(19) United States
(12) Patent Application Publication
(10) Pub. No.: US 2014/0259212 A1
(43) Pub. Date: Sep. 11, 2014

(54) Process for the Production of Fine Chemicals

(71) Applicants: Gunnar Plesch, Potsdam (DE); Astrid Blau, Stahnsdorf (DE); Michael Manfred Herold, Berlin (DE); Beate Kamlage, Berlin (DE); Birgit Wendel, Berlin (DE); Piotr Puzio, Mariakerke (Gent) (BE); Stefan Henkes, Potsdam (DE); Volker Haake, Berlin (DE); Wim Van Camp, Sint-Denijs-Westrem (BE); Holger Fahnenstich, Berlin (DE); Bryan McKersie, Raleigh, NC (US); Wesley Bruce, Raleigh, NC (US); Nicole Christiansen, Berlin (DE)

(72) Inventors: Gunnar Plesch, Potsdam (DE); Astrid Blau, Stahnsdorf (DE); Michael Manfred Herold, Berlin (DE); Beate Kamlage, Berlin (DE); Birgit Wendel, Berlin (DE); Piotr Puzio, Mariakerke (Gent) (BE); Stefan Henkes, Potsdam (DE); Volker Haake, Berlin (DE); Wim Van Camp, Sint-Denijs-Westrem (BE); Holger Fahnenstich, Berlin (DE); Bryan McKersie, Raleigh, NC (US); Wesley Bruce, Raleigh, NC (US); Nicole Christiansen, Berlin (DE)

(73) Assignee: BASF Plant Science Company GmbH, Ludwigshafen (DE)

(21) Appl. No.: 13/510,783

(22) PCT Filed: Nov. 18, 2010
(86) PCT No.: PCT/EP10/06988

§ 371 Date: May 18, 2012

(30) Foreign Application Priority Data
Nov. 18, 2009 (EP) 09014472.6
Nov. 18, 2009 (EP) 09176396.1
Dec. 22, 2009 (EP) 09181052.3
Oct. 8, 2010 (EP) 10186930.3
Oct. 26, 2010 (EP) 10188863.4
Oct. 28, 2010 (EP) 10189169.5
Oct. 29, 2010 (EP) 10189358.4
Nov. 4, 2010 (EP) 10189943.3
Nov. 5, 2010 (EP) 10190115.5
Nov. 8, 2010 (EP) 10190348.2
Nov. 9, 2010 (EP) 10190441.5
Nov. 10, 2010 (EP) 10190649.3
Nov. 11, 2010 (EP) 10190780.6
Nov. 11, 2010 (EP) 10190795.4
Nov. 12, 2010 (EP) 10190934.9
Nov. 12, 2010 (EP) 10190974.5
Nov. 12, 2010 (EP) 10191021.4
Nov. 15, 2010 (EP) 10191126.1
Nov. 15, 2010 (EP) 10191238.4
Nov. 16, 2010 (EP) 10191282.2

(51) Int. Cl. C12P 1/00; C12N 15/82

(52) U.S. Cl. CPC C12P 1/00; C12N 15/82
USPC 800/278; 435/41; 536/23.1; 435/320.1; 435/419; 435/243; 435/69.1; 530/300; 530/387.1; 800/298; 435/7.1; 435/6.1

(57) ABSTRACT

The present invention relates to a process for the production of a fine chemical in a non-human organism, like a microorganism, a plant cell, a plant, a plant tissue or in one or more parts thereof. The invention furthermore relates to nucleic acid molecules, polypeptides, nucleic acid constructs, expression cassettes, vectors, antibodies, host cells, plant tissue, propagation material, harvested material, plants, microorganisms as well as agricultural compositions and to their use.

[0001] The instant application is based on and claims the benefit of prior filed European Patent Application No. 09014472.6, filed 18 Nov. 2009, prior filed European Patent Application 09176396.1, filed 18 Nov. 2009, prior filed European Patent Application 09181052.3, filed 22 Dec. 2009, prior filed European Patent Application 10189169.5, filed 28 Oct .2010, prior filed European Patent Application 10189358.4, filed 29 Oct. 2010, prior filed European Patent Application 10189943.3, filed 4 Nov. 2010, prior filed European Patent Application 10186930.3, filed 8 Oct. 2010, prior filed European Patent Application 10190115.5, filed 5 Nov. 2010, prior filed European Patent Application 10190348.2, filed 8 Nov. 2010, prior filed European Patent Application 10190441.5, filed 9 Nov. 2010, prior filed European Patent Application 10190649.3, filed 10 Nov. 2010, prior filed European Patent Application 10191021.4, filed 12 Nov. 2010, prior filed European Patent Application 10191282.2, filed 16 Nov. 2010, prior filed European Patent Application 10188863.4, filed 26 Oct. 2010, prior filed European Patent Application 10191126.1, filed 15 Nov. 2010, prior filed European Patent Application 10191238.4, filed 15 Nov. 2010, prior filed European Patent Application 10190974.5 filed 12 Nov. 2010, prior filed European Patent Application 10190780.6, filed 11 Nov. 2010, prior filed European Patent Application 10190934.9, filed 12 Nov. 2010 and prior filed European Patent Application 10190795.4, filed 11 Nov. 2010. The entire content of the above-referenced patent applications are incorporated herein by this reference.

### INCORPORATION OF SEQUENCE LISTING

[0002] The contents of the following submission on DVDs are incorporated herein by reference in its entirety: two copies of the Sequence Listing (COPY 1 and COPY 2), all on DVDs, each containing: file name: PF62758.txt, date recorded: 17 Nov. 2010.

[0003] The present invention relates to a process for the production of fine chemical in a microorganism, a plant cell, a plant or a part thereof. The invention furthermore relates to nucleic acid molecules, polypeptides, nucleic acid constructs, vectors, antibodies, host cells, plant tissue, propagation material, harvested material, plants, microorganisms as well as agricultural compositions and to their use.

[0004] Amino acids are used in many branches of industry, including the food, animal feed, cosmetics, pharmaceutical and chemical industries. Amino acids such as D,L-methionine, L-lysine or L-threonine are used in the animal feed industry. The essential amino acids valine, leucine, isoleucine, lysine, threonine, methionine, tyrosine, phenylalanine and tryptophan are particularly important for the nutrition of humans and a number of livestock species. Glycine, L-methionine and tryptophan are all used in the pharmaceutical industry. Glutamine, valine, leucine, isoleucine, histidine, arginine, proline, serine and alanine are used in the pharmaceutical and cosmetics industries. Threonine, tryptophan and D,L-methionine are widely used feed additives (Leuchtenberger, W. Amino acids—technical production and use, pp. 466-502, in Rehm et al., (Ed.) Biotechnology Vol. 6, chapter 14a, VCH Weinheim, 1996). Moreover, amino acids are suitable for the chemical industry as precursors for the synthesis of synthetic amino acids and proteins, such as N-acetylcysteine, S-carboxymethyl-L-cysteine, (S)-5-hydroxytryptophan and other subtances, as for example described in Ullmann's Encyclopedia of Industrial Chemistry, Vol. A2, pp. 57-97, VCH Weinheim, 1985.

[0005] Over one million tonnes of amino acids are currently produced annually; their market value amounts to over 2.5 billion US dollars. They are currently produced by four competing processes: Extraction from protein hydrolysates, for example L-cystine, L-leucine or L-tyrosine, chemical synthesis, for example of D,L-methionine, conversion of chemical precursors in an enzyme or cell reactor, for example L-phenylalanine, and fermentative production by growing, on an industrial scale, bacteria which have been developed to produce and secrete large amounts of the desired molecule in question.

[0006] The biosynthesis of the natural amino acids in organisms capable of producing them, for example bacteria, has been characterized thoroughly; for a review of the bacterial amino acid biosynthesis and its regulation, see H. E. Umbarger,Ann. Rev. Biochem. 47, 533 (1978).

[0007] It is known that amino acids are produced by fermentation of strains of coryneform bacteria, in particular Corynebacterium glutamicum. Due to their great importance, the production processes are constantly being improved. Process improvements can relate to measures regarding technical aspects of the fermentation, such as, for example, stirring and oxygen supply, or the nutrient media composition, such as, for example, the sugar concentration during fermentation, or to the work-up to give the product, for example by ion exchange chromatography, or to the intrinsic performance properties of the microorganism itself. Bacteria from other genera such as Escherichia or Bacillus are also used for the production of amino acids. A number of mutant strains, which produce an assortment of desirable compounds from the group of the sulfur-containing fine chemicals, have been developed via strain selection. The performance properties of said microorganisms are improved with respect to the production of a particular molecule by applying methods of mutagenesis, selection and mutant selection. Methods for the production of methionine have also been developed. In this manner, strains are obtained which are, for example, resistant to antimetabolites, such as, for example, the methionine analogues α-methyL-methionine, ethionine, norleucine, N-acetylnorleucine, S-trifluoromethyl-homocysteine, 2-amino-5-heprenoitic acid, selenomethionine, methionine sulfoximine, methoxine, 1-aminocyclopentanecarboxylic acid or which are auxotrophic for metabolites with regulatory importance and which produce sulfur-containing fine chemicals such as, for example, L-methionine. However, such processes developed for the production of methionine have the disadvantage that their yields are too low for being economically exploitable and that they are therefore not yet competitive with regard to chemical synthesis.

[0008] Zeh (Plant Physiol. 127, 792 (2001)) describes increasing the methionine content in potato plants by inhibiting threonine synthase by what is known as antisense technology. This leads to a reduced threonine synthase activity without the threonine content in the plant being reduced. This technology is highly complex; the enzymatic activity must be inhibited in a very differentiated manner since otherwise auxotrophism for the amino acid occurs and the plant will no longer grow.

[0009] Methods of recombinant DNA technology have also been used for some years to improve Corynebacterium strains producing L-amino acids by amplifying individual amino acid biosynthesis genes and investigating the effect on amino acid production.

[0010] U.S. Pat. No. 5,589,616 teaches the production of higher amounts of amino acids in plants by overexpressing a monocot storage protein in dicots. WO 96/38574, WO 97/07665, WO 97/28247, U.S. Pat. No. 4,886,878, U.S. Pat. No. 5,082,993 and U.S. Pat. No. 5,670,635 are following this approach. That means in all the aforementioned intellectual property rights different proteins or polypeptides are expressed in plants. Said proteins or polypeptides should function as amino acid sinks. Other methods for increasing amino acids such as lysine are disclosed in WO 95/15392, WO 96/38574, WO 89/11789 or WO 93/19190. In these cases special enzymes in the amino acid biosynthetic pathway such as the diphydrodipicolinic acid synthase are deregulated. This leads to an increase in the production of lysine in the different plants. Another approach to increase the level of amino acids in plants is disclosed in EP-A-0 271 408. EP-A-0 271 408 teaches the mutagenesis of plant and selection afterwards with inhibitors of certain enzymes of amino acid biosynthetic pathway. WO 2006/069610, WO 2006/092449, WO 2007/087815 and US 2007/0118916 teach inter alia the production of higher amounts of amino acids, like methionine and threonine, in microorganism or plants by expression or overexpression of selected genes.

[0011] As described above, the essential amino acids are necessary for humans and many mammals, for example for livestock. L-methionine is important as methyl group donor for the biosynthesis of, for example, choline, creatine, adrenaline, bases—especially of those of RNA and DNA, histidine, and for the transmethylation following the formation of S-adenosyL-methionine or as a sulfhydryl group donor for the formation of cysteine. Moreover, L-methionine appears to have a positive effect as pharmaceutical agent against depression.

[0012] Improving the quality of foodstuffs and animal feeds is an important task of the food-and-feed industry. This is necessary since, for example, certain amino acids, which occur in plants are limited with regard to the supply of mammals. Especially advantageous for the quality of foodstuffs and animal feeds is an as balanced as possible amino acid profile since a great excess of an amino acid above a specific concentration in the food has no further positive effect on the utilization of the food since other amino acids suddenly become limiting. A further increase in quality is only possible via addition of further amino acids, which are limiting under these conditions. The targeted addition of the limiting amino acid in the form of synthetic products must be carried out with extreme caution in order to avoid amino acid imbalance. For example, the addition of an essential amino acid stimulates protein digestion, which may cause deficiency situations for the second or third limiting amino acid, in particular. In feeding experiments, for example casein feeding experiments, the additional provision of methionine, which is limiting in casein, has revealed the fatty degeneration of liver, which could only be alleviated after the additional provision of tryptophan.

[0013] To ensure a high quality of foods and animal feeds, it is therefore necessary to add a plurality of amino acids in a balanced manner to suit the respective organism. Accordingly, there is still a great demand for new and more suitable genes, which encode enzymes or regulators, which participate in the biosynthesis of amino acids and make it possible to produce certain amino acids specifically on an industrial scale without unwanted byproducts being formed. In the selection of genes for biosynthesis or regulation two characteristics above all are particularly important. On the one hand, there is as ever a need for improved processes for obtaining the highest possible contents of amino acids and on the other hand as less as possible byproducts should be produced in the production process.

[0014] The present invention relates in paragraphs [0012.1.1.1] to [0514.1.1.1] to a process for the production of the fine chemical methionine as defined below and corrresponding embodiments as described herein as follows.

[0015] It is an object of the present invention to develop an inexpensive process for the synthesis of methionine. L-Methionine is with lysin or threonine (depending on the organism) one of the amino acids, which are most frequently limiting.

[0016] It was now found that this object is achieved by providing the process according to the invention described herein and the embodiments characterized herein as well as in the claims.

[0017] Accordingly, in a first embodiment, the invention relates to a process for the production of methionine, or, in other words, of the “fine chemical” or “fine chemical of the invention”.

[0018] The terms “fine chemical of the invention”, “fine chemical” or “the fine chemical” are used herein equally and relate in context of the paragraphs or sections [0014.1.1.1] to [0514.1.1.1] essentially to the metabolite or the metabolites indicated in column 7, application no. 1 of Tables I, II and IV in the respective line.

[0019] Further, the term “in context of any of the paragraphs [0014.1.1.1] to [0514.1.1.1]” as used herein means that for any of said paragraphs [0014.1.1.1] to [0514.1.1.1] the term “the fine chemical” is understood to follow the definition of paragraphs or sections [0014.1.1.1] and [0015.1.1.1], independently whether it refers to any other paragraph or not and whether the reference recites the term “fine chemical” in an other context.

[0020] Thus, in cases where one or more paragraphs or sections are incorporated by reference into any of the present paragraphs [0014.1.1.1] to [0514.1.1.1], e.g. by usage of the term “see paragraph” or the term “for the disclosure of this paragraph see the disclosure of paragraph” or the term “incorporated by reference” or a corresponding term, the incorporated paragraph, section or term “the fine chemical” is also understood to have the meaning according to the definition of paragraph [0014.1.1.1] and [0015.1.1.1].

[0021] Accordingly, in one embodiment, the term “fine chemical of the invention”, “fine chemical” or “the fine chemical” as used herein (alone or in combination, like in FCRP) means “methionine in context of the nucleic acid or polypeptide sequences listed in the respective same line of any one of Tables I to IV of application no. 1 and indicating in column 7 the metabolite “methionine”. In one embodiment, the term methionine or the term “fine chemical” mean in context of the paragraphs or sections [0014.1.1.1] to [0514.1.1.1] at least one chemical compound with an activity of the above mentioned methionine, respectively.

[0022] Accordingly, in one embodiment, the terms “fine chemical of the invention”, “fine chemical” or “the fine chemical” mean in context of any of the paragraphs [0014.1.1.1] to [0514.1.1.1] methionine, preferably the L-enantiomer of methionine, its salts, ester or amides in free form or bound to proteins. In a preferred embodiment , the term “the fine chemical” means methionine or its salts, in free form or bound to proteins. In a preferred embodiment, the term “the fine chemical” means the L-enantiomer of methionine. On the other hand in case “methionine” is stated it means methionine itself, its salts, ester or amides in free form or bound to proteins, preferably the L-enantiomer of methionine, its salts, ester or amides in free form or bound to proteins. In a preferred embodiment “methionine” means the L-enantiomer of methionine in free form. In another preferred embodiment “methionine” means the L-enantiomer of methionine bound to proteins.

[0023] Further, the term “in context of any of the paragraphs [0014.1.1.1] to [0514.1.1.1]” as used herein means that for any of said paragraphs [0014.1.1.1] to [0514.1.1.1] the term “the fine chemical” is understood to follow the definition of section [0014.1.1.1] or section [0015.1.1.1], independently whether it refers to any other paragraph or not and whether the reference recites the term “fine chemical” in an other context.

[0024] Thus, in cases where one or more paragraphs or sections are incorporated by reference into any of the present paragraphs [0014.1.1.1] to [0514.1.1.1], e.g. by usage of the term “see paragraph” or the term “for the disclosure of this paragraph see the disclosure of paragraph” or the term “incorporated by reference” or a corresponding term, the incorporated paragraph, section or term “the fine chemical” is also understood to have the meaning according to this definition of this paragraph [0015.1.1.1].

[0025] Further, the term “fine chemicals” as used herein relates to compositions comprising said fine chemical(s), i.e. comprising methionine, respectively.

[0026] Accordingly, the present invention relates to a process for the production of methionine, which comprises
[0027] (a) increasing or generating one or more activities selected from the group consisting of 49747384_SOYBEAN-protein in a non-human organism or a part thereof, preferably a microorganism, a plant cell, a plant or a part thereof, as compared to a corresponding non-transformed wild type non-human organism or a part thereof; and
[0028] (b) growing the non-human organism or a part thereof under conditions which permit the production of methionine or a composition comprising methionine in said non-human organism or in the culture medium surrounding said non-human organism.

[0029] Accordingly, the present invention relates to a process for the production of methionine, which comprises
[0030] (a) increasing or generating one or more activities selected from the group consisting of At1 g09680-protein in a non-human organism or a part thereof, preferably a microorganism, a plant cell, a plant or a part thereof, as compared to a corresponding non-transformed wild type non-human organism or a part thereof; and
[0031] (b) growing the non-human organism or a part thereof under conditions which permit the production of methionine or a composition comprising methionine in said non-human organism or in the culture medium surrounding said non-human organism.

[0032] Accordingly, the present invention relates to a process for the production of methionine, which comprises
[0033] (a) increasing or generating one or more activities selected from the group consisting of DNA-binding protein in a non-human organism or a part thereof, preferably a microorganism, a plant cell, a plant or a part thereof, as compared to a corresponding non-transformed wild type non-human organism or a part thereof; and
[0034] (b) growing the non-human organism or a part thereof under conditions which permit the production of methionine or a composition comprising methionine in said non-human organism or in the culture medium surrounding said non-human organism.

[0035] Accordingly, the present invention relates to a process for the production of methionine, which comprises
[0036] (a) increasing or generating one or more activities selected from the group consisting of bi-functional aspartokinase/homoserine dehydrogenase in a non-human organism or a part thereof, preferably a microorganism, a plant cell, a plant or a part thereof, as compared to a corresponding non-transformed wild type non-human organism or a part thereof; and
[0037] (b) growing the non-human organism or a part thereof under conditions which permit the production of methionine or a composition comprising methionine in said non-human organism or in the culture medium surrounding said non-human organism.

[0038] Accordingly, the present invention relates to a process for the production of methionine, which comprises
[0039] (a) increasing or generating one or more activities selected from the group consisting of protein phosphatase in a non-human organism or a part thereof, preferably a microorganism, a plant cell, a plant or a part thereof, as compared to a corresponding non-transformed wild type non-human organism or a part thereof; and
[0040] (b) growing the non-human organism or a part thereof under conditions which permit the production of methionine or a composition comprising methionine in said non-human organism or in the culture medium surrounding said non-human organism.

[0041] Accordingly, the present invention relates to a process for the production of methionine, which comprises
[0042] (a) increasing or generating one or more activities selected from the group consisting of transcription factor in a non-human organism or a part thereof, preferably a microorganism, a plant cell, a plant or a part thereof, as compared to a corresponding non-transformed wild type non-human organism or a part thereof; and
[0043] (b) growing the non-human organism or a part thereof under conditions which permit the production of methionine or a composition comprising methionine in said non-human organism or in the culture medium surrounding said non-human organism.

[0044] Accordingly, the present invention relates to a process for the production of methionine, which comprises
[0045] (a) increasing or generating one or more activities selected from the group consisting of protein phosphatase in a non-human organism or a part thereof, preferably a microorganism, a plant cell, a plant or a part thereof, as compared to a corresponding non-transformed wild type non-human organism or a part thereof; and
[0046] (b) growing the non-human organism or a part thereof under conditions which permit the production of methionine or a composition comprising methionine in said non-human organism or in the culture medium surrounding said non-human organism.

[0047] Accordingly, the present invention relates to a process for the production of methionine, which comprises
[0048] (a) increasing or generating one or more activities selected from the group consisting of At2g45420-protein in a non-human organism or a part thereof, preferably a microorganism, a plant cell, a plant or a part thereof, as compared to a corresponding non-transformed wild type non-human organism or a part thereof; and
[0049] (b) growing the non-human organism or a part thereof under conditions which permit the production of methionine or a composition comprising methionine in said non-human organism or in the culture medium surrounding said non-human organism.

[0050] Accordingly, the present invention relates to a process for the production of methionine, which comprises
[0051] (a) increasing or generating one or more activities selected from the group consisting of adenosine kinase in a non-human organism or a part thereof, preferably a microorganism, a plant cell, a plant or a part thereof, as compared to a corresponding non-transformed wild type non-human organism or a part thereof; and
[0052] (b) growing the non-human organism or a part thereof under conditions which permit the production of methionine or a composition comprising methionine in said non-human organism or in the culture medium surrounding said non-human organism.

[0053] Accordingly, the present invention relates to a process for the production of methionine, which comprises
[0054] (a) increasing or generating one or more activities selected from the group consisting of protein kinase in a non-human organism or a part thereof, preferably a microorganism, a plant cell, a plant or a part thereof, as compared to a corresponding non-transformed wild type non-human organism or a part thereof; and
[0055] (b) growing the non-human organism or a part thereof under conditions which permit the production of methionine or a composition comprising methionine in said non-human organism or in the culture medium surrounding said non-human organism.

[0056] Accordingly, the present invention relates to a process for the production of methionine, which comprises
[0057] (a) increasing or generating one or more activities selected from the group consisting of auxin response factor in a non-human organism or a part thereof, preferably a microorganism, a plant cell, a plant or a part thereof, as compared to a corresponding non-transformed wild type non-human organism or a part thereof; and
[0058] (b) growing the non-human organism or a part thereof under conditions which permit the production of methionine or a composition comprising methionine in said non-human organism or in the culture medium surrounding said non-human organism.

[0059] Accordingly, the present invention relates to a process for the production of methionine, which comprises
[0060] (a) increasing or generating one or more activities selected from the group consisting of monthiol glutaredoxin in a non-human organism or a part thereof, preferably a microorganism, a plant cell, a plant or a part thereof, as compared to a corresponding non-transformed wild type non-human organism or a part thereof; and
[0061] (b) growing the non-human organism or a part thereof under conditions which permit the production of methionine or a composition comprising methionine in said non-human organism or in the culture medium surrounding said non-human organism.

[0062] Accordingly, the present invention relates to a process for the production of methionine, which comprises
[0063] (a) increasing or generating one or more activities selected from the group consisting of glutaredoxin in a non-human organism or a part thereof, preferably a microorganism, a plant cell, a plant or a part thereof, as compared to a corresponding non-transformed wild type non-human organism or a part thereof; and
[0064] (b) growing the non-human organism or a part thereof under conditions which permit the production of methionine or a composition comprising methionine in said non-human organism or in the culture medium surrounding said non-human organism.

[0065] Accordingly, the present invention relates to a process for the production of methionine, which comprises
[0066] (a) increasing or generating one or more activities selected from the group consisting of monothiol glutaredoxin in a non-human organism or a part thereof, preferably a microorganism, a plant cell, a plant or a part thereof, as compared to a corresponding non-transformed wild type non-human organism or a part thereof; and
[0067] (b) growing the non-human organism or a part thereof under conditions which permit the production of methionine or a composition comprising methionine in said non-human organism or in the culture medium surrounding said non-human organism.

[0068] Accordingly, the present invention relates to a process for the production of methionine, which comprises
[0069] (a) increasing or generating one or more activities selected from the group consisting of monothiol glutaredoxin in a non-human organism or a part thereof, preferably a microorganism, a plant cell, a plant or a part thereof, as compared to a corresponding non-transformed wild type non-human organism or a part thereof; and
[0070] (b) growing the non-human organism or a part thereof under conditions which permit the production of methionine or a composition comprising methionine in said non-human organism or in the culture medium surrounding said non-human organism.

[0071] Accordingly, the present invention relates to a process for the production of methionine, which comprises
[0072] (a) increasing or generating one or more activities selected from the group consisting of At4g32480-protein in a non-human organism or a part thereof, preferably a microorganism, a plant cell, a plant or a part thereof, as compared to a corresponding non-transformed wild type non-human organism or a part thereof; and
[0073] (b) growing the non-human organism or a part thereof under conditions which permit the production of methionine or a composition comprising methionine in said non-human organism or in the culture medium surrounding said non-human organism.

[0074] Accordingly, the present invention relates to a process for the production of methionine, which comprises
[0075] (a) increasing or generating one or more activities selected from the group consisting of glutaredoxin in a non-human organism or a part thereof, preferably a microorganism, a plant cell, a plant or a part thereof, as compared to a corresponding non-transformed wild type non-human organism or a part thereof; and
[0076] (b) growing the non-human organism or a part thereof under conditions which permit the production of methionine or a composition comprising methionine in said non-human organism or in the culture medium surrounding said non-human organism.

[0077] Accordingly, the present invention relates to a process for the production of methionine, which comprises
[0078] (a) increasing or generating one or more activities selected from the group consisting of calcium-dependent protein kinase in a non-human organism or a part thereof, preferably a microorganism, a plant cell, a plant or a part thereof, as compared to a corresponding non-transformed wild type non-human organism or a part thereof; and
[0079] (b) growing the non-human organism or a part thereof under conditions which permit the production of methionine or a composition comprising methionine in said non-human organism or in the culture medium surrounding said non-human organism.

[0080] Accordingly, the present invention relates to a process for the production of methionine, which comprises
[0081] (a) increasing or generating one or more activities selected from the group consisting of monothiol glutaredoxin in a non-human organism or a part thereof, preferably a microorganism, a plant cell, a plant or a part thereof, as compared to a corresponding non-transformed wild type non-human organism or a part thereof; and
[0082] (b) growing the non-human organism or a part thereof under conditions which permit the production of methionine or a composition comprising methionine in said non-human organism or in the culture medium surrounding said non-human organism.

[0083] Accordingly, the present invention relates to a process for the production of methionine, which comprises
[0084] (a) increasing or generating one or more activities selected from the group consisting of protein phosphatase in a non-human organism or a part thereof, preferably a microorganism, a plant cell, a plant or a part thereof, as compared to a corresponding non-transformed wild type non-human organism or a part thereof; and
[0085] (b) growing the non-human organism or a part thereof under conditions which permit the production of methionine or a composition comprising methionine in said non-human organism or in the culture medium surrounding said non-human organism.

[0086] Accordingly, the present invention relates to a process for the production of methionine, which comprises
[0087] (a) increasing or generating one or more activities selected from the group consisting of zinc finger protein in a non-human organism or a part thereof, preferably a microorganism, a plant cell, a plant or a part thereof, as compared to a corresponding non-transformed wild type non-human organism or a part thereof; and
[0088] (b) growing the non-human organism or a part thereof under conditions which permit the production of methionine or a composition comprising methionine in said non-human organism or in the culture medium surrounding said non-human organism.

[0089] Accordingly, the present invention relates to a process for the production of methionine, which comprises
[0090] (a) increasing or generating one or more activities selected from the group consisting of malic enzyme in a non-human organism or a part thereof, preferably a microorganism, a plant cell, a plant or a part thereof, as compared to a corresponding non-transformed wild type non-human organism or a part thereof; and
[0091] (b) growing the non-human organism or a part thereof under conditions which permit the production of methionine or a composition comprising methionine in said non-human organism or in the culture medium surrounding said non-human organism.

[0092] Accordingly, the present invention relates to a process for the production of methionine, which comprises
[0093] (a) increasing or generating one or more activities selected from the group consisting of beta-hydroxylase in a non-human organism or a part thereof, preferably a microorganism, a plant cell, a plant or a part thereof, as compared to a corresponding non-transformed wild type non-human organism or a part thereof; and
[0094] (b) growing the non-human organism or a part thereof under conditions which permit the production of methionine or a composition comprising methionine in said non-human organism or in the culture medium surrounding said non-human organism.

[0095] Accordingly, the present invention relates to a process for the production of methionine, which comprises
[0096] (a) increasing or generating one or more activities selected from the group consisting of 2-oxoglutarate dehydrogenase E1 subunit in a non-human organism or a part thereof, preferably a microorganism, a plant cell, a plant or a part thereof, as compared to a corresponding non-transformed wild type non-human organism or a part thereof; and
[0097] (b) growing the non-human organism or a part thereof under conditions which permit the production of methionine or a composition comprising methionine in said non-human organism or in the culture medium surrounding said non-human organism. Accordingly, the present invention relates to a process for the production of methionine, which comprises
[0098] (a) increasing or generating one or more activities selected from the group consisting of homoserine dehydrogenase in a non-human organism or a part thereof, preferably a microorganism, a plant cell, a plant or a part thereof, as compared to a corresponding non-transformed wild type non-human organism or a part thereof; and
[0099] (b) growing the non-human organism or a part thereof under conditions which permit the production of methionine or a composition comprising methionine in said non-human organism or in the culture medium surrounding said non-human organism.

[0100] Accordingly, the present invention relates to a process for the production of methionine, which comprises
[0101] (a) increasing or generating one or more activities selected from the group consisting of hydrolase in a non-human organism or a part thereof, preferably a microorganism, a plant cell, a plant or a part thereof, as compared to a corresponding non-transformed wild type non-human organism or a part thereof; and
[0102] (b) growing the non-human organism or a part thereof under conditions which permit the production of methionine or a composition comprising methionine in said non-human organism or in the culture medium surrounding said non-human organism.

[0103] Accordingly, the present invention relates to a process for the production of methionine, which comprises
[0104] (a) increasing or generating one or more activities selected from the group consisting of peptidyl-prolyl cis-trans isomerase in a non-human organism or a part thereof, preferably a microorganism, a plant cell, a plant or a part thereof, as compared to a corresponding non-transformed wild type non-human organism or a part thereof; and
[0105] (b) growing the non-human organism or a part thereof under conditions which permit the production of methionine or a composition comprising methionine in said non-human organism or in the culture medium surrounding said non-human organism.

[0106] Accordingly, the present invention relates to a process for the production of methionine, which comprises
[0107] (a) increasing or generating one or more activities selected from the group consisting of b0012-protein in a non-human organism or a part thereof, preferably a microorganism, a plant cell, a plant or a part thereof, as compared to a corresponding non-transformed wild type non-human organism or a part thereof; and
[0108] (b) growing the non-human organism or a part thereof under conditions which permit the production of methionine or a composition comprising methionine in said non-human organism or in the culture medium surrounding said non-human organism.

[0109] Accordingly, the present invention relates to a process for the production of methionine, which comprises
[0110] (a) increasing or generating one or more activities selected from the group consisting of acetolactate synthase small subunit in a non-human organism or a part thereof, preferably a microorganism, a plant cell, a plant or a part thereof, as compared to a corresponding non-transformed wild type non-human organism or a part thereof; and
[0111] (b) growing the non-human organism or a part thereof under conditions which permit the production of methionine or a composition comprising methionine in said non-human organism or in the culture medium surrounding said non-human organism.

[0112] Accordingly, the present invention relates to a process for the production of methionine, which comprises
[0113] (a) increasing or generating one or more activities selected from the group consisting of serine protease in a non-human organism or a part thereof, preferably a microorganism, a plant cell, a plant or a part thereof, as compared to a corresponding non-transformed wild type non-human organism or a part thereof; and
[0114] (b) growing the non-human organism or a part thereof under conditions which permit the production of methionine or a composition comprising methionine in said non-human organism or in the culture medium surrounding said non-human organism.

[0115] Accordingly, the present invention relates to a process for the production of methionine, which comprises
[0116] (a) increasing or generating one or more activities selected from the group consisting of 2,3-dihydroxyphenylpropionate 1,2-dioxygenase in a non-human organism or a part thereof, preferably a microorganism, a plant cell, a plant or a part thereof, as compared to a corresponding non-transformed wild type non-human organism or a part thereof; and
[0117] (b) growing the non-human organism or a part thereof under conditions which permit the production of methionine or a composition comprising methionine in said non-human organism or in the culture medium surrounding said non-human organism.

[0118] Accordingly, the present invention relates to a process for the production of methionine, which comprises
[0119] (a) increasing or generating one or more activities selected from the group consisting of ATP-binding component of a transport system in a non-human organism or a part thereof, preferably a microorganism, a plant cell, a plant or a part thereof, as compared to a corresponding non-transformed wild type non-human organism or a part thereof; and
[0120] (b) growing the non-human organism or a part thereof under conditions which permit the production of methionine or a composition comprising methionine in said non-human organism or in the culture medium surrounding said non-human organism.

[0121] Accordingly, the present invention relates to a process for the production of methionine, which comprises
[0122] (a) increasing or generating one or more activities selected from the group consisting of membrane transport protein in a non-human organism or a part thereof, preferably a microorganism, a plant cell, a plant or a part thereof, as compared to a corresponding non-transformed wild type non-human organism or a part thereof; and
[0123] (b) growing the non-human organism or a part thereof under conditions which permit the production of methionine or a composition comprising methionine in said non-human organism or in the culture medium surrounding said non-human organism.

[0124] Accordingly, the present invention relates to a process for the production of methionine, which comprises
[0125] (a) increasing or generating one or more activities selected from the group consisting of threonine aldolase in a non-human organism or a part thereof, preferably a microorganism, a plant cell, a plant or a part thereof, as compared to a corresponding non-transformed wild type non-human organism or a part thereof; and
[0126] (b) growing the non-human organism or a part thereof under conditions which permit the production of methionine or a composition comprising methionine in said non-human organism or in the culture medium surrounding said non-human organism.

[0127] Accordingly, the present invention relates to a process for the production of methionine, which comprises
[0128] (a) increasing or generating one or more activities selected from the group consisting of major facilitator superfamily transporter protein in a non-human organism or a part thereof, preferably a microorganism, a plant cell, a plant or a part thereof, as compared to a corresponding non-transformed wild type non-human organism or a part thereof; and
[0129] (b) growing the non-human organism or a part thereof under conditions which permit the production of methionine or a composition comprising methionine in said non-human organism or in the culture medium surrounding said non-human organism.

[0130] Accordingly, the present invention relates to a process for the production of methionine, which comprises
[0131] (a) increasing or generating one or more activities selected from the group consisting of b1003-protein in a non-human organism or a part thereof, preferably a microorganism, a plant cell, a plant or a part thereof, as compared to a corresponding non-transformed wild type non-human organism or a part thereof; and
[0132] (b) growing the non-human organism or a part thereof under conditions which permit the production of methionine or a composition comprising methionine in said non-human organism or in the culture medium surrounding said non-human organism.

[0133] Accordingly, the present invention relates to a process for the production of methionine, which comprises
[0134] (a) increasing or generating one or more activities selected from the group consisting of b1522-protein in a non-human organism or a part thereof, preferably a microorganism, a plant cell, a plant or a part thereof, as compared to a corresponding non-transformed wild type non-human organism or a part thereof; and
[0135] (b) growing the non-human organism or a part thereof under conditions which permit the production of methionine or a composition comprising methionine in said non-human organism or in the culture medium surrounding said non-human organism.

[0136] Accordingly, the present invention relates to a process for the production of methionine, which comprises
[0137] (a) increasing or generating one or more activities selected from the group consisting of transport protein in a non-human organism or a part thereof, preferably a microorganism, a plant cell, a plant or a part thereof, as compared to a corresponding non-transformed wild type non-human organism or a part thereof; and
[0138] (b) growing the non-human organism or a part thereof under conditions which permit the production of methionine or a composition comprising methionine in said non-human organism or in the culture medium surrounding said non-human organism.

[0139] Accordingly, the present invention relates to a process for the production of methionine, which comprises
[0140] (a) increasing or generating one or more activities selected from the group consisting of L-serine dehydratase in a non-human organism or a part thereof, preferably a microorganism, a plant cell, a plant or a part thereof, as compared to a corresponding non-transformed wild type non-human organism or a part thereof; and
[0141] (b) growing the non-human organism or a part thereof under conditions which permit the production of methionine or a composition comprising methionine in said non-human organism or in the culture medium surrounding said non-human organism.

[0142] Accordingly, the present invention relates to a process for the production of methionine, which comprises
[0143] (a) increasing or generating one or more activities selected from the group consisting of serine/threonine-protein phosphatase in a non-human organism or a part thereof, preferably a microorganism, a plant cell, a plant or a part thereof, as compared to a corresponding non-transformed wild type non-human organism or a part thereof; and
[0144] (b) growing the non-human organism or a part thereof under conditions which permit the production of methionine or a composition comprising methionine in said non-human organism or in the culture medium surrounding said non-human organism.

[0145] Accordingly, the present invention relates to a process for the production of methionine, which comprises
[0146] (a) increasing or generating one or more activities selected from the group consisting of pyruvate kinase in a non-human organism or a part thereof, preferably a microorganism, a plant cell, a plant or a part thereof, as compared to a corresponding non-transformed wild type non-human organism or a part thereof; and
[0147] (b) growing the non-human organism or a part thereof under conditions which permit the production of methionine or a composition comprising methionine in said non-human organism or in the culture medium surrounding said non-human organism.

[0148] Accordingly, the present invention relates to a process for the production of methionine, which comprises
[0149] (a) increasing or generating one or more activities selected from the group consisting of b2032-protein in a non-human organism or a part thereof, preferably a microorganism, a plant cell, a plant or a part thereof, as compared to a corresponding non-transformed wild type non-human organism or a part thereof; and
[0150] (b) growing the non-human organism or a part thereof under conditions which permit the production of methionine or a composition comprising methionine in said non-human organism or in the culture medium surrounding said non-human organism.

[0151] Accordingly, the present invention relates to a process for the production of methionine, which comprises
[0152] (a) increasing or generating one or more activities selected from the group consisting of uridine/cytidine kinase in a non-human organism or a part thereof, preferably a microorganism, a plant cell, a plant or a part thereof, as compared to a corresponding non-transformed wild type non-human organism or a part thereof; and
[0153] (b) growing the non-human organism or a part thereof under conditions which permit the production of methionine or a composition comprising methionine in said non-human organism or in the culture medium surrounding said non-human organism.

[0154] Accordingly, the present invention relates to a process for the production of methionine, which comprises
[0155] (a) increasing or generating one or more activities selected from the group consisting of b2345-protein in a non-human organism or a part thereof, preferably a microorganism, a plant cell, a plant or a part thereof, as compared to a corresponding non-transformed wild type non-human organism or a part thereof; and
[0156] (b) growing the non-human organism or a part thereof under conditions which permit the production of methionine or a composition comprising methionine in said non-human organism or in the culture medium surrounding said non-human organism.

[0157] Accordingly, the present invention relates to a process for the production of methionine, which comprises
[0158] (a) increasing or generating one or more activities selected from the group consisting of b2513-protein in a non-human organism or a part thereof, preferably a microorganism, a plant cell, a plant or a part thereof, as compared to a corresponding non-transformed wild type non-human organism or a part thereof; and
[0159] (b) growing the non-human organism or a part thereof under conditions which permit the production of methionine or a composition comprising methionine in said non-human organism or in the culture medium surrounding said non-human organism.

[0160] Accordingly, the present invention relates to a process for the production of methionine, which comprises
[0161] (a) increasing or generating one or more activities selected from the group consisting of b2673-protein in a non-human organism or a part thereof, preferably a microorganism, a plant cell, a plant or a part thereof, as compared to a corresponding non-transformed wild type non-human organism or a part thereof; and
[0162] (b) growing the non-human organism or a part thereof under conditions which permit the production of methionine or a composition comprising methionine in said non-human organism or in the culture medium surrounding said non-human organism.

[0163] Accordingly, the present invention relates to a process for the production of methionine, which comprises
[0164] (a) increasing or generating one or more activities selected from the group consisting of arginine exporter protein in a non-human organism or a part thereof, preferably a microorganism, a plant cell, a plant or a part thereof, as compared to a corresponding non-transformed wild type non-human organism or a part thereof; and
[0165] (b) growing the non-human organism or a part thereof under conditions which permit the production of methionine or a composition comprising methionine in said non-human organism or in the culture medium surrounding said non-human organism.

[0166] Accordingly, the present invention relates to a process for the production of methionine, which comprises
[0167] (a) increasing or generating one or more activities selected from the group consisting of b3246-protein in a non-human organism or a part thereof, preferably a microorganism, a plant cell, a plant or a part thereof, as compared to a corresponding non-transformed wild type non-human organism or a part thereof; and
[0168] (b) growing the non-human organism or a part thereof under conditions which permit the production of methionine or a composition comprising methionine in said non-human organism or in the culture medium surrounding said non-human organism.

[0169] Accordingly, the present invention relates to a process for the production of methionine, which comprises
[0170] (a) increasing or generating one or more activities selected from the group consisting of acetyl CoA carboxylase in a non-human organism or a part thereof, preferably a microorganism, a plant cell, a plant or a part thereof, as compared to a corresponding non-transformed wild type non-human organism or a part thereof; and
[0171] (b) growing the non-human organism or a part thereof under conditions which permit the production of methionine or a composition comprising methionine in said non-human organism or in the culture medium surrounding said non-human organism.

[0172] Accordingly, the present invention relates to a process for the production of methionine, which comprises
[0173] (a) increasing or generating one or more activities selected from the group consisting of b3346-protein in a non-human organism or a part thereof, preferably a microorganism, a plant cell, a plant or a part thereof, as compared to a corresponding non-transformed wild type non-human organism or a part thereof; and
[0174] (b) growing the non-human organism or a part thereof under conditions which permit the production of methionine or a composition comprising methionine in said non-human organism or in the culture medium surrounding said non-human organism.

[0175] Accordingly, the present invention relates to a process for the production of methionine, which comprises
[0176] (a) increasing or generating one or more activities selected from the group consisting of valine-pyruvate transaminase in a non-human organism or a part thereof, preferably a microorganism, a plant cell, a plant or a part thereof, as compared to a corresponding non-transformed wild type non-human organism or a part thereof; and
[0177] (b) growing the non-human organism or a part thereof under conditions which permit the production of methionine or a composition comprising methionine in said non-human organism or in the culture medium surrounding said non-human organism.

[0178] Accordingly, the present invention relates to a process for the production of methionine, which comprises
[0179] (a) increasing or generating one or more activities selected from the group consisting of dihydroxyacid dehydratase in a non-human organism or a part thereof, preferably a microorganism, a plant cell, a plant or a part thereof, as compared to a corresponding non-transformed wild type non-human organism or a part thereof; and
[0180] (b) growing the non-human organism or a part thereof under conditions which permit the production of methionine or a composition comprising methionine in said non-human organism or in the culture medium surrounding said non-human organism.

[0181] Accordingly, the present invention relates to a process for the production of methionine, which comprises
[0182] (a) increasing or generating one or more activities selected from the group consisting of b3817-protein in a non-human organism or a part thereof, preferably a microorganism, a plant cell, a plant or a part thereof, as compared to a corresponding non-transformed wild type non-human organism or a part thereof; and
[0183] (b) growing the non-human organism or a part thereof under conditions which permit the production of methionine or a composition comprising methionine in said non-human organism or in the culture medium surrounding said non-human organism.

[0184] Accordingly, the present invention relates to a process for the production of methionine, which comprises
[0185] (a) increasing or generating one or more activities selected from the group consisting of threonine efflux protein in a non-human organism or a part thereof, preferably a microorganism, a plant cell, a plant or a part thereof, as compared to a corresponding non-transformed wild type non-human organism or a part thereof; and
[0186] (b) growing the non-human organism or a part thereof under conditions which permit the production of methionine or a composition comprising methionine in said non-human organism or in the culture medium surrounding said non-human organism.

[0187] Accordingly, the present invention relates to a process for the production of methionine, which comprises
[0188] (a) increasing or generating one or more activities selected from the group consisting of b4029-protein in a non-human organism or a part thereof, preferably a microorganism, a plant cell, a plant or a part thereof, as compared to a corresponding non-transformed wild type non-human organism or a part thereof; and
[0189] (b) growing the non-human organism or a part thereof under conditions which permit the production of methionine or a composition comprising methionine in said non-human organism or in the culture medium surrounding said non-human organism.

[0190] Accordingly, the present invention relates to a process for the production of methionine, which comprises
[0191] (a) increasing or generating one or more activities selected from the group consisting of glutaredoxin in a non-human organism or a part thereof, preferably a microorganism, a plant cell, a plant or a part thereof, as compared to a corresponding non-transformed wild type non-human organism or a part thereof; and
[0192] (b) growing the non-human organism or a part thereof under conditions which permit the production of methionine or a composition comprising methionine in said non-human organism or in the culture medium surrounding said non-human organism.

[0193] Accordingly, the present invention relates to a process for the production of methionine, which comprises
[0194] (a) increasing or generating one or more activities selected from the group consisting of 5′-nucleotidase in a non-human organism or a part thereof, preferably a microorganism, a plant cell, a plant or a part thereof, as compared to a corresponding non-transformed wild type non-human organism or a part thereof; and
[0195] (b) growing the non-human organism or a part thereof under conditions which permit the production of methionine or a composition comprising methionine in said non-human organism or in the culture medium surrounding said non-human organism.

[0196] Accordingly, the present invention relates to a process for the production of methionine, which comprises
[0197] (a) increasing or generating one or more activities selected from the group consisting of glutathione S-transferase in a non-human organism or a part thereof, preferably a microorganism, a plant cell, a plant or a part thereof, as compared to a corresponding non-transformed wild type non-human organism or a part thereof; and
[0198] (b) growing the non-human organism or a part thereof under conditions which permit the production of methionine or a composition comprising methionine in said non-human organism or in the culture medium surrounding said non-human organism.

[0199] Accordingly, the present invention relates to a process for the production of methionine, which comprises
[0200] (a) increasing or generating one or more activities selected from the group consisting of coproporphyrinogen Ill oxidase in a non-human organism or a part thereof, preferably a microorganism, a plant cell, a plant or a part thereof, as compared to a corresponding non-transformed wild type non-human organism or a part thereof; and
[0201] (b) growing the non-human organism or a part thereof under conditions which permit the production of methionine or a composition comprising methionine in said non-human organism or in the culture medium surrounding said non-human organism.

[0202] Accordingly, the present invention relates to a process for the production of methionine, which comprises
[0203] (a) increasing or generating one or more activities selected from the group consisting of oxidoreductase in a non-human organism or a part thereof, preferably a microorganism, a plant cell, a plant or a part thereof, as compared to a corresponding non-transformed wild type non-human organism or a part thereof; and
[0204] (b) growing the non-human organism or a part thereof under conditions which permit the production of methionine or a composition comprising methionine in said non-human organism or in the culture medium surrounding said non-human organism.

[0205] Accordingly, the present invention relates to a process for the production of methionine, which comprises
[0206] (a) increasing or generating one or more activities selected from the group consisting of oxidoreductase in a non-human organism or a part thereof, preferably a microorganism, a plant cell, a plant or a part thereof, as compared to a corresponding non-transformed wild type non-human organism or a part thereof; and
[0207] (b) growing the non-human organism or a part thereof under conditions which permit the production of methionine or a composition comprising methionine in said non-human organism or in the culture medium surrounding said non-human organism.

[0208] Accordingly, the present invention relates to a process for the production of methionine, which comprises
[0209] (a) increasing or generating one or more activities selected from the group consisting of Photosystem I reaction center subunit XI in a non-human organism or a part thereof, preferably a microorganism, a plant cell, a plant or a part thereof, as compared to a corresponding non-transformed wild type non-human organism or a part thereof; and
[0210] (b) growing the non-human organism or a part thereof under conditions which permit the production of methionine or a composition comprising methionine in said non-human organism or in the culture medium surrounding said non-human organism.

[0211] Accordingly, the present invention relates to a process for the production of methionine, which comprises
[0212] (a) increasing or generating one or more activities selected from the group consisting of phosphoadenosine phosphosulfate reductase in a non-human organism or a part thereof, preferably a microorganism, a plant cell, a plant or a part thereof, as compared to a corresponding non-transformed wild type non-human organism or a part thereof; and
[0213] (b) growing the non-human organism or a part thereof under conditions which permit the production of methionine or a composition comprising methionine in said non-human organism or in the culture medium surrounding said non-human organism.

[0214] Accordingly, the present invention relates to a process for the production of methionine, which comprises
[0215] (a) increasing or generating one or more activities selected from the group consisting of threonine dehydratase in a non-human organism or a part thereof, preferably a microorganism, a plant cell, a plant or a part thereof, as compared to a corresponding non-transformed wild type non-human organism or a part thereof; and
[0216] (b) growing the non-human organism or a part thereof under conditions which permit the production of methionine or a composition comprising methionine in said non-human organism or in the culture medium surrounding said non-human organism.

[0217] Accordingly, the present invention relates to a process for the production of methionine, which comprises
[0218] (a) increasing or generating one or more activities selected from the group consisting of Sec-independent protein translocase subunit in a non-human organism or a part thereof, preferably a microorganism, a plant cell, a plant or a part thereof, as compared to a corresponding non-transformed wild type non-human organism or a part thereof; and
[0219] (b) growing the non-human organism or a part thereof under conditions which permit the production of methionine or a composition comprising methionine in said non-human organism or in the culture medium surrounding said non-human organism.

[0220] Accordingly, the present invention relates to a process for the production of methionine, which comprises
[0221] (a) increasing or generating one or more activities selected from the group consisting of homocitrate synthase in a non-human organism or a part thereof, preferably a microorganism, a plant cell, a plant or a part thereof, as compared to a corresponding non-transformed wild type non-human organism or a part thereof; and
[0222] (b) growing the non-human organism or a part thereof under conditions which permit the production of methionine or a composition comprising methionine in said non-human organism or in the culture medium surrounding said non-human organism.

[0223] Accordingly, the present invention relates to a process for the production of methionine, which comprises
[0224] (a) increasing or generating one or more activities selected from the group consisting of cystathionine -lyase in a non-human organism or a part thereof, preferably a microorganism, a plant cell, a plant or a part thereof, as compared to a corresponding non-transformed wild type non-human organism or a part thereof; and
[0225] (b) growing the non-human organism or a part thereof under conditions which permit the production of methionine or a composition comprising methionine in said non-human organism or in the culture medium surrounding said non-human organism.

[0226] Accordingly, the present invention relates to a process for the production of methionine, which comprises
[0227] (a) increasing or generating one or more activities selected from the group consisting of cyclin in a non-human organism or a part thereof, preferably a microorganism, a plant cell, a plant or a part thereof, as compared to a corresponding non-transformed wild type non-human organism or a part thereof; and
[0228] (b) growing the non-human organism or a part thereof under conditions which permit the production of methionine or a composition comprising methionine in said non-human organism or in the culture medium surrounding said non-human organism.

[0229] Accordingly, the present invention relates to a process for the production of methionine, which comprises
[0230] (a) increasing or generating one or more activities selected from the group consisting of protein kinase in a non-human organism or a part thereof, preferably a microorganism, a plant cell, a plant or a part thereof, as compared to a corresponding non-transformed wild type non-human organism or a part thereof; and
[0231] (b) growing the non-human organism or a part thereof under conditions which permit the production of methionine or a composition comprising methionine in said non-human organism or in the culture medium surrounding said non-human organism.

[0232] Accordingly, the present invention relates to a process for the production of methionine, which comprises
[0233] (a) increasing or generating one or more activities selected from the group consisting of protein kinase in a non-human organism or a part thereof, preferably a microorganism, a plant cell, a plant or a part thereof, as compared to a corresponding non-transformed wild type non-human organism or a part thereof; and
[0234] (b) growing the non-human organism or a part thereof under conditions which permit the production of methionine or a composition comprising methionine in said non-human organism or in the culture medium surrounding said non-human organism.

[0235] Accordingly, the present invention relates to a process for the production of methionine, which comprises
[0236] (a) increasing or generating one or more activities selected from the group consisting of F-box protein in a non-human organism or a part thereof, preferably a microorganism, a plant cell, a plant or a part thereof, as compared to a corresponding non-transformed wild type non-human organism or a part thereof; and
[0237] (b) growing the non-human organism or a part thereof under conditions which permit the production of methionine or a composition comprising methionine in said non-human organism or in the culture medium surrounding said non-human organism.

[0238] Accordingly, the present invention relates to a process for the production of methionine, which comprises
[0239] (a) increasing or generating one or more activities selected from the group consisting of yh1013c-protein in a non-human organism or a part thereof, preferably a microorganism, a plant cell, a plant or a part thereof, as compared to a corresponding non-transformed wild type non-human organism or a part thereof; and
[0240] (b) growing the non-human organism or a part thereof under conditions which permit the production of methionine or a composition comprising methionine in said non-human organism or in the culture medium surrounding said non-human organism.

[0241] Accordingly, the present invention relates to a process for the production of methionine, which comprises
[0242] (a) increasing or generating one or more activities selected from the group consisting of (DL)-glycerol-3-phosphatase in a non-human organism or a part thereof, preferably a microorganism, a plant cell, a plant or a part thereof, as compared to a corresponding non-transformed wild type non-human organism or a part thereof; and
[0243] (b) growing the non-human organism or a part thereof under conditions which permit the production of methionine or a composition comprising methionine in said non-human organism or in the culture medium surrounding said non-human organism.

[0244] Accordingly, the present invention relates to a process for the production of methionine, which comprises
[0245] (a) increasing or generating one or more activities selected from the group consisting of glycogenin in a non-human organism or a part thereof, preferably a microorganism, a plant cell, a plant or a part thereof, as compared to a corresponding non-transformed wild type non-human organism or a part thereof; and
[0246] (b) growing the non-human organism or a part thereof under conditions which permit the production of methionine or a composition comprising methionine in said non-human organism or in the culture medium surrounding said non-human organism.

[0247] Accordingly, the present invention relates to a process for the production of methionine, which comprises
[0248] (a) increasing or generating one or more activities selected from the group consisting of cystathionine gamma-synthase in a non-human organism or a part thereof, preferably a microorganism, a plant cell, a plant or a part thereof, as compared to a corresponding non-transformed wild type non-human organism or a part thereof; and
[0249] (b) growing the non-human organism or a part thereof under conditions which permit the production of methionine or a composition comprising methionine in said non-human organism or in the culture medium surrounding said non-human organism.

[0250] Accordingly, the present invention relates to a process for the production of methionine, which comprises
[0251] (a) increasing or generating one or more activities selected from the group consisting of homoserine dehydrogenase in a non-human organism or a part thereof, preferably a microorganism, a plant cell, a plant or a part thereof, as compared to a corresponding non-transformed wild type non-human organism or a part thereof; and
[0252] (b) growing the non-human organism or a part thereof under conditions which permit the production of methionine or a composition comprising methionine in said non-human organism or in the culture medium surrounding said non-human organism.

[0253] Accordingly, the present invention relates to a process for the production of methionine, which comprises
[0254] (a) increasing or generating one or more activities selected from the group consisting of yml084w-protein in a non-human organism or a part thereof, preferably a microorganism, a plant cell, a plant or a part thereof, as compared to a corresponding non-transformed wild type non-human organism or a part thereof; and
[0255] (b) growing the non-human organism or a part thereof under conditions which permit the production of methionine or a composition comprising methionine in said non-human organism or in the culture medium surrounding said non-human organism.

[0256] Accordingly, the present invention relates to a process for the production of methionine, which comprises
[0257] (a) increasing or generating one or more activities selected from the group consisting of yol160w-protein in a non-human organism or a part thereof, preferably a microorganism, a plant cell, a plant or a part thereof, as compared to a corresponding non-transformed wild type non-human organism or a part thereof; and
[0258] (b) growing the non-human organism or a part thereof under conditions which permit the production of methionine or a composition comprising methionine in said non-human organism or in the culture medium surrounding said non-human organism.

[0259] Accordingly, the present invention relates to a process for the production of methionine, which comprises
[0260] (a) increasing or generating one or more activities selected from the group consisting of yor392w-protein in a non-human organism or a part thereof, preferably a microorganism, a plant cell, a plant or a part thereof, as compared to a corresponding non-transformed wild type non-human organism or a part thereof; and
[0261] (b) growing the non-human organism or a part thereof under conditions which permit the production of methionine or a composition comprising methionine in said non-human organism or in the culture medium surrounding said non-human organism.

[0262] An embodiment of the present invention relates to a process for the production of methionine, which comprises
[0263] (a1) increasing or generating the activity of a polypeptide comprising a polypeptide as depicted in a respective line in column 5 or 8 of Table II, application no. 1, or a homolog or a fragment thereof, a consensus sequence or at least one polypeptide motif as depicted in the respective line in column 8 of Table IV, application no. 1; or
[0264] (a2) increasing or generating the activity of an expression product of one or more nucleic acid molecule(s) comprising a polynucleotide as depicted in the respective line in column 5 or 8 of Table I, application no. 1, preferably the coding region thereof, or a homolog or a fragment thereof; or
[0265] (a3) increasing or generating the activity of a functional equivalent of (a1) or (a2); in a non-human organism or a part thereof; preferably a microorganism, a plant cell, a plant or a part thereof, as compared to a corresponding non-transformed wild type non-human organism or a part thereof; and
[0266] (b) growing the non-human organism under conditions which permit the production of methionine or a composition comprising methionine in said non-human organism or in the culture medium surrounding said non-human organism.

[0267] Accordingly, the increase or generation of one or more said activities is for example conferred by one or more expression products of said nucleic acid molecule, e.g. proteins. Accordingly, in the present invention described above, the increase or generation of one or more said activities is for example conferred by one or more protein(s) each comprising a polypeptide selected from the group as depicted in Table II, application no. 1, column 5 and 8, or a homolog or a fragment thereof.

[0268] The process of the invention comprises in one embodiment the following steps:
[0269] (i) increasing or generating of the expression of; and/or
[0270] (ii) increasing or generating the expression of an expression product of; and/or
[0271] (iii) increasing or generating one or more activities of an expression product encoded by;

[0272] at least one nucleic acid molecule (in the following “Fine Chemical Related Protein (FCRP)”encoding gene or “FCRP”-gene) comprising a nucleic acid molecule selected from the group consisting of:
[0273] (a) a nucleic acid molecule encoding the polypeptide shown in column 5 or 8 of Table II, preferably Table II B, application no. 1, or a homolog or a fragment thereof;
[0274] (b) a nucleic acid molecule shown in column 5 or 8 of Table I, preferably Table I B, application no. 1, or a homolog or a fragment thereof (preferably the coding region thereof);
[0275] (c) a nucleic acid molecule, which, as a result of the degeneracy of the genetic code, can be derived from a polypeptide sequence depicted in column 5 or 8 of Table II, preferably Table II B, application no. 1;
[0276] (d) a nucleic acid molecule having at least 30%, in particular at least 50%, 60%, 70%, 80%, 85%, 90%, 95%, 97%, 98%, 99% or 99.5% identity with the nucleic acid molecule sequence of a polynucleotide comprising the nucleic acid molecule shown in column 5 or 8 of Table I, preferably Table I B, application no. 1, or the coding region thereof;
[0277] (e) a nucleic acid molecule encoding a polypeptide having at least 30%, in particular 50%, 60%, 70%, 80%, 85%, 90%, 95%, 97%, 98%, 99% or 99.5% identity with the amino acid sequence of the polypeptide encoded by the nucleic acid molecule of (a), (b), (c) or (d),
[0278] (f) a nucleic acid molecule which hybridizes with a nucleic acid molecule of (a), (b), (c), (d) or (e) under stringent hybridization conditions;
[0279] (g) a nucleic acid molecule encoding a polypeptide which can be isolated with the aid of monoclonal or polyclonal antibodies made against a polypeptide encoded by one of the nucleic acid molecules of (a), (b), (c), (d), (e) or (f);
[0280] (h) a nucleic acid molecule encoding a polypeptide comprising the consensus sequence or one or more polypeptide motifs as shown in column 8 of Table IV, application no. 1;
[0281] (i) a nucleic acid molecule encoding a polypeptide having the activity represented by a respective protein as depicted in column 5 of Table II, application no. 1;
[0282] (j) a nucleic acid molecule which comprises a polynucleotide, which is obtained by amplifying a cDNA library or a genomic library using the primers as depicted in column 8 of Table III, application no. 1; and
[0283] (k) a nucleic acid molecule which is obtainable by screening a suitable nucleic acid library, especially a cDNA library and/or a genomic library, under stringent hybridization conditions with a probe comprising a complementary sequence of a nucleic acid molecule of (a), (b), (c), (d), (e), (f), (g), (h), (i) or (j) or with a fragment thereof, having at least 15 nt, preferably 20 nt, 30 nt, 50 nt, 100 nt, 200 nt, 500 nt, 1000 nt, 1500 nt, 2000 nt or 3000 nt of a nucleic acid molecule complementary to a nucleic acid molecule sequence characterized in (a), (b), (c), (d), (e), (f), (g), (h), (i) or (j); or a nucleic acid molecule comprising a sequence which is complementary thereto.

[0284] (All the references to Tables I to IV are references to the corresponding lines of Tables I to IV.)

[0285] The term “increasing or generating of the expression of” may also be interchanged by the term “overexpressing”.

[0286] In a preferred embodiment thereof said nucleic acid molecule encodes a polypeptide which has the activity of the polypeptide represented by a protein comprising a polypeptide as depicted in the corresponding hit in column 5 of Table II, application no. 1.

[0287] In another preferred embodiment thereof said nucleic acid molecule confers a generation or an increase of the respective fine chemical in a non-human organism or a part thereof as compared to a corresponding wild-type non-human organism or part thereof.

[0288] In another preferred embodiment thereof said nucleic acid molecule encodes a polypeptide which has the activity of the polypeptide represented by a protein as depicted in the corresponding hit in column 5 of Table II, application no. 1, and confers a generation or an increase of the respective fine chemical in a non-human organism or a part thereof as compared to a corresponding wild-type non-human organism or part thereof.

[0289] Accordingly, the genes of the present invention or used in accordance with the present invention, which respectively encode a protein having an activity of (DL)-glycerol-3-phosphatase, 2,3-dihydroxyphenylpropionate 1,2-dioxygenase, 2-oxoglutarate dehydrogenase E1 subunit, 49747384_SOYBEAN-protein, 5′-nucleotidase, acetolactate synthase small subunit, acetyl CoA carboxylase, adenosine kinase, arginine exporter protein, At1g09680-protein, At2g45420-protein, At4g32480-protein, ATP-binding component of a transport system, auxin response factor, b0012-protein, b1003-protein, b1522-protein, b2032-protein, b2345-protein, b2513-protein, b2673-protein, b3246-protein, b3346-protein, b3817-protein, b4029-protein, beta-hydroxylase, bifunctional aspartokinase/homoserine dehydrogenase, calcium-dependent protein kinase, coproporphyrinogen III oxidase, cyclin, cystathionine gamma-synthase, cystathionine-lyase, dihydroxyacid dehydratase, DNA-binding protein, F-box protein, glutaredoxin, glutathione S-transferase, glycogenin, homocitrate synthase, homoserine dehydrogenase, hydrolase, L-serine dehydratase, major facilitator superfamily transporter protein, malic enzyme, membrane transport protein, monothiol glutaredoxin, monthiol glutaredoxin, oxidoreductase, peptidyl-prolyl cis-trans isomerase, phosphoadenosine phosphosulfate reductase , Photosystem I reaction center subunit XI, protein kinase, protein phosphatase, pyruvate kinase, Sec-independent protein translocase subunit, serine protease, serine/threonine-protein phosphatase, threonine aldolase, threonine dehydratase, threonine efflux protein, transcription factor, transport protein, uridine/cytidine kinase, valine-pyruvate transaminase, yhl013c-protein, yml084w-protein, yol160w-protein, yor392w-protein, or zinc finger protein, which respectively encode a protein comprising a polypeptide encoded by a nucleic acid sequence as shown in Table I, application no. 1, column 5 or 8, (preferably the coding region thereof), or a homolog or a fragment thereof, which respectively encode a protein comprising a polypeptide as depicted in Table II, application no. 1, column 5 or 8, or a homolg or a fragment thereof, and/or which respectively can be amplified with the primer set shown in Table III, application no. 1, column 8, are also referred to as “FCRP genes”.

[0290] Proteins or polypeptides encoded by “FCRP-genes” are referred to as “Fine Chemical Related Proteins” or “FCRP”. For the purposes of the description of the present invention, the respective protein having an activity of (DL)-glycerol-3-phosphatase, 2,3-dihydroxyphenylpropionate 1,2-dioxygenase, 2-oxoglutarate dehydrogenase E1subunit, 49747384_SOYBEAN-protein, 5′-nucleotidase, acetolactate synthase small subunit, acetyl CoA carboxylase, adenosine kinase, arginine exporter protein, At1g09680-protein, At2g45420-protein, At4g32480-protein, ATP-binding component of a transport system, auxin response factor, b0012-protein, b1003-protein, b1522-protein, b2032-protein, b2345-protein, b2513-protein, b2673-protein, b3246-protein, b3346-protein, b3817-protein, b4029-protein, beta-hydroxylase, bifunctional aspartokinase/homoserine dehydrogenase, calcium-dependent protein kinase, coproporphyrinogen III oxidase, cyclin, cystathionine gamma-synthase, cystathionine-lyase, dihydroxyacid dehydratase, DNA-binding protein, F-box protein, glutaredoxin, glutathione S-transferase, glycogenin, homocitrate synthase, homoserine dehydrogenase, hydrolase, L-serine dehydratase, major facilitator superfamily transporter protein, malic enzyme, membrane transport protein, monothiol glutaredoxin, monthiol glutaredoxin, oxidoreductase, peptidyl-prolyl cistrans isomerase, phosphoadenosine phosphosulfate reductase , Photosystem I reaction center subunit XI, protein kinase, protein phosphatase, pyruvate kinase, Sec-independent protein translocase subunit, serine protease, serine/threonine-protein phosphatase, threonine aldolase, threonine dehydratase, threonine efflux protein, transcription factor, transport protein, uridine/cytidine kinase, valine-pyruvate transaminase, yh1013c-protein, yml084w-protein, yol160w-protein, yor392w-protein, or zinc finger protein, the respective protein comprising a polypeptide encoded by one or more respective nucleic acid sequences as shown in Table I, application no. 1, column 5 or 8, (preferably the coding region thereof), or a homolog or fragment thereof, the respective protein comprising a respective polypeptide as depicted in Table II, application no. 1, column 5 or 8, or a homolog or fragment thereof, the respective protein comprising a sequence corresponding to the consensus sequence as shown in Table IV, application no. 1, column 8, and/or the respective protein comprising at least one polypeptide motif as shown in Table IV, application no. 1, column 8 is also referred to as Fine Chemical Related Protein” or “FCRP”.

[0291] Thus, in one embodiment, the present invention provides a process of the production of methionine, by increasing or generating one or more activities, especially selected from the group consisting of (DL)-glycerol-3-phosphatase, 2,3-dihydroxyphenylpropionate 1,2-dioxygenase, 2-oxoglutarate dehydrogenase E1 subunit, 49747384_SOYBEAN-protein, 5′-nucleotidase, acetolactate synthase small subunit, acetyl CoA carboxylase, adenosine kinase, arginine exporter protein, At1g09680-protein, At2g45420-protein, At4g32480-protein, ATP-binding component of a transport system, auxin response factor, b0012-protein, b1003-protein, b1522-protein, b2032-protein, b2345-protein, b2513-protein, b2673-protein, b3246-protein, b3346-protein, b3817-protein, b4029-protein, beta-hydroxylase, bifunctional aspartokinase homoserine dehydrogenase, calcium-dependent protein kinase, coproporphyrinogen III oxidase, cyclin, cystathionine gamma-synthase, cystathionine-lyase, dihydroxyacid dehydratase, DNA-binding protein, F-box protein, glutaredoxin, glutathione S-transferase, glycogenin, homocitrate synthase, homoserine dehydrogenase, hydrolase, L-serine dehydratase, major facilitator superfamily transporter protein, malic enzyme, membrane transport protein, monothiol glutaredoxin, monthiol glutaredoxin, oxidoreductase, peptidyl-prolyl cis-trans isomerase, phosphoadenosine phosphosulfate reductase , Photosystem I reaction center subunit XI, protein kinase, protein phosphatase, pyruvate kinase, Sec-independent protein translocase subunit, serine protease, serine/threonine-protein phosphatase, threonine aldolase, threonine dehydratase, threonine efflux protein, transcription factor, transport protein, uridine/cytidine kinase, valine-pyruvate transaminase, yhl013c-protein, yml084w-protein, yol160w-protein, yor392w-protein, and zinc finger protein, which is conferred by one or more FCRPs or the gene product of one or more FCRP-genes, for example by the gene product of a nucleic acid sequences comprising a polynucleotide selected from the group as shown in Table I, application no. 1, column 5 or 8, (preferably by the coding region thereof), or a homolog or a fragment thereof, e.g. or by one or more proteins each comprising a polypeptide encoded by one or more nucleic acid sequences selected from the group as shown in Table I, application no. 1, column 5 or 8, (preferably by the coding region thereof), or a homolog or a fragment thereof, or by one or more protein(s) each comprising a polypeptide selected from the group as depicted in Table II, application no. 1, column 5 and 8, or a homolog thereof, or a protein comprising a sequence corresponding to the consensus sequence or comprising at least one polypeptide motif as shown in Table IV, application no. 1, column 8.

[0292] As mentioned, the process for the production of the fine chemical according to the present invention, in particular showing a generation or an increase of the respective fine chemical in a non-human organism or a part thereof as compared to a corresponding wild-type non-human organism or part thereof, can be mediated by one or more FCRP-genes or FCPRs.

[0293] In an embodiment, the process comprises increasing or generating the activity of one or more polypeptides having said activity, e.g. by generating or increasing the amount and/or specific activity in the cell or a compartment of a cell of one of more FCRP, especially selected from the group consisting of (DL)-glycerol-3-phosphatase, 2,3-dihydroxyphenylpropionate 1,2-dioxygenase, 2-oxoglutarate dehydrogenase E1 subunit, 49747384_SOYBEAN-protein, 5′-nucleotidase, acetolactate synthase small subunit, acetyl CoA carboxylase, adenosine kinase, arginine exporter protein, At1g09680-protein, At2g45420-protein, At4g32480-protein, ATP-binding component of a transport system, auxin response factor, b0012-protein, b1003-protein, b1522-protein, b2032-protein, b2345-protein, b2513-protein, b2673-protein, b3246-protein, b3346-protein, b3817-protein, b4029-protein, beta-hydroxylase, bifunctional aspartokinase/homoserine dehydrogenase, calcium-dependent protein kinase, coproporphyrinogen III oxidase, cyclin, cystathionine gamma-synthase, cystathionine-lyase, dihydroxyacid dehydratase, DNA-binding protein, F-box protein, glutaredoxin, glutathione S-transferase, glycogenin, homocitrate synthase, homoserine dehydrogenase, hydrolase, L-serine dehydratase, major facilitator superfamily transporter protein, malic enzyme, membrane transport protein, monothiol glutaredoxin, monthiol glutaredoxin, oxidoreductase, peptidyl-prolyl cistrans isomerase, phosphoadenosine phosphosulfate reductase , Photosystem I reaction center subunit XI, protein kinase, protein phosphatase, pyruvate kinase, Sec-independent protein translocase subunit, serine protease, serine/threonine-protein phosphatase, threonine aldolase, threonine dehydratase, threonine efflux protein, transcription factor, transport protein, uridine/cytidine kinase, valine-pyruvate transaminase, yhl013c-protein, yml084w-protein, yol160w-protein, yor392w-protein, and zinc finger protein, for example of the respective polypeptide as depicted in Table II, application no. 1, column 5 and 8, or a homolog or a fragment thereof, or the respective polypeptide comprising a sequence corresponding to the consensus sequences as shown in Table IV, application no. 1, column 8, or the respective polypeptide comprising at least one polypeptide motif as depicted in Table IV, application no. 1, column 8.

[0294] A further embodiment of the present invention relates to a process for the production of methionine, which comprises
[0295] (a) increasing or generating the activiy of a 49747384_SOYBEAN-protein non-targeted in a non-human organism or a part thereof, preferably a microorganism, a plant cell, a plant or a part thereof, as compared to a corresponding non-transformed wild type non-human organism or a part thereof; and
[0296] (b) growing the non-human organism or a part thereof under conditions which permit the production of methionine or a composition comprising methionine in said non-human organism or in the culture medium surrounding said non-human organism.

[0297] A further embodiment of the present invention relates to a process for the production of methionine, which comprises
[0298] (a) increasing or generating the activiy of a At1g09680-protein non-targeted in a non-human organism or a part thereof, preferably a microorganism, a plant cell, a plant or a part thereof, as compared to a corresponding non-transformed wild type non-human organism or a part thereof; and
[0299] (b) growing the non-human organism or a part thereof under conditions which permit the production of methionine or a composition comprising methionine in said non-human organism or in the culture medium surrounding said non-human organism.

[0300] A further embodiment of the present invention relates to a process for the production of methionine, which comprises
[0301] (a) increasing or generating the activiy of a DNA-binding protein non-targeted in a non-human organism or a part thereof, preferably a microorganism, a plant cell, a plant or a part thereof, as compared to a corresponding non-transformed wild type non-human organism or a part thereof; and
[0302] (b) growing the non-human organism or a part thereof under conditions which permit the production of methionine or a composition comprising methionine in said non-human organism or in the culture medium surrounding said non-human organism.

[0303] A further embodiment of the present invention relates to a process for the production of methionine, which comprises
[0304] (a) increasing or generating the activiy of a bifunctional aspartokinase/homoserine dehydrogenase non-targeted in a non-human organism or a part thereof, preferably a microorganism, a plant cell, a plant or a part thereof, as compared to a corresponding non-transformed wild type non-human organism or a part thereof; and
[0305] (b) growing the non-human organism or a part thereof under conditions which permit the production of methionine or a composition comprising methionine in said non-human organism or in the culture medium surrounding said non-human organism.

[0306] A further embodiment of the present invention relates to a process for the production of methionine, which comprises
[0307] (a) increasing or generating the activiy of a protein phosphatase non-targeted in a non-human organism or a part thereof, preferably a microorganism, a plant cell, a plant or a part thereof, as compared to a corresponding non-transformed wild type non-human organism or a part thereof; and
[0308] (b) growing the non-human organism or a part thereof under conditions which permit the production of methionine or a composition comprising methionine in said non-human organism or in the culture medium surrounding said non-human organism.

[0309] A further embodiment of the present invention relates to a process for the production of methionine, which comprises
[0310] (a) increasing or generating the activiy of a transcription factor non-targeted in a non-human organism or a part thereof, preferably a microorganism, a plant cell, a plant or a part thereof, as compared to a corresponding non-transformed wild type non-human organism or a part thereof; and
[0311] (b) growing the non-human organism or a part thereof under conditions which permit the production of methionine or a composition comprising methionine in said non-human organism or in the culture medium surrounding said non-human organism.

[0312] A further embodiment of the present invention relates to a process for the production of methionine, which comprises
[0313] (a) increasing or generating the activiy of a protein phosphatase non-targeted in a non-human organism or a part thereof, preferably a microorganism, a plant cell, a plant or a part thereof, as compared to a corresponding non-transformed wild type non-human organism or a part thereof; and
[0314] (b) growing the non-human organism or a part thereof under conditions which permit the production of methionine or a composition comprising methionine in said non-human organism or in the culture medium surrounding said non-human organism.

[0315] A further embodiment of the present invention relates to a process for the production of methionine, which comprises
[0316] (a) increasing or generating the activiy of a At2g45420-protein non-targeted in a non-human organism or a part thereof, preferably a microorganism, a plant cell, a plant or a part thereof, as compared to a corresponding non-transformed wild type non-human organism or a part thereof; and
[0317] (b) growing the non-human organism or a part thereof under conditions which permit the production of methionine or a composition comprising methionine in said non-human organism or in the culture medium surrounding said non-human organism.

[0318] A further embodiment of the present invention relates to a process for the production of methionine, which comprises
[0319] (a) increasing or generating the activiy of a adenosine kinase non-targeted in a non-human organism or a part thereof, preferably a microorganism, a plant cell, a plant or a part thereof, as compared to a corresponding non-transformed wild type non-human organism or a part thereof; and
[0320] (b) growing the non-human organism or a part thereof under conditions which permit the production of methionine or a composition comprising methionine in said non-human organism or in the culture medium surrounding said non-human organism.

[0321] A further embodiment of the present invention relates to a process for the production of methionine, which comprises
[0322] (a) increasing or generating the activiy of a protein kinase non-targeted in a non-human organism or a part thereof, preferably a microorganism, a plant cell, a plant or a part thereof, as compared to a corresponding non-transformed wild type non-human organism or a part thereof; and
[0323] (b) growing the non-human organism or a part thereof under conditions which permit the production of methionine or a composition comprising methionine in said non-human organism or in the culture medium surrounding said non-human organism.

[0324] A further embodiment of the present invention relates to a process for the production of methionine, which comprises
[0325] (a) increasing or generating the activiy of a auxin response factor non-targeted in a non-human organism or a part thereof, preferably a microorganism, a plant cell, a plant or a part thereof, as compared to a corresponding non-transformed wild type non-human organism or a part thereof; and
[0326] (b) growing the non-human organism or a part thereof under conditions which permit the production of methionine or a composition comprising methionine in said non-human organism or in the culture medium surrounding said non-human organism.

[0327] A further embodiment of the present invention relates to a process for the production of methionine, which comprises
[0328] (a) increasing or generating the activiy of a monthiol glutaredoxin non-targeted in a non-human organism or a part thereof, preferably a microorganism, a plant cell, a plant or a part thereof, as compared to a corresponding non-transformed wild type non-human organism or a part thereof; and
[0329] (b) growing the non-human organism or a part thereof under conditions which permit the production of methionine or a composition comprising methionine in said non-human organism or in the culture medium surrounding said non-human organism.

[0330] A further embodiment of the present invention relates to a process for the production of methionine, which comprises
[0331] (a) increasing or generating the activiy of a glutaredoxin non-targeted in a non-human organism or a part thereof, preferably a microorganism, a plant cell, a plant or a part thereof, as compared to a corresponding non-transformed wild type non-human organism or a part thereof; and
[0332] (b) growing the non-human organism or a part thereof under conditions which permit the production of methionine or a composition comprising methionine in said non-human organism or in the culture medium surrounding said non-human organism.

[0333] A further embodiment of the present invention relates to a process for the production of methionine, which comprises
[0334] (a) increasing or generating the activiy of a monothiol glutaredoxin non-targeted in a non-human organism or a part thereof, preferably a microorganism, a plant cell, a plant or a part thereof, as compared to a corresponding non-transformed wild type non-human organism or a part thereof; and
[0335] (b) growing the non-human organism or a part thereof under conditions which permit the production of methionine or a composition comprising methionine in said non-human organism or in the culture medium surrounding said non-human organism.

[0336] A further embodiment of the present invention relates to a process for the production of methionine, which comprises
[0337] (a) increasing or generating the activiy of a monothiol glutaredoxin non-targeted in a non-human organism or a part thereof, preferably a microorganism, a plant cell, a plant or a part thereof, as compared to a corresponding non-transformed wild type non-human organism or a part thereof; and
[0338] (b) growing the non-human organism or a part thereof under conditions which permit the production of methionine or a composition comprising methionine in said non-human organism or in the culture medium surrounding said non-human organism.

[0339] A further embodiment of the present invention relates to a process for the production of methionine, which comprises
[0340] (a) increasing or generating the activiy of a At4g32480-protein non-targeted in a non-human organism or a part thereof, preferably a microorganism, a plant cell, a plant or a part thereof, as compared to a corresponding non-transformed wild type non-human organism or a part thereof; and
[0341] (b) growing the non-human organism or a part thereof under conditions which permit the production of methionine or a composition comprising methionine in said non-human organism or in the culture medium surrounding said non-human organism.

[0342] A further embodiment of the present invention relates to a process for the production of methionine, which comprises
[0343] (a) increasing or generating the activiy of a glutaredoxin non-targeted in a non-human organism or a part thereof, preferably a microorganism, a plant cell, a plant or a part thereof, as compared to a corresponding non-transformed wild type non-human organism or a part thereof; and
[0344] (b) growing the non-human organism or a part thereof under conditions which permit the production of methionine or a composition comprising methionine in said non-human organism or in the culture medium surrounding said non-human organism.

[0345] A further embodiment of the present invention relates to a process for the production of methionine, which comprises
[0346] (a) increasing or generating the activiy of a calcium-dependent protein kinase non-targeted in a non-human organism or a part thereof, preferably a microorganism, a plant cell, a plant or a part thereof, as compared to a corresponding non-transformed wild type non-human organism or a part thereof; and
[0347] (b) growing the non-human organism or a part thereof under conditions which permit the production of methionine or a composition comprising methionine in said non-human organism or in the culture medium surrounding said non-human organism.

[0348] A further embodiment of the present invention relates to a process for the production of methionine, which comprises
[0349] (a) increasing or generating the activiy of a monothiol glutaredoxin non-targeted in a non-human organism or a part thereof, preferably a microorganism, a plant cell, a plant or a part thereof, as compared to a corresponding non-transformed wild type non-human organism or a part thereof; and
[0350] (b) growing the non-human organism or a part thereof under conditions which permit the production of methionine or a composition comprising methionine in said non-human organism or in the culture medium surrounding said non-human organism.

[0351] A further embodiment of the present invention relates to a process for the production of methionine, which comprises
[0352] (a) increasing or generating the activiy of a protein phosphatase non-targeted in a non-human organism or a part thereof, preferably a microorganism, a plant cell, a plant or a part thereof, as compared to a corresponding non-transformed wild type non-human organism or a part thereof; and
[0353] (b) growing the non-human organism or a part thereof under conditions which permit the production of methionine or a composition comprising methionine in said non-human organism or in the culture medium surrounding said non-human organism.

[0354] A further embodiment of the present invention relates to a process for the production of methionine, which comprises
[0355] (a) increasing or generating the activiy of a zinc finger protein non-targeted in a non-human organism or a part thereof, preferably a microorganism, a plant cell, a plant or a part thereof, as compared to a corresponding non-transformed wild type non-human organism or a part thereof; and
[0356] (b) growing the non-human organism or a part thereof under conditions which permit the production of methionine or a composition comprising methionine in said non-human organism or in the culture medium surrounding said non-human organism.

[0357] A further embodiment of the present invention relates to a process for the production of methionine, which comprises
[0358] (a) increasing or generating the activiy of a malic enzyme non-targeted in a non-human organism or a part thereof, preferably a microorganism, a plant cell, a plant or a part thereof, as compared to a corresponding non-transformed wild type non-human organism or a part thereof; and
[0359] (b) growing the non-human organism or a part thereof under conditions which permit the production of methionine or a composition comprising methionine in said non-human organism or in the culture medium surrounding said non-human organism.

[0360] A further embodiment of the present invention relates to a process for the production of methionine, which comprises
[0361] (a) increasing or generating the activiy of a beta-hydroxylase non-targeted in a non-human organism or a part thereof, preferably a microorganism, a plant cell, a plant or a part thereof, as compared to a corresponding non-transformed wild type non-human organism or a part thereof; and
[0362] (b) growing the non-human organism or a part thereof under conditions which permit the production of methionine or a composition comprising methionine in said non-human organism or in the culture medium surrounding said non-human organism.

[0363] A further embodiment of the present invention relates to a process for the production of methionine, which comprises
[0364] (a) increasing or generating the activiy of a 2-oxoglutarate dehydrogenase E1 subunit non-targeted in a non-human organism or a part thereof, preferably a microorganism, a plant cell, a plant or a part thereof, as compared to a corresponding non-transformed wild type non-human organism or a part thereof; and
[0365] (b) growing the non-human organism or a part thereof under conditions which permit the production of methionine or a composition comprising methionine in said non-human organism or in the culture medium surrounding said non-human organism.

[0366] A further embodiment of the present invention relates to a process for the production of methionine, which comprises
[0367] (a) increasing or generating the activiy of a homoserine dehydrogenase non-targeted in a non-human organism or a part thereof, preferably a microorganism, a plant cell, a plant or a part thereof, as compared to a corresponding non-transformed wild type non-human organism or a part thereof; and
[0368] (b) growing the non-human organism or a part thereof under conditions which permit the production of methionine or a composition comprising methionine in said non-human organism or in the culture medium surrounding said non-human organism.

[0369] A further embodiment of the present invention relates to a process for the production of methionine, which comprises
[0370] (a) increasing or generating the activiy of a hydrolase non-targeted in a non-human organism or a part thereof, preferably a microorganism, a plant cell, a plant or a part thereof, as compared to a corresponding non-transformed wild type non-human organism or a part thereof; and
[0371] (b) growing the non-human organism or a part thereof under conditions which permit the production of methionine or a composition comprising methionine in said non-human organism or in the culture medium surrounding said non-human organism.

[0372] A further embodiment of the present invention relates to a process for the production of methionine, which comprises
[0373] (a) increasing or generating the activiy of a peptidyl-prolyl cis-trans isomerase non-targeted in a non-human organism or a part thereof, preferably a microorganism, a plant cell, a plant or a part thereof, as compared to a corresponding non-transformed wild type non-human organism or a part thereof; and
[0374] (b) growing the non-human organism or a part thereof under conditions which permit the production of methionine or a composition comprising methionine in said non-human organism or in the culture medium surrounding said non-human organism.

[0375] A further embodiment of the present invention relates to a process for the production of methionine, which comprises
[0376] (a) increasing or generating the activiy of a b0012-protein non-targeted in a non-human organism or a part thereof, preferably a microorganism, a plant cell, a plant or a part thereof, as compared to a corresponding non-transformed wild type non-human organism or a part thereof; and
[0377] (b) growing the non-human organism or a part thereof under conditions which permit the production of methionine or a composition comprising methionine in said non-human organism or in the culture medium surrounding said non-human organism.

[0378] A further embodiment of the present invention relates to a process for the production of methionine, which comprises
[0379] (a) increasing or generating the activiy of a acetolactate synthase small subunit non-targeted in a non-human organism or a part thereof, preferably a microorganism, a plant cell, a plant or a part thereof, as compared to a corresponding non-transformed wild type non-human organism or a part thereof; and
[0380] (b) growing the non-human organism or a part thereof under conditions which permit the production of methionine or a composition comprising methionine in said non-human organism or in the culture medium surrounding said non-human organism.

[0381] A further embodiment of the present invention relates to a process for the production of methionine, which comprises
[0382] (a) increasing or generating the activiy of a serine protease non-targeted in a non-human organism or a part thereof, preferably a microorganism, a plant cell, a plant or a part thereof, as compared to a corresponding non-transformed wild type non-human organism or a part thereof; and
[0383] (b) growing the non-human organism or a part thereof under conditions which permit the production of methionine or a composition comprising methionine in said non-human organism or in the culture medium surrounding said non-human organism.

[0384] A further embodiment of the present invention relates to a process for the production of methionine, which comprises
[0385] (a) increasing or generating the activiy of a 2,3-dihydroxyphenylpropionate 1,2-dioxygenase non-targeted in a non-human organism or a part thereof, preferably a microorganism, a plant cell, a plant or a part thereof, as compared to a corresponding non-transformed wild type non-human organism or a part thereof; and
[0386] (b) growing the non-human organism or a part thereof under conditions which permit the production of methionine or a composition comprising methionine in said non-human organism or in the culture medium surrounding said non-human organism.

[0387] A further embodiment of the present invention relates to a process for the production of methionine, which comprises
[0388] (a) increasing or generating the activiy of a ATP-binding component of a transport system non-targeted in a non-human organism or a part thereof, preferably a microorganism, a plant cell, a plant or a part thereof, as compared to a corresponding non-transformed wild type non-human organism or a part thereof; and
[0389] (b) growing the non-human organism or a part thereof under conditions which permit the production of methionine or a composition comprising methionine in said non-human organism or in the culture medium surrounding said non-human organism.

[0390] A further embodiment of the present invention relates to a process for the production of methionine, which comprises
[0391] (a) increasing or generating the activiy of a membrane transport protein non-targeted in a non-human organism or a part thereof, preferably a microorganism, a plant cell, a plant or a part thereof, as compared to a corresponding non-transformed wild type non-human organism or a part thereof; and
[0392] (b) growing the non-human organism or a part thereof under conditions which permit the production of methionine or a composition comprising methionine in said non-human organism or in the culture medium surrounding said non-human organism.

[0393] A further embodiment of the present invention relates to a process for the production of methionine, which comprises
[0394] (a) increasing or generating the activiy of a threonine aldolase non-targeted in a non-human organism or a part thereof, preferably a microorganism, a plant cell, a plant or a part thereof, as compared to a corresponding non-transformed wild type non-human organism or a part thereof; and
[0395] (b) growing the non-human organism or a part thereof under conditions which permit the production of methionine or a composition comprising methionine in said non-human organism or in the culture medium surrounding said non-human organism.

[0396] A further embodiment of the present invention relates to a process for the production of methionine, which comprises
[0397] (a) increasing or generating the activiy of a major facilitator superfamily transporter protein non-targeted in a non-human organism or a part thereof, preferably a microorganism, a plant cell, a plant or a part thereof, as compared to a corresponding non-transformed wild type non-human organism or a part thereof; and
[0398] (b) growing the non-human organism or a part thereof under conditions which permit the production of methionine or a composition comprising methionine in said non-human organism or in the culture medium surrounding said non-human organism.

[0399] A further embodiment of the present invention relates to a process for the production of methionine, which comprises
[0400] (a) increasing or generating the activiy of a b1003-protein non-targeted in a non-human organism or a part thereof, preferably a microorganism, a plant cell, a plant or a part thereof, as compared to a corresponding non-transformed wild type non-human organism or a part thereof; and
[0401] (b) growing the non-human organism or a part thereof under conditions which permit the production of methionine or a composition comprising methionine in said non-human organism or in the culture medium surrounding said non-human organism.

[0402] A further embodiment of the present invention relates to a process for the production of methionine, which comprises
[0403] (a) increasing or generating the activiy of a b1522-protein non-targeted in a non-human organism or a part thereof, preferably a microorganism, a plant cell, a plant or a part thereof, as compared to a corresponding non-transformed wild type non-human organism or a part thereof; and
[0404] (b) growing the non-human organism or a part thereof under conditions which permit the production of methionine or a composition comprising methionine in said non-human organism or in the culture medium surrounding said non-human organism.

[0405] A further embodiment of the present invention relates to a process for the production of methionine, which comprises
[0406] (a) increasing or generating the activiy of a transport protein non-targeted in a non-human organism or a part thereof, preferably a microorganism, a plant cell, a plant or a part thereof, as compared to a corresponding non-transformed wild type non-human organism or a part thereof; and
[0407] (b) growing the non-human organism or a part thereof under conditions which permit the production of methionine or a composition comprising methionine in said non-human organism or in the culture medium surrounding said non-human organism.

[0408] A further embodiment of the present invention relates to a process for the production of methionine, which comprises
[0409] (a) increasing or generating the activiy of a L-serine dehydratase non-targeted in a non-human organism or a part thereof, preferably a microorganism, a plant cell, a plant or a part thereof, as compared to a corresponding non-transformed wild type non-human organism or a part thereof; and
[0410] (b) growing the non-human organism or a part thereof under conditions which permit the production of methionine or a composition comprising methionine in said non-human organism or in the culture medium surrounding said non-human organism.

[0411] A further embodiment of the present invention relates to a process for the production of methionine, which comprises
[0412] (a) increasing or generating the activiy of a serine/threonine-protein phosphatase non-targeted in a non-human organism or a part thereof, preferably a microorganism, a plant cell, a plant or a part thereof, as compared to a corresponding non-transformed wild type non-human organism or a part thereof; and
[0413] (b) growing the non-human organism or a part thereof under conditions which permit the production of methionine or a composition comprising methionine in said non-human organism or in the culture medium surrounding said non-human organism.

[0414] A further embodiment of the present invention relates to a process for the production of methionine, which comprises
[0415] (a) increasing or generating the activiy of a pyruvate kinase non-targeted in a non-human organism or a part thereof, preferably a microorganism, a plant cell, a plant or a part thereof, as compared to a corresponding non-transformed wild type non-human organism or a part thereof; and
[0416] (b) growing the non-human organism or a part thereof under conditions which permit the production of methionine or a composition comprising methionine in said non-human organism or in the culture medium surrounding said non-human organism.

[0417] A further embodiment of the present invention relates to a process for the production of methionine, which comprises
[0418] (a) increasing or generating the activiy of a b2032-protein non-targeted in a non-human organism or a part thereof, preferably a microorganism, a plant cell, a plant or a part thereof, as compared to a corresponding non-transformed wild type non-human organism or a part thereof; and
[0419] (b) growing the non-human organism or a part thereof under conditions which permit the production of methionine or a composition comprising methionine in said non-human organism or in the culture medium surrounding said non-human organism.

[0420] A further embodiment of the present invention relates to a process for the production of methionine, which comprises
[0421] (a) increasing or generating the activiy of a uridine/cytidine kinase non-targeted in a non-human organism or a part thereof, preferably a microorganism, a plant cell, a plant or a part thereof, as compared to a corresponding non-transformed wild type non-human organism or a part thereof; and
[0422] (b) growing the non-human organism or a part thereof under conditions which permit the production of methionine or a composition comprising methionine in said non-human organism or in the culture medium surrounding said non-human organism.

[0423] A further embodiment of the present invention relates to a process for the production of methionine, which comprises
[0424] (a) increasing or generating the activiy of a b2345-protein non-targeted in a non-human organism or a part thereof, preferably a microorganism, a plant cell, a plant or a part thereof, as compared to a corresponding non-transformed wild type non-human organism or a part thereof; and
[0425] (b) growing the non-human organism or a part thereof under conditions which permit the production of methionine or a composition comprising methionine in said non-human organism or in the culture medium surrounding said non-human organism.

[0426] A further embodiment of the present invention relates to a process for the production of methionine, which comprises
[0427] (a) increasing or generating the activiy of a b2513-protein non-targeted in a non-human organism or a part thereof, preferably a microorganism, a plant cell, a plant or a part thereof, as compared to a corresponding non-transformed wild type non-human organism or a part thereof; and
[0428] (b) growing the non-human organism or a part thereof under conditions which permit the production of methionine or a composition comprising methionine in said non-human organism or in the culture medium surrounding said non-human organism.

[0429] A further embodiment of the present invention relates to a process for the production of methionine, which comprises
[0430] (a) increasing or generating the activiy of a b2673-protein non-targeted in a non-human organism or a part thereof, preferably a microorganism, a plant cell, a plant or a part thereof, as compared to a corresponding non-transformed wild type non-human organism or a part thereof; and
[0431] (b) growing the non-human organism or a part thereof under conditions which permit the production of methionine or a composition comprising methionine in said non-human organism or in the culture medium surrounding said non-human organism.

[0432] A further embodiment of the present invention relates to a process for the production of methionine, which comprises
[0433] (a) increasing or generating the activiy of a arginine exporter protein non-targeted in a non-human organism or a part thereof, preferably a microorganism, a plant cell, a plant or a part thereof, as compared to a corresponding non-transformed wild type non-human organism or a part thereof; and
[0434] (b) growing the non-human organism or a part thereof under conditions which permit the production of methionine or a composition comprising methionine in said non-human organism or in the culture medium surrounding said non-human organism.

[0435] A further embodiment of the present invention relates to a process for the production of methionine, which comprises
[0436] (a) increasing or generating the activiy of a b3246-protein non-targeted in a non-human organism or a part thereof, preferably a microorganism, a plant cell, a plant or a part thereof, as compared to a corresponding non-transformed wild type non-human organism or a part thereof; and
[0437] (b) growing the non-human organism or a part thereof under conditions which permit the production of methionine or a composition comprising methionine in said non-human organism or in the culture medium surrounding said non-human organism.

[0438] A further embodiment of the present invention relates to a process for the production of methionine, which comprises
[0439] (a) increasing or generating the activiy of a acetyl CoA carboxylase non-targeted in a non-human organism or a part thereof, preferably a microorganism, a plant cell, a plant or a part thereof, as compared to a corresponding non-transformed wild type non-human organism or a part thereof; and
[0440] (b) growing the non-human organism or a part thereof under conditions which permit the production of methionine or a composition comprising methionine in said non-human organism or in the culture medium surrounding said non-human organism.

[0441] A further embodiment of the present invention relates to a process for the production of methionine, which comprises
[0442] (a) increasing or generating the activiy of a b3346-protein non-targeted in a non-human organism or a part thereof, preferably a microorganism, a plant cell, a plant or a part thereof, as compared to a corresponding non-transformed wild type non-human organism or a part thereof; and
[0443] (b) growing the non-human organism or a part thereof under conditions which permit the production of methionine or a composition comprising methionine in said non-human organism or in the culture medium surrounding said non-human organism.

[0444] A further embodiment of the present invention relates to a process for the production of methionine, which comprises
[0445] (a) increasing or generating the activiy of a valine-pyruvate transaminase non-targeted in a non-human organism or a part thereof, preferably a microorganism, a plant cell, a plant or a part thereof, as compared to a corresponding non-transformed wild type non-human organism or a part thereof; and
[0446] (b) growing the non-human organism or a part thereof under conditions which permit the production of methionine or a composition comprising methionine in said non-human organism or in the culture medium surrounding said non-human organism.

[0447] A further embodiment of the present invention relates to a process for the production of methionine, which comprises
[0448] (a) increasing or generating the activiy of a dihydroxyacid dehydratase non-targeted in a non-human organism or a part thereof, preferably a microorganism, a plant cell, a plant or a part thereof, as compared to a corresponding non-transformed wild type non-human organism or a part thereof; and
[0449] (b) growing the non-human organism or a part thereof under conditions which permit the production of methionine or a composition comprising methionine in said non-human organism or in the culture medium surrounding said non-human organism.

[0450] A further embodiment of the present invention relates to a process for the production of methionine, which comprises
[0451] (a) increasing or generating the activiy of a b3817-protein non-targeted in a non-human organism or a part thereof, preferably a microorganism, a plant cell, a plant or a part thereof, as compared to a corresponding non-transformed wild type non-human organism or a part thereof; and
[0452] (b) growing the non-human organism or a part thereof under conditions which permit the production of methionine or a composition comprising methionine in said non-human organism or in the culture medium surrounding said non-human organism.

[0453] A further embodiment of the present invention relates to a process for the production of methionine, which comprises
[0454] (a) increasing or generating the activiy of a threonine efflux protein non-targeted in a non-human organism or a part thereof, preferably a microorganism, a plant cell, a plant or a part thereof, as compared to a corresponding non-transformed wild type non-human organism or a part thereof; and
[0455] (b) growing the non-human organism or a part thereof under conditions which permit the production of methionine or a composition comprising methionine in said non-human organism or in the culture medium surrounding said non-human organism.

[0456] A further embodiment of the present invention relates to a process for the production of methionine, which comprises
[0457] (a) increasing or generating the activiy of a b4029-protein non-targeted in a non-human organism or a part thereof, preferably a microorganism, a plant cell, a plant or a part thereof, as compared to a corresponding non-transformed wild type non-human organism or a part thereof; and
[0458] (b) growing the non-human organism or a part thereof under conditions which permit the production of methionine or a composition comprising methionine in said non-human organism or in the culture medium surrounding said non-human organism.

[0459] A further embodiment of the present invention relates to a process for the production of methionine, which comprises
[0460] (a) increasing or generating the activiy of a glutaredoxin non-targeted in a non-human organism or a part thereof, preferably a microorganism, a plant cell, a plant or a part thereof, as compared to a corresponding non-transformed wild type non-human organism or a part thereof; and
[0461] (b) growing the non-human organism or a part thereof under conditions which permit the production of methionine or a composition comprising methionine in said non-human organism or in the culture medium surrounding said non-human organism.

[0462] A further embodiment of the present invention relates to a process for the production of methionine, which comprises
[0463] (a) increasing or generating the activiy of a 5′-nucleotidase non-targeted in a non-human organism or a part thereof, preferably a microorganism, a plant cell, a plant or a part thereof, as compared to a corresponding non-transformed wild type non-human organism or a part thereof; and
[0464] (b) growing the non-human organism or a part thereof under conditions which permit the production of methionine or a composition comprising methionine in said non-human organism or in the culture medium surrounding said non-human organism.

[0465] A further embodiment of the present invention relates to a process for the production of methionine, which comprises
[0466] (a) increasing or generating the activiy of a glutathione S-transferase non-targeted in a non-human organism or a part thereof, preferably a microorganism, a plant cell, a plant or a part thereof, as compared to a corresponding non-transformed wild type non-human organism or a part thereof; and
[0467] (b) growing the non-human organism or a part thereof under conditions which permit the production of methionine or a composition comprising methionine in said non-human organism or in the culture medium surrounding said non-human organism.

[0468] A further embodiment of the present invention relates to a process for the production of methionine, which comprises
[0469] (a) increasing or generating the activiy of a coproporphyrinogen Ill oxidase non-targeted in a non-human organism or a part thereof, preferably a microorganism, a plant cell, a plant or a part thereof, as compared to a corresponding non-transformed wild type non-human organism or a part thereof; and
[0470] (b) growing the non-human organism or a part thereof under conditions which permit the production of methionine or a composition comprising methionine in said non-human organism or in the culture medium surrounding said non-human organism.

[0471] A further embodiment of the present invention relates to a process for the production of methionine, which comprises
[0472] (a) increasing or generating the activiy of a oxidoreductase non-targeted in a non-human organism or a part thereof, preferably a microorganism, a plant cell, a plant or a part thereof, as compared to a corresponding non-transformed wild type non-human organism or a part thereof; and
[0473] (b) growing the non-human organism or a part thereof under conditions which permit the production of methionine or a composition comprising methionine in said non-human organism or in the culture medium surrounding said non-human organism.

[0474] A further embodiment of the present invention relates to a process for the production of methionine, which comprises
[0475] (a) increasing or generating the activiy of a oxidoreductase non-targeted in a non-human organism or a part thereof, preferably a microorganism, a plant cell, a plant or a part thereof, as compared to a corresponding non-transformed wild type non-human organism or a part thereof; and
[0476] (b) growing the non-human organism or a part thereof under conditions which permit the production of methionine or a composition comprising methionine in said non-human organism or in the culture medium surrounding said non-human organism.

[0477] A further embodiment of the present invention relates to a process for the production of methionine, which comprises
[0478] (a) increasing or generating the activiy of a Photosystem I reaction center subunit XI non-targeted in a non-human organism or a part thereof, preferably a microorganism, a plant cell, a plant or a part thereof, as compared to a corresponding non-transformed wild type non-human organism or a part thereof; and
[0479] (b) growing the non-human organism or a part thereof under conditions which permit the production of methionine or a composition comprising methionine in said non-human organism or in the culture medium surrounding said non-human organism.

[0480] A further embodiment of the present invention relates to a process for the production of methionine, which comprises
[0481] (a) increasing or generating the activiy of a phosphoadenosine phosphosulfate reductase non-targeted in a non-human organism or a part thereof, preferably a microorganism, a plant cell, a plant or a part thereof, as compared to a corresponding non-transformed wild type non-human organism or a part thereof; and
[0482] (b) growing the non-human organism or a part thereof under conditions which permit the production of methionine or a composition comprising methionine in said non-human organism or in the culture medium surrounding said non-human organism.

[0483] A further embodiment of the present invention relates to a process for the production of methionine, which comprises
[0484] (a) increasing or generating the activiy of a threonine dehydratase non-targeted in a non-human organism or a part thereof, preferably a microorganism, a plant cell, a plant or a part thereof, as compared to a corresponding non-transformed wild type non-human organism or a part thereof; and
[0485] (b) growing the non-human organism or a part thereof under conditions which permit the production of methionine or a composition comprising methionine in said non-human organism or in the culture medium surrounding said non-human organism.

[0486] A further embodiment of the present invention relates to a process for the production of methionine, which comprises
[0487] (a) increasing or generating the activiy of a Sec-independent protein translocase subunit non-targeted in a non-human organism or a part thereof, preferably a microorganism, a plant cell, a plant or a part thereof, as compared to a corresponding non-transformed wild type non-human organism or a part thereof; and
[0488] (b) growing the non-human organism or a part thereof under conditions which permit the production of methionine or a composition comprising methionine in said non-human organism or in the culture medium surrounding said non-human organism.

[0489] A further embodiment of the present invention relates to a process for the production of methionine, which comprises
[0490] (a) increasing or generating the activiy of a homocitrate synthase non-targeted in a non-human organism or a part thereof, preferably a microorganism, a plant cell, a plant or a part thereof, as compared to a corresponding non-transformed wild type non-human organism or a part thereof; and
[0491] (b) growing the non-human organism or a part thereof under conditions which permit the production of methionine or a composition comprising methionine in said non-human organism or in the culture medium surrounding said non-human organism.

[0492] A further embodiment of the present invention relates to a process for the production of methionine, which comprises
[0493] (a) increasing or generating the activiy of a cystathionine-lyase non-targeted in a non-human organism or a part thereof, preferably a microorganism, a plant cell, a plant or a part thereof, as compared to a corresponding non-transformed wild type non-human organism or a part thereof; and
[0494] (b) growing the non-human organism or a part thereof under conditions which permit the production of methionine or a composition comprising methionine in said non-human organism or in the culture medium surrounding said non-human organism.

[0495] A further embodiment of the present invention relates to a process for the production of methionine, which comprises
[0496] (a) increasing or generating the activiy of a cyclin non-targeted in a non-human organism or a part thereof, preferably a microorganism, a plant cell, a plant or a part thereof, as compared to a corresponding non-transformed wild type non-human organism or a part thereof; and
[0497] (b) growing the non-human organism or a part thereof under conditions which permit the production of methionine or a composition comprising methionine in said non-human organism or in the culture medium surrounding said non-human organism.

[0498] A further embodiment of the present invention relates to a process for the production of methionine, which comprises
[0499] (a) increasing or generating the activiy of a protein kinase non-targeted in a non-human organism or a part thereof, preferably a microorganism, a plant cell, a plant or a part thereof, as compared to a corresponding non-transformed wild type non-human organism or a part thereof; and
[0500] (b) growing the non-human organism or a part thereof under conditions which permit the production of methionine or a composition comprising methionine in said non-human organism or in the culture medium surrounding said non-human organism.

[0501] A further embodiment of the present invention relates to a process for the production of methionine, which comprises
[0502] (a) increasing or generating the activiy of a protein kinase non-targeted in a non-human organism or a part thereof, preferably a microorganism, a plant cell, a plant or a part thereof, as compared to a corresponding non-transformed wild type non-human organism or a part thereof; and
[0503] (b) growing the non-human organism or a part thereof under conditions which permit the production of methionine or a composition comprising methionine in said non-human organism or in the culture medium surrounding said non-human organism.

[0504] A further embodiment of the present invention relates to a process for the production of methionine, which comprises
[0505] (a) increasing or generating the activiy of a F-box protein non-targeted in a non-human organism or a part thereof, preferably a microorganism, a plant cell, a plant or a part thereof, as compared to a corresponding non-transformed wild type non-human organism or a part thereof; and
[0506] (b) growing the non-human organism or a part thereof under conditions which permit the production of methionine or a composition comprising methionine in said non-human organism or in the culture medium surrounding said non-human organism.

[0507] A further embodiment of the present invention relates to a process for the production of methionine, which comprises
[0508] (a) increasing or generating the activiy of a yhl013c-protein non-targeted in a non-human organism or a part thereof, preferably a microorganism, a plant cell, a plant or a part thereof, as compared to a corresponding non-transformed wild type non-human organism or a part thereof; and
[0509] (b) growing the non-human organism or a part thereof under conditions which permit the production of methionine or a composition comprising methionine in said non-human organism or in the culture medium surrounding said non-human organism.

[0510] A further embodiment of the present invention relates to a process for the production of methionine, which comprises
[0511] (a) increasing or generating the activiy of a (DL)-glycerol-3-phosphatase non-targeted in a non-human organism or a part thereof, preferably a microorganism, a plant cell, a plant or a part thereof, as compared to a corresponding non-transformed wild type non-human organism or a part thereof; and
[0512] (b) growing the non-human organism or a part thereof under conditions which permit the production of methionine or a composition comprising methionine in said non-human organism or in the culture medium surrounding said non-human organism.

[0513] A further embodiment of the present invention relates to a process for the production of methionine, which comprises
[0514] (a) increasing or generating the activiy of a glycogenin non-targeted in a non-human organism or a part thereof, preferably a microorganism, a plant cell, a plant or a part thereof, as compared to a corresponding non-transformed wild type non-human organism or a part thereof; and
[0515] (b) growing the non-human organism or a part thereof under conditions which permit the production of methionine or a composition comprising methionine in said non-human organism or in the culture medium surrounding said non-human organism.

[0516] A further embodiment of the present invention relates to a process for the production of methionine, which comprises
[0517] (a) increasing or generating the activiy of a cystathionine gamma-synthase non-targeted in a non-human organism or a part thereof, preferably a microorganism, a plant cell, a plant or a part thereof, as compared to a corresponding non-transformed wild type non-human organism or a part thereof; and
[0518] (b) growing the non-human organism or a part thereof under conditions which permit the production of methionine or a composition comprising methionine in said non-human organism or in the culture medium surrounding said non-human organism.

[0519] A further embodiment of the present invention relates to a process for the production of methionine, which comprises
[0520] (a) increasing or generating the activiy of a homoserine dehydrogenase non-targeted in a non-human organism or a part thereof, preferably a microorganism, a plant cell, a plant or a part thereof, as compared to a corresponding non-transformed wild type non-human organism or a part thereof; and
[0521] (b) growing the non-human organism or a part thereof under conditions which permit the production of methionine or a composition comprising methionine in said non-human organism or in the culture medium surrounding said non-human organism.

[0522] A further embodiment of the present invention relates to a process for the production of methionine, which comprises
[0523] (a) increasing or generating the activiy of a yml084w-protein non-targeted in a non-human organism or a part thereof, preferably a microorganism, a plant cell, a plant or a part thereof, as compared to a corresponding non-transformed wild type non-human organism or a part thereof; and
[0524] (b) growing the non-human organism or a part thereof under conditions which permit the production of methionine or a composition comprising methionine in said non-human organism or in the culture medium surrounding said non-human organism.

[0525] A further embodiment of the present invention relates to a process for the production of methionine, which comprises
[0526] (a) increasing or generating the activiy of a yol160w-protein non-targeted in a non-human organism or a part thereof, preferably a microorganism, a plant cell, a plant or a part thereof, as compared to a corresponding non-transformed wild type non-human organism or a part thereof; and
[0527] (b) growing the non-human organism or a part thereof under conditions which permit the production of methionine or a composition comprising methionine in said non-human organism or in the culture medium surrounding said non-human organism.

[0528] A further embodiment of the present invention relates to a process for the production of methionine, which comprises
[0529] (a) increasing or generating the activiy of a yor392w-protein non-targeted in a non-human organism or a part thereof, preferably a microorganism, a plant cell, a plant or a part thereof, as compared to a corresponding non-transformed wild type non-human organism or a part thereof; and
[0530] (b) growing the non-human organism or a part thereof under conditions which permit the production of methionine or a composition comprising methionine in said non-human organism or in the culture medium surrounding said non-human organism.

[0531] A further embodiment of the present invention relates to a process for the production of methionine, which comprises
[0532] (a) increasing or generating the activity of a polypeptide comprising a polypeptide as depicted in the respective line in column 5 or 8 of Table II, application no. 1, or a homolog or a fragment thereof, a consensus sequence or at least one polypeptide motif as depicted in the respective line in column 8 of Table IV, application no. 1; or
   [0533] increasing or generating the activity of an expression product of one or more nucleic acid molecule(s) comprising a polynucleotide as depicted in the respective line in column 5 or 8 of Table I, application no. 1, preferably the coding region thereof, or a homolog or a fragment thereof;
   [0534] non-targeted in a non-human organism or a part thereof; preferably a microorganism, a plant cell, a plant or a part thereof, as compared to a corresponding non-transformed wild type non-human organism or a part thereof; and
[0535] (b) growing the non-human organism under conditions which permit the production of methionine, or a composition comprising methionine in said non-human organism or in the culture medium surrounding said non-human organism.

[0536] A further embodiment of the present invention relates to a process for the production of methionine, which comprises
[0537] (a) increasing or generating one or more activities selected from the group consisting of 49747384_SOYBEAN-protein in an organelle, preferably in plastids or mitochondria, especially in plastids, of a non-human organism or a part thereof, preferably a microorganism, a plant cell, a plant or a part thereof, as compared to a corresponding non-transformed wild type non-human organism or a part thereof; and
[0538] (b) growing the non-human organism or a part thereof under conditions which permit the production of methionine or a composition comprising methionine in said non-human organism or in the culture medium surrounding said non-human organism.

[0539] A further embodiment of the present invention relates to a process for the production of methionine, which comprises
[0540] (a) increasing or generating one or more activities selected from the group consisting of At1g09680-protein in an organelle, preferably in plastids or mitochondria, especially in plastids, of a non-human organism or a part thereof, preferably a microorganism, a plant cell, a plant or a part thereof, as compared to a corresponding non-transformed wild type non-human organism or a part thereof; and
[0541] (b) growing the non-human organism or a part thereof under conditions which permit the production of methionine or a composition comprising methionine in said non-human organism or in the culture medium surrounding said non-human organism.

[0542] A further embodiment of the present invention relates to a process for the production of methionine, which comprises
[0543] (a) increasing or generating one or more activities selected from the group consisting of DNA-binding protein in an organelle, preferably in plastids or mitochondria, especially in plastids, of a non-human organism or a part thereof, preferably a microorganism, a plant cell, a plant or a part thereof, as compared to a corresponding non-transformed wild type non-human organism or a part thereof; and
[0544] (b) growing the non-human organism or a part thereof under conditions which permit the production of methionine or a composition comprising methionine in said non-human organism or in the culture medium surrounding said non-human organism.

[0545] A further embodiment of the present invention relates to a process for the production of methionine, which comprises
[0546] (a) increasing or generating one or more activities selected from the group consisting of bi-functional aspartokinase/homoserine dehydrogenase in an organelle, preferably in plastids or mitochondria, especially in plastids, of a non-human organism or a part thereof, preferably a microorganism, a plant cell, a plant or a part thereof, as compared to a corresponding non-transformed wild type non-human organism or a part thereof; and
[0547] (b) growing the non-human organism or a part thereof under conditions which permit the production of methionine or a composition comprising methionine in said non-human organism or in the culture medium surrounding said non-human organism.

[0548] A further embodiment of the present invention relates to a process for the production of methionine, which comprises
[0549] (a) increasing or generating one or more activities selected from the group consisting of protein phosphatase in an organelle, preferably in plastids or mitochondria, especially in plastids, of a non-human organism or a part thereof, preferably a microorganism, a plant cell, a plant or a part thereof, as compared to a corresponding non-transformed wild type non-human organism or a part thereof; and
[0550] (b) growing the non-human organism or a part thereof under conditions which permit the production of methionine or a composition comprising methionine in said non-human organism or in the culture medium surrounding said non-human organism.

[0551] A further embodiment of the present invention relates to a process for the production of methionine, which comprises
[0552] (a) increasing or generating one or more activities selected from the group consisting of transcription factor in an organelle, preferably in plastids or mitochondria, especially in plastids, of a non-human organism or a part thereof, preferably a microorganism, a plant cell, a plant or a part thereof, as compared to a corresponding non-transformed wild type non-human organism or a part thereof; and
[0553] (b) growing the non-human organism or a part thereof under conditions which permit the production of methionine or a composition comprising methionine in said non-human organism or in the culture medium surrounding said non-human organism.

[0554] A further embodiment of the present invention relates to a process for the production of methionine, which comprises
[0555] (a) increasing or generating one or more activities selected from the group consisting of protein phosphatase in an organelle, preferably in plastids or mitochondria, especially in plastids, of a non-human organism or a part thereof, preferably a microorganism, a plant cell, a plant or a part thereof, as compared to a corresponding non-transformed wild type non-human organism or a part thereof; and
[0556] (b) growing the non-human organism or a part thereof under conditions which permit the production of methionine or a composition comprising methionine in said non-human organism or in the culture medium surrounding said non-human organism.

[0557] A further embodiment of the present invention relates to a process for the production of methionine, which comprises
[0558] (a) increasing or generating one or more activities selected from the group consisting of At2g45420-protein in an organelle, preferably in plastids or mitochondria, especially in plastids, of a non-human organism or a part thereof, preferably a microorganism, a plant cell, a plant or a part thereof, as compared to a corresponding non-transformed wild type non-human organism or a part thereof; and
[0559] (b) growing the non-human organism or a part thereof under conditions which permit the production of methionine or a composition comprising methionine in said non-human organism or in the culture medium surrounding said non-human organism.

[0560] A further embodiment of the present invention relates to a process for the production of methionine, which comprises
[0561] (a) increasing or generating one or more activities selected from the group consisting of adenosine kinase in an organelle, preferably in plastids or mitochondria, especially in plastids, of a non-human organism or a part thereof, preferably a microorganism, a plant cell, a plant or a part thereof, as compared to a corresponding non-transformed wild type non-human organism or a part thereof; and
[0562] (b) growing the non-human organism or a part thereof under conditions which permit the production of methionine or a composition comprising methionine in said non-human organism or in the culture medium surrounding said non-human organism.

[0563] A further embodiment of the present invention relates to a process for the production of methionine, which comprises
[0564] (a) increasing or generating one or more activities selected from the group consisting of protein kinase in an organelle, preferably in plastids or mitochondria, especially in plastids, of a non-human organism or a part thereof, preferably a microorganism, a plant cell, a plant or a part thereof, as compared to a corresponding non-transformed wild type non-human organism or a part thereof; and
[0565] (b) growing the non-human organism or a part thereof under conditions which permit the production of methionine or a composition comprising methionine in said non-human organism or in the culture medium surrounding said non-human organism.

[0566] A further embodiment of the present invention relates to a process for the production of methionine, which comprises
[0567] (a) increasing or generating one or more activities selected from the group consisting of auxin response factor in an organelle, preferably in plastids or mitochondria, especially in plastids, of a non-human organism or a part thereof, preferably a microorganism, a plant cell, a plant or a part thereof, as compared to a corresponding non-transformed wild type non-human organism or a part thereof; and
[0568] (b) growing the non-human organism or a part thereof under conditions which permit the production of methionine or a composition comprising methionine in said non-human organism or in the culture medium surrounding said non-human organism.

[0569] A further embodiment of the present invention relates to a process for the production of methionine, which comprises
[0570] (a) increasing or generating one or more activities selected from the group consisting of monthiol glutaredoxin in an organelle, preferably in plastids or mitochondria, especially in plastids, of a non-human organism or a part thereof, preferably a microorganism, a plant cell, a plant or a part thereof, as compared to a corresponding non-transformed wild type non-human organism or a part thereof; and
[0571] (b) growing the non-human organism or a part thereof under conditions which permit the production of methionine or a composition comprising methionine in said non-human organism or in the culture medium surrounding said non-human organism.

[0572] A further embodiment of the present invention relates to a process for the production of methionine, which comprises
[0573] (a) increasing or generating one or more activities selected from the group consisting of glutaredoxin in an organelle, preferably in plastids or mitochondria, especially in plastids, of a non-human organism or a part thereof, preferably a microorganism, a plant cell, a plant or a part thereof, as compared to a corresponding non-transformed wild type non-human organism or a part thereof; and
[0574] (b) growing the non-human organism or a part thereof under conditions which permit the production of methionine or a composition comprising methionine in said non-human organism or in the culture medium surrounding said non-human organism.

[0575] A further embodiment of the present invention relates to a process for the production of methionine, which comprises
[0576] (a) increasing or generating one or more activities selected from the group consisting of monothiol glutaredoxin in an organelle, preferably in plastids or mitochondria, especially in plastids, of a non-human organism or a part thereof, preferably a microorganism, a plant cell, a plant or a part thereof, as compared to a corresponding non-transformed wild type non-human organism or a part thereof; and
[0577] (b) growing the non-human organism or a part thereof under conditions which permit the production of methionine or a composition comprising methionine in said non-human organism or in the culture medium surrounding said non-human organism.

[0578] A further embodiment of the present invention relates to a process for the production of methionine, which comprises
[0579] (a) increasing or generating one or more activities selected from the group consisting of monothiol glutaredoxin in an organelle, preferably in plastids or mitochondria, especially in plastids, of a non-human organism or a part thereof, preferably a microorganism, a plant cell, a plant or a part thereof, as compared to a corresponding non-transformed wild type non-human organism or a part thereof; and
[0580] (b) growing the non-human organism or a part thereof under conditions which permit the production of methionine or a composition comprising methionine in said non-human organism or in the culture medium surrounding said non-human organism.

[0581] A further embodiment of the present invention relates to a process for the production of methionine, which comprises
[0582] (a) increasing or generating one or more activities selected from the group consisting of At4g32480-protein in an organelle, preferably in plastids or mitochondria, especially in plastids, of a non-human organism or a part thereof, preferably a microorganism, a plant cell, a plant or a part thereof, as compared to a corresponding non-transformed wild type non-human organism or a part thereof; and
[0583] (b) growing the non-human organism or a part thereof under conditions which permit the production of methionine or a composition comprising methionine in said non-human organism or in the culture medium surrounding said non-human organism.

[0584] A further embodiment of the present invention relates to a process for the production of methionine, which comprises
[0585] (a) increasing or generating one or more activities selected from the group consisting of glutaredoxin in an organelle, preferably in plastids or mitochondria, especially in plastids, of a non-human organism or a part thereof, preferably a microorganism, a plant cell, a plant or a part thereof, as compared to a corresponding non-transformed wild type non-human organism or a part thereof; and
[0586] (b) growing the non-human organism or a part thereof under conditions which permit the production of methionine or a composition comprising methionine in said non-human organism or in the culture medium surrounding said non-human organism.

[0587] A further embodiment of the present invention relates to a process for the production of methionine, which comprises
[0588] (a) increasing or generating one or more activities selected from the group consisting of calcium-dependent protein kinase in an organelle, preferably in plastids or mitochondria, especially in plastids, of a non-human organism or a part thereof, preferably a microorganism, a plant cell, a plant or a part thereof, as compared to a corresponding non-transformed wild type non-human organism or a part thereof; and
[0589] (b) growing the non-human organism or a part thereof under conditions which permit the production of methionine or a composition comprising methionine in said non-human organism or in the culture medium surrounding said non-human organism.

[0590] A further embodiment of the present invention relates to a process for the production of methionine, which comprises
[0591] (a) increasing or generating one or more activities selected from the group consisting of monothiol glutaredoxin in an organelle, preferably in plastids or mitochondria, especially in plastids, of a non-human organism or a part thereof, preferably a microorganism, a plant cell, a plant or a part thereof, as compared to a corresponding non-transformed wild type non-human organism or a part thereof; and
[0592] (b) growing the non-human organism or a part thereof under conditions which permit the production of methionine or a composition comprising methionine in said non-human organism or in the culture medium surrounding said non-human organism.

[0593] A further embodiment of the present invention relates to a process for the production of methionine, which comprises
[0594] (a) increasing or generating one or more activities selected from the group consisting of protein phosphatase in an organelle, preferably in plastids or mitochondria, especially in plastids, of a non-human organism or a part thereof, preferably a microorganism, a plant cell, a plant or a part thereof, as compared to a corresponding non-transformed wild type non-human organism or a part thereof; and
[0595] (b) growing the non-human organism or a part thereof under conditions which permit the production of methionine or a composition comprising methionine in said non-human organism or in the culture medium surrounding said non-human organism.

[0596] A further embodiment of the present invention relates to a process for the production of methionine, which comprises
[0597] (a) increasing or generating one or more activities selected from the group consisting of zinc finger protein in an organelle, preferably in plastids or mitochondria, especially in plastids, of a non-human organism or a part thereof, preferably a microorganism, a plant cell, a plant or a part thereof, as compared to a corresponding non-transformed wild type non-human organism or a part thereof; and
[0598] (b) growing the non-human organism or a part thereof under conditions which permit the production of methionine or a composition comprising methionine in said non-human organism or in the culture medium surrounding said non-human organism.

[0599] A further embodiment of the present invention relates to a process for the production of methionine, which comprises
[0600] (a) increasing or generating one or more activities selected from the group consisting of malic enzyme in an organelle, preferably in plastids or mitochondria, especially in plastids, of a non-human organism or a part thereof, preferably a microorganism, a plant cell, a plant or a part thereof, as compared to a corresponding non-transformed wild type non-human organism or a part thereof; and
[0601] (b) growing the non-human organism or a part thereof under conditions which permit the production of methionine or a composition comprising methionine in said non-human organism or in the culture medium surrounding said non-human organism.

[0602] A further embodiment of the present invention relates to a process for the production of methionine, which comprises
[0603] (a) increasing or generating one or more activities selected from the group consisting of betahydroxylase in an organelle, preferably in plastids or mitochondria, especially in plastids, of a non-human organism or a part thereof, preferably a microorganism, a plant cell, a plant or a part thereof, as compared to a corresponding non-transformed wild type non-human organism or a part thereof; and
[0604] (b) growing the non-human organism or a part thereof under conditions which permit the production of methionine or a composition comprising methionine in said non-human organism or in the culture medium surrounding said non-human organism.

[0605] A further embodiment of the present invention relates to a process for the production of methionine, which comprises
[0606] (a) increasing or generating one or more activities selected from the group consisting of 2-oxoglutarate dehydrogenase E1 subunit in an organelle, preferably in plastids or mitochondria, especially in plastids, of a non-human organism or a part thereof, preferably a microorganism, a plant cell, a plant or a part thereof, as compared to a corresponding non-transformed wild type non-human organism or a part thereof; and
[0607] (b) growing the non-human organism or a part thereof under conditions which permit the production of methionine or a composition comprising methionine in said non-human organism or in the culture medium surrounding said non-human organism.

[0608] A further embodiment of the present invention relates to a process for the production of methionine, which comprises
[0609] (a) increasing or generating one or more activities selected from the group consisting of homoserine dehydrogenase in an organelle, preferably in plastids or mitochondria, especially in plastids, of a non-human organism or a part thereof, preferably a microorganism, a plant cell, a plant or a part thereof, as compared to a corresponding non-transformed wild type non-human organism or a part thereof; and
[0610] (b) growing the non-human organism or a part thereof under conditions which permit the production of methionine or a composition comprising methionine in said non-human organism or in the culture medium surrounding said non-human organism.

[0611] A further embodiment of the present invention relates to a process for the production of methionine, which comprises
[0612] (a) increasing or generating one or more activities selected from the group consisting of hydrolase in an organelle, preferably in plastids or mitochondria, especially in plastids, of a non-human organism or a part thereof, preferably a microorganism, a plant cell, a plant or a part thereof, as compared to a corresponding non-transformed wild type non-human organism or a part thereof; and
[0613] (b) growing the non-human organism or a part thereof under conditions which permit the production of methionine or a composition comprising methionine in said non-human organism or in the culture medium surrounding said non-human organism.

[0614] A further embodiment of the present invention relates to a process for the production of methionine, which comprises
[0615] (a) increasing or generating one or more activities selected from the group consisting of peptidyl-prolyl cis-trans isomerase in an organelle, preferably in plastids or mitochondria, especially in plastids, of a non-human organism or a part thereof, preferably a microorganism, a plant cell, a plant or a part thereof, as compared to a corresponding non-transformed wild type non-human organism or a part thereof; and
[0616] (b) growing the non-human organism or a part thereof under conditions which permit the production of methionine or a composition comprising methionine in said non-human organism or in the culture medium surrounding said non-human organism.

[0617] A further embodiment of the present invention relates to a process for the production of methionine, which comprises
[0618] (a) increasing or generating one or more activities selected from the group consisting of b0012-protein in an organelle, preferably in plastids or mitochondria, especially in plastids, of a non-human organism or a part thereof, preferably a microorganism, a plant cell, a plant or a part thereof, as compared to a corresponding non-transformed wild type non-human organism or a part thereof; and
[0619] (b) growing the non-human organism or a part thereof under conditions which permit the production of methionine or a composition comprising methionine in said non-human organism or in the culture medium surrounding said non-human organism.

[0620] A further embodiment of the present invention relates to a process for the production of methionine, which comprises
[0621] (a) increasing or generating one or more activities selected from the group consisting of acetolactate synthase small subunit in an organelle, preferably in plastids or mitochondria, especially in plastids, of a non-human organism or a part thereof, preferably a microorganism, a plant cell, a plant or a part thereof, as compared to a corresponding non-transformed wild type non-human organism or a part thereof; and
[0622] (b) growing the non-human organism or a part thereof under conditions which permit the production of methionine or a composition comprising methionine in said non-human organism or in the culture medium surrounding said non-human organism.

[0623] A further embodiment of the present invention relates to a process for the production of methionine, which comprises
[0624] (a) increasing or generating one or more activities selected from the group consisting of serine protease in an organelle, preferably in plastids or mitochondria, especially in plastids, of a non-human organism or a part thereof, preferably a microorganism, a plant cell, a plant or a part thereof, as compared to a corresponding non-transformed wild type non-human organism or a part thereof; and
[0625] (b) growing the non-human organism or a part thereof under conditions which permit the production of methionine or a composition comprising methionine in said non-human organism or in the culture medium surrounding said non-human organism.

[0626] A further embodiment of the present invention relates to a process for the production of methionine, which comprises
[0627] (a) increasing or generating one or more activities selected from the group consisting of 2,3-dihydroxyphenylpropionate 1,2-dioxygenase in an organelle, preferably in plastids or mitochondria, especially in plastids, of a non-human organism or a part thereof, preferably a microorganism, a plant cell, a plant or a part thereof, as compared to a corresponding non-transformed wild type non-human organism or a part thereof; and
[0628] (b) growing the non-human organism or a part thereof under conditions which permit the production of methionine or a composition comprising methionine in said non-human organism or in the culture medium surrounding said non-human organism.

[0629] A further embodiment of the present invention relates to a process for the production of methionine, which comprises
[0630] (a) increasing or generating one or more activities selected from the group consisting of ATP-binding component of a transport system in an organelle, preferably in plastids or mitochondria, especially in plastids, of a non-human organism or a part thereof, preferably a microorganism, a plant cell, a plant or a part thereof, as compared to a corresponding non-transformed wild type non-human organism or a part thereof; and
[0631] (b) growing the non-human organism or a part thereof under conditions which permit the production of methionine or a composition comprising methionine in said non-human organism or in the culture medium surrounding said non-human organism.

[0632] A further embodiment of the present invention relates to a process for the production of methionine, which comprises
[0633] (a) increasing or generating one or more activities selected from the group consisting of membrane transport protein in an organelle, preferably in plastids or mitochondria, especially in plastids, of a non-human organism or a part thereof, preferably a microorganism, a plant cell, a plant or a part thereof, as compared to a corresponding non-transformed wild type non-human organism or a part thereof; and
[0634] (b) growing the non-human organism or a part thereof under conditions which permit the production of methionine or a composition comprising methionine in said non-human organism or in the culture medium surrounding said non-human organism.

[0635] A further embodiment of the present invention relates to a process for the production of methionine, which comprises
[0636] (a) increasing or generating one or more activities selected from the group consisting of threonine aldolase in an organelle, preferably in plastids or mitochondria, especially in plastids, of a non-human organism or a part thereof, preferably a microorganism, a plant cell, a plant or a part thereof, as compared to a corresponding non-transformed wild type non-human organism or a part thereof; and
[0637] (b) growing the non-human organism or a part thereof under conditions which permit the production of methionine or a composition comprising methionine in said non-human organism or in the culture medium surrounding said non-human organism.

[0638] A further embodiment of the present invention relates to a process for the production of methionine, which comprises
[0639] (a) increasing or generating one or more activities selected from the group consisting of major facilitator superfamily transporter protein in an organelle, preferably in plastids or mitochondria, especially in plastids, of a non-human organism or a part thereof, preferably a microorganism, a plant cell, a plant or a part thereof, as compared to a corresponding non-transformed wild type non-human organism or a part thereof; and
[0640] (b) growing the non-human organism or a part thereof under conditions which permit the production of methionine or a composition comprising methionine in said non-human organism or in the culture medium surrounding said non-human organism.

[0641] A further embodiment of the present invention relates to a process for the production of methionine, which comprises
[0642] (a) increasing or generating one or more activities selected from the group consisting of b1003-protein in an organelle, preferably in plastids or mitochondria, especially in plastids, of a non-human organism or a part thereof, preferably a microorganism, a plant cell, a plant or a part thereof, as compared to a corresponding non-transformed wild type non-human organism or a part thereof; and
[0643] (b) growing the non-human organism or a part thereof under conditions which permit the production of methionine or a composition comprising methionine in said non-human organism or in the culture medium surrounding said non-human organism.

[0644] A further embodiment of the present invention relates to a process for the production of methionine, which comprises
[0645] (a) increasing or generating one or more activities selected from the group consisting of b1522-protein in an organelle, preferably in plastids or mitochondria, especially in plastids, of a non-human organism or a part thereof, preferably a microorganism, a plant cell, a plant or a part thereof, as compared to a corresponding non-transformed wild type non-human organism or a part thereof; and
[0646] (b) growing the non-human organism or a part thereof under conditions which permit the production of methionine or a composition comprising methionine in said non-human organism or in the culture medium surrounding said non-human organism.

[0647] A further embodiment of the present invention relates to a process for the production of methionine, which comprises
[0648] (a) increasing or generating one or more activities selected from the group consisting of transport protein in an organelle, preferably in plastids or mitochondria, especially in plastids, of a non-human organism or a part thereof, preferably a microorganism, a plant cell, a plant or a part thereof, as compared to a corresponding non-transformed wild type non-human organism or a part thereof; and
[0649] (b) growing the non-human organism or a part thereof under conditions which permit the production of methionine or a composition comprising methionine in said non-human organism or in the culture medium surrounding said non-human organism.

[0650] A further embodiment of the present invention relates to a process for the production of methionine, which comprises
[0651] (a) increasing or generating one or more activities selected from the group consisting of L-serine dehydratase in an organelle, preferably in plastids or mitochondria, especially in plastids, of a non-human organism or a part thereof, preferably a microorganism, a plant cell, a plant or a part thereof, as compared to a corresponding non-transformed wild type non-human organism or a part thereof; and
[0652] (b) growing the non-human organism or a part thereof under conditions which permit the production of methionine or a composition comprising methionine in said non-human organism or in the culture medium surrounding said non-human organism.

[0653] A further embodiment of the present invention relates to a process for the production of methionine, which comprises
[0654] (a) increasing or generating one or more activities selected from the group consisting of serine/threonine-protein phosphatase in an organelle, preferably in plastids or mitochondria, especially in plastids, of a non-human organism or a part thereof, preferably a microorganism, a plant cell, a plant or a part thereof, as compared to a corresponding non-transformed wild type non-human organism or a part thereof; and
[0655] (b) growing the non-human organism or a part thereof under conditions which permit the production of methionine or a composition comprising methionine in said non-human organism or in the culture medium surrounding said non-human organism.

[0656] A further embodiment of the present invention relates to a process for the production of methionine, which comprises
[0657] (a) increasing or generating one or more activities selected from the group consisting of pyruvate kinase in an organelle, preferably in plastids or mitochondria, especially in plastids, of a non-human organism or a part thereof, preferably a microorganism, a plant cell, a plant or a part thereof, as compared to a corresponding non-transformed wild type non-human organism or a part thereof; and
[0658] (b) growing the non-human organism or a part thereof under conditions which permit the production of methionine or a composition comprising methionine in said non-human organism or in the culture medium surrounding said non-human organism.

[0659] A further embodiment of the present invention relates to a process for the production of methionine, which comprises
[0660] (a) increasing or generating one or more activities selected from the group consisting of b2032-protein in an organelle, preferably in plastids or mitochondria, especially in plastids, of a non-human organism or a part thereof, preferably a microorganism, a plant cell, a plant or a part thereof, as compared to a corresponding non-transformed wild type non-human organism or a part thereof; and
[0661] (b) growing the non-human organism or a part thereof under conditions which permit the production of methionine or a composition comprising methionine in said non-human organism or in the culture medium surrounding said non-human organism.

[0662] A further embodiment of the present invention relates to a process for the production of methionine, which comprises
[0663] (a) increasing or generating one or more activities selected from the group consisting of uridine/cytidine kinase in an organelle, preferably in plastids or mitochondria, especially in plastids, of a non-human organism or a part thereof, preferably a microorganism, a plant cell, a plant or a part thereof, as compared to a corresponding non-transformed wild type non-human organism or a part thereof; and
[0664] (b) growing the non-human organism or a part thereof under conditions which permit the production of methionine or a composition comprising methionine in said non-human organism or in the culture medium surrounding said non-human organism.

[0665] A further embodiment of the present invention relates to a process for the production of methionine, which comprises
[0666] (a) increasing or generating one or more activities selected from the group consisting of b2345-protein in an organelle, preferably in plastids or mitochondria, especially in plastids, of a non-human organism or a part thereof, preferably a microorganism, a plant cell, a plant or a part thereof, as compared to a corresponding non-transformed wild type non-human organism or a part thereof; and
[0667] (b) growing the non-human organism or a part thereof under conditions which permit the production of methionine or a composition comprising methionine in said non-human organism or in the culture medium surrounding said non-human organism.

[0668] A further embodiment of the present invention relates to a process for the production of methionine, which comprises
[0669] (a) increasing or generating one or more activities selected from the group consisting of b2513-protein in an organelle, preferably in plastids or mitochondria, especially in plastids, of a non-human organism or a part thereof, preferably a microorganism, a plant cell, a plant or a part thereof, as compared to a corresponding non-transformed wild type non-human organism or a part thereof; and
[0670] (b) growing the non-human organism or a part thereof under conditions which permit the production of methionine or a composition comprising methionine in said non-human organism or in the culture medium surrounding said non-human organism.

[0671] A further embodiment of the present invention relates to a process for the production of methionine, which comprises
[0672] (a) increasing or generating one or more activities selected from the group consisting of b2673-protein in an organelle, preferably in plastids or mitochondria, especially in plastids, of a non-human organism or a part thereof, preferably a microorganism, a plant cell, a plant or a part thereof, as compared to a corresponding non-transformed wild type non-human organism or a part thereof; and
[0673] (b) growing the non-human organism or a part thereof under conditions which permit the production of methionine or a composition comprising methionine in said non-human organism or in the culture medium surrounding said non-human organism.

[0674] A further embodiment of the present invention relates to a process for the production of methionine, which comprises
[0675] (a) increasing or generating one or more activities selected from the group consisting of arginine exporter protein in an organelle, preferably in plastids or mitochondria, especially in plastids, of a non-human organism or a part thereof, preferably a microorganism, a plant cell, a plant or a part thereof, as compared to a corresponding non-transformed wild type non-human organism or a part thereof; and
[0676] (b) growing the non-human organism or a part thereof under conditions which permit the production of methionine or a composition comprising methionine in said non-human organism or in the culture medium surrounding said non-human organism.

[0677] A further embodiment of the present invention relates to a process for the production of methionine, which comprises
[0678] (a) increasing or generating one or more activities selected from the group consisting of b3246-protein in an organelle, preferably in plastids or mitochondria, especially in plastids, of a non-human organism or a part thereof, preferably a microorganism, a plant cell, a plant or a part thereof, as compared to a corresponding non-transformed wild type non-human organism or a part thereof; and
[0679] (b) growing the non-human organism or a part thereof under conditions which permit the production of methionine or a composition comprising methionine in said non-human organism or in the culture medium surrounding said non-human organism.

[0680] A further embodiment of the present invention relates to a process for the production of methionine, which comprises
[0681] (a) increasing or generating one or more activities selected from the group consisting of acetyl CoA carboxylase in an organelle, preferably in plastids or mitochondria, especially in plastids, of a non-human organism or a part thereof, preferably a microorganism, a plant cell, a plant or a part thereof, as compared to a corresponding non-transformed wild type non-human organism or a part thereof; and
[0682] (b) growing the non-human organism or a part thereof under conditions which permit the production of methionine or a composition comprising methionine in said non-human organism or in the culture medium surrounding said non-human organism.

[0683] A further embodiment of the present invention relates to a process for the production of methionine, which comprises
[0684] (a) increasing or generating one or more activities selected from the group consisting of b3346-protein in an organelle, preferably in plastids or mitochondria, especially in plastids, of a non-human organism or a part thereof, preferably a microorganism, a plant cell, a plant or a part thereof, as compared to a corresponding non-transformed wild type non-human organism or a part thereof; and
[0685] (b) growing the non-human organism or a part thereof under conditions which permit the production of methionine or a composition comprising methionine in said non-human organism or in the culture medium surrounding said non-human organism.

[0686] A further embodiment of the present invention relates to a process for the production of methionine, which comprises
[0687] (a) increasing or generating one or more activities selected from the group consisting of valine-pyruvate transaminase in an organelle, preferably in plastids or mitochondria, especially in plastids, of a non-human organism or a part thereof, preferably a microorganism, a plant cell, a plant or a part thereof, as compared to a corresponding non-transformed wild type non-human organism or a part thereof; and
[0688] (b) growing the non-human organism or a part thereof under conditions which permit the production of methionine or a composition comprising methionine in said non-human organism or in the culture medium surrounding said non-human organism.

[0689] A further embodiment of the present invention relates to a process for the production of methionine, which comprises
[0690] (a) increasing or generating one or more activities selected from the group consisting of dihydroxyacid dehydratase in an organelle, preferably in plastids or mitochondria, especially in plastids, of a non-human organism or a part thereof, preferably a microorganism, a plant cell, a plant or a part thereof, as compared to a corresponding non-transformed wild type non-human organism or a part thereof; and
[0691] (b) growing the non-human organism or a part thereof under conditions which permit the production of methionine or a composition comprising methionine in said non-human organism or in the culture medium surrounding said non-human organism.

[0692] A further embodiment of the present invention relates to a process for the production of methionine, which comprises
[0693] (a) increasing or generating one or more activities selected from the group consisting of b3817-protein in an organelle, preferably in plastids or mitochondria, especially in plastids, of a non-human organism or a part thereof, preferably a microorganism, a plant cell, a plant or a part thereof, as compared to a corresponding non-transformed wild type non-human organism or a part thereof; and
[0694] (b) growing the non-human organism or a part thereof under conditions which permit the production of methionine or a composition comprising methionine in said non-human organism or in the culture medium surrounding said non-human organism.

[0695] A further embodiment of the present invention relates to a process for the production of methionine, which comprises
[0696] (a) increasing or generating one or more activities selected from the group consisting of threonine efflux protein in an organelle, preferably in plastids or mitochondria, especially in plastids, of a non-human organism or a part thereof, preferably a microorganism, a plant cell, a plant or a part thereof, as compared to a corresponding non-transformed wild type non-human organism or a part thereof; and
[0697] (b) growing the non-human organism or a part thereof under conditions which permit the production of methionine or a composition comprising methionine in said non-human organism or in the culture medium surrounding said non-human organism.

[0698] A further embodiment of the present invention relates to a process for the production of methionine, which comprises
[0699] (a) increasing or generating one or more activities selected from the group consisting of b4029-protein in an organelle, preferably in plastids or mitochondria, especially in plastids, of a non-human organism or a part thereof, preferably a microorganism, a plant cell, a plant or a part thereof, as compared to a corresponding non-transformed wild type non-human organism or a part thereof; and
[0700] (b) growing the non-human organism or a part thereof under conditions which permit the production of methionine or a composition comprising methionine in said non-human organism or in the culture medium surrounding said non-human organism.

[0701] A further embodiment of the present invention relates to a process for the production of methionine, which comprises
[0702] (a) increasing or generating one or more activities selected from the group consisting of glutaredoxin in an organelle, preferably in plastids or mitochondria, especially in plastids, of a non-human organism or a part thereof, preferably a microorganism, a plant cell, a plant or a part thereof, as compared to a corresponding non-transformed wild type non-human organism or a part thereof; and
[0703] (b) growing the non-human organism or a part thereof under conditions which permit the production of methionine or a composition comprising methionine in said non-human organism or in the culture medium surrounding said non-human organism.

[0704] A further embodiment of the present invention relates to a process for the production of methionine, which comprises
[0705] (a) increasing or generating one or more activities selected from the group consisting of 5′-nucleotidase in an organelle, preferably in plastids or mitochondria, especially in plastids, of a non-human organism or a part thereof, preferably a microorganism, a plant cell, a plant or a part thereof, as compared to a corresponding non-transformed wild type non-human organism or a part thereof; and
[0706] (b) growing the non-human organism or a part thereof under conditions which permit the production of methionine or a composition comprising methionine in said non-human organism or in the culture medium surrounding said non-human organism.

[0707] A further embodiment of the present invention relates to a process for the production of methionine, which comprises
[0708] (a) increasing or generating one or more activities selected from the group consisting of glutathione S-transferase in an organelle, preferably in plastids or mitochondria, especially in plastids, of a non-human organism or a part thereof, preferably a microorganism, a plant cell, a plant or a part thereof, as compared to a corresponding non-transformed wild type non-human organism or a part thereof; and
[0709] (b) growing the non-human organism or a part thereof under conditions which permit the production of methionine or a composition comprising methionine in said non-human organism or in the culture medium surrounding said non-human organism.

[0710] A further embodiment of the present invention relates to a process for the production of methionine, which comprises
[0711] (a) increasing or generating one or more activities selected from the group consisting of coproporphyrinogen III oxidase in an organelle, preferably in plastids or mitochondria, especially in plastids, of a non-human organism or a part thereof, preferably a microorganism, a plant cell, a plant or a part thereof, as compared to a corresponding non-transformed wild type non-human organism or a part thereof; and
[0712] (b) growing the non-human organism or a part thereof under conditions which permit the production of methionine or a composition comprising methionine in said non-human organism or in the culture medium surrounding said non-human organism.

[0713] A further embodiment of the present invention relates to a process for the production of methionine, which comprises
[0714] (a) increasing or generating one or more activities selected from the group consisting of oxidoreductase in an organelle, preferably in plastids or mitochondria, especially in plastids, of a non-human organism or a part thereof, preferably a microorganism, a plant cell, a plant or a part thereof, as compared to a corresponding non-transformed wild type non-human organism or a part thereof; and
[0715] (b) growing the non-human organism or a part thereof under conditions which permit the production of methionine or a composition comprising methionine in said non-human organism or in the culture medium surrounding said non-human organism.

[0716] A further embodiment of the present invention relates to a process for the production of methionine, which comprises
[0717] (a) increasing or generating one or more activities selected from the group consisting of oxidoreductase in an organelle, preferably in plastids or mitochondria, especially in plastids, of a non-human organism or a part thereof, preferably a microorganism, a plant cell, a plant or a part thereof, as compared to a corresponding non-transformed wild type non-human organism or a part thereof; and
[0718] (b) growing the non-human organism or a part thereof under conditions which permit the production of methionine or a composition comprising methionine in said non-human organism or in the culture medium surrounding said non-human organism.

[0719] A further embodiment of the present invention relates to a process for the production of methionine, which comprises
[0720] (a) increasing or generating one or more activities selected from the group consisting of Photosystem I reaction center subunit XI in an organelle, preferably in plastids or mitochondria, especially in plastids, of a non-human organism or a part thereof, preferably a microorganism, a plant cell, a plant or a part thereof, as compared to a corresponding non-transformed wild type non-human organism or a part thereof; and
[0721] (b) growing the non-human organism or a part thereof under conditions which permit the production of methionine or a composition comprising methionine in said non-human organism or in the culture medium surrounding said non-human organism.

[0722] A further embodiment of the present invention relates to a process for the production of methionine, which comprises
[0723] (a) increasing or generating one or more activities selected from the group consisting of phosphoadenosine phosphosulfate reductase in an organelle, preferably in plastids or mitochondria, especially in plastids, of a non-human organism or a part thereof, preferably a microorganism, a plant cell, a plant or a part thereof, as compared to a corresponding non-transformed wild type non-human organism or a part thereof; and
[0724] (b) growing the non-human organism or a part thereof under conditions which permit the production of methionine or a composition comprising methionine in said non-human organism or in the culture medium surrounding said non-human organism.

[0725] A further embodiment of the present invention relates to a process for the production of methionine, which comprises
[0726] (a) increasing or generating one or more activities selected from the group consisting of threonine dehydratase in an organelle, preferably in plastids or mitochondria, especially in plastids, of a non-human organism or a part thereof, preferably a microorganism, a plant cell, a plant or a part thereof, as compared to a corresponding non-transformed wild type non-human organism or a part thereof; and
[0727] (b) growing the non-human organism or a part thereof under conditions which permit the production of methionine or a composition comprising methionine in said non-human organism or in the culture medium surrounding said non-human organism.

[0728] A further embodiment of the present invention relates to a process for the production of methionine, which comprises
[0729] (a) increasing or generating one or more activities selected from the group consisting of Sec-independent protein translocase subunit in an organelle, preferably in plastids or mitochondria, especially in plastids, of a non-human organism or a part thereof, preferably a microorganism, a plant cell, a plant or a part thereof, as compared to a corresponding non-transformed wild type non-human organism or a part thereof; and
[0730] (b) growing the non-human organism or a part thereof under conditions which permit the production of methionine or a composition comprising methionine in said non-human organism or in the culture medium surrounding said non-human organism.

[0731] A further embodiment of the present invention relates to a process for the production of methionine, which comprises
[0732] (a) increasing or generating one or more activities selected from the group consisting of homocitrate synthase in an organelle, preferably in plastids or mitochondria, especially in plastids, of a non-human organism or a part thereof, preferably a microorganism, a plant cell, a plant or a part thereof, as compared to a corresponding non-transformed wild type non-human organism or a part thereof; and
[0733] (b) growing the non-human organism or a part thereof under conditions which permit the production of methionine or a composition comprising methionine in said non-human organism or in the culture medium surrounding said non-human organism.

[0734] A further embodiment of the present invention relates to a process for the production of methionine, which comprises
[0735] (a) increasing or generating one or more activities selected from the group consisting of cystathionine-lyase in an organelle, preferably in plastids or mitochondria, especially in plastids, of a non-human organism or a part thereof, preferably a microorganism, a plant cell, a plant or a part thereof, as compared to a corresponding non-transformed wild type non-human organism or a part thereof; and
[0736] (b) growing the non-human organism or a part thereof under conditions which permit the production of methionine or a composition comprising methionine in said non-human organism or in the culture medium surrounding said non-human organism.

[0737] A further embodiment of the present invention relates to a process for the production of methionine, which comprises
[0738] (a) increasing or generating one or more activities selected from the group consisting of cyclin in an organelle, preferably in plastids or mitochondria, especially in plastids, of a non-human organism or a part thereof, preferably a microorganism, a plant cell, a plant or a part thereof, as compared to a corresponding non-transformed wild type non-human organism or a part thereof; and
[0739] (b) growing the non-human organism or a part thereof under conditions which permit the production of methionine or a composition comprising methionine in said non-human organism or in the culture medium surrounding said non-human organism.

[0740] A further embodiment of the present invention relates to a process for the production of methionine, which comprises
[0741] (a) increasing or generating one or more activities selected from the group consisting of protein kinase in an organelle, preferably in plastids or mitochondria, especially in plastids, of a non-human organism or a part thereof, preferably a microorganism, a plant cell, a plant or a part thereof, as compared to a corresponding non-transformed wild type non-human organism or a part thereof; and
[0742] (b) growing the non-human organism or a part thereof under conditions which permit the production of methionine or a composition comprising methionine in said non-human organism or in the culture medium surrounding said non-human organism.

[0743] A further embodiment of the present invention relates to a process for the production of methionine, which comprises
[0744] (a) increasing or generating one or more activities selected from the group consisting of protein kinase in an organelle, preferably in plastids or mitochondria, especially in plastids, of a non-human organism or a part thereof, preferably a microorganism, a plant cell, a plant or a part thereof, as compared to a corresponding non-transformed wild type non-human organism or a part thereof; and
[0745] (b) growing the non-human organism or a part thereof under conditions which permit the production of methionine or a composition comprising methionine in said non-human organism or in the culture medium surrounding said non-human organism.

[0746] A further embodiment of the present invention relates to a process for the production of methionine, which comprises
[0747] (a) increasing or generating one or more activities selected from the group consisting of F-box protein in an organelle, preferably in plastids or mitochondria, especially in plastids, of a non-human organism or a part thereof, preferably a microorganism, a plant cell, a plant or a part thereof, as compared to a corresponding non-transformed wild type non-human organism or a part thereof; and
[0748] (b) growing the non-human organism or a part thereof under conditions which permit the production of methionine or a composition comprising methionine in said non-human organism or in the culture medium surrounding said non-human organism.

[0749] A further embodiment of the present invention relates to a process for the production of methionine, which comprises
[0750] (a) increasing or generating one or more activities selected from the group consisting of yhl013c-protein in an organelle, preferably in plastids or mitochondria, especially in plastids, of a non-human organism or a part thereof, preferably a microorganism, a plant cell, a plant or a part thereof, as compared to a corresponding non-transformed wild type non-human organism or a part thereof; and
[0751] (b) growing the non-human organism or a part thereof under conditions which permit the production of methionine or a composition comprising methionine in said non-human organism or in the culture medium surrounding said non-human organism.

[0752] A further embodiment of the present invention relates to a process for the production of methionine, which comprises
[0753] (a) increasing or generating one or more activities selected from the group consisting of (DL)-glycerol-3-phosphatase in an organelle, preferably in plastids or mitochondria, especially in plastids, of a non-human organism or a part thereof, preferably a microorganism, a plant cell, a plant or a part thereof, as compared to a corresponding non-transformed wild type non-human organism or a part thereof; and
[0754] (b) growing the non-human organism or a part thereof under conditions which permit the production of methionine or a composition comprising methionine in said non-human organism or in the culture medium surrounding said non-human organism.

[0755] A further embodiment of the present invention relates to a process for the production of methionine, which comprises
[0756] (a) increasing or generating one or more activities selected from the group consisting of glycogenin in an organelle, preferably in plastids or mitochondria, especially in plastids, of a non-human organism or a part thereof, preferably a microorganism, a plant cell, a plant or a part thereof, as compared to a corresponding non-transformed wild type non-human organism or a part thereof; and
[0757] (b) growing the non-human organism or a part thereof under conditions which permit the production of methionine or a composition comprising methionine in said non-human organism or in the culture medium surrounding said non-human organism.

[0758] A further embodiment of the present invention relates to a process for the production of methionine, which comprises
[0759] (a) increasing or generating one or more activities selected from the group consisting of cystathionine gamma-synthase in an organelle, preferably in plastids or mitochondria, especially in plastids, of a non-human organism or a part thereof, preferably a microorganism, a plant cell, a plant or a part thereof, as compared to a corresponding non-transformed wild type non-human organism or a part thereof; and
[0760] (b) growing the non-human organism or a part thereof under conditions which permit the production of methionine or a composition comprising methionine in said non-human organism or in the culture medium surrounding said non-human organism.

[0761] A further embodiment of the present invention relates to a process for the production of methionine, which comprises
[0762] (a) increasing or generating one or more activities selected from the group consisting of homoserine dehydrogenase in an organelle, preferably in plastids or mitochondria, especially in plastids, of a non-human organism or a part thereof, preferably a microorganism, a plant cell, a plant or a part thereof, as compared to a corresponding non-transformed wild type non-human organism or a part thereof; and
[0763] (b) growing the non-human organism or a part thereof under conditions which permit the production of methionine or a composition comprising methionine in said non-human organism or in the culture medium surrounding said non-human organism.

[0764] A further embodiment of the present invention relates to a process for the production of methionine, which comprises
[0765] (a) increasing or generating one or more activities selected from the group consisting of yml084w-protein in an organelle, preferably in plastids or mitochondria, especially in plastids, of a non-human organism or a part thereof, preferably a microorganism, a plant cell, a plant or a part thereof, as compared to a corresponding non-transformed wild type non-human organism or a part thereof; and
[0766] (b) growing the non-human organism or a part thereof under conditions which permit the production of methionine or a composition comprising methionine in said non-human organism or in the culture medium surrounding said non-human organism.

[0767] A further embodiment of the present invention relates to a process for the production of methionine, which comprises
[0768] (a) increasing or generating one or more activities selected from the group consisting of yol160w-protein in an organelle, preferably in plastids or mitochondria, especially in plastids, of a non-human organism or a part thereof, preferably a microorganism, a plant cell, a plant or a part thereof, as compared to a corresponding non-transformed wild type non-human organism or a part thereof; and
[0769] (b) growing the non-human organism or a part thereof under conditions which permit the production of methionine or a composition comprising methionine in said non-human organism or in the culture medium surrounding said non-human organism.

[0770] A further embodiment of the present invention relates to a process for the production of methionine, which comprises
[0771] (a) increasing or generating one or more activities selected from the group consisting of yor392w-protein in an organelle, preferably in plastids or mitochondria, especially in plastids, of a non-human organism or a part thereof, preferably a microorganism, a plant cell, a plant or a part thereof, as compared to a corresponding non-transformed wild type non-human organism or a part thereof; and
[0772] (b) growing the non-human organism or a part thereof under conditions which permit the production of methionine or a composition comprising methionine in said non-human organism or in the culture medium surrounding said non-human organism.

[0773] A further embodiment of the present invention relates to a process for the production of methionine, which comprises
[0774] (a1) increasing or generating the activity of a polypeptide comprising a polypeptide as depicted in the respective line in column 5 or 8 of Table II, application no. 1, or a homolog or fragment thereof, a consensus sequence or at least one polypeptide motif as depicted in column 8 of Table IV, application no. 1; or
   [0775] increasing or generating the activity of an expression product of one or more nucleic acid molecule(s) comprising a polynucleotide as depicted in the respective line in column 5 or 8 of Table I, application no. 1, preferably the coding region thereof, or a homolog or a fragment thereof;
   [0776] in an organelle, preferably in plastids or mitochondria, especially in plastids, in a non-human organism or a part thereof; preferably a microorganism, a plant cell, a plant or a part thereof, as compared to a corresponding non-transformed wild type non-human organism or a part thereof; or
[0777] (a2) increasing or generating the activity of a polypeptide comprising a polypeptide as depicted in the respective line in column 5 or 8 of Table II, application no. 1, or a homolog or a fragment thereof, a consensus sequence or at least one polypeptide motif as depicted in the respective line in column 8 of Table IV, application no. 1, which is joined to a transit peptide; or
   [0778] increasing or generating the activity of an expression product of one or more nucleic acid molecule(s) comprising a polynucleotide as depicted in the respective line in column 5 or 8 of Table I, application no. 1, preferably the coding region thereof, or a homolog or a fragment thereof, which is joined to a nucleic acid sequence encoding an organelle localization sequence, preferably a plastid or a mitochondrion locatization sequence, especially a plastid localization sequence;
   [0779] in a non-human organism or a part thereof; preferably a microorganism, a plant cell, a plant or a part thereof, as compared to a corresponding non-transformed wild type non-human organism or a part thereof; or
[0780] (a3) increasing or generating the activity of a polypeptide comprising a polypeptide as depicted in the respective line in column 5 or 8 of Table II, application no. 1, or a homolog or a fragment thereof, a consensus sequence or at least one polypeptide motif as depicted in the respective line in column 8 of Table IV, application no. 1; or
   [0781] increasing or generating the activity of an expression product of one or more nucleic acid molecule(s) comprising a polynucleotide as depicted in the respective line in column 5 or 8 of Table I, application no. 1, preferably the coding region thereof, or a homolog or a fragment thereof;
   [0782] in an organelle, preferably in plastids or imitochondra, especially in plastids, in a non-human organism or a part thereof; preferably a microorganism, a plant cell, a plant or a part thereof, through transformation of the organelle, as compared to a corresponding non-transformed wild type non-human organism or a part thereof;
[0783] and
[0784] (b) growing the non-human organism under conditions which permit the production of methionine, or a composition comprising methionine in said non-human organism or in the culture medium surrounding said non-human organism.

[0785] Accordingly, the present invention relates to a process for the production of methionine, which comprises
[0786] (a) increasing or generating the activity of a 49747384_SOYBEAN-protein in the cytosol of a cell of a non-human organism or a part thereof, preferably a microorganism, a plant cell, a plant or a part thereof, as compared to a corresponding non-transformed wild type non-human organism or a part thereof; and
[0787] (b) growing the non-human organism or a part thereof under conditions which permit the production of methionine or a composition comprising methionine in said non-human organism or in the culture medium surrounding said non-human organism.

[0788] Accordingly, the present invention relates to a process for the production of methionine, which comprises
[0789] (a) increasing or generating the activity of a At1g09680-protein in the cytosol of a cell of a non-human organism or a part thereof, preferably a microorganism, a plant cell, a plant or a part thereof, as compared to a corresponding non-transformed wild type non-human organism or a part thereof; and
[0790] (b) growing the non-human organism or a part thereof under conditions which permit the production of methionine or a composition comprising methionine in said non-human organism or in the culture medium surrounding said non-human organism.

[0791] Accordingly, the present invention relates to a process for the production of methionine, which comprises
[0792] (a) increasing or generating the activity of a DNA-binding protein in the cytosol of a cell of a non-human organism or a part thereof, preferably a microorganism, a plant cell, a plant or a part thereof, as compared to a corresponding non-transformed wild type non-human organism or a part thereof; and
[0793] (b) growing the non-human organism or a part thereof under conditions which permit the production of methionine or a composition comprising methionine in said non-human organism or in the culture medium surrounding said non-human organism.

[0794] Accordingly, the present invention relates to a process for the production of methionine, which comprises
[0795] (a) increasing or generating the activity of a bifunctional aspartokinase/homoserine dehydrogenase in the cytosol of a cell of a non-human organism or a part thereof, preferably a microorganism, a plant cell, a plant or a part thereof, as compared to a corresponding non-transformed wild type non-human organism or a part thereof; and
[0796] (b) growing the non-human organism or a part thereof under conditions which permit the production of methionine or a composition comprising methionine in said non-human organism or in the culture medium surrounding said non-human organism.

[0797] Accordingly, the present invention relates to a process for the production of methionine, which comprises
[0798] (a) increasing or generating the activity of a protein phosphatase in the cytosol of a cell of a non-human organism or a part thereof, preferably a microorganism, a plant cell, a plant or a part thereof, as compared to a corresponding non-transformed wild type non-human organism or a part thereof; and
[0799] (b) growing the non-human organism or a part thereof under conditions which permit the production of methionine or a composition comprising methionine in said non-human organism or in the culture medium surrounding said non-human organism.

[0800] Accordingly, the present invention relates to a process for the production of methionine, which comprises
[0801] (a) increasing or generating the activity of a transcription factor in the cytosol of a cell of a non-human organism or a part thereof, preferably a microorganism, a plant cell, a plant or a part thereof, as compared to a corresponding non-transformed wild type non-human organism or a part thereof; and
[0802] (b) growing the non-human organism or a part thereof under conditions which permit the production of methionine or a composition comprising methionine in said non-human organism or in the culture medium surrounding said non-human organism.

[0803] Accordingly, the present invention relates to a process for the production of methionine, which comprises
[0804] (a) increasing or generating the activity of a protein phosphatase in the cytosol of a cell of a non-human organism or a part thereof, preferably a microorganism, a plant cell, a plant or a part thereof, as compared to a corresponding non-transformed wild type non-human organism or a part thereof; and
[0805] (b) growing the non-human organism or a part thereof under conditions which permit the production of methionine or a composition comprising methionine in said non-human organism or in the culture medium surrounding said non-human organism.

[0806] Accordingly, the present invention relates to a process for the production of methionine, which comprises
[0807] (a) increasing or generating the activity of a At2g45420-protein in the cytosol of a cell of a non-human organism or a part thereof, preferably a microorganism, a plant cell, a plant or a part thereof, as compared to a corresponding non-transformed wild type non-human organism or a part thereof; and
[0808] (b) growing the non-human organism or a part thereof under conditions which permit the production of methionine or a composition comprising methionine in said non-human organism or in the culture medium surrounding said non-human organism.

[0809] Accordingly, the present invention relates to a process for the production of methionine, which comprises
[0810] (a) increasing or generating the activity of a adenosine kinase in the cytosol of a cell of a non-human organism or a part thereof, preferably a microorganism, a plant cell, a plant or a part thereof, as compared to a corresponding non-transformed wild type non-human organism or a part thereof; and
[0811] (b) growing the non-human organism or a part thereof under conditions which permit the production of methionine or a composition comprising methionine in said non-human organism or in the culture medium surrounding said non-human organism.

[0812] Accordingly, the present invention relates to a process for the production of methionine, which comprises
[0813] (a) increasing or generating the activity of a protein kinase in the cytosol of a cell of a non-human organism or a part thereof, preferably a microorganism, a plant cell, a plant or a part thereof, as compared to a corresponding non-transformed wild type non-human organism or a part thereof; and
[0814] (b) growing the non-human organism or a part thereof under conditions which permit the production of methionine or a composition comprising methionine in said non-human organism or in the culture medium surrounding said non-human organism.

[0815] Accordingly, the present invention relates to a process for the production of methionine, which comprises
[0816] (a) increasing or generating the activity of a auxin response factor in the cytosol of a cell of a non-human organism or a part thereof, preferably a microorganism, a plant cell, a plant or a part thereof, as compared to a corresponding non-transformed wild type non-human organism or a part thereof; and
[0817] (b) growing the non-human organism or a part thereof under conditions which permit the production of methionine or a composition comprising methionine in said non-human organism or in the culture medium surrounding said non-human organism.

[0818] Accordingly, the present invention relates to a process for the production of methionine, which comprises
[0819] (a) increasing or generating the activity of a monthiol glutaredoxin in the cytosol of a cell of a non-human organism or a part thereof, preferably a microorganism, a plant cell, a plant or a part thereof, as compared to a corresponding non-transformed wild type non-human organism or a part thereof; and
[0820] (b) growing the non-human organism or a part thereof under conditions which permit the production of methionine or a composition comprising methionine in said non-human organism or in the culture medium surrounding said non-human organism.

[0821] Accordingly, the present invention relates to a process for the production of methionine, which comprises
[0822] (a) increasing or generating the activity of a glutaredoxin in the cytosol of a cell of a non-human organism or a part thereof, preferably a microorganism, a plant cell, a plant or a part thereof, as compared to a corresponding non-transformed wild type non-human organism or a part thereof; and
[0823] (b) growing the non-human organism or a part thereof under conditions which permit the production of methionine or a composition comprising methionine in said non-human organism or in the culture medium surrounding said non-human organism.

[0824] Accordingly, the present invention relates to a process for the production of methionine, which comprises
[0825] (a) increasing or generating the activity of a monothiol glutaredoxin in the cytosol of a cell of a non-human organism or a part thereof, preferably a microorganism, a plant cell, a plant or a part thereof, as compared to a corresponding non-transformed wild type non-human organism or a part thereof; and
[0826] (b) growing the non-human organism or a part thereof under conditions which permit the production of methionine or a composition comprising methionine in said non-human organism or in the culture medium surrounding said non-human organism.

[0827] Accordingly, the present invention relates to a process for the production of methionine, which comprises
[0828] (a) increasing or generating the activity of a monothiol glutaredoxin in the cytosol of a cell of a non-human organism or a part thereof, preferably a microorganism, a plant cell, a plant or a part thereof, as compared to a corresponding non-transformed wild type non-human organism or a part thereof; and
[0829] (b) growing the non-human organism or a part thereof under conditions which permit the production of methionine or a composition comprising methionine in said non-human organism or in the culture medium surrounding said non-human organism.

[0830] Accordingly, the present invention relates to a process for the production of methionine, which comprises
[0831] (a) increasing or generating the activity of a At4g32480-protein in the cytosol of a cell of a non-human organism or a part thereof, preferably a microorganism, a plant cell, a plant or a part thereof, as compared to a corresponding non-transformed wild type non-human organism or a part thereof; and
[0832] (b) growing the non-human organism or a part thereof under conditions which permit the production of methionine or a composition comprising methionine in said non-human organism or in the culture medium surrounding said non-human organism.

[0833] Accordingly, the present invention relates to a process for the production of methionine, which comprises
[0834] (a) increasing or generating the activity of a glutaredoxin in the cytosol of a cell of a non-human organism or a part thereof, preferably a microorganism, a plant cell, a plant or a part thereof, as compared to a corresponding non-transformed wild type non-human organism or a part thereof; and
[0835] (b) growing the non-human organism or a part thereof under conditions which permit the production of methionine or a composition comprising methionine in said non-human organism or in the culture medium surrounding said non-human organism.

[0836] Accordingly, the present invention relates to a process for the production of methionine, which comprises
[0837] (a) increasing or generating the activity of a calcium-dependent protein kinase in the cytosol of a cell of a non-human organism or a part thereof, preferably a microorganism, a plant cell, a plant or a part thereof, as compared to a corresponding non-transformed wild type non-human organism or a part thereof; and
[0838] (b) growing the non-human organism or a part thereof under conditions which permit the production of methionine or a composition comprising methionine in said non-human organism or in the culture medium surrounding said non-human organism.

[0839] Accordingly, the present invention relates to a process for the production of methionine, which comprises
[0840] (a) increasing or generating the activity of a monothiol glutaredoxin in the cytosol of a cell of a non-human organism or a part thereof, preferably a microorganism, a plant cell, a plant or a part thereof, as compared to a corresponding non-transformed wild type non-human organism or a part thereof; and
[0841] (b) growing the non-human organism or a part thereof under conditions which permit the production of methionine or a composition comprising methionine in said non-human organism or in the culture medium surrounding said non-human organism.

[0842] Accordingly, the present invention relates to a process for the production of methionine, which comprises
[0843] (a) increasing or generating the activity of a protein phosphatase in the cytosol of a cell of a non-human organism or a part thereof, preferably a microorganism, a plant cell, a plant or a part thereof, as compared to a corresponding non-transformed wild type non-human organism or a part thereof; and
[0844] (b) growing the non-human organism or a part thereof under conditions which permit the production of methionine or a composition comprising methionine in said non-human organism or in the culture medium surrounding said non-human organism.

[0845] Accordingly, the present invention relates to a process for the production of methionine, which comprises
[0846] (a) increasing or generating the activity of a zinc finger protein in the cytosol of a cell of a non-human organism or a part thereof, preferably a microorganism, a plant cell, a plant or a part thereof, as compared to a corresponding non-transformed wild type non-human organism or a part thereof; and
[0847] (b) growing the non-human organism or a part thereof under conditions which permit the production of methionine or a composition comprising methionine in said non-human organism or in the culture medium surrounding said non-human organism.

[0848] Accordingly, the present invention relates to a process for the production of methionine, which comprises
[0849] (a) increasing or generating the activity of a malic enzyme in the cytosol of a cell of a non-human organism or a part thereof, preferably a microorganism, a plant cell, a plant or a part thereof, as compared to a corresponding non-transformed wild type non-human organism or a part thereof; and
[0850] (b) growing the non-human organism or a part thereof under conditions which permit the production of methionine or a composition comprising methionine in said non-human organism or in the culture medium surrounding said non-human organism.

[0851] Accordingly, the present invention relates to a process for the production of methionine, which comprises
[0852] (a) increasing or generating the activity of a beta-hydroxylase in the cytosol of a cell of a non-human organism or a part thereof, preferably a microorganism, a plant cell, a plant or a part thereof, as compared to a corresponding non-transformed wild type non-human organism or a part thereof; and
[0853] (b) growing the non-human organism or a part thereof under conditions which permit the production of methionine or a composition comprising methionine in said non-human organism or in the culture medium surrounding said non-human organism.

[0854] Accordingly, the present invention relates to a process for the production of methionine, which comprises
[0855] (a) increasing or generating the activity of a 2-oxoglutarate dehydrogenase E1 subunit in the cytosol of a cell of a non-human organism or a part thereof, preferably a microorganism, a plant cell, a plant or a part thereof, as compared to a corresponding non-transformed wild type non-human organism or a part thereof; and
[0856] (b) growing the non-human organism or a part thereof under conditions which permit the production of methionine or a composition comprising methionine in said non-human organism or in the culture medium surrounding said non-human organism.

[0857] Accordingly, the present invention relates to a process for the production of methionine, which comprises
[0858] (a) increasing or generating the activity of a homoserine dehydrogenase in the cytosol of a cell of a non-human organism or a part thereof, preferably a microorganism, a plant cell, a plant or a part thereof, as compared to a corresponding non-transformed wild type non-human organism or a part thereof; and
[0859] (b) growing the non-human organism or a part thereof under conditions which permit the production of methionine or a composition comprising methionine in said non-human organism or in the culture medium surrounding said non-human organism.

[0860] Accordingly, the present invention relates to a process for the production of methionine, which comprises
[0861] (a) increasing or generating the activity of a hydrolase in the cytosol of a cell of a non-human organism or a part thereof, preferably a microorganism, a plant cell, a plant or a part thereof, as compared to a corresponding non-transformed wild type non-human organism or a part thereof; and
[0862] (b) growing the non-human organism or a part thereof under conditions which permit the production of methionine or a composition comprising methionine in said non-human organism or in the culture medium surrounding said non-human organism.

[0863] Accordingly, the present invention relates to a process for the production of methionine, which comprises
[0864] (a) increasing or generating the activity of a peptidyl-prolyl cis-trans isomerase in the cytosol of a cell of a non-human organism or a part thereof, preferably a microorganism, a plant cell, a plant or a part thereof, as compared to a corresponding non-transformed wild type non-human organism or a part thereof; and
[0865] (b) growing the non-human organism or a part thereof under conditions which permit the production of methionine or a composition comprising methionine in said non-human organism or in the culture medium surrounding said non-human organism.

[0866] Accordingly, the present invention relates to a process for the production of methionine, which comprises
[0867] (a) increasing or generating the activity of a b0012-protein in the cytosol of a cell of a non-human organism or a part thereof, preferably a microorganism, a plant cell, a plant or a part thereof, as compared to a corresponding non-transformed wild type non-human organism or a part thereof; and
[0868] (b) growing the non-human organism or a part thereof under conditions which permit the production of methionine or a composition comprising methionine in said non-human organism or in the culture medium surrounding said non-human organism.

[0869] Accordingly, the present invention relates to a process for the production of methionine, which comprises
[0870] (a) increasing or generating the activity of a acetolactate synthase small subunit in the cytosol of a cell of a non-human organism or a part thereof, preferably a microorganism, a plant cell, a plant or a part thereof, as compared to a corresponding non-transformed wild type non-human organism or a part thereof; and
[0871] (b) growing the non-human organism or a part thereof under conditions which permit the production of methionine or a composition comprising methionine in said non-human organism or in the culture medium surrounding said non-human organism.

[0872] Accordingly, the present invention relates to a process for the production of methionine, which comprises
[0873] (a) increasing or generating the activity of a serine protease in the cytosol of a cell of a non-human organism or a part thereof, preferably a microorganism, a plant cell, a plant or a part thereof, as compared to a corresponding non-transformed wild type non-human organism or a part thereof; and
[0874] (b) growing the non-human organism or a part thereof under conditions which permit the production of methionine or a composition comprising methionine in said non-human organism or in the culture medium surrounding said non-human organism.

[0875] Accordingly, the present invention relates to a process for the production of methionine, which comprises
[0876] (a) increasing or generating the activity of a 2,3-dihydroxyphenylpropionate 1,2-dioxygenase in the cytosol of a cell of a non-human organism or a part thereof, preferably a microorganism, a plant cell, a plant or a part thereof, as compared to a corresponding non-transformed wild type non-human organism or a part thereof; and
[0877] (b) growing the non-human organism or a part thereof under conditions which permit the production of methionine or a composition comprising methionine in said non-human organism or in the culture medium surrounding said non-human organism.

[0878] Accordingly, the present invention relates to a process for the production of methionine, which comprises
[0879] (a) increasing or generating the activity of a ATP-binding component of a transport system in the cytosol of a cell of a non-human organism or a part thereof, preferably a microorganism, a plant cell, a plant or a part thereof, as compared to a corresponding non-transformed wild type non-human organism or a part thereof; and
[0880] (b) growing the non-human organism or a part thereof under conditions which permit the production of methionine or a composition comprising methionine in said non-human organism or in the culture medium surrounding said non-human organism.

[0881] Accordingly, the present invention relates to a process for the production of methionine, which comprises
[0882] (a) increasing or generating the activity of a membrane transport protein in the cytosol of a cell of a non-human organism or a part thereof, preferably a microorganism, a plant cell, a plant or a part thereof, as compared to a corresponding non-transformed wild type non-human organism or a part thereof; and
[0883] (b) growing the non-human organism or a part thereof under conditions which permit the production of methionine or a composition comprising methionine in said non-human organism or in the culture medium surrounding said non-human organism.

[0884] Accordingly, the present invention relates to a process for the production of methionine, which comprises
[0885] (a) increasing or generating the activity of a threonine aldolase in the cytosol of a cell of a non-human organism or a part thereof, preferably a microorganism, a plant cell, a plant or a part thereof, as compared to a corresponding non-transformed wild type non-human organism or a part thereof; and
[0886] (b) growing the non-human organism or a part thereof under conditions which permit the production of methionine or a composition comprising methionine in said non-human organism or in the culture medium surrounding said non-human organism.

[0887] Accordingly, the present invention relates to a process for the production of methionine, which comprises
[0888] (a) increasing or generating the activity of a major facilitator superfamily transporter protein in the cytosol of a cell of a non-human organism or a part thereof, preferably a microorganism, a plant cell, a plant or a part thereof, as compared to a corresponding non-transformed wild type non-human organism or a part thereof; and
[0889] (b) growing the non-human organism or a part thereof under conditions which permit the production of methionine or a composition comprising methionine in said non-human organism or in the culture medium surrounding said non-human organism.

[0890] Accordingly, the present invention relates to a process for the production of methionine, which comprises
[0891] (a) increasing or generating the activity of a b1003-protein in the cytosol of a cell of a non-human organism or a part thereof, preferably a microorganism, a plant cell, a plant or a part thereof, as compared to a corresponding non-transformed wild type non-human organism or a part thereof; and
[0892] (b) growing the non-human organism or a part thereof under conditions which permit the production of methionine or a composition comprising methionine in said non-human organism or in the culture medium surrounding said non-human organism.

[0893] Accordingly, the present invention relates to a process for the production of methionine, which comprises
[0894] (a) increasing or generating the activity of a b1522-protein in the cytosol of a cell of a non-human organism or a part thereof, preferably a microorganism, a plant cell, a plant or a part thereof, as compared to a corresponding non-transformed wild type non-human organism or a part thereof; and
[0895] (b) growing the non-human organism or a part thereof under conditions which permit the production of methionine or a composition comprising methionine in said non-human organism or in the culture medium surrounding said non-human organism.

[0896] Accordingly, the present invention relates to a process for the production of methionine, which comprises
[0897] (a) increasing or generating the activity of a transport protein in the cytosol of a cell of a non-human organism or a part thereof, preferably a microorganism, a plant cell, a plant or a part thereof, as compared to a corresponding non-transformed wild type non-human organism or a part thereof; and
[0898] (b) growing the non-human organism or a part thereof under conditions which permit the production of methionine or a composition comprising methionine in said non-human organism or in the culture medium surrounding said non-human organism.

[0899] Accordingly, the present invention relates to a process for the production of methionine, which comprises
[0900] (a) increasing or generating the activity of a L-serine dehydratase in the cytosol of a cell of a non-human organism or a part thereof, preferably a microorganism, a plant cell, a plant or a part thereof, as compared to a corresponding non-transformed wild type non-human organism or a part thereof; and
[0901] (b) growing the non-human organism or a part thereof under conditions which permit the production of methionine or a composition comprising methionine in said non-human organism or in the culture medium surrounding said non-human organism.

[0902] Accordingly, the present invention relates to a process for the production of methionine, which comprises
[0903] (a) increasing or generating the activity of a serine/threonine-protein phosphatase in the cytosol of a cell of a non-human organism or a part thereof, preferably a microorganism, a plant cell, a plant or a part thereof, as compared to a corresponding non-transformed wild type non-human organism or a part thereof; and
[0904] (b) growing the non-human organism or a part thereof under conditions which permit the production of methionine or a composition comprising methionine in said non-human organism or in the culture medium surrounding said non-human organism.

[0905] Accordingly, the present invention relates to a process for the production of methionine, which comprises
[0906] (a) increasing or generating the activity of a pyruvate kinase in the cytosol of a cell of a non-human organism or a part thereof, preferably a microorganism, a plant cell, a plant or a part thereof, as compared to a corresponding non-transformed wild type non-human organism or a part thereof; and
[0907] (b) growing the non-human organism or a part thereof under conditions which permit the production of methionine or a composition comprising methionine in said non-human organism or in the culture medium surrounding said non-human organism.

[0908] Accordingly, the present invention relates to a process for the production of methionine, which comprises
[0909] (a) increasing or generating the activity of a b2032-protein in the cytosol of a cell of a non-human organism or a part thereof, preferably a microorganism, a plant cell, a plant or a part thereof, as compared to a corresponding non-transformed wild type non-human organism or a part thereof; and
[0910] (b) growing the non-human organism or a part thereof under conditions which permit the production of methionine or a composition comprising methionine in said non-human organism or in the culture medium surrounding said non-human organism.

[0911] Accordingly, the present invention relates to a process for the production of methionine, which comprises
[0912] (a) increasing or generating the activity of a uridine/cytidine kinase in the cytosol of a cell of a non-human organism or a part thereof, preferably a microorganism, a plant cell, a plant or a part thereof, as compared to a corresponding non-transformed wild type non-human organism or a part thereof; and
[0913] (b) growing the non-human organism or a part thereof under conditions which permit the production of methionine or a composition comprising methionine in said non-human organism or in the culture medium surrounding said non-human organism.

[0914] Accordingly, the present invention relates to a process for the production of methionine, which comprises
[0915] (a) increasing or generating the activity of a b2345-protein in the cytosol of a cell of a non-human organism or a part thereof, preferably a microorganism, a plant cell, a plant or a part thereof, as compared to a corresponding non-transformed wild type non-human organism or a part thereof; and
[0916] (b) growing the non-human organism or a part thereof under conditions which permit the production of methionine or a composition comprising methionine in said non-human organism or in the culture medium surrounding said non-human organism.

[0917] Accordingly, the present invention relates to a process for the production of methionine, which comprises
[0918] (a) increasing or generating the activity of a b2513-protein in the cytosol of a cell of a non-human organism or a part thereof, preferably a microorganism, a plant cell, a plant or a part thereof, as compared to a corresponding non-transformed wild type non-human organism or a part thereof; and
[0919] (b) growing the non-human organism or a part thereof under conditions which permit the production of methionine or a composition comprising methionine in said non-human organism or in the culture medium surrounding said non-human organism.

[0920] Accordingly, the present invention relates to a process for the production of methionine, which comprises
[0921] (a) increasing or generating the activity of a b2673-protein in the cytosol of a cell of a non-human organism or a part thereof, preferably a microorganism, a plant cell, a plant or a part thereof, as compared to a corresponding non-transformed wild type non-human organism or a part thereof; and
[0922] (b) growing the non-human organism or a part thereof under conditions which permit the production of methionine or a composition comprising methionine in said non-human organism or in the culture medium surrounding said non-human organism.

[0923] Accordingly, the present invention relates to a process for the production of methionine, which comprises
[0924] (a) increasing or generating the activity of a arginine exporter protein in the cytosol of a cell of a non-human organism or a part thereof, preferably a microorganism, a plant cell, a plant or a part thereof, as compared to a corresponding non-transformed wild type non-human organism or a part thereof; and
[0925] (b) growing the non-human organism or a part thereof under conditions which permit the production of methionine or a composition comprising methionine in said non-human organism or in the culture medium surrounding said non-human organism.
   Accordingly, the present invention relates to a process for the production of methionine, which comprises
[0926] (a) increasing or generating the activity of a b3246-protein in the cytosol of a cell of a non-human organism or a part thereof, preferably a microorganism, a plant cell, a plant or a part thereof, as compared to a corresponding non-transformed wild type non-human organism or a part thereof; and
[0927] (b) growing the non-human organism or a part thereof under conditions which permit the production of methionine or a composition comprising methionine in said non-human organism or in the culture medium surrounding said non-human organism.

[0928] Accordingly, the present invention relates to a process for the production of methionine, which comprises
[0929] (a) increasing or generating the activity of a acetyl CoA carboxylase in the cytosol of a cell of a non-human organism or a part thereof, preferably a microorganism, a plant cell, a plant or a part thereof, as compared to a corresponding non-transformed wild type non-human organism or a part thereof; and
[0930] (b) growing the non-human organism or a part thereof under conditions which permit the production of methionine or a composition comprising methionine in said non-human organism or in the culture medium surrounding said non-human organism.

[0931] Accordingly, the present invention relates to a process for the production of methionine, which comprises
[0932] (a) increasing or generating the activity of a b3346-protein in the cytosol of a cell of a non-human organism or a part thereof, preferably a microorganism, a plant cell, a plant or a part thereof, as compared to a corresponding non-transformed wild type non-human organism or a part thereof; and
[0933] (b) growing the non-human organism or a part thereof under conditions which permit the production of methionine or a composition comprising methionine in said non-human organism or in the culture medium surrounding said non-human organism.

[0934] Accordingly, the present invention relates to a process for the production of methionine, which comprises
[0935] (a) increasing or generating the activity of a valine-pyruvate transaminase in the cytosol of a cell of a non-human organism or a part thereof, preferably a microorganism, a plant cell, a plant or a part thereof, as compared to a corresponding non-transformed wild type non-human organism or a part thereof; and
[0936] (b) growing the non-human organism or a part thereof under conditions which permit the production of methionine or a composition comprising methionine in said non-human organism or in the culture medium surrounding said non-human organism.

[0937] Accordingly, the present invention relates to a process for the production of methionine, which comprises
[0938] (a) increasing or generating the activity of a dihydroxyacid dehydratase in the cytosol of a cell of a non-human organism or a part thereof, preferably a microorganism, a plant cell, a plant or a part thereof, as compared to a corresponding non-transformed wild type non-human organism or a part thereof; and
[0939] (b) growing the non-human organism or a part thereof under conditions which permit the production of methionine or a composition comprising methionine in said non-human organism or in the culture medium surrounding said non-human organism.

[0940] Accordingly, the present invention relates to a process for the production of methionine, which comprises
[0941] (a) increasing or generating the activity of a b3817-protein in the cytosol of a cell of a non-human organism or a part thereof, preferably a microorganism, a plant cell, a plant or a part thereof, as compared to a corresponding non-transformed wild type non-human organism or a part thereof; and
[0942] (b) growing the non-human organism or a part thereof under conditions which permit the production of methionine or a composition comprising methionine in said non-human organism or in the culture medium surrounding said non-human organism.

[0943] Accordingly, the present invention relates to a process for the production of methionine, which comprises
[0944] (a) increasing or generating the activity of a threonine efflux protein in the cytosol of a cell of a non-human organism or a part thereof, preferably a microorganism, a plant cell, a plant or a part thereof, as compared to a corresponding non-transformed wild type non-human organism or a part thereof; and
[0945] (b) growing the non-human organism or a part thereof under conditions which permit the production of methionine or a composition comprising methionine in said non-human organism or in the culture medium surrounding said non-human organism.

[0946] Accordingly, the present invention relates to a process for the production of methionine, which comprises
[0947] (a) increasing or generating the activity of a b4029-protein in the cytosol of a cell of a non-human organism or a part thereof, preferably a microorganism, a plant cell, a plant or a part thereof, as compared to a corresponding non-transformed wild type non-human organism or a part thereof; and
[0948] (b) growing the non-human organism or a part thereof under conditions which permit the production of methionine or a composition comprising methionine in said non-human organism or in the culture medium surrounding said non-human organism.

[0949] Accordingly, the present invention relates to a process for the production of methionine, which comprises
[0950] (a) increasing or generating the activity of a glutaredoxin in the cytosol of a cell of a non-human organism or a part thereof, preferably a microorganism, a plant cell, a plant or a part thereof, as compared to a corresponding non-transformed wild type non-human organism or a part thereof; and
[0951] (b) growing the non-human organism or a part thereof under conditions which permit the production of methionine or a composition comprising methionine in said non-human organism or in the culture medium surrounding said non-human organism.

[0952] Accordingly, the present invention relates to a process for the production of methionine, which comprises
[0953] (a) increasing or generating the activity of a 5′-nucleotidase in the cytosol of a cell of a non-human organism or a part thereof, preferably a microorganism, a plant cell, a plant or a part thereof, as compared to a corresponding non-transformed wild type non-human organism or a part thereof; and
[0954] (b) growing the non-human organism or a part thereof under conditions which permit the production of methionine or a composition comprising methionine in said non-human organism or in the culture medium surrounding said non-human organism.

[0955] Accordingly, the present invention relates to a process for the production of methionine, which comprises
[0956] (a) increasing or generating the activity of a glutathione S-transferase in the cytosol of a cell of a non-human organism or a part thereof, preferably a microorganism, a plant cell, a plant or a part thereof, as compared to a corresponding non-transformed wild type non-human organism or a part thereof; and
[0957] (b) growing the non-human organism or a part thereof under conditions which permit the production of methionine or a composition comprising methionine in said non-human organism or in the culture medium surrounding said non-human organism.

[0958] Accordingly, the present invention relates to a process for the production of methionine, which comprises
[0959] (a) increasing or generating the activity of a coproporphyrinogen III oxidase in the cytosol of a cell of a non-human organism or a part thereof, preferably a microorganism, a plant cell, a plant or a part thereof, as compared to a corresponding non-transformed wild type non-human organism or a part thereof; and
[0960] (b) growing the non-human organism or a part thereof under conditions which permit the production of methionine or a composition comprising methionine in said non-human organism or in the culture medium surrounding said non-human organism.

[0961] Accordingly, the present invention relates to a process for the production of methionine, which comprises
[0962] (a) increasing or generating the activity of a oxidoreductase in the cytosol of a cell of a non-human organism or a part thereof, preferably a microorganism, a plant cell, a plant or a part thereof, as compared to a corresponding non-transformed wild type non-human organism or a part thereof; and
[0963] (b) growing the non-human organism or a part thereof under conditions which permit the production of methionine or a composition comprising methionine in said non-human organism or in the culture medium surrounding said non-human organism.

[0964] Accordingly, the present invention relates to a process for the production of methionine, which comprises
[0965] (a) increasing or generating the activity of a oxidoreductase in the cytosol of a cell of a non-human organism or a part thereof, preferably a microorganism, a plant cell, a plant or a part thereof, as compared to a corresponding non-transformed wild type non-human organism or a part thereof; and
[0966] (b) growing the non-human organism or a part thereof under conditions which permit the production of methionine or a composition comprising methionine in said non-human organism or in the culture medium surrounding said non-human organism.

[0967] Accordingly, the present invention relates to a process for the production of methionine, which comprises
[0968] (a) increasing or generating the activity of a Photosystem I reaction center subunit XI in the cytosol of a cell of a non-human organism or a part thereof, preferably a microorganism, a plant cell, a plant or a part thereof, as compared to a corresponding non-transformed wild type non-human organism or a part thereof; and
[0969] (b) growing the non-human organism or a part thereof under conditions which permit the production of methionine or a composition comprising methionine in said non-human organism or in the culture medium surrounding said non-human organism.

[0970] Accordingly, the present invention relates to a process for the production of methionine, which comprises
[0971] (a) increasing or generating the activity of a phosphoadenosine phosphosulfate reductase in the cytosol of a cell of a non-human organism or a part thereof, preferably a microorganism, a plant cell, a plant or a part thereof, as compared to a corresponding non-transformed wild type non-human organism or a part thereof; and
[0972] (b) growing the non-human organism or a part thereof under conditions which permit the production of methionine or a composition comprising methionine in said non-human organism or in the culture medium surrounding said non-human organism.

[0973] Accordingly, the present invention relates to a process for the production of methionine, which comprises
[0974] (a) increasing or generating the activity of a threonine dehydratase in the cytosol of a cell of a non-human organism or a part thereof, preferably a microorganism, a plant cell, a plant or a part thereof, as compared to a corresponding non-transformed wild type non-human organism or a part thereof; and
[0975] (b) growing the non-human organism or a part thereof under conditions which permit the production of methionine or a composition comprising methionine in said non-human organism or in the culture medium surrounding said non-human organism.

[0976] Accordingly, the present invention relates to a process for the production of methionine, which comprises
[0977] (a) increasing or generating the activity of a Sec-independent protein translocase subunit in the cytosol of a cell of a non-human organism or a part thereof, preferably a microorganism, a plant cell, a plant or a part thereof, as compared to a corresponding non-transformed wild type non-human organism or a part thereof; and
[0978] (b) growing the non-human organism or a part thereof under conditions which permit the production of methionine or a composition comprising methionine in said non-human organism or in the culture medium surrounding said non-human organism.

[0979] Accordingly, the present invention relates to a process for the production of methionine, which comprises
[0980] (a) increasing or generating the activity of a homocitrate synthase in the cytosol of a cell of a non-human organism or a part thereof, preferably a microorganism, a plant cell, a plant or a part thereof, as compared to a corresponding non-transformed wild type non-human organism or a part thereof; and
[0981] (b) growing the non-human organism or a part thereof under conditions which permit the production of methionine or a composition comprising methionine in said non-human organism or in the culture medium surrounding said non-human organism.

[0982] Accordingly, the present invention relates to a process for the production of methionine, which comprises
[0983] (a) increasing or generating the activity of a cystathionine-lyase in the cytosol of a cell of a non-human organism or a part thereof, preferably a microorganism, a plant cell, a plant or a part thereof, as compared to a corresponding non-transformed wild type non-human organism or a part thereof; and
[0984] (b) growing the non-human organism or a part thereof under conditions which permit the production of methionine or a composition comprising methionine in said non-human organism or in the culture medium surrounding said non-human organism.

[0985] Accordingly, the present invention relates to a process for the production of methionine, which comprises
[0986] (a) increasing or generating the activity of a cyclin in the cytosol of a cell of a non-human organism or a part thereof, preferably a microorganism, a plant cell, a plant or a part thereof, as compared to a corresponding non-transformed wild type non-human organism or a part thereof; and
[0987] (b) growing the non-human organism or a part thereof under conditions which permit the production of methionine or a composition comprising methionine in said non-human organism or in the culture medium surrounding said non-human organism.

[0988] Accordingly, the present invention relates to a process for the production of methionine, which comprises
[0989] (a) increasing or generating the activity of a protein kinase in the cytosol of a cell of a non-human organism or a part thereof, preferably a microorganism, a plant cell, a plant or a part thereof, as compared to a corresponding non-transformed wild type non-human organism or a part thereof; and
[0990] (b) growing the non-human organism or a part thereof under conditions which permit the production of methionine or a composition comprising methionine in said non-human organism or in the culture medium surrounding said non-human organism.

[0991] Accordingly, the present invention relates to a process for the production of methionine, which comprises
[0992] (a) increasing or generating the activity of a protein kinase in the cytosol of a cell of a non-human organism or a part thereof, preferably a microorganism, a plant cell, a plant or a part thereof, as compared to a corresponding non-transformed wild type non-human organism or a part thereof; and
[0993] (b) growing the non-human organism or a part thereof under conditions which permit the production of methionine or a composition comprising methionine in said non-human organism or in the culture medium surrounding said non-human organism.

[0994] Accordingly, the present invention relates to a process for the production of methionine, which comprises
[0995] (a) increasing or generating the activity of a F-box protein in the cytosol of a cell of a non-human organism or a part thereof, preferably a microorganism, a plant cell, a plant or a part thereof, as compared to a corresponding non-transformed wild type non-human organism or a part thereof; and
[0996] (b) growing the non-human organism or a part thereof under conditions which permit the production of methionine or a composition comprising methionine in said non-human organism or in the culture medium surrounding said non-human organism.

[0997] Accordingly, the present invention relates to a process for the production of methionine, which comprises
[0998] (a) increasing or generating the activity of a yhl013c-protein in the cytosol of a cell of a non-human organism or a part thereof, preferably a microorganism, a plant cell, a plant or a part thereof, as compared to a corresponding non-transformed wild type non-human organism or a part thereof; and
[0999] (b) growing the non-human organism or a part thereof under conditions which permit the production of methionine or a composition comprising methionine in said non-human organism or in the culture medium surrounding said non-human organism.

[1000] Accordingly, the present invention relates to a process for the production of methionine, which comprises
[1001] (a) increasing or generating the activity of a (DL)-glycerol-3-phosphatase in the cytosol of a cell of a non-human organism or a part thereof, preferably a microorganism, a plant cell, a plant or a part thereof, as compared to a corresponding non-transformed wild type non-human organism or a part thereof; and
[1002] (b) growing the non-human organism or a part thereof under conditions which permit the production of methionine or a composition comprising methionine in said non-human organism or in the culture medium surrounding said non-human organism.

[1003] Accordingly, the present invention relates to a process for the production of methionine, which comprises
[1004] (a) increasing or generating the activity of a glycogenin in the cytosol of a cell of a non-human organism or a part thereof, preferably a microorganism, a plant cell, a plant or a part thereof, as compared to a corresponding non-transformed wild type non-human organism or a part thereof; and
[1005] (b) growing the non-human organism or a part thereof under conditions which permit the production of methionine or a composition comprising methionine in said non-human organism or in the culture medium surrounding said non-human organism.

[1006] Accordingly, the present invention relates to a process for the production of methionine, which comprises
[1007] (a) increasing or generating the activity of a cystathionine gamma-synthase in the cytosol of a cell of a non-human organism or a part thereof, preferably a microorganism, a plant cell, a plant or a part thereof, as compared to a corresponding non-transformed wild type non-human organism or a part thereof; and
[1008] (b) growing the non-human organism or a part thereof under conditions which permit the production of methionine or a composition comprising methionine in said non-human organism or in the culture medium surrounding said non-human organism.

[1009] Accordingly, the present invention relates to a process for the production of methionine, which comprises
[1010] (a) increasing or generating the activity of a homoserine dehydrogenase in the cytosol of a cell of a non-human organism or a part thereof, preferably a microorganism, a plant cell, a plant or a part thereof, as compared to a corresponding non-transformed wild type non-human organism or a part thereof; and
[1011] (b) growing the non-human organism or a part thereof under conditions which permit the production of methionine or a composition comprising methionine in said non-human organism or in the culture medium surrounding said non-human organism.

[1012] Accordingly, the present invention relates to a process for the production of methionine, which comprises
[1013] (a) increasing or generating the activity of a yml084w-protein in the cytosol of a cell of a non-human organism or a part thereof, preferably a microorganism, a plant cell, a plant or a part thereof, as compared to a corresponding non-transformed wild type non-human organism or a part thereof; and
[1014] (b) growing the non-human organism or a part thereof under conditions which permit the production of methionine or a composition comprising methionine in said non-human organism or in the culture medium surrounding said non-human organism.

[1015] Accordingly, the present invention relates to a process for the production of methionine, which comprises
[1016] (a) increasing or generating the activity of a yol160w-protein in the cytosol of a cell of a non-human organism or a part thereof, preferably a microorganism, a plant cell, a plant or a part thereof, as compared to a corresponding non-transformed wild type non-human organism or a part thereof; and
[1017] (b) growing the non-human organism or a part thereof under conditions which permit the production of methionine or a composition comprising methionine in said non-human organism or in the culture medium surrounding said non-human organism.

[1018] Accordingly, the present invention relates to a process for the production of methionine, which comprises
[1019] (a) increasing or generating the activity of a yor392w-protein in the cytosol of a cell of a non-human organism or a part thereof, preferably a microorganism, a plant cell, a plant or a part thereof, as compared to a corresponding non-transformed wild type non-human organism or a part thereof; and
[1020] (b) growing the non-human organism or a part thereof under conditions which permit the production of methionine or a composition comprising methionine in said non-human organism or in the culture medium surrounding said non-human organism.

[1021] Accordingly, the present invention relates to a process for the production of methionine, which comprises
[1022] (a) increasing or generating the activity of a polypeptide comprising a polypeptide as depicted in the respective line in column 5 or 8 of Table II, application no. 1, or a homolog or a fragment thereof, a consensus sequence or at least one polypeptide motif as depicted in the respective line in column 8 of Table IV, application no. 1; or
   [1023] increasing or generating the activity of an expression product of one or more nucleic acid molecule(s) comprising a polynucleotide as depicted in the respective line in column 5 or 8 of Table I, application no. 1, preferably the coding region thereof, or a homolog or a fragment thereof;
   [1024] in the cytosol of a cell of a non-human organism or a part thereof; preferably a microorganism, a plant cell, a plant or a part thereof, as compared to a corresponding non-transformed wild type non-human organism or a part thereof; and
[1025] (b) growing the non-human organism under conditions which permit the production of methionine, or a composition comprising methionine in said non-human organism or in the culture medium surrounding said non-human organism.

[1026] In a further embodiment the activity of the polypeptide comprising a polypeptide as depicted in the respective line in column 5 or 8 of Table II, application no. 1, or a homolog or a fragment thereof, a consensus sequence or at least one polypeptide motif as depicted in the respective line in column 8 of Table IV, application no. 1, is increased or generated non-targeted in the above-mentioned process in a microorganism or plant or a part thereof.

[1027] In a further embodiment said polypeptide has the activity of the respective polypeptide represented by a protein comprising a polypeptide as depitcted in the respective line in column 5 of Table II, application no. 1.

[1028] In a further embodiment the activity of the expression product of one or more nucleic acid molecule(s) comprising a polynucleotide as depicted in the respective line in column 5 or 8 of Table I, application no. 1, preferably the coding region thereof, or a homolog or a fragment thereof, is increased or generated non-targeted in the above-mentioned process in a microorganism or plant or a part thereof.

[1029] In a further embodiment the activity of the polypeptide comprising a polypeptide as depicted in the respective line in column 5 or 8 of Table II, application no. 1, or a homolog or a fragment thereof, a consensus sequence or at least one polypeptide motif as depicted in the respective line in column 8 of Table IV, application no. 1, is increased or generated in the above-mentioned process in an organelle preferably in plastids or mitochondria, especially in plastids, of a microorganism or plant.

[1030] In a further embodiment said polypeptide has the activity of the respective polypeptide represented by a protein comprising a polypeptide as depitcted in the respective line in column 5 of Table II, application no. 1.

[1031] In a further embodiment the activity of the expression product of one or more nucleic acid molecule(s) comprising a polynucleotide as depicted in the respective line in column 5 or 8 of Table I, application no. 1, preferably the coding region thereof, or a homolog or a fragment thereof, is increased or generated in the above-mentioned process in an organelle, preferably in plasids or mitochondria, especially in plastids, of a microorganism or plant.

[1032] In a further embodiment the activity of the polypeptide comprising a polypeptide as depicted in the respective line in column 5 or 8 of Table II, application no. 1, or a homolog or a fragment thereof, a consensus sequence or at least one polypeptide motif as depicted in the respective line in column 8 of Table IV, application no. 1, is increased or generated in the above-mentioned process in the cyctosol of a cell, of a microorganism or plant.

[1033] In a further embodiment said polypeptide has the activity of the respective polypeptide represented by a protein comprising a polypeptide as depitcted in the respective line in column 5 of Table II, application no. 1.

[1034] In a further embodiment the activity of the expression product of one or more nucleic acid molecule(s) comprising a polynucleotide as depicted in the respective line in column 5 or 8 of Table I, application no. 1, preferably the coding region thereof, or a homolog or a fragment thereof, is increased or generated in the above-mentioned process in the cytosol of a cell, of a microorganism or plant.

[1035] In a further embodiment of the present invention the process further comprises the step of recovering the fine chemical, which is synthesized by the organism from the organism and/or from the culture medium used for the growth or maintenance of the organism.

[1036] For the purposes of the present invention, as a rule the plural is intended to encompass the singular and vice versa, unless otherwise specified.

[1037] Comprises/comprising and grammatical variations thereof when used in this specification are to be taken to specify the presence of stated features, integers, steps or components or groups thereof, but not to preclude the presence or addition of one or more other features, integers, steps, components or groups thereof.

[1038] The term “Table I” used in this specification is to be taken to specify the content of Table I A and Table I B. The term “Table II” used in this specification is to be taken to specify the content of Table II A and Table II B. The term “Table I A” used in this specification is to be taken to specify the content of Table I A. The term “Table I B” used in this specification is to be taken to specify the content of Table I B. The term “Table II A” used in this specification is to be taken to specify the content of Table II A. The term “Table II B” used in this specification is to be taken to specify the content of Table II B. In one preferred embodiment, the term “Table I” means Table I B. In one preferred embodiment, the term “Table II” means Table II B. In a line of Table I related nucleic acid molecules are listed. In column 3 the locus name, often also referred to as gene name, is given, in column 5 the lead sequence ID No. thereto and in column 8 the sequence ID No. of homologues thereof. In the corresponding line of Table II the respective polypeptides are listed. In column 3 the protein name is given (which is according to the common understanding of the skilled person in the art usually used for the gene as well as the polypeptide and therefore identical with the gene name/locus name), in column 5 the (corresonding) lead sequence ID No. thereto and in column 8 the (corresponding) sequence ID No. of homologues thereof.

[1039] In Tables I and II in column 4 information is given from which organism the lead sequence according to column 5 has been identified, in column 7 information is given which fine chemical is generated or increased, and in an especial embodiment in column 6 information is given about non-targeted expression or expression in plastids or mitochon dria.

[1040] Tables III and IV are arranged accordingly whereby in column 8 of Table III primers are listed which can be used to amplify the sequence of the corresponding lead sequence indicated in column 5 of the same line and whereby in column 8 of Table IV consensus and pattern sequences are listed which are shared by the lead sequence as indicated in column 5 of the same line and their homologs listed in the same line in Table II column 8. How the consensus and pattern sequences are determined is described lateron in the application in more detail.

[1041] The terms “increase”, “raise”, “extend”, “enhance”, “improve” and “amplify” as well as the grammatical versions thereof relate to a corresponding change of a property in a non-human organism, a part of an organism such as a tissue, seed, root, leave, flower, pollen etc. or in a cell and are interchangeable. Preferably, the overall activity in the volume is increased or enhanced in cases if the increase or enhancement is related to the increase or enhancement of an activity of a gene product, independent whether the amount of gene product or the specific activity of the gene product or both is increased or enhanced or whether the amount, stability or translation efficacy of the nucleic acid sequence or gene encoding for the gene product is increased or enhanced.

[1042] Under “change of a property” it is understood that the activity, expression level or amount of a gene product or the metabolite content is changed in a specific volume relative to a corresponding volume of a control, reference or wild type, including the de novo creation of the activity or expression.

[1043] The term “increase” may be directed to a change of said property in the subject of the present invention or only in a part thereof, for example, the change can be found in a compartment of a cell, like an organelle, or in a part of an non-human organism, like plant tissue, plant seed, plant root, pollen, leave, flower etc. but is not detectable in the overall subject, i.e. complete cell or plant, if tested.

[1044] Accordingly, the term “increase” means that the specific activity of a polypeptide or the amount of a compound or of a metabolite, e.g. of a polypeptide, a nucleic acid molecule or an encoding mRNA or DNA or the fine chemical, can be increased in a volume.

[1045] The term “increase” includes that a compound or an activity is introduced into a cell or a subcellular compartment or organelle de novo or that the compound or the activity has not been detectable before, in other words it is “generated”.

[1046] Accordingly, in the following, the term “increasing” also comprises the term “generating” or “stimulating”. The increased activity manifests itself in an increase of the fine chemical.

[1047] The terms “wild type”, “control” or “reference” are exchangeable and can be a cell or a part of a non-human organism such as an organelle like a chloroplast or a tissue, or a non-human organism, in particular a microorganism or a plant, which was not modified or treated according to the herein described process according to the invention. Accordingly, the cell or a part of a non-human organism such as an organelle like a chloroplast or a tissue, or an organism, in particular a microorganism or a plant used as wild type, control or reference corresponds to the cell, non-human organism, microorganism, plant, or a part thereof, as much as possible and is in any other property but in the result of the process of the invention as identical to the subject matter of the invention as possible. Thus, the wild type, control or reference is treated identically or as identical as possible, saying that only conditions or properties might be different which do not influence the quality of the tested property.

[1048] Preferably, any comparison is carried out under analogous conditions. The term “analogous conditions” means that all conditions such as, for example, culture or growing conditions (such as soil, nutrient, water content of the soil, temperature, humidity or surrounding air), or assay conditions (such as buffer composition, temperature, substrates, pathogen strain, concentrations and the like) are kept identical between the experiments to be compared.

[1049] The “reference”, “control” or “wild type” is preferably a subject, e.g. an organelle, a cell, a tissue, an organism, in particular a microorganism or a plant, which was not modified or treated according to the herein described process of the invention and is in any other property as similar to the subject matter of the invention as possible. The reference, control or wild type is in its genome, transcriptome, proteome or metabolome as similar as possible to the subject of the present invention. Preferably, the term “reference-”, “control-” or “wild type-”-organelle, -cell, -tissue or -organism, in particular a microorganism or a plant, relates to an organelle, cell, tissue or organism, in particular a microorganism or a plant, which is nearly genetically identical to the organelle, cell, tissue or organism, in particular a microorganism or plant, or a part thereof, of the present invention, preferably 95%, more preferred are 98%, even more preferred are 99.00%, in particular 99.10%, 99.30%, 99.50%, 99.70%, 99.90%, 99.99%, 99.999% or more. Most preferable the “reference”, “control”, or “wild type” is a subject, e.g. an organelle, a cell, a tissue, an organism, in particular a microorganism or a plant, which is genetically identical to the organism, in particular plant, cell, a tissue or organelle used according to the process of the invention except that the responsible or activity conferring nucleic acid molecules or the gene product encoded by them are amended, manipulated, exchanged or introduced according to the inventive process.

[1050] In case, a control, reference or wild type differing from the subject of the present invention only by not being subject of the process of the invention can not be provided, a control, reference or wild type can be a non-human organism in which the cause for the modulation of an activity conferring the generation/increase of the fine chemical or expression of the nucleic acid molecule of the invention as described herein has been switched back or off, e.g. by knocking out the expression of responsible gene product, e.g. by antisense inhibition, by inactivation of an activator or agonist, by activation of an inhibitor or antagonist, by inhibition through adding inhibitory antibodies, by adding active compounds as e.g. hormones, by introducing negative dominant mutants, etc. A gene production can for example be knocked out by introducing inactivating point mutations, which lead to an enzymatic activity inhibition or a destabilization or an inhibition of the ability to bind to cofactors etc.

[1051] Accordingly, preferred reference subject is the starting subject of the present process of the invention. Preferably, the reference and the subject matter of the invention are compared after standardization and normalization, e.g. to the amount of total RNA, DNA, or protein or activity or expression of reference genes, like housekeeping genes, such as ubiquitin, actin or ribosomal proteins.

[1052] In accordance with the invention, the term “non-human organism” as understood herein relates always to an organism with the exception of a human being, in particular to an animal or a plant or a microorganism. Further, the term “animal” as understood herein relates always to a non-human animal. Preferably the term “non-human organism” shall mean a microorganism, in particular those containing plastids, such as algae, or a plant or the like.

[1053] As used herein, “plant” is meant to include not only a whole plant but also a part thereof i.e., one or more cells, tissues, including for example, leaves, stems, shoots, roots, flowers, fruits, seeds and pollen.

[1054] The term “organelle” according to the invention shall mean for example “mitochondrion” or “plastid”. The term “plastid” according to the invention is intended to include various forms of plastids including proplastids, chloroplasts, chromoplasts, gerontoplasts, leucoplasts, amyloplasts, elaioplasts and etioplasts, preferably chloroplasts. They all have as a common ancestor the aforementioned proplasts.

[1055] Unless otherwise specified, the terms “polynucleotides”, “nucleic acid” and “nucleic acid molecule” are interchangeable in the present context. Unless otherwise specified, the terms “peptide”, “polypeptide” and “protein” are interchangeably in the present context. The term “sequence” may relate to polynucleotides, nucleic acids, nucleic acid molecules, peptides, polypeptides and proteins, depending on the context in which the term “sequence” is used. The terms “gene(s)”, “polynucleotide”, “nucleic acid sequence”, “nucleotide sequence”, or “nucleic acid molecule(s)” as used herein refer to a polymeric form of nucleotides of any length, either ribonucleotides or deoxyribonucleotides. The terms refer only to the primary structure of the molecule.

[1056] Thus, the terms “gene(s)”, “polynucleotide”, “nucleic acid sequence”, “nucleotide sequence”, or “nucleic acid molecule(s)” as used herein include double- and single-stranded DNA and/or RNA. They also include known types of modifications, for example, methylation, “caps”, substitutions of one or more of the naturally occurring nucleotides with an analog. Preferably, the DNA or RNA sequence comprises a coding sequence encoding the herein defined polypeptide.

[1057] A “coding sequence” is a nucleotide sequence, which is transcribed into a RNA, e.g. a regulatory RNA, such as a miRNA, a ta-siRNA, cosuppression molecule, an RNAi, a ribozyme, etc. or preferably into a mRNA which is translated into a polypeptide when placed under the control of appropriate regulatory sequences. The boundaries of the coding sequence are determined by a translation start codon at the 5′-terminus and a translation stop codon at the 3′-terminus. A coding sequence can include, but is not limited to mRNA, cDNA, recombinant nucleotide sequences or genomic DNA, while introns may be present as well under certain circumstances. The terms “coding sequence” and “coding region” are interchangeable in the present context.

[1058] As used in the present context a nucleic acid molecule may also encompass the untranslated sequence located at the 3′ and/or at the 5′ end of the coding gene region, for example at least 500, preferably 200, especially preferably 100, nucleotides of the sequence upstream of the 5′ end of the coding region and/or at least 100, preferably 50, especially preferably 20, nucleotides of the sequence downstream of the 3′ end of the coding gene region. In the event for example the antisense, RNAi, snRNA, dsRNA, siRNA, miRNA, ta-siRNA, cosuppression molecule, ribozyme etc. technology is used coding regions as well as the 5′- and/or 3′-regions can advantageously be used.

[1059] However, it is often advantageous only to choose the coding region of a nucleic acid sequence for cloning and expression purposes. Except as not otherwise specified in the sequence listing according to WI PO Standard 25 for a respective CDS usually the coding region of a nucleic acid molecule is depicted at numeric identifier <222>, whereby the coding region starts at the position given by the first number (given in brackets) and ends at the position given by the second number (given in brackets) and thereafter under numeric identifier <400>the respective sequence is disclosed.

[1060] Unless otherwise specified, the term “polypeptide” refers to a polymer of amino acids (amino acid sequence) and does not refer to a specific length of the molecule. Thus, peptides and oligopeptides are included within the definition of polypeptide. This term does also refer to or include post-translational modifications of the polypeptide, for example, glycosylations, acetylations, phosphorylations and the like. Included within the definition are, for example, polypeptides containing one or more analogs of an amino acid (including, for example, unnatural amino acids, etc.), polypeptides with substituted linkages, as well as other modifications known in the art, both naturally occurring and non-naturally occurring. The terms “protein” and “polypeptide” used in this application are interchangeable.

[1061] The term “recovering” means the isolation of the fine chemical in different purities, that means on the one hand harvesting of the biological material, which contains the fine chemical without further purification and on the other hand purities of the fine chemical between 5% and 100% purity, preferred purities are in the range of 10% and 99%. In one embodiment, the purities are at least 20%, 30%, 40%, 50%, 60%, 70%, 80%, 90%, 95% or 99%.

[1062] A “transit peptide” is an amino acid sequence, whose encoding nucleic acid sequence is translated together with the corresponding structural gene. That means the transit peptide is an integral part of the translated protein and forms an amino terminal extension of the protein. Both are translated as so called “preprotein”. In general the transit peptide is cleaved off from the preprotein during or just after import of the protein into the correct cell organelle such as a plastid or mitochondrion to yield the mature protein. The transit peptide ensures correct localization of the mature protein by facilitating the transport of proteins through intracellular membranes. In principle the nucleic acid sequence encoding a transit peptide can be isolated from every organism such as microorganisms such as algae or plants containing plastids, preferably chloroplasts, or mitochondria. Preferred nucleic acid sequences encoding a transit peptide are derived from a nucleic acid sequence encoding a protein finally resided in the plastid or mitochondria, respectively, and stemming from an organism selected from the group consisting of the genera:

[1063] Acetabularia, Arabidopsis, Brassica, Capsicum, Chlamydomonas, Cucurbita, Dunaliella, Euglena, Flaveria, Glycine, Helianthus, Hordeum, Lemna, Lolium, Lycopersion, Malus, Medicago, Mesembryanthemum, Nicotiana, Oenotherea, Oryza, Petunia, Phaseolus, Physcomitrella, Pinus, Pisum, Raphanus, Silene, Sinapis, Solanum, Spinacea, Stevia, Synechococcus, Triticum and Zea.

[1064] Advantageously plastidial transit peptides, which are beneficially used in an embodiment of the process of the present invention, are derived from the nucleic acid sequence encoding a protein selected from the group consisting of

[1065] ribulose bisphosphate carboxylase/oxygenase, 5-enolpyruvyl-shikimate-3-phosphate synthase, acetolactate synthase, chloroplast ribosomal protein CS17, Cs protein, ferredoxin, plastocyanin, ribulose bisphosphate carboxylase activase, tryptophan synthase, acyl carrier protein, plastid chaperonin-60, cytochrome c552, 22-kDA heat shock protein, 33-kDa Oxygen-evolving enhancer protein 1, ATP synthase y subunit, ATP synthase 6 subunit, chlorophyll-a/b-binding proteinII-1, Oxygen-evolving enhancer protein 2, Oxygen-evolving enhancer protein 3, photosystem I: P21, photosystem I: P28, photosystem I: P30, photosystem I: P35, photosystem I: P37, glycerol-3-phosphate acyltransferases, chlorophyll a/b binding protein, CAB2 protein, hydroxymethyl-bilane synthase, pyruvate-orthophosphate dikinase, CAB3 protein, plastid ferritin, ferritin, early light-inducible protein, glutamate-1-semialdehyde aminotransferase, protochlorophyllide reductase, starch-granule-bound amylase synthase, light-harvesting chlorophyll a/b-binding protein of photosystem II, major pollen allergen Lol p 5a, plastid CIpB ATP-dependent protease, superoxide dismutase, ferredoxin NADP oxidoreductase, 28-kDa ribonucleoprotein, 31-kDa ribonucleoprotein, 33-kDa ribonucleoprotein, acetolactate synthase, ATP synthase CF0 subunit 1, ATP synthase CFO subunit 2, ATP synthase CF0 subunit 3, ATP synthase CF0 subunit 4, cytochrome f, ADP-glucose pyrophosphorylase, glutamine synthase, glutamine synthase 2, carbonic anhydrase, GapA protein, heat-shock-protein hsp21, phosphate translocator, plastid CIpA ATP-dependent protease, plastid ribosomal protein CL24, plastid ribosomal protein CL9, plastid ribosomal protein PsCL18, plastid ribosomal protein PsCL25, DAHP synthase, starch phosphorylase, root acyl carrier protein II, betaine-aldehyde dehydrogenase, GapB protein, glutamine synthetase 2, phosphoribulokinase, nitrite reductase, ribosomal protein L12, ribosomal protein L13, ribosomal protein L21, ribosomal protein L35, ribosomal protein L40, triose phosphate-3-phosphoglyerate-phosphate translocator, ferredoxin-dependent glutamate synthase, glyceraldehyde-3-phosphate dehydrogenase, NADP-dependent malic enzyme and NADP-malate dehydrogenase.

[1066] More preferred the nucleic acid sequence encoding a plastidal transit peptide is derived from a nucleic acid sequence encoding a protein finally resided in the plastid and stemming from an organism selected from the group consisting of the species: Acetabularia mediterranea, Arabidopsis thaliana, Brassica campestris, Brassica napus, Capsicum annuum, Chlamydomonas reinhardtii, Cucurbita moschata, Dunaliella salina, Dunaliella tertiolecta, Euglena gracilis, Flaveria trinervia, Glycine max, Helianthus annuus, Hordeum vulgare, Lemna gibba, Lolium perenne, Lycopersion esculentum, Malus domestica, Medicago falcata, Medicago sativa, Mesembryanthemum crystallinum, Nicotiana plumbaginifolia, Nicotiana sylvestris, Nicotiana tabacum, Oenotherea hookeri, Oryza sativa, Petunia hybrida, Phaseolus vulgaris, Physcomitrella patens, Pinus tunbergii, Pisum sativum, Raphanus sativus, Silene pratensis, Sinapis alba, Solanum tuberosum, Spinacea oleracea, Stevia rebaudiana, Synechococcus, Synechocystis, Triticum aestivum and Zea mays.

[1067] Even more preferred nucleic acid sequences are encoding plastidal transit peptides as disclosed by von Heijne et al. (Plant Molecular Biology Reporter, 9 (2), 104 (1991)), which are hereby incorporated by reference. Table a shows some examples of the transit peptide sequences disclosed by von Heijne et al. According to the disclosure of the invention especially in the examples the skilled worker is able to link other nucleic acid sequences disclosed by von Heijne et al. to the respective nucleic acid sequences shown in Table I, columns 5 or 8, preferably the respective coding region thereof, or homologs or fragments thereof. Most preferred nucleic acid sequences encoding transit peptides are derived from the genus Spinacia such as chloroplast 30S ribosomal protein PSrp-1, root acyl carrier protein II, acyl carrier protein, ATP synthase: γ subunit, ATP synthase: σ subunit, cytochrom f, ferredoxin I, ferredoxin NADP oxidoreductase (=FNR), nitrite reductase, phosphoribulokinase, plastocyanin or carbonic anhydrase. The skilled worker will recognize that various other nucleic acid sequences encoding transit peptides can easily isolated from plastid-localized proteins, which are expressed from nuclear genes as precursors and are then targeted to plastids. Such transit peptides encoding sequences can be used for the construction of other expression constructs. The transit peptides advantageously used in the inventive process and which are part of the inventive nucleic acid sequences and proteins are typically 20 to 120 amino acids, preferably 25 to 110, 30 to 100 or 35 to 90 amino acids, more preferably 40 to 85 amino acids and most preferably 45 to 80 amino acids in length and function post-translationally to direct the protein to the plastid, preferably to the chloroplast. The nucleic acid sequences encoding such transit peptides are localized upstream of nucleic acid sequence encoding the mature protein. For the correct molecular joining of the transit peptide encoding nucleic acid and the nucleic acid encoding the protein to be targeted it is sometimes necessary to introduce additional base pairs at the joining position, which form restriction enzyme recognition sequences useful for the molecular joining of the different nucleic acid molecules. This procedure might lead to very few additional amino acids at the N-terminal of the mature imported protein, which usually and preferably do not interfere with the protein function. In any case, the additional base pairs at the joining position which form restriction enzyme recognition sequences have to be chosen with care, in order to avoid the formation of stop codons or codons which encode amino acids with a strong influence on protein folding, like e.g. proline. It is preferred that such additional codons encode small n.d. structural flexible amino acids such as glycine or alanine.

[1068] As mentioned above the nucleic acid sequences coding for the proteins as shown in Table II, application no. 1, column 5 or 8, or homologs or fragments thereof, are joined to a nucleic acid sequence encoding a plastidic transit peptide, e.g, if for the nucleic acid molecule in Table I, column 6 the term “plastidic”is indicated. This nucleic acid sequence encoding a transit peptide ensures transport of the protein to the organelle. The nucleic acid sequence of the gene to be expressed and the nucleic acid sequence encoding the transit peptide are operably linked. Therefore the transit peptide encoding sequence is fused in frame to the nucleic acid sequence coding for proteins as shown in Table II, application no. 1, column 5 or 8, or homologs or fragments thereof, e.g, if for the nucleic acid molecule in Table I, column 6 the term “plastidic” is indicated.

[1069] Other plastid transit peptides are disclosed by Schmidt et al. (J. Biol. Chem. 268 (36), 27447 (1993)), Della-Cioppa et al. (Plant. Physiol. 84, 965 (1987)), de Castro Silva Filho et al. (Plant Mol. Biol. 30, 769 (1996)), Zhao et al. (J. Biol. Chem. 270 (11), 6081 (1995)), Römer et al. (Biochem. Biophys. Res. Commun., 196 (3), 1414 (1993)), Keegstra et al. (Annu. Rev. Plant Physiol. Plant Mol. Biol. 40, 471 (1989)), Lubben et al. (Photosynthesis Res. 17, 173 (1988)) and Lawrence et al. (J. Biol. Chem. 272, (33), 20357 (1997)), Cho et al. (Planta 224, 598 (2006)), Lucia et al. (Transgenic R. 17 (4), 529 (2008)), Murayama et al. (Planta 225 (5), 1193 (2007)). A general review about targeting is disclosed by Allison R. Kermode in Critical Reviews in Plant Science 15 (4), 285 (1996).

[1070] Favored plastidal transit peptide sequences, which are used in an embodiment of the inventive process and which form part of the inventive nucleic acid sequences are generally enriched in hydroxylated amino acid residues (serine and threonine), with these two residues generally constituting 20-35% of the total. They often have an amino-terminal region empty of Gly, Pro, and charged residues. Furthermore they have a number of small hydrophobic amino acids such as valine and alanine and generally acidic amino acids are lacking. In addition they generally have a middle region rich in Ser, Thr, Lys and Arg. Overall they have very often a net positive charge.

[1071] Advantageously mitochondrial transit peptides, which are beneficially used in an embodiment of the process of the present invention, are derived from the nucleic acid sequence encoding a protein selected from the group consisting of 22 kDA heat shock protein; 70 kDA heat shock protein; 83 kDA heat shock protein; 40S ribosomal protein S19; 50S ribosomal protein L15; ribosomal protein L29; 22 kDA PSST protein of complex I; 2-oxoacid dehydrogenase family protein; 2-oxoglutarate/malate translocator; 3-methyl-2-oxobutanoate hydroxymethyltransferase; 3-Methylcrotonyl-coenzyme A carboxylase (MCCase); 7,8 - Dihydropteroate synthase (DHPS)/6-hydroxymethyl-7,8-dihydropterine pyrophosphokinase (HPPK); aconitate hydratase; acyl carrier protein (ACP); ADP/ATP translocase; alanyl-tRNA synthetase; alcohol dehydrogenase (ADH); alternative oxidase (AOX); aminoacylt-RNA ligase; asparate aminotransferase; ATP synthase alpha subunit; ATP synthase beta subunit; ATP synthase delta subunit; ATP synthase epsilon subunit; ATP synthase gamma subunit; ATP-dependent Clp protease-proteolytic subunit; Chaperonin 60- CPN60; Chaperonin 60 (2)-CPN60-2; Chaperonin 60(1)-CPN60-1; citrate synthase; cytochrome b-c1complex subunit Rieske FeS Protein; cytochrome c reductase-processing peptidase subunit II; dihydrolipoamide S-acetyltransferase; farnesyl-diphosphate synthase 1; formate dehydrogenase; fumarate hydratase; gamma carbonic anhydrase protein (gammaCA); gamma carbonic anhydrase-like protein 1 (gammaCAL1); gamma carbonic anhydrase-like protein 2 (gammaCAL2); gamma-aminobutyric acid transaminase (GABA-T); glutathione reductase (GR); glycine decarboxylase subunit H; glycine decarboxylase subunit L; glycine decarboxylase subunit P; glycine decarboxylase subunit T; isovaleryl-CoA dehydrogenase (IVD); lipoamide dehydrogenase; malate oxidoreductase; manganese superoxide dismutase (Mn)SOD; methylmalonate-semialdehyde dehydrogenase; mitochondrial-processing peptidase beta subunit (MPP); mitochondrial-processing peptidase subunit alpha (MPP); monodehydroascorbate reductase (MDHAR; NAD dependent isocitrate dehydrogenase; NAD dependent malate dehydrogenase; NAD-dependent malic enzyme; NAD-dependent malic enzyme 59 kDa isoform; NAD-dependent malic enzyme 62 kDa isoform; NAD-dependent malic enzyme 65 kDa isoform; NADH ubiquinone oxidoreductase 29 kDa subunit; NADH-ubiquinone oxidoreductase 18 kDa subunit; NADH-ubiquinone oxidoreductase 20 kDa subunit; NADH-ubiquinone oxidoreductase 23 kDa subunit; NAD-Hubiquinone oxidoreductase 75 kDa subunit; NADP dependent isocitrate dehydrogenase; NADP dependent malate dehydrogenase; nucleoside diphosphate kinase; nucleoside diphosphate kinase III; o-acetylserine (thiol) lyase (OAS-TL) ; propionyl-CoA carboxylase; protoporphyrinogen IX oxidase; pyruvate dehydrogenase E1 component subunit alpha; serine acetyltransferase (SAT); serine hydroxymethyltransferase; succinate dehydrogenase (SDH); succinic semialdehyde dehydrogenase (SSADH); succinyl-CoA ligase (GDP-forming) alpha-chain; succinyl-CoA ligase [GDP-forming] subunit beta; thiosulfate sulfurtransferase; threonyl-tRNA synthetase; trans-2-enoyl-CoA reductase; translocase inner membrane (TIM); translocase outer membrane (TOM); tRNA synthetase class I and ubiquinol cytochrome C oxidoreductase complex.

[1072] More preferred the nucleic acid sequence encoding a mitochondrial transit peptide is derived from a nucleic acid sequence encoding a protein finally resided in the mitochondrion and stemming from an organism selected from the group consisting of the species: Acetabularia mediterranea, Arabidopsis thaliana, Brassica campestris, Brassica napus, Capsicum annuum, Chlamydomonas reinhardtii, CururbitaCucurbita moschata, Daucus carota, Dunaliella salina, Dunaliella tertiolecta, Euglena gracilis, Flaveria trinervia, Glycine max, Helianthus annuus, Hordeum vulgare, Lactuca sativa, Lemna gibba, Lolium perenne, Lycopersion esculentum, Malus domestica, Medicago falcata, Medicago sativa, Mesembryanthemum crystallinum, Nicotiana plumbaginifolia, Nicotiana sylvestris, Nicotiana tabacum, Oenotherea hookeri, Oryza sativa, Petunia hybrida, Phaseolus vulgaris, Physcomitrella patens, Pinus tunbergii, Pisum sativum, Pyrus pyrifolia, Raphanus sativus, Saccharum officinarum, Silene pratensis, Sinapis alba, Solanum tuberosum, Spinacea oleracea, Stevia rebaudiana, Synechococcus, Synechocystis, Triticum aestivum and Zea mays.

[1073] Even more preferred nucleic acid sequences are encoding mitochondrial transit peptides as disclosed by White and Scandalios (Proc. Natl. Acad. Sci., 86 (10), 3534 (1989)), Cho et al (Plant Physiol. 149, 745 (2009)), Chatre et al (Journal of Experimental Botany, 60 (3), 741 (2009)), Murayama et al (Planta 225 (5), 1193 (2007) and Manzano et al (2006) , which are hereby incorporated by reference. Table b shows some examples of the transit peptide sequences disclosed by White and Scandalios (1989), Cho et al (2009), Chatre et al (2009), Murayama et al (2007) and Manzano et al (2006), Glaser et al (Plant Mol Biol. 38 (1-2), 311 (1998) and Huang et al (Plant Phys. 150, 1272 (2009)). According to the disclosure of the invention especially in the examples the skilled worker is able to link other nucleic acid sequences disclosed by Glaser et al (Plant Mol Biol. 38 (1-2), 311 (1998)) and Huang et al (Plant Phys. 150, 1272 (2009)) to the respective nucleic acid sequences shown in Table I, columns 5 or 8, preferably the coding region thereof, or a homolog or a fragment thereof. Most preferred nucleic acid sequences encoding transit peptides are derived from the genus Arabidopsis thaliana such as mitochondrial malate oxidoreductase, manganese superoxide dismutase (Mn)SOD, translocase inner membrane (TIM), translocase outer membrane (TOM), ATP synthase alpha subunit, ATP synthase beta subunit, ATP synthase gamma subunit, ATP synthase delta subunit, ATP synthase epsilon subunit, ADP/ATP translocase, aconitate hydratase and isovaleryl-CoA dehydrogenase (IVD). The skilled worker will recognize that various other nucleic acid sequences encoding transit peptides can easily isolated from mitochondrion-localized proteins, which are expressed from nuclear genes as precursors and are then targeted to mitochondria. Such transit peptides encoding sequences can be used for the construction of other expression constructs. The transit peptides advantageously used in the inventive process and which are part of the inventive nucleic acid sequences and proteins are typically 20 to 120 amino acids, preferably 25 to 110, 30 to 100 or 35 to 90 amino acids, more preferably 40 to 85 amino acids and most preferably 45 to 80 amino acids in length and function post-translationally to direct the protein to the mitochondrion. The nucleic acid sequences encoding such transit peptides are localized upstream of nucleic acid sequence encoding the mature protein. For the correct molecular joining of the transit peptide encoding nucleic acid and the nucleic acid encoding the protein to be targeted it is sometimes necessary to introduce additional base pairs at the joining position, which forms restriction enzyme recognition sequences useful for the molecular joining of the different nucleic acid molecules. This procedure might lead to very few additional amino acids at the N-terminal of the mature imported protein, which usually and preferably do not interfere with the protein function. In any case, the additional base pairs at the joining position which forms restriction enzyme recognition sequences have to be chosen with care, in order to avoid the formation of stop codons or codons which encode amino acids with a strong influence on protein folding, like e.g. proline. It is preferred that such additional codons encode small n.d. structural flexible amino acids such as glycine or alanine.

[1074] As mentioned above the nucleic acid sequences coding for the proteins as shown in the respective line in Table II, application no. 1, column 5 or 8, or homologs or fragments thereof, are joined to a nucleic acid sequence encoding a mitochondric transit peptide, e.g., if for the respective nucleic acid molecule in Table I, column 6 the term “mitochondrial” is indicated. This nucleic acid sequence encoding a transit peptide ensures transport of the protein to the organelle. The nucleic acid sequence of the gene to be expressed and the nucleic acid sequence encoding the transit peptide are operably linked. Therefore the transit peptide encoding sequence is fused in frame to the nucleic acid sequence coding for proteins as shown in the respective line in Table II, application no. 1, column 5 or 8, or homologs or fragments thereof, e.g, if for the nucleic acid molecule in the respective line in Table I, column 6 the term “mitochondrial” is indicated. (For the avoidance of doubt, the term “mitochondric” and “mitochondrial” are interchangeable.)

[1075] Other mitochondric transit peptides are disclosed by Cho et al. (Plant Physiol. 149, 745 (2009)), Gnanasambandam et al. (Functional Plant Biology 35(2), 166, (2008)), Subbaiah et al. (J. Biol.Chem. 281 (23), 15625 (2006)), Murcha et al. (Plant Physiol. 138, 2134 (2005)), Chatre et al. (Journal of Experimental Botany, 60 (3), 741 (2009)), Millar and Heazlewood (Plant Physiol. 131, 443 (2003)), White and Scandalios (Proc. Natl. Acad. Sci., 86 (10), 3534 (1989)), Laloi et al. (Proc. Natl. Acad. Sci., 98 (24), 14144 (2001)), Barranco-Medina et al. (Plant Physiol. and Biochem. 45, 729 (2007)), Olejnik et al. (FEBS J. 274 (18), 4877 (2007)), Fabre et al. (Plant Cell and Env. 30 (5), 617 (2007)), Murayama et al. (Planta 225 (5), 1193 (2007)), Bathgate et al. (Eur. J. Biochem. 183, 303 (1989)), Winning et al. (Plant J. 2, 763 (1992)), Murcha et al. (Plant Physiol. 143, 199 (2007)), Lehnerer et al. (Botanica Acta, 107, 306 (1994)), Kimura et al. (J. Biol.Chem. 265 (11), 6079 (1990)), Yang et al. (Plant Mol. Biol., 62, 951 (2006)).

[1076] Favored mitochondric transit peptide sequences, which are used in an embodiment of the inventive process and which form part of the inventive nucleic acid sequences are generally enriched in hydroxylated amino acid residues (serine and threonine), with these two residues generally constituting 20-35% of the total. They often have an amino-terminal region empty of Gly, Pro, and charged residues. Furthermore they have a number of small hydrophobic amino acids such as valine and alanine and generally acidic amino acids are lacking. In addition they generally have a middle region rich in Ser, Thr, Lys and Arg. Overall they have very often a net positive charge.

[1077] Nucleic acid sequences coding for the transit peptides may be chemically synthesized either in part or wholly according to structure of transit peptide sequences disclosed in the prior art. Said natural or chemically synthesized sequences can be directly linked to the sequences encoding the mature protein or via a linker nucleic acid sequence, which may be typically less than 500 base pairs, preferably less than 450, 400, 350, 300, 250 or 200 base pairs, more preferably less than 150, 100, 90, 80, 70, 60, 50, 40 or 30 base pairs and most preferably less than 25, 20, 15, 12, 9, 6 or 3 base pairs in length and are in frame to the coding sequence. Furthermore favorable nucleic acid sequences encoding transit peptides may comprise sequences derived from more than one biological and/or chemical source and may include a nucleic acid sequence derived from the amino-terminal region of the mature protein, which in its native state is linked to the transit peptide. In a preferred embodiment of the invention said amino-terminal region of the mature protein is typically less than 150 amino acids, preferably less than 140, 130, 120, 110, 100 or 90 amino acids, more preferably less than 80, 70, 60, 50, 40, 35, 30, 25 or 20 amino acids and most preferably less than 19, 18, 17, 16, 15, 14, 13, 12, 11 or 10 amino acids in length. But even shorter or longer stretches are also possible. In addition target sequences, which facilitate the transport of proteins to other cell compartments such as the vacuole, endoplasmic reticulum, golgi complex, glyoxysomes, peroxisomes, mitochondria (in case of a plastidal transit peptide) or plastids, especially chloroplasts (in case of a mitochondric transit peptide) may be also part of the inventive nucleic acid sequence. The proteins translated from said inventive nucleic acid sequences are a kind of fusion proteins that means the nucleic acid sequences encoding the plastidal transit peptide for example the ones shown in Table a, preferably the last one of the Table a are joint to the respective nucleic acid sequences shown in Table I, application no. 1, columns 5 or 8, especially the coding region thereof, or homologs or fragments thereof, in case of nucleic acid sequences being expressed in plastids, and that means the nucleic acid sequences encoding the mitochondric transit peptide for example the ones shown in Table b, preferably the last one of the Table b are joint to the respective nucleic acid sequences shown in Table I, application no. 1, columns 5 or 8, especially the coding region thereof, or homologs or fragments thereof, in case of nucleic acid sequences being expressed in mitochondria. The person skilled in the art is able to join said sequences in a functional manner. Advantageously the transit peptide part is cleaved off from the protein part shown in Table II, application no. 1, columns 5 or 8, or a homolog or fragment thereof, during or after the transport into the organelles, preferably into the plastids or mitochondria, respectively.

[1078] All products of the cleavage of the preferred transit peptide shown in the last line of Table a have preferably the N-terminal amino acid sequences QIA CSS or QIA EFQLTT in front of the start methionine of the respective protein metioned in Table II, application no. 1, column 5 or 8. or homologs or fragments thereof. Other short amino acid sequences of an range of 1 to 20 amino acids preferable 2 to 15 amino acids, more preferable 3 to 10 amino acids most preferably 4 to 8 amino acids are also possible in front of the start methionine of the protein metioned in Table II, application no. 1, columns 5 or 8, or homologs or fragments thereof. In case of the amino acid sequence QIA CSS the three amino acids in front of the start methionine are stemming from the LIC (=ligatation independent cloning) cassette. Said short amino acid sequence is preferred in the case of the expression of E. coli genes. In case of the amino acid sequence QIA EFQLTT the six amino acids in front of the start methionine are stemming from the LIC cassette. Said short amino acid sequence is preferred in the case of the expression of S. cerevisiae genes. The skilled worker knowns that other short sequences are also useful in the expression of the respective nucleic acid molecule comprising a polynucleotide as depicted in Table I, application no. 1, column 5 or 8, preferably the coding region thereof, or a homolog or a fragment thereof. Furthermore the skilled worker is aware of the fact that there is not a need for such short sequences in the expression of the genes.

TABLE a
Examples of plastidal transit peptides disclosed by von Heijne et al.

| Trans | | | SEQ | |
|---|---|---|---|---|
| Pep | Organism | Transit Peptide | ID NO. | Reference |
| 1 | Acetabularia | MASIMMNKSVVLSKECAKPLATPKVTLN | 1 | Mol. Gen. |
| | mediterranea | KRGFATTIATKNREMMVWQPFNNKMFET | | Genet. 218, |
| | | FSFLPP | | 445 (1989) |
| 2 | Arabidopsis | MAASLQSTATFLQSAKIATAPSRGSSHL | 2 | EMBO J. 8, |
| | thaliana | RSTQAVGKSFGLETSSARLTCSFQSDFK | | 3187 (1989) |
| | | DFTGKCSDAVKIAGFALATSALVVSGAS | | |
| | | AEGAPK | | |
| 3 | Arabidopsis | MAQVSRICNGVQNPSLICNLSKSSQRKS | 3 | Mol. Gen. |
| | thaliana | PLSVSLKTQQHPRAYPISSSWGLKKSGM | | Genet. 210, |
| | | TLIGSELRPLKVMSSVSTAEKASEIVLQ | | 437 (1987) |
| | | PIREISGLIKLP | | |
| 4 | Arabidopsis | MAAATTTTTTSSSISFSTKPSPSSSKSP | 4 | Plant |
| | thaliana | LPISRFSLPFSLNPNKSSSSSRRRGIKS | | Physiol. 85, |
| | | SSPSSISAVLNTTTNVTTTPSPTKPTKP | | 1110 (1987) |
| | | ETFISRFAPDQPRKGA | | |
| 5 | Arabidopsis | MITSSLTCSLQALKLSSPFAHGSTPLSS | 5 | J. Biol. |
| | thaliana | LSKPNSFPNHRMPALVPV | | Chem. 265, |
| | | | | 2763 (1990) |
| 6 | Arabidopsis | MASLLGTSSSAIWASPSLSSPSSKPSSS | 6 | EMBO J. |
| | thaliana | PICFRPGKLFGSKLNAGIQIRPKKNRSR | | 9, 1337 |
| | | YHVSVMNVATEINSTEQVVGKFDSKKSA | | (1990) |
| | | RPVYPFAAI | | |
| 7 | Arabidopsis | MASTALSSAIVGTSFIRRSPAPISLRSLP | 7 | Plant |
| | thaliana | SANTQSLFGLKSGTARGGRVVAM | | Physiol. 93, |
| | | | | 572 (1990) |
| 8 | Arabidopsis | MAASTMALSSPAFAGKAVNLSPAASEVL | 8 | Nucl. Acids |
| | thaliana | GSGRVTNRKTV | | Res. 14, |
| | | | | 4051 (1986) |
| 9 | Arabidopsis | MAAITSATVTIPSFTGLKLAVSSKPKTL | 9 | Gene 65, |
| | thaliana | STISRSSSATRAPPKLALKSSLKDFGVI | | 59 (1988) |
| | | AVATAASIVLAGNAMAMEVLLGSDDGSL | | |
| | | AFVPSEFT | | |
| 10 | Arabidopsis | MAAAVSTVGAINRAPLSLNGSGSGAVSA | 10 | Nucl. Acids |
| | thaliana | PASTFLGKKWTVSRFAQSNKKSNGSFKV | | Res. 17, |
| | | LAVKEDKQTDGDRWRGLAYDTSDDQIDI | | 2871 (1989) |
| 11 | Arabidopsis | MkSSMLSSTAWTSPAQATMVAPFTGLKS | 11 | Plant Mol. |
| | thaliana | SASFPVTRKANNDITSITSNGGRVSC | | Biol. 11, |
| | | | | 745 (1988) |
| 12 | Arabidopsis | MAASGTSATFRASVSSAPSSSSQLTHLK | 12 | Proc. Natl. |
| | thaliana | SPFKAVKY TPLPS SRSKSSSFSVSCT | | Acad. Sci. |
| | | IAKDPPVLMAAGSDPALWQRPDSFGRFG | | USA 86, |
| | | KFGGKYVPE | | 4604 (1989) |
| 13 | Brassica | MSTTFCSSVCMQATSLAATTRISFQKPA | 13 | Nucl. Acids |
| | campestris | LVSTTNLSFNLRRSIPTRFSISCAAKPE | | Res. 15, |
| | | TVEKVSKIVKKQLSLKDDQKVVAE | | 7197 (1987) |
| 14 | Brassica | MATTFSASVSMQATSLATTTRISFQKPV | 14 | Eur. J. Bio- |
| | napus | LVSNHGRTNLSFNLSRTRLSISC | | chem. 174, |
| | | | | 287 (1988) |
| 15 | Chlamydomonas | MQALSSRVNIAAKPQRAQRLWRAEEVKA | 15 | Plant Mol. |
| | reinhardtii | APKKEVGPKRGSLVK | | Biol. 12, |
| | | | | 463 (1989) |
| 16 | Cucurbita | MAELIQDKESAQSAATAAAASSGYERRN | 16 | FEBS Lett. |
| | moschata | EPAHSRKFLEVRSEEELLSCIKK | | 238, 424 |
| | | | | (1988) |
| 17 | Spinacea | MSTINGCLTSISPSRTQLKNTSTLRPTF | 17 | J. Biol. |
| | oleracea | IANSRVNPSSSVPPSLIRNQPVFAAPAP | | Chem. 265, |
| | | IITPTL | | 5414 (1990) |
| 18 | Spinacea | MTTAVTAAVSFPSTKTTSLSARCSSVIS | 18 | Curr. |
| | oleracea | PDKISYKKVPLYYRNVSATGKMGPIRAQ | | Genet. 13, |
| | | IASDVEAPPPAPAKVEKMS | | 517 (1988) |
| 19 | Spinacea | MTTAVTAAVSFPSTKTTSLSARSSSVIS | 19 | |
| | oleracea | PDKISYKKVPLYYRNVSATGKMGPIRA | | |

TABLE b
Examples of mitochondric transit peptides disclosed by
White and Scandalios (1989); Cho et al (2009); Chatre et al
(2008); Murayama et al (2007); Manzano et al (2006):

| Trans | | | SEQ | |
|---|---|---|---|---|
| Pep | Organism | Transit Peptide | ID NO. | Reference |
| 20 | Zea mays | MALRTLASKKVLSFPFGGAGRPLAAA | 63 | Proc. Nat. |
| | | ASARGV | | Acad. Sci. |
| | | | | 86, 3534 |
| | | | | (1989) |
| 21 | Oryza sativa | MGKAAAVGTAVVVAAAVGVAVVLA | 64 | Plant |
| | | | | Physiol |
| | | | | 149, 745 |
| | | | | (2009) |
| 22 | Oryza sativa | MGKGTVVGTAVVVCAAAAAAVGVAVV | 65 | Plant |
| | | VS | | Physiol |
| | | | | 149, 745 |
| | | | | (2009) |
| 23 | Arabidosis | MIITTHKRDINLLVLQLGAALAVSFA | 66 | J. Exp. Bot. |
| | thaliana | GFLFARFRKNTKR | | 60 (3), 741 |
| | | | | (2009) |
| 24 | Oryza sativa | MAAAAISHLRRGAPRHARALYLSTR- | 67 | Planta 225 |
| | | RFSSSSAAGVAPLAAVAASARR- | | (5), 1193 |
| | | LLSTSVDSGASSGESYKPPLFDPF- | | (2007) |
| | | RAASLASSAPPLESPPIEELPDDA- | | |
| | | TPPPEEEPGLPAPEKDPVATACQHE- | | |
| | | LEGLKAVETVRSRKESTEEKEAWSL- | | |
| | | LGRSVVSYCGTA | | |
| 25 | Arabidosis | MSVSCCCRNLGKTIKKAIPSHHLHL- | 68 | Plant Mol. |
| | thaliana | RSLGGSLYRRRIQSSSMETDLKS | | Bio. 61, |
| | | | | 195 (2006) |

[1079] Alternatively to the targeting of the respective sequences shown in Table II, application no. 1, columns 5 or 8, or homologs or fragments thereof, preferably of sequences in general encoded in the nucleus with the aid of the targeting sequences mentioned for example in Table a alone, Table b alone, or in combination with other targeting sequences preferably into plastids or mitochondria, respectively, the nucleic acids of the invention can directly be introduced into the plastidal or mitochondrial genome. Therefore in a preferred embodiment the respective nucleic acid sequences shown in the respective line in Table I, application no. 1, columns 5 or 8, preferably the coding region thereof, or homologs or fragments thereof, are directly introduced and expressed in plastids e.g, if for the nucleic acid molecule in the respective line in Table I, column 6, the term “plastidic” is indicated, or are directly introduced and expressed in mitochondria e.g., if for the nucleic acid molecule in the respective line in Table I, column 6 the term “mitochondrial” is indicated.

[1080] The term “introduced” in the context of this specification shall mean the insertion of a nucleic acid sequence into the organism by means of a “transfection”, “transduction” or preferably by “transformation”.

[1081] A plastid, such as a chloroplast, or a mitochondrion, has been “transformed” by an exogenous (preferably foreign) nucleic acid sequence if a nucleic acid sequence has been introduced into the plastid or mitochondrion that means that this sequence has crossed the membrane or the membranes of the plastid or of the mitochondrion. The exogenous, preferably foreign, DNA may be integrated (covalently linked) into plastid or mitochondrial DNA making up the genome of the plastid or mitochondrion, or it may remain unintegrated (e.g., by including a chloroplast origin of replication). “Stably” integrated DNA sequences are those, which are inherited through plastid or mitochondrion replication, thereby transferring new plastids or mitochondria, with the features of the integrated DNA sequence to the progeny.

[1082] For expression a person skilled in the art is familiar with different methods to introduce the nucleic acid sequences into different organelles, such as the preferred plastids or mitochondria. Such methods are for example disclosed by Pal Maiga (Annu. Rev. Plant Biol. 55, 289, (2004)), Evans T. (WO 2004/040973), McBride K. E. et al. (U.S. Pat. No. 5,455,818), Daniell H. et al. (U.S. Pat. No. 5,932,479 and U.S. Pat. No. 5,693,507) and Straub J. M. et al. (U.S. Pat. No. 6,781,033). A preferred method is the transformation of microspore-derived hypocotyl or cotyledonary tissue (which are green and thus contain numerous plastids) leaf tissue and afterwards the regeneration of shoots from said transformed plant material on selective medium. As methods for the transformation bombarding of the plant material or the use of independently replicating shuttle vectors are well known by the skilled worker. But also a PEG-mediated transformation of plastids or Agrobacterium transformation with binary vectors are possible. Useful markers for the transformation of plastids are positive selection markers for example the chloramphenicol-, streptomycin-, kanamycin-, neomycin-, amikamycin-, spectinomycin-, triazine- and/or lincomycin-resistance genes. As additional markers named in the literature often as secondary markers, genes coding for the resistance against herbicides such as phosphinothricin (=glufosinate, BASTA™, Liberty™, encoded by the bar gene), glyphosate (=N-(phosphonomethyl)glycine, Roundup Ready™, encoded by the 5-enolpyruvylshikimaete-3-phosphate synthase gene=epsps), sulfonylurea (e.g. =Staple™, encoded by the acetolactate synthase gene), imidazolinone (=IMI, e.g. imazethapyr, imazamox, Clearfield™, encoded by the acetohydroxyacid synthase (AHAS) gene, also known as acetolactate synthase (ALS) gene) or bromoxynil (=Buctril™, encoded by the oxy gene) or genes coding for antibiotics such as hygromycin or G418 are useful for further selection. Such secondary markers are useful in the case when most genome copies are transformed. In addition negative selection markers such as the bacterial cytosine deaminase (encoded by the codA gene) are also useful for the transformation of organelles, especially plastids.

[1083] Thus, in one embodiment, an activity disclosed herein as being conferred by a polypeptide shown in the respective line in Table II, or a homolog or a fragment thereof, is increased or generated by linking the polypeptide disclosed in respective line in Table II, or a homolog or a fragment thereof, or a polypeptide conferring the same said activity with a targeting signal as herein described, if in the respective line in column 6 of Table II the term “plastidic” is listed for said polypeptide. For example, the polypeptide described can be linked to the targeting signal shown in Table a.

[1084] Accordingly, in the method of the invention for producing a transgenic plant with increased fine chemical production as compared to a corresponding, e.g. non-transformed, wild type plant, comprising transforming a non-human organism, preferably a plant cell, a plant or a part thereof, with the mentioned nucleic acid molecule, said nucleic acid molecule selected from said mentioned group encodes for a polypeptide conferring said activity being linked to a targeting signal as mentioned herein, e.g. as mentioned in Table a, e.g. if in the respective line in column 6 of Table II the term “plastidic” is listed for the encoded polypeptide.

[1085] To increase the possibility of identification of transformants it is possible to use reporter genes other then the aforementioned resistance genes or in addition to said genes. Reporter genes are for example β-galactosidase-, β-glucuronidase-(GUS), alkaline phosphatase- and/or green-fluorescent protein-genes (GFP).

[1086] For the process of the present invention it may be of great advantage that by transforming the plastids the intraspecies specific transgene flow is blocked, because a lot of species such as corn, cotton and rice have a strict maternal inheritance of plastids. By placing the respective genes specified in the respective line in Table I, application no. 1, columns 5 or 8, preferably the coding region, or homologs or fragments thereof, e.g. if for the nucleic acid molecule in the respective line in column 6 of Table I the term “plastidic” is indicated, in the plastids of plants, these genes will not be present in the pollen of said plants.

[1087] A further preferred embodiment of the invention relates to the use of so called “chloroplast localization sequences”, in which a first RNA sequence or molecule is capable of transporting or “chaperoning” a second RNA sequence, such as a RNA sequence transcribed from the sequences depicted in the respective line in Table I, application no. 1, columns 5 or 8, preferably the coding region theeof, or a homolog or a fragment thereof, or a sequence encoding a protein, as depicted in the respective line in Table II, application no. 1, columns 5 and 8, or a homolog or a fragment thereof, from an external environment inside a cell or outside a plastid into a chloroplast. In one embodiment the chloroplast localization signal is substantially similar or complementary to a complete or intact viroid sequence. The chloroplast localization signal may be encoded by a DNA sequence, which is transcribed into the chloroplast localization RNA. The term “viroid” refers to a naturally occurring single stranded RNA molecule (Flores, C. R. Acad. Sci. III. 324 (10), 943 (2001)). Viroids usually contain about 200-500 nucleotides and generally exist as circular molecules. Examples of viroids that contain chloroplast localization signals include but are not limeted to ASBVd, PLMVd, CChMVd and ELVd. The viroid sequence or a functional part of it can be fused to the sequences depicted in the respective line in Table I, application no. 1, columns 5 or 8, preferably the coding region thereof, or a homolog or a fragment thereof, or a sequence encoding a protein, as depicted in the respective line in Table II, application no. 1, columns 5 or 8, or a homolog or a fragment thereof, in such a manner that the viroid sequence transports a sequence transcribed from a sequence as depicted in the respective line in Table I, application no. 1 columns 5 or 8, preferably the coding region thereof, or a homolog or a fragment thereof, or a sequence encoding a protein as depicted in th erespective line in Table II, application no. 1 columns 5 or 8, or a homolog or a fragment thereof, into the chloroplasts, e.g. if for the nucleic acid molecule in column 6 of Table I the term “plastidic” is indicated. A preferred embodiment uses a modified ASBVd (Navarro et al., Virology. 268 (1), 218 (2000)).

[1088] In a further specific embodiment the protein to be expressed in the plastids such as the proteins depicted in the respective line in Table II, application no.1, columns 5 or 8, or a homolog or a fragment thereof, e.g. if for the nucleic acid molecule in the respective line in column 6 of Table I the term “plastidic” is indicated, are encoded by different nucleic acids. Such a method is disclosed in WO 2004/040973, which shall be incorporated by reference. WO 2004/040973 teaches a method, which relates to the translocation of an RNA corresponding to a gene or gene fragment into the chloroplast by means of a chloroplast localization sequence. The genes, which should be expressed in the plant or plant cells, are split into nucleic acid fragments, which are introduced into different compartments in the plant e.g. the nucleus, the plastids and/or mitochondria. Additionally plant cells are described in which the chloroplast contains a ribozyme fused at one end to an RNA encoding a fragment of a protein used in the inventive process such that the ribozyme can trans-splice the translocated fusion RNA to the RNA encoding the gene fragment to form and as the case may be reunite the nucleic acid fragments to an intact mRNA encoding a functional protein for example as disclosed in the respective line in Table II, application no. 1, columns 5 or 8, or a homolog or a fragment thereof.

[1089] In a preferred embodiment of the invention the nucleic acid sequences as shown in the respective line in Table I, application no. 1, columns 5 or 8, preferably the coding region thereof, or homologs or fragments thereof, e.g. if for the nucleic acid molecule in the respective line in column 6 of Table I the term “plastidic” is indicated, used in the inventive process are transformed into plastids, which are metabolical active. Those plastids should preferably maintain at a high copy number in the plant or plant tissue of interest, most preferably the chloroplasts found in green plant tissues, such as leaves or cotyledons or in seeds.

[1090] For a good expression in the plastids the nucleic acid sequences as shown in The respective line in Table I, application no. 1, columns 5 or 8, preferably the coding region thereof, or homologs or fargments thereof, e.g. if for the nucleic acid molecule in the respective line in column 6 of Table I the term “plastidic” is indicated, are introduced into an expression cassette using preferably a promoter and terminater, which are active in plastids preferably a chloroplast promoter. Examples of such promoters include the psbA promoter from the gene from spinach or pea, the rbcL promoter, and the atpB promoter from corn.

[1091] In another embodiment, an activity disclosed herein as being conferred by a polypeptide shown in the respective line in Table II is increased or generated by linking the polypeptide disclosed in the respective line in Table II or a polypeptide conferring the same said activity with an targeting signal as herein described, if in the respective line in column 6 of Table II the term “mitochondrial ” is listed for said polypeptide. For example, the polypeptide described can be linked to the targeting signal shown in Table b.

[1092] In these cases the respective organelle is a mitochondrion. However, the remarks made regarding the plastids are applicable in analogy.

[1093] In another embodiment, an activity disclosed herein as being conferred by a polypeptide shown in Table II is increased or generated by the polypeptide disclosed in the respective line in Table II or a polypeptide conferring the same said activity without linking said polypeptide shown in the respective line in Table II to a targeting signal, if in the respective line in column 6 of Table II the term “non-targeted” is listed for said polypeptide.

[1094] For the purposes of the description of the present invention, the terms “non-targeted” shall indicate, that the nucleic acid of the invention is expressed without the addition of a “non-natural transit peptide encoding sequence”. A “non-natural transit peptide encoding sequence” is a sequence which is not a natural part of a nucleic acid of the invention, e.g. of the nucleic acids depicted in the respective line in Table I column 5 or 8, preferably the coding region thereof, or homologs or fragments thereof, but which is rather added by molecular manipulation steps as for example described in the example under “plastid targeted expression”. However, the terms “non-targeted” shall not exclude a targeted localisation to any cell compartment for the products of the inventive nucleic acid sequences by their naturally occuring sequence properties within the background of the transgenic organism. The subcellular location of the mature polypetide derived from the enclosed sequences can be predicted by a skilled person for the organism (plant) by using software tools like TargetP (Emanuelsson et al., J. Mol. Biol. 300, 1005 (2000)), ChloroP (Emanuelsson et al., Protein Science 8, 978 (1999)) or other predictive software tools (Emanuelsson et al., Nature Protocols 2, 953 (2007)).

[1095] Preferably, the process according to the invention further comprises the step of recovering the fine chemical, which is synthesized by the organism from the organism and/or from the culture medium used for the growth or maintenance of the organism. The term “recovering” means the isolation of the fine chemical in different purities, that means on the one hand harvesting of the biological material, which contains the fine chemical without further purification and on the other hand purities of the fine chemical between 5% and 100% purity, preferred purities are in the range of 10% and 99%. In one embodiment, the purities are at least 20%, 30%, 40%, 50%, 60%, 70%, 80%, 90%, 95% or 99%.

[1096] Advantageously the process for the production of the fine chemical methionine leads to an enhanced production of the respective fine chemical. The terms “enhanced” or “increase” mean at least a 10%, 20%, 30%, 40% or 50%, preferably at least 60%, 70%, 80%, 90% or 100%, more preferably 150%, 200%, 300%, 400% or 500% higher production of the respective fine chemical methionine in comparison to the wild-type as defined above, e.g. that means in comparison to a non-human organism without the aforementioned modification of the activity of a protein as shown in the respective line in Table II, application no. 1, column 5 or 8, or a fragment or a homolog thereof. The modification of the activity of a protein as shown in the respective line in Table II, application no. 1, column 5 or 8, or a homolog or a fragment thereof, or their combination can be achieved by joining the protein to a respective transit peptide, e.g. if for the respective encoding nucleic acid molecule in column 6 of Table I the term “plastidic” or “mitochondrial” is indicated.

[1097] Surprisingly it was found, that the transgenic expression of a protein as shown in the respective line in Table II, application no. 1, column 5, especially from the Saccaromyces cerevisiae, E. coli, Arabidopsis thaliana, Azotobacter vinelandii, Brassica napus, Glycine max, Oryza sativa, Physcomitrella patens, Synechocystis sp., Thermus thermophilus, Zea mays in a non-human organism, like a plant or a part thereof, such as Arabidopsis thaliana for example, or a microorganism, conferred a production of or an increase in methionine,respectively, to the transgenic non-human organism as compared to a corresponding non-transformed wild type.

[1098] In one embodiment the transgenic expression of a protein as shown in the respective line in Table II, application no. 1, column 5 or 8, or a homolog or a fragment thereof, especially from the Saccaromyces cerevisiae, E. coli, Arabidopsis thaliana, Azotobacter vinelandii, Brassica napus, Glycine max, Oryza sativa, Physcomitrella patens, Synechocystis sp., Thermus thermophilus, Zea mays in a non-human organism, like a plant or a part thereof, such as Arabidopsis thaliana for example, or a microorganism, confers a production of or an increase in methionine, respectively, to the transgenic non-human organism as compared to a corresponding non-transformed wild type.

[1099] Accordingly, in one embodiment, an increase of methionine in a non-human organism, as compared to a corresponding non-transformed wild type non-human organism, is conferred in the process of the invention, if the activity of a polypeptide showing the activity of a 49747384_SOYBEAN-protein, or if the activity of the polypeptide 49747384_SOYBEAN, preferably represented by SEQ ID NO. 70, or a homolog or fragment thereof, or if the activity of a polypeptide encoded by a nucleic acid molecule comprising the nucleic acid SEQ ID NO. 69, preferably the coding region thereof, or a homolog or fragment thereof, e.g. derived from Glycine max, is increased or generated. For example the activity of a nucleic acid molecule or a polypeptide comprising the nucleic acid, preferably the coding region thereof, or polypeptide or the consensus sequence or the polypeptide motif, as depicted in Table I, II or IV, application No. 1, column 5 or 8 in the respective same line as the nucleic acid molecule SEQ ID NO. 69 or polypeptide SEQ ID NO. 70, respectively, or a homolog or a fragment thereof, is increased or generated, or if the activity 49747384_SOYBEAN-protein is increased or generated in a non-human organism, like a microorganism or a plant cell, plant or part thereof, especially with non-targeted localization, For example, an increase of the methionine of at least 1 percent, particularly in a range of 41 to 74-percent is conferred as compared to a corresponding non-transformed wild type non-human organism.

[1100] Accordingly, in one embodiment, an increase of methionine in a non-human organism, as compared to a corresponding non-transformed wild type non-human organism, is conferred in the process of the invention, if the activity of a polypeptide showing the activity of a At1g09680protein, or if the activity of the polypeptide At1 g09680, preferably represented by SEQ ID NO. 353, or a homolog or fragment thereof, or if the activity of a polypeptide encoded by a nucleic acid molecule comprising the nucleic acid SEQ ID NO. 352, preferably the coding region thereof, or a homolog or fragment thereof, e.g. derived from Arabidopsis thaliana, is increased or generated. For example the activity of a nucleic acid molecule or a polypeptide comprising the nucleic acid, preferably the coding region thereof, or polypeptide or the consensus sequence or the polypeptide motif, as depicted in Table I, II or IV, application No. 1, column 5 or 8 in the respective same line as the nucleic acid molecule SEQ ID NO. 352 or polypeptide SEQ ID NO. 353, respectively, or a homolog or a fragment thereof, is increased or generated, or if the activity At1 g09680-protein is increased or generated in a non-human organism, like a microorganism or a plant cell, plant or part thereof, especially with non-targeted localization, For example, an increase of the methionine of at least 1 percent, particularly in a range of 41 to 60-percent is conferred as compared to a corresponding non-transformed wild type non-human organism.

[1101] Accordingly, in one embodiment, an increase of methionine in a non-human organism, as compared to a corresponding non-transformed wild type non-human organism, is conferred in the process of the invention, if the activity of a polypeptide showing the activity of a DNA-binding protein, or if the activity of the polypeptide At1g14490, preferably represented by SEQ ID NO. 386, or a homolog or fragment thereof, or if the activity of a polypeptide encoded by a nucleic acid molecule comprising the nucleic acid SEQ ID NO. 385, preferably the coding region thereof, or a homolog or fragment thereof, e.g. derived from Arabidopsis thaliana, is increased or generated. For example the activity of a nucleic acid molecule or a polypeptide comprising the nucleic acid, preferably the coding region thereof, or polypeptide or the consensus sequence or the polypeptide motif, as depicted in Table I, II or IV, application No. 1, column 5 or 8 in the respective same line as the nucleic acid molecule SEQ ID NO. 385 or polypeptide SEQ ID NO. 386, respectively, or a homolog or a fragment thereof, is increased or generated, or if the activity DNA-binding protein is increased or generated in a non-human organism, like a microorganism or a plant cell, plant or part thereof, especially with non-targeted localization, For example, an increase of the methionine of at least 1 percent, particularly in a range of 38 to 52-percent is conferred as compared to a corresponding non-transformed wild type non-human organism.

[1102] Accordingly, in one embodiment, an increase of methionine in a non-human organism, as compared to a corresponding non-transformed wild type non-human organism, is conferred in the process of the invention, if the activity of a polypeptide showing the activity of a bifunctional aspartokinase/homoserine dehydrogenase, or if the activity of the polypeptide At1g31230, preferably represented by SEQ ID NO. 628, or a homolog or fragment thereof, or if the activity of a polypeptide encoded by a nucleic acid molecule comprising the nucleic acid SEQ ID NO. 627, preferably the coding region thereof, or a homolog or fragment thereof, e.g. derived from Arabidopsis thaliana, is increased or generated. For example the activity of a nucleic acid molecule or a polypeptide comprising the nucleic acid, preferably the coding region thereof, or polypeptide or the consensus sequence or the polypeptide motif, as depicted in Table I, II or IV, application No. 1, column 5 or 8 in the respective same line as the nucleic acid molecule SEQ ID NO. 627 or polypeptide SEQ ID NO. 628, respectively, or a homolog or a fragment thereof, is increased or generated, or if the activity bifunctional aspartokinase/homoserine dehydrogenase is increased or generated in a non-human organism, like a microorganism or a plant cell, plant or part thereof, especially with non-targeted localization, For example, an increase of the methionine of at least 1 percent, particularly in a range of 60 to 306-percent is conferred as compared to a corresponding non-transformed wild type non-human organism.

[1103] Accordingly, in one embodiment, an increase of methionine in a non-human organism, as compared to a corresponding non-transformed wild type non-human organism, is conferred in the process of the invention, if the activity of a polypeptide showing the activity of a protein phosphatase, or if the activity of the polypeptide At1 g48040, preferably represented by SEQ ID NO. 813, or a homolog or fragment thereof, or if the activity of a polypeptide encoded by a nucleic acid molecule comprising the nucleic acid SEQ ID NO. 812, preferably the coding region thereof, or a homolog or fragment thereof, e.g. derived from Arabidopsis thaliana, is increased or generated. For example the activity of a nucleic acid molecule or a polypeptide comprising the nucleic acid, preferably the coding region thereof, or polypeptide or the consensus sequence or the polypeptide motif, as depicted in Table I, II or IV, application No. 1, column 5 or 8 in the respective same line as the nucleic acid molecule SEQ ID NO. 812 or polypeptide SEQ ID NO. 813, respectively, or a homolog or a fragment thereof, is increased or generated, or if the activity protein phosphatase is increased or generated in a non-human organism, like a microorganism or a plant cell, plant or part thereof, especially with non-targeted localization, For example, an increase of the methionine of at least 1 percent, particularly in a range of 47 to 49-percent is conferred as compared to a corresponding non-transformed wild type non-human organism.

[1104] Accordingly, in one embodiment, an increase of methionine in a non-human organism, as compared to a corresponding non-transformed wild type non-human organism, is conferred in the process of the invention, if the activity of a polypeptide showing the activity of a transcription factor, or if the activity of the polypeptide At1g68320, preferably represented by SEQ ID NO. 1062, or a homolog or fragment thereof, or if the activity of a polypeptide encoded by a nucleic acid molecule comprising the nucleic acid SEQ ID NO. 1061, preferably the coding region thereof, or a homolog or fragment thereof, e.g. derived from Arabidopsis thaliana, is increased or generated. For example the activity of a nucleic acid molecule or a polypeptide comprising the nucleic acid, preferably the coding region thereof, or polypeptide or the consensus sequence or the polypeptide motif, as depicted in Table I, II or IV, application No. 1, column 5 or 8 in the respective same line as the nucleic acid molecule SEQ ID NO. 1061 or polypeptide SEQ ID NO. 1062, respectively, or a homolog or a fragment thereof, is increased or generated, or if the activity transcription factor is increased or generated in a non-human organism, like a microorganism or a plant cell, plant or part thereof, especially with non-targeted localization, For example, an increase of the methionine of at least 1 percent, particularly in a range of 38 to 47-percent is conferred as compared to a corresponding non-transformed wild type non-human organism.

[1105] Accordingly, in one embodiment, an increase of methionine in a non-human organism, as compared to a corresponding non-transformed wild type non-human organism, is conferred in the process of the invention, if the activity of a polypeptide showing the activity of a protein phosphatase, or if the activity of the polypeptide At2g25070, preferably represented by SEQ ID NO. 1299, or a homolog or fragment thereof, or if the activity of a polypeptide encoded by a nucleic acid molecule comprising the nucleic acid SEQ ID NO. 1298, preferably the coding region thereof, or a homolog or fragment thereof, e.g. derived from Arabidopsis thaliana, is increased or generated. For example the activity of a nucleic acid molecule or a polypeptide comprising the nucleic acid, preferably the coding region thereof, or polypeptide or the consensus sequence or the polypeptide motif, as depicted in Table I, II or IV, application No. 1, column 5 or 8 in the respective same line as the nucleic acid molecule SEQ ID NO. 1298 or polypeptide SEQ ID NO. 1299, respectively, or a homolog or a fragment thereof, is increased or generated, or if the activity protein phosphatase is increased or generated in a non-human organism, like a microorganism or a plant cell, plant or part thereof, especially with non-targeted localization, For example, an increase of the methionine of at least 1 percent, particularly in a range of 42 to 89-percent is conferred as compared to a corresponding non-transformed wild type non-human organism.

[1106] Accordingly, in one embodiment, an increase of methionine in a non-human organism, as compared to a corresponding non-transformed wild type non-human organism, is conferred in the process of the invention, if the activity of a polypeptide showing the activity of a At2g45420-protein, or if the activity of the polypeptide At2g45420, preferably represented by SEQ ID NO. 1624, or a homolog or fragment thereof, or if the activity of a polypeptide encoded by a nucleic acid molecule comprising the nucleic acid SEQ ID NO. 1623, preferably the coding region thereof, or a homolog or fragment thereof, e.g. derived from Arabidopsis thaliana, is increased or generated. For example the activity of a nucleic acid molecule or a polypeptide comprising the nucleic acid, preferably the coding region thereof, or polypeptide or the consensus sequence or the polypeptide motif, as depicted in Table I, II or IV, application No. 1, column 5 or 8 in the respective same line as the nucleic acid molecule SEQ ID NO. 1623 or polypeptide SEQ

[1107] ID NO. 1624, respectively, or a homolog or a fragment thereof, is increased or generated, or if the activity At2g45420-protein is increased or generated in a non-human organism, like a microorganism or a plant cell, plant or part thereof, especially with non-targeted localization, For example, an increase of the methionine of at least 1 percent, particularly in a range of 32 to 37-percent is conferred as compared to a corresponding non-transformed wild type non-human organism.

[1108] Accordingly, in one embodiment, an increase of methionine in a non-human organism, as compared to a corresponding non-transformed wild type non-human organism, is conferred in the process of the invention, if the activity of a polypeptide showing the activity of a adenosine kinase, or if the activity of the polypeptide At3g09820, preferably represented by SEQ ID NO. 1697, or a homolog or fragment thereof, or if the activity of a polypeptide encoded by a nucleic acid molecule comprising the nucleic acid SEQ ID NO. 1696, preferably the coding region thereof, or a homolog or fragment thereof, e.g. derived from Arabidopsis thaliana, is increased or generated. For example the activity of a nucleic acid molecule or a polypeptide comprising the nucleic acid, preferably the coding region thereof, or polypeptide or the consensus sequence or the polypeptide motif, as depicted in Table I, II or IV, application No. 1, column 5 or 8 in the respective same line as the nucleic acid molecule SEQ ID NO. 1696 or polypeptide SEQ ID NO. 1697, respectively, or a homolog or a fragment thereof, is increased or generated, or if the activity adenosine kinase is increased or generated in a non-human organism, like a microorganism or a plant cell, plant or part thereof, especially with non-targeted localization, For example, an increase of the methionine of at least 1 percent, particularly in a range of 53 to 53-percent is conferred as compared to a corresponding non-transformed wild type non-human organism.

[1109] Accordingly, in one embodiment, an increase of methionine in a non-human organism, as compared to a corresponding non-transformed wild type non-human organism, is conferred in the process of the invention, if the activity of a polypeptide showing the activity of a protein kinase, or if the activity of the polypeptide At3g23000, preferably represented by SEQ ID NO. 1816, or a homolog or fragment thereof, or if the activity of a polypeptide encoded by a nucleic acid molecule comprising the nucleic acid SEQ ID NO. 1815, preferably the coding region thereof, or a homolog or fragment thereof, e.g. derived from Arabidopsis thaliana, is increased or generated. For example the activity of a nucleic acid molecule or a polypeptide comprising the nucleic acid, preferably the coding region thereof, or polypeptide or the consensus sequence or the polypeptide motif, as depicted in Table I, II or IV, application No. 1, column 5 or 8 in the respective same line as the nucleic acid molecule SEQ ID NO. 1815 or polypeptide SEQ ID NO. 1816, respectively, or a homolog or a fragment thereof, is increased or generated, or if the activity protein kinase is increased or generated in a non-human organism, like a microorganism or a plant cell, plant or part thereof, especially with non-targeted localization, For example, an increase of the methionine of at least 1 percent, particularly in a range of 43 to 67-percent is conferred as compared to a corresponding non-transformed wild type non-human organism.

[1110] Accordingly, in one embodiment, an increase of methionine in a non-human organism, as compared to a corresponding non-transformed wild type non-human organism, is conferred in the process of the invention, if the activity of a polypeptide showing the activity of a auxin response factor, or if the activity of the polypeptide At3g61830, preferably represented by SEQ ID NO. 2368, or a homolog or fragment thereof, or if the activity of a polypeptide encoded by a nucleic acid molecule comprising the nucleic acid SEQ ID NO. 2367, preferably the coding region thereof, or a homolog or fragment thereof, e.g. derived from Arabidopsis thaliana, is increased or generated. For example the activity of a nucleic acid molecule or a polypeptide comprising the nucleic acid, preferably the coding region thereof, or polypeptide or the consensus sequence or the polypeptide motif, as depicted in Table I, II or IV, application No. 1, column 5 or 8 in the respective same line as the nucleic acid molecule SEQ ID NO. 2367 or polypeptide SEQ ID NO. 2368, respectively, or a homolog or a fragment thereof, is increased or generated, or if the activity auxin response factor is increased or generated in a non-human organism, like a microorganism or a plant cell, plant or part thereof, especially with non-targeted localization, For example, an increase of the methionine of at least 1 percent, particularly in a range of 36 to 147-percent is conferred as compared to a corresponding non-transformed wild type non-human organism.

[1111] Accordingly, in one embodiment, an increase of methionine in a non-human organism, as compared to a corresponding non-transformed wild type non-human organism, is conferred in the process of the invention, if the activity of a polypeptide showing the activity of a monthiol glutaredoxin, or if the activity of the polypeptide At3g62930, preferably represented by SEQ ID NO. 2574, or a homolog or fragment thereof, or if the activity of a polypeptide encoded by a nucleic acid molecule comprising the nucleic acid SEQ ID NO. 2573, preferably the coding region thereof, or a homolog or fragment thereof, e.g. derived from Arabidopsis thaliana, is increased or generated. For example the activity of a nucleic acid molecule or a polypeptide comprising the nucleic acid, preferably the coding region thereof, or polypeptide or the consensus sequence or the polypeptide motif, as depicted in Table I, II or IV, application No. 1, column 5 or 8 in the respective same line as the nucleic acid molecule SEQ ID NO. 2573 or polypeptide SEQ ID NO. 2574, respectively, or a homolog or a fragment thereof, is increased or generated, or if the activity monthiol glutaredoxin is increased or generated in a non-human organism, like a microorganism or a plant cell, plant or part thereof, especially with non-targeted localization, For example, an increase of the methionine of at least 1 percent, particularly in a range of 37 to 63-percent is conferred as compared to a corresponding non-transformed wild type non-human organism.

[1112] Accordingly, in one embodiment, an increase of methionine in a non-human organism, as compared to a corresponding non-transformed wild type non-human organism, is conferred in the process of the invention, if the activity of a polypeptide showing the activity of a glutaredoxin, or if the activity of the polypeptide At3g62950, preferably represented by SEQ ID NO. 2936, or a homolog or fragment thereof, or if the activity of a polypeptide encoded by a nucleic acid molecule comprising the nucleic acid SEQ ID NO. 2935, preferably the coding region thereof, or a homolog or fragment thereof, e.g. derived from Arabidopsis thaliana, is increased or generated. For example the activity of a nucleic acid molecule or a polypeptide comprising the nucleic acid, preferably the coding region thereof, or polypeptide or the consensus sequence or the polypeptide motif, as depicted in Table I, II or IV, application No. 1, column 5 or 8 in the respective same line as the nucleic acid molecule SEQ ID NO. 2935 or polypeptide SEQ ID NO. 2936, respectively, or a homolog or a fragment thereof, is increased or generated, or if the activity glutaredoxin is increased or generated in a non-human organism, like a microorganism or a plant cell, plant or part thereof, especially with non-targeted localization, For example, an increase of the methionine of at least 1 percent, particularly in a range of 37 to 77-percent is conferred as compared to a corresponding non-transformed wild type non-human organism.

[1113] Accordingly, in one embodiment, an increase of methionine in a non-human organism, as compared to a corresponding non-transformed wild type non-human organism, is conferred in the process of the invention, if the activity of a polypeptide showing the activity of a monothiol glutaredoxin, or if the activity of the polypeptide At4g15670, preferably represented by SEQ ID NO. 3280, or a homolog or fragment thereof, or if the activity of a polypeptide encoded by a nucleic acid molecule comprising the nucleic acid SEQ ID NO. 3279, preferably the coding region thereof, or a homolog or fragment thereof, e.g. derived from Arabidopsis thaliana, is increased or generated. For example the activity of a nucleic acid molecule or a polypeptide comprising the nucleic acid, preferably the coding region thereof, or polypeptide or the consensus sequence or the polypeptide motif, as depicted in Table I, II or IV, application No. 1, column 5 or 8 in the respective same line as the nucleic acid molecule SEQ ID NO. 3279 or polypeptide SEQ ID NO. 3280, respectively, or a homolog or a fragment thereof, is increased or generated, or if the activity monothiol glutaredoxin is increased or generated in a non-human organism, like a microorganism or a plant cell, plant or part thereof, especially with non-targeted localization, For example, an increase of the methionine of at least 1 percent, particularly in a range of 37 to 52-percent is conferred as compared to a corresponding non-transformed wild type non-human organism.

[1114] Accordingly, in one embodiment, an increase of methionine in a non-human organism, as compared to a corresponding non-transformed wild type non-human organism, is conferred in the process of the invention, if the activity of a polypeptide showing the activity of a monothiol glutaredoxin, or if the activity of the polypeptide At4g15700, preferably represented by SEQ ID NO. 3655, or a homolog or fragment thereof, or if the activity of a polypeptide encoded by a nucleic acid molecule comprising the nucleic acid SEQ ID NO. 3654, preferably the coding region thereof, or a homolog or fragment thereof, e.g. derived from Arabidopsis thaliana, is increased or generated. For example the activity of a nucleic acid molecule or a polypeptide comprising the nucleic acid, preferably the coding region thereof, or polypeptide or the consensus sequence or the polypeptide motif, as depicted in Table I, II or IV, application No. 1, column 5 or 8 in the respective same line as the nucleic acid molecule SEQ ID NO. 3654 or polypeptide SEQ ID NO. 3655, respectively, or a homolog or a fragment thereof, is increased or generated, or if the activity monothiol glutaredoxin is increased or generated in a non-human organism, like a microorganism or a plant cell, plant or part thereof, especially with non-targeted localization, For example, an increase of the methionine of at least 1 percent, particularly in a range of 43 to 84-percent is conferred as compared to a corresponding non-transformed wild type non-human organism.

[1115] Accordingly, in one embodiment, an increase of methionine in a non-human organism, as compared to a corresponding non-transformed wild type non-human organism, is conferred in the process of the invention, if the activity of a polypeptide showing the activity of a At4g32480-protein, or if the activity of the polypeptide At4g32480, preferably represented by SEQ ID NO. 4041, or a homolog or fragment thereof, or if the activity of a polypeptide encoded by a nucleic acid molecule comprising the nucleic acid SEQ ID NO. 4040, preferably the coding region thereof, or a homolog or fragment thereof, e.g. derived from Arabidopsis thaliana, is increased or generated. For example the activity of a nucleic acid molecule or a polypeptide comprising the nucleic acid, preferably the coding region thereof, or polypeptide or the consensus sequence or the polypeptide motif, as depicted in Table I, II or IV, application No. 1, column 5 or 8 in the respective same line as the nucleic acid molecule SEQ ID NO. 4040 or polypeptide SEQ ID NO. 4041, respectively, or a homolog or a fragment thereof, is increased or generated, or if the activity At4g32480-protein is increased or generated in a non-human organism, like a microorganism or a plant cell, plant or part thereof, especially with non-targeted localization, For example, an increase of the methionine of at least 1 percent, particularly in a range of 44 to 184-percent is conferred as compared to a corresponding non-transformed wild type non-human organism.

[1116] Accordingly, in one embodiment, an increase of methionine in a non-human organism, as compared to a corresponding non-transformed wild type non-human organism, is conferred in the process of the invention, if the activity of a polypeptide showing the activity of a glutaredoxin, or if the activity of the polypeptide At4g33040, preferably represented by SEQ ID NO. 4103, or a homolog or fragment thereof, or if the activity of a polypeptide encoded by a nucleic acid molecule comprising the nucleic acid SEQ ID NO. 4102, preferably the coding region thereof, or a homolog or fragment thereof, e.g. derived from Arabidopsis thaliana, is increased or generated. For example the activity of a nucleic acid molecule or a polypeptide comprising the nucleic acid, preferably the coding region thereof, or polypeptide or the consensus sequence or the polypeptide motif, as depicted in Table I, II or IV, application No. 1, column 5 or 8 in the respective same line as the nucleic acid molecule SEQ ID NO. 4102 or polypeptide SEQ ID NO. 4103, respectively, or a homolog or a fragment thereof, is increased or generated, or if the activity glutaredoxin is increased or generated in a non-human organism, like a microorganism or a plant cell, plant or part thereof, especially with non-targeted localization, For example, an increase of the methionine of at least 1 percent, particularly in a range of 34 to 54-percent is conferred as compared to a corresponding non-transformed wild type non-human organism.

[1117] Accordingly, in one embodiment, an increase of methionine in a non-human organism, as compared to a corresponding non-transformed wild type non-human organism, is conferred in the process of the invention, if the activity of a polypeptide showing the activity of a calcium-dependent protein kinase, or if the activity of the polypeptide At4g35310, preferably represented by SEQ ID NO. 4349, or a homolog or fragment thereof, or if the activity of a polypeptide encoded by a nucleic acid molecule comprising the nucleic acid SEQ ID NO. 4348, preferably the coding region thereof, or a homolog or fragment thereof, e.g. derived from Arabidopsis thaliana, is increased or generated. For example the activity of a nucleic acid molecule or a polypeptide comprising the nucleic acid, preferably the coding region thereof, or polypeptide or the consensus sequence or the polypeptide motif, as depicted in Table I, II or IV, application No. 1, column 5 or 8 in the respective same line as the nucleic acid molecule SEQ ID NO. 4348 or polypeptide SEQ ID NO. 4349, respectively, or a homolog or a fragment thereof, is increased or generated, or if the activity calcium-dependent protein kinase is increased or generated in a non-human organism, like a microorganism or a plant cell, plant or part thereof, especially with non-targeted localization, For example, an increase of the methionine of at least 1 percent, particularly in a range of 62 to 83-percent is conferred as compared to a corresponding non-transformed wild type non-human organism.

[1118] Accordingly, in one embodiment, an increase of methionine in a non-human organism, as compared to a corresponding non-transformed wild type non-human organism, is conferred in the process of the invention, if the activity of a polypeptide showing the activity of a monothiol glutaredoxin, or if the activity of the polypeptide At5g18600, preferably represented by SEQ ID NO. 4905, or a homolog or fragment thereof, or if the activity of a polypeptide encoded by a nucleic acid molecule comprising the nucleic acid SEQ ID NO. 4904, preferably the coding region thereof, or a homolog or fragment thereof, e.g. derived from Arabidopsis thaliana, is increased or generated. For example the activity of a nucleic acid molecule or a polypeptide comprising the nucleic acid, preferably the coding region thereof, or polypeptide or the consensus sequence or the polypeptide motif, as depicted in Table I, II or IV, application No. 1, column 5 or 8 in the respective same line as the nucleic acid molecule SEQ ID NO. 4904 or polypeptide SEQ ID NO. 4905, respectively, or a homolog or a fragment thereof, is increased or generated, or if the activity monothiol glutaredoxin is increased or generated in a non-human organism, like a microorganism or a plant cell, plant or part thereof, especially with non-targeted localization, For example, an increase of the methionine of at least 1 percent, particularly in a range of 40 to 75-percent is conferred as compared to a corresponding non-transformed wild type non-human organism.

[1119] Accordingly, in one embodiment, an increase of methionine in a non-human organism, as compared to a corresponding non-transformed wild type non-human organism, is conferred in the process of the invention, if the activity of a polypeptide showing the activity of a protein phosphatase, or if the activity of the polypeptide At5g57050, preferably represented by SEQ ID NO. 5319, or a homolog or fragment thereof, or if the activity of a polypeptide encoded by a nucleic acid molecule comprising the nucleic acid SEQ ID NO. 5318, preferably the coding region thereof, or a homolog or fragment thereof, e.g. derived from Arabidopsis thaliana, is increased or generated. For example the activity of a nucleic acid molecule or a polypeptide comprising the nucleic acid, preferably the coding region thereof, or polypeptide or the consensus sequence or the polypeptide motif, as depicted in Table I, II or IV, application No. 1, column 5 or 8 in the respective same line as the nucleic acid molecule SEQ ID NO. 5318 or polypeptide SEQ ID NO. 5319, respectively, or a homolog or a fragment thereof, is increased or generated, or if the activity protein phosphatase is increased or generated in a non-human organism, like a microorganism or a plant cell, plant or part thereof, especially with non-targeted localization, For example, an increase of the methionine of at least 1 percent, particularly in a range of 36 to 45-percent is conferred as compared to a corresponding non-transformed wild type non-human organism.

[1120] Accordingly, in one embodiment, an increase of methionine in a non-human organism, as compared to a corresponding non-transformed wild type non-human organism, is conferred in the process of the invention, if the activity of a polypeptide showing the activity of a zinc finger protein, or if the activity of the polypeptide At5g64920, preferably represented by SEQ ID NO. 5494, or a homolog or fragment thereof, or if the activity of a polypeptide encoded by a nucleic acid molecule comprising the nucleic acid SEQ ID NO. 5493, preferably the coding region thereof, or a homolog or fragment thereof, e.g. derived from Arabidopsis thaliana, is increased or generated. For example the activity of a nucleic acid molecule or a polypeptide comprising the nucleic acid, preferably the coding region thereof, or polypeptide or the consensus sequence or the polypeptide motif, as depicted in Table I, II or IV, application No. 1, column 5 or 8 in the respective same line as the nucleic acid molecule SEQ ID NO. 5493 or polypeptide SEQ ID NO. 5494, respectively, or a homolog or a fragment thereof, is increased or generated, or if the activity zinc finger protein is increased or generated in a non-human organism, like a microorganism or a plant cell, plant or part thereof, especially with non-targeted localization, For example, an increase of the methionine of at least 1 percent, particularly in a range of 34 to 37-percent is conferred as compared to a corresponding non-transformed wild type non-human organism.

[1121] Accordingly, in one embodiment, an increase of methionine in a non-human organism, as compared to a corresponding non-transformed wild type non-human organism, is conferred in the process of the invention, if the activity of a polypeptide showing the activity of a malic enzyme, or if the activity of the polypeptide AvinDRAFT_{—}1495, preferably represented by SEQ ID NO. 5558, or a homolog or fragment thereof, or if the activity of a polypeptide encoded by a nucleic acid molecule comprising the nucleic acid SEQ ID NO. 5557, preferably the coding region thereof, or a homolog or fragment thereof, e.g. derived from Azotobacter vinelandii, is increased or generated. For example the activity of a nucleic acid molecule or a polypeptide comprising the nucleic acid, preferably the coding region thereof, or polypeptide or the consensus sequence or the polypeptide motif, as depicted in Table I, II or IV, application No. 1, column 5 or 8 in the respective same line as the nucleic acid molecule SEQ ID NO. 5557 or polypeptide SEQ ID NO. 5558, respectively, or a homolog or a fragment thereof, is increased or generated, or if the activity malic enzyme is increased or generated in a non-human organism, like a microorganism or a plant cell, plant or part thereof, especially with non-targeted localization, For example, an increase of the methionine of at least 1 percent, particularly in a range of 38 to 42-percent is conferred as compared to a corresponding non-transformed wild type non-human organism.

[1122] Accordingly, in one embodiment, an increase of methionine in a non-human organism, as compared to a corresponding non-transformed wild type non-human organism, is conferred in the process of the invention, if the activity of a polypeptide showing the activity of a betahydroxylase, or if the activity of the polypeptide AvinDRAFT_{—}2091, preferably represented by SEQ ID NO. 6041, or a homolog or fragment thereof, or if the activity of a polypeptide encoded by a nucleic acid molecule comprising the nucleic acid SEQ ID NO. 6040, preferably the coding region thereof, or a homolog or fragment thereof, e.g. derived from Azotobacter vinelandii, is increased or generated. For example the activity of a nucleic acid molecule or a polypeptide comprising the nucleic acid, preferably the coding region thereof, or polypeptide or the consensus sequence or the polypeptide motif, as depicted in Table I, II or IV, application No. 1, column 5 or 8 in the respective same line as the nucleic acid molecule SEQ ID NO. 6040 or polypeptide SEQ ID NO. 6041, respectively, or a homolog or a fragment thereof, is increased or generated, or if the activity beta-hydroxylase is increased or generated in a non-human organism, like a microorganism or a plant cell, plant or part thereof, especially with non-targeted localization, For example, an increase of the methionine of at least 1 percent, particularly in a range of 37 to 39-percent is conferred as compared to a corresponding non-transformed wild type non-human organism.

[1123] Accordingly, in one embodiment, an increase of methionine in a non-human organism, as compared to a corresponding non-transformed wild type non-human organism, is conferred in the process of the invention, if the activity of a polypeptide showing the activity of a 2-oxoglutarate dehydrogenase E1 subunit, or if the activity of the polypeptide AvinDRAFT_{—}3028, preferably represented by SEQ ID NO. 6076, or a homolog or fragment thereof, or if the activity of a polypeptide encoded by a nucleic acid molecule comprising the nucleic acid SEQ ID NO. 6075, preferably the coding region thereof, or a homolog or fragment thereof, e.g. derived from Azotobacter vinelandii, is increased or generated. For example the activity of a nucleic acid molecule or a polypeptide comprising the nucleic acid, preferably the coding region thereof, or polypeptide or the consensus sequence or the polypeptide motif, as depicted in Table I, II or IV, application No. 1, column 5 or 8 in the respective same line as the nucleic acid molecule SEQ ID NO. 6075 or polypeptide SEQ ID NO. 6076, respectively, or a homolog or a fragment thereof, is increased or generated, or if the activity 2-oxoglutarate dehydrogenase E1 subunit is increased or generated in a non-human organism, like a microorganism or a plant cell, plant or part thereof, especially with non-targeted localization, For example, an increase of the methionine of at least 1 percent, particularly in a range of 39 to 55-percent is conferred as compared to a corresponding non-transformed wild type non-human organism.

[1124] Accordingly, in one embodiment, an increase of methionine in a non-human organism, as compared to a corresponding non-transformed wild type non-human organism, is conferred in the process of the invention, if the activity of a polypeptide showing the activity of a homoserine dehydrogenase, or if the activity of the polypeptide AvinDRAFT_{—}3546, preferably represented by SEQ ID NO. 6269, or a homolog or fragment thereof, or if the activity of a polypeptide encoded by a nucleic acid molecule comprising the nucleic acid SEQ ID NO. 6268, preferably the coding region thereof, or a homolog or fragment thereof, e.g. derived from Azotobacter vinelandii, is increased or generated. For example the activity of a nucleic acid molecule or a polypeptide comprising the nucleic acid, preferably the coding region thereof, or polypeptide or the consensus sequence or the polypeptide motif, as depicted in Table I, II or IV, application No. 1, column 5 or 8 in the respective same line as the nucleic acid molecule SEQ ID NO. 6268 or polypeptide SEQ ID NO. 6269, respectively, or a homolog or a fragment thereof, is increased or generated, or if the activity homoserine dehydrogenase is increased or generated in a non-human organism, like a microorganism or a plant cell, plant or part thereof, especially with non-targeted localization, For example, an increase of the methionine of at least 1 percent, particularly in a range of 58 to 172-percent is conferred as compared to a corresponding non-transformed wild type non-human organism.

[1125] Accordingly, in one embodiment, an increase of methionine in a non-human organism, as compared to a corresponding non-transformed wild type non-human organism, is conferred in the process of the invention, if the activity of a polypeptide showing the activity of a hydrolase, or if the activity of the polypeptide AvinDRAFT_{—}5103, preferably represented by SEQ ID NO. 6511, or a homolog or fragment thereof, or if the activity of a polypeptide encoded by a nucleic acid molecule comprising the nucleic acid SEQ ID NO. 6510, preferably the coding region thereof, or a homolog or fragment thereof, e.g. derived from Azotobacter vinelandii, is increased or generated. For example the activity of a nucleic acid molecule or a polypeptide comprising the nucleic acid, preferably the coding region thereof, or polypeptide or the consensus sequence or the polypeptide motif, as depicted in Table I, II or IV, application No. 1, column 5 or 8 in the respective same line as the nucleic acid molecule SEQ ID NO. 6510 or polypeptide SEQ ID NO. 6511, respectively, or a homolog or a fragment thereof, is increased or generated, or if the activity hydrolase is increased or generated in a non-human organism, like a microorganism or a plant cell, plant or part thereof, especially with non-targeted localization, For example, an increase of the methionine of at least 1 percent, particularly in a range of 280 to 288-percent is conferred as compared to a corresponding non-transformed wild type non-human organism.

[1126] Accordingly, in one embodiment, an increase of methionine in a non-human organism, as compared to a corresponding non-transformed wild type non-human organism, is conferred in the process of the invention, if the activity of a polypeptide showing the activity of a peptidyl-prolyl cis-trans isomerase, or if the activity of the polypeptide AvinDRAFT_{—}6075, preferably represented by SEQ ID NO. 6675, or a homolog or fragment thereof, or if the activity of a polypeptide encoded by a nucleic acid molecule comprising the nucleic acid SEQ ID NO. 6674, preferably the coding region thereof, or a homolog or fragment thereof, e.g. derived from Azotobacter vinelandii, is increased or generated. For example the activity of a nucleic acid molecule or a polypeptide comprising the nucleic acid, preferably the coding region thereof, or polypeptide or the consensus sequence or the polypeptide motif, as depicted in Table I, II or IV, application No. 1, column 5 or 8 in the respective same line as the nucleic acid molecule SEQ ID NO. 6674 or polypeptide SEQ ID NO. 6675, respectively, or a homolog or a fragment thereof, is increased or generated, or if the activity peptidyl-prolyl cis-trans isomerase is increased or generated in a non-human organism, like a microorganism or a plant cell, plant or part thereof, especially with non-targeted localization, For example, an increase of the methionine of at least 1 percent, partitularly in a range of 37 to 46-percent is conferred as compared to a corresponding non-transformed wild type non-human organism.

[1127] Accordingly, in one embodiment, an increase of methionine in a non-human organism, as compared to a corresponding non-transformed wild type non-human organism, is conferred in the process of the invention, if the activity of a polypeptide showing the activity of a b0012-protein, or if the activity of the polypeptide B0012, preferably represented by SEQ ID NO. 6811, or a homolog or fragment thereof, or if the activity of a polypeptide encoded by a nucleic acid molecule comprising the nucleic acid SEQ ID NO. 6810, preferably the coding region thereof, or a homolog or fragment thereof, e.g. derived from Escherichia coli, is increased or generated. For example the activity of a nucleic acid molecule or a polypeptide comprising the nucleic acid, preferably the coding region thereof, or polypeptide or the consensus sequence or the polypeptide motif, as depicted in Table I, II or IV, application No. 1, column 5 or 8 in the respective same line as the nucleic acid molecule SEQ ID NO. 6810 or polypeptide SEQ ID NO. 6811, respectively, or a homolog or a fragment thereof, is increased or generated, or if the activity b0012-protein is increased or generated in a non-human organism, like a microorganism or a plant cell, plant or part thereof, especially with non-targeted localization, For example, an increase of the methionine of at least 1 percent, particularly in a range of 40 to 66-percent is conferred as compared to a corresponding non-transformed wild type non-human organism.

[1128] Accordingly, in one embodiment, an increase of methionine in a non-human organism, as compared to a corresponding non-transformed wild type non-human organism, is conferred in the process of the invention, if the activity of a polypeptide showing the activity of a acetolactate synthase small subunit, or if the activity of the polypeptide B0078, preferably represented by SEQ ID NO. 6819, or a homolog or fragment thereof, or if the activity of a polypeptide encoded by a nucleic acid molecule comprising the nucleic acid SEQ ID NO. 6818, preferably the coding region thereof, or a homolog or fragment thereof, e.g. derived from Escherichia coli, is increased or generated. For example the activity of a nucleic acid molecule or a polypeptide comprising the nucleic acid, preferably the coding region thereof, or polypeptide or the consensus sequence or the polypeptide motif, as depicted in Table I, II or IV, application No. 1, column 5 or 8 in the respective same line as the nucleic acid molecule SEQ ID NO. 6818 or polypeptide SEQ ID NO. 6819, respectively, or a homolog or a fragment thereof, is increased or generated, or if the activity acetolactate synthase small subunit is increased or generated in a non-human organism, like a microorganism or a plant cell, plant or part thereof, especially with non-targeted localization, For example, an increase of the methionine of at least 1 percent, particularly in a range of 21 to 24-percent is conferred as compared to a corresponding non-transformed wild type non-human organism.

[1129] Accordingly, in one embodiment, an increase of methionine in a non-human organism, as compared to a corresponding non-transformed wild type non-human organism, is conferred in the process of the invention, if the activity of a polypeptide showing the activity of a serine protease, or if the activity of the polypeptide B0161, preferably represented by SEQ ID NO. 7082, or a homolog or fragment thereof, or if the activity of a polypeptide encoded by a nucleic acid molecule comprising the nucleic acid SEQ ID NO. 7081, preferably the coding region thereof, or a homolog or fragment thereof, e.g. derived from Escherichia coli, is increased or generated. For example the activity of a nucleic acid molecule or a polypeptide comprising the nucleic acid, preferably the coding region thereof, or polypeptide or the consensus sequence or the polypeptide motif, as depicted in Table I, II or IV, application No. 1, column 5 or 8 in the respective same line as the nucleic acid molecule SEQ ID NO. 7081 or polypeptide SEQ ID NO. 7082, respectively, or a homolog or a fragment thereof, is increased or generated, or if the activity serine protease is increased or generated in a non-human organism, like a microorganism or a plant cell, plant or part thereof, especially with non-targeted localization, For example, an increase of the methionine of at least 1 percent, particularly in a range of 71 to 182-percent is conferred as compared to a corresponding non-transformed wild type non-human organism.

[1130] Accordingly, in one embodiment, an increase of methionine in a non-human organism, as compared to a corresponding non-transformed wild type non-human organism, is conferred in the process of the invention, if the activity of a polypeptide showing the activity of a 2,3-dihydroxyphenylpropionate 1,2-dioxygenase, or if the activity of the polypeptide B0348, preferably represented by SEQ ID NO. 7270, or a homolog or fragment thereof, or if the activity of a polypeptide encoded by a nucleic acid molecule comprising the nucleic acid SEQ ID NO. 7269, preferably the coding region thereof, or a homolog or fragment thereof, e.g. derived from Escherichia coli, is increased or generated. For example the activity of a nucleic acid molecule or a polypeptide comprising the nucleic acid, preferably the coding region thereof, or polypeptide or the consensus sequence or the polypeptide motif, as depicted in Table I, II or IV, application No. 1, column 5 or 8 in the respective same line as the nucleic acid molecule SEQ ID NO. 7269 or polypeptide SEQ ID NO. 7270, respectively, or a homolog or a fragment thereof, is increased or generated, or if the activity 2,3-dihydroxyphenylpropionate 1,2-dioxygenase is increased or generated in a non-human organism, like a microorganism or a plant cell, plant or part thereof, especially with plastidic localization, For example, an increase of the methionine of at least 1 percent, particularly in a range of 21 to 57-percent is conferred as compared to a corresponding non-transformed wild type non-human organism.

[1131] Accordingly, in one embodiment, an increase of methionine in a non-human organism, as compared to a corresponding non-transformed wild type non-human organism, is conferred in the process of the invention, if the activity of a polypeptide showing the activity of a ATP-binding component of a transport system, or if the activity of the polypeptide B0449, preferably represented by SEQ ID NO. 7334, or a homolog or fragment thereof, or if the activity of a polypeptide encoded by a nucleic acid molecule comprising the nucleic acid SEQ ID NO. 7333, preferably the coding region thereof, or a homolog or fragment thereof, e.g. derived from Escherichia coli, is increased or generated. For example the activity of a nucleic acid molecule or a polypeptide comprising the nucleic acid, preferably the coding region thereof, or polypeptide or the consensus sequence or the polypeptide motif, as depicted in Table I, II or IV, application No. 1, column 5 or 8 in the respective same line as the nucleic acid molecule SEQ ID NO. 7333 or polypeptide SEQ ID NO. 7334, respectively, or a homolog or a fragment thereof, is increased or generated, or if the activity ATP-binding component of a transport system is increased or generated in a non-human organism, like a microorganism or a plant cell, plant or part thereof, especially with non-targeted localization, For example, an increase of the methionine of at least 1 percent, partitularly in a range of 48 to 194-percent is conferred as compared to a corresponding non-transformed wild type non-human organism.

[1132] Accordingly, in one embodiment, an increase of methionine in a non-human organism, as compared to a corresponding non-transformed wild type non-human organism, is conferred in the process of the invention, if the activity of a polypeptide showing the activity of a membrane transport protein, or if the activity of the polypeptide B0486, preferably represented by SEQ ID NO. 7687, or a homolog or fragment thereof, or if the activity of a polypeptide encoded by a nucleic acid molecule comprising the nucleic acid SEQ ID NO. 7686, preferably the coding region thereof, or a homolog or fragment thereof, e.g. derived from Escherichia coli, is increased or generated. For example the activity of a nucleic acid molecule or a polypeptide comprising the nucleic acid, preferably the coding region thereof, or polypeptide or the consensus sequence or the polypeptide motif, as depicted in Table I, II or IV, application No. 1, column 5 or 8 in the respective same line as the nucleic acid molecule SEQ ID NO. 7686 or polypeptide SEQ ID NO. 7687, respectively, or a homolog or a fragment thereof, is increased or generated, or if the activity membrane transport protein is increased or generated in a non-human organism, like a microorganism or a plant cell, plant or part thereof, especially with non-targeted localization, For example, an increase of the methionine of at least 1 percent, particularly in a range of 32 to 59-percent is conferred as compared to a corresponding non-transformed wild type non-human organism.

[1133] Accordingly, in one embodiment, an increase of methionine in a non-human organism, as compared to a corresponding non-transformed wild type non-human organism, is conferred in the process of the invention, if the activity of a polypeptide showing the activity of a threonine aldolase, or if the activity of the polypeptide B0870, preferably represented by SEQ ID NO. 7731, or a homolog or fragment thereof, or if the activity of a polypeptide encoded by a nucleic acid molecule comprising the nucleic acid SEQ ID NO. 7730, preferably the coding region thereof, or a homolog or fragment thereof, e.g. derived from Escherichia coli, is increased or generated. For example the activity of a nucleic acid molecule or a polypeptide comprising the nucleic acid, preferably the coding region thereof, or polypeptide or the consensus sequence or the polypeptide motif, as depicted in Table I, II or IV, application No. 1, column 5 or 8 in the respective same line as the nucleic acid molecule SEQ ID NO. 7730 or polypeptide SEQ ID NO. 7731, respectively, or a homolog or a fragment thereof, is increased or generated, or if the activity threonine aldolase is increased or generated in a non-human organism, like a microorganism or a plant cell, plant or part thereof, especially with plastidic localization, For example, an increase of the methionine of at least 1 percent, particularly in a range of 17 to 38-percent is conferred as compared to a corresponding non-transformed wild type non-human organism.

[1134] Accordingly, in one embodiment, an increase of methionine in a non-human organism, as compared to a corresponding non-transformed wild type non-human organism, is conferred in the process of the invention, if the activity of a polypeptide showing the activity of a major facilitator superfamily transporter protein, or if the activity of the polypeptide B0898, preferably represented by SEQ ID NO. 7918, or a homolog or fragment thereof, or if the activity of a polypeptide encoded by a nucleic acid molecule comprising the nucleic acid SEQ ID NO. 7917, preferably the coding region thereof, or a homolog or fragment thereof, e.g. derived from Escherichia coli, is increased or generated. For example the activity of a nucleic acid molecule or a polypeptide comprising the nucleic acid, preferably the coding region thereof, or polypeptide or the consensus sequence or the polypeptide motif, as depicted in Table I, II or IV, application No. 1, column 5 or 8 in the respective same line as the nucleic acid molecule SEQ ID NO. 7917 or polypeptide SEQ ID NO. 7918, respectively, or a homolog or a fragment thereof, is increased or generated, or if the activity major facilitator superfamily transporter protein is increased or generated in a non-human organism, like a microorganism or a plant cell, plant or part thereof, especially with non-targeted localization, For example, an increase of the methionine of at least 1 percent, particularly in a range of 36 to 1310-percent is conferred as compared to a corresponding non-transformed wild type non-human organism.

[1135] Accordingly, in one embodiment, an increase of methionine in a non-human organism, as compared to a corresponding non-transformed wild type non-human organism, is conferred in the process of the invention, if the activity of a polypeptide showing the activity of a b1003-protein, or if the activity of the polypeptide B1003, preferably represented by SEQ ID NO. 7942, or a homolog or fragment thereof, or if the activity of a polypeptide encoded by a nucleic acid molecule comprising the nucleic acid SEQ ID NO. 7941, preferably the coding region thereof, or a homolog or fragment thereof, e.g. derived from Escherichia coli, is increased or generated. For example the activity of a nucleic acid molecule or a polypeptide comprising the nucleic acid, preferably the coding region thereof, or polypeptide or the consensus sequence or the polypeptide motif, as depicted in Table I, II or IV, application No. 1, column 5 or 8 in the respective same line as the nucleic acid molecule SEQ ID NO. 7941 or polypeptide SEQ ID NO. 7942, respectively, or a homolog or a fragment thereof, is increased or generated, or if the activity b1003-protein is increased or generated in a non-human organism, like a microorganism or a plant cell, plant or part thereof, especially with non-targeted localization, For example, an increase of the methionine of at least 1 percent, particularly in a range of 49 to 144-percent is conferred as compared to a corresponding non-transformed wild type non-human organism.

[1136] Accordingly, in one embodiment, an increase of methionine in a non-human organism, as compared to a corresponding non-transformed wild type non-human organism, is conferred in the process of the invention, if the activity of a polypeptide showing the activity of a b1522-protein, or if the activity of the polypeptide B1522, preferably represented by SEQ ID NO. 7948, or a homolog or fragment thereof, or if the activity of a polypeptide encoded by a nucleic acid molecule comprising the nucleic acid SEQ ID NO. 7947, preferably the coding region thereof, or a homolog or fragment thereof, e.g. derived from Escherichia coli, is increased or generated. For example the activity of a nucleic acid molecule or a polypeptide comprising the nucleic acid, preferably the coding region thereof, or polypeptide or the consensus sequence or the polypeptide motif, as depicted in Table I, II or IV, application No. 1, column 5 or 8 in the respective same line as the nucleic acid molecule SEQ ID NO. 7947 or polypeptide SEQ ID NO. 7948, respectively, or a homolog or a fragment thereof, is increased or generated, or if the activity b1522-protein is increased or generated in a non-human organism, like a microorganism or a plant cell, plant or part thereof, especially with non-targeted localization, For example, an increase of the methionine of at least 1 percent, particularly in a range of 42 to 144-percent is conferred as compared to a corresponding non-transformed wild type non-human organism.

[1137] Accordingly, in one embodiment, an increase of methionine in a non-human organism, as compared to a corresponding non-transformed wild type non-human organism, is conferred in the process of the invention, if the activity of a polypeptide showing the activity of a transport protein, or if the activity of the polypeptide B1601, preferably represented by SEQ ID NO. 7993, or a homolog or fragment thereof, or if the activity of a polypeptide encoded by a nucleic acid molecule comprising the nucleic acid SEQ ID NO. 7992, preferably the coding region thereof, or a homolog or fragment thereof, e.g. derived from Escherichia coli, is increased or generated. For example the activity of a nucleic acid molecule or a polypeptide comprising the nucleic acid, preferably the coding region thereof, or polypeptide or the consensus sequence or the polypeptide motif, as depicted in Table I, II or IV, application No. 1, column 5 or 8 in the respective same line as the nucleic acid molecule SEQ ID NO. 7992 or polypeptide SEQ ID NO. 7993, respectively, or a homolog or a fragment thereof, is increased or generated, or if the activity transport protein is increased or generated in a non-human organism, like a microorganism or a plant cell, plant or part thereof, especially with non-targeted localization, For example, an increase of the methionine of at least 1 percent, particularly in a range of 41 to 64-percent is conferred as compared to a corresponding non-transformed wild type non-human organism.

[1138] Accordingly, in one embodiment, an increase of methionine in a non-human organism, as compared to a corresponding non-transformed wild type non-human organism, is conferred in the process of the invention, if the activity of a polypeptide showing the activity of a L-serine dehydratase, or if the activity of the polypeptide B1814, preferably represented by SEQ ID NO. 8034, or a homolog or fragment thereof, or if the activity of a polypeptide encoded by a nucleic acid molecule comprising the nucleic acid SEQ ID NO. 8033, preferably the coding region thereof, or a homolog or fragment thereof, e.g. derived from Escherichia coli, is increased or generated. For example the activity of a nucleic acid molecule or a polypeptide comprising the nucleic acid, preferably the coding region thereof, or polypeptide or the consensus sequence or the polypeptide motif, as depicted in Table I, II or IV, application No. 1, column 5 or 8 in the respective same line as the nucleic acid molecule SEQ ID NO. 8033 or polypeptide SEQ ID NO. 8034, respectively, or a homolog or a fragment thereof, is increased or generated, or if the activity L-serine dehydratase is increased or generated in a non-human organism, like a microorganism or a plant cell, plant or part thereof, especially with plastidic localization, For example, an increase of the methionine of at least 1 percent, particularly in a range of 19 to 59-percent is conferred as compared to a corresponding non-transformed wild type non-human organism.

[1139] Accordingly, in one embodiment, an increase of methionine in a non-human organism, as compared to a corresponding non-transformed wild type non-human organism, is conferred in the process of the invention, if the activity of a polypeptide showing the activity of a serine/threonine-protein phosphatase, or if the activity of the polypeptide B1838, preferably represented by SEQ ID NO. 8317, or a homolog or fragment thereof, or if the activity of a polypeptide encoded by a nucleic acid molecule comprising the nucleic acid SEQ ID NO. 8316, preferably the coding region thereof, or a homolog or fragment thereof, e.g. derived from Escherichia coli, is increased or generated. For example the activity of a nucleic acid molecule or a polypeptide comprising the nucleic acid, preferably the coding region thereof, or polypeptide or the consensus sequence or the polypeptide motif, as depicted in Table I, II or IV, application No. 1, column 5 or 8 in the respective same line as the nucleic acid molecule SEQ ID NO. 8316 or polypeptide SEQ ID NO. 8317, respectively, or a homolog or a fragment thereof, is increased or generated, or if the activity serine/threonine-protein phosphatase is increased or generated in a non-human organism, like a microorganism or a plant cell, plant or part thereof, especially with non-targeted localization, For example, an increase of the methionine of at least 1 percent, particularly in a range of 50 to 59-percent is conferred as compared to a corresponding non-transformed wild type non-human organism.

[1140] Accordingly, in one embodiment, an increase of methionine in a non-human organism, as compared to a corresponding non-transformed wild type non-human organism, is conferred in the process of the invention, if the activity of a polypeptide showing the activity of a pyruvate kinase, or if the activity of the polypeptide B1854, preferably represented by SEQ ID NO. 8364, or a homolog or fragment thereof, or if the activity of a polypeptide encoded by a nucleic acid molecule comprising the nucleic acid SEQ ID NO. 8363, preferably the coding region thereof, or a homolog or fragment thereof, e.g. derived from Escherichia coli, is increased or generated. For example the activity of a nucleic acid molecule or a polypeptide comprising the nucleic acid, preferably the coding region thereof, or polypeptide or the consensus sequence or the polypeptide motif, as depicted in Table I, II or IV, application No. 1, column 5 or 8 in the respective same line as the nucleic acid molecule SEQ ID NO. 8363 or polypeptide SEQ ID NO. 8364, respectively, or a homolog or a fragment thereof, is increased or generated, or if the activity pyruvate kinase is increased or generated in a non-human organism, like a microorganism or a plant cell, plant or part thereof, especially with plastidic localization, For example, an increase of the methionine of at least 1 percent, particularly in a range of 19 to 45-percent is conferred as compared to a corresponding non-transformed wild type non-human organism.

[1141] Accordingly, in one embodiment, an increase of methionine in a non-human organism, as compared to a corresponding non-transformed wild type non-human organism, is conferred in the process of the invention, if the activity of a polypeptide showing the activity of a b2032-protein, or if the activity of the polypeptide B2032, preferably represented by SEQ ID NO. 8921, or a homolog or fragment thereof, or if the activity of a polypeptide encoded by a nucleic acid molecule comprising the nucleic acid SEQ ID NO. 8920, preferably the coding region thereof, or a homolog or fragment thereof, e.g. derived from Escherichia coli, is increased or generated. For example the activity of a nucleic acid molecule or a polypeptide comprising the nucleic acid, preferably the coding region thereof, or polypeptide or the consensus sequence or the polypeptide motif, as depicted in Table I, II or IV, application No. 1, column 5 or 8 in the respective same line as the nucleic acid molecule SEQ ID NO. 8920 or polypeptide SEQ ID NO. 8921, respectively, or a homolog or a fragment thereof, is increased or generated, or if the activity b2032-protein is increased or generated in a non-human organism, like a microorganism or a plant cell, plant or part thereof, especially with non-targeted localization, For example, an increase of the methionine of at least 1 percent, particularly in a range of 37 to 75-percent is conferred as compared to a corresponding non-transformed wild type non-human organism.

[1142] Accordingly, in one embodiment, an increase of methionine in a non-human organism, as compared to a corresponding non-transformed wild type non-human organism, is conferred in the process of the invention, if the activity of a polypeptide showing the activity of a uridine/cytidine kinase, or if the activity of the polypeptide B2066, preferably represented by SEQ ID NO. 8938, or a homolog or fragment thereof, or if the activity of a polypeptide encoded by a nucleic acid molecule comprising the nucleic acid SEQ ID NO. 8937, preferably the coding region thereof, or a homolog or fragment thereof, e.g. derived from Escherichia coli, is increased or generated. For example the activity of a nucleic acid molecule or a polypeptide comprising the nucleic acid, preferably the coding region thereof, or polypeptide or the consensus sequence or the polypeptide motif, as depicted in Table I, II or IV, application No. 1, column 5 or 8 in the respective same line as the nucleic acid molecule SEQ ID NO. 8937 or polypeptide SEQ ID NO. 8938, respectively, or a homolog or a fragment thereof, is increased or generated, or if the activity uridine/cytidine kinase is increased or generated in a non-human organism, like a microorganism or a plant cell, plant or part thereof, especially with mitochondrial localization, For example, an increase of the methionine of at least 1 percent, particularly in a range of 35 to 64-percent is conferred as compared to a corresponding non-transformed wild type non-human organism.

[1143] Accordingly, in one embodiment, an increase of methionine in a non-human organism, as compared to a corresponding non-transformed wild type non-human organism, is conferred in the process of the invention, if the activity of a polypeptide showing the activity of a b2345-protein, or if the activity of the polypeptide B2345, preferably represented by SEQ ID NO. 9157, or a homolog or fragment thereof, or if the activity of a polypeptide encoded by a nucleic acid molecule comprising the nucleic acid SEQ ID NO. 9156, preferably the coding region thereof, or a homolog or fragment thereof, e.g. derived from Escherichia coli, is increased or generated. For example the activity of a nucleic acid molecule or a polypeptide comprising the nucleic acid, preferably the coding region thereof, or polypeptide or the consensus sequence or the polypeptide motif, as depicted in Table I, II or IV, application No. 1, column 5 or 8 in the respective same line as the nucleic acid molecule SEQ ID NO. 9156 or polypeptide SEQ ID NO. 9157, respectively, or a homolog or a fragment thereof, is increased or generated, or if the activity b2345-protein is increased or generated in a non-human organism, like a microorganism or a plant cell, plant or part thereof, especially with non-targeted localization, For example, an increase of the methionine of at least 1 percent, particularly in a range of 41 to 231-percent is conferred as compared to a corresponding non-transformed wild type non-human organism.

[1144] Accordingly, in one embodiment, an increase of methionine in a non-human organism, as compared to a corresponding non-transformed wild type non-human organism, is conferred in the process of the invention, if the activity of a polypeptide showing the activity of a b2513-protein, or if the activity of the polypeptide B2513, preferably represented by SEQ ID NO. 9168, or a homolog or fragment thereof, or if the activity of a polypeptide encoded by a nucleic acid molecule comprising the nucleic acid SEQ ID NO. 9167, preferably the coding region thereof, or a homolog or fragment thereof, e.g. derived from Escherichia coli, is increased or generated. For example the activity of a nucleic acid molecule or a polypeptide comprising the nucleic acid, preferably the coding region thereof, or polypeptide or the consensus sequence or the polypeptide motif, as depicted in Table I, II or IV, application No. 1, column 5 or 8 in the respective same line as the nucleic acid molecule SEQ ID NO. 9167 or polypeptide SEQ ID NO. 9168, respectively, or a homolog or a fragment thereof, is increased or generated, or if the activity b2513-protein is increased or generated in a non-human organism, like a microorganism or a plant cell, plant or part thereof, especially with non-targeted localization, For example, an increase of the methionine of at least 1 percent, particularly in a range of 39 to 55-percent is conferred as compared to a corresponding non-transformed wild type non-human organism.

[1145] Accordingly, in one embodiment, an increase of methionine in a non-human organism, as compared to a corresponding non-transformed wild type non-human organism, is conferred in the process of the invention, if the activity of a polypeptide showing the activity of a b2673-protein, or if the activity of the polypeptide B2673, preferably represented by SEQ ID NO. 9245, or a homolog or fragment thereof, or if the activity of a polypeptide encoded by a nucleic acid molecule comprising the nucleic acid SEQ ID NO. 9244, preferably the coding region thereof, or a homolog or fragment thereof, e.g. derived from Escherichia coli, is increased or generated. For example the activity of a nucleic acid molecule or a polypeptide comprising the nucleic acid, preferably the coding region thereof, or polypeptide or the consensus sequence or the polypeptide motif, as depicted in Table I, II or IV, application No. 1, column 5 or 8 in the respective same line as the nucleic acid molecule SEQ ID NO. 9244 or polypeptide SEQ ID NO. 9245, respectively, or a homolog or a fragment thereof, is increased or generated, or if the activity b2673-protein is increased or generated in a non-human organism, like a microorganism or a plant cell, plant or part thereof, especially with non-targeted localization, For example, an increase of the methionine of at least 1 percent, particularly in a range of 32 to 57-percent is conferred as compared to a corresponding non-transformed wild type non-human organism.

[1146] Accordingly, in one embodiment, an increase of methionine in a non-human organism, as compared to a corresponding non-transformed wild type non-human organism, is conferred in the process of the invention, if the activity of a polypeptide showing the activity of a arginine exporter protein, or if the activity of the polypeptide B2923, preferably represented by SEQ ID NO. 9334, or a homolog or fragment thereof, or if the activity of a polypeptide encoded by a nucleic acid molecule comprising the nucleic acid SEQ ID NO. 9333, preferably the coding region thereof, or a homolog or fragment thereof, e.g. derived from Escherichia coli, is increased or generated. For example the activity of a nucleic acid molecule or a polypeptide comprising the nucleic acid, preferably the coding region thereof, or polypeptide or the consensus sequence or the polypeptide motif, as depicted in Table I, II or IV, application No. 1, column 5 or 8 in the respective same line as the nucleic acid molecule SEQ ID NO. 9333 or polypeptide SEQ ID NO. 9334, respectively, or a homolog or a fragment thereof, is increased or generated, or if the activity arginine exporter protein is increased or generated in a non-human organism, like a microorganism or a plant cell, plant or part thereof, especially with non-targeted localization, For example, an increase of the methionine of at least 1 percent, particularly in a range of 32 to 54-percent is conferred as compared to a corresponding non-transformed wild type non-human organism.

[1147] Accordingly, in one embodiment, an increase of methionine in a non-human organism, as compared to a corresponding non-transformed wild type non-human organism, is conferred in the process of the invention, if the activity of a polypeptide showing the activity of a b3246-protein, or if the activity of the polypeptide B3246, preferably represented by SEQ ID NO. 9471, or a homolog or fragment thereof, or if the activity of a polypeptide encoded by a nucleic acid molecule comprising the nucleic acid SEQ ID NO. 9470, preferably the coding region thereof, or a homolog or fragment thereof, e.g. derived from Escherichia coli, is increased or generated. For example the activity of a nucleic acid molecule or a polypeptide comprising the nucleic acid, preferably the coding region thereof, or polypeptide or the consensus sequence or the polypeptide motif, as depicted in Table I, II or IV, application No. 1, column 5 or 8 in the respective same line as the nucleic acid molecule SEQ ID NO. 9470 or polypeptide SEQ ID NO. 9471, respectively, or a homolog or a fragment thereof, is increased or generated, or if the activity b3246-protein is increased or generated in a non-human organism, like a microorganism or a plant cell, plant or part thereof, especially with non-targeted localization, For example, an increase of the methionine of at least 1 percent, particularly in a range of 36 to 46-percent is conferred as compared to a corresponding non-transformed wild type non-human organism.

[1148] Accordingly, in one embodiment, an increase of methionine in a non-human organism, as compared to a corresponding non-transformed wild type non-human organism, is conferred in the process of the invention, if the activity of a polypeptide showing the activity of a acetyl CoA carboxylase, or if the activity of the polypeptide B3256, preferably represented by SEQ ID NO. 9493, or a homolog or fragment thereof, or if the activity of a polypeptide encoded by a nucleic acid molecule comprising the nucleic acid SEQ ID NO. 9492, preferably the coding region thereof, or a homolog or fragment thereof, e.g. derived from Escherichia coli, is increased or generated. For example the activity of a nucleic acid molecule or a polypeptide comprising the nucleic acid, preferably the coding region thereof, or polypeptide or the consensus sequence or the polypeptide motif, as depicted in Table I, II or IV, application No. 1, column 5 or 8 in the respective same line as the nucleic acid molecule SEQ ID NO. 9492 or polypeptide SEQ ID NO. 9493, respectively, or a homolog or a fragment thereof, is increased or generated, or if the activity acetyl CoA carboxylase is increased or generated in a non-human organism, like a microorganism or a plant cell, plant or part thereof, especially with non-targeted localization, For example, an increase of the methionine of at least 1 percent, particularly in a range of 77 to 121-percent is conferred as compared to a corresponding non-transformed wild type non-human organism.

[1149] Accordingly, in one embodiment, an increase of methionine in a non-human organism, as compared to a corresponding non-transformed wild type non-human organism, is conferred in the process of the invention, if the activity of a polypeptide showing the activity of a b3346-protein, or if the activity of the polypeptide B3346, preferably represented by SEQ ID NO. 10105, or a homolog or fragment thereof, or if the activity of a polypeptide encoded by a nucleic acid molecule comprising the nucleic acid SEQ ID NO. 10104, preferably the coding region thereof, or a homolog or fragment thereof, e.g. derived from Escherichia coli, is increased or generated. For example the activity of a nucleic acid molecule or a polypeptide comprising the nucleic acid, preferably the coding region thereof, or polypeptide or the consensus sequence or the polypeptide motif, as depicted in Table I, II or IV, application No. 1, column 5 or 8 in the respective same line as the nucleic acid molecule SEQ ID NO. 10104 or polypeptide SEQ ID NO. 10105, respectively, or a homolog or a fragment thereof, is increased or generated, or if the activity b3346-protein is increased or generated in a non-human organism, like a microorganism or a plant cell, plant or part thereof, especially with non-targeted localization, For example, an increase of the methionine of at least 1 percent, particularly in a range of 37 to 40-percent is conferred as compared to a corresponding non-transformed wild type non-human organism.

[1150] Accordingly, in one embodiment, an increase of methionine in a non-human organism, as compared to a corresponding non-transformed wild type non-human organism, is conferred in the process of the invention, if the activity of a polypeptide showing the activity of a valine-pyruvate transaminase, or if the activity of the polypeptide B3572, preferably represented by SEQ ID NO. 10173, or a homolog or fragment thereof, or if the activity of a polypeptide encoded by a nucleic acid molecule comprising the nucleic acid SEQ ID NO. 10172, preferably the coding region thereof, or a homolog or fragment thereof, e.g. derived from Escherichia coli, is increased or generated. For example the activity of a nucleic acid molecule or a polypeptide comprising the nucleic acid, preferably the coding region thereof, or polypeptide or the consensus sequence or the polypeptide motif, as depicted in Table I, II or IV, application No. 1, column 5 or 8 in the respective same line as the nucleic acid molecule SEQ ID NO. 10172 or polypeptide SEQ ID NO. 10173, respectively, or a homolog or a fragment thereof, is increased or generated, or if the activity valine-pyruvate transaminase is increased or generated in a non-human organism, like a microorganism or a plant cell, plant or part thereof, especially with plastidic localization, For example, an increase of the methionine of at least 1 percent, particularly in a range of 20 to 652-percent is conferred as compared to a corresponding non-transformed wild type non-human organism.

[1151] Accordingly, in one embodiment, an increase of methionine in a non-human organism, as compared to a corresponding non-transformed wild type non-human organism, is conferred in the process of the invention, if the activity of a polypeptide showing the activity of a dihydroxyacid dehydratase, or if the activity of the polypeptide B3771, preferably represented by SEQ ID NO. 10253, or a homolog or fragment thereof, or if the activity of a polypeptide encoded by a nucleic acid molecule comprising the nucleic acid SEQ ID NO. 10252, preferably the coding region thereof, or a homolog or fragment thereof, e.g. derived from Escherichia coli, is increased or generated. For example the activity of a nucleic acid molecule or a polypeptide comprising the nucleic acid, preferably the coding region thereof, or polypeptide or the consensus sequence or the polypeptide motif, as depicted in Table I, II or IV, application No. 1, column 5 or 8 in the respective same line as the nucleic acid molecule SEQ ID NO. 10252 or polypeptide SEQ ID NO. 10253, respectively, or a homolog or a fragment thereof, is increased or generated, or if the activity dihydroxyacid dehydratase is increased or generated in a non-human organism, like a microorganism or a plant cell, plant or part thereof, especially with non-targeted localization, For example, an increase of the methionine of at least 1 percent, particularly in a range of 22 to 93-percent is conferred as compared to a corresponding non-transformed wild type non-human organism.

[1152] Accordingly, in one embodiment, an increase of methionine in a non-human organism, as compared to a corresponding non-transformed wild type non-human organism, is conferred in the process of the invention, if the activity of a polypeptide showing the activity of a b3817-protein, or if the activity of the polypeptide B3817, preferably represented by SEQ ID NO. 10709, or a homolog or fragment thereof, or if the activity of a polypeptide encoded by a nucleic acid molecule comprising the nucleic acid SEQ ID NO. 10708, preferably the coding region thereof, or a homolog or fragment thereof, e.g. derived from Escherichia coli, is increased or generated. For example the activity of a nucleic acid molecule or a polypeptide comprising the nucleic acid, preferably the coding region thereof, or polypeptide or the consensus sequence or the polypeptide motif, as depicted in Table I, II or IV, application No. 1, column 5 or 8 in the respective same line as the nucleic acid molecule SEQ ID NO. 10708 or polypeptide SEQ ID NO. 10709, respectively, or a homolog or a fragment thereof, is increased or generated, or if the activity b3817-protein is increased or generated in a non-human organism, like a microorganism or a plant cell, plant or part thereof, especially with non-targeted localization, For example, an increase of the methionine of at least 1 percent, particularly in a range of 37 to 61-percent is conferred as compared to a corresponding non-transformed wild type non-human organism.

[1153] Accordingly, in one embodiment, an increase of methionine in a non-human organism, as compared to a corresponding non-transformed wild type non-human organism, is conferred in the process of the invention, if the activity of a polypeptide showing the activity of a threonine efflux protein, or if the activity of the polypeptide B3823, preferably represented by SEQ ID NO. 10727, or a homolog or fragment thereof, or if the activity of a polypeptide encoded by a nucleic acid molecule comprising the nucleic acid SEQ ID NO. 10726, preferably the coding region thereof, or a homolog or fragment thereof, e.g. derived from Escherichia coli, is increased or generated. For example the activity of a nucleic acid molecule or a polypeptide comprising the nucleic acid, preferably the coding region thereof, or polypeptide or the consensus sequence or the polypeptide motif, as depicted in Table I, II or IV, application No. 1, column 5 or 8 in the respective same line as the nucleic acid molecule SEQ ID NO. 10726 or polypeptide SEQ ID NO. 10727, respectively, or a homolog or a fragment thereof, is increased or generated, or if the activity threonine efflux protein is increased or generated in a non-human organism, like a microorganism or a plant cell, plant or part thereof, especially with non-targeted localization, For example, an increase of the methionine of at least 1 percent, particularly in a range of 38 to 48-percent is conferred as compared to a corresponding non-transformed wild type non-human organism.

[1154] Accordingly, in one embodiment, an increase of methionine in a non-human organism, as compared to a corresponding non-transformed wild type non-human organism, is conferred in the process of the invention, if the activity of a polypeptide showing the activity of a b4029-protein, or if the activity of the polypeptide B4029, preferably represented by SEQ ID NO. 10741, or a homolog or fragment thereof, or if the activity of a polypeptide encoded by a nucleic acid molecule comprising the nucleic acid SEQ ID NO. 10740, preferably the coding region thereof, or a homolog or fragment thereof, e.g. derived from Escherichia coli, is increased or generated. For example the activity of a nucleic acid molecule or a polypeptide comprising the nucleic acid, preferably the coding region thereof, or polypeptide or the consensus sequence or the polypeptide motif, as depicted in Table I, II or IV, application No. 1, column 5 or 8 in the respective same line as the nucleic acid molecule SEQ ID NO. 10740 or polypeptide SEQ ID NO. 10741, respectively, or a homolog or a fragment thereof, is increased or generated, or if the activity b4029-protein is increased or generated in a non-human organism, like a microorganism or a plant cell, plant or part thereof, especially with non-targeted localization, For example, an increase of the methionine of at least 1 percent, particularly in a range of 84 to 691-percent is conferred as compared to a corresponding non-transformed wild type non-human organism.

[1155] Accordingly, in one embodiment, an increase of methionine in a non-human organism, as compared to a corresponding non-transformed wild type non-human organism, is conferred in the process of the invention, if the activity of a polypeptide showing the activity of a glutaredoxin, or if the activity of the polypeptide GM02LC12622, preferably represented by SEQ ID NO. 10812, or a homolog or fragment thereof, or if the activity of a polypeptide encoded by a nucleic acid molecule comprising the nucleic acid SEQ ID NO. 10811, preferably the coding region thereof, or a homolog or fragment thereof, e.g. derived from Glycine max, is increased or generated. For example the activity of a nucleic acid molecule or a polypeptide comprising the nucleic acid, preferably the coding region thereof, or polypeptide or the consensus sequence or the polypeptide motif, as depicted in Table I, II or IV, application No. 1, column 5 or 8 in the respective same line as the nucleic acid molecule SEQ ID NO. 10811 or polypeptide SEQ ID NO. 10812, respectively, or a homolog or a fragment thereof, is increased or generated, or if the activity glutaredoxin is increased or generated in a non-human organism, like a microorganism or a plant cell, plant or part thereof, especially with non-targeted localization, For example, an increase of the methionine of at least 1 percent, particularly in a range of 37 to 55-percent is conferred as compared to a corresponding non-transformed wild type non-human organism.

[1156] Accordingly, in one embodiment, an increase of methionine in a non-human organism, as compared to a corresponding non-transformed wild type non-human organism, is conferred in the process of the invention, if the activity of a polypeptide showing the activity of a 5′-nucleotidase, or if the activity of the polypeptide Sll1108, preferably represented by SEQ ID NO. 11212, or a homolog or fragment thereof, or if the activity of a polypeptide encoded by a nucleic acid molecule comprising the nucleic acid SEQ ID NO. 11211, preferably the coding region thereof, or a homolog or fragment thereof, e.g. derived from Synechocystis sp., is increased or generated. For example the activity of a nucleic acid molecule or a polypeptide comprising the nucleic acid, preferably the coding region thereof, or polypeptide or the consensus sequence or the polypeptide motif, as depicted in Table I, II or IV, application No. 1, column 5 or 8 in the respective same line as the nucleic acid molecule SEQ ID NO. 11211 or polypeptide SEQ ID NO. 11212, respectively, or a homolog or a fragment thereof, is increased or generated, or if the activity 5′-nucleotidase is increased or generated in a non-human organism, like a microorganism or a plant cell, plant or part thereof, especially with mitochondrial localization, For example, an increase of the methionine of at least 1 percent, particularly in a range of 39 to 67-percent is conferred as compared to a corresponding non-transformed wild type non-human organism.

[1157] Accordingly, in one embodiment, an increase of methionine in a non-human organism, as compared to a corresponding non-transformed wild type non-human organism, is conferred in the process of the invention, if the activity of a polypeptide showing the activity of a glutathione S-transferase, or if the activity of the polypeptide Sll1545, preferably represented by SEQ ID NO. 11424, or a homolog or fragment thereof, or if the activity of a polypeptide encoded by a nucleic acid molecule comprising the nucleic acid SEQ ID NO. 11423, preferably the coding region thereof, or a homolog or fragment thereof, e.g. derived from Synechocystis sp., is increased or generated. For example the activity of a nucleic acid molecule or a polypeptide comprising the nucleic acid, preferably the coding region thereof, or polypeptide or the consensus sequence or the polypeptide motif, as depicted in Table I, II or IV, application No. 1, column 5 or 8 in the respective same line as the nucleic acid molecule SEQ ID NO. 11423 or polypeptide SEQ ID NO. 11424, respectively, or a homolog or a fragment thereof, is increased or generated, or if the activity glutathione S-transferase is increased or generated in a non-human organism, like a microorganism or a plant cell, plant or part thereof, especially with mitochondrial localization, For example, an increase of the methionine of at least 1 percent, particularly in a range of 38 to 58-percent is conferred as compared to a corresponding non-transformed wild type non-human organism.

[1158] Accordingly, in one embodiment, an increase of methionine in a non-human organism, as compared to a corresponding non-transformed wild type non-human organism, is conferred in the process of the invention, if the activity of a polypeptide showing the activity of a coproporphyrinogen III oxidase, or if the activity of the polypeptide Sll1917, preferably represented by SEQ ID NO. 11472, or a homolog or fragment thereof, or if the activity of a polypeptide encoded by a nucleic acid molecule comprising the nucleic acid SEQ ID NO. 11471, preferably the coding region thereof, or a homolog or fragment thereof, e.g. derived from Synechocystis sp., is increased or generated. For example the activity of a nucleic acid molecule or a polypeptide comprising the nucleic acid, preferably the coding region thereof, or polypeptide or the consensus sequence or the polypeptide motif, as depicted in Table I, II or IV, application No. 1, column 5 or 8 in the respective same line as the nucleic acid molecule SEQ ID NO. 11471 or polypeptide SEQ ID NO. 11472, respectively, or a homolog or a fragment thereof, is increased or generated, or if the activity coproporphyrinogen III oxidase is increased or generated in a non-human organism, like a microorganism or a plant cell, plant or part thereof, especially with mitochondrial localization, For example, an increase of the methionine of at least 1 percent, particularly in a range of 30 to 34-percent is conferred as compared to a corresponding non-transformed wild type non-human organism.

[1159] Accordingly, in one embodiment, an increase of methionine in a non-human organism, as compared to a corresponding non-transformed wild type non-human organism, is conferred in the process of the invention, if the activity of a polypeptide showing the activity of a oxidoreductase, or if the activity of the polypeptide Slr0338, preferably represented by SEQ ID NO. 11991, or a homolog or fragment thereof, or if the activity of a polypeptide encoded by a nucleic acid molecule comprising the nucleic acid SEQ ID NO. 11990, preferably the coding region thereof, or a homolog or fragment thereof, e.g. derived from Synechocystis sp., is increased or generated. For example the activity of a nucleic acid molecule or a polypeptide comprising the nucleic acid, preferably the coding region thereof, or polypeptide or the consensus sequence or the polypeptide motif, as depicted in Table I, II or IV, application No. 1, column 5 or 8 in the respective same line as the nucleic acid molecule SEQ ID NO. 11990 or polypeptide SEQ ID NO. 11991, respectively, or a homolog or a fragment thereof, is increased or generated, or if the activity oxidoreductase is increased or generated in a non-human organism, like a microorganism or a plant cell, plant or part thereof, especially with non-targeted localization, For example, an increase of the methionine of at least 1 percent, particularly in a range of 29 to 40-percent is conferred as compared to a corresponding non-transformed wild type non-human organism.

[1160] Accordingly, in one embodiment, an increase of methionine in a non-human organism, as compared to a corresponding non-transformed wild type non-human organism, is conferred in the process of the invention, if the activity of a polypeptide showing the activity of a oxidoreductase, or if the activity of the polypeptide Slr0338, preferably represented by SEQ ID NO. 11991, or a homolog or fragment thereof, or if the activity of a polypeptide encoded by a nucleic acid molecule comprising the nucleic acid SEQ ID NO. 11990, preferably the coding region thereof, or a homolog or fragment thereof, e.g. derived from Synechocystis sp., is increased or generated. For example the activity of a nucleic acid molecule or a polypeptide comprising the nucleic acid, preferably the coding region thereof, or polypeptide or the consensus sequence or the polypeptide motif, as depicted in Table I, II or IV, application No. 1, column 5 or 8 in the respective same line as the nucleic acid molecule SEQ ID NO. 11990 or polypeptide SEQ ID NO. 11991, respectively, or a homolog or a fragment thereof, is increased or generated, or if the activity oxidoreductase is increased or generated in a non-human organism, like a microorganism or a plant cell, plant or part thereof, especially with plastidic localization, For example, an increase of the methionine of at least 1 percent, particularly in a range of 27 to 37-percent is conferred as compared to a corresponding non-transformed wild type non-human organism.

[1161] Accordingly, in one embodiment, an increase of methionine in a non-human organism, as compared to a corresponding non-transformed wild type non-human organism, is conferred in the process of the invention, if the activity of a polypeptide showing the activity of a Photosystem I reaction center subunit XI, or if the activity of the polypeptide Slr1655, preferably represented by SEQ ID NO. 12071, or a homolog or fragment thereof, or if the activity of a polypeptide encoded by a nucleic acid molecule comprising the nucleic acid SEQ ID NO. 12070, preferably the coding region thereof, or a homolog or fragment thereof, e.g. derived from Synechocystis sp., is increased or generated. For example the activity of a nucleic acid molecule or a polypeptide comprising the nucleic acid, preferably the coding region thereof, or polypeptide or the consensus sequence or the polypeptide motif, as depicted in Table I, II or IV, application No. 1, column 5 or 8 in the respective same line as the nucleic acid molecule SEQ ID NO. 12070 or polypeptide SEQ ID NO. 12071, respectively, or a homolog or a fragment thereof, is increased or generated, or if the activity Photosystem I reaction center subunit XI is increased or generated in a non-human organism, like a microorganism or a plant cell, plant or part thereof, especially with mitochondrial localization, For example, an increase of the methionine of at least 1 percent, particularly in a range of 30 to 58-percent is conferred as compared to a corresponding non-transformed wild type non-human organism.

[1162] Accordingly, in one embodiment, an increase of methionine in a non-human organism, as compared to a corresponding non-transformed wild type non-human organism, is conferred in the process of the invention, if the activity of a polypeptide showing the activity of a phosphoadenosine phosphosulfate reductase , or if the activity of the polypeptide Slr1791, preferably represented by SEQ ID NO. 12141, or a homolog or fragment thereof, or if the activity of a polypeptide encoded by a nucleic acid molecule comprising the nucleic acid SEQ ID NO. 12140, preferably the coding region thereof, or a homolog or fragment thereof, e.g. derived from Synechocystis sp., is increased or generated. For example the activity of a nucleic acid molecule or a polypeptide comprising the nucleic acid, preferably the coding region thereof, or polypeptide or the consensus sequence or the polypeptide motif, as depicted in Table I, II or IV, application No. 1, column 5 or 8 in the respective same line as the nucleic acid molecule SEQ ID NO. 12140 or polypeptide SEQ ID NO. 12141, respectively, or a homolog or a fragment thereof, is increased or generated, or if the activity phosphoadenosine phosphosulfate reductase is increased or generated in a non-human organism, like a microorganism or a plant cell, plant or part thereof, especially with plastidic localization, For example, an increase of the methionine of at least 1 percent, particularly in a range of 38 to 66-percent is conferred as compared to a corresponding non-transformed wild type non-human organism.

[1163] Accordingly, in one embodiment, an increase of methionine in a non-human organism, as compared to a corresponding non-transformed wild type non-human organism, is conferred in the process of the invention, if the activity of a polypeptide showing the activity of a threonine dehydratase, or if the activity of the polypeptide Slr2072, preferably represented by SEQ ID NO. 12342, or a homolog or fragment thereof, or if the activity of a polypeptide encoded by a nucleic acid molecule comprising the nucleic acid SEQ ID NO. 12341, preferably the coding region thereof, or a homolog or fragment thereof, e.g. derived from Synechocystis sp., is increased or generated. For example the activity of a nucleic acid molecule or a polypeptide comprising the nucleic acid, preferably the coding region thereof, or polypeptide or the consensus sequence or the polypeptide motif, as depicted in Table I, II or IV, application No. 1, column 5 or 8 in the respective same line as the nucleic acid molecule SEQ ID NO. 12341 or polypeptide SEQ ID NO. 12342, respectively, or a homolog or a fragment thereof, is increased or generated, or if the activity threonine dehydratase is increased or generated in a non-human organism, like a microorganism or a plant cell, plant or part thereof, especially with plastidic localization, For example, an increase of the methionine of at least 1 percent, particularly in a range of 36 to 74-percent is conferred as compared to a corresponding non-transformed wild type non-human organism.

[1164] Accordingly, in one embodiment, an increase of methionine in a non-human organism, as compared to a corresponding non-transformed wild type non-human organism, is conferred in the process of the invention, if the activity of a polypeptide showing the activity of a Sec-independent protein translocase subunit, or if the activity of the polypeptide TTC0019, preferably represented by SEQ ID NO. 12699, or a homolog or fragment thereof, or if the activity of a polypeptide encoded by a nucleic acid molecule comprising the nucleic acid SEQ ID NO. 12698, preferably the coding region thereof, or a homolog or fragment thereof, e.g. derived from Thermus thermophilus, is increased or generated. For example the activity of a nucleic acid molecule or a polypeptide comprising the nucleic acid, preferably the coding region thereof, or polypeptide or the consensus sequence or the polypeptide motif, as depicted in Table I, II or IV, application No. 1, column 5 or 8 in the respective same line as the nucleic acid molecule SEQ ID NO. 12698 or polypeptide SEQ ID NO. 12699, respectively, or a homolog or a fragment thereof, is increased or generated, or if the activity Sec-independent protein translocase subunit is increased or generated in a non-human organism, like a microorganism or a plant cell, plant or part thereof, especially with non-targeted localization, For example, an increase of the methionine of at least 1 percent, particularly in a range of 35 to 71-percent is conferred as compared to a corresponding non-transformed wild type non-human organism.

[1165] Accordingly, in one embodiment, an increase of methionine in a non-human organism, as compared to a corresponding non-transformed wild type non-human organism, is conferred in the process of the invention, if the activity of a polypeptide showing the activity of a homocitrate synthase, or if the activity of the polypeptide TTC1550, preferably represented by SEQ ID NO. 12975, or a homolog or fragment thereof, or if the activity of a polypeptide encoded by a nucleic acid molecule comprising the nucleic acid SEQ ID NO. 12974, preferably the coding region thereof, or a homolog or fragment thereof, e.g. derived from Thermus thermophilus, is increased or generated. For example the activity of a nucleic acid molecule or a polypeptide comprising the nucleic acid, preferably the coding region thereof, or polypeptide or the consensus sequence or the polypeptide motif, as depicted in Table I, II or IV, application No. 1, column 5 or 8 in the respective same line as the nucleic acid molecule SEQ ID NO. 12974 or polypeptide SEQ ID NO. 12975, respectively, or a homolog or a fragment thereof, is increased or generated, or if the activity homocitrate synthase is increased or generated in a non-human organism, like a microorganism or a plant cell, plant or part thereof, especially with non-targeted localization, For example, an increase of the methionine of at least 1 percent, particularly in a range of 36 to 44-percent is conferred as compared to a corresponding non-transformed wild type non-human organism.

[1166] Accordingly, in one embodiment, an increase of methionine in a non-human organism, as compared to a corresponding non-transformed wild type non-human organism, is conferred in the process of the invention, if the activity of a polypeptide showing the activity of a cystathioninelyase, or if the activity of the polypeptide Yal012w, preferably represented by SEQ ID NO. 13377, or a homolog or fragment thereof, or if the activity of a polypeptide encoded by a nucleic acid molecule comprising the nucleic acid SEQ ID NO. 13376, preferably the coding region thereof, or a homolog or fragment thereof, e.g. derived from Saccharomyces cerevisiae, is increased or generated. For example the activity of a nucleic acid molecule or a polypeptide comprising the nucleic acid, preferably the coding region thereof, or polypeptide or the consensus sequence or the polypeptide motif, as depicted in Table I, II or IV, application No. 1, column 5 or 8 in the respective same line as the nucleic acid molecule SEQ ID NO. 13376 or polypeptide SEQ ID NO. 13377, respectively, or a homolog or a fragment thereof, is increased or generated, or if the activity cystathionine-lyase is increased or generated in a non-human organism, like a microorganism or a plant cell, plant or part thereof, especially with non-targeted localization, For example, an increase of the methionine of at least 1 percent, particularly in a range of 22 to 31-percent is conferred as compared to a corresponding non-transformed wild type non-human organism.

[1167] Accordingly, in one embodiment, an increase of methionine in a non-human organism, as compared to a corresponding non-transformed wild type non-human organism, is conferred in the process of the invention, if the activity of a polypeptide showing the activity of a cyclin, or if the activity of the polypeptide Ydl155w, preferably represented by SEQ ID NO. 14172, or a homolog or fragment thereof, or if the activity of a polypeptide encoded by a nucleic acid molecule comprising the nucleic acid SEQ ID NO. 14171, preferably the coding region thereof, or a homolog or fragment thereof, e.g. derived from Saccharomyces cerevisiae, is increased or generated. For example the activity of a nucleic acid molecule or a polypeptide comprising the nucleic acid, preferably the coding region thereof, or polypeptide or the consensus sequence or the polypeptide motif, as depicted in Table I, II or IV, application No. 1, column 5 or 8 in the respective same line as the nucleic acid molecule SEQ ID NO. 14171 or polypeptide SEQ ID NO. 14172, respectively, or a homolog or a fragment thereof, is increased or generated, or if the activity cyclin is increased or generated in a non-human organism, like a microorganism or a plant cell, plant or part thereof, especially with non-targeted localization, For example, an increase of the methionine of at least 1 percent, particularly in a range of 34 to 107-percent is conferred as compared to a corresponding non-transformed wild type non-human organism.

[1168] Accordingly, in one embodiment, an increase of methionine in a non-human organism, as compared to a corresponding non-transformed wild type non-human organism, is conferred in the process of the invention, if the activity of a polypeptide showing the activity of a protein kinase, or if the activity of the polypeptide Ydl159w, preferably represented by SEQ ID NO. 14276, or a homolog or fragment thereof, or if the activity of a polypeptide encoded by a nucleic acid molecule comprising the nucleic acid SEQ ID NO. 14275, preferably the coding region thereof, or a homolog or fragment thereof, e.g. derived from Saccharomyces cerevisiae, is increased or generated. For example the activity of a nucleic acid molecule or a polypeptide comprising the nucleic acid, preferably the coding region thereof, or polypeptide or the consensus sequence or the polypeptide motif, as depicted in Table I, II or IV, application No. 1, column 5 or 8 in the respective same line as the nucleic acid molecule SEQ ID NO. 14275 or polypeptide SEQ ID NO. 14276, respectively, or a homolog or a fragment thereof, is increased or generated, or if the activity protein kinase is increased or generated in a non-human organism, like a microorganism or a plant cell, plant or part thereof, especially with plastidic localization, For example, an increase of the methionine of at least 1 percent, particularly in a range of 44 to 54-percent is conferred as compared to a corresponding non-transformed wild type non-human organism.

[1169] Accordingly, in one embodiment, an increase of methionine in a non-human organism, as compared to a corresponding non-transformed wild type non-human organism, is conferred in the process of the invention, if the activity of a polypeptide showing the activity of a protein kinase, or if the activity of the polypeptide Ydl168w, preferably represented by SEQ ID NO. 14303, or a homolog or fragment thereof, or if the activity of a polypeptide encoded by a nucleic acid molecule comprising the nucleic acid SEQ ID NO. 14302, preferably the coding region thereof, or a homolog or fragment thereof, e.g. derived from Saccharomyces cerevisiae, is increased or generated. For example the activity of a nucleic acid molecule or a polypeptide comprising the nucleic acid, preferably the coding region thereof, or polypeptide or the consensus sequence or the polypeptide motif, as depicted in Table I, II or IV, application No. 1, column 5 or 8 in the respective same line as the nucleic acid molecule SEQ ID NO. 14302 or polypeptide SEQ ID NO. 14303, respectively, or a homolog or a fragment thereof, is increased or generated, or if the activity protein kinase is increased or generated in a non-human organism, like a microorganism or a plant cell, plant or part thereof, especially with plastidic localization, For example, an increase of the methionine of at least 1 percent, particularly in a range of 40 to 46-percent is conferred as compared to a corresponding non-transformed wild type non-human organism.

[1170] Accordingly, in one embodiment, an increase of methionine in a non-human organism, as compared to a corresponding non-transformed wild type non-human organism, is conferred in the process of the invention, if the activity of a polypeptide showing the activity of a F-box protein, or if the activity of the polypeptide Ydr131c, preferably represented by SEQ ID NO. 14707, or a homolog or fragment thereof, or if the activity of a polypeptide encoded by a nucleic acid molecule comprising the nucleic acid SEQ ID NO. 14706, preferably the coding region thereof, or a homolog or fragment thereof, e.g. derived from Saccharomyces cerevisiae, is increased or generated. For example the activity of a nucleic acid molecule or a polypeptide comprising the nucleic acid, preferably the coding region thereof, or polypeptide or the consensus sequence or the polypeptide motif, as depicted in Table I, II or IV, application No. 1, column 5 or 8 in the respective same line as the nucleic acid molecule SEQ ID NO. 14706 or polypeptide SEQ ID NO. 14707, respectively, or a homolog or a fragment thereof, is increased or generated, or if the activity F-box protein is increased or generated in a non-human organism, like a microorganism or a plant cell, plant or part thereof, especially with plastidic localization, For example, an increase of the methionine of at least 1 percent, particularly in a range of 30 to 31-percent is conferred as compared to a corresponding non-transformed wild type non-human organism.

[1171] Accordingly, in one embodiment, an increase of methionine in a non-human organism, as compared to a corresponding non-transformed wild type non-human organism, is conferred in the process of the invention, if the activity of a polypeptide showing the activity of a yhl013c-protein, or if the activity of the polypeptide Yhl013c, preferably represented by SEQ ID NO. 14716, or a homolog or fragment thereof, or if the activity of a polypeptide encoded by a nucleic acid molecule comprising the nucleic acid SEQ ID NO. 14715, preferably the coding region thereof, or a homolog or fragment thereof, e.g. derived from Saccharomyces cerevisiae, is increased or generated. For example the activity of a nucleic acid molecule or a polypeptide comprising the nucleic acid, preferably the coding region thereof, or polypeptide or the consensus sequence or the polypeptide motif, as depicted in Table I, II or IV, application No. 1, column 5 or 8 in the respective same line as the nucleic acid molecule SEQ ID NO. 14715 or polypeptide SEQ ID NO. 14716, respectively, or a homolog or a fragment thereof, is increased or generated, or if the activity yhl013c-protein is increased or generated in a non-human organism, like a microorganism or a plant cell, plant or part thereof, especially with plastidic localization, For example, an increase of the methionine of at least 1 percent, particularly in a range of 32 to 73-percent is conferred as compared to a corresponding non-transformed wild type non-human organism.

[1172] Accordingly, in one embodiment, an increase of methionine in a non-human organism, as compared to a corresponding non-transformed wild type non-human organism, is conferred in the process of the invention, if the activity of a polypeptide showing the activity of a (DL)-glycerol-3-phosphatase, or if the activity of the polypeptide Yi1053w, preferably represented by SEQ ID NO. 14770, or a homolog or fragment thereof, or if the activity of a polypeptide encoded by a nucleic acid molecule comprising the nucleic acid SEQ ID NO. 14769, preferably the coding region thereof, or a homolog or fragment thereof, e.g. derived from Saccharomyces cerevisiae, is increased or generated. For example the activity of a nucleic acid molecule or a polypeptide comprising the nucleic acid, preferably the coding region thereof, or polypeptide or the consensus sequence or the polypeptide motif, as depicted in Table I, II or IV, application No. 1, column 5 or 8 in the respective same line as the nucleic acid molecule SEQ ID NO. 14769 or polypeptide SEQ ID NO. 14770, respectively, or a homolog or a fragment thereof, is increased or generated, or if the activity (DL)-glycerol-3-phosphatase is increased or generated in a non-human organism, like a microorganism or a plant cell, plant or part thereof, especially with plastidic localization, For example, an increase of the methionine of at least 1 percent, particularly in a range of 26 to 31-percent is conferred as compared to a corresponding non-transformed wild type non-human organism.

[1173] Accordingly, in one embodiment, an increase of methionine in a non-human organism, as compared to a corresponding non-transformed wild type non-human organism, is conferred in the process of the invention, if the activity of a polypeptide showing the activity of a glycogenin, or if the activity of the polypeptide Yjl137c, preferably represented by SEQ ID NO. 14822, or a homolog or fragment thereof, or if the activity of a polypeptide encoded by a nucleic acid molecule comprising the nucleic acid SEQ ID NO. 14821, preferably the coding region thereof, or a homolog or fragment thereof, e.g. derived from Saccharomyces cerevisiae, is increased or generated. For example the activity of a nucleic acid molecule or a polypeptide comprising the nucleic acid, preferably the coding region thereof, or polypeptide or the consensus sequence or the polypeptide motif, as depicted in Table I, II or IV, application No. 1, column 5 or 8 in the respective same line as the nucleic acid molecule SEQ ID NO. 14821 or polypeptide SEQ ID NO. 14822, respectively, or a homolog or a fragment thereof, is increased or generated, or if the activity glycogenin is increased or generated in a non-human organism, like a microorganism or a plant cell, plant or part thereof, especially with plastidic localization, For example, an increase of the methionine of at least 1 percent, particularly in a range of 26 to 37 -percent is conferred as compared to a corresponding non-transformed wild type non-human organism.

[1174] Accordingly, in one embodiment, an increase of methionine in a non-human organism, as compared to a corresponding non-transformed wild type non-human organism, is conferred in the process of the invention, if the activity of a polypeptide showing the activity of a cystathionine gamma-synthase, or if the activity of the polypeptide Yjr130c, preferably represented by SEQ ID NO. 14844, or a homolog or fragment thereof, or if the activity of a polypeptide encoded by a nucleic acid molecule comprising the nucleic acid SEQ ID NO. 14843, preferably the coding region thereof, or a homolog or fragment thereof, e.g. derived from Saccharomyces cerevisiae, is increased or generated. For example the activity of a nucleic acid molecule or a polypeptide comprising the nucleic acid, preferably the coding region thereof, or polypeptide or the consensus sequence or the polypeptide motif, as depicted in Table I, II or IV, application No. 1, column 5 or 8 in the respective same line as the nucleic acid molecule SEQ ID NO. 14843 or polypeptide SEQ ID NO. 14844, respectively, or a homolog or a fragment thereof, is increased or generated, or if the activity cystathionine gamma-synthase is increased or generated in a non-human organism, like a microorganism or a plant cell, plant or part thereof, especially with non-targeted localization, For example, an increase of the methionine of at least 1 percent, particularly in a range of 24 to 30-percent is conferred as compared to a corresponding non-transformed wild type non-human organism.

[1175] Accordingly, in one embodiment, an increase of methionine in a non-human organism, as compared to a corresponding non-transformed wild type non-human organism, is conferred in the process of the invention, if the activity of a polypeptide showing the activity of a homoserine dehydrogenase, or if the activity of the polypeptide Yjr139c, preferably represented by SEQ ID NO. 14886, or a homolog or fragment thereof, or if the activity of a polypeptide encoded by a nucleic acid molecule comprising the nucleic acid SEQ ID NO. 14885, preferably the coding region thereof, or a homolog or fragment thereof, e.g. derived from Saccharomyces cerevisiae, is increased or generated. For example the activity of a nucleic acid molecule or a polypeptide comprising the nucleic acid, preferably the coding region thereof, or polypeptide or the consensus sequence or the polypeptide motif, as depicted in Table I, II or IV, application No. 1, column 5 or 8 in the respective same line as the nucleic acid molecule SEQ ID NO. 14885 or polypeptide SEQ ID NO. 14886, respectively, or a homolog or a fragment thereof, is increased or generated, or if the activity homoserine dehydrogenase is increased or generated in a non-human organism, like a microorganism or a plant cell, plant or part thereof, especially with plastidic localization, For example, an increase of the methionine of at least 1 percent, particularly in a range of 38 to 59-percent is conferred as compared to a corresponding non-transformed wild type non-human organism.

[1176] Accordingly, in one embodiment, an increase of methionine in a non-human organism, as compared to a corresponding non-transformed wild type non-human organism, is conferred in the process of the invention, if the activity of a polypeptide showing the activity of a yml084w-protein, or if the activity of the polypeptide Yml084w, preferably represented by SEQ ID NO. 15176, or a homolog or fragment thereof, or if the activity of a polypeptide encoded by a nucleic acid molecule comprising the nucleic acid SEQ ID NO. 15175, preferably the coding region thereof, or a homolog or fragment thereof, e.g. derived from Saccharomyces cerevisiae, is increased or generated. For example the activity of a nucleic acid molecule or a polypeptide comprising the nucleic acid, preferably the coding region thereof, or polypeptide or the consensus sequence or the polypeptide motif, as depicted in Table I, II or IV, application No. 1, column 5 or 8 in the respective same line as the nucleic acid molecule SEQ ID NO. 15175 or polypeptide SEQ ID NO. 15176, respectively, or a homolog or a fragment thereof, is increased or generated, or if the activity yml084w-protein is increased or generated in a non-human organism, like a microorganism or a plant cell, plant or part thereof, especially with plastidic localization, For example, an increase of the methionine of at least 1 percent, particularly in a range of 31 to 52-percent is conferred as compared to a corresponding non-transformed wild type non-human organism.

[1177] Accordingly, in one embodiment, an increase of methionine in a non-human organism, as compared to a corresponding non-transformed wild type non-human organism, is conferred in the process of the invention, if the activity of a polypeptide showing the activity of a yol160w-protein, or if the activity of the polypeptide Yol160w, preferably represented by SEQ ID NO. 15180, or a homolog or fragment thereof, or if the activity of a polypeptide encoded by a nucleic acid molecule comprising the nucleic acid SEQ ID NO. 15179, preferably the coding region thereof, or a homolog or fragment thereof, e.g. derived from Saccharomyces cerevisiae, is increased or generated. For example the activity of a nucleic acid molecule or a polypeptide comprising the nucleic acid, preferably the coding region thereof, or polypeptide or the consensus sequence or the polypeptide motif, as depicted in Table I, II or IV, application No. 1, column 5 or 8 in the respective same line as the nucleic acid molecule SEQ ID NO. 15179 or polypeptide SEQ ID NO. 15180, respectively, or a homolog or a fragment thereof, is increased or generated, or if the activity yol160w-protein is increased or generated in a non-human organism, like a microorganism or a plant cell, plant or part thereof, especially with plastidic localization, For example, an increase of the methionine of at least 1 percent, particularly in a range of 31 to 47-percent is conferred as compared to a corresponding non-transformed wild type non-human organism.

[1178] Accordingly, in one embodiment, an increase of methionine in a non-human organism, as compared to a corresponding non-transformed wild type non-human organism, is conferred in the process of the invention, if the activity of a polypeptide showing the activity of a yor392w-protein, or if the activity of the polypeptide Yor392w, preferably represented by SEQ ID NO. 15184, or a homolog or fragment thereof, or if the activity of a polypeptide encoded by a nucleic acid molecule comprising the nucleic acid SEQ ID NO. 15183, preferably the coding region thereof, or a homolog or fragment thereof, e.g. derived from Saccharomyces cerevisiae, is increased or generated. For example the activity of a nucleic acid molecule or a polypeptide comprising the nucleic acid, preferably the coding region thereof, or polypeptide or the consensus sequence or the polypeptide motif, as depicted in Table I, II or IV, application No. 1, column 5 or 8 in the respective same line as the nucleic acid molecule SEQ ID NO. 15183 or polypeptide SEQ ID NO. 15184, respectively, or a homolog or a fragment thereof, is increased or generated, or if the activity yor392w-protein is increased or generated in a non-human organism, like a microorganism or a plant cell, plant or part thereof, especially with plastidic localization, For example, an increase of the methionine of at least 1 percent, particularly in a range of 14 to 20-percent is conferred as compared to a corresponding non-transformed wild type non-human organism.

[1179] In an embodiment of the invention, a protein or polypeptide has the “activity of a protein as shown in the respective line in Table II, column 3” if its de novo activity, or its increased expression directly or indirectly leads to an increase in the fine chemical level in the organism or a part thereof, preferably in a cell of said organism, and the protein has the above-mentioned activities of a protein as shown in the respective line in Table II, column 3. Throughout the specification the activity or preferably the biological activity of such a protein or polypeptide or an nucleic acid molecule or sequence encoding such protein or polypeptide is identical or similar if it still has the biological or enzymatic activity of a protein as shown in the respective line in Table II, column 3, or which has at least 10% of the original biological or enzymatic activity, preferably at least 20%, 30%, 40%, 50%, 60%, 70%, 80%, 90%, 95% or 99% in comparison to a protein as shown in Table II, column 3.

[1180] A series of mechanisms exists via which a modification of a protein, e.g. the polypeptide of the invention can directly or indirectly affect the yield, production and/or production efficiency of the fine chemical.

[1181] For example, the molecule number or the specific activity of the polypeptide or the nucleic acid molecule may be increased. Larger amounts of the fine chemical can be produced if the polypeptide or the nucleic acid of the invention is expressed de novo in an organism lacking the activity of said protein, preferably the nucleic acid molecules as mentioned in the respective line in Table I, columns 5 or 8, preferably the coding region thereof, or a homolog or a fragment thereof, alone or, if desired in combination with a transit peptide for example as mentioned in Table a or b, respectively, or in another embodiment by introducing said nucleic acid molecules into an organelle, such as a plastid, in the transgenic organism. However, it is also possible to modify the expression of the gene which is naturally present in the organisms, for example by integrating a nucleic acid sequence, encoding an organelle targeting sequence in front (5 prime) of the coding sequence, leading to a functional preprotein, which is directed for example to the organelle.

[1182] This also applies analogously to the combined increased expression of the nucleic acid molecule of the present invention or its gene product with that of further enzymes or regulators of the fine chemical biosynthesis pathways, e.g. which are useful for the synthesis of the fine chemicals.

[1183] The increase or modulation according to this invention can be constitutive, e.g. due to a stable permanent transgenic expression or to a stable mutation in the corresponding endogenous gene encoding the nucleic acid molecule of the invention or to a modulation of the expression or of the behaviour of a gene conferring the expression of the polypeptide of the invention, or transient, e.g. due to a transient transformation or temporary addition of a modulator such as an agonist or antagonist or inducible, e.g. after transformation with a inducible construct carrying the nucleic acid molecule of the invention under control of an inducible promoter and adding the inducer, e.g. tetracycline or as described herein below.

[1184] The increase in activity of the polypeptide amounts in a cell, an organelle, an organ or a non-human organism or a part thereof preferably to at least 1%, 5%, 10%, 20%, 50%, 70%, 80%, 90%, 100%, 150% or 200%, 250% or more in comparison to the control, reference or wild type.

[1185] In an embodiment the increase in activity of the polypeptide amounts in an organelle such as a plastid or a mitochondrion. In another embodiment the increase in activity of the polypeptide amounts in the cytoplasm. In another embodiment the increase in activity of the polypeptide amounts in the cytosol.

[1186] In the context of the application the term “cytoplasm” defines the compartment of the cell to which the protein is directed by the host cell without the addition of artifical targeting sequences, which are naturally not part of the protein.

[1187] In the context of the application the term “cytosol” defines the fluid of the cell between the plasma membrane and the organelles; that means that the organelles as well as the nucleus are not part of the cytosol.

[1188] The specific activity of a polypeptide encoded by a nucleic acid molecule of the present invention or of the polypeptide of the present invention can be tested as described in the examples. In particular, the expression of a protein in question in a cell, e.g. a plant cell or a microorganism and the detection of an increase the fine chemical level in comparison to a control is an easy test and can be performed as described in the state of the art.

[1189] The nucleic acid sequence of 49747384_SOYBEAN from Glycine max, e.g. as shown in the respective line in column 5 of Table I, application no. 1 is unpublished. And the activity of the gene product thereof is the activity of 49747384_SOYBEAN-protein.

[1190] Accordingly, in one embodiment, the process of the present invention for producing methionine in a non-human organism, like a microorganism or a plant or a part thereof, comprises increasing or generating the activity of a gene product with the activity of a gene product conferring the activity of “49747384_SOYBEAN-protein”, especially from Glycine max or its functional equivalent or its homolog, e.g. the increase of
[1191] (a) a gene product of a gene comprising the nucleic acid molecule as shown in the respective line in column 5 of Table I, application no. 1, preferably the coding region thereof, or a homolog or a fragment thereof, and being depicted in the same respective line as said 49747384_SOYBEAN, or a functional equivalent or a homolog thereof as shown in column 8 of Table I, application no. 1, preferably the coding region thereof, particularly a homolog or functional equivalent as shown in column 8 of Table I B, application no. 1, and being depicted in the same respective line as said 49747384_SOYBEAN, and preferably the activity is increased non-targeted, or
[1192] (b) a polypeptide comprising a polypeptide, a consensus sequence or at least a polypeptide motif as shown in the respective line in column 5 of Table II or in column 8 of Table IV, application no. 1, respectively, and being depicted in the same respective line as said 49747384_SOYBEAN, or a functional equivalent or a homolog thereof as depicted in column 8 of Table II, application no. 1, preferably a homolog or functional equivalent as depicted in column 8 of Table II B, application no. 1, and being depicted in the same respective line as said 49747384_SOYBEAN, and preferably the activity is increased non-targeted.

[1193] Accordingly, in one embodiment, the molecule which activity is to be increased in the process of the invention is the gene product with an activity as a “49747384_SOYBEAN-protein”, preferably it is the molecule of section (a) or (b) of this paragraph.

[1194] In particular, it was observed that in plants, especially in Arabidopsis thaliana, increasing or generating the activity of a gene product non-targeted with the activity of a “49747384_SOYBEAN-protein”, preferably being encoded by a gene comprising the nucleic acid sequence SEQ ID NO. 69, preferably the coding region thereof, conferred the production of or the increase in methionine compared with the wild type control.

[1195] The nucleic acid sequence of At1g09680 from Arabidopsis thaliana, e.g. as shown in the respective line in column 5 of Table I, application no. 1 is unpublished. And the activity of the gene product thereof is the activity of At1 g09680-protein.

[1196] Accordingly, in one embodiment, the process of the present invention for producing methionine in a non-human organism, like a microorganism or a plant or a part thereof, comprises increasing or generating the activity of a gene product with the activity of a gene product conferring the activity of “At1g09680-protein”, especially from Arabidopsis thaliana or its functional equivalent or its homolog, e.g. the increase of
[1197] (a) a gene product of a gene comprising the nucleic acid molecule as shown in the respective line in column 5 of Table I, application no. 1, preferably the coding region thereof, or a homolog or a fragment thereof, and being depicted in the same respective line as said At1g09680, or a functional equivalent or a homolog thereof as shown in column 8 of Table I, application no. 1, preferably the coding region thereof, particularly a homolog or functional equivalent as shown in column 8 of Table I B, application no. 1, and being depicted in the same respective line as said At1g09680, and preferably the activity is increased non-targeted, or
[1198] (b) a polypeptide comprising a polypeptide, a consensus sequence or at least a polypeptide motif as shown in the respective line in column 5 of Table II or in column 8 of Table IV, application no. 1, respectively, and being depicted in the same respective line as said At1g09680, or a functional equivalent or a homolog thereof as depicted in column 8 of Table II, application no. 1, preferably a homolog or functional equivalent as depicted in column 8 of Table II B, application no. 1, and being depicted in the same respective line as said At1g09680, and preferably the activity is increased non-targeted.

[1199] Accordingly, in one embodiment, the molecule which activity is to be increased in the process of the invention is the gene product with an activity as a “At1g09680-protein”, preferably it is the molecule of section (a) or (b) of this paragraph.

[1200] In particular, it was observed that in plants, especially in Arabidopsis thaliana, increasing or generating the activity of a gene product non-targeted with the activity of a “At1g09680-protein”, preferably being encoded by a gene comprising the nucleic acid sequence SEQ ID NO. 352, preferably the coding region thereof, conferred the production of or the increase in methionine compared with the wild type control.

[1201] The nucleic acid sequence of At1g14490 from Arabidopsis thaliana, e.g. as shown in the respective line in column 5 of Table I, application no. 1 is unpublished. And the activity of the gene product thereof is the activity of DNA-binding protein.

[1202] Accordingly, in one embodiment, the process of the present invention for producing methionine in a non-human organism, like a microorganism or a plant or a part thereof, comprises increasing or generating the activity of a gene product with the activity of a gene product conferring the activity of “DNA-binding protein”, especially from Arabidopsis thaliana or its functional equivalent or its homolog, e.g. the increase of
[1203] (a) a gene product of a gene comprising the nucleic acid molecule as shown in the respective line in column 5 of Table I, application no. 1, preferably the coding region thereof, or a homolog or a fragment thereof, and being depicted in the same respective line as said At1g14490, or a functional equivalent or a homolog thereof as shown in column 8 of Table I, application no. 1, preferably the coding region thereof, particularly a homolog or functional equivalent as shown in column 8 of Table I B, application no. 1, and being depicted in the same respective line as said At1g14490, and preferably the activity is increased non-targeted, or
[1204] (b) a polypeptide comprising a polypeptide, a consensus sequence or at least a polypeptide motif as shown in the respective line in column 5 of Table II or in column 8 of Table IV, application no. 1, respectively, and being depicted in the same respective line as said At1g14490, or a functional equivalent or a homolog thereof as depicted in column 8 of Table II, application no. 1, preferably a homolog or functional equivalent as depicted in column 8 of Table II B, application no. 1, and being depicted in the same respective line as said At1g14490, and preferably the activity is increased non-targeted.

[1205] Accordingly, in one embodiment, the molecule which activity is to be increased in the process of the invention is the gene product with an activity as a “DNA-binding protein”, preferably it is the molecule of section (a) or (b) of this paragraph.

[1206] In particular, it was observed that in plants, especially in Arabidopsis thaliana, increasing or generating the activity of a gene product non-targeted with the activity of a “DNA-binding protein”, preferably being encoded by a gene comprising the nucleic acid sequence SEQ ID NO. 385, preferably the coding region thereof, conferred the production of or the increase in methionine compared with the wild type control.

[1207] The nucleic acid sequence of At1g31230 from Arabidopsis thaliana, e.g. as shown in the respective line in column 5 of Table I, application no. 1 is unpublished. And the activity of the gene product thereof is the activity of bifunctional aspartokinase/homoserine dehydrogenase.

[1208] Accordingly, in one embodiment, the process of the present invention for producing methionine in a non-human organism, like a microorganism or a plant or a part thereof, comprises increasing or generating the activity of a gene product with the activity of a gene product conferring the activity of “bifunctional aspartokinase/homoserine dehydrogenase”, especially from Arabidopsis thaliana or its functional equivalent or its homolog, e.g. the increase of
[1209] (a) a gene product of a gene comprising the nucleic acid molecule as shown in the respective line in column 5 of Table I, application no. 1, preferably the coding region thereof, or a homolog or a fragment thereof, and being depicted in the same respective line as said At1g31230, or a functional equivalent or a homolog thereof as shown in column 8 of Table I, application no. 1, preferably the coding region thereof, particularly a homolog or functional equivalent as shown in column 8 of Table I B, application no. 1, and being depicted in the same respective line as said At1g31230, and preferably the activity is increased non-targeted, or
[1210] (b) a polypeptide comprising a polypeptide, a consensus sequence or at least a polypeptide motif as shown in the respective line in column 5 of Table II or in column 8 of Table IV, application no. 1, respectively, and being depicted in the same respective line as said At1g31230, or a functional equivalent or a homolog thereof as depicted in column 8 of Table II, application no. 1, preferably a homolog or functional equivalent as depicted in column 8 of Table II B, application no. 1, and being depicted in the same respective line as said At1g31230, and preferably the activity is increased non-targeted.

[1211] Accordingly, in one embodiment, the molecule which activity is to be increased in the process of the invention is the gene product with an activity as a “bifunctional aspartokinase/homoserine dehydrogenase”, preferably it is the molecule of section (a) or (b) of this paragraph.

[1212] In particular, it was observed that in plants, especially in Arabidopsis thaliana, increasing or generating the activity of a gene product non-targeted with the activity of a “bifunctional aspartokinase/homoserine dehydrogenase”, preferably being encoded by a gene comprising the nucleic acid sequence SEQ ID NO. 627, preferably the coding region thereof, conferred the production of or the increase in methionine compared with the wild type control.

[1213] The nucleic acid sequence of At1g48040 from Arabidopsis thaliana, e.g. as shown in the respective line in column 5 of Table I, application no. 1 is unpublished. And the activity of the gene product thereof is the activity of protein phosphatase.

[1214] Accordingly, in one embodiment, the process of the present invention for producing methionine in a non-human organism, like a microorganism or a plant or a part thereof, comprises increasing or generating the activity of a gene product with the activity of a gene product conferring the activity of “protein phosphatase”, especially from Arabidopsis thaliana or its functional equivalent or its homolog, e.g. the increase of
[1215] (a) a gene product of a gene comprising the nucleic acid molecule as shown in the respective line in column 5 of Table I, application no. 1, preferably the coding region thereof, or a homolog or a fragment thereof, and being depicted in the same respective line as said At1g48040, or a functional equivalent or a homolog thereof as shown in column 8 of Table I, application no. 1, preferably the coding region thereof, particularly a homolog or functional equivalent as shown in column 8 of Table I B, application no. 1, and being depicted in the same respective line as said At1g48040, and preferably the activity is increased non-targeted, or
[1216] (b) a polypeptide comprising a polypeptide, a consensus sequence or at least a polypeptide motif as shown in the respective line in column 5 of Table II or in column 8 of Table IV, application no. 1, respectively, and being depicted in the same respective line as said At1g48040, or a functional equivalent or a homolog thereof as depicted in column 8 of Table II, application no. 1, preferably a homolog or functional equivalent as depicted in column 8 of Table II B, application no. 1, and being depicted in the same respective line as said At1g48040, and preferably the activity is increased non-targeted.

[1217] Accordingly, in one embodiment, the molecule which activity is to be increased in the process of the invention is the gene product with an activity as a “protein phosphatase”, preferably it is the molecule of section (a) or (b) of this paragraph.

[1218] In particular, it was observed that in plants, especially in Arabidopsis thaliana, increasing or generating the activity of a gene product non-targeted with the activity of a “protein phosphatase”, preferably being encoded by a gene comprising the nucleic acid sequence SEQ ID NO. 812, preferably the coding region thereof, conferred the production of or the increase in methionine compared with the wild type control.

[1219] The nucleic acid sequence of At1g68320 from Arabidopsis thaliana, e.g. as shown in the respective line in column 5 of Table I, application no. 1 is unpublished. And the activity of the gene product thereof is the activity of transcription factor.

[1220] Accordingly, in one embodiment, the process of the present invention for producing methionine in a non-human organism, like a microorganism or a plant or a part thereof, comprises increasing or generating the activity of a gene product with the activity of a gene product conferring the activity of “transcription factor”, especially from Arabidopsis thaliana or its functional equivalent or its homolog, e.g. the increase of
[1221] (a) a gene product of a gene comprising the nucleic acid molecule as shown in the respective line in column 5 of Table I, application no. 1, preferably the coding region thereof, or a homolog or a fragment thereof, and being depicted in the same respective line as said At1g68320, or a functional equivalent or a homolog thereof as shown in column 8 of Table I, application no. 1, preferably the coding region thereof, particularly a homolog or functional equivalent as shown in column 8 of Table I B, application no. 1, and being depicted in the same respective line as said At1g68320, and preferably the activity is increased non-targeted, or
[1222] (b) a polypeptide comprising a polypeptide, a consensus sequence or at least a polypeptide motif as shown in the respective line in column 5 of Table II or in column 8 of Table IV, application no. 1, respectively, and being depicted in the same respective line as said At1g68320, or a functional equivalent or a homolog thereof as depicted in column 8 of Table II, application no. 1, preferably a homolog or functional equivalent as depicted in column 8 of Table II B, application no. 1, and being depicted in the same respective line as said At1g68320, and preferably the activity is increased non-targeted.

[1223] Accordingly, in one embodiment, the molecule which activity is to be increased in the process of the invention is the gene product with an activity as a “transcription factor”, preferably it is the molecule of section (a) or (b) of this paragraph.

[1224] In particular, it was observed that in plants, especially in Arabidopsis thaliana, increasing or generating the activity of a gene product non-targeted with the activity of a “transcription factor”, preferably being encoded by a gene comprising the nucleic acid sequence SEQ ID NO. 1061, preferably the coding region thereof, conferred the production of or the increase in methionine compared with the wild type control.

[1225] The nucleic acid sequence of At2g25070 from Arabidopsis thaliana, e.g. as shown in the respective line in column 5 of Table I, application no. 1 is unpublished. And the activity of the gene product thereof is the activity of protein phosphatase.

[1226] Accordingly, in one embodiment, the process of the present invention for producing methionine in a non-human organism, like a microorganism or a plant or a part thereof, comprises increasing or generating the activity of a gene product with the activity of a gene product conferring the activity of “protein phosphatase”, especially from Arabidopsis thaliana or its functional equivalent or its homolog, e.g. the increase of
[1227] (a) a gene product of a gene comprising the nucleic acid molecule as shown in the respective line in column 5 of Table I, application no. 1, preferably the coding region thereof, or a homolog or a fragment thereof, and being depicted in the same respective line as said

[1228] At2g25070, or a functional equivalent or a homolog thereof as shown in column 8 of Table I, application no. 1, preferably the coding region thereof, particularly a homolog or functional equivalent as shown in column 8 of Table I B, application no. 1, and being depicted in the same respective line as said At2g25070, and preferably the activity is increased non-targeted, or
[1229] (b) a polypeptide comprising a polypeptide, a consensus sequence or at least a polypeptide motif as shown in the respective line in column 5 of Table II or in column 8 of Table IV, application no. 1, respectively, and being depicted in the same respective line as said At2g25070, or a functional equivalent or a homolog thereof as depicted in column 8 of Table II, application no. 1, preferably a homolog or functional equivalent as depicted in column 8 of Table II B, application no. 1, and being depicted in the same respective line as said At2g25070, and preferably the activity is increased non-targeted.

[1230] Accordingly, in one embodiment, the molecule which activity is to be increased in the process of the invention is the gene product with an activity as a “protein phosphatase”, preferably it is the molecule of section (a) or (b) of this paragraph.

[1231] In particular, it was observed that in plants, especially in Arabidopsis thaliana, increasing or generating the activity of a gene product non-targeted with the activity of a “protein phosphatase”, preferably being encoded by a gene comprising the nucleic acid sequence SEQ ID NO. 1298, preferably the coding region thereof, conferred the production of or the increase in methionine compared with the wild type control.

[1232] The nucleic acid sequence of At2g45420 from Arabidopsis thaliana, e.g. as shown in the respective line in column 5 of Table I, application no. 1 is unpublished. And the activity of the gene product thereof is the activity of At2g45420-protein.

[1233] Accordingly, in one embodiment, the process of the present invention for producing methionine in a non-human organism, like a microorganism or a plant or a part thereof, comprises increasing or generating the activity of a gene product with the activity of a gene product conferring the activity of “At2g45420-protein”, especially from Arabidopsis thaliana or its functional equivalent or its homolog, e.g. the increase of
[1234] (a) a gene product of a gene comprising the nucleic acid molecule as shown in the respective line in column 5 of Table I, application no. 1, preferably the coding region thereof, or a homolog or a fragment thereof, and being depicted in the same respective line as said At2g45420, or a functional equivalent or a homolog thereof as shown in column 8 of Table I, application no. 1, preferably the coding region thereof, particularly a homolog or functional equivalent as shown in column 8 of Table I B, application no. 1, and being depicted in the same respective line as said At2g45420, and preferably the activity is increased non-targeted, or
[1235] (b) a polypeptide comprising a polypeptide, a consensus sequence or at least a polypeptide motif as shown in the respective line in column 5 of Table II or in column 8 of Table IV, application no. 1, respectively, and being depicted in the same respective line as said At2g45420, or a functional equivalent or a homolog thereof as depicted in column 8 of Table II, application no. 1, preferably a homolog or functional equivalent as depicted in column 8 of Table II B, application no. 1, and being depicted in the same respective line as said At2g45420, and preferably the activity is increased non-targeted.

[1236] Accordingly, in one embodiment, the molecule which activity is to be increased in the process of the invention is the gene product with an activity as a “At2g45420-protein”, preferably it is the molecule of section (a) or (b) of this paragraph.

[1237] In particular, it was observed that in plants, especially in Arabidopsis thaliana, increasing or generating the activity of a gene product non-targeted with the activity of a “At2g45420-protein”, preferably being encoded by a gene comprising the nucleic acid sequence SEQ ID NO. 1623, preferably the coding region thereof, conferred the production of or the increase in methionine compared with the wild type control.

[1238] The nucleic acid sequence of At3g09820 from Arabidopsis thaliana, e.g. as shown in the respective line in column 5 of Table I, application no. 1 is unpublished. And the activity of the gene product thereof is the activity of adenosine kinase.

[1239] Accordingly, in one embodiment, the process of the present invention for producing methionine in a non-human organism, like a microorganism or a plant or a part thereof, comprises increasing or generating the activity of a gene product with the activity of a gene product conferring the activity of “adenosine kinase”, especially from Arabidopsis thaliana or its functional equivalent or its homolog, e.g. the increase of
[1240] (a) a gene product of a gene comprising the nucleic acid molecule as shown in the respective line in column 5 of Table I, application no. 1, preferably the coding region thereof, or a homolog or a fragment thereof, and being depicted in the same respective line as said At3g09820, or a functional equivalent or a homolog thereof as shown in column 8 of Table I, application no. 1, preferably the coding region thereof, particularly a homolog or functional equivalent as shown in column 8 of Table I B, application no. 1, and being depicted in the same respective line as said At3g09820, and preferably the activity is increased non-targeted, or
[1241] (b) a polypeptide comprising a polypeptide, a consensus sequence or at least a polypeptide motif as shown in the respective line in column 5 of Table II or in column 8 of Table IV, application no. 1, respectively, and being depicted in the same respective line as said At3g09820, or a functional equivalent or a homolog thereof as depicted in column 8 of Table II, application no. 1, preferably a homolog or functional equivalent as depicted in column 8 of Table II B, application no. 1, and being depicted in the same respective line as said At3g09820, and preferably the activity is increased non-targeted.

[1242] Accordingly, in one embodiment, the molecule which activity is to be increased in the process of the invention is the gene product with an activity as a “adenosine kinase”, preferably it is the molecule of section (a) or (b) of this paragraph.

[1243] In particular, it was observed that in plants, especially in Arabidopsis thaliana, increasing or generating the activity of a gene product non-targeted with the activity of a “adenosine kinase”, preferably being encoded by a gene comprising the nucleic acid sequence SEQ ID NO. 1696, preferably the coding region thereof, conferred the production of or the increase in methionine compared with the wild type control.

[1244] The nucleic acid sequence of At3g23000 from Arabidopsis thaliana, e.g. as shown in the respective line in column 5 of Table I, application no. 1 is unpublished. And the activity of the gene product thereof is the activity of protein kinase.

[1245] Accordingly, in one embodiment, the process of the present invention for producing methionine in a non-human organism, like a microorganism or a plant or a part thereof, comprises increasing or generating the activity of a gene product with the activity of a gene product conferring the activity of “protein kinase”, especially from Arabidopsis thaliana or its functional equivalent or its homolog, e.g. the increase of
[1246] (a) a gene product of a gene comprising the nucleic acid molecule as shown in the respective line in column 5 of Table I, application no. 1, preferably the coding region thereof, or a homolog or a fragment thereof, and being depicted in the same respective line as said At3g23000, or a functional equivalent or a homolog thereof as shown in column 8 of Table I, application no. 1, preferably the coding region thereof, particularly a homolog or functional equivalent as shown in column 8 of Table I B, application no. 1, and being depicted in the same respective line as said At3g23000, and preferably the activity is increased non-targeted, or
[1247] (b) a polypeptide comprising a polypeptide, a consensus sequence or at least a polypeptide motif as shown in the respective line in column 5 of Table II or in column 8 of Table IV, application no. 1, respectively, and being depicted in the same respective line as said At3g23000, or a functional equivalent or a homolog thereof as depicted in column 8 of Table II, application no. 1, preferably a homolog or functional equivalent as depicted in column 8 of Table II B, application no. 1, and being depicted in the same respective line as said At3g23000, and preferably the activity is increased non-targeted.

[1248] Accordingly, in one embodiment, the molecule which activity is to be increased in the process of the invention is the gene product with an activity as a “protein kinase”, preferably it is the molecule of section (a) or (b) of this paragraph.

[1249] In particular, it was observed that in plants, especially in Arabidopsis thaliana, increasing or generating the activity of a gene product non-targeted with the activity of a “protein kinase”, preferably being encoded by a gene comprising the nucleic acid sequence SEQ ID NO. 1815, preferably the coding region thereof, conferred the production of or the increase in methionine compared with the wild type control.

[1250] The nucleic acid sequence of At3g61830 from Arabidopsis thaliana, e.g. as shown in the respective line in column 5 of Table I, application no. 1, is unpublished. And the activity of the gene product thereof is the activity of auxin response factor.

[1251] Accordingly, in one embodiment, the process of the present invention for producing methionine in a non-human organism, like a microorganism or a plant or a part thereof, comprises increasing or generating the activity of a gene product with the activity of a gene product conferring the activity of “auxin response factor”, especially from Arabidopsis thaliana or its functional equivalent or its homolog, e.g. the increase of
[1252] (a) a gene product of a gene comprising the nucleic acid molecule as shown in the respective line in column 5 of Table I, application no. 1, preferably the coding region thereof, or a homolog or a fragment thereof, and being depicted in the same respective line as said At3g61830, or a functional equivalent or a homolog thereof as shown in column 8 of Table I, application no. 1, preferably the coding region thereof, particularly a homolog or functional equivalent as shown in column 8 of Table I B, application no. 1, and being depicted in the same respective line as said At3g61830, and preferably the activity is increased non-targeted, or
[1253] (b) a polypeptide comprising a polypeptide, a consensus sequence or at least a polypeptide motif as shown in the respective line in column 5 of Table II or in column 8 of Table IV, application no. 1, respectively, and being depicted in the same respective line as said At3g61830, or a functional equivalent or a homolog thereof as depicted in column 8 of Table II, application no. 1, preferably a homolog or functional equivalent as depicted in column 8 of Table II B, application no. 1, and being depicted in the same respective line as said At3g61830, and preferably the activity is increased non-targeted.

[1254] Accordingly, in one embodiment, the molecule which activity is to be increased in the process of the invention is the gene product with an activity as a “auxin response factor”, preferably it is the molecule of section (a) or (b) of this paragraph.

[1255] In particular, it was observed that in plants, especially in Arabidopsis thaliana, increasing or generating the activity of a gene product non-targeted with the activity of a “auxin response factor”, preferably being encoded by a gene comprising the nucleic acid sequence SEQ ID NO. 2367, preferably the coding region thereof, conferred the production of or the increase in methionine compared with the wild type control.

[1256] The nucleic acid sequence of At3g62930 from Arabidopsis thaliana, e.g. as shown in the respective line in column 5 of Table I, application no. 1 is unpublished. And the activity of the gene product thereof is the activity of monthiol glutaredoxin.

[1257] Accordingly, in one embodiment, the process of the present invention for producing methionine in a non-human organism, like a microorganism or a plant or a part thereof, comprises increasing or generating the activity of a gene product with the activity of a gene product conferring the activity of “monthiol glutaredoxin”, especially from Arabidopsis thaliana or its functional equivalent or its homolog, e.g. the increase of
[1258] (a) a gene product of a gene comprising the nucleic acid molecule as shown in the respective line in column 5 of Table I, application no. 1, preferably the coding region thereof, or a homolog or a fragment thereof, and being depicted in the same respective line as said At3g62930, or a functional equivalent or a homolog thereof as shown in column 8 of Table I, application no. 1, preferably the coding region thereof, particularly a homolog or functional equivalent as shown in column 8 of Table I B, application no. 1, and being depicted in the same respective line as said At3g62930, and preferably the activity is increased non-targeted, or
[1259] (b) a polypeptide comprising a polypeptide, a consensus sequence or at least a polypeptide motif as shown in the respective line in column 5 of Table II or in column 8 of Table IV, application no. 1, respectively, and being depicted in the same respective line as said At3g62930, or a functional equivalent or a homolog thereof as depicted in column 8 of Table II, application no. 1, preferably a homolog or functional equivalent as depicted in column 8 of Table II B, application no. 1, and being depicted in the same respective line as said At3g62930, and preferably the activity is increased non-targeted.

[1260] Accordingly, in one embodiment, the molecule which activity is to be increased in the process of the invention is the gene product with an activity as a “monthiol glutaredoxin”, preferably it is the molecule of section (a) or (b) of this paragraph.

[1261] In particular, it was observed that in plants, especially in Arabidopsis thaliana, increasing or generating the activity of a gene product non-targeted with the activity of a “monthiol glutaredoxin”, preferably being encoded by a gene comprising the nucleic acid sequence SEQ ID NO. 2573, preferably the coding region thereof, conferred the production of or the increase in methionine compared with the wild type control.

[1262] The nucleic acid sequence of At3g62950 from Arabidopsis thaliana, e.g. as shown in the respective line in column 5 of Table I, application no. 1 is unpublished. And the activity of the gene product thereof is the activity of glutaredoxin.

[1263] Accordingly, in one embodiment, the process of the present invention for producing methionine in a non-human organism, like a microorganism or a plant or a part thereof, comprises increasing or generating the activity of a gene product with the activity of a gene product conferring the activity of “glutaredoxin”, especially from Arabidopsis thaliana or its functional equivalent or its homolog, e.g. the increase of
[1264] (a) a gene product of a gene comprising the nucleic acid molecule as shown in the respective line in column 5 of Table I, application no. 1, preferably the coding region thereof, or a homolog or a fragment thereof, and being depicted in the same respective line as said At3g62950, or a functional equivalent or a homolog thereof as shown in column 8 of Table I, application no. 1, preferably the coding region thereof, particularly a homolog or functional equivalent as shown in column 8 of Table I B, application no. 1, and being depicted in the same respective line as said At3g62950, and preferably the activity is increased non-targeted, or
[1265] (b) a polypeptide comprising a polypeptide, a consensus sequence or at least a polypeptide motif as shown in the respective line in column 5 of Table II or in column 8 of Table IV, application no. 1, respectively, and being depicted in the same respective line as said At3g62950, or a functional equivalent or a homolog thereof as depicted in column 8 of Table II, application no. 1, preferably a homolog or functional equivalent as depicted in column 8 of Table II B, application no. 1, and being depicted in the same respective line as said At3g62950, and preferably the activity is increased non-targeted.

[1266] Accordingly, in one embodiment, the molecule which activity is to be increased in the process of the invention is the gene product with an activity as a “glutaredoxin”, preferably it is the molecule of section (a) or (b) of this paragraph.

[1267] In particular, it was observed that in plants, especially in Arabidopsis thaliana, increasing or generating the activity of a gene product non-targeted with the activity of a “glutaredoxin”, preferably being encoded by a gene comprising the nucleic acid sequence SEQ ID NO. 2935, preferably the coding region thereof, conferred the production of or the increase in methionine compared with the wild type control.

[1268] The nucleic acid sequence of At4g15670 from Arabidopsis thaliana, e.g. as shown in the respective line in column 5 of Table I, application no. 1 is unpublished. And the activity of the gene product thereof is the activity of monothiol glutaredoxin.

[1269] Accordingly, in one embodiment, the process of the present invention for producing methionine in a non-human organism, like a microorganism or a plant or a part thereof, comprises increasing or generating the activity of a gene product with the activity of a gene product conferring the activity of “monothiol glutaredoxin”, especially from Arabidopsis thaliana or its functional equivalent or its homolog, e.g. the increase of
[1270] (a) a gene product of a gene comprising the nucleic acid molecule as shown in the respective line in column 5 of Table I, application no. 1, preferably the coding region thereof, or a homolog or a fragment thereof, and being depicted in the same respective line as said At4g15670, or a functional equivalent or a homolog thereof as shown in column 8 of Table I, application no. 1, preferably the coding region thereof, particularly a homolog or functional equivalent as shown in column 8 of Table I B, application no. 1, and being depicted in the same respective line as said At4g15670, and preferably the activity is increased non-targeted, or
[1271] (b) a polypeptide comprising a polypeptide, a consensus sequence or at least a polypeptide motif as shown in the respective line in column 5 of Table II or in column 8 of Table IV, application no. 1, respectively, and being depicted in the same respective line as said At4g15670, or a functional equivalent or a homolog thereof as depicted in column 8 of Table II, application no. 1, preferably a homolog or functional equivalent as depicted in column 8 of Table II B, application no. 1, and being depicted in the same respective line as said At4g15670, and preferably the activity is increased non-targeted.

[1272] Accordingly, in one embodiment, the molecule which activity is to be increased in the process of the invention is the gene product with an activity as a “monothiol glutaredoxin”, preferably it is the molecule of section (a) or (b) of this paragraph.

[1273] In particular, it was observed that in plants, especially in Arabidopsis thaliana, increasing or generating the activity of a gene product non-targeted with the activity of a “monothiol glutaredoxin”, preferably being encoded by a gene comprising the nucleic acid sequence SEQ ID NO. 3279, preferably the coding region thereof, conferred the production of or the increase in methionine compared with the wild type control.

[1274] The nucleic acid sequence of At4g15700 from Arabidopsis thaliana, e.g. as shown in the respective line in column 5 of Table I, application no. 1 is unpublished. And the activity of the gene product thereof is the activity of monothiol glutaredoxin.

[1275] Accordingly, in one embodiment, the process of the present invention for producing methionine in a non-human organism, like a microorganism or a plant or a part thereof, comprises increasing or generating the activity of a gene product with the activity of a gene product conferring the activity of “monothiol glutaredoxin”, especially from Arabidopsis thaliana or its functional equivalent or its homolog, e.g. the increase of
[1276] (a) a gene product of a gene comprising the nucleic acid molecule as shown in the respective line in column 5 of Table I, application no. 1, preferably the coding region thereof, or a homolog or a fragment thereof, and being depicted in the same respective line as said At4g15700, or a functional equivalent or a homolog thereof as shown in column 8 of Table I, application no. 1, preferably the coding region thereof, particularly a homolog or functional equivalent as shown in column 8 of Table I B, application no. 1, and being depicted in the same respective line as said At4g15700, and preferably the activity is increased non-targeted, or
[1277] (b) a polypeptide comprising a polypeptide, a consensus sequence or at least a polypeptide motif as shown in the respective line in column 5 of Table II or in column 8 of Table IV, application no. 1, respectively, and being depicted in the same respective line as said At4g15700, or a functional equivalent or a homolog thereof as depicted in column 8 of Table II, application no. 1, preferably a homolog or functional equivalent as depicted in column 8 of Table II B, application no. 1, and being depicted in the same respective line as said At4g15700, and preferably the activity is increased non-targeted.

[1278] Accordingly, in one embodiment, the molecule which activity is to be increased in the process of the invention is the gene product with an activity as a “monothiol glutaredoxin”, preferably it is the molecule of section (a) or (b) of this paragraph.

[1279] In particular, it was observed that in plants, especially in Arabidopsis thaliana, increasing or generating the activity of a gene product non-targeted with the activity of a “monothiol glutaredoxin”, preferably being encoded by a gene comprising the nucleic acid sequence SEQ ID NO. 3654, preferably the coding region thereof, conferred the production of or the increase in methionine compared with the wild type control.

[1280] The nucleic acid sequence of At4g32480 from Arabidopsis thaliana, e.g. as shown in the respective line in column 5 of Table I, application no. 1 is unpublished. And the activity of the gene product thereof is the activity of At4g32480-protein.

[1281] Accordingly, in one embodiment, the process of the present invention for producing methionine in a non-human organism, like a microorganism or a plant or a part thereof, comprises increasing or generating the activity of a gene product with the activity of a gene product conferring the activity of “At4g32480-protein”, especially from Arabidopsis thaliana or its functional equivalent or its homolog, e.g. the increase of
[1282] (a) a gene product of a gene comprising the nucleic acid molecule as shown in the respective line in column 5 of Table I, application no. 1, preferably the coding region thereof, or a homolog or a fragment thereof, and being depicted in the same respective line as said At4g32480, or a functional equivalent or a homolog thereof as shown in column 8 of Table I, application no. 1, preferably the coding region thereof, particularly a homolog or functional equivalent as shown in column 8 of Table I B, application no. 1, and being depicted in the same respective line as said At4g32480, and preferably the activity is increased non-targeted, or
[1283] (b) a polypeptide comprising a polypeptide, a consensus sequence or at least a polypeptide motif as shown in the respective line in column 5 of Table II or in column 8 of Table IV, application no. 1, respectively, and being depicted in the same respective line as said At4g32480, or a functional equivalent or a homolog thereof as depicted in column 8 of Table II, application no. 1, preferably a homolog or functional equivalent as depicted in column 8 of Table II B, application no. 1, and being depicted in the same respective line as said At4g32480, and preferably the activity is increased non-targeted.

[1284] Accordingly, in one embodiment, the molecule which activity is to be increased in the process of the invention is the gene product with an activity as a “At4g32480-protein”, preferably it is the molecule of section (a) or (b) of this paragraph.

[1285] In particular, it was observed that in plants, especially in Arabidopsis thaliana, increasing or generating the activity of a gene product non-targeted with the activity of a “At4g32480-protein”, preferably being encoded by a gene comprising the nucleic acid sequence SEQ ID NO. 4040, preferably the coding region thereof, conferred the production of or the increase in methionine compared with the wild type control.

[1286] The nucleic acid sequence of At4g33040 from Arabidopsis thaliana, e.g. as shown in the respective line in column 5 of Table I, application no. 1 is unpublished. And the activity of the gene product thereof is the activity of glutaredoxin.

[1287] Accordingly, in one embodiment, the process of the present invention for producing methionine in a non-human organism, like a microorganism or a plant or a part thereof, comprises increasing or generating the activity of a gene product with the activity of a gene product conferring the activity of “glutaredoxin”, especially from Arabidopsis thaliana or its functional equivalent or its homolog, e.g. the increase of
[1288] (a) a gene product of a gene comprising the nucleic acid molecule as shown in the respective line in column 5 of Table I, application no. 1, preferably the coding region thereof, or a homolog or a fragment thereof, and being depicted in the same respective line as said

[1289] At4g33040, or a functional equivalent or a homolog thereof as shown in column 8 of Table I, application no. 1, preferably the coding region thereof, particularly a homolog or functional equivalent as shown in column 8 of Table I B, application no. 1, and being depicted in the same respective line as said At4g33040, and preferably the activity is increased non-targeted, or
[1290] (b) a polypeptide comprising a polypeptide, a consensus sequence or at least a polypeptide motif as shown in the respective line in column 5 of Table II or in column 8 of Table IV, application no. 1, respectively, and being depicted in the same respective line as said At4g33040, or a functional equivalent or a homolog thereof as depicted in column 8 of Table II, application no. 1, preferably a homolog or functional equivalent as depicted in column 8 of Table II B, application no. 1, and being depicted in the same respective line as said At4g33040, and preferably the activity is increased non-targeted.

[1291] Accordingly, in one embodiment, the molecule which activity is to be increased in the process of the invention is the gene product with an activity as a “glutaredoxin”, preferably it is the molecule of section (a) or (b) of this paragraph.

[1292] In particular, it was observed that in plants, especially in Arabidopsis thaliana, increasing or generating the activity of a gene product non-targeted with the activity of a “glutaredoxin”, preferably being encoded by a gene comprising the nucleic acid sequence SEQ ID NO. 4102, preferably the coding region thereof, conferred the production of or the increase in methionine compared with the wild type control.

[1293] The nucleic acid sequence of At4g35310 from Arabidopsis thaliana, e.g. as shown in the respective line in column 5 of Table I, application no. 1 is unpublished. And the activity of the gene product thereof is the activity of calcium-dependent protein kinase.

[1294] Accordingly, in one embodiment, the process of the present invention for producing methionine in a non-human organism, like a microorganism or a plant or a part thereof, comprises increasing or generating the activity of a gene product with the activity of a gene product conferring the activity of “calcium-dependent protein kinase”, especially from Arabidopsis thaliana or its functional equivalent or its homolog, e.g. the increase of
[1295] (a) a gene product of a gene comprising the nucleic acid molecule as shown in the respective line in column 5 of Table I, application no. 1, preferably the coding region thereof, or a homolog or a fragment thereof, and being depicted in the same respective line as said At4g35310, or a functional equivalent or a homolog thereof as shown in column 8 of Table I, application no. 1, preferably the coding region thereof, particularly a homolog or functional equivalent as shown in column 8 of Table I B, application no. 1, and being depicted in the same respective line as said At4g35310, and preferably the activity is increased non-targeted, or
[1296] (b) a polypeptide comprising a polypeptide, a consensus sequence or at least a polypeptide motif as shown in the respective line in column 5 of Table II or in column 8 of Table IV, application no. 1, respectively, and being depicted in the same respective line as said At4g35310, or a functional equivalent or a homolog thereof as depicted in column 8 of Table II, application no. 1, preferably a homolog or functional equivalent as depicted in column 8 of Table II B, application no. 1, and being depicted in the same respective line as said At4g35310, and preferably the activity is increased non-targeted.

[1297] Accordingly, in one embodiment, the molecule which activity is to be increased in the process of the invention is the gene product with an activity as a “calcium-dependent protein kinase”, preferably it is the molecule of section (a) or (b) of this paragraph.

[1298] In particular, it was observed that in plants, especially in Arabidopsis thaliana, increasing or generating the activity of a gene product non-targeted with the activity of a “calcium-dependent protein kinase”, preferably being encoded by a gene comprising the nucleic acid sequence SEQ ID NO. 4348, preferably the coding region thereof, conferred the production of or the increase in methionine compared with the wild type control.

[1299] The nucleic acid sequence of At5g18600 from Arabidopsis thaliana, e.g. as shown in the respective line in column 5 of Table I, application no. 1 is unpublished. And the activity of the gene product thereof is the activity of monothiol glutaredoxin.

[1300] Accordingly, in one embodiment, the process of the present invention for producing methionine in a non-human organism, like a microorganism or a plant or a part thereof, comprises increasing or generating the activity of a gene product with the activity of a gene product conferring the activity of “monothiol glutaredoxin”, especially from Arabidopsis thaliana or its functional equivalent or its homolog, e.g. the increase of
[1301] (a) a gene product of a gene comprising the nucleic acid molecule as shown in the respective line in column 5 of Table I, application no. 1, preferably the coding region thereof, or a homolog or a fragment thereof, and being depicted in the same respective line as said At5g18600, or a functional equivalent or a homolog thereof as shown in column 8 of Table I, application no. 1, preferably the coding region thereof, particularly a homolog or functional equivalent as shown in column 8 of Table I B, application no. 1, and being depicted in the same respective line as said At5g18600, and preferably the activity is increased non-targeted, or
[1302] (b) a polypeptide comprising a polypeptide, a consensus sequence or at least a polypeptide motif as shown in the respective line in column 5 of Table II or in column 8 of Table IV, application no. 1, respectively, and being depicted in the same respective line as said At5g18600, or a functional equivalent or a homolog thereof as depicted in column 8 of Table II, application no. 1, preferably a homolog or functional equivalent as depicted in column 8 of Table II B, application no. 1, and being depicted in the same respective line as said At5g18600, and preferably the activity is increased non-targeted.

[1303] Accordingly, in one embodiment, the molecule which activity is to be increased in the process of the invention is the gene product with an activity as a “monothiol glutaredoxin”, preferably it is the molecule of section (a) or (b) of this paragraph.

[1304] In particular, it was observed that in plants, especially in Arabidopsis thaliana, increasing or generating the activity of a gene product non-targeted with the activity of a “monothiol glutaredoxin”, preferably being encoded by a gene comprising the nucleic acid sequence SEQ ID NO. 4904, preferably the coding region thereof, conferred the production of or the increase in methionine compared with the wild type control.

[1305] The nucleic acid sequence of At5g57050 from Arabidopsis thaliana, e.g. as shown in the respective line in column 5 of Table I, application no. 1 is unpublished. And the activity of the gene product thereof is the activity of protein phosphatase.

[1306] Accordingly, in one embodiment, the process of the present invention for producing methionine in a non-human organism, like a microorganism or a plant or a part thereof, comprises increasing or generating the activity of a gene product with the activity of a gene product conferring the activity of “protein phosphatase”, especially from Arabidopsis thaliana or its functional equivalent or its homolog, e.g. the increase of
[1307] (a) a gene product of a gene comprising the nucleic acid molecule as shown in the respective line in column 5 of Table I, application no. 1, preferably the coding region thereof, or a homolog or a fragment thereof, and being depicted in the same respective line as said At5g57050, or a functional equivalent or a homolog thereof as shown in column 8 of Table I, application no. 1, preferably the coding region thereof, particularly a homolog or functional equivalent as shown in column 8 of Table I B, application no. 1, and being depicted in the same respective line as said At5g57050, and preferably the activity is increased non-targeted, or
[1308] (b) a polypeptide comprising a polypeptide, a consensus sequence or at least a polypeptide motif as shown in the respective line in column 5 of Table II or in column 8 of Table IV, application no. 1, respectively, and being depicted in the same respective line as said At5g57050, or a functional equivalent or a homolog thereof as depicted in column 8 of Table II, application no. 1, preferably a homolog or functional equivalent as depicted in column 8 of Table II B, application no. 1, and being depicted in the same respective line as said At5g57050, and preferably the activity is increased non-targeted.

[1309] Accordingly, in one embodiment, the molecule which activity is to be increased in the process of the invention is the gene product with an activity as a “protein phosphatase”, preferably it is the molecule of section (a) or (b) of this paragraph.

[1310] In particular, it was observed that in plants, especially in Arabidopsis thaliana, increasing or generating the activity of a gene product non-targeted with the activity of a “protein phosphatase”, preferably being encoded by a gene comprising the nucleic acid sequence SEQ ID NO. 5318, preferably the coding region thereof, conferred the production of or the increase in methionine compared with the wild type control.

[1311] The nucleic acid sequence of At5g64920 from Arabidopsis thaliana, e.g. as shown in the respective line in column 5 of Table I, application no. 1 is unpublished. And the activity of the gene product thereof is the activity of zinc finger protein.

[1312] Accordingly, in one embodiment, the process of the present invention for producing methionine in a non-human organism, like a microorganism or a plant or a part thereof, comprises increasing or generating the activity of a gene product with the activity of a gene product conferring the activity of “zinc finger protein”, especially from Arabidopsis thaliana or its functional equivalent or its homolog, e.g. the increase of
[1313] (a) a gene product of a gene comprising the nucleic acid molecule as shown in the respective line in column 5 of Table I, application no. 1, preferably the coding region thereof, or a homolog or a fragment thereof, and being depicted in the same respective line as said At5g64920, or a functional equivalent or a homolog thereof as shown in column 8 of Table I, application no. 1, preferably the coding region thereof, particularly a homolog or functional equivalent as shown in column 8 of Table I B, application no. 1, and being depicted in the same respective line as said At5g64920, and preferably the activity is increased non-targeted, or
[1314] (b) a polypeptide comprising a polypeptide, a consensus sequence or at least a polypeptide motif as shown in the respective line in column 5 of Table II or in column 8 of Table IV, application no. 1, respectively, and being depicted in the same respective line as said At5g64920, or a functional equivalent or a homolog thereof as depicted in column 8 of Table II, application no. 1, preferably a homolog or functional equivalent as depicted in column 8 of Table II B, application no. 1, and being depicted in the same respective line as said At5g64920, and preferably the activity is increased non-targeted.

[1315] Accordingly, in one embodiment, the molecule which activity is to be increased in the process of the invention is the gene product with an activity as a “zinc finger protein”, preferably it is the molecule of section (a) or (b) of this paragraph. In particular, it was observed that in plants, especially in Arabidopsis thaliana, increasing or generating the activity of a gene product non-targeted with the activity of a “zinc finger protein”, preferably being encoded by a gene comprising the nucleic acid sequence SEQ ID NO. 5493, preferably the coding region thereof, conferred the production of or the increase in methionine compared with the wild type control.

[1316] The nucleic acid sequence of AvinDRAFT_{—}1495 from Azotobacter vinelandii, e.g. as shown in the respective line in column 5 of Table I, application no. 1, has been published by deposition of the sequences to the EMBL/GenBank/DDBJ databases under “Sequencing of the draft genome assembly of Azotobacter vinelandii AvOP.” in June 2005 by Copeland et al. And the activity of the gene product thereof is the activity of malic enzyme.

[1317] Accordingly, in one embodiment, the process of the present invention for producing methionine in a non-human organism, like a microorganism or a plant or a part thereof, comprises increasing or generating the activity of a gene product with the activity of a gene product conferring the activity of “malic enzyme”, especially from Azotobacter vinelandii or its functional equivalent or its homolog, e.g. the increase of
[1318] (a) a gene product of a gene comprising the nucleic acid molecule as shown in the respective line in column 5 of Table I, application no. 1, preferably the coding region thereof, or a homolog or a fragment thereof, and being depicted in the same respective line as said AvinDRAFT_{—}1495, or a functional equivalent or a homolog thereof as shown in column 8 of Table I, application no. 1, preferably the coding region thereof, particularly a homolog or functional equivalent as shown in column 8 of Table I B, application no. 1, and being depicted in the same respective line as said AvinDRAFT_{—}1495, and preferably the activity is increased non-targeted, or
[1319] (b) a polypeptide comprising a polypeptide, a consensus sequence or at least a polypeptide motif as shown in the respective line in column 5 of Table II or in column 8 of Table IV, application no. 1, respectively, and being depicted in the same respective line as said AvinDRAFT _{—}1495, or a functional equivalent or a homolog thereof as depicted in column 8 of Table II, application no. 1, preferably a homolog or functional equivalent as depicted in column 8 of Table II B, application no. 1, and being depicted in the same respective line as said AvinDRAFT_{—}1495, and preferably the activity is increased non-targeted.

[1320] Accordingly, in one embodiment, the molecule which activity is to be increased in the process of the invention is the gene product with an activity as a “malic enzyme”, preferably it is the molecule of section (a) or (b) of this paragraph.

[1321] In particular, it was observed that in plants, especially in Arabidopsis thaliana, increasing or generating the activity of a gene product non-targeted with the activity of a “malic enzyme”, preferably being encoded by a gene comprising the nucleic acid sequence SEQ ID NO. 5557, preferably the coding region thereof, conferred the production of or the increase in methionine compared with the wild type control.

[1322] The nucleic acid sequence of AvinDRAFT_{—}2091 from Azotobacter vinelandii, e.g. as shown in the respective line in column 5 of Table I, application no. 1, has been published by deposition of the sequences to the EMBL/GenBank/DDBJ databases under “Sequencing of the draft genome assembly of Azotobacter vinelandii AvOP.” in June 2005 by Copeland et al. And the activity of the gene product thereof is the activity of beta-hydroxylase.

[1323] Accordingly, in one embodiment, the process of the present invention for producing methionine in a non-human organism, like a microorganism or a plant or a part thereof, comprises increasing or generating the activity of a gene product with the activity of a gene product conferring the activity of “beta-hydroxylase”, especially from Azotobacter vinelandii or its functional equivalent or its homolog, e.g. the increase of
[1324] (a) a gene product of a gene comprising the nucleic acid molecule as shown in the respective line in column 5 of Table I, application no. 1, preferably the coding region thereof, or a homolog or a fragment thereof, and being depicted in the same respective line as said AvinDRAFT_{—}2091, or a functional equivalent or a homolog thereof as shown in column 8 of Table I, application no. 1, preferably the coding region thereof, particularly a homolog or functional equivalent as shown in column 8 of Table I B, application no. 1, and being depicted in the same respective line as said AvinDRAFT_{—}2091, and preferably the activity is increased non-targeted, or
[1325] (b) a polypeptide comprising a polypeptide, a consensus sequence or at least a polypeptide motif as shown in the respective line in column 5 of Table II or in column 8 of Table IV, application no. 1, respectively, and being depicted in the same respective line as said AvinDRAFT_{—}2091, or a functional equivalent or a homolog thereof as depicted in column 8 of Table II, application no. 1, preferably a homolog or functional equivalent as depicted in column 8 of Table II B, application no. 1, and being depicted in the same respective line as said AvinDRAFT_{—}2091, and preferably the activity is increased non-targeted.

[1326] Accordingly, in one embodiment, the molecule which activity is to be increased in the process of the invention is the gene product with an activity as a “beta-hydroxylase”, preferably it is the molecule of section (a) or (b) of this paragraph.

[1327] In particular, it was observed that in plants, especially in Arabidopsis thaliana, increasing or generating the activity of a gene product non-targeted with the activity of a “beta-hydroxylase”, preferably being encoded by a gene comprising the nucleic acid sequence SEQ ID NO. 6040, preferably the coding region thereof, conferred the production of or the increase in methionine compared with the wild type control.

[1328] The nucleic acid sequence of AvinDRAFT_{—}3028 from Azotobacter vinelandii, e.g. as shown in the respective line in column 5 of Table I, application no. 1, has been published by deposition of the sequences to the EMBL/GenBank/DDBJ databases under “Sequencing of the draft genome assembly of Azotobacter vinelandii AvOP.” in June 2005 by Copeland et al. And the activity of the gene product thereof is the activity of 2-oxoglutarate dehydrogenase E1 subunit.

[1329] Accordingly, in one embodiment, the process of the present invention for producing methionine in a non-human organism, like a microorganism or a plant or a part thereof, comprises increasing or generating the activity of a gene product with the activity of a gene product conferring the activity of “2-oxoglutarate dehydrogenase E1 subunit”, especially from Azotobacter vinelandii or its functional equivalent or its homolog, e.g. the increase of
[1330] (a) a gene product of a gene comprising the nucleic acid molecule as shown in the respective line in column 5 of Table I, application no. 1, preferably the coding region thereof, or a homolog or a fragment thereof, and being depicted in the same respective line as said AvinDRAFT_{—}3028, or a functional equivalent or a homolog thereof as shown in column 8 of Table I, application no. 1, preferably the coding region thereof, particularly a homolog or functional equivalent as shown in column 8 of Table I B, application no. 1, and being depicted in the same respective line as said AvinDRAFT_{—}3028, and preferably the activity is increased non-targeted, or
[1331] (b) a polypeptide comprising a polypeptide, a consensus sequence or at least a polypeptide motif as shown in the respective line in column 5 of Table II or in column 8 of Table IV, application no. 1, respectively, and being depicted in the same respective line as said AvinDRAFT_{—}3028, or a functional equivalent or a homolog thereof as depicted in column 8 of Table II, application no. 1, preferably a homolog or functional equivalent as depicted in column 8 of Table II B, application no. 1, and being depicted in the same respective line as said AvinDRAFT_{—}3028, and preferably the activity is increased non-targeted.

[1332] Accordingly, in one embodiment, the molecule which activity is to be increased in the process of the invention is the gene product with an activity as a “2-oxoglutarate dehydrogenase E1 subunit”, preferably it is the molecule of section (a) or (b) of this paragraph.

[1333] In particular, it was observed that in plants, especially in Arabidopsis thaliana, increasing or generating the activity of a gene product non-targeted with the activity of a “2-oxoglutarate dehydrogenase E1 subunit”, preferably being encoded by a gene comprising the nucleic acid sequence SEQ ID NO. 6075, preferably the coding region thereof, conferred the production of or the increase in methionine compared with the wild type control.

[1334] The nucleic acid sequence of AvinDRAFT_{—}3546 from Azotobacter vinelandii, e.g. as shown in the respective line in column 5 of Table I, application no. 1, has been published by deposition of the sequences to the EMBL/GenBank/DDBJ databases under “Sequencing of the draft genome assembly of Azotobacter vinelandii AvOP.” in June 2005 by Copeland et al. And the activity of the gene product thereof is the activity of homoserine dehydrogenase.

[1335] Accordingly, in one embodiment, the process of the present invention for producing methionine in a non-human organism, like a microorganism or a plant or a part thereof, comprises increasing or generating the activity of a gene product with the activity of a gene product conferring the activity of “homoserine dehydrogenase”, especially from Azotobacter vinelandii or its functional equivalent or its homolog, e.g. the increase of
[1336] (a) a gene product of a gene comprising the nucleic acid molecule as shown in the respective line in column 5 of Table I, application no. 1, preferably the coding region thereof, or a homolog or a fragment thereof, and being depicted in the same respective line as said AvinDRAFT_{—}3546, or a functional equivalent or a homolog thereof as shown in column 8 of Table I, application no. 1, preferably the coding region thereof, particularly a homolog or functional equivalent as shown in column 8 of Table I B, application no. 1, and being depicted in the same respective line as said AvinDRAFT_{—}3546, and preferably the activity is increased non-targeted, or
[1337] (b) a polypeptide comprising a polypeptide, a consensus sequence or at least a polypeptide motif as shown in the respective line in column 5 of Table II or in column 8 of Table IV, application no. 1, respectively, and being depicted in the same respective line as said AvinDRAFT_{—}3546, or a functional equivalent or a homolog thereof as depicted in column 8 of Table II, application no. 1, preferably a homolog or functional equivalent as depicted in column 8 of Table II B, application no. 1, and being depicted in the same respective line as said AvinDRAFT_{—}3546, and preferably the activity is increased non-targeted.

[1338] Accordingly, in one embodiment, the molecule which activity is to be increased in the process of the invention is the gene product with an activity as a “homoserine dehydrogenase”, preferably it is the molecule of section (a) or (b) of this paragraph.

[1339] In particular, it was observed that in plants, especially in Arabidopsis thaliana, increasing or generating the activity of a gene product non-targeted with the activity of a “homoserine dehydrogenase”, preferably being encoded by a gene comprising the nucleic acid sequence SEQ ID NO. 6268, preferably the coding region thereof, conferred the production of or the increase in methionine compared with the wild type control.

[1340] The nucleic acid sequence of AvinDRAFT_{—}5103 from Azotobacter vinelandii, e.g. as shown in the respective line in column 5 of Table I, application no. 1, has been published by deposition of the sequences to the EMBL/GenBank/DDBJ databases under “Sequencing of the draft genome assembly of Azotobacter vinelandii AvOP.” in June 2005 by Copeland et al. And the activity of the gene product thereof is the activity of hydrolase.

[1341] Accordingly, in one embodiment, the process of the present invention for producing methionine in a non-human organism, like a microorganism or a plant or a part thereof, comprises increasing or generating the activity of a gene product with the activity of a gene product conferring the activity of “hydrolase”, especially from Azotobacter vinelandii or its functional equivalent or its homolog, e.g. the increase of
[1342] (a) a gene product of a gene comprising the nucleic acid molecule as shown in the respective line in column 5 of Table I, application no. 1, preferably the coding region thereof, or a homolog or a fragment thereof, and being depicted in the same respective line as said AvinDRAFT_{—}5103, or a functional equivalent or a homolog thereof as shown in column 8 of Table I, application no. 1, preferably the coding region thereof, particularly a homolog or functional equivalent as shown in column 8 of Table I B, application no. 1, and being depicted in the same respective line as said AvinDRAFT_{—}5103, and preferably the activity is increased non-targeted, or
[1343] (b) a polypeptide comprising a polypeptide, a consensus sequence or at least a polypeptide motif as shown in the respective line in column 5 of Table II or in column 8 of Table IV, application no. 1, respectively, and being depicted in the same respective line as said AvinDRAFT_{—}5103, or a functional equivalent or a homolog thereof as depicted in column 8 of Table II, application no. 1, preferably a homolog or functional equivalent as depicted in column 8 of Table II B, application no. 1, and being depicted in the same respective line as said AvinDRAFT_{—}5103, and preferably the activity is increased non-targeted.

[1344] Accordingly, in one embodiment, the molecule which activity is to be increased in the process of the invention is the gene product with an activity as a “hydrolase”, preferably it is the molecule of section (a) or (b) of this paragraph.

[1345] In particular, it was observed that in plants, especially in Arabidopsis thaliana, increasing or generating the activity of a gene product non-targeted with the activity of a “hydrolase”, preferably being encoded by a gene comprising the nucleic acid sequence SEQ ID NO. 6510, preferably the coding region thereof, conferred the production of or the increase in methionine compared with the wild type control.

[1346] The nucleic acid sequence of AvinDRAFT_{—}6075 from Azotobacter vinelandii, e.g. as shown in the respective line in column 5 of Table I, application no. 1, has been published by deposition of the sequences to the EMBL/GenBank/DDBJ databases under “Sequencing of the draft genome assembly of Azotobacter vinelandii AvOP.” in June 2005 by Copeland et al. And the activity of the gene product thereof is the activity of peptidyl-prolyl cis-trans isomerase.

[1347] Accordingly, in one embodiment, the process of the present invention for producing methionine in a non-human organism, like a microorganism or a plant or a part thereof, comprises increasing or generating the activity of a gene product with the activity of a gene product conferring the activity of “peptidyl-prolyl cis-trans isomerase”, especially from Azotobacter vinelandii or its functional equivalent or its homolog, e.g. the increase of
[1348] (a) a gene product of a gene comprising the nucleic acid molecule as shown in the respective line in column 5 of Table I, application no. 1, preferably the coding region thereof, or a homolog or a fragment thereof, and being depicted in the same respective line as said AvinDRAFT_{—}6075, or a functional equivalent or a homolog thereof as shown in column 8 of Table I, application no. 1, preferably the coding region thereof, particularly a homolog or functional equivalent as shown in column 8 of Table I B, application no. 1, and being depicted in the same respective line as said AvinDRAFT_{—}6075, and preferably the activity is increased non-targeted, or
[1349] (b) a polypeptide comprising a polypeptide, a consensus sequence or at least a polypeptide motif as shown in the respective line in column 5 of Table II or in column 8 of Table IV, application no. 1, respectively, and being depicted in the same respective line as said AvinDRAFT_{—}6075, or a functional equivalent or a homolog thereof as depicted in column 8 of Table II, application no. 1, preferably a homolog or functional equivalent as depicted in column 8 of Table II B, application no. 1, and being depicted in the same respective line as said AvinDRAFT_{—}6075, and preferably the activity is increased non-targeted.

[1350] Accordingly, in one embodiment, the molecule which activity is to be increased in the process of the invention is the gene product with an activity as a “peptidyl-prolyl cis-trans isomerase”, preferably it is the molecule of section (a) or (b) of this paragraph.

[1351] In particular, it was observed that in plants, especially in Arabidopsis thaliana, increasing or generating the activity of a gene product non-targeted with the activity of a “peptidyl-prolyl cis-trans isomerase”, preferably being encoded by a gene comprising the nucleic acid sequence SEQ ID NO. 6674, preferably the coding region thereof, conferred the production of or the increase in methionine compared with the wild type control.

[1352] The nucleic acid sequence of B0012 from Escherichia coli, e.g. as shown in the respective line in column 5 of Table I, application no. 1, has been published in Blattner et al., Science 277 (5331), 1453 (1997). And the activity of the gene product thereof is the activity of b0012-protein.

[1353] Accordingly, in one embodiment, the process of the present invention for producing methionine in a non-human organism, like a microorganism or a plant or a part thereof, comprises increasing or generating the activity of a gene product with the activity of a gene product conferring the activity of “b0012-protein”, especially from Escherichia coli or its functional equivalent or its homolog, e.g. the increase of
[1354] (a) a gene product of a gene comprising the nucleic acid molecule as shown in the respective line in column 5 of Table I, application no. 1, preferably the coding region thereof, or a homolog or a fragment thereof, and being depicted in the same respective line as said B0012, or a functional equivalent or a homolog thereof as shown in column 8 of Table I, application no. 1, preferably the coding region thereof, particularly a homolog or functional equivalent as shown in column 8 of Table I B, application no. 1, and being depicted in the same respective line as said B0012, and preferably the activity is increased non-targeted, or
[1355] (b) a polypeptide comprising a polypeptide, a consensus sequence or at least a polypeptide motif as shown in the respective line in column 5 of Table II or in column 8 of Table IV, application no. 1, respectively, and being depicted in the same respective line as said B0012, or a functional equivalent or a homolog thereof as depicted in column 8 of Table II, application no. 1, preferably a homolog or functional equivalent as depicted in column 8 of Table II B, application no. 1, and being depicted in the same respective line as said B0012, and preferably the activity is increased non-targeted.

[1356] Accordingly, in one embodiment, the molecule which activity is to be increased in the process of the invention is the gene product with an activity as a “b0012-protein”, preferably it is the molecule of section (a) or (b) of this paragraph.

[1357] In particular, it was observed that in plants, especially in Arabidopsis thaliana, increasing or generating the activity of a gene product non-targeted with the activity of a “b0012-protein”, preferably being encoded by a gene comprising the nucleic acid sequence SEQ ID NO. 6810, preferably the coding region thereof, conferred the production of or the increase in methionine compared with the wild type control.

[1358] The nucleic acid sequence of B0078 from Escherichia coli, e.g. as shown in the respective line in column 5 of Table I, application no. 1, has been published in Blattner et al., Science 277 (5331), 1453 (1997). And the activity of the gene product thereof is the activity of acetolactate synthase small subunit.

[1359] Accordingly, in one embodiment, the process of the present invention for producing methionine in a non-human organism, like a microorganism or a plant or a part thereof, comprises increasing or generating the activity of a gene product with the activity of a gene product conferring the activity of “acetolactate synthase small subunit”, especially from Escherichia coli or its functional equivalent or its homolog, e.g. the increase of
[1360] (a) a gene product of a gene comprising the nucleic acid molecule as shown in the respective line in column 5 of Table I, application no. 1, preferably the coding region thereof, or a homolog or a fragment thereof, and being depicted in the same respective line as said B0078, or a functional equivalent or a homolog thereof as shown in column 8 of Table I, application no. 1, preferably the coding region thereof, particularly a homolog or functional equivalent as shown in column 8 of Table I B, application no. 1, and being depicted in the same respective line as said B0078, and preferably the activity is increased non-targeted, or
[1361] (b) a polypeptide comprising a polypeptide, a consensus sequence or at least a polypeptide motif as shown in the respective line in column 5 of Table II or in column 8 of Table IV, application no. 1, respectively, and being depicted in the same respective line as said B0078, or a functional equivalent or a homolog thereof as depicted in column 8 of Table II, application no. 1, preferably a homolog or functional equivalent as depicted in column 8 of Table II B, application no. 1, and being depicted in the same respective line as said B0078, and preferably the activity is increased non-targeted.

[1362] Accordingly, in one embodiment, the molecule which activity is to be increased in the process of the invention is the gene product with an activity as a “acetolactate synthase small subunit”, preferably it is the molecule of section (a) or (b) of this paragraph.

[1363] In particular, it was observed that in plants, especially in Arabidopsis thaliana, increasing or generating the activity of a gene product non-targeted with the activity of a “acetolactate synthase small subunit”, preferably being encoded by a gene comprising the nucleic acid sequence SEQ ID NO. 6818, preferably the coding region thereof, conferred the production of or the increase in methionine compared with the wild type control.

[1364] The nucleic acid sequence of B0161 from Escherichia coli, e.g. as shown in the respective line in column 5 of Table I, application no. 1, has been published in Blattner et al., Science 277 (5331), 1453 (1997). And the activity of the gene product thereof is the activity of serine protease.

[1365] Accordingly, in one embodiment, the process of the present invention for producing methionine in a non-human organism, like a microorganism or a plant or a part thereof, comprises increasing or generating the activity of a gene product with the activity of a gene product conferring the activity of “serine protease”, especially from Escherichia coli or its functional equivalent or its homolog, e.g. the increase of
[1366] (a) a gene product of a gene comprising the nucleic acid molecule as shown in the respective line in column 5 of Table I, application no. 1, preferably the coding region thereof, or a homolog or a fragment thereof, and being depicted in the same respective line as said B0161, or a functional equivalent or a homolog thereof as shown in column 8 of Table I, application no. 1, preferably the coding region thereof, particularly a homolog or functional equivalent as shown in column 8 of Table I B, application no. 1, and being depicted in the same respective line as said B0161, and preferably the activity is increased non-targeted, or
[1367] (b) a polypeptide comprising a polypeptide, a consensus sequence or at least a polypeptide motif as shown in the respective line in column 5 of Table II or in column 8 of Table IV, application no. 1, respectively, and being depicted in the same respective line as said B0161, or a functional equivalent or a homolog thereof as depicted in column 8 of Table II, application no. 1, preferably a homolog or functional equivalent as depicted in column 8 of Table II B, application no. 1, and being depicted in the same respective line as said B0161, and preferably the activity is increased non-targeted.

[1368] Accordingly, in one embodiment, the molecule which activity is to be increased in the process of the invention is the gene product with an activity as a “serine protease”, preferably it is the molecule of section (a) or (b) of this paragraph.

[1369] In particular, it was observed that in plants, especially in Arabidopsis thaliana, increasing or generating the activity of a gene product non-targeted with the activity of a “serine protease”, preferably being encoded by a gene comprising the nucleic acid sequence SEQ ID NO. 7081, preferably the coding region thereof, conferred the production of or the increase in methionine compared with the wild type control.

[1370] The nucleic acid sequence of B0348 from Escherichia coli, e.g. as shown in the respective line in column 5 of Table I, application no. 1, has been published in Blattner et al., Science 277 (5331), 1453 (1997). And the activity of the gene product thereof is the activity of 2,3-dihydroxyphenylpropionate 1,2-dioxygenase.

[1371] Accordingly, in one embodiment, the process of the present invention for producing methionine in a non-human organism, like a microorganism or a plant or a part thereof, comprises increasing or generating the activity of a gene product with the activity of a gene product conferring the activity of “2,3-dihydroxyphenylpropionate 1,2-dioxygenase”, especially from Escherichia coli or its functional equivalent or its homolog, e.g. the increase of
[1372] (a) a gene product of a gene comprising the nucleic acid molecule as shown in the respective line in column 5 of Table I, application no. 1, preferably the coding region thereof, or a homolog or a fragment thereof, and being depicted in the same respective line as said B0348, or a functional equivalent or a homolog thereof as shown in column 8 of Table I, application no. 1, preferably the coding region thereof, particularly a homolog or functional equivalent as shown in column 8 of Table I B, application no. 1, and being depicted in the same respective line as said B0348, and preferably the activity is increased plastidic, or
[1373] (b) a polypeptide comprising a polypeptide, a consensus sequence or at least a polypeptide motif as shown in the respective line in column 5 of Table II or in column 8 of Table IV, application no. 1, respectively, and being depicted in the same respective line as said

[1374] B0348, or a functional equivalent or a homolog thereof as depicted in column 8 of Table II, application no. 1, preferably a homolog or functional equivalent as depicted in column 8 of Table II B, application no. 1, and being depicted in the same respective line as said B0348, and preferably the activity is increased plastidic.

[1375] Accordingly, in one embodiment, the molecule which activity is to be increased in the process of the invention is the gene product with an activity as a “2,3-dihydroxyphenylpropionate 1,2-dioxygenase”, preferably it is the molecule of section (a) or (b) of this paragraph.

[1376] In particular, it was observed that in plants, especially in Arabidopsis thaliana, increasing or generating the activity of a gene product plastidic with the activity of a “2,3-dihydroxyphenylpropionate 1,2-dioxygenase”, preferably being encoded by a gene comprising the nucleic acid sequence SEQ ID NO. 7269, preferably the coding region thereof, conferred the production of or the increase in methionine compared with the wild type control.

[1377] The nucleic acid sequence of B0449 from Escherichia coli, e.g. as shown in the respective line in column 5 of Table I, application no. 1, has been published in Blattner et al., Science 277 (5331), 1453 (1997). And the activity of the gene product thereof is the activity of ATP-binding component of a transport system.

[1378] Accordingly, in one embodiment, the process of the present invention for producing methionine in a non-human organism, like a microorganism or a plant or a part thereof, comprises increasing or generating the activity of a gene product with the activity of a gene product conferring the activity of “ATP-binding component of a transport system”, especially from Escherichia coli or its functional equivalent or its homolog, e.g. the increase of
[1379] (a) a gene product of a gene comprising the nucleic acid molecule as shown in the respective line in column 5 of Table I, application no. 1, preferably the coding region thereof, or a homolog or a fragment thereof, and being depicted in the same respective line as said B0449, or a functional equivalent or a homolog thereof as shown in column 8 of Table I, application no. 1, preferably the coding region thereof, particularly a homolog or functional equivalent as shown in column 8 of Table I B, application no. 1, and being depicted in the same respective line as said B0449, and preferably the activity is increased non-targeted, or
[1380] (b) a polypeptide comprising a polypeptide, a consensus sequence or at least a polypeptide motif as shown in the respective line in column 5 of Table II or in column 8 of Table IV, application no. 1, respectively, and being depicted in the same respective line as said B0449, or a functional equivalent or a homolog thereof as depicted in column 8 of Table II, application no. 1, preferably a homolog or functional equivalent as depicted in column 8 of Table II B, application no. 1, and being depicted in the same respective line as said B0449, and preferably the activity is increased non-targeted.

[1381] Accordingly, in one embodiment, the molecule which activity is to be increased in the process of the invention is the gene product with an activity as a “ATP-binding component of a transport system”, preferably it is the molecule of section (a) or (b) of this paragraph.

[1382] In particular, it was observed that in plants, especially in Arabidopsis thaliana, increasing or generating the activity of a gene product non-targeted with the activity of a “ATP-binding component of a transport system”, preferably being encoded by a gene comprising the nucleic acid sequence SEQ ID NO. 7333, preferably the coding region thereof, conferred the production of or the increase in methionine compared with the wild type control.

[1383] The nucleic acid sequence of B0486 from Escherichia coli, e.g. as shown in the respective line in column 5 of Table I, application no. 1, has been published in Blattner et al., Science 277 (5331), 1453 (1997). And the activity of the gene product thereof is the activity of membrane transport protein.

[1384] Accordingly, in one embodiment, the process of the present invention for producing methionine in a non-human organism, like a microorganism or a plant or a part thereof, comprises increasing or generating the activity of a gene product with the activity of a gene product conferring the activity of “membrane transport protein”, especially from Escherichia coli or its functional equivalent or its homolog, e.g. the increase of
[1385] (a) a gene product of a gene comprising the nucleic acid molecule as shown in the respective line in column 5 of Table I, application no. 1, preferably the coding region thereof, or a homolog or a fragment thereof, and being depicted in the same respective line as said B0486, or a functional equivalent or a homolog thereof as shown in column 8 of Table I, application no. 1, preferably the coding region thereof, particularly a homolog or functional equivalent as shown in column 8 of Table I B, application no. 1, and being depicted in the same respective line as said B0486, and preferably the activity is increased non-targeted, or
[1386] (b) a polypeptide comprising a polypeptide, a consensus sequence or at least a polypeptide motif as shown in the respective line in column 5 of Table II or in column 8 of Table IV, application no. 1, respectively, and being depicted in the same respective line as said B0486, or a functional equivalent or a homolog thereof as depicted in column 8 of Table II, application no. 1, preferably a homolog or functional equivalent as depicted in column 8 of Table II B, application no. 1, and being depicted in the same respective line as said B0486, and preferably the activity is increased non-targeted.

[1387] Accordingly, in one embodiment, the molecule which activity is to be increased in the process of the invention is the gene product with an activity as a “membrane transport protein”, preferably it is the molecule of section (a) or (b) of this paragraph.

[1388] In particular, it was observed that in plants, especially in Arabidopsis thaliana, increasing or generating the activity of a gene product non-targeted with the activity of a “membrane transport protein”, preferably being encoded by a gene comprising the nucleic acid sequence SEQ ID NO. 7686, preferably the coding region thereof, conferred the production of or the increase in methionine compared with the wild type control.

[1389] The nucleic acid sequence of B0870 from Escherichia coli, e.g. as shown in the respective line in column 5 of Table I, application no. 1, has been published in Blattner et al., Science 277 (5331), 1453 (1997). And the activity of the gene product thereof is the activity of threonine aldolase.

[1390] Accordingly, in one embodiment, the process of the present invention for producing methionine in a non-human organism, like a microorganism or a plant or a part thereof, comprises increasing or generating the activity of a gene product with the activity of a gene product conferring the activity of “threonine aldolase”, especially from Escherichia coli or its functional equivalent or its homolog, e.g. the increase of
[1391] (a) a gene product of a gene comprising the nucleic acid molecule as shown in the respective line in column 5 of Table I, application no. 1, preferably the coding region thereof, or a homolog or a fragment thereof, and being depicted in the same respective line as said B0870, or a functional equivalent or a homolog thereof as shown in column 8 of Table I, application no. 1, preferably the coding region thereof, particularly a homolog or functional equivalent as shown in column 8 of Table I B, application no. 1, and being depicted in the same respective line as said B0870, and preferably the activity is increased plastidic, or
[1392] (b) a polypeptide comprising a polypeptide, a consensus sequence or at least a polypeptide motif as shown in the respective line in column 5 of Table II or in column 8 of Table IV, application no. 1, respectively, and being depicted in the same respective line as said B0870, or a functional equivalent or a homolog thereof as depicted in column 8 of Table II, application no. 1, preferably a homolog or functional equivalent as depicted in column 8 of Table II B, application no. 1, and being depicted in the same respective line as said B0870, and preferably the activity is increased plastidic.

[1393] Accordingly, in one embodiment, the molecule which activity is to be increased in the process of the invention is the gene product with an activity as a “threonine aldolase”, preferably it is the molecule of section (a) or (b) of this paragraph.

[1394] In particular, it was observed that in plants, especially in Arabidopsis thaliana, increasing or generating the activity of a gene product plastidic with the activity of a “threonine aldolase”, preferably being encoded by a gene comprising the nucleic acid sequence SEQ ID NO. 7730, preferably the coding region thereof, conferred the production of or the increase in methionine compared with the wild type control.

[1395] The nucleic acid sequence of B0898 from Escherichia coli, e.g. as shown in the respective line in column 5 of Table I, application no. 1, has been published in Blattner et al., Science 277 (5331), 1453 (1997). And the activity of the gene product thereof is the activity of major facilitator superfamily transporter protein.

[1396] Accordingly, in one embodiment, the process of the present invention for producing methionine in a non-human organism, like a microorganism or a plant or a part thereof, comprises increasing or generating the activity of a gene product with the activity of a gene product conferring the activity of “major facilitator superfamily transporter protein”, especially from Escherichia coli or its functional equivalent or its homolog, e.g. the increase of
[1397] (a) a gene product of a gene comprising the nucleic acid molecule as shown in the respective line in column 5 of Table I, application no. 1, preferably the coding region thereof, or a homolog or a fragment thereof, and being depicted in the same respective line as said B0898, or a functional equivalent or a homolog thereof as shown in column 8 of Table I, application no. 1, preferably the coding region thereof, particularly a homolog or functional equivalent as shown in column 8 of Table I B, application no. 1, and being depicted in the same respective line as said B0898, and preferably the activity is increased non-targeted, or
[1398] (b) a polypeptide comprising a polypeptide, a consensus sequence or at least a polypeptide motif as shown in the respective line in column 5 of Table II or in column 8 of Table IV, application no. 1, respectively, and being depicted in the same respective line as said B0898, or a functional equivalent or a homolog thereof as depicted in column 8 of Table II, application no. 1, preferably a homolog or functional equivalent as depicted in column 8 of Table II B, application no. 1, and being depicted in the same respective line as said B0898, and preferably the activity is increased non-targeted.

[1399] Accordingly, in one embodiment, the molecule which activity is to be increased in the process of the invention is the gene product with an activity as a “major facilitator superfamily transporter protein”, preferably it is the molecule of section (a) or (b) of this paragraph.

[1400] In particular, it was observed that in plants, especially in Arabidopsis thaliana, increasing or generating the activity of a gene product non-targeted with the activity of a “major facilitator superfamily transporter protein”, preferably being encoded by a gene comprising the nucleic acid sequence SEQ ID NO. 7917, preferably the coding region thereof, conferred the production of or the increase in methionine compared with the wild type control.

[1401] The nucleic acid sequence of B1003 from Escherichia coli, e.g. as shown in the respective line in column 5 of Table I, application no. 1, has been published in Blattner et al., Science 277 (5331), 1453 (1997). And the activity of the gene product thereof is the activity of b1003-protein.

[1402] Accordingly, in one embodiment, the process of the present invention for producing methionine in a non-human organism, like a microorganism or a plant or a part thereof, comprises increasing or generating the activity of a gene product with the activity of a gene product conferring the activity of “b1003-protein”, especially from Escherichia coli or its functional equivalent or its homolog, e.g. the increase of
[1403] (a) a gene product of a gene comprising the nucleic acid molecule as shown in the respective line in column 5 of Table I, application no. 1, preferably the coding region thereof, or a homolog or a fragment thereof, and being depicted in the same respective line as said B1003, or a functional equivalent or a homolog thereof as shown in column 8 of Table I, application no. 1, preferably the coding region thereof, particularly a homolog or functional equivalent as shown in column 8 of Table I B, application no. 1, and being depicted in the same respective line as said B1003, and preferably the activity is increased non-targeted, or
[1404] (b) a polypeptide comprising a polypeptide, a consensus sequence or at least a polypeptide motif as shown in the respective line in column 5 of Table II or in column 8 of Table IV, application no. 1, respectively, and being depicted in the same respective line as said B1003, or a functional equivalent or a homolog thereof as depicted in column 8 of Table II, application no. 1, preferably a homolog or functional equivalent as depicted in column 8 of Table II B, application no. 1, and being depicted in the same respective line as said B1003, and preferably the activity is increased non-targeted.

[1405] Accordingly, in one embodiment, the molecule which activity is to be increased in the process of the invention is the gene product with an activity as a “b1003-protein”, preferably it is the molecule of section (a) or (b) of this paragraph.

[1406] In particular, it was observed that in plants, especially in Arabidopsis thaliana, increasing or generating the activity of a gene product non-targeted with the activity of a “b1003-protein”, preferably being encoded by a gene comprising the nucleic acid sequence SEQ ID NO. 7941, preferably the coding region thereof, conferred the production of or the increase in methionine compared with the wild type control.

[1407] The nucleic acid sequence of B1522 from Escherichia coli, e.g. as shown in the respective line in column 5 of Table I, application no. 1, has been published in Blattner et al., Science 277 (5331), 1453 (1997). And the activity of the gene product thereof is the activity of b1522-protein.

[1408] Accordingly, in one embodiment, the process of the present invention for producing methionine in a non-human organism, like a microorganism or a plant or a part thereof, comprises increasing or generating the activity of a gene product with the activity of a gene product conferring the activity of “b1522-protein”, especially from Escherichia coli or its functional equivalent or its homolog, e.g. the increase of
[1409] (a) a gene product of a gene comprising the nucleic acid molecule as shown in the respective line in column 5 of Table I, application no. 1, preferably the coding region thereof, or a homolog or a fragment thereof, and being depicted in the same respective line as said B1522, or a functional equivalent or a homolog thereof as shown in column 8 of Table I, application no. 1, preferably the coding region thereof, particularly a homolog or functional equivalent as shown in column 8 of Table I B, application no. 1, and being depicted in the same respective line as said B1522, and preferably the activity is increased non-targeted, or
[1410] (b) a polypeptide comprising a polypeptide, a consensus sequence or at least a polypeptide motif as shown in the respective line in column 5 of Table II or in column 8 of Table IV, application no. 1, respectively, and being depicted in the same respective line as said B1522, or a functional equivalent or a homolog thereof as depicted in column 8 of Table II, application no. 1, preferably a homolog or functional equivalent as depicted in column 8 of Table II B, application no. 1, and being depicted in the same respective line as said B1522, and preferably the activity is increased non-targeted.

[1411] Accordingly, in one embodiment, the molecule which activity is to be increased in the process of the invention is the gene product with an activity as a “b1522-protein”, preferably it is the molecule of section (a) or (b) of this paragraph. In particular, it was observed that in plants, especially in Arabidopsis thaliana, increasing or generating the activity of a gene product non-targeted with the activity of a “b1522-protein”, preferably being encoded by a gene comprising the nucleic acid sequence SEQ ID NO. 7947, preferably the coding region thereof, conferred the production of or the increase in methionine compared with the wild type control.

[1412] The nucleic acid sequence of B1601 from Escherichia coli, e.g. as shown in the respective line in column 5 of Table I, application no. 1, has been published in Blattner et al., Science 277 (5331), 1453 (1997). And the activity of the gene product thereof is the activity of transport protein.

[1413] Accordingly, in one embodiment, the process of the present invention for producing methionine in a non-human organism, like a microorganism or a plant or a part thereof, comprises increasing or generating the activity of a gene product with the activity of a gene product conferring the activity of “transport protein”, especially from Escherichia coli or its functional equivalent or its homolog, e.g. the increase of
[1414] (a) a gene product of a gene comprising the nucleic acid molecule as shown in the respective line in column 5 of Table I, application no. 1, preferably the coding region thereof, or a homolog or a fragment thereof, and being depicted in the same respective line as said B1601, or a functional equivalent or a homolog thereof as shown in column 8 of Table I, application no. 1, preferably the coding region thereof, particularly a homolog or functional equivalent as shown in column 8 of Table I B, application no. 1, and being depicted in the same respective line as said B1601, and preferably the activity is increased non-targeted, or
[1415] (b) a polypeptide comprising a polypeptide, a consensus sequence or at least a polypeptide motif as shown in the respective line in column 5 of Table II or in column 8 of Table IV, application no. 1, respectively, and being depicted in the same respective line as said B1601, or a functional equivalent or a homolog thereof as depicted in column 8 of Table II, application no. 1, preferably a homolog or functional equivalent as depicted in column 8 of Table II B, application no. 1, and being depicted in the same respective line as said B1601, and preferably the activity is increased non-targeted.

[1416] Accordingly, in one embodiment, the molecule which activity is to be increased in the process of the invention is the gene product with an activity as a “transport protein”, preferably it is the molecule of section (a) or (b) of this paragraph.

[1417] In particular, it was observed that in plants, especially in Arabidopsis thaliana, increasing or generating the activity of a gene product non-targeted with the activity of a “transport protein”, preferably being encoded by a gene comprising the nucleic acid sequence SEQ ID NO. 7992, preferably the coding region thereof, conferred the production of or the increase in methionine compared with the wild type control.

[1418] The nucleic acid sequence of B1814 from Escherichia coli, e.g. as shown in the respective line in column 5 of Table I, application no. 1, has been published in Blattner et al., Science 277 (5331), 1453 (1997). And the activity of the gene product thereof is the activity of L-serine dehydratase.

[1419] Accordingly, in one embodiment, the process of the present invention for producing methionine in a non-human organism, like a microorganism or a plant or a part thereof, comprises increasing or generating the activity of a gene product with the activity of a gene product conferring the activity of “L-serine dehydratase”, especially from Escherichia coli or its functional equivalent or its homolog, e.g. the increase of
[1420] (a) a gene product of a gene comprising the nucleic acid molecule as shown in the respective line in column 5 of Table I, application no. 1, preferably the coding region thereof, or a homolog or a fragment thereof, and being depicted in the same respective line as said B1814, or a functional equivalent or a homolog thereof as shown in column 8 of Table I, application no. 1, preferably the coding region thereof, particularly a homolog or functional equivalent as shown in column 8 of Table I B, application no. 1, and being depicted in the same respective line as said B1814, and preferably the activity is increased plastidic, or
[1421] (b) a polypeptide comprising a polypeptide, a consensus sequence or at least a polypeptide motif as shown in the respective line in column 5 of Table II or in column 8 of Table IV, application no. 1, respectively, and being depicted in the same respective line as said B1814, or a functional equivalent or a homolog thereof as depicted in column 8 of Table II, application no. 1, preferably a homolog or functional equivalent as depicted in column 8 of Table II B, application no. 1, and being depicted in the same respective line as said B1814, and preferably the activity is increased plastidic.

[1422] Accordingly, in one embodiment, the molecule which activity is to be increased in the process of the invention is the gene product with an activity as a “L-serine dehydratase”, preferably it is the molecule of section (a) or (b) of this paragraph.

[1423] In particular, it was observed that in plants, especially in Arabidopsis thaliana, increasing or generating the activity of a gene product plastidic with the activity of a “L-serine dehydratase”, preferably being encoded by a gene comprising the nucleic acid sequence SEQ ID NO. 8033, preferably the coding region thereof, conferred the production of or the increase in methionine compared with the wild type control.

[1424] The nucleic acid sequence of B1838 from Escherichia coli, e.g. as shown in the respective line in column 5 of Table I, application no. 1, has been published in Blattner et al., Science 277 (5331), 1453 (1997). And the activity of the gene product thereof is the activity of serine/threonine-protein phosphatase.

[1425] Accordingly, in one embodiment, the process of the present invention for producing methionine in a non-human organism, like a microorganism or a plant or a part thereof, comprises increasing or generating the activity of a gene product with the activity of a gene product conferring the activity of “serine/threonine-protein phosphatase”, especially from Escherichia coli or its functional equivalent or its homolog, e.g. the increase of
[1426] (a) a gene product of a gene comprising the nucleic acid molecule as shown in the respective line in column 5 of Table I, application no. 1, preferably the coding region thereof, or a homolog or a fragment thereof, and being depicted in the same respective line as said B1838, or a functional equivalent or a homolog thereof as shown in column 8 of Table I, application no. 1, preferably the coding region thereof, particularly a homolog or functional equivalent as shown in column 8 of Table I B, application no. 1, and being depicted in the same respective line as said B1838, and preferably the activity is increased non-targeted, or
[1427] (b) a polypeptide comprising a polypeptide, a consensus sequence or at least a polypeptide motif as shown in the respective line in column 5 of Table II or in column 8 of Table IV, application no. 1, respectively, and being depicted in the same respective line as said B1838, or a functional equivalent or a homolog thereof as depicted in column 8 of Table II, application no. 1, preferably a homolog or functional equivalent as depicted in column 8 of Table II B, application no. 1, and being depicted in the same respective line as said B1838, and preferably the activity is increased non-targeted.

[1428] Accordingly, in one embodiment, the molecule which activity is to be increased in the process of the invention is the gene product with an activity as a “serine/threonine-protein phosphatase”, preferably it is the molecule of section (a) or (b) of this paragraph.

[1429] In particular, it was observed that in plants, especially in Arabidopsis thaliana, increasing or generating the activity of a gene product non-targeted with the activity of a “serine/threonine-protein phosphatase”, preferably being encoded by a gene comprising the nucleic acid sequence SEQ ID NO. 8316, preferably the coding region thereof, conferred the production of or the increase in methionine compared with the wild type control.

[1430] The nucleic acid sequence of B1854 from Escherichia coli, e.g. as shown in the respective line in column 5 of Table I, application no. 1, has been published in Blattner et al., Science 277 (5331), 1453 (1997). And the activity of the gene product thereof is the activity of pyruvate kinase.

[1431] Accordingly, in one embodiment, the process of the present invention for producing methionine in a non-human organism, like a microorganism or a plant or a part thereof, comprises increasing or generating the activity of a gene product with the activity of a gene product conferring the activity of “pyruvate kinase”, especially from Escherichia coli or its functional equivalent or its homolog, e.g. the increase of
[1432] (a) a gene product of a gene comprising the nucleic acid molecule as shown in the respective line in column 5 of Table I, application no. 1, preferably the coding region thereof, or a homolog or a fragment thereof, and being depicted in the same respective line as said B1854, or a functional equivalent or a homolog thereof as shown in column 8 of Table I, application no. 1, preferably the coding region thereof, particularly a homolog or functional equivalent as shown in column 8 of Table I B, application no. 1, and being depicted in the same respective line as said B1854, and preferably the activity is increased plastidic, or
[1433] (b) a polypeptide comprising a polypeptide, a consensus sequence or at least a polypeptide motif as shown in the respective line in column 5 of Table II or in column 8 of Table IV, application no. 1, respectively, and being depicted in the same respective line as said B1854, or a functional equivalent or a homolog thereof as depicted in column 8 of Table II, application no. 1, preferably a homolog or functional equivalent as depicted in column 8 of Table II B, application no. 1, and being depicted in the same respective line as said B1854, and preferably the activity is increased plastidic.

[1434] Accordingly, in one embodiment, the molecule which activity is to be increased in the process of the invention is the gene product with an activity as a “pyruvate kinase”, preferably it is the molecule of section (a) or (b) of this paragraph.

[1435] In particular, it was observed that in plants, especially in Arabidopsis thaliana, increasing or generating the activity of a gene product plastidic with the activity of a “pyruvate kinase”, preferably being encoded by a gene comprising the nucleic acid sequence SEQ ID NO. 8363, preferably the coding region thereof, conferred the production of or the increase in methionine compared with the wild type control.

[1436] The nucleic acid sequence of B2032 from Escherichia coli, e.g. as shown in the respective line in column 5 of Table I, application no. 1, has been published in Blattner et al., Science 277 (5331), 1453 (1997). And the activity of the gene product thereof is the activity of b2032-protein.

[1437] Accordingly, in one embodiment, the process of the present invention for producing methionine in a non-human organism, like a microorganism or a plant or a part thereof, comprises increasing or generating the activity of a gene product with the activity of a gene product conferring the activity of “b2032-protein”, especially from Escherichia coli or its functional equivalent or its homolog, e.g. the increase of
[1438] (a) a gene product of a gene comprising the nucleic acid molecule as shown in the respective line in column 5 of Table I, application no. 1, preferably the coding region thereof, or a homolog or a fragment thereof, and being depicted in the same respective line as said B2032, or a functional equivalent or a homolog thereof as shown in column 8 of Table I, application no. 1, preferably the coding region thereof, particularly a homolog or functional equivalent as shown in column 8 of Table I B, application no. 1, and being depicted in the same respective line as said B2032, and preferably the activity is increased non-targeted, or
[1439] (b) a polypeptide comprising a polypeptide, a consensus sequence or at least a polypeptide motif as shown in the respective line in column 5 of Table II or in column 8 of Table IV, application no. 1, respectively, and being depicted in the same respective line as said B2032, or a functional equivalent or a homolog thereof as depicted in column 8 of Table II, application no. 1, preferably a homolog or functional equivalent as depicted in column 8 of Table II B, application no. 1, and being depicted in the same respective line as said B2032, and preferably the activity is increased non-targeted.

[1440] Accordingly, in one embodiment, the molecule which activity is to be increased in the process of the invention is the gene product with an activity as a “b2032-protein”, preferably it is the molecule of section (a) or (b) of this paragraph.

[1441] In particular, it was observed that in plants, especially in Arabidopsis thaliana, increasing or generating the activity of a gene product non-targeted with the activity of a “b2032-protein”, preferably being encoded by a gene comprising the nucleic acid sequence SEQ ID NO. 8920, preferably the coding region thereof, conferred the production of or the increase in methionine compared with the wild type control.

[1442] The nucleic acid sequence of B2066 from Escherichia coli, e.g. as shown in the respective line in column 5 of Table I, application no. 1, has been published in Blattner et al., Science 277 (5331), 1453 (1997). And the activity of the gene product thereof is the activity of uridine/cytidine kinase.

[1443] Accordingly, in one embodiment, the process of the present invention for producing methionine in a non-human organism, like a microorganism or a plant or a part thereof, comprises increasing or generating the activity of a gene product with the activity of a gene product conferring the activity of “uridine/cytidine kinase”, especially from Escherichia coli or its functional equivalent or its homolog, e.g. the increase of
[1444] (a) a gene product of a gene comprising the nucleic acid molecule as shown in the respective line in column 5 of Table I, application no. 1, preferably the coding region thereof, or a homolog or a fragment thereof, and being depicted in the same respective line as said B2066, or a functional equivalent or a homolog thereof as shown in column 8 of Table I, application no. 1, preferably the coding region thereof, particularly a homolog or functional equivalent as shown in column 8 of Table I B, application no. 1, and being depicted in the same respective line as said B2066, and preferably the activity is increased mitochondrial, or
[1445] (b) a polypeptide comprising a polypeptide, a consensus sequence or at least a polypeptide motif as shown in the respective line in column 5 of Table II or in column 8 of Table IV, application no. 1, respectively, and being depicted in the same respective line as said B2066, or a functional equivalent or a homolog thereof as depicted in column 8 of Table II, application no. 1, preferably a homolog or functional equivalent as depicted in column 8 of Table II B, application no. 1, and being depicted in the same respective line as said B2066, and preferably the activity is increased mitochondrial.

[1446] Accordingly, in one embodiment, the molecule which activity is to be increased in the process of the invention is the gene product with an activity as a “uridine/cytidine kinase”, preferably it is the molecule of section (a) or (b) of this paragraph.

[1447] In particular, it was observed that in plants, especially in Arabidopsis thaliana, increasing or generating the activity of a gene product mitochondrial with the activity of a “uridine/cytidine kinase”, preferably being encoded by a gene comprising the nucleic acid sequence SEQ ID NO. 8937, preferably the coding region thereof, conferred the production of or the increase in methionine compared with the wild type control.

[1448] The nucleic acid sequence of B2345 from Escherichia coli, e.g. as shown in the respective line in column 5 of Table I, application no. 1, has been published in Blattner et al., Science 277 (5331), 1453 (1997). And the activity of the gene product thereof is the activity of b2345-protein.

[1449] Accordingly, in one embodiment, the process of the present invention for producing methionine in a non-human organism, like a microorganism or a plant or a part thereof, comprises increasing or generating the activity of a gene product with the activity of a gene product conferring the activity of “b2345-protein”, especially from Escherichia coli or its functional equivalent or its homolog, e.g. the increase of
[1450] (a) a gene product of a gene comprising the nucleic acid molecule as shown in the respective line in column 5 of Table I, application no. 1, preferably the coding region thereof, or a homolog or a fragment thereof, and being depicted in the same respective line as said B2345, or a functional equivalent or a homolog thereof as shown in column 8 of Table I, application no. 1, preferably the coding region thereof, particularly a homolog or functional equivalent as shown in column 8 of Table I B, application no. 1, and being depicted in the same respective line as said B2345, and preferably the activity is increased non-targeted, or
[1451] (b) a polypeptide comprising a polypeptide, a consensus sequence or at least a polypeptide motif as shown in the respective line in column 5 of Table II or in column 8 of Table IV, application no. 1, respectively, and being depicted in the same respective line as said B2345, or a functional equivalent or a homolog thereof as depicted in column 8 of Table II, application no. 1, preferably a homolog or functional equivalent as depicted in column 8 of Table II B, application no. 1, and being depicted in the same respective line as said B2345, and preferably the activity is increased non-targeted.

[1452] Accordingly, in one embodiment, the molecule which activity is to be increased in the process of the invention is the gene product with an activity as a “b2345-protein”, preferably it is the molecule of section (a) or (b) of this paragraph.

[1453] In particular, it was observed that in plants, especially in Arabidopsis thaliana, increasing or generating the activity of a gene product non-targeted with the activity of a “b2345-protein”, preferably being encoded by a gene comprising the nucleic acid sequence SEQ ID NO. 9156, preferably the coding region thereof, conferred the production of or the increase in methionine compared with the wild type control.

[1454] The nucleic acid sequence of B2513 from Escherichia coli, e.g. as shown in the respective line in column 5 of Table I, application no. 1, has been published in Blattner et al., Science 277 (5331), 1453 (1997). And the activity of the gene product thereof is the activity of b2513-protein.

[1455] Accordingly, in one embodiment, the process of the present invention for producing methionine in a non-human organism, like a microorganism or a plant or a part thereof, comprises increasing or generating the activity of a gene product with the activity of a gene product conferring the activity of “b2513-protein”, especially from Escherichia coli or its functional equivalent or its homolog, e.g. the increase of
[1456] (a) a gene product of a gene comprising the nucleic acid molecule as shown in the respective line in column 5 of Table I, application no. 1, preferably the coding region thereof, or a homolog or a fragment thereof, and being depicted in the same respective line as said B2513, or a functional equivalent or a homolog thereof as shown in column 8 of Table I, application no. 1, preferably the coding region thereof, particularly a homolog or functional equivalent as shown in column 8 of Table I B, application no. 1, and being depicted in the same respective line as said B2513, and preferably the activity is increased non-targeted, or
[1457] (b) a polypeptide comprising a polypeptide, a consensus sequence or at least a polypeptide motif as shown in the respective line in column 5 of Table II or in column 8 of Table IV, application no. 1, respectively, and being depicted in the same respective line as said B2513, or a functional equivalent or a homolog thereof as depicted in column 8 of Table II, application no. 1, preferably a homolog or functional equivalent as depicted in column 8 of Table II B, application no. 1, and being depicted in the same respective line as said B2513, and preferably the activity is increased non-targeted.

[1458] Accordingly, in one embodiment, the molecule which activity is to be increased in the process of the invention is the gene product with an activity as a “b2513-protein”, preferably it is the molecule of section (a) or (b) of this paragraph.

[1459] In particular, it was observed that in plants, especially in Arabidopsis thaliana, increasing or generating the activity of a gene product non-targeted with the activity of a “b2513-protein”, preferably being encoded by a gene comprising the nucleic acid sequence SEQ ID NO. 9167, preferably the coding region thereof, conferred the production of or the increase in methionine compared with the wild type control.

[1460] The nucleic acid sequence of B2673 from Escherichia coli, e.g. as shown in the respective line in column 5 of Table I, application no. 1, has been published in Blattner et al., Science 277 (5331), 1453 (1997). And the activity of the gene product thereof is the activity of b2673-protein.

[1461] Accordingly, in one embodiment, the process of the present invention for producing methionine in a non-human organism, like a microorganism or a plant or a part thereof, comprises increasing or generating the activity of a gene product with the activity of a gene product conferring the activity of “b2673-protein”, especially from Escherichia coli or its functional equivalent or its homolog, e.g. the increase of
[1462] (a) a gene product of a gene comprising the nucleic acid molecule as shown in the respective line in column 5 of Table I, application no. 1, preferably the coding region thereof, or a homolog or a fragment thereof, and being depicted in the same respective line as said B2673, or a functional equivalent or a homolog thereof as shown in column 8 of Table I, application no. 1, preferably the coding region thereof, particularly a homolog or functional equivalent as shown in column 8 of Table I B, application no. 1, and being depicted in the same respective line as said B2673, and preferably the activity is increased non-targeted, or
[1463] (b) a polypeptide comprising a polypeptide, a consensus sequence or at least a polypeptide motif as shown in the respective line in column 5 of Table II or in column 8 of Table IV, application no. 1, respectively, and being depicted in the same respective line as said B2673, or a functional equivalent or a homolog thereof as depicted in column 8 of Table II, application no. 1, preferably a homolog or functional equivalent as depicted in column 8 of Table II B, application no. 1, and being depicted in the same respective line as said B2673, and preferably the activity is increased non-targeted.

[1464] Accordingly, in one embodiment, the molecule which activity is to be increased in the process of the invention is the gene product with an activity as a “b2673-protein”, preferably it is the molecule of section (a) or (b) of this paragraph.

[1465] In particular, it was observed that in plants, especially in Arabidopsis thaliana, increasing or generating the activity of a gene product non-targeted with the activity of a “b2673-protein”, preferably being encoded by a gene comprising the nucleic acid sequence SEQ ID NO. 9244, preferably the coding region thereof, conferred the production of or the increase in methionine compared with the wild type control.

[1466] The nucleic acid sequence of B2923 from Escherichia coli, e.g. as shown in the respective line in column 5 of Table I, application no. 1, has been published in Blattner et al., Science 277 (5331), 1453 (1997). And the activity of the gene product thereof is the activity of arginine exporter protein.

[1467] Accordingly, in one embodiment, the process of the present invention for producing methionine in a non-human organism, like a microorganism or a plant or a part thereof, comprises increasing or generating the activity of a gene product with the activity of a gene product conferring the activity of “arginine exporter protein”, especially from Escherichia coli or its functional equivalent or its homolog, e.g. the increase of
[1468] (a) a gene product of a gene comprising the nucleic acid molecule as shown in the respective line in column 5 of Table I, application no. 1, preferably the coding region thereof, or a homolog or a fragment thereof, and being depicted in the same respective line as said B2923, or a functional equivalent or a homolog thereof as shown in column 8 of Table I, application no. 1, preferably the coding region thereof, particularly a homolog or functional equivalent as shown in column 8 of Table I B, application no. 1, and being depicted in the same respective line as said B2923, and preferably the activity is increased non-targeted, or
[1469] (b) a polypeptide comprising a polypeptide, a consensus sequence or at least a polypeptide motif as shown in the respective line in column 5 of Table II or in column 8 of Table IV, application no. 1, respectively, and being depicted in the same respective line as said B2923, or a functional equivalent or a homolog thereof as depicted in column 8 of Table II, application no. 1, preferably a homolog or functional equivalent as depicted in column 8 of Table II B, application no. 1, and being depicted in the same respective line as said B2923, and preferably the activity is increased non-targeted.

[1470] Accordingly, in one embodiment, the molecule which activity is to be increased in the process of the invention is the gene product with an activity as a “arginine exporter protein”, preferably it is the molecule of section (a) or (b) of this paragraph.
[1471] In particular, it was observed that in plants, especially in Arabidopsis thaliana, increasing or generating the activity of a gene product non-targeted with the activity of a “arginine exporter protein”, preferably being encoded by a gene comprising the nucleic acid sequence SEQ ID NO. 9333, preferably the coding region thereof, conferred the production of or the increase in methionine compared with the wild type control.

[1472] The nucleic acid sequence of B3246 from Escherichia coli, e.g. as shown in the respective line in column 5 of Table I, application no. 1, has been published in Blattner et al., Science 277 (5331), 1453 (1997). And the activity of the gene product thereof is the activity of b3246-protein.

[1473] Accordingly, in one embodiment, the process of the present invention for producing methionine in a non-human organism, like a microorganism or a plant or a part thereof, comprises increasing or generating the activity of a gene product with the activity of a gene product conferring the activity of “b3246-protein”, especially from Escherichia coli or its functional equivalent or its homolog, e.g. the increase of
[1474] (a) a gene product of a gene comprising the nucleic acid molecule as shown in the respective line in column 5 of Table I, application no. 1, preferably the coding region thereof, or a homolog or a fragment thereof, and being depicted in the same respective line as said B3246, or a functional equivalent or a homolog thereof as shown in column 8 of Table I, application no. 1, preferably the coding region thereof, particularly a homolog or functional equivalent as shown in column 8 of Table I B, application no. 1, and being depicted in the same respective line as said B3246, and preferably the activity is increased non-targeted, or
[1475] (b) a polypeptide comprising a polypeptide, a consensus sequence or at least a polypeptide motif as shown in the respective line in column 5 of Table II or in column 8 of Table IV, application no. 1, respectively, and being depicted in the same respective line as said B3246, or a functional equivalent or a homolog thereof as depicted in column 8 of Table II, application no. 1, preferably a homolog or functional equivalent as depicted in column 8 of Table II B, application no. 1, and being depicted in the same respective line as said B3246, and preferably the activity is increased non-targeted.

[1476] Accordingly, in one embodiment, the molecule which activity is to be increased in the process of the invention is the gene product with an activity as a “b3246-protein”, preferably it is the molecule of section (a) or (b) of this paragraph.

[1477] In particular, it was observed that in plants, especially in Arabidopsis thaliana, increasing or generating the activity of a gene product non-targeted with the activity of a “b3246-protein”, preferably being encoded by a gene comprising the nucleic acid sequence SEQ ID NO. 9470, preferably the coding region thereof, conferred the production of or the increase in methionine compared with the wild type control.

[1478] The nucleic acid sequence of B3256 from Escherichia coli, e.g. as shown in the respective line in column 5 of Table I, application no. 1, has been published in Blattner et al., Science 277 (5331), 1453 (1997). And the activity of the gene product thereof is the activity of acetyl CoA carboxylase.

[1479] Accordingly, in one embodiment, the process of the present invention for producing methionine in a non-human organism, like a microorganism or a plant or a part thereof, comprises increasing or generating the activity of a gene product with the activity of a gene product conferring the activity of “acetyl CoA carboxylase”, especially from Escherichia coli or its functional equivalent or its homolog, e.g. the increase of
[1480] (a) a gene product of a gene comprising the nucleic acid molecule as shown in the respective line in column 5 of Table I, application no. 1, preferably the coding region thereof, or a homolog or a fragment thereof, and being depicted in the same respective line as said B3256, or a functional equivalent or a homolog thereof as shown in column 8 of Table I, application no. 1, preferably the coding region thereof, particularly a homolog or functional equivalent as shown in column 8 of Table I B, application no. 1, and being depicted in the same respective line as said B3256, and preferably the activity is increased non-targeted, or
[1481] (b) a polypeptide comprising a polypeptide, a consensus sequence or at least a polypeptide motif as shown in the respective line in column 5 of Table II or in column 8 of Table IV, application no. 1, respectively, and being depicted in the same respective line as said B3256, or a functional equivalent or a homolog thereof as depicted in column 8 of Table II, application no. 1, preferably a homolog or functional equivalent as depicted in column 8 of Table II B, application no. 1, and being depicted in the same respective line as said B3256, and preferably the activity is increased non-targeted.

[1482] Accordingly, in one embodiment, the molecule which activity is to be increased in the process of the invention is the gene product with an activity as a “acetyl CoA carboxylase”, preferably it is the molecule of section (a) or (b) of this paragraph.

[1483] In particular, it was observed that in plants, especially in Arabidopsis thaliana, increasing or generating the activity of a gene product non-targeted with the activity of a “acetyl CoA carboxylase”, preferably being encoded by a gene comprising the nucleic acid sequence SEQ ID NO. 9492, preferably the coding region thereof, conferred the production of or the increase in methionine compared with the wild type control.

[1484] The nucleic acid sequence of B3346 from Escherichia coli, e.g. as shown in the respective line in column 5 of Table I, application no. 1, has been published in Blattner et al., Science 277 (5331), 1453 (1997). And the activity of the gene product thereof is the activity of b3346-protein.

[1485] Accordingly, in one embodiment, the process of the present invention for producing methionine in a non-human organism, like a microorganism or a plant or a part thereof, comprises increasing or generating the activity of a gene product with the activity of a gene product conferring the activity of “b3346-protein”, especially from Escherichia coli or its functional equivalent or its homolog, e.g. the increase of
[1486] (a) a gene product of a gene comprising the nucleic acid molecule as shown in the respective line in column 5 of Table I, application no. 1, preferably the coding region thereof, or a homolog or a fragment thereof, and being depicted in the same respective line as said B3346, or a functional equivalent or a homolog thereof as shown in column 8 of Table I, application no. 1, preferably the coding region thereof, particularly a homolog or functional equivalent as shown in column 8 of Table I B, application no. 1, and being depicted in the same respective line as said B3346, and preferably the activity is increased non-targeted, or
[1487] (b) a polypeptide comprising a polypeptide, a consensus sequence or at least a polypeptide motif as shown in the respective line in column 5 of Table II or in column 8 of Table IV, application no. 1, respectively, and being depicted in the same respective line as said B3346, or a functional equivalent or a homolog thereof as depicted in column 8 of Table II, application no. 1, preferably a homolog or functional equivalent as depicted in column 8 of Table II B, application no. 1, and being depicted in the same respective line as said B3346, and preferably the activity is increased non-targeted.

[1488] Accordingly, in one embodiment, the molecule which activity is to be increased in the process of the invention is the gene product with an activity as a “b3346-protein”, preferably it is the molecule of section (a) or (b) of this paragraph.

[1489] In particular, it was observed that in plants, especially in Arabidopsis thaliana, increasing or generating the activity of a gene product non-targeted with the activity of a “b3346-protein”, preferably being encoded by a gene comprising the nucleic acid sequence SEQ ID NO. 10104, preferably the coding region thereof, conferred the production of or the increase in methionine compared with the wild type control.

[1490] The nucleic acid sequence of B3572 from Escherichia coli, e.g. as shown in the respective line in column 5 of Table I, application no. 1, has been published in Blattner et al., Science 277 (5331), 1453 (1997). And the activity of the gene product thereof is the activity of valine-pyruvate transaminase.

[1491] Accordingly, in one embodiment, the process of the present invention for producing methionine in a non-human organism, like a microorganism or a plant or a part thereof, comprises increasing or generating the activity of a gene product with the activity of a gene product conferring the activity of “valine-pyruvate transaminase”, especially from Escherichia coli or its functional equivalent or its homolog, e.g. the increase of
[1492] (a) a gene product of a gene comprising the nucleic acid molecule as shown in the respective line in column 5 of Table I, application no. 1, preferably the coding region thereof, or a homolog or a fragment thereof, and being depicted in the same respective line as said B3572, or a functional equivalent or a homolog thereof as shown in column 8 of Table I, application no. 1, preferably the coding region thereof, particularly a homolog or functional equivalent as shown in column 8 of Table I B, application no. 1, and being depicted in the same respective line as said B3572, and preferably the activity is increased plastidic, or
[1493] (b) a polypeptide comprising a polypeptide, a consensus sequence or at least a polypeptide motif as shown in the respective line in column 5 of Table II or in column 8 of Table IV, application no. 1, respectively, and being depicted in the same respective line as said B3572, or a functional equivalent or a homolog thereof as depicted in column 8 of Table II, application no. 1, preferably a homolog or functional equivalent as depicted in column 8 of Table II B, application no. 1, and being depicted in the same respective line as said B3572, and preferably the activity is increased plastidic.

[1494] Accordingly, in one embodiment, the molecule which activity is to be increased in the process of the invention is the gene product with an activity as a “valine-pyruvate transaminase”, preferably it is the molecule of section (a) or (b) of this paragraph.

[1495] In particular, it was observed that in plants, especially in Arabidopsis thaliana, increasing or generating the activity of a gene product plastidic with the activity of a “valine-pyruvate transaminase”, preferably being encoded by a gene comprising the nucleic acid sequence SEQ ID NO. 10172, preferably the coding region thereof, conferred the production of or the increase in methionine compared with the wild type control.

[1496] The nucleic acid sequence of B3771 from Escherichia coli, e.g. as shown in the respective line in column 5 of Table I, application no. 1, has been published in Blattner et al., Science 277 (5331), 1453 (1997). And the activity of the gene product thereof is the activity of dihydroxyacid dehydratase.

[1497] Accordingly, in one embodiment, the process of the present invention for producing methionine in a non-human organism, like a microorganism or a plant or a part thereof, comprises increasing or generating the activity of a gene product with the activity of a gene product conferring the activity of “dihydroxyacid dehydratase”, especially from Escherichia coli or its functional equivalent or its homolog, e.g. the increase of
[1498] (a) a gene product of a gene comprising the nucleic acid molecule as shown in the respective line in column 5 of Table I, application no. 1, preferably the coding region thereof, or a homolog or a fragment thereof, and being depicted in the same respective line as said B3771, or a functional equivalent or a homolog thereof as shown in column 8 of Table I, application no. 1, preferably the coding region thereof, particularly a homolog or functional equivalent as shown in column 8 of Table I B, application no. 1, and being depicted in the same respective line as said B3771, and preferably the activity is increased non-targeted, or
[1499] (b) a polypeptide comprising a polypeptide, a consensus sequence or at least a polypeptide motif as shown in the respective line in column 5 of Table II or in column 8 of Table IV, application no. 1, respectively, and being depicted in the same respective line as said B3771, or a functional equivalent or a homolog thereof as depicted in column 8 of Table II, application no. 1, preferably a homolog or functional equivalent as depicted in column 8 of Table II B, application no. 1, and being depicted in the same respective line as said B3771, and preferably the activity is increased non-targeted.

[1500] Accordingly, in one embodiment, the molecule which activity is to be increased in the process of the invention is the gene product with an activity as a “dihydroxyacid dehydratase”, preferably it is the molecule of section (a) or (b) of this paragraph.

[1501] In particular, it was observed that in plants, especially in Arabidopsis thaliana, increasing or generating the activity of a gene product non-targeted with the activity of a “dihydroxyacid dehydratase”, preferably being encoded by a gene comprising the nucleic acid sequence SEQ ID NO. 10252, preferably the coding region thereof, conferred the production of or the increase in methionine compared with the wild type control.

[1502] The nucleic acid sequence of B3817 from Escherichia coli, e.g. as shown in the respective line in column 5 of Table I, application no. 1, has been published in Blattner et al., Science 277 (5331), 1453 (1997). And the activity of the gene product thereof is the activity of b3817-protein.

[1503] Accordingly, in one embodiment, the process of the present invention for producing methionine in a non-human organism, like a microorganism or a plant or a part thereof, comprises increasing or generating the activity of a gene product with the activity of a gene product conferring the activity of “b3817-protein”, especially from Escherichia coli or its functional equivalent or its homolog, e.g. the increase of
[1504] (a) a gene product of a gene comprising the nucleic acid molecule as shown in the respective line in column 5 of Table I, application no. 1, preferably the coding region thereof, or a homolog or a fragment thereof, and being depicted in the same respective line as said B3817, or a functional equivalent or a homolog thereof as shown in column 8 of Table I, application no. 1, preferably the coding region thereof, particularly a homolog or functional equivalent as shown in column 8 of Table I B, application no. 1, and being depicted in the same respective line as said B3817, and preferably the activity is increased non-targeted, or
[1505] (b) a polypeptide comprising a polypeptide, a consensus sequence or at least a polypeptide motif as shown in the respective line in column 5 of Table II or in column 8 of Table IV, application no. 1, respectively, and being depicted in the same respective line as said B3817, or a functional equivalent or a homolog thereof as depicted in column 8 of Table II, application no. 1, preferably a homolog or functional equivalent as depicted in column 8 of Table II B, application no. 1, and being depicted in the same respective line as said B3817, and preferably the activity is increased non-targeted.

[1506] Accordingly, in one embodiment, the molecule which activity is to be increased in the process of the invention is the gene product with an activity as a “b3817-protein”, preferably it is the molecule of section (a) or (b) of this paragraph.

[1507] In particular, it was observed that in plants, especially in Arabidopsis thaliana, increasing or generating the activity of a gene product non-targeted with the activity of a “b3817-protein”, preferably being encoded by a gene comprising the nucleic acid sequence SEQ ID NO. 10708, preferably the coding region thereof, conferred the production of or the increase in methionine compared with the wild type control.

[1508] The nucleic acid sequence of B3823 from Escherichia coli, e.g. as shown in the respective line in column 5 of Table I, application no. 1, has been published in Blattner et al., Science 277 (5331), 1453 (1997). And the activity of the gene product thereof is the activity of threonine efflux protein.

[1509] Accordingly, in one embodiment, the process of the present invention for producing methionine in a non-human organism, like a microorganism or a plant or a part thereof, comprises increasing or generating the activity of a gene product with the activity of a gene product conferring the activity of “threonine efflux protein”, especially from Escherichia coli or its functional equivalent or its homolog, e.g. the increase of
[1510] (a) a gene product of a gene comprising the nucleic acid molecule as shown in the respective line in column 5 of Table I, application no. 1, preferably the coding region thereof, or a homolog or a fragment thereof, and being depicted in the same respective line as said B3823, or a functional equivalent or a homolog thereof as shown in column 8 of Table I, application no. 1, preferably the coding region thereof, particularly a homolog or functional equivalent as shown in column 8 of Table I B, application no. 1, and being depicted in the same respective line as said B3823, and preferably the activity is increased non-targeted, or
[1511] (b) a polypeptide comprising a polypeptide, a consensus sequence or at least a polypeptide motif as shown in the respective line in column 5 of Table II or in column 8 of Table IV, application no. 1, respectively, and being depicted in the same respective line as said B3823, or a functional equivalent or a homolog thereof as depicted in column 8 of Table II, application no. 1, preferably a homolog or functional equivalent as depicted in column 8 of Table II B, application no. 1, and being depicted in the same respective line as said B3823, and preferably the activity is increased non-targeted.

[1512] Accordingly, in one embodiment, the molecule which activity is to be increased in the process of the invention is the gene product with an activity as a “threonine efflux protein”, preferably it is the molecule of section (a) or (b) of this paragraph.

[1513] In particular, it was observed that in plants, especially in Arabidopsis thaliana, increasing or generating the activity of a gene product non-targeted with the activity of a “threonine efflux protein”, preferably being encoded by a gene comprising the nucleic acid sequence SEQ ID NO. 10726, preferably the coding region thereof, conferred the production of or the increase in methionine compared with the wild type control.

[1514] The nucleic acid sequence of B4029 from Escherichia coli, e.g. as shown in the respective line in column 5 of Table I, application no. 1, has been published in Blattner et al., Science 277 (5331), 1453 (1997). And the activity of the gene product thereof is the activity of b4029-protein.

[1515] Accordingly, in one embodiment, the process of the present invention for producing methionine in a non-human organism, like a microorganism or a plant or a part thereof, comprises increasing or generating the activity of a gene product with the activity of a gene product conferring the activity of “b4029-protein”, especially from Escherichia coli or its functional equivalent or its homolog, e.g. the increase of
[1516] (a) a gene product of a gene comprising the nucleic acid molecule as shown in the respective line in column 5 of Table I, application no. 1, preferably the coding region thereof, or a homolog or a fragment thereof, and being depicted in the same respective line as said B4029, or a functional equivalent or a homolog thereof as shown in column 8 of Table I, application no. 1, preferably the coding region thereof, particularly a homolog or functional equivalent as shown in column 8 of Table I B, application no. 1, and being depicted in the same respective line as said B4029, and preferably the activity is increased non-targeted, or
[1517] (b) a polypeptide comprising a polypeptide, a consensus sequence or at least a polypeptide motif as shown in the respective line in column 5 of Table II or in column 8 of Table IV, application no. 1, respectively, and being depicted in the same respective line as said B4029, or a functional equivalent or a homolog thereof as depicted in column 8 of Table II, application no. 1, preferably a homolog or functional equivalent as depicted in column 8 of Table II B, application no. 1, and being depicted in the same respective line as said B4029, and preferably the activity is increased non-targeted.

[1518] Accordingly, in one embodiment, the molecule which activity is to be increased in the process of the invention is the gene product with an activity as a “b4029-protein”, preferably it is the molecule of section (a) or (b) of this paragraph.

[1519] In particular, it was observed that in plants, especially in Arabidopsis thaliana, increasing or generating the activity of a gene product non-targeted with the activity of a “b4029-protein”, preferably being encoded by a gene comprising the nucleic acid sequence SEQ ID NO. 10740, preferably the coding region thereof, conferred the production of or the increase in methionine compared with the wild type control.

[1520] The nucleic acid sequence of GM02LC12622 from Glycine max, e.g. as shown in the respective line in column 5 of Table I, application no. 1 is unpublished. And the activity of the gene product thereof is the activity of glutaredoxin.

[1521] Accordingly, in one embodiment, the process of the present invention for producing methionine in a non-human organism, like a microorganism or a plant or a part thereof, comprises increasing or generating the activity of a gene product with the activity of a gene product conferring the activity of “glutaredoxin”, especially from Glycine max or its functional equivalent or its homolog, e.g. the increase of
[1522] (a) a gene product of a gene comprising the nucleic acid molecule as shown in the respective line in column 5 of Table I, application no. 1, preferably the coding region thereof, or a homolog or a fragment thereof, and being depicted in the same respective line as said GM02LC12622, or a functional equivalent or a homolog thereof as shown in column 8 of Table I, application no. 1, preferably the coding region thereof, particularly a homolog or functional equivalent as shown in column 8 of Table I B, application no. 1, and being depicted in the same respective line as said GM02LC12622, and preferably the activity is increased non-targeted, or
[1523] (b) a polypeptide comprising a polypeptide, a consensus sequence or at least a polypeptide motif as shown in the respective line in column 5 of Table II or in column 8 of Table IV, application no. 1, respectively, and being depicted in the same respective line as said GM02LC12622, or a functional equivalent or a homolog thereof as depicted in column 8 of Table II, application no. 1, preferably a homolog or functional equivalent as depicted in column 8 of Table II B, application no. 1, and being depicted in the same respective line as said GM02LC12622, and preferably the activity is increased non-targeted.

[1524] Accordingly, in one embodiment, the molecule which activity is to be increased in the process of the invention is the gene product with an activity as a “glutaredoxin”, preferably it is the molecule of section (a) or (b) of this paragraph.

[1525] In particular, it was observed that in plants, especially in Arabidopsis thaliana, increasing or generating the activity of a gene product non-targeted with the activity of a “glutaredoxin”, preferably being encoded by a gene comprising the nucleic acid sequence SEQ ID NO. 10811, preferably the coding region thereof, conferred the production of or the increase in methionine compared with the wild type control.

[1526] The nucleic acid sequence of Sll1108 from Synechocystis sp., e.g. as shown in the respective line in column 5 of Table I, application no. 1, has been published in Nakamura et al., Nucleic Acids Res. 28(1), 72 (2000). And the activity of the gene product thereof is the activity of 5′-nucleotidase.

[1527] Accordingly, in one embodiment, the process of the present invention for producing methionine in a non-human organism, like a microorganism or a plant or a part thereof, comprises increasing or generating the activity of a gene product with the activity of a gene product conferring the activity of “5′-nucleotidase”, especially from Synechocystis sp. or its functional equivalent or its homolog, e.g. the increase of
[1528] (a) a gene product of a gene comprising the nucleic acid molecule as shown in the respective line in column 5 of Table I, application no. 1, preferably the coding region thereof, or a homolog or a fragment thereof, and being depicted in the same respective line as said Sll1108, or a functional equivalent or a homolog thereof as shown in column 8 of Table I, application no. 1, preferably the coding region thereof, particularly a homolog or functional equivalent as shown in column 8 of Table I B, application no. 1, and being depicted in the same respective line as said Sll1108, and preferably the activity is increased mitochondrial, or
[1529] (b) a polypeptide comprising a polypeptide, a consensus sequence or at least a polypeptide motif as shown in the respective line in column 5 of Table II or in column 8 of Table IV, application no. 1, respectively, and being depicted in the same respective line as said Sll1108, or a functional equivalent or a homolog thereof as depicted in column 8 of Table II, application no. 1, preferably a homolog or functional equivalent as depicted in column 8 of Table II B, application no. 1, and being depicted in the same respective line as said Sll1108, and preferably the activity is increased mitochondrial.

[1530] Accordingly, in one embodiment, the molecule which activity is to be increased in the process of the invention is the gene product with an activity as a “5′-nucleotidase”, preferably it is the molecule of section (a) or (b) of this paragraph.

[1531] In particular, it was observed that in plants, especially in Arabidopsis thaliana, increasing or generating the activity of a gene product mitochondrial with the activity of a “5′-nucleotidase”, preferably being encoded by a gene comprising the nucleic acid sequence SEQ ID NO. 11211, preferably the coding region thereof, conferred the production of or the increase in methionine compared with the wild type control.

[1532] The nucleic acid sequence of Sll1545 from Synechocystis sp., e.g. as shown in the respective line in column 5 of Table I, application no. 1, has been published in Nakamura et al., Nucleic Acids Res. 28(1), 72 (2000). And the activity of the gene product thereof is the activity of glutathione S-transferase.

[1533] Accordingly, in one embodiment, the process of the present invention for producing methionine in a non-human organism, like a microorganism or a plant or a part thereof, comprises increasing or generating the activity of a gene product with the activity of a gene product conferring the activity of “glutathione S-transferase”, especially from Synechocystis sp. or its functional equivalent or its homolog, e.g. the increase of
[1534] (a) a gene product of a gene comprising the nucleic acid molecule as shown in the respective line in column 5 of Table I, application no. 1, preferably the coding region thereof, or a homolog or a fragment thereof, and being depicted in the same respective line as said Sll1545, or a functional equivalent or a homolog thereof as shown in column 8 of Table I, application no. 1, preferably the coding region thereof, particularly a homolog or functional equivalent as shown in column 8 of Table I B, application no. 1, and being depicted in the same respective line as said Sll1545, and preferably the activity is increased mitochondrial, or
[1535] (b) a polypeptide comprising a polypeptide, a consensus sequence or at least a polypeptide motif as shown in the respective line in column 5 of Table II or in column 8 of Table IV, application no. 1, respectively, and being depicted in the same respective line as said Sll1545, or a functional equivalent or a homolog thereof as depicted in column 8 of Table II, application no. 1, preferably a homolog or functional equivalent as depicted in column 8 of Table II B, application no. 1, and being depicted in the same respective line as said Sll1545, and preferably the activity is increased mitochondrial.

[1536] Accordingly, in one embodiment, the molecule which activity is to be increased in the process of the invention is the gene product with an activity as a “glutathione S-transferase”, preferably it is the molecule of section (a) or (b) of this paragraph.

[1537] In particular, it was observed that in plants, especially in Arabidopsis thaliana, increasing or generating the activity of a gene product mitochondrial with the activity of a “glutathione S-transferase”, preferably being encoded by a gene comprising the nucleic acid sequence SEQ ID NO. 11423, preferably the coding region thereof, conferred the production of or the increase in methionine compared with the wild type control.

[1538] The nucleic acid sequence of Sll1917 from Synechocystis sp., e.g. as shown in the respective line in column 5 of Table I, application no. 1, has been published in Nakamura et al., Nucleic Acids Res. 28(1), 72 (2000). And the activity of the gene product thereof is the activity of coproporphyrinogen III oxidase.

[1539] Accordingly, in one embodiment, the process of the present invention for producing methionine in a non-human organism, like a microorganism or a plant or a part thereof, comprises increasing or generating the activity of a gene product with the activity of a gene product conferring the activity of “coproporphyrinogen III oxidase”, especially from Synechocystis sp. or its functional equivalent or its homolog, e.g. the increase of
[1540] (a) a gene product of a gene comprising the nucleic acid molecule as shown in the respective line in column 5 of Table I, application no. 1, preferably the coding region thereof, or a homolog or a fragment thereof, and being depicted in the same respective line as said Sll1917, or a functional equivalent or a homolog thereof as shown in column 8 of Table I, application no. 1, preferably the coding region thereof, particularly a homolog or functional equivalent as shown in column 8 of Table I B, application no. 1, and being depicted in the same respective line as said Sll1917, and preferably the activity is increased mitochondrial, or
[1541] (b) a polypeptide comprising a polypeptide, a consensus sequence or at least a polypeptide motif as shown in the respective line in column 5 of Table II or in column 8 of Table IV, application no. 1, respectively, and being depicted in the same respective line as said Sll1917, or a functional equivalent or a homolog thereof as depicted in column 8 of Table II, application no. 1, preferably a homolog or functional equivalent as depicted in column 8 of Table II B, application no. 1, and being depicted in the same respective line as said Sll1917, and preferably the activity is increased mitochondrial.

[1542] Accordingly, in one embodiment, the molecule which activity is to be increased in the process of the invention is the gene product with an activity as a “coproporphyrinogen III oxidase”, preferably it is the molecule of section (a) or (b) of this paragraph.

[1543] In particular, it was observed that in plants, especially in Arabidopsis thaliana, increasing or generating the activity of a gene product mitochondrial with the activity of a “coproporphyrinogen III oxidase”, preferably being encoded by a gene comprising the nucleic acid sequence SEQ ID NO. 11471, preferably the coding region thereof, conferred the production of or the increase in methionine compared with the wild type control.

[1544] The nucleic acid sequence of Slr0338 from Synechocystis sp., e.g. as shown in the respective line in column 5 of Table I, application no. 1, has been published in Nakamura et al., Nucleic Acids Res. 28(1), 72 (2000). And the activity of the gene product thereof is the activity of oxidoreductase.

[1545] Accordingly, in one embodiment, the process of the present invention for producing methionine in a non-human organism, like a microorganism or a plant or a part thereof, comprises increasing or generating the activity of a gene product with the activity of a gene product conferring the activity of “oxidoreductase”, especially from Synechocystis sp. or its functional equivalent or its homolog, e.g. the increase of
[1546] (a) a gene product of a gene comprising the nucleic acid molecule as shown in the respective line in column 5 of Table I, application no. 1, preferably the coding region thereof, or a homolog or a fragment thereof, and being depicted in the same respective line as said Slr0338, or a functional equivalent or a homolog thereof as shown in column 8 of Table I, application no. 1, preferably the coding region thereof, particularly a homolog or functional equivalent as shown in column 8 of Table I B, application no. 1, and being depicted in the same respective line as said Slr0338, and preferably the activity is increased non-targeted, or
[1547] (b) a polypeptide comprising a polypeptide, a consensus sequence or at least a polypeptide motif as shown in the respective line in column 5 of Table II or in column 8 of Table IV, application no. 1, respectively, and being depicted in the same respective line as said Slr0338, or a functional equivalent or a homolog thereof as depicted in column 8 of Table II, application no. 1, preferably a homolog or functional equivalent as depicted in column 8 of Table II B, application no. 1, and being depicted in the same respective line as said Slr0338, and preferably the activity is increased non-targeted.

[1548] Accordingly, in one embodiment, the molecule which activity is to be increased in the process of the invention is the gene product with an activity as a “oxidoreductase”, preferably it is the molecule of section (a) or (b) of this paragraph.

[1549] In particular, it was observed that in plants, especially in Arabidopsis thaliana, increasing or generating the activity of a gene product non-targeted with the activity of a “oxidoreductase”, preferably being encoded by a gene comprising the nucleic acid sequence SEQ ID NO. 11990, preferably the coding region thereof, conferred the production of or the increase in methionine compared with the wild type control.

[1550] The nucleic acid sequence of Slr0338 from Synechocystis sp., e.g. as shown in the respective line in column 5 of Table I, application no. 1, has been published in Nakamura et al., Nucleic Acids Res. 28(1), 72 (2000). And the activity of the gene product thereof is the activity of oxidoreductase.

[1551] Accordingly, in one embodiment, the process of the present invention for producing methionine in a non-human organism, like a microorganism or a plant or a part thereof, comprises increasing or generating the activity of a gene product with the activity of a gene product conferring the activity of “oxidoreductase”, especially from Synechocystis sp. or its functional equivalent or its homolog, e.g. the increase of
[1552] (a) a gene product of a gene comprising the nucleic acid molecule as shown in the respective line in column 5 of Table I, application no. 1, preferably the coding region thereof, or a homolog or a fragment thereof, and being depicted in the same respective line as said Slr0338, or a functional equivalent or a homolog thereof as shown in column 8 of Table I, application no. 1, preferably the coding region thereof, particularly a homolog or functional equivalent as shown in column 8 of Table I B, application no. 1, and being depicted in the same respective line as said Slr0338, and preferably the activity is increased plastidic, or
[1553] (b) a polypeptide comprising a polypeptide, a consensus sequence or at least a polypeptide motif as shown in the respective line in column 5 of Table II or in column 8 of Table IV, application no. 1, respectively, and being depicted in the same respective line as said Slr0338, or a functional equivalent or a homolog thereof as depicted in column 8 of Table II, application no. 1, preferably a homolog or functional equivalent as depicted in column 8 of Table II B, application no. 1, and being depicted in the same respective line as said Slr0338, and preferably the activity is increased plastidic.

[1554] Accordingly, in one embodiment, the molecule which activity is to be increased in the process of the invention is the gene product with an activity as a “oxidoreductase”, preferably it is the molecule of section (a) or (b) of this paragraph.

[1555] In particular, it was observed that in plants, especially in Arabidopsis thaliana, increasing or generating the activity of a gene product plastidic with the activity of a “oxidoreductase”, preferably being encoded by a gene comprising the nucleic acid sequence SEQ ID NO. 11990, preferably the coding region thereof, conferred the production of or the increase in methionine compared with the wild type control.

[1556] The nucleic acid sequence of Slr1655 from Synechocystis sp., e.g. as shown in the respective line in column 5 of Table I, application no. 1, has been published in Nakamura et al., Nucleic Acids Res. 28(1), 72 (2000). And the activity of the gene product thereof is the activity of Photosystem I reaction center subunit XI.

[1557] Accordingly, in one embodiment, the process of the present invention for producing methionine in a non-human organism, like a microorganism or a plant or a part thereof, comprises increasing or generating the activity of a gene product with the activity of a gene product conferring the activity of “Photosystem I reaction center subunit XI”, especially from Synechocystis sp. or its functional equivalent or its homolog, e.g. the increase of
[1558] (a) a gene product of a gene comprising the nucleic acid molecule as shown in the respective line in column 5 of Table I, application no. 1, preferably the coding region thereof, or a homolog or a fragment thereof, and being depicted in the same respective line as said Slr1655, or a functional equivalent or a homolog thereof as shown in column 8 of Table I, application no. 1, preferably the coding region thereof, particularly a homolog or functional equivalent as shown in column 8 of Table I B, application no. 1, and being depicted in the same respective line as said Slr1655, and preferably the activity is increased mitochondrial, or
[1559] (b) a polypeptide comprising a polypeptide, a consensus sequence or at least a polypeptide motif as shown in the respective line in column 5 of Table II or in column 8 of Table IV, application no. 1, respectively, and being depicted in the same respective line as said Slr1655, or a functional equivalent or a homolog thereof as depicted in column 8 of Table II, application no. 1, preferably a homolog or functional equivalent as depicted in column 8 of Table II B, application no. 1, and being depicted in the same respective line as said Slr1655, and preferably the activity is increased mitochondrial.

[1560] Accordingly, in one embodiment, the molecule which activity is to be increased in the process of the invention is the gene product with an activity as a “Photosystem I reaction center subunit XI”, preferably it is the molecule of section (a) or (b) of this paragraph.

[1561] In particular, it was observed that in plants, especially in Arabidopsis thaliana, increasing or generating the activity of a gene product mitochondrial with the activity of a “Photosystem I reaction center subunit XI”, preferably being encoded by a gene comprising the nucleic acid sequence SEQ ID NO. 12070, preferably the coding region thereof, conferred the production of or the increase in methionine compared with the wild type control.

[1562] The nucleic acid sequence of Slr1791 from Synechocystis sp., e.g. as shown in the respective line in column 5 of Table I, application no. 1, has been published in Synechocystis Nakamura et al., Nucleic Acids Res. 28(1), 72 (2000). And the activity of the gene product thereof is the activity of phosphoadenosine phosphosulfate reductase.

[1563] Accordingly, in one embodiment, the process of the present invention for producing methionine in a non-human organism, like a microorganism or a plant or a part thereof, comprises increasing or generating the activity of a gene product with the activity of a gene product conferring the activity of “phosphoadenosine phosphosulfate reductase”, especially from Synechocystis sp. or its functional equivalent or its homolog, e.g. the increase of
[1564] (a) a gene product of a gene comprising the nucleic acid molecule as shown in the respective line in column 5 of Table I, application no. 1, preferably the coding region thereof, or a homolog or a fragment thereof, and being depicted in the same respective line as said Slr1791, or a functional equivalent or a homolog thereof as shown in column 8 of Table I, application no. 1, preferably the coding region thereof, particularly a homolog or functional equivalent as shown in column 8 of Table I B, application no. 1, and being depicted in the same respective line as said Slr1791, and preferably the activity is increased plastidic, or
[1565] (b) a polypeptide comprising a polypeptide, a consensus sequence or at least a polypeptide motif as shown in the respective line in column 5 of Table II or in column 8 of Table IV, application no. 1, respectively, and being depicted in the same respective line as said Slr1791, or a functional equivalent or a homolog thereof as depicted in column 8 of Table II, application no. 1, preferably a homolog or functional equivalent as depicted in column 8 of Table II B, application no. 1, and being depicted in the same respective line as said Slr1791, and preferably the activity is increased plastidic.

[1566] Accordingly, in one embodiment, the molecule which activity is to be increased in the process of the invention is the gene product with an activity as a “phosphoadenosine phosphosulfate reductase”, preferably it is the molecule of section (a) or (b) of this paragraph.

[1567] In particular, it was observed that in plants, especially in Arabidopsis thaliana, increasing or generating the activity of a gene product plastidic with the activity of a “phosphoadenosine phosphosulfate reductase”, preferably being encoded by a gene comprising the nucleic acid sequence SEQ ID NO. 12140, preferably the coding region thereof, conferred the production of or the increase in methionine compared with the wild type control.

[1568] The nucleic acid sequence of Slr2072 from Synechocystis sp., e.g. as shown in the respective line in column 5 of Table I, application no. 1, has been published in Nakamura et al., Nucleic Acids Res. 28(1), 72 (2000). And the activity of the gene product thereof is the activity of threonine dehydratase.

[1569] Accordingly, in one embodiment, the process of the present invention for producing methionine in a non-human organism, like a microorganism or a plant or a part thereof, comprises increasing or generating the activity of a gene product with the activity of a gene product conferring the activity of “threonine dehydratase”, especially from Synechocystis sp. or its functional equivalent or its homolog, e.g. the increase of
[1570] (a) a gene product of a gene comprising the nucleic acid molecule as shown in the respective line in column 5 of Table I, application no. 1, preferably the coding region thereof, or a homolog or a fragment thereof, and being depicted in the same respective line as said Slr2072, or a functional equivalent or a homolog thereof as shown in column 8 of Table I, application no. 1, preferably the coding region thereof, particularly a homolog or functional equivalent as shown in column 8 of Table I B, application no. 1, and being depicted in the same respective line as said Slr2072, and preferably the activity is increased plastidic, or
[1571] (b) a polypeptide comprising a polypeptide, a consensus sequence or at least a polypeptide motif as shown in the respective line in column 5 of Table II or in column 8 of Table IV, application no. 1, respectively, and being depicted in the same respective line as said Slr2072, or a functional equivalent or a homolog thereof as depicted in column 8 of Table II, application no. 1, preferably a homolog or functional equivalent as depicted in column 8 of Table II B, application no. 1, and being depicted in the same respective line as said Slr2072, and preferably the activity is increased plastidic.

[1572] Accordingly, in one embodiment, the molecule which activity is to be increased in the process of the invention is the gene product with an activity as a “threonine dehydratase”, preferably it is the molecule of section (a) or (b) of this paragraph.

[1573] In particular, it was observed that in plants, especially in Arabidopsis thaliana, increasing or generating the activity of a gene product plastidic with the activity of a “threonine dehydratase”, preferably being encoded by a gene comprising the nucleic acid sequence SEQ ID NO. 12341, preferably the coding region thereof, conferred the production of or the increase in methionine compared with the wild type control.

[1574] The nucleic acid sequence of TTC0019 from Thermus thermophilus, e.g. as shown in the respective line in column 5 of Table I, application no. 1, has been published in Henne et al., Nat. Biotechnol. 22 (5), 547 (2004). And the activity of the gene product thereof is the activity of Sec-independent protein translocase subunit.

[1575] Accordingly, in one embodiment, the process of the present invention for producing methionine in a non-human organism, like a microorganism or a plant or a part thereof, comprises increasing or generating the activity of a gene product with the activity of a gene product conferring the activity of “Sec-independent protein translocase subunit”, especially from Thermus thermophilus or its functional equivalent or its homolog, e.g. the increase of
[1576] (a) a gene product of a gene comprising the nucleic acid molecule as shown in the respective line in column 5 of Table I, application no. 1, preferably the coding region thereof, or a homolog or a fragment thereof, and being depicted in the same respective line as said TTC0019, or a functional equivalent or a homolog thereof as shown in column 8 of Table I, application no. 1, preferably the coding region thereof, particularly a homolog or functional equivalent as shown in column 8 of Table I B, application no. 1, and being depicted in the same respective line as said TTC0019, and preferably the activity is increased non-targeted, or
[1577] (b) a polypeptide comprising a polypeptide, a consensus sequence or at least a polypeptide motif as shown in the respective line in column 5 of Table II or in column 8 of Table IV, application no. 1, respectively, and being depicted in the same respective line as said TTC0019, or a functional equivalent or a homolog thereof as depicted in column 8 of Table II, application no. 1, preferably a homolog or functional equivalent as depicted in column 8 of Table II B, application no. 1, and being depicted in the same respective line as said TTC0019, and preferably the activity is increased non-targeted.

[1578] Accordingly, in one embodiment, the molecule which activity is to be increased in the process of the invention is the gene product with an activity as a “Sec-independent protein translocase subunit”, preferably it is the molecule of section (a) or (b) of this paragraph.

[1579] In particular, it was observed that in plants, especially in Arabidopsis thaliana, increasing or generating the activity of a gene product non-targeted with the activity of a “Sec-independent protein translocase subunit”, preferably being encoded by a gene comprising the nucleic acid sequence SEQ ID NO. 12698, preferably the coding region thereof, conferred the production of or the increase in methionine compared with the wild type control.

[1580] The nucleic acid sequence of TTC1550 from Thermus thermophilus, e.g. as shown in the respective line in column 5 of Table I, application no. 1, has been published in Henne et al., Nat. Biotechnol. 22 (5), 547 (2004). And the activity of the gene product thereof is the activity of homocitrate synthase.

[1581] Accordingly, in one embodiment, the process of the present invention for producing methionine in a non-human organism, like a microorganism or a plant or a part thereof, comprises increasing or generating the activity of a gene product with the activity of a gene product conferring the activity of “homocitrate synthase”, especially from Thermus thermophilus or its functional equivalent or its homolog, e.g. the increase of
[1582] (a) a gene product of a gene comprising the nucleic acid molecule as shown in the respective line in column 5 of Table I, application no. 1, preferably the coding region thereof, or a homolog or a fragment thereof, and being depicted in the same respective line as said TTC1550, or a functional equivalent or a homolog thereof as shown in column 8 of Table I, application no. 1, preferably the coding region thereof, particularly a homolog or functional equivalent as shown in column 8 of Table I B, application no. 1, and being depicted in the same respective line as said TTC1550, and preferably the activity is increased non-targeted, or
[1583] (b) a polypeptide comprising a polypeptide, a consensus sequence or at least a polypeptide motif as shown in the respective line in column 5 of Table II or in column 8 of Table IV, application no. 1, respectively, and being depicted in the same respective line as said TTC1550, or a functional equivalent or a homolog thereof as depicted in column 8 of Table II, application no. 1, preferably a homolog or functional equivalent as depicted in column 8 of Table II B, application no. 1, and being depicted in the same respective line as said TTC1550, and preferably the activity is increased non-targeted.

[1584] Accordingly, in one embodiment, the molecule which activity is to be increased in the process of the invention is the gene product with an activity as a “homocitrate synthase”, preferably it is the molecule of section (a) or (b) of this paragraph.

[1585] In particular, it was observed that in plants, especially in Arabidopsis thaliana, increasing or generating the activity of a gene product non-targeted with the activity of a “homocitrate synthase”, preferably being encoded by a gene comprising the nucleic acid sequence SEQ ID NO. 12974, preferably the coding region thereof, conferred the production of or the increase in methionine compared with the wild type control.

[1586] The nucleic acid sequence of Yal012w from Saccharomyces cerevisiae, e.g. as shown in the respective line in column 5 of Table I, application no. 1, has been published in Goffeau et al., Science 274 (5287), 546 (1996). And the activity of the gene product thereof is the activity of cystathionine-lyase.

[1587] Accordingly, in one embodiment, the process of the present invention for producing methionine in a non-human organism, like a microorganism or a plant or a part thereof, comprises increasing or generating the activity of a gene product with the activity of a gene product conferring the activity of “cystathionine-lyase”, especially from Saccharomyces cerevisiae or its functional equivalent or its homolog, e.g. the increase of
[1588] (a) a gene product of a gene comprising the nucleic acid molecule as shown in the respective line in column 5 of Table I, application no. 1, preferably the coding region thereof, or a homolog or a fragment thereof, and being depicted in the same respective line as said Ya1012w, or a functional equivalent or a homolog thereof as shown in column 8 of Table I, application no. 1, preferably the coding region thereof, particularly a homolog or functional equivalent as shown in column 8 of Table I B, application no. 1, and being depicted in the same respective line as said Yal012w, and preferably the activity is increased non-targeted, or
[1589] (b) a polypeptide comprising a polypeptide, a consensus sequence or at least a polypeptide motif as shown in the respective line in column 5 of Table II or in column 8 of Table IV, application no. 1, respectively, and being depicted in the same respective line as said Yal012w, or a functional equivalent or a homolog thereof as depicted in column 8 of Table II, application no. 1, preferably a homolog or functional equivalent as depicted in column 8 of Table II B, application no. 1, and being depicted in the same respective line as said Yal012w, and preferably the activity is increased non-targeted.

[1590] Accordingly, in one embodiment, the molecule which activity is to be increased in the process of the invention is the gene product with an activity as a “cystathionine-lyase”, preferably it is the molecule of section (a) or (b) of this paragraph.

[1591] In particular, it was observed that in plants, especially in Arabidopsis thaliana, increasing or generating the activity of a gene product non-targeted with the activity of a “cystathionine-lyase”, preferably being encoded by a gene comprising the nucleic acid sequence SEQ ID NO. 13376, preferably the coding region thereof, conferred the production of or the increase in methionine compared with the wild type control.

[1592] The nucleic acid sequence of Ydl155w from Saccharomyces cerevisiae, e.g. as shown in the respective line in column 5 of Table I, application no. 1, has been published in Goffeau et al., Science 274 (5287), 546 (1996). And the activity of the gene product thereof is the activity of cyclin.

[1593] Accordingly, in one embodiment, the process of the present invention for producing methionine in a non-human organism, like a microorganism or a plant or a part thereof, comprises increasing or generating the activity of a gene product with the activity of a gene product conferring the activity of “cyclin”, especially from Saccharomyces cerevisiae or its functional equivalent or its homolog, e.g. the increase of
[1594] (a) a gene product of a gene comprising the nucleic acid molecule as shown in the respective line in column 5 of Table I, application no. 1, preferably the coding region thereof, or a homolog or a fragment thereof, and being depicted in the same respective line as said Ydl155w, or a functional equivalent or a homolog thereof as shown in column 8 of Table I, application no. 1, preferably the coding region thereof, particularly a homolog or functional equivalent as shown in column 8 of Table I B, application no. 1, and being depicted in the same respective line as said Ydl155w, and preferably the activity is increased non-targeted, or
[1595] (b) a polypeptide comprising a polypeptide, a consensus sequence or at least a polypeptide motif as shown in the respective line in column 5 of Table II or in column 8 of Table IV, application no. 1, respectively, and being depicted in the same respective line as said Ydl155w, or a functional equivalent or a homolog thereof as depicted in column 8 of Table II, application no. 1, preferably a homolog or functional equivalent as depicted in column 8 of Table II B, application no. 1, and being depicted in the same respective line as said Ydl155w, and preferably the activity is increased non-targeted.

[1596] Accordingly, in one embodiment, the molecule which activity is to be increased in the process of the invention is the gene product with an activity as a “cyclin”, preferably it is the molecule of section (a) or (b) of this paragraph.

[1597] In particular, it was observed that in plants, especially in Arabidopsis thaliana, increasing or generating the activity of a gene product non-targeted with the activity of a “cyclin”, preferably being encoded by a gene comprising the nucleic acid sequence SEQ ID NO. 14171, preferably the coding region thereof, conferred the production of or the increase in methionine compared with the wild type control.

[1598] The nucleic acid sequence of Ydl159w from Saccharomyces cerevisiae, e.g. as shown in the respective line in column 5 of Table I, application no. 1, has been published in Goffeau et al., Science 274 (5287), 546 (1996). And the activity of the gene product thereof is the activity of protein kinase.

[1599] Accordingly, in one embodiment, the process of the present invention for producing methionine in a non-human organism, like a microorganism or a plant or a part thereof, comprises increasing or generating the activity of a gene product with the activity of a gene product conferring the activity of “protein kinase”, especially from Saccharomyces cerevisiae or its functional equivalent or its homolog, e.g. the increase of
[1600] (a) a gene product of a gene comprising the nucleic acid molecule as shown in the respective line in column 5 of Table I, application no. 1, preferably the coding region thereof, or a homolog or a fragment thereof, and being depicted in the same respective line as said Ydl159w, or a functional equivalent or a homolog thereof as shown in column 8 of Table I, application no. 1, preferably the coding region thereof, particularly a homolog or functional equivalent as shown in column 8 of Table I B, application no. 1, and being depicted in the same respective line as said Ydl159w, and preferably the activity is increased plastidic, or
[1601] (b) a polypeptide comprising a polypeptide, a consensus sequence or at least a polypeptide motif as shown in the respective line in column 5 of Table II or in column 8 of Table IV, application no. 1, respectively, and being depicted in the same respective line as said Ydl159w, or a functional equivalent or a homolog thereof as depicted in column 8 of Table II, application no. 1, preferably a homolog or functional equivalent as depicted in column 8 of Table II B, application no. 1, and being depicted in the same respective line as said Ydl159w, and preferably the activity is increased plastidic.

[1602] Accordingly, in one embodiment, the molecule which activity is to be increased in the process of the invention is the gene product with an activity as a “protein kinase”, preferably it is the molecule of section (a) or (b) of this paragraph.

[1603] In particular, it was observed that in plants, especially in Arabidopsis thaliana, increasing or generating the activity of a gene product plastidic with the activity of a “protein kinase”, preferably being encoded by a gene comprising the nucleic acid sequence SEQ ID NO. 14275, preferably the coding region thereof, conferred the production of or the increase in methionine compared with the wild type control.

[1604] The nucleic acid sequence of Ydl168w from Saccharomyces cerevisiae, e.g. as shown in the respective line in column 5 of Table I, application no. 1, has been published in Goffeau et al., Science 274 (5287), 546 (1996). And the activity of the gene product thereof is the activity of protein kinase.

[1605] Accordingly, in one embodiment, the process of the present invention for producing methionine in a non-human organism, like a microorganism or a plant or a part thereof, comprises increasing or generating the activity of a gene product with the activity of a gene product conferring the activity of “protein kinase”, especially from Saccharomyces cerevisiae or its functional equivalent or its homolog, e.g. the increase of
[1606] (a) a gene product of a gene comprising the nucleic acid molecule as shown in the respective line in column 5 of Table I, application no. 1, preferably the coding region thereof, or a homolog or a fragment thereof, and being depicted in the same respective line as said Ydl168w, or a functional equivalent or a homolog thereof as shown in column 8 of Table I, application no. 1, preferably the coding region thereof, particularly a homolog or functional equivalent as shown in column 8 of Table I B, application no. 1, and being depicted in the same respective line as said Ydl168w, and preferably the activity is increased plastidic, or
[1607] (b) a polypeptide comprising a polypeptide, a consensus sequence or at least a polypeptide motif as shown in the respective line in column 5 of Table II or in column 8 of Table IV, application no. 1, respectively, and being depicted in the same respective line as said Ydl168w, or a functional equivalent or a homolog thereof as depicted in column 8 of Table II, application no. 1, preferably a homolog or functional equivalent as depicted in column 8 of Table II B, application no. 1, and being depicted in the same respective line as said Ydl168w, and preferably the activity is increased plastidic.

[1608] Accordingly, in one embodiment, the molecule which activity is to be increased in the process of the invention is the gene product with an activity as a “protein kinase”, preferably it is the molecule of section (a) or (b) of this paragraph.

[1609] In particular, it was observed that in plants, especially in Arabidopsis thaliana, increasing or generating the activity of a gene product plastidic with the activity of a “protein kinase”, preferably being encoded by a gene comprising the nucleic acid sequence SEQ ID NO. 14302, preferably the coding region thereof, conferred the production of or the increase in methionine compared with the wild type control.

[1610] The nucleic acid sequence of Ydr131c from Saccharomyces cerevisiae, e.g. as shown in the respective line in column 5 of Table I, application no. 1, has been published in Goffeau et al., Science 274 (5287), 546 (1996). And the activity of the gene product thereof is the activity of F-box protein.

[1611] Accordingly, in one embodiment, the process of the present invention for producing methionine in a non-human organism, like a microorganism or a plant or a part thereof, comprises increasing or generating the activity of a gene product with the activity of a gene product conferring the activity of “F-box protein”, especially from Saccharomyces cerevisiae or its functional equivalent or its homolog, e.g. the increase of
[1612] (a) a gene product of a gene comprising the nucleic acid molecule as shown in the respective line in column 5 of Table I, application no. 1, preferably the coding region thereof, or a homolog or a fragment thereof, and being depicted in the same respective line as said Ydr131c, or a functional equivalent or a homolog thereof as shown in column 8 of Table I, application no. 1, preferably the coding region thereof, particularly a homolog or functional equivalent as shown in column 8 of Table I B, application no. 1, and being depicted in the same respective line as said Ydr131c, and preferably the activity is increased plastidic, or
[1613] (b) a polypeptide comprising a polypeptide, a consensus sequence or at least a polypeptide motif as shown in the respective line in column 5 of Table II or in column 8 of Table IV, application no. 1, respectively, and being depicted in the same respective line as said Ydr131c, or a functional equivalent or a homolog thereof as depicted in column 8 of Table II, application no. 1, preferably a homolog or functional equivalent as depicted in column 8 of Table II B, application no. 1, and being depicted in the same respective line as said Ydr131c, and preferably the activity is increased plastidic.

[1614] Accordingly, in one embodiment, the molecule which activity is to be increased in the process of the invention is the gene product with an activity as a “F-box protein”, preferably it is the molecule of section (a) or (b) of this paragraph.

[1615] In particular, it was observed that in plants, especially in Arabidopsis thaliana, increasing or generating the activity of a gene product plastidic with the activity of a “F-box protein”, preferably being encoded by a gene comprising the nucleic acid sequence SEQ ID NO. 14706, preferably the coding region thereof, conferred the production of or the increase in methionine compared with the wild type control.

[1616] The nucleic acid sequence of Yhl013c from Saccharomyces cerevisiae, e.g. as shown in the respective line in column 5 of Table I, application no. 1, has been published in Goffeau et al.,

[1617] Science 274 (5287), 546 (1996). And the activity of the gene product thereof is the activity of yhl013c-protein.

[1618] Accordingly, in one embodiment, the process of the present invention for producing methionine in a non-human organism, like a microorganism or a plant or a part thereof, comprises increasing or generating the activity of a gene product with the activity of a gene product conferring the activity of “yh1013c-protein”, especially from Saccharomyces cerevisiae or its functional equivalent or its homolog, e.g. the increase of
[1619] (a) a gene product of a gene comprising the nucleic acid molecule as shown in the respective line in column 5 of Table I, application no. 1, preferably the coding region thereof, or a homolog or a fragment thereof, and being depicted in the same respective line as said Yhl013c, or a functional equivalent or a homolog thereof as shown in column 8 of Table I, application no. 1, preferably the coding region thereof, particularly a homolog or functional equivalent as shown in column 8 of Table I B, application no. 1, and being depicted in the same respective line as said Yhl013c, and preferably the activity is increased plastidic, or
[1620] (b) a polypeptide comprising a polypeptide, a consensus sequence or at least a polypeptide motif as shown in the respective line in column 5 of Table II or in column 8 of Table IV, application no. 1, respectively, and being depicted in the same respective line as said Yhl013c, or a functional equivalent or a homolog thereof as depicted in column 8 of Table II, application no. 1, preferably a homolog or functional equivalent as depicted in column 8 of Table II B, application no. 1, and being depicted in the same respective line as said Yhl013c, and preferably the activity is increased plastidic.

[1621] Accordingly, in one embodiment, the molecule which activity is to be increased in the process of the invention is the gene product with an activity as a “yhl013c-protein”, preferably it is the molecule of section (a) or (b) of this paragraph.

[1622] In particular, it was observed that in plants, especially in Arabidopsis thaliana, increasing or generating the activity of a gene product plastidic with the activity of a “yhl013c-protein”, preferably being encoded by a gene comprising the nucleic acid sequence SEQ ID NO. 14715, preferably the coding region thereof, conferred the production of or the increase in methionine compared with the wild type control.

[1623] The nucleic acid sequence of YiI053w from Saccharomyces cerevisiae, e.g. as shown in the respective line in column 5 of Table I, application no. 1, has been published in Goffeau et al., Science 274 (5287), 546 (1996). And the activity of the gene product thereof is the activity of (DL)-glycerol-3-phosphatase.

[1624] Accordingly, in one embodiment, the process of the present invention for producing methionine in a non-human organism, like a microorganism or a plant or a part thereof, comprises increasing or generating the activity of a gene product with the activity of a gene product conferring the activity of “(DL)-glycerol-3-phosphatase”, especially from Saccharomyces cerevisiae or its functional equivalent or its homolog, e.g. the increase of
[1625] (a) a gene product of a gene comprising the nucleic acid molecule as shown in the respective line in column 5 of Table I, application no. 1, preferably the coding region thereof, or a homolog or a fragment thereof, and being depicted in the same respective line as said YiI053w, or a functional equivalent or a homolog thereof as shown in column 8 of Table I, application no. 1, preferably the coding region thereof, particularly a homolog or functional equivalent as shown in column 8 of Table I B, application no. 1, and being depicted in the same respective line as said Yi1053w, and preferably the activity is increased plastidic, or
[1626] (b) a polypeptide comprising a polypeptide, a consensus sequence or at least a polypeptide motif as shown in the respective line in column 5 of Table II or in column 8 of Table IV, application no. 1, respectively, and being depicted in the same respective line as said Yi1053w, or a functional equivalent or a homolog thereof as depicted in column 8 of Table II, application no. 1, preferably a homolog or functional equivalent as depicted in column 8 of Table II B, application no. 1, and being depicted in the same respective line as said YiI053w, and preferably the activity is increased plastidic.

[1627] Accordingly, in one embodiment, the molecule which activity is to be increased in the process of the invention is the gene product with an activity as a “(DL)-glycerol-3-phosphatase”, preferably it is the molecule of section (a) or (b) of this paragraph.

[1628] In particular, it was observed that in plants, especially in Arabidopsis thaliana, increasing or generating the activity of a gene product plastidic with the activity of a “(DL)-glycerol-3-phosphatase”, preferably being encoded by a gene comprising the nucleic acid sequence SEQ ID NO. 14769, preferably the coding region thereof, conferred the production of or the increase in methionine compared with the wild type control.

[1629] The nucleic acid sequence of YjI137c from Saccharomyces cerevisiae, e.g. as shown in the respective line in column 5 of Table I, application no. 1, has been published in Goffeau et al., Science 274 (5287), 546 (1996). And the activity of the gene product thereof is the activity of glycogenin.

[1630] Accordingly, in one embodiment, the process of the present invention for producing methionine in a non-human organism, like a microorganism or a plant or a part thereof, comprises increasing or generating the activity of a gene product with the activity of a gene product conferring the activity of “glycogenin”, especially from Saccharomyces cerevisiae or its functional equivalent or its homolog, e.g. the increase of
[1631] (a) a gene product of a gene comprising the nucleic acid molecule as shown in the respective line in column 5 of Table I, application no. 1, preferably the coding region thereof, or a homolog or a fragment thereof, and being depicted in the same respective line as said YjI137c, or a functional equivalent or a homolog thereof as shown in column 8 of Table I, application no. 1, preferably the coding region thereof, particularly a homolog or functional equivalent as shown in column 8 of Table I B, application no. 1, and being depicted in the same respective line as said Yj1137c, and preferably the activity is increased plastidic, or (b) a polypeptide comprising a polypeptide, a consensus sequence or at least a polypeptide motif as shown in the respective line in column 5 of Table II or in column 8 of Table IV, application no. 1, respectively, and being depicted in the same respective line as said YjI137c, or a functional equivalent or a homolog thereof as depicted in column 8 of Table II, application no. 1, preferably a homolog or functional equivalent as depicted in column 8 of Table II B, application no. 1, and being depicted in the same respective line as said Yj1137c, and preferably the activity is increased plastidic.

[1632] Accordingly, in one embodiment, the molecule which activity is to be increased in the process of the invention is the gene product with an activity as a “glycogenin”, preferably it is the molecule of section (a) or (b) of this paragraph.

[1633] In particular, it was observed that in plants, especially in Arabidopsis thaliana, increasing or generating the activity of a gene product plastidic with the activity of a “glycogenin”, preferably being encoded by a gene comprising the nucleic acid sequence SEQ ID NO. 14821, preferably the coding region thereof, conferred the production of or the increase in methionine compared with the wild type control.

[1634] The nucleic acid sequence of Yjr130c from Saccharomyces cerevisiae, e.g. as shown in the respective line in column 5 of Table I, application no. 1, has been published in Goffeau et al., Science 274 (5287), 546 (1996). And the activity of the gene product thereof is the activity of cystathionine gamma-synthase.

[1635] Accordingly, in one embodiment, the process of the present invention for producing methionine in a non-human organism, like a microorganism or a plant or a part thereof, comprises increasing or generating the activity of a gene product with the activity of a gene product conferring the activity of “cystathionine gamma-synthase”, especially from Saccharomyces cerevisiae or its functional equivalent or its homolog, e.g. the increase of
[1636] (a) a gene product of a gene comprising the nucleic acid molecule as shown in the respective line in column 5 of Table I, application no. 1, preferably the coding region thereof, or a homolog or a fragment thereof, and being depicted in the same respective line as said Yjr130c, or a functional equivalent or a homolog thereof as shown in column 8 of Table I, application no. 1, preferably the coding region thereof, particularly a homolog or functional equivalent as shown in column 8 of Table I B, application no. 1, and being depicted in the same respective line as said Yjr130c, and preferably the activity is increased non-targeted, or
[1637] (b) a polypeptide comprising a polypeptide, a consensus sequence or at least a polypeptide motif as shown in the respective line in column 5 of Table II or in column 8 of Table IV, application no. 1, respectively, and being depicted in the same respective line as said Yjr130c, or a functional equivalent or a homolog thereof as depicted in column 8 of Table II, application no. 1, preferably a homolog or functional equivalent as depicted in column 8 of Table II B, application no. 1, and being depicted in the same respective line as said Yjr130c, and preferably the activity is increased non-targeted.

[1638] Accordingly, in one embodiment, the molecule which activity is to be increased in the process of the invention is the gene product with an activity as a “cystathionine gamma-synthase”, preferably it is the molecule of section (a) or (b) of this paragraph.

[1639] In particular, it was observed that in plants, especially in Arabidopsis thaliana, increasing or generating the activity of a gene product non-targeted with the activity of a “cystathionine gamma-synthase”, preferably being encoded by a gene comprising the nucleic acid sequence SEQ ID NO. 14843, preferably the coding region thereof, conferred the production of or the increase in methionine compared with the wild type control.

[1640] The nucleic acid sequence of Yjr139c from Saccharomyces cerevisiae, e.g. as shown in the respective line in column 5 of Table I, application no. 1, has been published in Goffeau et al., Science 274 (5287), 546 (1996). And the activity of the gene product thereof is the activity of homoserine dehydrogenase.

[1641] Accordingly, in one embodiment, the process of the present invention for producing methionine in a non-human organism, like a microorganism or a plant or a part thereof, comprises increasing or generating the activity of a gene product with the activity of a gene product conferring the activity of “homoserine dehydrogenase”, especially from Saccharomyces cerevisiae or its functional equivalent or its homolog, e.g. the increase of
[1642] (a) a gene product of a gene comprising the nucleic acid molecule as shown in the respective line in column 5 of Table I, application no. 1, preferably the coding region thereof, or a homolog or a fragment thereof, and being depicted in the same respective line as said Yjr139c, or a functional equivalent or a homolog thereof as shown in column 8 of Table I, application no. 1, preferably the coding region thereof, particularly a homolog or functional equivalent as shown in column 8 of Table I B, application no. 1, and being depicted in the same respective line as said Yjr139c, and preferably the activity is increased plastidic, or
[1643] (b) a polypeptide comprising a polypeptide, a consensus sequence or at least a polypeptide motif as shown in the respective line in column 5 of Table II or in column 8 of Table IV, application no. 1, respectively, and being depicted in the same respective line as said Yjr139c, or a functional equivalent or a homolog thereof as depicted in column 8 of Table II, application no. 1, preferably a homolog or functional equivalent as depicted in column 8 of Table II B, application no. 1, and being depicted in the same respective line as said Yjr139c, and preferably the activity is increased plastidic.

[1644] Accordingly, in one embodiment, the molecule which activity is to be increased in the process of the invention is the gene product with an activity as a “homoserine dehydrogenase”, preferably it is the molecule of section (a) or (b) of this paragraph.

[1645] In particular, it was observed that in plants, especially in Arabidopsis thaliana, increasing or generating the activity of a gene product plastidic with the activity of a “homoserine dehydrogenase”, preferably being encoded by a gene comprising the nucleic acid sequence SEQ ID NO. 14885, preferably the coding region thereof, conferred the production of or the increase in methionine compared with the wild type control.

[1646] The nucleic acid sequence of Ym1084w from Saccharomyces cerevisiae, e.g. as shown in the respective line in column 5 of Table I, application no. 1, has been published in Goffeau et al., Science 274 (5287), 546 (1996). And the activity of the gene product thereof is the activity of yml084w-protein.

[1647] Accordingly, in one embodiment, the process of the present invention for producing methionine in a non-human organism, like a microorganism or a plant or a part thereof, comprises increasing or generating the activity of a gene product with the activity of a gene product conferring the activity of “yml084w-protein”, especially from Saccharomyces cerevisiae or its functional equivalent or its homolog, e.g. the increase of
[1648] (a) a gene product of a gene comprising the nucleic acid molecule as shown in the respective line in column 5 of Table I, application no. 1, preferably the coding region thereof, or a homolog or a fragment thereof, and being depicted in the same respective line as said Yml084w, or a functional equivalent or a homolog thereof as shown in column 8 of Table 1, application no. 1, preferably the coding region thereof, particularly a homolog or functional equivalent as shown in column 8 of Table I B, application no. 1, and being depicted in the same respective line as said Yml084w, and preferably the activity is increased plastidic, or
[1649] (b) a polypeptide comprising a polypeptide, a consensus sequence or at least a polypeptide motif as shown in the respective line in column 5 of Table II or in column 8 of Table IV, application no. 1, respectively, and being depicted in the same respective line as said Yml084w, or a functional equivalent or a homolog thereof as depicted in column 8 of Table II, application no. 1, preferably a homolog or functional equivalent as depicted in column 8 of Table II B, application no. 1, and being depicted in the same respective line as said Yml084w, and preferably the activity is increased plastidic.

[1650] Accordingly, in one embodiment, the molecule which activity is to be increased in the process of the invention is the gene product with an activity as a “yml084w-protein”, preferably it is the molecule of section (a) or (b) of this paragraph.

[1651] In particular, it was observed that in plants, especially in Arabidopsis thaliana, increasing or generating the activity of a gene product plastidic with the activity of a “ym1084w-protein”, preferably being encoded by a gene comprising the nucleic acid sequence SEQ ID NO. 15175, preferably the coding region thereof, conferred the production of or the increase in methionine compared with the wild type control.

[1652] The nucleic acid sequence of Yol160w from Saccharomyces cerevisiae, e.g. as shown in the respective line in column 5 of Table I, application no. 1, has been published in Goffeau et al., Science 274 (5287), 546 (1996). And the activity of the gene product thereof is the activity of yol160w-protein.

[1653] Accordingly, in one embodiment, the process of the present invention for producing methionine in a non-human organism, like a microorganism or a plant or a part thereof, comprises increasing or generating the activity of a gene product with the activity of a gene product conferring the activity of “yol160w-protein”, especially from Saccharomyces cerevisiae or its functional equivalent or its homolog, e.g. the increase of
[1654] (a) a gene product of a gene comprising the nucleic acid molecule as shown in the respective line in column 5 of Table I, application no. 1, preferably the coding region thereof, or a homolog or a fragment thereof, and being depicted in the same respective line as said Yol160w, or a functional equivalent or a homolog thereof as shown in column 8 of Table I, application no. 1, preferably the coding region thereof, particularly a homolog or functional equivalent as shown in column 8 of Table I B, application no. 1, and being depicted in the same respective line as said Yol160w, and preferably the activity is increased plastidic, or
[1655] (b) a polypeptide comprising a polypeptide, a consensus sequence or at least a polypeptide motif as shown in the respective line in column 5 of Table II or in column 8 of Table IV, application no. 1, respectively, and being depicted in the same respective line as said Yol160w, or a functional equivalent or a homolog thereof as depicted in column 8 of Table II, application no. 1, preferably a homolog or functional equivalent as depicted in column 8 of Table II B, application no. 1, and being depicted in the same respective line as said Yol160w, and preferably the activity is increased plastidic.

[1656] Accordingly, in one embodiment, the molecule which activity is to be increased in the process of the invention is the gene product with an activity as a “yol160w-protein”, preferably it is the molecule of section (a) or (b) of this paragraph.

[1657] In particular, it was observed that in plants, especially in Arabidopsis thaliana, increasing or generating the activity of a gene product plastidic with the activity of a “yol160w-protein”, preferably being encoded by a gene comprising the nucleic acid sequence SEQ ID NO. 15179, preferably the coding region thereof, conferred the production of or the increase in methionine compared with the wild type control.

[1658] The nucleic acid sequence of Yor392w from Saccharomyces cerevisiae, e.g. as shown in the respective line in column 5 of Table I, application no. 1, has been published in Goffeau et al., Science 274 (5287), 546 (1996). And the activity of the gene product thereof is the activity of yor392w-protein.

[1659] Accordingly, in one embodiment, the process of the present invention for producing methionine in a non-human organism, like a microorganism or a plant or a part thereof, comprises increasing or generating the activity of a gene product with the activity of a gene product conferring the activity of “yor392w-protein”, especially from Saccharomyces cerevisiae or its functional equivalent or its homolog, e.g. the increase of
[1660] (a) a gene product of a gene comprising the nucleic acid molecule as shown in the respective line in column 5 of Table I, application no. 1, preferably the coding region thereof, or a homolog or a fragment thereof, and being depicted in the same respective line as said Yor392w, or a functional equivalent or a homolog thereof as shown in column 8 of Table I, application no. 1, preferably the coding region thereof, particularly a homolog or functional equivalent as shown in column 8 of Table I B, application no. 1, and being depicted in the same respective line as said Yor392w, and preferably the activity is increased plastidic, or
[1661] (b) a polypeptide comprising a polypeptide, a consensus sequence or at least a polypeptide motif as shown in the respective line in column 5 of Table II or in column 8 of Table IV, application no. 1, respectively, and being depicted in the same respective line as said Yor392w, or a functional equivalent or a homolog thereof as depicted in column 8 of Table II, application no. 1, preferably a homolog or functional equivalent as depicted in column 8 of Table II B, application no. 1, and being depicted in the same respective line as said Yor392w, and preferably the activity is increased plastidic.

[1662] Accordingly, in one embodiment, the molecule which activity is to be increased in the process of the invention is the gene product with an activity as a “yor392w-protein”, preferably it is the molecule of section (a) or (b) of this paragraph.

[1663] In particular, it was observed that in plants, especially in Arabidopsis thaliana, increasing or generating the activity of a gene product plastidic with the activity of a “yor392w-protein”, preferably being encoded by a gene comprising the nucleic acid sequence SEQ ID NO. 15183, preferably the coding region thereof, conferred the production of or the increase in methionine compared with the wild type control.

[1664] It was further observed that increasing or generating the activity of a FCRP gene shown in Table d, e.g. a nucleic acid molecule derived from the coding region of the nucleic acid molecule shown in Table d in A. thaliana conferred the production of or the increase in fine chemical, compared with the wild type control. Thus, in one embodiment, a nucleic acid molecule, preferably the coding region thereof, indicated in Table d or its homolog as indicated in the respective line in Table I or the expression product is used in the method of the present invention to generate or to increase the production of fine chemical in a non-human organism, like a microorganism or a plant, compared with the wild type control.

[1665] In this context, the fine chemical amount in a cell, in a non-human organism, like a plant or a microorganim or a part thereof, is increased by 1%, 3%, 5%, 10%, 20%, 30%, 40%, 50%, 60%, 70%, 80%, 90%, 100%, 120, 150% or 200% or more.

[1666] The fine chemical can be contained in the organism either in its free form and/or bound to proteins or polypeptids or mixtures thereof. Accordingly, in one embodiment, the amount of the free form in a cell, in a non-human organism, like a plant or a microorganim or part thereof, is increased byl%, 3%, 5%, 10%, 20%, 30%, 40%, 50%, 60%, 70%, 80%, 90%, 100%, 120, 150% or 200% or more. Accordingly, in another embodiment, the amount of the bound fine chemical in a cell, in a non-human organism, like a plant or a microorganim or part thereof, is increased byl%, 3%, 5%, 10%, 20%, 30%, 40%, 50%, 60%, 70%, 80%, 90%, 100%, 120, 150% or 200% or more.

[1667] A protein having an activity conferring an increase in the amount or level of the fine chemical methionine, upon targeting to the plastids or mitochondria or upon non-targeting, preferably has the structure of the respective polypeptide described herein, in particular of the polypeptides comprising the consensus sequence or at least one polypeptide motifs as shown in the respective line in Table IV, application no. 1, column 8 or of the polypeptide comprising an amino acid sequence as disclosed in the respective line in Table II, application no. 1, columns 5 or 8, or homolos or fragments thereof as described herein, or is encoded by the nucleic acid molecule characterized herein or the nucleic acid molecule according to the invention, for example by the nucleic acid molecule as shown in the respective line in Table I, application no. 1, columns 5 or 8, preferably the coding region thereof, or homologs or fragments thereof and has the herein mentioned activity.

[1668] Owing to the biological activity of the proteins which are used in the process according to the invention and which are encoded by nucleic acid molecules according to the invention, it is possible to produce compositions comprising the fine chemical, i.e. an increased amount of the fine chemical free or bound, e.g amino acid compositions. Depending on the choice of the non-human organism used for the process according to the present invention, for example a microorganism or a plant, compositions or mixtures comprising the fine chemical can be produced.

[1669] The term “expression” refers to the transcription and/or translation of a codogenic gene segment or gene. As a rule, the resulting product is an mRNA or a protein.

[1670] However, expression products can also include functional RNAs such as, for example, antisense, nucleic acids, tRNAs, snRNAs, rRNAs, RNAi, siRNA, ribozymes etc. Expression may be systemic, local or temporal, for example limited to certain cell types, tissues organs or organelles or time periods.

[1671] In one embodiment, the process of the present invention comprises one or more of the following steps
[1672] (a) stabilizing a protein conferring the generation or increased expression of a protein encoded by the nucleic acid molecule of the invention or of the polypeptide of the invention, e.g. of a polypeptide having the activity selected from the group consisting of (DL)-glycerol-3-phosphatase, 2,3-dihydroxyphenylpropionate 1,2-dioxygenase, 2-oxoglutarate dehydrogenase E1 subunit, 49747384_SOYBEAN-protein, 5′-nucleotidase, acetolactate synthase small subunit, acetyl CoA carboxylase, adenosine kinase, arginine exporter protein, At1g09680-protein, At2g45420-protein, At4g32480-protein, ATP-binding component of a transport system, auxin response factor, b0012-protein, b1003-protein, b1522protein, b2032-protein, b2345-protein, b2513-protein, b2673-protein, b3246-protein, b3346-protein, b3817-protein, b4029-protein, beta-hydroxylase, bifunctional aspartokinase/homoserine dehydrogenase, calcium-dependent protein kinase, coproporphyrinogen III oxidase, cyclin, cystathionine gamma-synthase, cystathionine-lyase, dihydroxyacid dehydratase, DNA-binding protein, F-box protein, glutaredoxin, glutathione S-transferase, glycogenin, homocitrate synthase, homoserine dehydrogenase, hydrolase, L-serine dehydratase, major facilitator superfamily transporter protein, malic enzyme, membrane transport protein, monothiol glutaredoxin, monthiol glutaredoxin, oxidoreductase, peptidylprolyl cis-trans isomerase, phosphoadenosine phosphosulfate reductase , Photosystem I reaction center subunit XI, protein kinase, protein phosphatase, pyruvate kinase, Sec-independent protein translocase subunit, serine protease, serine/threonine-protein phosphatase, threonine aldolase, threonine dehydratase, threonine efflux protein, transcription factor, transport protein, uridine/cytidine kinase, valine-pyruvate transaminase, yhl013c-protein, yml084w-protein, yol160w-protein, yor392w-protein, and zinc finger protein, or of a polypeptide as indicated in the respective line in Table II, application no. 1, columns 5 or 8,or its homologs or fragments, and conferring the production of or an increase in methionine, respectively; and/or
[1673] (b) stabilizing a mRNA conferring the generation or increased expression of a FCRP, e.g.

[1674] protein encoded by the nucleic acid molecule of the invention or its homologs or fragments, or of a mRNA encoding the polypeptide of the present invention having the hereinmentioned activity selected from the group consisting of said activities mentioned in (a) and conferring the production of or an increase in methionine, respectively; and/or
[1675] (c) increasing the specific activity of a protein conferring the increased expression of a FCRP, e.g. a protein encoded by the nucleic acid molecule of the invention or of the polypeptide of the present invention having herein-mentioned methionine generating or increasing activity, respectively, e.g. of a polypeptide having the activity of a protein as indicated in the respective line in Table II, application no. 1, columns 5 or 8, or its homologs or fragments, or decreasing the inhibitiory regulation of the polypeptide of the invention; and/or
[1676] (d) generating or increasing the expression of an endogenous or artificial transcription factor mediating the expression of a protein conferring the generation or increased expression of a FCRP, e.g. a protein encoded by the nucleic acid molecule of the invention or of the polypeptide of the invention having herein-mentioned activity selected from the group consisting of said activities mentioned in (a) and conferring a methionine increasing activity, respectively, e.g. of a polypeptide having the activity of a protein as indicated in the respective line in Table II, application no. 1, columns 5 or 8 or its homologs; and/or
[1677] (e) stimulating activity of a protein conferring the increased expression of a FCRP, e.g. a protein encoded by the nucleic acid molecule of the present invention or a polypeptide of the present invention having herein-mentioned activity selected from the group consisting of said activities mentioned in (a) and conferring a methionine increasing activity, respectively, e.g. of a polypeptide having the activity of a protein as indicated in the respective line in Table II, application no. 1, columns 5 or 8, or its homologs or fragments, by adding one or more exogenous inducing factors to the non-human organism or parts thereof; and/or
[1678] (f) expressing a transgenic gene encoding a protein conferring the increased expression of a

[1679] FCRP, e.g. a polypeptide encoded by the nucleic acid molecule of the present invention or a polypeptide of the present invention, having herein-mentioned activity selected from the group consisting of said activities mentioned in (a) and conferring a methionine increasing activity, respectively, e.g. of a polypeptide having the activity of a protein as indicated in the respective line in Table II, application no. 1, columns 5 or 8, or its homologs or fragments, and/or
[1680] (g) increasing the copy number of a gene conferring the increased expression of a nucleic acid molecule encoding a FCRP, e.g. a polypeptide encoded by the nucleic acid molecule of the invention or the polypeptide of the invention having herein-mentioned activity selected from the group consisting of said activities mentioned in (a) and conferring a methionine increasing activity, respectively, e.g. of a polypeptide having the activity of a protein as indicated in the respective line in Table II, application no. 1, columns 5 or 8, or its homologs or fragments; and/or
[1681] (h) increasing the expression of the endogenous gene encoding the FCRP, polypeptide of the invention, e.g. a polypeptide encoded by the nucleic acid molecule of the invention or the polypeptide of the invention having herein-mentioned activity selected from the group consisting of said activities mentioned in (a) and conferring a methionine; increasing activity, respectively, e.g. of a polypeptide having the activity of a protein as indicated in the respective line in Table II, application no. 1, columns 5 or 8, or its homologs or fragments, by adding positive expression or removing negative expression elements, e.g. homologous recombination can be used to either introduce positive regulatory elements like for plants the 35S enhancer into the promoter or to remove repressor elements form regulatory regions. Further gene conversion methods can be used to disrupt repressor elements or to enhance to acitivty of positive elements. Positive elements can be randomly introduced in plants by T-DNA or transposon mutagenesis and lines can be identified in which the positive elements have be integrated near to a gene of the invention, the expression of which is thereby enhanced; and/or
[1682] (i) modulating growth conditions of the non-human organism in such a manner, that the expression or activity of the gene encoding the FCRP, e.g. a protein of the invention or the protein itself is enhanced, for example microorganisms or plants can be grown for example under a higher temperature regime leading to an enhanced expression of heat shock proteins, which can lead to an enhanced methionine production, respectively; and/or
[1683] (j) selecting of non-human organisms with especially high activity of the proteins of the invention from natural or from mutagenized resources and breeding them into the target organisms, e.g. the elite crops; and/or
[1684] (k) directing a protein encoded by the nucleic acid molecule of the invention or of the polypeptide of the present invention having herein-mentioned activity selected from the group consisting of said activities mentioned in (a) and conferring a methionine increasing activity, respectively, e.g. of a polypeptide having the activity of a protein as indicated in the respective line in Table II, application no. 1, columns 5 or 8, or its homologs or fragments, if for the corresponding nucleic acid molecule in the respuective line in column 6 of Table I the term “plastidic” is indicated, to the plastids by the addition of a plastidial targeting sequence or if for the corresponding nucleic acid molecule in the respective line in column 6 of Table I the term “mitochondria!” is indicated, to the mitochondria by the addition of a mitochondrial targeting sequence; and/or
[1685] (l) generating the expression of a protein encoded by the nucleic acid molecule of the invention or of the polypeptide of the present invention having herein-mentioned activity selected from the group consisting of said activities mentioned in (a) and conferring a methionine increasing activity, respectively, e.g. of a polypeptide having the activity of a protein as indicated in the respective line in Table II, application no. 1, columns 5 or 8, or its homologs or fragments, if for the corresponding nucleic acid molecule in the respective line in column 6 of Table I the term “plastidic” or “mitochondria!” is indicated, in these organelles by the stable or transient transformation, advantageously stable transformation, of organelles, preferably plastids or mitochondria, with an inventive nucleic acid sequence preferably in form of an expression cassette containing said sequence leading to the expression of the nucleic acids or polypeptides of the invention in the respective organelle; and/or
[1686] (m) generating the expression of a protein encoded by the nucleic acid molecule of the invention or of the polypeptide of the present invention having herein-mentioned activity selected from the group consisting of said activities mentioned in (a) and conferring a methionine increasing activity, respectively, e.g. of a polypeptide having the activity of a protein as indicated in the respective line in Table II, application no. 1, columns 5 or 8, or its homologs or fragments, if for the corresponding nucleic acid molecule in the respective line in column 6 of Table I the term “plastidic” or “mitochondrial ” is indicated, in these organelles by integration of a nucleic acid of the invention into the genome of the respective organelle under control of preferable a promoter selective for the respective organelle.

[1687] Preferably, said mRNA is the coding region of the nucleic acid molecule of the present invention and/or the protein conferring the increased expression of a protein encoded by the coding region of the nucleic acid molecule of the present invention alone or linked to a transit nucleic acid sequence or transit peptide encoding nucleic acid sequence or the polypeptide having the herein mentioned activity, e.g. conferring the generation of or increase of methionine, respectively, after increasing the expression or activity of the encoded polypeptide, non-targeted or in organelles such as plastids and/or mitochondria, preferably plastids, or having the activity of a polypeptide having an activity as the protein as shown in the respective line in Table II, application no. 1, column 3, or its homologs. Preferably the increase of methionine, respectively, takes place non-targeted or in plastids and/or mitochondria, preferably non-targeted or in plastids.

[1688] In general, the amount of mRNA or polypeptide in a cell or a compartment of a non-human organism correlates with the amount of encoded protein and thus with the overall activity of the encoded protein in said volume. Said correlation is not always linear, the activity in the volume is dependent on the stability of the molecules, the degradation of the molecules or the presence of activating or inhibiting co-factors. Further, product and educt inhibitions of enzymes are well known and described in Textbooks, e.g. Stryer, Biochemistry or Zinser et al. “Enzyminhibitoren”/Enzyme inhibitors”.

[1689] The activity of the above-mentioned proteins and/or poylpeptide encoded by the nucleic acid molecule of the present invention can be increased in various ways. For example, the activity in an organism or in a part thereof, like a cell or in an organelle of the cell, is increased for example via targeting of the nucleic acid sequence or the encoded gene product to an organelle such as plastids or mitochondria, preferentially to plastids, and/or increasing the gene product number, e.g. by increasing the expression rate, like introducing a stronger promoter, or by increasing the stability of the mRNA expressed, thus increasing the translation rate, and/or increasing the stability of the gene product, thus reducing the proteins decayed. Further, the activity or turnover of enzymes can be influenced in such a way that a reduction or increase of the reaction rate or a modification (reduction or increase) of the affinity to the substrate results, is reached. A mutation in the catalytic centre of an polypeptide of the invention, e.g. as enzyme, can modulate the turn over rate of the enzyme, e.g. an exchange of an amino acid in the catalytic center can lead to an increased activity of the enzyme, or the deletion of regulator binding sites can reduce a negative regulation like a feedback inhibition (or a substrate inhibition, if the substrate level is also increased). The specific activity of an enzyme of the present invention can be increased such that the turn over rate is increased or the binding of a co-factor is improved. Improving the stability of the encoding mRNA or the protein can also increase the activity of a gene product. The stimulation of the activity is also under the scope of the term “increased activity”.

[1690] Moreover, the regulation of the above-mentioned nucleic acid sequences may be modified so that gene expression is increased. This can be achieved advantageously by means of heterologous regulatory sequences or by modifying, for example mutating, the natural regulatory sequences which are present. The advantageous methods may also be combined with each other.

[1691] In general, an activity of a gene product in a non-human organism or part thereof, in particular in a plant cell or organelle of a plant cell, a plant, or a plant or a part thereof or in a microorganism can be increased by increasing the amount of the specific encoding mRNA or the corresponding protein in said organism or part thereof. “Amount of protein or mRNA” is understood as meaning the molecule number of polypeptides or mRNA molecules in an organism, a tissue, a cell or a cell compartment. “Increase” in the amount of a protein means the quantitative increase of the molecule number of said protein in a non-human organism, a cell or a cell compartment, such as an organelle like a plastid or mitochondrion, or part thereof—for example by one of the methods described herein below—in comparison to a wild type, control or reference.

[1692] The increase in molecule number amounts preferably to at least 1%, 5%, 10%, 20%, 30%, 50%, 70%, 100%, 150%, 200% or more. However, a de novo expression is also regarded as subject of the present invention.

[1693] A modification, i.e. an increase, can be caused by endogenous or exogenous factors. For example, an increase in activity in a non-human organism or a part thereof can be caused by adding a gene product or a precursor or an activator or an agonist to the media or nutrition or can be caused by introducing said subjects into an organism, transient or stable. Such an increase can be reached by the introduction of the inventive nucleic acid sequence or the encoded protein into an organism, transient or stable. Furthermore such an increase can be reached by the introduction of the inventive nucleic acid sequence, preferably the coding region thereof, or the encoded protein in the correct cell compartement, for example into organelles, such as plastids or mitochondria, either by transformation and/or targeting.

[1694] In one embodiment the increase in the amount of the fine chemical in the non-human organism or a part thereof, e.g. in a cell, an organ, an organelle etc., is achived by increasing the endogenous level of the polypeptide of the invention. Accordingly, in an embodiment of the present invention, the present invention relates to a process wherein the gene copy number of a gene encoding the polynucleotide or nucleic acid molecule of the invention is increased. Further, the endogenous level of the polypeptide of the invention can for example be increased by modifiying the transcriptional or translational regulation of the polypeptide.

[1695] In one embodiment the amount of the fine chemical in the non-human organism or part thereof can be increase by targeted or random mutagenesis of the endogenous genes of the invention. For example homologous recombination can be used to either introduce positive regulatory elements like for plants the 35S enhancer into the promoter or to remove repressor elements form regulatory regions. In addition gene conversion like methods described by Kochevenko and Willmitzer (Plant Physiol. 132 (1), 174 (2003)) and citations therein can be used to disrupt repressor elements or to enhance to acitivty of positive regulatory elements. Furthermore positive elements can be randomly introduced in (plant) genomes by T-DNA or transposon mutagenesis and lines can be screened for, in which the positive elements has be integrated near to a gene of the invention, the expression of which is thereby enhanced. The activation of plant genes by random integrations of enhancer elements has been described by Hayashi et al. (Science 258,1350 (1992)) or Weigel et al. (Plant Physiol. 122, 1003 (2000)) and others citated therein.

[1696] Reverse genetic strategies to identify insertions (which eventually carrying the activation elements) near in genes of interest have been described for various cases e.g. Krysan et al. (Plant Cell 11, 2283 (1999)); Sessions et al. (Plant Cell 14, 2985 (2002)); Young et al. (Plant Physiol. 125, 513 (2001)); Koprek et al. (Plant J. 24, 253 (2000)); Jeon et al.(Plant J. 22, 561 (2000));

[1697] Tissier et al., (Plant Cell 11, 1841 (1999)); Speulmann et al. (Plant Cell 11, 1853 (1999)). Briefly, material from all plants of a large T-DNA or transposon mutagenized plant population is harvested and genomic DNA prepared. Then the genomic DNA is pooled following specific architectures as described for example in Krysan et al. (Plant Cell 11, 2283 (1999)). Pools of genomics DNAs are then screened by specific multiplex PCR reactions detecting the combination of the insertional mutagen (e.g. T-DNA or Transposon) and the gene of interest. Therefore PCR reactions are run on the DNA pools with specific combinations of T-DNA or transposon border primers and gene specific primers. General rules for primer design can again be taken from Krysan et al. (Plant Cell 11, 2283 (1999)). Rescreening of lower levels DNA pools lead to the identifcation of individual plants in which the gene of interest is disrupted by the insertional mutagen.

[1698] The enhancement of positive regulatory elements or the disruption or weaking of negative regulatory elements can also be achieved through common mutagenesis techniques: The production of chemically or radiation mutated populations is a common technique and known to the skilled worker. Methods for plants are described by Koorneef et al. 1982 and the citations therein and by Lightner and Caspar in “Methods in Molecular Biology” Vol 82. These techniques usually induce pointmutations that can be identified in any known gene using methods such as TILLING (Colbert et al., Plant Physiol.126 (2), 480 (2001)). One can also envisage to introduce nucleic acids sequences, encoding organelle- ,such as plastidal- or mitochondrial-targeting signals, like for example present in Table a or Table b, respectively, by homologous recombination or other methods of site specific integration, into the genome in that way, that an endogenous gene is functionally fused to the targeting sequence and the protein is redirected to the plastids or mitochondria, respectively. Eventually the integration can also occur randomly and the desired fusion event is selected for.

[1699] Accordingly, the expression level can be increased if the endogenous genes encoding a polypeptide conferring an increased expression of the polypeptide of the present invention, in particular genes comprising the nucleic acid molecule of the present invention, are modified via homologous recombination, Tilling approaches or gene conversion. It is also possible to add as mentioned herein targeting sequences to the inventive nucleic acid sequences.

[1700] Regulatory sequences, preferably in addition to a targeting sequence or part thereof (if present), can be operatively linked to the coding region of an endogenous nucleic acid and control its transcription and translation or the stability or decay of the encoding mRNA or the expressed protein. In order to modify and control the expression, promoter, UTRs, splicing sites, processing signals, polyadenylation sites, terminators, enhancers, repressors, post transcriptional or posttranslational modification sites can be changed, added or amended. For example, the activation of plant genes by random integrations of enhancer elements has been described by Hayashi et al. (Science 258, 1350 (1992)) or Weigel et al. (Plant Physiol. 122, 1003 (2000)) and others citated therein. For example, the expression level of the endogenous protein can be modulated by replacing the endogenous promoter with a stronger transgenic promoter or by replacing the endogenous 3′UTR with a 3′UTR, which provides more stablitiy without amending the coding region. Further, the transcriptional regulation can be modulated by introduction of an artifical transcription factor as described in the examples. Alternative promoters, terminators and UTR are described below.

[1701] The activation of an endogenous polypeptide having above-mentioned activity, e.g. having the activity of a protein as shown in the respective line in Table II, application no. 1, column 3 or of the polypeptide of the invention, e.g. conferring the increase of the fine chemical methionine, respectively, by increase of expression or activity in the cytoplasm, and/or in the cytosol, and/or in an organelle, such as plastids or mitochondria, can also be increased by introducing a synthetic transcription factor, which binds close to the coding region of the gene encoding the protein as shown in the respective line in Table II, application no. 1, column 5 or 8, or homologs or fragments thereof, and activates its transcription. A chimeric zinc finger protein can be constructed, which comprises a specific DNA-binding domain and an activation domain as e.g. the VP16 domain of Herpes Simplex virus. The specific binding domain can bind to the regulatory region of the gene encoding the protein as shown in the respective line in Table II, application no. 1, column 5 or 8, or homologs or fragments thereof. The expression of the chimeric transcription factor in a non-human organism, in particular in a plant, leads to a specific expression of the protein as shown in the respective line in Table II, application no. 1, column 5 or 8, or homologs or fragments thereof, see e.g. in W001/52620, Oriz, Proc. Natl. Acad. Sci. USA 99, 13290 (2002), or Guan, Proc. Natl. Acad. Sci. USA 99, 13296 (2002).

[1702] In one further embodiment of the process according to the invention, organisms are used in which one of the above-mentioned genes, or one of the above-mentioned nucleic acids, is mutated in a way that the activity of the encoded gene products is less influenced by cellular factors, or not at all, in comparison with the unmutated proteins. For example, well known regulation mechanisms of enzymic activity are substrate inhibition or feed back regulation mechanisms. Ways and techniques for the introduction of substitution, deletions and additions of one or more bases, nucleotides or amino acids of a corresponding sequence are described herein below in the corresponding paragraphs and the references listed there, e.g. in Sambrook et al., Molecular Cloning, Cold Spring Habour, N.Y., 1989. The person skilled in the art will be able to identify regulation domains and binding sites of regulators by comparing the sequence of the nucleic acid molecule of the present invention or the expression product thereof with the state of the art by computer software means which comprise algorithms for the identifying of binding sites and regulation domains or by introducing into a nucleic acid molecule or in a protein systematically mutations and assaying for those mutations which will lead to an increased specifiy activity or an increased activity per volume, in particular per cell.

[1703] It can therefore be advantageous to express in a non-human organism a nucleic acid molecule of the invention or a polypeptide of the invention derived from a evolutionary distantly related organism, as e.g. using a prokaryotic gene in a eukaryotic host, as in these cases the regulation mechanism of the host cell may not weaken the activity (cellular or specific) of the gene or its expression product.

[1704] In another embodiment it can be adavantageous to express in a non-human organism a nucleic acid molecule of the invention or a polypeptide of the invention in a compartment by the use of a respective targeting sequence, in which it is naturally not expressed, as in these cases the regulation mechanism of the host cell may not weaken the activity (cellular or specific) of the gene or its expression product.

[1705] The mutation is introduced in such a way that the production of the fine chemical is not adversely affected by e.g. undesired mutations.

[1706] Less influence on the regulation of a gene or its gene product is understood as meaning a reduced regulation of the enzymatic or biological activity leading to an increased specific or cellular activity of the gene or its product. An increase of the enzymatic activity is understood as meaning an enzymatic or biological activity, which is increased by at least 10%, 20%, 30% 40%, 50%, 60% or 70% in comparison with the starting organism. This leads to an increased productivity of the desired fine chemical(s).

[1707] Owing to the introduction of a gene or a plurality of genes conferring the expression of the nucleic acid molecule of the invention or the polypeptide of the invention, for example the nucleic acid construct mentioned below, or encoding the protein as shown in the respective line in Table II, application no. 1, column 5 or 8, or homologs or fragments thereof, into a non-human organism alone or in combination with other genes, it is possible not only to increase the biosynthetic flux towards the end product, but also to increase, modify or create de novo an advantageous, preferably novel metabolites composition in the non-human organism, e.g. an advantageous composition comprising a higher content of (from a viewpoint of nutrional physiology limited) methionine and if desired other amino acids, and/or other metabolites, in free or bound form.

[1708] In another embodiment the composition comprises further higher amounts of metabolites positively affecting or lower amounts of metabolites negatively affecting the nutrition or health of animals or humans provided with said compositions or non-human organisms of the invention or parts thereof. Likewise, the number or activity of further genes which are required for the import or export of nutrients or metabolites, including amino acids, fatty acids, vitamins etc. or its precursors, required for the cell's biosynthesis of the fine chemical may be increased so that the concentration of necessary or relevant precursors, cofactors or intermediates within the cell(s) or within the corresponding storage compartments is increased. Owing to the increased or novel generated activity of the polypeptide of the invention or owing to the increased number of nucleic acid sequences of the invention and/or to the modulation of further genes which are involved in the biosynthesis of the fine chemical, e.g. by increasing the acitivty of enzymes synthizing precursors or by destroying the activity of one or more genes which are involved in the breakdown of the fine chemical, it is possible to increase the yield, production and/or production efficiency of the fine chemical in the host organism, such as plants or microorganims.

[1709] Accordingly, in one embodiment, the process according to the invention relates to a process, which comprises:
[1710] (a) providing a non-human organism, preferably a microorganism, a plant cell, a plant tissue, a plant or a part thereof, more preferably a microorganism, a plant tissue, a plant or a part thereof;
[1711] (b) increasing the activity of a protein as shown in the respective line in Table II, application no. 1, column 3 or of a polypeptide being encoded by the respective nucleic acid molecule of the present invention and described below, e.g. conferring an increase of the fine chemical methionine, respectively, in the non-human organism, preferably in the microorganism, the plant cell, the plant tissue, the plant or a part thereof, more preferably a microorganism, a plant tissue, a plant or a part thereof, especially cytoplasmic or in an organelle, like plastids or mitochondria,
[1712] (c) growing the non-human organism, preferably the microorganism, the plant cell, the plant tissue, the plant or a part thereof, under conditions which permit the production of said fine chemical in the non-human organism, preferably the microorganism, the plant cell, the plant tissue, the plant or a part thereof; and
[1713] (d) if desired, recovering, optionally isolating, said fine chemical, in free and/or bound form, and, optionally further free and/or bound amino acids, and/or oher metabolites synthetized by the non-human organism, the microorganism, the plant cell, the plant tissue, the plant or a part thereof.

[1714] After the above-described increasing (which as defined above also encompasses the generating of an activity in a non-human organism, i.e. a de novo activity), for example after the introduction and the expression of the nucleic acid molecules of the invention or described in the methods or processes according to the invention, the organism according to the invention, advantageously, a microorganism, a non-human animal, a plant, plant or animal tissue or plant or animal cell, is grown and subsequently harvested.

[1715] Suitable non-human organisms or host organisms (transgenic organism) for the nucleic acid molecule used according to the invention and for the inventive process, the nucleic acid construct or the vector (both as described below) are, in principle, all organisms which are capable of synthesizing the fine chemical, and which are suitable for the activation, introduction or stimulation of recombinant genes. Examples which may be mentioned are transgenic plants, transgenic microorganisms such as fungi, bacteria, yeasts, alga or diatom preferably alga. Preferred organisms are those which are naturally capable of synthesizing the fine chemical in substantial amounts, like fungi, yeasts, bacteria or plants preferably alga and plants.

[1716] In the event that the transgenic non-human organism is a microorganism, such as a eukaryotic organism, for example a fungus, an alga, diatom or a yeast, in particular a fungus, alga, diatom or yeast selected from the families Tuberculariaceae, Adelotheciaceae, Dinophyceae, Ditrichaceae or Prasinophyceae. Preferred non-human organisms are microorganisms such as green algae or plants. After the growing phase, the organisms can be harvested.

[1717] The non-human organism, in particular the microorganism, plant or part thereof, is advantageously grown in such a way that it is not only possible to recover, if desired to isolate the free or bound fine chemical or the free and bound fine chemical but as option it is also possible to produce, recover and, if desired to isolate, other free or/and bound amino acids, in particular threonine and/or lysine, and/or other metabolites. For example Galili et al., Transgenic Res. 9 (2) 137 (2000) describes that the heterologous expression of a bacterial gene for the amino acid biosynthesis confers the increase of free as well as of protein-bound amino acids.

[1718] The organisms are harvested in a manner known per se and appropriate for the particular organism. Microorganisms such as bacteria, mosses, yeasts and fungi or plant cells which are cultured in liquid media by fermentation may be removed, for example, by centrifugation, decanting or filtration. Plants are grown on solid media in a manner known per se and harvested accordingly.

[1719] Preferred microorganisms are selected from the group consisting of Charophyceae such as the genera Chara, Nitella e.g. the species Chara globularis, Chara vulgaris, Nitella flexilis, Chlorophyceae such as the genera Acrosiphonia, Spongomorpha, Urospora, Bryopsis, Pseudobryopsis, Trichosolen, Dichotomosiphon, Caulerpa, Rhipilia, Blastophysa, Avrainvillea, Chlorodesmis, Codium, Espera, Halicystis, Halimeda, Penicillus, Pseudocodium, Rhipiliopsis, Rhipocephalus, Tydemania, Udotea, Derbesia, Acrochaete, Aphanochaete, Bolbocoleon, Chaetobolus, Chaetonema, Chaetophora, Chlorotylium, Desmococcus, Draparnaldia, Draparnaldiopsis, Ectochaete, Endophyton, Entocladia, Epicladia, Internoretia, Microthamnion, Ochlochaete, Phaeophila, Pilinella, Pringsheimiella, Protoderma, Pseudendoclonium, Pseudodictyon, Pseudopringsheimia, Pseudulvella, Schizomeris, Stigeoclonium, Thamniochaete, Ulvella, Pilinia, Tellamia, Helicodictyon, Actidesmium, Ankyra, Characium, Codiolum, Sykidion, Keratococcus, Prototheca, Bracteacoccus Chlorococcum, Excentrosphaera, Hormidium, Oophila, Schroederia, Tetraedron, Trebouxia Chlorosarcinopsis, Gomphonitzschia, Coccomyxa, Dactylothece, Di\acute{0}genes, Disporá, Gloeocystis, Mycanthococcus, Ourococcus, Coelastrum, Dicranochaete, Botryococcus, Dictyosphaerium, Dimorphococcus, Chlorochytrium, Kentrosphaera, Phyllobium, Gomontia, Hormotila, Euastropsis, Hydrodictyon, Pectodictyon, Pediastrum, Sorastrum, Tetrapedia, Acanthosphaera, Echinosphaerella, Echinosphaeridium, Errerella, Gloeoactinium, Golenkeniopsis Golenkinia, Micractinium, Ankistrodesmus, Chlorella, Chodatella, Closteriopsis, Cryocystis, Dactylococcus, Dematractum, Eremosphaera, Eutetramorus, Franceia, Glaucocystis, Gloeotaenium, Kirchneriella, Lagerheimiella, Monoraphidium, Nannochloris, Nephrochlamys, Nephrocytium, Oocystis, Oonephris, Pachycladon, Palmellococcus, Planktosphaeria, Polyedriopsis, Pseudoraciborskia, Quadrigula, Radiococcus, Rochiscia, Scotiella, Selanastrum, Thorakochloris, Treubaria, Trochiscia, Westella, Zoochlorella, Ostreobium, Phyllosiphon, Protosiphon, Rhodochytrium, Actinastrum, Coronastrum, Crucigenia, Dictymocystis, Enallax, Scenedesmus, Selenastrum, Tetradesmus, Tetrallantos, Tetrastrum, Chlorosarcina, Anadyomene, Valoniopsis, Ventricaria, Basicladia, Chaetomorpha, Cladophora, Lola Pithophora Rhizoclonium Chaetosphaeridium, Conochaete, Coleochaete, Oligochaetophora, Polychaetophora, Cylindrocapsa, Gongrosira, Protococcus, Acetabularia, Batophora, Bornetella, Dasycladus, Halicoryne, Neomeris, Elakatothrix, Raphidonema, Microspora, Bulbochaete, Oedocladium, Oedogonium, Prasiola, Rosenvingiella, Schizogonium, Apjohnia, Chamaedoris, Cladophoropsis, Siphonocladus, Spongocladia, Boergesenia, Boodlea, Cystodictyon, Dictyosphaeria, Ernodesmis, Microdictyon, Struvea, Valonia, Sphaeroplea, Malleochloris, Stylosphaeridium, Gloeococcus, Palmella, Palmodictyon, Palmophyllum, Pseudospherocystis, Sphaerocystis, Urococcus, Apiocystis, Chaetopeltis, Gemellicystis, Paulschulzia, Phacomyxa, Pseudotetraspora, Schizochlamys, Tetraspora, Cephaleuros, Ctenocladus, Epibolium, Leptosira, Trentepohlia, Diplochaete, Monostroma, Binuclearia, Geminella, Klebsormidium, Planetonema, Radiofilum, Stichococcus, Ulothrix, Uronema, Blidingia, Capsosiphon, Chloropelta, Enteromorpha, Percursaria, Ulva, Ulvaria, Brachiomonas, Carteria, Chlainomonas, Chlamydomonas, Chlamydonephris, Chlorangium, Chlorogonium, Cyanidium, Fortiella, Glenomonas, Gloeomonas, Hyalogonium, Lobomonas Polytoma, Pyramichlamys, Scourfieldia, Smithsonimonas, Sphaerellopsis, Sphenochloris, Spirogonium, Collodictyon, Dunaliella, Haematococcus, Stephanosphaera, Coccomonas, Dysmorphococcus, Phacotus, Pteromonas, Thoracomonas, Wislouchiella, Mascherina, Pyrobotrys, Spondylomorum, Eudorina, Gonium, Oltmannsiella, Pandorina, Platydorina, Pleodorina, Stephanoon, Volvox, Volvulina, Actinotaenium, Arthrodesmus, Bambusina Closterium, Cosmarium, Desmidium, Euastrum, Groenbladia, Hyalotheca, Micrasterias, Penium, Phymatodocis, Pleurotaenium, Sphaerozosma, Spinoclosterium, Spinocosmarium, Spondylosium, Staurastrum, Tetmemorus, Triploceras, Xanthidium, Cylindrocystis, Genicularia, Gonatozygon, Mesotaenium, Netrium, Roya, Spirotaenia, Cosmocladium, Debarya, Docidium, Euastridium, Hallasia, Mougeotia, Mougeotiopsis, Sirogonium, Spirogyra, Staurodesmus, Teilingia, Zygnema, Zygogonium, e.g. the species Caulerpa taxifolia, Prototheca wickerhamii, Ankistrodesmus falcatus, Chlorella ellipsoidea, Chlorella pyrenoidosa, CloreIla sorokiniana, Chlorella vulgaris, Scenedesmus obliquus, Scenedesmus quadricauda, Selenastrum capricornutum, Selenastrum undecimnotata, Cladophora glomerata, Chlamydomonas eugametos, Chlamydomonas reinhardtii, Cyanidium caldarium, Dunaliella salina, Dunaliella tertiolecta, Euglena gracilis, Haematococcus pluvialis, Coniugatophyceae, Prasinophyceae Trebouxiophyceae, Ulvophyceae, Chlorodendraceae, Pedinomonadales, Halosphaeraceae, Pterospermataceae, Monomastigaceae, Pyramimonadaceae, Chlorodendraceae such as the genera Prasinocladus e.g. the species Prasinocladus ascus, Halosphaeraceae, Pedinomonadales, Pedinomonadaceae such as the genera Pedinomonas, Pterospermataceae such as the genera Pachysphaera, Pterosperma, Halosphaera, Pyramimonas, Bacillariophyceae, Chrysophyceae, Craspedophyceae, Euglenophyceae, Prymnesiophyceae, Phaeophyceae, Dinophyceae, Rhodophyceae, Xanthophyceae, Prasinophyceae such as the genera Nephroselmis, Prasinococcus, Scherffelia, Tetraselmis, Mantoniella, Ostreococcus e.g. the species Nephroselmis olivacea, Prasinococcus capsulatus, Scherffelia dubia, Tetraselmis chui, Tetraselmis suecica, Mantoniella squamata or Ostreococcus tauri.

[1720] Preferred plants are monocotyledonous or dicotyledonous plants, preferably selected from the group consisting of Anacardiaceae such as the genera Pistacia, Mangifera, Anacardium e.g. the species Pistacia vera [pistachios, Pistazie], Mangifer indica [Mango] or Anacardium occidentale [Cashew]; Asteraceae such as the genera Calendula, Carthamus, Centaurea, Cichorium, Cynara, Helianthus, Lactuca, Locusta, Tagetes, Valeriana e.g. the species Calendula officinalis [Marigold], Carthamus tinctorius [safflower], Centaurea cyanus [cornflower], Cichorium intybus [blue daisy], Cynara scolymus [Artichoke], Helianthus annus [sunflower], Lactuca sativa, Lactuca crispa, Lactuca esculenta, Lactuca scariola L. ssp. sativa, Lactuca scariola L. var. integrate, Lactuca scariola L. var. integrifolia, Lactuca sativa subsp. romana, Locusta communis, Valeriana locusta [lettuce], Tagetes lucida, Tagetes erecta or Tagetes tenuifolia [Marigold]; Apiaceae such as the genera Daucus e.g. the species Daucus carota [carrot]; Betulaceae such as the genera Corylus e.g. the species Corylus avellana or Corylus colurna [hazelnut]; Boraginaceae such as the genera Borago e.g. the species Borago officinalis [borage]; Brassicaceae such as the genera Brassica, Melanosinapis, Sinapis, Arabadopsis e.g. the species Brassica napus, Brassica rapa ssp. [canola, oilseed rape, turnip rape], Sinapis arvensis Brassica juncea, Brassica juncea var. juncea, Brassica juncea var. crispifolia, Brassica juncea var. foliosa, Brassica nigra, Brassica sinapioides, Melanosinapis communis [mustard], Brassica oleracea [fodder beet] or Arabidopsis thaliana; Bromeliaceae such as the genera Anana, Bromelia e.g. the species Anana comosus, Ananas ananas or Bromelia comosa [pineapple]; Caricaceae such as the genera Carica e.g. the species Carica papaya [papaya]; Cannabaceae such as the genera Cannabis e.g. the species Cannabis sative [hemp], Convolvulaceae such as the genera Ipomea, Convolvulus e.g. the species Ipomoea batatus, Ipomoea pandurata, Convolvulus batatas, Convolvulus tiliaceus, Ipomoea fastigiata, Ipomoea tiliacea, Ipomoea triloba or Convolvulus panduratus [sweet potato, Man of the Earth, wild potato], Chenopodiaceae such as the genera Beta, i.e. the species Beta vulgaris, Beta vulgaris var. altissima, Beta vulgaris var. Vulgaris, Beta maritima, Beta vulgaris var. perennis, Beta vulgaris var. conditiva or Beta vulgaris var. esculenta [sugar beet]; Cucurbitaceae such as the genera Cucubita e.g. the species Cucurbita maxima, Cucurbita mixta, Cucurbita pepo or Cucurbita moschata [pumpkin, squash]; Elaeagnaceae such as the genera Elaeagnus e.g. the species Olea europaea [olive]; Ericaceae such as the genera Kalmia e.g. the species Kalmia latifolia, Kalmia angustifolia, Kalmia microphylla, Kalmia polifolia, Kalmia occidentalis, Cistus chamaerhodendros or Kalmia lucida [American laurel, broad-leafed laurel, calico bush, spoon wood, sheep laurel, alpine laurel, bog laurel, western bog-laurel, swamp-laurel]; Euphorbiaceae such as the genera Manihot, Janipha, Jatropha, Ricinus e.g. the species Manihot utilissima, Janipha manihot, Jatropha manihot, Manihot aipil, Manihot dulcis, Manihot manihot, Manihot melanobasis, Manihot esculenta [manihot, arrowroot, tapioca, cassava] or Ricinus communis [castor bean, Castor Oil Bush, Castor Oil Plant, Palma Christi, Wonder Tree]; Fabaceae such as the genera Pisum, Albizia, Cathormion, Feuillea, Inga, Pithecolobium, Acacia, Mimosa, Medicajo, Glycine, Dolichos, Phaseolus, Soja e.g. the species Pisum sativum, Pisum arvense, Pisum humile [pea], Albizia berteriana, Albizia julibrissin, Albizia lebbeck, Acacia berteriana, Acacia littoralis, Albizia berteriana, Albizzia berteriana, Cathormion berteriana, Feuillea berteriana, Inga fragrans, Pithecellobium berterianum, Pithecellobium fragrans, Pithecolobium berterianum, Pseudalbizzia berteriana, Acacia julibrissin, Acacia nemu, Albizia nemu, Feuilleea julibrissin, Mimosa julibrissin, Mimosa speciosa, Sericanrda julibrissin, Acacia lebbeck, Acacia macrophylla, Albizia lebbek, Feuilleea lebbeck, Mimosa lebbeck, Mimosa speciosa [bastard logwood, silk tree, East Indian Walnut], Medicago sativa, Medicago falcata, Medicago varia [alfalfa], Glycine max [soybean], Dolichos soja, Glycine gracilis, Glycine hispida, Phaseolus max or Soja hispida ; Geraniaceae such as the genera Pelargonium, Cocos, Oleum e.g. the species Cocos nucifera, Pelargonium grossularioides or Oleum cocois [coconut]; Gramineae such as the genera Saccharum e.g. the species Saccharum officinarum; Juglandaceae such as the genera Juglans, Wallia e.g. the species Juglans regia, Juglans ailanthifolia, Juglans sieboldiana, Juglans cinerea, Wallia cinerea, Juglans bixbyi, Juglans californica, Juglans hindsii, Juglans intermedia, Juglans jamaicensis, Juglans major, Juglans microcarpa, Juglans nigra or Wallia nigra [walnut, black walnut, common walnut, persian walnut, white walnut, butternut, black walnut]; Lauraceae such as the genera Persea, Laurus e.g. the species laurel Laurus nobilis [bay, laurel, bay laurel, sweet bay], Persea americana Persea americana, Persea gratissima or Persea persea [avocado]; Leguminosae such as the genera Arachis e.g. the species Arachis hypogaea [peanut]; Linaceae such as the genera Linum, Adenolinum e.g. the species Linum usitatissimum, Linum humile, Linum austriacum, Linum bienne, Linum angustifolium, Linum catharticum, Linum flavum, Linum grandiflorum, Adenolinum grandiflorum, Linum lewisii, Linum narbonense, Linum perenne, Linum perenne var. lewisii, Linum pratense or Linum trigynum [flax, linseed]; Lythrarieae such as the genera Punica e.g. the species Punica granatum [pomegranate]; Malvaceae such as the genera Gossypium e.g. the species Gossypium hirsutum, Gossypium arboreum, Gossypium barbadense, Gossypium herbaceum or Gossypium thurberi [cotton]; Musaceae such as the genera Musa e.g. the species Musa nana, Musa acuminata, Musa paradisiaca, Musa spp. [banana]; Onagraceae such as the genera Camissonia, Oenothera e.g. the species Oenothera biennis or Camissonia brevipes [primrose, evening primrose]; Palmae such as the genera Elacis e.g. the species Elaeis guineensis [oil plam]; Papaveraceae such as the genera Papaver e.g. the species Papaver orientale, Papaver rhoeas, Papaver dubium [poppy, oriental poppy, corn poppy, field poppy, shirley poppies, field poppy, long-headed poppy, long-pod poppy]; Pedaliaceae such as the genera Sesamum e.g. the species Sesamum indicum [sesame]; Piperaceae such as the genera Piper, Artanthe, Peperomia, Steffensia e.g. the species Piper aduncum, Piper amalago, Piper angustifolium, Piper auritum, Piper betel, Piper cubeba, Piper longum, Piper nigrum, Piper retrofractum, Artanthe adunca, Artanthe elongata, Peperomia elongata, Piper elongatum, Steffensia elongata. [Cayenne pepper, wild pepper]; Poaceae such as the genera Hordeum, Secale, Avena, Sorghum, Andropogon, Holcus, Panicum, Oryza, Zea, Triticum e.g. the species Hordeum vulgare, Hordeum jubatum, Hordeum murinum, Hordeum secalinum, Hordeum distichon Hordeum aegiceras, Hordeum hexastichon., Hordeum hexastichum, Hordeum irregulare, Hordeum sativum, Hordeum secalinum [barley, pearl barley, foxtail barley, wall barley, meadow barley], Secale cereale [rye], Avena sativa, Avena fatua, Avena byzantina, Avena fatua var. sativa, Avena hybrida [oat], Sorghum bicolor, Sorghum halepense, Sorghum saccharatum, Sorghum vulgare, Andropogon drummondii, Holcus bicolor, Holcus sorghum, Sorghum aethiopicum, Sorghum arundinaceum, Sorghum caffrorum, Sorghum cernuum, Sorghum dochna, Sorghum drummondii, Sorghum durra, Sorghum guineense, Sorghum lanceolatum, Sorghum nervosum, Sorghum saccharatum, Sorghum subglabrescens, Sorghum verticilliflorum, Sorghum vulgare, Holcus halepensis, Sorghum miliaceum millet, Panicum militaceum [Sorghum, millet], Oryza sativa, Oryza latifolia [rice], Zea mays [corn, maize] Triticum aestivum, Triticum durum, Triticum turgidum, Triticum hybernum, Triticum macha, Triticum sativum or Triticum vulgare [wheat, bread wheat, common wheat], Proteaceae such as the genera Macadamia e.g. the species Macadamia intergrifolia [macadamia]; Rubiaceae such as the genera Coffea e.g. the species Cofea spp., Coffea arabica, Coffea canephora or Coffea liberica [coffee]; Scrophulariaceae such as the genera Verbascum e.g. the species Verbascum blattaria, Verbascum chaixii, Verbascum densiflorum, Verbascum lagurus, Verbascum longifolium, Verbascum lychnitis, Verbascum nigrum, Verbascum olympicum, Verbascum phlomoides, Verbascum phoenicum, Verbascum pulverulentum or Verbascum thapsus [mullein, white moth mullein, nettle-leaved mullein, dense-flowered mullein, silver mullein, long-leaved mullein, white mullein, dark mullein, greek mullein, orange mullein, purple mullein, hoary mullein, great mullein]; Solanaceae such as the genera Capsicum, Nicotiana, Solanum, Lycopersicon e.g. the species Capsicum annuum, Capsicum annuum var. glabriusculum, Capsicum frutescens [pepper], Capsicum annuum [paprika], Nicotiana tabacum, Nicotiana alata, Nicotiana attenuata, Nicotiana glauca, Nicotiana langsdorffii, Nicotiana obtusifolia, Nicotiana quadrivalvis, Nicotiana repanda, Nicotiana rustica, Nicotiana sylvestris [tobacco], Solanum tuberosum [potato],Solanum melongena [egg-plant] (Lycopersicon esculentum, Lycopersicon lycopersicum, Lycopersicon pyriforme, Solanum integrifolium or Solanum lycopersicum [tomato]; Sterculiaceae such as the genera Theobroma e.g. the species Theobroma cacao [cacao]; Theaceae such as the genera Camellia e.g. the species Camellia sinensis) [tea].

[1721] Particular preferred plants are monocotyledonous or dicotyledonous plants selected from the group consisting of Asteraceae such as the genera Helianthus, Tagetes e.g. the species Helianthus annus [sunflower], Tagetes lucida, Tagetes erecta or Tagetes tenuifolia [Marigold]; Brassicaceae such as the genera Brassica, Arabadopsis e.g. the species Brassica napus, Brassica rapa ssp. [canola, oilseed rape, turnip rape] or Arabidopsis thaliana; Fabaceae such as the genera Glycine e.g. the species Glycine max [soybean] or Soja hispida; Linaceae such as the genera Linum e.g. the species Linum usitatissimum, [flax, linseed]; Poaceae such as the genera Hordeum, Secale, Avena, Sorghum, Oryza, Zea, Triticum e.g. the species Hordeum vulgare [barley], Secale cereale [rye], Avena sativa, Avena fatua, Avena byzantina, Avena fatua var. sativa, Avena hybrida [oat], Sorghum bicolor [Sorghum, millet], Oryza sativa, Oryza latifolia [rice], Zea mays [corn, maize], Triticum aestivum, Triticum durum, Triticum turgidum, Triticum hybernum, Triticum macha, Triticum sativum or Triticum vulgare [wheat, bread wheat, common wheat]; Solanaceae such as the genera Solanum, Lycopersicon e.g. the species Solanum tuberosum [potato], Lycopersicon esculentum, Lycopersicon lycopersicum, Lycopersicon pyriforme, Solanum integrifolium or Solanum lycopersicum [tomato]; Gramineae such as the genera Saccharum e.g. the species Saccharum officinarum or Helianthus annus [sunflower] or Chenopodiaceae such as the genera Beta, i.e. Beta vulgaris var. esculenta [sugar beet].

[1722] All above-mentioned organisms can be used as host organisms and/or can be used as donor organism.

[1723] The invention is not limited to specific nucleic acids, specific polypeptides, specific cell types, specific host cells, specific conditions or specific methods etc. as such, but may vary and numerous modifications and variations therein will be apparent to those skilled in the art. It is also to be understood that the terminology used herein is for the purpose of describing specific embodiments only and is not intended to be limiting.

[1724] In another embodiment, the invention relates to a (isolated) nucleic acid molecule, which comprises a nucleic acid molecule selected from the group consisting of:
[1725] (a) a nucleic acid molecule encoding a polypeptide shown in Table II, application no. 1, column 5 or 8, preferably shown in Table II B, application no. 1, column 8, or a homolog or a fragment thereof;
[1726] (b) a nucleic acid molecule shown in Table I, application no. 1, column 5 or 8, preferably shown in Table I B, application no. 1, column 8, preferably the coding region thereof, or a homolog or a fragment thereof;
[1727] (c) a nucleic acid molecule, which, as a result of the degeneracy of the genetic code, can be derived from a polypeptide sequence depicted in column 5 or 8 of Table II, application no. 1, preferably in column 8 of Table II B, application no. 1;
[1728] (d) a nucleic acid molecule having at least 30% identity, preferably at least 40%, 50%, 60%, 70%, 75%, 80%, 85%, 90%, 95%, 96%, 97%, 98%, 99%, 99.5%, with the nucleic acid molecule sequence of a polynucleotide comprising the nucleic acid molecule shown in column 5 or 8 of Table I, application no. 1, preferably shown in column 8 of Table I B, application no. 1, preferably the coding region thereof;
[1729] (e) a nucleic acid molecule encoding a polypeptide having at least 30% identity, preferably at least 40%, 50% 60%, 70%, 75%, 80%, 85%, 90%, 95%, 96%, 97%, 98%, 99%, 99.5%, identity with the amino acid sequence of the polypeptide encoded by the nucleic acid molecule of (a), (b), (c) or (d);
[1730] (f) a nucleic acid molecule which hybridizes with a nucleic acid molecule of (a), (b), (c), (d) or (e) under stringent hybridisation conditions;
[1731] (g) a nucleic acid molecule encoding a polypeptide which can be isolated with the aid of monoclonal or polyclonal antibodies made against a polypeptide encoded by one of the nucleic acid molecules of (a), (b), (c), (d), (e) or (f);
[1732] (h) a nucleic acid molecule encoding a polypeptide comprising the consensus sequence or one or more polypeptide motifs as shown in column 8 of Table IV, application no. 1;
[1733] (i) a nucleic acid molecule encoding a polypeptide having the activity represented by a respective protein as depicted in column 5 of Table II, application no. 1;
[1734] (j) a nucleic acid molecule comprising a polynucleotide which is obtained by amplifying a cDNA library or a genomic library using the primers in Table III, application no. 1, column 8;
[1735] and
[1736] (k) nucleic acid molecule which is obtainable by screening a suitable nucleic acid library, especially a cDNA library and/or a genomic library, under stringent hybridization conditions with a probe comprising one of the sequences of the nucleic acid molecule of (a), (b), (c), (d), (e), (f), (g), (h), (i) or (j) or with a fragment of at least 15 nt, preferably 20 nt, 30 nt, 50 nt, 100 nt, 200 nt,500 nt, 1000 nt, 1500 nt, 2000 nt or 3000 nt of the nucleic acid molecule characterized in (a), (b), (c), (d), (e), (f), (g), (h), (i) or (j);
   or a nucleic acid molecule comprising a sequence which is complementary thereto.
   (All the references to Tables I to IV are references to the corresponding lines of Tables I to IV.)

[1737] In a preferred embodiment thereof said nucleic acid molecule according to (a), (b), (c), (d), (e), (f), (g), (h), (i), (j) or (k) encodes a polypeptide which has the activity of the respective polypeptide represented by a protein comprising a polypeptide as depicted in the respective line in column 5 of Table II, application no. 1.

[1738] In another preferred embodiment thereof said nucleic acid molecule according to (a), (b), (c), (d), (e), (f), (g), (h), (i), (j) or (k) confers a generation or an increase of the respective fine chemical in a non-human organism or a part thereof as compared to a corresponding wild-type non-human organism or part thereof.

[1739] In another preferred embodiment thereof said nucleic acid molecule according to (a), (b), (c), (d), (e), (f), (g), (h), (i), (j) or (k) encodes a polypeptide which has the activity of the respective polypeptide represented by a protein as depicted in the respective line in column 5 of Table II application no. 1 and confers a generation or an increase of the respective fine chemical in a non-human organism or a part thereof as compared to a corresponding wild-type non-human organism or part thereof.

[1740] In another embodiment, the invention relates to a (isolated) nucleic acid molecule, which comprises a nucleic acid molecule selected from the group consisting of:
[1741] (a) a nucleic acid molecule encoding a polypeptide shown in Table II, column 5 or 8, application no. 1, preferably shown in Table II A, application no. 1, in column 5 or in Table II A, application no. 1, column 8 or in Table II B, application no. 1, column 8, or a homolog or a fragment thereof;
[1742] (b) a nucleic acid molecule shown in Table I, application no. 1, column 5 or 8, preferably shown in Table I A, application no. 1, in column 5 or in Table I A, application no. 1, column 8 or in Table I B, application no. 1, column 8, preferably the coding region thereof, or a homolog or a fragment thereof;
[1743] (c) a nucleic acid molecule, which, as a result of the degeneracy of the genetic code, can be derived from a polypeptide sequence depicted in column 5 or 8 of Table II, application no. 1, preferably shown in Table II A, application no. 1, in column 5 or in Table II A, application no. 1, column 8 or in Table II B, application no. 1, column 8;
[1744] (d) a nucleic acid molecule having at least 30% identity, preferably at least 40%, 50%, 60%, 70%, 75%, 80%, 85%, 90%, 95%, 96%, 97%, 98%, 99%, 99.5%, with the nucleic acid molecule sequence of a polynucleotide comprising the nucleic acid molecule shown in column 5 or 8 of Table I, application no. 1, preferably shown in Table I A, application no. 1, in column 5 or in Table I A, application no. 1, column 8 or in Table I B column 8, preferably the coding region thereof;
[1745] (e) a nucleic acid molecule encoding a polypeptide having at least 30% identity, preferably at least 40%, 50% 60%, 70%, 75%, 80%, 85%, 90%, 95%, 96%, 97%, 98%, 99%, 99.5%, identity with the amino acid sequence of the polypeptide encoded by the nucleic acid molecule of (a), (b), (c) or (d);
[1746] (f) a nucleic acid molecule which hybridizes with a nucleic acid molecule of (a), (b), (c), (d) or (e) under stringent hybridisation conditions;
[1747] (g) a nucleic acid molecule encoding a polypeptide which can be isolated with the aid of monoclonal or polyclonal antibodies made against a polypeptide encoded by one of the nucleic acid molecules of (a), (b), (c), (d), (e) or (f);

[1748] (h) a nucleic acid molecule encoding a polypeptide comprising the consensus sequence or one or more polypeptide motifs as shown in column 8 of Table IV, application no. 1;
[1749] (i) a nucleic acid molecule encoding a polypeptide having the activity represented by a respective protein as depicted in column 5 of Table II, application no. 1;
[1750] (j) a nucleic acid molecule comprising a polynucleotide which is obtained by amplifying a cDNA library or a genomic library using the primers in Table III, application no. 1, column 8; and
[1751] (k) nucleic acid molecule which is obtainable by screening a suitable nucleic acid library, especially a cDNA library and/or a genomic library, under stringent hybridization conditions with a probe comprising one of the sequences of the nucleic acid molecule of (a), (b), (c), (d), (e), (f), (g), (h), (i) or (j) or with a fragment thereof having at least 15 nt, preferably 20 nt, 30 nt, 50 nt, 100 nt, 200 nt,500 nt, 1000 nt, 1500 nt, 2000 nt or 3000 nt of the nucleic acid molecule complementary to a nucleic acid sequence characterized in (a), (b), (c), (d), (e), (f), (g), (h), (i) or (j);
   or a nucleic acid molecule comprising a sequence which is complementary thereto;
   whereby, preferably, the nucleic acid molecule according to (a), (b), (c), (d), (e), (f), (g), (h), (i), (j) or (k) distinguishes over the sequence depicted in Table I A and/or I B, application no. 1, column 5 or 8, or the coding regions thereof, by one or more nucleotides (especially but not exceeding 5%, preferably 4%, 3%, 2%, 1%, 0.5%, 0.2% or 0.1%). In an embodiment, the nucleic acid molecule of the invention does not consist of the sequence shown in Table I A and/or I B, application no. 1, column 5 or 8, or the coding region thereof. In another embodiment, the nucleic acid molecule of the present invention, preferably the coding region thereof, is at least 30%, 40%, 50%, 60%, 70%, 80%, 90%, 95% identical but less than 100%, 99.999%, 99.99%, 99.9%, 99%, 98%, 97%, 96% or 95% identical to the sequence shown in Table I A and/or I B, application no. 1, column 5 or 8, or the coding region thereof, respectively. In a further embodiment the nucleic acid molecule does not encode the polypeptide sequence shown in Table II A and/or II B, application no. 1, column 5 or 8 but homologs thereof. Accordingly, in one embodiment, the nucleic acid molecule of the present invention encodes in one embodiment a polypeptide which differs at least in one or more amino acids (especially but not exceeding 5%, preferably 4%, 3%, 2%, 1%, 0.5%, 0.2% or 0.1%) from the polypeptide shown in Table II, application no. 1, column 5 or 8 and does not encode a protein of the sequence shown in Table II A and/or II B, application no. 1, column 5 or 8. Accordingly, in one embodiment, the protein encoded by a sequence of a nucleic acid according to (a), (b), (c), (d), (e), (f), (g), (h), (i), (j) or (k) does not consist of the sequence shown in Table I A and/or I B, application no. 1, column 5 or 8, or the coding region thereof. In a further embodiment, the protein of the present invention is at least 30%, 40%, 50%, 60%, 70%, 80%, 90%, 95% identical to protein sequence depicted in Table II A and/or II B, application no. 1, column 5 or 8 but less than 100%, preferably less than 99.999%, 99.99%, 99.9%, 99%, 98%, 97%, 96% or 95% identical to the sequence shown in Table II A and/or II B, application no. 1, column 5 or 8.
   (All the references to Tables I to IV are references to the corresponding lines of Tables I to IV.)

[1752] In a preferred embodiment thereof said nucleic acid molecule according to (a), (b), (c), (d), (e), (f), (g), (h), (i), (j) or (k) encodes a polypeptide which has the activity of the respective polypeptide represented by a protein comprising a polypeptide as depicted in the respective line in column 5 of Table II, application no. 1.

[1753] In another preferred embodiment thereof said nucleic acid molecule according to (a), (b), (c), (d), (e), (f), (g), (h), (i), (j) or (k) confers a generation or an increase of the respective fine chemical in a non-human organism or a part thereof as compared to a corresponding wild-type non-human organism or part thereof.

[1754] In another preferred embodiment thereof said nucleic acid molecule according to (a), (b), (c), (d), (e), (f), (g), (h), (i), (j) or (k) encodes a polypeptide which has the activity of the respective polypeptide represented by a protein as depicted in the respective line in column 5 of Table II, application no. 1, and confers a generation or an increase of the respective fine chemical in a non-human organism or a part thereof as compared to a corresponding wild-type non-human organism or part thereof.

[1755] In one embodiment the invention relates to the aforementioned nucleic acid molecules, which can be isolated advantageously from yeast, fungi, viruses, algae, bacteria, for example from Charophyceae such as the genera Chara, Nitella e.g. the species Chara globularis, Chara vulgaris, Nitella flexilis, Chlorophyceae such as the genera Acrosiphonia, Spongomorpha, Urospora, Bryopsis, Pseudobryopsis, Trichosolen, Dichotomosiphon, Caulerpa, Rhipilia, Blastophysa, Avrainvillea, Chlorodesmis, Codium, Espera, Halicystis, Halimeda, Penicillus, Pseudocodium, Rhipiliopsis, Rhipocephalus, Tydemania, Udotea, Derbesia, Acrochaete, Aphanochaete, Bolbocoleon, Chaetobolus, Chaetonema, Chaetophora, Chlorotylium, Desmococcus, Draparnaldia, Draparnaldiopsis, Ectochaete, Endophyton, Entocladia, Epicladia, Internoretia, Microthamnion, Ochlochaete, Phaeophila, Pilinella, Pringsheimiella, Protoderma, Pseudendoclonium, Pseudodictyon, Pseudopringsheimia, Pseudulvella, Schizomeris, Stigeoclonium, Thamniochaete, Ulvella, Pilinia, Tellamia, Helicodictyon, Actidesmium, Ankyra, Characium, Codiolum, Sykidion, Keratococcus, Prototheca, Bracteacoccus Chlorococcum, Excentrosphaera, Hormidium, Oophila, Schroederia, Tetraedron, Trebouxia Chlorosarcinopsis, Gomphonitzschia, Coccomyxa, Dactylothece, Diógenes, Disporá, Gloeocystis, Mycanthococcus, Ourococcus, Coelastrum, Dicranochaete, Botryococcus, Dictyosphaerium, Dimorphococcus, Chlorochytrium, Kentrosphaera, Phyllobium, Gomontia, Hormotila, Euastropsis, Hydrodictyon, Pectodictyon, Pediastrum, Sorastrum, Tetrapedia, Acanthosphaera, Echinosphaerella, Echinosphaeridium, Errerella, Gloeoactinium, Golenkeniopsis Golenkinia, Micractinium, Ankistrodesmus, Chlorella, Chodatella, Closteriopsis, Cryocystis, Dactylococcus, Dematractum, Eremosphaera, Eutetramorus, Franceia, Glaucocystis, Gloeotaenium, Kirchneriella, Lagerheimiella, Monoraphidium, Nannochloris, Nephrochlamys, Nephrocytium, Oocystis, Oonephris, Pachycladon, Palmellococcus, Planktosphaeria, Polyedriopsis, Pseudoraciborskia, Quadrigula, Radiococcus, Rochiscia, Scotiella, Selanastrum, Thorakochloris, Treubaria, Trochiscia, Westella, Zoochlorella, Ostreobium, Phyllosiphon, Protosiphon, Rhodochytrium, Actinastrum, Coronastrum, Crucigenia, Dictymocystis, Enallax, Scenedesmus, Selenastrum, Tetradesmus, Tetrallantos, Tetrastrum, Chlorosarcina, Anadyomene, Valoniopsis, Ventricaria, Basicladia, Chaetomorpha, Cladophora, LolaPithophoraRhizoclonium Chaetosphaeridium, Conochaete, Coleochaete, Oligochaetophora, Polychaetophora, Cylindrocapsa, Gongrosira, Protococcus, Acetabularia, Batophora, Bornetella, Dasycladus, Halicoryne, Neomeris, Elakatothrix, Raphidonema, Microspora, Bulbochaete, Oedocladium, Oedogonium, Prasiola, Rosenvingiella, Schizogonium, Apjohnia, Chamaedoris, Cladophoropsis, Siphonocladus, Spongocladia, Boergesenia, Boodlea, Cystodictyon, Dictyosphaeria, Ernodesmis, Microdictyon, Struvea, Valonia, Sphaeroplea, Malleochloris, Stylosphaeridium, Gloeococcus, Palmella, Palmodictyon, Palmophyllum, Pseudospherocystis, Sphaerocystis, Urococcus, Apiocystis, Chaetopeltis, Gemellicystis, Paulschulzia, Phacomyxa, Pseudotetraspora, Schizochlamys, Tetraspora, Cephaleuros, Ctenocladus, Epibolium, Leptosira, Trentepohlia, Diplochaete, Monostroma, Binuclearia, Geminella, Klebsormidium, Planetonema, Radiofilum, Stichococcus, Ulothrix, Uronema, Blidingia, Capsosiphon, Chloropelta, Enteromorpha, Percursaria, Ulva, Ulvaria, Brachiomonas, Carteria, Chlainomonas, Chlamydomonas, Chlamydonephris, Chlorangium, Chlorogonium, Cyanidium, Fortiella, Glenomonas, Gloeomonas, Hyalogonium, Lobomonas Polytoma, Pyramichlamys, Scourfieldia, Smithsonimonas, Sphaerellopsis, Sphenochloris, Spirogonium, Collodictyon, Dunaliella, Haematococcus, Stephanosphaera, Coccomonas, Dysmorphococcus, Phacotus, Pteromonas, Thoracomonas, Wislouchiella, Mascherina, Pyrobotrys, Spondylomorum, Eudorina, Gonium, Oltmannsiella, Pandorina, Platydorina, Pleodorina, Stephanoon, Volvox, Volvulina, Actinotaenium, Arthrodesmus, Bambusina Closterium, Cosmarium, Desmidium, Euastrum, Groenbladia, Hyalotheca, Micrasterias, Penium, Phymatodocis, Pleurotaenium, Sphaerozosma, Spinoclosterium, Spinocosmarium, Spondylosium, Staurastrum, Tetmemorus, Triploceras, Xanthidium, Cylindrocystis, Genicularia, Gonatozygon, Mesotaenium, Netrium, Roya, Spirotaenia, Cosmocladium, Debarya, Docidium, Euastridium, Hallasia, Mougeotia, Mougeotiopsis, Sirogonium, Spirogyra, Staurodesmus, Teilingia, Zygnema, Zygogonium, e.g. the species Caulerpa taxifolia, Prototheca wickerhamii, Ankistrodesmus falcatus, Chlorella ellipsoidea, Chlorella pyrenoidosa, Clorella sorokiniana, Chlorella vulgaris, Scenedesmus obliquus, Scenedesmus quadricauda, Selenastrum capricornutum, Selenastrum undecimnotata, Cladophora glomerata, Chlamydomonas eugametos, Chlamydomonas reinhardtii, Cyanidium caldarium, Dunaliella salina, Dunaliella tertiolecta, Euglena gracilis, Haematococcus pluvialis, Coniugatophyceae, Prasinophyceae Trebouxiophyceae, Ulvophyceae, Chlorodendraceae, Pedinomonadales, Halosphaeraceae, Pterospermataceae, Monomastigaceae, Pyramimonadaceae, Chlorodendraceae such as the genera Prasinocladus e.g. the species Prasinocladus ascus, Halosphaeraceae, Pedinomonadales, Pedinomonadaceae such as the genera Pedinomonas, Pterospermataceae such as the genera Pachysphaera, Pterosperma, Halosphaera, Pyramimonas, Bacillariophyceae, Chrysophyceae, Craspedophyceae, Euglenophyceae, Prymnesiophyceae, Phaeophyceae, Dinophyceae, Rhodophyceae, Xanthophyceae, Prasinophyceae such as the genera Nephroselmis, Prasinococcus, Scherffelia, Tetraselmis, Mantoniella, Ostreococcus e.g. the species Nephroselmis olivacea, Prasinococcus capsulatus, Scherffelia dubia, Tetraselmis chui, Tetraselmis suecica, Mantoniella squamata, Ostreococcus tauri, especially such as Acetobacter (subgen. Acetobacter) aceti; Acidithiobacillus ferrooxidans; Acinetobacter sp.; Actinobacillus sp; Aeromonas salmonicida; Agrobacterium tumefaciens; Aquifex aeolicus; Arcanobacterium pyogenes; Aster yellows phytoplasma; Bacillus sp.; Bifidobacterium sp.; Borrelia burgdorferi; Brevibacterium linens; Brucella melitensis; Buchnera sp.; Butyrivibrio fibrisolvens; Campylobacter jejuni; Caulobacter crescentus; Chlamydia sp.; Chlamydophila sp.; Chlorobium limicola; Citrobacter rodentium; Clostridium sp.; Comamonas testosteroni; Corynebacterium sp.; Coxiella burnetii; Deinococcus radiodurans; Dichelobacter nodosus; Edwardsiella ictaluri; Enterobacter sp.; Erysipelothrix rhusiopathiae; E. coli; Flavobacterium sp.; Francisella tularensis; Frankia sp. Cpl1; Fusobacterium nucleatum; Geobacillus stearothermophilus; Gluconobacter oxydans; Haemophilus sp.; Helicobacter pylori; Klebsiella pneumoniae; Lactobacillus sp.; Lactococcus lactis; Listeria sp.; Mannheimia haemolytica; Mesorhizobium loti; Methylophaga thalassica; Microcystis aeruginosa; Microscilla sp. PRE1; Moraxella sp. TA144; Mycobacterium sp.; Mycoplasma sp.; Neisseria sp.; Nitrosomonas sp.; Nostoc sp. PCC 7120; Novosphingobium aromaticivorans; Oenococcus oeni; Pantoea citrea; Pasteurella multocida; Pediococcus pentosaceus; Phormidium foveolarum; Phytoplasma sp.; Plectonema boryanum; Prevotella ruminicola; Propionibacterium sp.; Proteus vulgaris; Pseudomonas sp.; Ralstonia sp.; Rhizobium sp.; Rhodococcus equi; Rhodothermus marinus; Rickettsia sp.; Riemerella anatipestifer; Ruminococcus flavefaciens; Salmonella sp.; Selenomonas ruminantium; Serratia entomophila; Shigella sp.; Sinorhizobium meliloti; Staphylococcus sp.; Streptococcus sp.; Streptomyces sp.; Synechococcus sp.; Synechocystis sp. PCC 6803; Thermotoga maritima; Treponema sp.; Ureaplasma urealyticum; Vibrio cholerae; Vibrio parahaemolyticus; Xylella fastidiosa; Yersinia sp.; Zymomonas mobilis, preferably Salmonella sp. or E. coli, preferably from yeasts such as from the genera Saccharomyces, Pichia, Candida, Hansenula, Torulopsis or Schizosaccharomyces, or from plants, such as monocotyledonous or dicotyledonous plants, preferably selected from the group consisting of Anacardiaceae such as the genera Pistacia, Mangifera, Anacardium e.g. the species Pistacia vera [pistachios, Pistazie], Mangifer indica [Mango] or Anacardium occidentale [Cashew]; Asteraceae such as the genera Calendula, Carthamus, Centaurea, Cichorium, Cynara, Helianthus, Lactuca, Locusta, Tagetes, Valeriana e.g. the species Calendula officinalis [Marigold], Carthamus tinctorius [safflower], Centaurea cyanus [cornflower], Cichorium intybus [blue daisy], Cynara scolymus [Artichoke], Helianthus annus [sunflower], Lactuca sativa, Lactuca crispa, Lactuca esculenta, Lactuca scariola L. ssp. sativa, Lactuca scariola L. var. integrata, Lactuca scariola L. var. integrifolia, Lactuca sativa subsp. romana, Locusta communis, Valeriana locusta [lettuce], Tagetes lucida, Tagetes erecta or Tagetes tenuifolia [Marigold]; Apiaceae such as the genera Daucus e.g. the species Daucus carota [carrot]; Betulaceae such as the genera Corylus e.g. the species Corylus avellana or Corylus colurna [hazelnut]; Boraginaceae such as the genera Borago e.g. the species Borago officinalis [borage]; Brassicaceae such as the genera Brassica, Melanosinapis, Sinapis, Arabadopsis e.g. the species Brassica napus, Brassica rapa ssp. [canola, oilseed rape, turnip rape], Sinapis arvensis Brassica juncea, Brassica juncea var. juncea, Brassica juncea var. crispifolia, Brassica juncea var. foliosa, Brassica nigra, Brassica sinapioides, Melanosinapis communis [mustard], Brassica oleracea [fodder beet] or Arabidopsis thaliana; Bromeliaceae such as the genera Anana, Bromelia e.g. the species Anana comosus, Ananas ananas or Bromelia comosa [pineapple]; Caricaceae such as the genera Carica e.g. the species Carica papaya [papaya]; Cannabaceae such as the genera Cannabis e.g. the species Cannabis sative [hemp], Convolvulaceae such as the genera Ipomea, Convolvulus e.g. the species Ipomoea batatus, Ipomoea pandurata, Convolvulus batatas, Convolvulus tiliaceus, Ipomoea fastigiata, Ipomoea tiliacea, Ipomoea triloba or Convolvulus panduratus [sweet potato, Man of the Earth, wild potato], Chenopodiaceae such as the genera Beta, i.e. the species Beta vulgaris, Beta vulgaris var. altissima, Beta vulgaris var. Vulgaris, Beta maritima, Beta vulgaris var. perennis, Beta vulgaris var. conditiva or Beta vulgaris var. esculenta [sugar beet]; Cucurbitaceae such as the genera Cucubita e.g. the species Cucurbita maxima, Cucurbita mixta, Cucurbita pepo or Cucurbita moschata [pumpkin, squash]; Elaeagnaceae such as the genera Elaeagnus e.g. the species Olea europaea [olive]; Ericaceae such as the genera Kalmia e.g. the species Kalmia latifolia, Kalmia angustifolia, Kalmia microphylla, Kalmia polifolia, Kalmia occidentalis, Cistus chamaerhodendros or Kalmia lucida [American laurel, broad-leafed laurel, calico bush, spoon wood, sheep laurel, alpine laurel, bog laurel, western bog-laurel, swamp-laurel]; Euphorbiaceae such as the genera Manihot, Janipha, Jatropha, Ricinus e.g. the species Manihot utilissima, Janipha manihot, Jatropha manihot, Manihot aipil, Manihot dulcis, Manihot manihot, Manihot melanobasis, Manihot esculenta [manihot, arrowroot, tapioca, cassava] or Ricinus communis [castor bean, Castor Oil Bush, Castor Oil Plant, Palma Christi, Wonder Tree]; Fabaceae such as the genera Pisum, Albizia, Cathormion, Feuillea, Inga, Pithecolobium, Acacia, Mimosa, Medicajo, Glycine, Dolichos, Phaseolus, Soja e.g. the species Pisum sativum, Pisum arvense, Pisum humile [pea], Albizia berteriana, Albizia julibrissin, Albizia lebbeck, Acacia berteriana, Acacia littoralis, Albizia berteriana, Albizzia berteriana, Cathormion berteriana, Feuillea berteriana, Inga fragrans, Pithecellobium berterianum, Pithecellobium fragrans, Pithecolobium berterianum, Pseudalbizzia berteriana, Acacia julibrissin, Acacia nemu, Albizia nemu, Feuilleea julibrissin, Mimosa julibrissin, Mimosa speciosa, Sericanrda julibrissin, Acacia lebbeck, Acacia macrophylla, Albizia lebbek, Feuilleea lebbeck, Mimosa lebbeck, Mimosa speciosa [bastard logwood, silk tree, East Indian Walnut], Medicago sativa, Medicago falcata, Medicago varia [alfalfa], Glycine max [soybean], Dolichos soja, Glycine gracilis, Glycine hispida, Phaseolus max or Soja hispida; Geraniaceae such as the genera Pelargonium, Cocos, Oleum e.g. the species Cocos nucifera, Pelargonium grossularioides or Oleum cocois [coconut]; Gramineae such as the genera Saccharum e.g. the species Saccharum officinarum; Juglandaceae such as the genera Juglans, Wallia e.g. the species Juglans regia, Juglans ailanthifolia, Juglans sieboldiana, Juglans cinerea, Wallia cinerea, Juglans bixbyi, Juglans californica, Juglans hindsii, Juglans intermedia, Juglans jamaicensis, Juglans major, Juglans microcarpa, Juglans nigra or Wallia nigra [walnut, black walnut, common walnut, persian walnut, white walnut, butternut, black walnut]; Lauraceae such as the genera Persea, Laurus e.g. the species laurel Laurus nobilis [bay, laurel, bay laurel, sweet bay], Persea americana Persea americana, Persea gratissima or Persea persea [avocado]; Leguminosae such as the genera Arachis e.g. the species Arachis hypogaea [peanut]; Linaceae such as the genera Linum, Adenolinum e.g. the species Linum usitatissimum, Linum humile, Linum austriacum, Linum bienne, Linum angustifolium, Linum catharticum, Linum flavum, Linum grandiflorum, Adenolinum grandiflorum, Linum lewisii, Linum narbonense, Linum perenne, Linum perenne var. lewisii, Linum pratense or Linum trigynum [flax, linseed]; Lythrarieae such as the genera Punica e.g. the species Punica granatum [pomegranate]; Malvaceae such as the genera Gossypium e.g. the species Gossypium hirsutum, Gossypium arboreum, Gossypium barbadense, Gossypium herbaceum or Gossypium thurberi [cotton]; Musaceae such as the genera Musa e.g. the species Musa nana, Musa acuminate, Musa paradisiaca, Musa spp. [banana]; Onagraceae such as the genera Camissonia, Oenothera e.g. the species Oenothera biennis or Camissonia brevipes [primrose, evening primrose]; Palmae such as the genera Elacis e.g. the species Elaeis guineensis [oil plam]; Papaveraceae such as the genera Papaver e.g. the species Papaver orientale, Papaver rhoeas, Papaver dubium [poppy, oriental poppy, corn poppy, field poppy, shirley poppies, field poppy, longheaded poppy, long-pod poppy]; Pedaliaceae such as the genera Sesamum e.g. the species Sesamum indicum [sesame]; Piperaceae such as the genera Piper, Artanthe, Peperomia, Steffensia e.g. the species Piper aduncum, Piper amalago, Piper angustifolium, Piper auritum, Piper betel, Piper cubeba, Piper longum, Piper nigrum, Piper retrofractum, Artanthe adunca, Artanthe elongata, Peperomia elongata, Piper elongatum, Steffensia elongata. [Cayenne pepper, wild pepper]; Poaceae such as the genera Hordeum, Secale, Avena, Sorghum, Andropogon, Holcus, Panicum, Oryza, Zea, Triticum e.g. the species Hordeum vulgare, Hordeum jubaturn, Hordeum murinum, Hordeum secalinum, Hordeum distichon Hordeum aegiceras, Hordeum hexastichon, Hordeum hexastichum, Hordeum irregulare, Hordeum sativum, Hordeum secalinum [barley, pearl barley, foxtail barley, wall barley, meadow barley], Secale cereale [rye], Avena sativa, Avena fatua, Avena byzantina, Avena fatua var. sativa, Avena hybrida [oat], Sorghum bicolor, Sorghum halepense, Sorghum saccharatum, Sorghum vulgare, Andropogon drummondii, Holcus bicolor, Holcus sorghum, Sorghum aethiopicum, Sorghum arundinaceum, Sorghum caffrorum, Sorghum cernuum, Sorghum dochna, Sorghum drummondii, Sorghum durra, Sorghum guineense, Sorghum lanceolatum, Sorghum nervosum, Sorghum saccharatum, Sorghum subglabrescens, Sorghum verticilliflorum, Sorghum vulgare, Holcus halepensis, Sorghum miliaceum millet, Panicum militaceum [Sorghum, millet], Oryza sativa, Oryza latifolia [rice], Zea mays [corn, maize] Triticum aestivum, Triticum durum, Triticum turgidum, Triticum hybernum, Triticum macha, Triticum sativum or Triticum vulgare [wheat, bread wheat, common wheat], Proteaceae such as the genera Macadamia e.g. the species Macadamia intergrifolia [macadamia]; Rubiaceae such as the genera Coffea e.g. the species Cofea spp., Coffea arabica, Coffea canephora or Coffea liberica [coffee]; Scrophulariaceae such as the genera Verbascum e.g. the species Verbascum blattaria, Verbascum chaixii, Verbascum densiflorum, Verbascum lagurus, Verbascum longifolium, Verbascum lychnitis, Verbascum nigrum, Verbascum olympicum, Verbascum phlomoides, Verbascum phoenicum, Verbascum pulverulentum or Verbascum thapsus [mullein, white moth mullein, nettle-leaved mullein, dense-flowered mullein, silver mullein, long-leaved mullein, white mullein, dark mullein, greek mullein, orange mullein, purple mullein, hoary mullein, great mullein]; Solanaceae such as the genera Capsicum, Nicotiana, Solanum, Lycopersicon e.g. the species Capsicum annuum, Capsicum annuum var. glabriusculum, Capsicum frutescens [pepper], Capsicum annuum [paprika], Nicotiana tabacum, Nicotiana alata, Nicotiana attenuata, Nicotiana glauca, Nicotiana langsdorffii, Nicotiana obtusifolia, Nicotiana quadrivalvis, Nicotiana repanda, Nicotiana rustica, Nicotiana sylvestris [tobacco], Solanum tuberosum [potato], Solanum melongena [egg-plant] (Lycopersicon esculentum, Lycopersicon lycopersicum, Lycopersicon pyriforme, Solanum integrifolium or Solanum lycopersicum [tomato]; Sterculiaceae such as the genera Theobroma e.g. the species Theobroma cacao [cacao]; Theaceae such as the genera Camellia e.g. the species Camellia sinensis) [tea]; especially A. thaliana, maize, wheat, rye, oat, triticale, rice, barley, soybean, peanut, cotton, borage, sunflower, sugar cane, sugar beet, linseed, primrose, rapeseed, canola and turnip rape, manihot, pepper, sunflower, tagetes, solanaceous plant such as potato, tobacco, eggplant and tomato, Vicia species, pea, alfalfa, bushy plants such as coffee, cacao, tea, Salix species, trees such as oil palm, coconut, perennial grass, such as ryegrass and fescue, and forage crops, such as alfalfa and clover and from spruce, pine or fir for example.

[1756] More preferably said nucleic acid molecules can be isolated from S. cerevisiae, E. coli, Azotobacter vinelandii, Thermus thermophilus or Synechocystis sp. or plants, preferably Arabidopsis thaliana, Brassica napus, Glycine max, Zea mays, Gossypium or Oryza sativa.

[1757] The FCRPs of the present invention are preferably produced by recombinant DNA techniques. For example, a nucleic acid molecule encoding the protein is cloned into an expression vector, for example into a binary vector, the expression vector is introduced into a host cell, for example into cells of the Arabidopsis thaliana wild type NASC N906 or any other plant cell as described above and/or below and/or in the examples, and the FCRP is expressed in said host cell.

[1758] In an embodiment of the present invention, the respective FCRP is localized after expression as indicated in column 6 of Table II, e.g. non-targeted, mitochondrial or plastidic.

[1759] In an embodiment of the present invention the FCRP is preferably produced in an compartment of the cell, e.g. in an organelle, for example in plastids or mitochondria. Ways of introducing nucleic acids into organelles, for example into plastids or mitochondria, and producing proteins in this compartment are known to the person skilled in the art.

[1760] The respective nucleic acid sequence according to the invention mentioned above is advantageously functionally joined to a nucleic acid sequence encoding a transit peptide, in such a manner that a preprotein is translated, which is able to direct the polypeptide to the organelle such as to plastids or mitochondria. In another preferred embodiment the nucleic acids according to the invention mentioned above is advantageously functionally joined to a promotor region functional in plastids or mitochondria like for example the RNA operon promoter fused to the 5′UTR of the rbcL gene and in another preferred embodiment joined to a plastome sequences homologous to the integration sites. Example for useful integration sites are the trnV-rps12/7 (Skidar et al., Plant Cell Rep. 18, 20 (1998), and other reports), thr rbvL-aacD site (Svab et al., Proc. Natl. Acad. Sci. USA 90, 913 (1993)), the trnI-trnA site (De Cosa et al., Nat. Biotech. 19, 71 (2001)), the rps7-ndhB site (Hou et al., Transgenic Res. 12, 111 (2003)) and the ndhF-trnL site Zhang et al., Plant Physiol. 127, 131 (2001c)).

[1761] The nucleic acid sequence coding for the transit peptide is advantageously derived from a nucleic acid sequence encoding a protein finally resided in the plastids or mitochondria and is stemming from an organism selected from the group consisting of the genera Acetabularia, Arabidopsis, Brassica, Capsicum, Chlamydomonas, Cucurbita, Daucus, Dunaliella, Euglena, Flaveria, Glycine, Helianthus, Hordeum, Lactua, Lemna, Lolium, Lycopersion, Malus, Meticago, Mesembryanthemum, Nicotiana, Oenotherea, Oryza, Petunia, Phaseolus, Physcomitrella, Pinus, Pisum, Pyrus, Raphanus, Saccharum, Silene, Sinapis, Solanum, Spinacea, Stevia, Synechococcus,Triticum and Zea.

[1762] Preferably the plastidal transit peptide is derived from the nucleic acid sequence encoding a protein selected from the group consisting of ribulose bisphosphate carboxylase/oxygenase, 5′-enolpyruvyl-shikimate-3-phosphate synthase, acetolactate synthase, chloroplast ribosomal protein CS17, Cs protein, ferredoxin, plastocyanin, ribulose bisphosphate carboxylase activase, tryptophan synthase, acyl carrier protein, plastid chaperonin-60, cytochrome c552, 22-kDA heat shock protein, 33-kDa Oxygen-evolving enhancer protein 1, ATP synthase y subunit, ATP synthase σ subunit, chlorophyll-a/b-binding proteinII-1, Oxygen-evolving enhancer protein 2, Oxygen-evolving enhancer protein 3, photosystem I: P21, photosystem I: P28, photosystem I: P30, photosystem I: P35, photosystem I: P37, glycerol-3-phosphate acyltransferases, chlorophyll a/b binding protein, CAB2 protein, hydroxymethyl-bilane synthase, pyruvate-orthophosphate dikinase, CAB3 protein, plastid ferritin, ferritin, early light-inducible protein, glutamate-1-semialdehyde aminotransferase, protochlorophyllide reductase, starch-granule-bound amylase synthase, light-harvesting chlorophyll a/b-binding protein of photosystem II, major pollen allergen Lol p 5a, plastid CIpB ATP-dependent protease, superoxide dismutase, ferredoxin NADP oxidoreductase, 28-kDa ribonucleoprotein, 31-kDa ribonucleoprotein, 33-kDa ribonucleoprotein, acetolactate synthase, ATP synthase CFO subunit 1, ATP synthase CFO subunit 2, ATP synthase CFO subunit 3, ATP synthase CFO subunit 4, cytochrome f, ADP-glucose pyrophosphorylase, glutamine synthase, glutamine synthase 2, carbonic anhydrase, GapA protein, heat-shock-protein hsp21, phosphate translocator, plastid CIpA ATP-dependent protease, plastid ribosomal protein CL24, plastid ribosomal protein CL9, plastid ribosomal protein PsCL18, plastid ribosomal protein PsCL25, DAHP synthase, starch phosphorylase, root acyl carrier protein II, betaine-aldehyde dehydrogenase, GapB protein, glutamine synthetase 2, phosphoribulokinase, nitrite reductase, ribosomal protein L12, ribosomal protein L13, ribosomal protein L21, ribosomal protein L35, ribosomal protein L40, triose phosphate-3-phosphoglyerate-phosphate translocator, ferredoxin-dependent glutamate synthase, glyceraldehyde-3-phosphate dehydrogenase, NADP-dependent malic enzyme and NADP-malate dehydrogenase.

[1763] In an embodiment the plastome sequences are preferential derived from the plastome of the target organisms themselves and are advantegously derived from one of the following intergration sites: trnV-rps12/7 (Skidar et al., Plant Cell Rep. 18, 20 (1998) and other reports), rbvL-aacD (Svab et al., Proc. Natl. Acad. Sci. USA 90, 913 (1993)), trnl-trnA (De Cosa et al., Nat. Biotech. 19, 71 (2001)), rps7-ndhB (Hou et al., Transgenic Res. 12, 111 (2003)) or ndhF-trnL site Zhang et al., Plant Physiol. 127, 131 (2001c)).

[1764] Advantageously the mitochondrial transit peptide is derived from the nucleic acid sequence encoding a protein selected from the group consisting of

[1765] 22 kDA heat shock protein; 70 kDA heat shock protein; 83 kDA heat shock protein; 40S ribosomal protein S19; 50S ribosomal protein L15; ribosomal protein L29; 22 kDA PSST protein of complex I; 2-oxoacid dehydrogenase family protein; 2-oxoglutarate/malate translocator; 3-methyl-2-oxobutanoate hydroxymethyltransferase; 3-Methylcrotonyl-coenzyme A carboxylase (MCCase); 7,8-Dihydropteroate synthase (DHPS)/6-hydroxymethyl-7,8-dihydropterine pyrophosphokinase (HPPK); aconitate hydratase; acyl carrier protein (ACP); ADP/ATP translocase; alanyl-tRNA synthetase; alcohol dehydrogenase (ADH); alternative oxidase (AOX); aminoacyl-tRNA ligase; asparate aminotransferase; ATP synthase alpha subunit; ATP synthase beta subunit; ATP synthase delta subunit; ATP synthase epsilon subunit; ATP synthase gamma subunit; ATP-dependent Clp protease-proteolytic subunit; Chaperonin 60-CPN60; Chaperonin 60 (2)-CPN60-2; Chaperonin 60(1)-CPN60-1; citrate synthase; cytochrome b-c1 complex subunit Rieske FeS Protein; cytochrome c reductase-processing peptidase subunit II; dihydrolipoamide S-acetyltransferase; farnesyl-diphosphate synthase 1; formate dehydrogenase; fumarate hydratase; gamma carbonic anhydrase protein (gammaCA); gamma carbonic anhydrase-like protein 1 (gammaCAL1); gamma carbonic anhydrase-like protein 2 (gammaCAL2); gamma-aminobutyric acid transaminase (GABA-T); glutathione reductase (GR); glycine decarboxylase subunit H; glycine decarboxylase subunit L; glycine decarboxylase subunit P; glycine decarboxylase subunit T; isovaleryl-CoA dehydrogenase (IVD); lipoamide dehydrogenase; malate oxidoreductase; manganese superoxide dismutase (Mn)SOD; methylmalonate-semialdehyde dehydrogenase; mitochondrial-processing peptidase beta subunit (MPP); mitochondrial-processing peptidase subunit alpha (MPP); monodehydroascorbate reductase (MDHAR); NAD dependent isocitrate dehydrogenase; NAD dependent malate dehydrogenase; NAD-dependent malic enzyme; NAD-dependent malic enzyme 59 kDa isoform; NAD-dependent malic enzyme 62 kDa isoform; NAD-dependent malic enzyme 65 kDa isoform; NADH ubiquinone oxidoreductase 29 kDa subunit; NADH-ubiquinone oxidoreductase 18 kDa subunit; NADH-ubiquinone oxidoreductase 20 kDa subunit; NADH-ubiquinone oxidoreductase 23 kDa subunit; NADHubiquinone oxidoreductase 75 kDa subunit; NADP dependent isocitrate dehydrogenase; NADP dependent malate dehydrogenase; nucleoside diphosphate kinase; nucleoside diphosphate kinase III; o-acetylserine (thiol) lyase (OAS-TL); propionyl-CoA carboxylase; protoporphyrinogen IX oxidase; pyruvate dehydrogenase E1 component subunit alpha; serine acetyltransferase (SAT); serine hydroxymethyltransferase; succinate dehydrogenase (SDH); succinic semialdehyde dehydrogenase (SSADH); succinyl-CoA ligase (GDP-forming) alpha-chain; succinyl-CoA ligase [GDP-forming] subunit beta; thiosulfate sulfurtransferase; threonyl-tRNA synthetase; trans-2-enoyl-CoA reductase; translocase inner membrane (TIM); translocase outer membrane (TOM); tRNA synthetase class I and ubiquinol cytochrome C oxidoreductase complex.

[1766] Further transit peptids and details thereto have been described above.

[1767] In another embodiment of the present invention the FCRP is produced without further targeting signal (e.g. as mentioned herein), e.g. in the cytoplasm of the cell. Ways of producing proteins without artificial targeting are known to the person skilled in the art.

[1768] The nucleic acid sequences used in the process are advantageously introduced in a nucleic acid construct, preferably an expression cassette, which makes possible the expression of the nucleic acid molecules in a non-human organism, advantageously a plant or a microorganism such as an algae, advantegously non-targeted or in an organelle, like plastids or mitochondria , respectively, of those non-human organisms.

[1769] Accordingly, the invention also relates to a nucleic acid construct, preferably to an expression construct, comprising the nucleic acid molecule of the present invention functionally linked to one or more regulatory elements or signals.

[1770] As described herein, the nucleic acid construct can also comprise further genes, which are to be introduced into the non-human organisms or cells. It is possible and advantageous to introduce into, and express in, the host organisms regulatory genes such as genes for inductors, repressors or enzymes, which, owing to their biological or enzymatic activity, engage in the regulation of one or more genes of the respective biosynthetic pathway. These genes can be of heterologous or homologous origin. Moreover, further biosynthesis genes may advantageously be present, or else these genes may be located on one or more further nucleic acid constructs. Genes, which are advantageously employed as further biosynthesis genes are genes of the fatty acid metabolism, amino acid metabolism, of glycolysis, of the tricarboxylic acid metabolism or their combinations. As described herein, regulator sequences or factors can have a positive effect on preferably the gene expression of the genes introduced, thus increasing it. Thus, an enhancement of the regulator elements may advantageously take place at the transcriptional level by using strong transcription signals such as promoters and/or enhancers. In addition, however, an enhancement of translation is also possible, for example by increasing mRNA stability or by inserting a translation enhancer sequence.

[1771] In principle, the nucleic acid construct can comprise the herein described regulator sequences and further sequences relevant for the expression of the comprised genes. Thus, the nucleic acid construct of the invention can be used as expression cassette and thus can be used directly for introduction into the plant, or else they may be introduced into a vector. Accordingly in one embodiment the nucleic acid construct is an expression cassette comprising a microorganism promoter or a microorganism terminator or both, beneath the nucleic acid molecule according to the invention. In another embodiment the expression cassette encompasses a plant promoter or a plant terminator or both, beneath the nucleic acid molecule according to the invention. In another embodiment the expression cassette encompasses sequences for transcription by organelle RNA polymerases, beneath the nucleic acid molecule according to the invention. In another embodiment an expression cassette encompasses a nucleic acid molecule encoding for a transit peptide, beneath the gene according to the invention.

[1772] In a preferred embodiment a nucleic acid construct, for example an expression cassette, comprises upstream, i.e. at the 5′ end of the encoding sequence, a promoter and downstream, i.e. at the 3′ end, a polyadenylation signal and optionally other regulatory elements which are operably linked to the intervening encoding sequence with one of the nucleic acids as depicted in the respective line in Table I, application no. 1, column 5 or 8, preferably the coding region thereof, or a homolog or a fragment thereof. By an operable linkage is meant the sequential arrangement of promoter, encoding sequence, terminator, optionally other regulatory elements and optionally targeting sequences in such a way that each of the regulatory elements/targeting sequence can fulfill its function in the expression of the encoding sequence in due manner. In one embodiment the sequences preferred for operable linkage are targeting sequences for ensuring subcellular localization in organelles, like plastids or mitochondria. However, targeting sequences for ensuring subcellular localization in the endoplasmic reticulum (=ER), in the nucleus, in oil corpuscles or other compartments may also be employed as well as translation promoters such as the 5′ lead sequence in tobacco mosaic virus (Gallie et al., Nucl. Acids Res. 15, 8693 (1987)).

[1773] As an example, a nucleic acid construct, like an expression cassette may, for example, contain a constitutive promoter or a tissue-specific promoter (preferably the USP or napin promoter), the gene to be expressed and a ER retention signal. For the ER retention signal the KDEL amino acid sequence (lysine, aspartic acid, glutamic acid, leucine) or the KKX amino acid sequence (lysine-lysine-X-stop, wherein X means every other known amino acid) is preferably employed.

[1774] In an embodiment, the invention relates to an expression cassette, comprising
[1775] 1) a promoter, prefereably a promoter selected from the group consisting of Big35S, PCUbi, Super and USP;
[1776] 2) a nucleic acid molecule selected from the group consisting of
   [1777] (a) a nucleic acid molecule encoding a polypeptide shown in Table II, application no. 1, column 5 or 8, preferably shown in Table II A, application no. 1, column 5, or in Table II A, application no. 1, column 8, or in Table II B, application no. 1, column 8, or a homolog or a fragment thereof;
   [1778] (b) a nucleic acid molecule shown in Table I, application no. 1, column 5 or 8, preferably shown in Table I A, application no. 1, column 5, or in Table I A, application no. 1, column 8, or in Table I B, application no. 1, column 8, preferably the coding region thereof, or a homolog or a fragment thereof;
   [1779] (c) a nucleic acid molecule, which, as a result of the degeneracy of the genetic code, can be derived from a polypeptide sequence depicted in column 5 or 8 of Table II, application no. 1, preferably shown in Table II A, application no. 1, column 5, or in Table II A, application no. 1, column 8, or in Table II B, application no. 1, column 8;
   [1780] (d) a nucleic acid molecule having at least 30% identity, preferably at least 40%, 50%, 60%, 70%, 75%, 80%, 85%, 90%, 95%, 96%, 97%, 98%, 99%, 99.5%, with the nucleic acid molecule sequence of a polynucleotide comprising the nucleic acid molecule shown in column 5 or 8 of Table I, application no. 1, preferably shown in Table I A, application no. 1, column 5, or in Table I A, application no. 1, column 8,or in Table I B, application no. 1, column 8, preferably the coding region thereof;
   [1781] (e) a nucleic acid molecule encoding a polypeptide having at least 30% identity, preferably at least 40%, 50% 60%, 70%, 75%, 80%, 85%, 90%, 95%, 96%, 97%, 98%, 99%, 99.5%, identity with the amino acid sequence of the polypeptide encoded by the nucleic acid molecule of (a), (b), (c) or (d);
   [1782] (f) a nucleic acid molecule which hybridizes with a nucleic acid molecule of (a), (b), (c), (d) or (e) under stringent hybridisation conditions;
   [1783] (g) a nucleic acid molecule encoding a polypeptide which can be isolated with the aid of monoclonal or polyclonal antibodies made against a polypeptide encoded by one of the nucleic acid molecules of (a), (b), (c), (d), (e) or (f);
   [1784] (h) a nucleic acid molecule encoding a polypeptide comprising the consensus sequence or one or more polypeptide motifs as shown in column 8 of Table IV, application no. 1;
   [1785] (i) a nucleic acid molecule encoding a polypeptide having the activity represented by a respective protein as depicted in column 5 of Table II, application no. 1;
   [1786] (j) a nucleic acid molecule comprising a polynucleotide which is obtained by amplifying a cDNA library or a genomic library using the primers in Table III, application no. 1, column 8;
   [1787] and
   [1788] (k) nucleic acid molecule which is obtainable by screening a suitable nucleic acid library, especially a cDNA library and/or a genomic library, under stringent hybridization conditions with a probe comprising one of the sequences of the nucleic acid molecule of (a), (b), (c), (d), (e), (f), (g), (h), (i) or (j) or with a fragment of at least 15 nt, preferably 20 nt, 30 nt, 50 nt, 100 nt, 200 nt,500 nt, 1000 nt, 1500 nt, 2000 nt or 3000 nt of the nucleic acid molecule characterized in (a), (b), (c), (d), (e), (f), (g), (h), (i) or (j);
   [1789] or a nucleic acid molecule comprising a sequence which is complementary thereto.
      and, optionally
[1790] 3) nucleic acid molecule encoding a transit peptide, preferably encoding a plastidal transit peptide or a mitochondrial transit peptide;
   which are operable linked.
   (All the references to Tables I to IV are references to the corresponding lines of Tables I to IV.)

[1791] In a preferred embodiment thereof said nucleic acid molecule according to 2 (a), (b), (c), (d), (e), (f), (g), (h), (i), (j) or (k) encodes a polypeptide which has the activity of the respective polypeptide represented by a protein comprising a polypeptide as depicted in the respective line in column 5 of Table II, application no. 1.

[1792] In another preferred embodiment thereof said nucleic acid molecule according to 2 (a), (b), (c), (d), (e), (f), (g), (h), (i), (j) or (k) confers a generation or an increase of the respective fine chemical in a non-human organism or a part thereof as compared to a corresponding wild-type non-human organism or part thereof.

[1793] In another preferred embodiment thereof said nucleic acid molecule according to 2 (a), (b), (c), (d), (e), (f), (g), (h), (i), (j) or (k) encodes a polypeptide which has the activity of the respective polypeptide represented by a protein as depicted in the respective line in column 5 of Table II application no. 1 and confers a generation or an increase of the respective fine chemical in a non-human organism or a part thereof as compared to a corresponding wild-type non-human organism or part thereof.

[1794] In another embodiment thereof the expression cassette comprises 3) a nucleic acid molecule encoding a transit peptide, preferably encoding a plastidal transit peptide, especially in case in column 6 of Table I, application no. 1, in the same line as of the respective nucleic acid molecule according to 2) “plastidic” is depicted, or encoding a mitochondrial transit peptide, especially in case in column 6 of Table I, application no. 1, in the same line as of the respective nucleic acid molecule according to 2) “mitochondrial” is depicted.

[1795] In another embodiment thereof the expression cassette does not comprise 3) a nucleic acid molecule encoding a transit peptide, especially in case in column 6 of Table I, application no. 1, in the same line as of the respective nucleic acid molecule according to 2) “non-targeted” is depicted.

[1796] In a further embodiment, the invention relates to an expression cassette, comprising
[1797] 1) a promoter, prefereably a promoter selected from the group consisting of Big35S, PCUbi, Super and USP;
[1798] 2) a nucleic acid molecule selected from the group consisting of
   [1799] (a) a nucleic acid molecule encoding a polypeptide shown in Table II, application no. 1, column 5 or 8, preferably shown in Table II A, application no. 1, column 5, or in Table II A, application no. 1, column 8, or in Table II B, application no. 1, column 8, or a homolog or a fragment thereof;
   [1800] (b) a nucleic acid molecule shown in Table I, application no. 1, column 5 or 8, preferably shown in Table I A, application no. 1, column 5, or in Table I A, application no. 1, column 8, or in Table I B, application no. 1, column 8, preferably the coding region thereof, or a homolog or a fragment thereof;
   [1801] (c) a nucleic acid molecule, which, as a result of the degeneracy of the genetic code, can be derived from a polypeptide sequence depicted in column 5 or 8 of Table II, application no. 1, preferably shown in Table II A, application no. 1, column 5, or in Table II A, application no. 1, column 8, or in Table II B, application no. 1, column 8;
   [1802] (d) a nucleic acid molecule having at least 30% identity, preferably at least 40%, 50%, 60%, 70%, 75%, 80%, 85%, 90%, 95%, 96%, 97%, 98%, 99%, 99.5%, with the nucleic acid molecule sequence of a polynucleotide comprising the nucleic acid molecule shown in column 5 or 8 of Table I, application no. 1, preferably shown in Table I A, application no. 1, column 5, or in Table I A, application no. 1, column 8, or in Table I B, application no. 1, column 8, preferably the coding region thereof;
   [1803] (e) a nucleic acid molecule encoding a polypeptide having at least 30% identity, preferably at least 40%, 50% 60%, 70%, 75%, 80%, 85%, 90%, 95%, 96%, 97%, 98%, 99%, 99.5%, identity with the amino acid sequence of the polypeptide encoded by the nucleic acid molecule of (a), (b), (c) or (d);
   [1804] (f) a nucleic acid molecule which hybridizes with a nucleic acid molecule of (a), (b), (c), (d) or (e) under stringent hybridisation conditions;
   [1805] (g) a nucleic acid molecule encoding a polypeptide which can be isolated with the aid of monoclonal or polyclonal antibodies made against a polypeptide encoded by one of the nucleic acid molecules of (a), (b), (c), (d), (e) or (f);
   [1806] (h) a nucleic acid molecule encoding a polypeptide comprising the consensus sequence or one or more polypeptide motifs as shown in column 8 of Table IV, application no. 1;
   [1807] (i) a nucleic acid molecule encoding a polypeptide having the activity represented by a respective protein as depicted in column 5 of Table II, application no. 1;
   [1808] (j) a nucleic acid molecule comprising a polynucleotide which is obtained by amplifying a cDNA library or a genomic library using the primers in Table III, application no. 1, column 8;
   [1809] and
   [1810] (k) nucleic acid molecule which is obtainable by screening a suitable nucleic acid library, especially a cDNA library and/or a genomic library, under stringent hybridization conditions with a probe comprising one of the sequences of the nucleic acid molecule of (a), (b), (c), (d), (e), (f), (g), (h), (i) or (j) or with a fragment of at least 15 nt, preferably 20 nt, 30 nt, 50 nt, 100 nt, 200 nt,500 nt, 1000 nt, 1500 nt, 2000 nt or 3000 nt of the nucleic acid molecule characterized in (a), (b), (c), (d), (e), (f), (g), (h), (i) or (j);
   [1811] or a nucleic acid molecule comprising a sequence which is complementary thereto;
      and, optionally
[1812] 3) nucleic acid molecule encoding a transit peptide, preferably encoding a plastidal transit peptide or a mitochondrial transit peptide;
   which are operable linked and
   whereby, preferably, the nucleic acid molecule according to 2 (a), (b), (c), (d), (e), (f), (g), (h), (i), (j) or (k) distinguishes over the sequence depicted in Table I A and/or I B, application no. 1, column 5 or 8, or the coding region thereof, by one or more nucleotides (especially but not exceeding 5%, preferably 4%, 3%, 2%, 1%, 0.5%, 0.2% or 0.1%). In an embodiment, the nucleic acid molecule of the invention according to 2) does not consist of the sequence shown in Table I A and/or I B, application no. 1, column 5 or 8, or the coding region thereof. In another embodiment, the nucleic acid molecule of the present invention, preferably the coding region thereof, is at least 30%, 40%, 50%, 60%, 70%, 80%, 90%, 95% identical but less than 100%, 99.999%, 99.99%, 99.9%, 99%, 98%, 97%, 96% or 95% identical to the sequence shown in Table I A and/or I B, application no. 1, column 5 or 8, or the coding region thereof, respectively. In a further embodiment the nucleic acid molecule does not encode the polypeptide sequence shown in Table II A and/or II B, application no. 1, column 5 or 8 but homologs thereof. Accordingly, in one embodiment, the nucleic acid molecule of the present invention encodes in one embodiment a polypeptide which differs at least in one or more amino acids (especially but not exceeding 5%, preferably 4%, 3%, 2%, 1%, 0.5%, 0.2% or 0.1%) from the polypeptide shown in Table II, application no. 1, column 5 or 8 and does not encode a protein of the sequence shown in Table II A and/or II B, application no. 1, column 5 or 8. Accordingly, in one embodiment, the protein encoded by a sequence of a nucleic acid according to 2 (a), (b), (c), (d), (e), (f), (g), (h), (i), (j) or (k) does not consist of the sequence shown in Table I A and/or I B, application no. 1, column 5 or 8, or the coding region thereof. In a further embodiment, the protein of the present invention is at least 30%, 40%, 50%, 60%, 70%, 80%, 90%, 95% identical to protein sequence depicted in Table II A and/or II B, application no. 1, column 5 or 8 but less than 100%, 99.999%, 99.99%, 99.9%, 99%, 98%, 97%, 96% or 95% identical to the sequence shown in Table II A and/or II B, application no. 1, column 5 or 8.
   (All the references to Tables I to IV are references to the corresponding lines of Tables I to IV.)

[1813] In a preferred embodiment thereof said nucleic acid molecule according to 2 (a), (b), (c), (d), (e), (f), (g), (h), (i), (j) or (k) encodes a polypeptide which has the activity of the respective polypeptide represented by a protein comprising a polypeptide as depicted in the respective line in column 5 of Table II, application no. 1.

[1814] In another preferred embodiment thereof said nucleic acid molecule according to 2 (a), (b), (c), (d), (e), (f), (g), (h), (i), (j) or (k) confers a generation or an increase of the respective fine chemical in a non-human organism or a part thereof as compared to a corresponding wild-type non-human organism or part thereof.

[1815] In another preferred embodiment thereof said nucleic acid molecule according to 2 (a), (b), (c), (d), (e), (f), (g), (h), (i), (j) or (k) encodes a polypeptide which has the activity of the respective polypeptide represented by a protein as depicted in the respective line in column 5 of Table II application no. 1 and confers a generation or an increase of the respective fine chemical in a non-human organism or a part thereof as compared to a corresponding wild-type non-human organism or part thereof.

[1816] In another embodiment thereof the expression cassette comprises 3) a nucleic acid molecule encoding a transit peptide, preferably encoding a plastidal transit peptide, especially in case in column 6 of Table I, application no. 1, in the same line as of the respective nucleic acid molecule according to 2) “plastidic” is depicted, or encoding a mitochondrial transit peptide, especially in case in column 6 of Table I, application no. 1, in the same line as of the respective nucleic acid molecule according to 2) “mitochondrial” is depicted.

[1817] In another embodiment thereof the expression cassette does not comprise 3) a nucleic acid molecule encoding a transit peptide, especially in case in column 6 of Table I, application no. 1, in the same line as of the respective nucleic acid molecule according to 2) “non-targeted” is depicted.

[1818] In an embodiment the present invention relates to an expresssion cassette comprising a) a promoter, prefereably a promoter selected from the group consisting of Big35S, PCUbi, Super and USP, in particular Super; and b) the nucleic acid SEQ ID NO. 15175, or a homolog or fragment thereof, or a homolog thereof being depicted in Table I, application no. 1, column 8, in the same line as SEQ ID NO. 15175, preferably the coding region thereof, a homolog or a fragment thereof; which are operable linked.

[1819] In an embodiment thereof the expression cassette comprises in addition c) a nucleic acid molecule encoding a transit peptide, especially a plastidal transit petide in case in Table I, application no. 1, in column 6 in the same line as SEQ ID NO. 15175 is depicted, plastidic is mentioned, or a mitochondrial transit petide in case in Table I, application no. 1, in column 6 in the same line as SEQ ID NO. 15175 is depicted, mitochondrial is mentioned; which is operable linke, too.

[1820] In another embodiment thereof the expression cassette does not comprise an additional transit peptide in case in Table I, application no. 1, in column 6 in the same line as SEQ ID NO. 15175 is depicted, non-targeted is mentioned.

[1821] In an embodiment the present invention relates to an expresssion cassette comprising a) a promoter, prefereably a promoter selected from the group consisting of Big35S, PCUbi, Super and USP, in particular Super; and b) the nucleic acid SEQ ID NO. 9167, or a homolog or fragment thereof, or a homolog thereof being depicted in Table I, application no. 1, column 8, in the same line as SEQ ID NO. 9167, preferably the coding region thereof, a homolog or a fragment thereof; which are operable linked.

[1822] In an embodiment thereof the expression cassette comprises in addition c) a nucleic acid molecule encoding a transit peptide, especially a plastidal transit petide in case in Table I, application no. 1, in column 6 in the same line as SEQ ID NO. 9167 is depicted, plastidic is mentioned, or a mitochondrial transit petide in case in Table I, application no. 1, in column 6 in the same line as SEQ ID NO. 9167 is depicted, mitochondrial is mentioned; which is operable linke, too.

[1823] In another embodiment thereof the expression cassette does not comprise an additional transit peptide in case in Table I, application no. 1, in column 6 in the same line as SEQ ID NO. 9167 is depicted, non-targeted is mentioned.

[1824] In an embodiment the present invention relates to an expresssion cassette comprising a) a promoter, prefereably a promoter selected from the group consisting of Big35S, PCUbi, Super and USP, in particular Super; and b) the nucleic acid SEQ ID NO. 9244, or a homolog or fragment thereof, or a homolog thereof being depicted in Table I, application no. 1, column 8, in the same line as SEQ ID NO. 9244, preferably the coding region thereof, a homolog or a fragment thereof; which are operable linked.

[1825] In an embodiment thereof the expression cassette comprises in addition c) a nucleic acid molecule encoding a transit peptide, especially a plastidal transit petide in case in Table I, application no. 1, in column 6 in the same line as SEQ ID NO. 9244 is depicted, plastidic is mentioned, or a mitochondrial transit petide in case in Table I, application no. 1, in column 6 in the same line as SEQ ID NO. 9244 is depicted, mitochondrial is mentioned; which is operable linke, too.

[1826] In another embodiment thereof the expression cassette does not comprise an additional transit peptide in case in Table I, application no. 1, in column 6 in the same line as SEQ ID NO. 9244 is depicted, non-targeted is mentioned.

[1827] In an embodiment the present invention relates to an expresssion cassette comprising a) a promoter, prefereably a promoter selected from the group consisting of Big35S, PCUbi, Super and USP, in particular Super; and b) the nucleic acid SEQ ID NO. 14302, or a homolog or fragment thereof, or a homolog thereof being depicted in Table I, application no. 1, column 8, in the same line as SEQ ID NO. 14302, preferably the coding region thereof, a homolog or a fragment thereof; which are operable linked.

[1828] In an embodiment thereof the expression cassette comprises in addition c) a nucleic acid molecule encoding a transit peptide, especially a plastidal transit petide in case in Table I, application no. 1, in column 6 in the same line as SEQ ID NO. 14302 is depicted, plastidic is mentioned, or a mitochondrial transit petide in case in Table I, application no. 1, in column 6 in the same line as SEQ ID NO. 14302 is depicted, mitochondrial is mentioned; which is operable linke, too.

[1829] In another embodiment thereof the expression cassette does not comprise an additional transit peptide in case in Table I, application no. 1, in column 6 in the same line as SEQ ID NO. 14302 is depicted, non-targeted is mentioned.

[1830] In an embodiment the present invention relates to an expresssion cassette comprising a) a promoter, prefereably a promoter selected from the group consisting of Big35S, PCUbi, Super and USP, in particular Super; and b) the nucleic acid SEQ ID NO. 14706, or a homolog or fragment thereof, or a homolog thereof being depicted in Table I, application no. 1, column 8, in the same line as SEQ ID NO. 14706, preferably the coding region thereof, a homolog or a fragment thereof; which are operable linked.

[1831] In an embodiment thereof the expression cassette comprises in addition c) a nucleic acid molecule encoding a transit peptide, especially a plastidal transit petide in case in Table I, application no. 1, in column 6 in the same line as SEQ ID NO. 14706 is depicted, plastidic is mentioned, or a mitochondrial transit petide in case in Table I, application no. 1, in column 6 in the same line as SEQ ID NO. 14706 is depicted, mitochondrial is mentioned; which is operable linke, too.

[1832] In another embodiment thereof the expression cassette does not comprise an additional transit peptide in case in Table I, application no. 1, in column 6 in the same line as SEQ ID NO. 14706 is depicted, non-targeted is mentioned.

[1833] In an embodiment the present invention relates to an expresssion cassette comprising a) a promoter, prefereably a promoter selected from the group consisting of Big35S, PCUbi, Super and USP, in particular Super; and b) the nucleic acid SEQ ID NO. 14715, or a homolog or fragment thereof, or a homolog thereof being depicted in Table I, application no. 1, column 8, in the same line as SEQ ID NO. 14715, preferably the coding region thereof, a homolog or a fragment thereof; which are operable linked.

[1834] In an embodiment thereof the expression cassette comprises in addition c) a nucleic acid molecule encoding a transit peptide, especially a plastidal transit petide in case in Table I, application no. 1, in column 6 in the same line as SEQ ID NO. 14715 is depicted, plastidic is mentioned, or a mitochondrial transit petide in case in Table I, application no. 1, in column 6 in the same line as SEQ ID NO. 14715 is depicted, mitochondrial is mentioned; which is operable linke, too.

[1835] In another embodiment thereof the expression cassette does not comprise an additional transit peptide in case in Table I, application no. 1, in column 6 in the same line as SEQ ID NO. 14715 is depicted, non-targeted is mentioned.

[1836] In an embodiment the present invention relates to an expresssion cassette comprising a) a promoter, prefereably a promoter selected from the group consisting of Big35S, PCUbi, Super and USP, in particular Super; and b) the nucleic acid SEQ ID NO. 14769, or a homolog or fragment thereof, or a homolog thereof being depicted in Table I, application no. 1, column 8, in the same line as SEQ ID NO. 14769, preferably the coding region thereof, a homolog or a fragment thereof; which are operable linked.

[1837] In an embodiment thereof the expression cassette comprises in addition c) a nucleic acid molecule encoding a transit peptide, especially a plastidal transit petide in case in Table I, application no. 1, in column 6 in the same line as SEQ ID NO. 14769 is depicted, plastidic is mentioned, or a mitochondrial transit petide in case in Table I, application no. 1, in column 6 in the same line as SEQ ID NO. 14769 is depicted, mitochondrial is mentioned; which is operable linke, too.

[1838] In another embodiment thereof the expression cassette does not comprise an additional transit peptide in case in Table I, application no. 1, in column 6 in the same line as SEQ ID NO. 14769 is depicted, non-targeted is mentioned.

[1839] In an embodiment the present invention relates to an expresssion cassette comprising a) a promoter, prefereably a promoter selected from the group consisting of Big35S, PCUbi, Super and USP, in particular Super; and b) the nucleic acid SEQ ID NO. 14821, or a homolog or fragment thereof, or a homolog thereof being depicted in Table I, application no. 1, column 8, in the same line as SEQ ID NO. 14821, preferably the coding region thereof, a homolog or a fragment thereof; which are operable linked.

[1840] In an embodiment thereof the expression cassette comprises in addition c) a nucleic acid molecule encoding a transit peptide, especially a plastidal transit petide in case in Table I, application no. 1, in column 6 in the same line as SEQ ID NO. 14821 is depicted, plastidic is mentioned, or a mitochondrial transit petide in case in Table I, application no. 1, in column 6 in the same line as SEQ ID NO. 14821 is depicted, mitochondrial is mentioned; which is operable linke, too.

[1841] In another embodiment thereof the expression cassette does not comprise an additional transit peptide in case in Table I, application no. 1, in column 6 in the same line as SEQ ID NO. 14821 is depicted, non-targeted is mentioned.

[1842] In an embodiment the present invention relates to an expresssion cassette comprising a) a promoter, prefereably a promoter selected from the group consisting of Big35S, PCUbi, Super and USP, in particular USP; and b) the nucleic acid SEQ ID NO. 10252, or a homolog or fragment thereof, or a homolog thereof being depicted in Table I, application no. 1, column 8, in the same line as SEQ ID NO. 10252, preferably the coding region thereof, a homolog or a fragment thereof; which are operable linked.

[1843] In an embodiment thereof the expression cassette comprises in addition c) a nucleic acid molecule encoding a transit peptide, especially a plastidal transit petide in case in Table I, application no. 1, in column 6 in the same line as SEQ ID NO. 10252 is depicted, plastidic is mentioned, or a mitochondrial transit petide in case in Table I, application no. 1, in column 6 in the same line as SEQ ID NO. 10252 is depicted, mitochondrial is mentioned; which is operable linke, too.

[1844] In another embodiment thereof the expression cassette does not comprise an additional transit peptide in case in Table I, application no. 1, in column 6 in the same line as SEQ ID NO. 10252 is depicted, non-targeted is mentioned.

[1845] In an embodiment the present invention relates to an expresssion cassette comprising a) a promoter, prefereably a promoter selected from the group consisting of Big35S, PCUbi, Super and USP, in particular Super; and b) the nucleic acid SEQ ID NO. 14885, or a homolog or fragment thereof, or a homolog thereof being depicted in Table I, application no. 1, column 8, in the same line as SEQ ID NO. 14885, preferably the coding region thereof, a homolog or a fragment thereof; which are operable linked.

[1846] In an embodiment thereof the expression cassette comprises in addition c) a nucleic acid molecule encoding a transit peptide, especially a plastidal transit petide in case in Table I, application no. 1, in column 6 in the same line as SEQ ID NO. 14885 is depicted, plastidic is mentioned, or a mitochondrial transit petide in case in Table I, application no. 1, in column 6 in the same line as SEQ ID NO. 14885 is depicted, mitochondrial is mentioned; which is operable linke, too.

[1847] In another embodiment thereof the expression cassette does not comprise an additional transit peptide in case in Table I, application no. 1, in column 6 in the same line as SEQ ID NO. 14885 is depicted, non-targeted is mentioned.

[1848] In an embodiment the present invention relates to an expresssion cassette comprising a) a promoter, prefereably a promoter selected from the group consisting of Big35S, PCUbi, Super and USP, in particular Super; and b) the nucleic acid SEQ ID NO. 8920, or a homolog or fragment thereof, or a homolog thereof being depicted in Table I, application no. 1, column 8, in the same line as SEQ ID NO. 8920, preferably the coding region thereof, a homolog or a fragment thereof; which are operable linked.

[1849] In an embodiment thereof the expression cassette comprises in addition c) a nucleic acid molecule encoding a transit peptide, especially a plastidal transit petide in case in Table I, application no. 1, in column 6 in the same line as SEQ ID NO. 8920 is depicted, plastidic is mentioned, or a mitochondrial transit petide in case in Table I, application no. 1, in column 6 in the same line as SEQ ID NO. 8920 is depicted, mitochondrial is mentioned; which is operable linke, too.

[1850] In another embodiment thereof the expression cassette does not comprise an additional transit peptide in case in Table I, application no. 1, in column 6 in the same line as SEQ ID NO. 8920 is depicted, non-targeted is mentioned.

[1851] In an embodiment the present invention relates to an expresssion cassette comprising a) a promoter, prefereably a promoter selected from the group consisting of Big35S, PCUbi, Super and USP, in particular Super; and b) the nucleic acid SEQ ID NO. 15179, or a homolog or fragment thereof, or a homolog thereof being depicted in Table I, application no. 1, column 8, in the same line as SEQ ID NO. 15179, preferably the coding region thereof, a homolog or a fragment thereof; which are operable linked.

[1852] In an embodiment thereof the expression cassette comprises in addition c) a nucleic acid molecule encoding a transit peptide, especially a plastidal transit petide in case in Table I, application no. 1, in column 6 in the same line as SEQ ID NO. 15179 is depicted, plastidic is mentioned, or a mitochondrial transit petide in case in Table I, application no. 1, in column 6 in the same line as SEQ ID NO. 15179 is depicted, mitochondrial is mentioned; which is operable linke, too.

[1853] In another embodiment thereof the expression cassette does not comprise an additional transit peptide in case in Table I, application no. 1, in column 6 in the same line as SEQ ID NO. 15179 is depicted, non-targeted is mentioned.

[1854] In an embodiment the present invention relates to an expresssion cassette comprising a) a promoter, prefereably a promoter selected from the group consisting of Big35S, PCUbi, Super and USP, in particular Super; and b) the nucleic acid SEQ ID NO. 15183, or a homolog or fragment thereof, or a homolog thereof being depicted in Table I, application no. 1, column 8, in the same line as SEQ ID NO. 15183, preferably the coding region thereof, a homolog or a fragment thereof; which are operable linked.

[1855] In an embodiment thereof the expression cassette comprises in addition c) a nucleic acid molecule encoding a transit peptide, especially a plastidal transit petide in case in Table I, application no. 1, in column 6 in the same line as SEQ ID NO. 15183 is depicted, plastidic is mentioned, or a mitochondrial transit petide in case in Table I, application no. 1, in column 6 in the same line as SEQ ID NO. 15183 is depicted, mitochondrial is mentioned; which is operable linke, too.

[1856] In another embodiment thereof the expression cassette does not comprise an additional transit peptide in case in Table I, application no. 1, in column 6 in the same line as SEQ ID NO. 15183 is depicted, non-targeted is mentioned.

[1857] In an embodiment the present invention relates to an expresssion cassette comprising a) a promoter, prefereably a promoter selected from the group consisting of Big35S, PCUbi, Super and USP, in particular Super; and b) the nucleic acid SEQ ID NO. 9333, or a homolog or fragment thereof, or a homolog thereof being depicted in Table I, application no. 1, column 8, in the same line as SEQ ID NO. 9333, preferably the coding region thereof, a homolog or a fragment thereof; which are operable linked.

[1858] In an embodiment thereof the expression cassette comprises in addition c) a nucleic acid molecule encoding a transit peptide, especially a plastidal transit petide in case in Table I, application no. 1, in column 6 in the same line as SEQ ID NO. 9333 is depicted, plastidic is mentioned, or a mitochondrial transit petide in case in Table I, application no. 1, in column 6 in the same line as SEQ ID NO. 9333 is depicted, mitochondrial is mentioned; which is operable linke, too.

[1859] In another embodiment thereof the expression cassette does not comprise an additional transit peptide in case in Table I, application no. 1, in column 6 in the same line as SEQ ID NO. 9333 is depicted, non-targeted is mentioned.

[1860] In an embodiment the present invention relates to an expresssion cassette comprising a) a promoter, prefereably a promoter selected from the group consisting of Big35S, PCUbi, Super and USP, in particular Super; and b) the nucleic acid SEQ ID NO. 9470, or a homolog or fragment thereof, or a homolog thereof being depicted in Table I, application no. 1, column 8, in the same line as SEQ ID NO. 9470, preferably the coding region thereof, a homolog or a fragment thereof; which are operable linked.

[1861] In an embodiment thereof the expression cassette comprises in addition c) a nucleic acid molecule encoding a transit peptide, especially a plastidal transit petide in case in Table I, application no. 1, in column 6 in the same line as SEQ ID NO. 9470 is depicted, plastidic is mentioned, or a mitochondrial transit petide in case in Table I, application no. 1, in column 6 in the same line as SEQ ID NO. 9470 is depicted, mitochondrial is mentioned; which is operable linke, too.

[1862] In another embodiment thereof the expression cassette does not comprise an additional transit peptide in case in Table I, application no. 1, in column 6 in the same line as SEQ ID NO. 9470 is depicted, non-targeted is mentioned.

[1863] In an embodiment the present invention relates to an expresssion cassette comprising a) a promoter, prefereably a promoter selected from the group consisting of Big35S, PCUbi, Super and USP, in particular USP; and b) the nucleic acid SEQ ID NO. 9492, or a homolog or fragment thereof, or a homolog thereof being depicted in Table I, application no. 1, column 8, in the same line as SEQ ID NO. 9492, preferably the coding region thereof, a homolog or a fragment thereof; which are operable linked.

[1864] In an embodiment thereof the expression cassette comprises in addition c) a nucleic acid molecule encoding a transit peptide, especially a plastidal transit petide in case in Table I, application no. 1, in column 6 in the same line as SEQ ID NO. 9492 is depicted, plastidic is mentioned, or a mitochondrial transit petide in case in Table I, application no. 1, in column 6 in the same line as SEQ ID NO. 9492 is depicted, mitochondrial is mentioned; which is operable linke, too.

[1865] In another embodiment thereof the expression cassette does not comprise an additional transit peptide in case in Table I, application no. 1, in column 6 in the same line as SEQ ID NO. 9492 is depicted, non-targeted is mentioned.

[1866] In an embodiment the present invention relates to an expresssion cassette comprising a) a promoter, prefereably a promoter selected from the group consisting of Big35S, PCUbi, Super and USP, in particular Super; and b) the nucleic acid SEQ ID NO. 10104, or a homolog or fragment thereof, or a homolog thereof being depicted in Table I, application no. 1, column 8, in the same line as SEQ ID NO. 10104, preferably the coding region thereof, a homolog or a fragment thereof; which are operable linked.

[1867] In an embodiment thereof the expression cassette comprises in addition c) a nucleic acid molecule encoding a transit peptide, especially a plastidal transit petide in case in Table I, application no. 1, in column 6 in the same line as SEQ ID NO. 10104 is depicted, plastidic is mentioned, or a mitochondrial transit petide in case in Table I, application no. 1, in column 6 in the same line as SEQ ID NO. 10104 is depicted, mitochondrial is mentioned; which is operable linke, too.

[1868] In another embodiment thereof the expression cassette does not comprise an additional transit peptide in case in Table I, application no. 1, in column 6 in the same line as SEQ ID NO. 10104 is depicted, non-targeted is mentioned.

[1869] In an embodiment the present invention relates to an expresssion cassette comprising a) a promoter, prefereably a promoter selected from the group consisting of Big35S, PCUbi, Super and USP, in particular PCUbi; and b) the nucleic acid SEQ ID NO. 6075, or a homolog or fragment thereof, or a homolog thereof being depicted in Table I, application no. 1, column 8, in the same line as SEQ ID NO. 6075, preferably the coding region thereof, a homolog or a fragment thereof; which are operable linked.

[1870] In an embodiment thereof the expression cassette comprises in addition c) a nucleic acid molecule encoding a transit peptide, especially a plastidal transit petide in case in Table I, application no. 1, in column 6 in the same line as SEQ ID NO. 6075 is depicted, plastidic is mentioned, or a mitochondrial transit petide in case in Table I, application no. 1, in column 6 in the same line as SEQ ID NO. 6075 is depicted, mitochondrial is mentioned; which is operable linke, too.

[1871] In another embodiment thereof the expression cassette does not comprise an additional transit peptide in case in Table I, application no. 1, in column 6 in the same line as SEQ ID NO. 6075 is depicted, non-targeted is mentioned.

[1872] In an embodiment the present invention relates to an expresssion cassette comprising a) a promoter, prefereably a promoter selected from the group consisting of Big35S, PCUbi, Super and USP, in particular Big35S; and b) the nucleic acid SEQ ID NO. 14843, or a homolog or fragment thereof, or a homolog thereof being depicted in Table I, application no. 1, column 8, in the same line as SEQ ID NO. 14843, preferably the coding region thereof, a homolog or a fragment thereof; which are operable linked.

[1873] In an embodiment thereof the expression cassette comprises in addition c) a nucleic acid molecule encoding a transit peptide, especially a plastidal transit petide in case in Table I, application no. 1, in column 6 in the same line as SEQ ID NO. 14843 is depicted, plastidic is mentioned, or a mitochondrial transit petide in case in Table I, application no. 1, in column 6 in the same line as SEQ ID NO. 14843 is depicted, mitochondrial is mentioned; which is operable linke, too.

[1874] In another embodiment thereof the expression cassette does not comprise an additional transit peptide in case in Table I, application no. 1, in column 6 in the same line as SEQ ID NO. 14843 is depicted, non-targeted is mentioned.

[1875] In an embodiment the present invention relates to an expresssion cassette comprising a) a promoter, prefereably a promoter selected from the group consisting of Big35S, PCUbi, Super and USP, in particular USP; and b) the nucleic acid SEQ ID NO. 7730, or a homolog or fragment thereof, or a homolog thereof being depicted in Table I, application no. 1, column 8, in the same line as SEQ ID NO. 7730, preferably the coding region thereof, a homolog or a fragment thereof; which are operable linked.

[1876] In an embodiment thereof the expression cassette comprises in addition c) a nucleic acid molecule encoding a transit peptide, especially a plastidal transit petide in case in Table I, application no. 1, in column 6 in the same line as SEQ ID NO. 7730 is depicted, plastidic is mentioned, or a mitochondrial transit petide in case in Table I, application no. 1, in column 6 in the same line as

[1877] SEQ ID NO. 7730 is depicted, mitochondrial is mentioned; which is operable linke, too.

[1878] In another embodiment thereof the expression cassette does not comprise an additional transit peptide in case in Table I, application no. 1, in column 6 in the same line as SEQ ID NO. 7730 is depicted, non-targeted is mentioned.

[1879] In an embodiment the present invention relates to an expresssion cassette comprising a) a promoter, prefereably a promoter selected from the group consisting of Big35S, PCUbi, Super and USP, in particular PCUbi; and b) the nucleic acid SEQ ID NO. 6268, or a homolog or fragment thereof, or a homolog thereof being depicted in Table I, application no. 1, column 8, in the same line as SEQ ID NO. 6268, preferably the coding region thereof, a homolog or a fragment thereof; which are operable linked.

[1880] In an embodiment thereof the expression cassette comprises in addition c) a nucleic acid molecule encoding a transit peptide, especially a plastidal transit petide in case in Table I, application no. 1, in column 6 in the same line as SEQ ID NO. 6268 is depicted, plastidic is mentioned, or a mitochondrial transit petide in case in Table I, application no. 1, in column 6 in the same line as SEQ ID NO. 6268 is depicted, mitochondrial is mentioned; which is operable linke, too.

[1881] In another embodiment thereof the expression cassette does not comprise an additional transit peptide in case in Table I, application no. 1, in column 6 in the same line as SEQ ID NO. 6268 is depicted, non-targeted is mentioned.

[1882] In an embodiment the present invention relates to an expresssion cassette comprising a) a promoter, prefereably a promoter selected from the group consisting of Big35S, PCUbi, Super and USP, in particular PCUbi; and b) the nucleic acid SEQ ID NO. 6510, or a homolog or fragment thereof, or a homolog thereof being depicted in Table I, application no. 1, column 8, in the same line as SEQ ID NO. 6510, preferably the coding region thereof, a homolog or a fragment thereof; which are operable linked.

[1883] In an embodiment thereof the expression cassette comprises in addition c) a nucleic acid molecule encoding a transit peptide, especially a plastidal transit petide in case in Table I, application no. 1, in column 6 in the same line as SEQ ID NO. 6510 is depicted, plastidic is mentioned, or a mitochondrial transit petide in case in Table I, application no. 1, in column 6 in the same line as SEQ ID NO. 6510 is depicted, mitochondrial is mentioned; which is operable linke, too.

[1884] In another embodiment thereof the expression cassette does not comprise an additional transit peptide in case in Table I, application no. 1, in column 6 in the same line as SEQ ID NO. 6510 is depicted, non-targeted is mentioned.

[1885] In an embodiment the present invention relates to an expresssion cassette comprising a) a promoter, prefereably a promoter selected from the group consisting of Big35S, PCUbi, Super and USP, in particular PCUbi; and b) the nucleic acid SEQ ID NO. 6674, or a homolog or fragment thereof, or a homolog thereof being depicted in Table I, application no. 1, column 8, in the same line as SEQ ID NO. 6674, preferably the coding region thereof, a homolog or a fragment thereof; which are operable linked.

[1886] In an embodiment thereof the expression cassette comprises in addition c) a nucleic acid molecule encoding a transit peptide, especially a plastidal transit petide in case in Table I, application no. 1, in column 6 in the same line as SEQ ID NO. 6674 is depicted, plastidic is mentioned, or a mitochondrial transit petide in case in Table I, application no. 1, in column 6 in the same line as SEQ ID NO. 6674 is depicted, mitochondrial is mentioned; which is operable linke, too.

[1887] In another embodiment thereof the expression cassette does not comprise an additional transit peptide in case in Table I, application no. 1, in column 6 in the same line as SEQ ID NO. 6674 is depicted, non-targeted is mentioned.

[1888] In an embodiment the present invention relates to an expresssion cassette comprising a) a promoter, prefereably a promoter selected from the group consisting of Big35S, PCUbi, Super and USP, in particular Super; and b) the nucleic acid SEQ ID NO. 6810, or a homolog or fragment thereof, or a homolog thereof being depicted in Table I, application no. 1, column 8, in the same line as SEQ ID NO. 6810, preferably the coding region thereof, a homolog or a fragment thereof; which are operable linked.

[1889] In an embodiment thereof the expression cassette comprises in addition c) a nucleic acid molecule encoding a transit peptide, especially a plastidal transit petide in case in Table I, application no. 1, in column 6 in the same line as SEQ ID NO. 6810 is depicted, plastidic is mentioned, or a mitochondrial transit petide in case in Table I, application no. 1, in column 6 in the same line as SEQ ID NO. 6810 is depicted, mitochondrial is mentioned; which is operable linke, too.

[1890] In another embodiment thereof the expression cassette does not comprise an additional transit peptide in case in Table I, application no. 1, in column 6 in the same line as SEQ ID NO. 6810 is depicted, non-targeted is mentioned.

[1891] In an embodiment the present invention relates to an expresssion cassette comprising a) a promoter, prefereably a promoter selected from the group consisting of Big35S, PCUbi, Super and USP, in particular USP; and b) the nucleic acid SEQ ID NO. 6818, or a homolog or fragment thereof, or a homolog thereof being depicted in Table I, application no. 1, column 8, in the same line as SEQ ID NO. 6818, preferably the coding region thereof, a homolog or a fragment thereof; which are operable linked.

[1892] In an embodiment thereof the expression cassette comprises in addition c) a nucleic acid molecule encoding a transit peptide, especially a plastidal transit petide in case in Table I, application no. 1, in column 6 in the same line as SEQ ID NO. 6818 is depicted, plastidic is mentioned, or a mitochondrial transit petide in case in Table I, application no. 1, in column 6 in the same line as SEQ ID NO. 6818 is depicted, mitochondrial is mentioned; which is operable linke, too.

[1893] In another embodiment thereof the expression cassette does not comprise an additional transit peptide in case in Table I, application no. 1, in column 6 in the same line as SEQ ID NO. 6818 is depicted, non-targeted is mentioned.

[1894] In an embodiment the present invention relates to an expresssion cassette comprising a) a promoter, prefereably a promoter selected from the group consisting of Big35S, PCUbi, Super and USP, in particular Super; and b) the nucleic acid SEQ ID NO. 7081, or a homolog or fragment thereof, or a homolog thereof being depicted in Table I, application no. 1, column 8, in the same line as SEQ ID NO. 7081, preferably the coding region thereof, a homolog or a fragment thereof; which are operable linked.

[1895] In an embodiment thereof the expression cassette comprises in addition c) a nucleic acid molecule encoding a transit peptide, especially a plastidal transit petide in case in Table I, application no. 1, in column 6 in the same line as SEQ ID NO. 7081 is depicted, plastidic is mentioned, or a mitochondrial transit petide in case in Table I, application no. 1, in column 6 in the same line as SEQ ID NO. 7081 is depicted, mitochondrial is mentioned; which is operable linke, too.

[1896] In another embodiment thereof the expression cassette does not comprise an additional transit peptide in case in Table I, application no. 1, in column 6 in the same line as SEQ ID NO. 7081 is depicted, non-targeted is mentioned.

[1897] In an embodiment the present invention relates to an expresssion cassette comprising a) a promoter, prefereably a promoter selected from the group consisting of Big35S, PCUbi, Super and USP, in particular USP; and b) the nucleic acid SEQ ID NO. 7269, or a homolog or fragment thereof, or a homolog thereof being depicted in Table I, application no. 1, column 8, in the same line as SEQ ID NO. 7269, preferably the coding region thereof, a homolog or a fragment thereof; which are operable linked.

[1898] In an embodiment thereof the expression cassette comprises in addition c) a nucleic acid molecule encoding a transit peptide, especially a plastidal transit petide in case in Table I, application no. 1, in column 6 in the same line as SEQ ID NO. 7269 is depicted, plastidic is mentioned, or a mitochondrial transit petide in case in Table I, application no. 1, in column 6 in the same line as SEQ ID NO. 7269 is depicted, mitochondrial is mentioned; which is operable linke, too.

[1899] In another embodiment thereof the expression cassette does not comprise an additional transit peptide in case in Table I, application no. 1, in column 6 in the same line as SEQ ID NO. 7269 is depicted, non-targeted is mentioned.

[1900] In an embodiment the present invention relates to an expresssion cassette comprising a) a promoter, prefereably a promoter selected from the group consisting of Big35S, PCUbi, Super and USP, in particular Super; and b) the nucleic acid SEQ ID NO. 9156, or a homolog or fragment thereof, or a homolog thereof being depicted in Table I, application no. 1, column 8, in the same line as SEQ ID NO. 9156, preferably the coding region thereof, a homolog or a fragment thereof; which are operable linked.

[1901] In an embodiment thereof the expression cassette comprises in addition c) a nucleic acid molecule encoding a transit peptide, especially a plastidal transit petide in case in Table I, application no. 1, in column 6 in the same line as SEQ ID NO. 9156 is depicted, plastidic is mentioned, or a mitochondrial transit petide in case in Table I, application no. 1, in column 6 in the same line as SEQ ID NO. 9156 is depicted, mitochondrial is mentioned; which is operable linke, too.

[1902] In another embodiment thereof the expression cassette does not comprise an additional transit peptide in case in Table I, application no. 1, in column 6 in the same line as SEQ ID NO. 9156 is depicted, non-targeted is mentioned.

[1903] In an embodiment the present invention relates to an expresssion cassette comprising a) a promoter, prefereably a promoter selected from the group consisting of Big35S, PCUbi, Super and USP, in particular Super; and b) the nucleic acid SEQ ID NO. 7686, or a homolog or fragment thereof, or a homolog thereof being depicted in Table I, application no. 1, column 8, in the same line as SEQ ID NO. 7686, preferably the coding region thereof, a homolog or a fragment thereof; which are operable linked.

[1904] In an embodiment thereof the expression cassette comprises in addition c) a nucleic acid molecule encoding a transit peptide, especially a plastidal transit petide in case in Table I, application no. 1, in column 6 in the same line as SEQ ID NO. 7686 is depicted, plastidic is mentioned, or a mitochondrial transit petide in case in Table I, application no. 1, in column 6 in the same line as SEQ ID NO. 7686 is depicted, mitochondrial is mentioned; which is operable linke, too.

[1905] In another embodiment thereof the expression cassette does not comprise an additional transit peptide in case in Table I, application no. 1, in column 6 in the same line as SEQ ID NO. 7686 is depicted, non-targeted is mentioned.

[1906] In an embodiment the present invention relates to an expresssion cassette comprising a) a promoter, prefereably a promoter selected from the group consisting of Big35S, PCUbi, Super and USP, in particular Super; and b) the nucleic acid SEQ ID NO. 8937, or a homolog or fragment thereof, or a homolog thereof being depicted in Table I, application no. 1, column 8, in the same line as SEQ ID NO. 8937, preferably the coding region thereof, a homolog or a fragment thereof; which are operable linked.

[1907] In an embodiment thereof the expression cassette comprises in addition c) a nucleic acid molecule encoding a transit peptide, especially a plastidal transit petide in case in Table I, application no. 1, in column 6 in the same line as SEQ ID NO. 8937 is depicted, plastidic is mentioned, or a mitochondrial transit petide in case in Table I, application no. 1, in column 6 in the same line as SEQ ID NO. 8937 is depicted, mitochondrial is mentioned; which is operable linke, too.

[1908] In another embodiment thereof the expression cassette does not comprise an additional transit peptide in case in Table I, application no. 1, in column 6 in the same line as SEQ ID NO. 8937 is depicted, non-targeted is mentioned.

[1909] In an embodiment the present invention relates to an expresssion cassette comprising a) a promoter, prefereably a promoter selected from the group consisting of Big35S, PCUbi, Super and USP, in particular Super; and b) the nucleic acid SEQ ID NO. 7917, or a homolog or fragment thereof, or a homolog thereof being depicted in Table I, application no. 1, column 8, in the same line as SEQ ID NO. 7917, preferably the coding region thereof, a homolog or a fragment thereof; which are operable linked.

[1910] In an embodiment thereof the expression cassette comprises in addition c) a nucleic acid molecule encoding a transit peptide, especially a plastidal transit petide in case in Table I, application no. 1, in column 6 in the same line as SEQ ID NO. 7917 is depicted, plastidic is mentioned, or a mitochondrial transit petide in case in Table I, application no. 1, in column 6 in the same line as SEQ ID NO. 7917 is depicted, mitochondrial is mentioned; which is operable linke, too.

[1911] In another embodiment thereof the expression cassette does not comprise an additional transit peptide in case in Table I, application no. 1, in column 6 in the same line as SEQ ID NO. 7917 is depicted, non-targeted is mentioned.

[1912] In an embodiment the present invention relates to an expresssion cassette comprising a) a promoter, prefereably a promoter selected from the group consisting of Big35S, PCUbi, Super and USP, in particular Super; and b) the nucleic acid SEQ ID NO. 7941, or a homolog or fragment thereof, or a homolog thereof being depicted in Table I, application no. 1, column 8, in the same line as SEQ ID NO. 7941, preferably the coding region thereof, a homolog or a fragment thereof; which are operable linked.

[1913] In an embodiment thereof the expression cassette comprises in addition c) a nucleic acid molecule encoding a transit peptide, especially a plastidal transit petide in case in Table I, application no. 1, in column 6 in the same line as SEQ ID NO. 7941 is depicted, plastidic is mentioned, or a mitochondrial transit petide in case in Table I, application no. 1, in column 6 in the same line as SEQ ID NO. 7941 is depicted, mitochondrial is mentioned; which is operable linke, too.

[1914] In another embodiment thereof the expression cassette does not comprise an additional transit peptide in case in Table I, application no. 1, in column 6 in the same line as SEQ ID NO. 7941 is depicted, non-targeted is mentioned.

[1915] In an embodiment the present invention relates to an expresssion cassette comprising a) a promoter, prefereably a promoter selected from the group consisting of Big35S, PCUbi, Super and USP, in particular Super; and b) the nucleic acid SEQ ID NO. 7947, or a homolog or fragment thereof, or a homolog thereof being depicted in Table I, application no. 1, column 8, in the same line as SEQ ID NO. 7947, preferably the coding region thereof, a homolog or a fragment thereof; which are operable linked.

[1916] In an embodiment thereof the expression cassette comprises in addition c) a nucleic acid molecule encoding a transit peptide, especially a plastidal transit petide in case in Table I, application no. 1, in column 6 in the same line as SEQ ID NO. 7947 is depicted, plastidic is mentioned, or a mitochondrial transit petide in case in Table I, application no. 1, in column 6 in the same line as SEQ ID NO. 7947 is depicted, mitochondrial is mentioned; which is operable linke, too.

[1917] In another embodiment thereof the expression cassette does not comprise an additional transit peptide in case in Table I, application no. 1, in column 6 in the same line as SEQ ID NO. 7947 is depicted, non-targeted is mentioned.

[1918] In an embodiment the present invention relates to an expresssion cassette comprising a) a promoter, prefereably a promoter selected from the group consisting of Big35S, PCUbi, Super and USP, in particular Super; and b) the nucleic acid SEQ ID NO. 7992, or a homolog or fragment thereof, or a homolog thereof being depicted in Table I, application no. 1, column 8, in the same line as SEQ ID NO. 7992, preferably the coding region thereof, a homolog or a fragment thereof; which are operable linked.

[1919] In an embodiment thereof the expression cassette comprises in addition c) a nucleic acid molecule encoding a transit peptide, especially a plastidal transit petide in case in Table I, application no. 1, in column 6 in the same line as SEQ ID NO. 7992 is depicted, plastidic is mentioned, or a mitochondrial transit petide in case in Table I, application no. 1, in column 6 in the same line as SEQ ID NO. 7992 is depicted, mitochondrial is mentioned; which is operable linke, too.

[1920] In another embodiment thereof the expression cassette does not comprise an additional transit peptide in case in Table I, application no. 1, in column 6 in the same line as SEQ ID NO. 7992 is depicted, non-targeted is mentioned.

[1921] In an embodiment the present invention relates to an expresssion cassette comprising a) a promoter, prefereably a promoter selected from the group consisting of Big35S, PCUbi, Super and USP, in particular USP; and b) the nucleic acid SEQ ID NO. 8033, or a homolog or fragment thereof, or a homolog thereof being depicted in Table I, application no. 1, column 8, in the same line as SEQ ID NO. 8033, preferably the coding region thereof, a homolog or a fragment thereof; which are operable linked.

[1922] In an embodiment thereof the expression cassette comprises in addition c) a nucleic acid molecule encoding a transit peptide, especially a plastidal transit petide in case in Table I, application no. 1, in column 6 in the same line as SEQ ID NO. 8033 is depicted, plastidic is mentioned, or a mitochondrial transit petide in case in Table I, application no. 1, in column 6 in the same line as SEQ ID NO. 8033 is depicted, mitochondrial is mentioned; which is operable linke, too.

[1923] In another embodiment thereof the expression cassette does not comprise an additional transit peptide in case in Table I, application no. 1, in column 6 in the same line as SEQ ID NO. 8033 is depicted, non-targeted is mentioned.

[1924] In an embodiment the present invention relates to an expresssion cassette comprising a) a promoter, prefereably a promoter selected from the group consisting of Big35S, PCUbi, Super and USP, in particular Super; and b) the nucleic acid SEQ ID NO. 8316, or a homolog or fragment thereof, or a homolog thereof being depicted in Table I, application no. 1, column 8, in the same line as SEQ ID NO. 8316, preferably the coding region thereof, a homolog or a fragment thereof; which are operable linked.

[1925] In an embodiment thereof the expression cassette comprises in addition c) a nucleic acid molecule encoding a transit peptide, especially a plastidal transit petide in case in Table I, application no. 1, in column 6 in the same line as SEQ ID NO. 8316 is depicted, plastidic is mentioned, or a mitochondrial transit petide in case in Table I, application no. 1, in column 6 in the same line as SEQ ID NO. 8316 is depicted, mitochondrial is mentioned; which is operable linke, too.

[1926] In another embodiment thereof the expression cassette does not comprise an additional transit peptide in case in Table I, application no. 1, in column 6 in the same line as SEQ ID NO. 8316 is depicted, non-targeted is mentioned.

[1927] In an embodiment the present invention relates to an expresssion cassette comprising a) a promoter, prefereably a promoter selected from the group consisting of Big35S, PCUbi, Super and USP, in particular USP; and b) the nucleic acid SEQ ID NO. 8363, or a homolog or fragment thereof, or a homolog thereof being depicted in Table I, application no. 1, column 8, in the same line as SEQ ID NO. 8363, preferably the coding region thereof, a homolog or a fragment thereof; which are operable linked.

[1928] In an embodiment thereof the expression cassette comprises in addition c) a nucleic acid molecule encoding a transit peptide, especially a plastidal transit petide in case in Table I, application no. 1, in column 6 in the same line as SEQ ID NO. 8363 is depicted, plastidic is mentioned, or a mitochondrial transit petide in case in Table I, application no. 1, in column 6 in the same line as SEQ ID NO. 8363 is depicted, mitochondrial is mentioned; which is operable linke, too.

[1929] In another embodiment thereof the expression cassette does not comprise an additional transit peptide in case in Table I, application no. 1, in column 6 in the same line as SEQ ID NO. 8363 is depicted, non-targeted is mentioned.

[1930] In an embodiment the present invention relates to an expresssion cassette comprising a) a promoter, prefereably a promoter selected from the group consisting of Big35S, PCUbi, Super and USP, in particular Super; and b) the nucleic acid SEQ ID NO. 10708, or a homolog or fragment thereof, or a homolog thereof being depicted in Table I, application no. 1, column 8, in the same line as SEQ ID NO. 10708, preferably the coding region thereof, a homolog or a fragment thereof; which are operable linked.

[1931] In an embodiment thereof the expression cassette comprises in addition c) a nucleic acid molecule encoding a transit peptide, especially a plastidal transit petide in case in Table I, application no. 1, in column 6 in the same line as SEQ ID NO. 10708 is depicted, plastidic is mentioned, or a mitochondrial transit petide in case in Table I, application no. 1, in column 6 in the same line as SEQ ID NO. 10708 is depicted, mitochondrial is mentioned; which is operable linke, too.

[1932] In another embodiment thereof the expression cassette does not comprise an additional transit peptide in case in Table I, application no. 1, in column 6 in the same line as SEQ ID NO. 10708 is depicted, non-targeted is mentioned.

[1933] In an embodiment the present invention relates to an expresssion cassette comprising a) a promoter, prefereably a promoter selected from the group consisting of Big35S, PCUbi, Super and USP, in particular Super; and b) the nucleic acid SEQ ID NO. 7333, or a homolog or fragment thereof, or a homolog thereof being depicted in Table I, application no. 1, column 8, in the same line as SEQ ID NO. 7333, preferably the coding region thereof, a homolog or a fragment thereof; which are operable linked.

[1934] In an embodiment thereof the expression cassette comprises in addition c) a nucleic acid molecule encoding a transit peptide, especially a plastidal transit petide in case in Table I, application no. 1, in column 6 in the same line as SEQ ID NO. 7333 is depicted, plastidic is mentioned, or a mitochondrial transit petide in case in Table I, application no. 1, in column 6 in the same line as SEQ ID NO. 7333 is depicted, mitochondrial is mentioned; which is operable linke, too.

[1935] In another embodiment thereof the expression cassette does not comprise an additional transit peptide in case in Table I, application no. 1, in column 6 in the same line as SEQ ID NO. 7333 is depicted, non-targeted is mentioned.

[1936] In an embodiment the present invention relates to an expresssion cassette comprising a) a promoter, prefereably a promoter selected from the group consisting of Big35S, PCUbi, Super and USP, in particular PCUbi; and b) the nucleic acid SEQ ID NO. 3654, or a homolog or fragment thereof, or a homolog thereof being depicted in Table I, application no. 1, column 8, in the same line as SEQ ID NO. 3654, preferably the coding region thereof, a homolog or a fragment thereof; which are operable linked.

[1937] In an embodiment thereof the expression cassette comprises in addition c) a nucleic acid molecule encoding a transit peptide, especially a plastidal transit petide in case in Table I, application no. 1, in column 6 in the same line as SEQ ID NO. 3654 is depicted, plastidic is mentioned, or a mitochondrial transit petide in case in Table I, application no. 1, in column 6 in the same line as SEQ ID NO. 3654 is depicted, mitochondrial is mentioned; which is operable linke, too.

[1938] In another embodiment thereof the expression cassette does not comprise an additional transit peptide in case in Table I, application no. 1, in column 6 in the same line as SEQ ID NO. 3654 is depicted, non-targeted is mentioned.

[1939] In an embodiment the present invention relates to an expresssion cassette comprising a) a promoter, prefereably a promoter selected from the group consisting of Big35S, PCUbi, Super and USP, in particular PCUbi; and b) the nucleic acid SEQ ID NO. 1061, or a homolog or fragment thereof, or a homolog thereof being depicted in Table I, application no. 1, column 8, in the same line as SEQ ID NO. 1061, preferably the coding region thereof, a homolog or a fragment thereof; which are operable linked.

[1940] In an embodiment thereof the expression cassette comprises in addition c) a nucleic acid molecule encoding a transit peptide, especially a plastidal transit petide in case in Table I, application no. 1, in column 6 in the same line as SEQ ID NO. 1061 is depicted, plastidic is mentioned, or a mitochondrial transit petide in case in Table I, application no. 1, in column 6 in the same line as SEQ ID NO. 1061 is depicted, mitochondrial is mentioned; which is operable linke, too.

[1941] In another embodiment thereof the expression cassette does not comprise an additional transit peptide in case in Table I, application no. 1, in column 6 in the same line as SEQ ID NO. 1061 is depicted, non-targeted is mentioned.

[1942] In an embodiment the present invention relates to an expresssion cassette comprising a) a promoter, prefereably a promoter selected from the group consisting of Big35S, PCUbi, Super and USP, in particular PCUbi; and b) the nucleic acid SEQ ID NO. 1298, or a homolog or fragment thereof, or a homolog thereof being depicted in Table I, application no. 1, column 8, in the same line as SEQ ID NO. 1298, preferably the coding region thereof, a homolog or a fragment thereof; which are operable linked.

[1943] In an embodiment thereof the expression cassette comprises in addition c) a nucleic acid molecule encoding a transit peptide, especially a plastidal transit petide in case in Table I, application no. 1, in column 6 in the same line as SEQ ID NO. 1298 is depicted, plastidic is mentioned, or a mitochondrial transit petide in case in Table I, application no. 1, in column 6 in the same line as SEQ ID NO. 1298 is depicted, mitochondrial is mentioned; which is operable linke, too.

[1944] In another embodiment thereof the expression cassette does not comprise an additional transit peptide in case in Table I, application no. 1, in column 6 in the same line as SEQ ID NO. 1298 is depicted, non-targeted is mentioned.

[1945] In an embodiment the present invention relates to an expresssion cassette comprising a) a promoter, prefereably a promoter selected from the group consisting of Big35S, PCUbi, Super and USP, in particular PCUbi; and b) the nucleic acid SEQ ID NO. 1623, or a homolog or fragment thereof, or a homolog thereof being depicted in Table I, application no. 1, column 8, in the same line as SEQ ID NO. 1623, preferably the coding region thereof, a homolog or a fragment thereof; which are operable linked.

[1946] In an embodiment thereof the expression cassette comprises in addition c) a nucleic acid molecule encoding a transit peptide, especially a plastidal transit petide in case in Table I, application no. 1, in column 6 in the same line as SEQ ID NO. 1623 is depicted, plastidic is mentioned, or a mitochondrial transit petide in case in Table I, application no. 1, in column 6 in the same line as SEQ ID NO. 1623 is depicted, mitochondrial is mentioned; which is operable linke, too.

[1947] In another embodiment thereof the expression cassette does not comprise an additional transit peptide in case in Table I, application no. 1, in column 6 in the same line as SEQ ID NO. 1623 is depicted, non-targeted is mentioned.

[1948] In an embodiment the present invention relates to an expresssion cassette comprising a) a promoter, prefereably a promoter selected from the group consisting of Big35S, PCUbi, Super and USP, in particular PCUbi; and b) the nucleic acid SEQ ID NO. 1696, or a homolog or fragment thereof, or a homolog thereof being depicted in Table I, application no. 1, column 8, in the same line as SEQ ID NO. 1696, preferably the coding region thereof, a homolog or a fragment thereof; which are operable linked.

[1949] In an embodiment thereof the expression cassette comprises in addition c) a nucleic acid molecule encoding a transit peptide, especially a plastidal transit petide in case in Table I, application no. 1, in column 6 in the same line as SEQ ID NO. 1696 is depicted, plastidic is mentioned, or a mitochondrial transit petide in case in Table I, application no. 1, in column 6 in the same line as SEQ ID NO. 1696 is depicted, mitochondrial is mentioned; which is operable linke, too.

[1950] In another embodiment thereof the expression cassette does not comprise an additional transit peptide in case in Table I, application no. 1, in column 6 in the same line as SEQ ID NO. 1696 is depicted, non-targeted is mentioned.

[1951] In an embodiment the present invention relates to an expresssion cassette comprising a) a promoter, prefereably a promoter selected from the group consisting of Big35S, PCUbi, Super and USP, in particular PCUbi; and b) the nucleic acid SEQ ID NO. 1815, or a homolog or fragment thereof, or a homolog thereof being depicted in Table I, application no. 1, column 8, in the same line as SEQ ID NO. 1815, preferably the coding region thereof, a homolog or a fragment thereof; which are operable linked.

[1952] In an embodiment thereof the expression cassette comprises in addition c) a nucleic acid molecule encoding a transit peptide, especially a plastidal transit petide in case in Table I, application no. 1, in column 6 in the same line as SEQ ID NO. 1815 is depicted, plastidic is mentioned, or a mitochondrial transit petide in case in Table I, application no. 1, in column 6 in the same line as SEQ ID NO. 1815 is depicted, mitochondrial is mentioned; which is operable linke, too.

[1953] In another embodiment thereof the expression cassette does not comprise an additional transit peptide in case in Table I, application no. 1, in column 6 in the same line as SEQ ID NO. 1815 is depicted, non-targeted is mentioned.

[1954] In an embodiment the present invention relates to an expresssion cassette comprising a) a promoter, prefereably a promoter selected from the group consisting of Big35S, PCUbi, Super and USP, in particular PCUbi; and b) the nucleic acid SEQ ID NO. 2367, or a homolog or fragment thereof, or a homolog thereof being depicted in Table I, application no. 1, column 8, in the same line as SEQ ID NO. 2367, preferably the coding region thereof, a homolog or a fragment thereof; which are operable linked.

[1955] In an embodiment thereof the expression cassette comprises in addition c) a nucleic acid molecule encoding a transit peptide, especially a plastidal transit petide in case in Table I, application no. 1, in column 6 in the same line as SEQ ID NO. 2367 is depicted, plastidic is mentioned, or a mitochondrial transit petide in case in Table I, application no. 1, in column 6 in the same line as SEQ ID NO. 2367 is depicted, mitochondrial is mentioned; which is operable linke, too.

[1956] In another embodiment thereof the expression cassette does not comprise an additional transit peptide in case in Table I, application no. 1, in column 6 in the same line as SEQ ID NO. 2367 is depicted, non-targeted is mentioned.

[1957] In an embodiment the present invention relates to an expresssion cassette comprising a) a promoter, prefereably a promoter selected from the group consisting of Big35S, PCUbi, Super and USP, in particular PCUbi; and b) the nucleic acid SEQ ID NO. 2573, or a homolog or fragment thereof, or a homolog thereof being depicted in Table I, application no. 1, column 8, in the same line as SEQ ID NO. 2573, preferably the coding region thereof, a homolog or a fragment thereof; which are operable linked.

[1958] In an embodiment thereof the expression cassette comprises in addition c) a nucleic acid molecule encoding a transit peptide, especially a plastidal transit petide in case in Table I, application no. 1, in column 6 in the same line as SEQ ID NO. 2573 is depicted, plastidic is mentioned, or a mitochondrial transit petide in case in Table I, application no. 1, in column 6 in the same line as SEQ ID NO. 2573 is depicted, mitochondrial is mentioned; which is operable linke, too.

[1959] In another embodiment thereof the expression cassette does not comprise an additional transit peptide in case in Table I, application no. 1, in column 6 in the same line as SEQ ID NO. 2573 is depicted, non-targeted is mentioned.

[1960] In an embodiment the present invention relates to an expresssion cassette comprising a) a promoter, prefereably a promoter selected from the group consisting of Big35S, PCUbi, Super and USP, in particular USP; and b) the nucleic acid SEQ ID NO. 10172, or a homolog or fragment thereof, or a homolog thereof being depicted in Table I, application no. 1, column 8, in the same line as SEQ ID NO. 10172, preferably the coding region thereof, a homolog or a fragment thereof; which are operable linked.

[1961] In an embodiment thereof the expression cassette comprises in addition c) a nucleic acid molecule encoding a transit peptide, especially a plastidal transit petide in case in Table I, application no. 1, in column 6 in the same line as SEQ ID NO. 10172 is depicted, plastidic is mentioned, or a mitochondrial transit petide in case in Table I, application no. 1, in column 6 in the same line as SEQ ID NO. 10172 is depicted, mitochondrial is mentioned; which is operable linke, too.

[1962] In another embodiment thereof the expression cassette does not comprise an additional transit peptide in case in Table I, application no. 1, in column 6 in the same line as SEQ ID NO. 10172 is depicted, non-targeted is mentioned.

[1963] In an embodiment the present invention relates to an expresssion cassette comprising a) a promoter, prefereably a promoter selected from the group consisting of Big35S, PCUbi, Super and USP, in particular PCUbi; and b) the nucleic acid SEQ ID NO. 3279, or a homolog or fragment thereof, or a homolog thereof being depicted in Table I, application no. 1, column 8, in the same line as SEQ ID NO. 3279, preferably the coding region thereof, a homolog or a fragment thereof; which are operable linked.

[1964] In an embodiment thereof the expression cassette comprises in addition c) a nucleic acid molecule encoding a transit peptide, especially a plastidal transit petide in case in Table I, application no. 1, in column 6 in the same line as SEQ ID NO. 3279 is depicted, plastidic is mentioned, or a mitochondrial transit petide in case in Table I, application no. 1, in column 6 in the same line as SEQ ID NO. 3279 is depicted, mitochondrial is mentioned; which is operable linke, too.

[1965] In another embodiment thereof the expression cassette does not comprise an additional transit peptide in case in Table I, application no. 1, in column 6 in the same line as SEQ ID NO. 3279 is depicted, non-targeted is mentioned.

[1966] In an embodiment the present invention relates to an expresssion cassette comprising a) a promoter, prefereably a promoter selected from the group consisting of Big35S, PCUbi, Super and USP, in particular PCUbi; and b) the nucleic acid SEQ ID NO. 385, or a homolog or fragment thereof, or a homolog thereof being depicted in Table I, application no. 1, column 8, in the same line as SEQ ID NO. 385, preferably the coding region thereof, a homolog or a fragment thereof; which are operable linked.

[1967] In an embodiment thereof the expression cassette comprises in addition c) a nucleic acid molecule encoding a transit peptide, especially a plastidal transit petide in case in Table I, application no. 1, in column 6 in the same line as SEQ ID NO. 385 is depicted, plastidic is mentioned, or a mitochondrial transit petide in case in Table I, application no. 1, in column 6 in the same line as SEQ ID NO. 385 is depicted, mitochondrial is mentioned; which is operable linke, too.

[1968] In another embodiment thereof the expression cassette does not comprise an additional transit peptide in case in Table I, application no. 1, in column 6 in the same line as SEQ ID NO. 385 is depicted, non-targeted is mentioned.

[1969] In an embodiment the present invention relates to an expresssion cassette comprising a) a promoter, prefereably a promoter selected from the group consisting of Big35S, PCUbi, Super and USP, in particular PCUbi; and b) the nucleic acid SEQ ID NO. 4040, or a homolog or fragment thereof, or a homolog thereof being depicted in Table I, application no. 1, column 8, in the same line as SEQ ID NO. 4040, preferably the coding region thereof, a homolog or a fragment thereof; which are operable linked.

[1970] In an embodiment thereof the expression cassette comprises in addition c) a nucleic acid molecule encoding a transit peptide, especially a plastidal transit petide in case in Table I, application no. 1, in column 6 in the same line as SEQ ID NO. 4040 is depicted, plastidic is mentioned, or a mitochondrial transit petide in case in Table I, application no. 1, in column 6 in the same line as SEQ ID NO. 4040 is depicted, mitochondrial is mentioned; which is operable linke, too.

[1971] In another embodiment thereof the expression cassette does not comprise an additional transit peptide in case in Table I, application no. 1, in column 6 in the same line as SEQ ID NO. 4040 is depicted, non-targeted is mentioned.

[1972] In an embodiment the present invention relates to an expresssion cassette comprising a) a promoter, prefereably a promoter selected from the group consisting of Big35S, PCUbi, Super and USP, in particular PCUbi; and b) the nucleic acid SEQ ID NO. 4102, or a homolog or fragment thereof, or a homolog thereof being depicted in Table I, application no. 1, column 8, in the same line as SEQ ID NO. 4102, preferably the coding region thereof, a homolog or a fragment thereof; which are operable linked.

[1973] In an embodiment thereof the expression cassette comprises in addition c) a nucleic acid molecule encoding a transit peptide, especially a plastidal transit petide in case in Table I, application no. 1, in column 6 in the same line as SEQ ID NO. 4102 is depicted, plastidic is mentioned, or a mitochondrial transit petide in case in Table I, application no. 1, in column 6 in the same line as SEQ ID NO. 4102 is depicted, mitochondrial is mentioned; which is operable linke, too.

[1974] In another embodiment thereof the expression cassette does not comprise an additional transit peptide in case in Table I, application no. 1, in column 6 in the same line as SEQ ID NO. 4102 is depicted, non-targeted is mentioned.

[1975] In an embodiment the present invention relates to an expresssion cassette comprising a) a promoter, prefereably a promoter selected from the group consisting of Big35S, PCUbi, Super and USP, in particular PCUbi; and b) the nucleic acid SEQ ID NO. 4348, or a homolog or fragment thereof, or a homolog thereof being depicted in Table I, application no. 1, column 8, in the same line as SEQ ID NO. 4348, preferably the coding region thereof, a homolog or a fragment thereof; which are operable linked.

[1976] In an embodiment thereof the expression cassette comprises in addition c) a nucleic acid molecule encoding a transit peptide, especially a plastidal transit petide in case in Table I, application no. 1, in column 6 in the same line as SEQ ID NO. 4348 is depicted, plastidic is mentioned, or a mitochondrial transit petide in case in Table I, application no. 1, in column 6 in the same line as SEQ ID NO. 4348 is depicted, mitochondrial is mentioned; which is operable linke, too.

[1977] In another embodiment thereof the expression cassette does not comprise an additional transit peptide in case in Table I, application no. 1, in column 6 in the same line as SEQ ID NO. 4348 is depicted, non-targeted is mentioned.

[1978] In an embodiment the present invention relates to an expresssion cassette comprising a) a promoter, prefereably a promoter selected from the group consisting of Big35S, PCUbi, Super and USP, in particular PCUbi; and b) the nucleic acid SEQ ID NO. 4904, or a homolog or fragment thereof, or a homolog thereof being depicted in Table I, application no. 1, column 8, in the same line as SEQ ID NO. 4904, preferably the coding region thereof, a homolog or a fragment thereof; which are operable linked.

[1979] In an embodiment thereof the expression cassette comprises in addition c) a nucleic acid molecule encoding a transit peptide, especially a plastidal transit petide in case in Table I, application no. 1, in column 6 in the same line as SEQ ID NO. 4904 is depicted, plastidic is mentioned, or a mitochondrial transit petide in case in Table I, application no. 1, in column 6 in the same line as SEQ ID NO. 4904 is depicted, mitochondrial is mentioned; which is operable linke, too.

[1980] In another embodiment thereof the expression cassette does not comprise an additional transit peptide in case in Table I, application no. 1, in column 6 in the same line as SEQ ID NO. 4904 is depicted, non-targeted is mentioned.

[1981] In an embodiment the present invention relates to an expresssion cassette comprising a) a promoter, prefereably a promoter selected from the group consisting of Big35S, PCUbi, Super and USP, in particular PCUbi; and b) the nucleic acid SEQ ID NO. 5318, or a homolog or fragment thereof, or a homolog thereof being depicted in Table I, application no. 1, column 8, in the same line as SEQ ID NO. 5318, preferably the coding region thereof, a homolog or a fragment thereof; which are operable linked.

[1982] In an embodiment thereof the expression cassette comprises in addition c) a nucleic acid molecule encoding a transit peptide, especially a plastidal transit petide in case in Table I, application no. 1, in column 6 in the same line as SEQ ID NO. 5318 is depicted, plastidic is mentioned, or a mitochondrial transit petide in case in Table I, application no. 1, in column 6 in the same line as SEQ ID NO. 5318 is depicted, mitochondrial is mentioned; which is operable linke, too.

[1983] In another embodiment thereof the expression cassette does not comprise an additional transit peptide in case in Table I, application no. 1, in column 6 in the same line as SEQ ID NO. 5318 is depicted, non-targeted is mentioned.

[1984] In an embodiment the present invention relates to an expresssion cassette comprising a) a promoter, prefereably a promoter selected from the group consisting of Big35S, PCUbi, Super and USP, in particular PCUbi; and b) the nucleic acid SEQ ID NO. 5493, or a homolog or fragment thereof, or a homolog thereof being depicted in Table I, application no. 1, column 8, in the same line as SEQ ID NO. 5493, preferably the coding region thereof, a homolog or a fragment thereof; which are operable linked.

[1985] In an embodiment thereof the expression cassette comprises in addition c) a nucleic acid molecule encoding a transit peptide, especially a plastidal transit petide in case in Table I, application no. 1, in column 6 in the same line as SEQ ID NO. 5493 is depicted, plastidic is mentioned, or a mitochondrial transit petide in case in Table I, application no. 1, in column 6 in the same line as SEQ ID NO. 5493 is depicted, mitochondrial is mentioned; which is operable linke, too.

[1986] In another embodiment thereof the expression cassette does not comprise an additional transit peptide in case in Table I, application no. 1, in column 6 in the same line as SEQ ID NO. 5493 is depicted, non-targeted is mentioned.

[1987] In an embodiment the present invention relates to an expresssion cassette comprising a) a promoter, prefereably a promoter selected from the group consisting of Big35S, PCUbi, Super and USP, in particular PCUbi; and b) the nucleic acid SEQ ID NO. 5557, or a homolog or fragment thereof, or a homolog thereof being depicted in Table I, application no. 1, column 8, in the same line as SEQ ID NO. 5557, preferably the coding region thereof, a homolog or a fragment thereof; which are operable linked.

[1988] In an embodiment thereof the expression cassette comprises in addition c) a nucleic acid molecule encoding a transit peptide, especially a plastidal transit petide in case in Table I, application no. 1, in column 6 in the same line as SEQ ID NO. 5557 is depicted, plastidic is mentioned, or a mitochondrial transit petide in case in Table I, application no. 1, in column 6 in the same line as SEQ ID NO. 5557 is depicted, mitochondrial is mentioned; which is operable linke, too.

[1989] In another embodiment thereof the expression cassette does not comprise an additional transit peptide in case in Table I, application no. 1, in column 6 in the same line as SEQ ID NO. 5557 is depicted, non-targeted is mentioned.

[1990] In an embodiment the present invention relates to an expresssion cassette comprising a) a promoter, prefereably a promoter selected from the group consisting of Big35S, PCUbi, Super and USP, in particular PCUbi; and b) the nucleic acid SEQ ID NO. 2935, or a homolog or fragment thereof, or a homolog thereof being depicted in Table I, application no. 1, column 8, in the same line as SEQ ID NO. 2935, preferably the coding region thereof, a homolog or a fragment thereof; which are operable linked.

[1991] In an embodiment thereof the expression cassette comprises in addition c) a nucleic acid molecule encoding a transit peptide, especially a plastidal transit petide in case in Table I, application no. 1, in column 6 in the same line as SEQ ID NO. 2935 is depicted, plastidic is mentioned, or a mitochondrial transit petide in case in Table I, application no. 1, in column 6 in the same line as SEQ ID NO. 2935 is depicted, mitochondrial is mentioned; which is operable linke, too.

[1992] In another embodiment thereof the expression cassette does not comprise an additional transit peptide in case in Table I, application no. 1, in column 6 in the same line as SEQ ID NO. 2935 is depicted, non-targeted is mentioned.

[1993] In an embodiment the present invention relates to an expresssion cassette comprising a) a promoter, prefereably a promoter selected from the group consisting of Big35S, PCUbi, Super and USP, in particular PCUbi; and b) the nucleic acid SEQ ID NO. 12341, or a homolog or fragment thereof, or a homolog thereof being depicted in Table I, application no. 1, column 8, in the same line as SEQ ID NO. 12341, preferably the coding region thereof, a homolog or a fragment thereof; which are operable linked.

[1994] In an embodiment thereof the expression cassette comprises in addition c) a nucleic acid molecule encoding a transit peptide, especially a plastidal transit petide in case in Table I, application no. 1, in column 6 in the same line as SEQ ID NO. 12341 is depicted, plastidic is mentioned, or a mitochondrial transit petide in case in Table I, application no. 1, in column 6 in the same line as SEQ ID NO. 12341 is depicted, mitochondrial is mentioned; which is operable linke, too.

[1995] In another embodiment thereof the expression cassette does not comprise an additional transit peptide in case in Table I, application no. 1, in column 6 in the same line as SEQ ID NO. 12341 is depicted, non-targeted is mentioned.

[1996] In an embodiment the present invention relates to an expresssion cassette comprising a) a promoter, prefereably a promoter selected from the group consisting of Big35S, PCUbi, Super and USP, in particular Super; and b) the nucleic acid SEQ ID NO. 10726, or a homolog or fragment thereof, or a homolog thereof being depicted in Table I, application no. 1, column 8, in the same line as SEQ ID NO. 10726, preferably the coding region thereof, a homolog or a fragment thereof; which are operable linked.

[1997] In an embodiment thereof the expression cassette comprises in addition c) a nucleic acid molecule encoding a transit peptide, especially a plastidal transit petide in case in Table I, application no. 1, in column 6 in the same line as SEQ ID NO. 10726 is depicted, plastidic is mentioned, or a mitochondrial transit petide in case in Table I, application no. 1, in column 6 in the same line as SEQ ID NO. 10726 is depicted, mitochondrial is mentioned; which is operable linke, too.

[1998] In another embodiment thereof the expression cassette does not comprise an additional transit peptide in case in Table I, application no. 1, in column 6 in the same line as SEQ ID NO. 10726 is depicted, non-targeted is mentioned.

[1999] In an embodiment the present invention relates to an expresssion cassette comprising a) a promoter, prefereably a promoter selected from the group consisting of Big35S, PCUbi, Super and USP, in particular Super; and b) the nucleic acid SEQ ID NO. 10740, or a homolog or fragment thereof, or a homolog thereof being depicted in Table I, application no. 1, column 8, in the same line as SEQ ID NO. 10740, preferably the coding region thereof, a homolog or a fragment thereof; which are operable linked.

[2000] In an embodiment thereof the expression cassette comprises in addition c) a nucleic acid molecule encoding a transit peptide, especially a plastidal transit petide in case in Table I, application no. 1, in column 6 in the same line as SEQ ID NO. 10740 is depicted, plastidic is mentioned, or a mitochondrial transit petide in case in Table I, application no. 1, in column 6 in the same line as SEQ ID NO. 10740 is depicted, mitochondrial is mentioned; which is operable linke, too.

[2001] In another embodiment thereof the expression cassette does not comprise an additional transit peptide in case in Table I, application no. 1, in column 6 in the same line as SEQ ID NO. 10740 is depicted, non-targeted is mentioned.

[2002] In an embodiment the present invention relates to an expresssion cassette comprising a) a promoter, prefereably a promoter selected from the group consisting of Big35S, PCUbi, Super and USP, in particular PCUbi; and b) the nucleic acid SEQ ID NO. 10811, or a homolog or fragment thereof, or a homolog thereof being depicted in Table I, application no. 1, column 8, in the same line as SEQ ID NO. 10811, preferably the coding region thereof, a homolog or a fragment thereof; which are operable linked.

[2003] In an embodiment thereof the expression cassette comprises in addition c) a nucleic acid molecule encoding a transit peptide, especially a plastidal transit petide in case in Table I, application no. 1, in column 6 in the same line as SEQ ID NO. 10811 is depicted, plastidic is mentioned, or a mitochondrial transit petide in case in Table I, application no. 1, in column 6 in the same line as SEQ ID NO. 10811 is depicted, mitochondrial is mentioned; which is operable linke, too.

[2004] In another embodiment thereof the expression cassette does not comprise an additional transit peptide in case in Table I, application no. 1, in column 6 in the same line as SEQ ID NO. 10811 is depicted, non-targeted is mentioned.

[2005] In an embodiment the present invention relates to an expresssion cassette comprising a) a promoter, prefereably a promoter selected from the group consisting of Big35S, PCUbi, Super and USP, in particular PCUbi; and b) the nucleic acid SEQ ID NO. 11211, or a homolog or fragment thereof, or a homolog thereof being depicted in Table I, application no. 1, column 8, in the same line as SEQ ID NO. 11211, preferably the coding region thereof, a homolog or a fragment thereof; which are operable linked.

[2006] In an embodiment thereof the expression cassette comprises in addition c) a nucleic acid molecule encoding a transit peptide, especially a plastidal transit petide in case in Table I, application no. 1, in column 6 in the same line as SEQ ID NO. 11211 is depicted, plastidic is mentioned, or a mitochondrial transit petide in case in Table I, application no. 1, in column 6 in the same line as SEQ ID NO. 11211 is depicted, mitochondrial is mentioned; which is operable linke, too.

[2007] In another embodiment thereof the expression cassette does not comprise an additional transit peptide in case in Table I, application no. 1, in column 6 in the same line as SEQ ID NO. 11211 is depicted, non-targeted is mentioned.

[2008] In an embodiment the present invention relates to an expresssion cassette comprising a) a promoter, prefereably a promoter selected from the group consisting of Big35S, PCUbi, Super and USP, in particular PCUbi; and b) the nucleic acid SEQ ID NO. 11423, or a homolog or fragment thereof, or a homolog thereof being depicted in Table I, application no. 1, column 8, in the same line as SEQ ID NO. 11423, preferably the coding region thereof, a homolog or a fragment thereof; which are operable linked.

[2009] In an embodiment thereof the expression cassette comprises in addition c) a nucleic acid molecule encoding a transit peptide, especially a plastidal transit petide in case in Table I, application no. 1, in column 6 in the same line as SEQ ID NO. 11423 is depicted, plastidic is mentioned, or a mitochondrial transit petide in case in Table I, application no. 1, in column 6 in the same line as SEQ ID NO. 11423 is depicted, mitochondrial is mentioned; which is operable linke, too.

[2010] In another embodiment thereof the expression cassette does not comprise an additional transit peptide in case in Table I, application no. 1, in column 6 in the same line as SEQ ID NO. 11423 is depicted, non-targeted is mentioned.

[2011] In an embodiment the present invention relates to an expresssion cassette comprising a) a promoter, prefereably a promoter selected from the group consisting of Big35S, PCUbi, Super and USP, in particular PCUbi; and b) the nucleic acid SEQ ID NO. 11471, or a homolog or fragment thereof, or a homolog thereof being depicted in Table I, application no. 1, column 8, in the same line as SEQ ID NO. 11471, preferably the coding region thereof, a homolog or a fragment thereof; which are operable linked.

[2012] In an embodiment thereof the expression cassette comprises in addition c) a nucleic acid molecule encoding a transit peptide, especially a plastidal transit petide in case in Table I, application no. 1, in column 6 in the same line as SEQ ID NO. 11471 is depicted, plastidic is mentioned, or a mitochondrial transit petide in case in Table I, application no. 1, in column 6 in the same line as SEQ ID NO. 11471 is depicted, mitochondrial is mentioned; which is operable linke, too.

[2013] In another embodiment thereof the expression cassette does not comprise an additional transit peptide in case in Table I, application no. 1, in column 6 in the same line as SEQ ID NO. 11471 is depicted, non-targeted is mentioned.

[2014] In an embodiment the present invention relates to an expresssion cassette comprising a) a promoter, prefereably a promoter selected from the group consisting of Big35S, PCUbi, Super and USP, in particular PCUbi; and b) the nucleic acid SEQ ID NO. 11990, or a homolog or fragment thereof, or a homolog thereof being depicted in Table I, application no. 1, column 8, in the same line as SEQ ID NO. 11990, preferably the coding region thereof, a homolog or a fragment thereof; which are operable linked.

[2015] In an embodiment thereof the expression cassette comprises in addition c) a nucleic acid molecule encoding a transit peptide, especially a plastidal transit petide in case in Table I, application no. 1, in column 6 in the same line as SEQ ID NO. 11990 is depicted, plastidic is mentioned, or a mitochondrial transit petide in case in Table I, application no. 1, in column 6 in the same line as SEQ ID NO. 11990 is depicted, mitochondrial is mentioned; which is operable linke, too.

[2016] In another embodiment thereof the expression cassette does not comprise an additional transit peptide in case in Table I, application no. 1, in column 6 in the same line as SEQ ID NO. 11990 is depicted, non-targeted is mentioned.

[2017] In an embodiment the present invention relates to an expresssion cassette comprising a) a promoter, prefereably a promoter selected from the group consisting of Big35S, PCUbi, Super and USP, in particular PCUbi; and b) the nucleic acid SEQ ID NO. 812, or a homolog or fragment thereof, or a homolog thereof being depicted in Table I, application no. 1, column 8, in the same line as SEQ ID NO. 812, preferably the coding region thereof, a homolog or a fragment thereof; which are operable linked.

[2018] In an embodiment thereof the expression cassette comprises in addition c) a nucleic acid molecule encoding a transit peptide, especially a plastidal transit petide in case in Table I, application no. 1, in column 6 in the same line as SEQ ID NO. 812 is depicted, plastidic is mentioned, or a mitochondrial transit petide in case in Table I, application no. 1, in column 6 in the same line as SEQ ID NO. 812 is depicted, mitochondrial is mentioned; which is operable linke, too.

[2019] In another embodiment thereof the expression cassette does not comprise an additional transit peptide in case in Table I, application no. 1, in column 6 in the same line as SEQ ID NO. 812 is depicted, non-targeted is mentioned.

[2020] In an embodiment the present invention relates to an expresssion cassette comprising a) a promoter, prefereably a promoter selected from the group consisting of Big35S, PCUbi, Super and USP, in particular PCUbi; and b) the nucleic acid SEQ ID NO. 12140, or a homolog or fragment thereof, or a homolog thereof being depicted in Table I, application no. 1, column 8, in the same line as SEQ ID NO. 12140, preferably the coding region thereof, a homolog or a fragment thereof; which are operable linked.

[2021] In an embodiment thereof the expression cassette comprises in addition c) a nucleic acid molecule encoding a transit peptide, especially a plastidal transit petide in case in Table I, application no. 1, in column 6 in the same line as SEQ ID NO. 12140 is depicted, plastidic is mentioned, or a mitochondrial transit petide in case in Table I, application no. 1, in column 6 in the same line as SEQ ID NO. 12140 is depicted, mitochondrial is mentioned; which is operable linke, too.

[2022] In another embodiment thereof the expression cassette does not comprise an additional transit peptide in case in Table I, application no. 1, in column 6 in the same line as SEQ ID NO. 12140 is depicted, non-targeted is mentioned.

[2023] In an embodiment the present invention relates to an expresssion cassette comprising a) a promoter, prefereably a promoter selected from the group consisting of Big35S, PCUbi, Super and USP, in particular Big35S; and b) the nucleic acid SEQ ID NO. 627, or a homolog or fragment thereof, or a homolog thereof being depicted in Table I, application no. 1, column 8, in the same line as SEQ ID NO. 627, preferably the coding region thereof, a homolog or a fragment thereof; which are operable linked.

[2024] In an embodiment thereof the expression cassette comprises in addition c) a nucleic acid molecule encoding a transit peptide, especially a plastidal transit petide in case in Table I, application no. 1, in column 6 in the same line as SEQ ID NO. 627 is depicted, plastidic is mentioned, or a mitochondrial transit petide in case in Table I, application no. 1, in column 6 in the same line as SEQ ID NO. 627 is depicted, mitochondrial is mentioned; which is operable linke, too.

[2025] In another embodiment thereof the expression cassette does not comprise an additional transit peptide in case in Table I, application no. 1, in column 6 in the same line as SEQ ID NO. 627 is depicted, non-targeted is mentioned.

[2026] In an embodiment the present invention relates to an expresssion cassette comprising a) a promoter, prefereably a promoter selected from the group consisting of Big35S, PCUbi, Super and USP, in particular PCUbi; and b) the nucleic acid SEQ ID NO. 12698, or a homolog or fragment thereof, or a homolog thereof being depicted in Table I, application no. 1, column 8, in the same line as SEQ ID NO. 12698, preferably the coding region thereof, a homolog or a fragment thereof; which are operable linked.

[2027] In an embodiment thereof the expression cassette comprises in addition c) a nucleic acid molecule encoding a transit peptide, especially a plastidal transit petide in case in Table I, application no. 1, in column 6 in the same line as SEQ ID NO. 12698 is depicted, plastidic is mentioned, or a mitochondrial transit petide in case in Table I, application no. 1, in column 6 in the same line as SEQ ID NO. 12698 is depicted, mitochondrial is mentioned; which is operable linke, too.

[2028] In another embodiment thereof the expression cassette does not comprise an additional transit peptide in case in Table I, application no. 1, in column 6 in the same line as SEQ ID NO. 12698 is depicted, non-targeted is mentioned.

[2029] In an embodiment the present invention relates to an expresssion cassette comprising a) a promoter, prefereably a promoter selected from the group consisting of Big35S, PCUbi, Super and USP, in particular PCUbi; and b) the nucleic acid SEQ ID NO. 12974, or a homolog or fragment thereof, or a homolog thereof being depicted in Table I, application no. 1, column 8, in the same line as SEQ ID NO. 12974, preferably the coding region thereof, a homolog or a fragment thereof; which are operable linked.

[2030] In an embodiment thereof the expression cassette comprises in addition c) a nucleic acid molecule encoding a transit peptide, especially a plastidal transit petide in case in Table I, application no. 1, in column 6 in the same line as SEQ ID NO. 12974 is depicted, plastidic is mentioned, or a mitochondrial transit petide in case in Table I, application no. 1, in column 6 in the same line as SEQ ID NO. 12974 is depicted, mitochondrial is mentioned; which is operable linke, too.

[2031] In another embodiment thereof the expression cassette does not comprise an additional transit peptide in case in Table I, application no. 1, in column 6 in the same line as SEQ ID NO. 12974 is depicted, non-targeted is mentioned.

[2032] In an embodiment the present invention relates to an expresssion cassette comprising a) a promoter, prefereably a promoter selected from the group consisting of Big35S, PCUbi, Super and USP, in particular PCUbi; and b) the nucleic acid SEQ ID NO. 13376, or a homolog or fragment thereof, or a homolog thereof being depicted in Table I, application no. 1, column 8, in the same line as SEQ ID NO. 13376, preferably the coding region thereof, a homolog or a fragment thereof; which are operable linked.

[2033] In an embodiment thereof the expression cassette comprises in addition c) a nucleic acid molecule encoding a transit peptide, especially a plastidal transit petide in case in Table I, application no. 1, in column 6 in the same line as SEQ ID NO. 13376 is depicted, plastidic is mentioned, or a mitochondrial transit petide in case in Table I, application no. 1, in column 6 in the same line as SEQ ID NO. 13376 is depicted, mitochondrial is mentioned; which is operable linke, too.

[2034] In another embodiment thereof the expression cassette does not comprise an additional transit peptide in case in Table I, application no. 1, in column 6 in the same line as SEQ ID NO. 13376 is depicted, non-targeted is mentioned.

[2035] In an embodiment the present invention relates to an expresssion cassette comprising a) a promoter, prefereably a promoter selected from the group consisting of Big35S, PCUbi, Super and USP, in particular Big35S; and b) the nucleic acid SEQ ID NO. 14171, or a homolog or fragment thereof, or a homolog thereof being depicted in Table I, application no. 1, column 8, in the same line as SEQ ID NO. 14171, preferably the coding region thereof, a homolog or a fragment thereof; which are operable linked.

[2036] In an embodiment thereof the expression cassette comprises in addition c) a nucleic acid molecule encoding a transit peptide, especially a plastidal transit petide in case in Table I, application no. 1, in column 6 in the same line as SEQ ID NO. 14171 is depicted, plastidic is mentioned, or a mitochondrial transit petide in case in Table I, application no. 1, in column 6 in the same line as SEQ ID NO. 14171 is depicted, mitochondrial is mentioned; which is operable linke, too.

[2037] In another embodiment thereof the expression cassette does not comprise an additional transit peptide in case in Table I, application no. 1, in column 6 in the same line as SEQ ID NO. 14171 is depicted, non-targeted is mentioned.

[2038] In an embodiment the present invention relates to an expresssion cassette comprising a) a promoter, prefereably a promoter selected from the group consisting of Big35S, PCUbi, Super and USP, in particular Super; and b) the nucleic acid SEQ ID NO. 14275, or a homolog or fragment thereof, or a homolog thereof being depicted in Table I, application no. 1, column 8, in the same line as SEQ ID NO. 14275, preferably the coding region thereof, a homolog or a fragment thereof; which are operable linked.

[2039] In an embodiment thereof the expression cassette comprises in addition c) a nucleic acid molecule encoding a transit peptide, especially a plastidal transit petide in case in Table I, application no. 1, in column 6 in the same line as SEQ ID NO. 14275 is depicted, plastidic is mentioned, or a mitochondrial transit petide in case in Table I, application no. 1, in column 6 in the same line as SEQ ID NO. 14275 is depicted, mitochondrial is mentioned; which is operable linke, too.

[2040] In another embodiment thereof the expression cassette does not comprise an additional transit peptide in case in Table I, application no. 1, in column 6 in the same line as SEQ ID NO. 14275 is depicted, non-targeted is mentioned.

[2041] In an embodiment the present invention relates to an expresssion cassette comprising a) a promoter, prefereably a promoter selected from the group consisting of Big35S, PCUbi, Super and USP, in particular PCUbi; and b) the nucleic acid SEQ ID NO. 69, or a homolog or fragment thereof, or a homolog thereof being depicted in Table I, application no. 1, column 8, in the same line as SEQ ID NO. 69, preferably the coding region thereof, a homolog or a fragment thereof; which are operable linked.

[2042] In an embodiment thereof the expression cassette comprises in addition c) a nucleic acid molecule encoding a transit peptide, especially a plastidal transit petide in case in Table I, application no. 1, in column 6 in the same line as SEQ ID NO. 69 is depicted, plastidic is mentioned, or a mitochondrial transit petide in case in Table I, application no. 1, in column 6 in the same line as SEQ ID NO. 69 is depicted, mitochondrial is mentioned; which is operable linke, too.

[2043] In another embodiment thereof the expression cassette does not comprise an additional transit peptide in case in Table I, application no. 1, in column 6 in the same line as SEQ ID NO. 69 is depicted, non-targeted is mentioned.

[2044] In an embodiment the present invention relates to an expresssion cassette comprising a) a promoter, prefereably a promoter selected from the group consisting of Big35S, PCUbi, Super and USP, in particular PCUbi; and b) the nucleic acid SEQ ID NO. 352, or a homolog or fragment thereof, or a homolog thereof being depicted in Table I, application no. 1, column 8, in the same line as SEQ ID NO. 352, preferably the coding region thereof, a homolog or a fragment thereof; which are operable linked.

[2045] In an embodiment thereof the expression cassette comprises in addition c) a nucleic acid molecule encoding a transit peptide, especially a plastidal transit petide in case in Table I, application no. 1, in column 6 in the same line as SEQ ID NO. 352 is depicted, plastidic is mentioned, or a mitochondrial transit petide in case in Table I, application no. 1, in column 6 in the same line as SEQ ID NO. 352 is depicted, mitochondrial is mentioned; which is operable linke, too.

[2046] In another embodiment thereof the expression cassette does not comprise an additional transit peptide in case in Table I, application no. 1, in column 6 in the same line as SEQ ID NO. 352 is depicted, non-targeted is mentioned.

[2047] In an embodiment the present invention relates to an expresssion cassette comprising a) a promoter, prefereably a promoter selected from the group consisting of Big35S, PCUbi, Super and USP, in particular PCUbi; and b) the nucleic acid SEQ ID NO. 6040, or a homolog or fragment thereof, or a homolog thereof being depicted in Table I, application no. 1, column 8, in the same line as SEQ ID NO. 6040, preferably the coding region thereof, a homolog or a fragment thereof; which are operable linked.

[2048] In an embodiment thereof the expression cassette comprises in addition c) a nucleic acid molecule encoding a transit peptide, especially a plastidal transit petide in case in Table I, application no. 1, in column 6 in the same line as SEQ ID NO. 6040 is depicted, plastidic is mentioned, or a mitochondrial transit petide in case in Table I, application no. 1, in column 6 in the same line as SEQ ID NO. 6040 is depicted, mitochondrial is mentioned; which is operable linke, too.

[2049] In another embodiment thereof the expression cassette does not comprise an additional transit peptide in case in Table I, application no. 1, in column 6 in the same line as SEQ ID NO. 6040 is depicted, non-targeted is mentioned.

[2050] In an embodiment the present invention relates to an expresssion cassette comprising a) a promoter, prefereably a promoter selected from the group consisting of Big35S, PCUbi, Super and USP, in particular PCUbi; and b) the nucleic acid SEQ ID NO. 12070, or a homolog or fragment thereof, or a homolog thereof being depicted in Table I, application no. 1, column 8, in the same line as SEQ ID NO. 12070, preferably the coding region thereof, a homolog or a fragment thereof; which are operable linked.

[2051] In an embodiment thereof the expression cassette comprises in addition c) a nucleic acid molecule encoding a transit peptide, especially a plastidal transit petide in case in Table I, application no. 1, in column 6 in the same line as SEQ ID NO. 12070 is depicted, plastidic is mentioned, or a mitochondrial transit petide in case in Table I, application no. 1, in column 6 in the same line as SEQ ID NO. 12070 is depicted, mitochondrial is mentioned; which is operable linke, too.

[2052] In another embodiment thereof the expression cassette does not comprise an additional transit peptide in case in Table I, application no. 1, in column 6 in the same line as SEQ ID NO. 12070 is depicted, non-targeted is mentioned.

[2053] Accordingly, in one embodiment, the process according to the invention comprises the following steps:
[2054] (a) introducing of a nucleic acid construct comprising the nucleic acid molecule of the invention (and if desired, in combination with the nucleic acid encoding a respective transit peptide) or used in the process of the invention or encoding the polypeptide of the present invention or used in the process of the invention; or
[2055] (b) introducing of a nucleic acid molecule, including regulatory sequences and/or factors(and if desired, in combination with the nucleic acid encoding a respective transit peptide), which expression increases the expression of the nucleic acid molecule of the invention or used in the process of the invention or encoding the polypeptide of the present invention or used in the process of the invention;
[2056] in a cell, or a non-human organism or a part thereof, preferably in a plant, plant cell or a microorganism, preferably in the organelles such as the plastids or mitochondria thereof, or preferably non-targeted, or
[2057] (c) introducing an expression cassette as mentioned above, and
[2058] (d) expressing of the gene product encoded by the nucleic acid construct or the nucleic acid molecule (and if desired, in combination with the nucleic acid encoding a respective transit peptide) or expresion cassette mentioned under (a), (b) or (c) in the cell or the non-human organism or part thereof.

[2059] For expression in a host organism, for example a plant, the expression cassette is advantageously inserted into a vector such as by way of example a plasmid, a phage or other DNA which allows optimal expression of the genes in the host organism. Examples of suitable plasmids are: in E. coli pLG338, pACYC184, pBR series such as e.g. pBR322, pUC series such as pUC18 or pUC19, M113mp series, pKC30, pRep4, pHS1, pHS2, pPLc236, pMBL24, pLG200, pUR290, pIN-III113-B1, λgt11 or pBdCI; in Streptomyces pIJ101, pIJ364, pIJ702 or pIJ361; in Bacillus pUB110, pC194 or pBD214; in Corynebacterium pSA77 or pAJ667; in fungi pALS1, pIL2 or pBB116; other advantageous fungal vectors are described by Romanos M. A. et al., Yeast 8, 423 (1992) and by van den Hondel C. A. M. J. J. et al. [(1991) “Heterologous gene expression in filamentous fungi”] as well as in “More Gene Manipulations” in “Fungi” in Bennet J. W. & Lasure L. L., eds., pp. 396-428, Academic Press, San Diego, and in “Gene transfer systems and vector development for filamentous fungi” [van den Hondel C. A. M. J. J. & Punt P. J. (1991) in: Applied Molecular Genetics of Fungi, Peberdy J. F. et al., eds., pp. 1-28, Cambridge University Press: Cambridge]. Examples of advantageous yeast vectors are 2pM, pAG-1, YEp6, YEp13 or pEMBLYe23. Examples of algal or plant plasmids are pLGV23, pGHIac+, pBIN19, pAK2004, pVKH or pDH51 (see Schmidt R., Willmitzer L., Plant Cell Rep. 7, 583 (1988)). The vectors identified above or derivatives of the vectors identified above are a small selection of the possible plasmids. Further plasmids are well known to those skilled in the art and may be found, for example, in “Cloning Vectors” (Eds. P. H. Pouwels et al., Elsevier, Amsterdam-New York-Oxford, 1985, ISBN 0 444 904018). Suitable plant vectors are described inter alia in “Methods in Plant Molecular Biology and Biotechnology” (CRC Press, Ch. 6/7, pp. 71-119). Advantageous vectors are known as shuttle vectors or binary vectors which replicate in E. coli and Agrobacterium. Examples for binary vectors are pBIN19, pBI101, pBinAR, pGPTV, pCAMBIA, pBIB-HYG, pBecks, pGreen or pPZP (Hajukiewicz P. et al., Plant Mol. Biol. 25, 989 (1994), and Hellens et al, Trends in Plant Science 5, 446 (2000)).

[2060] In a further embodiment of the vector the expression cassette according to the invention may also advantageously be introduced into the organisms in the form of a linear DNA and be integrated into the genome of the host organism by way of heterologous or homologous recombination. This linear DNA may be composed of a linearized plasmid or only of the expression cassette as vector or the respective nucleic acid sequences (if desired, in combination with the nucleic acid encoding a respective transit peptide) according to the invention.

[2061] In a further advantageous embodiment the nucleic acid sequence (if desired, in combination with the nucleic acid encoding a respective transit peptide) according to the invention can also be introduced into an organism on its own.

[2062] If in addition to the nucleic acid sequence according to the invention (and if desired, in combination with the nucleic acid encoding a respective transit peptide) further genes are to be introduced into the organism, all genes altogether with a marker in a single vector or each single gene with a marker in a vector can be introduced into the organism, whereby the different vectors can be introduced simultaneously or successively.

[2063] The vector advantageously contains at least one copy of the nucleic acid sequences according to the invention (and if desired, in combination with the nucleic acid encoding a respective transit peptide) or of the expression cassette (=gene construct) according to the invention.

[2064] The invention further provides a vector, comprising a nucleic acid molecule comprising 1) a nucleic acid molecule selected from the group consisting of:
[2065] (a) a nucleic acid molecule encoding a polypeptide shown in Table II, column 5 or 8, application no. 1, preferably shown in Table IIA, application no. 1, in column 5, or in Table II A, application no. 1, column 8, or in Table II B, application no. 1, column 8, or a homolog or a fragment thereof;
[2066] (b) a nucleic acid molecule shown in Table I, application no. 1, column 5 or 8, preferably shown in Table I A, application no. 1, in column 5, or in Table I A, application no. 1, column 8, or in Table I B, application no. 1, column 8, preferably the coding region thereof, or a homolog or a fragment thereof;
[2067] (c) a nucleic acid molecule, which, as a result of the degeneracy of the genetic code, can be derived from a polypeptide sequence depicted in column 5 or 8 of Table II, application no. 1, preferably shown in Table II A, application no. 1, in column 5, or in Table II A, application no. 1, column 8, or in Table II B, application no. ,1, column 8;
[2068] (d) a nucleic acid molecule having at least 30% identity, preferably at least 40%, 50%, 60%, 70%, 75%, 80%, 85%, 90%, 95%, 96%, 97%, 98%, 99%, 99.5%, with the nucleic acid molecule sequence of a polynucleotide comprising the nucleic acid molecule shown in column 5 or 8 of Table I, application no. 1, preferably shown in Table I A, application no. 1, in column 5, or in Table I A, application no. 1, column 8, or in Table I B, application no. 1,column 8, preferably the coding region thereof;
[2069] (e) a nucleic acid molecule encoding a polypeptide having at least 30% identity, preferably at least 40%, 50% 60%, 70%, 75%, 80%, 85%, 90%, 95%, 96%, 97%, 98%, 99%, 99.5%, identity with the amino acid sequence of the polypeptide encoded by the nucleic acid molecule of (a), (b), (c), or (d);
[2070] (f) a nucleic acid molecule which hybridizes with a nucleic acid molecule of (a), (b), (c), (d), or (e) under under stringent hybridisation conditions;
[2071] (g) a nucleic acid molecule encoding a polypeptide which can be isolated with the aid of monoclonal or polyclonal antibodies made against a polypeptide encoded by one of the nucleic acid molecules of (a), (b), (c), (d), (e) or (f);
[2072] (h) a nucleic acid molecule encoding a polypeptide comprising the consensus sequence or one or more polypeptide motifs as shown in column 8 of Table IV, application no. 1;
[2073] (i) a nucleic acid molecule encoding a polypeptide having the activity represented by a protein as depicted in column 5 of Table II, application no. 1;
[2074] (j) a nucleic acid molecule comprising a polynucleotide which is obtained by amplifying a cDNA library or a genomic library using the primers in Table III, application no. 1, column 8;
[2075] and
[2076] (k) nucleic acid molecule which is obtainable by screening a suitable nucleic acid library, especially a cDNA library and/or a genomic library, under stringent hybridization conditions with a probe comprising one of the sequences of the nucleic acid molecule of (a), (b), (c), (d), (e), (f), (g), (h), (i) or (j) or with a fragment thereof having at least 15 nt, preferably 20 nt, 30 nt, 50 nt, 100 nt, 200 nt, 500 nt, 1000 nt, 1500 nt, 2000 nt or 3000 nt of the nucleic acid molecule complementary to a nucleic acid sequence characterized in (a), (b), (c), (d), (e), (f), (g), (h), (i) or (j);
   or a nucleic acid molecule comprising a sequence which is complementary thereto.
   (All the references to Tables I to IV are references to the corresponding lines of Tables I to IV.)

[2077] In a preferred embodiment of said vector said nucleic acid molecule according to 1 (a), (b), (c), (d), (e), (f), (g), (h), (i), (j) or (k) encodes a polypeptide which has the activity of the respective polypeptide represented by a protein comprising a polypeptide as depicted in the respective line in column 5 of Table II, application no. 1.

[2078] In another preferred embodiment of said vector said nucleic acid molecule according to 1 (a), (b), (c), (d), (e), (f), (g), (h), (i), (j) or (k) confers a generation or an increase of the respective fine chemical in a non-human organism or a part thereof as compared to a corresponding wild-type non-human organism or part thereof.

[2079] In another preferred embodiment of said vector said nucleic acid molecule according to 1 (a), (b), (c), (d), (e), (f), (g), (h), (i), (j) or (k) encodes a polypeptide which has the activity of the respective polypeptide represented by a protein as depicted in the respective line in column 5 of Table II, application no. 1, and confers a generation or an increase of the respective fine chemical in a non-human organism or a part thereof as compared to a corresponding wild-type non-human organism or part thereof.

[2080] In another embodiment thereof said vector comprises beneath said nucleic acid molecule according to 1 (a), (b), (c), (d), (e), (f), (g), (h), (i), (j) or (k), a promoter, prefereably a promoter selected from the group consisting of Big35S, PCUbi, Super and USP, which are operable linked.

[2081] In a preferred embodiment thereof said vector comprises beneath said nucleic acid molecule according to 1 (a), (b), (c), (d), (e), (f), (g), (h), (i), (j) or (k), a promoter, prefereably a promoter selected from the group consisting of Big35S, PCUbi, Super and USP, which are operable linked; and said nucleic acid molecule according to 1 (a), (b), (c), (d), (e), (f), (g), (h), (i), (j) or (k) encodes a polypeptide which has the activity of the respective polypeptide represented by a protein comprising a polypeptide as depicted in the respective line in column 5 of Table II, application no. 1.

[2082] In another preferred embodiment thereof said vector comprises beneath said nucleic acid molecule according to 1 (a), (b), (c), (d), (e), (f), (g), (h), (i), (j) or (k), a promoter, prefereably a promoter selected from the group consisting of Big35S, PCUbi, Super and USP, which are operable linked; and said nucleic acid molecule according to 1 (a), (b), (c), (d), (e), (f), (g), (h), (i), (j) or (k) confers a generation or an increase of the respective fine chemical in a non-human organism or a part thereof as compared to a corresponding wild-type non-human organism or part thereof.

[2083] In another preferred embodiment thereof said vector comprises beneath said nucleic acid molecule according to 1 (a), (b), (c), (d), (e), (f), (g), (h), (i), (j) or (k), a promoter, prefereably a promoter selected from the group consisting of Big35S, PCUbi, Super and USP, which are operable linked; and said nucleic acid molecule according to 1 (a), (b), (c), (d), (e), (f), (g), (h), (i), (j) or (k) encodes a polypeptide which has the activity of the respective polypeptide represented by a protein as depicted in the respective line in column 5 of Table II, application no. 1, and confers a generation or an increase of the respective fine chemical in a non-human organism or a part thereof as compared to a corresponding wild-type non-human organism or part thereof.

[2084] In another embodiment thereof said vector comprises beneath said nucleic acid molecule according to 1 (a), (b), (c), (d), (e), (f), (g), (h), (i), (j) or (k), a nucleic acid molecule encoding a transit peptide, preferably encoding a plastidal transit peptide, especially in case in column 6 of Table I, application no. 1, in the same line as of the respective nucleic acid molecule according to 1) “plastidic” is depicted, or encoding a mitochondrial transit peptide, especially in case in column 6 of Table I, application no. 1, in the same line as of the respective nucleic acid molecule according to 1) “mitochondrial” is depicted, which are operable linked.

[2085] In another embodiment thereof said vector does not comprise beneath said nucleic acid molecule according to 1 (a), (b), (c), (d), (e), (f), (g), (h), (i), (j) or (k), a nucleic acid molecule encoding a transit peptide in case in column 6 of Table I, application no. 1, in the same line as of the respective nucleic acid molecule according to 1) “non-targeted” is depicted.

[2086] In another embodiment thereof said vector comprises beneath said nucleic acid molecule according to 1 (a), (b), (c), (d), (e), (f), (g), (h), (i), (j) or (k), and a promoter, prefereably a promoter selected from the group consisting of Big35S, PCUbi, Super and USP; a nucleic acid molecule encoding a transit peptide, preferably encoding a plastidal transit peptide, especially in case in column 6 of Table I, application no. 1, in the same line as of the respective nucleic acid molecule according to 1) “plastidic” is depicted, or encoding a mitochondrial transit peptide, especially in case in column 6 of Table I, application no. 1, in the same line as of the respective nucleic acid molecule according to 1) “mitochondrial” is depicted, which are operable linked.

[2087] In another embodiment thereof said vector does not comprise beneath said nucleic acid molecule according to 1 (a), (b), (c), (d), (e), (f), (g), (h), (i), (j) or (k), and a promoter, prefereably a promoter selected from the group consisting of Big35S, PCUbi, Super and USP, which are operable linked; a nucleic acid molecule encoding a transit peptide, especially in case in column 6 of Table I, application no. 1, in the same line as of the respective nucleic acid molecule according to 1) “non-targeted” is depicted.

[2088] In another embodiment thereof said vector comprises beneath said nucleic acid molecule according to 1 (a), (b), (c), (d), (e), (f), (g), (h), (i), (j) or (k), and a promoter, prefereably a promoter selected from the group consisting of Big35S, PCUbi, Super and USP; a nucleic acid molecule encoding a transit peptide, preferably encoding a plastidal transit peptide, especially in case in column 6 of Table I, application no. 1, in the same line as of the respective nucleic acid molecule according to 1) “plastidic” is depicted, or encoding a mitochondrial transit peptide, especially in case in column 6 of Table I, application no. 1, in the same line as of the respective nucleic acid molecule according to 1) “mitochondrial” is depicted, which are operable linked; and wherein said nucleic acid molecule according to 1 (a), (b), (c), (d), (e), (f), (g), (h), (i), (j) or (k) encodes a polypeptide which has the activity of the respective polypeptide represented by a protein comprising a polypeptide as depicted in column 5 of Table II, application no. 1 (in the same line).

[2089] In another embodiment thereof said vector does not comprise beneath said nucleic acid molecule according to 1 (a), (b), (c), (d), (e), (f), (g), (h), (i), (j) or (k), and a promoter, prefereably a promoter selected from the group consisting of Big35S, PCUbi, Super and USP, which are operatively linked; a nucleic acid molecule encoding a transit peptide, especially in case in column 6 of Table I, application no. 1, in the same line as of the respective nucleic acid molecule according to 1) “non-targeted” is depicted; and wherein said nucleic acid molecule according to 1 (a), (b), (c), (d), (e), (f), (g), (h), (i), (j) or (k) encodes a polypeptide which has the activity of the respective polypeptide represented by a protein comprising a polypeptide as depicted in column 5 of Table II, application no. 1.

[2090] In another embodiment thereof said vector comprises beneath said nucleic acid molecule according to 1 (a), (b), (c), (d), (e), (f), (g), (h), (i), (j) or (k), and a promoter, prefereably a promoter selected from the group consisting of Big35S, PCUbi, Super and USP; a nucleic acid molecule encoding a transit peptide, preferably encoding a plastidal transit peptide, especially in case in column 6 of Table I, application no. 1, in the same line as of the respective nucleic acid molecule according to 1) “plastidic” is depicted, or encoding a mitochondrial transit peptide, especially in case in column 6 of Table I, application no. 1, in the same line as of the respective nucleic acid molecule according to 1) “mitochondrial” is depicted, which are operable linked; and wherein said nucleic acid molecule according to 1 (a), (b), (c), (d), (e), (f), (g), (h), (i), (j) or (k) confers a generation or an increase of the respective fine chemical in a non-human organism or a part thereof as compared to a corresponding wild-type non-human organism or part thereof.

[2091] In another embodiment thereof said vector does not comprise beneath said nucleic acid molecule according to 1 (a), (b), (c), (d), (e), (f), (g), (h), (i), (j) or (k), and a promoter, prefereably a promoter selected from the group consisting of Big35S, PCUbi, Super and USP, which are operatively linked; a nucleic acid molecule encoding a transit peptide, especially in case in column 6 of Table I, application no. 1, in the same line as of the respective nucleic acid molecule according to 1) “non-targeted” is depicted; and wherein said nucleic acid molecule according to 1 (a), (b), (c), (d), (e), (f), (g), (h), (i), (j) or (k) confers a generation or an increase of the respective fine chemical in a non-human organism or a part thereof as compared to a corresponding wild-type non-human organism or part thereof.

[2092] In another embodiment thereof said vector comprises beneath said nucleic acid molecule according to 1 (a), (b), (c), (d), (e), (f), (g), (h), (i), (j) or (k), and a promoter, prefereably a promoter selected from the group consisting of Big35S, PCUbi, Super and USP; a nucleic acid molecule encoding a transit peptide, preferably encoding a plastidal transit peptide, especially in case in column 6 of Table I, application no. 1, in the same line as of the respective nucleic acid molecule according to 1) “plastidic” is depicted, or encoding a mitochondrial transit peptide, especially in case in column 6 of Table I, application no. 1, in the same line as of the respective nucleic acid molecule according to 1) “mitochondrial” is depicted, which are operable linked; and wherein said nucleic acid molecule according to 1 (a), (b), (c), (d), (e), (f), (g), (h), (i), (j) or (k) encodes a polypeptide which has the activity of the respective polypeptide represented by a protein as depicted in column 5 of Table II application no. 1 and confers a generation or an increase of the respective fine chemical in a non-human organism or a part thereof as compared to a corresponding wild-type non-human organism or part thereof.

[2093] In another embodiment thereof said vector does not comprise beneath said nucleic acid molecule according to 1 (a), (b), (c), (d), (e), (f), (g), (h), (i), (j) or (k), and a promoter, prefereably a promoter selected from the group consisting of Big35S, PCUbi, Super and USP, which are operatively linked; a nucleic acid molecule encoding a transit peptide, especially in case in column 6 of Table I, application no. 1, in the same line as of the respective nucleic acid molecule according to 1) “non-targeted” is depicted; and wherein said nucleic acid molecule according to 1 (a), (b), (c), (d), (e), (f), (g), (h), (i), (j) or (k) encodes a polypeptide which has the activity of the respective polypeptide represented by a protein as depicted in column 5 of Table II application no. 1 (in the same line) and confers a generation or an increase of the respective fine chemical in a non-human organism or a part thereof as compared to a corresponding wild-type non-human organism or part thereof.

[2094] In a prefered embodiment of said vector said nucleic acid molecule according to 1 (a), (b), (c), (d), (e), (f), (g), (h), (i), (j) or (k), said promoter and optionally said nucleic acid molecule encoding a transit peptide are encompassed in an expression cassette. Accordingly in an embodiment the invention provides a vector comprising an expression casssette comprising said nucleic acid molecule according to 1 (a), (b), (c), (d), (e), (f), (g), (h), (i), (j) or (k), said promoter and optionally said a nucleic acid molecule encoding a transit peptide, operable linked. Said expression cassette may encompass a terminator, too.

[2095] The invention further provides a vector comprising a nucleic acid molecule comprising 1) a nucleic acid molecule selected from the group consisting of:
[2096] (a) a nucleic acid molecule encoding a polypeptide shown in Table II, column 5 or 8, application no. 1, preferably shown in Table II A, application no. 1, in column 5, or in Table II A, application no. 1, column 8, or in Table II B, application no. 1, column 8, or a homolog or a fragment thereof;
[2097] (b) a nucleic acid molecule shown in Table I, application no. 1, column 5 or 8, preferably shown in Table I A, application no. 1, in column 5, or in Table I A, application no. 1, column 8, or in Table I B, application no. 1, column 8, preferably the coding region thereof, or a homolog or a fragment thereof;
[2098] (c) a nucleic acid molecule, which, as a result of the degeneracy of the genetic code, can be derived from a polypeptide sequence depicted in column 5 or 8 of Table II, application no. 1, preferably shown in Table II A, application no. 1, in column 5, or in Table II A, application no. 1, column 8, or in Table II B, application no. 1, column 8;
[2099] (d) a nucleic acid molecule having at least 30% identity, preferably at least 40%, 50%, 60%, 70%, 75%, 80%, 85%, 90%, 95%, 96%, 97%, 98%, 99%, 99.5%, with the nucleic acid molecule sequence of a polynucleotide comprising the nucleic acid molecule shown in column 5 or 8 of Table I, application no. 1, preferably shown in Table I A, application no. 1, in column 5, or in Table I A, application no. 1, column 8, or in Table I B, application no. 1, column 8, preferably the coding region thereof;
[2100] (e) a nucleic acid molecule encoding a polypeptide having at least 30% identity, preferably at least 40%, 50% 60%, 70%, 75%, 80%, 85%, 90%, 95%, 96%, 97%, 98%, 99%, 99.5%, identity with the amino acid sequence of the polypeptide encoded by the nucleic acid molecule of (a), (b), (c), or (d);
[2101] (f) a nucleic acid molecule which hybridizes with a nucleic acid molecule of (a), (b), (c), (d), or (e) under under stringent hybridisation conditions;
[2102] (g) a nucleic acid molecule encoding a polypeptide which can be isolated with the aid of monoclonal or polyclonal antibodies made against a polypeptide encoded by one of the nucleic acid molecules of (a), (b), (c), (d), (e) or (f);

[2103] (h) a nucleic acid molecule encoding a polypeptide comprising the consensus sequence or one or more polypeptide motifs as shown in column 8 of Table IV, application no. 1;
[2104] (i) a nucleic acid molecule encoding a polypeptide having the activity represented by a protein as depicted in column 5 of Table II, application no. 1;
[2105] (j) a nucleic acid molecule comprising a polynucleotide which is obtained by amplifying a cDNA library or a genomic library using the primers in Table III, application no. 1, column 8;
[2106] and
[2107] (k) nucleic acid molecule which is obtainable by screening a suitable nucleic acid library, especially a cDNA library and/or a genomic library, under stringent hybridization conditions with a probe comprising one of the sequences of the nucleic acid molecule of (a), (b), (c), (d), (e), (f), (g), (h), (i) or (j) or with a fragment thereof having at least 15 nt, preferably 20 nt, 30 nt, 50 nt, 100 nt, 200 nt, 500 nt, 1000 nt, 1500 nt, 2000 nt or 3000 nt of the nucleic acid molecule complementary to a nucleic acid sequence characterized in (a), (b), (c), (d), (e), (f), (g), (h), (i) or (j);
   or a nucleic acid molecule comprising a sequence which is complementary thereto;
   whereby, preferably, the nucleic acid molecule according to 1 (a), (b), (c), (d), (e), (f), (g), (h), (i), (j) or (k) distinguishes over the sequence depicted in Table I A and/or I B, application no. 1, column 5 or 8, or the coding region thereof, by one or more nucleotides (especially but not exceeding 5%, preferably 4%, 3%, 2%, 1%, 0.5%, 0.2% or 0.1%). In an embodiment, the nucleic acid molecule of the invention does not consist of the sequence shown in Table I A and/or I B, application no. 1, column 5 or 8, or the coding region thereof, respectively. In another embodiment, the nucleic acid molecule of the present invention, preferably the coding region thereof, is 30%, 40%, 50%, 60%, 70%, 80%, 90%, 95% identical but less than 100%, 99.999%, 99.99%, 99.9%, 99%, 98%, 97%, 96% or 95% identical to the sequence shown in Table I A and/or I B, application no. 1, column 5 or 8, or the coding region thereof, respectively. In a further embodiment the nucleic acid molecule does not encode the polypeptide sequence shown in Table II A and/or II B, application no. 1, column 5 or 8 but homologs thereof. Accordingly, in one embodiment, the nucleic acid molecule of the present invention encodes in one embodiment a polypeptide which differs at least in one or more amino acids (especially but not exceeding 5%, preferably 4%, 3%, 2%, 1%, 0.5%, 0.2% or 0.1%) from the polypeptide shown in Table II, application no. 1, column 5 or 8 and does not encode a protein of the sequence shown in Table II A and/or II B, application no. 1, column 5 or 8. Accordingly, in one embodiment, the protein encoded by a sequence of a nucleic acid according to (a), (b), (c), (d), (e), (f), (g), (h), (i), (j) or (k) does not consist of the sequence shown in Table I A and/or I B, application no. 1, column 5 and 8, or the coding region thereof. In a further embodiment, the protein of the present invention is at least 30%,40%, 50%, 60%, 70%, 80%, 90%, 95% identical to protein sequence depicted in

[2108] Table II A and/or II B, application no. 1, column 5 or 8 but less than 100%, preferably less than 99.999%, 99.99% or 99.9%, more preferably less than 99%, 985, 97%, 96% or 95% identical to the sequence shown in Table II A and/or II B, application no. 1, column 5 or 8.

(All the references to Tables I to IV are references to the corresponding lines of Tables I to IV.)

[2109] In a preferred embodiment of said vector said nucleic acid molecule according to 1 (a), (b), (c), (d), (e), (f), (g), (h), (i), (j) or (k) encodes a polypeptide which has the activity of the respective polypeptide represented by a protein comprising a polypeptide as depicted in the respective line in column 5 of Table II, application no. 1.

[2110] In another preferred embodiment of said vector said nucleic acid molecule according to 1 (a), (b), (c), (d), (e), (f), (g), (h), (i), (j) or (k) confers a generation or an increase of the respective fine chemical in a non-human organism or a part thereof as compared to a corresponding wild-type non-human organism or part thereof.

[2111] In another preferred embodiment of said vector said nucleic acid molecule according to 1 (a), (b), (c), (d), (e), (f), (g), (h), (i), (j) or (k) encodes a polypeptide which has the activity of the respective polypeptide represented by a protein as depicted in the respective line in column 5 of Table II, application no. 1, and confers a generation or an increase of the respective fine chemical in a non-human organism or a part thereof as compared to a corresponding wild-type non-human organism or part thereof.

[2112] In another embodiment thereof said vector comprises beneath said nucleic acid molecule according to 1 (a), (b), (c), (d), (e), (f), (g), (h), (i), (j) or (k), a promoter, prefereably a promoter selected from the group consisting of Big35S, PCUbi, Super and USP, which are operable linked.

[2113] In a preferred embodiment thereof said vector comprises beneath said nucleic acid molecule according to 1 (a), (b), (c), (d), (e), (f), (g), (h), (i), (j) or (k), a promoter, prefereably a promoter selected from the group consisting of Big35S, PCUbi, Super and USP, which are operable linked; and said nucleic acid molecule according to 1 (a), (b), (c), (d), (e), (f), (g), (h), (i), (j) or (k) encodes a polypeptide which has the activity of the respective polypeptide represented by a protein comprising a polypeptide as depicted in the respective line in column 5 of Table II, application no. 1.

[2114] In another preferred embodiment thereof said vector comprises beneath said nucleic acid molecule according to 1 (a), (b), (c), (d), (e), (f), (g), (h), (i), (j) or (k), a promoter, prefereably a promoter selected from the group consisting of Big35S, PCUbi, Super and USP, which are operable linked; and said nucleic acid molecule according to 1 (a), (b), (c), (d), (e), (f), (g), (h), (i), (j) or (k) confers a generation or an increase of the respective fine chemical in a non-human organism or a part thereof as compared to a corresponding wild-type non-human organism or part thereof.

[2115] In another preferred embodiment thereof said vector comprises beneath said nucleic acid molecule according to 1 (a), (b), (c), (d), (e), (f), (g), (h), (i), (j) or (k), a promoter, prefereably a promoter selected from the group consisting of Big35S, PCUbi, Super and USP, which are operable linked; and said nucleic acid molecule according to 1 (a), (b), (c), (d), (e), (f), (g), (h), (i), (j) or (k) encodes a polypeptide which has the activity of the respective polypeptide represented by a protein as depicted in the respective line in column 5 of Table II, application no. 1, and confers a generation or an increase of the respective fine chemical in a non-human organism or a part thereof as compared to a corresponding wild-type non-human organism or part thereof.

[2116] In another embodiment thereof said vector comprises beneath said nucleic acid molecule according to 1 (a), (b), (c), (d), (e), (f), (g), (h), (i), (j) or (k), a nucleic acid molecule encoding a transit peptide, preferably encoding a plastidal transit peptide, especially in case in column 6 of Table I, application no. 1, in the same line as of the respective nucleic acid molecule according to 1) “plastidic” is depicted, or encoding a mitochondrial transit peptide, especially in case in column 6 of Table I, application no. 1, in the same line as of the respective nucleic acid molecule according to 1) “mitochondrial” is depicted, which are operable linked.

[2117] In another embodiment thereof said vector does not comprise beneath said nucleic acid molecule according to 1 (a), (b), (c), (d), (e), (f), (g), (h), (i), (j) or (k), a nucleic acid molecule encoding a transit peptide in case in column 6 of Table I, application no. 1, in the same line as of the respective nucleic acid molecule according to 1) “non-targeted” is depicted.

[2118] In another embodiment thereof said vector comprises beneath said nucleic acid molecule according to 1 (a), (b), (c), (d), (e), (f), (g), (h), (i), (j) or (k), and a promoter, prefereably a promoter selected from the group consisting of Big35S, PCUbi, Super and USP; a nucleic acid molecule encoding a transit peptide, preferably encoding a plastidal transit peptide, especially in case in column 6 of Table I, application no. 1, in the same line as of the respective nucleic acid molecule according to 1) “plastidic” is depicted, or encoding a mitochondrial transit peptide, especially in case in column 6 of Table I, application no. 1, in the same line as of the respective nucleic acid molecule according to 1) “mitochondrial” is depicted, which are operable linked.

[2119] In another embodiment thereof said vector does not comprise beneath said nucleic acid molecule according to 1 (a), (b), (c), (d), (e), (f), (g), (h), (i), (j) or (k), and a promoter, prefereably a promoter selected from the group consisting of Big35S, PCUbi, Super and USP, which are operatively linked; a nucleic acid molecule encoding a transit peptide, especially in case in column 6 of Table I, application no. 1, in the same line as of the respective nucleic acid molecule according to 1) “non-targeted” is depicted.

[2120] In another embodiment thereof said vector comprises beneath said nucleic acid molecule according to 1 (a), (b), (c), (d), (e), (f), (g), (h), (i), (j) or (k), and a promoter, prefereably a promoter selected from the group consisting of Big35S, PCUbi, Super and USP; a nucleic acid molecule encoding a transit peptide, preferably encoding a plastidal transit peptide, especially in case in column 6 of Table I, application no. 1, in the same line as of the respective nucleic acid molecule according to 1) “plastidic” is depicted, or encoding a mitochondrial transit peptide, especially in case in column 6 of Table I, application no. 1, in the same line as of the respective nucleic acid molecule according to 1) “mitochondrial” is depicted, which are operable linked; and wherein said nucleic acid molecule according to 1 (a), (b), (c), (d), (e), (f), (g), (h), (i), (j) or (k) encodes a polypeptide which has the activity of the respective polypeptide represented by a protein comprising a polypeptide as depicted in column 5 of Table II, application no. 1.

[2121] In another embodiment thereof said vector does not comprise beneath said nucleic acid molecule according to 1 (a), (b), (c), (d), (e), (f), (g), (h), (i), (j) or (k), and a promoter, prefereably a promoter selected from the group consisting of Big35S, PCUbi, Super and USP, which are operatively linked; a nucleic acid molecule encoding a transit peptide, especially in case in column 6 of Table I, application no. 1, in the same line as of the respective nucleic acid molecule according to 1) “non-targeted” is depicted; and wherein said nucleic acid molecule according to 1 (a), (b), (c), (d), (e), (f), (g), (h), (i), (j) or (k) encodes a polypeptide which has the activity of the respective polypeptide represented by a protein comprising a polypeptide as depicted in column 5 of Table II, application no. 1.

[2122] In another embodiment thereof said vector comprises beneath said nucleic acid molecule according to 1 (a), (b), (c), (d), (e), (f), (g), (h), (i), (j) or (k), and a promoter, prefereably a promoter selected from the group consisting of Big35S, PCUbi, Super and USP; a nucleic acid molecule encoding a transit peptide, preferably encoding a plastidal transit peptide, especially in case in column 6 of Table I, application no. 1, in the same line as of the respective nucleic acid molecule according to 1) “plastidic” is depicted, or encoding a mitochondrial transit peptide, especially in case in column 6 of Table I, application no. 1, in the same line as of the respective nucleic acid molecule according to 1) “mitochondrial” is depicted, which are operable linked; and wherein said nucleic acid molecule according to 1 (a), (b), (c), (d), (e), (f), (g), (h), (i), (j) or (k) confers a generation or an increase of the respective fine chemical in a non-human organism or a part thereof as compared to a corresponding wild-type non-human organism or part thereof.

[2123] In another embodiment thereof said vector does not comprise beneath said nucleic acid molecule according to 1 (a), (b), (c), (d), (e), (f), (g), (h), (i), (j) or (k), and a promoter, prefereably a promoter selected from the group consisting of Big35S, PCUbi, Super and USP, which are operatively linked; a nucleic acid molecule encoding a transit peptide, especially in case in column 6 of Table I, application no. 1, in the same line as of the respective nucleic acid molecule according to 1) “non-targeted” is depicted; and wherein said nucleic acid molecule according to 1 (a), (b), (c), (d), (e), (f), (g), (h), (i), (j) or (k) confers a generation or an increase of the respective fine chemical in a non-human organism or a part thereof as compared to a corresponding wild-type non-human organism or part thereof.

[2124] In another embodiment thereof said vector comprises beneath said nucleic acid molecule according to 1 (a), (b), (c), (d), (e), (f), (g), (h), (i), (j) or (k), and a promoter, prefereably a promoter selected from the group consisting of Big35S, PCUbi, Super and USP; a nucleic acid molecule encoding a transit peptide, preferably encoding a plastidal transit peptide, especially in case in column 6 of Table I, application no. 1, in the same line as of the respective nucleic acid molecule according to 1) “plastidic” is depicted, or encoding a mitochondrial transit peptide, especially in case in column 6 of Table I, application no. 1, in the same line as of the respective nucleic acid molecule according to 1) “mitochondrial” is depicted, which are operable linked; and wherein said nucleic acid molecule according to 1 (a), (b), (c), (d), (e), (f), (g), (h), (i), (j) or (k) encodes a polypeptide which has the activity of the respective polypeptide represented by a protein as depicted in column 5 of Table II application no. 1 and confers a generation or an increase of the respective fine chemical in a non-human organism or a part thereof as compared to a corresponding wild-type non-human organism or part thereof.

[2125] In another embodiment thereof said vector does not comprise beneath said nucleic acid molecule according to 1 (a), (b), (c), (d), (e), (f), (g), (h), (i), (j) or (k), and a promoter, prefereably a promoter selected from the group consisting of Big35S, PCUbi, Super and USP, which are operatively linked; a nucleic acid molecule encoding a transit peptide, especially in case in column 6 of Table I, application no. 1, in the same line as of the respective nucleic acid molecule according to 1) “non-targeted” is depicted; and wherein said nucleic acid molecule according to 1 (a), (b), (c), (d), (e), (f), (g), (h), (i), (j) or (k) encodes a polypeptide which has the activity of the respective polypeptide represented by a protein as depicted in column 5 of Table II application no. 1 and confers a generation or an increase of the respective fine chemical in a non-human organism or a part thereof as compared to a corresponding wild-type non-human organism or part thereof.

[2126] In a prefered embodiment of said vector said nucleic acid molecule according to 1 (a), (b), (c), (d), (e), (f), (g), (h), (i), (j) or (k), said promoter and optionally said nucleic acid molecule encoding a transit peptide are encompassed in an expression cassette. Accordingly in an embodiment the invention provides a vector comprising an expression casssette comprising said nucleic acid molecule according to 1 (a), (b), (c), (d), (e), (f), (g), (h), (i), (j) or (k), said promoter and optionally said a nucleic acid molecule encoding a transit peptide, operable linked. Said expression cassette may encompass a terminator, too.

[2127] The invention further provides a vector, especially an expression vector, comprising a FCRP encoding nucleic acid as described above, wherein expression of the vector or FCRP encoding nucleic acid, respectively in a host cell results in the production of a the respective fine chemical, preferably in an increased production of the respective fine chemical, as compared to a wild type of the host cell.

[2128] As used herein, the term “vector” refers to a nucleic acid molecule capable of transporting another nucleic acid which has been linked thereto. One type of vector is a “plasmid”, which refers to a circular double stranded DNA loop into which additional DNA segments can be ligated. Another type of vector is a viral vector, wherein additional DNA segments can be ligated into the viral genome. Further types of vectors can be linearized nucleic acid sequences, such as transposons, which are pieces of DNA which can copy and insert themselves. There have been two types of transposons found: simple transposons, known as Insertion Sequences and composite transposons, which can have several genes as well as the genes that are required for transposition. Certain vectors are capable of autonomous replication in a host cell into which they are introduced (e.g. bacterial vectors having a bacterial origin of replication and episomal mammalian vectors). Other vectors (e.g. non-episomal mammalian vectors) are integrated into the genome of a host cell or an organelle upon introduction into the host cell, and thereby are replicated along with the host or organelle genome. Moreover, certain vectors are capable of directing the expression of genes to which they are operatively linked. Such vectors are referred to herein as “expression vectors.” In general, expression vectors of utility in recombinant DNA techniques are often in the form of plasmids. In the present specification, “plasmid” and “vector” can be used interchangeably as the plasmid is the most commonly used form of vector. However, the invention is intended to include other forms of expression vectors, such as viral vectors (e.g., replication defective retroviruses, adenoviruses, and adeno-associated viruses), which exert similar functions.

[2129] The term vector furthermore encompasses other vectors known to those skilled in the art such as by way of example phages, viruses such as SV40, CMV, baculovirus, adenovirus, transposons, IS elements, phasmids, phagemids, cosmids, linear or circular DNA.

[2130] These vectors can be replicated autonomously in the host organism or be chromosomally replicated, chromosomal replication being preferred.

[2131] The recombinant expression vectors of the invention comprise a nucleic acid molecule of the invention in a form suitable for expression of the nucleic acid molecule in a host cell, which means that the recombinant expression vectors include one or more regulatory sequences, selected on the basis of the host cells to be used for expression, and, if desired a targeting sequence, which are operatively linked to the nucleic acid sequence to be expressed. As used herein with respect to a recombinant expression vector, “operatively linked” is intended to mean that the nucleotide sequence of interest is linked to the regulatory sequence(s)/targeting sequence in a manner which allows for expression of the nucleotide sequence in such way that the predicted function assigned to the nucleic sequence is fulfilled (e.g. in an in vitro transcription/translation system or in a host cell when the vector is introduced into the host cell). The term “regulatory sequence” is intended to include promoters, enhancers, and other expression control elements (e.g. polyadenylation signals). Such regulatory sequences are described, for example, in Goeddel “Gene Expression Technology: Methods in Enzymology 185”, Academic Press, San Diego, Calif. (1990), and Gruber and Crosby, in: Methods in Plant Molecular Biology and Biotechnology, eds. Glick and Thompson, Chapter 7, 89-108, CRC Press; Boca Raton, Fla., including the references therein. Regulatory sequences include those that direct constitutive expression of a nucleotide sequence in many types of host cells and those that direct expression of the nucleotide sequence only in certain host cells or under certain conditions. It will be appreciated by those skilled in the art that the design of the expression vector can depend on such factors as the choice of the host cell to be transformed, the level of expression of polypeptide desired, etc. The term “regulatory sequence” is to be considered as being encompassed by the the term “regulatory signal”. The expression vectors of the invention can be introduced into host cells to thereby produce polypeptides or peptides, including fusion polypeptides or peptides, encoded by nucleic acid molecules as described herein (e.g., fusion polypeptides, FCRPs etc.).

[2132] In another embodiment the recombinant expression vectors of the invention can be designed specifically for expression of the polypeptides of the invention in plant cells. For example, FCRP genes can be expressed in plant cells (see R. Schmidt, L. Willmitzer, Plant Cell Rep. 7, 583 (1988); Plant Molecular Biology and Biotechnology, C Press, Boca Raton, Fla., Chapter 6/7, p. 71-119 (1993); F. F. White, B. Jenes et al., Techniques for Gene Transfer, in: Transgenic Plants, Vol. 1, Engineering and Utilization, eds. Kung and Wu R., 128-43, Academic Press: 1993; Potrykus, Annu. Rev. Plant Physiol. Plant Molec. Biol. 42, 205 (1991) and references cited therein). Suitable host cells are discussed further in Goeddel, “Gene Expression Technology: Methods in Enzymology 185”, Academic Press: San Diego, Calif. (1990). By way of example the plant expression cassette can be installed in the pRT transformation vector ((a) Toepfer et al., Methods Enzymol. 217, 66 (1993), (b) Toepfer et al., Nucl. Acids. Res. 15, 5890 (1987)). Alternatively, the recombinant expression vector can be transcribed and translated in vitro, for example using T7 promoter regulatory sequences and T7 polymerase.

[2133] Expression vectors employed in prokaryotes frequently make use of inducible systems with and without fusion proteins or fusion oligopeptides, wherein these fusions can ensue in both N-terminal and C-terminal manner or in other useful domains of a protein. Such fusion vectors usually have the following purposes: 1) to increase the RNA expression rate; 2) to increase the achievable protein synthesis rate; 3) to increase the solubility of the protein; 4) or to simplify purification by means of a binding sequence usable for affinity chromatography. Proteolytic cleavage points are also frequently introduced via fusion proteins, which allow cleavage of a portion of the fusion protein and purification. Such recognition sequences for proteases are recognized, e.g. factor Xa, thrombin and enterokinase.

[2134] Typical advantageous fusion and expression vectors are pGEX (Pharmacia Biotech Inc; D. B. Smith and K.S. Johnson, Gene 67, 31 (1988)), pMAL (New England Biolabs, Beverly, Mass.) and pRIT5 (Pharmacia, Piscataway, N.J.) which contains glutathione S-transferase (GST), maltose binding protein or protein A.

[2135] In an embodiment of the present invention, the coding sequence for the polypeptide of the invention is cloned into a pGEX expression vector to create a vector encoding a fusion polypeptide comprising, from the N-terminus to the C-terminus, GST-thrombin cleavage site-X polypeptide. The fusion polypeptide can be purified by affinity chromatography using glutathione-agarose resin. Recombinant FCRP unfused to GST can be recovered by cleavage of the fusion polypeptide with thrombin. Other examples of E. coli expression vectors are pTrc (Amann et al., Gene 69, 301 (1988)) and pET vectors (Studier et al., “Gene Expression Technology: Methods in Enzymology 185”, Academic Press, San Diego, Calif. (1990) 60-89; Stratagene, Amsterdam, The Netherlands).

[2136] Target gene expression from the pTrc vector relies on host RNA polymerase transcription from a hybrid trp-lac fusion promoter. Target gene expression from the pET 11d vector relies on transcription from a T7 gn10-lac fusion promoter mediated by a co-expressed viral RNA polymerase (T7 gn1). This viral polymerase is supplied by host strains BL21(DE3) or HMS174(DE3) from a resident I prophage harboring a T7 gn1 gene under the transcriptional control of the lacUV 5 promoter.

[2137] In a further embodiment of the present invention, the FCRPs are expressed in plants and plant cells such as unicellular plant cells (e.g. algae) (see Falciatore et al., Marine Biotechnology 1 (3), 239 (1999) and references therein) and plant cells from higher plants (e.g., the spermatophytes, such as crop plants), for example to regenerate plants from the plant cells. A nucleic acid molecule coding for FCRP as depicted in Table II, column 5 or 8, or a homolog or a fragment thereof, (and, if desired, in combination with the nucleic acid encoding a respective transit peptide) may be “introduced” into a plant cell by any means, including transfection, transformation or transduction, electroporation, particle bombardment, agroinfection, and the like. One transformation method known to those of skill in the art is the dipping of a flowering plant into an Agrobacteria solution, wherein the Agrobacteria contains the nucleic acid of the invention, followed by breeding of the transformed gametes.

[2138] Other suitable methods for transforming or transfecting host cells including plant cells can be found in Sambrook et al., “Molecular Cloning: A Laboratory Manual”. 2nd ed., Cold Spring Harbor Laboratory, Cold Spring Harbor Laboratory Press, Cold Spring Harbor, N.Y., 1989, and other laboratory manuals such as “Methods in Molecular Biology”, 1995, Vol. 44, Agrobacterium protocols, ed: Gartland and Davey, Humana Press, Totowa, N. J. As generated or increased production of the fine chemical is generally wished to be inherited into a wide variety of monocotyledonous or dicotyledonous plants, preferably plants like maize, wheat, rye, oat, triticale, rice, barley, sugar cane, soybean, peanut, cotton, rapeseed and canola, manihot, pepper, sunflower and tagetes, sugar beet, solanaceous plants like potato, tobacco, eggplant, and tomato, Vicia species, pea, alfalfa, bushy plants (coffee, cacao, tea), Salix species, trees (oil palm, coconut), perennial grasses, and forage crops, these crop plants are also preferred target plants for a genetic engineering as one further embodiment of the present invention. Forage crops include, but are not limited to Wheatgrass, Canarygrass, Bromegrass, Wildrye Grass, Bluegrass, Orchardgrass, Alfalfa, Salfoin, Birdsfoot Trefoil, Alsike Clover, Red Clover and Sweet Clover.

[2139] In one embodiment of the present invention, transfection of a nucleic acid molecule coding for FCRP e.g. as depicted in Table II column 5 or 8, or a homolog or a fragment thereof,(and, if desired, in combination with the nucleic acid encoding a respective transit peptide) into a plant is achieved by Agrobacterium mediated gene transfer. Agrobacterium mediated plant transformation can be performed using for example the GV3101(pMP90) (Koncz and Schell, Mol. Gen. Genet. 204, 383 (1986)) or LBA4404 (Clontech) Agrobacterium tumefaciens strain. Transformation can be performed by standard transformation and regeneration techniques (Deblaere et al., Nucl. Acids Res. 13, 4777 (1994), Gelvin, B. Stanton and Robert A.

[2140] Schilperoort, Plant Molecular Biology Manual, 2nd ed.—Dordrecht: Kluwer Academic Publ., 1995.—in Sect., Ringbuc Zentrale Signatur: BT11-P ISBN 0-7923-2731-4; Bernard R. Glick., John E. Thompson, “Methods in Plant Molecular Biology and Biotechnology”, Boca Raton: CRC Press, 1993 p. 360, ISBN 0-8493-5164-2). For example, rapeseed can be transformed via cotyledon or hypocotyl transformation (Moloney et al., Plant Cell Report 8, 238 (1989); De Block et al., Plant Physiol. 91, 694 (1989)). Use of antibiotics for Agrobacterium and plant selection depends on the binary vector and the Agrobacterium strain used for transformation. Rapeseed selection is normally performed using kanamycin as selectable plant marker. Agrobacterium mediated gene transfer to flax can be performed using, for example, a technique described by Mlynarova et al., Plant Cell Report 13, 282 (1994). Additionally, transformation of soybean can be performed using for example a technique described in European Patent No. 424 047, U.S. Pat. No. 5,322,783, European Patent No. 397 687, U.S. Pat. No. 5,376,543 or U.S. Pat. No. 5,169,770. Transformation of maize can be achieved by particle bombardment, polyethylene glycol mediated DNA uptake or via the silicon carbide fiber technique. (See, for example, Freeling and Walbot “The maize handbook” Springer Verlag: New York (1993) ISBN 3-540-97826-7). A specific example of maize transformation is found in U.S. Pat. No. 5,990,387, and a specific example of wheat transformation can be found in PCT Application No. WO 93/07256. Examples for rice transformation can be found e.g. in EP 1 728 418 or EP 897 013.

[2141] According to the present invention, the introduced nucleic acid molecule coding for FCRP e.g. as depicted in Table II, column 5 or 8, or a homolog or a fragment thereof, may be maintained in the plant cell stably if it is incorporated into a non-chromosomal autonomous replicon or integrated into the plant chromosomes or organelle genome. Alternatively, the introduced FCRP may be present on an extra-chromosomal non-replicating vector and be transiently expressed or transiently active.

[2142] Whether present in an extra-chromosomal non-replicating vector or a vector that is integrated into a chromosome, the nucleic acid molecule coding for FCRP as depicted in Table II, column 5 or 8, a homolog or a fragment thereof, preferably resides in a non-human organism expression cassette, preferably a microorganism expression cassette or a plant expression cassette. A plant expression cassette preferably contains regulatory sequences capable of driving gene expression in plant cells that are operatively linked so that each sequence can fulfill its function, for example, termination of transcription by polyadenylation signals. Preferred polyadenylation signals are those originating from Agrobacterium tumefaciens t-DNA such as the gene 3 known as octopine synthase of the Ti-plasmid pTiACH5 (Gielen et al., EMBO J. 3, 835 (1984)) or functional equivalents thereof but also all other terminators functionally active in plants are suitable. As plant gene expression is very often not limited on transcriptional levels, a plant expression cassette preferably contains other operatively linked sequences like translational enhancers such as the overdrive-sequence containing the 5″-untranslated leader sequence from tobacco mosaic virus enhancing the polypeptide per RNA ratio (Gallie et al., Nucl. Acids Research 15, 8693 (1987)). Examples of plant expression vectors include those detailed in: D. Becker et al., Plant Mol. Biol. 20, 1195 (1992); and M. W. Bevan, Nucl. Acid. Res. 12, 8711 (1984); and “Vectors for Gene Transfer in Higher Plants” in: Transgenic Plants, Vol. 1, Engineering and Utilization, eds. Kung and Wu R., Academic Press, 1993, S. 15-38.

[2143] “Transformation” is defined herein as a process for introducing DNA into a non-human organism, preferably a microrganism or a plant or a part thereof, like a plant cell or plant tissue. In an embodiment the transformation is performed with heterologous DNA. In another embodiment the transformation is performed with “additional” homologous DNA. Transformation may occur under natural or artificial conditions using various methods well known in the art. Transformation may rely on any known method for the insertion of (foreign, additional) nucleic acid sequences into a prokaryotic or eukaryotic host cell. The method is selected based on the host cell being transformed and may include, but is not limited to, viral infection, electroporation, lipofection, and particle bombardment. Such “transformed” cells include stably transformed cells in which the inserted DNA is capable of replication either as an autonomously replicating plasmid or as part of the host chromosome. They also include cells which transiently express the inserted DNA or RNA for limited periods of time. Transformed plant cells, plant tissue, or plants are understood to encompass not only the end product of a transformation process, but also transgenic progeny thereof.

[2144] The terms “transformed,” “transgenic,” and “recombinant” refer to a host organism such as a microorganism, e.g. a bacterium, or a plant into which a nucleic acid molecule has been introduced. In an embodiment the introduced nucleic acid molecule is heterogenous. In another embodiment the introduced DNA is homologous. The nucleic acid molecule can be stably integrated into the genome of the host or the nucleic acid molecule can also be present as an extra-chromosomal molecule. Such an extra-chromosomal molecule can be autoreplicating. A “non-transformed”, “non-transgenic” or “non-recombinant” host refers to a wild-type organism, e.g. a bacterium or plant, which does not contain the heterologous nucleic acid molecule or the additional homologous nucleic acid molecule.

[2145] In an embodiment a “transgenic plant”, as used herein, refers to a plant which contains a nucleotide sequence inserted into either its nuclear genome or organelle genome. In an embodiment the introduced nucleic acid molecule is heterogenous. In another embodiment the introduced DNA is homologous. In each case it encompasses further the offspring generations i.e. the Ti-, T2- and consecutively generations or BC1-, BC2- and consecutively generation as well as crossbreeds thereof with non-transgenic or other transgenic plants, as long as it contains said nucleic acid sequence.

[2146] The host organism (=transgenic organism) advantageously contains at least one copy of the nucleic acid in addition according to the invention and/or of the nucleic acid construct in addition according to the invention.

[2147] In principle all non-human organism can be used as host organism. In an embodiment the transgenic non-human organism or cell is an prokaryotic organism. In an embodiment the transgenic non-human organism or cell is an eukaryotic organism, like an algae, a non-human animal or a plant, in particular an algae or a plant. Preferred transgenic plants are monocotyledonous or dicotyledonous plants, preferably, for example, selected from the families Aceraceae, Anacardiaceae, Apiaceae, Asteraceae, Brassicaceae, Cactaceae, Cucurbitaceae, Euphorbiaceae, Fabaceae, Malvaceae, Nymphaeaceae, Papaveraceae, Rosaceae, Salicaceae, Solanaceae, Arecaceae, Bromeliaceae, Cyperaceae, lridaceae, Liliaceae, Orchidaceae, Gentianaceae, Labiaceae, Magnoliaceae, Ranunculaceae, Carifolaceae, Rubiaceae, Scrophulariaceae, Caryophyllaceae, Ericaceae, Polygonaceae, Violaceae, Juncaceae or Poaceae and preferably from a plant selected from the group of the families Apiaceae, Asteraceae, Brassicaceae, Cucurbitaceae, Fabaceae, Papaveraceae, Rosaceae, Solanaceae, Liliaceae or Poaceae. Preferred are crop plants such as plants advantageously selected from the group of the genus peanut, oilseed rape, canola, sunflower, safflower, olive, sesame, hazelnut, almond, avocado, bay, pumpkin/squash, linseed, soya, pistachio, borage, maize, wheat, rye, oats, sorghum and millet, triticale, rice, barley, sugarcane, cotton, cassava, potato, sugarbeet, egg plant, alfalfa, and perennial grasses and forage plants, oil palm, vegetables (brassicas, root vegetables, tuber vegetables, pod vegetables, fruiting vegetables, onion vegetables, leafy vegetables and stem vegetables), buckwheat, Jerusalem artichoke, broad bean, vetches, lentil, dwarf bean, lupin, clover and lucerne for mentioning only some of them.

[2148] In one embodiment of the invention transgenic plants are selected from the group comprising monocotyledonous or dicotyledonous plants, preferably cereals, soybean, rapeseed (including oil seed rape, especially canola and winter oil seed rape), cotton, sugarcane and potato, especially corn, soy, rapeseed (including oil seed rape, especially canola and winter oil seed rape), cotton, wheat and rice.

[2149] In one embodiment, the transgenic plant is a crop plant, in particular a transgenic plant belonging to e.g. Anacardium occidentale, Calendula officinalis, Carthamus tinctorius, Cichorium intybus, Cynara scolymus, Helianthus annus, Tagetes lucida, Tagetes erecta, Tagetes tenuifolia; Daucus carota; Corylus avellana, Corylus colurna, Borago officinalis; Brassica napus, Brassica rapa ssp., Sinapis arvensis Brassica juncea, Brassica juncea var. juncea, Brassica juncea var. crispifolia, Brassica juncea var. foliosa, Brassica nigra, Brassica sinapioides, Melanosinapis communis, Brassica oleracea, Arabidopsis thaliana, Anana comosus, Ananas ananas, Bromelia comosa, Carica papaya, Cannabis sative, Ipomoea batatus, Ipomoea pandurata, Convolvulus batatas, Convolvulus tiliaceus, Ipomoea fastigiata, Ipomoea tiliacea, Ipomoea triloba, Convolvulus panduratus, Beta vulgaris, Beta vulgaris var. altissima, Beta vulgaris var. vulgaris, Beta maritima, Beta vulgaris var. perennis, Beta vulgaris var. conditiva, Beta vulgaris var. esculenta, Cucurbita maxima, Cucurbita mixta, Cucurbita pepo, Cucurbita moschata, Olea europaea, Manihot utilissima, Janipha manihot, Jatropha manihot., Manihot aipil, Manihot dulcis, Manihot manihot, Manihot melanobasis, Manihot esculenta, Ricinus communis, Pisum sativum, Pisum arvense, Pisum humile, Medicago sativa, Medicago falcata, Medicago varia, Glycine max Dolichos soja, Glycine gracilis, Glycine hispida, Phaseolus max, Soja hispida, Glycine max, Cocos nucifera, Pelargonium grossularioides, Oleum cocoas, Laurus nobilis, Persea americana, Arachis hypogaea, Linum usitatissimum, Linum humile, Linum austriacum, Linum bienne, Linum angustifolium, Linum catharticum, Linum flavum, Linum grandiflorum, Adenolinum grandiflorum, Linum lewisii, Linum narbonense, Linum perenne, Linum perenne var. lewisii, Linum pratense, Linum trigynum, Punica granatum, Gossypium hirsutum, Gossypium arboreum, Gossypium barbadense, Gossypium herbaceum, Gossypium thurberi, Musa nana, Musa acuminata, Musa paradisiaca, Musa spp., Elaeis guineensis, Papaver orientale, Papaver rhoeas, Papaver dubium, Sesamum indicum, Piper aduncum, Piper amalago, Piper angustifolium, Piper auritum, Piper betel, Piper cubeba, Piper longum, Piper nigrum, Piper retrofractum, Artanthe adunca, Artanthe elongata, Peperomia elongata, Piper elongatum, Steffensia elongata, Hordeum vulgare, Hordeum jubatum, Hordeum murinum, Hordeum secalinum, Hordeum distichon Hordeum aegiceras, Hordeum hexastichon., Hordeum hexastichum, Hordeum irregulare, Hordeum sativum, Hordeum secalinum, Avena sativa, Avena fatua, Avena byzantina, Avena fatua var. sativa, Avena hybrida, Sorghum bicolor, Sorghum halepense, Sorghum saccharatum, Sorghum vulgare, Andropogon drummondii, Holcus bicolor, Holcus sorghum, Sorghum aethiopicum, Sorghum arundinaceum, Sorghum caffrorum, Sorghum cernuum, Sorghum dochna, Sorghum drummondii, Sorghum durra, Sorghum guineense, Sorghum lanceolatum, Sorghum nervosum, Sorghum saccharatum, Sorghum subglabrescens, Sorghum verticilliflorum, Sorghum vulgare, Holcus halepensis, Sorghum miliaceum millet, Panicum militaceum, Zea mays, Triticum aestivum, Triticum durum, Triticum turgidum, Triticum hybernum, Triticum macha, Triticum sativum or Triticum vulgare, Cofea spp., Coffea arabica, Coffea canephora, Coffea liberica, Capsicum annuum, Capsicum annuum var. glabriusculum, Capsicum frutescens, Capsicum annuum, Nicotiana tabacum, Solanum tuberosum, Solanum melongena, Lycopersicon esculentum, Lycopersicon lycopersicum., Lycopersicon pyriforme, Solanum integrifolium, Solanum lycopersicum Theobroma cacao, Panicum virgatum or Camellia sinensis.

[2150] In another embodiment, the transgenic plant belongs to monocotyledonous or dicotyledonous plants, preferably to Anacardiaceae such as the genera Pistacia, Mangifera, Anacardium e.g. the species Pistacia vera [pistachios, Pistazie], Mangifer indica [Mango] or Anacardium occidentale [Cashew]; Asteraceae such as the genera Calendula, Carthamus, Centaurea, Cichorium, Cynara, Helianthus, Lactuca, Locusta, Tagetes, Valeriana e.g. the species Calendula officinalis [Marigold], Carthamus tinctorius [safflower], Centaurea cyanus [cornflower], Cichorium intybus [blue daisy], Cynara scolymus [Artichoke], Helianthus annus [sunflower], Lactuca sativa, Lactuca crispa, Lactuca esculenta, Lactuca scariola L. ssp. sativa, Lactuca scariola L. var. integrate, Lactuca scariola L. var. integrifolia, Lactuca sativa subsp. romana, Locusta communis, Valeriana locusta [lettuce], Tagetes lucida, Tagetes erecta or Tagetes tenuifolia [Marigold]; Apiaceae such as the genera Daucus e.g. the species Daucus carota [carrot]; Betulaceae such as the genera Corylus e.g. the species Corylus avellana or Corylus colurna [hazelnut]; Boraginaceae such as the genera Borago e.g. the species Borago officinalis [borage]; Brassicaceae such as the genera Brassica, Melanosinapis, Sinapis, Arabadopsis e.g. the species Brassica napus, Brassica rapa ssp. [canola, oilseed rape, turnip rape], Sinapis arvensis Brassica juncea, Brassica juncea var. juncea, Brassica juncea var. crispifolia, Brassica juncea var. foliosa, Brassica nigra, Brassica sinapioides, Melanosinapis communis [mustard], Brassica oleracea [fodder beet] or Arabidopsis thaliana; Bromeliaceae such as the genera Anana, Bromelia e.g. the species Anana comosus, Ananas ananas or Bromelia comosa [pineapple]; Caricaceae such as the genera Carica e.g. the species Carica papaya [papaya]; Cannabaceae such as the genera Cannabis e.g. the species Cannabis sative [hemp], Convolvulaceae such as the genera Ipomea, Convolvulus e.g. the species Ipomoea batatus, Ipomoea pandurata, Convolvulus batatas, Convolvulus tiliaceus, Ipomoea fastigiata, Ipomoea tiliacea, Ipomoea triloba or Convolvulus panduratus [sweet potato, Man of the Earth, wild potato], Chenopodiaceae such as the genera Beta, i.e. the species Beta vulgaris, Beta vulgaris var. altissima, Beta vulgaris var. Vulgaris, Beta maritima, Beta vulgaris var. perennis, Beta vulgaris var. conditiva or Beta vulgaris var. esculenta [sugar beet]; Cucurbitaceae such as the genera Cucubita e.g. the species Cucurbita maxima, Cucurbita mixta, Cucurbita pepo or Cucurbita moschata [pumpkin, squash]; Elaeagnaceae such as the genera Elaeagnus e.g. the species Olea europaea [olive]; Ericaceae such as the genera Kalmia e.g. the species Kalmia latifolia, Kalmia angustifolia, Kalmia microphylla, Kalmia polifolia, Kalmia occidentalis, Cistus chamaerhodendros or Kalmia lucida [American laurel, broad-leafed laurel, calico bush, spoon wood, sheep laurel, alpine laurel, bog laurel, western bog-laurel, swamp-laurel]; Euphorbiaceae such as the genera Manihot, Janipha, Jatropha, Ricinus e.g. the species Manihot utilissima, Janipha manihot, Jatropha manihot, Manihot aipil, Manihot dulcis, Manihot manihot, Manihot melanobasis, Manihot esculenta [manihot, arrowroot, tapioca, cassava] or Ricinus communis [castor bean, Castor Oil Bush, Castor Oil Plant, Palma Christi, Wonder Tree]; Fabaceae such as the genera Pisum, Albizia, Cathormion, Feuillea, Inga, Pithecolobium, Acacia, Mimosa, Medicajo, Glycine, Dolichos, Phaseolus, Soja e.g. the species Pisum sativum, Pisum arvense, Pisum humile [pea], Albizia berteriana, Albizia julibrissin, Albizia lebbeck, Acacia berteriana, Acacia littoralis, Albizia berteriana, Albizzia berteriana, Cathormion berteriana, Feuillea berteriana, Inga fragrans, Pithecellobium berterianum, Pithecellobium fragrans, Pithecolobium berterianum, Pseudalbizzia berteriana, Acacia julibrissin, Acacia nemu, Albizia nemu, Feuilleea julibrissin, Mimosa julibrissin, Mimosa speciosa, Sericanrda julibrissin, Acacia lebbeck, Acacia macrophylla, Albizia lebbek, Feuilleea lebbeck, Mimosa lebbeck, Mimosa speciosa [bastard logwood, silk tree, East Indian Walnut], Medicago sativa, Medicago falcata, Medicago varia [alfalfa], Glycine max [soybean], Dolichos soja, Glycine gracilis, Glycine hispida, Phaseolus max or Soja hispida; Geraniaceae such as the genera Pelargonium, Cocos, Oleum e.g. the species Cocos nucifera, Pelargonium grossularioides or Oleum cocois [coconut]; Gramineae such as the genera Saccharum e.g. the species Saccharum officinarum; Juglandaceae such as the genera Juglans, Wallia e.g. the species Juglans regia, Juglans ailanthifolia, Juglans sieboldiana, Juglans cinerea, Wallia cinerea, Juglans bixbyi, Juglans californica, Juglans hindsii, Juglans intermedia, Juglans jamaicensis, Juglans major, Juglans microcarpa, Juglans nigra or Wallia nigra [walnut, black walnut, common walnut, persian walnut, white walnut, butternut, black walnut]; Lauraceae such as the genera Persea, Laurus e.g. the species laurel Laurus nobilis [bay, laurel, bay laurel, sweet bay], Persea americana Persea americana, Persea gratissima or Persea persea [avocado]; Leguminosae such as the genera Arachis e.g. the species Arachis hypogaea [peanut]; Linaceae such as the genera Linum, Adenolinum e.g. the species Linum usitatissimum, Linum humile, Linum austriacum, Linum bienne, Linum angustifolium, Linum catharticum, Linum flavum, Linum grandiflorum, Adenolinum grandiflorum, Linum lewisii, Linum narbonense, Linum perenne, Linum perenne var. lewisii, Linum pratense or Linum trigynum [flax, linseed]; Lythrarieae such as the genera Punica e.g. the species Punica granatum [pomegranate]; Malvaceae such as the genera Gossypium e.g. the species Gossypium hirsutum, Gossypium arboreum, Gossypium barbadense, Gossypium herbaceum or Gossypium thurberi [cotton]; Musaceae such as the genera Musa e.g. the species Musa nana, Musa acuminata, Musa paradisiaca, Musa spp. [banana]; Onagraceae such as the genera Camissonia, Oenothera e.g. the species Oenothera biennis or Camissonia brevipes [primrose, evening primrose]; Palmae such as the genera Elacis e.g. the species Elaeis guineensis [oil plam]; Papaveraceae such as the genera Papaver e.g. the species Papaver orientale, Papaver rhoeas, Papaver dubium [poppy, oriental poppy, corn poppy, field poppy, shirley poppies, field poppy, long-headed poppy, long-pod poppy]; Pedaliaceae such as the genera Sesamum e.g. the species Sesamum indicum [sesame]; Piperaceae such as the genera Piper, Artanthe, Peperomia, Steffensia e.g. the speciesPiper aduncum, Piper amalago, Piper angustifolium, Piper auritum, Piper betel, Piper cubeba, Piper longum, Piper nigrum, Piper retrofractum, Artanthe adunca, Artanthe elongata, Peperomia elongata, Piper elongatum, Steffensia elongata. [Cayenne pepper, wild pepper]; Poaceae such as the genera Hordeum, Secale, Avena, Sorghum, Andropogon, Holcus, Panicum, Oryza, Zea, Triticum e.g. the species Hordeum vulgare, Hordeum jubatum, Hordeum murinum, Hordeum secalinum, Hordeum distichon Hordeum aegiceras, Hordeum hexastichon, Hordeum hexastichum, Hordeum irregulare, Hordeum sativum, Hordeum secalinum [barley, pearl barley, foxtail barley, wall barley, meadow barley], Secale cereale [rye], Avena sativa, Avena fatua, Avena byzantina, Avena fatua var. sativa, Avena hybrida [oat], Sorghum bicolor, Sorghum halepense, Sorghum saccharatum, Sorghum vulgare, Andropogon drummondii, Holcus bicolor, Holcus sorghum, Sorghum aethiopicum, Sorghum arundinaceum, Sorghum caffrorum, Sorghum cernuum, Sorghum dochna, Sorghum drummondii, Sorghum durra, Sorghum guineense, Sorghum lanceolatum, Sorghum nervosum, Sorghum saccharatum, Sorghum subglabrescens, Sorghum verticilliflorum, Sorghum vulgare, Holcus halepensis, Sorghum miliaceum millet, Panicum militaceum [Sorghum, millet], Oryza sativa, Oryza latifolia [rice], Zea mays [corn, maize] Triticum aestivum, Triticum durum, Triticum turgidum, Triticum hybernum, Triticum macha, Triticum sativum or Triticum vulgare [wheat, bread wheat, common wheat], Proteaceae such as the genera Macadamia e.g. the species Macadamia intergrifolia [macadamia]; Rubiaceae such as the genera Coffea e.g. the species Cofea spp., Coffea arabica, Coffea canephora or Coffea liberica [coffee]; Scrophulariaceae such as the genera Verbascum e.g. the species Verbascum blattaria, Verbascum chaixii, Verbascum densiflorum, Verbascum lagurus, Verbascum longifolium, Verbascum lychnitis, Verbascum nigrum, Verbascum olympicum, Verbascum phlomoides, Verbascum phoenicum, Verbascum pulverulentum or Verbascum thapsus [mullein, white moth mullein, nettle-leaved mullein, dense-flowered mullein, silver mullein, long-leaved mullein, white mullein, dark mullein, greek mullein, orange mullein, purple mullein, hoary mullein, great mullein]; Solanaceae such as the genera Capsicum, Nicotiana, Solanum, Lycopersicon e.g. the species Capsicum annuum, Capsicum annuum var. glabriusculum, Capsicum frutescens [pepper], Capsicum annuum [paprika], Nicotiana tabacum, Nicotiana alata, Nicotiana attenuata, Nicotiana glauca, Nicotiana langsdorffii, Nicotiana obtusifolia, Nicotiana quadrivalvis, Nicotiana repanda, Nicotiana rustica, Nicotiana sylvestris [tobacco], Solanum tuberosum [potato], Solanum melongena [egg-plant] (Lycopersicon esculentum, Lycopersicon lycopersicum, Lycopersicon pyriforme, Solanum integrifolium or Solanum lycopersicum [tomato]; Sterculiaceae such as the genera Theobroma e.g. the species Theobroma cacao [cacao]; Theaceae such as the genera Camellia e.g. the species Camellia sinensis) [tea].

[2151] In another embodiment of the invention the transgenic non-human organism is a transgenic microorganism like selected from the group consisting of Charophyceae such as the genera Chara, Nitella e.g. the species Chara globularis, Chara vulgaris, Nitella flexilis, Chlorophyceae such as the genera Acrosiphonia, Spongomorpha, Urospora, Bryopsis, Pseudobryopsis, Trichosolen, Dichotomosiphon, Caulerpa, Rhipilia, Blastophysa, Avrainvillea, Chlorodesmis, Codium, Espera, Halicystis, Halimeda, Penicillus, Pseudocodium, Rhipiliopsis, Rhipocephalus, Tydemania, Udotea, Derbesia, Acrochaete, Aphanochaete, Bolbocoleon, Chaetobolus, Chaetonema, Chaetophora, Chlorotylium, Desmococcus, Draparnaldia, Draparnaldiopsis, Ectochaete, Endophyton, Entocladia, Epicladia, Internoretia, Microthamnion, Ochlochaete, Phaeophila, Pilinella, Pringsheimiella, Protoderma, Pseudendoclonium, Pseudodictyon, Pseudopringsheimia, Pseudulvella, Schizomeris, Stigeoclonium, Thamniochaete, Ulvella, Pilinia, Tellamia, Helicodictyon, Actidesmium, Ankyra, Characium, Codiolum, Sykidion, Keratococcus, Prototheca, Bracteacoccus Chlorococcum, Excentrosphaera, Hormidium, Oophila,

[2152] Schroederia, Tetraedron, Trebouxia Chlorosarcinopsis, Gomphonitzschia, Coccomyxa, Dactylothece, Diógenes, Disporá, Gloeocystis, Mycanthococcus, Ourococcus, Coelastrum, Dicranochaete, Botryococcus, Dictyosphaerium, Dimorphococcus, Chlorochytrium, Kentrosphaera, Phyllobium, Gomontia, Hormotila, Euastropsis, Hydrodictyon, Pectodictyon, Pediastrum, Sorastrum, Tetrapedia, Acanthosphaera, Echinosphaerella, Echinosphaeridium, Errerella, Gloeoactinium, Golenkeniopsis Golenkinia, Micractinium, Ankistrodesmus, Chlorella, Chodatella, Closteriopsis, Cryocystis, Dactylococcus, Dematractum, Eremosphaera, Eutetramorus, Franceia, Glaucocystis, Gloeotaenium, Kirchneriella, Lagerheimiella, Monoraphidium, Nannochloris, Nephrochlamys, Nephrocytium, Oocystis, Oonephris, Pachycladon, Palmellococcus, Planktosphaeria, Polyedriopsis, Pseudoraciborskia, Quadrigula, Radiococcus, Rochiscia, Scotiella, Selanastrum, Thorakochloris, Treubaria, Trochiscia, Westella, Zoochlorella, Ostreobium, Phyllosiphon, Protosiphon, Rhodochytrium, Actinastrum, Coronastrum, Crucigenia, Dictymocystis, Enallax, Scenedesmus, Selenastrum, Tetradesmus, Tetrallantos, Tetrastrum, Chlorosarcina, Anadyomene, Valoniopsis, Ventricaria, Basicladia, Chaetomorpha, Cladophora, LolaPithophoraRhizoclonium Chaetosphaeridium, Conochaete, Coleochaete, Oligochaetophora, Polychaetophora, Cylindrocapsa, Gongrosira, Protococcus, Acetabularia, Batophora, Bornetella, Dasycladus, Halicoryne, Neomeris, Elakatothrix, Raphidonema, Microspora, Bulbochaete, Oedocladium, Oedogonium, Prasiola, Rosenvingiella, Schizogonium, Apjohnia, Chamaedoris, Cladophoropsis, Siphonocladus, Spongocladia, Boergesenia, Boodlea, Cystodictyon, Dictyosphaeria, Ernodesmis, Microdictyon, Struvea, Valonia, Sphaeroplea, Malleochloris, Stylosphaeridium, Gloeococcus, Palmella, Palmodictyon, Palmophyllum, Pseudospherocystis, Sphaerocystis, Urococcus, Apiocystis, Chaetopeltis, Gemellicystis, Paulschulzia, Phacomyxa, Pseudotetraspora, Schizochlamys, Tetraspora, Cephaleuros, Ctenocladus, Epibolium, Leptosira, Trentepohlia, Diplochaete, Monostroma, Binuclearia, Geminella, Klebsormidium, Planetonema, Radiofilum, Stichococcus, Ulothrix, Uronema, Blidingia, Capsosiphon, Chloropelta, Enteromorpha, Percursaria, Ulva, Ulvaria, Brachiomonas, Carteria, Chlainomonas, Chlamydomonas, Chlamydonephris, Chlorangium, Chlorogonium, Cyanidium, Fortiella, Glenomonas, Gloeomonas, Hyalogonium, Lobomonas Polytoma, Pyramichlamys, Scourfieldia, Smithsonimonas, Sphaerellopsis, Sphenochloris, Spirogonium, Collodictyon, Dunaliella, Haematococcus, Stephanosphaera, Coccomonas, Dysmorphococcus, Phacotus, Pteromonas, Thoracomonas, Wislouchiella, Mascherina, Pyrobotrys, Spondylomorum, Eudorina, Gonium, Oltmannsiella, Pandorina, Platydorina, Pleodorina, Stephanoon, Volvox, Volvulina, Actinotaenium, Arthrodesmus, Bambusina Closterium, Cosmarium, Desmidium, Euastrum, Groenbladia, Hyalotheca, Micrasterias, Penium, Phymatodocis, Pleurotaenium, Sphaerozosma, Spinoclosterium, Spinocosmarium, Spondylosium, Staurastrum, Tetmemorus, Triploceras, Xanthidium, Cylindrocystis, Genicularia, Gonatozygon, Mesotaenium, Netrium, Roya, Spirotaenia, Cosmocladium, Debarya, Docidium, Euastridium, Hallasia, Mougeotia, Mougeotiopsis, Sirogonium, Spirogyra, Staurodesmus, Teilingia, Zygnema, Zygogonium, e.g. the species Caulerpa taxifolia, Prototheca wickerhamii, Ankistrodesmus falcatus, Chlorella ellipsoidea, Chlorella pyrenoidosa, CloreIla sorokiniana, Chlorella vulgaris, Scenedesmus obliquus, Scenedesmus quadricauda, Selenastrum capricornutum, Selenastrum undecimnotata, Cladophora glomerata, Chlamydomonas eugametos, Chlamydomonas reinhardtii, Cyanidium caldarium, Dunaliella salina, Dunaliella tertiolecta, Euglena gracilis, Haematococcus pluvialis, Coniugatophyceae, Prasinophyceae Trebouxiophyceae, Ulvophyceae, Chlorodendraceae, Pedinomonadales, Halosphaeraceae, Pterospermataceae, Monomastigaceae, Pyramimonadaceae, Chlorodendraceae such as the genera Prasinocladus e.g. the species Prasinocladus ascus, Halosphaeraceae, Pedinomonadales, Pedinomonadaceae such as the genera Pedinomonas, Pterospermataceae such as the genera Pachysphaera, Pterosperma, Halosphaera, Pyramimonas, Bacillariophyceae, Chrysophyceae, Craspedophyceae, Euglenophyceae, Prymnesiophyceae, Phaeophyceae, Dinophyceae, Rhodophyceae, Xanthophyceae, Prasinophyceae such as the genera Nephroselmis, Prasinococcus, Scherffelia, Tetraselmis, Mantoniella, Ostreococcus e.g. the species Nephroselmis olivacea, Prasinococcus capsulatus, Scherffelia dubia, Tetraselmis chui, Tetraselmis suecica, Mantoniella squamata or Ostreococcus tauri.

[2153] Other useful organism are prokaryotic host organism, which may be useful for the cloning of the desired nucleic acid constructs or vectors such as the genera Escherichia, for example the species Escherichia coli, in particular E. coli K12 and its described strains or Agrobacterium, for example Agrrobacterium tumefaciens.

[2154] The introduction of the nucleic acids according to the invention, the expression cassette or the vector into the non-human organism, like a microorganism or a plant, can in principle be done by all of the methods known to those skilled in the art. The introduction of the nucleic acid sequences gives rise to recombinant or transgenic organisms.

[2155] After the introduction of the nucleic acid, nucleic acid construct, expression cassette or vector, and the expression thereof the transgenic organism or cell is advantageously cultured and subsequently harvested.

[2156] Unless otherwise specified, the terms “polynucleotides”, “nucleic acid” and “nucleic acid molecule” as used herein are interchangeably. Unless otherwise specified, the terms “peptide”, “polypeptide” and “protein” are interchangeably in the present context. The term “sequence” may relate to polynucleotides, nucleic acids, nucleic acid molecules, peptides, polypeptides and proteins, depending on the context in which the term “sequence” is used. The terms “gene(s)”, “polynucleotide”, “nucleic acid sequence”, “nucleotide sequence”, or “nucleic acid molecule(s)” as used herein refers to a polymeric form of nucleotides of any length, either ribonucleotides or deoxyribonucleotides. The terms refer only to the primary structure of the molecule.

[2157] Thus, the terms “gene(s)”, “polynucleotide”, “nucleic acid sequence”, “nucleotide sequence”, or “nucleic acid molecule(s)” as used herein include double- and singles-stranded DNA and RNA. They also include known types of modifications, for example, methylation, “caps”, substitutions of one or more of the naturally occurring nucleotides with an analog. Preferably, the DNA or RNA sequence of the invention comprises a coding sequence encoding the herein defined polypeptide.

[2158] The genes of the invention, coding for an activity selected from the group consisting of (DL)-glycerol-3-phosphatase, 2,3-dihydroxyphenylpropionate 1,2-dioxygenase, 2-oxoglutarate dehydrogenase E1 subunit, 49747384_SOYBEAN-protein, 5′-nucleotidase, acetolactate synthase small subunit, acetyl CoA carboxylase, adenosine kinase, arginine exporter protein, At1g09680-protein, At2g45420-protein, At4g32480-protein, ATP-binding component of a transport system, auxin response factor, b0012-protein, b1003-protein, b1522-protein, b2032-protein, b2345-protein, b2513-protein, b2673-protein, b3246-protein, b3346-protein, b3817-protein, b4029-protein, beta-hydroxylase, bifunctional aspartokinase/homoserine dehydrogenase, calcium-dependent protein kinase, coproporphyrinogen III oxidase, cyclin, cystathionine gamma-synthase, cystathionine-lyase, dihydroxyacid dehydratase, DNA-binding protein, F-box protein, glutaredoxin, glutathione S-transferase, glycogenin, homocitrate synthase, homoserine dehydrogenase, hydrolase, L-serine dehydratase, major facilitator superfamily transporter protein, malic enzyme, membrane transport protein, monothiol glutaredoxin, monthiol glutaredoxin, oxidoreductase, peptidyl-prolyl cis-trans isomerase, phosphoadenosine phosphosulfate reductase , Photosystem I reaction center subunit XI, protein kinase, protein phosphatase, pyruvate kinase, Sec-independent protein translocase subunit, serine protease, serine/threonineprotein phosphatase, threonine aldolase, threonine dehydratase, threonine efflux protein, transcription factor, transport protein, uridine/cytidine kinase, valine-pyruvate transaminase, yhl013c-protein, yml084w-protein, yol160w-protein, yor392w-protein, and zinc finger protein are also called “FCRP genes”.

[2159] A “coding sequence” is a nucleotide sequence, which is transcribed into mRNA and/or translated into a polypeptide when placed under the control of appropriate regulatory sequences. The boundaries of the coding sequence are determined by a translation start codon at the 5′-terminus and a translation stop codon at the 3′-terminus. The triplets taa, tga and tag represent the (usual) stop codons which are interchangeable. A coding sequence can include, but is not limited to mRNA, cDNA, recombinant nucleotide sequences or genomic DNA, while introns may be present as well under certain circumstances.

[2160] To introduce a nucleic acid molecule into a nucleic acid construct, e.g. as part of an expression cassette, the codogenic gene segment is advantageously subjected to an amplification and ligation reaction in the manner known by a skilled person. It is preferred to follow a procedure similar to the protocol for the Pfu DNA polymerase or a Pfu/Taq DNA polymerase mixture. The primers are selected according to the sequence to be amplified. The primers should expediently be chosen in such a way that the amplificate comprise the codogenic sequence from the start to the stop codon. After the amplification, the amplificate is expediently analyzed. For example, the analysis may consider quality and quantity and be carried out following separation by gel electrophoresis. Thereafter, the amplificate can be purified following a standard protocol (for example Qiagen). An aliquot of the purified amplificate is then available for the subsequent cloning step. The skilled worker generally knows suitable cloning vectors.

[2161] They include, in particular, vectors which are capable of replication in easy to handle cloning systems like as bacterial, yeast or insect cell based (e.g. baculovirus expression) systems, that is to say especially vectors which ensure efficient cloning in E. coli, and which make possible the stable transformation of plants. Vectors, which must be mentioned, in particular are various binary and cointegrated vector systems, which are suitable for the T-DNA-mediated transformation. Such vector systems are generally characterized in that they contain at least the vir genes, which are required for the Agrobacterium-mediated transformation, and the T-DNA border sequences.

[2162] In general, vector systems preferably also comprise further cisregulatory regions such as promoters and terminators and/or selection markers by means of which suitably transformed organisms can be identified. While vir genes and T-DNA sequences are located on the same vector in the case of cointegrated vector systems, binary systems are based on at least two vectors, one of which bears vir genes, but no T-DNA, while a second one bears T-DNA, but no vir gene. Owing to this fact, the last-mentioned vectors are relatively small, easy to manipulate and capable of replication in E. coli and in Agrobacterium. These binary vectors include vectors from the series pBIB-HYG, pPZP, pBecks, pGreen. Those which are preferably used in accordance with the invention are Bin19, pBI101, pBinAR, pGPTV and pCAMBIA. An overview of binary vectors and their use is given by Hellens et al, Trends in Plant Science 5, 446-451 (2000). In case of a targeted expression the vectors are preferably modified in such a manner, that they already contain the nucleic acid coding for the transit peptide and that the nuleic acids of the invention, preferentially the nucleic acid sequences encoding the polypeptides shown in the respective line in Table II, column 5 or 8, or a homolog or a fragment thereof, can be cloned 3″prime to the transit peptide encoding sequence, leading to a functional preprotein, which is directed to the intended compartment, like plastids or mitochondria, and which means that the mature protein fulfills its biological activity.

[2163] For a vector preparation, vectors may first be linearized using restriction endonuclease(s) and then be modified enzymatically in a suitable manner. Thereafter, the vector is purified, and an aliquot is employed in the cloning step. In the cloning step, the enzyme-cleaved and, if required, purified amplificate is cloned together with similarly prepared vector fragments, using ligase. In this context, a specific nucleic acid construct, or vector or plasmid construct, may have one or else more codogenic gene segments. The codogenic gene segments in these constructs are preferably linked operably to regulatory sequences. The regulatory sequences include, in particular, plant sequences like the above-described promoters and terminators. The constructs can advantageously be propagated stably in microorganisms, in particular Escherichia coli and/or Agrobacterium tumefaciens, under selective conditions and enable the transfer of homologous or heterologous DNA into non-human organisms, like plants or other microorganisms. In accordance with a particular embodiment, the constructs are based on binary vectors (overview of a binary vector: Hellens et al., 2000). As a rule, they contain prokaryotic regulatory sequences, such as replication origin and selection markers, for the multiplication in microorganisms such as Escherichia coli and Agrobacterium tumefaciens. Vectors can further contain agrobacterial T-DNA sequences for the transfer of DNA into plant genomes or other eukaryotic regulatory sequences for transfer into other eukaryotic cells, e.g. Saccharomyces sp. or other prokaryotic regulatory sequences for the transfer into other prokaryotic cells, e.g. Corynebacterium sp. or Bacillus sp. For the transformation of plants, the right border sequence, which comprises approximately 25 base pairs, of the total agrobacterial T-DNA sequence is advantageously included. Usually, the plant transformation vector constructs according to the invention contain T-DNA sequences both from the right and from the left border region, which contain expedient recognition sites for site-specific acting enzymes, which, in turn, are encoded by some of the vir genes.

[2164] Alternatively the nuleic acids of the invention are cloned into vectors, which are designed for the direct transformation of organelles such as for example plastids. Generally such vectors additionally carry a specific resistance gene (as mentioned above), like the spectomycin resistance gene (aad) under control of a plastid regulatory sequence and two adjacent plastome sequences of the target organism, which mediated the directed insertion of the sequences of interest, e.g. the resistance gene and the expression cassette, into the plastidal genome through homologous recombination. As transformation can be achieved by particle bombardment or other physical or chemical methods e.g. PEG treatment or microinjection, the vectors do not need to contain the elements necessary for agrobacterial T-DNA transfer (see below).

[2165] In order to introduce, into a plant, the nucleic acid molecule of the invention or used in the process according to the invention, it has proved advantageous first to transfer them into an intermediate host, for example a bacterium or a eukaryotic unicellular cell. The transformation into E. coli, which can be carried out in a manner known per se, for example by means of heat shock or electroporation, has proved itself expedient in this context. Thus, the transformed E. coli colonies can be analysed for their cloning efficiency. This can be carried out with the aid of a PCR. Here, not only the identity, but also the integrity, of the plasmid construct can be verified with the aid of a defined colony number by subjecting an aliquot of the colonies to said PCR. As a rule, universal primers which are derived from vector sequences are used for this purpose, it being possible, for example, for a forward primer to be arranged upstream of the start ATG and a reverse primer to be arranged downstream of the stop codon of the codogenic gene segment. The amplificates are separated by electrophoresis and assessed with regard to quantity and quality.

[2166] The nucleic acid constructs, which are optionally verified, are subsequently used for the transformation of the plants or other hosts, e.g. other eukaryotic cells or other prokaryotic cells. To this end, it may first be necessary to obtain the constructs from the intermediate host. For example, the constructs may be obtained as plasmids from bacterial hosts by a method similar to conventional plasmid isolation.

[2167] The nucleic acid molecule of the invention or used in the process according to the invention can also be introduced into modified viral vectors like baculovirus vectors for expression in insect cells or plant viral vectors like tobacco mosaic virus or potato virus X-based vectors. Approaches leading to the expression of proteins from the modified viral genome including the nucleic acid molecule of the invention or used in the process according to the invention involve for example the inoculation of tobacco plants with infectious RNA transcribed in vitro from a cDNA copy of the recombinant viral genome. Another approach utilizes the transfection of whole plants from wounds inoculated with Agrobacterium tumefaciens containing cDNA copies of recombinant plus-sense RNA viruses. Different vectors and virus are known to the skilled worker for expression in different target e.g. production plants.

[2168] A large number of methods for the transformation of plants are known. Since, in accordance with the invention, a stable integration of heterologous or additional homologous DNA into the genome of plants is advantageous, the T-DNA-mediated transformation has proved expedient in particular. For this purpose, it is first necessary to transform suitable vehicles, in particular agrobacteria, with a codogenic gene segment or the corresponding plasmid construct comprising the nucleic acid molecule of the invention or an expression cassette according to the invention. This can be carried out in a manner known per se. For example, said nucleic acid construct of the invention, like said expression cassette or said plasmid construct, which has been generated in accordance with what has been detailed above, can be transformed into competent agrobacteria by means of electroporation or heat shock. In principle, one must differentiate between the formation of cointegrated vectors on the one hand and the transformation with binary vectors on the other hand. In the case of the first alternative, the constructs, which comprise the codogenic gene segment or the nucleic acid molecule of the invention have no T-DNA sequences, but the formation of the cointegrated vectors or constructs takes place in the agrobacteria by homologous recombination of the construct with T-DNA. The T-DNA is present in the agrobacteria in the form of Ti or Ri plasmids in which exogenous DNA has expediently replaced the oncogenes. If binary vectors are used, they can be transferred to agrobacteria either by bacterial conjugation or by direct transfer. These agrobacteria expediently already comprise the vector bearing the vir genes (currently referred to as helper Ti (Ri) plasmid). As mentioned before the stable integration of the heterologous (or additional homologous) nucleic acids into the plastidial genome may also be advantegously.

[2169] One or more markers may expediently also be used together with the nucleic acid construct, like the expression cassette, or the vector of the invention and, if plants or plant cells shall be transformed together with the T-DNA, with the aid of which the isolation or selection of transformed organisms, such as agrobacteria or transformed plant cells, is possible. These marker genes enable the identification of a successful transfer of the nucleic acid molecules according to the invention via a series of different principles, for example via visual identification with the aid of fluorescence, luminescence or in the wavelength range of light which is discernible for the human eye, by a resistance to herbicides or antibiotics, via what are known as nutritive markers (auxotrophism markers) or antinutritive markers, via enzyme assays or via phytohormones. Examples of such markers which may be mentioned are GFP (=green fluorescent protein); the luciferin/luceferase system, the β3-galactosidase with its colored substrates, for example X-Gal, the herbicide resistances to, for example, imidazolinone, glyphosate, phosphinothricin or sulfonylurea, the antibiotic resistances to, for example, bleomycin, hygromycin, streptomycin, kanamycin, tetracyclin, chloramphenicol, ampicillin, gentamycin, geneticin (G418), spectinomycin or blasticidin, to mention only a few, nutritive markers such as the utilization of mannose or xylose, or antinutritive markers such as the resistance to 2-deoxyglucose. This list is a small number of possible markers. The skilled worker is very familiar with such markers. Different markers are preferred, depending on the organism and the selection method. In case of plastidal transformation methods other marker genes known to a person skilled in the art may be used, but also the ones mentioned above, preferably e.g. the spectomycin resistance gene (aadA).

[2170] As a rule, it is desired that the plant nucleic acid constructs, plant expression cassettes, are flanked by T-DNA at one or both sides of the codogenic gene segment. This is particularly useful when bacteria of the species Agrobacterium tumefaciens or Agrobacterium rhizogenes are used for the transformation. A method, which is preferred in accordance with the invention, is the transformation with the aid of Agrobacterium tumefaciens. However, biolistic methods may also be used advantageously for introducing the sequences in the process according to the invention, and the introduction by means of PEG is also possible. The transformed agrobacteria can be grown in the manner known per se and are thus available for the expedient transformation of the plants. The plants or plant parts to be transformed are grown or provided in the customary manner. The transformed agrobacteria are subsequently allowed to act on the plants or plant parts until a sufficient transformation rate is reached. Allowing the agrobacteria to act on the plants or plant parts can take different forms. For example, a culture of morphogenic plant cells or tissue may be used. After the T-DNA transfer, the bacteria are, as a rule, eliminated by antibiotics, and the regeneration of plant tissue is induced. This is done in particular using suitable plant hormones in order to initially induce callus formation and then to promote shoot development.

[2171] Plant cells, plant tissues etc. may be transformed transient or stable. An advantageous transformation method is the transformation in planta. To this end, it is possible, for example, to allow the agrobacteria to act on plant seeds or to inoculate the plant meristem with agrobacteria. It has proved particularly expedient in accordance with the invention to allow a suspension of transformed agrobacteria to act on the intact plant or at least the flower primordia. The plant is subsequently grown on until the seeds of the treated plant are obtained (Clough and Bent, Plant J. 16, 735 (1998)). To select transformed plants, the plant material obtained in the transformation is, as a rule, subjected to selective conditions so that transformed plants can be distinguished from untransformed plants. For example, the seeds obtained in the above-described manner can be planted and, after an initial growing period, subjected to a suitable selection by spraying. A further possibility consists in growing the seeds, if appropriate after sterilization, on agar plates using a suitable selection agent so that only the transformed seeds can grow into plants. Further advantageous transformation methods, in particular for plants, are known to the skilled worker and are described herein.

[2172] Further advantageous and suitable methods are protoplast transformation by poly(ethylene glycol)-induced DNA uptake, the “biolistic” method using the gene cannon—referred to as the particle bombardment method, electroporation, the incubation of dry embryos in DNA solution, microinjection and gene transfer mediated by Agrobacterium. Said methods are described by way of example in Jenes B. et al., Techniques for Gene Transfer, in: Transgenic Plants, Vol. 1, Engineering and Utilization, eds. Kung S.D. and Wu R., Academic Press (1993) 128-143 and in Potrykus, Annu. Rev. Plant Physiol. Plant Molec. Biol. 42, 205 (1991)). The nucleic acids or the construct, e.g. the expression cassette, to be expressed is preferably cloned into a vector, which is suitable for transforming Agrobacterium tumefaciens, for example pBin19 (Bevan et al., Nucl. Acids Res. 12, 8711 (1984)). Agrobacteria transformed by an expression vector according to the invention may likewise be used in known manner for the transformation of plants such as test plants like Arabidopsis or crop plants such as cereal crops, corn, oats, rye, barley, wheat, soybean, rice, cotton, sugar beet, canola, sunflower, flax, hemp, potatoes, tobacco, tomatoes, carrots, paprika, oilseed rape, tapioca, cassava, arrowroot, tagetes, alfalfa, lettuce and the various tree, nut and vine species, in particular oil-containing crop plants such as soybean, peanut, castor oil plant, sunflower, corn, cotton, flax, oilseed rape, coconut, oil palm, safflower (Carthamus tinctorius) or cocoa bean, or in particular corn, wheat, soybean, rice, cotton and canola, e.g. by bathing bruised leaves or chopped leaves in an agrobacterial solution and then culturing them in suitable media. The transformation of plants by means of Agrobacterium tumefaciens is described, for example, by Hofgen and Willmitzer in Nucl. Acid Res. 16, 9877 (1988) or is known inter alia from White F. F., “Vectors for Gene Transfer in Higher Plants”; in Transgenic Plants, Vol. 1, Engineering and Utilization, eds. Kung S. D. and Wu R., Academic Press, 1993, pp. 15-38. For the transformation of plastids physical methods like PEG-treatment (O'Neil et al., Plant Journal. 3, 729 (1993), Golds et al., BioTechnology 11, 95 (1993)), microinjection (Knoblauch et al., Nat. Biotech. 17, 906 (1999)) or biolistics (Svab et al., Proc. Natl. Acad. Sci. USA 90, 8526 (1990)) are preferred. Such transformation methods are especially useful for the direct transformation of plastids and are well known to the skilled worker.

[2173] The expression of the nucleic acid molecules used in the process according the present invention may be desired alone or in combination with other genes or nucleic acid molecules. Multiple nucleic acid molecules conferring the expression of advantageous genes can be introduced via the simultaneous transformation of several individual suitable nucleic acid constructs, i.e. expression constructs, or, preferably, by combining several expression cassettes on one construct. It is also possible to transform the recipient non-human organisms stepwise with several vectors which in each case comprises a single expression cassette or several expression cassettes.

[2174] In addition to the sequence mentioned in Table I, application no. 1, column 5 or 8, preferably the coding region thereof, or its homologs or fragments, it may be advantageous additionally to express and/or mutate further genes in the non-human organisms. Especially advantageously, additionally at least one further gene of the biosynthetic pathway of the fine chemical is expressed in the non-human organisms such as plants or microorganisms. It is also possible that the regulation of the natural genes has been modified advantageously so that the gene and/or its gene product is no longer subject to the regulatory mechanisms which exist in the non-human organisms. This leads to an increased synthesis of the respective amino acid since, for example, feedback regulations no longer exist to the same extent or not at all. In addition it might be advantageously to combine the nucleic acids sequences of the invention containing the sequences shown in the respective line in Table I, application no. 1, column 5 or 8, preferably the coding region thereof, or homologs or fragments thereof, with genes which generally support or enhance the growth or yield of the target non-human organisms, for example genes which lead to faster growth rate of non human organism like microorganisms or plants or genes which produce stress-, pathogen-, or herbicide-resistant plants.

[2175] In a further embodiment of the process of the invention, non-human organisms are grown, in which there is in addition to the expression of the nucleic acid molecule according to the invention simultaneous expression of at least one nucleic acid molecule or one of the genes which code for proteins involved in the amino acid metabolism, in particular in amino acid synthesis, especially genes coding for proteins selected from the group coding for aspartate kinase (lysC), aspartate-semialdehyde dehydrogenase (asd), glyceraldehyde-3-phosphate dehydrogenase (gap), 3-phosphoglycerate kinase (pgk), pyruvate carboxylase (pyc), triosephosphate isomerase (tpi), homoserine O-acetyltransferase (metA), cystathionine γ-synthase (metB), cystathionine gamma-lyase (metC), cystathionine β-lyase, methionine synthase (metH), serine hydroxymethyltransferase (glyA), O-acetyl homoserine sulfhydrylase (metY), methylenetetrahydrofolate reductase (metF), phosphoserine aminotransferase (serC), phosphoserine phosphatase (serB), serine acetyltransferase (cysE), cysteine synthase (cysK), homoserine dehydrogenase (hom) and S-adenosyL-methionine synthase (metX) in the cytosol or in an organelle, like plastids or mitochondria. A further advantageous nucleic acid sequence which can be expressed in combination with the nucleic acid sequences according to the invention and if desired, the above-mentioned biosynthesis genes, is the sequence of the ATP/ADP translocator as described in WO 01/20009. This ATP/ADP translocator leads to an increased synthesis of the essential amino acids lysine and/or methionine.

[2176] In a further advantageous embodiment of the process of the invention, the non-human organisms used in the process are those in which simultaneously in addition a fine chemical degrading protein is attenuated, in particular by reducing the rate of expression of the corresponding gene.

[2177] In another embodiment of the process of the invention, the non-human organisms used in the process are those in which simultaneously in addition at least one of the aforementioned nucleic acids or of the aforementioned genes is mutated in such a way that the enzymatic or biological activity of the corresponding fine chemical degrading protein is partially reduced or completely blocked. A reduction in the enzymatic or biological activity means an enzymatic or biological activity, which is reduced by at least 10%, advantageously at least 20%, 30%, 40%, 50%, 60%, 70% or more, compared with the starting organism.

[2178] If it is intended to transform the host cell, in particular the plant cell, with several constructs, expression cassettes or vectors, the marker of a preceding transformation must be removed or a further marker employed in a following transformation. The markers can be removed from the host cell, in particular the plant cell, as described herein below via methods with which the skilled worker is familiar. These methods may be not used for multiple transformed host cell only but also for single transformed host cells. In particular plants without a marker, in particular without resistance to antibiotics, are an especially preferred embodiment of the present invention.

[2179] In the process according to the invention, the nucleic acid molecules used in the process according to the invention are advantageously linked operably to one or more regulatory signals in order to increase gene expression. These regulatory sequences are intended to enable the specific expression of the genes and the expression of protein. Depending on the host organism for example plant or microorganism, this may mean, for example, that the gene is expressed and/or overexpressed after induction only, or that it is expressed and/or overexpressed constitutively. These regulatory sequences are, for example, sequences to which the inductors or repressors bind and which thus regulate the expression of the nucleic acid. In addition to these novel regulatory sequences, or instead of these sequences, the natural regulation of these sequences may still be present before the actual structural genes and, if appropriate, may have been genetically modified so that the natural regulation has been switched off and gene expression has been increased. However, the nucleic acid construct of the invention suitable as expression cassette (=expression construct =gene construct) can also be simpler in construction, that is to say no additional regulatory signals have been inserted before the nucleic acid molecule or the homolog or fragment thereof, and the natural promoter together with its regulation has not been removed. Instead, the natural regulatory sequence has been mutated in such a way that regulation no longer takes place and/or gene expression is increased. These modified promoters can also be introduced on their own before the natural gene in the form of part sequences (=promoter with parts of the nucleic acid sequences according to the invention) in order to increase the activity. Moreover, the gene construct can advantageously also comprise one or more of what are known as enhancer sequences in operable linkage with the promoter, and these enable an increased expression of the nucleic acid sequence. Also, it is possible to insert additional advantageous sequences at the 3′ end of the DNA sequences, such as, for example, further regulatory elements or terminators. In another preferred embodiment, the natural or created expression cassette is further modified in such a manner, that a nucleic acid sequence encoding a transit peptide is functionally introduced between the regulatory and the coding region such, that a functionally preprotein is expressed, which is targeted to the organelles such as plastids or mitochondria, preferably the plastids.

[2180] The nucleic acid molecules, which encode proteins according to the invention and nucleic acid molecules, which encode other polypeptides may be present in one nucleic acid construct, expression cassette or vector or in respective several ones. Advantageously, only one copy of the nucleic acid molecule of the invention or its encoding genes is present in the nucleic acid construct, expression cassette or vector. Several vectors, nucleic acid construct, or expression cassettes can be expressed together in the host organism. The nucleic acid molecule, the nucleic acid construct or the expression cassette according to the invention can be inserted in a vector and be present in the cell in a free form. If a stable transformation is preferred, a vector is used, which is stably duplicated over several generations or which is else inserted into the genome. In the case of plants, integration into the genome of e.g. plastids or mitochondria or, in particular, into the nuclear genome may have taken place. For the insertion of more than one gene in the host genome the genes to be expressed are present together in one gene construct, for example in above-described vectors bearing a plurality of genes.

[2181] As a rule, regulatory sequences for the expression rate of a gene are located upstream (5′), within, and/or downstream (3′) relative to to the coding sequence of the nucleic acid molecule of the invention or another codogenic gene segment. They control in particular transcription and/or translation and/or the transcript stability. The expression level is dependent on the conjunction of further cellular regulatory systems, such as the protein biosynthesis and degradation systems of the cell.

[2182] Regulatory sequences include transcription and translation regulating sequences or signals, e.g. sequences located upstream (5′), which concern in particular the regulation of transcription or translation initiation, such as promoters or start codons, and sequences located downstream (3′), which concern in particular the regulation of transcription or translation termination and transcript stability, such as polyadenylation signals or stop codons. Regulatory sequences can also be present in transcribed coding regions as well in transcribed non-coding regions, e.g. in introns, as for example splicing sites, promoters for the regulation of expression of the nucleic acid molecule according to the invention in a cell and which can be employed are, in principle, all those which are capable of stimulating the transcription of genes in the organisms in question, such as microorganisms or plants. Suitable promoters, which are functional in these non-human organisms are generally known. They may take the form of constitutive or inducible promoters. Suitable promoters can enable the development- and/or tissue-specific expression in multi-cell eukaryotes; thus, leaf-, root-, flower-, seed-, stomata-, tuber-, fruit- or pollen-specific promoters may advantageously be used in plants. Furthermore in case of direct transformation of organelles such as plastids, promoters recognized by the plastid RNA-polymerases such as the plastid encoded Escherichia coli-like RNA polymerase or the nuclear encoded plastid RNA polymerase may advantageously be used.

[2183] The regulatory sequences or factors can, as described above, have a positive effect on, the expression of the genes introduced, thus increasing their expression. Thus, an enhancement of the expression can advantageously take place at the transcriptional level by using strong transcription signals such as strong promoters and/or strong enhancers. In addition, enhancement of expression on the translational level is also possible, for example by introducing translation enhancer sequences, e.g., the omega-enhancer e.g. improving the ribosomal binding to the transcript, or by increasing the stability of the mRNA, e.g. by replacing the 3′UTR coding region by a region encoding a 3′UTR known as conferring an high stability of the transcript or by stabilization of the transcript through the elimination of transcript instability, so that the mRNA molecule is translated more often than the wild type. For example in plants AU-rich elements (AREs) and DST (downstream) elements destabilized transcripts. Mutagenesis studies have demonstrated that residues within two of the conserved domains, the ATAGAT and the GTA regions, are necessary for instability function. Therefore removal or mutation of such elements would obviously lead to more stable transcripts, higher transcript rates and higher protein acitivity. Translation enhancers are also the “overdrive sequence”, which comprises the tobacco mosaic virus 5′-untranslated leader sequence and which increases the protein/RNA ratio (Gallie et al., Nucl. Acids Research 15, 8693 (1987)).

[2184] Enhancers are generally defined as cis active elements, which can stimulate gene transcription independent of position and orientation. Different enhancers have been identified in plants, which can either stimulate transcription constitutively or tissue or stimuli specific. Well known examples for constitutive enhancers are the enhancer from the 35S promoter (Odell et al., Nature 313, 810 (1985)) or the ocs enhancer (Fromm et al., Plant Cell 1, 977 (1989)). Other examples are the G-Box motif tetramer which confers high-level constitutive expression in dicotyledonous and monocotyledonous plants (Ishige et al., Plant Journal 18, 443 (1999)) or the petE, a NT-rich sequence which act as quantitative enhancers of gene expression in transgenic tobacco and potato plants (Sandhu et al., Plant Mol Biol. 37 (5), 885 (1998)). Beside that, a large variety of cis-active elements have been described which contribute to specific expression pattern, like organ specific expression or induced expression in response to biotic or abiotic stress. Examples are elements, which provide pathogen or wound-induced expression (Rushton, Plant Cell 14, 749 (2002)) or guard cell-specific expression (Plesch, Plant Journal 28, 455 (2001)).

[2185] Advantageous regulatory sequences for the expression of the nucleic acid molecule according to the invention in microorganisms are present for example in promoters such as the cos, tac, rha, trp, tet, trp-tet, Ipp, lac, !pp-lac, laclq-, T7, T5, T3, gal, trc, ara, SP6, λ-PR or λ-PL promoter, which are advantageously used in Gram-negative bacteria. Further advantageous regulatory sequences are present for example in the Gram-positive promoters amy, dnaK, xylS and SPO2, in the yeast or fungal promoters ADC1, MFα, AC, P-60, UASH, MCB, PHO, CYC1, GAPDH, TEF, rp28, ADH. Promoters, which are particularly advantageous, are constitutive, tissue or compartment specific or inducible promoters. In general, “promoter” is understood as meaning, in the present context, a regulatory sequence in a nucleic acid molecule, which mediates the expression of a coding sequence segment of a nucleic acid molecule. In general, the promoter is located upstream to the coding sequence segment. Some elements, for example expression-enhancing elements such as enhancer may, however, also be located downstream or even in the transcribed region.

[2186] In principle it is possible to use all natural promoters with their regulation sequences like those named above for the expression cassette according to the invention and the method according to the invention. Also, synthetic promoters may advantageously be used, either additionally or alone, for example synthetic promotors mediating seed-specific expression such as described in, for example, WO 99/16890. In the preparation of an expression cassette various DNA fragments can be manipulated in order to obtain a nucleotide sequence, which usefully reads in the correct direction and is equipped with a correct reading frame. To connect the DNA fragments (=nucleic acids according to the invention) to one another adaptors or linkers may be attached to the fragments. The promoter and the terminator regions can usefully be provided in the transcription direction with a linker or polylinker containing one or more restriction points for the insertion of this sequence. Generally, the linker has 1 to 10, mostly 1 to 8, preferably 2 to 6, restriction points. In general the size of the linker inside the regulatory region is less than 100 bp, frequently less than 60 bp, but at least 5 bp. The promoter may be both native or homologous as well as foreign or heterologous to the host non-human organism, for example to the host plant. In the 5′-3′ transcription direction the expression cassette contains the promoter, a nucleic acid molecule which is shown in the respective line in Table I, column 5 or 8, preferably the coding region, a homolog or a fragment thereof, and a region for transcription termination. Different termination regions can be exchanged for one another in any desired fashion.

[2187] As described above, the transcription of the genes introduced should advantageously be terminated by suitable terminators at the 3′ end of the genes introduced (behind the stop codon). A terminator, which may be used for this purpose is, for example, the OCS1 terminator, the nos3 terminator or the 35S terminator. As is the case with the promoters, different terminator sequences should be used for each gene in case several genes are introduced. Terminators, which are useful in microorganisms are for example the fimA terminator, txn terminator or trp terminator. Such terminators can be rho-dependent or rho-independent.

[2188] In an embodiment of the present invention the nucleic acid construct of the present invention comprises a nucleic acid molecule as depicted in the respective line in Table I, application no. 1, column 5 or 8, preferably the coding region thereof, a fragment or a homolog thereof, and a plant promoter, such as the Big 35S promoter, the DC3 promoter, the PC Ubi promoter, the LegB4-promoter, the Super promoter, the USP promoter or the like. In another embodiment the nucleic acid construct of the present invention comprises a nucleic acid molecule as depicted in th erespective line in Table I, application no. 1, column 5 or 8, preferably the coding region thereof, a fragment or a homolog thereof, and a plant promoter such as, for example, the USP, the LegB4-, the DC3 promoter or the ubiquitin promoter from parsley or other herein mentioned promoters. In a further embodiment the nucleic acid construct of the present invention comprises a nucleic acid molecule as depicted in th erespective line in Table I, application no. 1, column 5 or 8, preferably the coding region thereof, a fragment or a homolog thereof, and a plant promoter, such as the Big 35S promoter, the PC Ubi promoter, the Super promoter, the USP promoter or the like. In addition different terminators may advantageously be used in these nucleic acid constructs; examples for transcriptional termination are polyadenylation signals.

[2189] In order to ensure the stable integration, into the transgenic plant, of nucleic acid molecules used in the process according to the invention in combination with further genes, especially biosynthesis genes, over a plurality of generations, it may be advantageous to express each of the respective coding regions used in the process under the control of its own, preferably unique, promoter.

[2190] The nucleic acid construct is advantageously constructed in such a way that a promoter is followed by a suitable cleavage site for insertion of the nucleic acid to be expressed, advantageously in a polylinker, followed, if appropriate, by a terminator located behind the polylinker. If appropriate, this order is repeated several times so that several genes are combined in one construct and thus can be introduced into the transgenic plant in order to be expressed. The sequence is advantageously repeated up to three times. For the expression, the nucleic acid sequences are inserted via the above-mentioned suitable cleavage site, for example in the polylinker behind the promoter. It is advantageous for each nucleic acid sequence to have its own promoter and, if appropriate, its own terminator, as mentioned above. However, it is also possible to insert several nucleic acid sequences behind a promoter and, if appropriate, before a terminator if a polycistronic transcription is possible in the host or target cells. In this context, the insertion site, or the sequence of the nucleic acid molecules inserted, in the nucleic acid construct is not decisive, that is to say a nucleic acid molecule can be inserted in the first or last position in the cassette without this having a substantial effect on the expression. However, it is also possible to use only one promoter type in the construct.

[2191] Accordingly, in a preferred embodiment, the nucleic acid construct according to the invention confers expression of the nucleic acid molecule of the invention, and, optionally further genes, in a plant and comprises one or more plant regulatory elements. Said nucleic acid construct according to the invention advantageously encompasses beneath the nucleic acid molecule of the invention a plant promoter or a plant terminator or a plant promoter and a plant terminator. In another embodiment said nucleic acid construct according to the invention advantageously encompasses beneath the nucleic acid molecule of the invention a microorganism promoter or a microorganism terminator or a microorganism promoter and a microorganism terminator.

[2192] A “plant” promoter comprises regulatory elements, which mediate the expression of a coding sequence segment in plant cells. The plant promoter can originate from a plant cell, e.g. from the plant, which is transformed with the nucleic acid construct, expression cassette, or vector as described herein. However, a plant promoter does not need to be of plant origin, but may originate from viruses or microorganisms, in particular for example from viruses which attack plant cells. This also applies to other plant regulatory signals, for example in plant terminators. The term plant promoter shall also encompass organelle, especially plastidal promoters.

[2193] A nucleic acid construct suitable for plant expression preferably comprises regulatory elements which are capable of controlling the expression of genes in plant cells and which are operably linked so that each sequence can fulfill its function. Accordingly, the nucleic acid construct can also comprise transcription terminators. Examples for transcriptional termination are polyadenylation signals. Preferred polyadenylation signals are those which originate from Agrobacterium tumefaciens T-DNA, such as the gene 3 of the Ti plasmid pTiACH5, which is known as octopine synthase (Gielen et al., EMBO J. 3, 835 (1984)) or functional equivalents thereof, but all the other terminators which are functionally active in plants are also suitable.

[2194] Other preferred sequences for use in operable linkage in gene expression constructs are targeting sequences, which are required for targeting the gene product into specific cell compartments (for a review, see Kermode, Crit. Rev. Plant Sci. 15 (4), 285 (1996) and references cited therein), for example into the vacuole, the nucleus, all types of plastids, such as amyloplasts, chloroplasts, chromoplasts, the extracellular space, the mitochondria, the endoplasmic reticulum, elaioplasts, peroxisomes, glycosomes, and other compartments of cells or extracellular; preferred are sequences, which are involved in targeting to plastids as mentioned above. Sequences, which must be mentioned in this context are, in particular, the signal-peptide- or transit-peptide-encoding sequences which are known per se. For example, plastid-transit-peptide-encoding sequences enable the targeting of the expression product into the plastids of a plant cell. Targeting sequences are also known for eukaryotic and to a lower extent for prokaryotic organisms and can advantageously be operable linked with the nucleic acid molecule of the present invention as shown in Table I, application no. 1, columns 5 and 8, opreferably the coding region thereof, or homologs or fragments thereof, and described herein to achieve an expression in one of said compartments or extracellular.

[2195] For expression in plants, the nucleic acid molecule must, as described above, be linked operably to or comprise a suitable promoter which expresses the gene at the right point in time and in a cell- or tissue-specific manner. Usable promoters are constitutive promoters (Benfey et al., EMBO J. 8, 2195 (1989)), such as those which originate from plant viruses, such as 35S CAMV (Franck et al., Cell 21, 285 (1980)), 19S CaMV (see also U.S. Pat. No. 5,352,605 and WO 84/02913), 34S FMV (Sanger et al., Plant. Mol. Biol., 14, 433 (1990)), the parsley ubiquitin promoter, or plant promoters such as the Rubisco small subunit promoter described in U.S. Pat. No. 4,962,028 or the plant promoters PRP1 (Ward et al., Plant. Mol. Biol. 22 (1993)), SSU, PGEL1, OCS (Leisner, Proc. Natl. Acad. Sci. USA 85 (5), 2553 (1988)), lib4, usp, mas (Comai, Plant Mol. Biol. 15 (3), 373 (1990)), STLS1, ScBV (Schenk, Plant Mol. Biol. 39 (6),1221 (1999)), B33, SAD1 or SAD2 (flax promoters, Jain et al., Crop Science, 39 (6), 1696 (1999)) or nos (Shaw et al., Nucleic Acids Res. 12 (20), 7831 (1984)). Stable, constitutive expression of the proteins according to the invention into a plant can be advantageous. However, inducible expression of the polypeptide of the invention may be advantageous, if, for example, a late expression before the harvest is of advantage.

[2196] The expression of plant genes can also be facilitated as described above via a chemical inducible promoter (for a review, see Gatz, Annu. Rev. Plant Physiol. Plant Mol. Biol. 48, 89 (1997)). Chemically inducible promoters are particularly suitable when it is desired to express the gene in a time-specific manner. Examples of such promoters are a salicylic acid inducible promoter (WO 95/19443), a benzenesulfonamide inducible promoter (EP 388 186), and abscisic acid-inducible promoter (EP 335 528), a tetracyclin-inducible promoter (Gatz et al., Plant J. 2, 397 (1992)), a cyclohexanol- or ethanol-inducible promoter (WO 93/21334) or others as described herein.

[2197] Other suitable promoters are those which react to biotic or abiotic stress conditions, for example the pathogen-induced PRP1 gene promoter (Ward et al., Plant. Mol. Biol. 22, 361 (1993)), the auxin-induced GH3-promotor (Liu et al., Plant Cell 6, 645 (1994)), the cold/dehydration/ABA-induced Cor15A-promoter (Baker et al., Plant Mol. Biol. 24, 701 (1994)), the cold/drought/salt/ABA/wound-induced Cor78 promoter (Ishitani et al., Plant Cell 9, 1935 (1997), Yamaguchi-Shinozaki and Shinozaki, Plant Cell 6, 251 (1994)), the cold/dehydration-induced Rci2A-promoter (Capel et al., Plant Physiol 115, 569 (1997)), the drought/salt-induced Rd22-promoter (Yamaguchi-Shinozaki and Shinozaki, Mol. Gen. Genet. 238, 17 (1993)), the salt-induced RD29A-promoter (Yamaguchi-Shinozalei et al., Mol. Gen. Genet. 236, 331 (1993)), the salt-induced ARSK1-root promoter (Hwang and Goodman, Plant J. 8, 37 (1995), the salt-induced PtxA-root promoter (GenBank accession X67427), the tomato heat-inducible hsp80 promoter (U.S. Pat. No. 5,187,267), the potato chill-inducible alpha-amylase promoter (WO 96/12814) or the wound-inducible pinII promoter (EP-A-0 375 091) or others as described herein.

[2198] Preferred promoters are in particular those which bring about gene expression in tissues and organs, such as leaves, roots, seeds, pollen or xylem. Examples of tissue preferred or organ preferred promoters include, but are not limited to fruit-preferred, ovule-preferred, male tissue-preferred, seed-preferred, pollen-prefered integument-preferred, tuber-preferred, stalk-preferred, pericarp-preferred, leaf-preferred, stigma-preferred, pollen-preferred, anther-preferred, petal-preferred, sepal-preferred, pedicel-preferred, silique-preferred, stem-preferred, root-preferred promoters, and the like. Especially those promotors are preferred which bring about gene expression in tissues and organs in which the biosynthesis of amino acids takes place, like in seed cells, such as endosperm cells and cells of the developing embryo. Seed promoters are preferentially expressed during seed development and/or germination. For example, seed preferred promoters can be embryo-preferred, endosperm preferred, and seed coat-preferred (see Thompson et al., BioEssays 10, 108 (1989)). Examples of seed preferred promoters include, but are not limited to, cellulose synthase (celA), Cim1, gammazein, globulin-1, maize 19 kD zein (cZ19B1), and the like. Other suitable promoters are the oilseed rape napin gene promoter (U.S. Pat. No. 5,608,152), the Vicia faba USP promoter (Baeumlein et al., Mol Gen Genet, 225 (3), 459 (1991)), the Arabidopsis oleosin promoter (WO 98/45461), the Phaseolus vulgaris phaseolin promoter (U.S. Pat. No. 5,504,200), the Brassica Bce4 promoter (WO 91/13980), the bean arcs promoter, the carrot DcG3 promoter, or the Legumin B4 promoter (LeB4) (Baeumlein et al., Plant Journal, 2 (2), 233 (1992)), and promoters which bring about the seed-specific expression in monocotyledonous plants such as maize, barley, wheat, rye, rice and the like. Advantageous seed-specific promoters are the sucrose binding protein promoter (WO 00/26388), the phaseolin promoter and the napin promoter. Suitable promoters which must be considered are the barley Ipt2 or Ipt1 gene promoter (WO 95/15389 and WO 95/23230), and the promoters described in WO 99/16890 (promoters from the barley hordein gene, the rice glutelin gene, the rice oryzin gene, the rice prolamin gene, the wheat gliadin gene, the wheat glutelin gene, the maize zein gene, the oat glutelin gene, the sorghum kasirin gene and the rye secalin gene). Further suitable promoters are Amy32b, Amy 6-6 and Aleurain (U.S. Pat. No. 5,677,474), Bce4 (oilseed rape) (U.S. Pat. No. 5,530,149), glycinin (soya) (EP 571 741], phosphoenolpyruvate carboxylase (soya) (JP 06/62870), ADR12-2 (soya) (WO 98/08962), isocitrate lyase (oilseed rape) (U.S. Pat. No. 5,689,040])or α-amylase (barley) (EP 781 8499. Other promoters which are available for the expression of genes in plants are leaf-specific promoters such as those described in DE-A 19 644 478 or light-regulated promoters such as, for example, the pea petE promoter.

[2199] Further suitable plant promoters are the cytosolic FBPase promoter or the potato ST-LSI promoter (Stockhaus et al., EMBO J. 8, 2445 (1989)), the Glycine max phosphoribosylpyrophosphate amidotransferase promoter (GenBank Accession No. U87999) or the noduline-specific promoter described in EP 249 676.

[2200] Promoters, which are particularly suitable, are those which bring about plastid-specific expression. Suitable promoters such as the viral RNA polymerase promoter are described in WO 95/16783 and WO 97/06250, and the Arabidopsis clpP promoter, which is described in WO 99/46394.

[2201] Promoters, which are used for the strong expression of heterologous sequences as well as additional homologous sequences in as many tissues as possible, in particular also in leaves, are, in addition to several of the above-mentioned viral and bacterial promoters, preferably, plant promoters of actin or ubiquitin genes such as, for example, the rice actin1 promoter. Further examples of constitutive plant promoters are the sugarbeet V-ATPase promoters (WO 01/14572). Examples of synthetic constitutive promoters are the Super promoter (WO 95/14098) and promoters derived from G-boxes (WO 94/12015). If appropriate, chemical inducible promoters may furthermore also be used, as described in EP 388 186, EP 335 528, WO 97/06268.

[2202] Promoters, which are particularly suitable, are e.g. the super-promoter (Ni et al., Plant Journal 7, 661 (1995)), the ubiquitin promoter (Callis et al., J. Biol. Chem., 265, 12486 (1990); U.S. Pat. No. 5,510,474; U.S. Pat. No. 6,020,190; Kawalleck et al., Plant. Molecular Biology, 21, 673 (1993)) or the 34S promoter (GenBank Accession numbers M59930 and X16673). Promoters useful in the expression cassettes of the invention include, but are not limited to, the major chlorophyll a/b binding protein promoter, histone promoters, the Ap3 promoter, the β-conglycin promoter, the napin promoter, the soybean lectin promoter, the maize 15kD zein promoter, the 22kD zein promoter, the 27kD zein promoter, the g-zein promoter, the waxy, shrunken 1, shrunken 2 and bronze promoters, the Zm13 promoter (U.S. Pat. No. 5,086,169), the maize polygalacturonase promoters (PG) (U.S. Pat. Nos. 5,412,085 and 5,545,546), and the SGB6 promoter (U.S. Pat. No. 5,470,359), the rice cyclophilin promoter (Buchholz et al., Plant Mol. Biol.25 (5), 837 (1994)), the glutelin (rice) promoter (Takaiwa et al., Mol. Gen. Genet. 208, 15 (1986), Takaiwa et al., FEBS letts. 221, 43 (1987), the rice prolamin NRP33 promoter and the rice aglobulin Glb-1 promoter (Wu et al., Plant cell Physiology 39 (8), 885 (1998),as well as synthetic or other natural promoters.

[2203] As already mentioned herein, further regulatory sequences, which may be expedient, if appropriate, also include sequences, which target the transport and/or the localization of the expression products. Sequences, which must be mentioned in this context are, in particular, the signal-peptide- or transit-peptide-encoding sequences which are known per se. For example, plastid-transit-peptide-encoding sequences enable the targeting of the expression product into the plastids of a plant cell.

[2204] One embodiment of the present invention also relates to a method for generating a vector, which comprises the insertion of the nucleic acid molecule according to the invention or the expression cassette according to the invention into a nucleic acid molecule to give the vector. The vector can, for example, be introduced in to a cell, e.g. a microorganism or a plant cell, a plant or a part therof, as described herein for the nucleic acid construct, or below under transformation or transfection or shown in the examples. A transient or stable transformation of the host or target cell is possible, however, a stable transformation is preferred. The vector according to the invention is preferably a vector, which is suitable for expressing the polypeptide according to the invention in a microorganism or a plant cell, a plant or a part thereof.

[2205] The method can thus also encompass one or more steps for integrating regulatory signals into the vector, in particular signals, which mediate the expression in microorganisms or plant cells, plants or respective parts thereof.

[2206] Accordingly, the present invention also relates to a vector comprising the nucleic acid molecule characterized herein as part of a nucleic acid construct suitable for expression in plants and/or microrganisms or the nucleic acid molecule according to the invention.

[2207] The advantageous vectors of the invention comprise the nucleic acid molecules which encode proteins according to the invention, nucleic acid molecules which are used in the process, or nucleic acid construct suitable for plant expression or for microorganism expression comprising the nucleic acid molecules used, or expression cassettes according to the invention, either alone or in combination with further genes such as the biosynthesis or regulatory genes of the fine chemical metabolism e.g. with the genes mentioned herein above.

[2208] The recombinant expression vectors which are advantageously used in the process comprise the nucleic acid molecules according to the invention or the nucleic acid construct according to the invention, or ethe xpression cassettes according to the invention, in a form which is suitable for expressing, in a host cell. the nucleic acid molecules according to the invention or described herein. Accordingly, the recombinant expression vectors in addition may comprise one or more regulatory signals selected on the basis of the host cells to be used for the expression, in operable linkage with the nucleic acid sequence to be expressed. Furthermore, if desired, in addition the vector can comprise plastome sequences of the recipient organism to facilitate integration into the plastidal genome by homologous recombination as mentioned above.

[2209] The recombinant expression vectors used can be designed specifically for the expression, in prokaryotic and/or eukaryotic cells, of nucleic acid molecules used in the process. This is advantageous since intermediate steps of the vector construction are frequently carried out in microorganisms for the sake of simplicity. For example, the genes according to the invention and other genes can be expressed in bacterial cells, insect cells (using baculovirus expression vectors), yeast cells and other fungal cells (Romanos, Yeast 8, 423 (1992); van den Hondel, in “More Gene Manipulations in Fungi”, ed. Bennet J. W., Lasure L. L., pp. 396-428, Academic Press, San Diego (1991); van den Hondel C. A. M. J. J., in “Applied Molecular Genetics of Fungi”, ed. Peberdy J. F. et al., pp. 1-28, Cambridge University Press, Cambridge(1991)), algae (Falciatore et al., Marine Biotechnology.1 (3), 239 (1999)) using vectors and following a transformation method as described in WO 98/01572, and preferably in cells of multi-celled plants (see Schmidt R. and Willmitzer L., Plant Cell Rep. 7, 583 (1988); “Plant Molecular Biology and Biotechnology”, C Press, Boca Raton, Fla., chapter 6/7, pp.71-119 (1993); White F. F., in “Transgenic Plants”, Bd. 1, Engineering and Utilization, ed.Kung and Wu R., Academic Press, 128-43 (1993); Potrykus, Annu. Rev. Plant Physiol. Plant Molec. Biol. 42, 205 (1991) (and references cited therein)). Suitable host cells are furthermore discussed in Goeddel, “Gene Expression Technology: Methods in Enzymology 185”, Academic Press, San Diego, Cailf. (1990). As an alternative, the sequence of the recombinant expression vector can be transcribed and translated in vitro, for example using T7 promotor-regulatory sequences and T7 polymerase.

[2210] In the event it is necessary proteins can be expressed in prokaryotes using vectors comprising constitutive or inducible promoters, which control the expression of fusion proteins or nonfusion proteins as mentioned above.

[2211] Other vectors which are suitable in prokaryotic organisms are known to the skilled worker; these vectors are for example in E. coli pLG338, pACYC184, the pBR series, such as pBR322, the pUC series such as pUC18 or pUC19, the M113mp series, pKC30, pRep4, pHS1, pHS2, pPLc236, pMBL24, pLG200, pUR290, pIN-111113-B1, lambda-gt11 or pBdCl, in Streptomyces pIJ101, pIJ364, pIJ702 or pIJ361, in Bacillus pUB110, pC194 or pBD214, in Corynebacterium pSA77 or pAJ667.

[2212] In a further embodiment, the expression vector is a yeast expression vector. Examples of vectors for expression in the yeasts S. cerevisiae encompass pYeDesaturasec1 (Baldari et al., Embo J. 6, 229 (1987)), pMFa (Kurjan and Herskowitz, Cell 30, 933 (1982)), pJRY88 (Schultz et al., Gene 54, 113(1987)) and pYES2 (Invitrogen Corporation, San Diego, Calif.). Vectors and methods for the construction of vectors which are suitable for use in other fungi, such as the filamentous fungi, encompass those which are described in detail in: van den Hondel C. A. M. J. J. in “Applied Molecular Genetics of Fungi”, Peberdy J. F., ed., pp. 1-28, Cambridge University Press, Cambridge (1991); or van den Hondel C. A. M. J. J. in “More Gene Manipulations in Fungi”, Bennet J. W.& Lasure L. L., ed., pp. 396-428, Academic Press, San Diego (1991). Examples of other suitable yeast vectors are 2alphaM, pAG-1, YEp6, YEp13 or pEMBLYe23.

[2213] Further vectors, which may be mentioned by way of example, are pALS1, μl L2 or pBB116 in fungi or pLGV23, pGHlac+, pBIN19, pAK2004 or pDH51 in plants.

[2214] As an alternative, the nucleic acid sequences can be expressed in insect cells using baculovirus expression vectors. Baculovirus vectors, which are available for expressing proteins in cultured insect cells (for example Sf9 cells) encompass the pAc series (Smith et al., Mol. Cell Biol. 3, 2156 (1983)) and the pVL series (Lucklow and Summers, Virology 170, 31 (1989)).

[2215] The above-mentioned vectors are only a small overview of potentially suitable vectors. Further plasmids are known to the skilled worker and are described, for example, in “Cloning Vectors” (ed. Pouwels P.H., et al., Elsevier, Amsterdam-New York-Oxford, 1985, ISBN 0 444 904018). Further suitable expression systems for prokaryotic and eukaryotic cells, see the chapters 16 and 17 by Sambrook J., Fritsch E. F. and Maniatis T., “Molecular Cloning: A Laboratory Manual”, 2^{nd} edition, Cold Spring Harbor Laboratory, Cold Spring Harbor Laboratory Press, Cold Spring Harbor, N. Y., 1989.

[2216] An embodiment of the invention relates to a vector where the nucleic acid molecule according to the invention is linked operably to regulatory sequences which permit the expression in a prokaryotic or eukaryotic host. A further embodiment of the invention relates to a vector in which a nucleic acid sequence encoding one of the polypeptides shown in therespective line in Table II, application no. 1, columns 5 or 8, or homologs or fragments thereof, is functionally linked to a targeting sequence such as a plastidial or mitochondrial targeting sequence. A further embodiment of the invention relates to a vector in which a nucleic acid sequence encoding one of the polypeptides shown in the respective line in Table II, application no. 1, columns 5 or 8, or homologs or fragments thereof, is functionally linked to (a) regulatory sequence which permit the expression in an organelle,such as plastids or mitochondria, preferably plastids.

[2217] A further embodiment of the invention relates to a vector which comprises a nucleic acid sequence encoding one of the polypeptides shown in the respective line in Table II, application no. 1, columns 5 or 8, or homologs or fragments thereof, but no additional targeting sequence.

[2218] Accordingly, one embodiment of the invention relates to a host cell, which has been transformed stably or transiently with the vector according to the invention or the nucleic acid molecule according to the invention or the nucleic acid construct according to the invention or the expression construct according to the invention.

[2219] The genetically modified cells may be regenerated to the respective non-human organism, for example a plant cell to a plant, by all of the methods known to those skilled in the art. Appropriate methods can be found in the publications referred to above by Kung S. D. and Wu R., Potrykus or Hofgen and Willmitzer.

[2220] Accordingly, a further aspect of the invention relates to transgenic non-human organisms transformed by at least one nucleic acid molecule, expression cassette or vector according to the invention as well as cells, cell cultures, tissue, parts—such as, for example, leaves, roots, pollen, etc. in the case of plant organisms—or reproductive material derived from such non-human organisms. The terms “host organism”, “host cell”, “recombinant (host) non-human organism” and “transgenic (host) cell” are used here interchangeably. Of course these terms relate not only to the particular host non-human organism or the particular target cell but also to the descendants or potential descendants of these non-human organisms or cells. Since, due to mutation or environmental effects certain modifications may arise in successive generations, these descendants need not necessarily be identical with the parental cell but nevertheless are still encompassed by the term as used here.

[2221] For the purposes of the invention “ transgenic” or “recombinant” means with regard for example to a nucleic acid molecule, a nucleic acid construct, an expression cassette or a vector containing the nucleic acid molecule according to the invention or an non-human organism transformed with/by the nucleic acid molecule, nucleic acid construct, expression cassette or vector according to the invention all those constructions produced by genetic engineering methods in which either
[2222] (a) the nucleic acid molecule depicted in the respective line in Table I, column 5 or 8, preferably the coding region thereof, or homologs or fragments thereof; or
[2223] (b) a genetic control sequence functionally linked to the nucleic acid molecule described under (a), for example a 3′- and/or 5′- genetic control sequence such as a promoter or terminator, or
[2224] (c) (a) and (b);
   are not found in their natural, genetic environment or have been modified by genetic engineering methods, wherein the modification may by way of example be a substitution, addition, deletion, inversion or insertion of one or more nucleotide residues. Natural genetic environment means the natural genomic or chromosomal locus in the organism of origin or inside the host non-human organism or presence in a genomic library. In the case of a genomic library the natural genetic environment of the nucleic acid sequence is preferably retained at least in part. The environment sequence borders the nucleic acid sequence at least on one side and has a sequence length of at least 50 bp, preferably at least 500 bp, particularly preferably at least 1,000 bp, most particularly preferably at least 5,000 bp. A naturally occurring expression cassette—for example the naturally occurring combination of the natural promoter of the nucleic acid sequence according to the invention with the corresponding gene—turns into a transgenic expression cassette when the latter is modified by unnatural, synthetic (“artificial”) methods such as by way of example a mutagenesis. In case a non-human organism is transformed by a homologous nucleic acid molecule or by a homologous expression cassette the resulting non-human organism represents also a respective transgenic non-human organism since the additional homologous nucleic acid molecule or the additional homologous expression cassette is not located in its original envirnment. Appropriate methods are described by way of example in U.S. Pat. No. 5,565,350 or WO 00/15815. In another embodiment the non-human organism comprises a heterologous nucleic acid molecule.

[2225] Suitable organisms or host organisms for the nucleic acid molecule, nucleic acid construct, expression cassette or vector according to the invention are advantageously in principle all non-human organisms, which are suitable for the expression of recombinant genes as described above. Preferred non-human organism are microorganism or plants as described above, in particular those plants, which can be transformed in a suitable manner. These include monocotyledonous and dicotyledonous plants. In an embodiment of the present invention plants like Arabidopsis, Asteraceae such as Calendula or crop plants such as soybean, peanut, castor oil plant, sunflower, flax, corn, cotton, oilseed rape, coconut, oil palm, safflower (Carthamus tinctorius) or cocoa bean are preferred. In another embodiment agriculturally useful plants such as cereals and grasses, for example Triticum spp., Zea mays, Hordeum vulgare, oats, Secale cereale, Oryza sativa, Pennisetum glaucum, Sorghum bicolor, Triticale, Agrostis spp., Cenchrus ciliaris, Dactylis glomerata, Festuca arundinacea, Lolium spp., Medicago spp. and Saccharum spp., legumes and oil crops, for example Brassica juncea, Brassica napus, Glycine max, Arachis hypogaea, Gossypium hirsutum, Cicer arietinum, Helianthus annuus, Lens culinaris, Linum usitatissimum, Sinapis alba, Trifolium repens and Vicia narbonensis, vegetables and fruits, for example bananas, grapes, Lycopersicon esculentum, asparagus, cabbage, watermelons, kiwi fruit, Solanum tuberosum, Beta vulgaris, cassava and chicory, trees, for example Coffea species, Citrus spp., Eucalyptus spp., Picea spp., Pinus spp. and Populus spp., medicinal plants and trees, and flowers are preferred.

[2226] In another embodiment of the invention host plants for the nucleic acid molecule, nucleic acid construct, expression cassette or vector according to the invention are selected from the group comprising corn, soy, oil seed rape (including canola and winter oil seed rape), cotton, wheat and rice.

[2227] A further object of the invention relates to the use of a nucleic acid construct, e.g. an expression cassette, comprising one or more nucleic acid molecules encoding one or more polypeptides as depicted in the respective line(s) in Table II, application no. 1, columns 5 or 8, or homologs or fragments thereof, or comprising one or more nucleic acid molecules as depicted in the respective line(s) in Table I, application no. 1, columns 5 or 8, preferably the coding region thereof, or homologs or fragments thereof, or comprising a nucleic acid molecule hybridizing therewith for the transformation of a microorganism or a plant cell, plant tissues or a part of a plant

[2228] In doing so, depending on the choice of promoter, the nucleic acid molecules shown in the respective line in Table I, application no. 1, column 5 or 8, preferably the coding region thereof, or homologs or fragments thereof, or the nucleic acid molecules encoding a polypeptide as depicted in the respective line in Table II, application no. 1, column 5 or 8, or homologs or fragments thereof, can be expressed in the whole plant or specifically e.g. in the leaves, in the seeds, the nodules, in roots, in the stem or other parts of the plant. Those transgenic plants overproducing sequences, e.g. as depicted in the respective line in Table I, application no. 1, column 5 or 8, preferably the coding region thereof, or homologs or fragments thereof, the plant cell, plant tissues, plants, the reproductive material thereof, or parts thereof are a further object of the present invention.

[2229] Within the framework of the present invention, the production of the methionine is due to the generation or over-expression of one or more polypeptides as depicted in the respective line(s) in Table II, application no. 1, column 5 or 8, or homologs or fragments thereof, or encoded by the corresponding nucleic acid molecules as depicted in the respective line(s) in Table I, application no. 1, column 5 or 8, preferably the coding region thereof, or homologs or fragments thereof, in the non-human organism according to the invention, advantageously in the transgenic microorganism or plant according to the invention, at least for the duration of at least one plant generation.

[2230] A constitutive expression of the polypeptide as depicted in the respective line in Table II, application no. 1, column 5 or 8, or homologs or fragments thereof, or encoded by the respective nucleic acid molecule as depicted in the respective line in Table I, application no. 1, column 5 or 8, preferably the coding region thereof, or homologs or fragments thereof, may be advantageous. On the other hand, an inducible expression may also appear desirable. Expression of the polypeptide sequences of the invention can be either directed to the cytosol or to the organelles, such as plastids or mitochondria, preferably the plastids of the host cells, preferably the plant cells, or non-targeted.

[2231] The efficiency of the expression of the polypeptides depicted in the respective line in Table II, colunm 5 or 8, or homologs or fragments thereof, or encoded by the respective nucleic acid molecule as depicted in the respective line in Table I, column 5 or 8, preferably the coding region thereof, or homologs or fragments thereof, can be determined, for example, on test plants in greenhouse trials.

[2232] In a further embodiment the invention relates to a transgenic non-human organisms such as transgenic microorganism or transgenic plant comprising a nucleic acid molecule comprising
[2233] [1) a nucleic acid molecule selected from the group consisting of
   [2234] (a) a nucleic acid molecule encoding a polypeptide shown in Table II, application no. 1, column 5 or 8, preferably shown in Table II A, application no. 1, column 5, or in Table IIA, application no. 1, column 8, or in Table II B, application no. 1, column 8, or a homolog or a fragment thereof;
   [2235] (b) a nucleic acid molecule shown in Table I, application no. 1, column 5 or 8, preferably shown in Table I A, application no. 1, column 5, or in Table I A, application no. 1, column 8, or in Table I B, application no. 1, column 8, preferably the coding region thereof, or a homolog or a fragment thereof;
   [2236] (c) a nucleic acid molecule, which, as a result of the degeneracy of the genetic code, can be derived from a polypeptide sequence depicted in column 5 or 8 of Table II, application no. 1, preferably shown in Table II A, application no. 1, column 5, or in Table II A, application no. 1, column 8, or in Table II B, application no. 1, column 8;
   [2237] (d) a nucleic acid molecule having at least 30% identity, preferably at least 40%, 50%, 60%, 70%, 75%, 80%, 85%, 90%, 95%, 96%, 97%, 98%, 99%, 99.5%, with the nucleic acid molecule sequence of a polynucleotide comprising the nucleic acid molecule shown in column 5 or 8 of Table I, application no. 1, preferably shown in Table I A, application no. 1, column 5, or in Table I A, application no. 1, column 8,or in Table I B, application no. 1, column 8, preferably the coding region thereof;
   [2238] (e) a nucleic acid molecule encoding a polypeptide having at least 30% identity, preferably at least 40%, 50% 60%, 70%, 75%, 80%, 85%, 90%, 95%, 96%, 97%, 98%, 99%, 99.5%, identity with the amino acid sequence of the polypeptide encoded by the nucleic acid molecule of (a), (b), (c) or (d);
   [2239] (f) a nucleic acid molecule which hybridizes with a nucleic acid molecule of (a), (b), (c), (d) or (e) under stringent hybridisation conditions;
   [2240] (g) a nucleic acid molecule encoding a polypeptide which can be isolated with the aid of monoclonal or polyclonal antibodies made against a polypeptide encoded by one of the nucleic acid molecules of (a), (b), (c), (d), (e) or (f);
   [2241] (h) a nucleic acid molecule encoding a polypeptide comprising the consensus sequence or one or more polypeptide motifs as shown in column 8 of Table IV, application no. 1;
   [2242] (i) a nucleic acid molecule encoding a polypeptide having the activity represented by a respective protein as depicted in column 5 of Table II, application no. 1;
   [2243] (j) a nucleic acid molecule comprising a polynucleotide which is obtained by amplifying a cDNA library or a genomic library using the primers in Table III, application no. 1, column 8;
   [2244] and
   [2245] (k) nucleic acid molecule which is obtainable by screening a suitable nucleic acid library, especially a cDNA library and/or a genomic library, under stringent hybridization conditions with a probe comprising one of the sequences of the nucleic acid molecule of (a), (b), (c), (d), (e), (f), (g), (h), (i) or (j) or with a fragment of at least 15 nt, preferably 20 nt, 30 nt, 50 nt, 100 nt, 200 nt,500 nt, 1000 nt, 1500 nt, 2000 nt or 3000 nt of the nucleic acid molecule characterized in (a), (b), (c), (d), (e), (f), (g), (h), (i) or (j);
      or a nucleic acid molecule comprising a sequence which is complementary thereto; and, if desired
[2246] 2) nucleic acid molecule encoding a transit peptide, preferably encoding a plastidal transit peptide or a mitochondrial transit peptide; which are operable linked;]
   or comprising an expression cassette comprising
[2247] [0) a promoter, prefereably a promoter selected from the group consisting of Big35S, PCUbi, Super and USP; and
[2248] 1) a nucleic acid molecule selected from the group consisting of
   [2249] (a) a nucleic acid molecule encoding a polypeptide shown in Table II, application no. 1, column 5 or 8, preferably shown in Table II A, application no. 1, column 5, or in Table II A, application no. 1, column 8, or in Table II B, application no. 1, column 8, or a homolog or a fragment thereof;
   [2250] (b) a nucleic acid molecule shown in Table I, application no. 1, column 5 or 8, preferably shown in Table I A, application no. 1, column 5, or in Table I A, application no. 1, column 8, or in Table I B, application no. 1, column 8, preferably the coding region thereof, or a homolog or a fragment thereof;
   [2251] (c) a nucleic acid molecule, which, as a result of the degeneracy of the genetic code, can be derived from a polypeptide sequence depicted in column 5 or 8 of Table II, application no. 1, preferably shown in Table II A, application no. 1, column 5, or in Table II A, application no. 1, column 8, or in Table II B, application no. 1, column 8;
   [2252] (d) a nucleic acid molecule having at least 30% identity, preferably at least 40%, 50%, 60%, 70%, 75%, 80%, 85%, 90%, 95%, 96%, 97%, 98%, 99%, 99.5%, with the nucleic acid molecule sequence of a polynucleotide comprising the nucleic acid molecule shown in column 5 or 8 of Table I, application no. 1, preferably shown in Table I A, application no. 1, column 5, or in Table I A, application no. 1, column 8,or in Table I B, application no. 1, column 8, preferably the coding region thereof;
   [2253] (e) a nucleic acid molecule encoding a polypeptide having at least 30% identity, preferably at least 40%, 50% 60%, 70%, 75%, 80%, 85%, 90%, 95%, 96%, 97%, 98%, 99%, 99.5%, identity with the amino acid sequence of the polypeptide encoded by the nucleic acid molecule of (a), (b), (c) or (d);
   [2254] (f) a nucleic acid molecule which hybridizes with a nucleic acid molecule of (a), (b), (c), (d) or (e) under stringent hybridisation conditions;
   [2255] (g) a nucleic acid molecule encoding a polypeptide which can be isolated with the aid of monoclonal or polyclonal antibodies made against a polypeptide encoded by one of the nucleic acid molecules of (a), (b), (c), (d), (e) or (f);
   [2256] (h) a nucleic acid molecule encoding a polypeptide comprising the consensus sequence or one or more polypeptide motifs as shown in column 8 of Table IV, application no. 1;
   [2257] (i) a nucleic acid molecule encoding a polypeptide having the activity represented by a respective protein as depicted in column 5 of Table II, application no. 1;
   [2258] (j) a nucleic acid molecule comprising a polynucleotide which is obtained by amplifying a cDNA library or a genomic library using the primers in Table III, application no. 1, column 8;
   [2259] and
   [2260] (k) nucleic acid molecule which is obtainable by screening a suitable nucleic acid library, especially a cDNA library and/or a genomic library, under stringent hybridization conditions with a probe comprising one of the sequences of the nucleic acid molecule of (a), (b), (c), (d), (e), (f), (g), (h), (i) or (j) or with a fragment of at least 15 nt, preferably 20 nt, 30 nt, 50 nt, 100 nt, 200 nt,500 nt, 1000 nt, 1500 nt, 2000 nt or 3000 nt of the nucleic acid molecule characterized in (a), (b), (c), (d), (e), (f), (g), (h), (i) or (j);
   [2261] or a nucleic acid molecule comprising a sequence which is complementary thereto;
      and, if desired
[2262] 2) nucleic acid molecule encoding a transit peptide, preferably encoding a plastidal transit peptide or a mitochondrial transit peptide; which are operable linked;]
   or comprising or being transformed by a vector comprising
[2263] [1) a nucleic acid molecule selected from the group consisting of
   [2264] (a) a nucleic acid molecule encoding a polypeptide shown in Table II, application no. 1, column 5 or 8, preferably shown in Table II A, application no. 1, column 5, or in Table II A, application no. 1, column 8, or in Table II B, application no. 1, column 8, or a homolog or a fragment thereof;
   [2265] (b) a nucleic acid molecule shown in Table I, application no. 1, column 5 or 8, preferably shown in Table I A, application no. 1, column 5, or in Table I A, application no. 1, column 8, or in Table I B, application no. 1, column 8, preferably the coding region thereof, or a homolog or a fragment thereof;
   [2266] (c) a nucleic acid molecule, which, as a result of the degeneracy of the genetic code, can be derived from a polypeptide sequence depicted in column 5 or 8 of Table II, application no. 1, preferably shown in Table II A, application no. 1, column 5, or in Table II A, application no. 1, column 8, or in Table II B, application no. 1, column 8;
   [2267] (d) a nucleic acid molecule having at least 30% identity, preferably at least 40%, 50%, 60%, 70%, 75%, 80%, 85%, 90%, 95%, 96%, 97%, 98%, 99%, 99.5%, with the nucleic acid molecule sequence of a polynucleotide comprising the nucleic acid molecule shown in column 5 or 8 of Table I, application no. 1, preferably shown in Table I A, application no. 1, column 5, or in Table I A, application no. 1, column 8,or in Table I B, application no. 1, column 8, preferably the coding region thereof;
   [2268] (e) a nucleic acid molecule encoding a polypeptide having at least 30% identity, preferably at least 40%, 50% 60%, 70%, 75%, 80%, 85%, 90%, 95%, 96%, 97%, 98%, 99%, 99.5%, identity with the amino acid sequence of the polypeptide encoded by the nucleic acid molecule of (a), (b), (c) or (d);
   [2269] (f) a nucleic acid molecule which hybridizes with a nucleic acid molecule of (a), (b), (c), (d) or (e) under stringent hybridisation conditions;
   [2270] (g) a nucleic acid molecule encoding a polypeptide which can be isolated with the aid of monoclonal or polyclonal antibodies made against a polypeptide encoded by one of the nucleic acid molecules of (a), (b), (c), (d), (e) or (f);
   [2271] (h) a nucleic acid molecule encoding a polypeptide comprising the consensus sequence or one or more polypeptide motifs as shown in column 8 of Table IV, application no. 1;
   [2272] (i) a nucleic acid molecule encoding a polypeptide having the activity represented by a respective protein as depicted in column 5 of Table II, application no. 1;
   [2273] (j) a nucleic acid molecule comprising a polynucleotide which is obtained by amplifying a cDNA library or a genomic library using the primers in Table III, application no. 1, column 8;
   [2274] and
   [2275] (k) nucleic acid molecule which is obtainable by screening a suitable nucleic acid library, especially a cDNA library and/or a genomic library, under stringent hybridization conditions with a probe comprising one of the sequences of the nucleic acid molecule of (a), (b), (c), (d), (e), (f), (g), (h), (i) or (j) or with a fragment of at least 15 nt, preferably 20 nt, 30 nt, 50 nt, 100 nt, 200 nt,500 nt, 1000 nt, 1500 nt, 2000 nt or 3000 nt of the nucleic acid molecule characterized in (a), (b), (c), (d), (e), (f), (g), (h), (i) or (j);
   [2276] or a nucleic acid molecule comprising a sequence which is complementary thereto;]
      as well as respective transgenic cells, tissue, parts of such non-human organism, e.g. plant cells, plant tissue, part of plants, like leaves, roots, stems, blossoms, seeds, fruits, pollen and the like.
      (All the references to Tables I to IV are references to the corresponding lines of Tables I to IV.)

[2277] In a preferred embodiment of said transgenic non-human organism said nucleic acid molecule according to 1 (a), (b), (c), (d), (e), (f), (g), (h), (i), (j) or (k) encodes a polypeptide which has the activity of the respective polypeptide represented by a protein comprising a polypeptide as depicted in the respective line in column 5 of Table II, application no. 1.

[2278] In another preferred embodiment of said transgenic non-human organism said nucleic acid molecule according to 1 (a), (b), (c), (d), (e), (f), (g), (h), (i), (j) or (k) confers a generation or an increase of the respective fine chemical in a non-human organism or a part thereof as compared to a corresponding wild-type non-human organism or part thereof.

[2279] In another preferred embodiment of said transgenic non-human organism said nucleic acid molecule according to 1 (a), (b), (c), (d), (e), (f), (g), (h), (i), (j) or (k) encodes a polypeptide which has the activity of the respective polypeptide represented by a protein as depicted in the respective line in column 5 of Table II application no. 1 and confers a generation or an increase of the respective fine chemical in a non-human organism or a part thereof as compared to a corresponding wild-type non-human organism or part thereof.

[2280] In another embodiment of said transgenic non-human organism the expression cassette comprises 2) a nucleic acid molecule encoding a transit peptide, preferably encoding a plastidal transit peptide, especially in case in column 6 of Table I, application no. 1, in the same line as of the respective nucleic acid molecule according to 1) “plastidic” is depicted, or encoding a mitochondrial transit peptide, especially in case in column 6 of Table I, application no. 1, in the same line as of the respective nucleic acid molecule according to 1) “mitochondrial” is depicted.

[2281] In another embodiment of said transgenic non-human organism the expression cassette does not comprise 2) a nucleic acid molecule encoding a transit peptide, especially in case in column 6 of Table I, application no. 1, in the same line as of the respective nucleic acid molecule according to 1) “non-targeted” is depicted.

[2282] In another embodiment of said transgenic non-human organism said vector comprises beneath said nucleic acid molecule according to 1 (a), (b), (c), (d), (e), (f), (g), (h), (i), (j) or (k), a promoter, prefereably a promoter selected from the group consisting of Big35S, PCUbi, Super and USP, which are operable linked.

[2283] In a preferred embodiment of said transgenic non-human organism said vector comprises beneath said nucleic acid molecule according to 1 (a), (b), (c), (d), (e), (f), (g), (h), (i), (j) or (k), a promoter, prefereably a promoter selected from the group consisting of Big35S, PCUbi, Super and USP, which are operable linked; and said nucleic acid molecule according to 1 (a), (b), (c), (d), (e), (f), (g), (h), (i), (j) or (k) encodes a polypeptide which has the activity of the respective polypeptide represented by a protein comprising a polypeptide as depicted in the respective line in column 5 of Table II, application no. 1.

[2284] In another preferred embodiment of said transgenic non-human organism said vector comprises beneath said nucleic acid molecule according to 1 (a), (b), (c), (d), (e), (f), (g), (h), (i), (j) or (k), a promoter, prefereably a promoter selected from the group consisting of Big35S, PCUbi, Super and USP, which are operable linked; and said nucleic acid molecule according to 1 (a), (b), (c), (d), (e), (f), (g), (h), (i), (j) or (k) confers a generation or an increase of the respective fine chemical in a non-human organism or a part thereof as compared to a corresponding wild-type non-human organism or part thereof.

[2285] In another preferred embodiment of said transgenic non-human organism said vector comprises beneath said nucleic acid molecule according to 1 (a), (b), (c), (d), (e), (f), (g), (h), (i), (j) or (k), a promoter, prefereably a promoter selected from the group consisting of Big35S, PCUbi, Super and USP, which are operable linked; and said nucleic acid molecule according to 1 (a), (b), (c), (d), (e), (f), (g), (h), (i), (j) or (k) encodes a polypeptide which has the activity of the respective polypeptide represented by a protein as depicted in the respective line in column 5 of Table II, application no. 1, and confers a generation or an increase of the respective fine chemical in a non-human organism or a part thereof as compared to a corresponding wild-type non-human organism or part thereof.

[2286] In another embodiment of said transgenic non-human organism said vector comprises beneath said nucleic acid molecule according to 1 (a), (b), (c), (d), (e), (f), (g), (h), (i), (j) or (k), a nucleic acid molecule encoding a transit peptide, preferably encoding a plastidal transit peptide, especially in case in column 6 of Table I, application no. 1, in the same line as of the respective nucleic acid molecule according to 1) “plastidic” is depicted, or encoding a mitochondrial transit peptide, especially in case in column 6 of Table I, application no. 1, in the same line as of the respective nucleic acid molecule according to 1) “mitochondrial” is depicted, which are operable linked.

[2287] In another embodiment of said transgenic non-human organism said vector does not comprise beneath said nucleic acid molecule according to 1 (a), (b), (c), (d), (e), (f), (g), (h), (i), (j) or (k), a nucleic acid molecule encoding a transit peptide in case in column 6 of Table I, application no. 1, in the same line as of the respective nucleic acid molecule according to 1) “non-targeted” is depicted, which are operable linked.

[2288] In another embodiment of said transgenic non-human organism said vector comprises beneath said nucleic acid molecule according to 1 (a), (b), (c), (d), (e), (f), (g), (h), (i), (j) or (k), and a promoter, prefereably a promoter selected from the group consisting of Big35S, PCUbi, Super and USP; a nucleic acid molecule encoding a transit peptide, preferably encoding a plastidal transit peptide, especially in case in column 6 of Table I, application no. 1, in the same line as of the respective nucleic acid molecule according to 1) “plastidic” is depicted, or encoding a mitochondrial transit peptide, especially in case in column 6 of Table I, application no. 1, in the same line as of the respective nucleic acid molecule according to 1) “mitochondrial” is depicted, which are operable linked.

[2289] In another embodiment of said transgenic non-human organism said vector does not comprise beneath said nucleic acid molecule according to 1 (a), (b), (c), (d), (e), (f), (g), (h), (i), (j) or (k), and a promoter, prefereably a promoter selected from the group consisting of Big35S, PCUbi, Super and USP; a nucleic acid molecule encoding a transit peptide, especially in case in column 6 of Table I, application no. 1, in the same line as of the respective nucleic acid molecule according to 1) “non-targeted” is depicted, which are operable linked.

[2290] In another embodiment of said transgenic non-human organism said vector comprises beneath said nucleic acid molecule according to 1 (a), (b), (c), (d), (e), (f), (g), (h), (i), (j) or (k), and a promoter, prefereably a promoter selected from the group consisting of Big35S, PCUbi, Super and USP; a nucleic acid molecule encoding a transit peptide, preferably encoding a plastidal transit peptide, especially in case in column 6 of Table I, application no. 1, in the same line as of the respective nucleic acid molecule according to 1) “plastidic” is depicted, or encoding a mitochondrial transit peptide, especially in case in column 6 of Table I, application no. 1, in the same line as of the respective nucleic acid molecule according to 1) “mitochondrial” is depicted, which are operable linked; and wherein said nucleic acid molecule according to 1 (a), (b), (c), (d), (e), (f), (g), (h), (i), (j) or (k) encodes a polypeptide which has the activity of the respective polypeptide represented by a protein comprising a polypeptide as depicted in the respective line in column 5 of Table II, application no. 1.

[2291] In another embodiment of said transgenic non-human organism said vector does not comprise beneath said nucleic acid molecule according to 1 (a), (b), (c), (d), (e), (f), (g), (h), (i), (j) or (k), and a promoter, prefereably a promoter selected from the group consisting of Big35S, PCUbi,

[2292] Super and USP; a nucleic acid molecule encoding a transit peptide, especially in case in column 6 of Table I, application no. 1, in the same line as of the respective nucleic acid molecule according to 1) “non-targeted” is depicted, which are operable linked; and wherein said nucleic acid molecule according to 1 (a), (b), (c), (d), (e), (f), (g), (h), (i), (j) or (k) encodes a polypeptide which has the activity of the respective polypeptide represented by a protein comprising a polypeptide as depicted in the respective line in column 5 of Table II, application no. 1.

[2293] In another embodiment of said transgenic non-human organism said vector comprises beneath said nucleic acid molecule according to 1 (a), (b), (c), (d), (e), (f), (g), (h), (i), (j) or (k), and a promoter, prefereably a promoter selected from the group consisting of Big35S, PCUbi, Super and USP; a nucleic acid molecule encoding a transit peptide, preferably encoding a plastidal transit peptide, especially in case in column 6 of Table I, application no. 1, in the same line as of the respective nucleic acid molecule according to 1) “plastidic” is depicted, or encoding a mitochondrial transit peptide, especially in case in column 6 of Table I, application no. 1, in the same line as of the respective nucleic acid molecule according to 1) “mitochondrial” is depicted, which are operable linked; and wherein said nucleic acid molecule according to 1 (a), (b), (c), (d), (e), (f), (g), (h), (i), (j) or (k) confers a generation or an increase of the respective fine chemical in a non-human organism or a part thereof as compared to a corresponding wild-type non-human organism or part thereof.

[2294] In another embodiment of said transgenic non-human organism said vector does not comprise beneath said nucleic acid molecule according to 1 (a), (b), (c), (d), (e), (f), (g), (h), (i), (j) or (k), and a promoter, prefereably a promoter selected from the group consisting of Big35S, PCUbi, Super and USP; a nucleic acid molecule encoding a transit peptide, especially in case in column 6 of Table I, application no. 1, in the same line as of the respective nucleic acid molecule according to 1) “non-targeted” is depicted, which are operable linked; and wherein said nucleic acid molecule according to 1 (a), (b), (c), (d), (e), (f), (g), (h), (i), (j) or (k) confers a generation or an increase of the respective fine chemical in a non-human organism or a part thereof as compared to a corresponding wild-type non-human organism or part thereof.

[2295] In another embodiment of said transgenic non-human organism said vector comprises beneath said nucleic acid molecule according to 1 (a), (b), (c), (d), (e), (f), (g), (h), (i), (j) or (k), and a promoter, prefereably a promoter selected from the group consisting of Big35S, PCUbi, Super and USP; a nucleic acid molecule encoding a transit peptide, preferably encoding a plastidal transit peptide, especially in case in column 6 of Table I, application no. 1, in the same line as of the respective nucleic acid molecule according to 1) “plastidic” is depicted, or encoding a mitochondrial transit peptide, especially in case in column 6 of Table I, application no. 1, in the same line as of the respective nucleic acid molecule according to 1) “mitochondrial” is depicted, which are operable linked; and wherein said nucleic acid molecule according to 1 (a), (b), (c), (d), (e), (f), (g), (h), (i), (j) or (k) encodes a polypeptide which has the activity of the respective polypeptide represented by a protein as depicted in the respective line in column 5 of Table II application no. 1 and confers a generation or an increase of the respective fine chemical in a non-human organism or a part thereof as compared to a corresponding wild-type non-human organism or part thereof.

[2296] In another embodiment of said transgenic non-human organism said vector does not comprise beneath said nucleic acid molecule according to 1 (a), (b), (c), (d), (e), (f), (g), (h), (i), (j) or (k), and a promoter, prefereably a promoter selected from the group consisting of Big35S, PCUbi, Super and USP; a nucleic acid molecule encoding a transit peptide, especially in case in column 6 of Table I, application no. 1, in the same line as of the respective nucleic acid molecule according to 1) “non-targeted” is depicted, which are operable linked; and wherein said nucleic acid molecule according to 1 (a), (b), (c), (d), (e), (f), (g), (h), (i), (j) or (k) encodes a polypeptide which has the activity of the respective polypeptide represented by a protein as depicted in the respective line in column 5 of Table II application no. 1 (in the same line) and confers a generation or an increase of the respective fine chemical in a non-human organism or a part thereof as compared to a corresponding wild-type non-human organism or part thereof.

[2297] In a prefered embodiment of said transgenic non-human organism said nucleic acid molecule according to 1 (a), (b), (c), (d), (e), (f), (g), (h), (i), (j) or (k), said promoter and optionally said nucleic acid molecule encoding a transit peptide are encompassed in an expression cassette in said vector. Accordingly an embodiment the invention provides a non-human organism comprising or being transformed by a vector comprising an expression casssette comprising said nucleic acid molecule according to 1 (a), (b), (c), (d), (e), (f), (g), (h), (i), (j) or (k), said promoter and optionally said a nucleic acid molecule encoding a transit peptide, operable linked. Said expression cassette may encompass a terminator, too.

[2298] In a further embodiment the invention relates to a transgenic non-human organisms such as transgenic microorganism or transgenic plant comprising a nucleic acid molecule comprising
[2299] [1) a nucleic acid molecule selected from the group consisting of
   [2300] (a) a nucleic acid molecule encoding a polypeptide shown in Table II, application no. 1, column 5 or 8, preferably shown in Table II A, application no. 1, column 5, or in Table IIA, application no. 1, column 8, or in Table II B, application no. 1, column 8, or a homolog or a fragment thereof;
   [2301] (b) a nucleic acid molecule shown in Table I, application no. 1, column 5 or 8, preferably shown in Table I A, application no. 1, column 5, or in Table I A, application no. 1, column 8, or in Table I B, application no. 1, column 8, preferably the coding region thereof, or a homolog or a fragment thereof;
   [2302] (c) a nucleic acid molecule, which, as a result of the degeneracy of the genetic code, can be derived from a polypeptide sequence depicted in column 5 or 8 of Table II, application no. 1, preferably shown in Table II A, application no. 1, column 5, or in Table II A, application no. 1, column 8, or in Table II B, application no. 1, column 8;
   [2303] (d) a nucleic acid molecule having at least 30% identity, preferably at least 40%, 50%, 60%, 70%, 75%, 80%, 85%, 90%, 95%, 96%, 97%, 98%, 99%, 99.5%, with the nucleic acid molecule sequence of a polynucleotide comprising the nucleic acid molecule shown in column 5 or 8 of Table I, application no. 1, preferably shown in Table I A, application no. 1, column 5, or in Table I A, application no. 1, column 8,or in Table I B, application no. 1, column 8, preferably the coding region thereof;
   [2304] (e) a nucleic acid molecule encoding a polypeptide having at least 30% identity, preferably at least 40%, 50% 60%, 70%, 75%, 80%, 85%, 90%, 95%, 96%, 97%, 98%, 99%, 99.5%, identity with the amino acid sequence of the polypeptide encoded by the nucleic acid molecule of (a), (b), (c) or (d);
   [2305] (f) a nucleic acid molecule which hybridizes with a nucleic acid molecule of (a), (b), (c), (d) or (e) under stringent hybridisation conditions;
   [2306] (g) a nucleic acid molecule encoding a polypeptide which can be isolated with the aid of monoclonal or polyclonal antibodies made against a polypeptide encoded by one of the nucleic acid molecules of (a), (b), (c), (d), (e) or (f);
   [2307] (h) a nucleic acid molecule encoding a polypeptide comprising the consensus sequence or one or more polypeptide motifs as shown in column 8 of Table IV, application no. 1;
   [2308] (i) a nucleic acid molecule encoding a polypeptide having the activity represented by a respective protein as depicted in column 5 of Table II, application no. 1;
   [2309] (j) a nucleic acid molecule comprising a polynucleotide which is obtained by amplifying a cDNA library or a genomic library using the primers in Table III, application no. 1, column 8;
   [2310] and
   [2311] (k) nucleic acid molecule which is obtainable by screening a suitable nucleic acid library, especially a cDNA library and/or a genomic library, under stringent hybridization conditions with a probe comprising one of the sequences of the nucleic acid molecule of (a), (b), (c), (d), (e), (f), (g), (h), (i) or (j) or with a fragment of at least 15 nt, preferably 20 nt, 30 nt, 50 nt, 100 nt, 200 nt,500 nt, 1000 nt, 1500 nt, 2000 nt or 3000 nt of the nucleic acid molecule characterized in (a), (b), (c), (d), (e), (f), (g), (h), (i) or (j);
   [2312] or a nucleic acid molecule comprising a sequence which is complementary thereto;
      and, if desired
[2313] 2) nucleic acid molecule encoding a transit peptide, preferably encoding a plastidal transit peptide or a mitochondrial transit peptide;
   which are operable linked;]
   or comprising an expression cassette comprising
[2314] [0) a promoter, prefereably a promoter selected from the group consisting of Big35S, PCUbi, Super and USP; and
[2315] 1) a nucleic acid molecule selected from the group consisting of
   [2316] (a) a nucleic acid molecule encoding a polypeptide shown in Table II, application no. 1, column 5 or 8, preferably shown in Table II A, application no. 1, column 5, or in Table II A, application no. 1, column 8, or in Table II B, application no. 1, column 8, or a homolog or a fragment thereof;
   [2317] (b) a nucleic acid molecule shown in Table I, application no. 1, column 5 or 8, preferably shown in Table I A, application no. 1, column 5, or in Table I A, application no. 1, column 8, or in Table I B, application no. 1, column 8, preferably the coding region thereof, or a homolog or a fragment thereof;
   [2318] (c) a nucleic acid molecule, which, as a result of the degeneracy of the genetic code, can be derived from a polypeptide sequence depicted in column 5 or 8 of Table II, application no. 1, preferably shown in Table II A, application no. 1, column 5, or in Table II A, application no. 1, column 8, or in Table II B, application no. 1, column 8;
   [2319] (d) a nucleic acid molecule having at least 30% identity, preferably at least 40%, 50%, 60%, 70%, 75%, 80%, 85%, 90%, 95%, 96%, 97%, 98%, 99%, 99.5%, with the nucleic acid molecule sequence of a polynucleotide comprising the nucleic acid molecule shown in column 5 or 8 of Table I, application no. 1, preferably shown in Table I A, application no. 1, column 5, or in Table I A, application no. 1, column 8,or in Table I B, application no. 1, column 8, preferably the coding region thereof;
   [2320] (e) a nucleic acid molecule encoding a polypeptide having at least 30% identity, preferably at least 40%, 50% 60%, 70%, 75%, 80%, 85%, 90%, 95%, 96%, 97%, 98%, 99%, 99.5%, identity with the amino acid sequence of the polypeptide encoded by the nucleic acid molecule of (a), (b), (c) or (d);
   [2321] (f) a nucleic acid molecule which hybridizes with a nucleic acid molecule of (a), (b), (c), (d) or (e) under stringent hybridisation conditions;
   [2322] (g) a nucleic acid molecule encoding a polypeptide which can be isolated with the aid of monoclonal or polyclonal antibodies made against a polypeptide encoded by one of the nucleic acid molecules of (a), (b), (c), (d), (e) or (f);
   [2323] (h) a nucleic acid molecule encoding a polypeptide comprising the consensus sequence or one or more polypeptide motifs as shown in column 8 of Table IV, application no. 1;
   [2324] (i) a nucleic acid molecule encoding a polypeptide having the activity represented by a respective protein as depicted in column 5 of Table II, application no. 1;
   [2325] (j) a nucleic acid molecule comprising a polynucleotide which is obtained by amplifying a cDNA library or a genomic library using the primers in Table III, application no. 1, column 8;
   [2326] and
   [2327] (k) nucleic acid molecule which is obtainable by screening a suitable nucleic acid library, especially a cDNA library and/or a genomic library, under stringent hybridization conditions with a probe comprising one of the sequences of the nucleic acid molecule of (a), (b), (c), (d), (e), (f), (g), (h), (i) or (j) or with a fragment of at least 15 nt, preferably 20 nt, 30 nt, 50 nt, 100 nt, 200 nt,500 nt, 1000 nt, 1500 nt, 2000 nt or 3000 nt of the nucleic acid molecule characterized in (a), (b), (c), (d), (e), (f), (g), (h), (i) or (j);
   [2328] or a nucleic acid molecule comprising a sequence which is complementary thereto;]
      and, if desired
[2329] 2) nucleic acid molecule encoding a transit peptide, preferably encoding a plastidal transit peptide or a mitochondrial transit peptide;
   which are operable linked;]
   or comprising or being transformed by a vector comprising
[2330] [1) a nucleic acid molecule selected from the group consisting of
   [2331] (a) a nucleic acid molecule encoding a polypeptide shown in Table II, application no. 1, column 5 or 8, preferably shown in Table II A, application no. 1, column 5, or in Table II A, application no. 1, column 8, or in Table II B, application no. 1, column 8, or a homolog or a fragment thereof;
   [2332] (b) a nucleic acid molecule shown in Table I, application no. 1, column 5 or 8, preferably shown in Table I A, application no. 1, column 5, or in Table I A, application no. 1, column 8, or in Table I B, application no. 1, column 8, preferably the coding region thereof, or a homolog or a fragment thereof;
   [2333] (c) a nucleic acid molecule, which, as a result of the degeneracy of the genetic code, can be derived from a polypeptide sequence depicted in column 5 or 8 of Table II, application no. 1, preferably shown in Table II A, application no. 1, column 5, or in Table II A, application no. 1, column 8, or in Table II B, application no. 1, column 8;
   [2334] (d) a nucleic acid molecule having at least 30% identity, preferably at least 40%, 50%, 60%, 70%, 75%, 80%, 85%, 90%, 95%, 96%, 97%, 98%, 99%, 99.5%, with the nucleic acid molecule sequence of a polynucleotide comprising the nucleic acid molecule shown in column 5 or 8 of Table I, application no. 1, preferably shown in Table I A, application no. 1, column 5, or in Table I A, application no. 1, column 8,or in Table I B, application no. 1, column 8, preferably the coding region thereof;
   [2335] (e) a nucleic acid molecule encoding a polypeptide having at least 30% identity, preferably at least 40%, 50% 60%, 70%, 75%, 80%, 85%, 90%, 95%, 96%, 97%, 98%, 99%, 99.5%, identity with the amino acid sequence of the polypeptide encoded by the nucleic acid molecule of (a), (b), (c) or (d);
   [2336] (f) a nucleic acid molecule which hybridizes with a nucleic acid molecule of (a), (b), (c), (d) or (e) under stringent hybridisation conditions;
   [2337] (g) a nucleic acid molecule encoding a polypeptide which can be isolated with the aid of monoclonal or polyclonal antibodies made against a polypeptide encoded by one of the nucleic acid molecules of (a), (b), (c), (d), (e) or (f);
   [2338] (h) a nucleic acid molecule encoding a polypeptide comprising the consensus sequence or one or more polypeptide motifs as shown in column 8 of Table IV, application no. 1;
   [2339] (i) a nucleic acid molecule encoding a polypeptide having the activity represented by a respective protein as depicted in column 5 of Table II, application no. 1;
   [2340] (j) a nucleic acid molecule comprising a polynucleotide which is obtained by amplifying a cDNA library or a genomic library using the primers in Table III, application no. 1, column 8;
   [2341] and
   [2342] (k) nucleic acid molecule which is obtainable by screening a suitable nucleic acid library, especially a cDNA library and/or a genomic library, under stringent hybridization conditions with a probe comprising one of the sequences of the nucleic acid molecule of (a), (b), (c), (d), (e), (f), (g), (h), (i) or (j) or with a fragment of at least 15 nt, preferably 20 nt, 30 nt, 50 nt, 100 nt, 200 nt,500 nt, 1000 nt, 1500 nt, 2000 nt or 3000 nt of the nucleic acid molecule characterized in (a), (b), (c), (d), (e), (f), (g), (h), (i) or (j);
   [2343] or a nucleic acid molecule comprising a sequence which is complementary thereto;]
      whereby, preferably, the nucleic acid molecule according to 1 (a), (b), (c), (d), (e), (f), (g), (h), (i), (j) or (k) distinguishes over the sequence depicted in Table I A and/or I B, application no. 1, column 5 or 8, or the coding regions thereof, by one or more nucleotides (especially but not exceeding 5%, preferably 4%, 3%, 2%, 1%, 0.5%, 0.2% or 0.1%). In an embodiment, the nucleic acid molecule of the invention does not consist of the sequence shown in Table I A and/or I B, application no. 1, column 5 or 8, or the coding region thereof. In another embodiment, the nucleic acid molecule of the present invention, preferably the coding region thereof, is at least 30%, 40%, 50%, 60%, 70%, 80%, 90%, 95% identical but less than 100%, 99.999%, 99.99%, 99.9%, 99%, 98%, 97%, 96% or 95% identical to the sequence shown in Table I A and/or I B, application no. 1, column 5 or 8, or the coding region thereof, respectively. In a further embodiment the nucleic acid molecule does not encode the polypeptide sequence shown in Table II A and/or II B, application no. 1, column 5 or 8 but homologs thereof. Accordingly, in one embodiment, the nucleic acid molecule of the present invention encodes in one embodiment a polypeptide which differs at least in one or more amino acids (especially but not exceeding 5%, preferably 4%, 3%, 2%, 1%, 0.5%, 0.2% or 0.1%) from the polypeptide shown in Table II, application no. 1, column 5 or 8 and does not encode a protein of the sequence shown in Table II A and/or II B, application no. 1, column 5 or 8. Accordingly, in one embodiment, the protein encoded by a sequence of a nucleic acid according to 1 (a), (b), (c), (d), (e), (f), (g), (h), (i), (j) or (k) does not consist of the sequence shown in Table I A and/or I B, application no. 1, column 5 or 8, or the coding region thereof. In a further embodiment, the protein of the present invention is at least 30%, 40%, 50%, 60%, 70%, 80%, 90%, 95% identical to protein sequence depicted in Table II A and/or II B, application no. 1, column 5 or 8 but less than 100%, preferably less than 99.999%, 99.99%, 99.9%, 99%, 98%, 97%, 96% or 95% identical to the sequence shown in Table II A and/or II B, application no. 1, column 5 or 8;
      as well as respective transgenic cells, tissue, parts of such non-human organism, e.g. plant cells, plant tissue, part of plants, like leaves, roots, stems, blossoms, seeds, fruits, pollen and the like.
      (All the references to Tables I to IV are references to the corresponding lines of Tables I to IV.)

[2344] In a preferred embodiment of said transgenic non-human organism said nucleic acid molecule according to 1 (a), (b), (c), (d), (e), (f), (g), (h), (i), (j) or (k) encodes a polypeptide which has the activity of the respective polypeptide represented by a protein comprising a polypeptide as depicted in the respective line in column 5 of Table II, application no. 1.

[2345] In another preferred embodiment of said transgenic non-human organism said nucleic acid molecule according to 1 (a), (b), (c), (d), (e), (f), (g), (h), (i), (j) or (k) confers a generation or an increase of the respective fine chemical in a non-human organism or a part thereof as compared to a corresponding wild-type non-human organism or part thereof.

[2346] In another preferred embodiment of said transgenic non-human organism said nucleic acid molecule according to 1 (a), (b), (c), (d), (e), (f), (g), (h), (i), (j) or (k) encodes a polypeptide which has the activity of the respective polypeptide represented by a protein as depicted in the respective line in column 5 of Table II application no. 1 and confers a generation or an increase of the respective fine chemical in a non-human organism or a part thereof as compared to a corresponding wild-type non-human organism or part thereof.

[2347] In another embodiment of said transgenic non-human organism the expression cassette comprises 2) a nucleic acid molecule encoding a transit peptide, preferably encoding a plastidal transit peptide, especially in case in column 6 of Table I, application no. 1, in the same line as of the respective nucleic acid molecule according to 1) “plastidic” is depicted, or encoding a mitochondrial transit peptide, especially in case in column 6 of Table I, application no. 1, in the same line as of the respective nucleic acid molecule according to 1) “mitochondrial” is depicted.

[2348] In another embodiment thereof the expression cassette does not comprise 2) a nucleic acid molecule encoding a transit peptide, especially in case in column 6 of Table I, application no. 1, in the same line as of the respective nucleic acid molecule according to 1) “non-targeted” is depicted.

[2349] In another embodiment of said transgenic non-human organism said vector comprises beneath said nucleic acid molecule according to 1 (a), (b), (c), (d), (e), (f), (g), (h), (i), (j) or (k), a promoter, prefereably a promoter selected from the group consisting of Big35S, PCUbi, Super and USP, which are operable linked.

[2350] In a preferred embodiment of said transgenic non-human organism said vector comprises beneath said nucleic acid molecule according to 1 (a), (b), (c), (d), (e), (f), (g), (h), (i), (j) or (k), a promoter, prefereably a promoter selected from the group consisting of Big35S, PCUbi, Super and USP, which are operable linked; and said nucleic acid molecule according to 1 (a), (b), (c), (d), (e), (f), (g), (h), (i), (j) or (k) encodes a polypeptide which has the activity of the respective polypeptide represented by a protein comprising a polypeptide as depicted in the respective line in column 5 of Table II, application no. 1.

[2351] In another preferred embodiment of said transgenic non-human organism said vector comprises beneath said nucleic acid molecule according to 1 (a), (b), (c), (d), (e), (f), (g), (h), (i), (j) or (k), a promoter, prefereably a promoter selected from the group consisting of Big35S, PCUbi, Super and USP, which are operable linked; and said nucleic acid molecule according to 1 (a), (b), (c), (d), (e), (f), (g), (h), (i), (j) or (k) confers a generation or an increase of the respective fine chemical in a non-human organism or a part thereof as compared to a corresponding wild-type non-human organism or part thereof.

[2352] In another preferred embodiment of said transgenic non-human organism said vector comprises beneath said nucleic acid molecule according to 1 (a), (b), (c), (d), (e), (f), (g), (h), (i), (j) or (k), a promoter, prefereably a promoter selected from the group consisting of Big35S, PCUbi, Super and USP, which are operable linked; and said nucleic acid molecule according to 1 (a), (b), (c), (d), (e), (f), (g), (h), (i), (j) or (k) encodes a polypeptide which has the activity of the respective polypeptide represented by a protein as depicted in the same line in column 5 of Table II, application no. 1, and confers a generation or an increase of the respective fine chemical in a non-human organism or a part thereof as compared to a corresponding wild-type non-human organism or part thereof.

[2353] In another embodiment of said transgenic non-human organism said vector comprises beneath said nucleic acid molecule according to 1 (a), (b), (c), (d), (e), (f), (g), (h), (i), (j) or (k), a nucleic acid molecule encoding a transit peptide, preferably encoding a plastidal transit peptide, especially in case in column 6 of Table I, application no. 1, in the same line as of the respective nucleic acid molecule according to 1) “plastidic” is depicted, or encoding a mitochondrial transit peptide, especially in case in column 6 of Table I, application no. 1, in the same line as of the respective nucleic acid molecule according to 1) “mitochondrial” is depicted, which are operable linked.

[2354] In another embodiment of said transgenic non-human organism said vector does not comprise beneath said nucleic acid molecule according to 1 (a), (b), (c), (d), (e), (f), (g), (h), (i), (j) or (k), a nucleic acid molecule encoding a transit peptide in case in column 6 of Table I, application no. 1, in the same line as of the respective nucleic acid molecule according to 1) “non-targeted” is depicted, which are operable linked.

[2355] In another embodiment of said transgenic non-human organism said vector comprises beneath said nucleic acid molecule according to 1 (a), (b), (c), (d), (e), (f), (g), (h), (i), (j) or (k), and a promoter, prefereably a promoter selected from the group consisting of Big35S, PCUbi, Super and USP; a nucleic acid molecule encoding a transit peptide, preferably encoding a plastidal transit peptide, especially in case in column 6 of Table I, application no. 1, in the same line as of the respective nucleic acid molecule according to 1) “plastidic” is depicted, or encoding a mitochondrial transit peptide, especially in case in column 6 of Table I, application no. 1, in the same line as of the respective nucleic acid molecule according to 1) “mitochondrial” is depicted, which are operable linked.

[2356] In another embodiment of said transgenic non-human organism said vector does not comprise beneath said nucleic acid molecule according to 1 (a), (b), (c), (d), (e), (f), (g), (h), (i), (j) or (k), and a promoter, prefereably a promoter selected from the group consisting of Big35S, PCUbi, Super and USP; a nucleic acid molecule encoding a transit peptide, especially in case in column 6 of Table I, application no. 1, in the same line as of the respective nucleic acid molecule according to 1) “non-targeted” is depicted, which are operable linked.

[2357] In another embodiment of said transgenic non-human organism said vector comprises beneath said nucleic acid molecule according to 1 (a), (b), (c), (d), (e), (f), (g), (h), (i), (j) or (k), and a promoter, prefereably a promoter selected from the group consisting of Big35S, PCUbi, Super and USP; a nucleic acid molecule encoding a transit peptide, preferably encoding a plastidal transit peptide, especially in case in column 6 of Table I, application no. 1, in the same line as of the respective nucleic acid molecule according to 1) “plastidic” is depicted, or encoding a mitochondrial transit peptide, especially in case in column 6 of Table I, application no. 1, in the same line as of the respective nucleic acid molecule according to 1) “mitochondrial” is depicted, which are operable linked; and wherein said nucleic acid molecule according to 1 (a), (b), (c), (d), (e), (f), (g), (h), (i), (j) or (k) encodes a polypeptide which has the activity of the respective polypeptide represented by a protein comprising a polypeptide as depicted in the respective line in column 5 of Table II, application no. 1.

[2358] In another embodiment of said transgenic non-human organism said vector does not comprise beneath said nucleic acid molecule according to 1 (a), (b), (c), (d), (e), (f), (g), (h), (i), (j) or (k), and a promoter, prefereably a promoter selected from the group consisting of Big35S, PCUbi, Super and USP; a nucleic acid molecule encoding a transit peptide, especially in case in column 6 of Table I, application no. 1, in the same line as of the respective nucleic acid molecule according to 1) “non-targeted” is depicted, which are operable linked; and wherein said nucleic acid molecule according to 1 (a), (b), (c), (d), (e), (f), (g), (h), (i), (j) or (k) encodes a polypeptide which has the activity of the respective polypeptide represented by a protein comprising a polypeptide as depicted in the respective line in column 5 of Table II, application no. 1.

[2359] In another embodiment of said transgenic non-human organism said vector comprises beneath said nucleic acid molecule according to 1 (a), (b), (c), (d), (e), (f), (g), (h), (i), (j) or (k), and a promoter, prefereably a promoter selected from the group consisting of Big35S, PCUbi, Super and USP; a nucleic acid molecule encoding a transit peptide, preferably encoding a plastidal transit peptide, especially in case in column 6 of Table I, application no. 1, in the same line as of the respective nucleic acid molecule according to 1) “plastidic” is depicted, or encoding a mitochondrial transit peptide, especially in case in column 6 of Table I, application no. 1, in the same line as of the respective nucleic acid molecule according to 1) “mitochondrial” is depicted, which are operable linked; and wherein said nucleic acid molecule according to 1 (a), (b), (c), (d), (e), (f), (g), (h), (i), (j) or (k) confers a generation or an increase of the respective fine chemical in a non-human organism or a part thereof as compared to a corresponding wild-type non-human organism or part thereof.

[2360] In another embodiment of said transgenic non-human organism said vector does not comprise beneath said nucleic acid molecule according to 1 (a), (b), (c), (d), (e), (f), (g), (h), (i), (j) or (k), and a promoter, prefereably a promoter selected from the group consisting of Big35S, PCUbi, Super and USP; a nucleic acid molecule encoding a transit peptide, especially in case in column 6 of Table I, application no. 1, in the same line as of the respective nucleic acid molecule according to 1) “non-targeted” is depicted, which are operable linked; and wherein said nucleic acid molecule according to 1 (a), (b), (c), (d), (e), (f), (g), (h), (i), (j) or (k) confers a generation or an increase of the respective fine chemical in a non-human organism or a part thereof as compared to a corresponding wild-type non-human organism or part thereof.

[2361] In another embodiment of said transgenic non-human organism said vector comprises beneath said nucleic acid molecule according to 1 (a), (b), (c), (d), (e), (f), (g), (h), (i), (j) or (k), and a promoter, prefereably a promoter selected from the group consisting of Big35S, PCUbi, Super and USP; a nucleic acid molecule encoding a transit peptide, preferably encoding a plastidal transit peptide, especially in case in column 6 of Table I, application no. 1, in the same line as of the respective nucleic acid molecule according to 1) “plastidic” is depicted, or encoding a mitochondrial transit peptide, especially in case in column 6 of Table I, application no. 1, in the same line as of the respective nucleic acid molecule according to 1) “mitochondrial” is depicted, which are operable linked; and wherein said nucleic acid molecule according to 1 (a), (b), (c), (d), (e), (f), (g), (h), (i), (j) or (k) encodes a polypeptide which has the activity of the respective polypeptide represented by a protein as depicted in the respective line in column 5 of Table II application no. 1 and confers a generation or an increase of the respective fine chemical in a non-human organism or a part thereof as compared to a corresponding wild-type non-human organism or part thereof.

[2362] In another embodiment of said transgenic non-human organism said vector does not comprise beneath said nucleic acid molecule according to 1 (a), (b), (c), (d), (e), (f), (g), (h), (i), (j) or (k), and a promoter, prefereably a promoter selected from the group consisting of Big35S, PCUbi, Super and USP; a nucleic acid molecule encoding a transit peptide, especially in case in column 6 of Table I, application no. 1, in the same line as of the respective nucleic acid molecule according to 1) “non-targeted” is depicted, which are operable linked; and wherein said nucleic acid molecule according to 1 (a), (b), (c), (d), (e), (f), (g), (h), (i), (j) or (k) encodes a polypeptide which has the activity of the respective polypeptide represented by a protein as depicted in the respective line in column 5 of Table II application no. 1 and confers a generation or an increase of the respective fine chemical in a non-human organism or a part thereof as compared to a corresponding wild-type non-human organism or part thereof.

[2363] In a prefered embodiment of said transgenic non-human organism said nucleic acid molecule according to 1 (a), (b), (c), (d), (e), (f), (g), (h), (i), (j) or (k), said promoter and optionally said nucleic acid molecule encoding a transit peptide are encompassed in an expression cassette in said vector. Accordingly an embodiment the invention provides a non-human organism comprising or being transformed by a vector comprising an expression casssette comprising said nucleic acid molecule according to 1 (a), (b), (c), (d), (e), (f), (g), (h), (i), (j) or (k), said promoter and optionally said a nucleic acid molecule encoding a transit peptide, operable linked. Said expression cassette may encompass a terminator, too.

[2364] In an embodiment thereof the transgenic non-human organism is a microorganism selected from the group consisting of Charophyceae such as the genera Chara, Nitella e.g. the species Chara globularis, Chara vulgaris, Nitella flexilis, Chlorophyceae such as the genera Acrosiphonia, Spongomorpha, Urospora, Bryopsis, Pseudobryopsis, Trichosolen, Dichotomosiphon, Caulerpa, Rhipilia, Blastophysa, Avrainvillea, Chlorodesmis, Codium, Espera, Halicystis, Halimeda, Penicillus, Pseudocodium, Rhipiliopsis, Rhipocephalus, Tydemania, Udotea, Derbesia, Acrochaete, Aphanochaete, Bolbocoleon, Chaetobolus, Chaetonema, Chaetophora, Chlorotylium, Desmococcus, Draparnaldia, Draparnaldiopsis, Ectochaete, Endophyton, Entocladia, Epicladia, Internoretia, Microthamnion, Ochlochaete, Phaeophila, Pilinella, Pringsheimiella, Protoderma, Pseudendoclonium, Pseudodictyon, Pseudopringsheimia, Pseudulvella, Schizomeris, Stigeoclonium, Thamniochaete, Ulvella, Pilinia, Tellamia, Helicodictyon, Actidesmium, Ankyra, Characium, Codiolum, Sykidion, Keratococcus, Prototheca, Bracteacoccus Chlorococcum, Excentrosphaera, Hormidium, Oophila, Schroederia, Tetraedron, Trebouxia Chlorosarcinopsis, Gomphonitzschia, Coccomyxa, Dactylothece, Diógenes, Disporá, Gloeocystis, Mycanthococcus, Ourococcus, Coelastrum, Dicranochaete, Botryococcus, Dictyosphaerium, Dimorphococcus, Chlorochytrium, Kentrosphaera, Phyllobium, Gomontia, Hormotila, Euastropsis, Hydrodictyon, Pectodictyon, Pediastrum, Sorastrum, Tetrapedia, Acanthosphaera, Echinosphaerella, Echinosphaeridium, Errerella, Gloeoactinium, Golenkeniopsis Golenkinia, Micractinium, Ankistrodesmus, Chlorella, Chodatella, Closteriopsis, Cryocystis, Dactylococcus, Dematractum, Eremosphaera, Eutetramorus, Franceia, Glaucocystis, Gloeotaenium, Kirchneriella, Lagerheimiella, Monoraphidium, Nannochloris, Nephrochlamys, Nephrocytium, Oocystis, Oonephris, Pachycladon, Palmellococcus, Planktosphaeria, Polyedriopsis, Pseudoraciborskia, Quadrigula, Radiococcus, Rochiscia, Scotiella, Selanastrum, Thorakochloris, Treubaria, Trochiscia, Westella, Zoochlorella, Ostreobium, Phyllosiphon, Protosiphon, Rhodochytrium, Actinastrum, Coronastrum, Crucigenia, Dictymocystis, Enallax, Scenedesmus, Selenastrum, Tetradesmus, Tetrallantos, Tetrastrum, Chlorosarcina, Anadyomene, Valoniopsis, Ventricaria, Basicladia, Chaetomorpha, Cladophora, LolaPithophoraRhizoclonium Chaetosphaeridium, Conochaete, Coleochaete, Oligochaetophora, Polychaetophora, Cylindrocapsa, Gongrosira, Protococcus, Acetabularia, Batophora, Bornetella, Dasycladus, Halicoryne, Neomeris, Elakatothrix, Raphidonema, Microspora, Bulbochaete, Oedocladium, Oedogonium, Prasiola, Rosenvingiella, Schizogonium, Apjohnia, Chamaedoris, Cladophoropsis, Siphonocladus, Spongocladia, Boergesenia, Boodlea, Cystodictyon, Dictyosphaeria, Ernodesmis, Microdictyon, Struvea, Valonia, Sphaeroplea, Malleochloris, Stylosphaeridium, Gloeococcus, Palmella, Palmodictyon, Palmophyllum, Pseudospherocystis, Sphaerocystis, Urococcus, Apiocystis, Chaetopeltis, Gemellicystis, Paulschulzia, Phacomyxa, Pseudotetraspora, Schizochlamys, Tetraspora, Cephaleuros, Ctenocladus, Epibolium, Leptosira, Trentepohlia, Diplochaete, Monostroma, Binuclearia, Geminella, Klebsormidium, Planetonema, Radiofilum, Stichococcus, Ulothrix, Uronema, Blidingia, Capsosiphon, Chloropelta, Enteromorpha, Percursaria, Ulva, UIvaria, Brachiomonas, Carteria, Chlainomonas, Chlamydomonas, Chlamydonephris, Chlorangium, Chlorogonium, Cyanidium, Fortiella, Glenomonas, Gloeomonas, Hyalogonium, Lobomonas Polytoma, Pyramichlamys, Scourfieldia, Smithsonimonas, Sphaerellopsis, Sphenochloris, Spirogonium, Collodictyon, Dunaliella, Haematococcus, Stephanosphaera, Coccomonas, Dysmorphococcus, Phacotus, Pteromonas, Thoracomonas, Wislouchiella, Mascherina, Pyrobotrys, Spondylomorum, Eudorina, Gonium, Oltmannsiella, Pandorina, Platydorina, Pleodorina, Stephanoon, Volvox, Volvulina, Actinotaenium, Arthrodesmus, Bambusina Closterium, Cosmarium, Desmidium, Euastrum, Groenbladia, Hyalotheca, Micrasterias, Penium, Phymatodocis, Pleurotaenium, Sphaerozosma, Spinoclosterium, Spinocosmarium, Spondylosium, Staurastrum, Tetmemorus, Triploceras, Xanthidium, Cylindrocystis, Genicularia, Gonatozygon, Mesotaenium, Netrium, Roya, Spirotaenia, Cosmocladium, Debarya, Docidium, Euastridium, Hallasia, Mougeotia, Mougeotiopsis, Sirogonium, Spirogyra, Staurodesmus, Teilingia, Zygnema, Zygogonium, e.g. the species Caulerpa taxifolia, Prototheca wickerhamii, Ankistrodesmus falcatus, Chlorella ellipsoidea, Chlorella pyrenoidosa, Clorella sorokiniana, Chlorella vulgaris, Scenedesmus obliquus, Scenedesmus quadricauda, Selenastrum capricornutum, Selenastrum undecimnotata, Cladophora glomerata, Chlamydomonas eugametos, Chlamydomonas reinhardtii, Cyanidium caldarium, Dunaliella salina, Dunaliella tertiolecta, Euglena gracilis, Haematococcus pluvialis, Coniugatophyceae, Prasinophyceae Trebouxiophyceae, Ulvophyceae, Chlorodendraceae, Pedinomonadales, Halosphaeraceae, Pterospermataceae, Monomastigaceae, Pyramimonadaceae, Chlorodendraceae such as the genera Prasinocladus e.g. the species Prasinocladus ascus, Halosphaeraceae, Pedinomonadales, Pedinomonadaceae such as the genera Pedinomonas, Pterospermataceae such as the genera Pachysphaera, Pterosperma, Halosphaera, Pyramimonas, Bacillariophyceae, Chrysophyceae, Craspedophyceae, Euglenophyceae, Prymnesiophyceae, Phaeophyceae, Dinophyceae, Rhodophyceae, Xanthophyceae, Prasinophyceae such as the generaNephroselmis, Prasinococcus, Scherffelia, Tetraselmis, Mantoniella, Ostreococcus e.g. the species Nephroselmis olivacea, Prasinococcus capsulatus, Scherffelia dubia, Tetraselmis chui, Tetraselmis suecica, Mantoniella squamata or Ostreococcus tauri.

[2365] In an embodiment thereof the transgenic non-human organism is a plant (or a part thereof), preferably a monocotyledonous or a dicotyledonous plant. Preferably the plant is selected from the group consisting of Anacardiaceae such as the genera Pistacia, Mangifera, Anacardium e.g. the species Pistacia vera [pistachios, Pistazie], Mangifer indica [Mango] or Anacardium occidentale [Cashew]; Asteraceae such as the genera Calendula, Carthamus, Centaurea, Cichorium, Cynara, Helianthus, Lactuca, Locusta, Tagetes, Valeriana e.g. the species Calendula officinalis [Marigold], Carthamus tinctorius [safflower], Centaurea cyanus [cornflower], Cichorium intybus [blue daisy], Cynara scolymus [Artichoke], Helianthus annus [sunflower], Lactuca sativa, Lactuca crispa, Lactuca esculenta, Lactuca scariola L. ssp. sativa, Lactuca scariola L. var. integrate, Lactuca scariola L. var. integrifolia, Lactuca sativa subsp. romana, Locusta communis, Valeriana locusta [lettuce], Tagetes lucida, Tagetes erecta or Tagetes tenuifolia [Marigold]; Apiaceae such as the genera Daucus e.g. the species Daucus carota [carrot]; Betulaceae such as the genera Corylus e.g. the species Corylus avellana or Corylus colurna [hazelnut]; Boraginaceae such as the genera Borago e.g. the species Borago officinalis [borage]; Brassicaceae such as the genera Brassica, Melanosinapis, Sinapis, Arabadopsis e.g. the species Brassica napus, Brassica rapa ssp. [canola, oilseed rape, turnip rape], Sinapis arvensis Brassica juncea, Brassica juncea var. juncea, Brassica juncea var. crispifolia, Brassica juncea var. foliosa, Brassica nigra, Brassica sinapioides, Melanosinapis communis [mustard], Brassica oleracea [fodder beet] or Arabidopsis thaliana; Bromeliaceae such as the genera Anana, Bromelia e.g. the species Anana comosus, Ananas ananas or Bromelia comosa [pineapple]; Caricaceae such as the genera Carica e.g. the species Carica papaya [papaya]; Cannabaceae such as the genera Cannabis e.g. the species Cannabis sative [hemp], Convolvulaceae such as the genera Ipomea, Convolvulus e.g. the species Ipomoea batatus, Ipomoea pandurata, Convolvulus batatas, Convolvulus tiliaceus, Ipomoea fastigiata, Ipomoea tiliacea, Ipomoea triloba or Convolvulus panduratus [sweet potato, Man of the Earth, wild potato], Chenopodiaceae such as the genera Beta, i.e. the species Beta vulgaris, Beta vulgaris var. altissima, Beta vulgaris var. Vulgaris, Beta maritima, Beta vulgaris var. perennis, Beta vulgaris var. conditiva or Beta vulgaris var. esculenta [sugar beet]; Cucurbitaceae such as the genera Cucubita e.g. the species Cucurbita maxima, Cucurbita mixta, Cucurbita pepo or Cucurbita moschata [pumpkin, squash]; Elaeagnaceae such as the genera Elaeagnus e.g. the species Olea europaea [olive]; Ericaceae such as the genera Kalmia e.g. the species Kalmia latifolia, Kalmia angustifolia, Kalmia microphylla, Kalmia polifolia, Kalmia occidentalis, Cistus chamaerhodendros or Kalmia lucida [American laurel, broad-leafed laurel, calico bush, spoon wood, sheep laurel, alpine laurel, bog laurel, western bog-laurel, swamp-laurel]; Euphorbiaceae such as the genera Manihot, Janipha, Jatropha, Ricinus e.g. the species Manihot utilissima, Janipha manihot, Jatropha manihot, Manihot aipil, Manihot dulcis, Manihot manihot, Manihot melanobasis, Manihot esculenta [manihot, arrowroot, tapioca, cassava] or Ricinus communis [castor bean, Castor Oil Bush, Castor Oil Plant, Palma Christi, Wonder Tree]; Fabaceae such as the genera Pisum, Albizia, Cathormion, Feuillea, Inga, Pithecolobium, Acacia, Mimosa, Medicajo, Glycine, Dolichos, Phaseolus, Soja e.g. the species Pisum sativum, Pisum arvense, Pisum humile [pea], Albizia berteriana, Albizia julibrissin, Albizia lebbeck, Acacia berteriana, Acacia littoralis, Albizia berteriana, Albizzia berteriana, Cathormion berteriana, Feuillea berteriana, Inga fragrans, Pithecellobium berterianum, Pithecellobium fragrans, Pithecolobium berterianum, Pseudalbizzia berteriana, Acacia julibrissin, Acacia nemu, Albizia nemu, Feuilleea julibrissin, Mimosa julibrissin, Mimosa speciosa, Sericanrda julibrissin, Acacia lebbeck, Acacia macrophylla, Albizia lebbek, Feuilleea lebbeck, Mimosa lebbeck, Mimosa speciosa [bastard logwood, silk tree, East Indian Walnut], Medicago sativa, Medicago falcata, Medicago varia [alfalfa], Glycine max [soybean], Dolichos soja, Glycine gracilis, Glycine hispida, Phaseolus max or Soja hispida; Geraniaceae such as the genera Pelargonium, Cocos, Oleum e.g. the species Cocos nucifera, Pelargonium grossularioides or Oleum cocois [coconut]; Gramineae such as the genera Saccharum e.g. the species Saccharum officinarum; Juglandaceae such as the genera Juglans, Wallia e.g. the species Juglans regia, Juglans ailanthifolia, Juglans sieboldiana, Juglans cinerea, Wallia cinerea, Juglans bixbyi, Juglans californica, Juglans hindsii, Juglans intermedia, Juglans jamaicensis, Juglans major, Juglans microcarpa, Juglans nigra or Wallia nigra [walnut, black walnut, common walnut, persian walnut, white walnut, butternut, black walnut]; Lauraceae such as the genera Persea, Laurus e.g. the species laurel Laurus nobilis [bay, laurel, bay laurel, sweet bay], Persea americana Persea americana, Persea gratissima or Persea persea [avocado]; Leguminosae such as the genera Arachis e.g. the species Arachis hypogaea [peanut]; Linaceae such as the genera Linum, Adenolinum e.g. the species Linum usitatissimum, Linum humile, Linum austriacum, Linum bienne, Linum angustifolium, Linum catharticum, Linum flavum, Linum grandiflorum, Adenolinum grandiflorum, Linum lewisii, Linum narbonense, Linum perenne, Linum perenne var. lewisii, Linum pratense or Linum trigynum [flax, linseed]; Lythrarieae such as the genera Punica e.g. the species Punica granatum [pomegranate]; Malvaceae such as the genera Gossypium e.g. the species Gossypium hirsutum, Gossypium arboreum, Gossypium barbadense, Gossypium herbaceum or Gossypium thurberi [cotton]; Musaceae such as the genera Musa e.g. the species Musa nana, Musa acuminata, Musa paradisiaca, Musa spp. [banana]; Onagraceae such as the genera Camissonia, Oenothera e.g. the species Oenothera biennis or Camissonia brevipes [primrose, evening primrose]; Palmae such as the genera Elacis e.g. the species Elaeis guineensis [oil plam]; Papaveraceae such as the genera Papaver e.g. the species Papaver orientale, Papaver rhoeas, Papaver dubium [poppy, oriental poppy, corn poppy, field poppy, shirley poppies, field poppy, long-headed poppy, long-pod poppy]; Pedaliaceae such as the genera Sesamum e.g. the species Sesamum indicum [sesame]; Piperaceae such as the genera Piper, Artanthe, Peperomia, Steffensia e.g. the species Piper aduncum, Piper amalago, Piper angustifolium, Piper auritum, Piper betel, Piper cubeba, Piper longum, Piper nigrum, Piper retrofractum, Artanthe adunca, Artanthe elongata, Peperomia elongata, Piper elongatum, Steffensia elongata. [Cayenne pepper, wild pepper]; Poaceae such as the genera Hordeum, Secale, Avena, Sorghum, Andropogon, Holcus, Panicum, Oryza, Zea, Triticum e.g. the species Hordeum vulgare, Hordeum jubatum, Hordeum murinum, Hordeum secalinum, Hordeum distichon Hordeum aegiceras, Hordeum hexastichon, Hordeum hexastichum, Hordeum irregulare, Hordeum sativum, Hordeum secalinum [barley, pearl barley, foxtail barley, wall barley, meadow barley], Secale cereale [rye], Avena sativa, Avena fatua, Avena byzantina, Avena fatua var. sativa, Avena hybrida [oat], Sorghum bicolor, Sorghum halepense, Sorghum saccharatum, Sorghum vulgare, Andropogon drummondii, Holcus bicolor, Holcus sorghum, Sorghum aethiopicum, Sorghum arundinaceum, Sorghum caffrorum, Sorghum cernuum, Sorghum dochna, Sorghum drummondii, Sorghum durra, Sorghum guineense, Sorghum lanceolatum, Sorghum nervosum, Sorghum saccharatum, Sorghum subglabrescens, Sorghum verticilliflorum, Sorghum vulgare, Holcus halepensis, Sorghum miliaceum millet, Panicum militaceum [Sorghum, millet], Oryza sativa, Oryza latifolia [rice], Zea mays [corn, maize] Triticum aestivum, Triticum durum, Triticum turgidum, Triticum hybernum, Triticum macha, Triticum sativum or Triticum vulgare [wheat, bread wheat, common wheat], Proteaceae such as the genera Macadamia e.g. the species Macadamia intergrifolia [macadamia]; Rubiaceae such as the genera Coffea e.g. the species Cofea spp., Coffea arabica, Coffea canephora or Coffea liberica [coffee]; Scrophulariaceae such as the genera Verbascum e.g. the species Verbascum blattaria, Verbascum chaixii, Verbascum densiflorum, Verbascum lagurus, Verbascum longifolium, Verbascum lychnitis, Verbascum nigrum, Verbascum olympicum, Verbascum phlomoides, Verbascum phoenicum, Verbascum pulverulentum or Verbascum thapsus [mullein, white moth mullein, nettle-leaved mullein, dense-flowered mullein, silver mullein, long-leaved mullein, white mullein, dark mullein, greek mullein, orange mullein, purple mullein, hoary mullein, great mullein]; Solanaceae such as the genera Capsicum, Nicotiana, Solanum, Lycopersicon e.g. the species Capsicum annuum, Capsicum annuum var. glabriusculum, Capsicum frutescens [pepper], Capsicum annuum [paprika], Nicotiana tabacum, Nicotiana alata, Nicotiana attenuata, Nicotiana glauca, Nicotiana langsdorffii, Nicotiana obtusifolia, Nicotiana quadrivalvis, Nicotiana repanda, Nicotiana rustica, Nicotiana sylvestris [tobacco], Solanum tuberosum [potato], Solanum melongena [egg-plant] (Lycopersicon esculentum, Lycopersicon lycopersicum, Lycopersicon pyriforme, Solanum integrifolium or Solanum lycopersicum [tomato]; Sterculiaceae such as the genera Theobroma e.g. the species Theobroma cacao [cacao]; Theaceae such as the genera Camellia e.g. the species Camellia sinensis) [tea]

[2366] Particular preference is given to transgenic crop plants such as by way of example barley, wheat, rye, oats, corn, soybean, rice, cotton, sugar beet, oilseed rape and canola, sunflower, flax, hemp, thistle, potatoes, tobacco, tomatoes, tapioca, cassava, arrowroot, alfalfa, lettuce and the various tree, nut and vine species; especial preference is given to monocotyledonous crop plants like corn, wheat or rice; in another embodiment special preference is given to dicotyledonous crop plants like soy bean, oil seed rape (including canola and winter oil seed rape), cotton.

[2367] The term “transgenic plants” used in accordance with the invention also refers to the progeny of a transgenic plant, for example the T1, T2, T3 and subsequent plant generations or the BC1, BC2, BC3 and subsequent plant generations. Thus, the transgenic plants according to the invention can be raised and selfed or crossed with other individuals in order to obtain further transgenic plants according to the invention. Transgenic plants may also be obtained by propagating transgenic plant cells vegetatively. The present invention also relates to transgenic plant material, which can be derived from a transgenic plant population according to the invention. Such material includes plant cells and certain tissues, organs and parts of plants in all their manifestations, such as seeds, leaves, anthers, fibers, tubers, roots, root hairs, stems, embryo, calli, cotelydons, petioles, harvested material, plant tissue, reproductive tissue, pollen, and cell cultures, which are derived from the actual transgenic plant and/or can be used for bringing about the transgenic plant. Any transformed plant obtained according to the invention can be used in a conventional breeding scheme or in in vitro plant propagation to produce more transformed plants with the same characteristics and/or can be used to introduce the same characteristic in other varieties of the same or related species. Such plants are also part of the invention. Seeds obtained from the transformed plants genetically also contain the same characteristic and are part of the invention. As mentioned before, the present invention is in principle applicable to any plant and crop that can be transformed with any of the transformation method known to those skilled in the art.

[2368] An “isolated” nucleic acid molecule is one that is substantially separated from other nucleic acid molecules, which are present in the natural source of the nucleic acid. That means other nucleic acid molecules are present in an amount less than 5% based on weight of the amount of the desired nucleic acid, preferably less than 2% by weight, more preferably less than 1% by weight, most preferably less than 0.5% by weight. Preferably, an “isolated” nucleic acid is free of some of the sequences that naturally flank the nucleic acid (i.e., sequences located at the 5′ and 3′ ends of the nucleic acid) in the genomic DNA of the non-human organism from which the nucleic acid is derived. For example, in various embodiments, the FCRP encoding nucleic acid molecule can contain less than about 5 kb, 4 kb, 3 kb, 2 kb, 1 kb, 0.5 kb or 0.1 kb of nucleotide sequences which naturally flank the nucleic acid molecule in genomic DNA of the cell from which the nucleic acid is derived. Moreover, an “isolated” nucleic acid molecule, such as a cDNA molecule, can be free from some of the other cellular material with which it is naturally associated, or culture medium when produced by recombinant techniques, or chemical precursors or other chemicals when chemically synthesized.

[2369] A nucleic acid molecule of the present invention, e.g., a nucleic acid molecule encoding a FCRP, especially the coding region thereof, or a portion thereof which confers the production or increased production of the fine chemical, can be isolated using standard molecular biological techniques and the sequence information provided herein. For example, an A. thaliana FCRP encoding cDNA can be isolated from a A. thaliana c-DNA library or a E. coli, Saccharomyces cerevisiae, Synechocystis sp., Brassica napus, Glycine max, Zea mays or Oryza sativa FCRP encoding cDNA can be isolated from a E. coli, Saccharomyces cerevisiae, Synechocystis sp., Brassica napus, Glycine max, Zea mays or Oryza sativa c-DNA library respectively using all or portion of one of the respective sequences. Moreover, a nucleic acid molecule encompassing all or a portion of one of the sequences of Table I can be isolated by the polymerase chain reaction using oligonucleotide primers designed based upon this sequence. For example, mRNA can be isolated from plant cells (e.g., by the guanidinium-thiocyanate extraction procedure of Chirgwin et al., Biochemistry 18, 5294 (1979)) and cDNA can be prepared using reverse transcriptase (e.g., Moloney MLV reverse transcriptase, available from Gibco/BRL, Bethesda, MD; or AMV reverse transcriptase, available from Seikagaku America, Inc., St. Petersburg, Fla.). Synthetic oligonucleotide primers for polymerase chain reaction amplification can be designed based upon one of the nucleotide sequences shown in Table I. A nucleic acid molecule of the invention can be amplified using cDNA or, alternatively, genomic DNA, as a template and appropriate oligonucleotide primers according to standard PCR amplification techniques. The nucleic acid molecule so amplified can be cloned into an appropriate vector and characterized by DNA sequence analysis. Furthermore, oligonucleotides corresponding to a FCRP encoding nucleotide sequence can be prepared by standard synthetic techniques, e.g., using an automated DNA synthesizer.

[2370] In an embodiment, an isolated nucleic acid molecule of the invention comprises one of the nucleic acid molecules as shown in Table I, especially the coding region thereof, and if desired, as well as a 5′ untranslated sequence and 3′ untranslated sequence.

[2371] Moreover, the nucleic acid molecule of the invention can comprise only a portion of the coding region of one of the nucleic acid molecule of Table I, for example, a fragment which can be used as a probe or primer or a fragment encoding a biologically active portion of a FCRP.

[2372] Portions of proteins encoded by the FCRP encoding nucleic acid molecules of the invention are preferably biologically active portions described herein. As used herein, the term “biologically active portion of” a FCRP is intended to include a portion, e.g. a domain/motif, of the protein being responsible for the ability of the protein to enable the production or increased production of the fine chemical. To determine whether a FCRP, or a biologically active portion thereof, results in a production or an increased production of the fine chemical in the non-human organism, like a microorganism or a plant, an analysis of the non-human organism comprising the FCRP may be performed. Such analysis methods are well known to those skilled in the art, as detailed in the Examples. More specifically, nucleic acid fragments encoding biologically active portions of a FCRP can be prepared by isolating a portion of one of the sequences of the nucleic acid of Table I, e.g. expressing the encoded portion of the FCRP or peptide (e.g. by recombinant expression in vitro) and assessing the activity of the encoded portion of the FCRP or peptide.

[2373] Biologically active portions of a FCRP are encompassed by the present invention and include peptides comprising amino acid sequences derived from the amino acid sequence of a FCRP encoding gene, or the amino acid sequence of a protein homologous to a FCRP, which include fewer amino acids than a full length FCRP or the full length protein which is homologous to a FCRP, and exhibits at least some enzymatic or biological activity of a FCRP.

[2374] Typically, biologically active portions (e.g., peptides which are, for example, 5, 10, 15, 20, 30, 35, 36, 37, 38, 39, 40, 50, 75, 100, 125, 150 or more amino acids in length) comprise a domain or motif with at least one activity of a FCRP. Moreover, other biologically active portions in which other regions of the protein are deleted, can be prepared by recombinant techniques and evaluated for one or more of the activities described herein. Preferably, the biologically active portions of a FCRP include one or more selected domains/motifs or portions thereof having biological activity.

[2375] The term “biological active portion” or “biological activity” means a polypeptide as depicted in the respective line in Table II, application no. 1, column 3 or a portion of said polypeptide which still has at least 10% or 20%, preferably 30%, 40%, 50% or 60%, especially preferably 70%, 75%, 80%, 90% or 95% of the enzymatic or biological activity of the natural or starting enzyme or protein.

[2376] In the process according to the invention nucleic acid sequences or molecules can be used, which, if appropriate, contain synthetic, non-natural or modified nucleotide bases, which can be incorporated into DNA or RNA. Said synthetic, non-natural or modified bases can for example increase the stability of the nucleic acid molecule outside or inside a cell. The nucleic acid molecules of the invention can contain the same modifications as aforementioned.

[2377] As used in the present context the term “nucleic acid molecule” may also encompass the untranslated sequence or molecule located at the 3′ and at the 5′ end of the coding gene region, for example at least 500, preferably 200, especially preferably 100, nucleotides of the sequence upstream of the 5′ end of the coding region and at least 100, preferably 50, especially preferably 20, nucleotides of the sequence downstream of the 3′ end of the coding gene region. It is often advantageous only to choose the coding region for cloning and expression purposes.

[2378] Preferably, the nucleic acid molecule used in the process according to the invention or the nucleic acid molecule of the invention is an isolated nucleic acid molecule. In one embodiment, the nucleic acid molecule of the invention is the nucleic acid molecule used in the process of the invention.

[2379] The nucleic acid molecules used in the process, for example the polynucleotide of the invention or of a part thereof can be isolated using molecular-biological standard techniques and the sequence information provided herein. Also, for example a homologous sequence or homologous, conserved sequence regions at the DNA or amino acid level can be identified with the aid of comparison algorithms. The former can be used as hybridization probes under standard hybridization techniques (for example those described in Sambrook et al., “Molecular Cloning: A Laboratory Manual” 2nd ed., Cold Spring Harbor Laboratory, Cold Spring Harbor Laboratory Press, Cold Spring Harbor, N.Y., 1989) for isolating further nucleic acid sequences useful in this process.

[2380] Synthetic oligonucleotide primers for the amplification, e.g. as shown in the respective line in Table III, application no. 1, column 8, by means of polymerase chain reaction can be generated on the basis of a sequence shown herein, for example the sequence shown in the respective line in Table I, application no. 1, columns 5 or 8, or the sequences derived from Table II, application no. 1, columns 5 or 8, respectively.

[2381] Moreover, it is possible to identify a conserved region of a protein from various organism by carrying out protein sequence alignments with the polypeptide encoded by the nucleic acid molecules of the present invention, in particular with the sequences encoded by the nucleic acid molecule shown in the respective line in column 5 or 8 of Table I, application no. 1, from which conserved regions, and in turn, degenerate primers can be derived. Conserved regions are those, which show a very little variation in the amino acid in one particular position of several homologs from different origin. The consensus sequence and polypeptide motifs shown in the respective line in column 8 of Table IV, application no. 1, are derived from such alignments of homologous proteins.

[2382] In an embodiment of the present invention, in the method of the present invention the activity of a polypeptide comprising or consisting of a consensus sequence or at least one polypeptide motif shown in the respective line in Table IV, application no.1, column 8, is increased. In another embodiment thereof, the method of the present invention relates to a polypeptide comprising or consisting of a consensus sequence shown in the respective line in Table IV, application no. 1, column 8 or comprising at least one polypeptide motif shown in the respective line in Table IV, application no. 1, column 8, whereby not more than 20, 15, 10, 9, 8, 7, 6, 5 4, 3, 2 or 1, or 0 of the amino acid positions indicated can be replaced by any amino acid. In another embodiment thereof, the method of the present invention relates to a polypeptide comprising or consisting of a consensus sequence shown in the respective line in Table IV, application no. 1, column 8 or comprising at least one polypeptide motif shown in the respective line in Table IV, application no. 1, column 8, whereby not more than 15%, 10%, 5%, 4%, 3%, 2% or 1%, or 0% of the amino acid positions defined as distinct specific amino acids are/is replaced by another amino acid. In another embodiment thereof, the method of the present invention relates to a polypeptide comprising or consisting of a consensus sequence shown in the respective line in Table IV, application no. 1, column 8 or comprising at least one polypeptide motif shown in the respective line in Table IV, application no. 1, column 8, whereby not more than than 20, 15, 10, 9, 8, 7, 6, 5, 4, 3, 2 or 1, or 0 amino acids are inserted into a consensus sequence or polypeptide motif.

[2383] In an embodiment of the present invention, in the method of the present invention the activity of a polypeptide comprising or consisting of a consensus sequence or at least one polypeptide motif shown in the respective line in Table IV, application no.1, column 8, is increased, whereby said polypeptide distinguishes over the sequence depicted in Table II, application no. 1, columns 5 or 8 by one or more amino acids.

[2384] In one embodiment, said polypeptide of the invention distinguishes over the sequence shown in the respective line in Table II, application no. 1, columns 5 and 8 by more than 5, 6, 7, 8 or 9 amino acids, preferably by more than 10, 15, 20, 25 or 30 amino acids, even more preferred are more than 40, 50, or 60 amino acids and, preferably, the sequence of the polypeptide of the invention distinguishes from the sequence shown in the respective line in Table II B, application no. 1, columns 5 and 8 by not more than 80%, 70%, 60%, 50%, 40%, 30%, 20%, 10%, 5%, 4%, 3%, 2%, 1% or 0.5%. In another embodiment, said polypeptide of the invention does not consist of the sequence shown in Table II, application no. 1, columns 5 or 8.

[2385] The consensus sequence was derived from a multiple alignment of the sequences as listed in a single line of Table II. The amino acids are given in their three letter code. In case a specific amino acid is indicated this specific amino acid is conserved in at least 80% of the aligned proteins whereas the three letter code XAA stands for amino acids, which are not conserved in at least 80% of the aligned sequences. The consensus sequence starts with the first conserved amino acid in the alignment, and ends with the last conserved amino acid in the alignment of the investigated sequences.

[2386] Patterns had to match at least 80% of the investigated proteins. Conserved patterns were identified with the software tool MEME version 3.5.1 or manually by using first standard prosite anotation. The number of given x indicates the distances between conserved amino acid residues (given in the one letter code), e.g. (1) the pattern Y-x(21,23)-F means that conserved tyrosine and phenylalanine residues in the alignment are separated from each other by minimum 21 and maximum 23 amino acid residues in the alignment of all investigated sequences, (2) the pattern Y-x(21,23)-[FW] means that a conserved tyrosine is separated by minimum 21 and maximum 23 amino acid residues from either a phenylalanine or tryptophane. However, these patterns have been “translated” into the WIPO standard 25. MEME was developed by Bailey Timothy L.and Elkan Charles, Dept. of Computer Science and Engeneering, University of California, San Diego, USA and is described by Bailey Timothy L. and Elkan Charles (Proceedings of the Second International Conference on Intelligent Systems for Molecular Biology, pp. 28-36, AAAI Press, Menlo Park, Calif., 1994). The source code for the stand-alone program is public available from the San Diego Supercomputer centre (http://meme.sdsc.edu). For identifying common motifs in all sequences with the software tool MEME, the following settings were used: -maxsize 500000, -nmotifs 15, -evt 0.001, -maxw 60, -distance 1e-3, - minsites number of sequences used for the analysis. Input sequences for MEME were non-aligned sequences in Fasta format. Other parameters were used in the default settings in this software version. Prosite patterns for conserved domains were generated with the software tool Pratt version 2.1 or manually. Pratt was developed by Jonassen Inge, Dept. of Informatics, University of Bergen, Norway and is described by Jonassen et al. (Jonassen I., Collins J. F. and Higgins D. G., Protein Science 4, 1587 (1995); Jonassen I., Efficient discovery of conserved patterns using a pattern graph, Submitted to CABIOS Febr. 1997). The source code (ANSI C) for the stand-alone program is public available, e.g. at establisched Bioinformatic centers like EBI (European Bioinformatics Institute). For generating patterns with the software tool Pratt, following settings were used: PL (max Pattern Length): 100, PN (max Nr of Pattern Symbols): 100, PX (max Nr of consecutive x′s): 30, FN (max Nr of flexible spacers): 5, FL (max Flexibility): 30, FP (max Flex.Product): 10, ON (max number patterns): 50. Input sequences for Pratt were distinct regions of the protein sequences exhibiting high similarity as identified from software tool MEME. The minimum number of sequences, which have to match the generated patterns (CM, min Nr of Seqs to Match) was set to at least 80% of the provided sequences. Parameters not mentioned here were used in their default settings. The Prosite patterns of the conserved domains can be used to search for protein sequences matching this pattern. Various established Bioinformatic centres provide public internet portals for using those patterns in database searches (e.g. PIR (Protein Information Resource, located at Georgetown University Medical Center) or ExPASy (Expert Protein Analysis System)). Alternatively, stand-alone software is available, like the program Fuzzpro, which is part of the EMBOSS software package. For example, the program Fuzzpro not only allows to search for an exact pattern-protein match but also allows to set various ambiguities in the performed search.

[2387] The alignment was performed with the software ClustalW (version 1.83) and is described by Thompson et al. (Nucleic Acids Research 22, 4673 (1994)). The source code for the stand-alone program is public available from the European Molecular Biology Laboratory; Heidelberg, Germany. The analysis was performed using the default parameters of ClustalW v1.83 (gap open penalty: 10.0; gap extension penalty: 0.2; protein matrix: Gonnet; protein/DNA endgap: -1; protein/DNA gapdist: 4).

[2388] Degenerated primers can then be utilized by PCR for the amplification of fragments of novel proteins having above-mentioned activity, e.g. conferring the production or the increased production of the fine chemical as compared to a corresponding, non-transformed, wild type cell, or non-human organism, like a plant cell or a plant or a part thereof, after generating or increasing the expression or activity or having the activity of a protein as shown in therespective line in Table II, column 3 or further functional homologs of the polypeptide of the invention from other non-human organisms.

[2389] These fragments can then be utilized as hybridization probe for isolating the complete gene sequence. As an alternative, the missing 5′ and 3′ sequences can be isolated by means of RACE-PCR. A nucleic acid molecule according to the invention can be amplified using cDNA or, as an alternative, genomic DNA as template and suitable oligonucleotide primers, following standard PCR amplification techniques. The nucleic acid molecule amplified thus can be cloned into a suitable vector and characterized by means of DNA sequence analysis. Oligonucleotides, which correspond to one of the nucleic acid molecules used in the process can be generated by standard synthesis methods, for example using an automatic DNA synthesizer.

[2390] Nucleic acid molecules which are advantageously for the process according to the invention can be isolated based on their homology to the nucleic acid molecules disclosed herein using the sequences or part thereof as or for the generation of a hybridization probe and following standard hybridization techniques under stringent hybridization conditions. In this context, it is possible to use, for example, isolated one or more nucleic acid molecules of at least 15, 20, 25, 30, 35, 40, 50, 60 or more nucleotides, preferably of at least 15, 20 or 25 nucleotides in length which hybridize under stringent conditions with the above-described nucleic acid molecules, in particular with those which encompass a nucleotide sequence of the nucleic acid molecule used in the process of the invention or encoding a protein used in the invention or of the nucleic acid molecule of the invention. Nucleic acid molecules with 30, 50, 100, 250 or more nucleotides may also be used.

[2391] The term “homology” means that the respective nucleic acid molecules or the encoded proteins are functionally and/or structurally equivalent. The nucleic acid molecules that are homologous to the nucleic acid molecules described above and that are derivatives of said nucleic acid molecules are, for example, variations of said nucleic acid molecules which represent modifications having the same biological function, in particular encoding proteins with the same or substantially the same biological function. They may be naturally occurring variations, such as sequences from other plant varieties or species, or mutations. These mutations may occur naturally or may be obtained by mutagenesis techniques. The allelic variations may be naturally occurring allelic variants as well as synthetically produced or genetically engineered variants. Structurally equivalents can, for example, be identified by testing the binding of said polypeptide to antibodies or computer based predictions. Structurally equivalents have the similar immunological characteristic, e.g. comprise similar epitopes.

[2392] By “hybridizing” it is meant that such nucleic acid molecules hybridize under conventional hybridization conditions, preferably under stringent conditions such as described by, e.g., Sambrook (“Molecular Cloning; A Laboratory Manual”, 2^{nd} edition, Cold Spring Harbor Laboratory Press, Cold Spring Harbor, N.Y. (1989)) or in “Current Protocols in Molecular Biology”, John Wiley & Sons, N.Y. (1989), chapter 6.3.1-6.3.6.)

[2393] According to the invention, DNA as well as RNA molecules of the corresponding nucleic acid molecules of the invention can be used as probes. Further, as template for the identification of functional homologues Northern blot assays as well as Southern blot assays can be performed. The Northern blot assay advantageously provides further information about the expressed gene product: e.g. expression pattern, occurrence of processing steps, like splicing and capping, etc. The Southern blot assay provides additional information about the chromosomal localization and organization of the gene being related to the nucleic acid molecule of the invention.

[2394] A preferred, non-limiting example of stringent hybridization conditions are hybridizations in 6× sodium chloride/sodium citrate (=SSC) at approximately 45° C., followed by one or more wash steps in 0.2×SSC, 0.1% SDS at 50 to 65° C., for example at 50° C., 55° C. or 60° C. The skilled worker knows that these hybridization conditions differ as a function of the type of the nucleic acid and, for example when organic solvents are present, with regard to the temperature and concentration of the buffer. The temperature under “standard hybridization conditions” differs for example as a function of the type of the nucleic acid between 42° C. and 65° C., preferably between 45° C. and 50° C. in an aqueous buffer with a concentration of 0.1×, 0.5×, 1×, 2×, 3×, 4× or 5×SSC (pH 7.2). If organic solvent(s) is/are present in the above-mentioned buffer, for example 50% formamide, the temperature under standard conditions is approximately 40° C., 42° C. or 45° C. The hybridization conditions for DNA:DNA hybrids are preferably for example 0.1×SSC and 20° C., 25° C., 30° C., 35° C., 40° C. or 45° C., preferably between 30° C. and 45° C. The hybridization conditions for DNA:RNA hybrids are preferably for example 0.1×SSC and 30° C., 35° C., 40° C., 45° C., 50° C. or 55° C., preferably between 45° C. and 55° C. The above-mentioned hybridization temperatures are determined for example for a nucleic acid approximately 100 by (=base pairs) in length and a G +C content of 50% in the absence of formamide. The skilled worker knows to determine the hybridization conditions required with the aid of textbooks, for example the ones mentioned above, or from the following textbooks: Sambrook et al., “Molecular Cloning”, Cold Spring Harbor Laboratory, 1989; Hames and Higgins (ed.), “Nucleic Acids Hybridization: A Practical Approach”, IRL Press at Oxford University Press, Oxford, 1985; Brown (ed.), “Essential Molecular Biology: A Practical Approach”, IRL Press at Oxford University Press, Oxford, 1991.

[2395] A further example of one such stringent hybridization condition is hybridization at 4×SSC at 65° C., followed by a washing in 0.1×SSC at 65° C. for one hour. Alternatively, an exemplary stringent hybridization condition is in 50% formamide, 4×SSC at 42° C. Further, the conditions during the wash step can be selected from the range of conditions delimited by low-stringency conditions (approximately 2×SSC at 50° C.) and high-stringency conditions (approximately 0.2×SSC at 50° C., preferably at 65° C.) (20×SSC:0.3 M sodium citrate, 3 M NaCl, pH 7.0). In addition, the temperature during the wash step can be raised from low-stringency conditions at room temperature, approximately 22° C., to higher-stringency conditions at approximately 65° C. Both of the parameters salt concentration and temperature can be varied simultaneously, or else one of the two parameters can be kept constant while only the other is varied. Denaturants, for example formamide or SDS, may also be employed during the hybridization. In the presence of 50% formamide, hybridization is preferably effected at 42° C. Relevant factors like 1) length of treatment, 2) salt conditions, 3) detergent conditions, 4) competitor DNAs, 5) temperature and 6) probe selection can be combined case by case so that not all possibilities can be mentioned herein.

[2396] Thus, in a preferred embodiment, Northern blots are prehybridized with RothiHybri-Quick buffer (Roth, Karlsruhe) at 68° C. for 2 h. Hybridization with radioactive labelled probe is done overnight at 68° C. Subsequent washing steps are performed at 68° C. with 1×SSC. For Southern blot assays the membrane is prehybridized with Rothi-Hybri-Quick buffer (Roth, Karlsruhe) at 68° C. for 2 h. The hybridzation with radioactive labelled probe is conducted over night at 68° C. Subsequently the hybridization buffer is discarded and the filter shortly washed using 2×SSC; 0.1% SDS. After discarding the washing buffer new 2×SSC; 0,1% SDS buffer is added and incubated at 68° C. for 15 minutes. This washing step is performed twice followed by an additional washing step using 1×SSC; 0.1% SDS at 68° C. for 10 min.

[2397] Some examples of conditions for DNA hybridization (Southern blot assays) and wash step are shown herein below:

(1) Hybridization conditions can be selected, for example, from the following conditions:
[2398] (a) 4×SSC at 65° C.,
[2399] (b) 6×SSC at 45° C.,
[2400] (c) 6×SSC, 100 mg/ml denatured fragmented fish sperm DNA at 68° C.,
[2401] (d) 6×SSC, 0.5% SDS, 100 mg/ml denatured salmon sperm DNA at 68° C.,
[2402] (e) 6×SSC, 0.5% SDS, 100 mg/ml denatured fragmented salmon sperm DNA, 50% formamide at 42° C.,
[2403] (f) 50% formamide, 4×SSC at 42° C.,
[2404] (g) 50% (v/v) formamide, 0.1% bovine serum albumin, 0.1% Ficoll, 0.1% polyvinylpyrrolidone, 50 mM sodium phosphate buffer pH 6.5, 750 mM NaCl, 75 mM sodium citrate at 42° C.,
[2405] (h) 2× or 4×SSC at 50° C. (low-stringency condition), or
[2406] (i) 30 to 40% formamide, 2 x or 4×SSC at 42° C. (low-stringency condition).
   (2) Wash steps can be selected, for example, from the following conditions:
[2407] (a) 0.015 M NaCl/0.0015 M sodium citrate/0.1% SDS at 50° C.,
[2408] (b) 0.1×SSC at 65° C.,
[2409] (c) 0.1×SSC, 0.5% SDS at 68° C.,
[2410] (d) 0.1×SSC, 0.5% SDS, 50% formamide at 42° C.,
[2411] (e) 0.2×SSC, 0.1% SDS at 42° C.,
[2412] (f) 2×SSC at 65° C. (low-stringency condition),

[2413] Polypeptides having above-mentioned activity, i.e. conferring the production or the increased production of the fine chemical methionine as compared to a corresponding, e.g. non-transformed, wild type non-human organism, like a microorganism or a plant cell, plant or part thereof, can be encoded by other DNA sequences which hybridize to the sequences shown in the respective line in Table I, application no. 1, columns 5 and 8, preferably the coding region therof, at least under relaxed hybridization conditions and which encode the expression of polypeptides conferring the production or the increased production of the respective fine chemical methionine as compared to a corresponding, e.g. non-transformed, wild type non-human organism, like a microorganism or a plant cell, plant or part thereof.

[2414] Further, some applications have to be performed at low stringency hybridization conditions, without any consequences for the specificity of the hybridization. For example, a Southern blot analysis of total DNA could be probed with a nucleic acid molecule of the present invention and washed at low stringency (55° C. in 2×SSPE, 0.1% SDS). The hybridization analysis could reveal a simple pattern of only genes encoding polypeptides of the present invention or used in the process of the invention, e.g. having the herein-mentioned activity of conferring the production or the increased production of the fine chemical as compared to a corresponding, e.g. non-transformed, wild type non-human organism, like a microorganism or a plant cell, plant or part thereof. A further example of such low-stringent hybridization conditions is 4×SSC at 50° C. or hybridization with 30 to 40% formamide at 42° C. Such molecules comprise those which are fragments, analogues or derivatives of the polypeptide of the invention or used in the process of the invention and differ, for example, by way of amino acid and/or nucleotide deletion(s), insertion(s), substitution (s), addition(s) and/or recombination (s) or any other modification (s) known in the art either alone or in combination from the above-described amino acid sequences or their underlying nucleotide sequence(s). However, it is preferred to use high stringency hybridization conditions.

[2415] Hybridization should advantageously be carried out with fragments of at least 5, 10, 15, 20, 25, 30, 35 or 40 bp, advantageously at least 50, 60, 70 or 80 bp, preferably at least 90, 100 or 110 bp. Most preferably are fragments of at least 15, 20, 25 or 30 bp. Preferably are also hybridizations with at least 100 by or 200 bp, very especially preferably at least 400 by in length. In an especially preferred embodiment, the hybridization should be carried out with the entire nucleic acid sequence with conditions described above.

[2416] The terms “fragment”, “fragment of a sequence” or “part of a sequence” mean a truncated sequence of the original sequence referred to. The truncated sequence (nucleic acid or protein sequence) can vary widely in length; the minimum size being a sequence of sufficient size to provide a sequence with at least a comparable function and/or activity of the original sequence or molecule referred to, or hybridizing with the nucleic acid molecule of the invention or used in the process of the invention under stringent conditions, while the maximum size is not critical. In some applications, the maximum size usually is not substantially greater than that required to provide the desired activity and/or function(s) of the original sequence.

[2417] Typically, the truncated amino acid sequence or molecule will range from about 5 to about 310 amino acids in length. More typically, however, the sequence will be a maximum of about 250 amino acids in length, preferably a maximum of about 200 or 100 amino acids. It is usually desirable to select sequences of at least about 10, 12 or 15 amino acids, up to a maximum of about 20 or 25 amino acids.

[2418] The term “epitope” relates to specific immunoreactive sites within an antigen, also known as antigenic determinates. These epitopes can be a linear array of monomers in a polymeric composition—such as amino acids in a protein—or consist of or comprise a more complex secondary or tertiary structure. Those of skill will recognize that immunogens (i.e. substances capable of eliciting an immune response) are antigens; however, some antigen, such as haptens, are not immunogens but may be made immunogenic by coupling to a carrier molecule. The term “antigen” includes references to a substance to which an antibody can be generated and/or to which the antibody is specifically immunoreactive.

[2419] In an embodiment the present invention relates to an epitope of the polypeptide of the present invention or used in the process of the present invention and conferring the production or the increased production of the fine chemical as compared to a corresponding, e.g. non-transformed, wild type non-human organism, like a microorganism or a plant cell, plant or part thereof.

[2420] The term “one or several amino acids” relates to at least one amino acid but not more than that number of amino acids, which would result in a homology of below 50% identity. Preferably, the identity is more than 70%, 80%, 85%, 90%, 91%, 92%, 93%, 94%, 95%, 96%, 97%, 98%, 99% or 99.5% identity.

[2421] Further, the nucleic acid molecule of the invention comprises a nucleic acid molecule, which is a complement of one of the nucleotide sequences of above-mentioned nucleic acid molecules or a portion thereof. A nucleic acid molecule or its sequence which is complementary to one of the nucleotide molecules or sequences shown in the respective line in Table I, application no. 1, columns 5 or 8, preferably the coding rgion thereof, homologs or fragments thereof, is one which is sufficiently complementary to one of the nucleotide molecules or sequences shown in the respective line inTable I, application no. 1, columns 5 or 8, preferably the coding rgion thereof, homologs or fragments thereof, such that it can hybridize to one of the nucleotide sequences shown in Table I, application no. 1, columns 5 or 8, preferably the coding rgion thereof, homologs or fragments thereof, thereby forming a stable duplex. Preferably, the hybridization is performed under stringent hybrization conditions. However, a complement of one of the herein disclosed sequences is preferably a sequence complement thereto according to the base pairing of nucleic acid molecules well known to the skilled person. For example, the bases A and G undergo base pairing with the bases T and U or C, resp. and visa versa. Modifications of the bases can influence the base-pairing partner.

[2422] The nucleic acid molecule of the invention comprises a nucleotide sequence which is at least about 30%, 35%, 40%, 45%, 50%, 55%, 60%, 65%, 70%, 75%, 80%, 90%, 95%, 96%, 97%, 98%, 99%, 99.5% or more homologous to a nucleotide sequence shown in Table I, application no. 1, columns 5 or 8, preferably the coding region thereof, homologs or fragments thereof, and preferably has above-mentioned activity, in particular conferring the production or the increased production of the fine chemical methionine, respectively, after increasing the activity or an activity of a gene as shown in the respective line in Table I or of a gene product, e.g. as shown in the respective line in Table II, application no. 1, column 5 or 8, by for example in one embodiment expression either in the cytsol or in an organelle such as a plastid or mitochondria or both, preferably in a plastid, or in another embodiment non-targeted or targeted.

[2423] The nucleic acid molecule of the invention comprises a nucleotide sequence or molecule which hybridizes, preferably hybridizes under stringent conditions as defined herein, to one of the nucleic acid molecule shown in the respective line in Table I, preferably Table IB, application no. 1, columns 5 or 8, preferably the coding region therof, fragements or homolos therof, and encodes a protein having above-mentioned activity, e.g. conferring the production or the increased production of the respective fine chemical methionine as compared to a corresponding, e.g. non-transformed, wild type non-human organism, like a microorganism or a plant cell, plant or part thereof, by for example in one embodiment expression either in the cytsol or in an organelle such as a plastid or mitochondria or both, preferably in a plastid, or in another embodiment non-targeted or targeted, and optionally, the activity thereof is selected from the group consisting of (DL)-glycerol-3-phosphatase, 2,3-dihydroxyphenylpropionate 1,2-dioxygenase, 2-oxoglutarate dehydrogenase E1 subunit, 49747384_SOYBEAN-protein, 5′-nucleotidase, acetolactate synthase small subunit, acetyl CoA carboxylase, adenosine kinase, arginine exporter protein, Atl g09680-protein, At2g45420-protein, At4g32480-protein, ATP-binding component of a transport system, auxin response factor, b0012-protein, b1003-protein, b1522-protein, b2032-protein, b2345-protein, b2513-protein, b2673-protein, b3246-protein, b3346-protein, b3817-protein, b4029-protein, beta-hydroxylase, bifunctional aspartokinase/homoserine dehydrogenase, calcium-dependent protein kinase, coproporphyrinogen III oxidase, cyclin, cystathionine gamma-synthase, cystathionine-lyase, dihydroxyacid dehydratase, DNA-binding protein, F-box protein, glutaredoxin, glutathione S-transferase, glycogenin, homocitrate synthase, homoserine dehydrogenase, hydrolase, L-serine dehydratase, major facilitator superfamily transporter protein, malic enzyme, membrane transport protein, monothiol glutaredoxin, monthiol glutaredoxin, oxidoreductase, peptidyl-prolyl cis-trans isomerase, phosphoadenosine phosphosulfate reductase , Photosystem I reaction center subunit XI, protein kinase, protein phosphatase, pyruvate kinase, Sec-independent protein translocase subunit, serine protease, serine/threonine-protein phosphatase, threonine aldolase, threonine dehydratase, threonine efflux protein, transcription factor, transport protein, uridine/cytidine kinase, valine-pyruvate transaminase, yhl013c-protein, yml084w-protein, yol160w-protein, yor392w-protein, and zinc finger protein, respectively.

[2424] Moreover, the nucleic acid molecule of the invention can comprise only a portion of the coding region of one of the nucleic acid molecules depicted in Table I, application no. 1, columns 5 or 8, for example a fragment which can be used as a probe or primer or a fragment encoding a biologically active portion of the polypeptide of the present invention or of a polypeptide used in the process of the present invention, i.e. having above-mentioned activity, e.g. conferring the production or the increased production of the respective fine chemical methionine as compared to a corresponding, e.g. non-transformed, wild type non-human organism, like a microorganism or a plant cell, plant or part thereof, by for example in one embodiment expression either in the cytsol or in an organelle such as a plastid or mitochondria or both, preferably in a plastid, or in another embodiment non-targeted or targeted. The nucleotide sequences determined from the cloning of the present protein-according-to-the-invention-encoding gene allows for the generation of probes and primers designed for use in identifying and/or cloning its homologues from other cell types and organisms. The probe/primer typically comprises a substantially purified oligonucleotide. The oligonucleotide typically comprises a region of nucleotide sequence that hybridizes under stringent conditions to at least about 12, 15 preferably about 20 or 25, more preferably about 40, 50 or 75 consecutive nucleotides of a sense strand of one of the sequences set forth, e.g., in the respective line in Table I, application no. 1, column 5 or 8, preferably the coding region thereof, or a homolog or a fragment thereof, an anti-sense sequence of one of the sequences, e.g., set forth in the respective line in Table I, application no. 1, columns 5 or 8, preferably the coding region thereof, or a homolog or a fragment thereof or naturally occurring mutants thereof. Primers based on a nucleic acid molecule of the invention can be used in PCR reactions to clone homologs of the polypeptide of the invention or of the polypeptide used in the process of the invention, e.g. as the primers described in the examples of the present invention, e.g. as shown in the examples. A PCR with the primers shown in the respective line in Table III, column 8 will result in a fragment of the gene product as shown in Table II, application no. 1, column 5.

[2425] Primer sets are interchangeable. The person skilled in the art knows how to desing and combine said primers to result in the desired product, e.g. in a full length clone or a partial sequence. Probes based on the sequences of the nucleic acid molecule of the invention or used in the process of the present invention can be used to detect transcripts or genomic sequences encoding the same or homologous proteins. The probe can further comprise a label group attached thereto, e.g. the label group can be a radioisotope, a fluorescent compound, an enzyme, or an enzyme co-factor. Such probes can be used as a part of a genomic marker test kit for identifying cells which express a polypeptide of the invention or used in the process of the present invention, such as by measuring a level of an encoding nucleic acid molecule in a sample of cells, e.g. detecting mRNA levels or determining, whether a genomic gene comprising the sequence of the polynucleotide of the invention or used in the processes of the present invention has been mutated or deleted.

[2426] As the expression of a respective nucleic acids of the invention is related to the synthesis of the respective fine chemicaL-methionine its function as a probe extends to the detection of microorganisms, plant tissues, plants, plant variets, plant ecotypes or plant genera with varying capability or potential for synthesis of the respective fine chemical methionine. Therefore in one embodiment the present invention relates to a method for analyzing the capability or potential of a plant tissue, a plant, a plant variety or plant ecotype to produce the fine chemicaL-methionine by using the nucleic acid of the invention or parts thereof as a probe to detect the amount of the nucleic acid of the invention in the non-human organism or a part thereof in comparision to another non-human organism.

[2427] The nucleic acid molecule of the invention encodes a polypeptide or portion thereof which includes an amino acid sequence which is sufficiently homologous to the amino acid sequence shown in respective line in Table II, application no. 1, columns 5 or 8 such that the protein or portion thereof maintains the ability to confer the production or the increased production of the respective fine chemical methionine as compared to a corresponding, e.g. non-transformed, wild type non-human organism, like a microorganism or a plant cell, plant or part thereof, in particular increasing the activity as mentioned above or as described in the examples in microorganisms or plants.

[2428] As used herein, the language “sufficiently homologous” refers to proteins or portions thereof which have amino acid sequences which include a minimum number of identical or equivalent amino acids (e.g. an amino acid which has a similar side chain as an amino acid in one of the sequences of the polypeptide of the present invention) to an amino acid sequence shown in the respective line in Table II, application no. 1, columns 5 or 8 such that the protein or portion thereof is able to confer the production or the increased production of the respective fine chemical methionine as compared to a corresponding, e.g. non-transformed, wild type non-human organism, like a microorganism or a plant cell, plant or part thereof. For example having the activity of a protein as shown in the respective line in Table II, application no. 1, column 3 and as described herein.

[2429] In an embodiment of the present invention, the nucleic acid molecule of the present invention comprises a nucleic acid molecule that encodes a portion of the protein of the present invention. The protein is at least about 30%, 35%, 40%, 45% 50%, 55%, 60%, 65%, 70%, 75%, 80%, 85%, 90%, 91%, 92%, 93%, 94%, 95%, 96%, 97%, 98%, 99%, 99.5% or more homologous to an entire amino acid sequence shown in the respective line of Table II, application no. 1, column 5 or 8 and has the above-mentioned activity, e.g. conferring the production or the increased production of the respective fine chemical methionine as compared to a corresponding, e.g. non-transformed, wild type non-human organism, like a microorganism or a plant cell, plant or part thereof by, for example in a embodiment expression either in the cytsol or in an organelle such as a plastid or mitochondria or both, preferably in a plastid, or in another embodiment by targeted or non-targeted expression.

[2430] Portions of proteins encoded by the nucleic acid molecule of the invention show preferably the above-mentioned activity, e.g. conferring the production or the increased production of the fine chemical as compared to a corresponding, e.g. non-transformed, wild type non-human organism, like a microorganism or a plant cell, plant or part thereof.

[2431] As mentioned herein, the term “biologically active portion” is intended to include a portion, e.g., a domain/motif, that confers the production or the increased production of the fine chemical as compared to a corresponding, e.g. non-transformed, wild type non-human organism, like a microorganism or a plant cell, plant or part thereof or has an immunological activity such that it binds to an antibody binding specifically to the polypeptide of the present invention or a polypeptide used in the process of the present invention for conferring the production or the increased production of the fine chemical as compared to a corresponding, e.g. non-transformed, wild type non-human organism, like a microorganism or a plant cell, plant or part thereof.

[2432] The invention further relates to nucleic acid molecules or methods using said nucleic acid molecules that differ from one of the nucleotide sequences shown in the respective line in Table I, application no. 1, columns 5 or 8, preferably the coding region thereof, or fragments or homologs thereof, due to degeneracy of the genetic code but encode a polypeptide of the present invention, in particular a polypeptide having the above-mentioned activity, e.g. as those polypeptides depicted in the respective line in Table II, application no.1, columns 5 or 8, fragments or homologs thereof. Advantageously, the nucleic acid molecule of the invention comprises, or in an other embodiment has, a nucleotide sequence encoding a protein comprising, or in an other embodiment having, an amino acid sequence shown in the respective line in Table II, application no. 1, columns 5 or 8, fragments or homologs thereof. In a further embodiment, the nucleic acid molecule of the invention encodes a full length protein which is substantially homologous to an amino acid sequence shown in the respective line in Table II, application no. 1, columns 5 or 8, or homologs thereof. However, in an embodiment, the nucleic acid molecule of the present invention does not consist of the sequence shown in the respective line in Table I, preferably Table IA, application no. 1, columns 5 or 8, preferably the coding region thereof, but the functional homologs thereof.

[2433] In addition, it will be appreciated by those skilled in the art that DNA sequence polymorphisms that lead to changes in the amino acid sequences may exist within a population of the non-human organism of the present invention. Also these non-human organisms are encompassed by the respective non-human organism according to the invention.

[2434] As used herein, the terms “gene” and “recombinant gene” refer to nucleic acid molecules comprising an open reading frame encoding the polypeptide of the invention or comprising the nucleic acid molecule of the invention or encoding the polypeptide used in the process of the present invention, preferably from a plant, especially a crop plant, or from a microorgansim useful for the method of the invention. Such genetic polymorphism in the gene encoding the polypeptide of the invention or comprising the nucleic acid molecule of the invention may exist among individuals within a population due to natural variation. Such natural variations can typically result in 1 to 5% variance in the nucleotide sequence of the gene. Any and all such nucleotide variations and resulting amino acid polymorphisms in genes encoding a polypeptide of the invention or comprising a the nucleic acid molecule of the invention that are the result of natural variation and that do not alter the functional activity as described are intended to be within the scope of the invention.

[2435] Nucleic acid molecules corresponding to natural variants of a nucleic acid molecule of the invention, which can also be a cDNA, can be isolated based on their homology to the nucleic acid molecules disclosed herein using the nucleic acid molecule of the invention, or a portion thereof, as a hybridization probe according to standard hybridization techniques under stringent hybridization conditions.

[2436] Accordingly, in another embodiment, a nucleic acid molecule of the invention is at least 15, 20, 25 or 30 nucleotides in length. Preferably, it hybridizes under stringent conditions to a nucleic acid molecule comprising a nucleotide sequence of the nucleic acid molecule of the present invention or used in the process of the present invention, e.g. comprising the sequence shown in the respective line in Table I, application no. 1, columns 5 or 8, preferably the coding region thereof. In another embodiment the nucleic acid molecule is preferably at least 20, 30, 50, 100, 250 or more nucleotides in length.

[2437] The term “hybridizes under stringent conditions” is defined above. In an embodiment, the term “hybridizes under stringent conditions” is intended to describe conditions for hybridization and washing under which nucleotide sequences at least 30%, 40%, 50% or 65% identical to each other typically remain hybridized to each other. Preferably, the conditions are such that sequences at least about 70%, 75%, 80%, 85%, 90% or 95% or more identical to each other typically remain hybridized to each other.

[2438] Preferably, a nucleic acid molecule of the invention that hybridizes under stringent conditions to a sequence shown in the respective line in Table I, application no. 1, columns 5 or 8, preferably the coding region thereof, corresponds to a naturally-occurring nucleic acid molecule of the invention. As used herein, a “naturally-occurring” nucleic acid molecule refers to a RNA or DNA molecule having a nucleotide sequence that occurs in nature (e.g. encodes a natural protein). Preferably, the nucleic acid molecule encodes a natural protein having above-mentioned activity, e.g. conferring the production or the increased production of the respective fine chemical methionine as compared to a corresponding, e.g. non-transformed, wild type non-human organism, like a microorganism or a plant cell, plant or part thereof after increasing the expression or activity thereof or the activity of a protein of the invention or used in the process of the invention, in an embodiment for example expression either in the cytsol or in an organelle such as a plastid or mitochondria, preferably in plastids, or, in another embodiment by targeted or non-targeted expression.

[2439] In addition to naturally-occurring variants of the sequences of the polypeptide or nucleic acid molecule of the invention as well as of the polypeptide or nucleic acid molecule used in the process of the invention that may exist in the population, the skilled artisan will further appreciate that changes can be introduced by mutation into a nucleotide sequence of the nucleic acid molecule of the invention, e.g. encoding the polypeptide of the invention or used in the process of the present invention, thereby leading to changes in the amino acid sequence of the encoded said polypeptide, without altering the functional ability of the polypeptide, preferably not decreasing said activity, preferably increasing said activity.

[2440] For example, nucleotide substitutions leading to amino acid substitutions at “non-essential” amino acid residues can be made in a sequence of the nucleic acid molecule of the invention or used in the process of the invention, e.g. shown in the respective line in Table I, application no. 1, columns 5 or 8, preferably the coding region thereof, or fragments or homologs thereof.

[2441] With regard to the activity of a polypeptide a “non-essential” amino acid residue is a residue that can be altered without altering the activity of said polypeptide, whereas an “essential” amino acid residue is required for an activity as mentioned above, e.g. conferring the production or the increased production of the fine chemical as compared to a corresponding, e.g. non-transformed, wild type non-human organism, like a microorganism or a plant cell, plant or part thereof. Other amino acid residues, however, (e.g., those that are not conserved or only semi-conserved in the domain having said activity) may not be essential for activity and thus are likely to be amenable to alteration without altering said activity.

[2442] Further, a person skilled in the art knows that the codon usage between organisms can differ. In the enclosed sequence protocol according to WIPO ST 25 the respective donor organism codon usage “translation” is used.The person skilled in the art may adapt the codon usage in the nucleic acid molecule of the present invention to the usage of the organism or the cell compartment for example of the plastid or mitochondria in which the polynucleotide or polypeptide is expressed.

[2443] Accordingly, the invention relates to nucleic acid molecules encoding a polypeptide having above-mentioned activity, in an non-human organisms or parts thereof by for example expression either in the cytsol or in an organelle such as a plastid or mitochondria or both, preferably in plastids, that contain changes in amino acid residues that are not essential for said activity. Such polypeptides differ in amino acid sequence from a sequence depicted in the respective line in Table II, especially Table IIA, application no. 1, columns 5 or 8, but retain said activity described herein. The nucleic acid molecule can comprise a nucleotide sequence encoding a polypeptide, wherein the polypeptide comprises an amino acid sequence at least about 50% identical to an amino acid sequence shown in the respective line in Table II, application no. 1, columns 5 or 8, and is capable of conferring the production or the increased production of the respective fine chemical methionine as compared to a corresponding, e.g. non-transformed, wild type non-human organism, like a microorganism or a plant cell, plant or part thereof, after increasing its activity for example in an embodiment by expression either in the cytsol or in an organelle such as a plastid or mitochondria or both, preferably in plastids, or, in another embodiment by targeted or non-targeted expression. Preferably, the protein encoded by the nucleic acid molecule is at least about 60%, 70%, 80%, 90%, 95%, 96%, 97%, 98%, 99% or 99.5% identical to the sequence shown in the respective line in Table II, application no. 1, columns 5 or 8.

[2444] To determine the percentage identity (=homology, herein used interchangeably) of two amino acid sequences or of two nucleic acid molecules, the sequences are written one underneath the other for an optimal comparison (for example gaps may be inserted into the sequence of a protein or of a nucleic acid in order to generate an optimal alignment with the other protein or the other nucleic acid). The amino acids or nucleobases at the respective corresponding positions are then compared. If a position in one sequence is occupied by the same amino acid or the same nucleobase as the corresponding position in the other sequence, the molecules are homologous at this position. The percentage identity between the two sequences is a function of the number of identical positions shared by the sequences (i.e. % homology=% identity=number of identical positions/total number of positions×100).

[2445] For the determination of the percentage identity (=homology) of two or more amino acid sequences or of two or more nucleic acid molecules several computer software programs have been developed. The homology of two or more sequences can be calculated with for example the software fasta, which presently has been used in the version fasta 3 (Pearson W. R. and Lipman D. J., PNAS 85, 2444 (1988); Pearson W.R., Methods in Enzymology 183, 63 (1990)). Another useful program for the calculation of homologies of different sequences is the standard blast program, which is included in the Biomax PEDANTTM software (Biomax, Munich, Federal Republic of Germany). This leads unfortunately sometimes to suboptimal results since blast does not always include complete sequences of the subject and the querry. Nevertheless as this program is very efficient it can be used for the comparison of a huge number of sequences. The following settings are typically used for such a comparison of sequences: -p Program Name [String]; -d Database [String]; default=nr; -i Query File [File In]; default=stdin; -e Expectation value (E) [Real]; default=10.0; -m alignment view options: 0=pairwise; 1=query-anchored showing identities; 2=query-anchored no identities; 3=flat query-anchored, show identities; 4=flat query-anchored, no identities; 5=query-anchored no identities and blunt ends; 6=flat query-anchored, no identities and blunt ends; 7=XML Blast output; 8=tabular; 9 tabular with comment lines [Integer]; default =0; -o BLAST report Output File [File Out] Optional; default=stdout; -F Filter query sequence (DUST with blastn, SEG with others) [String]; default=T; -G Cost to open a gap (zero invokes default behavior) [Integer]; default=0; -E Cost to extend a gap (zero invokes default behavior) [Integer]; default=0; -X X dropoff value for gapped alignment (in bits) (zero invokes default behavior); blastn 30, megablast 20, tblastx 0, all others 15 [Integer]; default=0; -I Show GI's in deflines [T/F]; default =F; -q Penalty for a nucleotide mismatch (blastn only) [Integer]; default=-3; -r Reward for a nucleotide match (blastn only) [Integer]; default=1; -v Number of database sequences to show one-line descriptions for (V) [Integer]; default=500; -b Number of database sequence to show alignments for (B) [Integer]; default=250; -f Threshold for extending hits, default if zero; blastp 11, blastn 0, blastx 12, tblastn 13; tblastx 13, megablast 0 [Integer]; default=0; -g Perfom gapped alignment (not available with tblastx) [T/F]; default =T; -Q Query Genetic code to use [Integer]; default=1; -D DB Genetic code (for tblast[nx] only) [Integer]; default=1; -a Number of processors to use [Integer]; default=1; -O SeqAlign file [File Out] Optional; -J Believe the query defline [T/F]; default=F; -M Matrix [String]; default=BLOSUM62; -W Word size, default if zero (blastn 11, megablast 28, all others 3) [Integer]; default=0; -z Effective length of the database (use zero for the real size) [Real]; default=0; -K Number of best hits from a region to keep (off by default, if used a value of 100 is recommended) [Integer]; default=0; -P 0 for multiple hit, 1 for single hit [Integer]; default=0; -Y Effective length of the search space (use zero for the real size) [Real]; default=0; -S Query strands to search against database (for blast[nx], and tblastx); 3 is both, 1 is top, 2 is bottom [Integer]; default=3; -T Produce HTML output [T/F]; default=F; -I Restrict search of database to list of GI's [String] Optional; -U Use lower case filtering of FASTA sequence [T/F] Optional; default=F; -y X dropoff value for ungapped extensions in bits (0.0 invokes default behavior); blastn 20, megablast 10, all others 7 [Real]; default=0.0; -Z X dropoff value for final gapped alignment in bits (0.0 invokes default behavior); blastn/megablast 50, tblastx 0, all others 25 [Integer]; default =0; -R PSI-TBLASTN checkpoint file [File In] Optional; -n MegaBlast search [T/F]; default=F; -L Location on query sequence [String] Optional; -A Multiple Hits window size, default if zero (blastn/megablast 0, all others 40 [Integer]; default=0; -w Frame shift penalty (00F algorithm for blastx) [Integer]; default =0; -t Length of the largest intron allowed in tblastn for linking HSPs (0 disables linking) [Integer]; default=0.

[2446] Results of high quality are reached by using the algorithm of Needleman and Wunsch or Smith and Waterman. Therefore programs based on said algorithms are preferred. Advantageously the comparisons of sequences can be done with the program PileUp (J. Mol.

[2447] Evolution., 25, 351 (1987), Higgins et al., CABIOS 5, 151 (1989)) or preferably with the programs “Gap” and “Needle”, which are both based on the algorithms of Needleman and Wunsch (J. Mol. Biol. 48, 443 (1970)), and “BestFit”, which is based on the algorithm of Smith and Waterman (Adv. Appl. Math. 2, 482 (1981)). “Gap” and “BestFit” are part of the GCG software-package (Genetics Computer Group, 575 Science Drive, Madison, Wis., USA 53711 (1991); Altschul et al., (Nucleic Acids Res. 25, 3389 (1997)), “Needle” is part of the The European Molecular Biology Open Software Suite (EMBOSS) (Trends in Genetics 16 (6), 276 (2000)). Therefore preferably the calculations to determine the percentages of sequence homology are done with the programs “Gap” or “Needle” over the whole range of the sequences. The following standard adjustments for the comparison of nucleic acid sequences were used for “Needle”: matrix: EDNAFULL, Gap_{—penalty:} 10.0, Extend_{—penalty:} 0.5. The following standard adjustments for the comparison of nucleic acid sequences were used for “Gap”: gap weight: 50, length weight: 3, average match: 10.000, average mismatch: 0.000.

[2448] For example a sequence, which has 80% homology with sequence SEQ ID

[2449] NO: 69 at the nucleic acid level is understood as meaning a sequence which, upon comparison with the sequence SEQ ID NO: 69 by the above-mentioned program “Needle” with the above-mentioned parameter set, has a 80% homology.

[2450] Homology between two polypeptides is understood as meaning the identity of the amino acid sequence over in each case the entire sequence length which is calculated by comparison with the aid of the above program “Needle” using Matrix: EBLOSUM62, Gap_penalty: 8.0, Extend_penalty: 2.0.

[2451] For example a sequence which has a 80% homology with sequence SEQ ID NO: 70 at the protein level is understood as meaning a sequence which, upon comparison with the sequence SEQ ID NO: 70 by the above-mentioned program “Needle” with the above-mentioned parameter set, has a 80% homology.

[2452] Functional equivalents of the nucleic acid molecules according to the present invention and/or used in the process according to the present invention represent an embodiment of homologs. Functional equivalents derived from the nucleic acid molecules as shown in the respective line in Table I, application no. 1, columns 5 or 8, preferably the coding region thereof, according to the invention by substitution, insertion or deletion have at least 30%, 35%, 40%, 45%, 50%, 55%, 60%, 65%, 70%, 75%, 80%, 85%, 90%, 91%, 92%, 93%, 94%, 95%, 96%, 97%, 98%, 99% or 99.5% homology with one of the nucleic acid molecules as shown in the respective line in Table I, application no. 1, columns 5 or 8, preferably the coding region thereof, according to the invention and encode polypeptides having essentially the same properties as the polypeptide as shown in the respective line in Table II, application no. 1, columns 5 or 8.

[2453] Functional equivalents derived from one of the polypeptides as shown in the respective line in

[2454] Table II, application no. 1, columns 5 or 8 according to the invention by substitution, insertion or deletion have at least 30%, 35%, 40%, 45%, 50%, 55%, 60%, 65%, 70%, 75%, 80%, 85%, 90%, 91%, 92%, 93%, 94%, 95%, 96%, 97%, 98%, 99% or 99.5% homology with one of the polypeptides as shown in the respective line in Table II, application no. 1, columns 5 or 8 according to the invention and having essentially the same properties as the polypeptide as shown in the respective line in Table II, application no. 1, columns 5 or 8.

[2455] “Essentially the same properties” of a functional equivalent is above all understood as meaning that the functional equivalent has the above-mentioned activity, by for example in an embodiment expression either in the cytsol or in an organelle such as a plastid or mitochondria or both, or, in another embodiment by targeted or non-targeted expression, while increasing the amount of protein, activity or function of said functional equivalent in an organism, e.g. a microorgansim, a plant or plant tissue or animal tissue, plant or animal cells or a part of the same.

[2456] A nucleic acid molecule encoding a homolog to a polypeptide depicted in the respective line in Table II, application no. 1, columns 5 or 8 can be created by introducing one or more nucleotide substitutions, additions or deletions into the nucleic acid molecule of the present invention, in particular of Table I, application no. 1, columns 5 or 8, in the respective line, such that one or more amino acid substitutions, additions or deletions are introduced into the encoded protein. Mutations can be introduced into the nucleic acid molecules as depicted in the respective line in Table I, application no. 1, columns 5 or 8, preferably the coding region thereof, by standard techniques, such as site-directed mutagenesis,PCR-mediated mutagenesis or other methods known to the person skilled in the art.

[2457] Preferably, conservative amino acid substitutions are made at one or more predicted non-essential amino acid. A “conservative amino acid substitution” is one in which the amino acid is replaced with an amino acid having a similar side chain. Families of amino acids having similar side chains have been defined in the art. These families include amino acids with basic side chains (e.g. lysine, arginine, histidine), acidic side chains (e.g. aspartic acid, glutamic acid), uncharged polar side chains (e.g. glycine, asparagine, glutamine, serine, threonine, tyrosine, cysteine), nonpolar side chains (e.g. alanine, valine, leucine, isoleucine, proline, phenylalanine, methionine, tryptophane), beta-branched side chains (e.g. threonine, valine, isoleucine) and aromatic side chains (e.g. tyrosine, phenylalanine, tryptophane, histidine).

[2458] Thus, a predicted non-essential amino acid in a polypeptide of the invention or a polypeptide used in the process of the invention is preferably replaced with another amino acid from the same family. Alternatively, in another embodiment, mutations can be introduced randomly along all or part of a coding sequence of a nucleic acid molecule of the invention or used in the process of the invention, such as by saturation mutagenesis, and the resultant mutants can be screened for activity described herein to identify mutants that retain or even have increased activity, e.g. conferring the production or the increased production of the fine chemical as compared to a corresponding, e.g. non-transformed, wild type non-human organism, like a microorganism or a plant cell, plant or part thereof.

[2459] Following mutagenesis of one of the sequences as shown herein, the encoded protein can be expressed recombinantly and the activity of the protein can be determined using, for example, assays described herein (see Examples) or by measuring the resulting fine chemical production in an organsimen expressing the mutagenized form of the sequence in comparison to an organsim expressing the original non-mutagenized form of the sequence.

[2460] Homologues of the nucleic acid sequences used, with the sequences shown in the respective line in Table I, application no. 1, columns 5 or 8, perferably the coding region thereof, comprise also allelic variants with at least approximately 30%, 35%, 40%, 45%, 50%, 55%, 60%, 65%, 70%, 75%, 80%, 85%, 90%, 91%, 92%, 93%, 94% 95%. 96%, 97%, 98%, 99%, 99.5% or more % homology with one of the nucleotide sequences shown or the above-mentioned derived nucleic acid sequences or their homologues or derivatives or parts of these. Allelic variants encompass in particular functional variants which can be obtained by deletion, insertion or substitution of nucleotides from the sequences shown in the respective line, preferably in Table I, columns 5 or 8, preferably the coding region theeof, or from the derived nucleic acid sequences, the intention being, however, that the enzymatic activity or the biological activity of the resulting proteins synthesized is advantageously retained or increased.

[2461] In one embodiment of the present invention, the nucleic acid molecule of the invention or used in the process of the invention comprises the sequences shown in the respective line in any of the Table I, application no. 1, columns 5 or 8, preferably the coding region thereof, fragments or homologs thereof. It is preferred that the nucleic acid molecule comprises as little as possible other nucleotides not shown in the respective line in any one of Table I, application no. 1, columns 5 or 8, preferably the coding region thereof, fragments or homologs thereof. In one embodiment, the nucleic acid molecule comprises less than 500, 400, 300, 200, 100, 90, 80, 70, 60, 50 or 40 further nucleotides. In a further embodiment, the nucleic acid molecule comprises less than 30, 20 or 10 further nucleotides. In one embodiment, the nucleic acid molecule used in the process of the invention is identical to the sequences shown in the respective line in Table I, application no. 1, columns 5 or 8, preferably the coding region thereof.

[2462] Also preferred is that the nucleic acid molecule used in the process of the invention encodes a polypeptide comprising the sequence shown in the respective line in Table II, application no. 1, columns 5 or 8, fragments or homologs thereof. In one embodiment, the nucleic acid molecule encodes less than 150, 130, 100, 80, 60, 50, 40 or 30 further amino acids. In a further embodiment, the encoded polypeptide comprises less than 20, 15, 10, 9, 8, 7, 6 or 5 further amino acids. In one embodiment used in the inventive process, the encoded polypeptide is identical to the sequences shown in the respective line in Table II, application no. 1, columns 5 or 8.

[2463] In one embodiment, the nucleic acid molecule of the invention or used in the process encodes a polypeptide comprising the sequence shown in the respective line in Table II, application no. 1, columns 5 or 8, or fragments or homologs thereof, and comprises less than 100 further nucleotides. In a further embodiment, said nucleic acid molecule comprises less than 30 further nucleotides. In one embodiment, the nucleic acid molecule used in the process is identical to a coding sequence of the sequences shown in the respective line in Table I, application no. 1, columns 5 or 8.

[2464] Polypeptides (=proteins), which still have the essential biological or enzymatic activity of the polypeptide of the present invention conferring the production or the increased production of the respective fine chemical methionine as compared to a corresponding, e.g. non-transformed, wild type non-human organism, like a microorganism or a plant cell, plant or part thereof, i.e. whose activity is essentially not reduced, are polypeptides with at least 10%, 20%, 30%, 40%, 50%, 60%, 70%, 80%, 90%, 95% or more of the wild type biological activity or enzymatic activity, advantageously, the activity is essentially not reduced in comparison with the activity of a polypeptide shown in the respective line in Table II, application no.1, columns 5 or 8 expressed under identical conditions.

[2465] Homologues of nucleic acid molecules shown in the respective line in Table I, application no. 1, columns 5 or 8, preferably the coding region thereof, or fragments thereof, or of the derived sequences shown in the respective line in Table II, application no. 1, columns 5 or 8, or fragments thereof, also mean truncated sequences, cDNA, single-stranded DNA or RNA of the coding and noncoding DNA sequence. Homologues of said sequences are also understood as meaning derivatives, which comprise noncoding regions such as, for example, UTRs, introns, terminators, enhancers or promoter variants. The promoters upstream of the nucleotide sequences stated can be modified by one or more nucleotide substitution(s), insertion(s) and/or deletion(s) without, however, interfering with the functionality or activity either of the promoters, the open reading frame (=ORF) or with the 3′-regulatory region such as terminators or other 3′-regulatory regions, which are far away from the ORF. It is furthermore possible that the activity of the promoters is increased by modification of their sequence, or that they are replaced completely by more active promoters, even promoters from heterologous organisms.

[2466] Appropriate promoters are known to the person skilled in the art and are mentioned herein below.

[2467] Accordingly, one embodiment of the invention relates to a host cell, which has been transformed stably or transiently with the vector according to the invention or the nucleic acid molecule according to the invention or the nucleic acid construct or the expression construct according to the invention.

[2468] Depending on the non-human host organism, the non-human organisms used in the process according to the invention are cultured or grown in a manner with which the skilled worker is familiar.

[2469] As a rule, microorganisms are grown in a liquid medium comprising a carbon source, usually in the form of sugars, a nitrogen source, usually in the form of organic nitrogen sources such as yeast extract or salts such as ammonium sulfate, trace elements such as iron salts, manganese salts, magnesium salts, and, if appropriate, vitamins, at temperatures between 0° C. and 100° C., preferably between 10° C. and 60° C., while passing in oxygen. In the event the microorganism is anaerobe, no oxygen is blown through the culture medium. The pH value of the liquid nutrient medium may be kept constant, that is to say regulated during the culturing phase, or not. The organisms may be cultured batchwise, semibatchwise or continuously. Nutrients may be provided at the beginning of the fermentation or fed in semicontinuously or continuously. Advantageously microorganisms such as algae are grown under sunlight in open ponds or in fermentors illuminated with a light intensity between 10 to 2000 μmol×m⁻²33 s⁻¹, preferred between 100 to 1000 μmol×m⁻²×s^{-1,} more preferred between 200 to 800 μmol×m⁻²×s⁻¹, most preferred between 300 to 600 μmol×m⁻² ×s⁻¹. The cells are grown between several hours for example 3 to 48 h and several days 1 to 20 days, preferably 2 to 10 days. Algae as autotrophic organisms grow well in the presence of light as energy source, anorganic hydrogen donors and CO₂ as sole carbon source.

[2470] As a rule, plants used in the process according to the invention are grown according to general knowledge of a skilled worker.

[2471] The fine chemical produced can be isolated from the non-human organism by methods with which the skilled worker is familiar. For example via extraction, salt precipitation or chromatography, like ion-exchange chromatography. To this end, the non-human organisms, especially the microorganism or the plant, may be disrupted beforehand. The process according to the invention can be conducted batchwise, semibatchwise or continuously. A summary of known culture and isolation techniques can be found in the textbook by Chmiel (“Bioprozeβtechnik 1, Einführung in die Bioverfahrenstechnik”, Gustav Fischer Verlag, Stuttgart, 1991)), Demain et al. (“Industrial Microbiology and Biotechnology”, 2nd edition, ASM Press, Washington, D.C., 1999, ISBN 1-55581-128-0) or in the textbook by Storhas (“Bioreaktoren and periphere Einrichtungen”, Vieweg Verlag, Braunschweig/Wiesbaden, 1994)).

[2472] In one embodiment, the present invention relates to a polypeptide encoded by the nucleic acid molecule according to the present invention, preferably conferring the production of or an increase in the fine chemical content in an non-human organism or cell after generating or increasing the expression or activity of said nucleic acid molecule, eithet in the cytosol or in an organelles such as a plastid or mitochondrion or both, preferably in a plastid, or in another embodiment by targeted or non-targeted expression.

[2473] The present invention also relates to a process for the production of a polypeptide according to the present invention, the polypeptide being expressed in a host cell according to the invention, preferably in a microorganism or a plant cell, plant or a part thereof, especially in a transgenic microorganism or a transgenic plant cell, plant or a part thereof.

[2474] In an embodiment, the nucleic acid molecule used in the process for the production of the polypeptide (FCRP) is derived from a microorganism such as a eukaryotic or prokaryotic microorganism, preferably from a eukaryotic microorganism, such as an algae or Saccharomyces cerevisiae; in an embodiment thereof this polypeptide is produced in another microorganism or in another embodiment thereof this polypeptide is produced in a plant cell, plant or a part thereof. In another embodiment, the nucleic acid molecule used in the process for the production of the polypeptide is derived from a plant, in an embodiment thereof the polypeptide is produced in a microorganism or in another embodiment thereof this polypeptide is produced in another plant, a part or cell thereof.

[2475] The skilled worker knows that protein and DNA expressed in different non-human organisms differ in many respects and properties,e. g. DNA modulation and imprinting, such as methylation or post-translational modification, as for example glucosylation, phosphorylation, acetylation, myristoylation, ADP-ribosylation, farnesylation, carboxylation, sulfation, ubiquination, etc. though having the same coding sequence. Preferably, the cellular expression control of the corresponding protein differs accordingly in the control mechanisms controlling the activity and expression of an endogenous protein or another prokaryotic or eukaryotic protein. One major difference between proteins expressed in prokaryotic or eukaryotic organisms is the amount and pattern of glycosylation. For example in E. coli there are no glycosylated proteins. Proteins expressed in yeasts have a high mannose content in the glycosylated proteins, whereas in plants the glycosylation pattern is complex.

[2476] The polypeptide (FCRP) of the present invention is preferably produced by recombinant DNA techniques. For example, a nucleic acid molecule encoding the protein is cloned into a vector (as described above), the vector is introduced into a host cell (as described above) and said polypeptide is expressed in the host cell. Said polypeptide (FCRP) can then be isolated from the cells by an appropriate purification scheme using standard protein purification techniques. Alternative to recombinant expression, the polypeptide or peptide of the present invention can be synthesized chemically using standard peptide synthesis techniques.

[2477] Moreover, a native polypeptide conferring the increase of the respective fine chemical methionine in a non-human organism or a part thereof can be isolated from cells (e.g., endothelial cells), for example using the antibody of the present invention as described below, in particular, an antibody against proteins having (DL)-glycerol-3-phosphatase, 2,3-dihydroxyphenylpropionate 1,2-dioxygenase, 2-oxoglutarate dehydrogenase E1 subunit, 49747384_SOYBEAN-protein, 5′-nucleotidase, acetolactate synthase small subunit, acetyl CoA carboxylase, adenosine kinase, arginine exporter protein, At1g09680-protein, At2g45420-protein, At4g32480-protein, ATP-binding component of a transport system, auxin response factor, b0012-protein, b1003-protein, b1522-protein, b2032-protein, b2345-protein, b2513-protein, b2673-protein, b3246-protein, b3346-protein, b3817-protein, b4029-protein, beta-hydroxylase, bifunctional aspartokinase/homoserine dehydrogenase, calcium-dependent protein kinase, coproporphyrinogen III oxidase, cyclin, cystathionine gamma-synthase, cystathionine-lyase, dihydroxyacid dehydratase, DNA-binding protein, F-box protein, glutaredoxin, glutathione S-transferase, glycogenin, homocitrate synthase, homoserine dehydrogenase, hydrolase, L-serine dehydratase, major facilitator superfamily transporter protein, malic enzyme, membrane transport protein, monothiol glutaredoxin, monthiol glutaredoxin, oxidoreductase, peptidyl-prolyl cistrans isomerase, phosphoadenosine phosphosulfate reductase , Photosystem I reaction center subunit XI, protein kinase, protein phosphatase, pyruvate kinase, Sec-independent protein translocase subunit, serine protease, serine/threonine-protein phosphatase, threonine aldolase, threonine dehydratase, threonine efflux protein, transcription factor, transport protein, uridine/cytidine kinase, valine-pyruvate transaminase, yhl013c-protein, yml084w-protein, yol160w-protein, yor392w-protein, or zinc finger protein activity, respectively, or an antibody against polypeptides as shown in the respective line in Table II, application no. 1, columns 5 or 8, or fragments or homologs thereof which can be produced by standard techniques utilizing the polypeptid of the present invention or fragment thereof, i.e., the polypeptide of this invention (FCRP). Preferred are monoclonal antibodies.

[2478] In an embodiment, the present invention relates to a polypeptide encoded by a nucleic acid molecule of the invention or obtainable by a process of the invention. Said polypeptide confers preferably the aforementioned activity, in particular, the polypeptide confers the generation or the increased production of the fine chemical in a cell or an organsim or a part thereof after generating or increasing the cellular activity, e.g. by generating or increasing the expression or the specific activity of the polypeptide.

[2479] In one embodiment, the present invention relates to a polypeptide as depicted in the respective line in Table II, especially in Table IIA or especially in Table IIB, application no. 1, columns 5 or 8, or fragment or homolog thereof or as coded by the nucleic acid molecule shown in the respective line in Table I, especially Table IA or especially Table IB, application no. 1, columns 5 or 8, preferably the coding region thereof, or fragment or homolog thereof.

[2480] In an embodiment, the present invention relates to a polypeptide comprising or consisting of a consensus sequence shown in the respective line in Table IV, application no. 1, column 8 or at least one polypeptide motif shown in the respective line in Table IV, application no. 1, column 8.

[2481] In an embodiment thereof, the present invention relates to a polypeptide comprising or consisting of a consensus sequence shown in the respective line in Table IV, application no. 1, column 8 or comprising at least one polypeptide motif shown in the respective line in Table IV, application no. 1, column 8, whereby not more than 20, 15, 10, 9, 8, 7, 6, 5, 4, 3, 2, or 1, or 0 of the amino acids can be replaced by any amino acid.

[2482] In another embodiment thereof, the present invention relates to a polypeptide comprising or consisting of a consensus sequence shown in the respective line in Table IV, application no. 1, column 8 or comprising at least one polypeptide motif shown in the respective line in Table IV, application no. 1, column 8, whereby not more than 15%, 10%, 5%, 4%, 3%, 2% or1% or 0% of the amino acids defined as distinct specific amino acids are/is replaced by another amino acid.

[2483] In another embodiment thereof, the present invention relates to a polypeptide comprising or consisting of a consensus sequence shown in the respective line in Table IV, application no. 1, column 8 or comprising at least one polypeptide motif shown in the respective line in Table IV, application no. 1, column 8, whereby not more than 20, 15, 10, 9, 8, 7, 6, 5, 4, 3, 2, or 1, or 0 amino acids are inserted into the consensus sequence or polypeptide motif.

[2484] In an embodiment of the present invention, the polypeptide of the present invention comprises or consists of a consensus sequence or at least one polypeptide motif shown in the respective line in Table IV, application no. 1, column 8, whereby said polypeptide distinguishes over the sequence depicted in the respective line in Table II, application no. 1, columns 5 or 8 by one or more amino acids. In one embodiment, said polypeptide of the invention distinguishes over the sequence shown in the respective line in Table II, application no. 1, columns 5 and 8 by more than 5, 6, 7, 8 or 9 amino acids, preferably by more than 10, 15, 20, 25 or 30 amino acids, even more preferred are more than 40, 50, or 60 amino acids and, preferably, the sequence of the polypeptide of the invention distinguishes from the sequence shown in the respective line in Table II, application no. 1, columns 5 and 8 by not more than 80%, 70%, 60%, 50%, 40%, 30%, 20%, 10%, 5%, 4%, 3%, 2%, 1% or 0.5%. In another embodiment, said polypeptide of the invention does not consist of the sequence shown in the respective line in Table II, application no. 1, columns 5 and 8.

[2485] In an embodiment, the invention relates to a polypeptide conferring an increase in the respective fine chemical methionine in a non-human organism, especially a microorganism or a plant, or a part thereof, being encoded by the nucleic acid molecule of the invention or used in the process of the invention and having a sequence which distinguishes over the sequence as shown in the respective line in Table II, application no. 1, columns 5 or 8 by one or more amino acids (but not exceeding 5%, preferably 4%, 3%, 2%, 1%, 0.5%, 0.2% or 0.1%). In an embodiment, said polypeptide of the invention does not comprise or consist of the sequence shown in the respective line in Table II, application no. 1, columns 5 or 8. In an embodiment, said polypeptide of the present invention is less than 100%, 99.999%, 99.99%, 99.9% or 99% identical. In one embodiment, said polypeptide which differs at least in one or more amino acids (but not exceeding 5%, preferably 4%, 3%, 2%, 1%, 0.5%, 0.2% or 0.1%) from the polypeptide shown in the respective line in Table II, application no. 1, columns 5 and 8 does not comprise a protein of the sequence shown in the respective line in Table II A and/or II B, application no. 1, columns 5 or 8.

[2486] In an embodiment, the present invention relates to a polypeptide having the activity of the protein as shown in the respective line in Table II, application no. 1, column 3, which distinguishes over the sequence depicted in the respective line in Table II, application no. 1, columns 5 or 8 by one or more amino acids, preferably by more than 5, 6, 7, 8 or 9 amino acids, preferably by more than 10, 15, 20, 25 or 30 amino acids, evenmore preferred are more than 40, 50, or 60 amino acids and, preferably, the sequence of the polypeptide of the invention distinguishes from the sequence shown in the respective line in Table II, application no. 1, columns 5 and 8 by not more than 80%, 70%, 60%, 50%, 40%, 30%, 20%, 10%, 5%, 4%, 3%, 2%, 1% or 0.5%.

[2487] In another embodiment the polypeptide of the invention takes the form of a preprotein consisting of a plastidial or mitochondrial transit peptide joint to a polypeptide having the activity of the protein as shown in Table II, column 3, from which the transit peptide is preferably cleaved off upon transport of the preprotein into the organelle for example into the plastid or mitochondrion.

[2488] In another embodiment the polypeptide of the invention takes not the form of a preprotein.

[2489] The terms “protein” and “polypeptide” used in this application are interchangeable. “Polypeptide” refers to a polymer of amino acids (amino acid sequence) and does not refer to a specific length of the molecule. Thus peptides and oligopeptides are included within the definition of polypeptide. This term does also refer to or include post-translational modifications of the polypeptide, for example, glycosylations, acetylations, phosphorylations and the like. Included within the definition are, for example, polypeptides containing one or more analogs of an amino acid (including, for example, unnatural amino acids, etc.), polypeptides with substituted linkages, as well as other modifications known in the art, both naturally occurring and non-naturally occurring.

[2490] Another aspect of the present invention pertains to isolated FCRP, or biologically active portions thereof. An “isolated” or “purified” protein or biologically active portion thereof is substantially free of cellular material when produced by recombinant DNA techniques or chemical precursors or other chemicals when chemically synthesized.

[2491] The language “substantially free of cellular material” includes preparations of the polypeptide of the invention in which the protein is separated from cellular components of the cells in which it is naturally or recombinantly produced. In an embodiment, the language “substantially free of cellular material” includes preparations having less than about 30% (by dry weight) of “contaminating protein”, more preferably less than about 20% of “contaminating protein”, still more preferably less than about 10% of “contaminating protein”, and most preferably less than about 5% “contaminating protein”. The term “contaminating protein” relates to polypeptides, which differ from the polypeptide in question of the present invention. When the polypeptide of the present invention or biologically active portion thereof is recombinantly produced, it is also preferably substantially free of culture medium, i.e., culture medium represents less than about 20%, more preferably less than about 10%, and most preferably less than about 5% of the volume of the protein preparation. The language “substantially free of chemical precursors or other chemicals” includes preparations in which the polypeptide of the present invention is separated from chemical precursors or other chemicals, which are involved in the synthesis of the protein. The language “substantially free of chemical precursors or other chemicals” includes preparations having less than about 30% (by dry weight) of chemical precursors, other chemicals or other proteins, which differ from the polypeptide in question. Other chemical precursors, other chemicals or other proteins, which are not identical to the proteins as shown in the respective line in Table II, column 5 or 8, or fragments or homologs thereof, are all collectevly named as impurities. The term “chemical precursors” shall mean in the sense of the specification chemical substances, which are intermediates of the biochemical pathway within the organism or within the cell(s) of the non-human organism for example glucose-6-phoshat, citrate, fumarate, homoserine etc. The term “other chemicals” shall mean in the sense of the specification chemical substances, which are endproducts of the biochemical pathway within the organism or within the cell(s) of the organism for example amino acids such as lysine, alanine etc; fatty acids such as linolenic acid, eicosapantaenoic acid etc, sugars such as glucose, mannose, ribose, desoxy ribose etc, vitamins such as vitamin C, vitamin B2 etc. and all other chemical substances of the cell. The term “other proteins” shall mean in the sense of the specification all other proteins, which are not identical to the proteins mentioned in the respective line in Table II, columns 5 or 8, or fragments or homologs thereof. The fine chemical preparations advantageously shall have less than about 25% impurities, preferably less than about 20% impurities, still more preferably less than about 10% impurities, and most preferably less than about 5% impurities. In preferred embodiments, isolated proteins or biologically active portions thereof lack contaminating proteins from the same organism from which the polypeptide of the present invention is derived. Typically, such proteins are produced by recombinant techniques.

[2492] A polypeptide of the invention can participate in the process of the present invention. The polypeptide or a portion thereof comprises preferably an amino acid sequence, which is sufficiently homologous to an amino acid sequence shown in the respective line in Table II A and/or II B, application no. 1, columns 5 or 8.

[2493] Further, the polypeptide can have an amino acid sequence which is encoded by a nucleotide sequence which hybridizes, preferably hybridizes under stringent conditions as described above, to a nucleotide sequence of the nucleic acid molecule of the present invention. Accordingly, the polypeptide has an amino acid sequence which is encoded by a nucleotide sequence that is at least about 35%, 40%, 45%, 50%, 55%, 60%, 65%, 70%, 75%, 80%, 85%, 90%, 91%, 92%, 93%, 94%, 95%, 96%, 97%, 98%, 99%, 99.5% or more homologous to one of the amino acid sequences as shown in the respective line in Table II A and/or II B, application no. 1, columns 5 or 8, or fragments thereof. The preferred polypeptide of the present invention preferably possesses at least one of the activities according to the invention and described herein. A preferred polypeptide of the present invention includes an amino acid sequence encoded by a nucleotide sequence which hybridizes, preferably hybridizes under stringent conditions, to a nucleotide sequence shown in the respective line in Table I A and/or I B, application no. 1, columns 5 or 8, preferably the coding region thereof, or fragments thereto or which is homologous thereto, as defined above.

[2494] The polypeptide of the present invention can vary from the sequences shown in the respective line in Table II A and/or II B, application no. 1, columns 5 or 8 in amino acid sequence due to natural variation or mutagenesis, as described in detail herein. Accordingly, the polypeptide comprise an amino acid sequence which is at least about 35%, 40%, 45%, 50%, 55%, 60%, 65%, 70%, 75%, 80%, 85% or 90, 91%, 92%, 93%, 94%, 95%, 96%, 97%, 98%, 99%, 99.5% or more homologous to an entire amino acid sequence shown in the respective line in Table II A and/or II B, application no. 1, columns 5 or 8.

[2495] Biologically active portions of a polypeptide of the present invention include peptides comprising amino acid sequences derived from the amino acid sequence of the polypeptide of the present invention or used in the process of the present invention, e.g., the amino acid sequence shown in the respective line in Table II, application no. 1, columns 5 or 8 or the amino acid sequence of a protein homologous thereto, which include fewer amino acids than a full length polypeptide of the present invention or used in the process of the present invention or the full length protein which is homologous to a polypeptide of the present invention or used in the process of the present invention depicted herein, and exhibit at least one activity of a polypeptide of the present invention or used in the process of the present invention.

[2496] Typically, biologically (or immunologically) active portions of i.e. peptides are, for example, 5, 10, 15, 20, 30, 35, 36, 37, 38, 39, 40, 50, 75, 100, 125, 150 or more amino acids in length; especially they comprise a domain or motif with at least one activity or epitope of a polypeptide of the present invention or used in the process of the present invention. Moreover, other biologically active portions, in which other regions of the polypeptide are deleted, can be prepared by recombinant techniques and evaluated for one or more of the activities described herein.

[2497] Manipulation of the nucleic acid molecule of the invention may result in the production of a protein having differences from the protein as shown in the respective line in

[2498] Table II, application no. 1, column 5 or 8. Differences shall mean at least one amino acid different from the sequences as shown in the respective line in Table II, application no. 1, column 5 or 8, preferably at least 2, 3, 4, 5, 6, 7, 8, 9 or 10 amino acids (especially but not exceeding 0.1%, preferably 0.2%, 0.5%, 1%, 2%, 3% 4% or 5%), more preferably at least 15, 20, 25, 30, 35, 40, 45 or 50 amino acids (especially but not exceeding 0.5%, preferably 1%, 2%, 3% 4%, 5%, 10% or 25%) different from the sequences as shown in the respective line in Table II, application no. 1, column 5 or 8. These proteins may be improved in efficiency or activity, or may be more stable and therefore present in greater numbers in the cell as compared to the wild-type cell.

[2499] Any mutagenesis strategies for the polypeptide of the present invention or the polypeptide used in the process of the present invention to result in increasing said activity are not meant to be limiting; variations on these strategies will be readily apparent to one skilled in the art. Using such strategies, and incorporating the mechanisms disclosed herein, the nucleic acid molecule and polypeptide of the invention may be utilized to generate algae, ciliates, fungi, other microorganisms like C. glutamicum or plants or parts thereof, expressing proteins as shown in the respective line in Table II, application no. 1, column 5 or 8, or mutated proteins thereof. The nucleic acid molecules and polypeptide molecules of the invention are expressed such that the yield, production, and/or efficiency of production of a desired compound is improved.

[2500] This desired compound may be any natural product of the respective non-human organism, especially a microorganism or a plant, which includes the final products of biosynthesis pathways and intermediates of naturally-occurring metabolic pathways, as well as molecules which do not naturally occur in the metabolism of said cells of said non-human organism, but which are produced by said cells of the invention.

[2501] The invention also provides chimeric or fusion proteins.

[2502] As used herein, a “chimeric protein” or “fusion protein” comprises a polypeptide of the present invention operatively linked to a polypeptide whereby the latter does not confer on its own above-mentioned activity, in particular, which does not confer an increase of content of the fine chemical in a cell or a non-human organism or a part thereof, if its activity is increased.

[2503] In one embodiment, a protein (=polypeptide) as shown in the respective line in Table II, application no. 1, column 5 or 8 refers to a polypeptide having an amino acid sequence orresponding to the polypeptide of the invention, especially to a polypeptide as shown in Table II, application no. 1, colunms 5 or 8 or homologs thereof, or used in the process of the invention, whereas a “non- inventive protein or polypeptide” or “other polypeptide” refers to a polypeptide having an amino acid sequence corresponding to a protein which is not substantially homologous to a polypeptide of the invention, preferably which is not substantially homologous to a polypeptide or protein as shown in the respective line in Table II, application no. 1, column 5 or 8 or homologs thereof, e.g., a protein which does not confer the activity described herein and which is derived from the same or a different organism.

[2504] Within the fusion protein, the term “operatively linked” is intended to indicate that the polypeptide of the invention or a polypeptide used in the process of the invention and the “other polypeptide” or a part thereof are fused to each other so that both sequences fulfil the proposed function addicted to the sequence used. The “other polypeptide” can be fused to the N-terminus or C-terminus preferable to the C-terminus of the polypeptide of the invention or used in the process of the invention. For example, in one embodiment the fusion protein is a GST-LMRP fusion protein in which the sequences of the polypeptide of the invention or the polypeptide used in the process of the invention are fused to the C-terminus of the GST sequences. Such fusion proteins can facilitate the purification of recombinant polypeptides of the invention or a poylpeptide usefull in the process of the invention.

[2505] In another preferred embodiment, the fusion protein is a polypeptide of the invention or a polypeptide used in the process of the invention containing a heterologous signal sequence, preferably at its N-terminus. In certain host cells (e.g., mammalian host cells), expression and/or secretion of a polypeptide of the invention or a poylpeptide used in the process of the invention can be increased through use of a heterologous signal sequence. As already mentioned above, targeting sequences, are required for targeting the gene product into specific cell compartment (for a review, see Kermode, Crit. Rev. Plant Sci. 15 (4),285 (1996) and references cited therein), for example into the vacuole, the nucleus, all types of plastids, such as amyloplasts, chloroplasts, chromoplasts, the extracellular space, the mitochondria, the endoplasmic reticulum, elaioplasts, peroxisomes, glycosomes, and other compartments of cells or extracellular. Sequences, which must be mentioned in this context are, in particular, the signal-peptide- or transit-peptide-sequences which are known by the person skilled in the art. For example, plastid or mitochondrial-transit-peptide- sequences enable the targeting of the expression product into the plastids or the mitochondria, respectively, of a plant cell or the mitochondria of a microorganism. Targeting sequences are especially known for eukaryotic and to a lower extent for prokaryotic organisms and can advantageously be operable linked with the nucleic acid molecule of the present invention to achieve an expression in one of said compartments or extracellular.

[2506] Preferably, a chimeric or fusion protein of the invention is produced by standard recombinant DNA techniques. For example, DNA fragments coding for the different polypeptide sequences are ligated together in-frame in accordance with conventional techniques, for example by employing blunt-ended or stagger-ended termini for ligation, restriction enzyme digestion to provide for appropriate termini, filling-in of cohesive ends as appropriate, alkaline phosphatase treatment to avoid undesirable joining, and enzymatic ligation. The fusion gene can be synthesized by conventional techniques including automated DNA synthesizers. Alternatively, PCR amplification of gene fragments can be carried out using anchor primers, which give rise to complementary overhangs between two consecutive gene fragments which can subsequently be annealed and reamplified to generate a chimeric gene sequence (see, for example, Current Protocols in Molecular Biology, eds. Ausubel et al. John Wiley & Sons (1992)). Moreover, many expression vectors are commercially available that already encode a fusion moiety (e.g., a GST polypeptide). The nucleic acid molecule of the invention can be cloned into such an expression vector such that the fusion moiety is linked in-frame to the encoded protein.

[2507] Furthermore, folding simulations and computer redesign of structural motifs of the protein of the invention can be performed using appropriate computer programs (Olszewski, Proteins 25, 286 (1996); Hoffman, Comput. Appl. Biosci. 11, 675 (1995)). Computer modeling of protein folding can be used for the conformational and energetic analysis of detailed peptide and protein models (Monge, J. Mol. Biol. 247, 995 (1995); Renouf, Adv. Exp. Med. Biol. 376, 37 (1995)). The appropriate programs can be used for the identification of interactive sites the polypeptide of the invention or polypeptides used in the process of the invention and its substrates or binding factors or other interacting proteins by computer assistant searches for complementary peptide sequences (Fassina, Immunomethods 114 (1994)). This can be used to identify motifs and domains of the polypeptides according to the present invention or used in the process of the present invention. Further appropriate computer systems for the design of protein and peptides are described in the prior art, for example in Berry, Biochem. Soc. Trans. 22, 1033 (1994); Wodak, Ann. N.Y. Acad. Sci. 501, 1 (1987); Pabo, Biochemistry 25, 5987 (1986). The results obtained from the above-described computer analysis can be used for, e.g., the preparation of peptidomimetics of the protein of the invention or fragments thereof. Such pseudopeptide analogues of the natural amino acid sequence of the protein may very efficiently mimic the parent protein (Benkirane, J. Biol. Chem. 271, 33218 (1996)). For example, the replacement of Gly-Gly in a protein of the present invention or a fragment thereof by the easily available achiral omega-amino acid delta-amino valeric acid results in the substitution of —CH₂CONHCH₂— by —CH₂CH₂CH₂CH₂—, thereby providing a replacement of an amido group by an ethylen group, and a convenient strategy for constructing a peptidomimetic (Banerjee, Biopolymers 39, 769 (1996)).

[2508] Furthermore, a three-dimensional and/or crystallographic structure of the protein of the invention or used in the process of the present invention and the identification of motifs and/or interactive sites of the polypeptide of the invention or used in the process of the present invention and its substrates or binding factors can be used for the design of mutants with modulated binding or turnover activities. For example, the active center of the polypeptide of the present invention can be modelled and amino acids participating in the catalytic reaction can be modulated to increase or decrease the binding of the substrate to activate or improve the polypeptide. The identification of the active center, respective motifs and the amino acids involved in the catalytic reaction facilitates the screening for mutants having an increased activity.

[2509] Another embodiment of the invention relates to an antibody, which binds specifically to the polypeptide according to the invention or a portion thereof, i.e. specific fragments or epitopes of such a polypeptide.

[2510] The antibodies of the invention can be used to identify and isolate the polypeptide according to the invention in any organism, preferably microorganism or plants. These antibodies can be monoclonal antibodies, polyclonal antibodies or synthetic antibodies as well as fragments of antibodies, such as Fab, Fv or scFv fragments etc. Antibodies can be made by many well-known methods (see, e.g. Harlow and Lane, “Antibodies; A Laboratory Manual”, Cold Spring Harbor Laboratory, Cold Spring Harbor, N.Y., (1988)). Briefly, purified antigen can be injected into an animal in an amount and in intervals sufficient to elicit an immune response. Antibodies can either be purified directly, or spleen cells can be obtained from the animal. The cells can then be fused with an immortal cell line and screened for antibody secretion. The antibodies can be used to screen nucleic acid clone libraries for cells secreting the antigen. Those positive clones can then be sequenced. See, for example, Kelly et al., Bio/Technology 10, 163 (1992); Bebbington et al., Bio/Technology 10, 169 (1992).

[2511] As the nucleic acid molecules of the invention and/or to expression thereof is related to the synthesis of the respective fine chemical methionine its function as a probe extends to the detection of microorganisms, plant tissues, plants, plant variets, plant ecotypes or plant genera with varying, advantageously increased, capability or potential for synthesis of the respective fine chemical methionine. Therefore in one embodiment the present invention relates to a method for analyzing the capability or potential of a plant tissue, a plant, a plant variety or ecotype to produce the respective fine chemical methionine by using the respective antibody of the invention as a probe to detect the amount of the polypeptide encoded by said nucleic acid molecule of the invention in a non-human organism in comparision to another organism.

[2512] Therefore in one embodiment the invention relates to a method to probe a non-human organism for its capability for the production of the respective fine chemical comprising the steps of
[2513] a) analyzing the sequence and/or the expression of the respective nucleic acid molecule of the invention in least two non-human organisms which differ in the capability to produce the respective fine chemical;
[2514] b) associate thedifferent sequence and/or expression level of the nucleic acid molecules of the invention with their different capability to produce the respective fine chemical;
[2515] c) analyse the sequence and/or the expression of the nucleic acid molecule of the invention in at least a third non-human organism;
[2516] d) predict the capability of the at least third organism to produce the respective fine chemical based by comparing the sequence and/or expression of the nucleic acid of the invention to the sequences and/or expression levels of the nucleic acid molecule of the invention of the at least two organisms analyzed in step a.

[2517] The phrases “selectively binds” and “specifically binds” with the polypeptide refer to a binding reaction that is determinative of the presence of the polypeptide in a heterogeneous population of polypeptides and other biologics. Thus, under designated immunoassay conditions, the specified antibodies bound to a particular polypeptide do not bind in a significant amount to other polypeptides present in the sample. Selective binding of an antibody under such conditions may require an antibody that is selected for its specificity for a particular polypeptide. A variety of immunoassay formats may be used to select antibodies that selectively bind with a particular polypeptide. For example, solid-phase ELISA immunoassays are routinely used to select antibodies selectively immunoreactive with a polypeptide. See Harlow and Lane, “Antibodies, A Laboratory Manual,” Cold Spring Harbor Publications, New York, (1988), for a description of immunoassay formats and conditions that could be used to determine selective binding.

[2518] In some instances, it is desirable to prepare monoclonal antibodies from various hosts. A description of techniques for preparing such monoclonal antibodies may be found in Stites et al., eds., “Basic and Clinical Immunology,” (Lange Medical Publications, Los Altos, Calif., Fourth Edition) and references cited therein, and in Harlow and Lane, “Antibodies, A Laboratory Manual,” Cold Spring Harbor Publications, New York (1988).

[2519] Gene expression in non-human organism, like microorganism or plants, especially plants, is regulated by the interaction of protein transcription factors with specific nucleotide sequences within the regulatory region of a gene. One example of transcription factors are polypeptides that contain zinc finger (ZF) motifs. Each ZF module is approximately 30 amino acids long and folds around a zinc ion. The DNA recognition domain of a ZF protein is an α-helical structure that inserts into the major groove of the DNA double helix. The module contains three amino acids that bind to the DNA with each amino acid contacting a single base pair in the target DNA sequence. ZF motifs are arranged in a modular repeating fashion to form a set of fingers that recognize a contiguous DNA sequence. For example, a three-fingered ZF motif will recognize 9 by of DNA. Hundreds of proteins have been shown to contain ZF motifs with between 2 and 37 ZF modules in each protein (Isalan M. et al., Biochemistry 37 (35), 12026 (1998); Moore M. et al., Proc. Natl. Acad. Sci. USA 98 (4), 1432 (2001) and Moore M. et al., Proc. Natl. Acad. Sci. USA 98 (4), 1437 (2001); U.S Pat. No. 6,007,988 and U.S Pat. No. 6,013,453).

[2520] The regulatory region of a gene contains many short DNA sequences (cis-acting elements) that serve as recognition domains for transcription factors, including ZF proteins. Similar recognition domains in different genes allow the coordinate expression of several genes encoding enzymes in a metabolic pathway by common transcription factors. Variation in the recognition domains among members of a gene family facilitates differences in gene expression within the same gene family, for example, among tissues and stages of development and in response to environmental conditions.

[2521] Typical ZF proteins contain not only a DNA recognition domain but also a functional domain that enables the ZF protein to activate or repress transcription of a specific gene. Experimentally, an activation domain has been used to activate transcription of the target gene (U.S Pat. No. 5,789,538 and patent application WO 95/19431), but it is also possible to link a transcription repressor domain to the ZF and thereby inhibit transcription (WO 00/47754 and WO 01/002019). It has been reported that an enzymatic function such as nucleic acid cleavage can be linked to the ZF (WO 00/20622).

[2522] The invention provides a method that allows one skilled in the art to isolate the regulatory region of one or more FCRP encoding genes from the genome of a non-human organism, preferably a plant cell and to design zinc finger transcription factors linked to a functional domain that will interact with the regulatory region of the gene. The interaction of the zinc finger protein with the gene can be designed in such a manner as to alter expression of the gene and preferably thereby to confer the production or the increased production of the fine chemical as compared to a corresponding, e.g. non-transformed, wild type non-human organism, like a microorganism or a plant cell, plant or part thereof.

[2523] A further embodiment of the invention also relates to a method for the generation of a transgenic host or host cell, e.g. a eukaryotic or prokaryotic cell, preferably a transgenic microorganism, a transgenic plant cell or a transgenic plant tissue or a transgenic plant, which comprises introducing, into the plant cell, the plant or a part thereof , the nucleic acid molecule according to the invention, the nucleic acid construct according to the invention or the vector according to the invention or the expression cassette according to the invention.

[2524] A further embodiment of the invention also relates to a method for the stable generation of a host or host cell, prokaryotic or eukaryotic cell, preferably a transgenic microorganism such as a transgenic algae, a transgenic plant cell or a transgenic plant or a transgenic part thereof, which comprises introducing, into the plant cell, the plant or a part thereof, the nucleic acid construct according to the invention, the vector according to the invention, the expression cassette according to the invention, or the nucleic acid molecule according to the invention, whereby the introduction of the nucleic acid molecule, nucleic acid construct, expression cassette and/or vector is in such manner that the transformants are stable during the propagation of the host in respect of the introduced nucleic acid molecules, nucleic acid construct, expression cassette and/or vector.

[2525] A further embodiment of the invention also relates to a method for the transient generation of a host or host cell, prokaryotic or eukaryotic cell, preferably a transgenic microorganism such as a transgenic algae, a transgenic plant cell or a transgenic plant or a transgenic part thereof, which comprises introducing, into the plant cell, the plant or a part thereof, the nucleic acid construct according to the invention, the vector according to the invention, the expression cassette according to the invention or the nucleic acid molecule according to the invention, whereby the introduced nucleic acid molecule, nucleic acid construct, expression cassette and/or vector is not integrated into the genome of the host or host cell. Therefore the transformants are not stable during the propagation of the host in respect of the introduced nucleic acid molecules, nucleic acid construct, expressions cassette and/or vector.

[2526] In the process according to the invention, transgenic non-human organisms are also to be understood as meaning—if they take the form of plants—plant cells, plant tissues, plant organs such as root, shoot, stem, seed, flower, tuber or leaf, or intact plants which are grown for the production of the fine chemical.

[2527] Growing is to be understood as meaning for example culturing the transgenic plant cells, plant tissue or plant organs on or in a nutrient medium or the intact plant or part thereof on or in a substrate, for example in hydroponic culture, potting compost or on a field soil.

[2528] In a further advantageous embodiment of the process, the nucleic acid molecules can be expressed in single-celled plant cells (such as algae), see Falciatore et al., Marine Biotechnology 1 (3), 239 (1999), and references cited therein, and plant cells from higher plants (for example spermatophytes such as crops). Examples of plant expression vectors encompass those which are described in detail herein or in D. Becker, Plant Mol. Biol. 20,1195 (1992), M. W Bevan, [Nucl. Acids Res. 12, 8711(1984), and in “Vectors for Gene Transfer in Higher Plants” in: Transgenic Plants, Vol. 1, Engineering and Utilization, eds. S. D. Kung and R. Wu, Academic Press, 1993, pp. 15-38]. An overview of binary vectors and their use is also found in R. Hellens, Trends in Plant Science,5 (10), 446 (2000).

[2529] Vector DNA can be introduced into prokaryotic or eukaryotic cells via conventional transformation or transfection techniques. The terms “transformation” and “transfection” include conjugation and transduction and, as used in the present context, are intended to encompass a multiplicity of prior-art methods for introducing foreign nucleic acid molecules (for example DNA) into a host cell, including calcium phosphate coprecipitation or calcium chloride coprecipitation, DEAE-dextran-mediated transfection, PEG-mediated transfection, lipofection, natural competence, chemically mediated transfer, electroporation or particle bombardment. Suitable methods for the transformation or transfection of host cells, including plant cells, can be found in Sambrook et al. (Molecular Cloning: A Laboratory Manual., 2^{nd} Ed., Cold Spring Harbor Laboratory, Cold Spring Harbor Laboratory Press, Cold Spring Harbor, N.Y., 1989) and in other laboratory handbooks such as Methods in Molecular Biology, 1995, Vol. 44, Agrobacterium protocols, eds. Gartland and Davey, Humana Press, Totowa, N.J.

[2530] The above-described methods for the transformation and, if desired, regeneration of plants from plant cells, plant tissues or parts of a plant are exploited for transient or stable transformation of plants. Suitable methods are the transformation of protoplasts by polyethylene-glycol-induced DNA uptake, the biolistic method with the gene gun—known as the particle bombardment method—, electroporation, the incubation of dry embryos in DNA-containing solution, microinjection and the Agrobacterium-mediated gene transfer. The above-mentioned methods are described for example in B. Jenes, Techniques for Gene Transfer, in: Transgenic Plants, Vol. 1, Engineering and Utilization, edited by Kung S. D. and Wu R., Academic Press, pp. 128-143 (1993) and in Potrykus, Annu. Rev. Plant Physiol. Plant Molec. Biol. 42, 205 (1991). The construct to be expressed is preferably cloned into a vector, which is suitable for transforming Agrobacterium tumefaciens, for example pBin19 (Bevan, Nucl. Acids Res. 12, 8711 (1984)). Agrobacteria transformed with such a vector can then be used in the known manner for the transformation of plants, in particular crop plants, such as, for example, tobacco plants, for example by bathing scarified leaves or leaf segments in an agrobacterial solution and subsequently culturing them in suitable media. The transformation of plants with Agrobacterium tumefaciens is described for example by Hofgen and Willmitzer in Nucl. Acid Res. 16, 9877 (1988) or known from, inter alia, White F. F., “Vectors for Gene Transfer in Higher Plants” in Transgenic Plants, Vol. 1, Engineering and Utilization, edited by Kung S. D. and Wu R., Academic Press, 1993, pp. 15-38. Alternatively the construct to be expressed can be cloned into vectors suitable for plastid transformation, as for example described in WO 2004/029256, WO 20040/04445 or Dufourmantel et al., Plant Mol. Biol. 55, 479 (2004).

[2531] To select for the successful transfer of the nucleic acid molecule, vector or nucleic acid construct of the invention according to the invention into a host organism, it is advantageous to use marker genes as have already been described above in detail. It is known of the stable or transient integration of nucleic acids into plant cells that only a minority of the cells takes up the foreign DNA and, if desired, integrates it into its genome, depending on the expression vector used and the transfection technique used. To identify and select these integrants, a gene encoding for a selectable marker (as described above, for example resistance to antibiotics) is usually introduced into the host cells together with the gene of interest. Preferred selectable markers in plants comprise those, which confer resistance to an herbicide such as glyphosate or gluphosinate. Other suitable markers are, for example, markers, which encode genes involved in biosynthetic pathways of, for example, sugars or amino acids, such as β-galactosidase, ura3 or ilv2. Markers, which encode genes such as luciferase, gfp or other fluorescence genes, are likewise suitable. These markers and the aforementioned markers can be used in mutants in which these genes are not functional since, for example, they have been deleted by conventional methods. Furthermore, nucleic acid molecules, which encode a selectable marker, can be introduced into a host cell on the same vector as those, which encode the polypeptides of the invention or used in the process or else in a separate vector. Cells which have been transfected stably with the nucleic acid introduced can be identified for example by selection (for example, cells which have integrated the selectable marker survive whereas the other cells die).

[2532] Since the marker genes, as a rule specifically the gene for resistance to antibiotics and herbicides, are no longer required or are undesired in the transgenic host cell once the nucleic acids have been introduced successfully, the process according to the invention for introducing the nucleic acids advantageously employs techniques which enable the removal, or excision, of these marker genes. One such a method is what is known as cotransformation. The cotransformation method employs two vectors simultaneously for the transformation, one vector bearing the nucleic acid according to the invention and a second bearing the marker gene(s). A large proportion of transformants receives or, in the case of plants, comprises (up to 40% of the transformants and above), both vectors. In case of transformation with Agrobacteria, the transformants usually receive only a part of the vector, the sequence flanked by the T-DNA, which usually represents the expression cassette. The marker genes can subsequently be removed from the transformed plant by performing crosses. In another method, marker genes integrated into a transposon are used for the transformation together with desired nucleic acid (known as the Ac/Ds technology). The transformants can be crossed with a transposase resource or the transformants are transformed with a nucleic acid construct conferring expression of a transposase, transiently or stable. In some cases (approx. 10%), the transposon jumps out of the genome of the host cell once transformation has taken place successfully and is lost. In a further number of cases, the transposon jumps to a different location. In these cases, the marker gene must be eliminated by performing crosses. In microbiology, techniques were developed which make possible, or facilitate, the detection of such events. A further advantageous method relies on what are known as recombination systems, whose advantage is that elimination by crossing can be dispensed with. The best-known system of this type is what is known as the Cre/lox system. Cre1 is a recombinase, which removes the sequences located between the loxP sequences. If the marker gene is integrated between the loxP sequences, it is removed, once transformation has taken place successfully, by expression of the recombinase. Further recombination systems are the HIN/HIX, FLP/FRT and REP/STB system (Tribble et al., J. Biol. Chem., 275, 22255 (2000); Velmurugan et al., J. Cell Biol., 149, 553 (2000)). A site-specific integration into the plant genome of the nucleic acid sequences according to the invention is possible. Naturally, these methods can also be applied to microorganisms such as yeast, fungi or bacteria. Also methods for the production of marker-free plastid transformants using a transiently cointegrated selection gene have been described for example by Koop et al., Nature Biotechology, 22 (2), 225 (2004).

[2533] Agrobacteria transformed with an expression vector according to the invention may also be used in the manner known per se for the transformation of plants such as experimental plants like Arabidopsis or crop plants, such as, for example, cereals, maize, oats, rye, barley, wheat, soya, rice, cotton, sugarbeet, canola, sunflower, flax, hemp, potato, tobacco, tomato, carrot, bell peppers, oilseed rape, tapioca, cassava, arrow root, tagetes, alfalfa, lettuce and the various tree, nut, and grapevine species, in particular oil-containing crop plants such as soya, peanut, castor-oil plant, sunflower, maize, cotton, flax, oilseed rape, coconut, oil palm, safflower (Carthamus tinctorius) or cocoa beans, or in particular crop plants, like cereals, maize, oats, rye, barley, wheat, soya, rice, cotton, sugarbeet, canola, sunflower, potato or oilseed rape, for example by bathing scarified leaves or leaf segments in an agrobacterial solution and subsequently growing them in suitable media.

[2534] In addition to the transformation of somatic cells, which then have to be regenerated into intact plants, it is also possible to transform the cells of plant meristems and in particular those cells which develop into gametes. In this case, the transformed gametes follow the natural plant development, giving rise to transgenic plants. Thus, for example, seeds of Arabidopsis are treated with agrobacteria and seeds are obtained from the developing plants of which a certain proportion is transformed and thus transgenic (Feldman K. A. and Marks M. D., Mol. Gen. Genet. 208, 274 (1987), Feldmann K . in: Koncz C., Chua N.-H. and Shell J., eds., “Methods in Arabidopsis Research”, Word Scientific, Singapore, (1992) pp. 274-289). Alternative methods are based on the repeated removal of the influorescences and incubation of the excision site in the center of the rosette with transformed agrobacteria, whereby transformed seeds can likewise be obtained at a later point in time (Chang, Plant J., 5, 551 (1994), Katavic, Mol. Gen. Genet. 245, 363 (1994)). However, an especially effective method is the vacuum infiltration method with its modifications such as the “floral dip” method. In the case of vacuum infiltration of Arabidopsis, intact plants under reduced pressure are treated with an agrobacterial suspension (Bechthold N., C. R. Acad. Sci. Paris Life Sci, 316, 1194 (1993)), while in the case of the“floral dip” method the developing floral tissue is incubated briefly with a surfactant-treated agrobacterial suspension (Clough S. J., and Bent A. F., Plant J. 16, 735 (1998)). A certain proportion of transgenic seeds are harvested in both cases, and these seeds can be distinguished from non-transgenic seeds by growing under the above-described selective conditions. In addition the stable transformation of plastids is of advantages because plastids are inherited maternally in most crops reducing or eliminating the risk of transgene flow through pollen. The transformation of the chloroplast genome is generally achieved by a process, which has been schematically displayed in Klaus et al., (Nature Biotechnology 22 (2), 225 (2004)). Briefly the sequences to be transformed are cloned together with a selectable marker gene between flanking sequences homologous to the chloroplast genome. These homologous flanking sequences direct site specific integration into the plastome. Plastidal transformation has been described for many different plant species and an overview can be taken from Bock R., J. Mol. Biol. 312 (3), 425 (2001) or Maliga P., Trends Biotechnol. 21, 20 (2003). Further biotechnological progress has recently been reported in form of marker free plastid transformants, which can be produced by a transient cointegrated maker gene (Klaus et al., Nature Biotechnology 22 (2), 225 (2004)).

[2535] The genetically modified plant cells can be regenerated via all methods with which the skilled worker is familiar. Suitable methods can be found in the above-mentioned publications by Kung S. D. and Wu R., Potrykus or Höfgen and Willmitzer.

[2536] Accordingly, the present invention thus also relates to a plant cell comprising the nucleic acid construct according to the invention, the expression cassette according to the invention, the nucleic acid molecule according to the invention or the vector according to the invention, as well as a process to generate such a plant cell.

[2537] Accordingly the present invention relates to any cell transgenic for any nucleic acid characterized as part of the invention, e.g. conferring the increase of the respective fine chemical methionine in a cell or a non-human organism or a part thereof, e.g. the nucleic acid molecule of the invention, the nucleic acid construct of the invention, the vector of the invention, the expression cassette according to the invention, or a nucleic acid molecule encoding the polypeptide of the invention, e.g. encoding a polypeptide having an activity as the protein as shown in the respective line in Table II, application no. 1, column 3. Due to the above-mentioned activity the respective fine chemical methionine content in a cell or a non-human organism is increased. For example, due to modulation or manupulation, the cellular activity is increased, in a preferred embodiment in organelles such as plastids or mitochondria, e.g. due to an increased expression or specific activity or specific targeting of the subject matters of the invention in a cell or a non-human organism or a part thereof especially in organelles such as plastids or mitochondria, or in another embodiment in the cytosol. Transgenic for a polypeptide having a protein or a protein activity means herein that due to modulation or manipulation of the genome, the activity of protein as shown in the respective line in Table II, application no. 1, column 3 or a protein as shown in the respective line in Table II, application no. 1, column 3-like activity is increased in the cell or non-human organism or part thereof, especially in organelles such as plastids or mitochondria, or especuially in the cytosol. Examples are described above in context with the process of the invention.

[2538] “Transgenic”, for example regarding a nucleic acid molecule, a nucleic acid construct, an expression cassette or a vector comprising said nucleic acid molecule or a non-human organism transformed with said nucleic acid molecule, nucleic acid construct, expression casette or vector, refers to all those subjects originating by recombinant methods in which either
[2539] a) the nucleic acid sequence, or
[2540] b) a genetic control sequence linked operably to the nucleic acid sequence, for example a promoter, or
[2541] c) (a) and (b);
   are not located in their natural genetic environment or have been modified by recombinant methods, an example of a modification being a substitution, addition, deletion, inversion or insertion of one or more nucleotide residues. Natural genetic environment refers to the natural chromosomal locus in the organism of origin, or to the presence in a genomic library. In the case of a genomic library, the natural genetic environment of the nucleic acid sequence is preferably retained, at least in part. The environment flanks the nucleic acid sequence at least at one side and has a sequence of at least 50 bp, preferably at least 500 bp, especially preferably at least 1000 bp, very especially preferably at least 5000 bp, in length.

[2542] A naturally occurring expression cassette—for example the naturally occurring combination of the promoter of the gene encoding a protein as shown in the respective line in Table II, application no. 1, column 5 or 8, preferably the coding region thereof, or fragments or homologs thereof with the corresponding encoding gene—becomes a transgenic expression cassette when it is modified by non-natural, synthetic “artificial” methods such as, for example, mutagenesis. Such methods have been described (U.S. Pat. No. 5,565,350; WO 00/15815; also see above).

[2543] Further, the plant cell, plant or a part thereof can also be transformed such that further enzymes and proteins are (over)expressed which expression supports an increase of the fine chemical.

[2544] However, transgenic also means that the nucleic acids according to the invention are located at their natural position in the genome of a non-human organism, but that the sequence has been modified in comparison with the natural sequence and/or that the regulatory sequences of the natural sequences have been modified. Preferably, transgenic/recombinant is to be understood as meaning the transcription of the nucleic acids used in the process according to the invention occurs at a non-natural position in the genome, that is to say the expression of the nucleic acids is homologous or, preferably, heterologous. This expression can be performed with transiently transformed organism or with stably transformed organism.

[2545] Transgenic plants comprising the respective fine chemical(s) synthesized in the process according to the invention can be marketed directly without isolation of the fine chemical synthesized. In the process according to the invention, plants are understood as meaning all plant parts, plant organs such as leaf, stalk, root, tubers or seeds or propagation material or harvested material or the intact plant. In this context, the seed encompasses all parts of the seed such as the seed coats, epidermal cells, seed cells, endosperm or embryonic tissue. The fine chemical produced in the process according to the invention may, however, also be isolated from the plant. In case of methionine this can be in free form or bound to proteins. Fine chemical(s) produced by this process can be harvested by harvesting the non-human organisms either from the culture in which they grow or from the field. For example, this can be done via squeezing, grinding and/or extraction, salt precipitation and/or ion-exchange chromatography of the plant parts, preferably the plant seeds, plant fruits, plant tubers and the like.

[2546] In a further embodiment, the present invention relates to a process for the generation of a microorganism, comprising the introduction, into the microorganism or parts thereof, of the nucleic acid construct of the invention, or the expression cassette of the invention, or the vector of the invention or the nucleic acid molecule of the invention.

[2547] In another embodiment, the present invention relates also to a transgenic microorganism comprising the nucleic acid molecule of the invention, the nucleic acid construct of the invention, or the expression cassette of the invention, or the vector of the invention. Appropriate microorganisms have been described herein before under source organism, preferred are in particular aforementioned strains suitable for the production of fine chemicals.

[2548] In principle all microorganisms can be used as host organism especially the ones mentioned under source organism above. It is advantageous to use in the process of the invention transgenic microorganisms such as algae selected from the group of the families Bacillariophyceae, Charophyceae, Chlorophyceae, Chrysophyceae, Craspedophyceae, Euglenophyceae, Prymnesiophyceae, Phaeophyceae, Dinophyceae, Rhodophyceae, Xanthophyceae, Prasinophyceae and its described species and strains. Examples for such algae are the following species Isochrysis galbana, Chaetoceros gracilis, Chaetoceros calcitrans, Tetraselmis suecica, Thalassiosira pseudonana, Pavlova lutheri, lsochrysis sp., Skeletonema costatum, Chroomonas salina, Dunaliella tertiolecta, Chaetoceros simplex, Chaetoceros muelleri, Nannochloropsis sp., Cyclotella sp., Phaeodactylum tricornutum, Tetraselmis chui, Pavlova salina, Dicruteria sp., Tetraselmis levis, Dunaliella perva, Thalassiosira weissfloggii, Chlamydomonas sp., Chlorella vulgaris, Neochloris oleoabundans or Chlorella sp, which are only small overview.

[2549] The process of the invention is, when the host organisms are microorganisms, advantageously carried out at a temperature between 0° C. and 95° C., preferably between 10° C. and 85° C., particularly preferably between 15° C. and 75° C., very particularly preferably between 15° C. and 45° C. The pH is advantageously kept at between pH 4 and 12, preferably between pH 6 and 9, particularly preferably between pH 7 and 8, during this. The process of the invention can be operated batchwise, semibatchwise or continuously. A summary of known cultivation methods is to be found in the textbook by Chmiel (Bioprozeβtechnik 1. Einführung in die Bioverfahrenstechnik (Gustav Fischer Verlag, Stuttgart, 1991)) or in the textbook by Storhas (Bioreaktoren and periphere Einrichtungen (Vieweg Verlag, Braunschweig/Wiesbaden, 1994)). The culture medium to be used must meet the requirements of the respective strains in a suitable manner. Descriptions of culture media for various microorganisms are present in the handbook

[2550] “Manual of Methods for General Bacteriology” of the American Society for Bacteriology (Washington D. C., USA, 1981) and for algae in McLellan et al. (“Maintenance of algae and protozoa”, in “Maintenance of Microorganisms”, eds. Doyle A. and Kirsop B., London pp. 183-208 (1991)), Provasoli et al. (“Artificial media for freshwater algae: problems and suggestions”, in “The Ecology of Algae”, eds. Hartman R. T., Pymatunig Laboratory of Field Biology Special publication 2,

[2551] University of Pittsburgh, pp. 84-96 (1960)) or Starr R. C. (“Algal cultures-sources and methods of cultivation”, in “Photosynthesis Part A, Methods in Enzymology 23”, eds. San Pietro A., N.Y., pp 29-53 (1971)). These media, which can be employed according to the invention include, as described above, usually one or more carbon sources, nitrogen sources, inorganic salts, vitamins and/or trace elements. Preferred carbon sources are sugars such as mono-, di- or polysaccharides. Examples of very good carbon sources are glucose, fructose, mannose, galactose, ribose, sorbose, ribulose, lactose, maltose, sucrose, raffinose, starch or cellulose. Sugars can also be added to the media via complex compounds such as molasses, or other byproducts of sugar refining. It may also be advantageous to add mixtures of various carbon sources. Other possible carbon sources are oils and fats such as, for example, soybean oil, sunflower oil, peanut oil and/or coconut fat, fatty acids such as, for example, palmitic acid, stearic acid and/or linoleic acid, alcohols and/or polyalcohols such as, for example, glycerol, methanol and/or ethanol and/or organic acids such as, for example, acetic acid and/or lactic acid. Nitrogen sources are usually organic or inorganic nitrogen compounds or materials, which contain these compounds. Examples of nitrogen sources include ammonia in liquid or gaseous form or ammonium salts such as ammonium sulfate, ammonium chloride, ammonium phosphate, ammonium carbonate or ammonium nitrate, nitrates, urea, amino acids or complex nitrogen sources such as corn steep liquor, soybean meal, soybean protein, yeast extract, meat extract and others. The nitrogen sources may be used singly or as a mixture. Inorganic salt compounds, which may be present in the media include the chloride, phosphorus or sulfate salts of calcium, magnesium, sodium, cobalt, molybdenum, potassium, manganese, zinc, copper and iron. For the cultivation of algae the so called soilwater media are preferred. Such media are composed of soil extract, trace element solutions, filtered seawater, a nitrogen source and a buffer substance. Such culture media are well known by the skilled person and are available for example from culture collections such as the culture collection of algae (SAG) at the University of Gottingen, the Culture collection of algae in Coimbra, Portugal (ACOI) or the culture collection of algae (UTEX) in Texas, USA.

[2552] For preparing sulfur-containing amino acids, in particular methionin or cystein, it is possible to use as sulfur source inorganic sulfur-containing compounds such as, for example, sulfates, sulfites, dithionites, tetrathionates, thiosulfates, sulfides or else organic sulfur compounds such as mercaptans and thiols.

[2553] It is possible to use as phosphorus source phosphoric acid, potassium dihydrogenphosphate or dipotassium hydrogenphosphate or the corresponding sodium-containing salts. Chelating agents can be added to the medium in order to keep the metal ions in solution. Particularly suitable chelating agents include dihydroxyphenols such as catechol or protocatechuate, or organic acids such as citric acid. The fermentation media employed according to the invention for cultivating microorganisms normally also contain other growth factors such as vitamins or growth promoters, which include, for example, biotin, riboflavin, thiamine, folic acid, nicotinic acid, pantothenate and pyridoxine. All media components are sterilized either by heat (1.5 bar and 121° C. for 20 min) or by sterilizing filtration. The components can be sterilized either together or, if necessary, separately. All media components can be present at the start of the cultivation or optionally be added continuously or batchwise. The temperature of the culture is normally between 0° C. and 55° C., preferably at 10° C. to 30° C., and can be kept constant or changed during the experiment. The pH of the medium should be in the range from 3.5 to 8.5, preferably in the range between 5 to 7. The pH for the cultivation can be controlled during the cultivation by adding basic compounds such as sodium hydroxide, potassium hydroxide, ammonia or aqueous ammonia or acidic compounds such as phosphoric acid or sulfuric acid. Foaming can be controlled by employing antifoams such as, for example, fatty acid polyglycol esters. In addition the stability of plasmids can be maintained by adding to the medium suitable substances having a selective effect, for example antibiotics, if the plasmids carry the genetic information to overcome the selective effect. Aerobic conditions are maintained by introducing oxygen or oxygen-containing gas mixtures such as, for example, ambient air into the culture. The temperature of the culture is normally from 20° C. to 45° C. and preferably from 25° C. to 40° C. The culture is continued until formation of the desired product is at a maximum. This aim is normally achieved within 10 hours to 160 hours.

[2554] The fermentation broths obtained in this way, normally have a dry matter content of 7.5 to 25% by weight. The fermentation broth can be processed further. Depending on requirements, the biomass can be removed entirely or partly by separation methods, such as, for example, centrifugation, filtration, decantation or a combination of these methods, from the fermentation broth or left completely in it. The fermentation broth can then be thickened or concentrated by known methods, such as, for example, with the aid of a rotary evaporator, thin-film evaporator, falling film evaporator, by reverse osmosis or by nanofiltration. This concentrated fermentation broth can then be worked up by freeze-drying, spray drying, spray granulation or by other processes.

[2555] In another embodiment, the present invention relates to a method of producing a transgenic non-human oganism, especially a microorganism or a plant, with a FCRP coding nucleic acid, wherein expression of the nucleic acid(s) in the microorganism or a plant confers the production or the increased production of the fine chemical as compared to a wild type non-human organism comprising: (a) transforming a non-human cell with a vector comprising a FCRP encoding nucleic acid, and (b) generating from the non-human cell a transgenic non-human organism with production or enhanced production of the fine chemical.

[2556] The present invention relates also to a process according to the present invention whereby the produced fine chemical composition or the produced the fine chemical is isolated.

[2557] In this manner, more than 50% by weight, advantageously more than 60% by weight, preferably more than 70% by weight, especially preferably more than 80% by weight, very especially preferably more than 90% by weight, of the fine chemical produced in the process can be isolated. The resulting fine chemical can, if appropriate, subsequently be further purified, if desired mixed with other active ingredients such as vitamins, amino acids, carbohydrates, antibiotics and the like, and, if appropriate, formulated.

[2558] However, it is also possible to purify the fine chemical produced further with methods known by a person skilled in the art, like extraction, precipitation, crystallization etc.

[2559] For this purpose, the product-containing composition is for example subjected to a chromatography on a suitable resin, in which case the desired product or the impurities are retained wholly or partly on the chromatography resin. These chromatography steps can be repeated if necessary, using the same or different chromatography resins. The skilled worker is familiar with the choice of suitable chromatography resins and their most effective use. The purified product can be concentrated by filtration or ultrafiltration and stored at a temperature at which the stability of the product is a maximum.

[2560] The identity and purity of the isolated compound(s) can be determined by prior art techniques. These include gas chromatography (GC) high performance liquid chromatography (HPLC), spectroscopic methods, mass spectrometry (MS), staining methods, thin-layer chromatography, NIRS, enzyme assay or microbiological assays. These analytical methods are summarized for example in: Patek et al., Appl. Environ. Microbiol. 60, 133 (1994), Malakhova et al., Biotekhnologiya 11, 27 (1996); Schmidt et al., Bioprocess Engineer. 19, 67 (1998), Ullmann 's Encyclopedia of Industrial Chemistry (1996) Vol. A27, VCH, Weinheim, pp. 89-90, pp. 521-540, pp. 540-547, pp. 559-566, 575-581 and pp. 581-587, Michal G., “Biochemical Pathways: An Atlas of Biochemistry and Molecular Biology”, John Wiley and Sons (1999); Fallon A. et al. “Applications of HPLC in Biochemistry” in “Laboratory Techniques in Biochemistry and Molecular Biology”, Vol. 17 (1987).

[2561] The fine chemical obtained in the process are suitable as starting material for the synthesis of further products of value. For example, in case of amino acids they can be used in combination with each other or alone for the production of pharmaceuticals, foodstuffs, animal feeds or cosmetics. Accordingly, the present invention relates a method for the production of a pharmaceuticals, food stuff, animal feeds, nutrients or cosmetics comprising the steps of the process according to the invention, including the isolation of the fine chemical produced or a composition produced comprising the fine chemical, and, if desired, formulating the product with a pharmaceutical acceptable carrier or formulating the product in a form acceptable for an application in agriculture or formulating the product in a form acceptable for an application as food stuff, animal feed, nutrient or cosmetic. A further embodiment according to the invention is the use of the fine chemical produced in the process or of the transgenic non-human organisms in animal feeds, foodstuffs, medicines, food supplements, cosmetics or pharmaceuticals.

[2562] In yet another aspect, the invention also relates to harvestable parts and to propagation material of the transgenic plants according to the invention which either contain transgenic plant cells expressing a nucleic acid molecule according to the invention or which contains cells which show an increased cellular activity of the polypeptide of the invention, e.g. an increased expression level or higher activity of the described protein.

[2563] Harvestable parts can be in principle any useful parts of a plant, for example, flowers, pollen, seedlings, tubers, leaves, stems, fruit, seeds, roots etc. Propagation material includes, for example, seeds, fruits, cuttings, seedlings, tubers, rootstocks etc. Preferred are seeds, fruits, seedlings or tubers as harvestable or propagation material.

[2564] The invention furthermore relates to the use of the transgenic non-human organisms according to the invention and of the cells, cell cultures, parts—such as, for example, roots, leaves and the like as mentioned above in the case of transgenic plant organisms—derived from them, and to transgenic propagation material such as seeds or fruits and the like as mentioned above, for the production of foodstuffs or feeding stuffs, pharmaceuticals or fine chemicals.

[2565] Further in another embodiment, the present invention relates to the use of the nucleic acid molecule of the invention or used in the method of the invention alone or in combination with other genes of the respective fine chemical synthesis for example of the amino acid biosynthesis, the polypeptide of the invention or used in the method of the invention, the nucleic acid construct of the invention, the expression cassette of the invention, the vector of the invention, the plant or plant tissue or the host cell of the invention, for the production of plant resistant to a herbicide inhibiting eventually the production of the fine chemical.

[2566] Furthermore preferred is a method for the recombinant production of fine chemicals in non-human host organisms, wherein a non-human host organism is transformed with one of the above-described nucleic acid molecules or nucleic acid constructs, expression cassettes or vectors comprising one or more nucleic acid molecules, wherein said nucleic acid molecule participates in the biosynthesis of the desired fine chemical or encodes a polypeptide that catalyze the biosynthesis of the desired fine chemical, the transformed non-human host organism is cultured, and the desired fine chemical is isolated from the non-human organism and/or culture medium. In another embodiment s the additional production of further amino acids, tocopherols and tocotrienols and/or carotenoids or compositions comprising said compounds and/or of pharmaceuticals is preferred. The transformed non-human host organisms are cultured and the products are recovered from the non-human host organisms and/or the culture medium by methods known to the skilled worker or the non-human organism itself serves as food or feed or food or feed supplement. The production of pharmaceuticals such as, for example, antibodies or vaccines, is described by Hood E. E., ilkaJ. M. J, Curr. Opin. Biotechnol. 10 (4), 382 (1999), Ma J. K., Vine N. D., Curr. Top. Microbiol. Immunol. 236, 275 (1999).

[2567] In one embodiment, the present invention relates to a method for the identification of a gene product conferring the production of or an increase in the fine chemical production in a non-human cell, comprising the following steps:
[2568] (a) contacting, e.g. hybridising, a, some or all nucleic acid molecules of a sample, e.g. cells, tissues, plants or microorganisms or a nucleic acid library, which can contain a candidate gene encoding a gene product conferring the production of or an increase in the fine chemical after expression, with the nucleic acid molecule of the present invention as shown in the respective line in column 5 or 8 of Table I A or B of application no. 1, preferably the coding region thereof, or a fragment or homolog thereof;
[2569] (b) identifying the nucleic acid molecules, which hybridize under relaxed stringent conditions with the nucleic acid molecule of the present invention in particular to the nucleic acid molecule sequence shown in the respective line in Table I, application no. 1, columns 5 or 8, preferably the coding region thereof, of a fragment or a homolog thereof, preferably in Table I B, application no. 1, columns 5 or 8, preferably the coding region thereof, of a fragment or a homolog thereof, and, optionally, isolating the full length cDNA clone or complete genomic clone;
[2570] (c) introducing the candidate nucleic acid molecules or a fragment thereof in host cells, preferably in a plant cell or a microorganism, appropriate for producing the fine chemical;
[2571] (d) expressing the identified nucleic acid molecules in the host cells for which the production of or the increased production of the fine chemical is desired;
[2572] (e) assaying the the fine chemical level in the non-human host cells; and
[2573] (f) identifying the nucleic acid molecule and/or its gene product which expression confers the production of or an increase in the the fine chemical level in the non-human host cell after expression compared to the wild type.

[2574] Relaxed hybridisation conditions are: After standard hybridisation procedures washing steps can be performed at low to medium stringency conditions usually with washing conditions of 40° -55° C. and salt conditions between 2×SSC and 0.2×SSC with 0.1% SDS in comparison to stringent washing conditions as e.g. 60° -68° C. with 0.1% SDS. Further examples can be found in the references listed above for the stringend hybridization conditions. Usually washing steps are repeated with increasing stringency and length until a useful signal to noise ratio is detected and depend on many factors as the target, e.g. its purity, GC-content, size etc, the probe, e.g.its length, is it a RNA or a DNA probe, salt conditions, washing or hybridisation temperature, washing or hybridisation time etc.

[2575] In another embodiment, the present invention relates to a method for the identification of a gene product conferring the production of or an increase in the fine chemical production in a cell, comprising the following steps:
[2576] (a) identifiying a nucleic acid molecule of a non-human organism, which is at least 20%, 25%, 30%, 35%, 40%, 50%, 60%, 70%, 80%, 90%, 95%, 96%, 97%, 98%, 99%, 99.5% or more homolog to the nucleic acid molecule encoding a polypeptide comprising the polypeptide molecule as shown in the respective line in column 5 or 8 of Table II, application no. 1, or comprising a consensus sequence or a polypeptide motif as shown in the respective line in column 8 of Table IV, application no. 1, or being encoded by a nucleic acid molecule comprising a polynucleotide as shown in the respective line in column 5 or 8 of Table I, application no. 1, preferably the coding region thereof, or a homologue thereof as described herein, for example via homology search in a data bank;
[2577] (b) introducing the candidate nucleic acid molecule in non-human host cells, preferably in a plant cell or a microorganism, appropriate for producing the fine chemical;
[2578] (c) expressing the identified nucleic acid molecule in the non-human host cells;
[2579] (d) assaying the fine chemcial level in the non-human host cells; and
[2580] (e) identifying the nucleic acid molecule and its gene product which expression confers the production of or an increase in the the fine chemical level in the non-human host cell after expression compared to the wild type.

[2581] The nucleic acid molecules identified can then be used for the production of the fine chemical in the same way as the nucleic acid molecule of the present invention. Accordingly, in one embodiment, the present invention relates to a process for the production of the fine chemical, comprising (i) identifying a nucleic acid molecule according to aforementioned steps (a) to (f) or (a) to (e) and (ii) recovering the free or bound fine chemical from a non-human organism having an increased cellular activity of a polypeptide encoded by the nucleic acid molecule compared to a wild type and/or the respective culture medium.

[2582] Further, the nucleic acid molecules disclosed herein, in particular the nucleic acid molecules shown in the respective line in column 5 or 8 of Table I A or B of application no. 1, may be sufficiently homologous to the sequences of related species such that these nucleic acid molecules may serve as markers for the construction of a genomic map in related organism or for association mapping. Furthermore natural variation in the genomic regions corresponding to nucleic acids disclosed herein, in particular the nucleic acid molecule shown in the respective line in column 5 or 8 of Table I A or B, of application no. 1 or homologous thereof, may lead to variation in the activity of the proteins disclosed herein, in particular the proteins comprising polypeptides as shown in the respective lins in column 5 or 8 of Table II A or B, of application no. 1 or their homologous, or comprising the consensus sequence or the polypeptide motif as shown in the respective line in column 8 of Table IV, and in consequence in a natural variation of an increased fine chemical production.

[2583] In consequence natural variation eventually also exists in form of more active allelic variants leading already to a relative increase in the fine chemical. Different variants of the nucleic acid molecules disclosed herein, in particular the nucleic acid molecules comprising the nucleic acid molecules as shown in the respective line in column 5 or 8 of Table I A or B of application no. 1, preferably the coding region thereof, which corresponds to different levels of increase in fine chemical, e.g. different levels of increase in fine chemical, can be indentified and used for marker assisted breeding for an enhanced production of the fine chemical.

[2584] Natural variation may also exist in the regulatory regions, e.g. the promotors of the natural genes comprising the nucleic acid molecules as shown in the respective line column 5 or 8 of

[2585] Table I A or B of application no. 1, preferably the coding region thereof, which can similarily correspond to different levels of increase in the fine chemical, e.g. different levels of increase in the fine chemical can be identified and used for marker assisted breeding for an enhanced production of the fine chemical.

[2586] Accordingly, the present invention relates to a method for breeding plants for the production of the fine chemical, comprising
[2587] (a) selecting a first plant variety with an increased production of the fine chemical, e.g. based on an increased expression of a nucleic acid molecule of the invention as disclosed herein, in particular of a nucleic acid molecule comprising a nucleic acid molecule as shown in the respective line in column 5 or 8 of Table I A or B of application no. 1, preferably the coding region thereof, or fragments or homologs thereof, or a polypeptide comprising a polypeptide as shown in the respective line in column 5 or 8 of Table II A or B of application no. 1, or fragments or homologs thereof, or comprising a consensus sequence or a polypeptide motif as shown in the respective line in column 8 of Table IV, or a homolog thereof, as described herein;
[2588] (b) associating the level of increased production of the fine chemical, with the expression level or the genomic structure of a gene encoding said polypeptide or said nucleic acid molecule;
[2589] (c) crossing the first plant variety with a second plant variety, which significantly differs in its level of fine chemical; and
[2590] (d) identifying, which of the offspring varieties has got increased production of the fine chemical by the expression level of said polypeptide or nucleic acid molecule or the genomic structure of the gene(s) encoding said polypeptide or nucleic acid molecule of the invention.

[2591] In one embodiment, the expression level of the gene according to step (b) is increased.

[2592] In another embodiment, the present invention relates to a method for the identification of a compound stimulating production of the fine chemical in a non-human organism, especially a microorganism or a plant, comprising:
[2593] (a) contacting the microorganism or plant cells which express the polypeptide of the present invention or its mRNA with a candidate compound under appropriate conditions or in case of plant cells under cell cultivation conditions;
[2594] (b) assaying the production of or an increase in expression of said polypeptide or said mRNA;
[2595] (c) comparing the expression level to a standard response made in the absence of said candidate compound; whereby, the production of or an increased expression over the standard indicates that the compound is stimulating production of the fine chemical.

[2596] Furthermore, in one embodiment, the present invention relates to a process for the identification of a compound conferring the production of or an increase in the fine chemical production in a non-human organism, especially a plant or microorganism, comprising the steps:
[2597] (a) culturing a cell or a part of a plant or a microorganism or maintaining a plant expressing the polypeptide according to the invention or a nucleic acid molecule encoding said polypeptide and a readout system capable of interacting with the polypeptide under suitable conditions which permit the interaction of the polypeptide with said readout system in the presence of a compound or a sample comprising a plurality of compounds and capable of providing a detectable signal in response to the binding of a compound to said polypeptide under conditions which permit the expression of said readout system and the polypeptide of the present invention or used in the process of the invention; and
[2598] (b) identifying if the compound is an effective agonist by detecting the presence or absence or increase of a signal produced by said readout system.

[2599] The screen for a gene product or an agonist conferring the production of or an increase in the fine chemical can be performed by growth of a non-human organism for example a microorganism in the presence of growth reducing amounts of an inhibitor of the synthesis of the fine chemical. Better growth, e.g. higher dividing rate or high dry mass in comparison to the control, e.g. with a gene product or an agonist conferring the production of or an increase in the fine chemical, under such conditions would identify a gene or gene product or an agonist conferring the production of or an increase in fine chemical.

[2600] Said compound may be chemically synthesized or microbiologically produced and/or comprised in, for example, samples, e.g., cell extracts from, e.g., plants, non-human animals or microorganisms, e.g. pathogens. Furthermore, said compound(s) may be known in the art but hitherto not known to be capable of suppressing or activating the polypeptide of the present invention. The reaction mixture may be a cell free extract or may comprise a cell or tissue culture. Suitable set ups for the method of the invention are known to the person skilled in the art and are, for example, generally described in Alberts et al., “Molecular Biology of the Cell”, third edition (1994), in particular Chapter 17. The compounds may be, e.g., added to the reaction mixture, culture medium, injected into the cell or sprayed onto the plant.

[2601] If a sample containing a compound is identified in the method of the invention, then it is either possible to isolate the compound from the original sample identified as containing the compound capable of activating or conferring the production of or an increase in the fine chemical in a non-human organism or part thereof, or one can further subdivide the original sample, for example, if it consists of a plurality of different compounds, so as to reduce the number of different compounds per sample and repeat the method with the subdivisions of the original sample. Depending on the complexity of the samples, the steps described above can be performed several times, preferably until the sample identified according to the method of the invention only comprises a limited number of or only one compound(s). Preferably said sample comprises compounds of similar chemical and/or physical properties. Preferably, the compound identified according to the above-described method or a respective “active” derivative thereof is further formulated in a form suitable for the application in plant breeding or plant cell and tissue culture.

[2602] The compounds which can be tested and identified according to a method of the invention may be expression libraries, e.g., cDNA expression libraries, peptides, proteins, nucleic acids, antibodies, small organic compounds, hormones, peptidomimetics, PNAs or the like (Milner, Nature Medicine 1, 879 (1995); Hupp, Cell 83, 237 (1995); Gibbs, Cell 79, 193 (1994) and references cited supra). Said compounds can also be functional derivatives or analogues of known inhibitors or activators. Methods for the preparation of chemical derivatives and analogues are well known to those skilled in the art and are described in, for example, Beilstein, Handbook of Organic Chemistry, Springer edition New York Inc., 175 Fifth Avenue, New York, N.Y. 10010 U.S.A. and Organic Synthesis, Wiley, N.Y., USA. Furthermore, said derivatives and analogues can be tested for their effects according to methods known in the art. Furthermore, peptidomimetics and/or computer aided design of appropriate derivatives and analogues can be used, for example, according to the methods described above. The non-human cell or tissue that may be employed in the method of the invention preferably is a non-human host cell, plant cell or plant tissue of the invention described in the embodiments hereinbefore.

[2603] Thus, in a further embodiment the invention relates to a compound obtained or identified according to the method for identifiying an agonist of the invention said compound being an agonist of the polypeptide of the present invention or used in the process of the present invention.

[2604] Accordingly, in one embodiment, the present invention further relates to a compound identified by the method for identifying a compound of the present invention.

[2605] Said compound is, for example, a homolog of the polypeptide of the present invention. Homologs of the polypeptide of the present invention can be generated by mutagenesis, e.g., discrete point mutation or truncation of the polypeptide of the present invention. As used herein, the term “homolog” refers to a variant form of the protein, which acts as an agonist of the activity of the polypeptide of the present invention. An agonist of said protein can retain substantially the same, or a subset, of the biological activities of the polypeptide of the present invention. In particular, said agonist confers the increase of the expression level of the polypeptide of the present invention and/or the expression of said agonist in a non-human organisms or part thereof confers the increase of free and/or bound fine chemical in the non-human organism or part thereof.

[2606] In another embodiment, the invention relates to an antibody specifically recognizing the compound or agonist of the present invention.

[2607] The invention also relates to a diagnostic composition comprising at least one of the aforementioned nucleic acid molecules, expression cassettes, vectors, proteins, antibodies or compounds of the invention and optionally suitable means for detection.

[2608] The diagnostic composition of the present invention is suitable for the isolation of mRNA from a non-human cell and contacting the mRNA so obtained with a probe comprising a nucleic acid probe as described above under hybridizing conditions, detecting the presence of mRNA hybridized to the probe, and thereby detecting the expression of the protein in the non-human cell. Further methods of detecting the presence of a protein according to the present invention comprise immunotechniques well known in the art, for example enzyme linked immunoadsorbent assay. Furthermore, it is possible to use the nucleic acid molecules according to the invention as molecular markers or primers in plant breeding. Suitable means for detection are well known to a person skilled in the art, e.g. buffers and solutions for hybridization assays, e.g. the afore-mentioned solutions and buffers, and further means for Southern-, Western-, Northern- etc. -blots, as e.g. described in Sambrook et al. are known. In one embodiment diagnostic compositions contain PCR primers designed to specifically detect the presence or the expression level of the nucleic acid molecule to be expressed or to be expressed on an enhanced level in the process of the invention, e.g. of the nucleic acid molecule of the invention, or to descriminate between different variants or alleles of the nucleic acid molecule of the invention or nucleic acid molecules the activity of which is to be increased in the process of the invention.

[2609] In another embodiment, the present invention relates to a kit comprising the nucleic acid molecule, the vector, the host cell, the polypeptide, or the, viral nucleic acid molecule, antibody, plant cell, plant or part thereof, the harvestable part, the propagation material and/or the compound and/or agonist identified according to the method of the invention.

[2610] The compounds of the kit of the present invention may be packaged in containers such as vials, optionally with/in buffers and/or solvents. If appropriate, one or more of the components of said kits might be packaged in one and the same container or in different ones. Additionally or alternatively, one or more of said components might be adsorbed to a solid support, like a nitrocellulose filter, a glas plate, a chip, a nylon membrane or to the well of a micro titerplate. The kit can be used for any of the herein described methods and embodiments, e.g. for the production of the host cells, transgenic plants, pharmaceutical compositions, detection of homologous sequences, identification of agonists, as food or feed or as a supplement thereof or as supplement for the treating of plants, etc. Further, the kit can comprise instructions for the use of the kit for any of said embodiments. In one embodiment said kit comprises further a nucleic acid molecule encoding one or more of the aforementioned protein, and/or an antibody, a vector, a host cell, a plant cell, a plant or a part thereof. In another embodiment said kit comprises PCR primers to detect and increase the nucleic acid molecule to be increased in the process of the invention, e.g. of the nucleic acid molecule of the invention.

[2611] In a further embodiment, the present invention relates to a method for the production of a agricultural composition providing the nucleic acid molecule, the vector, or antibody of the present invention, the viral nucleic acid of the invention, or the polypeptide of the invention, the compound or agonist or comprising the steps of the method according to the invention for the identification of said compound or agonist; and formulating the nucleic acid molecule, the vector, or antibody of the present invention, the viral nucleic acid of the invention, the polypeptide of the invention or the agonist, or compound identified according to the methods or processes of the present invention or with use of the subject matters of the present invention in a form applicable as plant agricultural composition.

[2612] In another embodiment, the present invention relates to a method for the production of “the fine chemical”-production supporting plant culture composition comprising the steps of the method of the present invention; and formulating the compound identified in a form acceptable as agricultural composition.

[2613] Under “acceptable as agricultural composition” is understood, that such a composition optionally comprises auxiliaries which are customarily used for formulating crop protection agents.

[2614] In a further embodiment the nucleic acid molecule of the invention, the polypeptide of the invention, the nucleic acid construct of the invention, the expression cassette of the invention, the non-human organisms, the non-human host cell, the microorgansims, the plant, plant cell, or the part thereof, of the invention, the vector of the invention, the agonist identified with the method of the invention, the nucleic acid molecule identified with the method of the present invention, can be used for the production of the fine chemical or of the fine chemical and one or more other amino acids, in particular threonine, alanine, glutamin, glutamic acid, valine, aspargine, phenylalanine, leucine, proline , tryptophan tyrosine, isoleucine and arginine.

[2615] Accordingly, the nucleic acid molecule of the invention, or the nucleic acid molecule identified with the method of the present invention or the complement sequences thereof, the polypeptide of the invention, the nucleic acid construct of the invention, the expression cassette of the invention, the non-human organism, the non-human host cell, the microorgansim, the plant, plant cell, or the part thereof of the invention, the vector of the invention, the agonist identified with the method of the invention, the antibody of the present invention, can be used for the production of or the increase in the fine chemical in a non-human organism or part thereof, e.g. in a cell.

[2616] These and other embodiments are disclosed and encompassed by the description and examples of the present invention. Further literature concerning any one of the methods, uses and compounds to be employed in accordance with the present invention may be retrieved from public libraries, using for example electronic devices. For example the public database “Medline” may be utilized which is available on the Internet, for example under http://www.ncbi.nlm.nih.gov/PubMed/medline.html. Further databases and addresses, such as http://www.ncbi.nlm.nih.gov/, http://www.infobiogen.fr/, http://www.fmi.ch/biology/researchtools. html, hftp://www.tigr.org/, are known to the person skilled in the art and can also be obtained using, e.g., http://www.lycos.com.

[2617] The present invention is illustrated by the examples, which follow. The present examples illustrate the basic invention without being intended as limiting the subject of the invention. The content of all of the references, patent applications, patents and published patent applications cited in the present patent application is herewith incorporated by reference.

[2618] In a further embodiment the present invention is characterized by the features as disclosed in the following items:

[2619] Item 1. A process for the production of the fine chemical methionine, which comprises
[2620] (a) increasing or generating one or more activities selected from the group consisting of (DL)-glycerol-3-phosphatase, 2,3-di hydroxyphenylpropionate 1,2-dioxygenase, 2-oxoglutarate dehydrogenase E1 subunit, 49747384_SOYBEAN-protein, 5′-nucleotidase, acetolactate synthase small subunit, acetyl CoA carboxylase, adenosine kinase, arginine exporter protein, AO g09680-protein, At2g45420-protein, At4g32480-protein, ATP-binding component of a transport system, auxin response factor, b0012-protein, bl 003-protein, bl 522-protein, b2032-protein, b2345-protein, b2513-protein, b2673-protein, b3246-protein, b3346-protein, b3817-protein, b4029protein, beta-hydroxylase, bifunctional aspartokinase/homoserine dehydrogenase, calcium-dependent protein kinase, coproporphyrinogen III oxidase, cyclin, cystathionine gamma-synthase, cystathionine-lyase, dihydroxyacid dehydratase, DNA-binding protein, F-box protein, glutaredoxin, glutathione S-transferase, glycogenin, homocitrate synthase, homoserine dehydrogenase, hydrolase, L-serine dehydratase, major facilitator superfamily transporter protein, malic enzyme, membrane transport protein, monothiol glutaredoxin, monthiol glutaredoxin, oxidoreductase, peptidyl-prolyl cis-trans isomerase, phosphoadenosine phosphosulfate reductase, Photosystem I reaction center subunit XI, protein kinase, protein phosphatase, pyruvate kinase, Sec-independent protein translocase subunit, serine protease, serine/threonine-protein phosphatase, threonine aldolase, threonine dehydratase, threonine efflux protein, transcription factor, transport protein, uridine/cytidine kinase, valine-pyruvate transaminase, yhl013c-protein, yml084w-protein, yol160w-protein, yor392w-protein, and zinc finger protein, in a non-human organism or a part thereof, preferably a microorganism, a plant cell, a plant or a part thereof, as compared to a corresponding non-transformed wild type non-human organism or a part thereof; and
[2621] (b) growing the non-human organism or a part thereof under conditions which permit the production of methionine or a composition comprising methionine in said non-human organism or in the culture medium surrounding said non-human organism.

[2622] Item 2. A process for the production of the fine chemical methionine, which comprises
[2623] (A)
   [2624] (i) increasing or generating of the expression of; and/or
   [2625] (ii) increasing or generating the expression of an expression product of; and/or
   [2626] (iii) increasing or generating one or more activities of an expression product encoded by;
   [2627] at least one nucleic acid molecule comprising a nucleic acid molecule selected from the group consisting of:
[2628] (a) a nucleic acid molecule encoding the polypeptide shown in column 5 or 8 of Table II, preferably Table II B, application no. 1, or a homolog or a fragment thereof;
[2629] (b) a nucleic acid molecule shown in column 5 or 8 of Table I, preferably Table I B, application no. 1, or a homolog or a fragment thereof (preferably the coding region thereof);
[2630] (c) a nucleic acid molecule, which, as a result of the degeneracy of the genetic code, can be derived from a polypeptide sequence depicted in column 5 or 8 of Table II, preferably Table II B, application no. 1;
[2631] (d) a nucleic acid molecule having at least 30%, in particular at least 50%, 60%, 70%, 80%, 85%, 90%, 95%, 97%, 98%, 99% or 99.5% identity with the nucleic acid molecule sequence of a polynucleotide comprising the nucleic acid molecule shown in column 5 or 8 of Table I, preferably Table I B, application no. 1, or the coding region thereof;
[2632] (e) a nucleic acid molecule encoding a polypeptide having at least 30%, in particular 50%, 60%, 70%, 80%, 85%, 90%, 95%, 97%, 98%, 99% or 99.5% identity with the amino acid sequence of the polypeptide encoded by the nucleic acid molecule of (a), (b), (c) or (d);
[2633] (f) a nucleic acid molecule which hybridizes with a nucleic acid molecule of (a), (b), (c), (d) or (e) under stringent hybridization conditions;
[2634] (g) a nucleic acid molecule encoding a polypeptide which can be isolated with the aid of monoclonal or polyclonal antibodies made against a polypeptide encoded by one of the nucleic acid molecules of (a), (b), (c), (d), (e) or (f);
[2635] (h) a nucleic acid molecule encoding a polypeptide comprising the consensus sequence or one or more polypeptide motifs as shown in column 8 of Table IV, application no. 1;
[2636] (i) a nucleic acid molecule encoding a polypeptide having the activity represented by a respective protein as depicted in column 5 of Table II, application no. 1;
[2637] (j) a nucleic acid molecule which comprises a polynucleotide, which is obtained by amplifying a cDNA library or a genomic library using the primers as depicted in column 8 of Table III, application no. 1; and
[2638] (k) a nucleic acid molecule which is obtainable by screening a suitable nucleic acid library, especially a cDNA library and/or a genomic library, under stringent hybridization conditions with a probe comprising a complementary sequence of a nucleic acid molecule of (a), (b), (c), (d), (e), (f), (g), (h), (i) or (j) or with a fragment thereof, having at least 15 nt, preferably 20 nt, 30 nt, 50 nt, 100 nt, 200 nt, 500 nt, 1000 nt, 1500 nt, 2000 nt or 3000 nt of a nucleic acid molecule complementary to a nucleic acid molecule sequence characterized in (a), (b), (c), (d), (e), (f), (g), (h), (i) or (j);
[2639] or a nucleic acid molecule comprising a sequence which is complementary thereto; in a non-human organism or a part thereof, preferably a microorganism, a plant cell, a plant or a part thereof, as compared to a corresponding non-transformed wild type non-human organism or a part thereof; and
[2640] (B) growing the non-human organism or a part thereof under conditions which permit the production of methionine or a composition comprising methionine in said non-human organism or in the culture medium surrounding said non-human organism.

[2641] Item 3. A process of items 1 or 2, comprising of recovering methionine in its free or bound form.

[2642] Item 4. The process of any one of items 1 to 3, comprising the folowing steps:
[2643] (a) selecting a non-human organism or a part thereof expressing a polypeptide encoded by the nucleic acid molecule characterized in item 2;
[2644] (b) mutagenizing the selected non-human organism or the part thereof;
[2645] (c) comparing the activity or the expression level of said polypeptide in the mutagenized non-human organism or the part thereof with the activity or the expression of said polypeptide of the selected non-human organisms or the part thereof;
[2646] (d) selecting the mutated non-human organisms or parts thereof, which comprise an increased activity or expression level of said polypeptide compared to the selected non-human organism or the part thereof;
[2647] (e) optionally, growing and cultivating the non-human organisms or the parts thereof;
[2648] and
[2649] (f) recovering, and optionally isolating, the free or bound methionine produced by the selected mutated non-human organisms or parts thereof.

[2650] Item 5. The process of any one of items 1 to 4 wherein the activity of said protein or the expression of said nucleic acid molecule is increased or generated transiently or stably.

[2651] Item 6. An isolated nucleic acid molecule comprising a nucleic acid molecule selected from the group consisting of:
[2652] (a) a nucleic acid molecule encoding a polypeptide shown in Table II, application no. 1, column 5 or 8, preferably shown in Table II B, application no. 1, column 8, or a homolog or a fragment thereof;
[2653] (b) a nucleic acid molecule shown in Table I, application no. 1, column 5 or 8, preferably shown in Table I B, application no. 1, column 8, preferably the coding region thereof, or a homolog or a fragment thereof;
[2654] (c) a nucleic acid molecule, which, as a result of the degeneracy of the genetic code, can be derived from a polypeptide sequence depicted in column 5 or 8 of Table II, application no. 1, preferably in column 8 of Table II B, application no. 1;
[2655] (d) a nucleic acid molecule having at least 30% identity, preferably at least 40%, 50%, 60%, 70%, 75%, 80%, 85%, 90%, 95%, 96%, 97%, 98%, 99%, 99.5%, with the nucleic acid molecule sequence of a polynucleotide comprising the nucleic acid molecule shown in column 5 or 8 of Table I, application no. 1, preferably shown in column 8 of Table I B, application no. 1, preferably the coding region thereof;
[2656] (e) a nucleic acid molecule encoding a polypeptide having at least 30% identity, preferably at least 40%, 50% 60%, 70%, 75%, 80%, 85%, 90%, 95%, 96%, 97%, 98%, 99%, 99.5%, identity with the amino acid sequence of the polypeptide encoded by the nucleic acid molecule of (a), (b), (c) or (d);
[2657] (f) a nucleic acid molecule which hybridizes with a nucleic acid molecule of (a), (b), (c), (d) or (e) under stringent hybridisation conditions;
[2658] (g) a nucleic acid molecule encoding a polypeptide which can be isolated with the aid of monoclonal or polyclonal antibodies made against a polypeptide encoded by one of the nucleic acid molecules of (a), (b), (c), (d), (e) or (f);
[2659] (h) a nucleic acid molecule encoding a polypeptide comprising the consensus sequence or one or more polypeptide motifs as shown in column 8 of Table IV, application no. 1,
[2660] (i) a nucleic acid molecule encoding a polypeptide having the activity represented by a respective protein as depicted in column 5 of Table II, application no. 1;
[2661] (j) a nucleic acid molecule comprising a polynucleotide which is obtained by amplifying a cDNA library or a genomic library using the primers in Table III, application no. 1, column 8;
[2662] and
[2663] (k) nucleic acid molecule which is obtainable by screening a suitable nucleic acid library, especially a cDNA library and/or a genomic library, under stringent hybridization conditions with a probe comprising one of the sequences of the nucleic acid molecule of (a), (b), (c), (d), (e), (f), (g), (h), (i) or (j) or with a fragment of at least 15 nt, preferably 20 nt, 30 nt, 50 nt, 100 nt, 200 nt,500 nt, 1000 nt, 1500 nt, 2000 nt or 3000 nt of the nucleic acid molecule characterized in (a), (b), (c), (d), (e), (f), (g), (h), (i) or (i),
[2664] or a nucleic acid molecule comprising a sequence which is complementary thereto.

[2665] Item 7. A nucleic acid construct which confers the expression of the nucleic acid molecule as defined in item 6, comprising one or more regulatory elements.

[2666] Item 8. An expression cassette comprising
[2667] (a) a promoter, preferably selected from the group consisting of Big35S, PCUbi, Super ans USP;
[2668] (b) a nucleic acid molecule as defined in item 6.

[2669] Item 9. A vector comprising the nucleic acid molecule as defined in item 6 or the nucleic acid construct as claimed in item 7 or the expression cassette as claimed in item 8.

[2670] Item 10. A host cell or a plant organelle, which has been transformed with the vector as claimed in item 9 or the nucleic acid molecule as defined in item 6 or the nucleic acid construct as claimed in item 7 or the expression cassette as claimed in item 8.

[2671] Item 11. The host cell of item 10, which is a plant cell or a microorganism.

[2672] Item 12. A process for producing a polypeptide, wherein the polypeptide is expressed in a host cell as claimed in item 10 or 11.

[2673] Item 13. A polypeptide produced by the process as claimed in item 12 or encoded by the nucleic acid molecule as defined in item 6.

[2674] Item 14. An antibody, which binds specifically to the polypeptide as claimed in item 13.

[2675] Item 15. A plant tissue, propagation material, harvested material or a plant or a part thereof comprising the host cell as claimed in item 10 or 11.

[2676] Item 16. A process for the identification of a compound conferring an increase in methionine production in a non-human organism, comprising the steps:
[2677] (a) culturing a plant cell or tissue or microorganism or maintaining a plant expressing the polypeptide encoded by the nucleic acid molecule as defined in item 6 conferring an increase in the amount of methionine in a non-human organism or a part thereof and a readout system capable of interacting with the polypeptide under suitable conditions which permit the interaction of the polypeptide with said readout system in the presence of a compound or a sample comprising a plurality of compounds and capable of providing a detectable signal in response to the binding of a compound to said polypeptide under conditions which permit the expression of said readout system and of the polypeptide encoded by the nucleic acid molecule of item 6 conferring an increase in the amount of methionine in a non-human organism or a part thereof;
[2678] (b) identifying if the compound is an effective agonist by detecting the presence or absence or increase of a signal produced by said readout system.

[2679] Item 17. A method for the production of an agricultural composition comprising the steps of the method of item 16 and formulating the compound identified in item 16 in a form acceptable for an application in agriculture.

[2680] Item 18. A composition comprising the nucleic acid molecule as defined in item 6, the polypeptide as claimed in item 13, the nucleic acid construct as claimed in item 7, the expression cassette as claimed in item 8, the vector as claimed in item 9, the compound as claimed in item 16, the antibody as claimed in item 14, and optionally an agricultural acceptable carrier.

[2681] Item 19. Use of the nucleic acid molecule as defined in item 6 for the identification of a nucleic acid molecule conferring an increase in methionine after expression.

[2682] Item 20. Cosmetic, pharmaceutical, food or feed composition comprising the nucleic acid molecule as defined in item 6, the polypeptide as claimed in item 13, the nucleic acid construct as claimed in item 7, the expression cassette as claimed in item 8, the vector as claimed in item 9, the antibody as claimed in item 14, the plant or a part thereof, or plant tissue as claimed in item 15, the harvested material or propagation material as claimed in item 15 or the host cell as claimed in items 10 or 11.

[2683] Item 21. Use of the nuclei acid molecule as defined in item 6, the polypeptide as claimed in item 13, the nucleic acid construct as claimed in item 7, the expression cassette as claimed in item 8, the vector as claimed in item 9, the plant or plant tissue as claimed in item 15, or the host cell as claimed in item 10 to 11 for the production of plant resistant to a herbicide inhibiting the production of methionine .

### EXAMPLES

[2684] Example 1

### Cloning of the Sequences as Shown in Table I, Column 5 or 8 in Escherichia Coli

[2685] The inventive sequences as shown in the respective line in Table I, column 5 or 8 were cloned into the plasmids pBR322 (Sutcliffe J. G., Proc. Natl. Acad. Sci. USA, 75, 3737 (1979)), pACYC 177 (Change and Cohen, J. Bacteriol. 134, 1141 (1978)), plasmids of the pBS series (pBSSK+, pBSSK- and others; Stratagene, LaJolla, USA) or cosmids such as SuperCos1 (Stratagene, LaJolla, USA) or Lorist6 (Gibson T. J., Rosenthal A. and Waterson R.H., Gene 53, 283 (1987) for expression in E. coli using known, well-established procedures (see, for example, J. Sambrook et al. “Molecular Cloning: A Laboratory Manual”. Cold Spring Harbor Laboratory Press (1989) or F. M. Ausubel et al., “Current Protocols in Molecular Biology”, John Wiley & Sons (1994)).

### Example 2

### DNA Sequencing and Computerized Functional Analysis

[2686] The DNA was sequenced by standard procedures, in particular the chain determination method, using AB1377 sequencers (see, for example, Fleischman R. D. et al., Science 269, 496 (1995)).

### Example 3

### In-Vivo and In-Vitro Mutagenesis

[2687] An in vivo mutagenesis of organisms such as Saccharomyces, Mortierella, Escherichia and others mentioned above, which are beneficial for the production of a fine chemical can be carried out by passing a plasmid DNA (or another vector DNA) containing the desired nucleic acid sequence or nucleic acid sequences through E. coli and other microorganisms (for example Bacillus spp. or yeasts such as Saccharomyces cerevisiae) which are not capable of maintaining the integrity of its genetic information. Usual mutator strains have mutations in the genes for the DNA repair system (for example mutHLS, mutD, mutT and the like; for comparison, see Rupp W. D., “DNA repair mechanisms in Escherichia coli and Salmonella”, pp. 2277-2294, ASM, Washington (1996)]. The skilled worker knows these strains. The use of these strains is illustrated for example in Greener A., and Callahan M., Strategies 7, 32 (1994).

[2688] In-vitro mutation methods such as increasing the spontaneous mutation rates by chemical or physical treatment are well known to the skilled person. Mutagens like 5-bromo-uracil, N-methyl-N-nitro-N-nitrosoguanidine (=NTG), ethyl methanesulfonate (=EMS), hydroxylamine and/or nitrous acid are widly used as chemical agents for random in-vitro mutagensis. The most common physical method for mutagensis is the treatment with UV irradiation. Another random mutagenesis technique is the error-prone PCR for introducing amino acid changes into proteins. Mutations are deliberately introduced during PCR through the use of error-prone DNA polymerases and special reaction conditions known to a person skilled in the art. For this method randomized DNA sequences are cloned into expression vectors and the resulting mutant libraries screened for altered or improved protein activity as described below.

[2689] Site-directed mutagensis method such as the introduction of desired mutations with an M13 or phagemid vector and short oligonucleotides primers is a well-known approach for site-directed mutagensis. The clou of this method involves cloning of the nucleic acid sequence of the invention into an M13 or phagemid vector, which permits recovery of single-stranded recombinant nucleic acid sequence. A mutagenic oligonucleotide primer is then designed whose sequence is perfectly complementary to nucleic acid sequence in the region to be mutated, but with a single difference: at the intended mutation site it bears a base that is complementary to the desired mutant nucleotide rather than the original. The mutagenic oligonucleotide is then allowed to prime new DNA synthesis to create a complementary full-length sequence containing the desired mutation. Another site-directed mutagensis method is the PCR mismatch primer mutagensis method also known to the skilled person. Dpnl site-directed mutagensis is a further known method as described for example in the Stratagene QuickchangeTM site-directed mutagenesis kit protocol. A huge number of other methods are also known and used in common practice.

[2690] Positive mutation events can be selected by screening the organisms for the production of the desired fine chemical.

### Example 4

### DNA Transfer between Escherichia Coli, Saccharomyces Cerevisiae and Mortierella Alpina

[2691] Shuttle vectors such as pYE22m, pPAC-ResQ, pClasper, pAUR224, pAMH10, pAML10, pAMT10, pAMU10, pGMH10, pGML10, pGMT10, pGMU10, pPGAL1, pPADH1, pTADH1, pTAex3, pNGA142, pHT3101 and derivatives thereof which allow the transfer of nucleic acid sequences between Escherichia coli, Saccharomyces cerevisiae and/or Mortierella alpina are available to the skilled worker. An easy method to isolate such shuttle vectors is disclosed by Soni R. and Murray J. A. H., Nucleic Acid Research, 20 (21), 5852 (1992). If necessary such shuttle vectors can be constructed easily using standard vectors for E. coli (Sambrook J. et al. “Molecular Cloning: A Laboratory Manual”, Cold Spring Harbor Laboratory Press (1989) or Ausubel F. M. et al. “Current Protocols in Molecular Biology”, John Wiley & Sons (1994)) and/or the aforementioned vectors, which have a replication origin for, and suitable marker from, Escherichia coli, Saccharomyces cerevisiae or Mortierella alpina added. Such replication origins are preferably taken from endogenous plasmids, which have been isolated from species used in the inventive process. Genes, which are used in particular as transformation markers for these species are genes for kanamycin resistance (such as those which originate from the Tn5 or Tn-903 transposon) or for chloramphenicol resistance (Winnacker E.L., “From Genes to Clones Introduction to Gene Technology”, VCH, Weinheim (1987)) or for other antibiotic resistance genes such as for G418, gentamycin, neomycin, hygromycin or tetracycline resistance.

[2692] Using standard methods, it is possible to clone a gene of interest into one of the above-described shuttle vectors and to introduce such hybrid vectors into the microorganism strains used in the inventive process. The transformation of Saccharomyces can be achieved for example by LiCI or sheroplast transformation (Bishop et al., Mol. Cell. Biol., 6, 3401 (1986), Sherman et al., “Methods in Yeasts in Genetics”, Cold Spring Harbor Lab. Cold Spring Harbor, N.Y. (1982), Agatep et al., Technical Tips Online 1998, 1:51: P01525 or Gietz et al., Methods Mol. Cell. Biol. 5,255 (1995)) or electroporation (Delorme E., Appl. Environ. Microbiol., 55 (9), 2242 (1989)).

[2693] If the transformed sequence(s) is/are to be integrated advantageously into the genome of the microorganism used in the inventive process for example into the yeast or fungi genome, standard techniques known to the skilled worker also exist for this purpose. Solinger et al. (Proc. Natl. Acad. Sci. U S A., 15, 8447 (2001)) and Freedman et al. (Genetics, 162, 15 (2002)) teaches a homolog recombination system dependent on rad 50, rad51, rad54 and rad59 in yeasts. Vectors using this system for homologous recombination are vectors derived from the

[2694] Ylp series. Plasmid vectors derived for example from the 2p-Vector are known by the skilled worker and used for the expression in yeasts. Other preferred vectors are for example pART1, pCHY21 or pEVP11 as they have been described by McLeod et al. (EMBO J., 6, 729 (1987)) and Hoffman et al. (Genes Dev. 5, 561 (1991)) or Russell et al. (J. Biol. Chem. 258, 143 (1983)). Other beneficial yeast vectors are plasmids of the REP, REP-X, pYZ or RIP series.

### Example 5

### Determining the Expression of the Mutant/Transgenic Protein

[2695] The observations of the acivity of a mutated, or transgenic, protein in a transformed host cell are based on the fact that the protein is expressed in a similar manner and in a similar quantity as the wild-type protein. A suitable method for determining the transcription quantity of the mutant, or transgenic, gene (a sign for the amount of mRNA which is available for the translation of the gene product) is to carry out a Northern blot (see, for example, Ausubel et al., “Current Protocols in Molecular Biology”, Wiley, New York (1988)), where a primer which is designed in such a way that it binds to the gene of interest is provided with a detectable marker (usually a radioactive or chemiluminescent marker) so that, when the total RNA of a culture of the organism is extracted, separated on a gel, applied to a stable matrix and incubated with this probe, the binding and quantity of the binding of the probe indicates the presence and also the amount of mRNA for this gene. Another method is a quantitative PCR. This information detects the extent to which the gene has been transcribed. Total cell RNA can be isolated for example from yeasts or E. coli by a variety of methods, which are known in the art, for example with the Ambion kit according to the instructions of the manufacturer or as described in Edgington et al., Promega Notes Magazine Number 41, 14 (1993).

[2696] Standard techniques, such as Western blot, may be employed to determine the presence or relative amount of protein translated from this mRNA (see, for example, Ausubel et al. “Current Protocols in Molecular Biology”, Wiley, New York (1988)). In this method, total cell proteins are extracted, separated by gel electrophoresis, transferred to a matrix such as nitrocellulose and incubated with a probe, such as an antibody, which binds specifically to the desired protein. This probe is usually provided directly or indirectly with a chemiluminescent or colorimetric marker, which can be detected readily. The presence and the observed amount of marker indicate the presence and the amount of the sought mutant protein in the cell. However, other methods are also known.

### Example 6

### Growth of Genetically Modified Organism: Media and Culture Conditions

[2697] Genetically modified Yeast, Mortierella or Escherichia coli are grown in synthetic or natural growth media known by the skilled worker. A number of different growth media for Yeast, Mortierella or Escherichia coli are well known and widely available. A method for clulturing Mortierella is disclosed by Jang et al. (Bot. Bull. Acad. Sin. 41, 41 (2000)). Mortierella can be grown at 20° C. in a culture medium containing: 10 g/l glucose, 5 g/l yeast extract at pH 6.5. Futhermore Jang et al. teaches a submerged basal medium containing 20 g/l soluble starch, 5 g/l Bacto yeast extract, 10 g/l KNO₃, 1 g/l KH₂PO₄, and 0.5 g/l MgSat x7H₂O, pH 6.5.

[2698] Said media, which can be used according to the invention usually consist of one or more carbon sources, nitrogen sources, inorganic salts, vitamins and trace elements. Preferred carbon sources are sugars such as mono-, di- or polysaccharides. Examples of very good carbon sources are glucose, fructose, mannose, galactose, ribose, sorbose, ribulose, lactose, maltose, sucrose, raffinose, starch or cellulose. Sugars may also be added to the media via complex compounds such as molasses or other by-products of sugar refining. It may also be advantageous to add mixtures of various carbon sources. Other possible carbon sources are alcohols and/or organic acids such as methanol, ethanol, acetic acid or lactic acid. Nitrogen sources are usually organic or inorganic nitrogen compounds or materials containing said compounds. Examples of nitrogen sources include ammonia gas, aqueous ammonia solutions or ammonium salts such as NH₄Cl, or (NH₄)₂SO₄NH₄OH, nitrates, urea, amino acids or complex nitrogen sources such as cornsteep liquor, soybean flour, soybean protein, yeast extract, meat extract and others. Mixtures of the above nitrogen sources may be used advantageously.

[2699] Inorganic salt compounds, which may be included in the media comprise the chloride, phosphorus or sulfate salts of calcium, magnesium, sodium, cobalt, molybdenum, potassium, manganese, zinc, copper and iron. Chelating agents may be added to the medium in order to keep the metal ions in solution. Particularly suitable chelating agents include dihydroxyphenols such as catechol or protocatechulate or organic acids such as citric acid. The media usually also contain other growth factors such as vitamins or growth promoters, which include, for example, biotin, riboflavin, thiamine, folic acid, nicotinic acid, panthothenate and pyridoxine. Growth factors and salts are frequently derived from complex media components such as yeast extract, molasses, cornsteep liquor and the like. The exact composition of the compounds used in the media depends heavily on the particular experiment and is decided upon individually for each specific case. Information on the optimization of media can be found in the textbook “Applied Microbiol. Physiology, A Practical Approach” (eds. Rhodes P.M., Stanbury P.F., IRL Press pp. 53-73 (1997)). Growth media can also be obtained from commercial suppliers, for example Standard 1 (Merck) or BHI (Brain heart infusion, DIFCO) and the like.

[2700] All media components are sterilized, either by heat (20 min at 1.5 bar and 121° C.) or by filter sterilization. The components may be sterilized either together or, if required, separately. All media components may be present at the start of the cultivation or added continuously or batchwise, as desired.

[2701] The culture conditions are defined separately for each experiment. The temperature is normally between 15° C. and 45° C. and may be kept constant or may be altered during the experiment. The pH of the medium should be in the range from 5 to 8.5, preferably around 7.0, and can be maintained by adding buffers to the media. An example of a buffer for this purpose is a potassium phosphate buffer. Synthetic buffers such as MOPS, HEPES, ACES and the like may be used as an alternative or simultaneously. The culture pH value may also be kept constant during the culture period by addition of, for example, NaOH or NH₄OH. If complex media components such as yeast extract are used, additional buffers are required less since many complex compounds have a high buffer capacity. When using a fermenter for the culture of microorganisms, the pH value can also be regulated using gaseous ammonia.

[2702] The incubation period is generally in a range of from several hours to several days. This time period is selected in such a way that the maximum amount of product accumulates in the fermentation broth. The growth experiments, which are disclosed can be carried out in a multiplicity of containers such as microtiter plates, glass tubes, glass flasks or glass or metal fermenters of various sizes. To screen a large number of clones, the microorganisms should be grown in microtiter plates, glass tubes or shake flasks, either using simple flasks or baffle flasks. 100 ml shake flasks filled with 10% (based on the volume) of the growth medium required are preferably used. The flasks should be shaken on an orbital shaker (amplitude 25 mm) at a rate ranging from 100 to 300 rpm. Evaporation losses can be reduced by maintaining a humid atmosphere; as an alternative, a mathematical correction should be carried out for the evaporation losses.

[2703] If genetically modified clones are examined, an unmodified control clone, or a control clone, which contains the basic plasmid without insertion, should also be included in the tests. If a transgenic sequence is expressed, a control clone should advantageously again be included in these tests. The medium is advantageously inoculated to an OD600 of 0.5 to 1.5 using cells which have been grown on agar plates, such as CM plates (10 g/l glucose, 2.5 g/l NaCl, 2 g/l urea, 10 g/l polypeptone, 5 g/l yeast extract, 5 g/l meat extract, 22 g/l agar, pH value 6.8 established with 2M NaOH), which have been incubated at 30° C. The media are inoculated for example by addition of a liquid preculture of seed organism such as E. coli or S. cerevisiae.

### Example 7

### Growth of Genetically Modified Algae: Media and Culture Conditions

### Growing Chlamydomonas:

[2704] Chlamydomonas reinhardtii is able to grow under various growth conditions. It is a unicellular algae. The cells of Chlamydomonas reinhardtii can be normally cultured autotrophically in the media mentioned below. Cells of Chlamydomonas reinhardtii can be cultivated at 25° C. under cool-white fluorescence light at 10,000 lux (120 μmol m⁻² s⁻¹ photosynthetically active radiation) as described by Ghirardi et al., Appl. Biochem. Biotechnol. 63, 141 (1997) or Semin et al., Plant. Physiol., 131, 1756 (2003).

### Chlamydomonas Growth Medium:

[2705] 1 l growth medium is prepared by adding the following volumes of the stock solutions as mentioned below:
1 ml solution A, 5 ml solution B, 1 ml solution C, 1 ml solution D, 3 ml solution E, 3 ml solution F,
1 ml solution G, 1 ml solution H.
A) Trace elements solution:
[2706] 1 g/l H₃BO₃
[2707] 1 g/l ZnSO₄×7H₂O₂O
[2708] 0.3 g/l MnSO₄×H₂O₂O
[2709] 0.2 g/l CoCl₂×6H₂O₂O
[2710] 0.2 g/l Na₂MoO₄×2H₂O₂O
[2711] 0.04 g/l CuSO₄
   B) Na Citrate solution: 10% w/v Na citrate×2H₂O₂O
   C) Iron solution: 1% w/v FeCl₃×6H₂O₂O
   D) Calcium solution: 5.3% w/v CaCl₂×H₂O₂O
   E) Magnesium solution: 10% w/v MgSO₄×7H₂O₂O
   F) Ammonium solution: 10% w/v NH₄NO₃

[2712] G) Potassium solution: 10% w/v KH₂PO₄

H) Dipotassium solution 10% w/v K₂HPO₄

### Bristol's Soil Extract Medium:

[2713] Soil extract medium can generally be used for the growth of axenic and xenic algae cultures. The soil extract is prepared by adding a teaspoon of dry garden soil and a pinch of CaCO₃ to 200 ml distilled water and steaming said solution for approximately 2 h on two consecutive days. Afterwards the supernatant is decanted and added to the desired medium. To 940 ml bristol's solution 40 ml of soil extract medium is added.

### Bristol's Solution:

[2714] To 940 ml of distilled water, the following stock solutions are added:

| | | |
|---|---|---|
| 10 ml | NaNO₃ | (25 g/l) |
| 10 ml | CaCl₂ × 2 H₂O | (2.5 g/l) |
| 10 ml | MgSO₄ × 7 H₂O | (7.5 g/l) |
| 10 ml | K₂HPO₄ | (7.5 g/l) |
| 10 ml | KH₂PO₄ | (17.5 g/l) |
| 10 ml | NaCl | (2.5 g/l) |

Amplification and Cloning of DNA from Chlamydomonas Reinhardtii:

[2715] The DNA can be amplified by the polymerase chain reaction (PCR) from Chlamydomonas reinhardtii by the method of Howitt Crispin A. (BioTechniques 21, 32 (1996)).

Fine chemical Production in Chlamydomonas Reinhardtii:

[2716] The fine chemical production can be analysed as mentioned above. The proteins and nucleic acids can be analysed as mentioned below.

### Example 8

### In-Vitro Analysis of the Function of the Proteins Encoded by the Transformed Sequences

[2717] The determination of the activities and kinetic parameters of enzymes is well known in the art. Experiments for determining the activity of a specific modified enzyme must be adapted to the specific activity of the wild-enzyme type, which is well within the capabilities of the skilled worker. Overviews of enzymes in general and specific details regarding the structure, kinetics, principles, methods, applications and examples for the determination of many enzyme activities can be found for example in the following literature: Dixon M. and Webb E.C.: “Enzymes”, Longmans, London (1979); Fersht “Enzyme Structure and Mechanism”, Freeman, New York(1985); Walsh “Enzymatic Reaction Mechanisms” Freeman, San Francisco (1979); Price N. C., Stevens L., “Fundamentals of Enzymology” Oxford Univ. Press, Oxford (1982); Boyer P. D. (ed.), “The Enzymes”, 3rd ed. Academic Press, New York (1983); Bisswanger H., “Enzymkinetik”, 2^{nd}ed. VCH, Weinheim (1994); Bergmeyer H. U., Bergmeyer J., Grafβl M., (eds.) “Methods of Enzymatic Analysis”, 3^{rd}rd. Vol. I-XII, Verlag Chemie: Weinheim (1983-1986); and “Ullmann's Encyclopedia of Industrial Chemistry” Vol. A9, “Enzymes”, VCH, Weinheim, pp. 352-363 (1987).

### Example 9

### Analysis of the Effect of the Nucleic Acid Molecule on the Production of the Fine Chemical

[2718] The effect of the genetic modification in plants, fungi, algae, ciliates on the production of a fine chemical can be determined by growing the modified microorganisms for example Chlamydomonas reinhardtii under suitable conditions (such as those described above) and analyzing the medium and/or the cellular components for the increased production of the fine chemical. Such analytical techniques are well known to the skilled worker and encompass spectroscopy, thinlayer chromatography, various types of staining methods, enzymatic and microbiological methods and analytical chromatography such as high-performance liquid chromatography (see, for example, “Ullmann Encyclopedia of Industrial Chemistry”, Vol. A2, pp. 89-90 and pp. 443-613, VCH, Weinheim (1985); Fallon A. et al., “Applications of HPLC in Biochemistry” in “Laboratory Techniques in Biochemistry and Molecular Biology”, Vol. 17 (1987); Rehm et al. “Biotechnology”, Vol. 3, Chapter III: “Product recovery and purification”, pp. 469-714, VCH: Weinheim (1993); Belter P. A. et al. “Bioseparations: downstream processing for Biotechnology”, John Wiley and Sons (1988); Kennedy J. F. and Cabral J. M. S., “Recovery processes for biological Materials”, John Wiley and Sons(1992); Shaeiwitzand J. A., Henry J. D., “Biochemical Separations” in “Ullmann's Encyclopedia of Industrial Chemistry”, Vol. B3; chapter 11, pp. 1-27, VCH, Weinheim (1988); and Dechow, “Separation and purification techniques in biotechnology”, Noyes Publications (1989)).

[2719] In addition to the determination of the fermentation end product, other components of the metabolic pathways which are used for the production of the desired compound, such as intermediates and by-products, may also be analyzed in order to determine the total productivity of the organism, the yield and/or production efficiency of the compound. The analytical methods encompass determining the amounts of nutrients in the medium (for example sugars, hydrocarbons, nitrogen sources, phosphate and other ions), determining biomass composition and growth, analyzing the production of ordinary metabolites from biosynthetic pathways and measuring gases generated during the fermentation. Standard methods for these are described in “Applied Microbial Physiology” A Practical Approach, Rhodes P. M. and Stanbury P. F., eds. IRL Press, pp. 103-129; 131-163 and 165-192, and the references cited therein.

### Example 10

### Purification of a Fine Chemical e.g. an Amino Acid

[2720] The amino acid can be recovered from cells and/or from the supernatant of the above-described culture by a variety of methods known in the art. For example, the culture supernatant is recovered first. To this end, the cells are harvested from the culture by slow centrifugation. Cells can generally be disrupted or lysed by standard techniques such as mechanical force or sonication. The cell debris is removed by centrifugation and the supernatant fraction, if appropriate together with the culture supernatant, is used for the further purification of the amino acid. However, it is also possible to process the supernatant alone if the amino acid is present in the supernatant in sufficiently high a concentration. In this case, the amino acid, or the amino acid mixture, can be purified further for example via extraction and/or salt precipitation or via ion-exchange chromatography.

[2721] If required and desired, further chromatography steps with a suitable resin may follow, the amino acid, but not many contaminants in the sample, being retained on the chromatography resin or the contaminants, but not the sample with the product (amino acid), being retained on the resin. If necessary, these chromatography steps may be repeated, using identical or other chromatography resins. The skilled worker is familiar with the selection of suitable chromatography resin and the most effective use for a particular molecule to be purified. The purified product can be concentrated by filtration or ultrafiltration and stored at a temperature at which maximum product stability is ensured. Many purification methods, which are not limited to the above purification method are known in the art. They are described, for example, in Bailey J. E. and Ollis D. F., “Biochemical Engineering Fundamentals”, McGraw-Hill: New York (1986).

[2722] Identity and purity of the amino acid isolated can be determined by standard techniques of the art. They encompass high-performance liquid chromatography (HPLC), spectroscopic methods, mass spectrometry (MS), staining methods, thin-layer chromatography, NIRS, enzyme assay or microbiological assays. These analytical methods are compiled in: Patek et al., Appl. Environ. Microbiol. 60, 133 (1994); Malakhova et al., Biotekhnologiya 11, 27 (1996); and Schmidt et al., Bioprocess Engineer. 19, 67 (1998), “Ullmann's Encyclopedia of Industrial Chemistry” Vol. A27, VCH, Weinheim, pp. 89-90, pp. 521-540, pp. 540-547, pp. 559-566, 575-581 and pp. 581-587 (1996); Michel G., “Biochemical Pathways: An Atlas of Biochemistry and Molecular Biology”, John Wiley and Sons (1999); Fallon A. et al. “Applications of HPLC in Biochemistry in: Laboratory Techniques in Biochemistry and Molecular Biology”, Vol. 17 (1987).

### Example 11

### Cloning of the Sequences as Shown in Table I, Column 5 or 8 for the Expression in Plants

### Example 11a

### PCR Amplification of the Sequences

[2723] Unless otherwise specified, standard methods as described in Sambrook et al., Molecular Cloning: A laboratory manual, Cold Spring Harbor 1989, Cold Spring Harbor Laboratory Press are used.

[2724] The inventive sequences as shown in the respective line in Table I, column 5, prefareably the coding region thereof, were amplified by PCR as described in the protocol of the Pfu Ultra, Pfu Turbo or Herculase DNA polymerase (Stratagene). The composition for the protocol of the Pfu Ultra, Pfu Turbo or Herculase DNA polymerase was as follows: 1×PCR buffer (Stratagene), 0.2 mM of each dNTP, 100 ng genomic DNA of Saccharomyces cerevisiae (strain S288C; Research Genetics, Inc., now Invitrogen), Escherichia coli (strain MG1655; E. coli Genetic Stock Center), Synechocystis sp. (strain PCC6803), Azotobacter vinelandii (strain N.R. Smith,16), Thermus thermophilus (HB8) or 50 ng cDNA from various tissues and development stages of Arabidopsis thaliana (ecotype Columbia), Physcomitrella patens, Glycine max (variety Resnick), Brassica napus, Oryza sativa or Zea mays (variety B73, Mo17, A188), 50 μmol forward primer, 50 μmol reverse primer, with or without 1 M Betaine, 2.5 u Pfu Ultra, Pfu Turbo or Herculase DNA polymerase.

[2725] The amplification cycles were as follows:

[2726] 1 cycle of 2-3 minutes at 94-95° C., then 25-36 cycles with 30-60 seconds at 94-95° C., 30-45 seconds at 50-60° C. and 210-480 seconds at 72° C., followed by 1 cycle of 5-10 minutes at 72° C., then 4-16° C.—preferably for Saccharomyces cerevisiae, Escherichia coli, Synechocystis sp., Azotobacter vinelandii, Thermus thermophilus.

[2727] In case of Arabidopsis thaliana, Brassica napus, Glycine max, Oryza sativa, Physcomitrella patens, Zea mays the amplification cycles were as follows:

[2728] 1 cycle with 30 seconds at 94° C., 30 seconds at 61 ° C., 15 minutes at 72° C., then 2 cycles with 30 seconds at 94° C., 30 seconds at 60° C., 15 minutes at 72° C., then 3 cycles with 30 seconds at 94° C., 30 seconds at 59° C., 15 minutes at 72° C., then 4 cycles with 30 seconds at 94° C., 30 seconds at 58° C., 15 minutes at 72° C., then 25 cycles with 30 seconds at 94° C., 30 seconds at 57° C., 15 minutes at 72° C., then 1 cycle with 10 minutes at 72° C., then finally 4-16° C.

[2729] RNAs were generated with the RNeasy Plant Kit according to the standard protocol (Qiagen) and Superscript II Reverse Transkriptase was used to produce double stranded cDNA according to the standard protocol (Invitrogen).

[2730] ORF specific primer pairs for the genes to be expressed are shown in the respective line in Table III, column 8. The following adapter sequences were added to Saccharomyces cerevisiae ORF specific primers (see Table III) for cloning purposes:

SEQ ID NO: 20

| | | |
|---|---|---|
| i) | foward primer: | 5′-GGAATTCCAGCTGACCACC-3′ |

SEQ ID NO: 21

| | | |
|---|---|---|
| ii) | reverse primer: | 5′-GATCCCCGGGAATTGCCATG-3′ |

[2731] These adaptor sequences allow cloning of the ORF into the various vectors containing the Resgen adaptors, see table column E of Table c.

[2732] The following adapter sequences were added to Saccharomyces cerevisiae, Escherichia coli, Synechocystis sp., Azotobacter vinelandii, Thermus thermophilus, Arabidopsis thaliana, Brassica napus, Glycine max, Oryza sativa , Physcomitrella patens, or Zea mays ORF specific primers for cloning purposes:

| SEQ ID NO: 22 | | |
|---|---|---|
| iii) | forward primer: | 5′-TTGCTCTTCC-3′ |
| SEQ ID NO: 23 | | |
| iiii) | reverse primer: | 5′-TTGCTCTTCG-3′ |

[2733] The adaptor sequences allow cloning of the ORF into the various vectors containing the Colic adaptors, see table column E of Table c.

[2734] Therefore for amplification and cloning of Saccharomyces cerevisiae SEQ ID NO: 13376, a primer consisting of the adaptor sequence i) and the ORF specific sequence SEQ ID NO: 14166 and a second primer consisting of the adaptor sequence ii) and the ORF specific sequence SEQ ID NO: 14167 were used.

[2735] For amplification and cloning of Escherichia coli SEQ ID NO: 6810, a primer consisting of the adaptor sequence iii) and the ORF specific sequence SEQ ID NO: 6816 and a second primer consisting of the adaptor sequence iiii) and the ORF specific sequence SEQ ID NO: 6817 were used.

[2736] For amplification and cloning of Synechocystis sp. SEQ ID NO: 11211, a primer consisting of the adaptor sequence iii) and the ORF specific sequence SEQ ID NO: 11419 and a second primer consisting of the adaptor sequence iiii) and the ORF specific sequence SEQ ID NO: 11420 were used.

[2737] For amplification and cloning of Arabidopsis thaliana SEQ ID NO: 352, a primer consisting of the adaptor sequence iii) and the ORF specific sequence SEQ ID NO: 380 and a second primer consisting of the adaptor sequence iiii) and the ORF specific sequence SEQ ID NO: 381 were used.

[2738] For amplification and cloning of Azotobacter vinelandii SEQ ID NO: 5557, a primer consisting of the adaptor sequence iii) and the ORF specific sequence SEQ ID NO: 6033 and a second primer consisting of the adaptor sequence iiii) and the ORF specific sequence SEQ ID NO: 6034 were used.

[2739] For amplification and cloning of Glycine max SEQ ID NO: 69, a primer consisting of the adaptor sequence iii) and the ORF specific sequence SEQ ID NO: 343 and a second primer consisting of the adaptor sequence iiii) and the ORF specific sequence SEQ ID NO: 344 were used.

[2740] For amplification and cloning of Thermus thermophilus SEQ ID NO: 12698, a primer consisting of the adaptor sequence iii) and the ORF specific sequence SEQ ID NO: 12970 and a second primer consisting of the adaptor sequence iiii) and the ORF specific sequence SEQ ID NO: 12971 were used.

[2741] Following these examples every sequence disclosed in Table I, preferably column 5, especially the coding region thereof can be cloned by fusing the adaptor sequences to the respective specific primers sequences as disclosed in Table III, column 8 using the respective vectors shown in Table c.

[2742] Table c showing binary vectors used in Example 11

TABLE c
Overview of the different vectors used for cloning the ORFs; showing their
SEQ ID NOs (column A), their vector names (column B), the promoters they
contain for expression of the ORFs (column C), if present, the additional artificial
targeting sequence (column D), the adapter sequence (column E), the expression
type conferred by the promoter mentioned in column B (column F)
and the figure number (column G).

| | B | C | D | E | | |
|---|---|---|---|---|---|---|
| A | VectorNa- | Promoter | Target | Adapter | F | G |
| SegID | me | Name | Sequence | Sequence | Expression Type | Figure |
| 30 | pMTX0270 | Super | | Colic | non targeted constitu- | 6 |
| | p | | | | tive expression prefer- | |
| | | | | | entially in green tissues | |
| 31 | pMTX155 | Big35S | | Resgen | non targeted constitu- | 7 |
| | | | | | tive expression prefer- | |
| | | | | | entially in green tissues | |
| 32 | VC- | Super | FNR | Resgen | plastidic targeted consti- | 3 |
| | MME354- | | | | tutive expression pref- | |
| | 1QCZ | | | | erentially in green | |
| | | | | | tissues | |
| 34 | VC- | Super | IVD | Resgen | mitochondric targeted | 8 |
| | MME356- | | | | constitutive expression | |
| | 1QCZ | | | | preferentially in green | |
| | | | | | tissues | |
| 36 | VC- | USP | | Resgen | non targeted expression | 9 |
| | MME301- | | | | preferentially in seeds | |
| | 1QCZ | | | | | |
| 37 | pMTX461k | USP | FNR | Resgen | plastidic targeted ex- | 10 |
| | orrp | | | | pression preferentially | |
| | | | | | in seeds | |
| 39 | VC- | USP | IVD | Resgen | mitochondric targeted | 11 |
| | MME462- | | | | expression preferen- | |
| | 1QCZ | | | | tially in seeds | |
| 41 | VC- | Super | Colic | | non targeted constitu- | 1 |
| | MME220- | | | | tive expression prefer- | |
| | 1qcz | | | | entially in green tissues | |
| 42 | VC- | Super | FNR | Colic | plastidic targeted consti- | 4 |
| | MME432- | | | | tutive expression | |
| | 1qcz | | | | preferentially in green | |
| | | | | | tissues | |
| 44 | VC- | Super | IVD | Colic | mitochondric targeted | 12 |
| | MME431- | | | | constitutive expression | |
| | 1qcz | | | | preferentially in green | |
| | | | | | tissues | |
| 46 | VC- | PcUbi | | Colic | non targeted constitu- | 2 |
| | MME221- | | | | tive expression prefer- | |
| | 1qcz | | | | entially in green tissues | |
| 47 | pMTX447k | PcUbi | FNR | Colic | plastidic targeted consti- | 13 |
| | orr | | | | tutive expression | |
| | | | | | preferentially in green | |
| | | | | | tissues | |
| 49 | VC- | PcUbi | IVD | Colic | mitochondric targeted | 14 |
| | MME445- | | | | constitutive expression | |
| | 1qcz | | | | preferentially in green | |
| | | | | | tissues | |
| 51 | VC- | USP | | Colic | non targeted expression | 15 |
| | MME289- | | | | preferentially in seeds | |
| | 1qcz | | | | | |
| 52 | VC- | USP | FNR | Colic | plastidic targeted | 16 |
| | MME464- | | | | expression | |
| | 1qcz | | | | preferentially in seeds | |
| 54 | VC- | USP | IVD | Colic | mitochondric targeted | 17 |
| | MME465- | | | | expression in | |
| | 1qcz | | | | preferentially seeds | |
| 56 | VC- | Super | | Resgen | non targeted constitu- | 5 |
| | MME489- | | | | tive expression prefer- | |
| | 1QCZ | | | | entially in green tissues | |

[2743] In this Table c PcUbi refers to the PcUbi promoter (Kawalleck et al., Plant. Molecular Biology, 21, 673 (1993)) also being named p-PcUBI (e.g. in Table d), Super refers to the Super promoter (Ni et al,. Plant Journal 7, 661 (1995)) also being named p-Super (e.g. in Table d), Big35S refers to the enhanced 35S promoter (Comai et al., Plant Mol Biol 15, 373 (1990)) and USP to the USP promoter (Baumlein et al., Mol Gen Genet. 225(3), 459 (1991)) also being named p-USP in Table d.

### Example 11b

### Construction of Binary Vectors for Non-Targeted Expression of Proteins

[2744] “Non-targeted” expression in this context means, that no additional targeting sequences were added to the ORF to be expressed.

[2745] For non-targeted expression the binary vectors used for cloning were VC-MME220-1 qcz SEQ ID NO 41 (FIG. 1), VC-MME221-1qcz SEQ ID NO 46 (FIG. 2), and VC-MME489-1QCZ SEQ ID NO: 56 (FIG. 5), respectively. The binary vectors used for cloning the targeting sequence were VC-MME489-1QCZ SEQ ID NO: 56 (FIG. 5) and pMTX0270p SEQ ID NO 30 (FIG. 6), respectively. Other useful binary vectors are known to the skilled worker; an overview of binary vectors and their use can be found in Hellens R., Mullineaux P. and Klee H. (Trends in Plant Science, 5 (10), 446 (2000)). Such vectors have to be equally equipped with appropriate promoters and targeting sequences.

### Example 11c

### Construction of Binary Vectors for Plastidic-Targeted Expression of Proteins

[2746] For construction of a vector for plastid-targeted expression in preferential green tissues or preferential in seeds, the plastidic targeting sequence of the gene FNR from Spinacia oleracea was amplified. In order to amplify the targeting sequence, genomic DNA was extracted from leaves of 4 weeks old S. oleracea plants (DNeasy Plant Mini Kit, Qiagen, Hilden). The gDNA was used as the template for a PCR.

[2747] To enable cloning of the transit sequence into the vector VC-MME489-1QCZ and VC-MME301-1 QCZ an EcoRl restriction enzyme recognition sequence was added to both the forward and reverse primers, whereas for cloning in the vectors pMTX0270p, VC-MME220-1 qcz, VC-MME-221-1qcz and VC-MME289-1qcz a Pmel restriction enzyme recognition sequence was added to the forward primer and a Ncol site was added to the reverse primer.

FNR5EcoResgen
SEQ ID NO: 24
ATA GAA TTC GCA TAA ACT TAT CTT CAT AGT TGC C
FNR3EcoResgen
SEQ ID NO: 25
ATA GAA TTC AGA GGC GAT CTG GGC CCT
FNR5PmeColic
SEQ ID NO: 26
ATA GTT TAA ACG CAT AAA CTT ATC TTC ATA GTT GCC
FNR3NcoColic
SEQ ID NO: 27
ATA CCA TGG AAG AGC AAG AGG CGA TCT GGG CCC T

[2748] The resulting sequence SEQ ID NO: 28 amplified from genomic spinach DNA, comprised a 511TR (bp 1-165), and the coding region (bp 166-273 and 351-419). The coding sequence is interrupted by an intronic sequence from by 274 to by 350:

gcataaacttatcttcatagttgccactccaatttgctccttgaatct
cctccacccaatacataatccactcctccatcacccacttcactacta
aatcaaacttaactctgtttttctctctcctcctttcatttcttattc
ttccaatcatcgtactccgccatgaccaccgctgtcaccgccgctgtt
tctttcccctctaccaaaaccacctctctccgcccgaagctcctccgt
catttcccctgacaaaatcagctacaaaaaggtgattcccaatttcac
tgtgttttttattaataatttgttattttgatgatgagatgattaatt
tgggtgctgcaggttcctttgtactacaggaatgtatctgcaactggg
aaaatgggacccatcagggcccagatcgcctct

### (SEQ ID NO: 28)

[2749] The PCR fragment derived with the primers FNR5EcoResgen and FNR3EcoResgen was digested with EcoRl and ligated in the vectors VC-MME489-1QCZ and VC-MME301-1QCZ, that had also been digested with EcoRl. The correct orientation of the FNR targeting sequence was tested by sequencing. The vector generated in this ligation step were VC-MME354-1 QCZ and pMTX461 korrp, respectively.

[2750] The PCR fragment derived with the primers FNR5PmeColic and FNR3NcoColic was digested with Pmel and Ncol and ligated in the vectors pMTX0270p, VC-MME220-1qcz, VC-MME221-1qcz and VC-MME289-1qcz that had been digested with Smal and Ncol. The vectors generated in this ligation step were VC-MME432-1 qcz, VC-MME464-1 qcz and pMTX447korr, respectively.

[2751] For plastidic-targeted constitutive expression in preferentially green tissues an artifical promoter A(ocs)3AmasPmas promoter (Super promotor)) (Ni et al,. Plant Journal 7, 661 (1995), WO 95/14098) was used in context of the vector VC-MME354-1QCZ for ORFs from Saccharomyces cerevisiae as well as Arabidopsis thaliana and in context of the vector VC-MME432-1 qcz for ORFs from Escherichia coli as well as Arabidopsis thaliana, resulting in each case in an “inframe” fusion of the FNR targeting sequence with the ORFs.

[2752] For plastidic-targeted expression in preferentially seeds the USP promoter (Baumlein et al., Mol Gen Genet. 225(3):459-67 (1991)) was used in context of either the vector pMTX461 korrp for ORFs from Saccharomyces cerevisiae or in context of the vector VC-MME464-1 qcz for ORFs from Escherichia coli, resulting in each case in an “in-frame” fusion of the FNR targeting sequence with the ORFs.

[2753] For plastidic-targeted constitutive expression in preferentially green tissues and seeds the PcUbi promoter was used in context of the vector pMTX447korr for ORFs from Saccharomyces cerevisiae, Escherichia coli, Synechocystis sp., Azotobacter vinelandii, Thermus thermophilus, Arabidopsis thaliana, Brassica napus, Glycine max, Oryza sativa, Physcomitrella patens, or Zea mays, resulting in each case in an “in-frame” fusion of the FNR targeting sequence with the ORFs.

### Example 11d

### Construction of Binary Vectors for Mitochondric-Targeted Expression of Proteins

[2754] Amplification of the mitochondrial targeting sequence of the gene IVD from Arabidopsis thaliana and construction of vector for mitochondrial-targeted expression in preferential green tissues or preferential in seeds.

[2755] In order to amplify the targeting sequence of the IVD gene from A. thaliana, genomic DNA was extracted from leaves of A.thaliana plants (DNeasy Plant Mini Kit, Qiagen, Hilden). The gDNA was used as the template for a PCR.

[2756] To enable cloning of the transit sequence into the vectors VC-MME489-1 QCZ and VC-MME301-1QCZ an EcoRl restriction enzyme recognition sequence was added to both the forward and reverse primers, whereas for cloning in the vectors VC-MME220-1qcz, VC-MME221-1qcz and VC-MME289-1qcz a Pmel restriction enzyme recognition sequence was added to the forward primer and a Ncol site was added to the reverse primer.

IVD5EcoResgen
SEQ ID NO: 57
ATA GAA TTC ATG CAG AGG TTT TTC TCC GC
IVD3EcoResgen
SEQ ID NO: 58
ATA GAA TTC CGA AGA ACG AGA AGA GAA AG
IVD5PmeColic
SEQ ID NO: 59
ATA GTT TAA ACA TGC AGA GGT TTT TCT CCG C
IVD3NcoColic
SEQ ID NO: 60
ATA CCA TGG AAG AGC AAA GGA GAG ACG AAG AAC GAG

[2757] The resulting sequence (SEQ ID NO: 61) amplified from genomic A. thaliana DNA with IVD5EcoResgen and IVD3EcoResgen comprised 81 bp:

(SEQ ID NO: 61)
atgcagaggtttttctccgccagatcgattctcggttacgccgtcaa
gacgcggaggaggtctttctcttctcgttcttcg

[2758] The resulting sequence (SEQ ID NO: 62) amplified from genomic A. thaliana DNA with IVD5PmeColic and IVD3NcoColic comprised 89 bp:

(SEQ ID NO: 62)
atgcagaggtttttctccgccagatcgattctcggttacgccgtcaag
acgcggaggaggtctttctcttctcgttcttcgtctctcct

[2759] The PCR fragment derived with the primers IVD5EcoResgen and IVD3EcoResgen was digested with EcoRl and ligated in the vectors VC-MME489-1QCZ and VC-MME301-1QCZ that had also been digested with EcoRl. The correct orientation of the IVD targeting sequence was tested by sequencing. The vectors generated in this ligation step were VC-MME356-1 QCZ and VC-MME462-1 QCZ, respectively.

[2760] The PCR fragment derived with the primers IVD5PmeColic and IVD3NcoColic was digested with Pmel and Ncol and ligated in the vectors VC-MME220-1qcz, VC-MME221-1qcz and VC-MME289-1qcz that had been digested with Smal and Ncol. The vectors generated in this ligation step were VC-MME431-1qcz, VC-MME465-1qcz and VC-MME445-1qcz, respectively.

[2761] For mitochondrial-targeted constitutive expression in preferentially green tissues an artifical promoter A(ocs)3AmasPmas promoter (Super promotor) (Ni et al,. Plant Journal 7, 661 (1995), WO 95/14098) was used in context of the vector VC-MME356-1 QCZ for ORFs from Saccharomyces cerevisiae and in context of the vector VC-MME431-1qcz for ORFs from Escherichia coli, resulting in each case in an “in-frame” fusion between the IVD sequence and the respective ORFs.

[2762] For mitochondrial-targeted constitutive expression in preferentially seeds the USP promoter (Baumlein et al., Mol Gen Genet. 225 (3), 459 (1991)) was used in context of the vector VC-MME462-1 QCZ for ORFs from Saccharomyces cerevisiae and in context of the vector VCMME 465-1qcz for ORFs from Escherichia coli, resulting in each case in an “in-frame” fusion between the IVD sequence and the respective ORFs.

[2763] For mitochondrial-targeted constitutive expression in preferentially green tissues and seeds the PcUbi promoter was used in context of the vector VC-MME445-1 qcz for ORFs from Saccharomyces cerevisiae, Escherichia coli, Synechocystis sp., Azotobacter vinelandii, Thermus thermophilus, Arabidopsis thaliana, Brassica napus, Glycine max, Oryza sativa, Physcomitrella patens, or Zea mays, resulting in each case in an “in-frame” fusion between the IVD sequence and the respective ORFs.

[2764] Other useful binary vectors are known to the skilled worker; an overview of binary vectors and their use can be found in Hellens R., Mullineaux P. and Klee H., (Trends in Plant Science, 5 (10), 446 (2000)). Such vectors have to be equally equipped with appropriate promoters and targeting sequences.

### Example 11e

### Cloning of Inventive Sequences as Shown in Table I, Column 5 in the Different Expression Vectors

[2765] For cloning of for example SEQ ID NO: 6810 from Escherichia coli or any other ORF from Escherichia coli, Synechocystis sp., Azotobacter vinelandii, Thermus thermophilus, Arabidopsis thaliana or Glycine max the vector DNA was treated with the restriction enzymes Pacl and Ncol following the standard protocol (MBI Fermentas).

[2766] For cloning for example the ORFs of SEQ ID NO: 14171 from Saccharomyces cerevisiae or any other ORF from Saccharomyces cerevisiae into vectors containing the Resgen adaptor sequence the respective vector DNA was treated with the restriction enzyme Ncol.

[2767] For cloning of for example ORFs SEQ ID NO: 13376 from Saccharomyces cerevisiae or any other ORF from Saccharomyces cerevisiae into vectors containing the Colic adaptor sequence, the respective vector DNA was treated with the restriction enzymes Pacl and Ncol following the standard protocol (MBI Fermentas).

[2768] In all cases the reaction was stopped by inactivation at 70° C. for 20 minutes and purified over QlAquick or NucleoSpin Extract II columns following the standard protocol (Qiagen or Macherey-Nagel).

[2769] Then the PCR-product representing the amplified ORF with the respective adapter sequences and the vector DNA were treated with T4 DNA polymerase according to the standard protocol (MBI Fermentas) to produce single stranded overhangs with the parameters 1 unit T4 DNA polymerase at 37° C. for 2-10 minutes for the vector and 1-2 u T4 DNA polymerase at 15-17° C. for 10-60 minutes for the PCR product representing SEQ ID NO: 6810.

[2770] The reaction was stopped by addition of high-salt buffer and purified over QlAquick or NucleoSpin Extract II columns following the standard protocol (Qiagen or Macherey-Nagel).

[2771] According to this example the skilled person is able to clone all sequences disclosed in Table I, preferably column 5 or column 8, especially the coding region thereof.

[2772] Approximately 30-60 ng of prepared vector and a defined amount of prepared amplificate were mixed and hybridized at 65° C. for 15 minutes followed by 37° C. 0,1 ° C./1 seconds, followed by 37° C. 10 minutes, followed by 0,1 ° C./1 seconds, then 4-10 ° C.

[2773] The ligated constructs were transformed in the same reaction vessel by addition of competent E. coli cells (strain DHSalpha) and incubation for 20 minutes at 1° C. followed by a heat shock for 90 seconds at 42° C. and cooling to 1-4° C. Then, complete medium (SOC) was added and the mixture was incubated for 45 minutes at 37° C. The entire mixture was subsequently plated onto an agar plate with 0.05 mg/ml kanamycin and incubated overnight at 37° C.

[2774] The outcome of the cloning step was verified by amplification with the aid of primers which bind upstream and downstream of the integration site, thus allowing the amplification of the insertion. The amplifications were carried out as described in the protocol of Taq DNA polymerase (Gibco-BRL).

[2775] The amplification cycles were as follows:

[2776] 1 cycle of 1-5 minutes at 94° C., followed by 35 cycles of in each case 15-60 seconds at 94° C., 15-60 seconds at 50-66° C. and 5-15 minutes at 72° C., followed by 1 cycle of 10 minutes at 72° C., then 4-16° C.

[2777] Several colonies were checked, but only one colony for which a PCR product of the expected size was detected was used in the following steps.

[2778] A portion of this positive colony was transferred into a reaction vessel filled with complete medium (LB) supplemented with kanamycin and incubated overnight at 37° C.

[2779] The plasmid preparation was carried out as specified in the Qiaprep or NucleoSpin Multi-96 Plus standard protocol (Qiagen or Macherey-Nagel).

### Example 11f

### Generation of Transgenic Plants which Express Sequences as Shown in Table I, Preferably Column 5

[2780] 1-5 ng of the plasmid DNA isolated was transformed by electroporation or transformation into competent cells of Agrobacterium tumefaciens, of strain GV 3101 pMP90 (Koncz and Schell, Mol. Gen. Gent. 204, 383 (1986)). Thereafter, complete medium (YEP) was added and the mixture was transferred into a fresh reaction vessel for 3 hours at 28° C. Thereafter, all of the reaction mixture was plated onto YEP agar plates supplemented with the respective antibiotics, e.g. rifampicine (0.1 mg/ml), gentamycine (0.025 mg/ml and kanamycin (0.05 mg/ml) and incubated for 48 hours at 28° C.

[2781] The agrobacteria that contains the plasmid construct were then used for the transformation of plants.

[2782] A colony was picked from the agar plate with the aid of a pipette tip and taken up in 3 ml of liquid TB medium, which also contained suitable antibiotics as described above. The preculture was grown for 48 hours at 28° C. and 120 rpm.

[2783] 400 ml of LB medium containing the same antibiotics as above were used for the main culture. The preculture was transferred into the main culture. It was grown for 18 hours at 28° C. and 120 rpm. After centrifugation at 4 000 rpm, the pellet was resuspended in infiltration medium (MS medium, 10% sucrose).

[2784] In order to grow the plants for the transformation, dishes (Piki Saat 80, green, provided with a screen bottom, 30×20×4.5 cm, from Wiesauplast, Kunststofftechnik, Germany) were half-filled with a GS 90 substrate (standard soil, Werkverband E.V., Germany). The dishes were watered overnight with 0.05% Proplant solution (Chimac-Apriphar, Belgium). A. thaliana C24 seeds (Nottingham Arabidopsis Stock Centre, UK; NASC Stock N906) were scattered over the dish, approximately 1 000 seeds per dish. The dishes were covered with a hood and placed in the stratification facility (8 h, 110 μmol m⁻² s⁻¹, 22° C.; 16 h, dark, 6° C.). After 5 days, the dishes were placed into the short-day controlled environment chamber (8 h, 130 μmol m⁻2 s⁻1, 22° C.; 16 h, dark, 20° C.), where they remained for approximately 10 days until the first true leaves had formed.

[2785] The seedlings were transferred into pots containing the same substrate (Teku pots, 7 cm, LC series, manufactured by Pöppelmann GmbH & Co, Germany). Five plants were pricked out into each pot. The pots were then returned into the short-day controlled environment chamber for the plant to continue growing.

[2786] After 10 days, the plants were transferred into the greenhouse cabinet (supplementary illumination, 16 h, 340 μmol m⁻² s⁻¹, 22° C.; 8 h, dark, 20° C.), where they were allowed to grow for further 17 days.

[2787] For the transformation, 6-week-old Arabidopsis plants, which had just started flowering were immersed for 10 seconds into the above-described agrobacterial suspension which had previously been treated with 10 μl Silwett L77 (Crompton S. A., Osi Specialties, Switzerland). The method in question is described by Clough J. C. and Bent A. F. (Plant J. 16, 735 (1998)).

[2788] The plants were subsequently placed for 18 hours into a humid chamber. Thereafter, the pots were returned to the greenhouse for the plants to continue growing. The plants remained in the greenhouse for another 10 weeks until the seeds were ready for harvesting.

[2789] Depending on the tolerance marker used for the selection of the transformed plants the harvested seeds were planted in the greenhouse and subjected to a spray selection or else first sterilized and then grown on agar plates supplemented with the respective selection agent. Since the vector contained the bar gene as the tolerance marker, plantlets were sprayed four times at an interval of 2 to 3 days with 0.02% BASTA® and transformed plants were allowed to set seeds.

[2790] The seeds of the transgenic A. thaliana plants were stored in the freezer (at −20° C.).

### Example 11g

### Plant Culture (Arabidopsis) for Bioanalytical Analyses

[2791] For the bioanalytical analyses of the transgenic plants, the latter were grown uniformly a specific culture facility. To this end the GS-90 substrate as the compost mixture was introduced into the potting machine (Laible System GmbH, Singen, Germany) and filled into the pots. Thereafter, 35 pots were combined in one dish and treated with Previcur. For the treatment, 25 ml of Previcur were taken up in 10 l of tap water. This amount was sufficient for the treatment of approximately 200 pots. The pots were placed into the Previcur solution and additionally irrigated overhead with tap water without Previcur. They were used within four days.

[2792] For the sowing, the seeds, which had been stored in the refrigerator (at −20° C.), were removed from the Eppendorf tubes with the aid of a toothpick and transferred into the pots with the compost. In total, approximately 5 to 12 seeds were distributed in the middle of the pot.

[2793] After the seeds had been sown, the dishes with the pots were covered with matching plastic hood and placed into the stratification chamber for 4 days in the dark at 4° C. The humidity was approximately 90%. After the stratification, the test plants were grown for 22 to 23 days at a 16 h-light, 8-h-dark rhythm at 20° C., an atmospheric humidity of 60% and a CO2 concentration of approximately 400 ppm. The light sources used were Powerstar HQI-T 250 W/D Daylight lamps from Osram, which generate a light resembling the solar color spectrum with a light intensity of approximately 220 μmol m⁻² s⁻¹.

[2794] Selection of transgenic plants was depending on the use resistance marker. In case of the bar gene as the resistance marker plantlets were sprayed three times at days 8-10 after sowing with 0.02% BASTA® (Glufosinate ammonium; Bayer CropScience, Germany).The resistant plants were thinned when they had reached the age of 14 days. The plants, which had grown best in the center of the pot were considered the target plants. All the remaining plants were removed carefully with the aid of metal tweezers and discarded.

[2795] During their growth, the plants received overhead irrigation with distilled water (onto the compost) and bottom irrigation into the placement grooves. Once the grown plants had reached the age of 23 days, they were harvested. In case their seeds are desired these had been harvested 10 to 12 weeks after sowing (once they are ripe).

### Example 11 h

### Metabolic Analysis of Transformed Plants

[2796] The modifications identified in accordance with the invention, in the content of above-described metabolites, were identified by the following procedure.

### a) Sampling and Storage of the Samples

[2797] Sampling was performed directly in the controlled-environment chamber. The plants, or respective parts thereof, like leafs, were cut using small laboratory scissors, rapidly weighed on laboratory scales, transferred into a pre-cooled extraction sleeve and placed into an aluminum rack cooled by liquid nitrogen. If required, the extraction sleeves can be stored in the freezer at −80° C. The time elapsing between cutting the plant/plant parts to freezing it in liquid nitrogen amounted to not more than 10 to 20 seconds.

### b) Lyophilization

[2798] During the experiment, care was taken that the plants either remained in the deep-frozen state (temperatures <−40° C.) or were freed from water by lyophilization until the first contact with solvents.

[2799] The aluminum rack with the plant samples in the extraction sleeves was placed into the precooled (−40° C.) lyophilization facility. The initial temperature during the main drying phase was −35° C. and the pressure was 0.120 mbar. During the drying phase, the parameters were altered following a pressure and temperature program. The final temperature after 12 hours was +30° C. and the final pressure was 0.001 to 0.004 mbar. After the vacuum pump and the refrigerating machine had been switched off, the system was flushed with air (dried via a drying tube) or argon.

### c) Extraction

### Extraction of Arabidopsis Green Tissue:

[2800] Immediately after the lyophilization apparatus had been flushed, the extraction sleeves with the lyophilized plant material were transferred into the 5 ml extraction cartridges of the ASE device (Accelerated Solvent Extractor ASE 200 with Solvent Controller and AutoASE software (DIONEX)).

[2801] The 24 sample positions of an ASE device (Accelerated Solvent Extractor ASE 200 with Solvent Controller and AutoASE software (DIONEX)) were filled with plant samples, including some samples for testing quality control.

[2802] The polar substances were extracted with approximately 10 ml of methanol/water (80/20, v/v) at T=70° C. and p=140 bar, 5 minutes heating-up phase, 1 minute static extraction. The more lipophilic substances were extracted with approximately 10 ml of methanol/dichloromethane (40/60, v/v) at T=70° C. and p=140 bar, 5 minute heating-up phase, 1 minute static extraction.

[2803] The two solvent mixtures were extracted into the same glass tubes (centrifuge tubes, 50 ml, equipped with screw cap and pierceable septum for the ASE (DIONEX)).

[2804] The solution was treated with internal standards: ribitol, L-glycine-2,2-d₂, L-alanine-2,3,3,3-d₄, methionine-methyl-d₃, and α-methylglucopyranoside and methyl nonadecanoate, methyl undecanoate, methyl tridecanoate, methyl pentadecanoate, methyl nonacosanoate.

[2805] The total extract was treated with 8 ml of water. The solid residue of the plant sample and the extraction sleeve were discarded.

[2806] The extract was shaken and then centrifuged for 5 to 10 minutes at at least 1400 g in order to accelerate phase separation. 1 ml of the supernatant methanol/water phase (“polar phase”, colorless) was removed for the further GC analysis, and 1 ml was removed for the LC analysis. The remainder of the methanol/water phase was discarded. 0.5 ml of the organic phase (“lipid phase”, dark green) was removed for the further GC analysis and 0.5 ml was removed for the LC analysis. All the portions removed were evaporated to dryness using the IR Dancer infrared vacuum evaporator (Hettich). The maximum temperature during the evaporation process did not exceed 40° C. Pressure in the apparatus was not less than 10 mbar.

### Extraction of Arabidopsis Seeds:

[2807] 3 mg of Arabidopsis seeds are transferred into a 1.2-ml-stainless steel grinding jar and ground and extracted with a mixture of 770 μl methanol and 290 μl water. A solution containing commercially available standard substances (ribitol, L-glycine-2,2-d₂, L-alanine-2,3,3,3-d4, methionine-methyl-d₃, tryptophane-d₅, Arginine ¹³C₆¹⁵N₄, Pep3 (Boc-Ala-Gly-Gly-Gly-OH) and α-methylglucopyranoside) is added as internal standard. The extraction is performed using a stainless steel ball and a ball mill (Retsch MM 200, Retsch, Germany) operated at 30 Hz for 3 minutes. After centrifugation at 6000 rpm for 5 minutes 800 μl of the extraction solvent is transferred into a 2-ml-reaction tube (Eppendorf).

[2808] A solution of commercially available internal standard substances (Coenzyme Q1, Coenzyme Q2, Coenzyme Q4, and methyl nonadecanoate, undecanoic acid, tridecanoic acid, pentadecanoic acid, methyl nonacosanoate) is added to the residue as internal standard. For the extraction of lipophilic metabolites, 640 μl methylene chloride and 170 μl methanol are added and the sample is extracted in a ball mill operated at 30 Hz for 3 minutes. After centrifugation at 6000 rpm for 5 minutes 800 μl of the extraction solvent is transferred and combined with the extract of the first extraction step. After the addition of 400 μl of water and a centrifugation step to ensure proper separation of the organic and aqueous layer, two aliquots of 500 μl of the aqueous layer (polar phase) are taken for GC and LC analysis, respectively. Also two aliquots of 100 μl of the organic layer (lipid phase) are take for GC and LC analysis, respectively. All the portions removed were evaporated to dryness using the IR Dancer infrared vacuum evaporator (Hettich). The maximum temperature during the evaporation process did not exceed 40° C. Pressure in the apparatus was not less than 10 mbar.

### Extraction of Rice or Corn Seed Material:

[2809] 20 rice or corn kernels are homogenized with a 50-ml-stainless steel grinding jar and ground with a stainless steel grinding ball using a ball mill (Retsch MM 200, Retsch, Germany) operated at 30 Hz for 3 minutes. The ground samples are lyophilized over night The initial temperature during the main drying phase was −35 ° C. and the pressure was 0.120 mbar. During the drying phase, the parameters were altered following a pressure and temperature program. The final temperature after 12 hours was +30° C. and the final pressure was 0.001 to 0.004 mbar. After the vacuum pump and the refrigerating machine had been switched off, the system was flushed with air (dried via a drying tube) or argon. 50 mg of the lyophilized kernel material are weighed into glass fibre extraction thimbles and extracted and further processed as described for the extraction of Arabidopsis green tissue.

### d) Processing the Lipid Phase for the LC/MS or LC/MS/MS Analysis

[2810] The lipid extract, which had been evaporated to dryness was taken up in mobile phase. The HPLC was run with gradient elution.

[2811] The polar extract, which had been evaporated to dryness was taken up in mobile phase. The HPLC was run with gradient elution.

### LC-MS Analysis:

[2812] The LC part was carried out on a commercially available LC/MS system from Agilent Technologies, USA. For polar extracts 10 μl are injected into the system at a flow rate of 200 μl/min. The separation column (Reversed Phase C18) was maintained at 15 ° C. during chromatography. For lipid extracts 5 μl are injected into the system at a flow rate of 200 μl/min. The separation column (Reversed Phase C18) was maintained at 30 ° C. HPLC was performed with gradient elution. The mass spectrometric analysis was performed on an Applied Biosystems API 4000 triple quadrupole instrument with turbo ion spray source. For polar extracts the instrument measured in negative ion mode in MRM-mode and fullscan mode from 100-1000 amu. For lipid extracts the instrument measured in positive ion mode in MRM-mode fullscan mode from 100-1000 amu. MS analysis is described in more detail in patent publication number WO 03/073464.

### e) Derivatization of the Lipid Phase for the GC/MS Analysis

### Derivatization of the Lipid Phase for the GC/MS Analysis:

[2813] For the transmethanolysis, a mixture of 140 μl of chloroform, 37 μl of hydrochloric acid (37% by weight HCl in water), 320 μl of methanol and 20 μl of toluene was added to the evaporated extract of the lipid phase. The vessel was sealed tightly and heated for 2 hours at 100° C., with shaking. The solution was subsequently evaporated to dryness. The residue was dried completely.

[2814] The methoximation of the carbonyl groups was carried out by reaction with methoxyamine hydrochloride (5 mg/ml in pyridine, 100 μl for 1.5 hours at 60° C.) in a tightly sealed vessel. 20 μl of a solution of odd-numbered, straight-chain fatty acids (solution of each 0.3 mg/ml of fatty acids from 7 to 25 carbon atoms and each 0.6 mg/ml of fatty acids with 27, 29 and 31 carbon atoms in 3/7 (v/v) pyridine/toluene) were added as time standards. Finally, the derivatization with 100 μl of N-methyl-N-(trimethylsilyl)-2,2,2-trifluoroacetamide (MSTFA) was carried out for 30 minutes at 60° C., again in the tightly sealed vessel. The final volume before injection into the GC was 220 μl.

### f) Derivatization of the Polar Phase for the GC/MS Analysis

[2815] The methoximation of the carbonyl groups was carried out by reaction with methoxyamine hydrochloride (5 mg/ml in pyridine, 50 μl for 1.5 hours at 60° C.) in a tightly sealed vessel. 10 μl of a solution of odd-numbered, straight-chain fatty acids (solution of each 0.3 mg/ml of fatty acids from 7 to 25 carbon atoms and each 0.6 mg/mL of fatty acids with 27, 29 and 31 carbon atoms in 3/7 (v/v) pyridine/toluene) were added as time standards. Finally, the derivatization with 50 μl of N-methyl-N-(trimethylsilyl)-2,2,2-trifluoroacetamide (MSTFA) was carried out for 30 minutes at 60° C., again in the tightly sealed vessel. The final volume before injection into the GC was 110 μl.

### g) GC-MS Analysis

[2816] The GC-MS systems consisted of an Agilent 6890 GC coupled to an Agilent 5973 MSD. The autosamplers were CompiPal or GCPal from CTC. For the analysis usual commercial capillary separation columns (30 m×0.25 mm×0.25 pm) with different poly-methyl-siloxane stationary phases containing 0% up to 35% of aromatic moieties, depending on the analysed sample materials and fractions from the phase separation step, were used (for example: DB-1 ms, HP-5ms, DB-XLB, DB-35ms, Agilent Technologies). Up to 1 μl of the final volume was injected splitless and the oven temperature program was started at 70 ° C. and ended at 340 ° C. with different heating rates depending on the sample material and fraction from the phase separation step in order to achieve a sufficient chromatographic separation and number of scans within each analyte peak. Usual GC-MS standard conditions, for example constant flow with nominal 1 to 1.7 ml/min. and helium as the mobile phase gas were used. Ionisation was done by electron impact with 70 eV, scanning within a m/z range from 15 to 600 with scan rates from 2.5 to 3 scans/sec and standard tune conditions.

### h) Analysis of the Various Plant Samples

[2817] The samples were measured in individual series of 20 to 21 plant or seed samples each (also referred to as sequences), each sequence containing at least 5 wild-type plants or seeds as controls. Seed samples were from individual plants. The peak area of each analyte was divided by the peak area of the respective internal standard. The data were standardized for the fresh weight established for the plant or seed sample, respectively. The values calculated thus were related to the wild-type control group by being divided by the mean of the corresponding data of the wild-type control group of the same sequence. The values obtained were referred to as ratio_by_weight, they are comparable between sequences and indicate how much the analyte concentration in the transgenic plant sample differs in relation to the wild-type control. Appropriate controls were done before to proof that the vector and transformation procedure itself has no significant influence on the metabolic composition of the plants. Therefore the described changes in comparison with wild-types were caused by the introduced genes. At least 3-5 independent lines were analyzed in two independent experiments for each construct.

[2818] As an alternative, the amino acids can be detected advantageously via HPLC separation in ethanolic extract as described by Geigenberger et al. (Plant Cell & Environ, 19, 43 (1996)).

[2819] The results of the different plant analyses can be seen from the Table d.

### Table d Showing Results of Plant Analyses

TABLE d

| SeqID | Target | Locus | Metabolite | Source | Promotor | Method | Min | Max |
|---|---|---|---|---|---|---|---|---|
| 69 | non- | 49747384_ | methionine | ARA_LEAF | p-PcUBI | GC | 41 | 74 |
| | targeted | SOYBEAN | | | | | | |
| 352 | non- | At1g09680 | methionine | ARA_LEAF | p-PcUBI | LC | 41 | 60 |
| | targeted | | | | | | | |
| 385 | non- | At1g14490 | methionine | ARA_LEAF | p-PcUBI | LC | 38 | 52 |
| | targeted | | | | | | | |
| 627 | non- | At1g31230 | methionine | ARA_LEAF | Big35S | GC | 60 | 306 |
| | targeted | | | | | | | |
| 812 | non- | At1g48040 | methionine | ARA_LEAF | p-PcUBI | GC | 47 | 49 |
| | targeted | | | | | | | |
| 1061 | non- | At1g68320 | methionine | ARA_LEAF | p-PcUBI | GC | 38 | 47 |
| | targeted | | | | | | | |
| 1298 | non- | At2g25070 | methionine | ARA_LEAF | p-PcUBI | LC | 42 | 89 |
| | targeted | | | | | | | |
| 1623 | non- | At2g45420 | methionine | ARA_LEAF | p-PcUBI | LC | 32 | 37 |
| | targeted | | | | | | | |
| 1696 | non- | At3g09820 | methionine | ARA_LEAF | p-PcUBI | LC | 53 | 53 |
| | targeted | | | | | | | |
| 1815 | non- | At3g23000 | methionine | ARA_LEAF | p-PcUBI | GC | 43 | 67 |
| | targeted | | | | | | | |
| 2367 | non- | At3g61830 | methionine | ARA_LEAF | p-PcUBI | GC | 36 | 147 |
| | targeted | | | | | | | |
| 2573 | non- | At3g62930 | methionine | ARA_LEAF | p-PcUBI | GC | 37 | 63 |
| | targeted | | | | | | | |
| 2935 | non- | At3g62950 | methionine | ARA_LEAF | p-PcUBI | GC | 37 | 77 |
| | targeted | | | | | | | |
| 3279 | non- | At4g15670 | methionine | ARA_LEAF | p-PcUBI | LC | 37 | 52 |
| | targeted | | | | | | | |
| 3654 | non- | At4g15700 | methionine | ARA_LEAF | p-PcUBI | GC | 43 | 84 |
| | targeted | | | | | | | |
| 4040 | non- | At4g32480 | methionine | ARA_LEAF | p-PcUBI | LC | 44 | 184 |
| | targeted | | | | | | | |
| 4102 | non- | At4g33040 | methionine | ARA_LEAF | p-PcUBI | GC | 34 | 54 |
| | targeted | | | | | | | |
| 4348 | non- | At4g35310 | methionine | ARA_LEAF | p-PcUBI | GC | 62 | 83 |
| | targeted | | | | | | | |
| 4904 | non- | At5g18600 | methionine | ARA_LEAF | p-PcUBI | GC | 40 | 75 |
| | targeted | | | | | | | |
| 5318 | non- | At5g57050 | methionine | ARA_LEAF | p-PcUBI | GC | 36 | 45 |
| | targeted | | | | | | | |
| 5493 | non- | At5g64920 | methionine | ARA_LEAF | p-PcUBI | GC | 34 | 37 |
| | targeted | | | | | | | |
| 5557 | non- | AvinDRAFT_1495 | methionine | ARA_LEAF | p-PcUBI | GC | 38 | 42 |
| | targeted | | | | | | | |
| 6040 | non- | AvinDRAFT_2091 | methionine | ARA_LEAF | p-PcUBI | GC | 37 | 39 |
| | targeted | | | | | | | |
| 6075 | non- | AvinDRAFT_3028 | methionine | ARA_LEAF | p-PcUBI | GC | 39 | 55 |
| | targeted | | | | | | | |
| 6268 | non- | AvinDRAFT_3546 | methionine | ARA_LEAF | p-PcUBI | LC | 58 | 172 |
| | targeted | | | | | | | |
| 6510 | non- | AvinDRAFT_5103 | methionine | ARA_LEAF | p-PcUBI | GC | 280 | 288 |
| | targeted | | | | | | | |
| 6674 | non- | AvinDRAFT_6075 | methionine | ARA_LEAF | p-PcUBI | LC | 37 | 46 |
| | targeted | | | | | | | |
| 6810 | non- | B0012 | methionine | ARA_LEAF | p-Super | LC | 40 | 66 |
| | targeted | | | | | | | |
| 6818 | non- | B0078 | methionine | ARA_SEED_2 | p-USP | GC | 21 | 24 |
| | targeted | | | | | | | |
| 7081 | non- | B0161 | methionine | ARA_LEAF | p-Super | GC | 71 | 182 |
| | targeted | | | | | | | |
| 7269 | plastidic | B0348 | methionine | ARA_SEED_2 | p-USP | GC | 21 | 57 |
| 7333 | non- | B0449 | methionine | ARA_LEAF | p-Super | GC | 48 | 194 |
| | targeted | | | | | | | |
| 7686 | non- | B0486 | methionine | ARA_LEAF | p-Super | GC | 32 | 59 |
| | targeted | | | | | | | |
| 7730 | plastidic | B0870 | methionine | ARA_SEED_2 | p-USP | GC | 17 | 38 |
| 7917 | non- | B0898 | methionine | ARA_LEAF | p-Super | GC | 36 | 1310 |
| | targeted | | | | | | | |
| 7941 | non- | B1003 | methionine | ARA_LEAF | p-Super | GC | 49 | 144 |
| | targeted | | | | | | | |
| 7947 | non- | B1522 | methionine | ARA_LEAF | p-Super | GC | 42 | 144 |
| | targeted | | | | | | | |
| 7992 | non- | B1601 | methionine | ARA_LEAF | p-Super | GC | 41 | 64 |
| | targeted | | | | | | | |
| 8033 | plastidic | B1814 | methionine | ARA_SEED_2 | p-USP | GC | 19 | 59 |
| 8316 | non- | B1838 | methionine | ARA_LEAF | p-Super | LC | 50 | 59 |
| | targeted | | | | | | | |
| 8363 | plastidic | B1854 | methionine | ARA_SEED_2 | p-USP | GC | 19 | 45 |
| 8920 | non- | B2032 | methionine | ARA_LEAF | p-Super | GC | 37 | 75 |
| | targeted | | | | | | | |
| 8937 | mito- | B2066 | methionine | ARA_LEAF | p-Super | GC | 35 | 64 |
| | chondrial | | | | | | | |
| 9156 | non- | B2345 | methionine | ARA_LEAF | p-Super | LC | 41 | 231 |
| | targeted | | | | | | | |
| 9167 | non- | B2513 | methionine | ARA_LEAF | p-Super | GC | 39 | 55 |
| | targeted | | | | | | | |
| 9244 | non- | B2673 | methionine | ARA_LEAF | p-Super | LC | 32 | 57 |
| | targeted | | | | | | | |
| 9333 | non- | B2923 | methionine | ARA_LEAF | p-Super | GC | 32 | 54 |
| | targeted | | | | | | | |
| 9470 | non- | B3246 | methionine | ARA_LEAF | p-Super | LC | 36 | 46 |
| | targeted | | | | | | | |
| 9492 | non- | B3256 | methionine | ARA_SEED_2 | p-USP | GC | 77 | 121 |
| | targeted | | | | | | | |
| 10104 | non- | B3346 | methionine | ARA_LEAF | p-Super | LC | 37 | 40 |
| | targeted | | | | | | | |
| 10172 | plastidic | B3572 | methionine | ARA_SEED_2 | p-USP | GC | 20 | 652 |
| 10252 | non- | B3771 | methionine | ARA_SEED_2 | p-USP | GC | 22 | 93 |
| | targeted | | | | | | | |
| 10708 | non- | B3817 | methionine | ARA_LEAF | p-Super | LC | 37 | 61 |
| | targeted | | | | | | | |
| 10726 | non- | B3823 | methionine | ARA_LEAF | p-Super | GC | 38 | 48 |
| | targeted | | | | | | | |
| 10740 | non- | B4029 | methionine | ARA_LEAF | p-Super | GC | 84 | 691 |
| | targeted | | | | | | | |
| 10811 | non- | GM02 | methionine | ARA_LEAF | p-PcUBI | LC | 37 | 55 |
| | targeted | LC12622 | | | | | | |
| 11211 | mito- | Sll1108 | methionine | ARA_LEAF | p-PcUBI | LC | 39 | 67 |
| | chondrial | | | | | | | |
| 11423 | mito- | Sll1545 | methionine | ARA_LEAF | p-PcUBI | LC | 38 | 58 |
| | chondrial | | | | | | | |
| 11471 | mito- | Sll1917 | methionine | ARA_LEAF | p-PcUBI | LC | 30 | 34 |
| | chondrial | | | | | | | |
| 11990 | non- | Slr0338 | methionine | ARA_LEAF | p-PcUBI | LC | 29 | 40 |
| | targeted | | | | | | | |
| 11990 | plastidic | Slr0338 | methionine | ARA_LEAF | p-PcUBI | LC | 27 | 37 |
| 12070 | mito- | Slr1655 | methionine | ARA_LEAF | p-PcUBI | LC | 30 | 58 |
| | chondrial | | | | | | | |
| 12140 | plastidic | Slr1791 | methionine | ARA_LEAF | p-PcUBI | LC | 38 | 66 |
| 12341 | plastidic | Slr2072 | methionine | ARA_LEAF | p-PcUBI | GC | 36 | 74 |
| 12698 | non- | TTC0019 | methionine | ARA_LEAF | p-PcUBI | GC | 35 | 71 |
| | targeted | | | | | | | |
| 12974 | non- | TTC1550 | methionine | ARA_LEAF | p-PcUBI | GC | 36 | 44 |
| | targeted | | | | | | | |
| 13376 | non- | Yal012w | methionine | ARA_SEED_2 | p-PcUBI | GC | 22 | 31 |
| | targeted | | | | | | | |
| 14171 | non- | Ydl155w | methionine | ARA_LEAF | Big35S | GC | 34 | 107 |
| | targeted | | | | | | | |
| 14275 | plastidic | Ydl159w | methionine | ARA_LEAF | p-Super | GC | 44 | 54 |
| 14302 | plastidic | Ydl168w | methionine | ARA_LEAF | p-Super | GC | 40 | 46 |
| 14706 | plastidic | Ydr131c | methionine | ARA_LEAF | p-Super | GC | 30 | 31 |
| 14715 | plastidic | Yhl013c | methionine | ARA_LEAF | p-Super | GC | 32 | 73 |
| 14769 | plastidic | Yil053w | methionine | ARA_LEAF | p-Super | GC | 26 | 31 |
| 14821 | plastidic | Yjl137c | methionine | ARA_LEAF | p-Super | GC | 26 | 37 |
| 14843 | non- | Yjr130c | methionine | ARA_LEAF | Big35S | GC | 24 | 30 |
| | targeted | | | | | | | |
| 14885 | plastidic | Yjr139c | methionine | ARA_LEAF | p-Super | LC | 38 | 59 |
| 15175 | plastidic | Yml084w | methionine | ARA_LEAF | p-Super | LC | 31 | 52 |
| 15179 | plastidic | Yol160w | methionine | ARA_LEAF | p-Super | LC | 31 | 47 |
| 15183 | plastidic | Yor392w | methionine | ARA_LEAF | p-Super | LC | 14 | 20 |

[2821] Column 1 shows the SEQ ID NO, Column 2 shows the expression type (targeted or non-targeted), Column 3 shows the “gene name” (locus), Column 4 shows the metabolite analyzed, Column 5 indicates the A. thaliana source tissue analyzed, Column 6 indicates the used promoter for expression, Column 7 indicates the analytical method. Columns 8 and 9 show the minumum and the maximum increase of the analyzed metabolite (in percent) in comparison to the wild type (=ratio_by_weight, given as percent increase).

[2822] When the analyses were repeated independently, all results proved to be significant.

### Example 12

### Engineering Arabidopsis Plants with an Increased Production of a Fine Chemical by (Over) Expressing a FCRP-Protein Encoded by a Gene from Saccharomyces Cerevisiae or Synechocystis or E. Coli, Azotobacter Vinelandii, Thermus Thermophilus, Physcomitrella Patens, Arabidopsis. Thaliana, Brassica Napus, Glycine Max, Zea Mays or Oryza Sativa using Tissue-Specific and/or Stress Inducible Promoters

[2823] Transgenic Arabidopsis plants are created as in example 11 to express the FCRP under the control of a tissue-specific and/or stress inducible promoter.

[2824] T2 generation plants are produced and are grown under standard conditions. The fine chemical production is determined after a total time of 29 to 30 days starting with the sowing. The transgenic Arabidopsis plant produces more fine chemical then non-transgenic control plants.

### Example 13

### Engineering Alfalfa Plants with an Increased Production of a Fine Chemical by (Over)Expressing a FCRP-Protein Encoded by a gene from Saccharomyces Cerevisiae or Synechocystis or E. Coli, Azotobacter Vinelandii, Thermus Thermophilus, Physcomitrella Patens, Arabidopsis. Thaliana, Brassica Napus, Glycine Max, Zea Mays or Oryza Sativa

[2825] A regenerating clone of alfalfa (Medicago sativa) is transformed using the method of (McKersie et al., Plant Physiol 119, 839 (1999)). Regeneration and transformation of alfalfa is genotype dependent and therefore a regenerating plant is required. Methods to obtain regenerating plants have been described. For example, these can be selected from the cultivar Rangelander (Agriculture Canada) or any other commercial alfalfa variety as described by Brown D. C. W. and Atanassov A. (Plant Cell Tissue Organ Culture 4, 111 (1985)). Alternatively, the RA3 variety (University of Wisconsin) is selected for use in tissue culture (Walker et al., Am. J. Bot. 65, 654 (1978)).

[2826] Petiole explants are cocultivated with an overnight culture of Agrobacterium tumefaciens C58C1 pMP90 (McKersie et al., Plant Physiol 119, 839 (1999)) or LBA4404 containing a binary vector. Many different binary vector systems have been described for plant transformation (e.g. G. An, in “Agrobacterium Protocols, Methods in Molecular Biology”, Vol 44, pp. 47-62, Gartland K. M. A.and Davey M. R., eds. Humana Press, Totowa, N.J.). Many are based on the vector pBIN19 described by Bevan (Nucleic Acid Research. 12, 8711 (1984)) that includes a plant gene expression cassette flanked by the left and right border sequences from the Ti plasmid of Agrobacterium tumefaciens. A plant gene expression cassette consists of at least two genes—a selection marker gene and a plant promoter regulating the transcription of the cDNA or genomic DNA of the trait gene. Various selection marker genes can be used including the Arabidopsis gene encoding a mutated acetohydroxy acid synthase (AHAS) enzyme (U.S. Pat. No. 5,7673,666 and U.S. Pat. No. 6,225,105). Similarly, various promoters can be used to regulate the trait gene that provides constitutive, developmental, tissue or environmental regulation of gene transcription. In this example, the 34S promoter (GenBank Accession numbers M59930 and X16673) is used to provide constitutive expression of the trait gene.

[2827] The explants are cocultivated for 3 days in the dark on SH induction medium containing 288 mg/ L Pro, 53 mg/ L thioproline, 4.35 g/l K2SO4, and 100 μm acetosyringinone. The explants are washed in half-strength Murashige-Skoog medium (Murashige and Skoog, 1962) and plated on the same SH induction medium without acetosyringinone but with a suitable selection agent and suitable antibiotic to inhibit Agrobacterium growth. After several weeks, somatic embryos are transferred to BOi2Y development medium containing no growth regulators, no antibiotics, and 50 g/l sucrose. Somatic embryos are subsequently germinated on half-strength Murashige-Skoog medium. Rooted seedlings are transplanted into pots and grown in a greenhouse.

[2828] T1 or T2 generation plants are produced, grown and processed and evaluated for their fine chemical produced in analogy as described above.

### Example 14

### Engineering Ryegrass Plants with an Increased Production of Fine Chemical by (Over)-Expressing a FCRP Encoded by a Gene from Saccharomyces Cerevisiae or Synechocystis or E. Coli, Azotobacter Vinelandii, Thermus Thermophilus, Physcomitrella Patens, Arabidopsis. Thaliana, Brassica Napus, Glycine Max, Zea Mays or Oryza Sativa

[2829] Seeds of several different ryegrass varieties may be used as explant sources for transformation, including the commercial variety Gunne available from Svalof Weibull seed company or the variety Affinity. Seeds are surface-sterilized sequentially with 1% Tween-20 for 1 minute, 100% bleach for 60 minutes, 3 rinses with 5 minutes each with deionized and distilled H₂O, and then germinated for 3-4 days on moist, sterile filter paper in the dark. Seedlings are further sterilized for 1 minute with 1% Tween-20, 5 minutes with 75% bleach, and rinsed 3 times with double distilled H₂O, 5 min each.

[2830] Surface-sterilized seeds are placed on the callus induction medium containing Murashige and Skoog basal salts and vitamins, 20 g/l sucrose, 150 mg/l asparagine, 500 mg/l casein hydrolysate, 3 g/l Phytagel, 10 mg/l BAP, and 5 mg/l dicamba. Plates are incubated in the dark at 25° C. for 4 weeks for seed germination and embryogenic callus induction.

[2831] After 4 weeks on the callus induction medium, the shoots and roots of the seedlings are trimmed away, the callus is transferred to fresh media, maintained in culture for another 4 weeks, and then transferred to MSO medium in light for 2 weeks. Several pieces of callus (11-17 weeks old) are either strained through a 10 mesh sieve and put onto callus induction medium, or cultured in 100 ml of liquid ryegrass callus induction media (same medium as for callus induction with agar) in a 250 ml flask. The flask is wrapped in foil and shaken at 175 rpm in the dark at 23° C. for 1 week. Sieving the liquid culture with a 40-mesh sieve collected the cells. The fraction collected on the sieve is plated and cultured on solid ryegrass callus induction medium for 1 week in the dark at 25° C. The callus is then transferred to and cultured on MS medium containing 1% sucrose for 2 weeks.

[2832] Transformation can be accomplished with either Agrobacterium of with particle bombardment methods. An expression vector is created containing a constitutive plant promoter and the cDNA of the gene in a pUC vector. The plasmid DNA is prepared from E. coli cells using with Qiagen kit according to manufacturer's instruction. Approximately 2 g of embryogenic callus is spread in the center of a sterile filter paper in a Petri dish. An aliquot of liquid MSO with 10 g/L sucrose is added to the filter paper. Gold particles (1.0 pm in size) are coated with plasmid DNA according to method of Sanford et al., 1993 and delivered to the embryogenic callus with the following parameters: 500 pg particles and 2 μg DNA per shot, 1300 psi and a target distance of 8.5 cm from stopping plate to plate of callus and 1 shot per plate of callus.

[2833] After the bombardment, calli are transferred back to the fresh callus development medium and maintained in the dark at room temperature for a 1-week period. The callus is then transferred to growth conditions in the light at 25° C. to initiate embryo differentiation with the appropriate selection agent, e.g. 250 nM Arsenal, 5 mg/l PPT or 50 mg/l kanamycin. Shoots resistant to the selection agent are appearing and once rooted are transferred to soil.

[2834] Samples of the primary transgenic plants (TO) are analyzed by PCR to confirm the presence of T-DNA. These results are confirmed by Southern hybridization in which DNA is electrophoresed on a 1% agarose gel and transferred to a positively charged nylon membrane (Roche Diagnostics). The PCR DIG Probe Synthesis Kit (Roche Diagnostics) is used to prepare a digoxigenin-labelled probe by PCR, and used as recommended by the manufacturer.

[2835] Transgenic T0 ryegrass plants are propagated vegetatively by excising tillers. The transplanted tillers are maintained in the greenhouse for 2 months until well established. The shoots are defoliated and allowed to grow for 2 weeks.

[2836] T1 or T2 generation plants are produced, grown and processed and evaluated for their fine chemical produced in analogy as described above to determine the fine chemical content.

### Example 15

### Engineering Soybean Plants with an Increased Production of Fine Chemical by (Over)-Expressing a FCRP Encoded by a Gene from Saccharomyces Cerevisiae or Synechocystis or E. Coli, Azotobacter Vinelandii, Thermus Thermophilus, Physcomitrella Patens, Arabidopsis. Thaliana, Brassica Napus, Glycine Max, Zea Mays or Oryza Sativa

[2837] Soybean is transformed according to the following modification of the method described in the Texas A&M patent U.S. Pat. No. 5,164,310. Several commercial soybean varieties are amenable to transformation by this method. The cultivar Jack (available from the Illinois Seed Foundation) is commonly used for transformation. Seeds are sterilized by immersion in 70% (v/v) ethanol for 6 min and in 25% commercial bleach (NaOCI) supplemented with 0.1% (v/v) Tween for 20 min, followed by rinsing 4 times with sterile double distilled water. Seven-day seedlings are propagated by removing the radicle, hypocotyl and one cotyledon from each seedling. Then, the epicotyl with one cotyledon is transferred to fresh germination media in petri dishes and incubated at 25 ° C. under a 16-h photoperiod (approx. 100 μmol m⁻2 s⁻1) for three weeks. Axillary nodes (approx. 4 mm in length) were cut from 3-4 week-old plants. Axillary nodes are excised and incubated in Agrobacterium LBA4404 culture.

[2838] Many different binary vector systems have been described for plant transformation (e.g. An G., in Agrobacterium Protocols. Methods in Molecular Biology Vol. 44, pp. 47-62, Gartland K. M. A.

[2839] and Davey M. R. eds. Humana Press, Totowa, N.J.). Many are based on the vector pBIN19 described by Bevan (Nucleic Acid Research. 12, 8711 (1984)) that includes a plant gene expression cassette flanked by the left and right border sequences from the Ti plasmid of Agrobacterium tumefaciens. A plant gene expression cassette consists of at least two genes—a selection marker gene and a plant promoter regulating the transcription of the cDNA or genomic DNA of the trait gene. Various selection marker genes can be used including the Arabidopsis gene encoding a mutated acetohydroxy acid synthase (AHAS) enzyme (U.S. Pat. No. 5,7673,666 and U.S. Pat. No. 6,225,105). Similarly, various promoters can be used to regulate the trait gene to provide constitutive, developmental, tissue or environmental regulation of gene transcription. In this example, the 34S promoter (GenBank Accession numbers M59930 and X16673) can be used to provide constitutive expression of the trait gene.

[2840] After the co-cultivation treatment, the explants are washed and transferred to selection media supplemented with 500 mg/l timentin. Shoots are excised and placed on a shoot elongation medium. Shoots longer than 1 cm are placed on rooting medium for two to four weeks prior to transplanting to soil.

[2841] The primary transgenic plants (T0) are analyzed by PCR to confirm the presence of T-DNA. These results are confirmed by Southern hybridization in which DNA is electrophoresed on a 1% agarose gel and transferred to a positively charged nylon membrane (Roche Diagnostics). The PCR DIG Probe Synthesis Kit (Roche Diagnostics) is used to prepare a digoxigenin-labelled probe by PCR, and used as recommended by the manufacturer.

[2842] T1 or T2 generation plants are produced, grown and processed and evaluated for their fine chemical produced in analogy as described above.

### Example 16

### Engineering Rapeseed/Canola Plants with an Increased Production of Fine Chemical by (Over)-Expressing a FCRP Encoded by a Gene from Saccharomyces Cerevisiae or Synechocystis or E. Coli, Azotobacter Vinelandii, Thermus Thermophilus, Physcomitrella Patens, Arabidopsis. Thaliana, Brassica Napus, Glycine Max, Zea Mays or Oryza Sativa

[2843] Cotyledonary petioles and hypocotyls of 5-6 day-old young seedlings are used as explants for tissue culture and transformed according to Babic et al. (Plant Cell Rep 17, 183 (1998)). The commercial cultivar Westar (Agriculture Canada) is the standard variety used for transformation, but other varieties can be used.

[2844] Agrobacterium tumefaciens LBA4404 containing a binary vector can be used for canola transformation. Many different binary vector systems have been described for plant transformation (e.g. An G., in Agrobacterium Protocols. Methods in Molecular Biology Vol. 44, p. 47-62, Gartland K. M. A. and Davey M. R. eds. Humana Press, Totowa, N.J.). Many are based on the vector pBIN19 described by Bevan (Nucleic Acid Research. 12, 8711(1984)) that includes a plant gene expression cassette flanked by the left and right border sequences from the Ti plasmid of Agrobacterium tumefaciens. A plant gene expression cassette consists of at least two genes—a selection marker gene and a plant promoter regulating the transcription of the cDNA or genomic DNA of the trait gene. Various selection marker genes can be used including the Arabidopsis gene encoding a mutated acetohydroxy acid synthase (AHAS) enzyme (U.S. Pat. No. 5,7673,666 and U.S. Pat. No. 6,225,105). Similarly, various promoters can be used to regulate the trait gene to provide constitutive, developmental, tissue or environmental regulation of gene transcription. In this example, the 34S promoter (GenBank Accession numbers M59930 and X16673) can be used to provide constitutive expression of the trait gene.

[2845] Canola seeds are surface-sterilized in 70% ethanol for 2 min., and then in 30% Clorox with a drop of Tween-20 for 10 min, followed by three rinses with sterilized distilled water. Seeds are then germinated in vitro 5 days on half strength MS medium without hormones, 1% sucrose, 0.7% Phytagar at 23° C., 16 h light. The cotyledon petiole explants with the cotyledon attached are excised from the in vitro seedlings, and inoculated with Agrobacterium by dipping the cut end of the petiole explant into the bacterial suspension. The explants are then cultured for 2 days on MSBAP-3 medium containing 3 mg/l BAP, 3% sucrose, 0.7% Phytagar at 23° C., 16 h light. After two days of co-cultivation with Agrobacterium, the petiole explants are transferred to MSBAP-3 medium containing 3 mg/l BAP, cefotaxime, carbenicillin, or timentin (300 mg/l) for 7 days, and then cultured on MSBAP-3 medium with cefotaxime, carbenicillin, or timentin and selection agent until shoot regeneration. When the shoots were 5-10 mm in length, they are cut and transferred to shoot elongation medium (MSBAP-0.5, containing 0.5 mg/l BAP). Shoots of about 2 cm in length are transferred to the rooting medium (MSO) for root induction.

[2846] Samples of the primary transgenic plants (T0) are analyzed by PCR to confirm the presence of T-DNA. These results are confirmed by Southern hybridization in which DNA is electrophoresed on a 1% agarose gel and transferred to a positively charged nylon membrane (Roche Diagnostics). The PCR DIG Probe Synthesis Kit (Roche Diagnostics) is used to prepare a digoxigenin-labelled probe by PCR, and used as recommended by the manufacturer.

[2847] T1 or T2 generation plants are produced, grown and processed and evaluated for their fine chemical produced in analogy as described above.

### Example 17

### Engineering Corn Plants with an Increased Production of Fine Chemical by (Over)-Expressing a FCRP Encoded by a Gene from Saccharomyces Cerevisiae or Synechocystis or E. Coli, Azotobacter Vinelandii, Thermus Thermophilus, Physcomitrella Patens, Arabidopsis. Thaliana, Brassica Napus, Glycine Max, Zea Mays or Oryza Sativa

[2848] Transformation of maize (Zea Mays L.) is performed with a modification of the method described by Ishida et al. (Nature Biotech 14745 (1996)). Transformation is genotype-dependent in corn and only specific genotypes are amenable to transformation and regeneration. The inbred line A188 (University of Minnesota) or hybrids with A188 as a parent are good sources of donor material for transformation (Fromm et al., Biotech 8, 833 (1990)), but other genotypes can be used successfully as well. Ears are harvested from corn plants at approximately 11 days after pollination (DAP) when the length of immature embryos is about 1 to 1.2 mm. Immature embryos are co-cultivated with Agrobacterium tumefaciens that carry “super binary” vectors and transgenic plants are recovered through organogenesis. The super binary vector system of Japan Tobacco is described in WO patents WO 94/00977 and WO 95/06722. Vectors were constructed as described. Various selection marker genes can be used including the maize gene encoding a mutated acetohydroxy acid synthase (AHAS) enzyme (U.S. Pat. No. 6,025,541). Similarly, various promoters can be used to regulate the trait gene to provide constitutive, developmental, tissue or environmental regulation of gene transcription. In this example, the 34S promoter (GenBank Accession numbers M59930 and X16673) was used to provide constitutive expression of the trait gene.

[2849] Excised embryos are grown on callus induction medium, then maize regeneration medium, containing imidazolinone as a selection agent. The Petri plates are incubated in the light at 25 ° C. for 2-3 weeks, or until shoots develop. The green shoots are transferred from each embryo to maize rooting medium and incubated at 25° C. for 2-3 weeks, until roots develop. The rooted shoots are transplanted to soil in the greenhouse. T1 seeds are produced from plants that exhibit tolerance to the imidazolinone herbicides and which are PCR positive for the transgenes.

[2850] The T1 transgenic plants are then evaluated for their fine chemical producted as described above. The T1 generation of single locus insertions of the T-DNA will segregate for the transgene in a 3:1 ratio. Those progeny containing one or two copies of the transgene are tolerant regarding the imidazolinone herbicide, and exhibit an increased fine chemical production then those progeny lacking the transgenes.

[2851] T1 or T2 generation plants are produced, grown, processed and evaluated for their fine chemical produced in analogy as described above. Homozygous T2 plants exhibited similar phenotypes. Hybrid plants (F1 progeny) of homozygous transgenic plants and non-transgenic plants also exhibited enhanced fine chemical production.

### Example 18

### Engineering Wheat Plants with an Increased Production of Fine Chemical by (Over)-Expressing a FCRP Encoded by a Gene from Saccharomyces Cerevisiae or Synechocystis or E. Coli, Azotobacter Vinelandii, Thermus Thermophilus, Physcomitrella Patens, Arabidopsis. Thaliana, Brassica Napus, Glycine Max, Zea Mays or Oryza Sativa

[2852] Transformation of wheat is performed with the method described by Ishida et al. (Nature Biotech. 14745 (1996)). The cultivar Bobwhite (available from CYMMIT, Mexico) is commonly used in transformation. Immature embryos are co-cultivated with Agrobacterium tumefaciens that carry “super binary” vectors, and transgenic plants are recovered through organogenesis. The super binary vector system of Japan Tobacco is described in WO patents WO 94/00977 and WO 95/06722. Vectors were constructed as described. Various selection marker genes can be used including the maize gene encoding a mutated acetohydroxy acid synthase (AHAS) enzyme (U.S. Pat. No. 6,025,541). Similarly, various promoters can be used to regulate the trait gene to provide constitutive, developmental, tissue or environmental regulation of gene transcription. In this example, the 34S promoter (GenBank Accession numbers M59930 and X16673) was used to provide constitutive expression of the trait gene.

[2853] After incubation with Agrobacterium, the embryos are grown on callus induction medium, then regeneration medium, containing imidazolinone as a selection agent. The Petri plates are incubated in the light at 25 ° C. for 2-3 weeks, or until shoots develop. The green shoots are transferred from each embryo to rooting medium and incubated at 25 ° C. for 2-3 weeks, until roots develop. The rooted shoots are transplanted to soil in the greenhouse. T1 seeds are produced from plants that exhibit tolerance to the imidazolinone herbicides and which are PCR positive for the transgenes.

[2854] The T1 transgenic plants are then evaluated for their enhanced production of fine chemical according to the methods described in the previous examples. The T1 generation of single locus insertions of the T-DNA will segregate for the transgene in a 3:1 ratio. Those progeny containing one or two copies of the transgene are tolerant regarding the imidazolinone herbicide, and exhibit an enhanced production of fine chemical then those progeny lacking the transgenes. Homozygous T2 plants exhibited similar phenotypes.

### Example 19

### Engineering Rice Plants with an Increased Production of Fine Chemical by (Over)-Expressing a FCRP Encoded by a Gene from Saccharomyces Cerevisiae or Synechocystis or E. Coli, Azotobacter Vinelandii, Thermus Thermophilus, Physcomitrella Patens, Arabidopsis. Thaliana, Brassica Napus, Glycine Max, Zea Mays or Oryza Sativa

[2855] The Agrobacterium containing the expression vector of the invention is used to transform Oryza sativa plants. Mature dry seeds of the rice japonica cultivar Nipponbare are dehusked. Sterilization is carried out by incubating for one minute in 70% ethanol, followed by 30 minutes in 0.2% HgCl₂, followed by a 6 times 15 minutes can beh with sterile distilled water. The sterile seeds are then germinated on a medium containing 2,4-D (callus induction medium). After incubation in the dark for four weeks, embryogenic, scutellum-derived calli are excised and propagated on the same medium. After two weeks, the calli are multiplied or propagated by subculture on the same medium for another 2 weeks. Embryogenic callus pieces are sub-cultured on fresh medium 3 days before co-cultivation (to boost cell division activity).

[2856] Agrobacterium strain LBA4404 containing the expression vector of the invention is used for cocultivation. Agrobacterium is inoculated on AB medium with the appropriate antibiotics and cultured for 3 days at 28° C. The bacteria are then collected and suspended in liquid co-cultivation medium to a density (OD600) of about 1. The suspension is then transferred to a Petri dish and the calli immersed in the suspension for 15 minutes. The callus tissues are then blotted dry on a filter paper and transferred to solidified, co-cultivation medium and incubated for 3 days in the dark at 25° C. Co-cultivated calli are grown on 2,4-D-containing medium for 4 weeks in the dark at 28° C. in the presence of a selection agent. During this period, rapidly growing resistant callus islands developed. After transfer of this material to a regeneration medium and incubation in the light, the embryogenic potential is released and shoots developed in the next four to five weeks. Shoots are excised from the calli and incubated for 2 to 3 weeks on an auxin-containing medium from which they are transferred to soil. Hardened shoots are grown under high humidity and short days in a greenhouse.

[2857] Approximately 35 independent TO rice transformants are generated for one construct. The primary transformants are transferred from a tissue culture chamber to a greenhouse. After a quantitative PCR analysis to verify copy number of the T-DNA insert, only single copy transgenic plants that exhibit tolerance to the selection agent are kept for harvest of T1 seed. Seeds are then harvested three to five months after transplanting. The method yielded single locus transformants at a rate of over 50% (Aldemita and Hodges1996, Chan et al. 1993, Hiei et al. 1994).

[2858] T1 or T2 generation plants are produced, grown, processed and evaluated for their fine chemical produced in analogy as described above

### Example 20

### Identification of Identical and Heterologous Genes

[2859] Gene sequences can be used to identify identical or heterologous genes from cDNA or genomic libraries. Identical genes (e. g. full-length cDNA clones) can be isolated via nucleic acid hybridization using for example cDNA libraries. Depending on the abundance of the gene of interest, 100,000 up to 1,000,000 recombinant bacteriophages are plated and transferred to nylon membranes. After denaturation with alkali, DNA is immobilized on the membrane by e. g. UV cross linking. Hybridization is carried out at high stringency conditions. In aqueous solution, hybridization and washing is performed at an ionic strength of 1 M NaCl and a temperature of 68° C. Hybridization probes are generated by e.g. radioactive (32P) nick transcription labeling (High Prime, Roche, Mannheim, Germany). Signals are detected by autoradiography.

[2860] Partially identical or heterologous genes that are related but not identical can be identified in a manner analogous to the above-described procedure using low stringency hybridization and washing conditions. For aqueous hybridization, the ionic strength is normally kept at 1 M NaCl while the temperature is progressively lowered from 68 to 42° C.

[2861] Isolation of gene sequences with homology (or sequence identity/similarity) only in a distinct domain of (for example 10-20 amino acids) can be carried out by using synthetic radio labeled oligonucleotide probes. Radiolabeled oligonucleotides are prepared by phosphorylation of the 5-prime end of two complementary oligonucleotides with T4 polynucleotide kinase. The complementary oligonucleotides are annealed and ligated to form concatemers. The double stranded concatemers are than radiolabeled by, for example, nick transcription. Hybridization is normally performed at low stringency conditions using high oligonucleotide concentrations.

### Oligonucleotide Hybridization Solution:

[2862] 6×SSC
[2863] 0.01 M sodium phosphate
[2864] 1 mM EDTA (pH 8)
[2865] 0.5% SDS
[2866] 100 pg/ml denatured salmon sperm DNA
[2867] 0.1% nonfat dried milk

[2868] During hybridization, temperature is lowered stepwise to 5-10° C. below the estimated oligonucleotide Tm or down to room temperature followed by washing steps and autoradiography. Washing is performed with low stringency such as 3 washing steps using 4×SSC. Further details are described by Sambrook J. et al., 1989, “Molecular Cloning: A Laboratory Manual,” Cold Spring Harbor Laboratory Press or Ausubel F. M. et al., 1994, “Current Protocols in Molecular Biology,” John Wiley & Sons.

### Example 21

### Identification of Identical Genes by Screening Expression Libraries with Antibodies

[2869] c-DNA clones can be used to produce recombinant polypeptide for example in E. coli (e.g. Qiagen QIAexpress pQE system). Recombinant polypeptides are then normally affinity purified via Ni-NTA affinity chromatography (Qiagen). Recombinant polypeptides are then used to produce specific antibodies for example by using standard techniques for rabbit immunization. Antibodies are affinity purified using a Ni-NTA column saturated with the recombinant antigen as described by Gu et al., BioTechniques 17, 257 (1994). The antibody can than be used to screen expression cDNA libraries to identify identical or heterologous genes via an immunological screening (Sambrook J., et al., “Molecular Cloning: A Laboratory Manual,” Cold Spring Harbor Laboratory Press, 1989, or Ausubel F. M. et al., “Current Protocols in Molecular Biology”, John Wiley & Sons, 1994,).

### FIGURES

[2870] FIG. 1. Vector VC-MME220-1 qcz (SEQ ID NO: 41) used for cloning gene of interest for non-targeted expression.

[2871] FIG. 2. Vector VC-MME221-1qcz (SEQ ID NO: 46) used for cloning gene of interest for non-targeted expression.

[2872] FIG. 3. Vector VC-MME354-1 QCZ (SEQ ID NO: 32) used for cloning gene of interest for plastidic targeted expression.

[2873] FIG. 4. Vector VC-MME432-1 qcz (SEQ ID NO: 42) used for cloning gene of interest for plastidic targeted expression.

[2874] FIG. 5. Vector VC-MME489-1 QCZ (SEQ ID NO: 56) used for cloning gene of interest for non-targeted expression and cloning of a targeting sequence.

[2875] FIG. 6. Vector pMTX0270p (SEQ ID NO: 30) used for cloning of a targeting sequence.

[2876] FIG. 7. Vector pMTX155 (SEQ ID NO: 31) used for used for cloning gene of interest for non-targeted expression.

[2877] FIG. 8. Vector VC-MME356-1 QCZ (SEQ ID NO: 34) used for mitochondric targeted expression.

[2878] FIG. 9. Vector VC-MME301-1 QCZ (SEQ ID NO: 36) used for non-targeted expression in preferentially seeds.

[2879] FIG. 10. Vector pMTX461korrp (SEQ ID NO: 37) used for plastidic targeted expression in preferentially seeds.

[2880] FIG. 11. Vector VC-MME462-1QCZ (SEQ ID NO: 39) used for mitochondric targeted expression in preferentially seeds.

[2881] FIG. 12. Vector VC-MME431-1qcz (SEQ ID NO: 44) used for mitochondric targeted expression.

[2882] FIG. 13. Vector pMTX447korr (SEQ ID NO: 47) used for plastidic targeted expression.

[2883] FIG. 14. Vector VC-MME445-1qcz (SEQ ID NO: 49) used for mitochondric targeted expression.

[2884] FIG. 15. Vector VC-MME289-1qcz (SEQ ID NO: 51) used for non targeted expression in preferentially seeds.

[2885] FIG. 16. Vector VC-MME464-1qcz (SEQ ID NO: 52) used for plastidic targeted expression in preferentially seeds.

[2886] FIG. 17. Vector VC-MME465-1 qcz (SEQ ID NO: 54) used for mitochondric targeted expression in preferentially seeds.

[2887] In a further embodiment, the present invention relates in paragraphs [0000.1.1.2] to [0514.1.1.2] to a further process for the production of at least a, preferably a, fine chemical selected from the group consisting of arginine, glutamate, glutamine and proline, as defined below and corresponding embodiments as described herein as follows

[2888] [0001.1.1.2] to [0011.1.1.2] for the disclosure of these paragraphs see [0001.1.1.1] to [0011.1.1.1] above.

[2889] It is an object of the present invention to develop an inexpensive process for the synthesis of arginine, glutamate, glutamine and/or proline.

[2890] for the disclosure of this paragraph see [0013.1.1.1] above.

[2891] Accordingly, in a first embodiment, the invention relates to a process for the production of at least one, preferably a, fine chemical selected from the group consisting of:

[2892] arginine, glutamate, glutamine and proline, or, in other words, of the “fine chemical” or “fine chemical of the invention”.

[2893] The terms “fine chemical of the invention”, “fine chemical” or “the fine chemical” are used herein equally and relate in context of the paragraphs or sections [0014.1.2.2] to [0514.1.1.2] essentially to the metabolite or the metabolites indicated in column 7, application no. 2 of Tables I, II and IV in the respective line.

[2894] Further, the term “in context of any of the paragraphs [0014.1.2.2] to [0514.1.1.2]” as used herein means that for any of said paragraphs [0014.1.2.2] to [0514.1.1.2] the term “the fine chemical” is understood to follow the definition of paragraphs or sections [0014.1.2.2] and [0015.1.2.2], independently whether it refers to any other paragraph or not and whether the reference recites the term “fine chemical” in an other context.

[2895] Thus, in cases where one or more paragraphs or sections are incorporated by reference into any of the present paragraphs [0014.1.2.2] to [0514.1.1.2], e.g. by usage of the term “see paragraph” or the term “for the disclosure of this paragraph see the disclosure of paragraph” or the term “incorporated by reference” or a corresponding term, the incorporated paragraph, section or term “the fine chemical” is also understood to have the meaning according to the definition of paragraph [0014.1.2.2] and [0015.1.2.2].

[2896] Accordingly, in one embodiment, the term “fine chemical of the invention”, “fine chemical” or “the fine chemical” as used herein (alone or in combination, like in FCRP) means “arginine in context of the nucleic acid or polypeptide sequences listed in the respective same line of any one of Tables I to IV of application no. 2 and indicating in column 7 the metabolite “arginine”. In one embodiment, the term arginine or the term “fine chemical” mean in context of the paragraphs or sections [0014.1.2.2] to [0514.1.1.2] at least one chemical compound with an activity of the above mentioned arginine, respectively.

[2897] Accordingly, in one embodiment, the term “fine chemical of the invention”, “fine chemical” or “the fine chemical” as used herein (alone or in combination, like in FCRP) means “glutamate in context of the nucleic acid or polypeptide sequences listed in the respective same line of any one of Tables I to IV of application no. 2 and indicating in column 7 the metabolite “glutamate”. In one embodiment, the term glutamate or the term “fine chemical” mean in context of the paragraphs or sections [0014.1.2.2] to [0514.1.1.2] at least one chemical compound with an activity of the above mentioned glutamate, respectively.

[2898] Accordingly, in one embodiment, the term “fine chemical of the invention”, “fine chemical” or “the fine chemical” as used herein (alone or in combination, like in FCRP) means “glutamine in context of the nucleic acid or polypeptide sequences listed in the respective same line of any one of Tables I to IV of application no. 2 and indicating in column 7 the metabolite “glutamine”. In one embodiment, the term glutamine or the term “fine chemical” mean in context of the paragraphs or sections [0014.1.2.2] to [0514.1.1.2] at least one chemical compound with an activity of the above mentioned glutamine, respectively.

[2899] Accordingly, in one embodiment, the term “fine chemical of the invention”, “fine chemical” or “the fine chemical” as used herein (alone or in combination, like in FCRP) means “proline in context of the nucleic acid or polypeptide sequences listed in the respective same line of any one of Tables I to IV of application no. 2 and indicating in column 7 the metabolite “proline”. In one embodiment, the term proline or the term “fine chemical” mean in context of the paragraphs or sections [0014.1.2.2] to [0514.1.1.2] at least one chemical compound with an activity of the above mentioned proline, respectively.

[2900] Accordingly, in one embodiment, the terms “fine chemical of the invention”, “fine chemical” or “the fine chemical” mean in context of any of the paragraphs [0014.1.2.2] to [0514.1.1.2] arginine, preferably the L-enantiomer of arginine, its salts, ester or amides in free form or bound to proteins. In a preferred embodiment, the term “the fine chemical” means arginine or its salts, in free form or bound to proteins. In a preferred embodiment, the term “the fine chemical” means the L-enantiomer of arginine. On the other hand in case “arginine” is stated it means arginine itself, its salts, ester or amides in free form or bound to proteins, preferably the L-enantiomer of arginine, its salts, ester or amides in free form or bound to proteins. In a preferred embodiment “arginine” means the L-enantiomer of arginine in free form. In another preferred embodiment “arginine” means the L-enantiomer of arginine bound to proteins.

[2901] Accordingly, in one embodiment, the terms “fine chemical of the invention”, “fine chemical” or “the fine chemical” mean in context of any of the paragraphs [0014.1.2.2] to [0514.1.1.2] glutamate, preferably the L-enantiomer of glutamate, its salts, ester or amides in free form or bound to proteins. In a preferred embodiment, the term “the fine chemical” means glutamate or its salts, in free form or bound to proteins. In a preferred embodiment, the term “the fine chemical” means the L-enantiomer of glutamate.

[2902] On the other hand in case “glutamate” is stated it means glutamate itself, its salts, ester or amides in free form or bound to proteins, preferably the L-enantiomer of glutamate, its salts, ester or amides in free form or bound to proteins. In a preferred embodiment “glutamate” means the L-enantiomer of glutamate in free form. In another preferred embodiment “glutamate” means the L-enantiomer of glutamate bound to proteins.

[2903] Accordingly, in one embodiment, the terms “fine chemical of the invention”, “fine chemical” or “the fine chemical” mean in context of any of the paragraphs [0014.1.2.2] to [0514.1.1.2] glutamine, preferably the L-enantiomer of glutamine, its salts, ester or amides in free form or bound to proteins. In a preferred embodiment, the term “the fine chemical” means glutamine or its salts, in free form or bound to proteins. In a preferred embodiment, the term “the fine chemical” means the L-enantiomer of glutamine.

[2904] On the other hand in case “glutamine” is stated it means glutamine itself, its salts, ester or amides in free form or bound to proteins, preferably the L-enantiomer of glutamine, its salts, ester or amides in free form or bound to proteins. In a preferred embodiment “glutamine” means the L-enantiomer of glutamine in free form. In another preferred embodiment “glutamine” means the L-enantiomer of glutamine bound to proteins.

[2905] Accordingly, in one embodiment, the terms “fine chemical of the invention”, “fine chemical” or “the fine chemical” mean in context of any of the paragraphs [0014.1.2.2] to [0514.1.1.2] proline, preferably the L-enantiomer of proline, its salts, ester or amides in free form or bound to proteins. In a preferred embodiment, the term “the fine chemical” means proline or its salts, in free form or bound to proteins. In a preferred embodiment, the term “the fine chemical” means the Lenantiomer of proline.

[2906] On the other hand in case “proline” is stated it means proline itself, its salts, ester or amides in free form or bound to proteins, preferably the L-enantiomer of proline, its salts, ester or amides in free form or bound to proteins. In a preferred embodiment “proline” means the L-enantiomer of proline in free form. In another preferred embodiment “proline” means the L-enantiomer of proline bound to proteins.

[2907] Further, the term “in context of any of the paragraphs [0014.1.2.2] to [0514.1.1.2]” as used herein means that for any of said paragraphs [0014.1.2.2] to [0514.1.1.2] the term “the fine chemical” is understood to follow the definition of section [0014.1.2.2] or section [0015.1.2.2], independently whether it refers to any other paragraph or not and whether the reference recites the term “fine chemical” in an other context.

[2908] Thus, in cases where one or more paragraphs or sections are incorporated by reference into any of the present paragraphs [0014.1.2.2] to [0514.1.1.2], e.g. by usage of the term “see paragraph” or the term “for the disclosure of this paragraph see the disclosure of paragraph” or the term “incorporated by reference” or a corresponding term, the incorporated paragraph, section or term “the fine chemical” is also understood to have the meaning according to this definition of this paragraph [0015.1.2.2].

[2909] Further, the term “fine chemicals” as used herein relates to compositions comprising said fine chemical(s), i.e. comprising arginine, glutamate, glutamine, and/or proline, respectively.

[2910] Accordingly, the present invention relates to a process for the production of glutamate, which comprises
[2911] (a) increasing or generating one or more activities selected from the group consisting of 47266012-protein in a non-human organism or a part thereof, preferably a microorganism, a plant cell, a plant or a part thereof, as compared to a corresponding non-transformed wild type non-human organism or a part thereof; and
[2912] (b) growing the non-human organism or a part thereof under conditions which permit the production of glutamate or a composition comprising glutamate in said non-human organism or in the culture medium surrounding said non-human organism.

[2913] Accordingly, the present invention relates to a process for the production of glutamine, which comprises
[2914] (a) increasing or generating one or more activities selected from the group consisting of 47266012-protein in a non-human organism or a part thereof, preferably a microorganism, a plant cell, a plant or a part thereof, as compared to a corresponding non-transformed wild type non-human organism or a part thereof; and
[2915] (b) growing the non-human organism or a part thereof under conditions which permit the production of glutamine or a composition comprising glutamine in said non-human organism or in the culture medium surrounding said non-human organism.

[2916] Accordingly, the present invention relates to a process for the production of glutamate, which comprises
[2917] (a) increasing or generating one or more activities selected from the group consisting of 49747384_SOYBEAN-protein in a non-human organism or a part thereof, preferably a microorganism, a plant cell, a plant or a part thereof, as compared to a corresponding non-transformed wild type non-human organism or a part thereof; and
[2918] (b) growing the non-human organism or a part thereof under conditions which permit the production of glutamate or a composition comprising glutamate in said non-human organism or in the culture medium surrounding said non-human organism.

[2919] Accordingly, the present invention relates to a process for the production of glutamate, which comprises
[2920] (a) increasing or generating one or more activities selected from the group consisting of pyruvate kinase in a non-human organism or a part thereof, preferably a microorganism, a plant cell, a plant or a part thereof, as compared to a corresponding non-transformed wild type non-human organism or a part thereof; and
[2921] (b) growing the non-human organism or a part thereof under conditions which permit the production of glutamate or a composition comprising glutamate in said non-human organism or in the culture medium surrounding said non-human organism.

[2922] Accordingly, the present invention relates to a process for the production of proline, which comprises
[2923] (a) increasing or generating one or more activities selected from the group consisting of pyruvate kinase in a non-human organism or a part thereof, preferably a microorganism, a plant cell, a plant or a part thereof, as compared to a corresponding non-transformed wild type non-human organism or a part thereof; and
[2924] (b) growing the non-human organism or a part thereof under conditions which permit the production of proline or a composition comprising proline in said non-human organism or in the culture medium surrounding said non-human organism.

[2925] Accordingly, the present invention relates to a process for the production of arginine, which comprises
[2926] (a) increasing or generating one or more activities selected from the group consisting of acetyltransferase in a non-human organism or a part thereof, preferably a microorganism, a plant cell, a plant or a part thereof, as compared to a corresponding non-transformed wild type non-human organism or a part thereof; and
[2927] (b) growing the non-human organism or a part thereof under conditions which permit the production of arginine or a composition comprising arginine in said non-human organism or in the culture medium surrounding said non-human organism.

[2928] Accordingly, the present invention relates to a process for the production of glutamate, which comprises
[2929] (a) increasing or generating one or more activities selected from the group consisting of pyruvate kinase in a non-human organism or a part thereof, preferably a microorganism, a plant cell, a plant or a part thereof, as compared to a corresponding non-transformed wild type non-human organism or a part thereof; and
[2930] (b) growing the non-human organism or a part thereof under conditions which permit the production of glutamate or a composition comprising glutamate in said non-human organism or in the culture medium surrounding said non-human organism.

[2931] Accordingly, the present invention relates to a process for the production of arginine, which comprises
[2932] (a) increasing or generating one or more activities selected from the group consisting of glucose-6-phosphate 1-dehydrogenase in a non-human organism or a part thereof, preferably a microorganism, a plant cell, a plant or a part thereof, as compared to a corresponding non-transformed wild type non-human organism or a part thereof; and
[2933] (b) growing the non-human organism or a part thereof under conditions which permit the production of arginine or a composition comprising arginine in said non-human organism or in the culture medium surrounding said non-human organism.

[2934] Accordingly, the present invention relates to a process for the production of proline, which comprises
[2935] (a) increasing or generating one or more activities selected from the group consisting of glucose-6-phosphate 1-dehydrogenase in a non-human organism or a part thereof, preferably a microorganism, a plant cell, a plant or a part thereof, as compared to a corresponding non-transformed wild type non-human organism or a part thereof; and
[2936] (b) growing the non-human organism or a part thereof under conditions which permit the production of proline or a composition comprising proline in said non-human organism or in the culture medium surrounding said non-human organism.

[2937] Accordingly, the present invention relates to a process for the production of arginine, which comprises
[2938] (a) increasing or generating one or more activities selected from the group consisting of amino acid acetyltransferase in a non-human organism or a part thereof, preferably a microorganism, a plant cell, a plant or a part thereof, as compared to a corresponding non-transformed wild type non-human organism or a part thereof; and
[2939] (b) growing the non-human organism or a part thereof under conditions which permit the production of arginine or a composition comprising arginine in said non-human organism or in the culture medium surrounding said non-human organism.

[2940] Accordingly, the present invention relates to a process for the production of glutamate, which comprises
[2941] (a) increasing or generating one or more activities selected from the group consisting of protein phosphatase in a non-human organism or a part thereof, preferably a microorganism, a plant cell, a plant or a part thereof, as compared to a corresponding non-transformed wild type non-human organism or a part thereof; and
[2942] (b) growing the non-human organism or a part thereof under conditions which permit the production of glutamate or a composition comprising glutamate in said non-human organism or in the culture medium surrounding said non-human organism.

[2943] Accordingly, the present invention relates to a process for the production of glutamine, which comprises
[2944] (a) increasing or generating one or more activities selected from the group consisting of protein phosphatase in a non-human organism or a part thereof, preferably a microorganism, a plant cell, a plant or a part thereof, as compared to a corresponding non-transformed wild type non-human organism or a part thereof; and
[2945] (b) growing the non-human organism or a part thereof under conditions which permit the production of glutamine or a composition comprising glutamine in said non-human organism or in the culture medium surrounding said non-human organism.

[2946] Accordingly, the present invention relates to a process for the production of arginine, which comprises
[2947] (a) increasing or generating one or more activities selected from the group consisting of At1g17440-protein in a non-human organism or a part thereof, preferably a microorganism, a plant cell, a plant or a part thereof, as compared to a corresponding non-transformed wild type non-human organism or a part thereof; and
[2948] (b) growing the non-human organism or a part thereof under conditions which permit the production of arginine or a composition comprising arginine in said non-human organism or in the culture medium surrounding said non-human organism.

[2949] Accordingly, the present invention relates to a process for the production of glutamine, which comprises
[2950] (a) increasing or generating one or more activities selected from the group consisting of At1g19800-protein in a non-human organism or a part thereof, preferably a microorganism, a plant cell, a plant or a part thereof, as compared to a corresponding non-transformed wild type non-human organism or a part thereof; and
[2951] (b) growing the non-human organism or a part thereof under conditions which permit the production of glutamine or a composition comprising glutamine in said non-human organism or in the culture medium surrounding said non-human organism.

[2952] Accordingly, the present invention relates to a process for the production of arginine, which comprises
[2953] (a) increasing or generating one or more activities selected from the group consisting of cullin in a non-human organism or a part thereof, preferably a microorganism, a plant cell, a plant or a part thereof, as compared to a corresponding non-transformed wild type non-human organism or a part thereof; and
[2954] (b) growing the non-human organism or a part thereof under conditions which permit the production of arginine or a composition comprising arginine in said non-human organism or in the culture medium surrounding said non-human organism.

[2955] Accordingly, the present invention relates to a process for the production of proline, which comprises
[2956] (a) increasing or generating one or more activities selected from the group consisting of cullin in a non-human organism or a part thereof, preferably a microorganism, a plant cell, a plant or a part thereof, as compared to a corresponding non-transformed wild type non-human organism or a part thereof; and
[2957] (b) growing the non-human organism or a part thereof under conditions which permit the production of proline or a composition comprising proline in said non-human organism or in the culture medium surrounding said non-human organism.

[2958] Accordingly, the present invention relates to a process for the production of arginine, which comprises
[2959] (a) increasing or generating one or more activities selected from the group consisting of At1 g29350-protein in a non-human organism or a part thereof, preferably a microorganism, a plant cell, a plant or a part thereof, as compared to a corresponding non-transformed wild type non-human organism or a part thereof; and
[2960] (b) growing the non-human organism or a part thereof under conditions which permit the production of arginine or a composition comprising arginine in said non-human organism or in the culture medium surrounding said non-human organism.

[2961] Accordingly, the present invention relates to a process for the production of arginine, which comprises
[2962] (a) increasing or generating one or more activities selected from the group consisting of eukaryotic translation initiation factor 5 in a non-human organism or a part thereof, preferably a microorganism, a plant cell, a plant or a part thereof, as compared to a corresponding non-transformed wild type non-human organism or a part thereof; and
[2963] (b) growing the non-human organism or a part thereof under conditions which permit the production of arginine or a composition comprising arginine in said non-human organism or in the culture medium surrounding said non-human organism.

[2964] Accordingly, the present invention relates to a process for the production of glutamine, which comprises
[2965] (a) increasing or generating one or more activities selected from the group consisting of eukaryotic translation initiation factor 5 in a non-human organism or a part thereof, preferably a microorganism, a plant cell, a plant or a part thereof, as compared to a corresponding non-transformed wild type non-human organism or a part thereof; and
[2966] (b) growing the non-human organism or a part thereof under conditions which permit the production of glutamine or a composition comprising glutamine in said non-human organism or in the culture medium surrounding said non-human organism.

[2967] Accordingly, the present invention relates to a process for the production of arginine, which comprises
[2968] (a) increasing or generating one or more activities selected from the group consisting of transcriptional regulator in a non-human organism or a part thereof, preferably a microorganism, a plant cell, a plant or a part thereof, as compared to a corresponding non-transformed wild type non-human organism or a part thereof; and
[2969] (b) growing the non-human organism or a part thereof under conditions which permit the production of arginine or a composition comprising arginine in said non-human organism or in the culture medium surrounding said non-human organism.

[2970] Accordingly, the present invention relates to a process for the production of glutamate, which comprises
[2971] (a) increasing or generating one or more activities selected from the group consisting of transcriptional regulator in a non-human organism or a part thereof, preferably a microorganism, a plant cell, a plant or a part thereof, as compared to a corresponding non-transformed wild type non-human organism or a part thereof; and
[2972] (b) growing the non-human organism or a part thereof under conditions which permit the production of glutamate or a composition comprising glutamate in said non-human organism or in the culture medium surrounding said non-human organism.

[2973] Accordingly, the present invention relates to a process for the production of glutamine, which comprises
[2974] (a) increasing or generating one or more activities selected from the group consisting of transcriptional regulator in a non-human organism or a part thereof, preferably a microorganism, a plant cell, a plant or a part thereof, as compared to a corresponding non-transformed wild type non-human organism or a part thereof; and
[2975] (b) growing the non-human organism or a part thereof under conditions which permit the production of glutamine or a composition comprising glutamine in said non-human organism or in the culture medium surrounding said non-human organism.

[2976] Accordingly, the present invention relates to a process for the production of proline, which comprises
[2977] (a) increasing or generating one or more activities selected from the group consisting of transcriptional regulator in a non-human organism or a part thereof, preferably a microorganism, a plant cell, a plant or a part thereof, as compared to a corresponding non-transformed wild type non-human organism or a part thereof; and
[2978] (b) growing the non-human organism or a part thereof under conditions which permit the production of proline or a composition comprising proline in said non-human organism or in the culture medium surrounding said non-human organism.

[2979] Accordingly, the present invention relates to a process for the production of proline, which comprises
[2980] (a) increasing or generating one or more activities selected from the group consisting of At1g47380-protein in a non-human organism or a part thereof, preferably a microorganism, a plant cell, a plant or a part thereof, as compared to a corresponding non-transformed wild type non-human organism or a part thereof; and
[2981] (b) growing the non-human organism or a part thereof under conditions which permit the production of proline or a composition comprising proline in said non-human organism or in the culture medium surrounding said non-human organism.

[2982] Accordingly, the present invention relates to a process for the production of arginine, which comprises
[2983] (a) increasing or generating one or more activities selected from the group consisting of protein kinase in a non-human organism or a part thereof, preferably a microorganism, a plant cell, a plant or a part thereof, as compared to a corresponding non-transformed wild type non-human organism or a part thereof; and
[2984] (b) growing the non-human organism or a part thereof under conditions which permit the production of arginine or a composition comprising arginine in said non-human organism or in the culture medium surrounding said non-human organism.

[2985] Accordingly, the present invention relates to a process for the production of glutamate, which comprises
[2986] (a) increasing or generating one or more activities selected from the group consisting of protein kinase in a non-human organism or a part thereof, preferably a microorganism, a plant cell, a plant or a part thereof, as compared to a corresponding non-transformed wild type non-human organism or a part thereof; and
[2987] (b) growing the non-human organism or a part thereof under conditions which permit the production of glutamate or a composition comprising glutamate in said non-human organism or in the culture medium surrounding said non-human organism.

[2988] Accordingly, the present invention relates to a process for the production of proline, which comprises
[2989] (a) increasing or generating one or more activities selected from the group consisting of protein kinase in a non-human organism or a part thereof, preferably a microorganism, a plant cell, a plant or a part thereof, as compared to a corresponding non-transformed wild type non-human organism or a part thereof; and
[2990] (b) growing the non-human organism or a part thereof under conditions which permit the production of proline or a composition comprising proline in said non-human organism or in the culture medium surrounding said non-human organism.

[2991] Accordingly, the present invention relates to a process for the production of arginine, which comprises
[2992] (a) increasing or generating one or more activities selected from the group consisting of calcium-dependent protein kinase in a non-human organism or a part thereof, preferably a microorganism, a plant cell, a plant or a part thereof, as compared to a corresponding non-transformed wild type non-human organism or a part thereof; and
[2993] (b) growing the non-human organism or a part thereof under conditions which permit the production of arginine or a composition comprising arginine in said non-human organism or in the culture medium surrounding said non-human organism.

[2994] Accordingly, the present invention relates to a process for the production of glutamine, which comprises
[2995] (a) increasing or generating one or more activities selected from the group consisting of calcium-dependent protein kinase in a non-human organism or a part thereof, preferably a microorganism, a plant cell, a plant or a part thereof, as compared to a corresponding non-transformed wild type non-human organism or a part thereof; and
[2996] (b) growing the non-human organism or a part thereof under conditions which permit the production of glutamine or a composition comprising glutamine in said non-human organism or in the culture medium surrounding said non-human organism.

[2997] Accordingly, the present invention relates to a process for the production of proline, which comprises
[2998] (a) increasing or generating one or more activities selected from the group consisting of At1g67340-protein in a non-human organism or a part thereof, preferably a microorganism, a plant cell, a plant or a part thereof, as compared to a corresponding non-transformed wild type non-human organism or a part thereof; and
[2999] (b) growing the non-human organism or a part thereof under conditions which permit the production of proline or a composition comprising proline in said non-human organism or in the culture medium surrounding said non-human organism.

[3000] Accordingly, the present invention relates to a process for the production of glutamine, which comprises
[3001] (a) increasing or generating one or more activities selected from the group consisting of transcription factor in a non-human organism or a part thereof, preferably a microorganism, a plant cell, a plant or a part thereof, as compared to a corresponding non-transformed wild type non-human organism or a part thereof; and
[3002] (b) growing the non-human organism or a part thereof under conditions which permit the production of glutamine or a composition comprising glutamine in said non-human organism or in the culture medium surrounding said non-human organism.

[3003] Accordingly, the present invention relates to a process for the production of glutamine, which comprises
[3004] (a) increasing or generating one or more activities selected from the group consisting of protein phosphatase in a non-human organism or a part thereof, preferably a microorganism, a plant cell, a plant or a part thereof, as compared to a corresponding non-transformed wild type non-human organism or a part thereof; and
[3005] (b) growing the non-human organism or a part thereof under conditions which permit the production of glutamine or a composition comprising glutamine in said non-human organism or in the culture medium surrounding said non-human organism.

[3006] Accordingly, the present invention relates to a process for the production of proline, which comprises
[3007] (a) increasing or generating one or more activities selected from the group consisting of transcription factor in a non-human organism or a part thereof, preferably a microorganism, a plant cell, a plant or a part thereof, as compared to a corresponding non-transformed wild type non-human organism or a part thereof; and
[3008] (b) growing the non-human organism or a part thereof under conditions which permit the production of proline or a composition comprising proline in said non-human organism or in the culture medium surrounding said non-human organism.

[3009] Accordingly, the present invention relates to a process for the production of glutamate, which comprises
[3010] (a) increasing or generating one or more activities selected from the group consisting of protein phosphatase in a non-human organism or a part thereof, preferably a microorganism, a plant cell, a plant or a part thereof, as compared to a corresponding non-transformed wild type non-human organism or a part thereof; and
[3011] (b) growing the non-human organism or a part thereof under conditions which permit the production of glutamate or a composition comprising glutamate in said non-human organism or in the culture medium surrounding said non-human organism.
[3012] Accordingly, the present invention relates to a process for the production of glutamine, which comprises
[3013] (a) increasing or generating one or more activities selected from the group consisting of protein phosphatase in a non-human organism or a part thereof, preferably a microorganism, a plant cell, a plant or a part thereof, as compared to a corresponding non-transformed wild type non-human organism or a part thereof; and
[3014] (b) growing the non-human organism or a part thereof under conditions which permit the production of glutamine or a composition comprising glutamine in said non-human organism or in the culture medium surrounding said non-human organism.

[3015] Accordingly, the present invention relates to a process for the production of proline, which comprises
[3016] (a) increasing or generating one or more activities selected from the group consisting of serine protease inhibitor in a non-human organism or a part thereof, preferably a microorganism, a plant cell, a plant or a part thereof, as compared to a corresponding non-transformed wild type non-human organism or a part thereof; and
[3017] (b) growing the non-human organism or a part thereof under conditions which permit the production of proline or a composition comprising proline in said non-human organism or in the culture medium surrounding said non-human organism.

[3018] Accordingly, the present invention relates to a process for the production of proline, which comprises
[3019] (a) increasing or generating one or more activities selected from the group consisting of protein phosphatase in a non-human organism or a part thereof, preferably a microorganism, a plant cell, a plant or a part thereof, as compared to a corresponding non-transformed wild type non-human organism or a part thereof; and
[3020] (b) growing the non-human organism or a part thereof under conditions which permit the production of proline or a composition comprising proline in said non-human organism or in the culture medium surrounding said non-human organism.

[3021] Accordingly, the present invention relates to a process for the production of glutamine, which comprises
[3022] (a) increasing or generating one or more activities selected from the group consisting of CBL-interacting protein kinase in a non-human organism or a part thereof, preferably a microorganism, a plant cell, a plant or a part thereof, as compared to a corresponding non-transformed wild type non-human organism or a part thereof; and
[3023] (b) growing the non-human organism or a part thereof under conditions which permit the production of glutamine or a composition comprising glutamine in said non-human organism or in the culture medium surrounding said non-human organism.

[3024] Accordingly, the present invention relates to a process for the production of proline, which comprises
[3025] (a) increasing or generating one or more activities selected from the group consisting of CBL-interacting protein kinase in a non-human organism or a part thereof, preferably a microorganism, a plant cell, a plant or a part thereof, as compared to a corresponding non-transformed wild type non-human organism or a part thereof; and
[3026] (b) growing the non-human organism or a part thereof under conditions which permit the production of proline or a composition comprising proline in said non-human organism or in the culture medium surrounding said non-human organism.

[3027] Accordingly, the present invention relates to a process for the production of arginine, which comprises
[3028] (a) increasing or generating one or more activities selected from the group consisting of glutaredoxin in a non-human organism or a part thereof, preferably a microorganism, a plant cell, a plant or a part thereof, as compared to a corresponding non-transformed wild type non-human organism or a part thereof; and
[3029] (b) growing the non-human organism or a part thereof under conditions which permit the production of arginine or a composition comprising arginine in said non-human organism or in the culture medium surrounding said non-human organism.

[3030] Accordingly, the present invention relates to a process for the production of proline, which comprises
[3031] (a) increasing or generating one or more activities selected from the group consisting of glutaredoxin in a non-human organism or a part thereof, preferably a microorganism, a plant cell, a plant or a part thereof, as compared to a corresponding non-transformed wild type non-human organism or a part thereof; and
[3032] (b) growing the non-human organism or a part thereof under conditions which permit the production of proline or a composition comprising proline in said non-human organism or in the culture medium surrounding said non-human organism.

[3033] Accordingly, the present invention relates to a process for the production of proline, which comprises
[3034] (a) increasing or generating one or more activities selected from the group consisting of CBL-interacting protein kinase in a non-human organism or a part thereof, preferably a microorganism, a plant cell, a plant or a part thereof, as compared to a corresponding non-transformed wild type non-human organism or a part thereof; and
[3035] (b) growing the non-human organism or a part thereof under conditions which permit the production of proline or a composition comprising proline in said non-human organism or in the culture medium surrounding said non-human organism.

[3036] Accordingly, the present invention relates to a process for the production of proline, which comprises
[3037] (a) increasing or generating one or more activities selected from the group consisting of delta-1-pyrroline 5-carboxylase synthetase in a non-human organism or a part thereof, preferably a microorganism, a plant cell, a plant or a part thereof, as compared to a corresponding non-transformed wild type non-human organism or a part thereof; and
[3038] (b) growing the non-human organism or a part thereof under conditions which permit the production of proline or a composition comprising proline in said non-human organism or in the culture medium surrounding said non-human organism.

[3039] Accordingly, the present invention relates to a process for the production of glutamine, which comprises
[3040] (a) increasing or generating one or more activities selected from the group consisting of phosphatidylinositol 3- and 4-kinase family protein in a non-human organism or a part thereof, preferably a microorganism, a plant cell, a plant or a part thereof, as compared to a corresponding non-transformed wild type non-human organism or a part thereof; and
[3041] (b) growing the non-human organism or a part thereof under conditions which permit the production of glutamine or a composition comprising glutamine in said non-human organism or in the culture medium surrounding said non-human organism.

[3042] Accordingly, the present invention relates to a process for the production of arginine, which comprises
[3043] (a) increasing or generating one or more activities selected from the group consisting of glutaredoxin in a non-human organism or a part thereof, preferably a microorganism, a plant cell, a plant or a part thereof, as compared to a corresponding non-transformed wild type non-human organism or a part thereof; and
[3044] (b) growing the non-human organism or a part thereof under conditions which permit the production of arginine or a composition comprising arginine in said non-human organism or in the culture medium surrounding said non-human organism.

[3045] Accordingly, the present invention relates to a process for the production of glutamine, which comprises
[3046] (a) increasing or generating one or more activities selected from the group consisting of glutaredoxin in a non-human organism or a part thereof, preferably a microorganism, a plant cell, a plant or a part thereof, as compared to a corresponding non-transformed wild type non-human organism or a part thereof; and
[3047] (b) growing the non-human organism or a part thereof under conditions which permit the production of glutamine or a composition comprising glutamine in said non-human organism or in the culture medium surrounding said non-human organism.

[3048] Accordingly, the present invention relates to a process for the production of proline, which comprises
[3049] (a) increasing or generating one or more activities selected from the group consisting of glutaredoxin in a non-human organism or a part thereof, preferably a microorganism, a plant cell, a plant or a part thereof, as compared to a corresponding non-transformed wild type non-human organism or a part thereof; and
[3050] (b) growing the non-human organism or a part thereof under conditions which permit the production of proline or a composition comprising proline in said non-human organism or in the culture medium surrounding said non-human organism.

[3051] Accordingly, the present invention relates to a process for the production of glutamate, which comprises
[3052] (a) increasing or generating one or more activities selected from the group consisting of pyruvate kinase in a non-human organism or a part thereof, preferably a microorganism, a plant cell, a plant or a part thereof, as compared to a corresponding non-transformed wild type non-human organism or a part thereof; and
[3053] (b) growing the non-human organism or a part thereof under conditions which permit the production of glutamate or a composition comprising glutamate in said non-human organism or in the culture medium surrounding said non-human organism.

[3054] Accordingly, the present invention relates to a process for the production of proline, which comprises
[3055] (a) increasing or generating one or more activities selected from the group consisting of pyruvate kinase in a non-human organism or a part thereof, preferably a microorganism, a plant cell, a plant or a part thereof, as compared to a corresponding non-transformed wild type non-human organism or a part thereof; and
[3056] (b) growing the non-human organism or a part thereof under conditions which permit the production of proline or a composition comprising proline in said non-human organism or in the culture medium surrounding said non-human organism.

[3057] Accordingly, the present invention relates to a process for the production of proline, which comprises
[3058] (a) increasing or generating one or more activities selected from the group consisting of ankyrin repeat family protein in a non-human organism or a part thereof, preferably a microorganism, a plant cell, a plant or a part thereof, as compared to a corresponding non-transformed wild type non-human organism or a part thereof; and
[3059] (b) growing the non-human organism or a part thereof under conditions which permit the production of proline or a composition comprising proline in said non-human organism or in the culture medium surrounding said non-human organism.

[3060] Accordingly, the present invention relates to a process for the production of glutamate, which comprises
[3061] (a) increasing or generating one or more activities selected from the group consisting of protein phosphatase in a non-human organism or a part thereof, preferably a microorganism, a plant cell, a plant or a part thereof, as compared to a corresponding non-transformed wild type non-human organism or a part thereof; and
[3062] (b) growing the non-human organism or a part thereof under conditions which permit the production of glutamate or a composition comprising glutamate in said non-human organism or in the culture medium surrounding said non-human organism.

[3063] Accordingly, the present invention relates to a process for the production of arginine, which comprises
[3064] (a) increasing or generating one or more activities selected from the group consisting of thioredoxin family protein in a non-human organism or a part thereof, preferably a microorganism, a plant cell, a plant or a part thereof, as compared to a corresponding non-transformed wild type non-human organism or a part thereof; and
[3065] (b) growing the non-human organism or a part thereof under conditions which permit the production of arginine or a composition comprising arginine in said non-human organism or in the culture medium surrounding said non-human organism.

[3066] Accordingly, the present invention relates to a process for the production of glutamate, which comprises
[3067] (a) increasing or generating one or more activities selected from the group consisting of thioredoxin family protein in a non-human organism or a part thereof, preferably a microorganism, a plant cell, a plant or a part thereof, as compared to a corresponding non-transformed wild type non-human organism or a part thereof; and
[3068] (b) growing the non-human organism or a part thereof under conditions which permit the production of glutamate or a composition comprising glutamate in said non-human organism or in the culture medium surrounding said non-human organism.

[3069] Accordingly, the present invention relates to a process for the production of glutamine, which comprises
[3070] (a) increasing or generating one or more activities selected from the group consisting of thioredoxin family protein in a non-human organism or a part thereof, preferably a microorganism, a plant cell, a plant or a part thereof, as compared to a corresponding non-transformed wild type non-human organism or a part thereof; and
[3071] (b) growing the non-human organism or a part thereof under conditions which permit the production of glutamine or a composition comprising glutamine in said non-human organism or in the culture medium surrounding said non-human organism.

[3072] Accordingly, the present invention relates to a process for the production of proline, which comprises
[3073] (a) increasing or generating one or more activities selected from the group consisting of thioredoxin family protein in a non-human organism or a part thereof, preferably a microorganism, a plant cell, a plant or a part thereof, as compared to a corresponding non-transformed wild type non-human organism or a part thereof; and
[3074] (b) growing the non-human organism or a part thereof under conditions which permit the production of proline or a composition comprising proline in said non-human organism or in the culture medium surrounding said non-human organism.

[3075] Accordingly, the present invention relates to a process for the production of arginine, which comprises
[3076] (a) increasing or generating one or more activities selected from the group consisting of harpin-induced family protein in a non-human organism or a part thereof, preferably a microorganism, a plant cell, a plant or a part thereof, as compared to a corresponding non-transformed wild type non-human organism or a part thereof; and
[3077] (b) growing the non-human organism or a part thereof under conditions which permit the production of arginine or a composition comprising arginine in said non-human organism or in the culture medium surrounding said non-human organism.

[3078] Accordingly, the present invention relates to a process for the production of glutamine, which comprises
[3079] (a) increasing or generating one or more activities selected from the group consisting of harpin-induced family protein in a non-human organism or a part thereof, preferably a microorganism, a plant cell, a plant or a part thereof, as compared to a corresponding non-transformed wild type non-human organism or a part thereof; and
[3080] (b) growing the non-human organism or a part thereof under conditions which permit the production of glutamine or a composition comprising glutamine in said non-human organism or in the culture medium surrounding said non-human organism.

[3081] Accordingly, the present invention relates to a process for the production of proline, which comprises
[3082] (a) increasing or generating one or more activities selected from the group consisting of harpin-induced family protein in a non-human organism or a part thereof, preferably a microorganism, a plant cell, a plant or a part thereof, as compared to a corresponding non-transformed wild type non-human organism or a part thereof; and
[3083] (b) growing the non-human organism or a part thereof under conditions which permit the production of proline or a composition comprising proline in said non-human organism or in the culture medium surrounding said non-human organism.

[3084] Accordingly, the present invention relates to a process for the production of proline, which comprises
[3085] (a) increasing or generating one or more activities selected from the group consisting of DNA binding protein in a non-human organism or a part thereof, preferably a microorganism, a plant cell, a plant or a part thereof, as compared to a corresponding non-transformed wild type non-human organism or a part thereof; and
[3086] (b) growing the non-human organism or a part thereof under conditions which permit the production of proline or a composition comprising proline in said non-human organism or in the culture medium surrounding said non-human organism.

[3087] Accordingly, the present invention relates to a process for the production of proline, which comprises
[3088] (a) increasing or generating one or more activities selected from the group consisting of DNA mismatch repair protein in a non-human organism or a part thereof, preferably a microorganism, a plant cell, a plant or a part thereof, as compared to a corresponding non-transformed wild type non-human organism or a part thereof; and
[3089] (b) growing the non-human organism or a part thereof under conditions which permit the production of proline or a composition comprising proline in said non-human organism or in the culture medium surrounding said non-human organism.

[3090] Accordingly, the present invention relates to a process for the production of proline, which comprises
[3091] (a) increasing or generating one or more activities selected from the group consisting of CCAAT-binding transcription factor in a non-human organism or a part thereof, preferably a microorganism, a plant cell, a plant or a part thereof, as compared to a corresponding non-transformed wild type non-human organism or a part thereof; and
[3092] (b) growing the non-human organism or a part thereof under conditions which permit the production of proline or a composition comprising proline in said non-human organism or in the culture medium surrounding said non-human organism.

[3093] Accordingly, the present invention relates to a process for the production of glutamine, which comprises
[3094] (a) increasing or generating one or more activities selected from the group consisting of protein kinase in a non-human organism or a part thereof, preferably a microorganism, a plant cell, a plant or a part thereof, as compared to a corresponding non-transformed wild type non-human organism or a part thereof; and
[3095] (b) growing the non-human organism or a part thereof under conditions which permit the production of glutamine or a composition comprising glutamine in said non-human organism or in the culture medium surrounding said non-human organism.

[3096] Accordingly, the present invention relates to a process for the production of proline, which comprises
[3097] (a) increasing or generating one or more activities selected from the group consisting of glucose-6-phosphate 1-dehydrogenase in a non-human organism or a part thereof, preferably a microorganism, a plant cell, a plant or a part thereof, as compared to a corresponding non-transformed wild type non-human organism or a part thereof; and
[3098] (b) growing the non-human organism or a part thereof under conditions which permit the production of proline or a composition comprising proline in said non-human organism or in the culture medium surrounding said non-human organism.

[3099] Accordingly, the present invention relates to a process for the production of glutamate, which comprises
[3100] (a) increasing or generating one or more activities selected from the group consisting of monthiol glutaredoxin in a non-human organism or a part thereof, preferably a microorganism, a plant cell, a plant or a part thereof, as compared to a corresponding non-transformed wild type non-human organism or a part thereof; and
[3101] (b) growing the non-human organism or a part thereof under conditions which permit the production of glutamate or a composition comprising glutamate in said non-human organism or in the culture medium surrounding said non-human organism.

[3102] Accordingly, the present invention relates to a process for the production of glutamine, which comprises
[3103] (a) increasing or generating one or more activities selected from the group consisting of monthiol glutaredoxin in a non-human organism or a part thereof, preferably a microorganism, a plant cell, a plant or a part thereof, as compared to a corresponding non-transformed wild type non-human organism or a part thereof; and
[3104] (b) growing the non-human organism or a part thereof under conditions which permit the production of glutamine or a composition comprising glutamine in said non-human organism or in the culture medium surrounding said non-human organism.

[3105] Accordingly, the present invention relates to a process for the production of glutamate, which comprises
[3106] (a) increasing or generating one or more activities selected from the group consisting of glutaredoxin in a non-human organism or a part thereof, preferably a microorganism, a plant cell, a plant or a part thereof, as compared to a corresponding non-transformed wild type non-human organism or a part thereof; and
[3107] (b) growing the non-human organism or a part thereof under conditions which permit the production of glutamate or a composition comprising glutamate in said non-human organism or in the culture medium surrounding said non-human organism.

[3108] Accordingly, the present invention relates to a process for the production of glutamine, which comprises
[3109] (a) increasing or generating one or more activities selected from the group consisting of glutaredoxin in a non-human organism or a part thereof, preferably a microorganism, a plant cell, a plant or a part thereof, as compared to a corresponding non-transformed wild type non-human organism or a part thereof; and
[3110] (b) growing the non-human organism or a part thereof under conditions which permit the production of glutamine or a composition comprising glutamine in said non-human organism or in the culture medium surrounding said non-human organism.

[3111] Accordingly, the present invention relates to a process for the production of glutamate, which comprises
[3112] (a) increasing or generating one or more activities selected from the group consisting of monothiol glutaredoxin in a non-human organism or a part thereof, preferably a microorganism, a plant cell, a plant or a part thereof, as compared to a corresponding non-transformed wild type non-human organism or a part thereof; and
[3113] (b) growing the non-human organism or a part thereof under conditions which permit the production of glutamate or a composition comprising glutamate in said non-human organism or in the culture medium surrounding said non-human organism.

[3114] Accordingly, the present invention relates to a process for the production of glutamine, which comprises
[3115] (a) increasing or generating one or more activities selected from the group consisting of monothiol glutaredoxin in a non-human organism or a part thereof, preferably a microorganism, a plant cell, a plant or a part thereof, as compared to a corresponding non-transformed wild type non-human organism or a part thereof; and
[3116] (b) growing the non-human organism or a part thereof under conditions which permit the production of glutamine or a composition comprising glutamine in said non-human organism or in the culture medium surrounding said non-human organism.

[3117] Accordingly, the present invention relates to a process for the production of glutamate, which comprises
[3118] (a) increasing or generating one or more activities selected from the group consisting of monothiol glutaredoxin in a non-human organism or a part thereof, preferably a microorganism, a plant cell, a plant or a part thereof, as compared to a corresponding non-transformed wild type non-human organism or a part thereof; and
[3119] (b) growing the non-human organism or a part thereof under conditions which permit the production of glutamate or a composition comprising glutamate in said non-human organism or in the culture medium surrounding said non-human organism.

[3120] Accordingly, the present invention relates to a process for the production of glutamate, which comprises
[3121] (a) increasing or generating one or more activities selected from the group consisting of monothiol glutaredoxin in a non-human organism or a part thereof, preferably a microorganism, a plant cell, a plant or a part thereof, as compared to a corresponding non-transformed wild type non-human organism or a part thereof; and
[3122] (b) growing the non-human organism or a part thereof under conditions which permit the production of glutamate or a composition comprising glutamate in said non-human organism or in the culture medium surrounding said non-human organism.

[3123] Accordingly, the present invention relates to a process for the production of glutamine, which comprises
[3124] (a) increasing or generating one or more activities selected from the group consisting of monothiol glutaredoxin in a non-human organism or a part thereof, preferably a microorganism, a plant cell, a plant or a part thereof, as compared to a corresponding non-transformed wild type non-human organism or a part thereof; and
[3125] (b) growing the non-human organism or a part thereof under conditions which permit the production of glutamine or a composition comprising glutamine in said non-human organism or in the culture medium surrounding said non-human organism.

[3126] Accordingly, the present invention relates to a process for the production of proline, which comprises
[3127] (a) increasing or generating one or more activities selected from the group consisting of monothiol glutaredoxin in a non-human organism or a part thereof, preferably a microorganism, a plant cell, a plant or a part thereof, as compared to a corresponding non-transformed wild type non-human organism or a part thereof; and
[3128] (b) growing the non-human organism or a part thereof under conditions which permit the production of proline or a composition comprising proline in said non-human organism or in the culture medium surrounding said non-human organism.

[3129] Accordingly, the present invention relates to a process for the production of glutamine, which comprises
[3130] (a) increasing or generating one or more activities selected from the group consisting of monothiol glutaredoxin in a non-human organism or a part thereof, preferably a microorganism, a plant cell, a plant or a part thereof, as compared to a corresponding non-transformed wild type non-human organism or a part thereof; and
[3131] (b) growing the non-human organism or a part thereof under conditions which permit the production of glutamine or a composition comprising glutamine in said non-human organism or in the culture medium surrounding said non-human organism.

[3132] Accordingly, the present invention relates to a process for the production of proline, which comprises
[3133] (a) increasing or generating one or more activities selected from the group consisting of heat shock transcription factor in a non-human organism or a part thereof, preferably a microorganism, a plant cell, a plant or a part thereof, as compared to a corresponding non-transformed wild type non-human organism or a part thereof; and
[3134] (b) growing the non-human organism or a part thereof under conditions which permit the production of proline or a composition comprising proline in said non-human organism or in the culture medium surrounding said non-human organism.

[3135] Accordingly, the present invention relates to a process for the production of arginine, which comprises
[3136] (a) increasing or generating one or more activities selected from the group consisting of At4g32480-protein in a non-human organism or a part thereof, preferably a microorganism, a plant cell, a plant or a part thereof, as compared to a corresponding non-transformed wild type non-human organism or a part thereof; and
[3137] (b) growing the non-human organism or a part thereof under conditions which permit the production of arginine or a composition comprising arginine in said non-human organism or in the culture medium surrounding said non-human organism.

[3138] Accordingly, the present invention relates to a process for the production of glutamine, which comprises
[3139] (a) increasing or generating one or more activities selected from the group consisting of At4g32480-protein in a non-human organism or a part thereof, preferably a microorganism, a plant cell, a plant or a part thereof, as compared to a corresponding non-transformed wild type non-human organism or a part thereof; and
[3140] (b) growing the non-human organism or a part thereof under conditions which permit the production of glutamine or a composition comprising glutamine in said non-human organism or in the culture medium surrounding said non-human organism.

[3141] Accordingly, the present invention relates to a process for the production of proline, which comprises
[3142] (a) increasing or generating one or more activities selected from the group consisting of At4g32480-protein in a non-human organism or a part thereof, preferably a microorganism, a plant cell, a plant or a part thereof, as compared to a corresponding non-transformed wild type non-human organism or a part thereof; and
[3143] (b) growing the non-human organism or a part thereof under conditions which permit the production of proline or a composition comprising proline in said non-human organism or in the culture medium surrounding said non-human organism.

[3144] Accordingly, the present invention relates to a process for the production of glutamate, which comprises
[3145] (a) increasing or generating one or more activities selected from the group consisting of glutaredoxin in a non-human organism or a part thereof, preferably a microorganism, a plant cell, a plant or a part thereof, as compared to a corresponding non-transformed wild type non-human organism or a part thereof; and
[3146] (b) growing the non-human organism or a part thereof under conditions which permit the production of glutamate or a composition comprising glutamate in said non-human organism or in the culture medium surrounding said non-human organism.

[3147] Accordingly, the present invention relates to a process for the production of arginine, which comprises
[3148] (a) increasing or generating one or more activities selected from the group consisting of cyclin D in a non-human organism or a part thereof, preferably a microorganism, a plant cell, a plant or a part thereof, as compared to a corresponding non-transformed wild type non-human organism or a part thereof; and
[3149] (b) growing the non-human organism or a part thereof under conditions which permit the production of arginine or a composition comprising arginine in said non-human organism or in the culture medium surrounding said non-human organism.

[3150] Accordingly, the present invention relates to a process for the production of glutamine, which comprises
[3151] (a) increasing or generating one or more activities selected from the group consisting of cyclin D in a non-human organism or a part thereof, preferably a microorganism, a plant cell, a plant or a part thereof, as compared to a corresponding non-transformed wild type non-human organism or a part thereof; and
[3152] (b) growing the non-human organism or a part thereof under conditions which permit the production of glutamine or a composition comprising glutamine in said non-human organism or in the culture medium surrounding said non-human organism.

[3153] Accordingly, the present invention relates to a process for the production of proline, which comprises
[3154] (a) increasing or generating one or more activities selected from the group consisting of cyclin D in a non-human organism or a part thereof, preferably a microorganism, a plant cell, a plant or a part thereof, as compared to a corresponding non-transformed wild type non-human organism or a part thereof; and
[3155] (b) growing the non-human organism or a part thereof under conditions which permit the production of proline or a composition comprising proline in said non-human organism or in the culture medium surrounding said non-human organism.

[3156] Accordingly, the present invention relates to a process for the production of arginine, which comprises
[3157] (a) increasing or generating one or more activities selected from the group consisting of calcium-dependent protein kinase in a non-human organism or a part thereof, preferably a microorganism, a plant cell, a plant or a part thereof, as compared to a corresponding non-transformed wild type non-human organism or a part thereof; and
[3158] (b) growing the non-human organism or a part thereof under conditions which permit the production of arginine or a composition comprising arginine in said non-human organism or in the culture medium surrounding said non-human organism.

[3159] Accordingly, the present invention relates to a process for the production of proline, which comprises
[3160] (a) increasing or generating one or more activities selected from the group consisting of calcium-dependent protein kinase in a non-human organism or a part thereof, preferably a microorganism, a plant cell, a plant or a part thereof, as compared to a corresponding non-transformed wild type non-human organism or a part thereof; and
[3161] (b) growing the non-human organism or a part thereof under conditions which permit the production of proline or a composition comprising proline in said non-human organism or in the culture medium surrounding said non-human organism.

[3162] Accordingly, the present invention relates to a process for the production of glutamate, which comprises
[3163] (a) increasing or generating one or more activities selected from the group consisting of heat shock transcription factor in a non-human organism or a part thereof, preferably a microorganism, a plant cell, a plant or a part thereof, as compared to a corresponding non-transformed wild type non-human organism or a part thereof; and
[3164] (b) growing the non-human organism or a part thereof under conditions which permit the production of glutamate or a composition comprising glutamate in said non-human organism or in the culture medium surrounding said non-human organism.

[3165] Accordingly, the present invention relates to a process for the production of proline, which comprises
[3166] (a) increasing or generating one or more activities selected from the group consisting of gibberellin 20-oxidase in a non-human organism or a part thereof, preferably a microorganism, a plant cell, a plant or a part thereof, as compared to a corresponding non-transformed wild type non-human organism or a part thereof; and
[3167] (b) growing the non-human organism or a part thereof under conditions which permit the production of proline or a composition comprising proline in said non-human organism or in the culture medium surrounding said non-human organism.

[3168] Accordingly, the present invention relates to a process for the production of glutamate, which comprises
[3169] (a) increasing or generating one or more activities selected from the group consisting of integral membrane transporter family protein in a non-human organism or a part thereof, preferably a microorganism, a plant cell, a plant or a part thereof, as compared to a corresponding non-transformed wild type non-human organism or a part thereof; and
[3170] (b) growing the non-human organism or a part thereof under conditions which permit the production of glutamate or a composition comprising glutamate in said non-human organism or in the culture medium surrounding said non-human organism.

[3171] Accordingly, the present invention relates to a process for the production of glutamine, which comprises
[3172] (a) increasing or generating one or more activities selected from the group consisting of integral membrane transporter family protein in a non-human organism or a part thereof, preferably a microorganism, a plant cell, a plant or a part thereof, as compared to a corresponding non-transformed wild type non-human organism or a part thereof; and
[3173] (b) growing the non-human organism or a part thereof under conditions which permit the production of glutamine or a composition comprising glutamine in said non-human organism or in the culture medium surrounding said non-human organism.

[3174] Accordingly, the present invention relates to a process for the production of arginine, which comprises
[3175] (a) increasing or generating one or more activities selected from the group consisting of At5g16650-protein in a non-human organism or a part thereof, preferably a microorganism, a plant cell, a plant or a part thereof, as compared to a corresponding non-transformed wild type non-human organism or a part thereof; and
[3176] (b) growing the non-human organism or a part thereof under conditions which permit the production of arginine or a composition comprising arginine in said non-human organism or in the culture medium surrounding said non-human organism.

[3177] Accordingly, the present invention relates to a process for the production of glutamine, which comprises
[3178] (a) increasing or generating one or more activities selected from the group consisting of At5g16650-protein in a non-human organism or a part thereof, preferably a microorganism, a plant cell, a plant or a part thereof, as compared to a corresponding non-transformed wild type non-human organism or a part thereof; and
[3179] (b) growing the non-human organism or a part thereof under conditions which permit the production of glutamine or a composition comprising glutamine in said non-human organism or in the culture medium surrounding said non-human organism.

[3180] Accordingly, the present invention relates to a process for the production of proline, which comprises
[3181] (a) increasing or generating one or more activities selected from the group consisting of At5g16650-protein in a non-human organism or a part thereof, preferably a microorganism, a plant cell, a plant or a part thereof, as compared to a corresponding non-transformed wild type non-human organism or a part thereof; and
[3182] (b) growing the non-human organism or a part thereof under conditions which permit the production of proline or a composition comprising proline in said non-human organism or in the culture medium surrounding said non-human organism.

[3183] Accordingly, the present invention relates to a process for the production of glutamine, which comprises
[3184] (a) increasing or generating one or more activities selected from the group consisting of monothiol glutaredoxin in a non-human organism or a part thereof, preferably a microorganism, a plant cell, a plant or a part thereof, as compared to a corresponding non-transformed wild type non-human organism or a part thereof; and
[3185] (b) growing the non-human organism or a part thereof under conditions which permit the production of glutamine or a composition comprising glutamine in said non-human organism or in the culture medium surrounding said non-human organism.

[3186] Accordingly, the present invention relates to a process for the production of arginine, which comprises
[3187] (a) increasing or generating one or more activities selected from the group consisting of translation initiation factor subunit in a non-human organism or a part thereof, preferably a microorganism, a plant cell, a plant or a part thereof, as compared to a corresponding non-transformed wild type non-human organism or a part thereof; and
[3188] (b) growing the non-human organism or a part thereof under conditions which permit the production of arginine or a composition comprising arginine in said non-human organism or in the culture medium surrounding said non-human organism.

[3189] Accordingly, the present invention relates to a process for the production of glutamate, which comprises
[3190] (a) increasing or generating one or more activities selected from the group consisting of transcription factor in a non-human organism or a part thereof, preferably a microorganism, a plant cell, a plant or a part thereof, as compared to a corresponding non-transformed wild type non-human organism or a part thereof; and
[3191] (b) growing the non-human organism or a part thereof under conditions which permit the production of glutamate or a composition comprising glutamate in said non-human organism or in the culture medium surrounding said non-human organism.

[3192] Accordingly, the present invention relates to a process for the production of proline, which comprises
[3193] (a) increasing or generating one or more activities selected from the group consisting of transcription factor in a non-human organism or a part thereof, preferably a microorganism, a plant cell, a plant or a part thereof, as compared to a corresponding non-transformed wild type non-human organism or a part thereof; and
[3194] (b) growing the non-human organism or a part thereof under conditions which permit the production of proline or a composition comprising proline in said non-human organism or in the culture medium surrounding said non-human organism.

[3195] Accordingly, the present invention relates to a process for the production of glutamine, which comprises
[3196] (a) increasing or generating one or more activities selected from the group consisting of protein phosphatase in a non-human organism or a part thereof, preferably a microorganism, a plant cell, a plant or a part thereof, as compared to a corresponding non-transformed wild type non-human organism or a part thereof; and
[3197] (b) growing the non-human organism or a part thereof under conditions which permit the production of glutamine or a composition comprising glutamine in said non-human organism or in the culture medium surrounding said non-human organism.

[3198] Accordingly, the present invention relates to a process for the production of glutamine, which comprises
[3199] (a) increasing or generating one or more activities selected from the group consisting of protein phosphatase in a non-human organism or a part thereof, preferably a microorganism, a plant cell, a plant or a part thereof, as compared to a corresponding non-transformed wild type non-human organism or a part thereof; and
[3200] (b) growing the non-human organism or a part thereof under conditions which permit the production of glutamine or a composition comprising glutamine in said non-human organism or in the culture medium surrounding said non-human organism.

[3201] Accordingly, the present invention relates to a process for the production of arginine, which comprises
[3202] (a) increasing or generating one or more activities selected from the group consisting of zinc finger protein in a non-human organism or a part thereof, preferably a microorganism, a plant cell, a plant or a part thereof, as compared to a corresponding non-transformed wild type non-human organism or a part thereof; and
[3203] (b) growing the non-human organism or a part thereof under conditions which permit the production of arginine or a composition comprising arginine in said non-human organism or in the culture medium surrounding said non-human organism.

[3204] Accordingly, the present invention relates to a process for the production of glutamine, which comprises
[3205] (a) increasing or generating one or more activities selected from the group consisting of zinc finger protein in a non-human organism or a part thereof, preferably a microorganism, a plant cell, a plant or a part thereof, as compared to a corresponding non-transformed wild type non-human organism or a part thereof; and
[3206] (b) growing the non-human organism or a part thereof under conditions which permit the production of glutamine or a composition comprising glutamine in said non-human organism or in the culture medium surrounding said non-human organism.

[3207] Accordingly, the present invention relates to a process for the production of glutamate, which comprises
[3208] (a) increasing or generating one or more activities selected from the group consisting of transcriptional regulator in a non-human organism or a part thereof, preferably a microorganism, a plant cell, a plant or a part thereof, as compared to a corresponding non-transformed wild type non-human organism or a part thereof; and
[3209] (b) growing the non-human organism or a part thereof under conditions which permit the production of glutamate or a composition comprising glutamate in said non-human organism or in the culture medium surrounding said non-human organism.

[3210] Accordingly, the present invention relates to a process for the production of glutamate, which comprises
[3211] (a) increasing or generating one or more activities selected from the group consisting of adenylylsulfate kinase in a non-human organism or a part thereof, preferably a microorganism, a plant cell, a plant or a part thereof, as compared to a corresponding non-transformed wild type non-human organism or a part thereof; and
[3212] (b) growing the non-human organism or a part thereof under conditions which permit the production of glutamate or a composition comprising glutamate in said non-human organism or in the culture medium surrounding said non-human organism.

[3213] Accordingly, the present invention relates to a process for the production of glutamine, which comprises
[3214] (a) increasing or generating one or more activities selected from the group consisting of adenylylsulfate kinase in a non-human organism or a part thereof, preferably a microorganism, a plant cell, a plant or a part thereof, as compared to a corresponding non-transformed wild type non-human organism or a part thereof; and
[3215] (b) growing the non-human organism or a part thereof under conditions which permit the production of glutamine or a composition comprising glutamine in said non-human organism or in the culture medium surrounding said non-human organism.

[3216] Accordingly, the present invention relates to a process for the production of glutamine, which comprises
[3217] (a) increasing or generating one or more activities selected from the group consisting of malic enzyme in a non-human organism or a part thereof, preferably a microorganism, a plant cell, a plant or a part thereof, as compared to a corresponding non-transformed wild type non-human organism or a part thereof; and
[3218] (b) growing the non-human organism or a part thereof under conditions which permit the production of glutamine or a composition comprising glutamine in said non-human organism or in the culture medium surrounding said non-human organism. Accordingly, the present invention relates to a process for the production of proline, which comprises
[3219] (a) increasing or generating one or more activities selected from the group consisting of malic enzyme in a non-human organism or a part thereof, preferably a microorganism, a plant cell, a plant or a part thereof, as compared to a corresponding non-transformed wild type non-human organism or a part thereof; and
[3220] (b) growing the non-human organism or a part thereof under conditions which permit the production of proline or a composition comprising proline in said non-human organism or in the culture medium surrounding said non-human organism.

[3221] Accordingly, the present invention relates to a process for the production of proline, which comprises
[3222] (a) increasing or generating one or more activities selected from the group consisting of glycosyl transferase in a non-human organism or a part thereof, preferably a microorganism, a plant cell, a plant or a part thereof, as compared to a corresponding non-transformed wild type non-human organism or a part thereof; and
[3223] (b) growing the non-human organism or a part thereof under conditions which permit the production of proline or a composition comprising proline in said non-human organism or in the culture medium surrounding said non-human organism.

[3224] Accordingly, the present invention relates to a process for the production of proline, which comprises
[3225] (a) increasing or generating one or more activities selected from the group consisting of sec-independent protein translocase in a non-human organism or a part thereof, preferably a microorganism, a plant cell, a plant or a part thereof, as compared to a corresponding non-transformed wild type non-human organism or a part thereof; and
[3226] (b) growing the non-human organism or a part thereof under conditions which permit the production of proline or a composition comprising proline in said non-human organism or in the culture medium surrounding said non-human organism.

[3227] Accordingly, the present invention relates to a process for the production of glutamate, which comprises
[3228] (a) increasing or generating one or more activities selected from the group consisting of pyruvate kinase in a non-human organism or a part thereof, preferably a microorganism, a plant cell, a plant or a part thereof, as compared to a corresponding non-transformed wild type non-human organism or a part thereof; and
[3229] (b) growing the non-human organism or a part thereof under conditions which permit the production of glutamate or a composition comprising glutamate in said non-human organism or in the culture medium surrounding said non-human organism.

[3230] Accordingly, the present invention relates to a process for the production of arginine, which comprises
[3231] (a) increasing or generating one or more activities selected from the group consisting of beta-hydroxylase in a non-human organism or a part thereof, preferably a microorganism, a plant cell, a plant or a part thereof, as compared to a corresponding non-transformed wild type non-human organism or a part thereof; and
[3232] (b) growing the non-human organism or a part thereof under conditions which permit the production of arginine or a composition comprising arginine in said non-human organism or in the culture medium surrounding said non-human organism.

[3233] Accordingly, the present invention relates to a process for the production of arginine, which comprises
[3234] (a) increasing or generating one or more activities selected from the group consisting of elongation factor Tu in a non-human organism or a part thereof, preferably a microorganism, a plant cell, a plant or a part thereof, as compared to a corresponding non-transformed wild type non-human organism or a part thereof; and
[3235] (b) growing the non-human organism or a part thereof under conditions which permit the production of arginine or a composition comprising arginine in said non-human organism or in the culture medium surrounding said non-human organism.

[3236] Accordingly, the present invention relates to a process for the production of glutamate, which comprises
[3237] (a) increasing or generating one or more activities selected from the group consisting of elongation factor Tu in a non-human organism or a part thereof, preferably a microorganism, a plant cell, a plant or a part thereof, as compared to a corresponding non-transformed wild type non-human organism or a part thereof; and
[3238] (b) growing the non-human organism or a part thereof under conditions which permit the production of glutamate or a composition comprising glutamate in said non-human organism or in the culture medium surrounding said non-human organism.

[3239] Accordingly, the present invention relates to a process for the production of glutamine, which comprises
[3240] (a) increasing or generating one or more activities selected from the group consisting of elongation factor Tu in a non-human organism or a part thereof, preferably a microorganism, a plant cell, a plant or a part thereof, as compared to a corresponding non-transformed wild type non-human organism or a part thereof; and
[3241] (b) growing the non-human organism or a part thereof under conditions which permit the production of glutamine or a composition comprising glutamine in said non-human organism or in the culture medium surrounding said non-human organism.

[3242] Accordingly, the present invention relates to a process for the production of glutamine, which comprises
[3243] (a) increasing or generating one or more activities selected from the group consisting of ABC transporter permease protein in a non-human organism or a part thereof, preferably a microorganism, a plant cell, a plant or a part thereof, as compared to a corresponding non-transformed wild type non-human organism or a part thereof; and
[3244] (b) growing the non-human organism or a part thereof under conditions which permit the production of glutamine or a composition comprising glutamine in said non-human organism or in the culture medium surrounding said non-human organism.

[3245] Accordingly, the present invention relates to a process for the production of proline, which comprises
[3246] (a) increasing or generating one or more activities selected from the group consisting of ABC transporter permease protein in a non-human organism or a part thereof, preferably a microorganism, a plant cell, a plant or a part thereof, as compared to a corresponding non-transformed wild type non-human organism or a part thereof; and
[3247] (b) growing the non-human organism or a part thereof under conditions which permit the production of proline or a composition comprising proline in said non-human organism or in the culture medium surrounding said non-human organism.

[3248] Accordingly, the present invention relates to a process for the production of arginine, which comprises
[3249] (a) increasing or generating one or more activities selected from the group consisting of acyl-CoA synthase in a non-human organism or a part thereof, preferably a microorganism, a plant cell, a plant or a part thereof, as compared to a corresponding non-transformed wild type non-human organism or a part thereof; and
[3250] (b) growing the non-human organism or a part thereof under conditions which permit the production of arginine or a composition comprising arginine in said non-human organism or in the culture medium surrounding said non-human organism.

[3251] Accordingly, the present invention relates to a process for the production of glutamate, which comprises
[3252] (a) increasing or generating one or more activities selected from the group consisting of acyl-CoA synthase in a non-human organism or a part thereof, preferably a microorganism, a plant cell, a plant or a part thereof, as compared to a corresponding non-transformed wild type non-human organism or a part thereof; and
[3253] (b) growing the non-human organism or a part thereof under conditions which permit the production of glutamate or a composition comprising glutamate in said non-human organism or in the culture medium surrounding said non-human organism.

[3254] Accordingly, the present invention relates to a process for the production of glutamine, which comprises
[3255] (a) increasing or generating one or more activities selected from the group consisting of acyl-CoA synthase in a non-human organism or a part thereof, preferably a microorganism, a plant cell, a plant or a part thereof, as compared to a corresponding non-transformed wild type non-human organism or a part thereof; and
[3256] (b) growing the non-human organism or a part thereof under conditions which permit the production of glutamine or a composition comprising glutamine in said non-human organism or in the culture medium surrounding said non-human organism.

[3257] Accordingly, the present invention relates to a process for the production of proline, which comprises
[3258] (a) increasing or generating one or more activities selected from the group consisting of acyl-CoA synthase in a non-human organism or a part thereof, preferably a microorganism, a plant cell, a plant or a part thereof, as compared to a corresponding non-transformed wild type non-human organism or a part thereof; and
[3259] (b) growing the non-human organism or a part thereof under conditions which permit the production of proline or a composition comprising proline in said non-human organism or in the culture medium surrounding said non-human organism.

[3260] Accordingly, the present invention relates to a process for the production of glutamate, which comprises
[3261] (a) increasing or generating one or more activities selected from the group consisting of 2-oxoglutarate dehydrogenase E1 subunit in a non-human organism or a part thereof, preferably a microorganism, a plant cell, a plant or a part thereof, as compared to a corresponding non-transformed wild type non-human organism or a part thereof; and
[3262] (b) growing the non-human organism or a part thereof under conditions which permit the production of glutamate or a composition comprising glutamate in said non-human organism or in the culture medium surrounding said non-human organism.

[3263] Accordingly, the present invention relates to a process for the production of arginine, which comprises
[3264] (a) increasing or generating one or more activities selected from the group consisting of enoyl-CoA hydratase in a non-human organism or a part thereof, preferably a microorganism, a plant cell, a plant or a part thereof, as compared to a corresponding non-transformed wild type non-human organism or a part thereof; and
[3265] (b) growing the non-human organism or a part thereof under conditions which permit the production of arginine or a composition comprising arginine in said non-human organism or in the culture medium surrounding said non-human organism.

[3266] Accordingly, the present invention relates to a process for the production of proline, which comprises
[3267] (a) increasing or generating one or more activities selected from the group consisting of enoyl-CoA hydratase in a non-human organism or a part thereof, preferably a microorganism, a plant cell, a plant or a part thereof, as compared to a corresponding non-transformed wild type non-human organism or a part thereof; and
[3268] (b) growing the non-human organism or a part thereof under conditions which permit the production of proline or a composition comprising proline in said non-human organism or in the culture medium surrounding said non-human organism.

[3269] Accordingly, the present invention relates to a process for the production of glutamate, which comprises
[3270] (a) increasing or generating one or more activities selected from the group consisting of transcriptional regulator in a non-human organism or a part thereof, preferably a microorganism, a plant cell, a plant or a part thereof, as compared to a corresponding non-transformed wild type non-human organism or a part thereof; and
[3271] (b) growing the non-human organism or a part thereof under conditions which permit the production of glutamate or a composition comprising glutamate in said non-human organism or in the culture medium surrounding said non-human organism.

[3272] Accordingly, the present invention relates to a process for the production of proline, which comprises
[3273] (a) increasing or generating one or more activities selected from the group consisting of transcriptional regulator in a non-human organism or a part thereof, preferably a microorganism, a plant cell, a plant or a part thereof, as compared to a corresponding non-transformed wild type non-human organism or a part thereof; and
[3274] (b) growing the non-human organism or a part thereof under conditions which permit the production of proline or a composition comprising proline in said non-human organism or in the culture medium surrounding said non-human organism.

[3275] Accordingly, the present invention relates to a process for the production of proline, which comprises
[3276] (a) increasing or generating one or more activities selected from the group consisting of acyl-transferase in a non-human organism or a part thereof, preferably a microorganism, a plant cell, a plant or a part thereof, as compared to a corresponding non-transformed wild type non-human organism or a part thereof; and
[3277] (b) growing the non-human organism or a part thereof under conditions which permit the production of proline or a composition comprising proline in said non-human organism or in the culture medium surrounding said non-human organism.

[3278] Accordingly, the present invention relates to a process for the production of glutamate, which comprises
[3279] (a) increasing or generating one or more activities selected from the group consisting of oxidoreductase in a non-human organism or a part thereof, preferably a microorganism, a plant cell, a plant or a part thereof, as compared to a corresponding non-transformed wild type non-human organism or a part thereof; and
[3280] (b) growing the non-human organism or a part thereof under conditions which permit the production of glutamate or a composition comprising glutamate in said non-human organism or in the culture medium surrounding said non-human organism.

[3281] Accordingly, the present invention relates to a process for the production of glutamine, which comprises
[3282] (a) increasing or generating one or more activities selected from the group consisting of oxidoreductase in a non-human organism or a part thereof, preferably a microorganism, a plant cell, a plant or a part thereof, as compared to a corresponding non-transformed wild type non-human organism or a part thereof; and
[3283] (b) growing the non-human organism or a part thereof under conditions which permit the production of glutamine or a composition comprising glutamine in said non-human organism or in the culture medium surrounding said non-human organism.

[3284] Accordingly, the present invention relates to a process for the production of glutamine, which comprises
[3285] (a) increasing or generating one or more activities selected from the group consisting of lysyltRNA synthetase in a non-human organism or a part thereof, preferably a microorganism, a plant cell, a plant or a part thereof, as compared to a corresponding non-transformed wild type non-human organism or a part thereof; and
[3286] (b) growing the non-human organism or a part thereof under conditions which permit the production of glutamine or a composition comprising glutamine in said non-human organism or in the culture medium surrounding said non-human organism.

[3287] Accordingly, the present invention relates to a process for the production of glutamate, which comprises
[3288] (a) increasing or generating one or more activities selected from the group consisting of 30S ribosomal protein in a non-human organism or a part thereof, preferably a microorganism, a plant cell, a plant or a part thereof, as compared to a corresponding non-transformed wild type non-human organism or a part thereof; and
[3289] (b) growing the non-human organism or a part thereof under conditions which permit the production of glutamate or a composition comprising glutamate in said non-human organism or in the culture medium surrounding said non-human organism.

[3290] Accordingly, the present invention relates to a process for the production of glutamate, which comprises
[3291] (a) increasing or generating one or more activities selected from the group consisting of CTP synthase in a non-human organism or a part thereof, preferably a microorganism, a plant cell, a plant or a part thereof, as compared to a corresponding non-transformed wild type non-human organism or a part thereof; and
[3292] (b) growing the non-human organism or a part thereof under conditions which permit the production of glutamate or a composition comprising glutamate in said non-human organism or in the culture medium surrounding said non-human organism.

[3293] Accordingly, the present invention relates to a process for the production of glutamine, which comprises
[3294] (a) increasing or generating one or more activities selected from the group consisting of CTP synthase in a non-human organism or a part thereof, preferably a microorganism, a plant cell, a plant or a part thereof, as compared to a corresponding non-transformed wild type non-human organism or a part thereof; and
[3295] (b) growing the non-human organism or a part thereof under conditions which permit the production of glutamine or a composition comprising glutamine in said non-human organism or in the culture medium surrounding said non-human organism.

[3296] Accordingly, the present invention relates to a process for the production of glutamate, which comprises
[3297] (a) increasing or generating one or more activities selected from the group consisting of glucose-1-phosphate cytidylyltransferase in a non-human organism or a part thereof, preferably a microorganism, a plant cell, a plant or a part thereof, as compared to a corresponding non-transformed wild type non-human organism or a part thereof; and
[3298] (b) growing the non-human organism or a part thereof under conditions which permit the production of glutamate or a composition comprising glutamate in said non-human organism or in the culture medium surrounding said non-human organism.

[3299] Accordingly, the present invention relates to a process for the production of glutamine, which comprises
[3300] (a) increasing or generating one or more activities selected from the group consisting of glucose-1-phosphate cytidylyltransferase in a non-human organism or a part thereof, preferably a microorganism, a plant cell, a plant or a part thereof, as compared to a corresponding non-transformed wild type non-human organism or a part thereof; and
[3301] (b) growing the non-human organism or a part thereof under conditions which permit the production of glutamine or a composition comprising glutamine in said non-human organism or in the culture medium surrounding said non-human organism.

[3302] Accordingly, the present invention relates to a process for the production of proline, which comprises
[3303] (a) increasing or generating one or more activities selected from the group consisting of glucose-1-phosphate cytidylyltransferase in a non-human organism or a part thereof, preferably a microorganism, a plant cell, a plant or a part thereof, as compared to a corresponding non-transformed wild type non-human organism or a part thereof; and
[3304] (b) growing the non-human organism or a part thereof under conditions which permit the production of proline or a composition comprising proline in said non-human organism or in the culture medium surrounding said non-human organism.

[3305] Accordingly, the present invention relates to a process for the production of arginine, which comprises
[3306] (a) increasing or generating one or more activities selected from the group consisting of aminotransferase in a non-human organism or a part thereof, preferably a microorganism, a plant cell, a plant or a part thereof, as compared to a corresponding non-transformed wild type non-human organism or a part thereof; and
[3307] (b) growing the non-human organism or a part thereof under conditions which permit the production of arginine or a composition comprising arginine in said non-human organism or in the culture medium surrounding said non-human organism.

[3308] Accordingly, the present invention relates to a process for the production of proline, which comprises
[3309] (a) increasing or generating one or more activities selected from the group consisting of hydrolase in a non-human organism or a part thereof, preferably a microorganism, a plant cell, a plant or a part thereof, as compared to a corresponding non-transformed wild type non-human organism or a part thereof; and
[3310] (b) growing the non-human organism or a part thereof under conditions which permit the production of proline or a composition comprising proline in said non-human organism or in the culture medium surrounding said non-human organism.

[3311] Accordingly, the present invention relates to a process for the production of arginine, which comprises
[3312] (a) increasing or generating one or more activities selected from the group consisting of glutamate-ammonia-ligase in a non-human organism or a part thereof, preferably a microorganism, a plant cell, a plant or a part thereof, as compared to a corresponding non-transformed wild type non-human organism or a part thereof; and
[3313] (b) growing the non-human organism or a part thereof under conditions which permit the production of arginine or a composition comprising arginine in said non-human organism or in the culture medium surrounding said non-human organism.

[3314] Accordingly, the present invention relates to a process for the production of glutamine, which comprises
[3315] (a) increasing or generating one or more activities selected from the group consisting of glutamate-ammonia-ligase in a non-human organism or a part thereof, preferably a microorganism, a plant cell, a plant or a part thereof, as compared to a corresponding non-transformed wild type non-human organism or a part thereof; and
[3316] (b) growing the non-human organism or a part thereof under conditions which permit the production of glutamine or a composition comprising glutamine in said non-human organism or in the culture medium surrounding said non-human organism.

[3317] Accordingly, the present invention relates to a process for the production of proline, which comprises
[3318] (a) increasing or generating one or more activities selected from the group consisting of glutamate-ammonia-ligase in a non-human organism or a part thereof, preferably a microorganism, a plant cell, a plant or a part thereof, as compared to a corresponding non-transformed wild type non-human organism or a part thereof; and
[3319] (b) growing the non-human organism or a part thereof under conditions which permit the production of proline or a composition comprising proline in said non-human organism or in the culture medium surrounding said non-human organism.

[3320] Accordingly, the present invention relates to a process for the production of proline, which comprises
[3321] (a) increasing or generating one or more activities selected from the group consisting of fumarylacetoacetate hydrolase in a non-human organism or a part thereof, preferably a microorganism, a plant cell, a plant or a part thereof, as compared to a corresponding non-transformed wild type non-human organism or a part thereof; and
[3322] (b) growing the non-human organism or a part thereof under conditions which permit the production of proline or a composition comprising proline in said non-human organism or in the culture medium surrounding said non-human organism.

[3323] Accordingly, the present invention relates to a process for the production of arginine, which comprises
[3324] (a) increasing or generating one or more activities selected from the group consisting of HesB/YadR/YfhF family protein in a non-human organism or a part thereof, preferably a microorganism, a plant cell, a plant or a part thereof, as compared to a corresponding non-transformed wild type non-human organism or a part thereof; and
[3325] (b) growing the non-human organism or a part thereof under conditions which permit the production of arginine or a composition comprising arginine in said non-human organism or in the culture medium surrounding said non-human organism.

[3326] Accordingly, the present invention relates to a process for the production of glutamine, which comprises
[3327] (a) increasing or generating one or more activities selected from the group consisting of

[3328] HesB/YadR/YfhF family protein in a non-human organism or a part thereof, preferably a microorganism, a plant cell, a plant or a part thereof, as compared to a corresponding non-transformed wild type non-human organism or a part thereof; and
[3329] (b) growing the non-human organism or a part thereof under conditions which permit the production of glutamine or a composition comprising glutamine in said non-human organism or in the culture medium surrounding said non-human organism.

[3330] Accordingly, the present invention relates to a process for the production of proline, which comprises
[3331] (a) increasing or generating one or more activities selected from the group consisting of HesB/YadR/YfhF family protein in a non-human organism or a part thereof, preferably a microorganism, a plant cell, a plant or a part thereof, as compared to a corresponding non-transformed wild type non-human organism or a part thereof; and
[3332] (b) growing the non-human organism or a part thereof under conditions which permit the production of proline or a composition comprising proline in said non-human organism or in the culture medium surrounding said non-human organism.

[3333] Accordingly, the present invention relates to a process for the production of proline, which comprises
[3334] (a) increasing or generating one or more activities selected from the group consisting of L-aspartate oxidase in a non-human organism or a part thereof, preferably a microorganism, a plant cell, a plant or a part thereof, as compared to a corresponding non-transformed wild type non-human organism or a part thereof; and
[3335] (b) growing the non-human organism or a part thereof under conditions which permit the production of proline or a composition comprising proline in said non-human organism or in the culture medium surrounding said non-human organism.

[3336] Accordingly, the present invention relates to a process for the production of arginine, which comprises
[3337] (a) increasing or generating one or more activities selected from the group consisting of oxidoreductase in a non-human organism or a part thereof, preferably a microorganism, a plant cell, a plant or a part thereof, as compared to a corresponding non-transformed wild type non-human organism or a part thereof; and
[3338] (b) growing the non-human organism or a part thereof under conditions which permit the production of arginine or a composition comprising arginine in said non-human organism or in the culture medium surrounding said non-human organism.

[3339] Accordingly, the present invention relates to a process for the production of glutamine, which comprises
[3340] (a) increasing or generating one or more activities selected from the group consisting of oxidoreductase in a non-human organism or a part thereof, preferably a microorganism, a plant cell, a plant or a part thereof, as compared to a corresponding non-transformed wild type non-human organism or a part thereof; and
[3341] (b) growing the non-human organism or a part thereof under conditions which permit the production of glutamine or a composition comprising glutamine in said non-human organism or in the culture medium surrounding said non-human organism.

[3342] Accordingly, the present invention relates to a process for the production of proline, which comprises
[3343] (a) increasing or generating one or more activities selected from the group consisting of Chaperone protein CIpB in a non-human organism or a part thereof, preferably a microorganism, a plant cell, a plant or a part thereof, as compared to a corresponding non-transformed wild type non-human organism or a part thereof; and
[3344] (b) growing the non-human organism or a part thereof under conditions which permit the production of proline or a composition comprising proline in said non-human organism or in the culture medium surrounding said non-human organism.

[3345] Accordingly, the present invention relates to a process for the production of arginine, which comprises
[3346] (a) increasing or generating one or more activities selected from the group consisting of purine nucleoside phosphorylase in a non-human organism or a part thereof, preferably a microorganism, a plant cell, a plant or a part thereof, as compared to a corresponding non-transformed wild type non-human organism or a part thereof; and
[3347] (b) growing the non-human organism or a part thereof under conditions which permit the production of arginine or a composition comprising arginine in said non-human organism or in the culture medium surrounding said non-human organism.

[3348] Accordingly, the present invention relates to a process for the production of glutamine, which comprises
[3349] (a) increasing or generating one or more activities selected from the group consisting of purine nucleoside phosphorylase in a non-human organism or a part thereof, preferably a microorganism, a plant cell, a plant or a part thereof, as compared to a corresponding non-transformed wild type non-human organism or a part thereof; and
[3350] (b) growing the non-human organism or a part thereof under conditions which permit the production of glutamine or a composition comprising glutamine in said non-human organism or in the culture medium surrounding said non-human organism.

[3351] Accordingly, the present invention relates to a process for the production of proline, which comprises
[3352] (a) increasing or generating one or more activities selected from the group consisting of purine nucleoside phosphorylase in a non-human organism or a part thereof, preferably a microorganism, a plant cell, a plant or a part thereof, as compared to a corresponding non-transformed wild type non-human organism or a part thereof; and
[3353] (b) growing the non-human organism or a part thereof under conditions which permit the production of proline or a composition comprising proline in said non-human organism or in the culture medium surrounding said non-human organism.

[3354] Accordingly, the present invention relates to a process for the production of proline, which comprises
[3355] (a) increasing or generating one or more activities selected from the group consisting of transcriptional regulator protein in a non-human organism or a part thereof, preferably a microorganism, a plant cell, a plant or a part thereof, as compared to a corresponding non-transformed wild type non-human organism or a part thereof; and
[3356] (b) growing the non-human organism or a part thereof under conditions which permit the production of proline or a composition comprising proline in said non-human organism or in the culture medium surrounding said non-human organism.

[3357] Accordingly, the present invention relates to a process for the production of glutamate, which comprises
[3358] (a) increasing or generating one or more activities selected from the group consisting of AX653549-protein in a non-human organism or a part thereof, preferably a microorganism, a plant cell, a plant or a part thereof, as compared to a corresponding non-transformed wild type non-human organism or a part thereof; and
[3359] (b) growing the non-human organism or a part thereof under conditions which permit the production of glutamate or a composition comprising glutamate in said non-human organism or in the culture medium surrounding said non-human organism.

[3360] Accordingly, the present invention relates to a process for the production of glutamine, which comprises
[3361] (a) increasing or generating one or more activities selected from the group consisting of AX653549-protein in a non-human organism or a part thereof, preferably a microorganism, a plant cell, a plant or a part thereof, as compared to a corresponding non-transformed wild type non-human organism or a part thereof; and
[3362] (b) growing the non-human organism or a part thereof under conditions which permit the production of glutamine or a composition comprising glutamine in said non-human organism or in the culture medium surrounding said non-human organism.

[3363] Accordingly, the present invention relates to a process for the production of glutamine, which comprises
[3364] (a) increasing or generating one or more activities selected from the group consisting of AY087308-protein in a non-human organism or a part thereof, preferably a microorganism, a plant cell, a plant or a part thereof, as compared to a corresponding non-transformed wild type non-human organism or a part thereof; and
[3365] (b) growing the non-human organism or a part thereof under conditions which permit the production of glutamine or a composition comprising glutamine in said non-human organism or in the culture medium surrounding said non-human organism.

[3366] Accordingly, the present invention relates to a process for the production of arginine, which comprises
[3367] (a) increasing or generating one or more activities selected from the group consisting of threonine synthase in a non-human organism or a part thereof, preferably a microorganism, a plant cell, a plant or a part thereof, as compared to a corresponding non-transformed wild type non-human organism or a part thereof; and
[3368] (b) growing the non-human organism or a part thereof under conditions which permit the production of arginine or a composition comprising arginine in said non-human organism or in the culture medium surrounding said non-human organism.

[3369] Accordingly, the present invention relates to a process for the production of glutamine, which comprises
[3370] (a) increasing or generating one or more activities selected from the group consisting of threonine synthase in a non-human organism or a part thereof, preferably a microorganism, a plant cell, a plant or a part thereof, as compared to a corresponding non-transformed wild type non-human organism or a part thereof; and
[3371] (b) growing the non-human organism or a part thereof under conditions which permit the production of glutamine or a composition comprising glutamine in said non-human organism or in the culture medium surrounding said non-human organism.

[3372] Accordingly, the present invention relates to a process for the production of proline, which comprises
[3373] (a) increasing or generating one or more activities selected from the group consisting of threonine synthase in a non-human organism or a part thereof, preferably a microorganism, a plant cell, a plant or a part thereof, as compared to a corresponding non-transformed wild type non-human organism or a part thereof; and
[3374] (b) growing the non-human organism or a part thereof under conditions which permit the production of proline or a composition comprising proline in said non-human organism or in the culture medium surrounding said non-human organism.

[3375] Accordingly, the present invention relates to a process for the production of proline, which comprises
[3376] (a) increasing or generating one or more activities selected from the group consisting of L-ribulose-5-phosphate 4-epimerase in a non-human organism or a part thereof, preferably a microorganism, a plant cell, a plant or a part thereof, as compared to a corresponding non-transformed wild type non-human organism or a part thereof; and
[3377] (b) growing the non-human organism or a part thereof under conditions which permit the production of proline or a composition comprising proline in said non-human organism or in the culture medium surrounding said non-human organism.

[3378] Accordingly, the present invention relates to a process for the production of glutamine, which comprises
[3379] (a) increasing or generating one or more activities selected from the group consisting of dihydrolipoamide acetyltransferase in a non-human organism or a part thereof, preferably a microorganism, a plant cell, a plant or a part thereof, as compared to a corresponding non-transformed wild type non-human organism or a part thereof; and
[3380] (b) growing the non-human organism or a part thereof under conditions which permit the production of glutamine or a composition comprising glutamine in said non-human organism or in the culture medium surrounding said non-human organism.

[3381] Accordingly, the present invention relates to a process for the production of arginine, which comprises
[3382] (a) increasing or generating one or more activities selected from the group consisting of glucose dehydrogenase in a non-human organism or a part thereof, preferably a microorganism, a plant cell, a plant or a part thereof, as compared to a corresponding non-transformed wild type non-human organism or a part thereof; and
[3383] (b) growing the non-human organism or a part thereof under conditions which permit the production of arginine or a composition comprising arginine in said non-human organism or in the culture medium surrounding said non-human organism.

[3384] Accordingly, the present invention relates to a process for the production of proline, which comprises
[3385] (a) increasing or generating one or more activities selected from the group consisting of glucose dehydrogenase in a non-human organism or a part thereof, preferably a microorganism, a plant cell, a plant or a part thereof, as compared to a corresponding non-transformed wild type non-human organism or a part thereof; and
[3386] (b) growing the non-human organism or a part thereof under conditions which permit the production of proline or a composition comprising proline in said non-human organism or in the culture medium surrounding said non-human organism.

[3387] Accordingly, the present invention relates to a process for the production of proline, which comprises
[3388] (a) increasing or generating one or more activities selected from the group consisting of glucose dehydrogenase in a non-human organism or a part thereof, preferably a microorganism, a plant cell, a plant or a part thereof, as compared to a corresponding non-transformed wild type non-human organism or a part thereof; and
[3389] (b) growing the non-human organism or a part thereof under conditions which permit the production of proline or a composition comprising proline in said non-human organism or in the culture medium surrounding said non-human organism.

[3390] Accordingly, the present invention relates to a process for the production of proline, which comprises
[3391] (a) increasing or generating one or more activities selected from the group consisting of serine protease in a non-human organism or a part thereof, preferably a microorganism, a plant cell, a plant or a part thereof, as compared to a corresponding non-transformed wild type non-human organism or a part thereof; and
[3392] (b) growing the non-human organism or a part thereof under conditions which permit the production of proline or a composition comprising proline in said non-human organism or in the culture medium surrounding said non-human organism.

[3393] Accordingly, the present invention relates to a process for the production of arginine, which comprises
[3394] (a) increasing or generating one or more activities selected from the group consisting of acyl-CoA dehydrogenase in a non-human organism or a part thereof, preferably a microorganism, a plant cell, a plant or a part thereof, as compared to a corresponding non-transformed wild type non-human organism or a part thereof; and
[3395] (b) growing the non-human organism or a part thereof under conditions which permit the production of arginine or a composition comprising arginine in said non-human organism or in the culture medium surrounding said non-human organism.

[3396] Accordingly, the present invention relates to a process for the production of glutamate, which comprises
[3397] (a) increasing or generating one or more activities selected from the group consisting of acyl-CoA dehydrogenase in a non-human organism or a part thereof, preferably a microorganism, a plant cell, a plant or a part thereof, as compared to a corresponding non-transformed wild type non-human organism or a part thereof; and
[3398] (b) growing the non-human organism or a part thereof under conditions which permit the production of glutamate or a composition comprising glutamate in said non-human organism or in the culture medium surrounding said non-human organism.

[3399] Accordingly, the present invention relates to a process for the production of proline, which comprises
[3400] (a) increasing or generating one or more activities selected from the group consisting of beta-galactosidase in a non-human organism or a part thereof, preferably a microorganism, a plant cell, a plant or a part thereof, as compared to a corresponding non-transformed wild type non-human organism or a part thereof; and
[3401] (b) growing the non-human organism or a part thereof under conditions which permit the production of proline or a composition comprising proline in said non-human organism or in the culture medium surrounding said non-human organism.

[3402] Accordingly, the present invention relates to a process for the production of glutamine, which comprises
[3403] (a) increasing or generating one or more activities selected from the group consisting of ATP-binding component of a transport system in a non-human organism or a part thereof, preferably a microorganism, a plant cell, a plant or a part thereof, as compared to a corresponding non-transformed wild type non-human organism or a part thereof; and
[3404] (b) growing the non-human organism or a part thereof under conditions which permit the production of glutamine or a composition comprising glutamine in said non-human organism or in the culture medium surrounding said non-human organism.

[3405] Accordingly, the present invention relates to a process for the production of proline, which comprises
[3406] (a) increasing or generating one or more activities selected from the group consisting of b0456-protein in a non-human organism or a part thereof, preferably a microorganism, a plant cell, a plant or a part thereof, as compared to a corresponding non-transformed wild type non-human organism or a part thereof; and
[3407] (b) growing the non-human organism or a part thereof under conditions which permit the production of proline or a composition comprising proline in said non-human organism or in the culture medium surrounding said non-human organism.

[3408] Accordingly, the present invention relates to a process for the production of arginine, which comprises
[3409] (a) increasing or generating one or more activities selected from the group consisting of membrane transport protein in a non-human organism or a part thereof, preferably a microorganism, a plant cell, a plant or a part thereof, as compared to a corresponding non-transformed wild type non-human organism or a part thereof; and
[3410] (b) growing the non-human organism or a part thereof under conditions which permit the production of arginine or a composition comprising arginine in said non-human organism or in the culture medium surrounding said non-human organism.

[3411] Accordingly, the present invention relates to a process for the production of glutamate, which comprises
[3412] (a) increasing or generating one or more activities selected from the group consisting of membrane transport protein in a non-human organism or a part thereof, preferably a microorganism, a plant cell, a plant or a part thereof, as compared to a corresponding non-transformed wild type non-human organism or a part thereof; and
[3413] (b) growing the non-human organism or a part thereof under conditions which permit the production of glutamate or a composition comprising glutamate in said non-human organism or in the culture medium surrounding said non-human organism.

[3414] Accordingly, the present invention relates to a process for the production of glutamine, which comprises
[3415] (a) increasing or generating one or more activities selected from the group consisting of b0518-protein in a non-human organism or a part thereof, preferably a microorganism, a plant cell, a plant or a part thereof, as compared to a corresponding non-transformed wild type non-human organism or a part thereof; and
[3416] (b) growing the non-human organism or a part thereof under conditions which permit the production of glutamine or a composition comprising glutamine in said non-human organism or in the culture medium surrounding said non-human organism.

[3417] Accordingly, the present invention relates to a process for the production of arginine, which comprises
[3418] (a) increasing or generating one or more activities selected from the group consisting of isochorismate synthase in a non-human organism or a part thereof, preferably a microorganism, a plant cell, a plant or a part thereof, as compared to a corresponding non-transformed wild type non-human organism or a part thereof; and
[3419] (b) growing the non-human organism or a part thereof under conditions which permit the production of arginine or a composition comprising arginine in said non-human organism or in the culture medium surrounding said non-human organism.

[3420] Accordingly, the present invention relates to a process for the production of glutamate, which comprises
[3421] (a) increasing or generating one or more activities selected from the group consisting of isochorismate synthase in a non-human organism or a part thereof, preferably a microorganism, a plant cell, a plant or a part thereof, as compared to a corresponding non-transformed wild type non-human organism or a part thereof; and
[3422] (b) growing the non-human organism or a part thereof under conditions which permit the production of glutamate or a composition comprising glutamate in said non-human organism or in the culture medium surrounding said non-human organism.

[3423] Accordingly, the present invention relates to a process for the production of glutamine, which comprises
[3424] (a) increasing or generating one or more activities selected from the group consisting of isochorismate synthase in a non-human organism or a part thereof, preferably a microorganism, a plant cell, a plant or a part thereof, as compared to a corresponding non-transformed wild type non-human organism or a part thereof; and
[3425] (b) growing the non-human organism or a part thereof under conditions which permit the production of glutamine or a composition comprising glutamine in said non-human organism or in the culture medium surrounding said non-human organism.

[3426] Accordingly, the present invention relates to a process for the production of proline, which comprises
[3427] (a) increasing or generating one or more activities selected from the group consisting of isochorismate synthase in a non-human organism or a part thereof, preferably a microorganism, a plant cell, a plant or a part thereof, as compared to a corresponding non-transformed wild type non-human organism or a part thereof; and
[3428] (b) growing the non-human organism or a part thereof under conditions which permit the production of proline or a composition comprising proline in said non-human organism or in the culture medium surrounding said non-human organism.

[3429] Accordingly, the present invention relates to a process for the production of glutamine, which comprises
[3430] (a) increasing or generating one or more activities selected from the group consisting of zinc transporter in a non-human organism or a part thereof, preferably a microorganism, a plant cell, a plant or a part thereof, as compared to a corresponding non-transformed wild type non-human organism or a part thereof; and
[3431] (b) growing the non-human organism or a part thereof under conditions which permit the production of glutamine or a composition comprising glutamine in said non-human organism or in the culture medium surrounding said non-human organism.

[3432] Accordingly, the present invention relates to a process for the production of glutamine, which comprises
[3433] (a) increasing or generating one or more activities selected from the group consisting of asparaginase in a non-human organism or a part thereof, preferably a microorganism, a plant cell, a plant or a part thereof, as compared to a corresponding non-transformed wild type non-human organism or a part thereof; and
[3434] (b) growing the non-human organism or a part thereof under conditions which permit the production of glutamine or a composition comprising glutamine in said non-human organism or in the culture medium surrounding said non-human organism.

[3435] Accordingly, the present invention relates to a process for the production of glutamine, which comprises
[3436] (a) increasing or generating one or more activities selected from the group consisting of Leucyl/phenylalanyl-tRNA-protein transferase in a non-human organism or a part thereof, preferably a microorganism, a plant cell, a plant or a part thereof, as compared to a corresponding non-transformed wild type non-human organism or a part thereof; and
[3437] (b) growing the non-human organism or a part thereof under conditions which permit the production of glutamine or a composition comprising glutamine in said non-human organism or in the culture medium surrounding said non-human organism.

[3438] Accordingly, the present invention relates to a process for the production of proline, which comprises
[3439] (a) increasing or generating one or more activities selected from the group consisting of Leucyl/phenylalanyl-tRNA-protein transferase in a non-human organism or a part thereof, preferably a microorganism, a plant cell, a plant or a part thereof, as compared to a corresponding non-transformed wild type non-human organism or a part thereof; and
[3440] (b) growing the non-human organism or a part thereof under conditions which permit the production of proline or a composition comprising proline in said non-human organism or in the culture medium surrounding said non-human organism.

[3441] Accordingly, the present invention relates to a process for the production of glutamate, which comprises
[3442] (a) increasing or generating one or more activities selected from the group consisting of major facilitator superfamily transporter protein in a non-human organism or a part thereof, preferably a microorganism, a plant cell, a plant or a part thereof, as compared to a corresponding non-transformed wild type non-human organism or a part thereof; and
[3443] (b) growing the non-human organism or a part thereof under conditions which permit the production of glutamate or a composition comprising glutamate in said non-human organism or in the culture medium surrounding said non-human organism.

[3444] Accordingly, the present invention relates to a process for the production of proline, which comprises
[3445] (a) increasing or generating one or more activities selected from the group consisting of major facilitator superfamily transporter protein in a non-human organism or a part thereof, preferably a microorganism, a plant cell, a plant or a part thereof, as compared to a corresponding non-transformed wild type non-human organism or a part thereof; and
[3446] (b) growing the non-human organism or a part thereof under conditions which permit the production of proline or a composition comprising proline in said non-human organism or in the culture medium surrounding said non-human organism.

[3447] Accordingly, the present invention relates to a process for the production of proline, which comprises
[3448] (a) increasing or generating one or more activities selected from the group consisting of DNA helicase IV in a non-human organism or a part thereof, preferably a microorganism, a plant cell, a plant or a part thereof, as compared to a corresponding non-transformed wild type non-human organism or a part thereof; and
[3449] (b) growing the non-human organism or a part thereof under conditions which permit the production of proline or a composition comprising proline in said non-human organism or in the culture medium surrounding said non-human organism.

[3450] Accordingly, the present invention relates to a process for the production of proline, which comprises
[3451] (a) increasing or generating one or more activities selected from the group consisting of methylglyoxal synthase in a non-human organism or a part thereof, preferably a microorganism, a plant cell, a plant or a part thereof, as compared to a corresponding non-transformed wild type non-human organism or a part thereof; and
[3452] (b) growing the non-human organism or a part thereof under conditions which permit the production of proline or a composition comprising proline in said non-human organism or in the culture medium surrounding said non-human organism.

[3453] Accordingly, the present invention relates to a process for the production of proline, which comprises
[3454] (a) increasing or generating one or more activities selected from the group consisting of phosphoanhydride phosphorylase in a non-human organism or a part thereof, preferably a microorganism, a plant cell, a plant or a part thereof, as compared to a corresponding non-transformed wild type non-human organism or a part thereof; and
[3455] (b) growing the non-human organism or a part thereof under conditions which permit the production of proline or a composition comprising proline in said non-human organism or in the culture medium surrounding said non-human organism.

[3456] Accordingly, the present invention relates to a process for the production of glutamine, which comprises
[3457] (a) increasing or generating one or more activities selected from the group consisting of b1003-protein in a non-human organism or a part thereof, preferably a microorganism, a plant cell, a plant or a part thereof, as compared to a corresponding non-transformed wild type non-human organism or a part thereof; and
[3458] (b) growing the non-human organism or a part thereof under conditions which permit the production of glutamine or a composition comprising glutamine in said non-human organism or in the culture medium surrounding said non-human organism.

[3459] Accordingly, the present invention relates to a process for the production of proline, which comprises
[3460] (a) increasing or generating one or more activities selected from the group consisting of b1003-protein in a non-human organism or a part thereof, preferably a microorganism, a plant cell, a plant or a part thereof, as compared to a corresponding non-transformed wild type non-human organism or a part thereof; and
[3461] (b) growing the non-human organism or a part thereof under conditions which permit the production of proline or a composition comprising proline in said non-human organism or in the culture medium surrounding said non-human organism.

[3462] Accordingly, the present invention relates to a process for the production of arginine, which comprises
[3463] (a) increasing or generating one or more activities selected from the group consisting of lipoprotein precursor in a non-human organism or a part thereof, preferably a microorganism, a plant cell, a plant or a part thereof, as compared to a corresponding non-transformed wild type non-human organism or a part thereof; and
[3464] (b) growing the non-human organism or a part thereof under conditions which permit the production of arginine or a composition comprising arginine in said non-human organism or in the culture medium surrounding said non-human organism.

[3465] Accordingly, the present invention relates to a process for the production of glutamate, which comprises
[3466] (a) increasing or generating one or more activities selected from the group consisting of b1024-protein in a non-human organism or a part thereof, preferably a microorganism, a plant cell, a plant or a part thereof, as compared to a corresponding non-transformed wild type non-human organism or a part thereof; and
[3467] (b) growing the non-human organism or a part thereof under conditions which permit the production of glutamate or a composition comprising glutamate in said non-human organism or in the culture medium surrounding said non-human organism.

[3468] Accordingly, the present invention relates to a process for the production of glutamine, which comprises
[3469] (a) increasing or generating one or more activities selected from the group consisting of b1108-protein in a non-human organism or a part thereof, preferably a microorganism, a plant cell, a plant or a part thereof, as compared to a corresponding non-transformed wild type non-human organism or a part thereof; and
[3470] (b) growing the non-human organism or a part thereof under conditions which permit the production of glutamine or a composition comprising glutamine in said non-human organism or in the culture medium surrounding said non-human organism.

[3471] Accordingly, the present invention relates to a process for the production of proline, which comprises
[3472] (a) increasing or generating one or more activities selected from the group consisting of b1108-protein in a non-human organism or a part thereof, preferably a microorganism, a plant cell, a plant or a part thereof, as compared to a corresponding non-transformed wild type non-human organism or a part thereof; and
[3473] (b) growing the non-human organism or a part thereof under conditions which permit the production of proline or a composition comprising proline in said non-human organism or in the culture medium surrounding said non-human organism.

[3474] Accordingly, the present invention relates to a process for the production of proline, which comprises
[3475] (a) increasing or generating one or more activities selected from the group consisting of isocitrate dehydrogenase in a non-human organism or a part thereof, preferably a microorganism, a plant cell, a plant or a part thereof, as compared to a corresponding non-transformed wild type non-human organism or a part thereof; and
[3476] (b) growing the non-human organism or a part thereof under conditions which permit the production of proline or a composition comprising proline in said non-human organism or in the culture medium surrounding said non-human organism.

[3477] Accordingly, the present invention relates to a process for the production of arginine, which comprises
[3478] (a) increasing or generating one or more activities selected from the group consisting of b1137-protein in a non-human organism or a part thereof, preferably a microorganism, a plant cell, a plant or a part thereof, as compared to a corresponding non-transformed wild type non-human organism or a part thereof; and
[3479] (b) growing the non-human organism or a part thereof under conditions which permit the production of arginine or a composition comprising arginine in said non-human organism or in the culture medium surrounding said non-human organism.

[3480] Accordingly, the present invention relates to a process for the production of glutamate, which comprises
[3481] (a) increasing or generating one or more activities selected from the group consisting of b1137-protein in a non-human organism or a part thereof, preferably a microorganism, a plant cell, a plant or a part thereof, as compared to a corresponding non-transformed wild type non-human organism or a part thereof; and
[3482] (b) growing the non-human organism or a part thereof under conditions which permit the production of glutamate or a composition comprising glutamate in said non-human organism or in the culture medium surrounding said non-human organism.

[3483] Accordingly, the present invention relates to a process for the production of proline, which comprises
[3484] (a) increasing or generating one or more activities selected from the group consisting of b1137-protein in a non-human organism or a part thereof, preferably a microorganism, a plant cell, a plant or a part thereof, as compared to a corresponding non-transformed wild type non-human organism or a part thereof; and
[3485] (b) growing the non-human organism or a part thereof under conditions which permit the production of proline or a composition comprising proline in said non-human organism or in the culture medium surrounding said non-human organism.

[3486] Accordingly, the present invention relates to a process for the production of glutamine, which comprises
[3487] (a) increasing or generating one or more activities selected from the group consisting of b1163-protein in a non-human organism or a part thereof, preferably a microorganism, a plant cell, a plant or a part thereof, as compared to a corresponding non-transformed wild type non-human organism or a part thereof; and
[3488] (b) growing the non-human organism or a part thereof under conditions which permit the production of glutamine or a composition comprising glutamine in said non-human organism or in the culture medium surrounding said non-human organism.

[3489] Accordingly, the present invention relates to a process for the production of proline, which comprises
[3490] (a) increasing or generating one or more activities selected from the group consisting of sodium/proton antiporter in a non-human organism or a part thereof, preferably a microorganism, a plant cell, a plant or a part thereof, as compared to a corresponding non-transformed wild type non-human organism or a part thereof; and
[3491] (b) growing the non-human organism or a part thereof under conditions which permit the production of proline or a composition comprising proline in said non-human organism or in the culture medium surrounding said non-human organism.

[3492] Accordingly, the present invention relates to a process for the production of glutamine, which comprises
[3493] (a) increasing or generating one or more activities selected from the group consisting of membrane protein in a non-human organism or a part thereof, preferably a microorganism, a plant cell, a plant or a part thereof, as compared to a corresponding non-transformed wild type non-human organism or a part thereof; and
[3494] (b) growing the non-human organism or a part thereof under conditions which permit the production of glutamine or a composition comprising glutamine in said non-human organism or in the culture medium surrounding said non-human organism.

[3495] Accordingly, the present invention relates to a process for the production of proline, which comprises
[3496] (a) increasing or generating one or more activities selected from the group consisting of membrane protein in a non-human organism or a part thereof, preferably a microorganism, a plant cell, a plant or a part thereof, as compared to a corresponding non-transformed wild type non-human organism or a part thereof; and
[3497] (b) growing the non-human organism or a part thereof under conditions which permit the production of proline or a composition comprising proline in said non-human organism or in the culture medium surrounding said non-human organism.

[3498] Accordingly, the present invention relates to a process for the production of arginine, which comprises
[3499] (a) increasing or generating one or more activities selected from the group consisting of b1259-protein in a non-human organism or a part thereof, preferably a microorganism, a plant cell, a plant or a part thereof, as compared to a corresponding non-transformed wild type non-human organism or a part thereof; and
[3500] (b) growing the non-human organism or a part thereof under conditions which permit the production of arginine or a composition comprising arginine in said non-human organism or in the culture medium surrounding said non-human organism.

[3501] Accordingly, the present invention relates to a process for the production of glutamine, which comprises
[3502] (a) increasing or generating one or more activities selected from the group consisting of b1259-protein in a non-human organism or a part thereof, preferably a microorganism, a plant cell, a plant or a part thereof, as compared to a corresponding non-transformed wild type non-human organism or a part thereof; and
[3503] (b) growing the non-human organism or a part thereof under conditions which permit the production of glutamine or a composition comprising glutamine in said non-human organism or in the culture medium surrounding said non-human organism.

[3504] Accordingly, the present invention relates to a process for the production of glutamine, which comprises
[3505] (a) increasing or generating one or more activities selected from the group consisting of anthranilate synthase component II in a non-human organism or a part thereof, preferably a microorganism, a plant cell, a plant or a part thereof, as compared to a corresponding non-transformed wild type non-human organism or a part thereof; and
[3506] (b) growing the non-human organism or a part thereof under conditions which permit the production of glutamine or a composition comprising glutamine in said non-human organism or in the culture medium surrounding said non-human organism.

[3507] Accordingly, the present invention relates to a process for the production of glutamine, which comprises
[3508] (a) increasing or generating one or more activities selected from the group consisting of b1280-protein in a non-human organism or a part thereof, preferably a microorganism, a plant cell, a plant or a part thereof, as compared to a corresponding non-transformed wild type non-human organism or a part thereof; and
[3509] (b) growing the non-human organism or a part thereof under conditions which permit the production of glutamine or a composition comprising glutamine in said non-human organism or in the culture medium surrounding said non-human organism.

[3510] Accordingly, the present invention relates to a process for the production of glutamine, which comprises
[3511] (a) increasing or generating one or more activities selected from the group consisting of glutamine synthetase in a non-human organism or a part thereof, preferably a microorganism, a plant cell, a plant or a part thereof, as compared to a corresponding non-transformed wild type non-human organism or a part thereof; and
[3512] (b) growing the non-human organism or a part thereof under conditions which permit the production of glutamine or a composition comprising glutamine in said non-human organism or in the culture medium surrounding said non-human organism.

[3513] Accordingly, the present invention relates to a process for the production of glutamate, which comprises
[3514] (a) increasing or generating one or more activities selected from the group consisting of aldehyde dehydrogenase in a non-human organism or a part thereof, preferably a microorganism, a plant cell, a plant or a part thereof, as compared to a corresponding non-transformed wild type non-human organism or a part thereof; and
[3515] (b) growing the non-human organism or a part thereof under conditions which permit the production of glutamate or a composition comprising glutamate in said non-human organism or in the culture medium surrounding said non-human organism.

[3516] Accordingly, the present invention relates to a process for the production of glutamate, which comprises
[3517] (a) increasing or generating one or more activities selected from the group consisting of b1330-protein in a non-human organism or a part thereof, preferably a microorganism, a plant cell, a plant or a part thereof, as compared to a corresponding non-transformed wild type non-human organism or a part thereof; and
[3518] (b) growing the non-human organism or a part thereof under conditions which permit the production of glutamate or a composition comprising glutamate in said non-human organism or in the culture medium surrounding said non-human organism.

[3519] Accordingly, the present invention relates to a process for the production of glutamine, which comprises
[3520] (a) increasing or generating one or more activities selected from the group consisting of b1330-protein in a non-human organism or a part thereof, preferably a microorganism, a plant cell, a plant or a part thereof, as compared to a corresponding non-transformed wild type non-human organism or a part thereof; and
[3521] (b) growing the non-human organism or a part thereof under conditions which permit the production of glutamine or a composition comprising glutamine in said non-human organism or in the culture medium surrounding said non-human organism.

[3522] Accordingly, the present invention relates to a process for the production of glutamate, which comprises
[3523] (a) increasing or generating one or more activities selected from the group consisting of lipoprotein precursor in a non-human organism or a part thereof, preferably a microorganism, a plant cell, a plant or a part thereof, as compared to a corresponding non-transformed wild type non-human organism or a part thereof; and
[3524] (b) growing the non-human organism or a part thereof under conditions which permit the production of glutamate or a composition comprising glutamate in said non-human organism or in the culture medium surrounding said non-human organism.

[3525] Accordingly, the present invention relates to a process for the production of glutamine, which comprises
[3526] (a) increasing or generating one or more activities selected from the group consisting of lipoprotein precursor in a non-human organism or a part thereof, preferably a microorganism, a plant cell, a plant or a part thereof, as compared to a corresponding non-transformed wild type non-human organism or a part thereof; and
[3527] (b) growing the non-human organism or a part thereof under conditions which permit the production of glutamine or a composition comprising glutamine in said non-human organism or in the culture medium surrounding said non-human organism.

[3528] Accordingly, the present invention relates to a process for the production of glutamate, which comprises
[3529] (a) increasing or generating one or more activities selected from the group consisting of b1445-protein in a non-human organism or a part thereof, preferably a microorganism, a plant cell, a plant or a part thereof, as compared to a corresponding non-transformed wild type non-human organism or a part thereof; and
[3530] (b) growing the non-human organism or a part thereof under conditions which permit the production of glutamate or a composition comprising glutamate in said non-human organism or in the culture medium surrounding said non-human organism.

[3531] Accordingly, the present invention relates to a process for the production of glutamine, which comprises
[3532] (a) increasing or generating one or more activities selected from the group consisting of b1445-protein in a non-human organism or a part thereof, preferably a microorganism, a plant cell, a plant or a part thereof, as compared to a corresponding non-transformed wild type non-human organism or a part thereof; and
[3533] (b) growing the non-human organism or a part thereof under conditions which permit the production of glutamine or a composition comprising glutamine in said non-human organism or in the culture medium surrounding said non-human organism.

[3534] Accordingly, the present invention relates to a process for the production of glutamate, which comprises
[3535] (a) increasing or generating one or more activities selected from the group consisting of b1522-protein in a non-human organism or a part thereof, preferably a microorganism, a plant cell, a plant or a part thereof, as compared to a corresponding non-transformed wild type non-human organism or a part thereof; and
[3536] (b) growing the non-human organism or a part thereof under conditions which permit the production of glutamate or a composition comprising glutamate in said non-human organism or in the culture medium surrounding said non-human organism.

[3537] Accordingly, the present invention relates to a process for the production of glutamine, which comprises
[3538] (a) increasing or generating one or more activities selected from the group consisting of acid shock protein in a non-human organism or a part thereof, preferably a microorganism, a plant cell, a plant or a part thereof, as compared to a corresponding non-transformed wild type non-human organism or a part thereof; and
[3539] (b) growing the non-human organism or a part thereof under conditions which permit the production of glutamine or a composition comprising glutamine in said non-human organism or in the culture medium surrounding said non-human organism.

[3540] Accordingly, the present invention relates to a process for the production of glutamine, which comprises
[3541] (a) increasing or generating one or more activities selected from the group consisting of electron transport complex protein in a non-human organism or a part thereof, preferably a microorganism, a plant cell, a plant or a part thereof, as compared to a corresponding non-transformed wild type non-human organism or a part thereof; and
[3542] (b) growing the non-human organism or a part thereof under conditions which permit the production of glutamine or a composition comprising glutamine in said non-human organism or in the culture medium surrounding said non-human organism.

[3543] Accordingly, the present invention relates to a process for the production of glutamate, which comprises
[3544] (a) increasing or generating one or more activities selected from the group consisting of protease in a non-human organism or a part thereof, preferably a microorganism, a plant cell, a plant or a part thereof, as compared to a corresponding non-transformed wild type non-human organism or a part thereof; and
[3545] (b) growing the non-human organism or a part thereof under conditions which permit the production of glutamate or a composition comprising glutamate in said non-human organism or in the culture medium surrounding said non-human organism.

[3546] Accordingly, the present invention relates to a process for the production of glutamate, which comprises
[3547] (a) increasing or generating one or more activities selected from the group consisting of b1898-protein in a non-human organism or a part thereof, preferably a microorganism, a plant cell, a plant or a part thereof, as compared to a corresponding non-transformed wild type non-human organism or a part thereof; and
[3548] (b) growing the non-human organism or a part thereof under conditions which permit the production of glutamate or a composition comprising glutamate in said non-human organism or in the culture medium surrounding said non-human organism.

[3549] Accordingly, the present invention relates to a process for the production of glutamine, which comprises
[3550] (a) increasing or generating one or more activities selected from the group consisting of transport protein in a non-human organism or a part thereof, preferably a microorganism, a plant cell, a plant or a part thereof, as compared to a corresponding non-transformed wild type non-human organism or a part thereof; and
[3551] (b) growing the non-human organism or a part thereof under conditions which permit the production of glutamine or a composition comprising glutamine in said non-human organism or in the culture medium surrounding said non-human organism.

[3552] Accordingly, the present invention relates to a process for the production of glutamate, which comprises
[3553] (a) increasing or generating one or more activities selected from the group consisting of transport protein in a non-human organism or a part thereof, preferably a microorganism, a plant cell, a plant or a part thereof, as compared to a corresponding non-transformed wild type non-human organism or a part thereof; and
[3554] (b) growing the non-human organism or a part thereof under conditions which permit the production of glutamate or a composition comprising glutamate in said non-human organism or in the culture medium surrounding said non-human organism.

[3555] Accordingly, the present invention relates to a process for the production of glutamine, which comprises
[3556] (a) increasing or generating one or more activities selected from the group consisting of transport protein in a non-human organism or a part thereof, preferably a microorganism, a plant cell, a plant or a part thereof, as compared to a corresponding non-transformed wild type non-human organism or a part thereof; and
[3557] (b) growing the non-human organism or a part thereof under conditions which permit the production of glutamine or a composition comprising glutamine in said non-human organism or in the culture medium surrounding said non-human organism.

[3558] Accordingly, the present invention relates to a process for the production of proline, which comprises
[3559] (a) increasing or generating one or more activities selected from the group consisting of transport protein in a non-human organism or a part thereof, preferably a microorganism, a plant cell, a plant or a part thereof, as compared to a corresponding non-transformed wild type non-human organism or a part thereof; and
[3560] (b) growing the non-human organism or a part thereof under conditions which permit the production of proline or a composition comprising proline in said non-human organism or in the culture medium surrounding said non-human organism.

[3561] Accordingly, the present invention relates to a process for the production of glutamine, which comprises
[3562] (a) increasing or generating one or more activities selected from the group consisting of uridine/cytidine kinase in a non-human organism or a part thereof, preferably a microorganism, a plant cell, a plant or a part thereof, as compared to a corresponding non-transformed wild type non-human organism or a part thereof; and
[3563] (b) growing the non-human organism or a part thereof under conditions which permit the production of glutamine or a composition comprising glutamine in said non-human organism or in the culture medium surrounding said non-human organism.

[3564] Accordingly, the present invention relates to a process for the production of glutamate, which comprises
[3565] (a) increasing or generating one or more activities selected from the group consisting of b2107-protein in a non-human organism or a part thereof, preferably a microorganism, a plant cell, a plant or a part thereof, as compared to a corresponding non-transformed wild type non-human organism or a part thereof; and
[3566] (b) growing the non-human organism or a part thereof under conditions which permit the production of glutamate or a composition comprising glutamate in said non-human organism or in the culture medium surrounding said non-human organism.

[3567] Accordingly, the present invention relates to a process for the production of glutamine, which comprises
[3568] (a) increasing or generating one or more activities selected from the group consisting of b2121-protein in a non-human organism or a part thereof, preferably a microorganism, a plant cell, a plant or a part thereof, as compared to a corresponding non-transformed wild type non-human organism or a part thereof; and
[3569] (b) growing the non-human organism or a part thereof under conditions which permit the production of glutamine or a composition comprising glutamine in said non-human organism or in the culture medium surrounding said non-human organism.

[3570] Accordingly, the present invention relates to a process for the production of glutamate, which comprises
[3571] (a) increasing or generating one or more activities selected from the group consisting of ABC transporter permease protein in a non-human organism or a part thereof, preferably a microorganism, a plant cell, a plant or a part thereof, as compared to a corresponding non-transformed wild type non-human organism or a part thereof; and
[3572] (b) growing the non-human organism or a part thereof under conditions which permit the production of glutamate or a composition comprising glutamate in said non-human organism or in the culture medium surrounding said non-human organism.

[3573] Accordingly, the present invention relates to a process for the production of glutamine, which comprises
[3574] (a) increasing or generating one or more activities selected from the group consisting of ABC transporter permease protein in a non-human organism or a part thereof, preferably a microorganism, a plant cell, a plant or a part thereof, as compared to a corresponding non-transformed wild type non-human organism or a part thereof; and
[3575] (b) growing the non-human organism or a part thereof under conditions which permit the production of glutamine or a composition comprising glutamine in said non-human organism or in the culture medium surrounding said non-human organism.

[3576] Accordingly, the present invention relates to a process for the production of proline, which comprises
[3577] (a) increasing or generating one or more activities selected from the group consisting of ABC transporter permease protein in a non-human organism or a part thereof, preferably a microorganism, a plant cell, a plant or a part thereof, as compared to a corresponding non-transformed wild type non-human organism or a part thereof; and
[3578] (b) growing the non-human organism or a part thereof under conditions which permit the production of proline or a composition comprising proline in said non-human organism or in the culture medium surrounding said non-human organism.

[3579] Accordingly, the present invention relates to a process for the production of glutamine, which comprises
[3580] (a) increasing or generating one or more activities selected from the group consisting of NADH dehydrogenase I chain I in a non-human organism or a part thereof, preferably a microorganism, a plant cell, a plant or a part thereof, as compared to a corresponding non-transformed wild type non-human organism or a part thereof; and
[3581] (b) growing the non-human organism or a part thereof under conditions which permit the production of glutamine or a composition comprising glutamine in said non-human organism or in the culture medium surrounding said non-human organism.

[3582] Accordingly, the present invention relates to a process for the production of glutamate, which comprises
[3583] (a) increasing or generating one or more activities selected from the group consisting of b2360-protein in a non-human organism or a part thereof, preferably a microorganism, a plant cell, a plant or a part thereof, as compared to a corresponding non-transformed wild type non-human organism or a part thereof; and
[3584] (b) growing the non-human organism or a part thereof under conditions which permit the production of glutamate or a composition comprising glutamate in said non-human organism or in the culture medium surrounding said non-human organism.

[3585] Accordingly, the present invention relates to a process for the production of proline, which comprises
[3586] (a) increasing or generating one or more activities selected from the group consisting of b2399-protein in a non-human organism or a part thereof, preferably a microorganism, a plant cell, a plant or a part thereof, as compared to a corresponding non-transformed wild type non-human organism or a part thereof; and
[3587] (b) growing the non-human organism or a part thereof under conditions which permit the production of proline or a composition comprising proline in said non-human organism or in the culture medium surrounding said non-human organism.

[3588] Accordingly, the present invention relates to a process for the production of glutamate, which comprises
[3589] (a) increasing or generating one or more activities selected from the group consisting of transcriptional regulator in a non-human organism or a part thereof, preferably a microorganism, a plant cell, a plant or a part thereof, as compared to a corresponding non-transformed wild type non-human organism or a part thereof; and
[3590] (b) growing the non-human organism or a part thereof under conditions which permit the production of glutamate or a composition comprising glutamate in said non-human organism or in the culture medium surrounding said non-human organism.

[3591] Accordingly, the present invention relates to a process for the production of arginine, which comprises
[3592] (a) increasing or generating one or more activities selected from the group consisting of cysteine synthase A in a non-human organism or a part thereof, preferably a microorganism, a plant cell, a plant or a part thereof, as compared to a corresponding non-transformed wild type non-human organism or a part thereof; and
[3593] (b) growing the non-human organism or a part thereof under conditions which permit the production of arginine or a composition comprising arginine in said non-human organism or in the culture medium surrounding said non-human organism.

[3594] Accordingly, the present invention relates to a process for the production of glutamate, which comprises
[3595] (a) increasing or generating one or more activities selected from the group consisting of cysteine synthase A in a non-human organism or a part thereof, preferably a microorganism, a plant cell, a plant or a part thereof, as compared to a corresponding non-transformed wild type non-human organism or a part thereof; and
[3596] (b) growing the non-human organism or a part thereof under conditions which permit the production of glutamate or a composition comprising glutamate in said non-human organism or in the culture medium surrounding said non-human organism.

[3597] Accordingly, the present invention relates to a process for the production of proline, which comprises
[3598] (a) increasing or generating one or more activities selected from the group consisting of ethanolamine utilization protein in a non-human organism or a part thereof, preferably a microorganism, a plant cell, a plant or a part thereof, as compared to a corresponding non-transformed wild type non-human organism or a part thereof; and
[3599] (b) growing the non-human organism or a part thereof under conditions which permit the production of proline or a composition comprising proline in said non-human organism or in the culture medium surrounding said non-human organism.

[3600] Accordingly, the present invention relates to a process for the production of proline, which comprises
[3601] (a) increasing or generating one or more activities selected from the group consisting of b2474-protein in a non-human organism or a part thereof, preferably a microorganism, a plant cell, a plant or a part thereof, as compared to a corresponding non-transformed wild type non-human organism or a part thereof; and
[3602] (b) growing the non-human organism or a part thereof under conditions which permit the production of proline or a composition comprising proline in said non-human organism or in the culture medium surrounding said non-human organism.

[3603] Accordingly, the present invention relates to a process for the production of glutamate, which comprises
[3604] (a) increasing or generating one or more activities selected from the group consisting of b2513-protein in a non-human organism or a part thereof, preferably a microorganism, a plant cell, a plant or a part thereof, as compared to a corresponding non-transformed wild type non-human organism or a part thereof; and
[3605] (b) growing the non-human organism or a part thereof under conditions which permit the production of glutamate or a composition comprising glutamate in said non-human organism or in the culture medium surrounding said non-human organism.

[3606] Accordingly, the present invention relates to a process for the production of glutamine, which comprises
[3607] (a) increasing or generating one or more activities selected from the group consisting of b2513-protein in a non-human organism or a part thereof, preferably a microorganism, a plant cell, a plant or a part thereof, as compared to a corresponding non-transformed wild type non-human organism or a part thereof; and
[3608] (b) growing the non-human organism or a part thereof under conditions which permit the production of glutamine or a composition comprising glutamine in said non-human organism or in the culture medium surrounding said non-human organism.

[3609] Accordingly, the present invention relates to a process for the production of arginine, which comprises
[3610] (a) increasing or generating one or more activities selected from the group consisting of 2,3-dihydroxy-2,3-dihydrophenylpropionatedehydrogenase in a non-human organism or a part thereof, preferably a microorganism, a plant cell, a plant or a part thereof, as compared to a corresponding non-transformed wild type non-human organism or a part thereof; and
[3611] (b) growing the non-human organism or a part thereof under conditions which permit the production of arginine or a composition comprising arginine in said non-human organism or in the culture medium surrounding said non-human organism.

[3612] Accordingly, the present invention relates to a process for the production of glutamate, which comprises
[3613] (a) increasing or generating one or more activities selected from the group consisting of 2,3-dihydroxy-2,3-dihydrophenylpropionatedehydrogenase in a non-human organism or a part thereof, preferably a microorganism, a plant cell, a plant or a part thereof, as compared to a corresponding non-transformed wild type non-human organism or a part thereof; and
[3614] (b) growing the non-human organism or a part thereof under conditions which permit the production of glutamate or a composition comprising glutamate in said non-human organism or in the culture medium surrounding said non-human organism.

[3615] Accordingly, the present invention relates to a process for the production of glutamine, which comprises
[3616] (a) increasing or generating one or more activities selected from the group consisting of b2548-protein in a non-human organism or a part thereof, preferably a microorganism, a plant cell, a plant or a part thereof, as compared to a corresponding non-transformed wild type non-human organism or a part thereof; and
[3617] (b) growing the non-human organism or a part thereof under conditions which permit the production of glutamine or a composition comprising glutamine in said non-human organism or in the culture medium surrounding said non-human organism.

[3618] Accordingly, the present invention relates to a process for the production of glutamine, which comprises
[3619] (a) increasing or generating one or more activities selected from the group consisting of b2613-protein in a non-human organism or a part thereof, preferably a microorganism, a plant cell, a plant or a part thereof, as compared to a corresponding non-transformed wild type non-human organism or a part thereof; and
[3620] (b) growing the non-human organism or a part thereof under conditions which permit the production of glutamine or a composition comprising glutamine in said non-human organism or in the culture medium surrounding said non-human organism.

[3621] Accordingly, the present invention relates to a process for the production of proline, which comprises
[3622] (a) increasing or generating one or more activities selected from the group consisting of b2613-protein in a non-human organism or a part thereof, preferably a microorganism, a plant cell, a plant or a part thereof, as compared to a corresponding non-transformed wild type non-human organism or a part thereof; and
[3623] (b) growing the non-human organism or a part thereof under conditions which permit the production of proline or a composition comprising proline in said non-human organism or in the culture medium surrounding said non-human organism.

[3624] Accordingly, the present invention relates to a process for the production of glutamate, which comprises
[3625] (a) increasing or generating one or more activities selected from the group consisting of transcriptional regulator in a non-human organism or a part thereof, preferably a microorganism, a plant cell, a plant or a part thereof, as compared to a corresponding non-transformed wild type non-human organism or a part thereof; and
[3626] (b) growing the non-human organism or a part thereof under conditions which permit the production of glutamate or a composition comprising glutamate in said non-human organism or in the culture medium surrounding said non-human organism.

[3627] Accordingly, the present invention relates to a process for the production of glutamine, which comprises
[3628] (a) increasing or generating one or more activities selected from the group consisting of transcriptional regulator in a non-human organism or a part thereof, preferably a microorganism, a plant cell, a plant or a part thereof, as compared to a corresponding non-transformed wild type non-human organism or a part thereof; and
[3629] (b) growing the non-human organism or a part thereof under conditions which permit the production of glutamine or a composition comprising glutamine in said non-human organism or in the culture medium surrounding said non-human organism.

[3630] Accordingly, the present invention relates to a process for the production of proline, which comprises
[3631] (a) increasing or generating one or more activities selected from the group consisting of transcriptional regulator in a non-human organism or a part thereof, preferably a microorganism, a plant cell, a plant or a part thereof, as compared to a corresponding non-transformed wild type non-human organism or a part thereof; and
[3632] (b) growing the non-human organism or a part thereof under conditions which permit the production of proline or a composition comprising proline in said non-human organism or in the culture medium surrounding said non-human organism.

[3633] Accordingly, the present invention relates to a process for the production of glutamate, which comprises
[3634] (a) increasing or generating one or more activities selected from the group consisting of b2673-protein in a non-human organism or a part thereof, preferably a microorganism, a plant cell, a plant or a part thereof, as compared to a corresponding non-transformed wild type non-human organism or a part thereof; and
[3635] (b) growing the non-human organism or a part thereof under conditions which permit the production of glutamate or a composition comprising glutamate in said non-human organism or in the culture medium surrounding said non-human organism.

[3636] Accordingly, the present invention relates to a process for the production of glutamine, which comprises
[3637] (a) increasing or generating one or more activities selected from the group consisting of b2673-protein in a non-human organism or a part thereof, preferably a microorganism, a plant cell, a plant or a part thereof, as compared to a corresponding non-transformed wild type non-human organism or a part thereof; and
[3638] (b) growing the non-human organism or a part thereof under conditions which permit the production of glutamine or a composition comprising glutamine in said non-human organism or in the culture medium surrounding said non-human organism.

[3639] Accordingly, the present invention relates to a process for the production of glutamine, which comprises
[3640] (a) increasing or generating one or more activities selected from the group consisting of transcriptional regulator in a non-human organism or a part thereof, preferably a microorganism, a plant cell, a plant or a part thereof, as compared to a corresponding non-transformed wild type non-human organism or a part thereof; and
[3641] (b) growing the non-human organism or a part thereof under conditions which permit the production of glutamine or a composition comprising glutamine in said non-human organism or in the culture medium surrounding said non-human organism.

[3642] Accordingly, the present invention relates to a process for the production of proline, which comprises
[3643] (a) increasing or generating one or more activities selected from the group consisting of transcriptional regulator in a non-human organism or a part thereof, preferably a microorganism, a plant cell, a plant or a part thereof, as compared to a corresponding non-transformed wild type non-human organism or a part thereof; and
[3644] (b) growing the non-human organism or a part thereof under conditions which permit the production of proline or a composition comprising proline in said non-human organism or in the culture medium surrounding said non-human organism.

[3645] Accordingly, the present invention relates to a process for the production of glutamate, which comprises
[3646] (a) increasing or generating one or more activities selected from the group consisting of b2812-protein in a non-human organism or a part thereof, preferably a microorganism, a plant cell, a plant or a part thereof, as compared to a corresponding non-transformed wild type non-human organism or a part thereof; and
[3647] (b) growing the non-human organism or a part thereof under conditions which permit the production of glutamate or a composition comprising glutamate in said non-human organism or in the culture medium surrounding said non-human organism.

[3648] Accordingly, the present invention relates to a process for the production of glutamine, which comprises
[3649] (a) increasing or generating one or more activities selected from the group consisting of b2812-protein in a non-human organism or a part thereof, preferably a microorganism, a plant cell, a plant or a part thereof, as compared to a corresponding non-transformed wild type non-human organism or a part thereof; and
[3650] (b) growing the non-human organism or a part thereof under conditions which permit the production of glutamine or a composition comprising glutamine in said non-human organism or in the culture medium surrounding said non-human organism.

[3651] Accordingly, the present invention relates to a process for the production of proline, which comprises
[3652] (a) increasing or generating one or more activities selected from the group consisting of b2812-protein in a non-human organism or a part thereof, preferably a microorganism, a plant cell, a plant or a part thereof, as compared to a corresponding non-transformed wild type non-human organism or a part thereof; and
[3653] (b) growing the non-human organism or a part thereof under conditions which permit the production of proline or a composition comprising proline in said non-human organism or in the culture medium surrounding said non-human organism.

[3654] Accordingly, the present invention relates to a process for the production of proline, which comprises
[3655] (a) increasing or generating one or more activities selected from the group consisting of b2846-protein in a non-human organism or a part thereof, preferably a microorganism, a plant cell, a plant or a part thereof, as compared to a corresponding non-transformed wild type non-human organism or a part thereof; and
[3656] (b) growing the non-human organism or a part thereof under conditions which permit the production of proline or a composition comprising proline in said non-human organism or in the culture medium surrounding said non-human organism.

[3657] Accordingly, the present invention relates to a process for the production of arginine, which comprises
[3658] (a) increasing or generating one or more activities selected from the group consisting of b2909-protein in a non-human organism or a part thereof, preferably a microorganism, a plant cell, a plant or a part thereof, as compared to a corresponding non-transformed wild type non-human organism or a part thereof; and
[3659] (b) growing the non-human organism or a part thereof under conditions which permit the production of arginine or a composition comprising arginine in said non-human organism or in the culture medium surrounding said non-human organism.

[3660] Accordingly, the present invention relates to a process for the production of proline, which comprises
[3661] (a) increasing or generating one or more activities selected from the group consisting of b2909-protein in a non-human organism or a part thereof, preferably a microorganism, a plant cell, a plant or a part thereof, as compared to a corresponding non-transformed wild type non-human organism or a part thereof; and
[3662] (b) growing the non-human organism or a part thereof under conditions which permit the production of proline or a composition comprising proline in said non-human organism or in the culture medium surrounding said non-human organism.

[3663] Accordingly, the present invention relates to a process for the production of glutamate, which comprises
[3664] (a) increasing or generating one or more activities selected from the group consisting of ribosephosphate isomerase, constitutive in a non-human organism or a part thereof, preferably a microorganism, a plant cell, a plant or a part thereof, as compared to a corresponding non-transformed wild type non-human organism or a part thereof; and
[3665] (b) growing the non-human organism or a part thereof under conditions which permit the production of glutamate or a composition comprising glutamate in said non-human organism or in the culture medium surrounding said non-human organism.

[3666] Accordingly, the present invention relates to a process for the production of glutamate, which comprises
[3667] (a) increasing or generating one or more activities selected from the group consisting of arginine exporter protein in a non-human organism or a part thereof, preferably a microorganism, a plant cell, a plant or a part thereof, as compared to a corresponding non-transformed wild type non-human organism or a part thereof; and
[3668] (b) growing the non-human organism or a part thereof under conditions which permit the production of glutamate or a composition comprising glutamate in said non-human organism or in the culture medium surrounding said non-human organism.

[3669] Accordingly, the present invention relates to a process for the production of proline, which comprises
[3670] (a) increasing or generating one or more activities selected from the group consisting of b2936-protein in a non-human organism or a part thereof, preferably a microorganism, a plant cell, a plant or a part thereof, as compared to a corresponding non-transformed wild type non-human organism or a part thereof; and
[3671] (b) growing the non-human organism or a part thereof under conditions which permit the production of proline or a composition comprising proline in said non-human organism or in the culture medium surrounding said non-human organism.

[3672] Accordingly, the present invention relates to a process for the production of proline, which comprises
[3673] (a) increasing or generating one or more activities selected from the group consisting of L-asparaginase in a non-human organism or a part thereof, preferably a microorganism, a plant cell, a plant or a part thereof, as compared to a corresponding non-transformed wild type non-human organism or a part thereof; and
[3674] (b) growing the non-human organism or a part thereof under conditions which permit the production of proline or a composition comprising proline in said non-human organism or in the culture medium surrounding said non-human organism.

[3675] Accordingly, the present invention relates to a process for the production of proline, which comprises
[3676] (a) increasing or generating one or more activities selected from the group consisting of murein transglycosylase in a non-human organism or a part thereof, preferably a microorganism, a plant cell, a plant or a part thereof, as compared to a corresponding non-transformed wild type non-human organism or a part thereof; and
[3677] (b) growing the non-human organism or a part thereof under conditions which permit the production of proline or a composition comprising proline in said non-human organism or in the culture medium surrounding said non-human organism.

[3678] Accordingly, the present invention relates to a process for the production of arginine, which comprises
[3679] (a) increasing or generating one or more activities selected from the group consisting of b2999-protein in a non-human organism or a part thereof, preferably a microorganism, a plant cell, a plant or a part thereof, as compared to a corresponding non-transformed wild type non-human organism or a part thereof; and
[3680] (b) growing the non-human organism or a part thereof under conditions which permit the production of arginine or a composition comprising arginine in said non-human organism or in the culture medium surrounding said non-human organism.

[3681] Accordingly, the present invention relates to a process for the production of proline, which comprises
[3682] (a) increasing or generating one or more activities selected from the group consisting of glycoprotease in a non-human organism or a part thereof, preferably a microorganism, a plant cell, a plant or a part thereof, as compared to a corresponding non-transformed wild type non-human organism or a part thereof; and
[3683] (b) growing the non-human organism or a part thereof under conditions which permit the production of proline or a composition comprising proline in said non-human organism or in the culture medium surrounding said non-human organism.

[3684] Accordingly, the present invention relates to a process for the production of arginine, which comprises
[3685] (a) increasing or generating one or more activities selected from the group consisting of b3121-protein in a non-human organism or a part thereof, preferably a microorganism, a plant cell, a plant or a part thereof, as compared to a corresponding non-transformed wild type non-human organism or a part thereof; and
[3686] (b) growing the non-human organism or a part thereof under conditions which permit the production of arginine or a composition comprising arginine in said non-human organism or in the culture medium surrounding said non-human organism.

[3687] Accordingly, the present invention relates to a process for the production of proline, which comprises
[3688] (a) increasing or generating one or more activities selected from the group consisting of b3121-protein in a non-human organism or a part thereof, preferably a microorganism, a plant cell, a plant or a part thereof, as compared to a corresponding non-transformed wild type non-human organism or a part thereof; and
[3689] (b) growing the non-human organism or a part thereof under conditions which permit the production of proline or a composition comprising proline in said non-human organism or in the culture medium surrounding said non-human organism.

[3690] Accordingly, the present invention relates to a process for the production of proline, which comprises
[3691] (a) increasing or generating one or more activities selected from the group consisting of b3151-protein in a non-human organism or a part thereof, preferably a microorganism, a plant cell, a plant or a part thereof, as compared to a corresponding non-transformed wild type non-human organism or a part thereof; and
[3692] (b) growing the non-human organism or a part thereof under conditions which permit the production of proline or a composition comprising proline in said non-human organism or in the culture medium surrounding said non-human organism.

[3693] Accordingly, the present invention relates to a process for the production of arginine, which comprises
[3694] (a) increasing or generating one or more activities selected from the group consisting of acetyl CoA carboxylase in a non-human organism or a part thereof, preferably a microorganism, a plant cell, a plant or a part thereof, as compared to a corresponding non-transformed wild type non-human organism or a part thereof; and
[3695] (b) growing the non-human organism or a part thereof under conditions which permit the production of arginine or a composition comprising arginine in said non-human organism or in the culture medium surrounding said non-human organism.

[3696] Accordingly, the present invention relates to a process for the production of glutamate, which comprises
[3697] (a) increasing or generating one or more activities selected from the group consisting of acetyl CoA carboxylase in a non-human organism or a part thereof, preferably a microorganism, a plant cell, a plant or a part thereof, as compared to a corresponding non-transformed wild type non-human organism or a part thereof; and
[3698] (b) growing the non-human organism or a part thereof under conditions which permit the production of glutamate or a composition comprising glutamate in said non-human organism or in the culture medium surrounding said non-human organism.

[3699] Accordingly, the present invention relates to a process for the production of arginine, which comprises
[3700] (a) increasing or generating one or more activities selected from the group consisting of methyltransferase in a non-human organism or a part thereof, preferably a microorganism, a plant cell, a plant or a part thereof, as compared to a corresponding non-transformed wild type non-human organism or a part thereof; and
[3701] (b) growing the non-human organism or a part thereof under conditions which permit the production of arginine or a composition comprising arginine in said non-human organism or in the culture medium surrounding said non-human organism.

[3702] Accordingly, the present invention relates to a process for the production of glutamate, which comprises
[3703] (a) increasing or generating one or more activities selected from the group consisting of methyltransferase in a non-human organism or a part thereof, preferably a microorganism, a plant cell, a plant or a part thereof, as compared to a corresponding non-transformed wild type non-human organism or a part thereof; and
[3704] (b) growing the non-human organism or a part thereof under conditions which permit the production of glutamate or a composition comprising glutamate in said non-human organism or in the culture medium surrounding said non-human organism.

[3705] Accordingly, the present invention relates to a process for the production of glutamine, which comprises
[3706] (a) increasing or generating one or more activities selected from the group consisting of methyltransferase in a non-human organism or a part thereof, preferably a microorganism, a plant cell, a plant or a part thereof, as compared to a corresponding non-transformed wild type non-human organism or a part thereof; and
[3707] (b) growing the non-human organism or a part thereof under conditions which permit the production of glutamine or a composition comprising glutamine in said non-human organism or in the culture medium surrounding said non-human organism.

[3708] Accordingly, the present invention relates to a process for the production of proline, which comprises
[3709] (a) increasing or generating one or more activities selected from the group consisting of methyltransferase in a non-human organism or a part thereof, preferably a microorganism, a plant cell, a plant or a part thereof, as compared to a corresponding non-transformed wild type non-human organism or a part thereof; and
[3710] (b) growing the non-human organism or a part thereof under conditions which permit the production of proline or a composition comprising proline in said non-human organism or in the culture medium surrounding said non-human organism.

[3711] Accordingly, the present invention relates to a process for the production of proline, which comprises
[3712] (a) increasing or generating one or more activities selected from the group consisting of b3346-protein in a non-human organism or a part thereof, preferably a microorganism, a plant cell, a plant or a part thereof, as compared to a corresponding non-transformed wild type non-human organism or a part thereof; and
[3713] (b) growing the non-human organism or a part thereof under conditions which permit the production of proline or a composition comprising proline in said non-human organism or in the culture medium surrounding said non-human organism.

[3714] Accordingly, the present invention relates to a process for the production of glutamine, which comprises
[3715] (a) increasing or generating one or more activities selected from the group consisting of b3410-protein in a non-human organism or a part thereof, preferably a microorganism, a plant cell, a plant or a part thereof, as compared to a corresponding non-transformed wild type non-human organism or a part thereof; and
[3716] (b) growing the non-human organism or a part thereof under conditions which permit the production of glutamine or a composition comprising glutamine in said non-human organism or in the culture medium surrounding said non-human organism.

[3717] Accordingly, the present invention relates to a process for the production of arginine, which comprises
[3718] (a) increasing or generating one or more activities selected from the group consisting of B3427-protein in a non-human organism or a part thereof, preferably a microorganism, a plant cell, a plant or a part thereof, as compared to a corresponding non-transformed wild type non-human organism or a part thereof; and
[3719] (b) growing the non-human organism or a part thereof under conditions which permit the production of arginine or a composition comprising arginine in said non-human organism or in the culture medium surrounding said non-human organism.

[3720] Accordingly, the present invention relates to a process for the production of glutamate, which comprises
[3721] (a) increasing or generating one or more activities selected from the group consisting of b3509-protein in a non-human organism or a part thereof, preferably a microorganism, a plant cell, a plant or a part thereof, as compared to a corresponding non-transformed wild type non-human organism or a part thereof; and
[3722] (b) growing the non-human organism or a part thereof under conditions which permit the production of glutamate or a composition comprising glutamate in said non-human organism or in the culture medium surrounding said non-human organism.

[3723] Accordingly, the present invention relates to a process for the production of proline, which comprises
[3724] (a) increasing or generating one or more activities selected from the group consisting of valine-pyruvate transaminase in a non-human organism or a part thereof, preferably a microorganism, a plant cell, a plant or a part thereof, as compared to a corresponding non-transformed wild type non-human organism or a part thereof; and
[3725] (b) growing the non-human organism or a part thereof under conditions which permit the production of proline or a composition comprising proline in said non-human organism or in the culture medium surrounding said non-human organism.

[3726] Accordingly, the present invention relates to a process for the production of glutamine, which comprises
[3727] (a) increasing or generating one or more activities selected from the group consisting of threonine dehydrogenase in a non-human organism or a part thereof, preferably a microorganism, a plant cell, a plant or a part thereof, as compared to a corresponding non-transformed wild type non-human organism or a part thereof; and
[3728] (b) growing the non-human organism or a part thereof under conditions which permit the production of glutamine or a composition comprising glutamine in said non-human organism or in the culture medium surrounding said non-human organism.

[3729] Accordingly, the present invention relates to a process for the production of proline, which comprises
[3730] (a) increasing or generating one or more activities selected from the group consisting of threonine dehydrogenase in a non-human organism or a part thereof, preferably a microorganism, a plant cell, a plant or a part thereof, as compared to a corresponding non-transformed wild type non-human organism or a part thereof; and
[3731] (b) growing the non-human organism or a part thereof under conditions which permit the production of proline or a composition comprising proline in said non-human organism or in the culture medium surrounding said non-human organism.

[3732] Accordingly, the present invention relates to a process for the production of proline, which comprises
[3733] (a) increasing or generating one or more activities selected from the group consisting of phosphopantetheine adenylyltransferase in a non-human organism or a part thereof, preferably a microorganism, a plant cell, a plant or a part thereof, as compared to a corresponding non-transformed wild type non-human organism or a part thereof; and
[3734] (b) growing the non-human organism or a part thereof under conditions which permit the production of proline or a composition comprising proline in said non-human organism or in the culture medium surrounding said non-human organism.

[3735] Accordingly, the present invention relates to a process for the production of glutamine, which comprises
[3736] (a) increasing or generating one or more activities selected from the group consisting of ATP synthase subunit beta in a non-human organism or a part thereof, preferably a microorganism, a plant cell, a plant or a part thereof, as compared to a corresponding non-transformed wild type non-human organism or a part thereof; and
[3737] (b) growing the non-human organism or a part thereof under conditions which permit the production of glutamine or a composition comprising glutamine in said non-human organism or in the culture medium surrounding said non-human organism.

[3738] Accordingly, the present invention relates to a process for the production of arginine, which comprises
[3739] (a) increasing or generating one or more activities selected from the group consisting of enterobacterial common antigen polymerase in a non-human organism or a part thereof, preferably a microorganism, a plant cell, a plant or a part thereof, as compared to a corresponding non-transformed wild type non-human organism or a part thereof; and
[3740] (b) growing the non-human organism or a part thereof under conditions which permit the production of arginine or a composition comprising arginine in said non-human organism or in the culture medium surrounding said non-human organism.

[3741] Accordingly, the present invention relates to a process for the production of glutamate, which comprises
[3742] (a) increasing or generating one or more activities selected from the group consisting of enterobacterial common antigen polymerase in a non-human organism or a part thereof, preferably a microorganism, a plant cell, a plant or a part thereof, as compared to a corresponding non-transformed wild type non-human organism or a part thereof; and
[3743] (b) growing the non-human organism or a part thereof under conditions which permit the production of glutamate or a composition comprising glutamate in said non-human organism or in the culture medium surrounding said non-human organism.

[3744] Accordingly, the present invention relates to a process for the production of proline, which comprises
[3745] (a) increasing or generating one or more activities selected from the group consisting of DNA helicase II in a non-human organism or a part thereof, preferably a microorganism, a plant cell, a plant or a part thereof, as compared to a corresponding non-transformed wild type non-human organism or a part thereof; and
[3746] (b) growing the non-human organism or a part thereof under conditions which permit the production of proline or a composition comprising proline in said non-human organism or in the culture medium surrounding said non-human organism.

[3747] Accordingly, the present invention relates to a process for the production of glutamine, which comprises
[3748] (a) increasing or generating one or more activities selected from the group consisting of b3814-protein in a non-human organism or a part thereof, preferably a microorganism, a plant cell, a plant or a part thereof, as compared to a corresponding non-transformed wild type non-human organism or a part thereof; and
[3749] (b) growing the non-human organism or a part thereof under conditions which permit the production of glutamine or a composition comprising glutamine in said non-human organism or in the culture medium surrounding said non-human organism.

[3750] Accordingly, the present invention relates to a process for the production of proline, which comprises
[3751] (a) increasing or generating one or more activities selected from the group consisting of b3817-protein in a non-human organism or a part thereof, preferably a microorganism, a plant cell, a plant or a part thereof, as compared to a corresponding non-transformed wild type non-human organism or a part thereof; and
[3752] (b) growing the non-human organism or a part thereof under conditions which permit the production of proline or a composition comprising proline in said non-human organism or in the culture medium surrounding said non-human organism.

[3753] Accordingly, the present invention relates to a process for the production of glutamine, which comprises
[3754] (a) increasing or generating one or more activities selected from the group consisting of glycerol dehydrogenase in a non-human organism or a part thereof, preferably a microorganism, a plant cell, a plant or a part thereof, as compared to a corresponding non-transformed wild type non-human organism or a part thereof; and
[3755] (b) growing the non-human organism or a part thereof under conditions which permit the production of glutamine or a composition comprising glutamine in said non-human organism or in the culture medium surrounding said non-human organism.

[3756] Accordingly, the present invention relates to a process for the production of glutamine, which comprises
[3757] (a) increasing or generating one or more activities selected from the group consisting of b3989-protein in a non-human organism or a part thereof, preferably a microorganism, a plant cell, a plant or a part thereof, as compared to a corresponding non-transformed wild type non-human organism or a part thereof; and
[3758] (b) growing the non-human organism or a part thereof under conditions which permit the production of glutamine or a composition comprising glutamine in said non-human organism or in the culture medium surrounding said non-human organism.

[3759] Accordingly, the present invention relates to a process for the production of glutamate, which comprises
[3760] (a) increasing or generating one or more activities selected from the group consisting of acetyltransferase in a non-human organism or a part thereof, preferably a microorganism, a plant cell, a plant or a part thereof, as compared to a corresponding non-transformed wild type non-human organism or a part thereof; and
[3761] (b) growing the non-human organism or a part thereof under conditions which permit the production of glutamate or a composition comprising glutamate in said non-human organism or in the culture medium surrounding said non-human organism.

[3762] Accordingly, the present invention relates to a process for the production of arginine, which comprises
[3763] (a) increasing or generating one or more activities selected from the group consisting of b4029-protein in a non-human organism or a part thereof, preferably a microorganism, a plant cell, a plant or a part thereof, as compared to a corresponding non-transformed wild type non-human organism or a part thereof; and
[3764] (b) growing the non-human organism or a part thereof under conditions which permit the production of arginine or a composition comprising arginine in said non-human organism or in the culture medium surrounding said non-human organism.

[3765] Accordingly, the present invention relates to a process for the production of glutamine, which comprises
[3766] (a) increasing or generating one or more activities selected from the group consisting of b4029-protein in a non-human organism or a part thereof, preferably a microorganism, a plant cell, a plant or a part thereof, as compared to a corresponding non-transformed wild type non-human organism or a part thereof; and
[3767] (b) growing the non-human organism or a part thereof under conditions which permit the production of glutamine or a composition comprising glutamine in said non-human organism or in the culture medium surrounding said non-human organism.

[3768] Accordingly, the present invention relates to a process for the production of proline, which comprises
[3769] (a) increasing or generating one or more activities selected from the group consisting of b4029-protein in a non-human organism or a part thereof, preferably a microorganism, a plant cell, a plant or a part thereof, as compared to a corresponding non-transformed wild type non-human organism or a part thereof; and
[3770] (b) growing the non-human organism or a part thereof under conditions which permit the production of proline or a composition comprising proline in said non-human organism or in the culture medium surrounding said non-human organism.

[3771] Accordingly, the present invention relates to a process for the production of arginine, which comprises
[3772] (a) increasing or generating one or more activities selected from the group consisting of cation/acetate symporter in a non-human organism or a part thereof, preferably a microorganism, a plant cell, a plant or a part thereof, as compared to a corresponding non-transformed wild type non-human organism or a part thereof; and
[3773] (b) growing the non-human organism or a part thereof under conditions which permit the production of arginine or a composition comprising arginine in said non-human organism or in the culture medium surrounding said non-human organism.

[3774] Accordingly, the present invention relates to a process for the production of arginine, which comprises
[3775] (a) increasing or generating one or more activities selected from the group consisting of b4121-protein in a non-human organism or a part thereof, preferably a microorganism, a plant cell, a plant or a part thereof, as compared to a corresponding non-transformed wild type non-human organism or a part thereof; and
[3776] (b) growing the non-human organism or a part thereof under conditions which permit the production of arginine or a composition comprising arginine in said non-human organism or in the culture medium surrounding said non-human organism.

[3777] Accordingly, the present invention relates to a process for the production of proline, which comprises
[3778] (a) increasing or generating one or more activities selected from the group consisting of b4121-protein in a non-human organism or a part thereof, preferably a microorganism, a plant cell, a plant or a part thereof, as compared to a corresponding non-transformed wild type non-human organism or a part thereof; and
[3779] (b) growing the non-human organism or a part thereof under conditions which permit the production of proline or a composition comprising proline in said non-human organism or in the culture medium surrounding said non-human organism.

[3780] Accordingly, the present invention relates to a process for the production of proline, which comprises
[3781] (a) increasing or generating one or more activities selected from the group consisting of lysyl-tRNA synthetase in a non-human organism or a part thereof, preferably a microorganism, a plant cell, a plant or a part thereof, as compared to a corresponding non-transformed wild type non-human organism or a part thereof; and
[3782] (b) growing the non-human organism or a part thereof under conditions which permit the production of proline or a composition comprising proline in said non-human organism or in the culture medium surrounding said non-human organism.

[3783] Accordingly, the present invention relates to a process for the production of glutamine, which comprises
[3784] (a) increasing or generating one or more activities selected from the group consisting of aspartase in a non-human organism or a part thereof, preferably a microorganism, a plant cell, a plant or a part thereof, as compared to a corresponding non-transformed wild type non-human organism or a part thereof; and
[3785] (b) growing the non-human organism or a part thereof under conditions which permit the production of glutamine or a composition comprising glutamine in said non-human organism or in the culture medium surrounding said non-human organism.

[3786] Accordingly, the present invention relates to a process for the production of arginine, which comprises
[3787] (a) increasing or generating one or more activities selected from the group consisting of acetyltransferase in a non-human organism or a part thereof, preferably a microorganism, a plant cell, a plant or a part thereof, as compared to a corresponding non-transformed wild type non-human organism or a part thereof; and
[3788] (b) growing the non-human organism or a part thereof under conditions which permit the production of arginine or a composition comprising arginine in said non-human organism or in the culture medium surrounding said non-human organism.

[3789] Accordingly, the present invention relates to a process for the production of glutamine, which comprises
[3790] (a) increasing or generating one or more activities selected from the group consisting of acetyltransferase in a non-human organism or a part thereof, preferably a microorganism, a plant cell, a plant or a part thereof, as compared to a corresponding non-transformed wild type non-human organism or a part thereof; and
[3791] (b) growing the non-human organism or a part thereof under conditions which permit the production of glutamine or a composition comprising glutamine in said non-human organism or in the culture medium surrounding said non-human organism.

[3792] Accordingly, the present invention relates to a process for the production of proline, which comprises
[3793] (a) increasing or generating one or more activities selected from the group consisting of acetyltransferase in a non-human organism or a part thereof, preferably a microorganism, a plant cell, a plant or a part thereof, as compared to a corresponding non-transformed wild type non-human organism or a part thereof; and
[3794] (b) growing the non-human organism or a part thereof under conditions which permit the production of proline or a composition comprising proline in said non-human organism or in the culture medium surrounding said non-human organism.

[3795] Accordingly, the present invention relates to a process for the production of arginine, which comprises
[3796] (a) increasing or generating one or more activities selected from the group consisting of gluconate transport system permease 3 in a non-human organism or a part thereof, preferably a microorganism, a plant cell, a plant or a part thereof, as compared to a corresponding non-transformed wild type non-human organism or a part thereof; and
[3797] (b) growing the non-human organism or a part thereof under conditions which permit the production of arginine or a composition comprising arginine in said non-human organism or in the culture medium surrounding said non-human organism.

[3798] Accordingly, the present invention relates to a process for the production of glutamate, which comprises
[3799] (a) increasing or generating one or more activities selected from the group consisting of purine-nucleoside phosphorylase in a non-human organism or a part thereof, preferably a microorganism, a plant cell, a plant or a part thereof, as compared to a corresponding non-transformed wild type non-human organism or a part thereof; and
[3800] (b) growing the non-human organism or a part thereof under conditions which permit the production of glutamate or a composition comprising glutamate in said non-human organism or in the culture medium surrounding said non-human organism.

[3801] Accordingly, the present invention relates to a process for the production of proline, which comprises
[3802] (a) increasing or generating one or more activities selected from the group consisting of purine-nucleoside phosphorylase in a non-human organism or a part thereof, preferably a microorganism, a plant cell, a plant or a part thereof, as compared to a corresponding non-transformed wild type non-human organism or a part thereof; and
[3803] (b) growing the non-human organism or a part thereof under conditions which permit the production of proline or a composition comprising proline in said non-human organism or in the culture medium surrounding said non-human organism.

[3804] Accordingly, the present invention relates to a process for the production of arginine, which comprises
[3805] (a) increasing or generating one or more activities selected from the group consisting of thioredoxin in a non-human organism or a part thereof, preferably a microorganism, a plant cell, a plant or a part thereof, as compared to a corresponding non-transformed wild type non-human organism or a part thereof; and
[3806] (b) growing the non-human organism or a part thereof under conditions which permit the production of arginine or a composition comprising arginine in said non-human organism or in the culture medium surrounding said non-human organism.

[3807] Accordingly, the present invention relates to a process for the production of proline, which comprises
[3808] (a) increasing or generating one or more activities selected from the group consisting of GM02LC11114-protein in a non-human organism or a part thereof, preferably a microorganism, a plant cell, a plant or a part thereof, as compared to a corresponding non-transformed wild type non-human organism or a part thereof; and
[3809] (b) growing the non-human organism or a part thereof under conditions which permit the production of proline or a composition comprising proline in said non-human organism or in the culture medium surrounding said non-human organism.

[3810] Accordingly, the present invention relates to a process for the production of glutamine, which comprises
[3811] (a) increasing or generating one or more activities selected from the group consisting of glutaredoxin in a non-human organism or a part thereof, preferably a microorganism, a plant cell, a plant or a part thereof, as compared to a corresponding non-transformed wild type non-human organism or a part thereof; and
[3812] (b) growing the non-human organism or a part thereof under conditions which permit the production of glutamine or a composition comprising glutamine in said non-human organism or in the culture medium surrounding said non-human organism.

[3813] Accordingly, the present invention relates to a process for the production of arginine, which comprises
[3814] (a) increasing or generating one or more activities selected from the group consisting of histone H2A in a non-human organism or a part thereof, preferably a microorganism, a plant cell, a plant or a part thereof, as compared to a corresponding non-transformed wild type non-human organism or a part thereof; and
[3815] (b) growing the non-human organism or a part thereof under conditions which permit the production of arginine or a composition comprising arginine in said non-human organism or in the culture medium surrounding said non-human organism.

[3816] Accordingly, the present invention relates to a process for the production of proline, which comprises
[3817] (a) increasing or generating one or more activities selected from the group consisting of histone H2A in a non-human organism or a part thereof, preferably a microorganism, a plant cell, a plant or a part thereof, as compared to a corresponding non-transformed wild type non-human organism or a part thereof; and
[3818] (b) growing the non-human organism or a part thereof under conditions which permit the production of proline or a composition comprising proline in said non-human organism or in the culture medium surrounding said non-human organism.

[3819] Accordingly, the present invention relates to a process for the production of glutamine, which comprises
[3820] (a) increasing or generating one or more activities selected from the group consisting of GM02LC17485-protein in a non-human organism or a part thereof, preferably a microorganism, a plant cell, a plant or a part thereof, as compared to a corresponding non-transformed wild type non-human organism or a part thereof; and
[3821] (b) growing the non-human organism or a part thereof under conditions which permit the production of glutamine or a composition comprising glutamine in said non-human organism or in the culture medium surrounding said non-human organism.

[3822] Accordingly, the present invention relates to a process for the production of arginine, which comprises
[3823] (a) increasing or generating one or more activities selected from the group consisting of RNA binding protein in a non-human organism or a part thereof, preferably a microorganism, a plant cell, a plant or a part thereof, as compared to a corresponding non-transformed wild type non-human organism or a part thereof; and
[3824] (b) growing the non-human organism or a part thereof under conditions which permit the production of arginine or a composition comprising arginine in said non-human organism or in the culture medium surrounding said non-human organism.

[3825] Accordingly, the present invention relates to a process for the production of proline, which comprises
[3826] (a) increasing or generating one or more activities selected from the group consisting of transcription factor in a non-human organism or a part thereof, preferably a microorganism, a plant cell, a plant or a part thereof, as compared to a corresponding non-transformed wild type non-human organism or a part thereof; and
[3827] (b) growing the non-human organism or a part thereof under conditions which permit the production of proline or a composition comprising proline in said non-human organism or in the culture medium surrounding said non-human organism.

[3828] Accordingly, the present invention relates to a process for the production of proline, which comprises
[3829] (a) increasing or generating one or more activities selected from the group consisting of cyclin D in a non-human organism or a part thereof, preferably a microorganism, a plant cell, a plant or a part thereof, as compared to a corresponding non-transformed wild type non-human organism or a part thereof; and
[3830] (b) growing the non-human organism or a part thereof under conditions which permit the production of proline or a composition comprising proline in said non-human organism or in the culture medium surrounding said non-human organism.

[3831] Accordingly, the present invention relates to a process for the production of proline, which comprises
[3832] (a) increasing or generating one or more activities selected from the group consisting of GM02LC46-protein in a non-human organism or a part thereof, preferably a microorganism, a plant cell, a plant or a part thereof, as compared to a corresponding non-transformed wild type non-human organism or a part thereof; and
[3833] (b) growing the non-human organism or a part thereof under conditions which permit the production of proline or a composition comprising proline in said non-human organism or in the culture medium surrounding said non-human organism.

[3834] Accordingly, the present invention relates to a process for the production of proline, which comprises
[3835] (a) increasing or generating one or more activities selected from the group consisting of GM02LC5744-protein in a non-human organism or a part thereof, preferably a microorganism, a plant cell, a plant or a part thereof, as compared to a corresponding non-transformed wild type non-human organism or a part thereof; and
[3836] (b) growing the non-human organism or a part thereof under conditions which permit the production of proline or a composition comprising proline in said non-human organism or in the culture medium surrounding said non-human organism.

[3837] Accordingly, the present invention relates to a process for the production of glutamate, which comprises
[3838] (a) increasing or generating one or more activities selected from the group consisting of transcription factor in a non-human organism or a part thereof, preferably a microorganism, a plant cell, a plant or a part thereof, as compared to a corresponding non-transformed wild type non-human organism or a part thereof; and
[3839] (b) growing the non-human organism or a part thereof under conditions which permit the production of glutamate or a composition comprising glutamate in said non-human organism or in the culture medium surrounding said non-human organism.

[3840] Accordingly, the present invention relates to a process for the production of proline, which comprises
[3841] (a) increasing or generating one or more activities selected from the group consisting of glutaredoxin in a non-human organism or a part thereof, preferably a microorganism, a plant cell, a plant or a part thereof, as compared to a corresponding non-transformed wild type non-human organism or a part thereof; and
[3842] (b) growing the non-human organism or a part thereof under conditions which permit the production of proline or a composition comprising proline in said non-human organism or in the culture medium surrounding said non-human organism.

[3843] Accordingly, the present invention relates to a process for the production of arginine, which comprises
[3844] (a) increasing or generating one or more activities selected from the group consisting of s_pp015018333r-protein in a non-human organism or a part thereof, preferably a microorganism, a plant cell, a plant or a part thereof, as compared to a corresponding non-transformed wild type non-human organism or a part thereof; and
[3845] (b) growing the non-human organism or a part thereof under conditions which permit the production of arginine or a composition comprising arginine in said non-human organism or in the culture medium surrounding said non-human organism.

[3846] Accordingly, the present invention relates to a process for the production of glutamine, which comprises
[3847] (a) increasing or generating one or more activities selected from the group consisting of s_pp015018333r-protein in a non-human organism or a part thereof, preferably a microorganism, a plant cell, a plant or a part thereof, as compared to a corresponding non-transformed wild type non-human organism or a part thereof; and
[3848] (b) growing the non-human organism or a part thereof under conditions which permit the production of glutamine or a composition comprising glutamine in said non-human organism or in the culture medium surrounding said non-human organism.

[3849] Accordingly, the present invention relates to a process for the production of proline, which comprises
[3850] (a) increasing or generating one or more activities selected from the group consisting of sll0064-protein in a non-human organism or a part thereof, preferably a microorganism, a plant cell, a plant or a part thereof, as compared to a corresponding non-transformed wild type non-human organism or a part thereof; and
[3851] (b) growing the non-human organism or a part thereof under conditions which permit the production of proline or a composition comprising proline in said non-human organism or in the culture medium surrounding said non-human organism.

[3852] Accordingly, the present invention relates to a process for the production of glutamate, which comprises
[3853] (a) increasing or generating one or more activities selected from the group consisting of N-acetyl-gamma-glutamyl-phosphate reductase in a non-human organism or a part thereof, preferably a microorganism, a plant cell, a plant or a part thereof, as compared to a corresponding non-transformed wild type non-human organism or a part thereof; and
[3854] (b) growing the non-human organism or a part thereof under conditions which permit the production of glutamate or a composition comprising glutamate in said non-human organism or in the culture medium surrounding said non-human organism.

[3855] Accordingly, the present invention relates to a process for the production of glutamate, which comprises
[3856] (a) increasing or generating one or more activities selected from the group consisting of heat shock protein in a non-human organism or a part thereof, preferably a microorganism, a plant cell, a plant or a part thereof, as compared to a corresponding non-transformed wild type non-human organism or a part thereof; and
[3857] (b) growing the non-human organism or a part thereof under conditions which permit the production of glutamate or a composition comprising glutamate in said non-human organism or in the culture medium surrounding said non-human organism.

[3858] Accordingly, the present invention relates to a process for the production of arginine, which comprises
[3859] (a) increasing or generating one or more activities selected from the group consisting of flavodoxin in a non-human organism or a part thereof, preferably a microorganism, a plant cell, a plant or a part thereof, as compared to a corresponding non-transformed wild type non-human organism or a part thereof; and
[3860] (b) growing the non-human organism or a part thereof under conditions which permit the production of arginine or a composition comprising arginine in said non-human organism or in the culture medium surrounding said non-human organism.

[3861] Accordingly, the present invention relates to a process for the production of proline, which comprises
[3862] (a) increasing or generating one or more activities selected from the group consisting of phosphopantothenoylcysteinesynthetase/decarboxylase in a non-human organism or a part thereof, preferably a microorganism, a plant cell, a plant or a part thereof, as compared to a corresponding non-transformed wild type non-human organism or a part thereof; and
[3863] (b) growing the non-human organism or a part thereof under conditions which permit the production of proline or a composition comprising proline in said non-human organism or in the culture medium surrounding said non-human organism.

[3864] Accordingly, the present invention relates to a process for the production of glutamine, which comprises
[3865] (a) increasing or generating one or more activities selected from the group consisting of sll0254-protein in a non-human organism or a part thereof, preferably a microorganism, a plant cell, a plant or a part thereof, as compared to a corresponding non-transformed wild type non-human organism or a part thereof; and
[3866] (b) growing the non-human organism or a part thereof under conditions which permit the production of glutamine or a composition comprising glutamine in said non-human organism or in the culture medium surrounding said non-human organism.

[3867] Accordingly, the present invention relates to a process for the production of proline, which comprises
[3868] (a) increasing or generating one or more activities selected from the group consisting of sll0254-protein in a non-human organism or a part thereof, preferably a microorganism, a plant cell, a plant or a part thereof, as compared to a corresponding non-transformed wild type non-human organism or a part thereof; and
[3869] (b) growing the non-human organism or a part thereof under conditions which permit the production of proline or a composition comprising proline in said non-human organism or in the culture medium surrounding said non-human organism.

[3870] Accordingly, the present invention relates to a process for the production of proline, which comprises
[3871] (a) increasing or generating one or more activities selected from the group consisting of polyphosphate kinase in a non-human organism or a part thereof, preferably a microorganism, a plant cell, a plant or a part thereof, as compared to a corresponding non-transformed wild type non-human organism or a part thereof; and
[3872] (b) growing the non-human organism or a part thereof under conditions which permit the production of proline or a composition comprising proline in said non-human organism or in the culture medium surrounding said non-human organism.

[3873] Accordingly, the present invention relates to a process for the production of proline, which comprises
[3874] (a) increasing or generating one or more activities selected from the group consisting of sll0354-protein in a non-human organism or a part thereof, preferably a microorganism, a plant cell, a plant or a part thereof, as compared to a corresponding non-transformed wild type non-human organism or a part thereof; and
[3875] (b) growing the non-human organism or a part thereof under conditions which permit the production of proline or a composition comprising proline in said non-human organism or in the culture medium surrounding said non-human organism.

[3876] Accordingly, the present invention relates to a process for the production of proline, which comprises
[3877] (a) increasing or generating one or more activities selected from the group consisting of urease subunit in a non-human organism or a part thereof, preferably a microorganism, a plant cell, a plant or a part thereof, as compared to a corresponding non-transformed wild type non-human organism or a part thereof; and
[3878] (b) growing the non-human organism or a part thereof under conditions which permit the production of proline or a composition comprising proline in said non-human organism or in the culture medium surrounding said non-human organism.

[3879] Accordingly, the present invention relates to a process for the production of arginine, which comprises
[3880] (a) increasing or generating one or more activities selected from the group consisting of NAD(P)H-quinone oxidoreductase subunit in a non-human organism or a part thereof, preferably a microorganism, a plant cell, a plant or a part thereof, as compared to a corresponding non-transformed wild type non-human organism or a part thereof; and
[3881] (b) growing the non-human organism or a part thereof under conditions which permit the production of arginine or a composition comprising arginine in said non-human organism or in the culture medium surrounding said non-human organism.

[3882] Accordingly, the present invention relates to a process for the production of proline, which comprises
[3883] (a) increasing or generating one or more activities selected from the group consisting of quinolinate synthetase in a non-human organism or a part thereof, preferably a microorganism, a plant cell, a plant or a part thereof, as compared to a corresponding non-transformed wild type non-human organism or a part thereof; and
[3884] (b) growing the non-human organism or a part thereof under conditions which permit the production of proline or a composition comprising proline in said non-human organism or in the culture medium surrounding said non-human organism.

[3885] Accordingly, the present invention relates to a process for the production of glutamate, which comprises
[3886] (a) increasing or generating one or more activities selected from the group consisting of permease protein of phosphate ABC transporter in a non-human organism or a part thereof, preferably a microorganism, a plant cell, a plant or a part thereof, as compared to a corresponding non-transformed wild type non-human organism or a part thereof; and
[3887] (b) growing the non-human organism or a part thereof under conditions which permit the production of glutamate or a composition comprising glutamate in said non-human organism or in the culture medium surrounding said non-human organism.

[3888] Accordingly, the present invention relates to a process for the production of proline, which comprises
[3889] (a) increasing or generating one or more activities selected from the group consisting of permease protein of phosphate ABC transporter in a non-human organism or a part thereof, preferably a microorganism, a plant cell, a plant or a part thereof, as compared to a corresponding non-transformed wild type non-human organism or a part thereof; and
[3890] (b) growing the non-human organism or a part thereof under conditions which permit the production of proline or a composition comprising proline in said non-human organism or in the culture medium surrounding said non-human organism.

[3891] Accordingly, the present invention relates to a process for the production of arginine, which comprises
[3892] (a) increasing or generating one or more activities selected from the group consisting of oxireductase in a non-human organism or a part thereof, preferably a microorganism, a plant cell, a plant or a part thereof, as compared to a corresponding non-transformed wild type non-human organism or a part thereof; and
[3893] (b) growing the non-human organism or a part thereof under conditions which permit the production of arginine or a composition comprising arginine in said non-human organism or in the culture medium surrounding said non-human organism.

[3894] Accordingly, the present invention relates to a process for the production of glutamate, which comprises
[3895] (a) increasing or generating one or more activities selected from the group consisting of oxireductase in a non-human organism or a part thereof, preferably a microorganism, a plant cell, a plant or a part thereof, as compared to a corresponding non-transformed wild type non-human organism or a part thereof; and
[3896] (b) growing the non-human organism or a part thereof under conditions which permit the production of glutamate or a composition comprising glutamate in said non-human organism or in the culture medium surrounding said non-human organism.

[3897] Accordingly, the present invention relates to a process for the production of glutamine, which comprises
[3898] (a) increasing or generating one or more activities selected from the group consisting of oxireductase in a non-human organism or a part thereof, preferably a microorganism, a plant cell, a plant or a part thereof, as compared to a corresponding non-transformed wild type non-human organism or a part thereof; and
[3899] (b) growing the non-human organism or a part thereof under conditions which permit the production of glutamine or a composition comprising glutamine in said non-human organism or in the culture medium surrounding said non-human organism.

[3900] Accordingly, the present invention relates to a process for the production of arginine, which comprises
[3901] (a) increasing or generating one or more activities selected from the group consisting of malate dehydrogenase in a non-human organism or a part thereof, preferably a microorganism, a plant cell, a plant or a part thereof, as compared to a corresponding non-transformed wild type non-human organism or a part thereof; and
[3902] (b) growing the non-human organism or a part thereof under conditions which permit the production of arginine or a composition comprising arginine in said non-human organism or in the culture medium surrounding said non-human organism.

[3903] Accordingly, the present invention relates to a process for the production of glutamine, which comprises
[3904] (a) increasing or generating one or more activities selected from the group consisting of malate dehydrogenase in a non-human organism or a part thereof, preferably a microorganism, a plant cell, a plant or a part thereof, as compared to a corresponding non-transformed wild type non-human organism or a part thereof; and
[3905] (b) growing the non-human organism or a part thereof under conditions which permit the production of glutamine or a composition comprising glutamine in said non-human organism or in the culture medium surrounding said non-human organism.

[3906] Accordingly, the present invention relates to a process for the production of proline, which comprises
[3907] (a) increasing or generating one or more activities selected from the group consisting of malate dehydrogenase in a non-human organism or a part thereof, preferably a microorganism, a plant cell, a plant or a part thereof, as compared to a corresponding non-transformed wild type non-human organism or a part thereof; and
[3908] (b) growing the non-human organism or a part thereof under conditions which permit the production of proline or a composition comprising proline in said non-human organism or in the culture medium surrounding said non-human organism.

[3909] Accordingly, the present invention relates to a process for the production of proline, which comprises
[3910] (a) increasing or generating one or more activities selected from the group consisting of phosphoribosylaminoimidazole carboxylase catalytic subunit in a non-human organism or a part thereof, preferably a microorganism, a plant cell, a plant or a part thereof, as compared to a corresponding non-transformed wild type non-human organism or a part thereof; and
[3911] (b) growing the non-human organism or a part thereof under conditions which permit the production of proline or a composition comprising proline in said non-human organism or in the culture medium surrounding said non-human organism.

[3912] Accordingly, the present invention relates to a process for the production of glutamine, which comprises
[3913] (a) increasing or generating one or more activities selected from the group consisting of 3-deoxy-7-phosphoheptulonate synthase in a non-human organism or a part thereof, preferably a microorganism, a plant cell, a plant or a part thereof, as compared to a corresponding non-transformed wild type non-human organism or a part thereof; and
[3914] (b) growing the non-human organism or a part thereof under conditions which permit the production of glutamine or a composition comprising glutamine in said non-human organism or in the culture medium surrounding said non-human organism.

[3915] Accordingly, the present invention relates to a process for the production of proline, which comprises
[3916] (a) increasing or generating one or more activities selected from the group consisting of glycogen synthase in a non-human organism or a part thereof, preferably a microorganism, a plant cell, a plant or a part thereof, as compared to a corresponding non-transformed wild type non-human organism or a part thereof; and
[3917] (b) growing the non-human organism or a part thereof under conditions which permit the production of proline or a composition comprising proline in said non-human organism or in the culture medium surrounding said non-human organism.

[3918] Accordingly, the present invention relates to a process for the production of glutamate, which comprises
[3919] (a) increasing or generating one or more activities selected from the group consisting of carbon dioxide concentrating mechanism protein in a non-human organism or a part thereof, preferably a microorganism, a plant cell, a plant or a part thereof, as compared to a corresponding non-transformed wild type non-human organism or a part thereof; and
[3920] (b) growing the non-human organism or a part thereof under conditions which permit the production of glutamate or a composition comprising glutamate in said non-human organism or in the culture medium surrounding said non-human organism.

[3921] Accordingly, the present invention relates to a process for the production of glutamine, which comprises
[3922] (a) increasing or generating one or more activities selected from the group consisting of carbon dioxide concentrating mechanism protein in a non-human organism or a part thereof, preferably a microorganism, a plant cell, a plant or a part thereof, as compared to a corresponding non-transformed wild type non-human organism or a part thereof; and
[3923] (b) growing the non-human organism or a part thereof under conditions which permit the production of glutamine or a composition comprising glutamine in said non-human organism or in the culture medium surrounding said non-human organism.

[3924] Accordingly, the present invention relates to a process for the production of proline, which comprises
[3925] (a) increasing or generating one or more activities selected from the group consisting of carbon dioxide concentrating mechanism protein in a non-human organism or a part thereof, preferably a microorganism, a plant cell, a plant or a part thereof, as compared to a corresponding non-transformed wild type non-human organism or a part thereof; and
[3926] (b) growing the non-human organism or a part thereof under conditions which permit the production of proline or a composition comprising proline in said non-human organism or in the culture medium surrounding said non-human organism.

[3927] Accordingly, the present invention relates to a process for the production of proline, which comprises
[3928] (a) increasing or generating one or more activities selected from the group consisting of phosphoribosylformyl glycinamidine synthase subunit in a non-human organism or a part thereof, preferably a microorganism, a plant cell, a plant or a part thereof, as compared to a corresponding non-transformed wild type non-human organism or a part thereof; and
[3929] (b) growing the non-human organism or a part thereof under conditions which permit the production of proline or a composition comprising proline in said non-human organism or in the culture medium surrounding said non-human organism.

[3930] Accordingly, the present invention relates to a process for the production of glutamate, which comprises
[3931] (a) increasing or generating one or more activities selected from the group consisting of coproporphyrinogen oxidase in a non-human organism or a part thereof, preferably a microorganism, a plant cell, a plant or a part thereof, as compared to a corresponding non-transformed wild type non-human organism or a part thereof; and
[3932] (b) growing the non-human organism or a part thereof under conditions which permit the production of glutamate or a composition comprising glutamate in said non-human organism or in the culture medium surrounding said non-human organism.

[3933] Accordingly, the present invention relates to a process for the production of glutamine, which comprises
[3934] (a) increasing or generating one or more activities selected from the group consisting of glycogen (starch) synthase in a non-human organism or a part thereof, preferably a microorganism, a plant cell, a plant or a part thereof, as compared to a corresponding non-transformed wild type non-human organism or a part thereof; and
[3935] (b) growing the non-human organism or a part thereof under conditions which permit the production of glutamine or a composition comprising glutamine in said non-human organism or in the culture medium surrounding said non-human organism.

[3936] Accordingly, the present invention relates to a process for the production of proline, which comprises
[3937] (a) increasing or generating one or more activities selected from the group consisting of glycogen (starch) synthase in a non-human organism or a part thereof, preferably a microorganism, a plant cell, a plant or a part thereof, as compared to a corresponding non-transformed wild type non-human organism or a part thereof; and
[3938] (b) growing the non-human organism or a part thereof under conditions which permit the production of proline or a composition comprising proline in said non-human organism or in the culture medium surrounding said non-human organism.

[3939] Accordingly, the present invention relates to a process for the production of glutamine, which comprises
[3940] (a) increasing or generating one or more activities selected from the group consisting of fatty acid desaturase in a non-human organism or a part thereof, preferably a microorganism, a plant cell, a plant or a part thereof, as compared to a corresponding non-transformed wild type non-human organism or a part thereof; and
[3941] (b) growing the non-human organism or a part thereof under conditions which permit the production of glutamine or a composition comprising glutamine in said non-human organism or in the culture medium surrounding said non-human organism.

[3942] Accordingly, the present invention relates to a process for the production of glutamate, which comprises
[3943] (a) increasing or generating one or more activities selected from the group consisting of CTP synthetase in a non-human organism or a part thereof, preferably a microorganism, a plant cell, a plant or a part thereof, as compared to a corresponding non-transformed wild type non-human organism or a part thereof; and
[3944] (b) growing the non-human organism or a part thereof under conditions which permit the production of glutamate or a composition comprising glutamate in said non-human organism or in the culture medium surrounding said non-human organism.

[3945] Accordingly, the present invention relates to a process for the production of glutamate, which comprises
[3946] (a) increasing or generating one or more activities selected from the group consisting of nitrate/nitrite transport protein in a non-human organism or a part thereof, preferably a microorganism, a plant cell, a plant or a part thereof, as compared to a corresponding non-transformed wild type non-human organism or a part thereof; and
[3947] (b) growing the non-human organism or a part thereof under conditions which permit the production of glutamate or a composition comprising glutamate in said non-human organism or in the culture medium surrounding said non-human organism.

[3948] Accordingly, the present invention relates to a process for the production of glutamate, which comprises
[3949] (a) increasing or generating one or more activities selected from the group consisting of CDP-diacylglycerol-glycerol-3-phosphate 3-phosphatidyltransferase in a non-human organism or a part thereof, preferably a microorganism, a plant cell, a plant or a part thereof, as compared to a corresponding non-transformed wild type non-human organism or a part thereof; and
[3950] (b) growing the non-human organism or a part thereof under conditions which permit the production of glutamate or a composition comprising glutamate in said non-human organism or in the culture medium surrounding said non-human organism.

[3951] Accordingly, the present invention relates to a process for the production of arginine, which comprises
[3952] (a) increasing or generating one or more activities selected from the group consisting of glutathione S-transferase in a non-human organism or a part thereof, preferably a microorganism, a plant cell, a plant or a part thereof, as compared to a corresponding non-transformed wild type non-human organism or a part thereof; and
[3953] (b) growing the non-human organism or a part thereof under conditions which permit the production of arginine or a composition comprising arginine in said non-human organism or in the culture medium surrounding said non-human organism.

[3954] Accordingly, the present invention relates to a process for the production of glutamine, which comprises
[3955] (a) increasing or generating one or more activities selected from the group consisting of glutathione S-transferase in a non-human organism or a part thereof, preferably a microorganism, a plant cell, a plant or a part thereof, as compared to a corresponding non-transformed wild type non-human organism or a part thereof; and
[3956] (b) growing the non-human organism or a part thereof under conditions which permit the production of glutamine or a composition comprising glutamine in said non-human organism or in the culture medium surrounding said non-human organism.

[3957] Accordingly, the present invention relates to a process for the production of proline, which comprises
[3958] (a) increasing or generating one or more activities selected from the group consisting of glutathione S-transferase in a non-human organism or a part thereof, preferably a microorganism, a plant cell, a plant or a part thereof, as compared to a corresponding non-transformed wild type non-human organism or a part thereof; and
[3959] (b) growing the non-human organism or a part thereof under conditions which permit the production of proline or a composition comprising proline in said non-human organism or in the culture medium surrounding said non-human organism.

[3960] Accordingly, the present invention relates to a process for the production of arginine, which comprises
[3961] (a) increasing or generating one or more activities selected from the group consisting of exopolyphosphatase in a non-human organism or a part thereof, preferably a microorganism, a plant cell, a plant or a part thereof, as compared to a corresponding non-transformed wild type non-human organism or a part thereof; and
[3962] (b) growing the non-human organism or a part thereof under conditions which permit the production of arginine or a composition comprising arginine in said non-human organism or in the culture medium surrounding said non-human organism.

[3963] Accordingly, the present invention relates to a process for the production of proline, which comprises
[3964] (a) increasing or generating one or more activities selected from the group consisting of 4-alpha-glucanotransferase in a non-human organism or a part thereof, preferably a microorganism, a plant cell, a plant or a part thereof, as compared to a corresponding non-transformed wild type non-human organism or a part thereof; and
[3965] (b) growing the non-human organism or a part thereof under conditions which permit the production of proline or a composition comprising proline in said non-human organism or in the culture medium surrounding said non-human organism.

[3966] Accordingly, the present invention relates to a process for the production of proline, which comprises
[3967] (a) increasing or generating one or more activities selected from the group consisting of alanine dehydrogenase in a non-human organism or a part thereof, preferably a microorganism, a plant cell, a plant or a part thereof, as compared to a corresponding non-transformed wild type non-human organism or a part thereof; and
[3968] (b) growing the non-human organism or a part thereof under conditions which permit the production of proline or a composition comprising proline in said non-human organism or in the culture medium surrounding said non-human organism.

[3969] Accordingly, the present invention relates to a process for the production of arginine, which comprises
[3970] (a) increasing or generating one or more activities selected from the group consisting of sll1761-protein in a non-human organism or a part thereof, preferably a microorganism, a plant cell, a plant or a part thereof, as compared to a corresponding non-transformed wild type non-human organism or a part thereof; and
[3971] (b) growing the non-human organism or a part thereof under conditions which permit the production of arginine or a composition comprising arginine in said non-human organism or in the culture medium surrounding said non-human organism.

[3972] Accordingly, the present invention relates to a process for the production of proline, which comprises
[3973] (a) increasing or generating one or more activities selected from the group consisting of sll1761-protein in a non-human organism or a part thereof, preferably a microorganism, a plant cell, a plant or a part thereof, as compared to a corresponding non-transformed wild type non-human organism or a part thereof; and
[3974] (b) growing the non-human organism or a part thereof under conditions which permit the production of proline or a composition comprising proline in said non-human organism or in the culture medium surrounding said non-human organism.

[3975] Accordingly, the present invention relates to a process for the production of glutamate, which comprises
[3976] (a) increasing or generating one or more activities selected from the group consisting of coproporphyrinogen III oxidase in a non-human organism or a part thereof, preferably a microorganism, a plant cell, a plant or a part thereof, as compared to a corresponding non-transformed wild type non-human organism or a part thereof; and
[3977] (b) growing the non-human organism or a part thereof under conditions which permit the production of glutamate or a composition comprising glutamate in said non-human organism or in the culture medium surrounding said non-human organism.

[3978] Accordingly, the present invention relates to a process for the production of glutamine, which comprises
[3979] (a) increasing or generating one or more activities selected from the group consisting of coproporphyrinogen III oxidase in a non-human organism or a part thereof, preferably a microorganism, a plant cell, a plant or a part thereof, as compared to a corresponding non-transformed wild type non-human organism or a part thereof; and
[3980] (b) growing the non-human organism or a part thereof under conditions which permit the production of glutamine or a composition comprising glutamine in said non-human organism or in the culture medium surrounding said non-human organism.

[3981] Accordingly, the present invention relates to a process for the production of proline, which comprises
[3982] (a) increasing or generating one or more activities selected from the group consisting of coproporphyrinogen III oxidase in a non-human organism or a part thereof, preferably a microorganism, a plant cell, a plant or a part thereof, as compared to a corresponding non-transformed wild type non-human organism or a part thereof; and
[3983] (b) growing the non-human organism or a part thereof under conditions which permit the production of proline or a composition comprising proline in said non-human organism or in the culture medium surrounding said non-human organism.

[3984] Accordingly, the present invention relates to a process for the production of glutamate, which comprises
[3985] (a) increasing or generating one or more activities selected from the group consisting of cation-transporting ATPase in a non-human organism or a part thereof, preferably a microorganism, a plant cell, a plant or a part thereof, as compared to a corresponding non-transformed wild type non-human organism or a part thereof; and
[3986] (b) growing the non-human organism or a part thereof under conditions which permit the production of glutamate or a composition comprising glutamate in said non-human organism or in the culture medium surrounding said non-human organism.

[3987] Accordingly, the present invention relates to a process for the production of glutamine, which comprises
[3988] (a) increasing or generating one or more activities selected from the group consisting of cation-transporting ATPase in a non-human organism or a part thereof, preferably a microorganism, a plant cell, a plant or a part thereof, as compared to a corresponding non-transformed wild type non-human organism or a part thereof; and
[3989] (b) growing the non-human organism or a part thereof under conditions which permit the production of glutamine or a composition comprising glutamine in said non-human organism or in the culture medium surrounding said non-human organism.

[3990] Accordingly, the present invention relates to a process for the production of arginine, which comprises
[3991] (a) increasing or generating one or more activities selected from the group consisting of glycosidase in a non-human organism or a part thereof, preferably a microorganism, a plant cell, a plant or a part thereof, as compared to a corresponding non-transformed wild type non-human organism or a part thereof; and
[3992] (b) growing the non-human organism or a part thereof under conditions which permit the production of arginine or a composition comprising arginine in said non-human organism or in the culture medium surrounding said non-human organism.

[3993] Accordingly, the present invention relates to a process for the production of glutamine, which comprises
[3994] (a) increasing or generating one or more activities selected from the group consisting of glycosidase in a non-human organism or a part thereof, preferably a microorganism, a plant cell, a plant or a part thereof, as compared to a corresponding non-transformed wild type non-human organism or a part thereof; and
[3995] (b) growing the non-human organism or a part thereof under conditions which permit the production of glutamine or a composition comprising glutamine in said non-human organism or in the culture medium surrounding said non-human organism.

[3996] Accordingly, the present invention relates to a process for the production of proline, which comprises
[3997] (a) increasing or generating one or more activities selected from the group consisting of phosphoribosylglycinamide formyltransferase in a non-human organism or a part thereof, preferably a microorganism, a plant cell, a plant or a part thereof, as compared to a corresponding non-transformed wild type non-human organism or a part thereof; and
[3998] (b) growing the non-human organism or a part thereof under conditions which permit the production of proline or a composition comprising proline in said non-human organism or in the culture medium surrounding said non-human organism.

[3999] Accordingly, the present invention relates to a process for the production of glutamate, which comprises
[4000] (a) increasing or generating one or more activities selected from the group consisting of bifunctional purine biosynthesis protein in a non-human organism or a part thereof, preferably a microorganism, a plant cell, a plant or a part thereof, as compared to a corresponding non-transformed wild type non-human organism or a part thereof; and
[4001] (b) growing the non-human organism or a part thereof under conditions which permit the production of glutamate or a composition comprising glutamate in said non-human organism or in the culture medium surrounding said non-human organism.

[4002] Accordingly, the present invention relates to a process for the production of proline, which comprises
[4003] (a) increasing or generating one or more activities selected from the group consisting of slr0600-protein in a non-human organism or a part thereof, preferably a microorganism, a plant cell, a plant or a part thereof, as compared to a corresponding non-transformed wild type non-human organism or a part thereof; and
[4004] (b) growing the non-human organism or a part thereof under conditions which permit the production of proline or a composition comprising proline in said non-human organism or in the culture medium surrounding said non-human organism.

[4005] Accordingly, the present invention relates to a process for the production of proline, which comprises
[4006] (a) increasing or generating one or more activities selected from the group consisting of pyrroline carboxylate reductase in a non-human organism or a part thereof, preferably a microorganism, a plant cell, a plant or a part thereof, as compared to a corresponding non-transformed wild type non-human organism or a part thereof; and
[4007] (b) growing the non-human organism or a part thereof under conditions which permit the production of proline or a composition comprising proline in said non-human organism or in the culture medium surrounding said non-human organism.

[4008] Accordingly, the present invention relates to a process for the production of arginine, which comprises
[4009] (a) increasing or generating one or more activities selected from the group consisting of Glu/Leu/Phe/Val dehydrogenase in a non-human organism or a part thereof, preferably a microorganism, a plant cell, a plant or a part thereof, as compared to a corresponding non-transformed wild type non-human organism or a part thereof; and
[4010] (b) growing the non-human organism or a part thereof under conditions which permit the production of arginine or a composition comprising arginine in said non-human organism or in the culture medium surrounding said non-human organism.

[4011] Accordingly, the present invention relates to a process for the production of arginine, which comprises
[4012] (a) increasing or generating one or more activities selected from the group consisting of geranylgeranyl pyrophosphate synthase in a non-human organism or a part thereof, preferably a microorganism, a plant cell, a plant or a part thereof, as compared to a corresponding non-transformed wild type non-human organism or a part thereof; and
[4013] (b) growing the non-human organism or a part thereof under conditions which permit the production of arginine or a composition comprising arginine in said non-human organism or in the culture medium surrounding said non-human organism.

[4014] Accordingly, the present invention relates to a process for the production of glutamine, which comprises
[4015] (a) increasing or generating one or more activities selected from the group consisting of geranylgeranyl pyrophosphate synthase in a non-human organism or a part thereof, preferably a microorganism, a plant cell, a plant or a part thereof, as compared to a corresponding non-transformed wild type non-human organism or a part thereof; and
[4016] (b) growing the non-human organism or a part thereof under conditions which permit the production of glutamine or a composition comprising glutamine in said non-human organism or in the culture medium surrounding said non-human organism.

[4017] Accordingly, the present invention relates to a process for the production of proline, which comprises
[4018] (a) increasing or generating one or more activities selected from the group consisting of geranylgeranyl pyrophosphate synthase in a non-human organism or a part thereof, preferably a microorganism, a plant cell, a plant or a part thereof, as compared to a corresponding non-transformed wild type non-human organism or a part thereof; and
[4019] (b) growing the non-human organism or a part thereof under conditions which permit the production of proline or a composition comprising proline in said non-human organism or in the culture medium surrounding said non-human organism.

[4020] Accordingly, the present invention relates to a process for the production of arginine, which comprises
[4021] (a) increasing or generating one or more activities selected from the group consisting of circadian clock protein in a non-human organism or a part thereof, preferably a microorganism, a plant cell, a plant or a part thereof, as compared to a corresponding non-transformed wild type non-human organism or a part thereof; and
[4022] (b) growing the non-human organism or a part thereof under conditions which permit the production of arginine or a composition comprising arginine in said non-human organism or in the culture medium surrounding said non-human organism.

[4023] Accordingly, the present invention relates to a process for the production of proline, which comprises
[4024] (a) increasing or generating one or more activities selected from the group consisting of circadian clock protein in a non-human organism or a part thereof, preferably a microorganism, a plant cell, a plant or a part thereof, as compared to a corresponding non-transformed wild type non-human organism or a part thereof; and
[4025] (b) growing the non-human organism or a part thereof under conditions which permit the production of proline or a composition comprising proline in said non-human organism or in the culture medium surrounding said non-human organism.

[4026] Accordingly, the present invention relates to a process for the production of proline, which comprises
[4027] (a) increasing or generating one or more activities selected from the group consisting of amine oxidase in a non-human organism or a part thereof, preferably a microorganism, a plant cell, a plant or a part thereof, as compared to a corresponding non-transformed wild type non-human organism or a part thereof; and
[4028] (b) growing the non-human organism or a part thereof under conditions which permit the production of proline or a composition comprising proline in said non-human organism or in the culture medium surrounding said non-human organism.

[4029] Accordingly, the present invention relates to a process for the production of glutamate, which comprises
[4030] (a) increasing or generating one or more activities selected from the group consisting of dihydrolipoamide dehydrogenase in a non-human organism or a part thereof, preferably a microorganism, a plant cell, a plant or a part thereof, as compared to a corresponding non-transformed wild type non-human organism or a part thereof; and
[4031] (b) growing the non-human organism or a part thereof under conditions which permit the production of glutamate or a composition comprising glutamate in said non-human organism or in the culture medium surrounding said non-human organism.

[4032] Accordingly, the present invention relates to a process for the production of arginine, which comprises
[4033] (a) increasing or generating one or more activities selected from the group consisting of gamma-glutamyltranspeptidase in a non-human organism or a part thereof, preferably a microorganism, a plant cell, a plant or a part thereof, as compared to a corresponding non-transformed wild type non-human organism or a part thereof; and
[4034] (b) growing the non-human organism or a part thereof under conditions which permit the production of arginine or a composition comprising arginine in said non-human organism or in the culture medium surrounding said non-human organism.

[4035] Accordingly, the present invention relates to a process for the production of glutamate, which comprises
[4036] (a) increasing or generating one or more activities selected from the group consisting of gamma-glutamyltranspeptidase in a non-human organism or a part thereof, preferably a microorganism, a plant cell, a plant or a part thereof, as compared to a corresponding non-transformed wild type non-human organism or a part thereof; and
[4037] (b) growing the non-human organism or a part thereof under conditions which permit the production of glutamate or a composition comprising glutamate in said non-human organism or in the culture medium surrounding said non-human organism.

[4038] Accordingly, the present invention relates to a process for the production of arginine, which comprises
[4039] (a) increasing or generating one or more activities selected from the group consisting of arginine decarboxylase in a non-human organism or a part thereof, preferably a microorganism, a plant cell, a plant or a part thereof, as compared to a corresponding non-transformed wild type non-human organism or a part thereof; and
[4040] (b) growing the non-human organism or a part thereof under conditions which permit the production of arginine or a composition comprising arginine in said non-human organism or in the culture medium surrounding said non-human organism.

[4041] Accordingly, the present invention relates to a process for the production of glutamate, which comprises
[4042] (a) increasing or generating one or more activities selected from the group consisting of CDP-diglyceride synthetase in a non-human organism or a part thereof, preferably a microorganism, a plant cell, a plant or a part thereof, as compared to a corresponding non-transformed wild type non-human organism or a part thereof; and
[4043] (b) growing the non-human organism or a part thereof under conditions which permit the production of glutamate or a composition comprising glutamate in said non-human organism or in the culture medium surrounding said non-human organism.

[4044] Accordingly, the present invention relates to a process for the production of glutamate, which comprises
[4045] (a) increasing or generating one or more activities selected from the group consisting of carbohydrate kinase in a non-human organism or a part thereof, preferably a microorganism, a plant cell, a plant or a part thereof, as compared to a corresponding non-transformed wild type non-human organism or a part thereof; and
[4046] (b) growing the non-human organism or a part thereof under conditions which permit the production of glutamate or a composition comprising glutamate in said non-human organism or in the culture medium surrounding said non-human organism.

[4047] Accordingly, the present invention relates to a process for the production of glutamine, which comprises (a) increasing or generating one or more activities selected from the group consisting of iron(III) dicitrate-binding protein in a non-human organism or a part thereof, preferably a microorganism, a plant cell, a plant or a part thereof, as compared to a corresponding non-transformed wild type non-human organism or a part thereof; and
[4048] (b) growing the non-human organism or a part thereof under conditions which permit the production of glutamine or a composition comprising glutamine in said non-human organism or in the culture medium surrounding said non-human organism.

[4049] Accordingly, the present invention relates to a process for the production of proline, which comprises
[4050] (a) increasing or generating one or more activities selected from the group consisting of Photosystem I reaction center subunit XI in a non-human organism or a part thereof, preferably a microorganism, a plant cell, a plant or a part thereof, as compared to a corresponding non-transformed wild type non-human organism or a part thereof; and
[4051] (b) growing the non-human organism or a part thereof under conditions which permit the production of proline or a composition comprising proline in said non-human organism or in the culture medium surrounding said non-human organism.

[4052] Accordingly, the present invention relates to a process for the production of arginine, which comprises
[4053] (a) increasing or generating one or more activities selected from the group consisting of photosystem II protein in a non-human organism or a part thereof, preferably a microorganism, a plant cell, a plant or a part thereof, as compared to a corresponding non-transformed wild type non-human organism or a part thereof; and
[4054] (b) growing the non-human organism or a part thereof under conditions which permit the production of arginine or a composition comprising arginine in said non-human organism or in the culture medium surrounding said non-human organism.

[4055] Accordingly, the present invention relates to a process for the production of glutamine, which comprises
[4056] (a) increasing or generating one or more activities selected from the group consisting of photosystem II protein in a non-human organism or a part thereof, preferably a microorganism, a plant cell, a plant or a part thereof, as compared to a corresponding non-transformed wild type non-human organism or a part thereof; and
[4057] (b) growing the non-human organism or a part thereof under conditions which permit the production of glutamine or a composition comprising glutamine in said non-human organism or in the culture medium surrounding said non-human organism.

[4058] Accordingly, the present invention relates to a process for the production of proline, which comprises
[4059] (a) increasing or generating one or more activities selected from the group consisting of glutamine amidotransferase in a non-human organism or a part thereof, preferably a microorganism, a plant cell, a plant or a part thereof, as compared to a corresponding non-transformed wild type non-human organism or a part thereof; and
[4060] (b) growing the non-human organism or a part thereof under conditions which permit the production of proline or a composition comprising proline in said non-human organism or in the culture medium surrounding said non-human organism.

[4061] Accordingly, the present invention relates to a process for the production of glutamate, which comprises
[4062] (a) increasing or generating one or more activities selected from the group consisting of glycerol-3-phosphate dehydrogenase in a non-human organism or a part thereof, preferably a microorganism, a plant cell, a plant or a part thereof, as compared to a corresponding non-transformed wild type non-human organism or a part thereof; and
[4063] (b) growing the non-human organism or a part thereof under conditions which permit the production of glutamate or a composition comprising glutamate in said non-human organism or in the culture medium surrounding said non-human organism.

[4064] Accordingly, the present invention relates to a process for the production of proline, which comprises
[4065] (a) increasing or generating one or more activities selected from the group consisting of phosphoadenosine phosphosulfate reductase in a non-human organism or a part thereof, preferably a microorganism, a plant cell, a plant or a part thereof, as compared to a corresponding non-transformed wild type non-human organism or a part thereof; and
[4066] (b) growing the non-human organism or a part thereof under conditions which permit the production of proline or a composition comprising proline in said non-human organism or in the culture medium surrounding said non-human organism.

[4067] Accordingly, the present invention relates to a process for the production of glutamate, which comprises
[4068] (a) increasing or generating one or more activities selected from the group consisting of riboflavin biosynthesis protein in a non-human organism or a part thereof, preferably a microorganism, a plant cell, a plant or a part thereof, as compared to a corresponding non-transformed wild type non-human organism or a part thereof; and
[4069] (b) growing the non-human organism or a part thereof under conditions which permit the production of glutamate or a composition comprising glutamate in said non-human organism or in the culture medium surrounding said non-human organism.

[4070] Accordingly, the present invention relates to a process for the production of glutamate, which comprises
[4071] (a) increasing or generating one or more activities selected from the group consisting of malonyl CoA-acyl carrier protein transacylase in a non-human organism or a part thereof, preferably a microorganism, a plant cell, a plant or a part thereof, as compared to a corresponding non-transformed wild type non-human organism or a part thereof; and
[4072] (b) growing the non-human organism or a part thereof under conditions which permit the production of glutamate or a composition comprising glutamate in said non-human organism or in the culture medium surrounding said non-human organism.

[4073] Accordingly, the present invention relates to a process for the production of glutamine, which comprises (a) increasing or generating one or more activities selected from the group consisting of malonyl CoA-acyl carrier protein transacylase in a non-human organism or a part thereof, preferably a microorganism, a plant cell, a plant or a part thereof, as compared to a corresponding non-transformed wild type non-human organism or a part thereof; and
[4074] (b) growing the non-human organism or a part thereof under conditions which permit the production of glutamine or a composition comprising glutamine in said non-human organism or in the culture medium surrounding said non-human organism.

[4075] Accordingly, the present invention relates to a process for the production of proline, which comprises
[4076] (a) increasing or generating one or more activities selected from the group consisting of short-chain alcohol dehydrogenase family in a non-human organism or a part thereof, preferably a microorganism, a plant cell, a plant or a part thereof, as compared to a corresponding non-transformed wild type non-human organism or a part thereof; and
[4077] (b) growing the non-human organism or a part thereof under conditions which permit the production of proline or a composition comprising proline in said non-human organism or in the culture medium surrounding said non-human organism.

[4078] Accordingly, the present invention relates to a process for the production of glutamine, which comprises
[4079] (a) increasing or generating one or more activities selected from the group consisting of Sec-independent protein translocase subunit in a non-human organism or a part thereof, preferably a microorganism, a plant cell, a plant or a part thereof, as compared to a corresponding non-transformed wild type non-human organism or a part thereof; and
[4080] (b) growing the non-human organism or a part thereof under conditions which permit the production of glutamine or a composition comprising glutamine in said non-human organism or in the culture medium surrounding said non-human organism.

[4081] Accordingly, the present invention relates to a process for the production of proline, which comprises
[4082] (a) increasing or generating one or more activities selected from the group consisting of Sec-independent protein translocase subunit in a non-human organism or a part thereof, preferably a microorganism, a plant cell, a plant or a part thereof, as compared to a corresponding non-transformed wild type non-human organism or a part thereof; and
[4083] (b) growing the non-human organism or a part thereof under conditions which permit the production of proline or a composition comprising proline in said non-human organism or in the culture medium surrounding said non-human organism.

[4084] Accordingly, the present invention relates to a process for the production of proline, which comprises
[4085] (a) increasing or generating one or more activities selected from the group consisting of cell division protein in a non-human organism or a part thereof, preferably a microorganism, a plant cell, a plant or a part thereof, as compared to a corresponding non-transformed wild type non-human organism or a part thereof; and
[4086] (b) growing the non-human organism or a part thereof under conditions which permit the production of proline or a composition comprising proline in said non-human organism or in the culture medium surrounding said non-human organism.

[4087] Accordingly, the present invention relates to a process for the production of proline, which comprises
[4088] (a) increasing or generating one or more activities selected from the group consisting of branched-chain amino acid ABC transporter permease protein in a non-human organism or a part thereof, preferably a microorganism, a plant cell, a plant or a part thereof, as compared to a corresponding non-transformed wild type non-human organism or a part thereof; and
[4089] (b) growing the non-human organism or a part thereof under conditions which permit the production of proline or a composition comprising proline in said non-human organism or in the culture medium surrounding said non-human organism.

[4090] Accordingly, the present invention relates to a process for the production of proline, which comprises
[4091] (a) increasing or generating one or more activities selected from the group consisting of amino acid ABC transporter permease protein in a non-human organism or a part thereof, preferably a microorganism, a plant cell, a plant or a part thereof, as compared to a corresponding non-transformed wild type non-human organism or a part thereof; and
[4092] (b) growing the non-human organism or a part thereof under conditions which permit the production of proline or a composition comprising proline in said non-human organism or in the culture medium surrounding said non-human organism.

[4093] Accordingly, the present invention relates to a process for the production of proline, which comprises
[4094] (a) increasing or generating one or more activities selected from the group consisting of TTC0768-protein in a non-human organism or a part thereof, preferably a microorganism, a plant cell, a plant or a part thereof, as compared to a corresponding non-transformed wild type non-human organism or a part thereof; and
[4095] (b) growing the non-human organism or a part thereof under conditions which permit the production of proline or a composition comprising proline in said non-human organism or in the culture medium surrounding said non-human organism.

[4096] Accordingly, the present invention relates to a process for the production of glutamine, which comprises
[4097] (a) increasing or generating one or more activities selected from the group consisting of metal-dependent hydrolase in a non-human organism or a part thereof, preferably a microorganism, a plant cell, a plant or a part thereof, as compared to a corresponding non-transformed wild type non-human organism or a part thereof; and
[4098] (b) growing the non-human organism or a part thereof under conditions which permit the production of glutamine or a composition comprising glutamine in said non-human organism or in the culture medium surrounding said non-human organism.

[4099] Accordingly, the present invention relates to a process for the production of glutamate, which comprises
[4100] (a) increasing or generating one or more activities selected from the group consisting of multiple antibiotic resistance protein in a non-human organism or a part thereof, preferably a microorganism, a plant cell, a plant or a part thereof, as compared to a corresponding non-transformed wild type non-human organism or a part thereof; and
[4101] (b) growing the non-human organism or a part thereof under conditions which permit the production of glutamate or a composition comprising glutamate in said non-human organism or in the culture medium surrounding said non-human organism.

[4102] Accordingly, the present invention relates to a process for the production of glutamate, which comprises
[4103] (a) increasing or generating one or more activities selected from the group consisting of TTC1386-protein in a non-human organism or a part thereof, preferably a microorganism, a plant cell, a plant or a part thereof, as compared to a corresponding non-transformed wild type non-human organism or a part thereof; and
[4104] (b) growing the non-human organism or a part thereof under conditions which permit the production of glutamate or a composition comprising glutamate in said non-human organism or in the culture medium surrounding said non-human organism.

[4105] Accordingly, the present invention relates to a process for the production of glutamine, which comprises
[4106] (a) increasing or generating one or more activities selected from the group consisting of homocitrate synthase in a non-human organism or a part thereof, preferably a microorganism, a plant cell, a plant or a part thereof, as compared to a corresponding non-transformed wild type non-human organism or a part thereof; and
[4107] (b) growing the non-human organism or a part thereof under conditions which permit the production of glutamine or a composition comprising glutamine in said non-human organism or in the culture medium surrounding said non-human organism.

[4108] Accordingly, the present invention relates to a process for the production of proline, which comprises
[4109] (a) increasing or generating one or more activities selected from the group consisting of homocitrate synthase in a non-human organism or a part thereof, preferably a microorganism, a plant cell, a plant or a part thereof, as compared to a corresponding non-transformed wild type non-human organism or a part thereof; and
[4110] (b) growing the non-human organism or a part thereof under conditions which permit the production of proline or a composition comprising proline in said non-human organism or in the culture medium surrounding said non-human organism.

[4111] Accordingly, the present invention relates to a process for the production of glutamate, which comprises
[4112] (a) increasing or generating one or more activities selected from the group consisting of oxidoreductase subunit in a non-human organism or a part thereof, preferably a microorganism, a plant cell, a plant or a part thereof, as compared to a corresponding non-transformed wild type non-human organism or a part thereof; and
[4113] (b) growing the non-human organism or a part thereof under conditions which permit the production of glutamate or a composition comprising glutamate in said non-human organism or in the culture medium surrounding said non-human organism.

[4114] Accordingly, the present invention relates to a process for the production of glutamine, which comprises
[4115] (a) increasing or generating one or more activities selected from the group consisting of oxidoreductase subunit in a non-human organism or a part thereof, preferably a microorganism, a plant cell, a plant or a part thereof, as compared to a corresponding non-transformed wild type non-human organism or a part thereof; and
[4116] (b) growing the non-human organism or a part thereof under conditions which permit the production of glutamine or a composition comprising glutamine in said non-human organism or in the culture medium surrounding said non-human organism.

[4117] Accordingly, the present invention relates to a process for the production of glutamate, which comprises
[4118] (a) increasing or generating one or more activities selected from the group consisting of XM_{—}473199-protein in a non-human organism or a part thereof, preferably a microorganism, a plant cell, a plant or a part thereof, as compared to a corresponding non-transformed wild type non-human organism or a part thereof; and
[4119] (b) growing the non-human organism or a part thereof under conditions which permit the production of glutamate or a composition comprising glutamate in said non-human organism or in the culture medium surrounding said non-human organism.

[4120] Accordingly, the present invention relates to a process for the production of glutamine, which comprises
[4121] (a) increasing or generating one or more activities selected from the group consisting of

[4122] XM_{—}473199-protein in a non-human organism or a part thereof, preferably a microorganism, a plant cell, a plant or a part thereof, as compared to a corresponding non-transformed wild type non-human organism or a part thereof; and
[4123] (b) growing the non-human organism or a part thereof under conditions which permit the production of glutamine or a composition comprising glutamine in said non-human organism or in the culture medium surrounding said non-human organism. Accordingly, the present invention relates to a process for the production of proline, which comprises
[4124] (a) increasing or generating one or more activities selected from the group consisting of transcription factor in a non-human organism or a part thereof, preferably a microorganism, a plant cell, a plant or a part thereof, as compared to a corresponding non-transformed wild type non-human organism or a part thereof; and
[4125] (b) growing the non-human organism or a part thereof under conditions which permit the production of proline or a composition comprising proline in said non-human organism or in the culture medium surrounding said non-human organism.

[4126] Accordingly, the present invention relates to a process for the production of glutamate, which comprises
[4127] (a) increasing or generating one or more activities selected from the group consisting of cell division control protein in a non-human organism or a part thereof, preferably a microorganism, a plant cell, a plant or a part thereof, as compared to a corresponding non-transformed wild type non-human organism or a part thereof; and
[4128] (b) growing the non-human organism or a part thereof under conditions which permit the production of glutamate or a composition comprising glutamate in said non-human organism or in the culture medium surrounding said non-human organism.

[4129] Accordingly, the present invention relates to a process for the production of proline, which comprises
[4130] (a) increasing or generating one or more activities selected from the group consisting of cell division control protein in a non-human organism or a part thereof, preferably a microorganism, a plant cell, a plant or a part thereof, as compared to a corresponding non-transformed wild type non-human organism or a part thereof; and
[4131] (b) growing the non-human organism or a part thereof under conditions which permit the production of proline or a composition comprising proline in said non-human organism or in the culture medium surrounding said non-human organism.

[4132] Accordingly, the present invention relates to a process for the production of proline, which comprises
[4133] (a) increasing or generating one or more activities selected from the group consisting of YCL026C-A-protein in a non-human organism or a part thereof, preferably a microorganism, a plant cell, a plant or a part thereof, as compared to a corresponding non-transformed wild type non-human organism or a part thereof; and
[4134] (b) growing the non-human organism or a part thereof under conditions which permit the production of proline or a composition comprising proline in said non-human organism or in the culture medium surrounding said non-human organism.

[4135] Accordingly, the present invention relates to a process for the production of arginine, which comprises
[4136] (a) increasing or generating one or more activities selected from the group consisting of 102c-protein in a non-human organism or a part thereof, preferably a microorganism, a plant cell, a plant or a part thereof, as compared to a corresponding non-transformed wild type non-human organism or a part thereof; and
[4137] (b) growing the non-human organism or a part thereof under conditions which permit the production of arginine or a composition comprising arginine in said non-human organism or in the culture medium surrounding said non-human organism.

[4138] Accordingly, the present invention relates to a process for the production of proline, which comprises
[4139] (a) increasing or generating one or more activities selected from the group consisting of protein kinase in a non-human organism or a part thereof, preferably a microorganism, a plant cell, a plant or a part thereof, as compared to a corresponding non-transformed wild type non-human organism or a part thereof; and
[4140] (b) growing the non-human organism or a part thereof under conditions which permit the production of proline or a composition comprising proline in said non-human organism or in the culture medium surrounding said non-human organism.

[4141] Accordingly, the present invention relates to a process for the production of proline, which comprises
[4142] (a) increasing or generating one or more activities selected from the group consisting of coproporphyrinogen III oxidase in a non-human organism or a part thereof, preferably a microorganism, a plant cell, a plant or a part thereof, as compared to a corresponding non-transformed wild type non-human organism or a part thereof; and
[4143] (b) growing the non-human organism or a part thereof under conditions which permit the production of proline or a composition comprising proline in said non-human organism or in the culture medium surrounding said non-human organism.

[4144] Accordingly, the present invention relates to a process for the production of proline, which comprises
[4145] (a) increasing or generating one or more activities selected from the group consisting of branched-chain amino acid permease in a non-human organism or a part thereof, preferably a microorganism, a plant cell, a plant or a part thereof, as compared to a corresponding non-transformed wild type non-human organism or a part thereof; and
[4146] (b) growing the non-human organism or a part thereof under conditions which permit the production of proline or a composition comprising proline in said non-human organism or in the culture medium surrounding said non-human organism.

[4147] Accordingly, the present invention relates to a process for the production of arginine, which comprises
[4148] (a) increasing or generating one or more activities selected from the group consisting of peroxisome assembly protein in a non-human organism or a part thereof, preferably a microorganism, a plant cell, a plant or a part thereof, as compared to a corresponding non-transformed wild type non-human organism or a part thereof; and
[4149] (b) growing the non-human organism or a part thereof under conditions which permit the production of arginine or a composition comprising arginine in said non-human organism or in the culture medium surrounding said non-human organism.

[4150] Accordingly, the present invention relates to a process for the production of arginine, which comprises
[4151] (a) increasing or generating one or more activities selected from the group consisting of ydr338c-protein in a non-human organism or a part thereof, preferably a microorganism, a plant cell, a plant or a part thereof, as compared to a corresponding non-transformed wild type non-human organism or a part thereof; and
[4152] (b) growing the non-human organism or a part thereof under conditions which permit the production of arginine or a composition comprising arginine in said non-human organism or in the culture medium surrounding said non-human organism.

[4153] Accordingly, the present invention relates to a process for the production of glutamine, which comprises
[4154] (a) increasing or generating one or more activities selected from the group consisting of yer014w-protein in a non-human organism or a part thereof, preferably a microorganism, a plant cell, a plant or a part thereof, as compared to a corresponding non-transformed wild type non-human organism or a part thereof; and
[4155] (b) growing the non-human organism or a part thereof under conditions which permit the production of glutamine or a composition comprising glutamine in said non-human organism or in the culture medium surrounding said non-human organism.

[4156] Accordingly, the present invention relates to a process for the production of glutamine, which comprises
[4157] (a) increasing or generating one or more activities selected from the group consisting of yer106w-protein in a non-human organism or a part thereof, preferably a microorganism, a plant cell, a plant or a part thereof, as compared to a corresponding non-transformed wild type non-human organism or a part thereof; and
[4158] (b) growing the non-human organism or a part thereof under conditions which permit the production of glutamine or a composition comprising glutamine in said non-human organism or in the culture medium surrounding said non-human organism.

[4159] Accordingly, the present invention relates to a process for the production of proline, which comprises
[4160] (a) increasing or generating one or more activities selected from the group consisting of molecular chaperone portein in a non-human organism or a part thereof, preferably a microorganism, a plant cell, a plant or a part thereof, as compared to a corresponding non-transformed wild type non-human organism or a part thereof; and
[4161] (b) growing the non-human organism or a part thereof under conditions which permit the production of proline or a composition comprising proline in said non-human organism or in the culture medium surrounding said non-human organism.

[4162] Accordingly, the present invention relates to a process for the production of proline, which comprises
[4163] (a) increasing or generating one or more activities selected from the group consisting of YFLO19C-protein in a non-human organism or a part thereof, preferably a microorganism, a plant cell, a plant or a part thereof, as compared to a corresponding non-transformed wild type non-human organism or a part thereof; and
[4164] (b) growing the non-human organism or a part thereof under conditions which permit the production of proline or a composition comprising proline in said non-human organism or in the culture medium surrounding said non-human organism.

[4165] Accordingly, the present invention relates to a process for the production of arginine, which comprises
[4166] (a) increasing or generating one or more activities selected from the group consisting of yfl054c-protein in a non-human organism or a part thereof, preferably a microorganism, a plant cell, a plant or a part thereof, as compared to a corresponding non-transformed wild type non-human organism or a part thereof; and
[4167] (b) growing the non-human organism or a part thereof under conditions which permit the production of arginine or a composition comprising arginine in said non-human organism or in the culture medium surrounding said non-human organism.

[4168] Accordingly, the present invention relates to a process for the production of glutamine, which comprises
[4169] (a) increasing or generating one or more activities selected from the group consisting of yfl054c-protein in a non-human organism or a part thereof, preferably a microorganism, a plant cell, a plant or a part thereof, as compared to a corresponding non-transformed wild type non-human organism or a part thereof; and
[4170] (b) growing the non-human organism or a part thereof under conditions which permit the production of glutamine or a composition comprising glutamine in said non-human organism or in the culture medium surrounding said non-human organism.

[4171] Accordingly, the present invention relates to a process for the production of arginine, which comprises
[4172] (a) increasing or generating one or more activities selected from the group consisting of pre-mRNA-splicing factor in a non-human organism or a part thereof, preferably a microorganism, a plant cell, a plant or a part thereof, as compared to a corresponding non-transformed wild type non-human organism or a part thereof; and
[4173] (b) growing the non-human organism or a part thereof under conditions which permit the production of arginine or a composition comprising arginine in said non-human organism or in the culture medium surrounding said non-human organism.

[4174] Accordingly, the present invention relates to a process for the production of proline, which comprises
[4175] (a) increasing or generating one or more activities selected from the group consisting of ygI237c-protein in a non-human organism or a part thereof, preferably a microorganism, a plant cell, a plant or a part thereof, as compared to a corresponding non-transformed wild type non-human organism or a part thereof; and
[4176] (b) growing the non-human organism or a part thereof under conditions which permit the production of proline or a composition comprising proline in said non-human organism or in the culture medium surrounding said non-human organism.

[4177] Accordingly, the present invention relates to a process for the production of glutamine, which comprises
[4178] (a) increasing or generating one or more activities selected from the group consisting of ygr068c-protein in a non-human organism or a part thereof, preferably a microorganism, a plant cell, a plant or a part thereof, as compared to a corresponding non-transformed wild type non-human organism or a part thereof; and
[4179] (b) growing the non-human organism or a part thereof under conditions which permit the production of glutamine or a composition comprising glutamine in said non-human organism or in the culture medium surrounding said non-human organism.

[4180] Accordingly, the present invention relates to a process for the production of proline, which comprises
[4181] (a) increasing or generating one or more activities selected from the group consisting of squalene monooxygenase in a non-human organism or a part thereof, preferably a microorganism, a plant cell, a plant or a part thereof, as compared to a corresponding non-transformed wild type non-human organism or a part thereof; and
[4182] (b) growing the non-human organism or a part thereof under conditions which permit the production of proline or a composition comprising proline in said non-human organism or in the culture medium surrounding said non-human organism.

[4183] Accordingly, the present invention relates to a process for the production of glutamate, which comprises
[4184] (a) increasing or generating one or more activities selected from the group consisting of ygr221 c-protein in a non-human organism or a part thereof, preferably a microorganism, a plant cell, a plant or a part thereof, as compared to a corresponding non-transformed wild type non-human organism or a part thereof; and
[4185] (b) growing the non-human organism or a part thereof under conditions which permit the production of glutamate or a composition comprising glutamate in said non-human organism or in the culture medium surrounding said non-human organism.

[4186] Accordingly, the present invention relates to a process for the production of glutamine, which comprises
[4187] (a) increasing or generating one or more activities selected from the group consisting of ygr221 c-protein in a non-human organism or a part thereof, preferably a microorganism, a plant cell, a plant or a part thereof, as compared to a corresponding non-transformed wild type non-human organism or a part thereof; and
[4188] (b) growing the non-human organism or a part thereof under conditions which permit the production of glutamine or a composition comprising glutamine in said non-human organism or in the culture medium surrounding said non-human organism.

[4189] Accordingly, the present invention relates to a process for the production of proline, which comprises
[4190] (a) increasing or generating one or more activities selected from the group consisting of yhl013c-protein in a non-human organism or a part thereof, preferably a microorganism, a plant cell, a plant or a part thereof, as compared to a corresponding non-transformed wild type non-human organism or a part thereof; and
[4191] (b) growing the non-human organism or a part thereof under conditions which permit the production of proline or a composition comprising proline in said non-human organism or in the culture medium surrounding said non-human organism.

[4192] Accordingly, the present invention relates to a process for the production of arginine, which comprises
[4193] (a) increasing or generating one or more activities selected from the group consisting of mitochondrial processing protease in a non-human organism or a part thereof, preferably a microorganism, a plant cell, a plant or a part thereof, as compared to a corresponding non-transformed wild type non-human organism or a part thereof; and
[4194] (b) growing the non-human organism or a part thereof under conditions which permit the production of arginine or a composition comprising arginine in said non-human organism or in the culture medium surrounding said non-human organism.

[4195] Accordingly, the present invention relates to a process for the production of proline, which comprises
[4196] (a) increasing or generating one or more activities selected from the group consisting of H/ACA ribonucleoprotein complex subunit 3 in a non-human organism or a part thereof, preferably a microorganism, a plant cell, a plant or a part thereof, as compared to a corresponding non-transformed wild type non-human organism or a part thereof; and
[4197] (b) growing the non-human organism or a part thereof under conditions which permit the production of proline or a composition comprising proline in said non-human organism or in the culture medium surrounding said non-human organism.

[4198] Accordingly, the present invention relates to a process for the production of glutamate, which comprises
[4199] (a) increasing or generating one or more activities selected from the group consisting of yhr207c-protein in a non-human organism or a part thereof, preferably a microorganism, a plant cell, a plant or a part thereof, as compared to a corresponding non-transformed wild type non-human organism or a part thereof; and
[4200] (b) growing the non-human organism or a part thereof under conditions which permit the production of glutamate or a composition comprising glutamate in said non-human organism or in the culture medium surrounding said non-human organism.

[4201] Accordingly, the present invention relates to a process for the production of arginine, which comprises
[4202] (a) increasing or generating one or more activities selected from the group consisting of 3-phosphoglycerate dehydrogenase in a non-human organism or a part thereof, preferably a microorganism, a plant cell, a plant or a part thereof, as compared to a corresponding non-transformed wild type non-human organism or a part thereof; and
[4203] (b) growing the non-human organism or a part thereof under conditions which permit the production of arginine or a composition comprising arginine in said non-human organism or in the culture medium surrounding said non-human organism.

[4204] Accordingly, the present invention relates to a process for the production of proline, which comprises
[4205] (a) increasing or generating one or more activities selected from the group consisting of allantoinase in a non-human organism or a part thereof, preferably a microorganism, a plant cell, a plant or a part thereof, as compared to a corresponding non-transformed wild type non-human organism or a part thereof; and
[4206] (b) growing the non-human organism or a part thereof under conditions which permit the production of proline or a composition comprising proline in said non-human organism or in the culture medium surrounding said non-human organism.

[4207] Accordingly, the present invention relates to a process for the production of arginine, which comprises
[4208] (a) increasing or generating one or more activities selected from the group consisting of allantoicase in a non-human organism or a part thereof, preferably a microorganism, a plant cell, a plant or a part thereof, as compared to a corresponding non-transformed wild type non-human organism or a part thereof; and
[4209] (b) growing the non-human organism or a part thereof under conditions which permit the production of arginine or a composition comprising arginine in said non-human organism or in the culture medium surrounding said non-human organism.

[4210] Accordingly, the present invention relates to a process for the production of glutamine, which comprises
[4211] (a) increasing or generating one or more activities selected from the group consisting of DnaJ-like chaperone in a non-human organism or a part thereof, preferably a microorganism, a plant cell, a plant or a part thereof, as compared to a corresponding non-transformed wild type non-human organism or a part thereof; and
[4212] (b) growing the non-human organism or a part thereof under conditions which permit the production of glutamine or a composition comprising glutamine in said non-human organism or in the culture medium surrounding said non-human organism.

[4213] Accordingly, the present invention relates to a process for the production of arginine, which comprises
[4214] (a) increasing or generating one or more activities selected from the group consisting of ornithine carbamoyltransferase in a non-human organism or a part thereof, preferably a microorganism, a plant cell, a plant or a part thereof, as compared to a corresponding non-transformed wild type non-human organism or a part thereof; and
[4215] (b) growing the non-human organism or a part thereof under conditions which permit the production of arginine or a composition comprising arginine in said non-human organism or in the culture medium surrounding said non-human organism.

[4216] Accordingly, the present invention relates to a process for the production of proline, which comprises
[4217] (a) increasing or generating one or more activities selected from the group consisting of potassium transport protein in a non-human organism or a part thereof, preferably a microorganism, a plant cell, a plant or a part thereof, as compared to a corresponding non-transformed wild type non-human organism or a part thereof; and
[4218] (b) growing the non-human organism or a part thereof under conditions which permit the production of proline or a composition comprising proline in said non-human organism or in the culture medium surrounding said non-human organism.

[4219] Accordingly, the present invention relates to a process for the production of arginine, which comprises
[4220] (a) increasing or generating one or more activities selected from the group consisting of glycogenin in a non-human organism or a part thereof, preferably a microorganism, a plant cell, a plant or a part thereof, as compared to a corresponding non-transformed wild type non-human organism or a part thereof; and
[4221] (b) growing the non-human organism or a part thereof under conditions which permit the production of arginine or a composition comprising arginine in said non-human organism or in the culture medium surrounding said non-human organism.

[4222] Accordingly, the present invention relates to a process for the production of proline, which comprises
[4223] (a) increasing or generating one or more activities selected from the group consisting of ATP-dependent RNA helicase in a non-human organism or a part thereof, preferably a microorganism, a plant cell, a plant or a part thereof, as compared to a corresponding non-transformed wild type non-human organism or a part thereof; and
[4224] (b) growing the non-human organism or a part thereof under conditions which permit the production of proline or a composition comprising proline in said non-human organism or in the culture medium surrounding said non-human organism.

[4225] Accordingly, the present invention relates to a process for the production of glutamine, which comprises
[4226] (a) increasing or generating one or more activities selected from the group consisting of phosphoribosyltransferase in a non-human organism or a part thereof, preferably a microorganism, a plant cell, a plant or a part thereof, as compared to a corresponding non-transformed wild type non-human organism or a part thereof; and
[4227] (b) growing the non-human organism or a part thereof under conditions which permit the production of glutamine or a composition comprising glutamine in said non-human organism or in the culture medium surrounding said non-human organism.

[4228] Accordingly, the present invention relates to a process for the production of glutamate, which comprises
[4229] (a) increasing or generating one or more activities selected from the group consisting of polygalacturonase in a non-human organism or a part thereof, preferably a microorganism, a plant cell, a plant or a part thereof, as compared to a corresponding non-transformed wild type non-human organism or a part thereof; and
[4230] (b) growing the non-human organism or a part thereof under conditions which permit the production of glutamate or a composition comprising glutamate in said non-human organism or in the culture medium surrounding said non-human organism.

[4231] Accordingly, the present invention relates to a process for the production of proline, which comprises
[4232] (a) increasing or generating one or more activities selected from the group consisting of aspartate aminotransferase in a non-human organism or a part thereof, preferably a microorganism, a plant cell, a plant or a part thereof, as compared to a corresponding non-transformed wild type non-human organism or a part thereof; and
[4233] (b) growing the non-human organism or a part thereof under conditions which permit the production of proline or a composition comprising proline in said non-human organism or in the culture medium surrounding said non-human organism.

[4234] Accordingly, the present invention relates to a process for the production of glutamate, which comprises
[4235] (a) increasing or generating one or more activities selected from the group consisting of ylr065c-protein in a non-human organism or a part thereof, preferably a microorganism, a plant cell, a plant or a part thereof, as compared to a corresponding non-transformed wild type non-human organism or a part thereof; and
[4236] (b) growing the non-human organism or a part thereof under conditions which permit the production of glutamate or a composition comprising glutamate in said non-human organism or in the culture medium surrounding said non-human organism.

[4237] Accordingly, the present invention relates to a process for the production of glutamine, which comprises
[4238] (a) increasing or generating one or more activities selected from the group consisting of ylr178c-protein in a non-human organism or a part thereof, preferably a microorganism, a plant cell, a plant or a part thereof, as compared to a corresponding non-transformed wild type non-human organism or a part thereof; and
[4239] (b) growing the non-human organism or a part thereof under conditions which permit the production of glutamine or a composition comprising glutamine in said non-human organism or in the culture medium surrounding said non-human organism.

[4240] Accordingly, the present invention relates to a process for the production of proline, which comprises
[4241] (a) increasing or generating one or more activities selected from the group consisting of aconitate hydratase in a non-human organism or a part thereof, preferably a microorganism, a plant cell, a plant or a part thereof, as compared to a corresponding non-transformed wild type non-human organism or a part thereof; and
[4242] (b) growing the non-human organism or a part thereof under conditions which permit the production of proline or a composition comprising proline in said non-human organism or in the culture medium surrounding said non-human organism.

[4243] Accordingly, the present invention relates to a process for the production of proline, which comprises
[4244] (a) increasing or generating one or more activities selected from the group consisting of adenylosuccinate lyase in a non-human organism or a part thereof, preferably a microorganism, a plant cell, a plant or a part thereof, as compared to a corresponding non-transformed wild type non-human organism or a part thereof; and
[4245] (b) growing the non-human organism or a part thereof under conditions which permit the production of proline or a composition comprising proline in said non-human organism or in the culture medium surrounding said non-human organism.

[4246] Accordingly, the present invention relates to a process for the production of glutamine, which comprises
[4247] (a) increasing or generating one or more activities selected from the group consisting of ynl142w-protein in a non-human organism or a part thereof, preferably a microorganism, a plant cell, a plant or a part thereof, as compared to a corresponding non-transformed wild type non-human organism or a part thereof; and
[4248] (b) growing the non-human organism or a part thereof under conditions which permit the production of glutamine or a composition comprising glutamine in said non-human organism or in the culture medium surrounding said non-human organism.

[4249] Accordingly, the present invention relates to a process for the production of proline, which comprises
[4250] (a) increasing or generating one or more activities selected from the group consisting of sterol O-acyltransferase in a non-human organism or a part thereof, preferably a microorganism, a plant cell, a plant or a part thereof, as compared to a corresponding non-transformed wild type non-human organism or a part thereof; and
[4251] (b) growing the non-human organism or a part thereof under conditions which permit the production of proline or a composition comprising proline in said non-human organism or in the culture medium surrounding said non-human organism.

[4252] Accordingly, the present invention relates to a process for the production of arginine, which comprises
[4253] (a) increasing or generating one or more activities selected from the group consisting of protein kinase in a non-human organism or a part thereof, preferably a microorganism, a plant cell, a plant or a part thereof, as compared to a corresponding non-transformed wild type non-human organism or a part thereof; and
[4254] (b) growing the non-human organism or a part thereof under conditions which permit the production of arginine or a composition comprising arginine in said non-human organism or in the culture medium surrounding said non-human organism.

[4255] Accordingly, the present invention relates to a process for the production of glutamate, which comprises
[4256] (a) increasing or generating one or more activities selected from the group consisting of glutaminyl -tRNA synthetase in a non-human organism or a part thereof, preferably a microorganism, a plant cell, a plant or a part thereof, as compared to a corresponding non-transformed wild type non-human organism or a part thereof; and
[4257] (b) growing the non-human organism or a part thereof under conditions which permit the production of glutamate or a composition comprising glutamate in said non-human organism or in the culture medium surrounding said non-human organism.

[4258] Accordingly, the present invention relates to a process for the production of glutamine, which comprises
[4259] (a) increasing or generating one or more activities selected from the group consisting of glutaminyl-tRNA synthetase in a non-human organism or a part thereof, preferably a microorganism, a plant cell, a plant or a part thereof, as compared to a corresponding non-transformed wild type non-human organism or a part thereof; and
[4260] (b) growing the non-human organism or a part thereof under conditions which permit the production of glutamine or a composition comprising glutamine in said non-human organism or in the culture medium surrounding said non-human organism.

[4261] Accordingly, the present invention relates to a process for the production of proline, which comprises
[4262] (a) increasing or generating one or more activities selected from the group consisting of yor221 c-protein in a non-human organism or a part thereof, preferably a microorganism, a plant cell, a plant or a part thereof, as compared to a corresponding non-transformed wild type non-human organism or a part thereof; and
[4263] (b) growing the non-human organism or a part thereof under conditions which permit the production of proline or a composition comprising proline in said non-human organism or in the culture medium surrounding said non-human organism.

[4264] Accordingly, the present invention relates to a process for the production of proline, which comprises
[4265] (a) increasing or generating one or more activities selected from the group consisting of protein kinase in a non-human organism or a part thereof, preferably a microorganism, a plant cell, a plant or a part thereof, as compared to a corresponding non-transformed wild type non-human organism or a part thereof; and
[4266] (b) growing the non-human organism or a part thereof under conditions which permit the production of proline or a composition comprising proline in said non-human organism or in the culture medium surrounding said non-human organism.

[4267] Accordingly, the present invention relates to a process for the production of arginine, which comprises
[4268] (a) increasing or generating one or more activities selected from the group consisting of isopentenyl diphosphate isomerase in a non-human organism or a part thereof, preferably a microorganism, a plant cell, a plant or a part thereof, as compared to a corresponding non-transformed wild type non-human organism or a part thereof; and
[4269] (b) growing the non-human organism or a part thereof under conditions which permit the production of arginine or a composition comprising arginine in said non-human organism or in the culture medium surrounding said non-human organism.

[4270] Accordingly, the present invention relates to a process for the production of arginine, which comprises
[4271] (a) increasing or generating one or more activities selected from the group consisting of Zm_{—}4842_BE510522-protein in a non-human organism or a part thereof, preferably a microorganism, a plant cell, a plant or a part thereof, as compared to a corresponding non-transformed wild type non-human organism or a part thereof; and
[4272] (b) growing the non-human organism or a part thereof under conditions which permit the production of arginine or a composition comprising arginine in said non-human organism or in the culture medium surrounding said non-human organism.

[4273] Accordingly, the present invention relates to a process for the production of glutamine, which comprises
[4274] (a) increasing or generating one or more activities selected from the group consisting of Zm_{—}4842_BE510522-protein in a non-human organism or a part thereof, preferably a microorganism, a plant cell, a plant or a part thereof, as compared to a corresponding non-transformed wild type non-human organism or a part thereof; and
[4275] (b) growing the non-human organism or a part thereof under conditions which permit the production of glutamine or a composition comprising glutamine in said non-human organism or in the culture medium surrounding said non-human organism.

[4276] Accordingly, the present invention relates to a process for the production of proline, which comprises
[4277] (a) increasing or generating one or more activities selected from the group consisting of Zm_{—}4842_BE510522-protein in a non-human organism or a part thereof, preferably a microorganism, a plant cell, a plant or a part thereof, as compared to a corresponding non-transformed wild type non-human organism or a part thereof; and
[4278] (b) growing the non-human organism or a part thereof under conditions which permit the production of proline or a composition comprising proline in said non-human organism or in the culture medium surrounding said non-human organism.

[4279] Accordingly, the present invention relates to a process for the production of arginine, which comprises
[4280] (a) increasing or generating one or more activities selected from the group consisting of phosphopantothenoylcysteine decarboxylase in a non-human organism or a part thereof, preferably a microorganism, a plant cell, a plant or a part thereof, as compared to a corresponding non-transformed wild type non-human organism or a part thereof; and
[4281] (b) growing the non-human organism or a part thereof under conditions which permit the production of arginine or a composition comprising arginine in said non-human organism or in the culture medium surrounding said non-human organism.

[4282] Accordingly, the present invention relates to a process for the production of proline, which comprises
[4283] (a) increasing or generating one or more activities selected from the group consisting of ZM06LC11975-protein in a non-human organism or a part thereof, preferably a microorganism, a plant cell, a plant or a part thereof, as compared to a corresponding non-transformed wild type non-human organism or a part thereof; and
[4284] (b) growing the non-human organism or a part thereof under conditions which permit the production of proline or a composition comprising proline in said non-human organism or in the culture medium surrounding said non-human organism.

[4285] An embodiment of the present invention relates to a process for the production of arginine, which comprises
[4286] (a1) increasing or generating the activity of a polypeptide comprising a polypeptide as depicted in a respective line in column 5 or 8 of Table II, application no. 2, or a homolog or a fragment thereof, a consensus sequence or at least one polypeptide motif as depicted in the respective line in column 8 of Table IV, application no. 2, whereby the respective line discloses in column 7 arginine; or
[4287] (a2) increasing or generating the activity of an expression product of one or more nucleic acid molecule(s) comprising a polynucleotide as depicted in the respective line in column 5 or 8 of Table I, application no. 2, preferably the coding region thereof, or a homolog or a fragment thereof, whereby the respective line discloses in column 7 arginine; or
[4288] (a3) increasing or generating the activity of a functional equivalent of (a1) or (a2);
   in a non-human organism or a part thereof; preferably a microorganism, a plant cell, a plant or a part thereof, as compared to a corresponding non-transformed wild type non-human organism or a part thereof; and
[4289] (b) growing the non-human organism under conditions which permit the production of arginine or a composition comprising arginine in said non-human organism or in the culture medium surrounding said non-human organism.

[4290] An embodiment of the present invention relates to a process for the production of glutamate, which comprises
[4291] (a1) increasing or generating the activity of a polypeptide comprising a polypeptide as depicted in a respective line in column 5 or 8 of Table II, application no. 2, or a homolog or a fragment thereof, a consensus sequence or at least one polypeptide motif as depicted in the respective line in column 8 of Table IV, application no. 2, whereby the respective line discloses in column 7 glutamate; or
[4292] (a2) increasing or generating the activity of an expression product of one or more nucleic acid molecule(s) comprising a polynucleotide as depicted in the respective line in column 5 or 8 of Table I, application no. 2, preferably the coding region thereof, or a homolog or a fragment thereof, whereby the respective line discloses in column 7 glutamate; or
[4293] (a3) increasing or generating the activity of a functional equivalent of (a1) or (a2);
   in a non-human organism or a part thereof; preferably a microorganism, a plant cell, a plant or a part thereof, as compared to a corresponding non-transformed wild type non-human organism or a part thereof; and
[4294] (b) growing the non-human organism under conditions which permit the production of glutamate or a composition comprising glutamate in said non-human organism or in the culture medium surrounding said non-human organism.

[4295] An embodiment of the present invention relates to a process for the production of glutamine, which comprises
[4296] (a1) increasing or generating the activity of a polypeptide comprising a polypeptide as depicted in a respective line in column 5 or 8 of Table II, application no. 2, or a homolog or a fragment thereof, a consensus sequence or at least one polypeptide motif as depicted in the respective line in column 8 of Table IV, application no. 2, whereby the respective line discloses in column 7 glutamine; or
[4297] (a2) increasing or generating the activity of an expression product of one or more nucleic acid molecule(s) comprising a polynucleotide as depicted in the respective line in column 5 or 8 of Table I, application no. 2, preferably the coding region thereof, or a homolog or a fragment thereof, whereby the respective line discloses in column 7 glutamine; or
[4298] (a3) increasing or generating the activity of a functional equivalent of (a1) or (a2);
   in a non-human organism or a part thereof; preferably a microorganism, a plant cell, a plant or a part thereof, as compared to a corresponding non-transformed wild type non-human organism or a part thereof; and
[4299] (b) growing the non-human organism under conditions which permit the production of glutamine or a composition comprising glutamine in said non-human organism or in the culture medium surrounding said non-human organism.

[4300] An embodiment of the present invention relates to a process for the production of proline, which comprises
[4301] (a1) increasing or generating the activity of a polypeptide comprising a polypeptide as depicted in a respective line in column 5 or 8 of Table II, application no. 2, or a homolog or a fragment thereof, a consensus sequence or at least one polypeptide motif as depicted in the respective line in column 8 of Table IV, application no. 2, whereby the respective line discloses in column 7 proline; or
[4302] (a2) increasing or generating the activity of an expression product of one or more nucleic acid molecule(s) comprising a polynucleotide as depicted in the respective line in column 5 or 8 of Table I, application no. 2, preferably the coding region thereof, or a homolog or a fragment thereof, whereby the respective line discloses in column 7 proline; or
[4303] (a3) increasing or generating the activity of a functional equivalent of (a1) or (a2);
   in a non-human organism or a part thereof; preferably a microorganism, a plant cell, a plant or a part thereof, as compared to a corresponding non-transformed wild type non-human organism or a part thereof; and
[4304] (b) growing the non-human organism under conditions which permit the production of proline or a composition comprising proline in said non-human organism or in the culture medium surrounding said non-human organism.

[4305] Accordingly, the increase or generation of one or more said activities is for example conferred by one or more expression products of said nucleic acid molecule, e.g. proteins. Accordingly, in the present invention described above, the increase or generation of one or more said activities is for example conferred by one or more protein(s) each comprising a polypeptide selected from the group as depicted in Table II, application no. 2, column 5 and 8, or a homolog or a fragment thereof.

[4306] The process of the invention comprises in one embodiment the following steps:
[4307] (i) increasing or generating of the expression of; and/or
[4308] (ii) increasing or generating the expression of an expression product of; and/or
[4309] (iii) increasing or generating one or more activities of an expression product encoded by;
   at least one nucleic acid molecule (in the following “Fine Chemical Related Protein (FCRP)”encoding gene or “FCRP”-gene) comprising a nucleic acid molecule selected from the group consisting of:
[4310] (a) a nucleic acid molecule encoding the polypeptide shown in column 5 or 8 of Table II, preferably Table II B, application no. 2, or a homolog or a fragment thereof;
[4311] (b) a nucleic acid molecule shown in column 5 or 8 of Table I, preferably Table I B, application no. 2, or a homolog or a fragment thereof (preferably the coding region thereof);
[4312] (c) a nucleic acid molecule, which, as a result of the degeneracy of the genetic code, can be derived from a polypeptide sequence depicted in column 5 or 8 of Table II, preferably Table II B, application no. 2;
[4313] (d) a nucleic acid molecule having at least 30%, in particular at least 50%, 60%, 70%, 80%, 85%, 90%, 95%, 97%, 98%, 99% or 99.5% identity with the nucleic acid molecule sequence of a polynucleotide comprising the nucleic acid molecule shown in column 5 or 8 of Table I, preferably Table I B, application no. 2, or the coding region thereof;
[4314] (e) a nucleic acid molecule encoding a polypeptide having at least 30%, in particular 50%, 60%, 70%, 80%, 85%, 90%, 95%, 97%, 98%, 99% or 99.5% identity with the amino acid sequence of the polypeptide encoded by the nucleic acid molecule of (a), (b), (c) or (d),
[4315] (f) a nucleic acid molecule which hybridizes with a nucleic acid molecule of (a), (b), (c), (d) or (e) under stringent hybridization conditions;
[4316] (g) a nucleic acid molecule encoding a polypeptide which can be isolated with the aid of monoclonal or polyclonal antibodies made against a polypeptide encoded by one of the nucleic acid molecules of (a), (b), (c), (d), (e) or (f);
[4317] (h) a nucleic acid molecule encoding a polypeptide comprising the consensus sequence or one or more polypeptide motifs as shown in column 8 of Table IV, application no. 2;
[4318] (i) a nucleic acid molecule encoding a polypeptide having the activity represented by a respective protein as depicted in column 5 of Table II, application no. 2;
[4319] (j) a nucleic acid molecule which comprises a polynucleotide, which is obtained by amplifying a cDNA library or a genomic library using the primers as depicted in column 8 of Table III, application no. 2; and
[4320] (k) a nucleic acid molecule which is obtainable by screening a suitable nucleic acid library, especially a cDNA library and/or a genomic library, under stringent hybridization conditions with a probe comprising a complementary sequence of a nucleic acid molecule of (a), (b), (c), (d), (e), (f), (g), (h), (i) or (j) or with a fragment thereof, having at least 15 nt, preferably 20 nt, 30 nt, 50 nt, 100 nt, 200 nt, 500 nt, 1000 nt, 1500 nt, 2000 nt or 3000 nt of a nucleic acid molecule complementary to a nucleic acid molecule sequence characterized in (a), (b), (c), (d), (e), (f), (g), (h), (i) or (j);
   or a nucleic acid molecule comprising a sequence which is complementary thereto.
   (All the references to Tables I to IV are references to the corresponding lines of Tables I to IV.)

[4321] In a preferred embodiment thereof said nucleic acid molecule encodes a polypeptide which has the activity of the polypeptide represented by a protein comprising a polypeptide as depicted in the corresponding hit in column 5 of Table II, application no. 2.

[4322] In another preferred embodiment thereof said nucleic acid molecule confers a generation or an increase of the respective fine chemical in a non-human organism or a part thereof as compared to a corresponding wild-type non-human organism or part thereof.

[4323] In another preferred embodiment thereof said nucleic acid molecule encodes a polypeptide which has the activity of the polypeptide represented by a protein as depicted in the corresponding hit in column 5 of Table II, application no. 2, and confers a generation or an increase of the respective fine chemical in a non-human organism or a part thereof as compared to a corresponding wild-type non-human organism or part thereof.

[4324] Accordingly, the genes of the present invention or used in accordance with the present invention, which respectively encode a protein having an activity of 2,3-dihydroxy-2,3-dihydrophenylpropionatedehydrogenase, 2-oxoglutarate dehydrogenase E1 subunit, 30S ribosomal protein, 3-deoxy-7-phosphoheptulonate synthase, 3-phosphoglycerate dehydrogenase, 47266012-protein, 49747384_SOYBEAN-protein, 4-alpha-glucanotransferase, ABC transporter permease protein, acetyl CoA carboxylase, acetyltransferase, acid shock protein, aconitate hydratase, acyl-CoA dehydrogenase, acyl-CoA synthase, acyltransferase, adenylosuccinate lyase, adenylylsulfate kinase, alanine dehydrogenase, aldehyde dehydrogenase, allantoicase, allantoinase, amine oxidase, amino acid ABC transporter permease protein, amino acid acetyltransferase, aminotransferase, ankyrin repeat family protein, anthranilate synthase component II, arginine decarboxylase, arginine exporter protein, asparaginase, aspartase, aspartate aminotransferase, AT1g17440-protein, AO g19800-protein, Atl g29350-protein, AO g47380-protein, At1g67340-protein, At4g32480-protein, At5g16650-protein, ATP synthase subunit beta, ATP-binding component of a transport system, ATP-dependent RNA helicase, AX653549-protein, AY087308-protein, b0456-protein, b0518-protein, b1003-protein, b1024-protein, b1108-protein, b1137-protein, b1163-protein, b1259-protein, b1280-protein, b1330-protein, b1445-protein, b1522-protein, b1898-protein, b2107-protein, b2121-protein, b2360-protein, b2399-protein, b2474-protein, b2513-protein, b2548-protein, b2613-protein, b2673-protein, b2812-protein, b2846-protein, b2909-protein, b2936-protein, b2999-protein, b3121-protein, b3151-protein, b3346-protein, b3410-protein, B3427-protein, b3509-protein, b3814-protein, b3817-protein, b3989-protein, b4029-protein, b4121-protein, beta-galactosidase, beta-hydroxylase, bifunctional purine biosynthesis protein, branched-chain amino acid ABC transporter permease protein, branched-chain amino acid permease, calcium-dependent protein kinase, carbohydrate kinase, carbon dioxide concentrating mechanism protein, cation/acetate symporter, cation-transporting ATPase, CBL-interacting protein kinase, CCAAT-binding transcription factor, CDP-diacylglycerol-glycerol-3-phosphate 3-phosphatidyltransferase, CDP-diglyceride synthetase, cell division control protein, cell division protein, Chaperone protein CIpB, circadian clock protein, coproporphyrinogen III oxidase, coproporphyrinogen oxidase, CTP synthase, CTP synthetase, cullin, cyclin D, cysteine synthase A, delta-1-pyrroline 5-carboxylase synthetase, dihydrolipoamide acetyltransferase, dihydrolipoamide dehydrogenase, DNA binding protein, DNA helicase II, DNA helicase IV, DNA mismatch repair protein, DnaJ-like chaperone, electron transport complex protein, elongation factor Tu, enoyl-CoA hydratase, enterobacterial common antigen polymerase, ethanolamine utilization protein, eukaryotic translation initiation factor 5, exopolyphosphatase, fatty acid desaturase, flavodoxin, fumarylacetoacetate hydrolase, gammaglutamyltranspeptidase, geranylgeranyl pyrophosphate synthase, gibberellin 20-oxidase, Glu/Leu/PheNal dehydrogenase, gluconate transport system permease 3, glucose dehydrogenase, glucose-1-phosphate cytidylyltransferase, glucose-6-phosphate 1-dehydrogenase, glutamate-ammonia-ligase, glutamine amidotransferase, glutamine synthetase, glutaminyl-tRNA synthetase, glutaredoxin, glutathione S-transferase, glycerol dehydrogenase, glycerol-3-phosphate dehydrogenase, glycogen (starch) synthase, glycogen synthase, glycogenin, glycoprotease, glycosidase, glycosyl transferase, GM02LC11114-protein, GM02LC17485-protein, GM02LC46-protein, GM02LC5744-protein, H/ACA ribonucleoprotein complex subunit 3, harpin-induced family protein, heat shock protein, heat shock transcription factor, HesB/YadR/YfhF family protein, histone H2A, homocitrate synthase, hydrolase, integral membrane transporter family protein, iron(III) dicitrate-binding protein, isochorismate synthase, isocitrate dehydrogenase, isopentenyl diphosphate isomerase, L-asparaginase, L-aspartate oxidase, Leucyl/phenylalanyl-tRNA-protein transferase, lipoprotein precursor, L-ribulose-5-phosphate 4-epimerase, lysyl-tRNA synthetase, major facilitator superfamily transporter protein, malate dehydrogenase, malic enzyme, malonyl CoA-acyl carrier protein transacylase, membrane protein, membrane transport protein, metal-dependent hydrolase, methylglyoxal synthase, methyltransferase, mitochondrial processing protease, molecular chaperone portein, monothiol glutaredoxin, monthiol glutaredoxin, multiple antibiotic resistance protein, murein transglycosylase, N-acetyl-gamma-glutamyl-phosphate reductase, NAD(P)H-quinone oxidoreductase subunit, NADH dehydrogenase I chain I, nitrate/nitrite transport protein, ornithine carbamoyltransferase, oxidoreductase, oxidoreductase subunit, oxireductase, permease protein of phosphate ABC transporter, peroxisome assembly protein, phosphatidylinositol 3- and 4-kinase family protein, phosphoadenosine phosphosulfate reductase, phosphoanhydride phosphorylase, phosphopantetheine adenylyltransferase, phosphopantothenoylcysteine decarboxylase, phosphopantothenoylcysteinesynthetase/decarboxylase, phosphoribosylaminoimidazole carboxylase catalytic subunit, phosphoribosylformyl glycinamidine synthase subunit, phosphoribosylglycinamide formyltransferase, phosphoribosyltransferase, Photosystem I reaction center subunit XI, photosystem II protein, polygalacturonase, polyphosphate kinase, potassium transport protein, pre-mRNA-splicing factor, protease, protein kinase, protein phosphatase, purine nucleoside phosphorylase, purine-nucleoside phosphorylase, pyrroline carboxylate reductase, pyruvate kinase, quinolinate synthetase, riboflavin biosynthesis protein, ribosephosphate isomerase, constitutive, RNA binding protein, s_pp015018333r-protein, sec-independent protein translocase, Sec-independent protein translocase subunit, serine protease, serine protease inhibitor, short-chain alcohol dehydrogenase family, sll0064-protein, sll0254-protein, sll0354-protein, sll1761-protein, slr0600-protein, sodium/proton antiporter, squalene monooxygenase, sterol O-acyltransferase, thioredoxin, thioredoxin family protein, threonine dehydrogenase, threonine synthase, transcription factor, transcriptional regulator, transcriptional regulator protein, translation initiation factor subunit, transport protein, TTC0768-protein, TTC1386-protein, urease subunit, uridine/cytidine kinase, valine-pyruvate transaminase, XM_{—}473199-protein, YCL026C-A-protein, ycr102c-protein, ydr338c-protein, yer014w-protein, yer106w-protein, YFL019C-protein, yfl054c-protein, yg1237c-protein, ygr068c-protein, ygr221c-protein, yhl013c-protein, yhr207c-protein, ylr065c-protein, ylr178c-protein, ynl142w-protein, yor221c-protein, zinc finger protein, zinc transporter, Zm_{—}4842_BE510522-protein, or ZMO6LC11975-protein, which respectively encode a protein comprising a polypeptide encoded by a nucleic acid sequence as shown in Table I, application no. 2, column 5 or 8, (preferably the coding region thereof), or a homolog or a fragment thereof, which respectively encode a protein comprising a polypeptide as depicted in Table II, application no. 2, column 5 or 8, or a homolg or a fragment thereof, and/or which respectively can be amplified with the primer set shown in Table III, application no. 2, column 8, are also referred to as “FCRP genes”.

[4325] Proteins or polypeptides encoded by “FCRP-genes” are referred to as “Fine Chemical Related Proteins” or “FCRP”. For the purposes of the description of the present invention, the respective protein having an activity of 2,3-dihydroxy-2,3-dihydrophenylpropionatedehydrogenase, 2-oxoglutarate dehydrogenase E1 subunit, 30S ribosomal protein, 3-deoxy-7-phosphoheptulonate synthase, 3-phosphoglycerate dehydrogenase, 47266012-protein, 49747384_SOYBEAN-protein, 4-alpha-glucanotransferase, ABC transporter permease protein, acetyl CoA carboxylase, acetyltransferase, acid shock protein, aconitate hydratase, acyl-CoA dehydrogenase, acyl-CoA synthase, acyltransferase, adenylosuccinate lyase, adenylylsulfate kinase, alanine dehydrogenase, aldehyde dehydrogenase, allantoicase, allantoinase, amine oxidase, amino acid ABC transporter permease protein, amino acid acetyltransferase, aminotransferase, ankyrin repeat family protein, anthranilate synthase component II, arginine decarboxylase, arginine exporter protein, asparaginase, aspartase, aspartate aminotransferase, At1g17440-protein, At1g19800-protein, Atl g29350-protein, At1g47380-protein, At1g67340-protein, At4g32480-protein, At5g16650-protein, ATP synthase subunit beta, ATP-binding component of a transport system, ATP-dependent RNA helicase, AX653549-protein, AY087308-protein, b0456-protein, b0518-protein, b1003-protein, b1024-protein, b1108-protein, b1137-protein, b1163-protein, b1259-protein, b1280-protein, b1330-protein, b1445-protein, b1522-protein, b1898-protein, b2107-protein, b2121-protein, b2360-protein, b2399-protein, b2474-protein, b2513-protein, b2548-protein, b2613-protein, b2673-protein, b2812-protein, b2846-protein, b2909-protein, b2936-protein, b2999-protein, b3121-protein, b3151-protein, b3346-protein, b3410-protein, B3427-protein, b3509-protein, b3814-protein, b3817-protein, b3989-protein, b4029-protein, b4121-protein, beta-galactosidase, beta-hydroxylase, bifunctional purine biosynthesis protein, branched-chain amino acid ABC transporter permease protein, branched-chain amino acid permease, calcium-dependent protein kinase, carbohydrate kinase, carbon dioxide concentrating mechanism protein, cation/acetate symporter, cation-transporting ATPase, CBL-interacting protein kinase, CCAAT-binding transcription factor, CDP-diacylglycerol-glycerol-3-phosphate 3-phosphatidyltransferase, CDP-diglyceride synthetase, cell division control protein, cell division protein, Chaperone protein CIpB, circadian clock protein, coproporphyrinogen III oxidase, coproporphyrinogen oxidase, CTP synthase, CTP synthetase, cullin, cyclin D, cysteine synthase A, delta-1-pyrroline 5-carboxylase synthetase, dihydrolipoamide acetyltransferase, dihydrolipoamide dehydrogenase, DNA binding protein, DNA helicase II, DNA helicase IV, DNA mismatch repair protein, DnaJ-like chaperone, electron transport complex protein, elongation factor Tu, enoyl-CoA hydratase, enterobacterial common antigen polymerase, ethanolamine utilization protein, eukaryotic translation initiation factor 5, exopolyphosphatase, fatty acid desaturase, flavodoxin, fumarylacetoacetate hydrolase, gamma-glutamyltranspeptidase, geranylgeranyl pyrophosphate synthase, gibberellin 20-oxidase, Glu/Leu/PheNal dehydrogenase, gluconate transport system permease 3, glucose dehydrogenase, glucose-1-phosphate cytidylyltransferase, glucose-6-phosphate 1-dehydrogenase, glutamate-ammonia-ligase, glutamine amidotransferase, glutamine synthetase, glutaminyl-tRNA synthetase, glutaredoxin, glutathione S-transferase, glycerol dehydrogenase, glycerol-3-phosphate dehydrogenase, glycogen (starch) synthase, glycogen synthase, glycogenin, glycoprotease, glycosidase, glycosyl transferase, GM02LC11114-protein, GM02LC17485-protein, GM02LC46-protein, GM02LC5744-protein, H/ACA ribonucleoprotein complex subunit 3, harpin-induced family protein, heat shock protein, heat shock transcription factor, HesB/YadR/YfhF family protein, histone H2A, homocitrate synthase, hydrolase, integral membrane transporter family protein, iron(III) dicitrate-binding protein, isochorismate synthase, isocitrate dehydrogenase, isopentenyl diphosphate isomerase, L-asparaginase, L-aspartate oxidase, Leucyl/phenylalanyl-tRNA-protein transferase, lipoprotein precursor, L-ribulose-5-phosphate 4epimerase, lysyl-tRNA synthetase, major facilitator superfamily transporter protein, malate dehydrogenase, malic enzyme, malonyl CoA-acyl carrier protein transacylase, membrane protein, membrane transport protein, metal-dependent hydrolase, methylglyoxal synthase, methyltransferase, mitochondrial processing protease, molecular chaperone portein, monothiol glutaredoxin, monthiol glutaredoxin, multiple antibiotic resistance protein, murein transglycosylase, N-acetyl-gamma-glutamyl-phosphate reductase, NAD(P)H-quinone oxidoreductase subunit, NADH dehydrogenase I chain I, nitrate/nitrite transport protein, ornithine carbamoyltransferase, oxidoreductase, oxidoreductase subunit, oxireductase, permease protein of phosphate ABC transporter, peroxisome assembly protein, phosphatidylinositol 3- and 4-kinase family protein, phosphoadenosine phosphosulfate reductase, phosphoanhydride phosphorylase, phosphopantetheine adenylyltransferase, phosphopantothenoylcysteine decarboxylase, phosphopantothenoylcysteinesynthetase/decarboxylase, phosphoribosylaminoimidazole carboxylase catalytic subunit, phosphoribosylformyl glycinamidine synthase subunit, phosphoribosylglycinamide formyltransferase, phosphoribosyltransferase, Photosystem I reaction center subunit XI, photosystem II protein, polygalacturonase, polyphosphate kinase, potassium transport protein, pre-mRNA-splicing factor, protease, protein kinase, protein phosphatase, purine nucleoside phosphorylase, purine-nucleoside phosphorylase, pyrroline carboxylate reductase, pyruvate kinase, quinolinate synthetase, riboflavin biosynthesis protein, ribosephosphate isomerase, constitutive, RNA binding protein, s_pp015018333r-protein, sec-independent protein translocase, Sec-independent protein translocase subunit, serine protease, serine protease inhibitor, short-chain alcohol dehydrogenase family, sll0064-protein, sll0254-protein, sll0354-protein, sll1761-protein, slr0600-protein, sodium/proton antiporter, squalene monooxygenase, sterol O-acyltransferase, thioredoxin, thioredoxin family protein, threonine dehydrogenase, threonine synthase, transcription factor, transcriptional regulator, transcriptional regulator protein, translation initiation factor subunit, transport protein, TTC0768-protein, TTC1386-protein, urease subunit, uridine/cytidine kinase, valine-pyruvate transaminase, XM_{—}473199-protein, YCL026C-A-protein, ycr102c-protein, ydr338c-protein, yer014w-protein, yer106w-protein, YFL019C-protein, yfl054c-protein, ygI237c-protein, ygr068c-protein, ygr221 c-protein, yhl013c-protein, yhr207c-protein, ylr065c-protein, ylr178c-protein, ynl142w-protein, yor221c-protein, zinc finger protein, zinc transporter, Zm_{—}4842_BE510522-protein, or ZM06LC11975-protein, the respective protein comprising a polypeptide encoded by one or more respective nucleic acid sequences as shown in Table I, application no. 2, column 5 or 8, (preferably the coding region thereof), or a homolog or fragment thereof, the respective protein comprising a respective polypeptide as depicted in Table II, application no. 2, column 5 or 8, or a homolog or fragment thereof, the respective protein comprising a sequence corresponding to the consensus sequence as shown in Table IV, application no. 2, column 8, and/or the respective protein comprising at least one polypeptide motif as shown in Table IV, application no. 2, column 8 is also referred to as Fine Chemical Related Protein” or “FCRP”.

[4326] Thus, in one embodiment, the present invention provides a process of the production of arginine, glutamate, glutamine, and/or proline, by increasing or generating one or more activities, especially selected from the group consisting of 2,3-dihydroxy-2,3-dihydrophenylpropionatedehydrogenase, 2-oxoglutarate dehydrogenase E1 subunit, 30S ribosomal protein, 3-deoxy-7-phosphoheptulonate synthase, 3-phosphoglycerate dehydrogenase, 47266012-protein, 49747384_SOYBEAN-protein, 4-alpha-glucanotransferase, ABC transporter permease protein, acetyl CoA carboxylase, acetyltransferase, acid shock protein, aconitate hydratase, acyl-CoA dehydrogenase, acyl-CoA synthase, acyltransferase, adenylosuccinate lyase, adenylylsulfate kinase, alanine dehydrogenase, aldehyde dehydrogenase, allantoicase, allantoinase, amine oxidase, amino acid ABC transporter permease protein, amino acid acetyltransferase, aminotransferase, ankyrin repeat family protein, anthranilate synthase component II, arginine decarboxylase, arginine exporter protein, asparaginase, aspartase, aspartate aminotransferase, At1g17440-protein, At1g19800-protein, At1g29350-protein, At1g47380-protein, At1g67340-protein, At4g32480-protein, At5g16650-protein, ATP synthase subunit beta, ATP-binding component of a transport system, ATP-dependent RNA helicase, AX653549-protein, AY087308-protein, b0456-protein, b0518-protein, b1003-protein, b1024-protein, b1108-protein, b1137-protein, b1163-protein, b1259-protein, b1280-protein, b1330-protein, b1445-protein, b1522-protein, b1898-protein, b2107-protein, b2121-protein, b2360-protein, b2399-protein, b2474-protein, b2513-protein, b2548-protein, b2613-protein, b2673-protein, b2812-protein, b2846-protein, b2909-protein, b2936-protein, b2999-protein, b3121-protein, b3151-protein, b3346-protein, b3410-protein, B3427-protein, b3509-protein, b3814-protein, b3817-protein, b3989-protein, b4029-protein, b4121-protein, beta-galactosidase, beta-hydroxylase, bifunctional purine biosynthesis protein, branched-chain amino acid ABC transporter permease protein, branched-chain amino acid permease, calcium-dependent protein kinase, carbohydrate kinase, carbon dioxide concentrating mechanism protein, cation/acetate symporter, cation-transporting ATPase, CBL-interacting protein kinase, CCAAT-binding transcription factor, CDP-diacylglycerol-glycerol-3-phosphate 3-phosphatidyltransferase, CDP-diglyceride synthetase, cell division control protein, cell division protein, Chaperone protein CIpB, circadian clock protein, coproporphyrinogen III oxidase, coproporphyrinogen oxidase, CTP synthase, CTP synthetase, cullin, cyclin D, cysteine synthase A, delta-1-pyrroline 5-carboxylase synthetase, dihydrolipoamide acetyltransferase, dihydrolipoamide dehydrogenase, DNA binding protein, DNA helicase II, DNA helicase IV, DNA mismatch repair protein, DnaJ-like chaperone, electron transport complex protein, elongation factor Tu, enoyl-CoA hydratase, enterobacterial common antigen polymerase, ethanolamine utilization protein, eukaryotic translation initiation factor 5, exopolyphosphatase, fatty acid desaturase, flavodoxin, fumarylacetoacetate hydrolase, gamma-glutamyltranspeptidase, geranylgeranyl pyrophosphate synthase, gibberellin 20-oxidase, Glu/Leu/PheNal dehydrogenase, gluconate transport system permease 3, glucose dehydrogenase, glucose-1-phosphate cytidylyltransferase, glucose-6-phosphate 1-dehydrogenase, glutamate-ammonia-ligase, glutamine amidotransferase, glutamine synthetase, glutaminyl-tRNA synthetase, glutaredoxin, glutathione S-transferase, glycerol dehydrogenase, glycerol-3-phosphate dehydrogenase, glycogen (starch) synthase, glycogen synthase, glycogenin, glycoprotease, glycosidase, glycosyl transferase, GM02LC11114-protein, GM02LC17485-protein, GM02LC46-protein, GM02LC5744-protein, H/ACA ribonucleoprotein complex subunit 3, harpin-induced family protein, heat shock protein, heat shock transcription factor, HesB/YadR/YfhF family protein, histone H2A, homocitrate synthase, hydrolase, integral membrane transporter family protein, iron(III) dicitrate-binding protein, isochorismate synthase, isocitrate dehydrogenase, isopentenyl diphosphate isomerase, L-asparaginase, L-aspartate oxidase, Leucyl/phenylalanyl-tRNA-protein transferase, lipoprotein precursor, L-ribulose-5-phosphate 4-epimerase, lysyl-tRNA synthetase, major facilitator superfamily transporter protein, malate dehydrogenase, malic enzyme, malonyl CoA-acyl carrier protein transacylase, membrane protein, membrane transport protein, metal-dependent hydrolase, methylglyoxal synthase, methyltransferase, mitochondrial processing protease, molecular chaperone portein, monothiol glutaredoxin, monthiol glutaredoxin, multiple antibiotic resistance protein, murein transglycosylase, N-acetyl-gamma-glutamyl-phosphate reductase, NAD(P)H-quinone oxidoreductase subunit, NADH dehydrogenase I chain I, nitrate/nitrite transport protein, ornithine carbamoyltransferase, oxidoreductase, oxidoreductase subunit, oxireductase, permease protein of phosphate ABC transporter, peroxisome assembly protein, phosphatidylinositol 3- and 4-kinase family protein, phosphoadenosine phosphosulfate reductase, phosphoanhydride phosphorylase, phosphopantetheine adenylyltransferase, phosphopantothenoylcysteine decarboxylase, phosphopantothenoylcysteinesynthetase/decarboxylase, phosphoribosylaminoimidazole carboxylase catalytic subunit, phosphoribosylformyl glycinamidine synthase subunit, phosphoribosylglycinamide formyltransferase, phosphoribosyltransferase, Photosystem I reaction center subunit XI, photosystem II protein, polygalacturonase, polyphosphate kinase, potassium transport protein, pre-mRNA-splicing factor, protease, protein kinase, protein phosphatase, purine nucleoside phosphorylase, purine-nucleoside phosphorylase, pyrroline carboxylate reductase, pyruvate kinase, quinolinate synthetase, riboflavin biosynthesis protein, ribosephosphate isomerase, constitutive, RNA binding protein, s_pp015018333r-protein, sec-independent protein translocase, Sec-independent protein translocase subunit, serine protease, serine protease inhibitor, short-chain alcohol dehydrogenase family, sll0064-protein, sll0254-protein, sll0354-protein, sll1761-protein, slr0600-protein, sodium/proton antiporter, squalene monooxygenase, sterol O-acyltransferase, thioredoxin, thioredoxin family protein, threonine dehydrogenase, threonine synthase, transcription factor, transcriptional regulator, transcriptional regulator protein, translation initiation factor subunit, transport protein, TTC0768-protein, TTC1386-protein, urease subunit, uridine/cytidine kinase, valine-pyruvate transaminase, XM_{—}473199-protein, YCL026C-A-protein, ycr102c-protein, ydr338c-protein, yer014w-protein, yer106w-protein, YFL019C-protein, yfl054c-protein, ygI237c-protein, ygr068c-protein, ygr221 c-protein, yhl013c-protein, yhr207c-protein, ylr065c-protein, ylr178c-protein, ynl142w-protein, yor221c-protein, zinc finger protein, zinc transporter, Zm_{—}4842_BE510522-protein, and ZM06LC11975-protein, which is conferred by one or more FCRPs or the gene product of one or more FCRP-genes, for example by the gene product of a nucleic acid sequences comprising a polynucleotide selected from the group as shown in Table 1, application no. 2, column 5 or 8, (preferably by the coding region thereof), or a homolog or a fragment thereof, e.g. or by one or more proteins each comprising a polypeptide encoded by one or more nucleic acid sequences selected from the group as shown in Table I, application no. 2, column 5 or 8, (preferably by the coding region thereof), or a homolog or a fragment thereof, or by one or more protein(s) each comprising a polypeptide selected from the group as depicted in Table II, application no. 2, column 5 and 8, or a homolog thereof, or a protein comprising a sequence corresponding to the consensus sequence or comprising at least one polypeptide motif as shown in Table IV, application no. 2, column 8.

[4327] for the disclosure of this paragraph see [0025.1.1.1] above.

[4328] In an embodiment, the process comprises increasing or generating the activity of one or more polypeptides having said activity, e.g.

by generating or increasing the amount and/or specific activity in the cell or a compartment of a cell of one of more FCRP, especially selected from the group consisting of 2,3-dihydroxy-2,3-dihydrophenylpropionatedehydrogenase, 2-oxoglutarate dehydrogenase E1 subunit, 30S ribosomal protein, 3-deoxy-7-phosphoheptulonate synthase, 3-phosphoglycerate dehydrogenase, 47266012-protein, 49747384_SOYBEAN-protein, 4-alpha-glucanotransferase, ABC transporter permease protein, acetyl CoA carboxylase, acetyltransferase, acid shock protein, aconitate hydratase, acyl-CoA dehydrogenase, acyl-CoA synthase, acyltransferase, adenylosuccinate lyase, adenylylsulfate kinase, alanine dehydrogenase, aldehyde dehydrogenase, allantoicase, allantoinase, amine oxidase, amino acid ABC transporter permease protein, amino acid acetyltransferase, aminotransferase, ankyrin repeat family protein, anthranilate synthase component II, arginine decarboxylase, arginine exporter protein, asparaginase, aspartase, aspartate aminotransferase, At1g17440-protein, At1g19800-protein, At1g29350-protein, At1 g47380-protein, At1g67340-protein, At4g32480-protein, At5g16650-protein, ATP synthase subunit beta, ATP-binding component of a transport system, ATP-dependent RNA helicase, AX653549-protein, AY087308-protein, b0456-protein, b0518-protein, b1003-protein, b1024-protein, b1108-protein, b1137-protein, b1163-protein, b1259-protein, b1280-protein, b1330-protein, b1445-protein, b1522-protein, b1898-protein, b2107-protein, b2121-protein, b2360-protein, b2399-protein, b2474-protein, b2513-protein, b2548-protein, b2613-protein, b2673-protein, b2812-protein, b2846-protein, b2909-protein, b2936-protein, b2999-protein, b3121-protein, b3151-protein, b3346-protein, b3410-protein, B3427-protein, b3509-protein, b3814-protein, b3817-protein, b3989-protein, b4029-protein, b4121-protein, beta-galactosidase, beta-hydroxylase, bifunctional purine biosynthesis protein, branched-chain amino acid ABC transporter permease protein, branched-chain amino acid permease, calcium-dependent protein kinase, carbohydrate kinase, carbon dioxide concentrating mechanism protein, cation/acetate symporter, cation-transporting ATPase, CBL-interacting protein kinase, CCAAT-binding transcription factor, CDP-diacylglycerol-glycerol-3-phosphate 3-phosphatidyltransferase, CDP-diglyceride synthetase, cell division control protein, cell division protein, Chaperone protein CIpB, circadian clock protein, coproporphyrinogen III oxidase, coproporphyrinogen oxidase, CTP synthase, CTP synthetase, cullin, cyclin D, cysteine synthase A, delta-1-pyrroline 5-carboxylase synthetase, dihydrolipoamide acetyltransferase, dihydrolipoamide dehydrogenase, DNA binding protein, DNA helicase II, DNA helicase IV, DNA mismatch repair protein, DnaJ-like chaperone, electron transport complex protein, elongation factor Tu, enoyl-CoA hydratase, enterobacterial common antigen polymerase, ethanolamine utilization protein, eukaryotic translation initiation factor 5, exopolyphosphatase, fatty acid desaturase, flavodoxin, fumarylacetoacetate hydrolase, gamm-aglutamyltranspeptidase, geranylgeranyl pyrophosphate synthase, gibberellin 20-oxidase, Glu/Leu/PheNal dehydrogenase, gluconate transport system permease 3, glucose dehydrogenase, glucose-1-phosphate cytidylyltransferase, glucose-6-phosphate 1-dehydrogenase, glutamate-ammonia-ligase, glutamine amidotransferase, glutamine synthetase, glutaminyl-tRNA synthetase, glutaredoxin, glutathione S-transferase, glycerol dehydrogenase, glycerol-3-phosphate dehydrogenase, glycogen (starch) synthase, glycogen synthase, glycogenin, glycoprotease, glycosidase, glycosyl transferase, GM02LC11114-protein, GM02LC17485-protein, GM02LC46-protein, GM02LC5744-protein, H/ACA ribonucleoprotein complex subunit 3, harpin-induced family protein, heat shock protein, heat shock transcription factor, HesB/YadR/YfhF family protein, histone H2A, homocitrate synthase, hydrolase, integral membrane transporter family protein, iron(III) dicitrate-binding protein, isochorismate synthase, isocitrate dehydrogenase, isopentenyl diphosphate isomerase, L-asparaginase, L-aspartate oxidase, Leucyl/phenylalanyl-tRNA-protein transferase, lipoprotein precursor, L-ribulose-5-phosphate 4-epimerase, lysyl-tRNA synthetase, major facilitator superfamily transporter protein, malate dehydrogenase, malic enzyme, malonyl CoA-acyl carrier protein transacylase, membrane protein, membrane transport protein, metal-dependent hydrolase, methylglyoxal synthase, methyltransferase, mitochondrial processing protease, molecular chaperone portein, monothiol glutaredoxin, monthiol glutaredoxin, multiple antibiotic resistance protein, murein transglycosylase, N-acetyl-gamma-glutamyl-phosphate reductase, NAD(P)H-quinone oxidoreductase subunit, NADH dehydrogenase I chain I, nitrate/nitrite transport protein, ornithine carbamoyltransferase, oxidoreductase, oxidoreductase subunit, oxireductase, permease protein of phosphate ABC transporter, peroxisome assembly protein, phosphatidylinositol 3- and 4-kinase family protein, phosphoadenosine phosphosulfate reductase, phosphoanhydride phosphorylase, phosphopantetheine adenylyltransferase, phosphopantothenoylcysteine decarboxylase, phosphopanto-thenoylcysteinesynthetase/decarboxylase, phosphoribosylaminoimidazole carboxylase catalytic subunit, phosphoribosylformyl glycinamidine synthase subunit, phosphoribosylglycinamide formyltransferase, phosphoribosyltransferase, Photosystem I reaction center subunit XI, photosyste m II protein, polygalacturonase, polyphosphate kinase, potassium transport protein, pre-mRNA-splicing factor, protease, protein kinase, protein phosphatase, purine nucleoside phosphorylase, purine-nucleoside phosphorylase, pyrroline carboxylate reductase, pyruvate kinase, quinolinate synthetase, riboflavin biosynthesis protein, ribosephosphate isomerase, constitutive, RNA binding protein, s_pp015018333r-protein, sec-independent protein translocase, Sec-independent protein translocase subunit, serine protease, serine protease inhibitor, short-chain alcohol dehydrogenase family, sll0064-protein, sll0254-protein, sll0354-protein, sll1761-protein, slr0600-protein, sodium/proton antiporter, squalene monooxygenase, sterol O-acyltransferase, thioredoxin, thioredoxin family protein, threonine dehydrogenase, threonine synthase, transcription factor, transcriptional regulator, transcriptional regulator protein, translation initiation factor subunit, transport protein, TTC0768-protein, TTC1386-protein, urease subunit, uridine/cytidine kinase, valine-pyruvate transaminase, XM_{—}473199-protein, YCL026C-A-protein, ycr102c-protein, ydr338c-protein, yer014w-protein, yer106w-protein, YFL019C-protein, yfl054c-protein, ygl237c-protein, ygr068c-protein, ygr221 c-protein, yhl013c-protein, yhr207c-protein, ylr065cprotein, ylr178c-protein, ynl142w-protein, yor221c-protein, zinc finger protein, zinc transporter, Zm_{—}4842_BE510522-protein, and ZMO6LC11975-protein, for example of the respective polypeptide as depicted in Table II, application no. 2, column 5 and 8, or a homolog or a fragment thereof, or the respective polypeptide comprising a sequence corresponding to the consensus sequences as shown in Table IV, application no. 2, column 8, or the respective polypeptide comprising at least one polypeptide motif as depicted in Table IV, application no. 2, column 8.

[4329] A further embodiment of the present invention relates to a process for the production of glutamate, which comprises
[4330] (a) increasing or generating the activiy of a 47266012-protein non-targeted in a non-human organism or a part thereof, preferably a microorganism, a plant cell, a plant or a part thereof, as compared to a corresponding non-transformed wild type non-human organism or a part thereof; and
[4331] (b) growing the non-human organism or a part thereof under conditions which permit the production of glutamate or a composition comprising glutamate in said non-human organism or in the culture medium surrounding said non-human organism.

[4332] A further embodiment of the present invention relates to a process for the production of glutamine, which comprises
[4333] (a) increasing or generating the activiy of a 47266012-protein non-targeted in a non-human organism or a part thereof, preferably a microorganism, a plant cell, a plant or a part thereof, as compared to a corresponding non-transformed wild type non-human organism or a part thereof; and
[4334] (b) growing the non-human organism or a part thereof under conditions which permit the production of glutamine or a composition comprising glutamine in said non-human organism or in the culture medium surrounding said non-human organism.

[4335] A further embodiment of the present invention relates to a process for the production of glutamate, which comprises
[4336] (a) increasing or generating the activiy of a 49747384_SOYBEAN-protein non-targeted in a non-human organism or a part thereof, preferably a microorganism, a plant cell, a plant or a part thereof, as compared to a corresponding non-transformed wild type non-human organism or a part thereof; and
[4337] (b) growing the non-human organism or a part thereof under conditions which permit the production of glutamate or a composition comprising glutamate in said non-human organism or in the culture medium surrounding said non-human organism.

[4338] A further embodiment of the present invention relates to a process for the production of glutamate, which comprises
[4339] (a) increasing or generating the activiy of a pyruvate kinase non-targeted in a non-human organism or a part thereof, preferably a microorganism, a plant cell, a plant or a part thereof, as compared to a corresponding non-transformed wild type non-human organism or a part thereof; and
[4340] (b) growing the non-human organism or a part thereof under conditions which permit the production of glutamate or a composition comprising glutamate in said non-human organism or in the culture medium surrounding said non-human organism.

[4341] A further embodiment of the present invention relates to a process for the production of proline, which comprises
[4342] (a) increasing or generating the activiy of a pyruvate kinase non-targeted in a non-human organism or a part thereof, preferably a microorganism, a plant cell, a plant or a part thereof, as compared to a corresponding non-transformed wild type non-human organism or a part thereof; and
[4343] (b) growing the non-human organism or a part thereof under conditions which permit the production of proline or a composition comprising proline in said non-human organism or in the culture medium surrounding said non-human organism.

[4344] A further embodiment of the present invention relates to a process for the production of arginine, which comprises
[4345] (a) increasing or generating the activiy of a acetyltransferase non-targeted in a non-human organism or a part thereof, preferably a microorganism, a plant cell, a plant or a part thereof, as compared to a corresponding non-transformed wild type non-human organism or a part thereof; and
[4346] (b) growing the non-human organism or a part thereof under conditions which permit the production of arginine or a composition comprising arginine in said non-human organism or in the culture medium surrounding said non-human organism.

[4347] A further embodiment of the present invention relates to a process for the production of glutamate, which comprises
[4348] (a) increasing or generating the activiy of a pyruvate kinase non-targeted in a non-human organism or a part thereof, preferably a microorganism, a plant cell, a plant or a part thereof, as compared to a corresponding non-transformed wild type non-human organism or a part thereof; and
[4349] (b) growing the non-human organism or a part thereof under conditions which permit the production of glutamate or a composition comprising glutamate in said non-human organism or in the culture medium surrounding said non-human organism.

[4350] A further embodiment of the present invention relates to a process for the production of arginine, which comprises
[4351] (a) increasing or generating the activiy of a glucose-6-phosphate 1-dehydrogenase non-targeted in a non-human organism or a part thereof, preferably a microorganism, a plant cell, a plant or a part thereof, as compared to a corresponding non-transformed wild type non-human organism or a part thereof; and
[4352] (b) growing the non-human organism or a part thereof under conditions which permit the production of arginine or a composition comprising arginine in said non-human organism or in the culture medium surrounding said non-human organism.

[4353] A further embodiment of the present invention relates to a process for the production of proline, which comprises
[4354] (a) increasing or generating the activiy of a glucose-6-phosphate 1-dehydrogenase non-targeted in a non-human organism or a part thereof, preferably a microorganism, a plant cell, a plant or a part thereof, as compared to a corresponding non-transformed wild type non-human organism or a part thereof; and
[4355] (b) growing the non-human organism or a part thereof under conditions which permit the production of proline or a composition comprising proline in said non-human organism or in the culture medium surrounding said non-human organism.

[4356] A further embodiment of the present invention relates to a process for the production of arginine, which comprises
[4357] (a) increasing or generating the activiy of a amino acid acetyltransferase non-targeted in a non-human organism or a part thereof, preferably a microorganism, a plant cell, a plant or a part thereof, as compared to a corresponding non-transformed wild type non-human organism or a part thereof; and
[4358] (b) growing the non-human organism or a part thereof under conditions which permit the production of arginine or a composition comprising arginine in said non-human organism or in the culture medium surrounding said non-human organism.

[4359] A further embodiment of the present invention relates to a process for the production of glutamate, which comprises
[4360] (a) increasing or generating the activiy of a protein phosphatase non-targeted in a non-human organism or a part thereof, preferably a microorganism, a plant cell, a plant or a part thereof, as compared to a corresponding non-transformed wild type non-human organism or a part thereof; and
[4361] (b) growing the non-human organism or a part thereof under conditions which permit the production of glutamate or a composition comprising glutamate in said non-human organism or in the culture medium surrounding said non-human organism.

[4362] A further embodiment of the present invention relates to a process for the production of glutamine, which comprises
[4363] (a) increasing or generating the activiy of a protein phosphatase non-targeted in a non-human organism or a part thereof, preferably a microorganism, a plant cell, a plant or a part thereof, as compared to a corresponding non-transformed wild type non-human organism or a part thereof; and
[4364] (b) growing the non-human organism or a part thereof under conditions which permit the production of glutamine or a composition comprising glutamine in said non-human organism or in the culture medium surrounding said non-human organism.

[4365] A further embodiment of the present invention relates to a process for the production of arginine, which comprises
[4366] (a) increasing or generating the activiy of a At1g17440-protein non-targeted in a non-human organism or a part thereof, preferably a microorganism, a plant cell, a plant or a part thereof, as compared to a corresponding non-transformed wild type non-human organism or a part thereof; and
[4367] (b) growing the non-human organism or a part thereof under conditions which permit the production of arginine or a composition comprising arginine in said non-human organism or in the culture medium surrounding said non-human organism.

[4368] A further embodiment of the present invention relates to a process for the production of glutamine, which comprises
[4369] (a) increasing or generating the activiy of a At1g19800-protein non-targeted in a non-human organism or a part thereof, preferably a microorganism, a plant cell, a plant or a part thereof, as compared to a corresponding non-transformed wild type non-human organism or a part thereof; and
[4370] (b) growing the non-human organism or a part thereof under conditions which permit the production of glutamine or a composition comprising glutamine in said non-human organism or in the culture medium surrounding said non-human organism.

[4371] A further embodiment of the present invention relates to a process for the production of arginine, which comprises
[4372] (a) increasing or generating the activiy of a cullin non-targeted in a non-human organism or a part thereof, preferably a microorganism, a plant cell, a plant or a part thereof, as compared to a corresponding non-transformed wild type non-human organism or a part thereof; and
[4373] (b) growing the non-human organism or a part thereof under conditions which permit the production of arginine or a composition comprising arginine in said non-human organism or in the culture medium surrounding said non-human organism.

[4374] A further embodiment of the present invention relates to a process for the production of proline, which comprises
[4375] (a) increasing or generating the activiy of a cullin non-targeted in a non-human organism or a part thereof, preferably a microorganism, a plant cell, a plant or a part thereof, as compared to a corresponding non-transformed wild type non-human organism or a part thereof; and
[4376] (b) growing the non-human organism or a part thereof under conditions which permit the production of proline or a composition comprising proline in said non-human organism or in the culture medium surrounding said non-human organism.

[4377] A further embodiment of the present invention relates to a process for the production of arginine, which comprises
[4378] (a) increasing or generating the activiy of a At1g29350-protein non-targeted in a non-human organism or a part thereof, preferably a microorganism, a plant cell, a plant or a part thereof, as compared to a corresponding non-transformed wild type non-human organism or a part thereof; and
[4379] (b) growing the non-human organism or a part thereof under conditions which permit the production of arginine or a composition comprising arginine in said non-human organism or in the culture medium surrounding said non-human organism.

[4380] A further embodiment of the present invention relates to a process for the production of arginine, which comprises
[4381] (a) increasing or generating the activiy of a eukaryotic translation initiation factor 5 non-targeted in a non-human organism or a part thereof, preferably a microorganism, a plant cell, a plant or a part thereof, as compared to a corresponding non-transformed wild type non-human organism or a part thereof; and
[4382] (b) growing the non-human organism or a part thereof under conditions which permit the production of arginine or a composition comprising arginine in said non-human organism or in the culture medium surrounding said non-human organism.

[4383] A further embodiment of the present invention relates to a process for the production of glutamine, which comprises
[4384] (a) increasing or generating the activiy of a eukaryotic translation initiation factor 5 non-targeted in a non-human organism or a part thereof, preferably a microorganism, a plant cell, a plant or a part thereof, as compared to a corresponding non-transformed wild type non-human organism or a part thereof; and
[4385] (b) growing the non-human organism or a part thereof under conditions which permit the production of glutamine or a composition comprising glutamine in said non-human organism or in the culture medium surrounding said non-human organism.

[4386] A further embodiment of the present invention relates to a process for the production of arginine, which comprises
[4387] (a) increasing or generating the activiy of a transcriptional regulator non-targeted in a non-human organism or a part thereof, preferably a microorganism, a plant cell, a plant or a part thereof, as compared to a corresponding non-transformed wild type non-human organism or a part thereof; and
[4388] (b) growing the non-human organism or a part thereof under conditions which permit the production of arginine or a composition comprising arginine in said non-human organism or in the culture medium surrounding said non-human organism.

[4389] A further embodiment of the present invention relates to a process for the production of glutamate, which comprises
[4390] (a) increasing or generating the activiy of a transcriptional regulator non-targeted in a non-human organism or a part thereof, preferably a microorganism, a plant cell, a plant or a part thereof, as compared to a corresponding non-transformed wild type non-human organism or a part thereof; and
[4391] (b) growing the non-human organism or a part thereof under conditions which permit the production of glutamate or a composition comprising glutamate in said non-human organism or in the culture medium surrounding said non-human organism.

[4392] A further embodiment of the present invention relates to a process for the production of glutamine, which comprises
[4393] (a) increasing or generating the activiy of a transcriptional regulator non-targeted in a non-human organism or a part thereof, preferably a microorganism, a plant cell, a plant or a part thereof, as compared to a corresponding non-transformed wild type non-human organism or a part thereof; and
[4394] (b) growing the non-human organism or a part thereof under conditions which permit the production of glutamine or a composition comprising glutamine in said non-human organism or in the culture medium surrounding said non-human organism.

[4395] A further embodiment of the present invention relates to a process for the production of proline, which comprises
[4396] (a) increasing or generating the activiy of a transcriptional regulator non-targeted in a non-human organism or a part thereof, preferably a microorganism, a plant cell, a plant or a part thereof, as compared to a corresponding non-transformed wild type non-human organism or a part thereof; and
[4397] (b) growing the non-human organism or a part thereof under conditions which permit the production of proline or a composition comprising proline in said non-human organism or in the culture medium surrounding said non-human organism.

[4398] A further embodiment of the present invention relates to a process for the production of proline, which comprises
[4399] (a) increasing or generating the activiy of a At1g47380-protein non-targeted in a non-human organism or a part thereof, preferably a microorganism, a plant cell, a plant or a part thereof, as compared to a corresponding non-transformed wild type non-human organism or a part thereof; and
[4400] (b) growing the non-human organism or a part thereof under conditions which permit the production of proline or a composition comprising proline in said non-human organism or in the culture medium surrounding said non-human organism.

[4401] A further embodiment of the present invention relates to a process for the production of arginine, which comprises
[4402] (a) increasing or generating the activiy of a protein kinase non-targeted in a non-human organism or a part thereof, preferably a microorganism, a plant cell, a plant or a part thereof, as compared to a corresponding non-transformed wild type non-human organism or a part thereof; and
[4403] (b) growing the non-human organism or a part thereof under conditions which permit the production of arginine or a composition comprising arginine in said non-human organism or in the culture medium surrounding said non-human organism.

[4404] A further embodiment of the present invention relates to a process for the production of glutamate, which comprises
[4405] (a) increasing or generating the activiy of a protein kinase non-targeted in a non-human organism or a part thereof, preferably a microorganism, a plant cell, a plant or a part thereof, as compared to a corresponding non-transformed wild type non-human organism or a part thereof; and
[4406] (b) growing the non-human organism or a part thereof under conditions which permit the production of glutamate or a composition comprising glutamate in said non-human organism or in the culture medium surrounding said non-human organism.

[4407] A further embodiment of the present invention relates to a process for the production of proline, which comprises
[4408] (a) increasing or generating the activiy of a protein kinase non-targeted in a non-human organism or a part thereof, preferably a microorganism, a plant cell, a plant or a part thereof, as compared to a corresponding non-transformed wild type non-human organism or a part thereof; and
[4409] (b) growing the non-human organism or a part thereof under conditions which permit the production of proline or a composition comprising proline in said non-human organism or in the culture medium surrounding said non-human organism.

[4410] A further embodiment of the present invention relates to a process for the production of arginine, which comprises
[4411] (a) increasing or generating the activiy of a calcium-dependent protein kinase non-targeted in a non-human organism or a part thereof, preferably a microorganism, a plant cell, a plant or a part thereof, as compared to a corresponding non-transformed wild type non-human organism or a part thereof; and
[4412] (b) growing the non-human organism or a part thereof under conditions which permit the production of arginine or a composition comprising arginine in said non-human organism or in the culture medium surrounding said non-human organism.

[4413] A further embodiment of the present invention relates to a process for the production of glutamine, which comprises
[4414] (a) increasing or generating the activiy of a calcium-dependent protein kinase non-targeted in a non-human organism or a part thereof, preferably a microorganism, a plant cell, a plant or a part thereof, as compared to a corresponding non-transformed wild type non-human organism or a part thereof; and
[4415] (b) growing the non-human organism or a part thereof under conditions which permit the production of glutamine or a composition comprising glutamine in said non-human organism or in the culture medium surrounding said non-human organism.

[4416] A further embodiment of the present invention relates to a process for the production of proline, which comprises
[4417] (a) increasing or generating the activiy of a At1g67340-protein non-targeted in a non-human organism or a part thereof, preferably a microorganism, a plant cell, a plant or a part thereof, as compared to a corresponding non-transformed wild type non-human organism or a part thereof; and
[4418] (b) growing the non-human organism or a part thereof under conditions which permit the production of proline or a composition comprising proline in said non-human organism or in the culture medium surrounding said non-human organism.

[4419] A further embodiment of the present invention relates to a process for the production of glutamine, which comprises
[4420] (a) increasing or generating the activiy of a transcription factor non-targeted in a non-human organism or a part thereof, preferably a microorganism, a plant cell, a plant or a part thereof, as compared to a corresponding non-transformed wild type non-human organism or a part thereof; and
[4421] (b) growing the non-human organism or a part thereof under conditions which permit the production of glutamine or a composition comprising glutamine in said non-human organism or in the culture medium surrounding said non-human organism.

[4422] A further embodiment of the present invention relates to a process for the production of glutamine, which comprises
[4423] (a) increasing or generating the activiy of a protein phosphatase non-targeted in a non-human organism or a part thereof, preferably a microorganism, a plant cell, a plant or a part thereof, as compared to a corresponding non-transformed wild type non-human organism or a part thereof; and
[4424] (b) growing the non-human organism or a part thereof under conditions which permit the production of glutamine or a composition comprising glutamine in said non-human organism or in the culture medium surrounding said non-human organism.

[4425] A further embodiment of the present invention relates to a process for the production of proline, which comprises
[4426] (a) increasing or generating the activiy of a transcription factor non-targeted in a non-human organism or a part thereof, preferably a microorganism, a plant cell, a plant or a part thereof, as compared to a corresponding non-transformed wild type non-human organism or a part thereof; and
[4427] (b) growing the non-human organism or a part thereof under conditions which permit the production of proline or a composition comprising proline in said non-human organism or in the culture medium surrounding said non-human organism.

[4428] A further embodiment of the present invention relates to a process for the production of glutamate, which comprises
[4429] (a) increasing or generating the activiy of a protein phosphatase non-targeted in a non-human organism or a part thereof, preferably a microorganism, a plant cell, a plant or a part thereof, as compared to a corresponding non-transformed wild type non-human organism or a part thereof; and
[4430] (b) growing the non-human organism or a part thereof under conditions which permit the production of glutamate or a composition comprising glutamate in said non-human organism or in the culture medium surrounding said non-human organism.

[4431] A further embodiment of the present invention relates to a process for the production of glutamine, which comprises
[4432] (a) increasing or generating the activiy of a protein phosphatase non-targeted in a non-human organism or a part thereof, preferably a microorganism, a plant cell, a plant or a part thereof, as compared to a corresponding non-transformed wild type non-human organism or a part thereof; and
[4433] (b) growing the non-human organism or a part thereof under conditions which permit the production of glutamine or a composition comprising glutamine in said non-human organism or in the culture medium surrounding said non-human organism.

[4434] A further embodiment of the present invention relates to a process for the production of proline, which comprises
[4435] (a) increasing or generating the activiy of a serine protease inhibitor non-targeted in a non-human organism or a part thereof, preferably a microorganism, a plant cell, a plant or a part thereof, as compared to a corresponding non-transformed wild type non-human organism or a part thereof; and
[4436] (b) growing the non-human organism or a part thereof under conditions which permit the production of proline or a composition comprising proline in said non-human organism or in the culture medium surrounding said non-human organism.

[4437] A further embodiment of the present invention relates to a process for the production of proline, which comprises
[4438] (a) increasing or generating the activiy of a protein phosphatase non-targeted in a non-human organism or a part thereof, preferably a microorganism, a plant cell, a plant or a part thereof, as compared to a corresponding non-transformed wild type non-human organism or a part thereof; and
[4439] (b) growing the non-human organism or a part thereof under conditions which permit the production of proline or a composition comprising proline in said non-human organism or in the culture medium surrounding said non-human organism.

[4440] A further embodiment of the present invention relates to a process for the production of glutamine, which comprises
[4441] (a) increasing or generating the activiy of a CBL-interacting protein kinase non-targeted in a non-human organism or a part thereof, preferably a microorganism, a plant cell, a plant or a part thereof, as compared to a corresponding non-transformed wild type non-human organism or a part thereof; and
[4442] (b) growing the non-human organism or a part thereof under conditions which permit the production of glutamine or a composition comprising glutamine in said non-human organism or in the culture medium surrounding said non-human organism.

[4443] A further embodiment of the present invention relates to a process for the production of proline, which comprises
[4444] (a) increasing or generating the activiy of a CBL-interacting protein kinase non-targeted in a non-human organism or a part thereof, preferably a microorganism, a plant cell, a plant or a part thereof, as compared to a corresponding non-transformed wild type non-human organism or a part thereof; and
[4445] (b) growing the non-human organism or a part thereof under conditions which permit the production of proline or a composition comprising proline in said non-human organism or in the culture medium surrounding said non-human organism.

[4446] A further embodiment of the present invention relates to a process for the production of arginine, which comprises
[4447] (a) increasing or generating the activiy of a glutaredoxin non-targeted in a non-human organism or a part thereof, preferably a microorganism, a plant cell, a plant or a part thereof, as compared to a corresponding non-transformed wild type non-human organism or a part thereof; and
[4448] (b) growing the non-human organism or a part thereof under conditions which permit the production of arginine or a composition comprising arginine in said non-human organism or in the culture medium surrounding said non-human organism.

[4449] A further embodiment of the present invention relates to a process for the production of proline, which comprises
[4450] (a) increasing or generating the activiy of a glutaredoxin non-targeted in a non-human organism or a part thereof, preferably a microorganism, a plant cell, a plant or a part thereof, as compared to a corresponding non-transformed wild type non-human organism or a part thereof; and
[4451] (b) growing the non-human organism or a part thereof under conditions which permit the production of proline or a composition comprising proline in said non-human organism or in the culture medium surrounding said non-human organism.

[4452] A further embodiment of the present invention relates to a process for the production of proline, which comprises
[4453] (a) increasing or generating the activiy of a CBL-interacting protein kinase non-targeted in a non-human organism or a part thereof, preferably a microorganism, a plant cell, a plant or a part thereof, as compared to a corresponding non-transformed wild type non-human organism or a part thereof; and
[4454] (b) growing the non-human organism or a part thereof under conditions which permit the production of proline or a composition comprising proline in said non-human organism or in the culture medium surrounding said non-human organism.

[4455] A further embodiment of the present invention relates to a process for the production of proline, which comprises
[4456] (a) increasing or generating the activiy of a delta-1-pyrroline 5-carboxylase synthetase non-targeted in a non-human organism or a part thereof, preferably a microorganism, a plant cell, a plant or a part thereof, as compared to a corresponding non-transformed wild type non-human organism or a part thereof; and
[4457] (b) growing the non-human organism or a part thereof under conditions which permit the production of proline or a composition comprising proline in said non-human organism or in the culture medium surrounding said non-human organism.

[4458] A further embodiment of the present invention relates to a process for the production of glutamine, which comprises
[4459] (a) increasing or generating the activiy of a phosphatidylinositol 3- and 4-kinase family protein non-targeted in a non-human organism or a part thereof, preferably a microorganism, a plant cell, a plant or a part thereof, as compared to a corresponding non-transformed wild type non-human organism or a part thereof; and
[4460] (b) growing the non-human organism or a part thereof under conditions which permit the production of glutamine or a composition comprising glutamine in said non-human organism or in the culture medium surrounding said non-human organism.

[4461] A further embodiment of the present invention relates to a process for the production of arginine, which comprises
[4462] (a) increasing or generating the activiy of a glutaredoxin non-targeted in a non-human organism or a part thereof, preferably a microorganism, a plant cell, a plant or a part thereof, as compared to a corresponding non-transformed wild type non-human organism or a part thereof; and
[4463] (b) growing the non-human organism or a part thereof under conditions which permit the production of arginine or a composition comprising arginine in said non-human organism or in the culture medium surrounding said non-human organism.

[4464] A further embodiment of the present invention relates to a process for the production of glutamine, which comprises
[4465] (a) increasing or generating the activiy of a glutaredoxin non-targeted in a non-human organism or a part thereof, preferably a microorganism, a plant cell, a plant or a part thereof, as compared to a corresponding non-transformed wild type non-human organism or a part thereof; and
[4466] (b) growing the non-human organism or a part thereof under conditions which permit the production of glutamine or a composition comprising glutamine in said non-human organism or in the culture medium surrounding said non-human organism.

[4467] A further embodiment of the present invention relates to a process for the production of proline, which comprises
[4468] (a) increasing or generating the activiy of a glutaredoxin non-targeted in a non-human organism or a part thereof, preferably a microorganism, a plant cell, a plant or a part thereof, as compared to a corresponding non-transformed wild type non-human organism or a part thereof; and
[4469] (b) growing the non-human organism or a part thereof under conditions which permit the production of proline or a composition comprising proline in said non-human organism or in the culture medium surrounding said non-human organism.

[4470] A further embodiment of the present invention relates to a process for the production of glutamate, which comprises
[4471] (a) increasing or generating the activiy of a pyruvate kinase non-targeted in a non-human organism or a part thereof, preferably a microorganism, a plant cell, a plant or a part thereof, as compared to a corresponding non-transformed wild type non-human organism or a part thereof; and
[4472] (b) growing the non-human organism or a part thereof under conditions which permit the production of glutamate or a composition comprising glutamate in said non-human organism or in the culture medium surrounding said non-human organism.

[4473] A further embodiment of the present invention relates to a process for the production of proline, which comprises
[4474] (a) increasing or generating the activiy of a pyruvate kinase non-targeted in a non-human organism or a part thereof, preferably a microorganism, a plant cell, a plant or a part thereof, as compared to a corresponding non-transformed wild type non-human organism or a part thereof; and
[4475] (b) growing the non-human organism or a part thereof under conditions which permit the production of proline or a composition comprising proline in said non-human organism or in the culture medium surrounding said non-human organism.

[4476] A further embodiment of the present invention relates to a process for the production of proline, which comprises
[4477] (a) increasing or generating the activiy of a ankyrin repeat family protein non-targeted in a non-human organism or a part thereof, preferably a microorganism, a plant cell, a plant or a part thereof, as compared to a corresponding non-transformed wild type non-human organism or a part thereof; and
[4478] (b) growing the non-human organism or a part thereof under conditions which permit the production of proline or a composition comprising proline in said non-human organism or in the culture medium surrounding said non-human organism.

[4479] A further embodiment of the present invention relates to a process for the production of glutamate, which comprises
[4480] (a) increasing or generating the activiy of a protein phosphatase non-targeted in a non-human organism or a part thereof, preferably a microorganism, a plant cell, a plant or a part thereof, as compared to a corresponding non-transformed wild type non-human organism or a part thereof; and
[4481] (b) growing the non-human organism or a part thereof under conditions which permit the production of glutamate or a composition comprising glutamate in said non-human organism or in the culture medium surrounding said non-human organism.

[4482] A further embodiment of the present invention relates to a process for the production of arginine, which comprises
[4483] (a) increasing or generating the activiy of a thioredoxin family protein non-targeted in a non-human organism or a part thereof, preferably a microorganism, a plant cell, a plant or a part thereof, as compared to a corresponding non-transformed wild type non-human organism or a part thereof; and
[4484] (b) growing the non-human organism or a part thereof under conditions which permit the production of arginine or a composition comprising arginine in said non-human organism or in the culture medium surrounding said non-human organism.

[4485] A further embodiment of the present invention relates to a process for the production of glutamate, which comprises
[4486] (a) increasing or generating the activiy of a thioredoxin family protein non-targeted in a non-human organism or a part thereof, preferably a microorganism, a plant cell, a plant or a part thereof, as compared to a corresponding non-transformed wild type non-human organism or a part thereof; and
[4487] (b) growing the non-human organism or a part thereof under conditions which permit the production of glutamate or a composition comprising glutamate in said non-human organism or in the culture medium surrounding said non-human organism.

[4488] A further embodiment of the present invention relates to a process for the production of glutamine, which comprises
[4489] (a) increasing or generating the activiy of a thioredoxin family protein non-targeted in a non-human organism or a part thereof, preferably a microorganism, a plant cell, a plant or a part thereof, as compared to a corresponding non-transformed wild type non-human organism or a part thereof; and
[4490] (b) growing the non-human organism or a part thereof under conditions which permit the production of glutamine or a composition comprising glutamine in said non-human organism or in the culture medium surrounding said non-human organism.

[4491] A further embodiment of the present invention relates to a process for the production of proline, which comprises
[4492] (a) increasing or generating the activiy of a thioredoxin family protein non-targeted in a non-human organism or a part thereof, preferably a microorganism, a plant cell, a plant or a part thereof, as compared to a corresponding non-transformed wild type non-human organism or a part thereof; and
[4493] (b) growing the non-human organism or a part thereof under conditions which permit the production of proline or a composition comprising proline in said non-human organism or in the culture medium surrounding said non-human organism.

[4494] A further embodiment of the present invention relates to a process for the production of arginine, which comprises
[4495] (a) increasing or generating the activiy of a harpin-induced family protein non-targeted in a non-human organism or a part thereof, preferably a microorganism, a plant cell, a plant or a part thereof, as compared to a corresponding non-transformed wild type non-human organism or a part thereof; and
[4496] (b) growing the non-human organism or a part thereof under conditions which permit the production of arginine or a composition comprising arginine in said non-human organism or in the culture medium surrounding said non-human organism.

[4497] A further embodiment of the present invention relates to a process for the production of glutamine, which comprises
[4498] (a) increasing or generating the activiy of a harpin-induced family protein non-targeted in a non-human organism or a part thereof, preferably a microorganism, a plant cell, a plant or a part thereof, as compared to a corresponding non-transformed wild type non-human organism or a part thereof; and
[4499] (b) growing the non-human organism or a part thereof under conditions which permit the production of glutamine or a composition comprising glutamine in said non-human organism or in the culture medium surrounding said non-human organism.

[4500] A further embodiment of the present invention relates to a process for the production of proline, which comprises
[4501] (a) increasing or generating the activiy of a harpin-induced family protein non-targeted in a non-human organism or a part thereof, preferably a microorganism, a plant cell, a plant or a part thereof, as compared to a corresponding non-transformed wild type non-human organism or a part thereof; and
[4502] (b) growing the non-human organism or a part thereof under conditions which permit the production of proline or a composition comprising proline in said non-human organism or in the culture medium surrounding said non-human organism.

[4503] A further embodiment of the present invention relates to a process for the production of proline, which comprises
[4504] (a) increasing or generating the activiy of a DNA binding protein non-targeted in a non-human organism or a part thereof, preferably a microorganism, a plant cell, a plant or a part thereof, as compared to a corresponding non-transformed wild type non-human organism or a part thereof; and
[4505] (b) growing the non-human organism or a part thereof under conditions which permit the production of proline or a composition comprising proline in said non-human organism or in the culture medium surrounding said non-human organism.

[4506] A further embodiment of the present invention relates to a process for the production of proline, which comprises
[4507] (a) increasing or generating the activiy of a DNA mismatch repair protein non-targeted in a non-human organism or a part thereof, preferably a microorganism, a plant cell, a plant or a part thereof, as compared to a corresponding non-transformed wild type non-human organism or a part thereof; and
[4508] (b) growing the non-human organism or a part thereof under conditions which permit the production of proline or a composition comprising proline in said non-human organism or in the culture medium surrounding said non-human organism.

[4509] A further embodiment of the present invention relates to a process for the production of proline, which comprises
[4510] (a) increasing or generating the activiy of a CCAAT-binding transcription factor non-targeted in a non-human organism or a part thereof, preferably a microorganism, a plant cell, a plant or a part thereof, as compared to a corresponding non-transformed wild type non-human organism or a part thereof; and
[4511] (b) growing the non-human organism or a part thereof under conditions which permit the production of proline or a composition comprising proline in said non-human organism or in the culture medium surrounding said non-human organism.

[4512] A further embodiment of the present invention relates to a process for the production of glutamine, which comprises
[4513] (a) increasing or generating the activiy of a protein kinase non-targeted in a non-human organism or a part thereof, preferably a microorganism, a plant cell, a plant or a part thereof, as compared to a corresponding non-transformed wild type non-human organism or a part thereof; and
[4514] (b) growing the non-human organism or a part thereof under conditions which permit the production of glutamine or a composition comprising glutamine in said non-human organism or in the culture medium surrounding said non-human organism.

[4515] A further embodiment of the present invention relates to a process for the production of proline, which comprises
[4516] (a) increasing or generating the activiy of a glucose-6-phosphate 1-dehydrogenase non-targeted in a non-human organism or a part thereof, preferably a microorganism, a plant cell, a plant or a part thereof, as compared to a corresponding non-transformed wild type non-human organism or a part thereof; and
[4517] (b) growing the non-human organism or a part thereof under conditions which permit the production of proline or a composition comprising proline in said non-human organism or in the culture medium surrounding said non-human organism.

[4518] A further embodiment of the present invention relates to a process for the production of glutamate, which comprises
[4519] (a) increasing or generating the activiy of a monthiol glutaredoxin non-targeted in a non-human organism or a part thereof, preferably a microorganism, a plant cell, a plant or a part thereof, as compared to a corresponding non-transformed wild type non-human organism or a part thereof; and
[4520] (b) growing the non-human organism or a part thereof under conditions which permit the production of glutamate or a composition comprising glutamate in said non-human organism or in the culture medium surrounding said non-human organism.

[4521] A further embodiment of the present invention relates to a process for the production of glutamine, which comprises
[4522] (a) increasing or generating the activiy of a monthiol glutaredoxin non-targeted in a non-human organism or a part thereof, preferably a microorganism, a plant cell, a plant or a part thereof, as compared to a corresponding non-transformed wild type non-human organism or a part thereof; and
[4523] (b) growing the non-human organism or a part thereof under conditions which permit the production of glutamine or a composition comprising glutamine in said non-human organism or in the culture medium surrounding said non-human organism.

[4524] A further embodiment of the present invention relates to a process for the production of glutamate, which comprises
[4525] (a) increasing or generating the activiy of a glutaredoxin non-targeted in a non-human organism or a part thereof, preferably a microorganism, a plant cell, a plant or a part thereof, as compared to a corresponding non-transformed wild type non-human organism or a part thereof; and
[4526] (b) growing the non-human organism or a part thereof under conditions which permit the production of glutamate or a composition comprising glutamate in said non-human organism or in the culture medium surrounding said non-human organism.

[4527] A further embodiment of the present invention relates to a process for the production of glutamine, which comprises
[4528] (a) increasing or generating the activiy of a glutaredoxin non-targeted in a non-human organism or a part thereof, preferably a microorganism, a plant cell, a plant or a part thereof, as compared to a corresponding non-transformed wild type non-human organism or a part thereof; and
[4529] (b) growing the non-human organism or a part thereof under conditions which permit the production of glutamine or a composition comprising glutamine in said non-human organism or in the culture medium surrounding said non-human organism.

[4530] A further embodiment of the present invention relates to a process for the production of glutamate, which comprises
[4531] (a) increasing or generating the activiy of a monothiol glutaredoxin non-targeted in a non-human organism or a part thereof, preferably a microorganism, a plant cell, a plant or a part thereof, as compared to a corresponding non-transformed wild type non-human organism or a part thereof; and
[4532] (b) growing the non-human organism or a part thereof under conditions which permit the production of glutamate or a composition comprising glutamate in said non-human organism or in the culture medium surrounding said non-human organism.

[4533] A further embodiment of the present invention relates to a process for the production of glutamine, which comprises
[4534] (a) increasing or generating the activiy of a monothiol glutaredoxin non-targeted in a non-human organism or a part thereof, preferably a microorganism, a plant cell, a plant or a part thereof, as compared to a corresponding non-transformed wild type non-human organism or a part thereof; and
[4535] (b) growing the non-human organism or a part thereof under conditions which permit the production of glutamine or a composition comprising glutamine in said non-human organism or in the culture medium surrounding said non-human organism.

[4536] A further embodiment of the present invention relates to a process for the production of glutamate, which comprises
[4537] (a) increasing or generating the activiy of a monothiol glutaredoxin non-targeted in a non-human organism or a part thereof, preferably a microorganism, a plant cell, a plant or a part thereof, as compared to a corresponding non-transformed wild type non-human organism or a part thereof; and
[4538] (b) growing the non-human organism or a part thereof under conditions which permit the production of glutamate or a composition comprising glutamate in said non-human organism or in the culture medium surrounding said non-human organism.

[4539] A further embodiment of the present invention relates to a process for the production of glutamate, which comprises
[4540] (a) increasing or generating the activiy of a monothiol glutaredoxin non-targeted in a non-human organism or a part thereof, preferably a microorganism, a plant cell, a plant or a part thereof, as compared to a corresponding non-transformed wild type non-human organism or a part thereof; and
[4541] (b) growing the non-human organism or a part thereof under conditions which permit the production of glutamate or a composition comprising glutamate in said non-human organism or in the culture medium surrounding said non-human organism.

[4542] A further embodiment of the present invention relates to a process for the production of glutamine, which comprises
[4543] (a) increasing or generating the activiy of a monothiol glutaredoxin non-targeted in a non-human organism or a part thereof, preferably a microorganism, a plant cell, a plant or a part thereof, as compared to a corresponding non-transformed wild type non-human organism or a part thereof; and
[4544] (b) growing the non-human organism or a part thereof under conditions which permit the production of glutamine or a composition comprising glutamine in said non-human organism or in the culture medium surrounding said non-human organism.

[4545] A further embodiment of the present invention relates to a process for the production of proline, which comprises
[4546] (a) increasing or generating the activiy of a monothiol glutaredoxin non-targeted in a non-human organism or a part thereof, preferably a microorganism, a plant cell, a plant or a part thereof, as compared to a corresponding non-transformed wild type non-human organism or a part thereof; and
[4547] (b) growing the non-human organism or a part thereof under conditions which permit the production of proline or a composition comprising proline in said non-human organism or in the culture medium surrounding said non-human organism.

[4548] A further embodiment of the present invention relates to a process for the production of glutamine, which comprises
[4549] (a) increasing or generating the activiy of a monothiol glutaredoxin non-targeted in a non-human organism or a part thereof, preferably a microorganism, a plant cell, a plant or a part thereof, as compared to a corresponding non-transformed wild type non-human organism or a part thereof; and
[4550] (b) growing the non-human organism or a part thereof under conditions which permit the production of glutamine or a composition comprising glutamine in said non-human organism or in the culture medium surrounding said non-human organism.

[4551] A further embodiment of the present invention relates to a process for the production of proline, which comprises
[4552] (a) increasing or generating the activiy of a heat shock transcription factor non-targeted in a non-human organism or a part thereof, preferably a microorganism, a plant cell, a plant or a part thereof, as compared to a corresponding non-transformed wild type non-human organism or a part thereof; and
[4553] (b) growing the non-human organism or a part thereof under conditions which permit the production of proline or a composition comprising proline in said non-human organism or in the culture medium surrounding said non-human organism.

[4554] A further embodiment of the present invention relates to a process for the production of arginine, which comprises
[4555] (a) increasing or generating the activiy of a At4g32480-protein non-targeted in a non-human organism or a part thereof, preferably a microorganism, a plant cell, a plant or a part thereof, as compared to a corresponding non-transformed wild type non-human organism or a part thereof; and
[4556] (b) growing the non-human organism or a part thereof under conditions which permit the production of arginine or a composition comprising arginine in said non-human organism or in the culture medium surrounding said non-human organism.

[4557] A further embodiment of the present invention relates to a process for the production of glutamine, which comprises
[4558] (a) increasing or generating the activiy of a At4g32480-protein non-targeted in a non-human organism or a part thereof, preferably a microorganism, a plant cell, a plant or a part thereof, as compared to a corresponding non-transformed wild type non-human organism or a part thereof; and
[4559] (b) growing the non-human organism or a part thereof under conditions which permit the production of glutamine or a composition comprising glutamine in said non-human organism or in the culture medium surrounding said non-human organism.

[4560] A further embodiment of the present invention relates to a process for the production of proline, which comprises
[4561] (a) increasing or generating the activiy of a At4g32480-protein non-targeted in a non-human organism or a part thereof, preferably a microorganism, a plant cell, a plant or a part thereof, as compared to a corresponding non-transformed wild type non-human organism or a part thereof; and
[4562] (b) growing the non-human organism or a part thereof under conditions which permit the production of proline or a composition comprising proline in said non-human organism or in the culture medium surrounding said non-human organism.

[4563] A further embodiment of the present invention relates to a process for the production of glutamate, which comprises
[4564] (a) increasing or generating the activiy of a glutaredoxin non-targeted in a non-human organism or a part thereof, preferably a microorganism, a plant cell, a plant or a part thereof, as compared to a corresponding non-transformed wild type non-human organism or a part thereof; and
[4565] (b) growing the non-human organism or a part thereof under conditions which permit the production of glutamate or a composition comprising glutamate in said non-human organism or in the culture medium surrounding said non-human organism.

[4566] A further embodiment of the present invention relates to a process for the production of arginine, which comprises
[4567] (a) increasing or generating the activiy of a cyclin D non-targeted in a non-human organism or a part thereof, preferably a microorganism, a plant cell, a plant or a part thereof, as compared to a corresponding non-transformed wild type non-human organism or a part thereof; and
[4568] (b) growing the non-human organism or a part thereof under conditions which permit the production of arginine or a composition comprising arginine in said non-human organism or in the culture medium surrounding said non-human organism.

[4569] A further embodiment of the present invention relates to a process for the production of glutamine, which comprises
[4570] (a) increasing or generating the activiy of a cyclin D non-targeted in a non-human organism or a part thereof, preferably a microorganism, a plant cell, a plant or a part thereof, as compared to a corresponding non-transformed wild type non-human organism or a part thereof; and
[4571] (b) growing the non-human organism or a part thereof under conditions which permit the production of glutamine or a composition comprising glutamine in said non-human organism or in the culture medium surrounding said non-human organism.

[4572] A further embodiment of the present invention relates to a process for the production of proline, which comprises
[4573] (a) increasing or generating the activiy of a cyclin D non-targeted in a non-human organism or a part thereof, preferably a microorganism, a plant cell, a plant or a part thereof, as compared to a corresponding non-transformed wild type non-human organism or a part thereof; and
[4574] (b) growing the non-human organism or a part thereof under conditions which permit the production of proline or a composition comprising proline in said non-human organism or in the culture medium surrounding said non-human organism.

[4575] A further embodiment of the present invention relates to a process for the production of arginine, which comprises
[4576] (a) increasing or generating the activiy of a calcium-dependent protein kinase non-targeted in a non-human organism or a part thereof, preferably a microorganism, a plant cell, a plant or a part thereof, as compared to a corresponding non-transformed wild type non-human organism or a part thereof; and
[4577] (b) growing the non-human organism or a part thereof under conditions which permit the production of arginine or a composition comprising arginine in said non-human organism or in the culture medium surrounding said non-human organism.

[4578] A further embodiment of the present invention relates to a process for the production of proline, which comprises
[4579] (a) increasing or generating the activiy of a calcium-dependent protein kinase non-targeted in a non-human organism or a part thereof, preferably a microorganism, a plant cell, a plant or a part thereof, as compared to a corresponding non-transformed wild type non-human organism or a part thereof; and
[4580] (b) growing the non-human organism or a part thereof under conditions which permit the production of proline or a composition comprising proline in said non-human organism or in the culture medium surrounding said non-human organism.

[4581] A further embodiment of the present invention relates to a process for the production of glutamate, which comprises
[4582] (a) increasing or generating the activiy of a heat shock transcription factor non-targeted in a non-human organism or a part thereof, preferably a microorganism, a plant cell, a plant or a part thereof, as compared to a corresponding non-transformed wild type non-human organism or a part thereof; and
[4583] (b) growing the non-human organism or a part thereof under conditions which permit the production of glutamate or a composition comprising glutamate in said non-human organism or in the culture medium surrounding said non-human organism.

[4584] A further embodiment of the present invention relates to a process for the production of proline, which comprises
[4585] (a) increasing or generating the activiy of a gibberellin 20-oxidase non-targeted in a non-human organism or a part thereof, preferably a microorganism, a plant cell, a plant or a part thereof, as compared to a corresponding non-transformed wild type non-human organism or a part thereof; and
[4586] (b) growing the non-human organism or a part thereof under conditions which permit the production of proline or a composition comprising proline in said non-human organism or in the culture medium surrounding said non-human organism.

[4587] A further embodiment of the present invention relates to a process for the production of glutamate, which comprises
[4588] (a) increasing or generating the activiy of a integral membrane transporter family protein non-targeted in a non-human organism or a part thereof, preferably a microorganism, a plant cell, a plant or a part thereof, as compared to a corresponding non-transformed wild type non-human organism or a part thereof; and
[4589] (b) growing the non-human organism or a part thereof under conditions which permit the production of glutamate or a composition comprising glutamate in said non-human organism or in the culture medium surrounding said non-human organism.

[4590] A further embodiment of the present invention relates to a process for the production of glutamine, which comprises
[4591] (a) increasing or generating the activiy of a integral membrane transporter family protein non-targeted in a non-human organism or a part thereof, preferably a microorganism, a plant cell, a plant or a part thereof, as compared to a corresponding non-transformed wild type non-human organism or a part thereof; and
[4592] (b) growing the non-human organism or a part thereof under conditions which permit the production of glutamine or a composition comprising glutamine in said non-human organism or in the culture medium surrounding said non-human organism.

[4593] A further embodiment of the present invention relates to a process for the production of arginine, which comprises
[4594] (a) increasing or generating the activiy of a At5g16650-protein non-targeted in a non-human organism or a part thereof, preferably a microorganism, a plant cell, a plant or a part thereof, as compared to a corresponding non-transformed wild type non-human organism or a part thereof; and
[4595] (b) growing the non-human organism or a part thereof under conditions which permit the production of arginine or a composition comprising arginine in said non-human organism or in the culture medium surrounding said non-human organism.

[4596] A further embodiment of the present invention relates to a process for the production of glutamine, which comprises
[4597] (a) increasing or generating the activiy of a At5g16650-protein non-targeted in a non-human organism or a part thereof, preferably a microorganism, a plant cell, a plant or a part thereof, as compared to a corresponding non-transformed wild type non-human organism or a part thereof; and
[4598] (b) growing the non-human organism or a part thereof under conditions which permit the production of glutamine or a composition comprising glutamine in said non-human organism or in the culture medium surrounding said non-human organism.

[4599] A further embodiment of the present invention relates to a process for the production of proline, which comprises
[4600] (a) increasing or generating the activiy of a At5g16650-protein non-targeted in a non-human organism or a part thereof, preferably a microorganism, a plant cell, a plant or a part thereof, as compared to a corresponding non-transformed wild type non-human organism or a part thereof; and
[4601] (b) growing the non-human organism or a part thereof under conditions which permit the production of proline or a composition comprising proline in said non-human organism or in the culture medium surrounding said non-human organism.

[4602] A further embodiment of the present invention relates to a process for the production of glutamine, which comprises
[4603] (a) increasing or generating the activiy of a monothiol glutaredoxin non-targeted in a non-human organism or a part thereof, preferably a microorganism, a plant cell, a plant or a part thereof, as compared to a corresponding non-transformed wild type non-human organism or a part thereof; and
[4604] (b) growing the non-human organism or a part thereof under conditions which permit the production of glutamine or a composition comprising glutamine in said non-human organism or in the culture medium surrounding said non-human organism.

[4605] A further embodiment of the present invention relates to a process for the production of arginine, which comprises
[4606] (a) increasing or generating the activiy of a translation initiation factor subunit non-targeted in a non-human organism or a part thereof, preferably a microorganism, a plant cell, a plant or a part thereof, as compared to a corresponding non-transformed wild type non-human organism or a part thereof; and
[4607] (b) growing the non-human organism or a part thereof under conditions which permit the production of arginine or a composition comprising arginine in said non-human organism or in the culture medium surrounding said non-human organism.

[4608] A further embodiment of the present invention relates to a process for the production of glutamate, which comprises
[4609] (a) increasing or generating the activiy of a transcription factor non-targeted in a non-human organism or a part thereof, preferably a microorganism, a plant cell, a plant or a part thereof, as compared to a corresponding non-transformed wild type non-human organism or a part thereof; and
[4610] (b) growing the non-human organism or a part thereof under conditions which permit the production of glutamate or a composition comprising glutamate in said non-human organism or in the culture medium surrounding said non-human organism.

[4611] A further embodiment of the present invention relates to a process for the production of proline, which comprises
[4612] (a) increasing or generating the activiy of a transcription factor non-targeted in a non-human organism or a part thereof, preferably a microorganism, a plant cell, a plant or a part thereof, as compared to a corresponding non-transformed wild type non-human organism or a part thereof; and
[4613] (b) growing the non-human organism or a part thereof under conditions which permit the production of proline or a composition comprising proline in said non-human organism or in the culture medium surrounding said non-human organism.

[4614] A further embodiment of the present invention relates to a process for the production of glutamine, which comprises
[4615] (a) increasing or generating the activiy of a protein phosphatase non-targeted in a non-human organism or a part thereof, preferably a microorganism, a plant cell, a plant or a part thereof, as compared to a corresponding non-transformed wild type non-human organism or a part thereof; and
[4616] (b) growing the non-human organism or a part thereof under conditions which permit the production of glutamine or a composition comprising glutamine in said non-human organism or in the culture medium surrounding said non-human organism.

[4617] A further embodiment of the present invention relates to a process for the production of glutamine, which comprises
[4618] (a) increasing or generating the activiy of a protein phosphatase non-targeted in a non-human organism or a part thereof, preferably a microorganism, a plant cell, a plant or a part thereof, as compared to a corresponding non-transformed wild type non-human organism or a part thereof; and
[4619] (b) growing the non-human organism or a part thereof under conditions which permit the production of glutamine or a composition comprising glutamine in said non-human organism or in the culture medium surrounding said non-human organism.

[4620] A further embodiment of the present invention relates to a process for the production of arginine, which comprises
[4621] (a) increasing or generating the activiy of a zinc finger protein non-targeted in a non-human organism or a part thereof, preferably a microorganism, a plant cell, a plant or a part thereof, as compared to a corresponding non-transformed wild type non-human organism or a part thereof; and
[4622] (b) growing the non-human organism or a part thereof under conditions which permit the production of arginine or a composition comprising arginine in said non-human organism or in the culture medium surrounding said non-human organism.

[4623] A further embodiment of the present invention relates to a process for the production of glutamine, which comprises
[4624] (a) increasing or generating the activiy of a zinc finger protein non-targeted in a non-human organism or a part thereof, preferably a microorganism, a plant cell, a plant or a part thereof, as compared to a corresponding non-transformed wild type non-human organism or a part thereof; and
[4625] (b) growing the non-human organism or a part thereof under conditions which permit the production of glutamine or a composition comprising glutamine in said non-human organism or in the culture medium surrounding said non-human organism.

[4626] A further embodiment of the present invention relates to a process for the production of glutamate, which comprises
[4627] (a) increasing or generating the activiy of a transcriptional regulator non-targeted in a non-human organism or a part thereof, preferably a microorganism, a plant cell, a plant or a part thereof, as compared to a corresponding non-transformed wild type non-human organism or a part thereof; and
[4628] (b) growing the non-human organism or a part thereof under conditions which permit the production of glutamate or a composition comprising glutamate in said non-human organism or in the culture medium surrounding said non-human organism.

[4629] A further embodiment of the present invention relates to a process for the production of glutamate, which comprises
[4630] (a) increasing or generating the activiy of a adenylylsulfate kinase non-targeted in a non-human organism or a part thereof, preferably a microorganism, a plant cell, a plant or a part thereof, as compared to a corresponding non-transformed wild type non-human organism or a part thereof; and
[4631] (b) growing the non-human organism or a part thereof under conditions which permit the production of glutamate or a composition comprising glutamate in said non-human organism or in the culture medium surrounding said non-human organism.

[4632] A further embodiment of the present invention relates to a process for the production of glutamine, which comprises
[4633] (a) increasing or generating the activiy of a adenylylsulfate kinase non-targeted in a non-human organism or a part thereof, preferably a microorganism, a plant cell, a plant or a part thereof, as compared to a corresponding non-transformed wild type non-human organism or a part thereof; and
[4634] (b) growing the non-human organism or a part thereof under conditions which permit the production of glutamine or a composition comprising glutamine in said non-human organism or in the culture medium surrounding said non-human organism.

[4635] A further embodiment of the present invention relates to a process for the production of glutamine, which comprises
[4636] (a) increasing or generating the activiy of a malic enzyme non-targeted in a non-human organism or a part thereof, preferably a microorganism, a plant cell, a plant or a part thereof, as compared to a corresponding non-transformed wild type non-human organism or a part thereof; and
[4637] (b) growing the non-human organism or a part thereof under conditions which permit the production of glutamine or a composition comprising glutamine in said non-human organism or in the culture medium surrounding said non-human organism.

[4638] A further embodiment of the present invention relates to a process for the production of proline, which comprises
[4639] (a) increasing or generating the activiy of a malic enzyme non-targeted in a non-human organism or a part thereof, preferably a microorganism, a plant cell, a plant or a part thereof, as compared to a corresponding non-transformed wild type non-human organism or a part thereof; and
[4640] (b) growing the non-human organism or a part thereof under conditions which permit the production of proline or a composition comprising proline in said non-human organism or in the culture medium surrounding said non-human organism.

[4641] A further embodiment of the present invention relates to a process for the production of proline, which comprises
[4642] (a) increasing or generating the activiy of a glycosyl transferase non-targeted in a non-human organism or a part thereof, preferably a microorganism, a plant cell, a plant or a part thereof, as compared to a corresponding non-transformed wild type non-human organism or a part thereof; and
[4643] (b) growing the non-human organism or a part thereof under conditions which permit the production of proline or a composition comprising proline in said non-human organism or in the culture medium surrounding said non-human organism.

[4644] A further embodiment of the present invention relates to a process for the production of proline, which comprises
[4645] (a) increasing or generating the activiy of a sec-independent protein translocase non-targeted in a non-human organism or a part thereof, preferably a microorganism, a plant cell, a plant or a part thereof, as compared to a corresponding non-transformed wild type non-human organism or a part thereof; and
[4646] (b) growing the non-human organism or a part thereof under conditions which permit the production of proline or a composition comprising proline in said non-human organism or in the culture medium surrounding said non-human organism.

[4647] A further embodiment of the present invention relates to a process for the production of glutamate, which comprises
[4648] (a) increasing or generating the activiy of a pyruvate kinase non-targeted in a non-human organism or a part thereof, preferably a microorganism, a plant cell, a plant or a part thereof, as compared to a corresponding non-transformed wild type non-human organism or a part thereof; and
[4649] (b) growing the non-human organism or a part thereof under conditions which permit the production of glutamate or a composition comprising glutamate in said non-human organism or in the culture medium surrounding said non-human organism.
[4650] A further embodiment of the present invention relates to a process for the production of arginine, which comprises
[4651] (a) increasing or generating the activiy of a beta-hydroxylase non-targeted in a non-human organism or a part thereof, preferably a microorganism, a plant cell, a plant or a part thereof, as compared to a corresponding non-transformed wild type non-human organism or a part thereof; and
[4652] (b) growing the non-human organism or a part thereof under conditions which permit the production of arginine or a composition comprising arginine in said non-human organism or in the culture medium surrounding said non-human organism.

[4653] A further embodiment of the present invention relates to a process for the production of arginine, which comprises
[4654] (a) increasing or generating the activiy of a elongation factor Tu non-targeted in a non-human organism or a part thereof, preferably a microorganism, a plant cell, a plant or a part thereof, as compared to a corresponding non-transformed wild type non-human organism or a part thereof; and
[4655] (b) growing the non-human organism or a part thereof under conditions which permit the production of arginine or a composition comprising arginine in said non-human organism or in the culture medium surrounding said non-human organism.

[4656] A further embodiment of the present invention relates to a process for the production of glutamate, which comprises
[4657] (a) increasing or generating the activiy of a elongation factor Tu non-targeted in a non-human organism or a part thereof, preferably a microorganism, a plant cell, a plant or a part thereof, as compared to a corresponding non-transformed wild type non-human organism or a part thereof; and
[4658] (b) growing the non-human organism or a part thereof under conditions which permit the production of glutamate or a composition comprising glutamate in said non-human organism or in the culture medium surrounding said non-human organism.

[4659] A further embodiment of the present invention relates to a process for the production of glutamine, which comprises
[4660] (a) increasing or generating the activiy of a elongation factor Tu non-targeted in a non-human organism or a part thereof, preferably a microorganism, a plant cell, a plant or a part thereof, as compared to a corresponding non-transformed wild type non-human organism or a part thereof; and
[4661] (b) growing the non-human organism or a part thereof under conditions which permit the production of glutamine or a composition comprising glutamine in said non-human organism or in the culture medium surrounding said non-human organism.

[4662] A further embodiment of the present invention relates to a process for the production of glutamine, which comprises
[4663] (a) increasing or generating the activiy of a ABC transporter permease protein non-targeted in a non-human organism or a part thereof, preferably a microorganism, a plant cell, a plant or a part thereof, as compared to a corresponding non-transformed wild type non-human organism or a part thereof; and
[4664] (b) growing the non-human organism or a part thereof under conditions which permit the production of glutamine or a composition comprising glutamine in said non-human organism or in the culture medium surrounding said non-human organism.

[4665] A further embodiment of the present invention relates to a process for the production of proline, which comprises
[4666] (a) increasing or generating the activiy of a ABC transporter permease protein non-targeted in a non-human organism or a part thereof, preferably a microorganism, a plant cell, a plant or a part thereof, as compared to a corresponding non-transformed wild type non-human organism or a part thereof; and
[4667] (b) growing the non-human organism or a part thereof under conditions which permit the production of proline or a composition comprising proline in said non-human organism or in the culture medium surrounding said non-human organism.

[4668] A further embodiment of the present invention relates to a process for the production of arginine, which comprises
[4669] (a) increasing or generating the activiy of a acyl-CoA synthase non-targeted in a non-human organism or a part thereof, preferably a microorganism, a plant cell, a plant or a part thereof, as compared to a corresponding non-transformed wild type non-human organism or a part thereof; and
[4670] (b) growing the non-human organism or a part thereof under conditions which permit the production of arginine or a composition comprising arginine in said non-human organism or in the culture medium surrounding said non-human organism.

[4671] A further embodiment of the present invention relates to a process for the production of glutamate, which comprises
[4672] (a) increasing or generating the activiy of a acyl-CoA synthase non-targeted in a non-human organism or a part thereof, preferably a microorganism, a plant cell, a plant or a part thereof, as compared to a corresponding non-transformed wild type non-human organism or a part thereof; and
[4673] (b) growing the non-human organism or a part thereof under conditions which permit the production of glutamate or a composition comprising glutamate in said non-human organism or in the culture medium surrounding said non-human organism.

[4674] A further embodiment of the present invention relates to a process for the production of glutamine, which comprises
[4675] (a) increasing or generating the activiy of a acyl-CoA synthase non-targeted in a non-human organism or a part thereof, preferably a microorganism, a plant cell, a plant or a part thereof, as compared to a corresponding non-transformed wild type non-human organism or a part thereof; and
[4676] (b) growing the non-human organism or a part thereof under conditions which permit the production of glutamine or a composition comprising glutamine in said non-human organism or in the culture medium surrounding said non-human organism.

[4677] A further embodiment of the present invention relates to a process for the production of proline, which comprises
[4678] (a) increasing or generating the activiy of a acyl-CoA synthase non-targeted in a non-human organism or a part thereof, preferably a microorganism, a plant cell, a plant or a part thereof, as compared to a corresponding non-transformed wild type non-human organism or a part thereof; and
[4679] (b) growing the non-human organism or a part thereof under conditions which permit the production of proline or a composition comprising proline in said non-human organism or in the culture medium surrounding said non-human organism.

[4680] A further embodiment of the present invention relates to a process for the production of glutamate, which comprises
[4681] (a) increasing or generating the activiy of a 2-oxoglutarate dehydrogenase E1 subunit non-targeted in a non-human organism or a part thereof, preferably a microorganism, a plant cell, a plant or a part thereof, as compared to a corresponding non-transformed wild type non-human organism or a part thereof; and
[4682] (b) growing the non-human organism or a part thereof under conditions which permit the production of glutamate or a composition comprising glutamate in said non-human organism or in the culture medium surrounding said non-human organism.

[4683] A further embodiment of the present invention relates to a process for the production of arginine, which comprises
[4684] (a) increasing or generating the activiy of a enoyl-CoA hydratase non-targeted in a non-human organism or a part thereof, preferably a microorganism, a plant cell, a plant or a part thereof, as compared to a corresponding non-transformed wild type non-human organism or a part thereof; and
[4685] (b) growing the non-human organism or a part thereof under conditions which permit the production of arginine or a composition comprising arginine in said non-human organism or in the culture medium surrounding said non-human organism.

[4686] A further embodiment of the present invention relates to a process for the production of proline, which comprises
[4687] (a) increasing or generating the activiy of a enoyl-CoA hydratase non-targeted in a non-human organism or a part thereof, preferably a microorganism, a plant cell, a plant or a part thereof, as compared to a corresponding non-transformed wild type non-human organism or a part thereof; and
[4688] (b) growing the non-human organism or a part thereof under conditions which permit the production of proline or a composition comprising proline in said non-human organism or in the culture medium surrounding said non-human organism.

[4689] A further embodiment of the present invention relates to a process for the production of glutamate, which comprises
[4690] (a) increasing or generating the activiy of a transcriptional regulator non-targeted in a non-human organism or a part thereof, preferably a microorganism, a plant cell, a plant or a part thereof, as compared to a corresponding non-transformed wild type non-human organism or a part thereof; and
[4691] (b) growing the non-human organism or a part thereof under conditions which permit the production of glutamate or a composition comprising glutamate in said non-human organism or in the culture medium surrounding said non-human organism.

[4692] A further embodiment of the present invention relates to a process for the production of proline, which comprises
[4693] (a) increasing or generating the activiy of a transcriptional regulator non-targeted in a non-human organism or a part thereof, preferably a microorganism, a plant cell, a plant or a part thereof, as compared to a corresponding non-transformed wild type non-human organism or a part thereof; and
[4694] (b) growing the non-human organism or a part thereof under conditions which permit the production of proline or a composition comprising proline in said non-human organism or in the culture medium surrounding said non-human organism.

[4695] A further embodiment of the present invention relates to a process for the production of proline, which comprises
[4696] (a) increasing or generating the activiy of a acyltransferase non-targeted in a non-human organism or a part thereof, preferably a microorganism, a plant cell, a plant or a part thereof, as compared to a corresponding non-transformed wild type non-human organism or a part thereof; and
[4697] (b) growing the non-human organism or a part thereof under conditions which permit the production of proline or a composition comprising proline in said non-human organism or in the culture medium surrounding said non-human organism.

[4698] A further embodiment of the present invention relates to a process for the production of glutamate, which comprises
[4699] (a) increasing or generating the activiy of a oxidoreductase non-targeted in a non-human organism or a part thereof, preferably a microorganism, a plant cell, a plant or a part thereof, as compared to a corresponding non-transformed wild type non-human organism or a part thereof; and
[4700] (b) growing the non-human organism or a part thereof under conditions which permit the production of glutamate or a composition comprising glutamate in said non-human organism or in the culture medium surrounding said non-human organism.

[4701] A further embodiment of the present invention relates to a process for the production of glutamine, which comprises
[4702] (a) increasing or generating the activiy of a oxidoreductase non-targeted in a non-human organism or a part thereof, preferably a microorganism, a plant cell, a plant or a part thereof, as compared to a corresponding non-transformed wild type non-human organism or a part thereof; and
[4703] (b) growing the non-human organism or a part thereof under conditions which permit the production of glutamine or a composition comprising glutamine in said non-human organism or in the culture medium surrounding said non-human organism.

[4704] A further embodiment of the present invention relates to a process for the production of glutamine, which comprises
[4705] (a) increasing or generating the activiy of a lysyl-tRNA synthetase non-targeted in a non-human organism or a part thereof, preferably a microorganism, a plant cell, a plant or a part thereof, as compared to a corresponding non-transformed wild type non-human organism or a part thereof; and
[4706] (b) growing the non-human organism or a part thereof under conditions which permit the production of glutamine or a composition comprising glutamine in said non-human organism or in the culture medium surrounding said non-human organism.

[4707] A further embodiment of the present invention relates to a process for the production of glutamate, which comprises
[4708] (a) increasing or generating the activiy of a 30S ribosomal protein non-targeted in a non-human organism or a part thereof, preferably a microorganism, a plant cell, a plant or a part thereof, as compared to a corresponding non-transformed wild type non-human organism or a part thereof; and
[4709] (b) growing the non-human organism or a part thereof under conditions which permit the production of glutamate or a composition comprising glutamate in said non-human organism or in the culture medium surrounding said non-human organism.

[4710] A further embodiment of the present invention relates to a process for the production of glutamate, which comprises
[4711] (a) increasing or generating the activiy of a CTP synthase non-targeted in a non-human organism or a part thereof, preferably a microorganism, a plant cell, a plant or a part thereof, as compared to a corresponding non-transformed wild type non-human organism or a part thereof; and
[4712] (b) growing the non-human organism or a part thereof under conditions which permit the production of glutamate or a composition comprising glutamate in said non-human organism or in the culture medium surrounding said non-human organism.

[4713] A further embodiment of the present invention relates to a process for the production of glutamine, which comprises
[4714] (a) increasing or generating the activiy of a CTP synthase non-targeted in a non-human organism or a part thereof, preferably a microorganism, a plant cell, a plant or a part thereof, as compared to a corresponding non-transformed wild type non-human organism or a part thereof; and
[4715] (b) growing the non-human organism or a part thereof under conditions which permit the production of glutamine or a composition comprising glutamine in said non-human organism or in the culture medium surrounding said non-human organism.

[4716] A further embodiment of the present invention relates to a process for the production of glutamate, which comprises
[4717] (a) increasing or generating the activiy of a glucose-1-phosphate cytidylyltransferase non-targeted in a non-human organism or a part thereof, preferably a microorganism, a plant cell, a plant or a part thereof, as compared to a corresponding non-transformed wild type non-human organism or a part thereof; and
[4718] (b) growing the non-human organism or a part thereof under conditions which permit the production of glutamate or a composition comprising glutamate in said non-human organism or in the culture medium surrounding said non-human organism.

[4719] A further embodiment of the present invention relates to a process for the production of glutamine, which comprises
[4720] (a) increasing or generating the activiy of a glucose-1-phosphate cytidylyltransferase non-targeted in a non-human organism or a part thereof, preferably a microorganism, a plant cell, a plant or a part thereof, as compared to a corresponding non-transformed wild type non-human organism or a part thereof; and
[4721] (b) growing the non-human organism or a part thereof under conditions which permit the production of glutamine or a composition comprising glutamine in said non-human organism or in the culture medium surrounding said non-human organism.

[4722] A further embodiment of the present invention relates to a process for the production of proline, which comprises
[4723] (a) increasing or generating the activiy of a glucose-1-phosphate cytidylyltransferase non-targeted in a non-human organism or a part thereof, preferably a microorganism, a plant cell, a plant or a part thereof, as compared to a corresponding non-transformed wild type non-human organism or a part thereof; and
[4724] (b) growing the non-human organism or a part thereof under conditions which permit the production of proline or a composition comprising proline in said non-human organism or in the culture medium surrounding said non-human organism.

[4725] A further embodiment of the present invention relates to a process for the production of arginine, which comprises
[4726] (a) increasing or generating the activiy of a aminotransferase non-targeted in a non-human organism or a part thereof, preferably a microorganism, a plant cell, a plant or a part thereof, as compared to a corresponding non-transformed wild type non-human organism or a part thereof; and
[4727] (b) growing the non-human organism or a part thereof under conditions which permit the production of arginine or a composition comprising arginine in said non-human organism or in the culture medium surrounding said non-human organism.

[4728] A further embodiment of the present invention relates to a process for the production of proline, which comprises
[4729] (a) increasing or generating the activiy of a hydrolase non-targeted in a non-human organism or a part thereof, preferably a microorganism, a plant cell, a plant or a part thereof, as compared to a corresponding non-transformed wild type non-human organism or a part thereof; and
[4730] (b) growing the non-human organism or a part thereof under conditions which permit the production of proline or a composition comprising proline in said non-human organism or in the culture medium surrounding said non-human organism.

[4731] A further embodiment of the present invention relates to a process for the production of arginine, which comprises
[4732] (a) increasing or generating the activiy of a glutamate-ammonia-ligase non-targeted in a non-human organism or a part thereof, preferably a microorganism, a plant cell, a plant or a part thereof, as compared to a corresponding non-transformed wild type non-human organism or a part thereof; and
[4733] (b) growing the non-human organism or a part thereof under conditions which permit the production of arginine or a composition comprising arginine in said non-human organism or in the culture medium surrounding said non-human organism.

[4734] A further embodiment of the present invention relates to a process for the production of glutamine, which comprises
[4735] (a) increasing or generating the activiy of a glutamate-ammonia-ligase non-targeted in a non-human organism or a part thereof, preferably a microorganism, a plant cell, a plant or a part thereof, as compared to a corresponding non-transformed wild type non-human organism or a part thereof; and
[4736] (b) growing the non-human organism or a part thereof under conditions which permit the production of glutamine or a composition comprising glutamine in said non-human organism or in the culture medium surrounding said non-human organism.

[4737] A further embodiment of the present invention relates to a process for the production of proline, which comprises
[4738] (a) increasing or generating the activiy of a glutamate-ammonia-ligase non-targeted in a non-human organism or a part thereof, preferably a microorganism, a plant cell, a plant or a part thereof, as compared to a corresponding non-transformed wild type non-human organism or a part thereof; and
[4739] (b) growing the non-human organism or a part thereof under conditions which permit the production of proline or a composition comprising proline in said non-human organism or in the culture medium surrounding said non-human organism.

[4740] A further embodiment of the present invention relates to a process for the production of proline, which comprises
[4741] (a) increasing or generating the activiy of a fumarylacetoacetate hydrolase non-targeted in a non-human organism or a part thereof, preferably a microorganism, a plant cell, a plant or a part thereof, as compared to a corresponding non-transformed wild type non-human organism or a part thereof; and
[4742] (b) growing the non-human organism or a part thereof under conditions which permit the production of proline or a composition comprising proline in said non-human organism or in the culture medium surrounding said non-human organism.

[4743] A further embodiment of the present invention relates to a process for the production of arginine, which comprises
[4744] (a) increasing or generating the activiy of a HesB/YadR/YfhF family protein non-targeted in a non-human organism or a part thereof, preferably a microorganism, a plant cell, a plant or a part thereof, as compared to a corresponding non-transformed wild type non-human organism or a part thereof; and
[4745] (b) growing the non-human organism or a part thereof under conditions which permit the production of arginine or a composition comprising arginine in said non-human organism or in the culture medium surrounding said non-human organism.

[4746] A further embodiment of the present invention relates to a process for the production of glutamine, which comprises
[4747] (a) increasing or generating the activiy of a HesB/YadR/YfhF family protein non-targeted in a non-human organism or a part thereof, preferably a microorganism, a plant cell, a plant or a part thereof, as compared to a corresponding non-transformed wild type non-human organism or a part thereof; and
[4748] (b) growing the non-human organism or a part thereof under conditions which permit the production of glutamine or a composition comprising glutamine in said non-human organism or in the culture medium surrounding said non-human organism.

[4749] A further embodiment of the present invention relates to a process for the production of proline, which comprises
[4750] (a) increasing or generating the activiy of a HesB/YadR/YfhF family protein non-targeted in a non-human organism or a part thereof, preferably a microorganism, a plant cell, a plant or a part thereof, as compared to a corresponding non-transformed wild type non-human organism or a part thereof; and
[4751] (b) growing the non-human organism or a part thereof under conditions which permit the production of proline or a composition comprising proline in said non-human organism or in the culture medium surrounding said non-human organism.

[4752] A further embodiment of the present invention relates to a process for the production of proline, which comprises
[4753] (a) increasing or generating the activiy of a L-aspartate oxidase non-targeted in a non-human organism or a part thereof, preferably a microorganism, a plant cell, a plant or a part thereof, as compared to a corresponding non-transformed wild type non-human organism or a part thereof; and
[4754] (b) growing the non-human organism or a part thereof under conditions which permit the production of proline or a composition comprising proline in said non-human organism or in the culture medium surrounding said non-human organism.

[4755] A further embodiment of the present invention relates to a process for the production of arginine, which comprises
[4756] (a) increasing or generating the activiy of a oxidoreductase non-targeted in a non-human organism or a part thereof, preferably a microorganism, a plant cell, a plant or a part thereof, as compared to a corresponding non-transformed wild type non-human organism or a part thereof; and
[4757] (b) growing the non-human organism or a part thereof under conditions which permit the production of arginine or a composition comprising arginine in said non-human organism or in the culture medium surrounding said non-human organism.

[4758] A further embodiment of the present invention relates to a process for the production of glutamine, which comprises
[4759] (a) increasing or generating the activiy of a oxidoreductase non-targeted in a non-human organism or a part thereof, preferably a microorganism, a plant cell, a plant or a part thereof, as compared to a corresponding non-transformed wild type non-human organism or a part thereof; and
[4760] (b) growing the non-human organism or a part thereof under conditions which permit the production of glutamine or a composition comprising glutamine in said non-human organism or in the culture medium surrounding said non-human organism.

[4761] A further embodiment of the present invention relates to a process for the production of proline, which comprises
[4762] (a) increasing or generating the activiy of a Chaperone protein CIpB non-targeted in a non-human organism or a part thereof, preferably a microorganism, a plant cell, a plant or a part thereof, as compared to a corresponding non-transformed wild type non-human organism or a part thereof; and
[4763] (b) growing the non-human organism or a part thereof under conditions which permit the production of proline or a composition comprising proline in said non-human organism or in the culture medium surrounding said non-human organism.

[4764] A further embodiment of the present invention relates to a process for the production of arginine, which comprises
[4765] (a) increasing or generating the activiy of a purine nucleoside phosphorylase non-targeted in a non-human organism or a part thereof, preferably a microorganism, a plant cell, a plant or a part thereof, as compared to a corresponding non-transformed wild type non-human organism or a part thereof; and
[4766] (b) growing the non-human organism or a part thereof under conditions which permit the production of arginine or a composition comprising arginine in said non-human organism or in the culture medium surrounding said non-human organism.

[4767] A further embodiment of the present invention relates to a process for the production of glutamine, which comprises
[4768] (a) increasing or generating the activiy of a purine nucleoside phosphorylase non-targeted in a non-human organism or a part thereof, preferably a microorganism, a plant cell, a plant or a part thereof, as compared to a corresponding non-transformed wild type non-human organism or a part thereof; and
[4769] (b) growing the non-human organism or a part thereof under conditions which permit the production of glutamine or a composition comprising glutamine in said non-human organism or in the culture medium surrounding said non-human organism.

[4770] A further embodiment of the present invention relates to a process for the production of proline, which comprises
[4771] (a) increasing or generating the activiy of a purine nucleoside phosphorylase non-targeted in a non-human organism or a part thereof, preferably a microorganism, a plant cell, a plant or a part thereof, as compared to a corresponding non-transformed wild type non-human organism or a part thereof; and
[4772] (b) growing the non-human organism or a part thereof under conditions which permit the production of proline or a composition comprising proline in said non-human organism or in the culture medium surrounding said non-human organism.

[4773] A further embodiment of the present invention relates to a process for the production of proline, which comprises
[4774] (a) increasing or generating the activiy of a transcriptional regulator protein non-targeted in a non-human organism or a part thereof, preferably a microorganism, a plant cell, a plant or a part thereof, as compared to a corresponding non-transformed wild type non-human organism or a part thereof; and
[4775] (b) growing the non-human organism or a part thereof under conditions which permit the production of proline or a composition comprising proline in said non-human organism or in the culture medium surrounding said non-human organism.

[4776] A further embodiment of the present invention relates to a process for the production of glutamate, which comprises
[4777] (a) increasing or generating the activiy of a AX653549-protein non-targeted in a non-human organism or a part thereof, preferably a microorganism, a plant cell, a plant or a part thereof, as compared to a corresponding non-transformed wild type non-human organism or a part thereof; and
[4778] (b) growing the non-human organism or a part thereof under conditions which permit the production of glutamate or a composition comprising glutamate in said non-human organism or in the culture medium surrounding said non-human organism.

[4779] A further embodiment of the present invention relates to a process for the production of glutamine, which comprises
[4780] (a) increasing or generating the activiy of a AX653549-protein non-targeted in a non-human organism or a part thereof, preferably a microorganism, a plant cell, a plant or a part thereof, as compared to a corresponding non-transformed wild type non-human organism or a part thereof; and
[4781] (b) growing the non-human organism or a part thereof under conditions which permit the production of glutamine or a composition comprising glutamine in said non-human organism or in the culture medium surrounding said non-human organism.

[4782] A further embodiment of the present invention relates to a process for the production of glutamine, which comprises
[4783] (a) increasing or generating the activiy of a AY087308-protein non-targeted in a non-human organism or a part thereof, preferably a microorganism, a plant cell, a plant or a part thereof, as compared to a corresponding non-transformed wild type non-human organism or a part thereof; and
[4784] (b) growing the non-human organism or a part thereof under conditions which permit the production of glutamine or a composition comprising glutamine in said non-human organism or in the culture medium surrounding said non-human organism.

[4785] A further embodiment of the present invention relates to a process for the production of arginine, which comprises
[4786] (a) increasing or generating the activiy of a threonine synthase non-targeted in a non-human organism or a part thereof, preferably a microorganism, a plant cell, a plant or a part thereof, as compared to a corresponding non-transformed wild type non-human organism or a part thereof; and
[4787] (b) growing the non-human organism or a part thereof under conditions which permit the production of arginine or a composition comprising arginine in said non-human organism or in the culture medium surrounding said non-human organism.

[4788] A further embodiment of the present invention relates to a process for the production of glutamine, which comprises
[4789] (a) increasing or generating the activiy of a threonine synthase non-targeted in a non-human organism or a part thereof, preferably a microorganism, a plant cell, a plant or a part thereof, as compared to a corresponding non-transformed wild type non-human organism or a part thereof; and
[4790] (b) growing the non-human organism or a part thereof under conditions which permit the production of glutamine or a composition comprising glutamine in said non-human organism or in the culture medium surrounding said non-human organism.

[4791] A further embodiment of the present invention relates to a process for the production of proline, which comprises
[4792] (a) increasing or generating the activiy of a threonine synthase non-targeted in a non-human organism or a part thereof, preferably a microorganism, a plant cell, a plant or a part thereof, as compared to a corresponding non-transformed wild type non-human organism or a part thereof; and
[4793] (b) growing the non-human organism or a part thereof under conditions which permit the production of proline or a composition comprising proline in said non-human organism or in the culture medium surrounding said non-human organism.

[4794] A further embodiment of the present invention relates to a process for the production of proline, which comprises
[4795] (a) increasing or generating the activiy of a L-ribulose-5-phosphate 4-epimerase non-targeted in a non-human organism or a part thereof, preferably a microorganism, a plant cell, a plant or a part thereof, as compared to a corresponding non-transformed wild type non-human organism or a part thereof; and
[4796] (b) growing the non-human organism or a part thereof under conditions which permit the production of proline or a composition comprising proline in said non-human organism or in the culture medium surrounding said non-human organism.

[4797] A further embodiment of the present invention relates to a process for the production of glutamine, which comprises
[4798] (a) increasing or generating the activiy of a dihydrolipoamide acetyltransferase non-targeted in a non-human organism or a part thereof, preferably a microorganism, a plant cell, a plant or a part thereof, as compared to a corresponding non-transformed wild type non-human organism or a part thereof; and
[4799] (b) growing the non-human organism or a part thereof under conditions which permit the production of glutamine or a composition comprising glutamine in said non-human organism or in the culture medium surrounding said non-human organism.

[4800] A further embodiment of the present invention relates to a process for the production of arginine, which comprises
[4801] (a) increasing or generating the activiy of a glucose dehydrogenase non-targeted in a non-human organism or a part thereof, preferably a microorganism, a plant cell, a plant or a part thereof, as compared to a corresponding non-transformed wild type non-human organism or a part thereof; and
[4802] (b) growing the non-human organism or a part thereof under conditions which permit the production of arginine or a composition comprising arginine in said non-human organism or in the culture medium surrounding said non-human organism.

[4803] A further embodiment of the present invention relates to a process for the production of proline, which comprises
[4804] (a) increasing or generating the activiy of a glucose dehydrogenase non-targeted in a non-human organism or a part thereof, preferably a microorganism, a plant cell, a plant or a part thereof, as compared to a corresponding non-transformed wild type non-human organism or a part thereof; and
[4805] (b) growing the non-human organism or a part thereof under conditions which permit the production of proline or a composition comprising proline in said non-human organism or in the culture medium surrounding said non-human organism.

[4806] A further embodiment of the present invention relates to a process for the production of proline, which comprises
[4807] (a) increasing or generating the activiy of a glucose dehydrogenase non-targeted in a non-human organism or a part thereof, preferably a microorganism, a plant cell, a plant or a part thereof, as compared to a corresponding non-transformed wild type non-human organism or a part thereof; and
[4808] (b) growing the non-human organism or a part thereof under conditions which permit the production of proline or a composition comprising proline in said non-human organism or in the culture medium surrounding said non-human organism.

[4809] A further embodiment of the present invention relates to a process for the production of proline, which comprises
[4810] (a) increasing or generating the activiy of a serine protease non-targeted in a non-human organism or a part thereof, preferably a microorganism, a plant cell, a plant or a part thereof, as compared to a corresponding non-transformed wild type non-human organism or a part thereof; and
[4811] (b) growing the non-human organism or a part thereof under conditions which permit the production of proline or a composition comprising proline in said non-human organism or in the culture medium surrounding said non-human organism.

[4812] A further embodiment of the present invention relates to a process for the production of arginine, which comprises
[4813] (a) increasing or generating the activiy of a acyl-CoA dehydrogenase non-targeted in a non-human organism or a part thereof, preferably a microorganism, a plant cell, a plant or a part thereof, as compared to a corresponding non-transformed wild type non-human organism or a part thereof; and
[4814] (b) growing the non-human organism or a part thereof under conditions which permit the production of arginine or a composition comprising arginine in said non-human organism or in the culture medium surrounding said non-human organism.

[4815] A further embodiment of the present invention relates to a process for the production of glutamate, which comprises
[4816] (a) increasing or generating the activiy of a acyl-CoA dehydrogenase non-targeted in a non-human organism or a part thereof, preferably a microorganism, a plant cell, a plant or a part thereof, as compared to a corresponding non-transformed wild type non-human organism or a part thereof; and
[4817] (b) growing the non-human organism or a part thereof under conditions which permit the production of glutamate or a composition comprising glutamate in said non-human organism or in the culture medium surrounding said non-human organism.

[4818] A further embodiment of the present invention relates to a process for the production of proline, which comprises
[4819] (a) increasing or generating the activiy of a beta-galactosidase non-targeted in a non-human organism or a part thereof, preferably a microorganism, a plant cell, a plant or a part thereof, as compared to a corresponding non-transformed wild type non-human organism or a part thereof; and
[4820] (b) growing the non-human organism or a part thereof under conditions which permit the production of proline or a composition comprising proline in said non-human organism or in the culture medium surrounding said non-human organism.

[4821] A further embodiment of the present invention relates to a process for the production of glutamine, which comprises
[4822] (a) increasing or generating the activiy of a ATP-binding component of a transport system non-targeted in a non-human organism or a part thereof, preferably a microorganism, a plant cell, a plant or a part thereof, as compared to a corresponding non-transformed wild type non-human organism or a part thereof; and
[4823] (b) growing the non-human organism or a part thereof under conditions which permit the production of glutamine or a composition comprising glutamine in said non-human organism or in the culture medium surrounding said non-human organism.

[4824] A further embodiment of the present invention relates to a process for the production of proline, which comprises
[4825] (a) increasing or generating the activiy of a b0456-protein non-targeted in a non-human organism or a part thereof, preferably a microorganism, a plant cell, a plant or a part thereof, as compared to a corresponding non-transformed wild type non-human organism or a part thereof; and
[4826] (b) growing the non-human organism or a part thereof under conditions which permit the production of proline or a composition comprising proline in said non-human organism or in the culture medium surrounding said non-human organism.

[4827] A further embodiment of the present invention relates to a process for the production of arginine, which comprises
[4828] (a) increasing or generating the activiy of a membrane transport protein non-targeted in a non-human organism or a part thereof, preferably a microorganism, a plant cell, a plant or a part thereof, as compared to a corresponding non-transformed wild type non-human organism or a part thereof; and
[4829] (b) growing the non-human organism or a part thereof under conditions which permit the production of arginine or a composition comprising arginine in said non-human organism or in the culture medium surrounding said non-human organism.

[4830] A further embodiment of the present invention relates to a process for the production of glutamate, which comprises
[4831] (a) increasing or generating the activiy of a membrane transport protein non-targeted in a non-human organism or a part thereof, preferably a microorganism, a plant cell, a plant or a part thereof, as compared to a corresponding non-transformed wild type non-human organism or a part thereof; and
[4832] (b) growing the non-human organism or a part thereof under conditions which permit the production of glutamate or a composition comprising glutamate in said non-human organism or in the culture medium surrounding said non-human organism.

[4833] A further embodiment of the present invention relates to a process for the production of glutamine, which comprises
[4834] (a) increasing or generating the activiy of a b0518-protein non-targeted in a non-human organism or a part thereof, preferably a microorganism, a plant cell, a plant or a part thereof, as compared to a corresponding non-transformed wild type non-human organism or a part thereof; and
[4835] (b) growing the non-human organism or a part thereof under conditions which permit the production of glutamine or a composition comprising glutamine in said non-human organism or in the culture medium surrounding said non-human organism.

[4836] A further embodiment of the present invention relates to a process for the production of arginine, which comprises
[4837] (a) increasing or generating the activiy of a isochorismate synthase non-targeted in a non-human organism or a part thereof, preferably a microorganism, a plant cell, a plant or a part thereof, as compared to a corresponding non-transformed wild type non-human organism or a part thereof; and
[4838] (b) growing the non-human organism or a part thereof under conditions which permit the production of arginine or a composition comprising arginine in said non-human organism or in the culture medium surrounding said non-human organism.

[4839] A further embodiment of the present invention relates to a process for the production of glutamate, which comprises
[4840] (a) increasing or generating the activiy of a isochorismate synthase non-targeted in a non-human organism or a part thereof, preferably a microorganism, a plant cell, a plant or a part thereof, as compared to a corresponding non-transformed wild type non-human organism or a part thereof; and
[4841] (b) growing the non-human organism or a part thereof under conditions which permit the production of glutamate or a composition comprising glutamate in said non-human organism or in the culture medium surrounding said non-human organism.

[4842] A further embodiment of the present invention relates to a process for the production of glutamine, which comprises
[4843] (a) increasing or generating the activiy of a isochorismate synthase non-targeted in a non-human organism or a part thereof, preferably a microorganism, a plant cell, a plant or a part thereof, as compared to a corresponding non-transformed wild type non-human organism or a part thereof; and
[4844] (b) growing the non-human organism or a part thereof under conditions which permit the production of glutamine or a composition comprising glutamine in said non-human organism or in the culture medium surrounding said non-human organism.

[4845] A further embodiment of the present invention relates to a process for the production of proline, which comprises
[4846] (a) increasing or generating the activiy of a isochorismate synthase non-targeted in a non-human organism or a part thereof, preferably a microorganism, a plant cell, a plant or a part thereof, as compared to a corresponding non-transformed wild type non-human organism or a part thereof; and
[4847] (b) growing the non-human organism or a part thereof under conditions which permit the production of proline or a composition comprising proline in said non-human organism or in the culture medium surrounding said non-human organism.

[4848] A further embodiment of the present invention relates to a process for the production of glutamine, which comprises
[4849] (a) increasing or generating the activiy of a zinc transporter non-targeted in a non-human organism or a part thereof, preferably a microorganism, a plant cell, a plant or a part thereof, as compared to a corresponding non-transformed wild type non-human organism or a part thereof; and
[4850] (b) growing the non-human organism or a part thereof under conditions which permit the production of glutamine or a composition comprising glutamine in said non-human organism or in the culture medium surrounding said non-human organism.

[4851] A further embodiment of the present invention relates to a process for the production of glutamine, which comprises
[4852] (a) increasing or generating the activiy of a asparaginase non-targeted in a non-human organism or a part thereof, preferably a microorganism, a plant cell, a plant or a part thereof, as compared to a corresponding non-transformed wild type non-human organism or a part thereof; and
[4853] (b) growing the non-human organism or a part thereof under conditions which permit the production of glutamine or a composition comprising glutamine in said non-human organism or in the culture medium surrounding said non-human organism.

[4854] A further embodiment of the present invention relates to a process for the production of glutamine, which comprises
[4855] (a) increasing or generating the activiy of a Leucyl/phenylalanyl-tRNA-protein transferase non-targeted in a non-human organism or a part thereof, preferably a microorganism, a plant cell, a plant or a part thereof, as compared to a corresponding non-transformed wild type non-human organism or a part thereof; and
[4856] (b) growing the non-human organism or a part thereof under conditions which permit the production of glutamine or a composition comprising glutamine in said non-human organism or in the culture medium surrounding said non-human organism.

[4857] A further embodiment of the present invention relates to a process for the production of proline, which comprises
[4858] (a) increasing or generating the activiy of a Leucyl/phenylalanyl-tRNA-protein transferase non-targeted in a non-human organism or a part thereof, preferably a microorganism, a plant cell, a plant or a part thereof, as compared to a corresponding non-transformed wild type non-human organism or a part thereof; and
[4859] (b) growing the non-human organism or a part thereof under conditions which permit the production of proline or a composition comprising proline in said non-human organism or in the culture medium surrounding said non-human organism.

[4860] A further embodiment of the present invention relates to a process for the production of glutamate, which comprises
[4861] (a) increasing or generating the activiy of a major facilitator superfamily transporter protein non-targeted in a non-human organism or a part thereof, preferably a microorganism, a plant cell, a plant or a part thereof, as compared to a corresponding non-transformed wild type non-human organism or a part thereof; and
[4862] (b) growing the non-human organism or a part thereof under conditions which permit the production of glutamate or a composition comprising glutamate in said non-human organism or in the culture medium surrounding said non-human organism.

[4863] A further embodiment of the present invention relates to a process for the production of proline, which comprises
[4864] (a) increasing or generating the activiy of a major facilitator superfamily transporter protein non-targeted in a non-human organism or a part thereof, preferably a microorganism, a plant cell, a plant or a part thereof, as compared to a corresponding non-transformed wild type non-human organism or a part thereof; and
[4865] (b) growing the non-human organism or a part thereof under conditions which permit the production of proline or a composition comprising proline in said non-human organism or in the culture medium surrounding said non-human organism.

[4866] A further embodiment of the present invention relates to a process for the production of proline, which comprises
[4867] (a) increasing or generating the activiy of a DNA helicase IV non-targeted in a non-human organism or a part thereof, preferably a microorganism, a plant cell, a plant or a part thereof, as compared to a corresponding non-transformed wild type non-human organism or a part thereof; and
[4868] (b) growing the non-human organism or a part thereof under conditions which permit the production of proline or a composition comprising proline in said non-human organism or in the culture medium surrounding said non-human organism.

[4869] A further embodiment of the present invention relates to a process for the production of proline, which comprises
[4870] (a) increasing or generating the activiy of a methylglyoxal synthase non-targeted in a non-human organism or a part thereof, preferably a microorganism, a plant cell, a plant or a part thereof, as compared to a corresponding non-transformed wild type non-human organism or a part thereof; and
[4871] (b) growing the non-human organism or a part thereof under conditions which permit the production of proline or a composition comprising proline in said non-human organism or in the culture medium surrounding said non-human organism.

[4872] A further embodiment of the present invention relates to a process for the production of proline, which comprises
[4873] (a) increasing or generating the activiy of a phosphoanhydride phosphorylase non-targeted in a non-human organism or a part thereof, preferably a microorganism, a plant cell, a plant or a part thereof, as compared to a corresponding non-transformed wild type non-human organism or a part thereof; and
[4874] (b) growing the non-human organism or a part thereof under conditions which permit the production of proline or a composition comprising proline in said non-human organism or in the culture medium surrounding said non-human organism.

[4875] A further embodiment of the present invention relates to a process for the production of glutamine, which comprises
[4876] (a) increasing or generating the activiy of a b1003-protein non-targeted in a non-human organism or a part thereof, preferably a microorganism, a plant cell, a plant or a part thereof, as compared to a corresponding non-transformed wild type non-human organism or a part thereof; and
[4877] (b) growing the non-human organism or a part thereof under conditions which permit the production of glutamine or a composition comprising glutamine in said non-human organism or in the culture medium surrounding said non-human organism.

[4878] A further embodiment of the present invention relates to a process for the production of proline, which comprises
[4879] (a) increasing or generating the activiy of a b1003-protein non-targeted in a non-human organism or a part thereof, preferably a microorganism, a plant cell, a plant or a part thereof, as compared to a corresponding non-transformed wild type non-human organism or a part thereof; and
[4880] (b) growing the non-human organism or a part thereof under conditions which permit the production of proline or a composition comprising proline in said non-human organism or in the culture medium surrounding said non-human organism.

[4881] A further embodiment of the present invention relates to a process for the production of arginine, which comprises
[4882] (a) increasing or generating the activiy of a lipoprotein precursor non-targeted in a non-human organism or a part thereof, preferably a microorganism, a plant cell, a plant or a part thereof, as compared to a corresponding non-transformed wild type non-human organism or a part thereof; and
[4883] (b) growing the non-human organism or a part thereof under conditions which permit the production of arginine or a composition comprising arginine in said non-human organism or in the culture medium surrounding said non-human organism.

[4884] A further embodiment of the present invention relates to a process for the production of glutamate, which comprises
[4885] (a) increasing or generating the activiy of a b1024-protein non-targeted in a non-human organism or a part thereof, preferably a microorganism, a plant cell, a plant or a part thereof, as compared to a corresponding non-transformed wild type non-human organism or a part thereof; and
[4886] (b) growing the non-human organism or a part thereof under conditions which permit the production of glutamate or a composition comprising glutamate in said non-human organism or in the culture medium surrounding said non-human organism.

[4887] A further embodiment of the present invention relates to a process for the production of glutamine, which comprises
[4888] (a) increasing or generating the activiy of a b1108-protein non-targeted in a non-human organism or a part thereof, preferably a microorganism, a plant cell, a plant or a part thereof, as compared to a corresponding non-transformed wild type non-human organism or a part thereof; and
[4889] (b) growing the non-human organism or a part thereof under conditions which permit the production of glutamine or a composition comprising glutamine in said non-human organism or in the culture medium surrounding said non-human organism.

[4890] A further embodiment of the present invention relates to a process for the production of proline, which comprises
[4891] (a) increasing or generating the activiy of a b1108-protein non-targeted in a non-human organism or a part thereof, preferably a microorganism, a plant cell, a plant or a part thereof, as compared to a corresponding non-transformed wild type non-human organism or a part thereof; and
[4892] (b) growing the non-human organism or a part thereof under conditions which permit the production of proline or a composition comprising proline in said non-human organism or in the culture medium surrounding said non-human organism.

[4893] A further embodiment of the present invention relates to a process for the production of proline, which comprises
[4894] (a) increasing or generating the activiy of a isocitrate dehydrogenase non-targeted in a non-human organism or a part thereof, preferably a microorganism, a plant cell, a plant or a part thereof, as compared to a corresponding non-transformed wild type non-human organism or a part thereof; and
[4895] (b) growing the non-human organism or a part thereof under conditions which permit the production of proline or a composition comprising proline in said non-human organism or in the culture medium surrounding said non-human organism.

[4896] A further embodiment of the present invention relates to a process for the production of arginine, which comprises
[4897] (a) increasing or generating the activiy of a b1137-protein non-targeted in a non-human organism or a part thereof, preferably a microorganism, a plant cell, a plant or a part thereof, as compared to a corresponding non-transformed wild type non-human organism or a part thereof; and
[4898] (b) growing the non-human organism or a part thereof under conditions which permit the production of arginine or a composition comprising arginine in said non-human organism or in the culture medium surrounding said non-human organism.

[4899] A further embodiment of the present invention relates to a process for the production of glutamate, which comprises
[4900] (a) increasing or generating the activiy of a b1137-protein non-targeted in a non-human organism or a part thereof, preferably a microorganism, a plant cell, a plant or a part thereof, as compared to a corresponding non-transformed wild type non-human organism or a part thereof; and
[4901] (b) growing the non-human organism or a part thereof under conditions which permit the production of glutamate or a composition comprising glutamate in said non-human organism or in the culture medium surrounding said non-human organism.

[4902] A further embodiment of the present invention relates to a process for the production of proline, which comprises
[4903] (a) increasing or generating the activiy of a b1137-protein non-targeted in a non-human organism or a part thereof, preferably a microorganism, a plant cell, a plant or a part thereof, as compared to a corresponding non-transformed wild type non-human organism or a part thereof; and
[4904] (b) growing the non-human organism or a part thereof under conditions which permit the production of proline or a composition comprising proline in said non-human organism or in the culture medium surrounding said non-human organism.

[4905] A further embodiment of the present invention relates to a process for the production of glutamine, which comprises
[4906] (a) increasing or generating the activiy of a b1163-protein non-targeted in a non-human organism or a part thereof, preferably a microorganism, a plant cell, a plant or a part thereof, as compared to a corresponding non-transformed wild type non-human organism or a part thereof; and
[4907] (b) growing the non-human organism or a part thereof under conditions which permit the production of glutamine or a composition comprising glutamine in said non-human organism or in the culture medium surrounding said non-human organism.

[4908] A further embodiment of the present invention relates to a process for the production of proline, which comprises
[4909] (a) increasing or generating the activiy of a sodium/proton antiporter non-targeted in a non-human organism or a part thereof, preferably a microorganism, a plant cell, a plant or a part thereof, as compared to a corresponding non-transformed wild type non-human organism or a part thereof; and
[4910] (b) growing the non-human organism or a part thereof under conditions which permit the production of proline or a composition comprising proline in said non-human organism or in the culture medium surrounding said non-human organism.

[4911] A further embodiment of the present invention relates to a process for the production of glutamine, which comprises
[4912] (a) increasing or generating the activiy of a membrane protein non-targeted in a non-human organism or a part thereof, preferably a microorganism, a plant cell, a plant or a part thereof, as compared to a corresponding non-transformed wild type non-human organism or a part thereof; and
[4913] (b) growing the non-human organism or a part thereof under conditions which permit the production of glutamine or a composition comprising glutamine in said non-human organism or in the culture medium surrounding said non-human organism.

[4914] A further embodiment of the present invention relates to a process for the production of proline, which comprises
[4915] (a) increasing or generating the activiy of a membrane protein non-targeted in a non-human organism or a part thereof, preferably a microorganism, a plant cell, a plant or a part thereof, as compared to a corresponding non-transformed wild type non-human organism or a part thereof; and
[4916] (b) growing the non-human organism or a part thereof under conditions which permit the production of proline or a composition comprising proline in said non-human organism or in the culture medium surrounding said non-human organism.

[4917] A further embodiment of the present invention relates to a process for the production of arginine, which comprises
[4918] (a) increasing or generating the activiy of a b1259-protein non-targeted in a non-human organism or a part thereof, preferably a microorganism, a plant cell, a plant or a part thereof, as compared to a corresponding non-transformed wild type non-human organism or a part thereof; and
[4919] (b) growing the non-human organism or a part thereof under conditions which permit the production of arginine or a composition comprising arginine in said non-human organism or in the culture medium surrounding said non-human organism.

[4920] A further embodiment of the present invention relates to a process for the production of glutamine, which comprises
[4921] (a) increasing or generating the activiy of a b1259-protein non-targeted in a non-human organism or a part thereof, preferably a microorganism, a plant cell, a plant or a part thereof, as compared to a corresponding non-transformed wild type non-human organism or a part thereof; and
[4922] (b) growing the non-human organism or a part thereof under conditions which permit the production of glutamine or a composition comprising glutamine in said non-human organism or in the culture medium surrounding said non-human organism.

[4923] A further embodiment of the present invention relates to a process for the production of glutamine, which comprises
[4924] (a) increasing or generating the activiy of a anthranilate synthase component II non-targeted in a non-human organism or a part thereof, preferably a microorganism, a plant cell, a plant or a part thereof, as compared to a corresponding non-transformed wild type non-human organism or a part thereof; and
[4925] (b) growing the non-human organism or a part thereof under conditions which permit the production of glutamine or a composition comprising glutamine in said non-human organism or in the culture medium surrounding said non-human organism.

[4926] A further embodiment of the present invention relates to a process for the production of glutamine, which comprises
[4927] (a) increasing or generating the activiy of a b1280-protein non-targeted in a non-human organism or a part thereof, preferably a microorganism, a plant cell, a plant or a part thereof, as compared to a corresponding non-transformed wild type non-human organism or a part thereof; and
[4928] (b) growing the non-human organism or a part thereof under conditions which permit the production of glutamine or a composition comprising glutamine in said non-human organism or in the culture medium surrounding said non-human organism.

[4929] A further embodiment of the present invention relates to a process for the production of glutamine, which comprises
[4930] (a) increasing or generating the activiy of a glutamine synthetase non-targeted in a non-human organism or a part thereof, preferably a microorganism, a plant cell, a plant or a part thereof, as compared to a corresponding non-transformed wild type non-human organism or a part thereof; and
[4931] (b) growing the non-human organism or a part thereof under conditions which permit the production of glutamine or a composition comprising glutamine in said non-human organism or in the culture medium surrounding said non-human organism.

[4932] A further embodiment of the present invention relates to a process for the production of glutamate, which comprises
[4933] (a) increasing or generating the activiy of a aldehyde dehydrogenase non-targeted in a non-human organism or a part thereof, preferably a microorganism, a plant cell, a plant or a part thereof, as compared to a corresponding non-transformed wild type non-human organism or a part thereof; and
[4934] (b) growing the non-human organism or a part thereof under conditions which permit the production of glutamate or a composition comprising glutamate in said non-human organism or in the culture medium surrounding said non-human organism.

[4935] A further embodiment of the present invention relates to a process for the production of glutamate, which comprises
[4936] (a) increasing or generating the activiy of a b1330-protein non-targeted in a non-human organism or a part thereof, preferably a microorganism, a plant cell, a plant or a part thereof, as compared to a corresponding non-transformed wild type non-human organism or a part thereof; and
[4937] (b) growing the non-human organism or a part thereof under conditions which permit the production of glutamate or a composition comprising glutamate in said non-human organism or in the culture medium surrounding said non-human organism.

[4938] A further embodiment of the present invention relates to a process for the production of glutamine, which comprises
[4939] (a) increasing or generating the activiy of a b1330-protein non-targeted in a non-human organism or a part thereof, preferably a microorganism, a plant cell, a plant or a part thereof, as compared to a corresponding non-transformed wild type non-human organism or a part thereof; and
[4940] (b) growing the non-human organism or a part thereof under conditions which permit the production of glutamine or a composition comprising glutamine in said non-human organism or in the culture medium surrounding said non-human organism.

[4941] A further embodiment of the present invention relates to a process for the production of glutamate, which comprises
[4942] (a) increasing or generating the activiy of a lipoprotein precursor non-targeted in a non-human organism or a part thereof, preferably a microorganism, a plant cell, a plant or a part thereof, as compared to a corresponding non-transformed wild type non-human organism or a part thereof; and
[4943] (b) growing the non-human organism or a part thereof under conditions which permit the production of glutamate or a composition comprising glutamate in said non-human organism or in the culture medium surrounding said non-human organism.

[4944] A further embodiment of the present invention relates to a process for the production of glutamine, which comprises
[4945] (a) increasing or generating the activiy of a lipoprotein precursor non-targeted in a non-human organism or a part thereof, preferably a microorganism, a plant cell, a plant or a part thereof, as compared to a corresponding non-transformed wild type non-human organism or a part thereof; and
[4946] (b) growing the non-human organism or a part thereof under conditions which permit the production of glutamine or a composition comprising glutamine in said non-human organism or in the culture medium surrounding said non-human organism.

[4947] A further embodiment of the present invention relates to a process for the production of glutamate, which comprises
[4948] (a) increasing or generating the activiy of a b1445-protein non-targeted in a non-human organism or a part thereof, preferably a microorganism, a plant cell, a plant or a part thereof, as compared to a corresponding non-transformed wild type non-human organism or a part thereof; and
[4949] (b) growing the non-human organism or a part thereof under conditions which permit the production of glutamate or a composition comprising glutamate in said non-human organism or in the culture medium surrounding said non-human organism.

[4950] A further embodiment of the present invention relates to a process for the production of glutamine, which comprises
[4951] (a) increasing or generating the activiy of a b1445-protein non-targeted in a non-human organism or a part thereof, preferably a microorganism, a plant cell, a plant or a part thereof, as compared to a corresponding non-transformed wild type non-human organism or a part thereof; and
[4952] (b) growing the non-human organism or a part thereof under conditions which permit the production of glutamine or a composition comprising glutamine in said non-human organism or in the culture medium surrounding said non-human organism.

[4953] A further embodiment of the present invention relates to a process for the production of glutamate, which comprises
[4954] (a) increasing or generating the activiy of a b1522-protein non-targeted in a non-human organism or a part thereof, preferably a microorganism, a plant cell, a plant or a part thereof, as compared to a corresponding non-transformed wild type non-human organism or a part thereof; and
[4955] (b) growing the non-human organism or a part thereof under conditions which permit the production of glutamate or a composition comprising glutamate in said non-human organism or in the culture medium surrounding said non-human organism.

[4956] A further embodiment of the present invention relates to a process for the production of glutamine, which comprises
[4957] (a) increasing or generating the activiy of a acid shock protein non-targeted in a non-human organism or a part thereof, preferably a microorganism, a plant cell, a plant or a part thereof, as compared to a corresponding non-transformed wild type non-human organism or a part thereof; and
[4958] (b) growing the non-human organism or a part thereof under conditions which permit the production of glutamine or a composition comprising glutamine in said non-human organism or in the culture medium surrounding said non-human organism.

[4959] A further embodiment of the present invention relates to a process for the production of glutamine, which comprises
[4960] (a) increasing or generating the activiy of a electron transport complex protein non-targeted in a non-human organism or a part thereof, preferably a microorganism, a plant cell, a plant or a part thereof, as compared to a corresponding non-transformed wild type non-human organism or a part thereof; and
[4961] (b) growing the non-human organism or a part thereof under conditions which permit the production of glutamine or a composition comprising glutamine in said non-human organism or in the culture medium surrounding said non-human organism.

[4962] A further embodiment of the present invention relates to a process for the production of glutamate, which comprises
[4963] (a) increasing or generating the activiy of a protease non-targeted in a non-human organism or a part thereof, preferably a microorganism, a plant cell, a plant or a part thereof, as compared to a corresponding non-transformed wild type non-human organism or a part thereof; and
[4964] (b) growing the non-human organism or a part thereof under conditions which permit the production of glutamate or a composition comprising glutamate in said non-human organism or in the culture medium surrounding said non-human organism.

[4965] A further embodiment of the present invention relates to a process for the production of glutamate, which comprises
[4966] (a) increasing or generating the activiy of a b1898-protein non-targeted in a non-human organism or a part thereof, preferably a microorganism, a plant cell, a plant or a part thereof, as compared to a corresponding non-transformed wild type non-human organism or a part thereof; and
[4967] (b) growing the non-human organism or a part thereof under conditions which permit the production of glutamate or a composition comprising glutamate in said non-human organism or in the culture medium surrounding said non-human organism.

[4968] A further embodiment of the present invention relates to a process for the production of glutamine, which comprises
[4969] (a) increasing or generating the activiy of a transport protein non-targeted in a non-human organism or a part thereof, preferably a microorganism, a plant cell, a plant or a part thereof, as compared to a corresponding non-transformed wild type non-human organism or a part thereof; and
[4970] (b) growing the non-human organism or a part thereof under conditions which permit the production of glutamine or a composition comprising glutamine in said non-human organism or in the culture medium surrounding said non-human organism.

[4971] A further embodiment of the present invention relates to a process for the production of glutamate, which comprises
[4972] (a) increasing or generating the activiy of a transport protein non-targeted in a non-human organism or a part thereof, preferably a microorganism, a plant cell, a plant or a part thereof, as compared to a corresponding non-transformed wild type non-human organism or a part thereof; and
[4973] (b) growing the non-human organism or a part thereof under conditions which permit the production of glutamate or a composition comprising glutamate in said non-human organism or in the culture medium surrounding said non-human organism.

[4974] A further embodiment of the present invention relates to a process for the production of glutamine, which comprises
[4975] (a) increasing or generating the activiy of a transport protein non-targeted in a non-human organism or a part thereof, preferably a microorganism, a plant cell, a plant or a part thereof, as compared to a corresponding non-transformed wild type non-human organism or a part thereof; and
[4976] (b) growing the non-human organism or a part thereof under conditions which permit the production of glutamine or a composition comprising glutamine in said non-human organism or in the culture medium surrounding said non-human organism.

[4977] A further embodiment of the present invention relates to a process for the production of proline, which comprises
[4978] (a) increasing or generating the activiy of a transport protein non-targeted in a non-human organism or a part thereof, preferably a microorganism, a plant cell, a plant or a part thereof, as compared to a corresponding non-transformed wild type non-human organism or a part thereof; and
[4979] (b) growing the non-human organism or a part thereof under conditions which permit the production of proline or a composition comprising proline in said non-human organism or in the culture medium surrounding said non-human organism.

[4980] A further embodiment of the present invention relates to a process for the production of glutamine, which comprises
[4981] (a) increasing or generating the activiy of a uridine/cytidine kinase non-targeted in a non-human organism or a part thereof, preferably a microorganism, a plant cell, a plant or a part thereof, as compared to a corresponding non-transformed wild type non-human organism or a part thereof; and
[4982] (b) growing the non-human organism or a part thereof under conditions which permit the production of glutamine or a composition comprising glutamine in said non-human organism or in the culture medium surrounding said non-human organism.

[4983] A further embodiment of the present invention relates to a process for the production of glutamate, which comprises
[4984] (a) increasing or generating the activiy of a b2107-protein non-targeted in a non-human organism or a part thereof, preferably a microorganism, a plant cell, a plant or a part thereof, as compared to a corresponding non-transformed wild type non-human organism or a part thereof; and
[4985] (b) growing the non-human organism or a part thereof under conditions which permit the production of glutamate or a composition comprising glutamate in said non-human organism or in the culture medium surrounding said non-human organism.

[4986] A further embodiment of the present invention relates to a process for the production of glutamine, which comprises
[4987] (a) increasing or generating the activiy of a b2121-protein non-targeted in a non-human organism or a part thereof, preferably a microorganism, a plant cell, a plant or a part thereof, as compared to a corresponding non-transformed wild type non-human organism or a part thereof; and
[4988] (b) growing the non-human organism or a part thereof under conditions which permit the production of glutamine or a composition comprising glutamine in said non-human organism or in the culture medium surrounding said non-human organism.

[4989] A further embodiment of the present invention relates to a process for the production of glutamate, which comprises
[4990] (a) increasing or generating the activiy of a ABC transporter permease protein non-targeted in a non-human organism or a part thereof, preferably a microorganism, a plant cell, a plant or a part thereof, as compared to a corresponding non-transformed wild type non-human organism or a part thereof; and
[4991] (b) growing the non-human organism or a part thereof under conditions which permit the production of glutamate or a composition comprising glutamate in said non-human organism or in the culture medium surrounding said non-human organism.

[4992] A further embodiment of the present invention relates to a process for the production of glutamine, which comprises
[4993] (a) increasing or generating the activiy of a ABC transporter permease protein non-targeted in a non-human organism or a part thereof, preferably a microorganism, a plant cell, a plant or a part thereof, as compared to a corresponding non-transformed wild type non-human organism or a part thereof; and
[4994] (b) growing the non-human organism or a part thereof under conditions which permit the production of glutamine or a composition comprising glutamine in said non-human organism or in the culture medium surrounding said non-human organism.

[4995] A further embodiment of the present invention relates to a process for the production of proline, which comprises
[4996] (a) increasing or generating the activiy of a ABC transporter permease protein non-targeted in a non-human organism or a part thereof, preferably a microorganism, a plant cell, a plant or a part thereof, as compared to a corresponding non-transformed wild type non-human organism or a part thereof; and
[4997] (b) growing the non-human organism or a part thereof under conditions which permit the production of proline or a composition comprising proline in said non-human organism or in the culture medium surrounding said non-human organism.

[4998] A further embodiment of the present invention relates to a process for the production of glutamine, which comprises
[4999] (a) increasing or generating the activiy of a NADH dehydrogenase I chain I non-targeted in a non-human organism or a part thereof, preferably a microorganism, a plant cell, a plant or a part thereof, as compared to a corresponding non-transformed wild type non-human organism or a part thereof; and
[5000] (b) growing the non-human organism or a part thereof under conditions which permit the production of glutamine or a composition comprising glutamine in said non-human organism or in the culture medium surrounding said non-human organism.

[5001] A further embodiment of the present invention relates to a process for the production of glutamate, which comprises
[5002] (a) increasing or generating the activiy of a b2360-protein non-targeted in a non-human organism or a part thereof, preferably a microorganism, a plant cell, a plant or a part thereof, as compared to a corresponding non-transformed wild type non-human organism or a part thereof; and
[5003] (b) growing the non-human organism or a part thereof under conditions which permit the production of glutamate or a composition comprising glutamate in said non-human organism or in the culture medium surrounding said non-human organism.

[5004] A further embodiment of the present invention relates to a process for the production of proline, which comprises
[5005] (a) increasing or generating the activiy of a b2399-protein non-targeted in a non-human organism or a part thereof, preferably a microorganism, a plant cell, a plant or a part thereof, as compared to a corresponding non-transformed wild type non-human organism or a part thereof; and
[5006] (b) growing the non-human organism or a part thereof under conditions which permit the production of proline or a composition comprising proline in said non-human organism or in the culture medium surrounding said non-human organism.

[5007] A further embodiment of the present invention relates to a process for the production of glutamate, which comprises
[5008] (a) increasing or generating the activiy of a transcriptional regulator non-targeted in a non-human organism or a part thereof, preferably a microorganism, a plant cell, a plant or a part thereof, as compared to a corresponding non-transformed wild type non-human organism or a part thereof; and
[5009] (b) growing the non-human organism or a part thereof under conditions which permit the production of glutamate or a composition comprising glutamate in said non-human organism or in the culture medium surrounding said non-human organism.

[5010] A further embodiment of the present invention relates to a process for the production of arginine, which comprises
[5011] (a) increasing or generating the activiy of a cysteine synthase A non-targeted in a non-human organism or a part thereof, preferably a microorganism, a plant cell, a plant or a part thereof, as compared to a corresponding non-transformed wild type non-human organism or a part thereof; and
[5012] (b) growing the non-human organism or a part thereof under conditions which permit the production of arginine or a composition comprising arginine in said non-human organism or in the culture medium surrounding said non-human organism.

[5013] A further embodiment of the present invention relates to a process for the production of glutamate, which comprises
[5014] (a) increasing or generating the activiy of a cysteine synthase A non-targeted in a non-human organism or a part thereof, preferably a microorganism, a plant cell, a plant or a part thereof, as compared to a corresponding non-transformed wild type non-human organism or a part thereof; and
[5015] (b) growing the non-human organism or a part thereof under conditions which permit the production of glutamate or a composition comprising glutamate in said non-human organism or in the culture medium surrounding said non-human organism.

[5016] A further embodiment of the present invention relates to a process for the production of proline, which comprises
[5017] (a) increasing or generating the activiy of a ethanolamine utilization protein non-targeted in a non-human organism or a part thereof, preferably a microorganism, a plant cell, a plant or a part thereof, as compared to a corresponding non-transformed wild type non-human organism or a part thereof; and
[5018] (b) growing the non-human organism or a part thereof under conditions which permit the production of proline or a composition comprising proline in said non-human organism or in the culture medium surrounding said non-human organism.

[5019] A further embodiment of the present invention relates to a process for the production of proline, which comprises
[5020] (a) increasing or generating the activiy of a b2474-protein non-targeted in a non-human organism or a part thereof, preferably a microorganism, a plant cell, a plant or a part thereof, as compared to a corresponding non-transformed wild type non-human organism or a part thereof; and
[5021] (b) growing the non-human organism or a part thereof under conditions which permit the production of proline or a composition comprising proline in said non-human organism or in the culture medium surrounding said non-human organism.

[5022] A further embodiment of the present invention relates to a process for the production of glutamate, which comprises
[5023] (a) increasing or generating the activiy of a b2513-protein non-targeted in a non-human organism or a part thereof, preferably a microorganism, a plant cell, a plant or a part thereof, as compared to a corresponding non-transformed wild type non-human organism or a part thereof; and
[5024] (b) growing the non-human organism or a part thereof under conditions which permit the production of glutamate or a composition comprising glutamate in said non-human organism or in the culture medium surrounding said non-human organism.

[5025] A further embodiment of the present invention relates to a process for the production of glutamine, which comprises
[5026] (a) increasing or generating the activiy of a b2513-protein non-targeted in a non-human organism or a part thereof, preferably a microorganism, a plant cell, a plant or a part thereof, as compared to a corresponding non-transformed wild type non-human organism or a part thereof; and
[5027] (b) growing the non-human organism or a part thereof under conditions which permit the production of glutamine or a composition comprising glutamine in said non-human organism or in the culture medium surrounding said non-human organism.

[5028] A further embodiment of the present invention relates to a process for the production of arginine, which comprises
[5029] (a) increasing or generating the activiy of a 2,3-dihydroxy-2,3-dihydrophenylpropionatedehydrogenase non-targeted in a non-human organism or a part thereof, preferably a microorganism, a plant cell, a plant or a part thereof, as compared to a corresponding non-transformed wild type non-human organism or a part thereof; and
[5030] (b) growing the non-human organism or a part thereof under conditions which permit the production of arginine or a composition comprising arginine in said non-human organism or in the culture medium surrounding said non-human organism.

[5031] A further embodiment of the present invention relates to a process for the production of glutamate, which comprises
[5032] (a) increasing or generating the activiy of a 2,3-dihydroxy-2,3-dihydrophenylpropionatedehydrogenase non-targeted in a non-human organism or a part thereof, preferably a microorganism, a plant cell, a plant or a part thereof, as compared to a corresponding non-transformed wild type non-human organism or a part thereof; and
[5033] (b) growing the non-human organism or a part thereof under conditions which permit the production of glutamate or a composition comprising glutamate in said non-human organism or in the culture medium surrounding said non-human organism.

[5034] A further embodiment of the present invention relates to a process for the production of glutamine, which comprises
[5035] (a) increasing or generating the activiy of a b2548-protein non-targeted in a non-human organism or a part thereof, preferably a microorganism, a plant cell, a plant or a part thereof, as compared to a corresponding non-transformed wild type non-human organism or a part thereof; and
[5036] (b) growing the non-human organism or a part thereof under conditions which permit the production of glutamine or a composition comprising glutamine in said non-human organism or in the culture medium surrounding said non-human organism.

[5037] A further embodiment of the present invention relates to a process for the production of glutamine, which comprises
[5038] (a) increasing or generating the activiy of a b2613-protein non-targeted in a non-human organism or a part thereof, preferably a microorganism, a plant cell, a plant or a part thereof, as compared to a corresponding non-transformed wild type non-human organism or a part thereof; and
[5039] (b) growing the non-human organism or a part thereof under conditions which permit the production of glutamine or a composition comprising glutamine in said non-human organism or in the culture medium surrounding said non-human organism.

[5040] A further embodiment of the present invention relates to a process for the production of proline, which comprises
[5041] (a) increasing or generating the activiy of a b2613-protein non-targeted in a non-human organism or a part thereof, preferably a microorganism, a plant cell, a plant or a part thereof, as compared to a corresponding non-transformed wild type non-human organism or a part thereof; and
[5042] (b) growing the non-human organism or a part thereof under conditions which permit the production of proline or a composition comprising proline in said non-human organism or in the culture medium surrounding said non-human organism.

[5043] A further embodiment of the present invention relates to a process for the production of glutamate, which comprises
[5044] (a) increasing or generating the activiy of a transcriptional regulator non-targeted in a non-human organism or a part thereof, preferably a microorganism, a plant cell, a plant or a part thereof, as compared to a corresponding non-transformed wild type non-human organism or a part thereof; and
[5045] (b) growing the non-human organism or a part thereof under conditions which permit the production of glutamate or a composition comprising glutamate in said non-human organism or in the culture medium surrounding said non-human organism.

[5046] A further embodiment of the present invention relates to a process for the production of glutamine, which comprises
[5047] (a) increasing or generating the activiy of a transcriptional regulator non-targeted in a non-human organism or a part thereof, preferably a microorganism, a plant cell, a plant or a part thereof, as compared to a corresponding non-transformed wild type non-human organism or a part thereof; and
[5048] (b) growing the non-human organism or a part thereof under conditions which permit the production of glutamine or a composition comprising glutamine in said non-human organism or in the culture medium surrounding said non-human organism.

[5049] A further embodiment of the present invention relates to a process for the production of proline, which comprises
[5050] (a) increasing or generating the activiy of a transcriptional regulator non-targeted in a non-human organism or a part thereof, preferably a microorganism, a plant cell, a plant or a part thereof, as compared to a corresponding non-transformed wild type non-human organism or a part thereof; and
[5051] (b) growing the non-human organism or a part thereof under conditions which permit the production of proline or a composition comprising proline in said non-human organism or in the culture medium surrounding said non-human organism.

[5052] A further embodiment of the present invention relates to a process for the production of glutamate, which comprises
[5053] (a) increasing or generating the activiy of a b2673-protein non-targeted in a non-human organism or a part thereof, preferably a microorganism, a plant cell, a plant or a part thereof, as compared to a corresponding non-transformed wild type non-human organism or a part thereof; and
[5054] (b) growing the non-human organism or a part thereof under conditions which permit the production of glutamate or a composition comprising glutamate in said non-human organism or in the culture medium surrounding said non-human organism.

[5055] A further embodiment of the present invention relates to a process for the production of glutamine, which comprises
[5056] (a) increasing or generating the activiy of a b2673-protein non-targeted in a non-human organism or a part thereof, preferably a microorganism, a plant cell, a plant or a part thereof, as compared to a corresponding non-transformed wild type non-human organism or a part thereof; and
[5057] (b) growing the non-human organism or a part thereof under conditions which permit the production of glutamine or a composition comprising glutamine in said non-human organism or in the culture medium surrounding said non-human organism.

[5058] A further embodiment of the present invention relates to a process for the production of glutamine, which comprises
[5059] (a) increasing or generating the activiy of a transcriptional regulator non-targeted in a non-human organism or a part thereof, preferably a microorganism, a plant cell, a plant or a part thereof, as compared to a corresponding non-transformed wild type non-human organism or a part thereof; and
[5060] (b) growing the non-human organism or a part thereof under conditions which permit the production of glutamine or a composition comprising glutamine in said non-human organism or in the culture medium surrounding said non-human organism.

[5061] A further embodiment of the present invention relates to a process for the production of proline, which comprises
[5062] (a) increasing or generating the activiy of a transcriptional regulator non-targeted in a non-human organism or a part thereof, preferably a microorganism, a plant cell, a plant or a part thereof, as compared to a corresponding non-transformed wild type non-human organism or a part thereof; and
[5063] (b) growing the non-human organism or a part thereof under conditions which permit the production of proline or a composition comprising proline in said non-human organism or in the culture medium surrounding said non-human organism.

[5064] A further embodiment of the present invention relates to a process for the production of glutamate, which comprises
[5065] (a) increasing or generating the activiy of a b2812-protein non-targeted in a non-human organism or a part thereof, preferably a microorganism, a plant cell, a plant or a part thereof, as compared to a corresponding non-transformed wild type non-human organism or a part thereof; and
[5066] (b) growing the non-human organism or a part thereof under conditions which permit the production of glutamate or a composition comprising glutamate in said non-human organism or in the culture medium surrounding said non-human organism.

[5067] A further embodiment of the present invention relates to a process for the production of glutamine, which comprises
[5068] (a) increasing or generating the activiy of a b2812-protein non-targeted in a non-human organism or a part thereof, preferably a microorganism, a plant cell, a plant or a part thereof, as compared to a corresponding non-transformed wild type non-human organism or a part thereof; and
[5069] (b) growing the non-human organism or a part thereof under conditions which permit the production of glutamine or a composition comprising glutamine in said non-human organism or in the culture medium surrounding said non-human organism.

[5070] A further embodiment of the present invention relates to a process for the production of proline, which comprises
[5071] (a) increasing or generating the activiy of a b2812-protein non-targeted in a non-human organism or a part thereof, preferably a microorganism, a plant cell, a plant or a part thereof, as compared to a corresponding non-transformed wild type non-human organism or a part thereof; and
[5072] (b) growing the non-human organism or a part thereof under conditions which permit the production of proline or a composition comprising proline in said non-human organism or in the culture medium surrounding said non-human organism.

[5073] A further embodiment of the present invention relates to a process for the production of proline, which comprises
[5074] (a) increasing or generating the activiy of a b2846-protein non-targeted in a non-human organism or a part thereof, preferably a microorganism, a plant cell, a plant or a part thereof, as compared to a corresponding non-transformed wild type non-human organism or a part thereof; and
[5075] (b) growing the non-human organism or a part thereof under conditions which permit the production of proline or a composition comprising proline in said non-human organism or in the culture medium surrounding said non-human organism.

[5076] A further embodiment of the present invention relates to a process for the production of arginine, which comprises
[5077] (a) increasing or generating the activiy of a b2909-protein non-targeted in a non-human organism or a part thereof, preferably a microorganism, a plant cell, a plant or a part thereof, as compared to a corresponding non-transformed wild type non-human organism or a part thereof; and
[5078] (b) growing the non-human organism or a part thereof under conditions which permit the production of arginine or a composition comprising arginine in said non-human organism or in the culture medium surrounding said non-human organism.

[5079] A further embodiment of the present invention relates to a process for the production of proline, which comprises
[5080] (a) increasing or generating the activiy of a b2909-protein non-targeted in a non-human organism or a part thereof, preferably a microorganism, a plant cell, a plant or a part thereof, as compared to a corresponding non-transformed wild type non-human organism or a part thereof; and
[5081] (b) growing the non-human organism or a part thereof under conditions which permit the production of proline or a composition comprising proline in said non-human organism or in the culture medium surrounding said non-human organism.

[5082] A further embodiment of the present invention relates to a process for the production of glutamate, which comprises
[5083] (a) increasing or generating the activiy of a ribosephosphate isomerase, constitutive non-targeted in a non-human organism or a part thereof, preferably a microorganism, a plant cell, a plant or a part thereof, as compared to a corresponding non-transformed wild type non-human organism or a part thereof; and
[5084] (b) growing the non-human organism or a part thereof under conditions which permit the production of glutamate or a composition comprising glutamate in said non-human organism or in the culture medium surrounding said non-human organism.

[5085] A further embodiment of the present invention relates to a process for the production of glutamate, which comprises
[5086] (a) increasing or generating the activiy of a arginine exporter protein non-targeted in a non-human organism or a part thereof, preferably a microorganism, a plant cell, a plant or a part thereof, as compared to a corresponding non-transformed wild type non-human organism or a part thereof; and
[5087] (b) growing the non-human organism or a part thereof under conditions which permit the production of glutamate or a composition comprising glutamate in said non-human organism or in the culture medium surrounding said non-human organism.

[5088] A further embodiment of the present invention relates to a process for the production of proline, which comprises
[5089] (a) increasing or generating the activiy of a b2936-protein non-targeted in a non-human organism or a part thereof, preferably a microorganism, a plant cell, a plant or a part thereof, as compared to a corresponding non-transformed wild type non-human organism or a part thereof; and
[5090] (b) growing the non-human organism or a part thereof under conditions which permit the production of proline or a composition comprising proline in said non-human organism or in the culture medium surrounding said non-human organism.

[5091] A further embodiment of the present invention relates to a process for the production of proline, which comprises
[5092] (a) increasing or generating the activiy of a L-asparaginase non-targeted in a non-human organism or a part thereof, preferably a microorganism, a plant cell, a plant or a part thereof, as compared to a corresponding non-transformed wild type non-human organism or a part thereof; and
[5093] (b) growing the non-human organism or a part thereof under conditions which permit the production of proline or a composition comprising proline in said non-human organism or in the culture medium surrounding said non-human organism.

[5094] A further embodiment of the present invention relates to a process for the production of proline, which comprises
[5095] (a) increasing or generating the activiy of a murein transglycosylase non-targeted in a non-human organism or a part thereof, preferably a microorganism, a plant cell, a plant or a part thereof, as compared to a corresponding non-transformed wild type non-human organism or a part thereof; and
[5096] (b) growing the non-human organism or a part thereof under conditions which permit the production of proline or a composition comprising proline in said non-human organism or in the culture medium surrounding said non-human organism.

[5097] A further embodiment of the present invention relates to a process for the production of arginine, which comprises
[5098] (a) increasing or generating the activiy of a b2999-protein non-targeted in a non-human organism or a part thereof, preferably a microorganism, a plant cell, a plant or a part thereof, as compared to a corresponding non-transformed wild type non-human organism or a part thereof; and
[5099] (b) growing the non-human organism or a part thereof under conditions which permit the production of arginine or a composition comprising arginine in said non-human organism or in the culture medium surrounding said non-human organism.

[5100] A further embodiment of the present invention relates to a process for the production of proline, which comprises
[5101] (a) increasing or generating the activiy of a glycoprotease non-targeted in a non-human organism or a part thereof, preferably a microorganism, a plant cell, a plant or a part thereof, as compared to a corresponding non-transformed wild type non-human organism or a part thereof; and
[5102] (b) growing the non-human organism or a part thereof under conditions which permit the production of proline or a composition comprising proline in said non-human organism or in the culture medium surrounding said non-human organism.

[5103] A further embodiment of the present invention relates to a process for the production of arginine, which comprises
[5104] (a) increasing or generating the activiy of a b3121-protein non-targeted in a non-human organism or a part thereof, preferably a microorganism, a plant cell, a plant or a part thereof, as compared to a corresponding non-transformed wild type non-human organism or a part thereof; and
[5105] (b) growing the non-human organism or a part thereof under conditions which permit the production of arginine or a composition comprising arginine in said non-human organism or in the culture medium surrounding said non-human organism.

[5106] A further embodiment of the present invention relates to a process for the production of proline, which comprises
[5107] (a) increasing or generating the activiy of a b3121-protein non-targeted in a non-human organism or a part thereof, preferably a microorganism, a plant cell, a plant or a part thereof, as compared to a corresponding non-transformed wild type non-human organism or a part thereof; and
[5108] (b) growing the non-human organism or a part thereof under conditions which permit the production of proline or a composition comprising proline in said non-human organism or in the culture medium surrounding said non-human organism.

[5109] A further embodiment of the present invention relates to a process for the production of proline, which comprises
[5110] (a) increasing or generating the activiy of a b3151-protein non-targeted in a non-human organism or a part thereof, preferably a microorganism, a plant cell, a plant or a part thereof, as compared to a corresponding non-transformed wild type non-human organism or a part thereof; and
[5111] (b) growing the non-human organism or a part thereof under conditions which permit the production of proline or a composition comprising proline in said non-human organism or in the culture medium surrounding said non-human organism.

[5112] A further embodiment of the present invention relates to a process for the production of arginine, which comprises
[5113] (a) increasing or generating the activiy of a acetyl CoA carboxylase non-targeted in a non-human organism or a part thereof, preferably a microorganism, a plant cell, a plant or a part thereof, as compared to a corresponding non-transformed wild type non-human organism or a part thereof; and
[5114] (b) growing the non-human organism or a part thereof under conditions which permit the production of arginine or a composition comprising arginine in said non-human organism or in the culture medium surrounding said non-human organism.

[5115] A further embodiment of the present invention relates to a process for the production of glutamate, which comprises
[5116] (a) increasing or generating the activiy of a acetyl CoA carboxylase non-targeted in a non-human organism or a part thereof, preferably a microorganism, a plant cell, a plant or a part thereof, as compared to a corresponding non-transformed wild type non-human organism or a part thereof; and
[5117] (b) growing the non-human organism or a part thereof under conditions which permit the production of glutamate or a composition comprising glutamate in said non-human organism or in the culture medium surrounding said non-human organism.

[5118] A further embodiment of the present invention relates to a process for the production of arginine, which comprises
[5119] (a) increasing or generating the activiy of a methyltransferase non-targeted in a non-human organism or a part thereof, preferably a microorganism, a plant cell, a plant or a part thereof, as compared to a corresponding non-transformed wild type non-human organism or a part thereof; and
[5120] (b) growing the non-human organism or a part thereof under conditions which permit the production of arginine or a composition comprising arginine in said non-human organism or in the culture medium surrounding said non-human organism.

[5121] A further embodiment of the present invention relates to a process for the production of glutamate, which comprises
[5122] (a) increasing or generating the activiy of a methyltransferase non-targeted in a non-human organism or a part thereof, preferably a microorganism, a plant cell, a plant or a part thereof, as compared to a corresponding non-transformed wild type non-human organism or a part thereof; and
[5123] (b) growing the non-human organism or a part thereof under conditions which permit the production of glutamate or a composition comprising glutamate in said non-human organism or in the culture medium surrounding said non-human organism.

[5124] A further embodiment of the present invention relates to a process for the production of glutamine, which comprises
[5125] (a) increasing or generating the activiy of a methyltransferase non-targeted in a non-human organism or a part thereof, preferably a microorganism, a plant cell, a plant or a part thereof, as compared to a corresponding non-transformed wild type non-human organism or a part thereof; and
[5126] (b) growing the non-human organism or a part thereof under conditions which permit the production of glutamine or a composition comprising glutamine in said non-human organism or in the culture medium surrounding said non-human organism.

[5127] A further embodiment of the present invention relates to a process for the production of proline, which comprises
[5128] (a) increasing or generating the activiy of a methyltransferase non-targeted in a non-human organism or a part thereof, preferably a microorganism, a plant cell, a plant or a part thereof, as compared to a corresponding non-transformed wild type non-human organism or a part thereof; and
[5129] (b) growing the non-human organism or a part thereof under conditions which permit the production of proline or a composition comprising proline in said non-human organism or in the culture medium surrounding said non-human organism.

[5130] A further embodiment of the present invention relates to a process for the production of proline, which comprises
[5131] (a) increasing or generating the activiy of a b3346-protein non-targeted in a non-human organism or a part thereof, preferably a microorganism, a plant cell, a plant or a part thereof, as compared to a corresponding non-transformed wild type non-human organism or a part thereof; and
[5132] (b) growing the non-human organism or a part thereof under conditions which permit the production of proline or a composition comprising proline in said non-human organism or in the culture medium surrounding said non-human organism.

[5133] A further embodiment of the present invention relates to a process for the production of glutamine, which comprises
[5134] (a) increasing or generating the activiy of a b3410-protein non-targeted in a non-human organism or a part thereof, preferably a microorganism, a plant cell, a plant or a part thereof, as compared to a corresponding non-transformed wild type non-human organism or a part thereof; and
[5135] (b) growing the non-human organism or a part thereof under conditions which permit the production of glutamine or a composition comprising glutamine in said non-human organism or in the culture medium surrounding said non-human organism.

[5136] A further embodiment of the present invention relates to a process for the production of arginine, which comprises
[5137] (a) increasing or generating the activiy of a B3427-protein non-targeted in a non-human organism or a part thereof, preferably a microorganism, a plant cell, a plant or a part thereof, as compared to a corresponding non-transformed wild type non-human organism or a part thereof; and
[5138] (b) growing the non-human organism or a part thereof under conditions which permit the production of arginine or a composition comprising arginine in said non-human organism or in the culture medium surrounding said non-human organism.

[5139] A further embodiment of the present invention relates to a process for the production of glutamate, which comprises
[5140] (a) increasing or generating the activiy of a b3509-protein non-targeted in a non-human organism or a part thereof, preferably a microorganism, a plant cell, a plant or a part thereof, as compared to a corresponding non-transformed wild type non-human organism or a part thereof; and
[5141] (b) growing the non-human organism or a part thereof under conditions which permit the production of glutamate or a composition comprising glutamate in said non-human organism or in the culture medium surrounding said non-human organism.

[5142] A further embodiment of the present invention relates to a process for the production of proline, which comprises
[5143] (a) increasing or generating the activiy of a valine-pyruvate transaminase non-targeted in a non-human organism or a part thereof, preferably a microorganism, a plant cell, a plant or a part thereof, as compared to a corresponding non-transformed wild type non-human organism or a part thereof; and
[5144] (b) growing the non-human organism or a part thereof under conditions which permit the production of proline or a composition comprising proline in said non-human organism or in the culture medium surrounding said non-human organism.

[5145] A further embodiment of the present invention relates to a process for the production of glutamine, which comprises
[5146] (a) increasing or generating the activiy of a threonine dehydrogenase non-targeted in a non-human organism or a part thereof, preferably a microorganism, a plant cell, a plant or a part thereof, as compared to a corresponding non-transformed wild type non-human organism or a part thereof; and
[5147] (b) growing the non-human organism or a part thereof under conditions which permit the production of glutamine or a composition comprising glutamine in said non-human organism or in the culture medium surrounding said non-human organism.

[5148] A further embodiment of the present invention relates to a process for the production of proline, which comprises
[5149] (a) increasing or generating the activiy of a threonine dehydrogenase non-targeted in a non-human organism or a part thereof, preferably a microorganism, a plant cell, a plant or a part thereof, as compared to a corresponding non-transformed wild type non-human organism or a part thereof; and
[5150] (b) growing the non-human organism or a part thereof under conditions which permit the production of proline or a composition comprising proline in said non-human organism or in the culture medium surrounding said non-human organism.

[5151] A further embodiment of the present invention relates to a process for the production of proline, which comprises
[5152] (a) increasing or generating the activiy of a phosphopantetheine adenylyltransferase non-targeted in a non-human organism or a part thereof, preferably a microorganism, a plant cell, a plant or a part thereof, as compared to a corresponding non-transformed wild type non-human organism or a part thereof; and
[5153] (b) growing the non-human organism or a part thereof under conditions which permit the production of proline or a composition comprising proline in said non-human organism or in the culture medium surrounding said non-human organism.

[5154] A further embodiment of the present invention relates to a process for the production of glutamine, which comprises
[5155] (a) increasing or generating the activiy of a ATP synthase subunit beta non-targeted in a non-human organism or a part thereof, preferably a microorganism, a plant cell, a plant or a part thereof, as compared to a corresponding non-transformed wild type non-human organism or a part thereof; and
[5156] (b) growing the non-human organism or a part thereof under conditions which permit the production of glutamine or a composition comprising glutamine in said non-human organism or in the culture medium surrounding said non-human organism.

[5157] A further embodiment of the present invention relates to a process for the production of arginine, which comprises
[5158] (a) increasing or generating the activiy of a enterobacterial common antigen polymerase non-targeted in a non-human organism or a part thereof, preferably a microorganism, a plant cell, a plant or a part thereof, as compared to a corresponding non-transformed wild type non-human organism or a part thereof; and
[5159] (b) growing the non-human organism or a part thereof under conditions which permit the production of arginine or a composition comprising arginine in said non-human organism or in the culture medium surrounding said non-human organism.

[5160] A further embodiment of the present invention relates to a process for the production of glutamate, which comprises
[5161] (a) increasing or generating the activiy of a enterobacterial common antigen polymerase non-targeted in a non-human organism or a part thereof, preferably a microorganism, a plant cell, a plant or a part thereof, as compared to a corresponding non-transformed wild type non-human organism or a part thereof; and
[5162] (b) growing the non-human organism or a part thereof under conditions which permit the production of glutamate or a composition comprising glutamate in said non-human organism or in the culture medium surrounding said non-human organism.

[5163] A further embodiment of the present invention relates to a process for the production of proline, which comprises
[5164] (a) increasing or generating the activiy of a DNA helicase II non-targeted in a non-human organism or a part thereof, preferably a microorganism, a plant cell, a plant or a part thereof, as compared to a corresponding non-transformed wild type non-human organism or a part thereof; and
[5165] (b) growing the non-human organism or a part thereof under conditions which permit the production of proline or a composition comprising proline in said non-human organism or in the culture medium surrounding said non-human organism.

[5166] A further embodiment of the present invention relates to a process for the production of glutamine, which comprises
[5167] (a) increasing or generating the activiy of a b3814-protein non-targeted in a non-human organism or a part thereof, preferably a microorganism, a plant cell, a plant or a part thereof, as compared to a corresponding non-transformed wild type non-human organism or a part thereof; and
[5168] (b) growing the non-human organism or a part thereof under conditions which permit the production of glutamine or a composition comprising glutamine in said non-human organism or in the culture medium surrounding said non-human organism.

[5169] A further embodiment of the present invention relates to a process for the production of proline, which comprises
[5170] (a) increasing or generating the activiy of a b3817-protein non-targeted in a non-human organism or a part thereof, preferably a microorganism, a plant cell, a plant or a part thereof, as compared to a corresponding non-transformed wild type non-human organism or a part thereof; and
[5171] (b) growing the non-human organism or a part thereof under conditions which permit the production of proline or a composition comprising proline in said non-human organism or in the culture medium surrounding said non-human organism.

[5172] A further embodiment of the present invention relates to a process for the production of glutamine, which comprises
[5173] (a) increasing or generating the activiy of a glycerol dehydrogenase non-targeted in a non-human organism or a part thereof, preferably a microorganism, a plant cell, a plant or a part thereof, as compared to a corresponding non-transformed wild type non-human organism or a part thereof; and
[5174] (b) growing the non-human organism or a part thereof under conditions which permit the production of glutamine or a composition comprising glutamine in said non-human organism or in the culture medium surrounding said non-human organism.

[5175] A further embodiment of the present invention relates to a process for the production of glutamine, which comprises
[5176] (a) increasing or generating the activiy of a b3989-protein non-targeted in a non-human organism or a part thereof, preferably a microorganism, a plant cell, a plant or a part thereof, as compared to a corresponding non-transformed wild type non-human organism or a part thereof; and
[5177] (b) growing the non-human organism or a part thereof under conditions which permit the production of glutamine or a composition comprising glutamine in said non-human organism or in the culture medium surrounding said non-human organism.

[5178] A further embodiment of the present invention relates to a process for the production of glutamate, which comprises
[5179] (a) increasing or generating the activiy of a acetyltransferase non-targeted in a non-human organism or a part thereof, preferably a microorganism, a plant cell, a plant or a part thereof, as compared to a corresponding non-transformed wild type non-human organism or a part thereof; and (b) growing the non-human organism or a part thereof under conditions which permit the production of glutamate or a composition comprising glutamate in said non-human organism or in the culture medium surrounding said non-human organism.

[5180] A further embodiment of the present invention relates to a process for the production of arginine, which comprises
[5181] (a) increasing or generating the activiy of a b4029-protein non-targeted in a non-human organism or a part thereof, preferably a microorganism, a plant cell, a plant or a part thereof, as compared to a corresponding non-transformed wild type non-human organism or a part thereof; and
[5182] (b) growing the non-human organism or a part thereof under conditions which permit the production of arginine or a composition comprising arginine in said non-human organism or in the culture medium surrounding said non-human organism.

[5183] A further embodiment of the present invention relates to a process for the production of glutamine, which comprises
[5184] (a) increasing or generating the activiy of a b4029-protein non-targeted in a non-human organism or a part thereof, preferably a microorganism, a plant cell, a plant or a part thereof, as compared to a corresponding non-transformed wild type non-human organism or a part thereof; and
[5185] (b) growing the non-human organism or a part thereof under conditions which permit the production of glutamine or a composition comprising glutamine in said non-human organism or in the culture medium surrounding said non-human organism.

[5186] A further embodiment of the present invention relates to a process for the production of proline, which comprises
[5187] (a) increasing or generating the activiy of a b4029-protein non-targeted in a non-human organism or a part thereof, preferably a microorganism, a plant cell, a plant or a part thereof, as compared to a corresponding non-transformed wild type non-human organism or a part thereof; and
[5188] (b) growing the non-human organism or a part thereof under conditions which permit the production of proline or a composition comprising proline in said non-human organism or in the culture medium surrounding said non-human organism.

[5189] A further embodiment of the present invention relates to a process for the production of arginine, which comprises
[5190] (a) increasing or generating the activiy of a cation/acetate symporter non-targeted in a non-human organism or a part thereof, preferably a microorganism, a plant cell, a plant or a part thereof, as compared to a corresponding non-transformed wild type non-human organism or a part thereof; and
[5191] (b) growing the non-human organism or a part thereof under conditions which permit the production of arginine or a composition comprising arginine in said non-human organism or in the culture medium surrounding said non-human organism.

[5192] A further embodiment of the present invention relates to a process for the production of arginine, which comprises
[5193] (a) increasing or generating the activiy of a b4121-protein non-targeted in a non-human organism or a part thereof, preferably a microorganism, a plant cell, a plant or a part thereof, as compared to a corresponding non-transformed wild type non-human organism or a part thereof; and
[5194] (b) growing the non-human organism or a part thereof under conditions which permit the production of arginine or a composition comprising arginine in said non-human organism or in the culture medium surrounding said non-human organism.

[5195] A further embodiment of the present invention relates to a process for the production of proline, which comprises
[5196] (a) increasing or generating the activiy of a b4121-protein non-targeted in a non-human organism or a part thereof, preferably a microorganism, a plant cell, a plant or a part thereof, as compared to a corresponding non-transformed wild type non-human organism or a part thereof; and
[5197] (b) growing the non-human organism or a part thereof under conditions which permit the production of proline or a composition comprising proline in said non-human organism or in the culture medium surrounding said non-human organism.

[5198] A further embodiment of the present invention relates to a process for the production of proline, which comprises
[5199] (a) increasing or generating the activiy of a lysyl-tRNA synthetase non-targeted in a non-human organism or a part thereof, preferably a microorganism, a plant cell, a plant or a part thereof, as compared to a corresponding non-transformed wild type non-human organism or a part thereof; and
[5200] (b) growing the non-human organism or a part thereof under conditions which permit the production of proline or a composition comprising proline in said non-human organism or in the culture medium surrounding said non-human organism.

[5201] A further embodiment of the present invention relates to a process for the production of glutamine, which comprises
[5202] (a) increasing or generating the activiy of a aspartase non-targeted in a non-human organism or a part thereof, preferably a microorganism, a plant cell, a plant or a part thereof, as compared to a corresponding non-transformed wild type non-human organism or a part thereof; and
[5203] (b) growing the non-human organism or a part thereof under conditions which permit the production of glutamine or a composition comprising glutamine in said non-human organism or in the culture medium surrounding said non-human organism.

[5204] A further embodiment of the present invention relates to a process for the production of arginine, which comprises
[5205] (a) increasing or generating the activiy of a acetyltransferase non-targeted in a non-human organism or a part thereof, preferably a microorganism, a plant cell, a plant or a part thereof, as compared to a corresponding non-transformed wild type non-human organism or a part thereof; and
[5206] (b) growing the non-human organism or a part thereof under conditions which permit the production of arginine or a composition comprising arginine in said non-human organism or in the culture medium surrounding said non-human organism.

[5207] A further embodiment of the present invention relates to a process for the production of glutamine, which comprises
[5208] (a) increasing or generating the activiy of a acetyltransferase non-targeted in a non-human organism or a part thereof, preferably a microorganism, a plant cell, a plant or a part thereof, as compared to a corresponding non-transformed wild type non-human organism or a part thereof; and
[5209] (b) growing the non-human organism or a part thereof under conditions which permit the production of glutamine or a composition comprising glutamine in said non-human organism or in the culture medium surrounding said non-human organism.

[5210] A further embodiment of the present invention relates to a process for the production of proline, which comprises
[5211] (a) increasing or generating the activiy of a acetyltransferase non-targeted in a non-human organism or a part thereof, preferably a microorganism, a plant cell, a plant or a part thereof, as compared to a corresponding non-transformed wild type non-human organism or a part thereof; and
[5212] (b) growing the non-human organism or a part thereof under conditions which permit the production of proline or a composition comprising proline in said non-human organism or in the culture medium surrounding said non-human organism.

[5213] A further embodiment of the present invention relates to a process for the production of arginine, which comprises
[5214] (a) increasing or generating the activiy of a gluconate transport system permease 3 non-targeted in a non-human organism or a part thereof, preferably a microorganism, a plant cell, a plant or a part thereof, as compared to a corresponding non-transformed wild type non-human organism or a part thereof; and
[5215] (b) growing the non-human organism or a part thereof under conditions which permit the production of arginine or a composition comprising arginine in said non-human organism or in the culture medium surrounding said non-human organism.

[5216] A further embodiment of the present invention relates to a process for the production of glutamate, which comprises
[5217] (a) increasing or generating the activiy of a purine-nucleoside phosphorylase non-targeted in a non-human organism or a part thereof, preferably a microorganism, a plant cell, a plant or a part thereof, as compared to a corresponding non-transformed wild type non-human organism or a part thereof; and
[5218] (b) growing the non-human organism or a part thereof under conditions which permit the production of glutamate or a composition comprising glutamate in said non-human organism or in the culture medium surrounding said non-human organism.

[5219] A further embodiment of the present invention relates to a process for the production of proline, which comprises
[5220] (a) increasing or generating the activiy of a purine-nucleoside phosphorylase non-targeted in a non-human organism or a part thereof, preferably a microorganism, a plant cell, a plant or a part thereof, as compared to a corresponding non-transformed wild type non-human organism or a part thereof; and
[5221] (b) growing the non-human organism or a part thereof under conditions which permit the production of proline or a composition comprising proline in said non-human organism or in the culture medium surrounding said non-human organism.

[5222] A further embodiment of the present invention relates to a process for the production of arginine, which comprises
[5223] (a) increasing or generating the activiy of a thioredoxin non-targeted in a non-human organism or a part thereof, preferably a microorganism, a plant cell, a plant or a part thereof, as compared to a corresponding non-transformed wild type non-human organism or a part thereof; and
[5224] (b) growing the non-human organism or a part thereof under conditions which permit the production of arginine or a composition comprising arginine in said non-human organism or in the culture medium surrounding said non-human organism.

[5225] A further embodiment of the present invention relates to a process for the production of proline, which comprises
[5226] (a) increasing or generating the activiy of a GM02LC11114-protein non-targeted in a non-human organism or a part thereof, preferably a microorganism, a plant cell, a plant or a part thereof, as compared to a corresponding non-transformed wild type non-human organism or a part thereof; and
[5227] (b) growing the non-human organism or a part thereof under conditions which permit the production of proline or a composition comprising proline in said non-human organism or in the culture medium surrounding said non-human organism.

[5228] A further embodiment of the present invention relates to a process for the production of glutamine, which comprises
[5229] (a) increasing or generating the activiy of a glutaredoxin non-targeted in a non-human organism or a part thereof, preferably a microorganism, a plant cell, a plant or a part thereof, as compared to a corresponding non-transformed wild type non-human organism or a part thereof; and
[5230] (b) growing the non-human organism or a part thereof under conditions which permit the production of glutamine or a composition comprising glutamine in said non-human organism or in the culture medium surrounding said non-human organism.

[5231] A further embodiment of the present invention relates to a process for the production of arginine, which comprises
[5232] (a) increasing or generating the activiy of a histone H2A non-targeted in a non-human organism or a part thereof, preferably a microorganism, a plant cell, a plant or a part thereof, as compared to a corresponding non-transformed wild type non-human organism or a part thereof; and
[5233] (b) growing the non-human organism or a part thereof under conditions which permit the production of arginine or a composition comprising arginine in said non-human organism or in the culture medium surrounding said non-human organism.

[5234] A further embodiment of the present invention relates to a process for the production of proline, which comprises
[5235] (a) increasing or generating the activiy of a histone H2A non-targeted in a non-human organism or a part thereof, preferably a microorganism, a plant cell, a plant or a part thereof, as compared to a corresponding non-transformed wild type non-human organism or a part thereof; and
[5236] (b) growing the non-human organism or a part thereof under conditions which permit the production of proline or a composition comprising proline in said non-human organism or in the culture medium surrounding said non-human organism.

[5237] A further embodiment of the present invention relates to a process for the production of glutamine, which comprises
[5238] (a) increasing or generating the activiy of a GM02LC17485-protein non-targeted in a non-human organism or a part thereof, preferably a microorganism, a plant cell, a plant or a part thereof, as compared to a corresponding non-transformed wild type non-human organism or a part thereof; and
[5239] (b) growing the non-human organism or a part thereof under conditions which permit the production of glutamine or a composition comprising glutamine in said non-human organism or in the culture medium surrounding said non-human organism.

[5240] A further embodiment of the present invention relates to a process for the production of arginine, which comprises
[5241] (a) increasing or generating the activiy of a RNA binding protein non-targeted in a non-human organism or a part thereof, preferably a microorganism, a plant cell, a plant or a part thereof, as compared to a corresponding non-transformed wild type non-human organism or a part thereof; and
[5242] (b) growing the non-human organism or a part thereof under conditions which permit the production of arginine or a composition comprising arginine in said non-human organism or in the culture medium surrounding said non-human organism.

[5243] A further embodiment of the present invention relates to a process for the production of proline, which comprises
[5244] (a) increasing or generating the activiy of a transcription factor non-targeted in a non-human organism or a part thereof, preferably a microorganism, a plant cell, a plant or a part thereof, as compared to a corresponding non-transformed wild type non-human organism or a part thereof; and
[5245] (b) growing the non-human organism or a part thereof under conditions which permit the production of proline or a composition comprising proline in said non-human organism or in the culture medium surrounding said non-human organism.

[5246] A further embodiment of the present invention relates to a process for the production of proline, which comprises
[5247] (a) increasing or generating the activiy of a cyclin D non-targeted in a non-human organism or a part thereof, preferably a microorganism, a plant cell, a plant or a part thereof, as compared to a corresponding non-transformed wild type non-human organism or a part thereof; and
[5248] (b) growing the non-human organism or a part thereof under conditions which permit the production of proline or a composition comprising proline in said non-human organism or in the culture medium surrounding said non-human organism.

[5249] A further embodiment of the present invention relates to a process for the production of proline, which comprises
[5250] (a) increasing or generating the activiy of a GM02LC46-protein non-targeted in a non-human organism or a part thereof, preferably a microorganism, a plant cell, a plant or a part thereof, as compared to a corresponding non-transformed wild type non-human organism or a part thereof; and
[5251] (b) growing the non-human organism or a part thereof under conditions which permit the production of proline or a composition comprising proline in said non-human organism or in the culture medium surrounding said non-human organism.

[5252] A further embodiment of the present invention relates to a process for the production of proline, which comprises
[5253] (a) increasing or generating the activiy of a GM02LC5744-protein non-targeted in a non-human organism or a part thereof, preferably a microorganism, a plant cell, a plant or a part thereof, as compared to a corresponding non-transformed wild type non-human organism or a part thereof; and
[5254] (b) growing the non-human organism or a part thereof under conditions which permit the production of proline or a composition comprising proline in said non-human organism or in the culture medium surrounding said non-human organism.

[5255] A further embodiment of the present invention relates to a process for the production of glutamate, which comprises
[5256] (a) increasing or generating the activiy of a transcription factor non-targeted in a non-human organism or a part thereof, preferably a microorganism, a plant cell, a plant or a part thereof, as compared to a corresponding non-transformed wild type non-human organism or a part thereof; and
[5257] (b) growing the non-human organism or a part thereof under conditions which permit the production of glutamate or a composition comprising glutamate in said non-human organism or in the culture medium surrounding said non-human organism.

[5258] A further embodiment of the present invention relates to a process for the production of proline, which comprises
[5259] (a) increasing or generating the activiy of a glutaredoxin non-targeted in a non-human organism or a part thereof, preferably a microorganism, a plant cell, a plant or a part thereof, as compared to a corresponding non-transformed wild type non-human organism or a part thereof; and
[5260] (b) growing the non-human organism or a part thereof under conditions which permit the production of proline or a composition comprising proline in said non-human organism or in the culture medium surrounding said non-human organism.

[5261] A further embodiment of the present invention relates to a process for the production of arginine, which comprises
[5262] (a) increasing or generating the activiy of a s_pp015018333r-protein non-targeted in a non-human organism or a part thereof, preferably a microorganism, a plant cell, a plant or a part thereof, as compared to a corresponding non-transformed wild type non-human organism or a part thereof; and
[5263] (b) growing the non-human organism or a part thereof under conditions which permit the production of arginine or a composition comprising arginine in said non-human organism or in the culture medium surrounding said non-human organism.

[5264] A further embodiment of the present invention relates to a process for the production of glutamine, which comprises
[5265] (a) increasing or generating the activiy of a s_pp015018333r-protein non-targeted in a non-human organism or a part thereof, preferably a microorganism, a plant cell, a plant or a part thereof, as compared to a corresponding non-transformed wild type non-human organism or a part thereof; and
[5266] (b) growing the non-human organism or a part thereof under conditions which permit the production of glutamine or a composition comprising glutamine in said non-human organism or in the culture medium surrounding said non-human organism. A further embodiment of the present invention relates to a process for the production of proline, which comprises
[5267] (a) increasing or generating the activiy of a sll0064-protein non-targeted in a non-human organism or a part thereof, preferably a microorganism, a plant cell, a plant or a part thereof, as compared to a corresponding non-transformed wild type non-human organism or a part thereof; and
[5268] (b) growing the non-human organism or a part thereof under conditions which permit the production of proline or a composition comprising proline in said non-human organism or in the culture medium surrounding said non-human organism.

[5269] A further embodiment of the present invention relates to a process for the production of glutamate, which comprises
[5270] (a) increasing or generating the activiy of a N-acetyl-gamma-glutamyl-phosphate reductase non-targeted in a non-human organism or a part thereof, preferably a microorganism, a plant cell, a plant or a part thereof, as compared to a corresponding non-transformed wild type non-human organism or a part thereof; and
[5271] (b) growing the non-human organism or a part thereof under conditions which permit the production of glutamate or a composition comprising glutamate in said non-human organism or in the culture medium surrounding said non-human organism.

[5272] A further embodiment of the present invention relates to a process for the production of glutamate, which comprises
[5273] (a) increasing or generating the activiy of a heat shock protein non-targeted in a non-human organism or a part thereof, preferably a microorganism, a plant cell, a plant or a part thereof, as compared to a corresponding non-transformed wild type non-human organism or a part thereof; and
[5274] (b) growing the non-human organism or a part thereof under conditions which permit the production of glutamate or a composition comprising glutamate in said non-human organism or in the culture medium surrounding said non-human organism.

[5275] A further embodiment of the present invention relates to a process for the production of arginine, which comprises
[5276] (a) increasing or generating the activiy of a flavodoxin non-targeted in a non-human organism or a part thereof, preferably a microorganism, a plant cell, a plant or a part thereof, as compared to a corresponding non-transformed wild type non-human organism or a part thereof; and
[5277] (b) growing the non-human organism or a part thereof under conditions which permit the production of arginine or a composition comprising arginine in said non-human organism or in the culture medium surrounding said non-human organism.

[5278] A further embodiment of the present invention relates to a process for the production of proline, which comprises
[5279] (a) increasing or generating the activiy of a phosphopantothenoylcysteinesynthetase/decarboxylase non-targeted in a non-human organism or a part thereof, preferably a microorganism, a plant cell, a plant or a part thereof, as compared to a corresponding non-transformed wild type non-human organism or a part thereof; and
[5280] (b) growing the non-human organism or a part thereof under conditions which permit the production of proline or a composition comprising proline in said non-human organism or in the culture medium surrounding said non-human organism.

[5281] A further embodiment of the present invention relates to a process for the production of glutamine, which comprises
[5282] (a) increasing or generating the activiy of a sll0254-protein non-targeted in a non-human organism or a part thereof, preferably a microorganism, a plant cell, a plant or a part thereof, as compared to a corresponding non-transformed wild type non-human organism or a part thereof; and
[5283] (b) growing the non-human organism or a part thereof under conditions which permit the production of glutamine or a composition comprising glutamine in said non-human organism or in the culture medium surrounding said non-human organism.

[5284] A further embodiment of the present invention relates to a process for the production of proline, which comprises
[5285] (a) increasing or generating the activiy of a sll0254-protein non-targeted in a non-human organism or a part thereof, preferably a microorganism, a plant cell, a plant or a part thereof, as compared to a corresponding non-transformed wild type non-human organism or a part thereof; and
[5286] (b) growing the non-human organism or a part thereof under conditions which permit the production of proline or a composition comprising proline in said non-human organism or in the culture medium surrounding said non-human organism.

[5287] A further embodiment of the present invention relates to a process for the production of proline, which comprises
[5288] (a) increasing or generating the activiy of a polyphosphate kinase non-targeted in a non-human organism or a part thereof, preferably a microorganism, a plant cell, a plant or a part thereof, as compared to a corresponding non-transformed wild type non-human organism or a part thereof; and
[5289] (b) growing the non-human organism or a part thereof under conditions which permit the production of proline or a composition comprising proline in said non-human organism or in the culture medium surrounding said non-human organism.

[5290] A further embodiment of the present invention relates to a process for the production of proline, which comprises
[5291] (a) increasing or generating the activiy of a sll0354-protein non-targeted in a non-human organism or a part thereof, preferably a microorganism, a plant cell, a plant or a part thereof, as compared to a corresponding non-transformed wild type non-human organism or a part thereof; and
[5292] (b) growing the non-human organism or a part thereof under conditions which permit the production of proline or a composition comprising proline in said non-human organism or in the culture medium surrounding said non-human organism.

[5293] A further embodiment of the present invention relates to a process for the production of proline, which comprises
[5294] (a) increasing or generating the activiy of a urease subunit non-targeted in a non-human organism or a part thereof, preferably a microorganism, a plant cell, a plant or a part thereof, as compared to a corresponding non-transformed wild type non-human organism or a part thereof; and
[5295] (b) growing the non-human organism or a part thereof under conditions which permit the production of proline or a composition comprising proline in said non-human organism or in the culture medium surrounding said non-human organism.

[5296] A further embodiment of the present invention relates to a process for the production of arginine, which comprises
[5297] (a) increasing or generating the activiy of a NAD(P)H-quinone oxidoreductase subunit non-targeted in a non-human organism or a part thereof, preferably a microorganism, a plant cell, a plant or a part thereof, as compared to a corresponding non-transformed wild type non-human organism or a part thereof; and
[5298] (b) growing the non-human organism or a part thereof under conditions which permit the production of arginine or a composition comprising arginine in said non-human organism or in the culture medium surrounding said non-human organism.

[5299] A further embodiment of the present invention relates to a process for the production of proline, which comprises
[5300] (a) increasing or generating the activiy of a quinolinate synthetase non-targeted in a non-human organism or a part thereof, preferably a microorganism, a plant cell, a plant or a part thereof, as compared to a corresponding non-transformed wild type non-human organism or a part thereof; and
[5301] (b) growing the non-human organism or a part thereof under conditions which permit the production of proline or a composition comprising proline in said non-human organism or in the culture medium surrounding said non-human organism.

[5302] A further embodiment of the present invention relates to a process for the production of glutamate, which comprises
[5303] (a) increasing or generating the activiy of a permease protein of phosphate ABC transporter non-targeted in a non-human organism or a part thereof, preferably a microorganism, a plant cell, a plant or a part thereof, as compared to a corresponding non-transformed wild type non-human organism or a part thereof; and
[5304] (b) growing the non-human organism or a part thereof under conditions which permit the production of glutamate or a composition comprising glutamate in said non-human organism or in the culture medium surrounding said non-human organism.

[5305] A further embodiment of the present invention relates to a process for the production of proline, which comprises
[5306] (a) increasing or generating the activiy of a permease protein of phosphate ABC transporter non-targeted in a non-human organism or a part thereof, preferably a microorganism, a plant cell, a plant or a part thereof, as compared to a corresponding non-transformed wild type non-human organism or a part thereof; and
[5307] (b) growing the non-human organism or a part thereof under conditions which permit the production of proline or a composition comprising proline in said non-human organism or in the culture medium surrounding said non-human organism.

[5308] A further embodiment of the present invention relates to a process for the production of arginine, which comprises
[5309] (a) increasing or generating the activiy of a oxireductase non-targeted in a non-human organism or a part thereof, preferably a microorganism, a plant cell, a plant or a part thereof, as compared to a corresponding non-transformed wild type non-human organism or a part thereof; and
[5310] (b) growing the non-human organism or a part thereof under conditions which permit the production of arginine or a composition comprising arginine in said non-human organism or in the culture medium surrounding said non-human organism.

[5311] A further embodiment of the present invention relates to a process for the production of glutamate, which comprises
[5312] (a) increasing or generating the activiy of a oxireductase non-targeted in a non-human organism or a part thereof, preferably a microorganism, a plant cell, a plant or a part thereof, as compared to a corresponding non-transformed wild type non-human organism or a part thereof; and
[5313] (b) growing the non-human organism or a part thereof under conditions which permit the production of glutamate or a composition comprising glutamate in said non-human organism or in the culture medium surrounding said non-human organism.

[5314] A further embodiment of the present invention relates to a process for the production of glutamine, which comprises
[5315] (a) increasing or generating the activiy of a oxireductase non-targeted in a non-human organism or a part thereof, preferably a microorganism, a plant cell, a plant or a part thereof, as compared to a corresponding non-transformed wild type non-human organism or a part thereof; and
[5316] (b) growing the non-human organism or a part thereof under conditions which permit the production of glutamine or a composition comprising glutamine in said non-human organism or in the culture medium surrounding said non-human organism.

[5317] A further embodiment of the present invention relates to a process for the production of arginine, which comprises
[5318] (a) increasing or generating the activiy of a malate dehydrogenase non-targeted in a non-human organism or a part thereof, preferably a microorganism, a plant cell, a plant or a part thereof, as compared to a corresponding non-transformed wild type non-human organism or a part thereof; and
[5319] (b) growing the non-human organism or a part thereof under conditions which permit the production of arginine or a composition comprising arginine in said non-human organism or in the culture medium surrounding said non-human organism.

[5320] A further embodiment of the present invention relates to a process for the production of glutamine, which comprises
[5321] (a) increasing or generating the activiy of a malate dehydrogenase non-targeted in a non-human organism or a part thereof, preferably a microorganism, a plant cell, a plant or a part thereof, as compared to a corresponding non-transformed wild type non-human organism or a part thereof; and
[5322] (b) growing the non-human organism or a part thereof under conditions which permit the production of glutamine or a composition comprising glutamine in said non-human organism or in the culture medium surrounding said non-human organism.

[5323] A further embodiment of the present invention relates to a process for the production of proline, which comprises
[5324] (a) increasing or generating the activiy of a malate dehydrogenase non-targeted in a non-human organism or a part thereof, preferably a microorganism, a plant cell, a plant or a part thereof, as compared to a corresponding non-transformed wild type non-human organism or a part thereof; and
[5325] (b) growing the non-human organism or a part thereof under conditions which permit the production of proline or a composition comprising proline in said non-human organism or in the culture medium surrounding said non-human organism.

[5326] A further embodiment of the present invention relates to a process for the production of proline, which comprises
[5327] (a) increasing or generating the activiy of a phosphoribosylaminoimidazole carboxylase catalytic subunit non-targeted in a non-human organism or a part thereof, preferably a microorganism, a plant cell, a plant or a part thereof, as compared to a corresponding non-transformed wild type non-human organism or a part thereof; and
[5328] (b) growing the non-human organism or a part thereof under conditions which permit the production of proline or a composition comprising proline in said non-human organism or in the culture medium surrounding said non-human organism.

[5329] A further embodiment of the present invention relates to a process for the production of glutamine, which comprises
[5330] (a) increasing or generating the activiy of a 3-deoxy-7-phosphoheptulonate synthase non-targeted in a non-human organism or a part thereof, preferably a microorganism, a plant cell, a plant or a part thereof, as compared to a corresponding non-transformed wild type non-human organism or a part thereof; and
[5331] (b) growing the non-human organism or a part thereof under conditions which permit the production of glutamine or a composition comprising glutamine in said non-human organism or in the culture medium surrounding said non-human organism.

[5332] A further embodiment of the present invention relates to a process for the production of proline, which comprises
[5333] (a) increasing or generating the activiy of a glycogen synthase non-targeted in a non-human organism or a part thereof, preferably a microorganism, a plant cell, a plant or a part thereof, as compared to a corresponding non-transformed wild type non-human organism or a part thereof; and
[5334] (b) growing the non-human organism or a part thereof under conditions which permit the production of proline or a composition comprising proline in said non-human organism or in the culture medium surrounding said non-human organism.

[5335] A further embodiment of the present invention relates to a process for the production of glutamate, which comprises
[5336] (a) increasing or generating the activiy of a carbon dioxide concentrating mechanism protein non-targeted in a non-human organism or a part thereof, preferably a microorganism, a plant cell, a plant or a part thereof, as compared to a corresponding non-transformed wild type non-human organism or a part thereof; and
[5337] (b) growing the non-human organism or a part thereof under conditions which permit the production of glutamate or a composition comprising glutamate in said non-human organism or in the culture medium surrounding said non-human organism.

[5338] A further embodiment of the present invention relates to a process for the production of glutamine, which comprises
[5339] (a) increasing or generating the activiy of a carbon dioxide concentrating mechanism protein non-targeted in a non-human organism or a part thereof, preferably a microorganism, a plant cell, a plant or a part thereof, as compared to a corresponding non-transformed wild type non-human organism or a part thereof; and
[5340] (b) growing the non-human organism or a part thereof under conditions which permit the production of glutamine or a composition comprising glutamine in said non-human organism or in the culture medium surrounding said non-human organism.

[5341] A further embodiment of the present invention relates to a process for the production of proline, which comprises
[5342] (a) increasing or generating the activiy of a carbon dioxide concentrating mechanism protein non-targeted in a non-human organism or a part thereof, preferably a microorganism, a plant cell, a plant or a part thereof, as compared to a corresponding non-transformed wild type non-human organism or a part thereof; and
[5343] (b) growing the non-human organism or a part thereof under conditions which permit the production of proline or a composition comprising proline in said non-human organism or in the culture medium surrounding said non-human organism.

[5344] A further embodiment of the present invention relates to a process for the production of proline, which comprises
[5345] (a) increasing or generating the activiy of a phosphoribosylformyl glycinamidine synthase subunit non-targeted in a non-human organism or a part thereof, preferably a microorganism, a plant cell, a plant or a part thereof, as compared to a corresponding non-transformed wild type non-human organism or a part thereof; and
[5346] (b) growing the non-human organism or a part thereof under conditions which permit the production of proline or a composition comprising proline in said non-human organism or in the culture medium surrounding said non-human organism.

[5347] A further embodiment of the present invention relates to a process for the production of glutamate, which comprises
[5348] (a) increasing or generating the activiy of a coproporphyrinogen oxidase non-targeted in a non-human organism or a part thereof, preferably a microorganism, a plant cell, a plant or a part thereof, as compared to a corresponding non-transformed wild type non-human organism or a part thereof; and
[5349] (b) growing the non-human organism or a part thereof under conditions which permit the production of glutamate or a composition comprising glutamate in said non-human organism or in the culture medium surrounding said non-human organism.

[5350] A further embodiment of the present invention relates to a process for the production of glutamine, which comprises
[5351] (a) increasing or generating the activiy of a glycogen (starch) synthase non-targeted in a non-human organism or a part thereof, preferably a microorganism, a plant cell, a plant or a part thereof, as compared to a corresponding non-transformed wild type non-human organism or a part thereof; and
[5352] (b) growing the non-human organism or a part thereof under conditions which permit the production of glutamine or a composition comprising glutamine in said non-human organism or in the culture medium surrounding said non-human organism.

[5353] A further embodiment of the present invention relates to a process for the production of proline, which comprises
[5354] (a) increasing or generating the activiy of a glycogen (starch) synthase non-targeted in a non-human organism or a part thereof, preferably a microorganism, a plant cell, a plant or a part thereof, as compared to a corresponding non-transformed wild type non-human organism or a part thereof; and
[5355] (b) growing the non-human organism or a part thereof under conditions which permit the production of proline or a composition comprising proline in said non-human organism or in the culture medium surrounding said non-human organism.

[5356] A further embodiment of the present invention relates to a process for the production of glutamine, which comprises
[5357] (a) increasing or generating the activiy of a fatty acid desaturase non-targeted in a non-human organism or a part thereof, preferably a microorganism, a plant cell, a plant or a part thereof, as compared to a corresponding non-transformed wild type non-human organism or a part thereof; and
[5358] (b) growing the non-human organism or a part thereof under conditions which permit the production of glutamine or a composition comprising glutamine in said non-human organism or in the culture medium surrounding said non-human organism.

[5359] A further embodiment of the present invention relates to a process for the production of glutamate, which comprises
[5360] (a) increasing or generating the activiy of a CTP synthetase non-targeted in a non-human organism or a part thereof, preferably a microorganism, a plant cell, a plant or a part thereof, as compared to a corresponding non-transformed wild type non-human organism or a part thereof; and
[5361] (b) growing the non-human organism or a part thereof under conditions which permit the production of glutamate or a composition comprising glutamate in said non-human organism or in the culture medium surrounding said non-human organism.

[5362] A further embodiment of the present invention relates to a process for the production of glutamate, which comprises
[5363] (a) increasing or generating the activiy of a nitrate/nitrite transport protein non-targeted in a non-human organism or a part thereof, preferably a microorganism, a plant cell, a plant or a part thereof, as compared to a corresponding non-transformed wild type non-human organism or a part thereof; and
[5364] (b) growing the non-human organism or a part thereof under conditions which permit the production of glutamate or a composition comprising glutamate in said non-human organism or in the culture medium surrounding said non-human organism.

[5365] A further embodiment of the present invention relates to a process for the production of glutamate, which comprises
[5366] (a) increasing or generating the activiy of a CDP-diacylglycerol-glycerol-3-phosphate 3-phosphatidyltransferase non-targeted in a non-human organism or a part thereof, preferably a microorganism, a plant cell, a plant or a part thereof, as compared to a corresponding non-transformed wild type non-human organism or a part thereof; and
[5367] (b) growing the non-human organism or a part thereof under conditions which permit the production of glutamate or a composition comprising glutamate in said non-human organism or in the culture medium surrounding said non-human organism.

[5368] A further embodiment of the present invention relates to a process for the production of arginine, which comprises
[5369] (a) increasing or generating the activiy of a glutathione S-transferase non-targeted in a non-human organism or a part thereof, preferably a microorganism, a plant cell, a plant or a part thereof, as compared to a corresponding non-transformed wild type non-human organism or a part thereof; and
[5370] (b) growing the non-human organism or a part thereof under conditions which permit the production of arginine or a composition comprising arginine in said non-human organism or in the culture medium surrounding said non-human organism.

[5371] A further embodiment of the present invention relates to a process for the production of glutamine, which comprises
[5372] (a) increasing or generating the activiy of a glutathione S-transferase non-targeted in a non-human organism or a part thereof, preferably a microorganism, a plant cell, a plant or a part thereof, as compared to a corresponding non-transformed wild type non-human organism or a part thereof; and
[5373] (b) growing the non-human organism or a part thereof under conditions which permit the production of glutamine or a composition comprising glutamine in said non-human organism or in the culture medium surrounding said non-human organism.

[5374] A further embodiment of the present invention relates to a process for the production of proline, which comprises
[5375] (a) increasing or generating the activiy of a glutathione S-transferase non-targeted in a non-human organism or a part thereof, preferably a microorganism, a plant cell, a plant or a part thereof, as compared to a corresponding non-transformed wild type non-human organism or a part thereof; and
[5376] (b) growing the non-human organism or a part thereof under conditions which permit the production of proline or a composition comprising proline in said non-human organism or in the culture medium surrounding said non-human organism.

[5377] A further embodiment of the present invention relates to a process for the production of arginine, which comprises
[5378] (a) increasing or generating the activiy of a exopolyphosphatase non-targeted in a non-human organism or a part thereof, preferably a microorganism, a plant cell, a plant or a part thereof, as compared to a corresponding non-transformed wild type non-human organism or a part thereof; and
[5379] (b) growing the non-human organism or a part thereof under conditions which permit the production of arginine or a composition comprising arginine in said non-human organism or in the culture medium surrounding said non-human organism.

[5380] A further embodiment of the present invention relates to a process for the production of proline, which comprises
[5381] (a) increasing or generating the activiy of a 4-alpha-glucanotransferase non-targeted in a non-human organism or a part thereof, preferably a microorganism, a plant cell, a plant or a part thereof, as compared to a corresponding non-transformed wild type non-human organism or a part thereof; and
[5382] (b) growing the non-human organism or a part thereof under conditions which permit the production of proline or a composition comprising proline in said non-human organism or in the culture medium surrounding said non-human organism.

[5383] A further embodiment of the present invention relates to a process for the production of proline, which comprises
[5384] (a) increasing or generating the activiy of a alanine dehydrogenase non-targeted in a non-human organism or a part thereof, preferably a microorganism, a plant cell, a plant or a part thereof, as compared to a corresponding non-transformed wild type non-human organism or a part thereof; and
[5385] (b) growing the non-human organism or a part thereof under conditions which permit the production of proline or a composition comprising proline in said non-human organism or in the culture medium surrounding said non-human organism.

[5386] A further embodiment of the present invention relates to a process for the production of arginine, which comprises
[5387] (a) increasing or generating the activiy of a sll1761-protein non-targeted in a non-human organism or a part thereof, preferably a microorganism, a plant cell, a plant or a part thereof, as compared to a corresponding non-transformed wild type non-human organism or a part thereof; and
[5388] (b) growing the non-human organism or a part thereof under conditions which permit the production of arginine or a composition comprising arginine in said non-human organism or in the culture medium surrounding said non-human organism.

[5389] A further embodiment of the present invention relates to a process for the production of proline, which comprises
[5390] (a) increasing or generating the activiy of a sll1761-protein non-targeted in a non-human organism or a part thereof, preferably a microorganism, a plant cell, a plant or a part thereof, as compared to a corresponding non-transformed wild type non-human organism or a part thereof; and
[5391] (b) growing the non-human organism or a part thereof under conditions which permit the production of proline or a composition comprising proline in said non-human organism or in the culture medium surrounding said non-human organism.

[5392] A further embodiment of the present invention relates to a process for the production of glutamate, which comprises
[5393] (a) increasing or generating the activiy of a coproporphyrinogen III oxidase non-targeted in a non-human organism or a part thereof, preferably a microorganism, a plant cell, a plant or a part thereof, as compared to a corresponding non-transformed wild type non-human organism or a part thereof; and
[5394] (b) growing the non-human organism or a part thereof under conditions which permit the production of glutamate or a composition comprising glutamate in said non-human organism or in the culture medium surrounding said non-human organism.

[5395] A further embodiment of the present invention relates to a process for the production of glutamine, which comprises
[5396] (a) increasing or generating the activiy of a coproporphyrinogen III oxidase non-targeted in a non-human organism or a part thereof, preferably a microorganism, a plant cell, a plant or a part thereof, as compared to a corresponding non-transformed wild type non-human organism or a part thereof; and
[5397] (b) growing the non-human organism or a part thereof under conditions which permit the production of glutamine or a composition comprising glutamine in said non-human organism or in the culture medium surrounding said non-human organism.

[5398] A further embodiment of the present invention relates to a process for the production of proline, which comprises
[5399] (a) increasing or generating the activiy of a coproporphyrinogen III oxidase non-targeted in a non-human organism or a part thereof, preferably a microorganism, a plant cell, a plant or a part thereof, as compared to a corresponding non-transformed wild type non-human organism or a part thereof; and
[5400] (b) growing the non-human organism or a part thereof under conditions which permit the production of proline or a composition comprising proline in said non-human organism or in the culture medium surrounding said non-human organism.

[5401] A further embodiment of the present invention relates to a process for the production of glutamate, which comprises
[5402] (a) increasing or generating the activiy of a cation-transporting ATPase non-targeted in a non-human organism or a part thereof, preferably a microorganism, a plant cell, a plant or a part thereof, as compared to a corresponding non-transformed wild type non-human organism or a part thereof; and
[5403] (b) growing the non-human organism or a part thereof under conditions which permit the production of glutamate or a composition comprising glutamate in said non-human organism or in the culture medium surrounding said non-human organism.

[5404] A further embodiment of the present invention relates to a process for the production of glutamine, which comprises
[5405] (a) increasing or generating the activiy of a cation-transporting ATPase non-targeted in a non-human organism or a part thereof, preferably a microorganism, a plant cell, a plant or a part thereof, as compared to a corresponding non-transformed wild type non-human organism or a part thereof; and
[5406] (b) growing the non-human organism or a part thereof under conditions which permit the production of glutamine or a composition comprising glutamine in said non-human organism or in the culture medium surrounding said non-human organism.

[5407] A further embodiment of the present invention relates to a process for the production of arginine, which comprises
[5408] (a) increasing or generating the activiy of a glycosidase non-targeted in a non-human organism or a part thereof, preferably a microorganism, a plant cell, a plant or a part thereof, as compared to a corresponding non-transformed wild type non-human organism or a part thereof; and
[5409] (b) growing the non-human organism or a part thereof under conditions which permit the production of arginine or a composition comprising arginine in said non-human organism or in the culture medium surrounding said non-human organism.

[5410] A further embodiment of the present invention relates to a process for the production of glutamine, which comprises
[5411] (a) increasing or generating the activiy of a glycosidase non-targeted in a non-human organism or a part thereof, preferably a microorganism, a plant cell, a plant or a part thereof, as compared to a corresponding non-transformed wild type non-human organism or a part thereof; and
[5412] (b) growing the non-human organism or a part thereof under conditions which permit the production of glutamine or a composition comprising glutamine in said non-human organism or in the culture medium surrounding said non-human organism.

[5413] A further embodiment of the present invention relates to a process for the production of proline, which comprises
[5414] (a) increasing or generating the activiy of a phosphoribosylglycinamide formyltransferase non-targeted in a non-human organism or a part thereof, preferably a microorganism, a plant cell, a plant or a part thereof, as compared to a corresponding non-transformed wild type non-human organism or a part thereof; and
[5415] (b) growing the non-human organism or a part thereof under conditions which permit the production of proline or a composition comprising proline in said non-human organism or in the culture medium surrounding said non-human organism.

[5416] A further embodiment of the present invention relates to a process for the production of glutamate, which comprises
[5417] (a) increasing or generating the activiy of a bifunctional purine biosynthesis protein non-targeted in a non-human organism or a part thereof, preferably a microorganism, a plant cell, a plant or a part thereof, as compared to a corresponding non-transformed wild type non-human organism or a part thereof; and
[5418] (b) growing the non-human organism or a part thereof under conditions which permit the production of glutamate or a composition comprising glutamate in said non-human organism or in the culture medium surrounding said non-human organism.

[5419] A further embodiment of the present invention relates to a process for the production of proline, which comprises
[5420] (a) increasing or generating the activiy of a slr0600-protein non-targeted in a non-human organism or a part thereof, preferably a microorganism, a plant cell, a plant or a part thereof, as compared to a corresponding non-transformed wild type non-human organism or a part thereof; and
[5421] (b) growing the non-human organism or a part thereof under conditions which permit the production of proline or a composition comprising proline in said non-human organism or in the culture medium surrounding said non-human organism.

[5422] A further embodiment of the present invention relates to a process for the production of proline, which comprises
[5423] (a) increasing or generating the activiy of a pyrroline carboxylate reductase non-targeted in a non-human organism or a part thereof, preferably a microorganism, a plant cell, a plant or a part thereof, as compared to a corresponding non-transformed wild type non-human organism or a part thereof; and
[5424] (b) growing the non-human organism or a part thereof under conditions which permit the production of proline or a composition comprising proline in said non-human organism or in the culture medium surrounding said non-human organism.

[5425] A further embodiment of the present invention relates to a process for the production of arginine, which comprises
[5426] (a) increasing or generating the activiy of a Glu/Leu/Phe/Val dehydrogenase non-targeted in a non-human organism or a part thereof, preferably a microorganism, a plant cell, a plant or a part thereof, as compared to a corresponding non-transformed wild type non-human organism or a part thereof; and
[5427] (b) growing the non-human organism or a part thereof under conditions which permit the production of arginine or a composition comprising arginine in said non-human organism or in the culture medium surrounding said non-human organism.

[5428] A further embodiment of the present invention relates to a process for the production of arginine, which comprises
[5429] (a) increasing or generating the activiy of a geranylgeranyl pyrophosphate synthase non-targeted in a non-human organism or a part thereof, preferably a microorganism, a plant cell, a plant or a part thereof, as compared to a corresponding non-transformed wild type non-human organism or a part thereof; and
[5430] (b) growing the non-human organism or a part thereof under conditions which permit the production of arginine or a composition comprising arginine in said non-human organism or in the culture medium surrounding said non-human organism.

[5431] A further embodiment of the present invention relates to a process for the production of glutamine, which comprises
[5432] (a) increasing or generating the activiy of a geranylgeranyl pyrophosphate synthase non-targeted in a non-human organism or a part thereof, preferably a microorganism, a plant cell, a plant or a part thereof, as compared to a corresponding non-transformed wild type non-human organism or a part thereof; and
[5433] (b) growing the non-human organism or a part thereof under conditions which permit the production of glutamine or a composition comprising glutamine in said non-human organism or in the culture medium surrounding said non-human organism.

[5434] A further embodiment of the present invention relates to a process for the production of proline, which comprises
[5435] (a) increasing or generating the activiy of a geranylgeranyl pyrophosphate synthase non-targeted in a non-human organism or a part thereof, preferably a microorganism, a plant cell, a plant or a part thereof, as compared to a corresponding non-transformed wild type non-human organism or a part thereof; and
[5436] (b) growing the non-human organism or a part thereof under conditions which permit the production of proline or a composition comprising proline in said non-human organism or in the culture medium surrounding said non-human organism.

[5437] A further embodiment of the present invention relates to a process for the production of arginine, which comprises
[5438] (a) increasing or generating the activiy of a circadian clock protein non-targeted in a non-human organism or a part thereof, preferably a microorganism, a plant cell, a plant or a part thereof, as compared to a corresponding non-transformed wild type non-human organism or a part thereof; and
[5439] (b) growing the non-human organism or a part thereof under conditions which permit the production of arginine or a composition comprising arginine in said non-human organism or in the culture medium surrounding said non-human organism.

[5440] A further embodiment of the present invention relates to a process for the production of proline, which comprises
[5441] (a) increasing or generating the activiy of a circadian clock protein non-targeted in a non-human organism or a part thereof, preferably a microorganism, a plant cell, a plant or a part thereof, as compared to a corresponding non-transformed wild type non-human organism or a part thereof; and
[5442] (b) growing the non-human organism or a part thereof under conditions which permit the production of proline or a composition comprising proline in said non-human organism or in the culture medium surrounding said non-human organism.

[5443] A further embodiment of the present invention relates to a process for the production of proline, which comprises
[5444] (a) increasing or generating the activiy of a amine oxidase non-targeted in a non-human organism or a part thereof, preferably a microorganism, a plant cell, a plant or a part thereof, as compared to a corresponding non-transformed wild type non-human organism or a part thereof; and
[5445] (b) growing the non-human organism or a part thereof under conditions which permit the production of proline or a composition comprising proline in said non-human organism or in the culture medium surrounding said non-human organism.

[5446] A further embodiment of the present invention relates to a process for the production of glutamate, which comprises
[5447] (a) increasing or generating the activiy of a dihydrolipoamide dehydrogenase non-targeted in a non-human organism or a part thereof, preferably a microorganism, a plant cell, a plant or a part thereof, as compared to a corresponding non-transformed wild type non-human organism or a part thereof; and
[5448] (b) growing the non-human organism or a part thereof under conditions which permit the production of glutamate or a composition comprising glutamate in said non-human organism or in the culture medium surrounding said non-human organism.

[5449] A further embodiment of the present invention relates to a process for the production of arginine, which comprises
[5450] (a) increasing or generating the activiy of a gamma-glutamyltranspeptidase non-targeted in a non-human organism or a part thereof, preferably a microorganism, a plant cell, a plant or a part thereof, as compared to a corresponding non-transformed wild type non-human organism or a part thereof; and
[5451] (b) growing the non-human organism or a part thereof under conditions which permit the production of arginine or a composition comprising arginine in said non-human organism or in the culture medium surrounding said non-human organism.

[5452] A further embodiment of the present invention relates to a process for the production of glutamate, which comprises
[5453] (a) increasing or generating the activiy of a gamma-glutamyltranspeptidase non-targeted in a non-human organism or a part thereof, preferably a microorganism, a plant cell, a plant or a part thereof, as compared to a corresponding non-transformed wild type non-human organism or a part thereof; and
[5454] (b) growing the non-human organism or a part thereof under conditions which permit the production of glutamate or a composition comprising glutamate in said non-human organism or in the culture medium surrounding said non-human organism.

[5455] A further embodiment of the present invention relates to a process for the production of arginine, which comprises
[5456] (a) increasing or generating the activiy of a arginine decarboxylase non-targeted in a non-human organism or a part thereof, preferably a microorganism, a plant cell, a plant or a part thereof, as compared to a corresponding non-transformed wild type non-human organism or a part thereof; and
[5457] (b) growing the non-human organism or a part thereof under conditions which permit the production of arginine or a composition comprising arginine in said non-human organism or in the culture medium surrounding said non-human organism.

[5458] A further embodiment of the present invention relates to a process for the production of glutamate, which comprises
[5459] (a) increasing or generating the activiy of a CDP-diglyceride synthetase non-targeted in a non-human organism or a part thereof, preferably a microorganism, a plant cell, a plant or a part thereof, as compared to a corresponding non-transformed wild type non-human organism or a part thereof; and
[5460] (b) growing the non-human organism or a part thereof under conditions which permit the production of glutamate or a composition comprising glutamate in said non-human organism or in the culture medium surrounding said non-human organism.

[5461] A further embodiment of the present invention relates to a process for the production of glutamate, which comprises
[5462] (a) increasing or generating the activiy of a carbohydrate kinase non-targeted in a non-human organism or a part thereof, preferably a microorganism, a plant cell, a plant or a part thereof, as compared to a corresponding non-transformed wild type non-human organism or a part thereof; and
[5463] (b) growing the non-human organism or a part thereof under conditions which permit the production of glutamate or a composition comprising glutamate in said non-human organism or in the culture medium surrounding said non-human organism.

[5464] A further embodiment of the present invention relates to a process for the production of glutamine, which comprises
[5465] (a) increasing or generating the activiy of a iron(III) dicitrate-binding protein non-targeted in a non-human organism or a part thereof, preferably a microorganism, a plant cell, a plant or a part thereof, as compared to a corresponding non-transformed wild type non-human organism or a part thereof; and
[5466] (b) growing the non-human organism or a part thereof under conditions which permit the production of glutamine or a composition comprising glutamine in said non-human organism or in the culture medium surrounding said non-human organism.

[5467] A further embodiment of the present invention relates to a process for the production of proline, which comprises
[5468] (a) increasing or generating the activiy of a Photosystem I reaction center subunit XI non-targeted in a non-human organism or a part thereof, preferably a microorganism, a plant cell, a plant or a part thereof, as compared to a corresponding non-transformed wild type non-human organism or a part thereof; and
[5469] (b) growing the non-human organism or a part thereof under conditions which permit the production of proline or a composition comprising proline in said non-human organism or in the culture medium surrounding said non-human organism.

[5470] A further embodiment of the present invention relates to a process for the production of arginine, which comprises
[5471] (a) increasing or generating the activiy of a photosystem II protein non-targeted in a non-human organism or a part thereof, preferably a microorganism, a plant cell, a plant or a part thereof, as compared to a corresponding non-transformed wild type non-human organism or a part thereof; and
[5472] (b) growing the non-human organism or a part thereof under conditions which permit the production of arginine or a composition comprising arginine in said non-human organism or in the culture medium surrounding said non-human organism.

[5473] A further embodiment of the present invention relates to a process for the production of glutamine, which comprises
[5474] (a) increasing or generating the activiy of a photosystem II protein non-targeted in a non-human organism or a part thereof, preferably a microorganism, a plant cell, a plant or a part thereof, as compared to a corresponding non-transformed wild type non-human organism or a part thereof; and
[5475] (b) growing the non-human organism or a part thereof under conditions which permit the production of glutamine or a composition comprising glutamine in said non-human organism or in the culture medium surrounding said non-human organism.

[5476] A further embodiment of the present invention relates to a process for the production of proline, which comprises
[5477] (a) increasing or generating the activiy of a glutamine amidotransferase non-targeted in a non-human organism or a part thereof, preferably a microorganism, a plant cell, a plant or a part thereof, as compared to a corresponding non-transformed wild type non-human organism or a part thereof; and
[5478] (b) growing the non-human organism or a part thereof under conditions which permit the production of proline or a composition comprising proline in said non-human organism or in the culture medium surrounding said non-human organism.

[5479] A further embodiment of the present invention relates to a process for the production of glutamate, which comprises
[5480] (a) increasing or generating the activiy of a glycerol-3-phosphate dehydrogenase non-targeted in a non-human organism or a part thereof, preferably a microorganism, a plant cell, a plant or a part thereof, as compared to a corresponding non-transformed wild type non-human organism or a part thereof; and
[5481] (b) growing the non-human organism or a part thereof under conditions which permit the production of glutamate or a composition comprising glutamate in said non-human organism or in the culture medium surrounding said non-human organism.

[5482] A further embodiment of the present invention relates to a process for the production of proline, which comprises
[5483] (a) increasing or generating the activiy of a phosphoadenosine phosphosulfate reductase non-targeted in a non-human organism or a part thereof, preferably a microorganism, a plant cell, a plant or a part thereof, as compared to a corresponding non-transformed wild type non-human organism or a part thereof; and
[5484] (b) growing the non-human organism or a part thereof under conditions which permit the production of proline or a composition comprising proline in said non-human organism or in the culture medium surrounding said non-human organism.

[5485] A further embodiment of the present invention relates to a process for the production of glutamate, which comprises
[5486] (a) increasing or generating the activiy of a riboflavin biosynthesis protein non-targeted in a non-human organism or a part thereof, preferably a microorganism, a plant cell, a plant or a part thereof, as compared to a corresponding non-transformed wild type non-human organism or a part thereof; and
[5487] (b) growing the non-human organism or a part thereof under conditions which permit the production of glutamate or a composition comprising glutamate in said non-human organism or in the culture medium surrounding said non-human organism.

[5488] A further embodiment of the present invention relates to a process for the production of glutamate, which comprises
[5489] (a) increasing or generating the activiy of a malonyl CoA-acyl carrier protein transacylase non-targeted in a non-human organism or a part thereof, preferably a microorganism, a plant cell, a plant or a part thereof, as compared to a corresponding non-transformed wild type non-human organism or a part thereof; and
[5490] (b) growing the non-human organism or a part thereof under conditions which permit the production of glutamate or a composition comprising glutamate in said non-human organism or in the culture medium surrounding said non-human organism.

[5491] A further embodiment of the present invention relates to a process for the production of glutamine, which comprises
[5492] (a) increasing or generating the activiy of a malonyl CoA-acyl carrier protein transacylase non-targeted in a non-human organism or a part thereof, preferably a microorganism, a plant cell, a plant or a part thereof, as compared to a corresponding non-transformed wild type non-human organism or a part thereof; and
[5493] (b) growing the non-human organism or a part thereof under conditions which permit the production of glutamine or a composition comprising glutamine in said non-human organism or in the culture medium surrounding said non-human organism.

[5494] A further embodiment of the present invention relates to a process for the production of proline, which comprises
[5495] (a) increasing or generating the activiy of a short-chain alcohol dehydrogenase family non-targeted in a non-human organism or a part thereof, preferably a microorganism, a plant cell, a plant or a part thereof, as compared to a corresponding non-transformed wild type non-human organism or a part thereof; and
[5496] (b) growing the non-human organism or a part thereof under conditions which permit the production of proline or a composition comprising proline in said non-human organism or in the culture medium surrounding said non-human organism.

[5497] A further embodiment of the present invention relates to a process for the production of glutamine, which comprises
[5498] (a) increasing or generating the activiy of a Sec-independent protein translocase subunit non-targeted in a non-human organism or a part thereof, preferably a microorganism, a plant cell, a plant or a part thereof, as compared to a corresponding non-transformed wild type non-human organism or a part thereof; and
[5499] (b) growing the non-human organism or a part thereof under conditions which permit the production of glutamine or a composition comprising glutamine in said non-human organism or in the culture medium surrounding said non-human organism.

[5500] A further embodiment of the present invention relates to a process for the production of proline, which comprises
[5501] (a) increasing or generating the activiy of a Sec-independent protein translocase subunit non-targeted in a non-human organism or a part thereof, preferably a microorganism, a plant cell, a plant or a part thereof, as compared to a corresponding non-transformed wild type non-human organism or a part thereof; and
[5502] (b) growing the non-human organism or a part thereof under conditions which permit the production of proline or a composition comprising proline in said non-human organism or in the culture medium surrounding said non-human organism.

[5503] A further embodiment of the present invention relates to a process for the production of proline, which comprises
[5504] (a) increasing or generating the activiy of a cell division protein non-targeted in a non-human organism or a part thereof, preferably a microorganism, a plant cell, a plant or a part thereof, as compared to a corresponding non-transformed wild type non-human organism or a part thereof; and
[5505] (b) growing the non-human organism or a part thereof under conditions which permit the production of proline or a composition comprising proline in said non-human organism or in the culture medium surrounding said non-human organism.

[5506] A further embodiment of the present invention relates to a process for the production of proline, which comprises
[5507] (a) increasing or generating the activiy of a branched-chain amino acid ABC transporter permease protein non-targeted in a non-human organism or a part thereof, preferably a microorganism, a plant cell, a plant or a part thereof, as compared to a corresponding non-transformed wild type non-human organism or a part thereof; and
[5508] (b) growing the non-human organism or a part thereof under conditions which permit the production of proline or a composition comprising proline in said non-human organism or in the culture medium surrounding said non-human organism.

[5509] A further embodiment of the present invention relates to a process for the production of proline, which comprises
[5510] (a) increasing or generating the activiy of a amino acid ABC transporter permease protein non-targeted in a non-human organism or a part thereof, preferably a microorganism, a plant cell, a plant or a part thereof, as compared to a corresponding non-transformed wild type non-human organism or a part thereof; and
[5511] (b) growing the non-human organism or a part thereof under conditions which permit the production of proline or a composition comprising proline in said non-human organism or in the culture medium surrounding said non-human organism.

[5512] A further embodiment of the present invention relates to a process for the production of proline, which comprises
[5513] (a) increasing or generating the activiy of a TTC0768-protein non-targeted in a non-human organism or a part thereof, preferably a microorganism, a plant cell, a plant or a part thereof, as compared to a corresponding non-transformed wild type non-human organism or a part thereof; and
[5514] (b) growing the non-human organism or a part thereof under conditions which permit the production of proline or a composition comprising proline in said non-human organism or in the culture medium surrounding said non-human organism.

[5515] A further embodiment of the present invention relates to a process for the production of glutamine, which comprises
[5516] (a) increasing or generating the activiy of a metal-dependent hydrolase non-targeted in a non-human organism or a part thereof, preferably a microorganism, a plant cell, a plant or a part thereof, as compared to a corresponding non-transformed wild type non-human organism or a part thereof; and
[5517] (b) growing the non-human organism or a part thereof under conditions which permit the production of glutamine or a composition comprising glutamine in said non-human organism or in the culture medium surrounding said non-human organism.

[5518] A further embodiment of the present invention relates to a process for the production of glutamate, which comprises
[5519] (a) increasing or generating the activiy of a multiple antibiotic resistance protein non-targeted in a non-human organism or a part thereof, preferably a microorganism, a plant cell, a plant or a part thereof, as compared to a corresponding non-transformed wild type non-human organism or a part thereof; and
[5520] (b) growing the non-human organism or a part thereof under conditions which permit the production of glutamate or a composition comprising glutamate in said non-human organism or in the culture medium surrounding said non-human organism.

[5521] A further embodiment of the present invention relates to a process for the production of glutamate, which comprises
[5522] (a) increasing or generating the activiy of a TTC1386-protein non-targeted in a non-human organism or a part thereof, preferably a microorganism, a plant cell, a plant or a part thereof, as compared to a corresponding non-transformed wild type non-human organism or a part thereof; and
[5523] (b) growing the non-human organism or a part thereof under conditions which permit the production of glutamate or a composition comprising glutamate in said non-human organism or in the culture medium surrounding said non-human organism.

[5524] A further embodiment of the present invention relates to a process for the production of glutamine, which comprises
[5525] (a) increasing or generating the activiy of a homocitrate synthase non-targeted in a non-human organism or a part thereof, preferably a microorganism, a plant cell, a plant or a part thereof, as compared to a corresponding non-transformed wild type non-human organism or a part thereof; and
[5526] (b) growing the non-human organism or a part thereof under conditions which permit the production of glutamine or a composition comprising glutamine in said non-human organism or in the culture medium surrounding said non-human organism.

[5527] A further embodiment of the present invention relates to a process for the production of proline, which comprises
[5528] (a) increasing or generating the activiy of a homocitrate synthase non-targeted in a non-human organism or a part thereof, preferably a microorganism, a plant cell, a plant or a part thereof, as compared to a corresponding non-transformed wild type non-human organism or a part thereof; and
[5529] (b) growing the non-human organism or a part thereof under conditions which permit the production of proline or a composition comprising proline in said non-human organism or in the culture medium surrounding said non-human organism.

[5530] A further embodiment of the present invention relates to a process for the production of glutamate, which comprises
[5531] (a) increasing or generating the activiy of a oxidoreductase subunit non-targeted in a non-human organism or a part thereof, preferably a microorganism, a plant cell, a plant or a part thereof, as compared to a corresponding non-transformed wild type non-human organism or a part thereof; and
[5532] (b) growing the non-human organism or a part thereof under conditions which permit the production of glutamate or a composition comprising glutamate in said non-human organism or in the culture medium surrounding said non-human organism.

[5533] A further embodiment of the present invention relates to a process for the production of glutamine, which comprises
[5534] (a) increasing or generating the activiy of a oxidoreductase subunit non-targeted in a non-human organism or a part thereof, preferably a microorganism, a plant cell, a plant or a part thereof, as compared to a corresponding non-transformed wild type non-human organism or a part thereof; and
[5535] (b) growing the non-human organism or a part thereof under conditions which permit the production of glutamine or a composition comprising glutamine in said non-human organism or in the culture medium surrounding said non-human organism.

[5536] A further embodiment of the present invention relates to a process for the production of glutamate, which comprises
[5537] (a) increasing or generating the activiy of a XM_{—}473199-protein non-targeted in a non-human organism or a part thereof, preferably a microorganism, a plant cell, a plant or a part thereof, as compared to a corresponding non-transformed wild type non-human organism or a part thereof; and
[5538] (b) growing the non-human organism or a part thereof under conditions which permit the production of glutamate or a composition comprising glutamate in said non-human organism or in the culture medium surrounding said non-human organism.

[5539] A further embodiment of the present invention relates to a process for the production of glutamine, which comprises
[5540] (a) increasing or generating the activiy of a XM_{—}473199-protein non-targeted in a non-human organism or a part thereof, preferably a microorganism, a plant cell, a plant or a part thereof, as compared to a corresponding non-transformed wild type non-human organism or a part thereof; and
[5541] (b) growing the non-human organism or a part thereof under conditions which permit the production of glutamine or a composition comprising glutamine in said non-human organism or in the culture medium surrounding said non-human organism.

[5542] A further embodiment of the present invention relates to a process for the production of proline, which comprises
[5543] (a) increasing or generating the activiy of a transcription factor non-targeted in a non-human organism or a part thereof, preferably a microorganism, a plant cell, a plant or a part thereof, as compared to a corresponding non-transformed wild type non-human organism or a part thereof; and
[5544] (b) growing the non-human organism or a part thereof under conditions which permit the production of proline or a composition comprising proline in said non-human organism or in the culture medium surrounding said non-human organism.

[5545] A further embodiment of the present invention relates to a process for the production of glutamate, which comprises
[5546] (a) increasing or generating the activiy of a cell division control protein non-targeted in a non-human organism or a part thereof, preferably a microorganism, a plant cell, a plant or a part thereof, as compared to a corresponding non-transformed wild type non-human organism or a part thereof; and
[5547] (b) growing the non-human organism or a part thereof under conditions which permit the production of glutamate or a composition comprising glutamate in said non-human organism or in the culture medium surrounding said non-human organism.

[5548] A further embodiment of the present invention relates to a process for the production of proline, which comprises
[5549] (a) increasing or generating the activiy of a cell division control protein non-targeted in a non-human organism or a part thereof, preferably a microorganism, a plant cell, a plant or a part thereof, as compared to a corresponding non-transformed wild type non-human organism or a part thereof; and
[5550] (b) growing the non-human organism or a part thereof under conditions which permit the production of proline or a composition comprising proline in said non-human organism or in the culture medium surrounding said non-human organism.

[5551] A further embodiment of the present invention relates to a process for the production of proline, which comprises
[5552] (a) increasing or generating the activiy of a YCL026C-A-protein non-targeted in a non-human organism or a part thereof, preferably a microorganism, a plant cell, a plant or a part thereof, as compared to a corresponding non-transformed wild type non-human organism or a part thereof; and
[5553] (b) growing the non-human organism or a part thereof under conditions which permit the production of proline or a composition comprising proline in said non-human organism or in the culture medium surrounding said non-human organism.

[5554] A further embodiment of the present invention relates to a process for the production of arginine, which comprises
[5555] (a) increasing or generating the activiy of a ycr102c-protein non-targeted in a non-human organism or a part thereof, preferably a microorganism, a plant cell, a plant or a part thereof, as compared to a corresponding non-transformed wild type non-human organism or a part thereof; and
[5556] (b) growing the non-human organism or a part thereof under conditions which permit the production of arginine or a composition comprising arginine in said non-human organism or in the culture medium surrounding said non-human organism.

[5557] A further embodiment of the present invention relates to a process for the production of proline, which comprises
[5558] (a) increasing or generating the activiy of a protein kinase non-targeted in a non-human organism or a part thereof, preferably a microorganism, a plant cell, a plant or a part thereof, as compared to a corresponding non-transformed wild type non-human organism or a part thereof; and
[5559] (b) growing the non-human organism or a part thereof under conditions which permit the production of proline or a composition comprising proline in said non-human organism or in the culture medium surrounding said non-human organism.

[5560] A further embodiment of the present invention relates to a process for the production of proline, which comprises
[5561] (a) increasing or generating the activiy of a coproporphyrinogen Ill oxidase non-targeted in a non-human organism or a part thereof, preferably a microorganism, a plant cell, a plant or a part thereof, as compared to a corresponding non-transformed wild type non-human organism or a part thereof; and
[5562] (b) growing the non-human organism or a part thereof under conditions which permit the production of proline or a composition comprising proline in said non-human organism or in the culture medium surrounding said non-human organism.

[5563] A further embodiment of the present invention relates to a process for the production of proline, which comprises
[5564] (a) increasing or generating the activiy of a branched-chain amino acid permease non-targeted in a non-human organism or a part thereof, preferably a microorganism, a plant cell, a plant or a part thereof, as compared to a corresponding non-transformed wild type non-human organism or a part thereof; and
[5565] (b) growing the non-human organism or a part thereof under conditions which permit the production of proline or a composition comprising proline in said non-human organism or in the culture medium surrounding said non-human organism.

[5566] A further embodiment of the present invention relates to a process for the production of arginine, which comprises
[5567] (a) increasing or generating the activiy of a peroxisome assembly protein non-targeted in a non-human organism or a part thereof, preferably a microorganism, a plant cell, a plant or a part thereof, as compared to a corresponding non-transformed wild type non-human organism or a part thereof; and
[5568] (b) growing the non-human organism or a part thereof under conditions which permit the production of arginine or a composition comprising arginine in said non-human organism or in the culture medium surrounding said non-human organism.

[5569] A further embodiment of the present invention relates to a process for the production of arginine, which comprises
[5570] (a) increasing or generating the activiy of a ydr338c-protein non-targeted in a non-human organism or a part thereof, preferably a microorganism, a plant cell, a plant or a part thereof, as compared to a corresponding non-transformed wild type non-human organism or a part thereof; and
[5571] (b) growing the non-human organism or a part thereof under conditions which permit the production of arginine or a composition comprising arginine in said non-human organism or in the culture medium surrounding said non-human organism.

[5572] A further embodiment of the present invention relates to a process for the production of glutamine, which comprises
[5573] (a) increasing or generating the activiy of a yer014w-protein non-targeted in a non-human organism or a part thereof, preferably a microorganism, a plant cell, a plant or a part thereof, as compared to a corresponding non-transformed wild type non-human organism or a part thereof; and
[5574] (b) growing the non-human organism or a part thereof under conditions which permit the production of glutamine or a composition comprising glutamine in said non-human organism or in the culture medium surrounding said non-human organism.

[5575] A further embodiment of the present invention relates to a process for the production of glutamine, which comprises
[5576] (a) increasing or generating the activiy of a yer106w-protein non-targeted in a non-human organism or a part thereof, preferably a microorganism, a plant cell, a plant or a part thereof, as compared to a corresponding non-transformed wild type non-human organism or a part thereof; and
[5577] (b) growing the non-human organism or a part thereof under conditions which permit the production of glutamine or a composition comprising glutamine in said non-human organism or in the culture medium surrounding said non-human organism.

[5578] A further embodiment of the present invention relates to a process for the production of proline, which comprises
[5579] (a) increasing or generating the activiy of a molecular chaperone portein non-targeted in a non-human organism or a part thereof, preferably a microorganism, a plant cell, a plant or a part thereof, as compared to a corresponding non-transformed wild type non-human organism or a part thereof; and
[5580] (b) growing the non-human organism or a part thereof under conditions which permit the production of proline or a composition comprising proline in said non-human organism or in the culture medium surrounding said non-human organism.

[5581] A further embodiment of the present invention relates to a process for the production of proline, which comprises
[5582] (a) increasing or generating the activiy of a YFL019C-protein non-targeted in a non-human organism or a part thereof, preferably a microorganism, a plant cell, a plant or a part thereof, as compared to a corresponding non-transformed wild type non-human organism or a part thereof; and
[5583] (b) growing the non-human organism or a part thereof under conditions which permit the production of proline or a composition comprising proline in said non-human organism or in the culture medium surrounding said non-human organism.

[5584] A further embodiment of the present invention relates to a process for the production of arginine, which comprises
[5585] (a) increasing or generating the activiy of a yfl054c-protein non-targeted in a non-human organism or a part thereof, preferably a microorganism, a plant cell, a plant or a part thereof, as compared to a corresponding non-transformed wild type non-human organism or a part thereof; and
[5586] (b) growing the non-human organism or a part thereof under conditions which permit the production of arginine or a composition comprising arginine in said non-human organism or in the culture medium surrounding said non-human organism.

[5587] A further embodiment of the present invention relates to a process for the production of glutamine, which comprises
[5588] (a) increasing or generating the activiy of a yfl054c-protein non-targeted in a non-human organism or a part thereof, preferably a microorganism, a plant cell, a plant or a part thereof, as compared to a corresponding non-transformed wild type non-human organism or a part thereof; and
[5589] (b) growing the non-human organism or a part thereof under conditions which permit the production of glutamine or a composition comprising glutamine in said non-human organism or in the culture medium surrounding said non-human organism.

[5590] A further embodiment of the present invention relates to a process for the production of arginine, which comprises
[5591] (a) increasing or generating the activiy of a pre-mRNA-splicing factor non-targeted in a non-human organism or a part thereof, preferably a microorganism, a plant cell, a plant or a part thereof, as compared to a corresponding non-transformed wild type non-human organism or a part thereof; and
[5592] (b) growing the non-human organism or a part thereof under conditions which permit the production of arginine or a composition comprising arginine in said non-human organism or in the culture medium surrounding said non-human organism.

[5593] A further embodiment of the present invention relates to a process for the production of proline, which comprises
[5594] (a) increasing or generating the activiy of a ygl237c-protein non-targeted in a non-human organism or a part thereof, preferably a microorganism, a plant cell, a plant or a part thereof, as compared to a corresponding non-transformed wild type non-human organism or a part thereof; and
[5595] (b) growing the non-human organism or a part thereof under conditions which permit the production of proline or a composition comprising proline in said non-human organism or in the culture medium surrounding said non-human organism.

[5596] A further embodiment of the present invention relates to a process for the production of glutamine, which comprises
[5597] (a) increasing or generating the activiy of a ygr068c-protein non-targeted in a non-human organism or a part thereof, preferably a microorganism, a plant cell, a plant or a part thereof, as compared to a corresponding non-transformed wild type non-human organism or a part thereof; and
[5598] (b) growing the non-human organism or a part thereof under conditions which permit the production of glutamine or a composition comprising glutamine in said non-human organism or in the culture medium surrounding said non-human organism.

[5599] A further embodiment of the present invention relates to a process for the production of proline, which comprises
[5600] (a) increasing or generating the activiy of a squalene monooxygenase non-targeted in a non-human organism or a part thereof, preferably a microorganism, a plant cell, a plant or a part thereof, as compared to a corresponding non-transformed wild type non-human organism or a part thereof; and
[5601] (b) growing the non-human organism or a part thereof under conditions which permit the production of proline or a composition comprising proline in said non-human organism or in the culture medium surrounding said non-human organism.

[5602] A further embodiment of the present invention relates to a process for the production of glutamate, which comprises
[5603] (a) increasing or generating the activiy of a ygr221c-protein non-targeted in a non-human organism or a part thereof, preferably a microorganism, a plant cell, a plant or a part thereof, as compared to a corresponding non-transformed wild type non-human organism or a part thereof; and
[5604] (b) growing the non-human organism or a part thereof under conditions which permit the production of glutamate or a composition comprising glutamate in said non-human organism or in the culture medium surrounding said non-human organism.

[5605] A further embodiment of the present invention relates to a process for the production of glutamine, which comprises
[5606] (a) increasing or generating the activiy of a ygr221c-protein non-targeted in a non-human organism or a part thereof, preferably a microorganism, a plant cell, a plant or a part thereof, as compared to a corresponding non-transformed wild type non-human organism or a part thereof; and
[5607] (b) growing the non-human organism or a part thereof under conditions which permit the production of glutamine or a composition comprising glutamine in said non-human organism or in the culture medium surrounding said non-human organism.

[5608] A further embodiment of the present invention relates to a process for the production of proline, which comprises
[5609] (a) increasing or generating the activiy of a yhl013c-protein non-targeted in a non-human organism or a part thereof, preferably a microorganism, a plant cell, a plant or a part thereof, as compared to a corresponding non-transformed wild type non-human organism or a part thereof; and
[5610] (b) growing the non-human organism or a part thereof under conditions which permit the production of proline or a composition comprising proline in said non-human organism or in the culture medium surrounding said non-human organism.

[5611] A further embodiment of the present invention relates to a process for the production of arginine, which comprises
[5612] (a) increasing or generating the activiy of a mitochondrial processing protease non-targeted in a non-human organism or a part thereof, preferably a microorganism, a plant cell, a plant or a part thereof, as compared to a corresponding non-transformed wild type non-human organism or a part thereof; and
[5613] (b) growing the non-human organism or a part thereof under conditions which permit the production of arginine or a composition comprising arginine in said non-human organism or in the culture medium surrounding said non-human organism.

[5614] A further embodiment of the present invention relates to a process for the production of proline, which comprises
[5615] (a) increasing or generating the activiy of a H/ACA ribonucleoprotein complex subunit 3 non-targeted in a non-human organism or a part thereof, preferably a microorganism, a plant cell, a plant or a part thereof, as compared to a corresponding non-transformed wild type non-human organism or a part thereof; and
[5616] (b) growing the non-human organism or a part thereof under conditions which permit the production of proline or a composition comprising proline in said non-human organism or in the culture medium surrounding said non-human organism.

[5617] A further embodiment of the present invention relates to a process for the production of glutamate, which comprises
[5618] (a) increasing or generating the activiy of a yhr207c-protein non-targeted in a non-human organism or a part thereof, preferably a microorganism, a plant cell, a plant or a part thereof, as compared to a corresponding non-transformed wild type non-human organism or a part thereof; and
[5619] (b) growing the non-human organism or a part thereof under conditions which permit the production of glutamate or a composition comprising glutamate in said non-human organism or in the culture medium surrounding said non-human organism.

[5620] A further embodiment of the present invention relates to a process for the production of arginine, which comprises
[5621] (a) increasing or generating the activiy of a 3-phosphoglycerate dehydrogenase non-targeted in a non-human organism or a part thereof, preferably a microorganism, a plant cell, a plant or a part thereof, as compared to a corresponding non-transformed wild type non-human organism or a part thereof; and
[5622] (b) growing the non-human organism or a part thereof under conditions which permit the production of arginine or a composition comprising arginine in said non-human organism or in the culture medium surrounding said non-human organism.

[5623] A further embodiment of the present invention relates to a process for the production of proline, which comprises
[5624] (a) increasing or generating the activiy of a allantoinase non-targeted in a non-human organism or a part thereof, preferably a microorganism, a plant cell, a plant or a part thereof, as compared to a corresponding non-transformed wild type non-human organism or a part thereof; and
[5625] (b) growing the non-human organism or a part thereof under conditions which permit the production of proline or a composition comprising proline in said non-human organism or in the culture medium surrounding said non-human organism.

[5626] A further embodiment of the present invention relates to a process for the production of arginine, which comprises
[5627] (a) increasing or generating the activiy of a allantoicase non-targeted in a non-human organism or a part thereof, preferably a microorganism, a plant cell, a plant or a part thereof, as compared to a corresponding non-transformed wild type non-human organism or a part thereof; and
[5628] (b) growing the non-human organism or a part thereof under conditions which permit the production of arginine or a composition comprising arginine in said non-human organism or in the culture medium surrounding said non-human organism.

[5629] A further embodiment of the present invention relates to a process for the production of glutamine, which comprises
[5630] (a) increasing or generating the activiy of a DnaJ-like chaperone non-targeted in a non-human organism or a part thereof, preferably a microorganism, a plant cell, a plant or a part thereof, as compared to a corresponding non-transformed wild type non-human organism or a part thereof; and
[5631] (b) growing the non-human organism or a part thereof under conditions which permit the production of glutamine or a composition comprising glutamine in said non-human organism or in the culture medium surrounding said non-human organism.

[5632] A further embodiment of the present invention relates to a process for the production of arginine, which comprises
[5633] (a) increasing or generating the activiy of a ornithine carbamoyltransferase non-targeted in a non-human organism or a part thereof, preferably a microorganism, a plant cell, a plant or a part thereof, as compared to a corresponding non-transformed wild type non-human organism or a part thereof; and
[5634] (b) growing the non-human organism or a part thereof under conditions which permit the production of arginine or a composition comprising arginine in said non-human organism or in the culture medium surrounding said non-human organism.

[5635] A further embodiment of the present invention relates to a process for the production of proline, which comprises
[5636] (a) increasing or generating the activiy of a potassium transport protein non-targeted in a non-human organism or a part thereof, preferably a microorganism, a plant cell, a plant or a part thereof, as compared to a corresponding non-transformed wild type non-human organism or a part thereof; and
[5637] (b) growing the non-human organism or a part thereof under conditions which permit the production of proline or a composition comprising proline in said non-human organism or in the culture medium surrounding said non-human organism.

[5638] A further embodiment of the present invention relates to a process for the production of arginine, which comprises
[5639] (a) increasing or generating the activiy of a glycogenin non-targeted in a non-human organism or a part thereof, preferably a microorganism, a plant cell, a plant or a part thereof, as compared to a corresponding non-transformed wild type non-human organism or a part thereof; and
[5640] (b) growing the non-human organism or a part thereof under conditions which permit the production of arginine or a composition comprising arginine in said non-human organism or in the culture medium surrounding said non-human organism.

[5641] A further embodiment of the present invention relates to a process for the production of proline, which comprises
[5642] (a) increasing or generating the activiy of a ATP-dependent RNA helicase non-targeted in a non-human organism or a part thereof, preferably a microorganism, a plant cell, a plant or a part thereof, as compared to a corresponding non-transformed wild type non-human organism or a part thereof; and
[5643] (b) growing the non-human organism or a part thereof under conditions which permit the production of proline or a composition comprising proline in said non-human organism or in the culture medium surrounding said non-human organism.

[5644] A further embodiment of the present invention relates to a process for the production of glutamine, which comprises
[5645] (a) increasing or generating the activiy of a phosphoribosyltransferase non-targeted in a non-human organism or a part thereof, preferably a microorganism, a plant cell, a plant or a part thereof, as compared to a corresponding non-transformed wild type non-human organism or a part thereof; and
[5646] (b) growing the non-human organism or a part thereof under conditions which permit the production of glutamine or a composition comprising glutamine in said non-human organism or in the culture medium surrounding said non-human organism.

[5647] A further embodiment of the present invention relates to a process for the production of glutamate, which comprises
[5648] (a) increasing or generating the activiy of a polygalacturonase non-targeted in a non-human organism or a part thereof, preferably a microorganism, a plant cell, a plant or a part thereof, as compared to a corresponding non-transformed wild type non-human organism or a part thereof; and
[5649] (b) growing the non-human organism or a part thereof under conditions which permit the production of glutamate or a composition comprising glutamate in said non-human organism or in the culture medium surrounding said non-human organism.

[5650] A further embodiment of the present invention relates to a process for the production of proline, which comprises
[5651] (a) increasing or generating the activiy of a aspartate aminotransferase non-targeted in a non-human organism or a part thereof, preferably a microorganism, a plant cell, a plant or a part thereof, as compared to a corresponding non-transformed wild type non-human organism or a part thereof; and
[5652] (b) growing the non-human organism or a part thereof under conditions which permit the production of proline or a composition comprising proline in said non-human organism or in the culture medium surrounding said non-human organism.

[5653] A further embodiment of the present invention relates to a process for the production of glutamate, which comprises
[5654] (a) increasing or generating the activiy of a ylr065c-protein non-targeted in a non-human organism or a part thereof, preferably a microorganism, a plant cell, a plant or a part thereof, as compared to a corresponding non-transformed wild type non-human organism or a part thereof; and
[5655] (b) growing the non-human organism or a part thereof under conditions which permit the production of glutamate or a composition comprising glutamate in said non-human organism or in the culture medium surrounding said non-human organism.

[5656] A further embodiment of the present invention relates to a process for the production of glutamine, which comprises
[5657] (a) increasing or generating the activiy of a ylr178c-protein non-targeted in a non-human organism or a part thereof, preferably a microorganism, a plant cell, a plant or a part thereof, as compared to a corresponding non-transformed wild type non-human organism or a part thereof; and
[5658] (b) growing the non-human organism or a part thereof under conditions which permit the production of glutamine or a composition comprising glutamine in said non-human organism or in the culture medium surrounding said non-human organism.

[5659] A further embodiment of the present invention relates to a process for the production of proline, which comprises
[5660] (a) increasing or generating the activiy of a aconitate hydratase non-targeted in a non-human organism or a part thereof, preferably a microorganism, a plant cell, a plant or a part thereof, as compared to a corresponding non-transformed wild type non-human organism or a part thereof; and
[5661] (b) growing the non-human organism or a part thereof under conditions which permit the production of proline or a composition comprising proline in said non-human organism or in the culture medium surrounding said non-human organism.

[5662] A further embodiment of the present invention relates to a process for the production of proline, which comprises
[5663] (a) increasing or generating the activiy of a adenylosuccinate lyase non-targeted in a non-human organism or a part thereof, preferably a microorganism, a plant cell, a plant or a part thereof, as compared to a corresponding non-transformed wild type non-human organism or a part thereof; and
[5664] (b) growing the non-human organism or a part thereof under conditions which permit the production of proline or a composition comprising proline in said non-human organism or in the culture medium surrounding said non-human organism.

[5665] A further embodiment of the present invention relates to a process for the production of glutamine, which comprises
[5666] (a) increasing or generating the activiy of a ynl142w-protein non-targeted in a non-human organism or a part thereof, preferably a microorganism, a plant cell, a plant or a part thereof, as compared to a corresponding non-transformed wild type non-human organism or a part thereof; and
[5667] (b) growing the non-human organism or a part thereof under conditions which permit the production of glutamine or a composition comprising glutamine in said non-human organism or in the culture medium surrounding said non-human organism.

[5668] A further embodiment of the present invention relates to a process for the production of proline, which comprises
[5669] (a) increasing or generating the activiy of a sterol O-acyltransferase non-targeted in a non-human organism or a part thereof, preferably a microorganism, a plant cell, a plant or a part thereof, as compared to a corresponding non-transformed wild type non-human organism or a part thereof; and
[5670] (b) growing the non-human organism or a part thereof under conditions which permit the production of proline or a composition comprising proline in said non-human organism or in the culture medium surrounding said non-human organism.

[5671] A further embodiment of the present invention relates to a process for the production of arginine, which comprises
[5672] (a) increasing or generating the activiy of a protein kinase non-targeted in a non-human organism or a part thereof, preferably a microorganism, a plant cell, a plant or a part thereof, as compared to a corresponding non-transformed wild type non-human organism or a part thereof; and
[5673] (b) growing the non-human organism or a part thereof under conditions which permit the production of arginine or a composition comprising arginine in said non-human organism or in the culture medium surrounding said non-human organism.

[5674] A further embodiment of the present invention relates to a process for the production of glutamate, which comprises
[5675] (a) increasing or generating the activiy of a glutaminyl-tRNA synthetase non-targeted in a non-human organism or a part thereof, preferably a microorganism, a plant cell, a plant or a part thereof, as compared to a corresponding non-transformed wild type non-human organism or a part thereof; and
[5676] (b) growing the non-human organism or a part thereof under conditions which permit the production of glutamate or a composition comprising glutamate in said non-human organism or in the culture medium surrounding said non-human organism.

[5677] A further embodiment of the present invention relates to a process for the production of glutamine, which comprises
[5678] (a) increasing or generating the activiy of a glutaminyl-tRNA synthetase non-targeted in a non-human organism or a part thereof, preferably a microorganism, a plant cell, a plant or a part thereof, as compared to a corresponding non-transformed wild type non-human organism or a part thereof; and
[5679] (b) growing the non-human organism or a part thereof under conditions which permit the production of glutamine or a composition comprising glutamine in said non-human organism or in the culture medium surrounding said non-human organism.

[5680] A further embodiment of the present invention relates to a process for the production of proline, which comprises
[5681] (a) increasing or generating the activiy of a yor221c-protein non-targeted in a non-human organism or a part thereof, preferably a microorganism, a plant cell, a plant or a part thereof, as compared to a corresponding non-transformed wild type non-human organism or a part thereof; and
[5682] (b) growing the non-human organism or a part thereof under conditions which permit the production of proline or a composition comprising proline in said non-human organism or in the culture medium surrounding said non-human organism.

[5683] A further embodiment of the present invention relates to a process for the production of proline, which comprises
[5684] (a) increasing or generating the activiy of a protein kinase non-targeted in a non-human organism or a part thereof, preferably a microorganism, a plant cell, a plant or a part thereof, as compared to a corresponding non-transformed wild type non-human organism or a part thereof; and
[5685] (b) growing the non-human organism or a part thereof under conditions which permit the production of proline or a composition comprising proline in said non-human organism or in the culture medium surrounding said non-human organism.

[5686] A further embodiment of the present invention relates to a process for the production of arginine, which comprises
[5687] (a) increasing or generating the activiy of a isopentenyl diphosphate isomerase non-targeted in a non-human organism or a part thereof, preferably a microorganism, a plant cell, a plant or a part thereof, as compared to a corresponding non-transformed wild type non-human organism or a part thereof; and
[5688] (b) growing the non-human organism or a part thereof under conditions which permit the production of arginine or a composition comprising arginine in said non-human organism or in the culture medium surrounding said non-human organism.

[5689] A further embodiment of the present invention relates to a process for the production of arginine, which comprises
[5690] (a) increasing or generating the activiy of a Zm_{—}4842_BE510522-protein non-targeted in a non-human organism or a part thereof, preferably a microorganism, a plant cell, a plant or a part thereof, as compared to a corresponding non-transformed wild type non-human organism or a part thereof; and
[5691] (b) growing the non-human organism or a part thereof under conditions which permit the production of arginine or a composition comprising arginine in said non-human organism or in the culture medium surrounding said non-human organism.

[5692] A further embodiment of the present invention relates to a process for the production of glutamine, which comprises
[5693] (a) increasing or generating the activiy of a Zm_{—}4842_BE510522-protein non-targeted in a non-human organism or a part thereof, preferably a microorganism, a plant cell, a plant or a part thereof, as compared to a corresponding non-transformed wild type non-human organism or a part thereof; and
[5694] (b) growing the non-human organism or a part thereof under conditions which permit the production of glutamine or a composition comprising glutamine in said non-human organism or in the culture medium surrounding said non-human organism.

[5695] A further embodiment of the present invention relates to a process for the production of proline, which comprises
[5696] (a) increasing or generating the activiy of a Zm_{—}4842_BE510522-protein non-targeted in a non-human organism or a part thereof, preferably a microorganism, a plant cell, a plant or a part thereof, as compared to a corresponding non-transformed wild type non-human organism or a part thereof; and
[5697] (b) growing the non-human organism or a part thereof under conditions which permit the production of proline or a composition comprising proline in said non-human organism or in the culture medium surrounding said non-human organism.

[5698] A further embodiment of the present invention relates to a process for the production of arginine, which comprises
[5699] (a) increasing or generating the activiy of a phosphopantothenoylcysteine decarboxylase non-targeted in a non-human organism or a part thereof, preferably a microorganism, a plant cell, a plant or a part thereof, as compared to a corresponding non-transformed wild type non-human organism or a part thereof; and
[5700] (b) growing the non-human organism or a part thereof under conditions which permit the production of arginine or a composition comprising arginine in said non-human organism or in the culture medium surrounding said non-human organism.

[5701] A further embodiment of the present invention relates to a process for the production of proline, which comprises
[5702] (a) increasing or generating the activiy of a ZM06LC11975-protein non-targeted in a non-human organism or a part thereof, preferably a microorganism, a plant cell, a plant or a part thereof, as compared to a corresponding non-transformed wild type non-human organism or a part thereof; and
[5703] (b) growing the non-human organism or a part thereof under conditions which permit the production of proline or a composition comprising proline in said non-human organism or in the culture medium surrounding said non-human organism.

[5704] A further embodiment of the present invention relates to a process for the production of arginine, which comprises
[5705] (a) increasing or generating the activity of a polypeptide comprising a polypeptide as depicted in the respective line in column 5 or 8 of Table II, application no. 2, or a homolog or a fragment thereof, a consensus sequence or at least one polypeptide motif as depicted in the respective line in column 8 of Table IV, application no. 2, whereby the respective line discloses in column 7 arginine; or
[5706] increasing or generating the activity of an expression product of one or more nucleic acid molecule(s) comprising a polynucleotide as depicted in the respective line in column 5 or 8 of Table I, application no. 2, preferably the coding region thereof, or a homolog or a fragment thereof, whereby the respective line discloses in column 7 arginine; non-targeted in a non-human organism or a part thereof; preferably a microorganism, a plant cell, a plant or a part thereof, as compared to a corresponding non-transformed wild type non-human organism or a part thereof; and
[5707] (b) growing the non-human organism under conditions which permit the production of arginine, or a composition comprising arginine in said non-human organism or in the culture medium surrounding said non-human organism.

[5708] A further embodiment of the present invention relates to a process for the production of glutamate, which comprises
[5709] (a) increasing or generating the activity of a polypeptide comprising a polypeptide as depicted in the respective line in column 5 or 8 of Table II, application no. 2, or a homolog or a fragment thereof, a consensus sequence or at least one polypeptide motif as depicted in the respective line in column 8 of Table IV, application no. 2, whereby the respective line discloses in column 7 glutamate; or
[5710] increasing or generating the activity of an expression product of one or more nucleic acid molecule(s) comprising a polynucleotide as depicted in the respective line in column 5 or 8 of Table I, application no. 2, preferably the coding region thereof, or a homolog or a fragment thereof, whereby the respective line discloses in column 7 glutamate; non-targeted in a non-human organism or a part thereof; preferably a microorganism, a plant cell, a plant or a part thereof, as compared to a corresponding non-transformed wild type non-human organism or a part thereof; and
[5711] (b) growing the non-human organism under conditions which permit the production of glutamate, or a composition comprising glutamate in said non-human organism or in the culture medium surrounding said non-human organism.

[5712] A further embodiment of the present invention relates to a process for the production of glutamine, which comprises
[5713] (a) increasing or generating the activity of a polypeptide comprising a polypeptide as depicted in the respective line in column 5 or 8 of Table II, application no. 2, or a homolog or a fragment thereof, a consensus sequence or at least one polypeptide motif as depicted in the respective line in column 8 of Table IV, application no. 2, whereby the respective line discloses in column 7 glutamine; or
[5714] increasing or generating the activity of an expression product of one or more nucleic acid molecule(s) comprising a polynucleotide as depicted in the respective line in column 5 or 8 of Table I, application no. 2, preferably the coding region thereof, or a homolog or a fragment thereof, whereby the respective line discloses in column 7 glutamine; non-targeted in a non-human organism or a part thereof; preferably a microorganism, a plant cell, a plant or a part thereof, as compared to a corresponding non-transformed wild type non-human organism or a part thereof; and
[5715] (b) growing the non-human organism under conditions which permit the production of glutamine, or a composition comprising glutamine in said non-human organism or in the culture medium surrounding said non-human organism.

[5716] A further embodiment of the present invention relates to a process for the production of proline, which comprises
[5717] (a) increasing or generating the activity of a polypeptide comprising a polypeptide as depicted in the respective line in column 5 or 8 of Table II, application no. 2, or a homolog or a fragment thereof, a consensus sequence or at least one polypeptide motif as depicted in the respective line in column 8 of Table IV, application no. 2, whereby the respective line discloses in column 7 proline; or
[5718] increasing or generating the activity of an expression product of one or more nucleic acid molecule(s) comprising a polynucleotide as depicted in the respective line in column 5 or 8 of Table I, application no. 2, preferably the coding region thereof, or a homolog or a fragment thereof, whereby the respective line discloses in column 7 proline; non-targeted in a non-human organism or a part thereof; preferably a microorganism, a plant cell, a plant or a part thereof, as compared to a corresponding non-transformed wild type non-human organism or a part thereof; and
[5719] (b) growing the non-human organism under conditions which permit the production of proline, or a composition comprising proline in said non-human organism or in the culture medium surrounding said non-human organism.

[5720] A further embodiment of the present invention relates to a process for the production of glutamate, which comprises
[5721] (a) increasing or generating one or more activities selected from the group consisting of 47266012-protein in an organelle, preferably in plastids or mitochondria, especially in plastids, of a non-human organism or a part thereof, preferably a microorganism, a plant cell, a plant or a part thereof, as compared to a corresponding non-transformed wild type non-human organism or a part thereof; and
[5722] (b) growing the non-human organism or a part thereof under conditions which permit the production of glutamate or a composition comprising glutamate in said non-human organism or in the culture medium surrounding said non-human organism.

[5723] A further embodiment of the present invention relates to a process for the production of glutamine, which comprises
[5724] (a) increasing or generating one or more activities selected from the group consisting of 47266012-protein in an organelle, preferably in plastids or mitochondria, especially in plastids, of a non-human organism or a part thereof, preferably a microorganism, a plant cell, a plant or a part thereof, as compared to a corresponding non-transformed wild type non-human organism or a part thereof; and
[5725] (b) growing the non-human organism or a part thereof under conditions which permit the production of glutamine or a composition comprising glutamine in said non-human organism or in the culture medium surrounding said non-human organism.

[5726] A further embodiment of the present invention relates to a process for the production of glutamate, which comprises
[5727] (a) increasing or generating one or more activities selected from the group consisting of 49747384_SOYBEAN-protein in an organelle, preferably in plastids or mitochondria, especially in plastids, of a non-human organism or a part thereof, preferably a microorganism, a plant cell, a plant or a part thereof, as compared to a corresponding non-transformed wild type non-human organism or a part thereof; and
[5728] (b) growing the non-human organism or a part thereof under conditions which permit the production of glutamate or a composition comprising glutamate in said non-human organism or in the culture medium surrounding said non-human organism.

[5729] A further embodiment of the present invention relates to a process for the production of glutamate, which comprises
[5730] (a) increasing or generating one or more activities selected from the group consisting of pyruvate kinase in an organelle, preferably in plastids or mitochondria, especially in plastids, of a non-human organism or a part thereof, preferably a microorganism, a plant cell, a plant or a part thereof, as compared to a corresponding non-transformed wild type non-human organism or a part thereof; and
[5731] (b) growing the non-human organism or a part thereof under conditions which permit the production of glutamate or a composition comprising glutamate in said non-human organism or in the culture medium surrounding said non-human organism.

[5732] A further embodiment of the present invention relates to a process for the production of proline, which comprises
[5733] (a) increasing or generating one or more activities selected from the group consisting of pyruvate kinase in an organelle, preferably in plastids or mitochondria, especially in plastids, of a non-human organism or a part thereof, preferably a microorganism, a plant cell, a plant or a part thereof, as compared to a corresponding non-transformed wild type non-human organism or a part thereof; and
[5734] (b) growing the non-human organism or a part thereof under conditions which permit the production of proline or a composition comprising proline in said non-human organism or in the culture medium surrounding said non-human organism.

[5735] A further embodiment of the present invention relates to a process for the production of arginine, which comprises
[5736] (a) increasing or generating one or more activities selected from the group consisting of acetyltransferase in an organelle, preferably in plastids or mitochondria, especially in plastids, of a non-human organism or a part thereof, preferably a microorganism, a plant cell, a plant or a part thereof, as compared to a corresponding non-transformed wild type non-human organism or a part thereof; and
[5737] (b) growing the non-human organism or a part thereof under conditions which permit the production of arginine or a composition comprising arginine in said non-human organism or in the culture medium surrounding said non-human organism.

[5738] A further embodiment of the present invention relates to a process for the production of glutamate, which comprises
[5739] (a) increasing or generating one or more activities selected from the group consisting of pyruvate kinase in an organelle, preferably in plastids or mitochondria, especially in plastids, of a non-human organism or a part thereof, preferably a microorganism, a plant cell, a plant or a part thereof, as compared to a corresponding non-transformed wild type non-human organism or a part thereof; and
[5740] (b) growing the non-human organism or a part thereof under conditions which permit the production of glutamate or a composition comprising glutamate in said non-human organism or in the culture medium surrounding said non-human organism.

[5741] A further embodiment of the present invention relates to a process for the production of arginine, which comprises
[5742] (a) increasing or generating one or more activities selected from the group consisting of glucose-6-phosphate 1-dehydrogenase in an organelle, preferably in plastids or mitochondria, especially in plastids, of a non-human organism or a part thereof, preferably a microorganism, a plant cell, a plant or a part thereof, as compared to a corresponding non-transformed wild type non-human organism or a part thereof; and
[5743] (b) growing the non-human organism or a part thereof under conditions which permit the production of arginine or a composition comprising arginine in said non-human organism or in the culture medium surrounding said non-human organism.

[5744] A further embodiment of the present invention relates to a process for the production of proline, which comprises
[5745] (a) increasing or generating one or more activities selected from the group consisting of glucose-6-phosphate 1-dehydrogenase in an organelle, preferably in plastids or mitochondria, especially in plastids, of a non-human organism or a part thereof, preferably a microorganism, a plant cell, a plant or a part thereof, as compared to a corresponding non-transformed wild type non-human organism or a part thereof; and
[5746] (b) growing the non-human organism or a part thereof under conditions which permit the production of proline or a composition comprising proline in said non-human organism or in the culture medium surrounding said non-human organism.

[5747] A further embodiment of the present invention relates to a process for the production of arginine, which comprises
[5748] (a) increasing or generating one or more activities selected from the group consisting of amino acid acetyltransferase in an organelle, preferably in plastids or mitochondria, especially in plastids, of a non-human organism or a part thereof, preferably a microorganism, a plant cell, a plant or a part thereof, as compared to a corresponding non-transformed wild type non-human organism or a part thereof; and
[5749] (b) growing the non-human organism or a part thereof under conditions which permit the production of arginine or a composition comprising arginine in said non-human organism or in the culture medium surrounding said non-human organism.

[5750] A further embodiment of the present invention relates to a process for the production of glutamate, which comprises
[5751] (a) increasing or generating one or more activities selected from the group consisting of protein phosphatase in an organelle, preferably in plastids or mitochondria, especially in plastids, of a non-human organism or a part thereof, preferably a microorganism, a plant cell, a plant or a part thereof, as compared to a corresponding non-transformed wild type non-human organism or a part thereof; and
[5752] (b) growing the non-human organism or a part thereof under conditions which permit the production of glutamate or a composition comprising glutamate in said non-human organism or in the culture medium surrounding said non-human organism.

[5753] A further embodiment of the present invention relates to a process for the production of glutamine, which comprises
[5754] (a) increasing or generating one or more activities selected from the group consisting of protein phosphatase in an organelle, preferably in plastids or mitochondria, especially in plastids, of a non-human organism or a part thereof, preferably a microorganism, a plant cell, a plant or a part thereof, as compared to a corresponding non-transformed wild type non-human organism or a part thereof; and
[5755] (b) growing the non-human organism or a part thereof under conditions which permit the production of glutamine or a composition comprising glutamine in said non-human organism or in the culture medium surrounding said non-human organism.

[5756] A further embodiment of the present invention relates to a process for the production of arginine, which comprises
[5757] (a) increasing or generating one or more activities selected from the group consisting of At1g17440-protein in an organelle, preferably in plastids or mitochondria, especially in plastids, of a non-human organism or a part thereof, preferably a microorganism, a plant cell, a plant or a part thereof, as compared to a corresponding non-transformed wild type non-human organism or a part thereof; and
[5758] (b) growing the non-human organism or a part thereof under conditions which permit the production of arginine or a composition comprising arginine in said non-human organism or in the culture medium surrounding said non-human organism.

[5759] A further embodiment of the present invention relates to a process for the production of glutamine, which comprises
[5760] (a) increasing or generating one or more activities selected from the group consisting of At1g19800-protein in an organelle, preferably in plastids or mitochondria, especially in plastids, of a non-human organism or a part thereof, preferably a microorganism, a plant cell, a plant or a part thereof, as compared to a corresponding non-transformed wild type non-human organism or a part thereof; and
[5761] (b) growing the non-human organism or a part thereof under conditions which permit the production of glutamine or a composition comprising glutamine in said non-human organism or in the culture medium surrounding said non-human organism.

[5762] A further embodiment of the present invention relates to a process for the production of arginine, which comprises
[5763] (a) increasing or generating one or more activities selected from the group consisting of cullin in an organelle, preferably in plastids or mitochondria, especially in plastids, of a non-human organism or a part thereof, preferably a microorganism, a plant cell, a plant or a part thereof, as compared to a corresponding non-transformed wild type non-human organism or a part thereof; and
[5764] (b) growing the non-human organism or a part thereof under conditions which permit the production of arginine or a composition comprising arginine in said non-human organism or in the culture medium surrounding said non-human organism.

[5765] A further embodiment of the present invention relates to a process for the production of proline, which comprises
[5766] (a) increasing or generating one or more activities selected from the group consisting of cullin in an organelle, preferably in plastids or mitochondria, especially in plastids, of a non-human organism or a part thereof, preferably a microorganism, a plant cell, a plant or a part thereof, as compared to a corresponding non-transformed wild type non-human organism or a part thereof; and
[5767] (b) growing the non-human organism or a part thereof under conditions which permit the production of proline or a composition comprising proline in said non-human organism or in the culture medium surrounding said non-human organism.

[5768] A further embodiment of the present invention relates to a process for the production of arginine, which comprises
[5769] (a) increasing or generating one or more activities selected from the group consisting of At1g29350-protein in an organelle, preferably in plastids or mitochondria, especially in plastids, of a non-human organism or a part thereof, preferably a microorganism, a plant cell, a plant or a part thereof, as compared to a corresponding non-transformed wild type non-human organism or a part thereof; and
[5770] (b) growing the non-human organism or a part thereof under conditions which permit the production of arginine or a composition comprising arginine in said non-human organism or in the culture medium surrounding said non-human organism.

[5771] A further embodiment of the present invention relates to a process for the production of arginine, which comprises
[5772] (a) increasing or generating one or more activities selected from the group consisting of eukaryotic translation initiation factor 5 in an organelle, preferably in plastids or mitochondria, especially in plastids, of a non-human organism or a part thereof, preferably a microorganism, a plant cell, a plant or a part thereof, as compared to a corresponding non-transformed wild type non-human organism or a part thereof; and
[5773] (b) growing the non-human organism or a part thereof under conditions which permit the production of arginine or a composition comprising arginine in said non-human organism or in the culture medium surrounding said non-human organism.

[5774] A further embodiment of the present invention relates to a process for the production of glutamine, which comprises
[5775] (a) increasing or generating one or more activities selected from the group consisting of eukaryotic translation initiation factor 5 in an organelle, preferably in plastids or mitochondria, especially in plastids, of a non-human organism or a part thereof, preferably a microorganism, a plant cell, a plant or a part thereof, as compared to a corresponding non-transformed wild type non-human organism or a part thereof; and
[5776] (b) growing the non-human organism or a part thereof under conditions which permit the production of glutamine or a composition comprising glutamine in said non-human organism or in the culture medium surrounding said non-human organism.

[5777] A further embodiment of the present invention relates to a process for the production of arginine, which comprises
[5778] (a) increasing or generating one or more activities selected from the group consisting of transcriptional regulator in an organelle, preferably in plastids or mitochondria, especially in plastids, of a non-human organism or a part thereof, preferably a microorganism, a plant cell, a plant or a part thereof, as compared to a corresponding non-transformed wild type non-human organism or a part thereof; and
[5779] (b) growing the non-human organism or a part thereof under conditions which permit the production of arginine or a composition comprising arginine in said non-human organism or in the culture medium surrounding said non-human organism.

[5780] A further embodiment of the present invention relates to a process for the production of glutamate, which comprises
[5781] (a) increasing or generating one or more activities selected from the group consisting of transcriptional regulator in an organelle, preferably in plastids or mitochondria, especially in plastids, of a non-human organism or a part thereof, preferably a microorganism, a plant cell, a plant or a part thereof, as compared to a corresponding non-transformed wild type non-human organism or a part thereof; and
[5782] (b) growing the non-human organism or a part thereof under conditions which permit the production of glutamate or a composition comprising glutamate in said non-human organism or in the culture medium surrounding said non-human organism.

[5783] A further embodiment of the present invention relates to a process for the production of glutamine, which comprises
[5784] (a) increasing or generating one or more activities selected from the group consisting of transcriptional regulator in an organelle, preferably in plastids or mitochondria, especially in plastids, of a non-human organism or a part thereof, preferably a microorganism, a plant cell, a plant or a part thereof, as compared to a corresponding non-transformed wild type non-human organism or a part thereof; and
[5785] (b) growing the non-human organism or a part thereof under conditions which permit the production of glutamine or a composition comprising glutamine in said non-human organism or in the culture medium surrounding said non-human organism.

[5786] A further embodiment of the present invention relates to a process for the production of proline, which comprises
[5787] (a) increasing or generating one or more activities selected from the group consisting of transcriptional regulator in an organelle, preferably in plastids or mitochondria, especially in plastids, of a non-human organism or a part thereof, preferably a microorganism, a plant cell, a plant or a part thereof, as compared to a corresponding non-transformed wild type non-human organism or a part thereof; and
[5788] (b) growing the non-human organism or a part thereof under conditions which permit the production of proline or a composition comprising proline in said non-human organism or in the culture medium surrounding said non-human organism.

[5789] A further embodiment of the present invention relates to a process for the production of proline, which comprises
[5790] (a) increasing or generating one or more activities selected from the group consisting of At1g47380-protein in an organelle, preferably in plastids or mitochondria, especially in plastids, of a non-human organism or a part thereof, preferably a microorganism, a plant cell, a plant or a part thereof, as compared to a corresponding non-transformed wild type non-human organism or a part thereof; and
[5791] (b) growing the non-human organism or a part thereof under conditions which permit the production of proline or a composition comprising proline in said non-human organism or in the culture medium surrounding said non-human organism.

[5792] A further embodiment of the present invention relates to a process for the production of arginine, which comprises
[5793] (a) increasing or generating one or more activities selected from the group consisting of protein kinase in an organelle, preferably in plastids or mitochondria, especially in plastids, of a non-human organism or a part thereof, preferably a microorganism, a plant cell, a plant or a part thereof, as compared to a corresponding non-transformed wild type non-human organism or a part thereof; and
[5794] (b) growing the non-human organism or a part thereof under conditions which permit the production of arginine or a composition comprising arginine in said non-human organism or in the culture medium surrounding said non-human organism.

[5795] A further embodiment of the present invention relates to a process for the production of glutamate, which comprises
[5796] (a) increasing or generating one or more activities selected from the group consisting of protein kinase in an organelle, preferably in plastids or mitochondria, especially in plastids, of a non-human organism or a part thereof, preferably a microorganism, a plant cell, a plant or a part thereof, as compared to a corresponding non-transformed wild type non-human organism or a part thereof; and
[5797] (b) growing the non-human organism or a part thereof under conditions which permit the production of glutamate or a composition comprising glutamate in said non-human organism or in the culture medium surrounding said non-human organism.

[5798] A further embodiment of the present invention relates to a process for the production of proline, which comprises
[5799] (a) increasing or generating one or more activities selected from the group consisting of protein kinase in an organelle, preferably in plastids or mitochondria, especially in plastids, of a non-human organism or a part thereof, preferably a microorganism, a plant cell, a plant or a part thereof, as compared to a corresponding non-transformed wild type non-human organism or a part thereof; and
[5800] (b) growing the non-human organism or a part thereof under conditions which permit the production of proline or a composition comprising proline in said non-human organism or in the culture medium surrounding said non-human organism.

[5801] A further embodiment of the present invention relates to a process for the production of arginine, which comprises
[5802] (a) increasing or generating one or more activities selected from the group consisting of calcium-dependent protein kinase in an organelle, preferably in plastids or mitochondria, especially in plastids, of a non-human organism or a part thereof, preferably a microorganism, a plant cell, a plant or a part thereof, as compared to a corresponding non-transformed wild type non-human organism or a part thereof; and
[5803] (b) growing the non-human organism or a part thereof under conditions which permit the production of arginine or a composition comprising arginine in said non-human organism or in the culture medium surrounding said non-human organism.

[5804] A further embodiment of the present invention relates to a process for the production of glutamine, which comprises
[5805] (a) increasing or generating one or more activities selected from the group consisting of calcium-dependent protein kinase in an organelle, preferably in plastids or mitochondria, especially in plastids, of a non-human organism or a part thereof, preferably a microorganism, a plant cell, a plant or a part thereof, as compared to a corresponding non-transformed wild type non-human organism or a part thereof; and
[5806] (b) growing the non-human organism or a part thereof under conditions which permit the production of glutamine or a composition comprising glutamine in said non-human organism or in the culture medium surrounding said non-human organism.

[5807] A further embodiment of the present invention relates to a process for the production of proline, which comprises
[5808] (a) increasing or generating one or more activities selected from the group consisting of At1g67340-protein in an organelle, preferably in plastids or mitochondria, especially in plastids, of a non-human organism or a part thereof, preferably a microorganism, a plant cell, a plant or a part thereof, as compared to a corresponding non-transformed wild type non-human organism or a part thereof; and
[5809] (b) growing the non-human organism or a part thereof under conditions which permit the production of proline or a composition comprising proline in said non-human organism or in the culture medium surrounding said non-human organism.

[5810] A further embodiment of the present invention relates to a process for the production of glutamine, which comprises
[5811] (a) increasing or generating one or more activities selected from the group consisting of transcription factor in an organelle, preferably in plastids or mitochondria, especially in plastids, of a non-human organism or a part thereof, preferably a microorganism, a plant cell, a plant or a part thereof, as compared to a corresponding non-transformed wild type non-human organism or a part thereof; and
[5812] (b) growing the non-human organism or a part thereof under conditions which permit the production of glutamine or a composition comprising glutamine in said non-human organism or in the culture medium surrounding said non-human organism.

[5813] A further embodiment of the present invention relates to a process for the production of glutamine, which comprises
[5814] (a) increasing or generating one or more activities selected from the group consisting of protein phosphatase in an organelle, preferably in plastids or mitochondria, especially in plastids, of a non-human organism or a part thereof, preferably a microorganism, a plant cell, a plant or a part thereof, as compared to a corresponding non-transformed wild type non-human organism or a part thereof; and
[5815] (b) growing the non-human organism or a part thereof under conditions which permit the production of glutamine or a composition comprising glutamine in said non-human organism or in the culture medium surrounding said non-human organism.

[5816] A further embodiment of the present invention relates to a process for the production of proline, which comprises
[5817] (a) increasing or generating one or more activities selected from the group consisting of transcription factor in an organelle, preferably in plastids or mitochondria, especially in plastids, of a non-human organism or a part thereof, preferably a microorganism, a plant cell, a plant or a part thereof, as compared to a corresponding non-transformed wild type non-human organism or a part thereof; and
[5818] (b) growing the non-human organism or a part thereof under conditions which permit the production of proline or a composition comprising proline in said non-human organism or in the culture medium surrounding said non-human organism.

[5819] A further embodiment of the present invention relates to a process for the production of glutamate, which comprises
[5820] (a) increasing or generating one or more activities selected from the group consisting of protein phosphatase in an organelle, preferably in plastids or mitochondria, especially in plastids, of a non-human organism or a part thereof, preferably a microorganism, a plant cell, a plant or a part thereof, as compared to a corresponding non-transformed wild type non-human organism or a part thereof; and
[5821] (b) growing the non-human organism or a part thereof under conditions which permit the production of glutamate or a composition comprising glutamate in said non-human organism or in the culture medium surrounding said non-human organism.

[5822] A further embodiment of the present invention relates to a process for the production of glutamine, which comprises
[5823] (a) increasing or generating one or more activities selected from the group consisting of protein phosphatase in an organelle, preferably in plastids or mitochondria, especially in plastids, of a non-human organism or a part thereof, preferably a microorganism, a plant cell, a plant or a part thereof, as compared to a corresponding non-transformed wild type non-human organism or a part thereof; and
[5824] (b) growing the non-human organism or a part thereof under conditions which permit the production of glutamine or a composition comprising glutamine in said non-human organism or in the culture medium surrounding said non-human organism.

[5825] A further embodiment of the present invention relates to a process for the production of proline, which comprises
[5826] (a) increasing or generating one or more activities selected from the group consisting of serine protease inhibitor in an organelle, preferably in plastids or mitochondria, especially in plastids, of a non-human organism or a part thereof, preferably a microorganism, a plant cell, a plant or a part thereof, as compared to a corresponding non-transformed wild type non-human organism or a part thereof; and
[5827] (b) growing the non-human organism or a part thereof under conditions which permit the production of proline or a composition comprising proline in said non-human organism or in the culture medium surrounding said non-human organism.

[5828] A further embodiment of the present invention relates to a process for the production of proline, which comprises
[5829] (a) increasing or generating one or more activities selected from the group consisting of protein phosphatase in an organelle, preferably in plastids or mitochondria, especially in plastids, of a non-human organism or a part thereof, preferably a microorganism, a plant cell, a plant or a part thereof, as compared to a corresponding non-transformed wild type non-human organism or a part thereof; and
[5830] (b) growing the non-human organism or a part thereof under conditions which permit the production of proline or a composition comprising proline in said non-human organism or in the culture medium surrounding said non-human organism.

[5831] A further embodiment of the present invention relates to a process for the production of glutamine, which comprises
[5832] (a) increasing or generating one or more activities selected from the group consisting of CBL-interacting protein kinase in an organelle, preferably in plastids or mitochondria, especially in plastids, of a non-human organism or a part thereof, preferably a microorganism, a plant cell, a plant or a part thereof, as compared to a corresponding non-transformed wild type non-human organism or a part thereof; and
[5833] (b) growing the non-human organism or a part thereof under conditions which permit the production of glutamine or a composition comprising glutamine in said non-human organism or in the culture medium surrounding said non-human organism.

[5834] A further embodiment of the present invention relates to a process for the production of proline, which comprises
[5835] (a) increasing or generating one or more activities selected from the group consisting of CBL-interacting protein kinase in an organelle, preferably in plastids or mitochondria, especially in plastids, of a non-human organism or a part thereof, preferably a microorganism, a plant cell, a plant or a part thereof, as compared to a corresponding non-transformed wild type non-human organism or a part thereof; and
[5836] (b) growing the non-human organism or a part thereof under conditions which permit the production of proline or a composition comprising proline in said non-human organism or in the culture medium surrounding said non-human organism.

[5837] A further embodiment of the present invention relates to a process for the production of arginine, which comprises
[5838] (a) increasing or generating one or more activities selected from the group consisting of glutaredoxin in an organelle, preferably in plastids or mitochondria, especially in plastids, of a non-human organism or a part thereof, preferably a microorganism, a plant cell, a plant or a part thereof, as compared to a corresponding non-transformed wild type non-human organism or a part thereof; and
[5839] (b) growing the non-human organism or a part thereof under conditions which permit the production of arginine or a composition comprising arginine in said non-human organism or in the culture medium surrounding said non-human organism.

[5840] A further embodiment of the present invention relates to a process for the production of proline, which comprises
[5841] (a) increasing or generating one or more activities selected from the group consisting of glutaredoxin in an organelle, preferably in plastids or mitochondria, especially in plastids, of a non-human organism or a part thereof, preferably a microorganism, a plant cell, a plant or a part thereof, as compared to a corresponding non-transformed wild type non-human organism or a part thereof; and
[5842] (b) growing the non-human organism or a part thereof under conditions which permit the production of proline or a composition comprising proline in said non-human organism or in the culture medium surrounding said non-human organism.

[5843] A further embodiment of the present invention relates to a process for the production of proline, which comprises
[5844] (a) increasing or generating one or more activities selected from the group consisting of CBL-interacting protein kinase in an organelle, preferably in plastids or mitochondria, especially in plastids, of a non-human organism or a part thereof, preferably a microorganism, a plant cell, a plant or a part thereof, as compared to a corresponding non-transformed wild type non-human organism or a part thereof; and
[5845] (b) growing the non-human organism or a part thereof under conditions which permit the production of proline or a composition comprising proline in said non-human organism or in the culture medium surrounding said non-human organism.

[5846] A further embodiment of the present invention relates to a process for the production of proline, which comprises
[5847] (a) increasing or generating one or more activities selected from the group consisting of delta-1-pyrroline 5-carboxylase synthetase in an organelle, preferably in plastids or mitochondria, especially in plastids, of a non-human organism or a part thereof, preferably a microorganism, a plant cell, a plant or a part thereof, as compared to a corresponding non-transformed wild type non-human organism or a part thereof; and
[5848] (b) growing the non-human organism or a part thereof under conditions which permit the production of proline or a composition comprising proline in said non-human organism or in the culture medium surrounding said non-human organism.

[5849] A further embodiment of the present invention relates to a process for the production of glutamine, which comprises
[5850] (a) increasing or generating one or more activities selected from the group consisting of phosphatidylinositol 3- and 4-kinase family protein in an organelle, preferably in plastids or mitochondria, especially in plastids, of a non-human organism or a part thereof, preferably a microorganism, a plant cell, a plant or a part thereof, as compared to a corresponding non-transformed wild type non-human organism or a part thereof; and
[5851] (b) growing the non-human organism or a part thereof under conditions which permit the production of glutamine or a composition comprising glutamine in said non-human organism or in the culture medium surrounding said non-human organism.

[5852] A further embodiment of the present invention relates to a process for the production of arginine, which comprises
[5853] (a) increasing or generating one or more activities selected from the group consisting of glutaredoxin in an organelle, preferably in plastids or mitochondria, especially in plastids, of a non-human organism or a part thereof, preferably a microorganism, a plant cell, a plant or a part thereof, as compared to a corresponding non-transformed wild type non-human organism or a part thereof; and
[5854] (b) growing the non-human organism or a part thereof under conditions which permit the production of arginine or a composition comprising arginine in said non-human organism or in the culture medium surrounding said non-human organism.

[5855] A further embodiment of the present invention relates to a process for the production of glutamine, which comprises
[5856] (a) increasing or generating one or more activities selected from the group consisting of glutaredoxin in an organelle, preferably in plastids or mitochondria, especially in plastids, of a non-human organism or a part thereof, preferably a microorganism, a plant cell, a plant or a part thereof, as compared to a corresponding non-transformed wild type non-human organism or a part thereof; and
[5857] (b) growing the non-human organism or a part thereof under conditions which permit the production of glutamine or a composition comprising glutamine in said non-human organism or in the culture medium surrounding said non-human organism.

[5858] A further embodiment of the present invention relates to a process for the production of proline, which comprises
[5859] (a) increasing or generating one or more activities selected from the group consisting of glutaredoxin in an organelle, preferably in plastids or mitochondria, especially in plastids, of a non-human organism or a part thereof, preferably a microorganism, a plant cell, a plant or a part thereof, as compared to a corresponding non-transformed wild type non-human organism or a part thereof; and
[5860] (b) growing the non-human organism or a part thereof under conditions which permit the production of proline or a composition comprising proline in said non-human organism or in the culture medium surrounding said non-human organism.

[5861] A further embodiment of the present invention relates to a process for the production of glutamate, which comprises
[5862] (a) increasing or generating one or more activities selected from the group consisting of pyruvate kinase in an organelle, preferably in plastids or mitochondria, especially in plastids, of a non-human organism or a part thereof, preferably a microorganism, a plant cell, a plant or a part thereof, as compared to a corresponding non-transformed wild type non-human organism or a part thereof; and
[5863] (b) growing the non-human organism or a part thereof under conditions which permit the production of glutamate or a composition comprising glutamate in said non-human organism or in the culture medium surrounding said non-human organism.

[5864] A further embodiment of the present invention relates to a process for the production of proline, which comprises
[5865] (a) increasing or generating one or more activities selected from the group consisting of pyruvate kinase in an organelle, preferably in plastids or mitochondria, especially in plastids, of a non-human organism or a part thereof, preferably a microorganism, a plant cell, a plant or a part thereof, as compared to a corresponding non-transformed wild type non-human organism or a part thereof; and
[5866] (b) growing the non-human organism or a part thereof under conditions which permit the production of proline or a composition comprising proline in said non-human organism or in the culture medium surrounding said non-human organism.

[5867] A further embodiment of the present invention relates to a process for the production of proline, which comprises
[5868] (a) increasing or generating one or more activities selected from the group consisting of ankyrin repeat family protein in an organelle, preferably in plastids or mitochondria, especially in plastids, of a non-human organism or a part thereof, preferably a microorganism, a plant cell, a plant or a part thereof, as compared to a corresponding non-transformed wild type non-human organism or a part thereof; and
[5869] (b) growing the non-human organism or a part thereof under conditions which permit the production of proline or a composition comprising proline in said non-human organism or in the culture medium surrounding said non-human organism.

[5870] A further embodiment of the present invention relates to a process for the production of glutamate, which comprises
[5871] (a) increasing or generating one or more activities selected from the group consisting of protein phosphatase in an organelle, preferably in plastids or mitochondria, especially in plastids, of a non-human organism or a part thereof, preferably a microorganism, a plant cell, a plant or a part thereof, as compared to a corresponding non-transformed wild type non-human organism or a part thereof; and
[5872] (b) growing the non-human organism or a part thereof under conditions which permit the production of glutamate or a composition comprising glutamate in said non-human organism or in the culture medium surrounding said non-human organism.

[5873] A further embodiment of the present invention relates to a process for the production of arginine, which comprises
[5874] (a) increasing or generating one or more activities selected from the group consisting of thioredoxin family protein in an organelle, preferably in plastids or mitochondria, especially in plastids, of a non-human organism or a part thereof, preferably a microorganism, a plant cell, a plant or a part thereof, as compared to a corresponding non-transformed wild type non-human organism or a part thereof; and
[5875] (b) growing the non-human organism or a part thereof under conditions which permit the production of arginine or a composition comprising arginine in said non-human organism or in the culture medium surrounding said non-human organism.

[5876] A further embodiment of the present invention relates to a process for the production of glutamate, which comprises
[5877] (a) increasing or generating one or more activities selected from the group consisting of thioredoxin family protein in an organelle, preferably in plastids or mitochondria, especially in plastids, of a non-human organism or a part thereof, preferably a microorganism, a plant cell, a plant or a part thereof, as compared to a corresponding non-transformed wild type non-human organism or a part thereof; and
[5878] (b) growing the non-human organism or a part thereof under conditions which permit the production of glutamate or a composition comprising glutamate in said non-human organism or in the culture medium surrounding said non-human organism.

[5879] A further embodiment of the present invention relates to a process for the production of glutamine, which comprises
[5880] (a) increasing or generating one or more activities selected from the group consisting of thioredoxin family protein in an organelle, preferably in plastids or mitochondria, especially in plastids, of a non-human organism or a part thereof, preferably a microorganism, a plant cell, a plant or a part thereof, as compared to a corresponding non-transformed wild type non-human organism or a part thereof; and
[5881] (b) growing the non-human organism or a part thereof under conditions which permit the production of glutamine or a composition comprising glutamine in said non-human organism or in the culture medium surrounding said non-human organism.

[5882] A further embodiment of the present invention relates to a process for the production of proline, which comprises
[5883] (a) increasing or generating one or more activities selected from the group consisting of thioredoxin family protein in an organelle, preferably in plastids or mitochondria, especially in plastids, of a non-human organism or a part thereof, preferably a microorganism, a plant cell, a plant or a part thereof, as compared to a corresponding non-transformed wild type non-human organism or a part thereof; and
[5884] (b) growing the non-human organism or a part thereof under conditions which permit the production of proline or a composition comprising proline in said non-human organism or in the culture medium surrounding said non-human organism.

[5885] A further embodiment of the present invention relates to a process for the production of arginine, which comprises
[5886] (a) increasing or generating one or more activities selected from the group consisting of harpin-induced family protein in an organelle, preferably in plastids or mitochondria, especially in plastids, of a non-human organism or a part thereof, preferably a microorganism, a plant cell, a plant or a part thereof, as compared to a corresponding non-transformed wild type non-human organism or a part thereof; and
[5887] (b) growing the non-human organism or a part thereof under conditions which permit the production of arginine or a composition comprising arginine in said non-human organism or in the culture medium surrounding said non-human organism.

[5888] A further embodiment of the present invention relates to a process for the production of glutamine, which comprises
[5889] (a) increasing or generating one or more activities selected from the group consisting of harpin-induced family protein in an organelle, preferably in plastids or mitochondria, especially in plastids, of a non-human organism or a part thereof, preferably a microorganism, a plant cell, a plant or a part thereof, as compared to a corresponding non-transformed wild type non-human organism or a part thereof; and
[5890] (b) growing the non-human organism or a part thereof under conditions which permit the production of glutamine or a composition comprising glutamine in said non-human organism or in the culture medium surrounding said non-human organism.

[5891] A further embodiment of the present invention relates to a process for the production of proline, which comprises
[5892] (a) increasing or generating one or more activities selected from the group consisting of harpin-induced family protein in an organelle, preferably in plastids or mitochondria, especially in plastids, of a non-human organism or a part thereof, preferably a microorganism, a plant cell, a plant or a part thereof, as compared to a corresponding non-transformed wild type non-human organism or a part thereof; and
[5893] (b) growing the non-human organism or a part thereof under conditions which permit the production of proline or a composition comprising proline in said non-human organism or in the culture medium surrounding said non-human organism.

[5894] A further embodiment of the present invention relates to a process for the production of proline, which comprises
[5895] (a) increasing or generating one or more activities selected from the group consisting of DNA binding protein in an organelle, preferably in plastids or mitochondria, especially in plastids, of a non-human organism or a part thereof, preferably a microorganism, a plant cell, a plant or a part thereof, as compared to a corresponding non-transformed wild type non-human organism or a part thereof; and
[5896] (b) growing the non-human organism or a part thereof under conditions which permit the production of proline or a composition comprising proline in said non-human organism or in the culture medium surrounding said non-human organism.

[5897] A further embodiment of the present invention relates to a process for the production of proline, which comprises
[5898] (a) increasing or generating one or more activities selected from the group consisting of DNA mismatch repair protein in an organelle, preferably in plastids or mitochondria, especially in plastids, of a non-human organism or a part thereof, preferably a microorganism, a plant cell, a plant or a part thereof, as compared to a corresponding non-transformed wild type non-human organism or a part thereof; and
[5899] (b) growing the non-human organism or a part thereof under conditions which permit the production of proline or a composition comprising proline in said non-human organism or in the culture medium surrounding said non-human organism.

[5900] A further embodiment of the present invention relates to a process for the production of proline, which comprises
[5901] (a) increasing or generating one or more activities selected from the group consisting of CCAAT-binding transcription factor in an organelle, preferably in plastids or mitochondria, especially in plastids, of a non-human organism or a part thereof, preferably a microorganism, a plant cell, a plant or a part thereof, as compared to a corresponding non-transformed wild type non-human organism or a part thereof; and
[5902] (b) growing the non-human organism or a part thereof under conditions which permit the production of proline or a composition comprising proline in said non-human organism or in the culture medium surrounding said non-human organism.

[5903] A further embodiment of the present invention relates to a process for the production of glutamine, which comprises
[5904] (a) increasing or generating one or more activities selected from the group consisting of protein kinase in an organelle, preferably in plastids or mitochondria, especially in plastids, of a non-human organism or a part thereof, preferably a microorganism, a plant cell, a plant or a part thereof, as compared to a corresponding non-transformed wild type non-human organism or a part thereof; and
[5905] (b) growing the non-human organism or a part thereof under conditions which permit the production of glutamine or a composition comprising glutamine in said non-human organism or in the culture medium surrounding said non-human organism.

[5906] A further embodiment of the present invention relates to a process for the production of proline, which comprises
[5907] (a) increasing or generating one or more activities selected from the group consisting of glucose-6-phosphate 1-dehydrogenase in an organelle, preferably in plastids or mitochondria, especially in plastids, of a non-human organism or a part thereof, preferably a microorganism, a plant cell, a plant or a part thereof, as compared to a corresponding non-transformed wild type non-human organism or a part thereof; and
[5908] (b) growing the non-human organism or a part thereof under conditions which permit the production of proline or a composition comprising proline in said non-human organism or in the culture medium surrounding said non-human organism.

[5909] A further embodiment of the present invention relates to a process for the production of glutamate, which comprises
[5910] (a) increasing or generating one or more activities selected from the group consisting of monthiol glutaredoxin in an organelle, preferably in plastids or mitochondria, especially in plastids, of a non-human organism or a part thereof, preferably a microorganism, a plant cell, a plant or a part thereof, as compared to a corresponding non-transformed wild type non-human organism or a part thereof; and
[5911] (b) growing the non-human organism or a part thereof under conditions which permit the production of glutamate or a composition comprising glutamate in said non-human organism or in the culture medium surrounding said non-human organism.

[5912] A further embodiment of the present invention relates to a process for the production of glutamine, which comprises
[5913] (a) increasing or generating one or more activities selected from the group consisting of monthiol glutaredoxin in an organelle, preferably in plastids or mitochondria, especially in plastids, of a non-human organism or a part thereof, preferably a microorganism, a plant cell, a plant or a part thereof, as compared to a corresponding non-transformed wild type non-human organism or a part thereof; and
[5914] (b) growing the non-human organism or a part thereof under conditions which permit the production of glutamine or a composition comprising glutamine in said non-human organism or in the culture medium surrounding said non-human organism.

[5915] A further embodiment of the present invention relates to a process for the production of glutamate, which comprises
[5916] (a) increasing or generating one or more activities selected from the group consisting of glutaredoxin in an organelle, preferably in plastids or mitochondria, especially in plastids, of a non-human organism or a part thereof, preferably a microorganism, a plant cell, a plant or a part thereof, as compared to a corresponding non-transformed wild type non-human organism or a part thereof; and
[5917] (b) growing the non-human organism or a part thereof under conditions which permit the production of glutamate or a composition comprising glutamate in said non-human organism or in the culture medium surrounding said non-human organism.

[5918] A further embodiment of the present invention relates to a process for the production of glutamine, which comprises
[5919] (a) increasing or generating one or more activities selected from the group consisting of glutaredoxin in an organelle, preferably in plastids or mitochondria, especially in plastids, of a non-human organism or a part thereof, preferably a microorganism, a plant cell, a plant or a part thereof, as compared to a corresponding non-transformed wild type non-human organism or a part thereof; and
[5920] (b) growing the non-human organism or a part thereof under conditions which permit the production of glutamine or a composition comprising glutamine in said non-human organism or in the culture medium surrounding said non-human organism.

[5921] A further embodiment of the present invention relates to a process for the production of glutamate, which comprises
[5922] (a) increasing or generating one or more activities selected from the group consisting of monothiol glutaredoxin in an organelle, preferably in plastids or mitochondria, especially in plastids, of a non-human organism or a part thereof, preferably a microorganism, a plant cell, a plant or a part thereof, as compared to a corresponding non-transformed wild type non-human organism or a part thereof; and
[5923] (b) growing the non-human organism or a part thereof under conditions which permit the production of glutamate or a composition comprising glutamate in said non-human organism or in the culture medium surrounding said non-human organism.

[5924] A further embodiment of the present invention relates to a process for the production of glutamine, which comprises
[5925] (a) increasing or generating one or more activities selected from the group consisting of monothiol glutaredoxin in an organelle, preferably in plastids or mitochondria, especially in plastids, of a non-human organism or a part thereof, preferably a microorganism, a plant cell, a plant or a part thereof, as compared to a corresponding non-transformed wild type non-human organism or a part thereof; and
[5926] (b) growing the non-human organism or a part thereof under conditions which permit the production of glutamine or a composition comprising glutamine in said non-human organism or in the culture medium surrounding said non-human organism.

[5927] A further embodiment of the present invention relates to a process for the production of glutamate, which comprises
[5928] (a) increasing or generating one or more activities selected from the group consisting of monothiol glutaredoxin in an organelle, preferably in plastids or mitochondria, especially in plastids, of a non-human organism or a part thereof, preferably a microorganism, a plant cell, a plant or a part thereof, as compared to a corresponding non-transformed wild type non-human organism or a part thereof; and
[5929] (b) growing the non-human organism or a part thereof under conditions which permit the production of glutamate or a composition comprising glutamate in said non-human organism or in the culture medium surrounding said non-human organism.

[5930] A further embodiment of the present invention relates to a process for the production of glutamate, which comprises
[5931] (a) increasing or generating one or more activities selected from the group consisting of monothiol glutaredoxin in an organelle, preferably in plastids or mitochondria, especially in plastids, of a non-human organism or a part thereof, preferably a microorganism, a plant cell, a plant or a part thereof, as compared to a corresponding non-transformed wild type non-human organism or a part thereof; and
[5932] (b) growing the non-human organism or a part thereof under conditions which permit the production of glutamate or a composition comprising glutamate in said non-human organism or in the culture medium surrounding said non-human organism.

[5933] A further embodiment of the present invention relates to a process for the production of glutamine, which comprises
[5934] (a) increasing or generating one or more activities selected from the group consisting of monothiol glutaredoxin in an organelle, preferably in plastids or mitochondria, especially in plastids, of a non-human organism or a part thereof, preferably a microorganism, a plant cell, a plant or a part thereof, as compared to a corresponding non-transformed wild type non-human organism or a part thereof; and
[5935] (b) growing the non-human organism or a part thereof under conditions which permit the production of glutamine or a composition comprising glutamine in said non-human organism or in the culture medium surrounding said non-human organism.

[5936] A further embodiment of the present invention relates to a process for the production of proline, which comprises
[5937] (a) increasing or generating one or more activities selected from the group consisting of monothiol glutaredoxin in an organelle, preferably in plastids or mitochondria, especially in plastids, of a non-human organism or a part thereof, preferably a microorganism, a plant cell, a plant or a part thereof, as compared to a corresponding non-transformed wild type non-human organism or a part thereof; and
[5938] (b) growing the non-human organism or a part thereof under conditions which permit the production of proline or a composition comprising proline in said non-human organism or in the culture medium surrounding said non-human organism.

[5939] A further embodiment of the present invention relates to a process for the production of glutamine, which comprises
[5940] (a) increasing or generating one or more activities selected from the group consisting of monothiol glutaredoxin in an organelle, preferably in plastids or mitochondria, especially in plastids, of a non-human organism or a part thereof, preferably a microorganism, a plant cell, a plant or a part thereof, as compared to a corresponding non-transformed wild type non-human organism or a part thereof; and
[5941] (b) growing the non-human organism or a part thereof under conditions which permit the production of glutamine or a composition comprising glutamine in said non-human organism or in the culture medium surrounding said non-human organism.

[5942] A further embodiment of the present invention relates to a process for the production of proline, which comprises
[5943] (a) increasing or generating one or more activities selected from the group consisting of heat shock transcription factor in an organelle, preferably in plastids or mitochondria, especially in plastids, of a non-human organism or a part thereof, preferably a microorganism, a plant cell, a plant or a part thereof, as compared to a corresponding non-transformed wild type non-human organism or a part thereof; and
[5944] (b) growing the non-human organism or a part thereof under conditions which permit the production of proline or a composition comprising proline in said non-human organism or in the culture medium surrounding said non-human organism.

[5945] A further embodiment of the present invention relates to a process for the production of arginine, which comprises
[5946] (a) increasing or generating one or more activities selected from the group consisting of At4g32480-protein in an organelle, preferably in plastids or mitochondria, especially in plastids, of a non-human organism or a part thereof, preferably a microorganism, a plant cell, a plant or a part thereof, as compared to a corresponding non-transformed wild type non-human organism or a part thereof; and
[5947] (b) growing the non-human organism or a part thereof under conditions which permit the production of arginine or a composition comprising arginine in said non-human organism or in the culture medium surrounding said non-human organism.

[5948] A further embodiment of the present invention relates to a process for the production of glutamine, which comprises
[5949] (a) increasing or generating one or more activities selected from the group consisting of At4g32480-protein in an organelle, preferably in plastids or mitochondria, especially in plastids, of a non-human organism or a part thereof, preferably a microorganism, a plant cell, a plant or a part thereof, as compared to a corresponding non-transformed wild type non-human organism or a part thereof; and
[5950] (b) growing the non-human organism or a part thereof under conditions which permit the production of glutamine or a composition comprising glutamine in said non-human organism or in the culture medium surrounding said non-human organism.

[5951] A further embodiment of the present invention relates to a process for the production of proline, which comprises
[5952] (a) increasing or generating one or more activities selected from the group consisting of At4g32480-protein in an organelle, preferably in plastids or mitochondria, especially in plastids, of a non-human organism or a part thereof, preferably a microorganism, a plant cell, a plant or a part thereof, as compared to a corresponding non-transformed wild type non-human organism or a part thereof; and
[5953] (b) growing the non-human organism or a part thereof under conditions which permit the production of proline or a composition comprising proline in said non-human organism or in the culture medium surrounding said non-human organism.

[5954] A further embodiment of the present invention relates to a process for the production of glutamate, which comprises
[5955] (a) increasing or generating one or more activities selected from the group consisting of glutaredoxin in an organelle, preferably in plastids or mitochondria, especially in plastids, of a non-human organism or a part thereof, preferably a microorganism, a plant cell, a plant or a part thereof, as compared to a corresponding non-transformed wild type non-human organism or a part thereof; and
[5956] (b) growing the non-human organism or a part thereof under conditions which permit the production of glutamate or a composition comprising glutamate in said non-human organism or in the culture medium surrounding said non-human organism.

[5957] A further embodiment of the present invention relates to a process for the production of arginine, which comprises
[5958] (a) increasing or generating one or more activities selected from the group consisting of cyclin D in an organelle, preferably in plastids or mitochondria, especially in plastids, of a non-human organism or a part thereof, preferably a microorganism, a plant cell, a plant or a part thereof, as compared to a corresponding non-transformed wild type non-human organism or a part thereof; and
[5959] (b) growing the non-human organism or a part thereof under conditions which permit the production of arginine or a composition comprising arginine in said non-human organism or in the culture medium surrounding said non-human organism.

[5960] A further embodiment of the present invention relates to a process for the production of glutamine, which comprises
[5961] (a) increasing or generating one or more activities selected from the group consisting of cyclin D in an organelle, preferably in plastids or mitochondria, especially in plastids, of a non-human organism or a part thereof, preferably a microorganism, a plant cell, a plant or a part thereof, as compared to a corresponding non-transformed wild type non-human organism or a part thereof; and
[5962] (b) growing the non-human organism or a part thereof under conditions which permit the production of glutamine or a composition comprising glutamine in said non-human organism or in the culture medium surrounding said non-human organism.

[5963] A further embodiment of the present invention relates to a process for the production of proline, which comprises
[5964] (a) increasing or generating one or more activities selected from the group consisting of cyclin D in an organelle, preferably in plastids or mitochondria, especially in plastids, of a non-human organism or a part thereof, preferably a microorganism, a plant cell, a plant or a part thereof, as compared to a corresponding non-transformed wild type non-human organism or a part thereof; and
[5965] (b) growing the non-human organism or a part thereof under conditions which permit the production of proline or a composition comprising proline in said non-human organism or in the culture medium surrounding said non-human organism.

[5966] A further embodiment of the present invention relates to a process for the production of arginine, which comprises
[5967] (a) increasing or generating one or more activities selected from the group consisting of calcium-dependent protein kinase in an organelle, preferably in plastids or mitochondria, especially in plastids, of a non-human organism or a part thereof, preferably a microorganism, a plant cell, a plant or a part thereof, as compared to a corresponding non-transformed wild type non-human organism or a part thereof; and
[5968] (b) growing the non-human organism or a part thereof under conditions which permit the production of arginine or a composition comprising arginine in said non-human organism or in the culture medium surrounding said non-human organism.

[5969] A further embodiment of the present invention relates to a process for the production of proline, which comprises
[5970] (a) increasing or generating one or more activities selected from the group consisting of calcium-dependent protein kinase in an organelle, preferably in plastids or mitochondria, especially in plastids, of a non-human organism or a part thereof, preferably a microorganism, a plant cell, a plant or a part thereof, as compared to a corresponding non-transformed wild type non-human organism or a part thereof; and
[5971] (b) growing the non-human organism or a part thereof under conditions which permit the production of proline or a composition comprising proline in said non-human organism or in the culture medium surrounding said non-human organism.

[5972] A further embodiment of the present invention relates to a process for the production of glutamate, which comprises
[5973] (a) increasing or generating one or more activities selected from the group consisting of heat shock transcription factor in an organelle, preferably in plastids or mitochondria, especially in plastids, of a non-human organism or a part thereof, preferably a microorganism, a plant cell, a plant or a part thereof, as compared to a corresponding non-transformed wild type non-human organism or a part thereof; and
[5974] (b) growing the non-human organism or a part thereof under conditions which permit the production of glutamate or a composition comprising glutamate in said non-human organism or in the culture medium surrounding said non-human organism.

[5975] A further embodiment of the present invention relates to a process for the production of proline, which comprises
[5976] (a) increasing or generating one or more activities selected from the group consisting of gibberellin 20-oxidase in an organelle, preferably in plastids or mitochondria, especially in plastids, of a non-human organism or a part thereof, preferably a microorganism, a plant cell, a plant or a part thereof, as compared to a corresponding non-transformed wild type non-human organism or a part thereof; and
[5977] (b) growing the non-human organism or a part thereof under conditions which permit the production of proline or a composition comprising proline in said non-human organism or in the culture medium surrounding said non-human organism.

[5978] A further embodiment of the present invention relates to a process for the production of glutamate, which comprises
[5979] (a) increasing or generating one or more activities selected from the group consisting of integral membrane transporter family protein in an organelle, preferably in plastids or mitochondria, especially in plastids, of a non-human organism or a part thereof, preferably a microorganism, a plant cell, a plant or a part thereof, as compared to a corresponding non-transformed wild type non-human organism or a part thereof; and
[5980] (b) growing the non-human organism or a part thereof under conditions which permit the production of glutamate or a composition comprising glutamate in said non-human organism or in the culture medium surrounding said non-human organism.

[5981] A further embodiment of the present invention relates to a process for the production of glutamine, which comprises
[5982] (a) increasing or generating one or more activities selected from the group consisting of integral membrane transporter family protein in an organelle, preferably in plastids or mitochondria, especially in plastids, of a non-human organism or a part thereof, preferably a microorganism, a plant cell, a plant or a part thereof, as compared to a corresponding non-transformed wild type non-human organism or a part thereof; and
[5983] (b) growing the non-human organism or a part thereof under conditions which permit the production of glutamine or a composition comprising glutamine in said non-human organism or in the culture medium surrounding said non-human organism.

[5984] A further embodiment of the present invention relates to a process for the production of arginine, which comprises
[5985] (a) increasing or generating one or more activities selected from the group consisting of At5g16650-protein in an organelle, preferably in plastids or mitochondria, especially in plastids, of a non-human organism or a part thereof, preferably a microorganism, a plant cell, a plant or a part thereof, as compared to a corresponding non-transformed wild type non-human organism or a part thereof; and
[5986] (b) growing the non-human organism or a part thereof under conditions which permit the production of arginine or a composition comprising arginine in said non-human organism or in the culture medium surrounding said non-human organism.

[5987] A further embodiment of the present invention relates to a process for the production of glutamine, which comprises
[5988] (a) increasing or generating one or more activities selected from the group consisting of At5g16650-protein in an organelle, preferably in plastids or mitochondria, especially in plastids, of a non-human organism or a part thereof, preferably a microorganism, a plant cell, a plant or a part thereof, as compared to a corresponding non-transformed wild type non-human organism or a part thereof; and
[5989] (b) growing the non-human organism or a part thereof under conditions which permit the production of glutamine or a composition comprising glutamine in said non-human organism or in the culture medium surrounding said non-human organism.

[5990] A further embodiment of the present invention relates to a process for the production of proline, which comprises
[5991] (a) increasing or generating one or more activities selected from the group consisting of At5g16650-protein in an organelle, preferably in plastids or mitochondria, especially in plastids, of a non-human organism or a part thereof, preferably a microorganism, a plant cell, a plant or a part thereof, as compared to a corresponding non-transformed wild type non-human organism or a part thereof; and
[5992] (b) growing the non-human organism or a part thereof under conditions which permit the production of proline or a composition comprising proline in said non-human organism or in the culture medium surrounding said non-human organism.

[5993] A further embodiment of the present invention relates to a process for the production of glutamine, which comprises
[5994] (a) increasing or generating one or more activities selected from the group consisting of monothiol glutaredoxin in an organelle, preferably in plastids or mitochondria, especially in plastids, of a non-human organism or a part thereof, preferably a microorganism, a plant cell, a plant or a part thereof, as compared to a corresponding non-transformed wild type non-human organism or a part thereof; and
[5995] (b) growing the non-human organism or a part thereof under conditions which permit the production of glutamine or a composition comprising glutamine in said non-human organism or in the culture medium surrounding said non-human organism.

[5996] A further embodiment of the present invention relates to a process for the production of arginine, which comprises
[5997] (a) increasing or generating one or more activities selected from the group consisting of translation initiation factor subunit in an organelle, preferably in plastids or mitochondria, especially in plastids, of a non-human organism or a part thereof, preferably a microorganism, a plant cell, a plant or a part thereof, as compared to a corresponding non-transformed wild type non-human organism or a part thereof; and
[5998] (b) growing the non-human organism or a part thereof under conditions which permit the production of arginine or a composition comprising arginine in said non-human organism or in the culture medium surrounding said non-human organism.

[5999] A further embodiment of the present invention relates to a process for the production of glutamate, which comprises
[6000] (a) increasing or generating one or more activities selected from the group consisting of transcription factor in an organelle, preferably in plastids or mitochondria, especially in plastids, of a non-human organism or a part thereof, preferably a microorganism, a plant cell, a plant or a part thereof, as compared to a corresponding non-transformed wild type non-human organism or a part thereof; and
[6001] (b) growing the non-human organism or a part thereof under conditions which permit the production of glutamate or a composition comprising glutamate in said non-human organism or in the culture medium surrounding said non-human organism.

[6002] A further embodiment of the present invention relates to a process for the production of proline, which comprises
[6003] (a) increasing or generating one or more activities selected from the group consisting of transcription factor in an organelle, preferably in plastids or mitochondria, especially in plastids, of a non-human organism or a part thereof, preferably a microorganism, a plant cell, a plant or a part thereof, as compared to a corresponding non-transformed wild type non-human organism or a part thereof; and
[6004] (b) growing the non-human organism or a part thereof under conditions which permit the production of proline or a composition comprising proline in said non-human organism or in the culture medium surrounding said non-human organism.

[6005] A further embodiment of the present invention relates to a process for the production of glutamine, which comprises
[6006] (a) increasing or generating one or more activities selected from the group consisting of protein phosphatase in an organelle, preferably in plastids or mitochondria, especially in plastids, of a non-human organism or a part thereof, preferably a microorganism, a plant cell, a plant or a part thereof, as compared to a corresponding non-transformed wild type non-human organism or a part thereof; and
[6007] (b) growing the non-human organism or a part thereof under conditions which permit the production of glutamine or a composition comprising glutamine in said non-human organism or in the culture medium surrounding said non-human organism.

[6008] A further embodiment of the present invention relates to a process for the production of glutamine, which comprises
[6009] (a) increasing or generating one or more activities selected from the group consisting of protein phosphatase in an organelle, preferably in plastids or mitochondria, especially in plastids, of a non-human organism or a part thereof, preferably a microorganism, a plant cell, a plant or a part thereof, as compared to a corresponding non-transformed wild type non-human organism or a part thereof; and
[6010] (b) growing the non-human organism or a part thereof under conditions which permit the production of glutamine or a composition comprising glutamine in said non-human organism or in the culture medium surrounding said non-human organism.

[6011] A further embodiment of the present invention relates to a process for the production of arginine, which comprises
[6012] (a) increasing or generating one or more activities selected from the group consisting of zinc finger protein in an organelle, preferably in plastids or mitochondria, especially in plastids, of a non-human organism or a part thereof, preferably a microorganism, a plant cell, a plant or a part thereof, as compared to a corresponding non-transformed wild type non-human organism or a part thereof; and
[6013] (b) growing the non-human organism or a part thereof under conditions which permit the production of arginine or a composition comprising arginine in said non-human organism or in the culture medium surrounding said non-human organism.

[6014] A further embodiment of the present invention relates to a process for the production of glutamine, which comprises
[6015] (a) increasing or generating one or more activities selected from the group consisting of zinc finger protein in an organelle, preferably in plastids or mitochondria, especially in plastids, of a non-human organism or a part thereof, preferably a microorganism, a plant cell, a plant or a part thereof, as compared to a corresponding non-transformed wild type non-human organism or a part thereof; and
[6016] (b) growing the non-human organism or a part thereof under conditions which permit the production of glutamine or a composition comprising glutamine in said non-human organism or in the culture medium surrounding said non-human organism.

[6017] A further embodiment of the present invention relates to a process for the production of glutamate, which comprises
[6018] (a) increasing or generating one or more activities selected from the group consisting of transcriptional regulator in an organelle, preferably in plastids or mitochondria, especially in plastids, of a non-human organism or a part thereof, preferably a microorganism, a plant cell, a plant or a part thereof, as compared to a corresponding non-transformed wild type non-human organism or a part thereof; and
[6019] (b) growing the non-human organism or a part thereof under conditions which permit the production of glutamate or a composition comprising glutamate in said non-human organism or in the culture medium surrounding said non-human organism.

[6020] A further embodiment of the present invention relates to a process for the production of glutamate, which comprises
[6021] (a) increasing or generating one or more activities selected from the group consisting of adenylylsulfate kinase in an organelle, preferably in plastids or mitochondria, especially in plastids, of a non-human organism or a part thereof, preferably a microorganism, a plant cell, a plant or a part thereof, as compared to a corresponding non-transformed wild type non-human organism or a part thereof; and
[6022] (b) growing the non-human organism or a part thereof under conditions which permit the production of glutamate or a composition comprising glutamate in said non-human organism or in the culture medium surrounding said non-human organism.

[6023] A further embodiment of the present invention relates to a process for the production of glutamine, which comprises
[6024] (a) increasing or generating one or more activities selected from the group consisting of adenylylsulfate kinase in an organelle, preferably in plastids or mitochondria, especially in plastids, of a non-human organism or a part thereof, preferably a microorganism, a plant cell, a plant or a part thereof, as compared to a corresponding non-transformed wild type non-human organism or a part thereof; and
[6025] (b) growing the non-human organism or a part thereof under conditions which permit the production of glutamine or a composition comprising glutamine in said non-human organism or in the culture medium surrounding said non-human organism.

[6026] A further embodiment of the present invention relates to a process for the production of glutamine, which comprises
[6027] (a) increasing or generating one or more activities selected from the group consisting of malic enzyme in an organelle, preferably in plastids or mitochondria, especially in plastids, of a non-human organism or a part thereof, preferably a microorganism, a plant cell, a plant or a part thereof, as compared to a corresponding non-transformed wild type non-human organism or a part thereof; and
[6028] (b) growing the non-human organism or a part thereof under conditions which permit the production of glutamine or a composition comprising glutamine in said non-human organism or in the culture medium surrounding said non-human organism.

[6029] A further embodiment of the present invention relates to a process for the production of proline, which comprises
[6030] (a) increasing or generating one or more activities selected from the group consisting of malic enzyme in an organelle, preferably in plastids or mitochondria, especially in plastids, of a non-human organism or a part thereof, preferably a microorganism, a plant cell, a plant or a part thereof, as compared to a corresponding non-transformed wild type non-human organism or a part thereof; and
[6031] (b) growing the non-human organism or a part thereof under conditions which permit the production of proline or a composition comprising proline in said non-human organism or in the culture medium surrounding said non-human organism.

[6032] A further embodiment of the present invention relates to a process for the production of proline, which comprises
[6033] (a) increasing or generating one or more activities selected from the group consisting of glycosyl transferase in an organelle, preferably in plastids or mitochondria, especially in plastids, of a non-human organism or a part thereof, preferably a microorganism, a plant cell, a plant or a part thereof, as compared to a corresponding non-transformed wild type non-human organism or a part thereof; and
[6034] (b) growing the non-human organism or a part thereof under conditions which permit the production of proline or a composition comprising proline in said non-human organism or in the culture medium surrounding said non-human organism.

[6035] A further embodiment of the present invention relates to a process for the production of proline, which comprises
[6036] (a) increasing or generating one or more activities selected from the group consisting of sec-independent protein translocase in an organelle, preferably in plastids or mitochondria, especially in plastids, of a non-human organism or a part thereof, preferably a microorganism, a plant cell, a plant or a part thereof, as compared to a corresponding non-transformed wild type non-human organism or a part thereof; and
[6037] (b) growing the non-human organism or a part thereof under conditions which permit the production of proline or a composition comprising proline in said non-human organism or in the culture medium surrounding said non-human organism.

[6038] A further embodiment of the present invention relates to a process for the production of glutamate, which comprises
[6039] (a) increasing or generating one or more activities selected from the group consisting of pyruvate kinase in an organelle, preferably in plastids or mitochondria, especially in plastids, of a non-human organism or a part thereof, preferably a microorganism, a plant cell, a plant or a part thereof, as compared to a corresponding non-transformed wild type non-human organism or a part thereof; and
[6040] (b) growing the non-human organism or a part thereof under conditions which permit the production of glutamate or a composition comprising glutamate in said non-human organism or in the culture medium surrounding said non-human organism.

[6041] A further embodiment of the present invention relates to a process for the production of arginine, which comprises
[6042] (a) increasing or generating one or more activities selected from the group consisting of betahydroxylase in an organelle, preferably in plastids or mitochondria, especially in plastids, of a non-human organism or a part thereof, preferably a microorganism, a plant cell, a plant or a part thereof, as compared to a corresponding non-transformed wild type non-human organism or a part thereof; and
[6043] (b) growing the non-human organism or a part thereof under conditions which permit the production of arginine or a composition comprising arginine in said non-human organism or in the culture medium surrounding said non-human organism.

[6044] A further embodiment of the present invention relates to a process for the production of arginine, which comprises
[6045] (a) increasing or generating one or more activities selected from the group consisting of elongation factor Tu in an organelle, preferably in plastids or mitochondria, especially in plastids, of a non-human organism or a part thereof, preferably a microorganism, a plant cell, a plant or a part thereof, as compared to a corresponding non-transformed wild type non-human organism or a part thereof; and
[6046] (b) growing the non-human organism or a part thereof under conditions which permit the production of arginine or a composition comprising arginine in said non-human organism or in the culture medium surrounding said non-human organism.

[6047] A further embodiment of the present invention relates to a process for the production of glutamate, which comprises
[6048] (a) increasing or generating one or more activities selected from the group consisting of elongation factor Tu in an organelle, preferably in plastids or mitochondria, especially in plastids, of a non-human organism or a part thereof, preferably a microorganism, a plant cell, a plant or a part thereof, as compared to a corresponding non-transformed wild type non-human organism or a part thereof; and
[6049] (b) growing the non-human organism or a part thereof under conditions which permit the production of glutamate or a composition comprising glutamate in said non-human organism or in the culture medium surrounding said non-human organism.

[6050] A further embodiment of the present invention relates to a process for the production of glutamine, which comprises
[6051] (a) increasing or generating one or more activities selected from the group consisting of elongation factor Tu in an organelle, preferably in plastids or mitochondria, especially in plastids, of a non-human organism or a part thereof, preferably a microorganism, a plant cell, a plant or a part thereof, as compared to a corresponding non-transformed wild type non-human organism or a part thereof; and
[6052] (b) growing the non-human organism or a part thereof under conditions which permit the production of glutamine or a composition comprising glutamine in said non-human organism or in the culture medium surrounding said non-human organism.

[6053] A further embodiment of the present invention relates to a process for the production of glutamine, which comprises
[6054] (a) increasing or generating one or more activities selected from the group consisting of ABC transporter permease protein in an organelle, preferably in plastids or mitochondria, especially in plastids, of a non-human organism or a part thereof, preferably a microorganism, a plant cell, a plant or a part thereof, as compared to a corresponding non-transformed wild type non-human organism or a part thereof; and
[6055] (b) growing the non-human organism or a part thereof under conditions which permit the production of glutamine or a composition comprising glutamine in said non-human organism or in the culture medium surrounding said non-human organism.

[6056] A further embodiment of the present invention relates to a process for the production of proline, which comprises
[6057] (a) increasing or generating one or more activities selected from the group consisting of ABC transporter permease protein in an organelle, preferably in plastids or mitochondria, especially in plastids, of a non-human organism or a part thereof, preferably a microorganism, a plant cell, a plant or a part thereof, as compared to a corresponding non-transformed wild type non-human organism or a part thereof; and
[6058] (b) growing the non-human organism or a part thereof under conditions which permit the production of proline or a composition comprising proline in said non-human organism or in the culture medium surrounding said non-human organism.

[6059] A further embodiment of the present invention relates to a process for the production of arginine, which comprises
[6060] (a) increasing or generating one or more activities selected from the group consisting of acyl-CoA synthase in an organelle, preferably in plastids or mitochondria, especially in plastids, of a non-human organism or a part thereof, preferably a microorganism, a plant cell, a plant or a part thereof, as compared to a corresponding non-transformed wild type non-human organism or a part thereof; and
[6061] (b) growing the non-human organism or a part thereof under conditions which permit the production of arginine or a composition comprising arginine in said non-human organism or in the culture medium surrounding said non-human organism.

[6062] A further embodiment of the present invention relates to a process for the production of glutamate, which comprises
[6063] (a) increasing or generating one or more activities selected from the group consisting of acyl-CoA synthase in an organelle, preferably in plastids or mitochondria, especially in plastids, of a non-human organism or a part thereof, preferably a microorganism, a plant cell, a plant or a part thereof, as compared to a corresponding non-transformed wild type non-human organism or a part thereof; and
[6064] (b) growing the non-human organism or a part thereof under conditions which permit the production of glutamate or a composition comprising glutamate in said non-human organism or in the culture medium surrounding said non-human organism.

[6065] A further embodiment of the present invention relates to a process for the production of glutamine, which comprises
[6066] (a) increasing or generating one or more activities selected from the group consisting of acyl-CoA synthase in an organelle, preferably in plastids or mitochondria, especially in plastids, of a non-human organism or a part thereof, preferably a microorganism, a plant cell, a plant or a part thereof, as compared to a corresponding non-transformed wild type non-human organism or a part thereof; and
[6067] (b) growing the non-human organism or a part thereof under conditions which permit the production of glutamine or a composition comprising glutamine in said non-human organism or in the culture medium surrounding said non-human organism.

[6068] A further embodiment of the present invention relates to a process for the production of proline, which comprises
[6069] (a) increasing or generating one or more activities selected from the group consisting of acyl-CoA synthase in an organelle, preferably in plastids or mitochondria, especially in plastids, of a non-human organism or a part thereof, preferably a microorganism, a plant cell, a plant or a part thereof, as compared to a corresponding non-transformed wild type non-human organism or a part thereof; and
[6070] (b) growing the non-human organism or a part thereof under conditions which permit the production of proline or a composition comprising proline in said non-human organism or in the culture medium surrounding said non-human organism.

[6071] A further embodiment of the present invention relates to a process for the production of glutamate, which comprises
[6072] (a) increasing or generating one or more activities selected from the group consisting of 2-oxoglutarate dehydrogenase E1 subunit in an organelle, preferably in plastids or mitochondria, especially in plastids, of a non-human organism or a part thereof, preferably a microorganism, a plant cell, a plant or a part thereof, as compared to a corresponding non-transformed wild type non-human organism or a part thereof; and
[6073] (b) growing the non-human organism or a part thereof under conditions which permit the production of glutamate or a composition comprising glutamate in said non-human organism or in the culture medium surrounding said non-human organism.

[6074] A further embodiment of the present invention relates to a process for the production of arginine, which comprises
[6075] (a) increasing or generating one or more activities selected from the group consisting of enoyl-CoA hydratase in an organelle, preferably in plastids or mitochondria, especially in plastids, of a non-human organism or a part thereof, preferably a microorganism, a plant cell, a plant or a part thereof, as compared to a corresponding non-transformed wild type non-human organism or a part thereof; and
[6076] (b) growing the non-human organism or a part thereof under conditions which permit the production of arginine or a composition comprising arginine in said non-human organism or in the culture medium surrounding said non-human organism.

[6077] A further embodiment of the present invention relates to a process for the production of proline, which comprises
[6078] (a) increasing or generating one or more activities selected from the group consisting of enoyl-CoA hydratase in an organelle, preferably in plastids or mitochondria, especially in plastids, of a non-human organism or a part thereof, preferably a microorganism, a plant cell, a plant or a part thereof, as compared to a corresponding non-transformed wild type non-human organism or a part thereof; and
[6079] (b) growing the non-human organism or a part thereof under conditions which permit the production of proline or a composition comprising proline in said non-human organism or in the culture medium surrounding said non-human organism.

[6080] A further embodiment of the present invention relates to a process for the production of glutamate, which comprises
[6081] (a) increasing or generating one or more activities selected from the group consisting of transcriptional regulator in an organelle, preferably in plastids or mitochondria, especially in plastids, of a non-human organism or a part thereof, preferably a microorganism, a plant cell, a plant or a part thereof, as compared to a corresponding non-transformed wild type non-human organism or a part thereof; and
[6082] (b) growing the non-human organism or a part thereof under conditions which permit the production of glutamate or a composition comprising glutamate in said non-human organism or in the culture medium surrounding said non-human organism.

[6083] A further embodiment of the present invention relates to a process for the production of proline, which comprises
[6084] (a) increasing or generating one or more activities selected from the group consisting of transcriptional regulator in an organelle, preferably in plastids or mitochondria, especially in plastids, of a non-human organism or a part thereof, preferably a microorganism, a plant cell, a plant or a part thereof, as compared to a corresponding non-transformed wild type non-human organism or a part thereof; and
[6085] (b) growing the non-human organism or a part thereof under conditions which permit the production of proline or a composition comprising proline in said non-human organism or in the culture medium surrounding said non-human organism.

[6086] A further embodiment of the present invention relates to a process for the production of proline, which comprises
[6087] (a) increasing or generating one or more activities selected from the group consisting of acyltransferase in an organelle, preferably in plastids or mitochondria, especially in plastids, of a non-human organism or a part thereof, preferably a microorganism, a plant cell, a plant or a part thereof, as compared to a corresponding non-transformed wild type non-human organism or a part thereof; and
[6088] (b) growing the non-human organism or a part thereof under conditions which permit the production of proline or a composition comprising proline in said non-human organism or in the culture medium surrounding said non-human organism.

[6089] A further embodiment of the present invention relates to a process for the production of glutamate, which comprises
[6090] (a) increasing or generating one or more activities selected from the group consisting of oxidoreductase in an organelle, preferably in plastids or mitochondria, especially in plastids, of a non-human organism or a part thereof, preferably a microorganism, a plant cell, a plant or a part thereof, as compared to a corresponding non-transformed wild type non-human organism or a part thereof; and
[6091] (b) growing the non-human organism or a part thereof under conditions which permit the production of glutamate or a composition comprising glutamate in said non-human organism or in the culture medium surrounding said non-human organism.

[6092] A further embodiment of the present invention relates to a process for the production of glutamine, which comprises
[6093] (a) increasing or generating one or more activities selected from the group consisting of oxidoreductase in an organelle, preferably in plastids or mitochondria, especially in plastids, of a non-human organism or a part thereof, preferably a microorganism, a plant cell, a plant or a part thereof, as compared to a corresponding non-transformed wild type non-human organism or a part thereof; and
[6094] (b) growing the non-human organism or a part thereof under conditions which permit the production of glutamine or a composition comprising glutamine in said non-human organism or in the culture medium surrounding said non-human organism.

[6095] A further embodiment of the present invention relates to a process for the production of glutamine, which comprises
[6096] (a) increasing or generating one or more activities selected from the group consisting of lysyl-tRNA synthetase in an organelle, preferably in plastids or mitochondria, especially in plastids, of a non-human organism or a part thereof, preferably a microorganism, a plant cell, a plant or a part thereof, as compared to a corresponding non-transformed wild type non-human organism or a part thereof; and
[6097] (b) growing the non-human organism or a part thereof under conditions which permit the production of glutamine or a composition comprising glutamine in said non-human organism or in the culture medium surrounding said non-human organism.

[6098] A further embodiment of the present invention relates to a process for the production of glutamate, which comprises
[6099] (a) increasing or generating one or more activities selected from the group consisting of 30S ribosomal protein in an organelle, preferably in plastids or mitochondria, especially in plastids, of a non-human organism or a part thereof, preferably a microorganism, a plant cell, a plant or a part thereof, as compared to a corresponding non-transformed wild type non-human organism or a part thereof; and
[6100] (b) growing the non-human organism or a part thereof under conditions which permit the production of glutamate or a composition comprising glutamate in said non-human organism or in the culture medium surrounding said non-human organism.

[6101] A further embodiment of the present invention relates to a process for the production of glutamate, which comprises
[6102] (a) increasing or generating one or more activities selected from the group consisting of CTP synthase in an organelle, preferably in plastids or mitochondria, especially in plastids, of a non-human organism or a part thereof, preferably a microorganism, a plant cell, a plant or a part thereof, as compared to a corresponding non-transformed wild type non-human organism or a part thereof; and
[6103] (b) growing the non-human organism or a part thereof under conditions which permit the production of glutamate or a composition comprising glutamate in said non-human organism or in the culture medium surrounding said non-human organism.

[6104] A further embodiment of the present invention relates to a process for the production of glutamine, which comprises
[6105] (a) increasing or generating one or more activities selected from the group consisting of CTP synthase in an organelle, preferably in plastids or mitochondria, especially in plastids, of a non-human organism or a part thereof, preferably a microorganism, a plant cell, a plant or a part thereof, as compared to a corresponding non-transformed wild type non-human organism or a part thereof; and
[6106] (b) growing the non-human organism or a part thereof under conditions which permit the production of glutamine or a composition comprising glutamine in said non-human organism or in the culture medium surrounding said non-human organism.

[6107] A further embodiment of the present invention relates to a process for the production of glutamate, which comprises
[6108] (a) increasing or generating one or more activities selected from the group consisting of glucose-1-phosphate cytidylyltransferase in an organelle, preferably in plastids or mitochondria, especially in plastids, of a non-human organism or a part thereof, preferably a microorganism, a plant cell, a plant or a part thereof, as compared to a corresponding non-transformed wild type non-human organism or a part thereof; and
[6109] (b) growing the non-human organism or a part thereof under conditions which permit the production of glutamate or a composition comprising glutamate in said non-human organism or in the culture medium surrounding said non-human organism.

[6110] A further embodiment of the present invention relates to a process for the production of glutamine, which comprises
[6111] (a) increasing or generating one or more activities selected from the group consisting of glucose-1-phosphate cytidylyltransferase in an organelle, preferably in plastids or mitochondria, especially in plastids, of a non-human organism or a part thereof, preferably a microorganism, a plant cell, a plant or a part thereof, as compared to a corresponding non-transformed wild type non-human organism or a part thereof; and
[6112] (b) growing the non-human organism or a part thereof under conditions which permit the production of glutamine or a composition comprising glutamine in said non-human organism or in the culture medium surrounding said non-human organism.

[6113] A further embodiment of the present invention relates to a process for the production of proline, which comprises
[6114] (a) increasing or generating one or more activities selected from the group consisting of glucose-1-phosphate cytidylyltransferase in an organelle, preferably in plastids or mitochondria, especially in plastids, of a non-human organism or a part thereof, preferably a microorganism, a plant cell, a plant or a part thereof, as compared to a corresponding non-transformed wild type non-human organism or a part thereof; and
[6115] (b) growing the non-human organism or a part thereof under conditions which permit the production of proline or a composition comprising proline in said non-human organism or in the culture medium surrounding said non-human organism.

[6116] A further embodiment of the present invention relates to a process for the production of arginine, which comprises
[6117] (a) increasing or generating one or more activities selected from the group consisting of aminotransferase in an organelle, preferably in plastids or mitochondria, especially in plastids, of a non-human organism or a part thereof, preferably a microorganism, a plant cell, a plant or a part thereof, as compared to a corresponding non-transformed wild type non-human organism or a part thereof; and
[6118] (b) growing the non-human organism or a part thereof under conditions which permit the production of arginine or a composition comprising arginine in said non-human organism or in the culture medium surrounding said non-human organism.

[6119] A further embodiment of the present invention relates to a process for the production of proline, which comprises
[6120] (a) increasing or generating one or more activities selected from the group consisting of hydrolase in an organelle, preferably in plastids or mitochondria, especially in plastids, of a non-human organism or a part thereof, preferably a microorganism, a plant cell, a plant or a part thereof, as compared to a corresponding non-transformed wild type non-human organism or a part thereof; and
[6121] (b) growing the non-human organism or a part thereof under conditions which permit the production of proline or a composition comprising proline in said non-human organism or in the culture medium surrounding said non-human organism.

[6122] A further embodiment of the present invention relates to a process for the production of arginine, which comprises
[6123] (a) increasing or generating one or more activities selected from the group consisting of glutamate-ammonia-ligase in an organelle, preferably in plastids or mitochondria, especially in plastids, of a non-human organism or a part thereof, preferably a microorganism, a plant cell, a plant or a part thereof, as compared to a corresponding non-transformed wild type non-human organism or a part thereof; and
[6124] (b) growing the non-human organism or a part thereof under conditions which permit the production of arginine or a composition comprising arginine in said non-human organism or in the culture medium surrounding said non-human organism.

[6125] A further embodiment of the present invention relates to a process for the production of glutamine, which comprises
[6126] (a) increasing or generating one or more activities selected from the group consisting of glutamate-ammonia-ligase in an organelle, preferably in plastids or mitochondria, especially in plastids, of a non-human organism or a part thereof, preferably a microorganism, a plant cell, a plant or a part thereof, as compared to a corresponding non-transformed wild type non-human organism or a part thereof; and
[6127] (b) growing the non-human organism or a part thereof under conditions which permit the production of glutamine or a composition comprising glutamine in said non-human organism or in the culture medium surrounding said non-human organism.

[6128] A further embodiment of the present invention relates to a process for the production of proline, which comprises
[6129] (a) increasing or generating one or more activities selected from the group consisting of glutamate-ammonia-ligase in an organelle, preferably in plastids or mitochondria, especially in plastids, of a non-human organism or a part thereof, preferably a microorganism, a plant cell, a plant or a part thereof, as compared to a corresponding non-transformed wild type non-human organism or a part thereof; and
[6130] (b) growing the non-human organism or a part thereof under conditions which permit the production of proline or a composition comprising proline in said non-human organism or in the culture medium surrounding said non-human organism.

[6131] A further embodiment of the present invention relates to a process for the production of proline, which comprises
[6132] (a) increasing or generating one or more activities selected from the group consisting of fumarylacetoacetate hydrolase in an organelle, preferably in plastids or mitochondria, especially in plastids, of a non-human organism or a part thereof, preferably a microorganism, a plant cell, a plant or a part thereof, as compared to a corresponding non-transformed wild type non-human organism or a part thereof; and
[6133] (b) growing the non-human organism or a part thereof under conditions which permit the production of proline or a composition comprising proline in said non-human organism or in the culture medium surrounding said non-human organism.

[6134] A further embodiment of the present invention relates to a process for the production of arginine, which comprises
[6135] (a) increasing or generating one or more activities selected from the group consisting of HesB/YadR/YfhF family protein in an organelle, preferably in plastids or mitochondria, especially in plastids, of a non-human organism or a part thereof, preferably a microorganism, a plant cell, a plant or a part thereof, as compared to a corresponding non-transformed wild type non-human organism or a part thereof; and
[6136] (b) growing the non-human organism or a part thereof under conditions which permit the production of arginine or a composition comprising arginine in said non-human organism or in the culture medium surrounding said non-human organism.

[6137] A further embodiment of the present invention relates to a process for the production of glutamine, which comprises
[6138] (a) increasing or generating one or more activities selected from the group consisting of HesB/YadR/YfhF family protein in an organelle, preferably in plastids or mitochondria, especially in plastids, of a non-human organism or a part thereof, preferably a microorganism, a plant cell, a plant or a part thereof, as compared to a corresponding non-transformed wild type non-human organism or a part thereof; and
[6139] (b) growing the non-human organism or a part thereof under conditions which permit the production of glutamine or a composition comprising glutamine in said non-human organism or in the culture medium surrounding said non-human organism.

[6140] A further embodiment of the present invention relates to a process for the production of proline, which comprises
[6141] (a) increasing or generating one or more activities selected from the group consisting of HesB/YadR/YfhF family protein in an organelle, preferably in plastids or mitochondria, especially in plastids, of a non-human organism or a part thereof, preferably a microorganism, a plant cell, a plant or a part thereof, as compared to a corresponding non-transformed wild type non-human organism or a part thereof; and
[6142] (b) growing the non-human organism or a part thereof under conditions which permit the production of proline or a composition comprising proline in said non-human organism or in the culture medium surrounding said non-human organism.

[6143] A further embodiment of the present invention relates to a process for the production of proline, which comprises
[6144] (a) increasing or generating one or more activities selected from the group consisting of L-aspartate oxidase in an organelle, preferably in plastids or mitochondria, especially in plastids, of a non-human organism or a part thereof, preferably a microorganism, a plant cell, a plant or a part thereof, as compared to a corresponding non-transformed wild type non-human organism or a part thereof; and
[6145] (b) growing the non-human organism or a part thereof under conditions which permit the production of proline or a composition comprising proline in said non-human organism or in the culture medium surrounding said non-human organism.

[6146] A further embodiment of the present invention relates to a process for the production of arginine, which comprises
[6147] (a) increasing or generating one or more activities selected from the group consisting of oxidoreductase in an organelle, preferably in plastids or mitochondria, especially in plastids, of a non-human organism or a part thereof, preferably a microorganism, a plant cell, a plant or a part thereof, as compared to a corresponding non-transformed wild type non-human organism or a part thereof; and
[6148] (b) growing the non-human organism or a part thereof under conditions which permit the production of arginine or a composition comprising arginine in said non-human organism or in the culture medium surrounding said non-human organism.

[6149] A further embodiment of the present invention relates to a process for the production of glutamine, which comprises
[6150] (a) increasing or generating one or more activities selected from the group consisting of oxidoreductase in an organelle, preferably in plastids or mitochondria, especially in plastids, of a non-human organism or a part thereof, preferably a microorganism, a plant cell, a plant or a part thereof, as compared to a corresponding non-transformed wild type non-human organism or a part thereof; and
[6151] (b) growing the non-human organism or a part thereof under conditions which permit the production of glutamine or a composition comprising glutamine in said non-human organism or in the culture medium surrounding said non-human organism.

[6152] A further embodiment of the present invention relates to a process for the production of proline, which comprises
[6153] (a) increasing or generating one or more activities selected from the group consisting of Chaperone protein CIpB in an organelle, preferably in plastids or mitochondria, especially in plastids, of a non-human organism or a part thereof, preferably a microorganism, a plant cell, a plant or a part thereof, as compared to a corresponding non-transformed wild type non-human organism or a part thereof; and
[6154] (b) growing the non-human organism or a part thereof under conditions which permit the production of proline or a composition comprising proline in said non-human organism or in the culture medium surrounding said non-human organism.

[6155] A further embodiment of the present invention relates to a process for the production of arginine, which comprises
[6156] (a) increasing or generating one or more activities selected from the group consisting of purine nucleoside phosphorylase in an organelle, preferably in plastids or mitochondria, especially in plastids, of a non-human organism or a part thereof, preferably a microorganism, a plant cell, a plant or a part thereof, as compared to a corresponding non-transformed wild type non-human organism or a part thereof; and
[6157] (b) growing the non-human organism or a part thereof under conditions which permit the production of arginine or a composition comprising arginine in said non-human organism or in the culture medium surrounding said non-human organism.

[6158] A further embodiment of the present invention relates to a process for the production of glutamine, which comprises
[6159] (a) increasing or generating one or more activities selected from the group consisting of purine nucleoside phosphorylase in an organelle, preferably in plastids or mitochondria, especially in plastids, of a non-human organism or a part thereof, preferably a microorganism, a plant cell, a plant or a part thereof, as compared to a corresponding non-transformed wild type non-human organism or a part thereof; and
[6160] (b) growing the non-human organism or a part thereof under conditions which permit the production of glutamine or a composition comprising glutamine in said non-human organism or in the culture medium surrounding said non-human organism.

[6161] A further embodiment of the present invention relates to a process for the production of proline, which comprises
[6162] (a) increasing or generating one or more activities selected from the group consisting of purine nucleoside phosphorylase in an organelle, preferably in plastids or mitochondria, especially in plastids, of a non-human organism or a part thereof, preferably a microorganism, a plant cell, a plant or a part thereof, as compared to a corresponding non-transformed wild type non-human organism or a part thereof; and
[6163] (b) growing the non-human organism or a part thereof under conditions which permit the production of proline or a composition comprising proline in said non-human organism or in the culture medium surrounding said non-human organism.

[6164] A further embodiment of the present invention relates to a process for the production of proline, which comprises
[6165] (a) increasing or generating one or more activities selected from the group consisting of transcriptional regulator protein in an organelle, preferably in plastids or mitochondria, especially in plastids, of a non-human organism or a part thereof, preferably a microorganism, a plant cell, a plant or a part thereof, as compared to a corresponding non-transformed wild type non-human organism or a part thereof; and
[6166] (b) growing the non-human organism or a part thereof under conditions which permit the production of proline or a composition comprising proline in said non-human organism or in the culture medium surrounding said non-human organism.

[6167] A further embodiment of the present invention relates to a process for the production of glutamate, which comprises
[6168] (a) increasing or generating one or more activities selected from the group consisting of AX653549-protein in an organelle, preferably in plastids or mitochondria, especially in plastids, of a non-human organism or a part thereof, preferably a microorganism, a plant cell, a plant or a part thereof, as compared to a corresponding non-transformed wild type non-human organism or a part thereof; and
[6169] (b) growing the non-human organism or a part thereof under conditions which permit the production of glutamate or a composition comprising glutamate in said non-human organism or in the culture medium surrounding said non-human organism.

[6170] A further embodiment of the present invention relates to a process for the production of glutamine, which comprises
[6171] (a) increasing or generating one or more activities selected from the group consisting of AX653549-protein in an organelle, preferably in plastids or mitochondria, especially in plastids, of a non-human organism or a part thereof, preferably a microorganism, a plant cell, a plant or a part thereof, as compared to a corresponding non-transformed wild type non-human organism or a part thereof; and
[6172] (b) growing the non-human organism or a part thereof under conditions which permit the production of glutamine or a composition comprising glutamine in said non-human organism or in the culture medium surrounding said non-human organism.

[6173] A further embodiment of the present invention relates to a process for the production of glutamine, which comprises
[6174] (a) increasing or generating one or more activities selected from the group consisting of AY087308-protein in an organelle, preferably in plastids or mitochondria, especially in plastids, of a non-human organism or a part thereof, preferably a microorganism, a plant cell, a plant or a part thereof, as compared to a corresponding non-transformed wild type non-human organism or a part thereof; and
[6175] (b) growing the non-human organism or a part thereof under conditions which permit the production of glutamine or a composition comprising glutamine in said non-human organism or in the culture medium surrounding said non-human organism.

[6176] A further embodiment of the present invention relates to a process for the production of arginine, which comprises
[6177] (a) increasing or generating one or more activities selected from the group consisting of threonine synthase in an organelle, preferably in plastids or mitochondria, especially in plastids, of a non-human organism or a part thereof, preferably a microorganism, a plant cell, a plant or a part thereof, as compared to a corresponding non-transformed wild type non-human organism or a part thereof; and
[6178] (b) growing the non-human organism or a part thereof under conditions which permit the production of arginine or a composition comprising arginine in said non-human organism or in the culture medium surrounding said non-human organism.

[6179] A further embodiment of the present invention relates to a process for the production of glutamine, which comprises
[6180] (a) increasing or generating one or more activities selected from the group consisting of threonine synthase in an organelle, preferably in plastids or mitochondria, especially in plastids, of a non-human organism or a part thereof, preferably a microorganism, a plant cell, a plant or a part thereof, as compared to a corresponding non-transformed wild type non-human organism or a part thereof; and
[6181] (b) growing the non-human organism or a part thereof under conditions which permit the production of glutamine or a composition comprising glutamine in said non-human organism or in the culture medium surrounding said non-human organism.

[6182] A further embodiment of the present invention relates to a process for the production of proline, which comprises
[6183] (a) increasing or generating one or more activities selected from the group consisting of threonine synthase in an organelle, preferably in plastids or mitochondria, especially in plastids, of a non-human organism or a part thereof, preferably a microorganism, a plant cell, a plant or a part thereof, as compared to a corresponding non-transformed wild type non-human organism or a part thereof; and
[6184] (b) growing the non-human organism or a part thereof under conditions which permit the production of proline or a composition comprising proline in said non-human organism or in the culture medium surrounding said non-human organism.

[6185] A further embodiment of the present invention relates to a process for the production of proline, which comprises
[6186] (a) increasing or generating one or more activities selected from the group consisting of L-ribulose-5-phosphate 4-epimerase in an organelle, preferably in plastids or mitochondria, especially in plastids, of a non-human organism or a part thereof, preferably a microorganism, a plant cell, a plant or a part thereof, as compared to a corresponding non-transformed wild type non-human organism or a part thereof; and
[6187] (b) growing the non-human organism or a part thereof under conditions which permit the production of proline or a composition comprising proline in said non-human organism or in the culture medium surrounding said non-human organism.

[6188] A further embodiment of the present invention relates to a process for the production of glutamine, which comprises
[6189] (a) increasing or generating one or more activities selected from the group consisting of dihydrolipoamide acetyltransferase in an organelle, preferably in plastids or mitochondria, especially in plastids, of a non-human organism or a part thereof, preferably a microorganism, a plant cell, a plant or a part thereof, as compared to a corresponding non-transformed wild type non-human organism or a part thereof; and
[6190] (b) growing the non-human organism or a part thereof under conditions which permit the production of glutamine or a composition comprising glutamine in said non-human organism or in the culture medium surrounding said non-human organism.

[6191] A further embodiment of the present invention relates to a process for the production of arginine, which comprises
[6192] (a) increasing or generating one or more activities selected from the group consisting of glucose dehydrogenase in an organelle, preferably in plastids or mitochondria, especially in plastids, of a non-human organism or a part thereof, preferably a microorganism, a plant cell, a plant or a part thereof, as compared to a corresponding non-transformed wild type non-human organism or a part thereof; and
[6193] (b) growing the non-human organism or a part thereof under conditions which permit the production of arginine or a composition comprising arginine in said non-human organism or in the culture medium surrounding said non-human organism.

[6194] A further embodiment of the present invention relates to a process for the production of proline, which comprises
[6195] (a) increasing or generating one or more activities selected from the group consisting of glucose dehydrogenase in an organelle, preferably in plastids or mitochondria, especially in plastids, of a non-human organism or a part thereof, preferably a microorganism, a plant cell, a plant or a part thereof, as compared to a corresponding non-transformed wild type non-human organism or a part thereof; and
[6196] (b) growing the non-human organism or a part thereof under conditions which permit the production of proline or a composition comprising proline in said non-human organism or in the culture medium surrounding said non-human organism.

[6197] A further embodiment of the present invention relates to a process for the production of proline, which comprises
[6198] (a) increasing or generating one or more activities selected from the group consisting of glucose dehydrogenase in an organelle, preferably in plastids or mitochondria, especially in plastids, of a non-human organism or a part thereof, preferably a microorganism, a plant cell, a plant or a part thereof, as compared to a corresponding non-transformed wild type non-human organism or a part thereof; and
[6199] (b) growing the non-human organism or a part thereof under conditions which permit the production of proline or a composition comprising proline in said non-human organism or in the culture medium surrounding said non-human organism.

[6200] A further embodiment of the present invention relates to a process for the production of proline, which comprises
[6201] (a) increasing or generating one or more activities selected from the group consisting of serine protease in an organelle, preferably in plastids or mitochondria, especially in plastids, of a non-human organism or a part thereof, preferably a microorganism, a plant cell, a plant or a part thereof, as compared to a corresponding non-transformed wild type non-human organism or a part thereof; and
[6202] (b) growing the non-human organism or a part thereof under conditions which permit the production of proline or a composition comprising proline in said non-human organism or in the culture medium surrounding said non-human organism.

[6203] A further embodiment of the present invention relates to a process for the production of arginine, which comprises
[6204] (a) increasing or generating one or more activities selected from the group consisting of acyl-CoA dehydrogenase in an organelle, preferably in plastids or mitochondria, especially in plastids, of a non-human organism or a part thereof, preferably a microorganism, a plant cell, a plant or a part thereof, as compared to a corresponding non-transformed wild type non-human organism or a part thereof; and
[6205] (b) growing the non-human organism or a part thereof under conditions which permit the production of arginine or a composition comprising arginine in said non-human organism or in the culture medium surrounding said non-human organism.

[6206] A further embodiment of the present invention relates to a process for the production of glutamate, which comprises
[6207] (a) increasing or generating one or more activities selected from the group consisting of acyl-CoA dehydrogenase in an organelle, preferably in plastids or mitochondria, especially in plastids, of a non-human organism or a part thereof, preferably a microorganism, a plant cell, a plant or a part thereof, as compared to a corresponding non-transformed wild type non-human organism or a part thereof; and
[6208] (b) growing the non-human organism or a part thereof under conditions which permit the production of glutamate or a composition comprising glutamate in said non-human organism or in the culture medium surrounding said non-human organism.

[6209] A further embodiment of the present invention relates to a process for the production of proline, which comprises
[6210] (a) increasing or generating one or more activities selected from the group consisting of beta-galactosidase in an organelle, preferably in plastids or mitochondria, especially in plastids, of a non-human organism or a part thereof, preferably a microorganism, a plant cell, a plant or a part thereof, as compared to a corresponding non-transformed wild type non-human organism or a part thereof; and
[6211] (b) growing the non-human organism or a part thereof under conditions which permit the production of proline or a composition comprising proline in said non-human organism or in the culture medium surrounding said non-human organism.

[6212] A further embodiment of the present invention relates to a process for the production of glutamine, which comprises
[6213] (a) increasing or generating one or more activities selected from the group consisting of ATP-binding component of a transport system in an organelle, preferably in plastids or mitochondria, especially in plastids, of a non-human organism or a part thereof, preferably a microorganism, a plant cell, a plant or a part thereof, as compared to a corresponding non-transformed wild type non-human organism or a part thereof; and
[6214] (b) growing the non-human organism or a part thereof under conditions which permit the production of glutamine or a composition comprising glutamine in said non-human organism or in the culture medium surrounding said non-human organism.

[6215] A further embodiment of the present invention relates to a process for the production of proline, which comprises
[6216] (a) increasing or generating one or more activities selected from the group consisting of b0456-protein in an organelle, preferably in plastids or mitochondria, especially in plastids, of a non-human organism or a part thereof, preferably a microorganism, a plant cell, a plant or a part thereof, as compared to a corresponding non-transformed wild type non-human organism or a part thereof; and
[6217] (b) growing the non-human organism or a part thereof under conditions which permit the production of proline or a composition comprising proline in said non-human organism or in the culture medium surrounding said non-human organism.

[6218] A further embodiment of the present invention relates to a process for the production of arginine, which comprises
[6219] (a) increasing or generating one or more activities selected from the group consisting of membrane transport protein in an organelle, preferably in plastids or mitochondria, especially in plastids, of a non-human organism or a part thereof, preferably a microorganism, a plant cell, a plant or a part thereof, as compared to a corresponding non-transformed wild type non-human organism or a part thereof; and
[6220] (b) growing the non-human organism or a part thereof under conditions which permit the production of arginine or a composition comprising arginine in said non-human organism or in the culture medium surrounding said non-human organism.

[6221] A further embodiment of the present invention relates to a process for the production of glutamate, which comprises
[6222] (a) increasing or generating one or more activities selected from the group consisting of membrane transport protein in an organelle, preferably in plastids or mitochondria, especially in plastids, of a non-human organism or a part thereof, preferably a microorganism, a plant cell, a plant or a part thereof, as compared to a corresponding non-transformed wild type non-human organism or a part thereof; and
[6223] (b) growing the non-human organism or a part thereof under conditions which permit the production of glutamate or a composition comprising glutamate in said non-human organism or in the culture medium surrounding said non-human organism.

[6224] A further embodiment of the present invention relates to a process for the production of glutamine, which comprises
[6225] (a) increasing or generating one or more activities selected from the group consisting of b0518-protein in an organelle, preferably in plastids or mitochondria, especially in plastids, of a non-human organism or a part thereof, preferably a microorganism, a plant cell, a plant or a part thereof, as compared to a corresponding non-transformed wild type non-human organism or a part thereof; and
[6226] (b) growing the non-human organism or a part thereof under conditions which permit the production of glutamine or a composition comprising glutamine in said non-human organism or in the culture medium surrounding said non-human organism.

[6227] A further embodiment of the present invention relates to a process for the production of arginine, which comprises
[6228] (a) increasing or generating one or more activities selected from the group consisting of isochorismate synthase in an organelle, preferably in plastids or mitochondria, especially in plastids, of a non-human organism or a part thereof, preferably a microorganism, a plant cell, a plant or a part thereof, as compared to a corresponding non-transformed wild type non-human organism or a part thereof; and
[6229] (b) growing the non-human organism or a part thereof under conditions which permit the production of arginine or a composition comprising arginine in said non-human organism or in the culture medium surrounding said non-human organism.

[6230] A further embodiment of the present invention relates to a process for the production of glutamate, which comprises
[6231] (a) increasing or generating one or more activities selected from the group consisting of isochorismate synthase in an organelle, preferably in plastids or mitochondria, especially in plastids, of a non-human organism or a part thereof, preferably a microorganism, a plant cell, a plant or a part thereof, as compared to a corresponding non-transformed wild type non-human organism or a part thereof; and
[6232] (b) growing the non-human organism or a part thereof under conditions which permit the production of glutamate or a composition comprising glutamate in said non-human organism or in the culture medium surrounding said non-human organism.

[6233] A further embodiment of the present invention relates to a process for the production of glutamine, which comprises
[6234] (a) increasing or generating one or more activities selected from the group consisting of isochorismate synthase in an organelle, preferably in plastids or mitochondria, especially in plastids, of a non-human organism or a part thereof, preferably a microorganism, a plant cell, a plant or a part thereof, as compared to a corresponding non-transformed wild type non-human organism or a part thereof; and
[6235] (b) growing the non-human organism or a part thereof under conditions which permit the production of glutamine or a composition comprising glutamine in said non-human organism or in the culture medium surrounding said non-human organism.

[6236] A further embodiment of the present invention relates to a process for the production of proline, which comprises
[6237] (a) increasing or generating one or more activities selected from the group consisting of isochorismate synthase in an organelle, preferably in plastids or mitochondria, especially in plastids, of a non-human organism or a part thereof, preferably a microorganism, a plant cell, a plant or a part thereof, as compared to a corresponding non-transformed wild type non-human organism or a part thereof; and
[6238] (b) growing the non-human organism or a part thereof under conditions which permit the production of proline or a composition comprising proline in said non-human organism or in the culture medium surrounding said non-human organism.

[6239] A further embodiment of the present invention relates to a process for the production of glutamine, which comprises
[6240] (a) increasing or generating one or more activities selected from the group consisting of zinc transporter in an organelle, preferably in plastids or mitochondria, especially in plastids, of a non-human organism or a part thereof, preferably a microorganism, a plant cell, a plant or a part thereof, as compared to a corresponding non-transformed wild type non-human organism or a part thereof; and
[6241] (b) growing the non-human organism or a part thereof under conditions which permit the production of glutamine or a composition comprising glutamine in said non-human organism or in the culture medium surrounding said non-human organism.

[6242] A further embodiment of the present invention relates to a process for the production of glutamine, which comprises
[6243] (a) increasing or generating one or more activities selected from the group consisting of asparaginase in an organelle, preferably in plastids or mitochondria, especially in plastids, of a non-human organism or a part thereof, preferably a microorganism, a plant cell, a plant or a part thereof, as compared to a corresponding non-transformed wild type non-human organism or a part thereof; and
[6244] (b) growing the non-human organism or a part thereof under conditions which permit the production of glutamine or a composition comprising glutamine in said non-human organism or in the culture medium surrounding said non-human organism.

[6245] A further embodiment of the present invention relates to a process for the production of glutamine, which comprises
[6246] (a) increasing or generating one or more activities selected from the group consisting of Leucyl/phenylalanyl-tRNA-protein transferase in an organelle, preferably in plastids or mitochondria, especially in plastids, of a non-human organism or a part thereof, preferably a microorganism, a plant cell, a plant or a part thereof, as compared to a corresponding non-transformed wild type non-human organism or a part thereof; and
[6247] (b) growing the non-human organism or a part thereof under conditions which permit the production of glutamine or a composition comprising glutamine in said non-human organism or in the culture medium surrounding said non-human organism.

[6248] A further embodiment of the present invention relates to a process for the production of proline, which comprises
[6249] (a) increasing or generating one or more activities selected from the group consisting of Leucyl/phenylalanyl-tRNA-protein transferase in an organelle, preferably in plastids or mitochondria, especially in plastids, of a non-human organism or a part thereof, preferably a microorganism, a plant cell, a plant or a part thereof, as compared to a corresponding non-transformed wild type non-human organism or a part thereof; and
[6250] (b) growing the non-human organism or a part thereof under conditions which permit the production of proline or a composition comprising proline in said non-human organism or in the culture medium surrounding said non-human organism.

[6251] A further embodiment of the present invention relates to a process for the production of glutamate, which comprises
[6252] (a) increasing or generating one or more activities selected from the group consisting of major facilitator superfamily transporter protein in an organelle, preferably in plastids or mitochondria, especially in plastids, of a non-human organism or a part thereof, preferably a microorganism, a plant cell, a plant or a part thereof, as compared to a corresponding non-transformed wild type non-human organism or a part thereof; and
[6253] (b) growing the non-human organism or a part thereof under conditions which permit the production of glutamate or a composition comprising glutamate in said non-human organism or in the culture medium surrounding said non-human organism.

[6254] A further embodiment of the present invention relates to a process for the production of proline, which comprises
[6255] (a) increasing or generating one or more activities selected from the group consisting of major facilitator superfamily transporter protein in an organelle, preferably in plastids or mitochondria, especially in plastids, of a non-human organism or a part thereof, preferably a microorganism, a plant cell, a plant or a part thereof, as compared to a corresponding non-transformed wild type non-human organism or a part thereof; and
[6256] (b) growing the non-human organism or a part thereof under conditions which permit the production of proline or a composition comprising proline in said non-human organism or in the culture medium surrounding said non-human organism.

[6257] A further embodiment of the present invention relates to a process for the production of proline, which comprises
[6258] (a) increasing or generating one or more activities selected from the group consisting of DNA helicase IV in an organelle, preferably in plastids or mitochondria, especially in plastids, of a non-human organism or a part thereof, preferably a microorganism, a plant cell, a plant or a part thereof, as compared to a corresponding non-transformed wild type non-human organism or a part thereof; and
[6259] (b) growing the non-human organism or a part thereof under conditions which permit the production of proline or a composition comprising proline in said non-human organism or in the culture medium surrounding said non-human organism.

[6260] A further embodiment of the present invention relates to a process for the production of proline, which comprises
[6261] (a) increasing or generating one or more activities selected from the group consisting of methylglyoxal synthase in an organelle, preferably in plastids or mitochondria, especially in plastids, of a non-human organism or a part thereof, preferably a microorganism, a plant cell, a plant or a part thereof, as compared to a corresponding non-transformed wild type non-human organism or a part thereof; and
[6262] (b) growing the non-human organism or a part thereof under conditions which permit the production of proline or a composition comprising proline in said non-human organism or in the culture medium surrounding said non-human organism.

[6263] A further embodiment of the present invention relates to a process for the production of proline, which comprises
[6264] (a) increasing or generating one or more activities selected from the group consisting of phosphoanhydride phosphorylase in an organelle, preferably in plastids or mitochondria, especially in plastids, of a non-human organism or a part thereof, preferably a microorganism, a plant cell, a plant or a part thereof, as compared to a corresponding non-transformed wild type non-human organism or a part thereof; and
[6265] (b) growing the non-human organism or a part thereof under conditions which permit the production of proline or a composition comprising proline in said non-human organism or in the culture medium surrounding said non-human organism.

[6266] A further embodiment of the present invention relates to a process for the production of glutamine, which comprises
[6267] (a) increasing or generating one or more activities selected from the group consisting of b1003-protein in an organelle, preferably in plastids or mitochondria, especially in plastids, of a non-human organism or a part thereof, preferably a microorganism, a plant cell, a plant or a part thereof, as compared to a corresponding non-transformed wild type non-human organism or a part thereof; and
[6268] (b) growing the non-human organism or a part thereof under conditions which permit the production of glutamine or a composition comprising glutamine in said non-human organism or in the culture medium surrounding said non-human organism.

[6269] A further embodiment of the present invention relates to a process for the production of proline, which comprises
[6270] (a) increasing or generating one or more activities selected from the group consisting of b1003-protein in an organelle, preferably in plastids or mitochondria, especially in plastids, of a non-human organism or a part thereof, preferably a microorganism, a plant cell, a plant or a part thereof, as compared to a corresponding non-transformed wild type non-human organism or a part thereof; and
[6271] (b) growing the non-human organism or a part thereof under conditions which permit the production of proline or a composition comprising proline in said non-human organism or in the culture medium surrounding said non-human organism.

[6272] A further embodiment of the present invention relates to a process for the production of arginine, which comprises
[6273] (a) increasing or generating one or more activities selected from the group consisting of lipoprotein precursor in an organelle, preferably in plastids or mitochondria, especially in plastids, of a non-human organism or a part thereof, preferably a microorganism, a plant cell, a plant or a part thereof, as compared to a corresponding non-transformed wild type non-human organism or a part thereof; and
[6274] (b) growing the non-human organism or a part thereof under conditions which permit the production of arginine or a composition comprising arginine in said non-human organism or in the culture medium surrounding said non-human organism.

[6275] A further embodiment of the present invention relates to a process for the production of glutamate, which comprises
[6276] (a) increasing or generating one or more activities selected from the group consisting of b1024-protein in an organelle, preferably in plastids or mitochondria, especially in plastids, of a non-human organism or a part thereof, preferably a microorganism, a plant cell, a plant or a part thereof, as compared to a corresponding non-transformed wild type non-human organism or a part thereof; and
[6277] (b) growing the non-human organism or a part thereof under conditions which permit the production of glutamate or a composition comprising glutamate in said non-human organism or in the culture medium surrounding said non-human organism.

[6278] A further embodiment of the present invention relates to a process for the production of glutamine, which comprises
[6279] (a) increasing or generating one or more activities selected from the group consisting of b1108-protein in an organelle, preferably in plastids or mitochondria, especially in plastids, of a non-human organism or a part thereof, preferably a microorganism, a plant cell, a plant or a part thereof, as compared to a corresponding non-transformed wild type non-human organism or a part thereof; and
[6280] (b) growing the non-human organism or a part thereof under conditions which permit the production of glutamine or a composition comprising glutamine in said non-human organism or in the culture medium surrounding said non-human organism.

[6281] A further embodiment of the present invention relates to a process for the production of proline, which comprises
[6282] (a) increasing or generating one or more activities selected from the group consisting of b1108-protein in an organelle, preferably in plastids or mitochondria, especially in plastids, of a non-human organism or a part thereof, preferably a microorganism, a plant cell, a plant or a part thereof, as compared to a corresponding non-transformed wild type non-human organism or a part thereof; and
[6283] (b) growing the non-human organism or a part thereof under conditions which permit the production of proline or a composition comprising proline in said non-human organism or in the culture medium surrounding said non-human organism.

[6284] A further embodiment of the present invention relates to a process for the production of proline, which comprises
[6285] (a) increasing or generating one or more activities selected from the group consisting of isocitrate dehydrogenase in an organelle, preferably in plastids or mitochondria, especially in plastids, of a non-human organism or a part thereof, preferably a microorganism, a plant cell, a plant or a part thereof, as compared to a corresponding non-transformed wild type non-human organism or a part thereof; and
[6286] (b) growing the non-human organism or a part thereof under conditions which permit the production of proline or a composition comprising proline in said non-human organism or in the culture medium surrounding said non-human organism.

[6287] A further embodiment of the present invention relates to a process for the production of arginine, which comprises
[6288] (a) increasing or generating one or more activities selected from the group consisting of b1137-protein in an organelle, preferably in plastids or mitochondria, especially in plastids, of a non-human organism or a part thereof, preferably a microorganism, a plant cell, a plant or a part thereof, as compared to a corresponding non-transformed wild type non-human organism or a part thereof; and
[6289] (b) growing the non-human organism or a part thereof under conditions which permit the production of arginine or a composition comprising arginine in said non-human organism or in the culture medium surrounding said non-human organism.

[6290] A further embodiment of the present invention relates to a process for the production of glutamate, which comprises
[6291] (a) increasing or generating one or more activities selected from the group consisting of b1137-protein in an organelle, preferably in plastids or mitochondria, especially in plastids, of a non-human organism or a part thereof, preferably a microorganism, a plant cell, a plant or a part thereof, as compared to a corresponding non-transformed wild type non-human organism or a part thereof; and
[6292] (b) growing the non-human organism or a part thereof under conditions which permit the production of glutamate or a composition comprising glutamate in said non-human organism or in the culture medium surrounding said non-human organism.

[6293] A further embodiment of the present invention relates to a process for the production of proline, which comprises
[6294] (a) increasing or generating one or more activities selected from the group consisting of b1137-protein in an organelle, preferably in plastids or mitochondria, especially in plastids, of a non-human organism or a part thereof, preferably a microorganism, a plant cell, a plant or a part thereof, as compared to a corresponding non-transformed wild type non-human organism or a part thereof; and
[6295] (b) growing the non-human organism or a part thereof under conditions which permit the production of proline or a composition comprising proline in said non-human organism or in the culture medium surrounding said non-human organism.

[6296] A further embodiment of the present invention relates to a process for the production of glutamine, which comprises
[6297] (a) increasing or generating one or more activities selected from the group consisting of b1163-protein in an organelle, preferably in plastids or mitochondria, especially in plastids, of a non-human organism or a part thereof, preferably a microorganism, a plant cell, a plant or a part thereof, as compared to a corresponding non-transformed wild type non-human organism or a part thereof; and
[6298] (b) growing the non-human organism or a part thereof under conditions which permit the production of glutamine or a composition comprising glutamine in said non-human organism or in the culture medium surrounding said non-human organism.

[6299] A further embodiment of the present invention relates to a process for the production of proline, which comprises
[6300] (a) increasing or generating one or more activities selected from the group consisting of sodium/proton antiporter in an organelle, preferably in plastids or mitochondria, especially in plastids, of a non-human organism or a part thereof, preferably a microorganism, a plant cell, a plant or a part thereof, as compared to a corresponding non-transformed wild type non-human organism or a part thereof; and
[6301] (b) growing the non-human organism or a part thereof under conditions which permit the production of proline or a composition comprising proline in said non-human organism or in the culture medium surrounding said non-human organism.

[6302] A further embodiment of the present invention relates to a process for the production of glutamine, which comprises
[6303] (a) increasing or generating one or more activities selected from the group consisting of membrane protein in an organelle, preferably in plastids or mitochondria, especially in plastids, of a non-human organism or a part thereof, preferably a microorganism, a plant cell, a plant or a part thereof, as compared to a corresponding non-transformed wild type non-human organism or a part thereof; and
[6304] (b) growing the non-human organism or a part thereof under conditions which permit the production of glutamine or a composition comprising glutamine in said non-human organism or in the culture medium surrounding said non-human organism.

[6305] A further embodiment of the present invention relates to a process for the production of proline, which comprises
[6306] (a) increasing or generating one or more activities selected from the group consisting of membrane protein in an organelle, preferably in plastids or mitochondria, especially in plastids, of a non-human organism or a part thereof, preferably a microorganism, a plant cell, a plant or a part thereof, as compared to a corresponding non-transformed wild type non-human organism or a part thereof; and
[6307] (b) growing the non-human organism or a part thereof under conditions which permit the production of proline or a composition comprising proline in said non-human organism or in the culture medium surrounding said non-human organism.

[6308] A further embodiment of the present invention relates to a process for the production of arginine, which comprises
[6309] (a) increasing or generating one or more activities selected from the group consisting of b1259-protein in an organelle, preferably in plastids or mitochondria, especially in plastids, of a non-human organism or a part thereof, preferably a microorganism, a plant cell, a plant or a part thereof, as compared to a corresponding non-transformed wild type non-human organism or a part thereof; and
[6310] (b) growing the non-human organism or a part thereof under conditions which permit the production of arginine or a composition comprising arginine in said non-human organism or in the culture medium surrounding said non-human organism.

[6311] A further embodiment of the present invention relates to a process for the production of glutamine, which comprises
[6312] (a) increasing or generating one or more activities selected from the group consisting of b1259-protein in an organelle, preferably in plastids or mitochondria, especially in plastids, of a non-human organism or a part thereof, preferably a microorganism, a plant cell, a plant or a part thereof, as compared to a corresponding non-transformed wild type non-human organism or a part thereof; and
[6313] (b) growing the non-human organism or a part thereof under conditions which permit the production of glutamine or a composition comprising glutamine in said non-human organism or in the culture medium surrounding said non-human organism.

[6314] A further embodiment of the present invention relates to a process for the production of glutamine, which comprises
[6315] (a) increasing or generating one or more activities selected from the group consisting of anthranilate synthase component II in an organelle, preferably in plastids or mitochondria, especially in plastids, of a non-human organism or a part thereof, preferably a microorganism, a plant cell, a plant or a part thereof, as compared to a corresponding non-transformed wild type non-human organism or a part thereof; and
[6316] (b) growing the non-human organism or a part thereof under conditions which permit the production of glutamine or a composition comprising glutamine in said non-human organism or in the culture medium surrounding said non-human organism.

[6317] A further embodiment of the present invention relates to a process for the production of glutamine, which comprises
[6318] (a) increasing or generating one or more activities selected from the group consisting of b1280-protein in an organelle, preferably in plastids or mitochondria, especially in plastids, of a non-human organism or a part thereof, preferably a microorganism, a plant cell, a plant or a part thereof, as compared to a corresponding non-transformed wild type non-human organism or a part thereof; and
[6319] (b) growing the non-human organism or a part thereof under conditions which permit the production of glutamine or a composition comprising glutamine in said non-human organism or in the culture medium surrounding said non-human organism.

[6320] A further embodiment of the present invention relates to a process for the production of glutamine, which comprises
[6321] (a) increasing or generating one or more activities selected from the group consisting of glutamine synthetase in an organelle, preferably in plastids or mitochondria, especially in plastids, of a non-human organism or a part thereof, preferably a microorganism, a plant cell, a plant or a part thereof, as compared to a corresponding non-transformed wild type non-human organism or a part thereof; and
[6322] (b) growing the non-human organism or a part thereof under conditions which permit the production of glutamine or a composition comprising glutamine in said non-human organism or in the culture medium surrounding said non-human organism.

[6323] A further embodiment of the present invention relates to a process for the production of glutamate, which comprises
[6324] (a) increasing or generating one or more activities selected from the group consisting of aldehyde dehydrogenase in an organelle, preferably in plastids or mitochondria, especially in plastids, of a non-human organism or a part thereof, preferably a microorganism, a plant cell, a plant or a part thereof, as compared to a corresponding non-transformed wild type non-human organism or a part thereof; and
[6325] (b) growing the non-human organism or a part thereof under conditions which permit the production of glutamate or a composition comprising glutamate in said non-human organism or in the culture medium surrounding said non-human organism.

[6326] A further embodiment of the present invention relates to a process for the production of glutamate, which comprises
[6327] (a) increasing or generating one or more activities selected from the group consisting of b1330-protein in an organelle, preferably in plastids or mitochondria, especially in plastids, of a non-human organism or a part thereof, preferably a microorganism, a plant cell, a plant or a part thereof, as compared to a corresponding non-transformed wild type non-human organism or a part thereof; and
[6328] (b) growing the non-human organism or a part thereof under conditions which permit the production of glutamate or a composition comprising glutamate in said non-human organism or in the culture medium surrounding said non-human organism.

[6329] A further embodiment of the present invention relates to a process for the production of glutamine, which comprises
[6330] (a) increasing or generating one or more activities selected from the group consisting of b1330-protein in an organelle, preferably in plastids or mitochondria, especially in plastids, of a non-human organism or a part thereof, preferably a microorganism, a plant cell, a plant or a part thereof, as compared to a corresponding non-transformed wild type non-human organism or a part thereof; and
[6331] (b) growing the non-human organism or a part thereof under conditions which permit the production of glutamine or a composition comprising glutamine in said non-human organism or in the culture medium surrounding said non-human organism.

[6332] A further embodiment of the present invention relates to a process for the production of glutamate, which comprises
[6333] (a) increasing or generating one or more activities selected from the group consisting of lipoprotein precursor in an organelle, preferably in plastids or mitochondria, especially in plastids, of a non-human organism or a part thereof, preferably a microorganism, a plant cell, a plant or a part thereof, as compared to a corresponding non-transformed wild type non-human organism or a part thereof; and
[6334] (b) growing the non-human organism or a part thereof under conditions which permit the production of glutamate or a composition comprising glutamate in said non-human organism or in the culture medium surrounding said non-human organism.

[6335] A further embodiment of the present invention relates to a process for the production of glutamine, which comprises
[6336] (a) increasing or generating one or more activities selected from the group consisting of lipoprotein precursor in an organelle, preferably in plastids or mitochondria, especially in plastids, of a non-human organism or a part thereof, preferably a microorganism, a plant cell, a plant or a part thereof, as compared to a corresponding non-transformed wild type non-human organism or a part thereof; and
[6337] (b) growing the non-human organism or a part thereof under conditions which permit the production of glutamine or a composition comprising glutamine in said non-human organism or in the culture medium surrounding said non-human organism.

[6338] A further embodiment of the present invention relates to a process for the production of glutamate, which comprises
[6339] (a) increasing or generating one or more activities selected from the group consisting of b1445-protein in an organelle, preferably in plastids or mitochondria, especially in plastids, of a non-human organism or a part thereof, preferably a microorganism, a plant cell, a plant or a part thereof, as compared to a corresponding non-transformed wild type non-human organism or a part thereof; and
[6340] (b) growing the non-human organism or a part thereof under conditions which permit the production of glutamate or a composition comprising glutamate in said non-human organism or in the culture medium surrounding said non-human organism.

[6341] A further embodiment of the present invention relates to a process for the production of glutamine, which comprises
[6342] (a) increasing or generating one or more activities selected from the group consisting of b1445-protein in an organelle, preferably in plastids or mitochondria, especially in plastids, of a non-human organism or a part thereof, preferably a microorganism, a plant cell, a plant or a part thereof, as compared to a corresponding non-transformed wild type non-human organism or a part thereof; and
[6343] (b) growing the non-human organism or a part thereof under conditions which permit the production of glutamine or a composition comprising glutamine in said non-human organism or in the culture medium surrounding said non-human organism.

[6344] A further embodiment of the present invention relates to a process for the production of glutamate, which comprises
[6345] (a) increasing or generating one or more activities selected from the group consisting of b1522-protein in an organelle, preferably in plastids or mitochondria, especially in plastids, of a non-human organism or a part thereof, preferably a microorganism, a plant cell, a plant or a part thereof, as compared to a corresponding non-transformed wild type non-human organism or a part thereof; and
[6346] (b) growing the non-human organism or a part thereof under conditions which permit the production of glutamate or a composition comprising glutamate in said non-human organism or in the culture medium surrounding said non-human organism.

[6347] A further embodiment of the present invention relates to a process for the production of glutamine, which comprises
[6348] (a) increasing or generating one or more activities selected from the group consisting of acid shock protein in an organelle, preferably in plastids or mitochondria, especially in plastids, of a non-human organism or a part thereof, preferably a microorganism, a plant cell, a plant or a part thereof, as compared to a corresponding non-transformed wild type non-human organism or a part thereof; and
[6349] (b) growing the non-human organism or a part thereof under conditions which permit the production of glutamine or a composition comprising glutamine in said non-human organism or in the culture medium surrounding said non-human organism.

[6350] A further embodiment of the present invention relates to a process for the production of glutamine, which comprises
[6351] (a) increasing or generating one or more activities selected from the group consisting of electron transport complex protein in an organelle, preferably in plastids or mitochondria, especially in plastids, of a non-human organism or a part thereof, preferably a microorganism, a plant cell, a plant or a part thereof, as compared to a corresponding non-transformed wild type non-human organism or a part thereof; and
[6352] (b) growing the non-human organism or a part thereof under conditions which permit the production of glutamine or a composition comprising glutamine in said non-human organism or in the culture medium surrounding said non-human organism.

[6353] A further embodiment of the present invention relates to a process for the production of glutamate, which comprises
[6354] (a) increasing or generating one or more activities selected from the group consisting of protease in an organelle, preferably in plastids or mitochondria, especially in plastids, of a non-human organism or a part thereof, preferably a microorganism, a plant cell, a plant or a part thereof, as compared to a corresponding non-transformed wild type non-human organism or a part thereof; and
[6355] (b) growing the non-human organism or a part thereof under conditions which permit the production of glutamate or a composition comprising glutamate in said non-human organism or in the culture medium surrounding said non-human organism.

[6356] A further embodiment of the present invention relates to a process for the production of glutamate, which comprises
[6357] (a) increasing or generating one or more activities selected from the group consisting of b1898-protein in an organelle, preferably in plastids or mitochondria, especially in plastids, of a non-human organism or a part thereof, preferably a microorganism, a plant cell, a plant or a part thereof, as compared to a corresponding non-transformed wild type non-human organism or a part thereof; and
[6358] (b) growing the non-human organism or a part thereof under conditions which permit the production of glutamate or a composition comprising glutamate in said non-human organism or in the culture medium surrounding said non-human organism.

[6359] A further embodiment of the present invention relates to a process for the production of glutamine, which comprises
[6360] (a) increasing or generating one or more activities selected from the group consisting of transport protein in an organelle, preferably in plastids or mitochondria, especially in plastids, of a non-human organism or a part thereof, preferably a microorganism, a plant cell, a plant or a part thereof, as compared to a corresponding non-transformed wild type non-human organism or a part thereof; and
[6361] (b) growing the non-human organism or a part thereof under conditions which permit the production of glutamine or a composition comprising glutamine in said non-human organism or in the culture medium surrounding said non-human organism.

[6362] A further embodiment of the present invention relates to a process for the production of glutamate, which comprises
[6363] (a) increasing or generating one or more activities selected from the group consisting of transport protein in an organelle, preferably in plastids or mitochondria, especially in plastids, of a non-human organism or a part thereof, preferably a microorganism, a plant cell, a plant or a part thereof, as compared to a corresponding non-transformed wild type non-human organism or a part thereof; and
[6364] (b) growing the non-human organism or a part thereof under conditions which permit the production of glutamate or a composition comprising glutamate in said non-human organism or in the culture medium surrounding said non-human organism.

[6365] A further embodiment of the present invention relates to a process for the production of glutamine, which comprises
[6366] (a) increasing or generating one or more activities selected from the group consisting of transport protein in an organelle, preferably in plastids or mitochondria, especially in plastids, of a non-human organism or a part thereof, preferably a microorganism, a plant cell, a plant or a part thereof, as compared to a corresponding non-transformed wild type non-human organism or a part thereof; and
[6367] (b) growing the non-human organism or a part thereof under conditions which permit the production of glutamine or a composition comprising glutamine in said non-human organism or in the culture medium surrounding said non-human organism.

[6368] A further embodiment of the present invention relates to a process for the production of proline, which comprises
[6369] (a) increasing or generating one or more activities selected from the group consisting of transport protein in an organelle, preferably in plastids or mitochondria, especially in plastids, of a non-human organism or a part thereof, preferably a microorganism, a plant cell, a plant or a part thereof, as compared to a corresponding non-transformed wild type non-human organism or a part thereof; and
[6370] (b) growing the non-human organism or a part thereof under conditions which permit the production of proline or a composition comprising proline in said non-human organism or in the culture medium surrounding said non-human organism.

[6371] A further embodiment of the present invention relates to a process for the production of glutamine, which comprises
[6372] (a) increasing or generating one or more activities selected from the group consisting of uridine/cytidine kinase in an organelle, preferably in plastids or mitochondria, especially in plastids, of a non-human organism or a part thereof, preferably a microorganism, a plant cell, a plant or a part thereof, as compared to a corresponding non-transformed wild type non-human organism or a part thereof; and
[6373] (b) growing the non-human organism or a part thereof under conditions which permit the production of glutamine or a composition comprising glutamine in said non-human organism or in the culture medium surrounding said non-human organism.

[6374] A further embodiment of the present invention relates to a process for the production of glutamate, which comprises
[6375] (a) increasing or generating one or more activities selected from the group consisting of b2107-protein in an organelle, preferably in plastids or mitochondria, especially in plastids, of a non-human organism or a part thereof, preferably a microorganism, a plant cell, a plant or a part thereof, as compared to a corresponding non-transformed wild type non-human organism or a part thereof; and
[6376] (b) growing the non-human organism or a part thereof under conditions which permit the production of glutamate or a composition comprising glutamate in said non-human organism or in the culture medium surrounding said non-human organism.

[6377] A further embodiment of the present invention relates to a process for the production of glutamine, which comprises
[6378] (a) increasing or generating one or more activities selected from the group consisting of b2121-protein in an organelle, preferably in plastids or mitochondria, especially in plastids, of a non-human organism or a part thereof, preferably a microorganism, a plant cell, a plant or a part thereof, as compared to a corresponding non-transformed wild type non-human organism or a part thereof; and
[6379] (b) growing the non-human organism or a part thereof under conditions which permit the production of glutamine or a composition comprising glutamine in said non-human organism or in the culture medium surrounding said non-human organism.

[6380] A further embodiment of the present invention relates to a process for the production of glutamate, which comprises
[6381] (a) increasing or generating one or more activities selected from the group consisting of ABC transporter permease protein in an organelle, preferably in plastids or mitochondria, especially in plastids, of a non-human organism or a part thereof, preferably a microorganism, a plant cell, a plant or a part thereof, as compared to a corresponding non-transformed wild type non-human organism or a part thereof; and
[6382] (b) growing the non-human organism or a part thereof under conditions which permit the production of glutamate or a composition comprising glutamate in said non-human organism or in the culture medium surrounding said non-human organism.

[6383] A further embodiment of the present invention relates to a process for the production of glutamine, which comprises
[6384] (a) increasing or generating one or more activities selected from the group consisting of ABC transporter permease protein in an organelle, preferably in plastids or mitochondria, especially in plastids, of a non-human organism or a part thereof, preferably a microorganism, a plant cell, a plant or a part thereof, as compared to a corresponding non-transformed wild type non-human organism or a part thereof; and
[6385] (b) growing the non-human organism or a part thereof under conditions which permit the production of glutamine or a composition comprising glutamine in said non-human organism or in the culture medium surrounding said non-human organism.

[6386] A further embodiment of the present invention relates to a process for the production of proline, which comprises
[6387] (a) increasing or generating one or more activities selected from the group consisting of ABC transporter permease protein in an organelle, preferably in plastids or mitochondria, especially in plastids, of a non-human organism or a part thereof, preferably a microorganism, a plant cell, a plant or a part thereof, as compared to a corresponding non-transformed wild type non-human organism or a part thereof; and
[6388] (b) growing the non-human organism or a part thereof under conditions which permit the production of proline or a composition comprising proline in said non-human organism or in the culture medium surrounding said non-human organism.

[6389] A further embodiment of the present invention relates to a process for the production of glutamine, which comprises
[6390] (a) increasing or generating one or more activities selected from the group consisting of NADH dehydrogenase I chain I in an organelle, preferably in plastids or mitochondria, especially in plastids, of a non-human organism or a part thereof, preferably a microorganism, a plant cell, a plant or a part thereof, as compared to a corresponding non-transformed wild type non-human organism or a part thereof; and
[6391] (b) growing the non-human organism or a part thereof under conditions which permit the production of glutamine or a composition comprising glutamine in said non-human organism or in the culture medium surrounding said non-human organism.

[6392] A further embodiment of the present invention relates to a process for the production of glutamate, which comprises
[6393] (a) increasing or generating one or more activities selected from the group consisting of b2360-protein in an organelle, preferably in plastids or mitochondria, especially in plastids, of a non-human organism or a part thereof, preferably a microorganism, a plant cell, a plant or a part thereof, as compared to a corresponding non-transformed wild type non-human organism or a part thereof; and
[6394] (b) growing the non-human organism or a part thereof under conditions which permit the production of glutamate or a composition comprising glutamate in said non-human organism or in the culture medium surrounding said non-human organism.

[6395] A further embodiment of the present invention relates to a process for the production of proline, which comprises
[6396] (a) increasing or generating one or more activities selected from the group consisting of b2399-protein in an organelle, preferably in plastids or mitochondria, especially in plastids, of a non-human organism or a part thereof, preferably a microorganism, a plant cell, a plant or a part thereof, as compared to a corresponding non-transformed wild type non-human organism or a part thereof; and
[6397] (b) growing the non-human organism or a part thereof under conditions which permit the production of proline or a composition comprising proline in said non-human organism or in the culture medium surrounding said non-human organism.

[6398] A further embodiment of the present invention relates to a process for the production of glutamate, which comprises
[6399] (a) increasing or generating one or more activities selected from the group consisting of transcriptional regulator in an organelle, preferably in plastids or mitochondria, especially in plastids, of a non-human organism or a part thereof, preferably a microorganism, a plant cell, a plant or a part thereof, as compared to a corresponding non-transformed wild type non-human organism or a part thereof; and
[6400] (b) growing the non-human organism or a part thereof under conditions which permit the production of glutamate or a composition comprising glutamate in said non-human organism or in the culture medium surrounding said non-human organism.

[6401] A further embodiment of the present invention relates to a process for the production of arginine, which comprises
[6402] (a) increasing or generating one or more activities selected from the group consisting of cysteine synthase A in an organelle, preferably in plastids or mitochondria, especially in plastids, of a non-human organism or a part thereof, preferably a microorganism, a plant cell, a plant or a part thereof, as compared to a corresponding non-transformed wild type non-human organism or a part thereof; and
[6403] (b) growing the non-human organism or a part thereof under conditions which permit the production of arginine or a composition comprising arginine in said non-human organism or in the culture medium surrounding said non-human organism.

[6404] A further embodiment of the present invention relates to a process for the production of glutamate, which comprises
[6405] (a) increasing or generating one or more activities selected from the group consisting of cysteine synthase A in an organelle, preferably in plastids or mitochondria, especially in plastids, of a non-human organism or a part thereof, preferably a microorganism, a plant cell, a plant or a part thereof, as compared to a corresponding non-transformed wild type non-human organism or a part thereof; and
[6406] (b) growing the non-human organism or a part thereof under conditions which permit the production of glutamate or a composition comprising glutamate in said non-human organism or in the culture medium surrounding said non-human organism.

[6407] A further embodiment of the present invention relates to a process for the production of proline, which comprises
[6408] (a) increasing or generating one or more activities selected from the group consisting of ethanolamine utilization protein in an organelle, preferably in plastids or mitochondria, especially in plastids, of a non-human organism or a part thereof, preferably a microorganism, a plant cell, a plant or a part thereof, as compared to a corresponding non-transformed wild type non-human organism or a part thereof; and
[6409] (b) growing the non-human organism or a part thereof under conditions which permit the production of proline or a composition comprising proline in said non-human organism or in the culture medium surrounding said non-human organism.

[6410] A further embodiment of the present invention relates to a process for the production of proline, which comprises
[6411] (a) increasing or generating one or more activities selected from the group consisting of b2474-protein in an organelle, preferably in plastids or mitochondria, especially in plastids, of a non-human organism or a part thereof, preferably a microorganism, a plant cell, a plant or a part thereof, as compared to a corresponding non-transformed wild type non-human organism or a part thereof; and
[6412] (b) growing the non-human organism or a part thereof under conditions which permit the production of proline or a composition comprising proline in said non-human organism or in the culture medium surrounding said non-human organism.

[6413] A further embodiment of the present invention relates to a process for the production of glutamate, which comprises
[6414] (a) increasing or generating one or more activities selected from the group consisting of b2513-protein in an organelle, preferably in plastids or mitochondria, especially in plastids, of a non-human organism or a part thereof, preferably a microorganism, a plant cell, a plant or a part thereof, as compared to a corresponding non-transformed wild type non-human organism or a part thereof; and
[6415] (b) growing the non-human organism or a part thereof under conditions which permit the production of glutamate or a composition comprising glutamate in said non-human organism or in the culture medium surrounding said non-human organism.

[6416] A further embodiment of the present invention relates to a process for the production of glutamine, which comprises
[6417] (a) increasing or generating one or more activities selected from the group consisting of b2513-protein in an organelle, preferably in plastids or mitochondria, especially in plastids, of a non-human organism or a part thereof, preferably a microorganism, a plant cell, a plant or a part thereof, as compared to a corresponding non-transformed wild type non-human organism or a part thereof; and
[6418] (b) growing the non-human organism or a part thereof under conditions which permit the production of glutamine or a composition comprising glutamine in said non-human organism or in the culture medium surrounding said non-human organism.

[6419] A further embodiment of the present invention relates to a process for the production of arginine, which comprises
[6420] (a) increasing or generating one or more activities selected from the group consisting of 2,3-dihydroxy-2,3-dihydrophenylpropionatedehydrogenase in an organelle, preferably in plastids or mitochondria, especially in plastids, of a non-human organism or a part thereof, preferably a microorganism, a plant cell, a plant or a part thereof, as compared to a corresponding non-transformed wild type non-human organism or a part thereof; and
[6421] (b) growing the non-human organism or a part thereof under conditions which permit the production of arginine or a composition comprising arginine in said non-human organism or in the culture medium surrounding said non-human organism.

[6422] A further embodiment of the present invention relates to a process for the production of glutamate, which comprises
[6423] (a) increasing or generating one or more activities selected from the group consisting of 2,3-dihydroxy-2,3-dihydrophenylpropionatedehydrogenase in an organelle, preferably in plastids or mitochondria, especially in plastids, of a non-human organism or a part thereof, preferably a microorganism, a plant cell, a plant or a part thereof, as compared to a corresponding non-transformed wild type non-human organism or a part thereof; and
[6424] (b) growing the non-human organism or a part thereof under conditions which permit the production of glutamate or a composition comprising glutamate in said non-human organism or in the culture medium surrounding said non-human organism.

[6425] A further embodiment of the present invention relates to a process for the production of glutamine, which comprises
[6426] (a) increasing or generating one or more activities selected from the group consisting of b2548-protein in an organelle, preferably in plastids or mitochondria, especially in plastids, of a non-human organism or a part thereof, preferably a microorganism, a plant cell, a plant or a part thereof, as compared to a corresponding non-transformed wild type non-human organism or a part thereof; and
[6427] (b) growing the non-human organism or a part thereof under conditions which permit the production of glutamine or a composition comprising glutamine in said non-human organism or in the culture medium surrounding said non-human organism.

[6428] A further embodiment of the present invention relates to a process for the production of glutamine, which comprises
[6429] (a) increasing or generating one or more activities selected from the group consisting of b2613-protein in an organelle, preferably in plastids or mitochondria, especially in plastids, of a non-human organism or a part thereof, preferably a microorganism, a plant cell, a plant or a part thereof, as compared to a corresponding non-transformed wild type non-human organism or a part thereof; and
[6430] (b) growing the non-human organism or a part thereof under conditions which permit the production of glutamine or a composition comprising glutamine in said non-human organism or in the culture medium surrounding said non-human organism.

[6431] A further embodiment of the present invention relates to a process for the production of proline, which comprises
[6432] (a) increasing or generating one or more activities selected from the group consisting of b2613-protein in an organelle, preferably in plastids or mitochondria, especially in plastids, of a non-human organism or a part thereof, preferably a microorganism, a plant cell, a plant or a part thereof, as compared to a corresponding non-transformed wild type non-human organism or a part thereof; and
[6433] (b) growing the non-human organism or a part thereof under conditions which permit the production of proline or a composition comprising proline in said non-human organism or in the culture medium surrounding said non-human organism.

[6434] A further embodiment of the present invention relates to a process for the production of glutamate, which comprises
[6435] (a) increasing or generating one or more activities selected from the group consisting of transcriptional regulator in an organelle, preferably in plastids or mitochondria, especially in plastids, of a non-human organism or a part thereof, preferably a microorganism, a plant cell, a plant or a part thereof, as compared to a corresponding non-transformed wild type non-human organism or a part thereof; and
[6436] (b) growing the non-human organism or a part thereof under conditions which permit the production of glutamate or a composition comprising glutamate in said non-human organism or in the culture medium surrounding said non-human organism.

[6437] A further embodiment of the present invention relates to a process for the production of glutamine, which comprises
[6438] (a) increasing or generating one or more activities selected from the group consisting of transcriptional regulator in an organelle, preferably in plastids or mitochondria, especially in plastids, of a non-human organism or a part thereof, preferably a microorganism, a plant cell, a plant or a part thereof, as compared to a corresponding non-transformed wild type non-human organism or a part thereof; and
[6439] (b) growing the non-human organism or a part thereof under conditions which permit the production of glutamine or a composition comprising glutamine in said non-human organism or in the culture medium surrounding said non-human organism.

[6440] A further embodiment of the present invention relates to a process for the production of proline, which comprises
[6441] (a) increasing or generating one or more activities selected from the group consisting of transcriptional regulator in an organelle, preferably in plastids or mitochondria, especially in plastids, of a non-human organism or a part thereof, preferably a microorganism, a plant cell, a plant or a part thereof, as compared to a corresponding non-transformed wild type non-human organism or a part thereof; and
[6442] (b) growing the non-human organism or a part thereof under conditions which permit the production of proline or a composition comprising proline in said non-human organism or in the culture medium surrounding said non-human organism.

[6443] A further embodiment of the present invention relates to a process for the production of glutamate, which comprises
[6444] (a) increasing or generating one or more activities selected from the group consisting of b2673-protein in an organelle, preferably in plastids or mitochondria, especially in plastids, of a non-human organism or a part thereof, preferably a microorganism, a plant cell, a plant or a part thereof, as compared to a corresponding non-transformed wild type non-human organism or a part thereof; and
[6445] (b) growing the non-human organism or a part thereof under conditions which permit the production of glutamate or a composition comprising glutamate in said non-human organism or in the culture medium surrounding said non-human organism.

[6446] A further embodiment of the present invention relates to a process for the production of glutamine, which comprises
[6447] (a) increasing or generating one or more activities selected from the group consisting of b2673-protein in an organelle, preferably in plastids or mitochondria, especially in plastids, of a non-human organism or a part thereof, preferably a microorganism, a plant cell, a plant or a part thereof, as compared to a corresponding non-transformed wild type non-human organism or a part thereof; and
[6448] (b) growing the non-human organism or a part thereof under conditions which permit the production of glutamine or a composition comprising glutamine in said non-human organism or in the culture medium surrounding said non-human organism.

[6449] A further embodiment of the present invention relates to a process for the production of glutamine, which comprises
[6450] (a) increasing or generating one or more activities selected from the group consisting of transcriptional regulator in an organelle, preferably in plastids or mitochondria, especially in plastids, of a non-human organism or a part thereof, preferably a microorganism, a plant cell, a plant or a part thereof, as compared to a corresponding non-transformed wild type non-human organism or a part thereof; and
[6451] (b) growing the non-human organism or a part thereof under conditions which permit the production of glutamine or a composition comprising glutamine in said non-human organism or in the culture medium surrounding said non-human organism.

[6452] A further embodiment of the present invention relates to a process for the production of proline, which comprises
[6453] (a) increasing or generating one or more activities selected from the group consisting of transcriptional regulator in an organelle, preferably in plastids or mitochondria, especially in plastids, of a non-human organism or a part thereof, preferably a microorganism, a plant cell, a plant or a part thereof, as compared to a corresponding non-transformed wild type non-human organism or a part thereof; and
[6454] (b) growing the non-human organism or a part thereof under conditions which permit the production of proline or a composition comprising proline in said non-human organism or in the culture medium surrounding said non-human organism.

[6455] A further embodiment of the present invention relates to a process for the production of glutamate, which comprises
[6456] (a) increasing or generating one or more activities selected from the group consisting of b2812-protein in an organelle, preferably in plastids or mitochondria, especially in plastids, of a non-human organism or a part thereof, preferably a microorganism, a plant cell, a plant or a part thereof, as compared to a corresponding non-transformed wild type non-human organism or a part thereof; and
[6457] (b) growing the non-human organism or a part thereof under conditions which permit the production of glutamate or a composition comprising glutamate in said non-human organism or in the culture medium surrounding said non-human organism.

[6458] A further embodiment of the present invention relates to a process for the production of glutamine, which comprises
[6459] (a) increasing or generating one or more activities selected from the group consisting of b2812-protein in an organelle, preferably in plastids or mitochondria, especially in plastids, of a non-human organism or a part thereof, preferably a microorganism, a plant cell, a plant or a part thereof, as compared to a corresponding non-transformed wild type non-human organism or a part thereof; and
[6460] (b) growing the non-human organism or a part thereof under conditions which permit the production of glutamine or a composition comprising glutamine in said non-human organism or in the culture medium surrounding said non-human organism.

[6461] A further embodiment of the present invention relates to a process for the production of proline, which comprises
[6462] (a) increasing or generating one or more activities selected from the group consisting of b2812-protein in an organelle, preferably in plastids or mitochondria, especially in plastids, of a non-human organism or a part thereof, preferably a microorganism, a plant cell, a plant or a part thereof, as compared to a corresponding non-transformed wild type non-human organism or a part thereof; and
[6463] (b) growing the non-human organism or a part thereof under conditions which permit the production of proline or a composition comprising proline in said non-human organism or in the culture medium surrounding said non-human organism.

[6464] A further embodiment of the present invention relates to a process for the production of proline, which comprises
[6465] (a) increasing or generating one or more activities selected from the group consisting of b2846-protein in an organelle, preferably in plastids or mitochondria, especially in plastids, of a non-human organism or a part thereof, preferably a microorganism, a plant cell, a plant or a part thereof, as compared to a corresponding non-transformed wild type non-human organism or a part thereof; and
[6466] (b) growing the non-human organism or a part thereof under conditions which permit the production of proline or a composition comprising proline in said non-human organism or in the culture medium surrounding said non-human organism.

[6467] A further embodiment of the present invention relates to a process for the production of arginine, which comprises
[6468] (a) increasing or generating one or more activities selected from the group consisting of b2909-protein in an organelle, preferably in plastids or mitochondria, especially in plastids, of a non-human organism or a part thereof, preferably a microorganism, a plant cell, a plant or a part thereof, as compared to a corresponding non-transformed wild type non-human organism or a part thereof; and
[6469] (b) growing the non-human organism or a part thereof under conditions which permit the production of arginine or a composition comprising arginine in said non-human organism or in the culture medium surrounding said non-human organism.

[6470] A further embodiment of the present invention relates to a process for the production of proline, which comprises
[6471] (a) increasing or generating one or more activities selected from the group consisting of b2909-protein in an organelle, preferably in plastids or mitochondria, especially in plastids, of a non-human organism or a part thereof, preferably a microorganism, a plant cell, a plant or a part thereof, as compared to a corresponding non-transformed wild type non-human organism or a part thereof; and
[6472] (b) growing the non-human organism or a part thereof under conditions which permit the production of proline or a composition comprising proline in said non-human organism or in the culture medium surrounding said non-human organism.

[6473] A further embodiment of the present invention relates to a process for the production of glutamate, which comprises
[6474] (a) increasing or generating one or more activities selected from the group consisting of ribosephosphate isomerase, constitutive in an organelle, preferably in plastids or mitochondria, especially in plastids, of a non-human organism or a part thereof, preferably a microorganism, a plant cell, a plant or a part thereof, as compared to a corresponding non-transformed wild type non-human organism or a part thereof; and
[6475] (b) growing the non-human organism or a part thereof under conditions which permit the production of glutamate or a composition comprising glutamate in said non-human organism or in the culture medium surrounding said non-human organism.

[6476] A further embodiment of the present invention relates to a process for the production of glutamate, which comprises
[6477] (a) increasing or generating one or more activities selected from the group consisting of arginine exporter protein in an organelle, preferably in plastids or mitochondria, especially in plastids, of a non-human organism or a part thereof, preferably a microorganism, a plant cell, a plant or a part thereof, as compared to a corresponding non-transformed wild type non-human organism or a part thereof; and
[6478] (b) growing the non-human organism or a part thereof under conditions which permit the production of glutamate or a composition comprising glutamate in said non-human organism or in the culture medium surrounding said non-human organism.

[6479] A further embodiment of the present invention relates to a process for the production of proline, which comprises
[6480] (a) increasing or generating one or more activities selected from the group consisting of b2936-protein in an organelle, preferably in plastids or mitochondria, especially in plastids, of a non-human organism or a part thereof, preferably a microorganism, a plant cell, a plant or a part thereof, as compared to a corresponding non-transformed wild type non-human organism or a part thereof; and
[6481] (b) growing the non-human organism or a part thereof under conditions which permit the production of proline or a composition comprising proline in said non-human organism or in the culture medium surrounding said non-human organism.

[6482] A further embodiment of the present invention relates to a process for the production of proline, which comprises
[6483] (a) increasing or generating one or more activities selected from the group consisting of L-asparaginase in an organelle, preferably in plastids or mitochondria, especially in plastids, of a non-human organism or a part thereof, preferably a microorganism, a plant cell, a plant or a part thereof, as compared to a corresponding non-transformed wild type non-human organism or a part thereof; and
[6484] (b) growing the non-human organism or a part thereof under conditions which permit the production of proline or a composition comprising proline in said non-human organism or in the culture medium surrounding said non-human organism.

[6485] A further embodiment of the present invention relates to a process for the production of proline, which comprises
[6486] (a) increasing or generating one or more activities selected from the group consisting of murein transglycosylase in an organelle, preferably in plastids or mitochondria, especially in plastids, of a non-human organism or a part thereof, preferably a microorganism, a plant cell, a plant or a part thereof, as compared to a corresponding non-transformed wild type non-human organism or a part thereof; and
[6487] (b) growing the non-human organism or a part thereof under conditions which permit the production of proline or a composition comprising proline in said non-human organism or in the culture medium surrounding said non-human organism.

[6488] A further embodiment of the present invention relates to a process for the production of arginine, which comprises
[6489] (a) increasing or generating one or more activities selected from the group consisting of b2999-protein in an organelle, preferably in plastids or mitochondria, especially in plastids, of a non-human organism or a part thereof, preferably a microorganism, a plant cell, a plant or a part thereof, as compared to a corresponding non-transformed wild type non-human organism or a part thereof; and
[6490] (b) growing the non-human organism or a part thereof under conditions which permit the production of arginine or a composition comprising arginine in said non-human organism or in the culture medium surrounding said non-human organism.

[6491] A further embodiment of the present invention relates to a process for the production of proline, which comprises
[6492] (a) increasing or generating one or more activities selected from the group consisting of glycoprotease in an organelle, preferably in plastids or mitochondria, especially in plastids, of a non-human organism or a part thereof, preferably a microorganism, a plant cell, a plant or a part thereof, as compared to a corresponding non-transformed wild type non-human organism or a part thereof; and
[6493] (b) growing the non-human organism or a part thereof under conditions which permit the production of proline or a composition comprising proline in said non-human organism or in the culture medium surrounding said non-human organism.

[6494] A further embodiment of the present invention relates to a process for the production of arginine, which comprises
[6495] (a) increasing or generating one or more activities selected from the group consisting of b3121-protein in an organelle, preferably in plastids or mitochondria, especially in plastids, of a non-human organism or a part thereof, preferably a microorganism, a plant cell, a plant or a part thereof, as compared to a corresponding non-transformed wild type non-human organism or a part thereof; and
[6496] (b) growing the non-human organism or a part thereof under conditions which permit the production of arginine or a composition comprising arginine in said non-human organism or in the culture medium surrounding said non-human organism.

[6497] A further embodiment of the present invention relates to a process for the production of proline, which comprises
[6498] (a) increasing or generating one or more activities selected from the group consisting of b3121-protein in an organelle, preferably in plastids or mitochondria, especially in plastids, of a non-human organism or a part thereof, preferably a microorganism, a plant cell, a plant or a part thereof, as compared to a corresponding non-transformed wild type non-human organism or a part thereof; and
[6499] (b) growing the non-human organism or a part thereof under conditions which permit the production of proline or a composition comprising proline in said non-human organism or in the culture medium surrounding said non-human organism.

[6500] A further embodiment of the present invention relates to a process for the production of proline, which comprises
[6501] (a) increasing or generating one or more activities selected from the group consisting of b3151-protein in an organelle, preferably in plastids or mitochondria, especially in plastids, of a non-human organism or a part thereof, preferably a microorganism, a plant cell, a plant or a part thereof, as compared to a corresponding non-transformed wild type non-human organism or a part thereof; and
[6502] (b) growing the non-human organism or a part thereof under conditions which permit the production of proline or a composition comprising proline in said non-human organism or in the culture medium surrounding said non-human organism.

[6503] A further embodiment of the present invention relates to a process for the production of arginine, which comprises
[6504] (a) increasing or generating one or more activities selected from the group consisting of acetyl CoA carboxylase in an organelle, preferably in plastids or mitochondria, especially in plastids, of a non-human organism or a part thereof, preferably a microorganism, a plant cell, a plant or a part thereof, as compared to a corresponding non-transformed wild type non-human organism or a part thereof; and
[6505] (b) growing the non-human organism or a part thereof under conditions which permit the production of arginine or a composition comprising arginine in said non-human organism or in the culture medium surrounding said non-human organism.

[6506] A further embodiment of the present invention relates to a process for the production of glutamate, which comprises
[6507] (a) increasing or generating one or more activities selected from the group consisting of acetyl CoA carboxylase in an organelle, preferably in plastids or mitochondria, especially in plastids, of a non-human organism or a part thereof, preferably a microorganism, a plant cell, a plant or a part thereof, as compared to a corresponding non-transformed wild type non-human organism or a part thereof; and
[6508] (b) growing the non-human organism or a part thereof under conditions which permit the production of glutamate or a composition comprising glutamate in said non-human organism or in the culture medium surrounding said non-human organism.

[6509] A further embodiment of the present invention relates to a process for the production of arginine, which comprises
[6510] (a) increasing or generating one or more activities selected from the group consisting of methyltransferase in an organelle, preferably in plastids or mitochondria, especially in plastids, of a non-human organism or a part thereof, preferably a microorganism, a plant cell, a plant or a part thereof, as compared to a corresponding non-transformed wild type non-human organism or a part thereof; and
[6511] (b) growing the non-human organism or a part thereof under conditions which permit the production of arginine or a composition comprising arginine in said non-human organism or in the culture medium surrounding said non-human organism.

[6512] A further embodiment of the present invention relates to a process for the production of glutamate, which comprises
[6513] (a) increasing or generating one or more activities selected from the group consisting of methyltransferase in an organelle, preferably in plastids or mitochondria, especially in plastids, of a non-human organism or a part thereof, preferably a microorganism, a plant cell, a plant or a part thereof, as compared to a corresponding non-transformed wild type non-human organism or a part thereof; and
[6514] (b) growing the non-human organism or a part thereof under conditions which permit the production of glutamate or a composition comprising glutamate in said non-human organism or in the culture medium surrounding said non-human organism.

[6515] A further embodiment of the present invention relates to a process for the production of glutamine, which comprises
[6516] (a) increasing or generating one or more activities selected from the group consisting of methyltransferase in an organelle, preferably in plastids or mitochondria, especially in plastids, of a non-human organism or a part thereof, preferably a microorganism, a plant cell, a plant or a part thereof, as compared to a corresponding non-transformed wild type non-human organism or a part thereof; and
[6517] (b) growing the non-human organism or a part thereof under conditions which permit the production of glutamine or a composition comprising glutamine in said non-human organism or in the culture medium surrounding said non-human organism.

[6518] A further embodiment of the present invention relates to a process for the production of proline, which comprises
[6519] (a) increasing or generating one or more activities selected from the group consisting of methyltransferase in an organelle, preferably in plastids or mitochondria, especially in plastids, of a non-human organism or a part thereof, preferably a microorganism, a plant cell, a plant or a part thereof, as compared to a corresponding non-transformed wild type non-human organism or a part thereof; and
[6520] (b) growing the non-human organism or a part thereof under conditions which permit the production of proline or a composition comprising proline in said non-human organism or in the culture medium surrounding said non-human organism.

[6521] A further embodiment of the present invention relates to a process for the production of proline, which comprises
[6522] (a) increasing or generating one or more activities selected from the group consisting of b3346-protein in an organelle, preferably in plastids or mitochondria, especially in plastids, of a non-human organism or a part thereof, preferably a microorganism, a plant cell, a plant or a part thereof, as compared to a corresponding non-transformed wild type non-human organism or a part thereof; and
[6523] (b) growing the non-human organism or a part thereof under conditions which permit the production of proline or a composition comprising proline in said non-human organism or in the culture medium surrounding said non-human organism.

[6524] A further embodiment of the present invention relates to a process for the production of glutamine, which comprises
[6525] (a) increasing or generating one or more activities selected from the group consisting of b3410-protein in an organelle, preferably in plastids or mitochondria, especially in plastids, of a non-human organism or a part thereof, preferably a microorganism, a plant cell, a plant or a part thereof, as compared to a corresponding non-transformed wild type non-human organism or a part thereof; and
[6526] (b) growing the non-human organism or a part thereof under conditions which permit the production of glutamine or a composition comprising glutamine in said non-human organism or in the culture medium surrounding said non-human organism.

[6527] A further embodiment of the present invention relates to a process for the production of arginine, which comprises
[6528] (a) increasing or generating one or more activities selected from the group consisting of B3427-protein in an organelle, preferably in plastids or mitochondria, especially in plastids, of a non-human organism or a part thereof, preferably a microorganism, a plant cell, a plant or a part thereof, as compared to a corresponding non-transformed wild type non-human organism or a part thereof; and
[6529] (b) growing the non-human organism or a part thereof under conditions which permit the production of arginine or a composition comprising arginine in said non-human organism or in the culture medium surrounding said non-human organism.

[6530] A further embodiment of the present invention relates to a process for the production of glutamate, which comprises
[6531] (a) increasing or generating one or more activities selected from the group consisting of b3509-protein in an organelle, preferably in plastids or mitochondria, especially in plastids, of a non-human organism or a part thereof, preferably a microorganism, a plant cell, a plant or a part thereof, as compared to a corresponding non-transformed wild type non-human organism or a part thereof; and
[6532] (b) growing the non-human organism or a part thereof under conditions which permit the production of glutamate or a composition comprising glutamate in said non-human organism or in the culture medium surrounding said non-human organism.

[6533] A further embodiment of the present invention relates to a process for the production of proline, which comprises
[6534] (a) increasing or generating one or more activities selected from the group consisting of valine-pyruvate transaminase in an organelle, preferably in plastids or mitochondria, especially in plastids, of a non-human organism or a part thereof, preferably a microorganism, a plant cell, a plant or a part thereof, as compared to a corresponding non-transformed wild type non-human organism or a part thereof; and
[6535] (b) growing the non-human organism or a part thereof under conditions which permit the production of proline or a composition comprising proline in said non-human organism or in the culture medium surrounding said non-human organism.

[6536] A further embodiment of the present invention relates to a process for the production of glutamine, which comprises
[6537] (a) increasing or generating one or more activities selected from the group consisting of threonine dehydrogenase in an organelle, preferably in plastids or mitochondria, especially in plastids, of a non-human organism or a part thereof, preferably a microorganism, a plant cell, a plant or a part thereof, as compared to a corresponding non-transformed wild type non-human organism or a part thereof; and
[6538] (b) growing the non-human organism or a part thereof under conditions which permit the production of glutamine or a composition comprising glutamine in said non-human organism or in the culture medium surrounding said non-human organism.

[6539] A further embodiment of the present invention relates to a process for the production of proline, which comprises
[6540] (a) increasing or generating one or more activities selected from the group consisting of threonine dehydrogenase in an organelle, preferably in plastids or mitochondria, especially in plastids, of a non-human organism or a part thereof, preferably a microorganism, a plant cell, a plant or a part thereof, as compared to a corresponding non-transformed wild type non-human organism or a part thereof; and
[6541] (b) growing the non-human organism or a part thereof under conditions which permit the production of proline or a composition comprising proline in said non-human organism or in the culture medium surrounding said non-human organism.

[6542] A further embodiment of the present invention relates to a process for the production of proline, which comprises
[6543] (a) increasing or generating one or more activities selected from the group consisting of phosphopantetheine adenylyltransferase in an organelle, preferably in plastids or mitochondria, especially in plastids, of a non-human organism or a part thereof, preferably a microorganism, a plant cell, a plant or a part thereof, as compared to a corresponding non-transformed wild type non-human organism or a part thereof; and
[6544] (b) growing the non-human organism or a part thereof under conditions which permit the production of proline or a composition comprising proline in said non-human organism or in the culture medium surrounding said non-human organism.

[6545] A further embodiment of the present invention relates to a process for the production of glutamine, which comprises
[6546] (a) increasing or generating one or more activities selected from the group consisting of ATP synthase subunit beta in an organelle, preferably in plastids or mitochondria, especially in plastids, of a non-human organism or a part thereof, preferably a microorganism, a plant cell, a plant or a part thereof, as compared to a corresponding non-transformed wild type non-human organism or a part thereof; and
[6547] (b) growing the non-human organism or a part thereof under conditions which permit the production of glutamine or a composition comprising glutamine in said non-human organism or in the culture medium surrounding said non-human organism.

[6548] A further embodiment of the present invention relates to a process for the production of arginine, which comprises
[6549] (a) increasing or generating one or more activities selected from the group consisting of enterobacterial common antigen polymerase in an organelle, preferably in plastids or mitochondria, especially in plastids, of a non-human organism or a part thereof, preferably a microorganism, a plant cell, a plant or a part thereof, as compared to a corresponding non-transformed wild type non-human organism or a part thereof; and
[6550] (b) growing the non-human organism or a part thereof under conditions which permit the production of arginine or a composition comprising arginine in said non-human organism or in the culture medium surrounding said non-human organism.

[6551] A further embodiment of the present invention relates to a process for the production of glutamate, which comprises
[6552] (a) increasing or generating one or more activities selected from the group consisting of enterobacterial common antigen polymerase in an organelle, preferably in plastids or mitochondria, especially in plastids, of a non-human organism or a part thereof, preferably a microorganism, a plant cell, a plant or a part thereof, as compared to a corresponding non-transformed wild type non-human organism or a part thereof; and
[6553] (b) growing the non-human organism or a part thereof under conditions which permit the production of glutamate or a composition comprising glutamate in said non-human organism or in the culture medium surrounding said non-human organism.

[6554] A further embodiment of the present invention relates to a process for the production of proline, which comprises
[6555] (a) increasing or generating one or more activities selected from the group consisting of DNA helicase II in an organelle, preferably in plastids or mitochondria, especially in plastids, of a non-human organism or a part thereof, preferably a microorganism, a plant cell, a plant or a part thereof, as compared to a corresponding non-transformed wild type non-human organism or a part thereof; and
[6556] (b) growing the non-human organism or a part thereof under conditions which permit the production of proline or a composition comprising proline in said non-human organism or in the culture medium surrounding said non-human organism.

[6557] A further embodiment of the present invention relates to a process for the production of glutamine, which comprises
[6558] (a) increasing or generating one or more activities selected from the group consisting of b3814-protein in an organelle, preferably in plastids or mitochondria, especially in plastids, of a non-human organism or a part thereof, preferably a microorganism, a plant cell, a plant or a part thereof, as compared to a corresponding non-transformed wild type non-human organism or a part thereof; and
[6559] (b) growing the non-human organism or a part thereof under conditions which permit the production of glutamine or a composition comprising glutamine in said non-human organism or in the culture medium surrounding said non-human organism.

[6560] A further embodiment of the present invention relates to a process for the production of proline, which comprises
[6561] (a) increasing or generating one or more activities selected from the group consisting of b3817-protein in an organelle, preferably in plastids or mitochondria, especially in plastids, of a non-human organism or a part thereof, preferably a microorganism, a plant cell, a plant or a part thereof, as compared to a corresponding non-transformed wild type non-human organism or a part thereof; and
[6562] (b) growing the non-human organism or a part thereof under conditions which permit the production of proline or a composition comprising proline in said non-human organism or in the culture medium surrounding said non-human organism.

[6563] A further embodiment of the present invention relates to a process for the production of glutamine, which comprises
[6564] (a) increasing or generating one or more activities selected from the group consisting of glycerol dehydrogenase in an organelle, preferably in plastids or mitochondria, especially in plastids, of a non-human organism or a part thereof, preferably a microorganism, a plant cell, a plant or a part thereof, as compared to a corresponding non-transformed wild type non-human organism or a part thereof; and
[6565] (b) growing the non-human organism or a part thereof under conditions which permit the production of glutamine or a composition comprising glutamine in said non-human organism or in the culture medium surrounding said non-human organism.

[6566] A further embodiment of the present invention relates to a process for the production of glutamine, which comprises
[6567] (a) increasing or generating one or more activities selected from the group consisting of b3989-protein in an organelle, preferably in plastids or mitochondria, especially in plastids, of a non-human organism or a part thereof, preferably a microorganism, a plant cell, a plant or a part thereof, as compared to a corresponding non-transformed wild type non-human organism or a part thereof; and
[6568] (b) growing the non-human organism or a part thereof under conditions which permit the production of glutamine or a composition comprising glutamine in said non-human organism or in the culture medium surrounding said non-human organism.

[6569] A further embodiment of the present invention relates to a process for the production of glutamate, which comprises
[6570] (a) increasing or generating one or more activities selected from the group consisting of acetyltransferase in an organelle, preferably in plastids or mitochondria, especially in plastids, of a non-human organism or a part thereof, preferably a microorganism, a plant cell, a plant or a part thereof, as compared to a corresponding non-transformed wild type non-human organism or a part thereof; and
[6571] (b) growing the non-human organism or a part thereof under conditions which permit the production of glutamate or a composition comprising glutamate in said non-human organism or in the culture medium surrounding said non-human organism.

[6572] A further embodiment of the present invention relates to a process for the production of arginine, which comprises
[6573] (a) increasing or generating one or more activities selected from the group consisting of b4029-protein in an organelle, preferably in plastids or mitochondria, especially in plastids, of a non-human organism or a part thereof, preferably a microorganism, a plant cell, a plant or a part thereof, as compared to a corresponding non-transformed wild type non-human organism or a part thereof; and
[6574] (b) growing the non-human organism or a part thereof under conditions which permit the production of arginine or a composition comprising arginine in said non-human organism or in the culture medium surrounding said non-human organism.

[6575] A further embodiment of the present invention relates to a process for the production of glutamine, which comprises
[6576] (a) increasing or generating one or more activities selected from the group consisting of b4029-protein in an organelle, preferably in plastids or mitochondria, especially in plastids, of a non-human organism or a part thereof, preferably a microorganism, a plant cell, a plant or a part thereof, as compared to a corresponding non-transformed wild type non-human organism or a part thereof; and
[6577] (b) growing the non-human organism or a part thereof under conditions which permit the production of glutamine or a composition comprising glutamine in said non-human organism or in the culture medium surrounding said non-human organism.

[6578] A further embodiment of the present invention relates to a process for the production of proline, which comprises
[6579] (a) increasing or generating one or more activities selected from the group consisting of b4029-protein in an organelle, preferably in plastids or mitochondria, especially in plastids, of a non-human organism or a part thereof, preferably a microorganism, a plant cell, a plant or a part thereof, as compared to a corresponding non-transformed wild type non-human organism or a part thereof; and
[6580] (b) growing the non-human organism or a part thereof under conditions which permit the production of proline or a composition comprising proline in said non-human organism or in the culture medium surrounding said non-human organism.

[6581] A further embodiment of the present invention relates to a process for the production of arginine, which comprises
[6582] (a) increasing or generating one or more activities selected from the group consisting of cation/acetate symporter in an organelle, preferably in plastids or mitochondria, especially in plastids, of a non-human organism or a part thereof, preferably a microorganism, a plant cell, a plant or a part thereof, as compared to a corresponding non-transformed wild type non-human organism or a part thereof; and
[6583] (b) growing the non-human organism or a part thereof under conditions which permit the production of arginine or a composition comprising arginine in said non-human organism or in the culture medium surrounding said non-human organism.

[6584] A further embodiment of the present invention relates to a process for the production of arginine, which comprises
[6585] (a) increasing or generating one or more activities selected from the group consisting of b4121-protein in an organelle, preferably in plastids or mitochondria, especially in plastids, of a non-human organism or a part thereof, preferably a microorganism, a plant cell, a plant or a part thereof, as compared to a corresponding non-transformed wild type non-human organism or a part thereof; and
[6586] (b) growing the non-human organism or a part thereof under conditions which permit the production of arginine or a composition comprising arginine in said non-human organism or in the culture medium surrounding said non-human organism.

[6587] A further embodiment of the present invention relates to a process for the production of proline, which comprises
[6588] (a) increasing or generating one or more activities selected from the group consisting of b4121-protein in an organelle, preferably in plastids or mitochondria, especially in plastids, of a non-human organism or a part thereof, preferably a microorganism, a plant cell, a plant or a part thereof, as compared to a corresponding non-transformed wild type non-human organism or a part thereof; and
[6589] (b) growing the non-human organism or a part thereof under conditions which permit the production of proline or a composition comprising proline in said non-human organism or in the culture medium surrounding said non-human organism.

[6590] A further embodiment of the present invention relates to a process for the production of proline, which comprises
[6591] (a) increasing or generating one or more activities selected from the group consisting of lysyltRNA synthetase in an organelle, preferably in plastids or mitochondria, especially in plastids, of a non-human organism or a part thereof, preferably a microorganism, a plant cell, a plant or a part thereof, as compared to a corresponding non-transformed wild type non-human organism or a part thereof; and
[6592] (b) growing the non-human organism or a part thereof under conditions which permit the production of proline or a composition comprising proline in said non-human organism or in the culture medium surrounding said non-human organism.

[6593] A further embodiment of the present invention relates to a process for the production of glutamine, which comprises
[6594] (a) increasing or generating one or more activities selected from the group consisting of aspartase in an organelle, preferably in plastids or mitochondria, especially in plastids, of a non-human organism or a part thereof, preferably a microorganism, a plant cell, a plant or a part thereof, as compared to a corresponding non-transformed wild type non-human organism or a part thereof; and
[6595] (b) growing the non-human organism or a part thereof under conditions which permit the production of glutamine or a composition comprising glutamine in said non-human organism or in the culture medium surrounding said non-human organism.

[6596] A further embodiment of the present invention relates to a process for the production of arginine, which comprises
[6597] (a) increasing or generating one or more activities selected from the group consisting of acetyltransferase in an organelle, preferably in plastids or mitochondria, especially in plastids, of a non-human organism or a part thereof, preferably a microorganism, a plant cell, a plant or a part thereof, as compared to a corresponding non-transformed wild type non-human organism or a part thereof; and
[6598] (b) growing the non-human organism or a part thereof under conditions which permit the production of arginine or a composition comprising arginine in said non-human organism or in the culture medium surrounding said non-human organism.

[6599] A further embodiment of the present invention relates to a process for the production of glutamine, which comprises
[6600] (a) increasing or generating one or more activities selected from the group consisting of acetyltransferase in an organelle, preferably in plastids or mitochondria, especially in plastids, of a non-human organism or a part thereof, preferably a microorganism, a plant cell, a plant or a part thereof, as compared to a corresponding non-transformed wild type non-human organism or a part thereof; and
[6601] (b) growing the non-human organism or a part thereof under conditions which permit the production of glutamine or a composition comprising glutamine in said non-human organism or in the culture medium surrounding said non-human organism.

[6602] A further embodiment of the present invention relates to a process for the production of proline, which comprises
[6603] (a) increasing or generating one or more activities selected from the group consisting of acetyltransferase in an organelle, preferably in plastids or mitochondria, especially in plastids, of a non-human organism or a part thereof, preferably a microorganism, a plant cell, a plant or a part thereof, as compared to a corresponding non-transformed wild type non-human organism or a part thereof; and
[6604] (b) growing the non-human organism or a part thereof under conditions which permit the production of proline or a composition comprising proline in said non-human organism or in the culture medium surrounding said non-human organism.

[6605] A further embodiment of the present invention relates to a process for the production of arginine, which comprises
[6606] (a) increasing or generating one or more activities selected from the group consisting of gluconate transport system permease 3 in an organelle, preferably in plastids or mitochondria, especially in plastids, of a non-human organism or a part thereof, preferably a microorganism, a plant cell, a plant or a part thereof, as compared to a corresponding non-transformed wild type non-human organism or a part thereof; and
[6607] (b) growing the non-human organism or a part thereof under conditions which permit the production of arginine or a composition comprising arginine in said non-human organism or in the culture medium surrounding said non-human organism.

[6608] A further embodiment of the present invention relates to a process for the production of glutamate, which comprises
[6609] (a) increasing or generating one or more activities selected from the group consisting of purine-nucleoside phosphorylase in an organelle, preferably in plastids or mitochondria, especially in plastids, of a non-human organism or a part thereof, preferably a microorganism, a plant cell, a plant or a part thereof, as compared to a corresponding non-transformed wild type non-human organism or a part thereof; and
[6610] (b) growing the non-human organism or a part thereof under conditions which permit the production of glutamate or a composition comprising glutamate in said non-human organism or in the culture medium surrounding said non-human organism.

[6611] A further embodiment of the present invention relates to a process for the production of proline, which comprises
[6612] (a) increasing or generating one or more activities selected from the group consisting of purine-nucleoside phosphorylase in an organelle, preferably in plastids or mitochondria, especially in plastids, of a non-human organism or a part thereof, preferably a microorganism, a plant cell, a plant or a part thereof, as compared to a corresponding non-transformed wild type non-human organism or a part thereof; and
[6613] (b) growing the non-human organism or a part thereof under conditions which permit the production of proline or a composition comprising proline in said non-human organism or in the culture medium surrounding said non-human organism.

[6614] A further embodiment of the present invention relates to a process for the production of arginine, which comprises
[6615] (a) increasing or generating one or more activities selected from the group consisting of thioredoxin in an organelle, preferably in plastids or mitochondria, especially in plastids, of a non-human organism or a part thereof, preferably a microorganism, a plant cell, a plant or a part thereof, as compared to a corresponding non-transformed wild type non-human organism or a part thereof; and
[6616] (b) growing the non-human organism or a part thereof under conditions which permit the production of arginine or a composition comprising arginine in said non-human organism or in the culture medium surrounding said non-human organism.

[6617] A further embodiment of the present invention relates to a process for the production of proline, which comprises
[6618] (a) increasing or generating one or more activities selected from the group consisting of GM02LC11114-protein in an organelle, preferably in plastids or mitochondria, especially in plastids, of a non-human organism or a part thereof, preferably a microorganism, a plant cell, a plant or a part thereof, as compared to a corresponding non-transformed wild type non-human organism or a part thereof; and
[6619] (b) growing the non-human organism or a part thereof under conditions which permit the production of proline or a composition comprising proline in said non-human organism or in the culture medium surrounding said non-human organism.

[6620] A further embodiment of the present invention relates to a process for the production of glutamine, which comprises
[6621] (a) increasing or generating one or more activities selected from the group consisting of glutaredoxin in an organelle, preferably in plastids or mitochondria, especially in plastids, of a non-human organism or a part thereof, preferably a microorganism, a plant cell, a plant or a part thereof, as compared to a corresponding non-transformed wild type non-human organism or a part thereof; and
[6622] (b) growing the non-human organism or a part thereof under conditions which permit the production of glutamine or a composition comprising glutamine in said non-human organism or in the culture medium surrounding said non-human organism.

[6623] A further embodiment of the present invention relates to a process for the production of arginine, which comprises
[6624] (a) increasing or generating one or more activities selected from the group consisting of histone H2A in an organelle, preferably in plastids or mitochondria, especially in plastids, of a non-human organism or a part thereof, preferably a microorganism, a plant cell, a plant or a part thereof, as compared to a corresponding non-transformed wild type non-human organism or a part thereof; and
[6625] (b) growing the non-human organism or a part thereof under conditions which permit the production of arginine or a composition comprising arginine in said non-human organism or in the culture medium surrounding said non-human organism.

[6626] A further embodiment of the present invention relates to a process for the production of proline, which comprises
[6627] (a) increasing or generating one or more activities selected from the group consisting of histone H2A in an organelle, preferably in plastids or mitochondria, especially in plastids, of a non-human organism or a part thereof, preferably a microorganism, a plant cell, a plant or a part thereof, as compared to a corresponding non-transformed wild type non-human organism or a part thereof; and
[6628] (b) growing the non-human organism or a part thereof under conditions which permit the production of proline or a composition comprising proline in said non-human organism or in the culture medium surrounding said non-human organism.

[6629] A further embodiment of the present invention relates to a process for the production of glutamine, which comprises
[6630] (a) increasing or generating one or more activities selected from the group consisting of GM02LC17485-protein in an organelle, preferably in plastids or mitochondria, especially in plastids, of a non-human organism or a part thereof, preferably a microorganism, a plant cell, a plant or a part thereof, as compared to a corresponding non-transformed wild type non-human organism or a part thereof; and
[6631] (b) growing the non-human organism or a part thereof under conditions which permit the production of glutamine or a composition comprising glutamine in said non-human organism or in the culture medium surrounding said non-human organism.

[6632] A further embodiment of the present invention relates to a process for the production of arginine, which comprises
[6633] (a) increasing or generating one or more activities selected from the group consisting of RNA binding protein in an organelle, preferably in plastids or mitochondria, especially in plastids, of a non-human organism or a part thereof, preferably a microorganism, a plant cell, a plant or a part thereof, as compared to a corresponding non-transformed wild type non-human organism or a part thereof; and
[6634] (b) growing the non-human organism or a part thereof under conditions which permit the production of arginine or a composition comprising arginine in said non-human organism or in the culture medium surrounding said non-human organism.

[6635] A further embodiment of the present invention relates to a process for the production of proline, which comprises
[6636] (a) increasing or generating one or more activities selected from the group consisting of transcription factor in an organelle, preferably in plastids or mitochondria, especially in plastids, of a non-human organism or a part thereof, preferably a microorganism, a plant cell, a plant or a part thereof, as compared to a corresponding non-transformed wild type non-human organism or a part thereof; and
[6637] (b) growing the non-human organism or a part thereof under conditions which permit the production of proline or a composition comprising proline in said non-human organism or in the culture medium surrounding said non-human organism.

[6638] A further embodiment of the present invention relates to a process for the production of proline, which comprises
[6639] (a) increasing or generating one or more activities selected from the group consisting of cyclin D in an organelle, preferably in plastids or mitochondria, especially in plastids, of a non-human organism or a part thereof, preferably a microorganism, a plant cell, a plant or a part thereof, as compared to a corresponding non-transformed wild type non-human organism or a part thereof; and
[6640] (b) growing the non-human organism or a part thereof under conditions which permit the production of proline or a composition comprising proline in said non-human organism or in the culture medium surrounding said non-human organism.

[6641] A further embodiment of the present invention relates to a process for the production of proline, which comprises
[6642] (a) increasing or generating one or more activities selected from the group consisting of GM02LC46-protein in an organelle, preferably in plastids or mitochondria, especially in plastids, of a non-human organism or a part thereof, preferably a microorganism, a plant cell, a plant or a part thereof, as compared to a corresponding non-transformed wild type non-human organism or a part thereof; and
[6643] (b) growing the non-human organism or a part thereof under conditions which permit the production of proline or a composition comprising proline in said non-human organism or in the culture medium surrounding said non-human organism.

[6644] A further embodiment of the present invention relates to a process for the production of proline, which comprises
[6645] (a) increasing or generating one or more activities selected from the group consisting of GM02LC5744-protein in an organelle, preferably in plastids or mitochondria, especially in plastids, of a non-human organism or a part thereof, preferably a microorganism, a plant cell, a plant or a part thereof, as compared to a corresponding non-transformed wild type non-human organism or a part thereof; and
[6646] (b) growing the non-human organism or a part thereof under conditions which permit the production of proline or a composition comprising proline in said non-human organism or in the culture medium surrounding said non-human organism.

[6647] A further embodiment of the present invention relates to a process for the production of glutamate, which comprises
[6648] (a) increasing or generating one or more activities selected from the group consisting of transcription factor in an organelle, preferably in plastids or mitochondria, especially in plastids, of a non-human organism or a part thereof, preferably a microorganism, a plant cell, a plant or a part thereof, as compared to a corresponding non-transformed wild type non-human organism or a part thereof; and
[6649] (b) growing the non-human organism or a part thereof under conditions which permit the production of glutamate or a composition comprising glutamate in said non-human organism or in the culture medium surrounding said non-human organism.

[6650] A further embodiment of the present invention relates to a process for the production of proline, which comprises
[6651] (a) increasing or generating one or more activities selected from the group consisting of glutaredoxin in an organelle, preferably in plastids or mitochondria, especially in plastids, of a non-human organism or a part thereof, preferably a microorganism, a plant cell, a plant or a part thereof, as compared to a corresponding non-transformed wild type non-human organism or a part thereof; and
[6652] (b) growing the non-human organism or a part thereof under conditions which permit the production of proline or a composition comprising proline in said non-human organism or in the culture medium surrounding said non-human organism.

[6653] A further embodiment of the present invention relates to a process for the production of arginine, which comprises
[6654] (a) increasing or generating one or more activities selected from the group consisting of s_pp015018333r-protein in an organelle, preferably in plastids or mitochondria, especially in plastids, of a non-human organism or a part thereof, preferably a microorganism, a plant cell, a plant or a part thereof, as compared to a corresponding non-transformed wild type non-human organism or a part thereof; and
[6655] (b) growing the non-human organism or a part thereof under conditions which permit the production of arginine or a composition comprising arginine in said non-human organism or in the culture medium surrounding said non-human organism.

[6656] A further embodiment of the present invention relates to a process for the production of glutamine, which comprises
[6657] (a) increasing or generating one or more activities selected from the group consisting of s_pp015018333r-protein in an organelle, preferably in plastids or mitochondria, especially in plastids, of a non-human organism or a part thereof, preferably a microorganism, a plant cell, a plant or a part thereof, as compared to a corresponding non-transformed wild type non-human organism or a part thereof; and
[6658] (b) growing the non-human organism or a part thereof under conditions which permit the production of glutamine or a composition comprising glutamine in said non-human organism or in the culture medium surrounding said non-human organism.

[6659] A further embodiment of the present invention relates to a process for the production of proline, which comprises
[6660] (a) increasing or generating one or more activities selected from the group consisting of sll0064-protein in an organelle, preferably in plastids or mitochondria, especially in plastids, of a non-human organism or a part thereof, preferably a microorganism, a plant cell, a plant or a part thereof, as compared to a corresponding non-transformed wild type non-human organism or a part thereof; and
[6661] (b) growing the non-human organism or a part thereof under conditions which permit the production of proline or a composition comprising proline in said non-human organism or in the culture medium surrounding said non-human organism.

[6662] A further embodiment of the present invention relates to a process for the production of glutamate, which comprises
[6663] (a) increasing or generating one or more activities selected from the group consisting of N-acetyl-gamma-glutamyl-phosphate reductase in an organelle, preferably in plastids or mitochondria, especially in plastids, of a non-human organism or a part thereof, preferably a microorganism, a plant cell, a plant or a part thereof, as compared to a corresponding non-transformed wild type non-human organism or a part thereof; and
[6664] (b) growing the non-human organism or a part thereof under conditions which permit the production of glutamate or a composition comprising glutamate in said non-human organism or in the culture medium surrounding said non-human organism.

[6665] A further embodiment of the present invention relates to a process for the production of glutamate, which comprises
[6666] (a) increasing or generating one or more activities selected from the group consisting of heat shock protein in an organelle, preferably in plastids or mitochondria, especially in plastids, of a non-human organism or a part thereof, preferably a microorganism, a plant cell, a plant or a part thereof, as compared to a corresponding non-transformed wild type non-human organism or a part thereof; and
[6667] (b) growing the non-human organism or a part thereof under conditions which permit the production of glutamate or a composition comprising glutamate in said non-human organism or in the culture medium surrounding said non-human organism.

[6668] A further embodiment of the present invention relates to a process for the production of arginine, which comprises
[6669] (a) increasing or generating one or more activities selected from the group consisting of flavodoxin in an organelle, preferably in plastids or mitochondria, especially in plastids, of a non-human organism or a part thereof, preferably a microorganism, a plant cell, a plant or a part thereof, as compared to a corresponding non-transformed wild type non-human organism or a part thereof; and
[6670] (b) growing the non-human organism or a part thereof under conditions which permit the production of arginine or a composition comprising arginine in said non-human organism or in the culture medium surrounding said non-human organism.

[6671] A further embodiment of the present invention relates to a process for the production of proline, which comprises
[6672] (a) increasing or generating one or more activities selected from the group consisting of phosphopantothenoylcysteinesynthetase/decarboxylase in an organelle, preferably in plastids or mitochondria, especially in plastids, of a non-human organism or a part thereof, preferably a microorganism, a plant cell, a plant or a part thereof, as compared to a corresponding non-transformed wild type non-human organism or a part thereof; and
[6673] (b) growing the non-human organism or a part thereof under conditions which permit the production of proline or a composition comprising proline in said non-human organism or in the culture medium surrounding said non-human organism.

[6674] A further embodiment of the present invention relates to a process for the production of glutamine, which comprises
[6675] (a) increasing or generating one or more activities selected from the group consisting of sll0254-protein in an organelle, preferably in plastids or mitochondria, especially in plastids, of a non-human organism or a part thereof, preferably a microorganism, a plant cell, a plant or a part thereof, as compared to a corresponding non-transformed wild type non-human organism or a part thereof; and
[6676] (b) growing the non-human organism or a part thereof under conditions which permit the production of glutamine or a composition comprising glutamine in said non-human organism or in the culture medium surrounding said non-human organism.

[6677] A further embodiment of the present invention relates to a process for the production of proline, which comprises
[6678] (a) increasing or generating one or more activities selected from the group consisting of sll0254-protein in an organelle, preferably in plastids or mitochondria, especially in plastids, of a non-human organism or a part thereof, preferably a microorganism, a plant cell, a plant or a part thereof, as compared to a corresponding non-transformed wild type non-human organism or a part thereof; and
[6679] (b) growing the non-human organism or a part thereof under conditions which permit the production of proline or a composition comprising proline in said non-human organism or in the culture medium surrounding said non-human organism.

[6680] A further embodiment of the present invention relates to a process for the production of proline, which comprises
[6681] (a) increasing or generating one or more activities selected from the group consisting of polyphosphate kinase in an organelle, preferably in plastids or mitochondria, especially in plastids, of a non-human organism or a part thereof, preferably a microorganism, a plant cell, a plant or a part thereof, as compared to a corresponding non-transformed wild type non-human organism or a part thereof; and
[6682] (b) growing the non-human organism or a part thereof under conditions which permit the production of proline or a composition comprising proline in said non-human organism or in the culture medium surrounding said non-human organism.

[6683] A further embodiment of the present invention relates to a process for the production of proline, which comprises
[6684] (a) increasing or generating one or more activities selected from the group consisting of sll0354-protein in an organelle, preferably in plastids or mitochondria, especially in plastids, of a non-human organism or a part thereof, preferably a microorganism, a plant cell, a plant or a part thereof, as compared to a corresponding non-transformed wild type non-human organism or a part thereof; and
[6685] (b) growing the non-human organism or a part thereof under conditions which permit the production of proline or a composition comprising proline in said non-human organism or in the culture medium surrounding said non-human organism.

[6686] A further embodiment of the present invention relates to a process for the production of proline, which comprises
[6687] (a) increasing or generating one or more activities selected from the group consisting of urease subunit in an organelle, preferably in plastids or mitochondria, especially in plastids, of a non-human organism or a part thereof, preferably a microorganism, a plant cell, a plant or a part thereof, as compared to a corresponding non-transformed wild type non-human organism or a part thereof; and
[6688] (b) growing the non-human organism or a part thereof under conditions which permit the production of proline or a composition comprising proline in said non-human organism or in the culture medium surrounding said non-human organism.

[6689] A further embodiment of the present invention relates to a process for the production of arginine, which comprises
[6690] (a) increasing or generating one or more activities selected from the group consisting of NAD(P)H-quinone oxidoreductase subunit in an organelle, preferably in plastids or mitochondria, especially in plastids, of a non-human organism or a part thereof, preferably a microorganism, a plant cell, a plant or a part thereof, as compared to a corresponding non-transformed wild type non-human organism or a part thereof; and
[6691] (b) growing the non-human organism or a part thereof under conditions which permit the production of arginine or a composition comprising arginine in said non-human organism or in the culture medium surrounding said non-human organism.

[6692] A further embodiment of the present invention relates to a process for the production of proline, which comprises
[6693] (a) increasing or generating one or more activities selected from the group consisting of quinolinate synthetase in an organelle, preferably in plastids or mitochondria, especially in plastids, of a non-human organism or a part thereof, preferably a microorganism, a plant cell, a plant or a part thereof, as compared to a corresponding non-transformed wild type non-human organism or a part thereof; and
[6694] (b) growing the non-human organism or a part thereof under conditions which permit the production of proline or a composition comprising proline in said non-human organism or in the culture medium surrounding said non-human organism.

[6695] A further embodiment of the present invention relates to a process for the production of glutamate, which comprises
[6696] (a) increasing or generating one or more activities selected from the group consisting of permease protein of phosphate ABC transporter in an organelle, preferably in plastids or mitochondria, especially in plastids, of a non-human organism or a part thereof, preferably a microorganism, a plant cell, a plant or a part thereof, as compared to a corresponding non-transformed wild type non-human organism or a part thereof; and
[6697] (b) growing the non-human organism or a part thereof under conditions which permit the production of glutamate or a composition comprising glutamate in said non-human organism or in the culture medium surrounding said non-human organism.

[6698] A further embodiment of the present invention relates to a process for the production of proline, which comprises
[6699] (a) increasing or generating one or more activities selected from the group consisting of permease protein of phosphate ABC transporter in an organelle, preferably in plastids or mitochondria, especially in plastids, of a non-human organism or a part thereof, preferably a microorganism, a plant cell, a plant or a part thereof, as compared to a corresponding non-transformed wild type non-human organism or a part thereof; and
[6700] (b) growing the non-human organism or a part thereof under conditions which permit the production of proline or a composition comprising proline in said non-human organism or in the culture medium surrounding said non-human organism.

[6701] A further embodiment of the present invention relates to a process for the production of arginine, which comprises
[6702] (a) increasing or generating one or more activities selected from the group consisting of oxireductase in an organelle, preferably in plastids or mitochondria, especially in plastids, of a non-human organism or a part thereof, preferably a microorganism, a plant cell, a plant or a part thereof, as compared to a corresponding non-transformed wild type non-human organism or a part thereof; and
[6703] (b) growing the non-human organism or a part thereof under conditions which permit the production of arginine or a composition comprising arginine in said non-human organism or in the culture medium surrounding said non-human organism.

[6704] A further embodiment of the present invention relates to a process for the production of glutamate, which comprises
[6705] (a) increasing or generating one or more activities selected from the group consisting of oxireductase in an organelle, preferably in plastids or mitochondria, especially in plastids, of a non-human organism or a part thereof, preferably a microorganism, a plant cell, a plant or a part thereof, as compared to a corresponding non-transformed wild type non-human organism or a part thereof; and
[6706] (b) growing the non-human organism or a part thereof under conditions which permit the production of glutamate or a composition comprising glutamate in said non-human organism or in the culture medium surrounding said non-human organism.

[6707] A further embodiment of the present invention relates to a process for the production of glutamine, which comprises
[6708] (a) increasing or generating one or more activities selected from the group consisting of oxireductase in an organelle, preferably in plastids or mitochondria, especially in plastids, of a non-human organism or a part thereof, preferably a microorganism, a plant cell, a plant or a part thereof, as compared to a corresponding non-transformed wild type non-human organism or a part thereof; and
[6709] (b) growing the non-human organism or a part thereof under conditions which permit the production of glutamine or a composition comprising glutamine in said non-human organism or in the culture medium surrounding said non-human organism.

[6710] A further embodiment of the present invention relates to a process for the production of arginine, which comprises
[6711] (a) increasing or generating one or more activities selected from the group consisting of malate dehydrogenase in an organelle, preferably in plastids or mitochondria, especially in plastids, of a non-human organism or a part thereof, preferably a microorganism, a plant cell, a plant or a part thereof, as compared to a corresponding non-transformed wild type non-human organism or a part thereof; and
[6712] (b) growing the non-human organism or a part thereof under conditions which permit the production of arginine or a composition comprising arginine in said non-human organism or in the culture medium surrounding said non-human organism.

[6713] A further embodiment of the present invention relates to a process for the production of glutamine, which comprises
[6714] (a) increasing or generating one or more activities selected from the group consisting of malate dehydrogenase in an organelle, preferably in plastids or mitochondria, especially in plastids, of a non-human organism or a part thereof, preferably a microorganism, a plant cell, a plant or a part thereof, as compared to a corresponding non-transformed wild type non-human organism or a part thereof; and
[6715] (b) growing the non-human organism or a part thereof under conditions which permit the production of glutamine or a composition comprising glutamine in said non-human organism or in the culture medium surrounding said non-human organism.

[6716] A further embodiment of the present invention relates to a process for the production of proline, which comprises
[6717] (a) increasing or generating one or more activities selected from the group consisting of malate dehydrogenase in an organelle, preferably in plastids or mitochondria, especially in plastids, of a non-human organism or a part thereof, preferably a microorganism, a plant cell, a plant or a part thereof, as compared to a corresponding non-transformed wild type non-human organism or a part thereof; and
[6718] (b) growing the non-human organism or a part thereof under conditions which permit the production of proline or a composition comprising proline in said non-human organism or in the culture medium surrounding said non-human organism.

[6719] A further embodiment of the present invention relates to a process for the production of proline, which comprises
[6720] (a) increasing or generating one or more activities selected from the group consisting of phosphoribosylaminoimidazole carboxylase catalytic subunit in an organelle, preferably in plastids or mitochondria, especially in plastids, of a non-human organism or a part thereof, preferably a microorganism, a plant cell, a plant or a part thereof, as compared to a corresponding non-transformed wild type non-human organism or a part thereof; and
[6721] (b) growing the non-human organism or a part thereof under conditions which permit the production of proline or a composition comprising proline in said non-human organism or in the culture medium surrounding said non-human organism.

[6722] A further embodiment of the present invention relates to a process for the production of glutamine, which comprises
[6723] (a) increasing or generating one or more activities selected from the group consisting of 3-deoxy-7-phosphoheptulonate synthase in an organelle, preferably in plastids or mitochondria, especially in plastids, of a non-human organism or a part thereof, preferably a microorganism, a plant cell, a plant or a part thereof, as compared to a corresponding non-transformed wild type non-human organism or a part thereof; and
[6724] (b) growing the non-human organism or a part thereof under conditions which permit the production of glutamine or a composition comprising glutamine in said non-human organism or in the culture medium surrounding said non-human organism.

[6725] A further embodiment of the present invention relates to a process for the production of proline, which comprises
[6726] (a) increasing or generating one or more activities selected from the group consisting of glycogen synthase in an organelle, preferably in plastids or mitochondria, especially in plastids, of a non-human organism or a part thereof, preferably a microorganism, a plant cell, a plant or a part thereof, as compared to a corresponding non-transformed wild type non-human organism or a part thereof; and
[6727] (b) growing the non-human organism or a part thereof under conditions which permit the production of proline or a composition comprising proline in said non-human organism or in the culture medium surrounding said non-human organism.

[6728] A further embodiment of the present invention relates to a process for the production of glutamate, which comprises
[6729] (a) increasing or generating one or more activities selected from the group consisting of carbon dioxide concentrating mechanism protein in an organelle, preferably in plastids or mitochondria, especially in plastids, of a non-human organism or a part thereof, preferably a microorganism, a plant cell, a plant or a part thereof, as compared to a corresponding non-transformed wild type non-human organism or a part thereof; and
[6730] (b) growing the non-human organism or a part thereof under conditions which permit the production of glutamate or a composition comprising glutamate in said non-human organism or in the culture medium surrounding said non-human organism.

[6731] A further embodiment of the present invention relates to a process for the production of glutamine, which comprises
[6732] (a) increasing or generating one or more activities selected from the group consisting of carbon dioxide concentrating mechanism protein in an organelle, preferably in plastids or mitochondria, especially in plastids, of a non-human organism or a part thereof, preferably a microorganism, a plant cell, a plant or a part thereof, as compared to a corresponding non-transformed wild type non-human organism or a part thereof; and
[6733] (b) growing the non-human organism or a part thereof under conditions which permit the production of glutamine or a composition comprising glutamine in said non-human organism or in the culture medium surrounding said non-human organism.

[6734] A further embodiment of the present invention relates to a process for the production of proline, which comprises
[6735] (a) increasing or generating one or more activities selected from the group consisting of carbon dioxide concentrating mechanism protein in an organelle, preferably in plastids or mitochondria, especially in plastids, of a non-human organism or a part thereof, preferably a microorganism, a plant cell, a plant or a part thereof, as compared to a corresponding non-transformed wild type non-human organism or a part thereof; and
[6736] (b) growing the non-human organism or a part thereof under conditions which permit the production of proline or a composition comprising proline in said non-human organism or in the culture medium surrounding said non-human organism.

[6737] A further embodiment of the present invention relates to a process for the production of proline, which comprises
[6738] (a) increasing or generating one or more activities selected from the group consisting of phosphoribosylformyl glycinamidine synthase subunit in an organelle, preferably in plastids or mitochondria, especially in plastids, of a non-human organism or a part thereof, preferably a microorganism, a plant cell, a plant or a part thereof, as compared to a corresponding non-transformed wild type non-human organism or a part thereof; and
[6739] (b) growing the non-human organism or a part thereof under conditions which permit the production of proline or a composition comprising proline in said non-human organism or in the culture medium surrounding said non-human organism.

[6740] A further embodiment of the present invention relates to a process for the production of glutamate, which comprises
[6741] (a) increasing or generating one or more activities selected from the group consisting of coproporphyrinogen oxidase in an organelle, preferably in plastids or mitochondria, especially in plastids, of a non-human organism or a part thereof, preferably a microorganism, a plant cell, a plant or a part thereof, as compared to a corresponding non-transformed wild type non-human organism or a part thereof; and
[6742] (b) growing the non-human organism or a part thereof under conditions which permit the production of glutamate or a composition comprising glutamate in said non-human organism or in the culture medium surrounding said non-human organism.

[6743] A further embodiment of the present invention relates to a process for the production of glutamine, which comprises
[6744] (a) increasing or generating one or more activities selected from the group consisting of glycogen (starch) synthase in an organelle, preferably in plastids or mitochondria, especially in plastids, of a non-human organism or a part thereof, preferably a microorganism, a plant cell, a plant or a part thereof, as compared to a corresponding non-transformed wild type non-human organism or a part thereof; and
[6745] (b) growing the non-human organism or a part thereof under conditions which permit the production of glutamine or a composition comprising glutamine in said non-human organism or in the culture medium surrounding said non-human organism.

[6746] A further embodiment of the present invention relates to a process for the production of proline, which comprises
[6747] (a) increasing or generating one or more activities selected from the group consisting of glycogen (starch) synthase in an organelle, preferably in plastids or mitochondria, especially in plastids, of a non-human organism or a part thereof, preferably a microorganism, a plant cell, a plant or a part thereof, as compared to a corresponding non-transformed wild type non-human organism or a part thereof; and
[6748] (b) growing the non-human organism or a part thereof under conditions which permit the production of proline or a composition comprising proline in said non-human organism or in the culture medium surrounding said non-human organism.

[6749] A further embodiment of the present invention relates to a process for the production of glutamine, which comprises
[6750] (a) increasing or generating one or more activities selected from the group consisting of fatty acid desaturase in an organelle, preferably in plastids or mitochondria, especially in plastids, of a non-human organism or a part thereof, preferably a microorganism, a plant cell, a plant or a part thereof, as compared to a corresponding non-transformed wild type non-human organism or a part thereof; and
[6751] (b) growing the non-human organism or a part thereof under conditions which permit the production of glutamine or a composition comprising glutamine in said non-human organism or in the culture medium surrounding said non-human organism.

[6752] A further embodiment of the present invention relates to a process for the production of glutamate, which comprises
[6753] (a) increasing or generating one or more activities selected from the group consisting of CTP synthetase in an organelle, preferably in plastids or mitochondria, especially in plastids, of a non-human organism or a part thereof, preferably a microorganism, a plant cell, a plant or a part thereof, as compared to a corresponding non-transformed wild type non-human organism or a part thereof; and
[6754] (b) growing the non-human organism or a part thereof under conditions which permit the production of glutamate or a composition comprising glutamate in said non-human organism or in the culture medium surrounding said non-human organism.

[6755] A further embodiment of the present invention relates to a process for the production of glutamate, which comprises
[6756] (a) increasing or generating one or more activities selected from the group consisting of nitrate/nitrite transport protein in an organelle, preferably in plastids or mitochondria, especially in plastids, of a non-human organism or a part thereof, preferably a microorganism, a plant cell, a plant or a part thereof, as compared to a corresponding non-transformed wild type non-human organism or a part thereof; and
[6757] (b) growing the non-human organism or a part thereof under conditions which permit the production of glutamate or a composition comprising glutamate in said non-human organism or in the culture medium surrounding said non-human organism.

[6758] A further embodiment of the present invention relates to a process for the production of glutamate, which comprises
[6759] (a) increasing or generating one or more activities selected from the group consisting of CDP-diacylglycerol--glycerol-3-phosphate 3-phosphatidyltransferase in an organelle, preferably in plastids or mitochondria, especially in plastids, of a non-human organism or a part thereof, preferably a microorganism, a plant cell, a plant or a part thereof, as compared to a corresponding non-transformed wild type non-human organism or a part thereof; and
[6760] (b) growing the non-human organism or a part thereof under conditions which permit the production of glutamate or a composition comprising glutamate in said non-human organism or in the culture medium surrounding said non-human organism.

[6761] A further embodiment of the present invention relates to a process for the production of arginine, which comprises
[6762] (a) increasing or generating one or more activities selected from the group consisting of glutathione S-transferase in an organelle, preferably in plastids or mitochondria, especially in plastids, of a non-human organism or a part thereof, preferably a microorganism, a plant cell, a plant or a part thereof, as compared to a corresponding non-transformed wild type non-human organism or a part thereof; and
[6763] (b) growing the non-human organism or a part thereof under conditions which permit the production of arginine or a composition comprising arginine in said non-human organism or in the culture medium surrounding said non-human organism.

[6764] A further embodiment of the present invention relates to a process for the production of glutamine, which comprises
[6765] (a) increasing or generating one or more activities selected from the group consisting of glutathione S-transferase in an organelle, preferably in plastids or mitochondria, especially in plastids, of a non-human organism or a part thereof, preferably a microorganism, a plant cell, a plant or a part thereof, as compared to a corresponding non-transformed wild type non-human organism or a part thereof; and
[6766] (b) growing the non-human organism or a part thereof under conditions which permit the production of glutamine or a composition comprising glutamine in said non-human organism or in the culture medium surrounding said non-human organism.

[6767] A further embodiment of the present invention relates to a process for the production of proline, which comprises
[6768] (a) increasing or generating one or more activities selected from the group consisting of glutathione S-transferase in an organelle, preferably in plastids or mitochondria, especially in plastids, of a non-human organism or a part thereof, preferably a microorganism, a plant cell, a plant or a part thereof, as compared to a corresponding non-transformed wild type non-human organism or a part thereof; and
[6769] (b) growing the non-human organism or a part thereof under conditions which permit the production of proline or a composition comprising proline in said non-human organism or in the culture medium surrounding said non-human organism.

[6770] A further embodiment of the present invention relates to a process for the production of arginine, which comprises
[6771] (a) increasing or generating one or more activities selected from the group consisting of exopolyphosphatase in an organelle, preferably in plastids or mitochondria, especially in plastids, of a non-human organism or a part thereof, preferably a microorganism, a plant cell, a plant or a part thereof, as compared to a corresponding non-transformed wild type non-human organism or a part thereof; and
[6772] (b) growing the non-human organism or a part thereof under conditions which permit the production of arginine or a composition comprising arginine in said non-human organism or in the culture medium surrounding said non-human organism.

[6773] A further embodiment of the present invention relates to a process for the production of proline, which comprises
[6774] (a) increasing or generating one or more activities selected from the group consisting of 4-alpha-glucanotransferase in an organelle, preferably in plastids or mitochondria, especially in plastids, of a non-human organism or a part thereof, preferably a microorganism, a plant cell, a plant or a part thereof, as compared to a corresponding non-transformed wild type non-human organism or a part thereof; and
[6775] (b) growing the non-human organism or a part thereof under conditions which permit the production of proline or a composition comprising proline in said non-human organism or in the culture medium surrounding said non-human organism.

[6776] A further embodiment of the present invention relates to a process for the production of proline, which comprises
[6777] (a) increasing or generating one or more activities selected from the group consisting of alanine dehydrogenase in an organelle, preferably in plastids or mitochondria, especially in plastids, of a non-human organism or a part thereof, preferably a microorganism, a plant cell, a plant or a part thereof, as compared to a corresponding non-transformed wild type non-human organism or a part thereof; and
[6778] (b) growing the non-human organism or a part thereof under conditions which permit the production of proline or a composition comprising proline in said non-human organism or in the culture medium surrounding said non-human organism.

[6779] A further embodiment of the present invention relates to a process for the production of arginine, which comprises
[6780] (a) increasing or generating one or more activities selected from the group consisting of sll1761-protein in an organelle, preferably in plastids or mitochondria, especially in plastids, of a non-human organism or a part thereof, preferably a microorganism, a plant cell, a plant or a part thereof, as compared to a corresponding non-transformed wild type non-human organism or a part thereof; and
[6781] (b) growing the non-human organism or a part thereof under conditions which permit the production of arginine or a composition comprising arginine in said non-human organism or in the culture medium surrounding said non-human organism.

[6782] A further embodiment of the present invention relates to a process for the production of proline, which comprises
[6783] (a) increasing or generating one or more activities selected from the group consisting of sll1761-protein in an organelle, preferably in plastids or mitochondria, especially in plastids, of a non-human organism or a part thereof, preferably a microorganism, a plant cell, a plant or a part thereof, as compared to a corresponding non-transformed wild type non-human organism or a part thereof; and
[6784] (b) growing the non-human organism or a part thereof under conditions which permit the production of proline or a composition comprising proline in said non-human organism or in the culture medium surrounding said non-human organism.

[6785] A further embodiment of the present invention relates to a process for the production of glutamate, which comprises
[6786] (a) increasing or generating one or more activities selected from the group consisting of coproporphyrinogen III oxidase in an organelle, preferably in plastids or mitochondria, especially in plastids, of a non-human organism or a part thereof, preferably a microorganism, a plant cell, a plant or a part thereof, as compared to a corresponding non-transformed wild type non-human organism or a part thereof; and
[6787] (b) growing the non-human organism or a part thereof under conditions which permit the production of glutamate or a composition comprising glutamate in said non-human organism or in the culture medium surrounding said non-human organism.

[6788] A further embodiment of the present invention relates to a process for the production of glutamine, which comprises
[6789] (a) increasing or generating one or more activities selected from the group consisting of coproporphyrinogen III oxidase in an organelle, preferably in plastids or mitochondria, especially in plastids, of a non-human organism or a part thereof, preferably a microorganism, a plant cell, a plant or a part thereof, as compared to a corresponding non-transformed wild type non-human organism or a part thereof; and
[6790] (b) growing the non-human organism or a part thereof under conditions which permit the production of glutamine or a composition comprising glutamine in said non-human organism or in the culture medium surrounding said non-human organism.

[6791] A further embodiment of the present invention relates to a process for the production of proline, which comprises
[6792] (a) increasing or generating one or more activities selected from the group consisting of coproporphyrinogen III oxidase in an organelle, preferably in plastids or mitochondria, especially in plastids, of a non-human organism or a part thereof, preferably a microorganism, a plant cell, a plant or a part thereof, as compared to a corresponding non-transformed wild type non-human organism or a part thereof; and
[6793] (b) growing the non-human organism or a part thereof under conditions which permit the production of proline or a composition comprising proline in said non-human organism or in the culture medium surrounding said non-human organism.

[6794] A further embodiment of the present invention relates to a process for the production of glutamate, which comprises
[6795] (a) increasing or generating one or more activities selected from the group consisting of cation-transporting ATPase in an organelle, preferably in plastids or mitochondria, especially in plastids, of a non-human organism or a part thereof, preferably a microorganism, a plant cell, a plant or a part thereof, as compared to a corresponding non-transformed wild type non-human organism or a part thereof; and
[6796] (b) growing the non-human organism or a part thereof under conditions which permit the production of glutamate or a composition comprising glutamate in said non-human organism or in the culture medium surrounding said non-human organism.

[6797] A further embodiment of the present invention relates to a process for the production of glutamine, which comprises
[6798] (a) increasing or generating one or more activities selected from the group consisting of cation-transporting ATPase in an organelle, preferably in plastids or mitochondria, especially in plastids, of a non-human organism or a part thereof, preferably a microorganism, a plant cell, a plant or a part thereof, as compared to a corresponding non-transformed wild type non-human organism or a part thereof; and
[6799] (b) growing the non-human organism or a part thereof under conditions which permit the production of glutamine or a composition comprising glutamine in said non-human organism or in the culture medium surrounding said non-human organism.

[6800] A further embodiment of the present invention relates to a process for the production of arginine, which comprises
[6801] (a) increasing or generating one or more activities selected from the group consisting of glycosidase in an organelle, preferably in plastids or mitochondria, especially in plastids, of a non-human organism or a part thereof, preferably a microorganism, a plant cell, a plant or a part thereof, as compared to a corresponding non-transformed wild type non-human organism or a part thereof; and
[6802] (b) growing the non-human organism or a part thereof under conditions which permit the production of arginine or a composition comprising arginine in said non-human organism or in the culture medium surrounding said non-human organism.

[6803] A further embodiment of the present invention relates to a process for the production of glutamine, which comprises
[6804] (a) increasing or generating one or more activities selected from the group consisting of glycosidase in an organelle, preferably in plastids or mitochondria, especially in plastids, of a non-human organism or a part thereof, preferably a microorganism, a plant cell, a plant or a part thereof, as compared to a corresponding non-transformed wild type non-human organism or a part thereof; and
[6805] (b) growing the non-human organism or a part thereof under conditions which permit the production of glutamine or a composition comprising glutamine in said non-human organism or in the culture medium surrounding said non-human organism.

[6806] A further embodiment of the present invention relates to a process for the production of proline, which comprises
[6807] (a) increasing or generating one or more activities selected from the group consisting of phosphoribosylglycinamide formyltransferase in an organelle, preferably in plastids or mitochondria, especially in plastids, of a non-human organism or a part thereof, preferably a microorganism, a plant cell, a plant or a part thereof, as compared to a corresponding non-transformed wild type non-human organism or a part thereof; and
[6808] (b) growing the non-human organism or a part thereof under conditions which permit the production of proline or a composition comprising proline in said non-human organism or in the culture medium surrounding said non-human organism.

[6809] A further embodiment of the present invention relates to a process for the production of glutamate, which comprises
[6810] (a) increasing or generating one or more activities selected from the group consisting of bifunctional purine biosynthesis protein in an organelle, preferably in plastids or mitochondria, especially in plastids, of a non-human organism or a part thereof, preferably a microorganism, a plant cell, a plant or a part thereof, as compared to a corresponding non-transformed wild type non-human organism or a part thereof; and
[6811] (b) growing the non-human organism or a part thereof under conditions which permit the production of glutamate or a composition comprising glutamate in said non-human organism or in the culture medium surrounding said non-human organism.

[6812] A further embodiment of the present invention relates to a process for the production of proline, which comprises
[6813] (a) increasing or generating one or more activities selected from the group consisting of slr0600-protein in an organelle, preferably in plastids or mitochondria, especially in plastids, of a non-human organism or a part thereof, preferably a microorganism, a plant cell, a plant or a part thereof, as compared to a corresponding non-transformed wild type non-human organism or a part thereof; and
[6814] (b) growing the non-human organism or a part thereof under conditions which permit the production of proline or a composition comprising proline in said non-human organism or in the culture medium surrounding said non-human organism.

[6815] A further embodiment of the present invention relates to a process for the production of proline, which comprises
[6816] (a) increasing or generating one or more activities selected from the group consisting of pyrroline carboxylate reductase in an organelle, preferably in plastids or mitochondria, especially in plastids, of a non-human organism or a part thereof, preferably a microorganism, a plant cell, a plant or a part thereof, as compared to a corresponding non-transformed wild type non-human organism or a part thereof; and
[6817] (b) growing the non-human organism or a part thereof under conditions which permit the production of proline or a composition comprising proline in said non-human organism or in the culture medium surrounding said non-human organism.

[6818] A further embodiment of the present invention relates to a process for the production of arginine, which comprises
[6819] (a) increasing or generating one or more activities selected from the group consisting of Glu/Leu/Phe/Val dehydrogenase in an organelle, preferably in plastids or mitochondria, especially in plastids, of a non-human organism or a part thereof, preferably a microorganism, a plant cell, a plant or a part thereof, as compared to a corresponding non-transformed wild type non-human organism or a part thereof; and
[6820] (b) growing the non-human organism or a part thereof under conditions which permit the production of arginine or a composition comprising arginine in said non-human organism or in the culture medium surrounding said non-human organism.

[6821] A further embodiment of the present invention relates to a process for the production of arginine, which comprises
[6822] (a) increasing or generating one or more activities selected from the group consisting of geranylgeranyl pyrophosphate synthase in an organelle, preferably in plastids or mitochondria, especially in plastids, of a non-human organism or a part thereof, preferably a microorganism, a plant cell, a plant or a part thereof, as compared to a corresponding non-transformed wild type non-human organism or a part thereof; and
[6823] (b) growing the non-human organism or a part thereof under conditions which permit the production of arginine or a composition comprising arginine in said non-human organism or in the culture medium surrounding said non-human organism.

[6824] A further embodiment of the present invention relates to a process for the production of glutamine, which comprises
[6825] (a) increasing or generating one or more activities selected from the group consisting of geranylgeranyl pyrophosphate synthase in an organelle, preferably in plastids or mitochondria, especially in plastids, of a non-human organism or a part thereof, preferably a microorganism, a plant cell, a plant or a part thereof, as compared to a corresponding non-transformed wild type non-human organism or a part thereof; and
[6826] (b) growing the non-human organism or a part thereof under conditions which permit the production of glutamine or a composition comprising glutamine in said non-human organism or in the culture medium surrounding said non-human organism.

[6827] A further embodiment of the present invention relates to a process for the production of proline, which comprises
[6828] (a) increasing or generating one or more activities selected from the group consisting of geranylgeranyl pyrophosphate synthase in an organelle, preferably in plastids or mitochondria, especially in plastids, of a non-human organism or a part thereof, preferably a microorganism, a plant cell, a plant or a part thereof, as compared to a corresponding non-transformed wild type non-human organism or a part thereof; and
[6829] (b) growing the non-human organism or a part thereof under conditions which permit the production of proline or a composition comprising proline in said non-human organism or in the culture medium surrounding said non-human organism.

[6830] A further embodiment of the present invention relates to a process for the production of arginine, which comprises
[6831] (a) increasing or generating one or more activities selected from the group consisting of circadian clock protein in an organelle, preferably in plastids or mitochondria, especially in plastids, of a non-human organism or a part thereof, preferably a microorganism, a plant cell, a plant or a part thereof, as compared to a corresponding non-transformed wild type non-human organism or a part thereof; and
[6832] (b) growing the non-human organism or a part thereof under conditions which permit the production of arginine or a composition comprising arginine in said non-human organism or in the culture medium surrounding said non-human organism.

[6833] A further embodiment of the present invention relates to a process for the production of proline, which comprises
[6834] (a) increasing or generating one or more activities selected from the group consisting of circadian clock protein in an organelle, preferably in plastids or mitochondria, especially in plastids, of a non-human organism or a part thereof, preferably a microorganism, a plant cell, a plant or a part thereof, as compared to a corresponding non-transformed wild type non-human organism or a part thereof; and
[6835] (b) growing the non-human organism or a part thereof under conditions which permit the production of proline or a composition comprising proline in said non-human organism or in the culture medium surrounding said non-human organism.

[6836] A further embodiment of the present invention relates to a process for the production of proline, which comprises
[6837] (a) increasing or generating one or more activities selected from the group consisting of amine oxidase in an organelle, preferably in plastids or mitochondria, especially in plastids, of a non-human organism or a part thereof, preferably a microorganism, a plant cell, a plant or a part thereof, as compared to a corresponding non-transformed wild type non-human organism or a part thereof; and
[6838] (b) growing the non-human organism or a part thereof under conditions which permit the production of proline or a composition comprising proline in said non-human organism or in the culture medium surrounding said non-human organism.

[6839] A further embodiment of the present invention relates to a process for the production of glutamate, which comprises
[6840] (a) increasing or generating one or more activities selected from the group consisting of dihydrolipoamide dehydrogenase in an organelle, preferably in plastids or mitochondria, especially in plastids, of a non-human organism or a part thereof, preferably a microorganism, a plant cell, a plant or a part thereof, as compared to a corresponding non-transformed wild type non-human organism or a part thereof; and
[6841] (b) growing the non-human organism or a part thereof under conditions which permit the production of glutamate or a composition comprising glutamate in said non-human organism or in the culture medium surrounding said non-human organism.

[6842] A further embodiment of the present invention relates to a process for the production of arginine, which comprises
[6843] (a) increasing or generating one or more activities selected from the group consisting of gamma-glutamyltranspeptidase in an organelle, preferably in plastids or mitochondria, especially in plastids, of a non-human organism or a part thereof, preferably a microorganism, a plant cell, a plant or a part thereof, as compared to a corresponding non-transformed wild type non-human organism or a part thereof; and
[6844] (b) growing the non-human organism or a part thereof under conditions which permit the production of arginine or a composition comprising arginine in said non-human organism or in the culture medium surrounding said non-human organism.

[6845] A further embodiment of the present invention relates to a process for the production of glutamate, which comprises
[6846] (a) increasing or generating one or more activities selected from the group consisting of gamma-glutamyltranspeptidase in an organelle, preferably in plastids or mitochondria, especially in plastids, of a non-human organism or a part thereof, preferably a microorganism, a plant cell, a plant or a part thereof, as compared to a corresponding non-transformed wild type non-human organism or a part thereof; and
[6847] (b) growing the non-human organism or a part thereof under conditions which permit the production of glutamate or a composition comprising glutamate in said non-human organism or in the culture medium surrounding said non-human organism.

[6848] A further embodiment of the present invention relates to a process for the production of arginine, which comprises
[6849] (a) increasing or generating one or more activities selected from the group consisting of arginine decarboxylase in an organelle, preferably in plastids or mitochondria, especially in plastids, of a non-human organism or a part thereof, preferably a microorganism, a plant cell, a plant or a part thereof, as compared to a corresponding non-transformed wild type non-human organism or a part thereof; and
[6850] (b) growing the non-human organism or a part thereof under conditions which permit the production of arginine or a composition comprising arginine in said non-human organism or in the culture medium surrounding said non-human organism.

[6851] A further embodiment of the present invention relates to a process for the production of glutamate, which comprises
[6852] (a) increasing or generating one or more activities selected from the group consisting of CDP-diglyceride synthetase in an organelle, preferably in plastids or mitochondria, especially in plastids, of a non-human organism or a part thereof, preferably a microorganism, a plant cell, a plant or a part thereof, as compared to a corresponding non-transformed wild type non-human organism or a part thereof; and
[6853] (b) growing the non-human organism or a part thereof under conditions which permit the production of glutamate or a composition comprising glutamate in said non-human organism or in the culture medium surrounding said non-human organism.

[6854] A further embodiment of the present invention relates to a process for the production of glutamate, which comprises
[6855] (a) increasing or generating one or more activities selected from the group consisting of carbohydrate kinase in an organelle, preferably in plastids or mitochondria, especially in plastids, of a non-human organism or a part thereof, preferably a microorganism, a plant cell, a plant or a part thereof, as compared to a corresponding non-transformed wild type non-human organism or a part thereof; and
[6856] (b) growing the non-human organism or a part thereof under conditions which permit the production of glutamate or a composition comprising glutamate in said non-human organism or in the culture medium surrounding said non-human organism.

[6857] A further embodiment of the present invention relates to a process for the production of glutamine, which comprises
[6858] (a) increasing or generating one or more activities selected from the group consisting of iron(III) dicitrate-binding protein in an organelle, preferably in plastids or mitochondria, especially in plastids, of a non-human organism or a part thereof, preferably a microorganism, a plant cell, a plant or a part thereof, as compared to a corresponding non-transformed wild type non-human organism or a part thereof; and
[6859] (b) growing the non-human organism or a part thereof under conditions which permit the production of glutamine or a composition comprising glutamine in said non-human organism or in the culture medium surrounding said non-human organism.

[6860] A further embodiment of the present invention relates to a process for the production of proline, which comprises
[6861] (a) increasing or generating one or more activities selected from the group consisting of Photosystem I reaction center subunit XI in an organelle, preferably in plastids or mitochondria, especially in plastids, of a non-human organism or a part thereof, preferably a microorganism, a plant cell, a plant or a part thereof, as compared to a corresponding non-transformed wild type non-human organism or a part thereof; and
[6862] (b) growing the non-human organism or a part thereof under conditions which permit the production of proline or a composition comprising proline in said non-human organism or in the culture medium surrounding said non-human organism.

[6863] A further embodiment of the present invention relates to a process for the production of arginine, which comprises
[6864] (a) increasing or generating one or more activities selected from the group consisting of photosystem II protein in an organelle, preferably in plastids or mitochondria, especially in plastids, of a non-human organism or a part thereof, preferably a microorganism, a plant cell, a plant or a part thereof, as compared to a corresponding non-transformed wild type non-human organism or a part thereof; and
[6865] (b) growing the non-human organism or a part thereof under conditions which permit the production of arginine or a composition comprising arginine in said non-human organism or in the culture medium surrounding said non-human organism.

[6866] A further embodiment of the present invention relates to a process for the production of glutamine, which comprises
[6867] (a) increasing or generating one or more activities selected from the group consisting of photosystem II protein in an organelle, preferably in plastids or mitochondria, especially in plastids, of a non-human organism or a part thereof, preferably a microorganism, a plant cell, a plant or a part thereof, as compared to a corresponding non-transformed wild type non-human organism or a part thereof; and
[6868] (b) growing the non-human organism or a part thereof under conditions which permit the production of glutamine or a composition comprising glutamine in said non-human organism or in the culture medium surrounding said non-human organism.

[6869] A further embodiment of the present invention relates to a process for the production of proline, which comprises
[6870] (a) increasing or generating one or more activities selected from the group consisting of glutamine amidotransferase in an organelle, preferably in plastids or mitochondria, especially in plastids, of a non-human organism or a part thereof, preferably a microorganism, a plant cell, a plant or a part thereof, as compared to a corresponding non-transformed wild type non-human organism or a part thereof; and
[6871] (b) growing the non-human organism or a part thereof under conditions which permit the production of proline or a composition comprising proline in said non-human organism or in the culture medium surrounding said non-human organism.

[6872] A further embodiment of the present invention relates to a process for the production of glutamate, which comprises
[6873] (a) increasing or generating one or more activities selected from the group consisting of glycerol-3-phosphate dehydrogenase in an organelle, preferably in plastids or mitochondria, especially in plastids, of a non-human organism or a part thereof, preferably a microorganism, a plant cell, a plant or a part thereof, as compared to a corresponding non-transformed wild type non-human organism or a part thereof; and
[6874] (b) growing the non-human organism or a part thereof under conditions which permit the production of glutamate or a composition comprising glutamate in said non-human organism or in the culture medium surrounding said non-human organism.

[6875] A further embodiment of the present invention relates to a process for the production of proline, which comprises
[6876] (a) increasing or generating one or more activities selected from the group consisting of phosphoadenosine phosphosulfate reductase in an organelle, preferably in plastids or mitochondria, especially in plastids, of a non-human organism or a part thereof, preferably a microorganism, a plant cell, a plant or a part thereof, as compared to a corresponding non-transformed wild type non-human organism or a part thereof; and
[6877] (b) growing the non-human organism or a part thereof under conditions which permit the production of proline or a composition comprising proline in said non-human organism or in the culture medium surrounding said non-human organism.

[6878] A further embodiment of the present invention relates to a process for the production of glutamate, which comprises
[6879] (a) increasing or generating one or more activities selected from the group consisting of riboflavin biosynthesis protein in an organelle, preferably in plastids or mitochondria, especially in plastids, of a non-human organism or a part thereof, preferably a microorganism, a plant cell, a plant or a part thereof, as compared to a corresponding non-transformed wild type non-human organism or a part thereof; and
[6880] (b) growing the non-human organism or a part thereof under conditions which permit the production of glutamate or a composition comprising glutamate in said non-human organism or in the culture medium surrounding said non-human organism.

[6881] A further embodiment of the present invention relates to a process for the production of glutamate, which comprises
[6882] (a) increasing or generating one or more activities selected from the group consisting of malonyl CoA-acyl carrier protein transacylase in an organelle, preferably in plastids or mitochondria, especially in plastids, of a non-human organism or a part thereof, preferably a microorganism, a plant cell, a plant or a part thereof, as compared to a corresponding non-transformed wild type non-human organism or a part thereof; and
[6883] (b) growing the non-human organism or a part thereof under conditions which permit the production of glutamate or a composition comprising glutamate in said non-human organism or in the culture medium surrounding said non-human organism.

[6884] A further embodiment of the present invention relates to a process for the production of glutamine, which comprises
[6885] (a) increasing or generating one or more activities selected from the group consisting of malonyl CoA-acyl carrier protein transacylase in an organelle, preferably in plastids or mitochondria, especially in plastids, of a non-human organism or a part thereof, preferably a microorganism, a plant cell, a plant or a part thereof, as compared to a corresponding non-transformed wild type non-human organism or a part thereof; and
[6886] (b) growing the non-human organism or a part thereof under conditions which permit the production of glutamine or a composition comprising glutamine in said non-human organism or in the culture medium surrounding said non-human organism.

[6887] A further embodiment of the present invention relates to a process for the production of proline, which comprises
[6888] (a) increasing or generating one or more activities selected from the group consisting of short-chain alcohol dehydrogenase family in an organelle, preferably in plastids or mitochondria, especially in plastids, of a non-human organism or a part thereof, preferably a microorganism, a plant cell, a plant or a part thereof, as compared to a corresponding non-transformed wild type non-human organism or a part thereof; and
[6889] (b) growing the non-human organism or a part thereof under conditions which permit the production of proline or a composition comprising proline in said non-human organism or in the culture medium surrounding said non-human organism.

[6890] A further embodiment of the present invention relates to a process for the production of glutamine, which comprises
[6891] (a) increasing or generating one or more activities selected from the group consisting of Sec-independent protein translocase subunit in an organelle, preferably in plastids or mitochondria, especially in plastids, of a non-human organism or a part thereof, preferably a microorganism, a plant cell, a plant or a part thereof, as compared to a corresponding non-transformed wild type non-human organism or a part thereof; and
[6892] (b) growing the non-human organism or a part thereof under conditions which permit the production of glutamine or a composition comprising glutamine in said non-human organism or in the culture medium surrounding said non-human organism.

[6893] A further embodiment of the present invention relates to a process for the production of proline, which comprises
[6894] (a) increasing or generating one or more activities selected from the group consisting of Sec-independent protein translocase subunit in an organelle, preferably in plastids or mitochondria, especially in plastids, of a non-human organism or a part thereof, preferably a microorganism, a plant cell, a plant or a part thereof, as compared to a corresponding non-transformed wild type non-human organism or a part thereof; and
[6895] (b) growing the non-human organism or a part thereof under conditions which permit the production of proline or a composition comprising proline in said non-human organism or in the culture medium surrounding said non-human organism.

[6896] A further embodiment of the present invention relates to a process for the production of proline, which comprises
[6897] (a) increasing or generating one or more activities selected from the group consisting of cell division protein in an organelle, preferably in plastids or mitochondria, especially in plastids, of a non-human organism or a part thereof, preferably a microorganism, a plant cell, a plant or a part thereof, as compared to a corresponding non-transformed wild type non-human organism or a part thereof; and
[6898] (b) growing the non-human organism or a part thereof under conditions which permit the production of proline or a composition comprising proline in said non-human organism or in the culture medium surrounding said non-human organism.

[6899] A further embodiment of the present invention relates to a process for the production of proline, which comprises
[6900] (a) increasing or generating one or more activities selected from the group consisting of branched-chain amino acid ABC transporter permease protein in an organelle, preferably in plastids or mitochondria, especially in plastids, of a non-human organism or a part thereof, preferably a microorganism, a plant cell, a plant or a part thereof, as compared to a corresponding non-transformed wild type non-human organism or a part thereof; and
[6901] (b) growing the non-human organism or a part thereof under conditions which permit the production of proline or a composition comprising proline in said non-human organism or in the culture medium surrounding said non-human organism.

[6902] A further embodiment of the present invention relates to a process for the production of proline, which comprises
[6903] (a) increasing or generating one or more activities selected from the group consisting of amino acid ABC transporter permease protein in an organelle, preferably in plastids or mitochondria, especially in plastids, of a non-human organism or a part thereof, preferably a microorganism, a plant cell, a plant or a part thereof, as compared to a corresponding non-transformed wild type non-human organism or a part thereof; and
[6904] (b) growing the non-human organism or a part thereof under conditions which permit the production of proline or a composition comprising proline in said non-human organism or in the culture medium surrounding said non-human organism.

[6905] A further embodiment of the present invention relates to a process for the production of proline, which comprises
[6906] (a) increasing or generating one or more activities selected from the group consisting of TTC0768-protein in an organelle, preferably in plastids or mitochondria, especially in plastids, of a non-human organism or a part thereof, preferably a microorganism, a plant cell, a plant or a part thereof, as compared to a corresponding non-transformed wild type non-human organism or a part thereof; and
[6907] (b) growing the non-human organism or a part thereof under conditions which permit the production of proline or a composition comprising proline in said non-human organism or in the culture medium surrounding said non-human organism.

[6908] A further embodiment of the present invention relates to a process for the production of glutamine, which comprises
[6909] (a) increasing or generating one or more activities selected from the group consisting of metal-dependent hydrolase in an organelle, preferably in plastids or mitochondria, especially in plastids, of a non-human organism or a part thereof, preferably a microorganism, a plant cell, a plant or a part thereof, as compared to a corresponding non-transformed wild type non-human organism or a part thereof; and
[6910] (b) growing the non-human organism or a part thereof under conditions which permit the production of glutamine or a composition comprising glutamine in said non-human organism or in the culture medium surrounding said non-human organism.

[6911] A further embodiment of the present invention relates to a process for the production of glutamate, which comprises
[6912] (a) increasing or generating one or more activities selected from the group consisting of multiple antibiotic resistance protein in an organelle, preferably in plastids or mitochondria, especially in plastids, of a non-human organism or a part thereof, preferably a microorganism, a plant cell, a plant or a part thereof, as compared to a corresponding non-transformed wild type non-human organism or a part thereof; and
[6913] (b) growing the non-human organism or a part thereof under conditions which permit the production of glutamate or a composition comprising glutamate in said non-human organism or in the culture medium surrounding said non-human organism.

[6914] A further embodiment of the present invention relates to a process for the production of glutamate, which comprises
[6915] (a) increasing or generating one or more activities selected from the group consisting of TTC1386-protein in an organelle, preferably in plastids or mitochondria, especially in plastids, of a non-human organism or a part thereof, preferably a microorganism, a plant cell, a plant or a part thereof, as compared to a corresponding non-transformed wild type non-human organism or a part thereof; and
[6916] (b) growing the non-human organism or a part thereof under conditions which permit the production of glutamate or a composition comprising glutamate in said non-human organism or in the culture medium surrounding said non-human organism.

[6917] A further embodiment of the present invention relates to a process for the production of glutamine, which comprises
[6918] (a) increasing or generating one or more activities selected from the group consisting of homocitrate synthase in an organelle, preferably in plastids or mitochondria, especially in plastids, of a non-human organism or a part thereof, preferably a microorganism, a plant cell, a plant or a part thereof, as compared to a corresponding non-transformed wild type non-human organism or a part thereof; and
[6919] (b) growing the non-human organism or a part thereof under conditions which permit the production of glutamine or a composition comprising glutamine in said non-human organism or in the culture medium surrounding said non-human organism.

[6920] A further embodiment of the present invention relates to a process for the production of proline, which comprises
[6921] (a) increasing or generating one or more activities selected from the group consisting of homocitrate synthase in an organelle, preferably in plastids or mitochondria, especially in plastids, of a non-human organism or a part thereof, preferably a microorganism, a plant cell, a plant or a part thereof, as compared to a corresponding non-transformed wild type non-human organism or a part thereof; and
[6922] (b) growing the non-human organism or a part thereof under conditions which permit the production of proline or a composition comprising proline in said non-human organism or in the culture medium surrounding said non-human organism.

[6923] A further embodiment of the present invention relates to a process for the production of glutamate, which comprises
[6924] (a) increasing or generating one or more activities selected from the group consisting of oxidoreductase subunit in an organelle, preferably in plastids or mitochondria, especially in plastids, of a non-human organism or a part thereof, preferably a microorganism, a plant cell, a plant or a part thereof, as compared to a corresponding non-transformed wild type non-human organism or a part thereof; and
[6925] (b) growing the non-human organism or a part thereof under conditions which permit the production of glutamate or a composition comprising glutamate in said non-human organism or in the culture medium surrounding said non-human organism.

[6926] A further embodiment of the present invention relates to a process for the production of glutamine, which comprises
[6927] (a) increasing or generating one or more activities selected from the group consisting of oxidoreductase subunit in an organelle, preferably in plastids or mitochondria, especially in plastids, of a non-human organism or a part thereof, preferably a microorganism, a plant cell, a plant or a part thereof, as compared to a corresponding non-transformed wild type non-human organism or a part thereof; and
[6928] (b) growing the non-human organism or a part thereof under conditions which permit the production of glutamine or a composition comprising glutamine in said non-human organism or in the culture medium surrounding said non-human organism.

[6929] A further embodiment of the present invention relates to a process for the production of glutamate, which comprises
[6930] (a) increasing or generating one or more activities selected from the group consisting of XM_{—}473199-protein in an organelle, preferably in plastids or mitochondria, especially in plastids, of a non-human organism or a part thereof, preferably a microorganism, a plant cell, a plant or a part thereof, as compared to a corresponding non-transformed wild type non-human organism or a part thereof; and
[6931] (b) growing the non-human organism or a part thereof under conditions which permit the production of glutamate or a composition comprising glutamate in said non-human organism or in the culture medium surrounding said non-human organism.

[6932] A further embodiment of the present invention relates to a process for the production of glutamine, which comprises
[6933] (a) increasing or generating one or more activities selected from the group consisting of XM_{—}473199-protein in an organelle, preferably in plastids or mitochondria, especially in plastids, of a non-human organism or a part thereof, preferably a microorganism, a plant cell, a plant or a part thereof, as compared to a corresponding non-transformed wild type non-human organism or a part thereof; and
[6934] (b) growing the non-human organism or a part thereof under conditions which permit the production of glutamine or a composition comprising glutamine in said non-human organism or in the culture medium surrounding said non-human organism.

[6935] A further embodiment of the present invention relates to a process for the production of proline, which comprises
[6936] (a) increasing or generating one or more activities selected from the group consisting of transcription factor in an organelle, preferably in plastids or mitochondria, especially in plastids, of a non-human organism or a part thereof, preferably a microorganism, a plant cell, a plant or a part thereof, as compared to a corresponding non-transformed wild type non-human organism or a part thereof; and
[6937] (b) growing the non-human organism or a part thereof under conditions which permit the production of proline or a composition comprising proline in said non-human organism or in the culture medium surrounding said non-human organism.

[6938] A further embodiment of the present invention relates to a process for the production of glutamate, which comprises
[6939] (a) increasing or generating one or more activities selected from the group consisting of cell division control protein in an organelle, preferably in plastids or mitochondria, especially in plastids, of a non-human organism or a part thereof, preferably a microorganism, a plant cell, a plant or a part thereof, as compared to a corresponding non-transformed wild type non-human organism or a part thereof; and
[6940] (b) growing the non-human organism or a part thereof under conditions which permit the production of glutamate or a composition comprising glutamate in said non-human organism or in the culture medium surrounding said non-human organism.

[6941] A further embodiment of the present invention relates to a process for the production of proline, which comprises
[6942] (a) increasing or generating one or more activities selected from the group consisting of cell division control protein in an organelle, preferably in plastids or mitochondria, especially in plastids, of a non-human organism or a part thereof, preferably a microorganism, a plant cell, a plant or a part thereof, as compared to a corresponding non-transformed wild type non-human organism or a part thereof; and
[6943] (b) growing the non-human organism or a part thereof under conditions which permit the production of proline or a composition comprising proline in said non-human organism or in the culture medium surrounding said non-human organism.

[6944] A further embodiment of the present invention relates to a process for the production of proline, which comprises
[6945] (a) increasing or generating one or more activities selected from the group consisting of YCL026C-A-protein in an organelle, preferably in plastids or mitochondria, especially in plastids, of a non-human organism or a part thereof, preferably a microorganism, a plant cell, a plant or a part thereof, as compared to a corresponding non-transformed wild type non-human organism or a part thereof; and
[6946] (b) growing the non-human organism or a part thereof under conditions which permit the production of proline or a composition comprising proline in said non-human organism or in the culture medium surrounding said non-human organism.

[6947] A further embodiment of the present invention relates to a process for the production of arginine, which comprises
[6948] (a) increasing or generating one or more activities selected from the group consisting of ycr102c-protein in an organelle, preferably in plastids or mitochondria, especially in plastids, of a non-human organism or a part thereof, preferably a microorganism, a plant cell, a plant or a part thereof, as compared to a corresponding non-transformed wild type non-human organism or a part thereof; and
[6949] (b) growing the non-human organism or a part thereof under conditions which permit the production of arginine or a composition comprising arginine in said non-human organism or in the culture medium surrounding said non-human organism.

[6950] A further embodiment of the present invention relates to a process for the production of proline, which comprises
[6951] (a) increasing or generating one or more activities selected from the group consisting of protein kinase in an organelle, preferably in plastids or mitochondria, especially in plastids, of a non-human organism or a part thereof, preferably a microorganism, a plant cell, a plant or a part thereof, as compared to a corresponding non-transformed wild type non-human organism or a part thereof; and
[6952] (b) growing the non-human organism or a part thereof under conditions which permit the production of proline or a composition comprising proline in said non-human organism or in the culture medium surrounding said non-human organism.

[6953] A further embodiment of the present invention relates to a process for the production of proline, which comprises
[6954] (a) increasing or generating one or more activities selected from the group consisting of coproporphyrinogen Ill oxidase in an organelle, preferably in plastids or mitochondria, especially in plastids, of a non-human organism or a part thereof, preferably a microorganism, a plant cell, a plant or a part thereof, as compared to a corresponding non-transformed wild type non-human organism or a part thereof; and
[6955] (b) growing the non-human organism or a part thereof under conditions which permit the production of proline or a composition comprising proline in said non-human organism or in the culture medium surrounding said non-human organism.

[6956] A further embodiment of the present invention relates to a process for the production of proline, which comprises
[6957] (a) increasing or generating one or more activities selected from the group consisting of branched-chain amino acid permease in an organelle, preferably in plastids or mitochondria, especially in plastids, of a non-human organism or a part thereof, preferably a microorganism, a plant cell, a plant or a part thereof, as compared to a corresponding non-transformed wild type non-human organism or a part thereof; and
[6958] (b) growing the non-human organism or a part thereof under conditions which permit the production of proline or a composition comprising proline in said non-human organism or in the culture medium surrounding said non-human organism.

[6959] A further embodiment of the present invention relates to a process for the production of arginine, which comprises
[6960] (a) increasing or generating one or more activities selected from the group consisting of peroxisome assembly protein in an organelle, preferably in plastids or mitochondria, especially in plastids, of a non-human organism or a part thereof, preferably a microorganism, a plant cell, a plant or a part thereof, as compared to a corresponding non-transformed wild type non-human organism or a part thereof; and
[6961] (b) growing the non-human organism or a part thereof under conditions which permit the production of arginine or a composition comprising arginine in said non-human organism or in the culture medium surrounding said non-human organism.

[6962] A further embodiment of the present invention relates to a process for the production of arginine, which comprises
[6963] (a) increasing or generating one or more activities selected from the group consisting of ydr338c-protein in an organelle, preferably in plastids or mitochondria, especially in plastids, of a non-human organism or a part thereof, preferably a microorganism, a plant cell, a plant or a part thereof, as compared to a corresponding non-transformed wild type non-human organism or a part thereof; and
[6964] (b) growing the non-human organism or a part thereof under conditions which permit the production of arginine or a composition comprising arginine in said non-human organism or in the culture medium surrounding said non-human organism.

[6965] A further embodiment of the present invention relates to a process for the production of glutamine, which comprises
[6966] (a) increasing or generating one or more activities selected from the group consisting of yer014w-protein in an organelle, preferably in plastids or mitochondria, especially in plastids, of a non-human organism or a part thereof, preferably a microorganism, a plant cell, a plant or a part thereof, as compared to a corresponding non-transformed wild type non-human organism or a part thereof; and
[6967] (b) growing the non-human organism or a part thereof under conditions which permit the production of glutamine or a composition comprising glutamine in said non-human organism or in the culture medium surrounding said non-human organism.

[6968] A further embodiment of the present invention relates to a process for the production of glutamine, which comprises
[6969] (a) increasing or generating one or more activities selected from the group consisting of yer106w-protein in an organelle, preferably in plastids or mitochondria, especially in plastids, of a non-human organism or a part thereof, preferably a microorganism, a plant cell, a plant or a part thereof, as compared to a corresponding non-transformed wild type non-human organism or a part thereof; and
[6970] (b) growing the non-human organism or a part thereof under conditions which permit the production of glutamine or a composition comprising glutamine in said non-human organism or in the culture medium surrounding said non-human organism.

[6971] A further embodiment of the present invention relates to a process for the production of proline, which comprises
[6972] (a) increasing or generating one or more activities selected from the group consisting of molecular chaperone portein in an organelle, preferably in plastids or mitochondria, especially in plastids, of a non-human organism or a part thereof, preferably a microorganism, a plant cell, a plant or a part thereof, as compared to a corresponding non-transformed wild type non-human organism or a part thereof; and
[6973] (b) growing the non-human organism or a part thereof under conditions which permit the production of proline or a composition comprising proline in said non-human organism or in the culture medium surrounding said non-human organism.

[6974] A further embodiment of the present invention relates to a process for the production of proline, which comprises
[6975] (a) increasing or generating one or more activities selected from the group consisting of YFL019C-protein in an organelle, preferably in plastids or mitochondria, especially in plastids, of a non-human organism or a part thereof, preferably a microorganism, a plant cell, a plant or a part thereof, as compared to a corresponding non-transformed wild type non-human organism or a part thereof; and
[6976] (b) growing the non-human organism or a part thereof under conditions which permit the production of proline or a composition comprising proline in said non-human organism or in the culture medium surrounding said non-human organism.

[6977] A further embodiment of the present invention relates to a process for the production of arginine, which comprises
[6978] (a) increasing or generating one or more activities selected from the group consisting of yf1054c-protein in an organelle, preferably in plastids or mitochondria, especially in plastids, of a non-human organism or a part thereof, preferably a microorganism, a plant cell, a plant or a part thereof, as compared to a corresponding non-transformed wild type non-human organism or a part thereof; and
[6979] (b) growing the non-human organism or a part thereof under conditions which permit the production of arginine or a composition comprising arginine in said non-human organism or in the culture medium surrounding said non-human organism.

[6980] A further embodiment of the present invention relates to a process for the production of glutamine, which comprises
[6981] (a) increasing or generating one or more activities selected from the group consisting of yfl054c-protein in an organelle, preferably in plastids or mitochondria, especially in plastids, of a non-human organism or a part thereof, preferably a microorganism, a plant cell, a plant or a part thereof, as compared to a corresponding non-transformed wild type non-human organism or a part thereof; and
[6982] (b) growing the non-human organism or a part thereof under conditions which permit the production of glutamine or a composition comprising glutamine in said non-human organism or in the culture medium surrounding said non-human organism.

[6983] A further embodiment of the present invention relates to a process for the production of arginine, which comprises
[6984] (a) increasing or generating one or more activities selected from the group consisting of pre-mRNA-splicing factor in an organelle, preferably in plastids or mitochondria, especially in plastids, of a non-human organism or a part thereof, preferably a microorganism, a plant cell, a plant or a part thereof, as compared to a corresponding non-transformed wild type non-human organism or a part thereof; and
[6985] (b) growing the non-human organism or a part thereof under conditions which permit the production of arginine or a composition comprising arginine in said non-human organism or in the culture medium surrounding said non-human organism.

[6986] A further embodiment of the present invention relates to a process for the production of proline, which comprises
[6987] (a) increasing or generating one or more activities selected from the group consisting of ygl237c-protein in an organelle, preferably in plastids or mitochondria, especially in plastids, of a non-human organism or a part thereof, preferably a microorganism, a plant cell, a plant or a part thereof, as compared to a corresponding non-transformed wild type non-human organism or a part thereof; and
[6988] (b) growing the non-human organism or a part thereof under conditions which permit the production of proline or a composition comprising proline in said non-human organism or in the culture medium surrounding said non-human organism.

[6989] A further embodiment of the present invention relates to a process for the production of glutamine, which comprises
[6990] (a) increasing or generating one or more activities selected from the group consisting of ygr068c-protein in an organelle, preferably in plastids or mitochondria, especially in plastids, of a non-human organism or a part thereof, preferably a microorganism, a plant cell, a plant or a part thereof, as compared to a corresponding non-transformed wild type non-human organism or a part thereof; and
[6991] (b) growing the non-human organism or a part thereof under conditions which permit the production of glutamine or a composition comprising glutamine in said non-human organism or in the culture medium surrounding said non-human organism.

[6992] A further embodiment of the present invention relates to a process for the production of proline, which comprises
[6993] (a) increasing or generating one or more activities selected from the group consisting of squalene monooxygenase in an organelle, preferably in plastids or mitochondria, especially in plastids, of a non-human organism or a part thereof, preferably a microorganism, a plant cell, a plant or a part thereof, as compared to a corresponding non-transformed wild type non-human organism or a part thereof; and
[6994] (b) growing the non-human organism or a part thereof under conditions which permit the production of proline or a composition comprising proline in said non-human organism or in the culture medium surrounding said non-human organism.

[6995] A further embodiment of the present invention relates to a process for the production of glutamate, which comprises
[6996] (a) increasing or generating one or more activities selected from the group consisting of ygr221c-protein in an organelle, preferably in plastids or mitochondria, especially in plastids, of a non-human organism or a part thereof, preferably a microorganism, a plant cell, a plant or a part thereof, as compared to a corresponding non-transformed wild type non-human organism or a part thereof; and
[6997] (b) growing the non-human organism or a part thereof under conditions which permit the production of glutamate or a composition comprising glutamate in said non-human organism or in the culture medium surrounding said non-human organism.

[6998] A further embodiment of the present invention relates to a process for the production of glutamine, which comprises
[6999] (a) increasing or generating one or more activities selected from the group consisting of ygr221c-protein in an organelle, preferably in plastids or mitochondria, especially in plastids, of a non-human organism or a part thereof, preferably a microorganism, a plant cell, a plant or a part thereof, as compared to a corresponding non-transformed wild type non-human organism or a part thereof; and
[7000] (b) growing the non-human organism or a part thereof under conditions which permit the production of glutamine or a composition comprising glutamine in said non-human organism or in the culture medium surrounding said non-human organism.

[7001] A further embodiment of the present invention relates to a process for the production of proline, which comprises
[7002] (a) increasing or generating one or more activities selected from the group consisting of yhl013c-protein in an organelle, preferably in plastids or mitochondria, especially in plastids, of a non-human organism or a part thereof, preferably a microorganism, a plant cell, a plant or a part thereof, as compared to a corresponding non-transformed wild type non-human organism or a part thereof; and
[7003] (b) growing the non-human organism or a part thereof under conditions which permit the production of proline or a composition comprising proline in said non-human organism or in the culture medium surrounding said non-human organism.

[7004] A further embodiment of the present invention relates to a process for the production of arginine, which comprises
[7005] (a) increasing or generating one or more activities selected from the group consisting of mitochondrial processing protease in an organelle, preferably in plastids or mitochondria, especially in plastids, of a non-human organism or a part thereof, preferably a microorganism, a plant cell, a plant or a part thereof, as compared to a corresponding non-transformed wild type non-human organism or a part thereof; and
[7006] (b) growing the non-human organism or a part thereof under conditions which permit the production of arginine or a composition comprising arginine in said non-human organism or in the culture medium surrounding said non-human organism.

[7007] A further embodiment of the present invention relates to a process for the production of proline, which comprises
[7008] (a) increasing or generating one or more activities selected from the group consisting of H/ACA ribonucleoprotein complex subunit 3 in an organelle, preferably in plastids or mitochondria, especially in plastids, of a non-human organism or a part thereof, preferably a microorganism, a plant cell, a plant or a part thereof, as compared to a corresponding non-transformed wild type non-human organism or a part thereof; and
[7009] (b) growing the non-human organism or a part thereof under conditions which permit the production of proline or a composition comprising proline in said non-human organism or in the culture medium surrounding said non-human organism.

[7010] A further embodiment of the present invention relates to a process for the production of glutamate, which comprises
[7011] (a) increasing or generating one or more activities selected from the group consisting of yhr207c-protein in an organelle, preferably in plastids or mitochondria, especially in plastids, of a non-human organism or a part thereof, preferably a microorganism, a plant cell, a plant or a part thereof, as compared to a corresponding non-transformed wild type non-human organism or a part thereof; and
[7012] (b) growing the non-human organism or a part thereof under conditions which permit the production of glutamate or a composition comprising glutamate in said non-human organism or in the culture medium surrounding said non-human organism.

[7013] A further embodiment of the present invention relates to a process for the production of arginine, which comprises
[7014] (a) increasing or generating one or more activities selected from the group consisting of 3-phosphoglycerate dehydrogenase in an organelle, preferably in plastids or mitochondria, especially in plastids, of a non-human organism or a part thereof, preferably a microorganism, a plant cell, a plant or a part thereof, as compared to a corresponding non-transformed wild type non-human organism or a part thereof; and
[7015] (b) growing the non-human organism or a part thereof under conditions which permit the production of arginine or a composition comprising arginine in said non-human organism or in the culture medium surrounding said non-human organism.

[7016] A further embodiment of the present invention relates to a process for the production of proline, which comprises
[7017] (a) increasing or generating one or more activities selected from the group consisting of allantoinase in an organelle, preferably in plastids or mitochondria, especially in plastids, of a non-human organism or a part thereof, preferably a microorganism, a plant cell, a plant or a part thereof, as compared to a corresponding non-transformed wild type non-human organism or a part thereof; and
[7018] (b) growing the non-human organism or a part thereof under conditions which permit the production of proline or a composition comprising proline in said non-human organism or in the culture medium surrounding said non-human organism.

[7019] A further embodiment of the present invention relates to a process for the production of arginine, which comprises
[7020] (a) increasing or generating one or more activities selected from the group consisting of allantoicase in an organelle, preferably in plastids or mitochondria, especially in plastids, of a non-human organism or a part thereof, preferably a microorganism, a plant cell, a plant or a part thereof, as compared to a corresponding non-transformed wild type non-human organism or a part thereof; and
[7021] (b) growing the non-human organism or a part thereof under conditions which permit the production of arginine or a composition comprising arginine in said non-human organism or in the culture medium surrounding said non-human organism.

[7022] A further embodiment of the present invention relates to a process for the production of glutamine, which comprises
[7023] (a) increasing or generating one or more activities selected from the group consisting of DnaJ-like chaperone in an organelle, preferably in plastids or mitochondria, especially in plastids, of a non-human organism or a part thereof, preferably a microorganism, a plant cell, a plant or a part thereof, as compared to a corresponding non-transformed wild type non-human organism or a part thereof; and
[7024] (b) growing the non-human organism or a part thereof under conditions which permit the production of glutamine or a composition comprising glutamine in said non-human organism or in the culture medium surrounding said non-human organism.

[7025] A further embodiment of the present invention relates to a process for the production of arginine, which comprises
[7026] (a) increasing or generating one or more activities selected from the group consisting of ornithine carbamoyltransferase in an organelle, preferably in plastids or mitochondria, especially in plastids, of a non-human organism or a part thereof, preferably a microorganism, a plant cell, a plant or a part thereof, as compared to a corresponding non-transformed wild type non-human organism or a part thereof; and
[7027] (b) growing the non-human organism or a part thereof under conditions which permit the production of arginine or a composition comprising arginine in said non-human organism or in the culture medium surrounding said non-human organism.

[7028] A further embodiment of the present invention relates to a process for the production of proline, which comprises
[7029] (a) increasing or generating one or more activities selected from the group consisting of potassium transport protein in an organelle, preferably in plastids or mitochondria, especially in plastids, of a non-human organism or a part thereof, preferably a microorganism, a plant cell, a plant or a part thereof, as compared to a corresponding non-transformed wild type non-human organism or a part thereof; and
[7030] (b) growing the non-human organism or a part thereof under conditions which permit the production of proline or a composition comprising proline in said non-human organism or in the culture medium surrounding said non-human organism.

[7031] A further embodiment of the present invention relates to a process for the production of arginine, which comprises
[7032] (a) increasing or generating one or more activities selected from the group consisting of glycogenin in an organelle, preferably in plastids or mitochondria, especially in plastids, of a non-human organism or a part thereof, preferably a microorganism, a plant cell, a plant or a part thereof, as compared to a corresponding non-transformed wild type non-human organism or a part thereof; and
[7033] (b) growing the non-human organism or a part thereof under conditions which permit the production of arginine or a composition comprising arginine in said non-human organism or in the culture medium surrounding said non-human organism.

[7034] A further embodiment of the present invention relates to a process for the production of proline, which comprises
[7035] (a) increasing or generating one or more activities selected from the group consisting of ATP-dependent RNA helicase in an organelle, preferably in plastids or mitochondria, especially in plastids, of a non-human organism or a part thereof, preferably a microorganism, a plant cell, a plant or a part thereof, as compared to a corresponding non-transformed wild type non-human organism or a part thereof; and
[7036] (b) growing the non-human organism or a part thereof under conditions which permit the production of proline or a composition comprising proline in said non-human organism or in the culture medium surrounding said non-human organism.

[7037] A further embodiment of the present invention relates to a process for the production of glutamine, which comprises
[7038] (a) increasing or generating one or more activities selected from the group consisting of phosphoribosyltransferase in an organelle, preferably in plastids or mitochondria, especially in plastids, of a non-human organism or a part thereof, preferably a microorganism, a plant cell, a plant or a part thereof, as compared to a corresponding non-transformed wild type non-human organism or a part thereof; and
[7039] (b) growing the non-human organism or a part thereof under conditions which permit the production of glutamine or a composition comprising glutamine in said non-human organism or in the culture medium surrounding said non-human organism.

[7040] A further embodiment of the present invention relates to a process for the production of glutamate, which comprises
[7041] (a) increasing or generating one or more activities selected from the group consisting of polygalacturonase in an organelle, preferably in plastids or mitochondria, especially in plastids, of a non-human organism or a part thereof, preferably a microorganism, a plant cell, a plant or a part thereof, as compared to a corresponding non-transformed wild type non-human organism or a part thereof; and
[7042] (b) growing the non-human organism or a part thereof under conditions which permit the production of glutamate or a composition comprising glutamate in said non-human organism or in the culture medium surrounding said non-human organism.

[7043] A further embodiment of the present invention relates to a process for the production of proline, which comprises
[7044] (a) increasing or generating one or more activities selected from the group consisting of aspartate aminotransferase in an organelle, preferably in plastids or mitochondria, especially in plastids, of a non-human organism or a part thereof, preferably a microorganism, a plant cell, a plant or a part thereof, as compared to a corresponding non-transformed wild type non-human organism or a part thereof; and
[7045] (b) growing the non-human organism or a part thereof under conditions which permit the production of proline or a composition comprising proline in said non-human organism or in the culture medium surrounding said non-human organism.

[7046] A further embodiment of the present invention relates to a process for the production of glutamate, which comprises
[7047] (a) increasing or generating one or more activities selected from the group consisting of ylr065c-protein in an organelle, preferably in plastids or mitochondria, especially in plastids, of a non-human organism or a part thereof, preferably a microorganism, a plant cell, a plant or a part thereof, as compared to a corresponding non-transformed wild type non-human organism or a part thereof; and
[7048] (b) growing the non-human organism or a part thereof under conditions which permit the production of glutamate or a composition comprising glutamate in said non-human organism or in the culture medium surrounding said non-human organism.

[7049] A further embodiment of the present invention relates to a process for the production of glutamine, which comprises
[7050] (a) increasing or generating one or more activities selected from the group consisting of ylr178c-protein in an organelle, preferably in plastids or mitochondria, especially in plastids, of a non-human organism or a part thereof, preferably a microorganism, a plant cell, a plant or a part thereof, as compared to a corresponding non-transformed wild type non-human organism or a part thereof; and
[7051] (b) growing the non-human organism or a part thereof under conditions which permit the production of glutamine or a composition comprising glutamine in said non-human organism or in the culture medium surrounding said non-human organism.

[7052] A further embodiment of the present invention relates to a process for the production of proline, which comprises
[7053] (a) increasing or generating one or more activities selected from the group consisting of aconitate hydratase in an organelle, preferably in plastids or mitochondria, especially in plastids, of a non-human organism or a part thereof, preferably a microorganism, a plant cell, a plant or a part thereof, as compared to a corresponding non-transformed wild type non-human organism or a part thereof; and
[7054] (b) growing the non-human organism or a part thereof under conditions which permit the production of proline or a composition comprising proline in said non-human organism or in the culture medium surrounding said non-human organism.

[7055] A further embodiment of the present invention relates to a process for the production of proline, which comprises
[7056] (a) increasing or generating one or more activities selected from the group consisting of adenylosuccinate lyase in an organelle, preferably in plastids or mitochondria, especially in plastids, of a non-human organism or a part thereof, preferably a microorganism, a plant cell, a plant or a part thereof, as compared to a corresponding non-transformed wild type non-human organism or a part thereof; and
[7057] (b) growing the non-human organism or a part thereof under conditions which permit the production of proline or a composition comprising proline in said non-human organism or in the culture medium surrounding said non-human organism.

[7058] A further embodiment of the present invention relates to a process for the production of glutamine, which comprises
[7059] (a) increasing or generating one or more activities selected from the group consisting of ynl142w-protein in an organelle, preferably in plastids or mitochondria, especially in plastids, of a non-human organism or a part thereof, preferably a microorganism, a plant cell, a plant or a part thereof, as compared to a corresponding non-transformed wild type non-human organism or a part thereof; and
[7060] (b) growing the non-human organism or a part thereof under conditions which permit the production of glutamine or a composition comprising glutamine in said non-human organism or in the culture medium surrounding said non-human organism.

[7061] A further embodiment of the present invention relates to a process for the production of proline, which comprises
[7062] (a) increasing or generating one or more activities selected from the group consisting of sterol O-acyltransferase in an organelle, preferably in plastids or mitochondria, especially in plastids, of a non-human organism or a part thereof, preferably a microorganism, a plant cell, a plant or a part thereof, as compared to a corresponding non-transformed wild type non-human organism or a part thereof; and
[7063] (b) growing the non-human organism or a part thereof under conditions which permit the production of proline or a composition comprising proline in said non-human organism or in the culture medium surrounding said non-human organism.

[7064] A further embodiment of the present invention relates to a process for the production of arginine, which comprises
[7065] (a) increasing or generating one or more activities selected from the group consisting of protein kinase in an organelle, preferably in plastids or mitochondria, especially in plastids, of a non-human organism or a part thereof, preferably a microorganism, a plant cell, a plant or a part thereof, as compared to a corresponding non-transformed wild type non-human organism or a part thereof; and
[7066] (b) growing the non-human organism or a part thereof under conditions which permit the production of arginine or a composition comprising arginine in said non-human organism or in the culture medium surrounding said non-human organism.

[7067] A further embodiment of the present invention relates to a process for the production of glutamate, which comprises
[7068] (a) increasing or generating one or more activities selected from the group consisting of glutaminyl-tRNA synthetase in an organelle, preferably in plastids or mitochondria, especially in plastids, of a non-human organism or a part thereof, preferably a microorganism, a plant cell, a plant or a part thereof, as compared to a corresponding non-transformed wild type non-human organism or a part thereof; and
[7069] (b) growing the non-human organism or a part thereof under conditions which permit the production of glutamate or a composition comprising glutamate in said non-human organism or in the culture medium surrounding said non-human organism.

[7070] A further embodiment of the present invention relates to a process for the production of glutamine, which comprises
[7071] (a) increasing or generating one or more activities selected from the group consisting of glutaminyl-tRNA synthetase in an organelle, preferably in plastids or mitochondria, especially in plastids, of a non-human organism or a part thereof, preferably a microorganism, a plant cell, a plant or a part thereof, as compared to a corresponding non-transformed wild type non-human organism or a part thereof; and
[7072] (b) growing the non-human organism or a part thereof under conditions which permit the production of glutamine or a composition comprising glutamine in said non-human organism or in the culture medium surrounding said non-human organism.

[7073] A further embodiment of the present invention relates to a process for the production of proline, which comprises
[7074] (a) increasing or generating one or more activities selected from the group consisting of yor221c-protein in an organelle, preferably in plastids or mitochondria, especially in plastids, of a non-human organism or a part thereof, preferably a microorganism, a plant cell, a plant or a part thereof, as compared to a corresponding non-transformed wild type non-human organism or a part thereof; and
[7075] (b) growing the non-human organism or a part thereof under conditions which permit the production of proline or a composition comprising proline in said non-human organism or in the culture medium surrounding said non-human organism.

[7076] A further embodiment of the present invention relates to a process for the production of proline, which comprises
[7077] (a) increasing or generating one or more activities selected from the group consisting of protein kinase in an organelle, preferably in plastids or mitochondria, especially in plastids, of a non-human organism or a part thereof, preferably a microorganism, a plant cell, a plant or a part thereof, as compared to a corresponding non-transformed wild type non-human organism or a part thereof; and
[7078] (b) growing the non-human organism or a part thereof under conditions which permit the production of proline or a composition comprising proline in said non-human organism or in the culture medium surrounding said non-human organism.

[7079] A further embodiment of the present invention relates to a process for the production of arginine, which comprises
[7080] (a) increasing or generating one or more activities selected from the group consisting of isopentenyl diphosphate isomerase in an organelle, preferably in plastids or mitochondria, especially in plastids, of a non-human organism or a part thereof, preferably a microorganism, a plant cell, a plant or a part thereof, as compared to a corresponding non-transformed wild type non-human organism or a part thereof; and
[7081] (b) growing the non-human organism or a part thereof under conditions which permit the production of arginine or a composition comprising arginine in said non-human organism or in the culture medium surrounding said non-human organism.

[7082] A further embodiment of the present invention relates to a process for the production of arginine, which comprises
[7083] (a) increasing or generating one or more activities selected from the group consisting of Zm_{—}4842_BE510522-protein in an organelle, preferably in plastids or mitochondria, especially in plastids, of a non-human organism or a part thereof, preferably a microorganism, a plant cell, a plant or a part thereof, as compared to a corresponding non-transformed wild type non-human organism or a part thereof; and
[7084] (b) growing the non-human organism or a part thereof under conditions which permit the production of arginine or a composition comprising arginine in said non-human organism or in the culture medium surrounding said non-human organism.

[7085] A further embodiment of the present invention relates to a process for the production of glutamine, which comprises
[7086] (a) increasing or generating one or more activities selected from the group consisting of Zm_{—}4842_BE510522-protein in an organelle, preferably in plastids or mitochondria, especially in plastids, of a non-human organism or a part thereof, preferably a microorganism, a plant cell, a plant or a part thereof, as compared to a corresponding non-transformed wild type non-human organism or a part thereof; and
[7087] (b) growing the non-human organism or a part thereof under conditions which permit the production of glutamine or a composition comprising glutamine in said non-human organism or in the culture medium surrounding said non-human organism.

[7088] A further embodiment of the present invention relates to a process for the production of proline, which comprises
[7089] (a) increasing or generating one or more activities selected from the group consisting of Zm_{—}4842_BE510522-protein in an organelle, preferably in plastids or mitochondria, especially in plastids, of a non-human organism or a part thereof, preferably a microorganism, a plant cell, a plant or a part thereof, as compared to a corresponding non-transformed wild type non-human organism or a part thereof; and
[7090] (b) growing the non-human organism or a part thereof under conditions which permit the production of proline or a composition comprising proline in said non-human organism or in the culture medium surrounding said non-human organism.

[7091] A further embodiment of the present invention relates to a process for the production of arginine, which comprises
[7092] (a) increasing or generating one or more activities selected from the group consisting of phosphopantothenoylcysteine decarboxylase in an organelle, preferably in plastids or mitochondria, especially in plastids, of a non-human organism or a part thereof, preferably a microorganism, a plant cell, a plant or a part thereof, as compared to a corresponding non-transformed wild type non-human organism or a part thereof; and
[7093] (b) growing the non-human organism or a part thereof under conditions which permit the production of arginine or a composition comprising arginine in said non-human organism or in the culture medium surrounding said non-human organism.

[7094] A further embodiment of the present invention relates to a process for the production of proline, which comprises
[7095] (a) increasing or generating one or more activities selected from the group consisting of ZM06LC11975-protein in an organelle, preferably in plastids or mitochondria, especially in plastids, of a non-human organism or a part thereof, preferably a microorganism, a plant cell, a plant or a part thereof, as compared to a corresponding non-transformed wild type non-human organism or a part thereof; and
[7096] (b) growing the non-human organism or a part thereof under conditions which permit the production of proline or a composition comprising proline in said non-human organism or in the culture medium surrounding said non-human organism.

[7097] A further embodiment of the present invention relates to a process for the production of arginine, which comprises
[7098] (a1) increasing or generating the activity of a polypeptide comprising a polypeptide as depicted in the respective line in column 5 or 8 of Table II, application no. 2, or a homolog or fragment thereof, a consensus sequence or at least one polypeptide motif as depicted in column 8 of Table IV, application no. 2; or
[7099] increasing or generating the activity of an expression product of one or more nucleic acid molecule(s) comprising a polynucleotide as depicted in the respective line in column 5 or 8 of Table I, application no. 2, preferably the coding region thereof, or a homolog or a fragment thereof;
[7100] in an organelle, preferably in plastids or mitochondria, especially in plastids, in a non-human organism or a part thereof; preferably a microorganism, a plant cell, a plant or a part thereof, as compared to a corresponding non-transformed wild type non-human organism or a part thereof; or
[7101] (a2) increasing or generating the activity of a polypeptide comprising a polypeptide as depicted in the respective line in column 5 or 8 of Table II, application no. 2, or a homolog or a fragment thereof, a consensus sequence or at least one polypeptide motif as depicted in the respective line in column 8 of Table IV, application no. 2, which is joined to a transit peptide; or
[7102] increasing or generating the activity of an expression product of one or more nucleic acid molecule(s) comprising a polynucleotide as depicted in the respective line in column 5 or 8 of Table I, application no. 2, preferably the coding region thereof, or a homolog or a fragment thereof, which is joined to a nucleic acid sequence encoding an organelle localization sequence, preferably a plastid or a mitochondrion locatization sequence, especially a plastid localization sequence;
[7103] in a non-human organism or a part thereof; preferably a microorganism, a plant cell, a plant or a part thereof, as compared to a corresponding non-transformed wild type non-human organism or a part thereof; or
[7104] (a3) increasing or generating the activity of a polypeptide comprising a polypeptide as depicted in the respective line in column 5 or 8 of Table II, application no. 2, or a homolog or a fragment thereof, a consensus sequence or at least one polypeptide motif as depicted in the respective line in column 8 of Table IV, application no. 2; or
[7105] increasing or generating the activity of an expression product of one or more nucleic acid molecule(s) comprising a polynucleotide as depicted in the respective line in column 5 or 8 of Table I, application no. 2, preferably the coding region thereof, or a homolog or a fragment thereof;
[7106] in an organelle, preferably in plastids or imitochondra, especially in plastids, in a non-human organism or a part thereof; preferably a microorganism, a plant cell, a plant or a part thereof, through transformation of the organelle, as compared to a corresponding non-transformed wild type non-human organism or a part thereof;
   (wherein in the respective line in the respective Table in column 7 arginine is depicted) and
[7107] (b) growing the non-human organism under conditions which permit the production of arginine, or a composition comprising arginine in said non-human organism or in the culture medium surrounding said non-human organism.

[7108] A further embodiment of the present invention relates to a process for the production of glutamate, which comprises
[7109] (a1) increasing or generating the activity of a polypeptide comprising a polypeptide as depicted in the respective line in column 5 or 8 of Table II, application no. 2, or a homolog or fragment thereof, a consensus sequence or at least one polypeptide motif as depicted in column 8 of Table IV, application no. 2; or
[7110] increasing or generating the activity of an expression product of one or more nucleic acid molecule(s) comprising a polynucleotide as depicted in the respective line in column 5 or 8 of Table I, application no. 2, preferably the coding region thereof, or a homolog or a fragment thereof;
[7111] in an organelle, preferably in plastids or mitochondria, especially in plastids, in a non-human organism or a part thereof; preferably a microorganism, a plant cell, a plant or a part thereof, as compared to a corresponding non-transformed wild type non-human organism or a part thereof; or
[7112] (a2) increasing or generating the activity of a polypeptide comprising a polypeptide as depicted in the respective line in column 5 or 8 of Table II, application no. 2, or a homolog or a fragment thereof, a consensus sequence or at least one polypeptide motif as depicted in the respective line in column 8 of Table IV, application no. 2, which is joined to a transit peptide; or
[7113] increasing or generating the activity of an expression product of one or more nucleic acid molecule(s) comprising a polynucleotide as depicted in the respective line in column 5 or 8 of Table I, application no. 2, preferably the coding region thereof, or a homolog or a fragment thereof, which is joined to a nucleic acid sequence encoding an organelle localization sequence, preferably a plastid or a mitochondrion locatization sequence, especially a plastid localization sequence;
[7114] in a non-human organism or a part thereof; preferably a microorganism, a plant cell, a plant or a part thereof, as compared to a corresponding non-transformed wild type non-human organism or a part thereof; or
[7115] (a3) increasing or generating the activity of a polypeptide comprising a polypeptide as depicted in the respective line in column 5 or 8 of Table II, application no. 2, or a homolog or a fragment thereof, a consensus sequence or at least one polypeptide motif as depicted in the respective line in column 8 of Table IV, application no. 2; or
[7116] increasing or generating the activity of an expression product of one or more nucleic acid molecule(s) comprising a polynucleotide as depicted in the respective line in column 5 or 8 of Table I, application no. 2, preferably the coding region thereof, or a homolog or a fragment thereof;
[7117] in an organelle, preferably in plastids or imitochondra, especially in plastids, in a non-human organism or a part thereof; preferably a microorganism, a plant cell, a plant or a part thereof, through transformation of the organelle, as compared to a corresponding non-transformed wild type non-human organism or a part thereof;
   (wherein in the respective line in the respective Table in column 7 glutamate is depicted) and
[7118] (b) growing the non-human organism under conditions which permit the production of glutamate, or a composition comprising glutamate in said non-human organism or in the culture medium surrounding said non-human organism.

[7119] A further embodiment of the present invention relates to a process for the production of glutamine, which comprises
[7120] (a1) increasing or generating the activity of a polypeptide comprising a polypeptide as depicted in the respective line in column 5 or 8 of Table II, application no. 2, or a homolog or fragment thereof, a consensus sequence or at least one polypeptide motif as depicted in column 8 of Table IV, application no. 2; or
[7121] increasing or generating the activity of an expression product of one or more nucleic acid molecule(s) comprising a polynucleotide as depicted in the respective line in column 5 or 8 of Table I, application no. 2, preferably the coding region thereof, or a homolog or a fragment thereof;
[7122] in an organelle, preferably in plastids or mitochondria, especially in plastids, in a non-human organism or a part thereof; preferably a microorganism, a plant cell, a plant or a part thereof, as compared to a corresponding non-transformed wild type non-human organism or a part thereof; or
[7123] (a2) increasing or generating the activity of a polypeptide comprising a polypeptide as depicted in the respective line in column 5 or 8 of Table II, application no. 2, or a homolog or a fragment thereof, a consensus sequence or at least one polypeptide motif as depicted in the respective line in column 8 of Table IV, application no. 2, which is joined to a transit peptide; or
[7124] increasing or generating the activity of an expression product of one or more nucleic acid molecule(s) comprising a polynucleotide as depicted in the respective line in column 5 or 8 of Table I, application no. 2, preferably the coding region thereof, or a homolog or a fragment thereof, which is joined to a nucleic acid sequence encoding an organelle localization sequence, preferably a plastid or a mitochondrion locatization sequence, especially a plastid localization sequence;
[7125] in a non-human organism or a part thereof; preferably a microorganism, a plant cell, a plant or a part thereof, as compared to a corresponding non-transformed wild type non-human organism or a part thereof; or
[7126] (a3) increasing or generating the activity of a polypeptide comprising a polypeptide as depicted in the respective line in column 5 or 8 of Table II, application no. 2, or a homolog or a fragment thereof, a consensus sequence or at least one polypeptide motif as depicted in the respective line in column 8 of Table IV, application no. 2; or increasing or generating the activity of an expression product of one or more nucleic acid molecule(s) comprising a polynucleotide as depicted in the respective line in column 5 or 8 of Table I, application no. 2, preferably the coding region thereof, or a homolog or a fragment thereof;
[7127] in an organelle, preferably in plastids or imitochondra, especially in plastids, in a non-human organism or a part thereof; preferably a microorganism, a plant cell, a plant or a part thereof, through transformation of the organelle, as compared to a corresponding non-transformed wild type non-human organism or a part thereof;
   (wherein in the respective line in the respective Table in column 7 glutamine is depicted) and
[7128] (b) growing the non-human organism under conditions which permit the production of glutamine, or a composition comprising glutamine in said non-human organism or in the culture medium surrounding said non-human organism.

[7129] A further embodiment of the present invention relates to a process for the production of proline, which comprises
[7130] (a1) increasing or generating the activity of a polypeptide comprising a polypeptide as depicted in the respective line in column 5 or 8 of Table II, application no. 2, or a homolog or fragment thereof, a consensus sequence or at least one polypeptide motif as depicted in column 8 of Table IV, application no. 2; or increasing or generating the activity of an expression product of one or more nucleic acid molecule(s) comprising a polynucleotide as depicted in the respective line in column 5 or 8 of Table I, application no. 2, preferably the coding region thereof, or a homolog or a fragment thereof;
[7131] in an organelle, preferably in plastids or mitochondria, especially in plastids, in a non-human organism or a part thereof; preferably a microorganism, a plant cell, a plant or a part thereof, as compared to a corresponding non-transformed wild type non-human organism or a part thereof; or
[7132] (a2) increasing or generating the activity of a polypeptide comprising a polypeptide as depicted in the respective line in column 5 or 8 of Table II, application no. 2, or a homolog or a fragment thereof, a consensus sequence or at least one polypeptide motif as depicted in the respective line in column 8 of Table IV, application no. 2, which is joined to a transit peptide; or
[7133] increasing or generating the activity of an expression product of one or more nucleic acid molecule(s) comprising a polynucleotide as depicted in the respective line in column 5 or 8 of Table I, application no. 2, preferably the coding region thereof, or a homolog or a fragment thereof, which is joined to a nucleic acid sequence encoding an organelle localization sequence, preferably a plastid or a mitochondrion locatization sequence, especially a plastid localization sequence;
[7134] in a non-human organism or a part thereof; preferably a microorganism, a plant cell, a plant or a part thereof, as compared to a corresponding non-transformed wild type non-human organism or a part thereof; or
[7135] (a3) increasing or generating the activity of a polypeptide comprising a polypeptide as depicted in the respective line in column 5 or 8 of Table II, application no. 2, or a homolog or a fragment thereof, a consensus sequence or at least one polypeptide motif as depicted in the respective line in column 8 of Table IV, application no. 2; or increasing or generating the activity of an expression product of one or more nucleic acid molecule(s) comprising a polynucleotide as depicted in the respective line in column 5 or 8 of Table I, application no. 2, preferably the coding region thereof, or a homolog or a fragment thereof;
[7136] in an organelle, preferably in plastids or imitochondra, especially in plastids, in a non-human organism or a part thereof; preferably a microorganism, a plant cell, a plant or a part thereof, through transformation of the organelle, as compared to a corresponding non-transformed wild type non-human organism or a part thereof;
   (wherein in the respective line in the respective Table in column 7 proline is depicted) and
[7137] (b) growing the non-human organism under conditions which permit the production of proline, or a composition comprising proline in said non-human organism or in the culture medium surrounding said non-human organism.

[7138] Accordingly, the present invention relates to a process for the production of glutamate, which comprises
[7139] (a) increasing or generating the activity of a 47266012-protein in the cytosol of a cell of a non-human organism or a part thereof, preferably a microorganism, a plant cell, a plant or a part thereof, as compared to a corresponding non-transformed wild type non-human organism or a part thereof; and
[7140] (b) growing the non-human organism or a part thereof under conditions which permit the production of glutamate or a composition comprising glutamate in said non-human organism or in the culture medium surrounding said non-human organism.

[7141] Accordingly, the present invention relates to a process for the production of glutamine, which comprises
[7142] (a) increasing or generating the activity of a 47266012-protein in the cytosol of a cell of a non-human organism or a part thereof, preferably a microorganism, a plant cell, a plant or a part thereof, as compared to a corresponding non-transformed wild type non-human organism or a part thereof; and
[7143] (b) growing the non-human organism or a part thereof under conditions which permit the production of glutamine or a composition comprising glutamine in said non-human organism or in the culture medium surrounding said non-human organism.

[7144] Accordingly, the present invention relates to a process for the production of glutamate, which comprises
[7145] (a) increasing or generating the activity of a 49747384_SOYBEAN-protein in the cytosol of a cell of a non-human organism or a part thereof, preferably a microorganism, a plant cell, a plant or a part thereof, as compared to a corresponding non-transformed wild type non-human organism or a part thereof; and
[7146] (b) growing the non-human organism or a part thereof under conditions which permit the production of glutamate or a composition comprising glutamate in said non-human organism or in the culture medium surrounding said non-human organism.

[7147] Accordingly, the present invention relates to a process for the production of glutamate, which comprises
[7148] (a) increasing or generating the activity of a pyruvate kinase in the cytosol of a cell of a non-human organism or a part thereof, preferably a microorganism, a plant cell, a plant or a part thereof, as compared to a corresponding non-transformed wild type non-human organism or a part thereof; and
[7149] (b) growing the non-human organism or a part thereof under conditions which permit the production of glutamate or a composition comprising glutamate in said non-human organism or in the culture medium surrounding said non-human organism.

[7150] Accordingly, the present invention relates to a process for the production of proline, which comprises
[7151] (a) increasing or generating the activity of a pyruvate kinase in the cytosol of a cell of a non-human organism or a part thereof, preferably a microorganism, a plant cell, a plant or a part thereof, as compared to a corresponding non-transformed wild type non-human organism or a part thereof; and
[7152] (b) growing the non-human organism or a part thereof under conditions which permit the production of proline or a composition comprising proline in said non-human organism or in the culture medium surrounding said non-human organism.

[7153] Accordingly, the present invention relates to a process for the production of arginine, which comprises
[7154] (a) increasing or generating the activity of a acetyltransferase in the cytosol of a cell of a non-human organism or a part thereof, preferably a microorganism, a plant cell, a plant or a part thereof, as compared to a corresponding non-transformed wild type non-human organism or a part thereof; and
[7155] (b) growing the non-human organism or a part thereof under conditions which permit the production of arginine or a composition comprising arginine in said non-human organism or in the culture medium surrounding said non-human organism.

[7156] Accordingly, the present invention relates to a process for the production of glutamate, which comprises
[7157] (a) increasing or generating the activity of a pyruvate kinase in the cytosol of a cell of a non-human organism or a part thereof, preferably a microorganism, a plant cell, a plant or a part thereof, as compared to a corresponding non-transformed wild type non-human organism or a part thereof; and
[7158] (b) growing the non-human organism or a part thereof under conditions which permit the production of glutamate or a composition comprising glutamate in said non-human organism or in the culture medium surrounding said non-human organism.

[7159] Accordingly, the present invention relates to a process for the production of arginine, which comprises
[7160] (a) increasing or generating the activity of a glucose-6-phosphate 1-dehydrogenase in the cytosol of a cell of a non-human organism or a part thereof, preferably a microorganism, a plant cell, a plant or a part thereof, as compared to a corresponding non-transformed wild type non-human organism or a part thereof; and
[7161] (b) growing the non-human organism or a part thereof under conditions which permit the production of arginine or a composition comprising arginine in said non-human organism or in the culture medium surrounding said non-human organism.

[7162] Accordingly, the present invention relates to a process for the production of proline, which comprises
[7163] (a) increasing or generating the activity of a glucose-6-phosphate 1-dehydrogenase in the cytosol of a cell of a non-human organism or a part thereof, preferably a microorganism, a plant cell, a plant or a part thereof, as compared to a corresponding non-transformed wild type non-human organism or a part thereof; and
[7164] (b) growing the non-human organism or a part thereof under conditions which permit the production of proline or a composition comprising proline in said non-human organism or in the culture medium surrounding said non-human organism.

[7165] Accordingly, the present invention relates to a process for the production of arginine, which comprises
[7166] (a) increasing or generating the activity of a amino acid acetyltransferase in the cytosol of a cell of a non-human organism or a part thereof, preferably a microorganism, a plant cell, a plant or a part thereof, as compared to a corresponding non-transformed wild type non-human organism or a part thereof; and
[7167] (b) growing the non-human organism or a part thereof under conditions which permit the production of arginine or a composition comprising arginine in said non-human organism or in the culture medium surrounding said non-human organism.

[7168] Accordingly, the present invention relates to a process for the production of glutamate, which comprises
[7169] (a) increasing or generating the activity of a protein phosphatase in the cytosol of a cell of a non-human organism or a part thereof, preferably a microorganism, a plant cell, a plant or a part thereof, as compared to a corresponding non-transformed wild type non-human organism or a part thereof; and
[7170] (b) growing the non-human organism or a part thereof under conditions which permit the production of glutamate or a composition comprising glutamate in said non-human organism or in the culture medium surrounding said non-human organism.

[7171] Accordingly, the present invention relates to a process for the production of glutamine, which comprises
[7172] (a) increasing or generating the activity of a protein phosphatase in the cytosol of a cell of a non-human organism or a part thereof, preferably a microorganism, a plant cell, a plant or a part thereof, as compared to a corresponding non-transformed wild type non-human organism or a part thereof; and
[7173] (b) growing the non-human organism or a part thereof under conditions which permit the production of glutamine or a composition comprising glutamine in said non-human organism or in the culture medium surrounding said non-human organism.

[7174] Accordingly, the present invention relates to a process for the production of arginine, which comprises
[7175] (a) increasing or generating the activity of a At1g17440-protein in the cytosol of a cell of a non-human organism or a part thereof, preferably a microorganism, a plant cell, a plant or a part thereof, as compared to a corresponding non-transformed wild type non-human organism or a part thereof; and
[7176] (b) growing the non-human organism or a part thereof under conditions which permit the production of arginine or a composition comprising arginine in said non-human organism or in the culture medium surrounding said non-human organism.

[7177] Accordingly, the present invention relates to a process for the production of glutamine, which comprises
[7178] (a) increasing or generating the activity of a At1g19800-protein in the cytosol of a cell of a non-human organism or a part thereof, preferably a microorganism, a plant cell, a plant or a part thereof, as compared to a corresponding non-transformed wild type non-human organism or a part thereof; and
[7179] (b) growing the non-human organism or a part thereof under conditions which permit the production of glutamine or a composition comprising glutamine in said non-human organism or in the culture medium surrounding said non-human organism.

[7180] Accordingly, the present invention relates to a process for the production of arginine, which comprises
[7181] (a) increasing or generating the activity of a cullin in the cytosol of a cell of a non-human organism or a part thereof, preferably a microorganism, a plant cell, a plant or a part thereof, as compared to a corresponding non-transformed wild type non-human organism or a part thereof; and
[7182] (b) growing the non-human organism or a part thereof under conditions which permit the production of arginine or a composition comprising arginine in said non-human organism or in the culture medium surrounding said non-human organism.

[7183] Accordingly, the present invention relates to a process for the production of proline, which comprises
[7184] (a) increasing or generating the activity of a cullin in the cytosol of a cell of a non-human organism or a part thereof, preferably a microorganism, a plant cell, a plant or a part thereof, as compared to a corresponding non-transformed wild type non-human organism or a part thereof; and
[7185] (b) growing the non-human organism or a part thereof under conditions which permit the production of proline or a composition comprising proline in said non-human organism or in the culture medium surrounding said non-human organism.

[7186] Accordingly, the present invention relates to a process for the production of arginine, which comprises
[7187] (a) increasing or generating the activity of a At1g29350-protein in the cytosol of a cell of a non-human organism or a part thereof, preferably a microorganism, a plant cell, a plant or a part thereof, as compared to a corresponding non-transformed wild type non-human organism or a part thereof; and
[7188] (b) growing the non-human organism or a part thereof under conditions which permit the production of arginine or a composition comprising arginine in said non-human organism or in the culture medium surrounding said non-human organism.

[7189] Accordingly, the present invention relates to a process for the production of arginine, which comprises
[7190] (a) increasing or generating the activity of a eukaryotic translation initiation factor 5 in the cytosol of a cell of a non-human organism or a part thereof, preferably a microorganism, a plant cell, a plant or a part thereof, as compared to a corresponding non-transformed wild type non-human organism or a part thereof; and
[7191] (b) growing the non-human organism or a part thereof under conditions which permit the production of arginine or a composition comprising arginine in said non-human organism or in the culture medium surrounding said non-human organism.

[7192] Accordingly, the present invention relates to a process for the production of glutamine, which comprises
[7193] (a) increasing or generating the activity of a eukaryotic translation initiation factor 5 in the cytosol of a cell of a non-human organism or a part thereof, preferably a microorganism, a plant cell, a plant or a part thereof, as compared to a corresponding non-transformed wild type non-human organism or a part thereof; and
[7194] (b) growing the non-human organism or a part thereof under conditions which permit the production of glutamine or a composition comprising glutamine in said non-human organism or in the culture medium surrounding said non-human organism.

[7195] Accordingly, the present invention relates to a process for the production of arginine, which comprises
[7196] (a) increasing or generating the activity of a transcriptional regulator in the cytosol of a cell of a non-human organism or a part thereof, preferably a microorganism, a plant cell, a plant or a part thereof, as compared to a corresponding non-transformed wild type non-human organism or a part thereof; and
[7197] (b) growing the non-human organism or a part thereof under conditions which permit the production of arginine or a composition comprising arginine in said non-human organism or in the culture medium surrounding said non-human organism.

[7198] Accordingly, the present invention relates to a process for the production of glutamate, which comprises
[7199] (a) increasing or generating the activity of a transcriptional regulator in the cytosol of a cell of a non-human organism or a part thereof, preferably a microorganism, a plant cell, a plant or a part thereof, as compared to a corresponding non-transformed wild type non-human organism or a part thereof; and
[7200] (b) growing the non-human organism or a part thereof under conditions which permit the production of glutamate or a composition comprising glutamate in said non-human organism or in the culture medium surrounding said non-human organism.

[7201] Accordingly, the present invention relates to a process for the production of glutamine, which comprises
[7202] (a) increasing or generating the activity of a transcriptional regulator in the cytosol of a cell of a non-human organism or a part thereof, preferably a microorganism, a plant cell, a plant or a part thereof, as compared to a corresponding non-transformed wild type non-human organism or a part thereof; and
[7203] (b) growing the non-human organism or a part thereof under conditions which permit the production of glutamine or a composition comprising glutamine in said non-human organism or in the culture medium surrounding said non-human organism.

[7204] Accordingly, the present invention relates to a process for the production of proline, which comprises
[7205] (a) increasing or generating the activity of a transcriptional regulator in the cytosol of a cell of a non-human organism or a part thereof, preferably a microorganism, a plant cell, a plant or a part thereof, as compared to a corresponding non-transformed wild type non-human organism or a part thereof; and
[7206] (b) growing the non-human organism or a part thereof under conditions which permit the production of proline or a composition comprising proline in said non-human organism or in the culture medium surrounding said non-human organism.

[7207] Accordingly, the present invention relates to a process for the production of proline, which comprises
[7208] (a) increasing or generating the activity of a At1g47380-protein in the cytosol of a cell of a non-human organism or a part thereof, preferably a microorganism, a plant cell, a plant or a part thereof, as compared to a corresponding non-transformed wild type non-human organism or a part thereof; and
[7209] (b) growing the non-human organism or a part thereof under conditions which permit the production of proline or a composition comprising proline in said non-human organism or in the culture medium surrounding said non-human organism.

[7210] Accordingly, the present invention relates to a process for the production of arginine, which comprises
[7211] (a) increasing or generating the activity of a protein kinase in the cytosol of a cell of a non-human organism or a part thereof, preferably a microorganism, a plant cell, a plant or a part thereof, as compared to a corresponding non-transformed wild type non-human organism or a part thereof; and
[7212] (b) growing the non-human organism or a part thereof under conditions which permit the production of arginine or a composition comprising arginine in said non-human organism or in the culture medium surrounding said non-human organism.

[7213] Accordingly, the present invention relates to a process for the production of glutamate, which comprises
[7214] (a) increasing or generating the activity of a protein kinase in the cytosol of a cell of a non-human organism or a part thereof, preferably a microorganism, a plant cell, a plant or a part thereof, as compared to a corresponding non-transformed wild type non-human organism or a part thereof; and
[7215] (b) growing the non-human organism or a part thereof under conditions which permit the production of glutamate or a composition comprising glutamate in said non-human organism or in the culture medium surrounding said non-human organism.

[7216] Accordingly, the present invention relates to a process for the production of proline, which comprises
[7217] (a) increasing or generating the activity of a protein kinase in the cytosol of a cell of a non-human organism or a part thereof, preferably a microorganism, a plant cell, a plant or a part thereof, as compared to a corresponding non-transformed wild type non-human organism or a part thereof; and
[7218] (b) growing the non-human organism or a part thereof under conditions which permit the production of proline or a composition comprising proline in said non-human organism or in the culture medium surrounding said non-human organism.

[7219] Accordingly, the present invention relates to a process for the production of arginine, which comprises
[7220] (a) increasing or generating the activity of a calcium-dependent protein kinase in the cytosol of a cell of a non-human organism or a part thereof, preferably a microorganism, a plant cell, a plant or a part thereof, as compared to a corresponding non-transformed wild type non-human organism or a part thereof; and
[7221] (b) growing the non-human organism or a part thereof under conditions which permit the production of arginine or a composition comprising arginine in said non-human organism or in the culture medium surrounding said non-human organism.

[7222] Accordingly, the present invention relates to a process for the production of glutamine, which comprises
[7223] (a) increasing or generating the activity of a calcium-dependent protein kinase in the cytosol of a cell of a non-human organism or a part thereof, preferably a microorganism, a plant cell, a plant or a part thereof, as compared to a corresponding non-transformed wild type non-human organism or a part thereof; and
[7224] (b) growing the non-human organism or a part thereof under conditions which permit the production of glutamine or a composition comprising glutamine in said non-human organism or in the culture medium surrounding said non-human organism.

[7225] Accordingly, the present invention relates to a process for the production of proline, which comprises
[7226] (a) increasing or generating the activity of a At1g67340-protein in the cytosol of a cell of a non-human organism or a part thereof, preferably a microorganism, a plant cell, a plant or a part thereof, as compared to a corresponding non-transformed wild type non-human organism or a part thereof; and
[7227] (b) growing the non-human organism or a part thereof under conditions which permit the production of proline or a composition comprising proline in said non-human organism or in the culture medium surrounding said non-human organism.

[7228] Accordingly, the present invention relates to a process for the production of glutamine, which comprises
[7229] (a) increasing or generating the activity of a transcription factor in the cytosol of a cell of a non-human organism or a part thereof, preferably a microorganism, a plant cell, a plant or a part thereof, as compared to a corresponding non-transformed wild type non-human organism or a part thereof; and
[7230] (b) growing the non-human organism or a part thereof under conditions which permit the production of glutamine or a composition comprising glutamine in said non-human organism or in the culture medium surrounding said non-human organism.

[7231] Accordingly, the present invention relates to a process for the production of glutamine, which comprises
[7232] (a) increasing or generating the activity of a protein phosphatase in the cytosol of a cell of a non-human organism or a part thereof, preferably a microorganism, a plant cell, a plant or a part thereof, as compared to a corresponding non-transformed wild type non-human organism or a part thereof; and
[7233] (b) growing the non-human organism or a part thereof under conditions which permit the production of glutamine or a composition comprising glutamine in said non-human organism or in the culture medium surrounding said non-human organism.

[7234] Accordingly, the present invention relates to a process for the production of proline, which comprises
[7235] (a) increasing or generating the activity of a transcription factor in the cytosol of a cell of a non-human organism or a part thereof, preferably a microorganism, a plant cell, a plant or a part thereof, as compared to a corresponding non-transformed wild type non-human organism or a part thereof; and
[7236] (b) growing the non-human organism or a part thereof under conditions which permit the production of proline or a composition comprising proline in said non-human organism or in the culture medium surrounding said non-human organism.

[7237] Accordingly, the present invention relates to a process for the production of glutamate, which comprises
[7238] (a) increasing or generating the activity of a protein phosphatase in the cytosol of a cell of a non-human organism or a part thereof, preferably a microorganism, a plant cell, a plant or a part thereof, as compared to a corresponding non-transformed wild type non-human organism or a part thereof; and
[7239] (b) growing the non-human organism or a part thereof under conditions which permit the production of glutamate or a composition comprising glutamate in said non-human organism or in the culture medium surrounding said non-human organism.

[7240] Accordingly, the present invention relates to a process for the production of glutamine, which comprises
[7241] (a) increasing or generating the activity of a protein phosphatase in the cytosol of a cell of a non-human organism or a part thereof, preferably a microorganism, a plant cell, a plant or a part thereof, as compared to a corresponding non-transformed wild type non-human organism or a part thereof; and
[7242] (b) growing the non-human organism or a part thereof under conditions which permit the production of glutamine or a composition comprising glutamine in said non-human organism or in the culture medium surrounding said non-human organism. Accordingly, the present invention relates to a process for the production of proline, which comprises
[7243] (a) increasing or generating the activity of a serine protease inhibitor in the cytosol of a cell of a non-human organism or a part thereof, preferably a microorganism, a plant cell, a plant or a part thereof, as compared to a corresponding non-transformed wild type non-human organism or a part thereof; and
[7244] (b) growing the non-human organism or a part thereof under conditions which permit the production of proline or a composition comprising proline in said non-human organism or in the culture medium surrounding said non-human organism.

[7245] Accordingly, the present invention relates to a process for the production of proline, which comprises
[7246] (a) increasing or generating the activity of a protein phosphatase in the cytosol of a cell of a non-human organism or a part thereof, preferably a microorganism, a plant cell, a plant or a part thereof, as compared to a corresponding non-transformed wild type non-human organism or a part thereof; and
[7247] (b) growing the non-human organism or a part thereof under conditions which permit the production of proline or a composition comprising proline in said non-human organism or in the culture medium surrounding said non-human organism.

[7248] Accordingly, the present invention relates to a process for the production of glutamine, which comprises
[7249] (a) increasing or generating the activity of a CBL-interacting protein kinase in the cytosol of a cell of a non-human organism or a part thereof, preferably a microorganism, a plant cell, a plant or a part thereof, as compared to a corresponding non-transformed wild type non-human organism or a part thereof; and
[7250] (b) growing the non-human organism or a part thereof under conditions which permit the production of glutamine or a composition comprising glutamine in said non-human organism or in the culture medium surrounding said non-human organism.

[7251] Accordingly, the present invention relates to a process for the production of proline, which comprises
[7252] (a) increasing or generating the activity of a CBL-interacting protein kinase in the cytosol of a cell of a non-human organism or a part thereof, preferably a microorganism, a plant cell, a plant or a part thereof, as compared to a corresponding non-transformed wild type non-human organism or a part thereof; and
[7253] (b) growing the non-human organism or a part thereof under conditions which permit the production of proline or a composition comprising proline in said non-human organism or in the culture medium surrounding said non-human organism.

[7254] Accordingly, the present invention relates to a process for the production of arginine, which comprises
[7255] (a) increasing or generating the activity of a glutaredoxin in the cytosol of a cell of a non-human organism or a part thereof, preferably a microorganism, a plant cell, a plant or a part thereof, as compared to a corresponding non-transformed wild type non-human organism or a part thereof; and
[7256] (b) growing the non-human organism or a part thereof under conditions which permit the production of arginine or a composition comprising arginine in said non-human organism or in the culture medium surrounding said non-human organism.

[7257] Accordingly, the present invention relates to a process for the production of proline, which comprises
[7258] (a) increasing or generating the activity of a glutaredoxin in the cytosol of a cell of a non-human organism or a part thereof, preferably a microorganism, a plant cell, a plant or a part thereof, as compared to a corresponding non-transformed wild type non-human organism or a part thereof; and
[7259] (b) growing the non-human organism or a part thereof under conditions which permit the production of proline or a composition comprising proline in said non-human organism or in the culture medium surrounding said non-human organism.

[7260] Accordingly, the present invention relates to a process for the production of proline, which comprises
[7261] (a) increasing or generating the activity of a CBL-interacting protein kinase in the cytosol of a cell of a non-human organism or a part thereof, preferably a microorganism, a plant cell, a plant or a part thereof, as compared to a corresponding non-transformed wild type non-human organism or a part thereof; and
[7262] (b) growing the non-human organism or a part thereof under conditions which permit the production of proline or a composition comprising proline in said non-human organism or in the culture medium surrounding said non-human organism.

[7263] Accordingly, the present invention relates to a process for the production of proline, which comprises
[7264] (a) increasing or generating the activity of a delta-1-pyrroline 5-carboxylase synthetase in the cytosol of a cell of a non-human organism or a part thereof, preferably a microorganism, a plant cell, a plant or a part thereof, as compared to a corresponding non-transformed wild type non-human organism or a part thereof; and
[7265] (b) growing the non-human organism or a part thereof under conditions which permit the production of proline or a composition comprising proline in said non-human organism or in the culture medium surrounding said non-human organism.

[7266] Accordingly, the present invention relates to a process for the production of glutamine, which comprises
[7267] (a) increasing or generating the activity of a phosphatidylinositol 3- and 4-kinase family protein in the cytosol of a cell of a non-human organism or a part thereof, preferably a microorganism, a plant cell, a plant or a part thereof, as compared to a corresponding non-transformed wild type non-human organism or a part thereof; and
[7268] (b) growing the non-human organism or a part thereof under conditions which permit the production of glutamine or a composition comprising glutamine in said non-human organism or in the culture medium surrounding said non-human organism.

[7269] Accordingly, the present invention relates to a process for the production of arginine, which comprises
[7270] (a) increasing or generating the activity of a glutaredoxin in the cytosol of a cell of a non-human organism or a part thereof, preferably a microorganism, a plant cell, a plant or a part thereof, as compared to a corresponding non-transformed wild type non-human organism or a part thereof; and
[7271] (b) growing the non-human organism or a part thereof under conditions which permit the production of arginine or a composition comprising arginine in said non-human organism or in the culture medium surrounding said non-human organism.

[7272] Accordingly, the present invention relates to a process for the production of glutamine, which comprises
[7273] (a) increasing or generating the activity of a glutaredoxin in the cytosol of a cell of a non-human organism or a part thereof, preferably a microorganism, a plant cell, a plant or a part thereof, as compared to a corresponding non-transformed wild type non-human organism or a part thereof; and
[7274] (b) growing the non-human organism or a part thereof under conditions which permit the production of glutamine or a composition comprising glutamine in said non-human organism or in the culture medium surrounding said non-human organism.

[7275] Accordingly, the present invention relates to a process for the production of proline, which comprises
[7276] (a) increasing or generating the activity of a glutaredoxin in the cytosol of a cell of a non-human organism or a part thereof, preferably a microorganism, a plant cell, a plant or a part thereof, as compared to a corresponding non-transformed wild type non-human organism or a part thereof; and
[7277] (b) growing the non-human organism or a part thereof under conditions which permit the production of proline or a composition comprising proline in said non-human organism or in the culture medium surrounding said non-human organism.

[7278] Accordingly, the present invention relates to a process for the production of glutamate, which comprises
[7279] (a) increasing or generating the activity of a pyruvate kinase in the cytosol of a cell of a non-human organism or a part thereof, preferably a microorganism, a plant cell, a plant or a part thereof, as compared to a corresponding non-transformed wild type non-human organism or a part thereof; and
[7280] (b) growing the non-human organism or a part thereof under conditions which permit the production of glutamate or a composition comprising glutamate in said non-human organism or in the culture medium surrounding said non-human organism.

[7281] Accordingly, the present invention relates to a process for the production of proline, which comprises
[7282] (a) increasing or generating the activity of a pyruvate kinase in the cytosol of a cell of a non-human organism or a part thereof, preferably a microorganism, a plant cell, a plant or a part thereof, as compared to a corresponding non-transformed wild type non-human organism or a part thereof; and
[7283] (b) growing the non-human organism or a part thereof under conditions which permit the production of proline or a composition comprising proline in said non-human organism or in the culture medium surrounding said non-human organism.

[7284] Accordingly, the present invention relates to a process for the production of proline, which comprises
[7285] (a) increasing or generating the activity of a ankyrin repeat family protein in the cytosol of a cell of a non-human organism or a part thereof, preferably a microorganism, a plant cell, a plant or a part thereof, as compared to a corresponding non-transformed wild type non-human organism or a part thereof; and
[7286] (b) growing the non-human organism or a part thereof under conditions which permit the production of proline or a composition comprising proline in said non-human organism or in the culture medium surrounding said non-human organism.

[7287] Accordingly, the present invention relates to a process for the production of glutamate, which comprises
[7288] (a) increasing or generating the activity of a protein phosphatase in the cytosol of a cell of a non-human organism or a part thereof, preferably a microorganism, a plant cell, a plant or a part thereof, as compared to a corresponding non-transformed wild type non-human organism or a part thereof; and
[7289] (b) growing the non-human organism or a part thereof under conditions which permit the production of glutamate or a composition comprising glutamate in said non-human organism or in the culture medium surrounding said non-human organism.

[7290] Accordingly, the present invention relates to a process for the production of arginine, which comprises
[7291] (a) increasing or generating the activity of a thioredoxin family protein in the cytosol of a cell of a non-human organism or a part thereof, preferably a microorganism, a plant cell, a plant or a part thereof, as compared to a corresponding non-transformed wild type non-human organism or a part thereof; and
[7292] (b) growing the non-human organism or a part thereof under conditions which permit the production of arginine or a composition comprising arginine in said non-human organism or in the culture medium surrounding said non-human organism.

[7293] Accordingly, the present invention relates to a process for the production of glutamate, which comprises
[7294] (a) increasing or generating the activity of a thioredoxin family protein in the cytosol of a cell of a non-human organism or a part thereof, preferably a microorganism, a plant cell, a plant or a part thereof, as compared to a corresponding non-transformed wild type non-human organism or a part thereof; and
[7295] (b) growing the non-human organism or a part thereof under conditions which permit the production of glutamate or a composition comprising glutamate in said non-human organism or in the culture medium surrounding said non-human organism.

[7296] Accordingly, the present invention relates to a process for the production of glutamine, which comprises
[7297] (a) increasing or generating the activity of a thioredoxin family protein in the cytosol of a cell of a non-human organism or a part thereof, preferably a microorganism, a plant cell, a plant or a part thereof, as compared to a corresponding non-transformed wild type non-human organism or a part thereof; and
[7298] (b) growing the non-human organism or a part thereof under conditions which permit the production of glutamine or a composition comprising glutamine in said non-human organism or in the culture medium surrounding said non-human organism.

[7299] Accordingly, the present invention relates to a process for the production of proline, which comprises
[7300] (a) increasing or generating the activity of a thioredoxin family protein in the cytosol of a cell of a non-human organism or a part thereof, preferably a microorganism, a plant cell, a plant or a part thereof, as compared to a corresponding non-transformed wild type non-human organism or a part thereof; and
[7301] (b) growing the non-human organism or a part thereof under conditions which permit the production of proline or a composition comprising proline in said non-human organism or in the culture medium surrounding said non-human organism.

[7302] Accordingly, the present invention relates to a process for the production of arginine, which comprises
[7303] (a) increasing or generating the activity of a harpin-induced family protein in the cytosol of a cell of a non-human organism or a part thereof, preferably a microorganism, a plant cell, a plant or a part thereof, as compared to a corresponding non-transformed wild type non-human organism or a part thereof; and
[7304] (b) growing the non-human organism or a part thereof under conditions which permit the production of arginine or a composition comprising arginine in said non-human organism or in the culture medium surrounding said non-human organism.

[7305] Accordingly, the present invention relates to a process for the production of glutamine, which comprises
[7306] (a) increasing or generating the activity of a harpin-induced family protein in the cytosol of a cell of a non-human organism or a part thereof, preferably a microorganism, a plant cell, a plant or a part thereof, as compared to a corresponding non-transformed wild type non-human organism or a part thereof; and
[7307] (b) growing the non-human organism or a part thereof under conditions which permit the production of glutamine or a composition comprising glutamine in said non-human organism or in the culture medium surrounding said non-human organism.

[7308] Accordingly, the present invention relates to a process for the production of proline, which comprises
[7309] (a) increasing or generating the activity of a harpin-induced family protein in the cytosol of a cell of a non-human organism or a part thereof, preferably a microorganism, a plant cell, a plant or a part thereof, as compared to a corresponding non-transformed wild type non-human organism or a part thereof; and
[7310] (b) growing the non-human organism or a part thereof under conditions which permit the production of proline or a composition comprising proline in said non-human organism or in the culture medium surrounding said non-human organism.

[7311] Accordingly, the present invention relates to a process for the production of proline, which comprises
[7312] (a) increasing or generating the activity of a DNA binding protein in the cytosol of a cell of a non-human organism or a part thereof, preferably a microorganism, a plant cell, a plant or a part thereof, as compared to a corresponding non-transformed wild type non-human organism or a part thereof; and
[7313] (b) growing the non-human organism or a part thereof under conditions which permit the production of proline or a composition comprising proline in said non-human organism or in the culture medium surrounding said non-human organism.

[7314] Accordingly, the present invention relates to a process for the production of proline, which comprises
[7315] (a) increasing or generating the activity of a DNA mismatch repair protein in the cytosol of a cell of a non-human organism or a part thereof, preferably a microorganism, a plant cell, a plant or a part thereof, as compared to a corresponding non-transformed wild type non-human organism or a part thereof; and
[7316] (b) growing the non-human organism or a part thereof under conditions which permit the production of proline or a composition comprising proline in said non-human organism or in the culture medium surrounding said non-human organism.

[7317] Accordingly, the present invention relates to a process for the production of proline, which comprises
[7318] (a) increasing or generating the activity of a CCAAT-binding transcription factor in the cytosol of a cell of a non-human organism or a part thereof, preferably a microorganism, a plant cell, a plant or a part thereof, as compared to a corresponding non-transformed wild type non-human organism or a part thereof; and
[7319] (b) growing the non-human organism or a part thereof under conditions which permit the production of proline or a composition comprising proline in said non-human organism or in the culture medium surrounding said non-human organism.

[7320] Accordingly, the present invention relates to a process for the production of glutamine, which comprises
[7321] (a) increasing or generating the activity of a protein kinase in the cytosol of a cell of a non-human organism or a part thereof, preferably a microorganism, a plant cell, a plant or a part thereof, as compared to a corresponding non-transformed wild type non-human organism or a part thereof; and
[7322] (b) growing the non-human organism or a part thereof under conditions which permit the production of glutamine or a composition comprising glutamine in said non-human organism or in the culture medium surrounding said non-human organism.

[7323] Accordingly, the present invention relates to a process for the production of proline, which comprises
[7324] (a) increasing or generating the activity of a glucose-6-phosphate 1-dehydrogenase in the cytosol of a cell of a non-human organism or a part thereof, preferably a microorganism, a plant cell, a plant or a part thereof, as compared to a corresponding non-transformed wild type non-human organism or a part thereof; and
[7325] (b) growing the non-human organism or a part thereof under conditions which permit the production of proline or a composition comprising proline in said non-human organism or in the culture medium surrounding said non-human organism.

[7326] Accordingly, the present invention relates to a process for the production of glutamate, which comprises
[7327] (a) increasing or generating the activity of a monthiol glutaredoxin in the cytosol of a cell of a non-human organism or a part thereof, preferably a microorganism, a plant cell, a plant or a part thereof, as compared to a corresponding non-transformed wild type non-human organism or a part thereof; and
[7328] (b) growing the non-human organism or a part thereof under conditions which permit the production of glutamate or a composition comprising glutamate in said non-human organism or in the culture medium surrounding said non-human organism.

[7329] Accordingly, the present invention relates to a process for the production of glutamine, which comprises
[7330] (a) increasing or generating the activity of a monthiol glutaredoxin in the cytosol of a cell of a non-human organism or a part thereof, preferably a microorganism, a plant cell, a plant or a part thereof, as compared to a corresponding non-transformed wild type non-human organism or a part thereof; and
[7331] (b) growing the non-human organism or a part thereof under conditions which permit the production of glutamine or a composition comprising glutamine in said non-human organism or in the culture medium surrounding said non-human organism.

[7332] Accordingly, the present invention relates to a process for the production of glutamate, which comprises
[7333] (a) increasing or generating the activity of a glutaredoxin in the cytosol of a cell of a non-human organism or a part thereof, preferably a microorganism, a plant cell, a plant or a part thereof, as compared to a corresponding non-transformed wild type non-human organism or a part thereof; and
[7334] (b) growing the non-human organism or a part thereof under conditions which permit the production of glutamate or a composition comprising glutamate in said non-human organism or in the culture medium surrounding said non-human organism.

[7335] Accordingly, the present invention relates to a process for the production of glutamine, which comprises
[7336] (a) increasing or generating the activity of a glutaredoxin in the cytosol of a cell of a non-human organism or a part thereof, preferably a microorganism, a plant cell, a plant or a part thereof, as compared to a corresponding non-transformed wild type non-human organism or a part thereof; and
[7337] (b) growing the non-human organism or a part thereof under conditions which permit the production of glutamine or a composition comprising glutamine in said non-human organism or in the culture medium surrounding said non-human organism.

[7338] Accordingly, the present invention relates to a process for the production of glutamate, which comprises
[7339] (a) increasing or generating the activity of a monothiol glutaredoxin in the cytosol of a cell of a non-human organism or a part thereof, preferably a microorganism, a plant cell, a plant or a part thereof, as compared to a corresponding non-transformed wild type non-human organism or a part thereof; and
[7340] (b) growing the non-human organism or a part thereof under conditions which permit the production of glutamate or a composition comprising glutamate in said non-human organism or in the culture medium surrounding said non-human organism.

[7341] Accordingly, the present invention relates to a process for the production of glutamine, which comprises
[7342] (a) increasing or generating the activity of a monothiol glutaredoxin in the cytosol of a cell of a non-human organism or a part thereof, preferably a microorganism, a plant cell, a plant or a part thereof, as compared to a corresponding non-transformed wild type non-human organism or a part thereof; and
[7343] (b) growing the non-human organism or a part thereof under conditions which permit the production of glutamine or a composition comprising glutamine in said non-human organism or in the culture medium surrounding said non-human organism.

[7344] Accordingly, the present invention relates to a process for the production of glutamate, which comprises
[7345] (a) increasing or generating the activity of a monothiol glutaredoxin in the cytosol of a cell of a non-human organism or a part thereof, preferably a microorganism, a plant cell, a plant or a part thereof, as compared to a corresponding non-transformed wild type non-human organism or a part thereof; and
[7346] (b) growing the non-human organism or a part thereof under conditions which permit the production of glutamate or a composition comprising glutamate in said non-human organism or in the culture medium surrounding said non-human organism.

[7347] Accordingly, the present invention relates to a process for the production of glutamate, which comprises
[7348] (a) increasing or generating the activity of a monothiol glutaredoxin in the cytosol of a cell of a non-human organism or a part thereof, preferably a microorganism, a plant cell, a plant or a part thereof, as compared to a corresponding non-transformed wild type non-human organism or a part thereof; and
[7349] (b) growing the non-human organism or a part thereof under conditions which permit the production of glutamate or a composition comprising glutamate in said non-human organism or in the culture medium surrounding said non-human organism.

[7350] Accordingly, the present invention relates to a process for the production of glutamine, which comprises
[7351] (a) increasing or generating the activity of a monothiol glutaredoxin in the cytosol of a cell of a non-human organism or a part thereof, preferably a microorganism, a plant cell, a plant or a part thereof, as compared to a corresponding non-transformed wild type non-human organism or a part thereof; and
[7352] (b) growing the non-human organism or a part thereof under conditions which permit the production of glutamine or a composition comprising glutamine in said non-human organism or in the culture medium surrounding said non-human organism.

[7353] Accordingly, the present invention relates to a process for the production of proline, which comprises
[7354] (a) increasing or generating the activity of a monothiol glutaredoxin in the cytosol of a cell of a non-human organism or a part thereof, preferably a microorganism, a plant cell, a plant or a part thereof, as compared to a corresponding non-transformed wild type non-human organism or a part thereof; and
[7355] (b) growing the non-human organism or a part thereof under conditions which permit the production of proline or a composition comprising proline in said non-human organism or in the culture medium surrounding said non-human organism.

[7356] Accordingly, the present invention relates to a process for the production of glutamine, which comprises
[7357] (a) increasing or generating the activity of a monothiol glutaredoxin in the cytosol of a cell of a non-human organism or a part thereof, preferably a microorganism, a plant cell, a plant or a part thereof, as compared to a corresponding non-transformed wild type non-human organism or a part thereof; and
[7358] (b) growing the non-human organism or a part thereof under conditions which permit the production of glutamine or a composition comprising glutamine in said non-human organism or in the culture medium surrounding said non-human organism.

[7359] Accordingly, the present invention relates to a process for the production of proline, which comprises
[7360] (a) increasing or generating the activity of a heat shock transcription factor in the cytosol of a cell of a non-human organism or a part thereof, preferably a microorganism, a plant cell, a plant or a part thereof, as compared to a corresponding non-transformed wild type non-human organism or a part thereof; and
[7361] (b) growing the non-human organism or a part thereof under conditions which permit the production of proline or a composition comprising proline in said non-human organism or in the culture medium surrounding said non-human organism.

[7362] Accordingly, the present invention relates to a process for the production of arginine, which comprises
[7363] (a) increasing or generating the activity of a At4g32480-protein in the cytosol of a cell of a non-human organism or a part thereof, preferably a microorganism, a plant cell, a plant or a part thereof, as compared to a corresponding non-transformed wild type non-human organism or a part thereof; and
[7364] (b) growing the non-human organism or a part thereof under conditions which permit the production of arginine or a composition comprising arginine in said non-human organism or in the culture medium surrounding said non-human organism.

[7365] Accordingly, the present invention relates to a process for the production of glutamine, which comprises
[7366] (a) increasing or generating the activity of a At4g32480-protein in the cytosol of a cell of a non-human organism or a part thereof, preferably a microorganism, a plant cell, a plant or a part thereof, as compared to a corresponding non-transformed wild type non-human organism or a part thereof; and
[7367] (b) growing the non-human organism or a part thereof under conditions which permit the production of glutamine or a composition comprising glutamine in said non-human organism or in the culture medium surrounding said non-human organism.

[7368] Accordingly, the present invention relates to a process for the production of proline, which comprises
[7369] (a) increasing or generating the activity of a At4g32480-protein in the cytosol of a cell of a non-human organism or a part thereof, preferably a microorganism, a plant cell, a plant or a part thereof, as compared to a corresponding non-transformed wild type non-human organism or a part thereof; and
[7370] (b) growing the non-human organism or a part thereof under conditions which permit the production of proline or a composition comprising proline in said non-human organism or in the culture medium surrounding said non-human organism.

[7371] Accordingly, the present invention relates to a process for the production of glutamate, which comprises
[7372] (a) increasing or generating the activity of a glutaredoxin in the cytosol of a cell of a non-human organism or a part thereof, preferably a microorganism, a plant cell, a plant or a part thereof, as compared to a corresponding non-transformed wild type non-human organism or a part thereof; and
[7373] (b) growing the non-human organism or a part thereof under conditions which permit the production of glutamate or a composition comprising glutamate in said non-human organism or in the culture medium surrounding said non-human organism.

[7374] Accordingly, the present invention relates to a process for the production of arginine, which comprises
[7375] (a) increasing or generating the activity of a cyclin D in the cytosol of a cell of a non-human organism or a part thereof, preferably a microorganism, a plant cell, a plant or a part thereof, as compared to a corresponding non-transformed wild type non-human organism or a part thereof; and
[7376] (b) growing the non-human organism or a part thereof under conditions which permit the production of arginine or a composition comprising arginine in said non-human organism or in the culture medium surrounding said non-human organism.

[7377] Accordingly, the present invention relates to a process for the production of glutamine, which comprises
[7378] (a) increasing or generating the activity of a cyclin D in the cytosol of a cell of a non-human organism or a part thereof, preferably a microorganism, a plant cell, a plant or a part thereof, as compared to a corresponding non-transformed wild type non-human organism or a part thereof; and
[7379] (b) growing the non-human organism or a part thereof under conditions which permit the production of glutamine or a composition comprising glutamine in said non-human organism or in the culture medium surrounding said non-human organism.

[7380] Accordingly, the present invention relates to a process for the production of proline, which comprises
[7381] (a) increasing or generating the activity of a cyclin D in the cytosol of a cell of a non-human organism or a part thereof, preferably a microorganism, a plant cell, a plant or a part thereof, as compared to a corresponding non-transformed wild type non-human organism or a part thereof; and
[7382] (b) growing the non-human organism or a part thereof under conditions which permit the production of proline or a composition comprising proline in said non-human organism or in the culture medium surrounding said non-human organism.

[7383] Accordingly, the present invention relates to a process for the production of arginine, which comprises
[7384] (a) increasing or generating the activity of a calcium-dependent protein kinase in the cytosol of a cell of a non-human organism or a part thereof, preferably a microorganism, a plant cell, a plant or a part thereof, as compared to a corresponding non-transformed wild type non-human organism or a part thereof; and
[7385] (b) growing the non-human organism or a part thereof under conditions which permit the production of arginine or a composition comprising arginine in said non-human organism or in the culture medium surrounding said non-human organism.

[7386] Accordingly, the present invention relates to a process for the production of proline, which comprises
[7387] (a) increasing or generating the activity of a calcium-dependent protein kinase in the cytosol of a cell of a non-human organism or a part thereof, preferably a microorganism, a plant cell, a plant or a part thereof, as compared to a corresponding non-transformed wild type non-human organism or a part thereof; and
[7388] (b) growing the non-human organism or a part thereof under conditions which permit the production of proline or a composition comprising proline in said non-human organism or in the culture medium surrounding said non-human organism.

[7389] Accordingly, the present invention relates to a process for the production of glutamate, which comprises
[7390] (a) increasing or generating the activity of a heat shock transcription factor in the cytosol of a cell of a non-human organism or a part thereof, preferably a microorganism, a plant cell, a plant or a part thereof, as compared to a corresponding non-transformed wild type non-human organism or a part thereof; and
[7391] (b) growing the non-human organism or a part thereof under conditions which permit the production of glutamate or a composition comprising glutamate in said non-human organism or in the culture medium surrounding said non-human organism.

[7392] Accordingly, the present invention relates to a process for the production of proline, which comprises
[7393] (a) increasing or generating the activity of a gibberellin 20-oxidase in the cytosol of a cell of a non-human organism or a part thereof, preferably a microorganism, a plant cell, a plant or a part thereof, as compared to a corresponding non-transformed wild type non-human organism or a part thereof; and
[7394] (b) growing the non-human organism or a part thereof under conditions which permit the production of proline or a composition comprising proline in said non-human organism or in the culture medium surrounding said non-human organism.

[7395] Accordingly, the present invention relates to a process for the production of glutamate, which comprises
[7396] (a) increasing or generating the activity of a integral membrane transporter family protein in the cytosol of a cell of a non-human organism or a part thereof, preferably a microorganism, a plant cell, a plant or a part thereof, as compared to a corresponding non-transformed wild type non-human organism or a part thereof; and
[7397] (b) growing the non-human organism or a part thereof under conditions which permit the production of glutamate or a composition comprising glutamate in said non-human organism or in the culture medium surrounding said non-human organism.

[7398] Accordingly, the present invention relates to a process for the production of glutamine, which comprises
[7399] (a) increasing or generating the activity of a integral membrane transporter family protein in the cytosol of a cell of a non-human organism or a part thereof, preferably a microorganism, a plant cell, a plant or a part thereof, as compared to a corresponding non-transformed wild type non-human organism or a part thereof; and
[7400] (b) growing the non-human organism or a part thereof under conditions which permit the production of glutamine or a composition comprising glutamine in said non-human organism or in the culture medium surrounding said non-human organism.

[7401] Accordingly, the present invention relates to a process for the production of arginine, which comprises
[7402] (a) increasing or generating the activity of a At5g16650-protein in the cytosol of a cell of a non-human organism or a part thereof, preferably a microorganism, a plant cell, a plant or a part thereof, as compared to a corresponding non-transformed wild type non-human organism or a part thereof; and
[7403] (b) growing the non-human organism or a part thereof under conditions which permit the production of arginine or a composition comprising arginine in said non-human organism or in the culture medium surrounding said non-human organism.

[7404] Accordingly, the present invention relates to a process for the production of glutamine, which comprises
[7405] (a) increasing or generating the activity of a At5g16650-protein in the cytosol of a cell of a non-human organism or a part thereof, preferably a microorganism, a plant cell, a plant or a part thereof, as compared to a corresponding non-transformed wild type non-human organism or a part thereof; and
[7406] (b) growing the non-human organism or a part thereof under conditions which permit the production of glutamine or a composition comprising glutamine in said non-human organism or in the culture medium surrounding said non-human organism.

[7407] Accordingly, the present invention relates to a process for the production of proline, which comprises
[7408] (a) increasing or generating the activity of a At5g16650-protein in the cytosol of a cell of a non-human organism or a part thereof, preferably a microorganism, a plant cell, a plant or a part thereof, as compared to a corresponding non-transformed wild type non-human organism or a part thereof; and
[7409] (b) growing the non-human organism or a part thereof under conditions which permit the production of proline or a composition comprising proline in said non-human organism or in the culture medium surrounding said non-human organism.

[7410] Accordingly, the present invention relates to a process for the production of glutamine, which comprises
[7411] (a) increasing or generating the activity of a monothiol glutaredoxin in the cytosol of a cell of a non-human organism or a part thereof, preferably a microorganism, a plant cell, a plant or a part thereof, as compared to a corresponding non-transformed wild type non-human organism or a part thereof; and
[7412] (b) growing the non-human organism or a part thereof under conditions which permit the production of glutamine or a composition comprising glutamine in said non-human organism or in the culture medium surrounding said non-human organism.

[7413] Accordingly, the present invention relates to a process for the production of arginine, which comprises
[7414] (a) increasing or generating the activity of a translation initiation factor subunit in the cytosol of a cell of a non-human organism or a part thereof, preferably a microorganism, a plant cell, a plant or a part thereof, as compared to a corresponding non-transformed wild type non-human organism or a part thereof; and
[7415] (b) growing the non-human organism or a part thereof under conditions which permit the production of arginine or a composition comprising arginine in said non-human organism or in the culture medium surrounding said non-human organism.

[7416] Accordingly, the present invention relates to a process for the production of glutamate, which comprises
[7417] (a) increasing or generating the activity of a transcription factor in the cytosol of a cell of a non-human organism or a part thereof, preferably a microorganism, a plant cell, a plant or a part thereof, as compared to a corresponding non-transformed wild type non-human organism or a part thereof; and
[7418] (b) growing the non-human organism or a part thereof under conditions which permit the production of glutamate or a composition comprising glutamate in said non-human organism or in the culture medium surrounding said non-human organism.

[7419] Accordingly, the present invention relates to a process for the production of proline, which comprises
[7420] (a) increasing or generating the activity of a transcription factor in the cytosol of a cell of a non-human organism or a part thereof, preferably a microorganism, a plant cell, a plant or a part thereof, as compared to a corresponding non-transformed wild type non-human organism or a part thereof; and
[7421] (b) growing the non-human organism or a part thereof under conditions which permit the production of proline or a composition comprising proline in said non-human organism or in the culture medium surrounding said non-human organism.

[7422] Accordingly, the present invention relates to a process for the production of glutamine, which comprises
[7423] (a) increasing or generating the activity of a protein phosphatase in the cytosol of a cell of a non-human organism or a part thereof, preferably a microorganism, a plant cell, a plant or a part thereof, as compared to a corresponding non-transformed wild type non-human organism or a part thereof; and
[7424] (b) growing the non-human organism or a part thereof under conditions which permit the production of glutamine or a composition comprising glutamine in said non-human organism or in the culture medium surrounding said non-human organism.

[7425] Accordingly, the present invention relates to a process for the production of glutamine, which comprises
[7426] (a) increasing or generating the activity of a protein phosphatase in the cytosol of a cell of a non-human organism or a part thereof, preferably a microorganism, a plant cell, a plant or a part thereof, as compared to a corresponding non-transformed wild type non-human organism or a part thereof; and
[7427] (b) growing the non-human organism or a part thereof under conditions which permit the production of glutamine or a composition comprising glutamine in said non-human organism or in the culture medium surrounding said non-human organism.

[7428] Accordingly, the present invention relates to a process for the production of arginine, which comprises
[7429] (a) increasing or generating the activity of a zinc finger protein in the cytosol of a cell of a non-human organism or a part thereof, preferably a microorganism, a plant cell, a plant or a part thereof, as compared to a corresponding non-transformed wild type non-human organism or a part thereof; and
[7430] (b) growing the non-human organism or a part thereof under conditions which permit the production of arginine or a composition comprising arginine in said non-human organism or in the culture medium surrounding said non-human organism.

[7431] Accordingly, the present invention relates to a process for the production of glutamine, which comprises
[7432] (a) increasing or generating the activity of a zinc finger protein in the cytosol of a cell of a non-human organism or a part thereof, preferably a microorganism, a plant cell, a plant or a part thereof, as compared to a corresponding non-transformed wild type non-human organism or a part thereof; and
[7433] (b) growing the non-human organism or a part thereof under conditions which permit the production of glutamine or a composition comprising glutamine in said non-human organism or in the culture medium surrounding said non-human organism.

[7434] Accordingly, the present invention relates to a process for the production of glutamate, which comprises
[7435] (a) increasing or generating the activity of a transcriptional regulator in the cytosol of a cell of a non-human organism or a part thereof, preferably a microorganism, a plant cell, a plant or a part thereof, as compared to a corresponding non-transformed wild type non-human organism or a part thereof; and
[7436] (b) growing the non-human organism or a part thereof under conditions which permit the production of glutamate or a composition comprising glutamate in said non-human organism or in the culture medium surrounding said non-human organism.

[7437] Accordingly, the present invention relates to a process for the production of glutamate, which comprises
[7438] (a) increasing or generating the activity of a adenylylsulfate kinase in the cytosol of a cell of a non-human organism or a part thereof, preferably a microorganism, a plant cell, a plant or a part thereof, as compared to a corresponding non-transformed wild type non-human organism or a part thereof; and
[7439] (b) growing the non-human organism or a part thereof under conditions which permit the production of glutamate or a composition comprising glutamate in said non-human organism or in the culture medium surrounding said non-human organism.

[7440] Accordingly, the present invention relates to a process for the production of glutamine, which comprises
[7441] (a) increasing or generating the activity of a adenylylsulfate kinase in the cytosol of a cell of a non-human organism or a part thereof, preferably a microorganism, a plant cell, a plant or a part thereof, as compared to a corresponding non-transformed wild type non-human organism or a part thereof; and
[7442] (b) growing the non-human organism or a part thereof under conditions which permit the production of glutamine or a composition comprising glutamine in said non-human organism or in the culture medium surrounding said non-human organism.

[7443] Accordingly, the present invention relates to a process for the production of glutamine, which comprises
[7444] (a) increasing or generating the activity of a malic enzyme in the cytosol of a cell of a non-human organism or a part thereof, preferably a microorganism, a plant cell, a plant or a part thereof, as compared to a corresponding non-transformed wild type non-human organism or a part thereof; and
[7445] (b) growing the non-human organism or a part thereof under conditions which permit the production of glutamine or a composition comprising glutamine in said non-human organism or in the culture medium surrounding said non-human organism.

[7446] Accordingly, the present invention relates to a process for the production of proline, which comprises
[7447] (a) increasing or generating the activity of a malic enzyme in the cytosol of a cell of a non-human organism or a part thereof, preferably a microorganism, a plant cell, a plant or a part thereof, as compared to a corresponding non-transformed wild type non-human organism or a part thereof; and
[7448] (b) growing the non-human organism or a part thereof under conditions which permit the production of proline or a composition comprising proline in said non-human organism or in the culture medium surrounding said non-human organism.

[7449] Accordingly, the present invention relates to a process for the production of proline, which comprises
[7450] (a) increasing or generating the activity of a glycosyl transferase in the cytosol of a cell of a non-human organism or a part thereof, preferably a microorganism, a plant cell, a plant or a part thereof, as compared to a corresponding non-transformed wild type non-human organism or a part thereof; and
[7451] (b) growing the non-human organism or a part thereof under conditions which permit the production of proline or a composition comprising proline in said non-human organism or in the culture medium surrounding said non-human organism.

[7452] Accordingly, the present invention relates to a process for the production of proline, which comprises
[7453] (a) increasing or generating the activity of a sec-independent protein translocase in the cytosol of a cell of a non-human organism or a part thereof, preferably a microorganism, a plant cell, a plant or a part thereof, as compared to a corresponding non-transformed wild type non-human organism or a part thereof; and
[7454] (b) growing the non-human organism or a part thereof under conditions which permit the production of proline or a composition comprising proline in said non-human organism or in the culture medium surrounding said non-human organism.

[7455] Accordingly, the present invention relates to a process for the production of glutamate, which comprises
[7456] (a) increasing or generating the activity of a pyruvate kinase in the cytosol of a cell of a non-human organism or a part thereof, preferably a microorganism, a plant cell, a plant or a part thereof, as compared to a corresponding non-transformed wild type non-human organism or a part thereof; and
[7457] (b) growing the non-human organism or a part thereof under conditions which permit the production of glutamate or a composition comprising glutamate in said non-human organism or in the culture medium surrounding said non-human organism.

[7458] Accordingly, the present invention relates to a process for the production of arginine, which comprises
[7459] (a) increasing or generating the activity of a beta-hydroxylase in the cytosol of a cell of a non-human organism or a part thereof, preferably a microorganism, a plant cell, a plant or a part thereof, as compared to a corresponding non-transformed wild type non-human organism or a part thereof; and
[7460] (b) growing the non-human organism or a part thereof under conditions which permit the production of arginine or a composition comprising arginine in said non-human organism or in the culture medium surrounding said non-human organism.

[7461] Accordingly, the present invention relates to a process for the production of arginine, which comprises
[7462] (a) increasing or generating the activity of a elongation factor Tu in the cytosol of a cell of a non-human organism or a part thereof, preferably a microorganism, a plant cell, a plant or a part thereof, as compared to a corresponding non-transformed wild type non-human organism or a part thereof; and
[7463] (b) growing the non-human organism or a part thereof under conditions which permit the production of arginine or a composition comprising arginine in said non-human organism or in the culture medium surrounding said non-human organism.

[7464] Accordingly, the present invention relates to a process for the production of glutamate, which comprises
[7465] (a) increasing or generating the activity of a elongation factor Tu in the cytosol of a cell of a non-human organism or a part thereof, preferably a microorganism, a plant cell, a plant or a part thereof, as compared to a corresponding non-transformed wild type non-human organism or a part thereof; and
[7466] (b) growing the non-human organism or a part thereof under conditions which permit the production of glutamate or a composition comprising glutamate in said non-human organism or in the culture medium surrounding said non-human organism.

[7467] Accordingly, the present invention relates to a process for the production of glutamine, which comprises
[7468] (a) increasing or generating the activity of a elongation factor Tu in the cytosol of a cell of a non-human organism or a part thereof, preferably a microorganism, a plant cell, a plant or a part thereof, as compared to a corresponding non-transformed wild type non-human organism or a part thereof; and
[7469] (b) growing the non-human organism or a part thereof under conditions which permit the production of glutamine or a composition comprising glutamine in said non-human organism or in the culture medium surrounding said non-human organism.

[7470] Accordingly, the present invention relates to a process for the production of glutamine, which comprises
[7471] (a) increasing or generating the activity of a ABC transporter permease protein in the cytosol of a cell of a non-human organism or a part thereof, preferably a microorganism, a plant cell, a plant or a part thereof, as compared to a corresponding non-transformed wild type non-human organism or a part thereof; and
[7472] (b) growing the non-human organism or a part thereof under conditions which permit the production of glutamine or a composition comprising glutamine in said non-human organism or in the culture medium surrounding said non-human organism.

[7473] Accordingly, the present invention relates to a process for the production of proline, which comprises
[7474] (a) increasing or generating the activity of a ABC transporter permease protein in the cytosol of a cell of a non-human organism or a part thereof, preferably a microorganism, a plant cell, a plant or a part thereof, as compared to a corresponding non-transformed wild type non-human organism or a part thereof; and
[7475] (b) growing the non-human organism or a part thereof under conditions which permit the production of proline or a composition comprising proline in said non-human organism or in the culture medium surrounding said non-human organism.

[7476] Accordingly, the present invention relates to a process for the production of arginine, which comprises
[7477] (a) increasing or generating the activity of a acyl-CoA synthase in the cytosol of a cell of a non-human organism or a part thereof, preferably a microorganism, a plant cell, a plant or a part thereof, as compared to a corresponding non-transformed wild type non-human organism or a part thereof; and
[7478] (b) growing the non-human organism or a part thereof under conditions which permit the production of arginine or a composition comprising arginine in said non-human organism or in the culture medium surrounding said non-human organism.

[7479] Accordingly, the present invention relates to a process for the production of glutamate, which comprises
[7480] (a) increasing or generating the activity of a acyl-CoA synthase in the cytosol of a cell of a non-human organism or a part thereof, preferably a microorganism, a plant cell, a plant or a part thereof, as compared to a corresponding non-transformed wild type non-human organism or a part thereof; and
[7481] (b) growing the non-human organism or a part thereof under conditions which permit the production of glutamate or a composition comprising glutamate in said non-human organism or in the culture medium surrounding said non-human organism.

[7482] Accordingly, the present invention relates to a process for the production of glutamine, which comprises
[7483] (a) increasing or generating the activity of a acyl-CoA synthase in the cytosol of a cell of a non-human organism or a part thereof, preferably a microorganism, a plant cell, a plant or a part thereof, as compared to a corresponding non-transformed wild type non-human organism or a part thereof; and
[7484] (b) growing the non-human organism or a part thereof under conditions which permit the production of glutamine or a composition comprising glutamine in said non-human organism or in the culture medium surrounding said non-human organism.

[7485] Accordingly, the present invention relates to a process for the production of proline, which comprises
[7486] (a) increasing or generating the activity of a acyl-CoA synthase in the cytosol of a cell of a non-human organism or a part thereof, preferably a microorganism, a plant cell, a plant or a part thereof, as compared to a corresponding non-transformed wild type non-human organism or a part thereof; and
[7487] (b) growing the non-human organism or a part thereof under conditions which permit the production of proline or a composition comprising proline in said non-human organism or in the culture medium surrounding said non-human organism.

[7488] Accordingly, the present invention relates to a process for the production of glutamate, which comprises
[7489] (a) increasing or generating the activity of a 2-oxoglutarate dehydrogenase E1 subunit in the cytosol of a cell of a non-human organism or a part thereof, preferably a microorganism, a plant cell, a plant or a part thereof, as compared to a corresponding non-transformed wild type non-human organism or a part thereof; and
[7490] (b) growing the non-human organism or a part thereof under conditions which permit the production of glutamate or a composition comprising glutamate in said non-human organism or in the culture medium surrounding said non-human organism.

[7491] Accordingly, the present invention relates to a process for the production of arginine, which comprises
[7492] (a) increasing or generating the activity of a enoyl-CoA hydratase in the cytosol of a cell of a non-human organism or a part thereof, preferably a microorganism, a plant cell, a plant or a part thereof, as compared to a corresponding non-transformed wild type non-human organism or a part thereof; and
[7493] (b) growing the non-human organism or a part thereof under conditions which permit the production of arginine or a composition comprising arginine in said non-human organism or in the culture medium surrounding said non-human organism.

[7494] Accordingly, the present invention relates to a process for the production of proline, which comprises
[7495] (a) increasing or generating the activity of a enoyl-CoA hydratase in the cytosol of a cell of a non-human organism or a part thereof, preferably a microorganism, a plant cell, a plant or a part thereof, as compared to a corresponding non-transformed wild type non-human organism or a part thereof; and
[7496] (b) growing the non-human organism or a part thereof under conditions which permit the production of proline or a composition comprising proline in said non-human organism or in the culture medium surrounding said non-human organism.

[7497] Accordingly, the present invention relates to a process for the production of glutamate, which comprises
[7498] (a) increasing or generating the activity of a transcriptional regulator in the cytosol of a cell of a non-human organism or a part thereof, preferably a microorganism, a plant cell, a plant or a part thereof, as compared to a corresponding non-transformed wild type non-human organism or a part thereof; and
[7499] (b) growing the non-human organism or a part thereof under conditions which permit the production of glutamate or a composition comprising glutamate in said non-human organism or in the culture medium surrounding said non-human organism.

[7500] Accordingly, the present invention relates to a process for the production of proline, which comprises
[7501] (a) increasing or generating the activity of a transcriptional regulator in the cytosol of a cell of a non-human organism or a part thereof, preferably a microorganism, a plant cell, a plant or a part thereof, as compared to a corresponding non-transformed wild type non-human organism or a part thereof; and
[7502] (b) growing the non-human organism or a part thereof under conditions which permit the production of proline or a composition comprising proline in said non-human organism or in the culture medium surrounding said non-human organism.

[7503] Accordingly, the present invention relates to a process for the production of proline, which comprises
[7504] (a) increasing or generating the activity of a acyltransferase in the cytosol of a cell of a non-human organism or a part thereof, preferably a microorganism, a plant cell, a plant or a part thereof, as compared to a corresponding non-transformed wild type non-human organism or a part thereof; and
[7505] (b) growing the non-human organism or a part thereof under conditions which permit the production of proline or a composition comprising proline in said non-human organism or in the culture medium surrounding said non-human organism.

[7506] Accordingly, the present invention relates to a process for the production of glutamate, which comprises
[7507] (a) increasing or generating the activity of a oxidoreductase in the cytosol of a cell of a non-human organism or a part thereof, preferably a microorganism, a plant cell, a plant or a part thereof, as compared to a corresponding non-transformed wild type non-human organism or a part thereof; and
[7508] (b) growing the non-human organism or a part thereof under conditions which permit the production of glutamate or a composition comprising glutamate in said non-human organism or in the culture medium surrounding said non-human organism.

[7509] Accordingly, the present invention relates to a process for the production of glutamine, which comprises
[7510] (a) increasing or generating the activity of a oxidoreductase in the cytosol of a cell of a non-human organism or a part thereof, preferably a microorganism, a plant cell, a plant or a part thereof, as compared to a corresponding non-transformed wild type non-human organism or a part thereof; and
[7511] (b) growing the non-human organism or a part thereof under conditions which permit the production of glutamine or a composition comprising glutamine in said non-human organism or in the culture medium surrounding said non-human organism.

[7512] Accordingly, the present invention relates to a process for the production of glutamine, which comprises
[7513] (a) increasing or generating the activity of a lysyl-tRNA synthetase in the cytosol of a cell of a non-human organism or a part thereof, preferably a microorganism, a plant cell, a plant or a part thereof, as compared to a corresponding non-transformed wild type non-human organism or a part thereof; and
[7514] (b) growing the non-human organism or a part thereof under conditions which permit the production of glutamine or a composition comprising glutamine in said non-human organism or in the culture medium surrounding said non-human organism.

[7515] Accordingly, the present invention relates to a process for the production of glutamate, which comprises
[7516] (a) increasing or generating the activity of a 30S ribosomal protein in the cytosol of a cell of a non-human organism or a part thereof, preferably a microorganism, a plant cell, a plant or a part thereof, as compared to a corresponding non-transformed wild type non-human organism or a part thereof; and
[7517] (b) growing the non-human organism or a part thereof under conditions which permit the production of glutamate or a composition comprising glutamate in said non-human organism or in the culture medium surrounding said non-human organism.

[7518] Accordingly, the present invention relates to a process for the production of glutamate, which comprises
[7519] (a) increasing or generating the activity of a CTP synthase in the cytosol of a cell of a non-human organism or a part thereof, preferably a microorganism, a plant cell, a plant or a part thereof, as compared to a corresponding non-transformed wild type non-human organism or a part thereof; and
[7520] (b) growing the non-human organism or a part thereof under conditions which permit the production of glutamate or a composition comprising glutamate in said non-human organism or in the culture medium surrounding said non-human organism.

[7521] Accordingly, the present invention relates to a process for the production of glutamine, which comprises
[7522] (a) increasing or generating the activity of a CTP synthase in the cytosol of a cell of a non-human organism or a part thereof, preferably a microorganism, a plant cell, a plant or a part thereof, as compared to a corresponding non-transformed wild type non-human organism or a part thereof; and
[7523] (b) growing the non-human organism or a part thereof under conditions which permit the production of glutamine or a composition comprising glutamine in said non-human organism or in the culture medium surrounding said non-human organism.

[7524] Accordingly, the present invention relates to a process for the production of glutamate, which comprises
[7525] (a) increasing or generating the activity of a glucose-1-phosphate cytidylyltransferase in the cytosol of a cell of a non-human organism or a part thereof, preferably a microorganism, a plant cell, a plant or a part thereof, as compared to a corresponding non-transformed wild type non-human organism or a part thereof; and
[7526] (b) growing the non-human organism or a part thereof under conditions which permit the production of glutamate or a composition comprising glutamate in said non-human organism or in the culture medium surrounding said non-human organism.

[7527] Accordingly, the present invention relates to a process for the production of glutamine, which comprises
[7528] (a) increasing or generating the activity of a glucose-1-phosphate cytidylyltransferase in the cytosol of a cell of a non-human organism or a part thereof, preferably a microorganism, a plant cell, a plant or a part thereof, as compared to a corresponding non-transformed wild type non-human organism or a part thereof; and
[7529] (b) growing the non-human organism or a part thereof under conditions which permit the production of glutamine or a composition comprising glutamine in said non-human organism or in the culture medium surrounding said non-human organism.

[7530] Accordingly, the present invention relates to a process for the production of proline, which comprises
[7531] (a) increasing or generating the activity of a glucose-1-phosphate cytidylyltransferase in the cytosol of a cell of a non-human organism or a part thereof, preferably a microorganism, a plant cell, a plant or a part thereof, as compared to a corresponding non-transformed wild type non-human organism or a part thereof; and
[7532] (b) growing the non-human organism or a part thereof under conditions which permit the production of proline or a composition comprising proline in said non-human organism or in the culture medium surrounding said non-human organism.

[7533] Accordingly, the present invention relates to a process for the production of arginine, which comprises
[7534] (a) increasing or generating the activity of a aminotransferase in the cytosol of a cell of a non-human organism or a part thereof, preferably a microorganism, a plant cell, a plant or a part thereof, as compared to a corresponding non-transformed wild type non-human organism or a part thereof; and
[7535] (b) growing the non-human organism or a part thereof under conditions which permit the production of arginine or a composition comprising arginine in said non-human organism or in the culture medium surrounding said non-human organism.

[7536] Accordingly, the present invention relates to a process for the production of proline, which comprises
[7537] (a) increasing or generating the activity of a hydrolase in the cytosol of a cell of a non-human organism or a part thereof, preferably a microorganism, a plant cell, a plant or a part thereof, as compared to a corresponding non-transformed wild type non-human organism or a part thereof; and
[7538] (b) growing the non-human organism or a part thereof under conditions which permit the production of proline or a composition comprising proline in said non-human organism or in the culture medium surrounding said non-human organism.

[7539] Accordingly, the present invention relates to a process for the production of arginine, which comprises
[7540] (a) increasing or generating the activity of a glutamate-ammonia-ligase in the cytosol of a cell of a non-human organism or a part thereof, preferably a microorganism, a plant cell, a plant or a part thereof, as compared to a corresponding non-transformed wild type non-human organism or a part thereof; and
[7541] (b) growing the non-human organism or a part thereof under conditions which permit the production of arginine or a composition comprising arginine in said non-human organism or in the culture medium surrounding said non-human organism.

[7542] Accordingly, the present invention relates to a process for the production of glutamine, which comprises
[7543] (a) increasing or generating the activity of a glutamate-ammonia-ligase in the cytosol of a cell of a non-human organism or a part thereof, preferably a microorganism, a plant cell, a plant or a part thereof, as compared to a corresponding non-transformed wild type non-human organism or a part thereof; and
[7544] (b) growing the non-human organism or a part thereof under conditions which permit the production of glutamine or a composition comprising glutamine in said non-human organism or in the culture medium surrounding said non-human organism.

[7545] Accordingly, the present invention relates to a process for the production of proline, which comprises
[7546] (a) increasing or generating the activity of a glutamate-ammonia-ligase in the cytosol of a cell of a non-human organism or a part thereof, preferably a microorganism, a plant cell, a plant or a part thereof, as compared to a corresponding non-transformed wild type non-human organism or a part thereof; and
[7547] (b) growing the non-human organism or a part thereof under conditions which permit the production of proline or a composition comprising proline in said non-human organism or in the culture medium surrounding said non-human organism.

[7548] Accordingly, the present invention relates to a process for the production of proline, which comprises
[7549] (a) increasing or generating the activity of a fumarylacetoacetate hydrolase in the cytosol of a cell of a non-human organism or a part thereof, preferably a microorganism, a plant cell, a plant or a part thereof, as compared to a corresponding non-transformed wild type non-human organism or a part thereof; and
[7550] (b) growing the non-human organism or a part thereof under conditions which permit the production of proline or a composition comprising proline in said non-human organism or in the culture medium surrounding said non-human organism.

[7551] Accordingly, the present invention relates to a process for the production of arginine, which comprises
[7552] (a) increasing or generating the activity of a HesB/YadR/YfhF family protein in the cytosol of a cell of a non-human organism or a part thereof, preferably a microorganism, a plant cell, a plant or a part thereof, as compared to a corresponding non-transformed wild type non-human organism or a part thereof; and
[7553] (b) growing the non-human organism or a part thereof under conditions which permit the production of arginine or a composition comprising arginine in said non-human organism or in the culture medium surrounding said non-human organism.

[7554] Accordingly, the present invention relates to a process for the production of glutamine, which comprises
[7555] (a) increasing or generating the activity of a HesB/YadR/YfhF family protein in the cytosol of a cell of a non-human organism or a part thereof, preferably a microorganism, a plant cell, a plant or a part thereof, as compared to a corresponding non-transformed wild type non-human organism or a part thereof; and
[7556] (b) growing the non-human organism or a part thereof under conditions which permit the production of glutamine or a composition comprising glutamine in said non-human organism or in the culture medium surrounding said non-human organism.

[7557] Accordingly, the present invention relates to a process for the production of proline, which comprises
[7558] (a) increasing or generating the activity of a HesB/YadR/YfhF family protein in the cytosol of a cell of a non-human organism or a part thereof, preferably a microorganism, a plant cell, a plant or a part thereof, as compared to a corresponding non-transformed wild type non-human organism or a part thereof; and
[7559] (b) growing the non-human organism or a part thereof under conditions which permit the production of proline or a composition comprising proline in said non-human organism or in the culture medium surrounding said non-human organism.

[7560] Accordingly, the present invention relates to a process for the production of proline, which comprises
[7561] (a) increasing or generating the activity of a L-aspartate oxidase in the cytosol of a cell of a non-human organism or a part thereof, preferably a microorganism, a plant cell, a plant or a part thereof, as compared to a corresponding non-transformed wild type non-human organism or a part thereof; and
[7562] (b) growing the non-human organism or a part thereof under conditions which permit the production of proline or a composition comprising proline in said non-human organism or in the culture medium surrounding said non-human organism.

[7563] Accordingly, the present invention relates to a process for the production of arginine, which comprises
[7564] (a) increasing or generating the activity of a oxidoreductase in the cytosol of a cell of a non-human organism or a part thereof, preferably a microorganism, a plant cell, a plant or a part thereof, as compared to a corresponding non-transformed wild type non-human organism or a part thereof; and
[7565] (b) growing the non-human organism or a part thereof under conditions which permit the production of arginine or a composition comprising arginine in said non-human organism or in the culture medium surrounding said non-human organism.

[7566] Accordingly, the present invention relates to a process for the production of glutamine, which comprises
[7567] (a) increasing or generating the activity of a oxidoreductase in the cytosol of a cell of a non-human organism or a part thereof, preferably a microorganism, a plant cell, a plant or a part thereof, as compared to a corresponding non-transformed wild type non-human organism or a part thereof; and
[7568] (b) growing the non-human organism or a part thereof under conditions which permit the production of glutamine or a composition comprising glutamine in said non-human organism or in the culture medium surrounding said non-human organism.

[7569] Accordingly, the present invention relates to a process for the production of proline, which comprises
[7570] (a) increasing or generating the activity of a Chaperone protein CIpB in the cytosol of a cell of a non-human organism or a part thereof, preferably a microorganism, a plant cell, a plant or a part thereof, as compared to a corresponding non-transformed wild type non-human organism or a part thereof; and
[7571] (b) growing the non-human organism or a part thereof under conditions which permit the production of proline or a composition comprising proline in said non-human organism or in the culture medium surrounding said non-human organism.

[7572] Accordingly, the present invention relates to a process for the production of arginine, which comprises
[7573] (a) increasing or generating the activity of a purine nucleoside phosphorylase in the cytosol of a cell of a non-human organism or a part thereof, preferably a microorganism, a plant cell, a plant or a part thereof, as compared to a corresponding non-transformed wild type non-human organism or a part thereof; and
[7574] (b) growing the non-human organism or a part thereof under conditions which permit the production of arginine or a composition comprising arginine in said non-human organism or in the culture medium surrounding said non-human organism.

[7575] Accordingly, the present invention relates to a process for the production of glutamine, which comprises
[7576] (a) increasing or generating the activity of a purine nucleoside phosphorylase in the cytosol of a cell of a non-human organism or a part thereof, preferably a microorganism, a plant cell, a plant or a part thereof, as compared to a corresponding non-transformed wild type non-human organism or a part thereof; and
[7577] (b) growing the non-human organism or a part thereof under conditions which permit the production of glutamine or a composition comprising glutamine in said non-human organism or in the culture medium surrounding said non-human organism.

[7578] Accordingly, the present invention relates to a process for the production of proline, which comprises
[7579] (a) increasing or generating the activity of a purine nucleoside phosphorylase in the cytosol of a cell of a non-human organism or a part thereof, preferably a microorganism, a plant cell, a plant or a part thereof, as compared to a corresponding non-transformed wild type non-human organism or a part thereof; and
[7580] (b) growing the non-human organism or a part thereof under conditions which permit the production of proline or a composition comprising proline in said non-human organism or in the culture medium surrounding said non-human organism.

[7581] Accordingly, the present invention relates to a process for the production of proline, which comprises
[7582] (a) increasing or generating the activity of a transcriptional regulator protein in the cytosol of a cell of a non-human organism or a part thereof, preferably a microorganism, a plant cell, a plant or a part thereof, as compared to a corresponding non-transformed wild type non-human organism or a part thereof; and
[7583] (b) growing the non-human organism or a part thereof under conditions which permit the production of proline or a composition comprising proline in said non-human organism or in the culture medium surrounding said non-human organism.

[7584] Accordingly, the present invention relates to a process for the production of glutamate, which comprises
[7585] (a) increasing or generating the activity of a AX653549-protein in the cytosol of a cell of a non-human organism or a part thereof, preferably a microorganism, a plant cell, a plant or a part thereof, as compared to a corresponding non-transformed wild type non-human organism or a part thereof; and
[7586] (b) growing the non-human organism or a part thereof under conditions which permit the production of glutamate or a composition comprising glutamate in said non-human organism or in the culture medium surrounding said non-human organism.

[7587] Accordingly, the present invention relates to a process for the production of glutamine, which comprises
[7588] (a) increasing or generating the activity of a AX653549-protein in the cytosol of a cell of a non-human organism or a part thereof, preferably a microorganism, a plant cell, a plant or a part thereof, as compared to a corresponding non-transformed wild type non-human organism or a part thereof; and
[7589] (b) growing the non-human organism or a part thereof under conditions which permit the production of glutamine or a composition comprising glutamine in said non-human organism or in the culture medium surrounding said non-human organism.

[7590] Accordingly, the present invention relates to a process for the production of glutamine, which comprises
[7591] (a) increasing or generating the activity of a AY087308-protein in the cytosol of a cell of a non-human organism or a part thereof, preferably a microorganism, a plant cell, a plant or a part thereof, as compared to a corresponding non-transformed wild type non-human organism or a part thereof; and
[7592] (b) growing the non-human organism or a part thereof under conditions which permit the production of glutamine or a composition comprising glutamine in said non-human organism or in the culture medium surrounding said non-human organism.

[7593] Accordingly, the present invention relates to a process for the production of arginine, which comprises
[7594] (a) increasing or generating the activity of a threonine synthase in the cytosol of a cell of a non-human organism or a part thereof, preferably a microorganism, a plant cell, a plant or a part thereof, as compared to a corresponding non-transformed wild type non-human organism or a part thereof; and
[7595] (b) growing the non-human organism or a part thereof under conditions which permit the production of arginine or a composition comprising arginine in said non-human organism or in the culture medium surrounding said non-human organism.

[7596] Accordingly, the present invention relates to a process for the production of glutamine, which comprises
[7597] (a) increasing or generating the activity of a threonine synthase in the cytosol of a cell of a non-human organism or a part thereof, preferably a microorganism, a plant cell, a plant or a part thereof, as compared to a corresponding non-transformed wild type non-human organism or a part thereof; and
[7598] (b) growing the non-human organism or a part thereof under conditions which permit the production of glutamine or a composition comprising glutamine in said non-human organism or in the culture medium surrounding said non-human organism.

[7599] Accordingly, the present invention relates to a process for the production of proline, which comprises
[7600] (a) increasing or generating the activity of a threonine synthase in the cytosol of a cell of a non-human organism or a part thereof, preferably a microorganism, a plant cell, a plant or a part thereof, as compared to a corresponding non-transformed wild type non-human organism or a part thereof; and
[7601] (b) growing the non-human organism or a part thereof under conditions which permit the production of proline or a composition comprising proline in said non-human organism or in the culture medium surrounding said non-human organism.

[7602] Accordingly, the present invention relates to a process for the production of proline, which comprises
[7603] (a) increasing or generating the activity of a L-ribulose-5-phosphate 4-epimerase in the cytosol of a cell of a non-human organism or a part thereof, preferably a microorganism, a plant cell, a plant or a part thereof, as compared to a corresponding non-transformed wild type non-human organism or a part thereof; and
[7604] (b) growing the non-human organism or a part thereof under conditions which permit the production of proline or a composition comprising proline in said non-human organism or in the culture medium surrounding said non-human organism.

[7605] Accordingly, the present invention relates to a process for the production of glutamine, which comprises
[7606] (a) increasing or generating the activity of a dihydrolipoamide acetyltransferase in the cytosol of a cell of a non-human organism or a part thereof, preferably a microorganism, a plant cell, a plant or a part thereof, as compared to a corresponding non-transformed wild type non-human organism or a part thereof; and
[7607] (b) growing the non-human organism or a part thereof under conditions which permit the production of glutamine or a composition comprising glutamine in said non-human organism or in the culture medium surrounding said non-human organism.

[7608] Accordingly, the present invention relates to a process for the production of arginine, which comprises
[7609] (a) increasing or generating the activity of a glucose dehydrogenase in the cytosol of a cell of a non-human organism or a part thereof, preferably a microorganism, a plant cell, a plant or a part thereof, as compared to a corresponding non-transformed wild type non-human organism or a part thereof; and
[7610] (b) growing the non-human organism or a part thereof under conditions which permit the production of arginine or a composition comprising arginine in said non-human organism or in the culture medium surrounding said non-human organism.

[7611] Accordingly, the present invention relates to a process for the production of proline, which comprises
[7612] (a) increasing or generating the activity of a glucose dehydrogenase in the cytosol of a cell of a non-human organism or a part thereof, preferably a microorganism, a plant cell, a plant or a part thereof, as compared to a corresponding non-transformed wild type non-human organism or a part thereof; and
[7613] (b) growing the non-human organism or a part thereof under conditions which permit the production of proline or a composition comprising proline in said non-human organism or in the culture medium surrounding said non-human organism.

[7614] Accordingly, the present invention relates to a process for the production of proline, which comprises
[7615] (a) increasing or generating the activity of a glucose dehydrogenase in the cytosol of a cell of a non-human organism or a part thereof, preferably a microorganism, a plant cell, a plant or a part thereof, as compared to a corresponding non-transformed wild type non-human organism or a part thereof; and
[7616] (b) growing the non-human organism or a part thereof under conditions which permit the production of proline or a composition comprising proline in said non-human organism or in the culture medium surrounding said non-human organism.

[7617] Accordingly, the present invention relates to a process for the production of proline, which comprises
[7618] (a) increasing or generating the activity of a serine protease in the cytosol of a cell of a non-human organism or a part thereof, preferably a microorganism, a plant cell, a plant or a part thereof, as compared to a corresponding non-transformed wild type non-human organism or a part thereof; and
[7619] (b) growing the non-human organism or a part thereof under conditions which permit the production of proline or a composition comprising proline in said non-human organism or in the culture medium surrounding said non-human organism.

[7620] Accordingly, the present invention relates to a process for the production of arginine, which comprises
[7621] (a) increasing or generating the activity of a acyl-CoA dehydrogenase in the cytosol of a cell of a non-human organism or a part thereof, preferably a microorganism, a plant cell, a plant or a part thereof, as compared to a corresponding non-transformed wild type non-human organism or a part thereof; and
[7622] (b) growing the non-human organism or a part thereof under conditions which permit the production of arginine or a composition comprising arginine in said non-human organism or in the culture medium surrounding said non-human organism.

[7623] Accordingly, the present invention relates to a process for the production of glutamate, which comprises
[7624] (a) increasing or generating the activity of a acyl-CoA dehydrogenase in the cytosol of a cell of a non-human organism or a part thereof, preferably a microorganism, a plant cell, a plant or a part thereof, as compared to a corresponding non-transformed wild type non-human organism or a part thereof; and
[7625] (b) growing the non-human organism or a part thereof under conditions which permit the production of glutamate or a composition comprising glutamate in said non-human organism or in the culture medium surrounding said non-human organism.

[7626] Accordingly, the present invention relates to a process for the production of proline, which comprises
[7627] (a) increasing or generating the activity of a beta-galactosidase in the cytosol of a cell of a non-human organism or a part thereof, preferably a microorganism, a plant cell, a plant or a part thereof, as compared to a corresponding non-transformed wild type non-human organism or a part thereof; and
[7628] (b) growing the non-human organism or a part thereof under conditions which permit the production of proline or a composition comprising proline in said non-human organism or in the culture medium surrounding said non-human organism.

[7629] Accordingly, the present invention relates to a process for the production of glutamine, which comprises
[7630] (a) increasing or generating the activity of a ATP-binding component of a transport system in the cytosol of a cell of a non-human organism or a part thereof, preferably a microorganism, a plant cell, a plant or a part thereof, as compared to a corresponding non-transformed wild type non-human organism or a part thereof; and
[7631] (b) growing the non-human organism or a part thereof under conditions which permit the production of glutamine or a composition comprising glutamine in said non-human organism or in the culture medium surrounding said non-human organism.

[7632] Accordingly, the present invention relates to a process for the production of proline, which comprises
[7633] (a) increasing or generating the activity of a b0456-protein in the cytosol of a cell of a non-human organism or a part thereof, preferably a microorganism, a plant cell, a plant or a part thereof, as compared to a corresponding non-transformed wild type non-human organism or a part thereof; and
[7634] (b) growing the non-human organism or a part thereof under conditions which permit the production of proline or a composition comprising proline in said non-human organism or in the culture medium surrounding said non-human organism.

[7635] Accordingly, the present invention relates to a process for the production of arginine, which comprises
[7636] (a) increasing or generating the activity of a membrane transport protein in the cytosol of a cell of a non-human organism or a part thereof, preferably a microorganism, a plant cell, a plant or a part thereof, as compared to a corresponding non-transformed wild type non-human organism or a part thereof; and
[7637] (b) growing the non-human organism or a part thereof under conditions which permit the production of arginine or a composition comprising arginine in said non-human organism or in the culture medium surrounding said non-human organism.

[7638] Accordingly, the present invention relates to a process for the production of glutamate, which comprises
[7639] (a) increasing or generating the activity of a membrane transport protein in the cytosol of a cell of a non-human organism or a part thereof, preferably a microorganism, a plant cell, a plant or a part thereof, as compared to a corresponding non-transformed wild type non-human organism or a part thereof; and
[7640] (b) growing the non-human organism or a part thereof under conditions which permit the production of glutamate or a composition comprising glutamate in said non-human organism or in the culture medium surrounding said non-human organism.

[7641] Accordingly, the present invention relates to a process for the production of glutamine, which comprises
[7642] (a) increasing or generating the activity of a b0518-protein in the cytosol of a cell of a non-human organism or a part thereof, preferably a microorganism, a plant cell, a plant or a part thereof, as compared to a corresponding non-transformed wild type non-human organism or a part thereof; and
[7643] (b) growing the non-human organism or a part thereof under conditions which permit the production of glutamine or a composition comprising glutamine in said non-human organism or in the culture medium surrounding said non-human organism.

[7644] Accordingly, the present invention relates to a process for the production of arginine, which comprises
[7645] (a) increasing or generating the activity of a isochorismate synthase in the cytosol of a cell of a non-human organism or a part thereof, preferably a microorganism, a plant cell, a plant or a part thereof, as compared to a corresponding non-transformed wild type non-human organism or a part thereof; and
[7646] (b) growing the non-human organism or a part thereof under conditions which permit the production of arginine or a composition comprising arginine in said non-human organism or in the culture medium surrounding said non-human organism.

[7647] Accordingly, the present invention relates to a process for the production of glutamate, which comprises
[7648] (a) increasing or generating the activity of a isochorismate synthase in the cytosol of a cell of a non-human organism or a part thereof, preferably a microorganism, a plant cell, a plant or a part thereof, as compared to a corresponding non-transformed wild type non-human organism or a part thereof; and
[7649] (b) growing the non-human organism or a part thereof under conditions which permit the production of glutamate or a composition comprising glutamate in said non-human organism or in the culture medium surrounding said non-human organism.

[7650] Accordingly, the present invention relates to a process for the production of glutamine, which comprises
[7651] (a) increasing or generating the activity of a isochorismate synthase in the cytosol of a cell of a non-human organism or a part thereof, preferably a microorganism, a plant cell, a plant or a part thereof, as compared to a corresponding non-transformed wild type non-human organism or a part thereof; and
[7652] (b) growing the non-human organism or a part thereof under conditions which permit the production of glutamine or a composition comprising glutamine in said non-human organism or in the culture medium surrounding said non-human organism.

[7653] Accordingly, the present invention relates to a process for the production of proline, which comprises
[7654] (a) increasing or generating the activity of a isochorismate synthase in the cytosol of a cell of a non-human organism or a part thereof, preferably a microorganism, a plant cell, a plant or a part thereof, as compared to a corresponding non-transformed wild type non-human organism or a part thereof; and
[7655] (b) growing the non-human organism or a part thereof under conditions which permit the production of proline or a composition comprising proline in said non-human organism or in the culture medium surrounding said non-human organism.

[7656] Accordingly, the present invention relates to a process for the production of glutamine, which comprises
[7657] (a) increasing or generating the activity of a zinc transporter in the cytosol of a cell of a non-human organism or a part thereof, preferably a microorganism, a plant cell, a plant or a part thereof, as compared to a corresponding non-transformed wild type non-human organism or a part thereof; and
[7658] (b) growing the non-human organism or a part thereof under conditions which permit the production of glutamine or a composition comprising glutamine in said non-human organism or in the culture medium surrounding said non-human organism.

[7659] Accordingly, the present invention relates to a process for the production of glutamine, which comprises
[7660] (a) increasing or generating the activity of a asparaginase in the cytosol of a cell of a non-human organism or a part thereof, preferably a microorganism, a plant cell, a plant or a part thereof, as compared to a corresponding non-transformed wild type non-human organism or a part thereof; and
[7661] (b) growing the non-human organism or a part thereof under conditions which permit the production of glutamine or a composition comprising glutamine in said non-human organism or in the culture medium surrounding said non-human organism.

[7662] Accordingly, the present invention relates to a process for the production of glutamine, which comprises
[7663] (a) increasing or generating the activity of a Leucyl/phenylalanyl-tRNA-protein transferase in the cytosol of a cell of a non-human organism or a part thereof, preferably a microorganism, a plant cell, a plant or a part thereof, as compared to a corresponding non-transformed wild type non-human organism or a part thereof; and
[7664] (b) growing the non-human organism or a part thereof under conditions which permit the production of glutamine or a composition comprising glutamine in said non-human organism or in the culture medium surrounding said non-human organism.

[7665] Accordingly, the present invention relates to a process for the production of proline, which comprises
[7666] (a) increasing or generating the activity of a Leucyl/phenylalanyl-tRNA-protein transferase in the cytosol of a cell of a non-human organism or a part thereof, preferably a microorganism, a plant cell, a plant or a part thereof, as compared to a corresponding non-transformed wild type non-human organism or a part thereof; and
[7667] (b) growing the non-human organism or a part thereof under conditions which permit the production of proline or a composition comprising proline in said non-human organism or in the culture medium surrounding said non-human organism.

[7668] Accordingly, the present invention relates to a process for the production of glutamate, which comprises
[7669] (a) increasing or generating the activity of a major facilitator superfamily transporter protein in the cytosol of a cell of a non-human organism or a part thereof, preferably a microorganism, a plant cell, a plant or a part thereof, as compared to a corresponding non-transformed wild type non-human organism or a part thereof; and
[7670] (b) growing the non-human organism or a part thereof under conditions which permit the production of glutamate or a composition comprising glutamate in said non-human organism or in the culture medium surrounding said non-human organism.

[7671] Accordingly, the present invention relates to a process for the production of proline, which comprises
[7672] (a) increasing or generating the activity of a major facilitator superfamily transporter protein in the cytosol of a cell of a non-human organism or a part thereof, preferably a microorganism, a plant cell, a plant or a part thereof, as compared to a corresponding non-transformed wild type non-human organism or a part thereof; and
[7673] (b) growing the non-human organism or a part thereof under conditions which permit the production of proline or a composition comprising proline in said non-human organism or in the culture medium surrounding said non-human organism.

[7674] Accordingly, the present invention relates to a process for the production of proline, which comprises
[7675] (a) increasing or generating the activity of a DNA helicase IV in the cytosol of a cell of a non-human organism or a part thereof, preferably a microorganism, a plant cell, a plant or a part thereof, as compared to a corresponding non-transformed wild type non-human organism or a part thereof; and
[7676] (b) growing the non-human organism or a part thereof under conditions which permit the production of proline or a composition comprising proline in said non-human organism or in the culture medium surrounding said non-human organism.

[7677] Accordingly, the present invention relates to a process for the production of proline, which comprises
[7678] (a) increasing or generating the activity of a methylglyoxal synthase in the cytosol of a cell of a non-human organism or a part thereof, preferably a microorganism, a plant cell, a plant or a part thereof, as compared to a corresponding non-transformed wild type non-human organism or a part thereof; and
[7679] (b) growing the non-human organism or a part thereof under conditions which permit the production of proline or a composition comprising proline in said non-human organism or in the culture medium surrounding said non-human organism.

[7680] Accordingly, the present invention relates to a process for the production of proline, which comprises
[7681] (a) increasing or generating the activity of a phosphoanhydride phosphorylase in the cytosol of a cell of a non-human organism or a part thereof, preferably a microorganism, a plant cell, a plant or a part thereof, as compared to a corresponding non-transformed wild type non-human organism or a part thereof; and
[7682] (b) growing the non-human organism or a part thereof under conditions which permit the production of proline or a composition comprising proline in said non-human organism or in the culture medium surrounding said non-human organism.

[7683] Accordingly, the present invention relates to a process for the production of glutamine, which comprises
[7684] (a) increasing or generating the activity of a b1003-protein in the cytosol of a cell of a non-human organism or a part thereof, preferably a microorganism, a plant cell, a plant or a part thereof, as compared to a corresponding non-transformed wild type non-human organism or a part thereof; and
[7685] (b) growing the non-human organism or a part thereof under conditions which permit the production of glutamine or a composition comprising glutamine in said non-human organism or in the culture medium surrounding said non-human organism.

[7686] Accordingly, the present invention relates to a process for the production of proline, which comprises
[7687] (a) increasing or generating the activity of a b1003-protein in the cytosol of a cell of a non-human organism or a part thereof, preferably a microorganism, a plant cell, a plant or a part thereof, as compared to a corresponding non-transformed wild type non-human organism or a part thereof; and
[7688] (b) growing the non-human organism or a part thereof under conditions which permit the production of proline or a composition comprising proline in said non-human organism or in the culture medium surrounding said non-human organism.

[7689] Accordingly, the present invention relates to a process for the production of arginine, which comprises
[7690] (a) increasing or generating the activity of a lipoprotein precursor in the cytosol of a cell of a non-human organism or a part thereof, preferably a microorganism, a plant cell, a plant or a part thereof, as compared to a corresponding non-transformed wild type non-human organism or a part thereof; and
[7691] (b) growing the non-human organism or a part thereof under conditions which permit the production of arginine or a composition comprising arginine in said non-human organism or in the culture medium surrounding said non-human organism.

[7692] Accordingly, the present invention relates to a process for the production of glutamate, which comprises
[7693] (a) increasing or generating the activity of a b1024-protein in the cytosol of a cell of a non-human organism or a part thereof, preferably a microorganism, a plant cell, a plant or a part thereof, as compared to a corresponding non-transformed wild type non-human organism or a part thereof; and
[7694] (b) growing the non-human organism or a part thereof under conditions which permit the production of glutamate or a composition comprising glutamate in said non-human organism or in the culture medium surrounding said non-human organism.

[7695] Accordingly, the present invention relates to a process for the production of glutamine, which comprises
[7696] (a) increasing or generating the activity of a b1108-protein in the cytosol of a cell of a non-human organism or a part thereof, preferably a microorganism, a plant cell, a plant or a part thereof, as compared to a corresponding non-transformed wild type non-human organism or a part thereof; and
[7697] (b) growing the non-human organism or a part thereof under conditions which permit the production of glutamine or a composition comprising glutamine in said non-human organism or in the culture medium surrounding said non-human organism.

[7698] Accordingly, the present invention relates to a process for the production of proline, which comprises
[7699] (a) increasing or generating the activity of a b1108-protein in the cytosol of a cell of a non-human organism or a part thereof, preferably a microorganism, a plant cell, a plant or a part thereof, as compared to a corresponding non-transformed wild type non-human organism or a part thereof; and
[7700] (b) growing the non-human organism or a part thereof under conditions which permit the production of proline or a composition comprising proline in said non-human organism or in the culture medium surrounding said non-human organism.

[7701] Accordingly, the present invention relates to a process for the production of proline, which comprises
[7702] (a) increasing or generating the activity of a isocitrate dehydrogenase in the cytosol of a cell of a non-human organism or a part thereof, preferably a microorganism, a plant cell, a plant or a part thereof, as compared to a corresponding non-transformed wild type non-human organism or a part thereof; and
[7703] (b) growing the non-human organism or a part thereof under conditions which permit the production of proline or a composition comprising proline in said non-human organism or in the culture medium surrounding said non-human organism.

[7704] Accordingly, the present invention relates to a process for the production of arginine, which comprises
[7705] (a) increasing or generating the activity of a b1137-protein in the cytosol of a cell of a non-human organism or a part thereof, preferably a microorganism, a plant cell, a plant or a part thereof, as compared to a corresponding non-transformed wild type non-human organism or a part thereof; and
[7706] (b) growing the non-human organism or a part thereof under conditions which permit the production of arginine or a composition comprising arginine in said non-human organism or in the culture medium surrounding said non-human organism.

[7707] Accordingly, the present invention relates to a process for the production of glutamate, which comprises
[7708] (a) increasing or generating the activity of a b1137-protein in the cytosol of a cell of a non-human organism or a part thereof, preferably a microorganism, a plant cell, a plant or a part thereof, as compared to a corresponding non-transformed wild type non-human organism or a part thereof; and
[7709] (b) growing the non-human organism or a part thereof under conditions which permit the production of glutamate or a composition comprising glutamate in said non-human organism or in the culture medium surrounding said non-human organism.

[7710] Accordingly, the present invention relates to a process for the production of proline, which comprises
[7711] (a) increasing or generating the activity of a b1137-protein in the cytosol of a cell of a non-human organism or a part thereof, preferably a microorganism, a plant cell, a plant or a part thereof, as compared to a corresponding non-transformed wild type non-human organism or a part thereof; and
[7712] (b) growing the non-human organism or a part thereof under conditions which permit the production of proline or a composition comprising proline in said non-human organism or in the culture medium surrounding said non-human organism.

[7713] Accordingly, the present invention relates to a process for the production of glutamine, which comprises
[7714] (a) increasing or generating the activity of a b1163-protein in the cytosol of a cell of a non-human organism or a part thereof, preferably a microorganism, a plant cell, a plant or a part thereof, as compared to a corresponding non-transformed wild type non-human organism or a part thereof; and
[7715] (b) growing the non-human organism or a part thereof under conditions which permit the production of glutamine or a composition comprising glutamine in said non-human organism or in the culture medium surrounding said non-human organism.

[7716] Accordingly, the present invention relates to a process for the production of proline, which comprises
[7717] (a) increasing or generating the activity of a sodium/proton antiporter in the cytosol of a cell of a non-human organism or a part thereof, preferably a microorganism, a plant cell, a plant or a part thereof, as compared to a corresponding non-transformed wild type non-human organism or a part thereof; and
[7718] (b) growing the non-human organism or a part thereof under conditions which permit the production of proline or a composition comprising proline in said non-human organism or in the culture medium surrounding said non-human organism.

[7719] Accordingly, the present invention relates to a process for the production of glutamine, which comprises
[7720] (a) increasing or generating the activity of a membrane protein in the cytosol of a cell of a non-human organism or a part thereof, preferably a microorganism, a plant cell, a plant or a part thereof, as compared to a corresponding non-transformed wild type non-human organism or a part thereof; and
[7721] (b) growing the non-human organism or a part thereof under conditions which permit the production of glutamine or a composition comprising glutamine in said non-human organism or in the culture medium surrounding said non-human organism.

[7722] Accordingly, the present invention relates to a process for the production of proline, which comprises
[7723] (a) increasing or generating the activity of a membrane protein in the cytosol of a cell of a non-human organism or a part thereof, preferably a microorganism, a plant cell, a plant or a part thereof, as compared to a corresponding non-transformed wild type non-human organism or a part thereof; and
[7724] (b) growing the non-human organism or a part thereof under conditions which permit the production of proline or a composition comprising proline in said non-human organism or in the culture medium surrounding said non-human organism.

[7725] Accordingly, the present invention relates to a process for the production of arginine, which comprises
[7726] (a) increasing or generating the activity of a b1259-protein in the cytosol of a cell of a non-human organism or a part thereof, preferably a microorganism, a plant cell, a plant or a part thereof, as compared to a corresponding non-transformed wild type non-human organism or a part thereof; and
[7727] (b) growing the non-human organism or a part thereof under conditions which permit the production of arginine or a composition comprising arginine in said non-human organism or in the culture medium surrounding said non-human organism.

[7728] Accordingly, the present invention relates to a process for the production of glutamine, which comprises
[7729] (a) increasing or generating the activity of a b1259-protein in the cytosol of a cell of a non-human organism or a part thereof, preferably a microorganism, a plant cell, a plant or a part thereof, as compared to a corresponding non-transformed wild type non-human organism or a part thereof; and
[7730] (b) growing the non-human organism or a part thereof under conditions which permit the production of glutamine or a composition comprising glutamine in said non-human organism or in the culture medium surrounding said non-human organism.

[7731] Accordingly, the present invention relates to a process for the production of glutamine, which comprises
[7732] (a) increasing or generating the activity of a anthranilate synthase component II in the cytosol of a cell of a non-human organism or a part thereof, preferably a microorganism, a plant cell, a plant or a part thereof, as compared to a corresponding non-transformed wild type non-human organism or a part thereof; and
[7733] (b) growing the non-human organism or a part thereof under conditions which permit the production of glutamine or a composition comprising glutamine in said non-human organism or in the culture medium surrounding said non-human organism.

[7734] Accordingly, the present invention relates to a process for the production of glutamine, which comprises
[7735] (a) increasing or generating the activity of a b1280-protein in the cytosol of a cell of a non-human organism or a part thereof, preferably a microorganism, a plant cell, a plant or a part thereof, as compared to a corresponding non-transformed wild type non-human organism or a part thereof; and
[7736] (b) growing the non-human organism or a part thereof under conditions which permit the production of glutamine or a composition comprising glutamine in said non-human organism or in the culture medium surrounding said non-human organism.

[7737] Accordingly, the present invention relates to a process for the production of glutamine, which comprises
[7738] (a) increasing or generating the activity of a glutamine synthetase in the cytosol of a cell of a non-human organism or a part thereof, preferably a microorganism, a plant cell, a plant or a part thereof, as compared to a corresponding non-transformed wild type non-human organism or a part thereof; and
[7739] (b) growing the non-human organism or a part thereof under conditions which permit the production of glutamine or a composition comprising glutamine in said non-human organism or in the culture medium surrounding said non-human organism.

[7740] Accordingly, the present invention relates to a process for the production of glutamate, which comprises
[7741] (a) increasing or generating the activity of a aldehyde dehydrogenase in the cytosol of a cell of a non-human organism or a part thereof, preferably a microorganism, a plant cell, a plant or a part thereof, as compared to a corresponding non-transformed wild type non-human organism or a part thereof; and
[7742] (b) growing the non-human organism or a part thereof under conditions which permit the production of glutamate or a composition comprising glutamate in said non-human organism or in the culture medium surrounding said non-human organism.

[7743] Accordingly, the present invention relates to a process for the production of glutamate, which comprises
[7744] (a) increasing or generating the activity of a b1330-protein in the cytosol of a cell of a non-human organism or a part thereof, preferably a microorganism, a plant cell, a plant or a part thereof, as compared to a corresponding non-transformed wild type non-human organism or a part thereof; and
[7745] (b) growing the non-human organism or a part thereof under conditions which permit the production of glutamate or a composition comprising glutamate in said non-human organism or in the culture medium surrounding said non-human organism.

[7746] Accordingly, the present invention relates to a process for the production of glutamine, which comprises
[7747] (a) increasing or generating the activity of a b1330-protein in the cytosol of a cell of a non-human organism or a part thereof, preferably a microorganism, a plant cell, a plant or a part thereof, as compared to a corresponding non-transformed wild type non-human organism or a part thereof; and
[7748] (b) growing the non-human organism or a part thereof under conditions which permit the production of glutamine or a composition comprising glutamine in said non-human organism or in the culture medium surrounding said non-human organism.

[7749] Accordingly, the present invention relates to a process for the production of glutamate, which comprises
[7750] (a) increasing or generating the activity of a lipoprotein precursor in the cytosol of a cell of a non-human organism or a part thereof, preferably a microorganism, a plant cell, a plant or a part thereof, as compared to a corresponding non-transformed wild type non-human organism or a part thereof; and
[7751] (b) growing the non-human organism or a part thereof under conditions which permit the production of glutamate or a composition comprising glutamate in said non-human organism or in the culture medium surrounding said non-human organism.

[7752] Accordingly, the present invention relates to a process for the production of glutamine, which comprises
[7753] (a) increasing or generating the activity of a lipoprotein precursor in the cytosol of a cell of a non-human organism or a part thereof, preferably a microorganism, a plant cell, a plant or a part thereof, as compared to a corresponding non-transformed wild type non-human organism or a part thereof; and
[7754] (b) growing the non-human organism or a part thereof under conditions which permit the production of glutamine or a composition comprising glutamine in said non-human organism or in the culture medium surrounding said non-human organism.

[7755] Accordingly, the present invention relates to a process for the production of glutamate, which comprises
[7756] (a) increasing or generating the activity of a b1445-protein in the cytosol of a cell of a non-human organism or a part thereof, preferably a microorganism, a plant cell, a plant or a part thereof, as compared to a corresponding non-transformed wild type non-human organism or a part thereof; and
[7757] (b) growing the non-human organism or a part thereof under conditions which permit the production of glutamate or a composition comprising glutamate in said non-human organism or in the culture medium surrounding said non-human organism.

[7758] Accordingly, the present invention relates to a process for the production of glutamine, which comprises
[7759] (a) increasing or generating the activity of a b1445-protein in the cytosol of a cell of a non-human organism or a part thereof, preferably a microorganism, a plant cell, a plant or a part thereof, as compared to a corresponding non-transformed wild type non-human organism or a part thereof; and
[7760] (b) growing the non-human organism or a part thereof under conditions which permit the production of glutamine or a composition comprising glutamine in said non-human organism or in the culture medium surrounding said non-human organism.

[7761] Accordingly, the present invention relates to a process for the production of glutamate, which comprises
[7762] (a) increasing or generating the activity of a b1522-protein in the cytosol of a cell of a non-human organism or a part thereof, preferably a microorganism, a plant cell, a plant or a part thereof, as compared to a corresponding non-transformed wild type non-human organism or a part thereof; and
[7763] (b) growing the non-human organism or a part thereof under conditions which permit the production of glutamate or a composition comprising glutamate in said non-human organism or in the culture medium surrounding said non-human organism.

[7764] Accordingly, the present invention relates to a process for the production of glutamine, which comprises
[7765] (a) increasing or generating the activity of a acid shock protein in the cytosol of a cell of a non-human organism or a part thereof, preferably a microorganism, a plant cell, a plant or a part thereof, as compared to a corresponding non-transformed wild type non-human organism or a part thereof; and
[7766] (b) growing the non-human organism or a part thereof under conditions which permit the production of glutamine or a composition comprising glutamine in said non-human organism or in the culture medium surrounding said non-human organism.

[7767] Accordingly, the present invention relates to a process for the production of glutamine, which comprises
[7768] (a) increasing or generating the activity of a electron transport complex protein in the cytosol of a cell of a non-human organism or a part thereof, preferably a microorganism, a plant cell, a plant or a part thereof, as compared to a corresponding non-transformed wild type non-human organism or a part thereof; and
[7769] (b) growing the non-human organism or a part thereof under conditions which permit the production of glutamine or a composition comprising glutamine in said non-human organism or in the culture medium surrounding said non-human organism.

[7770] Accordingly, the present invention relates to a process for the production of glutamate, which comprises
[7771] (a) increasing or generating the activity of a protease in the cytosol of a cell of a non-human organism or a part thereof, preferably a microorganism, a plant cell, a plant or a part thereof, as compared to a corresponding non-transformed wild type non-human organism or a part thereof; and
[7772] (b) growing the non-human organism or a part thereof under conditions which permit the production of glutamate or a composition comprising glutamate in said non-human organism or in the culture medium surrounding said non-human organism.

[7773] Accordingly, the present invention relates to a process for the production of glutamate, which comprises
[7774] (a) increasing or generating the activity of a b1898-protein in the cytosol of a cell of a non-human organism or a part thereof, preferably a microorganism, a plant cell, a plant or a part thereof, as compared to a corresponding non-transformed wild type non-human organism or a part thereof; and
[7775] (b) growing the non-human organism or a part thereof under conditions which permit the production of glutamate or a composition comprising glutamate in said non-human organism or in the culture medium surrounding said non-human organism.

[7776] Accordingly, the present invention relates to a process for the production of glutamine, which comprises
[7777] (a) increasing or generating the activity of a transport protein in the cytosol of a cell of a non-human organism or a part thereof, preferably a microorganism, a plant cell, a plant or a part thereof, as compared to a corresponding non-transformed wild type non-human organism or a part thereof; and
[7778] (b) growing the non-human organism or a part thereof under conditions which permit the production of glutamine or a composition comprising glutamine in said non-human organism or in the culture medium surrounding said non-human organism.

[7779] Accordingly, the present invention relates to a process for the production of glutamate, which comprises
[7780] (a) increasing or generating the activity of a transport protein in the cytosol of a cell of a non-human organism or a part thereof, preferably a microorganism, a plant cell, a plant or a part thereof, as compared to a corresponding non-transformed wild type non-human organism or a part thereof; and
[7781] (b) growing the non-human organism or a part thereof under conditions which permit the production of glutamate or a composition comprising glutamate in said non-human organism or in the culture medium surrounding said non-human organism.

[7782] Accordingly, the present invention relates to a process for the production of glutamine, which comprises
[7783] (a) increasing or generating the activity of a transport protein in the cytosol of a cell of a non-human organism or a part thereof, preferably a microorganism, a plant cell, a plant or a part thereof, as compared to a corresponding non-transformed wild type non-human organism or a part thereof; and
[7784] (b) growing the non-human organism or a part thereof under conditions which permit the production of glutamine or a composition comprising glutamine in said non-human organism or in the culture medium surrounding said non-human organism.

[7785] Accordingly, the present invention relates to a process for the production of proline, which comprises
[7786] (a) increasing or generating the activity of a transport protein in the cytosol of a cell of a non-human organism or a part thereof, preferably a microorganism, a plant cell, a plant or a part thereof, as compared to a corresponding non-transformed wild type non-human organism or a part thereof; and
[7787] (b) growing the non-human organism or a part thereof under conditions which permit the production of proline or a composition comprising proline in said non-human organism or in the culture medium surrounding said non-human organism.

[7788] Accordingly, the present invention relates to a process for the production of glutamine, which comprises
[7789] (a) increasing or generating the activity of a uridine/cytidine kinase in the cytosol of a cell of a non-human organism or a part thereof, preferably a microorganism, a plant cell, a plant or a part thereof, as compared to a corresponding non-transformed wild type non-human organism or a part thereof; and
[7790] (b) growing the non-human organism or a part thereof under conditions which permit the production of glutamine or a composition comprising glutamine in said non-human organism or in the culture medium surrounding said non-human organism.

[7791] Accordingly, the present invention relates to a process for the production of glutamate, which comprises
[7792] (a) increasing or generating the activity of a b2107-protein in the cytosol of a cell of a non-human organism or a part thereof, preferably a microorganism, a plant cell, a plant or a part thereof, as compared to a corresponding non-transformed wild type non-human organism or a part thereof; and
[7793] (b) growing the non-human organism or a part thereof under conditions which permit the production of glutamate or a composition comprising glutamate in said non-human organism or in the culture medium surrounding said non-human organism.

[7794] Accordingly, the present invention relates to a process for the production of glutamine, which comprises
[7795] (a) increasing or generating the activity of a b2121-protein in the cytosol of a cell of a non-human organism or a part thereof, preferably a microorganism, a plant cell, a plant or a part thereof, as compared to a corresponding non-transformed wild type non-human organism or a part thereof; and
[7796] (b) growing the non-human organism or a part thereof under conditions which permit the production of glutamine or a composition comprising glutamine in said non-human organism or in the culture medium surrounding said non-human organism.

[7797] Accordingly, the present invention relates to a process for the production of glutamate, which comprises
[7798] (a) increasing or generating the activity of a ABC transporter permease protein in the cytosol of a cell of a non-human organism or a part thereof, preferably a microorganism, a plant cell, a plant or a part thereof, as compared to a corresponding non-transformed wild type non-human organism or a part thereof; and
[7799] (b) growing the non-human organism or a part thereof under conditions which permit the production of glutamate or a composition comprising glutamate in said non-human organism or in the culture medium surrounding said non-human organism.

[7800] Accordingly, the present invention relates to a process for the production of glutamine, which comprises
[7801] (a) increasing or generating the activity of a ABC transporter permease protein in the cytosol of a cell of a non-human organism or a part thereof, preferably a microorganism, a plant cell, a plant or a part thereof, as compared to a corresponding non-transformed wild type non-human organism or a part thereof; and
[7802] (b) growing the non-human organism or a part thereof under conditions which permit the production of glutamine or a composition comprising glutamine in said non-human organism or in the culture medium surrounding said non-human organism.

[7803] Accordingly, the present invention relates to a process for the production of proline, which comprises
[7804] (a) increasing or generating the activity of a ABC transporter permease protein in the cytosol of a cell of a non-human organism or a part thereof, preferably a microorganism, a plant cell, a plant or a part thereof, as compared to a corresponding non-transformed wild type non-human organism or a part thereof; and
[7805] (b) growing the non-human organism or a part thereof under conditions which permit the production of proline or a composition comprising proline in said non-human organism or in the culture medium surrounding said non-human organism.

[7806] Accordingly, the present invention relates to a process for the production of glutamine, which comprises
[7807] (a) increasing or generating the activity of a NADH dehydrogenase I chain I in the cytosol of a cell of a non-human organism or a part thereof, preferably a microorganism, a plant cell, a plant or a part thereof, as compared to a corresponding non-transformed wild type non-human organism or a part thereof; and
[7808] (b) growing the non-human organism or a part thereof under conditions which permit the production of glutamine or a composition comprising glutamine in said non-human organism or in the culture medium surrounding said non-human organism.

[7809] Accordingly, the present invention relates to a process for the production of glutamate, which comprises
[7810] (a) increasing or generating the activity of a b2360-protein in the cytosol of a cell of a non-human organism or a part thereof, preferably a microorganism, a plant cell, a plant or a part thereof, as compared to a corresponding non-transformed wild type non-human organism or a part thereof; and
[7811] (b) growing the non-human organism or a part thereof under conditions which permit the production of glutamate or a composition comprising glutamate in said non-human organism or in the culture medium surrounding said non-human organism.

[7812] Accordingly, the present invention relates to a process for the production of proline, which comprises
[7813] (a) increasing or generating the activity of a b2399-protein in the cytosol of a cell of a non-human organism or a part thereof, preferably a microorganism, a plant cell, a plant or a part thereof, as compared to a corresponding non-transformed wild type non-human organism or a part thereof; and
[7814] (b) growing the non-human organism or a part thereof under conditions which permit the production of proline or a composition comprising proline in said non-human organism or in the culture medium surrounding said non-human organism.

[7815] Accordingly, the present invention relates to a process for the production of glutamate, which comprises
[7816] (a) increasing or generating the activity of a transcriptional regulator in the cytosol of a cell of a non-human organism or a part thereof, preferably a microorganism, a plant cell, a plant or a part thereof, as compared to a corresponding non-transformed wild type non-human organism or a part thereof; and
[7817] (b) growing the non-human organism or a part thereof under conditions which permit the production of glutamate or a composition comprising glutamate in said non-human organism or in the culture medium surrounding said non-human organism.

[7818] Accordingly, the present invention relates to a process for the production of arginine, which comprises
[7819] (a) increasing or generating the activity of a cysteine synthase A in the cytosol of a cell of a non-human organism or a part thereof, preferably a microorganism, a plant cell, a plant or a part thereof, as compared to a corresponding non-transformed wild type non-human organism or a part thereof; and
[7820] (b) growing the non-human organism or a part thereof under conditions which permit the production of arginine or a composition comprising arginine in said non-human organism or in the culture medium surrounding said non-human organism.

[7821] Accordingly, the present invention relates to a process for the production of glutamate, which comprises
[7822] (a) increasing or generating the activity of a cysteine synthase A in the cytosol of a cell of a non-human organism or a part thereof, preferably a microorganism, a plant cell, a plant or a part thereof, as compared to a corresponding non-transformed wild type non-human organism or a part thereof; and
[7823] (b) growing the non-human organism or a part thereof under conditions which permit the production of glutamate or a composition comprising glutamate in said non-human organism or in the culture medium surrounding said non-human organism.

[7824] Accordingly, the present invention relates to a process for the production of proline, which comprises
[7825] (a) increasing or generating the activity of a ethanolamine utilization protein in the cytosol of a cell of a non-human organism or a part thereof, preferably a microorganism, a plant cell, a plant or a part thereof, as compared to a corresponding non-transformed wild type non-human organism or a part thereof; and
[7826] (b) growing the non-human organism or a part thereof under conditions which permit the production of proline or a composition comprising proline in said non-human organism or in the culture medium surrounding said non-human organism.

[7827] Accordingly, the present invention relates to a process for the production of proline, which comprises
[7828] (a) increasing or generating the activity of a b2474-protein in the cytosol of a cell of a non-human organism or a part thereof, preferably a microorganism, a plant cell, a plant or a part thereof, as compared to a corresponding non-transformed wild type non-human organism or a part thereof; and
[7829] (b) growing the non-human organism or a part thereof under conditions which permit the production of proline or a composition comprising proline in said non-human organism or in the culture medium surrounding said non-human organism.

[7830] Accordingly, the present invention relates to a process for the production of glutamate, which comprises
[7831] (a) increasing or generating the activity of a b2513-protein in the cytosol of a cell of a non-human organism or a part thereof, preferably a microorganism, a plant cell, a plant or a part thereof, as compared to a corresponding non-transformed wild type non-human organism or a part thereof; and
[7832] (b) growing the non-human organism or a part thereof under conditions which permit the production of glutamate or a composition comprising glutamate in said non-human organism or in the culture medium surrounding said non-human organism.

[7833] Accordingly, the present invention relates to a process for the production of glutamine, which comprises
[7834] (a) increasing or generating the activity of a b2513-protein in the cytosol of a cell of a non-human organism or a part thereof, preferably a microorganism, a plant cell, a plant or a part thereof, as compared to a corresponding non-transformed wild type non-human organism or a part thereof; and
[7835] (b) growing the non-human organism or a part thereof under conditions which permit the production of glutamine or a composition comprising glutamine in said non-human organism or in the culture medium surrounding said non-human organism.

[7836] Accordingly, the present invention relates to a process for the production of arginine, which comprises
[7837] (a) increasing or generating the activity of a 2,3-dihydroxy-2,3-dihydrophenylpropionatedehydrogenase in the cytosol of a cell of a non-human organism or a part thereof, preferably a microorganism, a plant cell, a plant or a part thereof, as compared to a corresponding non-transformed wild type non-human organism or a part thereof; and
[7838] (b) growing the non-human organism or a part thereof under conditions which permit the production of arginine or a composition comprising arginine in said non-human organism or in the culture medium surrounding said non-human organism.

[7839] Accordingly, the present invention relates to a process for the production of glutamate, which comprises
[7840] (a) increasing or generating the activity of a 2,3-dihydroxy-2,3-dihydrophenylpropionatedehydrogenase in the cytosol of a cell of a non-human organism or a part thereof, preferably a microorganism, a plant cell, a plant or a part thereof, as compared to a corresponding non-transformed wild type non-human organism or a part thereof; and
[7841] (b) growing the non-human organism or a part thereof under conditions which permit the production of glutamate or a composition comprising glutamate in said non-human organism or in the culture medium surrounding said non-human organism.

[7842] Accordingly, the present invention relates to a process for the production of glutamine, which comprises
[7843] (a) increasing or generating the activity of a b2548-protein in the cytosol of a cell of a non-human organism or a part thereof, preferably a microorganism, a plant cell, a plant or a part thereof, as compared to a corresponding non-transformed wild type non-human organism or a part thereof; and
[7844] (b) growing the non-human organism or a part thereof under conditions which permit the production of glutamine or a composition comprising glutamine in said non-human organism or in the culture medium surrounding said non-human organism.

[7845] Accordingly, the present invention relates to a process for the production of glutamine, which comprises
[7846] (a) increasing or generating the activity of a b2613-protein in the cytosol of a cell of a non-human organism or a part thereof, preferably a microorganism, a plant cell, a plant or a part thereof, as compared to a corresponding non-transformed wild type non-human organism or a part thereof; and
[7847] (b) growing the non-human organism or a part thereof under conditions which permit the production of glutamine or a composition comprising glutamine in said non-human organism or in the culture medium surrounding said non-human organism.

[7848] Accordingly, the present invention relates to a process for the production of proline, which comprises
[7849] (a) increasing or generating the activity of a b2613-protein in the cytosol of a cell of a non-human organism or a part thereof, preferably a microorganism, a plant cell, a plant or a part thereof, as compared to a corresponding non-transformed wild type non-human organism or a part thereof; and
[7850] (b) growing the non-human organism or a part thereof under conditions which permit the production of proline or a composition comprising proline in said non-human organism or in the culture medium surrounding said non-human organism.

[7851] Accordingly, the present invention relates to a process for the production of glutamate, which comprises
[7852] (a) increasing or generating the activity of a transcriptional regulator in the cytosol of a cell of a non-human organism or a part thereof, preferably a microorganism, a plant cell, a plant or a part thereof, as compared to a corresponding non-transformed wild type non-human organism or a part thereof; and
[7853] (b) growing the non-human organism or a part thereof under conditions which permit the production of glutamate or a composition comprising glutamate in said non-human organism or in the culture medium surrounding said non-human organism.

[7854] Accordingly, the present invention relates to a process for the production of glutamine, which comprises
[7855] (a) increasing or generating the activity of a transcriptional regulator in the cytosol of a cell of a non-human organism or a part thereof, preferably a microorganism, a plant cell, a plant or a part thereof, as compared to a corresponding non-transformed wild type non-human organism or a part thereof; and
[7856] (b) growing the non-human organism or a part thereof under conditions which permit the production of glutamine or a composition comprising glutamine in said non-human organism or in the culture medium surrounding said non-human organism.

[7857] Accordingly, the present invention relates to a process for the production of proline, which comprises
[7858] (a) increasing or generating the activity of a transcriptional regulator in the cytosol of a cell of a non-human organism or a part thereof, preferably a microorganism, a plant cell, a plant or a part thereof, as compared to a corresponding non-transformed wild type non-human organism or a part thereof; and
[7859] (b) growing the non-human organism or a part thereof under conditions which permit the production of proline or a composition comprising proline in said non-human organism or in the culture medium surrounding said non-human organism.

[7860] Accordingly, the present invention relates to a process for the production of glutamate, which comprises
[7861] (a) increasing or generating the activity of a b2673-protein in the cytosol of a cell of a non-human organism or a part thereof, preferably a microorganism, a plant cell, a plant or a part thereof, as compared to a corresponding non-transformed wild type non-human organism or a part thereof; and
[7862] (b) growing the non-human organism or a part thereof under conditions which permit the production of glutamate or a composition comprising glutamate in said non-human organism or in the culture medium surrounding said non-human organism.

[7863] Accordingly, the present invention relates to a process for the production of glutamine, which comprises
[7864] (a) increasing or generating the activity of a b2673-protein in the cytosol of a cell of a non-human organism or a part thereof, preferably a microorganism, a plant cell, a plant or a part thereof, as compared to a corresponding non-transformed wild type non-human organism or a part thereof; and
[7865] (b) growing the non-human organism or a part thereof under conditions which permit the production of glutamine or a composition comprising glutamine in said non-human organism or in the culture medium surrounding said non-human organism.

[7866] Accordingly, the present invention relates to a process for the production of glutamine, which comprises
[7867] (a) increasing or generating the activity of a transcriptional regulator in the cytosol of a cell of a non-human organism or a part thereof, preferably a microorganism, a plant cell, a plant or a part thereof, as compared to a corresponding non-transformed wild type non-human organism or a part thereof; and
[7868] (b) growing the non-human organism or a part thereof under conditions which permit the production of glutamine or a composition comprising glutamine in said non-human organism or in the culture medium surrounding said non-human organism.

[7869] Accordingly, the present invention relates to a process for the production of proline, which comprises
[7870] (a) increasing or generating the activity of a transcriptional regulator in the cytosol of a cell of a non-human organism or a part thereof, preferably a microorganism, a plant cell, a plant or a part thereof, as compared to a corresponding non-transformed wild type non-human organism or a part thereof; and
[7871] (b) growing the non-human organism or a part thereof under conditions which permit the production of proline or a composition comprising proline in said non-human organism or in the culture medium surrounding said non-human organism.

[7872] Accordingly, the present invention relates to a process for the production of glutamate, which comprises
[7873] (a) increasing or generating the activity of a b2812-protein in the cytosol of a cell of a non-human organism or a part thereof, preferably a microorganism, a plant cell, a plant or a part thereof, as compared to a corresponding non-transformed wild type non-human organism or a part thereof; and
[7874] (b) growing the non-human organism or a part thereof under conditions which permit the production of glutamate or a composition comprising glutamate in said non-human organism or in the culture medium surrounding said non-human organism.

[7875] Accordingly, the present invention relates to a process for the production of glutamine, which comprises
[7876] (a) increasing or generating the activity of a b2812-protein in the cytosol of a cell of a non-human organism or a part thereof, preferably a microorganism, a plant cell, a plant or a part thereof, as compared to a corresponding non-transformed wild type non-human organism or a part thereof; and
[7877] (b) growing the non-human organism or a part thereof under conditions which permit the production of glutamine or a composition comprising glutamine in said non-human organism or in the culture medium surrounding said non-human organism.

[7878] Accordingly, the present invention relates to a process for the production of proline, which comprises
[7879] (a) increasing or generating the activity of a b2812-protein in the cytosol of a cell of a non-human organism or a part thereof, preferably a microorganism, a plant cell, a plant or a part thereof, as compared to a corresponding non-transformed wild type non-human organism or a part thereof; and
[7880] (b) growing the non-human organism or a part thereof under conditions which permit the production of proline or a composition comprising proline in said non-human organism or in the culture medium surrounding said non-human organism.

[7881] Accordingly, the present invention relates to a process for the production of proline, which comprises
[7882] (a) increasing or generating the activity of a b2846-protein in the cytosol of a cell of a non-human organism or a part thereof, preferably a microorganism, a plant cell, a plant or a part thereof, as compared to a corresponding non-transformed wild type non-human organism or a part thereof; and
[7883] (b) growing the non-human organism or a part thereof under conditions which permit the production of proline or a composition comprising proline in said non-human organism or in the culture medium surrounding said non-human organism.

[7884] Accordingly, the present invention relates to a process for the production of arginine, which comprises
[7885] (a) increasing or generating the activity of a b2909-protein in the cytosol of a cell of a non-human organism or a part thereof, preferably a microorganism, a plant cell, a plant or a part thereof, as compared to a corresponding non-transformed wild type non-human organism or a part thereof; and
[7886] (b) growing the non-human organism or a part thereof under conditions which permit the production of arginine or a composition comprising arginine in said non-human organism or in the culture medium surrounding said non-human organism.

[7887] Accordingly, the present invention relates to a process for the production of proline, which comprises
[7888] (a) increasing or generating the activity of a b2909-protein in the cytosol of a cell of a non-human organism or a part thereof, preferably a microorganism, a plant cell, a plant or a part thereof, as compared to a corresponding non-transformed wild type non-human organism or a part thereof; and
[7889] (b) growing the non-human organism or a part thereof under conditions which permit the production of proline or a composition comprising proline in said non-human organism or in the culture medium surrounding said non-human organism.

[7890] Accordingly, the present invention relates to a process for the production of glutamate, which comprises
[7891] (a) increasing or generating the activity of a ribosephosphate isomerase, constitutive in the cytosol of a cell of a non-human organism or a part thereof, preferably a microorganism, a plant cell, a plant or a part thereof, as compared to a corresponding non-transformed wild type non-human organism or a part thereof; and
[7892] (b) growing the non-human organism or a part thereof under conditions which permit the production of glutamate or a composition comprising glutamate in said non-human organism or in the culture medium surrounding said non-human organism.

[7893] Accordingly, the present invention relates to a process for the production of glutamate, which comprises
[7894] (a) increasing or generating the activity of a arginine exporter protein in the cytosol of a cell of a non-human organism or a part thereof, preferably a microorganism, a plant cell, a plant or a part thereof, as compared to a corresponding non-transformed wild type non-human organism or a part thereof; and
[7895] (b) growing the non-human organism or a part thereof under conditions which permit the production of glutamate or a composition comprising glutamate in said non-human organism or in the culture medium surrounding said non-human organism.

[7896] Accordingly, the present invention relates to a process for the production of proline, which comprises
[7897] (a) increasing or generating the activity of a b2936-protein in the cytosol of a cell of a non-human organism or a part thereof, preferably a microorganism, a plant cell, a plant or a part thereof, as compared to a corresponding non-transformed wild type non-human organism or a part thereof; and
[7898] (b) growing the non-human organism or a part thereof under conditions which permit the production of proline or a composition comprising proline in said non-human organism or in the culture medium surrounding said non-human organism.

[7899] Accordingly, the present invention relates to a process for the production of proline, which comprises
[7900] (a) increasing or generating the activity of a L-asparaginase in the cytosol of a cell of a non-human organism or a part thereof, preferably a microorganism, a plant cell, a plant or a part thereof, as compared to a corresponding non-transformed wild type non-human organism or a part thereof; and
[7901] (b) growing the non-human organism or a part thereof under conditions which permit the production of proline or a composition comprising proline in said non-human organism or in the culture medium surrounding said non-human organism.

[7902] Accordingly, the present invention relates to a process for the production of proline, which comprises
[7903] (a) increasing or generating the activity of a murein transglycosylase in the cytosol of a cell of a non-human organism or a part thereof, preferably a microorganism, a plant cell, a plant or a part thereof, as compared to a corresponding non-transformed wild type non-human organism or a part thereof; and
[7904] (b) growing the non-human organism or a part thereof under conditions which permit the production of proline or a composition comprising proline in said non-human organism or in the culture medium surrounding said non-human organism.

[7905] Accordingly, the present invention relates to a process for the production of arginine, which comprises
[7906] (a) increasing or generating the activity of a b2999-protein in the cytosol of a cell of a non-human organism or a part thereof, preferably a microorganism, a plant cell, a plant or a part thereof, as compared to a corresponding non-transformed wild type non-human organism or a part thereof; and
[7907] (b) growing the non-human organism or a part thereof under conditions which permit the production of arginine or a composition comprising arginine in said non-human organism or in the culture medium surrounding said non-human organism.

[7908] Accordingly, the present invention relates to a process for the production of proline, which comprises
[7909] (a) increasing or generating the activity of a glycoprotease in the cytosol of a cell of a non-human organism or a part thereof, preferably a microorganism, a plant cell, a plant or a part thereof, as compared to a corresponding non-transformed wild type non-human organism or a part thereof; and
[7910] (b) growing the non-human organism or a part thereof under conditions which permit the production of proline or a composition comprising proline in said non-human organism or in the culture medium surrounding said non-human organism.

[7911] Accordingly, the present invention relates to a process for the production of arginine, which comprises
[7912] (a) increasing or generating the activity of a b3121-protein in the cytosol of a cell of a non-human organism or a part thereof, preferably a microorganism, a plant cell, a plant or a part thereof, as compared to a corresponding non-transformed wild type non-human organism or a part thereof; and
[7913] (b) growing the non-human organism or a part thereof under conditions which permit the production of arginine or a composition comprising arginine in said non-human organism or in the culture medium surrounding said non-human organism.

[7914] Accordingly, the present invention relates to a process for the production of proline, which comprises
[7915] (a) increasing or generating the activity of a b3121-protein in the cytosol of a cell of a non-human organism or a part thereof, preferably a microorganism, a plant cell, a plant or a part thereof, as compared to a corresponding non-transformed wild type non-human organism or a part thereof; and
[7916] (b) growing the non-human organism or a part thereof under conditions which permit the production of proline or a composition comprising proline in said non-human organism or in the culture medium surrounding said non-human organism.

[7917] Accordingly, the present invention relates to a process for the production of proline, which comprises
[7918] (a) increasing or generating the activity of a b3151-protein in the cytosol of a cell of a non-human organism or a part thereof, preferably a microorganism, a plant cell, a plant or a part thereof, as compared to a corresponding non-transformed wild type non-human organism or a part thereof; and
[7919] (b) growing the non-human organism or a part thereof under conditions which permit the production of proline or a composition comprising proline in said non-human organism or in the culture medium surrounding said non-human organism.

[7920] Accordingly, the present invention relates to a process for the production of arginine, which comprises
[7921] (a) increasing or generating the activity of a acetyl CoA carboxylase in the cytosol of a cell of a non-human organism or a part thereof, preferably a microorganism, a plant cell, a plant or a part thereof, as compared to a corresponding non-transformed wild type non-human organism or a part thereof; and
[7922] (b) growing the non-human organism or a part thereof under conditions which permit the production of arginine or a composition comprising arginine in said non-human organism or in the culture medium surrounding said non-human organism.

[7923] Accordingly, the present invention relates to a process for the production of glutamate, which comprises
[7924] (a) increasing or generating the activity of a acetyl CoA carboxylase in the cytosol of a cell of a non-human organism or a part thereof, preferably a microorganism, a plant cell, a plant or a part thereof, as compared to a corresponding non-transformed wild type non-human organism or a part thereof; and
[7925] (b) growing the non-human organism or a part thereof under conditions which permit the production of glutamate or a composition comprising glutamate in said non-human organism or in the culture medium surrounding said non-human organism.

[7926] Accordingly, the present invention relates to a process for the production of arginine, which comprises
[7927] (a) increasing or generating the activity of a methyltransferase in the cytosol of a cell of a non-human organism or a part thereof, preferably a microorganism, a plant cell, a plant or a part thereof, as compared to a corresponding non-transformed wild type non-human organism or a part thereof; and
[7928] (b) growing the non-human organism or a part thereof under conditions which permit the production of arginine or a composition comprising arginine in said non-human organism or in the culture medium surrounding said non-human organism.

[7929] Accordingly, the present invention relates to a process for the production of glutamate, which comprises
[7930] (a) increasing or generating the activity of a methyltransferase in the cytosol of a cell of a non-human organism or a part thereof, preferably a microorganism, a plant cell, a plant or a part thereof, as compared to a corresponding non-transformed wild type non-human organism or a part thereof; and
[7931] (b) growing the non-human organism or a part thereof under conditions which permit the production of glutamate or a composition comprising glutamate in said non-human organism or in the culture medium surrounding said non-human organism.

[7932] Accordingly, the present invention relates to a process for the production of glutamine, which comprises
[7933] (a) increasing or generating the activity of a methyltransferase in the cytosol of a cell of a non-human organism or a part thereof, preferably a microorganism, a plant cell, a plant or a part thereof, as compared to a corresponding non-transformed wild type non-human organism or a part thereof; and
[7934] (b) growing the non-human organism or a part thereof under conditions which permit the production of glutamine or a composition comprising glutamine in said non-human organism or in the culture medium surrounding said non-human organism.

[7935] Accordingly, the present invention relates to a process for the production of proline, which comprises
[7936] (a) increasing or generating the activity of a methyltransferase in the cytosol of a cell of a non-human organism or a part thereof, preferably a microorganism, a plant cell, a plant or a part thereof, as compared to a corresponding non-transformed wild type non-human organism or a part thereof; and
[7937] (b) growing the non-human organism or a part thereof under conditions which permit the production of proline or a composition comprising proline in said non-human organism or in the culture medium surrounding said non-human organism.

[7938] Accordingly, the present invention relates to a process for the production of proline, which comprises
[7939] (a) increasing or generating the activity of a b3346-protein in the cytosol of a cell of a non-human organism or a part thereof, preferably a microorganism, a plant cell, a plant or a part thereof, as compared to a corresponding non-transformed wild type non-human organism or a part thereof; and
[7940] (b) growing the non-human organism or a part thereof under conditions which permit the production of proline or a composition comprising proline in said non-human organism or in the culture medium surrounding said non-human organism.

[7941] Accordingly, the present invention relates to a process for the production of glutamine, which comprises
[7942] (a) increasing or generating the activity of a b3410-protein in the cytosol of a cell of a non-human organism or a part thereof, preferably a microorganism, a plant cell, a plant or a part thereof, as compared to a corresponding non-transformed wild type non-human organism or a part thereof; and
[7943] (b) growing the non-human organism or a part thereof under conditions which permit the production of glutamine or a composition comprising glutamine in said non-human organism or in the culture medium surrounding said non-human organism.

[7944] Accordingly, the present invention relates to a process for the production of arginine, which comprises
[7945] (a) increasing or generating the activity of a B3427-protein in the cytosol of a cell of a non-human organism or a part thereof, preferably a microorganism, a plant cell, a plant or a part thereof, as compared to a corresponding non-transformed wild type non-human organism or a part thereof; and
[7946] (b) growing the non-human organism or a part thereof under conditions which permit the production of arginine or a composition comprising arginine in said non-human organism or in the culture medium surrounding said non-human organism.

[7947] Accordingly, the present invention relates to a process for the production of glutamate, which comprises
[7948] (a) increasing or generating the activity of a b3509-protein in the cytosol of a cell of a non-human organism or a part thereof, preferably a microorganism, a plant cell, a plant or a part thereof, as compared to a corresponding non-transformed wild type non-human organism or a part thereof; and
[7949] (b) growing the non-human organism or a part thereof under conditions which permit the production of glutamate or a composition comprising glutamate in said non-human organism or in the culture medium surrounding said non-human organism.

[7950] Accordingly, the present invention relates to a process for the production of proline, which comprises
[7951] (a) increasing or generating the activity of a valine-pyruvate transaminase in the cytosol of a cell of a non-human organism or a part thereof, preferably a microorganism, a plant cell, a plant or a part thereof, as compared to a corresponding non-transformed wild type non-human organism or a part thereof; and
[7952] (b) growing the non-human organism or a part thereof under conditions which permit the production of proline or a composition comprising proline in said non-human organism or in the culture medium surrounding said non-human organism.

[7953] Accordingly, the present invention relates to a process for the production of glutamine, which comprises
[7954] (a) increasing or generating the activity of a threonine dehydrogenase in the cytosol of a cell of a non-human organism or a part thereof, preferably a microorganism, a plant cell, a plant or a part thereof, as compared to a corresponding non-transformed wild type non-human organism or a part thereof; and
[7955] (b) growing the non-human organism or a part thereof under conditions which permit the production of glutamine or a composition comprising glutamine in said non-human organism or in the culture medium surrounding said non-human organism.

[7956] Accordingly, the present invention relates to a process for the production of proline, which comprises
[7957] (a) increasing or generating the activity of a threonine dehydrogenase in the cytosol of a cell of a non-human organism or a part thereof, preferably a microorganism, a plant cell, a plant or a part thereof, as compared to a corresponding non-transformed wild type non-human organism or a part thereof; and
[7958] (b) growing the non-human organism or a part thereof under conditions which permit the production of proline or a composition comprising proline in said non-human organism or in the culture medium surrounding said non-human organism.

[7959] Accordingly, the present invention relates to a process for the production of proline, which comprises
[7960] (a) increasing or generating the activity of a phosphopantetheine adenylyltransferase in the cytosol of a cell of a non-human organism or a part thereof, preferably a microorganism, a plant cell, a plant or a part thereof, as compared to a corresponding non-transformed wild type non-human organism or a part thereof; and
[7961] (b) growing the non-human organism or a part thereof under conditions which permit the production of proline or a composition comprising proline in said non-human organism or in the culture medium surrounding said non-human organism.

[7962] Accordingly, the present invention relates to a process for the production of glutamine, which comprises
[7963] (a) increasing or generating the activity of a ATP synthase subunit beta in the cytosol of a cell of a non-human organism or a part thereof, preferably a microorganism, a plant cell, a plant or a part thereof, as compared to a corresponding non-transformed wild type non-human organism or a part thereof; and
[7964] (b) growing the non-human organism or a part thereof under conditions which permit the production of glutamine or a composition comprising glutamine in said non-human organism or in the culture medium surrounding said non-human organism.

[7965] Accordingly, the present invention relates to a process for the production of arginine, which comprises
[7966] (a) increasing or generating the activity of a enterobacterial common antigen polymerase in the cytosol of a cell of a non-human organism or a part thereof, preferably a microorganism, a plant cell, a plant or a part thereof, as compared to a corresponding non-transformed wild type non-human organism or a part thereof; and
[7967] (b) growing the non-human organism or a part thereof under conditions which permit the production of arginine or a composition comprising arginine in said non-human organism or in the culture medium surrounding said non-human organism.

[7968] Accordingly, the present invention relates to a process for the production of glutamate, which comprises
[7969] (a) increasing or generating the activity of a enterobacterial common antigen polymerase in the cytosol of a cell of a non-human organism or a part thereof, preferably a microorganism, a plant cell, a plant or a part thereof, as compared to a corresponding non-transformed wild type non-human organism or a part thereof; and
[7970] (b) growing the non-human organism or a part thereof under conditions which permit the production of glutamate or a composition comprising glutamate in said non-human organism or in the culture medium surrounding said non-human organism.

[7971] Accordingly, the present invention relates to a process for the production of proline, which comprises
[7972] (a) increasing or generating the activity of a DNA helicase II in the cytosol of a cell of a non-human organism or a part thereof, preferably a microorganism, a plant cell, a plant or a part thereof, as compared to a corresponding non-transformed wild type non-human organism or a part thereof; and
[7973] (b) growing the non-human organism or a part thereof under conditions which permit the production of proline or a composition comprising proline in said non-human organism or in the culture medium surrounding said non-human organism.

[7974] Accordingly, the present invention relates to a process for the production of glutamine, which comprises
[7975] (a) increasing or generating the activity of a b3814-protein in the cytosol of a cell of a non-human organism or a part thereof, preferably a microorganism, a plant cell, a plant or a part thereof, as compared to a corresponding non-transformed wild type non-human organism or a part thereof; and
[7976] (b) growing the non-human organism or a part thereof under conditions which permit the production of glutamine or a composition comprising glutamine in said non-human organism or in the culture medium surrounding said non-human organism.

[7977] Accordingly, the present invention relates to a process for the production of proline, which comprises
[7978] (a) increasing or generating the activity of a b3817-protein in the cytosol of a cell of a non-human organism or a part thereof, preferably a microorganism, a plant cell, a plant or a part thereof, as compared to a corresponding non-transformed wild type non-human organism or a part thereof; and
[7979] (b) growing the non-human organism or a part thereof under conditions which permit the production of proline or a composition comprising proline in said non-human organism or in the culture medium surrounding said non-human organism.

[7980] Accordingly, the present invention relates to a process for the production of glutamine, which comprises
[7981] (a) increasing or generating the activity of a glycerol dehydrogenase in the cytosol of a cell of a non-human organism or a part thereof, preferably a microorganism, a plant cell, a plant or a part thereof, as compared to a corresponding non-transformed wild type non-human organism or a part thereof; and
[7982] (b) growing the non-human organism or a part thereof under conditions which permit the production of glutamine or a composition comprising glutamine in said non-human organism or in the culture medium surrounding said non-human organism.

[7983] Accordingly, the present invention relates to a process for the production of glutamine, which comprises
[7984] (a) increasing or generating the activity of a b3989-protein in the cytosol of a cell of a non-human organism or a part thereof, preferably a microorganism, a plant cell, a plant or a part thereof, as compared to a corresponding non-transformed wild type non-human organism or a part thereof; and
[7985] (b) growing the non-human organism or a part thereof under conditions which permit the production of glutamine or a composition comprising glutamine in said non-human organism or in the culture medium surrounding said non-human organism.

[7986] Accordingly, the present invention relates to a process for the production of glutamate, which comprises
[7987] (a) increasing or generating the activity of a acetyltransferase in the cytosol of a cell of a non-human organism or a part thereof, preferably a microorganism, a plant cell, a plant or a part thereof, as compared to a corresponding non-transformed wild type non-human organism or a part thereof; and
[7988] (b) growing the non-human organism or a part thereof under conditions which permit the production of glutamate or a composition comprising glutamate in said non-human organism or in the culture medium surrounding said non-human organism.

[7989] Accordingly, the present invention relates to a process for the production of arginine, which comprises
[7990] (a) increasing or generating the activity of a b4029-protein in the cytosol of a cell of a non-human organism or a part thereof, preferably a microorganism, a plant cell, a plant or a part thereof, as compared to a corresponding non-transformed wild type non-human organism or a part thereof; and
[7991] (b) growing the non-human organism or a part thereof under conditions which permit the production of arginine or a composition comprising arginine in said non-human organism or in the culture medium surrounding said non-human organism.

[7992] Accordingly, the present invention relates to a process for the production of glutamine, which comprises
[7993] (a) increasing or generating the activity of a b4029-protein in the cytosol of a cell of a non-human organism or a part thereof, preferably a microorganism, a plant cell, a plant or a part thereof, as compared to a corresponding non-transformed wild type non-human organism or a part thereof; and
[7994] (b) growing the non-human organism or a part thereof under conditions which permit the production of glutamine or a composition comprising glutamine in said non-human organism or in the culture medium surrounding said non-human organism.

[7995] Accordingly, the present invention relates to a process for the production of proline, which comprises
[7996] (a) increasing or generating the activity of a b4029-protein in the cytosol of a cell of a non-human organism or a part thereof, preferably a microorganism, a plant cell, a plant or a part thereof, as compared to a corresponding non-transformed wild type non-human organism or a part thereof; and
[7997] (b) growing the non-human organism or a part thereof under conditions which permit the production of proline or a composition comprising proline in said non-human organism or in the culture medium surrounding said non-human organism.

[7998] Accordingly, the present invention relates to a process for the production of arginine, which comprises
[7999] (a) increasing or generating the activity of a cation/acetate symporter in the cytosol of a cell of a non-human organism or a part thereof, preferably a microorganism, a plant cell, a plant or a part thereof, as compared to a corresponding non-transformed wild type non-human organism or a part thereof; and
[8000] (b) growing the non-human organism or a part thereof under conditions which permit the production of arginine or a composition comprising arginine in said non-human organism or in the culture medium surrounding said non-human organism.

[8001] Accordingly, the present invention relates to a process for the production of arginine, which comprises
[8002] (a) increasing or generating the activity of a b4121-protein in the cytosol of a cell of a non-human organism or a part thereof, preferably a microorganism, a plant cell, a plant or a part thereof, as compared to a corresponding non-transformed wild type non-human organism or a part thereof; and
[8003] (b) growing the non-human organism or a part thereof under conditions which permit the production of arginine or a composition comprising arginine in said non-human organism or in the culture medium surrounding said non-human organism.

[8004] Accordingly, the present invention relates to a process for the production of proline, which comprises
[8005] (a) increasing or generating the activity of a b4121-protein in the cytosol of a cell of a non-human organism or a part thereof, preferably a microorganism, a plant cell, a plant or a part thereof, as compared to a corresponding non-transformed wild type non-human organism or a part thereof; and
[8006] (b) growing the non-human organism or a part thereof under conditions which permit the production of proline or a composition comprising proline in said non-human organism or in the culture medium surrounding said non-human organism.

[8007] Accordingly, the present invention relates to a process for the production of proline, which comprises
[8008] (a) increasing or generating the activity of a lysyl-tRNA synthetase in the cytosol of a cell of a non-human organism or a part thereof, preferably a microorganism, a plant cell, a plant or a part thereof, as compared to a corresponding non-transformed wild type non-human organism or a part thereof; and
[8009] (b) growing the non-human organism or a part thereof under conditions which permit the production of proline or a composition comprising proline in said non-human organism or in the culture medium surrounding said non-human organism.

[8010] Accordingly, the present invention relates to a process for the production of glutamine, which comprises
[8011] (a) increasing or generating the activity of a aspartase in the cytosol of a cell of a non-human organism or a part thereof, preferably a microorganism, a plant cell, a plant or a part thereof, as compared to a corresponding non-transformed wild type non-human organism or a part thereof; and
[8012] (b) growing the non-human organism or a part thereof under conditions which permit the production of glutamine or a composition comprising glutamine in said non-human organism or in the culture medium surrounding said non-human organism.

[8013] Accordingly, the present invention relates to a process for the production of arginine, which comprises
[8014] (a) increasing or generating the activity of a acetyltransferase in the cytosol of a cell of a non-human organism or a part thereof, preferably a microorganism, a plant cell, a plant or a part thereof, as compared to a corresponding non-transformed wild type non-human organism or a part thereof; and
[8015] (b) growing the non-human organism or a part thereof under conditions which permit the production of arginine or a composition comprising arginine in said non-human organism or in the culture medium surrounding said non-human organism.

[8016] Accordingly, the present invention relates to a process for the production of glutamine, which comprises
[8017] (a) increasing or generating the activity of a acetyltransferase in the cytosol of a cell of a non-human organism or a part thereof, preferably a microorganism, a plant cell, a plant or a part thereof, as compared to a corresponding non-transformed wild type non-human organism or a part thereof; and
[8018] (b) growing the non-human organism or a part thereof under conditions which permit the production of glutamine or a composition comprising glutamine in said non-human organism or in the culture medium surrounding said non-human organism.

[8019] Accordingly, the present invention relates to a process for the production of proline, which comprises
[8020] (a) increasing or generating the activity of a acetyltransferase in the cytosol of a cell of a non-human organism or a part thereof, preferably a microorganism, a plant cell, a plant or a part thereof, as compared to a corresponding non-transformed wild type non-human organism or a part thereof; and
[8021] (b) growing the non-human organism or a part thereof under conditions which permit the production of proline or a composition comprising proline in said non-human organism or in the culture medium surrounding said non-human organism.

[8022] Accordingly, the present invention relates to a process for the production of arginine, which comprises
[8023] (a) increasing or generating the activity of a gluconate transport system permease 3 in the cytosol of a cell of a non-human organism or a part thereof, preferably a microorganism, a plant cell, a plant or a part thereof, as compared to a corresponding non-transformed wild type non-human organism or a part thereof; and
[8024] (b) growing the non-human organism or a part thereof under conditions which permit the production of arginine or a composition comprising arginine in said non-human organism or in the culture medium surrounding said non-human organism.

[8025] Accordingly, the present invention relates to a process for the production of glutamate, which comprises
[8026] (a) increasing or generating the activity of a purine-nucleoside phosphorylase in the cytosol of a cell of a non-human organism or a part thereof, preferably a microorganism, a plant cell, a plant or a part thereof, as compared to a corresponding non-transformed wild type non-human organism or a part thereof; and
[8027] (b) growing the non-human organism or a part thereof under conditions which permit the production of glutamate or a composition comprising glutamate in said non-human organism or in the culture medium surrounding said non-human organism.

[8028] Accordingly, the present invention relates to a process for the production of proline, which comprises
[8029] (a) increasing or generating the activity of a purine-nucleoside phosphorylase in the cytosol of a cell of a non-human organism or a part thereof, preferably a microorganism, a plant cell, a plant or a part thereof, as compared to a corresponding non-transformed wild type non-human organism or a part thereof; and
[8030] (b) growing the non-human organism or a part thereof under conditions which permit the production of proline or a composition comprising proline in said non-human organism or in the culture medium surrounding said non-human organism.

[8031] Accordingly, the present invention relates to a process for the production of arginine, which comprises
[8032] (a) increasing or generating the activity of a thioredoxin in the cytosol of a cell of a non-human organism or a part thereof, preferably a microorganism, a plant cell, a plant or a part thereof, as compared to a corresponding non-transformed wild type non-human organism or a part thereof; and
[8033] (b) growing the non-human organism or a part thereof under conditions which permit the production of arginine or a composition comprising arginine in said non-human organism or in the culture medium surrounding said non-human organism.

[8034] Accordingly, the present invention relates to a process for the production of proline, which comprises
[8035] (a) increasing or generating the activity of a GM02LC11114-protein in the cytosol of a cell of a non-human organism or a part thereof, preferably a microorganism, a plant cell, a plant or a part thereof, as compared to a corresponding non-transformed wild type non-human organism or a part thereof; and
[8036] (b) growing the non-human organism or a part thereof under conditions which permit the production of proline or a composition comprising proline in said non-human organism or in the culture medium surrounding said non-human organism.

[8037] Accordingly, the present invention relates to a process for the production of glutamine, which comprises
[8038] (a) increasing or generating the activity of a glutaredoxin in the cytosol of a cell of a non-human organism or a part thereof, preferably a microorganism, a plant cell, a plant or a part thereof, as compared to a corresponding non-transformed wild type non-human organism or a part thereof; and
[8039] (b) growing the non-human organism or a part thereof under conditions which permit the production of glutamine or a composition comprising glutamine in said non-human organism or in the culture medium surrounding said non-human organism.

[8040] Accordingly, the present invention relates to a process for the production of arginine, which comprises
[8041] (a) increasing or generating the activity of a histone H2A in the cytosol of a cell of a non-human organism or a part thereof, preferably a microorganism, a plant cell, a plant or a part thereof, as compared to a corresponding non-transformed wild type non-human organism or a part thereof; and
[8042] (b) growing the non-human organism or a part thereof under conditions which permit the production of arginine or a composition comprising arginine in said non-human organism or in the culture medium surrounding said non-human organism.

[8043] Accordingly, the present invention relates to a process for the production of proline, which comprises
[8044] (a) increasing or generating the activity of a histone H2A in the cytosol of a cell of a non-human organism or a part thereof, preferably a microorganism, a plant cell, a plant or a part thereof, as compared to a corresponding non-transformed wild type non-human organism or a part thereof; and
[8045] (b) growing the non-human organism or a part thereof under conditions which permit the production of proline or a composition comprising proline in said non-human organism or in the culture medium surrounding said non-human organism.

[8046] Accordingly, the present invention relates to a process for the production of glutamine, which comprises
[8047] (a) increasing or generating the activity of a GM02LC17485-protein in the cytosol of a cell of a non-human organism or a part thereof, preferably a microorganism, a plant cell, a plant or a part thereof, as compared to a corresponding non-transformed wild type non-human organism or a part thereof; and
[8048] (b) growing the non-human organism or a part thereof under conditions which permit the production of glutamine or a composition comprising glutamine in said non-human organism or in the culture medium surrounding said non-human organism.

[8049] Accordingly, the present invention relates to a process for the production of arginine, which comprises
[8050] (a) increasing or generating the activity of a RNA binding protein in the cytosol of a cell of a non-human organism or a part thereof, preferably a microorganism, a plant cell, a plant or a part thereof, as compared to a corresponding non-transformed wild type non-human organism or a part thereof; and
[8051] (b) growing the non-human organism or a part thereof under conditions which permit the production of arginine or a composition comprising arginine in said non-human organism or in the culture medium surrounding said non-human organism.

[8052] Accordingly, the present invention relates to a process for the production of proline, which comprises
[8053] (a) increasing or generating the activity of a transcription factor in the cytosol of a cell of a non-human organism or a part thereof, preferably a microorganism, a plant cell, a plant or a part thereof, as compared to a corresponding non-transformed wild type non-human organism or a part thereof; and
[8054] (b) growing the non-human organism or a part thereof under conditions which permit the production of proline or a composition comprising proline in said non-human organism or in the culture medium surrounding said non-human organism.

[8055] Accordingly, the present invention relates to a process for the production of proline, which comprises
[8056] (a) increasing or generating the activity of a cyclin D in the cytosol of a cell of a non-human organism or a part thereof, preferably a microorganism, a plant cell, a plant or a part thereof, as compared to a corresponding non-transformed wild type non-human organism or a part thereof; and
[8057] (b) growing the non-human organism or a part thereof under conditions which permit the production of proline or a composition comprising proline in said non-human organism or in the culture medium surrounding said non-human organism.

[8058] Accordingly, the present invention relates to a process for the production of proline, which comprises
[8059] (a) increasing or generating the activity of a GM02LC46-protein in the cytosol of a cell of a non-human organism or a part thereof, preferably a microorganism, a plant cell, a plant or a part thereof, as compared to a corresponding non-transformed wild type non-human organism or a part thereof; and
[8060] (b) growing the non-human organism or a part thereof under conditions which permit the production of proline or a composition comprising proline in said non-human organism or in the culture medium surrounding said non-human organism.

[8061] Accordingly, the present invention relates to a process for the production of proline, which comprises
[8062] (a) increasing or generating the activity of a GM02LC5744-protein in the cytosol of a cell of a non-human organism or a part thereof, preferably a microorganism, a plant cell, a plant or a part thereof, as compared to a corresponding non-transformed wild type non-human organism or a part thereof; and
[8063] (b) growing the non-human organism or a part thereof under conditions which permit the production of proline or a composition comprising proline in said non-human organism or in the culture medium surrounding said non-human organism.

[8064] Accordingly, the present invention relates to a process for the production of glutamate, which comprises
[8065] (a) increasing or generating the activity of a transcription factor in the cytosol of a cell of a non-human organism or a part thereof, preferably a microorganism, a plant cell, a plant or a part thereof, as compared to a corresponding non-transformed wild type non-human organism or a part thereof; and
[8066] (b) growing the non-human organism or a part thereof under conditions which permit the production of glutamate or a composition comprising glutamate in said non-human organism or in the culture medium surrounding said non-human organism.

[8067] Accordingly, the present invention relates to a process for the production of proline, which comprises
[8068] (a) increasing or generating the activity of a glutaredoxin in the cytosol of a cell of a non-human organism or a part thereof, preferably a microorganism, a plant cell, a plant or a part thereof, as compared to a corresponding non-transformed wild type non-human organism or a part thereof; and
[8069] (b) growing the non-human organism or a part thereof under conditions which permit the production of proline or a composition comprising proline in said non-human organism or in the culture medium surrounding said non-human organism.

[8070] Accordingly, the present invention relates to a process for the production of arginine, which comprises
[8071] (a) increasing or generating the activity of a s_pp015018333r-protein in the cytosol of a cell of a non-human organism or a part thereof, preferably a microorganism, a plant cell, a plant or a part thereof, as compared to a corresponding non-transformed wild type non-human organism or a part thereof; and
[8072] (b) growing the non-human organism or a part thereof under conditions which permit the production of arginine or a composition comprising arginine in said non-human organism or in the culture medium surrounding said non-human organism.

[8073] Accordingly, the present invention relates to a process for the production of glutamine, which comprises
[8074] (a) increasing or generating the activity of a s_pp015018333r-protein in the cytosol of a cell of a non-human organism or a part thereof, preferably a microorganism, a plant cell, a plant or a part thereof, as compared to a corresponding non-transformed wild type non-human organism or a part thereof; and
[8075] (b) growing the non-human organism or a part thereof under conditions which permit the production of glutamine or a composition comprising glutamine in said non-human organism or in the culture medium surrounding said non-human organism.

[8076] Accordingly, the present invention relates to a process for the production of proline, which comprises
[8077] (a) increasing or generating the activity of a sll0064-protein in the cytosol of a cell of a non-human organism or a part thereof, preferably a microorganism, a plant cell, a plant or a part thereof, as compared to a corresponding non-transformed wild type non-human organism or a part thereof; and
[8078] (b) growing the non-human organism or a part thereof under conditions which permit the production of proline or a composition comprising proline in said non-human organism or in the culture medium surrounding said non-human organism.

[8079] Accordingly, the present invention relates to a process for the production of glutamate, which comprises
[8080] (a) increasing or generating the activity of a N-acetyl-gamma-glutamyl-phosphate reductase in the cytosol of a cell of a non-human organism or a part thereof, preferably a microorganism, a plant cell, a plant or a part thereof, as compared to a corresponding non-transformed wild type non-human organism or a part thereof; and
[8081] (b) growing the non-human organism or a part thereof under conditions which permit the production of glutamate or a composition comprising glutamate in said non-human organism or in the culture medium surrounding said non-human organism.

[8082] Accordingly, the present invention relates to a process for the production of glutamate, which comprises
[8083] (a) increasing or generating the activity of a heat shock protein in the cytosol of a cell of a non-human organism or a part thereof, preferably a microorganism, a plant cell, a plant or a part thereof, as compared to a corresponding non-transformed wild type non-human organism or a part thereof; and
[8084] (b) growing the non-human organism or a part thereof under conditions which permit the production of glutamate or a composition comprising glutamate in said non-human organism or in the culture medium surrounding said non-human organism.

[8085] Accordingly, the present invention relates to a process for the production of arginine, which comprises
[8086] (a) increasing or generating the activity of a flavodoxin in the cytosol of a cell of a non-human organism or a part thereof, preferably a microorganism, a plant cell, a plant or a part thereof, as compared to a corresponding non-transformed wild type non-human organism or a part thereof; and
[8087] (b) growing the non-human organism or a part thereof under conditions which permit the production of arginine or a composition comprising arginine in said non-human organism or in the culture medium surrounding said non-human organism.

[8088] Accordingly, the present invention relates to a process for the production of proline, which comprises
[8089] (a) increasing or generating the activity of a phosphopantothenoylcysteinesynthetase/decarboxylase in the cytosol of a cell of a non-human organism or a part thereof, preferably a microorganism, a plant cell, a plant or a part thereof, as compared to a corresponding non-transformed wild type non-human organism or a part thereof; and
[8090] (b) growing the non-human organism or a part thereof under conditions which permit the production of proline or a composition comprising proline in said non-human organism or in the culture medium surrounding said non-human organism.

[8091] Accordingly, the present invention relates to a process for the production of glutamine, which comprises
[8092] (a) increasing or generating the activity of a sll0254-protein in the cytosol of a cell of a non-human organism or a part thereof, preferably a microorganism, a plant cell, a plant or a part thereof, as compared to a corresponding non-transformed wild type non-human organism or a part thereof; and
[8093] (b) growing the non-human organism or a part thereof under conditions which permit the production of glutamine or a composition comprising glutamine in said non-human organism or in the culture medium surrounding said non-human organism.

[8094] Accordingly, the present invention relates to a process for the production of proline, which comprises
[8095] (a) increasing or generating the activity of a sll0254-protein in the cytosol of a cell of a non-human organism or a part thereof, preferably a microorganism, a plant cell, a plant or a part thereof, as compared to a corresponding non-transformed wild type non-human organism or a part thereof; and
[8096] (b) growing the non-human organism or a part thereof under conditions which permit the production of proline or a composition comprising proline in said non-human organism or in the culture medium surrounding said non-human organism.

[8097] Accordingly, the present invention relates to a process for the production of proline, which comprises
[8098] (a) increasing or generating the activity of a polyphosphate kinase in the cytosol of a cell of a non-human organism or a part thereof, preferably a microorganism, a plant cell, a plant or a part thereof, as compared to a corresponding non-transformed wild type non-human organism or a part thereof; and
[8099] (b) growing the non-human organism or a part thereof under conditions which permit the production of proline or a composition comprising proline in said non-human organism or in the culture medium surrounding said non-human organism.

[8100] Accordingly, the present invention relates to a process for the production of proline, which comprises
[8101] (a) increasing or generating the activity of a sll0354-protein in the cytosol of a cell of a non-human organism or a part thereof, preferably a microorganism, a plant cell, a plant or a part thereof, as compared to a corresponding non-transformed wild type non-human organism or a part thereof; and
[8102] (b) growing the non-human organism or a part thereof under conditions which permit the production of proline or a composition comprising proline in said non-human organism or in the culture medium surrounding said non-human organism.

[8103] Accordingly, the present invention relates to a process for the production of proline, which comprises
[8104] (a) increasing or generating the activity of a urease subunit in the cytosol of a cell of a non-human organism or a part thereof, preferably a microorganism, a plant cell, a plant or a part thereof, as compared to a corresponding non-transformed wild type non-human organism or a part thereof; and
[8105] (b) growing the non-human organism or a part thereof under conditions which permit the production of proline or a composition comprising proline in said non-human organism or in the culture medium surrounding said non-human organism.

[8106] Accordingly, the present invention relates to a process for the production of arginine, which comprises
[8107] (a) increasing or generating the activity of a NAD(P)H-quinone oxidoreductase subunit in the cytosol of a cell of a non-human organism or a part thereof, preferably a microorganism, a plant cell, a plant or a part thereof, as compared to a corresponding non-transformed wild type non-human organism or a part thereof; and
[8108] (b) growing the non-human organism or a part thereof under conditions which permit the production of arginine or a composition comprising arginine in said non-human organism or in the culture medium surrounding said non-human organism.

[8109] Accordingly, the present invention relates to a process for the production of proline, which comprises
[8110] (a) increasing or generating the activity of a quinolinate synthetase in the cytosol of a cell of a non-human organism or a part thereof, preferably a microorganism, a plant cell, a plant or a part thereof, as compared to a corresponding non-transformed wild type non-human organism or a part thereof; and
[8111] (b) growing the non-human organism or a part thereof under conditions which permit the production of proline or a composition comprising proline in said non-human organism or in the culture medium surrounding said non-human organism.

[8112] Accordingly, the present invention relates to a process for the production of glutamate, which comprises
[8113] (a) increasing or generating the activity of a permease protein of phosphate ABC transporter in the cytosol of a cell of a non-human organism or a part thereof, preferably a microorganism, a plant cell, a plant or a part thereof, as compared to a corresponding non-transformed wild type non-human organism or a part thereof; and
[8114] (b) growing the non-human organism or a part thereof under conditions which permit the production of glutamate or a composition comprising glutamate in said non-human organism or in the culture medium surrounding said non-human organism.

[8115] Accordingly, the present invention relates to a process for the production of proline, which comprises
[8116] (a) increasing or generating the activity of a permease protein of phosphate ABC transporter in the cytosol of a cell of a non-human organism or a part thereof, preferably a microorganism, a plant cell, a plant or a part thereof, as compared to a corresponding non-transformed wild type non-human organism or a part thereof; and
[8117] (b) growing the non-human organism or a part thereof under conditions which permit the production of proline or a composition comprising proline in said non-human organism or in the culture medium surrounding said non-human organism.

[8118] Accordingly, the present invention relates to a process for the production of arginine, which comprises
[8119] (a) increasing or generating the activity of a oxireductase in the cytosol of a cell of a non-human organism or a part thereof, preferably a microorganism, a plant cell, a plant or a part thereof, as compared to a corresponding non-transformed wild type non-human organism or a part thereof; and
[8120] (b) growing the non-human organism or a part thereof under conditions which permit the production of arginine or a composition comprising arginine in said non-human organism or in the culture medium surrounding said non-human organism.

[8121] Accordingly, the present invention relates to a process for the production of glutamate, which comprises
[8122] (a) increasing or generating the activity of a oxireductase in the cytosol of a cell of a non-human organism or a part thereof, preferably a microorganism, a plant cell, a plant or a part thereof, as compared to a corresponding non-transformed wild type non-human organism or a part thereof; and
[8123] (b) growing the non-human organism or a part thereof under conditions which permit the production of glutamate or a composition comprising glutamate in said non-human organism or in the culture medium surrounding said non-human organism.

[8124] Accordingly, the present invention relates to a process for the production of glutamine, which comprises
[8125] (a) increasing or generating the activity of a oxireductase in the cytosol of a cell of a non-human organism or a part thereof, preferably a microorganism, a plant cell, a plant or a part thereof, as compared to a corresponding non-transformed wild type non-human organism or a part thereof; and
[8126] (b) growing the non-human organism or a part thereof under conditions which permit the production of glutamine or a composition comprising glutamine in said non-human organism or in the culture medium surrounding said non-human organism.

[8127] Accordingly, the present invention relates to a process for the production of arginine, which comprises
[8128] (a) increasing or generating the activity of a malate dehydrogenase in the cytosol of a cell of a non-human organism or a part thereof, preferably a microorganism, a plant cell, a plant or a part thereof, as compared to a corresponding non-transformed wild type non-human organism or a part thereof; and
[8129] (b) growing the non-human organism or a part thereof under conditions which permit the production of arginine or a composition comprising arginine in said non-human organism or in the culture medium surrounding said non-human organism.

[8130] Accordingly, the present invention relates to a process for the production of glutamine, which comprises
[8131] (a) increasing or generating the activity of a malate dehydrogenase in the cytosol of a cell of a non-human organism or a part thereof, preferably a microorganism, a plant cell, a plant or a part thereof, as compared to a corresponding non-transformed wild type non-human organism or a part thereof; and
[8132] (b) growing the non-human organism or a part thereof under conditions which permit the production of glutamine or a composition comprising glutamine in said non-human organism or in the culture medium surrounding said non-human organism.

[8133] Accordingly, the present invention relates to a process for the production of proline, which comprises
[8134] (a) increasing or generating the activity of a malate dehydrogenase in the cytosol of a cell of a non-human organism or a part thereof, preferably a microorganism, a plant cell, a plant or a part thereof, as compared to a corresponding non-transformed wild type non-human organism or a part thereof; and
[8135] (b) growing the non-human organism or a part thereof under conditions which permit the production of proline or a composition comprising proline in said non-human organism or in the culture medium surrounding said non-human organism.

[8136] Accordingly, the present invention relates to a process for the production of proline, which comprises
[8137] (a) increasing or generating the activity of a phosphoribosylaminoimidazole carboxylase catalytic subunit in the cytosol of a cell of a non-human organism or a part thereof, preferably a microorganism, a plant cell, a plant or a part thereof, as compared to a corresponding non-transformed wild type non-human organism or a part thereof; and
[8138] (b) growing the non-human organism or a part thereof under conditions which permit the production of proline or a composition comprising proline in said non-human organism or in the culture medium surrounding said non-human organism.

[8139] Accordingly, the present invention relates to a process for the production of glutamine, which comprises
[8140] (a) increasing or generating the activity of a 3-deoxy-7-phosphoheptulonate synthase in the cytosol of a cell of a non-human organism or a part thereof, preferably a microorganism, a plant cell, a plant or a part thereof, as compared to a corresponding non-transformed wild type non-human organism or a part thereof; and
[8141] (b) growing the non-human organism or a part thereof under conditions which permit the production of glutamine or a composition comprising glutamine in said non-human organism or in the culture medium surrounding said non-human organism.

[8142] Accordingly, the present invention relates to a process for the production of proline, which comprises
[8143] (a) increasing or generating the activity of a glycogen synthase in the cytosol of a cell of a non-human organism or a part thereof, preferably a microorganism, a plant cell, a plant or a part thereof, as compared to a corresponding non-transformed wild type non-human organism or a part thereof; and
[8144] (b) growing the non-human organism or a part thereof under conditions which permit the production of proline or a composition comprising proline in said non-human organism or in the culture medium surrounding said non-human organism.

[8145] Accordingly, the present invention relates to a process for the production of glutamate, which comprises
[8146] (a) increasing or generating the activity of a carbon dioxide concentrating mechanism protein in the cytosol of a cell of a non-human organism or a part thereof, preferably a microorganism, a plant cell, a plant or a part thereof, as compared to a corresponding non-transformed wild type non-human organism or a part thereof; and
[8147] (b) growing the non-human organism or a part thereof under conditions which permit the production of glutamate or a composition comprising glutamate in said non-human organism or in the culture medium surrounding said non-human organism.

[8148] Accordingly, the present invention relates to a process for the production of glutamine, which comprises
[8149] (a) increasing or generating the activity of a carbon dioxide concentrating mechanism protein in the cytosol of a cell of a non-human organism or a part thereof, preferably a microorganism, a plant cell, a plant or a part thereof, as compared to a corresponding non-transformed wild type non-human organism or a part thereof; and
[8150] (b) growing the non-human organism or a part thereof under conditions which permit the production of glutamine or a composition comprising glutamine in said non-human organism or in the culture medium surrounding said non-human organism.

[8151] Accordingly, the present invention relates to a process for the production of proline, which comprises
[8152] (a) increasing or generating the activity of a carbon dioxide concentrating mechanism protein in the cytosol of a cell of a non-human organism or a part thereof, preferably a microorganism, a plant cell, a plant or a part thereof, as compared to a corresponding non-transformed wild type non-human organism or a part thereof; and
[8153] (b) growing the non-human organism or a part thereof under conditions which permit the production of proline or a composition comprising proline in said non-human organism or in the culture medium surrounding said non-human organism.

[8154] Accordingly, the present invention relates to a process for the production of proline, which comprises
[8155] (a) increasing or generating the activity of a phosphoribosylformyl glycinamidine synthase subunit in the cytosol of a cell of a non-human organism or a part thereof, preferably a microorganism, a plant cell, a plant or a part thereof, as compared to a corresponding non-transformed wild type non-human organism or a part thereof; and
[8156] (b) growing the non-human organism or a part thereof under conditions which permit the production of proline or a composition comprising proline in said non-human organism or in the culture medium surrounding said non-human organism.

[8157] Accordingly, the present invention relates to a process for the production of glutamate, which comprises
[8158] (a) increasing or generating the activity of a coproporphyrinogen oxidase in the cytosol of a cell of a non-human organism or a part thereof, preferably a microorganism, a plant cell, a plant or a part thereof, as compared to a corresponding non-transformed wild type non-human organism or a part thereof; and
[8159] (b) growing the non-human organism or a part thereof under conditions which permit the production of glutamate or a composition comprising glutamate in said non-human organism or in the culture medium surrounding said non-human organism.

[8160] Accordingly, the present invention relates to a process for the production of glutamine, which comprises
[8161] (a) increasing or generating the activity of a glycogen (starch) synthase in the cytosol of a cell of a non-human organism or a part thereof, preferably a microorganism, a plant cell, a plant or a part thereof, as compared to a corresponding non-transformed wild type non-human organism or a part thereof; and
[8162] (b) growing the non-human organism or a part thereof under conditions which permit the production of glutamine or a composition comprising glutamine in said non-human organism or in the culture medium surrounding said non-human organism.

[8163] Accordingly, the present invention relates to a process for the production of proline, which comprises
[8164] (a) increasing or generating the activity of a glycogen (starch) synthase in the cytosol of a cell of a non-human organism or a part thereof, preferably a microorganism, a plant cell, a plant or a part thereof, as compared to a corresponding non-transformed wild type non-human organism or a part thereof; and
[8165] (b) growing the non-human organism or a part thereof under conditions which permit the production of proline or a composition comprising proline in said non-human organism or in the culture medium surrounding said non-human organism.

[8166] Accordingly, the present invention relates to a process for the production of glutamine, which comprises
[8167] (a) increasing or generating the activity of a fatty acid desaturase in the cytosol of a cell of a non-human organism or a part thereof, preferably a microorganism, a plant cell, a plant or a part thereof, as compared to a corresponding non-transformed wild type non-human organism or a part thereof; and
[8168] (b) growing the non-human organism or a part thereof under conditions which permit the production of glutamine or a composition comprising glutamine in said non-human organism or in the culture medium surrounding said non-human organism.

[8169] Accordingly, the present invention relates to a process for the production of glutamate, which comprises
[8170] (a) increasing or generating the activity of a CTP synthetase in the cytosol of a cell of a non-human organism or a part thereof, preferably a microorganism, a plant cell, a plant or a part thereof, as compared to a corresponding non-transformed wild type non-human organism or a part thereof; and
[8171] (b) growing the non-human organism or a part thereof under conditions which permit the production of glutamate or a composition comprising glutamate in said non-human organism or in the culture medium surrounding said non-human organism.

[8172] Accordingly, the present invention relates to a process for the production of glutamate, which comprises
[8173] (a) increasing or generating the activity of a nitrate/nitrite transport protein in the cytosol of a cell of a non-human organism or a part thereof, preferably a microorganism, a plant cell, a plant or a part thereof, as compared to a corresponding non-transformed wild type non-human organism or a part thereof; and
[8174] (b) growing the non-human organism or a part thereof under conditions which permit the production of glutamate or a composition comprising glutamate in said non-human organism or in the culture medium surrounding said non-human organism.

[8175] Accordingly, the present invention relates to a process for the production of glutamate, which comprises
[8176] (a) increasing or generating the activity of a CDP-diacylglycerol-glycerol-3-phosphate 3-phosphatidyltransferase in the cytosol of a cell of a non-human organism or a part thereof, preferably a microorganism, a plant cell, a plant or a part thereof, as compared to a corresponding non-transformed wild type non-human organism or a part thereof; and
[8177] (b) growing the non-human organism or a part thereof under conditions which permit the production of glutamate or a composition comprising glutamate in said non-human organism or in the culture medium surrounding said non-human organism.

[8178] Accordingly, the present invention relates to a process for the production of arginine, which comprises
[8179] (a) increasing or generating the activity of a glutathione S-transferase in the cytosol of a cell of a non-human organism or a part thereof, preferably a microorganism, a plant cell, a plant or a part thereof, as compared to a corresponding non-transformed wild type non-human organism or a part thereof; and
[8180] (b) growing the non-human organism or a part thereof under conditions which permit the production of arginine or a composition comprising arginine in said non-human organism or in the culture medium surrounding said non-human organism.

[8181] Accordingly, the present invention relates to a process for the production of glutamine, which comprises
[8182] (a) increasing or generating the activity of a glutathione S-transferase in the cytosol of a cell of a non-human organism or a part thereof, preferably a microorganism, a plant cell, a plant or a part thereof, as compared to a corresponding non-transformed wild type non-human organism or a part thereof; and
[8183] (b) growing the non-human organism or a part thereof under conditions which permit the production of glutamine or a composition comprising glutamine in said non-human organism or in the culture medium surrounding said non-human organism.

[8184] Accordingly, the present invention relates to a process for the production of proline, which comprises
[8185] (a) increasing or generating the activity of a glutathione S-transferase in the cytosol of a cell of a non-human organism or a part thereof, preferably a microorganism, a plant cell, a plant or a part thereof, as compared to a corresponding non-transformed wild type non-human organism or a part thereof; and
[8186] (b) growing the non-human organism or a part thereof under conditions which permit the production of proline or a composition comprising proline in said non-human organism or in the culture medium surrounding said non-human organism.

[8187] Accordingly, the present invention relates to a process for the production of arginine, which comprises
[8188] (a) increasing or generating the activity of a exopolyphosphatase in the cytosol of a cell of a non-human organism or a part thereof, preferably a microorganism, a plant cell, a plant or a part thereof, as compared to a corresponding non-transformed wild type non-human organism or a part thereof; and
[8189] (b) growing the non-human organism or a part thereof under conditions which permit the production of arginine or a composition comprising arginine in said non-human organism or in the culture medium surrounding said non-human organism.

[8190] Accordingly, the present invention relates to a process for the production of proline, which comprises
[8191] (a) increasing or generating the activity of a 4-alpha-glucanotransferase in the cytosol of a cell of a non-human organism or a part thereof, preferably a microorganism, a plant cell, a plant or a part thereof, as compared to a corresponding non-transformed wild type non-human organism or a part thereof; and
[8192] (b) growing the non-human organism or a part thereof under conditions which permit the production of proline or a composition comprising proline in said non-human organism or in the culture medium surrounding said non-human organism.

[8193] Accordingly, the present invention relates to a process for the production of proline, which comprises
[8194] (a) increasing or generating the activity of a alanine dehydrogenase in the cytosol of a cell of a non-human organism or a part thereof, preferably a microorganism, a plant cell, a plant or a part thereof, as compared to a corresponding non-transformed wild type non-human organism or a part thereof; and
[8195] (b) growing the non-human organism or a part thereof under conditions which permit the production of proline or a composition comprising proline in said non-human organism or in the culture medium surrounding said non-human organism.

[8196] Accordingly, the present invention relates to a process for the production of arginine, which comprises
[8197] (a) increasing or generating the activity of a sll1761-protein in the cytosol of a cell of a non-human organism or a part thereof, preferably a microorganism, a plant cell, a plant or a part thereof, as compared to a corresponding non-transformed wild type non-human organism or a part thereof; and
[8198] (b) growing the non-human organism or a part thereof under conditions which permit the production of arginine or a composition comprising arginine in said non-human organism or in the culture medium surrounding said non-human organism.

[8199] Accordingly, the present invention relates to a process for the production of proline, which comprises
[8200] (a) increasing or generating the activity of a sll1761-protein in the cytosol of a cell of a non-human organism or a part thereof, preferably a microorganism, a plant cell, a plant or a part thereof, as compared to a corresponding non-transformed wild type non-human organism or a part thereof; and
[8201] (b) growing the non-human organism or a part thereof under conditions which permit the production of proline or a composition comprising proline in said non-human organism or in the culture medium surrounding said non-human organism.

[8202] Accordingly, the present invention relates to a process for the production of glutamate, which comprises
[8203] (a) increasing or generating the activity of a coproporphyrinogen III oxidase in the cytosol of a cell of a non-human organism or a part thereof, preferably a microorganism, a plant cell, a plant or a part thereof, as compared to a corresponding non-transformed wild type non-human organism or a part thereof; and
[8204] (b) growing the non-human organism or a part thereof under conditions which permit the production of glutamate or a composition comprising glutamate in said non-human organism or in the culture medium surrounding said non-human organism.

[8205] Accordingly, the present invention relates to a process for the production of glutamine, which comprises
[8206] (a) increasing or generating the activity of a coproporphyrinogen III oxidase in the cytosol of a cell of a non-human organism or a part thereof, preferably a microorganism, a plant cell, a plant or a part thereof, as compared to a corresponding non-transformed wild type non-human organism or a part thereof; and
[8207] (b) growing the non-human organism or a part thereof under conditions which permit the production of glutamine or a composition comprising glutamine in said non-human organism or in the culture medium surrounding said non-human organism.

[8208] Accordingly, the present invention relates to a process for the production of proline, which comprises
[8209] (a) increasing or generating the activity of a coproporphyrinogen Ill oxidase in the cytosol of a cell of a non-human organism or a part thereof, preferably a microorganism, a plant cell, a plant or a part thereof, as compared to a corresponding non-transformed wild type non-human organism or a part thereof; and
[8210] (b) growing the non-human organism or a part thereof under conditions which permit the production of proline or a composition comprising proline in said non-human organism or in the culture medium surrounding said non-human organism.

[8211] Accordingly, the present invention relates to a process for the production of glutamate, which comprises
[8212] (a) increasing or generating the activity of a cation-transporting ATPase in the cytosol of a cell of a non-human organism or a part thereof, preferably a microorganism, a plant cell, a plant or a part thereof, as compared to a corresponding non-transformed wild type non-human organism or a part thereof; and
[8213] (b) growing the non-human organism or a part thereof under conditions which permit the production of glutamate or a composition comprising glutamate in said non-human organism or in the culture medium surrounding said non-human organism.

[8214] Accordingly, the present invention relates to a process for the production of glutamine, which comprises
[8215] (a) increasing or generating the activity of a cation-transporting ATPase in the cytosol of a cell of a non-human organism or a part thereof, preferably a microorganism, a plant cell, a plant or a part thereof, as compared to a corresponding non-transformed wild type non-human organism or a part thereof; and
[8216] (b) growing the non-human organism or a part thereof under conditions which permit the production of glutamine or a composition comprising glutamine in said non-human organism or in the culture medium surrounding said non-human organism.

[8217] Accordingly, the present invention relates to a process for the production of arginine, which comprises
[8218] (a) increasing or generating the activity of a glycosidase in the cytosol of a cell of a non-human organism or a part thereof, preferably a microorganism, a plant cell, a plant or a part thereof, as compared to a corresponding non-transformed wild type non-human organism or a part thereof; and
[8219] (b) growing the non-human organism or a part thereof under conditions which permit the production of arginine or a composition comprising arginine in said non-human organism or in the culture medium surrounding said non-human organism.

[8220] Accordingly, the present invention relates to a process for the production of glutamine, which comprises
[8221] (a) increasing or generating the activity of a glycosidase in the cytosol of a cell of a non-human organism or a part thereof, preferably a microorganism, a plant cell, a plant or a part thereof, as compared to a corresponding non-transformed wild type non-human organism or a part thereof; and
[8222] (b) growing the non-human organism or a part thereof under conditions which permit the production of glutamine or a composition comprising glutamine in said non-human organism or in the culture medium surrounding said non-human organism.

[8223] Accordingly, the present invention relates to a process for the production of proline, which comprises
[8224] (a) increasing or generating the activity of a phosphoribosylglycinamide formyltransferase in the cytosol of a cell of a non-human organism or a part thereof, preferably a microorganism, a plant cell, a plant or a part thereof, as compared to a corresponding non-transformed wild type non-human organism or a part thereof; and
[8225] (b) growing the non-human organism or a part thereof under conditions which permit the production of proline or a composition comprising proline in said non-human organism or in the culture medium surrounding said non-human organism.

[8226] Accordingly, the present invention relates to a process for the production of glutamate, which comprises
[8227] (a) increasing or generating the activity of a bifunctional purine biosynthesis protein in the cytosol of a cell of a non-human organism or a part thereof, preferably a microorganism, a plant cell, a plant or a part thereof, as compared to a corresponding non-transformed wild type non-human organism or a part thereof; and
[8228] (b) growing the non-human organism or a part thereof under conditions which permit the production of glutamate or a composition comprising glutamate in said non-human organism or in the culture medium surrounding said non-human organism.

[8229] Accordingly, the present invention relates to a process for the production of proline, which comprises
[8230] (a) increasing or generating the activity of a slr0600-protein in the cytosol of a cell of a non-human organism or a part thereof, preferably a microorganism, a plant cell, a plant or a part thereof, as compared to a corresponding non-transformed wild type non-human organism or a part thereof; and
[8231] (b) growing the non-human organism or a part thereof under conditions which permit the production of proline or a composition comprising proline in said non-human organism or in the culture medium surrounding said non-human organism.

[8232] Accordingly, the present invention relates to a process for the production of proline, which comprises
[8233] (a) increasing or generating the activity of a pyrroline carboxylate reductase in the cytosol of a cell of a non-human organism or a part thereof, preferably a microorganism, a plant cell, a plant or a part thereof, as compared to a corresponding non-transformed wild type non-human organism or a part thereof; and
[8234] (b) growing the non-human organism or a part thereof under conditions which permit the production of proline or a composition comprising proline in said non-human organism or in the culture medium surrounding said non-human organism.

[8235] Accordingly, the present invention relates to a process for the production of arginine, which comprises
[8236] (a) increasing or generating the activity of a Glu/Leu/PheNal dehydrogenase in the cytosol of a cell of a non-human organism or a part thereof, preferably a microorganism, a plant cell, a plant or a part thereof, as compared to a corresponding non-transformed wild type non-human organism or a part thereof; and
[8237] (b) growing the non-human organism or a part thereof under conditions which permit the production of arginine or a composition comprising arginine in said non-human organism or in the culture medium surrounding said non-human organism.

[8238] Accordingly, the present invention relates to a process for the production of arginine, which comprises
[8239] (a) increasing or generating the activity of a geranylgeranyl pyrophosphate synthase in the cytosol of a cell of a non-human organism or a part thereof, preferably a microorganism, a plant cell, a plant or a part thereof, as compared to a corresponding non-transformed wild type non-human organism or a part thereof; and
[8240] (b) growing the non-human organism or a part thereof under conditions which permit the production of arginine or a composition comprising arginine in said non-human organism or in the culture medium surrounding said non-human organism.

[8241] Accordingly, the present invention relates to a process for the production of glutamine, which comprises
[8242] (a) increasing or generating the activity of a geranylgeranyl pyrophosphate synthase in the cytosol of a cell of a non-human organism or a part thereof, preferably a microorganism, a plant cell, a plant or a part thereof, as compared to a corresponding non-transformed wild type non-human organism or a part thereof; and
[8243] (b) growing the non-human organism or a part thereof under conditions which permit the production of glutamine or a composition comprising glutamine in said non-human organism or in the culture medium surrounding said non-human organism.

[8244] Accordingly, the present invention relates to a process for the production of proline, which comprises
[8245] (a) increasing or generating the activity of a geranylgeranyl pyrophosphate synthase in the cytosol of a cell of a non-human organism or a part thereof, preferably a microorganism, a plant cell, a plant or a part thereof, as compared to a corresponding non-transformed wild type non-human organism or a part thereof; and
[8246] (b) growing the non-human organism or a part thereof under conditions which permit the production of proline or a composition comprising proline in said non-human organism or in the culture medium surrounding said non-human organism.

[8247] Accordingly, the present invention relates to a process for the production of arginine, which comprises
[8248] (a) increasing or generating the activity of a circadian clock protein in the cytosol of a cell of a non-human organism or a part thereof, preferably a microorganism, a plant cell, a plant or a part thereof, as compared to a corresponding non-transformed wild type non-human organism or a part thereof; and
[8249] (b) growing the non-human organism or a part thereof under conditions which permit the production of arginine or a composition comprising arginine in said non-human organism or in the culture medium surrounding said non-human organism.

[8250] Accordingly, the present invention relates to a process for the production of proline, which comprises
[8251] (a) increasing or generating the activity of a circadian clock protein in the cytosol of a cell of a non-human organism or a part thereof, preferably a microorganism, a plant cell, a plant or a part thereof, as compared to a corresponding non-transformed wild type non-human organism or a part thereof; and
[8252] (b) growing the non-human organism or a part thereof under conditions which permit the production of proline or a composition comprising proline in said non-human organism or in the culture medium surrounding said non-human organism.

[8253] Accordingly, the present invention relates to a process for the production of proline, which comprises
[8254] (a) increasing or generating the activity of a amine oxidase in the cytosol of a cell of a non-human organism or a part thereof, preferably a microorganism, a plant cell, a plant or a part thereof, as compared to a corresponding non-transformed wild type non-human organism or a part thereof; and
[8255] (b) growing the non-human organism or a part thereof under conditions which permit the production of proline or a composition comprising proline in said non-human organism or in the culture medium surrounding said non-human organism.

[8256] Accordingly, the present invention relates to a process for the production of glutamate, which comprises
[8257] (a) increasing or generating the activity of a dihydrolipoamide dehydrogenase in the cytosol of a cell of a non-human organism or a part thereof, preferably a microorganism, a plant cell, a plant or a part thereof, as compared to a corresponding non-transformed wild type non-human organism or a part thereof; and
[8258] (b) growing the non-human organism or a part thereof under conditions which permit the production of glutamate or a composition comprising glutamate in said non-human organism or in the culture medium surrounding said non-human organism.

[8259] Accordingly, the present invention relates to a process for the production of arginine, which comprises
[8260] (a) increasing or generating the activity of a gamma-glutamyltranspeptidase in the cytosol of a cell of a non-human organism or a part thereof, preferably a microorganism, a plant cell, a plant or a part thereof, as compared to a corresponding non-transformed wild type non-human organism or a part thereof; and
[8261] (b) growing the non-human organism or a part thereof under conditions which permit the production of arginine or a composition comprising arginine in said non-human organism or in the culture medium surrounding said non-human organism.

[8262] Accordingly, the present invention relates to a process for the production of glutamate, which comprises
[8263] (a) increasing or generating the activity of a gamma-glutamyltranspeptidase in the cytosol of a cell of a non-human organism or a part thereof, preferably a microorganism, a plant cell, a plant or a part thereof, as compared to a corresponding non-transformed wild type non-human organism or a part thereof; and
[8264] (b) growing the non-human organism or a part thereof under conditions which permit the production of glutamate or a composition comprising glutamate in said non-human organism or in the culture medium surrounding said non-human organism.

[8265] Accordingly, the present invention relates to a process for the production of arginine, which comprises
[8266] (a) increasing or generating the activity of a arginine decarboxylase in the cytosol of a cell of a non-human organism or a part thereof, preferably a microorganism, a plant cell, a plant or a part thereof, as compared to a corresponding non-transformed wild type non-human organism or a part thereof; and
[8267] (b) growing the non-human organism or a part thereof under conditions which permit the production of arginine or a composition comprising arginine in said non-human organism or in the culture medium surrounding said non-human organism.

[8268] Accordingly, the present invention relates to a process for the production of glutamate, which comprises
[8269] (a) increasing or generating the activity of a CDP-diglyceride synthetase in the cytosol of a cell of a non-human organism or a part thereof, preferably a microorganism, a plant cell, a plant or a part thereof, as compared to a corresponding non-transformed wild type non-human organism or a part thereof; and
[8270] (b) growing the non-human organism or a part thereof under conditions which permit the production of glutamate or a composition comprising glutamate in said non-human organism or in the culture medium surrounding said non-human organism.

[8271] Accordingly, the present invention relates to a process for the production of glutamate, which comprises
[8272] (a) increasing or generating the activity of a carbohydrate kinase in the cytosol of a cell of a non-human organism or a part thereof, preferably a microorganism, a plant cell, a plant or a part thereof, as compared to a corresponding non-transformed wild type non-human organism or a part thereof; and
[8273] (b) growing the non-human organism or a part thereof under conditions which permit the production of glutamate or a composition comprising glutamate in said non-human organism or in the culture medium surrounding said non-human organism.

[8274] Accordingly, the present invention relates to a process for the production of glutamine, which comprises
[8275] (a) increasing or generating the activity of a iron(III) dicitrate-binding protein in the cytosol of a cell of a non-human organism or a part thereof, preferably a microorganism, a plant cell, a plant or a part thereof, as compared to a corresponding non-transformed wild type non-human organism or a part thereof; and
[8276] (b) growing the non-human organism or a part thereof under conditions which permit the production of glutamine or a composition comprising glutamine in said non-human organism or in the culture medium surrounding said non-human organism.

[8277] Accordingly, the present invention relates to a process for the production of proline, which comprises
[8278] (a) increasing or generating the activity of a Photosystem I reaction center subunit XI in the cytosol of a cell of a non-human organism or a part thereof, preferably a microorganism, a plant cell, a plant or a part thereof, as compared to a corresponding non-transformed wild type non-human organism or a part thereof; and
[8279] (b) growing the non-human organism or a part thereof under conditions which permit the production of proline or a composition comprising proline in said non-human organism or in the culture medium surrounding said non-human organism.

[8280] Accordingly, the present invention relates to a process for the production of arginine, which comprises
[8281] (a) increasing or generating the activity of a photosystem II protein in the cytosol of a cell of a non-human organism or a part thereof, preferably a microorganism, a plant cell, a plant or a part thereof, as compared to a corresponding non-transformed wild type non-human organism or a part thereof; and
[8282] (b) growing the non-human organism or a part thereof under conditions which permit the production of arginine or a composition comprising arginine in said non-human organism or in the culture medium surrounding said non-human organism.

[8283] Accordingly, the present invention relates to a process for the production of glutamine, which comprises
[8284] (a) increasing or generating the activity of a photosystem II protein in the cytosol of a cell of a non-human organism or a part thereof, preferably a microorganism, a plant cell, a plant or a part thereof, as compared to a corresponding non-transformed wild type non-human organism or a part thereof; and
[8285] (b) growing the non-human organism or a part thereof under conditions which permit the production of glutamine or a composition comprising glutamine in said non-human organism or in the culture medium surrounding said non-human organism.

[8286] Accordingly, the present invention relates to a process for the production of proline, which comprises
[8287] (a) increasing or generating the activity of a glutamine amidotransferase in the cytosol of a cell of a non-human organism or a part thereof, preferably a microorganism, a plant cell, a plant or a part thereof, as compared to a corresponding non-transformed wild type non-human organism or a part thereof; and
[8288] (b) growing the non-human organism or a part thereof under conditions which permit the production of proline or a composition comprising proline in said non-human organism or in the culture medium surrounding said non-human organism.

[8289] Accordingly, the present invention relates to a process for the production of glutamate, which comprises
[8290] (a) increasing or generating the activity of a glycerol-3-phosphate dehydrogenase in the cytosol of a cell of a non-human organism or a part thereof, preferably a microorganism, a plant cell, a plant or a part thereof, as compared to a corresponding non-transformed wild type non-human organism or a part thereof; and
[8291] (b) growing the non-human organism or a part thereof under conditions which permit the production of glutamate or a composition comprising glutamate in said non-human organism or in the culture medium surrounding said non-human organism.

[8292] Accordingly, the present invention relates to a process for the production of proline, which comprises
[8293] (a) increasing or generating the activity of a phosphoadenosine phosphosulfate reductase in the cytosol of a cell of a non-human organism or a part thereof, preferably a microorganism, a plant cell, a plant or a part thereof, as compared to a corresponding non-transformed wild type non-human organism or a part thereof; and
[8294] (b) growing the non-human organism or a part thereof under conditions which permit the production of proline or a composition comprising proline in said non-human organism or in the culture medium surrounding said non-human organism.

[8295] Accordingly, the present invention relates to a process for the production of glutamate, which comprises
[8296] (a) increasing or generating the activity of a riboflavin biosynthesis protein in the cytosol of a cell of a non-human organism or a part thereof, preferably a microorganism, a plant cell, a plant or a part thereof, as compared to a corresponding non-transformed wild type non-human organism or a part thereof; and
[8297] (b) growing the non-human organism or a part thereof under conditions which permit the production of glutamate or a composition comprising glutamate in said non-human organism or in the culture medium surrounding said non-human organism.

[8298] Accordingly, the present invention relates to a process for the production of glutamate, which comprises
[8299] (a) increasing or generating the activity of a malonyl CoA-acyl carrier protein transacylase in the cytosol of a cell of a non-human organism or a part thereof, preferably a microorganism, a plant cell, a plant or a part thereof, as compared to a corresponding non-transformed wild type non-human organism or a part thereof; and
[8300] (b) growing the non-human organism or a part thereof under conditions which permit the production of glutamate or a composition comprising glutamate in said non-human organism or in the culture medium surrounding said non-human organism.

[8301] Accordingly, the present invention relates to a process for the production of glutamine, which comprises
[8302] (a) increasing or generating the activity of a malonyl CoA-acyl carrier protein transacylase in the cytosol of a cell of a non-human organism or a part thereof, preferably a microorganism, a plant cell, a plant or a part thereof, as compared to a corresponding non-transformed wild type non-human organism or a part thereof; and
[8303] (b) growing the non-human organism or a part thereof under conditions which permit the production of glutamine or a composition comprising glutamine in said non-human organism or in the culture medium surrounding said non-human organism.

[8304] Accordingly, the present invention relates to a process for the production of proline, which comprises
[8305] (a) increasing or generating the activity of a short-chain alcohol dehydrogenase family in the cytosol of a cell of a non-human organism or a part thereof, preferably a microorganism, a plant cell, a plant or a part thereof, as compared to a corresponding non-transformed wild type non-human organism or a part thereof; and
[8306] (b) growing the non-human organism or a part thereof under conditions which permit the production of proline or a composition comprising proline in said non-human organism or in the culture medium surrounding said non-human organism.

[8307] Accordingly, the present invention relates to a process for the production of glutamine, which comprises
[8308] (a) increasing or generating the activity of a Sec-independent protein translocase subunit in the cytosol of a cell of a non-human organism or a part thereof, preferably a microorganism, a plant cell, a plant or a part thereof, as compared to a corresponding non-transformed wild type non-human organism or a part thereof; and
[8309] (b) growing the non-human organism or a part thereof under conditions which permit the production of glutamine or a composition comprising glutamine in said non-human organism or in the culture medium surrounding said non-human organism.

[8310] Accordingly, the present invention relates to a process for the production of proline, which comprises
[8311] (a) increasing or generating the activity of a Sec-independent protein translocase subunit in the cytosol of a cell of a non-human organism or a part thereof, preferably a microorganism, a plant cell, a plant or a part thereof, as compared to a corresponding non-transformed wild type non-human organism or a part thereof; and
[8312] (b) growing the non-human organism or a part thereof under conditions which permit the production of proline or a composition comprising proline in said non-human organism or in the culture medium surrounding said non-human organism.

[8313] Accordingly, the present invention relates to a process for the production of proline, which comprises
[8314] (a) increasing or generating the activity of a cell division protein in the cytosol of a cell of a non-human organism or a part thereof, preferably a microorganism, a plant cell, a plant or a part thereof, as compared to a corresponding non-transformed wild type non-human organism or a part thereof; and
[8315] (b) growing the non-human organism or a part thereof under conditions which permit the production of proline or a composition comprising proline in said non-human organism or in the culture medium surrounding said non-human organism.

[8316] Accordingly, the present invention relates to a process for the production of proline, which comprises
[8317] (a) increasing or generating the activity of a branched-chain amino acid ABC transporter permease protein in the cytosol of a cell of a non-human organism or a part thereof, preferably a microorganism, a plant cell, a plant or a part thereof, as compared to a corresponding non-transformed wild type non-human organism or a part thereof; and
[8318] (b) growing the non-human organism or a part thereof under conditions which permit the production of proline or a composition comprising proline in said non-human organism or in the culture medium surrounding said non-human organism.

[8319] Accordingly, the present invention relates to a process for the production of proline, which comprises
[8320] (a) increasing or generating the activity of a amino acid ABC transporter permease protein in the cytosol of a cell of a non-human organism or a part thereof, preferably a microorganism, a plant cell, a plant or a part thereof, as compared to a corresponding non-transformed wild type non-human organism or a part thereof; and
[8321] (b) growing the non-human organism or a part thereof under conditions which permit the production of proline or a composition comprising proline in said non-human organism or in the culture medium surrounding said non-human organism.

[8322] Accordingly, the present invention relates to a process for the production of proline, which comprises
[8323] (a) increasing or generating the activity of a TTC0768-protein in the cytosol of a cell of a non-human organism or a part thereof, preferably a microorganism, a plant cell, a plant or a part thereof, as compared to a corresponding non-transformed wild type non-human organism or a part thereof; and
[8324] (b) growing the non-human organism or a part thereof under conditions which permit the production of proline or a composition comprising proline in said non-human organism or in the culture medium surrounding said non-human organism.

[8325] Accordingly, the present invention relates to a process for the production of glutamine, which comprises
[8326] (a) increasing or generating the activity of a metal-dependent hydrolase in the cytosol of a cell of a non-human organism or a part thereof, preferably a microorganism, a plant cell, a plant or a part thereof, as compared to a corresponding non-transformed wild type non-human organism or a part thereof; and
[8327] (b) growing the non-human organism or a part thereof under conditions which permit the production of glutamine or a composition comprising glutamine in said non-human organism or in the culture medium surrounding said non-human organism.

[8328] Accordingly, the present invention relates to a process for the production of glutamate, which comprises
[8329] (a) increasing or generating the activity of a multiple antibiotic resistance protein in the cytosol of a cell of a non-human organism or a part thereof, preferably a microorganism, a plant cell, a plant or a part thereof, as compared to a corresponding non-transformed wild type non-human organism or a part thereof; and
[8330] (b) growing the non-human organism or a part thereof under conditions which permit the production of glutamate or a composition comprising glutamate in said non-human organism or in the culture medium surrounding said non-human organism.

[8331] Accordingly, the present invention relates to a process for the production of glutamate, which comprises
[8332] (a) increasing or generating the activity of a TTC1386-protein in the cytosol of a cell of a non-human organism or a part thereof, preferably a microorganism, a plant cell, a plant or a part thereof, as compared to a corresponding non-transformed wild type non-human organism or a part thereof; and
[8333] (b) growing the non-human organism or a part thereof under conditions which permit the production of glutamate or a composition comprising glutamate in said non-human organism or in the culture medium surrounding said non-human organism.

[8334] Accordingly, the present invention relates to a process for the production of glutamine, which comprises
[8335] (a) increasing or generating the activity of a homocitrate synthase in the cytosol of a cell of a non-human organism or a part thereof, preferably a microorganism, a plant cell, a plant or a part thereof, as compared to a corresponding non-transformed wild type non-human organism or a part thereof; and
[8336] (b) growing the non-human organism or a part thereof under conditions which permit the production of glutamine or a composition comprising glutamine in said non-human organism or in the culture medium surrounding said non-human organism.

[8337] Accordingly, the present invention relates to a process for the production of proline, which comprises
[8338] (a) increasing or generating the activity of a homocitrate synthase in the cytosol of a cell of a non-human organism or a part thereof, preferably a microorganism, a plant cell, a plant or a part thereof, as compared to a corresponding non-transformed wild type non-human organism or a part thereof; and
[8339] (b) growing the non-human organism or a part thereof under conditions which permit the production of proline or a composition comprising proline in said non-human organism or in the culture medium surrounding said non-human organism.

[8340] Accordingly, the present invention relates to a process for the production of glutamate, which comprises
[8341] (a) increasing or generating the activity of a oxidoreductase subunit in the cytosol of a cell of a non-human organism or a part thereof, preferably a microorganism, a plant cell, a plant or a part thereof, as compared to a corresponding non-transformed wild type non-human organism or a part thereof; and
[8342] (b) growing the non-human organism or a part thereof under conditions which permit the production of glutamate or a composition comprising glutamate in said non-human organism or in the culture medium surrounding said non-human organism.

[8343] Accordingly, the present invention relates to a process for the production of glutamine, which comprises
[8344] (a) increasing or generating the activity of a oxidoreductase subunit in the cytosol of a cell of a non-human organism or a part thereof, preferably a microorganism, a plant cell, a plant or a part thereof, as compared to a corresponding non-transformed wild type non-human organism or a part thereof; and
[8345] (b) growing the non-human organism or a part thereof under conditions which permit the production of glutamine or a composition comprising glutamine in said non-human organism or in the culture medium surrounding said non-human organism.

[8346] Accordingly, the present invention relates to a process for the production of glutamate, which comprises
[8347] (a) increasing or generating the activity of a XM_{—}473199-protein in the cytosol of a cell of a non-human organism or a part thereof, preferably a microorganism, a plant cell, a plant or a part thereof, as compared to a corresponding non-transformed wild type non-human organism or a part thereof; and
[8348] (b) growing the non-human organism or a part thereof under conditions which permit the production of glutamate or a composition comprising glutamate in said non-human organism or in the culture medium surrounding said non-human organism.

[8349] Accordingly, the present invention relates to a process for the production of glutamine, which comprises
[8350] (a) increasing or generating the activity of a XM_{—}473199-protein in the cytosol of a cell of a non-human organism or a part thereof, preferably a microorganism, a plant cell, a plant or a part thereof, as compared to a corresponding non-transformed wild type non-human organism or a part thereof; and
[8351] (b) growing the non-human organism or a part thereof under conditions which permit the production of glutamine or a composition comprising glutamine in said non-human organism or in the culture medium surrounding said non-human organism.

[8352] Accordingly, the present invention relates to a process for the production of proline, which comprises
[8353] (a) increasing or generating the activity of a transcription factor in the cytosol of a cell of a non-human organism or a part thereof, preferably a microorganism, a plant cell, a plant or a part thereof, as compared to a corresponding non-transformed wild type non-human organism or a part thereof; and
[8354] (b) growing the non-human organism or a part thereof under conditions which permit the production of proline or a composition comprising proline in said non-human organism or in the culture medium surrounding said non-human organism.

[8355] Accordingly, the present invention relates to a process for the production of glutamate, which comprises
[8356] (a) increasing or generating the activity of a cell division control protein in the cytosol of a cell of a non-human organism or a part thereof, preferably a microorganism, a plant cell, a plant or a part thereof, as compared to a corresponding non-transformed wild type non-human organism or a part thereof; and
[8357] (b) growing the non-human organism or a part thereof under conditions which permit the production of glutamate or a composition comprising glutamate in said non-human organism or in the culture medium surrounding said non-human organism.

[8358] Accordingly, the present invention relates to a process for the production of proline, which comprises
[8359] (a) increasing or generating the activity of a cell division control protein in the cytosol of a cell of a non-human organism or a part thereof, preferably a microorganism, a plant cell, a plant or a part thereof, as compared to a corresponding non-transformed wild type non-human organism or a part thereof; and
[8360] (b) growing the non-human organism or a part thereof under conditions which permit the production of proline or a composition comprising proline in said non-human organism or in the culture medium surrounding said non-human organism.

[8361] Accordingly, the present invention relates to a process for the production of proline, which comprises
[8362] (a) increasing or generating the activity of a YCL026C-A-protein in the cytosol of a cell of a non-human organism or a part thereof, preferably a microorganism, a plant cell, a plant or a part thereof, as compared to a corresponding non-transformed wild type non-human organism or a part thereof; and
[8363] (b) growing the non-human organism or a part thereof under conditions which permit the production of proline or a composition comprising proline in said non-human organism or in the culture medium surrounding said non-human organism.

[8364] Accordingly, the present invention relates to a process for the production of arginine, which comprises
[8365] (a) increasing or generating the activity of a ycr102c-protein in the cytosol of a cell of a non-human organism or a part thereof, preferably a microorganism, a plant cell, a plant or a part thereof, as compared to a corresponding non-transformed wild type non-human organism or a part thereof; and
[8366] (b) growing the non-human organism or a part thereof under conditions which permit the production of arginine or a composition comprising arginine in said non-human organism or in the culture medium surrounding said non-human organism.

[8367] Accordingly, the present invention relates to a process for the production of proline, which comprises
[8368] (a) increasing or generating the activity of a protein kinase in the cytosol of a cell of a non-human organism or a part thereof, preferably a microorganism, a plant cell, a plant or a part thereof, as compared to a corresponding non-transformed wild type non-human organism or a part thereof; and
[8369] (b) growing the non-human organism or a part thereof under conditions which permit the production of proline or a composition comprising proline in said non-human organism or in the culture medium surrounding said non-human organism.

[8370] Accordingly, the present invention relates to a process for the production of proline, which comprises
[8371] (a) increasing or generating the activity of a coproporphyrinogen Ill oxidase in the cytosol of a cell of a non-human organism or a part thereof, preferably a microorganism, a plant cell, a plant or a part thereof, as compared to a corresponding non-transformed wild type non-human organism or a part thereof; and
[8372] (b) growing the non-human organism or a part thereof under conditions which permit the production of proline or a composition comprising proline in said non-human organism or in the culture medium surrounding said non-human organism.

[8373] Accordingly, the present invention relates to a process for the production of proline, which comprises
[8374] (a) increasing or generating the activity of a branched-chain amino acid permease in the cytosol of a cell of a non-human organism or a part thereof, preferably a microorganism, a plant cell, a plant or a part thereof, as compared to a corresponding non-transformed wild type non-human organism or a part thereof; and
[8375] (b) growing the non-human organism or a part thereof under conditions which permit the production of proline or a composition comprising proline in said non-human organism or in the culture medium surrounding said non-human organism.

[8376] Accordingly, the present invention relates to a process for the production of arginine, which comprises
[8377] (a) increasing or generating the activity of a peroxisome assembly protein in the cytosol of a cell of a non-human organism or a part thereof, preferably a microorganism, a plant cell, a plant or a part thereof, as compared to a corresponding non-transformed wild type non-human organism or a part thereof; and
[8378] (b) growing the non-human organism or a part thereof under conditions which permit the production of arginine or a composition comprising arginine in said non-human organism or in the culture medium surrounding said non-human organism.

[8379] Accordingly, the present invention relates to a process for the production of arginine, which comprises
[8380] (a) increasing or generating the activity of a ydr338c-protein in the cytosol of a cell of a non-human organism or a part thereof, preferably a microorganism, a plant cell, a plant or a part thereof, as compared to a corresponding non-transformed wild type non-human organism or a part thereof; and
[8381] (b) growing the non-human organism or a part thereof under conditions which permit the production of arginine or a composition comprising arginine in said non-human organism or in the culture medium surrounding said non-human organism.

[8382] Accordingly, the present invention relates to a process for the production of glutamine, which comprises
[8383] (a) increasing or generating the activity of a yer014w-protein in the cytosol of a cell of a non-human organism or a part thereof, preferably a microorganism, a plant cell, a plant or a part thereof, as compared to a corresponding non-transformed wild type non-human organism or a part thereof; and
[8384] (b) growing the non-human organism or a part thereof under conditions which permit the production of glutamine or a composition comprising glutamine in said non-human organism or in the culture medium surrounding said non-human organism.

[8385] Accordingly, the present invention relates to a process for the production of glutamine, which comprises
[8386] (a) increasing or generating the activity of a yer106w-protein in the cytosol of a cell of a non-human organism or a part thereof, preferably a microorganism, a plant cell, a plant or a part thereof, as compared to a corresponding non-transformed wild type non-human organism or a part thereof; and
[8387] (b) growing the non-human organism or a part thereof under conditions which permit the production of glutamine or a composition comprising glutamine in said non-human organism or in the culture medium surrounding said non-human organism.

[8388] Accordingly, the present invention relates to a process for the production of proline, which comprises
[8389] (a) increasing or generating the activity of a molecular chaperone portein in the cytosol of a cell of a non-human organism or a part thereof, preferably a microorganism, a plant cell, a plant or a part thereof, as compared to a corresponding non-transformed wild type non-human organism or a part thereof; and
[8390] (b) growing the non-human organism or a part thereof under conditions which permit the production of proline or a composition comprising proline in said non-human organism or in the culture medium surrounding said non-human organism.

[8391] Accordingly, the present invention relates to a process for the production of proline, which comprises
[8392] (a) increasing or generating the activity of a YFL019C-protein in the cytosol of a cell of a non-human organism or a part thereof, preferably a microorganism, a plant cell, a plant or a part thereof, as compared to a corresponding non-transformed wild type non-human organism or a part thereof; and
[8393] (b) growing the non-human organism or a part thereof under conditions which permit the production of proline or a composition comprising proline in said non-human organism or in the culture medium surrounding said non-human organism.

[8394] Accordingly, the present invention relates to a process for the production of arginine, which comprises
[8395] (a) increasing or generating the activity of a yfl054c-protein in the cytosol of a cell of a non-human organism or a part thereof, preferably a microorganism, a plant cell, a plant or a part thereof, as compared to a corresponding non-transformed wild type non-human organism or a part thereof; and
[8396] (b) growing the non-human organism or a part thereof under conditions which permit the production of arginine or a composition comprising arginine in said non-human organism or in the culture medium surrounding said non-human organism.

[8397] Accordingly, the present invention relates to a process for the production of glutamine, which comprises
[8398] (a) increasing or generating the activity of a yfl054c-protein in the cytosol of a cell of a non-human organism or a part thereof, preferably a microorganism, a plant cell, a plant or a part thereof, as compared to a corresponding non-transformed wild type non-human organism or a part thereof; and
[8399] (b) growing the non-human organism or a part thereof under conditions which permit the production of glutamine or a composition comprising glutamine in said non-human organism or in the culture medium surrounding said non-human organism.

[8400] Accordingly, the present invention relates to a process for the production of arginine, which comprises
[8401] (a) increasing or generating the activity of a pre-mRNA-splicing factor in the cytosol of a cell of a non-human organism or a part thereof, preferably a microorganism, a plant cell, a plant or a part thereof, as compared to a corresponding non-transformed wild type non-human organism or a part thereof; and
[8402] (b) growing the non-human organism or a part thereof under conditions which permit the production of arginine or a composition comprising arginine in said non-human organism or in the culture medium surrounding said non-human organism.

[8403] Accordingly, the present invention relates to a process for the production of proline, which comprises
[8404] (a) increasing or generating the activity of a ygl237c-protein in the cytosol of a cell of a non-human organism or a part thereof, preferably a microorganism, a plant cell, a plant or a part thereof, as compared to a corresponding non-transformed wild type non-human organism or a part thereof; and
[8405] (b) growing the non-human organism or a part thereof under conditions which permit the production of proline or a composition comprising proline in said non-human organism or in the culture medium surrounding said non-human organism.

[8406] Accordingly, the present invention relates to a process for the production of glutamine, which comprises
[8407] (a) increasing or generating the activity of a ygr068c-protein in the cytosol of a cell of a non-human organism or a part thereof, preferably a microorganism, a plant cell, a plant or a part thereof, as compared to a corresponding non-transformed wild type non-human organism or a part thereof; and
[8408] (b) growing the non-human organism or a part thereof under conditions which permit the production of glutamine or a composition comprising glutamine in said non-human organism or in the culture medium surrounding said non-human organism.

[8409] Accordingly, the present invention relates to a process for the production of proline, which comprises
[8410] (a) increasing or generating the activity of a squalene monooxygenase in the cytosol of a cell of a non-human organism or a part thereof, preferably a microorganism, a plant cell, a plant or a part thereof, as compared to a corresponding non-transformed wild type non-human organism or a part thereof; and (b) growing the non-human organism or a part thereof under conditions which permit the production of proline or a composition comprising proline in said non-human organism or in the culture medium surrounding said non-human organism.

[8411] Accordingly, the present invention relates to a process for the production of glutamate, which comprises
[8412] (a) increasing or generating the activity of a ygr221c-protein in the cytosol of a cell of a non-human organism or a part thereof, preferably a microorganism, a plant cell, a plant or a part thereof, as compared to a corresponding non-transformed wild type non-human organism or a part thereof; and
[8413] (b) growing the non-human organism or a part thereof under conditions which permit the production of glutamate or a composition comprising glutamate in said non-human organism or in the culture medium surrounding said non-human organism.

[8414] Accordingly, the present invention relates to a process for the production of glutamine, which comprises
[8415] (a) increasing or generating the activity of a ygr221c-protein in the cytosol of a cell of a non-human organism or a part thereof, preferably a microorganism, a plant cell, a plant or a part thereof, as compared to a corresponding non-transformed wild type non-human organism or a part thereof; and
[8416] (b) growing the non-human organism or a part thereof under conditions which permit the production of glutamine or a composition comprising glutamine in said non-human organism or in the culture medium surrounding said non-human organism.

[8417] Accordingly, the present invention relates to a process for the production of proline, which comprises
[8418] (a) increasing or generating the activity of a yhl013c-protein in the cytosol of a cell of a non-human organism or a part thereof, preferably a microorganism, a plant cell, a plant or a part thereof, as compared to a corresponding non-transformed wild type non-human organism or a part thereof; and
[8419] (b) growing the non-human organism or a part thereof under conditions which permit the production of proline or a composition comprising proline in said non-human organism or in the culture medium surrounding said non-human organism.

[8420] Accordingly, the present invention relates to a process for the production of arginine, which comprises
[8421] (a) increasing or generating the activity of a mitochondrial processing protease in the cytosol of a cell of a non-human organism or a part thereof, preferably a microorganism, a plant cell, a plant or a part thereof, as compared to a corresponding non-transformed wild type non-human organism or a part thereof; and
[8422] (b) growing the non-human organism or a part thereof under conditions which permit the production of arginine or a composition comprising arginine in said non-human organism or in the culture medium surrounding said non-human organism.

[8423] Accordingly, the present invention relates to a process for the production of proline, which comprises
[8424] (a) increasing or generating the activity of a H/ACA ribonucleoprotein complex subunit 3 in the cytosol of a cell of a non-human organism or a part thereof, preferably a microorganism, a plant cell, a plant or a part thereof, as compared to a corresponding non-transformed wild type non-human organism or a part thereof; and
[8425] (b) growing the non-human organism or a part thereof under conditions which permit the production of proline or a composition comprising proline in said non-human organism or in the culture medium surrounding said non-human organism.

[8426] Accordingly, the present invention relates to a process for the production of glutamate, which comprises
[8427] (a) increasing or generating the activity of a yhr207c-protein in the cytosol of a cell of a non-human organism or a part thereof, preferably a microorganism, a plant cell, a plant or a part thereof, as compared to a corresponding non-transformed wild type non-human organism or a part thereof; and
[8428] (b) growing the non-human organism or a part thereof under conditions which permit the production of glutamate or a composition comprising glutamate in said non-human organism or in the culture medium surrounding said non-human organism.

[8429] Accordingly, the present invention relates to a process for the production of arginine, which comprises
[8430] (a) increasing or generating the activity of a 3-phosphoglycerate dehydrogenase in the cytosol of a cell of a non-human organism or a part thereof, preferably a microorganism, a plant cell, a plant or a part thereof, as compared to a corresponding non-transformed wild type non-human organism or a part thereof; and
[8431] (b) growing the non-human organism or a part thereof under conditions which permit the production of arginine or a composition comprising arginine in said non-human organism or in the culture medium surrounding said non-human organism.

[8432] Accordingly, the present invention relates to a process for the production of proline, which comprises
[8433] (a) increasing or generating the activity of a allantoinase in the cytosol of a cell of a non-human organism or a part thereof, preferably a microorganism, a plant cell, a plant or a part thereof, as compared to a corresponding non-transformed wild type non-human organism or a part thereof; and
[8434] (b) growing the non-human organism or a part thereof under conditions which permit the production of proline or a composition comprising proline in said non-human organism or in the culture medium surrounding said non-human organism.

[8435] Accordingly, the present invention relates to a process for the production of arginine, which comprises
[8436] (a) increasing or generating the activity of a allantoicase in the cytosol of a cell of a non-human organism or a part thereof, preferably a microorganism, a plant cell, a plant or a part thereof, as compared to a corresponding non-transformed wild type non-human organism or a part thereof; and
[8437] (b) growing the non-human organism or a part thereof under conditions which permit the production of arginine or a composition comprising arginine in said non-human organism or in the culture medium surrounding said non-human organism.

[8438] Accordingly, the present invention relates to a process for the production of glutamine, which comprises
[8439] (a) increasing or generating the activity of a DnaJ-like chaperone in the cytosol of a cell of a non-human organism or a part thereof, preferably a microorganism, a plant cell, a plant or a part thereof, as compared to a corresponding non-transformed wild type non-human organism or a part thereof; and
[8440] (b) growing the non-human organism or a part thereof under conditions which permit the production of glutamine or a composition comprising glutamine in said non-human organism or in the culture medium surrounding said non-human organism.

[8441] Accordingly, the present invention relates to a process for the production of arginine, which comprises
[8442] (a) increasing or generating the activity of a ornithine carbamoyltransferase in the cytosol of a cell of a non-human organism or a part thereof, preferably a microorganism, a plant cell, a plant or a part thereof, as compared to a corresponding non-transformed wild type non-human organism or a part thereof; and
[8443] (b) growing the non-human organism or a part thereof under conditions which permit the production of arginine or a composition comprising arginine in said non-human organism or in the culture medium surrounding said non-human organism.

[8444] Accordingly, the present invention relates to a process for the production of proline, which comprises
[8445] (a) increasing or generating the activity of a potassium transport protein in the cytosol of a cell of a non-human organism or a part thereof, preferably a microorganism, a plant cell, a plant or a part thereof, as compared to a corresponding non-transformed wild type non-human organism or a part thereof; and
[8446] (b) growing the non-human organism or a part thereof under conditions which permit the production of proline or a composition comprising proline in said non-human organism or in the culture medium surrounding said non-human organism.

[8447] Accordingly, the present invention relates to a process for the production of arginine, which comprises
[8448] (a) increasing or generating the activity of a glycogenin in the cytosol of a cell of a non-human organism or a part thereof, preferably a microorganism, a plant cell, a plant or a part thereof, as compared to a corresponding non-transformed wild type non-human organism or a part thereof; and
[8449] (b) growing the non-human organism or a part thereof under conditions which permit the production of arginine or a composition comprising arginine in said non-human organism or in the culture medium surrounding said non-human organism.

[8450] Accordingly, the present invention relates to a process for the production of proline, which comprises
[8451] (a) increasing or generating the activity of a ATP-dependent RNA helicase in the cytosol of a cell of a non-human organism or a part thereof, preferably a microorganism, a plant cell, a plant or a part thereof, as compared to a corresponding non-transformed wild type non-human organism or a part thereof; and
[8452] (b) growing the non-human organism or a part thereof under conditions which permit the production of proline or a composition comprising proline in said non-human organism or in the culture medium surrounding said non-human organism.

[8453] Accordingly, the present invention relates to a process for the production of glutamine, which comprises
[8454] (a) increasing or generating the activity of a phosphoribosyltransferase in the cytosol of a cell of a non-human organism or a part thereof, preferably a microorganism, a plant cell, a plant or a part thereof, as compared to a corresponding non-transformed wild type non-human organism or a part thereof; and
[8455] (b) growing the non-human organism or a part thereof under conditions which permit the production of glutamine or a composition comprising glutamine in said non-human organism or in the culture medium surrounding said non-human organism.

[8456] Accordingly, the present invention relates to a process for the production of glutamate, which comprises
[8457] (a) increasing or generating the activity of a polygalacturonase in the cytosol of a cell of a non-human organism or a part thereof, preferably a microorganism, a plant cell, a plant or a part thereof, as compared to a corresponding non-transformed wild type non-human organism or a part thereof; and
[8458] (b) growing the non-human organism or a part thereof under conditions which permit the production of glutamate or a composition comprising glutamate in said non-human organism or in the culture medium surrounding said non-human organism.

[8459] Accordingly, the present invention relates to a process for the production of proline, which comprises
[8460] (a) increasing or generating the activity of a aspartate aminotransferase in the cytosol of a cell of a non-human organism or a part thereof, preferably a microorganism, a plant cell, a plant or a part thereof, as compared to a corresponding non-transformed wild type non-human organism or a part thereof; and
[8461] (b) growing the non-human organism or a part thereof under conditions which permit the production of proline or a composition comprising proline in said non-human organism or in the culture medium surrounding said non-human organism.

[8462] Accordingly, the present invention relates to a process for the production of glutamate, which comprises
[8463] (a) increasing or generating the activity of a ylr065c-protein in the cytosol of a cell of a non-human organism or a part thereof, preferably a microorganism, a plant cell, a plant or a part thereof, as compared to a corresponding non-transformed wild type non-human organism or a part thereof; and
[8464] (b) growing the non-human organism or a part thereof under conditions which permit the production of glutamate or a composition comprising glutamate in said non-human organism or in the culture medium surrounding said non-human organism.

[8465] Accordingly, the present invention relates to a process for the production of glutamine, which comprises
[8466] (a) increasing or generating the activity of a ylr178c-protein in the cytosol of a cell of a non-human organism or a part thereof, preferably a microorganism, a plant cell, a plant or a part thereof, as compared to a corresponding non-transformed wild type non-human organism or a part thereof; and
[8467] (b) growing the non-human organism or a part thereof under conditions which permit the production of glutamine or a composition comprising glutamine in said non-human organism or in the culture medium surrounding said non-human organism.

[8468] Accordingly, the present invention relates to a process for the production of proline, which comprises
[8469] (a) increasing or generating the activity of a aconitate hydratase in the cytosol of a cell of a non-human organism or a part thereof, preferably a microorganism, a plant cell, a plant or a part thereof, as compared to a corresponding non-transformed wild type non-human organism or a part thereof; and
[8470] (b) growing the non-human organism or a part thereof under conditions which permit the production of proline or a composition comprising proline in said non-human organism or in the culture medium surrounding said non-human organism.

[8471] Accordingly, the present invention relates to a process for the production of proline, which comprises
[8472] (a) increasing or generating the activity of a adenylosuccinate lyase in the cytosol of a cell of a non-human organism or a part thereof, preferably a microorganism, a plant cell, a plant or a part thereof, as compared to a corresponding non-transformed wild type non-human organism or a part thereof; and
[8473] (b) growing the non-human organism or a part thereof under conditions which permit the production of proline or a composition comprising proline in said non-human organism or in the culture medium surrounding said non-human organism.

[8474] Accordingly, the present invention relates to a process for the production of glutamine, which comprises
[8475] (a) increasing or generating the activity of a ynl142w-protein in the cytosol of a cell of a non-human organism or a part thereof, preferably a microorganism, a plant cell, a plant or a part thereof, as compared to a corresponding non-transformed wild type non-human organism or a part thereof; and
[8476] (b) growing the non-human organism or a part thereof under conditions which permit the production of glutamine or a composition comprising glutamine in said non-human organism or in the culture medium surrounding said non-human organism.

[8477] Accordingly, the present invention relates to a process for the production of proline, which comprises
[8478] (a) increasing or generating the activity of a sterol O-acyltransferase in the cytosol of a cell of a non-human organism or a part thereof, preferably a microorganism, a plant cell, a plant or a part thereof, as compared to a corresponding non-transformed wild type non-human organism or a part thereof; and
[8479] (b) growing the non-human organism or a part thereof under conditions which permit the production of proline or a composition comprising proline in said non-human organism or in the culture medium surrounding said non-human organism.

[8480] Accordingly, the present invention relates to a process for the production of arginine, which comprises
[8481] (a) increasing or generating the activity of a protein kinase in the cytosol of a cell of a non-human organism or a part thereof, preferably a microorganism, a plant cell, a plant or a part thereof, as compared to a corresponding non-transformed wild type non-human organism or a part thereof; and
[8482] (b) growing the non-human organism or a part thereof under conditions which permit the production of arginine or a composition comprising arginine in said non-human organism or in the culture medium surrounding said non-human organism.

[8483] Accordingly, the present invention relates to a process for the production of glutamate, which comprises
[8484] (a) increasing or generating the activity of a glutaminyl-tRNA synthetase in the cytosol of a cell of a non-human organism or a part thereof, preferably a microorganism, a plant cell, a plant or a part thereof, as compared to a corresponding non-transformed wild type non-human organism or a part thereof; and
[8485] (b) growing the non-human organism or a part thereof under conditions which permit the production of glutamate or a composition comprising glutamate in said non-human organism or in the culture medium surrounding said non-human organism.

[8486] Accordingly, the present invention relates to a process for the production of glutamine, which comprises
[8487] (a) increasing or generating the activity of a glutaminyl-tRNA synthetase in the cytosol of a cell of a non-human organism or a part thereof, preferably a microorganism, a plant cell, a plant or a part thereof, as compared to a corresponding non-transformed wild type non-human organism or a part thereof; and
[8488] (b) growing the non-human organism or a part thereof under conditions which permit the production of glutamine or a composition comprising glutamine in said non-human organism or in the culture medium surrounding said non-human organism.

[8489] Accordingly, the present invention relates to a process for the production of proline, which comprises
[8490] (a) increasing or generating the activity of a yor221c-protein in the cytosol of a cell of a non-human organism or a part thereof, preferably a microorganism, a plant cell, a plant or a part thereof, as compared to a corresponding non-transformed wild type non-human organism or a part thereof; and
[8491] (b) growing the non-human organism or a part thereof under conditions which permit the production of proline or a composition comprising proline in said non-human organism or in the culture medium surrounding said non-human organism.

[8492] Accordingly, the present invention relates to a process for the production of proline, which comprises
[8493] (a) increasing or generating the activity of a protein kinase in the cytosol of a cell of a non-human organism or a part thereof, preferably a microorganism, a plant cell, a plant or a part thereof, as compared to a corresponding non-transformed wild type non-human organism or a part thereof; and
[8494] (b) growing the non-human organism or a part thereof under conditions which permit the production of proline or a composition comprising proline in said non-human organism or in the culture medium surrounding said non-human organism.

[8495] Accordingly, the present invention relates to a process for the production of arginine, which comprises
[8496] (a) increasing or generating the activity of a isopentenyl diphosphate isomerase in the cytosol of a cell of a non-human organism or a part thereof, preferably a microorganism, a plant cell, a plant or a part thereof, as compared to a corresponding non-transformed wild type non-human organism or a part thereof; and
[8497] (b) growing the non-human organism or a part thereof under conditions which permit the production of arginine or a composition comprising arginine in said non-human organism or in the culture medium surrounding said non-human organism.

[8498] Accordingly, the present invention relates to a process for the production of arginine, which comprises
[8499] (a) increasing or generating the activity of a Zm_{—}4842_BE510522-protein in the cytosol of a cell of a non-human organism or a part thereof, preferably a microorganism, a plant cell, a plant or a part thereof, as compared to a corresponding non-transformed wild type non-human organism or a part thereof; and
[8500] (b) growing the non-human organism or a part thereof under conditions which permit the production of arginine or a composition comprising arginine in said non-human organism or in the culture medium surrounding said non-human organism.

[8501] Accordingly, the present invention relates to a process for the production of glutamine, which comprises
[8502] (a) increasing or generating the activity of a Zm_{—}4842_BE510522-protein in the cytosol of a cell of a non-human organism or a part thereof, preferably a microorganism, a plant cell, a plant or a part thereof, as compared to a corresponding non-transformed wild type non-human organism or a part thereof; and
[8503] (b) growing the non-human organism or a part thereof under conditions which permit the production of glutamine or a composition comprising glutamine in said non-human organism or in the culture medium surrounding said non-human organism.

[8504] Accordingly, the present invention relates to a process for the production of proline, which comprises
[8505] (a) increasing or generating the activity of a Zm_{—}4842_BE510522-protein in the cytosol of a cell of a non-human organism or a part thereof, preferably a microorganism, a plant cell, a plant or a part thereof, as compared to a corresponding non-transformed wild type non-human organism or a part thereof; and
[8506] (b) growing the non-human organism or a part thereof under conditions which permit the production of proline or a composition comprising proline in said non-human organism or in the culture medium surrounding said non-human organism.

[8507] Accordingly, the present invention relates to a process for the production of arginine, which comprises
[8508] (a) increasing or generating the activity of a phosphopantothenoylcysteine decarboxylase in the cytosol of a cell of a non-human organism or a part thereof, preferably a microorganism, a plant cell, a plant or a part thereof, as compared to a corresponding non-transformed wild type non-human organism or a part thereof; and
[8509] (b) growing the non-human organism or a part thereof under conditions which permit the production of arginine or a composition comprising arginine in said non-human organism or in the culture medium surrounding said non-human organism.

[8510] Accordingly, the present invention relates to a process for the production of proline, which comprises
[8511] (a) increasing or generating the activity of a ZM06LC11975-protein in the cytosol of a cell of a non-human organism or a part thereof, preferably a microorganism, a plant cell, a plant or a part thereof, as compared to a corresponding non-transformed wild type non-human organism or a part thereof; and
[8512] (b) growing the non-human organism or a part thereof under conditions which permit the production of proline or a composition comprising proline in said non-human organism or in the culture medium surrounding said non-human organism.

[8513] Accordingly, the present invention relates to a process for the production of arginine, which comprises
[8514] (a) increasing or generating the activity of a polypeptide comprising a polypeptide as depicted in the respective line in column 5 or 8 of Table II, application no. 2, or a homolog or a fragment thereof, a consensus sequence or at least one polypeptide motif as depicted in the respective line in column 8 of Table IV, application no. 2; or increasing or generating the activity of an expression product of one or more nucleic acid molecule(s) comprising a polynucleotide as depicted in the respective line in column 5 or 8 of Table I, application no. 2, preferably the coding region thereof, or a homolog or a fragment thereof;
[8515] in the cytosol of a cell of a non-human organism or a part thereof; preferably a microorganism, a plant cell, a plant or a part thereof, as compared to a corresponding non-transformed wild type non-human organism or a part thereof;
[8516] (wherein in the respective line in the respective Table in column 7 arginine is depicted) and
[8517] (b) growing the non-human organism under conditions which permit the production of arginine, or a composition comprising arginine in said non-human organism or in the culture medium surrounding said non-human organism.

[8518] Accordingly, the present invention relates to a process for the production of glutamate, which comprises
[8519] (a) increasing or generating the activity of a polypeptide comprising a polypeptide as depicted in the respective line in column 5 or 8 of Table II, application no. 2, or a homolog or a fragment thereof, a consensus sequence or at least one polypeptide motif as depicted in the respective line in column 8 of Table IV, application no. 2; or increasing or generating the activity of an expression product of one or more nucleic acid molecule(s) comprising a polynucleotide as depicted in the respective line in column 5 or 8 of Table I, application no. 2, preferably the coding region thereof, or a homolog or a fragment thereof;
[8520] in the cytosol of a cell of a non-human organism or a part thereof; preferably a microorganism, a plant cell, a plant or a part thereof, as compared to a corresponding non-transformed wild type non-human organism or a part thereof;
[8521] (wherein in the respective line in the respective Table in column 7 glutamate is depicted) and
[8522] (b) growing the non-human organism under conditions which permit the production of glutamate, or a composition comprising glutamate in said non-human organism or in the culture medium surrounding said non-human organism.

[8523] Accordingly, the present invention relates to a process for the production of glutamine, which comprises
[8524] (a) increasing or generating the activity of a polypeptide comprising a polypeptide as depicted in the respective line in column 5 or 8 of Table II, application no. 2, or a homolog or a fragment thereof, a consensus sequence or at least one polypeptide motif as depicted in the respective line in column 8 of Table IV, application no. 2; or increasing or generating the activity of an expression product of one or more nucleic acid molecule(s) comprising a polynucleotide as depicted in the respective line in column 5 or 8 of Table I, application no. 2, preferably the coding region thereof, or a homolog or a fragment thereof;
[8525] in the cytosol of a cell of a non-human organism or a part thereof; preferably a microorganism, a plant cell, a plant or a part thereof, as compared to a corresponding non-transformed wild type non-human organism or a part thereof;
[8526] (wherein in the respective line in the respective Table in column 7 glutamine is depicted) and
[8527] (b) growing the non-human organism under conditions which permit the production of glutamine, or a composition comprising glutamine in said non-human organism or in the culture medium surrounding said non-human organism.

[8528] Accordingly, the present invention relates to a process for the production of proline, which comprises
[8529] (a) increasing or generating the activity of a polypeptide comprising a polypeptide as depicted in the respective line in column 5 or 8 of Table II, application no. 2, or a homolog or a fragment thereof, a consensus sequence or at least one polypeptide motif as depicted in the respective line in column 8 of Table IV, application no. 2; or
[8530] increasing or generating the activity of an expression product of one or more nucleic acid molecule(s) comprising a polynucleotide as depicted in the respective line in column 5 or 8 of Table I, application no. 2, preferably the coding region thereof, or a homolog or a fragment thereof;
[8531] in the cytosol of a cell of a non-human organism or a part thereof; preferably a microorganism, a plant cell, a plant or a part thereof, as compared to a corresponding non-transformed wild type non-human organism or a part thereof;
[8532] (wherein in the respective line in the respective Table in column 7 proline is depicted) and
[8533] (b) growing the non-human organism under conditions which permit the production of proline, or a composition comprising proline in said non-human organism or in the culture medium surrounding said non-human organism.

[8534] In a further embodiment the activity of the polypeptide comprising a polypeptide as depicted in the respective line in column 5 or 8 of Table II, application no. 2, or a homolog or a fragment thereof, a consensus sequence or at least one polypeptide motif as depicted in the respective line in column 8 of Table IV, application no. 2, is increased or generated non-targeted in the above-mentioned process in a microorganism or plant or a part thereof.

[8535] In a further embodiment said polypeptide has the activity of the respective polypeptide represented by a protein comprising a polypeptide as depitcted in the respective line in column 5 of Table II, application no. 2.

[8536] In a further embodiment the activity of the expression product of one or more nucleic acid molecule(s) comprising a polynucleotide as depicted in the respective line in column 5 or 8 of Table I, application no. 2, preferably the coding region thereof, or a homolog or a fragment thereof, is increased or generated non-targeted in the above-mentioned process in a microorganism or plant or a part thereof.

[8537] In a further embodiment the activity of the polypeptide comprising a polypeptide as depicted in the respective line in column 5 or 8 of Table II, application no. 2, or a homolog or a fragment thereof, a consensus sequence or at least one polypeptide motif as depicted in the respective line in column 8 of Table IV, application no. 2, is increased or generated in the above-mentioned process in an organelle preferably in plastids or mitochondria, especially in plastids, of a microorganism or plant.

[8538] In a further embodiment said polypeptide has the activity of the respective polypeptide represented by a protein comprising a polypeptide as depitcted in the respective line in column 5 of Table II, application no. 2.

[8539] In a further embodiment the activity of the expression product of one or more nucleic acid molecule(s) comprising a polynucleotide as depicted in the respective line in column 5 or 8 of Table I, application no. 2, preferably the coding region thereof, or a homolog or a fragment thereof, is increased or generated in the above-mentioned process in an organelle, preferably in plasids or mitochondria, especially in plastids, of a microorganism or plant.

[8540] In a further embodiment the activity of the polypeptide comprising a polypeptide as depicted in the respective line in column 5 or 8 of Table II, application no. 2, or a homolog or a fragment thereof, a consensus sequence or at least one polypeptide motif as depicted in the respective line in column 8 of Table IV, application no. 2, is increased or generated in the above-mentioned process in the cyctosol of a cell, of a microorganism or plant.

[8541] In a further embodiment said polypeptide has the activity of the respective polypeptide represented by a protein comprising a polypeptide as depitcted in the respective line in column 5 of Table II, application no. 2.

[8542] In a further embodiment the activity of the expression product of one or more nucleic acid molecule(s) comprising a polynucleotide as depicted in the respective line in column 5 or 8 of Table I, application no. 2, preferably the coding region thereof, or a homolog or a fragment thereof, is increased or generated in the above-mentioned process in the cytosol of a cell, of a microorganism or plant.

[8543] [0039.1.1.2] to [0066.1.1.2] for the disclosure of these paragraphs see [0039.1.1.1] to [0066.1.1.1] above.

[8544] As mentioned above the nucleic acid sequences coding for the proteins as shown in Table II, application no. 2, column 5 or 8, or homologs or fragments thereof, are joined to a nucleic acid sequence encoding a plastidic transit peptide, e.g, if for the nucleic acid molecule in Table I, column 6 the term “plastidic”is indicated. This nucleic acid sequence encoding a transit peptide ensures transport of the protein to the organelle. The nucleic acid sequence of the gene to be expressed and the nucleic acid sequence encoding the transit peptide are operably linked. Therefore the transit peptide encoding sequence is fused in frame to the nucleic acid sequence coding for proteins as shown in Table II, application no. 2, column 5 or 8, or homologs or fragments thereof, e.g, if for the nucleic acid molecule in Table I, column 6 the term “plastidic” is indicated.

[8545] [0068.1.1.2] to [0072.1.1.2] for the disclosure of these paragraphs see [0068.1.1.1] to [0072.1.1.1] above.

[8546] As mentioned above the nucleic acid sequences coding for the proteins as shown in the respective line in Table II, application no. 2, column 5 or 8, or homologs or fragments thereof, are joined to a nucleic acid sequence encoding a mitochondrial transit peptide, e.g., if for the respective nucleic acid molecule in Table I, column 6 the term “mitochondrial” is indicated. This nucleic acid sequence encoding a transit peptide ensures transport of the protein to the organelle. The nucleic acid sequence of the gene to be expressed and the nucleic acid sequence encoding the transit peptide are operably linked. Therefore the transit peptide encoding sequence is fused in frame to the nucleic acid sequence coding for proteins as shown in the respective line in Table II, application no. 2, column 5 or 8, or homologs or fragments thereof, e.g, if for the nucleic acid molecule in the respective line in Table I, column 6 the term “mitochondrial” is indicated. (For the avoidance of doubt, the term “mitochondric” and “mitochondrial” are interchangeable.)

[8547] [0074.1.1.2] to [0075.1.1.2] for the disclosure of these paragraphs see [0074.1.1.1] to [0075.1.1.1] above.

[8548] Nucleic acid sequences coding for the transit peptides may be chemically synthesized either in part or wholly according to structure of transit peptide sequences disclosed in the prior art. Said natural or chemically synthesized sequences can be directly linked to the sequences encoding the mature protein or via a linker nucleic acid sequence, which may be typically less than 500 base pairs, preferably less than 450, 400, 350, 300, 250 or 200 base pairs, more preferably less than 150, 100, 90, 80, 70, 60, 50, 40 or 30 base pairs and most preferably less than 25, 20, 15, 12, 9, 6 or 3 base pairs in length and are in frame to the coding sequence. Furthermore favorable nucleic acid sequences encoding transit peptides may comprise sequences derived from more than one biological and/or chemical source and may include a nucleic acid sequence derived from the amino-terminal region of the mature protein, which in its native state is linked to the transit peptide. In a preferred embodiment of the invention said amino-terminal region of the mature protein is typically less than 150 amino acids, preferably less than 140, 130, 120, 110, 100 or 90 amino acids, more preferably less than 80, 70, 60, 50, 40, 35, 30, 25 or 20 amino acids and most preferably less than 19, 18, 17, 16, 15, 14, 13, 12, 11 or 10 amino acids in length. But even shorter or longer stretches are also possible. In addition target sequences, which facilitate the transport of proteins to other cell compartments such as the vacuole, endoplasmic reticulum, golgi complex, glyoxysomes, peroxisomes, mitochondria (in case of a plastidal transit peptide) or plastids, especially chloroplasts (in case of a mitochondric transit peptide) may be also part of the inventive nucleic acid sequence. The proteins translated from said inventive nucleic acid sequences are a kind of fusion proteins that means the nucleic acid sequences encoding the plastidal transit peptide for example the ones shown in Table a, preferably the last one of the Table a are joint to the respective nucleic acid sequences shown in Table I, application no. 2, columns 5 or 8, especially the coding region thereof, or homologs or fragments thereof, in case of nucleic acid sequences being expressed in plastids, and that means the nucleic acid sequences encoding the mitochondric transit peptide for example the ones shown in Table b, preferably the last one of the Table b are joint to the respective nucleic acid sequences shown in Table I, application no. 2, columns 5 or 8, especially the coding region thereof, or homologs or fragments thereof, in case of nucleic acid sequences being expressed in mitochondria. The person skilled in the art is able to join said sequences in a functional manner. Advantageously the transit peptide part is cleaved off from the protein part shown in Table II, application no. 2, columns 5 or 8, or a homolog or fragment thereof, during or after the transport into the organelles, preferably into the plastids or mitochondria, respectively.

[8549] All products of the cleavage of the preferred transit peptide shown in the last line of Table a have preferably the N-terminal amino acid sequences QIA CSS or QIA EFQLTT in front of the start methionine of the respective protein metioned in Table II, application no. 2, column 5 or 8. or homologs or fragments thereof. Other short amino acid sequences of an range of 1 to 20 amino acids preferable 2 to 15 amino acids, more preferable 3 to 10 amino acids most preferably 4 to 8 amino acids are also possible in front of the start methionine of the protein metioned in Table II, application no. 2, columns 5 or 8, or homologs or fragments thereof. In case of the amino acid sequence QIA CSS the three amino acids in front of the start methionine are stemming from the LIC (=ligatation independent cloning) cassette. Said short amino acid sequence is preferred in the case of the expression of E. coli genes. In case of the amino acid sequence QIA EFQLTT the six amino acids in front of the start methionine are stemming from the LIC cassette. Said short amino acid sequence is preferred in the case of the expression of S. cerevisiae genes. The skilled worker knowns that other short sequences are also useful in the expression of the respective nucleic acid molecule comprising a polynucleotide as depicted in Table I, application no. 2, column 5 or 8, preferably the coding region thereof, or a homolog or a fragment thereof. Furthermore the skilled worker is aware of the fact that there is not a need for such short sequences in the expression of the genes.

[8550] [0077.1.1.2] to [0078.1.1.2] for the disclosure of these paragraphs see [0077.1.1.1] to [0078.1.1.1] above.

[8551] Alternatively to the targeting of the respective sequences shown in Table II, application no. 2, columns 5 or 8, or homologs or fragments thereof, preferably of sequences in general encoded in the nucleus with the aid of the targeting sequences mentioned for example in Table a alone, Table b alone, or in combination with other targeting sequences preferably into plastids or mitochondria, respectively, the nucleic acids of the invention can directly be introduced into the plastidal or mitochondrial genome. Therefore in a preferred embodiment the respective nucleic acid sequences shown in the respective line in Table I, application no. 2, columns 5 or 8, preferably the coding region thereof, or homologs or fragments thereof, are directly introduced and expressed in plastids e.g, if for the nucleic acid molecule in the respective line in Table I, column 6, the term “plastidic” is indicated, or are directly introduced and expressed in mitochondria e.g., if for the nucleic acid molecule in the respective line in Table I, column 6 the term “mitochondrial” is indicated.

[8552] The term “introduced” in the context of this specification shall mean the insertion of a nucleic acid sequence into the organism by means of a “transfection”, “transduction” or preferably by “transformation”.

[8553] A plastid, such as a chloroplast, or a mitochondrion, has been “transformed” by an exogenous (preferably foreign) nucleic acid sequence if a nucleic acid sequence has been introduced into the plastid or mitochondrion that means that this sequence has crossed the membrane or the membranes of the plastid or of the mitochondrion. The exogenous, preferably foreign, DNA may be integrated (covalently linked) into plastid or mitochondrial DNA making up the genome of the plastid or mitochondrion, or it may remain unintegrated (e.g., by including a chloroplast origin of replication). “Stably” integrated DNA sequences are those, which are inherited through plastid or mitochondrion replication, thereby transferring new plastids or mitochondria, with the features of the integrated DNA sequence to the progeny.

[8554] [0080.1.1.2] to [0083.1.1.2] for the disclosure of these paragraphs see [0080.1.1.1] to [0083.1.1.1] above.

[8555] For the process of the present invention it may be of great advantage that by transforming the plastids the intraspecies specific transgene flow is blocked, because a lot of species such as corn, cotton and rice have a strict maternal inheritance of plastids. By placing the respective genes specified in the respective line in Table I, application no. 2, columns 5 or 8, preferably the coding region, or homologs or fragments thereof, e.g. if for the nucleic acid molecule in the respective line in column 6 of Table I the term “plastidic” is indicated, in the plastids of plants, these genes will not be present in the pollen of said plants.

[8556] A further preferred embodiment of the invention relates to the use of so called “chloroplast localization sequences”, in which a first RNA sequence or molecule is capable of transporting or “chaperoning” a second RNA sequence, such as a RNA sequence transcribed from the sequences depicted in the respective line in Table I, application no. 2, columns 5 or 8, preferably the coding region theeof, or a homolog or a fragment thereof, or a sequence encoding a protein, as depicted in the respective line in Table II, application no. 2, columns 5 and 8, or a homolog or a fragment thereof, from an external environment inside a cell or outside a plastid into a chloroplast. In one embodiment the chloroplast localization signal is substantially similar or complementary to a complete or intact viroid sequence. The chloroplast localization signal may be encoded by a DNA sequence, which is transcribed into the chloroplast localization RNA. The term “viroid” refers to a naturally occurring single stranded RNA molecule (Flores, C. R. Acad. Sci. III. 324 (10), 943 (2001)). Viroids usually contain about 200-500 nucleotides and generally exist as circular molecules. Examples of viroids that contain chloroplast localization signals include but are not limeted to ASBVd, PLMVd, CChMVd and ELVd. The viroid sequence or a functional part of it can be fused to the sequences depicted in the respective line in Table I, application no. 2, columns 5 or 8, preferably the coding region thereof, or a homolog or a fragment thereof, or a sequence encoding a protein, as depicted in the respective line in Table II, application no. 2, columns 5 or 8, or a homolog or a fragment thereof, in such a manner that the viroid sequence transports a sequence transcribed from a sequence as depicted in th erespective line in Table I, application no. 2 columns 5 or 8, preferably the coding region thereof, or a homolog or a fragment thereof, or a sequence encoding a protein as depicted in th erespective line in Table II, application no. 2 columns 5 or 8, or a homolog or a fragment thereof, into the chloroplasts, e.g. if for the nucleic acid molecule in column 6 of Table I the term “plastidic” is indicated. A preferred embodiment uses a modified ASBVd (Navarro et al., Virology. 268 (1), 218 (2000)).

[8557] In a further specific embodiment the protein to be expressed in the plastids such as the proteins depicted in the respective line in Table II, application no. 2, columns 5 or 8, or a homolog or a fragment thereof, e.g. if for the nucleic acid molecule in the respective line in column 6 of Table I the term “plastidic” is indicated, are encoded by different nucleic acids. Such a method is disclosed in WO 2004/040973, which shall be incorporated by reference. WO 2004/040973 teaches a method, which relates to the translocation of an RNA corresponding to a gene or gene fragment into the chloroplast by means of a chloroplast localization sequence. The genes, which should be expressed in the plant or plant cells, are split into nucleic acid fragments, which are introduced into different compartments in the plant e.g. the nucleus, the plastids and/or mitochondria. Additionally plant cells are described in which the chloroplast contains a ribozyme fused at one end to an RNA encoding a fragment of a protein used in the inventive process such that the ribozyme can trans-splice the translocated fusion RNA to the RNA encoding the gene fragment to form and as the case may be reunite the nucleic acid fragments to an intact mRNA encoding a functional protein for example as disclosed in the respective line in Table II, application no. 2, columns 5 or 8, or a homolog or a fragment thereof.

[8558] In a preferred embodiment of the invention the nucleic acid sequences as shown in the respective line in Table I, application no. 2, columns 5 or 8, preferably the coding region thereof, or homologs or fragments thereof, e.g. if for the nucleic acid molecule in the respective line in column 6 of Table I the term “plastidic” is indicated, used in the inventive process are transformed into plastids, which are metabolical active. Those plastids should preferably maintain at a high copy number in the plant or plant tissue of interest, most preferably the chloroplasts found in green plant tissues, such as leaves or cotyledons or in seeds.

[8559] For a good expression in the plastids the nucleic acid sequences as shown in th erespective line in Table I, application no. 2, columns 5 or 8, preferably the coding region thereof, or homologs or fargments thereof, e.g. if for the nucleic acid molecule in the respective line in column 6 of Table I the term “plastidic” is indicated, are introduced into an expression cassette using preferably a promoter and terminater, which are active in plastids preferably a chloroplast promoter. Examples of such promoters include the psbA promoter from the gene from spinach or pea, the rbcL promoter, and the atpB promoter from corn.

[8560] [0089.1.1.2] to [0092.1.1.2] for the disclosure of these paragraphs see [0089.1.1.1] to [0092.1.1.1] above.

[8561] Advantageously the process for the production of the fine chemical arginine, glutamate, glutamine, and/or proline leads to an enhanced production of the respective fine chemical. The terms “enhanced” or “increase” mean at least a 10%, 20%, 30%, 40% or 50%, preferably at least 60%, 70%, 80%, 90% or 100%, more preferably 150%, 200%, 300%, 400% or 500% higher production of the respective fine chemical arginine, glutamate, glutamine, and/or proline in comparison to the wild-type as defined above, e.g. that means in comparison to a non-human organism without the aforementioned modification of the activity of a protein as shown in the respective line in Table II, application no. 2, column 5 or 8, or a fragment or a homolog thereof. The modification of the activity of a protein as shown in the respective line in Table II, application no. 2, column 5 or 8, or a homolog or a fragment thereof, or their combination can be achieved by joining the protein to a respective transit peptide, e.g. if for the respective encoding nucleic acid molecule in column 6 of Table I the term “plastidic” or “mitochondrial” is indicated.

[8562] Surprisingly it was found, that the transgenic expression of a protein as shown in the respective line in Table II, application no. 2, column 5, especially from the Saccaromyces cerevisiae, E. coli, Arabidopsis thaliana, Azotobacter vinelandii, Brassica napus, Glycine max, Oryza sativa, Physcomitrella patens, Synechocystis sp., Thermus thermophilus, Zea mays in a non-human organism, like a plant or a part thereof, such as Arabidopsis thaliana for example, or a microorganism, conferred a production of or an increase in arginine, glutamate, glutamine, and/or proline,respectively, to the transgenic non-human organism as compared to a corresponding non-transformed wild type.

[8563] In one embodiment the transgenic expression of a protein as shown in the respective line in Table II, application no. 2, column 5 or 8, or a homolog or a fragment thereof, especially from the Saccaromyces cerevisiae, E. coli, Arabidopsis thaliana, Azotobacter vinelandii, Brassica napus, Glycine max, Oryza sativa, Physcomitrella patens, Synechocystis sp., Thermus thermophilus, Zea mays in a non-human organism, like a plant or a part thereof, such as Arabidopsis thaliana for example, or a microorganism, confers a production of or an increase in arginine, glutamate, glutamine, and/or proline, respectively, to the transgenic non-human organism as compared to a corresponding non-transformed wild type.

[8564] Accordingly, in one embodiment, an increase of glutamate in a non-human organism, as compared to a corresponding non-transformed wild type non-human organism, is conferred in the process of the invention, if the activity of a polypeptide showing the activity of a 47266012-protein, or if the activity of the polypeptide 47266012_SOYBEAN, preferably represented by SEQ ID NO. 15188, or a homolog or fragment thereof, or if the activity of a polypeptide encoded by a nucleic acid molecule comprising the nucleic acid SEQ ID NO. 15187, preferably the coding region thereof, or a homolog or fragment thereof, e.g. derived from Glycine max, is increased or generated. For example the activity of a nucleic acid molecule or a polypeptide comprising the nucleic acid, preferably the coding region thereof, or polypeptide or the consensus sequence or the polypeptide motif, as depicted in Table I, II or IV, application No. 2, column 5 or 8 in the respective same line as the nucleic acid molecule SEQ ID NO. 15187 or polypeptide SEQ ID NO. 15188, respectively, or a homolog or a fragment thereof, is increased or generated, or if the activity 47266012-protein is increased or generated in a non-human organism, like a microorganism or a plant cell, plant or part thereof, especially with non-targeted localization, whereby the respective line discloses in column 7 glutamate. For example, an increase of the glutamate of at least 1 percent, particularly in a range of 42 to 96 -percent is conferred as compared to a corresponding non-transformed wild type non-human organism.

[8565] Accordingly, in one embodiment, an increase of glutamine in a non-human organism, as compared to a corresponding non-transformed wild type non-human organism, is conferred in the process of the invention, if the activity of a polypeptide showing the activity of a 47266012-protein, or if the activity of the polypeptide 47266012_SOYBEAN, preferably represented by SEQ ID NO. 15188, or a homolog or fragment thereof, or if the activity of a polypeptide encoded by a nucleic acid molecule comprising the nucleic acid SEQ ID NO. 15187, preferably the coding region thereof, or a homolog or fragment thereof, e.g. derived from Glycine max, is increased or generated. For example the activity of a nucleic acid molecule or a polypeptide comprising the nucleic acid, preferably the coding region thereof, or polypeptide or the consensus sequence or the polypeptide motif, as depicted in Table I, II or IV, application No. 2, column 5 or 8 in the respective same line as the nucleic acid molecule SEQ ID NO. 15187 or polypeptide SEQ ID NO. 15188, respectively, or a homolog or a fragment thereof, is increased or generated, or if the activity 47266012-protein is increased or generated in a non-human organism, like a microorganism or a plant cell, plant or part thereof, especially with non-targeted localization, whereby the respective line discloses in column 7 glutamine. For example, an increase of the glutamine of at least 1 percent, particularly in a range of 72 to 234-percent is conferred as compared to a corresponding non-transformed wild type non-human organism.

[8566] Accordingly, in one embodiment, an increase of glutamate in a non-human organism, as compared to a corresponding non-transformed wild type non-human organism, is conferred in the process of the invention, if the activity of a polypeptide showing the activity of a 49747384_SOYBEAN-protein, or if the activity of the polypeptide 49747384_SOYBEAN, preferably represented by SEQ ID NO. 70, or a homolog or fragment thereof, or if the activity of a polypeptide encoded by a nucleic acid molecule comprising the nucleic acid SEQ ID NO. 69, preferably the coding region thereof, or a homolog or fragment thereof, e.g. derived from Glycine max, is increased or generated. For example the activity of a nucleic acid molecule or a polypeptide comprising the nucleic acid, preferably the coding region thereof, or polypeptide or the consensus sequence or the polypeptide motif, as depicted in Table I, II or IV, application No. 2, column 5 or 8 in the respective same line as the nucleic acid molecule SEQ ID NO. 69 or polypeptide SEQ ID NO. 70, respectively, or a homolog or a fragment thereof, is increased or generated, or if the activity 49747384_SOYBEAN-protein is increased or generated in a non-human organism, like a microorganism or a plant cell, plant or part thereof, especially with non-targeted localization, whereby the respective line discloses in column 7 glutamate. For example, an increase of the glutamate of at least 1 percent, particularly in a range of 37 to 122-percent is conferred as compared to a corresponding non-transformed wild type non-human organism.

[8567] Accordingly, in one embodiment, an increase of glutamate in a non-human organism, as compared to a corresponding non-transformed wild type non-human organism, is conferred in the process of the invention, if the activity of a polypeptide showing the activity of a pyruvate kinase, or if the activity of the polypeptide 51340801_CANOLA, preferably represented by SEQ ID NO. 15533, or a homolog or fragment thereof, or if the activity of a polypeptide encoded by a nucleic acid molecule comprising the nucleic acid SEQ ID NO. 15532, preferably the coding region thereof, or a homolog or fragment thereof, e.g. derived from Brassica napus, is increased or generated. For example the activity of a nucleic acid molecule or a polypeptide comprising the nucleic acid, preferably the coding region thereof, or polypeptide or the consensus sequence or the polypeptide motif, as depicted in Table I, II or IV, application No. 2, column 5 or 8 in the respective same line as the nucleic acid molecule SEQ ID NO. 15532 or polypeptide SEQ ID NO. 15533, respectively, or a homolog or a fragment thereof, is increased or generated, or if the activity pyruvate kinase is increased or generated in a non-human organism, like a microorganism or a plant cell, plant or part thereof, especially with plastidic localization, whereby the respective line discloses in column 7 glutamate. For example, an increase of the glutamate of at least 1 percent, particularly in a range of 35 to 135-percent is conferred as compared to a corresponding non-transformed wild type non-human organism.

[8568] Accordingly, in one embodiment, an increase of proline in a non-human organism, as compared to a corresponding non-transformed wild type non-human organism, is conferred in the process of the invention, if the activity of a polypeptide showing the activity of a pyruvate kinase, or if the activity of the polypeptide 51340801_CANOLA, preferably represented by SEQ ID NO. 15533, or a homolog or fragment thereof, or if the activity of a polypeptide encoded by a nucleic acid molecule comprising the nucleic acid SEQ ID NO. 15532, preferably the coding region thereof, or a homolog or fragment thereof, e.g. derived from Brassica napus, is increased or generated. For example the activity of a nucleic acid molecule or a polypeptide comprising the nucleic acid, preferably the coding region thereof, or polypeptide or the consensus sequence or the polypeptide motif, as depicted in Table I, II or IV, application No. 2, column 5 or 8 in the respective same line as the nucleic acid molecule SEQ ID NO. 15532 or polypeptide SEQ ID NO. 15533, respectively, or a homolog or a fragment thereof, is increased or generated, or if the activity pyruvate kinase is increased or generated in a non-human organism, like a microorganism or a plant cell, plant or part thereof, especially with plastidic localization, whereby the respective line discloses in column 7 proline. For example, an increase of the proline of at least 1 percent, particularly in a range of 38 to 189-percent is conferred as compared to a corresponding non-transformed wild type non-human organism.

[8569] Accordingly, in one embodiment, an increase of arginine in a non-human organism, as compared to a corresponding non-transformed wild type non-human organism, is conferred in the process of the invention, if the activity of a polypeptide showing the activity of a acetyltransferase, or if the activity of the polypeptide 59547452_SOYBEAN, preferably represented by SEQ ID NO. 16156, or a homolog or fragment thereof, or if the activity of a polypeptide encoded by a nucleic acid molecule comprising the nucleic acid SEQ ID NO. 16155, preferably the coding region thereof, or a homolog or fragment thereof, e.g. derived from Glycine max, is increased or generated. For example the activity of a nucleic acid molecule or a polypeptide comprising the nucleic acid, preferably the coding region thereof, or polypeptide or the consensus sequence or the polypeptide motif, as depicted in Table I, II or IV, application No. 2, column 5 or 8 in the respective same line as the nucleic acid molecule SEQ ID NO. 16155 or polypeptide SEQ ID NO. 16156, respectively, or a homolog or a fragment thereof, is increased or generated, or if the activity acetyltransferase is increased or generated in a non-human organism, like a microorganism or a plant cell, plant or part thereof, especially with non-targeted localization, whereby the respective line discloses in column 7 arginine. For example, an increase of the arginine of at least 1 percent, particularly in a range of 65 to 457-percent is conferred as compared to a corresponding non-transformed wild type non-human organism.

[8570] Accordingly, in one embodiment, an increase of glutamate in a non-human organism, as compared to a corresponding non-transformed wild type non-human organism, is conferred in the process of the invention, if the activity of a polypeptide showing the activity of a pyruvate kinase, or if the activity of the polypeptide 59554615_SOYBEAN, preferably represented by SEQ ID NO. 16264, or a homolog or fragment thereof, or if the activity of a polypeptide encoded by a nucleic acid molecule comprising the nucleic acid SEQ ID NO. 16263, preferably the coding region thereof, or a homolog or fragment thereof, e.g. derived from Glycine max, is increased or generated. For example the activity of a nucleic acid molecule or a polypeptide comprising the nucleic acid, preferably the coding region thereof, or polypeptide or the consensus sequence or the polypeptide motif, as depicted in Table I, II or IV, application No. 2, column 5 or 8 in the respective same line as the nucleic acid molecule SEQ ID NO. 16263 or polypeptide SEQ ID NO. 16264, respectively, or a homolog or a fragment thereof, is increased or generated, or if the activity pyruvate kinase is increased or generated in a non-human organism, like a microorganism or a plant cell, plant or part thereof, especially with plastidic localization, whereby the respective line discloses in column 7 glutamate. For example, an increase of the glutamate of at least 1 percent, particularly in a range of 44 to 80-percent is conferred as compared to a corresponding non-transformed wild type non-human organism.

[8571] Accordingly, in one embodiment, an increase of arginine in a non-human organism, as compared to a corresponding non-transformed wild type non-human organism, is conferred in the process of the invention, if the activity of a polypeptide showing the activity of a glucose-6-phosphate 1-dehydrogenase, or if the activity of the polypeptide 59582753_SOYBEAN, preferably represented by SEQ ID NO. 16884, or a homolog or fragment thereof, or if the activity of a polypeptide encoded by a nucleic acid molecule comprising the nucleic acid SEQ ID NO. 16883, preferably the coding region thereof, or a homolog or fragment thereof, e.g. derived from Glycine max, is increased or generated. For example the activity of a nucleic acid molecule or a polypeptide comprising the nucleic acid, preferably the coding region thereof, or polypeptide or the consensus sequence or the polypeptide motif, as depicted in Table I, II or IV, application No. 2, column 5 or 8 in the respective same line as the nucleic acid molecule SEQ ID NO. 16883 or polypeptide SEQ ID NO. 16884, respectively, or a homolog or a fragment thereof, is increased or generated, or if the activity glucose-6-phosphate 1-dehydrogenase is increased or generated in a non-human organism, like a microorganism or a plant cell, plant or part thereof, especially with plastidic localization, whereby the respective line discloses in column 7 arginine. For example, an increase of the arginine of at least 1 percent, particularly in a range of 66 to 241-percent is conferred as compared to a corresponding non-transformed wild type non-human organism.

[8572] Accordingly, in one embodiment, an increase of proline in a non-human organism, as compared to a corresponding non-transformed wild type non-human organism, is conferred in the process of the invention, if the activity of a polypeptide showing the activity of a glucose-6-phosphate 1-dehydrogenase, or if the activity of the polypeptide 59582753_SOYBEAN, preferably represented by SEQ ID NO. 16884, or a homolog or fragment thereof, or if the activity of a polypeptide encoded by a nucleic acid molecule comprising the nucleic acid SEQ ID NO. 16883, preferably the coding region thereof, or a homolog or fragment thereof, e.g. derived from Glycine max, is increased or generated. For example the activity of a nucleic acid molecule or a polypeptide comprising the nucleic acid, preferably the coding region thereof, or polypeptide or the consensus sequence or the polypeptide motif, as depicted in Table I, II or IV, application No. 2, column 5 or 8 in the respective same line as the nucleic acid molecule SEQ ID NO. 16883 or polypeptide SEQ ID NO. 16884, respectively, or a homolog or a fragment thereof, is increased or generated, or if the activity glucose-6-phosphate 1-dehydrogenase is increased or generated in a non-human organism, like a microorganism or a plant cell, plant or part thereof, especially with plastidic localization, whereby the respective line discloses in column 7 proline. For example, an increase of the proline of at least 1 percent, particularly in a range of 34 to 204-percent is conferred as compared to a corresponding non-transformed wild type non-human organism.

[8573] Accordingly, in one embodiment, an increase of arginine in a non-human organism, as compared to a corresponding non-transformed wild type non-human organism, is conferred in the process of the invention, if the activity of a polypeptide showing the activity of a amino acid acetyltransferase, or if the activity of the polypeptide AAC43185, preferably represented by SEQ ID NO. 17357, or a homolog or fragment thereof, or if the activity of a polypeptide encoded by a nucleic acid molecule comprising the nucleic acid SEQ ID NO. 17356, preferably the coding region thereof, or a homolog or fragment thereof, e.g. derived from Arabidopsis thaliana, is increased or generated. For example the activity of a nucleic acid molecule or a polypeptide comprising the nucleic acid, preferably the coding region thereof, or polypeptide or the consensus sequence or the polypeptide motif, as depicted in Table I, II or IV, application No. 2, column 5 or 8 in the respective same line as the nucleic acid molecule SEQ ID NO. 17356 or polypeptide SEQ ID NO. 17357, respectively, or a homolog or a fragment thereof, is increased or generated, or if the activity amino acid acetyltransferase is increased or generated in a non-human organism, like a microorganism or a plant cell, plant or part thereof, especially with plastidic localization, whereby the respective line discloses in column 7 arginine. For example, an increase of the arginine of at least 1 percent, particularly in a range of 586 to 3134-percent is conferred as compared to a corresponding non-transformed wild type non-human organism.

[8574] Accordingly, in one embodiment, an increase of glutamate in a non-human organism, as compared to a corresponding non-transformed wild type non-human organism, is conferred in the process of the invention, if the activity of a polypeptide showing the activity of a protein phosphatase, or if the activity of the polypeptide At1g07430, preferably represented by SEQ ID NO. 17452, or a homolog or fragment thereof, or if the activity of a polypeptide encoded by a nucleic acid molecule comprising the nucleic acid SEQ ID NO. 17451, preferably the coding region thereof, or a homolog or fragment thereof, e.g. derived from Arabidopsis thaliana, is increased or generated. For example the activity of a nucleic acid molecule or a polypeptide comprising the nucleic acid, preferably the coding region thereof, or polypeptide or the consensus sequence or the polypeptide motif, as depicted in Table I, II or IV, application No. 2, column 5 or 8 in the respective same line as the nucleic acid molecule SEQ ID NO. 17451 or polypeptide SEQ ID NO. 17452, respectively, or a homolog or a fragment thereof, is increased or generated, or if the activity protein phosphatase is increased or generated in a non-human organism, like a microorganism or a plant cell, plant or part thereof, especially with non-targeted localization, whereby the respective line discloses in column 7 glutamate. For example, an increase of the glutamate of at least 1 percent, particularly in a range of 39 to 67-percent is conferred as compared to a corresponding non-transformed wild type non-human organism.

[8575] Accordingly, in one embodiment, an increase of glutamine in a non-human organism, as compared to a corresponding non-transformed wild type non-human organism, is conferred in the process of the invention, if the activity of a polypeptide showing the activity of a protein phosphatase, or if the activity of the polypeptide At1g07430, preferably represented by SEQ ID NO. 17452, or a homolog or fragment thereof, or if the activity of a polypeptide encoded by a nucleic acid molecule comprising the nucleic acid SEQ ID NO. 17451, preferably the coding region thereof, or a homolog or fragment thereof, e.g. derived from Arabidopsis thaliana, is increased or generated. For example the activity of a nucleic acid molecule or a polypeptide comprising the nucleic acid, preferably the coding region thereof, or polypeptide or the consensus sequence or the polypeptide motif, as depicted in Table I, II or IV, application No. 2, column 5 or 8 in the respective same line as the nucleic acid molecule SEQ ID NO. 17451 or polypeptide SEQ ID NO. 17452, respectively, or a homolog or a fragment thereof, is increased or generated, or if the activity protein phosphatase is increased or generated in a non-human organism, like a microorganism or a plant cell, plant or part thereof, especially with non-targeted localization, whereby the respective line discloses in column 7 glutamine. For example, an increase of the glutamine of at least 1 percent, particularly in a range of 27 to 35-percent is conferred as compared to a corresponding non-transformed wild type non-human organism.

[8576] Accordingly, in one embodiment, an increase of arginine in a non-human organism, as compared to a corresponding non-transformed wild type non-human organism, is conferred in the process of the invention, if the activity of a polypeptide showing the activity of a At1g17440-protein, or if the activity of the polypeptide At1g17440, preferably represented by SEQ ID NO. 17602, or a homolog or fragment thereof, or if the activity of a polypeptide encoded by a nucleic acid molecule comprising the nucleic acid SEQ ID NO. 17601, preferably the coding region thereof, or a homolog or fragment thereof, e.g. derived from Arabidopsis thaliana, is increased or generated. For example the activity of a nucleic acid molecule or a polypeptide comprising the nucleic acid, preferably the coding region thereof, or polypeptide or the consensus sequence or the polypeptide motif, as depicted in Table I, II or IV, application No. 2, column 5 or 8 in the respective same line as the nucleic acid molecule SEQ ID NO. 17601 or polypeptide SEQ ID NO. 17602, respectively, or a homolog or a fragment thereof, is increased or generated, or if the activity At1g17440-protein is increased or generated in a non-human organism, like a microorganism or a plant cell, plant or part thereof, especially with non-targeted localization, whereby the respective line discloses in column 7 arginine. For example, an increase of the arginine of at least 1 percent, particularly in a range of 54 to 181-percent is conferred as compared to a corresponding non-transformed wild type non-human organism.

[8577] Accordingly, in one embodiment, an increase of glutamine in a non-human organism, as compared to a corresponding non-transformed wild type non-human organism, is conferred in the process of the invention, if the activity of a polypeptide showing the activity of a At1g19800-protein, or if the activity of the polypeptide At1g19800, preferably represented by SEQ ID NO. 17638, or a homolog or fragment thereof, or if the activity of a polypeptide encoded by a nucleic acid molecule comprising the nucleic acid SEQ ID NO. 17637, preferably the coding region thereof, or a homolog or fragment thereof, e.g. derived from Arabidopsis thaliana, is increased or generated. For example the activity of a nucleic acid molecule or a polypeptide comprising the nucleic acid, preferably the coding region thereof, or polypeptide or the consensus sequence or the polypeptide motif, as depicted in Table I, II or IV, application No. 2, column 5 or 8 in the respective same line as the nucleic acid molecule SEQ ID NO. 17637 or polypeptide SEQ ID NO. 17638, respectively, or a homolog or a fragment thereof, is increased or generated, or if the activity At1g19800-protein is increased or generated in a non-human organism, like a microorganism or a plant cell, plant or part thereof, especially with non-targeted localization, whereby the respective line discloses in column 7 glutamine. For example, an increase of the glutamine of at least 1 percent, particularly in a range of 53 to 175-percent is conferred as compared to a corresponding non-transformed wild type non-human organism.

[8578] Accordingly, in one embodiment, an increase of arginine in a non-human organism, as compared to a corresponding non-transformed wild type non-human organism, is conferred in the process of the invention, if the activity of a polypeptide showing the activity of a cullin, or if the activity of the polypeptide At1g26830, preferably represented by SEQ ID NO. 17702, or a homolog or fragment thereof, or if the activity of a polypeptide encoded by a nucleic acid molecule comprising the nucleic acid SEQ ID NO. 17701, preferably the coding region thereof, or a homolog or fragment thereof, e.g. derived from Arabidopsis thaliana, is increased or generated. For example the activity of a nucleic acid molecule or a polypeptide comprising the nucleic acid, preferably the coding region thereof, or polypeptide or the consensus sequence or the polypeptide motif, as depicted in Table I, II or IV, application No. 2, column 5 or 8 in the respective same line as the nucleic acid molecule SEQ ID NO. 17701 or polypeptide SEQ ID NO. 17702, respectively, or a homolog or a fragment thereof, is increased or generated, or if the activity cullin is increased or generated in a non-human organism, like a microorganism or a plant cell, plant or part thereof, especially with non-targeted localization, whereby the respective line discloses in column 7 arginine. For example, an increase of the arginine of at least 1 percent, particularly in a range of 64 to 354-percent is conferred as compared to a corresponding non-transformed wild type non-human organism.

[8579] Accordingly, in one embodiment, an increase of proline in a non-human organism, as compared to a corresponding non-transformed wild type non-human organism, is conferred in the process of the invention, if the activity of a polypeptide showing the activity of a cullin, or if the activity of the polypeptide At1g26830, preferably represented by SEQ ID NO. 17702, or a homolog or fragment thereof, or if the activity of a polypeptide encoded by a nucleic acid molecule comprising the nucleic acid SEQ ID NO. 17701, preferably the coding region thereof, or a homolog or fragment thereof, e.g. derived from Arabidopsis thaliana, is increased or generated. For example the activity of a nucleic acid molecule or a polypeptide comprising the nucleic acid, preferably the coding region thereof, or polypeptide or the consensus sequence or the polypeptide motif, as depicted in Table I, II or IV, application No. 2, column 5 or 8 in the respective same line as the nucleic acid molecule SEQ ID NO. 17701 or polypeptide SEQ ID NO. 17702, respectively, or a homolog or a fragment thereof, is increased or generated, or if the activity cullin is increased or generated in a non-human organism, like a microorganism or a plant cell, plant or part thereof, especially with non-targeted localization, whereby the respective line discloses in column 7 proline. For example, an increase of the proline of at least 1 percent, particularly in a range of 65 to 193-percent is conferred as compared to a corresponding non-transformed wild type non-human organism.

[8580] Accordingly, in one embodiment, an increase of arginine in a non-human organism, as compared to a corresponding non-transformed wild type non-human organism, is conferred in the process of the invention, if the activity of a polypeptide showing the activity of a At1g29350-protein, or if the activity of the polypeptide At1g29350, preferably represented by SEQ ID NO. 17902, or a homolog or fragment thereof, or if the activity of a polypeptide encoded by a nucleic acid molecule comprising the nucleic acid SEQ ID NO. 17901, preferably the coding region thereof, or a homolog or fragment thereof, e.g. derived from Arabidopsis thaliana, is increased or generated. For example the activity of a nucleic acid molecule or a polypeptide comprising the nucleic acid, preferably the coding region thereof, or polypeptide or the consensus sequence or the polypeptide motif, as depicted in Table I, II or IV, application No. 2, column 5 or 8 in the respective same line as the nucleic acid molecule SEQ ID NO. 17901 or polypeptide SEQ ID NO. 17902, respectively, or a homolog or a fragment thereof, is increased or generated, or if the activity At1g29350-protein is increased or generated in a non-human organism, like a microorganism or a plant cell, plant or part thereof, especially with non-targeted localization, whereby the respective line discloses in column 7 arginine. For example, an increase of the arginine of at least 1 percent, particularly in a range of 51 to 249-percent is conferred as compared to a corresponding non-transformed wild type non-human organism.

[8581] Accordingly, in one embodiment, an increase of arginine in a non-human organism, as compared to a corresponding non-transformed wild type non-human organism, is conferred in the process of the invention, if the activity of a polypeptide showing the activity of a eukaryotic translation initiation factor 5, or if the activity of the polypeptide At1g36730, preferably represented by SEQ ID NO. 17969, or a homolog or fragment thereof, or if the activity of a polypeptide encoded by a nucleic acid molecule comprising the nucleic acid SEQ ID NO. 17968, preferably the coding region thereof, or a homolog or fragment thereof, e.g. derived from Arabidopsis thaliana, is increased or generated. For example the activity of a nucleic acid molecule or a polypeptide comprising the nucleic acid, preferably the coding region thereof, or polypeptide or the consensus sequence or the polypeptide motif, as depicted in Table I, II or IV, application No. 2, column 5 or 8 in the respective same line as the nucleic acid molecule SEQ ID NO. 17968 or polypeptide SEQ ID NO. 17969, respectively, or a homolog or a fragment thereof, is increased or generated, or if the activity eukaryotic translation initiation factor 5 is increased or generated in a non-human organism, like a microorganism or a plant cell, plant or part thereof, especially with non-targeted localization, whereby the respective line discloses in column 7 arginine. For example, an increase of the arginine of at least 1 percent, particularly in a range of 56 to 193-percent is conferred as compared to a corresponding non-transformed wild type non-human organism.

[8582] Accordingly, in one embodiment, an increase of glutamine in a non-human organism, as compared to a corresponding non-transformed wild type non-human organism, is conferred in the process of the invention, if the activity of a polypeptide showing the activity of a eukaryotic translation initiation factor 5, or if the activity of the polypeptide At1g36730, preferably represented by SEQ ID NO. 17969, or a homolog or fragment thereof, or if the activity of a polypeptide encoded by a nucleic acid molecule comprising the nucleic acid SEQ ID NO. 17968, preferably the coding region thereof, or a homolog or fragment thereof, e.g. derived from Arabidopsis thaliana, is increased or generated. For example the activity of a nucleic acid molecule or a polypeptide comprising the nucleic acid, preferably the coding region thereof, or polypeptide or the consensus sequence or the polypeptide motif, as depicted in Table I, II or IV, application No. 2, column 5 or 8 in the respective same line as the nucleic acid molecule SEQ ID NO. 17968 or polypeptide SEQ ID NO. 17969, respectively, or a homolog or a fragment thereof, is increased or generated, or if the activity eukaryotic translation initiation factor 5 is increased or generated in a non-human organism, like a microorganism or a plant cell, plant or part thereof, especially with non-targeted localization, whereby the respective line discloses in column 7 glutamine. For example, an increase of the glutamine of at least 1 percent, particularly in a range of 48 to 136-percent is conferred as compared to a corresponding non-transformed wild type non-human organism.

[8583] Accordingly, in one embodiment, an increase of arginine in a non-human organism, as compared to a corresponding non-transformed wild type non-human organism, is conferred in the process of the invention, if the activity of a polypeptide showing the activity of a transcriptional regulator, or if the activity of the polypeptide At1g43850, preferably represented by SEQ ID NO. 18071, or a homolog or fragment thereof, or if the activity of a polypeptide encoded by a nucleic acid molecule comprising the nucleic acid SEQ ID NO. 18070, preferably the coding region thereof, or a homolog or fragment thereof, e.g. derived from Arabidopsis thaliana, is increased or generated. For example the activity of a nucleic acid molecule or a polypeptide comprising the nucleic acid, preferably the coding region thereof, or polypeptide or the consensus sequence or the polypeptide motif, as depicted in Table I, II or IV, application No. 2, column 5 or 8 in the respective same line as the nucleic acid molecule SEQ ID NO. 18070 or polypeptide SEQ ID NO. 18071, respectively, or a homolog or a fragment thereof, is increased or generated, or if the activity transcriptional regulator is increased or generated in a non-human organism, like a microorganism or a plant cell, plant or part thereof, especially with non-targeted localization, whereby the respective line discloses in column 7 arginine. For example, an increase of the arginine of at least 1 percent, particularly in a range of 49 to 294-percent is conferred as compared to a corresponding non-transformed wild type non-human organism.

[8584] Accordingly, in one embodiment, an increase of glutamate in a non-human organism, as compared to a corresponding non-transformed wild type non-human organism, is conferred in the process of the invention, if the activity of a polypeptide showing the activity of a transcriptional regulator, or if the activity of the polypeptide At1g43850, preferably represented by SEQ ID NO. 18071, or a homolog or fragment thereof, or if the activity of a polypeptide encoded by a nucleic acid molecule comprising the nucleic acid SEQ ID NO. 18070, preferably the coding region thereof, or a homolog or fragment thereof, e.g. derived from Arabidopsis thaliana, is increased or generated. For example the activity of a nucleic acid molecule or a polypeptide comprising the nucleic acid, preferably the coding region thereof, or polypeptide or the consensus sequence or the polypeptide motif, as depicted in Table I, II or IV, application No. 2, column 5 or 8 in the respective same line as the nucleic acid molecule SEQ ID NO. 18070 or polypeptide SEQ ID NO. 18071, respectively, or a homolog or a fragment thereof, is increased or generated, or if the activity transcriptional regulator is increased or generated in a non-human organism, like a microorganism or a plant cell, plant or part thereof, especially with non-targeted localization, whereby the respective line discloses in column 7 glutamate. For example, an increase of the glutamate of at least 1 percent, particularly in a range of 54 to 158-percent is conferred as compared to a corresponding non-transformed wild type non-human organism.

[8585] Accordingly, in one embodiment, an increase of glutamine in a non-human organism, as compared to a corresponding non-transformed wild type non-human organism, is conferred in the process of the invention, if the activity of a polypeptide showing the activity of a transcriptional regulator, or if the activity of the polypeptide At1g43850, preferably represented by SEQ ID NO. 18071, or a homolog or fragment thereof, or if the activity of a polypeptide encoded by a nucleic acid molecule comprising the nucleic acid SEQ ID NO. 18070, preferably the coding region thereof, or a homolog or fragment thereof, e.g. derived from Arabidopsis thaliana, is increased or generated. For example the activity of a nucleic acid molecule or a polypeptide comprising the nucleic acid, preferably the coding region thereof, or polypeptide or the consensus sequence or the polypeptide motif, as depicted in Table I, II or IV, application No. 2, column 5 or 8 in the respective same line as the nucleic acid molecule SEQ ID NO. 18070 or polypeptide SEQ ID NO. 18071, respectively, or a homolog or a fragment thereof, is increased or generated, or if the activity transcriptional regulator is increased or generated in a non-human organism, like a microorganism or a plant cell, plant or part thereof, especially with non-targeted localization, whereby the respective line discloses in column 7 glutamine. For example, an increase of the glutamine of at least 1 percent, particularly in a range of 42 to 488-percent is conferred as compared to a corresponding non-transformed wild type non-human organism.

[8586] Accordingly, in one embodiment, an increase of proline in a non-human organism, as compared to a corresponding non-transformed wild type non-human organism, is conferred in the process of the invention, if the activity of a polypeptide showing the activity of a transcriptional regulator, or if the activity of the polypeptide At1g43850, preferably represented by SEQ ID NO. 18071, or a homolog or fragment thereof, or if the activity of a polypeptide encoded by a nucleic acid molecule comprising the nucleic acid SEQ ID NO. 18070, preferably the coding region thereof, or a homolog or fragment thereof, e.g. derived from Arabidopsis thaliana, is increased or generated. For example the activity of a nucleic acid molecule or a polypeptide comprising the nucleic acid, preferably the coding region thereof, or polypeptide or the consensus sequence or the polypeptide motif, as depicted in Table I, II or IV, application No. 2, column 5 or 8 in the respective same line as the nucleic acid molecule SEQ ID NO. 18070 or polypeptide SEQ ID NO. 18071, respectively, or a homolog or a fragment thereof, is increased or generated, or if the activity transcriptional regulator is increased or generated in a non-human organism, like a microorganism or a plant cell, plant or part thereof, especially with non-targeted localization, whereby the respective line discloses in column 7 proline. For example, an increase of the proline of at least 1 percent, particularly in a range of 38 to 520-percent is conferred as compared to a corresponding non-transformed wild type non-human organism.

[8587] Accordingly, in one embodiment, an increase of proline in a non-human organism, as compared to a corresponding non-transformed wild type non-human organism, is conferred in the process of the invention, if the activity of a polypeptide showing the activity of a At1g47380-protein, or if the activity of the polypeptide At1g47380, preferably represented by SEQ ID NO. 18123, or a homolog or fragment thereof, or if the activity of a polypeptide encoded by a nucleic acid molecule comprising the nucleic acid SEQ ID NO. 18122, preferably the coding region thereof, or a homolog or fragment thereof, e.g. derived from Arabidopsis thaliana, is increased or generated. For example the activity of a nucleic acid molecule or a polypeptide comprising the nucleic acid, preferably the coding region thereof, or polypeptide or the consensus sequence or the polypeptide motif, as depicted in Table I, II or IV, application No. 2, column 5 or 8 in the respective same line as the nucleic acid molecule SEQ ID NO. 18122 or polypeptide SEQ ID NO. 18123, respectively, or a homolog or a fragment thereof, is increased or generated, or if the activity At1g47380-protein is increased or generated in a non-human organism, like a microorganism or a plant cell, plant or part thereof, especially with non-targeted localization, whereby the respective line discloses in column 7 proline. For example, an increase of the proline of at least 1 percent, particularly in a range of 39 to 237-percent is conferred as compared to a corresponding non-transformed wild type non-human organism.

[8588] Accordingly, in one embodiment, an increase of arginine in a non-human organism, as compared to a corresponding non-transformed wild type non-human organism, is conferred in the process of the invention, if the activity of a polypeptide showing the activity of a protein kinase, or if the activity of the polypeptide At1g48260, preferably represented by SEQ ID NO. 18236, or a homolog or fragment thereof, or if the activity of a polypeptide encoded by a nucleic acid molecule comprising the nucleic acid SEQ ID NO. 18235, preferably the coding region thereof, or a homolog or fragment thereof, e.g. derived from Arabidopsis thaliana, is increased or generated. For example the activity of a nucleic acid molecule or a polypeptide comprising the nucleic acid, preferably the coding region thereof, or polypeptide or the consensus sequence or the polypeptide motif, as depicted in Table I, II or IV, application No. 2, column 5 or 8 in the respective same line as the nucleic acid molecule SEQ ID NO. 18235 or polypeptide SEQ ID NO. 18236, respectively, or a homolog or a fragment thereof, is increased or generated, or if the activity protein kinase is increased or generated in a non-human organism, like a microorganism or a plant cell, plant or part thereof, especially with non-targeted localization, whereby the respective line discloses in column 7 arginine. For example, an increase of the arginine of at least 1 percent, particularly in a range of 70 to 338-percent is conferred as compared to a corresponding non-transformed wild type non-human organism.

[8589] Accordingly, in one embodiment, an increase of glutamate in a non-human organism, as compared to a corresponding non-transformed wild type non-human organism, is conferred in the process of the invention, if the activity of a polypeptide showing the activity of a protein kinase, or if the activity of the polypeptide At1g48260, preferably represented by SEQ ID NO. 18236, or a homolog or fragment thereof, or if the activity of a polypeptide encoded by a nucleic acid molecule comprising the nucleic acid SEQ ID NO. 18235, preferably the coding region thereof, or a homolog or fragment thereof, e.g. derived from Arabidopsis thaliana, is increased or generated. For example the activity of a nucleic acid molecule or a polypeptide comprising the nucleic acid, preferably the coding region thereof, or polypeptide or the consensus sequence or the polypeptide motif, as depicted in Table I, II or IV, application No. 2, column 5 or 8 in the respective same line as the nucleic acid molecule SEQ ID NO. 18235 or polypeptide SEQ ID NO. 18236, respectively, or a homolog or a fragment thereof, is increased or generated, or if the activity protein kinase is increased or generated in a non-human organism, like a microorganism or a plant cell, plant or part thereof, especially with non-targeted localization, whereby the respective line discloses in column 7 glutamate. For example, an increase of the glutamate of at least 1 percent, particularly in a range of 53 to 362-percent is conferred as compared to a corresponding non-transformed wild type non-human organism.

[8590] Accordingly, in one embodiment, an increase of proline in a non-human organism, as compared to a corresponding non-transformed wild type non-human organism, is conferred in the process of the invention, if the activity of a polypeptide showing the activity of a protein kinase, or if the activity of the polypeptide At1g48260, preferably represented by SEQ ID NO. 18236, or a homolog or fragment thereof, or if the activity of a polypeptide encoded by a nucleic acid molecule comprising the nucleic acid SEQ ID NO. 18235, preferably the coding region thereof, or a homolog or fragment thereof, e.g. derived from Arabidopsis thaliana, is increased or generated. For example the activity of a nucleic acid molecule or a polypeptide comprising the nucleic acid, preferably the coding region thereof, or polypeptide or the consensus sequence or the polypeptide motif, as depicted in Table I, II or IV, application No. 2, column 5 or 8 in the respective same line as the nucleic acid molecule SEQ ID NO. 18235 or polypeptide SEQ ID NO. 18236, respectively, or a homolog or a fragment thereof, is increased or generated, or if the activity protein kinase is increased or generated in a non-human organism, like a microorganism or a plant cell, plant or part thereof, especially with non-targeted localization, whereby the respective line discloses in column 7 proline. For example, an increase of the proline of at least 1 percent, particularly in a range of 34 to 108-percent is conferred as compared to a corresponding non-transformed wild type non-human organism.

[8591] Accordingly, in one embodiment, an increase of arginine in a non-human organism, as compared to a corresponding non-transformed wild type non-human organism, is conferred in the process of the invention, if the activity of a polypeptide showing the activity of a calciumdependent protein kinase, or if the activity of the polypeptide At1g61950, preferably represented by SEQ ID NO. 18870, or a homolog or fragment thereof, or if the activity of a polypeptide encoded by a nucleic acid molecule comprising the nucleic acid SEQ ID NO. 18869, preferably the coding region thereof, or a homolog or fragment thereof, e.g. derived from Arabidopsis thaliana, is increased or generated. For example the activity of a nucleic acid molecule or a polypeptide comprising the nucleic acid, preferably the coding region thereof, or polypeptide or the consensus sequence or the polypeptide motif, as depicted in Table I, II or IV, application No. 2, column 5 or 8 in the respective same line as the nucleic acid molecule SEQ ID NO. 18869 or polypeptide SEQ ID NO. 18870, respectively, or a homolog or a fragment thereof, is increased or generated, or if the activity calcium-dependent protein kinase is increased or generated in a non-human organism, like a microorganism or a plant cell, plant or part thereof, especially with non-targeted localization, whereby the respective line discloses in column 7 arginine. For example, an increase of the arginine of at least 1 percent, particularly in a range of 89 to 385-percent is conferred as compared to a corresponding non-transformed wild type non-human organism.

[8592] Accordingly, in one embodiment, an increase of glutamine in a non-human organism, as compared to a corresponding non-transformed wild type non-human organism, is conferred in the process of the invention, if the activity of a polypeptide showing the activity of a calciumdependent protein kinase, or if the activity of the polypeptide At1g61950, preferably represented by SEQ ID NO. 18870, or a homolog or fragment thereof, or if the activity of a polypeptide encoded by a nucleic acid molecule comprising the nucleic acid SEQ ID NO. 18869, preferably the coding region thereof, or a homolog or fragment thereof, e.g. derived from Arabidopsis thaliana, is increased or generated. For example the activity of a nucleic acid molecule or a polypeptide comprising the nucleic acid, preferably the coding region thereof, or polypeptide or the consensus sequence or the polypeptide motif, as depicted in Table I, II or IV, application No. 2, column 5 or 8 in the respective same line as the nucleic acid molecule SEQ ID NO. 18869 or polypeptide SEQ ID NO. 18870, respectively, or a homolog or a fragment thereof, is increased or generated, or if the activity calcium-dependent protein kinase is increased or generated in a non-human organism, like a microorganism or a plant cell, plant or part thereof, especially with non-targeted localization, whereby the respective line discloses in column 7 glutamine. For example, an increase of the glutamine of at least 1 percent, particularly in a range of 54 to 319-percent is conferred as compared to a corresponding non-transformed wild type non-human organism.

[8593] Accordingly, in one embodiment, an increase of proline in a non-human organism, as compared to a corresponding non-transformed wild type non-human organism, is conferred in the process of the invention, if the activity of a polypeptide showing the activity of a At1g67340-protein, or if the activity of the polypeptide At1g67340, preferably represented by SEQ ID NO. 19365, or a homolog or fragment thereof, or if the activity of a polypeptide encoded by a nucleic acid molecule comprising the nucleic acid SEQ ID NO. 19364, preferably the coding region thereof, or a homolog or fragment thereof, e.g. derived from Arabidopsis thaliana, is increased or generated. For example the activity of a nucleic acid molecule or a polypeptide comprising the nucleic acid, preferably the coding region thereof, or polypeptide or the consensus sequence or the polypeptide motif, as depicted in Table I, II or IV, application No. 2, column 5 or 8 in the respective same line as the nucleic acid molecule SEQ ID NO. 19364 or polypeptide SEQ ID NO. 19365, respectively, or a homolog or a fragment thereof, is increased or generated, or if the activity At1g67340-protein is increased or generated in a non-human organism, like a microorganism or a plant cell, plant or part thereof, especially with non-targeted localization, whereby the respective line discloses in column 7 proline. For example, an increase of the proline of at least 1 percent, particularly in a range of 36 to 86-percent is conferred as compared to a corresponding non-transformed wild type non-human organism.

[8594] Accordingly, in one embodiment, an increase of glutamine in a non-human organism, as compared to a corresponding non-transformed wild type non-human organism, is conferred in the process of the invention, if the activity of a polypeptide showing the activity of a transcription factor, or if the activity of the polypeptide At1g68320, preferably represented by SEQ ID NO. 1062, or a homolog or fragment thereof, or if the activity of a polypeptide encoded by a nucleic acid molecule comprising the nucleic acid SEQ ID NO. 1061, preferably the coding region thereof, or a homolog or fragment thereof, e.g. derived from Arabidopsis thaliana, is increased or generated. For example the activity of a nucleic acid molecule or a polypeptide comprising the nucleic acid, preferably the coding region thereof, or polypeptide or the consensus sequence or the polypeptide motif, as depicted in Table I, II or IV, application No. 2, column 5 or 8 in the respective same line as the nucleic acid molecule SEQ ID NO. 1061 or polypeptide SEQ ID NO. 1062, respectively, or a homolog or a fragment thereof, is increased or generated, or if the activity transcription factor is increased or generated in a non-human organism, like a microorganism or a plant cell, plant or part thereof, especially with non-targeted localization, whereby the respective line discloses in column 7 glutamine. For example, an increase of the glutamine of at least 1 percent, particularly in a range of 57 to 183-percent is conferred as compared to a corresponding non-transformed wild type non-human organism.

[8595] Accordingly, in one embodiment, an increase of glutamine in a non-human organism, as compared to a corresponding non-transformed wild type non-human organism, is conferred in the process of the invention, if the activity of a polypeptide showing the activity of a protein phosphatase, or if the activity of the polypeptide At1g72770, preferably represented by SEQ ID NO. 19420, or a homolog or fragment thereof, or if the activity of a polypeptide encoded by a nucleic acid molecule comprising the nucleic acid SEQ ID NO. 19419, preferably the coding region thereof, or a homolog or fragment thereof, e.g. derived from Arabidopsis thaliana, is increased or generated. For example the activity of a nucleic acid molecule or a polypeptide comprising the nucleic acid, preferably the coding region thereof, or polypeptide or the consensus sequence or the polypeptide motif, as depicted in Table I, II or IV, application No. 2, column 5 or 8 in the respective same line as the nucleic acid molecule SEQ ID NO. 19419 or polypeptide SEQ ID NO. 19420, respectively, or a homolog or a fragment thereof, is increased or generated, or if the activity protein phosphatase is increased or generated in a non-human organism, like a microorganism or a plant cell, plant or part thereof, especially with non-targeted localization, whereby the respective line discloses in column 7 glutamine. For example, an increase of the glutamine of at least 1 percent, particularly in a range of 44 to 290-percent is conferred as compared to a corresponding non-transformed wild type non-human organism.

[8596] Accordingly, in one embodiment, an increase of proline in a non-human organism, as compared to a corresponding non-transformed wild type non-human organism, is conferred in the process of the invention, if the activity of a polypeptide showing the activity of a transcription factor, or if the activity of the polypeptide At2g17560, preferably represented by SEQ ID NO. 19503, or a homolog or fragment thereof, or if the activity of a polypeptide encoded by a nucleic acid molecule comprising the nucleic acid SEQ ID NO. 19502, preferably the coding region thereof, or a homolog or fragment thereof, e.g. derived from Arabidopsis thaliana, is increased or generated. For example the activity of a nucleic acid molecule or a polypeptide comprising the nucleic acid, preferably the coding region thereof, or polypeptide or the consensus sequence or the polypeptide motif, as depicted in Table I, II or IV, application No. 2, column 5 or 8 in the respective same line as the nucleic acid molecule SEQ ID NO. 19502 or polypeptide SEQ ID NO. 19503, respectively, or a homolog or a fragment thereof, is increased or generated, or if the activity transcription factor is increased or generated in a non-human organism, like a microorganism or a plant cell, plant or part thereof, especially with non-targeted localization, whereby the respective line discloses in column 7 proline. For example, an increase of the proline of at least 1 percent, particularly in a range of 39 to 181-percent is conferred as compared to a corresponding non-transformed wild type non-human organism.

[8597] Accordingly, in one embodiment, an increase of glutamate in a non-human organism, as compared to a corresponding non-transformed wild type non-human organism, is conferred in the process of the invention, if the activity of a polypeptide showing the activity of a protein phosphatase, or if the activity of the polypeptide At2g25070, preferably represented by SEQ ID NO. 1299, or a homolog or fragment thereof, or if the activity of a polypeptide encoded by a nucleic acid molecule comprising the nucleic acid SEQ ID NO. 1298, preferably the coding region thereof, or a homolog or fragment thereof, e.g. derived from Arabidopsis thaliana, is increased or generated. For example the activity of a nucleic acid molecule or a polypeptide comprising the nucleic acid, preferably the coding region thereof, or polypeptide or the consensus sequence or the polypeptide motif, as depicted in Table I, II or IV, application No. 2, column 5 or 8 in the respective same line as the nucleic acid molecule SEQ ID NO. 1298 or polypeptide SEQ ID NO. 1299, respectively, or a homolog or a fragment thereof, is increased or generated, or if the activity protein phosphatase is increased or generated in a non-human organism, like a microorganism or a plant cell, plant or part thereof, especially with non-targeted localization, whereby the respective line discloses in column 7 glutamate. For example, an increase of the glutamate of at least 1 percent, particularly in a range of 33 to 77-percent is conferred as compared to a corresponding non-transformed wild type non-human organism.

[8598] Accordingly, in one embodiment, an increase of glutamine in a non-human organism, as compared to a corresponding non-transformed wild type non-human organism, is conferred in the process of the invention, if the activity of a polypeptide showing the activity of a protein phosphatase, or if the activity of the polypeptide At2g25070, preferably represented by SEQ ID NO. 1299, or a homolog or fragment thereof, or if the activity of a polypeptide encoded by a nucleic acid molecule comprising the nucleic acid SEQ ID NO. 1298, preferably the coding region thereof, or a homolog or fragment thereof, e.g. derived from Arabidopsis thaliana, is increased or generated. For example the activity of a nucleic acid molecule or a polypeptide comprising the nucleic acid, preferably the coding region thereof, or polypeptide or the consensus sequence or the polypeptide motif, as depicted in Table I, II or IV, application No. 2, column 5 or 8 in the respective same line as the nucleic acid molecule SEQ ID NO. 1298 or polypeptide SEQ ID NO. 1299, respectively, or a homolog or a fragment thereof, is increased or generated, or if the activity protein phosphatase is increased or generated in a non-human organism, like a microorganism or a plant cell, plant or part thereof, especially with non-targeted localization, whereby the respective line discloses in column 7 glutamine. For example, an increase of the glutamine of at least 1 percent, particularly in a range of 60 to 213-percent is conferred as compared to a corresponding non-transformed wild type non-human organism.

[8599] Accordingly, in one embodiment, an increase of proline in a non-human organism, as compared to a corresponding non-transformed wild type non-human organism, is conferred in the process of the invention, if the activity of a polypeptide showing the activity of a serine protease inhibitor, or if the activity of the polypeptide At2g26390, preferably represented by SEQ ID NO. 19672, or a homolog or fragment thereof, or if the activity of a polypeptide encoded by a nucleic acid molecule comprising the nucleic acid SEQ ID NO. 19671, preferably the coding region thereof, or a homolog or fragment thereof, e.g. derived from Arabidopsis thaliana, is increased or generated. For example the activity of a nucleic acid molecule or a polypeptide comprising the nucleic acid, preferably the coding region thereof, or polypeptide or the consensus sequence or the polypeptide motif, as depicted in Table I, II or IV, application No. 2, column 5 or 8 in the respective same line as the nucleic acid molecule SEQ ID NO. 19671 or polypeptide SEQ ID NO. 19672, respectively, or a homolog or a fragment thereof, is increased or generated, or if the activity serine protease inhibitor is increased or generated in a non-human organism, like a microorganism or a plant cell, plant or part thereof, especially with non-targeted localization, whereby the respective line discloses in column 7 proline. For example, an increase of the proline of at least 1 percent, particularly in a range of 38 to 120-percent is conferred as compared to a corresponding non-transformed wild type non-human organism.

[8600] Accordingly, in one embodiment, an increase of proline in a non-human organism, as compared to a corresponding non-transformed wild type non-human organism, is conferred in the process of the invention, if the activity of a polypeptide showing the activity of a protein phosphatase, or if the activity of the polypeptide At2g28890, preferably represented by SEQ ID NO. 19875, or a homolog or fragment thereof, or if the activity of a polypeptide encoded by a nucleic acid molecule comprising the nucleic acid SEQ ID NO. 19874, preferably the coding region thereof, or a homolog or fragment thereof, e.g. derived from Arabidopsis thaliana, is increased or generated. For example the activity of a nucleic acid molecule or a polypeptide comprising the nucleic acid, preferably the coding region thereof, or polypeptide or the consensus sequence or the polypeptide motif, as depicted in Table I, II or IV, application No. 2, column 5 or 8 in the respective same line as the nucleic acid molecule SEQ ID NO. 19874 or polypeptide SEQ ID NO. 19875, respectively, or a homolog or a fragment thereof, is increased or generated, or if the activity protein phosphatase is increased or generated in a non-human organism, like a microorganism or a plant cell, plant or part thereof, especially with non-targeted localization, whereby the respective line discloses in column 7 proline. For example, an increase of the proline of at least 1 percent, particularly in a range of 36 to 716-percent is conferred as compared to a corresponding non-transformed wild type non-human organism.

[8601] Accordingly, in one embodiment, an increase of glutamine in a non-human organism, as compared to a corresponding non-transformed wild type non-human organism, is conferred in the process of the invention, if the activity of a polypeptide showing the activity of a CBL-interacting protein kinase, or if the activity of the polypeptide At2g30360, preferably represented by SEQ ID NO. 19920, or a homolog or fragment thereof, or if the activity of a polypeptide encoded by a nucleic acid molecule comprising the nucleic acid SEQ ID NO. 19919, preferably the coding region thereof, or a homolog or fragment thereof, e.g. derived from Arabidopsis thaliana, is increased or generated. For example the activity of a nucleic acid molecule or a polypeptide comprising the nucleic acid, preferably the coding region thereof, or polypeptide or the consensus sequence or the polypeptide motif, as depicted in Table I, II or IV, application No. 2, column 5 or 8 in the respective same line as the nucleic acid molecule SEQ ID NO. 19919 or polypeptide SEQ ID NO. 19920, respectively, or a homolog or a fragment thereof, is increased or generated, or if the activity CBL-interacting protein kinase is increased or generated in a non-human organism, like a microorganism or a plant cell, plant or part thereof, especially with non-targeted localization, whereby the respective line discloses in column 7 glutamine. For example, an increase of the glutamine of at least 1 percent, particularly in a range of 46 to 170-percent is conferred as compared to a corresponding non-transformed wild type non-human organism.

[8602] Accordingly, in one embodiment, an increase of proline in a non-human organism, as compared to a corresponding non-transformed wild type non-human organism, is conferred in the process of the invention, if the activity of a polypeptide showing the activity of a CBL-interacting protein kinase, or if the activity of the polypeptide At2g30360, preferably represented by SEQ ID NO. 19920, or a homolog or fragment thereof, or if the activity of a polypeptide encoded by a nucleic acid molecule comprising the nucleic acid SEQ ID NO. 19919, preferably the coding region thereof, or a homolog or fragment thereof, e.g. derived from Arabidopsis thaliana, is increased or generated. For example the activity of a nucleic acid molecule or a polypeptide comprising the nucleic acid, preferably the coding region thereof, or polypeptide or the consensus sequence or the polypeptide motif, as depicted in Table I, II or IV, application No. 2, column 5 or 8 in the respective same line as the nucleic acid molecule SEQ ID NO. 19919 or polypeptide SEQ ID NO. 19920, respectively, or a homolog or a fragment thereof, is increased or generated, or if the activity CBL-interacting protein kinase is increased or generated in a non-human organism, like a microorganism or a plant cell, plant or part thereof, especially with non-targeted localization, whereby the respective line discloses in column 7 proline. For example, an increase of the proline of at least 1 percent, particularly in a range of 43 to 132-percent is conferred as compared to a corresponding non-transformed wild type non-human organism.

[8603] Accordingly, in one embodiment, an increase of arginine in a non-human organism, as compared to a corresponding non-transformed wild type non-human organism, is conferred in the process of the invention, if the activity of a polypeptide showing the activity of a glutaredoxin, or if the activity of the polypeptide At2g30540, preferably represented by SEQ ID NO. 20347, or a homolog or fragment thereof, or if the activity of a polypeptide encoded by a nucleic acid molecule comprising the nucleic acid SEQ ID NO. 20346, preferably the coding region thereof, or a homolog or fragment thereof, e.g. derived from Arabidopsis thaliana, is increased or generated. For example the activity of a nucleic acid molecule or a polypeptide comprising the nucleic acid, preferably the coding region thereof, or polypeptide or the consensus sequence or the polypeptide motif, as depicted in Table I, II or IV, application No. 2, column 5 or 8 in the respective same line as the nucleic acid molecule SEQ ID NO. 20346 or polypeptide SEQ ID NO. 20347, respectively, or a homolog or a fragment thereof, is increased or generated, or if the activity glutaredoxin is increased or generated in a non-human organism, like a microorganism or a plant cell, plant or part thereof, especially with non-targeted localization, whereby the respective line discloses in column 7 arginine. For example, an increase of the arginine of at least 1 percent, particularly in a range of 62 to 285-percent is conferred as compared to a corresponding non-transformed wild type non-human organism.

[8604] Accordingly, in one embodiment, an increase of proline in a non-human organism, as compared to a corresponding non-transformed wild type non-human organism, is conferred in the process of the invention, if the activity of a polypeptide showing the activity of a glutaredoxin, or if the activity of the polypeptide At2g30540, preferably represented by SEQ ID NO. 20347, or a homolog or fragment thereof, or if the activity of a polypeptide encoded by a nucleic acid molecule comprising the nucleic acid SEQ ID NO. 20346, preferably the coding region thereof, or a homolog or fragment thereof, e.g. derived from Arabidopsis thaliana, is increased or generated. For example the activity of a nucleic acid molecule or a polypeptide comprising the nucleic acid, preferably the coding region thereof, or polypeptide or the consensus sequence or the polypeptide motif, as depicted in Table I, II or IV, application No. 2, column 5 or 8 in the respective same line as the nucleic acid molecule SEQ ID NO. 20346 or polypeptide SEQ ID NO. 20347, respectively, or a homolog or a fragment thereof, is increased or generated, or if the activity glutaredoxin is increased or generated in a non-human organism, like a microorganism or a plant cell, plant or part thereof, especially with non-targeted localization, whereby the respective line discloses in column 7 proline. For example, an increase of the proline of at least 1 percent, particularly in a range of 71 to 1094-percent is conferred as compared to a corresponding non-transformed wild type non-human organism.

[8605] Accordingly, in one embodiment, an increase of proline in a non-human organism, as compared to a corresponding non-transformed wild type non-human organism, is conferred in the process of the invention, if the activity of a polypeptide showing the activity of a CBL-interacting protein kinase, or if the activity of the polypeptide At2g34180, preferably represented by SEQ ID NO. 20579, or a homolog or fragment thereof, or if the activity of a polypeptide encoded by a nucleic acid molecule comprising the nucleic acid SEQ ID NO. 20578, preferably the coding region thereof, or a homolog or fragment thereof, e.g. derived from Arabidopsis thaliana, is increased or generated. For example the activity of a nucleic acid molecule or a polypeptide comprising the nucleic acid, preferably the coding region thereof, or polypeptide or the consensus sequence or the polypeptide motif, as depicted in Table I, II or IV, application No. 2, column 5 or 8 in the respective same line as the nucleic acid molecule SEQ ID NO. 20578 or polypeptide SEQ ID NO. 20579, respectively, or a homolog or a fragment thereof, is increased or generated, or if the activity CBL-interacting protein kinase is increased or generated in a non-human organism, like a microorganism or a plant cell, plant or part thereof, especially with non-targeted localization, whereby the respective line discloses in column 7 proline. For example, an increase of the proline of at least 1 percent, particularly in a range of 37 to 136-percent is conferred as compared to a corresponding non-transformed wild type non-human organism.

[8606] Accordingly, in one embodiment, an increase of proline in a non-human organism, as compared to a corresponding non-transformed wild type non-human organism, is conferred in the process of the invention, if the activity of a polypeptide showing the activity of a delta-1-pyrroline 5-carboxylase synthetase, or if the activity of the polypeptide At2g39800, preferably represented by SEQ ID NO. 21009, or a homolog or fragment thereof, or if the activity of a polypeptide encoded by a nucleic acid molecule comprising the nucleic acid SEQ ID NO. 21008, preferably the coding region thereof, or a homolog or fragment thereof, e.g. derived from Arabidopsis thaliana, is increased or generated. For example the activity of a nucleic acid molecule or a polypeptide comprising the nucleic acid, preferably the coding region thereof, or polypeptide or the consensus sequence or the polypeptide motif, as depicted in Table I, II or IV, application No. 2, column 5 or 8 in the respective same line as the nucleic acid molecule SEQ ID NO. 21008 or polypeptide SEQ ID NO. 21009, respectively, or a homolog or a fragment thereof, is increased or generated, or if the activity delta-1-pyrroline 5-carboxylase synthetase is increased or generated in a non-human organism, like a microorganism or a plant cell, plant or part thereof, especially with non-targeted localization, whereby the respective line discloses in column 7 proline. For example, an increase of the proline of at least 1 percent, particularly in a range of 106 to 4073-percent is conferred as compared to a corresponding non-transformed wild type non-human organism.

[8607] Accordingly, in one embodiment, an increase of glutamine in a non-human organism, as compared to a corresponding non-transformed wild type non-human organism, is conferred in the process of the invention, if the activity of a polypeptide showing the activity of a phosphatidylinositol 3- and 4-kinase family protein, or if the activity of the polypeptide At2g46500, preferably represented by SEQ ID NO. 21107, or a homolog or fragment thereof, or if the activity of a polypeptide encoded by a nucleic acid molecule comprising the nucleic acid SEQ ID NO. 21106, preferably the coding region thereof, or a homolog or fragment thereof, e.g. derived from Arabidopsis thaliana, is increased or generated. For example the activity of a nucleic acid molecule or a polypeptide comprising the nucleic acid, preferably the coding region thereof, or polypeptide or the consensus sequence or the polypeptide motif, as depicted in Table I, II or IV, application No. 2, column 5 or 8 in the respective same line as the nucleic acid molecule SEQ ID NO. 21106 or polypeptide SEQ ID NO. 21107, respectively, or a homolog or a fragment thereof, is increased or generated, or if the activity phosphatidylinositol 3- and 4-kinase family protein is increased or generated in a non-human organism, like a microorganism or a plant cell, plant or part thereof, especially with non-targeted localization, whereby the respective line discloses in column 7 glutamine. For example, an increase of the glutamine of at least 1 percent, particularly in a range of 44 to 135-percent is conferred as compared to a corresponding non-transformed wild type non-human organism.

[8608] Accordingly, in one embodiment, an increase of arginine in a non-human organism, as compared to a corresponding non-transformed wild type non-human organism, is conferred in the process of the invention, if the activity of a polypeptide showing the activity of a glutaredoxin, or if the activity of the polypeptide At2g47880, preferably represented by SEQ ID NO. 21160, or a homolog or fragment thereof, or if the activity of a polypeptide encoded by a nucleic acid molecule comprising the nucleic acid SEQ ID NO. 21159, preferably the coding region thereof, or a homolog or fragment thereof, e.g. derived from Arabidopsis thaliana, is increased or generated. For example the activity of a nucleic acid molecule or a polypeptide comprising the nucleic acid, preferably the coding region thereof, or polypeptide or the consensus sequence or the polypeptide motif, as depicted in Table I, II or IV, application No. 2, column 5 or 8 in the respective same line as the nucleic acid molecule SEQ ID NO. 21159 or polypeptide SEQ ID NO. 21160, respectively, or a homolog or a fragment thereof, is increased or generated, or if the activity glutaredoxin is increased or generated in a non-human organism, like a microorganism or a plant cell, plant or part thereof, especially with non-targeted localization, whereby the respective line discloses in column 7 arginine. For example, an increase of the arginine of at least 1 percent, particularly in a range of 253 to 1026-percent is conferred as compared to a corresponding non-transformed wild type non-human organism.

[8609] Accordingly, in one embodiment, an increase of glutamine in a non-human organism, as compared to a corresponding non-transformed wild type non-human organism, is conferred in the process of the invention, if the activity of a polypeptide showing the activity of a glutaredoxin, or if the activity of the polypeptide At2g47880, preferably represented by SEQ ID NO. 21160, or a homolog or fragment thereof, or if the activity of a polypeptide encoded by a nucleic acid molecule comprising the nucleic acid SEQ ID NO. 21159, preferably the coding region thereof, or a homolog or fragment thereof, e.g. derived from Arabidopsis thaliana, is increased or generated. For example the activity of a nucleic acid molecule or a polypeptide comprising the nucleic acid, preferably the coding region thereof, or polypeptide or the consensus sequence or the polypeptide motif, as depicted in Table I, II or IV, application No. 2, column 5 or 8 in the respective same line as the nucleic acid molecule SEQ ID NO. 21159 or polypeptide SEQ ID NO. 21160, respectively, or a homolog or a fragment thereof, is increased or generated, or if the activity glutaredoxin is increased or generated in a non-human organism, like a microorganism or a plant cell, plant or part thereof, especially with non-targeted localization, whereby the respective line discloses in column 7 glutamine. For example, an increase of the glutamine of at least 1 percent, particularly in a range of 90 to 179-percent is conferred as compared to a corresponding non-transformed wild type non-human organism.

[8610] Accordingly, in one embodiment, an increase of proline in a non-human organism, as compared to a corresponding non-transformed wild type non-human organism, is conferred in the process of the invention, if the activity of a polypeptide showing the activity of a glutaredoxin, or if the activity of the polypeptide At2g47880, preferably represented by SEQ ID NO. 21160, or a homolog or fragment thereof, or if the activity of a polypeptide encoded by a nucleic acid molecule comprising the nucleic acid SEQ ID NO. 21159, preferably the coding region thereof, or a homolog or fragment thereof, e.g. derived from Arabidopsis thaliana, is increased or generated. For example the activity of a nucleic acid molecule or a polypeptide comprising the nucleic acid, preferably the coding region thereof, or polypeptide or the consensus sequence or the polypeptide motif, as depicted in Table I, II or IV, application No. 2, column 5 or 8 in the respective same line as the nucleic acid molecule SEQ ID NO. 21159 or polypeptide SEQ ID NO. 21160, respectively, or a homolog or a fragment thereof, is increased or generated, or if the activity glutaredoxin is increased or generated in a non-human organism, like a microorganism or a plant cell, plant or part thereof, especially with non-targeted localization, whereby the respective line discloses in column 7 proline. For example, an increase of the proline of at least 1 percent, particularly in a range of 49 to 717-percent is conferred as compared to a corresponding non-transformed wild type non-human organism.

[8611] Accordingly, in one embodiment, an increase of glutamate in a non-human organism, as compared to a corresponding non-transformed wild type non-human organism, is conferred in the process of the invention, if the activity of a polypeptide showing the activity of a pyruvate kinase, or if the activity of the polypeptide At3g04050, preferably represented by SEQ ID NO. 21498, or a homolog or fragment thereof, or if the activity of a polypeptide encoded by a nucleic acid molecule comprising the nucleic acid SEQ ID NO. 21497, preferably the coding region thereof, or a homolog or fragment thereof, e.g. derived from Arabidopsis thaliana, is increased or generated. For example the activity of a nucleic acid molecule or a polypeptide comprising the nucleic acid, preferably the coding region thereof, or polypeptide or the consensus sequence or the polypeptide motif, as depicted in Table I, II or IV, application No. 2, column 5 or 8 in the respective same line as the nucleic acid molecule SEQ ID NO. 21497 or polypeptide SEQ ID NO. 21498, respectively, or a homolog or a fragment thereof, is increased or generated, or if the activity pyruvate kinase is increased or generated in a non-human organism, like a microorganism or a plant cell, plant or part thereof, especially with plastidic localization, whereby the respective line discloses in column 7 glutamate. For example, an increase of the glutamate of at least 1 percent, particularly in a range of 36 to 311-percent is conferred as compared to a corresponding non-transformed wild type non-human organism.

[8612] Accordingly, in one embodiment, an increase of proline in a non-human organism, as compared to a corresponding non-transformed wild type non-human organism, is conferred in the process of the invention, if the activity of a polypeptide showing the activity of a pyruvate kinase, or if the activity of the polypeptide At3g04050, preferably represented by SEQ ID NO. 21498, or a homolog or fragment thereof, or if the activity of a polypeptide encoded by a nucleic acid molecule comprising the nucleic acid SEQ ID NO. 21497, preferably the coding region thereof, or a homolog or fragment thereof, e.g. derived from Arabidopsis thaliana, is increased or generated. For example the activity of a nucleic acid molecule or a polypeptide comprising the nucleic acid, preferably the coding region thereof, or polypeptide or the consensus sequence or the polypeptide motif, as depicted in Table I, II or IV, application No. 2, column 5 or 8 in the respective same line as the nucleic acid molecule SEQ ID NO. 21497 or polypeptide SEQ ID NO. 21498, respectively, or a homolog or a fragment thereof, is increased or generated, or if the activity pyruvate kinase is increased or generated in a non-human organism, like a microorganism or a plant cell, plant or part thereof, especially with plastidic localization, whereby the respective line discloses in column 7 proline. For example, an increase of the proline of at least 1 percent, particularly in a range of 33 to 272-percent is conferred as compared to a corresponding non-transformed wild type non-human organism.

[8613] Accordingly, in one embodiment, an increase of proline in a non-human organism, as compared to a corresponding non-transformed wild type non-human organism, is conferred in the process of the invention, if the activity of a polypeptide showing the activity of a ankyrin repeat family protein, or if the activity of the polypeptide At3g04710, preferably represented by SEQ ID NO. 21903, or a homolog or fragment thereof, or if the activity of a polypeptide encoded by a nucleic acid molecule comprising the nucleic acid SEQ ID NO. 21902, preferably the coding region thereof, or a homolog or fragment thereof, e.g. derived from Arabidopsis thaliana, is increased or generated. For example the activity of a nucleic acid molecule or a polypeptide comprising the nucleic acid, preferably the coding region thereof, or polypeptide or the consensus sequence or the polypeptide motif, as depicted in Table I, II or IV, application No. 2, column 5 or 8 in the respective same line as the nucleic acid molecule SEQ ID NO. 21902 or polypeptide SEQ ID NO. 21903, respectively, or a homolog or a fragment thereof, is increased or generated, or if the activity ankyrin repeat family protein is increased or generated in a non-human organism, like a microorganism or a plant cell, plant or part thereof, especially with non-targeted localization, whereby the respective line discloses in column 7 proline. For example, an increase of the proline of at least 1 percent, particularly in a range of 35 to 230-percent is conferred as compared to a corresponding non-transformed wild type non-human organism.

[8614] Accordingly, in one embodiment, an increase of glutamate in a non-human organism, as compared to a corresponding non-transformed wild type non-human organism, is conferred in the process of the invention, if the activity of a polypeptide showing the activity of a protein phosphatase, or if the activity of the polypeptide At3g06270, preferably represented by SEQ ID NO. 22016, or a homolog or fragment thereof, or if the activity of a polypeptide encoded by a nucleic acid molecule comprising the nucleic acid SEQ ID NO. 22015, preferably the coding region thereof, or a homolog or fragment thereof, e.g. derived from Arabidopsis thaliana, is increased or generated. For example the activity of a nucleic acid molecule or a polypeptide comprising the nucleic acid, preferably the coding region thereof, or polypeptide or the consensus sequence or the polypeptide motif, as depicted in Table I, II or IV, application No. 2, column 5 or 8 in the respective same line as the nucleic acid molecule SEQ ID NO. 22015 or polypeptide SEQ ID NO. 22016, respectively, or a homolog or a fragment thereof, is increased or generated, or if the activity protein phosphatase is increased or generated in a non-human organism, like a microorganism or a plant cell, plant or part thereof, especially with non-targeted localization, whereby the respective line discloses in column 7 glutamate. For example, an increase of the glutamate of at least 1 percent, particularly in a range of 36 to 99-percent is conferred as compared to a corresponding non-transformed wild type non-human organism.

[8615] Accordingly, in one embodiment, an increase of arginine in a non-human organism, as compared to a corresponding non-transformed wild type non-human organism, is conferred in the process of the invention, if the activity of a polypeptide showing the activity of a thioredoxin family protein, or if the activity of the polypeptide At3g08710, preferably represented by SEQ ID NO. 22250, or a homolog or fragment thereof, or if the activity of a polypeptide encoded by a nucleic acid molecule comprising the nucleic acid SEQ ID NO. 22249, preferably the coding region thereof, or a homolog or fragment thereof, e.g. derived from Arabidopsis thaliana, is increased or generated. For example the activity of a nucleic acid molecule or a polypeptide comprising the nucleic acid, preferably the coding region thereof, or polypeptide or the consensus sequence or the polypeptide motif, as depicted in Table I, II or IV, application No. 2, column 5 or 8 in the respective same line as the nucleic acid molecule SEQ ID NO. 22249 or polypeptide SEQ ID NO. 22250, respectively, or a homolog or a fragment thereof, is increased or generated, or if the activity thioredoxin family protein is increased or generated in a non-human organism, like a microorganism or a plant cell, plant or part thereof, especially with non-targeted localization, whereby the respective line discloses in column 7 arginine. For example, an increase of the arginine of at least 1 percent, particularly in a range of 56 to 513-percent is conferred as compared to a corresponding non-transformed wild type non-human organism.

[8616] Accordingly, in one embodiment, an increase of glutamate in a non-human organism, as compared to a corresponding non-transformed wild type non-human organism, is conferred in the process of the invention, if the activity of a polypeptide showing the activity of a thioredoxin family protein, or if the activity of the polypeptide At3g08710, preferably represented by SEQ ID NO. 22250, or a homolog or fragment thereof, or if the activity of a polypeptide encoded by a nucleic acid molecule comprising the nucleic acid SEQ ID NO. 22249, preferably the coding region thereof, or a homolog or fragment thereof, e.g. derived from Arabidopsis thaliana, is increased or generated. For example the activity of a nucleic acid molecule or a polypeptide comprising the nucleic acid, preferably the coding region thereof, or polypeptide or the consensus sequence or the polypeptide motif, as depicted in Table I, II or IV, application No. 2, column 5 or 8 in the respective same line as the nucleic acid molecule SEQ ID NO. 22249 or polypeptide SEQ ID NO. 22250, respectively, or a homolog or a fragment thereof, is increased or generated, or if the activity thioredoxin family protein is increased or generated in a non-human organism, like a microorganism or a plant cell, plant or part thereof, especially with non-targeted localization, whereby the respective line discloses in column 7 glutamate. For example, an increase of the glutamate of at least 1 percent, particularly in a range of 45 to 167-percent is conferred as compared to a corresponding non-transformed wild type non-human organism.

[8617] Accordingly, in one embodiment, an increase of glutamine in a non-human organism, as compared to a corresponding non-transformed wild type non-human organism, is conferred in the process of the invention, if the activity of a polypeptide showing the activity of a thioredoxin family protein, or if the activity of the polypeptide At3g08710, preferably represented by SEQ ID NO. 22250, or a homolog or fragment thereof, or if the activity of a polypeptide encoded by a nucleic acid molecule comprising the nucleic acid SEQ ID NO. 22249, preferably the coding region thereof, or a homolog or fragment thereof, e.g. derived from Arabidopsis thaliana, is increased or generated. For example the activity of a nucleic acid molecule or a polypeptide comprising the nucleic acid, preferably the coding region thereof, or polypeptide or the consensus sequence or the polypeptide motif, as depicted in Table I, II or IV, application No. 2, column 5 or 8 in the respective same line as the nucleic acid molecule SEQ ID NO. 22249 or polypeptide SEQ ID NO. 22250, respectively, or a homolog or a fragment thereof, is increased or generated, or if the activity thioredoxin family protein is increased or generated in a non-human organism, like a microorganism or a plant cell, plant or part thereof, especially with non-targeted localization, whereby the respective line discloses in column 7 glutamine. For example, an increase of the glutamine of at least 1 percent, particularly in a range of 76 to 558-percent is conferred as compared to a corresponding non-transformed wild type non-human organism.

[8618] Accordingly, in one embodiment, an increase of proline in a non-human organism, as compared to a corresponding non-transformed wild type non-human organism, is conferred in the process of the invention, if the activity of a polypeptide showing the activity of a thioredoxin family protein, or if the activity of the polypeptide At3g08710, preferably represented by SEQ ID NO. 22250, or a homolog or fragment thereof, or if the activity of a polypeptide encoded by a nucleic acid molecule comprising the nucleic acid SEQ ID NO. 22249, preferably the coding region thereof, or a homolog or fragment thereof, e.g. derived from Arabidopsis thaliana, is increased or generated. For example the activity of a nucleic acid molecule or a polypeptide comprising the nucleic acid, preferably the coding region thereof, or polypeptide or the consensus sequence or the polypeptide motif, as depicted in Table I, II or IV, application No. 2, column 5 or 8 in the respective same line as the nucleic acid molecule SEQ ID NO. 22249 or polypeptide SEQ ID NO. 22250, respectively, or a homolog or a fragment thereof, is increased or generated, or if the activity thioredoxin family protein is increased or generated in a non-human organism, like a microorganism or a plant cell, plant or part thereof, especially with non-targeted localization, whereby the respective line discloses in column 7 proline. For example, an increase of the proline of at least 1 percent, particularly in a range of 70 to 169-percent is conferred as compared to a corresponding non-transformed wild type non-human organism.

[8619] Accordingly, in one embodiment, an increase of arginine in a non-human organism, as compared to a corresponding non-transformed wild type non-human organism, is conferred in the process of the invention, if the activity of a polypeptide showing the activity of a harpin-induced family protein, or if the activity of the polypeptide At3g11650, preferably represented by SEQ ID NO. 22612, or a homolog or fragment thereof, or if the activity of a polypeptide encoded by a nucleic acid molecule comprising the nucleic acid SEQ ID NO. 22611, preferably the coding region thereof, or a homolog or fragment thereof, e.g. derived from Arabidopsis thaliana, is increased or generated. For example the activity of a nucleic acid molecule or a polypeptide comprising the nucleic acid, preferably the coding region thereof, or polypeptide or the consensus sequence or the polypeptide motif, as depicted in Table I, II or IV, application No. 2, column 5 or 8 in the respective same line as the nucleic acid molecule SEQ ID NO. 22611 or polypeptide SEQ ID NO. 22612, respectively, or a homolog or a fragment thereof, is increased or generated, or if the activity harpin-induced family protein is increased or generated in a non-human organism, like a microorganism or a plant cell, plant or part thereof, especially with non-targeted localization, whereby the respective line discloses in column 7 arginine. For example, an increase of the arginine of at least 1 percent, particularly in a range of 46 to 397-percent is conferred as compared to a corresponding non-transformed wild type non-human organism.

[8620] Accordingly, in one embodiment, an increase of glutamine in a non-human organism, as compared to a corresponding non-transformed wild type non-human organism, is conferred in the process of the invention, if the activity of a polypeptide showing the activity of a harpin-induced family protein, or if the activity of the polypeptide At3g11650, preferably represented by SEQ ID NO. 22612, or a homolog or fragment thereof, or if the activity of a polypeptide encoded by a nucleic acid molecule comprising the nucleic acid SEQ ID NO. 22611, preferably the coding region thereof, or a homolog or fragment thereof, e.g. derived from Arabidopsis thaliana, is increased or generated. For example the activity of a nucleic acid molecule or a polypeptide comprising the nucleic acid, preferably the coding region thereof, or polypeptide or the consensus sequence or the polypeptide motif, as depicted in Table I, II or IV, application No. 2, column 5 or 8 in the respective same line as the nucleic acid molecule SEQ ID NO. 22611 or polypeptide SEQ ID NO. 22612, respectively, or a homolog or a fragment thereof, is increased or generated, or if the activity harpin-induced family protein is increased or generated in a non-human organism, like a microorganism or a plant cell, plant or part thereof, especially with non-targeted localization, whereby the respective line discloses in column 7 glutamine. For example, an increase of the glutamine of at least 1 percent, particularly in a range of 44 to 124-percent is conferred as compared to a corresponding non-transformed wild type non-human organism.

[8621] Accordingly, in one embodiment, an increase of proline in a non-human organism, as compared to a corresponding non-transformed wild type non-human organism, is conferred in the process of the invention, if the activity of a polypeptide showing the activity of a harpin-induced family protein, or if the activity of the polypeptide At3g11650, preferably represented by SEQ ID NO. 22612, or a homolog or fragment thereof, or if the activity of a polypeptide encoded by a nucleic acid molecule comprising the nucleic acid SEQ ID NO. 22611, preferably the coding region thereof, or a homolog or fragment thereof, e.g. derived from Arabidopsis thaliana, is increased or generated. For example the activity of a nucleic acid molecule or a polypeptide comprising the nucleic acid, preferably the coding region thereof, or polypeptide or the consensus sequence or the polypeptide motif, as depicted in Table I, II or IV, application No. 2, column 5 or 8 in the respective same line as the nucleic acid molecule SEQ ID NO. 22611 or polypeptide SEQ ID NO. 22612, respectively, or a homolog or a fragment thereof, is increased or generated, or if the activity harpin-induced family protein is increased or generated in a non-human organism, like a microorganism or a plant cell, plant or part thereof, especially with non-targeted localization, whereby the respective line discloses in column 7 proline. For example, an increase of the proline of at least 1 percent, particularly in a range of 50 to 129-percent is conferred as compared to a corresponding non-transformed wild type non-human organism.

[8622] Accordingly, in one embodiment, an increase of proline in a non-human organism, as compared to a corresponding non-transformed wild type non-human organism, is conferred in the process of the invention, if the activity of a polypeptide showing the activity of a DNA binding protein, or if the activity of the polypeptide At3g14230, preferably represented by SEQ ID NO. 22700, or a homolog or fragment thereof, or if the activity of a polypeptide encoded by a nucleic acid molecule comprising the nucleic acid SEQ ID NO. 22699, preferably the coding region thereof, or a homolog or fragment thereof, e.g. derived from Arabidopsis thaliana, is increased or generated. For example the activity of a nucleic acid molecule or a polypeptide comprising the nucleic acid, preferably the coding region thereof, or polypeptide or the consensus sequence or the polypeptide motif, as depicted in Table I, II or IV, application No. 2, column 5 or 8 in the respective same line as the nucleic acid molecule SEQ ID NO. 22699 or polypeptide SEQ ID NO. 22700, respectively, or a homolog or a fragment thereof, is increased or generated, or if the activity DNA binding protein is increased or generated in a non-human organism, like a microorganism or a plant cell, plant or part thereof, especially with plastidic localization, whereby the respective line discloses in column 7 proline. For example, an increase of the proline of at least 1 percent, particularly in a range of 53 to 142-percent is conferred as compared to a corresponding non-transformed wild type non-human organism.

[8623] Accordingly, in one embodiment, an increase of proline in a non-human organism, as compared to a corresponding non-transformed wild type non-human organism, is conferred in the process of the invention, if the activity of a polypeptide showing the activity of a DNA mismatch repair protein, or if the activity of the polypeptide At3g18524, preferably represented by SEQ ID NO. 22833, or a homolog or fragment thereof, or if the activity of a polypeptide encoded by a nucleic acid molecule comprising the nucleic acid SEQ ID NO. 22832, preferably the coding region thereof, or a homolog or fragment thereof, e.g. derived from Arabidopsis thaliana, is increased or generated. For example the activity of a nucleic acid molecule or a polypeptide comprising the nucleic acid, preferably the coding region thereof, or polypeptide or the consensus sequence or the polypeptide motif, as depicted in Table I, II or IV, application No. 2, column 5 or 8 in the respective same line as the nucleic acid molecule SEQ ID NO. 22832 or polypeptide SEQ ID NO. 22833, respectively, or a homolog or a fragment thereof, is increased or generated, or if the activity DNA mismatch repair protein is increased or generated in a non-human organism, like a microorganism or a plant cell, plant or part thereof, especially with non-targeted localization, whereby the respective line discloses in column 7 proline. For example, an increase of the proline of at least 1 percent, particularly in a range of 38 to 75-percent is conferred as compared to a corresponding non-transformed wild type non-human organism.

[8624] Accordingly, in one embodiment, an increase of proline in a non-human organism, as compared to a corresponding non-transformed wild type non-human organism, is conferred in the process of the invention, if the activity of a polypeptide showing the activity of a CCAAT-binding transcription factor, or if the activity of the polypeptide At3g20910, preferably represented by SEQ ID NO. 22922, or a homolog or fragment thereof, or if the activity of a polypeptide encoded by a nucleic acid molecule comprising the nucleic acid SEQ ID NO. 22921, preferably the coding region thereof, or a homolog or fragment thereof, e.g. derived from Arabidopsis thaliana, is increased or generated. For example the activity of a nucleic acid molecule or a polypeptide comprising the nucleic acid, preferably the coding region thereof, or polypeptide or the consensus sequence or the polypeptide motif, as depicted in Table I, II or IV, application No. 2, column 5 or 8 in the respective same line as the nucleic acid molecule SEQ ID NO. 22921 or polypeptide SEQ ID NO. 22922, respectively, or a homolog or a fragment thereof, is increased or generated, or if the activity CCAAT-binding transcription factor is increased or generated in a non-human organism, like a microorganism or a plant cell, plant or part thereof, especially with non-targeted localization, whereby the respective line discloses in column 7 proline. For example, an increase of the proline of at least 1 percent, particularly in a range of 61 to 204-percent is conferred as compared to a corresponding non-transformed wild type non-human organism.

[8625] Accordingly, in one embodiment, an increase of glutamine in a non-human organism, as compared to a corresponding non-transformed wild type non-human organism, is conferred in the process of the invention, if the activity of a polypeptide showing the activity of a protein kinase, or if the activity of the polypeptide At3g23000, preferably represented by SEQ ID NO. 1816, or a homolog or fragment thereof, or if the activity of a polypeptide encoded by a nucleic acid molecule comprising the nucleic acid SEQ ID NO. 1815, preferably the coding region thereof, or a homolog or fragment thereof, e.g. derived from Arabidopsis thaliana, is increased or generated. For example the activity of a nucleic acid molecule or a polypeptide comprising the nucleic acid, preferably the coding region thereof, or polypeptide or the consensus sequence or the polypeptide motif, as depicted in Table I, II or IV, application No. 2, column 5 or 8 in the respective same line as the nucleic acid molecule SEQ ID NO. 1815 or polypeptide SEQ ID NO. 1816, respectively, or a homolog or a fragment thereof, is increased or generated, or if the activity protein kinase is increased or generated in a non-human organism, like a microorganism or a plant cell, plant or part thereof, especially with non-targeted localization, whereby the respective line discloses in column 7 glutamine. For example, an increase of the glutamine of at least 1 percent, particularly in a range of 79 to 288-percent is conferred as compared to a corresponding non-transformed wild type non-human organism.

[8626] Accordingly, in one embodiment, an increase of proline in a non-human organism, as compared to a corresponding non-transformed wild type non-human organism, is conferred in the process of the invention, if the activity of a polypeptide showing the activity of a glucose-6-phosphate 1-dehydrogenase, or if the activity of the polypeptide At3g27300, preferably represented by SEQ ID NO. 23003, or a homolog or fragment thereof, or if the activity of a polypeptide encoded by a nucleic acid molecule comprising the nucleic acid SEQ ID NO. 23002, preferably the coding region thereof, or a homolog or fragment thereof, e.g. derived from Arabidopsis thaliana, is increased or generated. For example the activity of a nucleic acid molecule or a polypeptide comprising the nucleic acid, preferably the coding region thereof, or polypeptide or the consensus sequence or the polypeptide motif, as depicted in Table I, II or IV, application No. 2, column 5 or 8 in the respective same line as the nucleic acid molecule SEQ ID NO. 23002 or polypeptide SEQ ID NO. 23003, respectively, or a homolog or a fragment thereof, is increased or generated, or if the activity glucose-6-phosphate 1-dehydrogenase is increased or generated in a non-human organism, like a microorganism or a plant cell, plant or part thereof, especially with non-targeted localization, whereby the respective line discloses in column 7 proline. For example, an increase of the proline of at least 1 percent, particularly in a range of 38 to 123-percent is conferred as compared to a corresponding non-transformed wild type non-human organism.

[8627] Accordingly, in one embodiment, an increase of glutamate in a non-human organism, as compared to a corresponding non-transformed wild type non-human organism, is conferred in the process of the invention, if the activity of a polypeptide showing the activity of a monthiol glutaredoxin, or if the activity of the polypeptide At3g62930, preferably represented by SEQ ID NO. 2574, or a homolog or fragment thereof, or if the activity of a polypeptide encoded by a nucleic acid molecule comprising the nucleic acid SEQ ID NO. 2573, preferably the coding region thereof, or a homolog or fragment thereof, e.g. derived from Arabidopsis thaliana, is increased or generated. For example the activity of a nucleic acid molecule or a polypeptide comprising the nucleic acid, preferably the coding region thereof, or polypeptide or the consensus sequence or the polypeptide motif, as depicted in Table I, II or IV, application No. 2, column 5 or 8 in the respective same line as the nucleic acid molecule SEQ ID NO. 2573 or polypeptide SEQ ID NO. 2574, respectively, or a homolog or a fragment thereof, is increased or generated, or if the activity monthiol glutaredoxin is increased or generated in a non-human organism, like a microorganism or a plant cell, plant or part thereof, especially with non-targeted localization, whereby the respective line discloses in column 7 glutamate. For example, an increase of the glutamate of at least 1 percent, particularly in a range of 39 to 132-percent is conferred as compared to a corresponding non-transformed wild type non-human organism.

[8628] Accordingly, in one embodiment, an increase of glutamine in a non-human organism, as compared to a corresponding non-transformed wild type non-human organism, is conferred in the process of the invention, if the activity of a polypeptide showing the activity of a monthiol glutaredoxin, or if the activity of the polypeptide At3g62930, preferably represented by SEQ ID NO. 2574, or a homolog or fragment thereof, or if the activity of a polypeptide encoded by a nucleic acid molecule comprising the nucleic acid SEQ ID NO. 2573, preferably the coding region thereof, or a homolog or fragment thereof, e.g. derived from Arabidopsis thaliana, is increased or generated. For example the activity of a nucleic acid molecule or a polypeptide comprising the nucleic acid, preferably the coding region thereof, or polypeptide or the consensus sequence or the polypeptide motif, as depicted in Table I, II or IV, application No. 2, column 5 or 8 in the respective same line as the nucleic acid molecule SEQ ID NO. 2573 or polypeptide SEQ ID NO. 2574, respectively, or a homolog or a fragment thereof, is increased or generated, or if the activity monthiol glutaredoxin is increased or generated in a non-human organism, like a microorganism or a plant cell, plant or part thereof, especially with non-targeted localization, whereby the respective line discloses in column 7 glutamine. For example, an increase of the glutamine of at least 1 percent, particularly in a range of 51 to 277-percent is conferred as compared to a corresponding non-transformed wild type non-human organism.

[8629] Accordingly, in one embodiment, an increase of glutamate in a non-human organism, as compared to a corresponding non-transformed wild type non-human organism, is conferred in the process of the invention, if the activity of a polypeptide showing the activity of a glutaredoxin, or if the activity of the polypeptide At3g62950, preferably represented by SEQ ID NO. 2936, or a homolog or fragment thereof, or if the activity of a polypeptide encoded by a nucleic acid molecule comprising the nucleic acid SEQ ID NO. 2935, preferably the coding region thereof, or a homolog or fragment thereof, e.g. derived from Arabidopsis thaliana, is increased or generated. For example the activity of a nucleic acid molecule or a polypeptide comprising the nucleic acid, preferably the coding region thereof, or polypeptide or the consensus sequence or the polypeptide motif, as depicted in Table I, II or IV, application No. 2, column 5 or 8 in the respective same line as the nucleic acid molecule SEQ ID NO. 2935 or polypeptide SEQ ID NO. 2936, respectively, or a homolog or a fragment thereof, is increased or generated, or if the activity glutaredoxin is increased or generated in a non-human organism, like a microorganism or a plant cell, plant or part thereof, especially with non-targeted localization, whereby the respective line discloses in column 7 glutamate. For example, an increase of the glutamate of at least 1 percent, particularly in a range of 33 to 89-percent is conferred as compared to a corresponding non-transformed wild type non-human organism.

[8630] Accordingly, in one embodiment, an increase of glutamine in a non-human organism, as compared to a corresponding non-transformed wild type non-human organism, is conferred in the process of the invention, if the activity of a polypeptide showing the activity of a glutaredoxin, or if the activity of the polypeptide At3g62950, preferably represented by SEQ ID NO. 2936, or a homolog or fragment thereof, or if the activity of a polypeptide encoded by a nucleic acid molecule comprising the nucleic acid SEQ ID NO. 2935, preferably the coding region thereof, or a homolog or fragment thereof, e.g. derived from Arabidopsis thaliana, is increased or generated. For example the activity of a nucleic acid molecule or a polypeptide comprising the nucleic acid, preferably the coding region thereof, or polypeptide or the consensus sequence or the polypeptide motif, as depicted in Table I, II or IV, application No. 2, column 5 or 8 in the respective same line as the nucleic acid molecule SEQ ID NO. 2935 or polypeptide SEQ ID NO. 2936, respectively, or a homolog or a fragment thereof, is increased or generated, or if the activity glutaredoxin is increased or generated in a non-human organism, like a microorganism or a plant cell, plant or part thereof, especially with non-targeted localization, whereby the respective line discloses in column 7 glutamine. For example, an increase of the glutamine of at least 1 percent, particularly in a range of 127 to 250-percent is conferred as compared to a corresponding non-transformed wild type non-human organism.

[8631] Accordingly, in one embodiment, an increase of glutamate in a non-human organism, as compared to a corresponding non-transformed wild type non-human organism, is conferred in the process of the invention, if the activity of a polypeptide showing the activity of a monothiol glutaredoxin, or if the activity of the polypeptide At4g15660, preferably represented by SEQ ID NO. 23483, or a homolog or fragment thereof, or if the activity of a polypeptide encoded by a nucleic acid molecule comprising the nucleic acid SEQ ID NO. 23482, preferably the coding region thereof, or a homolog or fragment thereof, e.g. derived from Arabidopsis thaliana, is increased or generated. For example the activity of a nucleic acid molecule or a polypeptide comprising the nucleic acid, preferably the coding region thereof, or polypeptide or the consensus sequence or the polypeptide motif, as depicted in Table I, II or IV, application No. 2, column 5 or 8 in the respective same line as the nucleic acid molecule SEQ ID NO. 23482 or polypeptide SEQ ID NO. 23483, respectively, or a homolog or a fragment thereof, is increased or generated, or if the activity monothiol glutaredoxin is increased or generated in a non-human organism, like a microorganism or a plant cell, plant or part thereof, especially with non-targeted localization, whereby the respective line discloses in column 7 glutamate. For example, an increase of the glutamate of at least 1 percent, particularly in a range of 38 to 164-percent is conferred as compared to a corresponding non-transformed wild type non-human organism.

[8632] Accordingly, in one embodiment, an increase of glutamine in a non-human organism, as compared to a corresponding non-transformed wild type non-human organism, is conferred in the process of the invention, if the activity of a polypeptide showing the activity of a monothiol glutaredoxin, or if the activity of the polypeptide At4g15660, preferably represented by SEQ ID NO. 23483, or a homolog or fragment thereof, or if the activity of a polypeptide encoded by a nucleic acid molecule comprising the nucleic acid SEQ ID NO. 23482, preferably the coding region thereof, or a homolog or fragment thereof, e.g. derived from Arabidopsis thaliana, is increased or generated. For example the activity of a nucleic acid molecule or a polypeptide comprising the nucleic acid, preferably the coding region thereof, or polypeptide or the consensus sequence or the polypeptide motif, as depicted in Table I, II or IV, application No. 2, column 5 or 8 in the respective same line as the nucleic acid molecule SEQ ID NO. 23482 or polypeptide SEQ ID NO. 23483, respectively, or a homolog or a fragment thereof, is increased or generated, or if the activity monothiol glutaredoxin is increased or generated in a non-human organism, like a microorganism or a plant cell, plant or part thereof, especially with non-targeted localization, whereby the respective line discloses in column 7 glutamine. For example, an increase of the glutamine of at least 1 percent, particularly in a range of 44 to 116-percent is conferred as compared to a corresponding non-transformed wild type non-human organism.

[8633] Accordingly, in one embodiment, an increase of glutamate in a non-human organism, as compared to a corresponding non-transformed wild type non-human organism, is conferred in the process of the invention, if the activity of a polypeptide showing the activity of a monothiol glutaredoxin, or if the activity of the polypeptide At4g15670, preferably represented by SEQ ID NO. 3280, or a homolog or fragment thereof, or if the activity of a polypeptide encoded by a nucleic acid molecule comprising the nucleic acid SEQ ID NO. 3279, preferably the coding region thereof, or a homolog or fragment thereof, e.g. derived from Arabidopsis thaliana, is increased or generated. For example the activity of a nucleic acid molecule or a polypeptide comprising the nucleic acid, preferably the coding region thereof, or polypeptide or the consensus sequence or the polypeptide motif, as depicted in Table I, II or IV, application No. 2, column 5 or 8 in the respective same line as the nucleic acid molecule SEQ ID NO. 3279 or polypeptide SEQ ID NO. 3280, respectively, or a homolog or a fragment thereof, is increased or generated, or if the activity monothiol glutaredoxin is increased or generated in a non-human organism, like a microorganism or a plant cell, plant or part thereof, especially with non-targeted localization, whereby the respective line discloses in column 7 glutamate. For example, an increase of the glutamate of at least 1 percent, particularly in a range of 77 to 165-percent is conferred as compared to a corresponding non-transformed wild type non-human organism.

[8634] Accordingly, in one embodiment, an increase of glutamate in a non-human organism, as compared to a corresponding non-transformed wild type non-human organism, is conferred in the process of the invention, if the activity of a polypeptide showing the activity of a monothiol glutaredoxin, or if the activity of the polypeptide At4g15690, preferably represented by SEQ ID NO. 23845, or a homolog or fragment thereof, or if the activity of a polypeptide encoded by a nucleic acid molecule comprising the nucleic acid SEQ ID NO. 23844, preferably the coding region thereof, or a homolog or fragment thereof, e.g. derived from Arabidopsis thaliana, is increased or generated. For example the activity of a nucleic acid molecule or a polypeptide comprising the nucleic acid, preferably the coding region thereof, or polypeptide or the consensus sequence or the polypeptide motif, as depicted in Table I, II or IV, application No. 2, column 5 or 8 in the respective same line as the nucleic acid molecule SEQ ID NO. 23844 or polypeptide SEQ ID NO. 23845, respectively, or a homolog or a fragment thereof, is increased or generated, or if the activity monothiol glutaredoxin is increased or generated in a non-human organism, like a microorganism or a plant cell, plant or part thereof, especially with non-targeted localization, whereby the respective line discloses in column 7 glutamate. For example, an increase of the glutamate of at least 1 percent, particularly in a range of 47 to 145-percent is conferred as compared to a corresponding non-transformed wild type non-human organism.

[8635] Accordingly, in one embodiment, an increase of glutamine in a non-human organism, as compared to a corresponding non-transformed wild type non-human organism, is conferred in the process of the invention, if the activity of a polypeptide showing the activity of a monothiol glutaredoxin, or if the activity of the polypeptide At4g15690, preferably represented by SEQ ID NO. 23845, or a homolog or fragment thereof, or if the activity of a polypeptide encoded by a nucleic acid molecule comprising the nucleic acid SEQ ID NO. 23844, preferably the coding region thereof, or a homolog or fragment thereof, e.g. derived from Arabidopsis thaliana, is increased or generated. For example the activity of a nucleic acid molecule or a polypeptide comprising the nucleic acid, preferably the coding region thereof, or polypeptide or the consensus sequence or the polypeptide motif, as depicted in Table I, II or IV, application No. 2, column 5 or 8 in the respective same line as the nucleic acid molecule SEQ ID NO. 23844 or polypeptide SEQ ID NO. 23845, respectively, or a homolog or a fragment thereof, is increased or generated, or if the activity monothiol glutaredoxin is increased or generated in a non-human organism, like a microorganism or a plant cell, plant or part thereof, especially with non-targeted localization, whereby the respective line discloses in column 7 glutamine. For example, an increase of the glutamine of at least 1 percent, particularly in a range of 53 to 270-percent is conferred as compared to a corresponding non-transformed wild type non-human organism.

[8636] Accordingly, in one embodiment, an increase of proline in a non-human organism, as compared to a corresponding non-transformed wild type non-human organism, is conferred in the process of the invention, if the activity of a polypeptide showing the activity of a monothiol glutaredoxin, or if the activity of the polypeptide At4g15690, preferably represented by SEQ ID NO. 23845, or a homolog or fragment thereof, or if the activity of a polypeptide encoded by a nucleic acid molecule comprising the nucleic acid SEQ ID NO. 23844, preferably the coding region thereof, or a homolog or fragment thereof, e.g. derived from Arabidopsis thaliana, is increased or generated. For example the activity of a nucleic acid molecule or a polypeptide comprising the nucleic acid, preferably the coding region thereof, or polypeptide or the consensus sequence or the polypeptide motif, as depicted in Table I, II or IV, application No. 2, column 5 or 8 in the respective same line as the nucleic acid molecule SEQ ID NO. 23844 or polypeptide SEQ ID NO. 23845, respectively, or a homolog or a fragment thereof, is increased or generated, or if the activity monothiol glutaredoxin is increased or generated in a non-human organism, like a microorganism or a plant cell, plant or part thereof, especially with non-targeted localization, whereby the respective line discloses in column 7 proline. For example, an increase of the proline of at least 1 percent, particularly in a range of 44 to 156-percent is conferred as compared to a corresponding non-transformed wild type non-human organism.

[8637] Accordingly, in one embodiment, an increase of glutamine in a non-human organism, as compared to a corresponding non-transformed wild type non-human organism, is conferred in the process of the invention, if the activity of a polypeptide showing the activity of a monothiol glutaredoxin, or if the activity of the polypeptide At4g15700, preferably represented by SEQ ID NO. 3655, or a homolog or fragment thereof, or if the activity of a polypeptide encoded by a nucleic acid molecule comprising the nucleic acid SEQ ID NO. 3654, preferably the coding region thereof, or a homolog or fragment thereof, e.g. derived from Arabidopsis thaliana, is increased or generated. For example the activity of a nucleic acid molecule or a polypeptide comprising the nucleic acid, preferably the coding region thereof, or polypeptide or the consensus sequence or the polypeptide motif, as depicted in Table I, II or IV, application No. 2, column 5 or 8 in the respective same line as the nucleic acid molecule SEQ ID NO. 3654 or polypeptide SEQ ID NO. 3655, respectively, or a homolog or a fragment thereof, is increased or generated, or if the activity monothiol glutaredoxin is increased or generated in a non-human organism, like a microorganism or a plant cell, plant or part thereof, especially with non-targeted localization, whereby the respective line discloses in column 7 glutamine. For example, an increase of the glutamine of at least 1 percent, particularly in a range of 55 to 267-percent is conferred as compared to a corresponding non-transformed wild type non-human organism.

[8638] Accordingly, in one embodiment, an increase of proline in a non-human organism, as compared to a corresponding non-transformed wild type non-human organism, is conferred in the process of the invention, if the activity of a polypeptide showing the activity of a heat shock transcription factor, or if the activity of the polypeptide At4g18880, preferably represented by SEQ ID NO. 24233, or a homolog or fragment thereof, or if the activity of a polypeptide encoded by a nucleic acid molecule comprising the nucleic acid SEQ ID NO. 24232, preferably the coding region thereof, or a homolog or fragment thereof, e.g. derived from Arabidopsis thaliana, is increased or generated. For example the activity of a nucleic acid molecule or a polypeptide comprising the nucleic acid, preferably the coding region thereof, or polypeptide or the consensus sequence or the polypeptide motif, as depicted in Table I, II or IV, application No. 2, column 5 or 8 in the respective same line as the nucleic acid molecule SEQ ID NO. 24232 or polypeptide SEQ ID NO. 24233, respectively, or a homolog or a fragment thereof, is increased or generated, or if the activity heat shock transcription factor is increased or generated in a non-human organism, like a microorganism or a plant cell, plant or part thereof, especially with non-targeted localization, whereby the respective line discloses in column 7 proline. For example, an increase of the proline of at least 1 percent, particularly in a range of 46 to 216-percent is conferred as compared to a corresponding non-transformed wild type non-human organism.

[8639] Accordingly, in one embodiment, an increase of arginine in a non-human organism, as compared to a corresponding non-transformed wild type non-human organism, is conferred in the process of the invention, if the activity of a polypeptide showing the activity of a At4g32480-protein, or if the activity of the polypeptide At4g32480, preferably represented by SEQ ID NO. 4041, or a homolog or fragment thereof, or if the activity of a polypeptide encoded by a nucleic acid molecule comprising the nucleic acid SEQ ID NO. 4040, preferably the coding region thereof, or a homolog or fragment thereof, e.g. derived from Arabidopsis thaliana, is increased or generated. For example the activity of a nucleic acid molecule or a polypeptide comprising the nucleic acid, preferably the coding region thereof, or polypeptide or the consensus sequence or the polypeptide motif, as depicted in Table I, II or IV, application No. 2, column 5 or 8 in the respective same line as the nucleic acid molecule SEQ ID NO. 4040 or polypeptide SEQ ID NO. 4041, respectively, or a homolog or a fragment thereof, is increased or generated, or if the activity At4g32480-protein is increased or generated in a non-human organism, like a microorganism or a plant cell, plant or part thereof, especially with non-targeted localization, whereby the respective line discloses in column 7 arginine. For example, an increase of the arginine of at least 1 percent, particularly in a range of 52 to 215-percent is conferred as compared to a corresponding non-transformed wild type non-human organism.

[8640] Accordingly, in one embodiment, an increase of glutamine in a non-human organism, as compared to a corresponding non-transformed wild type non-human organism, is conferred in the process of the invention, if the activity of a polypeptide showing the activity of a At4g32480-protein, or if the activity of the polypeptide At4g32480, preferably represented by SEQ ID NO. 4041, or a homolog or fragment thereof, or if the activity of a polypeptide encoded by a nucleic acid molecule comprising the nucleic acid SEQ ID NO. 4040, preferably the coding region thereof, or a homolog or fragment thereof, e.g. derived from Arabidopsis thaliana, is increased or generated. For example the activity of a nucleic acid molecule or a polypeptide comprising the nucleic acid, preferably the coding region thereof, or polypeptide or the consensus sequence or the polypeptide motif, as depicted in Table I, II or IV, application No. 2, column 5 or 8 in the respective same line as the nucleic acid molecule SEQ ID NO. 4040 or polypeptide SEQ ID NO. 4041, respectively, or a homolog or a fragment thereof, is increased or generated, or if the activity At4g32480-protein is increased or generated in a non-human organism, like a microorganism or a plant cell, plant or part thereof, especially with non-targeted localization, whereby the respective line discloses in column 7 glutamine. For example, an increase of the glutamine of at least 1 percent, particularly in a range of 301 to 4258-percent is conferred as compared to a corresponding non-transformed wild type non-human organism.

[8641] Accordingly, in one embodiment, an increase of proline in a non-human organism, as compared to a corresponding non-transformed wild type non-human organism, is conferred in the process of the invention, if the activity of a polypeptide showing the activity of a At4g32480-protein, or if the activity of the polypeptide At4g32480, preferably represented by SEQ ID NO. 4041, or a homolog or fragment thereof, or if the activity of a polypeptide encoded by a nucleic acid molecule comprising the nucleic acid SEQ ID NO. 4040, preferably the coding region thereof, or a homolog or fragment thereof, e.g. derived from Arabidopsis thaliana, is increased or generated. For example the activity of a nucleic acid molecule or a polypeptide comprising the nucleic acid, preferably the coding region thereof, or polypeptide or the consensus sequence or the polypeptide motif, as depicted in Table I, II or IV, application No. 2, column 5 or 8 in the respective same line as the nucleic acid molecule SEQ ID NO. 4040 or polypeptide SEQ ID NO. 4041, respectively, or a homolog or a fragment thereof, is increased or generated, or if the activity At4g32480-protein is increased or generated in a non-human organism, like a microorganism or a plant cell, plant or part thereof, especially with non-targeted localization, whereby the respective line discloses in column 7 proline. For example, an increase of the proline of at least 1 percent, particularly in a range of 45 to 111-percent is conferred as compared to a corresponding non-transformed wild type non-human organism.

[8642] Accordingly, in one embodiment, an increase of glutamate in a non-human organism, as compared to a corresponding non-transformed wild type non-human organism, is conferred in the process of the invention, if the activity of a polypeptide showing the activity of a glutaredoxin, or if the activity of the polypeptide At4g33040, preferably represented by SEQ ID NO. 4103, or a homolog or fragment thereof, or if the activity of a polypeptide encoded by a nucleic acid molecule comprising the nucleic acid SEQ ID NO. 4102, preferably the coding region thereof, or a homolog or fragment thereof, e.g. derived from Arabidopsis thaliana, is increased or generated. For example the activity of a nucleic acid molecule or a polypeptide comprising the nucleic acid, preferably the coding region thereof, or polypeptide or the consensus sequence or the polypeptide motif, as depicted in Table I, II or IV, application No. 2, column 5 or 8 in the respective same line as the nucleic acid molecule SEQ ID NO. 4102 or polypeptide SEQ ID NO. 4103, respectively, or a homolog or a fragment thereof, is increased or generated, or if the activity glutaredoxin is increased or generated in a non-human organism, like a microorganism or a plant cell, plant or part thereof, especially with non-targeted localization, whereby the respective line discloses in column 7 glutamate. For example, an increase of the glutamate of at least 1 percent, particularly in a range of 46 to 104-percent is conferred as compared to a corresponding non-transformed wild type non-human organism.

[8643] Accordingly, in one embodiment, an increase of arginine in a non-human organism, as compared to a corresponding non-transformed wild type non-human organism, is conferred in the process of the invention, if the activity of a polypeptide showing the activity of a cyclin D, or if the activity of the polypeptide At4g34160, preferably represented by SEQ ID NO. 24312, or a homolog or fragment thereof, or if the activity of a polypeptide encoded by a nucleic acid molecule comprising the nucleic acid SEQ ID NO. 24311, preferably the coding region thereof, or a homolog or fragment thereof, e.g. derived from Arabidopsis thaliana, is increased or generated. For example the activity of a nucleic acid molecule or a polypeptide comprising the nucleic acid, preferably the coding region thereof, or polypeptide or the consensus sequence or the polypeptide motif, as depicted in Table I, II or IV, application No. 2, column 5 or 8 in the respective same line as the nucleic acid molecule SEQ ID NO. 24311 or polypeptide SEQ ID NO. 24312, respectively, or a homolog or a fragment thereof, is increased or generated, or if the activity cyclin D is increased or generated in a non-human organism, like a microorganism or a plant cell, plant or part thereof, especially with non-targeted localization, whereby the respective line discloses in column 7 arginine. For example, an increase of the arginine of at least 1 percent, particularly in a range of 90 to 236-percent is conferred as compared to a corresponding non-transformed wild type non-human organism.

[8644] Accordingly, in one embodiment, an increase of glutamine in a non-human organism, as compared to a corresponding non-transformed wild type non-human organism, is conferred in the process of the invention, if the activity of a polypeptide showing the activity of a cyclin D, or if the activity of the polypeptide At4g34160, preferably represented by SEQ ID NO. 24312, or a homolog or fragment thereof, or if the activity of a polypeptide encoded by a nucleic acid molecule comprising the nucleic acid SEQ ID NO. 24311, preferably the coding region thereof, or a homolog or fragment thereof, e.g. derived from Arabidopsis thaliana, is increased or generated. For example the activity of a nucleic acid molecule or a polypeptide comprising the nucleic acid, preferably the coding region thereof, or polypeptide or the consensus sequence or the polypeptide motif, as depicted in Table I, II or IV, application No. 2, column 5 or 8 in the respective same line as the nucleic acid molecule SEQ ID NO. 24311 or polypeptide SEQ ID NO. 24312, respectively, or a homolog or a fragment thereof, is increased or generated, or if the activity cyclin D is increased or generated in a non-human organism, like a microorganism or a plant cell, plant or part thereof, especially with non-targeted localization, whereby the respective line discloses in column 7 glutamine. For example, an increase of the glutamine of at least 1 percent, particularly in a range of 51 to 313-percent is conferred as compared to a corresponding non-transformed wild type non-human organism.

[8645] Accordingly, in one embodiment, an increase of proline in a non-human organism, as compared to a corresponding non-transformed wild type non-human organism, is conferred in the process of the invention, if the activity of a polypeptide showing the activity of a cyclin D, or if the activity of the polypeptide At4g34160, preferably represented by SEQ ID NO. 24312, or a homolog or fragment thereof, or if the activity of a polypeptide encoded by a nucleic acid molecule comprising the nucleic acid SEQ ID NO. 24311, preferably the coding region thereof, or a homolog or fragment thereof, e.g. derived from Arabidopsis thaliana, is increased or generated. For example the activity of a nucleic acid molecule or a polypeptide comprising the nucleic acid, preferably the coding region thereof, or polypeptide or the consensus sequence or the polypeptide motif, as depicted in Table I, II or IV, application No. 2, column 5 or 8 in the respective same line as the nucleic acid molecule SEQ ID NO. 24311 or polypeptide SEQ ID NO. 24312, respectively, or a homolog or a fragment thereof, is increased or generated, or if the activity cyclin D is increased or generated in a non-human organism, like a microorganism or a plant cell, plant or part thereof, especially with non-targeted localization, whereby the respective line discloses in column 7 proline. For example, an increase of the proline of at least 1 percent, particularly in a range of 49 to 772-percent is conferred as compared to a corresponding non-transformed wild type non-human organism.

[8646] Accordingly, in one embodiment, an increase of arginine in a non-human organism, as compared to a corresponding non-transformed wild type non-human organism, is conferred in the process of the invention, if the activity of a polypeptide showing the activity of a calcium-dependent protein kinase, or if the activity of the polypeptide At4g35310, preferably represented by SEQ ID NO. 4349, or a homolog or fragment thereof, or if the activity of a polypeptide encoded by a nucleic acid molecule comprising the nucleic acid SEQ ID NO. 4348, preferably the coding region thereof, or a homolog or fragment thereof, e.g. derived from Arabidopsis thaliana, is increased or generated. For example the activity of a nucleic acid molecule or a polypeptide comprising the nucleic acid, preferably the coding region thereof, or polypeptide or the consensus sequence or the polypeptide motif, as depicted in Table I, II or IV, application No. 2, column 5 or 8 in the respective same line as the nucleic acid molecule SEQ ID NO. 4348 or polypeptide SEQ ID NO. 4349, respectively, or a homolog or a fragment thereof, is increased or generated, or if the activity calcium-dependent protein kinase is increased or generated in a non-human organism, like a microorganism or a plant cell, plant or part thereof, especially with non-targeted localization, whereby the respective line discloses in column 7 arginine. For example, an increase of the arginine of at least 1 percent, particularly in a range of 58 to 499-percent is conferred as compared to a corresponding non-transformed wild type non-human organism.

[8647] Accordingly, in one embodiment, an increase of proline in a non-human organism, as compared to a corresponding non-transformed wild type non-human organism, is conferred in the process of the invention, if the activity of a polypeptide showing the activity of a calcium-dependent protein kinase, or if the activity of the polypeptide At4g35310, preferably represented by SEQ ID NO. 4349, or a homolog or fragment thereof, or if the activity of a polypeptide encoded by a nucleic acid molecule comprising the nucleic acid SEQ ID NO. 4348, preferably the coding region thereof, or a homolog or fragment thereof, e.g. derived from Arabidopsis thaliana, is increased or generated. For example the activity of a nucleic acid molecule or a polypeptide comprising the nucleic acid, preferably the coding region thereof, or polypeptide or the consensus sequence or the polypeptide motif, as depicted in Table I, II or IV, application No. 2, column 5 or 8 in the respective same line as the nucleic acid molecule SEQ ID NO. 4348 or polypeptide SEQ ID NO. 4349, respectively, or a homolog or a fragment thereof, is increased or generated, or if the activity calcium-dependent protein kinase is increased or generated in a non-human organism, like a microorganism or a plant cell, plant or part thereof, especially with non-targeted localization, whereby the respective line discloses in column 7 proline. For example, an increase of the proline of at least 1 percent, particularly in a range of 126 to 329-percent is conferred as compared to a corresponding non-transformed wild type non-human organism.

[8648] Accordingly, in one embodiment, an increase of glutamate in a non-human organism, as compared to a corresponding non-transformed wild type non-human organism, is conferred in the process of the invention, if the activity of a polypeptide showing the activity of a heat shock transcription factor, or if the activity of the polypeptide At5g03720, preferably represented by SEQ ID NO. 24439, or a homolog or fragment thereof, or if the activity of a polypeptide encoded by a nucleic acid molecule comprising the nucleic acid SEQ ID NO. 24438, preferably the coding region thereof, or a homolog or fragment thereof, e.g. derived from Arabidopsis thaliana, is increased or generated. For example the activity of a nucleic acid molecule or a polypeptide comprising the nucleic acid, preferably the coding region thereof, or polypeptide or the consensus sequence or the polypeptide motif, as depicted in Table I, II or IV, application No. 2, column 5 or 8 in the respective same line as the nucleic acid molecule SEQ ID NO. 24438 or polypeptide SEQ ID NO. 24439, respectively, or a homolog or a fragment thereof, is increased or generated, or if the activity heat shock transcription factor is increased or generated in a non-human organism, like a microorganism or a plant cell, plant or part thereof, especially with non-targeted localization, whereby the respective line discloses in column 7 glutamate. For example, an increase of the glutamate of at least 1 percent, particularly in a range of 67 to 186-percent is conferred as compared to a corresponding non-transformed wild type non-human organism.

[8649] Accordingly, in one embodiment, an increase of proline in a non-human organism, as compared to a corresponding non-transformed wild type non-human organism, is conferred in the process of the invention, if the activity of a polypeptide showing the activity of a gibberellin 20-oxidase, or if the activity of the polypeptide At5g07200, preferably represented by SEQ ID NO. 24493, or a homolog or fragment thereof, or if the activity of a polypeptide encoded by a nucleic acid molecule comprising the nucleic acid SEQ ID NO. 24492, preferably the coding region thereof, or a homolog or fragment thereof, e.g. derived from Arabidopsis thaliana, is increased or generated. For example the activity of a nucleic acid molecule or a polypeptide comprising the nucleic acid, preferably the coding region thereof, or polypeptide or the consensus sequence or the polypeptide motif, as depicted in Table I, II or IV, application No. 2, column 5 or 8 in the respective same line as the nucleic acid molecule SEQ ID NO. 24492 or polypeptide SEQ ID NO. 24493, respectively, or a homolog or a fragment thereof, is increased or generated, or if the activity gibberellin 20-oxidase is increased or generated in a non-human organism, like a microorganism or a plant cell, plant or part thereof, especially with non-targeted localization, whereby the respective line discloses in column 7 proline. For example, an increase of the proline of at least 1 percent, particularly in a range of 44 to 99-percent is conferred as compared to a corresponding non-transformed wild type non-human organism.

[8650] Accordingly, in one embodiment, an increase of glutamate in a non-human organism, as compared to a corresponding non-transformed wild type non-human organism, is conferred in the process of the invention, if the activity of a polypeptide showing the activity of a integral membrane transporter family protein, or if the activity of the polypeptide At5g10820, preferably represented by SEQ ID NO. 25223, or a homolog or fragment thereof, or if the activity of a polypeptide encoded by a nucleic acid molecule comprising the nucleic acid SEQ ID NO. 25222, preferably the coding region thereof, or a homolog or fragment thereof, e.g. derived from Arabidopsis thaliana, is increased or generated. For example the activity of a nucleic acid molecule or a polypeptide comprising the nucleic acid, preferably the coding region thereof, or polypeptide or the consensus sequence or the polypeptide motif, as depicted in Table I, II or IV, application No. 2, column 5 or 8 in the respective same line as the nucleic acid molecule SEQ ID NO. 25222 or polypeptide SEQ ID NO. 25223, respectively, or a homolog or a fragment thereof, is increased or generated, or if the activity integral membrane transporter family protein is increased or generated in a non-human organism, like a microorganism or a plant cell, plant or part thereof, especially with non-targeted localization, whereby the respective line discloses in column 7 glutamate. For example, an increase of the glutamate of at least 1 percent, particularly in a range of 34 to 69-percent is conferred as compared to a corresponding non-transformed wild type non-human organism.

[8651] Accordingly, in one embodiment, an increase of glutamine in a non-human organism, as compared to a corresponding non-transformed wild type non-human organism, is conferred in the process of the invention, if the activity of a polypeptide showing the activity of a integral membrane transporter family protein, or if the activity of the polypeptide At5g10820, preferably represented by SEQ ID NO. 25223, or a homolog or fragment thereof, or if the activity of a polypeptide encoded by a nucleic acid molecule comprising the nucleic acid SEQ ID NO. 25222, preferably the coding region thereof, or a homolog or fragment thereof, e.g. derived from Arabidopsis thaliana, is increased or generated. For example the activity of a nucleic acid molecule or a polypeptide comprising the nucleic acid, preferably the coding region thereof, or polypeptide or the consensus sequence or the polypeptide motif, as depicted in Table I, II or IV, application No. 2, column 5 or 8 in the respective same line as the nucleic acid molecule SEQ ID NO. 25222 or polypeptide SEQ ID NO. 25223, respectively, or a homolog or a fragment thereof, is increased or generated, or if the activity integral membrane transporter family protein is increased or generated in a non-human organism, like a microorganism or a plant cell, plant or part thereof, especially with non-targeted localization, whereby the respective line discloses in column 7 glutamine. For example, an increase of the glutamine of at least 1 percent, particularly in a range of 45 to 139-percent is conferred as compared to a corresponding non-transformed wild type non-human organism.

[8652] Accordingly, in one embodiment, an increase of arginine in a non-human organism, as compared to a corresponding non-transformed wild type non-human organism, is conferred in the process of the invention, if the activity of a polypeptide showing the activity of a At5g16650-protein, or if the activity of the polypeptide At5g16650, preferably represented by SEQ ID NO. 25284, or a homolog or fragment thereof, or if the activity of a polypeptide encoded by a nucleic acid molecule comprising the nucleic acid SEQ ID NO. 25283, preferably the coding region thereof, or a homolog or fragment thereof, e.g. derived from Arabidopsis thaliana, is increased or generated. For example the activity of a nucleic acid molecule or a polypeptide comprising the nucleic acid, preferably the coding region thereof, or polypeptide or the consensus sequence or the polypeptide motif, as depicted in Table I, II or IV, application No. 2, column 5 or 8 in the respective same line as the nucleic acid molecule SEQ ID NO. 25283 or polypeptide SEQ ID NO. 25284, respectively, or a homolog or a fragment thereof, is increased or generated, or if the activity At5g16650-protein is increased or generated in a non-human organism, like a microorganism or a plant cell, plant or part thereof, especially with non-targeted localization, whereby the respective line discloses in column 7 arginine. For example, an increase of the arginine of at least 1 percent, particularly in a range of 104 to 361-percent is conferred as compared to a corresponding non-transformed wild type non-human organism.

[8653] Accordingly, in one embodiment, an increase of glutamine in a non-human organism, as compared to a corresponding non-transformed wild type non-human organism, is conferred in the process of the invention, if the activity of a polypeptide showing the activity of a At5g16650-protein, or if the activity of the polypeptide At5g16650, preferably represented by SEQ ID NO. 25284, or a homolog or fragment thereof, or if the activity of a polypeptide encoded by a nucleic acid molecule comprising the nucleic acid SEQ ID NO. 25283, preferably the coding region thereof, or a homolog or fragment thereof, e.g. derived from Arabidopsis thaliana, is increased or generated. For example the activity of a nucleic acid molecule or a polypeptide comprising the nucleic acid, preferably the coding region thereof, or polypeptide or the consensus sequence or the polypeptide motif, as depicted in Table I, II or IV, application No. 2, column 5 or 8 in the respective same line as the nucleic acid molecule SEQ ID NO. 25283 or polypeptide SEQ ID NO. 25284, respectively, or a homolog or a fragment thereof, is increased or generated, or if the activity At5g16650-protein is increased or generated in a non-human organism, like a microorganism or a plant cell, plant or part thereof, especially with non-targeted localization, whereby the respective line discloses in column 7 glutamine. For example, an increase of the glutamine of at least 1 percent, particularly in a range of 48 to 238-percent is conferred as compared to a corresponding non-transformed wild type non-human organism.

[8654] Accordingly, in one embodiment, an increase of proline in a non-human organism, as compared to a corresponding non-transformed wild type non-human organism, is conferred in the process of the invention, if the activity of a polypeptide showing the activity of a At5g16650-protein, or if the activity of the polypeptide At5g16650, preferably represented by SEQ ID NO. 25284, or a homolog or fragment thereof, or if the activity of a polypeptide encoded by a nucleic acid molecule comprising the nucleic acid SEQ ID NO. 25283, preferably the coding region thereof, or a homolog or fragment thereof, e.g. derived from Arabidopsis thaliana, is increased or generated. For example the activity of a nucleic acid molecule or a polypeptide comprising the nucleic acid, preferably the coding region thereof, or polypeptide or the consensus sequence or the polypeptide motif, as depicted in Table I, II or IV, application No. 2, column 5 or 8 in the respective same line as the nucleic acid molecule SEQ ID NO. 25283 or polypeptide SEQ ID NO. 25284, respectively, or a homolog or a fragment thereof, is increased or generated, or if the activity At5g16650-protein is increased or generated in a non-human organism, like a microorganism or a plant cell, plant or part thereof, especially with non-targeted localization, whereby the respective line discloses in column 7 proline. For example, an increase of the proline of at least 1 percent, particularly in a range of 41 to 177-percent is conferred as compared to a corresponding non-transformed wild type non-human organism.

[8655] Accordingly, in one embodiment, an increase of glutamine in a non-human organism, as compared to a corresponding non-transformed wild type non-human organism, is conferred in the process of the invention, if the activity of a polypeptide showing the activity of a monothiol glutaredoxin, or if the activity of the polypeptide At5g18600, preferably represented by SEQ ID NO. 4905, or a homolog or fragment thereof, or if the activity of a polypeptide encoded by a nucleic acid molecule comprising the nucleic acid SEQ ID NO. 4904, preferably the coding region thereof, or a homolog or fragment thereof, e.g. derived from Arabidopsis thaliana, is increased or generated. For example the activity of a nucleic acid molecule or a polypeptide comprising the nucleic acid, preferably the coding region thereof, or polypeptide or the consensus sequence or the polypeptide motif, as depicted in Table I, II or IV, application No. 2, column 5 or 8 in the respective same line as the nucleic acid molecule SEQ ID NO. 4904 or polypeptide SEQ ID NO. 4905, respectively, or a homolog or a fragment thereof, is increased or generated, or if the activity monothiol glutaredoxin is increased or generated in a non-human organism, like a microorganism or a plant cell, plant or part thereof, especially with non-targeted localization, whereby the respective line discloses in column 7 glutamine. For example, an increase of the glutamine of at least 1 percent, particularly in a range of 82 to 254-percent is conferred as compared to a corresponding non-transformed wild type non-human organism.

[8656] Accordingly, in one embodiment, an increase of arginine in a non-human organism, as compared to a corresponding non-transformed wild type non-human organism, is conferred in the process of the invention, if the activity of a polypeptide showing the activity of a translation initiation factor subunit, or if the activity of the polypeptide At5g27640, preferably represented by SEQ ID NO. 25345, or a homolog or fragment thereof, or if the activity of a polypeptide encoded by a nucleic acid molecule comprising the nucleic acid SEQ ID NO. 25344, preferably the coding region thereof, or a homolog or fragment thereof, e.g. derived from Arabidopsis thaliana, is increased or generated. For example the activity of a nucleic acid molecule or a polypeptide comprising the nucleic acid, preferably the coding region thereof, or polypeptide or the consensus sequence or the polypeptide motif, as depicted in Table I, II or IV, application No. 2, column 5 or 8 in the respective same line as the nucleic acid molecule SEQ ID NO. 25344 or polypeptide SEQ ID NO. 25345, respectively, or a homolog or a fragment thereof, is increased or generated, or if the activity translation initiation factor subunit is increased or generated in a non-human organism, like a microorganism or a plant cell, plant or part thereof, especially with non-targeted localization, whereby the respective line discloses in column 7 arginine. For example, an increase of the arginine of at least 1 percent, particularly in a range of 67 to 139-percent is conferred as compared to a corresponding non-transformed wild type non-human organism.

[8657] Accordingly, in one embodiment, an increase of glutamate in a non-human organism, as compared to a corresponding non-transformed wild type non-human organism, is conferred in the process of the invention, if the activity of a polypeptide showing the activity of a transcription factor, or if the activity of the polypeptide At5g39760, preferably represented by SEQ ID NO. 25429, or a homolog or fragment thereof, or if the activity of a polypeptide encoded by a nucleic acid molecule comprising the nucleic acid SEQ ID NO. 25428, preferably the coding region thereof, or a homolog or fragment thereof, e.g. derived from Arabidopsis thaliana, is increased or generated. For example the activity of a nucleic acid molecule or a polypeptide comprising the nucleic acid, preferably the coding region thereof, or polypeptide or the consensus sequence or the polypeptide motif, as depicted in Table I, II or IV, application No. 2, column 5 or 8 in the respective same line as the nucleic acid molecule SEQ ID NO. 25428 or polypeptide SEQ ID NO. 25429, respectively, or a homolog or a fragment thereof, is increased or generated, or if the activity transcription factor is increased or generated in a non-human organism, like a microorganism or a plant cell, plant or part thereof, especially with non-targeted localization, whereby the respective line discloses in column 7 glutamate. For example, an increase of the glutamate of at least 1 percent, particularly in a range of 40 to 78-percent is conferred as compared to a corresponding non-transformed wild type non-human organism.

[8658] Accordingly, in one embodiment, an increase of proline in a non-human organism, as compared to a corresponding non-transformed wild type non-human organism, is conferred in the process of the invention, if the activity of a polypeptide showing the activity of a transcription factor, or if the activity of the polypeptide At5g39760, preferably represented by SEQ ID NO. 25429, or a homolog or fragment thereof, or if the activity of a polypeptide encoded by a nucleic acid molecule comprising the nucleic acid SEQ ID NO. 25428, preferably the coding region thereof, or a homolog or fragment thereof, e.g. derived from Arabidopsis thaliana, is increased or generated. For example the activity of a nucleic acid molecule or a polypeptide comprising the nucleic acid, preferably the coding region thereof, or polypeptide or the consensus sequence or the polypeptide motif, as depicted in Table I, II or IV, application No. 2, column 5 or 8 in the respective same line as the nucleic acid molecule SEQ ID NO. 25428 or polypeptide SEQ ID NO. 25429, respectively, or a homolog or a fragment thereof, is increased or generated, or if the activity transcription factor is increased or generated in a non-human organism, like a microorganism or a plant cell, plant or part thereof, especially with non-targeted localization, whereby the respective line discloses in column 7 proline. For example, an increase of the proline of at least 1 percent, particularly in a range of 32 to 275-percent is conferred as compared to a corresponding non-transformed wild type non-human organism.

[8659] Accordingly, in one embodiment, an increase of glutamine in a non-human organism, as compared to a corresponding non-transformed wild type non-human organism, is conferred in the process of the invention, if the activity of a polypeptide showing the activity of a protein phosphatase, or if the activity of the polypeptide At5g57050, preferably represented by SEQ ID NO. 5319, or a homolog or fragment thereof, or if the activity of a polypeptide encoded by a nucleic acid molecule comprising the nucleic acid SEQ ID NO. 5318, preferably the coding region thereof, or a homolog or fragment thereof, e.g. derived from Arabidopsis thaliana, is increased or generated. For example the activity of a nucleic acid molecule or a polypeptide comprising the nucleic acid, preferably the coding region thereof, or polypeptide or the consensus sequence or the polypeptide motif, as depicted in Table I, II or IV, application No. 2, column 5 or 8 in the respective same line as the nucleic acid molecule SEQ ID NO. 5318 or polypeptide SEQ ID NO. 5319, respectively, or a homolog or a fragment thereof, is increased or generated, or if the activity protein phosphatase is increased or generated in a non-human organism, like a microorganism or a plant cell, plant or part thereof, especially with non-targeted localization, whereby the respective line discloses in column 7 glutamine. For example, an increase of the glutamine of at least 1 percent, particularly in a range of 34 to 63-percent is conferred as compared to a corresponding non-transformed wild type non-human organism.

[8660] Accordingly, in one embodiment, an increase of glutamine in a non-human organism, as compared to a corresponding non-transformed wild type non-human organism, is conferred in the process of the invention, if the activity of a polypeptide showing the activity of a protein phosphatase, or if the activity of the polypeptide At5g59220, preferably represented by SEQ ID NO. 25499, or a homolog or fragment thereof, or if the activity of a polypeptide encoded by a nucleic acid molecule comprising the nucleic acid SEQ ID NO. 25498, preferably the coding region thereof, or a homolog or fragment thereof, e.g. derived from Arabidopsis thaliana, is increased or generated. For example the activity of a nucleic acid molecule or a polypeptide comprising the nucleic acid, preferably the coding region thereof, or polypeptide or the consensus sequence or the polypeptide motif, as depicted in Table I, II or IV, application No. 2, column 5 or 8 in the respective same line as the nucleic acid molecule SEQ ID NO. 25498 or polypeptide SEQ ID NO. 25499, respectively, or a homolog or a fragment thereof, is increased or generated, or if the activity protein phosphatase is increased or generated in a non-human organism, like a microorganism or a plant cell, plant or part thereof, especially with non-targeted localization, whereby the respective line discloses in column 7 glutamine. For example, an increase of the glutamine of at least 1 percent, particularly in a range of 32 to 52-percent is conferred as compared to a corresponding non-transformed wild type non-human organism.

[8661] Accordingly, in one embodiment, an increase of arginine in a non-human organism, as compared to a corresponding non-transformed wild type non-human organism, is conferred in the process of the invention, if the activity of a polypeptide showing the activity of a zinc finger protein, or if the activity of the polypeptide At5g64920, preferably represented by SEQ ID NO. 5494, or a homolog or fragment thereof, or if the activity of a polypeptide encoded by a nucleic acid molecule comprising the nucleic acid SEQ ID NO. 5493, preferably the coding region thereof, or a homolog or fragment thereof, e.g. derived from Arabidopsis thaliana, is increased or generated. For example the activity of a nucleic acid molecule or a polypeptide comprising the nucleic acid, preferably the coding region thereof, or polypeptide or the consensus sequence or the polypeptide motif, as depicted in Table I, II or IV, application No. 2, column 5 or 8 in the respective same line as the nucleic acid molecule SEQ ID NO. 5493 or polypeptide SEQ ID NO. 5494, respectively, or a homolog or a fragment thereof, is increased or generated, or if the activity zinc finger protein is increased or generated in a non-human organism, like a microorganism or a plant cell, plant or part thereof, especially with non-targeted localization, whereby the respective line discloses in column 7 arginine. For example, an increase of the arginine of at least 1 percent, particularly in a range of 53 to 291-percent is conferred as compared to a corresponding non-transformed wild type non-human organism.

[8662] Accordingly, in one embodiment, an increase of glutamine in a non-human organism, as compared to a corresponding non-transformed wild type non-human organism, is conferred in the process of the invention, if the activity of a polypeptide showing the activity of a zinc finger protein, or if the activity of the polypeptide At5g64920, preferably represented by SEQ ID NO. 5494, or a homolog or fragment thereof, or if the activity of a polypeptide encoded by a nucleic acid molecule comprising the nucleic acid SEQ ID NO. 5493, preferably the coding region thereof, or a homolog or fragment thereof, e.g. derived from Arabidopsis thaliana, is increased or generated. For example the activity of a nucleic acid molecule or a polypeptide comprising the nucleic acid, preferably the coding region thereof, or polypeptide or the consensus sequence or the polypeptide motif, as depicted in Table I, II or IV, application No. 2, column 5 or 8 in the respective same line as the nucleic acid molecule SEQ ID NO. 5493 or polypeptide SEQ ID NO. 5494, respectively, or a homolog or a fragment thereof, is increased or generated, or if the activity zinc finger protein is increased or generated in a non-human organism, like a microorganism or a plant cell, plant or part thereof, especially with non-targeted localization, whereby the respective line discloses in column 7 glutamine. For example, an increase of the glutamine of at least 1 percent, particularly in a range of 52 to 199-percent is conferred as compared to a corresponding non-transformed wild type non-human organism.

[8663] Accordingly, in one embodiment, an increase of glutamate in a non-human organism, as compared to a corresponding non-transformed wild type non-human organism, is conferred in the process of the invention, if the activity of a polypeptide showing the activity of a transcriptional regulator, or if the activity of the polypeptide AvinDRAFT_{—}1045, preferably represented by SEQ ID NO. 25677, or a homolog or fragment thereof, or if the activity of a polypeptide encoded by a nucleic acid molecule comprising the nucleic acid SEQ ID NO. 25676, preferably the coding region thereof, or a homolog or fragment thereof, e.g. derived from Azotobacter vinelandii, is increased or generated. For example the activity of a nucleic acid molecule or a polypeptide comprising the nucleic acid, preferably the coding region thereof, or polypeptide or the consensus sequence or the polypeptide motif, as depicted in Table I, II or IV, application No. 2, column 5 or 8 in the respective same line as the nucleic acid molecule SEQ ID NO. 25676 or polypeptide SEQ ID NO. 25677, respectively, or a homolog or a fragment thereof, is increased or generated, or if the activity transcriptional regulator is increased or generated in a non-human organism, like a microorganism or a plant cell, plant or part thereof, especially with non-targeted localization, whereby the respective line discloses in column 7 glutamate. For example, an increase of the glutamate of at least 1 percent, particularly in a range of 55 to 90-percent is conferred as compared to a corresponding non-transformed wild type non-human organism.

[8664] Accordingly, in one embodiment, an increase of glutamate in a non-human organism, as compared to a corresponding non-transformed wild type non-human organism, is conferred in the process of the invention, if the activity of a polypeptide showing the activity of a adenylylsulfate kinase, or if the activity of the polypeptide AvinDRAFT_{—}1398, preferably represented by SEQ ID NO. 25781, or a homolog or fragment thereof, or if the activity of a polypeptide encoded by a nucleic acid molecule comprising the nucleic acid SEQ ID NO. 25780, preferably the coding region thereof, or a homolog or fragment thereof, e.g. derived from Azotobacter vinelandii, is increased or generated. For example the activity of a nucleic acid molecule or a polypeptide comprising the nucleic acid, preferably the coding region thereof, or polypeptide or the consensus sequence or the polypeptide motif, as depicted in Table I, II or IV, application No. 2, column 5 or 8 in the respective same line as the nucleic acid molecule SEQ ID NO. 25780 or polypeptide SEQ ID NO. 25781, respectively, or a homolog or a fragment thereof, is increased or generated, or if the activity adenylylsulfate kinase is increased or generated in a non-human organism, like a microorganism or a plant cell, plant or part thereof, especially with non-targeted localization, whereby the respective line discloses in column 7 glutamate. For example, an increase of the glutamate of at least 1 percent, particularly in a range of 42 to 44-percent is conferred as compared to a corresponding non-transformed wild type non-human organism.

[8665] Accordingly, in one embodiment, an increase of glutamine in a non-human organism, as compared to a corresponding non-transformed wild type non-human organism, is conferred in the process of the invention, if the activity of a polypeptide showing the activity of a adenylylsulfate kinase, or if the activity of the polypeptide AvinDRAFT_{—}1398, preferably represented by SEQ ID NO. 25781, or a homolog or fragment thereof, or if the activity of a polypeptide encoded by a nucleic acid molecule comprising the nucleic acid SEQ ID NO. 25780, preferably the coding region thereof, or a homolog or fragment thereof, e.g. derived from Azotobacter vinelandii, is increased or generated. For example the activity of a nucleic acid molecule or a polypeptide comprising the nucleic acid, preferably the coding region thereof, or polypeptide or the consensus sequence or the polypeptide motif, as depicted in Table I, II or IV, application No. 2, column 5 or 8 in the respective same line as the nucleic acid molecule SEQ ID NO. 25780 or polypeptide SEQ ID NO. 25781, respectively, or a homolog or a fragment thereof, is increased or generated, or if the activity adenylylsulfate kinase is increased or generated in a non-human organism, like a microorganism or a plant cell, plant or part thereof, especially with non-targeted localization, whereby the respective line discloses in column 7 glutamine. For example, an increase of the glutamine of at least 1 percent, particularly in a range of 56 to 79-percent is conferred as compared to a corresponding non-transformed wild type non-human organism.

[8666] Accordingly, in one embodiment, an increase of glutamine in a non-human organism, as compared to a corresponding non-transformed wild type non-human organism, is conferred in the process of the invention, if the activity of a polypeptide showing the activity of a malic enzyme, or if the activity of the polypeptide AvinDRAFT_{—}1495, preferably represented by SEQ ID NO. 5558, or a homolog or fragment thereof, or if the activity of a polypeptide encoded by a nucleic acid molecule comprising the nucleic acid SEQ ID NO. 5557, preferably the coding region thereof, or a homolog or fragment thereof, e.g. derived from Azotobacter vinelandii, is increased or generated. For example the activity of a nucleic acid molecule or a polypeptide comprising the nucleic acid, preferably the coding region thereof, or polypeptide or the consensus sequence or the polypeptide motif, as depicted in Table I, II or IV, application No. 2, column 5 or 8 in the respective same line as the nucleic acid molecule SEQ ID NO. 5557 or polypeptide SEQ ID NO. 5558, respectively, or a homolog or a fragment thereof, is increased or generated, or if the activity malic enzyme is increased or generated in a non-human organism, like a microorganism or a plant cell, plant or part thereof, especially with non-targeted localization, whereby the respective line discloses in column 7 glutamine. For example, an increase of the glutamine of at least 1 percent, particularly in a range of 54 to 292-percent is conferred as compared to a corresponding non-transformed wild type non-human organism.

[8667] Accordingly, in one embodiment, an increase of proline in a non-human organism, as compared to a corresponding non-transformed wild type non-human organism, is conferred in the process of the invention, if the activity of a polypeptide showing the activity of a malic enzyme, or if the activity of the polypeptide AvinDRAFT_{—}1495, preferably represented by SEQ ID NO. 5558, or a homolog or fragment thereof, or if the activity of a polypeptide encoded by a nucleic acid molecule comprising the nucleic acid SEQ ID NO. 5557, preferably the coding region thereof, or a homolog or fragment thereof, e.g. derived from Azotobacter vinelandii, is increased or generated. For example the activity of a nucleic acid molecule or a polypeptide comprising the nucleic acid, preferably the coding region thereof, or polypeptide or the consensus sequence or the polypeptide motif, as depicted in Table I, II or IV, application No. 2, column 5 or 8 in the respective same line as the nucleic acid molecule SEQ ID NO. 5557 or polypeptide SEQ ID NO. 5558, respectively, or a homolog or a fragment thereof, is increased or generated, or if the activity malic enzyme is increased or generated in a non-human organism, like a microorganism or a plant cell, plant or part thereof, especially with non-targeted localization, whereby the respective line discloses in column 7 proline. For example, an increase of the proline of at least 1 percent, particularly in a range of 111 to 227-percent is conferred as compared to a corresponding non-transformed wild type non-human organism.

[8668] Accordingly, in one embodiment, an increase of proline in a non-human organism, as compared to a corresponding non-transformed wild type non-human organism, is conferred in the process of the invention, if the activity of a polypeptide showing the activity of a glycosyl transferase, or if the activity of the polypeptide AvinDRAFT_{—}1534, preferably represented by SEQ ID NO. 26121, or a homolog or fragment thereof, or if the activity of a polypeptide encoded by a nucleic acid molecule comprising the nucleic acid SEQ ID NO. 26120, preferably the coding region thereof, or a homolog or fragment thereof, e.g. derived from Azotobacter vinelandii, is increased or generated. For example the activity of a nucleic acid molecule or a polypeptide comprising the nucleic acid, preferably the coding region thereof, or polypeptide or the consensus sequence or the polypeptide motif, as depicted in Table I, II or IV, application No. 2, column 5 or 8 in the respective same line as the nucleic acid molecule SEQ ID NO. 26120 or polypeptide SEQ ID NO. 26121, respectively, or a homolog or a fragment thereof, is increased or generated, or if the activity glycosyl transferase is increased or generated in a non-human organism, like a microorganism or a plant cell, plant or part thereof, especially with non-targeted localization, whereby the respective line discloses in column 7 proline. For example, an increase of the proline of at least 1 percent, particularly in a range of 44 to 119-percent is conferred as compared to a corresponding non-transformed wild type non-human organism.

[8669] Accordingly, in one embodiment, an increase of proline in a non-human organism, as compared to a corresponding non-transformed wild type non-human organism, is conferred in the process of the invention, if the activity of a polypeptide showing the activity of a sec-independent protein translocase, or if the activity of the polypeptide AvinDRAFT_{—}1624, preferably represented by SEQ ID NO. 26197, or a homolog or fragment thereof, or if the activity of a polypeptide encoded by a nucleic acid molecule comprising the nucleic acid SEQ ID NO. 26196, preferably the coding region thereof, or a homolog or fragment thereof, e.g. derived from Azotobacter vinelandii, is increased or generated. For example the activity of a nucleic acid molecule or a polypeptide comprising the nucleic acid, preferably the coding region thereof, or polypeptide or the consensus sequence or the polypeptide motif, as depicted in Table I, II or IV, application No. 2, column 5 or 8 in the respective same line as the nucleic acid molecule SEQ ID NO. 26196 or polypeptide SEQ ID NO. 26197, respectively, or a homolog or a fragment thereof, is increased or generated, or if the activity sec-independent protein translocase is increased or generated in a non-human organism, like a microorganism or a plant cell, plant or part thereof, especially with non-targeted localization, whereby the respective line discloses in column 7 proline. For example, an increase of the proline of at least 1 percent, particularly in a range of 35 to 78-percent is conferred as compared to a corresponding non-transformed wild type non-human organism.

[8670] Accordingly, in one embodiment, an increase of glutamate in a non-human organism, as compared to a corresponding non-transformed wild type non-human organism, is conferred in the process of the invention, if the activity of a polypeptide showing the activity of a pyruvate kinase, or if the activity of the polypeptide AvinDRAFT_{—}1806, preferably represented by SEQ ID NO. 26435, or a homolog or fragment thereof, or if the activity of a polypeptide encoded by a nucleic acid molecule comprising the nucleic acid SEQ ID NO. 26434, preferably the coding region thereof, or a homolog or fragment thereof, e.g. derived from Azotobacter vinelandii, is increased or generated. For example the activity of a nucleic acid molecule or a polypeptide comprising the nucleic acid, preferably the coding region thereof, or polypeptide or the consensus sequence or the polypeptide motif, as depicted in Table I, II or IV, application No. 2, column 5 or 8 in the respective same line as the nucleic acid molecule SEQ ID NO. 26434 or polypeptide SEQ ID NO. 26435, respectively, or a homolog or a fragment thereof, is increased or generated, or if the activity pyruvate kinase is increased or generated in a non-human organism, like a microorganism or a plant cell, plant or part thereof, especially with non-targeted localization, whereby the respective line discloses in column 7 glutamate. For example, an increase of the glutamate of at least 1 percent, particularly in a range of 76 to 95-percent is conferred as compared to a corresponding non-transformed wild type non-human organism.

[8671] Accordingly, in one embodiment, an increase of arginine in a non-human organism, as compared to a corresponding non-transformed wild type non-human organism, is conferred in the process of the invention, if the activity of a polypeptide showing the activity of a betahydroxylase, or if the activity of the polypeptide AvinDRAFT_{—}2091, preferably represented by SEQ ID NO. 6041, or a homolog or fragment thereof, or if the activity of a polypeptide encoded by a nucleic acid molecule comprising the nucleic acid SEQ ID NO. 6040, preferably the coding region thereof, or a homolog or fragment thereof, e.g. derived from Azotobacter vinelandii, is increased or generated. For example the activity of a nucleic acid molecule or a polypeptide comprising the nucleic acid, preferably the coding region thereof, or polypeptide or the consensus sequence or the polypeptide motif, as depicted in Table I, II or IV, application No. 2, column 5 or 8 in the respective same line as the nucleic acid molecule SEQ ID NO. 6040 or polypeptide SEQ ID NO. 6041, respectively, or a homolog or a fragment thereof, is increased or generated, or if the activity beta-hydroxylase is increased or generated in a non-human organism, like a microorganism or a plant cell, plant or part thereof, especially with non-targeted localization, whereby the respective line discloses in column 7 arginine. For example, an increase of the arginine of at least 1 percent, particularly in a range of 64 to 530-percent is conferred as compared to a corresponding non-transformed wild type non-human organism.

[8672] Accordingly, in one embodiment, an increase of arginine in a non-human organism, as compared to a corresponding non-transformed wild type non-human organism, is conferred in the process of the invention, if the activity of a polypeptide showing the activity of a elongation factor Tu, or if the activity of the polypeptide AvinDRAFT_{—}2344, preferably represented by SEQ ID NO. 27022, or a homolog or fragment thereof, or if the activity of a polypeptide encoded by a nucleic acid molecule comprising the nucleic acid SEQ ID NO. 27021, preferably the coding region thereof, or a homolog or fragment thereof, e.g. derived from Azotobacter vinelandii, is increased or generated. For example the activity of a nucleic acid molecule or a polypeptide comprising the nucleic acid, preferably the coding region thereof, or polypeptide or the consensus sequence or the polypeptide motif, as depicted in Table I, II or IV, application No. 2, column 5 or 8 in the respective same line as the nucleic acid molecule SEQ ID NO. 27021 or polypeptide SEQ ID NO. 27022, respectively, or a homolog or a fragment thereof, is increased or generated, or if the activity elongation factor Tu is increased or generated in a non-human organism, like a microorganism or a plant cell, plant or part thereof, especially with non-targeted localization, whereby the respective line discloses in column 7 arginine. For example, an increase of the arginine of at least 1 percent, particularly in a range of 115 to 495-percent is conferred as compared to a corresponding non-transformed wild type non-human organism.

[8673] Accordingly, in one embodiment, an increase of glutamate in a non-human organism, as compared to a corresponding non-transformed wild type non-human organism, is conferred in the process of the invention, if the activity of a polypeptide showing the activity of a elongation factor Tu, or if the activity of the polypeptide AvinDRAFT_{—}2344, preferably represented by SEQ ID NO. 27022, or a homolog or fragment thereof, or if the activity of a polypeptide encoded by a nucleic acid molecule comprising the nucleic acid SEQ ID NO. 27021, preferably the coding region thereof, or a homolog or fragment thereof, e.g. derived from Azotobacter vinelandii, is increased or generated. For example the activity of a nucleic acid molecule or a polypeptide comprising the nucleic acid, preferably the coding region thereof, or polypeptide or the consensus sequence or the polypeptide motif, as depicted in Table I, II or IV, application No. 2, column 5 or 8 in the respective same line as the nucleic acid molecule SEQ ID NO. 27021 or polypeptide SEQ ID NO. 27022, respectively, or a homolog or a fragment thereof, is increased or generated, or if the activity elongation factor Tu is increased or generated in a non-human organism, like a microorganism or a plant cell, plant or part thereof, especially with non-targeted localization, whereby the respective line discloses in column 7 glutamate. For example, an increase of the glutamate of at least 1 percent, particularly in a range of 44 to 145-percent is conferred as compared to a corresponding non-transformed wild type non-human organism.

[8674] Accordingly, in one embodiment, an increase of glutamine in a non-human organism, as compared to a corresponding non-transformed wild type non-human organism, is conferred in the process of the invention, if the activity of a polypeptide showing the activity of a elongation factor Tu, or if the activity of the polypeptide AvinDRAFT_{—}2344, preferably represented by SEQ ID NO. 27022, or a homolog or fragment thereof, or if the activity of a polypeptide encoded by a nucleic acid molecule comprising the nucleic acid SEQ ID NO. 27021, preferably the coding region thereof, or a homolog or fragment thereof, e.g. derived from Azotobacter vinelandii, is increased or generated. For example the activity of a nucleic acid molecule or a polypeptide comprising the nucleic acid, preferably the coding region thereof, or polypeptide or the consensus sequence or the polypeptide motif, as depicted in Table I, II or IV, application No. 2, column 5 or 8 in the respective same line as the nucleic acid molecule SEQ ID NO. 27021 or polypeptide SEQ ID NO. 27022, respectively, or a homolog or a fragment thereof, is increased or generated, or if the activity elongation factor Tu is increased or generated in a non-human organism, like a microorganism or a plant cell, plant or part thereof, especially with non-targeted localization, whereby the respective line discloses in column 7 glutamine. For example, an increase of the glutamine of at least 1 percent, particularly in a range of 76 to 770-percent is conferred as compared to a corresponding non-transformed wild type non-human organism.

[8675] Accordingly, in one embodiment, an increase of glutamine in a non-human organism, as compared to a corresponding non-transformed wild type non-human organism, is conferred in the process of the invention, if the activity of a polypeptide showing the activity of a ABC transporter permease protein, or if the activity of the polypeptide AvinDRAFT_{—}2521, preferably represented by SEQ ID NO. 27883, or a homolog or fragment thereof, or if the activity of a polypeptide encoded by a nucleic acid molecule comprising the nucleic acid SEQ ID NO. 27882, preferably the coding region thereof, or a homolog or fragment thereof, e.g. derived from Azotobacter vinelandii, is increased or generated. For example the activity of a nucleic acid molecule or a polypeptide comprising the nucleic acid, preferably the coding region thereof, or polypeptide or the consensus sequence or the polypeptide motif, as depicted in Table I, II or IV, application No. 2, column 5 or 8 in the respective same line as the nucleic acid molecule SEQ ID NO. 27882 or polypeptide SEQ ID NO. 27883, respectively, or a homolog or a fragment thereof, is increased or generated, or if the activity ABC transporter permease protein is increased or generated in a non-human organism, like a microorganism or a plant cell, plant or part thereof, especially with non-targeted localization, whereby the respective line discloses in column 7 glutamine. For example, an increase of the glutamine of at least 1 percent, particularly in a range of 58 to 197-percent is conferred as compared to a corresponding non-transformed wild type non-human organism.

[8676] Accordingly, in one embodiment, an increase of proline in a non-human organism, as compared to a corresponding non-transformed wild type non-human organism, is conferred in the process of the invention, if the activity of a polypeptide showing the activity of a ABC transporter permease protein, or if the activity of the polypeptide AvinDRAFT_{—}2521, preferably represented by SEQ ID NO. 27883, or a homolog or fragment thereof, or if the activity of a polypeptide encoded by a nucleic acid molecule comprising the nucleic acid SEQ ID NO. 27882, preferably the coding region thereof, or a homolog or fragment thereof, e.g. derived from Azotobacter vinelandii, is increased or generated. For example the activity of a nucleic acid molecule or a polypeptide comprising the nucleic acid, preferably the coding region thereof, or polypeptide or the consensus sequence or the polypeptide motif, as depicted in Table I, II or IV, application No. 2, column 5 or 8 in the respective same line as the nucleic acid molecule SEQ ID NO. 27882 or polypeptide SEQ ID NO. 27883, respectively, or a homolog or a fragment thereof, is increased or generated, or if the activity ABC transporter permease protein is increased or generated in a non-human organism, like a microorganism or a plant cell, plant or part thereof, especially with non-targeted localization, whereby the respective line discloses in column 7 proline. For example, an increase of the proline of at least 1 percent, particularly in a range of 39 to 466-percent is conferred as compared to a corresponding non-transformed wild type non-human organism.

[8677] Accordingly, in one embodiment, an increase of arginine in a non-human organism, as compared to a corresponding non-transformed wild type non-human organism, is conferred in the process of the invention, if the activity of a polypeptide showing the activity of a acyl-CoA synthase, or if the activity of the polypeptide AvinDRAFT_{—}2754, preferably represented by SEQ ID NO. 28041, or a homolog or fragment thereof, or if the activity of a polypeptide encoded by a nucleic acid molecule comprising the nucleic acid SEQ ID NO. 28040, preferably the coding region thereof, or a homolog or fragment thereof, e.g. derived from Azotobacter vinelandii, is increased or generated. For example the activity of a nucleic acid molecule or a polypeptide comprising the nucleic acid, preferably the coding region thereof, or polypeptide or the consensus sequence or the polypeptide motif, as depicted in Table I, II or IV, application No. 2, column 5 or 8 in the respective same line as the nucleic acid molecule SEQ ID NO. 28040 or polypeptide SEQ ID NO. 28041, respectively, or a homolog or a fragment thereof, is increased or generated, or if the activity acyl-CoA synthase is increased or generated in a non-human organism, like a microorganism or a plant cell, plant or part thereof, especially with non-targeted localization, whereby the respective line discloses in column 7 arginine. For example, an increase of the arginine of at least 1 percent, particularly in a range of 73 to 227-percent is conferred as compared to a corresponding non-transformed wild type non-human organism.

[8678] Accordingly, in one embodiment, an increase of glutamate in a non-human organism, as compared to a corresponding non-transformed wild type non-human organism, is conferred in the process of the invention, if the activity of a polypeptide showing the activity of a acyl-CoA synthase, or if the activity of the polypeptide AvinDRAFT_{—}2754, preferably represented by SEQ ID NO. 28041, or a homolog or fragment thereof, or if the activity of a polypeptide encoded by a nucleic acid molecule comprising the nucleic acid SEQ ID NO. 28040, preferably the coding region thereof, or a homolog or fragment thereof, e.g. derived from Azotobacter vinelandii, is increased or generated. For example the activity of a nucleic acid molecule or a polypeptide comprising the nucleic acid, preferably the coding region thereof, or polypeptide or the consensus sequence or the polypeptide motif, as depicted in Table I, II or IV, application No. 2, column 5 or 8 in the respective same line as the nucleic acid molecule SEQ ID NO. 28040 or polypeptide SEQ ID NO. 28041, respectively, or a homolog or a fragment thereof, is increased or generated, or if the activity acyl-CoA synthase is increased or generated in a non-human organism, like a microorganism or a plant cell, plant or part thereof, especially with non-targeted localization, whereby the respective line discloses in column 7 glutamate. For example, an increase of the glutamate of at least 1 percent, particularly in a range of 38 to 297-percent is conferred as compared to a corresponding non-transformed wild type non-human organism.

[8679] Accordingly, in one embodiment, an increase of glutamine in a non-human organism, as compared to a corresponding non-transformed wild type non-human organism, is conferred in the process of the invention, if the activity of a polypeptide showing the activity of a acyl-CoA synthase, or if the activity of the polypeptide AvinDRAFT_{—}2754, preferably represented by SEQ ID NO. 28041, or a homolog or fragment thereof, or if the activity of a polypeptide encoded by a nucleic acid molecule comprising the nucleic acid SEQ ID NO. 28040, preferably the coding region thereof, or a homolog or fragment thereof, e.g. derived from Azotobacter vinelandii, is increased or generated. For example the activity of a nucleic acid molecule or a polypeptide comprising the nucleic acid, preferably the coding region thereof, or polypeptide or the consensus sequence or the polypeptide motif, as depicted in Table I, II or IV, application No. 2, column 5 or 8 in the respective same line as the nucleic acid molecule SEQ ID NO. 28040 or polypeptide SEQ ID NO. 28041, respectively, or a homolog or a fragment thereof, is increased or generated, or if the activity acyl-CoA synthase is increased or generated in a non-human organism, like a microorganism or a plant cell, plant or part thereof, especially with non-targeted localization, whereby the respective line discloses in column 7 glutamine. For example, an increase of the glutamine of at least 1 percent, particularly in a range of 80 to 466-percent is conferred as compared to a corresponding non-transformed wild type non-human organism.

[8680] Accordingly, in one embodiment, an increase of proline in a non-human organism, as compared to a corresponding non-transformed wild type non-human organism, is conferred in the process of the invention, if the activity of a polypeptide showing the activity of a acyl-CoA synthase, or if the activity of the polypeptide AvinDRAFT_{—}2754, preferably represented by SEQ ID NO. 28041, or a homolog or fragment thereof, or if the activity of a polypeptide encoded by a nucleic acid molecule comprising the nucleic acid SEQ ID NO. 28040, preferably the coding region thereof, or a homolog or fragment thereof, e.g. derived from Azotobacter vinelandii, is increased or generated. For example the activity of a nucleic acid molecule or a polypeptide comprising the nucleic acid, preferably the coding region thereof, or polypeptide or the consensus sequence or the polypeptide motif, as depicted in Table I, II or IV, application No. 2, column 5 or 8 in the respective same line as the nucleic acid molecule SEQ ID NO. 28040 or polypeptide SEQ ID NO. 28041, respectively, or a homolog or a fragment thereof, is increased or generated, or if the activity acyl-CoA synthase is increased or generated in a non-human organism, like a microorganism or a plant cell, plant or part thereof, especially with non-targeted localization, whereby the respective line discloses in column 7 proline. For example, an increase of the proline of at least 1 percent, particularly in a range of 36 to 170-percent is conferred as compared to a corresponding non-transformed wild type non-human organism.

[8681] Accordingly, in one embodiment, an increase of glutamate in a non-human organism, as compared to a corresponding non-transformed wild type non-human organism, is conferred in the process of the invention, if the activity of a polypeptide showing the activity of a 2-oxoglutarate dehydrogenase E1 subunit, or if the activity of the polypeptide AvinDRAFT_{—}3028, preferably represented by SEQ ID NO. 6076, or a homolog or fragment thereof, or if the activity of a polypeptide encoded by a nucleic acid molecule comprising the nucleic acid SEQ ID NO. 6075, preferably the coding region thereof, or a homolog or fragment thereof, e.g. derived from Azotobacter vinelandii, is increased or generated. For example the activity of a nucleic acid molecule or a polypeptide comprising the nucleic acid, preferably the coding region thereof, or polypeptide or the consensus sequence or the polypeptide motif, as depicted in Table I, II or IV, application No. 2, column 5 or 8 in the respective same line as the nucleic acid molecule SEQ ID NO. 6075 or polypeptide SEQ ID NO. 6076, respectively, or a homolog or a fragment thereof, is increased or generated, or if the activity 2-oxoglutarate dehydrogenase E1 subunit is increased or generated in a non-human organism, like a microorganism or a plant cell, plant or part thereof, especially with non-targeted localization, whereby the respective line discloses in column 7 glutamate. For example, an increase of the glutamate of at least 1 percent, particularly in a range of 64 to 185-percent is conferred as compared to a corresponding non-transformed wild type non-human organism.

[8682] Accordingly, in one embodiment, an increase of arginine in a non-human organism, as compared to a corresponding non-transformed wild type non-human organism, is conferred in the process of the invention, if the activity of a polypeptide showing the activity of a enoyl-CoA hydratase, or if the activity of the polypeptide AvinDRAFT_{—}3159, preferably represented by SEQ ID NO. 28739, or a homolog or fragment thereof, or if the activity of a polypeptide encoded by a nucleic acid molecule comprising the nucleic acid SEQ ID NO. 28738, preferably the coding region thereof, or a homolog or fragment thereof, e.g. derived from Azotobacter vinelandii, is increased or generated. For example the activity of a nucleic acid molecule or a polypeptide comprising the nucleic acid, preferably the coding region thereof, or polypeptide or the consensus sequence or the polypeptide motif, as depicted in Table I, II or IV, application No. 2, column 5 or 8 in the respective same line as the nucleic acid molecule SEQ ID NO. 28738 or polypeptide SEQ ID NO. 28739, respectively, or a homolog or a fragment thereof, is increased or generated, or if the activity enoyl-CoA hydratase is increased or generated in a non-human organism, like a microorganism or a plant cell, plant or part thereof, especially with non-targeted localization, whereby the respective line discloses in column 7 arginine. For example, an increase of the arginine of at least 1 percent, particularly in a range of 64 to 144-percent is conferred as compared to a corresponding non-transformed wild type non-human organism.

[8683] Accordingly, in one embodiment, an increase of proline in a non-human organism, as compared to a corresponding non-transformed wild type non-human organism, is conferred in the process of the invention, if the activity of a polypeptide showing the activity of a enoyl-CoA hydratase, or if the activity of the polypeptide AvinDRAFT_{—}3159, preferably represented by SEQ ID NO. 28739, or a homolog or fragment thereof, or if the activity of a polypeptide encoded by a nucleic acid molecule comprising the nucleic acid SEQ ID NO. 28738, preferably the coding region thereof, or a homolog or fragment thereof, e.g. derived from Azotobacter vinelandii, is increased or generated. For example the activity of a nucleic acid molecule or a polypeptide comprising the nucleic acid, preferably the coding region thereof, or polypeptide or the consensus sequence or the polypeptide motif, as depicted in Table I, II or IV, application No. 2, column 5 or 8 in the respective same line as the nucleic acid molecule SEQ ID NO. 28738 or polypeptide SEQ ID NO. 28739, respectively, or a homolog or a fragment thereof, is increased or generated, or if the activity enoyl-CoA hydratase is increased or generated in a non-human organism, like a microorganism or a plant cell, plant or part thereof, especially with non-targeted localization, whereby the respective line discloses in column 7 proline. For example, an increase of the proline of at least 1 percent, particularly in a range of 63 to 531-percent is conferred as compared to a corresponding non-transformed wild type non-human organism.

[8684] Accordingly, in one embodiment, an increase of glutamate in a non-human organism, as compared to a corresponding non-transformed wild type non-human organism, is conferred in the process of the invention, if the activity of a polypeptide showing the activity of a transcriptional regulator, or if the activity of the polypeptide AvinDRAFT_{—}3186, preferably represented by SEQ ID NO. 29247, or a homolog or fragment thereof, or if the activity of a polypeptide encoded by a nucleic acid molecule comprising the nucleic acid SEQ ID NO. 29246, preferably the coding region thereof, or a homolog or fragment thereof, e.g. derived from Azotobacter vinelandii, is increased or generated. For example the activity of a nucleic acid molecule or a polypeptide comprising the nucleic acid, preferably the coding region thereof, or polypeptide or the consensus sequence or the polypeptide motif, as depicted in Table I, II or IV, application No. 2, column 5 or 8 in the respective same line as the nucleic acid molecule SEQ ID NO. 29246 or polypeptide SEQ ID NO. 29247, respectively, or a homolog or a fragment thereof, is increased or generated, or if the activity transcriptional regulator is increased or generated in a non-human organism, like a microorganism or a plant cell, plant or part thereof, especially with non-targeted localization, whereby the respective line discloses in column 7 glutamate. For example, an increase of the glutamate of at least 1 percent, particularly in a range of 38 to 91-percent is conferred as compared to a corresponding non-transformed wild type non-human organism.

[8685] Accordingly, in one embodiment, an increase of proline in a non-human organism, as compared to a corresponding non-transformed wild type non-human organism, is conferred in the process of the invention, if the activity of a polypeptide showing the activity of a transcriptional regulator, or if the activity of the polypeptide AvinDRAFT_{—}3209, preferably represented by SEQ ID NO. 29287, or a homolog or fragment thereof, or if the activity of a polypeptide encoded by a nucleic acid molecule comprising the nucleic acid SEQ ID NO. 29286, preferably the coding region thereof, or a homolog or fragment thereof, e.g. derived from Azotobacter vinelandii, is increased or generated. For example the activity of a nucleic acid molecule or a polypeptide comprising the nucleic acid, preferably the coding region thereof, or polypeptide or the consensus sequence or the polypeptide motif, as depicted in Table I, II or IV, application No. 2, column 5 or 8 in the respective same line as the nucleic acid molecule SEQ ID NO. 29286 or polypeptide SEQ ID NO. 29287, respectively, or a homolog or a fragment thereof, is increased or generated, or if the activity transcriptional regulator is increased or generated in a non-human organism, like a microorganism or a plant cell, plant or part thereof, especially with non-targeted localization, whereby the respective line discloses in column 7 proline. For example, an increase of the proline of at least 1 percent, particularly in a range of 105 to 202-percent is conferred as compared to a corresponding non-transformed wild type non-human organism.

[8686] Accordingly, in one embodiment, an increase of proline in a non-human organism, as compared to a corresponding non-transformed wild type non-human organism, is conferred in the process of the invention, if the activity of a polypeptide showing the activity of a acyltransferase, or if the activity of the polypeptide AvinDRAFT_{—}3250, preferably represented by SEQ ID NO. 29398, or a homolog or fragment thereof, or if the activity of a polypeptide encoded by a nucleic acid molecule comprising the nucleic acid SEQ ID NO. 29397, preferably the coding region thereof, or a homolog or fragment thereof, e.g. derived from Azotobacter vinelandii, is increased or generated. For example the activity of a nucleic acid molecule or a polypeptide comprising the nucleic acid, preferably the coding region thereof, or polypeptide or the consensus sequence or the polypeptide motif, as depicted in Table I, II or IV, application No. 2, column 5 or 8 in the respective same line as the nucleic acid molecule SEQ ID NO. 29397 or polypeptide SEQ ID NO. 29398, respectively, or a homolog or a fragment thereof, is increased or generated, or if the activity acyltransferase is increased or generated in a non-human organism, like a microorganism or a plant cell, plant or part thereof, especially with non-targeted localization, whereby the respective line discloses in column 7 proline. For example, an increase of the proline of at least 1 percent, particularly in a range of 50 to 405-percent is conferred as compared to a corresponding non-transformed wild type non-human organism.

[8687] Accordingly, in one embodiment, an increase of glutamate in a non-human organism, as compared to a corresponding non-transformed wild type non-human organism, is conferred in the process of the invention, if the activity of a polypeptide showing the activity of a oxidoreductase, or if the activity of the polypeptide AvinDRAFT_{—}3253, preferably represented by SEQ ID NO. 29501, or a homolog or fragment thereof, or if the activity of a polypeptide encoded by a nucleic acid molecule comprising the nucleic acid SEQ ID NO. 29500, preferably the coding region thereof, or a homolog or fragment thereof, e.g. derived from Azotobacter vinelandii, is increased or generated. For example the activity of a nucleic acid molecule or a polypeptide comprising the nucleic acid, preferably the coding region thereof, or polypeptide or the consensus sequence or the polypeptide motif, as depicted in Table I, II or IV, application No. 2, column 5 or 8 in the respective same line as the nucleic acid molecule SEQ ID NO. 29500 or polypeptide SEQ ID NO. 29501, respectively, or a homolog or a fragment thereof, is increased or generated, or if the activity oxidoreductase is increased or generated in a non-human organism, like a microorganism or a plant cell, plant or part thereof, especially with non-targeted localization, whereby the respective line discloses in column 7 glutamate. For example, an increase of the glutamate of at least 1 percent, particularly in a range of 34 to 63-percent is conferred as compared to a corresponding non-transformed wild type non-human organism.

[8688] Accordingly, in one embodiment, an increase of glutamine in a non-human organism, as compared to a corresponding non-transformed wild type non-human organism, is conferred in the process of the invention, if the activity of a polypeptide showing the activity of a oxidoreductase, or if the activity of the polypeptide AvinDRAFT_{—}3253, preferably represented by SEQ ID NO. 29501, or a homolog or fragment thereof, or if the activity of a polypeptide encoded by a nucleic acid molecule comprising the nucleic acid SEQ ID NO. 29500, preferably the coding region thereof, or a homolog or fragment thereof, e.g. derived from Azotobacter vinelandii, is increased or generated. For example the activity of a nucleic acid molecule or a polypeptide comprising the nucleic acid, preferably the coding region thereof, or polypeptide or the consensus sequence or the polypeptide motif, as depicted in Table I, II or IV, application No. 2, column 5 or 8 in the respective same line as the nucleic acid molecule SEQ ID NO. 29500 or polypeptide SEQ ID NO. 29501, respectively, or a homolog or a fragment thereof, is increased or generated, or if the activity oxidoreductase is increased or generated in a non-human organism, like a microorganism or a plant cell, plant or part thereof, especially with non-targeted localization, whereby the respective line discloses in column 7 glutamine. For example, an increase of the glutamine of at least 1 percent, particularly in a range of 53 to 128-percent is conferred as compared to a corresponding non-transformed wild type non-human organism.

[8689] Accordingly, in one embodiment, an increase of glutamine in a non-human organism, as compared to a corresponding non-transformed wild type non-human organism, is conferred in the process of the invention, if the activity of a polypeptide showing the activity of a lysyl-tRNA synthetase, or if the activity of the polypeptide AvinDRAFT_{—}3556, preferably represented by SEQ ID NO. 30040, or a homolog or fragment thereof, or if the activity of a polypeptide encoded by a nucleic acid molecule comprising the nucleic acid SEQ ID NO. 30039, preferably the coding region thereof, or a homolog or fragment thereof, e.g. derived from Azotobacter vinelandii, is increased or generated. For example the activity of a nucleic acid molecule or a polypeptide comprising the nucleic acid, preferably the coding region thereof, or polypeptide or the consensus sequence or the polypeptide motif, as depicted in Table I, II or IV, application No. 2, column 5 or 8 in the respective same line as the nucleic acid molecule SEQ ID NO. 30039 or polypeptide SEQ ID NO. 30040, respectively, or a homolog or a fragment thereof, is increased or generated, or if the activity lysyl-tRNA synthetase is increased or generated in a non-human organism, like a microorganism or a plant cell, plant or part thereof, especially with non-targeted localization, whereby the respective line discloses in column 7 glutamine. For example, an increase of the glutamine of at least 1 percent, particularly in a range of 37 to 65-percent is conferred as compared to a corresponding non-transformed wild type non-human organism.

[8690] Accordingly, in one embodiment, an increase of glutamate in a non-human organism, as compared to a corresponding non-transformed wild type non-human organism, is conferred in the process of the invention, if the activity of a polypeptide showing the activity of a 30S ribosomal protein, or if the activity of the polypeptide AvinDRAFT_{—}3587, preferably represented by SEQ ID NO. 30465, or a homolog or fragment thereof, or if the activity of a polypeptide encoded by a nucleic acid molecule comprising the nucleic acid SEQ ID NO. 30464, preferably the coding region thereof, or a homolog or fragment thereof, e.g. derived from Azotobacter vinelandii, is increased or generated. For example the activity of a nucleic acid molecule or a polypeptide comprising the nucleic acid, preferably the coding region thereof, or polypeptide or the consensus sequence or the polypeptide motif, as depicted in Table I, II or IV, application No. 2, column 5 or 8 in the respective same line as the nucleic acid molecule SEQ ID NO. 30464 or polypeptide SEQ ID NO. 30465, respectively, or a homolog or a fragment thereof, is increased or generated, or if the activity 30S ribosomal protein is increased or generated in a non-human organism, like a microorganism or a plant cell, plant or part thereof, especially with non-targeted localization, whereby the respective line discloses in column 7 glutamate. For example, an increase of the glutamate of at least 1 percent, particularly in a range of 36 to 71-percent is conferred as compared to a corresponding non-transformed wild type non-human organism.

[8691] Accordingly, in one embodiment, an increase of glutamate in a non-human organism, as compared to a corresponding non-transformed wild type non-human organism, is conferred in the process of the invention, if the activity of a polypeptide showing the activity of a CTP synthase, or if the activity of the polypeptide AvinDRAFT_{—}3605, preferably represented by SEQ ID NO. 31027, or a homolog or fragment thereof, or if the activity of a polypeptide encoded by a nucleic acid molecule comprising the nucleic acid SEQ ID NO. 31026, preferably the coding region thereof, or a homolog or fragment thereof, e.g. derived from Azotobacter vinelandii, is increased or generated. For example the activity of a nucleic acid molecule or a polypeptide comprising the nucleic acid, preferably the coding region thereof, or polypeptide or the consensus sequence or the polypeptide motif, as depicted in Table I, II or IV, application No. 2, column 5 or 8 in the respective same line as the nucleic acid molecule SEQ ID NO. 31026 or polypeptide SEQ ID NO. 31027, respectively, or a homolog or a fragment thereof, is increased or generated, or if the activity CTP synthase is increased or generated in a non-human organism, like a microorganism or a plant cell, plant or part thereof, especially with non-targeted localization, whereby the respective line discloses in column 7 glutamate. For example, an increase of the glutamate of at least 1 percent, particularly in a range of 35 to 57-percent is conferred as compared to a corresponding non-transformed wild type non-human organism.

[8692] Accordingly, in one embodiment, an increase of glutamine in a non-human organism, as compared to a corresponding non-transformed wild type non-human organism, is conferred in the process of the invention, if the activity of a polypeptide showing the activity of a CTP synthase, or if the activity of the polypeptide AvinDRAFT_{—}3605, preferably represented by SEQ ID NO. 31027, or a homolog or fragment thereof, or if the activity of a polypeptide encoded by a nucleic acid molecule comprising the nucleic acid SEQ ID NO. 31026, preferably the coding region thereof, or a homolog or fragment thereof, e.g. derived from Azotobacter vinelandii, is increased or generated. For example the activity of a nucleic acid molecule or a polypeptide comprising the nucleic acid, preferably the coding region thereof, or polypeptide or the consensus sequence or the polypeptide motif, as depicted in Table I, II or IV, application No. 2, column 5 or 8 in the respective same line as the nucleic acid molecule SEQ ID NO. 31026 or polypeptide SEQ ID NO. 31027, respectively, or a homolog or a fragment thereof, is increased or generated, or if the activity CTP synthase is increased or generated in a non-human organism, like a microorganism or a plant cell, plant or part thereof, especially with non-targeted localization, whereby the respective line discloses in column 7 glutamine. For example, an increase of the glutamine of at least 1 percent, particularly in a range of 60 to 275-percent is conferred as compared to a corresponding non-transformed wild type non-human organism.

[8693] Accordingly, in one embodiment, an increase of glutamate in a non-human organism, as compared to a corresponding non-transformed wild type non-human organism, is conferred in the process of the invention, if the activity of a polypeptide showing the activity of a glucose-1-phosphate cytidylyltransferase, or if the activity of the polypeptide AvinDRAFT_{—}4384, preferably represented by SEQ ID NO. 31718, or a homolog or fragment thereof, or if the activity of a polypeptide encoded by a nucleic acid molecule comprising the nucleic acid SEQ ID NO. 31717, preferably the coding region thereof, or a homolog or fragment thereof, e.g. derived from Azotobacter vinelandii, is increased or generated. For example the activity of a nucleic acid molecule or a polypeptide comprising the nucleic acid, preferably the coding region thereof, or polypeptide or the consensus sequence or the polypeptide motif, as depicted in Table I, II or IV, application No. 2, column 5 or 8 in the respective same line as the nucleic acid molecule SEQ ID NO. 31717 or polypeptide SEQ ID NO. 31718, respectively, or a homolog or a fragment thereof, is increased or generated, or if the activity glucose-1-phosphate cytidylyltransferase is increased or generated in a non-human organism, like a microorganism or a plant cell, plant or part thereof, especially with non-targeted localization, whereby the respective line discloses in column 7 glutamate. For example, an increase of the glutamate of at least 1 percent, particularly in a range of 35 to 98-percent is conferred as compared to a corresponding non-transformed wild type non-human organism.

[8694] Accordingly, in one embodiment, an increase of glutamine in a non-human organism, as compared to a corresponding non-transformed wild type non-human organism, is conferred in the process of the invention, if the activity of a polypeptide showing the activity of a glucose-1-phosphate cytidylyltransferase, or if the activity of the polypeptide AvinDRAFT_{—}4384, preferably represented by SEQ ID NO. 31718, or a homolog or fragment thereof, or if the activity of a polypeptide encoded by a nucleic acid molecule comprising the nucleic acid SEQ ID NO. 31717, preferably the coding region thereof, or a homolog or fragment thereof, e.g. derived from Azotobacter vinelandii, is increased or generated. For example the activity of a nucleic acid molecule or a polypeptide comprising the nucleic acid, preferably the coding region thereof, or polypeptide or the consensus sequence or the polypeptide motif, as depicted in Table I, II or IV, application No. 2, column 5 or 8 in the respective same line as the nucleic acid molecule SEQ ID NO. 31717 or polypeptide SEQ ID NO. 31718, respectively, or a homolog or a fragment thereof, is increased or generated, or if the activity glucose-1-phosphate cytidylyltransferase is increased or generated in a non-human organism, like a microorganism or a plant cell, plant or part thereof, especially with non-targeted localization, whereby the respective line discloses in column 7 glutamine. For example, an increase of the glutamine of at least 1 percent, particularly in a range of 75 to 196-percent is conferred as compared to a corresponding non-transformed wild type non-human organism.

[8695] Accordingly, in one embodiment, an increase of proline in a non-human organism, as compared to a corresponding non-transformed wild type non-human organism, is conferred in the process of the invention, if the activity of a polypeptide showing the activity of a glucose-1-phosphate cytidylyltransferase, or if the activity of the polypeptide AvinDRAFT_{—}4384, preferably represented by SEQ ID NO. 31718, or a homolog or fragment thereof, or if the activity of a polypeptide encoded by a nucleic acid molecule comprising the nucleic acid SEQ ID NO. 31717, preferably the coding region thereof, or a homolog or fragment thereof, e.g. derived from Azotobacter vinelandii, is increased or generated. For example the activity of a nucleic acid molecule or a polypeptide comprising the nucleic acid, preferably the coding region thereof, or polypeptide or the consensus sequence or the polypeptide motif, as depicted in Table I, II or IV, application No. 2, column 5 or 8 in the respective same line as the nucleic acid molecule SEQ ID NO. 31717 or polypeptide SEQ ID NO. 31718, respectively, or a homolog or a fragment thereof, is increased or generated, or if the activity glucose-1-phosphate cytidylyltransferase is increased or generated in a non-human organism, like a microorganism or a plant cell, plant or part thereof, especially with non-targeted localization, whereby the respective line discloses in column 7 proline. For example, an increase of the proline of at least 1 percent, particularly in a range of 49 to 109-percent is conferred as compared to a corresponding non-transformed wild type non-human organism.

[8696] Accordingly, in one embodiment, an increase of arginine in a non-human organism, as compared to a corresponding non-transformed wild type non-human organism, is conferred in the process of the invention, if the activity of a polypeptide showing the activity of a aminotransferase, or if the activity of the polypeptide AvinDRAFT_{—}4562, preferably represented by SEQ ID NO. 31927, or a homolog or fragment thereof, or if the activity of a polypeptide encoded by a nucleic acid molecule comprising the nucleic acid SEQ ID NO. 31926, preferably the coding region thereof, or a homolog or fragment thereof, e.g. derived from Azotobacter vinelandii, is increased or generated. For example the activity of a nucleic acid molecule or a polypeptide comprising the nucleic acid, preferably the coding region thereof, or polypeptide or the consensus sequence or the polypeptide motif, as depicted in Table I, II or IV, application No. 2, column 5 or 8 in the respective same line as the nucleic acid molecule SEQ ID NO. 31926 or polypeptide SEQ ID NO. 31927, respectively, or a homolog or a fragment thereof, is increased or generated, or if the activity aminotransferase is increased or generated in a non-human organism, like a microorganism or a plant cell, plant or part thereof, especially with non-targeted localization, whereby the respective line discloses in column 7 arginine. For example, an increase of the arginine of at least 1 percent, particularly in a range of 58 to 219-percent is conferred as compared to a corresponding non-transformed wild type non-human organism.

[8697] Accordingly, in one embodiment, an increase of proline in a non-human organism, as compared to a corresponding non-transformed wild type non-human organism, is conferred in the process of the invention, if the activity of a polypeptide showing the activity of a hydrolase, or if the activity of the polypeptide AvinDRAFT_{—}5103, preferably represented by SEQ ID NO. 6511, or a homolog or fragment thereof, or if the activity of a polypeptide encoded by a nucleic acid molecule comprising the nucleic acid SEQ ID NO. 6510, preferably the coding region thereof, or a homolog or fragment thereof, e.g. derived from Azotobacter vinelandii, is increased or generated. For example the activity of a nucleic acid molecule or a polypeptide comprising the nucleic acid, preferably the coding region thereof, or polypeptide or the consensus sequence or the polypeptide motif, as depicted in Table I, II or IV, application No. 2, column 5 or 8 in the respective same line as the nucleic acid molecule SEQ ID NO. 6510 or polypeptide SEQ ID NO. 6511, respectively, or a homolog or a fragment thereof, is increased or generated, or if the activity hydrolase is increased or generated in a non-human organism, like a microorganism or a plant cell, plant or part thereof, especially with non-targeted localization, whereby the respective line discloses in column 7 proline. For example, an increase of the proline of at least 1 percent, partitularly in a range of 66 to 289-percent is conferred as compared to a corresponding non-transformed wild type non-human organism.

[8698] Accordingly, in one embodiment, an increase of arginine in a non-human organism, as compared to a corresponding non-transformed wild type non-human organism, is conferred in the process of the invention, if the activity of a polypeptide showing the activity of a glutamate-ammonia-ligase, or if the activity of the polypeptide AvinDRAFT_{—}5246, preferably represented by SEQ ID NO. 32038, or a homolog or fragment thereof, or if the activity of a polypeptide encoded by a nucleic acid molecule comprising the nucleic acid SEQ ID NO. 32037, preferably the coding region thereof, or a homolog or fragment thereof, e.g. derived from Azotobacter vinelandii, is increased or generated. For example the activity of a nucleic acid molecule or a polypeptide comprising the nucleic acid, preferably the coding region thereof, or polypeptide or the consensus sequence or the polypeptide motif, as depicted in Table I, II or IV, application No. 2, column 5 or 8 in the respective same line as the nucleic acid molecule SEQ ID NO. 32037 or polypeptide SEQ ID NO. 32038, respectively, or a homolog or a fragment thereof, is increased or generated, or if the activity glutamate-ammonia-ligase is increased or generated in a non-human organism, like a microorganism or a plant cell, plant or part thereof, especially with non-targeted localization, whereby the respective line discloses in column 7 arginine. For example, an increase of the arginine of at least 1 percent, particularly in a range of 71 to 419-percent is conferred as compared to a corresponding non-transformed wild type non-human organism.

[8699] Accordingly, in one embodiment, an increase of glutamine in a non-human organism, as compared to a corresponding non-transformed wild type non-human organism, is conferred in the process of the invention, if the activity of a polypeptide showing the activity of a glutamate-ammonia-ligase, or if the activity of the polypeptide AvinDRAFT_{—}5246, preferably represented by SEQ ID NO. 32038, or a homolog or fragment thereof, or if the activity of a polypeptide encoded by a nucleic acid molecule comprising the nucleic acid SEQ ID NO. 32037, preferably the coding region thereof, or a homolog or fragment thereof, e.g. derived from Azotobacter vinelandii, is increased or generated. For example the activity of a nucleic acid molecule or a polypeptide comprising the nucleic acid, preferably the coding region thereof, or polypeptide or the consensus sequence or the polypeptide motif, as depicted in Table I, II or IV, application No. 2, column 5 or 8 in the respective same line as the nucleic acid molecule SEQ ID NO. 32037 or polypeptide SEQ ID NO. 32038, respectively, or a homolog or a fragment thereof, is increased or generated, or if the activity glutamate-ammonia-ligase is increased or generated in a non-human organism, like a microorganism or a plant cell, plant or part thereof, especially with non-targeted localization, whereby the respective line discloses in column 7 glutamine. For example, an increase of the glutamine of at least 1 percent, particularly in a range of 70 to 363-percent is conferred as compared to a corresponding non-transformed wild type non-human organism.

[8700] Accordingly, in one embodiment, an increase of proline in a non-human organism, as compared to a corresponding non-transformed wild type non-human organism, is conferred in the process of the invention, if the activity of a polypeptide showing the activity of a glutamate-ammonia-ligase, or if the activity of the polypeptide AvinDRAFT_{—}5246, preferably represented by SEQ ID NO. 32038, or a homolog or fragment thereof, or if the activity of a polypeptide encoded by a nucleic acid molecule comprising the nucleic acid SEQ ID NO. 32037, preferably the coding region thereof, or a homolog or fragment thereof, e.g. derived from Azotobacter vinelandii, is increased or generated. For example the activity of a nucleic acid molecule or a polypeptide comprising the nucleic acid, preferably the coding region thereof, or polypeptide or the consensus sequence or the polypeptide motif, as depicted in Table I, II or IV, application No. 2, column 5 or 8 in the respective same line as the nucleic acid molecule SEQ ID NO. 32037 or polypeptide SEQ ID NO. 32038, respectively, or a homolog or a fragment thereof, is increased or generated, or if the activity glutamate-ammonia-ligase is increased or generated in a non-human organism, like a microorganism or a plant cell, plant or part thereof, especially with non-targeted localization, whereby the respective line discloses in column 7 proline. For example, an increase of the proline of at least 1 percent, particularly in a range of 69 to 218-percent is conferred as compared to a corresponding non-transformed wild type non-human organism.

[8701] Accordingly, in one embodiment, an increase of proline in a non-human organism, as compared to a corresponding non-transformed wild type non-human organism, is conferred in the process of the invention, if the activity of a polypeptide showing the activity of a fumarylacetoacetate hydrolase, or if the activity of the polypeptide AvinDRAFT_{—}5292, preferably represented by SEQ ID NO. 32309, or a homolog or fragment thereof, or if the activity of a polypeptide encoded by a nucleic acid molecule comprising the nucleic acid SEQ ID NO. 32308, preferably the coding region thereof, or a homolog or fragment thereof, e.g. derived from Azotobacter vinelandii, is increased or generated. For example the activity of a nucleic acid molecule or a polypeptide comprising the nucleic acid, preferably the coding region thereof, or polypeptide or the consensus sequence or the polypeptide motif, as depicted in Table I, II or IV, application No. 2, column 5 or 8 in the respective same line as the nucleic acid molecule SEQ ID NO. 32308 or polypeptide SEQ ID NO. 32309, respectively, or a homolog or a fragment thereof, is increased or generated, or if the activity fumarylacetoacetate hydrolase is increased or generated in a non-human organism, like a microorganism or a plant cell, plant or part thereof, especially with non-targeted localization, whereby the respective line discloses in column 7 proline. For example, an increase of the proline of at least 1 percent, particularly in a range of 47 to 172-percent is conferred as compared to a corresponding non-transformed wild type non-human organism.

[8702] Accordingly, in one embodiment, an increase of arginine in a non-human organism, as compared to a corresponding non-transformed wild type non-human organism, is conferred in the process of the invention, if the activity of a polypeptide showing the activity of a HesB/YadR/YfhF family protein, or if the activity of the polypeptide AvinDRAFT_{—}5467, preferably represented by SEQ ID NO. 32649, or a homolog or fragment thereof, or if the activity of a polypeptide encoded by a nucleic acid molecule comprising the nucleic acid SEQ ID NO. 32648, preferably the coding region thereof, or a homolog or fragment thereof, e.g. derived from Azotobacter vinelandii, is increased or generated. For example the activity of a nucleic acid molecule or a polypeptide comprising the nucleic acid, preferably the coding region thereof, or polypeptide or the consensus sequence or the polypeptide motif, as depicted in Table I, II or IV, application No. 2, column 5 or 8 in the respective same line as the nucleic acid molecule SEQ ID NO. 32648 or polypeptide SEQ ID NO. 32649, respectively, or a homolog or a fragment thereof, is increased or generated, or if the activity HesB/YadR/YfhF family protein is increased or generated in a non-human organism, like a microorganism or a plant cell, plant or part thereof, especially with non-targeted localization, whereby the respective line discloses in column 7 arginine. For example, an increase of the arginine of at least 1 percent, particularly in a range of 49 to 171-percent is conferred as compared to a corresponding non-transformed wild type non-human organism.

[8703] Accordingly, in one embodiment, an increase of glutamine in a non-human organism, as compared to a corresponding non-transformed wild type non-human organism, is conferred in the process of the invention, if the activity of a polypeptide showing the activity of a HesB/YadR/YfhF family protein, or if the activity of the polypeptide AvinDRAFT_{—}5467, preferably represented by SEQ ID NO. 32649, or a homolog or fragment thereof, or if the activity of a polypeptide encoded by a nucleic acid molecule comprising the nucleic acid SEQ ID NO. 32648, preferably the coding region thereof, or a homolog or fragment thereof, e.g. derived from Azotobacter vinelandii, is increased or generated. For example the activity of a nucleic acid molecule or a polypeptide comprising the nucleic acid, preferably the coding region thereof, or polypeptide or the consensus sequence or the polypeptide motif, as depicted in Table I, II or IV, application No. 2, column 5 or 8 in the respective same line as the nucleic acid molecule SEQ ID NO. 32648 or polypeptide SEQ ID NO. 32649, respectively, or a homolog or a fragment thereof, is increased or generated, or if the activity HesB/YadR/YfhF family protein is increased or generated in a non-human organism, like a microorganism or a plant cell, plant or part thereof, especially with non-targeted localization, whereby the respective line discloses in column 7 glutamine. For example, an increase of the glutamine of at least 1 percent, particularly in a range of 45 to 123-percent is conferred as compared to a corresponding non-transformed wild type non-human organism.

[8704] Accordingly, in one embodiment, an increase of proline in a non-human organism, as compared to a corresponding non-transformed wild type non-human organism, is conferred in the process of the invention, if the activity of a polypeptide showing the activity of a HesB/YadR/YfhF family protein, or if the activity of the polypeptide AvinDRAFT_{—}5467, preferably represented by SEQ ID NO. 32649, or a homolog or fragment thereof, or if the activity of a polypeptide encoded by a nucleic acid molecule comprising the nucleic acid SEQ ID NO. 32648, preferably the coding region thereof, or a homolog or fragment thereof, e.g. derived from Azotobacter vinelandii, is increased or generated. For example the activity of a nucleic acid molecule or a polypeptide comprising the nucleic acid, preferably the coding region thereof, or polypeptide or the consensus sequence or the polypeptide motif, as depicted in Table I, II or IV, application No. 2, column 5 or 8 in the respective same line as the nucleic acid molecule SEQ ID NO. 32648 or polypeptide SEQ ID NO. 32649, respectively, or a homolog or a fragment thereof, is increased or generated, or if the activity HesB/YadR/YfhF family protein is increased or generated in a non-human organism, like a microorganism or a plant cell, plant or part thereof, especially with non-targeted localization, whereby the respective line discloses in column 7 proline. For example, an increase of the proline of at least 1 percent, particularly in a range of 50 to 132-percent is conferred as compared to a corresponding non-transformed wild type non-human organism.

[8705] Accordingly, in one embodiment, an increase of proline in a non-human organism, as compared to a corresponding non-transformed wild type non-human organism, is conferred in the process of the invention, if the activity of a polypeptide showing the activity of a L-aspartate oxidase, or if the activity of the polypeptide AvinDRAFT_{—}5644, preferably represented by SEQ ID NO. 33086, or a homolog or fragment thereof, or if the activity of a polypeptide encoded by a nucleic acid molecule comprising the nucleic acid SEQ ID NO. 33085, preferably the coding region thereof, or a homolog or fragment thereof, e.g. derived from Azotobacter vinelandii, is increased or generated. For example the activity of a nucleic acid molecule or a polypeptide comprising the nucleic acid, preferably the coding region thereof, or polypeptide or the consensus sequence or the polypeptide motif, as depicted in Table I, II or IV, application No. 2, column 5 or 8 in the respective same line as the nucleic acid molecule SEQ ID NO. 33085 or polypeptide SEQ ID NO. 33086, respectively, or a homolog or a fragment thereof, is increased or generated, or if the activity L-aspartate oxidase is increased or generated in a non-human organism, like a microorganism or a plant cell, plant or part thereof, especially with non-targeted localization, whereby the respective line discloses in column 7 proline. For example, an increase of the proline of at least 1 percent, particularly in a range of 51 to 152-percent is conferred as compared to a corresponding non-transformed wild type non-human organism.

[8706] Accordingly, in one embodiment, an increase of arginine in a non-human organism, as compared to a corresponding non-transformed wild type non-human organism, is conferred in the process of the invention, if the activity of a polypeptide showing the activity of a oxidoreductase, or if the activity of the polypeptide AvinDRAFT_{—}5651, preferably represented by SEQ ID NO. 33458, or a homolog or fragment thereof, or if the activity of a polypeptide encoded by a nucleic acid molecule comprising the nucleic acid SEQ ID NO. 33457, preferably the coding region thereof, or a homolog or fragment thereof, e.g. derived from Azotobacter vinelandii, is increased or generated. For example the activity of a nucleic acid molecule or a polypeptide comprising the nucleic acid, preferably the coding region thereof, or polypeptide or the consensus sequence or the polypeptide motif, as depicted in Table I, II or IV, application No. 2, column 5 or 8 in the respective same line as the nucleic acid molecule SEQ ID NO. 33457 or polypeptide SEQ ID NO. 33458, respectively, or a homolog or a fragment thereof, is increased or generated, or if the activity oxidoreductase is increased or generated in a non-human organism, like a microorganism or a plant cell, plant or part thereof, especially with non-targeted localization, whereby the respective line discloses in column 7 arginine. For example, an increase of the arginine of at least 1 percent, particularly in a range of 62 to 368-percent is conferred as compared to a corresponding non-transformed wild type non-human organism.

[8707] Accordingly, in one embodiment, an increase of glutamine in a non-human organism, as compared to a corresponding non-transformed wild type non-human organism, is conferred in the process of the invention, if the activity of a polypeptide showing the activity of a oxidoreductase, or if the activity of the polypeptide AvinDRAFT_{—}5651, preferably represented by SEQ ID NO. 33458, or a homolog or fragment thereof, or if the activity of a polypeptide encoded by a nucleic acid molecule comprising the nucleic acid SEQ ID NO. 33457, preferably the coding region thereof, or a homolog or fragment thereof, e.g. derived from Azotobacter vinelandii, is increased or generated. For example the activity of a nucleic acid molecule or a polypeptide comprising the nucleic acid, preferably the coding region thereof, or polypeptide or the consensus sequence or the polypeptide motif, as depicted in Table I, II or IV, application No. 2, column 5 or 8 in the respective same line as the nucleic acid molecule SEQ ID NO. 33457 or polypeptide SEQ ID NO. 33458, respectively, or a homolog or a fragment thereof, is increased or generated, or if the activity oxidoreductase is increased or generated in a non-human organism, like a microorganism or a plant cell, plant or part thereof, especially with non-targeted localization, whereby the respective line discloses in column 7 glutamine. For example, an increase of the glutamine of at least 1 percent, particularly in a range of 92 to 226-percent is conferred as compared to a corresponding non-transformed wild type non-human organism.

[8708] Accordingly, in one embodiment, an increase of proline in a non-human organism, as compared to a corresponding non-transformed wild type non-human organism, is conferred in the process of the invention, if the activity of a polypeptide showing the activity of a Chaperone protein CIpB, or if the activity of the polypeptide AvinDRAFT_{—}6093, preferably represented by SEQ ID NO. 33597, or a homolog or fragment thereof, or if the activity of a polypeptide encoded by a nucleic acid molecule comprising the nucleic acid SEQ ID NO. 33596, preferably the coding region thereof, or a homolog or fragment thereof, e.g. derived from Azotobacter vinelandii, is increased or generated. For example the activity of a nucleic acid molecule or a polypeptide comprising the nucleic acid, preferably the coding region thereof, or polypeptide or the consensus sequence or the polypeptide motif, as depicted in Table I, II or IV, application No. 2, column 5 or 8 in the respective same line as the nucleic acid molecule SEQ ID NO. 33596 or polypeptide SEQ ID NO. 33597, respectively, or a homolog or a fragment thereof, is increased or generated, or if the activity Chaperone protein CIpB is increased or generated in a non-human organism, like a microorganism or a plant cell, plant or part thereof, especially with non-targeted localization, whereby the respective line discloses in column 7 proline. For example, an increase of the proline of at least 1 percent, particularly in a range of 42 to 112-percent is conferred as compared to a corresponding non-transformed wild type non-human organism.

[8709] Accordingly, in one embodiment, an increase of arginine in a non-human organism, as compared to a corresponding non-transformed wild type non-human organism, is conferred in the process of the invention, if the activity of a polypeptide showing the activity of a purine nucleoside phosphorylase, or if the activity of the polypeptide AvinDRAFT_{—}6700, preferably represented by SEQ ID NO. 34045, or a homolog or fragment thereof, or if the activity of a polypeptide encoded by a nucleic acid molecule comprising the nucleic acid SEQ ID NO. 34044, preferably the coding region thereof, or a homolog or fragment thereof, e.g. derived from Azotobacter vinelandii, is increased or generated. For example the activity of a nucleic acid molecule or a polypeptide comprising the nucleic acid, preferably the coding region thereof, or polypeptide or the consensus sequence or the polypeptide motif, as depicted in Table I, II or IV, application No. 2, column 5 or 8 in the respective same line as the nucleic acid molecule SEQ ID NO. 34044 or polypeptide SEQ ID NO. 34045, respectively, or a homolog or a fragment thereof, is increased or generated, or if the activity purine nucleoside phosphorylase is increased or generated in a non-human organism, like a microorganism or a plant cell, plant or part thereof, especially with non-targeted localization, whereby the respective line discloses in column 7 arginine. For example, an increase of the arginine of at least 1 percent, particularly in a range of 99 to 186-percent is conferred as compared to a corresponding non-transformed wild type non-human organism.

[8710] Accordingly, in one embodiment, an increase of glutamine in a non-human organism, as compared to a corresponding non-transformed wild type non-human organism, is conferred in the process of the invention, if the activity of a polypeptide showing the activity of a purine nucleoside phosphorylase, or if the activity of the polypeptide AvinDRAFT_{—}6700, preferably represented by SEQ ID NO. 34045, or a homolog or fragment thereof, or if the activity of a polypeptide encoded by a nucleic acid molecule comprising the nucleic acid SEQ ID NO. 34044, preferably the coding region thereof, or a homolog or fragment thereof, e.g. derived from Azotobacter vinelandii, is increased or generated. For example the activity of a nucleic acid molecule or a polypeptide comprising the nucleic acid, preferably the coding region thereof, or polypeptide or the consensus sequence or the polypeptide motif, as depicted in Table I, II or IV, application No. 2, column 5 or 8 in the respective same line as the nucleic acid molecule SEQ ID NO. 34044 or polypeptide SEQ ID NO. 34045, respectively, or a homolog or a fragment thereof, is increased or generated, or if the activity purine nucleoside phosphorylase is increased or generated in a non-human organism, like a microorganism or a plant cell, plant or part thereof, especially with non-targeted localization, whereby the respective line discloses in column 7 glutamine. For example, an increase of the glutamine of at least 1 percent, particularly in a range of 45 to 168-percent is conferred as compared to a corresponding non-transformed wild type non-human organism.

[8711] Accordingly, in one embodiment, an increase of proline in a non-human organism, as compared to a corresponding non-transformed wild type non-human organism, is conferred in the process of the invention, if the activity of a polypeptide showing the activity of a purine nucleoside phosphorylase, or if the activity of the polypeptide AvinDRAFT_{—}6700, preferably represented by SEQ ID NO. 34045, or a homolog or fragment thereof, or if the activity of a polypeptide encoded by a nucleic acid molecule comprising the nucleic acid SEQ ID NO. 34044, preferably the coding region thereof, or a homolog or fragment thereof, e.g. derived from Azotobacter vinelandii, is increased or generated. For example the activity of a nucleic acid molecule or a polypeptide comprising the nucleic acid, preferably the coding region thereof, or polypeptide or the consensus sequence or the polypeptide motif, as depicted in Table I, II or IV, application No. 2, column 5 or 8 in the respective same line as the nucleic acid molecule SEQ ID NO. 34044 or polypeptide SEQ ID NO. 34045, respectively, or a homolog or a fragment thereof, is increased or generated, or if the activity purine nucleoside phosphorylase is increased or generated in a non-human organism, like a microorganism or a plant cell, plant or part thereof, especially with non-targeted localization, whereby the respective line discloses in column 7 proline. For example, an increase of the proline of at least 1 percent, particularly in a range of 47 to 112-percent is conferred as compared to a corresponding non-transformed wild type non-human organism.

[8712] Accordingly, in one embodiment, an increase of proline in a non-human organism, as compared to a corresponding non-transformed wild type non-human organism, is conferred in the process of the invention, if the activity of a polypeptide showing the activity of a transcriptional regulator protein, or if the activity of the polypeptide AvinDRAFT_{—}6864, preferably represented by SEQ ID NO. 34205, or a homolog or fragment thereof, or if the activity of a polypeptide encoded by a nucleic acid molecule comprising the nucleic acid SEQ ID NO. 34204, preferably the coding region thereof, or a homolog or fragment thereof, e.g. derived from Azotobacter vinelandii, is increased or generated. For example the activity of a nucleic acid molecule or a polypeptide comprising the nucleic acid, preferably the coding region thereof, or polypeptide or the consensus sequence or the polypeptide motif, as depicted in Table I, II or IV, application No. 2, column 5 or 8 in the respective same line as the nucleic acid molecule SEQ ID NO. 34204 or polypeptide SEQ ID NO. 34205, respectively, or a homolog or a fragment thereof, is increased or generated, or if the activity transcriptional regulator protein is increased or generated in a non-human organism, like a microorganism or a plant cell, plant or part thereof, especially with non-targeted localization, whereby the respective line discloses in column 7 proline. For example, an increase of the proline of at least 1 percent, particularly in a range of 47 to 75-percent is conferred as compared to a corresponding non-transformed wild type non-human organism.

[8713] Accordingly, in one embodiment, an increase of glutamate in a non-human organism, as compared to a corresponding non-transformed wild type non-human organism, is conferred in the process of the invention, if the activity of a polypeptide showing the activity of a AX653549-protein, or if the activity of the polypeptide AX653549, preferably represented by SEQ ID NO. 34302, or a homolog or fragment thereof, or if the activity of a polypeptide encoded by a nucleic acid molecule comprising the nucleic acid SEQ ID NO. 34301, preferably the coding region thereof, or a homolog or fragment thereof, e.g. derived from Oryza sativa, is increased or generated. For example the activity of a nucleic acid molecule or a polypeptide comprising the nucleic acid, preferably the coding region thereof, or polypeptide or the consensus sequence or the polypeptide motif, as depicted in Table I, II or IV, application No. 2, column 5 or 8 in the respective same line as the nucleic acid molecule SEQ ID NO. 34301 or polypeptide SEQ ID NO. 34302, respectively, or a homolog or a fragment thereof, is increased or generated, or if the activity AX653549-protein is increased or generated in a non-human organism, like a microorganism or a plant cell, plant or part thereof, especially with non-targeted localization, whereby the respective line discloses in column 7 glutamate. For example, an increase of the glutamate of at least 1 percent, particularly in a range of 47 to 57-percent is conferred as compared to a corresponding non-transformed wild type non-human organism.

[8714] Accordingly, in one embodiment, an increase of glutamine in a non-human organism, as compared to a corresponding non-transformed wild type non-human organism, is conferred in the process of the invention, if the activity of a polypeptide showing the activity of a AX653549-protein, or if the activity of the polypeptide AX653549, preferably represented by SEQ ID NO. 34302, or a homolog or fragment thereof, or if the activity of a polypeptide encoded by a nucleic acid molecule comprising the nucleic acid SEQ ID NO. 34301, preferably the coding region thereof, or a homolog or fragment thereof, e.g. derived from Oryza sativa, is increased or generated. For example the activity of a nucleic acid molecule or a polypeptide comprising the nucleic acid, preferably the coding region thereof, or polypeptide or the consensus sequence or the polypeptide motif, as depicted in Table I, II or IV, application No. 2, column 5 or 8 in the respective same line as the nucleic acid molecule SEQ ID NO. 34301 or polypeptide SEQ ID NO. 34302, respectively, or a homolog or a fragment thereof, is increased or generated, or if the activity AX653549-protein is increased or generated in a non-human organism, like a microorganism or a plant cell, plant or part thereof, especially with non-targeted localization, whereby the respective line discloses in column 7 glutamine. For example, an increase of the glutamine of at least 1 percent, particularly in a range of 58 to 355-percent is conferred as compared to a corresponding non-transformed wild type non-human organism.

[8715] Accordingly, in one embodiment, an increase of glutamine in a non-human organism, as compared to a corresponding non-transformed wild type non-human organism, is conferred in the process of the invention, if the activity of a polypeptide showing the activity of a AY087308-protein, or if the activity of the polypeptide AY087308, preferably represented by SEQ ID NO. 34603, or a homolog or fragment thereof, or if the activity of a polypeptide encoded by a nucleic acid molecule comprising the nucleic acid SEQ ID NO. 34602, preferably the coding region thereof, or a homolog or fragment thereof, e.g. derived from Arabidopsis thaliana, is increased or generated. For example the activity of a nucleic acid molecule or a polypeptide comprising the nucleic acid, preferably the coding region thereof, or polypeptide or the consensus sequence or the polypeptide motif, as depicted in Table I, II or IV, application No. 2, column 5 or 8 in the respective same line as the nucleic acid molecule SEQ ID NO. 34602 or polypeptide SEQ ID NO. 34603, respectively, or a homolog or a fragment thereof, is increased or generated, or if the activity AY087308-protein is increased or generated in a non-human organism, like a microorganism or a plant cell, plant or part thereof, especially with non-targeted localization, whereby the respective line discloses in column 7 glutamine. For example, an increase of the glutamine of at least 1 percent, particularly in a range of 53 to 114-percent is conferred as compared to a corresponding non-transformed wild type non-human organism.

[8716] Accordingly, in one embodiment, an increase of arginine in a non-human organism, as compared to a corresponding non-transformed wild type non-human organism, is conferred in the process of the invention, if the activity of a polypeptide showing the activity of a threonine synthase, or if the activity of the polypeptide B0004, preferably represented by SEQ ID NO. 34890, or a homolog or fragment thereof, or if the activity of a polypeptide encoded by a nucleic acid molecule comprising the nucleic acid SEQ ID NO. 34889, preferably the coding region thereof, or a homolog or fragment thereof, e.g. derived from Escherichia coli, is increased or generated. For example the activity of a nucleic acid molecule or a polypeptide comprising the nucleic acid, preferably the coding region thereof, or polypeptide or the consensus sequence or the polypeptide motif, as depicted in Table I, II or IV, application No. 2, column 5 or 8 in the respective same line as the nucleic acid molecule SEQ ID NO. 34889 or polypeptide SEQ ID NO. 34890, respectively, or a homolog or a fragment thereof, is increased or generated, or if the activity threonine synthase is increased or generated in a non-human organism, like a microorganism or a plant cell, plant or part thereof, especially with plastidic localization, whereby the respective line discloses in column 7 arginine. For example, an increase of the arginine of at least 1 percent, particularly in a range of 56 to 2425-percent is conferred as compared to a corresponding non-transformed wild type non-human organism.

[8717] Accordingly, in one embodiment, an increase of glutamine in a non-human organism, as compared to a corresponding non-transformed wild type non-human organism, is conferred in the process of the invention, if the activity of a polypeptide showing the activity of a threonine synthase, or if the activity of the polypeptide B0004, preferably represented by SEQ ID NO. 34890, or a homolog or fragment thereof, or if the activity of a polypeptide encoded by a nucleic acid molecule comprising the nucleic acid SEQ ID NO. 34889, preferably the coding region thereof, or a homolog or fragment thereof, e.g. derived from Escherichia coli, is increased or generated. For example the activity of a nucleic acid molecule or a polypeptide comprising the nucleic acid, preferably the coding region thereof, or polypeptide or the consensus sequence or the polypeptide motif, as depicted in Table I, II or IV, application No. 2, column 5 or 8 in the respective same line as the nucleic acid molecule SEQ ID NO. 34889 or polypeptide SEQ ID NO. 34890, respectively, or a homolog or a fragment thereof, is increased or generated, or if the activity threonine synthase is increased or generated in a non-human organism, like a microorganism or a plant cell, plant or part thereof, especially with plastidic localization, whereby the respective line discloses in column 7 glutamine. For example, an increase of the glutamine of at least 1 percent, particularly in a range of 49 to 4802-percent is conferred as compared to a corresponding non-transformed wild type non-human organism.

[8718] Accordingly, in one embodiment, an increase of proline in a non-human organism, as compared to a corresponding non-transformed wild type non-human organism, is conferred in the process of the invention, if the activity of a polypeptide showing the activity of a threonine synthase, or if the activity of the polypeptide B0004, preferably represented by SEQ ID NO. 34890, or a homolog or fragment thereof, or if the activity of a polypeptide encoded by a nucleic acid molecule comprising the nucleic acid SEQ ID NO. 34889, preferably the coding region thereof, or a homolog or fragment thereof, e.g. derived from Escherichia coli, is increased or generated. For example the activity of a nucleic acid molecule or a polypeptide comprising the nucleic acid, preferably the coding region thereof, or polypeptide or the consensus sequence or the polypeptide motif, as depicted in Table I, II or IV, application No. 2, column 5 or 8 in the respective same line as the nucleic acid molecule SEQ ID NO. 34889 or polypeptide SEQ ID NO. 34890, respectively, or a homolog or a fragment thereof, is increased or generated, or if the activity threonine synthase is increased or generated in a non-human organism, like a microorganism or a plant cell, plant or part thereof, especially with plastidic localization, whereby the respective line discloses in column 7 proline. For example, an increase of the proline of at least 1 percent, particularly in a range of 40 to 1754-percent is conferred as compared to a corresponding non-transformed wild type non-human organism.

[8719] Accordingly, in one embodiment, an increase of proline in a non-human organism, as compared to a corresponding non-transformed wild type non-human organism, is conferred in the process of the invention, if the activity of a polypeptide showing the activity of a L-ribulose-5-phosphate 4-epimerase, or if the activity of the polypeptide B0061, preferably represented by SEQ ID NO. 35205, or a homolog or fragment thereof, or if the activity of a polypeptide encoded by a nucleic acid molecule comprising the nucleic acid SEQ ID NO. 35204, preferably the coding region thereof, or a homolog or fragment thereof, e.g. derived from Escherichia coli, is increased or generated. For example the activity of a nucleic acid molecule or a polypeptide comprising the nucleic acid, preferably the coding region thereof, or polypeptide or the consensus sequence or the polypeptide motif, as depicted in Table I, II or IV, application No. 2, column 5 or 8 in the respective same line as the nucleic acid molecule SEQ ID NO. 35204 or polypeptide SEQ ID NO. 35205, respectively, or a homolog or a fragment thereof, is increased or generated, or if the activity L-ribulose-5-phosphate 4-epimerase is increased or generated in a non-human organism, like a microorganism or a plant cell, plant or part thereof, especially with non-targeted localization, whereby the respective line discloses in column 7 proline. For example, an increase of the proline of at least 1 percent, particularly in a range of 137 to 1181-percent is conferred as compared to a corresponding non-transformed wild type non-human organism.

[8720] Accordingly, in one embodiment, an increase of glutamine in a non-human organism, as compared to a corresponding non-transformed wild type non-human organism, is conferred in the process of the invention, if the activity of a polypeptide showing the activity of a dihydrolipoamide acetyltransferase, or if the activity of the polypeptide B0115, preferably represented by SEQ ID NO. 35367, or a homolog or fragment thereof, or if the activity of a polypeptide encoded by a nucleic acid molecule comprising the nucleic acid SEQ ID NO. 35366, preferably the coding region thereof, or a homolog or fragment thereof, e.g. derived from Escherichia coli, is increased or generated. For example the activity of a nucleic acid molecule or a polypeptide comprising the nucleic acid, preferably the coding region thereof, or polypeptide or the consensus sequence or the polypeptide motif, as depicted in Table I, II or IV, application No. 2, column 5 or 8 in the respective same line as the nucleic acid molecule SEQ ID NO. 35366 or polypeptide SEQ ID NO. 35367, respectively, or a homolog or a fragment thereof, is increased or generated, or if the activity dihydrolipoamide acetyltransferase is increased or generated in a non-human organism, like a microorganism or a plant cell, plant or part thereof, especially with plastidic localization, whereby the respective line discloses in column 7 glutamine. For example, an increase of the glutamine of at least 1 percent, particularly in a range of 67 to 86-percent is conferred as compared to a corresponding non-transformed wild type non-human organism.

[8721] Accordingly, in one embodiment, an increase of arginine in a non-human organism, as compared to a corresponding non-transformed wild type non-human organism, is conferred in the process of the invention, if the activity of a polypeptide showing the activity of a glucose dehydrogenase, or if the activity of the polypeptide B0124, preferably represented by SEQ ID NO. 35483, or a homolog or fragment thereof, or if the activity of a polypeptide encoded by a nucleic acid molecule comprising the nucleic acid SEQ ID NO. 35482, preferably the coding region thereof, or a homolog or fragment thereof, e.g. derived from Escherichia coli, is increased or generated. For example the activity of a nucleic acid molecule or a polypeptide comprising the nucleic acid, preferably the coding region thereof, or polypeptide or the consensus sequence or the polypeptide motif, as depicted in Table I, II or IV, application No. 2, column 5 or 8 in the respective same line as the nucleic acid molecule SEQ ID NO. 35482 or polypeptide SEQ ID NO. 35483, respectively, or a homolog or a fragment thereof, is increased or generated, or if the activity glucose dehydrogenase is increased or generated in a non-human organism, like a microorganism or a plant cell, plant or part thereof, especially with non-targeted localization, whereby the respective line discloses in column 7 arginine. For example, an increase of the arginine of at least 1 percent, particularly in a range of 53 to 395-percent is conferred as compared to a corresponding non-transformed wild type non-human organism.

[8722] Accordingly, in one embodiment, an increase of proline in a non-human organism, as compared to a corresponding non-transformed wild type non-human organism, is conferred in the process of the invention, if the activity of a polypeptide showing the activity of a glucose dehydrogenase, or if the activity of the polypeptide B0124, preferably represented by SEQ ID NO. 35483, or a homolog or fragment thereof, or if the activity of a polypeptide encoded by a nucleic acid molecule comprising the nucleic acid SEQ ID NO. 35482, preferably the coding region thereof, or a homolog or fragment thereof, e.g. derived from Escherichia coli, is increased or generated. For example the activity of a nucleic acid molecule or a polypeptide comprising the nucleic acid, preferably the coding region thereof, or polypeptide or the consensus sequence or the polypeptide motif, as depicted in Table I, II or IV, application No. 2, column 5 or 8 in the respective same line as the nucleic acid molecule SEQ ID NO. 35482 or polypeptide SEQ ID NO. 35483, respectively, or a homolog or a fragment thereof, is increased or generated, or if the activity glucose dehydrogenase is increased or generated in a non-human organism, like a microorganism or a plant cell, plant or part thereof, especially with plastidic localization, whereby the respective line discloses in column 7 proline. For example, an increase of the proline of at least 1 percent, particularly in a range of 47 to 389-percent is conferred as compared to a corresponding non-transformed wild type non-human organism.

[8723] Accordingly, in one embodiment, an increase of proline in a non-human organism, as compared to a corresponding non-transformed wild type non-human organism, is conferred in the process of the invention, if the activity of a polypeptide showing the activity of a glucose dehydrogenase, or if the activity of the polypeptide B0124, preferably represented by SEQ ID NO. 35483, or a homolog or fragment thereof, or if the activity of a polypeptide encoded by a nucleic acid molecule comprising the nucleic acid SEQ ID NO. 35482, preferably the coding region thereof, or a homolog or fragment thereof, e.g. derived from Escherichia coli, is increased or generated. For example the activity of a nucleic acid molecule or a polypeptide comprising the nucleic acid, preferably the coding region thereof, or polypeptide or the consensus sequence or the polypeptide motif, as depicted in Table I, II or IV, application No. 2, column 5 or 8 in the respective same line as the nucleic acid molecule SEQ ID NO. 35482 or polypeptide SEQ ID NO. 35483, respectively, or a homolog or a fragment thereof, is increased or generated, or if the activity glucose dehydrogenase is increased or generated in a non-human organism, like a microorganism or a plant cell, plant or part thereof, especially with non-targeted localization, whereby the respective line discloses in column 7 proline. For example, an increase of the proline of at least 1 percent, particularly in a range of 47 to 124-percent is conferred as compared to a corresponding non-transformed wild type non-human organism.

[8724] Accordingly, in one embodiment, an increase of proline in a non-human organism, as compared to a corresponding non-transformed wild type non-human organism, is conferred in the process of the invention, if the activity of a polypeptide showing the activity of a serine protease, or if the activity of the polypeptide B0161, preferably represented by SEQ ID NO. 7082, or a homolog or fragment thereof, or if the activity of a polypeptide encoded by a nucleic acid molecule comprising the nucleic acid SEQ ID NO. 7081, preferably the coding region thereof, or a homolog or fragment thereof, e.g. derived from Escherichia coli, is increased or generated. For example the activity of a nucleic acid molecule or a polypeptide comprising the nucleic acid, preferably the coding region thereof, or polypeptide or the consensus sequence or the polypeptide motif, as depicted in Table I, II or IV, application No. 2, column 5 or 8 in the respective same line as the nucleic acid molecule SEQ ID NO. 7081 or polypeptide SEQ ID NO. 7082, respectively, or a homolog or a fragment thereof, is increased or generated, or if the activity serine protease is increased or generated in a non-human organism, like a microorganism or a plant cell, plant or part thereof, especially with non-targeted localization, whereby the respective line discloses in column 7 proline. For example, an increase of the proline of at least 1 percent, particularly in a range of 100 to 233-percent is conferred as compared to a corresponding non-transformed wild type non-human organism.

[8725] Accordingly, in one embodiment, an increase of arginine in a non-human organism, as compared to a corresponding non-transformed wild type non-human organism, is conferred in the process of the invention, if the activity of a polypeptide showing the activity of a acyl-CoA dehydrogenase, or if the activity of the polypeptide B0221, preferably represented by SEQ ID NO. 35591, or a homolog or fragment thereof, or if the activity of a polypeptide encoded by a nucleic acid molecule comprising the nucleic acid SEQ ID NO. 35590, preferably the coding region thereof, or a homolog or fragment thereof, e.g. derived from Escherichia coli, is increased or generated. For example the activity of a nucleic acid molecule or a polypeptide comprising the nucleic acid, preferably the coding region thereof, or polypeptide or the consensus sequence or the polypeptide motif, as depicted in Table I, II or IV, application No. 2, column 5 or 8 in the respective same line as the nucleic acid molecule SEQ ID NO. 35590 or polypeptide SEQ ID NO. 35591, respectively, or a homolog or a fragment thereof, is increased or generated, or if the activity acyl-CoA dehydrogenase is increased or generated in a non-human organism, like a microorganism or a plant cell, plant or part thereof, especially with non-targeted localization, whereby the respective line discloses in column 7 arginine. For example, an increase of the arginine of at least 1 percent, particularly in a range of 61 to 202-percent is conferred as compared to a corresponding non-transformed wild type non-human organism.

[8726] Accordingly, in one embodiment, an increase of glutamate in a non-human organism, as compared to a corresponding non-transformed wild type non-human organism, is conferred in the process of the invention, if the activity of a polypeptide showing the activity of a acyl-CoA dehydrogenase, or if the activity of the polypeptide B0221, preferably represented by SEQ ID NO. 35591, or a homolog or fragment thereof, or if the activity of a polypeptide encoded by a nucleic acid molecule comprising the nucleic acid SEQ ID NO. 35590, preferably the coding region thereof, or a homolog or fragment thereof, e.g. derived from Escherichia coli, is increased or generated. For example the activity of a nucleic acid molecule or a polypeptide comprising the nucleic acid, preferably the coding region thereof, or polypeptide or the consensus sequence or the polypeptide motif, as depicted in Table I, II or IV, application No. 2, column 5 or 8 in the respective same line as the nucleic acid molecule SEQ ID NO. 35590 or polypeptide SEQ ID NO. 35591, respectively, or a homolog or a fragment thereof, is increased or generated, or if the activity acyl-CoA dehydrogenase is increased or generated in a non-human organism, like a microorganism or a plant cell, plant or part thereof, especially with non-targeted localization, whereby the respective line discloses in column 7 glutamate. For example, an increase of the glutamate of at least 1 percent, particularly in a range of 54 to 78-percent is conferred as compared to a corresponding non-transformed wild type non-human organism.

[8727] Accordingly, in one embodiment, an increase of proline in a non-human organism, as compared to a corresponding non-transformed wild type non-human organism, is conferred in the process of the invention, if the activity of a polypeptide showing the activity of a beta-galactosidase, or if the activity of the polypeptide B0344, preferably represented by SEQ ID NO. 35734, or a homolog or fragment thereof, or if the activity of a polypeptide encoded by a nucleic acid molecule comprising the nucleic acid SEQ ID NO. 35733, preferably the coding region thereof, or a homolog or fragment thereof, e.g. derived from Escherichia coli, is increased or generated. For example the activity of a nucleic acid molecule or a polypeptide comprising the nucleic acid, preferably the coding region thereof, or polypeptide or the consensus sequence or the polypeptide motif, as depicted in Table I, II or IV, application No. 2, column 5 or 8 in the respective same line as the nucleic acid molecule SEQ ID NO. 35733 or polypeptide SEQ ID NO. 35734, respectively, or a homolog or a fragment thereof, is increased or generated, or if the activity beta-galactosidase is increased or generated in a non-human organism, like a microorganism or a plant cell, plant or part thereof, especially with plastidic localization, whereby the respective line discloses in column 7 proline. For example, an increase of the proline of at least 1 percent, particularly in a range of 118 to 227-percent is conferred as compared to a corresponding non-transformed wild type non-human organism.

[8728] Accordingly, in one embodiment, an increase of glutamine in a non-human organism, as compared to a corresponding non-transformed wild type non-human organism, is conferred in the process of the invention, if the activity of a polypeptide showing the activity of a ATP-binding component of a transport system, or if the activity of the polypeptide B0449, preferably represented by SEQ ID NO. 7334, or a homolog or fragment thereof, or if the activity of a polypeptide encoded by a nucleic acid molecule comprising the nucleic acid SEQ ID NO. 7333, preferably the coding region thereof, or a homolog or fragment thereof, e.g. derived from Escherichia coli, is increased or generated. For example the activity of a nucleic acid molecule or a polypeptide comprising the nucleic acid, preferably the coding region thereof, or polypeptide or the consensus sequence or the polypeptide motif, as depicted in Table I, II or IV, application No. 2, column 5 or 8 in the respective same line as the nucleic acid molecule SEQ ID NO. 7333 or polypeptide SEQ ID NO. 7334, respectively, or a homolog or a fragment thereof, is increased or generated, or if the activity ATP-binding component of a transport system is increased or generated in a non-human organism, like a microorganism or a plant cell, plant or part thereof, especially with non-targeted localization, whereby the respective line discloses in column 7 glutamine. For example, an increase of the glutamine of at least 1 percent, particularly in a range of 51 to 961-percent is conferred as compared to a corresponding non-transformed wild type non-human organism.

[8729] Accordingly, in one embodiment, an increase of proline in a non-human organism, as compared to a corresponding non-transformed wild type non-human organism, is conferred in the process of the invention, if the activity of a polypeptide showing the activity of a b0456-protein, or if the activity of the polypeptide B0456, preferably represented by SEQ ID NO. 35876, or a homolog or fragment thereof, or if the activity of a polypeptide encoded by a nucleic acid molecule comprising the nucleic acid SEQ ID NO. 35875, preferably the coding region thereof, or a homolog or fragment thereof, e.g. derived from Escherichia coli, is increased or generated. For example the activity of a nucleic acid molecule or a polypeptide comprising the nucleic acid, preferably the coding region thereof, or polypeptide or the consensus sequence or the polypeptide motif, as depicted in Table I, II or IV, application No. 2, column 5 or 8 in the respective same line as the nucleic acid molecule SEQ ID NO. 35875 or polypeptide SEQ ID NO. 35876, respectively, or a homolog or a fragment thereof, is increased or generated, or if the activity b0456-protein is increased or generated in a non-human organism, like a microorganism or a plant cell, plant or part thereof, especially with non-targeted localization, whereby the respective line discloses in column 7 proline. For example, an increase of the proline of at least 1 percent, particularly in a range of 75 to 121-percent is conferred as compared to a corresponding non-transformed wild type non-human organism.

[8730] Accordingly, in one embodiment, an increase of arginine in a non-human organism, as compared to a corresponding non-transformed wild type non-human organism, is conferred in the process of the invention, if the activity of a polypeptide showing the activity of a membrane transport protein, or if the activity of the polypeptide B0486, preferably represented by SEQ ID NO. 7687, or a homolog or fragment thereof, or if the activity of a polypeptide encoded by a nucleic acid molecule comprising the nucleic acid SEQ ID NO. 7686, preferably the coding region thereof, or a homolog or fragment thereof, e.g. derived from Escherichia coli, is increased or generated. For example the activity of a nucleic acid molecule or a polypeptide comprising the nucleic acid, preferably the coding region thereof, or polypeptide or the consensus sequence or the polypeptide motif, as depicted in Table I, II or IV, application No. 2, column 5 or 8 in the respective same line as the nucleic acid molecule SEQ ID NO. 7686 or polypeptide SEQ ID NO. 7687, respectively, or a homolog or a fragment thereof, is increased or generated, or if the activity membrane transport protein is increased or generated in a non-human organism, like a microorganism or a plant cell, plant or part thereof, especially with non-targeted localization, whereby the respective line discloses in column 7 arginine. For example, an increase of the arginine of at least 1 percent, particularly in a range of 67 to 213-percent is conferred as compared to a corresponding non-transformed wild type non-human organism.

[8731] Accordingly, in one embodiment, an increase of glutamate in a non-human organism, as compared to a corresponding non-transformed wild type non-human organism, is conferred in the process of the invention, if the activity of a polypeptide showing the activity of a membrane transport protein, or if the activity of the polypeptide B0486, preferably represented by SEQ ID NO. 7687, or a homolog or fragment thereof, or if the activity of a polypeptide encoded by a nucleic acid molecule comprising the nucleic acid SEQ ID NO. 7686, preferably the coding region thereof, or a homolog or fragment thereof, e.g. derived from Escherichia coli, is increased or generated. For example the activity of a nucleic acid molecule or a polypeptide comprising the nucleic acid, preferably the coding region thereof, or polypeptide or the consensus sequence or the polypeptide motif, as depicted in Table I, II or IV, application No. 2, column 5 or 8 in the respective same line as the nucleic acid molecule SEQ ID NO. 7686 or polypeptide SEQ ID NO. 7687, respectively, or a homolog or a fragment thereof, is increased or generated, or if the activity membrane transport protein is increased or generated in a non-human organism, like a microorganism or a plant cell, plant or part thereof, especially with non-targeted localization, whereby the respective line discloses in column 7 glutamate. For example, an increase of the glutamate of at least 1 percent, particularly in a range of 33 to 57-percent is conferred as compared to a corresponding non-transformed wild type non-human organism.

[8732] Accordingly, in one embodiment, an increase of glutamine in a non-human organism, as compared to a corresponding non-transformed wild type non-human organism, is conferred in the process of the invention, if the activity of a polypeptide showing the activity of a b0518-protein, or if the activity of the polypeptide B0518, preferably represented by SEQ ID NO. 35937, or a homolog or fragment thereof, or if the activity of a polypeptide encoded by a nucleic acid molecule comprising the nucleic acid SEQ ID NO. 35936, preferably the coding region thereof, or a homolog or fragment thereof, e.g. derived from Escherichia coli, is increased or generated. For example the activity of a nucleic acid molecule or a polypeptide comprising the nucleic acid, preferably the coding region thereof, or polypeptide or the consensus sequence or the polypeptide motif, as depicted in Table I, II or IV, application No. 2, column 5 or 8 in the respective same line as the nucleic acid molecule SEQ ID NO. 35936 or polypeptide SEQ ID NO. 35937, respectively, or a homolog or a fragment thereof, is increased or generated, or if the activity b0518-protein is increased or generated in a non-human organism, like a microorganism or a plant cell, plant or part thereof, especially with non-targeted localization, whereby the respective line discloses in column 7 glutamine. For example, an increase of the glutamine of at least 1 percent, particularly in a range of 48 to 190-percent is conferred as compared to a corresponding non-transformed wild type non-human organism.

[8733] Accordingly, in one embodiment, an increase of arginine in a non-human organism, as compared to a corresponding non-transformed wild type non-human organism, is conferred in the process of the invention, if the activity of a polypeptide showing the activity of a isochorismate synthase, or if the activity of the polypeptide B0593, preferably represented by SEQ ID NO. 35968, or a homolog or fragment thereof, or if the activity of a polypeptide encoded by a nucleic acid molecule comprising the nucleic acid SEQ ID NO. 35967, preferably the coding region thereof, or a homolog or fragment thereof, e.g. derived from Escherichia coli, is increased or generated. For example the activity of a nucleic acid molecule or a polypeptide comprising the nucleic acid, preferably the coding region thereof, or polypeptide or the consensus sequence or the polypeptide motif, as depicted in Table I, II or IV, application No. 2, column 5 or 8 in the respective same line as the nucleic acid molecule SEQ ID NO. 35967 or polypeptide SEQ ID NO. 35968, respectively, or a homolog or a fragment thereof, is increased or generated, or if the activity isochorismate synthase is increased or generated in a non-human organism, like a microorganism or a plant cell, plant or part thereof, especially with plastidic localization, whereby the respective line discloses in column 7 arginine. For example, an increase of the arginine of at least 1 percent, particularly in a range of 137 to 775-percent is conferred as compared to a corresponding non-transformed wild type non-human organism.

[8734] Accordingly, in one embodiment, an increase of glutamate in a non-human organism, as compared to a corresponding non-transformed wild type non-human organism, is conferred in the process of the invention, if the activity of a polypeptide showing the activity of a isochorismate synthase, or if the activity of the polypeptide B0593, preferably represented by SEQ ID NO. 35968, or a homolog or fragment thereof, or if the activity of a polypeptide encoded by a nucleic acid molecule comprising the nucleic acid SEQ ID NO. 35967, preferably the coding region thereof, or a homolog or fragment thereof, e.g. derived from Escherichia coli, is increased or generated. For example the activity of a nucleic acid molecule or a polypeptide comprising the nucleic acid, preferably the coding region thereof, or polypeptide or the consensus sequence or the polypeptide motif, as depicted in Table I, II or IV, application No. 2, column 5 or 8 in the respective same line as the nucleic acid molecule SEQ ID NO. 35967 or polypeptide SEQ ID NO. 35968, respectively, or a homolog or a fragment thereof, is increased or generated, or if the activity isochorismate synthase is increased or generated in a non-human organism, like a microorganism or a plant cell, plant or part thereof, especially with plastidic localization, whereby the respective line discloses in column 7 glutamate. For example, an increase of the glutamate of at least 1 percent, particularly in a range of 36 to 80-percent is conferred as compared to a corresponding non-transformed wild type non-human organism.

[8735] Accordingly, in one embodiment, an increase of glutamine in a non-human organism, as compared to a corresponding non-transformed wild type non-human organism, is conferred in the process of the invention, if the activity of a polypeptide showing the activity of a isochorismate synthase, or if the activity of the polypeptide B0593, preferably represented by SEQ ID NO. 35968, or a homolog or fragment thereof, or if the activity of a polypeptide encoded by a nucleic acid molecule comprising the nucleic acid SEQ ID NO. 35967, preferably the coding region thereof, or a homolog or fragment thereof, e.g. derived from Escherichia coli, is increased or generated. For example the activity of a nucleic acid molecule or a polypeptide comprising the nucleic acid, preferably the coding region thereof, or polypeptide or the consensus sequence or the polypeptide motif, as depicted in Table I, II or IV, application No. 2, column 5 or 8 in the respective same line as the nucleic acid molecule SEQ ID NO. 35967 or polypeptide SEQ ID NO. 35968, respectively, or a homolog or a fragment thereof, is increased or generated, or if the activity isochorismate synthase is increased or generated in a non-human organism, like a microorganism or a plant cell, plant or part thereof, especially with plastidic localization, whereby the respective line discloses in column 7 glutamine. For example, an increase of the glutamine of at least 1 percent, particularly in a range of 34 to 132-percent is conferred as compared to a corresponding non-transformed wild type non-human organism.

[8736] Accordingly, in one embodiment, an increase of proline in a non-human organism, as compared to a corresponding non-transformed wild type non-human organism, is conferred in the process of the invention, if the activity of a polypeptide showing the activity of a isochorismate synthase, or if the activity of the polypeptide B0593, preferably represented by SEQ ID NO. 35968, or a homolog or fragment thereof, or if the activity of a polypeptide encoded by a nucleic acid molecule comprising the nucleic acid SEQ ID NO. 35967, preferably the coding region thereof, or a homolog or fragment thereof, e.g. derived from Escherichia coli, is increased or generated. For example the activity of a nucleic acid molecule or a polypeptide comprising the nucleic acid, preferably the coding region thereof, or polypeptide or the consensus sequence or the polypeptide motif, as depicted in Table I, II or IV, application No. 2, column 5 or 8 in the respective same line as the nucleic acid molecule SEQ ID NO. 35967 or polypeptide SEQ ID NO. 35968, respectively, or a homolog or a fragment thereof, is increased or generated, or if the activity isochorismate synthase is increased or generated in a non-human organism, like a microorganism or a plant cell, plant or part thereof, especially with plastidic localization, whereby the respective line discloses in column 7 proline. For example, an increase of the proline of at least 1 percent, particularly in a range of 71 to 148-percent is conferred as compared to a corresponding non-transformed wild type non-human organism.

[8737] Accordingly, in one embodiment, an increase of glutamine in a non-human organism, as compared to a corresponding non-transformed wild type non-human organism, is conferred in the process of the invention, if the activity of a polypeptide showing the activity of a zinc transporter, or if the activity of the polypeptide B0752, preferably represented by SEQ ID NO. 36115, or a homolog or fragment thereof, or if the activity of a polypeptide encoded by a nucleic acid molecule comprising the nucleic acid SEQ ID NO. 36114, preferably the coding region thereof, or a homolog or fragment thereof, e.g. derived from Escherichia coli, is increased or generated. For example the activity of a nucleic acid molecule or a polypeptide comprising the nucleic acid, preferably the coding region thereof, or polypeptide or the consensus sequence or the polypeptide motif, as depicted in Table I, II or IV, application No. 2, column 5 or 8 in the respective same line as the nucleic acid molecule SEQ ID NO. 36114 or polypeptide SEQ ID NO. 36115, respectively, or a homolog or a fragment thereof, is increased or generated, or if the activity zinc transporter is increased or generated in a non-human organism, like a microorganism or a plant cell, plant or part thereof, especially with non-targeted localization, whereby the respective line discloses in column 7 glutamine. For example, an increase of the glutamine of at least 1 percent, particularly in a range of 60 to 126-percent is conferred as compared to a corresponding non-transformed wild type non-human organism.

[8738] Accordingly, in one embodiment, an increase of glutamine in a non-human organism, as compared to a corresponding non-transformed wild type non-human organism, is conferred in the process of the invention, if the activity of a polypeptide showing the activity of a asparaginase, or if the activity of the polypeptide B0828, preferably represented by SEQ ID NO. 36300, or a homolog or fragment thereof, or if the activity of a polypeptide encoded by a nucleic acid molecule comprising the nucleic acid SEQ ID NO. 36299, preferably the coding region thereof, or a homolog or fragment thereof, e.g. derived from Escherichia coli, is increased or generated. For example the activity of a nucleic acid molecule or a polypeptide comprising the nucleic acid, preferably the coding region thereof, or polypeptide or the consensus sequence or the polypeptide motif, as depicted in Table I, II or IV, application No. 2, column 5 or 8 in the respective same line as the nucleic acid molecule SEQ ID NO. 36299 or polypeptide SEQ ID NO. 36300, respectively, or a homolog or a fragment thereof, is increased or generated, or if the activity asparaginase is increased or generated in a non-human organism, like a microorganism or a plant cell, plant or part thereof, especially with non-targeted localization, whereby the respective line discloses in column 7 glutamine. For example, an increase of the glutamine of at least 1 percent, particularly in a range of 35 to 80-percent is conferred as compared to a corresponding non-transformed wild type non-human organism.

[8739] Accordingly, in one embodiment, an increase of glutamine in a non-human organism, as compared to a corresponding non-transformed wild type non-human organism, is conferred in the process of the invention, if the activity of a polypeptide showing the activity of a Leucyl/phenylalanyl-tRNA-protein transferase, or if the activity of the polypeptide B0885, preferably represented by SEQ ID NO. 36490, or a homolog or fragment thereof, or if the activity of a polypeptide encoded by a nucleic acid molecule comprising the nucleic acid SEQ ID NO. 36489, preferably the coding region thereof, or a homolog or fragment thereof, e.g. derived from Escherichia coli, is increased or generated. For example the activity of a nucleic acid molecule or a polypeptide comprising the nucleic acid, preferably the coding region thereof, or polypeptide or the consensus sequence or the polypeptide motif, as depicted in Table I, II or IV, application No. 2, column 5 or 8 in the respective same line as the nucleic acid molecule SEQ ID NO. 36489 or polypeptide SEQ ID NO. 36490, respectively, or a homolog or a fragment thereof, is increased or generated, or if the activity Leucyl/phenylalanyl-tRNA-protein transferase is increased or generated in a non-human organism, like a microorganism or a plant cell, plant or part thereof, especially with non-targeted localization, whereby the respective line discloses in column 7 glutamine. For example, an increase of the glutamine of at least 1 percent, particularly in a range of 29 to 80-percent is conferred as compared to a corresponding non-transformed wild type non-human organism.

[8740] Accordingly, in one embodiment, an increase of proline in a non-human organism, as compared to a corresponding non-transformed wild type non-human organism, is conferred in the process of the invention, if the activity of a polypeptide showing the activity of a Leucyl/phenylalanyl-tRNA-protein transferase, or if the activity of the polypeptide B0885, preferably represented by SEQ ID NO. 36490, or a homolog or fragment thereof, or if the activity of a polypeptide encoded by a nucleic acid molecule comprising the nucleic acid SEQ ID NO. 36489, preferably the coding region thereof, or a homolog or fragment thereof, e.g. derived from Escherichia coli, is increased or generated. For example the activity of a nucleic acid molecule or a polypeptide comprising the nucleic acid, preferably the coding region thereof, or polypeptide or the consensus sequence or the polypeptide motif, as depicted in Table I, II or IV, application No. 2, column 5 or 8 in the respective same line as the nucleic acid molecule SEQ ID NO. 36489 or polypeptide SEQ ID NO. 36490, respectively, or a homolog or a fragment thereof, is increased or generated, or if the activity Leucyl/phenylalanyl-tRNA-protein transferase is increased or generated in a non-human organism, like a microorganism or a plant cell, plant or part thereof, especially with non-targeted localization, whereby the respective line discloses in column 7 proline. For example, an increase of the proline of at least 1 percent, particularly in a range of 50 to 181-percent is conferred as compared to a corresponding non-transformed wild type non-human organism.

[8741] Accordingly, in one embodiment, an increase of glutamate in a non-human organism, as compared to a corresponding non-transformed wild type non-human organism, is conferred in the process of the invention, if the activity of a polypeptide showing the activity of a major facilitator superfamily transporter protein, or if the activity of the polypeptide B0898, preferably represented by SEQ ID NO. 7918, or a homolog or fragment thereof, or if the activity of a polypeptide encoded by a nucleic acid molecule comprising the nucleic acid SEQ ID NO. 7917, preferably the coding region thereof, or a homolog or fragment thereof, e.g. derived from Escherichia coli, is increased or generated. For example the activity of a nucleic acid molecule or a polypeptide comprising the nucleic acid, preferably the coding region thereof, or polypeptide or the consensus sequence or the polypeptide motif, as depicted in Table I, II or IV, application No. 2, column 5 or 8 in the respective same line as the nucleic acid molecule SEQ ID NO. 7917 or polypeptide SEQ ID NO. 7918, respectively, or a homolog or a fragment thereof, is increased or generated, or if the activity major facilitator superfamily transporter protein is increased or generated in a non-human organism, like a microorganism or a plant cell, plant or part thereof, especially with non-targeted localization, whereby the respective line discloses in column 7 glutamate. For example, an increase of the glutamate of at least 1 percent, particularly in a range of 39 to 138-percent is conferred as compared to a corresponding non-transformed wild type non-human organism.

[8742] Accordingly, in one embodiment, an increase of proline in a non-human organism, as compared to a corresponding non-transformed wild type non-human organism, is conferred in the process of the invention, if the activity of a polypeptide showing the activity of a major facilitator superfamily transporter protein, or if the activity of the polypeptide B0898, preferably represented by SEQ ID NO. 7918, or a homolog or fragment thereof, or if the activity of a polypeptide encoded by a nucleic acid molecule comprising the nucleic acid SEQ ID NO. 7917, preferably the coding region thereof, or a homolog or fragment thereof, e.g. derived from Escherichia coli, is increased or generated. For example the activity of a nucleic acid molecule or a polypeptide comprising the nucleic acid, preferably the coding region thereof, or polypeptide or the consensus sequence or the polypeptide motif, as depicted in Table I, II or IV, application No. 2, column 5 or 8 in the respective same line as the nucleic acid molecule SEQ ID NO. 7917 or polypeptide SEQ ID NO. 7918, respectively, or a homolog or a fragment thereof, is increased or generated, or if the activity major facilitator superfamily transporter protein is increased or generated in a non-human organism, like a microorganism or a plant cell, plant or part thereof, especially with non-targeted localization, whereby the respective line discloses in column 7 proline. For example, an increase of the proline of at least 1 percent, particularly in a range of 68 to 8167-percent is conferred as compared to a corresponding non-transformed wild type non-human organism.

[8743] Accordingly, in one embodiment, an increase of proline in a non-human organism, as compared to a corresponding non-transformed wild type non-human organism, is conferred in the process of the invention, if the activity of a polypeptide showing the activity of a DNA helicase IV, or if the activity of the polypeptide B0962, preferably represented by SEQ ID NO. 36624, or a homolog or fragment thereof, or if the activity of a polypeptide encoded by a nucleic acid molecule comprising the nucleic acid SEQ ID NO. 36623, preferably the coding region thereof, or a homolog or fragment thereof, e.g. derived from Escherichia coli, is increased or generated. For example the activity of a nucleic acid molecule or a polypeptide comprising the nucleic acid, preferably the coding region thereof, or polypeptide or the consensus sequence or the polypeptide motif, as depicted in Table I, II or IV, application No. 2, column 5 or 8 in the respective same line as the nucleic acid molecule SEQ ID NO. 36623 or polypeptide SEQ ID NO. 36624, respectively, or a homolog or a fragment thereof, is increased or generated, or if the activity DNA helicase IV is increased or generated in a non-human organism, like a microorganism or a plant cell, plant or part thereof, especially with non-targeted localization, whereby the respective line discloses in column 7 proline. For example, an increase of the proline of at least 1 percent, particularly in a range of 114 to 475-percent is conferred as compared to a corresponding non-transformed wild type non-human organism.

[8744] Accordingly, in one embodiment, an increase of proline in a non-human organism, as compared to a corresponding non-transformed wild type non-human organism, is conferred in the process of the invention, if the activity of a polypeptide showing the activity of a methylglyoxal synthase, or if the activity of the polypeptide B0963, preferably represented by SEQ ID NO. 36671, or a homolog or fragment thereof, or if the activity of a polypeptide encoded by a nucleic acid molecule comprising the nucleic acid SEQ ID NO. 36670, preferably the coding region thereof, or a homolog or fragment thereof, e.g. derived from Escherichia coli, is increased or generated. For example the activity of a nucleic acid molecule or a polypeptide comprising the nucleic acid, preferably the coding region thereof, or polypeptide or the consensus sequence or the polypeptide motif, as depicted in Table I, II or IV, application No. 2, column 5 or 8 in the respective same line as the nucleic acid molecule SEQ ID NO. 36670 or polypeptide SEQ ID NO. 36671, respectively, or a homolog or a fragment thereof, is increased or generated, or if the activity methylglyoxal synthase is increased or generated in a non-human organism, like a microorganism or a plant cell, plant or part thereof, especially with non-targeted localization, whereby the respective line discloses in column 7 proline. For example, an increase of the proline of at least 1 percent, particularly in a range of 40 to 332-percent is conferred as compared to a corresponding non-transformed wild type non-human organism.

[8745] Accordingly, in one embodiment, an increase of proline in a non-human organism, as compared to a corresponding non-transformed wild type non-human organism, is conferred in the process of the invention, if the activity of a polypeptide showing the activity of a phosphoanhydride phosphorylase, or if the activity of the polypeptide B0980, preferably represented by SEQ ID NO. 36810, or a homolog or fragment thereof, or if the activity of a polypeptide encoded by a nucleic acid molecule comprising the nucleic acid SEQ ID NO. 36809, preferably the coding region thereof, or a homolog or fragment thereof, e.g. derived from Escherichia coli, is increased or generated. For example the activity of a nucleic acid molecule or a polypeptide comprising the nucleic acid, preferably the coding region thereof, or polypeptide or the consensus sequence or the polypeptide motif, as depicted in Table I, II or IV, application No. 2, column 5 or 8 in the respective same line as the nucleic acid molecule SEQ ID NO. 36809 or polypeptide SEQ ID NO. 36810, respectively, or a homolog or a fragment thereof, is increased or generated, or if the activity phosphoanhydride phosphorylase is increased or generated in a non-human organism, like a microorganism or a plant cell, plant or part thereof, especially with non-targeted localization, whereby the respective line discloses in column 7 proline. For example, an increase of the proline of at least 1 percent, particularly in a range of 233 to 304-percent is conferred as compared to a corresponding non-transformed wild type non-human organism.

[8746] Accordingly, in one embodiment, an increase of glutamine in a non-human organism, as compared to a corresponding non-transformed wild type non-human organism, is conferred in the process of the invention, if the activity of a polypeptide showing the activity of a b1003-protein, or if the activity of the polypeptide B1003, preferably represented by SEQ ID NO. 7942, or a homolog or fragment thereof, or if the activity of a polypeptide encoded by a nucleic acid molecule comprising the nucleic acid SEQ ID NO. 7941, preferably the coding region thereof, or a homolog or fragment thereof, e.g. derived from Escherichia coli, is increased or generated. For example the activity of a nucleic acid molecule or a polypeptide comprising the nucleic acid, preferably the coding region thereof, or polypeptide or the consensus sequence or the polypeptide motif, as depicted in Table I, II or IV, application No. 2, column 5 or 8 in the respective same line as the nucleic acid molecule SEQ ID NO. 7941 or polypeptide SEQ ID NO. 7942, respectively, or a homolog or a fragment thereof, is increased or generated, or if the activity b1003-protein is increased or generated in a non-human organism, like a microorganism or a plant cell, plant or part thereof, especially with non-targeted localization, whereby the respective line discloses in column 7 glutamine. For example, an increase of the glutamine of at least 1 percent, particularly in a range of 71 to 2938-percent is conferred as compared to a corresponding non-transformed wild type non-human organism.

[8747] Accordingly, in one embodiment, an increase of proline in a non-human organism, as compared to a corresponding non-transformed wild type non-human organism, is conferred in the process of the invention, if the activity of a polypeptide showing the activity of a b1003-protein, or if the activity of the polypeptide B1003, preferably represented by SEQ ID NO. 7942, or a homolog or fragment thereof, or if the activity of a polypeptide encoded by a nucleic acid molecule comprising the nucleic acid SEQ ID NO. 7941, preferably the coding region thereof, or a homolog or fragment thereof, e.g. derived from Escherichia coli, is increased or generated. For example the activity of a nucleic acid molecule or a polypeptide comprising the nucleic acid, preferably the coding region thereof, or polypeptide or the consensus sequence or the polypeptide motif, as depicted in Table I, II or IV, application No. 2, column 5 or 8 in the respective same line as the nucleic acid molecule SEQ ID NO. 7941 or polypeptide SEQ ID NO. 7942, respectively, or a homolog or a fragment thereof, is increased or generated, or if the activity b1003-protein is increased or generated in a non-human organism, like a microorganism or a plant cell, plant or part thereof, especially with non-targeted localization, whereby the respective line discloses in column 7 proline. For example, an increase of the proline of at least 1 percent, particularly in a range of 56 to 1315-percent is conferred as compared to a corresponding non-transformed wild type non-human organism.

[8748] Accordingly, in one embodiment, an increase of arginine in a non-human organism, as compared to a corresponding non-transformed wild type non-human organism, is conferred in the process of the invention, if the activity of a polypeptide showing the activity of a lipoprotein precursor, or if the activity of the polypeptide B1023, preferably represented by SEQ ID NO. 36881, or a homolog or fragment thereof, or if the activity of a polypeptide encoded by a nucleic acid molecule comprising the nucleic acid SEQ ID NO. 36880, preferably the coding region thereof, or a homolog or fragment thereof, e.g. derived from Escherichia coli, is increased or generated. For example the activity of a nucleic acid molecule or a polypeptide comprising the nucleic acid, preferably the coding region thereof, or polypeptide or the consensus sequence or the polypeptide motif, as depicted in Table I, II or IV, application No. 2, column 5 or 8 in the respective same line as the nucleic acid molecule SEQ ID NO. 36880 or polypeptide SEQ ID NO. 36881, respectively, or a homolog or a fragment thereof, is increased or generated, or if the activity lipoprotein precursor is increased or generated in a non-human organism, like a microorganism or a plant cell, plant or part thereof, especially with non-targeted localization, whereby the respective line discloses in column 7 arginine. For example, an increase of the arginine of at least 1 percent, particularly in a range of 53 to 554-percent is conferred as compared to a corresponding non-transformed wild type non-human organism.

[8749] Accordingly, in one embodiment, an increase of glutamate in a non-human organism, as compared to a corresponding non-transformed wild type non-human organism, is conferred in the process of the invention, if the activity of a polypeptide showing the activity of a b1024-protein, or if the activity of the polypeptide B1024, preferably represented by SEQ ID NO. 36908, or a homolog or fragment thereof, or if the activity of a polypeptide encoded by a nucleic acid molecule comprising the nucleic acid SEQ ID NO. 36907, preferably the coding region thereof, or a homolog or fragment thereof, e.g. derived from Escherichia coli, is increased or generated. For example the activity of a nucleic acid molecule or a polypeptide comprising the nucleic acid, preferably the coding region thereof, or polypeptide or the consensus sequence or the polypeptide motif, as depicted in Table I, II or IV, application No. 2, column 5 or 8 in the respective same line as the nucleic acid molecule SEQ ID NO. 36907 or polypeptide SEQ ID NO. 36908, respectively, or a homolog or a fragment thereof, is increased or generated, or if the activity b1024-protein is increased or generated in a non-human organism, like a microorganism or a plant cell, plant or part thereof, especially with non-targeted localization, whereby the respective line discloses in column 7 glutamate. For example, an increase of the glutamate of at least 1 percent, particularly in a range of 38 to 55-percent is conferred as compared to a corresponding non-transformed wild type non-human organism.

[8750] Accordingly, in one embodiment, an increase of glutamine in a non-human organism, as compared to a corresponding non-transformed wild type non-human organism, is conferred in the process of the invention, if the activity of a polypeptide showing the activity of a b1108-protein, or if the activity of the polypeptide B1108, preferably represented by SEQ ID NO. 36938, or a homolog or fragment thereof, or if the activity of a polypeptide encoded by a nucleic acid molecule comprising the nucleic acid SEQ ID NO. 36937, preferably the coding region thereof, or a homolog or fragment thereof, e.g. derived from Escherichia coli, is increased or generated. For example the activity of a nucleic acid molecule or a polypeptide comprising the nucleic acid, preferably the coding region thereof, or polypeptide or the consensus sequence or the polypeptide motif, as depicted in Table I, II or IV, application No. 2, column 5 or 8 in the respective same line as the nucleic acid molecule SEQ ID NO. 36937 or polypeptide SEQ ID NO. 36938, respectively, or a homolog or a fragment thereof, is increased or generated, or if the activity b1108-protein is increased or generated in a non-human organism, like a microorganism or a plant cell, plant or part thereof, especially with non-targeted localization, whereby the respective line discloses in column 7 glutamine. For example, an increase of the glutamine of at least 1 percent, particularly in a range of 61 to 491-percent is conferred as compared to a corresponding non-transformed wild type non-human organism.

[8751] Accordingly, in one embodiment, an increase of proline in a non-human organism, as compared to a corresponding non-transformed wild type non-human organism, is conferred in the process of the invention, if the activity of a polypeptide showing the activity of a b1108-protein, or if the activity of the polypeptide B1108, preferably represented by SEQ ID NO. 36938, or a homolog or fragment thereof, or if the activity of a polypeptide encoded by a nucleic acid molecule comprising the nucleic acid SEQ ID NO. 36937, preferably the coding region thereof, or a homolog or fragment thereof, e.g. derived from Escherichia coli, is increased or generated. For example the activity of a nucleic acid molecule or a polypeptide comprising the nucleic acid, preferably the coding region thereof, or polypeptide or the consensus sequence or the polypeptide motif, as depicted in Table I, II or IV, application No. 2, column 5 or 8 in the respective same line as the nucleic acid molecule SEQ ID NO. 36937 or polypeptide SEQ ID NO. 36938, respectively, or a homolog or a fragment thereof, is increased or generated, or if the activity b1108-protein is increased or generated in a non-human organism, like a microorganism or a plant cell, plant or part thereof, especially with non-targeted localization, whereby the respective line discloses in column 7 proline. For example, an increase of the proline of at least 1 percent, particularly in a range of 34 to 225-percent is conferred as compared to a corresponding non-transformed wild type non-human organism.

[8752] Accordingly, in one embodiment, an increase of proline in a non-human organism, as compared to a corresponding non-transformed wild type non-human organism, is conferred in the process of the invention, if the activity of a polypeptide showing the activity of a isocitrate dehydrogenase, or if the activity of the polypeptide B1136, preferably represented by SEQ ID NO. 36972, or a homolog or fragment thereof, or if the activity of a polypeptide encoded by a nucleic acid molecule comprising the nucleic acid SEQ ID NO. 36971, preferably the coding region thereof, or a homolog or fragment thereof, e.g. derived from Escherichia coli, is increased or generated. For example the activity of a nucleic acid molecule or a polypeptide comprising the nucleic acid, preferably the coding region thereof, or polypeptide or the consensus sequence or the polypeptide motif, as depicted in Table I, II or IV, application No. 2, column 5 or 8 in the respective same line as the nucleic acid molecule SEQ ID NO. 36971 or polypeptide SEQ ID NO. 36972, respectively, or a homolog or a fragment thereof, is increased or generated, or if the activity isocitrate dehydrogenase is increased or generated in a non-human organism, like a microorganism or a plant cell, plant or part thereof, especially with plastidic localization, whereby the respective line discloses in column 7 proline. For example, an increase of the proline of at least 1 percent, particularly in a range of 47 to 549-percent is conferred as compared to a corresponding non-transformed wild type non-human organism.

[8753] Accordingly, in one embodiment, an increase of arginine in a non-human organism, as compared to a corresponding non-transformed wild type non-human organism, is conferred in the process of the invention, if the activity of a polypeptide showing the activity of a b1137-protein, or if the activity of the polypeptide B1137, preferably represented by SEQ ID NO. 37391, or a homolog or fragment thereof, or if the activity of a polypeptide encoded by a nucleic acid molecule comprising the nucleic acid SEQ ID NO. 37390, preferably the coding region thereof, or a homolog or fragment thereof, e.g. derived from Escherichia coli, is increased or generated. For example the activity of a nucleic acid molecule or a polypeptide comprising the nucleic acid, preferably the coding region thereof, or polypeptide or the consensus sequence or the polypeptide motif, as depicted in Table I, II or IV, application No. 2, column 5 or 8 in the respective same line as the nucleic acid molecule SEQ ID NO. 37390 or polypeptide SEQ ID NO. 37391, respectively, or a homolog or a fragment thereof, is increased or generated, or if the activity b1137-protein is increased or generated in a non-human organism, like a microorganism or a plant cell, plant or part thereof, especially with non-targeted localization, whereby the respective line discloses in column 7 arginine. For example, an increase of the arginine of at least 1 percent, particularly in a range of 85 to 748-percent is conferred as compared to a corresponding non-transformed wild type non-human organism.

[8754] Accordingly, in one embodiment, an increase of glutamate in a non-human organism, as compared to a corresponding non-transformed wild type non-human organism, is conferred in the process of the invention, if the activity of a polypeptide showing the activity of a b1137-protein, or if the activity of the polypeptide B1137, preferably represented by SEQ ID NO. 37391,or a homolog or fragment thereof, or if the activity of a polypeptide encoded by a nucleic acid molecule comprising the nucleic acid SEQ ID NO. 37390, preferably the coding region thereof, or a homolog or fragment thereof, e.g. derived from Escherichia coli, is increased or generated. For example the activity of a nucleic acid molecule or a polypeptide comprising the nucleic acid, preferably the coding region thereof, or polypeptide or the consensus sequence or the polypeptide motif, as depicted in Table I, II or IV, application No. 2, column 5 or 8 in the respective same line as the nucleic acid molecule SEQ ID NO. 37390 or polypeptide SEQ ID NO. 37391, respectively, or a homolog or a fragment thereof, is increased or generated, or if the activity b1137-protein is increased or generated in a non-human organism, like a microorganism or a plant cell, plant or part thereof, especially with non-targeted localization, whereby the respective line discloses in column 7 glutamate. For example, an increase of the glutamate of at least 1 percent, particularly in a range of 48 to 69-percent is conferred as compared to a corresponding non-transformed wild type non-human organism.

[8755] Accordingly, in one embodiment, an increase of proline in a non-human organism, as compared to a corresponding non-transformed wild type non-human organism, is conferred in the process of the invention, if the activity of a polypeptide showing the activity of a b1137-protein, or if the activity of the polypeptide B1137, preferably represented by SEQ ID NO. 37391, or a homolog or fragment thereof, or if the activity of a polypeptide encoded by a nucleic acid molecule comprising the nucleic acid SEQ ID NO. 37390, preferably the coding region thereof, or a homolog or fragment thereof, e.g. derived from Escherichia coli, is increased or generated. For example the activity of a nucleic acid molecule or a polypeptide comprising the nucleic acid, preferably the coding region thereof, or polypeptide or the consensus sequence or the polypeptide motif, as depicted in Table I, II or IV, application No. 2, column 5 or 8 in the respective same line as the nucleic acid molecule SEQ ID NO. 37390 or polypeptide SEQ ID NO. 37391, respectively, or a homolog or a fragment thereof, is increased or generated, or if the activity b1137-protein is increased or generated in a non-human organism, like a microorganism or a plant cell, plant or part thereof, especially with non-targeted localization, whereby the respective line discloses in column 7 proline. For example, an increase of the proline of at least 1 percent, particularly in a range of 40 to 169-percent is conferred as compared to a corresponding non-transformed wild type non-human organism.

[8756] Accordingly, in one embodiment, an increase of glutamine in a non-human organism, as compared to a corresponding non-transformed wild type non-human organism, is conferred in the process of the invention, if the activity of a polypeptide showing the activity of a b1163-protein, or if the activity of the polypeptide B1163, preferably represented by SEQ ID NO. 37395, or a homolog or fragment thereof, or if the activity of a polypeptide encoded by a nucleic acid molecule comprising the nucleic acid SEQ ID NO. 37394, preferably the coding region thereof, or a homolog or fragment thereof, e.g. derived from Escherichia coli, is increased or generated. For example the activity of a nucleic acid molecule or a polypeptide comprising the nucleic acid, preferably the coding region thereof, or polypeptide or the consensus sequence or the polypeptide motif, as depicted in Table I, II or IV, application No. 2, column 5 or 8 in the respective same line as the nucleic acid molecule SEQ ID NO. 37394 or polypeptide SEQ ID NO. 37395, respectively, or a homolog or a fragment thereof, is increased or generated, or if the activity b1163-protein is increased or generated in a non-human organism, like a microorganism or a plant cell, plant or part thereof, especially with non-targeted localization, whereby the respective line discloses in column 7 glutamine. For example, an increase of the glutamine of at least 1 percent, particularly in a range of 30 to 36-percent is conferred as compared to a corresponding non-transformed wild type non-human organism.

[8757] Accordingly, in one embodiment, an increase of proline in a non-human organism, as compared to a corresponding non-transformed wild type non-human organism, is conferred in the process of the invention, if the activity of a polypeptide showing the activity of a sodium/proton antiporter, or if the activity of the polypeptide B1186, preferably represented by SEQ ID NO. 37401, or a homolog or fragment thereof, or if the activity of a polypeptide encoded by a nucleic acid molecule comprising the nucleic acid SEQ ID NO. 37400, preferably the coding region thereof, or a homolog or fragment thereof, e.g. derived from Escherichia coli K12, is increased or generated. For example the activity of a nucleic acid molecule or a polypeptide comprising the nucleic acid, preferably the coding region thereof, or polypeptide or the consensus sequence or the polypeptide motif, as depicted in Table I, II or IV, application No. 2, column 5 or 8 in the respective same line as the nucleic acid molecule SEQ ID NO. 37400 or polypeptide SEQ ID NO. 37401, respectively, or a homolog or a fragment thereof, is increased or generated, or if the activity sodium/proton antiporter is increased or generated in a non-human organism, like a microorganism or a plant cell, plant or part thereof, especially with non-targeted localization, whereby the respective line discloses in column 7 proline. For example, an increase of the proline of at least 1 percent, particularly in a range of 36 to 164-percent is conferred as compared to a corresponding non-transformed wild type non-human organism.

[8758] Accordingly, in one embodiment, an increase of glutamine in a non-human organism, as compared to a corresponding non-transformed wild type non-human organism, is conferred in the process of the invention, if the activity of a polypeptide showing the activity of a membrane protein, or if the activity of the polypeptide B1255, preferably represented by SEQ ID NO. 37484, or a homolog or fragment thereof, or if the activity of a polypeptide encoded by a nucleic acid molecule comprising the nucleic acid SEQ ID NO. 37483, preferably the coding region thereof, or a homolog or fragment thereof, e.g. derived from Escherichia coli, is increased or generated. For example the activity of a nucleic acid molecule or a polypeptide comprising the nucleic acid, preferably the coding region thereof, or polypeptide or the consensus sequence or the polypeptide motif, as depicted in Table I, II or IV, application No. 2, column 5 or 8 in the respective same line as the nucleic acid molecule SEQ ID NO. 37483 or polypeptide SEQ ID NO. 37484, respectively, or a homolog or a fragment thereof, is increased or generated, or if the activity membrane protein is increased or generated in a non-human organism, like a microorganism or a plant cell, plant or part thereof, especially with non-targeted localization, whereby the respective line discloses in column 7 glutamine. For example, an increase of the glutamine of at least 1 percent, particularly in a range of 42 to 80-percent is conferred as compared to a corresponding non-transformed wild type non-human organism.

[8759] Accordingly, in one embodiment, an increase of proline in a non-human organism, as compared to a corresponding non-transformed wild type non-human organism, is conferred in the process of the invention, if the activity of a polypeptide showing the activity of a membrane protein, or if the activity of the polypeptide B1255, preferably represented by SEQ ID NO. 37484, or a homolog or fragment thereof, or if the activity of a polypeptide encoded by a nucleic acid molecule comprising the nucleic acid SEQ ID NO. 37483, preferably the coding region thereof, or a homolog or fragment thereof, e.g. derived from Escherichia coli, is increased or generated. For example the activity of a nucleic acid molecule or a polypeptide comprising the nucleic acid, preferably the coding region thereof, or polypeptide or the consensus sequence or the polypeptide motif, as depicted in Table I, II or IV, application No. 2, column 5 or 8 in the respective same line as the nucleic acid molecule SEQ ID NO. 37483 or polypeptide SEQ ID NO. 37484, respectively, or a homolog or a fragment thereof, is increased or generated, or if the activity membrane protein is increased or generated in a non-human organism, like a microorganism or a plant cell, plant or part thereof, especially with non-targeted localization, whereby the respective line discloses in column 7 proline. For example, an increase of the proline of at least 1 percent, particularly in a range of 39 to 520-percent is conferred as compared to a corresponding non-transformed wild type non-human organism.

[8760] Accordingly, in one embodiment, an increase of arginine in a non-human organism, as compared to a corresponding non-transformed wild type non-human organism, is conferred in the process of the invention, if the activity of a polypeptide showing the activity of a b1259-protein, or if the activity of the polypeptide B1259, preferably represented by SEQ ID NO. 37504, or a homolog or fragment thereof, or if the activity of a polypeptide encoded by a nucleic acid molecule comprising the nucleic acid SEQ ID NO. 37503, preferably the coding region thereof, or a homolog or fragment thereof, e.g. derived from Escherichia coli, is increased or generated. For example the activity of a nucleic acid molecule or a polypeptide comprising the nucleic acid, preferably the coding region thereof, or polypeptide or the consensus sequence or the polypeptide motif, as depicted in Table I, II or IV, application No. 2, column 5 or 8 in the respective same line as the nucleic acid molecule SEQ ID NO. 37503 or polypeptide SEQ ID NO. 37504, respectively, or a homolog or a fragment thereof, is increased or generated, or if the activity b1259-protein is increased or generated in a non-human organism, like a microorganism or a plant cell, plant or part thereof, especially with non-targeted localization, whereby the respective line discloses in column 7 arginine. For example, an increase of the arginine of at least 1 percent, particularly in a range of 66 to 105-percent is conferred as compared to a corresponding non-transformed wild type non-human organism.

[8761] Accordingly, in one embodiment, an increase of glutamine in a non-human organism, as compared to a corresponding non-transformed wild type non-human organism, is conferred in the process of the invention, if the activity of a polypeptide showing the activity of a b1259-protein, or if the activity of the polypeptide B1259, preferably represented by SEQ ID NO. 37504, or a homolog or fragment thereof, or if the activity of a polypeptide encoded by a nucleic acid molecule comprising the nucleic acid SEQ ID NO. 37503, preferably the coding region thereof, or a homolog or fragment thereof, e.g. derived from Escherichia coli, is increased or generated. For example the activity of a nucleic acid molecule or a polypeptide comprising the nucleic acid, preferably the coding region thereof, or polypeptide or the consensus sequence or the polypeptide motif, as depicted in Table I, II or IV, application No. 2, column 5 or 8 in the respective same line as the nucleic acid molecule SEQ ID NO. 37503 or polypeptide SEQ ID NO. 37504, respectively, or a homolog or a fragment thereof, is increased or generated, or if the activity b1259-protein is increased or generated in a non-human organism, like a microorganism or a plant cell, plant or part thereof, especially with non-targeted localization, whereby the respective line discloses in column 7 glutamine. For example, an increase of the glutamine of at least 1 percent, particularly in a range of 58 to 291-percent is conferred as compared to a corresponding non-transformed wild type non-human organism.

[8762] Accordingly, in one embodiment, an increase of glutamine in a non-human organism, as compared to a corresponding non-transformed wild type non-human organism, is conferred in the process of the invention, if the activity of a polypeptide showing the activity of a anthranilate synthase component II, or if the activity of the polypeptide B1263, preferably represented by SEQ ID NO. 37540, or a homolog or fragment thereof, or if the activity of a polypeptide encoded by a nucleic acid molecule comprising the nucleic acid SEQ ID NO. 37539, preferably the coding region thereof, or a homolog or fragment thereof, e.g. derived from Escherichia coli, is increased or generated. For example the activity of a nucleic acid molecule or a polypeptide comprising the nucleic acid, preferably the coding region thereof, or polypeptide or the consensus sequence or the polypeptide motif, as depicted in Table I, II or IV, application No. 2, column 5 or 8 in the respective same line as the nucleic acid molecule SEQ ID NO. 37539 or polypeptide SEQ ID NO. 37540, respectively, or a homolog or a fragment thereof, is increased or generated, or if the activity anthranilate synthase component II is increased or generated in a non-human organism, like a microorganism or a plant cell, plant or part thereof, especially with plastidic localization, whereby the respective line discloses in column 7 glutamine. For example, an increase of the glutamine of at least 1 percent, particularly in a range of 68 to 176-percent is conferred as compared to a corresponding non-transformed wild type non-human organism.

[8763] Accordingly, in one embodiment, an increase of glutamine in a non-human organism, as compared to a corresponding non-transformed wild type non-human organism, is conferred in the process of the invention, if the activity of a polypeptide showing the activity of a b1280-protein, or if the activity of the polypeptide B1280, preferably represented by SEQ ID NO. 37574, or a homolog or fragment thereof, or if the activity of a polypeptide encoded by a nucleic acid molecule comprising the nucleic acid SEQ ID NO. 37573, preferably the coding region thereof, or a homolog or fragment thereof, e.g. derived from Escherichia coli, is increased or generated. For example the activity of a nucleic acid molecule or a polypeptide comprising the nucleic acid, preferably the coding region thereof, or polypeptide or the consensus sequence or the polypeptide motif, as depicted in Table I, II or IV, application No. 2, column 5 or 8 in the respective same line as the nucleic acid molecule SEQ ID NO. 37573 or polypeptide SEQ ID NO. 37574, respectively, or a homolog or a fragment thereof, is increased or generated, or if the activity b1280-protein is increased or generated in a non-human organism, like a microorganism or a plant cell, plant or part thereof, especially with non-targeted localization, whereby the respective line discloses in column 7 glutamine. For example, an increase of the glutamine of at least 1 percent, particularly in a range of 94 to 179-percent is conferred as compared to a corresponding non-transformed wild type non-human organism.

[8764] Accordingly, in one embodiment, an increase of glutamine in a non-human organism, as compared to a corresponding non-transformed wild type non-human organism, is conferred in the process of the invention, if the activity of a polypeptide showing the activity of a glutamine synthetase, or if the activity of the polypeptide B1297, preferably represented by SEQ ID NO. 37659, or a homolog or fragment thereof, or if the activity of a polypeptide encoded by a nucleic acid molecule comprising the nucleic acid SEQ ID NO. 37658, preferably the coding region thereof, or a homolog or fragment thereof, e.g. derived from Escherichia coli, is increased or generated. For example the activity of a nucleic acid molecule or a polypeptide comprising the nucleic acid, preferably the coding region thereof, or polypeptide or the consensus sequence or the polypeptide motif, as depicted in Table I, II or IV, application No. 2, column 5 or 8 in the respective same line as the nucleic acid molecule SEQ ID NO. 37658 or polypeptide SEQ ID NO. 37659, respectively, or a homolog or a fragment thereof, is increased or generated, or if the activity glutamine synthetase is increased or generated in a non-human organism, like a microorganism or a plant cell, plant or part thereof, especially with plastidic localization, whereby the respective line discloses in column 7 glutamine. For example, an increase of the glutamine of at least 1 percent, particularly in a range of 70 to 412-percent is conferred as compared to a corresponding non-transformed wild type non-human organism.

[8765] Accordingly, in one embodiment, an increase of glutamate in a non-human organism, as compared to a corresponding non-transformed wild type non-human organism, is conferred in the process of the invention, if the activity of a polypeptide showing the activity of a aldehyde dehydrogenase, or if the activity of the polypeptide B1300, preferably represented by SEQ ID NO. 37808, or a homolog or fragment thereof, or if the activity of a polypeptide encoded by a nucleic acid molecule comprising the nucleic acid SEQ ID NO. 37807, preferably the coding region thereof, or a homolog or fragment thereof, e.g. derived from Escherichia coli, is increased or generated. For example the activity of a nucleic acid molecule or a polypeptide comprising the nucleic acid, preferably the coding region thereof, or polypeptide or the consensus sequence or the polypeptide motif, as depicted in Table I, II or IV, application No. 2, column 5 or 8 in the respective same line as the nucleic acid molecule SEQ ID NO. 37807 or polypeptide SEQ ID NO. 37808, respectively, or a homolog or a fragment thereof, is increased or generated, or if the activity aldehyde dehydrogenase is increased or generated in a non-human organism, like a microorganism or a plant cell, plant or part thereof, especially with non-targeted localization, whereby the respective line discloses in column 7 glutamate of at least 1 percent, particularly in a range of 39 to 89-percent is conferred as compared to a corresponding non-transformed wild type non-human organism.

[8766] Accordingly, in one embodiment, an increase of glutamate in a non-human organism, as compared to a corresponding non-transformed wild type non-human organism, is conferred in the process of the invention, if the activity of a polypeptide showing the activity of a b1330-protein, or if the activity of the polypeptide B1330, preferably represented by SEQ ID NO. 38227, or a homolog or fragment thereof, or if the activity of a polypeptide encoded by a nucleic acid molecule comprising the nucleic acid SEQ ID NO. 38226, preferably the coding region thereof, or a homolog or fragment thereof, e.g. derived from Escherichia coli, is increased or generated. For example the activity of a nucleic acid molecule or a polypeptide comprising the nucleic acid, preferably the coding region thereof, or polypeptide or the consensus sequence or the polypeptide motif, as depicted in Table I, II or IV, application No. 2, column 5 or 8 in the respective same line as the nucleic acid molecule SEQ ID NO. 38226 or polypeptide SEQ ID NO. 38227, respectively, or a homolog or a fragment thereof, is increased or generated, or if the activity b1330-protein is increased or generated in a non-human organism, like a microorganism or a plant cell, plant or part thereof, especially with non-targeted localization, whereby the respective line discloses in column 7 glutamate. For example, an increase of the glutamate of at least 1 percent, particularly in a range of 50 to 97-percent is conferred as compared to a corresponding non-transformed wild type non-human organism.

[8767] Accordingly, in one embodiment, an increase of glutamine in a non-human organism, as compared to a corresponding non-transformed wild type non-human organism, is conferred in the process of the invention, if the activity of a polypeptide showing the activity of a b1330-protein, or if the activity of the polypeptide B1330, preferably represented by SEQ ID NO. 38227, or a homolog or fragment thereof, or if the activity of a polypeptide encoded by a nucleic acid molecule comprising the nucleic acid SEQ ID NO. 38226, preferably the coding region thereof, or a homolog or fragment thereof, e.g. derived from Escherichia coli, is increased or generated. For example the activity of a nucleic acid molecule or a polypeptide comprising the nucleic acid, preferably the coding region thereof, or polypeptide or the consensus sequence or the polypeptide motif, as depicted in Table I, II or IV, application No. 2, column 5 or 8 in the respective same line as the nucleic acid molecule SEQ ID NO. 38226 or polypeptide SEQ ID NO. 38227, respectively, or a homolog or a fragment thereof, is increased or generated, or if the activity b1330-protein is increased or generated in a non-human organism, like a microorganism or a plant cell, plant or part thereof, especially with non-targeted localization, whereby the respective line discloses in column 7 glutamine. For example, an increase of the glutamine of at least 1 percent, particularly in a range of 28 to 102-percent is conferred as compared to a corresponding non-transformed wild type non-human organism.

[8768] Accordingly, in one embodiment, an increase of glutamate in a non-human organism, as compared to a corresponding non-transformed wild type non-human organism, is conferred in the process of the invention, if the activity of a polypeptide showing the activity of a lipoprotein precursor, or if the activity of the polypeptide B1431, preferably represented by SEQ ID NO. 38267, or a homolog or fragment thereof, or if the activity of a polypeptide encoded by a nucleic acid molecule comprising the nucleic acid SEQ ID NO. 38266, preferably the coding region thereof, or a homolog or fragment thereof, e.g. derived from Escherichia coli, is increased or generated. For example the activity of a nucleic acid molecule or a polypeptide comprising the nucleic acid, preferably the coding region thereof, or polypeptide or the consensus sequence or the polypeptide motif, as depicted in Table I, II or IV, application No. 2, column 5 or 8 in the respective same line as the nucleic acid molecule SEQ ID NO. 38266 or polypeptide SEQ ID NO. 38267, respectively, or a homolog or a fragment thereof, is increased or generated, or if the activity lipoprotein precursor is increased or generated in a non-human organism, like a microorganism or a plant cell, plant or part thereof, especially with plastidic localization, whereby the respective line discloses in column 7 glutamate. For example, an increase of the glutamate of at least 1 percent, particularly in a range of 33 to 52-percent is conferred as compared to a corresponding non-transformed wild type non-human organism.

[8769] Accordingly, in one embodiment, an increase of glutamine in a non-human organism, as compared to a corresponding non-transformed wild type non-human organism, is conferred in the process of the invention, if the activity of a polypeptide showing the activity of a lipoprotein precursor, or if the activity of the polypeptide B1431, preferably represented by SEQ ID NO. 38267, or a homolog or fragment thereof, or if the activity of a polypeptide encoded by a nucleic acid molecule comprising the nucleic acid SEQ ID NO. 38266, preferably the coding region thereof, or a homolog or fragment thereof, e.g. derived from Escherichia coli, is increased or generated. For example the activity of a nucleic acid molecule or a polypeptide comprising the nucleic acid, preferably the coding region thereof, or polypeptide or the consensus sequence or the polypeptide motif, as depicted in Table I, II or IV, application No. 2, column 5 or 8 in the respective same line as the nucleic acid molecule SEQ ID NO. 38266 or polypeptide SEQ ID NO. 38267, respectively, or a homolog or a fragment thereof, is increased or generated, or if the activity lipoprotein precursor is increased or generated in a non-human organism, like a microorganism or a plant cell, plant or part thereof, especially with plastidic localization, whereby the respective line discloses in column 7 glutamine. For example, an increase of the glutamine of at least 1 percent, particularly in a range of 63 to 83-percent is conferred as compared to a corresponding non-transformed wild type non-human organism.

[8770] Accordingly, in one embodiment, an increase of glutamate in a non-human organism, as compared to a corresponding non-transformed wild type non-human organism, is conferred in the process of the invention, if the activity of a polypeptide showing the activity of a b1445-protein, or if the activity of the polypeptide B1445, preferably represented by SEQ ID NO. 38290, or a homolog or fragment thereof, or if the activity of a polypeptide encoded by a nucleic acid molecule comprising the nucleic acid SEQ ID NO. 38289, preferably the coding region thereof, or a homolog or fragment thereof, e.g. derived from Escherichia coli, is increased or generated. For example the activity of a nucleic acid molecule or a polypeptide comprising the nucleic acid, preferably the coding region thereof, or polypeptide or the consensus sequence or the polypeptide motif, as depicted in Table I, II or IV, application No. 2, column 5 or 8 in the respective same line as the nucleic acid molecule SEQ ID NO. 38289 or polypeptide SEQ ID NO. 38290, respectively, or a homolog or a fragment thereof, is increased or generated, or if the activity b1445-protein is increased or generated in a non-human organism, like a microorganism or a plant cell, plant or part thereof, especially with non-targeted localization, whereby the respective line discloses in column 7 glutamate. For example, an increase of the glutamate of at least 1 percent, particularly in a range of 36 to 165-percent is conferred as compared to a corresponding non-transformed wild type non-human organism.

[8771] Accordingly, in one embodiment, an increase of glutamine in a non-human organism, as compared to a corresponding non-transformed wild type non-human organism, is conferred in the process of the invention, if the activity of a polypeptide showing the activity of a b1445-protein, or if the activity of the polypeptide B1445, preferably represented by SEQ ID NO. 38290, or a homolog or fragment thereof, or if the activity of a polypeptide encoded by a nucleic acid molecule comprising the nucleic acid SEQ ID NO. 38289, preferably the coding region thereof, or a homolog or fragment thereof, e.g. derived from Escherichia coli, is increased or generated. For example the activity of a nucleic acid molecule or a polypeptide comprising the nucleic acid, preferably the coding region thereof, or polypeptide or the consensus sequence or the polypeptide motif, as depicted in Table I, II or IV, application No. 2, column 5 or 8 in the respective same line as the nucleic acid molecule SEQ ID NO. 38289 or polypeptide SEQ ID NO. 38290, respectively, or a homolog or a fragment thereof, is increased or generated, or if the activity b1445-protein is increased or generated in a non-human organism, like a microorganism or a plant cell, plant or part thereof, especially with non-targeted localization, whereby the respective line discloses in column 7 glutamine. For example, an increase of the glutamine of at least 1 percent, particularly in a range of 43 to 134-percent is conferred as compared to a corresponding non-transformed wild type non-human organism.

[8772] Accordingly, in one embodiment, an increase of glutamate in a non-human organism, as compared to a corresponding non-transformed wild type non-human organism, is conferred in the process of the invention, if the activity of a polypeptide showing the activity of a b1522-protein, or if the activity of the polypeptide B1522, preferably represented by SEQ ID NO. 7948, or a homolog or fragment thereof, or if the activity of a polypeptide encoded by a nucleic acid molecule comprising the nucleic acid SEQ ID NO. 7947, preferably the coding region thereof, or a homolog or fragment thereof, e.g. derived from Escherichia coli, is increased or generated. For example the activity of a nucleic acid molecule or a polypeptide comprising the nucleic acid, preferably the coding region thereof, or polypeptide or the consensus sequence or the polypeptide motif, as depicted in Table I, II or IV, application No. 2, column 5 or 8 in the respective same line as the nucleic acid molecule SEQ ID NO. 7947 or polypeptide SEQ ID NO. 7948, respectively, or a homolog or a fragment thereof, is increased or generated, or if the activity b1522-protein is increased or generated in a non-human organism, like a microorganism or a plant cell, plant or part thereof, especially with non-targeted localization, whereby the respective line discloses in column 7 glutamate. For example, an increase of the glutamate of at least 1 percent, particularly in a range of 38 to 281-percent is conferred as compared to a corresponding non-transformed wild type non-human organism.

[8773] Accordingly, in one embodiment, an increase of glutamine in a non-human organism, as compared to a corresponding non-transformed wild type non-human organism, is conferred in the process of the invention, if the activity of a polypeptide showing the activity of a acid shock protein, or if the activity of the polypeptide B1597, preferably represented by SEQ ID NO. 38301, or a homolog or fragment thereof, or if the activity of a polypeptide encoded by a nucleic acid molecule comprising the nucleic acid SEQ ID NO. 38300, preferably the coding region thereof, or a homolog or fragment thereof, e.g. derived from Escherichia coli, is increased or generated. For example the activity of a nucleic acid molecule or a polypeptide comprising the nucleic acid, preferably the coding region thereof, or polypeptide or the consensus sequence or the polypeptide motif, as depicted in Table I, II or IV, application No. 2, column 5 or 8 in the respective same line as the nucleic acid molecule SEQ ID NO. 38300 or polypeptide SEQ ID NO. 38301, respectively, or a homolog or a fragment thereof, is increased or generated, or if the activity acid shock protein is increased or generated in a non-human organism, like a microorganism or a plant cell, plant or part thereof, especially with non-targeted localization, whereby the respective line discloses in column 7 glutamine. For example, an increase of the glutamine of at least 1 percent, particularly in a range of 38 to 69-percent is conferred as compared to a corresponding non-transformed wild type non-human organism.

[8774] Accordingly, in one embodiment, an increase of glutamine in a non-human organism, as compared to a corresponding non-transformed wild type non-human organism, is conferred in the process of the invention, if the activity of a polypeptide showing the activity of a electron transport complex protein, or if the activity of the polypeptide B1627, preferably represented by SEQ ID NO. 38346, or a homolog or fragment thereof, or if the activity of a polypeptide encoded by a nucleic acid molecule comprising the nucleic acid SEQ ID NO. 38345, preferably the coding region thereof, or a homolog or fragment thereof, e.g. derived from Escherichia coli, is increased or generated. For example the activity of a nucleic acid molecule or a polypeptide comprising the nucleic acid, preferably the coding region thereof, or polypeptide or the consensus sequence or the polypeptide motif, as depicted in Table I, II or IV, application No. 2, column 5 or 8 in the respective same line as the nucleic acid molecule SEQ ID NO. 38345 or polypeptide SEQ ID NO. 38346, respectively, or a homolog or a fragment thereof, is increased or generated, or if the activity electron transport complex protein is increased or generated in a non-human organism, like a microorganism or a plant cell, plant or part thereof, especially with non-targeted localization, whereby the respective line discloses in column 7 glutamine. For example, an increase of the glutamine of at least 1 percent, particularly in a range of 43 to 239-percent is conferred as compared to a corresponding non-transformed wild type non-human organism.

[8775] Accordingly, in one embodiment, an increase of glutamate in a non-human organism, as compared to a corresponding non-transformed wild type non-human organism, is conferred in the process of the invention, if the activity of a polypeptide showing the activity of a protease, or if the activity of the polypeptide B1845, preferably represented by SEQ ID NO. 38574, or a homolog or fragment thereof, or if the activity of a polypeptide encoded by a nucleic acid molecule comprising the nucleic acid SEQ ID NO. 38573, preferably the coding region thereof, or a homolog or fragment thereof, e.g. derived from Escherichia coli, is increased or generated. For example the activity of a nucleic acid molecule or a polypeptide comprising the nucleic acid, preferably the coding region thereof, or polypeptide or the consensus sequence or the polypeptide motif, as depicted in Table I, II or IV, application No. 2, column 5 or 8 in the respective same line as the nucleic acid molecule SEQ ID NO. 38573 or polypeptide SEQ ID NO. 38574, respectively, or a homolog or a fragment thereof, is increased or generated, or if the activity protease is increased or generated in a non-human organism, like a microorganism or a plant cell, plant or part thereof, especially with non-targeted localization, whereby the respective line discloses in column 7 glutamate. For example, an increase of the glutamate of at least 1 percent, particularly in a range of 48 to 147-percent is conferred as compared to a corresponding non-transformed wild type non-human organism.

[8776] Accordingly, in one embodiment, an increase of glutamate in a non-human organism, as compared to a corresponding non-transformed wild type non-human organism, is conferred in the process of the invention, if the activity of a polypeptide showing the activity of a b1898-protein, or if the activity of the polypeptide B1898, preferably represented by SEQ ID NO. 38768, or a homolog or fragment thereof, or if the activity of a polypeptide encoded by a nucleic acid molecule comprising the nucleic acid SEQ ID NO. 38767, preferably the coding region thereof, or a homolog or fragment thereof, e.g. derived from Escherichia coli, is increased or generated. For example the activity of a nucleic acid molecule or a polypeptide comprising the nucleic acid, preferably the coding region thereof, or polypeptide or the consensus sequence or the polypeptide motif, as depicted in Table I, II or IV, application No. 2, column 5 or 8 in the respective same line as the nucleic acid molecule SEQ ID NO. 38767 or polypeptide SEQ ID NO. 38768, respectively, or a homolog or a fragment thereof, is increased or generated, or if the activity b1898-protein is increased or generated in a non-human organism, like a microorganism or a plant cell, plant or part thereof, especially with non-targeted localization, whereby the respective line discloses in column 7 glutamate. For example, an increase of the glutamate of at least 1 percent, particularly in a range of 40 to 45-percent is conferred as compared to a corresponding non-transformed wild type non-human organism.

[8777] Accordingly, in one embodiment, an increase of glutamine in a non-human organism, as compared to a corresponding non-transformed wild type non-human organism, is conferred in the process of the invention, if the activity of a polypeptide showing the activity of a transport protein, or if the activity of the polypeptide B1981, preferably represented by SEQ ID NO. 38900, or a homolog or fragment thereof, or if the activity of a polypeptide encoded by a nucleic acid molecule comprising the nucleic acid SEQ ID NO. 38899, preferably the coding region thereof, or a homolog or fragment thereof, e.g. derived from Escherichia coli, is increased or generated. For example the activity of a nucleic acid molecule or a polypeptide comprising the nucleic acid, preferably the coding region thereof, or polypeptide or the consensus sequence or the polypeptide motif, as depicted in Table I, II or IV, application No. 2, column 5 or 8 in the respective same line as the nucleic acid molecule SEQ ID NO. 38899 or polypeptide SEQ ID NO. 38900, respectively, or a homolog or a fragment thereof, is increased or generated, or if the activity transport protein is increased or generated in a non-human organism, like a microorganism or a plant cell, plant or part thereof, especially with non-targeted localization, whereby the respective line discloses in column 7 glutamine. For example, an increase of the glutamine of at least 1 percent, particularly in a range of 87 to 481-percent is conferred as compared to a corresponding non-transformed wild type non-human organism.

[8778] Accordingly, in one embodiment, an increase of glutamate in a non-human organism, as compared to a corresponding non-transformed wild type non-human organism, is conferred in the process of the invention, if the activity of a polypeptide showing the activity of a transport protein, or if the activity of the polypeptide B2063, preferably represented by SEQ ID NO. 38948, or a homolog or fragment thereof, or if the activity of a polypeptide encoded by a nucleic acid molecule comprising the nucleic acid SEQ ID NO. 38947, preferably the coding region thereof, or a homolog or fragment thereof, e.g. derived from Escherichia coli, is increased or generated. For example the activity of a nucleic acid molecule or a polypeptide comprising the nucleic acid, preferably the coding region thereof, or polypeptide or the consensus sequence or the polypeptide motif, as depicted in Table I, II or IV, application No. 2, column 5 or 8 in the respective same line as the nucleic acid molecule SEQ ID NO. 38947 or polypeptide SEQ ID NO. 38948, respectively, or a homolog or a fragment thereof, is increased or generated, or if the activity transport protein is increased or generated in a non-human organism, like a microorganism or a plant cell, plant or part thereof, especially with non-targeted localization, whereby the respective line discloses in column 7 glutamate. For example, an increase of the glutamate of at least 1 percent, particularly in a range of 57 to 134-percent is conferred as compared to a corresponding non-transformed wild type non-human organism.

[8779] Accordingly, in one embodiment, an increase of glutamine in a non-human organism, as compared to a corresponding non-transformed wild type non-human organism, is conferred in the process of the invention, if the activity of a polypeptide showing the activity of a transport protein, or if the activity of the polypeptide B2063, preferably represented by SEQ ID NO. 38948, or a homolog or fragment thereof, or if the activity of a polypeptide encoded by a nucleic acid molecule comprising the nucleic acid SEQ ID NO. 38947, preferably the coding region thereof, or a homolog or fragment thereof, e.g. derived from Escherichia coli, is increased or generated. For example the activity of a nucleic acid molecule or a polypeptide comprising the nucleic acid, preferably the coding region thereof, or polypeptide or the consensus sequence or the polypeptide motif, as depicted in Table I, II or IV, application No. 2, column 5 or 8 in the respective same line as the nucleic acid molecule SEQ ID NO. 38947 or polypeptide SEQ ID NO. 38948, respectively, or a homolog or a fragment thereof, is increased or generated, or if the activity transport protein is increased or generated in a non-human organism, like a microorganism or a plant cell, plant or part thereof, especially with non-targeted localization, whereby the respective line discloses in column 7 glutamine. For example, an increase of the glutamine of at least 1 percent, particularly in a range of 42 to 448-percent is conferred as compared to a corresponding non-transformed wild type non-human organism.

[8780] Accordingly, in one embodiment, an increase of proline in a non-human organism, as compared to a corresponding non-transformed wild type non-human organism, is conferred in the process of the invention, if the activity of a polypeptide showing the activity of a transport protein, or if the activity of the polypeptide B2063, preferably represented by SEQ ID NO. 38948, or a homolog or fragment thereof, or if the activity of a polypeptide encoded by a nucleic acid molecule comprising the nucleic acid SEQ ID NO. 38947, preferably the coding region thereof, or a homolog or fragment thereof, e.g. derived from Escherichia coli, is increased or generated. For example the activity of a nucleic acid molecule or a polypeptide comprising the nucleic acid, preferably the coding region thereof, or polypeptide or the consensus sequence or the polypeptide motif, as depicted in Table I, II or IV, application No. 2, column 5 or 8 in the respective same line as the nucleic acid molecule SEQ ID NO. 38947 or polypeptide SEQ ID NO. 38948, respectively, or a homolog or a fragment thereof, is increased or generated, or if the activity transport protein is increased or generated in a non-human organism, like a microorganism or a plant cell, plant or part thereof, especially with non-targeted localization, whereby the respective line discloses in column 7 proline. For example, an increase of the prolinelocalization, whereby the respective line discloses in column 7 proline. For example, an increase of the proline of at least 1 percent, particularly in a range of 54 to 722-percent is conferred as compared to a corresponding non-transformed wild type non-human organism.

[8781] Accordingly, in one embodiment, an increase of glutamine in a non-human organism, as compared to a corresponding non-transformed wild type non-human organism, is conferred in the process of the invention, if the activity of a polypeptide showing the activity of a uridine/cytidine kinase, or if the activity of the polypeptide B2066, preferably represented by SEQ ID NO. 8938, or a homolog or fragment thereof, or if the activity of a polypeptide encoded by a nucleic acid molecule comprising the nucleic acid SEQ ID NO. 8937, preferably the coding region thereof, or a homolog or fragment thereof, e.g. derived from Escherichia coli, is increased or generated. For example the activity of a nucleic acid molecule or a polypeptide comprising the nucleic acid, preferably the coding region thereof, or polypeptide or the consensus sequence or the polypeptide motif, as depicted in Table I, II or IV, application No. 2, column 5 or 8 in the respective same line as the nucleic acid molecule SEQ ID NO. 8937 or polypeptide SEQ ID NO. 8938, respectively, or a homolog or a fragment thereof, is increased or generated, or if the activity uridine/cytidine kinase is increased or generated in a non-human organism, like a microorganism or a plant cell, plant or part thereof, especially with mitochondrial localization, whereby the respective line discloses in column 7 glutamine. For example, an increase of the glutamine of at least 1 percent, particularly in a range of 58 to 476-percent is conferred as compared to a corresponding non-transformed wild type non-human organism.

[8782] Accordingly, in one embodiment, an increase of glutamate in a non-human organism, as compared to a corresponding non-transformed wild type non-human organism, is conferred in the process of the invention, if the activity of a polypeptide showing the activity of a b2107-protein, or if the activity of the polypeptide B2107, preferably represented by SEQ ID NO. 39003, or a homolog or fragment thereof, or if the activity of a polypeptide encoded by a nucleic acid molecule comprising the nucleic acid SEQ ID NO. 39002, preferably the coding region thereof, or a homolog or fragment thereof, e.g. derived from Escherichia coli, is increased or generated. For example the activity of a nucleic acid molecule or a polypeptide comprising the nucleic acid, preferably the coding region thereof, or polypeptide or the consensus sequence or the polypeptide motif, as depicted in Table I, II or IV, application No. 2, column 5 or 8 in the respective same line as the nucleic acid molecule SEQ ID NO. 39002 or polypeptide SEQ ID NO. 39003, respectively, or a homolog or a fragment thereof, is increased or generated, or if the activity b2107-protein is increased or generated in a non-human organism, like a microorganism or a plant cell, plant or part thereof, especially with non-targeted localization, whereby the respective line discloses in column 7 glutamate. For example, an increase of the glutamate of at least 1 percent, particularly in a range of 35 to 185-percent is conferred as compared to a corresponding non-transformed wild type non-human organism.

[8783] Accordingly, in one embodiment, an increase of glutamine in a non-human organism, as compared to a corresponding non-transformed wild type non-human organism, is conferred in the process of the invention, if the activity of a polypeptide showing the activity of a b2121-protein, or if the activity of the polypeptide B2121, preferably represented by SEQ ID NO. 39014, or a homolog or fragment thereof, or if the activity of a polypeptide encoded by a nucleic acid molecule comprising the nucleic acid SEQ ID NO. 39013, preferably the coding region thereof, or a homolog or fragment thereof, e.g. derived from Escherichia coli, is increased or generated. For example the activity of a nucleic acid molecule or a polypeptide comprising the nucleic acid, preferably the coding region thereof, or polypeptide or the consensus sequence or the polypeptide motif, as depicted in Table I, II or IV, application No. 2, column 5 or 8 in the respective same line as the nucleic acid molecule SEQ ID NO. 39013 or polypeptide SEQ ID NO. 39014, respectively, or a homolog or a fragment thereof, is increased or generated, or if the activity b2121-protein is increased or generated in a non-human organism, like a microorganism or a plant cell, plant or part thereof, especially with non-targeted localization, whereby the respective line discloses in column 7 glutamine. For example, an increase of the glutamine of at least 1 percent, particularly in a range of 70 to 156-percent is conferred as compared to a corresponding non-transformed wild type non-human organism.

[8784] Accordingly, in one embodiment, an increase of glutamate in a non-human organism, as compared to a corresponding non-transformed wild type non-human organism, is conferred in the process of the invention, if the activity of a polypeptide showing the activity of a ABC transporter permease protein, or if the activity of the polypeptide B2178, preferably represented by SEQ ID NO. 39041, or a homolog or fragment thereof, or if the activity of a polypeptide encoded by a nucleic acid molecule comprising the nucleic acid SEQ ID NO. 39040, preferably the coding region thereof, or a homolog or fragment thereof, e.g. derived from Escherichia coli, is increased or generated. For example the activity of a nucleic acid molecule or a polypeptide comprising the nucleic acid, preferably the coding region thereof, or polypeptide or the consensus sequence or the polypeptide motif, as depicted in Table I, II or IV, application No. 2, column 5 or 8 in the respective same line as the nucleic acid molecule SEQ ID NO. 39040 or polypeptide SEQ ID NO. 39041, respectively, or a homolog or a fragment thereof, is increased or generated, or if the activity ABC transporter permease protein is increased or generated in a non-human organism, like a microorganism or a plant cell, plant or part thereof, especially with non-targeted localization, whereby the respective line discloses in column 7 glutamate. For example, an increase of the glutamate of at least 1 percent, particularly in a range of 75 to 139-percent is conferred as compared to a corresponding non-transformed wild type non-human organism.

[8785] Accordingly, in one embodiment, an increase of glutamine in a non-human organism, as compared to a corresponding non-transformed wild type non-human organism, is conferred in the process of the invention, if the activity of a polypeptide showing the activity of a ABC transporter permease protein, or if the activity of the polypeptide B2178, preferably represented by SEQ ID NO. 39041, or a homolog or fragment thereof, or if the activity of a polypeptide encoded by a nucleic acid molecule comprising the nucleic acid SEQ ID NO. 39040, preferably the coding region thereof, or a homolog or fragment thereof, e.g. derived from Escherichia coli, is increased or generated. For example the activity of a nucleic acid molecule or a polypeptide comprising the nucleic acid, preferably the coding region thereof, or polypeptide or the consensus sequence or the polypeptide motif, as depicted in Table I, II or IV, application No. 2, column 5 or 8 in the respective same line as the nucleic acid molecule SEQ ID NO. 39040 or polypeptide SEQ ID NO. 39041, respectively, or a homolog or a fragment thereof, is increased or generated, or if the activity ABC transporter permease protein is increased or generated in a non-human organism, like a microorganism or a plant cell, plant or part thereof, especially with non-targeted localization, whereby the respective line discloses in column 7 glutamine. For example, an increase of the glutamine of at least 1 percent, particularly in a range of 43 to 350-percent is conferred as compared to a corresponding non-transformed wild type non-human organism.

[8786] Accordingly, in one embodiment, an increase of proline in a non-human organism, as compared to a corresponding non-transformed wild type non-human organism, is conferred in the process of the invention, if the activity of a polypeptide showing the activity of a ABC transporter permease protein, or if the activity of the polypeptide B2178, preferably represented by SEQ ID NO. 39041, or a homolog or fragment thereof, or if the activity of a polypeptide encoded by a nucleic acid molecule comprising the nucleic acid SEQ ID NO. 39040, preferably the coding region thereof, or a homolog or fragment thereof, e.g. derived from Escherichia coli, is increased or generated. For example the activity of a nucleic acid molecule or a polypeptide comprising the nucleic acid, preferably the coding region thereof, or polypeptide or the consensus sequence or the polypeptide motif, as depicted in Table I, II or IV, application No. 2, column 5 or 8 in the respective same line as the nucleic acid molecule SEQ ID NO. 39040 or polypeptide SEQ ID NO. 39041, respectively, or a homolog or a fragment thereof, is increased or generated, or if the activity ABC transporter permease protein is increased or generated in a non-human organism, like a microorganism or a plant cell, plant or part thereof, especially with non-targeted localization, whereby the respective line discloses in column 7 proline. For example, an increase of the prolinelocalization, whereby the respective line discloses in column 7 proline. For example, an increase of the proline of at least 1 percent, particularly in a range of 41 to 288 percent is conferred as compared to a corresponding non-transformed wild type non-human organism.

[8787] Accordingly, in one embodiment, an increase of glutamine in a non-human organism, as compared to a corresponding non-transformed wild type non-human organism, is conferred in the process of the invention, if the activity of a polypeptide showing the activity of a NADH dehydrogenase I chain I, or if the activity of the polypeptide B2281, preferably represented by SEQ ID NO. 39121, or a homolog or fragment thereof, or if the activity of a polypeptide encoded by a nucleic acid molecule comprising the nucleic acid SEQ ID NO. 39120, preferably the coding region thereof, or a homolog or fragment thereof, e.g. derived from Escherichia coli, is increased or generated. For example the activity of a nucleic acid molecule or a polypeptide comprising the nucleic acid, preferably the coding region thereof, or polypeptide or the consensus sequence or the polypeptide motif, as depicted in Table I, II or IV, application No. 2, column 5 or 8 in the respective same line as the nucleic acid molecule SEQ ID NO. 39120 or polypeptide SEQ ID NO. 39121, respectively, or a homolog or a fragment thereof, is increased or generated, or if the activity NADH dehydrogenase I chain I is increased or generated in a non-human organism, like a microorganism or a plant cell, plant or part thereof, especially with non-targeted localization, whereby the respective line discloses in column 7 glutamine. For example, an increase of the glutamine of at least 1 percent, particularly in a range of 76 to 275-percent is conferred as compared to a corresponding non-transformed wild type non-human organism.

[8788] Accordingly, in one embodiment, an increase of glutamate in a non-human organism, as compared to a corresponding non-transformed wild type non-human organism, is conferred in the process of the invention, if the activity of a polypeptide showing the activity of a b2360-protein, or if the activity of the polypeptide B2360, preferably represented by SEQ ID NO. 39220, or a homolog or fragment thereof, or if the activity of a polypeptide encoded by a nucleic acid molecule comprising the nucleic acid SEQ ID NO. 39219, preferably the coding region thereof, or a homolog or fragment thereof, e.g. derived from Escherichia coli, is increased or generated. For example the activity of a nucleic acid molecule or a polypeptide comprising the nucleic acid, preferably the coding region thereof, or polypeptide or the consensus sequence or the polypeptide motif, as depicted in Table I, II or IV, application No. 2, column 5 or 8 in the respective same line as the nucleic acid molecule SEQ ID NO. 39219 or polypeptide SEQ ID NO. 39220, respectively, or a homolog or a fragment thereof, is increased or generated, or if the activity b2360-protein is increased or generated in a non-human organism, like a microorganism or a plant cell, plant or part thereof, especially with non-targeted localization, whereby the respective line discloses in column 7 glutamate. For example, an increase of the glutamate of at least 1 percent, particularly in a range of 42 to 121-percent is conferred as compared to a corresponding non-transformed wild type non-human organism.

[8789] Accordingly, in one embodiment, an increase of proline in a non-human organism, as compared to a corresponding non-transformed wild type non-human organism, is conferred in the process of the invention, if the activity of a polypeptide showing the activity of a b2399-protein, or if the activity of the polypeptide B2399, preferably represented by SEQ ID NO. 39238, or a homolog or fragment thereof, or if the activity of a polypeptide encoded by a nucleic acid molecule comprising the nucleic acid SEQ ID NO. 39237, preferably the coding region thereof, or a homolog or fragment thereof, e.g. derived from Escherichia coli, is increased or generated. For example the activity of a nucleic acid molecule or a polypeptide comprising the nucleic acid, preferably the coding region thereof, or polypeptide or the consensus sequence or the polypeptide motif, as depicted in Table I, II or IV, application No. 2, column 5 or 8 in the respective same line as the nucleic acid molecule SEQ ID NO. 39237 or polypeptide SEQ ID NO. 39238, respectively, or a homolog or a fragment thereof, is increased or generated, or if the activity b2399-protein is increased or generated in a non-human organism, like a microorganism or a plant cell, plant or part thereof, especially with non-targeted localization, whereby the respective line discloses in column 7 proline. For example, an increase of the proline of at least 1 percent, particularly in a range of 146 to 3262-percent is conferred as compared to a corresponding non-transformed wild type non-human organism.

[8790] Accordingly, in one embodiment, an increase of glutamate in a non-human organism, as compared to a corresponding non-transformed wild type non-human organism, is conferred in the process of the invention, if the activity of a polypeptide showing the activity of a transcriptional regulator, or if the activity of the polypeptide B2405, preferably represented by SEQ ID NO. 39256, or a homolog or fragment thereof, or if the activity of a polypeptide encoded by a nucleic acid molecule comprising the nucleic acid SEQ ID NO. 39255, preferably the coding region thereof, or a homolog or fragment thereof, e.g. derived from Escherichia coli, is increased or generated. For example the activity of a nucleic acid molecule or a polypeptide comprising the nucleic acid, preferably the coding region thereof, or polypeptide or the consensus sequence or the polypeptide motif, as depicted in Table I, II or IV, application No. 2, column 5 or 8 in the respective same line as the nucleic acid molecule SEQ ID NO. 39255 or polypeptide SEQ ID NO. 39256, respectively, or a homolog or a fragment thereof, is increased or generated, or if the activity transcriptional regulator is increased or generated in a non-human organism, like a microorganism or a plant cell, plant or part thereof, especially with non-targeted localization, whereby the respective line discloses in column 7 glutamate. For example, an increase of the glutamate of at least 1 percent, particularly in a range of 33 to 66-percent is conferred as compared to a corresponding non-transformed wild type non-human organism.

[8791] Accordingly, in one embodiment, an increase of arginine in a non-human organism, as compared to a corresponding non-transformed wild type non-human organism, is conferred in the process of the invention, if the activity of a polypeptide showing the activity of a cysteine synthase A, or if the activity of the polypeptide B2414, preferably represented by SEQ ID NO. 39301, or a homolog or fragment thereof, or if the activity of a polypeptide encoded by a nucleic acid molecule comprising the nucleic acid SEQ ID NO. 39300, preferably the coding region thereof, or a homolog or fragment thereof, e.g. derived from Escherichia coli, is increased or generated. For example the activity of a nucleic acid molecule or a polypeptide comprising the nucleic acid, preferably the coding region thereof, or polypeptide or the consensus sequence or the polypeptide motif, as depicted in Table I, II or IV, application No. 2, column 5 or 8 in the respective same line as the nucleic acid molecule SEQ ID NO. 39300 or polypeptide SEQ ID NO. 39301, respectively, or a homolog or a fragment thereof, is increased or generated, or if the activity cysteine synthase A is increased or generated in a non-human organism, like a microorganism or a plant cell, plant or part thereof, especially with non-targeted localization, whereby the respective line discloses in column 7 arginine. For example, an increase of the arginine of at least 1 percent, particularly in a range of 49 to 161-percent is conferred as compared to a corresponding non-transformed wild type non-human organism.

[8792] Accordingly, in one embodiment, an increase of glutamate in a non-human organism, as compared to a corresponding non-transformed wild type non-human organism, is conferred in the process of the invention, if the activity of a polypeptide showing the activity of a cysteine synthase A, or if the activity of the polypeptide B2414, preferably represented by SEQ ID NO. 39301, or a homolog or fragment thereof, or if the activity of a polypeptide encoded by a nucleic acid molecule comprising the nucleic acid SEQ ID NO. 39300, preferably the coding region thereof, or a homolog or fragment thereof, e.g. derived from Escherichia coli, is increased or generated. For example the activity of a nucleic acid molecule or a polypeptide comprising the nucleic acid, preferably the coding region thereof, or polypeptide or the consensus sequence or the polypeptide motif, as depicted in Table I, II or IV, application No. 2, column 5 or 8 in the respective same line as the nucleic acid molecule SEQ ID NO. 39300 or polypeptide SEQ ID NO. 39301, respectively, or a homolog or a fragment thereof, is increased or generated, or if the activity cysteine synthase A is increased or generated in a non-human organism, like a microorganism or a plant cell, plant or part thereof, especially with non-targeted localization, whereby the respective line discloses in column 7 glutamate. For example, an increase of the glutamate of at least 1 percent, particularly in a range of 35 to 55-percent is conferred as compared to a corresponding non-transformed wild type non-human organism.

[8793] Accordingly, in one embodiment, an increase of proline in a non-human organism, as compared to a corresponding non-transformed wild type non-human organism, is conferred in the process of the invention, if the activity of a polypeptide showing the activity of a ethanolamine utilization protein, or if the activity of the polypeptide B2461, preferably represented by SEQ ID NO. 40300, or a homolog or fragment thereof, or if the activity of a polypeptide encoded by a nucleic acid molecule comprising the nucleic acid SEQ ID NO. 40299, preferably the coding region thereof, or a homolog or fragment thereof, e.g. derived from Escherichia coli, is increased or generated. For example the activity of a nucleic acid molecule or a polypeptide comprising the nucleic acid, preferably the coding region thereof, or polypeptide or the consensus sequence or the polypeptide motif, as depicted in Table I, II or IV, application No. 2, column 5 or 8 in the respective same line as the nucleic acid molecule SEQ ID NO. 40299 or polypeptide SEQ ID NO. 40300, respectively, or a homolog or a fragment thereof, is increased or generated, or if the activity ethanolamine utilization protein is increased or generated in a non-human organism, like a microorganism or a plant cell, plant or part thereof, especially with non-targeted localization, whereby the respective line discloses in column 7 proline. For example, an increase of the proline of at least 1 percent, particularly in a range of 40 to 408-percent is conferred as compared to a corresponding non-transformed wild type non-human organism.

[8794] Accordingly, in one embodiment, an increase of proline in a non-human organism, as compared to a corresponding non-transformed wild type non-human organism, is conferred in the process of the invention, if the activity of a polypeptide showing the activity of a b2474-protein, or if the activity of the polypeptide B2474, preferably represented by SEQ ID NO. 40330, or a homolog or fragment thereof, or if the activity of a polypeptide encoded by a nucleic acid molecule comprising the nucleic acid SEQ ID NO. 40329, preferably the coding region thereof, or a homolog or fragment thereof, e.g. derived from Escherichia coli, is increased or generated. For example the activity of a nucleic acid molecule or a polypeptide comprising the nucleic acid, preferably the coding region thereof, or polypeptide or the consensus sequence or the polypeptide motif, as depicted in Table I, II or IV, application No. 2, column 5 or 8 in the respective same line as the nucleic acid molecule SEQ ID NO. 40329 or polypeptide SEQ ID NO. 40330, respectively, or a homolog or a fragment thereof, is increased or generated, or if the activity b2474-protein is increased or generated in a non-human organism, like a microorganism or a plant cell, plant or part thereof, especially with non-targeted localization, whereby the respective line discloses in column 7 proline. For example, an increase of the proline of at least 1 percent, particularly in a range of 42 to 89-percent is conferred as compared to a corresponding non-transformed wild type non-human organism.

[8795] Accordingly, in one embodiment, an increase of glutamate in a non-human organism, as compared to a corresponding non-transformed wild type non-human organism, is conferred in the process of the invention, if the activity of a polypeptide showing the activity of a b2513-protein, or if the activity of the polypeptide B2513, preferably represented by SEQ ID NO. 9168, or a homolog or fragment thereof, or if the activity of a polypeptide encoded by a nucleic acid molecule comprising the nucleic acid SEQ ID NO. 9167, preferably the coding region thereof, or a homolog or fragment thereof, e.g. derived from Escherichia coli, is increased or generated. For example the activity of a nucleic acid molecule or a polypeptide comprising the nucleic acid, preferably the coding region thereof, or polypeptide or the consensus sequence or the polypeptide motif, as depicted in Table I, II or IV, application No. 2, column 5 or 8 in the respective same line as the nucleic acid molecule SEQ ID NO. 9167 or polypeptide SEQ ID NO. 9168, respectively, or a homolog or a fragment thereof, is increased or generated, or if the activity b2513-protein is increased or generated in a non-human organism, like a microorganism or a plant cell, plant or part thereof, especially with non-targeted localization, whereby the respective line discloses in column 7 glutamate. For example, an increase of the glutamate of at least 1 percent, particularly in a range of 39 to 228-percent is conferred as compared to a corresponding non-transformed wild type non-human organism.

[8796] Accordingly, in one embodiment, an increase of glutamine in a non-human organism, as compared to a corresponding non-transformed wild type non-human organism, is conferred in the process of the invention, if the activity of a polypeptide showing the activity of a b2513-protein, or if the activity of the polypeptide B2513, preferably represented by SEQ ID NO. 9168, or a homolog or fragment thereof, or if the activity of a polypeptide encoded by a nucleic acid molecule comprising the nucleic acid SEQ ID NO. 9167, preferably the coding region thereof, or a homolog or fragment thereof, e.g. derived from Escherichia coli, is increased or generated. For example the activity of a nucleic acid molecule or a polypeptide comprising the nucleic acid, preferably the coding region thereof, or polypeptide or the consensus sequence or the polypeptide motif, as depicted in Table I, II or IV, application No. 2, column 5 or 8 in the respective same line as the nucleic acid molecule SEQ ID NO. 9167 or polypeptide SEQ ID NO. 9168, respectively, or a homolog or a fragment thereof, is increased or generated, or if the activity b2513-protein is increased or generated in a non-human organism, like a microorganism or a plant cell, plant or part thereof, especially with non-targeted localization, whereby the respective line discloses in column 7 glutamine. For example, an increase of the glutamine of at least 1 percent, particularly in a range of 63 to 239-percent is conferred as compared to a corresponding non-transformed wild type non-human organism.

[8797] Accordingly, in one embodiment, an increase of arginine in a non-human organism, as compared to a corresponding non-transformed wild type non-human organism, is conferred in the process of the invention, if the activity of a polypeptide showing the activity of a 2,3-dihydroxy-2,3-dihydrophenylpropionatedehydrogenase, or if the activity of the polypeptide B2541, preferably represented by SEQ ID NO. 40384, or a homolog or fragment thereof, or if the activity of a polypeptide encoded by a nucleic acid molecule comprising the nucleic acid SEQ ID NO. 40383, preferably the coding region thereof, or a homolog or fragment thereof, e.g. derived from Escherichia coli, is increased or generated. For example the activity of a nucleic acid molecule or a polypeptide comprising the nucleic acid, preferably the coding region thereof, or polypeptide or the consensus sequence or the polypeptide motif, as depicted in Table I, II or IV, application No. 2, column 5 or 8 in the respective same line as the nucleic acid molecule SEQ ID NO. 40383 or polypeptide SEQ ID NO. 40384, respectively, or a homolog or a fragment thereof, is increased or generated, or if the activity 2,3-dihydroxy-2,3-dihydrophenylpropionatedehydrogenase is increased or generated in a non-human organism, like a microorganism or a plant cell, plant or part thereof, especially with non-targeted localization, whereby the respective line discloses in column 7 arginine. For example, an increase of the arginine of at least 1 percent, particularly in a range of 121 to 441-percent is conferred as compared to a corresponding non-transformed wild type non-human organism.

[8798] Accordingly, in one embodiment, an increase of glutamate in a non-human organism, as compared to a corresponding non-transformed wild type non-human organism, is conferred in the process of the invention, if the activity of a polypeptide showing the activity of a 2,3-dihydroxy-2,3-dihydrophenylpropionatedehydrogenase, or if the activity of the polypeptide B2541, preferably represented by SEQ ID NO. 40384, or a homolog or fragment thereof, or if the activity of a polypeptide encoded by a nucleic acid molecule comprising the nucleic acid SEQ ID NO. 40383, preferably the coding region thereof, or a homolog or fragment thereof, e.g. derived from Escherichia coli, is increased or generated. For example the activity of a nucleic acid molecule or a polypeptide comprising the nucleic acid, preferably the coding region thereof, or polypeptide or the consensus sequence or the polypeptide motif, as depicted in Table I, II or IV, application No. 2, column 5 or 8 in the respective same line as the nucleic acid molecule SEQ ID NO. 40383 or polypeptide SEQ ID NO. 40384, respectively, or a homolog or a fragment thereof, is increased or generated, or if the activity 2,3-dihydroxy-2,3-dihydrophenylpropionatedehydrogenase is increased or generated in a non-human organism, like a microorganism or a plant cell, plant or part thereof, especially with non-targeted localization, whereby the respective line discloses in column 7 glutamate. For example, an increase of the glutamate of at least 1 percent, particularly in a range of 40 to 107-percent is conferred as compared to a corresponding non-transformed wild type non-human organism.

[8799] Accordingly, in one embodiment, an increase of glutamine in a non-human organism, as compared to a corresponding non-transformed wild type non-human organism, is conferred in the process of the invention, if the activity of a polypeptide showing the activity of a b2548-protein, or if the activity of the polypeptide B2548, preferably represented by SEQ ID NO. 40638, or a homolog or fragment thereof, or if the activity of a polypeptide encoded by a nucleic acid molecule comprising the nucleic acid SEQ ID NO. 40637, preferably the coding region thereof, or a homolog or fragment thereof, e.g. derived from Escherichia coli, is increased or generated. For example the activity of a nucleic acid molecule or a polypeptide comprising the nucleic acid, preferably the coding region thereof, or polypeptide or the consensus sequence or the polypeptide motif, as depicted in Table I, II or IV, application No. 2, column 5 or 8 in the respective same line as the nucleic acid molecule SEQ ID NO. 40637 or polypeptide SEQ ID NO. 40638, respectively, or a homolog or a fragment thereof, is increased or generated, or if the activity b2548-protein is increased or generated in a non-human organism, like a microorganism or a plant cell, plant or part thereof, especially with non-targeted localization, whereby the respective line discloses in column 7 glutamine. For example, an increase of the glutamine of at least 1 percent, particularly in a range of 36 to 62-percent is conferred as compared to a corresponding non-transformed wild type non-human organism.

[8800] Accordingly, in one embodiment, an increase of glutamine in a non-human organism, as compared to a corresponding non-transformed wild type non-human organism, is conferred in the process of the invention, if the activity of a polypeptide showing the activity of a b2613-protein, or if the activity of the polypeptide B2613, preferably represented by SEQ ID NO. 40666, or a homolog or fragment thereof, or if the activity of a polypeptide encoded by a nucleic acid molecule comprising the nucleic acid SEQ ID NO. 40665, preferably the coding region thereof, or a homolog or fragment thereof, e.g. derived from Escherichia coli, is increased or generated. For example the activity of a nucleic acid molecule or a polypeptide comprising the nucleic acid, preferably the coding region thereof, or polypeptide or the consensus sequence or the polypeptide motif, as depicted in Table I, II or IV, application No. 2, column 5 or 8 in the respective same line as the nucleic acid molecule SEQ ID NO. 40665 or polypeptide SEQ ID NO. 40666, respectively, or a homolog or a fragment thereof, is increased or generated, or if the activity b2613-protein is increased or generated in a non-human organism, like a microorganism or a plant cell, plant or part thereof, especially with non-targeted localization, whereby the respective line discloses in column 7 glutamine. For example, an increase of the glutamine of at least 1 percent, particularly in a range of 38 to 52-percent is conferred as compared to a corresponding non-transformed wild type non-human organism.

[8801] Accordingly, in one embodiment, an increase of proline in a non-human organism, as compared to a corresponding non-transformed wild type non-human organism, is conferred in the process of the invention, if the activity of a polypeptide showing the activity of a b2613-protein, or if the activity of the polypeptide B2613, preferably represented by SEQ ID NO. 40666, or a homolog or fragment thereof, or if the activity of a polypeptide encoded by a nucleic acid molecule comprising the nucleic acid SEQ ID NO. 40665, preferably the coding region thereof, or a homolog or fragment thereof, e.g. derived from Escherichia coli, is increased or generated. For example the activity of a nucleic acid molecule or a polypeptide comprising the nucleic acid, preferably the coding region thereof, or polypeptide or the consensus sequence or the polypeptide motif, as depicted in Table I, II or IV, application No. 2, column 5 or 8 in the respective same line as the nucleic acid molecule SEQ ID NO. 40665 or polypeptide SEQ ID NO. 40666, respectively, or a homolog or a fragment thereof, is increased or generated, or if the activity b2613-protein is increased or generated in a non-human organism, like a microorganism or a plant cell, plant or part thereof, especially with non-targeted localization, whereby the respective line discloses in column 7 proline. For example, an increase of the proline of at least 1 percent, particularly in a range of 33 to 191-percent is conferred as compared to a corresponding non-transformed wild type non-human organism.

[8802] Accordingly, in one embodiment, an increase of glutamate in a non-human organism, as compared to a corresponding non-transformed wild type non-human organism, is conferred in the process of the invention, if the activity of a polypeptide showing the activity of a transcriptional regulator, or if the activity of the polypeptide B2634, preferably represented by SEQ ID NO. 40727, or a homolog or fragment thereof, or if the activity of a polypeptide encoded by a nucleic acid molecule comprising the nucleic acid SEQ ID NO. 40726, preferably the coding region thereof, or a homolog or fragment thereof, e.g. derived from Escherichia coli, is increased or generated. For example the activity of a nucleic acid molecule or a polypeptide comprising the nucleic acid, preferably the coding region thereof, or polypeptide or the consensus sequence or the polypeptide motif, as depicted in Table I, II or IV, application No. 2, column 5 or 8 in the respective same line as the nucleic acid molecule SEQ ID NO. 40726 or polypeptide SEQ ID NO. 40727, respectively, or a homolog or a fragment thereof, is increased or generated, or if the activity transcriptional regulator is increased or generated in a non-human organism, like a microorganism or a plant cell, plant or part thereof, especially with non-targeted localization, whereby the respective line discloses in column 7 glutamate. For example, an increase of the glutamate of at least 1 percent, particularly in a range of 56 to 220-percent is conferred as compared to a corresponding non-transformed wild type non-human organism.

[8803] Accordingly, in one embodiment, an increase of glutamine in a non-human organism, as compared to a corresponding non-transformed wild type non-human organism, is conferred in the process of the invention, if the activity of a polypeptide showing the activity of a transcriptional regulator, or if the activity of the polypeptide B2634, preferably represented by SEQ ID NO. 40727, or a homolog or fragment thereof, or if the activity of a polypeptide encoded by a nucleic acid molecule comprising the nucleic acid SEQ ID NO. 40726, preferably the coding region thereof, or a homolog or fragment thereof, e.g. derived from Escherichia coli, is increased or generated. For example the activity of a nucleic acid molecule or a polypeptide comprising the nucleic acid, preferably the coding region thereof, or polypeptide or the consensus sequence or the polypeptide motif, as depicted in Table I, II or IV, application No. 2, column 5 or 8 in the respective same line as the nucleic acid molecule SEQ ID NO. 40726 or polypeptide SEQ ID NO. 40727, respectively, or a homolog or a fragment thereof, is increased or generated, or if the activity transcriptional regulator is increased or generated in a non-human organism, like a microorganism or a plant cell, plant or part thereof, especially with non-targeted localization, whereby the respective line discloses in column 7 glutamine. For example, an increase of the glutamine of at least 1 percent, particularly in a range of 92 to 1167-percent is conferred as compared to a corresponding non-transformed wild type non-human organism.

[8804] Accordingly, in one embodiment, an increase of proline in a non-human organism, as compared to a corresponding non-transformed wild type non-human organism, is conferred in the process of the invention, if the activity of a polypeptide showing the activity of a transcriptional regulator, or if the activity of the polypeptide B2634, preferably represented by SEQ ID NO. 40727, or a homolog or fragment thereof, or if the activity of a polypeptide encoded by a nucleic acid molecule comprising the nucleic acid SEQ ID NO. 40726, preferably the coding region thereof, or a homolog or fragment thereof, e.g. derived from Escherichia coli, is increased or generated. For example the activity of a nucleic acid molecule or a polypeptide comprising the nucleic acid, preferably the coding region thereof, or polypeptide or the consensus sequence or the polypeptide motif, as depicted in Table I, II or IV, application No. 2, column 5 or 8 in the respective same line as the nucleic acid molecule SEQ ID NO. 40726 or polypeptide SEQ ID NO. 40727, respectively, or a homolog or a fragment thereof, is increased or generated, or if the activity transcriptional regulator is increased or generated in a non-human organism, like a microorganism or a plant cell, plant or part thereof, especially with non-targeted localization, whereby the respective line discloses in column 7 proline. For example, an increase of the proline of at least 1 percent, particularly in a range of 54 to 1631-percent is conferred as compared to a corresponding non-transformed wild type non-human organism.

[8805] Accordingly, in one embodiment, an increase of glutamate in a non-human organism, as compared to a corresponding non-transformed wild type non-human organism, is conferred in the process of the invention, if the activity of a polypeptide showing the activity of a b2673-protein, or if the activity of the polypeptide B2673, preferably represented by SEQ ID NO. 9245, or a homolog or fragment thereof, or if the activity of a polypeptide encoded by a nucleic acid molecule comprising the nucleic acid SEQ ID NO. 9244, preferably the coding region thereof, or a homolog or fragment thereof, e.g. derived from Escherichia coli, is increased or generated. For example the activity of a nucleic acid molecule or a polypeptide comprising the nucleic acid, preferably the coding region thereof, or polypeptide or the consensus sequence or the polypeptide motif, as depicted in Table I, II or IV, application No. 2, column 5 or 8 in the respective same line as the nucleic acid molecule SEQ ID NO. 9244 or polypeptide SEQ ID NO. 9245, respectively, or a homolog or a fragment thereof, is increased or generated, or if the activity b2673-protein is increased or generated in a non-human organism, like a microorganism or a plant cell, plant or part thereof, especially with non-targeted localization, whereby the respective line discloses in column 7 glutamate. For example, an increase of the glutamate of at least 1 percent, particularly in a range of 102 to 157-percent is conferred as compared to a corresponding non-transformed wild type non-human organism.

[8806] Accordingly, in one embodiment, an increase of glutamine in a non-human organism, as compared to a corresponding non-transformed wild type non-human organism, is conferred in the process of the invention, if the activity of a polypeptide showing the activity of a b2673-protein, or if the activity of the polypeptide B2673, preferably represented by SEQ ID NO. 9245, or a homolog or fragment thereof, or if the activity of a polypeptide encoded by a nucleic acid molecule comprising the nucleic acid SEQ ID NO. 9244, preferably the coding region thereof, or a homolog or fragment thereof, e.g. derived from Escherichia coli, is increased or generated. For example the activity of a nucleic acid molecule or a polypeptide comprising the nucleic acid, preferably the coding region thereof, or polypeptide or the consensus sequence or the polypeptide motif, as depicted in Table I, II or IV, application No. 2, column 5 or 8 in the respective same line as the nucleic acid molecule SEQ ID NO. 9244 or polypeptide SEQ ID NO. 9245, respectively, or a homolog or a fragment thereof, is increased or generated, or if the activity b2673-protein is increased or generated in a non-human organism, like a microorganism or a plant cell, plant or part thereof, especially with non-targeted localization, whereby the respective line discloses in column 7 glutamine. For example, an increase of the glutamine of at least 1 percent, particularly in a range of 126 to 263-percent is conferred as compared to a corresponding non-transformed wild type non-human organism.

[8807] Accordingly, in one embodiment, an increase of glutamine in a non-human organism, as compared to a corresponding non-transformed wild type non-human organism, is conferred in the process of the invention, if the activity of a polypeptide showing the activity of a transcriptional regulator, or if the activity of the polypeptide B2714, preferably represented by SEQ ID NO. 40742, or a homolog or fragment thereof, or if the activity of a polypeptide encoded by a nucleic acid molecule comprising the nucleic acid SEQ ID NO. 40741, preferably the coding region thereof, or a homolog or fragment thereof, e.g. derived from Escherichia coli, is increased or generated. For example the activity of a nucleic acid molecule or a polypeptide comprising the nucleic acid, preferably the coding region thereof, or polypeptide or the consensus sequence or the polypeptide motif, as depicted in Table I, II or IV, application No. 2, column 5 or 8 in the respective same line as the nucleic acid molecule SEQ ID NO. 40741 or polypeptide SEQ ID NO. 40742, respectively, or a homolog or a fragment thereof, is increased or generated, or if the activity transcriptional regulator is increased or generated in a non-human organism, like a microorganism or a plant cell, plant or part thereof, especially with non-targeted localization, whereby the respective line discloses in column 7 glutamine. For example, an increase of the glutamine of at least 1 percent, particularly in a range of 37 to 46-percent is conferred as compared to a corresponding non-transformed wild type non-human organism.

[8808] Accordingly, in one embodiment, an increase of proline in a non-human organism, as compared to a corresponding non-transformed wild type non-human organism, is conferred in the process of the invention, if the activity of a polypeptide showing the activity of a transcriptional regulator, or if the activity of the polypeptide B2714, preferably represented by SEQ ID NO. 40742, or a homolog or fragment thereof, or if the activity of a polypeptide encoded by a nucleic acid molecule comprising the nucleic acid SEQ ID NO. 40741, preferably the coding region thereof, or a homolog or fragment thereof, e.g. derived from Escherichia coli, is increased or generated. For example the activity of a nucleic acid molecule or a polypeptide comprising the nucleic acid, preferably the coding region thereof, or polypeptide or the consensus sequence or the polypeptide motif, as depicted in Table I, II or IV, application No. 2, column 5 or 8 in the respective same line as the nucleic acid molecule SEQ ID NO. 40741 or polypeptide SEQ ID NO. 40742, respectively, or a homolog or a fragment thereof, is increased or generated, or if the activity transcriptional regulator is increased or generated in a non-human organism, like a microorganism or a plant cell, plant or part thereof, especially with non-targeted localization, whereby the respective line discloses in column 7 proline. For example, an increase of the proline of at least 1 percent, particularly in a range of 50 to 67-percent is conferred as compared to a corresponding non-transformed wild type non-human organism.

[8809] Accordingly, in one embodiment, an increase of glutamate in a non-human organism, as compared to a corresponding non-transformed wild type non-human organism, is conferred in the process of the invention, if the activity of a polypeptide showing the activity of a b2812-protein, or if the activity of the polypeptide B2812, preferably represented by SEQ ID NO. 40796, or a homolog or fragment thereof, or if the activity of a polypeptide encoded by a nucleic acid molecule comprising the nucleic acid SEQ ID NO. 40795, preferably the coding region thereof, or a homolog or fragment thereof, e.g. derived from Escherichia coli, is increased or generated. For example the activity of a nucleic acid molecule or a polypeptide comprising the nucleic acid, preferably the coding region thereof, or polypeptide or the consensus sequence or the polypeptide motif, as depicted in Table I, II or IV, application No. 2, column 5 or 8 in the respective same line as the nucleic acid molecule SEQ ID NO. 40795 or polypeptide SEQ ID NO. 40796, respectively, or a homolog or a fragment thereof, is increased or generated, or if the activity b2812-protein is increased or generated in a non-human organism, like a microorganism or a plant cell, plant or part thereof, especially with non-targeted localization, whereby the respective line discloses in column 7 glutamate. For example, an increase of the glutamate of at least 1 percent, particularly in a range of 37 to 130-percent is conferred as compared to a corresponding non-transformed wild type non-human organism.

[8810] Accordingly, in one embodiment, an increase of glutamine in a non-human organism, as compared to a corresponding non-transformed wild type non-human organism, is conferred in the process of the invention, if the activity of a polypeptide showing the activity of a b2812-protein, or if the activity of the polypeptide B2812, preferably represented by SEQ ID NO. 40796, or a homolog or fragment thereof, or if the activity of a polypeptide encoded by a nucleic acid molecule comprising the nucleic acid SEQ ID NO. 40795, preferably the coding region thereof, or a homolog or fragment thereof, e.g. derived from Escherichia coli, is increased or generated. For example the activity of a nucleic acid molecule or a polypeptide comprising the nucleic acid, preferably the coding region thereof, or polypeptide or the consensus sequence or the polypeptide motif, as depicted in Table I, II or IV, application No. 2, column 5 or 8 in the respective same line as the nucleic acid molecule SEQ ID NO. 40795 or polypeptide SEQ ID NO. 40796, respectively, or a homolog or a fragment thereof, is increased or generated, or if the activity b2812-protein is increased or generated in a non-human organism, like a microorganism or a plant cell, plant or part thereof, especially with non-targeted localization, whereby the respective line discloses in column 7 glutamine. For example, an increase of the glutamine of at least 1 percent, particularly in a range of 32 to 50-percent is conferred as compared to a corresponding non-transformed wild type non-human organism.

[8811] Accordingly, in one embodiment, an increase of proline in a non-human organism, as compared to a corresponding non-transformed wild type non-human organism, is conferred in the process of the invention, if the activity of a polypeptide showing the activity of a b2812-protein, or if the activity of the polypeptide B2812, preferably represented by SEQ ID NO. 40796, or a homolog or fragment thereof, or if the activity of a polypeptide encoded by a nucleic acid molecule comprising the nucleic acid SEQ ID NO. 40795, preferably the coding region thereof, or a homolog or fragment thereof, e.g. derived from Escherichia coli, is increased or generated. For example the activity of a nucleic acid molecule or a polypeptide comprising the nucleic acid, preferably the coding region thereof, or polypeptide or the consensus sequence or the polypeptide motif, as depicted in Table I, II or IV, application No. 2, column 5 or 8 in the respective same line as the nucleic acid molecule SEQ ID NO. 40795 or polypeptide SEQ ID NO. 40796, respectively, or a homolog or a fragment thereof, is increased or generated, or if the activity b2812-protein is increased or generated in a non-human organism, like a microorganism or a plant cell, plant or part thereof, especially with non-targeted localization, whereby the respective line discloses in column 7 proline. For example, an increase of the proline of at least 1 percent, particularly in a range of 43 to 104-percent is conferred as compared to a corresponding non-transformed wild type non-human organism.

[8812] Accordingly, in one embodiment, an increase of proline in a non-human organism, as compared to a corresponding non-transformed wild type non-human organism, is conferred in the process of the invention, if the activity of a polypeptide showing the activity of a b2846-protein, or if the activity of the polypeptide B2846, preferably represented by SEQ ID NO. 40985, or a homolog or fragment thereof, or if the activity of a polypeptide encoded by a nucleic acid molecule comprising the nucleic acid SEQ ID NO. 40984, preferably the coding region thereof, or a homolog or fragment thereof, e.g. derived from Escherichia coli, is increased or generated. For example the activity of a nucleic acid molecule or a polypeptide comprising the nucleic acid, preferably the coding region thereof, or polypeptide or the consensus sequence or the polypeptide motif, as depicted in Table I, II or IV, application No. 2, column 5 or 8 in the respective same line as the nucleic acid molecule SEQ ID NO. 40984 or polypeptide SEQ ID NO. 40985, respectively, or a homolog or a fragment thereof, is increased or generated, or if the activity b2846-protein is increased or generated in a non-human organism, like a microorganism or a plant cell, plant or part thereof, especially with non-targeted localization, whereby the respective line discloses in column 7 proline. For example, an increase of the proline of at least 1 percent, particularly in a range of 50 to 63-percent is conferred as compared to a corresponding non-transformed wild type non-human organism.

[8813] Accordingly, in one embodiment, an increase of arginine in a non-human organism, as compared to a corresponding non-transformed wild type non-human organism, is conferred in the process of the invention, if the activity of a polypeptide showing the activity of a b2909-protein, or if the activity of the polypeptide B2909, preferably represented by SEQ ID NO. 41007, or a homolog or fragment thereof, or if the activity of a polypeptide encoded by a nucleic acid molecule comprising the nucleic acid SEQ ID NO. 41006, preferably the coding region thereof, or a homolog or fragment thereof, e.g. derived from Escherichia coli, is increased or generated. For example the activity of a nucleic acid molecule or a polypeptide comprising the nucleic acid, preferably the coding region thereof, or polypeptide or the consensus sequence or the polypeptide motif, as depicted in Table I, II or IV, application No. 2, column 5 or 8 in the respective same line as the nucleic acid molecule SEQ ID NO. 41006 or polypeptide SEQ ID NO. 41007, respectively, or a homolog or a fragment thereof, is increased or generated, or if the activity b2909-protein is increased or generated in a non-human organism, like a microorganism or a plant cell, plant or part thereof, especially with non-targeted localization, whereby the respective line discloses in column 7 arginine. For example, an increase of the arginine of at least 1 percent, particularly in a range of 69 to 445-percent is conferred as compared to a corresponding non-transformed wild type non-human organism.

[8814] Accordingly, in one embodiment, an increase of proline in a non-human organism, as compared to a corresponding non-transformed wild type non-human organism, is conferred in the process of the invention, if the activity of a polypeptide showing the activity of a b2909-protein, or if the activity of the polypeptide B2909, preferably represented by SEQ ID NO. 41007, or a homolog or fragment thereof, or if the activity of a polypeptide encoded by a nucleic acid molecule comprising the nucleic acid SEQ ID NO. 41006, preferably the coding region thereof, or a homolog or fragment thereof, e.g. derived from Escherichia coli, is increased or generated. For example the activity of a nucleic acid molecule or a polypeptide comprising the nucleic acid, preferably the coding region thereof, or polypeptide or the consensus sequence or the polypeptide motif, as depicted in Table I, II or IV, application No. 2, column 5 or 8 in the respective same line as the nucleic acid molecule SEQ ID NO. 41006 or polypeptide SEQ ID NO. 41007, respectively, or a homolog or a fragment thereof, is increased or generated, or if the activity b2909-protein is increased or generated in a non-human organism, like a microorganism or a plant cell, plant or part thereof, especially with non-targeted localization, whereby the respective line discloses in column 7 proline. For example, an increase of the proline of at least 1 percent, particularly in a range of 39 to 248-percent is conferred as compared to a corresponding non-transformed wild type non-human organism.

[8815] Accordingly, in one embodiment, an increase of glutamate in a non-human organism, as compared to a corresponding non-transformed wild type non-human organism, is conferred in the process of the invention, if the activity of a polypeptide showing the activity of a ribosephosphate isomerase, constitutive, or if the activity of the polypeptide B2914, preferably represented by SEQ ID NO. 41074, or a homolog or fragment thereof, or if the activity of a polypeptide encoded by a nucleic acid molecule comprising the nucleic acid SEQ ID NO. 41073, preferably the coding region thereof, or a homolog or fragment thereof, e.g. derived from Escherichia coli, is increased or generated. For example the activity of a nucleic acid molecule or a polypeptide comprising the nucleic acid, preferably the coding region thereof, or polypeptide or the consensus sequence or the polypeptide motif, as depicted in Table I, II or IV, application No. 2, column 5 or 8 in the respective same line as the nucleic acid molecule SEQ ID NO. 41073 or polypeptide SEQ ID NO. 41074, respectively, or a homolog or a fragment thereof, is increased or generated, or if the activity ribosephosphate isomerase, constitutive is increased or generated in a non-human organism, like a microorganism or a plant cell, plant or part thereof, especially with non-targeted localization, whereby the respective line discloses in column 7 glutamate. For example, an increase of the glutamate of at least 1 percent, particularly in a range of 44 to 95 percent is conferred as compared to a corresponding non-transformed wild type non-human organism.

[8816] Accordingly, in one embodiment, an increase of glutamate in a non-human organism, as compared to a corresponding non-transformed wild type non-human organism, is conferred in the process of the invention, if the activity of a polypeptide showing the activity of a arginine exporter protein, or if the activity of the polypeptide B2923, preferably represented by SEQ ID NO. 9334, or a homolog or fragment thereof, or if the activity of a polypeptide encoded by a nucleic acid molecule comprising the nucleic acid SEQ ID NO. 9333, preferably the coding region thereof, or a homolog or fragment thereof, e.g. derived from Escherichia coli, is increased or generated. For example the activity of a nucleic acid molecule or a polypeptide comprising the nucleic acid, preferably the coding region thereof, or polypeptide or the consensus sequence or the polypeptide motif, as depicted in Table I, II or IV, application No. 2, column 5 or 8 in the respective same line as the nucleic acid molecule SEQ ID NO. 9333 or polypeptide SEQ ID NO. 9334, respectively, or a homolog or a fragment thereof, is increased or generated, or if the activity arginine exporter protein is increased or generated in a non-human organism, like a microorganism or a plant cell, plant or part thereof, especially with non-targeted localization, whereby the respective line discloses in column 7 glutamate. For example, an increase of the glutamate of at least 1 percent, particularly in a range of 41 to 77-percent is conferred as compared to a corresponding non-transformed wild type non-human organism.

[8817] Accordingly, in one embodiment, an increase of proline in a non-human organism, as compared to a corresponding non-transformed wild type non-human organism, is conferred in the process of the invention, if the activity of a polypeptide showing the activity of a b2936-protein, or if the activity of the polypeptide B2936, preferably represented by SEQ ID NO. 41443, or a homolog or fragment thereof, or if the activity of a polypeptide encoded by a nucleic acid molecule comprising the nucleic acid SEQ ID NO. 41442, preferably the coding region thereof, or a homolog or fragment thereof, e.g. derived from Escherichia coli, is increased or generated. For example the activity of a nucleic acid molecule or a polypeptide comprising the nucleic acid, preferably the coding region thereof, or polypeptide or the consensus sequence or the polypeptide motif, as depicted in Table I, II or IV, application No. 2, column 5 or 8 in the respective same line as the nucleic acid molecule SEQ ID NO. 41442 or polypeptide SEQ ID NO. 41443, respectively, or a homolog or a fragment thereof, is increased or generated, or if the activity b2936-protein is increased or generated in a non-human organism, like a microorganism or a plant cell, plant or part thereof, especially with non-targeted localization, whereby the respective line discloses in column 7 proline. For example, an increase of the proline of at least 1 percent, particularly in a range of 50 to 178-percent is conferred as compared to a corresponding non-transformed wild type non-human organism.

[8818] Accordingly, in one embodiment, an increase of proline in a non-human organism, as compared to a corresponding non-transformed wild type non-human organism, is conferred in the process of the invention, if the activity of a polypeptide showing the activity of a L-asparaginase, or if the activity of the polypeptide B2957, preferably represented by SEQ ID NO. 41500, or a homolog or fragment thereof, or if the activity of a polypeptide encoded by a nucleic acid molecule comprising the nucleic acid SEQ ID NO. 41499, preferably the coding region thereof, or a homolog or fragment thereof, e.g. derived from Escherichia coli, is increased or generated. For example the activity of a nucleic acid molecule or a polypeptide comprising the nucleic acid, preferably the coding region thereof, or polypeptide or the consensus sequence or the polypeptide motif, as depicted in Table I, II or IV, application No. 2, column 5 or 8 in the respective same line as the nucleic acid molecule SEQ ID NO. 41499 or polypeptide SEQ ID NO. 41500, respectively, or a homolog or a fragment thereof, is increased or generated, or if the activity L-asparaginase is increased or generated in a non-human organism, like a microorganism or a plant cell, plant or part thereof, especially with non-targeted localization, whereby the respective line discloses in column 7 proline. For example, an increase of the proline of at least 1 percent, particularly in a range of 34 to 262-percent is conferred as compared to a corresponding non-transformed wild type non-human organism.

[8819] Accordingly, in one embodiment, an increase of proline in a non-human organism, as compared to a corresponding non-transformed wild type non-human organism, is conferred in the process of the invention, if the activity of a polypeptide showing the activity of a murein transglycosylase, or if the activity of the polypeptide B2963, preferably represented by SEQ ID NO. 41733, or a homolog or fragment thereof, or if the activity of a polypeptide encoded by a nucleic acid molecule comprising the nucleic acid SEQ ID NO. 41732, preferably the coding region thereof, or a homolog or fragment thereof, e.g. derived from Escherichia coli, is increased or generated. For example the activity of a nucleic acid molecule or a polypeptide comprising the nucleic acid, preferably the coding region thereof, or polypeptide or the consensus sequence or the polypeptide motif, as depicted in Table I, II or IV, application No. 2, column 5 or 8 in the respective same line as the nucleic acid molecule SEQ ID NO. 41732 or polypeptide SEQ ID NO. 41733, respectively, or a homolog or a fragment thereof, is increased or generated, or if the activity murein transglycosylase is increased or generated in a non-human organism, like a microorganism or a plant cell, plant or part thereof, especially with plastidic localization, whereby the respective line discloses in column 7 proline. For example, an increase of the proline of at least 1 percent, particularly in a range of 53 to 57-percent is conferred as compared to a corresponding non-transformed wild type non-human organism.

[8820] Accordingly, in one embodiment, an increase of arginine in a non-human organism, as compared to a corresponding non-transformed wild type non-human organism, is conferred in the process of the invention, if the activity of a polypeptide showing the activity of a b2999-protein, or if the activity of the polypeptide B2999, preferably represented by SEQ ID NO. 41798, or a homolog or fragment thereof, or if the activity of a polypeptide encoded by a nucleic acid molecule comprising the nucleic acid SEQ ID NO. 41797, preferably the coding region thereof, or a homolog or fragment thereof, e.g. derived from Escherichia coli, is increased or generated. For example the activity of a nucleic acid molecule or a polypeptide comprising the nucleic acid, preferably the coding region thereof, or polypeptide or the consensus sequence or the polypeptide motif, as depicted in Table I, II or IV, application No. 2, column 5 or 8 in the respective same line as the nucleic acid molecule SEQ ID NO. 41797 or polypeptide SEQ ID NO. 41798, respectively, or a homolog or a fragment thereof, is increased or generated, or if the activity b2999-protein is increased or generated in a non-human organism, like a microorganism or a plant cell, plant or part thereof, especially with non-targeted localization, whereby the respective line discloses in column 7 arginine. For example, an increase of the arginine of at least 1 percent, particularly in a range of 52 to 278-percent is conferred as compared to a corresponding non-transformed wild type non-human organism.

[8821] Accordingly, in one embodiment, an increase of proline in a non-human organism, as compared to a corresponding non-transformed wild type non-human organism, is conferred in the process of the invention, if the activity of a polypeptide showing the activity of a glycoprotease, or if the activity of the polypeptide B3064, preferably represented by SEQ ID NO. 42047, or a homolog or fragment thereof, or if the activity of a polypeptide encoded by a nucleic acid molecule comprising the nucleic acid SEQ ID NO. 42046, preferably the coding region thereof, or a homolog or fragment thereof, e.g. derived from Escherichia coli, is increased or generated. For example the activity of a nucleic acid molecule or a polypeptide comprising the nucleic acid, preferably the coding region thereof, or polypeptide or the consensus sequence or the polypeptide motif, as depicted in Table I, II or IV, application No. 2, column 5 or 8 in the respective same line as the nucleic acid molecule SEQ ID NO. 42046 or polypeptide SEQ ID NO. 42047, respectively, or a homolog or a fragment thereof, is increased or generated, or if the activity glycoprotease is increased or generated in a non-human organism, like a microorganism or a plant cell, plant or part thereof, especially with non-targeted localization, whereby the respective line discloses in column 7 proline. For example, an increase of the proline of at least 1 percent, particularly in a range of 57 to 255-percent is conferred as compared to a corresponding non-transformed wild type non-human organism.

[8822] Accordingly, in one embodiment, an increase of arginine in a non-human organism, as compared to a corresponding non-transformed wild type non-human organism, is conferred in the process of the invention, if the activity of a polypeptide showing the activity of a b3121-protein, or if the activity of the polypeptide B3121, preferably represented by SEQ ID NO. 42472, or a homolog or fragment thereof, or if the activity of a polypeptide encoded by a nucleic acid molecule comprising the nucleic acid SEQ ID NO. 42471, preferably the coding region thereof, or a homolog or fragment thereof, e.g. derived from Escherichia coli, is increased or generated. For example the activity of a nucleic acid molecule or a polypeptide comprising the nucleic acid, preferably the coding region thereof, or polypeptide or the consensus sequence or the polypeptide motif, as depicted in Table I, II or IV, application No. 2, column 5 or 8 in the respective same line as the nucleic acid molecule SEQ ID NO. 42471 or polypeptide SEQ ID NO. 42472, respectively, or a homolog or a fragment thereof, is increased or generated, or if the activity b3121-protein is increased or generated in a non-human organism, like a microorganism or a plant cell, plant or part thereof, especially with non-targeted localization, whereby the respective line discloses in column 7 arginine. For example, an increase of the arginine of at least 1 percent, particularly in a range of 63 to 201-percent is conferred as compared to a corresponding non-transformed wild type non-human organism.

[8823] Accordingly, in one embodiment, an increase of proline in a non-human organism, as compared to a corresponding non-transformed wild type non-human organism, is conferred in the process of the invention, if the activity of a polypeptide showing the activity of a b3121-protein, or if the activity of the polypeptide B3121, preferably represented by SEQ ID NO. 42472, or a homolog or fragment thereof, or if the activity of a polypeptide encoded by a nucleic acid molecule comprising the nucleic acid SEQ ID NO. 42471, preferably the coding region thereof, or a homolog or fragment thereof, e.g. derived from Escherichia coli, is increased or generated. For example the activity of a nucleic acid molecule or a polypeptide comprising the nucleic acid, preferably the coding region thereof, or polypeptide or the consensus sequence or the polypeptide motif, as depicted in Table I, II or IV, application No. 2, column 5 or 8 in the respective same line as the nucleic acid molecule SEQ ID NO. 42471 or polypeptide SEQ ID NO. 42472, respectively, or a homolog or a fragment thereof, is increased or generated, or if the activity b3121-protein is increased or generated in a non-human organism, like a microorganism or a plant cell, plant or part thereof, especially with non-targeted localization, whereby the respective line discloses in column 7 proline. For example, an increase of the proline of at least 1 percent, particularly in a range of 33 to 104-percent is conferred as compared to a corresponding non-transformed wild type non-human organism.

[8824] Accordingly, in one embodiment, an increase of proline in a non-human organism, as compared to a corresponding non-transformed wild type non-human organism, is conferred in the process of the invention, if the activity of a polypeptide showing the activity of a b3151-protein, or if the activity of the polypeptide B3151, preferably represented by SEQ ID NO. 42478, or a homolog or fragment thereof, or if the activity of a polypeptide encoded by a nucleic acid molecule comprising the nucleic acid SEQ ID NO. 42477, preferably the coding region thereof, or a homolog or fragment thereof, e.g. derived from Escherichia coli, is increased or generated. For example the activity of a nucleic acid molecule or a polypeptide comprising the nucleic acid, preferably the coding region thereof, or polypeptide or the consensus sequence or the polypeptide motif, as depicted in Table I, II or IV, application No. 2, column 5 or 8 in the respective same line as the nucleic acid molecule SEQ ID NO. 42477 or polypeptide SEQ ID NO. 42478, respectively, or a homolog or a fragment thereof, is increased or generated, or if the activity b3151-protein is increased or generated in a non-human organism, like a microorganism or a plant cell, plant or part thereof, especially with non-targeted localization, whereby the respective line discloses in column 7 proline. For example, an increase of the proline of at least 1 percent, particularly in a range of 45 to 689-percent is conferred as compared to a corresponding non-transformed wild type non-human organism.

[8825] Accordingly, in one embodiment, an increase of arginine in a non-human organism, as compared to a corresponding non-transformed wild type non-human organism, is conferred in the process of the invention, if the activity of a polypeptide showing the activity of a acetyl CoA carboxylase, or if the activity of the polypeptide B3256, preferably represented by SEQ ID NO. 9493, or a homolog or fragment thereof, or if the activity of a polypeptide encoded by a nucleic acid molecule comprising the nucleic acid SEQ ID NO. 9492, preferably the coding region thereof, or a homolog or fragment thereof, e.g. derived from Escherichia coli, is increased or generated. For example the activity of a nucleic acid molecule or a polypeptide comprising the nucleic acid, preferably the coding region thereof, or polypeptide or the consensus sequence or the polypeptide motif, as depicted in Table I, II or IV, application No. 2, column 5 or 8 in the respective same line as the nucleic acid molecule SEQ ID NO. 9492 or polypeptide SEQ ID NO. 9493, respectively, or a homolog or a fragment thereof, is increased or generated, or if the activity acetyl CoA carboxylase is increased or generated in a non-human organism, like a microorganism or a plant cell, plant or part thereof, especially with non-targeted localization, whereby the respective line discloses in column 7 arginine. For example, an increase of the arginine of at least 1 percent, particularly in a range of 100 to 2020-percent is conferred as compared to a corresponding non-transformed wild type non-human organism.

[8826] Accordingly, in one embodiment, an increase of glutamate in a non-human organism, as compared to a corresponding non-transformed wild type non-human organism, is conferred in the process of the invention, if the activity of a polypeptide showing the activity of a acetyl CoA carboxylase, or if the activity of the polypeptide B3256, preferably represented by SEQ ID NO. 9493, or a homolog or fragment thereof, or if the activity of a polypeptide encoded by a nucleic acid molecule comprising the nucleic acid SEQ ID NO. 9492, preferably the coding region thereof, or a homolog or fragment thereof, e.g. derived from Escherichia coli, is increased or generated. For example the activity of a nucleic acid molecule or a polypeptide comprising the nucleic acid, preferably the coding region thereof, or polypeptide or the consensus sequence or the polypeptide motif, as depicted in Table I, II or IV, application No. 2, column 5 or 8 in the respective same line as the nucleic acid molecule SEQ ID NO. 9492 or polypeptide SEQ ID NO. 9493, respectively, or a homolog or a fragment thereof, is increased or generated, or if the activity acetyl CoA carboxylase is increased or generated in a non-human organism, like a microorganism or a plant cell, plant or part thereof, especially with non-targeted localization, whereby the respective line discloses in column 7 glutamate. For example, an increase of the glutamate of at least 1 percent, particularly in a range of 57 to 194-percent is conferred as compared to a corresponding non-transformed wild type non-human organism.

[8827] Accordingly, in one embodiment, an increase of arginine in a non-human organism, as compared to a corresponding non-transformed wild type non-human organism, is conferred in the process of the invention, if the activity of a polypeptide showing the activity of a methyltransferase, or if the activity of the polypeptide B3262, preferably represented by SEQ ID NO. 42503, or a homolog or fragment thereof, or if the activity of a polypeptide encoded by a nucleic acid molecule comprising the nucleic acid SEQ ID NO. 42502, preferably the coding region thereof, or a homolog or fragment thereof, e.g. derived from Escherichia coli, is increased or generated. For example the activity of a nucleic acid molecule or a polypeptide comprising the nucleic acid, preferably the coding region thereof, or polypeptide or the consensus sequence or the polypeptide motif, as depicted in Table I, II or IV, application No. 2, column 5 or 8 in the respective same line as the nucleic acid molecule SEQ ID NO. 42502 or polypeptide SEQ ID NO. 42503, respectively, or a homolog or a fragment thereof, is increased or generated, or if the activity methyltransferase is increased or generated in a non-human organism, like a microorganism or a plant cell, plant or part thereof, especially with non-targeted localization, whereby the respective line discloses in column 7 arginine. For example, an increase of the arginine of at least 1 percent, particularly in a range of 50 to 273-percent is conferred as compared to a corresponding non-transformed wild type non-human organism.

[8828] Accordingly, in one embodiment, an increase of glutamate in a non-human organism, as compared to a corresponding non-transformed wild type non-human organism, is conferred in the process of the invention, if the activity of a polypeptide showing the activity of a methyltransferase, or if the activity of the polypeptide B3262, preferably represented by SEQ ID NO. 42503, or a homolog or fragment thereof, or if the activity of a polypeptide encoded by a nucleic acid molecule comprising the nucleic acid SEQ ID NO. 42502, preferably the coding region thereof, or a homolog or fragment thereof, e.g. derived from Escherichia coli, is increased or generated. For example the activity of a nucleic acid molecule or a polypeptide comprising the nucleic acid, preferably the coding region thereof, or polypeptide or the consensus sequence or the polypeptide motif, as depicted in Table I, II or IV, application No. 2, column 5 or 8 in the respective same line as the nucleic acid molecule SEQ ID NO. 42502 or polypeptide SEQ ID NO. 42503, respectively, or a homolog or a fragment thereof, is increased or generated, or if the activity methyltransferase is increased or generated in a non-human organism, like a microorganism or a plant cell, plant or part thereof, especially with non-targeted localization, whereby the respective line discloses in column 7 glutamate. For example, an increase of the glutamate of at least 1 percent, particularly in a range of 79 to 126-percent is conferred as compared to a corresponding non-transformed wild type non-human organism.

[8829] Accordingly, in one embodiment, an increase of glutamine in a non-human organism, as compared to a corresponding non-transformed wild type non-human organism, is conferred in the process of the invention, if the activity of a polypeptide showing the activity of a methyltransferase, or if the activity of the polypeptide B3262, preferably represented by SEQ ID NO. 42503, or a homolog or fragment thereof, or if the activity of a polypeptide encoded by a nucleic acid molecule comprising the nucleic acid SEQ ID NO. 42502, preferably the coding region thereof, or a homolog or fragment thereof, e.g. derived from Escherichia coli, is increased or generated. For example the activity of a nucleic acid molecule or a polypeptide comprising the nucleic acid, preferably the coding region thereof, or polypeptide or the consensus sequence or the polypeptide motif, as depicted in Table I, II or IV, application No. 2, column 5 or 8 in the respective same line as the nucleic acid molecule SEQ ID NO. 42502 or polypeptide SEQ ID NO. 42503, respectively, or a homolog or a fragment thereof, is increased or generated, or if the activity methyltransferase is increased or generated in a non-human organism, like a microorganism or a plant cell, plant or part thereof, especially with non-targeted localization, whereby the respective line discloses in column 7 glutamine. For example, an increase of the glutamine of at least 1 percent, particularly in a range of 27 to 113-percent is conferred as compared to a corresponding non-transformed wild type non-human organism.

[8830] Accordingly, in one embodiment, an increase of proline in a non-human organism, as compared to a corresponding non-transformed wild type non-human organism, is conferred in the process of the invention, if the activity of a polypeptide showing the activity of a methyltransferase, or if the activity of the polypeptide B3262, preferably represented by SEQ ID NO. 42503, or a homolog or fragment thereof, or if the activity of a polypeptide encoded by a nucleic acid molecule comprising the nucleic acid SEQ ID NO. 42502, preferably the coding region thereof, or a homolog or fragment thereof, e.g. derived from Escherichia coli, is increased or generated. For example the activity of a nucleic acid molecule or a polypeptide comprising the nucleic acid, preferably the coding region thereof, or polypeptide or the consensus sequence or the polypeptide motif, as depicted in Table I, II or IV, application No. 2, column 5 or 8 in the respective same line as the nucleic acid molecule SEQ ID NO. 42502 or polypeptide SEQ ID NO. 42503, respectively, or a homolog or a fragment thereof, is increased or generated, or if the activity methyltransferase is increased or generated in a non-human organism, like a microorganism or a plant cell, plant or part thereof, especially with non-targeted localization, whereby the respective line discloses in column 7 proline. For example, an increase of the proline of at least 1 percent, particularly in a range of 78 to 302-percent is conferred as compared to a corresponding non-transformed wild type non-human organism.

[8831] Accordingly, in one embodiment, an increase of proline in a non-human organism, as compared to a corresponding non-transformed wild type non-human organism, is conferred in the process of the invention, if the activity of a polypeptide showing the activity of a b3346-protein, or if the activity of the polypeptide B3346, preferably represented by SEQ ID NO. 10105, or a homolog or fragment thereof, or if the activity of a polypeptide encoded by a nucleic acid molecule comprising the nucleic acid SEQ ID NO. 10104, preferably the coding region thereof, or a homolog or fragment thereof, e.g. derived from Escherichia coli, is increased or generated. For example the activity of a nucleic acid molecule or a polypeptide comprising the nucleic acid, preferably the coding region thereof, or polypeptide or the consensus sequence or the polypeptide motif, as depicted in Table I, II or IV, application No. 2, column 5 or 8 in the respective same line as the nucleic acid molecule SEQ ID NO. 10104 or polypeptide SEQ ID NO. 10105, respectively, or a homolog or a fragment thereof, is increased or generated, or if the activity b3346-protein is increased or generated in a non-human organism, like a microorganism or a plant cell, plant or part thereof, especially with non-targeted localization, whereby the respective line discloses in column 7 proline. For example, an increase of the proline of at least 1 percent, particularly in a range of 48 to 193-percent is conferred as compared to a corresponding non-transformed wild type non-human organism.

[8832] Accordingly, in one embodiment, an increase of glutamine in a non-human organism, as compared to a corresponding non-transformed wild type non-human organism, is conferred in the process of the invention, if the activity of a polypeptide showing the activity of a b3410-protein, or if the activity of the polypeptide B3410, preferably represented by SEQ ID NO. 42560, or a homolog or fragment thereof, or if the activity of a polypeptide encoded by a nucleic acid molecule comprising the nucleic acid SEQ ID NO. 42559, preferably the coding region thereof, or a homolog or fragment thereof, e.g. derived from Escherichia coli, is increased or generated. For example the activity of a nucleic acid molecule or a polypeptide comprising the nucleic acid, preferably the coding region thereof, or polypeptide or the consensus sequence or the polypeptide motif, as depicted in Table I, II or IV, application No. 2, column 5 or 8 in the respective same line as the nucleic acid molecule SEQ ID NO. 42559 or polypeptide SEQ ID NO. 42560, respectively, or a homolog or a fragment thereof, is increased or generated, or if the activity b3410-protein is increased or generated in a non-human organism, like a microorganism or a plant cell, plant or part thereof, especially with non-targeted localization, whereby the respective line discloses in column 7 glutamine. For example, an increase of the glutamine of at least 1 percent, particularly in a range of 40 to 86-percent is conferred as compared to a corresponding non-transformed wild type non-human organism.

[8833] Accordingly, in one embodiment, an increase of arginine in a non-human organism, as compared to a corresponding non-transformed wild type non-human organism, is conferred in the process of the invention, if the activity of a polypeptide showing the activity of a B3427-protein, or if the activity of the polypeptide B3427, preferably represented by SEQ ID NO. 42580, or a homolog or fragment thereof, or if the activity of a polypeptide encoded by a nucleic acid molecule comprising the nucleic acid SEQ ID NO. 42579, preferably the coding region thereof, or a homolog or fragment thereof, e.g. derived from Escherichia coli, is increased or generated. For example the activity of a nucleic acid molecule or a polypeptide comprising the nucleic acid, preferably the coding region thereof, or polypeptide or the consensus sequence or the polypeptide motif, as depicted in Table I, II or IV, application No. 2, column 5 or 8 in the respective same line as the nucleic acid molecule SEQ ID NO. 42579 or polypeptide SEQ ID NO. 42580, respectively, or a homolog or a fragment thereof, is increased or generated, or if the activity B3427-protein is increased or generated in a non-human organism, like a microorganism or a plant cell, plant or part thereof, especially with non-targeted localization, whereby the respective line discloses in column 7 arginine. For example, an increase of the arginine of at least 1 percent, particularly in a range of 66 to 148-percent is conferred as compared to a corresponding non-transformed wild type non-human organism.

[8834] Accordingly, in one embodiment, an increase of glutamate in a non-human organism, as compared to a corresponding non-transformed wild type non-human organism, is conferred in the process of the invention, if the activity of a polypeptide showing the activity of a b3509-protein, or if the activity of the polypeptide B3509, preferably represented by SEQ ID NO. 42593, or a homolog or fragment thereof, or if the activity of a polypeptide encoded by a nucleic acid molecule comprising the nucleic acid SEQ ID NO. 42592, preferably the coding region thereof, or a homolog or fragment thereof, e.g. derived from Escherichia coli, is increased or generated. For example the activity of a nucleic acid molecule or a polypeptide comprising the nucleic acid, preferably the coding region thereof, or polypeptide or the consensus sequence or the polypeptide motif, as depicted in Table I, II or IV, application No. 2, column 5 or 8 in the respective same line as the nucleic acid molecule SEQ ID NO. 42592 or polypeptide SEQ ID NO. 42593, respectively, or a homolog or a fragment thereof, is increased or generated, or if the activity b3509-protein is increased or generated in a non-human organism, like a microorganism or a plant cell, plant or part thereof, especially with non-targeted localization, whereby the respective line discloses in column 7 glutamate. For example, an increase of the glutamate of at least 1 percent, particularly in a range of 47 to 65-percent is conferred as compared to a corresponding non-transformed wild type non-human organism.

[8835] Accordingly, in one embodiment, an increase of proline in a non-human organism, as compared to a corresponding non-transformed wild type non-human organism, is conferred in the process of the invention, if the activity of a polypeptide showing the activity of a valine-pyruvate transaminase, or if the activity of the polypeptide B3572, preferably represented by SEQ ID NO. 10173, or a homolog or fragment thereof, or if the activity of a polypeptide encoded by a nucleic acid molecule comprising the nucleic acid SEQ ID NO. 10172, preferably the coding region thereof, or a homolog or fragment thereof, e.g. derived from Escherichia coli, is increased or generated. For example the activity of a nucleic acid molecule or a polypeptide comprising the nucleic acid, preferably the coding region thereof, or polypeptide or the consensus sequence or the polypeptide motif, as depicted in Table I, II or IV, application No. 2, column 5 or 8 in the respective same line as the nucleic acid molecule SEQ ID NO. 10172 or polypeptide SEQ ID NO. 10173, respectively, or a homolog or a fragment thereof, is increased or generated, or if the activity valine-pyruvate transaminase is increased or generated in a non-human organism, like a microorganism or a plant cell, plant or part thereof, especially with plastidic localization, whereby the respective line discloses in column 7 proline. For example, an increase of the proline of at least 1 percent, particularly in a range of 55 to 376-percent is conferred as compared to a corresponding non-transformed wild type non-human organism.

[8836] Accordingly, in one embodiment, an increase of glutamine in a non-human organism, as compared to a corresponding non-transformed wild type non-human organism, is conferred in the process of the invention, if the activity of a polypeptide showing the activity of a threonine dehydrogenase, or if the activity of the polypeptide B3616, preferably represented by SEQ ID NO. 42601, or a homolog or fragment thereof, or if the activity of a polypeptide encoded by a nucleic acid molecule comprising the nucleic acid SEQ ID NO. 42600, preferably the coding region thereof, or a homolog or fragment thereof, e.g. derived from Escherichia coli, is increased or generated. For example the activity of a nucleic acid molecule or a polypeptide comprising the nucleic acid, preferably the coding region thereof, or polypeptide or the consensus sequence or the polypeptide motif, as depicted in Table I, II or IV, application No. 2, column 5 or 8 in the respective same line as the nucleic acid molecule SEQ ID NO. 42600 or polypeptide SEQ ID NO. 42601, respectively, or a homolog or a fragment thereof, is increased or generated, or if the activity threonine dehydrogenase is increased or generated in a non-human organism, like a microorganism or a plant cell, plant or part thereof, especially with non-targeted localization, whereby the respective line discloses in column 7 glutamine. For example, an increase of the glutamine of at least 1 percent, particularly in a range of 45 to 225-percent is conferred as compared to a corresponding non-transformed wild type non-human organism.

[8837] Accordingly, in one embodiment, an increase of proline in a non-human organism, as compared to a corresponding non-transformed wild type non-human organism, is conferred in the process of the invention, if the activity of a polypeptide showing the activity of a threonine dehydrogenase, or if the activity of the polypeptide B3616, preferably represented by SEQ ID NO. 42601, or a homolog or fragment thereof, or if the activity of a polypeptide encoded by a nucleic acid molecule comprising the nucleic acid SEQ ID NO. 42600, preferably the coding region thereof, or a homolog or fragment thereof, e.g. derived from Escherichia coli, is increased or generated. For example the activity of a nucleic acid molecule or a polypeptide comprising the nucleic acid, preferably the coding region thereof, or polypeptide or the consensus sequence or the polypeptide motif, as depicted in Table I, II or IV, application No. 2, column 5 or 8 in the respective same line as the nucleic acid molecule SEQ ID NO. 42600 or polypeptide SEQ ID NO. 42601, respectively, or a homolog or a fragment thereof, is increased or generated, or if the activity threonine dehydrogenase is increased or generated in a non-human organism, like a microorganism or a plant cell, plant or part thereof, especially with non-targeted localization, whereby the respective line discloses in column 7 proline. For example, an increase of the proline of at least 1 percent, particularly in a range of 49 to 107-percent is conferred as compared to a corresponding non-transformed wild type non-human organism.

[8838] Accordingly, in one embodiment, an increase of proline in a non-human organism, as compared to a corresponding non-transformed wild type non-human organism, is conferred in the process of the invention, if the activity of a polypeptide showing the activity of a phosphopantetheine adenylyltransferase, or if the activity of the polypeptide B3634, preferably represented by SEQ ID NO. 42932, or a homolog or fragment thereof, or if the activity of a polypeptide encoded by a nucleic acid molecule comprising the nucleic acid SEQ ID NO. 42931, preferably the coding region thereof, or a homolog or fragment thereof, e.g. derived from Escherichia coli, is increased or generated. For example the activity of a nucleic acid molecule or a polypeptide comprising the nucleic acid, preferably the coding region thereof, or polypeptide or the consensus sequence or the polypeptide motif, as depicted in Table I, II or IV, application No. 2, column 5 or 8 in the respective same line as the nucleic acid molecule SEQ ID NO. 42931 or polypeptide SEQ ID NO. 42932, respectively, or a homolog or a fragment thereof, is increased or generated, or if the activity phosphopantetheine adenylyltransferase is increased or generated in a non-human organism, like a microorganism or a plant cell, plant or part thereof, especially with non-targeted localization, whereby the respective line discloses in column 7 proline. For example, an increase of the proline of at least 1 percent, particularly in a range of 34 to 162-percent is conferred as compared to a corresponding non-transformed wild type non-human organism.

[8839] Accordingly, in one embodiment, an increase of glutamine in a non-human organism, as compared to a corresponding non-transformed wild type non-human organism, is conferred in the process of the invention, if the activity of a polypeptide showing the activity of a ATP synthase subunit beta, or if the activity of the polypeptide B3732, preferably represented by SEQ ID NO. 43249, or a homolog or fragment thereof, or if the activity of a polypeptide encoded by a nucleic acid molecule comprising the nucleic acid SEQ ID NO. 43248, preferably the coding region thereof, or a homolog or fragment thereof, e.g. derived from Escherichia coli, is increased or generated. For example the activity of a nucleic acid molecule or a polypeptide comprising the nucleic acid, preferably the coding region thereof, or polypeptide or the consensus sequence or the polypeptide motif, as depicted in Table I, II or IV, application No. 2, column 5 or 8 in the respective same line as the nucleic acid molecule SEQ ID NO. 43248 or polypeptide SEQ ID NO. 43249, respectively, or a homolog or a fragment thereof, is increased or generated, or if the activity ATP synthase subunit beta is increased or generated in a non-human organism, like a microorganism or a plant cell, plant or part thereof, especially with non-targeted localization, whereby the respective line discloses in column 7 glutamine. For example, an increase of the glutamine of at least 1 percent, particularly in a range of 30 to 36-percent is conferred as compared to a corresponding non-transformed wild type non-human organism.

[8840] Accordingly, in one embodiment, an increase of arginine in a non-human organism, as compared to a corresponding non-transformed wild type non-human organism, is conferred in the process of the invention, if the activity of a polypeptide showing the activity of a enterobacterial common antigen polymerase, or if the activity of the polypeptide B3793, preferably represented by SEQ ID NO. 43801, or a homolog or fragment thereof, or if the activity of a polypeptide encoded by a nucleic acid molecule comprising the nucleic acid SEQ ID NO. 43800, preferably the coding region thereof, or a homolog or fragment thereof, e.g. derived from Escherichia coli, is increased or generated. For example the activity of a nucleic acid molecule or a polypeptide comprising the nucleic acid, preferably the coding region thereof, or polypeptide or the consensus sequence or the polypeptide motif, as depicted in Table I, II or IV, application No. 2, column 5 or 8 in the respective same line as the nucleic acid molecule SEQ ID NO. 43800 or polypeptide SEQ ID NO. 43801, respectively, or a homolog or a fragment thereof, is increased or generated, or if the activity enterobacterial common antigen polymerase is increased or generated in a non-human organism, like a microorganism or a plant cell, plant or part thereof, especially with non-targeted localization, whereby the respective line discloses in column 7 arginine. For example, an increase of the arginine of at least 1 percent, particularly in a range of 58 to 229-percent is conferred as compared to a corresponding non-transformed wild type non-human organism.

[8841] Accordingly, in one embodiment, an increase of glutamate in a non-human organism, as compared to a corresponding non-transformed wild type non-human organism, is conferred in the process of the invention, if the activity of a polypeptide showing the activity of a enterobacterial common antigen polymerase, or if the activity of the polypeptide B3793, preferably represented by SEQ ID NO. 43801, or a homolog or fragment thereof, or if the activity of a polypeptide encoded by a nucleic acid molecule comprising the nucleic acid SEQ ID NO. 43800, preferably the coding region thereof, or a homolog or fragment thereof, e.g. derived from Escherichia coli, is increased or generated. For example the activity of a nucleic acid molecule or a polypeptide comprising the nucleic acid, preferably the coding region thereof, or polypeptide or the consensus sequence or the polypeptide motif, as depicted in Table I, II or IV, application No. 2, column 5 or 8 in the respective same line as the nucleic acid molecule SEQ ID NO. 43800 or polypeptide SEQ ID NO. 43801, respectively, or a homolog or a fragment thereof, is increased or generated, or if the activity enterobacterial common antigen polymerase is increased or generated in a non-human organism, like a microorganism or a plant cell, plant or part thereof, especially with non-targeted localization, whereby the respective line discloses in column 7 glutamate. For example, an increase of the glutamate of at least 1 percent, particularly in a range of 78 to 212 percent is conferred as compared to a corresponding non-transformed wild type non-human organism.

[8842] Accordingly, in one embodiment, an increase of proline in a non-human organism, as compared to a corresponding non-transformed wild type non-human organism, is conferred in the process of the invention, if the activity of a polypeptide showing the activity of a DNA helicase II, or if the activity of the polypeptide B3813, preferably represented by SEQ ID NO. 43840, or a homolog or fragment thereof, or if the activity of a polypeptide encoded by a nucleic acid molecule comprising the nucleic acid SEQ ID NO. 43839, preferably the coding region thereof, or a homolog or fragment thereof, e.g. derived from Escherichia coli, is increased or generated. For example the activity of a nucleic acid molecule or a polypeptide comprising the nucleic acid, preferably the coding region thereof, or polypeptide or the consensus sequence or the polypeptide motif, as depicted in Table I, II or IV, application No. 2, column 5 or 8 in the respective same line as the nucleic acid molecule SEQ ID NO. 43839 or polypeptide SEQ ID NO. 43840, respectively, or a homolog or a fragment thereof, is increased or generated, or if the activity DNA helicase II is increased or generated in a non-human organism, like a microorganism or a plant cell, plant or part thereof, especially with non-targeted localization, whereby the respective line discloses in column 7 proline. For example, an increase of the proline of at least 1 percent, particularly in a range of 104 to 159-percent is conferred as compared to a corresponding non-transformed wild type non-human organism.

[8843] Accordingly, in one embodiment, an increase of glutamine in a non-human organism, as compared to a corresponding non-transformed wild type non-human organism, is conferred in the process of the invention, if the activity of a polypeptide showing the activity of a b3814-protein, or if the activity of the polypeptide B3814, preferably represented by SEQ ID NO. 44197, or a homolog or fragment thereof, or if the activity of a polypeptide encoded by a nucleic acid molecule comprising the nucleic acid SEQ ID NO. 44196, preferably the coding region thereof, or a homolog or fragment thereof, e.g. derived from Escherichia coli, is increased or generated. For example the activity of a nucleic acid molecule or a polypeptide comprising the nucleic acid, preferably the coding region thereof, or polypeptide or the consensus sequence or the polypeptide motif, as depicted in Table I, II or IV, application No. 2, column 5 or 8 in the respective same line as the nucleic acid molecule SEQ ID NO. 44196 or polypeptide SEQ ID NO. 44197, respectively, or a homolog or a fragment thereof, is increased or generated, or if the activity b3814-protein is increased or generated in a non-human organism, like a microorganism or a plant cell, plant or part thereof, especially with non-targeted localization, whereby the respective line discloses in column 7 glutamine. For example, an increase of the glutamine of at least 1 percent, particularly in a range of 54 to 94-percent is conferred as compared to a corresponding non-transformed wild type non-human organism.

[8844] Accordingly, in one embodiment, an increase of proline in a non-human organism, as compared to a corresponding non-transformed wild type non-human organism, is conferred in the process of the invention, if the activity of a polypeptide showing the activity of a b3817-protein, or if the activity of the polypeptide B3817, preferably represented by SEQ ID NO. 10709, or a homolog or fragment thereof, or if the activity of a polypeptide encoded by a nucleic acid molecule comprising the nucleic acid SEQ ID NO. 10708, preferably the coding region thereof, or a homolog or fragment thereof, e.g. derived from Escherichia coli, is increased or generated. For example the activity of a nucleic acid molecule or a polypeptide comprising the nucleic acid, preferably the coding region thereof, or polypeptide or the consensus sequence or the polypeptide motif, as depicted in Table I, II or IV, application No. 2, column 5 or 8 in the respective same line as the nucleic acid molecule SEQ ID NO. 10708 or polypeptide SEQ ID NO. 10709, respectively, or a homolog or a fragment thereof, is increased or generated, or if the activity b3817-protein is increased or generated in a non-human organism, like a microorganism or a plant cell, plant or part thereof, especially with non-targeted localization, whereby the respective line discloses in column 7 proline. For example, an increase of the proline of at least 1 percent, particularly in a range of 607 to 890-percent is conferred as compared to a corresponding non-transformed wild type non-human organism.

[8845] Accordingly, in one embodiment, an increase of glutamine in a non-human organism, as compared to a corresponding non-transformed wild type non-human organism, is conferred in the process of the invention, if the activity of a polypeptide showing the activity of a glycerol dehydrogenase, or if the activity of the polypeptide B3945, preferably represented by SEQ ID NO. 44224, or a homolog or fragment thereof, or if the activity of a polypeptide encoded by a nucleic acid molecule comprising the nucleic acid SEQ ID NO. 44223, preferably the coding region thereof, or a homolog or fragment thereof, e.g. derived from Escherichia coli, is increased or generated. For example the activity of a nucleic acid molecule or a polypeptide comprising the nucleic acid, preferably the coding region thereof, or polypeptide or the consensus sequence or the polypeptide motif, as depicted in Table I, II or IV, application No. 2, column 5 or 8 in the respective same line as the nucleic acid molecule SEQ ID NO. 44223 or polypeptide SEQ ID NO. 44224, respectively, or a homolog or a fragment thereof, is increased or generated, or if the activity glycerol dehydrogenase is increased or generated in a non-human organism, like a microorganism or a plant cell, plant or part thereof, especially with non-targeted localization, whereby the respective line discloses in column 7 glutamine. For example, an increase of the glutamine of at least 1 percent, particularly in a range of 68 to 125-percent is conferred as compared to a corresponding non-transformed wild type non-human organism.

[8846] Accordingly, in one embodiment, an increase of glutamine in a non-human organism, as compared to a corresponding non-transformed wild type non-human organism, is conferred in the process of the invention, if the activity of a polypeptide showing the activity of a b3989-protein, or if the activity of the polypeptide B3989, preferably represented by SEQ ID NO. 44373, or a homolog or fragment thereof, or if the activity of a polypeptide encoded by a nucleic acid molecule comprising the nucleic acid SEQ ID NO. 44372, preferably the coding region thereof, or a homolog or fragment thereof, e.g. derived from Escherichia coli, is increased or generated. For example the activity of a nucleic acid molecule or a polypeptide comprising the nucleic acid, preferably the coding region thereof, or polypeptide or the consensus sequence or the polypeptide motif, as depicted in Table I, II or IV, application No. 2, column 5 or 8 in the respective same line as the nucleic acid molecule SEQ ID NO. 44372 or polypeptide SEQ ID NO. 44373, respectively, or a homolog or a fragment thereof, is increased or generated, or if the activity b3989-protein is increased or generated in a non-human organism, like a microorganism or a plant cell, plant or part thereof, especially with non-targeted localization, whereby the respective line discloses in column 7 glutamine. For example, an increase of the glutamine of at least 1 percent, particularly in a range of 28 to 90-percent is conferred as compared to a corresponding non-transformed wild type non-human organism.

[8847] Accordingly, in one embodiment, an increase of glutamate in a non-human organism, as compared to a corresponding non-transformed wild type non-human organism, is conferred in the process of the invention, if the activity of a polypeptide showing the activity of a acetyltransferase, or if the activity of the polypeptide B4012, preferably represented by SEQ ID NO. 44379, or a homolog or fragment thereof, or if the activity of a polypeptide encoded by a nucleic acid molecule comprising the nucleic acid SEQ ID NO. 44378, preferably the coding region thereof, or a homolog or fragment thereof, e.g. derived from Escherichia coli, is increased or generated. For example the activity of a nucleic acid molecule or a polypeptide comprising the nucleic acid, preferably the coding region thereof, or polypeptide or the consensus sequence or the polypeptide motif, as depicted in Table I, II or IV, application No. 2, column 5 or 8 in the respective same line as the nucleic acid molecule SEQ ID NO. 44378 or polypeptide SEQ ID NO. 44379, respectively, or a homolog or a fragment thereof, is increased or generated, or if the activity acetyltransferase is increased or generated in a non-human organism, like a microorganism or a plant cell, plant or part thereof, especially with non-targeted localization, whereby the respective line discloses in column 7 glutamate. For example, an increase of the glutamate of at least 1 percent, particularly in a range of 39 to 76-percent is conferred as compared to a corresponding non-transformed wild type non-human organism.

[8848] Accordingly, in one embodiment, an increase of arginine in a non-human organism, as compared to a corresponding non-transformed wild type non-human organism, is conferred in the process of the invention, if the activity of a polypeptide showing the activity of a b4029-protein, or if the activity of the polypeptide B4029, preferably represented by SEQ ID NO. 10741, or a homolog or fragment thereof, or if the activity of a polypeptide encoded by a nucleic acid molecule comprising the nucleic acid SEQ ID NO. 10740, preferably the coding region thereof, or a homolog or fragment thereof, e.g. derived from Escherichia coli, is increased or generated. For example the activity of a nucleic acid molecule or a polypeptide comprising the nucleic acid, preferably the coding region thereof, or polypeptide or the consensus sequence or the polypeptide motif, as depicted in Table I, II or IV, application No. 2, column 5 or 8 in the respective same line as the nucleic acid molecule SEQ ID NO. 10740 or polypeptide SEQ ID NO. 10741, respectively, or a homolog or a fragment thereof, is increased or generated, or if the activity b4029-protein is increased or generated in a non-human organism, like a microorganism or a plant cell, plant or part thereof, especially with non-targeted localization, whereby the respective line discloses in column 7 arginine. For example, an increase of the arginine of at least 1 percent, particularly in a range of 58 to 478-percent is conferred as compared to a corresponding non-transformed wild type non-human organism.

[8849] Accordingly, in one embodiment, an increase of glutamine in a non-human organism, as compared to a corresponding non-transformed wild type non-human organism, is conferred in the process of the invention, if the activity of a polypeptide showing the activity of a b4029-protein, or if the activity of the polypeptide B4029, preferably represented by SEQ ID NO. 10741, or a homolog or fragment thereof, or if the activity of a polypeptide encoded by a nucleic acid molecule comprising the nucleic acid SEQ ID NO. 10740, preferably the coding region thereof, or a homolog or fragment thereof, e.g. derived from Escherichia coli, is increased or generated. For example the activity of a nucleic acid molecule or a polypeptide comprising the nucleic acid, preferably the coding region thereof, or polypeptide or the consensus sequence or the polypeptide motif, as depicted in Table I, II or IV, application No. 2, column 5 or 8 in the respective same line as the nucleic acid molecule SEQ ID NO. 10740 or polypeptide SEQ ID NO. 10741, respectively, or a homolog or a fragment thereof, is increased or generated, or if the activity b4029-protein is increased or generated in a non-human organism, like a microorganism or a plant cell, plant or part thereof, especially with non-targeted localization, whereby the respective line discloses in column 7 glutamine. For example, an increase of the glutamine of at least 1 percent, particularly in a range of 52 to 2052-percent is conferred as compared to a corresponding non-transformed wild type non-human organism.

[8850] Accordingly, in one embodiment, an increase of proline in a non-human organism, as compared to a corresponding non-transformed wild type non-human organism, is conferred in the process of the invention, if the activity of a polypeptide showing the activity of a b4029-protein, or if the activity of the polypeptide B4029, preferably represented by SEQ ID NO. 10741, or a homolog or fragment thereof, or if the activity of a polypeptide encoded by a nucleic acid molecule comprising the nucleic acid SEQ ID NO. 10740, preferably the coding region thereof, or a homolog or fragment thereof, e.g. derived from Escherichia coli, is increased or generated. For example the activity of a nucleic acid molecule or a polypeptide comprising the nucleic acid, preferably the coding region thereof, or polypeptide or the consensus sequence or the polypeptide motif, as depicted in Table I, II or IV, application No. 2, column 5 or 8 in the respective same line as the nucleic acid molecule SEQ ID NO. 10740 or polypeptide SEQ ID NO. 10741, respectively, or a homolog or a fragment thereof, is increased or generated, or if the activity b4029-protein is increased or generated in a non-human organism, like a microorganism or a plant cell, plant or part thereof, especially with non-targeted localization, whereby the respective line discloses in column 7 proline. For example, an increase of the proline of at least 1 percent, particularly in a range of 32 to 836-percent is conferred as compared to a corresponding non-transformed wild type non-human organism.

[8851] Accordingly, in one embodiment, an increase of arginine in a non-human organism, as compared to a corresponding non-transformed wild type non-human organism, is conferred in the process of the invention, if the activity of a polypeptide showing the activity of a cation/acetate symporter, or if the activity of the polypeptide B4067, preferably represented by SEQ ID NO. 44467, or a homolog or fragment thereof, or if the activity of a polypeptide encoded by a nucleic acid molecule comprising the nucleic acid SEQ ID NO. 44466, preferably the coding region thereof, or a homolog or fragment thereof, e.g. derived from Escherichia coli, is increased or generated. For example the activity of a nucleic acid molecule or a polypeptide comprising the nucleic acid, preferably the coding region thereof, or polypeptide or the consensus sequence or the polypeptide motif, as depicted in Table I, II or IV, application No. 2, column 5 or 8 in the respective same line as the nucleic acid molecule SEQ ID NO. 44466 or polypeptide SEQ ID NO. 44467, respectively, or a homolog or a fragment thereof, is increased or generated, or if the activity cation/acetate symporter is increased or generated in a non-human organism, like a microorganism or a plant cell, plant or part thereof, especially with non-targeted localization, whereby the respective line discloses in column 7 arginine. For example, an increase of the arginine of at least 1 percent, particularly in a range of 46 to 154-percent is conferred as compared to a corresponding non-transformed wild type non-human organism.

[8852] Accordingly, in one embodiment, an increase of arginine in a non-human organism, as compared to a corresponding non-transformed wild type non-human organism, is conferred in the process of the invention, if the activity of a polypeptide showing the activity of a b4121-protein, or if the activity of the polypeptide B4121, preferably represented by SEQ ID NO. 44610, or a homolog or fragment thereof, or if the activity of a polypeptide encoded by a nucleic acid molecule comprising the nucleic acid SEQ ID NO. 44609, preferably the coding region thereof, or a homolog or fragment thereof, e.g. derived from Escherichia coli, is increased or generated. For example the activity of a nucleic acid molecule or a polypeptide comprising the nucleic acid, preferably the coding region thereof, or polypeptide or the consensus sequence or the polypeptide motif, as depicted in Table I, II or IV, application No. 2, column 5 or 8 in the respective same line as the nucleic acid molecule SEQ ID NO. 44609 or polypeptide SEQ ID NO. 44610, respectively, or a homolog or a fragment thereof, is increased or generated, or if the activity b4121-protein is increased or generated in a non-human organism, like a microorganism or a plant cell, plant or part thereof, especially with non-targeted localization, whereby the respective line discloses in column 7 arginine. For example, an increase of the arginine of at least 1 percent, particularly in a range of 46 to 442-percent is conferred as compared to a corresponding non-transformed wild type non-human organism.

[8853] Accordingly, in one embodiment, an increase of proline in a non-human organism, as compared to a corresponding non-transformed wild type non-human organism, is conferred in the process of the invention, if the activity of a polypeptide showing the activity of a b4121-protein, or if the activity of the polypeptide B4121, preferably represented by SEQ ID NO. 44610, or a homolog or fragment thereof, or if the activity of a polypeptide encoded by a nucleic acid molecule comprising the nucleic acid SEQ ID NO. 44609, preferably the coding region thereof, or a homolog or fragment thereof, e.g. derived from Escherichia coli, is increased or generated. For example the activity of a nucleic acid molecule or a polypeptide comprising the nucleic acid, preferably the coding region thereof, or polypeptide or the consensus sequence or the polypeptide motif, as depicted in Table I, II or IV, application No. 2, column 5 or 8 in the respective same line as the nucleic acid molecule SEQ ID NO. 44609 or polypeptide SEQ ID NO. 44610, respectively, or a homolog or a fragment thereof, is increased or generated, or if the activity b4121-protein is increased or generated in a non-human organism, like a microorganism or a plant cell, plant or part thereof, especially with non-targeted localization, whereby the respective line discloses in column 7 proline. For example, an increase of the proline of at least 1 percent, particularly in a range of 33 to 151-percent is conferred as compared to a corresponding non-transformed wild type non-human organism.

[8854] Accordingly, in one embodiment, an increase of proline in a non-human organism, as compared to a corresponding non-transformed wild type non-human organism, is conferred in the process of the invention, if the activity of a polypeptide showing the activity of a lysyl-tRNA synthetase, or if the activity of the polypeptide B4129, preferably represented by SEQ ID NO. 44663, or a homolog or fragment thereof, or if the activity of a polypeptide encoded by a nucleic acid molecule comprising the nucleic acid SEQ ID NO. 44662, preferably the coding region thereof, or a homolog or fragment thereof, e.g. derived from Escherichia coli, is increased or generated. For example the activity of a nucleic acid molecule or a polypeptide comprising the nucleic acid, preferably the coding region thereof, or polypeptide or the consensus sequence or the polypeptide motif, as depicted in Table I, II or IV, application No. 2, column 5 or 8 in the respective same line as the nucleic acid molecule SEQ ID NO. 44662 or polypeptide SEQ ID NO. 44663, respectively, or a homolog or a fragment thereof, is increased or generated, or if the activity lysyl-tRNA synthetase is increased or generated in a non-human organism, like a microorganism or a plant cell, plant or part thereof, especially with non-targeted localization, whereby the respective line discloses in column 7 proline. For example, an increase of the proline of at least 1 percent, particularly in a range of 126 to 168-percent is conferred as compared to a corresponding non-transformed wild type non-human organism.

[8855] Accordingly, in one embodiment, an increase of glutamine in a non-human organism, as compared to a corresponding non-transformed wild type non-human organism, is conferred in the process of the invention, if the activity of a polypeptide showing the activity of a aspartase, or if the activity of the polypeptide B4139, preferably represented by SEQ ID NO. 45023, or a homolog or fragment thereof, or if the activity of a polypeptide encoded by a nucleic acid molecule comprising the nucleic acid SEQ ID NO. 45022, preferably the coding region thereof, or a homolog or fragment thereof, e.g. derived from Escherichia coli, is increased or generated. For example the activity of a nucleic acid molecule or a polypeptide comprising the nucleic acid, preferably the coding region thereof, or polypeptide or the consensus sequence or the polypeptide motif, as depicted in Table I, II or IV, application No. 2, column 5 or 8 in the respective same line as the nucleic acid molecule SEQ ID NO. 45022 or polypeptide SEQ ID NO. 45023, respectively, or a homolog or a fragment thereof, is increased or generated, or if the activity aspartase is increased or generated in a non-human organism, like a microorganism or a plant cell, plant or part thereof, especially with non-targeted localization, whereby the respective line discloses in column 7 glutamine. For example, an increase of the glutamine of at least 1 percent, particularly in a range of 196 to 629-percent is conferred as compared to a corresponding non-transformed wild type non-human organism.

[8856] Accordingly, in one embodiment, an increase of arginine in a non-human organism, as compared to a corresponding non-transformed wild type non-human organism, is conferred in the process of the invention, if the activity of a polypeptide showing the activity of a acetyltransferase, or if the activity of the polypeptide B4256, preferably represented by SEQ ID NO. 45322, or a homolog or fragment thereof, or if the activity of a polypeptide encoded by a nucleic acid molecule comprising the nucleic acid SEQ ID NO. 45321, preferably the coding region thereof, or a homolog or fragment thereof, e.g. derived from Escherichia coli, is increased or generated. For example the activity of a nucleic acid molecule or a polypeptide comprising the nucleic acid, preferably the coding region thereof, or polypeptide or the consensus sequence or the polypeptide motif, as depicted in Table I, II or IV, application No. 2, column 5 or 8 in the respective same line as the nucleic acid molecule SEQ ID NO. 45321 or polypeptide SEQ ID NO. 45322, respectively, or a homolog or a fragment thereof, is increased or generated, or if the activity acetyltransferase is increased or generated in a non-human organism, like a microorganism or a plant cell, plant or part thereof, especially with non-targeted localization, whereby the respective line discloses in column 7 arginine. For example, an increase of the arginine of at least 1 percent, particularly in a range of 93 to 838-percent is conferred as compared to a corresponding non-transformed wild type non-human organism.

[8857] Accordingly, in one embodiment, an increase of glutamine in a non-human organism, as compared to a corresponding non-transformed wild type non-human organism, is conferred in the process of the invention, if the activity of a polypeptide showing the activity of a acetyltransferase, or if the activity of the polypeptide B4256, preferably represented by SEQ ID NO. 45322, or a homolog or fragment thereof, or if the activity of a polypeptide encoded by a nucleic acid molecule comprising the nucleic acid SEQ ID NO. 45321, preferably the coding region thereof, or a homolog or fragment thereof, e.g. derived from Escherichia coli, is increased or generated. For example the activity of a nucleic acid molecule or a polypeptide comprising the nucleic acid, preferably the coding region thereof, or polypeptide or the consensus sequence or the polypeptide motif, as depicted in Table I, II or IV, application No. 2, column 5 or 8 in the respective same line as the nucleic acid molecule SEQ ID NO. 45321 or polypeptide SEQ ID NO. 45322, respectively, or a homolog or a fragment thereof, is increased or generated, or if the activity acetyltransferase is increased or generated in a non-human organism, like a microorganism or a plant cell, plant or part thereof, especially with non-targeted localization, whereby the respective line discloses in column 7 glutamine. For example, an increase of the glutamine of at least 1 percent, particularly in a range of 43 to 153-percent is conferred as compared to a corresponding non-transformed wild type non-human organism.

[8858] Accordingly, in one embodiment, an increase of proline in a non-human organism, as compared to a corresponding non-transformed wild type non-human organism, is conferred in the process of the invention, if the activity of a polypeptide showing the activity of a acetyltransferase, or if the activity of the polypeptide B4256, preferably represented by SEQ ID NO. 45322, or a homolog or fragment thereof, or if the activity of a polypeptide encoded by a nucleic acid molecule comprising the nucleic acid SEQ ID NO. 45321, preferably the coding region thereof, or a homolog or fragment thereof, e.g. derived from Escherichia coli, is increased or generated. For example the activity of a nucleic acid molecule or a polypeptide comprising the nucleic acid, preferably the coding region thereof, or polypeptide or the consensus sequence or the polypeptide motif, as depicted in Table I, II or IV, application No. 2, column 5 or 8 in the respective same line as the nucleic acid molecule SEQ ID NO. 45321 or polypeptide SEQ ID NO. 45322, respectively, or a homolog or a fragment thereof, is increased or generated, or if the activity acetyltransferase is increased or generated in a non-human organism, like a microorganism or a plant cell, plant or part thereof, especially with non-targeted localization, whereby the respective line discloses in column 7 proline. For example, an increase of the proline of at least 1 percent, particularly in a range of 39 to 843-percent is conferred as compared to a corresponding non-transformed wild type non-human organism.

[8859] Accordingly, in one embodiment, an increase of arginine in a non-human organism, as compared to a corresponding non-transformed wild type non-human organism, is conferred in the process of the invention, if the activity of a polypeptide showing the activity of a gluconate transport system permease 3, or if the activity of the polypeptide B4321, preferably represented by SEQ ID NO. 45395, or a homolog or fragment thereof, or if the activity of a polypeptide encoded by a nucleic acid molecule comprising the nucleic acid SEQ ID NO. 45394, preferably the coding region thereof, or a homolog or fragment thereof, e.g. derived from Escherichia coli, is increased or generated. For example the activity of a nucleic acid molecule or a polypeptide comprising the nucleic acid, preferably the coding region thereof, or polypeptide or the consensus sequence or the polypeptide motif, as depicted in Table I, II or IV, application No. 2, column 5 or 8 in the respective same line as the nucleic acid molecule SEQ ID NO. 45394 or polypeptide SEQ ID NO. 45395, respectively, or a homolog or a fragment thereof, is increased or generated, or if the activity gluconate transport system permease 3 is increased or generated in a non-human organism, like a microorganism or a plant cell, plant or part thereof, especially with non-targeted localization, whereby the respective line discloses in column 7 arginine. For example, an increase of the arginine of at least 1 percent, particularly in a range of 75 to 181 percent is conferred as compared to a corresponding non-transformed wild type non-human organism.

[8860] Accordingly, in one embodiment, an increase of glutamate in a non-human organism, as compared to a corresponding non-transformed wild type non-human organism, is conferred in the process of the invention, if the activity of a polypeptide showing the activity of a purinenucleoside phosphorylase, or if the activity of the polypeptide B4384, preferably represented by SEQ ID NO. 45557, or a homolog or fragment thereof, or if the activity of a polypeptide encoded by a nucleic acid molecule comprising the nucleic acid SEQ ID NO. 45556, preferably the coding region thereof, or a homolog or fragment thereof, e.g. derived from Escherichia coli, is increased or generated. For example the activity of a nucleic acid molecule or a polypeptide comprising the nucleic acid, preferably the coding region thereof, or polypeptide or the consensus sequence or the polypeptide motif, as depicted in Table I, II or IV, application No. 2, column 5 or 8 in the respective same line as the nucleic acid molecule SEQ ID NO. 45556 or polypeptide SEQ ID NO. 45557, respectively, or a homolog or a fragment thereof, is increased or generated, or if the activity purine-nucleoside phosphorylase is increased or generated in a non-human organism, like a microorganism or a plant cell, plant or part thereof, especially with non-targeted localization, whereby the respective line discloses in column 7 glutamate. For example, an increase of the glutamate of at least 1 percent, particularly in a range of 59 to 124-percent is conferred as compared to a corresponding non-transformed wild type non-human organism.

[8861] Accordingly, in one embodiment, an increase of proline in a non-human organism, as compared to a corresponding non-transformed wild type non-human organism, is conferred in the process of the invention, if the activity of a polypeptide showing the activity of a purine-nucleoside phosphorylase, or if the activity of the polypeptide B4384, preferably represented by SEQ ID NO. 45557, or a homolog or fragment thereof, or if the activity of a polypeptide encoded by a nucleic acid molecule comprising the nucleic acid SEQ ID NO. 45556, preferably the coding region thereof, or a homolog or fragment thereof, e.g. derived from Escherichia coli, is increased or generated. For example the activity of a nucleic acid molecule or a polypeptide comprising the nucleic acid, preferably the coding region thereof, or polypeptide or the consensus sequence or the polypeptide motif, as depicted in Table I, II or IV, application No. 2, column 5 or 8 in the respective same line as the nucleic acid molecule SEQ ID NO. 45556 or polypeptide SEQ ID NO. 45557, respectively, or a homolog or a fragment thereof, is increased or generated, or if the activity purine-nucleoside phosphorylase is increased or generated in a non-human organism, like a microorganism or a plant cell, plant or part thereof, especially with non-targeted localization, whereby the respective line discloses in column 7 proline. For example, an increase of the proline of at least 1 percent, particularly in a range of 107 to 506-percent is conferred as compared to a corresponding non-transformed wild type non-human organism.

[8862] Accordingly, in one embodiment, an increase of arginine in a non-human organism, as compared to a corresponding non-transformed wild type non-human organism, is conferred in the process of the invention, if the activity of a polypeptide showing the activity of a thioredoxin, or if the activity of the polypeptide C_pp004096192r, preferably represented by SEQ ID NO. 45758, or a homolog or fragment thereof, or if the activity of a polypeptide encoded by a nucleic acid molecule comprising the nucleic acid SEQ ID NO. 45757, preferably the coding region thereof, or a homolog or fragment thereof, e.g. derived from Physcomitrella patens, is increased or generated. For example the activity of a nucleic acid molecule or a polypeptide comprising the nucleic acid, preferably the coding region thereof, or polypeptide or the consensus sequence or the polypeptide motif, as depicted in Table I, II or IV, application No. 2, column 5 or 8 in the respective same line as the nucleic acid molecule SEQ ID NO. 45757 or polypeptide SEQ ID NO. 45758, respectively, or a homolog or a fragment thereof, is increased or generated, or if the activity thioredoxin is increased or generated in a non-human organism, like a microorganism or a plant cell, plant or part thereof, especially with non-targeted localization, whereby the respective line discloses in column 7 arginine. For example, an increase of the arginine of at least 1 percent, particularly in a range of 61 to 306-percent is conferred as compared to a corresponding non-transformed wild type non-human organism.

[8863] Accordingly, in one embodiment, an increase of proline in a non-human organism, as compared to a corresponding non-transformed wild type non-human organism, is conferred in the process of the invention, if the activity of a polypeptide showing the activity of a GM02LC11114-protein, or if the activity of the polypeptide GM02LC11114, preferably represented by SEQ ID NO. 45796, or a homolog or fragment thereof, or if the activity of a polypeptide encoded by a nucleic acid molecule comprising the nucleic acid SEQ ID NO. 45795, preferably the coding region thereof, or a homolog or fragment thereof, e.g. derived from Glycine max, is increased or generated. For example the activity of a nucleic acid molecule or a polypeptide comprising the nucleic acid, preferably the coding region thereof, or polypeptide or the consensus sequence or the polypeptide motif, as depicted in Table I, II or IV, application No. 2, column 5 or 8 in the respective same line as the nucleic acid molecule SEQ ID NO. 45795 or polypeptide SEQ ID NO. 45796, respectively, or a homolog or a fragment thereof, is increased or generated, or if the activity GM02LC11114-protein is increased or generated in a non-human organism, like a microorganism or a plant cell, plant or part thereof, especially with non-targeted localization, whereby the respective line discloses in column 7 proline. For example, an increase of the proline of at least 1 percent, particularly in a range of 40 to 127-percent is conferred as compared to a corresponding non-transformed wild type non-human organism.

[8864] Accordingly, in one embodiment, an increase of glutamine in a non-human organism, as compared to a corresponding non-transformed wild type non-human organism, is conferred in the process of the invention, if the activity of a polypeptide showing the activity of a glutaredoxin, or if the activity of the polypeptide GM02LC12622, preferably represented by SEQ ID NO. 10812, or a homolog or fragment thereof, or if the activity of a polypeptide encoded by a nucleic acid molecule comprising the nucleic acid SEQ ID NO. 10811, preferably the coding region thereof, or a homolog or fragment thereof, e.g. derived from Glycine max, is increased or generated. For example the activity of a nucleic acid molecule or a polypeptide comprising the nucleic acid, preferably the coding region thereof, or polypeptide or the consensus sequence or the polypeptide motif, as depicted in Table I, II or IV, application No. 2, column 5 or 8 in the respective same line as the nucleic acid molecule SEQ ID NO. 10811 or polypeptide SEQ ID NO. 10812, respectively, or a homolog or a fragment thereof, is increased or generated, or if the activity glutaredoxin is increased or generated in a non-human organism, like a microorganism or a plant cell, plant or part thereof, especially with non-targeted localization, whereby the respective line discloses in column 7 glutamine. For example, an increase of the glutamine of at least 1 percent, particularly in a range of 68 to 261-percent is conferred as compared to a corresponding non-transformed wild type non-human organism.

[8865] Accordingly, in one embodiment, an increase of arginine in a non-human organism, as compared to a corresponding non-transformed wild type non-human organism, is conferred in the process of the invention, if the activity of a polypeptide showing the activity of a histone H2A, or if the activity of the polypeptide GM02LC15313, preferably represented by SEQ ID NO. 45898, or a homolog or fragment thereof, or if the activity of a polypeptide encoded by a nucleic acid molecule comprising the nucleic acid SEQ ID NO. 45897, preferably the coding region thereof, or a homolog or fragment thereof, e.g. derived from Glycine max, is increased or generated. For example the activity of a nucleic acid molecule or a polypeptide comprising the nucleic acid, preferably the coding region thereof, or polypeptide or the consensus sequence or the polypeptide motif, as depicted in Table I, II or IV, application No. 2, column 5 or 8 in the respective same line as the nucleic acid molecule SEQ ID NO. 45897 or polypeptide SEQ ID NO. 45898, respectively, or a homolog or a fragment thereof, is increased or generated, or if the activity histone H2A is increased or generated in a non-human organism, like a microorganism or a plant cell, plant or part thereof, especially with non-targeted localization, whereby the respective line discloses in column 7 arginine. For example, an increase of the arginine of at least 1 percent, particularly in a range of 63 to 488-percent is conferred as compared to a corresponding non-transformed wild type non-human organism.

[8866] Accordingly, in one embodiment, an increase of proline in a non-human organism, as compared to a corresponding non-transformed wild type non-human organism, is conferred in the process of the invention, if the activity of a polypeptide showing the activity of a histone H2A, or if the activity of the polypeptide GM02LC15313, preferably represented by SEQ ID NO. 45898, or a homolog or fragment thereof, or if the activity of a polypeptide encoded by a nucleic acid molecule comprising the nucleic acid SEQ ID NO. 45897, preferably the coding region thereof, or a homolog or fragment thereof, e.g. derived from Glycine max, is increased or generated. For example the activity of a nucleic acid molecule or a polypeptide comprising the nucleic acid, preferably the coding region thereof, or polypeptide or the consensus sequence or the polypeptide motif, as depicted in Table I, II or IV, application No. 2, column 5 or 8 in the respective same line as the nucleic acid molecule SEQ ID NO. 45897 or polypeptide SEQ ID NO. 45898, respectively, or a homolog or a fragment thereof, is increased or generated, or if the activity histone H2A is increased or generated in a non-human organism, like a microorganism or a plant cell, plant or part thereof, especially with non-targeted localization, whereby the respective line discloses in column 7 proline. For example, an increase of the proline of at least 1 percent, particularly in a range of 37 to 144-percent is conferred as compared to a corresponding non-transformed wild type non-human organism.

[8867] Accordingly, in one embodiment, an increase of glutamine in a non-human organism, as compared to a corresponding non-transformed wild type non-human organism, is conferred in the process of the invention, if the activity of a polypeptide showing the activity of a GM02LC17485-protein, or if the activity of the polypeptide GM02LC17485, preferably represented by SEQ ID NO. 46406, or a homolog or fragment thereof, or if the activity of a polypeptide encoded by a nucleic acid molecule comprising the nucleic acid SEQ ID NO. 46405, preferably the coding region thereof, or a homolog or fragment thereof, e.g. derived from Glycine max, is increased or generated. For example the activity of a nucleic acid molecule or a polypeptide comprising the nucleic acid, preferably the coding region thereof, or polypeptide or the consensus sequence or the polypeptide motif, as depicted in Table I, II or IV, application No. 2, column 5 or 8 in the respective same line as the nucleic acid molecule SEQ ID NO. 46405 or polypeptide SEQ ID NO. 46406, respectively, or a homolog or a fragment thereof, is increased or generated, or if the activity GM02LC17485-protein is increased or generated in a non-human organism, like a microorganism or a plant cell, plant or part thereof, especially with non-targeted localization, whereby the respective line discloses in column 7 glutamine. For example, an increase of the glutamine of at least 1 percent, particularly in a range of 45 to 157-percent is conferred as compared to a corresponding non-transformed wild type non-human organism.

[8868] Accordingly, in one embodiment, an increase of arginine in a non-human organism, as compared to a corresponding non-transformed wild type non-human organism, is conferred in the process of the invention, if the activity of a polypeptide showing the activity of a RNA binding protein, or if the activity of the polypeptide GM02LC17556, preferably represented by SEQ ID NO. 46516, or a homolog or fragment thereof, or if the activity of a polypeptide encoded by a nucleic acid molecule comprising the nucleic acid SEQ ID NO. 46515, preferably the coding region thereof, or a homolog or fragment thereof, e.g. derived from Glycine max, is increased or generated. For example the activity of a nucleic acid molecule or a polypeptide comprising the nucleic acid, preferably the coding region thereof, or polypeptide or the consensus sequence or the polypeptide motif, as depicted in Table I, II or IV, application No. 2, column 5 or 8 in the respective same line as the nucleic acid molecule SEQ ID NO. 46515 or polypeptide SEQ ID NO. 46516, respectively, or a homolog or a fragment thereof, is increased or generated, or if the activity RNA binding protein is increased or generated in a non-human organism, like a microorganism or a plant cell, plant or part thereof, especially with non-targeted localization, whereby the respective line discloses in column 7 arginine. For example, an increase of the arginine of at least 1 percent, particularly in a range of 98 to 362-percent is conferred as compared to a corresponding non-transformed wild type non-human organism.

[8869] Accordingly, in one embodiment, an increase of proline in a non-human organism, as compared to a corresponding non-transformed wild type non-human organism, is conferred in the process of the invention, if the activity of a polypeptide showing the activity of a transcription factor, or if the activity of the polypeptide GM02LC19289, preferably represented by SEQ ID NO. 46752, or a homolog or fragment thereof, or if the activity of a polypeptide encoded by a nucleic acid molecule comprising the nucleic acid SEQ ID NO. 46751, preferably the coding region thereof, or a homolog or fragment thereof, e.g. derived from Glycine max, is increased or generated. For example the activity of a nucleic acid molecule or a polypeptide comprising the nucleic acid, preferably the coding region thereof, or polypeptide or the consensus sequence or the polypeptide motif, as depicted in Table I, II or IV, application No. 2, column 5 or 8 in the respective same line as the nucleic acid molecule SEQ ID NO. 46751 or polypeptide SEQ ID NO. 46752, respectively, or a homolog or a fragment thereof, is increased or generated, or if the activity transcription factor is increased or generated in a non-human organism, like a microorganism or a plant cell, plant or part thereof, especially with non-targeted localization, whereby the respective line discloses in column 7 proline. For example, an increase of the proline of at least 1 percent, particularly in a range of 36 to 231-percent is conferred as compared to a corresponding non-transformed wild type non-human organism.

[8870] Accordingly, in one embodiment, an increase of proline in a non-human organism, as compared to a corresponding non-transformed wild type non-human organism, is conferred in the process of the invention, if the activity of a polypeptide showing the activity of a cyclin D, or if the activity of the polypeptide GM02LC44512, preferably represented by SEQ ID NO. 46851, or a homolog or fragment thereof, or if the activity of a polypeptide encoded by a nucleic acid molecule comprising the nucleic acid SEQ ID NO. 46850, preferably the coding region thereof, or a homolog or fragment thereof, e.g. derived from Glycine max, is increased or generated. For example the activity of a nucleic acid molecule or a polypeptide comprising the nucleic acid, preferably the coding region thereof, or polypeptide or the consensus sequence or the polypeptide motif, as depicted in Table I, II or IV, application No. 2, column 5 or 8 in the respective same line as the nucleic acid molecule SEQ ID NO. 46850 or polypeptide SEQ ID NO. 46851, respectively, or a homolog or a fragment thereof, is increased or generated, or if the activity cyclin D is increased or generated in a non-human organism, like a microorganism or a plant cell, plant or part thereof, especially with non-targeted localization, whereby the respective line discloses in column 7 proline. For example, an increase of the proline of at least 1 percent, particularly in a range of 72 to 410-percent is conferred as compared to a corresponding non-transformed wild type non-human organism.

[8871] Accordingly, in one embodiment, an increase of proline in a non-human organism, as compared to a corresponding non-transformed wild type non-human organism, is conferred in the process of the invention, if the activity of a polypeptide showing the activity of a GM02LC46-protein, or if the activity of the polypeptide GM02LC46, preferably represented by SEQ ID NO. 47027, or a homolog or fragment thereof, or if the activity of a polypeptide encoded by a nucleic acid molecule comprising the nucleic acid SEQ ID NO. 47026, preferably the coding region thereof, or a homolog or fragment thereof, e.g. derived from GLYCINE MAX, is increased or generated. For example the activity of a nucleic acid molecule or a polypeptide comprising the nucleic acid, preferably the coding region thereof, or polypeptide or the consensus sequence or the polypeptide motif, as depicted in Table I, II or IV, application No. 2, column 5 or 8 in the respective same line as the nucleic acid molecule SEQ ID NO. 47026 or polypeptide SEQ ID NO. 47027, respectively, or a homolog or a fragment thereof, is increased or generated, or if the activity GM02LC46-protein is increased or generated in a non-human organism, like a microorganism or a plant cell, plant or part thereof, especially with non-targeted localization, whereby the respective line discloses in column 7 proline. For example, an increase of the proline of at least 1 percent, particularly in a range of 59 to 113-percent is conferred as compared to a corresponding non-transformed wild type non-human organism.

[8872] Accordingly, in one embodiment, an increase of proline in a non-human organism, as compared to a corresponding non-transformed wild type non-human organism, is conferred in the process of the invention, if the activity of a polypeptide showing the activity of a GM02LC5744-protein, or if the activity of the polypeptide GM02LC5744, preferably represented by SEQ ID NO. 47077, or a homolog or fragment thereof, or if the activity of a polypeptide encoded by a nucleic acid molecule comprising the nucleic acid SEQ ID NO. 47076, preferably the coding region thereof, or a homolog or fragment thereof, e.g. derived from Glycine max, is increased or generated. For example the activity of a nucleic acid molecule or a polypeptide comprising the nucleic acid, preferably the coding region thereof, or polypeptide or the consensus sequence or the polypeptide motif, as depicted in Table I, II or IV, application No. 2, column 5 or 8 in the respective same line as the nucleic acid molecule SEQ ID NO. 47076 or polypeptide SEQ ID NO. 47077, respectively, or a homolog or a fragment thereof, is increased or generated, or if the activity GM02LC5744-protein is increased or generated in a non-human organism, like a microorganism or a plant cell, plant or part thereof, especially with non-targeted localization, whereby the respective line discloses in column 7 proline. For example, an increase of the proline of at least 1 percent, particularly in a range of 42 to 73-percent is conferred as compared to a corresponding non-transformed wild type non-human organism.

[8873] Accordingly, in one embodiment, an increase of glutamate in a non-human organism, as compared to a corresponding non-transformed wild type non-human organism, is conferred in the process of the invention, if the activity of a polypeptide showing the activity of a transcription factor, or if the activity of the polypeptide GM02LC6021, preferably represented by SEQ ID NO. 47106, or a homolog or fragment thereof, or if the activity of a polypeptide encoded by a nucleic acid molecule comprising the nucleic acid SEQ ID NO. 47105, preferably the coding region thereof, or a homolog or fragment thereof, e.g. derived from Glycine max, is increased or generated. For example the activity of a nucleic acid molecule or a polypeptide comprising the nucleic acid, preferably the coding region thereof, or polypeptide or the consensus sequence or the polypeptide motif, as depicted in Table I, II or IV, application No. 2, column 5 or 8 in the respective same line as the nucleic acid molecule SEQ ID NO. 47105 or polypeptide SEQ ID NO. 47106, respectively, or a homolog or a fragment thereof, is increased or generated, or if the activity transcription factor is increased or generated in a non-human organism, like a microorganism or a plant cell, plant or part thereof, especially with non-targeted localization, whereby the respective line discloses in column 7 glutamate. For example, an increase of the glutamate of at least 1 percent, particularly in a range of 37 to 66-percent is conferred as compared to a corresponding non-transformed wild type non-human organism.

[8874] Accordingly, in one embodiment, an increase of proline in a non-human organism, as compared to a corresponding non-transformed wild type non-human organism, is conferred in the process of the invention, if the activity of a polypeptide showing the activity of a glutaredoxin, or if the activity of the polypeptide NZ_AAAU02000016.150, preferably represented by SEQ ID NO. 47160, or a homolog or fragment thereof, or if the activity of a polypeptide encoded by a nucleic acid molecule comprising the nucleic acid SEQ ID NO. 47159, preferably the coding region thereof, or a homolog or fragment thereof, e.g. derived from Azotobacter vinelandii, is increased or generated. For example the activity of a nucleic acid molecule or a polypeptide comprising the nucleic acid, preferably the coding region thereof, or polypeptide or the consensus sequence or the polypeptide motif, as depicted in Table I, II or IV, application No. 2, column 5 or 8 in the respective same line as the nucleic acid molecule SEQ ID NO. 47159 or polypeptide SEQ ID NO. 47160, respectively, or a homolog or a fragment thereof, is increased or generated, or if the activity glutaredoxin is increased or generated in a non-human organism, like a microorganism or a plant cell, plant or part thereof, especially with non-targeted localization, whereby the respective line discloses in column 7 proline. For example, an increase of the proline of at least 1 percent, particularly in a range of 37 to 58-percent is conferred as compared to a corresponding non-transformed wild type non-human organism.

[8875] Accordingly, in one embodiment, an increase of arginine in a non-human organism, as compared to a corresponding non-transformed wild type non-human organism, is conferred in the process of the invention, if the activity of a polypeptide showing the activity of a s_pp015018333r-protein, or if the activity of the polypeptide S_pp015018333r, preferably represented by SEQ ID NO. 59852, or a homolog or fragment thereof, or if the activity of a polypeptide encoded by a nucleic acid molecule comprising the nucleic acid SEQ ID NO. 59851, preferably the coding region thereof, or a homolog or fragment thereof, e.g. derived from Physcomitrella patens, is increased or generated. For example the activity of a nucleic acid molecule or a polypeptide comprising the nucleic acid, preferably the coding region thereof, or polypeptide or the consensus sequence or the polypeptide motif, as depicted in Table I, II or IV, application No. 2, column 5 or 8 in the respective same line as the nucleic acid molecule SEQ ID NO. 59851 or polypeptide SEQ ID NO. 59852, respectively, or a homolog or a fragment thereof, is increased or generated, or if the activity s_pp015018333r-protein is increased or generated in a non-human organism, like a microorganism or a plant cell, plant or part thereof, especially with non-targeted localization, whereby the respective line discloses in column 7 arginine. For example, an increase of the arginine of at least 1 percent, particularly in a range of 106 to 460-percent is conferred as compared to a corresponding non-transformed wild type non-human organism.

[8876] Accordingly, in one embodiment, an increase of glutamine in a non-human organism, as compared to a corresponding non-transformed wild type non-human organism, is conferred in the process of the invention, if the activity of a polypeptide showing the activity of a s_pp015018333r-protein, or if the activity of the polypeptide S_pp015018333r, preferably represented by SEQ ID NO. 59852, or a homolog or fragment thereof, or if the activity of a polypeptide encoded by a nucleic acid molecule comprising the nucleic acid SEQ ID NO. 59851, preferably the coding region thereof, or a homolog or fragment thereof, e.g. derived from Physcomitrella patens, is increased or generated. For example the activity of a nucleic acid molecule or a polypeptide comprising the nucleic acid, preferably the coding region thereof, or polypeptide or the consensus sequence or the polypeptide motif, as depicted in Table I, II or IV, application No. 2, column 5 or 8 in the respective same line as the nucleic acid molecule SEQ ID NO. 59851 or polypeptide SEQ ID NO. 59852, respectively, or a homolog or a fragment thereof, is increased or generated, or if the activity s_pp015018333r-protein is increased or generated in a non-human organism, like a microorganism or a plant cell, plant or part thereof, especially with non-targeted localization, whereby the respective line discloses in column 7 glutamine. For example, an increase of the glutamine of at least 1 percent, particularly in a range of 44 to 187-percent is conferred as compared to a corresponding non-transformed wild type non-human organism.

[8877] Accordingly, in one embodiment, an increase of proline in a non-human organism, as compared to a corresponding non-transformed wild type non-human organism, is conferred in the process of the invention, if the activity of a polypeptide showing the activity of a sll0064-protein, or if the activity of the polypeptide Sll0064, preferably represented by SEQ ID NO. 47527, or a homolog or fragment thereof, or if the activity of a polypeptide encoded by a nucleic acid molecule comprising the nucleic acid SEQ ID NO. 47526, preferably the coding region thereof, or a homolog or fragment thereof, e.g. derived from Synechocystis sp., is increased or generated. For example the activity of a nucleic acid molecule or a polypeptide comprising the nucleic acid, preferably the coding region thereof, or polypeptide or the consensus sequence or the polypeptide motif, as depicted in Table I, II or IV, application No. 2, column 5 or 8 in the respective same line as the nucleic acid molecule SEQ ID NO. 47526 or polypeptide SEQ ID NO. 47527, respectively, or a homolog or a fragment thereof, is increased or generated, or if the activity sll0064-protein is increased or generated in a non-human organism, like a microorganism or a plant cell, plant or part thereof, especially with mitochondrial localization, whereby the respective line discloses in column 7 proline. For example, an increase of the proline of at least 1 percent, particularly in a range of 62 to 111-percent is conferred as compared to a corresponding non-transformed wild type non-human organism.

[8878] Accordingly, in one embodiment, an increase of glutamate in a non-human organism, as compared to a corresponding non-transformed wild type non-human organism, is conferred in the process of the invention, if the activity of a polypeptide showing the activity of a N-acetyl-gamma-glutamyl-phosphate reductase, or if the activity of the polypeptide Sll0080, preferably represented by SEQ ID NO. 47567, or a homolog or fragment thereof, or if the activity of a polypeptide encoded by a nucleic acid molecule comprising the nucleic acid SEQ ID NO. 47566, preferably the coding region thereof, or a homolog or fragment thereof, e.g. derived from Synechocystis sp., is increased or generated. For example the activity of a nucleic acid molecule or a polypeptide comprising the nucleic acid, preferably the coding region thereof, or polypeptide or the consensus sequence or the polypeptide motif, as depicted in Table I, II or IV, application No. 2, column 5 or 8 in the respective same line as the nucleic acid molecule SEQ ID NO. 47566 or polypeptide SEQ ID NO. 47567, respectively, or a homolog or a fragment thereof, is increased or generated, or if the activity N-acetyl-gamma-glutamyl-phosphate reductase is increased or generated in a non-human organism, like a microorganism or a plant cell, plant or part thereof, especially with plastidic localization, whereby the respective line discloses in column 7 glutamate. For example, an increase of the glutamate of at least 1 percent, particularly in a range of 51 to 61-percent is conferred as compared to a corresponding non-transformed wild type non-human organism.

[8879] Accordingly, in one embodiment, an increase of glutamate in a non-human organism, as compared to a corresponding non-transformed wild type non-human organism, is conferred in the process of the invention, if the activity of a polypeptide showing the activity of a heat shock protein, or if the activity of the polypeptide Sll0170, preferably represented by SEQ ID NO. 48139, or a homolog or fragment thereof, or if the activity of a polypeptide encoded by a nucleic acid molecule comprising the nucleic acid SEQ ID NO. 48138, preferably the coding region thereof, or a homolog or fragment thereof, e.g. derived from Synechocystis sp., is increased or generated. For example the activity of a nucleic acid molecule or a polypeptide comprising the nucleic acid, preferably the coding region thereof, or polypeptide or the consensus sequence or the polypeptide motif, as depicted in Table I, II or IV, application No. 2, column 5 or 8 in the respective same line as the nucleic acid molecule SEQ ID NO. 48138 or polypeptide SEQ ID NO. 48139, respectively, or a homolog or a fragment thereof, is increased or generated, or if the activity heat shock protein is increased or generated in a non-human organism, like a microorganism or a plant cell, plant or part thereof, especially with non-targeted localization, whereby the respective line discloses in column 7 glutamate. For example, an increase of the glutamate of at least 1 percent, particularly in a range of 39 to 234-percent is conferred as compared to a corresponding non-transformed wild type non-human organism.

[8880] Accordingly, in one embodiment, an increase of arginine in a non-human organism, as compared to a corresponding non-transformed wild type non-human organism, is conferred in the process of the invention, if the activity of a polypeptide showing the activity of a flavodoxin, or if the activity of the polypeptide Sll0248, preferably represented by SEQ ID NO. 49144, or a homolog or fragment thereof, or if the activity of a polypeptide encoded by a nucleic acid molecule comprising the nucleic acid SEQ ID NO. 49143, preferably the coding region thereof, or a homolog or fragment thereof, e.g. derived from Synechocystis sp., is increased or generated. For example the activity of a nucleic acid molecule or a polypeptide comprising the nucleic acid, preferably the coding region thereof, or polypeptide or the consensus sequence or the polypeptide motif, as depicted in Table I, II or IV, application No. 2, column 5 or 8 in the respective same line as the nucleic acid molecule SEQ ID NO. 49143 or polypeptide SEQ ID NO. 49144, respectively, or a homolog or a fragment thereof, is increased or generated, or if the activity flavodoxin is increased or generated in a non-human organism, like a microorganism or a plant cell, plant or part thereof, especially with plastidic localization, whereby the respective line discloses in column 7 arginine. For example, an increase of the arginine of at least 1 percent, particularly in a range of 49 to 438-percent is conferred as compared to a corresponding non-transformed wild type non-human organism.

[8881] Accordingly, in one embodiment, an increase of proline in a non-human organism, as compared to a corresponding non-transformed wild type non-human organism, is conferred in the process of the invention, if the activity of a polypeptide showing the activity of a phosphopantothenoylcysteinesynthetase/decarboxylase, or if the activity of the polypeptide Sll0250, preferably represented by SEQ ID NO. 49343, or a homolog or fragment thereof, or if the activity of a polypeptide encoded by a nucleic acid molecule comprising the nucleic acid SEQ ID NO. 49342, preferably the coding region thereof, or a homolog or fragment thereof, e.g. derived from Synechocystis sp., is increased or generated. For example the activity of a nucleic acid molecule or a polypeptide comprising the nucleic acid, preferably the coding region thereof, or polypeptide or the consensus sequence or the polypeptide motif, as depicted in Table I, II or IV, application No. 2, column 5 or 8 in the respective same line as the nucleic acid molecule SEQ ID NO. 49342 or polypeptide SEQ ID NO. 49343, respectively, or a homolog or a fragment thereof, is increased or generated, or if the activity phosphopantothenoylcysteinesynthetase/decarboxylase is increased or generated in a non-human organism, like a microorganism or a plant cell, plant or part thereof, especially with non-targeted localization, whereby the respective line discloses in column 7 proline. For example, an increase of the proline of at least 1 percent, particularly in a range of 139 to 160-percent is conferred as compared to a corresponding non-transformed wild type non-human organism.

[8882] Accordingly, in one embodiment, an increase of glutamine in a non-human organism, as compared to a corresponding non-transformed wild type non-human organism, is conferred in the process of the invention, if the activity of a polypeptide showing the activity of a sll0254-protein, or if the activity of the polypeptide Sll0254, preferably represented by SEQ ID NO. 49801, or a homolog or fragment thereof, or if the activity of a polypeptide encoded by a nucleic acid molecule comprising the nucleic acid SEQ ID NO. 49800, preferably the coding region thereof, or a homolog or fragment thereof, e.g. derived from Synechocystis sp., is increased or generated. For example the activity of a nucleic acid molecule or a polypeptide comprising the nucleic acid, preferably the coding region thereof, or polypeptide or the consensus sequence or the polypeptide motif, as depicted in Table I, II or IV, application No. 2, column 5 or 8 in the respective same line as the nucleic acid molecule SEQ ID NO. 49800 or polypeptide SEQ ID NO. 49801, respectively, or a homolog or a fragment thereof, is increased or generated, or if the activity sll0254-protein is increased or generated in a non-human organism, like a microorganism or a plant cell, plant or part thereof, especially with mitochondrial localization, whereby the respective line discloses in column 7 glutamine. For example, an increase of the glutamine of at least 1 percent, particularly in a range of 49 to 391-percent is conferred as compared to a corresponding non-transformed wild type non-human organism.

[8883] Accordingly, in one embodiment, an increase of proline in a non-human organism, as compared to a corresponding non-transformed wild type non-human organism, is conferred in the process of the invention, if the activity of a polypeptide showing the activity of a sll0254-protein, or if the activity of the polypeptide Sll0254, preferably represented by SEQ ID NO. 49801, or a homolog or fragment thereof, or if the activity of a polypeptide encoded by a nucleic acid molecule comprising the nucleic acid SEQ ID NO. 49800, preferably the coding region thereof, or a homolog or fragment thereof, e.g. derived from Synechocystis sp., is increased or generated. For example the activity of a nucleic acid molecule or a polypeptide comprising the nucleic acid, preferably the coding region thereof, or polypeptide or the consensus sequence or the polypeptide motif, as depicted in Table I, II or IV, application No. 2, column 5 or 8 in the respective same line as the nucleic acid molecule SEQ ID NO. 49800 or polypeptide SEQ ID NO. 49801, respectively, or a homolog or a fragment thereof, is increased or generated, or if the activity sll0254-protein is increased or generated in a non-human organism, like a microorganism or a plant cell, plant or part thereof, especially with mitochondrial localization, whereby the respective line discloses in column 7 proline. For example, an increase of the proline of at least 1 percent, particularly in a range of 40 to 179-percent is conferred as compared to a corresponding non-transformed wild type non-human organism.

[8884] Accordingly, in one embodiment, an increase of proline in a non-human organism, as compared to a corresponding non-transformed wild type non-human organism, is conferred in the process of the invention, if the activity of a polypeptide showing the activity of a polyphosphate kinase, or if the activity of the polypeptide Sll0290, preferably represented by SEQ ID NO. 49829, or a homolog or fragment thereof, or if the activity of a polypeptide encoded by a nucleic acid molecule comprising the nucleic acid SEQ ID NO. 49828, preferably the coding region thereof, or a homolog or fragment thereof, e.g. derived from Synechocystis sp., is increased or generated. For example the activity of a nucleic acid molecule or a polypeptide comprising the nucleic acid, preferably the coding region thereof, or polypeptide or the consensus sequence or the polypeptide motif, as depicted in Table I, II or IV, application No. 2, column 5 or 8 in the respective same line as the nucleic acid molecule SEQ ID NO. 49828 or polypeptide SEQ ID NO. 49829, respectively, or a homolog or a fragment thereof, is increased or generated, or if the activity polyphosphate kinase is increased or generated in a non-human organism, like a microorganism or a plant cell, plant or part thereof, especially with non-targeted localization, whereby the respective line discloses in column 7 proline. For example, an increase of the proline of at least 1 percent, particularly in a range of 34 to 190-percent is conferred as compared to a corresponding non-transformed wild type non-human organism.

[8885] Accordingly, in one embodiment, an increase of proline in a non-human organism, as compared to a corresponding non-transformed wild type non-human organism, is conferred in the process of the invention, if the activity of a polypeptide showing the activity of a sll0354-protein, or if the activity of the polypeptide Sll0354, preferably represented by SEQ ID NO. 50071, or a homolog or fragment thereof, or if the activity of a polypeptide encoded by a nucleic acid molecule comprising the nucleic acid SEQ ID NO. 50070, preferably the coding region thereof, or a homolog or fragment thereof, e.g. derived from Synechocystis sp., is increased or generated. For example the activity of a nucleic acid molecule or a polypeptide comprising the nucleic acid, preferably the coding region thereof, or polypeptide or the consensus sequence or the polypeptide motif, as depicted in Table I, II or IV, application No. 2, column 5 or 8 in the respective same line as the nucleic acid molecule SEQ ID NO. 50070 or polypeptide SEQ ID NO. 50071, respectively, or a homolog or a fragment thereof, is increased or generated, or if the activity sll0354-protein is increased or generated in a non-human organism, like a microorganism or a plant cell, plant or part thereof, especially with non-targeted localization, whereby the respective line discloses in column 7 proline. For example, an increase of the proline of at least 1 percent, particularly in a range of 42 to 129-percent is conferred as compared to a corresponding non-transformed wild type non-human organism. Accordingly, in one embodiment, an increase of proline in a non-human organism, as compared to a corresponding non-transformed wild type non-human organism, is conferred in the process of the invention, if the activity of a polypeptide showing the activity of a urease subunit, or if the activity of the polypeptide Sll0420, preferably represented by SEQ ID NO. 50105, or a homolog or fragment thereof, or if the activity of a polypeptide encoded by a nucleic acid molecule comprising the nucleic acid SEQ ID NO. 50104, preferably the coding region thereof, or a homolog or fragment thereof, e.g. derived from Synechocystis sp., is increased or generated. For example the activity of a nucleic acid molecule or a polypeptide comprising the nucleic acid, preferably the coding region thereof, or polypeptide or the consensus sequence or the polypeptide motif, as depicted in Table I, II or IV, application No. 2, column 5 or 8 in the respective same line as the nucleic acid molecule SEQ ID NO. 50104 or polypeptide SEQ ID NO. 50105, respectively, or a homolog or a fragment thereof, is increased or generated, or if the activity urease subunit is increased or generated in a non-human organism, like a microorganism or a plant cell, plant or part thereof, especially with non-targeted localization, whereby the respective line discloses in column 7 proline. For example, an increase of the proline of at least 1 percent, particularly in a range of 33 to 45-percent is conferred as compared to a corresponding non-transformed wild type non-human organism.

[8886] Accordingly, in one embodiment, an increase of arginine in a non-human organism, as compared to a corresponding non-transformed wild type non-human organism, is conferred in the process of the invention, if the activity of a polypeptide showing the activity of a NAD(P)Hquinone oxidoreductase subunit, or if the activity of the polypeptide Sll0521, preferably represented by SEQ ID NO. 50340, or a homolog or fragment thereof, or if the activity of a polypeptide encoded by a nucleic acid molecule comprising the nucleic acid SEQ ID NO. 50339, preferably the coding region thereof, or a homolog or fragment thereof, e.g. derived from Synechocystis sp., is increased or generated. For example the activity of a nucleic acid molecule or a polypeptide comprising the nucleic acid, preferably the coding region thereof, or polypeptide or the consensus sequence or the polypeptide motif, as depicted in Table I, II or IV, application No. 2, column 5 or 8 in the respective same line as the nucleic acid molecule SEQ ID NO. 50339 or polypeptide SEQ ID NO. 50340, respectively, or a homolog or a fragment thereof, is increased or generated, or if the activity NAD(P)H-quinone oxidoreductase subunit is increased or generated in a non-human organism, like a microorganism or a plant cell, plant or part thereof, especially with plastidic localization, whereby the respective line discloses in column 7 arginine. For example, an increase of the arginine of at least 1 percent, particularly in a range of 51 to 185 percent is conferred as compared to a corresponding non-transformed wild type non-human organism.

[8887] Accordingly, in one embodiment, an increase of proline in a non-human organism, as compared to a corresponding non-transformed wild type non-human organism, is conferred in the process of the invention, if the activity of a polypeptide showing the activity of a quinolinate synthetase, or if the activity of the polypeptide Sll0622, preferably represented by SEQ ID NO. 50714, or a homolog or fragment thereof, or if the activity of a polypeptide encoded by a nucleic acid molecule comprising the nucleic acid SEQ ID NO. 50713, preferably the coding region thereof, or a homolog or fragment thereof, e.g. derived from Synechocystis sp., is increased or generated. For example the activity of a nucleic acid molecule or a polypeptide comprising the nucleic acid, preferably the coding region thereof, or polypeptide or the consensus sequence or the polypeptide motif, as depicted in Table I, II or IV, application No. 2, column 5 or 8 in the respective same line as the nucleic acid molecule SEQ ID NO. 50713 or polypeptide SEQ ID NO. 50714, respectively, or a homolog or a fragment thereof, is increased or generated, or if the activity quinolinate synthetase is increased or generated in a non-human organism, like a microorganism or a plant cell, plant or part thereof, especially with mitochondrial localization, whereby the respective line discloses in column 7 proline. For example, an increase of the proline of at least 1 percent, particularly in a range of 46 to 106-percent is conferred as compared to a corresponding non-transformed wild type non-human organism.

[8888] Accordingly, in one embodiment, an increase of glutamate in a non-human organism, as compared to a corresponding non-transformed wild type non-human organism, is conferred in the process of the invention, if the activity of a polypeptide showing the activity of a permease protein of phosphate ABC transporter, or if the activity of the polypeptide Sll0682, preferably represented by SEQ ID NO. 50951, or a homolog or fragment thereof, or if the activity of a polypeptide encoded by a nucleic acid molecule comprising the nucleic acid SEQ ID NO. 50950, preferably the coding region thereof, or a homolog or fragment thereof, e.g. derived from Synechocystis sp., is increased or generated. For example the activity of a nucleic acid molecule or a polypeptide comprising the nucleic acid, preferably the coding region thereof, or polypeptide or the consensus sequence or the polypeptide motif, as depicted in Table I, II or IV, application No. 2, column 5 or 8 in the respective same line as the nucleic acid molecule SEQ ID NO. 50950 or polypeptide SEQ ID NO. 50951, respectively, or a homolog or a fragment thereof, is increased or generated, or if the activity permease protein of phosphate ABC transporter is increased or generated in a non-human organism, like a microorganism or a plant cell, plant or part thereof, especially with non-targeted localization, whereby the respective line discloses in column 7 glutamate. For example, an increase of the glutamate of at least 1 percent, particularly in a range of 45 to 153-percent is conferred as compared to a corresponding non-transformed wild type non-human organism.

[8889] Accordingly, in one embodiment, an increase of proline in a non-human organism, as compared to a corresponding non-transformed wild type non-human organism, is conferred in the process of the invention, if the activity of a polypeptide showing the activity of a permease protein of phosphate ABC transporter, or if the activity of the polypeptide Sll0682, preferably represented by SEQ ID NO. 50951, or a homolog or fragment thereof, or if the activity of a polypeptide encoded by a nucleic acid molecule comprising the nucleic acid SEQ ID NO. 50950, preferably the coding region thereof, or a homolog or fragment thereof, e.g. derived from Synechocystis sp., is increased or generated. For example the activity of a nucleic acid molecule or a polypeptide comprising the nucleic acid, preferably the coding region thereof, or polypeptide or the consensus sequence or the polypeptide motif, as depicted in Table I, II or IV, application No. 2, column 5 or 8 in the respective same line as the nucleic acid molecule SEQ ID NO. 50950 or polypeptide SEQ ID NO. 50951, respectively, or a homolog or a fragment thereof, is increased or generated, or if the activity permease protein of phosphate ABC transporter is increased or generated in a non-human organism, like a microorganism or a plant cell, plant or part thereof, especially with non-targeted localization, whereby the respective line discloses in column 7 proline. For example, an increase of the proline of at least 1 percent, particularly in a range of 32 to 90 percent is conferred as compared to a corresponding non-transformed wild type non-human organism.

[8890] Accordingly, in one embodiment, an increase of arginine in a non-human organism, as compared to a corresponding non-transformed wild type non-human organism, is conferred in the process of the invention, if the activity of a polypeptide showing the activity of a oxireductase, or if the activity of the polypeptide Sll0816, preferably represented by SEQ ID NO. 51199, or a homolog or fragment thereof, or if the activity of a polypeptide encoded by a nucleic acid molecule comprising the nucleic acid SEQ ID NO. 51198, preferably the coding region thereof, or a homolog or fragment thereof, e.g. derived from Synechocystis sp., is increased or generated. For example the activity of a nucleic acid molecule or a polypeptide comprising the nucleic acid, preferably the coding region thereof, or polypeptide or the consensus sequence or the polypeptide motif, as depicted in Table I, II or IV, application No. 2, column 5 or 8 in the respective same line as the nucleic acid molecule SEQ ID NO. 51198 or polypeptide SEQ ID NO. 51199, respectively, or a homolog or a fragment thereof, is increased or generated, or if the activity oxireductase is increased or generated in a non-human organism, like a microorganism or a plant cell, plant or part thereof, especially with non-targeted localization, whereby the respective line discloses in column 7 arginine. For example, an increase of the arginine of at least 1 percent, particularly in a range of 61 to 392-percent is conferred as compared to a corresponding non-transformed wild type non-human organism.

[8891] Accordingly, in one embodiment, an increase of glutamate in a non-human organism, as compared to a corresponding non-transformed wild type non-human organism, is conferred in the process of the invention, if the activity of a polypeptide showing the activity of a oxireductase, or if the activity of the polypeptide Sll0816, preferably represented by SEQ ID NO. 51199, or a homolog or fragment thereof, or if the activity of a polypeptide encoded by a nucleic acid molecule comprising the nucleic acid SEQ ID NO. 51198, preferably the coding region thereof, or a homolog or fragment thereof, e.g. derived from Synechocystis sp., is increased or generated. For example the activity of a nucleic acid molecule or a polypeptide comprising the nucleic acid, preferably the coding region thereof, or polypeptide or the consensus sequence or the polypeptide motif, as depicted in Table I, II or IV, application No. 2, column 5 or 8 in the respective same line as the nucleic acid molecule SEQ ID NO. 51198 or polypeptide SEQ ID NO. 51199, respectively, or a homolog or a fragment thereof, is increased or generated, or if the activity oxireductase is increased or generated in a non-human organism, like a microorganism or a plant cell, plant or part thereof, especially with non-targeted localization, whereby the respective line discloses in column 7 glutamate. For example, an increase of the glutamate of at least 1 percent, particularly in a range of 39 to 190-percent is conferred as compared to a corresponding non-transformed wild type non-human organism.

[8892] Accordingly, in one embodiment, an increase of glutamine in a non-human organism, as compared to a corresponding non-transformed wild type non-human organism, is conferred in the process of the invention, if the activity of a polypeptide showing the activity of a oxireductase, or if the activity of the polypeptide Sll0816, preferably represented by SEQ ID NO. 51199, or a homolog or fragment thereof, or if the activity of a polypeptide encoded by a nucleic acid molecule comprising the nucleic acid SEQ ID NO. 51198, preferably the coding region thereof, or a homolog or fragment thereof, e.g. derived from Synechocystis sp., is increased or generated. For example the activity of a nucleic acid molecule or a polypeptide comprising the nucleic acid, preferably the coding region thereof, or polypeptide or the consensus sequence or the polypeptide motif, as depicted in Table I, II or IV, application No. 2, column 5 or 8 in the respective same line as the nucleic acid molecule SEQ ID NO. 51198 or polypeptide SEQ ID NO. 51199, respectively, or a homolog or a fragment thereof, is increased or generated, or if the activity oxireductase is increased or generated in a non-human organism, like a microorganism or a plant cell, plant or part thereof, especially with non-targeted localization, whereby the respective line discloses in column 7 glutamine. For example, an increase of the glutamine of at least 1 percent, particularly in a range of 81 to 382-percent is conferred as compared to a corresponding non-transformed wild type non-human organism.

[8893] Accordingly, in one embodiment, an increase of arginine in a non-human organism, as compared to a corresponding non-transformed wild type non-human organism, is conferred in the process of the invention, if the activity of a polypeptide showing the activity of a malate dehydrogenase, or if the activity of the polypeptide Sll0891, preferably represented by SEQ ID NO. 51269, or a homolog or fragment thereof, or if the activity of a polypeptide encoded by a nucleic acid molecule comprising the nucleic acid SEQ ID NO. 51268, preferably the coding region thereof, or a homolog or fragment thereof, e.g. derived from Synechocystis sp., is increased or generated. For example the activity of a nucleic acid molecule or a polypeptide comprising the nucleic acid, preferably the coding region thereof, or polypeptide or the consensus sequence or the polypeptide motif, as depicted in Table I, II or IV, application No. 2, column 5 or 8 in the respective same line as the nucleic acid molecule SEQ ID NO. 51268 or polypeptide SEQ ID NO. 51269, respectively, or a homolog or a fragment thereof, is increased or generated, or if the activity malate dehydrogenase is increased or generated in a non-human organism, like a microorganism or a plant cell, plant or part thereof, especially with plastidic localization, whereby the respective line discloses in column 7 arginine. For example, an increase of the arginine of at least 1 percent, particularly in a range of 47 to 289-percent is conferred as compared to a corresponding non-transformed wild type non-human organism.

[8894] Accordingly, in one embodiment, an increase of glutamine in a non-human organism, as compared to a corresponding non-transformed wild type non-human organism, is conferred in the process of the invention, if the activity of a polypeptide showing the activity of a malate dehydrogenase, or if the activity of the polypeptide Sll0891, preferably represented by SEQ ID NO. 51269, or a homolog or fragment thereof, or if the activity of a polypeptide encoded by a nucleic acid molecule comprising the nucleic acid SEQ ID NO. 51268, preferably the coding region thereof, or a homolog or fragment thereof, e.g. derived from Synechocystis sp., is increased or generated. For example the activity of a nucleic acid molecule or a polypeptide comprising the nucleic acid, preferably the coding region thereof, or polypeptide or the consensus sequence or the polypeptide motif, as depicted in Table I, II or IV, application No. 2, column 5 or 8 in the respective same line as the nucleic acid molecule SEQ ID NO. 51268 or polypeptide SEQ ID NO. 51269, respectively, or a homolog or a fragment thereof, is increased or generated, or if the activity malate dehydrogenase is increased or generated in a non-human organism, like a microorganism or a plant cell, plant or part thereof, especially with plastidic localization, whereby the respective line discloses in column 7 glutamine. For example, an increase of the glutamine of at least 1 percent, particularly in a range of 28 to 28-percent is conferred as compared to a corresponding non-transformed wild type non-human organism.

[8895] Accordingly, in one embodiment, an increase of proline in a non-human organism, as compared to a corresponding non-transformed wild type non-human organism, is conferred in the process of the invention, if the activity of a polypeptide showing the activity of a malate dehydrogenase, or if the activity of the polypeptide Sll0891, preferably represented by SEQ ID NO. 51269, or a homolog or fragment thereof, or if the activity of a polypeptide encoded by a nucleic acid molecule comprising the nucleic acid SEQ ID NO. 51268, preferably the coding region thereof, or a homolog or fragment thereof, e.g. derived from Synechocystis sp., is increased or generated. For example the activity of a nucleic acid molecule or a polypeptide comprising the nucleic acid, preferably the coding region thereof, or polypeptide or the consensus sequence or the polypeptide motif, as depicted in Table I, II or IV, application No. 2, column 5 or 8 in the respective same line as the nucleic acid molecule SEQ ID NO. 51268 or polypeptide SEQ ID NO. 51269, respectively, or a homolog or a fragment thereof, is increased or generated, or if the activity malate dehydrogenase is increased or generated in a non-human organism, like a microorganism or a plant cell, plant or part thereof, especially with plastidic localization, whereby the respective line discloses in column 7 proline. For example, an increase of the proline of at least 1 percent, particularly in a range of 52 to 77-percent is conferred as compared to a corresponding non-transformed wild type non-human organism.

[8896] Accordingly, in one embodiment, an increase of proline in a non-human organism, as compared to a corresponding non-transformed wild type non-human organism, is conferred in the process of the invention, if the activity of a polypeptide showing the activity of a phosphoribosylaminoimidazole carboxylase catalytic subunit, or if the activity of the polypeptide Sll0901, preferably represented by SEQ ID NO. 51633, or a homolog or fragment thereof, or if the activity of a polypeptide encoded by a nucleic acid molecule comprising the nucleic acid SEQ ID NO. 51632, preferably the coding region thereof, or a homolog or fragment thereof, e.g. derived from Synechocystis sp., is increased or generated. For example the activity of a nucleic acid molecule or a polypeptide comprising the nucleic acid, preferably the coding region thereof, or polypeptide or the consensus sequence or the polypeptide motif, as depicted in Table I, II or IV, application No. 2, column 5 or 8 in the respective same line as the nucleic acid molecule SEQ ID NO. 51632 or polypeptide SEQ ID NO. 51633, respectively, or a homolog or a fragment thereof, is increased or generated, or if the activity phosphoribosylaminoimidazole carboxylase catalytic subunit is increased or generated in a non-human organism, like a microorganism or a plant cell, plant or part thereof, especially with mitochondrial localization, whereby the respective line discloses in column 7 proline. For example, an increase of the proline of at least 1 percent, particularly in a range of 38 to 273-percent is conferred as compared to a corresponding non-transformed wild type non-human organism.

[8897] Accordingly, in one embodiment, an increase of glutamine in a non-human organism, as compared to a corresponding non-transformed wild type non-human organism, is conferred in the process of the invention, if the activity of a polypeptide showing the activity of a 3-deoxy-7-phosphoheptulonate synthase, or if the activity of the polypeptide Sll0934, preferably represented by SEQ ID NO. 52247, or a homolog or fragment thereof, or if the activity of a polypeptide encoded by a nucleic acid molecule comprising the nucleic acid SEQ ID NO. 52246, preferably the coding region thereof, or a homolog or fragment thereof, e.g. derived from Synechocystis sp., is increased or generated. For example the activity of a nucleic acid molecule or a polypeptide comprising the nucleic acid, preferably the coding region thereof, or polypeptide or the consensus sequence or the polypeptide motif, as depicted in Table I, II or IV, application No. 2, column 5 or 8 in the respective same line as the nucleic acid molecule SEQ ID NO. 52246 or polypeptide SEQ ID NO. 52247, respectively, or a homolog or a fragment thereof, is increased or generated, or if the activity 3-deoxy-7-phosphoheptulonate synthase is increased or generated in a non-human organism, like a microorganism or a plant cell, plant or part thereof, especially with mitochondrial localization, whereby the respective line discloses in column 7 glutamine. For example, an increase of the glutamine of at least 1 percent, particularly in a range of 72 to 148-percent is conferred as compared to a corresponding non-transformed wild type non-human organism.

[8898] Accordingly, in one embodiment, an increase of proline in a non-human organism, as compared to a corresponding non-transformed wild type non-human organism, is conferred in the process of the invention, if the activity of a polypeptide showing the activity of a glycogen synthase, or if the activity of the polypeptide Sll0945, preferably represented by SEQ ID NO. 52365, or a homolog or fragment thereof, or if the activity of a polypeptide encoded by a nucleic acid molecule comprising the nucleic acid SEQ ID NO. 52364, preferably the coding region thereof, or a homolog or fragment thereof, e.g. derived from Synechocystis sp., is increased or generated. For example the activity of a nucleic acid molecule or a polypeptide comprising the nucleic acid, preferably the coding region thereof, or polypeptide or the consensus sequence or the polypeptide motif, as depicted in Table I, II or IV, application No. 2, column 5 or 8 in the respective same line as the nucleic acid molecule SEQ ID NO. 52364 or polypeptide SEQ ID NO. 52365, respectively, or a homolog or a fragment thereof, is increased or generated, or if the activity glycogen synthase is increased or generated in a non-human organism, like a microorganism or a plant cell, plant or part thereof, especially with non-targeted localization, whereby the respective line discloses in column 7 proline. For example, an increase of the proline of at least 1 percent, particularly in a range of 34 to 293-percent is conferred as compared to a corresponding non-transformed wild type non-human organism.

[8899] Accordingly, in one embodiment, an increase of glutamate in a non-human organism, as compared to a corresponding non-transformed wild type non-human organism, is conferred in the process of the invention, if the activity of a polypeptide showing the activity of a carbon dioxide concentrating mechanism protein, or if the activity of the polypeptide Sll1031, preferably represented by SEQ ID NO. 52635, or a homolog or fragment thereof, or if the activity of a polypeptide encoded by a nucleic acid molecule comprising the nucleic acid SEQ ID NO. 52634, preferably the coding region thereof, or a homolog or fragment thereof, e.g. derived from Synechocystis sp., is increased or generated. For example the activity of a nucleic acid molecule or a polypeptide comprising the nucleic acid, preferably the coding region thereof, or polypeptide or the consensus sequence or the polypeptide motif, as depicted in Table I, II or IV, application No. 2, column 5 or 8 in the respective same line as the nucleic acid molecule SEQ ID NO. 52634 or polypeptide SEQ ID NO. 52635, respectively, or a homolog or a fragment thereof, is increased or generated, or if the activity carbon dioxide concentrating mechanism protein is increased or generated in a non-human organism, like a microorganism or a plant cell, plant or part thereof, especially with mitochondrial localization, whereby the respective line discloses in column 7 glutamate. For example, an increase of the glutamate of at least 1 percent, particularly in a range of 37 to 133-percent is conferred as compared to a corresponding non-transformed wild type non-human organism.

[8900] Accordingly, in one embodiment, an increase of glutamine in a non-human organism, as compared to a corresponding non-transformed wild type non-human organism, is conferred in the process of the invention, if the activity of a polypeptide showing the activity of a carbon dioxide concentrating mechanism protein, or if the activity of the polypeptide Sll1031, preferably represented by SEQ ID NO. 52635, or a homolog or fragment thereof, or if the activity of a polypeptide encoded by a nucleic acid molecule comprising the nucleic acid SEQ ID NO. 52634, preferably the coding region thereof, or a homolog or fragment thereof, e.g. derived from Synechocystis sp., is increased or generated. For example the activity of a nucleic acid molecule or a polypeptide comprising the nucleic acid, preferably the coding region thereof, or polypeptide or the consensus sequence or the polypeptide motif, as depicted in Table I, II or IV, application No. 2, column 5 or 8 in the respective same line as the nucleic acid molecule SEQ ID NO. 52634 or polypeptide SEQ ID NO. 52635, respectively, or a homolog or a fragment thereof, is increased or generated, or if the activity carbon dioxide concentrating mechanism protein is increased or generated in a non-human organism, like a microorganism or a plant cell, plant or part thereof, especially with mitochondrial localization, whereby the respective line discloses in column 7 glutamine. For example, an increase of the glutamine of at least 1 percent, particularly in a range of 55 to 461-percent is conferred as compared to a corresponding non-transformed wild type non-human organism.

[8901] Accordingly, in one embodiment, an increase of proline in a non-human organism, as compared to a corresponding non-transformed wild type non-human organism, is conferred in the process of the invention, if the activity of a polypeptide showing the activity of a carbon dioxide concentrating mechanism protein, or if the activity of the polypeptide Sll1031, preferably represented by SEQ ID NO. 52635, or a homolog or fragment thereof, or if the activity of a polypeptide encoded by a nucleic acid molecule comprising the nucleic acid SEQ ID NO. 52634, preferably the coding region thereof, or a homolog or fragment thereof, e.g. derived from Synechocystis sp., is increased or generated. For example the activity of a nucleic acid molecule or a polypeptide comprising the nucleic acid, preferably the coding region thereof, or polypeptide or the consensus sequence or the polypeptide motif, as depicted in Table I, II or IV, application No. 2, column 5 or 8 in the respective same line as the nucleic acid molecule SEQ ID NO. 52634 or polypeptide SEQ ID NO. 52635, respectively, or a homolog or a fragment thereof, is increased or generated, or if the activity carbon dioxide concentrating mechanism protein is increased or generated in a non-human organism, like a microorganism or a plant cell, plant or part thereof, especially with mitochondrial localization, whereby the respective line discloses in column 7 proline. For example, an increase of the proline of at least 1 percent, particularly in a range of 32 to 110-percent is conferred as compared to a corresponding non-transformed wild type non-human organism.

[8902] Accordingly, in one embodiment, an increase of proline in a non-human organism, as compared to a corresponding non-transformed wild type non-human organism, is conferred in the process of the invention, if the activity of a polypeptide showing the activity of a phosphoribosylformyl glycinamidine synthase subunit, or if the activity of the polypeptide Sll1056, preferably represented by SEQ ID NO. 52661, or a homolog or fragment thereof, or if the activity of a polypeptide encoded by a nucleic acid molecule comprising the nucleic acid SEQ ID NO. 52660, preferably the coding region thereof, or a homolog or fragment thereof, e.g. derived from Synechocystis sp., is increased or generated. For example the activity of a nucleic acid molecule or a polypeptide comprising the nucleic acid, preferably the coding region thereof, or polypeptide or the consensus sequence or the polypeptide motif, as depicted in Table I, II or IV, application No. 2, column 5 or 8 in the respective same line as the nucleic acid molecule SEQ ID NO. 52660 or polypeptide SEQ ID NO. 52661, respectively, or a homolog or a fragment thereof, is increased or generated, or if the activity phosphoribosylformyl glycinamidine synthase subunit is increased or generated in a non-human organism, like a microorganism or a plant cell, plant or part thereof, especially with plastidic localization, whereby the respective line discloses in column 7 proline. For example, an increase of the proline of at least 1 percent, particularly in a range of 45 to 113-percent is conferred as compared to a corresponding non-transformed wild type non-human organism.

[8903] Accordingly, in one embodiment, an increase of glutamate in a non-human organism, as compared to a corresponding non-transformed wild type non-human organism, is conferred in the process of the invention, if the activity of a polypeptide showing the activity of a coproporphyrinogen oxidase, or if the activity of the polypeptide Sll1185, preferably represented by SEQ ID NO. 53190, or a homolog or fragment thereof, or if the activity of a polypeptide encoded by a nucleic acid molecule comprising the nucleic acid SEQ ID NO. 53189, preferably the coding region thereof, or a homolog or fragment thereof, e.g. derived from Synechocystis sp., is increased or generated. For example the activity of a nucleic acid molecule or a polypeptide comprising the nucleic acid, preferably the coding region thereof, or polypeptide or the consensus sequence or the polypeptide motif, as depicted in Table I, II or IV, application No. 2, column 5 or 8 in the respective same line as the nucleic acid molecule SEQ ID NO. 53189 or polypeptide SEQ ID NO. 53190, respectively, or a homolog or a fragment thereof, is increased or generated, or if the activity coproporphyrinogen oxidase is increased or generated in a non-human organism, like a microorganism or a plant cell, plant or part thereof, especially with non-targeted localization, whereby the respective line discloses in column 7 glutamate. For example, an increase of the glutamate of at least 1 percent, particularly in a range of 33 to 55-percent is conferred as compared to a corresponding non-transformed wild type non-human organism.

[8904] Accordingly, in one embodiment, an increase of glutamine in a non-human organism, as compared to a corresponding non-transformed wild type non-human organism, is conferred in the process of the invention, if the activity of a polypeptide showing the activity of a glycogen (starch) synthase, or if the activity of the polypeptide Sll1393, preferably represented by SEQ ID NO. 53457, or a homolog or fragment thereof, or if the activity of a polypeptide encoded by a nucleic acid molecule comprising the nucleic acid SEQ ID NO. 53456, preferably the coding region thereof, or a homolog or fragment thereof, e.g. derived from Synechocystis sp., is increased or generated. For example the activity of a nucleic acid molecule or a polypeptide comprising the nucleic acid, preferably the coding region thereof, or polypeptide or the consensus sequence or the polypeptide motif, as depicted in Table I, II or IV, application No. 2, column 5 or 8 in the respective same line as the nucleic acid molecule SEQ ID NO. 53456 or polypeptide SEQ ID NO. 53457, respectively, or a homolog or a fragment thereof, is increased or generated, or if the activity glycogen (starch) synthase is increased or generated in a non-human organism, like a microorganism or a plant cell, plant or part thereof, especially with non-targeted localization, whereby the respective line discloses in column 7 glutamine. For example, an increase of the glutamine of at least 1 percent, particularly in a range of 49 to 73-percent is conferred as compared to a corresponding non-transformed wild type non-human organism.

[8905] Accordingly, in one embodiment, an increase of proline in a non-human organism, as compared to a corresponding non-transformed wild type non-human organism, is conferred in the process of the invention, if the activity of a polypeptide showing the activity of a glycogen (starch) synthase, or if the activity of the polypeptide Sll1393, preferably represented by SEQ ID NO. 53457, or a homolog or fragment thereof, or if the activity of a polypeptide encoded by a nucleic acid molecule comprising the nucleic acid SEQ ID NO. 53456, preferably the coding region thereof, or a homolog or fragment thereof, e.g. derived from Synechocystis sp., is increased or generated. For example the activity of a nucleic acid molecule or a polypeptide comprising the nucleic acid, preferably the coding region thereof, or polypeptide or the consensus sequence or the polypeptide motif, as depicted in Table I, II or IV, application No. 2, column 5 or 8 in the respective same line as the nucleic acid molecule SEQ ID NO. 53456 or polypeptide SEQ ID NO. 53457, respectively, or a homolog or a fragment thereof, is increased or generated, or if the activity glycogen (starch) synthase is increased or generated in a non-human organism, like a microorganism or a plant cell, plant or part thereof, especially with non-targeted localization, For example, an increase of the proline of at least 1 percent, particularly in a range of 36 to 105 percent is conferred as compared to a corresponding non-transformed wild type non-human organism.

[8906] Accordingly, in one embodiment, an increase of glutamine in a non-human organism, as compared to a corresponding non-transformed wild type non-human organism, is conferred in the process of the invention, if the activity of a polypeptide showing the activity of a fatty acid desaturase, or if the activity of the polypeptide Sll1441, preferably represented by SEQ ID NO. 53609, or a homolog or fragment thereof, or if the activity of a polypeptide encoded by a nucleic acid molecule comprising the nucleic acid SEQ ID NO. 53608, preferably the coding region thereof, or a homolog or fragment thereof, e.g. derived from Synechocystis sp., is increased or generated. For example the activity of a nucleic acid molecule or a polypeptide comprising the nucleic acid, preferably the coding region thereof, or polypeptide or the consensus sequence or the polypeptide motif, as depicted in Table I, II or IV, application No. 2, column 5 or 8 in the respective same line as the nucleic acid molecule SEQ ID NO. 53608 or polypeptide SEQ ID NO. 53609, respectively, or a homolog or a fragment thereof, is increased or generated, or if the activity fatty acid desaturase is increased or generated in a non-human organism, like a microorganism or a plant cell, plant or part thereof, especially with non-targeted localization, whereby the respective line discloses in column 7 glutamine. For example, an increase of the glutamine of at least 1 percent, particularly in a range of 37 to 37-percent is conferred as compared to a corresponding non-transformed wild type non-human organism.

[8907] Accordingly, in one embodiment, an increase of glutamate in a non-human organism, as compared to a corresponding non-transformed wild type non-human organism, is conferred in the process of the invention, if the activity of a polypeptide showing the activity of a CTP synthetase, or if the activity of the polypeptide Sll1443, preferably represented by SEQ ID NO. 53879, or a homolog or fragment thereof, or if the activity of a polypeptide encoded by a nucleic acid molecule comprising the nucleic acid SEQ ID NO. 53878, preferably the coding region thereof, or a homolog or fragment thereof, e.g. derived from Synechocystis sp., is increased or generated. For example the activity of a nucleic acid molecule or a polypeptide comprising the nucleic acid, preferably the coding region thereof, or polypeptide or the consensus sequence or the polypeptide motif, as depicted in Table I, II or IV, application No. 2, column 5 or 8 in the respective same line as the nucleic acid molecule SEQ ID NO. 53878 or polypeptide SEQ ID NO. 53879, respectively, or a homolog or a fragment thereof, is increased or generated, or if the activity CTP synthetase is increased or generated in a non-human organism, like a microorganism or a plant cell, plant or part thereof, especially with mitochondrial localization, whereby the respective line discloses in column 7 glutamate. For example, an increase of the glutamate of at least 1 percent, particularly in a range of 33 to 61-percent is conferred as compared to a corresponding non-transformed wild type non-human organism.

[8908] Accordingly, in one embodiment, an increase of glutamate in a non-human organism, as compared to a corresponding non-transformed wild type non-human organism, is conferred in the process of the invention, if the activity of a polypeptide showing the activity of a nitrate/nitrite transport protein, or if the activity of the polypeptide Sll1450, preferably represented by SEQ ID NO. 54338, or a homolog or fragment thereof, or if the activity of a polypeptide encoded by a nucleic acid molecule comprising the nucleic acid SEQ ID NO. 54337, preferably the coding region thereof, or a homolog or fragment thereof, e.g. derived from Synechocystis sp., is increased or generated. For example the activity of a nucleic acid molecule or a polypeptide comprising the nucleic acid, preferably the coding region thereof, or polypeptide or the consensus sequence or the polypeptide motif, as depicted in Table I, II or IV, application No. 2, column 5 or 8 in the respective same line as the nucleic acid molecule SEQ ID NO. 54337 or polypeptide SEQ ID NO. 54338, respectively, or a homolog or a fragment thereof, is increased or generated, or if the activity nitrate/nitrite transport protein is increased or generated in a non-human organism, like a microorganism or a plant cell, plant or part thereof, especially with mitochondrial localization, whereby the respective line discloses in column 7 glutamate. For example, an increase of the glutamate of at least 1 percent, particularly in a range of 34 to 90-percent is conferred as compared to a corresponding non-transformed wild type non-human organism.

[8909] Accordingly, in one embodiment, an increase of glutamate in a non-human organism, as compared to a corresponding non-transformed wild type non-human organism, is conferred in the process of the invention, if the activity of a polypeptide showing the activity of a CDP-diacylglycerol-glycerol-3-phosphate 3-phosphatidyltransferase, or if the activity of the polypeptide Sll1522, preferably represented by SEQ ID NO. 54453, or a homolog or fragment thereof, or if the activity of a polypeptide encoded by a nucleic acid molecule comprising the nucleic acid SEQ ID NO. 54452, preferably the coding region thereof, or a homolog or fragment thereof, e.g. derived from Synechocystis sp., is increased or generated. For example the activity of a nucleic acid molecule or a polypeptide comprising the nucleic acid, preferably the coding region thereof, or polypeptide or the consensus sequence or the polypeptide motif, as depicted in Table I, II or IV, application No. 2, column 5 or 8 in the respective same line as the nucleic acid molecule SEQ ID NO. 54452 or polypeptide SEQ ID NO. 54453, respectively, or a homolog or a fragment thereof, is increased or generated, or if the activity CDP-diacylglycerol-glycerol-3-phosphate 3-phosphatidyltransferase is increased or generated in a non-human organism, like a microorganism or a plant cell, plant or part thereof, especially with plastidic localization, whereby the respective line discloses in column 7 glutamate. For example, an increase of the glutamate of at least 1 percent, particularly in a range of 63 to 154-percent is conferred as compared to a corresponding non-transformed wild type non-human organism.

[8910] Accordingly, in one embodiment, an increase of arginine in a non-human organism, as compared to a corresponding non-transformed wild type non-human organism, is conferred in the process of the invention, if the activity of a polypeptide showing the activity of a glutathione S-transferase, or if the activity of the polypeptide Sll1545, preferably represented by SEQ ID NO. 11424, or a homolog or fragment thereof, or if the activity of a polypeptide encoded by a nucleic acid molecule comprising the nucleic acid SEQ ID NO. 11423, preferably the coding region thereof, or a homolog or fragment thereof, e.g. derived from Synechocystis sp., is increased or generated. For example the activity of a nucleic acid molecule or a polypeptide comprising the nucleic acid, preferably the coding region thereof, or polypeptide or the consensus sequence or the polypeptide motif, as depicted in Table I, II or IV, application No. 2, column 5 or 8 in the respective same line as the nucleic acid molecule SEQ ID NO. 11423 or polypeptide SEQ ID NO. 11424, respectively, or a homolog or a fragment thereof, is increased or generated, or if the activity glutathione S-transferase is increased or generated in a non-human organism, like a microorganism or a plant cell, plant or part thereof, especially with non-targeted localization, whereby the respective line discloses in column 7 arginine. For example, an increase of the arginine of at least 1 percent, particularly in a range of 51 to 152-percent is conferred as compared to a corresponding non-transformed wild type non-human organism.

[8911] Accordingly, in one embodiment, an increase of glutamine in a non-human organism, as compared to a corresponding non-transformed wild type non-human organism, is conferred in the process of the invention, if the activity of a polypeptide showing the activity of a glutathione S-transferase, or if the activity of the polypeptide Sll1545, preferably represented by SEQ ID NO. 11424, or a homolog or fragment thereof, or if the activity of a polypeptide encoded by a nucleic acid molecule comprising the nucleic acid SEQ ID NO. 11423, preferably the coding region thereof, or a homolog or fragment thereof, e.g. derived from Synechocystis sp., is increased or generated. For example the activity of a nucleic acid molecule or a polypeptide comprising the nucleic acid, preferably the coding region thereof, or polypeptide or the consensus sequence or the polypeptide motif, as depicted in Table I, II or IV, application No. 2, column 5 or 8 in the respective same line as the nucleic acid molecule SEQ ID NO. 11423 or polypeptide SEQ ID NO. 11424, respectively, or a homolog or a fragment thereof, is increased or generated, or if the activity glutathione S-transferase is increased or generated in a non-human organism, like a microorganism or a plant cell, plant or part thereof, especially with mitochondrial localization, whereby the respective line discloses in column 7 glutamine. For example, an increase of the glutamine of at least 1 percent, particularly in a range of 29 to 35-percent is conferred as compared to a corresponding non-transformed wild type non-human organism.

[8912] Accordingly, in one embodiment, an increase of proline in a non-human organism, as compared to a corresponding non-transformed wild type non-human organism, is conferred in the process of the invention, if the activity of a polypeptide showing the activity of a glutathione S-transferase, or if the activity of the polypeptide Sll1545, preferably represented by SEQ ID NO. 11424, or a homolog or fragment thereof, or if the activity of a polypeptide encoded by a nucleic acid molecule comprising the nucleic acid SEQ ID NO. 11423, preferably the coding region thereof, or a homolog or fragment thereof, e.g. derived from Synechocystis sp., is increased or generated. For example the activity of a nucleic acid molecule or a polypeptide comprising the nucleic acid, preferably the coding region thereof, or polypeptide or the consensus sequence or the polypeptide motif, as depicted in Table I, II or IV, application No. 2, column 5 or 8 in the respective same line as the nucleic acid molecule SEQ ID NO. 11423 or polypeptide SEQ ID NO. 11424, respectively, or a homolog or a fragment thereof, is increased or generated, or if the activity glutathione S-transferase is increased or generated in a non-human organism, like a microorganism or a plant cell, plant or part thereof, especially with mitochondrial localization, whereby the respective line discloses in column 7 proline. For example, an increase of the proline of at least 1 percent, particularly in a range of 75 to 130-percent is conferred as compared to a corresponding non-transformed wild type non-human organism.

[8913] Accordingly, in one embodiment, an increase of arginine in a non-human organism, as compared to a corresponding non-transformed wild type non-human organism, is conferred in the process of the invention, if the activity of a polypeptide showing the activity of a exopolyphosphatase, or if the activity of the polypeptide Sll1546, preferably represented by SEQ ID NO. 54805, or a homolog or fragment thereof, or if the activity of a polypeptide encoded by a nucleic acid molecule comprising the nucleic acid SEQ ID NO. 54804, preferably the coding region thereof, or a homolog or fragment thereof, e.g. derived from Synechocystis sp., is increased or generated. For example the activity of a nucleic acid molecule or a polypeptide comprising the nucleic acid, preferably the coding region thereof, or polypeptide or the consensus sequence or the polypeptide motif, as depicted in Table I, II or IV, application No. 2, column 5 or 8 in the respective same line as the nucleic acid molecule SEQ ID NO. 54804 or polypeptide SEQ ID NO. 54805, respectively, or a homolog or a fragment thereof, is increased or generated, or if the activity exopolyphosphatase is increased or generated in a non-human organism, like a microorganism or a plant cell, plant or part thereof, especially with non-targeted localization, whereby the respective line discloses in column 7 arginine. For example, an increase of the arginine of at least 1 percent, particularly in a range of 64 to 260-percent is conferred as compared to a corresponding non-transformed wild type non-human organism.

[8914] Accordingly, in one embodiment, an increase of proline in a non-human organism, as compared to a corresponding non-transformed wild type non-human organism, is conferred in the process of the invention, if the activity of a polypeptide showing the activity of a 4-alpha-glucanotransferase, or if the activity of the polypeptide Sll1676, preferably represented by SEQ ID NO. 54898, or a homolog or fragment thereof, or if the activity of a polypeptide encoded by a nucleic acid molecule comprising the nucleic acid SEQ ID NO. 54897, preferably the coding region thereof, or a homolog or fragment thereof, e.g. derived from Synechocystis sp., is increased or generated. For example the activity of a nucleic acid molecule or a polypeptide comprising the nucleic acid, preferably the coding region thereof, or polypeptide or the consensus sequence or the polypeptide motif, as depicted in Table I, II or IV, application No. 2, column 5 or 8 in the respective same line as the nucleic acid molecule SEQ ID NO. 54897 or polypeptide SEQ ID NO. 54898, respectively, or a homolog or a fragment thereof, is increased or generated, or if the activity 4-alpha-glucanotransferase is increased or generated in a non-human organism, like a microorganism or a plant cell, plant or part thereof, especially with non-targeted localization, whereby the respective line discloses in column 7 proline. For example, an increase of the proline of at least 1 percent, particularly in a range of 44 to 186-percent is conferred as compared to a corresponding non-transformed wild type non-human organism.

[8915] Accordingly, in one embodiment, an increase of proline in a non-human organism, as compared to a corresponding non-transformed wild type non-human organism, is conferred in the process of the invention, if the activity of a polypeptide showing the activity of a alanine dehydrogenase, or if the activity of the polypeptide Sll1682, preferably represented by SEQ ID NO. 55064, or a homolog or fragment thereof, or if the activity of a polypeptide encoded by a nucleic acid molecule comprising the nucleic acid SEQ ID NO. 55063, preferably the coding region thereof, or a homolog or fragment thereof, e.g. derived from Synechocystis sp., is increased or generated. For example the activity of a nucleic acid molecule or a polypeptide comprising the nucleic acid, preferably the coding region thereof, or polypeptide or the consensus sequence or the polypeptide motif, as depicted in Table I, II or IV, application No. 2, column 5 or 8 in the respective same line as the nucleic acid molecule SEQ ID NO. 55063 or polypeptide SEQ ID NO. 55064, respectively, or a homolog or a fragment thereof, is increased or generated, or if the activity alanine dehydrogenase is increased or generated in a non-human organism, like a microorganism or a plant cell, plant or part thereof, especially with plastidic localization, whereby the respective line discloses in column 7 proline. For example, an increase of the proline of at least 1 percent, particularly in a range of 76 to 272-percent is conferred as compared to a corresponding non-transformed wild type non-human organism.

[8916] Accordingly, in one embodiment, an increase of arginine in a non-human organism, as compared to a corresponding non-transformed wild type non-human organism, is conferred in the process of the invention, if the activity of a polypeptide showing the activity of a sll1761-protein, or if the activity of the polypeptide Sll1761, preferably represented by SEQ ID NO. 55380, or a homolog or fragment thereof, or if the activity of a polypeptide encoded by a nucleic acid molecule comprising the nucleic acid SEQ ID NO. 55379, preferably the coding region thereof, or a homolog or fragment thereof, e.g. derived from Synechocystis sp., is increased or generated. For example the activity of a nucleic acid molecule or a polypeptide comprising the nucleic acid, preferably the coding region thereof, or polypeptide or the consensus sequence or the polypeptide motif, as depicted in Table I, II or IV, application No. 2, column 5 or 8 in the respective same line as the nucleic acid molecule SEQ ID NO. 55379 or polypeptide SEQ ID NO. 55380, respectively, or a homolog or a fragment thereof, is increased or generated, or if the activity sll1761-protein is increased or generated in a non-human organism, like a microorganism or a plant cell, plant or part thereof, especially with non-targeted localization, whereby the respective line discloses in column 7 arginine. For example, an increase of the arginine of at least 1 percent, particularly in a range of 69 to 387-percent is conferred as compared to a corresponding non-transformed wild type non-human organism.

[8917] Accordingly, in one embodiment, an increase of proline in a non-human organism, as compared to a corresponding non-transformed wild type non-human organism, is conferred in the process of the invention, if the activity of a polypeptide showing the activity of a sll761-protein, or if the activity of the polypeptide Sll1761, preferably represented by SEQ ID NO. 55380, or a homolog or fragment thereof, or if the activity of a polypeptide encoded by a nucleic acid molecule comprising the nucleic acid SEQ ID NO. 55379, preferably the coding region thereof, or a homolog or fragment thereof, e.g. derived from Synechocystis sp., is increased or generated. For example the activity of a nucleic acid molecule or a polypeptide comprising the nucleic acid, preferably the coding region thereof, or polypeptide or the consensus sequence or the polypeptide motif, as depicted in Table I, II or IV, application No. 2, column 5 or 8 in the respective same line as the nucleic acid molecule SEQ ID NO. 55379 or polypeptide SEQ ID NO. 55380, respectively, or a homolog or a fragment thereof, is increased or generated, or if the activity sll1761-protein is increased or generated in a non-human organism, like a microorganism or a plant cell, plant or part thereof, especially with non-targeted localization, whereby the respective line discloses in column 7 proline. For example, an increase of the proline of at least 1 percent, particularly in a range of 36 to 269-percent is conferred as compared to a corresponding non-transformed wild type non-human organism.

[8918] Accordingly, in one embodiment, an increase of glutamate in a non-human organism, as compared to a corresponding non-transformed wild type non-human organism, is conferred in the process of the invention, if the activity of a polypeptide showing the activity of a coproporphyrinogen III oxidase, or if the activity of the polypeptide Sll1917, preferably represented by SEQ ID NO. 11472, or a homolog or fragment thereof, or if the activity of a polypeptide encoded by a nucleic acid molecule comprising the nucleic acid SEQ ID NO. 11471, preferably the coding region thereof, or a homolog or fragment thereof, e.g. derived from Synechocystis sp., is increased or generated. For example the activity of a nucleic acid molecule or a polypeptide comprising the nucleic acid, preferably the coding region thereof, or polypeptide or the consensus sequence or the polypeptide motif, as depicted in Table I, II or IV, application No. 2, column 5 or 8 in the respective same line as the nucleic acid molecule SEQ ID NO. 11471 or polypeptide SEQ ID NO. 11472, respectively, or a homolog or a fragment thereof, is increased or generated, or if the activity coproporphyrinogen III oxidase is increased or generated in a non-human organism, like a microorganism or a plant cell, plant or part thereof, especially with mitochondrial localization, whereby the respective line discloses in column 7 glutamate. For example, an increase of the glutamate of at least 1 percent, particularly in a range of 42 to 167-percent is conferred as compared to a corresponding non-transformed wild type non-human organism.

[8919] Accordingly, in one embodiment, an increase of glutamine in a non-human organism, as compared to a corresponding non-transformed wild type non-human organism, is conferred in the process of the invention, if the activity of a polypeptide showing the activity of a coproporphyrinogen III oxidase, or if the activity of the polypeptide Sll1917, preferably represented by SEQ ID NO. 11472, or a homolog or fragment thereof, or if the activity of a polypeptide encoded by a nucleic acid molecule comprising the nucleic acid SEQ ID NO. 11471, preferably the coding region thereof, or a homolog or fragment thereof, e.g. derived from Synechocystis sp., is increased or generated. For example the activity of a nucleic acid molecule or a polypeptide comprising the nucleic acid, preferably the coding region thereof, or polypeptide or the consensus sequence or the polypeptide motif, as depicted in Table I, II or IV, application No. 2, column 5 or 8 in the respective same line as the nucleic acid molecule SEQ ID NO. 11471 or polypeptide SEQ ID NO. 11472, respectively, or a homolog or a fragment thereof, is increased or generated, or if the activity coproporphyrinogen III oxidase is increased or generated in a non-human organism, like a microorganism or a plant cell, plant or part thereof, especially with mitochondrial localization, whereby the respective line discloses in column 7 glutamine. For example, an increase of the glutamine of at least 1 percent, particularly in a range of 47 to 318-percent is conferred as compared to a corresponding non-transformed wild type non-human organism.

[8920] Accordingly, in one embodiment, an increase of proline in a non-human organism, as compared to a corresponding non-transformed wild type non-human organism, is conferred in the process of the invention, if the activity of a polypeptide showing the activity of a coproporphyrinogen III oxidase, or if the activity of the polypeptide Sll1917, preferably represented by SEQ ID NO. 11472, or a homolog or fragment thereof, or if the activity of a polypeptide encoded by a nucleic acid molecule comprising the nucleic acid SEQ ID NO. 11471, preferably the coding region thereof, or a homolog or fragment thereof, e.g. derived from Synechocystis sp., is increased or generated. For example the activity of a nucleic acid molecule or a polypeptide comprising the nucleic acid, preferably the coding region thereof, or polypeptide or the consensus sequence or the polypeptide motif, as depicted in Table I, II or IV, application No. 2, column 5 or 8 in the respective same line as the nucleic acid molecule SEQ ID NO. 11471 or polypeptide SEQ ID NO. 11472, respectively, or a homolog or a fragment thereof, is increased or generated, or if the activity coproporphyrinogen III oxidase is increased or generated in a non-human organism, like a microorganism or a plant cell, plant or part thereof, especially with mitochondrial localization, whereby the respective line discloses in column 7 proline. For example, an increase of the proline of at least 1 percent, particularly in a range of 34 to 176-percent is conferred as compared to a corresponding non-transformed wild type non-human organism.

[8921] Accordingly, in one embodiment, an increase of glutamate in a non-human organism, as compared to a corresponding non-transformed wild type non-human organism, is conferred in the process of the invention, if the activity of a polypeptide showing the activity of a cation-transporting ATPase, or if the activity of the polypeptide Sll1920, preferably represented by SEQ ID NO. 55386, or a homolog or fragment thereof, or if the activity of a polypeptide encoded by a nucleic acid molecule comprising the nucleic acid SEQ ID NO. 55385, preferably the coding region thereof, or a homolog or fragment thereof, e.g. derived from Synechocystis sp., is increased or generated. For example the activity of a nucleic acid molecule or a polypeptide comprising the nucleic acid, preferably the coding region thereof, or polypeptide or the consensus sequence or the polypeptide motif, as depicted in Table I, II or IV, application No. 2, column 5 or 8 in the respective same line as the nucleic acid molecule SEQ ID NO. 55385 or polypeptide SEQ ID NO. 55386, respectively, or a homolog or a fragment thereof, is increased or generated, or if the activity cation-transporting ATPase is increased or generated in a non-human organism, like a microorganism or a plant cell, plant or part thereof, especially with mitochondrial localization, whereby the respective line discloses in column 7 glutamate. For example, an increase of the glutamate of at least 1 percent, particularly in a range of 46 to 113-percent is conferred as compared to a corresponding non-transformed wild type non-human organism.

[8922] Accordingly, in one embodiment, an increase of glutamine in a non-human organism, as compared to a corresponding non-transformed wild type non-human organism, is conferred in the process of the invention, if the activity of a polypeptide showing the activity of a cationtransporting ATPase, or if the activity of the polypeptide Sll1920, preferably represented by SEQ ID NO. 55386, or a homolog or fragment thereof, or if the activity of a polypeptide encoded by a nucleic acid molecule comprising the nucleic acid SEQ ID NO. 55385, preferably the coding region thereof, or a homolog or fragment thereof, e.g. derived from Synechocystis sp., is increased or generated. For example the activity of a nucleic acid molecule or a polypeptide comprising the nucleic acid, preferably the coding region thereof, or polypeptide or the consensus sequence or the polypeptide motif, as depicted in Table I, II or IV, application No. 2, column 5 or 8 in the respective same line as the nucleic acid molecule SEQ ID NO. 55385 or polypeptide SEQ ID NO. 55386, respectively, or a homolog or a fragment thereof, is increased or generated, or if the activity cation-transporting ATPase is increased or generated in a non-human organism, like a microorganism or a plant cell, plant or part thereof, especially with mitochondrial localization, whereby the respective line discloses in column 7 glutamine. For example, an increase of the glutamine of at least 1 percent, particularly in a range of 44 to 372-percent is conferred as compared to a corresponding non-transformed wild type non-human organism.

[8923] Accordingly, in one embodiment, an increase of arginine in a non-human organism, as compared to a corresponding non-transformed wild type non-human organism, is conferred in the process of the invention, if the activity of a polypeptide showing the activity of a glycosidase, or if the activity of the polypeptide Slr0237, preferably represented by SEQ ID NO. 55772, or a homolog or fragment thereof, or if the activity of a polypeptide encoded by a nucleic acid molecule comprising the nucleic acid SEQ ID NO. 55771, preferably the coding region thereof, or a homolog or fragment thereof, e.g. derived from Synechocystis sp., is increased or generated. For example the activity of a nucleic acid molecule or a polypeptide comprising the nucleic acid, preferably the coding region thereof, or polypeptide or the consensus sequence or the polypeptide motif, as depicted in Table I, II or IV, application No. 2, column 5 or 8 in the respective same line as the nucleic acid molecule SEQ ID NO. 55771 or polypeptide SEQ ID NO. 55772, respectively, or a homolog or a fragment thereof, is increased or generated, or if the activity glycosidase is increased or generated in a non-human organism, like a microorganism or a plant cell, plant or part thereof, especially with non-targeted localization, whereby the respective line discloses in column 7 arginine. For example, an increase of the arginine of at least 1 percent, particularly in a range of 84 to 104-percent is conferred as compared to a corresponding non-transformed wild type non-human organism.

[8924] Accordingly, in one embodiment, an increase of glutamine in a non-human organism, as compared to a corresponding non-transformed wild type non-human organism, is conferred in the process of the invention, if the activity of a polypeptide showing the activity of a glycosidase, or if the activity of the polypeptide Slr0237, preferably represented by SEQ ID NO. 55772, or a homolog or fragment thereof, or if the activity of a polypeptide encoded by a nucleic acid molecule comprising the nucleic acid SEQ ID NO. 55771, preferably the coding region thereof, or a homolog or fragment thereof, e.g. derived from Synechocystis sp., is increased or generated. For example the activity of a nucleic acid molecule or a polypeptide comprising the nucleic acid, preferably the coding region thereof, or polypeptide or the consensus sequence or the polypeptide motif, as depicted in Table I, II or IV, application No. 2, column 5 or 8 in the respective same line as the nucleic acid molecule SEQ ID NO. 55771 or polypeptide SEQ ID NO. 55772, respectively, or a homolog or a fragment thereof, is increased or generated, or if the activity glycosidase is increased or generated in a non-human organism, like a microorganism or a plant cell, plant or part thereof, especially with non-targeted localization, whereby the respective line discloses in column 7 glutamine. For example, an increase of the glutamine of at least 1 percent, particularly in a range of 30 to 40-percent is conferred as compared to a corresponding non-transformed wild type non-human organism.

[8925] Accordingly, in one embodiment, an increase of proline in a non-human organism, as compared to a corresponding non-transformed wild type non-human organism, is conferred in the process of the invention, if the activity of a polypeptide showing the activity of a phosphoribosylglycinamide formyltransferase, or if the activity of the polypeptide Slr0477, preferably represented by SEQ ID NO. 55979, or a homolog or fragment thereof, or if the activity of a polypeptide encoded by a nucleic acid molecule comprising the nucleic acid SEQ ID NO. 55978, preferably the coding region thereof, or a homolog or fragment thereof, e.g. derived from Synechocystis sp., is increased or generated. For example the activity of a nucleic acid molecule or a polypeptide comprising the nucleic acid, preferably the coding region thereof, or polypeptide or the consensus sequence or the polypeptide motif, as depicted in Table I, II or IV, application No. 2, column 5 or 8 in the respective same line as the nucleic acid molecule SEQ ID NO. 55978 or polypeptide SEQ ID NO. 55979, respectively, or a homolog or a fragment thereof, is increased or generated, or if the activity phosphoribosylglycinamide formyltransferase is increased or generated in a non-human organism, like a microorganism or a plant cell, plant or part thereof, especially with plastidic localization, whereby the respective line discloses in column 7 proline. For example, an increase of the proline of at least 1 percent, particularly in a range of 42 to 86-percent is conferred as compared to a corresponding non-transformed wild type non-human organism.

[8926] Accordingly, in one embodiment, an increase of glutamate in a non-human organism, as compared to a corresponding non-transformed wild type non-human organism, is conferred in the process of the invention, if the activity of a polypeptide showing the activity of a bifunctional purine biosynthesis protein, or if the activity of the polypeptide Slr0597, preferably represented by SEQ ID NO. 56154, or a homolog or fragment thereof, or if the activity of a polypeptide encoded by a nucleic acid molecule comprising the nucleic acid SEQ ID NO. 56153, preferably the coding region thereof, or a homolog or fragment thereof, e.g. derived from Synechocystis sp., is increased or generated. For example the activity of a nucleic acid molecule or a polypeptide comprising the nucleic acid, preferably the coding region thereof, or polypeptide or the consensus sequence or the polypeptide motif, as depicted in Table I, II or IV, application No. 2, column 5 or 8 in the respective same line as the nucleic acid molecule SEQ ID NO. 56153 or polypeptide SEQ ID NO. 56154, respectively, or a homolog or a fragment thereof, is increased or generated, or if the activity bifunctional purine biosynthesis protein is increased or generated in a non-human organism, like a microorganism or a plant cell, plant or part thereof, especially with plastidic localization, whereby the respective line discloses in column 7 glutamate. For example, an increase of the glutamate of at least 1 percent, particularly in a range of 43 to 100-percent is conferred as compared to a corresponding non-transformed wild type non-human organism.

[8927] Accordingly, in one embodiment, an increase of proline in a non-human organism, as compared to a corresponding non-transformed wild type non-human organism, is conferred in the process of the invention, if the activity of a polypeptide showing the activity of a slr0600-protein, or if the activity of the polypeptide Slr0600, preferably represented by SEQ ID NO. 56515, or a homolog or fragment thereof, or if the activity of a polypeptide encoded by a nucleic acid molecule comprising the nucleic acid SEQ ID NO. 56514, preferably the coding region thereof, or a homolog or fragment thereof, e.g. derived from Synechocystis sp., is increased or generated. For example the activity of a nucleic acid molecule or a polypeptide comprising the nucleic acid, preferably the coding region thereof, or polypeptide or the consensus sequence or the polypeptide motif, as depicted in Table I, II or IV, application No. 2, column 5 or 8 in the respective same line as the nucleic acid molecule SEQ ID NO. 56514 or polypeptide SEQ ID NO. 56515, respectively, or a homolog or a fragment thereof, is increased or generated, or if the activity slr0600-protein is increased or generated in a non-human organism, like a microorganism or a plant cell, plant or part thereof, especially with non-targeted localization, whereby the respective line discloses in column 7 proline. For example, an increase of the proline of at least 1 percent, particularly in a range of 43 to 60-percent is conferred as compared to a corresponding non-transformed wild type non-human organism.

[8928] Accordingly, in one embodiment, an increase of proline in a non-human organism, as compared to a corresponding non-transformed wild type non-human organism, is conferred in the process of the invention, if the activity of a polypeptide showing the activity of a pyrroline carboxylate reductase, or if the activity of the polypeptide Slr0661, preferably represented by SEQ ID NO. 56577, or a homolog or fragment thereof, or if the activity of a polypeptide encoded by a nucleic acid molecule comprising the nucleic acid SEQ ID NO. 56576, preferably the coding region thereof, or a homolog or fragment thereof, e.g. derived from Synechocystis sp., is increased or generated. For example the activity of a nucleic acid molecule or a polypeptide comprising the nucleic acid, preferably the coding region thereof, or polypeptide or the consensus sequence or the polypeptide motif, as depicted in Table I, II or IV, application No. 2, column 5 or 8 in the respective same line as the nucleic acid molecule SEQ ID NO. 56576 or polypeptide SEQ ID NO. 56577, respectively, or a homolog or a fragment thereof, is increased or generated, or if the activity pyrroline carboxylate reductase is increased or generated in a non-human organism, like a microorganism or a plant cell, plant or part thereof, especially with mitochondrial localization, whereby the respective line discloses in column 7 proline. For example, an increase of the proline of at least 1 percent, particularly in a range of 45 to 85-percent is conferred as compared to a corresponding non-transformed wild type non-human organism.

[8929] Accordingly, in one embodiment, an increase of arginine in a non-human organism, as compared to a corresponding non-transformed wild type non-human organism, is conferred in the process of the invention, if the activity of a polypeptide showing the activity of a Glu/Leu/Phe/Val dehydrogenase, or if the activity of the polypeptide Slr0710, preferably represented by SEQ ID NO. 56895, or a homolog or fragment thereof, or if the activity of a polypeptide encoded by a nucleic acid molecule comprising the nucleic acid SEQ ID NO. 56894, preferably the coding region thereof, or a homolog or fragment thereof, e.g. derived from Synechocystis sp., is increased or generated. For example the activity of a nucleic acid molecule or a polypeptide comprising the nucleic acid, preferably the coding region thereof, or polypeptide or the consensus sequence or the polypeptide motif, as depicted in Table I, II or IV, application No. 2, column 5 or 8 in the respective same line as the nucleic acid molecule SEQ ID NO. 56894 or polypeptide SEQ ID NO. 56895, respectively, or a homolog or a fragment thereof, is increased or generated, or if the activity Glu/Leu/Phe/Val dehydrogenase is increased or generated in a non-human organism, like a microorganism or a plant cell, plant or part thereof, especially with mitochondrial localization, whereby the respective line discloses in column 7 arginine. For example, an increase of the arginine of at least 1 percent, particularly in a range of 47 to 175-percent is conferred as compared to a corresponding non-transformed wild type non-human organism.

[8930] Accordingly, in one embodiment, an increase of arginine in a non-human organism, as compared to a corresponding non-transformed wild type non-human organism, is conferred in the process of the invention, if the activity of a polypeptide showing the activity of a geranylgeranyl pyrophosphate synthase, or if the activity of the polypeptide Slr0739, preferably represented by SEQ ID NO. 57236, or a homolog or fragment thereof, or if the activity of a polypeptide encoded by a nucleic acid molecule comprising the nucleic acid SEQ ID NO. 57235, preferably the coding region thereof, or a homolog or fragment thereof, e.g. derived from Synechocystis sp., is increased or generated. For example the activity of a nucleic acid molecule or a polypeptide comprising the nucleic acid, preferably the coding region thereof, or polypeptide or the consensus sequence or the polypeptide motif, as depicted in Table I, II or IV, application No. 2, column 5 or 8 in the respective same line as the nucleic acid molecule SEQ ID NO. 57235 or polypeptide SEQ ID NO. 57236, respectively, or a homolog or a fragment thereof, is increased or generated, or if the activity geranylgeranyl pyrophosphate synthase is increased or generated in a non-human organism, like a microorganism or a plant cell, plant or part thereof, especially with plastidic localization, whereby the respective line discloses in column 7 arginine. For example, an increase of the arginine of at least 1 percent, particularly in a range of 347 to 910-percent is conferred as compared to a corresponding non-transformed wild type non-human organism.

[8931] Accordingly, in one embodiment, an increase of glutamine in a non-human organism, as compared to a corresponding non-transformed wild type non-human organism, is conferred in the process of the invention, if the activity of a polypeptide showing the activity of a geranylgeranyl pyrophosphate synthase, or if the activity of the polypeptide Slr0739, preferably represented by SEQ ID NO. 57236, or a homolog or fragment thereof, or if the activity of a polypeptide encoded by a nucleic acid molecule comprising the nucleic acid SEQ ID NO. 57235, preferably the coding region thereof, or a homolog or fragment thereof, e.g. derived from Synechocystis sp., is increased or generated. For example the activity of a nucleic acid molecule or a polypeptide comprising the nucleic acid, preferably the coding region thereof, or polypeptide or the consensus sequence or the polypeptide motif, as depicted in Table I, II or IV, application No. 2, column 5 or 8 in the respective same line as the nucleic acid molecule SEQ ID NO. 57235 or polypeptide SEQ ID NO. 57236, respectively, or a homolog or a fragment thereof, is increased or generated, or if the activity geranylgeranyl pyrophosphate synthase is increased or generated in a non-human organism, like a microorganism or a plant cell, plant or part thereof, especially with plastidic localization, whereby the respective line discloses in column 7 glutamine. For example, an increase of the glutamine of at least 1 percent, particularly in a range of 46 to 519-percent is conferred as compared to a corresponding non-transformed wild type non-human organism.

[8932] Accordingly, in one embodiment, an increase of proline in a non-human organism, as compared to a corresponding non-transformed wild type non-human organism, is conferred in the process of the invention, if the activity of a polypeptide showing the activity of a geranylgeranyl pyrophosphate synthase, or if the activity of the polypeptide Slr0739, preferably represented by SEQ ID NO. 57236, or a homolog or fragment thereof, or if the activity of a polypeptide encoded by a nucleic acid molecule comprising the nucleic acid SEQ ID NO. 57235, preferably the coding region thereof, or a homolog or fragment thereof, e.g. derived from Synechocystis sp., is increased or generated. For example the activity of a nucleic acid molecule or a polypeptide comprising the nucleic acid, preferably the coding region thereof, or polypeptide or the consensus sequence or the polypeptide motif, as depicted in Table I, II or IV, application No. 2, column 5 or 8 in the respective same line as the nucleic acid molecule SEQ ID NO. 57235 or polypeptide SEQ ID NO. 57236, respectively, or a homolog or a fragment thereof, is increased or generated, or if the activity geranylgeranyl pyrophosphate synthase is increased or generated in a non-human organism, like a microorganism or a plant cell, plant or part thereof, especially with plastidic localization, whereby the respective line discloses in column 7 proline. For example, an increase of the proline of at least 1 percent, particularly in a range of 105 to 801-percent is conferred as compared to a corresponding non-transformed wild type non-human organism.

[8933] Accordingly, in one embodiment, an increase of arginine in a non-human organism, as compared to a corresponding non-transformed wild type non-human organism, is conferred in the process of the invention, if the activity of a polypeptide showing the activity of a circadian clock protein, or if the activity of the polypeptide Slr0756, preferably represented by SEQ ID NO. 57664, or a homolog or fragment thereof, or if the activity of a polypeptide encoded by a nucleic acid molecule comprising the nucleic acid SEQ ID NO. 57663, preferably the coding region thereof, or a homolog or fragment thereof, e.g. derived from Synechocystis sp., is increased or generated. For example the activity of a nucleic acid molecule or a polypeptide comprising the nucleic acid, preferably the coding region thereof, or polypeptide or the consensus sequence or the polypeptide motif, as depicted in Table I, II or IV, application No. 2, column 5 or 8 in the respective same line as the nucleic acid molecule SEQ ID NO. 57663 or polypeptide SEQ ID NO. 57664, respectively, or a homolog or a fragment thereof, is increased or generated, or if the activity circadian clock protein is increased or generated in a non-human organism, like a microorganism or a plant cell, plant or part thereof, especially with non-targeted localization, whereby the respective line discloses in column 7 arginine. For example, an increase of the arginine of at least 1 percent, particularly in a range of 48 to 280-percent is conferred as compared to a corresponding non-transformed wild type non-human organism.

[8934] Accordingly, in one embodiment, an increase of proline in a non-human organism, as compared to a corresponding non-transformed wild type non-human organism, is conferred in the process of the invention, if the activity of a polypeptide showing the activity of a circadian clock protein, or if the activity of the polypeptide Slr0756, preferably represented by SEQ ID NO. 57664, or a homolog or fragment thereof, or if the activity of a polypeptide encoded by a nucleic acid molecule comprising the nucleic acid SEQ ID NO. 57663, preferably the coding region thereof, or a homolog or fragment thereof, e.g. derived from Synechocystis sp., is increased or generated. For example the activity of a nucleic acid molecule or a polypeptide comprising the nucleic acid, preferably the coding region thereof, or polypeptide or the consensus sequence or the polypeptide motif, as depicted in Table I, II or IV, application No. 2, column 5 or 8 in the respective same line as the nucleic acid molecule SEQ ID NO. 57663 or polypeptide SEQ ID NO. 57664, respectively, or a homolog or a fragment thereof, is increased or generated, or if the activity circadian clock protein is increased or generated in a non-human organism, like a microorganism or a plant cell, plant or part thereof, especially with non-targeted localization, whereby the respective line discloses in column 7 proline. For example, an increase of the proline of at least 1 percent, particularly in a range of 32 to 91-percent is conferred as compared to a corresponding non-transformed wild type non-human organism.

[8935] Accordingly, in one embodiment, an increase of proline in a non-human organism, as compared to a corresponding non-transformed wild type non-human organism, is conferred in the process of the invention, if the activity of a polypeptide showing the activity of a amine oxidase, or if the activity of the polypeptide Slr0782, preferably represented by SEQ ID NO. 57680, or a homolog or fragment thereof, or if the activity of a polypeptide encoded by a nucleic acid molecule comprising the nucleic acid SEQ ID NO. 57679, preferably the coding region thereof, or a homolog or fragment thereof, e.g. derived from Synechocystis sp., is increased or generated. For example the activity of a nucleic acid molecule or a polypeptide comprising the nucleic acid, preferably the coding region thereof, or polypeptide or the consensus sequence or the polypeptide motif, as depicted in Table I, II or IV, application No. 2, column 5 or 8 in the respective same line as the nucleic acid molecule SEQ ID NO. 57679 or polypeptide SEQ ID NO. 57680, respectively, or a homolog or a fragment thereof, is increased or generated, or if the activity amine oxidase is increased or generated in a non-human organism, like a microorganism or a plant cell, plant or part thereof, especially with mitochondrial localization, whereby the respective line discloses in column 7 proline. For example, an increase of the proline of at least 1 percent, particularly in a range of 43 to 94-percent is conferred as compared to a corresponding non-transformed wild type non-human organism.

[8936] Accordingly, in one embodiment, an increase of glutamate in a non-human organism, as compared to a corresponding non-transformed wild type non-human organism, is conferred in the process of the invention, if the activity of a polypeptide showing the activity of a dihydrolipoamide dehydrogenase, or if the activity of the polypeptide Slr1096, preferably represented by SEQ ID NO. 57735, or a homolog or fragment thereof, or if the activity of a polypeptide encoded by a nucleic acid molecule comprising the nucleic acid SEQ ID NO. 57734, preferably the coding region thereof, or a homolog or fragment thereof, e.g. derived from Synechocystis sp., is increased or generated. For example the activity of a nucleic acid molecule or a polypeptide comprising the nucleic acid, preferably the coding region thereof, or polypeptide or the consensus sequence or the polypeptide motif, as depicted in Table I, II or IV, application No. 2, column 5 or 8 in the respective same line as the nucleic acid molecule SEQ ID NO. 57734 or polypeptide SEQ ID NO. 57735, respectively, or a homolog or a fragment thereof, is increased or generated, or if the activity dihydrolipoamide dehydrogenase is increased or generated in a non-human organism, like a microorganism or a plant cell, plant or part thereof, especially with non-targeted localization, whereby the respective line discloses in column 7 glutamate. For example, an increase of the glutamate of at least 1 percent, particularly in a range of 41 to 79-percent is conferred as compared to a corresponding non-transformed wild type non-human organism.

[8937] Accordingly, in one embodiment, an increase of arginine in a non-human organism, as compared to a corresponding non-transformed wild type non-human organism, is conferred in the process of the invention, if the activity of a polypeptide showing the activity of a gamma-glutamyltranspeptidase, or if the activity of the polypeptide Slr1269, preferably represented by SEQ ID NO. 58059, or a homolog or fragment thereof, or if the activity of a polypeptide encoded by a nucleic acid molecule comprising the nucleic acid SEQ ID NO. 58058, preferably the coding region thereof, or a homolog or fragment thereof, e.g. derived from Synechocystis sp., is increased or generated. For example the activity of a nucleic acid molecule or a polypeptide comprising the nucleic acid, preferably the coding region thereof, or polypeptide or the consensus sequence or the polypeptide motif, as depicted in Table I, II or IV, application No. 2, column 5 or 8 in the respective same line as the nucleic acid molecule SEQ ID NO. 58058 or polypeptide SEQ ID NO. 58059, respectively, or a homolog or a fragment thereof, is increased or generated, or if the activity gamma-glutamyltranspeptidase is increased or generated in a non-human organism, like a microorganism or a plant cell, plant or part thereof, especially with non-targeted localization, whereby the respective line discloses in column 7 arginine. For example, an increase of the arginine of at least 1 percent, particularly in a range of 65 to 209-percent is conferred as compared to a corresponding non-transformed wild type non-human organism.

[8938] Accordingly, in one embodiment, an increase of glutamate in a non-human organism, as compared to a corresponding non-transformed wild type non-human organism, is conferred in the process of the invention, if the activity of a polypeptide showing the activity of a gamma-polypeptideglutamyltranspeptidase, or if the activity of the polypeptide Slr1269, preferably represented by SEQ ID NO. 58059, or a homolog or fragment thereof, or if the activity of a polypeptide encoded by a nucleic acid molecule comprising the nucleic acid SEQ ID NO. 58058, preferably the coding region thereof, or a homolog or fragment thereof, e.g. derived from Synechocystis sp., is increased or generated. For example the activity of a nucleic acid molecule or a polypeptide comprising the nucleic acid, preferably the coding region thereof, or polypeptide or the consensus sequence or the polypeptide motif, as depicted in Table I, II or IV, application No. 2, column 5 or 8 in the respective same line as the nucleic acid molecule SEQ ID NO. 58058 or polypeptide SEQ ID NO. 58059, respectively, or a homolog or a fragment thereof, is increased or generated, or if the activity gamma-glutamyltranspeptidase is increased or generated in a non-human organism, like a microorganism or a plant cell, plant or part thereof, especially with non-targeted localization, whereby the respective line discloses in column 7 glutamate. For example, an increase of the glutamate of at least 1 percent, particularly in a range of 63 to 150-percent is conferred as compared to a corresponding non-transformed wild type non-human organism.

[8939] Accordingly, in one embodiment, an increase of arginine in a non-human organism, as compared to a corresponding non-transformed wild type non-human organism, is conferred in the process of the invention, if the activity of a polypeptide showing the activity of a arginine decarboxylase, or if the activity of the polypeptide Slr1312, preferably represented by SEQ ID NO. 58325, or a homolog or fragment thereof, or if the activity of a polypeptide encoded by a nucleic acid molecule comprising the nucleic acid SEQ ID NO. 58324, preferably the coding region thereof, or a homolog or fragment thereof, e.g. derived from Synechocystis sp., is increased or generated. For example the activity of a nucleic acid molecule or a polypeptide comprising the nucleic acid, preferably the coding region thereof, or polypeptide or the consensus sequence or the polypeptide motif, as depicted in Table I, II or IV, application No. 2, column 5 or 8 in the respective same line as the nucleic acid molecule SEQ ID NO. 58324 or polypeptide SEQ ID NO. 58325, respectively, or a homolog or a fragment thereof, is increased or generated, or if the activity arginine decarboxylase is increased or generated in a non-human organism, like a microorganism or a plant cell, plant or part thereof, especially with non-targeted localization, whereby the respective line discloses in column 7 arginine. For example, an increase of the arginine of at least 1 percent, particularly in a range of 52 to 306-percent is conferred as compared to a corresponding non-transformed wild type non-human organism.

[8940] Accordingly, in one embodiment, an increase of glutamate in a non-human organism, as compared to a corresponding non-transformed wild type non-human organism, is conferred in the process of the invention, if the activity of a polypeptide showing the activity of a CDP-diglyceride synthetase, or if the activity of the polypeptide Slr1369, preferably represented by SEQ ID NO. 58473, or a homolog or fragment thereof, or if the activity of a polypeptide encoded by a nucleic acid molecule comprising the nucleic acid SEQ ID NO. 58472, preferably the coding region thereof, or a homolog or fragment thereof, e.g. derived from Synechocystis sp., is increased or generated. For example the activity of a nucleic acid molecule or a polypeptide comprising the nucleic acid, preferably the coding region thereof, or polypeptide or the consensus sequence or the polypeptide motif, as depicted in Table I, II or IV, application No. 2, column 5 or 8 in the respective same line as the nucleic acid molecule SEQ ID NO. 58472 or polypeptide SEQ ID NO. 58473, respectively, or a homolog or a fragment thereof, is increased or generated, or if the activity CDP-diglyceride synthetase is increased or generated in a non-human organism, like a microorganism or a plant cell, plant or part thereof, especially with mitochondrial localization, whereby the respective line discloses in column 7 glutamate. For example, an increase of the glutamate of at least 1 percent, particularly in a range of 39 to 86-percent is conferred as compared to a corresponding non-transformed wild type non-human organism.

[8941] Accordingly, in one embodiment, an increase of glutamate in a non-human organism, as compared to a corresponding non-transformed wild type non-human organism, is conferred in the process of the invention, if the activity of a polypeptide showing the activity of a carbohydrate kinase, or if the activity of the polypeptide Slr1420, preferably represented by SEQ ID NO. 58591, or a homolog or fragment thereof, or if the activity of a polypeptide encoded by a nucleic acid molecule comprising the nucleic acid SEQ ID NO. 58590, preferably the coding region thereof, or a homolog or fragment thereof, e.g. derived from Synechocystis sp., is increased or generated. For example the activity of a nucleic acid molecule or a polypeptide comprising the nucleic acid, preferably the coding region thereof, or polypeptide or the consensus sequence or the polypeptide motif, as depicted in Table I, II or IV, application No. 2, column 5 or 8 in the respective same line as the nucleic acid molecule SEQ ID NO. 58590 or polypeptide SEQ ID NO. 58591, respectively, or a homolog or a fragment thereof, is increased or generated, or if the activity carbohydrate kinase is increased or generated in a non-human organism, like a microorganism or a plant cell, plant or part thereof, especially with non-targeted localization, whereby the respective line discloses in column 7 glutamate. For example, an increase of the glutamate of at least 1 percent, particularly in a range of 35 to 196-percent is conferred as compared to a corresponding non-transformed wild type non-human organism.

[8942] Accordingly, in one embodiment, an increase of glutamine in a non-human organism, as compared to a corresponding non-transformed wild type non-human organism, is conferred in the process of the invention, if the activity of a polypeptide showing the activity of a iron(III) dicitrate-binding protein, or if the activity of the polypeptide Slr1492, preferably represented by SEQ ID NO. 58669, or a homolog or fragment thereof, or if the activity of a polypeptide encoded by a nucleic acid molecule comprising the nucleic acid SEQ ID NO. 58668, preferably the coding region thereof, or a homolog or fragment thereof, e.g. derived from Synechocystis sp., is increased or generated. For example the activity of a nucleic acid molecule or a polypeptide comprising the nucleic acid, preferably the coding region thereof, or polypeptide or the consensus sequence or the polypeptide motif, as depicted in Table I, II or IV, application No. 2, column 5 or 8 in the respective same line as the nucleic acid molecule SEQ ID NO. 58668 or polypeptide SEQ ID NO. 58669, respectively, or a homolog or a fragment thereof, is increased or generated, or if the activity iron(III) dicitrate-binding protein is increased or generated in a non-human organism, like a microorganism or a plant cell, plant or part thereof, especially with mitochondrial localization, whereby the respective line discloses in column 7 glutamine. For example, an increase of the glutamine of at least 1 percent, particularly in a range of 30 to 46-percent is conferred as compared to a corresponding non-transformed wild type non-human organism.

[8943] Accordingly, in one embodiment, an increase of proline in a non-human organism, as compared to a corresponding non-transformed wild type non-human organism, is conferred in the process of the invention, if the activity of a polypeptide showing the activity of a Photosystem I reaction center subunit XI, or if the activity of the polypeptide Slr1655, preferably represented by SEQ ID NO. 12071, or a homolog or fragment thereof, or if the activity of a polypeptide encoded by a nucleic acid molecule comprising the nucleic acid SEQ ID NO. 12070, preferably the coding region thereof, or a homolog or fragment thereof, e.g. derived from Synechocystis sp., is increased or generated. For example the activity of a nucleic acid molecule or a polypeptide comprising the nucleic acid, preferably the coding region thereof, or polypeptide or the consensus sequence or the polypeptide motif, as depicted in Table I, II or IV, application No. 2, column 5 or 8 in the respective same line as the nucleic acid molecule SEQ ID NO. 12070 or polypeptide SEQ ID NO. 12071, respectively, or a homolog or a fragment thereof, is increased or generated, or if the activity Photosystem I reaction center subunit XI is increased or generated in a non-human organism, like a microorganism or a plant cell, plant or part thereof, especially with mitochondrial localization, whereby the respective line discloses in column 7 proline. For example, an increase of the proline of at least 1 percent, particularly in a range of 40 to 164-percent is conferred as compared to a corresponding non-transformed wild type non-human organism.

[8944] Accordingly, in one embodiment, an increase of arginine in a non-human organism, as compared to a corresponding non-transformed wild type non-human organism, is conferred in the process of the invention, if the activity of a polypeptide showing the activity of a photosystem II protein, or if the activity of the polypeptide Slr1739, preferably represented by SEQ ID NO. 58732, or a homolog or fragment thereof, or if the activity of a polypeptide encoded by a nucleic acid molecule comprising the nucleic acid SEQ ID NO. 58731, preferably the coding region thereof, or a homolog or fragment thereof, e.g. derived from Synechocystis sp., is increased or generated. For example the activity of a nucleic acid molecule or a polypeptide comprising the nucleic acid, preferably the coding region thereof, or polypeptide or the consensus sequence or the polypeptide motif, as depicted in Table I, II or IV, application No. 2, column 5 or 8 in the respective same line as the nucleic acid molecule SEQ ID NO. 58731 or polypeptide SEQ ID NO. 58732, respectively, or a homolog or a fragment thereof, is increased or generated, or if the activity photosystem II protein is increased or generated in a non-human organism, like a microorganism or a plant cell, plant or part thereof, especially with plastidic localization, whereby the respective line discloses in column 7 arginine. For example, an increase of the arginine of at least 1 percent, particularly in a range of 99 to 193-percent is conferred as compared to a corresponding non-transformed wild type non-human organism.

[8945] Accordingly, in one embodiment, an increase of glutamine in a non-human organism, as compared to a corresponding non-transformed wild type non-human organism, is conferred in the process of the invention, if the activity of a polypeptide showing the activity of a photosystem II protein, or if the activity of the polypeptide Slr1739, preferably represented by SEQ ID NO. 58732, or a homolog or fragment thereof, or if the activity of a polypeptide encoded by a nucleic acid molecule comprising the nucleic acid SEQ ID NO. 58731, preferably the coding region thereof, or a homolog or fragment thereof, e.g. derived from Synechocystis sp., is increased or generated. For example the activity of a nucleic acid molecule or a polypeptide comprising the nucleic acid, preferably the coding region thereof, or polypeptide or the consensus sequence or the polypeptide motif, as depicted in Table I, II or IV, application No. 2, column 5 or 8 in the respective same line as the nucleic acid molecule SEQ ID NO. 58731 or polypeptide SEQ ID NO. 58732, respectively, or a homolog or a fragment thereof, is increased or generated, or if the activity photosystem II protein is increased or generated in a non-human organism, like a microorganism or a plant cell, plant or part thereof, especially with plastidic localization, whereby the respective line discloses in column 7 glutamine. For example, an increase of the glutamine of at least 1 percent, particularly in a range of 42 to 229-percent is conferred as compared to a corresponding non-transformed wild type non-human organism.

[8946] Accordingly, in one embodiment, an increase of proline in a non-human organism, as compared to a corresponding non-transformed wild type non-human organism, is conferred in the process of the invention, if the activity of a polypeptide showing the activity of a glutamine amidotransferase, or if the activity of the polypeptide Slr1742, preferably represented by SEQ ID NO. 58752, or a homolog or fragment thereof, or if the activity of a polypeptide encoded by a nucleic acid molecule comprising the nucleic acid SEQ ID NO. 58751, preferably the coding region thereof, or a homolog or fragment thereof, e.g. derived from Synechocystis sp., is increased or generated. For example the activity of a nucleic acid molecule or a polypeptide comprising the nucleic acid, preferably the coding region thereof, or polypeptide or the consensus sequence or the polypeptide motif, as depicted in Table I, II or IV, application No. 2, column 5 or 8 in the respective same line as the nucleic acid molecule SEQ ID NO. 58751 or polypeptide SEQ ID NO. 58752, respectively, or a homolog or a fragment thereof, is increased or generated, or if the activity glutamine amidotransferase is increased or generated in a non-human organism, like a microorganism or a plant cell, plant or part thereof, especially with mitochondrial localization, whereby the respective line discloses in column 7 proline. For example, an increase of the proline of at least 1 percent, particularly in a range of 49 to 75-percent is conferred as compared to a corresponding non-transformed wild type non-human organism.

[8947] Accordingly, in one embodiment, an increase of glutamate in a non-human organism, as compared to a corresponding non-transformed wild type non-human organism, is conferred in the process of the invention, if the activity of a polypeptide showing the activity of a glycerol-3-phosphate dehydrogenase, or if the activity of the polypeptide Slr1755, preferably represented by SEQ ID NO. 58824, or a homolog or fragment thereof, or if the activity of a polypeptide encoded by a nucleic acid molecule comprising the nucleic acid SEQ ID NO. 58823, preferably the coding region thereof, or a homolog or fragment thereof, e.g. derived from Synechocystis sp., is increased or generated. For example the activity of a nucleic acid molecule or a polypeptide comprising the nucleic acid, preferably the coding region thereof, or polypeptide or the consensus sequence or the polypeptide motif, as depicted in Table I, II or IV, application No. 2, column 5 or 8 in the respective same line as the nucleic acid molecule SEQ ID NO. 58823 or polypeptide SEQ ID NO. 58824, respectively, or a homolog or a fragment thereof, is increased or generated, or if the activity glycerol-3-phosphate dehydrogenase is increased or generated in a non-human organism, like a microorganism or a plant cell, plant or part thereof, especially with mitochondrial localization, whereby the respective line discloses in column 7 glutamate. For example, an increase of the glutamate of at least 1 percent, particularly in a range of 40 to 62 percent is conferred as compared to a corresponding non-transformed wild type non-human organism.

[8948] Accordingly, in one embodiment, an increase of proline in a non-human organism, as compared to a corresponding non-transformed wild type non-human organism, is conferred in the process of the invention, if the activity of a polypeptide showing the activity of a phosphoadenosine phosphosulfate reductase, or if the activity of the polypeptide Slr1791, preferably represented by SEQ ID NO. 12141, or a homolog or fragment thereof, or if the activity of a polypeptide encoded by a nucleic acid molecule comprising the nucleic acid SEQ ID NO. 12140, preferably the coding region thereof, or a homolog or fragment thereof, e.g. derived from Synechocystis sp., is increased or generated. For example the activity of a nucleic acid molecule or a polypeptide comprising the nucleic acid, preferably the coding region thereof, or polypeptide or the consensus sequence or the polypeptide motif, as depicted in Table I, II or IV, application No. 2, column 5 or 8 in the respective same line as the nucleic acid molecule SEQ ID NO. 12140 or polypeptide SEQ ID NO. 12141, respectively, or a homolog or a fragment thereof, is increased or generated, or if the activity phosphoadenosine phosphosulfate reductase is increased or generated in a non-human organism, like a microorganism or a plant cell, plant or part thereof, especially with plastidic localization, whereby the respective line discloses in column 7 proline. For example, an increase of the proline of at least 1 percent, particularly in a range of 32 to 53-percent is conferred as compared to a corresponding non-transformed wild type non-human organism.

[8949] Accordingly, in one embodiment, an increase of glutamate in a non-human organism, as compared to a corresponding non-transformed wild type non-human organism, is conferred in the process of the invention, if the activity of a polypeptide showing the activity of a riboflavin biosynthesis protein, or if the activity of the polypeptide Slr1882, preferably represented by SEQ ID NO. 59042, or a homolog or fragment thereof, or if the activity of a polypeptide encoded by a nucleic acid molecule comprising the nucleic acid SEQ ID NO. 59041, preferably the coding region thereof, or a homolog or fragment thereof, e.g. derived from Synechocystis sp., is increased or generated. For example the activity of a nucleic acid molecule or a polypeptide comprising the nucleic acid, preferably the coding region thereof, or polypeptide or the consensus sequence or the polypeptide motif, as depicted in Table I, II or IV, application No. 2, column 5 or 8 in the respective same line as the nucleic acid molecule SEQ ID NO. 59041 or polypeptide SEQ ID NO. 59042, respectively, or a homolog or a fragment thereof, is increased or generated, or if the activity riboflavin biosynthesis protein is increased or generated in a non-human organism, like a microorganism or a plant cell, plant or part thereof, especially with non-targeted localization, whereby the respective line discloses in column 7 glutamate. For example, an increase of the glutamate of at least 1 percent, particularly in a range of 34 to 114-percent is conferred as compared to a corresponding non-transformed wild type non-human organism.

[8950] Accordingly, in one embodiment, an increase of glutamate in a non-human organism, as compared to a corresponding non-transformed wild type non-human organism, is conferred in the process of the invention, if the activity of a polypeptide showing the activity of a malonyl CoA-acyl carrier protein transacylase, or if the activity of the polypeptide Slr2023, preferably represented by SEQ ID NO. 59166, or a homolog or fragment thereof, or if the activity of a polypeptide encoded by a nucleic acid molecule comprising the nucleic acid SEQ ID NO. 59165, preferably the coding region thereof, or a homolog or fragment thereof, e.g. derived from Synechocystis sp., is increased or generated. For example the activity of a nucleic acid molecule or a polypeptide comprising the nucleic acid, preferably the coding region thereof, or polypeptide or the consensus sequence or the polypeptide motif, as depicted in Table I, II or IV, application No. 2, column 5 or 8 in the respective same line as the nucleic acid molecule SEQ ID NO. 59165 or polypeptide SEQ ID NO. 59166, respectively, or a homolog or a fragment thereof, is increased or generated, or if the activity malonyl CoA-acyl carrier protein transacylase is increased or generated in a non-human organism, like a microorganism or a plant cell, plant or part thereof, especially with plastidic localization, whereby the respective line discloses in column 7 glutamate. For example, an increase of the glutamate of at least 1 percent, particularly in a range of 123 to 185-percent is conferred as compared to a corresponding non-transformed wild type non-human organism.

[8951] Accordingly, in one embodiment, an increase of glutamine in a non-human organism, as compared to a corresponding non-transformed wild type non-human organism, is conferred in the process of the invention, if the activity of a polypeptide showing the activity of a malonyl CoA-acyl carrier protein transacylase, or if the activity of the polypeptide Slr2023, preferably represented by SEQ ID NO. 59166, or a homolog or fragment thereof, or if the activity of a polypeptide encoded by a nucleic acid molecule comprising the nucleic acid SEQ ID NO. 59165, preferably the coding region thereof, or a homolog or fragment thereof, e.g. derived from Synechocystis sp., is increased or generated. For example the activity of a nucleic acid molecule or a polypeptide comprising the nucleic acid, preferably the coding region thereof, or polypeptide or the consensus sequence or the polypeptide motif, as depicted in Table I, II or IV, application No. 2, column 5 or 8 in the respective same line as the nucleic acid molecule SEQ ID NO. 59165 or polypeptide SEQ ID NO. 59166, respectively, or a homolog or a fragment thereof, is increased or generated, or if the activity malonyl CoA-acyl carrier protein transacylase is increased or generated in a non-human organism, like a microorganism or a plant cell, plant or part thereof, especially with plastidic localization, whereby the respective line discloses in column 7 glutamine. For example, an increase of the glutamine of at least 1 percent, particularly in a range of 70 to 355-percent is conferred as compared to a corresponding non-transformed wild type non-human organism.

[8952] Accordingly, in one embodiment, an increase of proline in a non-human organism, as compared to a corresponding non-transformed wild type non-human organism, is conferred in the process of the invention, if the activity of a polypeptide showing the activity of a short-chain alcohol dehydrogenase family, or if the activity of the polypeptide Slr2124, preferably represented by SEQ ID NO. 59371, or a homolog or fragment thereof, or if the activity of a polypeptide encoded by a nucleic acid molecule comprising the nucleic acid SEQ ID NO. 59370, preferably the coding region thereof, or a homolog or fragment thereof, e.g. derived from Synechocystis sp., is increased or generated. For example the activity of a nucleic acid molecule or a polypeptide comprising the nucleic acid, preferably the coding region thereof, or polypeptide or the consensus sequence or the polypeptide motif, as depicted in Table I, II or IV, application No. 2, column 5 or 8 in the respective same line as the nucleic acid molecule SEQ ID NO. 59370 or polypeptide SEQ ID NO. 59371, respectively, or a homolog or a fragment thereof, is increased or generated, or if the activity short-chain alcohol dehydrogenase family is increased or generated in a non-human organism, like a microorganism or a plant cell, plant or part thereof, especially with plastidic localization, whereby the respective line discloses in column 7 proline. For example, an increase of the proline of at least 1 percent, particularly in a range of 53 to 228-percent is conferred as compared to a corresponding non-transformed wild type non-human organism.

[8953] Accordingly, in one embodiment, an increase of glutamine in a non-human organism, as compared to a corresponding non-transformed wild type non-human organism, is conferred in the process of the invention, if the activity of a polypeptide showing the activity of a Sec-independent protein translocase subunit, or if the activity of the polypeptide TTC0019, preferably represented by SEQ ID NO. 12699, or a homolog or fragment thereof, or if the activity of a polypeptide encoded by a nucleic acid molecule comprising the nucleic acid SEQ ID NO. 12698, preferably the coding region thereof, or a homolog or fragment thereof, e.g. derived from Thermus thermophilus, is increased or generated. For example the activity of a nucleic acid molecule or a polypeptide comprising the nucleic acid, preferably the coding region thereof, or polypeptide or the consensus sequence or the polypeptide motif, as depicted in Table I, II or IV, application No. 2, column 5 or 8 in the respective same line as the nucleic acid molecule SEQ ID NO. 12698 or polypeptide SEQ ID NO. 12699, respectively, or a homolog or a fragment thereof, is increased or generated, or if the activity Sec-independent protein translocase subunit is increased or generated in a non-human organism, like a microorganism or a plant cell, plant or part thereof, especially with non-targeted localization, whereby the respective line discloses in column 7 glutamine. For example, an increase of the glutamine of at least 1 percent, particularly in a range of 72 to 162-percent is conferred as compared to a corresponding non-transformed wild type non-human organism.

[8954] Accordingly, in one embodiment, an increase of proline in a non-human organism, as compared to a corresponding non-transformed wild type non-human organism, is conferred in the process of the invention, if the activity of a polypeptide showing the activity of a Sec-independent protein translocase subunit, or if the activity of the polypeptide TTC0019, preferably represented by SEQ ID NO. 12699, or a homolog or fragment thereof, or if the activity of a polypeptide encoded by a nucleic acid molecule comprising the nucleic acid SEQ ID NO. 12698, preferably the coding region thereof, or a homolog or fragment thereof, e.g. derived from Thermus thermophilus, is increased or generated. For example the activity of a nucleic acid molecule or a polypeptide comprising the nucleic acid, preferably the coding region thereof, or polypeptide or the consensus sequence or the polypeptide motif, as depicted in Table I, II or IV, application No. 2, column 5 or 8 in the respective same line as the nucleic acid molecule SEQ ID NO. 12698 or polypeptide SEQ ID NO. 12699, respectively, or a homolog or a fragment thereof, is increased or generated, or if the activity Sec-independent protein translocase subunit is increased or generated in a non-human organism, like a microorganism or a plant cell, plant or part thereof, especially with non-targeted localization, whereby the respective line discloses in column 7 proline. For example, an increase of the proline of at least 1 percent, particularly in a range of 45 to 228-percent is conferred as compared to a corresponding non-transformed wild type non-human organism.

[8955] Accordingly, in one embodiment, an increase of proline in a non-human organism, as compared to a corresponding non-transformed wild type non-human organism, is conferred in the process of the invention, if the activity of a polypeptide showing the activity of a cell division protein, or if the activity of the polypeptide TTC0035, preferably represented by SEQ ID NO. 60302, or a homolog or fragment thereof, or if the activity of a polypeptide encoded by a nucleic acid molecule comprising the nucleic acid SEQ ID NO. 60301, preferably the coding region thereof, or a homolog or fragment thereof, e.g. derived from Thermus thermophilus, is increased or generated. For example the activity of a nucleic acid molecule or a polypeptide comprising the nucleic acid, preferably the coding region thereof, or polypeptide or the consensus sequence or the polypeptide motif, as depicted in Table I, II or IV, application No. 2, column 5 or 8 in the respective same line as the nucleic acid molecule SEQ ID NO. 60301 or polypeptide SEQ ID NO. 60302, respectively, or a homolog or a fragment thereof, is increased or generated, or if the activity cell division protein is increased or generated in a non-human organism, like a microorganism or a plant cell, plant or part thereof, especially with non-targeted localization, whereby the respective line discloses in column 7 proline. For example, an increase of the proline of at least 1 percent, particularly in a range of 44 to 145-percent is conferred as compared to a corresponding non-transformed wild type non-human organism.

[8956] Accordingly, in one embodiment, an increase of proline in a non-human organism, as compared to a corresponding non-transformed wild type non-human organism, is conferred in the process of the invention, if the activity of a polypeptide showing the activity of a branched-chain amino acid ABC transporter permease protein, or if the activity of the polypeptide TTC0216, preferably represented by SEQ ID NO. 60860, or a homolog or fragment thereof, or if the activity of a polypeptide encoded by a nucleic acid molecule comprising the nucleic acid SEQ ID NO. 60859, preferably the coding region thereof, or a homolog or fragment thereof, e.g. derived from Thermus thermophilus, is increased or generated. For example the activity of a nucleic acid molecule or a polypeptide comprising the nucleic acid, preferably the coding region thereof, or polypeptide or the consensus sequence or the polypeptide motif, as depicted in Table I, II or IV, application No. 2, column 5 or 8 in the respective same line as the nucleic acid molecule SEQ ID NO. 60859 or polypeptide SEQ ID NO. 60860, respectively, or a homolog or a fragment thereof, is increased or generated, or if the activity branched-chain amino acid ABC transporter permease protein is increased or generated in a non-human organism, like a microorganism or a plant cell, plant or part thereof, especially with non-targeted localization, whereby the respective line discloses in column 7 proline. For example, an increase of the proline of at least 1 percent, particularly in a range of 37 to 137-percent is conferred as compared to a corresponding non-transformed wild type non-human organism.

[8957] Accordingly, in one embodiment, an increase of proline in a non-human organism, as compared to a corresponding non-transformed wild type non-human organism, is conferred in the process of the invention, if the activity of a polypeptide showing the activity of a amino acid ABC transporter permease protein, or if the activity of the polypeptide TTC0337, preferably represented by SEQ ID NO. 61071, or a homolog or fragment thereof, or if the activity of a polypeptide encoded by a nucleic acid molecule comprising the nucleic acid SEQ ID NO. 61070, preferably the coding region thereof, or a homolog or fragment thereof, e.g. derived from Thermus thermophilus, is increased or generated. For example the activity of a nucleic acid molecule or a polypeptide comprising the nucleic acid, preferably the coding region thereof, or polypeptide or the consensus sequence or the polypeptide motif, as depicted in Table I, II or IV, application No. 2, column 5 or 8 in the respective same line as the nucleic acid molecule SEQ ID NO. 61070 or polypeptide SEQ ID NO. 61071, respectively, or a homolog or a fragment thereof, is increased or generated, or if the activity amino acid ABC transporter permease protein is increased or generated in a non-human organism, like a microorganism or a plant cell, plant or part thereof, especially with non-targeted localization, whereby the respective line discloses in column 7 proline. For example, an increase of the proline of at least 1 percent, particularly in a range of 37 to 74 percent is conferred as compared to a corresponding non-transformed wild type non-human organism.

[8958] Accordingly, in one embodiment, an increase of proline in a non-human organism, as compared to a corresponding non-transformed wild type non-human organism, is conferred in the process of the invention, if the activity of a polypeptide showing the activity of a TTC0768-protein, or if the activity of the polypeptide TTC0768, preferably represented by SEQ ID NO. 61533, or a homolog or fragment thereof, or if the activity of a polypeptide encoded by a nucleic acid molecule comprising the nucleic acid SEQ ID NO. 61532, preferably the coding region thereof, or a homolog or fragment thereof, e.g. derived from Thermus thermophilus, is increased or generated. For example the activity of a nucleic acid molecule or a polypeptide comprising the nucleic acid, preferably the coding region thereof, or polypeptide or the consensus sequence or the polypeptide motif, as depicted in Table I, II or IV, application No. 2, column 5 or 8 in the respective same line as the nucleic acid molecule SEQ ID NO. 61532 or polypeptide SEQ ID NO. 61533, respectively, or a homolog or a fragment thereof, is increased or generated, or if the activity TTC0768-protein is increased or generated in a non-human organism, like a microorganism or a plant cell, plant or part thereof, especially with non-targeted localization, whereby the respective line discloses in column 7 proline. For example, an increase of the proline of at least 1 percent, particularly in a range of 48 to 77-percent is conferred as compared to a corresponding non-transformed wild type non-human organism.

[8959] Accordingly, in one embodiment, an increase of glutamine in a non-human organism, as compared to a corresponding non-transformed wild type non-human organism, is conferred in the process of the invention, if the activity of a polypeptide showing the activity of a metal-dependent hydrolase, or if the activity of the polypeptide TTC0917, preferably represented by SEQ ID NO. 61554, or a homolog or fragment thereof, or if the activity of a polypeptide encoded by a nucleic acid molecule comprising the nucleic acid SEQ ID NO. 61553, preferably the coding region thereof, or a homolog or fragment thereof, e.g. derived from Thermus thermophilus, is increased or generated. For example the activity of a nucleic acid molecule or a polypeptide comprising the nucleic acid, preferably the coding region thereof, or polypeptide or the consensus sequence or the polypeptide motif, as depicted in Table I, II or IV, application No. 2, column 5 or 8 in the respective same line as the nucleic acid molecule SEQ ID NO. 61553 or polypeptide SEQ ID NO. 61554, respectively, or a homolog or a fragment thereof, is increased or generated, or if the activity metal-dependent hydrolase is increased or generated in a non-human organism, like a microorganism or a plant cell, plant or part thereof, especially with non-targeted localization, whereby the respective line discloses in column 7 glutamine. For example, an increase of the glutamine of at least 1 percent, particularly in a range of 58 to 79-percent is conferred as compared to a corresponding non-transformed wild type non-human organism.

[8960] Accordingly, in one embodiment, an increase of glutamate in a non-human organism, as compared to a corresponding non-transformed wild type non-human organism, is conferred in the process of the invention, if the activity of a polypeptide showing the activity of a multiple antibiotic resistance protein, or if the activity of the polypeptide TTC1193, preferably represented by SEQ ID NO. 61724, or a homolog or fragment thereof, or if the activity of a polypeptide encoded by a nucleic acid molecule comprising the nucleic acid SEQ ID NO. 61723, preferably the coding region thereof, or a homolog or fragment thereof, e.g. derived from Thermus thermophilus, is increased or generated. For example the activity of a nucleic acid molecule or a polypeptide comprising the nucleic acid, preferably the coding region thereof, or polypeptide or the consensus sequence or the polypeptide motif, as depicted in Table I, II or IV, application No. 2, column 5 or 8 in the respective same line as the nucleic acid molecule SEQ ID NO. 61723 or polypeptide SEQ ID NO. 61724, respectively, or a homolog or a fragment thereof, is increased or generated, or if the activity multiple antibiotic resistance protein is increased or generated in a non-human organism, like a microorganism or a plant cell, plant or part thereof, especially with non-targeted localization, whereby the respective line discloses in column 7 glutamate. For example, an increase of the glutamate of at least 1 percent, particularly in a range of 35 to 73-percent is conferred as compared to a corresponding non-transformed wild type non-human organism.

[8961] Accordingly, in one embodiment, an increase of glutamate in a non-human organism, as compared to a corresponding non-transformed wild type non-human organism, is conferred in the process of the invention, if the activity of a polypeptide showing the activity of a TTC1386-protein, or if the activity of the polypeptide TTC1386, preferably represented by SEQ ID NO. 62080, or a homolog or fragment thereof, or if the activity of a polypeptide encoded by a nucleic acid molecule comprising the nucleic acid SEQ ID NO. 62079, preferably the coding region thereof, or a homolog or fragment thereof, e.g. derived from Thermus thermophilus, is increased or generated. For example the activity of a nucleic acid molecule or a polypeptide comprising the nucleic acid, preferably the coding region thereof, or polypeptide or the consensus sequence or the polypeptide motif, as depicted in Table I, II or IV, application No. 2, column 5 or 8 in the respective same line as the nucleic acid molecule SEQ ID NO. 62079 or polypeptide SEQ ID NO. 62080, respectively, or a homolog or a fragment thereof, is increased or generated, or if the activity TTC1386-protein is increased or generated in a non-human organism, like a microorganism or a plant cell, plant or part thereof, especially with non-targeted localization, whereby the respective line discloses in column 7 glutamate. For example, an increase of the glutamate of at least 1 percent, particularly in a range of 66 to 106-percent is conferred as compared to a corresponding non-transformed wild type non-human organism.

[8962] Accordingly, in one embodiment, an increase of glutamine in a non-human organism, as compared to a corresponding non-transformed wild type non-human organism, is conferred in the process of the invention, if the activity of a polypeptide showing the activity of a homocitrate synthase, or if the activity of the polypeptide TTC1550, preferably represented by SEQ ID NO. 12975, or a homolog or fragment thereof, or if the activity of a polypeptide encoded by a nucleic acid molecule comprising the nucleic acid SEQ ID NO. 12974, preferably the coding region thereof, or a homolog or fragment thereof, e.g. derived from Thermus thermophilus, is increased or generated. For example the activity of a nucleic acid molecule or a polypeptide comprising the nucleic acid, preferably the coding region thereof, or polypeptide or the consensus sequence or the polypeptide motif, as depicted in Table I, II or IV, application No. 2, column 5 or 8 in the respective same line as the nucleic acid molecule SEQ ID NO. 12974 or polypeptide SEQ ID NO. 12975, respectively, or a homolog or a fragment thereof, is increased or generated, or if the activity homocitrate synthase is increased or generated in a non-human organism, like a microorganism or a plant cell, plant or part thereof, especially with non-targeted localization, whereby the respective line discloses in column 7 glutamine. For example, an increase of the glutamine of at least 1 percent, particularly in a range of 56 to 248-percent is conferred as compared to a corresponding non-transformed wild type non-human organism.

[8963] Accordingly, in one embodiment, an increase of proline in a non-human organism, as compared to a corresponding non-transformed wild type non-human organism, is conferred in the process of the invention, if the activity of a polypeptide showing the activity of a homocitrate synthase, or if the activity of the polypeptide TTC1550, preferably represented by SEQ ID NO. 12975, or a homolog or fragment thereof, or if the activity of a polypeptide encoded by a nucleic acid molecule comprising the nucleic acid SEQ ID NO. 12974, preferably the coding region thereof, or a homolog or fragment thereof, e.g. derived from Thermus thermophilus, is increased or generated. For example the activity of a nucleic acid molecule or a polypeptide comprising the nucleic acid, preferably the coding region thereof, or polypeptide or the consensus sequence or the polypeptide motif, as depicted in Table I, II or IV, application No. 2, column 5 or 8 in the respective same line as the nucleic acid molecule SEQ ID NO. 12974 or polypeptide SEQ ID NO. 12975, respectively, or a homolog or a fragment thereof, is increased or generated, or if the activity homocitrate synthase is increased or generated in a non-human organism, like a microorganism or a plant cell, plant or part thereof, especially with non-targeted localization, whereby the respective line discloses in column 7 proline. For example, an increase of the proline of at least 1 percent, particularly in a range of 54 to 320-percent is conferred as compared to a corresponding non-transformed wild type non-human organism.

[8964] Accordingly, in one embodiment, an increase of glutamate in a non-human organism, as compared to a corresponding non-transformed wild type non-human organism, is conferred in the process of the invention, if the activity of a polypeptide showing the activity of a oxidoreductase subunit, or if the activity of the polypeptide TTC1918, preferably represented by SEQ ID NO. 62161, or a homolog or fragment thereof, or if the activity of a polypeptide encoded by a nucleic acid molecule comprising the nucleic acid SEQ ID NO. 62160, preferably the coding region thereof, or a homolog or fragment thereof, e.g. derived from Thermus thermophilus, is increased or generated. For example the activity of a nucleic acid molecule or a polypeptide comprising the nucleic acid, preferably the coding region thereof, or polypeptide or the consensus sequence or the polypeptide motif, as depicted in Table I, II or IV, application No. 2, column 5 or 8 in the respective same line as the nucleic acid molecule SEQ ID NO. 62160 or polypeptide SEQ ID NO. 62161, respectively, or a homolog or a fragment thereof, is increased or generated, or if the activity oxidoreductase subunit is increased or generated in a non-human organism, like a microorganism or a plant cell, plant or part thereof, especially with non-targeted localization, whereby the respective line discloses in column 7 glutamate. For example, an increase of the glutamate of at least 1 percent, particularly in a range of 43 to 128-percent is conferred as compared to a corresponding non-transformed wild type non-human organism.

[8965] Accordingly, in one embodiment, an increase of glutamine in a non-human organism, as compared to a corresponding non-transformed wild type non-human organism, is conferred in the process of the invention, if the activity of a polypeptide showing the activity of a oxidoreductase subunit, or if the activity of the polypeptide TTC1918, preferably represented by SEQ ID NO. 62161, or a homolog or fragment thereof, or if the activity of a polypeptide encoded by a nucleic acid molecule comprising the nucleic acid SEQ ID NO. 62160, preferably the coding region thereof, or a homolog or fragment thereof, e.g. derived from Thermus thermophilus, is increased or generated. For example the activity of a nucleic acid molecule or a polypeptide comprising the nucleic acid, preferably the coding region thereof, or polypeptide or the consensus sequence or the polypeptide motif, as depicted in Table I, II or IV, application No. 2, column 5 or 8 in the respective same line as the nucleic acid molecule SEQ ID NO. 62160 or polypeptide SEQ ID NO. 62161, respectively, or a homolog or a fragment thereof, is increased or generated, or if the activity oxidoreductase subunit is increased or generated in a non-human organism, like a microorganism or a plant cell, plant or part thereof, especially with non-targeted localization, whereby the respective line discloses in column 7 glutamine. For example, an increase of the glutamine of at least 1 percent, particularly in a range of 42 to 139-percent is conferred as compared to a corresponding non-transformed wild type non-human organism.

[8966] Accordingly, in one embodiment, an increase of glutamate in a non-human organism, as compared to a corresponding non-transformed wild type non-human organism, is conferred in the process of the invention, if the activity of a polypeptide showing the activity of a XM_{—}473199-protein, or if the activity of the polypeptide XM_{—}473199, preferably represented by SEQ ID NO. 62245, or a homolog or fragment thereof, or if the activity of a polypeptide encoded by a nucleic acid molecule comprising the nucleic acid SEQ ID NO. 62244, preferably the coding region thereof, or a homolog or fragment thereof, e.g. derived from Oryza sativa, is increased or generated. For example the activity of a nucleic acid molecule or a polypeptide comprising the nucleic acid, preferably the coding region thereof, or polypeptide or the consensus sequence or the polypeptide motif, as depicted in Table I, II or IV, application No. 2, column 5 or 8 in the respective same line as the nucleic acid molecule SEQ ID NO. 62244 or polypeptide SEQ ID NO. 62245, respectively, or a homolog or a fragment thereof, is increased or generated, or if the activity XM_{—}473199-protein is increased or generated in a non-human organism, like a microorganism or a plant cell, plant or part thereof, especially with non-targeted localization, whereby the respective line discloses in column 7 glutamate. For example, an increase of the glutamate of at least 1 percent, particularly in a range of 45 to 75-percent is conferred as compared to a corresponding non-transformed wild type non-human organism.

[8967] Accordingly, in one embodiment, an increase of glutamine in a non-human organism, as compared to a corresponding non-transformed wild type non-human organism, is conferred in the process of the invention, if the activity of a polypeptide showing the activity of a XM_{—}473199-protein, or if the activity of the polypeptide XM_{—}473199, preferably represented by SEQ ID NO. 62245, or a homolog or fragment thereof, or if the activity of a polypeptide encoded by a nucleic acid molecule comprising the nucleic acid SEQ ID NO. 62244, preferably the coding region thereof, or a homolog or fragment thereof, e.g. derived from Oryza sativa, is increased or generated. For example the activity of a nucleic acid molecule or a polypeptide comprising the nucleic acid, preferably the coding region thereof, or polypeptide or the consensus sequence or the polypeptide motif, as depicted in Table I, II or IV, application No. 2, column 5 or 8 in the respective same line as the nucleic acid molecule SEQ ID NO. 62244 or polypeptide SEQ ID NO. 62245, respectively, or a homolog or a fragment thereof, is increased or generated, or if the activity XM_{—}473199-protein is increased or generated in a non-human organism, like a microorganism or a plant cell, plant or part thereof, especially with non-targeted localization, whereby the respective line discloses in column 7 glutamine. For example, an increase of the glutamine of at least 1 percent, particularly in a range of 62 to 173-percent is conferred as compared to a corresponding non-transformed wild type non-human organism.

[8968] Accordingly, in one embodiment, an increase of proline in a non-human organism, as compared to a corresponding non-transformed wild type non-human organism, is conferred in the process of the invention, if the activity of a polypeptide showing the activity of a transcription factor, or if the activity of the polypeptide Ybl021 c, preferably represented by SEQ ID NO. 62525, or a homolog or fragment thereof, or if the activity of a polypeptide encoded by a nucleic acid molecule comprising the nucleic acid SEQ ID NO. 62524, preferably the coding region thereof, or a homolog or fragment thereof, e.g. derived from Saccharomyces cerevisiae, is increased or generated. For example the activity of a nucleic acid molecule or a polypeptide comprising the nucleic acid, preferably the coding region thereof, or polypeptide or the consensus sequence or the polypeptide motif, as depicted in Table I, II or IV, application No. 2, column 5 or 8 in the respective same line as the nucleic acid molecule SEQ ID NO. 62524 or polypeptide SEQ ID NO. 62525, respectively, or a homolog or a fragment thereof, is increased or generated, or if the activity transcription factor is increased or generated in a non-human organism, like a microorganism or a plant cell, plant or part thereof, especially with non-targeted localization, whereby the respective line discloses in column 7 proline. For example, an increase of the proline of at least 1 percent, particularly in a range of 35 to 804-percent is conferred as compared to a corresponding non-transformed wild type non-human organism.

[8969] Accordingly, in one embodiment, an increase of glutamate in a non-human organism, as compared to a corresponding non-transformed wild type non-human organism, is conferred in the process of the invention, if the activity of a polypeptide showing the activity of a cell division controt protein, or if the activity of the polypeptide Ybr160w, preferably represented by SEQ ID NO. 62718, or a homolog or fragment thereof, or if the activity of a polypeptide encoded by a nucleic acid molecule comprising the nucleic acid SEQ ID NO. 62717, preferably the coding region thereof, or a homolog or fragment thereof, e.g. derived from Saccharomyces cerevisiae, is increased or generated. For example the activity of a nucleic acid molecule or a polypeptide comprising the nucleic acid, preferably the coding region thereof, or polypeptide or the consensus sequence or the polypeptide motif, as depicted in Table I, II or IV, application No. 2, column 5 or 8 in the respective same line as the nucleic acid molecule SEQ ID NO. 62717 or polypeptide SEQ ID NO. 62718, respectively, or a homolog or a fragment thereof, is increased or generated, or if the activity cell division control protein is increased or generated in a non-human organism, like a microorganism or a plant cell, plant or part thereof, especially with non-targeted localization, whereby the respective line discloses in column 7 glutamate. For example, an increase of the glutamate of at least 1 percent, particularly in a range of 37 to 118-percent is conferred as compared to a corresponding non-transformed wild type non-human organism.

[8970] Accordingly, in one embodiment, an increase of proline in a non-human organism, as compared to a corresponding non-transformed wild type non-human organism, is conferred in the process of the invention, if the activity of a polypeptide showing the activity of a cell division control protein, or if the activity of the polypeptide Ybr160w, preferably represented by SEQ ID NO. 62718, or a homolog or fragment thereof, or if the activity of a polypeptide encoded by a nucleic acid molecule comprising the nucleic acid SEQ ID NO. 62717, preferably the coding region thereof, or a homolog or fragment thereof, e.g. derived from Saccharomyces cerevisiae, is increased or generated. For example the activity of a nucleic acid molecule or a polypeptide comprising the nucleic acid, preferably the coding region thereof, or polypeptide or the consensus sequence or the polypeptide motif, as depicted in Table I, II or IV, application No. 2, column 5 or 8 in the respective same line as the nucleic acid molecule SEQ ID NO. 62717 or polypeptide SEQ ID NO. 62718, respectively, or a homolog or a fragment thereof, is increased or generated, or if the activity cell division control protein is increased or generated in a non-human organism, like a microorganism or a plant cell, plant or part thereof, especially with non-targeted localization, whereby the respective line discloses in column 7 proline. For example, an increase of the proline of at least 1 percent, particularly in a range of 36 to 323-percent is conferred as compared to a corresponding non-transformed wild type non-human organism.

[8971] Accordingly, in one embodiment, an increase of proline in a non-human organism, as compared to a corresponding non-transformed wild type non-human organism, is conferred in the process of the invention, if the activity of a polypeptide showing the activity of a YCL026C-A-protein, or if the activity of the polypeptide Yc1026c-a, preferably represented by SEQ ID NO. 63168, or a homolog or fragment thereof, or if the activity of a polypeptide encoded by a nucleic acid molecule comprising the nucleic acid SEQ ID NO. 63167, preferably the coding region thereof, or a homolog or fragment thereof, e.g. derived from Saccharomyces cerevisiae, is increased or generated. For example the activity of a nucleic acid molecule or a polypeptide comprising the nucleic acid, preferably the coding region thereof, or polypeptide or the consensus sequence or the polypeptide motif, as depicted in Table I, II or IV, application No. 2, column 5 or 8 in the respective same line as the nucleic acid molecule SEQ ID NO. 63167 or polypeptide SEQ ID NO. 63168, respectively, or a homolog or a fragment thereof, is increased or generated, or if the activity YCL026C-A-protein is increased or generated in a non-human organism, like a microorganism or a plant cell, plant or part thereof, especially with non-targeted localization, whereby the respective line discloses in column 7 proline. For example, an increase of the proline of at least 1 percent, particularly in a range of 51 to 68-percent is conferred as compared to a corresponding non-transformed wild type non-human organism.

[8972] Accordingly, in one embodiment, an increase of arginine in a non-human organism, as compared to a corresponding non-transformed wild type non-human organism, is conferred in the process of the invention, if the activity of a polypeptide showing the activity of a ycr102c-protein, or if the activity of the polypeptide Ycr102c, preferably represented by SEQ ID NO. 63265, or a homolog or fragment thereof, or if the activity of a polypeptide encoded by a nucleic acid molecule comprising the nucleic acid SEQ ID NO. 63264, preferably the coding region thereof, or a homolog or fragment thereof, e.g. derived from Saccharomyces cerevisiae, is increased or generated. For example the activity of a nucleic acid molecule or a polypeptide comprising the nucleic acid, preferably the coding region thereof, or polypeptide or the consensus sequence or the polypeptide motif, as depicted in Table I, II or IV, application No. 2, column 5 or 8 in the respective same line as the nucleic acid molecule SEQ ID NO. 63264 or polypeptide SEQ ID NO. 63265, respectively, or a homolog or a fragment thereof, is increased or generated, or if the activity ycr102c-protein is increased or generated in a non-human organism, like a microorganism or a plant cell, plant or part thereof, especially with plastidic localization, whereby the respective line discloses in column 7 arginine. For example, an increase of the arginine of at least 1 percent, particularly in a range of 78 to 107-percent is conferred as compared to a corresponding non-transformed wild type non-human organism.

[8973] Accordingly, in one embodiment, an increase of proline in a non-human organism, as compared to a corresponding non-transformed wild type non-human organism, is conferred in the process of the invention, if the activity of a polypeptide showing the activity of a protein kinase, or if the activity of the polypeptide Ydl168w, preferably represented by SEQ ID NO. 14303, or a homolog or fragment thereof, or if the activity of a polypeptide encoded by a nucleic acid molecule comprising the nucleic acid SEQ ID NO. 14302, preferably the coding region thereof, or a homolog or fragment thereof, e.g. derived from Saccharomyces cerevisiae, is increased or generated. For example the activity of a nucleic acid molecule or a polypeptide comprising the nucleic acid, preferably the coding region thereof, or polypeptide or the consensus sequence or the polypeptide motif, as depicted in Table I, II or IV, application No. 2, column 5 or 8 in the respective same line as the nucleic acid molecule SEQ ID NO. 14302 or polypeptide SEQ ID NO. 14303, respectively, or a homolog or a fragment thereof, is increased or generated, or if the activity protein kinase is increased or generated in a non-human organism, like a microorganism or a plant cell, plant or part thereof, especially with plastidic localization, whereby the respective line discloses in column 7 proline. For example, an increase of the proline of at least 1 percent, particularly in a range of 42 to 99-percent is conferred as compared to a corresponding non-transformed wild type non-human organism.

[8974] Accordingly, in one embodiment, an increase of proline in a non-human organism, as compared to a corresponding non-transformed wild type non-human organism, is conferred in the process of the invention, if the activity of a polypeptide showing the activity of a coproporphyrinogen III oxidase, or if the activity of the polypeptide Ydr044w, preferably represented by SEQ ID NO. 63335, or a homolog or fragment thereof, or if the activity of a polypeptide encoded by a nucleic acid molecule comprising the nucleic acid SEQ ID NO. 63334, preferably the coding region thereof, or a homolog or fragment thereof, e.g. derived from Saccharomyces cerevisiae, is increased or generated. For example the activity of a nucleic acid molecule or a polypeptide comprising the nucleic acid, preferably the coding region thereof, or polypeptide or the consensus sequence or the polypeptide motif, as depicted in Table I, II or IV, application No. 2, column 5 or 8 in the respective same line as the nucleic acid molecule SEQ ID NO. 63334 or polypeptide SEQ ID NO. 63335, respectively, or a homolog or a fragment thereof, is increased or generated, or if the activity coproporphyrinogen III oxidase is increased or generated in a non-human organism, like a microorganism or a plant cell, plant or part thereof, especially with plastidic localization, whereby the respective line discloses in column 7 proline. For example, an increase of the proline of at least 1 percent, particularly in a range of 47 to 228-percent is conferred as compared to a corresponding non-transformed wild type non-human organism.

[8975] Accordingly, in one embodiment, an increase of proline in a non-human organism, as compared to a corresponding non-transformed wild type non-human organism, is conferred in the process of the invention, if the activity of a polypeptide showing the activity of a branched-chain amino acid permease, or if the activity of the polypeptide Ydr046c, preferably represented by SEQ ID NO. 63545, or a homolog or fragment thereof, or if the activity of a polypeptide encoded by a nucleic acid molecule comprising the nucleic acid SEQ ID NO. 63544, preferably the coding region thereof, or a homolog or fragment thereof, e.g. derived from Saccharomyces cerevisiae, is increased or generated. For example the activity of a nucleic acid molecule or a polypeptide comprising the nucleic acid, preferably the coding region thereof, or polypeptide or the consensus sequence or the polypeptide motif, as depicted in Table I, II or IV, application No. 2, column 5 or 8 in the respective same line as the nucleic acid molecule SEQ ID NO. 63544 or polypeptide SEQ ID NO. 63545, respectively, or a homolog or a fragment thereof, is increased or generated, or if the activity branched-chain amino acid permease is increased or generated in a non-human organism, like a microorganism or a plant cell, plant or part thereof, especially with plastidic localization, whereby the respective line discloses in column 7 proline. For example, an increase of the proline of at least 1 percent, particularly in a range of 66 to 75-percent is conferred as compared to a corresponding non-transformed wild type non-human organism.

[8976] Accordingly, in one embodiment, an increase of arginine in a non-human organism, as compared to a corresponding non-transformed wild type non-human organism, is conferred in the process of the invention, if the activity of a polypeptide showing the activity of a peroxisome assembly protein, or if the activity of the polypeptide Ydr265w, preferably represented by SEQ ID NO. 63666, or a homolog or fragment thereof, or if the activity of a polypeptide encoded by a nucleic acid molecule comprising the nucleic acid SEQ ID NO. 63665, preferably the coding region thereof, or a homolog or fragment thereof, e.g. derived from Saccharomyces cerevisiae, is increased or generated. For example the activity of a nucleic acid molecule or a polypeptide comprising the nucleic acid, preferably the coding region thereof, or polypeptide or the consensus sequence or the polypeptide motif, as depicted in Table I, II or IV, application No. 2, column 5 or 8 in the respective same line as the nucleic acid molecule SEQ ID NO. 63665 or polypeptide SEQ ID NO. 63666, respectively, or a homolog or a fragment thereof, is increased or generated, or if the activity peroxisome assembly protein is increased or generated in a non-human organism, like a microorganism or a plant cell, plant or part thereof, especially with plastidic localization, whereby the respective line discloses in column 7 arginine. For example, an increase of the arginine of at least 1 percent, particularly in a range of 88 to 276-percent is conferred as compared to a corresponding non-transformed wild type non-human organism.

[8977] Accordingly, in one embodiment, an increase of arginine in a non-human organism, as compared to a corresponding non-transformed wild type non-human organism, is conferred in the process of the invention, if the activity of a polypeptide showing the activity of a ydr338c-protein, or if the activity of the polypeptide Ydr338c, preferably represented by SEQ ID NO. 63714, or a homolog or fragment thereof, or if the activity of a polypeptide encoded by a nucleic acid molecule comprising the nucleic acid SEQ ID NO. 63713, preferably the coding region thereof, or a homolog or fragment thereof, e.g. derived from Saccharomyces cerevisiae, is increased or generated. For example the activity of a nucleic acid molecule or a polypeptide comprising the nucleic acid, preferably the coding region thereof, or polypeptide or the consensus sequence or the polypeptide motif, as depicted in Table I, II or IV, application No. 2, column 5 or 8 in the respective same line as the nucleic acid molecule SEQ ID NO. 63713 or polypeptide SEQ ID NO. 63714, respectively, or a homolog or a fragment thereof, is increased or generated, or if the activity ydr338c-protein is increased or generated in a non-human organism, like a microorganism or a plant cell, plant or part thereof, especially with plastidic localization, whereby the respective line discloses in column 7 arginine. For example, an increase of the arginine of at least 1 percent, particularly in a range of 67 to 165-percent is conferred as compared to a corresponding non-transformed wild type non-human organism.

[8978] Accordingly, in one embodiment, an increase of glutamine in a non-human organism, as compared to a corresponding non-transformed wild type non-human organism, is conferred in the process of the invention, if the activity of a polypeptide showing the activity of a yer014w-protein, or if the activity of the polypeptide Yer014w, preferably represented by SEQ ID NO. 63746, or a homolog or fragment thereof, or if the activity of a polypeptide encoded by a nucleic acid molecule comprising the nucleic acid SEQ ID NO. 63745, preferably the coding region thereof, or a homolog or fragment thereof, e.g. derived from Saccharomyces cerevisiae, is increased or generated. For example the activity of a nucleic acid molecule or a polypeptide comprising the nucleic acid, preferably the coding region thereof, or polypeptide or the consensus sequence or the polypeptide motif, as depicted in Table I, II or IV, application No. 2, column 5 or 8 in the respective same line as the nucleic acid molecule SEQ ID NO. 63745 or polypeptide SEQ ID NO. 63746, respectively, or a homolog or a fragment thereof, is increased or generated, or if the activity yer014w-protein is increased or generated in a non-human organism, like a microorganism or a plant cell, plant or part thereof, especially with plastidic localization, whereby the respective line discloses in column 7 glutamine. For example, an increase of the glutamine of at least 1 percent, particularly in a range of 74 to 186-percent is conferred as compared to a corresponding non-transformed wild type non-human organism.

[8979] Accordingly, in one embodiment, an increase of glutamine in a non-human organism, as compared to a corresponding non-transformed wild type non-human organism, is conferred in the process of the invention, if the activity of a polypeptide showing the activity of a yer106w-protein, or if the activity of the polypeptide Yer106w, preferably represented by SEQ ID NO. 63804, or a homolog or fragment thereof, or if the activity of a polypeptide encoded by a nucleic acid molecule comprising the nucleic acid SEQ ID NO. 63803, preferably the coding region thereof, or a homolog or fragment thereof, e.g. derived from Saccharomyces cerevisiae, is increased or generated. For example the activity of a nucleic acid molecule or a polypeptide comprising the nucleic acid, preferably the coding region thereof, or polypeptide or the consensus sequence or the polypeptide motif, as depicted in Table I, II or IV, application No. 2, column 5 or 8 in the respective same line as the nucleic acid molecule SEQ ID NO. 63803 or polypeptide SEQ ID NO. 63804, respectively, or a homolog or a fragment thereof, is increased or generated, or if the activity yer106w-protein is increased or generated in a non-human organism, like a microorganism or a plant cell, plant or part thereof, especially with plastidic localization, whereby the respective line discloses in column 7 glutamine. For example, an increase of the glutamine of at least 1 percent, particularly in a range of 43 to 118-percent is conferred as compared to a corresponding non-transformed wild type non-human organism.

[8980] Accordingly, in one embodiment, an increase of proline in a non-human organism, as compared to a corresponding non-transformed wild type non-human organism, is conferred in the process of the invention, if the activity of a polypeptide showing the activity of a molecular chaperone portein, or if the activity of the polypeptide Yfl016c, preferably represented by SEQ ID NO. 63808, or a homolog or fragment thereof, or if the activity of a polypeptide encoded by a nucleic acid molecule comprising the nucleic acid SEQ ID NO. 63807, preferably the coding region thereof, or a homolog or fragment thereof, e.g. derived from Saccharomyces cerevisiae, is increased or generated. For example the activity of a nucleic acid molecule or a polypeptide comprising the nucleic acid, preferably the coding region thereof, or polypeptide or the consensus sequence or the polypeptide motif, as depicted in Table I, II or IV, application No. 2, column 5 or 8 in the respective same line as the nucleic acid molecule SEQ ID NO. 63807 or polypeptide SEQ ID NO. 63808, respectively, or a homolog or a fragment thereof, is increased or generated, or if the activity molecular chaperone portein is increased or generated in a non-human organism, like a microorganism or a plant cell, plant or part thereof, especially with non-targeted localization, whereby the respective line discloses in column 7 proline. For example, an increase of the proline of at least 1 percent, particularly in a range of 43 to 83-percent is conferred as compared to a corresponding non-transformed wild type non-human organism.

[8981] Accordingly, in one embodiment, an increase of proline in a non-human organism, as compared to a corresponding non-transformed wild type non-human organism, is conferred in the process of the invention, if the activity of a polypeptide showing the activity of a YFL0190-protein, or if the activity of the polypeptide Yfl019c, preferably represented by SEQ ID NO. 64145, or a homolog or fragment thereof, or if the activity of a polypeptide encoded by a nucleic acid molecule comprising the nucleic acid SEQ ID NO. 64144, preferably the coding region thereof, or a homolog or fragment thereof, e.g. derived from Saccharomyces cerevisiae, is increased or generated. For example the activity of a nucleic acid molecule or a polypeptide comprising the nucleic acid, preferably the coding region thereof, or polypeptide or the consensus sequence or the polypeptide motif, as depicted in Table I, II or IV, application No. 2, column 5 or 8 in the respective same line as the nucleic acid molecule SEQ ID NO. 64144 or polypeptide SEQ ID NO. 64145, respectively, or a homolog or a fragment thereof, is increased or generated, or if the activity YFL019C-protein is increased or generated in a non-human organism, like a microorganism or a plant cell, plant or part thereof, especially with non-targeted localization, whereby the respective line discloses in column 7 proline. For example, an increase of the proline of at least 1 percent, particularly in a range of 32 to 235-percent is conferred as compared to a corresponding non-transformed wild type non-human organism.

[8982] Accordingly, in one embodiment, an increase of arginine in a non-human organism, as compared to a corresponding non-transformed wild type non-human organism, is conferred in the process of the invention, if the activity of a polypeptide showing the activity of a yfl054c-protein, or if the activity of the polypeptide Yfl054c, preferably represented by SEQ ID NO. 64149, or a homolog or fragment thereof, or if the activity of a polypeptide encoded by a nucleic acid molecule comprising the nucleic acid SEQ ID NO. 64148, preferably the coding region thereof, or a homolog or fragment thereof, e.g. derived from Saccharomyces cerevisiae, is increased or generated. For example the activity of a nucleic acid molecule or a polypeptide comprising the nucleic acid, preferably the coding region thereof, or polypeptide or the consensus sequence or the polypeptide motif, as depicted in Table I, II or IV, application No. 2, column 5 or 8 in the respective same line as the nucleic acid molecule SEQ ID NO. 64148 or polypeptide SEQ ID NO. 64149, respectively, or a homolog or a fragment thereof, is increased or generated, or if the activity yf1054c-protein is increased or generated in a non-human organism, like a microorganism or a plant cell, plant or part thereof, especially with plastidic localization, whereby the respective line discloses in column 7 arginine. For example, an increase of the arginine of at least 1 percent, particularly in a range of 87 to 268-percent is conferred as compared to a corresponding non-transformed wild type non-human organism.

[8983] Accordingly, in one embodiment, an increase of glutamine in a non-human organism, as compared to a corresponding non-transformed wild type non-human organism, is conferred in the process of the invention, if the activity of a polypeptide showing the activity of a yfl054c-protein, or if the activity of the polypeptide Yfl054c, preferably represented by SEQ ID NO. 64149, or a homolog or fragment thereof, or if the activity of a polypeptide encoded by a nucleic acid molecule comprising the nucleic acid SEQ ID NO. 64148, preferably the coding region thereof, or a homolog or fragment thereof, e.g. derived from Saccharomyces cerevisiae, is increased or generated. For example the activity of a nucleic acid molecule or a polypeptide comprising the nucleic acid, preferably the coding region thereof, or polypeptide or the consensus sequence or the polypeptide motif, as depicted in Table I, II or IV, application No. 2, column 5 or 8 in the respective same line as the nucleic acid molecule SEQ ID NO. 64148 or polypeptide SEQ ID NO. 64149, respectively, or a homolog or a fragment thereof, is increased or generated, or if the activity yfl054c-protein is increased or generated in a non-human organism, like a microorganism or a plant cell, plant or part thereof, especially with plastidic localization, whereby the respective line discloses in column 7 glutamine. For example, an increase of the glutamine of at least 1 percent, particularly in a range of 30 to 75-percent is conferred as compared to a corresponding non-transformed wild type non-human organism.

[8984] Accordingly, in one embodiment, an increase of arginine in a non-human organism, as compared to a corresponding non-transformed wild type non-human organism, is conferred in the process of the invention, if the activity of a polypeptide showing the activity of a pre-mRNA-splicing factor, or if the activity of the polypeptide Ygl174w, preferably represented by SEQ ID NO. 64158, or a homolog or fragment thereof, or if the activity of a polypeptide encoded by a nucleic acid molecule comprising the nucleic acid SEQ ID NO. 64157, preferably the coding region thereof, or a homolog or fragment thereof, e.g. derived from Saccharomyces cerevisiae, is increased or generated. For example the activity of a nucleic acid molecule or a polypeptide comprising the nucleic acid, preferably the coding region thereof, or polypeptide or the consensus sequence or the polypeptide motif, as depicted in Table I, II or IV, application No. 2, column 5 or 8 in the respective same line as the nucleic acid molecule SEQ ID NO. 64157 or polypeptide SEQ ID NO. 64158, respectively, or a homolog or a fragment thereof, is increased or generated, or if the activity pre-mRNA-splicing factor is increased or generated in a non-human organism, like a microorganism or a plant cell, plant or part thereof, especially with plastidic localization, whereby the respective line discloses in column 7 arginine. For example, an increase of the arginine of at least 1 percent, particularly in a range of 85 to 199-percent is conferred as compared to a corresponding non-transformed wild type non-human organism.

[8985] Accordingly, in one embodiment, an increase of proline in a non-human organism, as compared to a corresponding non-transformed wild type non-human organism, is conferred in the process of the invention, if the activity of a polypeptide showing the activity of a yg1237c-protein, or if the activity of the polypeptide Yg1237c, preferably represented by SEQ ID NO. 64178, or a homolog or fragment thereof, or if the activity of a polypeptide encoded by a nucleic acid molecule comprising the nucleic acid SEQ ID NO. 64177, preferably the coding region thereof, or a homolog or fragment thereof, e.g. derived from Saccharomyces cerevisiae, is increased or generated. For example the activity of a nucleic acid molecule or a polypeptide comprising the nucleic acid, preferably the coding region thereof, or polypeptide or the consensus sequence or the polypeptide motif, as depicted in Table I, II or IV, application No. 2, column 5 or 8 in the respective same line as the nucleic acid molecule SEQ ID NO. 64177 or polypeptide SEQ ID NO. 64178, respectively, or a homolog or a fragment thereof, is increased or generated, or if the activity ygl237c-protein is increased or generated in a non-human organism, like a microorganism or a plant cell, plant or part thereof, especially with non-targeted localization, whereby the respective line discloses in column 7 proline. For example, an increase of the proline of at least 1 percent, particularly in a range of 42 to 388-percent is conferred as compared to a corresponding non-transformed wild type non-human organism.

[8986] Accordingly, in one embodiment, an increase of glutamine in a non-human organism, as compared to a corresponding non-transformed wild type non-human organism, is conferred in the process of the invention, if the activity of a polypeptide showing the activity of a ygr068c-protein, or if the activity of the polypeptide Ygr068c, preferably represented by SEQ ID NO. 64199, or a homolog or fragment thereof, or if the activity of a polypeptide encoded by a nucleic acid molecule comprising the nucleic acid SEQ ID NO. 64198, preferably the coding region thereof, or a homolog or fragment thereof, e.g. derived from Saccharomyces cerevisiae, is increased or generated. For example the activity of a nucleic acid molecule or a polypeptide comprising the nucleic acid, preferably the coding region thereof, or polypeptide or the consensus sequence or the polypeptide motif, as depicted in Table I, II or IV, application No. 2, column 5 or 8 in the respective same line as the nucleic acid molecule SEQ ID NO. 64198 or polypeptide SEQ ID NO. 64199, respectively, or a homolog or a fragment thereof, is increased or generated, or if the activity ygr068c-protein is increased or generated in a non-human organism, like a microorganism or a plant cell, plant or part thereof, especially with plastidic localization, whereby the respective line discloses in column 7 glutamine. For example, an increase of the glutamine of at least 1 percent, particularly in a range of 60 to 428-percent is conferred as compared to a corresponding non-transformed wild type non-human organism.

[8987] Accordingly, in one embodiment, an increase of proline in a non-human organism, as compared to a corresponding non-transformed wild type non-human organism, is conferred in the process of the invention, if the activity of a polypeptide showing the activity of a squalene monooxygenase, or if the activity of the polypeptide Ygr175c, preferably represented by SEQ ID NO. 64219, or a homolog or fragment thereof, or if the activity of a polypeptide encoded by a nucleic acid molecule comprising the nucleic acid SEQ ID NO. 64218, preferably the coding region thereof, or a homolog or fragment thereof, e.g. derived from Saccharomyces cerevisiae, is increased or generated. For example the activity of a nucleic acid molecule or a polypeptide comprising the nucleic acid, preferably the coding region thereof, or polypeptide or the consensus sequence or the polypeptide motif, as depicted in Table I, II or IV, application No. 2, column 5 or 8 in the respective same line as the nucleic acid molecule SEQ ID NO. 64218 or polypeptide SEQ ID NO. 64219, respectively, or a homolog or a fragment thereof, is increased or generated, or if the activity squalene monooxygenase is increased or generated in a non-human organism, like a microorganism or a plant cell, plant or part thereof, especially with plastidic localization, whereby the respective line discloses in column 7 proline. For example, an increase of the proline of at least 1 percent, particularly in a range of 43 to 69-percent is conferred as compared to a corresponding non-transformed wild type non-human organism.

[8988] Accordingly, in one embodiment, an increase of glutamate in a non-human organism, as compared to a corresponding non-transformed wild type non-human organism, is conferred in the process of the invention, if the activity of a polypeptide showing the activity of a ygr221c-protein, or if the activity of the polypeptide Ygr221c, preferably represented by SEQ ID NO. 64316, or a homolog or fragment thereof, or if the activity of a polypeptide encoded by a nucleic acid molecule comprising the nucleic acid SEQ ID NO. 64315, preferably the coding region thereof, or a homolog or fragment thereof, e.g. derived from Saccharomyces cerevisiae, is increased or generated. For example the activity of a nucleic acid molecule or a polypeptide comprising the nucleic acid, preferably the coding region thereof, or polypeptide or the consensus sequence or the polypeptide motif, as depicted in Table I, II or IV, application No. 2, column 5 or 8 in the respective same line as the nucleic acid molecule SEQ ID NO. 64315 or polypeptide SEQ ID NO. 64316, respectively, or a homolog or a fragment thereof, is increased or generated, or if the activity ygr221c-protein is increased or generated in a non-human organism, like a microorganism or a plant cell, plant or part thereof, especially with plastidic localization, whereby the respective line discloses in column 7 glutamate. For example, an increase of the glutamate of at least 1 percent, particularly in a range of 33 to 65-percent is conferred as compared to a corresponding non-transformed wild type non-human organism.

[8989] Accordingly, in one embodiment, an increase of glutamine in a non-human organism, as compared to a corresponding non-transformed wild type non-human organism, is conferred in the process of the invention, if the activity of a polypeptide showing the activity of a ygr221c-protein, or if the activity of the polypeptide Ygr221c, preferably represented by SEQ ID NO. 64316, or a homolog or fragment thereof, or if the activity of a polypeptide encoded by a nucleic acid molecule comprising the nucleic acid SEQ ID NO. 64315, preferably the coding region thereof, or a homolog or fragment thereof, e.g. derived from Saccharomyces cerevisiae, is increased or generated. For example the activity of a nucleic acid molecule or a polypeptide comprising the nucleic acid, preferably the coding region thereof, or polypeptide or the consensus sequence or the polypeptide motif, as depicted in Table I, II or IV, application No. 2, column 5 or 8 in the respective same line as the nucleic acid molecule SEQ ID NO. 64315 or polypeptide SEQ ID NO. 64316, respectively, or a homolog or a fragment thereof, is increased or generated, or if the activity ygr221c-protein is increased or generated in a non-human organism, like a microorganism or a plant cell, plant or part thereof, especially with plastidic localization, whereby the respective line discloses in column 7 glutamine. For example, an increase of the glutamine of at least 1 percent, particularly in a range of 24 to 30-percent is conferred as compared to a corresponding non-transformed wild type non-human organism.

[8990] Accordingly, in one embodiment, an increase of proline in a non-human organism, as compared to a corresponding non-transformed wild type non-human organism, is conferred in the process of the invention, if the activity of a polypeptide showing the activity of a yhl013c-protein, or if the activity of the polypeptide Yhl013c, preferably represented by SEQ ID NO. 14716, or a homolog or fragment thereof, or if the activity of a polypeptide encoded by a nucleic acid molecule comprising the nucleic acid SEQ ID NO. 14715, preferably the coding region thereof, or a homolog or fragment thereof, e.g. derived from Saccharomyces cerevisiae, is increased or generated. For example the activity of a nucleic acid molecule or a polypeptide comprising the nucleic acid, preferably the coding region thereof, or polypeptide or the consensus sequence or the polypeptide motif, as depicted in Table I, II or IV, application No. 2, column 5 or 8 in the respective same line as the nucleic acid molecule SEQ ID NO. 14715 or polypeptide SEQ ID NO. 14716, respectively, or a homolog or a fragment thereof, is increased or generated, or if the activity yhl013c-protein is increased or generated in a non-human organism, like a microorganism or a plant cell, plant or part thereof, especially with plastidic localization, whereby the respective line discloses in column 7 proline. For example, an increase of the proline of at least 1 percent, particularly in a range of 33 to 402-percent is conferred as compared to a corresponding non-transformed wild type non-human organism.

[8991] Accordingly, in one embodiment, an increase of arginine in a non-human organism, as compared to a corresponding non-transformed wild type non-human organism, is conferred in the process of the invention, if the activity of a polypeptide showing the activity of a mitochondrial processing protease, or if the activity of the polypeptide Yhr024c, preferably represented by SEQ ID NO. 64337, or a homolog or fragment thereof, or if the activity of a polypeptide encoded by a nucleic acid molecule comprising the nucleic acid SEQ ID NO. 64336, preferably the coding region thereof, or a homolog or fragment thereof, e.g. derived from Saccharomyces cerevisiae, is increased or generated. For example the activity of a nucleic acid molecule or a polypeptide comprising the nucleic acid, preferably the coding region thereof, or polypeptide or the consensus sequence or the polypeptide motif, as depicted in Table I, II or IV, application No. 2, column 5 or 8 in the respective same line as the nucleic acid molecule SEQ ID NO. 64336 or polypeptide SEQ ID NO. 64337, respectively, or a homolog or a fragment thereof, is increased or generated, or if the activity mitochondrial processing protease is increased or generated in a non-human organism, like a microorganism or a plant cell, plant or part thereof, especially with plastidic localization, whereby the respective line discloses in column 7 arginine. For example, an increase of the arginine of at least 1 percent, particularly in a range of 72 to 166-percent is conferred as compared to a corresponding non-transformed wild type non-human organism.

[8992] Accordingly, in one embodiment, an increase of proline in a non-human organism, as compared to a corresponding non-transformed wild type non-human organism, is conferred in the process of the invention, if the activity of a polypeptide showing the activity of a H/ACA ribonucleoprotein complex subunit 3, or if the activity of the polypeptide Yhr072w-a, preferably represented by SEQ ID NO. 64471, or a homolog or fragment thereof, or if the activity of a polypeptide encoded by a nucleic acid molecule comprising the nucleic acid SEQ ID NO. 64470, preferably the coding region thereof, or a homolog or fragment thereof, e.g. derived from Saccharomyces cerevisiae, is increased or generated. For example the activity of a nucleic acid molecule or a polypeptide comprising the nucleic acid, preferably the coding region thereof, or polypeptide or the consensus sequence or the polypeptide motif, as depicted in Table I, II or IV, application No. 2, column 5 or 8 in the respective same line as the nucleic acid molecule SEQ ID NO. 64470 or polypeptide SEQ ID NO. 64471, respectively, or a homolog or a fragment thereof, is increased or generated, or if the activity H/ACA ribonucleoprotein complex subunit 3 is increased or generated in a non-human organism, like a microorganism or a plant cell, plant or part thereof, especially with non-targeted localization, whereby the respective line discloses in column 7 proline. For example, an increase of the proline of at least 1 percent, particularly in a range of 53 to 260-percent is conferred as compared to a corresponding non-transformed wild type non-human organism.

[8993] Accordingly, in one embodiment, an increase of glutamate in a non-human organism, as compared to a corresponding non-transformed wild type non-human organism, is conferred in the process of the invention, if the activity of a polypeptide showing the activity of a yhr207c-protein, or if the activity of the polypeptide Yhr207c, preferably represented by SEQ ID NO. 64547, or a homolog or fragment thereof, or if the activity of a polypeptide encoded by a nucleic acid molecule comprising the nucleic acid SEQ ID NO. 64546, preferably the coding region thereof, or a homolog or fragment thereof, e.g. derived from Saccharomyces cerevisiae, is increased or generated. For example the activity of a nucleic acid molecule or a polypeptide comprising the nucleic acid, preferably the coding region thereof, or polypeptide or the consensus sequence or the polypeptide motif, as depicted in Table I, II or IV, application No. 2, column 5 or 8 in the respective same line as the nucleic acid molecule SEQ ID NO. 64546 or polypeptide SEQ ID NO. 64547, respectively, or a homolog or a fragment thereof, is increased or generated, or if the activity yhr207c-protein is increased or generated in a non-human organism, like a microorganism or a plant cell, plant or part thereof, especially with plastidic localization, whereby the respective line discloses in column 7 glutamate. For example, an increase of the glutamate of at least 1 percent, particularly in a range of 33 to 47-percent is conferred as compared to a corresponding non-transformed wild type non-human organism.

[8994] Accordingly, in one embodiment, an increase of arginine in a non-human organism, as compared to a corresponding non-transformed wild type non-human organism, is conferred in the process of the invention, if the activity of a polypeptide showing the activity of a 3-phosphoglycerate dehydrogenase, or if the activity of the polypeptide Yil074c, preferably represented by SEQ ID NO. 64564, or a homolog or fragment thereof, or if the activity of a polypeptide encoded by a nucleic acid molecule comprising the nucleic acid SEQ ID NO. 64563, preferably the coding region thereof, or a homolog or fragment thereof, e.g. derived from Saccharomyces cerevisiae, is increased or generated. For example the activity of a nucleic acid molecule or a polypeptide comprising the nucleic acid, preferably the coding region thereof, or polypeptide or the consensus sequence or the polypeptide motif, as depicted in Table I, II or IV, application No. 2, column 5 or 8 in the respective same line as the nucleic acid molecule SEQ ID NO. 64563 or polypeptide SEQ ID NO. 64564, respectively, or a homolog or a fragment thereof, is increased or generated, or if the activity 3-phosphoglycerate dehydrogenase is increased or generated in a non-human organism, like a microorganism or a plant cell, plant or part thereof, especially with plastidic localization, whereby the respective line discloses in column 7 arginine. For example, an increase of the arginine of at least 1 percent, particularly in a range of 47 to 129-percent is conferred as compared to a corresponding non-transformed wild type non-human organism.

[8995] Accordingly, in one embodiment, an increase of proline in a non-human organism, as compared to a corresponding non-transformed wild type non-human organism, is conferred in the process of the invention, if the activity of a polypeptide showing the activity of a allantoinase, or if the activity of the polypeptide Yir027c, preferably represented by SEQ ID NO. 64774, or a homolog or fragment thereof, or if the activity of a polypeptide encoded by a nucleic acid molecule comprising the nucleic acid SEQ ID NO. 64773, preferably the coding region thereof, or a homolog or fragment thereof, e.g. derived from Saccharomyces cerevisiae, is increased or generated. For example the activity of a nucleic acid molecule or a polypeptide comprising the nucleic acid, preferably the coding region thereof, or polypeptide or the consensus sequence or the polypeptide motif, as depicted in Table I, II or IV, application No. 2, column 5 or 8 in the respective same line as the nucleic acid molecule SEQ ID NO. 64773 or polypeptide SEQ ID NO. 64774, respectively, or a homolog or a fragment thereof, is increased or generated, or if the activity allantoinase is increased or generated in a non-human organism, like a microorganism or a plant cell, plant or part thereof, especially with plastidic localization, whereby the respective line discloses in column 7 proline. For example, an increase of the proline of at least 1 percent, particularly in a range of 39 to 46-percent is conferred as compared to a corresponding non-transformed wild type non-human organism.

[8996] Accordingly, in one embodiment, an increase of arginine in a non-human organism, as compared to a corresponding non-transformed wild type non-human organism, is conferred in the process of the invention, if the activity of a polypeptide showing the activity of a allantoicase, or if the activity of the polypeptide Yir029w, preferably represented by SEQ ID NO. 64895, or a homolog or fragment thereof, or if the activity of a polypeptide encoded by a nucleic acid molecule comprising the nucleic acid SEQ ID NO. 64894, preferably the coding region thereof, or a homolog or fragment thereof, e.g. derived from Saccharomyces cerevisiae, is increased or generated. For example the activity of a nucleic acid molecule or a polypeptide comprising the nucleic acid, preferably the coding region thereof, or polypeptide or the consensus sequence or the polypeptide motif, as depicted in Table I, II or IV, application No. 2, column 5 or 8 in the respective same line as the nucleic acid molecule SEQ ID NO. 64894 or polypeptide SEQ ID NO. 64895, respectively, or a homolog or a fragment thereof, is increased or generated, or if the activity allantoicase is increased or generated in a non-human organism, like a microorganism or a plant cell, plant or part thereof, especially with plastidic localization, whereby the respective line discloses in column 7 arginine. For example, an increase of the arginine of at least 1 percent, particularly in a range of 52 to 316-percent is conferred as compared to a corresponding non-transformed wild type non-human organism.

[8997] Accordingly, in one embodiment, an increase of glutamine in a non-human organism, as compared to a corresponding non-transformed wild type non-human organism, is conferred in the process of the invention, if the activity of a polypeptide showing the activity of a DnaJ-like chaperone, or if the activity of the polypeptide Yj1073w, preferably represented by SEQ ID NO. 64965, or a homolog or fragment thereof, or if the activity of a polypeptide encoded by a nucleic acid molecule comprising the nucleic acid SEQ ID NO. 64964, preferably the coding region thereof, or a homolog or fragment thereof, e.g. derived from Saccharomyces cerevisiae, is increased or generated. For example the activity of a nucleic acid molecule or a polypeptide comprising the nucleic acid, preferably the coding region thereof, or polypeptide or the consensus sequence or the polypeptide motif, as depicted in Table I, II or IV, application No. 2, column 5 or 8 in the respective same line as the nucleic acid molecule SEQ ID NO. 64964 or polypeptide SEQ ID NO. 64965, respectively, or a homolog or a fragment thereof, is increased or generated, or if the activity DnaJ-like chaperone is increased or generated in a non-human organism, like a microorganism or a plant cell, plant or part thereof, especially with plastidic localization, whereby the respective line discloses in column 7 glutamine. For example, an increase of the glutamine of at least 1 percent, particularly in a range of 28 to 29-percent is conferred as compared to a corresponding non-transformed wild type non-human organism.

[8998] Accordingly, in one embodiment, an increase of arginine in a non-human organism, as compared to a corresponding non-transformed wild type non-human organism, is conferred in the process of the invention, if the activity of a polypeptide showing the activity of a ornithine carbamoyltransferase, or if the activity of the polypeptide Yjl088w, preferably represented by SEQ ID NO. 64976, or a homolog or fragment thereof, or if the activity of a polypeptide encoded by a nucleic acid molecule comprising the nucleic acid SEQ ID NO. 64975, preferably the coding region thereof, or a homolog or fragment thereof, e.g. derived from Saccharomyces cerevisiae, is increased or generated. For example the activity of a nucleic acid molecule or a polypeptide comprising the nucleic acid, preferably the coding region thereof, or polypeptide or the consensus sequence or the polypeptide motif, as depicted in Table I, II or IV, application No. 2, column 5 or 8 in the respective same line as the nucleic acid molecule SEQ ID NO. 64975 or polypeptide SEQ ID NO. 64976, respectively, or a homolog or a fragment thereof, is increased or generated, or if the activity ornithine carbamoyltransferase is increased or generated in a non-human organism, like a microorganism or a plant cell, plant or part thereof, especially with non-targeted localization, whereby the respective line discloses in column 7 arginine. For example, an increase of the arginine of at least 1 percent, particularly in a range of 52 to 124-percent is conferred as compared to a corresponding non-transformed wild type non-human organism.

[8999] Accordingly, in one embodiment, an increase of proline in a non-human organism, as compared to a corresponding non-transformed wild type non-human organism, is conferred in the process of the invention, if the activity of a polypeptide showing the activity of a potassium transport protein, or if the activity of the polypeptide Yjl129c, preferably represented by SEQ ID NO. 65182, or a homolog or fragment thereof, or if the activity of a polypeptide encoded by a nucleic acid molecule comprising the nucleic acid SEQ ID NO. 65181, preferably the coding region thereof, or a homolog or fragment thereof, e.g. derived from Saccharomyces cerevisiae, is increased or generated. For example the activity of a nucleic acid molecule or a polypeptide comprising the nucleic acid, preferably the coding region thereof, or polypeptide or the consensus sequence or the polypeptide motif, as depicted in Table I, II or IV, application No. 2, column 5 or 8 in the respective same line as the nucleic acid molecule SEQ ID NO. 65181 or polypeptide SEQ ID NO. 65182, respectively, or a homolog or a fragment thereof, is increased or generated, or if the activity potassium transport protein is increased or generated in a non-human organism, like a microorganism or a plant cell, plant or part thereof, especially with plastidic localization, whereby the respective line discloses in column 7 proline. For example, an increase of the proline of at least 1 percent, particularly in a range of 37 to 89-percent is conferred as compared to a corresponding non-transformed wild type non-human organism.

[9000] Accordingly, in one embodiment, an increase of arginine in a non-human organism, as compared to a corresponding non-transformed wild type non-human organism, is conferred in the process of the invention, if the activity of a polypeptide showing the activity of a glycogenin, or if the activity of the polypeptide Yjl137c, preferably represented by SEQ ID NO. 14822, or a homolog or fragment thereof, or if the activity of a polypeptide encoded by a nucleic acid molecule comprising the nucleic acid SEQ ID NO. 14821, preferably the coding region thereof, or a homolog or fragment thereof, e.g. derived from Saccharomyces cerevisiae, is increased or generated. For example the activity of a nucleic acid molecule or a polypeptide comprising the nucleic acid, preferably the coding region thereof, or polypeptide or the consensus sequence or the polypeptide motif, as depicted in Table I, II or IV, application No. 2, column 5 or 8 in the respective same line as the nucleic acid molecule SEQ ID NO. 14821 or polypeptide SEQ ID NO. 14822, respectively, or a homolog or a fragment thereof, is increased or generated, or if the activity glycogenin is increased or generated in a non-human organism, like a microorganism or a plant cell, plant or part thereof, especially with plastidic localization, whereby the respective line discloses in column 7 arginine. For example, an increase of the arginine of at least 1 percent, particularly in a range of 47 to 152-percent is conferred as compared to a corresponding non-transformed wild type non-human organism.

[9001] Accordingly, in one embodiment, an increase of proline in a non-human organism, as compared to a corresponding non-transformed wild type non-human organism, is conferred in the process of the invention, if the activity of a polypeptide showing the activity of a ATP-dependent RNA helicase, or if the activity of the polypeptide Yjl138c, preferably represented by SEQ ID NO. 65225, or a homolog or fragment thereof, or if the activity of a polypeptide encoded by a nucleic acid molecule comprising the nucleic acid SEQ ID NO. 65224, preferably the coding region thereof, or a homolog or fragment thereof, e.g. derived from Saccharomyces cerevisiae, is increased or generated. For example the activity of a nucleic acid molecule or a polypeptide comprising the nucleic acid, preferably the coding region thereof, or polypeptide or the consensus sequence or the polypeptide motif, as depicted in Table I, II or IV, application No. 2, column 5 or 8 in the respective same line as the nucleic acid molecule SEQ ID NO. 65224 or polypeptide SEQ ID NO. 65225, respectively, or a homolog or a fragment thereof, is increased or generated, or if the activity ATP-dependent RNA helicase is increased or generated in a non-human organism, like a microorganism or a plant cell, plant or part thereof, especially with non-targeted localization, whereby the respective line discloses in column 7 proline. For example, an increase of the proline of at least 1 percent, particularly in a range of 112 to 770-percent is conferred as compared to a corresponding non-transformed wild type non-human organism.

[9002] Accordingly, in one embodiment, an increase of glutamine in a non-human organism, as compared to a corresponding non-transformed wild type non-human organism, is conferred in the process of the invention, if the activity of a polypeptide showing the activity of a phosphoribosyltransferase, or if the activity of the polypeptide Yjr133w, preferably represented by SEQ ID NO. 66226, or a homolog or fragment thereof, or if the activity of a polypeptide encoded by a nucleic acid molecule comprising the nucleic acid SEQ ID NO. 66225, preferably the coding region thereof, or a homolog or fragment thereof, e.g. derived from Saccharomyces cerevisiae, is increased or generated. For example the activity of a nucleic acid molecule or a polypeptide comprising the nucleic acid, preferably the coding region thereof, or polypeptide or the consensus sequence or the polypeptide motif, as depicted in Table I, II or IV, application No. 2, column 5 or 8 in the respective same line as the nucleic acid molecule SEQ ID NO. 66225 or polypeptide SEQ ID NO. 66226, respectively, or a homolog or a fragment thereof, is increased or generated, or if the activity phosphoribosyltransferase is increased or generated in a non-human organism, like a microorganism or a plant cell, plant or part thereof, especially with plastidic localization, whereby the respective line discloses in column 7 glutamine. For example, an increase of the glutamine of at least 1 percent, particularly in a range of 29 to 46-percent is conferred as compared to a corresponding non-transformed wild type non-human organism.

[9003] Accordingly, in one embodiment, an increase of glutamate in a non-human organism, as compared to a corresponding non-transformed wild type non-human organism, is conferred in the process of the invention, if the activity of a polypeptide showing the activity of a polygalacturonase, or if the activity of the polypeptide Yjr153w, preferably represented by SEQ ID NO. 66275, or a homolog or fragment thereof, or if the activity of a polypeptide encoded by a nucleic acid molecule comprising the nucleic acid SEQ ID NO. 66274, preferably the coding region thereof, or a homolog or fragment thereof, e.g. derived from Saccharomyces cerevisiae, is increased or generated. For example the activity of a nucleic acid molecule or a polypeptide comprising the nucleic acid, preferably the coding region thereof, or polypeptide or the consensus sequence or the polypeptide motif, as depicted in Table I, II or IV, application No. 2, column 5 or 8 in the respective same line as the nucleic acid molecule SEQ ID NO. 66274 or polypeptide SEQ ID NO. 66275, respectively, or a homolog or a fragment thereof, is increased or generated, or if the activity polygalacturonase is increased or generated in a non-human organism, like a microorganism or a plant cell, plant or part thereof, especially with non-targeted localization, whereby the respective line discloses in column 7 glutamate. For example, an increase of the glutamate of at least 1 percent, particularly in a range of 36 to 124-percent is conferred as compared to a corresponding non-transformed wild type non-human organism.

[9004] Accordingly, in one embodiment, an increase of proline in a non-human organism, as compared to a corresponding non-transformed wild type non-human organism, is conferred in the process of the invention, if the activity of a polypeptide showing the activity of a aspartate aminotransferase, or if the activity of the polypeptide Ykl106w, preferably represented by SEQ ID NO. 66420, or a homolog or fragment thereof, or if the activity of a polypeptide encoded by a nucleic acid molecule comprising the nucleic acid SEQ ID NO. 66419, preferably the coding region thereof, or a homolog or fragment thereof, e.g. derived from Saccharomyces cerevisiae, is increased or generated. For example the activity of a nucleic acid molecule or a polypeptide comprising the nucleic acid, preferably the coding region thereof, or polypeptide or the consensus sequence or the polypeptide motif, as depicted in Table I, II or IV, application No. 2, column 5 or 8 in the respective same line as the nucleic acid molecule SEQ ID NO. 66419 or polypeptide SEQ ID NO. 66420, respectively, or a homolog or a fragment thereof, is increased or generated, or if the activity aspartate aminotransferase is increased or generated in a non-human organism, like a microorganism or a plant cell, plant or part thereof, especially with non-targeted localization, whereby the respective line discloses in column 7 proline. For example, an increase of the proline of at least 1 percent, particularly in a range of 42 to 54-percent is conferred as compared to a corresponding non-transformed wild type non-human organism.

[9005] Accordingly, in one embodiment, an increase of glutamate in a non-human organism, as compared to a corresponding non-transformed wild type non-human organism, is conferred in the process of the invention, if the activity of a polypeptide showing the activity of a ylr065c-protein, or if the activity of the polypeptide Ylr065c, preferably represented by SEQ ID NO. 66696, or a homolog or fragment thereof, or if the activity of a polypeptide encoded by a nucleic acid molecule comprising the nucleic acid SEQ ID NO. 66695, preferably the coding region thereof, or a homolog or fragment thereof, e.g. derived from Saccharomyces cerevisiae, is increased or generated. For example the activity of a nucleic acid molecule or a polypeptide comprising the nucleic acid, preferably the coding region thereof, or polypeptide or the consensus sequence or the polypeptide motif, as depicted in Table I, II or IV, application No. 2, column 5 or 8 in the respective same line as the nucleic acid molecule SEQ ID NO. 66695 or polypeptide SEQ ID NO. 66696, respectively, or a homolog or a fragment thereof, is increased or generated, or if the activity ylr065c-protein is increased or generated in a non-human organism, like a microorganism or a plant cell, plant or part thereof, especially with plastidic localization, whereby the respective line discloses in column 7 glutamate. For example, an increase of the glutamate of at least 1 percent, particularly in a range of 39 to 62-percent is conferred as compared to a corresponding non-transformed wild type non-human organism.

[9006] Accordingly, in one embodiment, an increase of glutamine in a non-human organism, as compared to a corresponding non-transformed wild type non-human organism, is conferred in the process of the invention, if the activity of a polypeptide showing the activity of a ylr178c-protein, or if the activity of the polypeptide Ylr178c, preferably represented by SEQ ID NO. 66716, or a homolog or fragment thereof, or if the activity of a polypeptide encoded by a nucleic acid molecule comprising the nucleic acid SEQ ID NO. 66715, preferably the coding region thereof, or a homolog or fragment thereof, e.g. derived from Saccharomyces cerevisiae, is increased or generated. For example the activity of a nucleic acid molecule or a polypeptide comprising the nucleic acid, preferably the coding region thereof, or polypeptide or the consensus sequence or the polypeptide motif, as depicted in Table I, II or IV, application No. 2, column 5 or 8 in the respective same line as the nucleic acid molecule SEQ ID NO. 66715 or polypeptide SEQ ID NO. 66716, respectively, or a homolog or a fragment thereof, is increased or generated, or if the activity ylr178c-protein is increased or generated in a non-human organism, like a microorganism or a plant cell, plant or part thereof, especially with plastidic localization, whereby the respective line discloses in column 7 glutamine. For example, an increase of the glutamine of at least 1 percent, particularly in a range of 29 to 59-percent is conferred as compared to a corresponding non-transformed wild type non-human organism.

[9007] Accordingly, in one embodiment, an increase of proline in a non-human organism, as compared to a corresponding non-transformed wild type non-human organism, is conferred in the process of the invention, if the activity of a polypeptide showing the activity of a aconitate hydratase, or if the activity of the polypeptide Ylr304c, preferably represented by SEQ ID NO. 66773, or a homolog or fragment thereof, or if the activity of a polypeptide encoded by a nucleic acid molecule comprising the nucleic acid SEQ ID NO. 66772, preferably the coding region thereof, or a homolog or fragment thereof, e.g. derived from Saccharomyces cerevisiae, is increased or generated. For example the activity of a nucleic acid molecule or a polypeptide comprising the nucleic acid, preferably the coding region thereof, or polypeptide or the consensus sequence or the polypeptide motif, as depicted in Table I, II or IV, application No. 2, column 5 or 8 in the respective same line as the nucleic acid molecule SEQ ID NO. 66772 or polypeptide SEQ ID NO. 66773, respectively, or a homolog or a fragment thereof, is increased or generated, or if the activity aconitate hydratase is increased or generated in a non-human organism, like a microorganism or a plant cell, plant or part thereof, especially with non-targeted localization, whereby the respective line discloses in column 7 proline. For example, an increase of the proline of at least 1 percent, particularly in a range of 42 to 53-percent is conferred as compared to a corresponding non-transformed wild type non-human organism.

[9008] Accordingly, in one embodiment, an increase of proline in a non-human organism, as compared to a corresponding non-transformed wild type non-human organism, is conferred in the process of the invention, if the activity of a polypeptide showing the activity of a adenylosuccinate lyase, or if the activity of the polypeptide Ylr359w, preferably represented by SEQ ID NO. 67191, or a homolog or fragment thereof, or if the activity of a polypeptide encoded by a nucleic acid molecule comprising the nucleic acid SEQ ID NO. 67190, preferably the coding region thereof, or a homolog or fragment thereof, e.g. derived from Saccharomyces cerevisiae, is increased or generated. For example the activity of a nucleic acid molecule or a polypeptide comprising the nucleic acid, preferably the coding region thereof, or polypeptide or the consensus sequence or the polypeptide motif, as depicted in Table I, II or IV, application No. 2, column 5 or 8 in the respective same line as the nucleic acid molecule SEQ ID NO. 67190 or polypeptide SEQ ID NO. 67191, respectively, or a homolog or a fragment thereof, is increased or generated, or if the activity adenylosuccinate lyase is increased or generated in a non-human organism, like a microorganism or a plant cell, plant or part thereof, especially with plastidic localization, whereby the respective line discloses in column 7 proline. For example, an increase of the proline of at least 1 percent, particularly in a range of 72 to 309-percent is conferred as compared to a corresponding non-transformed wild type non-human organism.

[9009] Accordingly, in one embodiment, an increase of glutamine in a non-human organism, as compared to a corresponding non-transformed wild type non-human organism, is conferred in the process of the invention, if the activity of a polypeptide showing the activity of a ynl142w-protein, or if the activity of the polypeptide Ynl142w, preferably represented by SEQ ID NO. 67300, or a homolog or fragment thereof, or if the activity of a polypeptide encoded by a nucleic acid molecule comprising the nucleic acid SEQ ID NO. 67299, preferably the coding region thereof, or a homolog or fragment thereof, e.g. derived from Saccharomyces cerevisiae, is increased or generated. For example the activity of a nucleic acid molecule or a polypeptide comprising the nucleic acid, preferably the coding region thereof, or polypeptide or the consensus sequence or the polypeptide motif, as depicted in Table I, II or IV, application No. 2, column 5 or 8 in the respective same line as the nucleic acid molecule SEQ ID NO. 67299 or polypeptide SEQ ID NO. 67300, respectively, or a homolog or a fragment thereof, is increased or generated, or if the activity ynl142w-protein is increased or generated in a non-human organism, like a microorganism or a plant cell, plant or part thereof, especially with non-targeted localization, whereby the respective line discloses in column 7 glutamine. For example, an increase of the glutamine of at least 1 percent, particularly in a range of 98 to 182-percent is conferred as compared to a corresponding non-transformed wild type non-human organism.

[9010] Accordingly, in one embodiment, an increase of proline in a non-human organism, as compared to a corresponding non-transformed wild type non-human organism, is conferred in the process of the invention, if the activity of a polypeptide showing the activity of a sterol O-acyltransferase, or if the activity of the polypeptide Ynr019w, preferably represented by SEQ ID NO. 67647, or a homolog or fragment thereof, or if the activity of a polypeptide encoded by a nucleic acid molecule comprising the nucleic acid SEQ ID NO. 67646, preferably the coding region thereof, or a homolog or fragment thereof, e.g. derived from Saccharomyces cerevisiae, is increased or generated. For example the activity of a nucleic acid molecule or a polypeptide comprising the nucleic acid, preferably the coding region thereof, or polypeptide or the consensus sequence or the polypeptide motif, as depicted in Table I, II or IV, application No. 2, column 5 or 8 in the respective same line as the nucleic acid molecule SEQ ID NO. 67646 or polypeptide SEQ ID NO. 67647, respectively, or a homolog or a fragment thereof, is increased or generated, or if the activity sterol O-acyltransferase is increased or generated in a non-human organism, like a microorganism or a plant cell, plant or part thereof, especially with plastidic localization, whereby the respective line discloses in column 7 proline. For example, an increase of the proline of at least 1 percent, particularly in a range of 59 to 77-percent is conferred as compared to a corresponding non-transformed wild type non-human organism.

[9011] Accordingly, in one embodiment, an increase of arginine in a non-human organism, as compared to a corresponding non-transformed wild type non-human organism, is conferred in the process of the invention, if the activity of a polypeptide showing the activity of a protein kinase, or if the activity of the polypeptide Yol045w, preferably represented by SEQ ID NO. 67685, or a homolog or fragment thereof, or if the activity of a polypeptide encoded by a nucleic acid molecule comprising the nucleic acid SEQ ID NO. 67684, preferably the coding region thereof, or a homolog or fragment thereof, e.g. derived from Saccharomyces cerevisiae, is increased or generated. For example the activity of a nucleic acid molecule or a polypeptide comprising the nucleic acid, preferably the coding region thereof, or polypeptide or the consensus sequence or the polypeptide motif, as depicted in Table I, II or IV, application No. 2, column 5 or 8 in the respective same line as the nucleic acid molecule SEQ ID NO. 67684 or polypeptide SEQ ID NO. 67685, respectively, or a homolog or a fragment thereof, is increased or generated, or if the activity protein kinase is increased or generated in a non-human organism, like a microorganism or a plant cell, plant or part thereof, especially with plastidic localization, whereby the respective line discloses in column 7 arginine. For example, an increase of the arginine of at least 1 percent, particularly in a range of 49 to 140-percent is conferred as compared to a corresponding non-transformed wild type non-human organism.

[9012] Accordingly, in one embodiment, an increase of glutamate in a non-human organism, as compared to a corresponding non-transformed wild type non-human organism, is conferred in the process of the invention, if the activity of a polypeptide showing the activity of a glutaminyl-tRNA synthetase, or if the activity of the polypeptide Yor168w, preferably represented by SEQ ID NO. 67711, or a homolog or fragment thereof, or if the activity of a polypeptide encoded by a nucleic acid molecule comprising the nucleic acid SEQ ID NO. 67710, preferably the coding region thereof, or a homolog or fragment thereof, e.g. derived from Saccharomyces cerevisiae, is increased or generated. For example the activity of a nucleic acid molecule or a polypeptide comprising the nucleic acid, preferably the coding region thereof, or polypeptide or the consensus sequence or the polypeptide motif, as depicted in Table I, II or IV, application No. 2, column 5 or 8 in the respective same line as the nucleic acid molecule SEQ ID NO. 67710 or polypeptide SEQ ID NO. 67711, respectively, or a homolog or a fragment thereof, is increased or generated, or if the activity glutaminyl-tRNA synthetase is increased or generated in a non-human organism, like a microorganism or a plant cell, plant or part thereof, especially with non-targeted localization, whereby the respective line discloses in column 7 glutamate. For example, an increase of the glutamate of at least 1 percent, particularly in a range of 38 to 112-percent is conferred as compared to a corresponding non-transformed wild type non-human organism.

[9013] Accordingly, in one embodiment, an increase of glutamine in a non-human organism, as compared to a corresponding non-transformed wild type non-human organism, is conferred in the process of the invention, if the activity of a polypeptide showing the activity of a glutaminyl-tRNA synthetase, or if the activity of the polypeptide Yor168w, preferably represented by SEQ ID NO. 67711, or a homolog or fragment thereof, or if the activity of a polypeptide encoded by a nucleic acid molecule comprising the nucleic acid SEQ ID NO. 67710, preferably the coding region thereof, or a homolog or fragment thereof, e.g. derived from Saccharomyces cerevisiae, is increased or generated. For example the activity of a nucleic acid molecule or a polypeptide comprising the nucleic acid, preferably the coding region thereof, or polypeptide or the consensus sequence or the polypeptide motif, as depicted in Table I, II or IV, application No. 2, column 5 or 8 in the respective same line as the nucleic acid molecule SEQ ID NO. 67710 or polypeptide SEQ ID NO. 67711, respectively, or a homolog or a fragment thereof, is increased or generated, or if the activity glutaminyl-tRNA synthetase is increased or generated in a non-human organism, like a microorganism or a plant cell, plant or part thereof, especially with non-targeted localization, whereby the respective line discloses in column 7 glutamine. For example, an increase of the glutamine of at least 1 percent, particularly in a range of 28 to 112-percent is conferred as compared to a corresponding non-transformed wild type non-human organism.

[9014] Accordingly, in one embodiment, an increase of proline in a non-human organism, as compared to a corresponding non-transformed wild type non-human organism, is conferred in the process of the invention, if the activity of a polypeptide showing the activity of a yor221c-protein, or if the activity of the polypeptide Yor221c, preferably represented by SEQ ID NO. 67952, or a homolog or fragment thereof, or if the activity of a polypeptide encoded by a nucleic acid molecule comprising the nucleic acid SEQ ID NO. 67951, preferably the coding region thereof, or a homolog or fragment thereof, e.g. derived from Saccharomyces cerevisiae, is increased or generated. For example the activity of a nucleic acid molecule or a polypeptide comprising the nucleic acid, preferably the coding region thereof, or polypeptide or the consensus sequence or the polypeptide motif, as depicted in Table I, II or IV, application No. 2, column 5 or 8 in the respective same line as the nucleic acid molecule SEQ ID NO. 67951 or polypeptide SEQ ID NO. 67952, respectively, or a homolog or a fragment thereof, is increased or generated, or if the activity yor221c-protein is increased or generated in a non-human organism, like a microorganism or a plant cell, plant or part thereof, especially with non-targeted localization, whereby the respective line discloses in column 7 proline. For example, an increase of the proline of at least 1 percent, particularly in a range of 55 to 420-percent is conferred as compared to a corresponding non-transformed wild type non-human organism.

[9015] Accordingly, in one embodiment, an increase of proline in a non-human organism, as compared to a corresponding non-transformed wild type non-human organism, is conferred in the process of the invention, if the activity of a polypeptide showing the activity of a protein kinase, or if the activity of the polypeptide Yor233w, preferably represented by SEQ ID NO. 67969, or a homolog or fragment thereof, or if the activity of a polypeptide encoded by a nucleic acid molecule comprising the nucleic acid SEQ ID NO. 67968, preferably the coding region thereof, or a homolog or fragment thereof, e.g. derived from Saccharomyces cerevisiae, is increased or generated. For example the activity of a nucleic acid molecule or a polypeptide comprising the nucleic acid, preferably the coding region thereof, or polypeptide or the consensus sequence or the polypeptide motif, as depicted in Table I, II or IV, application No. 2, column 5 or 8 in the respective same line as the nucleic acid molecule SEQ ID NO. 67968 or polypeptide SEQ ID NO. 67969, respectively, or a homolog or a fragment thereof, is increased or generated, or if the activity protein kinase is increased or generated in a non-human organism, like a microorganism or a plant cell, plant or part thereof, especially with non-targeted localization, whereby the respective line discloses in column 7 proline. For example, an increase of the proline of at least 1 percent, particularly in a range of 40 to 167-percent is conferred as compared to a corresponding non-transformed wild type non-human organism.

[9016] Accordingly, in one embodiment, an increase of arginine in a non-human organism, as compared to a corresponding non-transformed wild type non-human organism, is conferred in the process of the invention, if the activity of a polypeptide showing the activity of a isopentenyl diphosphate isomerase, or if the activity of the polypeptide Ypl117c, preferably represented by SEQ ID NO. 67999, or a homolog or fragment thereof, or if the activity of a polypeptide encoded by a nucleic acid molecule comprising the nucleic acid SEQ ID NO. 67998, preferably the coding region thereof, or a homolog or fragment thereof, e.g. derived from Saccharomyces cerevisiae, is increased or generated. For example the activity of a nucleic acid molecule or a polypeptide comprising the nucleic acid, preferably the coding region thereof, or polypeptide or the consensus sequence or the polypeptide motif, as depicted in Table I, II or IV, application No. 2, column 5 or 8 in the respective same line as the nucleic acid molecule SEQ ID NO. 67998 or polypeptide SEQ ID NO. 67999, respectively, or a homolog or a fragment thereof, is increased or generated, or if the activity isopentenyl diphosphate isomerase is increased or generated in a non-human organism, like a microorganism or a plant cell, plant or part thereof, especially with plastidic localization, whereby the respective line discloses in column 7 arginine. For example, an increase of the arginine of at least 1 percent, particularly in a range of 77 to 341-percent is conferred as compared to a corresponding non-transformed wild type non-human organism.

[9017] Accordingly, in one embodiment, an increase of arginine in a non-human organism, as compared to a corresponding non-transformed wild type non-human organism, is conferred in the process of the invention, if the activity of a polypeptide showing the activity of a Zm_{—}4842_BE510522-protein, or if the activity of the polypeptide Zm_{—}4842_BE510522, preferably represented by SEQ ID NO. 68414, or a homolog or fragment thereof, or if the activity of a polypeptide encoded by a nucleic acid molecule comprising the nucleic acid SEQ ID NO. 68413, preferably the coding region thereof, or a homolog or fragment thereof, e.g. derived from Zea mays, is increased or generated. For example the activity of a nucleic acid molecule or a polypeptide comprising the nucleic acid, preferably the coding region thereof, or polypeptide or the consensus sequence or the polypeptide motif, as depicted in Table I, II or IV, application No. 2, column 5 or 8 in the respective same line as the nucleic acid molecule SEQ ID NO. 68413 or polypeptide SEQ ID NO. 68414, respectively, or a homolog or a fragment thereof, is increased or generated, or if the activity Zm_{—}4842_BE510522-protein is increased or generated in a non-human organism, like a microorganism or a plant cell, plant or part thereof, especially with non-targeted localization, whereby the respective line discloses in column 7 arginine. For example, an increase of the arginine of at least 1 percent, particularly in a range of 52 to 238-percent is conferred as compared to a corresponding non-transformed wild type non-human organism.

[9018] Accordingly, in one embodiment, an increase of glutamine in a non-human organism, as compared to a corresponding non-transformed wild type non-human organism, is conferred in the process of the invention, if the activity of a polypeptide showing the activity of a Zm_{—}4842_BE510522-protein, or if the activity of the polypeptide Zm_{—}4842_BE510522, preferably represented by SEQ ID NO. 68414, or a homolog or fragment thereof, or if the activity of a polypeptide encoded by a nucleic acid molecule comprising the nucleic acid SEQ ID NO. 68413, preferably the coding region thereof, or a homolog or fragment thereof, e.g. derived from Zea mays, is increased or generated. For example the activity of a nucleic acid molecule or a polypeptide comprising the nucleic acid, preferably the coding region thereof, or polypeptide or the consensus sequence or the polypeptide motif, as depicted in Table I, II or IV, application No. 2, column 5 or 8 in the respective same line as the nucleic acid molecule SEQ ID NO. 68413 or polypeptide SEQ ID NO. 68414, respectively, or a homolog or a fragment thereof, is increased or generated, or if the activity Zm_{—}4842_BE510522-protein is increased or generated in a non-human organism, like a microorganism or a plant cell, plant or part thereof, especially with non-targeted localization, whereby the respective line discloses in column 7 glutamine. For example, an increase of the glutamine of at least 1 percent, particularly in a range of 49 to 411-percent is conferred as compared to a corresponding non-transformed wild type non-human organism.

[9019] Accordingly, in one embodiment, an increase of proline in a non-human organism, as compared to a corresponding non-transformed wild type non-human organism, is conferred in the process of the invention, if the activity of a polypeptide showing the activity of a Zm_{—}4842_BE510522protein, or if the activity of the polypeptide Zm_{—}4842_BE510522, preferably represented by SEQ ID NO. 68414, or a homolog or fragment thereof, or if the activity of a polypeptide encoded by a nucleic acid molecule comprising the nucleic acid SEQ ID NO. 68413, preferably the coding region thereof, or a homolog or fragment thereof, e.g. derived from Zea mays, is increased or generated. For example the activity of a nucleic acid molecule or a polypeptide comprising the nucleic acid, preferably the coding region thereof, or polypeptide or the consensus sequence or the polypeptide motif, as depicted in Table I, II or IV, application No. 2, column 5 or 8 in the respective same line as the nucleic acid molecule SEQ ID NO. 68413 or polypeptide SEQ ID NO. 68414, respectively, or a homolog or a fragment thereof, is increased or generated, or if the activity Zm_{—}4842_BE510522-protein is increased or generated in a non-human organism, like a microorganism or a plant cell, plant or part thereof, especially with non-targeted localization, whereby the respective line discloses in column 7 proline. For example, an increase of the proline of at least 1 percent, particularly in a range of 44 to 103-percent is conferred as compared to a corresponding non-transformed wild type non-human organism.

[9020] Accordingly, in one embodiment, an increase of arginine in a non-human organism, as compared to a corresponding non-transformed wild type non-human organism, is conferred in the process of the invention, if the activity of a polypeptide showing the activity of a phosphopantothenoylcysteine decarboxylase, or if the activity of the polypeptide ZM06LC1143, preferably represented by SEQ ID NO. 68133, or a homolog or fragment thereof, or if the activity of a polypeptide encoded by a nucleic acid molecule comprising the nucleic acid SEQ ID NO. 68132, preferably the coding region thereof, or a homolog or fragment thereof, e.g. derived from Zea mays, is increased or generated. For example the activity of a nucleic acid molecule or a polypeptide comprising the nucleic acid, preferably the coding region thereof, or polypeptide or the consensus sequence or the polypeptide motif, as depicted in Table I, II or IV, application No. 2, column 5 or 8 in the respective same line as the nucleic acid molecule SEQ ID NO. 68132 or polypeptide SEQ ID NO. 68133, respectively, or a homolog or a fragment thereof, is increased or generated, or if the activity phosphopantothenoylcysteine decarboxylase is increased or generated in a non-human organism, like a microorganism or a plant cell, plant or part thereof, especially with non-targeted localization, whereby the respective line discloses in column 7 arginine. For example, an increase of the arginine of at least 1 percent, particularly in a range of 49 to 117-percent is conferred as compared to a corresponding non-transformed wild type non-human organism.

[9021] Accordingly, in one embodiment, an increase of proline in a non-human organism, as compared to a corresponding non-transformed wild type non-human organism, is conferred in the process of the invention, if the activity of a polypeptide showing the activity of a ZM06LC11975-protein, or if the activity of the polypeptide ZM06LC11975, preferably represented by SEQ ID NO. 68364, or a homolog or fragment thereof, or if the activity of a polypeptide encoded by a nucleic acid molecule comprising the nucleic acid SEQ ID NO. 68363, preferably the coding region thereof, or a homolog or fragment thereof, e.g. derived from Zea mays, is increased or generated. For example the activity of a nucleic acid molecule or a polypeptide comprising the nucleic acid, preferably the coding region thereof, or polypeptide or the consensus sequence or the polypeptide motif, as depicted in Table I, II or IV, application No. 2, column 5 or 8 in the respective same line as the nucleic acid molecule SEQ ID NO. 68363 or polypeptide SEQ ID NO. 68364, respectively, or a homolog or a fragment thereof, is increased or generated, or if the activity ZM06LC11975-protein is increased or generated in a non-human organism, like a microorganism or a plant cell, plant or part thereof, especially with non-targeted localization, whereby the respective line discloses in column 7 proline. For example, an increase of the proline of at least 1 percent, particularly in a range of 33 to 136-percent is conferred as compared to a corresponding non-transformed wild type non-human organism.

[9022] [0096.1.1.2] to [0103.1.1.2] for the disclosure of these paragraphs see [0096.1.1.1] to [0103.1.1.1] above.

[9023] The nucleic acid sequence of 47266012_SOYBEAN from Glycine max, e.g. as shown in the respective line in column 5 of Table I, application no. 2 is unpublished. And the activity of the gene product thereof is the activity of 47266012-protein.

[9024] Accordingly, in one embodiment, the process of the present invention for producing glutamate in a non-human organism, like a microorganism or a plant or a part thereof, comprises increasing or generating the activity of a gene product with the activity of a gene product conferring the activity of “47266012-protein”, especially from Glycine max or its functional equivalent or its homolog, e.g. the increase of
[9025] (a) a gene product of a gene comprising the nucleic acid molecule as shown in the respective line in column 5 of Table I, application no. 2, preferably the coding region thereof, or a homolog or a fragment thereof, and being depicted in the same respective line as said 47266012_SOYBEAN, or a functional equivalent or a homolog thereof as shown in column 8 of Table I, application no. 2, preferably the coding region thereof, particularly a homolog or functional equivalent as shown in column 8 of Table I B, application no. 2, and being depicted in the same respective line as said 47266012_SOYBEAN, and preferably the activity is increased non-targeted, or
[9026] (b) a polypeptide comprising a polypeptide, a consensus sequence or at least a polypeptide motif as shown in the respective line in column 5 of Table II or in column 8 of Table IV, application no. 2, respectively, and being depicted in the same respective line as said 47266012_SOYBEAN, or a functional equivalent or a homolog thereof as depicted in column 8 of Table II, application no. 2, preferably a homolog or functional equivalent as depicted in column 8 of Table II B, application no. 2, and being depicted in the same respective line as said 47266012_SOYBEAN, and preferably the activity is increased non-targeted.

[9027] Accordingly, in one embodiment, the molecule which activity is to be increased in the process of the invention is the gene product with an activity as a “47266012-protein”, preferably it is the molecule of section (a) or (b) of this paragraph.

[9028] In particular, it was observed that in plants, especially in Arabidopsis thaliana, increasing or generating the activity of a gene product non-targeted with the activity of a “47266012-protein”, preferably being encoded by a gene comprising the nucleic acid sequence SEQ ID NO. 15187, preferably the coding region thereof, conferred the production of or the increase in glutamate compared with the wild type control.

[9029] The nucleic acid sequence of 47266012_SOYBEAN from Glycine max, e.g. as shown in the respective line in column 5 of Table I, application no. 2 is unpublished. And the activity of the gene product thereof is the activity of 47266012-protein.

[9030] Accordingly, in one embodiment, the process of the present invention for producing glutamine in a non-human organism, like a microorganism or a plant or a part thereof, comprises increasing or generating the activity of a gene product with the activity of a gene product conferring the activity of “47266012-protein”, especially from Glycine max or its functional equivalent or its homolog, e.g. the increase of
[9031] (a) a gene product of a gene comprising the nucleic acid molecule as shown in the respective line in column 5 of Table I, application no. 2, preferably the coding region thereof, or a homolog or a fragment thereof, and being depicted in the same respective line as said 47266012_SOYBEAN, or a functional equivalent or a homolog thereof as shown in column 8 of Table I, application no. 2, preferably the coding region thereof, particularly a homolog or functional equivalent as shown in column 8 of Table I B, application no. 2, and being depicted in the same respective line as said 47266012_SOYBEAN, and preferably the activity is increased non-targeted, or
[9032] (b) a polypeptide comprising a polypeptide, a consensus sequence or at least a polypeptide motif as shown in the respective line in column 5 of Table II or in column 8 of Table IV, application no. 2, respectively, and being depicted in the same respective line as said 47266012_SOYBEAN, or a functional equivalent or a homolog thereof as depicted in column 8 of Table II, application no. 2, preferably a homolog or functional equivalent as depicted in column 8 of Table II B, application no. 2, and being depicted in the same respective line as said 47266012_SOYBEAN, and preferably the activity is increased non-targeted.

[9033] Accordingly, in one embodiment, the molecule which activity is to be increased in the process of the invention is the gene product with an activity as a “47266012-protein”, preferably it is the molecule of section (a) or (b) of this paragraph.

[9034] In particular, it was observed that in plants, especially in Arabidopsis thaliana, increasing or generating the activity of a gene product non-targeted with the activity of a “47266012-protein”, preferably being encoded by a gene comprising the nucleic acid sequence SEQ ID NO. 15187, preferably the coding region thereof, conferred the production of or the increase in glutamine compared with the wild type control.

[9035] The nucleic acid sequence of 49747384_SOYBEAN from Glycine max, e.g. as shown in the respective line in column 5 of Table I, application no. 2 is unpublished. And the activity of the gene product thereof is the activity of 49747384_SOYBEAN-protein.

[9036] Accordingly, in one embodiment, the process of the present invention for producing glutamate in a non-human organism, like a microorganism or a plant or a part thereof, comprises increasing or generating the activity of a gene product with the activity of a gene product conferring the activity of “49747384_SOYBEAN-protein”, especially from Glycine max or its functional equivalent or its homolog, e.g. the increase of
[9037] (a) a gene product of a gene comprising the nucleic acid molecule as shown in the respective line in column 5 of Table I, application no. 2, preferably the coding region thereof, or a homolog or a fragment thereof, and being depicted in the same respective line as said 49747384_SOYBEAN, or a functional equivalent or a homolog thereof as shown in column 8 of Table I, application no. 2, preferably the coding region thereof, particularly a homolog or functional equivalent as shown in column 8 of Table I B, application no. 2, and being depicted in the same respective line as said 49747384_SOYBEAN, and preferably the activity is increased non-targeted, or
[9038] (b) a polypeptide comprising a polypeptide, a consensus sequence or at least a polypeptide motif as shown in the respective line in column 5 of Table II or in column 8 of Table IV, application no. 2, respectively, and being depicted in the same respective line as said 49747384_SOYBEAN, or a functional equivalent or a homolog thereof as depicted in column 8 of Table II, application no. 2, preferably a homolog or functional equivalent as depicted in column 8 of Table II B, application no. 2, and being depicted in the same respective line as said 49747384_SOYBEAN, and preferably the activity is increased non-targeted.

[9039] Accordingly, in one embodiment, the molecule which activity is to be increased in the process of the invention is the gene product with an activity as a “49747384_SOYBEAN-protein”, preferably it is the molecule of section (a) or (b) of this paragraph. In particular, it was observed that in plants, especially in Arabidopsis thaliana, increasing or generating the activity of a gene product non-targeted with the activity of a “49747384_SOYBEAN-protein”, preferably being encoded by a gene comprising the nucleic acid sequence SEQ ID NO. 69, preferably the coding region thereof, conferred the production of or the increase in glutamate compared with the wild type control.

[9040] The nucleic acid sequence of 51340801_CANOLA from Brassica napus, e.g. as shown in the respective line in column 5 of Table I, application no. 2 is unpublished. And the activity of the gene product thereof is the activity of pyruvate kinase.

[9041] Accordingly, in one embodiment, the process of the present invention for producing glutamate in a non-human organism, like a microorganism or a plant or a part thereof, comprises increasing or generating the activity of a gene product with the activity of a gene product conferring the activity of “pyruvate kinase”, especially from Brassica napus or its functional equivalent or its homolog, e.g. the increase of
[9042] (a) a gene product of a gene comprising the nucleic acid molecule as shown in the respective line in column 5 of Table I, application no. 2, preferably the coding region thereof, or a homolog or a fragment thereof, and being depicted in the same respective line as said 51340801_CANOLA, or a functional equivalent or a homolog thereof as shown in column 8 of Table I, application no. 2, preferably the coding region thereof, particularly a homolog or functional equivalent as shown in column 8 of Table I B, application no. 2, and being depicted in the same respective line as said 51340801_CANOLA, and preferably the activity is increased plastidic, or
[9043] (b) a polypeptide comprising a polypeptide, a consensus sequence or at least a polypeptide motif as shown in the respective line in column 5 of Table II or in column 8 of Table IV, application no. 2, respectively, and being depicted in the same respective line as said 51340801_CANOLA, or a functional equivalent or a homolog thereof as depicted in column 8 of Table II, application no. 2, preferably a homolog or functional equivalent as depicted in column 8 of Table II B, application no. 2, and being depicted in the same respective line as said 51340801_CANOLA, and preferably the activity is increased plastidic.

[9044] Accordingly, in one embodiment, the molecule which activity is to be increased in the process of the invention is the gene product with an activity as a “pyruvate kinase”, preferably it is the molecule of section (a) or (b) of this paragraph.

[9045] In particular, it was observed that in plants, especially in Arabidopsis thaliana, increasing or generating the activity of a gene product plastidic with the activity of a “pyruvate kinase”, preferably being encoded by a gene comprising the nucleic acid sequence SEQ ID NO. 15532, preferably the coding region thereof, conferred the production of or the increase in glutamate compared with the wild type control.

[9046] The nucleic acid sequence of 51340801_CANOLA from Brassica napus, e.g. as shown in the respective line in column 5 of Table I, application no. 2 is unpublished. And the activity of the gene product thereof is the activity of pyruvate kinase.

[9047] Accordingly, in one embodiment, the process of the present invention for producing proline in a non-human organism, like a microorganism or a plant or a part thereof, comprises increasing or generating the activity of a gene product with the activity of a gene product conferring the activity of “pyruvate kinase”, especially from Brassica napus or its functional equivalent or its homolog, e.g. the increase of
[9048] (a) a gene product of a gene comprising the nucleic acid molecule as shown in the respective line in column 5 of Table I, application no. 2, preferably the coding region thereof, or a homolog or a fragment thereof, and being depicted in the same respective line as said 51340801_CANOLA, or a functional equivalent or a homolog thereof as shown in column 8 of Table I, application no. 2, preferably the coding region thereof, particularly a homolog or functional equivalent as shown in column 8 of Table I B, application no. 2, and being depicted in the same respective line as said 51340801_CANOLA, and preferably the activity is increased plastidic, or
[9049] (b) a polypeptide comprising a polypeptide, a consensus sequence or at least a polypeptide motif as shown in the respective line in column 5 of Table II or in column 8 of Table IV, application no. 2, respectively, and being depicted in the same respective line as said 51340801_CANOLA, or a functional equivalent or a homolog thereof as depicted in column 8 of Table II, application no. 2, preferably a homolog or functional equivalent as depicted in column 8 of Table II B, application no. 2, and being depicted in the same respective line as said 51340801_CANOLA, and preferably the activity is increased plastidic.

[9050] Accordingly, in one embodiment, the molecule which activity is to be increased in the process of the invention is the gene product with an activity as a “pyruvate kinase”, preferably it is the molecule of section (a) or (b) of this paragraph.

[9051] In particular, it was observed that in plants, especially in Arabidopsis thaliana, increasing or generating the activity of a gene product plastidic with the activity of a “pyruvate kinase”, preferably being encoded by a gene comprising the nucleic acid sequence SEQ ID NO. 15532, preferably the coding region thereof, conferred the production of or the increase in proline compared with the wild type control.

[9052] The nucleic acid sequence of 59547452_SOYBEAN from Glycine max, e.g. as shown in the respective line in column 5 of Table I, application no. 2 is unpublished. And the activity of the gene product thereof is the activity of acetyltransferase.

[9053] Accordingly, in one embodiment, the process of the present invention for producing arginine in a non-human organism, like a microorganism or a plant or a part thereof, comprises increasing or generating the activity of a gene product with the activity of a gene product conferring the activity of “acetyltransferase”, especially from Glycine max or its functional equivalent or its homolog, e.g. the increase of
[9054] (a) a gene product of a gene comprising the nucleic acid molecule as shown in the respective line in column 5 of Table I, application no. 2, preferably the coding region thereof, or a homolog or a fragment thereof, and being depicted in the same respective line as said 59547452_SOYBEAN, or a functional equivalent or a homolog thereof as shown in column 8 of Table I, application no. 2, preferably the coding region thereof, particularly a homolog or functional equivalent as shown in column 8 of Table I B, application no. 2, and being depicted in the same respective line as said 59547452_SOYBEAN, and preferably the activity is increased non-targeted, or
[9055] (b) a polypeptide comprising a polypeptide, a consensus sequence or at least a polypeptide motif as shown in the respective line in column 5 of Table II or in column 8 of Table IV, application no. 2, respectively, and being depicted in the same respective line as said 59547452_SOYBEAN, or a functional equivalent or a homolog thereof as depicted in column 8 of Table II, application no. 2, preferably a homolog or functional equivalent as depicted in column 8 of Table II B, application no. 2, and being depicted in the same respective line as said 59547452_SOYBEAN, and preferably the activity is increased non-targeted.

[9056] Accordingly, in one embodiment, the molecule which activity is to be increased in the process of the invention is the gene product with an activity as a “acetyltransferase”, preferably it is the molecule of section (a) or (b) of this paragraph.

[9057] In particular, it was observed that in plants, especially in Arabidopsis thaliana, increasing or generating the activity of a gene product non-targeted with the activity of a “acetyltransferase”, preferably being encoded by a gene comprising the nucleic acid sequence SEQ ID NO. 16155, preferably the coding region thereof, conferred the production of or the increase in arginine compared with the wild type control.

[9058] The nucleic acid sequence of 59554615_SOYBEAN from Glycine max, e.g. as shown in the respective line in column 5 of Table I, application no. 2 is unpublished. And the activity of the gene product thereof is the activity of pyruvate kinase.

[9059] Accordingly, in one embodiment, the process of the present invention for producing glutamate in a non-human organism, like a microorganism or a plant or a part thereof, comprises increasing or generating the activity of a gene product with the activity of a gene product conferring the activity of “pyruvate kinase”, especially from Glycine max or its functional equivalent or its homolog, e.g. the increase of
[9060] (a) a gene product of a gene comprising the nucleic acid molecule as shown in the respective line in column 5 of Table I, application no. 2, preferably the coding region thereof, or a homolog or a fragment thereof, and being depicted in the same respective line as said 59554615_SOYBEAN, or a functional equivalent or a homolog thereof as shown in column 8 of Table I, application no. 2, preferably the coding region thereof, particularly a homolog or functional equivalent as shown in column 8 of Table I B, application no. 2, and being depicted in the same respective line as said 59554615_SOYBEAN, and preferably the activity is increased plastidic, or
[9061] (b) a polypeptide comprising a polypeptide, a consensus sequence or at least a polypeptide motif as shown in the respective line in column 5 of Table II or in column 8 of Table IV, application no. 2, respectively, and being depicted in the same respective line as said 59554615_SOYBEAN, or a functional equivalent or a homolog thereof as depicted in column 8 of Table II, application no. 2, preferably a homolog or functional equivalent as depicted in column 8 of Table II B, application no. 2, and being depicted in the same respective line as said 59554615_SOYBEAN, and preferably the activity is increased plastidic.

[9062] Accordingly, in one embodiment, the molecule which activity is to be increased in the process of the invention is the gene product with an activity as a “pyruvate kinase”, preferably it is the molecule of section (a) or (b) of this paragraph.

[9063] In particular, it was observed that in plants, especially in Arabidopsis thaliana, increasing or generating the activity of a gene product plastidic with the activity of a “pyruvate kinase”, preferably being encoded by a gene comprising the nucleic acid sequence SEQ ID NO. 16263, preferably the coding region thereof, conferred the production of or the increase in glutamate compared with the wild type control.

[9064] The nucleic acid sequence of 59582753_SOYBEAN from Glycine max, e.g. as shown in the respective line in column 5 of Table I, application no. 2 is unpublished. And the activity of the gene product thereof is the activity of glucose-6-phosphate 1-dehydrogenase.

[9065] Accordingly, in one embodiment, the process of the present invention for producing arginine in a non-human organism, like a microorganism or a plant or a part thereof, comprises increasing or generating the activity of a gene product with the activity of a gene product conferring the activity of “glucose-6-phosphate 1-dehydrogenase”, especially from Glycine max or its functional equivalent or its homolog, e.g. the increase of
[9066] (a) a gene product of a gene comprising the nucleic acid molecule as shown in the respective line in column 5 of Table I, application no. 2, preferably the coding region thereof, or a homolog or a fragment thereof, and being depicted in the same respective line as said 59582753_SOYBEAN, or a functional equivalent or a homolog thereof as shown in column 8 of Table I, application no. 2, preferably the coding region thereof, particularly a homolog or functional equivalent as shown in column 8 of Table I B, application no. 2, and being depicted in the same respective line as said 59582753_SOYBEAN, and preferably the activity is increased plastidic, or
[9067] (b) a polypeptide comprising a polypeptide, a consensus sequence or at least a polypeptide motif as shown in the respective line in column 5 of Table II or in column 8 of Table IV, application no. 2, respectively, and being depicted in the same respective line as said 59582753_SOYBEAN, or a functional equivalent or a homolog thereof as depicted in column 8 of Table II, application no. 2, preferably a homolog or functional equivalent as depicted in column 8 of Table II B, application no. 2, and being depicted in the same respective line as said 59582753_SOYBEAN, and preferably the activity is increased plastidic.

[9068] Accordingly, in one embodiment, the molecule which activity is to be increased in the process of the invention is the gene product with an activity as a “glucose-6-phosphate 1-dehydrogenase”, preferably it is the molecule of section (a) or (b) of this paragraph.

[9069] In particular, it was observed that in plants, especially in Arabidopsis thaliana, increasing or generating the activity of a gene product plastidic with the activity of a “glucose-6-phosphate 1-dehydrogenase”, preferably being encoded by a gene comprising the nucleic acid sequence SEQ ID NO. 16883, preferably the coding region thereof, conferred the production of or the increase in arginine compared with the wild type control.

[9070] The nucleic acid sequence of 59582753_SOYBEAN from Glycine max, e.g. as shown in the respective line in column 5 of Table I, application no. 2 is unpublished. And the activity of the gene product thereof is the activity of glucose-6-phosphate 1-dehydrogenase.

[9071] Accordingly, in one embodiment, the process of the present invention for producing proline in a non-human organism, like a microorganism or a plant or a part thereof, comprises increasing or generating the activity of a gene product with the activity of a gene product conferring the activity of “glucose-6-phosphate 1-dehydrogenase”, especially from Glycine max or its functional equivalent or its homolog, e.g. the increase of
[9072] (a) a gene product of a gene comprising the nucleic acid molecule as shown in the respective line in column 5 of Table I, application no. 2, preferably the coding region thereof, or a homolog or a fragment thereof, and being depicted in the same respective line as said 59582753_SOYBEAN, or a functional equivalent or a homolog thereof as shown in column 8 of Table I, application no. 2, preferably the coding region thereof, particularly a homolog or functional equivalent as shown in column 8 of Table I B, application no. 2, and being depicted in the same respective line as said 59582753_SOYBEAN, and preferably the activity is increased plastidic, or
[9073] (b) a polypeptide comprising a polypeptide, a consensus sequence or at least a polypeptide motif as shown in the respective line in column 5 of Table II or in column 8 of Table IV, application no. 2, respectively, and being depicted in the same respective line as said 59582753_SOYBEAN, or a functional equivalent or a homolog thereof as depicted in column 8 of Table II, application no. 2, preferably a homolog or functional equivalent as depicted in column 8 of Table II B, application no. 2, and being depicted in the same respective line as said 59582753_SOYBEAN, and preferably the activity is increased plastidic.

[9074] Accordingly, in one embodiment, the molecule which activity is to be increased in the process of the invention is the gene product with an activity as a “glucose-6-phosphate 1-dehydrogenase”, preferably it is the molecule of section (a) or (b) of this paragraph.

[9075] In particular, it was observed that in plants, especially in Arabidopsis thaliana, increasing or generating the activity of a gene product plastidic with the activity of a “glucose-6-phosphate 1-dehydrogenase”, preferably being encoded by a gene comprising the nucleic acid sequence SEQ ID NO. 16883, preferably the coding region thereof, conferred the production of or the increase in proline compared with the wild type control.

[9076] CHECK The nucleic acid sequence of AAC43185 from Arabidopsis thaliana, e.g. as shown in the respective line in column 5 of Table I, application no. 2 is unpublished. And the activity of the gene product thereof is the activity of amino acid acetyltransferase.

[9077] Accordingly, in one embodiment, the process of the present invention for producing arginine in a non-human organism, like a microorganism or a plant or a part thereof, comprises increasing or generating the activity of a gene product with the activity of a gene product conferring the activity of “amino acid acetyltransferase”, especially from Arabidopsis thaliana or its functional equivalent or its homolog, e.g. the increase of
[9078] (a) a gene product of a gene comprising the nucleic acid molecule as shown in the respective line in column 5 of Table I, application no. 2, preferably the coding region thereof, or a homolog or a fragment thereof, and being depicted in the same respective line as said AAC43185, or a functional equivalent or a homolog thereof as shown in column 8 of Table I, application no. 2, preferably the coding region thereof, particularly a homolog or functional equivalent as shown in column 8 of Table I B, application no. 2, and being depicted in the same respective line as said AAC43185, and preferably the activity is increased plastidic, or
[9079] (b) a polypeptide comprising a polypeptide, a consensus sequence or at least a polypeptide motif as shown in the respective line in column 5 of Table II or in column 8 of Table IV, application no. 2, respectively, and being depicted in the same respective line as said AAC43185, or a functional equivalent or a homolog thereof as depicted in column 8 of

[9080] Table II, application no. 2, preferably a homolog or functional equivalent as depicted in column 8 of Table II B, application no. 2, and being depicted in the same respective line as said AAC43185, and preferably the activity is increased plastidic.

[9081] Accordingly, in one embodiment, the molecule which activity is to be increased in the process of the invention is the gene product with an activity as a “amino acid acetyltransferase”, preferably it is the molecule of section (a) or (b) of this paragraph.

[9082] In particular, it was observed that in plants, especially in Arabidopsis thaliana, increasing or generating the activity of a gene product plastidic with the activity of a “amino acid acetyltransferase”, preferably being encoded by a gene comprising the nucleic acid sequence SEQ ID NO. 17356, preferably the coding region thereof, conferred the production of or the increase in arginine compared with the wild type control.

[9083] The nucleic acid sequence of At1g07430 from Arabidopsis thaliana, e.g. as shown in the respective line in column 5 of Table I, application no. 2 is unpublished. And the activity of the gene product thereof is the activity of protein phosphatase.

[9084] Accordingly, in one embodiment, the process of the present invention for producing glutamate in a non-human organism, like a microorganism or a plant or a part thereof, comprises increasing or generating the activity of a gene product with the activity of a gene product conferring the activity of “protein phosphatase”, especially from Arabidopsis thaliana or its functional equivalent or its homolog, e.g. the increase of
[9085] (a) a gene product of a gene comprising the nucleic acid molecule as shown in the respective line in column 5 of Table I, application no. 2, preferably the coding region thereof, or a homolog or a fragment thereof, and being depicted in the same respective line as said At1g07430, or a functional equivalent or a homolog thereof as shown in column 8 of Table I, application no. 2, preferably the coding region thereof, particularly a homolog or functional equivalent as shown in column 8 of Table I B, application no. 2, and being depicted in the same respective line as said At1g07430, and preferably the activity is increased non-targeted, or
[9086] (b) a polypeptide comprising a polypeptide, a consensus sequence or at least a polypeptide motif as shown in the respective line in column 5 of Table II or in column 8 of Table IV, application no. 2, respectively, and being depicted in the same respective line as said At1g07430, or a functional equivalent or a homolog thereof as depicted in column 8 of Table II, application no. 2, preferably a homolog or functional equivalent as depicted in column 8 of Table II B, application no. 2, and being depicted in the same respective line as said At1g07430, and preferably the activity is increased non-targeted.

[9087] Accordingly, in one embodiment, the molecule which activity is to be increased in the process of the invention is the gene product with an activity as a “protein phosphatase”, preferably it is the molecule of section (a) or (b) of this paragraph.

[9088] In particular, it was observed that in plants, especially in Arabidopsis thaliana, increasing or generating the activity of a gene product non-targeted with the activity of a “protein phosphatase”, preferably being encoded by a gene comprising the nucleic acid sequence SEQ ID NO. 17451, preferably the coding region thereof, conferred the production of or the increase in glutamate compared with the wild type control.

[9089] The nucleic acid sequence of At1g07430 from Arabidopsis thaliana, e.g. as shown in the respective line in column 5 of Table I, application no. 2 is unpublished. And the activity of the gene product thereof is the activity of protein phosphatase.

[9090] Accordingly, in one embodiment, the process of the present invention for producing glutamine in a non-human organism, like a microorganism or a plant or a part thereof, comprises increasing or generating the activity of a gene product with the activity of a gene product conferring the activity of “protein phosphatase”, especially from Arabidopsis thaliana or its functional equivalent or its homolog, e.g. the increase of
[9091] (a) a gene product of a gene comprising the nucleic acid molecule as shown in the respective line in column 5 of Table I, application no. 2, preferably the coding region thereof, or a homolog or a fragment thereof, and being depicted in the same respective line as said At1g07430, or a functional equivalent or a homolog thereof as shown in column 8 of Table I, application no. 2, preferably the coding region thereof, particularly a homolog or functional equivalent as shown in column 8 of Table I B, application no. 2, and being depicted in the same respective line as said At1g07430, and preferably the activity is increased non-targeted, or
[9092] (b) a polypeptide comprising a polypeptide, a consensus sequence or at least a polypeptide motif as shown in the respective line in column 5 of Table II or in column 8 of Table IV, application no. 2, respectively, and being depicted in the same respective line as said At1g07430, or a functional equivalent or a homolog thereof as depicted in column 8 of Table II, application no. 2, preferably a homolog or functional equivalent as depicted in column 8 of Table II B, application no. 2, and being depicted in the same respective line as said At1g07430, and preferably the activity is increased non-targeted.

[9093] Accordingly, in one embodiment, the molecule which activity is to be increased in the process of the invention is the gene product with an activity as a “protein phosphatase”, preferably it is the molecule of section (a) or (b) of this paragraph.

[9094] In particular, it was observed that in plants, especially in Arabidopsis thaliana, increasing or generating the activity of a gene product non-targeted with the activity of a “protein phosphatase”, preferably being encoded by a gene comprising the nucleic acid sequence SEQ ID NO. 17451, preferably the coding region thereof, conferred the production of or the increase in glutamine compared with the wild type control.

[9095] The nucleic acid sequence of At1g17440 from Arabidopsis thaliana, e.g. as shown in the respective line in column 5 of Table I, application no. 2 is unpublished. And the activity of the gene product thereof is the activity of At1g17440-protein.

[9096] Accordingly, in one embodiment, the process of the present invention for producing arginine in a non-human organism, like a microorganism or a plant or a part thereof, comprises increasing or generating the activity of a gene product with the activity of a gene product conferring the activity of “At1g17440-protein”, especially from Arabidopsis thaliana or its functional equivalent or its homolog, e.g. the increase of
[9097] (a) a gene product of a gene comprising the nucleic acid molecule as shown in the respective line in column 5 of Table I, application no. 2, preferably the coding region thereof, or a homolog or a fragment thereof, and being depicted in the same respective line as said At1g17440, or a functional equivalent or a homolog thereof as shown in column 8 of Table I, application no. 2, preferably the coding region thereof, particularly a homolog or functional equivalent as shown in column 8 of Table I B, application no. 2, and being depicted in the same respective line as said At1g17440, and preferably the activity is increased non-targeted, or
[9098] (b) a polypeptide comprising a polypeptide, a consensus sequence or at least a polypeptide motif as shown in the respective line in column 5 of Table II or in column 8 of Table IV, application no. 2, respectively, and being depicted in the same respective line as said At1g17440, or a functional equivalent or a homolog thereof as depicted in column 8 of Table II, application no. 2, preferably a homolog or functional equivalent as depicted in column 8 of Table II B, application no. 2, and being depicted in the same respective line as said At1g17440, and preferably the activity is increased non-targeted.

[9099] Accordingly, in one embodiment, the molecule which activity is to be increased in the process of the invention is the gene product with an activity as a “At1g17440-protein”, preferably it is the molecule of section (a) or (b) of this paragraph.

[9100] In particular, it was observed that in plants, especially in Arabidopsis thaliana, increasing or generating the activity of a gene product non-targeted with the activity of a “At1g17440-protein”, preferably being encoded by a gene comprising the nucleic acid sequence SEQ ID NO. 17601, preferably the coding region thereof, conferred the production of or the increase in arginine compared with the wild type control.

[9101] The nucleic acid sequence of At1g19800 from Arabidopsis thaliana, e.g. as shown in the respective line in column 5 of Table I, application no. 2 is unpublished. And the activity of the gene product thereof is the activity of At1g19800-protein.

[9102] Accordingly, in one embodiment, the process of the present invention for producing glutamine in a non-human organism, like a microorganism or a plant or a part thereof, comprises increasing or generating the activity of a gene product with the activity of a gene product conferring the activity of “At1g19800-protein”, especially from Arabidopsis thaliana or its functional equivalent or its homolog, e.g. the increase of
[9103] (a) a gene product of a gene comprising the nucleic acid molecule as shown in the respective line in column 5 of Table I, application no. 2, preferably the coding region thereof, or a homolog or a fragment thereof, and being depicted in the same respective line as said At1g19800, or a functional equivalent or a homolog thereof as shown in column 8 of Table I, application no. 2, preferably the coding region thereof, particularly a homolog or functional equivalent as shown in column 8 of Table I B, application no. 2, and being depicted in the same respective line as said At1g19800, and preferably the activity is increased non-targeted, or
[9104] (b) a polypeptide comprising a polypeptide, a consensus sequence or at least a polypeptide motif as shown in the respective line in column 5 of Table II or in column 8 of Table IV, application no. 2, respectively, and being depicted in the same respective line as said At1g19800, or a functional equivalent or a homolog thereof as depicted in column 8 of Table II, application no. 2, preferably a homolog or functional equivalent as depicted in column 8 of Table II B, application no. 2, and being depicted in the same respective line as said At1g19800, and preferably the activity is increased non-targeted.

[9105] Accordingly, in one embodiment, the molecule which activity is to be increased in the process of the invention is the gene product with an activity as a “At1g19800-protein”, preferably it is the molecule of section (a) or (b) of this paragraph.

[9106] In particular, it was observed that in plants, especially in Arabidopsis thaliana, increasing or generating the activity of a gene product non-targeted with the activity of a “At1g19800-protein”, preferably being encoded by a gene comprising the nucleic acid sequence SEQ ID NO. 17637, preferably the coding region thereof, conferred the production of or the increase in glutamine compared with the wild type control.

[9107] The nucleic acid sequence of At1g26830 from Arabidopsis thaliana, e.g. as shown in the respective line in column 5 of Table I, application no. 2 is unpublished. And the activity of the gene product thereof is the activity of cullin.

[9108] Accordingly, in one embodiment, the process of the present invention for producing arginine in a non-human organism, like a microorganism or a plant or a part thereof, comprises increasing or generating the activity of a gene product with the activity of a gene product conferring the activity of “cullin”, especially from Arabidopsis thaliana or its functional equivalent or its homolog, e.g. the increase of
[9109] (a) a gene product of a gene comprising the nucleic acid molecule as shown in the respective line in column 5 of Table I, application no. 2, preferably the coding region thereof, or a homolog or a fragment thereof, and being depicted in the same respective line as said At1g26830, or a functional equivalent or a homolog thereof as shown in column 8 of Table I, application no. 2, preferably the coding region thereof, particularly a homolog or functional equivalent as shown in column 8 of Table I B, application no. 2, and being depicted in the same respective line as said At1g26830, and preferably the activity is increased non-targeted, or
[9110] (b) a polypeptide comprising a polypeptide, a consensus sequence or at least a polypeptide motif as shown in the respective line in column 5 of Table II or in column 8 of Table IV, application no. 2, respectively, and being depicted in the same respective line as said At1g26830, or a functional equivalent or a homolog thereof as depicted in column 8 of Table II, application no. 2, preferably a homolog or functional equivalent as depicted in column 8 of Table II B, application no. 2, and being depicted in the same respective line as said At1g26830, and preferably the activity is increased non-targeted.

[9111] Accordingly, in one embodiment, the molecule which activity is to be increased in the process of the invention is the gene product with an activity as a “cullin”, preferably it is the molecule of section (a) or (b) of this paragraph.

[9112] In particular, it was observed that in plants, especially in Arabidopsis thaliana, increasing or generating the activity of a gene product non-targeted with the activity of a “cullin”, preferably being encoded by a gene comprising the nucleic acid sequence SEQ ID NO. 17701, preferably the coding region thereof, conferred the production of or the increase in arginine compared with the wild type control.

[9113] The nucleic acid sequence of At1g26830 from Arabidopsis thaliana, e.g. as shown in the respective line in column 5 of Table I, application no. 2 is unpublished. And the activity of the gene product thereof is the activity of cullin.

[9114] Accordingly, in one embodiment, the process of the present invention for producing proline in a non-human organism, like a microorganism or a plant or a part thereof, comprises increasing or generating the activity of a gene product with the activity of a gene product conferring the activity of “cullin”, especially from Arabidopsis thaliana or its functional equivalent or its homolog, e.g. the increase of
[9115] (a) a gene product of a gene comprising the nucleic acid molecule as shown in the respective line in column 5 of Table I, application no. 2, preferably the coding region thereof, or a homolog or a fragment thereof, and being depicted in the same respective line as said At1g26830, or a functional equivalent or a homolog thereof as shown in column 8 of Table I, application no. 2, preferably the coding region thereof, particularly a homolog or functional equivalent as shown in column 8 of Table I B, application no. 2, and being depicted in the same respective line as said At1g26830, and preferably the activity is increased non-targeted, or
[9116] (b) a polypeptide comprising a polypeptide, a consensus sequence or at least a polypeptide motif as shown in the respective line in column 5 of Table II or in column 8 of Table IV, application no. 2, respectively, and being depicted in the same respective line as said At1g26830, or a functional equivalent or a homolog thereof as depicted in column 8 of Table II, application no. 2, preferably a homolog or functional equivalent as depicted in column 8 of Table II B, application no. 2, and being depicted in the same respective line as said At1g26830, and preferably the activity is increased non-targeted.

[9117] Accordingly, in one embodiment, the molecule which activity is to be increased in the process of the invention is the gene product with an activity as a “cullin”, preferably it is the molecule of section (a) or (b) of this paragraph.

[9118] In particular, it was observed that in plants, especially in Arabidopsis thaliana, increasing or generating the activity of a gene product non-targeted with the activity of a “cullin”, preferably being encoded by a gene comprising the nucleic acid sequence SEQ ID NO. 17701, preferably the coding region thereof, conferred the production of or the increase in proline compared with the wild type control.

[9119] The nucleic acid sequence of At1g29350 from Arabidopsis thaliana, e.g. as shown in the respective line in column 5 of Table I, application no. 2 is unpublished. And the activity of the gene product thereof is the activity of At1g29350-protein.

[9120] Accordingly, in one embodiment, the process of the present invention for producing arginine in a non-human organism, like a microorganism or a plant or a part thereof, comprises increasing or generating the activity of a gene product with the activity of a gene product conferring the activity of “Atl g29350-protein”, especiallyfrom Arabidopsis thaliana or its functional equivalent or its homolog, e.g. the increase of
[9121] (a) a gene product of a gene comprising the nucleic acid molecule as shown in the respective line in column 5 of Table I, application no. 2, preferably the coding region thereof, or a homolog or a fragment thereof, and being depicted in the same respective line as said At1g29350, or a functional equivalent or a homolog thereof as shown in column 8 of Table I, application no. 2, preferably the coding region thereof, particularly a homolog or functional equivalent as shown in column 8 of Table I B, application no. 2, and being depicted in the same respective line as said At1g29350, and preferably the activity is increased non-targeted, or
[9122] (b) a polypeptide comprising a polypeptide, a consensus sequence or at least a polypeptide motif as shown in the respective line in column 5 of Table II or in column 8 of Table IV, application no. 2, respectively, and being depicted in the same respective line as said

[9123] At1g29350, or a functional equivalent or a homolog thereof as depicted in column 8 of Table II, application no. 2, preferably a homolog or functional equivalent as depicted in column 8 of Table II B, application no. 2, and being depicted in the same respective line as said At1g29350, and preferably the activity is increased non-targeted.

[9124] Accordingly, in one embodiment, the molecule which activity is to be increased in the process of the invention is the gene product with an activity as a “At1g29350-protein”, preferably it is the molecule of section (a) or (b) of this paragraph.

[9125] In particular, it was observed that in plants, especially in Arabidopsis thaliana, increasing or generating the activity of a gene product non-targeted with the activity of a “At1g29350-protein”, preferably being encoded by a gene comprising the nucleic acid sequence SEQ ID NO. 17901, preferably the coding region thereof, conferred the production of or the increase in arginine compared with the wild type control.

[9126] The nucleic acid sequence of At1g36730 from Arabidopsis thaliana, e.g. as shown in the respective line in column 5 of Table I, application no. 2 is unpublished. And the activity of the gene product thereof is the activity of eukaryotic translation initiation factor 5.

[9127] Accordingly, in one embodiment, the process of the present invention for producing arginine in a non-human organism, like a microorganism or a plant or a part thereof, comprises increasing or generating the activity of a gene product with the activity of a gene product conferring the activity of “eukaryotic translation initiation factor 5”, especially from Arabidopsis thaliana or its functional equivalent or its homolog, e.g. the increase of
[9128] (a) a gene product of a gene comprising the nucleic acid molecule as shown in the respective line in column 5 of Table I, application no. 2, preferably the coding region thereof, or a homolog or a fragment thereof, and being depicted in the same respective line as said At1g36730, or a functional equivalent or a homolog thereof as shown in column 8 of Table I, application no. 2, preferably the coding region thereof, particularly a homolog or functional equivalent as shown in column 8 of Table I B, application no. 2, and being depicted in the same respective line as said At1g36730, and preferably the activity is increased non-targeted, or
[9129] (b) a polypeptide comprising a polypeptide, a consensus sequence or at least a polypeptide motif as shown in the respective line in column 5 of Table II or in column 8 of Table IV, application no. 2, respectively, and being depicted in the same respective line as said At1g36730, or a functional equivalent or a homolog thereof as depicted in column 8 of Table II, application no. 2, preferably a homolog or functional equivalent as depicted in column 8 of Table II B, application no. 2, and being depicted in the same respective line as said At1g36730, and preferably the activity is increased non-targeted.

[9130] Accordingly, in one embodiment, the molecule which activity is to be increased in the process of the invention is the gene product with an activity as a “eukaryotic translation initiation factor 5”, preferably it is the molecule of section (a) or (b) of this paragraph.

[9131] In particular, it was observed that in plants, especially in Arabidopsis thaliana, increasing or generating the activity of a gene product non-targeted with the activity of a “eukaryotic translation initiation factor 5”, preferably being encoded by a gene comprising the nucleic acid sequence SEQ ID NO. 17968, preferably the coding region thereof, conferred the production of or the increase in arginine compared with the wild type control.

[9132] The nucleic acid sequence of At1g36730 from Arabidopsis thaliana, e.g. as shown in the respective line in column 5 of Table I, application no. 2 is unpublished. And the activity of the gene product thereof is the activity of eukaryotic translation initiation factor 5.

[9133] Accordingly, in one embodiment, the process of the present invention for producing glutamine in a non-human organism, like a microorganism or a plant or a part thereof, comprises increasing or generating the activity of a gene product with the activity of a gene product conferring the activity of “eukaryotic translation initiation factor 5”, especially from Arabidopsis thaliana or its functional equivalent or its homolog, e.g. the increase of
[9134] (a) a gene product of a gene comprising the nucleic acid molecule as shown in the respective line in column 5 of Table I, application no. 2, preferably the coding region thereof, or a homolog or a fragment thereof, and being depicted in the same respective line as said At1g36730, or a functional equivalent or a homolog thereof as shown in column 8 of Table I, application no. 2, preferably the coding region thereof, particularly a homolog or functional equivalent as shown in column 8 of Table I B, application no. 2, and being depicted in the same respective line as said At1g36730, and preferably the activity is increased non-targeted, or
[9135] (b) a polypeptide comprising a polypeptide, a consensus sequence or at least a polypeptide motif as shown in the respective line in column 5 of Table II or in column 8 of Table IV, application no. 2, respectively, and being depicted in the same respective line as said At1g36730, or a functional equivalent or a homolog thereof as depicted in column 8 of Table II, application no. 2, preferably a homolog or functional equivalent as depicted in column 8 of Table II B, application no. 2, and being depicted in the same respective line as said At1g36730, and preferably the activity is increased non-targeted.

[9136] Accordingly, in one embodiment, the molecule which activity is to be increased in the process of the invention is the gene product with an activity as a “eukaryotic translation initiation factor 5”, preferably it is the molecule of section (a) or (b) of this paragraph.

[9137] In particular, it was observed that in plants, especially in Arabidopsis thaliana, increasing or generating the activity of a gene product non-targeted with the activity of a “eukaryotic translation initiation factor 5”, preferably being encoded by a gene comprising the nucleic acid sequence SEQ ID NO. 17968, preferably the coding region thereof, conferred the production of or the increase in glutamine compared with the wild type control.

[9138] The nucleic acid sequence of At1g43850 from Arabidopsis thaliana, e.g. as shown in the respective line in column 5 of Table I, application no. 2 is unpublished. And the activity of the gene product thereof is the activity of transcriptional regulator.

[9139] Accordingly, in one embodiment, the process of the present invention for producing arginine in a non-human organism, like a microorganism or a plant or a part thereof, comprises increasing or generating the activity of a gene product with the activity of a gene product conferring the activity of “transcriptional regulator”, especially from Arabidopsis thaliana or its functional equivalent or its homolog, e.g. the increase of
[9140] (a) a gene product of a gene comprising the nucleic acid molecule as shown in the respective line in column 5 of Table I, application no. 2, preferably the coding region thereof, or a homolog or a fragment thereof, and being depicted in the same respective line as said At1g43850, or a functional equivalent or a homolog thereof as shown in column 8 of Table I, application no. 2, preferably the coding region thereof, particularly a homolog or functional equivalent as shown in column 8 of Table I B, application no. 2, and being depicted in the same respective line as said At1g43850, and preferably the activity is increased non-targeted, or
[9141] (b) a polypeptide comprising a polypeptide, a consensus sequence or at least a polypeptide motif as shown in the respective line in column 5 of Table II or in column 8 of Table IV, application no. 2, respectively, and being depicted in the same respective line as said At1g43850, or a functional equivalent or a homolog thereof as depicted in column 8 of Table II, application no. 2, preferably a homolog or functional equivalent as depicted in column 8 of Table II B, application no. 2, and being depicted in the same respective line as said At1g43850, and preferably the activity is increased non-targeted.

[9142] Accordingly, in one embodiment, the molecule which activity is to be increased in the process of the invention is the gene product with an activity as a “transcriptional regulator”, preferably it is the molecule of section (a) or (b) of this paragraph. In particular, it was observed that in plants, especially in Arabidopsis thaliana, increasing or generating the activity of a gene product non-targeted with the activity of a “transcriptional regulator”, preferably being encoded by a gene comprising the nucleic acid sequence SEQ ID NO. 18070, preferably the coding region thereof, conferred the production of or the increase in arginine compared with the wild type control.

[9143] The nucleic acid sequence of At1g43850 from Arabidopsis thaliana, e.g. as shown in the respective line in column 5 of Table I, application no. 2 is unpublished. And the activity of the gene product thereof is the activity of transcriptional regulator.

[9144] Accordingly, in one embodiment, the process of the present invention for producing glutamate in a non-human organism, like a microorganism or a plant or a part thereof, comprises increasing or generating the activity of a gene product with the activity of a gene product conferring the activity of “transcriptional regulator”, especially from Arabidopsis thaliana or its functional equivalent or its homolog, e.g. the increase of
[9145] (a) a gene product of a gene comprising the nucleic acid molecule as shown in the respective line in column 5 of Table I, application no. 2, preferably the coding region thereof, or a homolog or a fragment thereof, and being depicted in the same respective line as said At1g43850, or a functional equivalent or a homolog thereof as shown in column 8 of Table I, application no. 2, preferably the coding region thereof, particularly a homolog or functional equivalent as shown in column 8 of Table I B, application no. 2, and being depicted in the same respective line as said At1g43850, and preferably the activity is increased non-targeted, or
[9146] (b) a polypeptide comprising a polypeptide, a consensus sequence or at least a polypeptide motif as shown in the respective line in column 5 of Table II or in column 8 of Table IV, application no. 2, respectively, and being depicted in the same respective line as said At1g43850, or a functional equivalent or a homolog thereof as depicted in column 8 of Table II, application no. 2, preferably a homolog or functional equivalent as depicted in column 8 of Table II B, application no. 2, and being depicted in the same respective line as said At1g43850, and preferably the activity is increased non-targeted.

[9147] Accordingly, in one embodiment, the molecule which activity is to be increased in the process of the invention is the gene product with an activity as a “transcriptional regulator”, preferably it is the molecule of section (a) or (b) of this paragraph.

[9148] In particular, it was observed that in plants, especially in Arabidopsis thaliana, increasing or generating the activity of a gene product non-targeted with the activity of a “transcriptional regulator”, preferably being encoded by a gene comprising the nucleic acid sequence SEQ ID NO. 18070, preferably the coding region thereof, conferred the production of or the increase in glutamate compared with the wild type control.

[9149] The nucleic acid sequence of At1g43850 from Arabidopsis thaliana, e.g. as shown in the respective line in column 5 of Table I, application no. 2 is unpublished. And the activity of the gene product thereof is the activity of transcriptional regulator.

[9150] Accordingly, in one embodiment, the process of the present invention for producing glutamine in a non-human organism, like a microorganism or a plant or a part thereof, comprises increasing or generating the activity of a gene product with the activity of a gene product conferring the activity of “transcriptional regulator”, especially from Arabidopsis thaliana or its functional equivalent or its homolog, e.g. the increase of
[9151] (a) a gene product of a gene comprising the nucleic acid molecule as shown in the respective line in column 5 of Table I, application no. 2, preferably the coding region thereof, or a homolog or a fragment thereof, and being depicted in the same respective line as said At1g43850, or a functional equivalent or a homolog thereof as shown in column 8 of Table I, application no. 2, preferably the coding region thereof, particularly a homolog or functional equivalent as shown in column 8 of Table I B, application no. 2, and being depicted in the same respective line as said At1g43850, and preferably the activity is increased non-targeted, or
[9152] (b) a polypeptide comprising a polypeptide, a consensus sequence or at least a polypeptide motif as shown in the respective line in column 5 of Table II or in column 8 of Table IV, application no. 2, respectively, and being depicted in the same respective line as said At1g43850, or a functional equivalent or a homolog thereof as depicted in column 8 of Table II, application no. 2, preferably a homolog or functional equivalent as depicted in column 8 of Table II B, application no. 2, and being depicted in the same respective line as said At1g43850, and preferably the activity is increased non-targeted.

[9153] Accordingly, in one embodiment, the molecule which activity is to be increased in the process of the invention is the gene product with an activity as a “transcriptional regulator”, preferably it is the molecule of section (a) or (b) of this paragraph.

[9154] In particular, it was observed that in plants, especially in Arabidopsis thaliana, increasing or generating the activity of a gene product non-targeted with the activity of a “transcriptional regulator”, preferably being encoded by a gene comprising the nucleic acid sequence SEQ ID NO. 18070, preferably the coding region thereof, conferred the production of or the increase in glutamine compared with the wild type control.

[9155] The nucleic acid sequence of At1g43850 from Arabidopsis thaliana, e.g. as shown in the respective line in column 5 of Table I, application no. 2 is unpublished. And the activity of the gene product thereof is the activity of transcriptional regulator.

[9156] Accordingly, in one embodiment, the process of the present invention for producing proline in a non-human organism, like a microorganism or a plant or a part thereof, comprises increasing or generating the activity of a gene product with the activity of a gene product conferring the activity of “transcriptional regulator”, especially from Arabidopsis thaliana or its functional equivalent or its homolog, e.g. the increase of
[9157] (a) a gene product of a gene comprising the nucleic acid molecule as shown in the respective line in column 5 of Table I, application no. 2, preferably the coding region thereof, or a homolog or a fragment thereof, and being depicted in the same respective line as said At1g43850, or a functional equivalent or a homolog thereof as shown in column 8 of Table I, application no. 2, preferably the coding region thereof, particularly a homolog or functional equivalent as shown in column 8 of Table I B, application no. 2, and being depicted in the same respective line as said At1g43850, and preferably the activity is increased non-targeted, or
[9158] (b) a polypeptide comprising a polypeptide, a consensus sequence or at least a polypeptide motif as shown in the respective line in column 5 of Table II or in column 8 of Table IV, application no. 2, respectively, and being depicted in the same respective line as said At1g43850, or a functional equivalent or a homolog thereof as depicted in column 8 of Table II, application no. 2, preferably a homolog or functional equivalent as depicted in column 8 of Table II B, application no. 2, and being depicted in the same respective line as said At1g43850, and preferably the activity is increased non-targeted.

[9159] Accordingly, in one embodiment, the molecule which activity is to be increased in the process of the invention is the gene product with an activity as a “transcriptional regulator”, preferably it is the molecule of section (a) or (b) of this paragraph.

[9160] In particular, it was observed that in plants, especially in Arabidopsis thaliana, increasing or generating the activity of a gene product non-targeted with the activity of a “transcriptional regulator”, preferably being encoded by a gene comprising the nucleic acid sequence SEQ ID NO. 18070, preferably the coding region thereof, conferred the production of or the increase in proline compared with the wild type control.

[9161] The nucleic acid sequence of At1g47380 from Arabidopsis thaliana, e.g. as shown in the respective line in column 5 of Table I, application no. 2 is unpublished. And the activity of the gene product thereof is the activity of At1g47380-protein.

[9162] Accordingly, in one embodiment, the process of the present invention for producing proline in a non-human organism, like a microorganism or a plant or a part thereof, comprises increasing or generating the activity of a gene product with the activity of a gene product conferring the activity of “At1g47380-protein”, especially from Arabidopsis thaliana or its functional equivalent or its homolog, e.g. the increase of
[9163] (a) a gene product of a gene comprising the nucleic acid molecule as shown in the respective line in column 5 of Table I, application no. 2, preferably the coding region thereof, or a homolog or a fragment thereof, and being depicted in the same respective line as said At1g47380, or a functional equivalent or a homolog thereof as shown in column 8 of Table I, application no. 2, preferably the coding region thereof, particularly a homolog or functional equivalent as shown in column 8 of Table I B, application no. 2, and being depicted in the same respective line as said At1g47380, and preferably the activity is increased non-targeted, or
[9164] (b) a polypeptide comprising a polypeptide, a consensus sequence or at least a polypeptide motif as shown in the respective line in column 5 of Table II or in column 8 of Table IV, application no. 2, respectively, and being depicted in the same respective line as said At1g47380, or a functional equivalent or a homolog thereof as depicted in column 8 of Table II, application no. 2, preferably a homolog or functional equivalent as depicted in column 8 of Table II B, application no. 2, and being depicted in the same respective line as said At1g47380, and preferably the activity is increased non-targeted.

[9165] Accordingly, in one embodiment, the molecule which activity is to be increased in the process of the invention is the gene product with an activity as a “At1g47380-protein”, preferably it is the molecule of section (a) or (b) of this paragraph.

[9166] In particular, it was observed that in plants, especially in Arabidopsis thaliana, increasing or generating the activity of a gene product non-targeted with the activity of a “At1g47380-protein”, preferably being encoded by a gene comprising the nucleic acid sequence SEQ ID NO. 18122, preferably the coding region thereof, conferred the production of or the increase in proline compared with the wild type control.

[9167] The nucleic acid sequence of At1g48260 from Arabidopsis thaliana, e.g. as shown in the respective line in column 5 of Table I, application no. 2 is unpublished. And the activity of the gene product thereof is the activity of protein kinase.

[9168] Accordingly, in one embodiment, the process of the present invention for producing arginine in a non-human organism, like a microorganism or a plant or a part thereof, comprises increasing or generating the activity of a gene product with the activity of a gene product conferring the activity of “protein kinase”, especially from Arabidopsis thaliana or its functional equivalent or its homolog, e.g. the increase of
[9169] (a) a gene product of a gene comprising the nucleic acid molecule as shown in the respective line in column 5 of Table I, application no. 2, preferably the coding region thereof, or a homolog or a fragment thereof, and being depicted in the same respective line as said At1g48260, or a functional equivalent or a homolog thereof as shown in column 8 of Table I, application no. 2, preferably the coding region thereof, particularly a homolog or functional equivalent as shown in column 8 of Table I B, application no. 2, and being depicted in the same respective line as said At1g48260, and preferably the activity is increased non-targeted, or
[9170] (b) a polypeptide comprising a polypeptide, a consensus sequence or at least a polypeptide motif as shown in the respective line in column 5 of Table II or in column 8 of Table IV, application no. 2, respectively, and being depicted in the same respective line as said At1g48260, or a functional equivalent or a homolog thereof as depicted in column 8 of Table II, application no. 2, preferably a homolog or functional equivalent as depicted in column 8 of Table II B, application no. 2, and being depicted in the same respective line as said At1g48260, and preferably the activity is increased non-targeted.

[9171] Accordingly, in one embodiment, the molecule which activity is to be increased in the process of the invention is the gene product with an activity as a “protein kinase”, preferably it is the molecule of section (a) or (b) of this paragraph.

[9172] In particular, it was observed that in plants, especially in Arabidopsis thaliana, increasing or generating the activity of a gene product non-targeted with the activity of a “protein kinase”, preferably being encoded by a gene comprising the nucleic acid sequence SEQ ID NO. 18235, preferably the coding region thereof, conferred the production of or the increase in arginine compared with the wild type control.

[9173] The nucleic acid sequence of At1g48260 from Arabidopsis thaliana, e.g. as shown in the respective line in column 5 of Table I, application no. 2 is unpublished. And the activity of the gene product thereof is the activity of protein kinase.

[9174] Accordingly, in one embodiment, the process of the present invention for producing glutamate in a non-human organism, like a microorganism or a plant or a part thereof, comprises increasing or generating the activity of a gene product with the activity of a gene product conferring the activity of “protein kinase”, especially from Arabidopsis thaliana or its functional equivalent or its homolog, e.g. the increase of
[9175] (a) a gene product of a gene comprising the nucleic acid molecule as shown in the respective line in column 5 of Table I, application no. 2, preferably the coding region thereof, or a homolog or a fragment thereof, and being depicted in the same respective line as said At1g48260, or a functional equivalent or a homolog thereof as shown in column 8 of Table I, application no. 2, preferably the coding region thereof, particularly a homolog or functional equivalent as shown in column 8 of Table I B, application no. 2, and being depicted in the same respective line as said At1g48260, and preferably the activity is increased non-targeted, or
[9176] (b) a polypeptide comprising a polypeptide, a consensus sequence or at least a polypeptide motif as shown in the respective line in column 5 of Table II or in column 8 of Table IV, application no. 2, respectively, and being depicted in the same respective line as said At1g48260, or a functional equivalent or a homolog thereof as depicted in column 8 of Table II, application no. 2, preferably a homolog or functional equivalent as depicted in column 8 of Table II B, application no. 2, and being depicted in the same respective line as said At1g48260, and preferably the activity is increased non-targeted.

[9177] Accordingly, in one embodiment, the molecule which activity is to be increased in the process of the invention is the gene product with an activity as a “protein kinase”, preferably it is the molecule of section (a) or (b) of this paragraph.

[9178] In particular, it was observed that in plants, especially in Arabidopsis thaliana, increasing or generating the activity of a gene product non-targeted with the activity of a “protein kinase”, preferably being encoded by a gene comprising the nucleic acid sequence SEQ ID NO. 18235, preferably the coding region thereof, conferred the production of or the increase in glutamate compared with the wild type control.

[9179] The nucleic acid sequence of At1g48260 from Arabidopsis thaliana, e.g. as shown in the respective line in column 5 of Table I, application no. 2 is unpublished. And the activity of the gene product thereof is the activity of protein kinase.

[9180] Accordingly, in one embodiment, the process of the present invention for producing proline in a non-human organism, like a microorganism or a plant or a part thereof, comprises increasing or generating the activity of a gene product with the activity of a gene product conferring the activity of “protein kinase”, especially from Arabidopsis thaliana or its functional equivalent or its homolog, e.g. the increase of
[9181] (a) a gene product of a gene comprising the nucleic acid molecule as shown in the respective line in column 5 of Table I, application no. 2, preferably the coding region thereof, or a homolog or a fragment thereof, and being depicted in the same respective line as said At1g48260, or a functional equivalent or a homolog thereof as shown in column 8 of Table I, application no. 2, preferably the coding region thereof, particularly a homolog or functional equivalent as shown in column 8 of Table I B, application no. 2, and being depicted in the same respective line as said At1g48260, and preferably the activity is increased non-targeted, or
[9182] (b) a polypeptide comprising a polypeptide, a consensus sequence or at least a polypeptide motif as shown in the respective line in column 5 of Table II or in column 8 of Table IV, application no. 2, respectively, and being depicted in the same respective line as said At1g48260, or a functional equivalent or a homolog thereof as depicted in column 8 of Table II, application no. 2, preferably a homolog or functional equivalent as depicted in column 8 of Table II B, application no. 2, and being depicted in the same respective line as said At1g48260, and preferably the activity is increased non-targeted.

[9183] Accordingly, in one embodiment, the molecule which activity is to be increased in the process of the invention is the gene product with an activity as a “protein kinase”, preferably it is the molecule of section (a) or (b) of this paragraph.

[9184] In particular, it was observed that in plants, especially in Arabidopsis thaliana, increasing or generating the activity of a gene product non-targeted with the activity of a “protein kinase”, preferably being encoded by a gene comprising the nucleic acid sequence SEQ ID NO. 18235, preferably the coding region thereof, conferred the production of or the increase in proline compared with the wild type control.

[9185] The nucleic acid sequence of At1g61950 from Arabidopsis thaliana, e.g. as shown in the respective line in column 5 of Table I, application no. 2 is unpublished. And the activity of the gene product thereof is the activity of calcium-dependent protein kinase.

[9186] Accordingly, in one embodiment, the process of the present invention for producing arginine in a non-human organism, like a microorganism or a plant or a part thereof, comprises increasing or generating the activity of a gene product with the activity of a gene product conferring the activity of “calcium-dependent protein kinase”, especially from Arabidopsis thaliana or its functional equivalent or its homolog, e.g. the increase of
[9187] (a) a gene product of a gene comprising the nucleic acid molecule as shown in the respective line in column 5 of Table I, application no. 2, preferably the coding region thereof, or a homolog or a fragment thereof, and being depicted in the same respective line as said At1g61950, or a functional equivalent or a homolog thereof as shown in column 8 of Table I, application no. 2, preferably the coding region thereof, particularly a homolog or functional equivalent as shown in column 8 of Table I B, application no. 2, and being depicted in the same respective line as said At1g61950, and preferably the activity is increased non-targeted, or
[9188] (b) a polypeptide comprising a polypeptide, a consensus sequence or at least a polypeptide motif as shown in the respective line in column 5 of Table II or in column 8 of Table IV, application no. 2, respectively, and being depicted in the same respective line as said At1g61950, or a functional equivalent or a homolog thereof as depicted in column 8 of Table II, application no. 2, preferably a homolog or functional equivalent as depicted in column 8 of Table II B, application no. 2, and being depicted in the same respective line as said At1g61950, and preferably the activity is increased non-targeted.

[9189] Accordingly, in one embodiment, the molecule which activity is to be increased in the process of the invention is the gene product with an activity as a “calcium-dependent protein kinase”, preferably it is the molecule of section (a) or (b) of this paragraph.

[9190] In particular, it was observed that in plants, especially in Arabidopsis thaliana, increasing or generating the activity of a gene product non-targeted with the activity of a “calcium-dependent protein kinase”, preferably being encoded by a gene comprising the nucleic acid sequence SEQ ID NO. 18869, preferably the coding region thereof, conferred the production of or the increase in arginine compared with the wild type control.

[9191] The nucleic acid sequence of At1g61950 from Arabidopsis thaliana, e.g. as shown in the respective line in column 5 of Table I, application no. 2 is unpublished. And the activity of the gene product thereof is the activity of calcium-dependent protein kinase.

[9192] Accordingly, in one embodiment, the process of the present invention for producing glutamine in a non-human organism, like a microorganism or a plant or a part thereof, comprises increasing or generating the activity of a gene product with the activity of a gene product conferring the activity of “calcium-dependent protein kinase”, especially from Arabidopsis thaliana or its functional equivalent or its homolog, e.g. the increase of
[9193] (a) a gene product of a gene comprising the nucleic acid molecule as shown in the respective line in column 5 of Table I, application no. 2, preferably the coding region thereof, or a homolog or a fragment thereof, and being depicted in the same respective line as said At1g61950, or a functional equivalent or a homolog thereof as shown in column 8 of Table I, application no. 2, preferably the coding region thereof, particularly a homolog or functional equivalent as shown in column 8 of Table I B, application no. 2, and being depicted in the same respective line as said At1g61950, and preferably the activity is increased non-targeted, or
[9194] (b) a polypeptide comprising a polypeptide, a consensus sequence or at least a polypeptide motif as shown in the respective line in column 5 of Table II or in column 8 of Table IV, application no. 2, respectively, and being depicted in the same respective line as said At1g61950, or a functional equivalent or a homolog thereof as depicted in column 8 of Table II, application no. 2, preferably a homolog or functional equivalent as depicted in column 8 of Table II B, application no. 2, and being depicted in the same respective line as said At1g61950, and preferably the activity is increased non-targeted.

[9195] Accordingly, in one embodiment, the molecule which activity is to be increased in the process of the invention is the gene product with an activity as a “calcium-dependent protein kinase”, preferably it is the molecule of section (a) or (b) of this paragraph.

[9196] In particular, it was observed that in plants, especially in Arabidopsis thaliana, increasing or generating the activity of a gene product non-targeted with the activity of a “calcium-dependent protein kinase”, preferably being encoded by a gene comprising the nucleic acid sequence SEQ ID NO. 18869, preferably the coding region thereof, conferred the production of or the increase in glutamine compared with the wild type control.

[9197] The nucleic acid sequence of At1g67340 from Arabidopsis thaliana, e.g. as shown in the respective line in column 5 of Table I, application no. 2 is unpublished. And the activity of the gene product thereof is the activity of At1g67340-protein.

[9198] Accordingly, in one embodiment, the process of the present invention for producing proline in a non-human organism, like a microorganism or a plant or a part thereof, comprises increasing or generating the activity of a gene product with the activity of a gene product conferring the activity of “At1g67340-protein”, especially from Arabidopsis thaliana or its functional equivalent or its homolog, e.g. the increase of
[9199] (a) a gene product of a gene comprising the nucleic acid molecule as shown in the respective line in column 5 of Table I, application no. 2, preferably the coding region thereof, or a homolog or a fragment thereof, and being depicted in the same respective line as said At1g67340, or a functional equivalent or a homolog thereof as shown in column 8 of Table I, application no. 2, preferably the coding region thereof, particularly a homolog or functional equivalent as shown in column 8 of Table I B, application no. 2, and being depicted in the same respective line as said At1g67340, and preferably the activity is increased non-targeted, or
[9200] (b) a polypeptide comprising a polypeptide, a consensus sequence or at least a polypeptide motif as shown in the respective line in column 5 of Table II or in column 8 of Table IV, application no. 2, respectively, and being depicted in the same respective line as said At1g67340, or a functional equivalent or a homolog thereof as depicted in column 8 of Table II, application no. 2, preferably a homolog or functional equivalent as depicted in column 8 of Table II B, application no. 2, and being depicted in the same respective line as said At1g67340, and preferably the activity is increased non-targeted.

[9201] Accordingly, in one embodiment, the molecule which activity is to be increased in the process of the invention is the gene product with an activity as a “At1g67340-protein”, preferably it is the molecule of section (a) or (b) of this paragraph.

[9202] In particular, it was observed that in plants, especially in Arabidopsis thaliana, increasing or generating the activity of a gene product non-targeted with the activity of a “At1g67340-protein”, preferably being encoded by a gene comprising the nucleic acid sequence SEQ ID NO. 19364, preferably the coding region thereof, conferred the production of or the increase in proline compared with the wild type control.

[9203] The nucleic acid sequence of At1g68320 from Arabidopsis thaliana, e.g. as shown in the respective line in column 5 of Table I, application no. 2 is unpublished. And the activity of the gene product thereof is the activity of transcription factor.

[9204] Accordingly, in one embodiment, the process of the present invention for producing glutamine in a non-human organism, like a microorganism or a plant or a part thereof, comprises increasing or generating the activity of a gene product with the activity of a gene product conferring the activity of “transcription factor”, especially from Arabidopsis thaliana or its functional equivalent or its homolog, e.g. the increase of
[9205] (a) a gene product of a gene comprising the nucleic acid molecule as shown in the respective line in column 5 of Table I, application no. 2, preferably the coding region thereof, or a homolog or a fragment thereof, and being depicted in the same respective line as said At1g68320, or a functional equivalent or a homolog thereof as shown in column 8 of Table I, application no. 2, preferably the coding region thereof, particularly a homolog or functional equivalent as shown in column 8 of Table I B, application no. 2, and being depicted in the same respective line as said At1g68320, and preferably the activity is increased non-targeted, or
[9206] (b) a polypeptide comprising a polypeptide, a consensus sequence or at least a polypeptide motif as shown in the respective line in column 5 of Table II or in column 8 of Table IV, application no. 2, respectively, and being depicted in the same respective line as said At1g68320, or a functional equivalent or a homolog thereof as depicted in column 8 of Table II, application no. 2, preferably a homolog or functional equivalent as depicted in column 8 of Table II B, application no. 2, and being depicted in the same respective line as said At1g68320, and preferably the activity is increased non-targeted,.

[9207] Accordingly, in one embodiment, the molecule which activity is to be increased in the process of the invention is the gene product with an activity as a “transcription factor”, preferably it is the molecule of section (a) or (b) of this paragraph.

[9208] In particular, it was observed that in plants, especially in Arabidopsis thaliana, increasing or generating the activity of a gene product non-targeted with the activity of a “transcription factor”, preferably being encoded by a gene comprising the nucleic acid sequence SEQ ID NO. 1061, preferably the coding region thereof, conferred the production of or the increase in glutamine compared with the wild type control.

[9209] The nucleic acid sequence of At1g72770 from Arabidopsis thaliana, e.g. as shown in the respective line in column 5 of Table I, application no. 2 is unpublished. And the activity of the gene product thereof is the activity of protein phosphatase.

[9210] Accordingly, in one embodiment, the process of the present invention for producing glutamine in a non-human organism, like a microorganism or a plant or a part thereof, comprises increasing or generating the activity of a gene product with the activity of a gene product conferring the activity of “protein phosphatase”, especially from Arabidopsis thaliana or its functional equivalent or its homolog, e.g. the increase of
[9211] (a) a gene product of a gene comprising the nucleic acid molecule as shown in the respective line in column 5 of Table I, application no. 2, preferably the coding region thereof, or a homolog or a fragment thereof, and being depicted in the same respective line as said At1g72770, or a functional equivalent or a homolog thereof as shown in column 8 of Table I, application no. 2, preferably the coding region thereof, particularly a homolog or functional equivalent as shown in column 8 of Table I B, application no. 2, and being depicted in the same respective line as said At1g72770, and preferably the activity is increased non-targeted, or
[9212] (b) a polypeptide comprising a polypeptide, a consensus sequence or at least a polypeptide motif as shown in the respective line in column 5 of Table II or in column 8 of Table IV, application no. 2, respectively, and being depicted in the same respective line as said At1g72770, or a functional equivalent or a homolog thereof as depicted in column 8 of Table II, application no. 2, preferably a homolog or functional equivalent as depicted in column 8 of Table II B, application no. 2, and being depicted in the same respective line as said At1g72770, and preferably the activity is increased non-targeted.

[9213] Accordingly, in one embodiment, the molecule which activity is to be increased in the process of the invention is the gene product with an activity as a “protein phosphatase”, preferably it is the molecule of section (a) or (b) of this paragraph.

[9214] In particular, it was observed that in plants, especially in Arabidopsis thaliana, increasing or generating the activity of a gene product non-targeted with the activity of a “protein phosphatase”, preferably being encoded by a gene comprising the nucleic acid sequence SEQ ID NO. 19419, preferably the coding region thereof, conferred the production of or the increase in glutamine compared with the wild type control.

[9215] The nucleic acid sequence of At2g17560 from Arabidopsis thaliana, e.g. as shown in the respective line in column 5 of Table I, application no. 2 is unpublished. And the activity of the gene product thereof is the activity of transcription factor.

[9216] Accordingly, in one embodiment, the process of the present invention for producing proline in a non-human organism, like a microorganism or a plant or a part thereof, comprises increasing or generating the activity of a gene product with the activity of a gene product conferring the activity of “transcription factor”, especially from Arabidopsis thaliana or its functional equivalent or its homolog, e.g. the increase of
[9217] (a) a gene product of a gene comprising the nucleic acid molecule as shown in the respective line in column 5 of Table I, application no. 2, preferably the coding region thereof, or a homolog or a fragment thereof, and being depicted in the same respective line as said At2g17560, or a functional equivalent or a homolog thereof as shown in column 8 of Table I, application no. 2, preferably the coding region thereof, particularly a homolog or functional equivalent as shown in column 8 of Table I B, application no. 2, and being depicted in the same respective line as said At2g17560, and preferably the activity is increased non-targeted, or
[9218] (b) a polypeptide comprising a polypeptide, a consensus sequence or at least a polypeptide motif as shown in the respective line in column 5 of Table II or in column 8 of Table IV, application no. 2, respectively, and being depicted in the same respective line as said At2g17560, or a functional equivalent or a homolog thereof as depicted in column 8 of Table II, application no. 2, preferably a homolog or functional equivalent as depicted in column 8 of Table II B, application no. 2, and being depicted in the same respective line as said At2g17560, and preferably the activity is increased non-targeted.

[9219] Accordingly, in one embodiment, the molecule which activity is to be increased in the process of the invention is the gene product with an activity as a “transcription factor”, preferably it is the molecule of section (a) or (b) of this paragraph.

[9220] In particular, it was observed that in plants, especially in Arabidopsis thaliana, increasing or generating the activity of a gene product non-targeted with the activity of a “transcription factor”, preferably being encoded by a gene comprising the nucleic acid sequence SEQ ID NO. 19502, preferably the coding region thereof, conferred the production of or the increase in proline compared with the wild type control.

[9221] The nucleic acid sequence of At2g25070 from Arabidopsis thaliana, e.g. as shown in the respective line in column 5 of Table I, application no. 2 is unpublished. And the activity of the gene product thereof is the activity of protein phosphatase.

[9222] Accordingly, in one embodiment, the process of the present invention for producing glutamate in a non-human organism, like a microorganism or a plant or a part thereof, comprises increasing or generating the activity of a gene product with the activity of a gene product conferring the activity of “protein phosphatase”, especially from Arabidopsis thaliana or its functional equivalent or its homolog, e.g. the increase of
[9223] (a) a gene product of a gene comprising the nucleic acid molecule as shown in the respective line in column 5 of Table I, application no. 2, preferably the coding region thereof, or a homolog or a fragment thereof, and being depicted in the same respective line as said At2g25070, or a functional equivalent or a homolog thereof as shown in column 8 of Table I, application no. 2, preferably the coding region thereof, particularly a homolog or functional equivalent as shown in column 8 of Table I B, application no. 2, and being depicted in the same respective line as said At2g25070, and preferably the activity is increased non-targeted, or
[9224] (b) a polypeptide comprising a polypeptide, a consensus sequence or at least a polypeptide motif as shown in the respective line in column 5 of Table II or in column 8 of Table IV, application no. 2, respectively, and being depicted in the same respective line as said At2g25070, or a functional equivalent or a homolog thereof as depicted in column 8 of Table II, application no. 2, preferably a homolog or functional equivalent as depicted in column 8 of Table II B, application no. 2, and being depicted in the same respective line as said At2g25070, and preferably the activity is increased non-targeted.

[9225] Accordingly, in one embodiment, the molecule which activity is to be increased in the process of the invention is the gene product with an activity as a “protein phosphatase”, preferably it is the molecule of section (a) or (b) of this paragraph.

[9226] In particular, it was observed that in plants, especially in Arabidopsis thaliana, increasing or generating the activity of a gene product non-targeted with the activity of a “protein phosphatase”, preferably being encoded by a gene comprising the nucleic acid sequence SEQ ID NO. 1298, preferably the coding region thereof, conferred the production of or the increase in glutamate compared with the wild type control.

[9227] The nucleic acid sequence of At2g25070 from Arabidopsis thaliana, e.g. as shown in the respective line in column 5 of Table I, application no. 2 is unpublished. And the activity of the gene product thereof is the activity of protein phosphatase.

[9228] Accordingly, in one embodiment, the process of the present invention for producing glutamine in a non-human organism, like a microorganism or a plant or a part thereof, comprises increasing or generating the activity of a gene product with the activity of a gene product conferring the activity of “protein phosphatase”, especially from Arabidopsis thaliana or its functional equivalent or its homolog, e.g. the increase of
[9229] (a) a gene product of a gene comprising the nucleic acid molecule as shown in the respective line in column 5 of Table I, application no. 2, preferably the coding region thereof, or a homolog or a fragment thereof, and being depicted in the same respective line as said At2g25070, or a functional equivalent or a homolog thereof as shown in column 8 of Table I, application no. 2, preferably the coding region thereof, particularly a homolog or functional equivalent as shown in column 8 of Table I B, application no. 2, and being depicted in the same respective line as said At2g25070, and preferably the activity is increased non-targeted, or
[9230] (b) a polypeptide comprising a polypeptide, a consensus sequence or at least a polypeptide motif as shown in the respective line in column 5 of Table II or in column 8 of Table IV, application no. 2, respectively, and being depicted in the same respective line as said At2g25070, or a functional equivalent or a homolog thereof as depicted in column 8 of Table II, application no. 2, preferably a homolog or functional equivalent as depicted in column 8 of Table II B, application no. 2, and being depicted in the same respective line as said At2g25070, and preferably the activity is increased non-targeted.

[9231] Accordingly, in one embodiment, the molecule which activity is to be increased in the process of the invention is the gene product with an activity as a “protein phosphatase”, preferably it is the molecule of section (a) or (b) of this paragraph.

[9232] In particular, it was observed that in plants, especially in Arabidopsis thaliana, increasing or generating the activity of a gene product non-targeted with the activity of a “protein phosphatase”, preferably being encoded by a gene comprising the nucleic acid sequence SEQ ID NO. 1298, preferably the coding region thereof, conferred the production of or the increase in glutamine compared with the wild type control.

[9233] The nucleic acid sequence of At2g26390 from Arabidopsis thaliana, e.g. as shown in the respective line in column 5 of Table I, application no. 2 is unpublished. And the activity of the gene product thereof is the activity of serine protease inhibitor.

[9234] Accordingly, in one embodiment, the process of the present invention for producing proline in a non-human organism, like a microorganism or a plant or a part thereof, comprises increasing or generating the activity of a gene product with the activity of a gene product conferring the activity of “serine protease inhibitor”, especially from Arabidopsis thaliana or its functional equivalent or its homolog, e.g. the increase of
[9235] (a) a gene product of a gene comprising the nucleic acid molecule as shown in the respective line in column 5 of Table I, application no. 2, preferably the coding region thereof, or a homolog or a fragment thereof, and being depicted in the same respective line as said At2g26390, or a functional equivalent or a homolog thereof as shown in column 8 of Table I, application no. 2, preferably the coding region thereof, particularly a homolog or functional equivalent as shown in column 8 of Table I B, application no. 2, and being depicted in the same respective line as said At2g26390, and preferably the activity is increased non-targeted, or
[9236] (b) a polypeptide comprising a polypeptide, a consensus sequence or at least a polypeptide motif as shown in the respective line in column 5 of Table II or in column 8 of Table IV, application no. 2, respectively, and being depicted in the same respective line as said At2g26390, or a functional equivalent or a homolog thereof as depicted in column 8 of Table II, application no. 2, preferably a homolog or functional equivalent as depicted in column 8 of Table II B, application no. 2, and being depicted in the same respective line as said At2g26390, and preferably the activity is increased non-targeted.

[9237] Accordingly, in one embodiment, the molecule which activity is to be increased in the process of the invention is the gene product with an activity as a “serine protease inhibitor”, preferably it is the molecule of section (a) or (b) of this paragraph.

[9238] In particular, it was observed that in plants, especially in Arabidopsis thaliana, increasing or generating the activity of a gene product non-targeted with the activity of a “serine protease inhibitor”, preferably being encoded by a gene comprising the nucleic acid sequence SEQ ID NO. 19671, preferably the coding region thereof, conferred the production of or the increase in proline compared with the wild type control.

[9239] The nucleic acid sequence of At2g28890 from Arabidopsis thaliana, e.g. as shown in the respective line in column 5 of Table I, application no. 2 is unpublished. And the activity of the gene product thereof is the activity of protein phosphatase.

[9240] Accordingly, in one embodiment, the process of the present invention for producing proline in a non-human organism, like a microorganism or a plant or a part thereof, comprises increasing or generating the activity of a gene product with the activity of a gene product conferring the activity of “protein phosphatase”, especially from Arabidopsis thaliana or its functional equivalent or its homolog, e.g. the increase of
[9241] (a) a gene product of a gene comprising the nucleic acid molecule as shown in the respective line in column 5 of Table I, application no. 2, preferably the coding region thereof, or a homolog or a fragment thereof, and being depicted in the same respective line as said At2g28890, or a functional equivalent or a homolog thereof as shown in column 8 of Table I, application no. 2, preferably the coding region thereof, particularly a homolog or functional equivalent as shown in column 8 of Table I B, application no. 2, and being depicted in the same respective line as said At2g28890, and preferably the activity is increased non-targeted, or
[9242] (b) a polypeptide comprising a polypeptide, a consensus sequence or at least a polypeptide motif as shown in the respective line in column 5 of Table II or in column 8 of Table IV, application no. 2, respectively, and being depicted in the same respective line as said At2g28890, or a functional equivalent or a homolog thereof as depicted in column 8 of Table II, application no. 2, preferably a homolog or functional equivalent as depicted in column 8 of Table II B, application no. 2, and being depicted in the same respective line as said At2g28890, and preferably the activity is increased non-targeted.

[9243] Accordingly, in one embodiment, the molecule which activity is to be increased in the process of the invention is the gene product with an activity as a “protein phosphatase”, preferably it is the molecule of section (a) or (b) of this paragraph.

[9244] In particular, it was observed that in plants, especially in Arabidopsis thaliana, increasing or generating the activity of a gene product non-targeted with the activity of a “protein phosphatase”, preferably being encoded by a gene comprising the nucleic acid sequence SEQ ID NO. 19874, preferably the coding region thereof, conferred the production of or the increase in proline compared with the wild type control.

[9245] The nucleic acid sequence of At2g30360 from Arabidopsis thaliana, e.g. as shown in the respective line in column 5 of Table I, application no. 2 is unpublished. And the activity of the gene product thereof is the activity of CBL-interacting protein kinase.

[9246] Accordingly, in one embodiment, the process of the present invention for producing glutamine in a non-human organism, like a microorganism or a plant or a part thereof, comprises increasing or generating the activity of a gene product with the activity of a gene product conferring the activity of “CBL-interacting protein kinase”, especially from Arabidopsis thaliana or its functional equivalent or its homolog, e.g. the increase of
[9247] (a) a gene product of a gene comprising the nucleic acid molecule as shown in the respective line in column 5 of Table I, application no. 2, preferably the coding region thereof, or a homolog or a fragment thereof, and being depicted in the same respective line as said At2g30360, or a functional equivalent or a homolog thereof as shown in column 8 of Table I, application no. 2, preferably the coding region thereof, particularly a homolog or functional equivalent as shown in column 8 of Table I B, application no. 2, and being depicted in the same respective line as said At2g30360, and preferably the activity is increased non-targeted, or
[9248] (b) a polypeptide comprising a polypeptide, a consensus sequence or at least a polypeptide motif as shown in the respective line in column 5 of Table II or in column 8 of Table IV, application no. 2, respectively, and being depicted in the same respective line as said At2g30360, or a functional equivalent or a homolog thereof as depicted in column 8 of Table II, application no. 2, preferably a homolog or functional equivalent as depicted in column 8 of Table II B, application no. 2, and being depicted in the same respective line as said At2g30360, and preferably the activity is increased non-targeted.

[9249] Accordingly, in one embodiment, the molecule which activity is to be increased in the process of the invention is the gene product with an activity as a “CBL-interacting protein kinase”, preferably it is the molecule of section (a) or (b) of this paragraph.

[9250] In particular, it was observed that in plants, especially in Arabidopsis thaliana, increasing or generating the activity of a gene product non-targeted with the activity of a “CBL-interacting protein kinase”, preferably being encoded by a gene comprising the nucleic acid sequence SEQ ID NO. 19919, preferably the coding region thereof, conferred the production of or the increase in glutamine compared with the wild type control.

[9251] The nucleic acid sequence of At2g30360 from Arabidopsis thaliana, e.g. as shown in the respective line in column 5 of Table I, application no. 2 is unpublished. And the activity of the gene product thereof is the activity of CBL-interacting protein kinase.

[9252] Accordingly, in one embodiment, the process of the present invention for producing proline in a non-human organism, like a microorganism or a plant or a part thereof, comprises increasing or generating the activity of a gene product with the activity of a gene product conferring the activity of “CBL-interacting protein kinase”, especially from Arabidopsis thaliana or its functional equivalent or its homolog, e.g. the increase of
[9253] (a) a gene product of a gene comprising the nucleic acid molecule as shown in the respective line in column 5 of Table I, application no. 2, preferably the coding region thereof, or a homolog or a fragment thereof, and being depicted in the same respective line as said At2g30360, or a functional equivalent or a homolog thereof as shown in column 8 of Table I, application no. 2, preferably the coding region thereof, particularly a homolog or functional equivalent as shown in column 8 of Table I B, application no. 2, and being depicted in the same respective line as said At2g30360, and preferably the activity is increased non-targeted, or
[9254] (b) a polypeptide comprising a polypeptide, a consensus sequence or at least a polypeptide motif as shown in the respective line in column 5 of Table II or in column 8 of Table IV, application no. 2, respectively, and being depicted in the same respective line as said At2g30360, or a functional equivalent or a homolog thereof as depicted in column 8 of Table II, application no. 2, preferably a homolog or functional equivalent as depicted in column 8 of Table II B, application no. 2, and being depicted in the same respective line as said At2g30360, and preferably the activity is increased non-targeted.

[9255] Accordingly, in one embodiment, the molecule which activity is to be increased in the process of the invention is the gene product with an activity as a “CBL-interacting protein kinase”, preferably it is the molecule of section (a) or (b) of this paragraph.

[9256] In particular, it was observed that in plants, especially in Arabidopsis thaliana, increasing or generating the activity of a gene product non-targeted with the activity of a “CBL-interacting protein kinase”, preferably being encoded by a gene comprising the nucleic acid sequence SEQ ID NO. 19919, preferably the coding region thereof, conferred the production of or the increase in proline compared with the wild type control.

[9257] The nucleic acid sequence of At2g30540 from Arabidopsis thaliana, e.g. as shown in the respective line in column 5 of Table I, application no. 2 is unpublished. And the activity of the gene product thereof is the activity of glutaredoxin.

[9258] Accordingly, in one embodiment, the process of the present invention for producing arginine in a non-human organism, like a microorganism or a plant or a part thereof, comprises increasing or generating the activity of a gene product with the activity of a gene product conferring the activity of “glutaredoxin”, especially from Arabidopsis thaliana or its functional equivalent or its homolog, e.g. the increase of
[9259] (a) a gene product of a gene comprising the nucleic acid molecule as shown in the respective line in column 5 of Table I, application no. 2, preferably the coding region thereof, or a homolog or a fragment thereof, and being depicted in the same respective line as said At2g30540, or a functional equivalent or a homolog thereof as shown in column 8 of Table I, application no. 2, preferably the coding region thereof, particularly a homolog or functional equivalent as shown in column 8 of Table I B, application no. 2, and being depicted in the same respective line as said At2g30540, and preferably the activity is increased non-targeted, or
[9260] (b) a polypeptide comprising a polypeptide, a consensus sequence or at least a polypeptide motif as shown in the respective line in column 5 of Table II or in column 8 of Table IV, application no. 2, respectively, and being depicted in the same respective line as said At2g30540, or a functional equivalent or a homolog thereof as depicted in column 8 of Table II, application no. 2, preferably a homolog or functional equivalent as depicted in column 8 of Table II B, application no. 2, and being depicted in the same respective line as said At2g30540, and preferably the activity is increased non-targeted.

[9261] Accordingly, in one embodiment, the molecule which activity is to be increased in the process of the invention is the gene product with an activity as a “glutaredoxin”, preferably it is the molecule of section (a) or (b) of this paragraph.

[9262] In particular, it was observed that in plants, especially in Arabidopsis thaliana, increasing or generating the activity of a gene product non-targeted with the activity of a “glutaredoxin”, preferably being encoded by a gene comprising the nucleic acid sequence SEQ ID NO. 20346, preferably the coding region thereof, conferred the production of or the increase in arginine compared with the wild type control.

[9263] The nucleic acid sequence of At2g30540 from Arabidopsis thaliana, e.g. as shown in the respective line in column 5 of Table I, application no. 2 is unpublished. And the activity of the gene product thereof is the activity of glutaredoxin.

[9264] Accordingly, in one embodiment, the process of the present invention for producing proline in a non-human organism, like a microorganism or a plant or a part thereof, comprises increasing or generating the activity of a gene product with the activity of a gene product conferring the activity of “glutaredoxin”, especially from Arabidopsis thaliana or its functional equivalent or its homolog, e.g. the increase of
[9265] (a) a gene product of a gene comprising the nucleic acid molecule as shown in the respective line in column 5 of Table I, application no. 2, preferably the coding region thereof, or a homolog or a fragment thereof, and being depicted in the same respective line as said At2g30540, or a functional equivalent or a homolog thereof as shown in column 8 of Table I, application no. 2, preferably the coding region thereof, particularly a homolog or functional equivalent as shown in column 8 of Table I B, application no. 2, and being depicted in the same respective line as said At2g30540, and preferably the activity is increased non-targeted, or
[9266] (b) a polypeptide comprising a polypeptide, a consensus sequence or at least a polypeptide motif as shown in the respective line in column 5 of Table II or in column 8 of Table IV, application no. 2, respectively, and being depicted in the same respective line as said At2g30540, or a functional equivalent or a homolog thereof as depicted in column 8 of Table II, application no. 2, preferably a homolog or functional equivalent as depicted in column 8 of Table II B, application no. 2, and being depicted in the same respective line as said At2g30540, and preferably the activity is increased non-targeted.

[9267] Accordingly, in one embodiment, the molecule which activity is to be increased in the process of the invention is the gene product with an activity as a “glutaredoxin”, preferably it is the molecule of section (a) or (b) of this paragraph.

[9268] In particular, it was observed that in plants, especially in Arabidopsis thaliana, increasing or generating the activity of a gene product non-targeted with the activity of a “glutaredoxin”, preferably being encoded by a gene comprising the nucleic acid sequence SEQ ID NO. 20346, preferably the coding region thereof, conferred the production of or the increase in proline compared with the wild type control.

[9269] The nucleic acid sequence of At2g34180 from Arabidopsis thaliana, e.g. as shown in the respective line in column 5 of Table I, application no. 2 is unpublished. And the activity of the gene product thereof is the activity of CBL-interacting protein kinase.

[9270] Accordingly, in one embodiment, the process of the present invention for producing proline in a non-human organism, like a microorganism or a plant or a part thereof, comprises increasing or generating the activity of a gene product with the activity of a gene product conferring the activity of “CBL-interacting protein kinase”, especially from Arabidopsis thaliana or its functional equivalent or its homolog, e.g. the increase of
[9271] (a) a gene product of a gene comprising the nucleic acid molecule as shown in the respective line in column 5 of Table I, application no. 2, preferably the coding region thereof, or a homolog or a fragment thereof, and being depicted in the same respective line as said At2g34180, or a functional equivalent or a homolog thereof as shown in column 8 of Table I, application no. 2, preferably the coding region thereof, particularly a homolog or functional equivalent as shown in column 8 of Table I B, application no. 2, and being depicted in the same respective line as said At2g34180, and preferably the activity is increased non-targeted, or
[9272] (b) a polypeptide comprising a polypeptide, a consensus sequence or at least a polypeptide motif as shown in the respective line in column 5 of Table II or in column 8 of Table IV, application no. 2, respectively, and being depicted in the same respective line as said At2g34180, or a functional equivalent or a homolog thereof as depicted in column 8 of Table II, application no. 2, preferably a homolog or functional equivalent as depicted in column 8 of Table II B, application no. 2, and being depicted in the same respective line as said At2g34180, and preferably the activity is increased non-targeted.

[9273] Accordingly, in one embodiment, the molecule which activity is to be increased in the process of the invention is the gene product with an activity as a “CBL-interacting protein kinase”, preferably it is the molecule of section (a) or (b) of this paragraph.

[9274] In particular, it was observed that in plants, especially in Arabidopsis thaliana, increasing or generating the activity of a gene product non-targeted with the activity of a “CBL-interacting protein kinase”, preferably being encoded by a gene comprising the nucleic acid sequence SEQ ID NO. 20578, preferably the coding region thereof, conferred the production of or the increase in proline compared with the wild type control.

[9275] The nucleic acid sequence of At2g39800 from Arabidopsis thaliana, e.g. as shown in the respective line in column 5 of Table I, application no. 2 is unpublished. And the activity of the gene product thereof is the activity of delta-1-pyrroline 5-carboxylase synthetase.

[9276] Accordingly, in one embodiment, the process of the present invention for producing proline in a non-human organism, like a microorganism or a plant or a part thereof, comprises increasing or generating the activity of a gene product with the activity of a gene product conferring the activity of “delta-1-pyrroline 5-carboxylase synthetase”, especially from Arabidopsis thaliana or its functional equivalent or its homolog, e.g. the increase of
[9277] (a) a gene product of a gene comprising the nucleic acid molecule as shown in the respective line in column 5 of Table I, application no. 2, preferably the coding region thereof, or a homolog or a fragment thereof, and being depicted in the same respective line as said At2g39800, or a functional equivalent or a homolog thereof as shown in column 8 of Table I, application no. 2, preferably the coding region thereof, particularly a homolog or functional equivalent as shown in column 8 of Table I B, application no. 2, and being depicted in the same respective line as said At2g39800, and preferably the activity is increased non-targeted, or
[9278] (b) a polypeptide comprising a polypeptide, a consensus sequence or at least a polypeptide motif as shown in the respective line in column 5 of Table II or in column 8 of Table IV, application no. 2, respectively, and being depicted in the same respective line as said At2g39800, or a functional equivalent or a homolog thereof as depicted in column 8 of Table II, application no. 2, preferably a homolog or functional equivalent as depicted in column 8 of Table II B, application no. 2, and being depicted in the same respective line as said At2g39800, and preferably the activity is increased non-targeted.

[9279] Accordingly, in one embodiment, the molecule which activity is to be increased in the process of the invention is the gene product with an activity as a “delta-1-pyrroline 5-carboxylase synthetase”, preferably it is the molecule of section (a) or (b) of this paragraph.

[9280] In particular, it was observed that in plants, especially in Arabidopsis thaliana, increasing or generating the activity of a gene product non-targeted with the activity of a “delta-1-pyrroline 5-carboxylase synthetase”, preferably being encoded by a gene comprising the nucleic acid sequence SEQ ID NO. 21008, preferably the coding region thereof, conferred the production of or the increase in proline compared with the wild type control.

[9281] The nucleic acid sequence of At2g46500 from Arabidopsis thaliana, e.g. as shown in the respective line in column 5 of Table I, application no. 2 is unpublished. And the activity of the gene product thereof is the activity of phosphatidylinositol 3- and 4-kinase family protein.

[9282] Accordingly, in one embodiment, the process of the present invention for producing glutamine in a non-human organism, like a microorganism or a plant or a part thereof, comprises increasing or generating the activity of a gene product with the activity of a gene product conferring the activity of “phosphatidylinositol 3- and 4-kinase family protein”, especially from Arabidopsis thaliana or its functional equivalent or its homolog, e.g. the increase of
[9283] (a) a gene product of a gene comprising the nucleic acid molecule as shown in the respective line in column 5 of Table I, application no. 2, preferably the coding region thereof, or a homolog or a fragment thereof, and being depicted in the same respective line as said At2g46500, or a functional equivalent or a homolog thereof as shown in column 8 of Table I, application no. 2, preferably the coding region thereof, particularly a homolog or functional equivalent as shown in column 8 of Table I B, application no. 2, and being depicted in the same respective line as said At2g46500, and preferably the activity is increased non-targeted, or
[9284] (b) a polypeptide comprising a polypeptide, a consensus sequence or at least a polypeptide motif as shown in the respective line in column 5 of Table II or in column 8 of Table IV, application no. 2, respectively, and being depicted in the same respective line as said At2g46500, or a functional equivalent or a homolog thereof as depicted in column 8 of Table II, application no. 2, preferably a homolog or functional equivalent as depicted in column 8 of Table II B, application no. 2, and being depicted in the same respective line as said At2g46500, and preferably the activity is increased non-targeted.

[9285] Accordingly, in one embodiment, the molecule which activity is to be increased in the process of the invention is the gene product with an activity as a “phosphatidylinositol 3- and 4-kinase family protein”, preferably it is the molecule of section (a) or (b) of this paragraph.

[9286] In particular, it was observed that in plants, especially in Arabidopsis thaliana, increasing or generating the activity of a gene product non-targeted with the activity of a “phosphatidylinositol 3- and 4-kinase family protein”, preferably being encoded by a gene comprising the nucleic acid sequence SEQ ID NO. 21106, preferably the coding region thereof, conferred the production of or the increase in glutamine compared with the wild type control.

[9287] The nucleic acid sequence of At2g47880 from Arabidopsis thaliana, e.g. as shown in the respective line in column 5 of Table I, application no. 2 is unpublished. And the activity of the gene product thereof is the activity of glutaredoxin.

[9288] Accordingly, in one embodiment, the process of the present invention for producing arginine in a non-human organism, like a microorganism or a plant or a part thereof, comprises increasing or generating the activity of a gene product with the activity of a gene product conferring the activity of “glutaredoxin”, especially from Arabidopsis thaliana or its functional equivalent or its homolog, e.g. the increase of
[9289] (a) a gene product of a gene comprising the nucleic acid molecule as shown in the respective line in column 5 of Table I, application no. 2, preferably the coding region thereof, or a homolog or a fragment thereof, and being depicted in the same respective line as said At2g47880, or a functional equivalent or a homolog thereof as shown in column 8 of Table I, application no. 2, preferably the coding region thereof, particularly a homolog or functional equivalent as shown in column 8 of Table I B, application no. 2, and being depicted in the same respective line as said At2g47880, and preferably the activity is increased non-targeted, or
[9290] (b) a polypeptide comprising a polypeptide, a consensus sequence or at least a polypeptide motif as shown in the respective line in column 5 of Table II or in column 8 of Table IV, application no. 2, respectively, and being depicted in the same respective line as said At2g47880, or a functional equivalent or a homolog thereof as depicted in column 8 of Table II, application no. 2, preferably a homolog or functional equivalent as depicted in column 8 of Table II B, application no. 2, and being depicted in the same respective line as said At2g47880, and preferably the activity is increased non-targeted.

[9291] Accordingly, in one embodiment, the molecule which activity is to be increased in the process of the invention is the gene product with an activity as a “glutaredoxin”, preferably it is the molecule of section (a) or (b) of this paragraph.

[9292] In particular, it was observed that in plants, especially in Arabidopsis thaliana, increasing or generating the activity of a gene product non-targeted with the activity of a “glutaredoxin”, preferably being encoded by a gene comprising the nucleic acid sequence SEQ ID NO. 21159, preferably the coding region thereof, conferred the production of or the increase in arginine compared with the wild type control.

[9293] The nucleic acid sequence of At2g47880 from Arabidopsis thaliana, e.g. as shown in the respective line in column 5 of Table I, application no. 2 is unpublished. And the activity of the gene product thereof is the activity of glutaredoxin.

[9294] Accordingly, in one embodiment, the process of the present invention for producing glutamine in a non-human organism, like a microorganism or a plant or a part thereof, comprises increasing or generating the activity of a gene product with the activity of a gene product conferring the activity of “glutaredoxin”, especially from Arabidopsis thaliana or its functional equivalent or its homolog, e.g. the increase of
[9295] (a) a gene product of a gene comprising the nucleic acid molecule as shown in the respective line in column 5 of Table I, application no. 2, preferably the coding region thereof, or a homolog or a fragment thereof, and being depicted in the same respective line as said At2g47880, or a functional equivalent or a homolog thereof as shown in column 8 of Table I, application no. 2, preferably the coding region thereof, particularly a homolog or functional equivalent as shown in column 8 of Table I B, application no. 2, and being depicted in the same respective line as said At2g47880, and preferably the activity is increased non-targeted, or
[9296] (b) a polypeptide comprising a polypeptide, a consensus sequence or at least a polypeptide motif as shown in the respective line in column 5 of Table II or in column 8 of Table IV, application no. 2, respectively, and being depicted in the same respective line as said At2g47880, or a functional equivalent or a homolog thereof as depicted in column 8 of Table II, application no. 2, preferably a homolog or functional equivalent as depicted in column 8 of Table II B, application no. 2, and being depicted in the same respective line as said At2g47880, and preferably the activity is increased non-targeted.

[9297] Accordingly, in one embodiment, the molecule which activity is to be increased in the process of the invention is the gene product with an activity as a “glutaredoxin”, preferably it is the molecule of section (a) or (b) of this paragraph.

[9298] In particular, it was observed that in plants, especially in Arabidopsis thaliana, increasing or generating the activity of a gene product non-targeted with the activity of a “glutaredoxin”, preferably being encoded by a gene comprising the nucleic acid sequence SEQ ID NO. 21159, preferably the coding region thereof, conferred the production of or the increase in glutamine compared with the wild type control.

[9299] The nucleic acid sequence of At2g47880 from Arabidopsis thaliana, e.g. as shown in the respective line in column 5 of Table I, application no. 2 is unpublished. And the activity of the gene product thereof is the activity of glutaredoxin.

[9300] Accordingly, in one embodiment, the process of the present invention for producing proline in a non-human organism, like a microorganism or a plant or a part thereof, comprises increasing or generating the activity of a gene product with the activity of a gene product conferring the activity of “glutaredoxin”, especially from Arabidopsis thaliana or its functional equivalent or its homolog, e.g. the increase of
[9301] (a) a gene product of a gene comprising the nucleic acid molecule as shown in the respective line in column 5 of Table I, application no. 2, preferably the coding region thereof, or a homolog or a fragment thereof, and being depicted in the same respective line as said At2g47880, or a functional equivalent or a homolog thereof as shown in column 8 of Table I, application no. 2, preferably the coding region thereof, particularly a homolog or functional equivalent as shown in column 8 of Table I B, application no. 2, and being depicted in the same respective line as said At2g47880, and preferably the activity is increased non-targeted, or
[9302] (b) a polypeptide comprising a polypeptide, a consensus sequence or at least a polypeptide motif as shown in the respective line in column 5 of Table II or in column 8 of Table IV, application no. 2, respectively, and being depicted in the same respective line as said At2g47880, or a functional equivalent or a homolog thereof as depicted in column 8 of Table II, application no. 2, preferably a homolog or functional equivalent as depicted in column 8 of Table II B, application no. 2, and being depicted in the same respective line as said At2g47880, and preferably the activity is increased non-targeted.

[9303] Accordingly, in one embodiment, the molecule which activity is to be increased in the process of the invention is the gene product with an activity as a “glutaredoxin”, preferably it is the molecule of section (a) or (b) of this paragraph.

[9304] In particular, it was observed that in plants, especially in Arabidopsis thaliana, increasing or generating the activity of a gene product non-targeted with the activity of a “glutaredoxin”, preferably being encoded by a gene comprising the nucleic acid sequence SEQ ID NO. 21159, preferably the coding region thereof, conferred the production of or the increase in proline compared with the wild type control.

[9305] The nucleic acid sequence of At3g04050 from Arabidopsis thaliana, e.g. as shown in the respective line in column 5 of Table I, application no. 2 is unpublished. And the activity of the gene product thereof is the activity of pyruvate kinase.

[9306] Accordingly, in one embodiment, the process of the present invention for producing glutamate in a non-human organism, like a microorganism or a plant or a part thereof, comprises increasing or generating the activity of a gene product with the activity of a gene product conferring the activity of “pyruvate kinase”, especially from Arabidopsis thaliana or its functional equivalent or its homolog, e.g. the increase of
[9307] (a) a gene product of a gene comprising the nucleic acid molecule as shown in the respective line in column 5 of Table I, application no. 2, preferably the coding region thereof, or a homolog or a fragment thereof, and being depicted in the same respective line as said At3g04050, or a functional equivalent or a homolog thereof as shown in column 8 of Table I, application no. 2, preferably the coding region thereof, particularly a homolog or functional equivalent as shown in column 8 of Table I B, application no. 2, and being depicted in the same respective line as said At3g04050, and preferably the activity is increased plastidic, or
[9308] (b) a polypeptide comprising a polypeptide, a consensus sequence or at least a polypeptide motif as shown in the respective line in column 5 of Table II or in column 8 of Table IV, application no. 2, respectively, and being depicted in the same respective line as said At3g04050, or a functional equivalent or a homolog thereof as depicted in column 8 of Table II, application no. 2, preferably a homolog or functional equivalent as depicted in column 8 of Table II B, application no. 2, and being depicted in the same respective line as said At3g04050, and preferably the activity is increased plastidic.

[9309] Accordingly, in one embodiment, the molecule which activity is to be increased in the process of the invention is the gene product with an activity as a “pyruvate kinase”, preferably it is the molecule of section (a) or (b) of this paragraph.

[9310] In particular, it was observed that in plants, especially in Arabidopsis thaliana, increasing or generating the activity of a gene product plastidic with the activity of a “pyruvate kinase”, preferably being encoded by a gene comprising the nucleic acid sequence SEQ ID NO. 21497, preferably the coding region thereof, conferred the production of or the increase in glutamate compared with the wild type control.

[9311] The nucleic acid sequence of At3g04050 from Arabidopsis thaliana, e.g. as shown in the respective line in column 5 of Table I, application no. 2 is unpublished. And the activity of the gene product thereof is the activity of pyruvate kinase.

[9312] Accordingly, in one embodiment, the process of the present invention for producing proline in a non-human organism, like a microorganism or a plant or a part thereof, comprises increasing or generating the activity of a gene product with the activity of a gene product conferring the activity of “pyruvate kinase”, especially from Arabidopsis thaliana or its functional equivalent or its homolog, e.g. the increase of
[9313] (a) a gene product of a gene comprising the nucleic acid molecule as shown in the respective line in column 5 of Table I, application no. 2, preferably the coding region thereof, or a homolog or a fragment thereof, and being depicted in the same respective line as said At3g04050, or a functional equivalent or a homolog thereof as shown in column 8 of Table I, application no. 2, preferably the coding region thereof, particularly a homolog or functional equivalent as shown in column 8 of Table I B, application no. 2, and being depicted in the same respective line as said At3g04050, and preferably the activity is increased plastidic, or
[9314] (b) a polypeptide comprising a polypeptide, a consensus sequence or at least a polypeptide motif as shown in the respective line in column 5 of Table II or in column 8 of Table IV, application no. 2, respectively, and being depicted in the same respective line as said At3g04050, or a functional equivalent or a homolog thereof as depicted in column 8 of Table II, application no. 2, preferably a homolog or functional equivalent as depicted in column 8 of Table II B, application no. 2, and being depicted in the same respective line as said At3g04050, and preferably the activity is increased plastidic.

[9315] Accordingly, in one embodiment, the molecule which activity is to be increased in the process of the invention is the gene product with an activity as a “pyruvate kinase”, preferably it is the molecule of section (a) or (b) of this paragraph.

[9316] In particular, it was observed that in plants, especially in Arabidopsis thaliana, increasing or generating the activity of a gene product plastidic with the activity of a “pyruvate kinase”, preferably being encoded by a gene comprising the nucleic acid sequence SEQ ID NO. 21497, preferably the coding region thereof, conferred the production of or the increase in proline compared with the wild type control.

[9317] The nucleic acid sequence of At3g04710 from Arabidopsis thaliana, e.g. as shown in the respective line in column 5 of Table I, application no. 2 is unpublished. And the activity of the gene product thereof is the activity of ankyrin repeat family protein.

[9318] Accordingly, in one embodiment, the process of the present invention for producing proline in a non-human organism, like a microorganism or a plant or a part thereof, comprises increasing or generating the activity of a gene product with the activity of a gene product conferring the activity of “ankyrin repeat family protein”, especially from Arabidopsis thaliana or its functional equivalent or its homolog, e.g. the increase of
[9319] (a) a gene product of a gene comprising the nucleic acid molecule as shown in the respective line in column 5 of Table I, application no. 2, preferably the coding region thereof, or a homolog or a fragment thereof, and being depicted in the same respective line as said At3g04710, or a functional equivalent or a homolog thereof as shown in column 8 of Table I, application no. 2, preferably the coding region thereof, particularly a homolog or functional equivalent as shown in column 8 of Table I B, application no. 2, and being depicted in the same respective line as said At3g04710, and preferably the activity is increased non-targeted, or
[9320] (b) a polypeptide comprising a polypeptide, a consensus sequence or at least a polypeptide motif as shown in the respective line in column 5 of Table II or in column 8 of Table IV, application no. 2, respectively, and being depicted in the same respective line as said At3g04710, or a functional equivalent or a homolog thereof as depicted in column 8 of Table II, application no. 2, preferably a homolog or functional equivalent as depicted in column 8 of Table II B, application no. 2, and being depicted in the same respective line as said At3g04710, and preferably the activity is increased non-targeted.

[9321] Accordingly, in one embodiment, the molecule which activity is to be increased in the process of the invention is the gene product with an activity as a “ankyrin repeat family protein”, preferably it is the molecule of section (a) or (b) of this paragraph.

[9322] In particular, it was observed that in plants, especially in Arabidopsis thaliana, increasing or generating the activity of a gene product non-targeted with the activity of a “ankyrin repeat family protein”, preferably being encoded by a gene comprising the nucleic acid sequence SEQ ID NO. 21902, preferably the coding region thereof, conferred the production of or the increase in proline compared with the wild type control.

[9323] The nucleic acid sequence of At3g06270 from Arabidopsis thaliana, e.g. as shown in the respective line in column 5 of Table I, application no. 2 is unpublished. And the activity of the gene product thereof is the activity of protein phosphatase.

[9324] Accordingly, in one embodiment, the process of the present invention for producing glutamate in a non-human organism, like a microorganism or a plant or a part thereof, comprises increasing or generating the activity of a gene product with the activity of a gene product conferring the activity of “protein phosphatase”, especially from Arabidopsis thaliana or its functional equivalent or its homolog, e.g. the increase of
[9325] (a) a gene product of a gene comprising the nucleic acid molecule as shown in the respective line in column 5 of Table I, application no. 2, preferably the coding region thereof, or a homolog or a fragment thereof, and being depicted in the same respective line as said At3g06270, or a functional equivalent or a homolog thereof as shown in column 8 of Table I, application no. 2, preferably the coding region thereof, particularly a homolog or functional equivalent as shown in column 8 of Table I B, application no. 2, and being depicted in the same respective line as said At3g06270, and preferably the activity is increased non-targeted, or
[9326] (b) a polypeptide comprising a polypeptide, a consensus sequence or at least a polypeptide motif as shown in the respective line in column 5 of Table II or in column 8 of Table IV, application no. 2, respectively, and being depicted in the same respective line as said At3g06270, or a functional equivalent or a homolog thereof as depicted in column 8 of Table II, application no. 2, preferably a homolog or functional equivalent as depicted in column 8 of Table II B, application no. 2, and being depicted in the same respective line as said At3g06270, and preferably the activity is increased non-targeted.

[9327] Accordingly, in one embodiment, the molecule which activity is to be increased in the process of the invention is the gene product with an activity as a “protein phosphatase”, preferably it is the molecule of section (a) or (b) of this paragraph.

[9328] In particular, it was observed that in plants, especially in Arabidopsis thaliana, increasing or generating the activity of a gene product non-targeted with the activity of a “protein phosphatase”, preferably being encoded by a gene comprising the nucleic acid sequence SEQ ID NO. 22015, preferably the coding region thereof, conferred the production of or the increase in glutamate compared with the wild type control.

[9329] The nucleic acid sequence of At3g08710 from Arabidopsis thaliana, e.g. as shown in the respective line in column 5 of Table I, application no. 2 is unpublished. And the activity of the gene product thereof is the activity of thioredoxin family protein.

[9330] Accordingly, in one embodiment, the process of the present invention for producing arginine in a non-human organism, like a microorganism or a plant or a part thereof, comprises increasing or generating the activity of a gene product with the activity of a gene product conferring the activity of “thioredoxin family protein”, especially from Arabidopsis thaliana or its functional equivalent or its homolog, e.g. the increase of
[9331] (a) a gene product of a gene comprising the nucleic acid molecule as shown in the respective line in column 5 of Table I, application no. 2, preferably the coding region thereof, or a homolog or a fragment thereof, and being depicted in the same respective line as said At3g08710, or a functional equivalent or a homolog thereof as shown in column 8 of Table I, application no. 2, preferably the coding region thereof, particularly a homolog or functional equivalent as shown in column 8 of Table I B, application no. 2, and being depicted in the same respective line as said At3g08710, and preferably the activity is increased non-targeted, or
[9332] (b) a polypeptide comprising a polypeptide, a consensus sequence or at least a polypeptide motif as shown in the respective line in column 5 of Table II or in column 8 of Table IV, application no. 2, respectively, and being depicted in the same respective line as said At3g08710, or a functional equivalent or a homolog thereof as depicted in column 8 of Table II, application no. 2, preferably a homolog or functional equivalent as depicted in column 8 of Table II B, application no. 2, and being depicted in the same respective line as said At3g08710, and preferably the activity is increased non-targeted.

[9333] Accordingly, in one embodiment, the molecule which activity is to be increased in the process of the invention is the gene product with an activity as a “thioredoxin family protein”, preferably it is the molecule of section (a) or (b) of this paragraph.

[9334] In particular, it was observed that in plants, especially in Arabidopsis thaliana, increasing or generating the activity of a gene product non-targeted with the activity of a “thioredoxin family protein”, preferably being encoded by a gene comprising the nucleic acid sequence SEQ ID NO. 22249, preferably the coding region thereof, conferred the production of or the increase in arginine compared with the wild type control.

[9335] The nucleic acid sequence of At3g08710 from Arabidopsis thaliana, e.g. as shown in the respective line in column 5 of Table I, application no. 2 is unpublished. And the activity of the gene product thereof is the activity of thioredoxin family protein.

[9336] Accordingly, in one embodiment, the process of the present invention for producing glutamate in a non-human organism, like a microorganism or a plant or a part thereof, comprises increasing or generating the activity of a gene product with the activity of a gene product conferring the activity of “thioredoxin family protein”, especially from Arabidopsis thaliana or its functional equivalent or its homolog, e.g. the increase of
[9337] (a) a gene product of a gene comprising the nucleic acid molecule as shown in the respective line in column 5 of Table I, application no. 2, preferably the coding region thereof, or a homolog or a fragment thereof, and being depicted in the same respective line as said At3g08710, or a functional equivalent or a homolog thereof as shown in column 8 of Table I, application no. 2, preferably the coding region thereof, particularly a homolog or functional equivalent as shown in column 8 of Table I B, application no. 2, and being depicted in the same respective line as said At3g08710, and preferably the activity is increased non-targeted, or
[9338] (b) a polypeptide comprising a polypeptide, a consensus sequence or at least a polypeptide motif as shown in the respective line in column 5 of Table II or in column 8 of Table IV, application no. 2, respectively, and being depicted in the same respective line as said At3g08710, or a functional equivalent or a homolog thereof as depicted in column 8 of Table II, application no. 2, preferably a homolog or functional equivalent as depicted in column 8 of Table II B, application no. 2, and being depicted in the same respective line as said At3g08710, and preferably the activity is increased non-targeted.

[9339] Accordingly, in one embodiment, the molecule which activity is to be increased in the process of the invention is the gene product with an activity as a “thioredoxin family protein”, preferably it is the molecule of section (a) or (b) of this paragraph.

[9340] In particular, it was observed that in plants, especially in Arabidopsis thaliana, increasing or generating the activity of a gene product non-targeted with the activity of a “thioredoxin family protein”, preferably being encoded by a gene comprising the nucleic acid sequence SEQ ID NO. 22249, preferably the coding region thereof, conferred the production of or the increase in glutamate compared with the wild type control.

[9341] The nucleic acid sequence of At3g08710 from Arabidopsis thaliana, e.g. as shown in the respective line in column 5 of Table I, application no. 2 is unpublished. And the activity of the gene product thereof is the activity of thioredoxin family protein.

[9342] Accordingly, in one embodiment, the process of the present invention for producing glutamine in a non-human organism, like a microorganism or a plant or a part thereof, comprises increasing or generating the activity of a gene product with the activity of a gene product conferring the activity of “thioredoxin family protein”, especially from Arabidopsis thaliana or its functional equivalent or its homolog, e.g. the increase of
[9343] (a) a gene product of a gene comprising the nucleic acid molecule as shown in the respective line in column 5 of Table I, application no. 2, preferably the coding region thereof, or a homolog or a fragment thereof, and being depicted in the same respective line as said At3g08710, or a functional equivalent or a homolog thereof as shown in column 8 of Table I, application no. 2, preferably the coding region thereof, particularly a homolog or functional equivalent as shown in column 8 of Table I B, application no. 2, and being depicted in the same respective line as said At3g08710, and preferably the activity is increased non-targeted, or
[9344] (b) a polypeptide comprising a polypeptide, a consensus sequence or at least a polypeptide motif as shown in the respective line in column 5 of Table II or in column 8 of Table IV, application no. 2, respectively, and being depicted in the same respective line as said At3g08710, or a functional equivalent or a homolog thereof as depicted in column 8 of Table II, application no. 2, preferably a homolog or functional equivalent as depicted in column 8 of Table II B, application no. 2, and being depicted in the same respective line as said At3g08710, and preferably the activity is increased non-targeted.

[9345] Accordingly, in one embodiment, the molecule which activity is to be increased in the process of the invention is the gene product with an activity as a “thioredoxin family protein”, preferably it is the molecule of section (a) or (b) of this paragraph.

[9346] In particular, it was observed that in plants, especially in Arabidopsis thaliana, increasing or generating the activity of a gene product non-targeted with the activity of a “thioredoxin family protein”, preferably being encoded by a gene comprising the nucleic acid sequence SEQ ID NO. 22249, preferably the coding region thereof, conferred the production of or the increase in glutamine compared with the wild type control.

[9347] The nucleic acid sequence of At3g08710 from Arabidopsis thaliana, e.g. as shown in the respective line in column 5 of Table I, application no. 2 is unpublished. And the activity of the gene product thereof is the activity of thioredoxin family protein.

[9348] Accordingly, in one embodiment, the process of the present invention for producing proline in a non-human organism, like a microorganism or a plant or a part thereof, comprises increasing or generating the activity of a gene product with the activity of a gene product conferring the activity of “thioredoxin family protein”, especially from Arabidopsis thaliana or its functional equivalent or its homolog, e.g. the increase of
[9349] (a) a gene product of a gene comprising the nucleic acid molecule as shown in the respective line in column 5 of Table I, application no. 2, preferably the coding region thereof, or a homolog or a fragment thereof, and being depicted in the same respective line as said At3g08710, or a functional equivalent or a homolog thereof as shown in column 8 of Table I, application no. 2, preferably the coding region thereof, particularly a homolog or functional equivalent as shown in column 8 of Table I B, application no. 2, and being depicted in the same respective line as said At3g08710, and preferably the activity is increased non-targeted, or
[9350] (b) a polypeptide comprising a polypeptide, a consensus sequence or at least a polypeptide motif as shown in the respective line in column 5 of Table II or in column 8 of Table IV, application no. 2, respectively, and being depicted in the same respective line as said At3g08710, or a functional equivalent or a homolog thereof as depicted in column 8 of Table II, application no. 2, preferably a homolog or functional equivalent as depicted in column 8 of Table II B, application no. 2, and being depicted in the same respective line as said At3g08710, and preferably the activity is increased non-targeted.

[9351] Accordingly, in one embodiment, the molecule which activity is to be increased in the process of the invention is the gene product with an activity as a “thioredoxin family protein”, preferably it is the molecule of section (a) or (b) of this paragraph.

[9352] In particular, it was observed that in plants, especially in Arabidopsis thaliana, increasing or generating the activity of a gene product non-targeted with the activity of a “thioredoxin family protein”, preferably being encoded by a gene comprising the nucleic acid sequence SEQ ID NO. 22249, preferably the coding region thereof, conferred the production of or the increase in proline compared with the wild type control.

[9353] The nucleic acid sequence of At3g11650 from Arabidopsis thaliana, e.g. as shown in the respective line in column 5 of Table I, application no. 2 is unpublished. And the activity of the gene product thereof is the activity of harpin-induced family protein.

[9354] Accordingly, in one embodiment, the process of the present invention for producing arginine in a non-human organism, like a microorganism or a plant or a part thereof, comprises increasing or generating the activity of a gene product with the activity of a gene product conferring the activity of “harpin-induced family protein”, especially from Arabidopsis thaliana or its functional equivalent or its homolog, e.g. the increase of
[9355] (a) a gene product of a gene comprising the nucleic acid molecule as shown in the respective line in column 5 of Table I, application no. 2, preferably the coding region thereof, or a homolog or a fragment thereof, and being depicted in the same respective line as said At3g11650, or a functional equivalent or a homolog thereof as shown in column 8 of Table I, application no. 2, preferably the coding region thereof, particularly a homolog or functional equivalent as shown in column 8 of Table I B, application no. 2, and being depicted in the same respective line as said At3g11650, and preferably the activity is increased non-targeted, or
[9356] (b) a polypeptide comprising a polypeptide, a consensus sequence or at least a polypeptide motif as shown in the respective line in column 5 of Table II or in column 8 of Table IV, application no. 2, respectively, and being depicted in the same respective line as said At3g11650, or a functional equivalent or a homolog thereof as depicted in column 8 of Table II, application no. 2, preferably a homolog or functional equivalent as depicted in column 8 of Table II B, application no. 2, and being depicted in the same respective line as said At3g11650, and preferably the activity is increased non-targeted,.

[9357] Accordingly, in one embodiment, the molecule which activity is to be increased in the process of the invention is the gene product with an activity as a “harpin-induced family protein”, preferably it is the molecule of section (a) or (b) of this paragraph.

[9358] In particular, it was observed that in plants, especially in Arabidopsis thaliana, increasing or generating the activity of a gene product non-targeted with the activity of a “harpin-induced family protein”, preferably being encoded by a gene comprising the nucleic acid sequence SEQ ID NO. 22611, preferably the coding region thereof, conferred the production of or the increase in arginine compared with the wild type control.

[9359] The nucleic acid sequence of At3g11650 from Arabidopsis thaliana, e.g. as shown in the respective line in column 5 of Table I, application no. 2 is unpublished. And the activity of the gene product thereof is the activity of harpin-induced family protein.

[9360] Accordingly, in one embodiment, the process of the present invention for producing glutamine in a non-human organism, like a microorganism or a plant or a part thereof, comprises increasing or generating the activity of a gene product with the activity of a gene product conferring the activity of “harpin-induced family protein”, especially from Arabidopsis thaliana or its functional equivalent or its homolog, e.g. the increase of
[9361] (a) a gene product of a gene comprising the nucleic acid molecule as shown in the respective line in column 5 of Table I, application no. 2, preferably the coding region thereof, or a homolog or a fragment thereof, and being depicted in the same respective line as said At3g11650, or a functional equivalent or a homolog thereof as shown in column 8 of Table I, application no. 2, preferably the coding region thereof, particularly a homolog or functional equivalent as shown in column 8 of Table I B, application no. 2, and being depicted in the same respective line as said At3g11650, and preferably the activity is increased non-targeted, or
[9362] (b) a polypeptide comprising a polypeptide, a consensus sequence or at least a polypeptide motif as shown in the respective line in column 5 of Table II or in column 8 of Table IV, application no. 2, respectively, and being depicted in the same respective line as said At3g11650, or a functional equivalent or a homolog thereof as depicted in column 8 of Table II, application no. 2, preferably a homolog or functional equivalent as depicted in column 8 of Table II B, application no. 2, and being depicted in the same respective line as said At3g11650, and preferably the activity is increased non-targeted.

[9363] Accordingly, in one embodiment, the molecule which activity is to be increased in the process of the invention is the gene product with an activity as a “harpin-induced family protein”, preferably it is the molecule of section (a) or (b) of this paragraph.

[9364] In particular, it was observed that in plants, especially in Arabidopsis thaliana, increasing or generating the activity of a gene product non-targeted with the activity of a “harpin-induced family protein”, preferably being encoded by a gene comprising the nucleic acid sequence SEQ ID NO. 22611, preferably the coding region thereof, conferred the production of or the increase in glutamine compared with the wild type control.

[9365] The nucleic acid sequence of At3g11650 from Arabidopsis thaliana, e.g. as shown in the respective line in column 5 of Table I, application no. 2 is unpublished. And the activity of the gene product thereof is the activity of harpin-induced family protein.

[9366] Accordingly, in one embodiment, the process of the present invention for producing proline in a non-human organism, like a microorganism or a plant or a part thereof, comprises increasing or generating the activity of a gene product with the activity of a gene product conferring the activity of “harpin-induced family protein”, especially from Arabidopsis thaliana or its functional equivalent or its homolog, e.g. the increase of
[9367] (a) a gene product of a gene comprising the nucleic acid molecule as shown in the respective line in column 5 of Table I, application no. 2, preferably the coding region thereof, or a homolog or a fragment thereof, and being depicted in the same respective line as said At3g11650, or a functional equivalent or a homolog thereof as shown in column 8 of Table I, application no. 2, preferably the coding region thereof, particularly a homolog or functional equivalent as shown in column 8 of Table I B, application no. 2, and being depicted in the same respective line as said At3g11650, and preferably the activity is increased non-targeted, or
[9368] (b) a polypeptide comprising a polypeptide, a consensus sequence or at least a polypeptide motif as shown in the respective line in column 5 of Table II or in column 8 of Table IV, application no. 2, respectively, and being depicted in the same respective line as said At3g11650, or a functional equivalent or a homolog thereof as depicted in column 8 of Table II, application no. 2, preferably a homolog or functional equivalent as depicted in column 8 of Table II B, application no. 2, and being depicted in the same respective line as said At3g11650, and preferably the activity is increased non-targeted.

[9369] Accordingly, in one embodiment, the molecule which activity is to be increased in the process of the invention is the gene product with an activity as a “harpin-induced family protein”, preferably it is the molecule of section (a) or (b) of this paragraph.

[9370] In particular, it was observed that in plants, especially in Arabidopsis thaliana, increasing or generating the activity of a gene product non-targeted with the activity of a “harpin-induced family protein”, preferably being encoded by a gene comprising the nucleic acid sequence SEQ ID NO. 22611, preferably the coding region thereof, conferred the production of or the increase in proline compared with the wild type control.

[9371] The nucleic acid sequence of At3g14230 from Arabidopsis thaliana, e.g. as shown in the respective line in column 5 of Table I, application no. 2 is unpublished. And the activity of the gene product thereof is the activity of DNA binding protein.

[9372] Accordingly, in one embodiment, the process of the present invention for producing proline in a non-human organism, like a microorganism or a plant or a part thereof, comprises increasing or generating the activity of a gene product with the activity of a gene product conferring the activity of “DNA binding protein”, especially from Arabidopsis thaliana or its functional equivalent or its homolog, e.g. the increase of
[9373] (a) a gene product of a gene comprising the nucleic acid molecule as shown in the respective line in column 5 of Table I, application no. 2, preferably the coding region thereof, or a homolog or a fragment thereof, and being depicted in the same respective line as said At3g14230, or a functional equivalent or a homolog thereof as shown in column 8 of Table I, application no. 2, preferably the coding region thereof, particularly a homolog or functional equivalent as shown in column 8 of Table I B, application no. 2, and being depicted in the same respective line as said At3g14230, and preferably the activity is increased plastidic, or
[9374] (b) a polypeptide comprising a polypeptide, a consensus sequence or at least a polypeptide motif as shown in the respective line in column 5 of Table II or in column 8 of Table IV, application no. 2, respectively, and being depicted in the same respective line as said At3g14230, or a functional equivalent or a homolog thereof as depicted in column 8 of Table II, application no. 2, preferably a homolog or functional equivalent as depicted in column 8 of Table II B, application no. 2, and being depicted in the same respective line as said At3g14230, and preferably the activity is increased plastidic.

[9375] Accordingly, in one embodiment, the molecule which activity is to be increased in the process of the invention is the gene product with an activity as a “DNA binding protein”, preferably it is the molecule of section (a) or (b) of this paragraph.

[9376] In particular, it was observed that in plants, especially in Arabidopsis thaliana, increasing or generating the activity of a gene product plastidic with the activity of a “DNA binding protein”, preferably being encoded by a gene comprising the nucleic acid sequence SEQ ID NO. 22699, preferably the coding region thereof, conferred the production of or the increase in proline compared with the wild type control.

[9377] The nucleic acid sequence of At3g18524 from Arabidopsis thaliana, e.g. as shown in the respective line in column 5 of Table I, application no. 2 is unpublished. And the activity of the gene product thereof is the activity of DNA mismatch repair protein.

[9378] Accordingly, in one embodiment, the process of the present invention for producing proline in a non-human organism, like a microorganism or a plant or a part thereof, comprises increasing or generating the activity of a gene product with the activity of a gene product conferring the activity of “DNA mismatch repair protein”, especially from Arabidopsis thaliana or its functional equivalent or its homolog, e.g. the increase of
[9379] (a) a gene product of a gene comprising the nucleic acid molecule as shown in the respective line in column 5 of Table I, application no. 2, preferably the coding region thereof, or a homolog or a fragment thereof, and being depicted in the same respective line as said At3g18524, or a functional equivalent or a homolog thereof as shown in column 8 of Table I, application no. 2, preferably the coding region thereof, particularly a homolog or functional equivalent as shown in column 8 of Table I B, application no. 2, and being depicted in the same respective line as said At3g18524, and preferably the activity is increased non-targeted, or
[9380] (b) a polypeptide comprising a polypeptide, a consensus sequence or at least a polypeptide motif as shown in the respective line in column 5 of Table II or in column 8 of Table IV, application no. 2, respectively, and being depicted in the same respective line as said At3g18524, or a functional equivalent or a homolog thereof as depicted in column 8 of Table II, application no. 2, preferably a homolog or functional equivalent as depicted in column 8 of Table II B, application no. 2, and being depicted in the same respective line as said At3g18524, and preferably the activity is increased non-targeted.

[9381] Accordingly, in one embodiment, the molecule which activity is to be increased in the process of the invention is the gene product with an activity as a “DNA mismatch repair protein”, preferably it is the molecule of section (a) or (b) of this paragraph.

[9382] In particular, it was observed that in plants, especially in Arabidopsis thaliana, increasing or generating the activity of a gene product non-targeted with the activity of a “DNA mismatch repair protein”, preferably being encoded by a gene comprising the nucleic acid sequence SEQ ID NO. 22832, preferably the coding region thereof, conferred the production of or the increase in proline compared with the wild type control.

[9383] The nucleic acid sequence of At3g20910 from Arabidopsis thaliana, e.g. as shown in the respective line in column 5 of Table I, application no. 2 is unpublished. And the activity of the gene product thereof is the activity of CCAAT-binding transcription factor.

[9384] Accordingly, in one embodiment, the process of the present invention for producing proline in a non-human organism, like a microorganism or a plant or a part thereof, comprises increasing or generating the activity of a gene product with the activity of a gene product conferring the activity of “CCAAT-binding transcription factor”, especially from Arabidopsis thaliana or its functional equivalent or its homolog, e.g. the increase of
[9385] (a) a gene product of a gene comprising the nucleic acid molecule as shown in the respective line in column 5 of Table I, application no. 2, preferably the coding region thereof, or a homolog or a fragment thereof, and being depicted in the same respective line as said At3g20910, or a functional equivalent or a homolog thereof as shown in column 8 of Table I, application no. 2, preferably the coding region thereof, particularly a homolog or functional equivalent as shown in column 8 of Table I B, application no. 2, and being depicted in the same respective line as said At3g20910, and preferably the activity is increased non-targeted, or
[9386] (b) a polypeptide comprising a polypeptide, a consensus sequence or at least a polypeptide motif as shown in the respective line in column 5 of Table II or in column 8 of Table IV, application no. 2, respectively, and being depicted in the same respective line as said At3g20910, or a functional equivalent or a homolog thereof as depicted in column 8 of Table II, application no. 2, preferably a homolog or functional equivalent as depicted in column 8 of Table II B, application no. 2, and being depicted in the same respective line as said At3g20910, and preferably the activity is increased non-targeted.

[9387] Accordingly, in one embodiment, the molecule which activity is to be increased in the process of the invention is the gene product with an activity as a “CCAAT-binding transcription factor”, preferably it is the molecule of section (a) or (b) of this paragraph.

[9388] In particular, it was observed that in plants, especially in Arabidopsis thaliana, increasing or generating the activity of a gene product non-targeted with the activity of a “CCAAT-binding transcription factor”, preferably being encoded by a gene comprising the nucleic acid sequence SEQ ID NO. 22921, preferably the coding region thereof, conferred the production of or the increase in proline compared with the wild type control.

[9389] The nucleic acid sequence of At3g23000 from Arabidopsis thaliana, e.g. as shown in the respective line in column 5 of Table I, application no. 2 is unpublished. And the activity of the gene product thereof is the activity of protein kinase.

[9390] Accordingly, in one embodiment, the process of the present invention for producing glutamine in a non-human organism, like a microorganism or a plant or a part thereof, comprises increasing or generating the activity of a gene product with the activity of a gene product conferring the activity of “protein kinase”, especially from Arabidopsis thaliana or its functional equivalent or its homolog, e.g. the increase of
[9391] (a) a gene product of a gene comprising the nucleic acid molecule as shown in the respective line in column 5 of Table I, application no. 2, preferably the coding region thereof, or a homolog or a fragment thereof, and being depicted in the same respective line as said At3g23000, or a functional equivalent or a homolog thereof as shown in column 8 of Table I, application no. 2, preferably the coding region thereof, particularly a homolog or functional equivalent as shown in column 8 of Table I B, application no. 2, and being depicted in the same respective line as said At3g23000, and preferably the activity is increased non-targeted, or
[9392] (b) a polypeptide comprising a polypeptide, a consensus sequence or at least a polypeptide motif as shown in the respective line in column 5 of Table II or in column 8 of Table IV, application no. 2, respectively, and being depicted in the same respective line as said At3g23000, or a functional equivalent or a homolog thereof as depicted in column 8 of Table II, application no. 2, preferably a homolog or functional equivalent as depicted in column 8 of Table II B, application no. 2, and being depicted in the same respective line as said At3g23000, and preferably the activity is increased non-targeted.

[9393] Accordingly, in one embodiment, the molecule which activity is to be increased in the process of the invention is the gene product with an activity as a “protein kinase”, preferably it is the molecule of section (a) or (b) of this paragraph.

[9394] In particular, it was observed that in plants, especially in Arabidopsis thaliana, increasing or generating the activity of a gene product non-targeted with the activity of a “protein kinase”, preferably being encoded by a gene comprising the nucleic acid sequence SEQ ID NO. 1815, preferably the coding region thereof, conferred the production of or the increase in glutamine compared with the wild type control.

[9395] The nucleic acid sequence of At3g27300 from Arabidopsis thaliana, e.g. as shown in the respective line in column 5 of Table I, application no. 2 is unpublished. And the activity of the gene product thereof is the activity of glucose-6-phosphate 1-dehydrogenase.

[9396] Accordingly, in one embodiment, the process of the present invention for producing proline in a non-human organism, like a microorganism or a plant or a part thereof, comprises increasing or generating the activity of a gene product with the activity of a gene product conferring the activity of “glucose-6-phosphate 1-dehydrogenase”, especially from Arabidopsis thaliana or its functional equivalent or its homolog, e.g. the increase of
[9397] (a) a gene product of a gene comprising the nucleic acid molecule as shown in the respective line in column 5 of Table I, application no. 2, preferably the coding region thereof, or a homolog or a fragment thereof, and being depicted in the same respective line as said At3g27300, or a functional equivalent or a homolog thereof as shown in column 8 of Table I, application no. 2, preferably the coding region thereof, particularly a homolog or functional equivalent as shown in column 8 of Table I B, application no. 2, and being depicted in the same respective line as said At3g27300, and preferably the activity is increased non-targeted, or
[9398] (b) a polypeptide comprising a polypeptide, a consensus sequence or at least a polypeptide motif as shown in the respective line in column 5 of Table II or in column 8 of Table IV, application no. 2, respectively, and being depicted in the same respective line as said At3g27300, or a functional equivalent or a homolog thereof as depicted in column 8 of Table II, application no. 2, preferably a homolog or functional equivalent as depicted in column 8 of Table II B, application no. 2, and being depicted in the same respective line as said At3g27300, and preferably the activity is increased non-targeted.

[9399] Accordingly, in one embodiment, the molecule which activity is to be increased in the process of the invention is the gene product with an activity as a “glucose-6-phosphate 1-dehydrogenase”, preferably it is the molecule of section (a) or (b) of this paragraph.

[9400] In particular, it was observed that in plants, especially in Arabidopsis thaliana, increasing or generating the activity of a gene product non-targeted with the activity of a “glucose-6-phosphate 1-dehydrogenase”, preferably being encoded by a gene comprising the nucleic acid sequence SEQ ID NO. 23002, preferably the coding region thereof, conferred the production of or the increase in proline compared with the wild type control.

[9401] The nucleic acid sequence of At3g62930 from Arabidopsis thaliana, e.g. as shown in the respective line in column 5 of Table I, application no. 2 is unpublished. And the activity of the gene product thereof is the activity of monthiol glutaredoxin.

[9402] Accordingly, in one embodiment, the process of the present invention for producing glutamate in a non-human organism, like a microorganism or a plant or a part thereof, comprises increasing or generating the activity of a gene product with the activity of a gene product conferring the activity of “monthiol glutaredoxin”, especially from Arabidopsis thaliana or its functional equivalent or its homolog, e.g. the increase of
[9403] (a) a gene product of a gene comprising the nucleic acid molecule as shown in the respective line in column 5 of Table I, application no. 2, preferably the coding region thereof, or a homolog or a fragment thereof, and being depicted in the same respective line as said At3g62930, or a functional equivalent or a homolog thereof as shown in column 8 of Table I, application no. 2, preferably the coding region thereof, particularly a homolog or functional equivalent as shown in column 8 of Table I B, application no. 2, and being depicted in the same respective line as said At3g62930, and preferably the activity is increased non-targeted, or
[9404] (b) a polypeptide comprising a polypeptide, a consensus sequence or at least a polypeptide motif as shown in the respective line in column 5 of Table II or in column 8 of Table IV, application no. 2, respectively, and being depicted in the same respective line as said At3g62930, or a functional equivalent or a homolog thereof as depicted in column 8 of Table II, application no. 2, preferably a homolog or functional equivalent as depicted in column 8 of Table II B, application no. 2, and being depicted in the same respective line as said At3g62930, and preferably the activity is increased non-targeted.

[9405] Accordingly, in one embodiment, the molecule which activity is to be increased in the process of the invention is the gene product with an activity as a “monthiol glutaredoxin”, preferably it is the molecule of section (a) or (b) of this paragraph.

[9406] In particular, it was observed that in plants, especially in Arabidopsis thaliana, increasing or generating the activity of a gene product non-targeted with the activity of a “monthiol glutaredoxin”, preferably being encoded by a gene comprising the nucleic acid sequence SEQ ID NO. 2573, preferably the coding region thereof, conferred the production of or the increase in glutamate compared with the wild type control.

[9407] The nucleic acid sequence of At3g62930 from Arabidopsis thaliana, e.g. as shown in the respective line in column 5 of Table I, application no. 2 is unpublished. And the activity of the gene product thereof is the activity of monthiol glutaredoxin.

[9408] Accordingly, in one embodiment, the process of the present invention for producing glutamine in a non-human organism, like a microorganism or a plant or a part thereof, comprises increasing or generating the activity of a gene product with the activity of a gene product conferring the activity of “monthiol glutaredoxin”, especially from Arabidopsis thaliana or its functional equivalent or its homolog, e.g. the increase of
[9409] (a) a gene product of a gene comprising the nucleic acid molecule as shown in the respective line in column 5 of Table I, application no. 2, preferably the coding region thereof, or a homolog or a fragment thereof, and being depicted in the same respective line as said At3g62930, or a functional equivalent or a homolog thereof as shown in column 8 of Table I, application no. 2, preferably the coding region thereof, particularly a homolog or functional equivalent as shown in column 8 of Table I B, application no. 2, and being depicted in the same respective line as said At3g62930, and preferably the activity is increased non-targeted, or
[9410] (b) a polypeptide comprising a polypeptide, a consensus sequence or at least a polypeptide motif as shown in the respective line in column 5 of Table II or in column 8 of Table IV, application no. 2, respectively, and being depicted in the same respective line as said At3g62930, or a functional equivalent or a homolog thereof as depicted in column 8 of Table II, application no. 2, preferably a homolog or functional equivalent as depicted in column 8 of Table II B, application no. 2, and being depicted in the same respective line as said At3g62930, and preferably the activity is increased non-targeted.

[9411] Accordingly, in one embodiment, the molecule which activity is to be increased in the process of the invention is the gene product with an activity as a “monthiol glutaredoxin”, preferably it is the molecule of section (a) or (b) of this paragraph.

[9412] In particular, it was observed that in plants, especially in Arabidopsis thaliana, increasing or generating the activity of a gene product non-targeted with the activity of a “monthiol glutaredoxin”, preferably being encoded by a gene comprising the nucleic acid sequence SEQ ID NO. 2573, preferably the coding region thereof, conferred the production of or the increase in glutamine compared with the wild type control.

[9413] The nucleic acid sequence of At3g62950 from Arabidopsis thaliana, e.g. as shown in the respective line in column 5 of Table I, application no. 2 is unpublished. And the activity of the gene product thereof is the activity of glutaredoxin.

[9414] Accordingly, in one embodiment, the process of the present invention for producing glutamate in a non-human organism, like a microorganism or a plant or a part thereof, comprises increasing or generating the activity of a gene product with the activity of a gene product conferring the activity of “glutaredoxin”, especially from Arabidopsis thaliana or its functional equivalent or its homolog, e.g. the increase of
[9415] (a) a gene product of a gene comprising the nucleic acid molecule as shown in the respective line in column 5 of Table I, application no. 2, preferably the coding region thereof, or a homolog or a fragment thereof, and being depicted in the same respective line as said At3g62950, or a functional equivalent or a homolog thereof as shown in column 8 of Table I, application no. 2, preferably the coding region thereof, particularly a homolog or functional equivalent as shown in column 8 of Table I B, application no. 2, and being depicted in the same respective line as said At3g62950, and preferably the activity is increased non-targeted, or
[9416] (b) a polypeptide comprising a polypeptide, a consensus sequence or at least a polypeptide motif as shown in the respective line in column 5 of Table II or in column 8 of Table IV, application no. 2, respectively, and being depicted in the same respective line as said At3g62950, or a functional equivalent or a homolog thereof as depicted in column 8 of Table II, application no. 2, preferably a homolog or functional equivalent as depicted in column 8 of Table II B, application no. 2, and being depicted in the same respective line as said At3g62950, and preferably the activity is increased non-targeted.

[9417] Accordingly, in one embodiment, the molecule which activity is to be increased in the process of the invention is the gene product with an activity as a “glutaredoxin”, preferably it is the molecule of section (a) or (b) of this paragraph.

[9418] In particular, it was observed that in plants, especially in Arabidopsis thaliana, increasing or generating the activity of a gene product non-targeted with the activity of a “glutaredoxin”, preferably being encoded by a gene comprising the nucleic acid sequence SEQ ID NO. 2935, preferably the coding region thereof, conferred the production of or the increase in glutamate compared with the wild type control.

[9419] The nucleic acid sequence of At3g62950 from Arabidopsis thaliana, e.g. as shown in the respective line in column 5 of Table I, application no. 2 is unpublished. And the activity of the gene product thereof is the activity of glutaredoxin.

[9420] Accordingly, in one embodiment, the process of the present invention for producing glutamine in a non-human organism, like a microorganism or a plant or a part thereof, comprises increasing or generating the activity of a gene product with the activity of a gene product conferring the activity of “glutaredoxin”, especially from Arabidopsis thaliana or its functional equivalent or its homolog, e.g. the increase of
[9421] (a) a gene product of a gene comprising the nucleic acid molecule as shown in the respective line in column 5 of Table I, application no. 2, preferably the coding region thereof, or a homolog or a fragment thereof, and being depicted in the same respective line as said At3g62950, or a functional equivalent or a homolog thereof as shown in column 8 of Table I, application no. 2, preferably the coding region thereof, particularly a homolog or functional equivalent as shown in column 8 of Table I B, application no. 2, and being depicted in the same respective line as said At3g62950, and preferably the activity is increased non-targeted, or
[9422] (b) a polypeptide comprising a polypeptide, a consensus sequence or at least a polypeptide motif as shown in the respective line in column 5 of Table II or in column 8 of Table IV, application no. 2, respectively, and being depicted in the same respective line as said At3g62950, or a functional equivalent or a homolog thereof as depicted in column 8 of Table II, application no. 2, preferably a homolog or functional equivalent as depicted in column 8 of Table II B, application no. 2, and being depicted in the same respective line as said At3g62950, and preferably the activity is increased non-targeted,.

[9423] Accordingly, in one embodiment, the molecule which activity is to be increased in the process of the invention is the gene product with an activity as a “glutaredoxin”, preferably it is the molecule of section (a) or (b) of this paragraph.

[9424] In particular, it was observed that in plants, especially in Arabidopsis thaliana, increasing or generating the activity of a gene product non-targeted with the activity of a “glutaredoxin”, preferably being encoded by a gene comprising the nucleic acid sequence SEQ ID NO. 2935, preferably the coding region thereof, conferred the production of or the increase in glutamine compared with the wild type control.

[9425] The nucleic acid sequence of At4g15660 from Arabidopsis thaliana, e.g. as shown in the respective line in column 5 of Table I, application no. 2 is unpublished. And the activity of the gene product thereof is the activity of monothiol glutaredoxin.

[9426] Accordingly, in one embodiment, the process of the present invention for producing glutamate in a non-human organism, like a microorganism or a plant or a part thereof, comprises increasing or generating the activity of a gene product with the activity of a gene product conferring the activity of “monothiol glutaredoxin”, especially from Arabidopsis thaliana or its functional equivalent or its homolog, e.g. the increase of
[9427] (a) a gene product of a gene comprising the nucleic acid molecule as shown in the respective line in column 5 of Table I, application no. 2, preferably the coding region thereof, or a homolog or a fragment thereof, and being depicted in the same respective line as said At4g15660, or a functional equivalent or a homolog thereof as shown in column 8 of Table I, application no. 2, preferably the coding region thereof, particularly a homolog or functional equivalent as shown in column 8 of Table I B, application no. 2, and being depicted in the same respective line as said At4g15660, and preferably the activity is increased non-targeted, or
[9428] (b) a polypeptide comprising a polypeptide, a consensus sequence or at least a polypeptide motif as shown in the respective line in column 5 of Table II or in column 8 of Table IV, application no. 2, respectively, and being depicted in the same respective line as said At4g15660, or a functional equivalent or a homolog thereof as depicted in column 8 of Table II, application no. 2, preferably a homolog or functional equivalent as depicted in column 8 of Table II B, application no. 2, and being depicted in the same respective line as said At4g15660, and preferably the activity is increased non-targeted.

[9429] Accordingly, in one embodiment, the molecule which activity is to be increased in the process of the invention is the gene product with an activity as a “monothiol glutaredoxin”, preferably it is the molecule of section (a) or (b) of this paragraph.

[9430] In particular, it was observed that in plants, especially in Arabidopsis thaliana, increasing or generating the activity of a gene product non-targeted with the activity of a “monothiol glutaredoxin”, preferably being encoded by a gene comprising the nucleic acid sequence SEQ ID NO. 23482, preferably the coding region thereof, conferred the production of or the increase in glutamate compared with the wild type control.

[9431] The nucleic acid sequence of At4g15660 from Arabidopsis thaliana, e.g. as shown in the respective line in column 5 of Table I, application no. 2 is unpublished. And the activity of the gene product thereof is the activity of monothiol glutaredoxin.

[9432] Accordingly, in one embodiment, the process of the present invention for producing glutamine in a non-human organism, like a microorganism or a plant or a part thereof, comprises increasing or generating the activity of a gene product with the activity of a gene product conferring the activity of “monothiol glutaredoxin”, especially from Arabidopsis thaliana or its functional equivalent or its homolog, e.g. the increase of
[9433] (a) a gene product of a gene comprising the nucleic acid molecule as shown in the respective line in column 5 of Table I, application no. 2, preferably the coding region thereof, or a homolog or a fragment thereof, and being depicted in the same respective line as said At4g15660, or a functional equivalent or a homolog thereof as shown in column 8 of Table I, application no. 2, preferably the coding region thereof, particularly a homolog or functional equivalent as shown in column 8 of Table I B, application no. 2, and being depicted in the same respective line as said At4g15660, and preferably the activity is increased non-targeted, or
[9434] (b) a polypeptide comprising a polypeptide, a consensus sequence or at least a polypeptide motif as shown in the respective line in column 5 of Table II or in column 8 of Table IV, application no. 2, respectively, and being depicted in the same respective line as said At4g15660, or a functional equivalent or a homolog thereof as depicted in column 8 of Table II, application no. 2, preferably a homolog or functional equivalent as depicted in column 8 of Table II B, application no. 2, and being depicted in the same respective line as said At4g15660, and preferably the activity is increased non-targeted.

[9435] Accordingly, in one embodiment, the molecule which activity is to be increased in the process of the invention is the gene product with an activity as a “monothiol glutaredoxin”, preferably it is the molecule of section (a) or (b) of this paragraph.

[9436] In particular, it was observed that in plants, especially in Arabidopsis thaliana, increasing or generating the activity of a gene product non-targeted with the activity of a “monothiol glutaredoxin”, preferably being encoded by a gene comprising the nucleic acid sequence SEQ ID NO. 23482, preferably the coding region thereof, conferred the production of or the increase in glutamine compared with the wild type control.

[9437] The nucleic acid sequence of At4g15670 from Arabidopsis thaliana, e.g. as shown in the respective line in column 5 of Table I, application no. 2 is unpublished. And the activity of the gene product thereof is the activity of monothiol glutaredoxin.

[9438] Accordingly, in one embodiment, the process of the present invention for producing glutamate in a non-human organism, like a microorganism or a plant or a part thereof, comprises increasing or generating the activity of a gene product with the activity of a gene product conferring the activity of “monothiol glutaredoxin”, especially from Arabidopsis thaliana or its functional equivalent or its homolog, e.g. the increase of
[9439] (a) a gene product of a gene comprising the nucleic acid molecule as shown in the respective line in column 5 of Table I, application no. 2, preferably the coding region thereof, or a homolog or a fragment thereof, and being depicted in the same respective line as said At4g15670, or a functional equivalent or a homolog thereof as shown in column 8 of Table I, application no. 2, preferably the coding region thereof, particularly a homolog or functional equivalent as shown in column 8 of Table I B, application no. 2, and being depicted in the same respective line as said At4g15670, and preferably the activity is increased non-targeted, or
[9440] (b) a polypeptide comprising a polypeptide, a consensus sequence or at least a polypeptide motif as shown in the respective line in column 5 of Table II or in column 8 of Table IV, application no. 2, respectively, and being depicted in the same respective line as said At4g15670, or a functional equivalent or a homolog thereof as depicted in column 8 of Table II, application no. 2, preferably a homolog or functional equivalent as depicted in column 8 of Table II B, application no. 2, and being depicted in the same respective line as said At4g15670, and preferably the activity is increased non-targeted.

[9441] Accordingly, in one embodiment, the molecule which activity is to be increased in the process of the invention is the gene product with an activity as a “monothiol glutaredoxin”, preferably it is the molecule of section (a) or (b) of this paragraph.

[9442] In particular, it was observed that in plants, especially in Arabidopsis thaliana, increasing or generating the activity of a gene product non-targeted with the activity of a “monothiol glutaredoxin”, preferably being encoded by a gene comprising the nucleic acid sequence SEQ ID NO. 3279, preferably the coding region thereof, conferred the production of or the increase in glutamate compared with the wild type control.

[9443] The nucleic acid sequence of At4g15690 from Arabidopsis thaliana, e.g. as shown in the respective line in column 5 of Table I, application no. 2 is unpublished. And the activity of the gene product thereof is the activity of monothiol glutaredoxin.

[9444] Accordingly, in one embodiment, the process of the present invention for producing glutamate in a non-human organism, like a microorganism or a plant or a part thereof, comprises increasing or generating the activity of a gene product with the activity of a gene product conferring the activity of “monothiol glutaredoxin”, especially from Arabidopsis thaliana or its functional equivalent or its homolog, e.g. the increase of
[9445] (a) a gene product of a gene comprising the nucleic acid molecule as shown in the respective line in column 5 of Table I, application no. 2, preferably the coding region thereof, or a homolog or a fragment thereof, and being depicted in the same respective line as said At4g15690, or a functional equivalent or a homolog thereof as shown in column 8 of Table I, application no. 2, preferably the coding region thereof, particularly a homolog or functional equivalent as shown in column 8 of Table I B, application no. 2, and being depicted in the same respective line as said At4g15690, and preferably the activity is increased non-targeted, or
[9446] (b) a polypeptide comprising a polypeptide, a consensus sequence or at least a polypeptide motif as shown in the respective line in column 5 of Table II or in column 8 of Table IV, application no. 2, respectively, and being depicted in the same respective line as said At4g15690, or a functional equivalent or a homolog thereof as depicted in column 8 of Table II, application no. 2, preferably a homolog or functional equivalent as depicted in column 8 of Table II B, application no. 2, and being depicted in the same respective line as said At4g15690, and preferably the activity is increased non-targeted.

[9447] Accordingly, in one embodiment, the molecule which activity is to be increased in the process of the invention is the gene product with an activity as a “monothiol glutaredoxin”, preferably it is the molecule of section (a) or (b) of this paragraph.

[9448] In particular, it was observed that in plants, especially in Arabidopsis thaliana, increasing or generating the activity of a gene product non-targeted with the activity of a “monothiol glutaredoxin”, preferably being encoded by a gene comprising the nucleic acid sequence SEQ ID NO. 23844, preferably the coding region thereof, conferred the production of or the increase in glutamate compared with the wild type control.

[9449] The nucleic acid sequence of At4g15690 from Arabidopsis thaliana, e.g. as shown in the respective line in column 5 of Table I, application no. 2 is unpublished. And the activity of the gene product thereof is the activity of monothiol glutaredoxin.

[9450] Accordingly, in one embodiment, the process of the present invention for producing glutamine in a non-human organism, like a microorganism or a plant or a part thereof, comprises increasing or generating the activity of a gene product with the activity of a gene product conferring the activity of “monothiol glutaredoxin”, especially from Arabidopsis thaliana or its functional equivalent or its homolog, e.g. the increase of
[9451] (a) a gene product of a gene comprising the nucleic acid molecule as shown in the respective line in column 5 of Table I, application no. 2, preferably the coding region thereof, or a homolog or a fragment thereof, and being depicted in the same respective line as said At4g15690, or a functional equivalent or a homolog thereof as shown in column 8 of Table I, application no. 2, preferably the coding region thereof, particularly a homolog or functional equivalent as shown in column 8 of Table I B, application no. 2, and being depicted in the same respective line as said At4g15690, and preferably the activity is increased non-targeted, or
[9452] (b) a polypeptide comprising a polypeptide, a consensus sequence or at least a polypeptide motif as shown in the respective line in column 5 of Table II or in column 8 of Table IV, application no. 2, respectively, and being depicted in the same respective line as said At4g15690, or a functional equivalent or a homolog thereof as depicted in column 8 of Table II, application no. 2, preferably a homolog or functional equivalent as depicted in column 8 of Table II B, application no. 2, and being depicted in the same respective line as said At4g15690, and preferably the activity is increased non-targeted.

[9453] Accordingly, in one embodiment, the molecule which activity is to be increased in the process of the invention is the gene product with an activity as a “monothiol glutaredoxin”, preferably it is the molecule of section (a) or (b) of this paragraph.

[9454] In particular, it was observed that in plants, especially in Arabidopsis thaliana, increasing or generating the activity of a gene product non-targeted with the activity of a “monothiol glutaredoxin”, preferably being encoded by a gene comprising the nucleic acid sequence SEQ ID NO. 23844, preferably the coding region thereof, conferred the production of or the increase in glutamine compared with the wild type control.

[9455] The nucleic acid sequence of At4g15690 from Arabidopsis thaliana, e.g. as shown in the respective line in column 5 of Table I, application no. 2 is unpublished. And the activity of the gene product thereof is the activity of monothiol glutaredoxin.

[9456] Accordingly, in one embodiment, the process of the present invention for producing proline in a non-human organism, like a microorganism or a plant or a part thereof, comprises increasing or generating the activity of a gene product with the activity of a gene product conferring the activity of “monothiol glutaredoxin”, especially from Arabidopsis thaliana or its functional equivalent or its homolog, e.g. the increase of
[9457] (a) a gene product of a gene comprising the nucleic acid molecule as shown in the respective line in column 5 of Table I, application no. 2, preferably the coding region thereof, or a homolog or a fragment thereof, and being depicted in the same respective line as said At4g15690, or a functional equivalent or a homolog thereof as shown in column 8 of Table I, application no. 2, preferably the coding region thereof, particularly a homolog or functional equivalent as shown in column 8 of Table I B, application no. 2, and being depicted in the same respective line as said At4g15690, and preferably the activity is increased non-targeted, or
[9458] (b) a polypeptide comprising a polypeptide, a consensus sequence or at least a polypeptide motif as shown in the respective line in column 5 of Table II or in column 8 of Table IV, application no. 2, respectively, and being depicted in the same respective line as said At4g15690, or a functional equivalent or a homolog thereof as depicted in column 8 of Table II, application no. 2, preferably a homolog or functional equivalent as depicted in column 8 of Table II B, application no. 2, and being depicted in the same respective line as said At4g15690, and preferably the activity is increased non-targeted.

[9459] Accordingly, in one embodiment, the molecule which activity is to be increased in the process of the invention is the gene product with an activity as a “monothiol glutaredoxin”, preferably it is the molecule of section (a) or (b) of this paragraph.

[9460] In particular, it was observed that in plants, especially in Arabidopsis thaliana, increasing or generating the activity of a gene product non-targeted with the activity of a “monothiol glutaredoxin”, preferably being encoded by a gene comprising the nucleic acid sequence SEQ ID NO. 23844, preferably the coding region thereof, conferred the production of or the increase in proline compared with the wild type control.

[9461] The nucleic acid sequence of At4g15700 from Arabidopsis thaliana, e.g. as shown in the respective line in column 5 of Table I, application no. 2 is unpublished. And the activity of the gene product thereof is the activity of monothiol glutaredoxin.

[9462] Accordingly, in one embodiment, the process of the present invention for producing glutamine in a non-human organism, like a microorganism or a plant or a part thereof, comprises increasing or generating the activity of a gene product with the activity of a gene product conferring the activity of “monothiol glutaredoxin”, especially from Arabidopsis thaliana or its functional equivalent or its homolog, e.g. the increase of
[9463] (a) a gene product of a gene comprising the nucleic acid molecule as shown in the respective line in column 5 of Table I, application no. 2, preferably the coding region thereof, or a homolog or a fragment thereof, and being depicted in the same respective line as said At4g15700, or a functional equivalent or a homolog thereof as shown in column 8 of Table I, application no. 2, preferably the coding region thereof, particularly a homolog or functional equivalent as shown in column 8 of Table I B, application no. 2, and being depicted in the same respective line as said At4g15700, and preferably the activity is increased non-targeted, or
[9464] (b) a polypeptide comprising a polypeptide, a consensus sequence or at least a polypeptide motif as shown in the respective line in column 5 of Table II or in column 8 of Table IV, application no. 2, respectively, and being depicted in the same respective line as said At4g15700, or a functional equivalent or a homolog thereof as depicted in column 8 of Table II, application no. 2, preferably a homolog or functional equivalent as depicted in column 8 of Table II B, application no. 2, and being depicted in the same respective line as said At4g15700, and preferably the activity is increased non-targeted.

[9465] Accordingly, in one embodiment, the molecule which activity is to be increased in the process of the invention is the gene product with an activity as a “monothiol glutaredoxin”, preferably it is the molecule of section (a) or (b) of this paragraph.

[9466] In particular, it was observed that in plants, especially in Arabidopsis thaliana, increasing or generating the activity of a gene product non-targeted with the activity of a “monothiol glutaredoxin”, preferably being encoded by a gene comprising the nucleic acid sequence SEQ ID NO. 3654, preferably the coding region thereof, conferred the production of or the increase in glutamine compared with the wild type control.

[9467] The nucleic acid sequence of At4g18880 from Arabidopsis thaliana, e.g. as shown in the respective line in column 5 of Table I, application no. 2 is unpublished. And the activity of the gene product thereof is the activity of heat shock transcription factor.

[9468] Accordingly, in one embodiment, the process of the present invention for producing proline in a non-human organism, like a microorganism or a plant or a part thereof, comprises increasing or generating the activity of a gene product with the activity of a gene product conferring the activity of “heat shock transcription factor”, especially from Arabidopsis thaliana or its functional equivalent or its homolog, e.g. the increase of
[9469] (a) a gene product of a gene comprising the nucleic acid molecule as shown in the respective line in column 5 of Table I, application no. 2, preferably the coding region thereof, or a homolog or a fragment thereof, and being depicted in the same respective line as said At4g18880, or a functional equivalent or a homolog thereof as shown in column 8 of Table I, application no. 2, preferably the coding region thereof, particularly a homolog or functional equivalent as shown in column 8 of Table I B, application no. 2, and being depicted in the same respective line as said At4g18880, and preferably the activity is increased non-targeted, or
[9470] (b) a polypeptide comprising a polypeptide, a consensus sequence or at least a polypeptide motif as shown in the respective line in column 5 of Table II or in column 8 of Table IV, application no. 2, respectively, and being depicted in the same respective line as said At4g18880, or a functional equivalent or a homolog thereof as depicted in column 8 of Table II, application no. 2, preferably a homolog or functional equivalent as depicted in column 8 of Table II B, application no. 2, and being depicted in the same respective line as said At4g18880, and preferably the activity is increased non-targeted.

[9471] Accordingly, in one embodiment, the molecule which activity is to be increased in the process of the invention is the gene product with an activity as a “heat shock transcription factor”, preferably it is the molecule of section (a) or (b) of this paragraph.

[9472] In particular, it was observed that in plants, especially in Arabidopsis thaliana, increasing or generating the activity of a gene product non-targeted with the activity of a “heat shock transcription factor”, preferably being encoded by a gene comprising the nucleic acid sequence SEQ ID NO. 24232, preferably the coding region thereof, conferred the production of or the increase in proline compared with the wild type control.

[9473] The nucleic acid sequence of At4g32480 from Arabidopsis thaliana, e.g. as shown in the respective line in column 5 of Table I, application no. 2, is unpublished. And the activity of the gene product thereof is the activity of At4g32480-protein.

[9474] Accordingly, in one embodiment, the process of the present invention for producing arginine in a non-human organism, like a microorganism or a plant or a part thereof, comprises increasing or generating the activity of a gene product with the activity of a gene product conferring the activity of “At4g32480-protein”, especially from Arabidopsis thaliana or its functional equivalent or its homolog, e.g. the increase of
[9475] (a) a gene product of a gene comprising the nucleic acid molecule as shown in the respective line in column 5 of Table I, application no. 2, preferably the coding region thereof, or a homolog or a fragment thereof, and being depicted in the same respective line as said At4g32480, or a functional equivalent or a homolog thereof as shown in column 8 of Table I, application no. 2, preferably the coding region thereof, particularly a homolog or functional equivalent as shown in column 8 of Table I B, application no. 2, and being depicted in the same respective line as said At4g32480, and preferably the activity is increased non-targeted, or
[9476] (b) a polypeptide comprising a polypeptide, a consensus sequence or at least a polypeptide motif as shown in the respective line in column 5 of Table II or in column 8 of Table IV, application no. 2, respectively, and being depicted in the same respective line as said At4g32480, or a functional equivalent or a homolog thereof as depicted in column 8 of Table II, application no. 2, preferably a homolog or functional equivalent as depicted in column 8 of Table II B, application no. 2, and being depicted in the same respective line as said At4g32480, and preferably the activity is increased non-targeted,.

[9477] Accordingly, in one embodiment, the molecule which activity is to be increased in the process of the invention is the gene product with an activity as a “At4g32480-protein”, preferably it is the molecule of section (a) or (b) of this paragraph.

[9478] In particular, it was observed that in plants, especially in Arabidopsis thaliana, increasing or generating the activity of a gene product non-targeted with the activity of a “At4g32480-protein”, preferably being encoded by a gene comprising the nucleic acid sequence SEQ ID NO. 4040, preferably the coding region thereof, conferred the production of or the increase in arginine compared with the wild type control.

[9479] The nucleic acid sequence of At4g32480 from Arabidopsis thaliana, e.g. as shown in the respective line in column 5 of Table I, application no. 2 is unpublished. And the activity of the gene product thereof is the activity of At4g32480-protein.

[9480] Accordingly, in one embodiment, the process of the present invention for producing glutamine in a non-human organism, like a microorganism or a plant or a part thereof, comprises increasing or generating the activity of a gene product with the activity of a gene product conferring the activity of “At4g32480-protein”, especially from Arabidopsis thaliana or its functional equivalent or its homolog, e.g. the increase of
[9481] (a) a gene product of a gene comprising the nucleic acid molecule as shown in the respective line in column 5 of Table I, application no. 2, preferably the coding region thereof, or a homolog or a fragment thereof, and being depicted in the same respective line as said At4g32480, or a functional equivalent or a homolog thereof as shown in column 8 of Table I, application no. 2, preferably the coding region thereof, particularly a homolog or functional equivalent as shown in column 8 of Table I B, application no. 2, and being depicted in the same respective line as said At4g32480, and preferably the activity is increased non-targeted, or
[9482] (b) a polypeptide comprising a polypeptide, a consensus sequence or at least a polypeptide motif as shown in the respective line in column 5 of Table II or in column 8 of Table IV, application no. 2, respectively, and being depicted in the same respective line as said At4g32480, or a functional equivalent or a homolog thereof as depicted in column 8 of Table II, application no. 2, preferably a homolog or functional equivalent as depicted in column 8 of Table II B, application no. 2, and being depicted in the same respective line as said At4g32480, and preferably the activity is increased non-targeted.

[9483] Accordingly, in one embodiment, the molecule which activity is to be increased in the process of the invention is the gene product with an activity as a “At4g32480-protein”, preferably it is the molecule of section (a) or (b) of this paragraph.

[9484] In particular, it was observed that in plants, especially in Arabidopsis thaliana, increasing or generating the activity of a gene product non-targeted with the activity of a “At4g32480-protein”, preferably being encoded by a gene comprising the nucleic acid sequence SEQ ID NO. 4040, preferably the coding region thereof, conferred the production of or the increase in glutamine compared with the wild type control.

[9485] The nucleic acid sequence of At4g32480 from Arabidopsis thaliana, e.g. as shown in the respective line in column 5 of Table I, application no. 2 is unpublished. And the activity of the gene product thereof is the activity of At4g32480-protein.

[9486] Accordingly, in one embodiment, the process of the present invention for producing proline in a non-human organism, like a microorganism or a plant or a part thereof, comprises increasing or generating the activity of a gene product with the activity of a gene product conferring the activity of “At4g32480-protein”, especially from Arabidopsis thaliana or its functional equivalent or its homolog, e.g. the increase of
[9487] (a) a gene product of a gene comprising the nucleic acid molecule as shown in the respective line in column 5 of Table I, application no. 2, preferably the coding region thereof, or a homolog or a fragment thereof, and being depicted in the same respective line as said At4g32480, or a functional equivalent or a homolog thereof as shown in column 8 of Table I, application no. 2, preferably the coding region thereof, particularly a homolog or functional equivalent as shown in column 8 of Table I B, application no. 2, and being depicted in the same respective line as said At4g32480, and preferably the activity is increased non-targeted, or
[9488] (b) a polypeptide comprising a polypeptide, a consensus sequence or at least a polypeptide motif as shown in the respective line in column 5 of Table II or in column 8 of Table IV, application no. 2, respectively, and being depicted in the same respective line as said At4g32480, or a functional equivalent or a homolog thereof as depicted in column 8 of Table II, application no. 2, preferably a homolog or functional equivalent as depicted in column 8 of Table II B, application no. 2, and being depicted in the same respective line as said At4g32480, and preferably the activity is increased non-targeted.

[9489] Accordingly, in one embodiment, the molecule which activity is to be increased in the process of the invention is the gene product with an activity as a “At4g32480-protein”, preferably it is the molecule of section (a) or (b) of this paragraph.

[9490] In particular, it was observed that in plants, especially in Arabidopsis thaliana, increasing or generating the activity of a gene product non-targeted with the activity of a “At4g32480-protein”, preferably being encoded by a gene comprising the nucleic acid sequence SEQ ID NO. 4040, preferably the coding region thereof, conferred the production of or the increase in proline compared with the wild type control.

[9491] The nucleic acid sequence of At4g33040 from Arabidopsis thaliana, e.g. as shown in the respective line in column 5 of Table I, application no. 2 is unpublished. And the activity of the gene product thereof is the activity of glutaredoxin.

[9492] Accordingly, in one embodiment, the process of the present invention for producing glutamate in a non-human organism, like a microorganism or a plant or a part thereof, comprises increasing or generating the activity of a gene product with the activity of a gene product conferring the activity of “glutaredoxin”, especially from Arabidopsis thaliana or its functional equivalent or its homolog, e.g. the increase of
[9493] (a) a gene product of a gene comprising the nucleic acid molecule as shown in the respective line in column 5 of Table I, application no. 2, preferably the coding region thereof, or a homolog or a fragment thereof, and being depicted in the same respective line as said At4g33040, or a functional equivalent or a homolog thereof as shown in column 8 of Table I, application no. 2, preferably the coding region thereof, particularly a homolog or functional equivalent as shown in column 8 of Table I B, application no. 2, and being depicted in the same respective line as said At4g33040, and preferably the activity is increased non-targeted, or
[9494] (b) a polypeptide comprising a polypeptide, a consensus sequence or at least a polypeptide motif as shown in the respective line in column 5 of Table II or in column 8 of Table IV, application no. 2, respectively, and being depicted in the same respective line as said At4g33040, or a functional equivalent or a homolog thereof as depicted in column 8 of Table II, application no. 2, preferably a homolog or functional equivalent as depicted in column 8 of Table II B, application no. 2, and being depicted in the same respective line as said At4g33040, and preferably the activity is increased non-targeted,.

[9495] Accordingly, in one embodiment, the molecule which activity is to be increased in the process of the invention is the gene product with an activity as a “glutaredoxin”, preferably it is the molecule of section (a) or (b) of this paragraph.

[9496] In particular, it was observed that in plants, especially in Arabidopsis thaliana, increasing or generating the activity of a gene product non-targeted with the activity of a “glutaredoxin”, preferably being encoded by a gene comprising the nucleic acid sequence SEQ ID NO. 4102, preferably the coding region thereof, conferred the production of or the increase in glutamate compared with the wild type control.

[9497] The nucleic acid sequence of At4g34160 from Arabidopsis thaliana, e.g. as shown in the respective line in column 5 of Table I, application no. 2 is unpublished. And the activity of the gene product thereof is the activity of cyclin D.

[9498] Accordingly, in one embodiment, the process of the present invention for producing arginine in a non-human organism, like a microorganism or a plant or a part thereof, comprises increasing or generating the activity of a gene product with the activity of a gene product conferring the activity of “cyclin D”, especially from Arabidopsis thaliana or its functional equivalent or its homolog, e.g. the increase of
[9499] (a) a gene product of a gene comprising the nucleic acid molecule as shown in the respective line in column 5 of Table I, application no. 2, preferably the coding region thereof, or a homolog or a fragment thereof, and being depicted in the same respective line as said At4g34160, or a functional equivalent or a homolog thereof as shown in column 8 of Table I, application no. 2, preferably the coding region thereof, particularly a homolog or functional equivalent as shown in column 8 of Table I B, application no. 2, and being depicted in the same respective line as said At4g34160, and preferably the activity is increased non-targeted, or
[9500] (b) a polypeptide comprising a polypeptide, a consensus sequence or at least a polypeptide motif as shown in the respective line in column 5 of Table II or in column 8 of Table IV, application no. 2, respectively, and being depicted in the same respective line as said At4g34160, or a functional equivalent or a homolog thereof as depicted in column 8 of Table II, application no. 2, preferably a homolog or functional equivalent as depicted in column 8 of Table II B, application no. 2, and being depicted in the same respective line as said At4g34160, and preferably the activity is increased non-targeted.

[9501] Accordingly, in one embodiment, the molecule which activity is to be increased in the process of the invention is the gene product with an activity as a “cyclin D”, preferably it is the molecule of section (a) or (b) of this paragraph.

[9502] In particular, it was observed that in plants, especially in Arabidopsis thaliana, increasing or generating the activity of a gene product non-targeted with the activity of a “cyclin D”, preferably being encoded by a gene comprising the nucleic acid sequence SEQ ID NO. 24311, preferably the coding region thereof, conferred the production of or the increase in arginine compared with the wild type control.

[9503] The nucleic acid sequence of At4g34160 from Arabidopsis thaliana, e.g. as shown in the respective line in column 5 of Table I, application no. 2 is unpublished. And the activity of the gene product thereof is the activity of cyclin D.

[9504] Accordingly, in one embodiment, the process of the present invention for producing glutamine in a non-human organism, like a microorganism or a plant or a part thereof, comprises increasing or generating the activity of a gene product with the activity of a gene product conferring the activity of “cyclin D”, especially from Arabidopsis thaliana or its functional equivalent or its homolog, e.g. the increase of
[9505] (a) a gene product of a gene comprising the nucleic acid molecule as shown in the respective line in column 5 of Table I, application no. 2, preferably the coding region thereof, or a homolog or a fragment thereof, and being depicted in the same respective line as said At4g34160, or a functional equivalent or a homolog thereof as shown in column 8 of Table I, application no. 2, preferably the coding region thereof, particularly a homolog or functional equivalent as shown in column 8 of Table I B, application no. 2, and being depicted in the same respective line as said At4g34160, and preferably the activity is increased non-targeted, or
[9506] (b) a polypeptide comprising a polypeptide, a consensus sequence or at least a polypeptide motif as shown in the respective line in column 5 of Table II or in column 8 of Table IV, application no. 2, respectively, and being depicted in the same respective line as said At4g34160, or a functional equivalent or a homolog thereof as depicted in column 8 of Table II, application no. 2, preferably a homolog or functional equivalent as depicted in column 8 of Table II B, application no. 2, and being depicted in the same respective line as said At4g34160, and preferably the activity is increased non-targeted.

[9507] Accordingly, in one embodiment, the molecule which activity is to be increased in the process of the invention is the gene product with an activity as a “cyclin D”, preferably it is the molecule of section (a) or (b) of this paragraph.

[9508] In particular, it was observed that in plants, especially in Arabidopsis thaliana, increasing or generating the activity of a gene product non-targeted with the activity of a “cyclin D”, preferably being encoded by a gene comprising the nucleic acid sequence SEQ ID NO. 24311, preferably the coding region thereof, conferred the production of or the increase in glutamine compared with the wild type control.

[9509] The nucleic acid sequence of At4g34160 from Arabidopsis thaliana, e.g. as shown in the respective line in column 5 of Table I, application no. 2 is unpublished. And the activity of the gene product thereof is the activity of cyclin D.

[9510] Accordingly, in one embodiment, the process of the present invention for producing proline in a non-human organism, like a microorganism or a plant or a part thereof, comprises increasing or generating the activity of a gene product with the activity of a gene product conferring the activity of “cyclin D”, especially from Arabidopsis thaliana or its functional equivalent or its homolog, e.g. the increase of
[9511] (a) a gene product of a gene comprising the nucleic acid molecule as shown in the respective line in column 5 of Table I, application no. 2, preferably the coding region thereof, or a homolog or a fragment thereof, and being depicted in the same respective line as said At4g34160, or a functional equivalent or a homolog thereof as shown in column 8 of Table I, application no. 2, preferably the coding region thereof, particularly a homolog or functional equivalent as shown in column 8 of Table I B, application no. 2, and being depicted in the same respective line as said At4g34160, and preferably the activity is increased non-targeted, or
[9512] (b) a polypeptide comprising a polypeptide, a consensus sequence or at least a polypeptide motif as shown in the respective line in column 5 of Table II or in column 8 of Table IV, application no. 2, respectively, and being depicted in the same respective line as said At4g34160, or a functional equivalent or a homolog thereof as depicted in column 8 of Table II, application no. 2, preferably a homolog or functional equivalent as depicted in column 8 of Table II B, application no. 2, and being depicted in the same respective line as said At4g34160, and preferably the activity is increased non-targeted.

[9513] Accordingly, in one embodiment, the molecule which activity is to be increased in the process of the invention is the gene product with an activity as a “cyclin D”, preferably it is the molecule of section (a) or (b) of this paragraph.

[9514] In particular, it was observed that in plants, especially in Arabidopsis thaliana, increasing or generating the activity of a gene product non-targeted with the activity of a “cyclin D”, preferably being encoded by a gene comprising the nucleic acid sequence SEQ ID NO. 24311, preferably the coding region thereof, conferred the production of or the increase in proline compared with the wild type control.

[9515] The nucleic acid sequence of At4g35310 from Arabidopsis thaliana, e.g. as shown in the respective line in column 5 of Table I, application no. 2 is unpublished. And the activity of the gene product thereof is the activity of calcium-dependent protein kinase.

[9516] Accordingly, in one embodiment, the process of the present invention for producing arginine in a non-human organism, like a microorganism or a plant or a part thereof, comprises increasing or generating the activity of a gene product with the activity of a gene product conferring the activity of “calcium-dependent protein kinase”, especially from Arabidopsis thaliana or its functional equivalent or its homolog, e.g. the increase of
[9517] (a) a gene product of a gene comprising the nucleic acid molecule as shown in the respective line in column 5 of Table I, application no. 2, preferably the coding region thereof, or a homolog or a fragment thereof, and being depicted in the same respective line as said At4g35310, or a functional equivalent or a homolog thereof as shown in column 8 of Table I, application no. 2, preferably the coding region thereof, particularly a homolog or functional equivalent as shown in column 8 of Table I B, application no. 2, and being depicted in the same respective line as said At4g35310, and preferably the activity is increased non-targeted, or
[9518] (b) a polypeptide comprising a polypeptide, a consensus sequence or at least a polypeptide motif as shown in the respective line in column 5 of Table II or in column 8 of Table IV, application no. 2, respectively, and being depicted in the same respective line as said At4g35310, or a functional equivalent or a homolog thereof as depicted in column 8 of Table II, application no. 2, preferably a homolog or functional equivalent as depicted in column 8 of Table II B, application no. 2, and being depicted in the same respective line as said At4g35310, and preferably the activity is increased non-targeted.

[9519] Accordingly, in one embodiment, the molecule which activity is to be increased in the process of the invention is the gene product with an activity as a “calcium-dependent protein kinase”, preferably it is the molecule of section (a) or (b) of this paragraph.

[9520] In particular, it was observed that in plants, especially in Arabidopsis thaliana, increasing or generating the activity of a gene product non-targeted with the activity of a “calcium-dependent protein kinase”, preferably being encoded by a gene comprising the nucleic acid sequence SEQ ID NO. 4348, preferably the coding region thereof, conferred the production of or the increase in arginine compared with the wild type control.

[9521] The nucleic acid sequence of At4g35310 from Arabidopsis thaliana, e.g. as shown in the respective line in column 5 of Table I, application no. 2 is unpublished. And the activity of the gene product thereof is the activity of calcium-dependent protein kinase.

[9522] Accordingly, in one embodiment, the process of the present invention for producing proline in a non-human organism, like a microorganism or a plant or a part thereof, comprises increasing or generating the activity of a gene product with the activity of a gene product conferring the activity of “calcium-dependent protein kinase”, especially from Arabidopsis thaliana or its functional equivalent or its homolog, e.g. the increase of
[9523] (a) a gene product of a gene comprising the nucleic acid molecule as shown in the respective line in column 5 of Table I, application no. 2, preferably the coding region thereof, or a homolog or a fragment thereof, and being depicted in the same respective line as said At4g35310, or a functional equivalent or a homolog thereof as shown in column 8 of Table I, application no. 2, preferably the coding region thereof, particularly a homolog or functional equivalent as shown in column 8 of Table I B, application no. 2, and being depicted in the same respective line as said At4g35310, and preferably the activity is increased non-targeted, or
[9524] (b) a polypeptide comprising a polypeptide, a consensus sequence or at least a polypeptide motif as shown in the respective line in column 5 of Table II or in column 8 of Table IV, application no. 2, respectively, and being depicted in the same respective line as said At4g35310, or a functional equivalent or a homolog thereof as depicted in column 8 of Table II, application no. 2, preferably a homolog or functional equivalent as depicted in column 8 of Table II B, application no. 2, and being depicted in the same respective line as said At4g35310, and preferably the activity is increased non-targeted.

[9525] Accordingly, in one embodiment, the molecule which activity is to be increased in the process of the invention is the gene product with an activity as a “calcium-dependent protein kinase”, preferably it is the molecule of section (a) or (b) of this paragraph.

[9526] In particular, it was observed that in plants, especially in Arabidopsis thaliana, increasing or generating the activity of a gene product non-targeted with the activity of a “calcium-dependent protein kinase”, preferably being encoded by a gene comprising the nucleic acid sequence SEQ ID NO. 4348, preferably the coding region thereof, conferred the production of or the increase in proline compared with the wild type control.

[9527] The nucleic acid sequence of At5g03720 from Arabidopsis thaliana, e.g. as shown in the respective line in column 5 of Table I, application no. 2 is unpublished. And the activity of the gene product thereof is the activity of heat shock transcription factor.

[9528] Accordingly, in one embodiment, the process of the present invention for producing glutamate in a non-human organism, like a microorganism or a plant or a part thereof, comprises increasing or generating the activity of a gene product with the activity of a gene product conferring the activity of “heat shock transcription factor”, especially from Arabidopsis thaliana or its functional equivalent or its homolog, e.g. the increase of
[9529] (a) a gene product of a gene comprising the nucleic acid molecule as shown in the respective line in column 5 of Table I, application no. 2, preferably the coding region thereof, or a homolog or a fragment thereof, and being depicted in the same respective line as said At5g03720, or a functional equivalent or a homolog thereof as shown in column 8 of Table I, application no. 2, preferably the coding region thereof, particularly a homolog or functional equivalent as shown in column 8 of Table I B, application no. 2, and being depicted in the same respective line as said At5g03720, and preferably the activity is increased non-targeted, or
[9530] (b) a polypeptide comprising a polypeptide, a consensus sequence or at least a polypeptide motif as shown in the respective line in column 5 of Table II or in column 8 of Table IV, application no. 2, respectively, and being depicted in the same respective line as said At5g03720, or a functional equivalent or a homolog thereof as depicted in column 8 of Table II, application no. 2, preferably a homolog or functional equivalent as depicted in column 8 of Table II B, application no. 2, and being depicted in the same respective line as said At5g03720, and preferably the activity is increased non-targeted.

[9531] Accordingly, in one embodiment, the molecule which activity is to be increased in the process of the invention is the gene product with an activity as a “heat shock transcription factor”, preferably it is the molecule of section (a) or (b) of this paragraph.

[9532] In particular, it was observed that in plants, especially in Arabidopsis thaliana, increasing or generating the activity of a gene product non-targeted with the activity of a “heat shock transcription factor”, preferably being encoded by a gene comprising the nucleic acid sequence SEQ ID NO. 24438, preferably the coding region thereof, conferred the production of or the increase in glutamate compared with the wild type control.

[9533] The nucleic acid sequence of At5g07200 from Arabidopsis thaliana, e.g. as shown in the respective line in column 5 of Table I, application no. 2 is unpublished. And the activity of the gene product thereof is the activity of gibberellin 20-oxidase.

[9534] Accordingly, in one embodiment, the process of the present invention for producing proline in a non-human organism, like a microorganism or a plant or a part thereof, comprises increasing or generating the activity of a gene product with the activity of a gene product conferring the activity of “gibberellin 20-oxidase”, especially from Arabidopsis thaliana or its functional equivalent or its homolog, e.g. the increase of
[9535] (a) a gene product of a gene comprising the nucleic acid molecule as shown in the respective line in column 5 of Table I, application no. 2, preferably the coding region thereof, or a homolog or a fragment thereof, and being depicted in the same respective line as said At5g07200, or a functional equivalent or a homolog thereof as shown in column 8 of Table I, application no. 2, preferably the coding region thereof, particularly a homolog or functional equivalent as shown in column 8 of Table I B, application no. 2, and being depicted in the same respective line as said At5g07200, and preferably the activity is increased non-targeted, or
[9536] (b) a polypeptide comprising a polypeptide, a consensus sequence or at least a polypeptide motif as shown in the respective line in column 5 of Table II or in column 8 of Table IV, application no. 2, respectively, and being depicted in the same respective line as said At5g07200, or a functional equivalent or a homolog thereof as depicted in column 8 of Table II, application no. 2, preferably a homolog or functional equivalent as depicted in column 8 of Table II B, application no. 2, and being depicted in the same respective line as said At5g07200, and preferably the activity is increased non-targeted.

[9537] Accordingly, in one embodiment, the molecule which activity is to be increased in the process of the invention is the gene product with an activity as a “gibberellin 20-oxidase”, preferably it is the molecule of section (a) or (b) of this paragraph.

[9538] In particular, it was observed that in plants, especially in Arabidopsis thaliana, increasing or generating the activity of a gene product non-targeted with the activity of a “gibberellin 20-oxidase”, preferably being encoded by a gene comprising the nucleic acid sequence SEQ ID NO. 24492, preferably the coding region thereof, conferred the production of or the increase in proline compared with the wild type control.

[9539] The nucleic acid sequence of At5g10820 from Arabidopsis thaliana, e.g. as shown in the respective line in column 5 of Table I, application no. 2 is unpublished. And the activity of the gene product thereof is the activity of integral membrane transporter family protein.

[9540] Accordingly, in one embodiment, the process of the present invention for producing glutamate in a non-human organism, like a microorganism or a plant or a part thereof, comprises increasing or generating the activity of a gene product with the activity of a gene product conferring the activity of “integral membrane transporter family protein”, especially from Arabidopsis thaliana or its functional equivalent or its homolog, e.g. the increase of
[9541] (a) a gene product of a gene comprising the nucleic acid molecule as shown in the respective line in column 5 of Table I, application no. 2, preferably the coding region thereof, or a homolog or a fragment thereof, and being depicted in the same respective line as said At5g10820, or a functional equivalent or a homolog thereof as shown in column 8 of Table I, application no. 2, preferably the coding region thereof, particularly a homolog or functional equivalent as shown in column 8 of Table I B, application no. 2, and being depicted in the same respective line as said At5g10820, and preferably the activity is increased non-targeted, or
[9542] (b) a polypeptide comprising a polypeptide, a consensus sequence or at least a polypeptide motif as shown in the respective line in column 5 of Table II or in column 8 of Table IV, application no. 2, respectively, and being depicted in the same respective line as said At5g10820, or a functional equivalent or a homolog thereof as depicted in column 8 of Table II, application no. 2, preferably a homolog or functional equivalent as depicted in column 8 of Table II B, application no. 2, and being depicted in the same respective line as said At5g10820, and preferably the activity is increased non-targeted.

[9543] Accordingly, in one embodiment, the molecule which activity is to be increased in the process of the invention is the gene product with an activity as a “integral membrane transporter family protein”, preferably it is the molecule of section (a) or (b) of this paragraph.

[9544] In particular, it was observed that in plants, especially in Arabidopsis thaliana, increasing or generating the activity of a gene product non-targeted with the activity of a “integral membrane transporter family protein”, preferably being encoded by a gene comprising the nucleic acid sequence SEQ ID NO. 25222, preferably the coding region thereof, conferred the production of or the increase in glutamate compared with the wild type control.

[9545] The nucleic acid sequence of At5g10820 from Arabidopsis thaliana, e.g. as shown in the respective line in column 5 of Table I, application no. 2 is unpublished. And the activity of the gene product thereof is the activity of integral membrane transporter family protein.

[9546] Accordingly, in one embodiment, the process of the present invention for producing glutamine in a non-human organism, like a microorganism or a plant or a part thereof, comprises increasing or generating the activity of a gene product with the activity of a gene product conferring the activity of “integral membrane transporter family protein”, especially from Arabidopsis thaliana or its functional equivalent or its homolog, e.g. the increase of
[9547] (a) a gene product of a gene comprising the nucleic acid molecule as shown in the respective line in column 5 of Table I, application no. 2, preferably the coding region thereof, or a homolog or a fragment thereof, and being depicted in the same respective line as said At5g10820, or a functional equivalent or a homolog thereof as shown in column 8 of Table I, application no. 2, preferably the coding region thereof, particularly a homolog or functional equivalent as shown in column 8 of Table I B, application no. 2, and being depicted in the same respective line as said At5g10820, and preferably the activity is increased non-targeted, or
[9548] (b) a polypeptide comprising a polypeptide, a consensus sequence or at least a polypeptide motif as shown in the respective line in column 5 of Table II or in column 8 of Table IV, application no. 2, respectively, and being depicted in the same respective line as said At5g10820, or a functional equivalent or a homolog thereof as depicted in column 8 of Table II, application no. 2, preferably a homolog or functional equivalent as depicted in column 8 of Table II B, application no. 2, and being depicted in the same respective line as said At5g10820, and preferably the activity is increased non-targeted.

[9549] Accordingly, in one embodiment, the molecule which activity is to be increased in the process of the invention is the gene product with an activity as a “integral membrane transporter family protein”, preferably it is the molecule of section (a) or (b) of this paragraph.

[9550] In particular, it was observed that in plants, especially in Arabidopsis thaliana, increasing or generating the activity of a gene product non-targeted with the activity of a “integral membrane transporter family protein”, preferably being encoded by a gene comprising the nucleic acid sequence SEQ ID NO. 25222, preferably the coding region thereof, conferred the production of or the increase in glutamine compared with the wild type control.

[9551] The nucleic acid sequence of At5g16650 from Arabidopsis thaliana, e.g. as shown in the respective line in column 5 of Table I, application no. 2 is unpublished. And the activity of the gene product thereof is the activity of At5g16650-protein.

[9552] Accordingly, in one embodiment, the process of the present invention for producing arginine in a non-human organism, like a microorganism or a plant or a part thereof, comprises increasing or generating the activity of a gene product with the activity of a gene product conferring the activity of “At5g16650-protein”, especially from Arabidopsis thaliana or its functional equivalent or its homolog, e.g. the increase of
[9553] (a) a gene product of a gene comprising the nucleic acid molecule as shown in the respective line in column 5 of Table I, application no. 2, preferably the coding region thereof, or a homolog or a fragment thereof, and being depicted in the same respective line as said At5g16650, or a functional equivalent or a homolog thereof as shown in column 8 of Table I, application no. 2, preferably the coding region thereof, particularly a homolog or functional equivalent as shown in column 8 of Table I B, application no. 2, and being depicted in the same respective line as said At5g16650, and preferably the activity is increased non-targeted, or
[9554] (b) a polypeptide comprising a polypeptide, a consensus sequence or at least a polypeptide motif as shown in the respective line in column 5 of Table II or in column 8 of Table IV, application no. 2, respectively, and being depicted in the same respective line as said At5g16650, or a functional equivalent or a homolog thereof as depicted in column 8 of Table II, application no. 2, preferably a homolog or functional equivalent as depicted in column 8 of Table II B, application no. 2, and being depicted in the same respective line as said At5g16650, and preferably the activity is increased non-targeted,.

[9555] Accordingly, in one embodiment, the molecule which activity is to be increased in the process of the invention is the gene product with an activity as a “At5g16650-protein”, preferably it is the molecule of section (a) or (b) of this paragraph.

[9556] In particular, it was observed that in plants, especially in Arabidopsis thaliana, increasing or generating the activity of a gene product non-targeted with the activity of a “At5g16650-protein”, preferably being encoded by a gene comprising the nucleic acid sequence SEQ ID NO. 25283, preferably the coding region thereof, conferred the production of or the increase in arginine compared with the wild type control.

[9557] The nucleic acid sequence of At5g16650 from Arabidopsis thaliana, e.g. as shown in the respective line in column 5 of Table I, application no. 2 is unpublished. And the activity of the gene product thereof is the activity of At5g16650-protein.

[9558] Accordingly, in one embodiment, the process of the present invention for producing glutamine in a non-human organism, like a microorganism or a plant or a part thereof, comprises increasing or generating the activity of a gene product with the activity of a gene product conferring the activity of “At5g16650-protein”, especially from Arabidopsis thaliana or its functional equivalent or its homolog, e.g. the increase of
[9559] (a) a gene product of a gene comprising the nucleic acid molecule as shown in the respective line in column 5 of Table I, application no. 2, preferably the coding region thereof, or a homolog or a fragment thereof, and being depicted in the same respective line as said At5g16650, or a functional equivalent or a homolog thereof as shown in column 8 of Table I, application no. 2, preferably the coding region thereof, particularly a homolog or functional equivalent as shown in column 8 of Table I B, application no. 2, and being depicted in the same respective line as said At5g16650, and preferably the activity is increased non-targeted, or
[9560] (b) a polypeptide comprising a polypeptide, a consensus sequence or at least a polypeptide motif as shown in the respective line in column 5 of Table II or in column 8 of Table IV, application no. 2, respectively, and being depicted in the same respective line as said At5g16650, or a functional equivalent or a homolog thereof as depicted in column 8 of Table II, application no. 2, preferably a homolog or functional equivalent as depicted in column 8 of Table II B, application no. 2, and being depicted in the same respective line as said At5g16650, and preferably the activity is increased non-targeted.

[9561] Accordingly, in one embodiment, the molecule which activity is to be increased in the process of the invention is the gene product with an activity as a “At5g16650-protein”, preferably it is the molecule of section (a) or (b) of this paragraph.

[9562] In particular, it was observed that in plants, especially in Arabidopsis thaliana, increasing or generating the activity of a gene product non-targeted with the activity of a “At5g16650-protein”, preferably being encoded by a gene comprising the nucleic acid sequence SEQ ID NO. 25283, preferably the coding region thereof, conferred the production of or the increase in glutamine compared with the wild type control.

[9563] The nucleic acid sequence of At5g16650 from Arabidopsis thaliana, e.g. as shown in the respective line in column 5 of Table I, application no. 2 is unpublished. And the activity of the gene product thereof is the activity of At5g16650-protein.

[9564] Accordingly, in one embodiment, the process of the present invention for producing proline in a non-human organism, like a microorganism or a plant or a part thereof, comprises increasing or generating the activity of a gene product with the activity of a gene product conferring the activity of “At5g16650-protein”, especially from Arabidopsis thaliana or its functional equivalent or its homolog, e.g. the increase of
[9565] (a) a gene product of a gene comprising the nucleic acid molecule as shown in the respective line in column 5 of Table I, application no. 2, preferably the coding region thereof, or a homolog or a fragment thereof, and being depicted in the same respective line as said At5g16650, or a functional equivalent or a homolog thereof as shown in column 8 of Table I, application no. 2, preferably the coding region thereof, particularly a homolog or functional equivalent as shown in column 8 of Table I B, application no. 2, and being depicted in the same respective line as said At5g16650, and preferably the activity is increased non-targeted, or
[9566] (b) a polypeptide comprising a polypeptide, a consensus sequence or at least a polypeptide motif as shown in the respective line in column 5 of Table II or in column 8 of Table IV, application no. 2, respectively, and being depicted in the same respective line as said At5g16650, or a functional equivalent or a homolog thereof as depicted in column 8 of Table II, application no. 2, preferably a homolog or functional equivalent as depicted in column 8 of Table II B, application no. 2, and being depicted in the same respective line as said At5g16650, and preferably the activity is increased non-targeted.

[9567] Accordingly, in one embodiment, the molecule which activity is to be increased in the process of the invention is the gene product with an activity as a “At5g16650-protein”, preferably it is the molecule of section (a) or (b) of this paragraph.

[9568] In particular, it was observed that in plants, especially in Arabidopsis thaliana, increasing or generating the activity of a gene product non-targeted with the activity of a “At5g16650-protein”, preferably being encoded by a gene comprising the nucleic acid sequence SEQ ID NO. 25283, preferably the coding region thereof, conferred the production of or the increase in proline compared with the wild type control.

[9569] The nucleic acid sequence of At5g18600 from Arabidopsis thaliana, e.g. as shown in the respective line in column 5 of Table I, application no. 2 is unpublished. And the activity of the gene product thereof is the activity of monothiol glutaredoxin.

[9570] Accordingly, in one embodiment, the process of the present invention for producing glutamine in a non-human organism, like a microorganism or a plant or a part thereof, comprises increasing or generating the activity of a gene product with the activity of a gene product conferring the activity of “monothiol glutaredoxin”, especially from Arabidopsis thaliana or its functional equivalent or its homolog, e.g. the increase of
[9571] (a) a gene product of a gene comprising the nucleic acid molecule as shown in the respective line in column 5 of Table I, application no. 2, preferably the coding region thereof, or a homolog or a fragment thereof, and being depicted in the same respective line as said At5g18600, or a functional equivalent or a homolog thereof as shown in column 8 of Table I, application no. 2, preferably the coding region thereof, particularly a homolog or functional equivalent as shown in column 8 of Table I B, application no. 2, and being depicted in the same respective line as said At5g18600, and preferably the activity is increased non-targeted, or
[9572] (b) a polypeptide comprising a polypeptide, a consensus sequence or at least a polypeptide motif as shown in the respective line in column 5 of Table II or in column 8 of Table IV, application no. 2, respectively, and being depicted in the same respective line as said At5g18600, or a functional equivalent or a homolog thereof as depicted in column 8 of Table II, application no. 2, preferably a homolog or functional equivalent as depicted in column 8 of Table II B, application no. 2, and being depicted in the same respective line as said At5g18600, and preferably the activity is increased non-targeted.

[9573] Accordingly, in one embodiment, the molecule which activity is to be increased in the process of the invention is the gene product with an activity as a “monothiol glutaredoxin”, preferably it is the molecule of section (a) or (b) of this paragraph.

[9574] In particular, it was observed that in plants, especially in Arabidopsis thaliana, increasing or generating the activity of a gene product non-targeted with the activity of a “monothiol glutaredoxin”, preferably being encoded by a gene comprising the nucleic acid sequence SEQ ID NO. 4904, preferably the coding region thereof, conferred the production of or the increase in glutamine compared with the wild type control.

[9575] The nucleic acid sequence of At5g27640 from Arabidopsis thaliana, e.g. as shown in the respective line in column 5 of Table I, application no. 2 is unpublished. And the activity of the gene product thereof is the activity of translation initiation factor subunit.

[9576] Accordingly, in one embodiment, the process of the present invention for producing arginine in a non-human organism, like a microorganism or a plant or a part thereof, comprises increasing or generating the activity of a gene product with the activity of a gene product conferring the activity of “translation initiation factor subunit”, especially from Arabidopsis thaliana or its functional equivalent or its homolog, e.g. the increase of
[9577] (a) a gene product of a gene comprising the nucleic acid molecule as shown in the respective line in column 5 of Table I, application no. 2, preferably the coding region thereof, or a homolog or a fragment thereof, and being depicted in the same respective line as said At5g27640, or a functional equivalent or a homolog thereof as shown in column 8 of Table I, application no. 2, preferably the coding region thereof, particularly a homolog or functional equivalent as shown in column 8 of Table I B, application no. 2, and being depicted in the same respective line as said At5g27640, and preferably the activity is increased non-targeted, or
[9578] (b) a polypeptide comprising a polypeptide, a consensus sequence or at least a polypeptide motif as shown in the respective line in column 5 of Table II or in column 8 of Table IV, application no. 2, respectively, and being depicted in the same respective line as said At5g27640, or a functional equivalent or a homolog thereof as depicted in column 8 of Table II, application no. 2, preferably a homolog or functional equivalent as depicted in column 8 of Table II B, application no. 2, and being depicted in the same respective line as said At5g27640, and preferably the activity is increased non-targeted.

[9579] Accordingly, in one embodiment, the molecule which activity is to be increased in the process of the invention is the gene product with an activity as a “translation initiation factor subunit”, preferably it is the molecule of section (a) or (b) of this paragraph.

[9580] In particular, it was observed that in plants, especially in Arabidopsis thaliana, increasing or generating the activity of a gene product non-targeted with the activity of a “translation initiation factor subunit”, preferably being encoded by a gene comprising the nucleic acid sequence SEQ ID NO. 25344, preferably the coding region thereof, conferred the production of or the increase in arginine compared with the wild type control.

[9581] The nucleic acid sequence of At5g39760 from Arabidopsis thaliana, e.g. as shown in the respective line in column 5 of Table I, application no. 2 is unpublished. And the activity of the gene product thereof is the activity of transcription factor.

[9582] Accordingly, in one embodiment, the process of the present invention for producing glutamate in a non-human organism, like a microorganism or a plant or a part thereof, comprises increasing or generating the activity of a gene product with the activity of a gene product conferring the activity of “transcription factor”, especially from Arabidopsis thaliana or its functional equivalent or its homolog, e.g. the increase of
[9583] (a) a gene product of a gene comprising the nucleic acid molecule as shown in the respective line in column 5 of Table I, application no. 2, preferably the coding region thereof, or a homolog or a fragment thereof, and being depicted in the same respective line as said At5g39760, or a functional equivalent or a homolog thereof as shown in column 8 of Table I, application no. 2, preferably the coding region thereof, particularly a homolog or functional equivalent as shown in column 8 of Table I B, application no. 2, and being depicted in the same respective line as said At5g39760, and preferably the activity is increased non-targeted, or
[9584] (b) a polypeptide comprising a polypeptide, a consensus sequence or at least a polypeptide motif as shown in the respective line in column 5 of Table II or in column 8 of Table IV, application no. 2, respectively, and being depicted in the same respective line as said At5g39760, or a functional equivalent or a homolog thereof as depicted in column 8 of Table II, application no. 2, preferably a homolog or functional equivalent as depicted in column 8 of Table II B, application no. 2, and being depicted in the same respective line as said At5g39760, and preferably the activity is increased non-targeted.

[9585] Accordingly, in one embodiment, the molecule which activity is to be increased in the process of the invention is the gene product with an activity as a “transcription factor”, preferably it is the molecule of section (a) or (b) of this paragraph.

[9586] In particular, it was observed that in plants, especially in Arabidopsis thaliana, increasing or generating the activity of a gene product non-targeted with the activity of a “transcription factor”, preferably being encoded by a gene comprising the nucleic acid sequence SEQ ID NO. 25428, preferably the coding region thereof, conferred the production of or the increase in glutamate compared with the wild type control.

[9587] The nucleic acid sequence of At5g39760 from Arabidopsis thaliana, e.g. as shown in the respective line in column 5 of Table I, application no. 2 is unpublished. And the activity of the gene product thereof is the activity of transcription factor.

[9588] Accordingly, in one embodiment, the process of the present invention for producing proline in a non-human organism, like a microorganism or a plant or a part thereof, comprises increasing or generating the activity of a gene product with the activity of a gene product conferring the activity of “transcription factor”, especially from Arabidopsis thaliana or its functional equivalent or its homolog, e.g. the increase of
[9589] (a) a gene product of a gene comprising the nucleic acid molecule as shown in the respective line in column 5 of Table I, application no. 2, preferably the coding region thereof, or a homolog or a fragment thereof, and being depicted in the same respective line as said At5g39760, or a functional equivalent or a homolog thereof as shown in column 8 of Table I, application no. 2, preferably the coding region thereof, particularly a homolog or functional equivalent as shown in column 8 of Table I B, application no. 2, and being depicted in the same respective line as said At5g39760, and preferably the activity is increased non-targeted, or
[9590] (b) a polypeptide comprising a polypeptide, a consensus sequence or at least a polypeptide motif as shown in the respective line in column 5 of Table II or in column 8 of Table IV, application no. 2, respectively, and being depicted in the same respective line as said At5g39760, or a functional equivalent or a homolog thereof as depicted in column 8 of Table II, application no. 2, preferably a homolog or functional equivalent as depicted in column 8 of Table II B, application no. 2, and being depicted in the same respective line as said At5g39760, and preferably the activity is increased non-targeted.

[9591] Accordingly, in one embodiment, the molecule which activity is to be increased in the process of the invention is the gene product with an activity as a “transcription factor”, preferably it is the molecule of section (a) or (b) of this paragraph.

[9592] In particular, it was observed that in plants, especially in Arabidopsis thaliana, increasing or generating the activity of a gene product non-targeted with the activity of a “transcription factor”, preferably being encoded by a gene comprising the nucleic acid sequence SEQ ID NO. 25428, preferably the coding region thereof, conferred the production of or the increase in proline compared with the wild type control.

[9593] The nucleic acid sequence of At5g57050 from Arabidopsis thaliana, e.g. as shown in the respective line in column 5 of Table I, application no. 2 is unpublished. And the activity of the gene product thereof is the activity of protein phosphatase.

[9594] Accordingly, in one embodiment, the process of the present invention for producing glutamine in a non-human organism, like a microorganism or a plant or a part thereof, comprises increasing or generating the activity of a gene product with the activity of a gene product conferring the activity of “protein phosphatase”, especially from Arabidopsis thaliana or its functional equivalent or its homolog, e.g. the increase of
[9595] (a) a gene product of a gene comprising the nucleic acid molecule as shown in the respective line in column 5 of Table I, application no. 2, preferably the coding region thereof, or a homolog or a fragment thereof, and being depicted in the same respective line as said At5g57050, or a functional equivalent or a homolog thereof as shown in column 8 of Table I, application no. 2, preferably the coding region thereof, particularly a homolog or functional equivalent as shown in column 8 of Table I B, application no. 2, and being depicted in the same respective line as said At5g57050, and preferably the activity is increased non-targeted, or
[9596] (b) a polypeptide comprising a polypeptide, a consensus sequence or at least a polypeptide motif as shown in the respective line in column 5 of Table II or in column 8 of Table IV, application no. 2, respectively, and being depicted in the same respective line as said At5g57050, or a functional equivalent or a homolog thereof as depicted in column 8 of Table II, application no. 2, preferably a homolog or functional equivalent as depicted in column 8 of Table II B, application no. 2, and being depicted in the same respective line as said At5g57050, and preferably the activity is increased non-targeted.

[9597] Accordingly, in one embodiment, the molecule which activity is to be increased in the process of the invention is the gene product with an activity as a “protein phosphatase”, preferably it is the molecule of section (a) or (b) of this paragraph.

[9598] In particular, it was observed that in plants, especially in Arabidopsis thaliana, increasing or generating the activity of a gene product non-targeted with the activity of a “protein phosphatase”, preferably being encoded by a gene comprising the nucleic acid sequence SEQ ID NO. 5318, preferably the coding region thereof, conferred the production of or the increase in glutamine compared with the wild type control.

[9599] The nucleic acid sequence of At5g59220 from Arabidopsis thaliana, e.g. as shown in the respective line in column 5 of Table I, application no. 2 is unpublished. And the activity of the gene product thereof is the activity of protein phosphatase.

[9600] Accordingly, in one embodiment, the process of the present invention for producing glutamine in a non-human organism, like a microorganism or a plant or a part thereof, comprises increasing or generating the activity of a gene product with the activity of a gene product conferring the activity of “protein phosphatase”, especially from Arabidopsis thaliana or its functional equivalent or its homolog, e.g. the increase of
[9601] (a) a gene product of a gene comprising the nucleic acid molecule as shown in the respective line in column 5 of Table I, application no. 2, preferably the coding region thereof, or a homolog or a fragment thereof, and being depicted in the same respective line as said At5g59220, or a functional equivalent or a homolog thereof as shown in column 8 of Table I, application no. 2, preferably the coding region thereof, particularly a homolog or functional equivalent as shown in column 8 of Table I B, application no. 2, and being depicted in the same respective line as said At5g59220, and preferably the activity is increased non-targeted, or
[9602] (b) a polypeptide comprising a polypeptide, a consensus sequence or at least a polypeptide motif as shown in the respective line in column 5 of Table II or in column 8 of Table IV, application no. 2, respectively, and being depicted in the same respective line as said At5g59220, or a functional equivalent or a homolog thereof as depicted in column 8 of Table II, application no. 2, preferably a homolog or functional equivalent as depicted in column 8 of Table II B, application no. 2, and being depicted in the same respective line as said At5g59220, and preferably the activity is increased non-targeted.

[9603] Accordingly, in one embodiment, the molecule which activity is to be increased in the process of the invention is the gene product with an activity as a “protein phosphatase”, preferably it is the molecule of section (a) or (b) of this paragraph.

[9604] In particular, it was observed that in plants, especially in Arabidopsis thaliana, increasing or generating the activity of a gene product non-targeted with the activity of a “protein phosphatase”, preferably being encoded by a gene comprising the nucleic acid sequence SEQ ID NO. 25498, preferably the coding region thereof, conferred the production of or the increase in glutamine compared with the wild type control.

[9605] The nucleic acid sequence of At5g64920 from Arabidopsis thaliana, e.g. as shown in the respective line in column 5 of Table I, application no. 2 is unpublished. And the activity of the gene product thereof is the activity of zinc finger protein.

[9606] Accordingly, in one embodiment, the process of the present invention for producing arginine in a non-human organism, like a microorganism or a plant or a part thereof, comprises increasing or generating the activity of a gene product with the activity of a gene product conferring the activity of “zinc finger protein”, especially from Arabidopsis thaliana or its functional equivalent or its homolog, e.g. the increase of
[9607] (a) a gene product of a gene comprising the nucleic acid molecule as shown in the respective line in column 5 of Table I, application no. 2, preferably the coding region thereof, or a homolog or a fragment thereof, and being depicted in the same respective line as said At5g64920, or a functional equivalent or a homolog thereof as shown in column 8 of Table I, application no. 2, preferably the coding region thereof, particularly a homolog or functional equivalent as shown in column 8 of Table I B, application no. 2, and being depicted in the same respective line as said At5g64920, and preferably the activity is increased non-targeted, or
[9608] (b) a polypeptide comprising a polypeptide, a consensus sequence or at least a polypeptide motif as shown in the respective line in column 5 of Table II or in column 8 of Table IV, application no. 2, respectively, and being depicted in the same respective line as said At5g64920, or a functional equivalent or a homolog thereof as depicted in column 8 of Table II, application no. 2, preferably a homolog or functional equivalent as depicted in column 8 of Table II B, application no. 2, and being depicted in the same respective line as said At5g64920, and preferably the activity is increased non-targeted.

[9609] Accordingly, in one embodiment, the molecule which activity is to be increased in the process of the invention is the gene product with an activity as a “zinc finger protein”, preferably it is the molecule of section (a) or (b) of this paragraph.

[9610] In particular, it was observed that in plants, especially in Arabidopsis thaliana, increasing or generating the activity of a gene product non-targeted with the activity of a “zinc finger protein”, preferably being encoded by a gene comprising the nucleic acid sequence SEQ ID NO. 5493, preferably the coding region thereof, conferred the production of or the increase in arginine compared with the wild type control.

[9611] The nucleic acid sequence of At5g64920 from Arabidopsis thaliana, e.g. as shown in the respective line in column 5 of Table I, application no. 2 is unpublished. And the activity of the gene product thereof is the activity of zinc finger protein.

[9612] Accordingly, in one embodiment, the process of the present invention for producing glutamine in a non-human organism, like a microorganism or a plant or a part thereof, comprises increasing or generating the activity of a gene product with the activity of a gene product conferring the activity of “zinc finger protein”, especially from Arabidopsis thaliana or its functional equivalent or its homolog, e.g. the increase of
[9613] (a) a gene product of a gene comprising the nucleic acid molecule as shown in the respective line in column 5 of Table I, application no. 2, preferably the coding region thereof, or a homolog or a fragment thereof, and being depicted in the same respective line as said At5g64920, or a functional equivalent or a homolog thereof as shown in column 8 of Table I, application no. 2, preferably the coding region thereof, particularly a homolog or functional equivalent as shown in column 8 of Table I B, application no. 2, and being depicted in the same respective line as said At5g64920, and preferably the activity is increased non-targeted, or
[9614] (b) a polypeptide comprising a polypeptide, a consensus sequence or at least a polypeptide motif as shown in the respective line in column 5 of Table II or in column 8 of Table IV, application no. 2, respectively, and being depicted in the same respective line as said At5g64920, or a functional equivalent or a homolog thereof as depicted in column 8 of Table II, application no. 2, preferably a homolog or functional equivalent as depicted in column 8 of Table II B, application no. 2, and being depicted in the same respective line as said At5g64920, and preferably the activity is increased non-targeted.

[9615] Accordingly, in one embodiment, the molecule which activity is to be increased in the process of the invention is the gene product with an activity as a “zinc finger protein”, preferably it is the molecule of section (a) or (b) of this paragraph.

[9616] In particular, it was observed that in plants, especially in Arabidopsis thaliana, increasing or generating the activity of a gene product non-targeted with the activity of a “zinc finger protein”, preferably being encoded by a gene comprising the nucleic acid sequence SEQ ID NO. 5493, preferably the coding region thereof, conferred the production of or the increase in glutamine compared with the wild type control.

[9617] The nucleic acid sequence of AvinDRAFT_{—}1045 from Azotobacter vinelandii, e.g. as shown in the respective line in column 5 of Table I, application no. 2, has been published by deposition of the sequences to the EMBL/GenBank/DDBJ databases under “Sequencing of the draft genome assembly of Azotobacter vinelandii AvOP.” in June 2005 by Copeland et al. And the activity of the gene product thereof is the activity of transcriptional regulator.

[9618] Accordingly, in one embodiment, the process of the present invention for producing glutamate in a non-human organism, like a microorganism or a plant or a part thereof, comprises increasing or generating the activity of a gene product with the activity of a gene product conferring the activity of “transcriptional regulator”, especially from Azotobacter vinelandii or its functional equivalent or its homolog, e.g. the increase of
[9619] (a) a gene product of a gene comprising the nucleic acid molecule as shown in the respective line in column 5 of Table I, application no. 2, preferably the coding region thereof, or a homolog or a fragment thereof, and being depicted in the same respective line as said AvinDRAFT_{—}1045, or a functional equivalent or a homolog thereof as shown in column 8 of Table I, application no. 2, preferably the coding region thereof, particularly a homolog or functional equivalent as shown in column 8 of Table I B, application no. 2, and being depicted in the same respective line as said AvinDRAFT_{—}1045, and preferably the activity is increased non-targeted, or
[9620] (b) a polypeptide comprising a polypeptide, a consensus sequence or at least a polypeptide motif as shown in the respective line in column 5 of Table II or in column 8 of Table IV, application no. 2, respectively, and being depicted in the same respective line as said AvinDRAFT_{—}1045, or a functional equivalent or a homolog thereof as depicted in column 8 of Table II, application no. 2, preferably a homolog or functional equivalent as depicted in column 8 of Table II B, application no. 2, and being depicted in the same respective line as said AvinDRAFT_{—}1045, and preferably the activity is increased non-targeted.

[9621] Accordingly, in one embodiment, the molecule which activity is to be increased in the process of the invention is the gene product with an activity as a “transcriptional regulator”, preferably it is the molecule of section (a) or (b) of this paragraph.

[9622] In particular, it was observed that in plants, especially in Arabidopsis thaliana, increasing or generating the activity of a gene product non-targeted with the activity of a “transcriptional regulator”, preferably being encoded by a gene comprising the nucleic acid sequence SEQ ID NO. 25676, preferably the coding region thereof, conferred the production of or the increase in glutamate compared with the wild type control.

[9623] The nucleic acid sequence of AvinDRAFT_{—}1398 from Azotobacter vinelandii, e.g. as shown in the respective line in column 5 of Table I, application no. 2, has been published by deposition of the sequences to the EMBL/GenBank/DDBJ databases under “Sequencing of the draft genome assembly of Azotobacter vinelandii AvOP.” in June 2005 by Copeland et al. And the activity of the gene product thereof is the activity of adenylylsulfate kinase.

[9624] Accordingly, in one embodiment, the process of the present invention for producing glutamate in a non-human organism, like a microorganism or a plant or a part thereof, comprises increasing or generating the activity of a gene product with the activity of a gene product conferring the activity of “adenylylsulfate kinase”, especially from Azotobacter vinelandii or its functional equivalent or its homolog, e.g. the increase of
[9625] (a) a gene product of a gene comprising the nucleic acid molecule as shown in the respective line in column 5 of Table I, application no. 2, preferably the coding region thereof, or a homolog or a fragment thereof, and being depicted in the same respective line as said AvinDRAFT_{—}1398, or a functional equivalent or a homolog thereof as shown in column 8 of Table I, application no. 2, preferably the coding region thereof, particularly a homolog or functional equivalent as shown in column 8 of Table I B, application no. 2, and being depicted in the same respective line as said AvinDRAFT_{—}1398, and preferably the activity is increased non-targeted, or
[9626] (b) a polypeptide comprising a polypeptide, a consensus sequence or at least a polypeptide motif as shown in the respective line in column 5 of Table II or in column 8 of Table IV, application no. 2, respectively, and being depicted in the same respective line as said AvinDRAFT_{—}1398, or a functional equivalent or a homolog thereof as depicted in column 8 of Table II, application no. 2, preferably a homolog or functional equivalent as depicted in column 8 of Table II B, application no. 2, and being depicted in the same respective line as said AvinDRAFT_{—}1398, and preferably the activity is increased non-targeted.

[9627] Accordingly, in one embodiment, the molecule which activity is to be increased in the process of the invention is the gene product with an activity as a “adenylylsulfate kinase”, preferably it is the molecule of section (a) or (b) of this paragraph.

[9628] In particular, it was observed that in plants, especially in Arabidopsis thaliana, increasing or generating the activity of a gene product non-targeted with the activity of a “adenylylsulfate kinase”, preferably being encoded by a gene comprising the nucleic acid sequence SEQ ID NO. 25780, preferably the coding region thereof, conferred the production of or the increase in glutamate compared with the wild type control.

[9629] The nucleic acid sequence of AvinDRAFT_{—}1398 from Azotobacter vinelandii, e.g. as shown in the respective line in column 5 of Table I, application no. 2, has been published by deposition of the sequences to the EMBL/GenBank/DDBJ databases under “Sequencing of the draft genome assembly of Azotobacter vinelandii AvOP.” in June 2005 by Copeland et al. And the activity of the gene product thereof is the activity of adenylylsulfate kinase.

[9630] Accordingly, in one embodiment, the process of the present invention for producing glutamine in a non-human organism, like a microorganism or a plant or a part thereof, comprises increasing or generating the activity of a gene product with the activity of a gene product conferring the activity of “adenylylsulfate kinase”, especially from Azotobacter vinelandii or its functional equivalent or its homolog, e.g. the increase of
[9631] (a) a gene product of a gene comprising the nucleic acid molecule as shown in the respective line in column 5 of Table I, application no. 2, preferably the coding region thereof, or a homolog or a fragment thereof, and being depicted in the same respective line as said AvinDRAFT_{—}1398, or a functional equivalent or a homolog thereof as shown in column 8 of Table I, application no. 2, preferably the coding region thereof, particularly a homolog or functional equivalent as shown in column 8 of Table I B, application no. 2, and being depicted in the same respective line as said AvinDRAFT_{—}1398, and preferably the activity is increased non-targeted, or
[9632] (b) a polypeptide comprising a polypeptide, a consensus sequence or at least a polypeptide motif as shown in the respective line in column 5 of Table II or in column 8 of Table IV, application no. 2, respectively, and being depicted in the same respective line as said AvinDRAFT_{—}1398, or a functional equivalent or a homolog thereof as depicted in column 8 of Table II, application no. 2, preferably a homolog or functional equivalent as depicted in column 8 of Table II B, application no. 2, and being depicted in the same respective line as said AvinDRAFT_{—}1398, and preferably the activity is increased non-targeted.

[9633] Accordingly, in one embodiment, the molecule which activity is to be increased in the process of the invention is the gene product with an activity as a “adenylylsulfate kinase”, preferably it is the molecule of section (a) or (b) of this paragraph.

[9634] In particular, it was observed that in plants, especially in Arabidopsis thaliana, increasing or generating the activity of a gene product non-targeted with the activity of a “adenylylsulfate kinase”, preferably being encoded by a gene comprising the nucleic acid sequence SEQ ID NO. 25780, preferably the coding region thereof, conferred the production of or the increase in glutamine compared with the wild type control.

[9635] The nucleic acid sequence of AvinDRAFT_{—}1495 from Azotobacter vinelandii, e.g. as shown in the respective line in column 5 of Table I, application no. 2, has been published by deposition of the sequences to the EMBL/GenBank/DDBJ databases under “Sequencing of the draft genome assembly of Azotobacter vinelandii AvOP.” in June 2005 by Copeland et al. And the activity of the gene product thereof is the activity of malic enzyme.

[9636] Accordingly, in one embodiment, the process of the present invention for producing glutamine in a non-human organism, like a microorganism or a plant or a part thereof, comprises increasing or generating the activity of a gene product with the activity of a gene product conferring the activity of “malic enzyme”, especially from Azotobacter vinelandii or its functional equivalent or its homolog, e.g. the increase of
[9637] (a) a gene product of a gene comprising the nucleic acid molecule as shown in the respective line in column 5 of Table I, application no. 2, preferably the coding region thereof, or a homolog or a fragment thereof, and being depicted in the same respective line as said AvinDRAFT_{—}1495, or a functional equivalent or a homolog thereof as shown in column 8 of Table I, application no. 2, preferably the coding region thereof, particularly a homolog or functional equivalent as shown in column 8 of Table I B, application no. 2, and being depicted in the same respective line as said AvinDRAFT_{—}1495, and preferably the activity is increased non-targeted, or
[9638] (b) a polypeptide comprising a polypeptide, a consensus sequence or at least a polypeptide motif as shown in the respective line in column 5 of Table II or in column 8 of Table IV, application no. 2, respectively, and being depicted in the same respective line as said AvinDRAFT_{—}1495, or a functional equivalent or a homolog thereof as depicted in column 8 of Table II, application no. 2, preferably a homolog or functional equivalent as depicted in column 8 of Table II B, application no. 2, and being depicted in the same respective line as said AvinDRAFT_{—}1495, and preferably the activity is increased non-targeted.

[9639] Accordingly, in one embodiment, the molecule which activity is to be increased in the process of the invention is the gene product with an activity as a “malic enzyme”, preferably it is the molecule of section (a) or (b) of this paragraph.

[9640] In particular, it was observed that in plants, especially in Arabidopsis thaliana, increasing or generating the activity of a gene product non-targeted with the activity of a “malic enzyme”, preferably being encoded by a gene comprising the nucleic acid sequence SEQ ID NO. 5557, preferably the coding region thereof, conferred the production of or the increase in glutamine compared with the wild type control.

[9641] The nucleic acid sequence of AvinDRAFT_{—}1495 from Azotobacter vinelandii, e.g. as shown in the respective line in column 5 of Table I, application no. 2, has been published by deposition of the sequences to the EMBL/GenBank/DDBJ databases under “Sequencing of the draft genome assembly of Azotobacter vinelandii AvOP.” in June 2005 by Copeland et al. And the activity of the gene product thereof is the activity of malic enzyme.

[9642] Accordingly, in one embodiment, the process of the present invention for producing proline in a non-human organism, like a microorganism or a plant or a part thereof, comprises increasing or generating the activity of a gene product with the activity of a gene product conferring the activity of “malic enzyme”, especially from Azotobacter vinelandii or its functional equivalent or its homolog, e.g. the increase of
[9643] (a) a gene product of a gene comprising the nucleic acid molecule as shown in the respective line in column 5 of Table I, application no. 2, preferably the coding region thereof, or a homolog or a fragment thereof, and being depicted in the same respective line as said AvinDRAFT_{—}1495, or a functional equivalent or a homolog thereof as shown in column 8 of Table I, application no. 2, preferably the coding region thereof, particularly a homolog or functional equivalent as shown in column 8 of Table I B, application no. 2, and being depicted in the same respective line as said AvinDRAFT_{—}1495, and preferably the activity is increased non-targeted, or
[9644] (b) a polypeptide comprising a polypeptide, a consensus sequence or at least a polypeptide motif as shown in the respective line in column 5 of Table II or in column 8 of Table IV, application no. 2, respectively, and being depicted in the same respective line as said AvinDRAFT_{—}1495, or a functional equivalent or a homolog thereof as depicted in column 8 of Table II, application no. 2, preferably a homolog or functional equivalent as depicted in column 8 of Table II B, application no. 2, and being depicted in the same respective line as said AvinDRAFT_{—}1495, and preferably the activity is increased non-targeted.

[9645] Accordingly, in one embodiment, the molecule which activity is to be increased in the process of the invention is the gene product with an activity as a “malic enzyme”, preferably it is the molecule of section (a) or (b) of this paragraph.

[9646] In particular, it was observed that in plants, especially in Arabidopsis thaliana, increasing or generating the activity of a gene product non-targeted with the activity of a “malic enzyme”, preferably being encoded by a gene comprising the nucleic acid sequence SEQ ID NO. 5557, preferably the coding region thereof, conferred the production of or the increase in proline compared with the wild type control.

[9647] The nucleic acid sequence of AvinDRAFT_{—}1534 from Azotobacter vinelandii, e.g. as shown in the respective line in column 5 of Table I, application no. 2, has been published by deposition of the sequences to the EMBL/GenBank/DDBJ databases under “Sequencing of the draft genome assembly of Azotobacter vinelandii AvOP.” in June 2005 by Copeland et al. And the activity of the gene product thereof is the activity of glycosyl transferase.

[9648] Accordingly, in one embodiment, the process of the present invention for producing proline in a non-human organism, like a microorganism or a plant or a part thereof, comprises increasing or generating the activity of a gene product with the activity of a gene product conferring the activity of “glycosyl transferase”, especially from Azotobacter vinelandii or its functional equivalent or its homolog, e.g. the increase of
[9649] (a) a gene product of a gene comprising the nucleic acid molecule as shown in the respective line in column 5 of Table I, application no. 2, preferably the coding region thereof, or a homolog or a fragment thereof, and being depicted in the same respective line as said AvinDRAFT_{—}1534, or a functional equivalent or a homolog thereof as shown in column 8 of Table I, application no. 2, preferably the coding region thereof, particularly a homolog or functional equivalent as shown in column 8 of Table I B, application no. 2, and being depicted in the same respective line as said AvinDRAFT_{—}1534, and preferably the activity is increased non-targeted, or
[9650] (b) a polypeptide comprising a polypeptide, a consensus sequence or at least a polypeptide motif as shown in the respective line in column 5 of Table II or in column 8 of Table IV, application no. 2, respectively, and being depicted in the same respective line as said AvinDRAFT_{—}1534, or a functional equivalent or a homolog thereof as depicted in column 8 of Table II, application no. 2, preferably a homolog or functional equivalent as depicted in column 8 of Table II B, application no. 2, and being depicted in the same respective line as said AvinDRAFT_{—}1534, and preferably the activity is increased non-targeted.

[9651] Accordingly, in one embodiment, the molecule which activity is to be increased in the process of the invention is the gene product with an activity as a “glycosyl transferase”, preferably it is the molecule of section (a) or (b) of this paragraph.

[9652] In particular, it was observed that in plants, especially in Arabidopsis thaliana, increasing or generating the activity of a gene product non-targeted with the activity of a “glycosyl transferase”, preferably being encoded by a gene comprising the nucleic acid sequence SEQ ID NO. 26120, preferably the coding region thereof, conferred the production of or the increase in proline compared with the wild type control.

[9653] The nucleic acid sequence of AvinDRAFT_{—}1624 from Azotobacter vinelandii, e.g. as shown in the respective line in column 5 of Table I, application no. 2, has been published by deposition of the sequences to the EMBL/GenBank/DDBJ databases under “Sequencing of the draft genome assembly of Azotobacter vinelandii AvOP.” in June 2005 by Copeland et al. And the activity of the gene product thereof is the activity of sec-independent protein translocase.

[9654] Accordingly, in one embodiment, the process of the present invention for producing proline in a non-human organism, like a microorganism or a plant or a part thereof, comprises increasing or generating the activity of a gene product with the activity of a gene product conferring the activity of “sec-independent protein translocase”, especially from Azotobacter vinelandii or its functional equivalent or its homolog, e.g. the increase of
[9655] (a) a gene product of a gene comprising the nucleic acid molecule as shown in the respective line in column 5 of Table I, application no. 2, preferably the coding region thereof, or a homolog or a fragment thereof, and being depicted in the same respective line as said AvinDRAFT_{—}1624, or a functional equivalent or a homolog thereof as shown in column 8 of Table I, application no. 2, preferably the coding region thereof, particularly a homolog or functional equivalent as shown in column 8 of Table I B, application no. 2, and being depicted in the same respective line as said AvinDRAFT_{—}1624, and preferably the activity is increased non-targeted, or
[9656] (b) a polypeptide comprising a polypeptide, a consensus sequence or at least a polypeptide motif as shown in the respective line in column 5 of Table II or in column 8 of Table IV, application no. 2, respectively, and being depicted in the same respective line as said AvinDRAFT_{—}1624, or a functional equivalent or a homolog thereof as depicted in column 8 of Table II, application no. 2, preferably a homolog or functional equivalent as depicted in column 8 of Table II B, application no. 2, and being depicted in the same respective line as said AvinDRAFT_{—}1624, and preferably the activity is increased non-targeted.

[9657] Accordingly, in one embodiment, the molecule which activity is to be increased in the process of the invention is the gene product with an activity as a “sec-independent protein translocase”, preferably it is the molecule of section (a) or (b) of this paragraph.

[9658] In particular, it was observed that in plants, especially in Arabidopsis thaliana, increasing or generating the activity of a gene product non-targeted with the activity of a “sec-independent protein translocase”, preferably being encoded by a gene comprising the nucleic acid sequence SEQ ID NO. 26196, preferably the coding region thereof, conferred the production of or the increase in proline compared with the wild type control.

[9659] The nucleic acid sequence of AvinDRAFT_{—}1806 from Azotobacter vinelandii, e.g. as shown in the respective line in column 5 of Table I, application no. 2, has been published by deposition of the sequences to the EMBL/GenBank/DDBJ databases under “Sequencing of the draft genome assembly of Azotobacter vinelandii AvOP.” in June 2005 by Copeland et al. And the activity of the gene product thereof is the activity of pyruvate kinase.

[9660] Accordingly, in one embodiment, the process of the present invention for producing glutamate in a non-human organism, like a microorganism or a plant or a part thereof, comprises increasing or generating the activity of a gene product with the activity of a gene product conferring the activity of “pyruvate kinase”, especially from Azotobacter vinelandii or its functional equivalent or its homolog, e.g. the increase of
[9661] (a) a gene product of a gene comprising the nucleic acid molecule as shown in the respective line in column 5 of Table I, application no. 2, preferably the coding region thereof, or a homolog or a fragment thereof, and being depicted in the same respective line as said AvinDRAFT_{—}1806, or a functional equivalent or a homolog thereof as shown in column 8 of Table I, application no. 2, preferably the coding region thereof, particularly a homolog or functional equivalent as shown in column 8 of Table I B, application no. 2, and being depicted in the same respective line as said AvinDRAFT_{—}1806, and preferably the activity is increased non-targeted, or
[9662] (b) a polypeptide comprising a polypeptide, a consensus sequence or at least a polypeptide motif as shown in the respective line in column 5 of Table II or in column 8 of Table IV, application no. 2, respectively, and being depicted in the same respective line as said AvinDRAFT_{—}1806, or a functional equivalent or a homolog thereof as depicted in column 8 of Table II, application no. 2, preferably a homolog or functional equivalent as depicted in column 8 of Table II B, application no. 2, and being depicted in the same respective line as said AvinDRAFT_{—}1806, and preferably the activity is increased non-targeted.

[9663] Accordingly, in one embodiment, the molecule which activity is to be increased in the process of the invention is the gene product with an activity as a “pyruvate kinase”, preferably it is the molecule of section (a) or (b) of this paragraph.

[9664] In particular, it was observed that in plants, especially in Arabidopsis thaliana, increasing or generating the activity of a gene product non-targeted with the activity of a “pyruvate kinase”, preferably being encoded by a gene comprising the nucleic acid sequence SEQ ID NO. 26434, preferably the coding region thereof, conferred the production of or the increase in glutamate compared with the wild type control.

[9665] The nucleic acid sequence of AvinDRAFT_{—}2091 from Azotobacter vinelandii, e.g. as shown in the respective line in column 5 of Table I, application no. 2, has been published by deposition of the sequences to the EMBL/GenBank/DDBJ databases under “Sequencing of the draft genome assembly of Azotobacter vinelandii AvOP.” in June 2005 by Copeland et al. And the activity of the gene product thereof is the activity of beta-hydroxylase.

[9666] Accordingly, in one embodiment, the process of the present invention for producing arginine in a non-human organism, like a microorganism or a plant or a part thereof, comprises increasing or generating the activity of a gene product with the activity of a gene product conferring the activity of “beta-hydroxylase”, especially from Azotobacter vinelandii or its functional equivalent or its homolog, e.g. the increase of
[9667] (a) a gene product of a gene comprising the nucleic acid molecule as shown in the respective line in column 5 of Table I, application no. 2, preferably the coding region thereof, or a homolog or a fragment thereof, and being depicted in the same respective line as said AvinDRAFT_{—}2091, or a functional equivalent or a homolog thereof as shown in column 8 of Table I, application no. 2, preferably the coding region thereof, particularly a homolog or functional equivalent as shown in column 8 of Table I B, application no. 2, and being depicted in the same respective line as said AvinDRAFT_{—}2091, and preferably the activity is increased non-targeted, or
[9668] (b) a polypeptide comprising a polypeptide, a consensus sequence or at least a polypeptide motif as shown in the respective line in column 5 of Table II or in column 8 of Table IV, application no. 2, respectively, and being depicted in the same respective line as said AvinDRAFT_{—}2091, or a functional equivalent or a homolog thereof as depicted in column 8 of Table II, application no. 2, preferably a homolog or functional equivalent as depicted in column 8 of Table II B, application no. 2, and being depicted in the same respective line as said AvinDRAFT_{—}2091, and preferably the activity is increased non-targeted.

[9669] Accordingly, in one embodiment, the molecule which activity is to be increased in the process of the invention is the gene product with an activity as a “beta-hydroxylase”, preferably it is the molecule of section (a) or (b) of this paragraph.

[9670] In particular, it was observed that in plants, especially in Arabidopsis thaliana, increasing or generating the activity of a gene product non-targeted with the activity of a “beta-hydroxylase”, preferably being encoded by a gene comprising the nucleic acid sequence SEQ ID NO. 6040, preferably the coding region thereof, conferred the production of or the increase in arginine compared with the wild type control.

[9671] The nucleic acid sequence of AvinDRAFT_{—}2344 from Azotobacter vinelandii, e.g. as shown in the respective line in column 5 of Table I, application no. 2, has been published by deposition of the sequences to the EMBL/GenBank/DDBJ databases under “Sequencing of the draft genome assembly of Azotobacter vinelandii AvOP.” in June 2005 by Copeland et al. And the activity of the gene product thereof is the activity of elongation factor Tu.

[9672] Accordingly, in one embodiment, the process of the present invention for producing arginine in a non-human organism, like a microorganism or a plant or a part thereof, comprises increasing or generating the activity of a gene product with the activity of a gene product conferring the activity of “elongation factor Tu”, especially from Azotobacter vinelandii or its functional equivalent or its homolog, e.g. the increase of
[9673] (a) a gene product of a gene comprising the nucleic acid molecule as shown in the respective line in column 5 of Table I, application no. 2, preferably the coding region thereof, or a homolog or a fragment thereof, and being depicted in the same respective line as said AvinDRAFT_{—}2344, or a functional equivalent or a homolog thereof as shown in column 8 of Table I, application no. 2, preferably the coding region thereof, particularly a homolog or functional equivalent as shown in column 8 of Table I B, application no. 2, and being depicted in the same respective line as said AvinDRAFT_{—}2344, and preferably the activity is increased non-targeted, or
[9674] (b) a polypeptide comprising a polypeptide, a consensus sequence or at least a polypeptide motif as shown in the respective line in column 5 of Table II or in column 8 of Table IV, application no. 2, respectively, and being depicted in the same respective line as said AvinDRAFT_{—}2344, or a functional equivalent or a homolog thereof as depicted in column 8 of Table II, application no. 2, preferably a homolog or functional equivalent as depicted in column 8 of Table II B, application no. 2, and being depicted in the same respective line as said AvinDRAFT_{—}2344, and preferably the activity is increased non-targeted.

[9675] Accordingly, in one embodiment, the molecule which activity is to be increased in the process of the invention is the gene product with an activity as a “elongation factor Tu”, preferably it is the molecule of section (a) or (b) of this paragraph.

[9676] In particular, it was observed that in plants, especially in Arabidopsis thaliana, increasing or generating the activity of a gene product non-targeted with the activity of a “elongation factor Tu”, preferably being encoded by a gene comprising the nucleic acid sequence SEQ ID NO. 27021, preferably the coding region thereof, conferred the production of or the increase in arginine compared with the wild type control.

[9677] The nucleic acid sequence of AvinDRAFT_{—}2344 from Azotobacter vinelandii, e.g. as shown in the respective line in column 5 of Table I, application no. 2, has been published by deposition of the sequences to the EMBL/GenBank/DDBJ databases under “Sequencing of the draft genome assembly of Azotobacter vinelandii AvOP.” in June 2005 by Copeland et al. And the activity of the gene product thereof is the activity of elongation factor Tu.

[9678] Accordingly, in one embodiment, the process of the present invention for producing glutamate in a non-human organism, like a microorganism or a plant or a part thereof, comprises increasing or generating the activity of a gene product with the activity of a gene product conferring the activity of “elongation factor Tu”, especially from Azotobacter vinelandii or its functional equivalent or its homolog, e.g. the increase of
[9679] (a) a gene product of a gene comprising the nucleic acid molecule as shown in the respective line in column 5 of Table I, application no. 2, preferably the coding region thereof, or a homolog or a fragment thereof, and being depicted in the same respective line as said AvinDRAFT_{—}2344, or a functional equivalent or a homolog thereof as shown in column 8 of Table I, application no. 2, preferably the coding region thereof, particularly a homolog or functional equivalent as shown in column 8 of Table I B, application no. 2, and being depicted in the same respective line as said AvinDRAFT_{—}2344, and preferably the activity is increased non-targeted, or
[9680] (b) a polypeptide comprising a polypeptide, a consensus sequence or at least a polypeptide motif as shown in the respective line in column 5 of Table II or in column 8 of Table IV, application no. 2, respectively, and being depicted in the same respective line as said AvinDRAFT_{—}2344, or a functional equivalent or a homolog thereof as depicted in column 8 of Table II, application no. 2, preferably a homolog or functional equivalent as depicted in column 8 of Table II B, application no. 2, and being depicted in the same respective line as said AvinDRAFT_{—}2344, and preferably the activity is increased non-targeted.

[9681] Accordingly, in one embodiment, the molecule which activity is to be increased in the process of the invention is the gene product with an activity as a “elongation factor Tu”, preferably it is the molecule of section (a) or (b) of this paragraph.

[9682] In particular, it was observed that in plants, especially in Arabidopsis thaliana, increasing or generating the activity of a gene product non-targeted with the activity of a “elongation factor Tu”, preferably being encoded by a gene comprising the nucleic acid sequence SEQ ID NO. 27021, preferably the coding region thereof, conferred the production of or the increase in glutamate compared with the wild type control.

[9683] The nucleic acid sequence of AvinDRAFT_{—}2344 from Azotobacter vinelandii, e.g. as shown in the respective line in column 5 of Table I, application no. 2, has been published by deposition of the sequences to the EMBL/GenBank/DDBJ databases under “Sequencing of the draft genome assembly of Azotobacter vinelandii AvOP.” in June 2005 by Copeland et al. And the activity of the gene product thereof is the activity of elongation factor Tu.

[9684] Accordingly, in one embodiment, the process of the present invention for producing glutamine in a non-human organism, like a microorganism or a plant or a part thereof, comprises increasing or generating the activity of a gene product with the activity of a gene product conferring the activity of “elongation factor Tu”, especially from Azotobacter vinelandii or its functional equivalent or its homolog, e.g. the increase of
[9685] (a) a gene product of a gene comprising the nucleic acid molecule as shown in the respective line in column 5 of Table I, application no. 2, preferably the coding region thereof, or a homolog or a fragment thereof, and being depicted in the same respective line as said AvinDRAFT_{—}2344, or a functional equivalent or a homolog thereof as shown in column 8 of Table I, application no. 2, preferably the coding region thereof, particularly a homolog or functional equivalent as shown in column 8 of Table I B, application no. 2, and being depicted in the same respective line as said AvinDRAFT_{—}2344, and preferably the activity is increased non-targeted, or
[9686] (b) a polypeptide comprising a polypeptide, a consensus sequence or at least a polypeptide motif as shown in the respective line in column 5 of Table II or in column 8 of Table IV, application no. 2, respectively, and being depicted in the same respective line as said AvinDRAFT_{—}2344, or a functional equivalent or a homolog thereof as depicted in column 8 of Table II, application no. 2, preferably a homolog or functional equivalent as depicted in column 8 of Table II B, application no. 2, and being depicted in the same respective line as said AvinDRAFT_{—}2344, and preferably the activity is increased non-targeted.

[9687] Accordingly, in one embodiment, the molecule which activity is to be increased in the process of the invention is the gene product with an activity as a “elongation factor Tu”, preferably it is the molecule of section (a) or (b) of this paragraph.

[9688] In particular, it was observed that in plants, especially in Arabidopsis thaliana, increasing or generating the activity of a gene product non-targeted with the activity of a “elongation factor Tu”, preferably being encoded by a gene comprising the nucleic acid sequence SEQ ID NO. 27021, preferably the coding region thereof, conferred the production of or the increase in glutamine compared with the wild type control.

[9689] The nucleic acid sequence of AvinDRAFT_{—}2521 from Azotobacter vinelandii, e.g. as shown in the respective line in column 5 of Table I, application no. 2, has been published by deposition of the sequences to the EMBL/GenBank/DDBJ databases under “Sequencing of the draft genome assembly of Azotobacter vinelandii AvOP.” in June 2005 by Copeland et al. And the activity of the gene product thereof is the activity of ABC transporter permease protein.

[9690] Accordingly, in one embodiment, the process of the present invention for producing glutamine in a non-human organism, like a microorganism or a plant or a part thereof, comprises increasing or generating the activity of a gene product with the activity of a gene product conferring the activity of “ABC transporter permease protein”, especially from Azotobacter vinelandii or its functional equivalent or its homolog, e.g. the increase of
[9691] (a) a gene product of a gene comprising the nucleic acid molecule as shown in the respective line in column 5 of Table I, application no. 2, preferably the coding region thereof, or a homolog or a fragment thereof, and being depicted in the same respective line as said AvinDRAFT_{—}2521, or a functional equivalent or a homolog thereof as shown in column 8 of Table I, application no. 2, preferably the coding region thereof, particularly a homolog or functional equivalent as shown in column 8 of Table I B, application no. 2, and being depicted in the same respective line as said AvinDRAFT_{—}2521, and preferably the activity is increased non-targeted, or
[9692] (b) a polypeptide comprising a polypeptide, a consensus sequence or at least a polypeptide motif as shown in the respective line in column 5 of Table II or in column 8 of Table IV, application no. 2, respectively, and being depicted in the same respective line as said AvinDRAFT_{—}2521, or a functional equivalent or a homolog thereof as depicted in column 8 of Table II, application no. 2, preferably a homolog or functional equivalent as depicted in column 8 of Table II B, application no. 2, and being depicted in the same respective line as said AvinDRAFT_{—}2521, and preferably the activity is increased non-targeted.

[9693] Accordingly, in one embodiment, the molecule which activity is to be increased in the process of the invention is the gene product with an activity as a “ABC transporter permease protein”, preferably it is the molecule of section (a) or (b) of this paragraph.

[9694] In particular, it was observed that in plants, especially in Arabidopsis thaliana, increasing or generating the activity of a gene product non-targeted with the activity of a “ABC transporter permease protein”, preferably being encoded by a gene comprising the nucleic acid sequence SEQ ID NO. 27882, preferably the coding region thereof, conferred the production of or the increase in glutamine compared with the wild type control.

[9695] The nucleic acid sequence of AvinDRAFT_{—}2521 from Azotobacter vinelandii, e.g. as shown in the respective line in column 5 of Table I, application no. 2, has been published by deposition of the sequences to the EMBL/GenBank/DDBJ databases under “Sequencing of the draft genome assembly of Azotobacter vinelandii AvOP.” in June 2005 by Copeland et al. And the activity of the gene product thereof is the activity of ABC transporter permease protein.

[9696] Accordingly, in one embodiment, the process of the present invention for producing proline in a non-human organism, like a microorganism or a plant or a part thereof, comprises increasing or generating the activity of a gene product with the activity of a gene product conferring the activity of “ABC transporter permease protein”, especially from Azotobacter vinelandii or its functional equivalent or its homolog, e.g. the increase of
[9697] (a) a gene product of a gene comprising the nucleic acid molecule as shown in the respective line in column 5 of Table I, application no. 2, preferably the coding region thereof, or a homolog or a fragment thereof, and being depicted in the same respective line as said AvinDRAFT_{—}2521, or a functional equivalent or a homolog thereof as shown in column 8 of Table I, application no. 2, preferably the coding region thereof, particularly a homolog or functional equivalent as shown in column 8 of Table I B, application no. 2, and being depicted in the same respective line as said AvinDRAFT_{—}2521, and preferably the activity is increased non-targeted, or
[9698] (b) a polypeptide comprising a polypeptide, a consensus sequence or at least a polypeptide motif as shown in the respective line in column 5 of Table II or in column 8 of Table IV, application no. 2, respectively, and being depicted in the same respective line as said AvinDRAFT_{—}2521, or a functional equivalent or a homolog thereof as depicted in column 8 of Table II, application no. 2, preferably a homolog or functional equivalent as depicted in column 8 of Table II B, application no. 2, and being depicted in the same respective line as said AvinDRAFT_{—}2521, and preferably the activity is increased non-targeted.

[9699] Accordingly, in one embodiment, the molecule which activity is to be increased in the process of the invention is the gene product with an activity as a “ABC transporter permease protein”, preferably it is the molecule of section (a) or (b) of this paragraph.

[9700] In particular, it was observed that in plants, especially in Arabidopsis thaliana, increasing or generating the activity of a gene product non-targeted with the activity of a “ABC transporter permease protein”, preferably being encoded by a gene comprising the nucleic acid sequence SEQ ID NO. 27882, preferably the coding region thereof, conferred the production of or the increase in proline compared with the wild type control.

[9701] The nucleic acid sequence of AvinDRAFT_{—}2754 from Azotobacter vinelandii, e.g. as shown in the respective line in column 5 of Table I, application no. 2, has been published by deposition of the sequences to the EMBL/GenBank/DDBJ databases under “Sequencing of the draft genome assembly of Azotobacter vinelandii AvOP.” in June 2005 by Copeland et al. And the activity of the gene product thereof is the activity of acyl-CoA synthase.

[9702] Accordingly, in one embodiment, the process of the present invention for producing arginine in a non-human organism, like a microorganism or a plant or a part thereof, comprises increasing or generating the activity of a gene product with the activity of a gene product conferring the activity of “acyl-CoA synthase”, especially from Azotobacter vinelandii or its functional equivalent or its homolog, e.g. the increase of
[9703] (a) a gene product of a gene comprising the nucleic acid molecule as shown in the respective line in column 5 of Table I, application no. 2, preferably the coding region thereof, or a homolog or a fragment thereof, and being depicted in the same respective line as said AvinDRAFT_{—}2754, or a functional equivalent or a homolog thereof as shown in column 8 of Table I, application no. 2, preferably the coding region thereof, particularly a homolog or functional equivalent as shown in column 8 of Table I B, application no. 2, and being depicted in the same respective line as said AvinDRAFT_{—}2754, and preferably the activity is increased non-targeted, or
[9704] (b) a polypeptide comprising a polypeptide, a consensus sequence or at least a polypeptide motif as shown in the respective line in column 5 of Table II or in column 8 of Table IV, application no. 2, respectively, and being depicted in the same respective line as said AvinDRAFT_{—}2754, or a functional equivalent or a homolog thereof as depicted in column 8 of Table II, application no. 2, preferably a homolog or functional equivalent as depicted in column 8 of Table II B, application no. 2, and being depicted in the same respective line as said AvinDRAFT_{—}2754, and preferably the activity is increased non-targeted.

[9705] Accordingly, in one embodiment, the molecule which activity is to be increased in the process of the invention is the gene product with an activity as a “acyl-CoA synthase”, preferably it is the molecule of section (a) or (b) of this paragraph.

[9706] In particular, it was observed that in plants, especially in Arabidopsis thaliana, increasing or generating the activity of a gene product non-targeted with the activity of a “acyl-CoA synthase”, preferably being encoded by a gene comprising the nucleic acid sequence SEQ ID NO. 28040, preferably the coding region thereof, conferred the production of or the increase in arginine compared with the wild type control.

[9707] The nucleic acid sequence of AvinDRAFT_{—}2754 from Azotobacter vinelandii, e.g. as shown in the respective line in column 5 of Table I, application no. 2, has been published by deposition of the sequences to the EMBL/GenBank/DDBJ databases under “Sequencing of the draft genome assembly of Azotobacter vinelandii AvOP.” in June 2005 by Copeland et al. And the activity of the gene product thereof is the activity of acyl-CoA synthase.

[9708] Accordingly, in one embodiment, the process of the present invention for producing glutamate in a non-human organism, like a microorganism or a plant or a part thereof, comprises increasing or generating the activity of a gene product with the activity of a gene product conferring the activity of “acyl-CoA synthase”, especially from Azotobacter vinelandii or its functional equivalent or its homolog, e.g. the increase of
[9709] (a) a gene product of a gene comprising the nucleic acid molecule as shown in the respective line in column 5 of Table I, application no. 2, preferably the coding region thereof, or a homolog or a fragment thereof, and being depicted in the same respective line as said AvinDRAFT_{—}2754, or a functional equivalent or a homolog thereof as shown in column 8 of Table I, application no. 2, preferably the coding region thereof, particularly a homolog or functional equivalent as shown in column 8 of Table I B, application no. 2, and being depicted in the same respective line as said AvinDRAFT_{—}2754, and preferably the activity is increased non-targeted, or
[9710] (b) a polypeptide comprising a polypeptide, a consensus sequence or at least a polypeptide motif as shown in the respective line in column 5 of Table II or in column 8 of Table IV, application no. 2, respectively, and being depicted in the same respective line as said AvinDRAFT_{—}2754, or a functional equivalent or a homolog thereof as depicted in column 8 of Table II, application no. 2, preferably a homolog or functional equivalent as depicted in column 8 of Table II B, application no. 2, and being depicted in the same respective line as said AvinDRAFT_{—}2754, and preferably the activity is increased non-targeted.

[9711] Accordingly, in one embodiment, the molecule which activity is to be increased in the process of the invention is the gene product with an activity as a “acyl-CoA synthase”, preferably it is the molecule of section (a) or (b) of this paragraph.

[9712] In particular, it was observed that in plants, especially in Arabidopsis thaliana, increasing or generating the activity of a gene product non-targeted with the activity of a “acyl-CoA synthase”, preferably being encoded by a gene comprising the nucleic acid sequence SEQ ID NO. 28040, preferably the coding region thereof, conferred the production of or the increase in glutamate compared with the wild type control.

[9713] The nucleic acid sequence of AvinDRAFT_{—}2754 from Azotobacter vinelandii, e.g. as shown in the respective line in column 5 of Table I, application no. 2, has been published by deposition of the sequences to the EMBL/GenBank/DDBJ databases under “Sequencing of the draft genome assembly of Azotobacter vinelandii AvOP.” in June 2005 by Copeland et al. And the activity of the gene product thereof is the activity of acyl-CoA synthase.

[9714] Accordingly, in one embodiment, the process of the present invention for producing glutamine in a non-human organism, like a microorganism or a plant or a part thereof, comprises increasing or generating the activity of a gene product with the activity of a gene product conferring the activity of “acyl-CoA synthase”, especially from Azotobacter vinelandii or its functional equivalent or its homolog, e.g. the increase of
[9715] (a) a gene product of a gene comprising the nucleic acid molecule as shown in the respective line in column 5 of Table I, application no. 2, preferably the coding region thereof, or a homolog or a fragment thereof, and being depicted in the same respective line as said AvinDRAFT_{—}2754, or a functional equivalent or a homolog thereof as shown in column 8 of Table I, application no. 2, preferably the coding region thereof, particularly a homolog or functional equivalent as shown in column 8 of Table I B, application no. 2, and being depicted in the same respective line as said AvinDRAFT_{—}2754, and preferably the activity is increased non-targeted, or
[9716] (b) a polypeptide comprising a polypeptide, a consensus sequence or at least a polypeptide motif as shown in the respective line in column 5 of Table II or in column 8 of Table IV, application no. 2, respectively, and being depicted in the same respective line as said AvinDRAFT_{—}2754, or a functional equivalent or a homolog thereof as depicted in column 8 of Table II, application no. 2, preferably a homolog or functional equivalent as depicted in column 8 of Table II B, application no. 2, and being depicted in the same respective line as said AvinDRAFT_{—}2754, and preferably the activity is increased non-targeted.

[9717] Accordingly, in one embodiment, the molecule which activity is to be increased in the process of the invention is the gene product with an activity as a “acyl-CoA synthase”, preferably it is the molecule of section (a) or (b) of this paragraph.

[9718] In particular, it was observed that in plants, especially in Arabidopsis thaliana, increasing or generating the activity of a gene product non-targeted with the activity of a “acyl-CoA synthase”, preferably being encoded by a gene comprising the nucleic acid sequence SEQ ID NO. 28040, preferably the coding region thereof, conferred the production of or the increase in glutamine compared with the wild type control.

[9719] The nucleic acid sequence of AvinDRAFT_{—}2754 from Azotobacter vinelandii, e.g. as shown in the respective line in column 5 of Table I, application no. 2, has been published by deposition of the sequences to the EMBL/GenBank/DDBJ databases under “Sequencing of the draft genome assembly of Azotobacter vinelandii AvOP.” in June 2005 by Copeland et al. And the activity of the gene product thereof is the activity of acyl-CoA synthase.

[9720] Accordingly, in one embodiment, the process of the present invention for producing proline in a non-human organism, like a microorganism or a plant or a part thereof, comprises increasing or generating the activity of a gene product with the activity of a gene product conferring the activity of “acyl-CoA synthase”, especially from Azotobacter vinelandii or its functional equivalent or its homolog, e.g. the increase of
[9721] (a) a gene product of a gene comprising the nucleic acid molecule as shown in the respective line in column 5 of Table I, application no. 2, preferably the coding region thereof, or a homolog or a fragment thereof, and being depicted in the same respective line as said AvinDRAFT_{—}2754, or a functional equivalent or a homolog thereof as shown in column 8 of Table I, application no. 2, preferably the coding region thereof, particularly a homolog or functional equivalent as shown in column 8 of Table I B, application no. 2, and being depicted in the same respective line as said AvinDRAFT_{—}2754, and preferably the activity is increased non-targeted, or
[9722] (b) a polypeptide comprising a polypeptide, a consensus sequence or at least a polypeptide motif as shown in the respective line in column 5 of Table II or in column 8 of Table IV, application no. 2, respectively, and being depicted in the same respective line as said AvinDRAFT_{—}2754, or a functional equivalent or a homolog thereof as depicted in column 8 of Table II, application no. 2, preferably a homolog or functional equivalent as depicted in column 8 of Table II B, application no. 2, and being depicted in the same respective line as said AvinDRAFT_{—}2754, and preferably the activity is increased non-targeted.

[9723] Accordingly, in one embodiment, the molecule which activity is to be increased in the process of the invention is the gene product with an activity as a “acyl-CoA synthase”, preferably it is the molecule of section (a) or (b) of this paragraph.

[9724] In particular, it was observed that in plants, especially in Arabidopsis thaliana, increasing or generating the activity of a gene product non-targeted with the activity of a “acyl-CoA synthase”, preferably being encoded by a gene comprising the nucleic acid sequence SEQ ID NO. 28040, preferably the coding region thereof, conferred the production of or the increase in proline compared with the wild type control.

[9725] The nucleic acid sequence of AvinDRAFT_{—}3028 from Azotobacter vinelandii, e.g. as shown in the respective line in column 5 of Table I, application no. 2, has been published by deposition of the sequences to the EMBL/GenBank/DDBJ databases under “Sequencing of the draft genome assembly of Azotobacter vinelandii AvOP.” in June 2005 by Copeland et al And the activity of the gene product thereof is the activity of 2-oxoglutarate dehydrogenase E1 subunit.

[9726] Accordingly, in one embodiment, the process of the present invention for producing glutamate in a non-human organism, like a microorganism or a plant or a part thereof, comprises increasing or generating the activity of a gene product with the activity of a gene product conferring the activity of “2-oxoglutarate dehydrogenase E1 subunit”, especially from Azotobacter vinelandii or its functional equivalent or its homolog, e.g. the increase of
[9727] (a) a gene product of a gene comprising the nucleic acid molecule as shown in the respective line in column 5 of Table I, application no. 2, preferably the coding region thereof, or a homolog or a fragment thereof, and being depicted in the same respective line as said AvinDRAFT_{—}3028, or a functional equivalent or a homolog thereof as shown in column 8 of Table I, application no. 2, preferably the coding region thereof, particularly a homolog or functional equivalent as shown in column 8 of Table I B, application no. 2, and being depicted in the same respective line as said AvinDRAFT_{—}3028, and preferably the activity is increased non-targeted, or
[9728] (b) a polypeptide comprising a polypeptide, a consensus sequence or at least a polypeptide motif as shown in the respective line in column 5 of Table II or in column 8 of Table IV, application no. 2, respectively, and being depicted in the same respective line as said AvinDRAFT_{—}3028, or a functional equivalent or a homolog thereof as depicted in column 8 of Table II, application no. 2, preferably a homolog or functional equivalent as depicted in column 8 of Table II B, application no. 2, and being depicted in the same respective line as said AvinDRAFT_{—}3028, and preferably the activity is increased non-targeted.

[9729] Accordingly, in one embodiment, the molecule which activity is to be increased in the process of the invention is the gene product with an activity as a “2-oxoglutarate dehydrogenase E1 subunit”, preferably it is the molecule of section (a) or (b) of this paragraph.

[9730] In particular, it was observed that in plants, especially in Arabidopsis thaliana, increasing or generating the activity of a gene product non-targeted with the activity of a “2-oxoglutarate dehydrogenase E1 subunit”, preferably being encoded by a gene comprising the nucleic acid sequence SEQ ID NO. 6075, preferably the coding region thereof, conferred the production of or the increase in glutamate compared with the wild type control.

[9731] The nucleic acid sequence of AvinDRAFT_{—}3159 from Azotobacter vinelandii, e.g. as shown in the respective line in column 5 of Table I, application no. 2, has been published by deposition of the sequences to the EMBL/GenBank/DDBJ databases under “Sequencing of the draft genome assembly of Azotobacter vinelandii AvOP.” in June 2005 by Copeland et al. And the activity of the gene product thereof is the activity of enoyl-CoA hydratase.

[9732] Accordingly, in one embodiment, the process of the present invention for producing arginine in a non-human organism, like a microorganism or a plant or a part thereof, comprises increasing or generating the activity of a gene product with the activity of a gene product conferring the activity of “enoyl-CoA hydratase”, especially from Azotobacter vinelandii or its functional equivalent or its homolog, e.g. the increase of
[9733] (a) a gene product of a gene comprising the nucleic acid molecule as shown in the respective line in column 5 of Table I, application no. 2, preferably the coding region thereof, or a homolog or a fragment thereof, and being depicted in the same respective line as said AvinDRAFT_{—}3159, or a functional equivalent or a homolog thereof as shown in column 8 of Table I, application no. 2, preferably the coding region thereof, particularly a homolog or functional equivalent as shown in column 8 of Table I B, application no. 2, and being depicted in the same respective line as said AvinDRAFT_{—}3159, and preferably the activity is increased non-targeted, or
[9734] (b) a polypeptide comprising a polypeptide, a consensus sequence or at least a polypeptide motif as shown in the respective line in column 5 of Table II or in column 8 of Table IV, application no. 2, respectively, and being depicted in the same respective line as said AvinDRAFT_{—}3159, or a functional equivalent or a homolog thereof as depicted in column 8 of Table II, application no. 2, preferably a homolog or functional equivalent as depicted in column 8 of Table II B, application no. 2, and being depicted in the same respective line as said AvinDRAFT_{—}3159, and preferably the activity is increased non-targeted.

[9735] Accordingly, in one embodiment, the molecule which activity is to be increased in the process of the invention is the gene product with an activity as a “enoyl-CoA hydratase”, preferably it is the molecule of section (a) or (b) of this paragraph.

[9736] In particular, it was observed that in plants, especially in Arabidopsis thaliana, increasing or generating the activity of a gene product non-targeted with the activity of a “enoyl-CoA hydratase”, preferably being encoded by a gene comprising the nucleic acid sequence SEQ ID NO. 28738, preferably the coding region thereof, conferred the production of or the increase in arginine compared with the wild type control.

[9737] The nucleic acid sequence of AvinDRAFT_{—}3159 from Azotobacter vinelandii, e.g. as shown in the respective line in column 5 of Table I, application no. 2, has been published by deposition of the sequences to the EMBL/GenBank/DDBJ databases under “Sequencing of the draft genome assembly of Azotobacter vinelandii AvOP.” in June 2005 by Copeland et a. And the activity of the gene product thereof is the activity of enoyl-CoA hydratase.

[9738] Accordingly, in one embodiment, the process of the present invention for producing proline in a non-human organism, like a microorganism or a plant or a part thereof, comprises increasing or generating the activity of a gene product with the activity of a gene product conferring the activity of “enoyl-CoA hydratase”, especially from Azotobacter vinelandii or its functional equivalent or its homolog, e.g. the increase of
[9739] (a) a gene product of a gene comprising the nucleic acid molecule as shown in the respective line in column 5 of Table I, application no. 2, preferably the coding region thereof, or a homolog or a fragment thereof, and being depicted in the same respective line as said AvinDRAFT_{—}3159, or a functional equivalent or a homolog thereof as shown in column 8 of Table I, application no. 2, preferably the coding region thereof, particularly a homolog or functional equivalent as shown in column 8 of Table I B, application no. 2, and being depicted in the same respective line as said AvinDRAFT_{—}3159, and preferably the activity is increased non-targeted, or
[9740] (b) a polypeptide comprising a polypeptide, a consensus sequence or at least a polypeptide motif as shown in the respective line in column 5 of Table II or in column 8 of Table IV, application no. 2, respectively, and being depicted in the same respective line as said AvinDRAFT_{—}3159, or a functional equivalent or a homolog thereof as depicted in column 8 of Table II, application no. 2, preferably a homolog or functional equivalent as depicted in column 8 of Table II B, application no. 2, and being depicted in the same respective line as said AvinDRAFT_{—}3159, and preferably the activity is increased non-targeted.

[9741] Accordingly, in one embodiment, the molecule which activity is to be increased in the process of the invention is the gene product with an activity as a “enoyl-CoA hydratase”, preferably it is the molecule of section (a) or (b) of this paragraph.

[9742] In particular, it was observed that in plants, especially in Arabidopsis thaliana, increasing or generating the activity of a gene product non-targeted with the activity of a “enoyl-CoA hydratase”, preferably being encoded by a gene comprising the nucleic acid sequence SEQ ID NO. 28738, preferably the coding region thereof, conferred the production of or the increase in proline compared with the wild type control.

[9743] The nucleic acid sequence of AvinDRAFT_{—}3186 from Azotobacter vinelandii, e.g. as shown in the respective line in column 5 of Table I, application no. 2, has been published by deposition of the sequences to the EMBL/GenBank/DDBJ databases under “Sequencing of the draft genome assembly of Azotobacter vinelandii AvOP.” in June 2005 by Copeland et al. And the activity of the gene product thereof is the activity of transcriptional regulator.

[9744] Accordingly, in one embodiment, the process of the present invention for producing glutamate in a non-human organism, like a microorganism or a plant or a part thereof, comprises increasing or generating the activity of a gene product with the activity of a gene product conferring the activity of “transcriptional regulator”, especially from Azotobacter vinelandii or its functional equivalent or its homolog, e.g. the increase of
[9745] (a) a gene product of a gene comprising the nucleic acid molecule as shown in the respective line in column 5 of Table I, application no. 2, preferably the coding region thereof, or a homolog or a fragment thereof, and being depicted in the same respective line as said AvinDRAFT_{—}3186, or a functional equivalent or a homolog thereof as shown in column 8 of Table I, application no. 2, preferably the coding region thereof, particularly a homolog or functional equivalent as shown in column 8 of Table I B, application no. 2, and being depicted in the same respective line as said AvinDRAFT_{—}3186, and preferably the activity is increased non-targeted, or
[9746] (b) a polypeptide comprising a polypeptide, a consensus sequence or at least a polypeptide motif as shown in the respective line in column 5 of Table II or in column 8 of Table IV, application no. 2, respectively, and being depicted in the same respective line as said AvinDRAFT_{—}3186, or a functional equivalent or a homolog thereof as depicted in column 8 of Table II, application no. 2, preferably a homolog or functional equivalent as depicted in column 8 of Table II B, application no. 2, and being depicted in the same respective line as said AvinDRAFT_{—}3186, and preferably the activity is increased non-targeted.

[9747] Accordingly, in one embodiment, the molecule which activity is to be increased in the process of the invention is the gene product with an activity as a “transcriptional regulator”, preferably it is the molecule of section (a) or (b) of this paragraph.

[9748] In particular, it was observed that in plants, especially in Arabidopsis thaliana, increasing or generating the activity of a gene product non-targeted with the activity of a “transcriptional regulator”, preferably being encoded by a gene comprising the nucleic acid sequence SEQ ID NO. 29246, preferably the coding region thereof, conferred the production of or the increase in glutamate compared with the wild type control.

[9749] The nucleic acid sequence of AvinDRAFT_{—}3209 from Azotobacter vinelandii, e.g. as shown in the respective line in column 5 of Table I, application no. 2, has been published by deposition of the sequences to the EMBL/GenBank/DDBJ databases under “Sequencing of the draft genome assembly of Azotobacter vinelandii AvOP.” in June 2005 by Copeland et al. And the activity of the gene product thereof is the activity of transcriptional regulator.

[9750] Accordingly, in one embodiment, the process of the present invention for producing proline in a non-human organism, like a microorganism or a plant or a part thereof, comprises increasing or generating the activity of a gene product with the activity of a gene product conferring the activity of “transcriptional regulator”, especially from Azotobacter vinelandii or its functional equivalent or its homolog, e.g. the increase of
[9751] (a) a gene product of a gene comprising the nucleic acid molecule as shown in the respective line in column 5 of Table I, application no. 2, preferably the coding region thereof, or a homolog or a fragment thereof, and being depicted in the same respective line as said AvinDRAFT_{—}3209, or a functional equivalent or a homolog thereof as shown in column 8 of Table I, application no. 2, preferably the coding region thereof, particularly a homolog or functional equivalent as shown in column 8 of Table I B, application no. 2, and being depicted in the same respective line as said AvinDRAFT_{—}3209, and preferably the activity is increased non-targeted, or
[9752] (b) a polypeptide comprising a polypeptide, a consensus sequence or at least a polypeptide motif as shown in the respective line in column 5 of Table II or in column 8 of Table IV, application no. 2, respectively, and being depicted in the same respective line as said AvinDRAFT_{—}3209, or a functional equivalent or a homolog thereof as depicted in column 8 of Table II, application no. 2, preferably a homolog or functional equivalent as depicted in column 8 of Table II B, application no. 2, and being depicted in the same respective line as said AvinDRAFT_{—}3209, and preferably the activity is increased non-targeted.

[9753] Accordingly, in one embodiment, the molecule which activity is to be increased in the process of the invention is the gene product with an activity as a “transcriptional regulator”, preferably it is the molecule of section (a) or (b) of this paragraph.

[9754] In particular, it was observed that in plants, especially in Arabidopsis thaliana, increasing or generating the activity of a gene product non-targeted with the activity of a “transcriptional regulator”, preferably being encoded by a gene comprising the nucleic acid sequence SEQ ID NO. 29286, preferably the coding region thereof, conferred the production of or the increase in proline compared with the wild type control.

[9755] The nucleic acid sequence of AvinDRAFT_{—}3250 from Azotobacter vinelandii, e.g. as shown in the respective line in column 5 of Table I, application no. 2, has been published by deposition of the sequences to the EMBL/GenBank/DDBJ databases under “Sequencing of the draft genome assembly of Azotobacter vinelandii AvOP.” in June 2005 by Copeland et al. And the activity of the gene product thereof is the activity of acyltransferase.

[9756] Accordingly, in one embodiment, the process of the present invention for producing proline in a non-human organism, like a microorganism or a plant or a part thereof, comprises increasing or generating the activity of a gene product with the activity of a gene product conferring the activity of “acyltransferase”, especially from Azotobacter vinelandii or its functional equivalent or its homolog, e.g. the increase of
[9757] (a) a gene product of a gene comprising the nucleic acid molecule as shown in the respective line in column 5 of Table I, application no. 2, preferably the coding region thereof, or a homolog or a fragment thereof, and being depicted in the same respective line as said AvinDRAFT_{—}3250, or a functional equivalent or a homolog thereof as shown in column 8 of Table I, application no. 2, preferably the coding region thereof, particularly a homolog or functional equivalent as shown in column 8 of Table I B, application no. 2, and being depicted in the same respective line as said AvinDRAFT_{—}3250, and preferably the activity is increased non-targeted, or
[9758] (b) a polypeptide comprising a polypeptide, a consensus sequence or at least a polypeptide motif as shown in the respective line in column 5 of Table II or in column 8 of Table IV, application no. 2, respectively, and being depicted in the same respective line as said AvinDRAFT_{—}3250, or a functional equivalent or a homolog thereof as depicted in column 8 of Table II, application no. 2, preferably a homolog or functional equivalent as depicted in column 8 of Table II B, application no. 2, and being depicted in the same respective line as said AvinDRAFT_{—}3250, and preferably the activity is increased non-targeted.

[9759] Accordingly, in one embodiment, the molecule which activity is to be increased in the process of the invention is the gene product with an activity as a “acyltransferase”, preferably it is the molecule of section (a) or (b) of this paragraph.

[9760] In particular, it was observed that in plants, especially in Arabidopsis thaliana, increasing or generating the activity of a gene product non-targeted with the activity of a “acyltransferase”, preferably being encoded by a gene comprising the nucleic acid sequence SEQ ID NO. 29397, preferably the coding region thereof, conferred the production of or the increase in proline compared with the wild type control.

[9761] The nucleic acid sequence of AvinDRAFT_{—}3253 from Azotobacter vinelandii, e.g. as shown in the respective line in column 5 of Table I, application no. 2, has been published by deposition of the sequences to the EMBL/GenBank/DDBJ databases under “Sequencing of the draft genome assembly of Azotobacter vinelandii AvOP.” in June 2005 by Copeland et al. And the activity of the gene product thereof is the activity of oxidoreductase.

[9762] Accordingly, in one embodiment, the process of the present invention for producing glutamate in a non-human organism, like a microorganism or a plant or a part thereof, comprises increasing or generating the activity of a gene product with the activity of a gene product conferring the activity of “oxidoreductase”, especially from Azotobacter vinelandii or its functional equivalent or its homolog, e.g. the increase of
[9763] (a) a gene product of a gene comprising the nucleic acid molecule as shown in the respective line in column 5 of Table I, application no. 2, preferably the coding region thereof, or a homolog or a fragment thereof, and being depicted in the same respective line as said AvinDRAFT_{—}3253, or a functional equivalent or a homolog thereof as shown in column 8 of Table I, application no. 2, preferably the coding region thereof, particularly a homolog or functional equivalent as shown in column 8 of Table I B, application no. 2, and being depicted in the same respective line as said AvinDRAFT_{—}3253, and preferably the activity is increased non-targeted, or
[9764] (b) a polypeptide comprising a polypeptide, a consensus sequence or at least a polypeptide motif as shown in the respective line in column 5 of Table II or in column 8 of Table IV, application no. 2, respectively, and being depicted in the same respective line as said AvinDRAFT_{—}3253, or a functional equivalent or a homolog thereof as depicted in column 8 of Table II, application no. 2, preferably a homolog or functional equivalent as depicted in column 8 of Table II B, application no. 2, and being depicted in the same respective line as said AvinDRAFT_{—}3253, and preferably the activity is increased non-targeted.

[9765] Accordingly, in one embodiment, the molecule which activity is to be increased in the process of the invention is the gene product with an activity as a “oxidoreductase”, preferably it is the molecule of section (a) or (b) of this paragraph.

[9766] In particular, it was observed that in plants, especially in Arabidopsis thaliana, increasing or generating the activity of a gene product non-targeted with the activity of a “oxidoreductase”, preferably being encoded by a gene comprising the nucleic acid sequence SEQ ID NO. 29500, preferably the coding region thereof, conferred the production of or the increase in glutamate compared with the wild type control.

[9767] The nucleic acid sequence of AvinDRAFT_{—}3253 from Azotobacter vinelandii, e.g. as shown in the respective line in column 5 of Table I, application no. 2, has been published by deposition of the sequences to the EMBL/GenBank/DDBJ databases under “Sequencing of the draft genome assembly of Azotobacter vinelandii AvOP.” in June 2005 by Copeland et al. And the activity of the gene product thereof is the activity of oxidoreductase.

[9768] Accordingly, in one embodiment, the process of the present invention for producing glutamine in a non-human organism, like a microorganism or a plant or a part thereof, comprises increasing or generating the activity of a gene product with the activity of a gene product conferring the activity of “oxidoreductase”, especially from Azotobacter vinelandii or its functional equivalent or its homolog, e.g. the increase of
[9769] (a) a gene product of a gene comprising the nucleic acid molecule as shown in the respective line in column 5 of Table I, application no. 2, preferably the coding region thereof, or a homolog or a fragment thereof, and being depicted in the same respective line as said AvinDRAFT_{—}3253, or a functional equivalent or a homolog thereof as shown in column 8 of Table I, application no. 2, preferably the coding region thereof, particularly a homolog or functional equivalent as shown in column 8 of Table I B, application no. 2, and being depicted in the same respective line as said AvinDRAFT_{—}3253, and preferably the activity is increased non-targeted, or
[9770] (b) a polypeptide comprising a polypeptide, a consensus sequence or at least a polypeptide motif as shown in the respective line in column 5 of Table II or in column 8 of Table IV, application no. 2, respectively, and being depicted in the same respective line as said AvinDRAFT_{—}3253, or a functional equivalent or a homolog thereof as depicted in column 8 of Table II, application no. 2, preferably a homolog or functional equivalent as depicted in column 8 of Table II B, application no. 2, and being depicted in the same respective line as said AvinDRAFT_{—}3253, and preferably the activity is increased non-targeted.

[9771] Accordingly, in one embodiment, the molecule which activity is to be increased in the process of the invention is the gene product with an activity as a “oxidoreductase”, preferably it is the molecule of section (a) or (b) of this paragraph.

[9772] In particular, it was observed that in plants, especially in Arabidopsis thaliana, increasing or generating the activity of a gene product non-targeted with the activity of a “oxidoreductase”, preferably being encoded by a gene comprising the nucleic acid sequence SEQ ID NO. 29500, preferably the coding region thereof, conferred the production of or the increase in glutamine compared with the wild type control.

[9773] The nucleic acid sequence of AvinDRAFT_{—}3556 from Azotobacter vinelandii, e.g. as shown in the respective line in column 5 of Table I, application no. 2, has been published by deposition of the sequences to the EMBL/GenBank/DDBJ databases under “Sequencing of the draft genome assembly of Azotobacter vinelandii AvOP.” in June 2005 by Copeland et al. And the activity of the gene product thereof is the activity of lysyl-tRNA synthetase.

[9774] Accordingly, in one embodiment, the process of the present invention for producing glutamine in a non-human organism, like a microorganism or a plant or a part thereof, comprises increasing or generating the activity of a gene product with the activity of a gene product conferring the activity of “lysyl-tRNA synthetase”, especially from Azotobacter vinelandii or its functional equivalent or its homolog, e.g. the increase of
[9775] (a) a gene product of a gene comprising the nucleic acid molecule as shown in the respective line in column 5 of Table I, application no. 2, preferably the coding region thereof, or a homolog or a fragment thereof, and being depicted in the same respective line as said AvinDRAFT_{—}3556, or a functional equivalent or a homolog thereof as shown in column 8 of Table I, application no. 2, preferably the coding region thereof, particularly a homolog or functional equivalent as shown in column 8 of Table I B, application no. 2, and being depicted in the same respective line as said AvinDRAFT_{—}3556, and preferably the activity is increased non-targeted, or
[9776] (b) a polypeptide comprising a polypeptide, a consensus sequence or at least a polypeptide motif as shown in the respective line in column 5 of Table II or in column 8 of Table IV, application no. 2, respectively, and being depicted in the same respective line as said AvinDRAFT_{—}3556, or a functional equivalent or a homolog thereof as depicted in column 8 of Table II, application no. 2, preferably a homolog or functional equivalent as depicted in column 8 of Table II B, application no. 2, and being depicted in the same respective line as said AvinDRAFT_{—}3556, and preferably the activity is increased non-targeted.

[9777] Accordingly, in one embodiment, the molecule which activity is to be increased in the process of the invention is the gene product with an activity as a “lysyl-tRNA synthetase”, preferably it is the molecule of section (a) or (b) of this paragraph.

[9778] In particular, it was observed that in plants, especially in Arabidopsis thaliana, increasing or generating the activity of a gene product non-targeted with the activity of a “lysyl-tRNA synthetase”, preferably being encoded by a gene comprising the nucleic acid sequence SEQ ID NO. 30039, preferably the coding region thereof, conferred the production of or the increase in glutamine compared with the wild type control.

[9779] The nucleic acid sequence of AvinDRAFT_{—}3587 from Azotobacter vinelandii, e.g. as shown in the respective line in column 5 of Table I, application no. 2, has been published by deposition of the sequences to the EMBL/GenBank/DDBJ databases under “Sequencing of the draft genome assembly of Azotobacter vinelandii AvOP.” in June 2005 by Copeland et al. And the activity of the gene product thereof is the activity of 30S ribosomal protein.

[9780] Accordingly, in one embodiment, the process of the present invention for producing glutamate in a non-human organism, like a microorganism or a plant or a part thereof, comprises increasing or generating the activity of a gene product with the activity of a gene product conferring the activity of “305 ribosomal protein”, especially from Azotobacter vinelandii or its functional equivalent or its homolog, e.g. the increase of
[9781] (a) a gene product of a gene comprising the nucleic acid molecule as shown in the respective line in column 5 of Table I, application no. 2, preferably the coding region thereof, or a homolog or a fragment thereof, and being depicted in the same respective line as said AvinDRAFT_{—}3587, or a functional equivalent or a homolog thereof as shown in column 8 of Table I, application no. 2, preferably the coding region thereof, particularly a homolog or functional equivalent as shown in column 8 of Table I B, application no. 2, and being depicted in the same respective line as said AvinDRAFT_{—}3587, and preferably the activity is increased non-targeted, or
[9782] (b) a polypeptide comprising a polypeptide, a consensus sequence or at least a polypeptide motif as shown in the respective line in column 5 of Table II or in column 8 of Table IV, application no. 2, respectively, and being depicted in the same respective line as said AvinDRAFT_{—}3587, or a functional equivalent or a homolog thereof as depicted in column 8 of Table II, application no. 2, preferably a homolog or functional equivalent as depicted in column 8 of Table II B, application no. 2, and being depicted in the same respective line as said AvinDRAFT_{—}3587, and preferably the activity is increased non-targeted.

[9783] Accordingly, in one embodiment, the molecule which activity is to be increased in the process of the invention is the gene product with an activity as a “305 ribosomal protein”, preferably it is the molecule of section (a) or (b) of this paragraph.

[9784] In particular, it was observed that in plants, especially in Arabidopsis thaliana, increasing or generating the activity of a gene product non-targeted with the activity of a “305 ribosomal protein”, preferably being encoded by a gene comprising the nucleic acid sequence SEQ ID NO. 30464, preferably the coding region thereof, conferred the production of or the increase in glutamate compared with the wild type control.

[9785] The nucleic acid sequence of AvinDRAFT_{—}3605 from Azotobacter vinelandii, e.g. as shown in the respective line in column 5 of Table I, application no. 2, has been published deposition of the sequences to the EMBL/GenBank/DDBJ databases under “Sequencing of the draft genome assembly of Azotobacter vinelandii AvOP.” in June 2005 by Copeland et al. And the activity of the gene product thereof is the activity of CTP synthase.

[9786] Accordingly, in one embodiment, the process of the present invention for producing glutamate in a non-human organism, like a microorganism or a plant or a part thereof, comprises increasing or generating the activity of a gene product with the activity of a gene product conferring the activity of “CTP synthase”, especially from Azotobacter vinelandii or its functional equivalent or its homolog, e.g. the increase of
[9787] (a) a gene product of a gene comprising the nucleic acid molecule as shown in the respective line in column 5 of Table I, application no. 2, preferably the coding region thereof, or a homolog or a fragment thereof, and being depicted in the same respective line as said AvinDRAFT_{—}3605, or a functional equivalent or a homolog thereof as shown in column 8 of Table I, application no. 2, preferably the coding region thereof, particularly a homolog or functional equivalent as shown in column 8 of Table I B, application no. 2, and being depicted in the same respective line as said AvinDRAFT_{—}3605, and preferably the activity is increased non-targeted, or
[9788] (b) a polypeptide comprising a polypeptide, a consensus sequence or at least a polypeptide motif as shown in the respective line in column 5 of Table II or in column 8 of Table IV, application no. 2, respectively, and being depicted in the same respective line as said AvinDRAFT_{—}3605, or a functional equivalent or a homolog thereof as depicted in column 8 of Table II, application no. 2, preferably a homolog or functional equivalent as depicted in column 8 of Table II B, application no. 2, and being depicted in the same respective line as said AvinDRAFT_{—}3605, and preferably the activity is increased non-targeted.

[9789] Accordingly, in one embodiment, the molecule which activity is to be increased in the process of the invention is the gene product with an activity as a “CTP synthase”, preferably it is the molecule of section (a) or (b) of this paragraph.

[9790] In particular, it was observed that in plants, especially in Arabidopsis thaliana, increasing or generating the activity of a gene product non-targeted with the activity of a “CTP synthase”, preferably being encoded by a gene comprising the nucleic acid sequence SEQ ID NO. 31026, preferably the coding region thereof, conferred the production of or the increase in glutamate compared with the wild type control.

[9791] The nucleic acid sequence of AvinDRAFT_{—}3605 from Azotobacter vinelandii, e.g. as shown in the respective line in column 5 of Table I, application no. 2, has been published by deposition of the sequences to the EMBL/GenBank/DDBJ databases under “Sequencing of the draft genome assembly of Azotobacter vinelandii AvOP.” in June 2005 by Copeland et al. And the activity of the gene product thereof is the activity of CTP synthase.

[9792] Accordingly, in one embodiment, the process of the present invention for producing glutamine in a non-human organism, like a microorganism or a plant or a part thereof, comprises increasing or generating the activity of a gene product with the activity of a gene product conferring the activity of “CTP synthase”, especially from Azotobacter vinelandii or its functional equivalent or its homolog, e.g. the increase of
[9793] (a) a gene product of a gene comprising the nucleic acid molecule as shown in the respective line in column 5 of Table I, application no. 2, preferably the coding region thereof, or a homolog or a fragment thereof, and being depicted in the same respective line as said AvinDRAFT_{—}3605, or a functional equivalent or a homolog thereof as shown in column 8 of Table I, application no. 2, preferably the coding region thereof, particularly a homolog or functional equivalent as shown in column 8 of Table I B, application no. 2, and being depicted in the same respective line as said AvinDRAFT_{—}3605, and preferably the activity is increased non-targeted, or
[9794] (b) a polypeptide comprising a polypeptide, a consensus sequence or at least a polypeptide motif as shown in the respective line in column 5 of Table II or in column 8 of Table IV, application no. 2, respectively, and being depicted in the same respective line as said AvinDRAFT_{—}3605, or a functional equivalent or a homolog thereof as depicted in column 8 of Table II, application no. 2, preferably a homolog or functional equivalent as depicted in column 8 of Table II B, application no. 2, and being depicted in the same respective line as said AvinDRAFT_{—}3605, and preferably the activity is increased non-targeted.

[9795] Accordingly, in one embodiment, the molecule which activity is to be increased in the process of the invention is the gene product with an activity as a “CTP synthase”, preferably it is the molecule of section (a) or (b) of this paragraph.

[9796] In particular, it was observed that in plants, especially in Arabidopsis thaliana, increasing or generating the activity of a gene product non-targeted with the activity of a “CTP synthase”, preferably being encoded by a gene comprising the nucleic acid sequence SEQ ID NO. 31026, preferably the coding region thereof, conferred the production of or the increase in glutamine compared with the wild type control.

[9797] The nucleic acid sequence of AvinDRAFT_{—}4384 from Azotobacter vinelandii, e.g. as shown in the respective line in column 5 of Table I, application no. 2, has been published by deposition of the sequences to the EMBL/GenBank/DDBJ databases under “Sequencing of the draft genome assembly of Azotobacter vinelandii AvOP.” in June 2005 by Copeland et al. And the activity of the gene product thereof is the activity of glucose-1-phosphate cytidylyltransferase.

[9798] Accordingly, in one embodiment, the process of the present invention for producing glutamate in a non-human organism, like a microorganism or a plant or a part thereof, comprises increasing or generating the activity of a gene product with the activity of a gene product conferring the activity of “glucose-1-phosphate cytidylyltransferase”, especially from Azotobacter vinelandii or its functional equivalent or its homolog, e.g. the increase of
[9799] (a) a gene product of a gene comprising the nucleic acid molecule as shown in the respective line in column 5 of Table I, application no. 2, preferably the coding region thereof, or a homolog or a fragment thereof, and being depicted in the same respective line as said AvinDRAFT_{—}4384, or a functional equivalent or a homolog thereof as shown in column 8 of Table I, application no. 2, preferably the coding region thereof, particularly a homolog or functional equivalent as shown in column 8 of Table I B, application no. 2, and being depicted in the same respective line as said AvinDRAFT_{—}4384, and preferably the activity is increased non-targeted, or
[9800] (b) a polypeptide comprising a polypeptide, a consensus sequence or at least a polypeptide motif as shown in the respective line in column 5 of Table II or in column 8 of Table IV, application no. 2, respectively, and being depicted in the same respective line as said AvinDRAFT_{—}4384, or a functional equivalent or a homolog thereof as depicted in column 8 of Table II, application no. 2, preferably a homolog or functional equivalent as depicted in column 8 of Table II B, application no. 2, and being depicted in the same respective line as said AvinDRAFT_{—}4384, and preferably the activity is increased non-targeted.

[9801] Accordingly, in one embodiment, the molecule which activity is to be increased in the process of the invention is the gene product with an activity as a “glucose-1-phosphate cytidylyltransferase”, preferably it is the molecule of section (a) or (b) of this paragraph.

[9802] In particular, it was observed that in plants, especially in Arabidopsis thaliana, increasing or generating the activity of a gene product non-targeted with the activity of a “glucose-1-phosphate cytidylyltransferase”, preferably being encoded by a gene comprising the nucleic acid sequence SEQ ID NO. 31717, preferably the coding region thereof, conferred the production of or the increase in glutamate compared with the wild type control.

[9803] The nucleic acid sequence of AvinDRAFT_{—}4384 from Azotobacter vinelandii, e.g. as shown in the respective line in column 5 of Table I, application no. 2, has been published by deposition of the sequences to the EMBL/GenBank/DDBJ databases under “Sequencing of the draft genome assembly of Azotobacter vinelandii AvOP.” in June 2005 by Copeland et al. And the activity of the gene product thereof is the activity of glucose-1-phosphate cytidylyltransferase.

[9804] Accordingly, in one embodiment, the process of the present invention for producing glutamine in a non-human organism, like a microorganism or a plant or a part thereof, comprises increasing or generating the activity of a gene product with the activity of a gene product conferring the activity of “glucose-1-phosphate cytidylyltransferase”, especially from Azotobacter vinelandii or its functional equivalent or its homolog, e.g. the increase of
[9805] (a) a gene product of a gene comprising the nucleic acid molecule as shown in the respective line in column 5 of Table I, application no. 2, preferably the coding region thereof, or a homolog or a fragment thereof, and being depicted in the same respective line as said AvinDRAFT_{—}4384, or a functional equivalent or a homolog thereof as shown in column 8 of Table I, application no. 2, preferably the coding region thereof, particularly a homolog or functional equivalent as shown in column 8 of Table I B, application no. 2, and being depicted in the same respective line as said AvinDRAFT_{—}4384, and preferably the activity is increased non-targeted, or
[9806] (b) a polypeptide comprising a polypeptide, a consensus sequence or at least a polypeptide motif as shown in the respective line in column 5 of Table II or in column 8 of Table IV, application no. 2, respectively, and being depicted in the same respective line as said AvinDRAFT_{—}4384, or a functional equivalent or a homolog thereof as depicted in column 8 of Table II, application no. 2, preferably a homolog or functional equivalent as depicted in column 8 of Table II B, application no. 2, and being depicted in the same respective line as said AvinDRAFT_{—}4384, and preferably the activity is increased non-targeted.

[9807] Accordingly, in one embodiment, the molecule which activity is to be increased in the process of the invention is the gene product with an activity as a “glucose-1-phosphate cytidylyltransferase”, preferably it is the molecule of section (a) or (b) of this paragraph.

[9808] In particular, it was observed that in plants, especially in Arabidopsis thaliana, increasing or generating the activity of a gene product non-targeted with the activity of a “glucose-1-phosphate cytidylyltransferase”, preferably being encoded by a gene comprising the nucleic acid sequence SEQ ID NO. 31717, preferably the coding region thereof, conferred the production of or the increase in glutamine compared with the wild type control.

[9809] The nucleic acid sequence of AvinDRAFT_{—}4384 from Azotobacter vinelandii, e.g. as shown in the respective line in column 5 of Table I, application no. 2, has been published by deposition of the sequences to the EMBL/GenBank/DDBJ databases under “Sequencing of the draft genome assembly of Azotobacter vinelandii AvOP.” in June 2005 by Copeland et al. And the activity of the gene product thereof is the activity of glucose-1-phosphate cytidylyltransferase.

[9810] Accordingly, in one embodiment, the process of the present invention for producing proline in a non-human organism, like a microorganism or a plant or a part thereof, comprises increasing or generating the activity of a gene product with the activity of a gene product conferring the activity of “glucose-1-phosphate cytidylyltransferase”, especially from Azotobacter vinelandii or its functional equivalent or its homolog, e.g. the increase of
[9811] (a) a gene product of a gene comprising the nucleic acid molecule as shown in the respective line in column 5 of Table I, application no. 2, preferably the coding region thereof, or a homolog or a fragment thereof, and being depicted in the same respective line as said AvinDRAFT_{—}4384, or a functional equivalent or a homolog thereof as shown in column 8 of Table I, application no. 2, preferably the coding region thereof, particularly a homolog or functional equivalent as shown in column 8 of Table I B, application no. 2, and being depicted in the same respective line as said AvinDRAFT_{—}4384, and preferably the activity is increased non-targeted, or
[9812] (b) a polypeptide comprising a polypeptide, a consensus sequence or at least a polypeptide motif as shown in the respective line in column 5 of Table II or in column 8 of Table IV, application no. 2, respectively, and being depicted in the same respective line as said AvinDRAFT_{—}4384, or a functional equivalent or a homolog thereof as depicted in column 8 of Table II, application no. 2, preferably a homolog or functional equivalent as depicted in column 8 of Table II B, application no. 2, and being depicted in the same respective line as said AvinDRAFT_{—}4384, and preferably the activity is increased non-targeted.

[9813] Accordingly, in one embodiment, the molecule which activity is to be increased in the process of the invention is the gene product with an activity as a “glucose-1-phosphate cytidylyltransferase”, preferably it is the molecule of section (a) or (b) of this paragraph.

[9814] In particular, it was observed that in plants, especially in Arabidopsis thaliana, increasing or generating the activity of a gene product non-targeted with the activity of a “glucose-1-phosphate cytidylyltransferase”, preferably being encoded by a gene comprising the nucleic acid sequence SEQ ID NO. 31717, preferably the coding region thereof, conferred the production of or the increase in proline compared with the wild type control.

[9815] The nucleic acid sequence of AvinDRAFT_{—}4562 from Azotobacter vinelandii, e.g. as shown in the respective line in column 5 of Table I, application no. 2, has been published by deposition of the sequences to the EMBL/GenBank/DDBJ databases under “Sequencing of the draft genome assembly of Azotobacter vinelandii AvOP.” in June 2005 by Copeland et al. And the activity of the gene product thereof is the activity of aminotransferase.

[9816] Accordingly, in one embodiment, the process of the present invention for producing arginine in a non-human organism, like a microorganism or a plant or a part thereof, comprises increasing or generating the activity of a gene product with the activity of a gene product conferring the activity of “aminotransferase”, especially from Azotobacter vinelandii or its functional equivalent or its homolog, e.g. the increase of
[9817] (a) a gene product of a gene comprising the nucleic acid molecule as shown in the respective line in column 5 of Table I, application no. 2, preferably the coding region thereof, or a homolog or a fragment thereof, and being depicted in the same respective line as said AvinDRAFT_{—}4562, or a functional equivalent or a homolog thereof as shown in column 8 of Table I, application no. 2, preferably the coding region thereof, particularly a homolog or functional equivalent as shown in column 8 of Table I B, application no. 2, and being depicted in the same respective line as said AvinDRAFT_{—}4562, and preferably the activity is increased non-targeted, or
[9818] (b) a polypeptide comprising a polypeptide, a consensus sequence or at least a polypeptide motif as shown in the respective line in column 5 of Table II or in column 8 of Table IV, application no. 2, respectively, and being depicted in the same respective line as said AvinDRAFT_{—}4562, or a functional equivalent or a homolog thereof as depicted in column 8 of Table II, application no. 2, preferably a homolog or functional equivalent as depicted in column 8 of Table II B, application no. 2, and being depicted in the same respective line as said AvinDRAFT_{—}4562, and preferably the activity is increased non-targeted.

[9819] Accordingly, in one embodiment, the molecule which activity is to be increased in the process of the invention is the gene product with an activity as a “aminotransferase”, preferably it is the molecule of section (a) or (b) of this paragraph.

[9820] In particular, it was observed that in plants, especially in Arabidopsis thaliana, increasing or generating the activity of a gene product non-targeted with the activity of a “aminotransferase”, preferably being encoded by a gene comprising the nucleic acid sequence SEQ ID NO. 31926, preferably the coding region thereof, conferred the production of or the increase in arginine compared with the wild type control.

[9821] The nucleic acid sequence of AvinDRAFT_{—}5103 from Azotobacter vinelandii, e.g. as shown in the respective line in column 5 of Table I, application no. 2, has been published deposition of the sequences to the EMBL/GenBank/DDBJ databases under “Sequencing of the draft genome assembly of Azotobacter vinelandii AvOP.” in June 2005 by Copeland et al. And the activity of the gene product thereof is the activity of hydrolase.

[9822] Accordingly, in one embodiment, the process of the present invention for producing proline in a non-human organism, like a microorganism or a plant or a part thereof, comprises increasing or generating the activity of a gene product with the activity of a gene product conferring the activity of “hydrolase”, especially from Azotobacter vinelandii or its functional equivalent or its homolog, e.g. the increase of
[9823] (a) a gene product of a gene comprising the nucleic acid molecule as shown in the respective line in column 5 of Table I, application no. 2, preferably the coding region thereof, or a homolog or a fragment thereof, and being depicted in the same respective line as said AvinDRAFT_{—}5103, or a functional equivalent or a homolog thereof as shown in column 8 of Table I, application no. 2, preferably the coding region thereof, particularly a homolog or functional equivalent as shown in column 8 of Table I B, application no. 2, and being depicted in the same respective line as said AvinDRAFT_{—}5103, and preferably the activity is increased non-targeted, or
[9824] (b) a polypeptide comprising a polypeptide, a consensus sequence or at least a polypeptide motif as shown in the respective line in column 5 of Table II or in column 8 of Table IV, application no. 2, respectively, and being depicted in the same respective line as said AvinDRAFT_{—}5103, or a functional equivalent or a homolog thereof as depicted in column 8 of Table II, application no. 2, preferably a homolog or functional equivalent as depicted in column 8 of Table II B, application no. 2, and being depicted in the same respective line as said AvinDRAFT_{—}5103, and preferably the activity is increased non-targeted.

[9825] Accordingly, in one embodiment, the molecule which activity is to be increased in the process of the invention is the gene product with an activity as a “hydrolase”, preferably it is the molecule of section (a) or (b) of this paragraph.

[9826] In particular, it was observed that in plants, especially in Arabidopsis thaliana, increasing or generating the activity of a gene product non-targeted with the activity of a “hydrolase”, preferably being encoded by a gene comprising the nucleic acid sequence SEQ ID NO. 6510, preferably the coding region thereof, conferred the production of or the increase in proline compared with the wild type control.

[9827] The nucleic acid sequence of AvinDRAFT_{—}5246 from Azotobacter vinelandii, e.g. as shown in the respective line in column 5 of Table I, application no. 2, has been published by deposition of the sequences to the EMBL/GenBank/DDBJ databases under “Sequencing of the draft genome assembly of Azotobacter vinelandii AvOP.” in June 2005 by Copeland et al. And the activity of the gene product thereof is the activity of glutamate-ammonia-ligase.

[9828] Accordingly, in one embodiment, the process of the present invention for producing arginine in a non-human organism, like a microorganism or a plant or a part thereof, comprises increasing or generating the activity of a gene product with the activity of a gene product conferring the activity of “glutamate-ammonia-ligase”, especially from Azotobacter vinelandii or its functional equivalent or its homolog, e.g. the increase of
[9829] (a) a gene product of a gene comprising the nucleic acid molecule as shown in the respective line in column 5 of Table I, application no. 2, preferably the coding region thereof, or a homolog or a fragment thereof, and being depicted in the same respective line as said AvinDRAFT_{—}5246, or a functional equivalent or a homolog thereof as shown in column 8 of Table I, application no. 2, preferably the coding region thereof, particularly a homolog or functional equivalent as shown in column 8 of Table I B, application no. 2, and being depicted in the same respective line as said AvinDRAFT_{—}5246, and preferably the activity is increased non-targeted, or
[9830] (b) a polypeptide comprising a polypeptide, a consensus sequence or at least a polypeptide motif as shown in the respective line in column 5 of Table II or in column 8 of Table IV, application no. 2, respectively, and being depicted in the same respective line as said AvinDRAFT_{—}5246, or a functional equivalent or a homolog thereof as depicted in column 8 of Table II, application no. 2, preferably a homolog or functional equivalent as depicted in column 8 of Table II B, application no. 2, and being depicted in the same respective line as said AvinDRAFT_{—}5246, and preferably the activity is increased non-targeted.

[9831] Accordingly, in one embodiment, the molecule which activity is to be increased in the process of the invention is the gene product with an activity as a “glutamate-ammonia-ligase”, preferably it is the molecule of section (a) or (b) of this paragraph.

[9832] In particular, it was observed that in plants, especially in Arabidopsis thaliana, increasing or generating the activity of a gene product non-targeted with the activity of a “glutamate-ammonia-ligase”, preferably being encoded by a gene comprising the nucleic acid sequence SEQ ID NO. 32037, preferably the coding region thereof, conferred the production of or the increase in arginine compared with the wild type control.

[9833] The nucleic acid sequence of AvinDRAFT_{—}5246 from Azotobacter vinelandii, e.g. as shown in the respective line in column 5 of Table I, application no. 2, has been published by deposition of the sequences to the EMBL/GenBank/DDBJ databases under “Sequencing of the draft genome assembly of Azotobacter vinelandii AvOP.” in June 2005 by Copeland et al. And the activity of the gene product thereof is the activity of glutamate-ammonia-ligase.

[9834] Accordingly, in one embodiment, the process of the present invention for producing glutamine in a non-human organism, like a microorganism or a plant or a part thereof, comprises increasing or generating the activity of a gene product with the activity of a gene product conferring the activity of “glutamate-ammonia-ligase”, especially from Azotobacter vinelandii or its functional equivalent or its homolog, e.g. the increase of
[9835] (a) a gene product of a gene comprising the nucleic acid molecule as shown in the respective line in column 5 of Table I, application no. 2, preferably the coding region thereof, or a homolog or a fragment thereof, and being depicted in the same respective line as said AvinDRAFT_{—}5246, or a functional equivalent or a homolog thereof as shown in column 8 of Table I, application no. 2, preferably the coding region thereof, particularly a homolog or functional equivalent as shown in column 8 of Table I B, application no. 2, and being depicted in the same respective line as said AvinDRAFT_{—}5246, and preferably the activity is increased non-targeted, or
[9836] (b) a polypeptide comprising a polypeptide, a consensus sequence or at least a polypeptide motif as shown in the respective line in column 5 of Table II or in column 8 of Table IV, application no. 2, respectively, and being depicted in the same respective line as said AvinDRAFT_{—}5246, or a functional equivalent or a homolog thereof as depicted in column 8 of Table II, application no. 2, preferably a homolog or functional equivalent as depicted in column 8 of Table II B, application no. 2, and being depicted in the same respective line as said AvinDRAFT_{—}5246, and preferably the activity is increased non-targeted.

[9837] Accordingly, in one embodiment, the molecule which activity is to be increased in the process of the invention is the gene product with an activity as a “glutamate-ammonia-ligase”, preferably it is the molecule of section (a) or (b) of this paragraph.

[9838] In particular, it was observed that in plants, especially in Arabidopsis thaliana, increasing or generating the activity of a gene product non-targeted with the activity of a “glutamate-ammonia-ligase”, preferably being encoded by a gene comprising the nucleic acid sequence SEQ ID NO. 32037, preferably the coding region thereof, conferred the production of or the increase in glutamine compared with the wild type control.

[9839] The nucleic acid sequence of AvinDRAFT_{—}5246 from Azotobacter vinelandii, e.g. as shown in the respective line in column 5 of Table I, application no. 2, has been published by deposition of the sequences to the EMBL/GenBank/DDBJ databases under “Sequencing of the draft genome assembly of Azotobacter vinelandii AvOP.” in June 2005 by Copeland et al. And the activity of the gene product thereof is the activity of glutamate-ammonia-ligase.

[9840] Accordingly, in one embodiment, the process of the present invention for producing proline in a non-human organism, like a microorganism or a plant or a part thereof, comprises increasing or generating the activity of a gene product with the activity of a gene product conferring the activity of “glutamate-ammonia-ligase”, especially from Azotobacter vinelandii or its functional equivalent or its homolog, e.g. the increase of
[9841] (a) a gene product of a gene comprising the nucleic acid molecule as shown in the respective line in column 5 of Table I, application no. 2, preferably the coding region thereof, or a homolog or a fragment thereof, and being depicted in the same respective line as said AvinDRAFT_{—}5246, or a functional equivalent or a homolog thereof as shown in column 8 of Table I, application no. 2, preferably the coding region thereof, particularly a homolog or functional equivalent as shown in column 8 of Table I B, application no. 2, and being depicted in the same respective line as said AvinDRAFT_{—}5246, and preferably the activity is increased non-targeted, or
[9842] (b) a polypeptide comprising a polypeptide, a consensus sequence or at least a polypeptide motif as shown in the respective line in column 5 of Table II or in column 8 of Table IV, application no. 2, respectively, and being depicted in the same respective line as said AvinDRAFT_{—}5246, or a functional equivalent or a homolog thereof as depicted in column 8 of Table II, application no. 2, preferably a homolog or functional equivalent as depicted in column 8 of Table II B, application no. 2, and being depicted in the same respective line as said AvinDRAFT_{—}5246, and preferably the activity is increased non-targeted.

[9843] Accordingly, in one embodiment, the molecule which activity is to be increased in the process of the invention is the gene product with an activity as a “glutamate-ammonia-ligase”, preferably it is the molecule of section (a) or (b) of this paragraph.

[9844] In particular, it was observed that in plants, especially in Arabidopsis thaliana, increasing or generating the activity of a gene product non-targeted with the activity of a “glutamate-ammonia-ligase”, preferably being encoded by a gene comprising the nucleic acid sequence SEQ ID NO. 32037, preferably the coding region thereof, conferred the production of or the increase in proline compared with the wild type control.

[9845] The nucleic acid sequence of AvinDRAFT_{—}5292 from Azotobacter vinelandii, e.g. as shown in the respective line in column 5 of Table I, application no. 2, has been published by deposition of the sequences to the EMBL/GenBank/DDBJ databases under “Sequencing of the draft genome assembly of Azotobacter vinelandii AvOP.” in June 2005 by Copeland et al. And the activity of the gene product thereof is the activity of fumarylacetoacetate hydrolase.

[9846] Accordingly, in one embodiment, the process of the present invention for producing proline in a non-human organism, like a microorganism or a plant or a part thereof, comprises increasing or generating the activity of a gene product with the activity of a gene product conferring the activity of “fumarylacetoacetate hydrolase”, especially from Azotobacter vinelandii or its functional equivalent or its homolog, e.g. the increase of
[9847] (a) a gene product of a gene comprising the nucleic acid molecule as shown in the respective line in column 5 of Table I, application no. 2, preferably the coding region thereof, or a homolog or a fragment thereof, and being depicted in the same respective line as said AvinDRAFT_{—}5292, or a functional equivalent or a homolog thereof as shown in column 8 of Table I, application no. 2, preferably the coding region thereof, particularly a homolog or functional equivalent as shown in column 8 of Table I B, application no. 2, and being depicted in the same respective line as said AvinDRAFT_{—}5292, and preferably the activity is increased non-targeted, or
[9848] (b) a polypeptide comprising a polypeptide, a consensus sequence or at least a polypeptide motif as shown in the respective line in column 5 of Table II or in column 8 of Table IV, application no. 2, respectively, and being depicted in the same respective line as said AvinDRAFT_{—}5292, or a functional equivalent or a homolog thereof as depicted in column 8 of Table II, application no. 2, preferably a homolog or functional equivalent as depicted in column 8 of Table II B, application no. 2, and being depicted in the same respective line as said AvinDRAFT_{—}5292, and preferably the activity is increased non-targeted.

[9849] Accordingly, in one embodiment, the molecule which activity is to be increased in the process of the invention is the gene product with an activity as a “fumarylacetoacetate hydrolase”, preferably it is the molecule of section (a) or (b) of this paragraph.

[9850] In particular, it was observed that in plants, especially in Arabidopsis thaliana, increasing or generating the activity of a gene product non-targeted with the activity of a “fumarylacetoacetate hydrolase”, preferably being encoded by a gene comprising the nucleic acid sequence SEQ ID NO. 32308, preferably the coding region thereof, conferred the production of or the increase in proline compared with the wild type control.

[9851] The nucleic acid sequence of AvinDRAFT_{—}5467 from Azotobacter vinelandii, e.g. as shown in the respective line in column 5 of Table I, application no. 2, has been published by deposition of the sequences to the EMBL/GenBank/DDBJ databases under “Sequencing of the draft genome assembly of Azotobacter vinelandii AvOP.” in June 2005 by Copeland et al. And the activity of the gene product thereof is the activity of HesB/YadR/YfhF family protein.

[9852] Accordingly, in one embodiment, the process of the present invention for producing arginine in a non-human organism, like a microorganism or a plant or a part thereof, comprises increasing or generating the activity of a gene product with the activity of a gene product conferring the activity of “HesB/YadR/YfhF family protein”, especially from Azotobacter vinelandii or its functional equivalent or its homolog, e.g. the increase of
[9853] (a) a gene product of a gene comprising the nucleic acid molecule as shown in the respective line in column 5 of Table I, application no. 2, preferably the coding region thereof, or a homolog or a fragment thereof, and being depicted in the same respective line as said AvinDRAFT_{—}5467, or a functional equivalent or a homolog thereof as shown in column 8 of Table I, application no. 2, preferably the coding region thereof, particularly a homolog or functional equivalent as shown in column 8 of Table I B, application no. 2, and being depicted in the same respective line as said AvinDRAFT_{—}5467, and preferably the activity is increased non-targeted, or
[9854] (b) a polypeptide comprising a polypeptide, a consensus sequence or at least a polypeptide motif as shown in the respective line in column 5 of Table II or in column 8 of Table IV, application no. 2, respectively, and being depicted in the same respective line as said AvinDRAFT_{—}5467, or a functional equivalent or a homolog thereof as depicted in column 8 of Table II, application no. 2, preferably a homolog or functional equivalent as depicted in column 8 of Table II B, application no. 2, and being depicted in the same respective line as said AvinDRAFT_{—}5467, and preferably the activity is increased non-targeted.

[9855] Accordingly, in one embodiment, the molecule which activity is to be increased in the process of the invention is the gene product with an activity as a “HesB/YadR/YfhF family protein”, preferably it is the molecule of section (a) or (b) of this paragraph.

[9856] In particular, it was observed that in plants, especially in Arabidopsis thaliana, increasing or generating the activity of a gene product non-targeted with the activity of a “HesB/YadR/YfhF family protein”, preferably being encoded by a gene comprising the nucleic acid sequence SEQ ID NO. 32648, preferably the coding region thereof, conferred the production of or the increase in arginine compared with the wild type control.

[9857] The nucleic acid sequence of AvinDRAFT_{—}5467 from Azotobacter vinelandii, e.g. as shown in the respective line in column 5 of Table I, application no. 2, has been published by deposition of the sequences to the EMBL/GenBank/DDBJ databases under “Sequencing of the draft genome assembly of Azotobacter vinelandii AvOP.” in June 2005 by Copeland et al. And the activity of the gene product thereof is the activity of HesB/YadR/YfhF family protein.

[9858] Accordingly, in one embodiment, the process of the present invention for producing glutamine in a non-human organism, like a microorganism or a plant or a part thereof, comprises increasing or generating the activity of a gene product with the activity of a gene product conferring the activity of “HesB/YadR/YfhF family protein”, especially from Azotobacter vinelandii or its functional equivalent or its homolog, e.g. the increase of
[9859] (a) a gene product of a gene comprising the nucleic acid molecule as shown in the respective line in column 5 of Table I, application no. 2, preferably the coding region thereof, or a homolog or a fragment thereof, and being depicted in the same respective line as said AvinDRAFT_{—}5467, or a functional equivalent or a homolog thereof as shown in column 8 of Table I, application no. 2, preferably the coding region thereof, particularly a homolog or functional equivalent as shown in column 8 of Table I B, application no. 2, and being depicted in the same respective line as said AvinDRAFT_{—}5467, and preferably the activity is increased non-targeted, or
[9860] (b) a polypeptide comprising a polypeptide, a consensus sequence or at least a polypeptide motif as shown in the respective line in column 5 of Table II or in column 8 of Table IV, application no. 2, respectively, and being depicted in the same respective line as said AvinDRAFT_{—}5467, or a functional equivalent or a homolog thereof as depicted in column 8 of Table II, application no. 2, preferably a homolog or functional equivalent as depicted in column 8 of Table II B, application no. 2, and being depicted in the same respective line as said AvinDRAFT_{—}5467, and preferably the activity is increased non-targeted.

[9861] Accordingly, in one embodiment, the molecule which activity is to be increased in the process of the invention is the gene product with an activity as a “HesB/YadR/YfhF family protein”, preferably it is the molecule of section (a) or (b) of this paragraph.

[9862] In particular, it was observed that in plants, especially in Arabidopsis thaliana, increasing or generating the activity of a gene product non-targeted with the activity of a “HesB/YadR/YfhF family protein”, preferably being encoded by a gene comprising the nucleic acid sequence SEQ ID NO. 32648, preferably the coding region thereof, conferred the production of or the increase in glutamine compared with the wild type control.

[9863] The nucleic acid sequence of AvinDRAFT_{—}5467 from Azotobacter vinelandii, e.g. as shown in the respective line in column 5 of Table I, application no. 2, has been published by deposition of the sequences to the EMBL/GenBank/DDBJ databases under “Sequencing of the draft genome assembly of Azotobacter vinelandii AvOP.” in June 2005 by Copeland et al And the activity of the gene product thereof is the activity of HesB/YadR/YfhF family protein.

[9864] Accordingly, in one embodiment, the process of the present invention for producing proline in a non-human organism, like a microorganism or a plant or a part thereof, comprises increasing or generating the activity of a gene product with the activity of a gene product conferring the activity of “HesB/YadR/YfhF family protein”, especially from Azotobacter vinelandii or its functional equivalent or its homolog, e.g. the increase of
[9865] (a) a gene product of a gene comprising the nucleic acid molecule as shown in the respective line in column 5 of Table I, application no. 2, preferably the coding region thereof, or a homolog or a fragment thereof, and being depicted in the same respective line as said AvinDRAFT_{—}5467, or a functional equivalent or a homolog thereof as shown in column 8 of Table I, application no. 2, preferably the coding region thereof, particularly a homolog or functional equivalent as shown in column 8 of Table I B, application no. 2, and being depicted in the same respective line as said AvinDRAFT_{—}5467, and preferably the activity is increased non-targeted, or
[9866] (b) a polypeptide comprising a polypeptide, a consensus sequence or at least a polypeptide motif as shown in the respective line in column 5 of Table II or in column 8 of Table IV, application no. 2, respectively, and being depicted in the same respective line as said AvinDRAFT_{—}5467, or a functional equivalent or a homolog thereof as depicted in column 8 of Table II, application no. 2, preferably a homolog or functional equivalent as depicted in column 8 of Table II B, application no. 2, and being depicted in the same respective line as said AvinDRAFT_{—}5467, and preferably the activity is increased non-targeted.

[9867] Accordingly, in one embodiment, the molecule which activity is to be increased in the process of the invention is the gene product with an activity as a “HesB/YadR/YfhF family protein”, preferably it is the molecule of section (a) or (b) of this paragraph.

[9868] In particular, it was observed that in plants, especially in Arabidopsis thaliana, increasing or generating the activity of a gene product non-targeted with the activity of a “HesB/YadR/YfhF family protein”, preferably being encoded by a gene comprising the nucleic acid sequence SEQ ID NO. 32648, preferably the coding region thereof, conferred the production of or the increase in proline compared with the wild type control.

[9869] The nucleic acid sequence of AvinDRAFT_{—}5644 from Azotobacter vinelandii, e.g. as shown in the respective line in column 5 of Table I, application no. 2, has been published by deposition of the sequences to the EMBL/GenBank/DDBJ databases under “Sequencing of the draft genome assembly of Azotobacter vinelandii AvOP.” in June 2005 by Copeland et al And the activity of the gene product thereof is the activity of L-aspartate oxidase.

[9870] Accordingly, in one embodiment, the process of the present invention for producing proline in a non-human organism, like a microorganism or a plant or a part thereof, comprises increasing or generating the activity of a gene product with the activity of a gene product conferring the activity of “L-aspartate oxidase”, especially from Azotobacter vinelandii or its functional equivalent or its homolog, e.g. the increase of
[9871] (a) a gene product of a gene comprising the nucleic acid molecule as shown in the respective line in column 5 of Table I, application no. 2, preferably the coding region thereof, or a homolog or a fragment thereof, and being depicted in the same respective line as said AvinDRAFT_{—}5644, or a functional equivalent or a homolog thereof as shown in column 8 of Table I, application no. 2, preferably the coding region thereof, particularly a homolog or functional equivalent as shown in column 8 of Table I B, application no. 2, and being depicted in the same respective line as said AvinDRAFT_{—}5644, and preferably the activity is increased non-targeted, or
[9872] (b) a polypeptide comprising a polypeptide, a consensus sequence or at least a polypeptide motif as shown in the respective line in column 5 of Table II or in column 8 of Table IV, application no. 2, respectively, and being depicted in the same respective line as said AvinDRAFT_{—}5644, or a functional equivalent or a homolog thereof as depicted in column 8 of Table II, application no. 2, preferably a homolog or functional equivalent as depicted in column 8 of Table II B, application no. 2, and being depicted in the same respective line as said AvinDRAFT_{—}5644, and preferably the activity is increased non-targeted.

[9873] Accordingly, in one embodiment, the molecule which activity is to be increased in the process of the invention is the gene product with an activity as a “L-aspartate oxidase”, preferably it is the molecule of section (a) or (b) of this paragraph.

[9874] In particular, it was observed that in plants, especially in Arabidopsis thaliana, increasing or generating the activity of a gene product non-targeted with the activity of a “L-aspartate oxidase”, preferably being encoded by a gene comprising the nucleic acid sequence SEQ ID NO. 33085, preferably the coding region thereof, conferred the production of or the increase in proline compared with the wild type control.

[9875] The nucleic acid sequence of AvinDRAFT_{—}5651 from Azotobacter vinelandii, e.g. as shown in the respective line in column 5 of Table I, application no. 2, has been published by deposition of the sequences to the EMBL/GenBank/DDBJ databases under “Sequencing of the draft genome assembly of Azotobacter vinelandii AvOP.” in June 2005 by Copeland et al And the activity of the gene product thereof is the activity of oxidoreductase.

[9876] Accordingly, in one embodiment, the process of the present invention for producing arginine in a non-human organism, like a microorganism or a plant or a part thereof, comprises increasing or generating the activity of a gene product with the activity of a gene product conferring the activity of “oxidoreductase”, especially from Azotobacter vinelandii or its functional equivalent or its homolog, e.g. the increase of
[9877] (a) a gene product of a gene comprising the nucleic acid molecule as shown in the respective line in column 5 of Table I, application no. 2, preferably the coding region thereof, or a homolog or a fragment thereof, and being depicted in the same respective line as said AvinDRAFT_{—}5651, or a functional equivalent or a homolog thereof as shown in column 8 of Table I, application no. 2, preferably the coding region thereof, particularly a homolog or functional equivalent as shown in column 8 of Table I B, application no. 2, and being depicted in the same respective line as said AvinDRAFT_{—}5651, and preferably the activity is increased non-targeted, or
[9878] (b) a polypeptide comprising a polypeptide, a consensus sequence or at least a polypeptide motif as shown in the respective line in column 5 of Table II or in column 8 of Table IV, application no. 2, respectively, and being depicted in the same respective line as said AvinDRAFT_{—}5651, or a functional equivalent or a homolog thereof as depicted in column 8 of Table II, application no. 2, preferably a homolog or functional equivalent as depicted in column 8 of Table II B, application no. 2, and being depicted in the same respective line as said AvinDRAFT_{—}5651, and preferably the activity is increased non-targeted.

[9879] Accordingly, in one embodiment, the molecule which activity is to be increased in the process of the invention is the gene product with an activity as a “oxidoreductase”, preferably it is the molecule of section (a) or (b) of this paragraph.

[9880] In particular, it was observed that in plants, especially in Arabidopsis thaliana, increasing or generating the activity of a gene product non-targeted with the activity of a “oxidoreductase”, preferably being encoded by a gene comprising the nucleic acid sequence SEQ ID NO. 33457, preferably the coding region thereof, conferred the production of or the increase in arginine compared with the wild type control.

[9881] The nucleic acid sequence of AvinDRAFT_{—}5651 from Azotobacter vinelandii, e.g. as shown in the respective line in column 5 of Table I, application no. 2, has been published by deposition of the sequences to the EMBL/GenBank/DDBJ databases under “Sequencing of the draft genome assembly of Azotobacter vinelandii AvOP.” in June 2005 by Copeland et al. And the activity of the gene product thereof is the activity of oxidoreductase.

[9882] Accordingly, in one embodiment, the process of the present invention for producing glutamine in a non-human organism, like a microorganism or a plant or a part thereof, comprises increasing or generating the activity of a gene product with the activity of a gene product conferring the activity of “oxidoreductase”, especially from Azotobacter vinelandii or its functional equivalent or its homolog, e.g. the increase of
[9883] (a) a gene product of a gene comprising the nucleic acid molecule as shown in the respective line in column 5 of Table I, application no. 2, preferably the coding region thereof, or a homolog or a fragment thereof, and being depicted in the same respective line as said AvinDRAFT_{—}5651, or a functional equivalent or a homolog thereof as shown in column 8 of Table I, application no. 2, preferably the coding region thereof, particularly a homolog or functional equivalent as shown in column 8 of Table I B, application no. 2, and being depicted in the same respective line as said AvinDRAFT_{—}5651, and preferably the activity is increased non-targeted, or
[9884] (b) a polypeptide comprising a polypeptide, a consensus sequence or at least a polypeptide motif as shown in the respective line in column 5 of Table II or in column 8 of Table IV, application no. 2, respectively, and being depicted in the same respective line as said AvinDRAFT_{—}5651, or a functional equivalent or a homolog thereof as depicted in column 8 of Table II, application no. 2, preferably a homolog or functional equivalent as depicted in column 8 of Table II B, application no. 2, and being depicted in the same respective line as said AvinDRAFT_{—}5651, and preferably the activity is increased non-targeted.

[9885] Accordingly, in one embodiment, the molecule which activity is to be increased in the process of the invention is the gene product with an activity as a “oxidoreductase”, preferably it is the molecule of section (a) or (b) of this paragraph.

[9886] In particular, it was observed that in plants, especially in Arabidopsis thaliana, increasing or generating the activity of a gene product non-targeted with the activity of a “oxidoreductase”, preferably being encoded by a gene comprising the nucleic acid sequence SEQ ID NO. 33457, preferably the coding region thereof, conferred the production of or the increase in glutamine compared with the wild type control.

[9887] The nucleic acid sequence of AvinDRAFT_{—}6093 from Azotobacter vinelandii, e.g. as shown in the respective line in column 5 of Table I, application no. 2, has been published by deposition of the sequences to the EMBL/GenBank/DDBJ databases under “Sequencing of the draft genome assembly of Azotobacter vinelandii AvOP.” in June 2005 by Copeland et al. And the activity of the gene product thereof is the activity of Chaperone protein CIpB.

[9888] Accordingly, in one embodiment, the process of the present invention for producing proline in a non-human organism, like a microorganism or a plant or a part thereof, comprises increasing or generating the activity of a gene product with the activity of a gene product conferring the activity of “Chaperone protein CIpB”, especially from Azotobacter vinelandii or its functional equivalent or its homolog, e.g. the increase of
[9889] (a) a gene product of a gene comprising the nucleic acid molecule as shown in the respective line in column 5 of Table I, application no. 2, preferably the coding region thereof, or a homolog or a fragment thereof, and being depicted in the same respective line as said AvinDRAFT_{—}6093, or a functional equivalent or a homolog thereof as shown in column 8 of Table I, application no. 2, preferably the coding region thereof, particularly a homolog or functional equivalent as shown in column 8 of Table I B, application no. 2, and being depicted in the same respective line as said AvinDRAFT_{—}6093, and preferably the activity is increased non-targeted, or
[9890] (b) a polypeptide comprising a polypeptide, a consensus sequence or at least a polypeptide motif as shown in the respective line in column 5 of Table II or in column 8 of Table IV, application no. 2, respectively, and being depicted in the same respective line as said AvinDRAFT_{—}6093, or a functional equivalent or a homolog thereof as depicted in column 8 of Table II, application no. 2, preferably a homolog or functional equivalent as depicted in column 8 of Table II B, application no. 2, and being depicted in the same respective line as said AvinDRAFT_{—}6093, and preferably the activity is increased non-targeted.

[9891] Accordingly, in one embodiment, the molecule which activity is to be increased in the process of the invention is the gene product with an activity as a “Chaperone protein CIpB”, preferably it is the molecule of section (a) or (b) of this paragraph.

[9892] In particular, it was observed that in plants, especially in Arabidopsis thaliana, increasing or generating the activity of a gene product non-targeted with the activity of a “Chaperone protein CIpB”, preferably being encoded by a gene comprising the nucleic acid sequence SEQ ID NO. 33596, preferably the coding region thereof, conferred the production of or the increase in proline compared with the wild type control.

[9893] The nucleic acid sequence of AvinDRAFT_{—}6700 from Azotobacter vinelandii, e.g. as shown in the respective line in column 5 of Table I, application no. 2, has been published by deposition of the sequences to the EMBL/GenBank/DDBJ databases under “Sequencing of the draft genome assembly of Azotobacter vinelandii AvOP.” in June 2005 by Copeland et al. And the activity of the gene product thereof is the activity of purine nucleoside phosphorylase.

[9894] Accordingly, in one embodiment, the process of the present invention for producing arginine in a non-human organism, like a microorganism or a plant or a part thereof, comprises increasing or generating the activity of a gene product with the activity of a gene product conferring the activity of “purine nucleoside phosphorylase”, especially from Azotobacter vinelandii or its functional equivalent or its homolog, e.g. the increase of
[9895] (a) a gene product of a gene comprising the nucleic acid molecule as shown in the respective line in column 5 of Table I, application no. 2, preferably the coding region thereof, or a homolog or a fragment thereof, and being depicted in the same respective line as said AvinDRAFT_{—}6700, or a functional equivalent or a homolog thereof as shown in column 8 of Table I, application no. 2, preferably the coding region thereof, particularly a homolog or functional equivalent as shown in column 8 of Table I B, application no. 2, and being depicted in the same respective line as said AvinDRAFT_{—}6700, and preferably the activity is increased non-targeted, or
[9896] (b) a polypeptide comprising a polypeptide, a consensus sequence or at least a polypeptide motif as shown in the respective line in column 5 of Table II or in column 8 of Table IV, application no. 2, respectively, and being depicted in the same respective line as said AvinDRAFT_{—}6700, or a functional equivalent or a homolog thereof as depicted in column 8 of Table II, application no. 2, preferably a homolog or functional equivalent as depicted in column 8 of Table II B, application no. 2, and being depicted in the same respective line as said AvinDRAFT_{—}6700, and preferably the activity is increased non-targeted.

[9897] Accordingly, in one embodiment, the molecule which activity is to be increased in the process of the invention is the gene product with an activity as a “purine nucleoside phosphorylase”, preferably it is the molecule of section (a) or (b) of this paragraph.

[9898] In particular, it was observed that in plants, especially in Arabidopsis thaliana, increasing or generating the activity of a gene product non-targeted with the activity of a “purine nucleoside phosphorylase”, preferably being encoded by a gene comprising the nucleic acid sequence SEQ ID NO. 34044, preferably the coding region thereof, conferred the production of or the increase in arginine compared with the wild type control.

[9899] The nucleic acid sequence of AvinDRAFT_{—}6700 from Azotobacter vinelandii, e.g. as shown in the respective line in column 5 of Table I, application no. 2, has been published by deposition of the sequences to the EMBL/GenBank/DDBJ databases under “Sequencing of the draft genome assembly of Azotobacter vinelandii AvOP.” in June 2005 by Copeland et al. And the activity of the gene product thereof is the activity of purine nucleoside phosphorylase.

[9900] Accordingly, in one embodiment, the process of the present invention for producing glutamine in a non-human organism, like a microorganism or a plant or a part thereof, comprises increasing or generating the activity of a gene product with the activity of a gene product conferring the activity of “purine nucleoside phosphorylase”, especially from Azotobacter vinelandii or its functional equivalent or its homolog, e.g. the increase of
[9901] (a) a gene product of a gene comprising the nucleic acid molecule as shown in the respective line in column 5 of Table I, application no. 2, preferably the coding region thereof, or a homolog or a fragment thereof, and being depicted in the same respective line as said AvinDRAFT_{—}6700, or a functional equivalent or a homolog thereof as shown in column 8 of Table I, application no. 2, preferably the coding region thereof, particularly a homolog or functional equivalent as shown in column 8 of Table I B, application no. 2, and being depicted in the same respective line as said AvinDRAFT_{—}6700, and preferably the activity is increased non-targeted, or
[9902] (b) a polypeptide comprising a polypeptide, a consensus sequence or at least a polypeptide motif as shown in the respective line in column 5 of Table II or in column 8 of Table IV, application no. 2, respectively, and being depicted in the same respective line as said AvinDRAFT_{—}6700, or a functional equivalent or a homolog thereof as depicted in column 8 of Table II, application no. 2, preferably a homolog or functional equivalent as depicted in column 8 of Table II B, application no. 2, and being depicted in the same respective line as said AvinDRAFT_{—}6700, and preferably the activity is increased non-targeted.

[9903] Accordingly, in one embodiment, the molecule which activity is to be increased in the process of the invention is the gene product with an activity as a “purine nucleoside phosphorylase”, preferably it is the molecule of section (a) or (b) of this paragraph.

[9904] In particular, it was observed that in plants, especially in Arabidopsis thaliana, increasing or generating the activity of a gene product non-targeted with the activity of a “purine nucleoside phosphorylase”, preferably being encoded by a gene comprising the nucleic acid sequence SEQ ID NO. 34044, preferably the coding region thereof, conferred the production of or the increase in glutamine compared with the wild type control.

[9905] The nucleic acid sequence of AvinDRAFT_{—}6700 from Azotobacter vinelandii, e.g. as shown in the respective line in column 5 of Table I, application no. 2, has been published by deposition of the sequences to the EMBL/GenBank/DDBJ databases under “Sequencing of the draft genome assembly of Azotobacter vinelandii AvOP.” in June 2005 by Copeland et al. And the activity of the gene product thereof is the activity of purine nucleoside phosphorylase.

[9906] Accordingly, in one embodiment, the process of the present invention for producing proline in a non-human organism, like a microorganism or a plant or a part thereof, comprises increasing or generating the activity of a gene product with the activity of a gene product conferring the activity of “purine nucleoside phosphorylase”, especially from Azotobacter vinelandii or its functional equivalent or its homolog, e.g. the increase of
[9907] (a) a gene product of a gene comprising the nucleic acid molecule as shown in the respective line in column 5 of Table I, application no. 2, preferably the coding region thereof, or a homolog or a fragment thereof, and being depicted in the same respective line as said AvinDRAFT_{—}6700, or a functional equivalent or a homolog thereof as shown in column 8 of Table I, application no. 2, preferably the coding region thereof, particularly a homolog or functional equivalent as shown in column 8 of Table I B, application no. 2, and being depicted in the same respective line as said AvinDRAFT_{—}6700, and preferably the activity is increased non-targeted, or
[9908] (b) a polypeptide comprising a polypeptide, a consensus sequence or at least a polypeptide motif as shown in the respective line in column 5 of Table II or in column 8 of Table IV, application no. 2, respectively, and being depicted in the same respective line as said AvinDRAFT_{—}6700, or a functional equivalent or a homolog thereof as depicted in column 8 of Table II, application no. 2, preferably a homolog or functional equivalent as depicted in column 8 of Table II B, application no. 2, and being depicted in the same respective line as said AvinDRAFT_{—}6700, and preferably the activity is increased non-targeted.

[9909] Accordingly, in one embodiment, the molecule which activity is to be increased in the process of the invention is the gene product with an activity as a “purine nucleoside phosphorylase”, preferably it is the molecule of section (a) or (b) of this paragraph.

[9910] In particular, it was observed that in plants, especially in Arabidopsis thaliana, increasing or generating the activity of a gene product non-targeted with the activity of a “purine nucleoside phosphorylase”, preferably being encoded by a gene comprising the nucleic acid sequence SEQ ID NO. 34044, preferably the coding region thereof, conferred the production of or the increase in proline compared with the wild type control.

[9911] The nucleic acid sequence of AvinDRAFT_{—}6864 from Azotobacter vinelandii, e.g. as shown in the respective line in column 5 of Table I, application no. 2, has been published by deposition of the sequences to the EMBL/GenBank/DDBJ databases under “Sequencing of the draft genome assembly of Azotobacter vinelandii AvOP.” in June 2005 by Copeland et al. And the activity of the gene product thereof is the activity of transcriptional regulator protein.

[9912] Accordingly, in one embodiment, the process of the present invention for producing proline in a non-human organism, like a microorganism or a plant or a part thereof, comprises increasing or generating the activity of a gene product with the activity of a gene product conferring the activity of “transcriptional regulator protein”, especially from Azotobacter vinelandii or its functional equivalent or its homolog, e.g. the increase of
[9913] (a) a gene product of a gene comprising the nucleic acid molecule as shown in the respective line in column 5 of Table I, application no. 2, preferably the coding region thereof, or a homolog or a fragment thereof, and being depicted in the same respective line as said AvinDRAFT_{—}6864, or a functional equivalent or a homolog thereof as shown in column 8 of Table I, application no. 2, preferably the coding region thereof, particularly a homolog or functional equivalent as shown in column 8 of Table I B, application no. 2, and being depicted in the same respective line as said AvinDRAFT_{—}6864, and preferably the activity is increased non-targeted, or
[9914] (b) a polypeptide comprising a polypeptide, a consensus sequence or at least a polypeptide motif as shown in the respective line in column 5 of Table II or in column 8 of Table IV, application no. 2, respectively, and being depicted in the same respective line as said AvinDRAFT_{—}6864, or a functional equivalent or a homolog thereof as depicted in column 8 of Table II, application no. 2, preferably a homolog or functional equivalent as depicted in column 8 of Table II B, application no. 2, and being depicted in the same respective line as said AvinDRAFT_{—}6864, and preferably the activity is increased non-targeted.

[9915] Accordingly, in one embodiment, the molecule which activity is to be increased in the process of the invention is the gene product with an activity as a “transcriptional regulator protein”, preferably it is the molecule of section (a) or (b) of this paragraph. In particular, it was observed that in plants, especially in Arabidopsis thaliana, increasing or generating the activity of a gene product non-targeted with the activity of a “transcriptional regulator protein”, preferably being encoded by a gene comprising the nucleic acid sequence SEQ ID NO. 34204, preferably the coding region thereof, conferred the production of or the increase in proline compared with the wild type control.

[9916] The nucleic acid sequence of AX653549 from Oryza sativa, e.g. as shown in the respective line in column 5 of Table I, application no. 2 is unpublished. And the activity of the gene product thereof is the activity of AX653549-protein.

[9917] Accordingly, in one embodiment, the process of the present invention for producing glutamate in a non-human organism, like a microorganism or a plant or a part thereof, comprises increasing or generating the activity of a gene product with the activity of a gene product conferring the activity of “AX653549-protein”, especially from Oryza sativa or its functional equivalent or its homolog, e.g. the increase of
[9918] (a) a gene product of a gene comprising the nucleic acid molecule as shown in the respective line in column 5 of Table I, application no. 2, preferably the coding region thereof, or a homolog or a fragment thereof, and being depicted in the same respective line as said AX653549, or a functional equivalent or a homolog thereof as shown in column 8 of Table I, application no. 2, preferably the coding region thereof, particularly a homolog or functional equivalent as shown in column 8 of Table I B, application no. 2, and being depicted in the same respective line as said AX653549, and preferably the activity is increased non-targeted, or
[9919] (b) a polypeptide comprising a polypeptide, a consensus sequence or at least a polypeptide motif as shown in the respective line in column 5 of Table II or in column 8 of Table IV, application no. 2, respectively, and being depicted in the same respective line as said AX653549, or a functional equivalent or a homolog thereof as depicted in column 8 of Table II, application no. 2, preferably a homolog or functional equivalent as depicted in column 8 of Table II B, application no. 2, and being depicted in the same respective line as said AX653549, and preferably the activity is increased non-targeted.

[9920] Accordingly, in one embodiment, the molecule which activity is to be increased in the process of the invention is the gene product with an activity as a “AX653549-protein”, preferably it is the molecule of section (a) or (b) of this paragraph.

[9921] In particular, it was observed that in plants, especially in Arabidopsis thaliana, increasing or generating the activity of a gene product non-targeted with the activity of a “AX653549-protein”, preferably being encoded by a gene comprising the nucleic acid sequence SEQ ID NO. 34301, preferably the coding region thereof, conferred the production of or the increase in glutamate compared with the wild type control.

[9922] The nucleic acid sequence of AX653549 from Oryza sativa, e.g. as shown in the respective line in column 5 of Table I, application no. 2 is unpublished. And the activity of the gene product thereof is the activity of AX653549-protein.

[9923] Accordingly, in one embodiment, the process of the present invention for producing glutamine in a non-human organism, like a microorganism or a plant or a part thereof, comprises increasing or generating the activity of a gene product with the activity of a gene product conferring the activity of “AX653549-protein”, especially from Oryza sativa or its functional equivalent or its homolog, e.g. the increase of
[9924] (a) a gene product of a gene comprising the nucleic acid molecule as shown in the respective line in column 5 of Table I, application no. 2, preferably the coding region thereof, or a homolog or a fragment thereof, and being depicted in the same respective line as said AX653549, or a functional equivalent or a homolog thereof as shown in column 8 of Table I, application no. 2, preferably the coding region thereof, particularly a homolog or functional equivalent as shown in column 8 of Table I B, application no. 2, and being depicted in the same respective line as said AX653549, and preferably the activity is increased non-targeted, or
[9925] (b) a polypeptide comprising a polypeptide, a consensus sequence or at least a polypeptide motif as shown in the respective line in column 5 of Table II or in column 8 of Table IV, application no. 2, respectively, and being depicted in the same respective line as said AX653549, or a functional equivalent or a homolog thereof as depicted in column 8 of Table II, application no. 2, preferably a homolog or functional equivalent as depicted in column 8 of Table II B, application no. 2, and being depicted in the same respective line as said AX653549, and preferably the activity is increased non-targeted.

[9926] Accordingly, in one embodiment, the molecule which activity is to be increased in the process of the invention is the gene product with an activity as a “AX653549-protein”, preferably it is the molecule of section (a) or (b) of this paragraph.

[9927] In particular, it was observed that in plants, especially in Arabidopsis thaliana, increasing or generating the activity of a gene product non-targeted with the activity of a “AX653549-protein”, preferably being encoded by a gene comprising the nucleic acid sequence SEQ ID NO. 34301, preferably the coding region thereof, conferred the production of or the increase in glutamine compared with the wild type control.

[9928] The nucleic acid sequence of AY087308 from Arabidopsis thaliana, e.g. as shown in the respective line in column 5 of Table I, application no. 2 is unpublished. And the activity of the gene product thereof is the activity of AY087308-protein.

[9929] Accordingly, in one embodiment, the process of the present invention for producing glutamine in a non-human organism, like a microorganism or a plant or a part thereof, comprises increasing or generating the activity of a gene product with the activity of a gene product conferring the activity of “AY087308-protein”, especially from Arabidopsis thaliana or its functional equivalent or its homolog, e.g. the increase of
[9930] (a) a gene product of a gene comprising the nucleic acid molecule as shown in the respective line in column 5 of Table I, application no. 2, preferably the coding region thereof, or a homolog or a fragment thereof, and being depicted in the same respective line as said AY087308, or a functional equivalent or a homolog thereof as shown in column 8 of Table I, application no. 2, preferably the coding region thereof, particularly a homolog or functional equivalent as shown in column 8 of Table I B, application no. 2, and being depicted in the same respective line as said AY087308, and preferably the activity is increased non-targeted, or
[9931] (b) a polypeptide comprising a polypeptide, a consensus sequence or at least a polypeptide motif as shown in the respective line in column 5 of Table II or in column 8 of Table IV, application no. 2, respectively, and being depicted in the same respective line as said AY087308, or a functional equivalent or a homolog thereof as depicted in column 8 of Table II, application no. 2, preferably a homolog or functional equivalent as depicted in column 8 of Table II B, application no. 2, and being depicted in the same respective line as said AY087308, and preferably the activity is increased non-targeted.

[9932] Accordingly, in one embodiment, the molecule which activity is to be increased in the process of the invention is the gene product with an activity as a “AY087308-protein”, preferably it is the molecule of section (a) or (b) of this paragraph. In particular, it was observed that in plants, especially in Arabidopsis thaliana, increasing or generating the activity of a gene product non-targeted with the activity of a “AY087308-protein”, preferably being encoded by a gene comprising the nucleic acid sequence SEQ ID NO. 34602, preferably the coding region thereof, conferred the production of or the increase in glutamine compared with the wild type control.

[9933] The nucleic acid sequence of B0004 from Escherichia coli, e.g. as shown in the respective line in column 5 of Table I, application no. 2, has been published in Blattner et al., Science 277 (5331). And the activity of the gene product thereof is the activity of threonine synthase.

[9934] Accordingly, in one embodiment, the process of the present invention for producing arginine in a non-human organism, like a microorganism or a plant or a part thereof, comprises increasing or generating the activity of a gene product with the activity of a gene product conferring the activity of “threonine synthase”, especially from Escherichia coli or its functional equivalent or its homolog, e.g. the increase of
[9935] (a) a gene product of a gene comprising the nucleic acid molecule as shown in the respective line in column 5 of Table I, application no. 2, preferably the coding region thereof, or a homolog or a fragment thereof, and being depicted in the same respective line as said B0004, or a functional equivalent or a homolog thereof as shown in column 8 of Table I, application no. 2, preferably the coding region thereof, particularly a homolog or functional equivalent as shown in column 8 of Table I B, application no. 2, and being depicted in the same respective line as said B0004, and preferably the activity is increased plastidic, or
[9936] (b) a polypeptide comprising a polypeptide, a consensus sequence or at least a polypeptide motif as shown in the respective line in column 5 of Table II or in column 8 of Table IV, application no. 2, respectively, and being depicted in the same respective line as said B0004, or a functional equivalent or a homolog thereof as depicted in column 8 of Table II, application no. 2, preferably a homolog or functional equivalent as depicted in column 8 of Table II B, application no. 2, and being depicted in the same respective line as said B0004, and preferably the activity is increased plastidic.

[9937] Accordingly, in one embodiment, the molecule which activity is to be increased in the process of the invention is the gene product with an activity as a “threonine synthase”, preferably it is the molecule of section (a) or (b) of this paragraph.

[9938] In particular, it was observed that in plants, especially in Arabidopsis thaliana, increasing or generating the activity of a gene product plastidic with the activity of a “threonine synthase”, preferably being encoded by a gene comprising the nucleic acid sequence SEQ ID NO. 34889, preferably the coding region thereof, conferred the production of or the increase in arginine compared with the wild type control.

[9939] The nucleic acid sequence of B0004 from Escherichia coli, e.g. as shown in the respective line in column 5 of Table I, application no. 2, has been published in Blattner et al., Science 277 (5331), 1453 (1997)). And the activity of the gene product thereof is the activity of threonine synthase.

[9940] Accordingly, in one embodiment, the process of the present invention for producing glutamine in a non-human organism, like a microorganism or a plant or a part thereof, comprises increasing or generating the activity of a gene product with the activity of a gene product conferring the activity of “threonine synthase”, especially from Escherichia coli or its functional equivalent or its homolog, e.g. the increase of
[9941] (a) a gene product of a gene comprising the nucleic acid molecule as shown in the respective line in column 5 of Table I, application no. 2, preferably the coding region thereof, or a homolog or a fragment thereof, and being depicted in the same respective line as said B0004, or a functional equivalent or a homolog thereof as shown in column 8 of Table I, application no. 2, preferably the coding region thereof, particularly a homolog or functional equivalent as shown in column 8 of Table I B, application no. 2, and being depicted in the same respective line as said B0004, and preferably the activity is increased plastidic, or
[9942] (b) a polypeptide comprising a polypeptide, a consensus sequence or at least a polypeptide motif as shown in the respective line in column 5 of Table II or in column 8 of Table IV, application no. 2, respectively, and being depicted in the same respective line as said B0004, or a functional equivalent or a homolog thereof as depicted in column 8 of Table II, application no. 2, preferably a homolog or functional equivalent as depicted in column 8 of Table II B, application no. 2, and being depicted in the same respective line as said B0004, and preferably the activity is increased plastidic.

[9943] Accordingly, in one embodiment, the molecule which activity is to be increased in the process of the invention is the gene product with an activity as a “threonine synthase”, preferably it is the molecule of section (a) or (b) of this paragraph.

[9944] In particular, it was observed that in plants, especially in Arabidopsis thaliana, increasing or generating the activity of a gene product plastidic with the activity of a “threonine synthase”, preferably being encoded by a gene comprising the nucleic acid sequence SEQ ID NO. 34889, preferably the coding region thereof, conferred the production of or the increase in glutamine compared with the wild type control.

[9945] The nucleic acid sequence of B0004 from Escherichia coli, e.g. as shown in the respective line in column 5 of Table I, application no. 2, has been published in Blattner et al., Science 277 (5331), 1453 (1997)). And the activity of the gene product thereof is the activity of threonine synthase.

[9946] Accordingly, in one embodiment, the process of the present invention for producing proline in a non-human organism, like a microorganism or a plant or a part thereof, comprises increasing or generating the activity of a gene product with the activity of a gene product conferring the activity of “threonine synthase”, especially from Escherichia coli or its functional equivalent or its homolog, e.g. the increase of
[9947] (a) a gene product of a gene comprising the nucleic acid molecule as shown in the respective line in column 5 of Table I, application no. 2, preferably the coding region thereof, or a homolog or a fragment thereof, and being depicted in the same respective line as said B0004, or a functional equivalent or a homolog thereof as shown in column 8 of Table I, application no. 2, preferably the coding region thereof, particularly a homolog or functional equivalent as shown in column 8 of Table I B, application no. 2, and being depicted in the same respective line as said B0004, and preferably the activity is increased plastidic, or
[9948] (b) a polypeptide comprising a polypeptide, a consensus sequence or at least a polypeptide motif as shown in the respective line in column 5 of Table II or in column 8 of Table IV, application no. 2, respectively, and being depicted in the same respective line as said B0004, or a functional equivalent or a homolog thereof as depicted in column 8 of Table II, application no. 2, preferably a homolog or functional equivalent as depicted in column 8 of Table II B, application no. 2, and being depicted in the same respective line as said B0004, and preferably the activity is increased plastidic.

[9949] Accordingly, in one embodiment, the molecule which activity is to be increased in the process of the invention is the gene product with an activity as a “threonine synthase”, preferably it is the molecule of section (a) or (b) of this paragraph.

[9950] In particular, it was observed that in plants, especially in Arabidopsis thaliana, increasing or generating the activity of a gene product plastidic with the activity of a “threonine synthase”, preferably being encoded by a gene comprising the nucleic acid sequence SEQ ID NO. 34889, preferably the coding region thereof, conferred the production of or the increase in proline compared with the wild type control.

[9951] The nucleic acid sequence of B0061 from Escherichia coli, e.g. as shown in the respective line in column 5 of Table I, application no. 2, has been published in Blattner et al., Science 277 (5331), 1453 (1997). And the activity of the gene product thereof is the activity of L-ribulose-5-phosphate 4-epimerase.

[9952] Accordingly, in one embodiment, the process of the present invention for producing proline in a non-human organism, like a microorganism or a plant or a part thereof, comprises increasing or generating the activity of a gene product with the activity of a gene product conferring the activity of “L-ribulose-5-phosphate 4-epimerase”, especially from Escherichia coli or its functional equivalent or its homolog, e.g. the increase of
[9953] (a) a gene product of a gene comprising the nucleic acid molecule as shown in the respective line in column 5 of Table I, application no. 2, preferably the coding region thereof, or a homolog or a fragment thereof, and being depicted in the same respective line as said B0061, or a functional equivalent or a homolog thereof as shown in column 8 of Table I, application no. 2, preferably the coding region thereof, particularly a homolog or functional equivalent as shown in column 8 of Table I B, application no. 2, and being depicted in the same respective line as said B0061, and preferably the activity is increased non-targeted, or
[9954] (b) a polypeptide comprising a polypeptide, a consensus sequence or at least a polypeptide motif as shown in the respective line in column 5 of Table II or in column 8 of Table IV, application no. 2, respectively, and being depicted in the same respective line as said B0061, or a functional equivalent or a homolog thereof as depicted in column 8 of Table II, application no. 2, preferably a homolog or functional equivalent as depicted in column 8 of Table II B, application no. 2, and being depicted in the same respective line as said B0061, and preferably the activity is increased non-targeted.

[9955] Accordingly, in one embodiment, the molecule which activity is to be increased in the process of the invention is the gene product with an activity as a “L-ribulose-5-phosphate 4-epimerase”, preferably it is the molecule of section (a) or (b) of this paragraph.

[9956] In particular, it was observed that in plants, especially in Arabidopsis thaliana, increasing or generating the activity of a gene product non-targeted with the activity of a “L-ribulose-5-phosphate 4-epimerase”, preferably being encoded by a gene comprising the nucleic acid sequence SEQ ID NO. 35204, preferably the coding region thereof, conferred the production of or the increase in proline compared with the wild type control.

[9957] The nucleic acid sequence of B0115 from Escherichia coli, e.g. as shown in the respective line in column 5 of Table I, application no. 2, has been published in Blattner et al., Science 277 (5331), 1453 (1997)). And the activity of the gene product thereof is the activity of dihydrolipoamide acetyltransferase.

[9958] Accordingly, in one embodiment, the process of the present invention for producing glutamine in a non-human organism, like a microorganism or a plant or a part thereof, comprises increasing or generating the activity of a gene product with the activity of a gene product conferring the activity of “dihydrolipoamide acetyltransferase”, especially from Escherichia coli or its functional equivalent or its homolog, e.g. the increase of
[9959] (a) a gene product of a gene comprising the nucleic acid molecule as shown in the respective line in column 5 of Table I, application no. 2, preferably the coding region thereof, or a homolog or a fragment thereof, and being depicted in the same respective line as said B0115, or a functional equivalent or a homolog thereof as shown in column 8 of Table I, application no. 2, preferably the coding region thereof, particularly a homolog or functional equivalent as shown in column 8 of Table I B, application no. 2, and being depicted in the same respective line as said B0115, and preferably the activity is increased plastidic, or
[9960] (b) a polypeptide comprising a polypeptide, a consensus sequence or at least a polypeptide motif as shown in the respective line in column 5 of Table II or in column 8 of Table IV, application no. 2, respectively, and being depicted in the same respective line as said B0115, or a functional equivalent or a homolog thereof as depicted in column 8 of Table II, application no. 2, preferably a homolog or functional equivalent as depicted in column 8 of Table II B, application no. 2, and being depicted in the same respective line as said B0115, and preferably the activity is increased plastidic.

[9961] Accordingly, in one embodiment, the molecule which activity is to be increased in the process of the invention is the gene product with an activity as a “dihydrolipoamide acetyltransferase”, preferably it is the molecule of section (a) or (b) of this paragraph.

[9962] In particular, it was observed that in plants, especially in Arabidopsis thaliana, increasing or generating the activity of a gene product plastidic with the activity of a “dihydrolipoamide acetyltransferase”, preferably being encoded by a gene comprising the nucleic acid sequence SEQ ID NO. 35366, preferably the coding region thereof, conferred the production of or the increase in glutamine compared with the wild type control.

[9963] The nucleic acid sequence of B0124 from Escherichia coli, e.g. as shown in the respective line in column 5 of Table I, application no. 2, has been published in Blattner et al., Science 277 (5331), 1453 (1997)). And the activity of the gene product thereof is the activity of glucose dehydrogenase.

[9964] Accordingly, in one embodiment, the process of the present invention for producing arginine in a non-human organism, like a microorganism or a plant or a part thereof, comprises increasing or generating the activity of a gene product with the activity of a gene product conferring the activity of “glucose dehydrogenase”, especially from Escherichia coli or its functional equivalent or its homolog, e.g. the increase of
[9965] (a) a gene product of a gene comprising the nucleic acid molecule as shown in the respective line in column 5 of Table I, application no. 2, preferably the coding region thereof, or a homolog or a fragment thereof, and being depicted in the same respective line as said B0124, or a functional equivalent or a homolog thereof as shown in column 8 of Table I, application no. 2, preferably the coding region thereof, particularly a homolog or functional equivalent as shown in column 8 of Table I B, application no. 2, and being depicted in the same respective line as said B0124, and preferably the activity is increased non-targeted, or
[9966] (b) a polypeptide comprising a polypeptide, a consensus sequence or at least a polypeptide motif as shown in the respective line in column 5 of Table II or in column 8 of Table IV, application no. 2, respectively, and being depicted in the same respective line as said B0124, or a functional equivalent or a homolog thereof as depicted in column 8 of Table II, application no. 2, preferably a homolog or functional equivalent as depicted in column 8 of Table II B, application no. 2, and being depicted in the same respective line as said B0124, and preferably the activity is increased non-targeted.

[9967] Accordingly, in one embodiment, the molecule which activity is to be increased in the process of the invention is the gene product with an activity as a “glucose dehydrogenase”, preferably it is the molecule of section (a) or (b) of this paragraph.

[9968] In particular, it was observed that in plants, especially in Arabidopsis thaliana, increasing or generating the activity of a gene product non-targeted with the activity of a “glucose dehydrogenase”, preferably being encoded by a gene comprising the nucleic acid sequence SEQ ID NO. 35482, preferably the coding region thereof, conferred the production of or the increase in arginine compared with the wild type control.

[9969] The nucleic acid sequence of B0124 from Escherichia coli, e.g. as shown in the respective line in column 5 of Table I, application no. 2, has been published in Blattner et al., Science 277 (5331), 1453 (1997)). And the activity of the gene product thereof is the activity of glucose dehydrogenase.

[9970] Accordingly, in one embodiment, the process of the present invention for producing proline in a non-human organism, like a microorganism or a plant or a part thereof, comprises increasing or generating the activity of a gene product with the activity of a gene product conferring the activity of “glucose dehydrogenase”, especially from Escherichia coli or its functional equivalent or its homolog, e.g. the increase of
[9971] (a) a gene product of a gene comprising the nucleic acid molecule as shown in the respective line in column 5 of Table I, application no. 2, preferably the coding region thereof, or a homolog or a fragment thereof, and being depicted in the same respective line as said B0124, or a functional equivalent or a homolog thereof as shown in column 8 of Table I, application no. 2, preferably the coding region thereof, particularly a homolog or functional equivalent as shown in column 8 of Table I B, application no. 2, and being depicted in the same respective line as said B0124, and preferably the activity is increased plastidic, or
[9972] (b) a polypeptide comprising a polypeptide, a consensus sequence or at least a polypeptide motif as shown in the respective line in column 5 of Table II or in column 8 of Table IV, application no. 2, respectively, and being depicted in the same respective line as said B0124, or a functional equivalent or a homolog thereof as depicted in column 8 of Table II, application no. 2, preferably a homolog or functional equivalent as depicted in column 8 of Table II B, application no. 2, and being depicted in the same respective line as said B0124, and preferably the activity is increased plastidic.

[9973] Accordingly, in one embodiment, the molecule which activity is to be increased in the process of the invention is the gene product with an activity as a “glucose dehydrogenase”, preferably it is the molecule of section (a) or (b) of this paragraph.

[9974] In particular, it was observed that in plants, especially in Arabidopsis thaliana, increasing or generating the activity of a gene product plastidic with the activity of a “glucose dehydrogenase”, preferably being encoded by a gene comprising the nucleic acid sequence SEQ ID NO. 35482, preferably the coding region thereof, conferred the production of or the increase in proline compared with the wild type control.

[9975] The nucleic acid sequence of B0124 from Escherichia coli, e.g. as shown in the respective line in column 5 of Table I, application no. 2, has been published in Blattner et al., Science 277 (5331), 1453 (1997)). And the activity of the gene product thereof is the activity of glucose dehydrogenase.

[9976] Accordingly, in one embodiment, the process of the present invention for producing proline in a non-human organism, like a microorganism or a plant or a part thereof, comprises increasing or generating the activity of a gene product with the activity of a gene product conferring the activity of “glucose dehydrogenase”, especially from Escherichia coli or its functional equivalent or its homolog, e.g. the increase of
[9977] (a) a gene product of a gene comprising the nucleic acid molecule as shown in the respective line in column 5 of Table I, application no. 2, preferably the coding region thereof, or a homolog or a fragment thereof, and being depicted in the same respective line as said B0124, or a functional equivalent or a homolog thereof as shown in column 8 of Table I, application no. 2, preferably the coding region thereof, particularly a homolog or functional equivalent as shown in column 8 of Table I B, application no. 2, and being depicted in the same respective line as said B0124, and preferably the activity is increased non-targeted, or
[9978] (b) a polypeptide comprising a polypeptide, a consensus sequence or at least a polypeptide motif as shown in the respective line in column 5 of Table II or in column 8 of Table IV, application no. 2, respectively, and being depicted in the same respective line as said B0124, or a functional equivalent or a homolog thereof as depicted in column 8 of Table II, application no. 2, preferably a homolog or functional equivalent as depicted in column 8 of Table II B, application no. 2, and being depicted in the same respective line as said B0124, and preferably the activity is increased non-targeted.

[9979] Accordingly, in one embodiment, the molecule which activity is to be increased in the process of the invention is the gene product with an activity as a “glucose dehydrogenase”, preferably it is the molecule of section (a) or (b) of this paragraph.

[9980] In particular, it was observed that in plants, especially in Arabidopsis thaliana, increasing or generating the activity of a gene product non-targeted with the activity of a “glucose dehydrogenase”, preferably being encoded by a gene comprising the nucleic acid sequence SEQ ID NO. 35482, preferably the coding region thereof, conferred the production of or the increase in proline compared with the wild type control.

[9981] The nucleic acid sequence of B0161 from Escherichia coli, e.g. as shown in the respective line in column 5 of Table I, application no. 2, has been published in Blattner et al., Science 277 (5331), 1453 (1997)). And the activity of the gene product thereof is the activity of serine protease.

[9982] Accordingly, in one embodiment, the process of the present invention for producing proline in a non-human organism, like a microorganism or a plant or a part thereof, comprises increasing or generating the activity of a gene product with the activity of a gene product conferring the activity of “serine protease”, especially from Escherichia coli or its functional equivalent or its homolog, e.g. the increase of
[9983] (a) a gene product of a gene comprising the nucleic acid molecule as shown in the respective line in column 5 of Table I, application no. 2, preferably the coding region thereof, or a homolog or a fragment thereof, and being depicted in the same respective line as said B0161, or a functional equivalent or a homolog thereof as shown in column 8 of Table I, application no. 2, preferably the coding region thereof, particularly a homolog or functional equivalent as shown in column 8 of Table I B, application no. 2, and being depicted in the same respective line as said B0161, and preferably the activity is increased non-targeted, or
[9984] (b) a polypeptide comprising a polypeptide, a consensus sequence or at least a polypeptide motif as shown in the respective line in column 5 of Table II or in column 8 of Table IV, application no. 2, respectively, and being depicted in the same respective line as said B0161, or a functional equivalent or a homolog thereof as depicted in column 8 of Table II, application no. 2, preferably a homolog or functional equivalent as depicted in column 8 of Table II B, application no. 2, and being depicted in the same respective line as said B0161, and preferably the activity is increased non-targeted.

[9985] Accordingly, in one embodiment, the molecule which activity is to be increased in the process of the invention is the gene product with an activity as a “serine protease”, preferably it is the molecule of section (a) or (b) of this paragraph.

[9986] In particular, it was observed that in plants, especially in Arabidopsis thaliana, increasing or generating the activity of a gene product non-targeted with the activity of a “serine protease”, preferably being encoded by a gene comprising the nucleic acid sequence SEQ ID NO. 7081, preferably the coding region thereof, conferred the production of or the increase in proline compared with the wild type control.

[9987] The nucleic acid sequence of B0221 from Escherichia coli, e.g. as shown in the respective line in column 5 of Table I, application no. 2, has been published in Saccharomyces cerevisiae Goffeau et al., Science 274 (5287), 546 (1996), Escherichia coli Blattner et al., Science 277 (5331), 1453 (1997)). And the activity of the gene product thereof is the activity of acyl-CoA dehydrogenase.

[9988] Accordingly, in one embodiment, the process of the present invention for producing arginine in a non-human organism, like a microorganism or a plant or a part thereof, comprises increasing or generating the activity of a gene product with the activity of a gene product conferring the activity of “acyl-CoA dehydrogenase”, especially from Escherichia coli or its functional equivalent or its homolog, e.g. the increase of
[9989] (a) a gene product of a gene comprising the nucleic acid molecule as shown in the respective line in column 5 of Table I, application no. 2, preferably the coding region thereof, or a homolog or a fragment thereof, and being depicted in the same respective line as said B0221, or a functional equivalent or a homolog thereof as shown in column 8 of Table I, application no. 2, preferably the coding region thereof, particularly a homolog or functional equivalent as shown in column 8 of Table I B, application no. 2, and being depicted in the same respective line as said B0221, and preferably the activity is increased non-targeted, or
[9990] (b) a polypeptide comprising a polypeptide, a consensus sequence or at least a polypeptide motif as shown in the respective line in column 5 of Table II or in column 8 of Table IV, application no. 2, respectively, and being depicted in the same respective line as said B0221, or a functional equivalent or a homolog thereof as depicted in column 8 of Table II, application no. 2, preferably a homolog or functional equivalent as depicted in column 8 of Table II B, application no. 2, and being depicted in the same respective line as said B0221, and preferably the activity is increased non-targeted.

[9991] Accordingly, in one embodiment, the molecule which activity is to be increased in the process of the invention is the gene product with an activity as a “acyl-CoA dehydrogenase”, preferably it is the molecule of section (a) or (b) of this paragraph.

[9992] In particular, it was observed that in plants, especially in Arabidopsis thaliana, increasing or generating the activity of a gene product non-targeted with the activity of a “acyl-CoA dehydrogenase”, preferably being encoded by a gene comprising the nucleic acid sequence SEQ ID NO. 35590, preferably the coding region thereof, conferred the production of or the increase in arginine compared with the wild type control.

[9993] The nucleic acid sequence of B0221 from Escherichia coli, e.g. as shown in the respective line in column 5 of Table I, application no. 2, has been published in Blattner et al., Science 277 (5331), 1453 (1997)). And the activity of the gene product thereof is the activity of acyl-CoA dehydrogenase.

[9994] Accordingly, in one embodiment, the process of the present invention for producing glutamate in a non-human organism, like a microorganism or a plant or a part thereof, comprises increasing or generating the activity of a gene product with the activity of a gene product conferring the activity of “acyl-CoA dehydrogenase”, especially from Escherichia coli or its functional equivalent or its homolog, e.g. the increase of
[9995] (a) a gene product of a gene comprising the nucleic acid molecule as shown in the respective line in column 5 of Table I, application no. 2, preferably the coding region thereof, or a homolog or a fragment thereof, and being depicted in the same respective line as said B0221, or a functional equivalent or a homolog thereof as shown in column 8 of Table I, application no. 2, preferably the coding region thereof, particularly a homolog or functional equivalent as shown in column 8 of Table I B, application no. 2, and being depicted in the same respective line as said B0221, and preferably the activity is increased non-targeted, or
[9996] (b) a polypeptide comprising a polypeptide, a consensus sequence or at least a polypeptide motif as shown in the respective line in column 5 of Table II or in column 8 of Table IV, application no. 2, respectively, and being depicted in the same respective line as said B0221, or a functional equivalent or a homolog thereof as depicted in column 8 of Table II, application no. 2, preferably a homolog or functional equivalent as depicted in column 8 of Table II B, application no. 2, and being depicted in the same respective line as said B0221, and preferably the activity is increased non-targeted.

[9997] Accordingly, in one embodiment, the molecule which activity is to be increased in the process of the invention is the gene product with an activity as a “acyl-CoA dehydrogenase”, preferably it is the molecule of section (a) or (b) of this paragraph.

[9998] In particular, it was observed that in plants, especially in Arabidopsis thaliana, increasing or generating the activity of a gene product non-targeted with the activity of a “acyl-CoA dehydrogenase”, preferably being encoded by a gene comprising the nucleic acid sequence SEQ ID NO. 35590, preferably the coding region thereof, conferred the production of or the increase in glutamate compared with the wild type control.

[9999] The nucleic acid sequence of B0344 from Escherichia coli, e.g. as shown in the respective line in column 5 of Table I, application no. 2, has been published in Blattner et al., Science 277 (5331), 1453 (1997)). And the activity of the gene product thereof is the activity of beta-galactosidase.

[10000] Accordingly, in one embodiment, the process of the present invention for producing proline in a non-human organism, like a microorganism or a plant or a part thereof, comprises increasing or generating the activity of a gene product with the activity of a gene product conferring the activity of “beta-galactosidase”, especially from Escherichia coli or its functional equivalent or its homolog, e.g. the increase of
[10001] (a) a gene product of a gene comprising the nucleic acid molecule as shown in the respective line in column 5 of Table I, application no. 2, preferably the coding region thereof, or a homolog or a fragment thereof, and being depicted in the same respective line as said B0344, or a functional equivalent or a homolog thereof as shown in column 8 of Table I, application no. 2, preferably the coding region thereof, particularly a homolog or functional equivalent as shown in column 8 of Table I B, application no. 2, and being depicted in the same respective line as said B0344, and preferably the activity is increased plastidic, or
[10002] (b) a polypeptide comprising a polypeptide, a consensus sequence or at least a polypeptide motif as shown in the respective line in column 5 of Table II or in column 8 of Table IV, application no. 2, respectively, and being depicted in the same respective line as said B0344, or a functional equivalent or a homolog thereof as depicted in column 8 of Table II, application no. 2, preferably a homolog or functional equivalent as depicted in column 8 of Table II B, application no. 2, and being depicted in the same respective line as said B0344, and preferably the activity is increased plastidic.

[10003] Accordingly, in one embodiment, the molecule which activity is to be increased in the process of the invention is the gene product with an activity as a “beta-galactosidase”, preferably it is the molecule of section (a) or (b) of this paragraph.

[10004] In particular, it was observed that in plants, especially in Arabidopsis thaliana, increasing or generating the activity of a gene product plastidic with the activity of a “beta-galactosidase”, preferably being encoded by a gene comprising the nucleic acid sequence SEQ ID NO. 35733, preferably the coding region thereof, conferred the production of or the increase in proline compared with the wild type control.

[10005] The nucleic acid sequence of B0449 from Escherichia coli, e.g. as shown in the respective line in column 5 of Table I, application no. 2, has been published in Blattner et al., Science 277 (5331), 1453 (1997)). And the activity of the gene product thereof is the activity of ATP-binding component of a transport system.

[10006] Accordingly, in one embodiment, the process of the present invention for producing glutamine in a non-human organism, like a microorganism or a plant or a part thereof, comprises increasing or generating the activity of a gene product with the activity of a gene product conferring the activity of “ATP-binding component of a transport system”, especially from Escherichia coli or its functional equivalent or its homolog, e.g. the increase of
[10007] (a) a gene product of a gene comprising the nucleic acid molecule as shown in the respective line in column 5 of Table I, application no. 2, preferably the coding region thereof, or a homolog or a fragment thereof, and being depicted in the same respective line as said B0449, or a functional equivalent or a homolog thereof as shown in column 8 of Table I, application no. 2, preferably the coding region thereof, particularly a homolog or functional equivalent as shown in column 8 of Table I B, application no. 2, and being depicted in the same respective line as said B0449, and preferably the activity is increased non-targeted, or
[10008] (b) a polypeptide comprising a polypeptide, a consensus sequence or at least a polypeptide motif as shown in the respective line in column 5 of Table II or in column 8 of Table IV, application no. 2, respectively, and being depicted in the same respective line as said B0449, or a functional equivalent or a homolog thereof as depicted in column 8 of Table II, application no. 2, preferably a homolog or functional equivalent as depicted in column 8 of Table II B, application no. 2, and being depicted in the same respective line as said B0449, and preferably the activity is increased non-targeted.

[10009] Accordingly, in one embodiment, the molecule which activity is to be increased in the process of the invention is the gene product with an activity as a “ATP-binding component of a transport system”, preferably it is the molecule of section (a) or (b) of this paragraph.

[10010] In particular, it was observed that in plants, especially in Arabidopsis thaliana, increasing or generating the activity of a gene product non-targeted with the activity of a “ATP-binding component of a transport system”, preferably being encoded by a gene comprising the nucleic acid sequence SEQ ID NO. 7333, preferably the coding region thereof, conferred the production of or the increase in glutamine compared with the wild type control.

[10011] The nucleic acid sequence of B0456 from Escherichia coli, e.g. as shown in the respective line in column 5 of Table I, application no. 2, has been published in Blattner et al., Science 277 (5331), 1453 (1997)). And the activity of the gene product thereof is the activity of b0456-protein.

[10012] Accordingly, in one embodiment, the process of the present invention for producing proline in a non-human organism, like a microorganism or a plant or a part thereof, comprises increasing or generating the activity of a gene product with the activity of a gene product conferring the activity of “b0456-protein”, especially from Escherichia coli or its functional equivalent or its homolog, e.g. the increase of
[10013] (a) a gene product of a gene comprising the nucleic acid molecule as shown in the respective line in column 5 of Table I, application no. 2, preferably the coding region thereof, or a homolog or a fragment thereof, and being depicted in the same respective line as said B0456, or a functional equivalent or a homolog thereof as shown in column 8 of Table I, application no. 2, preferably the coding region thereof, particularly a homolog or functional equivalent as shown in column 8 of Table I B, application no. 2, and being depicted in the same respective line as said B0456, and preferably the activity is increased non-targeted, or
[10014] (b) a polypeptide comprising a polypeptide, a consensus sequence or at least a polypeptide motif as shown in the respective line in column 5 of Table II or in column 8 of Table IV, application no. 2, respectively, and being depicted in the same respective line as said B0456, or a functional equivalent or a homolog thereof as depicted in column 8 of Table II, application no. 2, preferably a homolog or functional equivalent as depicted in column 8 of Table II B, application no. 2, and being depicted in the same respective line as said B0456, and preferably the activity is increased non-targeted.
[10015] Accordingly, in one embodiment, the molecule which activity is to be increased in the process of the invention is the gene product with an activity as a “b0456-protein”, preferably it is the molecule of section (a) or (b) of this paragraph.

[10016] In particular, it was observed that in plants, especially in Arabidopsis thaliana, increasing or generating the activity of a gene product non-targeted with the activity of a “b0456-protein”, preferably being encoded by a gene comprising the nucleic acid sequence SEQ ID NO. 35875, preferably the coding region thereof, conferred the production of or the increase in proline compared with the wild type control.

[10017] The nucleic acid sequence of B0486 from Escherichia coli, e.g. as shown in the respective line in column 5 of Table I, application no. 2, has been published in Blattner et al., Science 277 (5331), 1453 (1997)). And the activity of the gene product thereof is the activity of membrane transport protein.

[10018] Accordingly, in one embodiment, the process of the present invention for producing arginine in a non-human organism, like a microorganism or a plant or a part thereof, comprises increasing or generating the activity of a gene product with the activity of a gene product conferring the activity of “membrane transport protein”, especially from Escherichia coli or its functional equivalent or its homolog, e.g. the increase of
[10019] (a) a gene product of a gene comprising the nucleic acid molecule as shown in the respective line in column 5 of Table I, application no. 2, preferably the coding region thereof, or a homolog or a fragment thereof, and being depicted in the same respective line as said B0486, or a functional equivalent or a homolog thereof as shown in column 8 of Table I, application no. 2, preferably the coding region thereof, particularly a homolog or functional equivalent as shown in column 8 of Table I B, application no. 2, and being depicted in the same respective line as said B0486, and preferably the activity is increased non-targeted, or
[10020] (b) a polypeptide comprising a polypeptide, a consensus sequence or at least a polypeptide motif as shown in the respective line in column 5 of Table II or in column 8 of Table IV, application no. 2, respectively, and being depicted in the same respective line as said B0486, or a functional equivalent or a homolog thereof as depicted in column 8 of Table II, application no. 2, preferably a homolog or functional equivalent as depicted in column 8 of Table II B, application no. 2, and being depicted in the same respective line as said B0486, and preferably the activity is increased non-targeted.

[10021] Accordingly, in one embodiment, the molecule which activity is to be increased in the process of the invention is the gene product with an activity as a “membrane transport protein”, preferably it is the molecule of section (a) or (b) of this paragraph.

[10022] In particular, it was observed that in plants, especially in Arabidopsis thaliana, increasing or generating the activity of a gene product non-targeted with the activity of a “membrane transport protein”, preferably being encoded by a gene comprising the nucleic acid sequence SEQ ID NO. 7686, preferably the coding region thereof, conferred the production of or the increase in arginine compared with the wild type control.

[10023] The nucleic acid sequence of B0486 from Escherichia coli, e.g. as shown in the respective line in column 5 of Table I, application no. 2, has been published in Blattner et al., Science 277 (5331), 1453 (1997)). And the activity of the gene product thereof is the activity of membrane transport protein.

[10024] Accordingly, in one embodiment, the process of the present invention for producing glutamate in a non-human organism, like a microorganism or a plant or a part thereof, comprises increasing or generating the activity of a gene product with the activity of a gene product conferring the activity of “membrane transport protein”, especially from Escherichia coli or its functional equivalent or its homolog, e.g. the increase of
[10025] (a) a gene product of a gene comprising the nucleic acid molecule as shown in the respective line in column 5 of Table I, application no. 2, preferably the coding region thereof, or a homolog or a fragment thereof, and being depicted in the same respective line as said B0486, or a functional equivalent or a homolog thereof as shown in column 8 of Table I, application no. 2, preferably the coding region thereof, particularly a homolog or functional equivalent as shown in column 8 of Table I B, application no. 2, and being depicted in the same respective line as said B0486, and preferably the activity is increased non-targeted, or
[10026] (b) a polypeptide comprising a polypeptide, a consensus sequence or at least a polypeptide motif as shown in the respective line in column 5 of Table II or in column 8 of Table IV, application no. 2, respectively, and being depicted in the same respective line as said B0486, or a functional equivalent or a homolog thereof as depicted in column 8 of Table II, application no. 2, preferably a homolog or functional equivalent as depicted in column 8 of Table II B, application no. 2, and being depicted in the same respective line as said B0486, and preferably the activity is increased non-targeted.

[10027] Accordingly, in one embodiment, the molecule which activity is to be increased in the process of the invention is the gene product with an activity as a “membrane transport protein”, preferably it is the molecule of section (a) or (b) of this paragraph.

[10028] In particular, it was observed that in plants, especially in Arabidopsis thaliana, increasing or generating the activity of a gene product non-targeted with the activity of a “membrane transport protein”, preferably being encoded by a gene comprising the nucleic acid sequence SEQ ID NO. 7686, preferably the coding region thereof, conferred the production of or the increase in glutamate compared with the wild type control.

[10029] The nucleic acid sequence of B0518 from Escherichia coli, e.g. as shown in the respective line in column 5 of Table I, application no. 2, has been published in Blattner et al., Science 277 (5331), 1453 (1997)). And the activity of the gene product thereof is the activity of b0518-protein.

[10030] Accordingly, in one embodiment, the process of the present invention for producing glutamine in a non-human organism, like a microorganism or a plant or a part thereof, comprises increasing or generating the activity of a gene product with the activity of a gene product conferring the activity of “b0518-protein”, especially from Escherichia coli or its functional equivalent or its homolog, e.g. the increase of
[10031] (a) a gene product of a gene comprising the nucleic acid molecule as shown in the respective line in column 5 of Table I, application no. 2, preferably the coding region thereof, or a homolog or a fragment thereof, and being depicted in the same respective line as said B0518, or a functional equivalent or a homolog thereof as shown in column 8 of Table I, application no. 2, preferably the coding region thereof, particularly a homolog or functional equivalent as shown in column 8 of Table I B, application no. 2, and being depicted in the same respective line as said B0518, and preferably the activity is increased non-targeted, or
[10032] (b) a polypeptide comprising a polypeptide, a consensus sequence or at least a polypeptide motif as shown in the respective line in column 5 of Table II or in column 8 of Table IV, application no. 2, respectively, and being depicted in the same respective line as said B0518, or a functional equivalent or a homolog thereof as depicted in column 8 of Table II, application no. 2, preferably a homolog or functional equivalent as depicted in column 8 of Table II B, application no. 2, and being depicted in the same respective line as said B0518, and preferably the activity is increased non-targeted.

[10033] Accordingly, in one embodiment, the molecule which activity is to be increased in the process of the invention is the gene product with an activity as a “b0518-protein”, preferably it is the molecule of section (a) or (b) of this paragraph.

[10034] In particular, it was observed that in plants, especially in Arabidopsis thaliana, increasing or generating the activity of a gene product non-targeted with the activity of a “b0518-protein”, preferably being encoded by a gene comprising the nucleic acid sequence SEQ ID NO. 35936, preferably the coding region thereof, conferred the production of or the increase in glutamine compared with the wild type control.

[10035] The nucleic acid sequence of B0593 from Escherichia coli, e.g. as shown in the respective line in column 5 of Table I, application no. 2, has been published in Blattner et al., Science 277 (5331), 1453 (1997)). And the activity of the gene product thereof is the activity of isochorismate synthase.

[10036] Accordingly, in one embodiment, the process of the present invention for producing arginine in a non-human organism, like a microorganism or a plant or a part thereof, comprises increasing or generating the activity of a gene product with the activity of a gene product conferring the activity of “isochorismate synthase”, especially from Escherichia coli or its functional equivalent or its homolog, e.g. the increase of
[10037] (a) a gene product of a gene comprising the nucleic acid molecule as shown in the respective line in column 5 of Table I, application no. 2, preferably the coding region thereof, or a homolog or a fragment thereof, and being depicted in the same respective line as said B0593, or a functional equivalent or a homolog thereof as shown in column 8 of Table I, application no. 2, preferably the coding region thereof, particularly a homolog or functional equivalent as shown in column 8 of Table I B, application no. 2, and being depicted in the same respective line as said B0593, and preferably the activity is increased plastidic, or
[10038] (b) a polypeptide comprising a polypeptide, a consensus sequence or at least a polypeptide motif as shown in the respective line in column 5 of Table II or in column 8 of Table IV, application no. 2, respectively, and being depicted in the same respective line as said B0593, or a functional equivalent or a homolog thereof as depicted in column 8 of Table II, application no. 2, preferably a homolog or functional equivalent as depicted in column 8 of Table II B, application no. 2, and being depicted in the same respective line as said B0593, and preferably the activity is increased plastidic.

[10039] Accordingly, in one embodiment, the molecule which activity is to be increased in the process of the invention is the gene product with an activity as a “isochorismate synthase”, preferably it is the molecule of section (a) or (b) of this paragraph.

[10040] In particular, it was observed that in plants, especially in Arabidopsis thaliana, increasing or generating the activity of a gene product plastidic with the activity of a “isochorismate synthase”, preferably being encoded by a gene comprising the nucleic acid sequence SEQ ID NO. 35967, preferably the coding region thereof, conferred the production of or the increase in arginine compared with the wild type control.

[10041] The nucleic acid sequence of B0593 from Escherichia coli, e.g. as shown in the respective line in column 5 of Table I, application no. 2, has been published in Blattner et al., Science 277 (5331), 1453 (1997)). And the activity of the gene product thereof is the activity of isochorismate synthase.

[10042] Accordingly, in one embodiment, the process of the present invention for producing glutamate in a non-human organism, like a microorganism or a plant or a part thereof, comprises increasing or generating the activity of a gene product with the activity of a gene product conferring the activity of “isochorismate synthase”, especially from Escherichia coli or its functional equivalent or its homolog, e.g. the increase of
[10043] (a) a gene product of a gene comprising the nucleic acid molecule as shown in the respective line in column 5 of Table I, application no. 2, preferably the coding region thereof, or a homolog or a fragment thereof, and being depicted in the same respective line as said B0593, or a functional equivalent or a homolog thereof as shown in column 8 of Table I, application no. 2, preferably the coding region thereof, particularly a homolog or functional equivalent as shown in column 8 of Table I B, application no. 2, and being depicted in the same respective line as said B0593, and preferably the activity is increased plastidic, or
[10044] (b) a polypeptide comprising a polypeptide, a consensus sequence or at least a polypeptide motif as shown in the respective line in column 5 of Table II or in column 8 of Table IV, application no. 2, respectively, and being depicted in the same respective line as said B0593, or a functional equivalent or a homolog thereof as depicted in column 8 of Table II, application no. 2, preferably a homolog or functional equivalent as depicted in column 8 of Table II B, application no. 2, and being depicted in the same respective line as said B0593, and preferably the activity is increased plastidic.

[10045] Accordingly, in one embodiment, the molecule which activity is to be increased in the process of the invention is the gene product with an activity as a “isochorismate synthase”, preferably it is the molecule of section (a) or (b) of this paragraph.

[10046] In particular, it was observed that in plants, especially in Arabidopsis thaliana, increasing or generating the activity of a gene product plastidic with the activity of a “isochorismate synthase”, preferably being encoded by a gene comprising the nucleic acid sequence SEQ ID NO. 35967, preferably the coding region thereof, conferred the production of or the increase in glutamate compared with the wild type control.

[10047] The nucleic acid sequence of B0593 from Escherichia coli, e.g. as shown in the respective line in column 5 of Table I, application no. 2, has been published in Blattner et al., Science 277 (5331), 1453 (1997)). And the activity of the gene product thereof is the activity of isochorismate synthase.

[10048] Accordingly, in one embodiment, the process of the present invention for producing glutamine in a non-human organism, like a microorganism or a plant or a part thereof, comprises increasing or generating the activity of a gene product with the activity of a gene product conferring the activity of “isochorismate synthase”, especially from Escherichia coli or its functional equivalent or its homolog, e.g. the increase of
[10049] (a) a gene product of a gene comprising the nucleic acid molecule as shown in the respective line in column 5 of Table I, application no. 2, preferably the coding region thereof, or a homolog or a fragment thereof, and being depicted in the same respective line as said B0593, or a functional equivalent or a homolog thereof as shown in column 8 of Table I, application no. 2, preferably the coding region thereof, particularly a homolog or functional equivalent as shown in column 8 of Table I B, application no. 2, and being depicted in the same respective line as said B0593, and preferably the activity is increased plastidic, or
[10050] (b) a polypeptide comprising a polypeptide, a consensus sequence or at least a polypeptide motif as shown in the respective line in column 5 of Table II or in column 8 of Table IV, application no. 2, respectively, and being depicted in the same respective line as said B0593, or a functional equivalent or a homolog thereof as depicted in column 8 of Table II, application no. 2, preferably a homolog or functional equivalent as depicted in column 8 of Table II B, application no. 2, and being depicted in the same respective line as said B0593, and preferably the activity is increased plastidic.

[10051] Accordingly, in one embodiment, the molecule which activity is to be increased in the process of the invention is the gene product with an activity as a “isochorismate synthase”, preferably it is the molecule of section (a) or (b) of this paragraph.

[10052] In particular, it was observed that in plants, especially in Arabidopsis thaliana, increasing or generating the activity of a gene product plastidic with the activity of a “isochorismate synthase”, preferably being encoded by a gene comprising the nucleic acid sequence SEQ ID NO. 35967, preferably the coding region thereof, conferred the production of or the increase in glutamine compared with the wild type control.

[10053] The nucleic acid sequence of B0593 from Escherichia coli, e.g. as shown in the respective line in column 5 of Table I, application no. 2, has been published in Blattner et al., Science 277 (5331), 1453 (1997)). And the activity of the gene product thereof is the activity of isochorismate synthase.

[10054] Accordingly, in one embodiment, the process of the present invention for producing proline in a non-human organism, like a microorganism or a plant or a part thereof, comprises increasing or generating the activity of a gene product with the activity of a gene product conferring the activity of “isochorismate synthase”, especially from Escherichia coli or its functional equivalent or its homolog, e.g. the increase of
[10055] (a) a gene product of a gene comprising the nucleic acid molecule as shown in the respective line in column 5 of Table I, application no. 2, preferably the coding region thereof, or a homolog or a fragment thereof, and being depicted in the same respective line as said B0593, or a functional equivalent or a homolog thereof as shown in column 8 of Table I, application no. 2, preferably the coding region thereof, particularly a homolog or functional equivalent as shown in column 8 of Table I B, application no. 2, and being depicted in the same respective line as said B0593, and preferably the activity is increased plastidic, or
[10056] (b) a polypeptide comprising a polypeptide, a consensus sequence or at least a polypeptide motif as shown in the respective line in column 5 of Table II or in column 8 of Table IV, application no. 2, respectively, and being depicted in the same respective line as said B0593, or a functional equivalent or a homolog thereof as depicted in column 8 of Table II, application no. 2, preferably a homolog or functional equivalent as depicted in column 8 of Table II B, application no. 2, and being depicted in the same respective line as said B0593, and preferably the activity is increased plastidic.

[10057] Accordingly, in one embodiment, the molecule which activity is to be increased in the process of the invention is the gene product with an activity as a “isochorismate synthase”, preferably it is the molecule of section (a) or (b) of this paragraph.

[10058] In particular, it was observed that in plants, especially in Arabidopsis thaliana, increasing or generating the activity of a gene product plastidic with the activity of a “isochorismate synthase”, preferably being encoded by a gene comprising the nucleic acid sequence SEQ ID NO. 35967, preferably the coding region thereof, conferred the production of or the increase in proline compared with the wild type control.

[10059] The nucleic acid sequence of B0752 from Escherichia coli, e.g. as shown in the respective line in column 5 of Table I, application no. 2, has been published in Blattner et al., Science 277 (5331), 1453 (1997)). And the activity of the gene product thereof is the activity of zinc transporter.

[10060] Accordingly, in one embodiment, the process of the present invention for producing glutamine in a non-human organism, like a microorganism or a plant or a part thereof, comprises increasing or generating the activity of a gene product with the activity of a gene product conferring the activity of “zinc transporter”, especially from Escherichia coli or its functional equivalent or its homolog, e.g. the increase of
[10061] (a) a gene product of a gene comprising the nucleic acid molecule as shown in the respective line in column 5 of Table I, application no. 2, preferably the coding region thereof, or a homolog or a fragment thereof, and being depicted in the same respective line as said B0752, or a functional equivalent or a homolog thereof as shown in column 8 of Table I, application no. 2, preferably the coding region thereof, particularly a homolog or functional equivalent as shown in column 8 of Table I B, application no. 2, and being depicted in the same respective line as said B0752, and preferably the activity is increased non-targeted, or
[10062] (b) a polypeptide comprising a polypeptide, a consensus sequence or at least a polypeptide motif as shown in the respective line in column 5 of Table II or in column 8 of Table IV, application no. 2, respectively, and being depicted in the same respective line as said B0752, or a functional equivalent or a homolog thereof as depicted in column 8 of Table II, application no. 2, preferably a homolog or functional equivalent as depicted in column 8 of Table II B, application no. 2, and being depicted in the same respective line as said B0752, and preferably the activity is increased non-targeted.

[10063] Accordingly, in one embodiment, the molecule which activity is to be increased in the process of the invention is the gene product with an activity as a “zinc transporter”, preferably it is the molecule of section (a) or (b) of this paragraph.

[10064] In particular, it was observed that in plants, especially in Arabidopsis thaliana, increasing or generating the activity of a gene product non-targeted with the activity of a “zinc transporter”, preferably being encoded by a gene comprising the nucleic acid sequence SEQ ID NO. 36114, preferably the coding region thereof, conferred the production of or the increase in glutamine compared with the wild type control.

[10065] The nucleic acid sequence of B0828 from Escherichia coli, e.g. as shown in the respective line in column 5 of Table I, application no. 2, has been published in Blattner et al., Science 277 (5331), 1453 (1997)). And the activity of the gene product thereof is the activity of asparaginase.

[10066] Accordingly, in one embodiment, the process of the present invention for producing glutamine in a non-human organism, like a microorganism or a plant or a part thereof, comprises increasing or generating the activity of a gene product with the activity of a gene product conferring the activity of “asparaginase”, especially from Escherichia coli or its functional equivalent or its homolog, e.g. the increase of
[10067] (a) a gene product of a gene comprising the nucleic acid molecule as shown in the respective line in column 5 of Table I, application no. 2, preferably the coding region thereof, or a homolog or a fragment thereof, and being depicted in the same respective line as said B0828, or a functional equivalent or a homolog thereof as shown in column 8 of Table I, application no. 2, preferably the coding region thereof, particularly a homolog or functional equivalent as shown in column 8 of Table I B, application no. 2, and being depicted in the same respective line as said B0828, and preferably the activity is increased non-targeted, or
[10068] (b) a polypeptide comprising a polypeptide, a consensus sequence or at least a polypeptide motif as shown in the respective line in column 5 of Table II or in column 8 of Table IV, application no. 2, respectively, and being depicted in the same respective line as said B0828, or a functional equivalent or a homolog thereof as depicted in column 8 of Table II, application no. 2, preferably a homolog or functional equivalent as depicted in column 8 of Table II B, application no. 2, and being depicted in the same respective line as said B0828, and preferably the activity is increased non-targeted.

[10069] Accordingly, in one embodiment, the molecule which activity is to be increased in the process of the invention is the gene product with an activity as a “asparaginase”, preferably it is the molecule of section (a) or (b) of this paragraph.

[10070] In particular, it was observed that in plants, especially in Arabidopsis thaliana, increasing or generating the activity of a gene product non-targeted with the activity of a “asparaginase”, preferably being encoded by a gene comprising the nucleic acid sequence SEQ ID NO. 36299, preferably the coding region thereof, conferred the production of or the increase in glutamine compared with the wild type control.

[10071] The nucleic acid sequence of B0885 from Escherichia coli, e.g. as shown in the respective line in column 5 of Table I, application no. 2, has been published in Blattner et al., Science 277 (5331), 1453 (1997)). And the activity of the gene product thereof is the activity of Leucyl/phenylalanyl-tRNA-protein transferase.

[10072] Accordingly, in one embodiment, the process of the present invention for producing glutamine in a non-human organism, like a microorganism or a plant or a part thereof, comprises increasing or generating the activity of a gene product with the activity of a gene product conferring the activity of “Leucyl/phenylalanyl-tRNA-protein transferase”, especially from Escherichia coli or its functional equivalent or its homolog, e.g. the increase of
[10073] (a) a gene product of a gene comprising the nucleic acid molecule as shown in the respective line in column 5 of Table I, application no. 2, preferably the coding region thereof, or a homolog or a fragment thereof, and being depicted in the same respective line as said B0885, or a functional equivalent or a homolog thereof as shown in column 8 of Table I, application no. 2, preferably the coding region thereof, particularly a homolog or functional equivalent as shown in column 8 of Table I B, application no. 2, and being depicted in the same respective line as said B0885, and preferably the activity is increased non-targeted, or
[10074] (b) a polypeptide comprising a polypeptide, a consensus sequence or at least a polypeptide motif as shown in the respective line in column 5 of Table II or in column 8 of Table IV, application no. 2, respectively, and being depicted in the same respective line as said B0885, or a functional equivalent or a homolog thereof as depicted in column 8 of Table II, application no. 2, preferably a homolog or functional equivalent as depicted in column 8 of Table II B, application no. 2, and being depicted in the same respective line as said B0885, and preferably the activity is increased non-targeted.

[10075] Accordingly, in one embodiment, the molecule which activity is to be increased in the process of the invention is the gene product with an activity as a “Leucyl/phenylalanyl-tRNA-protein transferase”, preferably it is the molecule of section (a) or (b) of this paragraph.

[10076] In particular, it was observed that in plants, especially in Arabidopsis thaliana, increasing or generating the activity of a gene product non-targeted with the activity of a “Leucyl/phenylalanyl-tRNA-protein transferase”, preferably being encoded by a gene comprising the nucleic acid sequence SEQ ID NO. 36489, preferably the coding region thereof, conferred the production of or the increase in glutamine compared with the wild type control.

[10077] The nucleic acid sequence of B0885 from Escherichia coli, e.g. as shown in the respective line in column 5 of Table I, application no. 2, has been published in Blattner et al., Science 277 (5331), 1453 (1997)). And the activity of the gene product thereof is the activity of Leucyl/phenylalanyl-tRNA-protein transferase.

[10078] Accordingly, in one embodiment, the process of the present invention for producing proline in a non-human organism, like a microorganism or a plant or a part thereof, comprises increasing or generating the activity of a gene product with the activity of a gene product conferring the activity of “Leucyl/phenylalanyl-tRNA-protein transferase”, especially from Escherichia coli or its functional equivalent or its homolog, e.g. the increase of
[10079] (a) a gene product of a gene comprising the nucleic acid molecule as shown in the respective line in column 5 of Table I, application no. 2, preferably the coding region thereof, or a homolog or a fragment thereof, and being depicted in the same respective line as said B0885, or a functional equivalent or a homolog thereof as shown in column 8 of Table I, application no. 2, preferably the coding region thereof, particularly a homolog or functional equivalent as shown in column 8 of Table I B, application no. 2, and being depicted in the same respective line as said B0885, and preferably the activity is increased non-targeted, or
[10080] (b) a polypeptide comprising a polypeptide, a consensus sequence or at least a polypeptide motif as shown in the respective line in column 5 of Table II or in column 8 of Table IV, application no. 2, respectively, and being depicted in the same respective line as said B0885, or a functional equivalent or a homolog thereof as depicted in column 8 of Table II, application no. 2, preferably a homolog or functional equivalent as depicted in column 8 of Table II B, application no. 2, and being depicted in the same respective line as said B0885, and preferably the activity is increased non-targeted.

[10081] Accordingly, in one embodiment, the molecule which activity is to be increased in the process of the invention is the gene product with an activity as a “Leucyl/phenylalanyl-tRNA-protein transferase”, preferably it is the molecule of section (a) or (b) of this paragraph.

[10082] In particular, it was observed that in plants, especially in Arabidopsis thaliana, increasing or generating the activity of a gene product non-targeted with the activity of a “Leucyl/phenylalanyl-tRNA-protein transferase”, preferably being encoded by a gene comprising the nucleic acid sequence SEQ ID NO. 36489, preferably the coding region thereof, conferred the production of or the increase in proline compared with the wild type control.

[10083] The nucleic acid sequence of B0898 from Escherichia coli, e.g. as shown in the respective line in column 5 of Table I, application no. 2, has been published in Blattner et al., Science 277 (5331), 1453 (1997)). And the activity of the gene product thereof is the activity of major facilitator superfamily transporter protein.

[10084] Accordingly, in one embodiment, the process of the present invention for producing glutamate in a non-human organism, like a microorganism or a plant or a part thereof, comprises increasing or generating the activity of a gene product with the activity of a gene product conferring the activity of “major facilitator superfamily transporter protein”, especially from Escherichia coli or its functional equivalent or its homolog, e.g. the increase of
[10085] (a) a gene product of a gene comprising the nucleic acid molecule as shown in the respective line in column 5 of Table I, application no. 2, preferably the coding region thereof, or a homolog or a fragment thereof, and being depicted in the same respective line as said B0898, or a functional equivalent or a homolog thereof as shown in column 8 of Table I, application no. 2, preferably the coding region thereof, particularly a homolog or functional equivalent as shown in column 8 of Table I B, application no. 2, and being depicted in the same respective line as said B0898, and preferably the activity is increased non-targeted, or
[10086] (b) a polypeptide comprising a polypeptide, a consensus sequence or at least a polypeptide motif as shown in the respective line in column 5 of Table II or in column 8 of Table IV, application no. 2, respectively, and being depicted in the same respective line as said B0898, or a functional equivalent or a homolog thereof as depicted in column 8 of Table II, application no. 2, preferably a homolog or functional equivalent as depicted in column 8 of Table II B, application no. 2, and being depicted in the same respective line as said B0898, and preferably the activity is increased non-targeted.

[10087] Accordingly, in one embodiment, the molecule which activity is to be increased in the process of the invention is the gene product with an activity as a “major facilitator superfamily transporter protein”, preferably it is the molecule of section (a) or (b) of this paragraph.

[10088] In particular, it was observed that in plants, especially in Arabidopsis thaliana, increasing or generating the activity of a gene product non-targeted with the activity of a “major facilitator superfamily transporter protein”, preferably being encoded by a gene comprising the nucleic acid sequence SEQ ID NO. 7917, preferably the coding region thereof, conferred the production of or the increase in glutamate compared with the wild type control.

[10089] The nucleic acid sequence of B0898 from Escherichia coli, e.g. as shown in the respective line in column 5 of Table I, application no. 2, has been published in Blattner et al., Science 277 (5331), 1453 (1997)). And the activity of the gene product thereof is the activity of major facilitator superfamily transporter protein.

[10090] Accordingly, in one embodiment, the process of the present invention for producing proline in a non-human organism, like a microorganism or a plant or a part thereof, comprises increasing or generating the activity of a gene product with the activity of a gene product conferring the activity of “major facilitator superfamily transporter protein”, especially from Escherichia coli or its functional equivalent or its homolog, e.g. the increase of
[10091] (a) a gene product of a gene comprising the nucleic acid molecule as shown in the respective line in column 5 of Table I, application no. 2, preferably the coding region thereof, or a homolog or a fragment thereof, and being depicted in the same respective line as said B0898, or a functional equivalent or a homolog thereof as shown in column 8 of Table I, application no. 2, preferably the coding region thereof, particularly a homolog or functional equivalent as shown in column 8 of Table I B, application no. 2, and being depicted in the same respective line as said B0898, and preferably the activity is increased non-targeted, or
[10092] (b) a polypeptide comprising a polypeptide, a consensus sequence or at least a polypeptide motif as shown in the respective line in column 5 of Table II or in column 8 of Table IV, application no. 2, respectively, and being depicted in the same respective line as said B0898, or a functional equivalent or a homolog thereof as depicted in column 8 of Table II, application no. 2, preferably a homolog or functional equivalent as depicted in column 8 of Table II B, application no. 2, and being depicted in the same respective line as said B0898, and preferably the activity is increased non-targeted.

[10093] Accordingly, in one embodiment, the molecule which activity is to be increased in the process of the invention is the gene product with an activity as a “major facilitator superfamily transporter protein”, preferably it is the molecule of section (a) or (b) of this paragraph.

[10094] In particular, it was observed that in plants, especially in Arabidopsis thaliana, increasing or generating the activity of a gene product non-targeted with the activity of a “major facilitator superfamily transporter protein”, preferably being encoded by a gene comprising the nucleic acid sequence SEQ ID NO. 7917, preferably the coding region thereof, conferred the production of or the increase in proline compared with the wild type control.

[10095] The nucleic acid sequence of B0962 from Escherichia coli, e.g. as shown in the respective line in column 5 of Table I, application no. 2, has been published in Blattner et al., Science 277 (5331), 1453 (1997)). And the activity of the gene product thereof is the activity of DNA helicase IV.

[10096] Accordingly, in one embodiment, the process of the present invention for producing proline in a non-human organism, like a microorganism or a plant or a part thereof, comprises increasing or generating the activity of a gene product with the activity of a gene product conferring the activity of “DNA helicase IV”, especially from Escherichia coli or its functional equivalent or its homolog, e.g. the increase of
[10097] (a) a gene product of a gene comprising the nucleic acid molecule as shown in the respective line in column 5 of Table I, application no. 2, preferably the coding region thereof, or a homolog or a fragment thereof, and being depicted in the same respective line as said B0962, or a functional equivalent or a homolog thereof as shown in column 8 of Table I, application no. 2, preferably the coding region thereof, particularly a homolog or functional equivalent as shown in column 8 of Table I B, application no. 2, and being depicted in the same respective line as said B0962, and preferably the activity is increased non-targeted, or
[10098] (b) a polypeptide comprising a polypeptide, a consensus sequence or at least a polypeptide motif as shown in the respective line in column 5 of Table II or in column 8 of Table IV, application no. 2, respectively, and being depicted in the same respective line as said B0962, or a functional equivalent or a homolog thereof as depicted in column 8 of Table II, application no. 2, preferably a homolog or functional equivalent as depicted in column 8 of Table II B, application no. 2, and being depicted in the same respective line as said B0962, and preferably the activity is increased non-targeted.

[10099] Accordingly, in one embodiment, the molecule which activity is to be increased in the process of the invention is the gene product with an activity as a “DNA helicase IV”, preferably it is the molecule of section (a) or (b) of this paragraph.

[10100] In particular, it was observed that in plants, especially in Arabidopsis thaliana, increasing or generating the activity of a gene product non-targeted with the activity of a “DNA helicase IV”, preferably being encoded by a gene comprising the nucleic acid sequence SEQ ID NO. 36623, preferably the coding region thereof, conferred the production of or the increase in proline compared with the wild type control.

[10101] The nucleic acid sequence of B0963 from Escherichia coli, e.g. as shown in the respective line in column 5 of Table I, application no. 2, has been published in Blattner et al., Science 277 (5331), 1453 (1997)). And the activity of the gene product thereof is the activity of methylglyoxal synthase.

[10102] Accordingly, in one embodiment, the process of the present invention for producing proline in a non-human organism, like a microorganism or a plant or a part thereof, comprises increasing or generating the activity of a gene product with the activity of a gene product conferring the activity of “methylglyoxal synthase”, especially from Escherichia coli or its functional equivalent or its homolog, e.g. the increase of
[10103] (a) a gene product of a gene comprising the nucleic acid molecule as shown in the respective line in column 5 of Table I, application no. 2, preferably the coding region thereof, or a homolog or a fragment thereof, and being depicted in the same respective line as said B0963, or a functional equivalent or a homolog thereof as shown in column 8 of Table I, application no. 2, preferably the coding region thereof, particularly a homolog or functional equivalent as shown in column 8 of Table I B, application no. 2, and being depicted in the same respective line as said B0963, and preferably the activity is increased non-targeted, or
[10104] (b) a polypeptide comprising a polypeptide, a consensus sequence or at least a polypeptide motif as shown in the respective line in column 5 of Table II or in column 8 of Table IV, application no. 2, respectively, and being depicted in the same respective line as said B0963, or a functional equivalent or a homolog thereof as depicted in column 8 of Table II, application no. 2, preferably a homolog or functional equivalent as depicted in column 8 of Table II B, application no. 2, and being depicted in the same respective line as said B0963, and preferably the activity is increased non-targeted.

[10105] Accordingly, in one embodiment, the molecule which activity is to be increased in the process of the invention is the gene product with an activity as a “methylglyoxal synthase”, preferably it is the molecule of section (a) or (b) of this paragraph.

[10106] In particular, it was observed that in plants, especially in Arabidopsis thaliana, increasing or generating the activity of a gene product non-targeted with the activity of a “methylglyoxal synthase”, preferably being encoded by a gene comprising the nucleic acid sequence SEQ ID NO. 36670, preferably the coding region thereof, conferred the production of or the increase in proline compared with the wild type control.

[10107] The nucleic acid sequence of B0980 from Escherichia coli, e.g. as shown in the respective line in column 5 of Table I, application no. 2, has been published in Blattner et al., Science 277 (5331), 1453 (1997)). And the activity of the gene product thereof is the activity of phosphoanhydride phosphorylase.

[10108] Accordingly, in one embodiment, the process of the present invention for producing proline in a non-human organism, like a microorganism or a plant or a part thereof, comprises increasing or generating the activity of a gene product with the activity of a gene product conferring the activity of “phosphoanhydride phosphorylase”, especially from Escherichia coli or its functional equivalent or its homolog, e.g. the increase of
[10109] (a) a gene product of a gene comprising the nucleic acid molecule as shown in the respective line in column 5 of Table I, application no. 2, preferably the coding region thereof, or a homolog or a fragment thereof, and being depicted in the same respective line as said B0980, or a functional equivalent or a homolog thereof as shown in column 8 of Table I, application no. 2, preferably the coding region thereof, particularly a homolog or functional equivalent as shown in column 8 of Table I B, application no. 2, and being depicted in the same respective line as said B0980, and preferably the activity is increased non-targeted, or
[10110] (b) a polypeptide comprising a polypeptide, a consensus sequence or at least a polypeptide motif as shown in the respective line in column 5 of Table II or in column 8 of Table IV, application no. 2, respectively, and being depicted in the same respective line as said B0980, or a functional equivalent or a homolog thereof as depicted in column 8 of Table II, application no. 2, preferably a homolog or functional equivalent as depicted in column 8 of Table II B, application no. 2, and being depicted in the same respective line as said B0980, and preferably the activity is increased non-targeted.

[10111] Accordingly, in one embodiment, the molecule which activity is to be increased in the process of the invention is the gene product with an activity as a “phosphoanhydride phosphorylase”, preferably it is the molecule of section (a) or (b) of this paragraph.

[10112] In particular, it was observed that in plants, especially in Arabidopsis thaliana, increasing or generating the activity of a gene product non-targeted with the activity of a “phosphoanhydride phosphorylase”, preferably being encoded by a gene comprising the nucleic acid sequence SEQ ID NO. 36809, preferably the coding region thereof, conferred the production of or the increase in proline compared with the wild type control.

[10113] The nucleic acid sequence of B1003 from Escherichia coli, e.g. as shown in the respective line in column 5 of Table I, application no. 2, has been published in Blattner et al., Science 277 (5331), 1453 (1997)). And the activity of the gene product thereof is the activity of b1003-protein.

[10114] Accordingly, in one embodiment, the process of the present invention for producing glutamine in a non-human organism, like a microorganism or a plant or a part thereof, comprises increasing or generating the activity of a gene product with the activity of a gene product conferring the activity of “b1003-protein”, especially from Escherichia coli or its functional equivalent or its homolog, e.g. the increase of
[10115] (a) a gene product of a gene comprising the nucleic acid molecule as shown in the respective line in column 5 of Table I, application no. 2, preferably the coding region thereof, or a homolog or a fragment thereof, and being depicted in the same respective line as said B1003, or a functional equivalent or a homolog thereof as shown in column 8 of Table I, application no. 2, preferably the coding region thereof, particularly a homolog or functional equivalent as shown in column 8 of Table I B, application no. 2, and being depicted in the same respective line as said B1003, and preferably the activity is increased non-targeted, or
[10116] (b) a polypeptide comprising a polypeptide, a consensus sequence or at least a polypeptide motif as shown in the respective line in column 5 of Table II or in column 8 of Table IV, application no. 2, respectively, and being depicted in the same respective line as said B1003, or a functional equivalent or a homolog thereof as depicted in column 8 of Table II, application no. 2, preferably a homolog or functional equivalent as depicted in column 8 of Table II B, application no. 2, and being depicted in the same respective line as said B1003, and preferably the activity is increased non-targeted.

[10117] Accordingly, in one embodiment, the molecule which activity is to be increased in the process of the invention is the gene product with an activity as a “b1003-protein”, preferably it is the molecule of section (a) or (b) of this paragraph.

[10118] In particular, it was observed that in plants, especially in Arabidopsis thaliana, increasing or generating the activity of a gene product non-targeted with the activity of a “b1003-protein”, preferably being encoded by a gene comprising the nucleic acid sequence SEQ ID NO. 7941, preferably the coding region thereof, conferred the production of or the increase in glutamine compared with the wild type control.

[10119] The nucleic acid sequence of B1003 from Escherichia coli, e.g. as shown in the respective line in column 5 of Table I, application no. 2, has been published in Blattner et al., Science 277 (5331), 1453 (1997)). And the activity of the gene product thereof is the activity of b1003-protein.

[10120] Accordingly, in one embodiment, the process of the present invention for producing proline in a non-human organism, like a microorganism or a plant or a part thereof, comprises increasing or generating the activity of a gene product with the activity of a gene product conferring the activity of “b1003-protein”, especially from Escherichia coli or its functional equivalent or its homolog, e.g. the increase of
[10121] (a) a gene product of a gene comprising the nucleic acid molecule as shown in the respective line in column 5 of Table I, application no. 2, preferably the coding region thereof, or a homolog or a fragment thereof, and being depicted in the same respective line as said B1003, or a functional equivalent or a homolog thereof as shown in column 8 of Table I, application no. 2, preferably the coding region thereof, particularly a homolog or functional equivalent as shown in column 8 of Table I B, application no. 2, and being depicted in the same respective line as said B1003, and preferably the activity is increased non-targeted, or
[10122] (b) a polypeptide comprising a polypeptide, a consensus sequence or at least a polypeptide motif as shown in the respective line in column 5 of Table II or in column 8 of Table IV, application no. 2, respectively, and being depicted in the same respective line as said B1003, or a functional equivalent or a homolog thereof as depicted in column 8 of Table II, application no. 2, preferably a homolog or functional equivalent as depicted in column 8 of Table II B, application no. 2, and being depicted in the same respective line as said B1003, and preferably the activity is increased non-targeted.

[10123] Accordingly, in one embodiment, the molecule which activity is to be increased in the process of the invention is the gene product with an activity as a “b1003-protein”, preferably it is the molecule of section (a) or (b) of this paragraph.

[10124] In particular, it was observed that in plants, especially in Arabidopsis thaliana, increasing or generating the activity of a gene product non-targeted with the activity of a “b1003-protein”, preferably being encoded by a gene comprising the nucleic acid sequence SEQ ID NO. 7941, preferably the coding region thereof, conferred the production of or the increase in proline compared with the wild type control.

[10125] The nucleic acid sequence of B1023 from Escherichia coli, e.g. as shown in the respective line in column 5 of Table I, application no. 2, has been published in Blattner et al., Science 277 (5331), 1453 (1997)). And the activity of the gene product thereof is the activity of lipoprotein precursor.

[10126] Accordingly, in one embodiment, the process of the present invention for producing arginine in a non-human organism, like a microorganism or a plant or a part thereof, comprises increasing or generating the activity of a gene product with the activity of a gene product conferring the activity of “lipoprotein precursor”, especially from Escherichia coli or its functional equivalent or its homolog, e.g. the increase of
[10127] (a) a gene product of a gene comprising the nucleic acid molecule as shown in the respective line in column 5 of Table I, application no. 2, preferably the coding region thereof, or a homolog or a fragment thereof, and being depicted in the same respective line as said B1023, or a functional equivalent or a homolog thereof as shown in column 8 of Table I, application no. 2, preferably the coding region thereof, particularly a homolog or functional equivalent as shown in column 8 of Table I B, application no. 2, and being depicted in the same respective line as said B1023, and preferably the activity is increased non-targeted, or
[10128] (b) a polypeptide comprising a polypeptide, a consensus sequence or at least a polypeptide motif as shown in the respective line in column 5 of Table II or in column 8 of Table IV, application no. 2, respectively, and being depicted in the same respective line as said B1023, or a functional equivalent or a homolog thereof as depicted in column 8 of Table II, application no. 2, preferably a homolog or functional equivalent as depicted in column 8 of Table II B, application no. 2, and being depicted in the same respective line as said B1023, and preferably the activity is increased non-targeted,.

[10129] Accordingly, in one embodiment, the molecule which activity is to be increased in the process of the invention is the gene product with an activity as a “lipoprotein precursor”, preferably it is the molecule of section (a) or (b) of this paragraph.

[10130] In particular, it was observed that in plants, especially in Arabidopsis thaliana, increasing or generating the activity of a gene product non-targeted with the activity of a “lipoprotein precursor”, preferably being encoded by a gene comprising the nucleic acid sequence SEQ ID NO. 36880, preferably the coding region thereof, conferred the production of or the increase in arginine compared with the wild type control.

[10131] The nucleic acid sequence of B1024 from Escherichia coli, e.g. as shown in the respective line in column 5 of Table I, application no. 2, has been published in Blattner et al., Science 277 (5331), 1453 (1997)). And the activity of the gene product thereof is the activity of b1024-protein.

[10132] Accordingly, in one embodiment, the process of the present invention for producing glutamate in a non-human organism, like a microorganism or a plant or a part thereof, comprises increasing or generating the activity of a gene product with the activity of a gene product conferring the activity of “b1024-protein”, especially from Escherichia coli or its functional equivalent or its homolog, e.g. the increase of
[10133] (a) a gene product of a gene comprising the nucleic acid molecule as shown in the respective line in column 5 of Table I, application no. 2, preferably the coding region thereof, or a homolog or a fragment thereof, and being depicted in the same respective line as said B1024, or a functional equivalent or a homolog thereof as shown in column 8 of Table I, application no. 2, preferably the coding region thereof, particularly a homolog or functional equivalent as shown in column 8 of Table I B, application no. 2, and being depicted in the same respective line as said B1024, and preferably the activity is increased non-targeted, or
[10134] (b) a polypeptide comprising a polypeptide, a consensus sequence or at least a polypeptide motif as shown in the respective line in column 5 of Table II or in column 8 of Table IV, application no. 2, respectively, and being depicted in the same respective line as said B1024, or a functional equivalent or a homolog thereof as depicted in column 8 of Table II, application no. 2, preferably a homolog or functional equivalent as depicted in column 8 of Table II B, application no. 2, and being depicted in the same respective line as said B1024, and preferably the activity is increased non-targeted.

[10135] Accordingly, in one embodiment, the molecule which activity is to be increased in the process of the invention is the gene product with an activity as a “b1024-protein”, preferably it is the molecule of section (a) or (b) of this paragraph.

[10136] In particular, it was observed that in plants, especially in Arabidopsis thaliana, increasing or generating the activity of a gene product non-targeted with the activity of a “b1024-protein”, preferably being encoded by a gene comprising the nucleic acid sequence SEQ ID NO. 36907, preferably the coding region thereof, conferred the production of or the increase in glutamate compared with the wild type control.

[10137] The nucleic acid sequence of B1108 from Escherichia coli, e.g. as shown in the respective line in column 5 of Table I, application no. 2, has been published in Blattner et al., Science 277 (5331), 1453 (1997)). And the activity of the gene product thereof is the activity of b1108-protein.

[10138] Accordingly, in one embodiment, the process of the present invention for producing glutamine in a non-human organism, like a microorganism or a plant or a part thereof, comprises increasing or generating the activity of a gene product with the activity of a gene product conferring the activity of “b1108-protein”, especially from Escherichia coli or its functional equivalent or its homolog, e.g. the increase of
[10139] (a) a gene product of a gene comprising the nucleic acid molecule as shown in the respective line in column 5 of Table I, application no. 2, preferably the coding region thereof, or a homolog or a fragment thereof, and being depicted in the same respective line as said B1108, or a functional equivalent or a homolog thereof as shown in column 8 of Table I, application no. 2, preferably the coding region thereof, particularly a homolog or functional equivalent as shown in column 8 of Table I B, application no. 2, and being depicted in the same respective line as said B1108, and preferably the activity is increased non-targeted, or
[10140] (b) a polypeptide comprising a polypeptide, a consensus sequence or at least a polypeptide motif as shown in the respective line in column 5 of Table II or in column 8 of Table IV, application no. 2, respectively, and being depicted in the same respective line as said B1108, or a functional equivalent or a homolog thereof as depicted in column 8 of Table II, application no. 2, preferably a homolog or functional equivalent as depicted in column 8 of Table II B, application no. 2, and being depicted in the same respective line as said B1108, and preferably the activity is increased non-targeted.

[10141] Accordingly, in one embodiment, the molecule which activity is to be increased in the process of the invention is the gene product with an activity as a “b1108-protein”, preferably it is the molecule of section (a) or (b) of this paragraph.

[10142] In particular, it was observed that in plants, especially in Arabidopsis thaliana, increasing or generating the activity of a gene product non-targeted with the activity of a “b1108-protein”, preferably being encoded by a gene comprising the nucleic acid sequence SEQ ID NO. 36937, preferably the coding region thereof, conferred the production of or the increase in glutamine compared with the wild type control.

[10143] The nucleic acid sequence of B1108 from Escherichia coli, e.g. as shown in the respective line in column 5 of Table I, application no. 2, has been published in Blattner et al., Science 277 (5331), 1453 (1997)). And the activity of the gene product thereof is the activity of b1108-protein.

[10144] Accordingly, in one embodiment, the process of the present invention for producing proline in a non-human organism, like a microorganism or a plant or a part thereof, comprises increasing or generating the activity of a gene product with the activity of a gene product conferring the activity of “b1108-protein”, especially from Escherichia coli or its functional equivalent or its homolog, e.g. the increase of
[10145] (a) a gene product of a gene comprising the nucleic acid molecule as shown in the respective line in column 5 of Table I, application no. 2, preferably the coding region thereof, or a homolog or a fragment thereof, and being depicted in the same respective line as said B1108, or a functional equivalent or a homolog thereof as shown in column 8 of Table I, application no. 2, preferably the coding region thereof, particularly a homolog or functional equivalent as shown in column 8 of Table I B, application no. 2, and being depicted in the same respective line as said B1108, and preferably the activity is increased non-targeted, or
[10146] (b) a polypeptide comprising a polypeptide, a consensus sequence or at least a polypeptide motif as shown in the respective line in column 5 of Table II or in column 8 of Table IV, application no. 2, respectively, and being depicted in the same respective line as said B1108, or a functional equivalent or a homolog thereof as depicted in column 8 of Table II, application no. 2, preferably a homolog or functional equivalent as depicted in column 8 of Table II B, application no. 2, and being depicted in the same respective line as said B1108, and preferably the activity is increased non-targeted.

[10147] Accordingly, in one embodiment, the molecule which activity is to be increased in the process of the invention is the gene product with an activity as a “b1108-protein”, preferably it is the molecule of section (a) or (b) of this paragraph.

[10148] In particular, it was observed that in plants, especially in Arabidopsis thaliana, increasing or generating the activity of a gene product non-targeted with the activity of a “b1108-protein”, preferably being encoded by a gene comprising the nucleic acid sequence SEQ ID NO. 36937, preferably the coding region thereof, conferred the production of or the increase in proline compared with the wild type control.

[10149] The nucleic acid sequence of B1136 from Escherichia coli, e.g. as shown in the respective line in column 5 of Table I, application no. 2, has been published in Blattner et al., Science 277 (5331), 1453 (1997)). And the activity of the gene product thereof is the activity of isocitrate dehydrogenase.

[10150] Accordingly, in one embodiment, the process of the present invention for producing proline in a non-human organism, like a microorganism or a plant or a part thereof, comprises increasing or generating the activity of a gene product with the activity of a gene product conferring the activity of “isocitrate dehydrogenase”, especially from Escherichia coli or its functional equivalent or its homolog, e.g. the increase of
[10151] (a) a gene product of a gene comprising the nucleic acid molecule as shown in the respective line in column 5 of Table I, application no. 2, preferably the coding region thereof, or a homolog or a fragment thereof, and being depicted in the same respective line as said B1136, or a functional equivalent or a homolog thereof as shown in column 8 of Table I, application no. 2, preferably the coding region thereof, particularly a homolog or functional equivalent as shown in column 8 of Table I B, application no. 2, and being depicted in the same respective line as said B1136, and preferably the activity is increased plastidic, or
[10152] (b) a polypeptide comprising a polypeptide, a consensus sequence or at least a polypeptide motif as shown in the respective line in column 5 of Table II or in column 8 of Table IV, application no. 2, respectively, and being depicted in the same respective line as said B1136, or a functional equivalent or a homolog thereof as depicted in column 8 of Table II, application no. 2, preferably a homolog or functional equivalent as depicted in column 8 of Table II B, application no. 2, and being depicted in the same respective line as said B1136, and preferably the activity is increased plastidic.

[10153] Accordingly, in one embodiment, the molecule which activity is to be increased in the process of the invention is the gene product with an activity as a “isocitrate dehydrogenase”, preferably it is the molecule of section (a) or (b) of this paragraph.

[10154] In particular, it was observed that in plants, especially in Arabidopsis thaliana, increasing or generating the activity of a gene product plastidic with the activity of a “isocitrate dehydrogenase”, preferably being encoded by a gene comprising the nucleic acid sequence SEQ ID NO. 36971, preferably the coding region thereof, conferred the production of or the increase in proline compared with the wild type control.

[10155] The nucleic acid sequence of B1137 from Escherichia coli, e.g. as shown in the respective line in column 5 of Table I, application no. 2, has been published in Blattner et al., Science 277 (5331), 1453 (1997)). And the activity of the gene product thereof is the activity of b1137-protein.

[10156] Accordingly, in one embodiment, the process of the present invention for producing arginine in a non-human organism, like a microorganism or a plant or a part thereof, comprises increasing or generating the activity of a gene product with the activity of a gene product conferring the activity of “b1137-protein”, especially from Escherichia coli or its functional equivalent or its homolog, e.g. the increase of
[10157] (a) a gene product of a gene comprising the nucleic acid molecule as shown in the respective line in column 5 of Table I, application no. 2, preferably the coding region thereof, or a homolog or a fragment thereof, and being depicted in the same respective line as said B1137, or a functional equivalent or a homolog thereof as shown in column 8 of Table I, application no. 2, preferably the coding region thereof, particularly a homolog or functional equivalent as shown in column 8 of Table I B, application no. 2, and being depicted in the same respective line as said B1137, and preferably the activity is increased non-targeted, or
[10158] (b) a polypeptide comprising a polypeptide, a consensus sequence or at least a polypeptide motif as shown in the respective line in column 5 of Table II or in column 8 of Table IV, application no. 2, respectively, and being depicted in the same respective line as said B1137, or a functional equivalent or a homolog thereof as depicted in column 8 of Table II, application no. 2, preferably a homolog or functional equivalent as depicted in column 8 of Table II B, application no. 2, and being depicted in the same respective line as said B1137, and preferably the activity is increased non-targeted,.

[10159] Accordingly, in one embodiment, the molecule which activity is to be increased in the process of the invention is the gene product with an activity as a “b1137-protein”, preferably it is the molecule of section (a) or (b) of this paragraph.

[10160] In particular, it was observed that in plants, especially in Arabidopsis thaliana, increasing or generating the activity of a gene product non-targeted with the activity of a “b1137-protein”, preferably being encoded by a gene comprising the nucleic acid sequence SEQ ID NO. 37390, preferably the coding region thereof, conferred the production of or the increase in arginine compared with the wild type control.

[10161] The nucleic acid sequence of B1137 from Escherichia coli, e.g. as shown in the respective line in column 5 of Table I, application no. 2, has been published in Blattner et al., Science 277 (5331), 1453 (1997)). And the activity of the gene product thereof is the activity of b1137-protein.

[10162] Accordingly, in one embodiment, the process of the present invention for producing glutamate in a non-human organism, like a microorganism or a plant or a part thereof, comprises increasing or generating the activity of a gene product with the activity of a gene product conferring the activity of “b1137-protein”, especially from Escherichia coli or its functional equivalent or its homolog, e.g. the increase of
[10163] (a) a gene product of a gene comprising the nucleic acid molecule as shown in the respective line in column 5 of Table I, application no. 2, preferably the coding region thereof, or a homolog or a fragment thereof, and being depicted in the same respective line as said B1137, or a functional equivalent or a homolog thereof as shown in column 8 of Table I, application no. 2, preferably the coding region thereof, particularly a homolog or functional equivalent as shown in column 8 of Table I B, application no. 2, and being depicted in the same respective line as said B1137, and preferably the activity is increased non-targeted, or
[10164] (b) a polypeptide comprising a polypeptide, a consensus sequence or at least a polypeptide motif as shown in the respective line in column 5 of Table II or in column 8 of Table IV, application no. 2, respectively, and being depicted in the same respective line as said B1137, or a functional equivalent or a homolog thereof as depicted in column 8 of Table II, application no. 2, preferably a homolog or functional equivalent as depicted in column 8 of Table II B, application no. 2, and being depicted in the same respective line as said B1137, and preferably the activity is increased non-targeted.

[10165] Accordingly, in one embodiment, the molecule which activity is to be increased in the process of the invention is the gene product with an activity as a “b1137-protein”, preferably it is the molecule of section (a) or (b) of this paragraph.

[10166] In particular, it was observed that in plants, especially in Arabidopsis thaliana, increasing or generating the activity of a gene product non-targeted with the activity of a “b1137-protein”, preferably being encoded by a gene comprising the nucleic acid sequence SEQ ID NO. 37390, preferably the coding region thereof, conferred the production of or the increase in glutamate compared with the wild type control.

[10167] The nucleic acid sequence of B1137 from Escherichia coli, e.g. as shown in the respective line in column 5 of Table I, application no. 2, has been published in Blattner et al., Science 277 (5331), 1453 (1997)). And the activity of the gene product thereof is the activity of b1137-protein.

[10168] Accordingly, in one embodiment, the process of the present invention for producing proline in a non-human organism, like a microorganism or a plant or a part thereof, comprises increasing or generating the activity of a gene product with the activity of a gene product conferring the activity of “b1137-protein”, especially from Escherichia coli or its functional equivalent or its homolog, e.g. the increase of
[10169] (a) a gene product of a gene comprising the nucleic acid molecule as shown in the respective line in column 5 of Table I, application no. 2, preferably the coding region thereof, or a homolog or a fragment thereof, and being depicted in the same respective line as said B1137, or a functional equivalent or a homolog thereof as shown in column 8 of Table I, application no. 2, preferably the coding region thereof, particularly a homolog or functional equivalent as shown in column 8 of Table I B, application no. 2, and being depicted in the same respective line as said B1137, and preferably the activity is increased non-targeted, or
[10170] (b) a polypeptide comprising a polypeptide, a consensus sequence or at least a polypeptide motif as shown in the respective line in column 5 of Table II or in column 8 of Table IV, application no. 2, respectively, and being depicted in the same respective line as said B1137, or a functional equivalent or a homolog thereof as depicted in column 8 of Table II, application no. 2, preferably a homolog or functional equivalent as depicted in column 8 of Table II B, application no. 2, and being depicted in the same respective line as said B1137, and preferably the activity is increased non-targeted.

[10171] Accordingly, in one embodiment, the molecule which activity is to be increased in the process of the invention is the gene product with an activity as a “b1137-protein”, preferably it is the molecule of section (a) or (b) of this paragraph.

[10172] In particular, it was observed that in plants, especially in Arabidopsis thaliana, increasing or generating the activity of a gene product non-targeted with the activity of a “b1137-protein”, preferably being encoded by a gene comprising the nucleic acid sequence SEQ ID NO. 37390, preferably the coding region thereof, conferred the production of or the increase in proline compared with the wild type control.

[10173] The nucleic acid sequence of B1163 from Escherichia coli, e.g. as shown in the respective line in column 5 of Table I, application no. 2, has been published in Blattner et al., Science 277 (5331), 1453 (1997)). And the activity of the gene product thereof is the activity of b1163-protein.

[10174] Accordingly, in one embodiment, the process of the present invention for producing glutamine in a non-human organism, like a microorganism or a plant or a part thereof, comprises increasing or generating the activity of a gene product with the activity of a gene product conferring the activity of “b1163-protein”, especially from Escherichia coli or its functional equivalent or its homolog, e.g. the increase of
[10175] (a) a gene product of a gene comprising the nucleic acid molecule as shown in the respective line in column 5 of Table I, application no. 2, preferably the coding region thereof, or a homolog or a fragment thereof, and being depicted in the same respective line as said B1163, or a functional equivalent or a homolog thereof as shown in column 8 of Table I, application no. 2, preferably the coding region thereof, particularly a homolog or functional equivalent as shown in column 8 of Table I B, application no. 2, and being depicted in the same respective line as said B1163, and preferably the activity is increased non-targeted, or
[10176] (b) a polypeptide comprising a polypeptide, a consensus sequence or at least a polypeptide motif as shown in the respective line in column 5 of Table II or in column 8 of Table IV, application no. 2, respectively, and being depicted in the same respective line as said B1163, or a functional equivalent or a homolog thereof as depicted in column 8 of Table II, application no. 2, preferably a homolog or functional equivalent as depicted in column 8 of Table II B, application no. 2, and being depicted in the same respective line as said B1163, and preferably the activity is increased non-targeted.

[10177] Accordingly, in one embodiment, the molecule which activity is to be increased in the process of the invention is the gene product with an activity as a “b1163-protein”, preferably it is the molecule of section (a) or (b) of this paragraph.

[10178] In particular, it was observed that in plants, especially in Arabidopsis thaliana, increasing or generating the activity of a gene product non-targeted with the activity of a “b1163-protein”, preferably being encoded by a gene comprising the nucleic acid sequence SEQ ID NO. 37394, preferably the coding region thereof, conferred the production of or the increase in glutamine compared with the wild type control.

[10179] The nucleic acid sequence of B1186 from Escherichia coli K12, e.g. as shown in the respective line in column 5 of Table I, application no. 2, has been published in Blattner et al., Science 277 (5331), 1453 (1997)). And the activity of the gene product thereof is the activity of sodium/proton antiporter.

[10180] Accordingly, in one embodiment, the process of the present invention for producing proline in a non-human organism, like a microorganism or a plant or a part thereof, comprises increasing or generating the activity of a gene product with the activity of a gene product conferring the activity of “sodium/proton antiporter”, especially from Escherichia coli K12 or its functional equivalent or its homolog, e.g. the increase of
[10181] (a) a gene product of a gene comprising the nucleic acid molecule as shown in the respective line in column 5 of Table I, application no. 2, preferably the coding region thereof, or a homolog or a fragment thereof, and being depicted in the same respective line as said B1186, or a functional equivalent or a homolog thereof as shown in column 8 of Table I, application no. 2, preferably the coding region thereof, particularly a homolog or functional equivalent as shown in column 8 of Table I B, application no. 2, and being depicted in the same respective line as said B1186, and preferably the activity is increased non-targeted, or
[10182] (b) a polypeptide comprising a polypeptide, a consensus sequence or at least a polypeptide motif as shown in the respective line in column 5 of Table II or in column 8 of Table IV, application no. 2, respectively, and being depicted in the same respective line as said B1186, or a functional equivalent or a homolog thereof as depicted in column 8 of Table II, application no. 2, preferably a homolog or functional equivalent as depicted in column 8 of Table II B, application no. 2, and being depicted in the same respective line as said B1186, and preferably the activity is increased non-targeted.

[10183] Accordingly, in one embodiment, the molecule which activity is to be increased in the process of the invention is the gene product with an activity as a “sodium/proton antiporter”, preferably it is the molecule of section (a) or (b) of this paragraph.

[10184] In particular, it was observed that in plants, especially in Arabidopsis thaliana, increasing or generating the activity of a gene product non-targeted with the activity of a “sodium/proton antiporter”, preferably being encoded by a gene comprising the nucleic acid sequence SEQ ID NO. 37400, preferably the coding region thereof, conferred the production of or the increase in proline compared with the wild type control.

[10185] The nucleic acid sequence of B1255 from Escherichia coli, e.g. as shown in the respective line in column 5 of Table I, application no. 2, has been published in Blattner et al., Science 277 (5331), 1453 (1997)). And the activity of the gene product thereof is the activity of membrane protein.

[10186] Accordingly, in one embodiment, the process of the present invention for producing glutamine in a non-human organism, like a microorganism or a plant or a part thereof, comprises increasing or generating the activity of a gene product with the activity of a gene product conferring the activity of “membrane protein”, especially from Escherichia coli or its functional equivalent or its homolog, e.g. the increase of
[10187] (a) a gene product of a gene comprising the nucleic acid molecule as shown in the respective line in column 5 of Table I, application no. 2, preferably the coding region thereof, or a homolog or a fragment thereof, and being depicted in the same respective line as said B1255, or a functional equivalent or a homolog thereof as shown in column 8 of Table I, application no. 2, preferably the coding region thereof, particularly a homolog or functional equivalent as shown in column 8 of Table I B, application no. 2, and being depicted in the same respective line as said B1255, and preferably the activity is increased non-targeted, or
[10188] (b) a polypeptide comprising a polypeptide, a consensus sequence or at least a polypeptide motif as shown in the respective line in column 5 of Table II or in column 8 of Table IV, application no. 2, respectively, and being depicted in the same respective line as said B1255, or a functional equivalent or a homolog thereof as depicted in column 8 of Table II, application no. 2, preferably a homolog or functional equivalent as depicted in column 8 of Table II B, application no. 2, and being depicted in the same respective line as said B1255, and preferably the activity is increased non-targeted,.

[10189] Accordingly, in one embodiment, the molecule which activity is to be increased in the process of the invention is the gene product with an activity as a “membrane protein”, preferably it is the molecule of section (a) or (b) of this paragraph.

[10190] In particular, it was observed that in plants, especially in Arabidopsis thaliana, increasing or generating the activity of a gene product non-targeted with the activity of a “membrane protein”, preferably being encoded by a gene comprising the nucleic acid sequence SEQ ID NO. 37483, preferably the coding region thereof, conferred the production of or the increase in glutamine compared with the wild type control.

[10191] The nucleic acid sequence of B1255 from Escherichia coli, e.g. as shown in the respective line in column 5 of Table I, application no. 2, has been published Blattner et al., Science 277 (5331), 1453 (1997)). And the activity of the gene product thereof is the activity of membrane protein.

[10192] Accordingly, in one embodiment, the process of the present invention for producing proline in a non-human organism, like a microorganism or a plant or a part thereof, comprises increasing or generating the activity of a gene product with the activity of a gene product conferring the activity of “membrane protein”, especially from Escherichia coli or its functional equivalent or its homolog, e.g. the increase of
[10193] (a) a gene product of a gene comprising the nucleic acid molecule as shown in the respective line in column 5 of Table I, application no. 2, preferably the coding region thereof, or a homolog or a fragment thereof, and being depicted in the same respective line as said B1255, or a functional equivalent or a homolog thereof as shown in column 8 of Table I, application no. 2, preferably the coding region thereof, particularly a homolog or functional equivalent as shown in column 8 of Table I B, application no. 2, and being depicted in the same respective line as said B1255, and preferably the activity is increased non-targeted, or
[10194] (b) a polypeptide comprising a polypeptide, a consensus sequence or at least a polypeptide motif as shown in the respective line in column 5 of Table II or in column 8 of Table IV, application no. 2, respectively, and being depicted in the same respective line as said B1255, or a functional equivalent or a homolog thereof as depicted in column 8 of Table II, application no. 2, preferably a homolog or functional equivalent as depicted in column 8 of Table II B, application no. 2, and being depicted in the same respective line as said B1255, and preferably the activity is increased non-targeted.

[10195] Accordingly, in one embodiment, the molecule which activity is to be increased in the process of the invention is the gene product with an activity as a “membrane protein”, preferably it is the molecule of section (a) or (b) of this paragraph.

[10196] In particular, it was observed that in plants, especially in Arabidopsis thaliana, increasing or generating the activity of a gene product non-targeted with the activity of a “membrane protein”, preferably being encoded by a gene comprising the nucleic acid sequence SEQ ID NO. 37483, preferably the coding region thereof, conferred the production of or the increase in proline compared with the wild type control.

[10197] The nucleic acid sequence of B1259 from Escherichia coli, e.g. as shown in the respective line in column 5 of Table I, application no. 2, has been published in Blattner et al., Science 277 (5331), 1453 (1997)). And the activity of the gene product thereof is the activity of b1259-protein.

[10198] Accordingly, in one embodiment, the process of the present invention for producing arginine in a non-human organism, like a microorganism or a plant or a part thereof, comprises increasing or generating the activity of a gene product with the activity of a gene product conferring the activity of “b1259-protein”, especially from Escherichia coli or its functional equivalent or its homolog, e.g. the increase of
[10199] (a) a gene product of a gene comprising the nucleic acid molecule as shown in the respective line in column 5 of Table I, application no. 2, preferably the coding region thereof, or a homolog or a fragment thereof, and being depicted in the same respective line as said B1259, or a functional equivalent or a homolog thereof as shown in column 8 of Table I, application no. 2, preferably the coding region thereof, particularly a homolog or functional equivalent as shown in column 8 of Table I B, application no. 2, and being depicted in the same respective line as said B1259, and preferably the activity is increased non-targeted, or
[10200] (b) a polypeptide comprising a polypeptide, a consensus sequence or at least a polypeptide motif as shown in the respective line in column 5 of Table II or in column 8 of Table IV, application no. 2, respectively, and being depicted in the same respective line as said B1259, or a functional equivalent or a homolog thereof as depicted in column 8 of Table II, application no. 2, preferably a homolog or functional equivalent as depicted in column 8 of Table II B, application no. 2, and being depicted in the same respective line as said B1259, and preferably the activity is increased non-targeted.

[10201] Accordingly, in one embodiment, the molecule which activity is to be increased in the process of the invention is the gene product with an activity as a “b1259-protein”, preferably it is the molecule of section (a) or (b) of this paragraph.

[10202] In particular, it was observed that in plants, especially in Arabidopsis thaliana, increasing or generating the activity of a gene product non-targeted with the activity of a “b1259-protein”, preferably being encoded by a gene comprising the nucleic acid sequence SEQ ID NO. 37503, preferably the coding region thereof, conferred the production of or the increase in arginine compared with the wild type control.

[10203] The nucleic acid sequence of B1259 from Escherichia coli, e.g. as shown in the respective line in column 5 of Table I, application no. 2, has been published in Blattner et al., Science 277 (5331), 1453 (1997)). And the activity of the gene product thereof is the activity of b1259-protein.

[10204] Accordingly, in one embodiment, the process of the present invention for producing glutamine in a non-human organism, like a microorganism or a plant or a part thereof, comprises increasing or generating the activity of a gene product with the activity of a gene product conferring the activity of “b1259-protein”, especially from Escherichia coli or its functional equivalent or its homolog, e.g. the increase of
[10205] (a) a gene product of a gene comprising the nucleic acid molecule as shown in the respective line in column 5 of Table I, application no. 2, preferably the coding region thereof, or a homolog or a fragment thereof, and being depicted in the same respective line as said B1259, or a functional equivalent or a homolog thereof as shown in column 8 of Table I, application no. 2, preferably the coding region thereof, particularly a homolog or functional equivalent as shown in column 8 of Table I B, application no. 2, and being depicted in the same respective line as said B1259, and preferably the activity is increased non-targeted, or
[10206] (b) a polypeptide comprising a polypeptide, a consensus sequence or at least a polypeptide motif as shown in the respective line in column 5 of Table II or in column 8 of Table IV, application no. 2, respectively, and being depicted in the same respective line as said B1259, or a functional equivalent or a homolog thereof as depicted in column 8 of Table II, application no. 2, preferably a homolog or functional equivalent as depicted in column 8 of Table II B, application no. 2, and being depicted in the same respective line as said B1259, and preferably the activity is increased non-targeted.

[10207] Accordingly, in one embodiment, the molecule which activity is to be increased in the process of the invention is the gene product with an activity as a “b1259-protein”, preferably it is the molecule of section (a) or (b) of this paragraph.

[10208] In particular, it was observed that in plants, especially in Arabidopsis thaliana, increasing or generating the activity of a gene product non-targeted with the activity of a “b1259-protein”, preferably being encoded by a gene comprising the nucleic acid sequence SEQ ID NO. 37503, preferably the coding region thereof, conferred the production of or the increase in glutamine compared with the wild type control.

[10209] The nucleic acid sequence of B1263 from Escherichia coli, e.g. as shown in the respective line in column 5 of Table I, application no. 2, has been published in Blattner et al., Science 277 (5331), 1453 (1997)). And the activity of the gene product thereof is the activity of anthranilate synthase component II.

[10210] Accordingly, in one embodiment, the process of the present invention for producing glutamine in a non-human organism, like a microorganism or a plant or a part thereof, comprises increasing or generating the activity of a gene product with the activity of a gene product conferring the activity of “anthranilate synthase component II”, especially from Escherichia coli or its functional equivalent or its homolog, e.g. the increase of
[10211] (a) a gene product of a gene comprising the nucleic acid molecule as shown in the respective line in column 5 of Table I, application no. 2, preferably the coding region thereof, or a homolog or a fragment thereof, and being depicted in the same respective line as said B1263, or a functional equivalent or a homolog thereof as shown in column 8 of Table I, application no. 2, preferably the coding region thereof, particularly a homolog or functional equivalent as shown in column 8 of Table I B, application no. 2, and being depicted in the same respective line as said B1263, and preferably the activity is increased plastidic, or
[10212] (b) a polypeptide comprising a polypeptide, a consensus sequence or at least a polypeptide motif as shown in the respective line in column 5 of Table II or in column 8 of Table IV, application no. 2, respectively, and being depicted in the same respective line as said B1263, or a functional equivalent or a homolog thereof as depicted in column 8 of Table II, application no. 2, preferably a homolog or functional equivalent as depicted in column 8 of Table II B, application no. 2, and being depicted in the same respective line as said B1263, and preferably the activity is increased plastidic.

[10213] Accordingly, in one embodiment, the molecule which activity is to be increased in the process of the invention is the gene product with an activity as a “anthranilate synthase component II”, preferably it is the molecule of section (a) or (b) of this paragraph.

[10214] In particular, it was observed that in plants, especially in Arabidopsis thaliana, increasing or generating the activity of a gene product plastidic with the activity of a “anthranilate synthase component II”, preferably being encoded by a gene comprising the nucleic acid sequence SEQ ID NO. 37539, preferably the coding region thereof, conferred the production of or the increase in glutamine compared with the wild type control.

[10215] The nucleic acid sequence of B1280 from Escherichia coli, e.g. as shown in the respective line in column 5 of Table I, application no. 2, has been published in Blattner et al., Science 277 (5331), 1453 (1997)). And the activity of the gene product thereof is the activity of b1280-protein.

[10216] Accordingly, in one embodiment, the process of the present invention for producing glutamine in a non-human organism, like a microorganism or a plant or a part thereof, comprises increasing or generating the activity of a gene product with the activity of a gene product conferring the activity of “b1280-protein”, especially from Escherichia coli or its functional equivalent or its homolog, e.g. the increase of
[10217] (a) a gene product of a gene comprising the nucleic acid molecule as shown in the respective line in column 5 of Table I, application no. 2, preferably the coding region thereof, or a homolog or a fragment thereof, and being depicted in the same respective line as said B1280, or a functional equivalent or a homolog thereof as shown in column 8 of Table I, application no. 2, preferably the coding region thereof, particularly a homolog or functional equivalent as shown in column 8 of Table I B, application no. 2, and being depicted in the same respective line as said B1280, and preferably the activity is increased non-targeted, or
[10218] (b) a polypeptide comprising a polypeptide, a consensus sequence or at least a polypeptide motif as shown in the respective line in column 5 of Table II or in column 8 of Table IV, application no. 2, respectively, and being depicted in the same respective line as said B1280, or a functional equivalent or a homolog thereof as depicted in column 8 of Table II, application no. 2, preferably a homolog or functional equivalent as depicted in column 8 of Table II B, application no. 2, and being depicted in the same respective line as said B1280, and preferably the activity is increased non-targeted.

[10219] Accordingly, in one embodiment, the molecule which activity is to be increased in the process of the invention is the gene product with an activity as a “b1280-protein”, preferably it is the molecule of section (a) or (b) of this paragraph.

[10220] In particular, it was observed that in plants, especially in Arabidopsis thaliana, increasing or generating the activity of a gene product non-targeted with the activity of a “b1280-protein”, preferably being encoded by a gene comprising the nucleic acid sequence SEQ ID NO. 37573, preferably the coding region thereof, conferred the production of or the increase in glutamine compared with the wild type control.

[10221] The nucleic acid sequence of B1297 from Escherichia coli, e.g. as shown in the respective line in column 5 of Table I, application no. 2, has been published in Blattner et al., Science 277 (5331), 1453 (1997)). And the activity of the gene product thereof is the activity of glutamine synthetase.

[10222] Accordingly, in one embodiment, the process of the present invention for producing glutamine in a non-human organism, like a microorganism or a plant or a part thereof, comprises increasing or generating the activity of a gene product with the activity of a gene product conferring the activity of “glutamine synthetase”, especially from Escherichia coli or its functional equivalent or its homolog, e.g. the increase of
[10223] (a) a gene product of a gene comprising the nucleic acid molecule as shown in the respective line in column 5 of Table I, application no. 2, preferably the coding region thereof, or a homolog or a fragment thereof, and being depicted in the same respective line as said B1297, or a functional equivalent or a homolog thereof as shown in column 8 of Table I, application no. 2, preferably the coding region thereof, particularly a homolog or functional equivalent as shown in column 8 of Table I B, application no. 2, and being depicted in the same respective line as said B1297, and preferably the activity is increased plastidic, or
[10224] (b) a polypeptide comprising a polypeptide, a consensus sequence or at least a polypeptide motif as shown in the respective line in column 5 of Table II or in column 8 of Table IV, application no. 2, respectively, and being depicted in the same respective line as said B1297, or a functional equivalent or a homolog thereof as depicted in column 8 of Table II, application no. 2, preferably a homolog or functional equivalent as depicted in column 8 of Table II B, application no. 2, and being depicted in the same respective line as said B1297, and preferably the activity is increased plastidic.

[10225] Accordingly, in one embodiment, the molecule which activity is to be increased in the process of the invention is the gene product with an activity as a “glutamine synthetase”, preferably it is the molecule of section (a) or (b) of this paragraph.

[10226] In particular, it was observed that in plants, especially in Arabidopsis thaliana, increasing or generating the activity of a gene product plastidic with the activity of a “glutamine synthetase”, preferably being encoded by a gene comprising the nucleic acid sequence SEQ ID NO. 37658, preferably the coding region thereof, conferred the production of or the increase in glutamine compared with the wild type control.

[10227] The nucleic acid sequence of B1300 from Escherichia coli, e.g. as shown in the respective line in column 5 of Table I, application no. 2, has been published in Blattner et al., Science 277 (5331), 1453 (1997)). And the activity of the gene product thereof is the activity of aldehyde dehydrogenase.

[10228] Accordingly, in one embodiment, the process of the present invention for producing glutamate in a non-human organism, like a microorganism or a plant or a part thereof, comprises increasing or generating the activity of a gene product with the activity of a gene product conferring the activity of “aldehyde dehydrogenase”, especially from Escherichia coli or its functional equivalent or its homolog, e.g. the increase of
[10229] (a) a gene product of a gene comprising the nucleic acid molecule as shown in the respective line in column 5 of Table I, application no. 2, preferably the coding region thereof, or a homolog or a fragment thereof, and being depicted in the same respective line as said B1300, or a functional equivalent or a homolog thereof as shown in column 8 of Table I, application no. 2, preferably the coding region thereof, particularly a homolog or functional equivalent as shown in column 8 of Table I B, application no. 2, and being depicted in the same respective line as said B1300, and preferably the activity is increased non-targeted, or
[10230] (b) a polypeptide comprising a polypeptide, a consensus sequence or at least a polypeptide motif as shown in the respective line in column 5 of Table II or in column 8 of Table IV, application no. 2, respectively, and being depicted in the same respective line as said B1300, or a functional equivalent or a homolog thereof as depicted in column 8 of Table II, application no. 2, preferably a homolog or functional equivalent as depicted in column 8 of Table II B, application no. 2, and being depicted in the same respective line as said B1300, and preferably the activity is increased non-targeted.

[10231] Accordingly, in one embodiment, the molecule which activity is to be increased in the process of the invention is the gene product with an activity as a “aldehyde dehydrogenase”, preferably it is the molecule of section (a) or (b) of this paragraph.

[10232] In particular, it was observed that in plants, especially in Arabidopsis thaliana, increasing or generating the activity of a gene product non-targeted with the activity of a “aldehyde dehydrogenase”, preferably being encoded by a gene comprising the nucleic acid sequence SEQ ID NO. 37807, preferably the coding region thereof, conferred the production of or the increase in glutamate compared with the wild type control.

[10233] The nucleic acid sequence of B1330 from Escherichia coli, e.g. as shown in the respective line in column 5 of Table I, application no. 2, has been published in Blattner et al., Science 277 (5331), 1453 (1997)). And the activity of the gene product thereof is the activity of b1330-protein.

[10234] Accordingly, in one embodiment, the process of the present invention for producing glutamate in a non-human organism, like a microorganism or a plant or a part thereof, comprises increasing or generating the activity of a gene product with the activity of a gene product conferring the activity of “b1330-protein”, especially from Escherichia coli or its functional equivalent or its homolog, e.g. the increase of
[10235] (a) a gene product of a gene comprising the nucleic acid molecule as shown in the respective line in column 5 of Table I, application no. 2, preferably the coding region thereof, or a homolog or a fragment thereof, and being depicted in the same respective line as said B1330, or a functional equivalent or a homolog thereof as shown in column 8 of Table I, application no. 2, preferably the coding region thereof, particularly a homolog or functional equivalent as shown in column 8 of Table I B, application no. 2, and being depicted in the same respective line as said B1330, and preferably the activity is increased non-targeted, or
[10236] (b) a polypeptide comprising a polypeptide, a consensus sequence or at least a polypeptide motif as shown in the respective line in column 5 of Table II or in column 8 of Table IV, application no. 2, respectively, and being depicted in the same respective line as said B1330, or a functional equivalent or a homolog thereof as depicted in column 8 of Table II, application no. 2, preferably a homolog or functional equivalent as depicted in column 8 of Table II B, application no. 2, and being depicted in the same respective line as said B1330, and preferably the activity is increased non-targeted.

[10237] Accordingly, in one embodiment, the molecule which activity is to be increased in the process of the invention is the gene product with an activity as a “b1330-protein”, preferably it is the molecule of section (a) or (b) of this paragraph.

[10238] In particular, it was observed that in plants, especially in Arabidopsis thaliana, increasing or generating the activity of a gene product non-targeted with the activity of a “b1330-protein”, preferably being encoded by a gene comprising the nucleic acid sequence SEQ ID NO. 38226, preferably the coding region thereof, conferred the production of or the increase in glutamate compared with the wild type control.

[10239] The nucleic acid sequence of B1330 from Escherichia coli, e.g. as shown in the respective line in column 5 of Table I, application no. 2, has been published in Blattner et al., Science 277 (5331), 1453 (1997)). And the activity of the gene product thereof is the activity of b1330-protein.

[10240] Accordingly, in one embodiment, the process of the present invention for producing glutamine in a non-human organism, like a microorganism or a plant or a part thereof, comprises increasing or generating the activity of a gene product with the activity of a gene product conferring the activity of “b1330-protein”, especially from Escherichia coli or its functional equivalent or its homolog, e.g. the increase of
[10241] (a) a gene product of a gene comprising the nucleic acid molecule as shown in the respective line in column 5 of Table I, application no. 2, preferably the coding region thereof, or a homolog or a fragment thereof, and being depicted in the same respective line as said B1330, or a functional equivalent or a homolog thereof as shown in column 8 of Table I, application no. 2, preferably the coding region thereof, particularly a homolog or functional equivalent as shown in column 8 of Table I B, application no. 2, and being depicted in the same respective line as said B1330, and preferably the activity is increased non-targeted, or
[10242] (b) a polypeptide comprising a polypeptide, a consensus sequence or at least a polypeptide motif as shown in the respective line in column 5 of Table II or in column 8 of Table IV, application no. 2, respectively, and being depicted in the same respective line as said B1330, or a functional equivalent or a homolog thereof as depicted in column 8 of Table II, application no. 2, preferably a homolog or functional equivalent as depicted in column 8 of Table II B, application no. 2, and being depicted in the same respective line as said B1330, and preferably the activity is increased non-targeted.

[10243] Accordingly, in one embodiment, the molecule which activity is to be increased in the process of the invention is the gene product with an activity as a “b1330-protein”, preferably it is the molecule of section (a) or (b) of this paragraph.

[10244] In particular, it was observed that in plants, especially in Arabidopsis thaliana, increasing or generating the activity of a gene product non-targeted with the activity of a “b1330-protein”, preferably being encoded by a gene comprising the nucleic acid sequence SEQ ID NO. 38226, preferably the coding region thereof, conferred the production of or the increase in glutamine compared with the wild type control.

[10245] The nucleic acid sequence of B1431 from Escherichia coli, e.g. as shown in the respective line in column 5 of Table I, application no. 2, has been published in Blattner et al., Science 277 (5331), 1453 (1997)). And the activity of the gene product thereof is the activity of lipoprotein precursor.

[10246] Accordingly, in one embodiment, the process of the present invention for producing glutamate in a non-human organism, like a microorganism or a plant or a part thereof, comprises increasing or generating the activity of a gene product with the activity of a gene product conferring the activity of “lipoprotein precursor”, especially from Escherichia coli or its functional equivalent or its homolog, e.g. the increase of
[10247] (a) a gene product of a gene comprising the nucleic acid molecule as shown in the respective line in column 5 of Table I, application no. 2, preferably the coding region thereof, or a homolog or a fragment thereof, and being depicted in the same respective line as said B1431, or a functional equivalent or a homolog thereof as shown in column 8 of Table I, application no. 2, preferably the coding region thereof, particularly a homolog or functional equivalent as shown in column 8 of Table I B, application no. 2, and being depicted in the same respective line as said B1431, and preferably the activity is increased plastidic, or
[10248] (b) a polypeptide comprising a polypeptide, a consensus sequence or at least a polypeptide motif as shown in the respective line in column 5 of Table II or in column 8 of Table IV, application no. 2, respectively, and being depicted in the same respective line as said B1431, or a functional equivalent or a homolog thereof as depicted in column 8 of Table II, application no. 2, preferably a homolog or functional equivalent as depicted in column 8 of Table II B, application no. 2, and being depicted in the same respective line as said B1431, and preferably the activity is increased plastidic.

[10249] Accordingly, in one embodiment, the molecule which activity is to be increased in the process of the invention is the gene product with an activity as a “lipoprotein precursor”, preferably it is the molecule of section (a) or (b) of this paragraph.

[10250] In particular, it was observed that in plants, especially in Arabidopsis thaliana, increasing or generating the activity of a gene product plastidic with the activity of a “lipoprotein precursor”, preferably being encoded by a gene comprising the nucleic acid sequence SEQ ID NO. 38266, preferably the coding region thereof, conferred the production of or the increase in glutamate compared with the wild type control.

[10251] The nucleic acid sequence of B1431 from Escherichia coli, e.g. as shown in the respective line in column 5 of Table I, application no. 2, has been published in Blattner et al., Science 277 (5331), 1453 (1997)). And the activity of the gene product thereof is the activity of lipoprotein precursor.

[10252] Accordingly, in one embodiment, the process of the present invention for producing glutamine in a non-human organism, like a microorganism or a plant or a part thereof, comprises increasing or generating the activity of a gene product with the activity of a gene product conferring the activity of “lipoprotein precursor”, especially from Escherichia coli or its functional equivalent or its homolog, e.g. the increase of
[10253] (a) a gene product of a gene comprising the nucleic acid molecule as shown in the respective line in column 5 of Table I, application no. 2, preferably the coding region thereof, or a homolog or a fragment thereof, and being depicted in the same respective line as said B1431, or a functional equivalent or a homolog thereof as shown in column 8 of Table I, application no. 2, preferably the coding region thereof, particularly a homolog or functional equivalent as shown in column 8 of Table I B, application no. 2, and being depicted in the same respective line as said B1431, and preferably the activity is increased plastidic, or
[10254] (b) a polypeptide comprising a polypeptide, a consensus sequence or at least a polypeptide motif as shown in the respective line in column 5 of Table II or in column 8 of Table IV, application no. 2, respectively, and being depicted in the same respective line as said B1431, or a functional equivalent or a homolog thereof as depicted in column 8 of Table II, application no. 2, preferably a homolog or functional equivalent as depicted in column 8 of Table II B, application no. 2, and being depicted in the same respective line as said B1431, and preferably the activity is increased plastidic.

[10255] Accordingly, in one embodiment, the molecule which activity is to be increased in the process of the invention is the gene product with an activity as a “lipoprotein precursor”, preferably it is the molecule of section (a) or (b) of this paragraph.

[10256] In particular, it was observed that in plants, especially in Arabidopsis thaliana, increasing or generating the activity of a gene product plastidic with the activity of a “lipoprotein precursor”, preferably being encoded by a gene comprising the nucleic acid sequence SEQ ID NO. 38266, preferably the coding region thereof, conferred the production of or the increase in glutamine compared with the wild type control.

[10257] The nucleic acid sequence of B1445 from Escherichia coli, e.g. as shown in the respective line in column 5 of Table I, application no. 2, has been published in Blattner et al., Science 277 (5331), 1453 (1997)) And the activity of the gene product thereof is the activity of b1445-protein.

[10258] Accordingly, in one embodiment, the process of the present invention for producing glutamate in a non-human organism, like a microorganism or a plant or a part thereof, comprises increasing or generating the activity of a gene product with the activity of a gene product conferring the activity of “b1445-protein”, especially from Escherichia coli or its functional equivalent or its homolog, e.g. the increase of
[10259] (a) a gene product of a gene comprising the nucleic acid molecule as shown in the respective line in column 5 of Table I, application no. 2, preferably the coding region thereof, or a homolog or a fragment thereof, and being depicted in the same respective line as said B1445, or a functional equivalent or a homolog thereof as shown in column 8 of Table I, application no. 2, preferably the coding region thereof, particularly a homolog or functional equivalent as shown in column 8 of Table I B, application no. 2, and being depicted in the same respective line as said B1445, and preferably the activity is increased non-targeted, or
[10260] (b) a polypeptide comprising a polypeptide, a consensus sequence or at least a polypeptide motif as shown in the respective line in column 5 of Table II or in column 8 of Table IV, application no. 2, respectively, and being depicted in the same respective line as said B1445, or a functional equivalent or a homolog thereof as depicted in column 8 of Table II, application no. 2, preferably a homolog or functional equivalent as depicted in column 8 of Table II B, application no. 2, and being depicted in the same respective line as said B1445, and preferably the activity is increased non-targeted.

[10261] Accordingly, in one embodiment, the molecule which activity is to be increased in the process of the invention is the gene product with an activity as a “b1445-protein”, preferably it is the molecule of section (a) or (b) of this paragraph.

[10262] In particular, it was observed that in plants, especially in Arabidopsis thaliana, increasing or generating the activity of a gene product non-targeted with the activity of a “b1445-protein”, preferably being encoded by a gene comprising the nucleic acid sequence SEQ ID NO. 38289, preferably the coding region thereof, conferred the production of or the increase in glutamate compared with the wild type control.

[10263] The nucleic acid sequence of B1445 from Escherichia coli, e.g. as shown in the respective line in column 5 of Table I, application no. 2, has been published in Blattner et al., Science 277 (5331), 1453 (1997)). And the activity of the gene product thereof is the activity of b1445-protein.

[10264] Accordingly, in one embodiment, the process of the present invention for producing glutamine in a non-human organism, like a microorganism or a plant or a part thereof, comprises increasing or generating the activity of a gene product with the activity of a gene product conferring the activity of “b1445-protein”, especially from Escherichia coli or its functional equivalent or its homolog, e.g. the increase of
[10265] (a) a gene product of a gene comprising the nucleic acid molecule as shown in the respective line in column 5 of Table I, application no. 2, preferably the coding region thereof, or a homolog or a fragment thereof, and being depicted in the same respective line as said B1445, or a functional equivalent or a homolog thereof as shown in column 8 of Table I, application no. 2, preferably the coding region thereof, particularly a homolog or functional equivalent as shown in column 8 of Table I B, application no. 2, and being depicted in the same respective line as said B1445, and preferably the activity is increased non-targeted, or
[10266] (b) a polypeptide comprising a polypeptide, a consensus sequence or at least a polypeptide motif as shown in the respective line in column 5 of Table II or in column 8 of Table IV, application no. 2, respectively, and being depicted in the same respective line as said B1445, or a functional equivalent or a homolog thereof as depicted in column 8 of Table II, application no. 2, preferably a homolog or functional equivalent as depicted in column 8 of Table II B, application no. 2, and being depicted in the same respective line as said B1445, and preferably the activity is increased non-targeted.

[10267] Accordingly, in one embodiment, the molecule which activity is to be increased in the process of the invention is the gene product with an activity as a “b1445-protein”, preferably it is the molecule of section (a) or (b) of this paragraph. In particular, it was observed that in plants, especially in Arabidopsis thaliana, increasing or generating the activity of a gene product non-targeted with the activity of a “b1445-protein”, preferably being encoded by a gene comprising the nucleic acid sequence SEQ ID NO. 38289, preferably the coding region thereof, conferred the production of or the increase in glutamine compared with the wild type control.

[10268] The nucleic acid sequence of B1522 from Escherichia coli, e.g. as shown in the respective line in column 5 of Table I, application no. 2, has been published in Blattner et al., Science 277 (5331), 1453 (1997)). And the activity of the gene product thereof is the activity of b1522-protein.

[10269] Accordingly, in one embodiment, the process of the present invention for producing glutamate in a non-human organism, like a microorganism or a plant or a part thereof, comprises increasing or generating the activity of a gene product with the activity of a gene product conferring the activity of “b1522-protein”, especially from Escherichia coli or its functional equivalent or its homolog, e.g. the increase of
[10270] (a) a gene product of a gene comprising the nucleic acid molecule as shown in the respective line in column 5 of Table I, application no. 2, preferably the coding region thereof, or a homolog or a fragment thereof, and being depicted in the same respective line as said B1522, or a functional equivalent or a homolog thereof as shown in column 8 of Table I, application no. 2, preferably the coding region thereof, particularly a homolog or functional equivalent as shown in column 8 of Table I B, application no. 2, and being depicted in the same respective line as said B1522, and preferably the activity is increased non-targeted, or
[10271] (b) a polypeptide comprising a polypeptide, a consensus sequence or at least a polypeptide motif as shown in the respective line in column 5 of Table II or in column 8 of Table IV, application no. 2, respectively, and being depicted in the same respective line as said B1522, or a functional equivalent or a homolog thereof as depicted in column 8 of Table II, application no. 2, preferably a homolog or functional equivalent as depicted in column 8 of Table II B, application no. 2, and being depicted in the same respective line as said B1522, and preferably the activity is increased non-targeted.

[10272] Accordingly, in one embodiment, the molecule which activity is to be increased in the process of the invention is the gene product with an activity as a “b1522-protein”, preferably it is the molecule of section (a) or (b) of this paragraph.

[10273] In particular, it was observed that in plants, especially in Arabidopsis thaliana, increasing or generating the activity of a gene product non-targeted with the activity of a “b1522-protein”, preferably being encoded by a gene comprising the nucleic acid sequence SEQ ID NO. 7947, preferably the coding region thereof, conferred the production of or the increase in glutamate compared with the wild type control.

[10274] The nucleic acid sequence of B1597 from Escherichia coli, e.g. as shown in the respective line in column 5 of Table I, application no. 2, has been published in Blattner et al., Science 277 (5331), 1453 (1997)). And the activity of the gene product thereof is the activity of acid shock protein.

[10275] Accordingly, in one embodiment, the process of the present invention for producing glutamine in a non-human organism, like a microorganism or a plant or a part thereof, comprises increasing or generating the activity of a gene product with the activity of a gene product conferring the activity of “acid shock protein”, especially from Escherichia coli or its functional equivalent or its homolog, e.g. the increase of
[10276] (a) a gene product of a gene comprising the nucleic acid molecule as shown in the respective line in column 5 of Table I, application no. 2, preferably the coding region thereof, or a homolog or a fragment thereof, and being depicted in the same respective line as said B1597, or a functional equivalent or a homolog thereof as shown in column 8 of Table I, application no. 2, preferably the coding region thereof, particularly a homolog or functional equivalent as shown in column 8 of Table I B, application no. 2, and being depicted in the same respective line as said B1597, and preferably the activity is increased non-targeted, or
[10277] (b) a polypeptide comprising a polypeptide, a consensus sequence or at least a polypeptide motif as shown in the respective line in column 5 of Table II or in column 8 of Table IV, application no. 2, respectively, and being depicted in the same respective line as said B1597, or a functional equivalent or a homolog thereof as depicted in column 8 of Table II, application no. 2, preferably a homolog or functional equivalent as depicted in column 8 of Table II B, application no. 2, and being depicted in the same respective line as said B1597, and preferably the activity is increased non-targeted.

[10278] Accordingly, in one embodiment, the molecule which activity is to be increased in the process of the invention is the gene product with an activity as a “acid shock protein”, preferably it is the molecule of section (a) or (b) of this paragraph.

[10279] In particular, it was observed that in plants, especially in Arabidopsis thaliana, increasing or generating the activity of a gene product non-targeted with the activity of a “acid shock protein”, preferably being encoded by a gene comprising the nucleic acid sequence SEQ ID NO. 38300, preferably the coding region thereof, conferred the production of or the increase in glutamine compared with the wild type control.

[10280] The nucleic acid sequence of B1627 from Escherichia coli, e.g. as shown in the respective line in column 5 of Table I, application no. 2, has been published in Blattner et al., Science 277 (5331), 1453 (1997)). And the activity of the gene product thereof is the activity of electron transport complex protein.

[10281] Accordingly, in one embodiment, the process of the present invention for producing glutamine in a non-human organism, like a microorganism or a plant or a part thereof, comprises increasing or generating the activity of a gene product with the activity of a gene product conferring the activity of “electron transport complex protein”, especially from Escherichia coli or its functional equivalent or its homolog, e.g. the increase of
[10282] (a) a gene product of a gene comprising the nucleic acid molecule as shown in the respective line in column 5 of Table I, application no. 2, preferably the coding region thereof, or a homolog or a fragment thereof, and being depicted in the same respective line as said B1627, or a functional equivalent or a homolog thereof as shown in column 8 of Table I, application no. 2, preferably the coding region thereof, particularly a homolog or functional equivalent as shown in column 8 of Table I B, application no. 2, and being depicted in the same respective line as said B1627, and preferably the activity is increased non-targeted, or
[10283] (b) a polypeptide comprising a polypeptide, a consensus sequence or at least a polypeptide motif as shown in the respective line in column 5 of Table II or in column 8 of Table IV, application no. 2, respectively, and being depicted in the same respective line as said B1627, or a functional equivalent or a homolog thereof as depicted in column 8 of Table II, application no. 2, preferably a homolog or functional equivalent as depicted in column 8 of Table II B, application no. 2, and being depicted in the same respective line as said B1627, and preferably the activity is increased non-targeted.

[10284] Accordingly, in one embodiment, the molecule which activity is to be increased in the process of the invention is the gene product with an activity as a “electron transport complex protein”, preferably it is the molecule of section (a) or (b) of this paragraph.

[10285] In particular, it was observed that in plants, especially in Arabidopsis thaliana, increasing or generating the activity of a gene product non-targeted with the activity of a “electron transport complex protein”, preferably being encoded by a gene comprising the nucleic acid sequence SEQ ID NO. 38345, preferably the coding region thereof, conferred the production of or the increase in glutamine compared with the wild type control.

[10286] The nucleic acid sequence of B1845 from Escherichia coli, e.g. as shown in the respective line in column 5 of Table I, application no. 2, has been published in Blattner et al., Science 277 (5331), 1453 (1997)). And the activity of the gene product thereof is the activity of protease.

[10287] Accordingly, in one embodiment, the process of the present invention for producing glutamate in a non-human organism, like a microorganism or a plant or a part thereof, comprises increasing or generating the activity of a gene product with the activity of a gene product conferring the activity of “protease”, especially from Escherichia coli or its functional equivalent or its homolog, e.g. the increase of
[10288] (a) a gene product of a gene comprising the nucleic acid molecule as shown in the respective line in column 5 of Table I, application no. 2, preferably the coding region thereof, or a homolog or a fragment thereof, and being depicted in the same respective line as said B1845, or a functional equivalent or a homolog thereof as shown in column 8 of Table I, application no. 2, preferably the coding region thereof, particularly a homolog or functional equivalent as shown in column 8 of Table I B, application no. 2, and being depicted in the same respective line as said B1845, and preferably the activity is increased non-targeted, or
[10289] (b) a polypeptide comprising a polypeptide, a consensus sequence or at least a polypeptide motif as shown in the respective line in column 5 of Table II or in column 8 of Table IV, application no. 2, respectively, and being depicted in the same respective line as said B1845, or a functional equivalent or a homolog thereof as depicted in column 8 of Table II, application no. 2, preferably a homolog or functional equivalent as depicted in column 8 of Table II B, application no. 2, and being depicted in the same respective line as said B1845, and preferably the activity is increased non-targeted.

[10290] Accordingly, in one embodiment, the molecule which activity is to be increased in the process of the invention is the gene product with an activity as a “protease”, preferably it is the molecule of section (a) or (b) of this paragraph.

[10291] In particular, it was observed that in plants, especially in Arabidopsis thaliana, increasing or generating the activity of a gene product non-targeted with the activity of a “protease”, preferably being encoded by a gene comprising the nucleic acid sequence SEQ ID NO. 38573, preferably the coding region thereof, conferred the production of or the increase in glutamate compared with the wild type control.

[10292] The nucleic acid sequence of B1898 from Escherichia coli, e.g. as shown in the respective line in column 5 of Table I, application no. 2, has been published in Blattner et al., Science 277 (5331), 1453 (1997)). And the activity of the gene product thereof is the activity of b1898-protein.

[10293] Accordingly, in one embodiment, the process of the present invention for producing glutamate in a non-human organism, like a microorganism or a plant or a part thereof, comprises increasing or generating the activity of a gene product with the activity of a gene product conferring the activity of “b1898-protein”, especially from Escherichia coli or its functional equivalent or its homolog, e.g. the increase of
[10294] (a) a gene product of a gene comprising the nucleic acid molecule as shown in the respective line in column 5 of Table I, application no. 2, preferably the coding region thereof, or a homolog or a fragment thereof, and being depicted in the same respective line as said B1898, or a functional equivalent or a homolog thereof as shown in column 8 of Table I, application no. 2, preferably the coding region thereof, particularly a homolog or functional equivalent as shown in column 8 of Table I B, application no. 2, and being depicted in the same respective line as said B1898, and preferably the activity is increased non-targeted, or
[10295] (b) a polypeptide comprising a polypeptide, a consensus sequence or at least a polypeptide motif as shown in the respective line in column 5 of Table II or in column 8 of Table IV, application no. 2, respectively, and being depicted in the same respective line as said B1898, or a functional equivalent or a homolog thereof as depicted in column 8 of Table II, application no. 2, preferably a homolog or functional equivalent as depicted in column 8 of Table II B, application no. 2, and being depicted in the same respective line as said B1898, and preferably the activity is increased non-targeted.

[10296] Accordingly, in one embodiment, the molecule which activity is to be increased in the process of the invention is the gene product with an activity as a “b1898-protein”, preferably it is the molecule of section (a) or (b) of this paragraph.

[10297] In particular, it was observed that in plants, especially in Arabidopsis thaliana, increasing or generating the activity of a gene product non-targeted with the activity of a “b1898-protein”, preferably being encoded by a gene comprising the nucleic acid sequence SEQ ID NO. 38767, preferably the coding region thereof, conferred the production of or the increase in glutamate compared with the wild type control.

[10298] The nucleic acid sequence of B1981 from Escherichia coli, e.g. as shown in the respective line in column 5 of Table I, application no. 2, has been published in Blattner et al., Science 277 (5331), 1453 (1997)). And the activity of the gene product thereof is the activity of transport protein.

[10299] Accordingly, in one embodiment, the process of the present invention for producing glutamine in a non-human organism, like a microorganism or a plant or a part thereof, comprises increasing or generating the activity of a gene product with the activity of a gene product conferring the activity of “transport protein”, especially from Escherichia coli or its functional equivalent or its homolog, e.g. the increase of
[10300] (a) a gene product of a gene comprising the nucleic acid molecule as shown in the respective line in column 5 of Table I, application no. 2, preferably the coding region thereof, or a homolog or a fragment thereof, and being depicted in the same respective line as said B1981, or a functional equivalent or a homolog thereof as shown in column 8 of Table I, application no. 2, preferably the coding region thereof, particularly a homolog or functional equivalent as shown in column 8 of Table I B, application no. 2, and being depicted in the same respective line as said B1981, and preferably the activity is increased non-targeted, or
[10301] (b) a polypeptide comprising a polypeptide, a consensus sequence or at least a polypeptide motif as shown in the respective line in column 5 of Table II or in column 8 of Table IV, application no. 2, respectively, and being depicted in the same respective line as said B1981, or a functional equivalent or a homolog thereof as depicted in column 8 of Table II, application no. 2, preferably a homolog or functional equivalent as depicted in column 8 of Table II B, application no. 2, and being depicted in the same respective line as said B1981, and preferably the activity is increased non-targeted.

[10302] Accordingly, in one embodiment, the molecule which activity is to be increased in the process of the invention is the gene product with an activity as a “transport protein”, preferably it is the molecule of section (a) or (b) of this paragraph.

[10303] In particular, it was observed that in plants, especially in Arabidopsis thaliana, increasing or generating the activity of a gene product non-targeted with the activity of a “transport protein”, preferably being encoded by a gene comprising the nucleic acid sequence SEQ ID NO. 38899, preferably the coding region thereof, conferred the production of or the increase in glutamine compared with the wild type control.

[10304] The nucleic acid sequence of B2063 from Escherichia coli, e.g. as shown in the respective line in column 5 of Table I, application no. 2, has been published in Blattner et al., Science 277 (5331), 1453 (1997)). And the activity of the gene product thereof is the activity of transport protein.

[10305] Accordingly, in one embodiment, the process of the present invention for producing glutamate in a non-human organism, like a microorganism or a plant or a part thereof, comprises increasing or generating the activity of a gene product with the activity of a gene product conferring the activity of “transport protein”, especially from Escherichia coli or its functional equivalent or its homolog, e.g. the increase of
[10306] (a) a gene product of a gene comprising the nucleic acid molecule as shown in the respective line in column 5 of Table I, application no. 2, preferably the coding region thereof, or a homolog or a fragment thereof, and being depicted in the same respective line as said B2063, or a functional equivalent or a homolog thereof as shown in column 8 of Table I, application no. 2, preferably the coding region thereof, particularly a homolog or functional equivalent as shown in column 8 of Table I B, application no. 2, and being depicted in the same respective line as said B2063, and preferably the activity is increased non-targeted, or
[10307] (b) a polypeptide comprising a polypeptide, a consensus sequence or at least a polypeptide motif as shown in the respective line in column 5 of Table II or in column 8 of Table IV, application no. 2, respectively, and being depicted in the same respective line as said B2063, or a functional equivalent or a homolog thereof as depicted in column 8 of Table II, application no. 2, preferably a homolog or functional equivalent as depicted in column 8 of Table II B, application no. 2, and being depicted in the same respective line as said B2063, and preferably the activity is increased non-targeted.

[10308] Accordingly, in one embodiment, the molecule which activity is to be increased in the process of the invention is the gene product with an activity as a “transport protein”, preferably it is the molecule of section (a) or (b) of this paragraph.

[10309] In particular, it was observed that in plants, especially in Arabidopsis thaliana, increasing or generating the activity of a gene product non-targeted with the activity of a “transport protein”, preferably being encoded by a gene comprising the nucleic acid sequence SEQ ID NO. 38947, preferably the coding region thereof, conferred the production of or the increase in glutamate compared with the wild type control.

[10310] The nucleic acid sequence of B2063 from Escherichia coli, e.g. as shown in the respective line in column 5 of Table I, application no. 2, has been published in Blattner et al., Science 277 (5331), 1453 (1997)). And the activity of the gene product thereof is the activity of transport protein.

[10311] Accordingly, in one embodiment, the process of the present invention for producing glutamine in a non-human organism, like a microorganism or a plant or a part thereof, comprises increasing or generating the activity of a gene product with the activity of a gene product conferring the activity of “transport protein”, especially from Escherichia coli or its functional equivalent or its homolog, e.g. the increase of
[10312] (a) a gene product of a gene comprising the nucleic acid molecule as shown in the respective line in column 5 of Table I, application no. 2, preferably the coding region thereof, or a homolog or a fragment thereof, and being depicted in the same respective line as said B2063, or a functional equivalent or a homolog thereof as shown in column 8 of Table I, application no. 2, preferably the coding region thereof, particularly a homolog or functional equivalent as shown in column 8 of Table I B, application no. 2, and being depicted in the same respective line as said B2063, and preferably the activity is increased non-targeted, or
[10313] (b) a polypeptide comprising a polypeptide, a consensus sequence or at least a polypeptide motif as shown in the respective line in column 5 of Table II or in column 8 of Table IV, application no. 2, respectively, and being depicted in the same respective line as said B2063, or a functional equivalent or a homolog thereof as depicted in column 8 of Table II, application no. 2, preferably a homolog or functional equivalent as depicted in column 8 of Table II B, application no. 2, and being depicted in the same respective line as said B2063, and preferably the activity is increased non-targeted.

[10314] Accordingly, in one embodiment, the molecule which activity is to be increased in the process of the invention is the gene product with an activity as a “transport protein”, preferably it is the molecule of section (a) or (b) of this paragraph.

[10315] In particular, it was observed that in plants, especially in Arabidopsis thaliana, increasing or generating the activity of a gene product non-targeted with the activity of a “transport protein”, preferably being encoded by a gene comprising the nucleic acid sequence SEQ ID NO. 38947, preferably the coding region thereof, conferred the production of or the increase in glutamine compared with the wild type control.

[10316] The nucleic acid sequence of B2063 from Escherichia coli, e.g. as shown in the respective line in column 5 of Table I, application no. 2, has been published in Blattner et al., Science 277 (5331), 1453 (1997)). And the activity of the gene product thereof is the activity of transport protein.

[10317] Accordingly, in one embodiment, the process of the present invention for producing proline in a non-human organism, like a microorganism or a plant or a part thereof, comprises increasing or generating the activity of a gene product with the activity of a gene product conferring the activity of “transport protein”, especially from Escherichia coli or its functional equivalent or its homolog, e.g. the increase of
[10318] (a) a gene product of a gene comprising the nucleic acid molecule as shown in the respective line in column 5 of Table I, application no. 2, preferably the coding region thereof, or a homolog or a fragment thereof, and being depicted in the same respective line as said B2063, or a functional equivalent or a homolog thereof as shown in column 8 of Table I, application no. 2, preferably the coding region thereof, particularly a homolog or functional equivalent as shown in column 8 of Table I B, application no. 2, and being depicted in the same respective line as said B2063, and preferably the activity is increased non-targeted, or
[10319] (b) a polypeptide comprising a polypeptide, a consensus sequence or at least a polypeptide motif as shown in the respective line in column 5 of Table II or in column 8 of Table IV, application no. 2, respectively, and being depicted in the same respective line as said B2063, or a functional equivalent or a homolog thereof as depicted in column 8 of Table II, application no. 2, preferably a homolog or functional equivalent as depicted in column 8 of Table II B, application no. 2, and being depicted in the same respective line as said B2063, and preferably the activity is increased non-targeted.

[10320] Accordingly, in one embodiment, the molecule which activity is to be increased in the process of the invention is the gene product with an activity as a “transport protein”, preferably it is the molecule of section (a) or (b) of this paragraph.

[10321] In particular, it was observed that in plants, especially in Arabidopsis thaliana, increasing or generating the activity of a gene product non-targeted with the activity of a “transport protein”, preferably being encoded by a gene comprising the nucleic acid sequence SEQ ID NO. 38947, preferably the coding region thereof, conferred the production of or the increase in proline compared with the wild type control.

[10322] The nucleic acid sequence of B2066 from Escherichia coli, e.g. as shown in the respective line in column 5 of Table I, application no. 2, has been published in S Blattner et al., Science 277 (5331), 1453 (1997)). And the activity of the gene product thereof is the activity of uridine/cytidine kinase.

[10323] Accordingly, in one embodiment, the process of the present invention for producing glutamine in a non-human organism, like a microorganism or a plant or a part thereof, comprises increasing or generating the activity of a gene product with the activity of a gene product conferring the activity of “uridine/cytidine kinase”, especially from Escherichia coli or its functional equivalent or its homolog, e.g. the increase of
[10324] (a) a gene product of a gene comprising the nucleic acid molecule as shown in the respective line in column 5 of Table I, application no. 2, preferably the coding region thereof, or a homolog or a fragment thereof, and being depicted in the same respective line as said B2066, or a functional equivalent or a homolog thereof as shown in column 8 of Table I, application no. 2, preferably the coding region thereof, particularly a homolog or functional equivalent as shown in column 8 of Table I B, application no. 2, and being depicted in the same respective line as said B2066, and preferably the activity is increased mitochondrial, or
[10325] (b) a polypeptide comprising a polypeptide, a consensus sequence or at least a polypeptide motif as shown in the respective line in column 5 of Table II or in column 8 of Table IV, application no. 2, respectively, and being depicted in the same respective line as said B2066, or a functional equivalent or a homolog thereof as depicted in column 8 of Table II, application no. 2, preferably a homolog or functional equivalent as depicted in column 8 of Table II B, application no. 2, and being depicted in the same respective line as said B2066, and preferably the activity is increased mitochondrial.

[10326] Accordingly, in one embodiment, the molecule which activity is to be increased in the process of the invention is the gene product with an activity as a “uridine/cytidine kinase”, preferably it is the molecule of section (a) or (b) of this paragraph.
[10327] In particular, it was observed that in plants, especially in Arabidopsis thaliana, increasing or generating the activity of a gene product mitochondrial with the activity of a “uridine/cytidine kinase”, preferably being encoded by a gene comprising the nucleic acid sequence SEQ ID NO. 8937, preferably the coding region thereof, conferred the production of or the increase in glutamine compared with the wild type control.

[10328] The nucleic acid sequence of B2107 from Escherichia coli, e.g. as shown in the respective line in column 5 of Table I, application no. 2, has been published in Blattner et al., Science 277 (5331), 1453 (1997)). And the activity of the gene product thereof is the activity of b2107-protein.

[10329] Accordingly, in one embodiment, the process of the present invention for producing glutamate in a non-human organism, like a microorganism or a plant or a part thereof, comprises increasing or generating the activity of a gene product with the activity of a gene product conferring the activity of “b2107-protein”, especially from Escherichia coli or its functional equivalent or its homolog, e.g. the increase of
[10330] (a) a gene product of a gene comprising the nucleic acid molecule as shown in the respective line in column 5 of Table I, application no. 2, preferably the coding region thereof, or a homolog or a fragment thereof, and being depicted in the same respective line as said B2107, or a functional equivalent or a homolog thereof as shown in column 8 of Table I, application no. 2, preferably the coding region thereof, particularly a homolog or functional equivalent as shown in column 8 of Table I B, application no. 2, and being depicted in the same respective line as said B2107, and preferably the activity is increased non-targeted, or
[10331] (b) a polypeptide comprising a polypeptide, a consensus sequence or at least a polypeptide motif as shown in the respective line in column 5 of Table II or in column 8 of Table IV, application no. 2, respectively, and being depicted in the same respective line as said B2107, or a functional equivalent or a homolog thereof as depicted in column 8 of Table II, application no. 2, preferably a homolog or functional equivalent as depicted in column 8 of Table II B, application no. 2, and being depicted in the same respective line as said B2107, and preferably the activity is increased non-targeted.

[10332] Accordingly, in one embodiment, the molecule which activity is to be increased in the process of the invention is the gene product with an activity as a “b2107-protein”, preferably it is the molecule of section (a) or (b) of this paragraph.

[10333] In particular, it was observed that in plants, especially in Arabidopsis thaliana, increasing or generating the activity of a gene product non-targeted with the activity of a “b2107-protein”, preferably being encoded by a gene comprising the nucleic acid sequence SEQ ID NO. 39002, preferably the coding region thereof, conferred the production of or the increase in glutamate compared with the wild type control.

[10334] The nucleic acid sequence of B2121 from Escherichia coli, e.g. as shown in the respective line in column 5 of Table I, application no. 2, has been published in Blattner et al., Science 277 (5331), 1453 (1997)). And the activity of the gene product thereof is the activity of b2121-protein.

[10335] Accordingly, in one embodiment, the process of the present invention for producing glutamine in a non-human organism, like a microorganism or a plant or a part thereof, comprises increasing or generating the activity of a gene product with the activity of a gene product conferring the activity of “b2121-protein”, especially from Escherichia coli or its functional equivalent or its homolog, e.g. the increase of
[10336] (a) a gene product of a gene comprising the nucleic acid molecule as shown in the respective line in column 5 of Table I, application no. 2, preferably the coding region thereof, or a homolog or a fragment thereof, and being depicted in the same respective line as said B2121, or a functional equivalent or a homolog thereof as shown in column 8 of Table I, application no. 2, preferably the coding region thereof, particularly a homolog or functional equivalent as shown in column 8 of Table I B, application no. 2, and being depicted in the same respective line as said B2121, and preferably the activity is increased non-targeted, or
[10337] (b) a polypeptide comprising a polypeptide, a consensus sequence or at least a polypeptide motif as shown in the respective line in column 5 of Table II or in column 8 of Table IV, application no. 2, respectively, and being depicted in the same respective line as said B2121, or a functional equivalent or a homolog thereof as depicted in column 8 of Table II, application no. 2, preferably a homolog or functional equivalent as depicted in column 8 of Table II B, application no. 2, and being depicted in the same respective line as said B2121, and preferably the activity is increased non-targeted.

[10338] Accordingly, in one embodiment, the molecule which activity is to be increased in the process of the invention is the gene product with an activity as a “b2121-protein”, preferably it is the molecule of section (a) or (b) of this paragraph.

[10339] In particular, it was observed that in plants, especially in Arabidopsis thaliana, increasing or generating the activity of a gene product non-targeted with the activity of a “b2121-protein”, preferably being encoded by a gene comprising the nucleic acid sequence SEQ ID NO. 39013, preferably the coding region thereof, conferred the production of or the increase in glutamine compared with the wild type control.

[10340] The nucleic acid sequence of B2178 from Escherichia coli, e.g. as shown in the respective line in column 5 of Table I, application no. 2, has been published in Blattner et al., Science 277 (5331), 1453 (1997)). And the activity of the gene product thereof is the activity of ABC transporter permease protein.

[10341] Accordingly, in one embodiment, the process of the present invention for producing glutamate in a non-human organism, like a microorganism or a plant or a part thereof, comprises increasing or generating the activity of a gene product with the activity of a gene product conferring the activity of “ABC transporter permease protein”, especially from Escherichia coli or its functional equivalent or its homolog, e.g. the increase of
[10342] (a) a gene product of a gene comprising the nucleic acid molecule as shown in the respective line in column 5 of Table I, application no. 2, preferably the coding region thereof, or a homolog or a fragment thereof, and being depicted in the same respective line as said B2178, or a functional equivalent or a homolog thereof as shown in column 8 of Table I, application no. 2, preferably the coding region thereof, particularly a homolog or functional equivalent as shown in column 8 of Table I B, application no. 2, and being depicted in the same respective line as said B2178, and preferably the activity is increased non-targeted, or
[10343] (b) a polypeptide comprising a polypeptide, a consensus sequence or at least a polypeptide motif as shown in the respective line in column 5 of Table II or in column 8 of Table IV, application no. 2, respectively, and being depicted in the same respective line as said B2178, or a functional equivalent or a homolog thereof as depicted in column 8 of Table II, application no. 2, preferably a homolog or functional equivalent as depicted in column 8 of Table II B, application no. 2, and being depicted in the same respective line as said B2178, and preferably the activity is increased non-targeted.

[10344] Accordingly, in one embodiment, the molecule which activity is to be increased in the process of the invention is the gene product with an activity as a “ABC transporter permease protein”, preferably it is the molecule of section (a) or (b) of this paragraph.

[10345] In particular, it was observed that in plants, especially in Arabidopsis thaliana, increasing or generating the activity of a gene product non-targeted with the activity of a “ABC transporter permease protein”, preferably being encoded by a gene comprising the nucleic acid sequence SEQ ID NO. 39040, preferably the coding region thereof, conferred the production of or the increase in glutamate compared with the wild type control.

[10346] The nucleic acid sequence of B2178 from Escherichia coli, e.g. as shown in the respective line in column 5 of Table I, application no. 2, has been published in Blattner et al., Science 277 (5331), 1453 (1997)). And the activity of the gene product thereof is the activity of ABC transporter permease protein.

[10347] Accordingly, in one embodiment, the process of the present invention for producing glutamine in a non-human organism, like a microorganism or a plant or a part thereof, comprises increasing or generating the activity of a gene product with the activity of a gene product conferring the activity of “ABC transporter permease protein”, especially from Escherichia coli or its functional equivalent or its homolog, e.g. the increase of
[10348] (a) a gene product of a gene comprising the nucleic acid molecule as shown in the respective line in column 5 of Table I, application no. 2, preferably the coding region thereof, or a homolog or a fragment thereof, and being depicted in the same respective line as said B2178, or a functional equivalent or a homolog thereof as shown in column 8 of Table I, application no. 2, preferably the coding region thereof, particularly a homolog or functional equivalent as shown in column 8 of Table I B, application no. 2, and being depicted in the same respective line as said B2178, and preferably the activity is increased non-targeted, or
[10349] (b) a polypeptide comprising a polypeptide, a consensus sequence or at least a polypeptide motif as shown in the respective line in column 5 of Table II or in column 8 of Table IV, application no. 2, respectively, and being depicted in the same respective line as said B2178, or a functional equivalent or a homolog thereof as depicted in column 8 of Table II, application no. 2, preferably a homolog or functional equivalent as depicted in column 8 of Table II B, application no. 2, and being depicted in the same respective line as said B2178, and preferably the activity is increased non-targeted.

[10350] Accordingly, in one embodiment, the molecule which activity is to be increased in the process of the invention is the gene product with an activity as a “ABC transporter permease protein”, preferably it is the molecule of section (a) or (b) of this paragraph.

[10351] In particular, it was observed that in plants, especially in Arabidopsis thaliana, increasing or generating the activity of a gene product non-targeted with the activity of a “ABC transporter permease protein”, preferably being encoded by a gene comprising the nucleic acid sequence SEQ ID NO. 39040, preferably the coding region thereof, conferred the production of or the increase in glutamine compared with the wild type control.

[10352] The nucleic acid sequence of B2178 from Escherichia coli, e.g. as shown in the respective line in column 5 of Table I, application no. 2, has been published in Blattner et al., Science 277 (5331), 1453 (1997)). And the activity of the gene product thereof is the activity of ABC transporter permease protein.

[10353] Accordingly, in one embodiment, the process of the present invention for producing proline in a non-human organism, like a microorganism or a plant or a part thereof, comprises increasing or generating the activity of a gene product with the activity of a gene product conferring the activity of “ABC transporter permease protein”, especially from Escherichia coli or its functional equivalent or its homolog, e.g. the increase of
[10354] (a) a gene product of a gene comprising the nucleic acid molecule as shown in the respective line in column 5 of Table I, application no. 2, preferably the coding region thereof, or a homolog or a fragment thereof, and being depicted in the same respective line as said B2178, or a functional equivalent or a homolog thereof as shown in column 8 of Table I, application no. 2, preferably the coding region thereof, particularly a homolog or functional equivalent as shown in column 8 of Table I B, application no. 2, and being depicted in the same respective line as said B2178, and preferably the activity is increased non-targeted, or
[10355] (b) a polypeptide comprising a polypeptide, a consensus sequence or at least a polypeptide motif as shown in the respective line in column 5 of Table II or in column 8 of Table IV, application no. 2, respectively, and being depicted in the same respective line as said B2178, or a functional equivalent or a homolog thereof as depicted in column 8 of Table II, application no. 2, preferably a homolog or functional equivalent as depicted in column 8 of Table II B, application no. 2, and being depicted in the same respective line as said B2178, and preferably the activity is increased non-targeted.

[10356] Accordingly, in one embodiment, the molecule which activity is to be increased in the process of the invention is the gene product with an activity as a “ABC transporter permease protein”, preferably it is the molecule of section (a) or (b) of this paragraph.

[10357] In particular, it was observed that in plants, especially in Arabidopsis thaliana, increasing or generating the activity of a gene product non-targeted with the activity of a “ABC transporter permease protein”, preferably being encoded by a gene comprising the nucleic acid sequence SEQ ID NO. 39040, preferably the coding region thereof, conferred the production of or the increase in proline compared with the wild type control.

[10358] The nucleic acid sequence of B2281 from Escherichia coli, e.g. as shown in the respective line in column 5 of Table I, application no. 2, has been published in Blattner et al., Science 277 (5331), 1453 (1997)). And the activity of the gene product thereof is the activity of NADH dehydrogenase I chain I.

[10359] Accordingly, in one embodiment, the process of the present invention for producing glutamine in a non-human organism, like a microorganism or a plant or a part thereof, comprises increasing or generating the activity of a gene product with the activity of a gene product conferring the activity of “NADH dehydrogenase I chain I”, especially from Escherichia coli or its functional equivalent or its homolog, e.g. the increase of
[10360] (a) a gene product of a gene comprising the nucleic acid molecule as shown in the respective line in column 5 of Table I, application no. 2, preferably the coding region thereof, or a homolog or a fragment thereof, and being depicted in the same respective line as said B2281, or a functional equivalent or a homolog thereof as shown in column 8 of Table I, application no. 2, preferably the coding region thereof, particularly a homolog or functional equivalent as shown in column 8 of Table I B, application no. 2, and being depicted in the same respective line as said B2281, and preferably the activity is increased non-targeted, or
[10361] (b) a polypeptide comprising a polypeptide, a consensus sequence or at least a polypeptide motif as shown in the respective line in column 5 of Table II or in column 8 of Table IV, application no. 2, respectively, and being depicted in the same respective line as said B2281, or a functional equivalent or a homolog thereof as depicted in column 8 of Table II, application no. 2, preferably a homolog or functional equivalent as depicted in column 8 of Table II B, application no. 2, and being depicted in the same respective line as said B2281, and preferably the activity is increased non-targeted.

[10362] Accordingly, in one embodiment, the molecule which activity is to be increased in the process of the invention is the gene product with an activity as a “NADH dehydrogenase I chain I”, preferably it is the molecule of section (a) or (b) of this paragraph.

[10363] In particular, it was observed that in plants, especially in Arabidopsis thaliana, increasing or generating the activity of a gene product non-targeted with the activity of a “NADH dehydrogenase I chain I”, preferably being encoded by a gene comprising the nucleic acid sequence SEQ ID NO. 39120, preferably the coding region thereof, conferred the production of or the increase in glutamine compared with the wild type control.

[10364] The nucleic acid sequence of B2360 from Escherichia coli, e.g. as shown in the respective line in column 5 of Table I, application no. 2, has been published in Blattner et al., Science 277 (5331), 1453 (1997)). And the activity of the gene product thereof is the activity of b2360-protein.

[10365] Accordingly, in one embodiment, the process of the present invention for producing glutamate in a non-human organism, like a microorganism or a plant or a part thereof, comprises increasing or generating the activity of a gene product with the activity of a gene product conferring the activity of “b2360-protein”, especially from Escherichia coli or its functional equivalent or its homolog, e.g. the increase of
[10366] (a) a gene product of a gene comprising the nucleic acid molecule as shown in the respective line in column 5 of Table I, application no. 2, preferably the coding region thereof, or a homolog or a fragment thereof, and being depicted in the same respective line as said B2360, or a functional equivalent or a homolog thereof as shown in column 8 of Table I, application no. 2, preferably the coding region thereof, particularly a homolog or functional equivalent as shown in column 8 of Table I B, application no. 2, and being depicted in the same respective line as said B2360, and preferably the activity is increased non-targeted, or
[10367] (b) a polypeptide comprising a polypeptide, a consensus sequence or at least a polypeptide motif as shown in the respective line in column 5 of Table II or in column 8 of Table IV, application no. 2, respectively, and being depicted in the same respective line as said B2360, or a functional equivalent or a homolog thereof as depicted in column 8 of Table II, application no. 2, preferably a homolog or functional equivalent as depicted in column 8 of Table II B, application no. 2, and being depicted in the same respective line as said B2360, and preferably the activity is increased non-targeted.

[10368] Accordingly, in one embodiment, the molecule which activity is to be increased in the process of the invention is the gene product with an activity as a “b2360-protein”, preferably it is the molecule of section (a) or (b) of this paragraph.

[10369] In particular, it was observed that in plants, especially in Arabidopsis thaliana, increasing or generating the activity of a gene product non-targeted with the activity of a “b2360-protein”, preferably being encoded by a gene comprising the nucleic acid sequence SEQ ID NO. 39219, preferably the coding region thereof, conferred the production of or the increase in glutamate compared with the wild type control.

[10370] The nucleic acid sequence of B2399 from Escherichia coli, e.g. as shown in the respective line in column 5 of Table I, application no. 2, has been published in Blattner et al., Science 277 (5331), 1453 (1997)). And the activity of the gene product thereof is the activity of b2399-protein.

[10371] Accordingly, in one embodiment, the process of the present invention for producing proline in a non-human organism, like a microorganism or a plant or a part thereof, comprises increasing or generating the activity of a gene product with the activity of a gene product conferring the activity of “b2399-protein”, especially from Escherichia coli or its functional equivalent or its homolog, e.g. the increase of
[10372] (a) a gene product of a gene comprising the nucleic acid molecule as shown in the respective line in column 5 of Table I, application no. 2, preferably the coding region thereof, or a homolog or a fragment thereof, and being depicted in the same respective line as said B2399, or a functional equivalent or a homolog thereof as shown in column 8 of Table I, application no. 2, preferably the coding region thereof, particularly a homolog or functional equivalent as shown in column 8 of Table I B, application no. 2, and being depicted in the same respective line as said B2399, and preferably the activity is increased non-targeted, or
[10373] (b) a polypeptide comprising a polypeptide, a consensus sequence or at least a polypeptide motif as shown in the respective line in column 5 of Table II or in column 8 of Table IV, application no. 2, respectively, and being depicted in the same respective line as said B2399, or a functional equivalent or a homolog thereof as depicted in column 8 of Table II, application no. 2, preferably a homolog or functional equivalent as depicted in column 8 of Table II B, application no. 2, and being depicted in the same respective line as said B2399, and preferably the activity is increased non-targeted.

[10374] Accordingly, in one embodiment, the molecule which activity is to be increased in the process of the invention is the gene product with an activity as a “b2399-protein”, preferably it is the molecule of section (a) or (b) of this paragraph.

[10375] In particular, it was observed that in plants, especially in Arabidopsis thaliana, increasing or generating the activity of a gene product non-targeted with the activity of a “b2399-protein”, preferably being encoded by a gene comprising the nucleic acid sequence SEQ ID NO. 39237, preferably the coding region thereof, conferred the production of or the increase in proline compared with the wild type control.

[10376] The nucleic acid sequence of B2405 from Escherichia coli, e.g. as shown in the respective line in column 5 of Table I, application no. 2, has been published in Blattner et al., Science 277 (5331), 1453 (1997)). And the activity of the gene product thereof is the activity of transcriptional regulator.

[10377] Accordingly, in one embodiment, the process of the present invention for producing glutamate in a non-human organism, like a microorganism or a plant or a part thereof, comprises increasing or generating the activity of a gene product with the activity of a gene product conferring the activity of “transcriptional regulator”, especially from Escherichia coli or its functional equivalent or its homolog, e.g. the increase of
[10378] (a) a gene product of a gene comprising the nucleic acid molecule as shown in the respective line in column 5 of Table I, application no. 2, preferably the coding region thereof, or a homolog or a fragment thereof, and being depicted in the same respective line as said B2405, or a functional equivalent or a homolog thereof as shown in column 8 of Table I, application no. 2, preferably the coding region thereof, particularly a homolog or functional equivalent as shown in column 8 of Table I B, application no. 2, and being depicted in the same respective line as said B2405, and preferably the activity is increased non-targeted, or
[10379] (b) a polypeptide comprising a polypeptide, a consensus sequence or at least a polypeptide motif as shown in the respective line in column 5 of Table II or in column 8 of Table IV, application no. 2, respectively, and being depicted in the same respective line as said B2405, or a functional equivalent or a homolog thereof as depicted in column 8 of Table II, application no. 2, preferably a homolog or functional equivalent as depicted in column 8 of Table II B, application no. 2, and being depicted in the same respective line as said B2405, and preferably the activity is increased non-targeted.

[10380] Accordingly, in one embodiment, the molecule which activity is to be increased in the process of the invention is the gene product with an activity as a “transcriptional regulator”, preferably it is the molecule of section (a) or (b) of this paragraph.

[10381] In particular, it was observed that in plants, especially in Arabidopsis thaliana, increasing or generating the activity of a gene product non-targeted with the activity of a “transcriptional regulator”, preferably being encoded by a gene comprising the nucleic acid sequence SEQ ID NO. 39255, preferably the coding region thereof, conferred the production of or the increase in glutamate compared with the wild type control.

[10382] The nucleic acid sequence of B2414 from Escherichia coli, e.g. as shown in the respective line in column 5 of Table I, application no. 2, has been published in Blattner et al., Science 277 (5331), 1453 (1997)). And the activity of the gene product thereof is the activity of cysteine synthase A.

[10383] Accordingly, in one embodiment, the process of the present invention for producing arginine in a non-human organism, like a microorganism or a plant or a part thereof, comprises increasing or generating the activity of a gene product with the activity of a gene product conferring the activity of “cysteine synthase A”, especially from Escherichia coli or its functional equivalent or its homolog, e.g. the increase of
[10384] (a) a gene product of a gene comprising the nucleic acid molecule as shown in the respective line in column 5 of Table I, application no. 2, preferably the coding region thereof, or a homolog or a fragment thereof, and being depicted in the same respective line as said B2414, or a functional equivalent or a homolog thereof as shown in column 8 of Table I, application no. 2, preferably the coding region thereof, particularly a homolog or functional equivalent as shown in column 8 of Table I B, application no. 2, and being depicted in the same respective line as said B2414, and preferably the activity is increased non-targeted, or
[10385] (b) a polypeptide comprising a polypeptide, a consensus sequence or at least a polypeptide motif as shown in the respective line in column 5 of Table II or in column 8 of Table IV, application no. 2, respectively, and being depicted in the same respective line as said B2414, or a functional equivalent or a homolog thereof as depicted in column 8 of Table II, application no. 2, preferably a homolog or functional equivalent as depicted in column 8 of Table II B, application no. 2, and being depicted in the same respective line as said B2414, and preferably the activity is increased non-targeted.

[10386] Accordingly, in one embodiment, the molecule which activity is to be increased in the process of the invention is the gene product with an activity as a “cysteine synthase A”, preferably it is the molecule of section (a) or (b) of this paragraph.

[10387] In particular, it was observed that in plants, especially in Arabidopsis thaliana, increasing or generating the activity of a gene product non-targeted with the activity of a “cysteine synthase A”, preferably being encoded by a gene comprising the nucleic acid sequence SEQ ID NO. 39300, preferably the coding region thereof, conferred the production of or the increase in arginine compared with the wild type control.

[10388] The nucleic acid sequence of B2414 from Escherichia coli, e.g. as shown in the respective line in column 5 of Table I, application no. 2, has been published in Blattner et al., Science 277 (5331), 1453 (1997)). And the activity of the gene product thereof is the activity of cysteine synthase A.

[10389] Accordingly, in one embodiment, the process of the present invention for producing glutamate in a non-human organism, like a microorganism or a plant or a part thereof, comprises increasing or generating the activity of a gene product with the activity of a gene product conferring the activity of “cysteine synthase A”, especially from Escherichia coli or its functional equivalent or its homolog, e.g. the increase of
[10390] (a) a gene product of a gene comprising the nucleic acid molecule as shown in the respective line in column 5 of Table I, application no. 2, preferably the coding region thereof, or a homolog or a fragment thereof, and being depicted in the same respective line as said B2414, or a functional equivalent or a homolog thereof as shown in column 8 of Table I, application no. 2, preferably the coding region thereof, particularly a homolog or functional equivalent as shown in column 8 of Table I B, application no. 2, and being depicted in the same respective line as said B2414, and preferably the activity is increased non-targeted, or
[10391] (b) a polypeptide comprising a polypeptide, a consensus sequence or at least a polypeptide motif as shown in the respective line in column 5 of Table II or in column 8 of Table IV, application no. 2, respectively, and being depicted in the same respective line as said B2414, or a functional equivalent or a homolog thereof as depicted in column 8 of Table II, application no. 2, preferably a homolog or functional equivalent as depicted in column 8 of Table II B, application no. 2, and being depicted in the same respective line as said B2414, and preferably the activity is increased non-targeted.

[10392] Accordingly, in one embodiment, the molecule which activity is to be increased in the process of the invention is the gene product with an activity as a “cysteine synthase A”, preferably it is the molecule of section (a) or (b) of this paragraph.

[10393] In particular, it was observed that in plants, especially in Arabidopsis thaliana, increasing or generating the activity of a gene product non-targeted with the activity of a “cysteine synthase A”, preferably being encoded by a gene comprising the nucleic acid sequence SEQ ID NO. 39300, preferably the coding region thereof, conferred the production of or the increase in glutamate compared with the wild type control.

[10394] The nucleic acid sequence of B2461 from Escherichia coli, e.g. as shown in the respective line in column 5 of Table I, application no. 2, has been published in Blattner et al., Science 277 (5331), 1453 (1997)). And the activity of the gene product thereof is the activity of ethanolamine utilization protein.

[10395] Accordingly, in one embodiment, the process of the present invention for producing proline in a non-human organism, like a microorganism or a plant or a part thereof, comprises increasing or generating the activity of a gene product with the activity of a gene product conferring the activity of “ethanolamine utilization protein”, especially from Escherichia coli or its functional equivalent or its homolog, e.g. the increase of
[10396] (a) a gene product of a gene comprising the nucleic acid molecule as shown in the respective line in column 5 of Table I, application no. 2, preferably the coding region thereof, or a homolog or a fragment thereof, and being depicted in the same respective line as said B2461, or a functional equivalent or a homolog thereof as shown in column 8 of Table I, application no. 2, preferably the coding region thereof, particularly a homolog or functional equivalent as shown in column 8 of Table I B, application no. 2, and being depicted in the same respective line as said B2461, and preferably the activity is increased non-targeted, or
[10397] (b) a polypeptide comprising a polypeptide, a consensus sequence or at least a polypeptide motif as shown in the respective line in column 5 of Table II or in column 8 of Table IV, application no. 2, respectively, and being depicted in the same respective line as said B2461, or a functional equivalent or a homolog thereof as depicted in column 8 of Table II, application no. 2, preferably a homolog or functional equivalent as depicted in column 8 of Table II B, application no. 2, and being depicted in the same respective line as said B2461, and preferably the activity is increased non-targeted.

[10398] Accordingly, in one embodiment, the molecule which activity is to be increased in the process of the invention is the gene product with an activity as a “ethanolamine utilization protein”, preferably it is the molecule of section (a) or (b) of this paragraph.

[10399] In particular, it was observed that in plants, especially in Arabidopsis thaliana, increasing or generating the activity of a gene product non-targeted with the activity of a “ethanolamine utilization protein”, preferably being encoded by a gene comprising the nucleic acid sequence SEQ ID NO. 40299, preferably the coding region thereof, conferred the production of or the increase in proline compared with the wild type control.

[10400] The nucleic acid sequence of B2474 from Escherichia coli, e.g. as shown in the respective line in column 5 of Table I, application no. 2, has been published in Blattner et al., Science 277 (5331), 1453 (1997)). And the activity of the gene product thereof is the activity of b2474-protein.

[10401] Accordingly, in one embodiment, the process of the present invention for producing proline in a non-human organism, like a microorganism or a plant or a part thereof, comprises increasing or generating the activity of a gene product with the activity of a gene product conferring the activity of “b2474-protein”, especially from Escherichia coli or its functional equivalent or its homolog, e.g. the increase of
[10402] (a) a gene product of a gene comprising the nucleic acid molecule as shown in the respective line in column 5 of Table I, application no. 2, preferably the coding region thereof, or a homolog or a fragment thereof, and being depicted in the same respective line as said B2474, or a functional equivalent or a homolog thereof as shown in column 8 of Table I, application no. 2, preferably the coding region thereof, particularly a homolog or functional equivalent as shown in column 8 of Table I B, application no. 2, and being depicted in the same respective line as said B2474, and preferably the activity is increased non-targeted, or
[10403] (b) a polypeptide comprising a polypeptide, a consensus sequence or at least a polypeptide motif as shown in the respective line in column 5 of Table II or in column 8 of Table IV, application no. 2, respectively, and being depicted in the same respective line as said B2474, or a functional equivalent or a homolog thereof as depicted in column 8 of Table II, application no. 2, preferably a homolog or functional equivalent as depicted in column 8 of Table II B, application no. 2, and being depicted in the same respective line as said B2474, and preferably the activity is increased non-targeted,.

[10404] Accordingly, in one embodiment, the molecule which activity is to be increased in the process of the invention is the gene product with an activity as a “b2474-protein”, preferably it is the molecule of section (a) or (b) of this paragraph.

[10405] In particular, it was observed that in plants, especially in Arabidopsis thaliana, increasing or generating the activity of a gene product non-targeted with the activity of a “b2474-protein”, preferably being encoded by a gene comprising the nucleic acid sequence SEQ ID NO. 40329, preferably the coding region thereof, conferred the production of or the increase in proline compared with the wild type control.

[10406] The nucleic acid sequence of B2513 from Escherichia coli, e.g. as shown in the respective line in column 5 of Table I, application no. 2, has been published in Blattner et al., Science 277 (5331), 1453 (1997)). And the activity of the gene product thereof is the activity of b2513-protein.

[10407] Accordingly, in one embodiment, the process of the present invention for producing glutamate in a non-human organism, like a microorganism or a plant or a part thereof, comprises increasing or generating the activity of a gene product with the activity of a gene product conferring the activity of “b2513-protein”, especially from Escherichia coli or its functional equivalent or its homolog, e.g. the increase of
[10408] (a) a gene product of a gene comprising the nucleic acid molecule as shown in the respective line in column 5 of Table I, application no. 2, preferably the coding region thereof, or a homolog or a fragment thereof, and being depicted in the same respective line as said B2513, or a functional equivalent or a homolog thereof as shown in column 8 of Table I, application no. 2, preferably the coding region thereof, particularly a homolog or functional equivalent as shown in column 8 of Table I B, application no. 2, and being depicted in the same respective line as said B2513, and preferably the activity is increased non-targeted, or
[10409] (b) a polypeptide comprising a polypeptide, a consensus sequence or at least a polypeptide motif as shown in the respective line in column 5 of Table II or in column 8 of Table IV, application no. 2, respectively, and being depicted in the same respective line as said B2513, or a functional equivalent or a homolog thereof as depicted in column 8 of Table II, application no. 2, preferably a homolog or functional equivalent as depicted in column 8 of Table II B, application no. 2, and being depicted in the same respective line as said B2513, and preferably the activity is increased non-targeted.

[10410] Accordingly, in one embodiment, the molecule which activity is to be increased in the process of the invention is the gene product with an activity as a “b2513-protein”, preferably it is the molecule of section (a) or (b) of this paragraph.

[10411] In particular, it was observed that in plants, especially in Arabidopsis thaliana, increasing or generating the activity of a gene product non-targeted with the activity of a “b2513-protein”, preferably being encoded by a gene comprising the nucleic acid sequence SEQ ID NO. 9167, preferably the coding region thereof, conferred the production of or the increase in glutamate compared with the wild type control.

[10412] The nucleic acid sequence of B2513 from Escherichia coli, e.g. as shown in the respective line in column 5 of Table I, application no. 2, has been published in Blattner et al., Science 277 (5331), 1453 (1997)). And the activity of the gene product thereof is the activity of b2513-protein.

[10413] Accordingly, in one embodiment, the process of the present invention for producing glutamine in a non-human organism, like a microorganism or a plant or a part thereof, comprises increasing or generating the activity of a gene product with the activity of a gene product conferring the activity of “b2513-protein”, especially from Escherichia coli or its functional equivalent or its homolog, e.g. the increase of
[10414] (a) a gene product of a gene comprising the nucleic acid molecule as shown in the respective line in column 5 of Table I, application no. 2, preferably the coding region thereof, or a homolog or a fragment thereof, and being depicted in the same respective line as said B2513, or a functional equivalent or a homolog thereof as shown in column 8 of Table I, application no. 2, preferably the coding region thereof, particularly a homolog or functional equivalent as shown in column 8 of Table I B, application no. 2, and being depicted in the same respective line as said B2513, and preferably the activity is increased non-targeted, or
[10415] (b) a polypeptide comprising a polypeptide, a consensus sequence or at least a polypeptide motif as shown in the respective line in column 5 of Table II or in column 8 of Table IV, application no. 2, respectively, and being depicted in the same respective line as said B2513, or a functional equivalent or a homolog thereof as depicted in column 8 of Table II, application no. 2, preferably a homolog or functional equivalent as depicted in column 8 of Table II B, application no. 2, and being depicted in the same respective line as said B2513, and preferably the activity is increased non-targeted.

[10416] Accordingly, in one embodiment, the molecule which activity is to be increased in the process of the invention is the gene product with an activity as a “b2513-protein”, preferably it is the molecule of section (a) or (b) of this paragraph.

[10417] In particular, it was observed that in plants, especially in Arabidopsis thaliana, increasing or generating the activity of a gene product non-targeted with the activity of a “b2513-protein”, preferably being encoded by a gene comprising the nucleic acid sequence SEQ ID NO. 9167, preferably the coding region thereof, conferred the production of or the increase in glutamine compared with the wild type control.

[10418] The nucleic acid sequence of B2541 from Escherichia coli, e.g. as shown in the respective line in column 5 of Table I, application no. 2, has been published in Blattner et al., Science 277 (5331), 1453 (1997)). And the activity of the gene product thereof is the activity of 2,3-dihydroxy-2,3-dihydrophenylpropionatedehydrogenase.

[10419] Accordingly, in one embodiment, the process of the present invention for producing arginine in a non-human organism, like a microorganism or a plant or a part thereof, comprises increasing or generating the activity of a gene product with the activity of a gene product conferring the activity of “2,3-dihydroxy-2,3-dihydrophenylpropionatedehydrogenase”, especially from Escherichia coli or its functional equivalent or its homolog, e.g. the increase of
[10420] (a) a gene product of a gene comprising the nucleic acid molecule as shown in the respective line in column 5 of Table I, application no. 2, preferably the coding region thereof, or a homolog or a fragment thereof, and being depicted in the same respective line as said B2541, or a functional equivalent or a homolog thereof as shown in column 8 of Table I, application no. 2, preferably the coding region thereof, particularly a homolog or functional equivalent as shown in column 8 of Table I B, application no. 2, and being depicted in the same respective line as said B2541, and preferably the activity is increased non-targeted, or
[10421] (b) a polypeptide comprising a polypeptide, a consensus sequence or at least a polypeptide motif as shown in the respective line in column 5 of Table II or in column 8 of Table IV, application no. 2, respectively, and being depicted in the same respective line as said B2541, or a functional equivalent or a homolog thereof as depicted in column 8 of Table II, application no. 2, preferably a homolog or functional equivalent as depicted in column 8 of Table II B, application no. 2, and being depicted in the same respective line as said B2541, and preferably the activity is increased non-targeted.

[10422] Accordingly, in one embodiment, the molecule which activity is to be increased in the process of the invention is the gene product with an activity as a “2,3-dihydroxy-2,3-dihydrophenylpropionatedehydrogenase”, preferably it is the molecule of section (a) or (b) of this paragraph.

[10423] In particular, it was observed that in plants, especially in Arabidopsis thaliana, increasing or generating the activity of a gene product non-targeted with the activity of a “2,3-dihydroxy-2,3-dihydrophenylpropionatedehydrogenase”, preferably being encoded by a gene comprising the nucleic acid sequence SEQ ID NO. 40383, preferably the coding region thereof, conferred the production of or the increase in arginine compared with the wild type control.

[10424] CHECK The nucleic acid sequence of B2541 from Escherichia coli, e.g. as shown in the respective line in column 5 of Table I, application no. 2, has been published in Blattner et al., Science 277 (5331), 1453 (1997)). And the activity of the gene product thereof is the activity of 2,3-dihydroxy-2,3-dihydrophenylpropionatedehydrogenase.

[10425] Accordingly, in one embodiment, the process of the present invention for producing glutamate in a non-human organism, like a microorganism or a plant or a part thereof, comprises increasing or generating the activity of a gene product with the activity of a gene product conferring the activity of “2,3-dihydroxy-2,3-dihydrophenylpropionatedehydrogenase”, especially from Escherichia coli or its functional equivalent or its homolog, e.g. the increase of
[10426] (a) a gene product of a gene comprising the nucleic acid molecule as shown in the respective line in column 5 of Table I, application no. 2, preferably the coding region thereof, or a homolog or a fragment thereof, and being depicted in the same respective line as said B2541, or a functional equivalent or a homolog thereof as shown in column 8 of Table I, application no. 2, preferably the coding region thereof, particularly a homolog or functional equivalent as shown in column 8 of Table I B, application no. 2, and being depicted in the same respective line as said B2541, and preferably the activity is increased non-targeted, or
[10427] (b) a polypeptide comprising a polypeptide, a consensus sequence or at least a polypeptide motif as shown in the respective line in column 5 of Table II or in column 8 of Table IV, application no. 2, respectively, and being depicted in the same respective line as said B2541, or a functional equivalent or a homolog thereof as depicted in column 8 of Table II, application no. 2, preferably a homolog or functional equivalent as depicted in column 8 of Table II B, application no. 2, and being depicted in the same respective line as said B2541, and preferably the activity is increased non-targeted.

[10428] Accordingly, in one embodiment, the molecule which activity is to be increased in the process of the invention is the gene product with an activity as a “2,3-dihydroxy-2,3-dihydrophenylpropionatedehydrogenase”, preferably it is the molecule of section (a) or (b) of this paragraph.

[10429] In particular, it was observed that in plants, especially in Arabidopsis thaliana, increasing or generating the activity of a gene product non-targeted with the activity of a “2,3-dihydroxy-2,3-dihydrophenylpropionatedehydrogenase”, preferably being encoded by a gene comprising the nucleic acid sequence SEQ ID NO. 40383, preferably the coding region thereof, conferred the production of or the increase in glutamate compared with the wild type control.

[10430] The nucleic acid sequence of B2548 from Escherichia coli, e.g. as shown in the respective line in column 5 of Table I, application no. 2, has been published in Blattner et al., Science 277 (5331), 1453 (1997)). And the activity of the gene product thereof is the activity of b2548-protein.

[10431] Accordingly, in one embodiment, the process of the present invention for producing glutamine in a non-human organism, like a microorganism or a plant or a part thereof, comprises increasing or generating the activity of a gene product with the activity of a gene product conferring the activity of “b2548-protein”, especially from Escherichia coli or its functional equivalent or its homolog, e.g. the increase of
[10432] (a) a gene product of a gene comprising the nucleic acid molecule as shown in the respective line in column 5 of Table I, application no. 2, preferably the coding region thereof, or a homolog or a fragment thereof, and being depicted in the same respective line as said B2548, or a functional equivalent or a homolog thereof as shown in column 8 of Table I, application no. 2, preferably the coding region thereof, particularly a homolog or functional equivalent as shown in column 8 of Table I B, application no. 2, and being depicted in the same respective line as said B2548, and preferably the activity is increased non-targeted, or
[10433] (b) a polypeptide comprising a polypeptide, a consensus sequence or at least a polypeptide motif as shown in the respective line in column 5 of Table II or in column 8 of Table IV, application no. 2, respectively, and being depicted in the same respective line as said B2548, or a functional equivalent or a homolog thereof as depicted in column 8 of Table II, application no. 2, preferably a homolog or functional equivalent as depicted in column 8 of Table II B, application no. 2, and being depicted in the same respective line as said B2548, and preferably the activity is increased non-targeted.

[10434] Accordingly, in one embodiment, the molecule which activity is to be increased in the process of the invention is the gene product with an activity as a “b2548-protein”, preferably it is the molecule of section (a) or (b) of this paragraph.

[10435] In particular, it was observed that in plants, especially in Arabidopsis thaliana, increasing or generating the activity of a gene product non-targeted with the activity of a “b2548-protein”, preferably being encoded by a gene comprising the nucleic acid sequence SEQ ID NO. 40637, preferably the coding region thereof, conferred the production of or the increase in glutamine compared with the wild type control.

[10436] The nucleic acid sequence of B2613 from Escherichia coli, e.g. as shown in the respective line in column 5 of Table I, application no. 2, has been published in Blattner et al., Science 277 (5331), 1453 (1997)). And the activity of the gene product thereof is the activity of b2613-protein.

[10437] Accordingly, in one embodiment, the process of the present invention for producing glutamine in a non-human organism, like a microorganism or a plant or a part thereof, comprises increasing or generating the activity of a gene product with the activity of a gene product conferring the activity of “b2613-protein”, especially from Escherichia coli or its functional equivalent or its homolog, e.g. the increase of
[10438] (a) a gene product of a gene comprising the nucleic acid molecule as shown in the respective line in column 5 of Table I, application no. 2, preferably the coding region thereof, or a homolog or a fragment thereof, and being depicted in the same respective line as said B2613, or a functional equivalent or a homolog thereof as shown in column 8 of Table I, application no. 2, preferably the coding region thereof, particularly a homolog or functional equivalent as shown in column 8 of Table I B, application no. 2, and being depicted in the same respective line as said B2613, and preferably the activity is increased non-targeted, or
[10439] (b) a polypeptide comprising a polypeptide, a consensus sequence or at least a polypeptide motif as shown in the respective line in column 5 of Table II or in column 8 of Table IV, application no. 2, respectively, and being depicted in the same respective line as said B2613, or a functional equivalent or a homolog thereof as depicted in column 8 of Table II, application no. 2, preferably a homolog or functional equivalent as depicted in column 8 of Table II B, application no. 2, and being depicted in the same respective line as said B2613, and preferably the activity is increased non-targeted.

[10440] Accordingly, in one embodiment, the molecule which activity is to be increased in the process of the invention is the gene product with an activity as a “b2613-protein”, preferably it is the molecule of section (a) or (b) of this paragraph.

[10441] In particular, it was observed that in plants, especially in Arabidopsis thaliana, increasing or generating the activity of a gene product non-targeted with the activity of a “b2613-protein”, preferably being encoded by a gene comprising the nucleic acid sequence SEQ ID NO. 40665, preferably the coding region thereof, conferred the production of or the increase in glutamine compared with the wild type control.

[10442] The nucleic acid sequence of B2613 from Escherichia coli, e.g. as shown in the respective line in column 5 of Table I, application no. 2, has been published in Blattner et al., Science 277 (5331), 1453 (1997)). And the activity of the gene product thereof is the activity of b2613-protein.

[10443] Accordingly, in one embodiment, the process of the present invention for producing proline in a non-human organism, like a microorganism or a plant or a part thereof, comprises increasing or generating the activity of a gene product with the activity of a gene product conferring the activity of “b2613-protein”, especially from Escherichia coli or its functional equivalent or its homolog, e.g. the increase of
[10444] (a) a gene product of a gene comprising the nucleic acid molecule as shown in the respective line in column 5 of Table I, application no. 2, preferably the coding region thereof, or a homolog or a fragment thereof, and being depicted in the same respective line as said B2613, or a functional equivalent or a homolog thereof as shown in column 8 of Table I, application no. 2, preferably the coding region thereof, particularly a homolog or functional equivalent as shown in column 8 of Table I B, application no. 2, and being depicted in the same respective line as said B2613, and preferably the activity is increased non-targeted, or
[10445] (b) a polypeptide comprising a polypeptide, a consensus sequence or at least a polypeptide motif as shown in the respective line in column 5 of Table II or in column 8 of Table IV, application no. 2, respectively, and being depicted in the same respective line as said B2613, or a functional equivalent or a homolog thereof as depicted in column 8 of Table II, application no. 2, preferably a homolog or functional equivalent as depicted in column 8 of Table II B, application no. 2, and being depicted in the same respective line as said B2613, and preferably the activity is increased non-targeted.

[10446] Accordingly, in one embodiment, the molecule which activity is to be increased in the process of the invention is the gene product with an activity as a “b2613-protein”, preferably it is the molecule of section (a) or (b) of this paragraph.

[10447] In particular, it was observed that in plants, especially in Arabidopsis thaliana, increasing or generating the activity of a gene product non-targeted with the activity of a “b2613-protein”, preferably being encoded by a gene comprising the nucleic acid sequence SEQ ID NO. 40665, preferably the coding region thereof, conferred the production of or the increase in proline compared with the wild type control.

[10448] The nucleic acid sequence of B2634 from Escherichia coli, e.g. as shown in the respective line in column 5 of Table I, application no. 2, has been published in Blattner et al., Science 277 (5331), 1453 (1997)). And the activity of the gene product thereof is the activity of transcriptional regulator.

[10449] Accordingly, in one embodiment, the process of the present invention for producing glutamate in a non-human organism, like a microorganism or a plant or a part thereof, comprises increasing or generating the activity of a gene product with the activity of a gene product conferring the activity of “transcriptional regulator”, especially from Escherichia coli or its functional equivalent or its homolog, e.g. the increase of
[10450] (a) a gene product of a gene comprising the nucleic acid molecule as shown in the respective line in column 5 of Table I, application no. 2, preferably the coding region thereof, or a homolog or a fragment thereof, and being depicted in the same respective line as said B2634, or a functional equivalent or a homolog thereof as shown in column 8 of Table I, application no. 2, preferably the coding region thereof, particularly a homolog or functional equivalent as shown in column 8 of Table I B, application no. 2, and being depicted in the same respective line as said B2634, and preferably the activity is increased non-targeted, or
[10451] (b) a polypeptide comprising a polypeptide, a consensus sequence or at least a polypeptide motif as shown in the respective line in column 5 of Table II or in column 8 of Table IV, application no. 2, respectively, and being depicted in the same respective line as said B2634, or a functional equivalent or a homolog thereof as depicted in column 8 of Table II, application no. 2, preferably a homolog or functional equivalent as depicted in column 8 of Table II B, application no. 2, and being depicted in the same respective line as said B2634, and preferably the activity is increased non-targeted.

[10452] Accordingly, in one embodiment, the molecule which activity is to be increased in the process of the invention is the gene product with an activity as a “transcriptional regulator”, preferably it is the molecule of section (a) or (b) of this paragraph.

[10453] In particular, it was observed that in plants, especially in Arabidopsis thaliana, increasing or generating the activity of a gene product non-targeted with the activity of a “transcriptional regulator”, preferably being encoded by a gene comprising the nucleic acid sequence SEQ ID NO. 40726, preferably the coding region thereof, conferred the production of or the increase in glutamate compared with the wild type control.

[10454] The nucleic acid sequence of B2634 from Escherichia coli, e.g. as shown in the respective line in column 5 of Table I, application no. 2, has been published in Blattner et al., Science 277 (5331), 1453 (1997)). And the activity of the gene product thereof is the activity of transcriptional regulator.

[10455] Accordingly, in one embodiment, the process of the present invention for producing glutamine in a non-human organism, like a microorganism or a plant or a part thereof, comprises increasing or generating the activity of a gene product with the activity of a gene product conferring the activity of “transcriptional regulator”, especially from Escherichia coli or its functional equivalent or its homolog, e.g. the increase of
[10456] (a) a gene product of a gene comprising the nucleic acid molecule as shown in the respective line in column 5 of Table I, application no. 2, preferably the coding region thereof, or a homolog or a fragment thereof, and being depicted in the same respective line as said B2634, or a functional equivalent or a homolog thereof as shown in column 8 of Table I, application no. 2, preferably the coding region thereof, particularly a homolog or functional equivalent as shown in column 8 of Table I B, application no. 2, and being depicted in the same respective line as said B2634, and preferably the activity is increased non-targeted, or
[10457] (b) a polypeptide comprising a polypeptide, a consensus sequence or at least a polypeptide motif as shown in the respective line in column 5 of Table II or in column 8 of Table IV, application no. 2, respectively, and being depicted in the same respective line as said B2634, or a functional equivalent or a homolog thereof as depicted in column 8 of Table II, application no. 2, preferably a homolog or functional equivalent as depicted in column 8 of Table II B, application no. 2, and being depicted in the same respective line as said B2634, and preferably the activity is increased non-targeted.

[10458] Accordingly, in one embodiment, the molecule which activity is to be increased in the process of the invention is the gene product with an activity as a “transcriptional regulator”, preferably it is the molecule of section (a) or (b) of this paragraph.

[10459] In particular, it was observed that in plants, especially in Arabidopsis thaliana, increasing or generating the activity of a gene product non-targeted with the activity of a “transcriptional regulator”, preferably being encoded by a gene comprising the nucleic acid sequence SEQ ID NO. 40726, preferably the coding region thereof, conferred the production of or the increase in glutamine compared with the wild type control.

[10460] The nucleic acid sequence of B2634 from Escherichia coli, e.g. as shown in the respective line in column 5 of Table I, application no. 2, has been published in S Blattner et al., Science 277 (5331), 1453 (1997)). And the activity of the gene product thereof is the activity of transcriptional regulator.

[10461] Accordingly, in one embodiment, the process of the present invention for producing proline in a non-human organism, like a microorganism or a plant or a part thereof, comprises increasing or generating the activity of a gene product with the activity of a gene product conferring the activity of “transcriptional regulator”, especially from Escherichia coli or its functional equivalent or its homolog, e.g. the increase of
[10462] (a) a gene product of a gene comprising the nucleic acid molecule as shown in the respective line in column 5 of Table I, application no. 2, preferably the coding region thereof, or a homolog or a fragment thereof, and being depicted in the same respective line as said B2634, or a functional equivalent or a homolog thereof as shown in column 8 of Table I, application no. 2, preferably the coding region thereof, particularly a homolog or functional equivalent as shown in column 8 of Table I B, application no. 2, and being depicted in the same respective line as said B2634, and preferably the activity is increased non-targeted, or
[10463] (b) a polypeptide comprising a polypeptide, a consensus sequence or at least a polypeptide motif as shown in the respective line in column 5 of Table II or in column 8 of Table IV, application no. 2, respectively, and being depicted in the same respective line as said B2634, or a functional equivalent or a homolog thereof as depicted in column 8 of Table II, application no. 2, preferably a homolog or functional equivalent as depicted in column 8 of Table II B, application no. 2, and being depicted in the same respective line as said B2634, and preferably the activity is increased non-targeted.

[10464] Accordingly, in one embodiment, the molecule which activity is to be increased in the process of the invention is the gene product with an activity as a “transcriptional regulator”, preferably it is the molecule of section (a) or (b) of this paragraph.

[10465] In particular, it was observed that in plants, especially in Arabidopsis thaliana, increasing or generating the activity of a gene product non-targeted with the activity of a “transcriptional regulator”, preferably being encoded by a gene comprising the nucleic acid sequence SEQ ID NO. 40726, preferably the coding region thereof, conferred the production of or the increase in proline compared with the wild type control.

[10466] The nucleic acid sequence of B2673 from Escherichia coli, e.g. as shown in the respective line in column 5 of Table I, application no. 2, has been published in Blattner et al., Science 277 (5331), 1453 (1997)). And the activity of the gene product thereof is the activity of b2673-protein.

[10467] Accordingly, in one embodiment, the process of the present invention for producing glutamate in a non-human organism, like a microorganism or a plant or a part thereof, comprises increasing or generating the activity of a gene product with the activity of a gene product conferring the activity of “b2673-protein”, especially from Escherichia coli or its functional equivalent or its homolog, e.g. the increase of
[10468] (a) a gene product of a gene comprising the nucleic acid molecule as shown in the respective line in column 5 of Table I, application no. 2, preferably the coding region thereof, or a homolog or a fragment thereof, and being depicted in the same respective line as said B2673, or a functional equivalent or a homolog thereof as shown in column 8 of Table I, application no. 2, preferably the coding region thereof, particularly a homolog or functional equivalent as shown in column 8 of Table I B, application no. 2, and being depicted in the same respective line as said B2673, and preferably the activity is increased non-targeted, or
[10469] (b) a polypeptide comprising a polypeptide, a consensus sequence or at least a polypeptide motif as shown in the respective line in column 5 of Table II or in column 8 of Table IV, application no. 2, respectively, and being depicted in the same respective line as said B2673, or a functional equivalent or a homolog thereof as depicted in column 8 of Table II, application no. 2, preferably a homolog or functional equivalent as depicted in column 8 of Table II B, application no. 2, and being depicted in the same respective line as said B2673, and preferably the activity is increased non-targeted.

[10470] Accordingly, in one embodiment, the molecule which activity is to be increased in the process of the invention is the gene product with an activity as a “b2673-protein”, preferably it is the molecule of section (a) or (b) of this paragraph.

[10471] In particular, it was observed that in plants, especially in Arabidopsis thaliana, increasing or generating the activity of a gene product non-targeted with the activity of a “b2673-protein”, preferably being encoded by a gene comprising the nucleic acid sequence SEQ ID NO. 9244, preferably the coding region thereof, conferred the production of or the increase in glutamate compared with the wild type control.

[10472] The nucleic acid sequence of B2673 from Escherichia coli, e.g. as shown in the respective line in column 5 of Table I, application no. 2, has been published in Blattner et al., Science 277 (5331), 1453 (1997)). And the activity of the gene product thereof is the activity of b2673-protein.

[10473] Accordingly, in one embodiment, the process of the present invention for producing glutamine in a non-human organism, like a microorganism or a plant or a part thereof, comprises increasing or generating the activity of a gene product with the activity of a gene product conferring the activity of “b2673-protein”, especially from Escherichia coli or its functional equivalent or its homolog, e.g. the increase of
[10474] (a) a gene product of a gene comprising the nucleic acid molecule as shown in the respective line in column 5 of Table I, application no. 2, preferably the coding region thereof, or a homolog or a fragment thereof, and being depicted in the same respective line as said B2673, or a functional equivalent or a homolog thereof as shown in column 8 of Table I, application no. 2, preferably the coding region thereof, particularly a homolog or functional equivalent as shown in column 8 of Table I B, application no. 2, and being depicted in the same respective line as said B2673, and preferably the activity is increased non-targeted, or
[10475] (b) a polypeptide comprising a polypeptide, a consensus sequence or at least a polypeptide motif as shown in the respective line in column 5 of Table II or in column 8 of Table IV, application no. 2, respectively, and being depicted in the same respective line as said B2673, or a functional equivalent or a homolog thereof as depicted in column 8 of Table II, application no. 2, preferably a homolog or functional equivalent as depicted in column 8 of Table II B, application no. 2, and being depicted in the same respective line as said B2673, and preferably the activity is increased non-targeted.

[10476] Accordingly, in one embodiment, the molecule which activity is to be increased in the process of the invention is the gene product with an activity as a “b2673-protein”, preferably it is the molecule of section (a) or (b) of this paragraph.

[10477] In particular, it was observed that in plants, especially in Arabidopsis thaliana, increasing or generating the activity of a gene product non-targeted with the activity of a “b2673-protein”, preferably being encoded by a gene comprising the nucleic acid sequence SEQ ID NO. 9244, preferably the coding region thereof, conferred the production of or the increase in glutamine compared with the wild type control.

[10478] The nucleic acid sequence of B2714 from Escherichia coli, e.g. as shown in the respective line in column 5 of Table I, application no. 2, has been published in Blattner et al., Science 277 (5331), 1453 (1997)). And the activity of the gene product thereof is the activity of transcriptional regulator.

[10479] Accordingly, in one embodiment, the process of the present invention for producing glutamine in a non-human organism, like a microorganism or a plant or a part thereof, comprises increasing or generating the activity of a gene product with the activity of a gene product conferring the activity of “transcriptional regulator”, especially from Escherichia coli or its functional equivalent or its homolog, e.g. the increase of
[10480] (a) a gene product of a gene comprising the nucleic acid molecule as shown in the respective line in column 5 of Table I, application no. 2, preferably the coding region thereof, or a homolog or a fragment thereof, and being depicted in the same respective line as said B2714, or a functional equivalent or a homolog thereof as shown in column 8 of Table I, application no. 2, preferably the coding region thereof, particularly a homolog or functional equivalent as shown in column 8 of Table I B, application no. 2, and being depicted in the same respective line as said B2714, and preferably the activity is increased non-targeted, or
[10481] (b) a polypeptide comprising a polypeptide, a consensus sequence or at least a polypeptide motif as shown in the respective line in column 5 of Table II or in column 8 of Table IV, application no. 2, respectively, and being depicted in the same respective line as said B2714, or a functional equivalent or a homolog thereof as depicted in column 8 of Table II, application no. 2, preferably a homolog or functional equivalent as depicted in column 8 of Table II B, application no. 2, and being depicted in the same respective line as said B2714, and preferably the activity is increased non-targeted.

[10482] Accordingly, in one embodiment, the molecule which activity is to be increased in the process of the invention is the gene product with an activity as a “transcriptional regulator”, preferably it is the molecule of section (a) or (b) of this paragraph.

[10483] In particular, it was observed that in plants, especially in Arabidopsis thaliana, increasing or generating the activity of a gene product non-targeted with the activity of a “transcriptional regulator”, preferably being encoded by a gene comprising the nucleic acid sequence SEQ ID NO. 40741, preferably the coding region thereof, conferred the production of or the increase in glutamine compared with the wild type control.

[10484] The nucleic acid sequence of B2714 from Escherichia coli, e.g. as shown in the respective line in column 5 of Table I, application no. 2, has been published in Blattner et al., Science 277 (5331), 1453 (1997)). And the activity of the gene product thereof is the activity of transcriptional regulator.

[10485] Accordingly, in one embodiment, the process of the present invention for producing proline in a non-human organism, like a microorganism or a plant or a part thereof, comprises increasing or generating the activity of a gene product with the activity of a gene product conferring the activity of “transcriptional regulator”, especially from Escherichia coli or its functional equivalent or its homolog, e.g. the increase of
[10486] (a) a gene product of a gene comprising the nucleic acid molecule as shown in the respective line in column 5 of Table I, application no. 2, preferably the coding region thereof, or a homolog or a fragment thereof, and being depicted in the same respective line as said B2714, or a functional equivalent or a homolog thereof as shown in column 8 of Table I, application no. 2, preferably the coding region thereof, particularly a homolog or functional equivalent as shown in column 8 of Table I B, application no. 2, and being depicted in the same respective line as said B2714, and preferably the activity is increased non-targeted, or
[10487] (b) a polypeptide comprising a polypeptide, a consensus sequence or at least a polypeptide motif as shown in the respective line in column 5 of Table II or in column 8 of Table IV, application no. 2, respectively, and being depicted in the same respective line as said B2714, or a functional equivalent or a homolog thereof as depicted in column 8 of Table II, application no. 2, preferably a homolog or functional equivalent as depicted in column 8 of Table II B, application no. 2, and being depicted in the same respective line as said B2714, and preferably the activity is increased non-targeted.

[10488] Accordingly, in one embodiment, the molecule which activity is to be increased in the process of the invention is the gene product with an activity as a “transcriptional regulator”, preferably it is the molecule of section (a) or (b) of this paragraph.

[10489] In particular, it was observed that in plants, especially in Arabidopsis thaliana, increasing or generating the activity of a gene product non-targeted with the activity of a “transcriptional regulator”, preferably being encoded by a gene comprising the nucleic acid sequence SEQ ID NO. 40741, preferably the coding region thereof, conferred the production of or the increase in proline compared with the wild type control.

[10490] The nucleic acid sequence of B2812 from Escherichia coli, e.g. as shown in the respective line in column 5 of Table I, application no. 2, has been published in Blattner et al., Science 277 (5331), 1453 (1997)). And the activity of the gene product thereof is the activity of b2812-protein.

[10491] Accordingly, in one embodiment, the process of the present invention for producing glutamate in a non-human organism, like a microorganism or a plant or a part thereof, comprises increasing or generating the activity of a gene product with the activity of a gene product conferring the activity of “b2812-protein”, especially from Escherichia coli or its functional equivalent or its homolog, e.g. the increase of
[10492] (a) a gene product of a gene comprising the nucleic acid molecule as shown in the respective line in column 5 of Table I, application no. 2, preferably the coding region thereof, or a homolog or a fragment thereof, and being depicted in the same respective line as said B2812, or a functional equivalent or a homolog thereof as shown in column 8 of Table I, application no. 2, preferably the coding region thereof, particularly a homolog or functional equivalent as shown in column 8 of Table I B, application no. 2, and being depicted in the same respective line as said B2812, and preferably the activity is increased non-targeted, or
[10493] (b) a polypeptide comprising a polypeptide, a consensus sequence or at least a polypeptide motif as shown in the respective line in column 5 of Table II or in column 8 of Table IV, application no. 2, respectively, and being depicted in the same respective line as said B2812, or a functional equivalent or a homolog thereof as depicted in column 8 of Table II, application no. 2, preferably a homolog or functional equivalent as depicted in column 8 of Table II B, application no. 2, and being depicted in the same respective line as said B2812, and preferably the activity is increased non-targeted.

[10494] Accordingly, in one embodiment, the molecule which activity is to be increased in the process of the invention is the gene product with an activity as a “b2812-protein”, preferably it is the molecule of section (a) or (b) of this paragraph.

[10495] In particular, it was observed that in plants, especially in Arabidopsis thaliana, increasing or generating the activity of a gene product non-targeted with the activity of a “b2812-protein”, preferably being encoded by a gene comprising the nucleic acid sequence SEQ ID NO. 40795, preferably the coding region thereof, conferred the production of or the increase in glutamate compared with the wild type control.

[10496] The nucleic acid sequence of B2812 from Escherichia coli, e.g. as shown in the respective line in column 5 of Table I, application no. 2, has been published in Blattner et al., Science 277 (5331), 1453 (1997)). And the activity of the gene product thereof is the activity of b2812-protein.

[10497] Accordingly, in one embodiment, the process of the present invention for producing glutamine in a non-human organism, like a microorganism or a plant or a part thereof, comprises increasing or generating the activity of a gene product with the activity of a gene product conferring the activity of “b2812-protein”, especially from Escherichia coli or its functional equivalent or its homolog, e.g. the increase of
[10498] (a) a gene product of a gene comprising the nucleic acid molecule as shown in the respective line in column 5 of Table I, application no. 2, preferably the coding region thereof, or a homolog or a fragment thereof, and being depicted in the same respective line as said B2812, or a functional equivalent or a homolog thereof as shown in column 8 of Table I, application no. 2, preferably the coding region thereof, particularly a homolog or functional equivalent as shown in column 8 of Table I B, application no. 2, and being depicted in the same respective line as said B2812, and preferably the activity is increased non-targeted, or
[10499] (b) a polypeptide comprising a polypeptide, a consensus sequence or at least a polypeptide motif as shown in the respective line in column 5 of Table II or in column 8 of Table IV, application no. 2, respectively, and being depicted in the same respective line as said B2812, or a functional equivalent or a homolog thereof as depicted in column 8 of Table II, application no. 2, preferably a homolog or functional equivalent as depicted in column 8 of Table II B, application no. 2, and being depicted in the same respective line as said B2812, and preferably the activity is increased non-targeted.

[10500] Accordingly, in one embodiment, the molecule which activity is to be increased in the process of the invention is the gene product with an activity as a “b2812-protein”, preferably it is the molecule of section (a) or (b) of this paragraph.

[10501] In particular, it was observed that in plants, especially in Arabidopsis thaliana, increasing or generating the activity of a gene product non-targeted with the activity of a “b2812-protein”, preferably being encoded by a gene comprising the nucleic acid sequence SEQ ID NO. 40795, preferably the coding region thereof, conferred the production of or the increase in glutamine compared with the wild type control.

[10502] The nucleic acid sequence of B2812 from Escherichia coli, e.g. as shown in the respective line in column 5 of Table I, application no. 2, has been published in Blattner et al., Science 277 (5331), 1453 (1997)) . And the activity of the gene product thereof is the activity of b2812-protein.

[10503] Accordingly, in one embodiment, the process of the present invention for producing proline in a non-human organism, like a microorganism or a plant or a part thereof, comprises increasing or generating the activity of a gene product with the activity of a gene product conferring the activity of “b2812-protein”, especially from Escherichia coli or its functional equivalent or its homolog, e.g. the increase of
[10504] (a) a gene product of a gene comprising the nucleic acid molecule as shown in the respective line in column 5 of Table I, application no. 2, preferably the coding region thereof, or a homolog or a fragment thereof, and being depicted in the same respective line as said B2812, or a functional equivalent or a homolog thereof as shown in column 8 of Table I, application no. 2, preferably the coding region thereof, particularly a homolog or functional equivalent as shown in column 8 of Table I B, application no. 2, and being depicted in the same respective line as said B2812, and preferably the activity is increased non-targeted, or
[10505] (b) a polypeptide comprising a polypeptide, a consensus sequence or at least a polypeptide motif as shown in the respective line in column 5 of Table II or in column 8 of Table IV, application no. 2, respectively, and being depicted in the same respective line as said B2812, or a functional equivalent or a homolog thereof as depicted in column 8 of Table II, application no. 2, preferably a homolog or functional equivalent as depicted in column 8 of Table II B, application no. 2, and being depicted in the same respective line as said B2812, and preferably the activity is increased non-targeted.

[10506] Accordingly, in one embodiment, the molecule which activity is to be increased in the process of the invention is the gene product with an activity as a “b2812-protein”, preferably it is the molecule of section (a) or (b) of this paragraph.

[10507] In particular, it was observed that in plants, especially in Arabidopsis thaliana, increasing or generating the activity of a gene product non-targeted with the activity of a “b2812-protein”, preferably being encoded by a gene comprising the nucleic acid sequence SEQ ID NO. 40795, preferably the coding region thereof, conferred the production of or the increase in proline compared with the wild type control.

[10508] The nucleic acid sequence of B2846 from Escherichia coli, e.g. as shown in the respective line in column 5 of Table I, application no. 2, has been published in Blattner et al., Science 277 (5331), 1453 (1997)). And the activity of the gene product thereof is the activity of b2846-protein.

[10509] Accordingly, in one embodiment, the process of the present invention for producing proline in a non-human organism, like a microorganism or a plant or a part thereof, comprises increasing or generating the activity of a gene product with the activity of a gene product conferring the activity of “b2846-protein”, especially from Escherichia coli or its functional equivalent or its homolog, e.g. the increase of
[10510] (a) a gene product of a gene comprising the nucleic acid molecule as shown in the respective line in column 5 of Table I, application no. 2, preferably the coding region thereof, or a homolog or a fragment thereof, and being depicted in the same respective line as said B2846, or a functional equivalent or a homolog thereof as shown in column 8 of Table I, application no. 2, preferably the coding region thereof, particularly a homolog or functional equivalent as shown in column 8 of Table I B, application no. 2, and being depicted in the same respective line as said B2846, and preferably the activity is increased non-targeted, or
[10511] (b) a polypeptide comprising a polypeptide, a consensus sequence or at least a polypeptide motif as shown in the respective line in column 5 of Table II or in column 8 of Table IV, application no. 2, respectively, and being depicted in the same respective line as said B2846, or a functional equivalent or a homolog thereof as depicted in column 8 of Table II, application no. 2, preferably a homolog or functional equivalent as depicted in column 8 of Table II B, application no. 2, and being depicted in the same respective line as said B2846, and preferably the activity is increased non-targeted.

[10512] Accordingly, in one embodiment, the molecule which activity is to be increased in the process of the invention is the gene product with an activity as a “b2846-protein”, preferably it is the molecule of section (a) or (b) of this paragraph.

[10513] In particular, it was observed that in plants, especially in Arabidopsis thaliana, increasing or generating the activity of a gene product non-targeted with the activity of a “b2846-protein”, preferably being encoded by a gene comprising the nucleic acid sequence SEQ ID NO. 40984, preferably the coding region thereof, conferred the production of or the increase in proline compared with the wild type control.

[10514] CHECK The nucleic acid sequence of B2909 from Escherichia coli, e.g. as shown in the respective line in column 5 of Table I, application no. 2, has been published in Blattner et al., Science 277 (5331), 1453 (1997)). And the activity of the gene product thereof is the activity of b2909-protein.

[10515] Accordingly, in one embodiment, the process of the present invention for producing arginine in a non-human organism, like a microorganism or a plant or a part thereof, comprises increasing or generating the activity of a gene product with the activity of a gene product conferring the activity of “b2909-protein”, especially from Escherichia coli or its functional equivalent or its homolog, e.g. the increase of
[10516] (a) a gene product of a gene comprising the nucleic acid molecule as shown in the respective line in column 5 of Table I, application no. 2, preferably the coding region thereof, or a homolog or a fragment thereof, and being depicted in the same respective line as said B2909, or a functional equivalent or a homolog thereof as shown in column 8 of Table I, application no. 2, preferably the coding region thereof, particularly a homolog or functional equivalent as shown in column 8 of Table I B, application no. 2, and being depicted in the same respective line as said B2909, and preferably the activity is increased non-targeted, or
[10517] (b) a polypeptide comprising a polypeptide, a consensus sequence or at least a polypeptide motif as shown in the respective line in column 5 of Table II or in column 8 of Table IV, application no. 2, respectively, and being depicted in the same respective line as said B2909, or a functional equivalent or a homolog thereof as depicted in column 8 of Table II, application no. 2, preferably a homolog or functional equivalent as depicted in column 8 of Table II B, application no. 2, and being depicted in the same respective line as said B2909, and preferably the activity is increased non-targeted.

[10518] Accordingly, in one embodiment, the molecule which activity is to be increased in the process of the invention is the gene product with an activity as a “b2909-protein”, preferably it is the molecule of section (a) or (b) of this paragraph.

[10519] In particular, it was observed that in plants, especially in Arabidopsis thaliana, increasing or generating the activity of a gene product non-targeted with the activity of a “b2909-protein”, preferably being encoded by a gene comprising the nucleic acid sequence SEQ ID NO. 41006, preferably the coding region thereof, conferred the production of or the increase in arginine compared with the wild type control.

[10520] The nucleic acid sequence of B2909 from Escherichia coli, e.g. as shown in the respective line in column 5 of Table I, application no. 2, has been published in Blattner et al., Science 277 (5331), 1453 (1997)). And the activity of the gene product thereof is the activity of b2909-protein.

[10521] Accordingly, in one embodiment, the process of the present invention for producing proline in a non-human organism, like a microorganism or a plant or a part thereof, comprises increasing or generating the activity of a gene product with the activity of a gene product conferring the activity of “b2909-protein”, especially from Escherichia coli or its functional equivalent or its homolog, e.g. the increase of
[10522] (a) a gene product of a gene comprising the nucleic acid molecule as shown in the respective line in column 5 of Table I, application no. 2, preferably the coding region thereof, or a homolog or a fragment thereof, and being depicted in the same respective line as said B2909, or a functional equivalent or a homolog thereof as shown in column 8 of Table I, application no. 2, preferably the coding region thereof, particularly a homolog or functional equivalent as shown in column 8 of Table I B, application no. 2, and being depicted in the same respective line as said B2909, and preferably the activity is increased non-targeted, or
[10523] (b) a polypeptide comprising a polypeptide, a consensus sequence or at least a polypeptide motif as shown in the respective line in column 5 of Table II or in column 8 of Table IV, application no. 2, respectively, and being depicted in the same respective line as said B2909, or a functional equivalent or a homolog thereof as depicted in column 8 of Table II, application no. 2, preferably a homolog or functional equivalent as depicted in column 8 of Table II B, application no. 2, and being depicted in the same respective line as said B2909, and preferably the activity is increased non-targeted.

[10524] Accordingly, in one embodiment, the molecule which activity is to be increased in the process of the invention is the gene product with an activity as a “b2909-protein”, preferably it is the molecule of section (a) or (b) of this paragraph.

[10525] In particular, it was observed that in plants, especially in Arabidopsis thaliana, increasing or generating the activity of a gene product non-targeted with the activity of a “b2909-protein”, preferably being encoded by a gene comprising the nucleic acid sequence SEQ ID NO. 41006, preferably the coding region thereof, conferred the production of or the increase in proline compared with the wild type control.

[10526] The nucleic acid sequence of B2914 from Escherichia coli, e.g. as shown in the respective line in column 5 of Table I, application no. 2, has been published in Blattner et al., Science 277 (5331), 1453 (1997)). And the activity of the gene product thereof is the activity of ribosephosphate isomerase, constitutive.

[10527] Accordingly, in one embodiment, the process of the present invention for producing glutamate in a non-human organism, like a microorganism or a plant or a part thereof, comprises increasing or generating the activity of a gene product with the activity of a gene product conferring the activity of “ribosephosphate isomerase, constitutive”, especially from Escherichia coli or its functional equivalent or its homolog, e.g. the increase of
[10528] (a) a gene product of a gene comprising the nucleic acid molecule as shown in the respective line in column 5 of Table I, application no. 2, preferably the coding region thereof, or a homolog or a fragment thereof, and being depicted in the same respective line as said B2914, or a functional equivalent or a homolog thereof as shown in column 8 of Table I, application no. 2, preferably the coding region thereof, particularly a homolog or functional equivalent as shown in column 8 of Table I B, application no. 2, and being depicted in the same respective line as said B2914, and preferably the activity is increased non-targeted, or
[10529] (b) a polypeptide comprising a polypeptide, a consensus sequence or at least a polypeptide motif as shown in the respective line in column 5 of Table II or in column 8 of Table IV, application no. 2, respectively, and being depicted in the same respective line as said B2914, or a functional equivalent or a homolog thereof as depicted in column 8 of Table II, application no. 2, preferably a homolog or functional equivalent as depicted in column 8 of Table II B, application no. 2, and being depicted in the same respective line as said B2914, and preferably the activity is increased non-targeted.

[10530] Accordingly, in one embodiment, the molecule which activity is to be increased in the process of the invention is the gene product with an activity as a “ribosephosphate isomerase, constitutive”, preferably it is the molecule of section (a) or (b) of this paragraph.

[10531] In particular, it was observed that in plants, especially in Arabidopsis thaliana, increasing or generating the activity of a gene product non-targeted with the activity of a “ribosephosphate isomerase, constitutive”, preferably being encoded by a gene comprising the nucleic acid sequence SEQ ID NO. 41073, preferably the coding region thereof, conferred the production of or the increase in glutamate compared with the wild type control.

[10532] The nucleic acid sequence of B2923 from Escherichia coli, e.g. as shown in the respective line in column 5 of Table I, application no. 2, has been published in Blattner et al., Science 277 (5331), 1453 (1997)). And the activity of the gene product thereof is the activity of arginine exporter protein.

[10533] Accordingly, in one embodiment, the process of the present invention for producing glutamate in a non-human organism, like a microorganism or a plant or a part thereof, comprises increasing or generating the activity of a gene product with the activity of a gene product conferring the activity of “arginine exporter protein”, especially from Escherichia coli or its functional equivalent or its homolog, e.g. the increase of
[10534] (a) a gene product of a gene comprising the nucleic acid molecule as shown in the respective line in column 5 of Table I, application no. 2, preferably the coding region thereof, or a homolog or a fragment thereof, and being depicted in the same respective line as said B2923, or a functional equivalent or a homolog thereof as shown in column 8 of Table I, application no. 2, preferably the coding region thereof, particularly a homolog or functional equivalent as shown in column 8 of Table I B, application no. 2, and being depicted in the same respective line as said B2923, and preferably the activity is increased non-targeted, or
[10535] (b) a polypeptide comprising a polypeptide, a consensus sequence or at least a polypeptide motif as shown in the respective line in column 5 of Table II or in column 8 of Table IV, application no. 2, respectively, and being depicted in the same respective line as said B2923, or a functional equivalent or a homolog thereof as depicted in column 8 of Table II, application no. 2, preferably a homolog or functional equivalent as depicted in column 8 of Table II B, application no. 2, and being depicted in the same respective line as said B2923, and preferably the activity is increased non-targeted.

[10536] Accordingly, in one embodiment, the molecule which activity is to be increased in the process of the invention is the gene product with an activity as a “arginine exporter protein”, preferably it is the molecule of section (a) or (b) of this paragraph.

[10537] In particular, it was observed that in plants, especially in Arabidopsis thaliana, increasing or generating the activity of a gene product non-targeted with the activity of a “arginine exporter protein”, preferably being encoded by a gene comprising the nucleic acid sequence SEQ ID NO. 9333, preferably the coding region thereof, conferred the production of or the increase in glutamate compared with the wild type control.

[10538] The nucleic acid sequence of B2936 from Escherichia coli, e.g. as shown in the respective line in column 5 of Table I, application no. 2, has been published in Blattner et al., Science 277 (5331), 1453 (1997)). And the activity of the gene product thereof is the activity of b2936-protein.

[10539] Accordingly, in one embodiment, the process of the present invention for producing proline in a non-human organism, like a microorganism or a plant or a part thereof, comprises increasing or generating the activity of a gene product with the activity of a gene product conferring the activity of “b2936-protein”, especially from Escherichia coli or its functional equivalent or its homolog, e.g. the increase of
[10540] (a) a gene product of a gene comprising the nucleic acid molecule as shown in the respective line in column 5 of Table I, application no. 2, preferably the coding region thereof, or a homolog or a fragment thereof, and being depicted in the same respective line as said B2936, or a functional equivalent or a homolog thereof as shown in column 8 of Table I, application no. 2, preferably the coding region thereof, particularly a homolog or functional equivalent as shown in column 8 of Table I B, application no. 2, and being depicted in the same respective line as said B2936, and preferably the activity is increased non-targeted, or
[10541] (b) a polypeptide comprising a polypeptide, a consensus sequence or at least a polypeptide motif as shown in the respective line in column 5 of Table II or in column 8 of Table IV, application no. 2, respectively, and being depicted in the same respective line as said B2936, or a functional equivalent or a homolog thereof as depicted in column 8 of Table II, application no. 2, preferably a homolog or functional equivalent as depicted in column 8 of Table II B, application no. 2, and being depicted in the same respective line as said B2936, and preferably the activity is increased non-targeted.

[10542] Accordingly, in one embodiment, the molecule which activity is to be increased in the process of the invention is the gene product with an activity as a “b2936-protein”, preferably it is the molecule of section (a) or (b) of this paragraph.

[10543] In particular, it was observed that in plants, especially in Arabidopsis thaliana, increasing or generating the activity of a gene product non-targeted with the activity of a “b2936-protein”, preferably being encoded by a gene comprising the nucleic acid sequence SEQ ID NO. 41442, preferably the coding region thereof, conferred the production of or the increase in proline compared with the wild type control.

[10544] The nucleic acid sequence of B2957 from Escherichia coli, e.g. as shown in the respective line in column 5 of Table I, application no. 2, has been published in Blattner et al., Science 277 (5331), 1453 (1997)). And the activity of the gene product thereof is the activity of L-asparaginase.

[10545] Accordingly, in one embodiment, the process of the present invention for producing proline in a non-human organism, like a microorganism or a plant or a part thereof, comprises increasing or generating the activity of a gene product with the activity of a gene product conferring the activity of “L-asparaginase”, especially from Escherichia coli or its functional equivalent or its homolog, e.g. the increase of
[10546] (a) a gene product of a gene comprising the nucleic acid molecule as shown in the respective line in column 5 of Table I, application no. 2, preferably the coding region thereof, or a homolog or a fragment thereof, and being depicted in the same respective line as said B2957, or a functional equivalent or a homolog thereof as shown in column 8 of Table I, application no. 2, preferably the coding region thereof, particularly a homolog or functional equivalent as shown in column 8 of Table I B, application no. 2, and being depicted in the same respective line as said B2957, and preferably the activity is increased non-targeted, or
[10547] (b) a polypeptide comprising a polypeptide, a consensus sequence or at least a polypeptide motif as shown in the respective line in column 5 of Table II or in column 8 of Table IV, application no. 2, respectively, and being depicted in the same respective line as said B2957, or a functional equivalent or a homolog thereof as depicted in column 8 of Table II, application no. 2, preferably a homolog or functional equivalent as depicted in column 8 of Table II B, application no. 2, and being depicted in the same respective line as said B2957, and preferably the activity is increased non-targeted.

[10548] Accordingly, in one embodiment, the molecule which activity is to be increased in the process of the invention is the gene product with an activity as a “L-asparaginase”, preferably it is the molecule of section (a) or (b) of this paragraph.

[10549] In particular, it was observed that in plants, especially in Arabidopsis thaliana, increasing or generating the activity of a gene product non-targeted with the activity of a “L-asparaginase”, preferably being encoded by a gene comprising the nucleic acid sequence SEQ ID NO. 41499, preferably the coding region thereof, conferred the production of or the increase in proline compared with the wild type control.

[10550] The nucleic acid sequence of B2963 from Escherichia coli, e.g. as shown in the respective line in column 5 of Table I, application no. 2, has been published in Blattner et al., Science 277 (5331), 1453 (1997)). And the activity of the gene product thereof is the activity of murein transglycosylase.

[10551] Accordingly, in one embodiment, the process of the present invention for producing proline in a non-human organism, like a microorganism or a plant or a part thereof, comprises increasing or generating the activity of a gene product with the activity of a gene product conferring the activity of “murein transglycosylase”, especially from Escherichia coli or its functional equivalent or its homolog, e.g. the increase of
[10552] (a) a gene product of a gene comprising the nucleic acid molecule as shown in the respective line in column 5 of Table I, application no. 2, preferably the coding region thereof, or a homolog or a fragment thereof, and being depicted in the same respective line as said B2963, or a functional equivalent or a homolog thereof as shown in column 8 of Table I, application no. 2, preferably the coding region thereof, particularly a homolog or functional equivalent as shown in column 8 of Table I B, application no. 2, and being depicted in the same respective line as said B2963, and preferably the activity is increased plastidic, or
[10553] (b) a polypeptide comprising a polypeptide, a consensus sequence or at least a polypeptide motif as shown in the respective line in column 5 of Table II or in column 8 of Table IV, application no. 2, respectively, and being depicted in the same respective line as said B2963, or a functional equivalent or a homolog thereof as depicted in column 8 of Table II, application no. 2, preferably a homolog or functional equivalent as depicted in column 8 of Table II B, application no. 2, and being depicted in the same respective line as said B2963, and preferably the activity is increased plastidic.

[10554] Accordingly, in one embodiment, the molecule which activity is to be increased in the process of the invention is the gene product with an activity as a “murein transglycosylase”, preferably it is the molecule of section (a) or (b) of this paragraph.

[10555] In particular, it was observed that in plants, especially in Arabidopsis thaliana, increasing or generating the activity of a gene product plastidic with the activity of a “murein transglycosylase”, preferably being encoded by a gene comprising the nucleic acid sequence SEQ ID NO. 41732, preferably the coding region thereof, conferred the production of or the increase in proline compared with the wild type control.

[10556] The nucleic acid sequence of B2999 from Escherichia coli, e.g. as shown in the respective line in column 5 of Table I, application no. 2, has been published in Blattner et al., Science 277 (5331), 1453 (1997)). And the activity of the gene product thereof is the activity of b2999-protein.

[10557] Accordingly, in one embodiment, the process of the present invention for producing arginine in a non-human organism, like a microorganism or a plant or a part thereof, comprises increasing or generating the activity of a gene product with the activity of a gene product conferring the activity of “b2999-protein”, especially from Escherichia coli or its functional equivalent or its homolog, e.g. the increase of
[10558] (a) a gene product of a gene comprising the nucleic acid molecule as shown in the respective line in column 5 of Table I, application no. 2, preferably the coding region thereof, or a homolog or a fragment thereof, and being depicted in the same respective line as said B2999, or a functional equivalent or a homolog thereof as shown in column 8 of Table I, application no. 2, preferably the coding region thereof, particularly a homolog or functional equivalent as shown in column 8 of Table I B, application no. 2, and being depicted in the same respective line as said B2999, and preferably the activity is increased non-targeted, or
[10559] (b) a polypeptide comprising a polypeptide, a consensus sequence or at least a polypeptide motif as shown in the respective line in column 5 of Table II or in column 8 of Table IV, application no. 2, respectively, and being depicted in the same respective line as said B2999, or a functional equivalent or a homolog thereof as depicted in column 8 of Table II, application no. 2, preferably a homolog or functional equivalent as depicted in column 8 of Table II B, application no. 2, and being depicted in the same respective line as said B2999, and preferably the activity is increased non-targeted.

[10560] Accordingly, in one embodiment, the molecule which activity is to be increased in the process of the invention is the gene product with an activity as a “b2999-protein”, preferably it is the molecule of section (a) or (b) of this paragraph.

[10561] In particular, it was observed that in plants, especially in Arabidopsis thaliana, increasing or generating the activity of a gene product non-targeted with the activity of a “b2999-protein”, preferably being encoded by a gene comprising the nucleic acid sequence SEQ ID NO. 41797, preferably the coding region thereof, conferred the production of or the increase in arginine compared with the wild type control.

[10562] The nucleic acid sequence of B3064 from Escherichia coli, e.g. as shown in the respective line in column 5 of Table I, application no. 2, has been published in Blattner et al., Science 277 (5331), 1453 (1997)). And the activity of the gene product thereof is the activity of glycoprotease.

[10563] Accordingly, in one embodiment, the process of the present invention for producing proline in a non-human organism, like a microorganism or a plant or a part thereof, comprises increasing or generating the activity of a gene product with the activity of a gene product conferring the activity of “glycoprotease”, especially from Escherichia coli or its functional equivalent or its homolog, e.g. the increase of
[10564] (a) a gene product of a gene comprising the nucleic acid molecule as shown in the respective line in column 5 of Table I, application no. 2, preferably the coding region thereof, or a homolog or a fragment thereof, and being depicted in the same respective line as said B3064, or a functional equivalent or a homolog thereof as shown in column 8 of Table I, application no. 2, preferably the coding region thereof, particularly a homolog or functional equivalent as shown in column 8 of Table I B, application no. 2, and being depicted in the same respective line as said B3064, and preferably the activity is increased non-targeted, or
[10565] (b) a polypeptide comprising a polypeptide, a consensus sequence or at least a polypeptide motif as shown in the respective line in column 5 of Table II or in column 8 of Table IV, application no. 2, respectively, and being depicted in the same respective line as said B3064, or a functional equivalent or a homolog thereof as depicted in column 8 of Table II, application no. 2, preferably a homolog or functional equivalent as depicted in column 8 of Table II B, application no. 2, and being depicted in the same respective line as said B3064, and preferably the activity is increased non-targeted.

[10566] Accordingly, in one embodiment, the molecule which activity is to be increased in the process of the invention is the gene product with an activity as a “glycoprotease”, preferably it is the molecule of section (a) or (b) of this paragraph.

[10567] In particular, it was observed that in plants, especially in Arabidopsis thaliana, increasing or generating the activity of a gene product non-targeted with the activity of a “glycoprotease”, preferably being encoded by a gene comprising the nucleic acid sequence SEQ ID NO. 42046, preferably the coding region thereof, conferred the production of or the increase in proline compared with the wild type control.

[10568] The nucleic acid sequence of B3121 from Escherichia coli, e.g. as shown in the respective line in column 5 of Table I, application no. 2, has been published in Blattner et al., Science 277 (5331), 1453 (1997)). And the activity of the gene product thereof is the activity of b3121-protein.

[10569] Accordingly, in one embodiment, the process of the present invention for producing arginine in a non-human organism, like a microorganism or a plant or a part thereof, comprises increasing or generating the activity of a gene product with the activity of a gene product conferring the activity of “b3121-protein”, especially from Escherichia coli or its functional equivalent or its homolog, e.g. the increase of
[10570] (a) a gene product of a gene comprising the nucleic acid molecule as shown in the respective line in column 5 of Table I, application no. 2, preferably the coding region thereof, or a homolog or a fragment thereof, and being depicted in the same respective line as said B3121, or a functional equivalent or a homolog thereof as shown in column 8 of Table I, application no. 2, preferably the coding region thereof, particularly a homolog or functional equivalent as shown in column 8 of Table I B, application no. 2, and being depicted in the same respective line as said B3121, and preferably the activity is increased non-targeted, or
[10571] (b) a polypeptide comprising a polypeptide, a consensus sequence or at least a polypeptide motif as shown in the respective line in column 5 of Table II or in column 8 of Table IV, application no. 2, respectively, and being depicted in the same respective line as said B3121, or a functional equivalent or a homolog thereof as depicted in column 8 of Table II, application no. 2, preferably a homolog or functional equivalent as depicted in column 8 of Table II B, application no. 2, and being depicted in the same respective line as said B3121, and preferably the activity is increased non-targeted.

[10572] Accordingly, in one embodiment, the molecule which activity is to be increased in the process of the invention is the gene product with an activity as a “b3121-protein”, preferably it is the molecule of section (a) or (b) of this paragraph.

[10573] In particular, it was observed that in plants, especially in Arabidopsis thaliana, increasing or generating the activity of a gene product non-targeted with the activity of a “b3121-protein”, preferably being encoded by a gene comprising the nucleic acid sequence SEQ ID NO. 42471, preferably the coding region thereof, conferred the production of or the increase in arginine compared with the wild type control.

[10574] The nucleic acid sequence of B3121 from Escherichia coli, e.g. as shown in the respective line in column 5 of Table I, application no. 2, has been published in Blattner et al., Science 277 (5331), 1453 (1997)). And the activity of the gene product thereof is the activity of b3121-protein.

[10575] Accordingly, in one embodiment, the process of the present invention for producing proline in a non-human organism, like a microorganism or a plant or a part thereof, comprises increasing or generating the activity of a gene product with the activity of a gene product conferring the activity of “b3121-protein”, especially from Escherichia coli or its functional equivalent or its homolog, e.g. the increase of
[10576] (a) a gene product of a gene comprising the nucleic acid molecule as shown in the respective line in column 5 of Table I, application no. 2, preferably the coding region thereof, or a homolog or a fragment thereof, and being depicted in the same respective line as said B3121, or a functional equivalent or a homolog thereof as shown in column 8 of Table I, application no. 2, preferably the coding region thereof, particularly a homolog or functional equivalent as shown in column 8 of Table I B, application no. 2, and being depicted in the same respective line as said B3121, and preferably the activity is increased non-targeted, or
[10577] (b) a polypeptide comprising a polypeptide, a consensus sequence or at least a polypeptide motif as shown in the respective line in column 5 of Table II or in column 8 of Table IV, application no. 2, respectively, and being depicted in the same respective line as said B3121, or a functional equivalent or a homolog thereof as depicted in column 8 of Table II, application no. 2, preferably a homolog or functional equivalent as depicted in column 8 of Table II B, application no. 2, and being depicted in the same respective line as said B3121, and preferably the activity is increased non-targeted.

[10578] Accordingly, in one embodiment, the molecule which activity is to be increased in the process of the invention is the gene product with an activity as a “b3121-protein”, preferably it is the molecule of section (a) or (b) of this paragraph.

[10579] In particular, it was observed that in plants, especially in Arabidopsis thaliana, increasing or generating the activity of a gene product non-targeted with the activity of a “b3121-protein”, preferably being encoded by a gene comprising the nucleic acid sequence SEQ ID NO. 42471, preferably the coding region thereof, conferred the production of or the increase in proline compared with the wild type control.

[10580] The nucleic acid sequence of B3151 from Escherichia coli, e.g. as shown in the respective line in column 5 of Table I, application no. 2, has been published in Blattner et al., Science 277 (5331), 1453 (1997)). And the activity of the gene product thereof is the activity of b3151-protein.

[10581] Accordingly, in one embodiment, the process of the present invention for producing proline in a non-human organism, like a microorganism or a plant or a part thereof, comprises increasing or generating the activity of a gene product with the activity of a gene product conferring the activity of “b3151-protein”, especially from Escherichia coli or its functional equivalent or its homolog, e.g. the increase of
[10582] (a) a gene product of a gene comprising the nucleic acid molecule as shown in the respective line in column 5 of Table I, application no. 2, preferably the coding region thereof, or a homolog or a fragment thereof, and being depicted in the same respective line as said B3151, or a functional equivalent or a homolog thereof as shown in column 8 of Table I, application no. 2, preferably the coding region thereof, particularly a homolog or functional equivalent as shown in column 8 of Table I B, application no. 2, and being depicted in the same respective line as said B3151, and preferably the activity is increased non-targeted, or
[10583] (b) a polypeptide comprising a polypeptide, a consensus sequence or at least a polypeptide motif as shown in the respective line in column 5 of Table II or in column 8 of Table IV, application no. 2, respectively, and being depicted in the same respective line as said B3151, or a functional equivalent or a homolog thereof as depicted in column 8 of Table II, application no. 2, preferably a homolog or functional equivalent as depicted in column 8 of Table II B, application no. 2, and being depicted in the same respective line as said B3151, and preferably the activity is increased non-targeted.

[10584] Accordingly, in one embodiment, the molecule which activity is to be increased in the process of the invention is the gene product with an activity as a “b3151-protein”, preferably it is the molecule of section (a) or (b) of this paragraph.

[10585] In particular, it was observed that in plants, especially in Arabidopsis thaliana, increasing or generating the activity of a gene product non-targeted with the activity of a “b3151-protein”, preferably being encoded by a gene comprising the nucleic acid sequence SEQ ID NO. 42477, preferably the coding region thereof, conferred the production of or the increase in proline compared with the wild type control.

[10586] The nucleic acid sequence of B3256 from Escherichia coli, e.g. as shown in the respective line in column 5 of Table I, application no. 2, has been published in Blattner et al., Science 277 (5331), 1453 (1997)). And the activity of the gene product thereof is the activity of acetyl CoA carboxylase.

[10587] Accordingly, in one embodiment, the process of the present invention for producing arginine in a non-human organism, like a microorganism or a plant or a part thereof, comprises increasing or generating the activity of a gene product with the activity of a gene product conferring the activity of “acetyl CoA carboxylase”, especially from Escherichia coli or its functional equivalent or its homolog, e.g. the increase of
[10588] (a) a gene product of a gene comprising the nucleic acid molecule as shown in the respective line in column 5 of Table I, application no. 2, preferably the coding region thereof, or a homolog or a fragment thereof, and being depicted in the same respective line as said B3256, or a functional equivalent or a homolog thereof as shown in column 8 of Table I, application no. 2, preferably the coding region thereof, particularly a homolog or functional equivalent as shown in column 8 of Table I B, application no. 2, and being depicted in the same respective line as said B3256, and preferably the activity is increased non-targeted, or
[10589] (b) a polypeptide comprising a polypeptide, a consensus sequence or at least a polypeptide motif as shown in the respective line in column 5 of Table II or in column 8 of Table IV, application no. 2, respectively, and being depicted in the same respective line as said B3256, or a functional equivalent or a homolog thereof as depicted in column 8 of Table II, application no. 2, preferably a homolog or functional equivalent as depicted in column 8 of Table II B, application no. 2, and being depicted in the same respective line as said B3256, and preferably the activity is increased non-targeted.

[10590] Accordingly, in one embodiment, the molecule which activity is to be increased in the process of the invention is the gene product with an activity as a “acetyl CoA carboxylase”, preferably it is the molecule of section (a) or (b) of this paragraph.

[10591] In particular, it was observed that in plants, especially in Arabidopsis thaliana, increasing or generating the activity of a gene product non-targeted with the activity of a “acetyl CoA carboxylase”, preferably being encoded by a gene comprising the nucleic acid sequence SEQ ID NO. 9492, preferably the coding region thereof, conferred the production of or the increase in arginine compared with the wild type control.

[10592] The nucleic acid sequence of B3256 from Escherichia coli, e.g. as shown in the respective line in column 5 of Table I, application no. 2, has been published in Blattner et al., Science 277 (5331), 1453 (1997)). And the activity of the gene product thereof is the activity of acetyl CoA carboxylase.

[10593] Accordingly, in one embodiment, the process of the present invention for producing glutamate in a non-human organism, like a microorganism or a plant or a part thereof, comprises increasing or generating the activity of a gene product with the activity of a gene product conferring the activity of “acetyl CoA carboxylase”, especially from Escherichia coli or its functional equivalent or its homolog, e.g. the increase of
[10594] (a) a gene product of a gene comprising the nucleic acid molecule as shown in the respective line in column 5 of Table I, application no. 2, preferably the coding region thereof, or a homolog or a fragment thereof, and being depicted in the same respective line as said B3256, or a functional equivalent or a homolog thereof as shown in column 8 of Table I, application no. 2, preferably the coding region thereof, particularly a homolog or functional equivalent as shown in column 8 of Table I B, application no. 2, and being depicted in the same respective line as said B3256, and preferably the activity is increased non-targeted, or
[10595] (b) a polypeptide comprising a polypeptide, a consensus sequence or at least a polypeptide motif as shown in the respective line in column 5 of Table II or in column 8 of Table IV, application no. 2, respectively, and being depicted in the same respective line as said B3256, or a functional equivalent or a homolog thereof as depicted in column 8 of Table II, application no. 2, preferably a homolog or functional equivalent as depicted in column 8 of Table II B, application no. 2, and being depicted in the same respective line as said B3256, and preferably the activity is increased non-targeted.

[10596] Accordingly, in one embodiment, the molecule which activity is to be increased in the process of the invention is the gene product with an activity as a “acetyl CoA carboxylase”, preferably it is the molecule of section (a) or (b) of this paragraph.

[10597] In particular, it was observed that in plants, especially in Arabidopsis thaliana, increasing or generating the activity of a gene product non-targeted with the activity of a “acetyl CoA carboxylase”, preferably being encoded by a gene comprising the nucleic acid sequence SEQ ID NO. 9492, preferably the coding region thereof, conferred the production of or the increase in glutamate compared with the wild type control.

[10598] The nucleic acid sequence of B3262 from Escherichia coli, e.g. as shown in the respective line in column 5 of Table I, application no. 2, has been published in Blattner et al., Science 277 (5331), 1453 (1997)). And the activity of the gene product thereof is the activity of methyltransferase.

[10599] Accordingly, in one embodiment, the process of the present invention for producing arginine in a non-human organism, like a microorganism or a plant or a part thereof, comprises increasing or generating the activity of a gene product with the activity of a gene product conferring the activity of “methyltransferase”, especially from Escherichia coli or its functional equivalent or its homolog, e.g. the increase of
[10600] (a) a gene product of a gene comprising the nucleic acid molecule as shown in the respective line in column 5 of Table I, application no. 2, preferably the coding region thereof, or a homolog or a fragment thereof, and being depicted in the same respective line as said B3262, or a functional equivalent or a homolog thereof as shown in column 8 of Table I, application no. 2, preferably the coding region thereof, particularly a homolog or functional equivalent as shown in column 8 of Table I B, application no. 2, and being depicted in the same respective line as said B3262, and preferably the activity is increased non-targeted, or
[10601] (b) a polypeptide comprising a polypeptide, a consensus sequence or at least a polypeptide motif as shown in the respective line in column 5 of Table II or in column 8 of Table IV, application no. 2, respectively, and being depicted in the same respective line as said B3262, or a functional equivalent or a homolog thereof as depicted in column 8 of Table II, application no. 2, preferably a homolog or functional equivalent as depicted in column 8 of Table II B, application no. 2, and being depicted in the same respective line as said B3262, and preferably the activity is increased non-targeted.

[10602] Accordingly, in one embodiment, the molecule which activity is to be increased in the process of the invention is the gene product with an activity as a “methyltransferase”, preferably it is the molecule of section (a) or (b) of this paragraph.

[10603] In particular, it was observed that in plants, especially in Arabidopsis thaliana, increasing or generating the activity of a gene product non-targeted with the activity of a “methyltransferase”, preferably being encoded by a gene comprising the nucleic acid sequence SEQ ID NO. 42502, preferably the coding region thereof, conferred the production of or the increase in arginine compared with the wild type control.

[10604] The nucleic acid sequence of B3262 from Escherichia coli, e.g. as shown in the respective line in column 5 of Table I, application no. 2, has been published in Blattner et al., Science 277 (5331), 1453 (1997)). And the activity of the gene product thereof is the activity of methyltransferase.

[10605] Accordingly, in one embodiment, the process of the present invention for producing glutamate in a non-human organism, like a microorganism or a plant or a part thereof, comprises increasing or generating the activity of a gene product with the activity of a gene product conferring the activity of “methyltransferase”, especially from Escherichia coli or its functional equivalent or its homolog, e.g. the increase of
[10606] (a) a gene product of a gene comprising the nucleic acid molecule as shown in the respective line in column 5 of Table I, application no. 2, preferably the coding region thereof, or a homolog or a fragment thereof, and being depicted in the same respective line as said B3262, or a functional equivalent or a homolog thereof as shown in column 8 of Table I, application no. 2, preferably the coding region thereof, particularly a homolog or functional equivalent as shown in column 8 of Table I B, application no. 2, and being depicted in the same respective line as said B3262, and preferably the activity is increased non-targeted, or
[10607] (b) a polypeptide comprising a polypeptide, a consensus sequence or at least a polypeptide motif as shown in the respective line in column 5 of Table II or in column 8 of Table IV, application no. 2, respectively, and being depicted in the same respective line as said B3262, or a functional equivalent or a homolog thereof as depicted in column 8 of Table II, application no. 2, preferably a homolog or functional equivalent as depicted in column 8 of Table II B, application no. 2, and being depicted in the same respective line as said B3262, and preferably the activity is increased non-targeted.

[10608] Accordingly, in one embodiment, the molecule which activity is to be increased in the process of the invention is the gene product with an activity as a “methyltransferase”, preferably it is the molecule of section (a) or (b) of this paragraph.

[10609] In particular, it was observed that in plants, especially in Arabidopsis thaliana, increasing or generating the activity of a gene product non-targeted with the activity of a “methyltransferase”, preferably being encoded by a gene comprising the nucleic acid sequence SEQ ID NO. 42502, preferably the coding region thereof, conferred the production of or the increase in glutamate compared with the wild type control.

[10610] The nucleic acid sequence of B3262 from Escherichia coli, e.g. as shown in the respective line in column 5 of Table I, application no. 2, has been published in Blattner et al., Science 277 (5331), 1453 (1997)). And the activity of the gene product thereof is the activity of methyltransferase.

[10611] Accordingly, in one embodiment, the process of the present invention for producing glutamine in a non-human organism, like a microorganism or a plant or a part thereof, comprises increasing or generating the activity of a gene product with the activity of a gene product conferring the activity of “methyltransferase”, especially from Escherichia coli or its functional equivalent or its homolog, e.g. the increase of
[10612] (a) a gene product of a gene comprising the nucleic acid molecule as shown in the respective line in column 5 of Table I, application no. 2, preferably the coding region thereof, or a homolog or a fragment thereof, and being depicted in the same respective line as said B3262, or a functional equivalent or a homolog thereof as shown in column 8 of Table I, application no. 2, preferably the coding region thereof, particularly a homolog or functional equivalent as shown in column 8 of Table I B, application no. 2, and being depicted in the same respective line as said B3262, and preferably the activity is increased non-targeted, or
[10613] (b) a polypeptide comprising a polypeptide, a consensus sequence or at least a polypeptide motif as shown in the respective line in column 5 of Table II or in column 8 of Table IV, application no. 2, respectively, and being depicted in the same respective line as said B3262, or a functional equivalent or a homolog thereof as depicted in column 8 of Table II, application no. 2, preferably a homolog or functional equivalent as depicted in column 8 of Table II B, application no. 2, and being depicted in the same respective line as said B3262, and preferably the activity is increased non-targeted.

[10614] Accordingly, in one embodiment, the molecule which activity is to be increased in the process of the invention is the gene product with an activity as a “methyltransferase”, preferably it is the molecule of section (a) or (b) of this paragraph.

[10615] In particular, it was observed that in plants, especially in Arabidopsis thaliana, increasing or generating the activity of a gene product non-targeted with the activity of a “methyltransferase”, preferably being encoded by a gene comprising the nucleic acid sequence SEQ ID NO. 42502, preferably the coding region thereof, conferred the production of or the increase in glutamine compared with the wild type control.

[10616] The nucleic acid sequence of B3262 from Escherichia coli, e.g. as shown in the respective line in column 5 of Table I, application no. 2, has been published in Blattner et al., Science 277 (5331), 1453 (1997)) d. And the activity of the gene product thereof is the activity of methyltransferase.

[10617] Accordingly, in one embodiment, the process of the present invention for producing proline in a non-human organism, like a microorganism or a plant or a part thereof, comprises increasing or generating the activity of a gene product with the activity of a gene product conferring the activity of “methyltransferase”, especially from Escherichia coli or its functional equivalent or its homolog, e.g. the increase of
[10618] (a) a gene product of a gene comprising the nucleic acid molecule as shown in the respective line in column 5 of Table I, application no. 2, preferably the coding region thereof, or a homolog or a fragment thereof, and being depicted in the same respective line as said B3262, or a functional equivalent or a homolog thereof as shown in column 8 of Table I, application no. 2, preferably the coding region thereof, particularly a homolog or functional equivalent as shown in column 8 of Table I B, application no. 2, and being depicted in the same respective line as said B3262, and preferably the activity is increased non-targeted, or
[10619] (b) a polypeptide comprising a polypeptide, a consensus sequence or at least a polypeptide motif as shown in the respective line in column 5 of Table II or in column 8 of Table IV, application no. 2, respectively, and being depicted in the same respective line as said B3262, or a functional equivalent or a homolog thereof as depicted in column 8 of Table II, application no. 2, preferably a homolog or functional equivalent as depicted in column 8 of Table II B, application no. 2, and being depicted in the same respective line as said B3262, and preferably the activity is increased non-targeted.

[10620] Accordingly, in one embodiment, the molecule which activity is to be increased in the process of the invention is the gene product with an activity as a “methyltransferase”, preferably it is the molecule of section (a) or (b) of this paragraph.

[10621] In particular, it was observed that in plants, especially in Arabidopsis thaliana, increasing or generating the activity of a gene product non-targeted with the activity of a “methyltransferase”, preferably being encoded by a gene comprising the nucleic acid sequence SEQ ID NO. 42502, preferably the coding region thereof, conferred the production of or the increase in proline compared with the wild type control.

[10622] The nucleic acid sequence of B3346 from Escherichia coli, e.g. as shown in the respective line in column 5 of Table I, application no. 2, has been published in Blattner et al., Science 277 (5331), 1453 (1997)). And the activity of the gene product thereof is the activity of b3346-protein.

[10623] Accordingly, in one embodiment, the process of the present invention for producing proline in a non-human organism, like a microorganism or a plant or a part thereof, comprises increasing or generating the activity of a gene product with the activity of a gene product conferring the activity of “b3346-protein”, especially from Escherichia coli or its functional equivalent or its homolog, e.g. the increase of
[10624] (a) a gene product of a gene comprising the nucleic acid molecule as shown in the respective line in column 5 of Table I, application no. 2, preferably the coding region thereof, or a homolog or a fragment thereof, and being depicted in the same respective line as said B3346, or a functional equivalent or a homolog thereof as shown in column 8 of Table I, application no. 2, preferably the coding region thereof, particularly a homolog or functional equivalent as shown in column 8 of Table I B, application no. 2, and being depicted in the same respective line as said B3346, and preferably the activity is increased non-targeted, or
[10625] (b) a polypeptide comprising a polypeptide, a consensus sequence or at least a polypeptide motif as shown in the respective line in column 5 of Table II or in column 8 of Table IV, application no. 2, respectively, and being depicted in the same respective line as said B3346, or a functional equivalent or a homolog thereof as depicted in column 8 of Table II, application no. 2, preferably a homolog or functional equivalent as depicted in column 8 of Table II B, application no. 2, and being depicted in the same respective line as said B3346, and preferably the activity is increased non-targeted.

[10626] Accordingly, in one embodiment, the molecule which activity is to be increased in the process of the invention is the gene product with an activity as a “b3346-protein”, preferably it is the molecule of section (a) or (b) of this paragraph.

[10627] In particular, it was observed that in plants, especially in Arabidopsis thaliana, increasing or generating the activity of a gene product non-targeted with the activity of a “b3346-protein”, preferably being encoded by a gene comprising the nucleic acid sequence SEQ ID NO. 10104, preferably the coding region thereof, conferred the production of or the increase in proline compared with the wild type control.

[10628] The nucleic acid sequence of B3410 from Escherichia coli, e.g. as shown in the respective line in column 5 of Table I, application no. 2, has been published in Blattner et al., Science 277 (5331), 1453 (1997)). And the activity of the gene product thereof is the activity of b3410-protein.

[10629] Accordingly, in one embodiment, the process of the present invention for producing glutamine in a non-human organism, like a microorganism or a plant or a part thereof, comprises increasing or generating the activity of a gene product with the activity of a gene product conferring the activity of “b3410-protein”, especially from Escherichia coli or its functional equivalent or its homolog, e.g. the increase of
[10630] (a) a gene product of a gene comprising the nucleic acid molecule as shown in the respective line in column 5 of Table I, application no. 2, preferably the coding region thereof, or a homolog or a fragment thereof, and being depicted in the same respective line as said B3410, or a functional equivalent or a homolog thereof as shown in column 8 of Table I, application no. 2, preferably the coding region thereof, particularly a homolog or functional equivalent as shown in column 8 of Table I B, application no. 2, and being depicted in the same respective line as said B3410, and preferably the activity is increased non-targeted, or
[10631] (b) a polypeptide comprising a polypeptide, a consensus sequence or at least a polypeptide motif as shown in the respective line in column 5 of Table II or in column 8 of Table IV, application no. 2, respectively, and being depicted in the same respective line as said B3410, or a functional equivalent or a homolog thereof as depicted in column 8 of Table II, application no. 2, preferably a homolog or functional equivalent as depicted in column 8 of Table II B, application no. 2, and being depicted in the same respective line as said B3410, and preferably the activity is increased non-targeted.

[10632] Accordingly, in one embodiment, the molecule which activity is to be increased in the process of the invention is the gene product with an activity as a “b3410-protein”, preferably it is the molecule of section (a) or (b) of this paragraph.

[10633] In particular, it was observed that in plants, especially in Arabidopsis thaliana, increasing or generating the activity of a gene product non-targeted with the activity of a “b3410-protein”, preferably being encoded by a gene comprising the nucleic acid sequence SEQ ID NO. 42559, preferably the coding region thereof, conferred the production of or the increase in glutamine compared with the wild type control.

[10634] The nucleic acid sequence of B3427 from Escherichia coli, e.g. as shown in the respective line in column 5 of Table I, application no. 2, has been published in Blattner et al., Science 277 (5331), 1453 (1997)). And the activity of the gene product thereof is the activity of B3427-protein.

[10635] Accordingly, in one embodiment, the process of the present invention for producing arginine in a non-human organism, like a microorganism or a plant or a part thereof, comprises increasing or generating the activity of a gene product with the activity of a gene product conferring the activity of “B3427-protein”, especially from Escherichia coli or its functional equivalent or its homolog, e.g. the increase of
[10636] (a) a gene product of a gene comprising the nucleic acid molecule as shown in the respective line in column 5 of Table I, application no. 2, preferably the coding region thereof, or a homolog or a fragment thereof, and being depicted in the same respective line as said B3427, or a functional equivalent or a homolog thereof as shown in column 8 of Table I, application no. 2, preferably the coding region thereof, particularly a homolog or functional equivalent as shown in column 8 of Table I B, application no. 2, and being depicted in the same respective line as said B3427, and preferably the activity is increased non-targeted, or
[10637] (b) a polypeptide comprising a polypeptide, a consensus sequence or at least a polypeptide motif as shown in the respective line in column 5 of Table II or in column 8 of Table IV, application no. 2, respectively, and being depicted in the same respective line as said B3427, or a functional equivalent or a homolog thereof as depicted in column 8 of Table II, application no. 2, preferably a homolog or functional equivalent as depicted in column 8 of Table II B, application no. 2, and being depicted in the same respective line as said B3427, and preferably the activity is increased non-targeted.

[10638] Accordingly, in one embodiment, the molecule which activity is to be increased in the process of the invention is the gene product with an activity as a “B3427-protein”, preferably it is the molecule of section (a) or (b) of this paragraph.

[10639] In particular, it was observed that in plants, especially in Arabidopsis thaliana, increasing or generating the activity of a gene product non-targeted with the activity of a “B3427-protein”, preferably being encoded by a gene comprising the nucleic acid sequence SEQ ID NO. 42579, preferably the coding region thereof, conferred the production of or the increase in arginine compared with the wild type control.

[10640] The nucleic acid sequence of B3509 from Escherichia coli, e.g. as shown in the respective line in column 5 of Table I, application no. 2, has been published in Blattner et al., Science 277 (5331), 1453 (1997)). And the activity of the gene product thereof is the activity of b3509-protein.

[10641] Accordingly, in one embodiment, the process of the present invention for producing glutamate in a non-human organism, like a microorganism or a plant or a part thereof, comprises increasing or generating the activity of a gene product with the activity of a gene product conferring the activity of “b3509-protein”, especially from Escherichia coli or its functional equivalent or its homolog, e.g. the increase of
[10642] (a) a gene product of a gene comprising the nucleic acid molecule as shown in the respective line in column 5 of Table I, application no. 2, preferably the coding region thereof, or a homolog or a fragment thereof, and being depicted in the same respective line as said B3509, or a functional equivalent or a homolog thereof as shown in column 8 of Table I, application no. 2, preferably the coding region thereof, particularly a homolog or functional equivalent as shown in column 8 of Table I B, application no. 2, and being depicted in the same respective line as said B3509, and preferably the activity is increased non-targeted, or
[10643] (b) a polypeptide comprising a polypeptide, a consensus sequence or at least a polypeptide motif as shown in the respective line in column 5 of Table II or in column 8 of Table IV, application no. 2, respectively, and being depicted in the same respective line as said B3509, or a functional equivalent or a homolog thereof as depicted in column 8 of Table II, application no. 2, preferably a homolog or functional equivalent as depicted in column 8 of Table II B, application no. 2, and being depicted in the same respective line as said B3509, and preferably the activity is increased non-targeted.

[10644] Accordingly, in one embodiment, the molecule which activity is to be increased in the process of the invention is the gene product with an activity as a “b3509-protein”, preferably it is the molecule of section (a) or (b) of this paragraph.

[10645] In particular, it was observed that in plants, especially in Arabidopsis thaliana, increasing or generating the activity of a gene product non-targeted with the activity of a “b3509-protein”, preferably being encoded by a gene comprising the nucleic acid sequence SEQ ID NO. 42592, preferably the coding region thereof, conferred the production of or the increase in glutamate compared with the wild type control.

[10646] The nucleic acid sequence of B3572 from Escherichia coli, e.g. as shown in the respective line in column 5 of Table I, application no. 2, has been published in Blattner et al., Science 277 (5331), 1453 (1997)). And the activity of the gene product thereof is the activity of valine-pyruvate transaminase.

[10647] Accordingly, in one embodiment, the process of the present invention for producing proline in a non-human organism, like a microorganism or a plant or a part thereof, comprises increasing or generating the activity of a gene product with the activity of a gene product conferring the activity of “valine-pyruvate transaminase”, especially from Escherichia coli or its functional equivalent or its homolog, e.g. the increase of
[10648] (a) a gene product of a gene comprising the nucleic acid molecule as shown in the respective line in column 5 of Table I, application no. 2, preferably the coding region thereof, or a homolog or a fragment thereof, and being depicted in the same respective line as said B3572, or a functional equivalent or a homolog thereof as shown in column 8 of Table I, application no. 2, preferably the coding region thereof, particularly a homolog or functional equivalent as shown in column 8 of Table I B, application no. 2, and being depicted in the same respective line as said B3572, and preferably the activity is increased plastidic, or
[10649] (b) a polypeptide comprising a polypeptide, a consensus sequence or at least a polypeptide motif as shown in the respective line in column 5 of Table II or in column 8 of Table IV, application no. 2, respectively, and being depicted in the same respective line as said B3572, or a functional equivalent or a homolog thereof as depicted in column 8 of Table II, application no. 2, preferably a homolog or functional equivalent as depicted in column 8 of Table II B, application no. 2, and being depicted in the same respective line as said B3572, and preferably the activity is increased plastidic.

[10650] Accordingly, in one embodiment, the molecule which activity is to be increased in the process of the invention is the gene product with an activity as a “valine-pyruvate transaminase”, preferably it is the molecule of section (a) or (b) of this paragraph.

[10651] In particular, it was observed that in plants, especially in Arabidopsis thaliana, increasing or generating the activity of a gene product plastidic with the activity of a “valine-pyruvate transaminase”, preferably being encoded by a gene comprising the nucleic acid sequence SEQ ID NO. 10172, preferably the coding region thereof, conferred the production of or the increase in proline compared with the wild type control.

[10652] The nucleic acid sequence of B3616 from Escherichia coli, e.g. as shown in the respective line in column 5 of Table I, application no. 2, has been published in Blattner et al., Science 277 (5331), 1453 (1997)). And the activity of the gene product thereof is the activity of threonine dehydrogenase.

[10653] Accordingly, in one embodiment, the process of the present invention for producing glutamine in a non-human organism, like a microorganism or a plant or a part thereof, comprises increasing or generating the activity of a gene product with the activity of a gene product conferring the activity of “threonine dehydrogenase”, especially from Escherichia coli or its functional equivalent or its homolog, e.g. the increase of
[10654] (a) a gene product of a gene comprising the nucleic acid molecule as shown in the respective line in column 5 of Table I, application no. 2, preferably the coding region thereof, or a homolog or a fragment thereof, and being depicted in the same respective line as said B3616, or a functional equivalent or a homolog thereof as shown in column 8 of Table I, application no. 2, preferably the coding region thereof, particularly a homolog or functional equivalent as shown in column 8 of Table I B, application no. 2, and being depicted in the same respective line as said B3616, and preferably the activity is increased non-targeted, or
[10655] (b) a polypeptide comprising a polypeptide, a consensus sequence or at least a polypeptide motif as shown in the respective line in column 5 of Table II or in column 8 of Table IV, application no. 2, respectively, and being depicted in the same respective line as said B3616, or a functional equivalent or a homolog thereof as depicted in column 8 of Table II, application no. 2, preferably a homolog or functional equivalent as depicted in column 8 of Table II B, application no. 2, and being depicted in the same respective line as said B3616, and preferably the activity is increased non-targeted.

[10656] Accordingly, in one embodiment, the molecule which activity is to be increased in the process of the invention is the gene product with an activity as a “threonine dehydrogenase”, preferably it is the molecule of section (a) or (b) of this paragraph.

[10657] In particular, it was observed that in plants, especially in Arabidopsis thaliana, increasing or generating the activity of a gene product non-targeted with the activity of a “threonine dehydrogenase”, preferably being encoded by a gene comprising the nucleic acid sequence SEQ ID NO. 42600, preferably the coding region thereof, conferred the production of or the increase in glutamine compared with the wild type control.

[10658] The nucleic acid sequence of B3616 from Escherichia coli, e.g. as shown in the respective line in column 5 of Table I, application no. 2, has been published in Blattner et al., Science 277 (5331), 1453 (1997)). And the activity of the gene product thereof is the activity of threonine dehydrogenase.

[10659] Accordingly, in one embodiment, the process of the present invention for producing proline in a non-human organism, like a microorganism or a plant or a part thereof, comprises increasing or generating the activity of a gene product with the activity of a gene product conferring the activity of “threonine dehydrogenase”, especially from Escherichia coli or its functional equivalent or its homolog, e.g. the increase of
[10660] (a) a gene product of a gene comprising the nucleic acid molecule as shown in the respective line in column 5 of Table I, application no. 2, preferably the coding region thereof, or a homolog or a fragment thereof, and being depicted in the same respective line as said B3616, or a functional equivalent or a homolog thereof as shown in column 8 of Table I, application no. 2, preferably the coding region thereof, particularly a homolog or functional equivalent as shown in column 8 of Table I B, application no. 2, and being depicted in the same respective line as said B3616, and preferably the activity is increased non-targeted, or
[10661] (b) a polypeptide comprising a polypeptide, a consensus sequence or at least a polypeptide motif as shown in the respective line in column 5 of Table II or in column 8 of Table IV, application no. 2, respectively, and being depicted in the same respective line as said B3616, or a functional equivalent or a homolog thereof as depicted in column 8 of Table II, application no. 2, preferably a homolog or functional equivalent as depicted in column 8 of Table II B, application no. 2, and being depicted in the same respective line as said B3616, and preferably the activity is increased non-targeted.

[10662] Accordingly, in one embodiment, the molecule which activity is to be increased in the process of the invention is the gene product with an activity as a “threonine dehydrogenase”, preferably it is the molecule of section (a) or (b) of this paragraph.

[10663] In particular, it was observed that in plants, especially in Arabidopsis thaliana, increasing or generating the activity of a gene product non-targeted with the activity of a “threonine dehydrogenase”, preferably being encoded by a gene comprising the nucleic acid sequence SEQ ID NO. 42600, preferably the coding region thereof, conferred the production of or the increase in proline compared with the wild type control.

[10664] The nucleic acid sequence of B3634 from Escherichia coli, e.g. as shown in the respective line in column 5 of Table I, application no. 2, has been published in Blattner et al., Science 277 (5331), 1453 (1997)). And the activity of the gene product thereof is the activity of phosphopantetheine adenylyltransferase.

[10665] Accordingly, in one embodiment, the process of the present invention for producing proline in a non-human organism, like a microorganism or a plant or a part thereof, comprises increasing or generating the activity of a gene product with the activity of a gene product conferring the activity of “phosphopantetheine adenylyltransferase”, especially from Escherichia coli or its functional equivalent or its homolog, e.g. the increase of
[10666] (a) a gene product of a gene comprising the nucleic acid molecule as shown in the respective line in column 5 of Table I, application no. 2, preferably the coding region thereof, or a homolog or a fragment thereof, and being depicted in the same respective line as said B3634, or a functional equivalent or a homolog thereof as shown in column 8 of Table I, application no. 2, preferably the coding region thereof, particularly a homolog or functional equivalent as shown in column 8 of Table I B, application no. 2, and being depicted in the same respective line as said B3634, and preferably the activity is increased non-targeted, or
[10667] (b) a polypeptide comprising a polypeptide, a consensus sequence or at least a polypeptide motif as shown in the respective line in column 5 of Table II or in column 8 of Table IV, application no. 2, respectively, and being depicted in the same respective line as said B3634, or a functional equivalent or a homolog thereof as depicted in column 8 of Table II, application no. 2, preferably a homolog or functional equivalent as depicted in column 8 of Table II B, application no. 2, and being depicted in the same respective line as said B3634, and preferably the activity is increased non-targeted.

[10668] Accordingly, in one embodiment, the molecule which activity is to be increased in the process of the invention is the gene product with an activity as a “phosphopantetheine adenylyltransferase”, preferably it is the molecule of section (a) or (b) of this paragraph.

[10669] In particular, it was observed that in plants, especially in Arabidopsis thaliana, increasing or generating the activity of a gene product non-targeted with the activity of a “phosphopantetheine adenylyltransferase”, preferably being encoded by a gene comprising the nucleic acid sequence SEQ ID NO. 42931, preferably the coding region thereof, conferred the production of or the increase in proline compared with the wild type control.

[10670] The nucleic acid sequence of B3732 from Escherichia coli, e.g. as shown in the respective line in column 5 of Table I, application no. 2, has been published in Blattner et al., Science 277 (5331), 1453 (1997)). And the activity of the gene product thereof is the activity of ATP synthase subunit beta.

[10671] Accordingly, in one embodiment, the process of the present invention for producing glutamine in a non-human organism, like a microorganism or a plant or a part thereof, comprises increasing or generating the activity of a gene product with the activity of a gene product conferring the activity of “ATP synthase subunit beta”, especially from Escherichia coli or its functional equivalent or its homolog, e.g. the increase of
[10672] (a) a gene product of a gene comprising the nucleic acid molecule as shown in the respective line in column 5 of Table I, application no. 2, preferably the coding region thereof, or a homolog or a fragment thereof, and being depicted in the same respective line as said B3732, or a functional equivalent or a homolog thereof as shown in column 8 of Table I, application no. 2, preferably the coding region thereof, particularly a homolog or functional equivalent as shown in column 8 of Table I B, application no. 2, and being depicted in the same respective line as said B3732, and preferably the activity is increased non-targeted, or
[10673] (b) a polypeptide comprising a polypeptide, a consensus sequence or at least a polypeptide motif as shown in the respective line in column 5 of Table II or in column 8 of Table IV, application no. 2, respectively, and being depicted in the same respective line as said B3732, or a functional equivalent or a homolog thereof as depicted in column 8 of Table II, application no. 2, preferably a homolog or functional equivalent as depicted in column 8 of Table II B, application no. 2, and being depicted in the same respective line as said B3732, and preferably the activity is increased non-targeted.

[10674] Accordingly, in one embodiment, the molecule which activity is to be increased in the process of the invention is the gene product with an activity as a “ATP synthase subunit beta”, preferably it is the molecule of section (a) or (b) of this paragraph.

[10675] In particular, it was observed that in plants, especially in Arabidopsis thaliana, increasing or generating the activity of a gene product non-targeted with the activity of a “ATP synthase subunit beta”, preferably being encoded by a gene comprising the nucleic acid sequence SEQ ID NO. 43248, preferably the coding region thereof, conferred the production of or the increase in glutamine compared with the wild type control.

[10676] The nucleic acid sequence of B3793 from Escherichia coli, e.g. as shown in the respective line in column 5 of Table I, application no. 2, has been published in Blattner et al., Science 277 (5331), 1453 (1997)). And the activity of the gene product thereof is the activity of enterobacterial common antigen polymerase.

[10677] Accordingly, in one embodiment, the process of the present invention for producing arginine in a non-human organism, like a microorganism or a plant or a part thereof, comprises increasing or generating the activity of a gene product with the activity of a gene product conferring the activity of “enterobacterial common antigen polymerase”, especially from Escherichia coli or its functional equivalent or its homolog, e.g. the increase of
[10678] (a) a gene product of a gene comprising the nucleic acid molecule as shown in the respective line in column 5 of Table I, application no. 2, preferably the coding region thereof, or a homolog or a fragment thereof, and being depicted in the same respective line as said B3793, or a functional equivalent or a homolog thereof as shown in column 8 of Table I, application no. 2, preferably the coding region thereof, particularly a homolog or functional equivalent as shown in column 8 of Table I B, application no. 2, and being depicted in the same respective line as said B3793, and preferably the activity is increased non-targeted, or
[10679] (b) a polypeptide comprising a polypeptide, a consensus sequence or at least a polypeptide motif as shown in the respective line in column 5 of Table II or in column 8 of Table IV, application no. 2, respectively, and being depicted in the same respective line as said B3793, or a functional equivalent or a homolog thereof as depicted in column 8 of Table II, application no. 2, preferably a homolog or functional equivalent as depicted in column 8 of Table II B, application no. 2, and being depicted in the same respective line as said B3793, and preferably the activity is increased non-targeted.

[10680] Accordingly, in one embodiment, the molecule which activity is to be increased in the process of the invention is the gene product with an activity as a “enterobacterial common antigen polymerase”, preferably it is the molecule of section (a) or (b) of this paragraph.

[10681] In particular, it was observed that in plants, especially in Arabidopsis thaliana, increasing or generating the activity of a gene product non-targeted with the activity of a “enterobacterial common antigen polymerase”, preferably being encoded by a gene comprising the nucleic acid sequence SEQ ID NO. 43800, preferably the coding region thereof, conferred the production of or the increase in arginine compared with the wild type control.

[10682] The nucleic acid sequence of B3793 from Escherichia coli, e.g. as shown in the respective line in column 5 of Table I, application no. 2, has been published in Blattner et al., Science 277 (5331), 1453 (1997)). And the activity of the gene product thereof is the activity of enterobacterial common antigen polymerase.

[10683] Accordingly, in one embodiment, the process of the present invention for producing glutamate in a non-human organism, like a microorganism or a plant or a part thereof, comprises increasing or generating the activity of a gene product with the activity of a gene product conferring the activity of “enterobacterial common antigen polymerase”, especially from Escherichia coli or its functional equivalent or its homolog, e.g. the increase of
[10684] (a) a gene product of a gene comprising the nucleic acid molecule as shown in the respective line in column 5 of Table I, application no. 2, preferably the coding region thereof, or a homolog or a fragment thereof, and being depicted in the same respective line as said B3793, or a functional equivalent or a homolog thereof as shown in column 8 of Table I, application no. 2, preferably the coding region thereof, particularly a homolog or functional equivalent as shown in column 8 of Table I B, application no. 2, and being depicted in the same respective line as said B3793, and preferably the activity is increased non-targeted, or
[10685] (b) a polypeptide comprising a polypeptide, a consensus sequence or at least a polypeptide motif as shown in the respective line in column 5 of Table II or in column 8 of Table IV, application no. 2, respectively, and being depicted in the same respective line as said B3793, or a functional equivalent or a homolog thereof as depicted in column 8 of Table II, application no. 2, preferably a homolog or functional equivalent as depicted in column 8 of Table II B, application no. 2, and being depicted in the same respective line as said B3793, and preferably the activity is increased non-targeted.

[10686] Accordingly, in one embodiment, the molecule which activity is to be increased in the process of the invention is the gene product with an activity as a “enterobacterial common antigen polymerase”, preferably it is the molecule of section (a) or (b) of this paragraph.

[10687] In particular, it was observed that in plants, especially in Arabidopsis thaliana, increasing or generating the activity of a gene product non-targeted with the activity of a “enterobacterial common antigen polymerase”, preferably being encoded by a gene comprising the nucleic acid sequence SEQ ID NO. 43800, preferably the coding region thereof, conferred the production of or the increase in glutamate compared with the wild type control.

[10688] The nucleic acid sequence of B3813 from Escherichia coli, e.g. as shown in the respective line in column 5 of Table I, application no. 2, has been published in Blattner et al., Science 277 (5331), 1453 (1997)). And the activity of the gene product thereof is the activity of DNA helicase

[10689] Accordingly, in one embodiment, the process of the present invention for producing proline in a non-human organism, like a microorganism or a plant or a part thereof, comprises increasing or generating the activity of a gene product with the activity of a gene product conferring the activity of “DNA helicase II”, especially from Escherichia coli or its functional equivalent or its homolog, e.g. the increase of
[10690] (a) a gene product of a gene comprising the nucleic acid molecule as shown in the respective line in column 5 of Table I, application no. 2, preferably the coding region thereof, or a homolog or a fragment thereof, and being depicted in the same respective line as said B3813, or a functional equivalent or a homolog thereof as shown in column 8 of Table I, application no. 2, preferably the coding region thereof, particularly a homolog or functional equivalent as shown in column 8 of Table I B, application no. 2, and being depicted in the same respective line as said B3813, and preferably the activity is increased non-targeted, or
[10691] (b) a polypeptide comprising a polypeptide, a consensus sequence or at least a polypeptide motif as shown in the respective line in column 5 of Table II or in column 8 of Table IV, application no. 2, respectively, and being depicted in the same respective line as said B3813, or a functional equivalent or a homolog thereof as depicted in column 8 of Table II, application no. 2, preferably a homolog or functional equivalent as depicted in column 8 of Table II B, application no. 2, and being depicted in the same respective line as said B3813, and preferably the activity is increased non-targeted.

[10692] Accordingly, in one embodiment, the molecule which activity is to be increased in the process of the invention is the gene product with an activity as a “DNA helicase II”, preferably it is the molecule of section (a) or (b) of this paragraph.

[10693] In particular, it was observed that in plants, especially in Arabidopsis thaliana, increasing or generating the activity of a gene product non-targeted with the activity of a “DNA helicase II”, preferably being encoded by a gene comprising the nucleic acid sequence SEQ ID NO. 43839, preferably the coding region thereof, conferred the production of or the increase in proline compared with the wild type control.

[10694] The nucleic acid sequence of B3814 from Escherichia coli, e.g. as shown in the respective line in column 5 of Table I, application no. 2, has been published in Blattner et al., Science 277 (5331), 1453 (1997)). And the activity of the gene product thereof is the activity of b3814*protein.

[10695] Accordingly, in one embodiment, the process of the present invention for producing glutamine in a non-human organism, like a microorganism or a plant or a part thereof, comprises increasing or generating the activity of a gene product with the activity of a gene product conferring the activity of “b3814-protein”, especially from Escherichia coli or its functional equivalent or its homolog, e.g. the increase of
[10696] (a) a gene product of a gene comprising the nucleic acid molecule as shown in the respective line in column 5 of Table I, application no. 2, preferably the coding region thereof, or a homolog or a fragment thereof, and being depicted in the same respective line as said B3814, or a functional equivalent or a homolog thereof as shown in column 8 of Table I, application no. 2, preferably the coding region thereof, particularly a homolog or functional equivalent as shown in column 8 of Table I B, application no. 2, and being depicted in the same respective line as said B3814, and preferably the activity is increased non-targeted, or
[10697] (b) a polypeptide comprising a polypeptide, a consensus sequence or at least a polypeptide motif as shown in the respective line in column 5 of Table II or in column 8 of Table IV, application no. 2, respectively, and being depicted in the same respective line as said B3814, or a functional equivalent or a homolog thereof as depicted in column 8 of Table II, application no. 2, preferably a homolog or functional equivalent as depicted in column 8 of Table II B, application no. 2, and being depicted in the same respective line as said B3814, and preferably the activity is increased non-targeted.

[10698] Accordingly, in one embodiment, the molecule which activity is to be increased in the process of the invention is the gene product with an activity as a “b3814-protein”, preferably it is the molecule of section (a) or (b) of this paragraph.

[10699] In particular, it was observed that in plants, especially in Arabidopsis thaliana, increasing or generating the activity of a gene product non-targeted with the activity of a “b3814-protein”, preferably being encoded by a gene comprising the nucleic acid sequence SEQ ID NO. 44196, preferably the coding region thereof, conferred the production of or the increase in glutamine compared with the wild type control.

[10700] The nucleic acid sequence of B3817 from Escherichia coli, e.g. as shown in the respective line in column 5 of Table I, application no. 2, has been published in Blattner et al., Science 277 (5331), 1453 (1997)). And the activity of the gene product thereof is the activity of b3817-protein.

[10701] Accordingly, in one embodiment, the process of the present invention for producing proline in a non-human organism, like a microorganism or a plant or a part thereof, comprises increasing or generating the activity of a gene product with the activity of a gene product conferring the activity of “b3817-protein”, especially from Escherichia coli or its functional equivalent or its homolog, e.g. the increase of
[10702] (a) a gene product of a gene comprising the nucleic acid molecule as shown in the respective line in column 5 of Table I, application no. 2, preferably the coding region thereof, or a homolog or a fragment thereof, and being depicted in the same respective line as said B3817, or a functional equivalent or a homolog thereof as shown in column 8 of Table I, application no. 2, preferably the coding region thereof, particularly a homolog or functional equivalent as shown in column 8 of Table I B, application no. 2, and being depicted in the same respective line as said B3817, and preferably the activity is increased non-targeted, or
[10703] (b) a polypeptide comprising a polypeptide, a consensus sequence or at least a polypeptide motif as shown in the respective line in column 5 of Table II or in column 8 of Table IV, application no. 2, respectively, and being depicted in the same respective line as said B3817, or a functional equivalent or a homolog thereof as depicted in column 8 of Table II, application no. 2, preferably a homolog or functional equivalent as depicted in column 8 of Table II B, application no. 2, and being depicted in the same respective line as said B3817, and preferably the activity is increased non-targeted.

[10704] Accordingly, in one embodiment, the molecule which activity is to be increased in the process of the invention is the gene product with an activity as a “b3817-protein”, preferably it is the molecule of section (a) or (b) of this paragraph.

[10705] In particular, it was observed that in plants, especially in Arabidopsis thaliana, increasing or generating the activity of a gene product non-targeted with the activity of a “b3817-protein”, preferably being encoded by a gene comprising the nucleic acid sequence SEQ ID NO. 10708, preferably the coding region thereof, conferred the production of or the increase in proline compared with the wild type control.

[10706] The nucleic acid sequence of B3945 from Escherichia coli, e.g. as shown in the respective line in column 5 of Table I, application no. 2, has been published in Blattner et al., Science 277 (5331), 1453 (1997)). And the activity of the gene product thereof is the activity of glycerol dehydrogenase.

[10707] Accordingly, in one embodiment, the process of the present invention for producing glutamine in a non-human organism, like a microorganism or a plant or a part thereof, comprises increasing or generating the activity of a gene product with the activity of a gene product conferring the activity of “glycerol dehydrogenase”, especially from Escherichia coli or its functional equivalent or its homolog, e.g. the increase of
[10708] (a) a gene product of a gene comprising the nucleic acid molecule as shown in the respective line in column 5 of Table I, application no. 2, preferably the coding region thereof, or a homolog or a fragment thereof, and being depicted in the same respective line as said B3945, or a functional equivalent or a homolog thereof as shown in column 8 of Table I, application no. 2, preferably the coding region thereof, particularly a homolog or functional equivalent as shown in column 8 of Table I B, application no. 2, and being depicted in the same respective line as said B3945, and preferably the activity is increased non-targeted, or
[10709] (b) a polypeptide comprising a polypeptide, a consensus sequence or at least a polypeptide motif as shown in the respective line in column 5 of Table II or in column 8 of Table IV, application no. 2, respectively, and being depicted in the same respective line as said

[10710] B3945, or a functional equivalent or a homolog thereof as depicted in column 8 of Table II, application no. 2, preferably a homolog or functional equivalent as depicted in column 8 of Table II B, application no. 2, and being depicted in the same respective line as said B3945, and preferably the activity is increased non-targeted.

[10711] Accordingly, in one embodiment, the molecule which activity is to be increased in the process of the invention is the gene product with an activity as a “glycerol dehydrogenase”, preferably it is the molecule of section (a) or (b) of this paragraph.

[10712] In particular, it was observed that in plants, especially in Arabidopsis thaliana, increasing or generating the activity of a gene product non-targeted with the activity of a “glycerol dehydrogenase”, preferably being encoded by a gene comprising the nucleic acid sequence SEQ ID NO. 44223, preferably the coding region thereof, conferred the production of or the increase in glutamine compared with the wild type control.

[10713] The nucleic acid sequence of B3989 from Escherichia coli, e.g. as shown in the respective line in column 5 of Table I, application no. 2, has been published in Blattner et al., Science 277 (5331), 1453 (1997)). And the activity of the gene product thereof is the activity of b3989-protein.

[10714] Accordingly, in one embodiment, the process of the present invention for producing glutamine in a non-human organism, like a microorganism or a plant or a part thereof, comprises increasing or generating the activity of a gene product with the activity of a gene product conferring the activity of “b3989-protein”, especially from Escherichia coli or its functional equivalent or its homolog, e.g. the increase of
[10715] (a) a gene product of a gene comprising the nucleic acid molecule as shown in the respective line in column 5 of Table I, application no. 2, preferably the coding region thereof, or a homolog or a fragment thereof, and being depicted in the same respective line as said B3989, or a functional equivalent or a homolog thereof as shown in column 8 of Table I, application no. 2, preferably the coding region thereof, particularly a homolog or functional equivalent as shown in column 8 of Table I B, application no. 2, and being depicted in the same respective line as said B3989, and preferably the activity is increased non-targeted, or
[10716] (b) a polypeptide comprising a polypeptide, a consensus sequence or at least a polypeptide motif as shown in the respective line in column 5 of Table II or in column 8 of Table IV, application no. 2, respectively, and being depicted in the same respective line as said B3989, or a functional equivalent or a homolog thereof as depicted in column 8 of Table II, application no. 2, preferably a homolog or functional equivalent as depicted in column 8 of Table II B, application no. 2, and being depicted in the same respective line as said B3989, and preferably the activity is increased non-targeted.

[10717] Accordingly, in one embodiment, the molecule which activity is to be increased in the process of the invention is the gene product with an activity as a “b3989-protein”, preferably it is the molecule of section (a) or (b) of this paragraph.

[10718] In particular, it was observed that in plants, especially in Arabidopsis thaliana, increasing or generating the activity of a gene product non-targeted with the activity of a “b3989-protein”, preferably being encoded by a gene comprising the nucleic acid sequence SEQ ID NO. 44372, preferably the coding region thereof, conferred the production of or the increase in glutamine compared with the wild type control.

[10719] The nucleic acid sequence of B4012 from Escherichia coli, e.g. as shown in the respective line in column 5 of Table I, application no. 2, has been published in Blattner et al., Science 277 (5331), 1453 (1997)). And the activity of the gene product thereof is the activity of acetyltransferase.

[10720] Accordingly, in one embodiment, the process of the present invention for producing glutamate in a non-human organism, like a microorganism or a plant or a part thereof, comprises increasing or generating the activity of a gene product with the activity of a gene product conferring the activity of “acetyltransferase”, especially from Escherichia coli or its functional equivalent or its homolog, e.g. the increase of
[10721] (a) a gene product of a gene comprising the nucleic acid molecule as shown in the respective line in column 5 of Table I, application no. 2, preferably the coding region thereof, or a homolog or a fragment thereof, and being depicted in the same respective line as said B4012, or a functional equivalent or a homolog thereof as shown in column 8 of Table I, application no. 2, preferably the coding region thereof, particularly a homolog or functional equivalent as shown in column 8 of Table I B, application no. 2, and being depicted in the same respective line as said B4012, and preferably the activity is increased non-targeted, or
[10722] (b) a polypeptide comprising a polypeptide, a consensus sequence or at least a polypeptide motif as shown in the respective line in column 5 of Table II or in column 8 of Table IV, application no. 2, respectively, and being depicted in the same respective line as said B4012, or a functional equivalent or a homolog thereof as depicted in column 8 of Table II, application no. 2, preferably a homolog or functional equivalent as depicted in column 8 of Table II B, application no. 2, and being depicted in the same respective line as said B4012, and preferably the activity is increased non-targeted.

[10723] Accordingly, in one embodiment, the molecule which activity is to be increased in the process of the invention is the gene product with an activity as a “acetyltransferase”, preferably it is the molecule of section (a) or (b) of this paragraph.

[10724] In particular, it was observed that in plants, especially in Arabidopsis thaliana, increasing or generating the activity of a gene product non-targeted with the activity of a “acetyltransferase”, preferably being encoded by a gene comprising the nucleic acid sequence SEQ ID NO. 44378, preferably the coding region thereof, conferred the production of or the increase in glutamate compared with the wild type control.

[10725] The nucleic acid sequence of B4029 from Escherichia coli, e.g. as shown in the respective line in column 5 of Table I, application no. 2, has been published in Blattner et al., Science 277 (5331), 1453 (1997)). And the activity of the gene product thereof is the activity of b4029-protein.

[10726] Accordingly, in one embodiment, the process of the present invention for producing arginine in a non-human organism, like a microorganism or a plant or a part thereof, comprises increasing or generating the activity of a gene product with the activity of a gene product conferring the activity of “b4029-protein”, especially from Escherichia coli or its functional equivalent or its homolog, e.g. the increase of
[10727] (a) a gene product of a gene comprising the nucleic acid molecule as shown in the respective line in column 5 of Table I, application no. 2, preferably the coding region thereof, or a homolog or a fragment thereof, and being depicted in the same respective line as said B4029, or a functional equivalent or a homolog thereof as shown in column 8 of Table I, application no. 2, preferably the coding region thereof, particularly a homolog or functional equivalent as shown in column 8 of Table I B, application no. 2, and being depicted in the same respective line as said B4029, and preferably the activity is increased non-targeted, or
[10728] (b) a polypeptide comprising a polypeptide, a consensus sequence or at least a polypeptide motif as shown in the respective line in column 5 of Table II or in column 8 of Table IV, application no. 2, respectively, and being depicted in the same respective line as said B4029, or a functional equivalent or a homolog thereof as depicted in column 8 of Table II, application no. 2, preferably a homolog or functional equivalent as depicted in column 8 of Table II B, application no. 2, and being depicted in the same respective line as said B4029, and preferably the activity is increased non-targeted.

[10729] Accordingly, in one embodiment, the molecule which activity is to be increased in the process of the invention is the gene product with an activity as a “b4029-protein”, preferably it is the molecule of section (a) or (b) of this paragraph.

[10730] In particular, it was observed that in plants, especially in Arabidopsis thaliana, increasing or generating the activity of a gene product non-targeted with the activity of a “b4029-protein”, preferably being encoded by a gene comprising the nucleic acid sequence SEQ ID NO. 10740, preferably the coding region thereof, conferred the production of or the increase in arginine compared with the wild type control.

[10731] The nucleic acid sequence of B4029 from Escherichia coli, e.g. as shown in the respective line in column 5 of Table I, application no. 2, has been published in Blattner et al., Science 277 (5331), 1453 (1997)). And the activity of the gene product thereof is the activity of b4029-protein.

[10732] Accordingly, in one embodiment, the process of the present invention for producing glutamine in a non-human organism, like a microorganism or a plant or a part thereof, comprises increasing or generating the activity of a gene product with the activity of a gene product conferring the activity of “b4029-protein”, especially from Escherichia coli or its functional equivalent or its homolog, e.g. the increase of
[10733] (a) a gene product of a gene comprising the nucleic acid molecule as shown in the respective line in column 5 of Table I, application no. 2, preferably the coding region thereof, or a homolog or a fragment thereof, and being depicted in the same respective line as said B4029, or a functional equivalent or a homolog thereof as shown in column 8 of Table I, application no. 2, preferably the coding region thereof, particularly a homolog or functional equivalent as shown in column 8 of Table I B, application no. 2, and being depicted in the same respective line as said B4029, and preferably the activity is increased non-targeted, or
[10734] (b) a polypeptide comprising a polypeptide, a consensus sequence or at least a polypeptide motif as shown in the respective line in column 5 of Table II or in column 8 of Table IV, application no. 2, respectively, and being depicted in the same respective line as said B4029, or a functional equivalent or a homolog thereof as depicted in column 8 of Table II, application no. 2, preferably a homolog or functional equivalent as depicted in column 8 of Table II B, application no. 2, and being depicted in the same respective line as said B4029, and preferably the activity is increased non-targeted.

[10735] Accordingly, in one embodiment, the molecule which activity is to be increased in the process of the invention is the gene product with an activity as a “b4029-protein”, preferably it is the molecule of section (a) or (b) of this paragraph.

[10736] In particular, it was observed that in plants, especially in Arabidopsis thaliana, increasing or generating the activity of a gene product non-targeted with the activity of a “b4029-protein”, preferably being encoded by a gene comprising the nucleic acid sequence SEQ ID NO. 10740, preferably the coding region thereof, conferred the production of or the increase in glutamine compared with the wild type control.

[10737] The nucleic acid sequence of B4029 from Escherichia coli, e.g. as shown in the respective line in column 5 of Table I, application no. 2, has been published in Blattner et al., Science 277 (5331), 1453 (1997)). And the activity of the gene product thereof is the activity of b4029-protein.

[10738] Accordingly, in one embodiment, the process of the present invention for producing proline in a non-human organism, like a microorganism or a plant or a part thereof, comprises increasing or generating the activity of a gene product with the activity of a gene product conferring the activity of “b4029-protein”, especially from Escherichia coli or its functional equivalent or its homolog, e.g. the increase of
[10739] (a) a gene product of a gene comprising the nucleic acid molecule as shown in the respective line in column 5 of Table I, application no. 2, preferably the coding region thereof, or a homolog or a fragment thereof, and being depicted in the same respective line as said B4029, or a functional equivalent or a homolog thereof as shown in column 8 of Table I, application no. 2, preferably the coding region thereof, particularly a homolog or functional equivalent as shown in column 8 of Table I B, application no. 2, and being depicted in the same respective line as said B4029, and preferably the activity is increased non-targeted, or
[10740] (b) a polypeptide comprising a polypeptide, a consensus sequence or at least a polypeptide motif as shown in the respective line in column 5 of Table II or in column 8 of Table IV, application no. 2, respectively, and being depicted in the same respective line as said B4029, or a functional equivalent or a homolog thereof as depicted in column 8 of Table II, application no. 2, preferably a homolog or functional equivalent as depicted in column 8 of Table II B, application no. 2, and being depicted in the same respective line as said B4029, and preferably the activity is increased non-targeted.

[10741] Accordingly, in one embodiment, the molecule which activity is to be increased in the process of the invention is the gene product with an activity as a “b4029-protein”, preferably it is the molecule of section (a) or (b) of this paragraph.

[10742] In particular, it was observed that in plants, especially in Arabidopsis thaliana, increasing or generating the activity of a gene product non-targeted with the activity of a “b4029-protein”, preferably being encoded by a gene comprising the nucleic acid sequence SEQ ID NO. 10740, preferably the coding region thereof, conferred the production of or the increase in proline compared with the wild type control.

[10743] The nucleic acid sequence of B4067 from Escherichia coli, e.g. as shown in the respective line in column 5 of Table I, application no. 2, has been published in Blattner et al., Science 277 (5331), 1453 (1997)). And the activity of the gene product thereof is the activity of cation/acetate symporter.

[10744] Accordingly, in one embodiment, the process of the present invention for producing arginine in a non-human organism, like a microorganism or a plant or a part thereof, comprises increasing or generating the activity of a gene product with the activity of a gene product conferring the activity of “cation/acetate symporter”, especially from Escherichia coli or its functional equivalent or its homolog, e.g. the increase of
[10745] (a) a gene product of a gene comprising the nucleic acid molecule as shown in the respective line in column 5 of Table I, application no. 2, preferably the coding region thereof, or a homolog or a fragment thereof, and being depicted in the same respective line as said B4067, or a functional equivalent or a homolog thereof as shown in column 8 of Table I, application no. 2, preferably the coding region thereof, particularly a homolog or functional equivalent as shown in column 8 of Table I B, application no. 2, and being depicted in the same respective line as said B4067, and preferably the activity is increased non-targeted, or
[10746] (b) a polypeptide comprising a polypeptide, a consensus sequence or at least a polypeptide motif as shown in the respective line in column 5 of Table II or in column 8 of Table IV, application no. 2, respectively, and being depicted in the same respective line as said B4067, or a functional equivalent or a homolog thereof as depicted in column 8 of Table II, application no. 2, preferably a homolog or functional equivalent as depicted in column 8 of Table II B, application no. 2, and being depicted in the same respective line as said B4067, and preferably the activity is increased non-targeted.

[10747] Accordingly, in one embodiment, the molecule which activity is to be increased in the process of the invention is the gene product with an activity as a “cation/acetate symporter”, preferably it is the molecule of section (a) or (b) of this paragraph.

[10748] In particular, it was observed that in plants, especially in Arabidopsis thaliana, increasing or generating the activity of a gene product non-targeted with the activity of a “cation/acetate symporter”, preferably being encoded by a gene comprising the nucleic acid sequence SEQ ID NO. 44466, preferably the coding region thereof, conferred the production of or the increase in arginine compared with the wild type control.

[10749] The nucleic acid sequence of B4121 from Escherichia coli, e.g. as shown in the respective line in column 5 of Table I, application no. 2, has been published in Blattner et al., Science 277 (5331), 1453 (1997)). And the activity of the gene product thereof is the activity of b4121-protein.

[10750] Accordingly, in one embodiment, the process of the present invention for producing arginine in a non-human organism, like a microorganism or a plant or a part thereof, comprises increasing or generating the activity of a gene product with the activity of a gene product conferring the activity of “b4121-protein”, especially from Escherichia coli or its functional equivalent or its homolog, e.g. the increase of
[10751] (a) a gene product of a gene comprising the nucleic acid molecule as shown in the respective line in column 5 of Table I, application no. 2, preferably the coding region thereof, or a homolog or a fragment thereof, and being depicted in the same respective line as said B4121, or a functional equivalent or a homolog thereof as shown in column 8 of Table I, application no. 2, preferably the coding region thereof, particularly a homolog or functional equivalent as shown in column 8 of Table I B, application no. 2, and being depicted in the same respective line as said B4121, and preferably the activity is increased non-targeted, or
[10752] (b) a polypeptide comprising a polypeptide, a consensus sequence or at least a polypeptide motif as shown in the respective line in column 5 of Table II or in column 8 of Table IV, application no. 2, respectively, and being depicted in the same respective line as said B4121, or a functional equivalent or a homolog thereof as depicted in column 8 of Table II, application no. 2, preferably a homolog or functional equivalent as depicted in column 8 of Table II B, application no. 2, and being depicted in the same respective line as said B4121, and preferably the activity is increased non-targeted.

[10753] Accordingly, in one embodiment, the molecule which activity is to be increased in the process of the invention is the gene product with an activity as a “b4121-protein”, preferably it is the molecule of section (a) or (b) of this paragraph.

[10754] In particular, it was observed that in plants, especially in Arabidopsis thaliana, increasing or generating the activity of a gene product non-targeted with the activity of a “b4121-protein”, preferably being encoded by a gene comprising the nucleic acid sequence SEQ ID NO. 44609, preferably the coding region thereof, conferred the production of or the increase in arginine compared with the wild type control.

[10755] The nucleic acid sequence of B4121 from Escherichia coli, e.g. as shown in the respective line in column 5 of Table I, application no. 2, has been published in Blattner et al., Science 277 (5331), 1453 (1997)). And the activity of the gene product thereof is the activity of b4121-protein.

[10756] Accordingly, in one embodiment, the process of the present invention for producing proline in a non-human organism, like a microorganism or a plant or a part thereof, comprises increasing or generating the activity of a gene product with the activity of a gene product conferring the activity of “b4121-protein”, especially from Escherichia coli or its functional equivalent or its homolog, e.g. the increase of
[10757] (a) a gene product of a gene comprising the nucleic acid molecule as shown in the respective line in column 5 of Table I, application no. 2, preferably the coding region thereof, or a homolog or a fragment thereof, and being depicted in the same respective line as said B4121, or a functional equivalent or a homolog thereof as shown in column 8 of Table I, application no. 2, preferably the coding region thereof, particularly a homolog or functional equivalent as shown in column 8 of Table I B, application no. 2, and being depicted in the same respective line as said B4121, and preferably the activity is increased non-targeted, or
[10758] (b) a polypeptide comprising a polypeptide, a consensus sequence or at least a polypeptide motif as shown in the respective line in column 5 of Table II or in column 8 of Table IV, application no. 2, respectively, and being depicted in the same respective line as said B4121, or a functional equivalent or a homolog thereof as depicted in column 8 of Table II, application no. 2, preferably a homolog or functional equivalent as depicted in column 8 of Table II B, application no. 2, and being depicted in the same respective line as said B4121, and preferably the activity is increased non-targeted.

[10759] Accordingly, in one embodiment, the molecule which activity is to be increased in the process of the invention is the gene product with an activity as a “b4121-protein”, preferably it is the molecule of section (a) or (b) of this paragraph.

[10760] In particular, it was observed that in plants, especially in Arabidopsis thaliana, increasing or generating the activity of a gene product non-targeted with the activity of a “b4121-protein”, preferably being encoded by a gene comprising the nucleic acid sequence SEQ ID NO. 44609, preferably the coding region thereof, conferred the production of or the increase in proline compared with the wild type control.

[10761] The nucleic acid sequence of B4129 from Escherichia coli, e.g. as shown in the respective line in column 5 of Table I, application no. 2, has been published in Blattner et al., Science 277 (5331), 1453 (1997)). And the activity of the gene product thereof is the activity of lysyl-tRNA synthetase.

[10762] Accordingly, in one embodiment, the process of the present invention for producing proline in a non-human organism, like a microorganism or a plant or a part thereof, comprises increasing or generating the activity of a gene product with the activity of a gene product conferring the activity of “lysyl-tRNA synthetase”, especially from Escherichia coli or its functional equivalent or its homolog, e.g. the increase of
[10763] (a) a gene product of a gene comprising the nucleic acid molecule as shown in the respective line in column 5 of Table I, application no. 2, preferably the coding region thereof, or a homolog or a fragment thereof, and being depicted in the same respective line as said B4129, or a functional equivalent or a homolog thereof as shown in column 8 of Table I, application no. 2, preferably the coding region thereof, particularly a homolog or functional equivalent as shown in column 8 of Table I B, application no. 2, and being depicted in the same respective line as said B4129, and preferably the activity is increased non-targeted, or
[10764] (b) a polypeptide comprising a polypeptide, a consensus sequence or at least a polypeptide motif as shown in the respective line in column 5 of Table II or in column 8 of Table IV, application no. 2, respectively, and being depicted in the same respective line as said B4129, or a functional equivalent or a homolog thereof as depicted in column 8 of Table II, application no. 2, preferably a homolog or functional equivalent as depicted in column 8 of Table II B, application no. 2, and being depicted in the same respective line as said B4129, and preferably the activity is increased non-targeted.

[10765] Accordingly, in one embodiment, the molecule which activity is to be increased in the process of the invention is the gene product with an activity as a “lysyl-tRNA synthetase”, preferably it is the molecule of section (a) or (b) of this paragraph.

[10766] In particular, it was observed that in plants, especially in Arabidopsis thaliana, increasing or generating the activity of a gene product non-targeted with the activity of a “lysyl-tRNA synthetase”, preferably being encoded by a gene comprising the nucleic acid sequence SEQ ID NO. 44662, preferably the coding region thereof, conferred the production of or the increase in proline compared with the wild type control.

[10767] The nucleic acid sequence of B4139 from Escherichia coli, e.g. as shown in the respective line in column 5 of Table I, application no. 2, has been published in Blattner et al., Science 277 (5331), 1453 (1997)). And the activity of the gene product thereof is the activity of aspartase.

[10768] Accordingly, in one embodiment, the process of the present invention for producing glutamine in a non-human organism, like a microorganism or a plant or a part thereof, comprises increasing or generating the activity of a gene product with the activity of a gene product conferring the activity of “aspartase”, especially from Escherichia coli or its functional equivalent or its homolog, e.g. the increase of
[10769] (a) a gene product of a gene comprising the nucleic acid molecule as shown in the respective line in column 5 of Table I, application no. 2, preferably the coding region thereof, or a homolog or a fragment thereof, and being depicted in the same respective line as said B4139, or a functional equivalent or a homolog thereof as shown in column 8 of Table I, application no. 2, preferably the coding region thereof, particularly a homolog or functional equivalent as shown in column 8 of Table I B, application no. 2, and being depicted in the same respective line as said B4139, and preferably the activity is increased non-targeted, or
[10770] (b) a polypeptide comprising a polypeptide, a consensus sequence or at least a polypeptide motif as shown in the respective line in column 5 of Table II or in column 8 of Table IV, application no. 2, respectively, and being depicted in the same respective line as said B4139, or a functional equivalent or a homolog thereof as depicted in column 8 of Table II, application no. 2, preferably a homolog or functional equivalent as depicted in column 8 of Table II B, application no. 2, and being depicted in the same respective line as said B4139, and preferably the activity is increased non-targeted.

[10771] Accordingly, in one embodiment, the molecule which activity is to be increased in the process of the invention is the gene product with an activity as a “aspartase”, preferably it is the molecule of section (a) or (b) of this paragraph.

[10772] In particular, it was observed that in plants, especially in Arabidopsis thaliana, increasing or generating the activity of a gene product non-targeted with the activity of a “aspartase”, preferably being encoded by a gene comprising the nucleic acid sequence SEQ ID NO. 45022, preferably the coding region thereof, conferred the production of or the increase in glutamine compared with the wild type control.

[10773] The nucleic acid sequence of B4256 from Escherichia coli, e.g. as shown in the respective line in column 5 of Table I, application no. 2, has been published in Blattner et al., Science 277 (5331), 1453 (1997)). And the activity of the gene product thereof is the activity of acetyltransferase.

[10774] Accordingly, in one embodiment, the process of the present invention for producing arginine in a non-human organism, like a microorganism or a plant or a part thereof, comprises increasing or generating the activity of a gene product with the activity of a gene product conferring the activity of “acetyltransferase”, especially from Escherichia coli or its functional equivalent or its homolog, e.g. the increase of
[10775] (a) a gene product of a gene comprising the nucleic acid molecule as shown in the respective line in column 5 of Table I, application no. 2, preferably the coding region thereof, or a homolog or a fragment thereof, and being depicted in the same respective line as said B4256, or a functional equivalent or a homolog thereof as shown in column 8 of Table I, application no. 2, preferably the coding region thereof, particularly a homolog or functional equivalent as shown in column 8 of Table I B, application no. 2, and being depicted in the same respective line as said B4256, and preferably the activity is increased non-targeted, or
[10776] (b) a polypeptide comprising a polypeptide, a consensus sequence or at least a polypeptide motif as shown in the respective line in column 5 of Table II or in column 8 of Table IV, application no. 2, respectively, and being depicted in the same respective line as said B4256, or a functional equivalent or a homolog thereof as depicted in column 8 of Table II, application no. 2, preferably a homolog or functional equivalent as depicted in column 8 of Table II B, application no. 2, and being depicted in the same respective line as said B4256, and preferably the activity is increased non-targeted.

[10777] Accordingly, in one embodiment, the molecule which activity is to be increased in the process of the invention is the gene product with an activity as a “acetyltransferase”, preferably it is the molecule of section (a) or (b) of this paragraph.

[10778] In particular, it was observed that in plants, especially in Arabidopsis thaliana, increasing or generating the activity of a gene product non-targeted with the activity of a “acetyltransferase”, preferably being encoded by a gene comprising the nucleic acid sequence SEQ ID NO. 45321, preferably the coding region thereof, conferred the production of or the increase in arginine compared with the wild type control.

[10779] The nucleic acid sequence of B4256 from Escherichia coli, e.g. as shown in the respective line in column 5 of Table I, application no. 2, has been published in Blattner et al., Science 277 (5331), 1453 (1997)). And the activity of the gene product thereof is the activity of acetyltransferase.

[10780] Accordingly, in one embodiment, the process of the present invention for producing glutamine in a non-human organism, like a microorganism or a plant or a part thereof, comprises increasing or generating the activity of a gene product with the activity of a gene product conferring the activity of “acetyltransferase”, especially from Escherichia coli or its functional equivalent or its homolog, e.g. the increase of
[10781] (a) a gene product of a gene comprising the nucleic acid molecule as shown in the respective line in column 5 of Table I, application no. 2, preferably the coding region thereof, or a homolog or a fragment thereof, and being depicted in the same respective line as said B4256, or a functional equivalent or a homolog thereof as shown in column 8 of Table I, application no. 2, preferably the coding region thereof, particularly a homolog or functional equivalent as shown in column 8 of Table I B, application no. 2, and being depicted in the same respective line as said B4256, and preferably the activity is increased non-targeted, or
[10782] (b) a polypeptide comprising a polypeptide, a consensus sequence or at least a polypeptide motif as shown in the respective line in column 5 of Table II or in column 8 of Table IV, application no. 2, respectively, and being depicted in the same respective line as said B4256, or a functional equivalent or a homolog thereof as depicted in column 8 of Table II, application no. 2, preferably a homolog or functional equivalent as depicted in column 8 of Table II B, application no. 2, and being depicted in the same respective line as said B4256, and preferably the activity is increased non-targeted.

[10783] Accordingly, in one embodiment, the molecule which activity is to be increased in the process of the invention is the gene product with an activity as a “acetyltransferase”, preferably it is the molecule of section (a) or (b) of this paragraph.

[10784] In particular, it was observed that in plants, especially in Arabidopsis thaliana, increasing or generating the activity of a gene product non-targeted with the activity of a “acetyltransferase”, preferably being encoded by a gene comprising the nucleic acid sequence SEQ ID NO. 45321, preferably the coding region thereof, conferred the production of or the increase in glutamine compared with the wild type control.

[10785] The nucleic acid sequence of B4256 from Escherichia coli, e.g. as shown in the respective line in column 5 of Table I, application no. 2, has been published in Blattner et al., Science 277 (5331), 1453 (1997)). And the activity of the gene product thereof is the activity of acetyltransferase.

[10786] Accordingly, in one embodiment, the process of the present invention for producing proline in a non-human organism, like a microorganism or a plant or a part thereof, comprises increasing or generating the activity of a gene product with the activity of a gene product conferring the activity of “acetyltransferase”, especially from Escherichia coli or its functional equivalent or its homolog, e.g. the increase of
[10787] (a) a gene product of a gene comprising the nucleic acid molecule as shown in the respective line in column 5 of Table I, application no. 2, preferably the coding region thereof, or a homolog or a fragment thereof, and being depicted in the same respective line as said B4256, or a functional equivalent or a homolog thereof as shown in column 8 of Table I, application no. 2, preferably the coding region thereof, particularly a homolog or functional equivalent as shown in column 8 of Table I B, application no. 2, and being depicted in the same respective line as said B4256, and preferably the activity is increased non-targeted, or
[10788] (b) a polypeptide comprising a polypeptide, a consensus sequence or at least a polypeptide motif as shown in the respective line in column 5 of Table II or in column 8 of Table IV, application no. 2, respectively, and being depicted in the same respective line as said B4256, or a functional equivalent or a homolog thereof as depicted in column 8 of Table II, application no. 2, preferably a homolog or functional equivalent as depicted in column 8 of Table II B, application no. 2, and being depicted in the same respective line as said B4256, and preferably the activity is increased non-targeted.

[10789] Accordingly, in one embodiment, the molecule which activity is to be increased in the process of the invention is the gene product with an activity as a “acetyltransferase”, preferably it is the molecule of section (a) or (b) of this paragraph.

[10790] In particular, it was observed that in plants, especially in Arabidopsis thaliana, increasing or generating the activity of a gene product non-targeted with the activity of a “acetyltransferase”, preferably being encoded by a gene comprising the nucleic acid sequence SEQ ID NO. 45321, preferably the coding region thereof, conferred the production of or the increase in proline compared with the wild type control.

[10791] The nucleic acid sequence of B4321 from Escherichia coli, e.g. as shown in the respective line in column 5 of Table I, application no. 2, has been published in Blattner et al., Science 277 (5331), 1453 (1997)). And the activity of the gene product thereof is the activity of gluconate transport system permease 3.

[10792] Accordingly, in one embodiment, the process of the present invention for producing arginine in a non-human organism, like a microorganism or a plant or a part thereof, comprises increasing or generating the activity of a gene product with the activity of a gene product conferring the activity of “gluconate transport system permease 3”, especially from Escherichia coli or its functional equivalent or its homolog, e.g. the increase of
[10793] (a) a gene product of a gene comprising the nucleic acid molecule as shown in the respective line in column 5 of Table I, application no. 2, preferably the coding region thereof, or a homolog or a fragment thereof, and being depicted in the same respective line as said B4321, or a functional equivalent or a homolog thereof as shown in column 8 of Table I, application no. 2, preferably the coding region thereof, particularly a homolog or functional equivalent as shown in column 8 of Table I B, application no. 2, and being depicted in the same respective line as said B4321, and preferably the activity is increased non-targeted, or
[10794] (b) a polypeptide comprising a polypeptide, a consensus sequence or at least a polypeptide motif as shown in the respective line in column 5 of Table II or in column 8 of Table IV, application no. 2, respectively, and being depicted in the same respective line as said B4321, or a functional equivalent or a homolog thereof as depicted in column 8 of Table II, application no. 2, preferably a homolog or functional equivalent as depicted in column 8 of Table II B, application no. 2, and being depicted in the same respective line as said B4321, and preferably the activity is increased non-targeted.

[10795] Accordingly, in one embodiment, the molecule which activity is to be increased in the process of the invention is the gene product with an activity as a “gluconate transport system permease 3”, preferably it is the molecule of section (a) or (b) of this paragraph.

[10796] In particular, it was observed that in plants, especially in Arabidopsis thaliana, increasing or generating the activity of a gene product non-targeted with the activity of a “gluconate transport system permease 3”, preferably being encoded by a gene comprising the nucleic acid sequence SEQ ID NO. 45394, preferably the coding region thereof, conferred the production of or the increase in arginine compared with the wild type control.

[10797] The nucleic acid sequence of B4384 from Escherichia coli, e.g. as shown in the respective line in column 5 of Table I, application no. 2, has been published in Blattner et al., Science 277 (5331), 1453 (1997)). And the activity of the gene product thereof is the activity of purinenucleoside phosphorylase.

[10798] Accordingly, in one embodiment, the process of the present invention for producing glutamate in a non-human organism, like a microorganism or a plant or a part thereof, comprises increasing or generating the activity of a gene product with the activity of a gene product conferring the activity of “purine-nucleoside phosphorylase”, especially from Escherichia coli or its functional equivalent or its homolog, e.g. the increase of
[10799] (a) a gene product of a gene comprising the nucleic acid molecule as shown in the respective line in column 5 of Table I, application no. 2, preferably the coding region thereof, or a homolog or a fragment thereof, and being depicted in the same respective line as said B4384, or a functional equivalent or a homolog thereof as shown in column 8 of Table I, application no. 2, preferably the coding region thereof, particularly a homolog or functional equivalent as shown in column 8 of Table I B, application no. 2, and being depicted in the same respective line as said B4384, and preferably the activity is increased non-targeted, or
[10800] (b) a polypeptide comprising a polypeptide, a consensus sequence or at least a polypeptide motif as shown in the respective line in column 5 of Table II or in column 8 of Table IV, application no. 2, respectively, and being depicted in the same respective line as said B4384, or a functional equivalent or a homolog thereof as depicted in column 8 of Table II, application no. 2, preferably a homolog or functional equivalent as depicted in column 8 of Table II B, application no. 2, and being depicted in the same respective line as said B4384, and preferably the activity is increased non-targeted.

[10801] Accordingly, in one embodiment, the molecule which activity is to be increased in the process of the invention is the gene product with an activity as a “purine-nucleoside phosphorylase”, preferably it is the molecule of section (a) or (b) of this paragraph.

[10802] In particular, it was observed that in plants, especially in Arabidopsis thaliana, increasing or generating the activity of a gene product non-targeted with the activity of a “purine-nucleoside phosphorylase”, preferably being encoded by a gene comprising the nucleic acid sequence SEQ ID NO. 45556, preferably the coding region thereof, conferred the production of or the increase in glutamate compared with the wild type control.

[10803] The nucleic acid sequence of B4384 from Escherichia coli, e.g. as shown in the respective line in column 5 of Table I, application no. 2, has been published in Blattner et al., Science 277 (5331), 1453 (1997)). And the activity of the gene product thereof is the activity of purinenucleoside phosphorylase.

[10804] Accordingly, in one embodiment, the process of the present invention for producing proline in a non-human organism, like a microorganism or a plant or a part thereof, comprises increasing or generating the activity of a gene product with the activity of a gene product conferring the activity of “purine-nucleoside phosphorylase”, especially from Escherichia coli or its functional equivalent or its homolog, e.g. the increase of
[10805] (a) a gene product of a gene comprising the nucleic acid molecule as shown in the respective line in column 5 of Table I, application no. 2, preferably the coding region thereof, or a homolog or a fragment thereof, and being depicted in the same respective line as said B4384, or a functional equivalent or a homolog thereof as shown in column 8 of Table I, application no. 2, preferably the coding region thereof, particularly a homolog or functional equivalent as shown in column 8 of Table I B, application no. 2, and being depicted in the same respective line as said B4384, and preferably the activity is increased non-targeted, or
[10806] (b) a polypeptide comprising a polypeptide, a consensus sequence or at least a polypeptide motif as shown in the respective line in column 5 of Table II or in column 8 of Table IV, application no. 2, respectively, and being depicted in the same respective line as said B4384, or a functional equivalent or a homolog thereof as depicted in column 8 of Table II, application no. 2, preferably a homolog or functional equivalent as depicted in column 8 of Table II B, application no. 2, and being depicted in the same respective line as said B4384, and preferably the activity is increased non-targeted.

[10807] Accordingly, in one embodiment, the molecule which activity is to be increased in the process of the invention is the gene product with an activity as a “purine-nucleoside phosphorylase”, preferably it is the molecule of section (a) or (b) of this paragraph.

[10808] In particular, it was observed that in plants, especially in Arabidopsis thaliana, increasing or generating the activity of a gene product non-targeted with the activity of a “purine-nucleoside phosphorylase”, preferably being encoded by a gene comprising the nucleic acid sequence SEQ ID NO. 45556, preferably the coding region thereof, conferred the production of or the increase in proline compared with the wild type control.

[10809] The nucleic acid sequence of C_pp004096192r from Physcomitrella patens, e.g. as shown in the respective line in column 5 of Table I, application no. 2 is unpublished. And the activity of the gene product thereof is the activity of thioredoxin.

[10810] Accordingly, in one embodiment, the process of the present invention for producing arginine in a non-human organism, like a microorganism or a plant or a part thereof, comprises increasing or generating the activity of a gene product with the activity of a gene product conferring the activity of “thioredoxin”, especially from Physcomitrella patens or its functional equivalent or its homolog, e.g. the increase of
[10811] (a) a gene product of a gene comprising the nucleic acid molecule as shown in the respective line in column 5 of Table I, application no. 2, preferably the coding region thereof, or a homolog or a fragment thereof, and being depicted in the same respective line as said C_pp004096192r, or a functional equivalent or a homolog thereof as shown in column 8 of Table I, application no. 2, preferably the coding region thereof, particularly a homolog or functional equivalent as shown in column 8 of Table I B, application no. 2, and being depicted in the same respective line as said C_pp004096192r, and preferably the activity is increased non-targeted, or
[10812] (b) a polypeptide comprising a polypeptide, a consensus sequence or at least a polypeptide motif as shown in the respective line in column 5 of Table II or in column 8 of Table IV, application no. 2, respectively, and being depicted in the same respective line as said C_pp004096192r, or a functional equivalent or a homolog thereof as depicted in column 8 of Table II, application no. 2, preferably a homolog or functional equivalent as depicted in column 8 of Table II B, application no. 2, and being depicted in the same respective line as said C_pp004096192r, and preferably the activity is increased non-targeted.

[10813] Accordingly, in one embodiment, the molecule which activity is to be increased in the process of the invention is the gene product with an activity as a “thioredoxin”, preferably it is the molecule of section (a) or (b) of this paragraph.

[10814] In particular, it was observed that in plants, especially in Arabidopsis thaliana, increasing or generating the activity of a gene product non-targeted with the activity of a “thioredoxin”, preferably being encoded by a gene comprising the nucleic acid sequence SEQ ID NO. 45757, preferably the coding region thereof, conferred the production of or the increase in arginine compared with the wild type control.

[10815] The nucleic acid sequence of GM02LC11114 from Glycine max, e.g. as shown in the respective line in column 5 of Table I, application no. 2 is unpublished. And the activity of the gene product thereof is the activity of GM02LC11114-protein.

[10816] Accordingly, in one embodiment, the process of the present invention for producing proline in a non-human organism, like a microorganism or a plant or a part thereof, comprises increasing or generating the activity of a gene product with the activity of a gene product conferring the activity of “GM02LC11114-protein”, especially from Glycine max or its functional equivalent or its homolog, e.g. the increase of
[10817] (a) a gene product of a gene comprising the nucleic acid molecule as shown in the respective line in column 5 of Table I, application no. 2, preferably the coding region thereof, or a homolog or a fragment thereof, and being depicted in the same respective line as said GM02LC11114, or a functional equivalent or a homolog thereof as shown in column 8 of Table I, application no. 2, preferably the coding region thereof, particularly a homolog or functional equivalent as shown in column 8 of Table I B, application no. 2, and being depicted in the same respective line as said GM02LC11114, and preferably the activity is increased non-targeted, or
[10818] (b) a polypeptide comprising a polypeptide, a consensus sequence or at least a polypeptide motif as shown in the respective line in column 5 of Table II or in column 8 of Table IV, application no. 2, respectively, and being depicted in the same respective line as said GM02LC11114, or a functional equivalent or a homolog thereof as depicted in column 8 of Table II, application no. 2, preferably a homolog or functional equivalent as depicted in column 8 of Table II B, application no. 2, and being depicted in the same respective line as said GM02LC11114, and preferably the activity is increased non-targeted.

[10819] Accordingly, in one embodiment, the molecule which activity is to be increased in the process of the invention is the gene product with an activity as a “GM02LC11114-protein”, preferably it is the molecule of section (a) or (b) of this paragraph.

[10820] In particular, it was observed that in plants, especially in Arabidopsis thaliana, increasing or generating the activity of a gene product non-targeted with the activity of a “GM02LC11114-protein”, preferably being encoded by a gene comprising the nucleic acid sequence SEQ ID NO. 45795, preferably the coding region thereof, conferred the production of or the increase in proline compared with the wild type control.

[10821] The nucleic acid sequence of GM02LC12622 from Glycine max, e.g. as shown in the respective line in column 5 of Table I, application no. 2 is unpublished. And the activity of the gene product thereof is the activity of glutaredoxin.

[10822] Accordingly, in one embodiment, the process of the present invention for producing glutamine in a non-human organism, like a microorganism or a plant or a part thereof, comprises increasing or generating the activity of a gene product with the activity of a gene product conferring the activity of “glutaredoxin”, especially from Glycine max or its functional equivalent or its homolog, e.g. the increase of
[10823] (a) a gene product of a gene comprising the nucleic acid molecule as shown in the respective line in column 5 of Table I, application no. 2, preferably the coding region thereof, or a homolog or a fragment thereof, and being depicted in the same respective line as said GM02LC12622, or a functional equivalent or a homolog thereof as shown in column 8 of Table I, application no. 2, preferably the coding region thereof, particularly a homolog or functional equivalent as shown in column 8 of Table I B, application no. 2, and being depicted in the same respective line as said GM02LC12622, and preferably the activity is increased non-targeted, or
[10824] (b) a polypeptide comprising a polypeptide, a consensus sequence or at least a polypeptide motif as shown in the respective line in column 5 of Table II or in column 8 of Table IV, application no. 2, respectively, and being depicted in the same respective line as said GM02LC12622, or a functional equivalent or a homolog thereof as depicted in column 8 of Table II, application no. 2, preferably a homolog or functional equivalent as depicted in column 8 of Table II B, application no. 2, and being depicted in the same respective line as said GM02LC12622, and preferably the activity is increased non-targeted.

[10825] Accordingly, in one embodiment, the molecule which activity is to be increased in the process of the invention is the gene product with an activity as a “glutaredoxin”, preferably it is the molecule of section (a) or (b) of this paragraph.

[10826] In particular, it was observed that in plants, especially in Arabidopsis thaliana, increasing or generating the activity of a gene product non-targeted with the activity of a “glutaredoxin”, preferably being encoded by a gene comprising the nucleic acid sequence SEQ ID NO. 10811, preferably the coding region thereof, conferred the production of or the increase in glutamine compared with the wild type control.

[10827] The nucleic acid sequence of GM02LC15313 from Glycine max, e.g. as shown in the respective line in column 5 of Table I, application no. 2 is unpublished. And the activity of the gene product thereof is the activity of histone H2A.

[10828] Accordingly, in one embodiment, the process of the present invention for producing arginine in a non-human organism, like a microorganism or a plant or a part thereof, comprises increasing or generating the activity of a gene product with the activity of a gene product conferring the activity of “histone H2A”, especially from Glycine max or its functional equivalent or its homolog, e.g. the increase of
[10829] (a) a gene product of a gene comprising the nucleic acid molecule as shown in the respective line in column 5 of Table I, application no. 2, preferably the coding region thereof, or a homolog or a fragment thereof, and being depicted in the same respective line as said GM02LC15313, or a functional equivalent or a homolog thereof as shown in column 8 of Table I, application no. 2, preferably the coding region thereof, particularly a homolog or functional equivalent as shown in column 8 of Table I B, application no. 2, and being depicted in the same respective line as said GM02LC15313, and preferably the activity is increased non-targeted, or
[10830] (b) a polypeptide comprising a polypeptide, a consensus sequence or at least a polypeptide motif as shown in the respective line in column 5 of Table II or in column 8 of Table IV, application no. 2, respectively, and being depicted in the same respective line as said GM02LC15313, or a functional equivalent or a homolog thereof as depicted in column 8 of Table II, application no. 2, preferably a homolog or functional equivalent as depicted in column 8 of Table II B, application no. 2, and being depicted in the same respective line as said GM02LC15313, and preferably the activity is increased non-targeted.

[10831] Accordingly, in one embodiment, the molecule which activity is to be increased in the process of the invention is the gene product with an activity as a “histone H2A”, preferably it is the molecule of section (a) or (b) of this paragraph.

[10832] In particular, it was observed that in plants, especially in Arabidopsis thaliana, increasing or generating the activity of a gene product non-targeted with the activity of a “histone H2A”, preferably being encoded by a gene comprising the nucleic acid sequence SEQ ID NO. 45897, preferably the coding region thereof, conferred the production of or the increase in arginine compared with the wild type control.

[10833] The nucleic acid sequence of GM02LC15313 from Glycine max, e.g. as shown in the respective line in column 5 of Table I, application no. 2 is unpublished. And the activity of the gene product thereof is the activity of histone H2A.

[10834] Accordingly, in one embodiment, the process of the present invention for producing proline in a non-human organism, like a microorganism or a plant or a part thereof, comprises increasing or generating the activity of a gene product with the activity of a gene product conferring the activity of “histone H2A”, especially from Glycine max or its functional equivalent or its homolog, e.g. the increase of
[10835] (a) a gene product of a gene comprising the nucleic acid molecule as shown in the respective line in column 5 of Table I, application no. 2, preferably the coding region thereof, or a homolog or a fragment thereof, and being depicted in the same respective line as said GM02LC15313, or a functional equivalent or a homolog thereof as shown in column 8 of Table I, application no. 2, preferably the coding region thereof, particularly a homolog or functional equivalent as shown in column 8 of Table I B, application no. 2, and being depicted in the same respective line as said GM02LC15313, and preferably the activity is increased non-targeted, or
[10836] (b) a polypeptide comprising a polypeptide, a consensus sequence or at least a polypeptide motif as shown in the respective line in column 5 of Table II or in column 8 of Table IV, application no. 2, respectively, and being depicted in the same respective line as said GM02LC15313, or a functional equivalent or a homolog thereof as depicted in column 8 of Table II, application no. 2, preferably a homolog or functional equivalent as depicted in column 8 of Table II B, application no. 2, and being depicted in the same respective line as said GM02LC15313, and preferably the activity is increased non-targeted.

[10837] Accordingly, in one embodiment, the molecule which activity is to be increased in the process of the invention is the gene product with an activity as a “histone H2A”, preferably it is the molecule of section (a) or (b) of this paragraph.

[10838] In particular, it was observed that in plants, especially in Arabidopsis thaliana, increasing or generating the activity of a gene product non-targeted with the activity of a “histone H2A”, preferably being encoded by a gene comprising the nucleic acid sequence SEQ ID NO. 45897, preferably the coding region thereof, conferred the production of or the increase in proline compared with the wild type control.

[10839] The nucleic acid sequence of GM02LC17485 from Glycine max, e.g. as shown in the respective line in column 5 of Table I, application no. 2, is unpublished. And the activity of the gene product thereof is the activity of GM02LC17485-protein.

[10840] Accordingly, in one embodiment, the process of the present invention for producing glutamine in a non-human organism, like a microorganism or a plant or a part thereof, comprises increasing or generating the activity of a gene product with the activity of a gene product conferring the activity of “GM02LC17485-protein”, especially from Glycine max or its functional equivalent or its homolog, e.g. the increase of
[10841] (a) a gene product of a gene comprising the nucleic acid molecule as shown in the respective line in column 5 of Table I, application no. 2, preferably the coding region thereof, or a homolog or a fragment thereof, and being depicted in the same respective line as said GM02LC17485, or a functional equivalent or a homolog thereof as shown in column 8 of Table I, application no. 2, preferably the coding region thereof, particularly a homolog or functional equivalent as shown in column 8 of Table I B, application no. 2, and being depicted in the same respective line as said GM02LC17485, and preferably the activity is increased non-targeted, or
[10842] (b) a polypeptide comprising a polypeptide, a consensus sequence or at least a polypeptide motif as shown in the respective line in column 5 of Table II or in column 8 of Table IV, application no. 2, respectively, and being depicted in the same respective line as said GM02LC17485, or a functional equivalent or a homolog thereof as depicted in column 8 of Table II, application no. 2, preferably a homolog or functional equivalent as depicted in column 8 of Table II B, application no. 2, and being depicted in the same respective line as said GM02LC17485, and preferably the activity is increased non-targeted.

[10843] Accordingly, in one embodiment, the molecule which activity is to be increased in the process of the invention is the gene product with an activity as a “GM02LC17485-protein”, preferably it is the molecule of section (a) or (b) of this paragraph.

[10844] In particular, it was observed that in plants, especially in Arabidopsis thaliana, increasing or generating the activity of a gene product non-targeted with the activity of a “GM02LC17485-protein”, preferably being encoded by a gene comprising the nucleic acid sequence SEQ ID NO. 46405, preferably the coding region thereof, conferred the production of or the increase in glutamine compared with the wild type control.

[10845] The nucleic acid sequence of GM02LC17556 from Glycine max, e.g. as shown in the respective line in column 5 of Table I, application no. 2 is unpublished. And the activity of the gene product thereof is the activity of RNA binding protein.

[10846] Accordingly, in one embodiment, the process of the present invention for producing arginine in a non-human organism, like a microorganism or a plant or a part thereof, comprises increasing or generating the activity of a gene product with the activity of a gene product conferring the activity of “RNA binding protein”, especially from Glycine max or its functional equivalent or its homolog, e.g. the increase of
[10847] (a) a gene product of a gene comprising the nucleic acid molecule as shown in the respective line in column 5 of Table I, application no. 2, preferably the coding region thereof, or a homolog or a fragment thereof, and being depicted in the same respective line as said GM02LC17556, or a functional equivalent or a homolog thereof as shown in column 8 of Table I, application no. 2, preferably the coding region thereof, particularly a homolog or functional equivalent as shown in column 8 of Table I B, application no. 2, and being depicted in the same respective line as said GM02LC17556, and preferably the activity is increased non-targeted, or
[10848] (b) a polypeptide comprising a polypeptide, a consensus sequence or at least a polypeptide motif as shown in the respective line in column 5 of Table II or in column 8 of Table IV, application no. 2, respectively, and being depicted in the same respective line as said GM02LC17556, or a functional equivalent or a homolog thereof as depicted in column 8 of Table II, application no. 2, preferably a homolog or functional equivalent as depicted in column 8 of Table II B, application no. 2, and being depicted in the same respective line as said GM02LC17556, and preferably the activity is increased non-targeted,.

[10849] Accordingly, in one embodiment, the molecule which activity is to be increased in the process of the invention is the gene product with an activity as a “RNA binding protein”, preferably it is the molecule of section (a) or (b) of this paragraph.

[10850] In particular, it was observed that in plants, especially in Arabidopsis thaliana, increasing or generating the activity of a gene product non-targeted with the activity of a “RNA binding protein”, preferably being encoded by a gene comprising the nucleic acid sequence SEQ ID NO. 46515, preferably the coding region thereof, conferred the production of or the increase in arginine compared with the wild type control.

[10851] The nucleic acid sequence of GM02LC19289 from Glycine max, e.g. as shown in the respective line in column 5 of Table I, application no. 2 is unpublished. And the activity of the gene product thereof is the activity of transcription factor.

[10852] Accordingly, in one embodiment, the process of the present invention for producing proline in a non-human organism, like a microorganism or a plant or a part thereof, comprises increasing or generating the activity of a gene product with the activity of a gene product conferring the activity of “transcription factor”, especially from Glycine max or its functional equivalent or its homolog, e.g. the increase of
[10853] (a) a gene product of a gene comprising the nucleic acid molecule as shown in the respective line in column 5 of Table I, application no. 2, preferably the coding region thereof, or a homolog or a fragment thereof, and being depicted in the same respective line as said GM02LC19289, or a functional equivalent or a homolog thereof as shown in column 8 of Table I, application no. 2, preferably the coding region thereof, particularly a homolog or functional equivalent as shown in column 8 of Table I B, application no. 2, and being depicted in the same respective line as said GM02LC19289, and preferably the activity is increased non-targeted, or
[10854] (b) a polypeptide comprising a polypeptide, a consensus sequence or at least a polypeptide motif as shown in the respective line in column 5 of Table II or in column 8 of Table IV, application no. 2, respectively, and being depicted in the same respective line as said GM02LC19289, or a functional equivalent or a homolog thereof as depicted in column 8 of Table II, application no. 2, preferably a homolog or functional equivalent as depicted in column 8 of Table II B, application no. 2, and being depicted in the same respective line as said GM02LC19289, and preferably the activity is increased non-targeted.

[10855] Accordingly, in one embodiment, the molecule which activity is to be increased in the process of the invention is the gene product with an activity as a “transcription factor”, preferably it is the molecule of section (a) or (b) of this paragraph.

[10856] In particular, it was observed that in plants, especially in Arabidopsis thaliana, increasing or generating the activity of a gene product non-targeted with the activity of a “transcription factor”, preferably being encoded by a gene comprising the nucleic acid sequence SEQ ID NO. 46751, preferably the coding region thereof, conferred the production of or the increase in proline compared with the wild type control.

[10857] The nucleic acid sequence of GM02LC44512 from Glycine max, e.g. as shown in the respective line in column 5 of Table I, application no. 2 is unpublished. And the activity of the gene product thereof is the activity of cyclin D.

[10858] Accordingly, in one embodiment, the process of the present invention for producing proline in a non-human organism, like a microorganism or a plant or a part thereof, comprises increasing or generating the activity of a gene product with the activity of a gene product conferring the activity of “cyclin D”, especially from Glycine max or its functional equivalent or its homolog, e.g. the increase of
[10859] (a) a gene product of a gene comprising the nucleic acid molecule as shown in the respective line in column 5 of Table I, application no. 2, preferably the coding region thereof, or a homolog or a fragment thereof, and being depicted in the same respective line as said GM02LC44512, or a functional equivalent or a homolog thereof as shown in column 8 of Table I, application no. 2, preferably the coding region thereof, particularly a homolog or functional equivalent as shown in column 8 of Table I B, application no. 2, and being depicted in the same respective line as said GM02LC44512, and preferably the activity is increased non-targeted, or
[10860] (b) a polypeptide comprising a polypeptide, a consensus sequence or at least a polypeptide motif as shown in the respective line in column 5 of Table II or in column 8 of Table IV, application no. 2, respectively, and being depicted in the same respective line as said GM02LC44512, or a functional equivalent or a homolog thereof as depicted in column 8 of Table II, application no. 2, preferably a homolog or functional equivalent as depicted in column 8 of Table II B, application no. 2, and being depicted in the same respective line as said GM02LC44512, and preferably the activity is increased non-targeted.

[10861] Accordingly, in one embodiment, the molecule which activity is to be increased in the process of the invention is the gene product with an activity as a “cyclin D”, preferably it is the molecule of section (a) or (b) of this paragraph.

[10862] In particular, it was observed that in plants, especially in Arabidopsis thaliana, increasing or generating the activity of a gene product non-targeted with the activity of a “cyclin D”, preferably being encoded by a gene comprising the nucleic acid sequence SEQ ID NO. 46850, preferably the coding region thereof, conferred the production of or the increase in proline compared with the wild type control.

[10863] The nucleic acid sequence of GM02LC46 from GLYCINE MAX, e.g. as shown in the respective line in column 5 of Table I, application no. 2 is unpublished. And the activity of the gene product thereof is the activity of GM02LC46-protein.

[10864] Accordingly, in one embodiment, the process of the present invention for producing proline in a non-human organism, like a microorganism or a plant or a part thereof, comprises increasing or generating the activity of a gene product with the activity of a gene product conferring the activity of “GM02LC46-protein”, especially from GLYCINE MAX or its functional equivalent or its homolog, e.g. the increase of
[10865] (a) a gene product of a gene comprising the nucleic acid molecule as shown in the respective line in column 5 of Table I, application no. 2, preferably the coding region thereof, or a homolog or a fragment thereof, and being depicted in the same respective line as said GM02LC46, or a functional equivalent or a homolog thereof as shown in column 8 of Table I, application no. 2, preferably the coding region thereof, particularly a homolog or functional equivalent as shown in column 8 of Table I B, application no. 2, and being depicted in the same respective line as said GM02LC46, and preferably the activity is increased non-targeted, or
[10866] (b) a polypeptide comprising a polypeptide, a consensus sequence or at least a polypeptide motif as shown in the respective line in column 5 of Table II or in column 8 of Table IV, application no. 2, respectively, and being depicted in the same respective line as said GM02LC46, or a functional equivalent or a homolog thereof as depicted in column 8 of Table II, application no. 2, preferably a homolog or functional equivalent as depicted in column 8 of Table II B, application no. 2, and being depicted in the same respective line as said GM02LC46, and preferably the activity is increased non-targeted.

[10867] Accordingly, in one embodiment, the molecule which activity is to be increased in the process of the invention is the gene product with an activity as a “GM02LC46-protein”, preferably it is the molecule of section (a) or (b) of this paragraph.

[10868] In particular, it was observed that in plants, especially in Arabidopsis thaliana, increasing or generating the activity of a gene product non-targeted with the activity of a “GM02LC46-protein”, preferably being encoded by a gene comprising the nucleic acid sequence SEQ ID NO. 47026, preferably the coding region thereof, conferred the production of or the increase in proline compared with the wild type control.

[10869] The nucleic acid sequence of GM02LC5744 from Glycine max, e.g. as shown in the respective line in column 5 of Table I, application no. 2 is unpublished. And the activity of the gene product thereof is the activity of GM02LC5744-protein.

[10870] Accordingly, in one embodiment, the process of the present invention for producing proline in a non-human organism, like a microorganism or a plant or a part thereof, comprises increasing or generating the activity of a gene product with the activity of a gene product conferring the activity of “GM02LC5744-protein”, especially from Glycine max or its functional equivalent or its homolog, e.g. the increase of
[10871] (a) a gene product of a gene comprising the nucleic acid molecule as shown in the respective line in column 5 of Table I, application no. 2, preferably the coding region thereof, or a homolog or a fragment thereof, and being depicted in the same respective line as said GM02LC5744, or a functional equivalent or a homolog thereof as shown in column 8 of Table I, application no. 2, preferably the coding region thereof, particularly a homolog or functional equivalent as shown in column 8 of Table I B, application no. 2, and being depicted in the same respective line as said GM02LC5744, and preferably the activity is increased non-targeted, or
[10872] (b) a polypeptide comprising a polypeptide, a consensus sequence or at least a polypeptide motif as shown in the respective line in column 5 of Table II or in column 8 of Table IV, application no. 2, respectively, and being depicted in the same respective line as said GM02LC5744, or a functional equivalent or a homolog thereof as depicted in column 8 of Table II, application no. 2, preferably a homolog or functional equivalent as depicted in column 8 of Table II B, application no. 2, and being depicted in the same respective line as said GM02LC5744, and preferably the activity is increased non-targeted.

[10873] Accordingly, in one embodiment, the molecule which activity is to be increased in the process of the invention is the gene product with an activity as a “GM02LC5744-protein”, preferably it is the molecule of section (a) or (b) of this paragraph.

[10874] In particular, it was observed that in plants, especially in Arabidopsis thaliana, increasing or generating the activity of a gene product non-targeted with the activity of a “GM02LC5744protein”, preferably being encoded by a gene comprising the nucleic acid sequence SEQ ID NO. 47076, preferably the coding region thereof, conferred the production of or the increase in proline compared with the wild type control.

[10875] The nucleic acid sequence of GM02LC6021 from Glycine max, e.g. as shown in the respective line in column 5 of Table I, application no. 2, is unpublished. And the activity of the gene product thereof is the activity of transcription factor.

[10876] Accordingly, in one embodiment, the process of the present invention for producing glutamate in a non-human organism, like a microorganism or a plant or a part thereof, comprises increasing or generating the activity of a gene product with the activity of a gene product conferring the activity of “transcription factor”, especially from Glycine max or its functional equivalent or its homolog, e.g. the increase of
[10877] (a) a gene product of a gene comprising the nucleic acid molecule as shown in the respective line in column 5 of Table I, application no. 2, preferably the coding region thereof, or a homolog or a fragment thereof, and being depicted in the same respective line as said GM02LC6021, or a functional equivalent or a homolog thereof as shown in column 8 of Table I, application no. 2, preferably the coding region thereof, particularly a homolog or functional equivalent as shown in column 8 of Table I B, application no. 2, and being depicted in the same respective line as said GM02LC6021, and preferably the activity is increased non-targeted, or
[10878] (b) a polypeptide comprising a polypeptide, a consensus sequence or at least a polypeptide motif as shown in the respective line in column 5 of Table II or in column 8 of Table IV, application no. 2, respectively, and being depicted in the same respective line as said GM02LC6021, or a functional equivalent or a homolog thereof as depicted in column 8 of Table II, application no. 2, preferably a homolog or functional equivalent as depicted in column 8 of Table II B, application no. 2, and being depicted in the same respective line as said GM02LC6021, and preferably the activity is increased non-targeted.

[10879] Accordingly, in one embodiment, the molecule which activity is to be increased in the process of the invention is the gene product with an activity as a “transcription factor”, preferably it is the molecule of section (a) or (b) of this paragraph.

[10880] In particular, it was observed that in plants, especially in Arabidopsis thaliana, increasing or generating the activity of a gene product non-targeted with the activity of a “transcription factor”, preferably being encoded by a gene comprising the nucleic acid sequence SEQ ID NO. 47105, preferably the coding region thereof, conferred the production of or the increase in glutamate compared with the wild type control.

[10881] The nucleic acid sequence of NZ_AAAU02000016.150 from Azotobacter vinelandii, e.g. as shown in the respective line in column 5 of Table I, application no. 2, has been published by deposition of the sequences to the EMBL/GenBank/DDBJ databases under “Sequencing of the draft genome assembly of Azotobacter vinelandii AvOP.” in June 2005 by Copeland et al. And the activity of the gene product thereof is the activity of glutaredoxin.

[10882] Accordingly, in one embodiment, the process of the present invention for producing proline in a non-human organism, like a microorganism or a plant or a part thereof, comprises increasing or generating the activity of a gene product with the activity of a gene product conferring the activity of “glutaredoxin”, especially from Azotobacter vinelandii or its functional equivalent or its homolog, e.g. the increase of
[10883] (a) a gene product of a gene comprising the nucleic acid molecule as shown in the respective line in column 5 of Table I, application no. 2, preferably the coding region thereof, or a homolog or a fragment thereof, and being depicted in the same respective line as said NZ_AAAU02000016.150, or a functional equivalent or a homolog thereof as shown in column 8 of Table I, application no. 2, preferably the coding region thereof, particularly a homolog or functional equivalent as shown in column 8 of Table I B, application no. 2, and being depicted in the same respective line as said NZ_AAAU02000016.150, and preferably the activity is increased non-targeted, or
[10884] (b) a polypeptide comprising a polypeptide, a consensus sequence or at least a polypeptide motif as shown in the respective line in column 5 of Table II or in column 8 of Table IV, application no. 2, respectively, and being depicted in the same respective line as said NZ_AAAU02000016.150, or a functional equivalent or a homolog thereof as depicted in column 8 of Table II, application no. 2, preferably a homolog or functional equivalent as depicted in column 8 of Table II B, application no. 2, and being depicted in the same respective line as said NZ_AAAU02000016.150, and preferably the activity is increased non-targeted.

[10885] Accordingly, in one embodiment, the molecule which activity is to be increased in the process of the invention is the gene product with an activity as a “glutaredoxin”, preferably it is the molecule of section (a) or (b) of this paragraph.

[10886] In particular, it was observed that in plants, especially in Arabidopsis thaliana, increasing or generating the activity of a gene product non-targeted with the activity of a “glutaredoxin”, preferably being encoded by a gene comprising the nucleic acid sequence SEQ ID NO. 47159, preferably the coding region thereof, conferred the production of or the increase in proline compared with the wild type control.

[10887] The nucleic acid sequence of S_pp015018333r from Physcomitrella patens, e.g. as shown in the respective line in column 5 of Table I, application no. 2 is unpublished. And the activity of the gene product thereof is the activity of s_pp015018333r-protein.

[10888] Accordingly, in one embodiment, the process of the present invention for producing arginine in a non-human organism, like a microorganism or a plant or a part thereof, comprises increasing or generating the activity of a gene product with the activity of a gene product conferring the activity of “s_pp015018333r-protein”, especially from Physcomitrella patens or its functional equivalent or its homolog, e.g. the increase of
[10889] (a) a gene product of a gene comprising the nucleic acid molecule as shown in the respective line in column 5 of Table I, application no. 2, preferably the coding region thereof, or a homolog or a fragment thereof, and being depicted in the same respective line as said S_pp015018333r, or a functional equivalent or a homolog thereof as shown in column 8 of Table I, application no. 2, preferably the coding region thereof, particularly a homolog or functional equivalent as shown in column 8 of Table I B, application no. 2, and being depicted in the same respective line as said S_pp015018333r, and preferably the activity is increased non-targeted, or
[10890] (b) a polypeptide comprising a polypeptide, a consensus sequence or at least a polypeptide motif as shown in the respective line in column 5 of Table II or in column 8 of Table IV, application no. 2, respectively, and being depicted in the same respective line as said S_pp015018333r, or a functional equivalent or a homolog thereof as depicted in column 8 of Table II, application no. 2, preferably a homolog or functional equivalent as depicted in column 8 of Table II B, application no. 2, and being depicted in the same respective line as said S_pp015018333r, and preferably the activity is increased non-targeted.

[10891] Accordingly, in one embodiment, the molecule which activity is to be increased in the process of the invention is the gene product with an activity as a “s_pp015018333r-protein”, preferably it is the molecule of section (a) or (b) of this paragraph.

[10892] In particular, it was observed that in plants, especially in Arabidopsis thaliana, increasing or generating the activity of a gene product non-targeted with the activity of a “s_pp015018333rprotein”, preferably being encoded by a gene comprising the nucleic acid sequence SEQ ID NO. 59851, preferably the coding region thereof, conferred the production of or the increase in arginine compared with the wild type control.

[10893] The nucleic acid sequence of S_pp015018333r from Physcomitrella patens, e.g. as shown in the respective line in column 5 of Table I, application no. 2 is unpublished. And the activity of the gene product thereof is the activity of s_pp015018333r-protein.

[10894] Accordingly, in one embodiment, the process of the present invention for producing glutamine in a non-human organism, like a microorganism or a plant or a part thereof, comprises increasing or generating the activity of a gene product with the activity of a gene product conferring the activity of “s_pp015018333r-protein”, especially from Physcomitrella patens or its functional equivalent or its homolog, e.g. the increase of
[10895] (a) a gene product of a gene comprising the nucleic acid molecule as shown in the respective line in column 5 of Table I, application no. 2, preferably the coding region thereof, or a homolog or a fragment thereof, and being depicted in the same respective line as said S_pp015018333r, or a functional equivalent or a homolog thereof as shown in column 8 of Table I, application no. 2, preferably the coding region thereof, particularly a homolog or functional equivalent as shown in column 8 of Table I B, application no. %%applicationnumber%%, and being depicted in the same respective line as said S_pp015018333r, and preferably the activity is increased non-targeted, or
[10896] (b) a polypeptide comprising a polypeptide, a consensus sequence or at least a polypeptide motif as shown in the respective line in column 5 of Table II or in column 8 of Table IV, application no. 2, respectively, and being depicted in the same respective line as said S_pp015018333r, or a functional equivalent or a homolog thereof as depicted in column 8 of Table II, application no. 2, preferably a homolog or functional equivalent as depicted in column 8 of Table II B, application no. 2, and being depicted in the same respective line as said S_pp015018333r, and preferably the activity is increased non-targeted.

[10897] Accordingly, in one embodiment, the molecule which activity is to be increased in the process of the invention is the gene product with an activity as a “s_pp015018333r-protein”, preferably it is the molecule of section (a) or (b) of this paragraph.

[10898] In particular, it was observed that in plants, especially in Arabidopsis thaliana, increasing or generating the activity of a gene product non-targeted with the activity of a “s_pp015018333r-protein”, preferably being encoded by a gene comprising the nucleic acid sequence SEQ ID NO. 59851, preferably the coding region thereof, conferred the production of or the increase in glutamine compared with the wild type control.

[10899] The nucleic acid sequence of Sll0064 from Synechocystis sp., e.g. as shown in the respective line in column 5 of Table I, application no. 2, has been published in Nakamura et al., Nucleic Acids Res. 28(1), 72 (2000). And the activity of the gene product thereof is the activity of sll0064-protein.

[10900] Accordingly, in one embodiment, the process of the present invention for producing proline in a non-human organism, like a microorganism or a plant or a part thereof, comprises increasing or generating the activity of a gene product with the activity of a gene product conferring the activity of “sll0064-protein”, especially from Synechocystis sp. or its functional equivalent or its homolog, e.g. the increase of
[10901] (a) a gene product of a gene comprising the nucleic acid molecule as shown in the respective line in column 5 of Table I, application no. 2, preferably the coding region thereof, or a homolog or a fragment thereof, and being depicted in the same respective line as said Sll0064, or a functional equivalent or a homolog thereof as shown in column 8 of Table I, application no. 2, preferably the coding region thereof, particularly a homolog or functional equivalent as shown in column 8 of Table I B, application no. 2, and being depicted in the same respective line as said Sll0064, and preferably the activity is increased mitochondrial, or
[10902] (b) a polypeptide comprising a polypeptide, a consensus sequence or at least a polypeptide motif as shown in the respective line in column 5 of Table II or in column 8 of Table IV, application no. 2, respectively, and being depicted in the same respective line as said Sll0064, or a functional equivalent or a homolog thereof as depicted in column 8 of Table II, application no. 2, preferably a homolog or functional equivalent as depicted in column 8 of Table II B, application no. 2, and being depicted in the same respective line as said Sll0064, and preferably the activity is increased mitochondrial,.

[10903] Accordingly, in one embodiment, the molecule which activity is to be increased in the process of the invention is the gene product with an activity as a “sll0064-protein”, preferably it is the molecule of section (a) or (b) of this paragraph.
[10904] In particular, it was observed that in plants, especially in Arabidopsis thaliana, increasing or generating the activity of a gene product mitochondrial with the activity of a “sll0064-protein”, preferably being encoded by a gene comprising the nucleic acid sequence SEQ ID NO. 47526, preferably the coding region thereof, conferred the production of or the increase in proline compared with the wild type control.

[10905] The nucleic acid sequence of Sll0080 from Synechocystis sp., e.g. as shown in the respective line in column 5 of Table I, application no. 2, has been published in Nakamura et al., Nucleic Acids Res. 28(1), 72 (2000). And the activity of the gene product thereof is the activity of N-acetyl-gamma-glutamyl-phosphate reductase.

[10906] Accordingly, in one embodiment, the process of the present invention for producing glutamate in a non-human organism, like a microorganism or a plant or a part thereof, comprises increasing or generating the activity of a gene product with the activity of a gene product conferring the activity of “N-acetyl-gamma-glutamyl-phosphate reductase”, especially from Synechocystis sp. or its functional equivalent or its homolog, e.g. the increase of
[10907] (a) a gene product of a gene comprising the nucleic acid molecule as shown in the respective line in column 5 of Table I, application no. 2, preferably the coding region thereof, or a homolog or a fragment thereof, and being depicted in the same respective line as said Sll0080, or a functional equivalent or a homolog thereof as shown in column 8 of Table I, application no. 2, preferably the coding region thereof, particularly a homolog or functional equivalent as shown in column 8 of Table I B, application no. 2, and being depicted in the same respective line as said Sll0080, and preferably the activity is increased plastidic, or
[10908] (b) a polypeptide comprising a polypeptide, a consensus sequence or at least a polypeptide motif as shown in the respective line in column 5 of Table II or in column 8 of Table IV, application no. 2, respectively, and being depicted in the same respective line as said Sll0080, or a functional equivalent or a homolog thereof as depicted in column 8 of Table II, application no. 2, preferably a homolog or functional equivalent as depicted in column 8 of Table II B, application no. 2, and being depicted in the same respective line as said Sll0080, and preferably the activity is increased plastidic.

[10909] Accordingly, in one embodiment, the molecule which activity is to be increased in the process of the invention is the gene product with an activity as a “N-acetyl-gamma-glutamyl-phosphate reductase”, preferably it is the molecule of section (a) or (b) of this paragraph.

[10910] In particular, it was observed that in plants, especially in Arabidopsis thaliana, increasing or generating the activity of a gene product plastidic with the activity of a “N-acetyl-gamma-glutamyl-phosphate reductase”, preferably being encoded by a gene comprising the nucleic acid sequence SEQ ID NO. 47566, preferably the coding region thereof, conferred the production of or the increase in glutamate compared with the wild type control.

[10911] The nucleic acid sequence of Sll0170 from Synechocystis sp., e.g. as shown in the respective line in column 5 of Table I, application no. 2, has been published in Synechocystis Nakamura et al., Nucleic Acids Res. 28(1), 72 (2000). And the activity of the gene product thereof is the activity of heat shock protein.

[10912] Accordingly, in one embodiment, the process of the present invention for producing glutamate in a non-human organism, like a microorganism or a plant or a part thereof, comprises increasing or generating the activity of a gene product with the activity of a gene product conferring the activity of “heat shock protein”, especially from Synechocystis sp. or its functional equivalent or its homolog, e.g. the increase of
[10913] (a) a gene product of a gene comprising the nucleic acid molecule as shown in the respective line in column 5 of Table I, application no. 2, preferably the coding region thereof, or a homolog or a fragment thereof, and being depicted in the same respective line as said Sll0170, or a functional equivalent or a homolog thereof as shown in column 8 of Table I, application no. 2, preferably the coding region thereof, particularly a homolog or functional equivalent as shown in column 8 of Table I B, application no. 2, and being depicted in the same respective line as said Sll0170, and preferably the activity is increased non-targeted, or
[10914] (b) a polypeptide comprising a polypeptide, a consensus sequence or at least a polypeptide motif as shown in the respective line in column 5 of Table II or in column 8 of Table IV, application no. 2, respectively, and being depicted in the same respective line as said Sll0170, or a functional equivalent or a homolog thereof as depicted in column 8 of Table II, application no. 2, preferably a homolog or functional equivalent as depicted in column 8 of Table II B, application no. 2, and being depicted in the same respective line as said Sll0170, and preferably the activity is increased non-targeted.

[10915] Accordingly, in one embodiment, the molecule which activity is to be increased in the process of the invention is the gene product with an activity as a “heat shock protein”, preferably it is the molecule of section (a) or (b) of this paragraph.

[10916] In particular, it was observed that in plants, especially in Arabidopsis thaliana, increasing or generating the activity of a gene product non-targeted with the activity of a “heat shock protein”, preferably being encoded by a gene comprising the nucleic acid sequence SEQ ID NO. 48138, preferably the coding region thereof, conferred the production of or the increase in glutamate compared with the wild type control.

[10917] The nucleic acid sequence of Sll0248 from Synechocystis sp., e.g. as shown in the respective line in column 5 of Table I, application no. 2, has been published in Nakamura et al., Nucleic Acids Res. 28(1), 72 (2000). And the activity of the gene product thereof is the activity of flavodoxin.

[10918] Accordingly, in one embodiment, the process of the present invention for producing arginine in a non-human organism, like a microorganism or a plant or a part thereof, comprises increasing or generating the activity of a gene product with the activity of a gene product conferring the activity of “flavodoxin”, especially from Synechocystis sp. or its functional equivalent or its homolog, e.g. the increase of
[10919] (a) a gene product of a gene comprising the nucleic acid molecule as shown in the respective line in column 5 of Table I, application no. 2, preferably the coding region thereof, or a homolog or a fragment thereof, and being depicted in the same respective line as said Sll0248, or a functional equivalent or a homolog thereof as shown in column 8 of Table I, application no. 2, preferably the coding region thereof, particularly a homolog or functional equivalent as shown in column 8 of Table I B, application no. 2, and being depicted in the same respective line as said Sll0248, and preferably the activity is increased plastidic, or
[10920] (b) a polypeptide comprising a polypeptide, a consensus sequence or at least a polypeptide motif as shown in the respective line in column 5 of Table II or in column 8 of Table IV, application no. 2, respectively, and being depicted in the same respective line as said Sll0248, or a functional equivalent or a homolog thereof as depicted in column 8 of Table II, application no. 2, preferably a homolog or functional equivalent as depicted in column 8 of Table II B, application no. 2, and being depicted in the same respective line as said Sll0248, and preferably the activity is increased plastidic.

[10921] Accordingly, in one embodiment, the molecule which activity is to be increased in the process of the invention is the gene product with an activity as a “flavodoxin”, preferably it is the molecule of section (a) or (b) of this paragraph.

[10922] In particular, it was observed that in plants, especially in Arabidopsis thaliana, increasing or generating the activity of a gene product plastidic with the activity of a “flavodoxin”, preferably being encoded by a gene comprising the nucleic acid sequence SEQ ID NO. 49143, preferably the coding region thereof, conferred the production of or the increase in arginine compared with the wild type control.

[10923] The nucleic acid sequence of Sll0250 from Synechocystis sp., e.g. as shown in the respective line in column 5 of Table I, application no. 2, has been published in Nakamura et al., Nucleic Acids Res. 28(1), 72 (2000). And the activity of the gene product thereof is the activity of phosphopantothenoylcysteinesynthetase/decarboxylase.

[10924] Accordingly, in one embodiment, the process of the present invention for producing proline in a non-human organism, like a microorganism or a plant or a part thereof, comprises increasing or generating the activity of a gene product with the activity of a gene product conferring the activity of “phosphopantothenoylcysteinesynthetase/decarboxylase”, especially from Synechocystis sp. or its functional equivalent or its homolog, e.g. the increase of
[10925] (a) a gene product of a gene comprising the nucleic acid molecule as shown in the respective line in column 5 of Table I, application no. 2, preferably the coding region thereof, or a homolog or a fragment thereof, and being depicted in the same respective line as said Sll0250, or a functional equivalent or a homolog thereof as shown in column 8 of Table I, application no. 2, preferably the coding region thereof, particularly a homolog or functional equivalent as shown in column 8 of Table I B, application no. 2, and being depicted in the same respective line as said Sll0250, and preferably the activity is increased non-targeted, or
[10926] (b) a polypeptide comprising a polypeptide, a consensus sequence or at least a polypeptide motif as shown in the respective line in column 5 of Table II or in column 8 of Table IV, application no. 2, respectively, and being depicted in the same respective line as said Sll0250, or a functional equivalent or a homolog thereof as depicted in column 8 of Table II, application no. 2, preferably a homolog or functional equivalent as depicted in column 8 of Table II B, application no. 2, and being depicted in the same respective line as said Sll0250, and preferably the activity is increased non-targeted.

[10927] Accordingly, in one embodiment, the molecule which activity is to be increased in the process of the invention is the gene product with an activity as a “phosphopantothenoylcysteinesynthetase/decarboxylase”, preferably it is the molecule of section (a) or (b) of this paragraph.

[10928] In particular, it was observed that in plants, especially in Arabidopsis thaliana, increasing or generating the activity of a gene product non-targeted with the activity of a “phosphopantothenoylcysteinesynthetase/decarboxylase”, preferably being encoded by a gene comprising the nucleic acid sequence SEQ ID NO. 49342, preferably the coding region thereof, conferred the production of or the increase in proline compared with the wild type control.

[10929] The nucleic acid sequence of Sll0254 from Synechocystis sp., e.g. as shown in the respective line in column 5 of Table I, application no. 2, has been published in Nakamura et al., Nucleic Acids Res. 28(1), 72 (2000). And the activity of the gene product thereof is the activity of sll0254-protein.

[10930] Accordingly, in one embodiment, the process of the present invention for producing glutamine in a non-human organism, like a microorganism or a plant or a part thereof, comprises increasing or generating the activity of a gene product with the activity of a gene product conferring the activity of “sll0254-protein”, especially from Synechocystis sp. or its functional equivalent or its homolog, e.g. the increase of
[10931] (a) a gene product of a gene comprising the nucleic acid molecule as shown in the respective line in column 5 of Table I, application no. 2, preferably the coding region thereof, or a homolog or a fragment thereof, and being depicted in the same respective line as said Sll0254, or a functional equivalent or a homolog thereof as shown in column 8 of Table I, application no. 2, preferably the coding region thereof, particularly a homolog or functional equivalent as shown in column 8 of Table I B, application no. 2, and being depicted in the same respective line as said Sll0254, and preferably the activity is increased mitochondrial, or
[10932] (b) a polypeptide comprising a polypeptide, a consensus sequence or at least a polypeptide motif as shown in the respective line in column 5 of Table II or in column 8 of Table IV, application no. 2, respectively, and being depicted in the same respective line as said Sll0254, or a functional equivalent or a homolog thereof as depicted in column 8 of Table II, application no. 2, preferably a homolog or functional equivalent as depicted in column 8 of Table II B, application no. 2, and being depicted in the same respective line as said Sll0254, and preferably the activity is increased mitochondrial.

[10933] Accordingly, in one embodiment, the molecule which activity is to be increased in the process of the invention is the gene product with an activity as a “sll0254-protein”, preferably it is the molecule of section (a) or (b) of this paragraph.

[10934] In particular, it was observed that in plants, especially in Arabidopsis thaliana, increasing or generating the activity of a gene product mitochondrial with the activity of a “sll0254-protein”, preferably being encoded by a gene comprising the nucleic acid sequence SEQ ID NO. 49800, preferably the coding region thereof, conferred the production of or the increase in glutamine compared with the wild type control.

[10935] The nucleic acid sequence of Sll0254 from Synechocystis sp., e.g. as shown in the respective line in column 5 of Table I, application no. 2, has been published in Nakamura et al., Nucleic Acids Res. 28(1), 72 (2000). And the activity of the gene product thereof is the activity of sll0254-protein.

[10936] Accordingly, in one embodiment, the process of the present invention for producing proline in a non-human organism, like a microorganism or a plant or a part thereof, comprises increasing or generating the activity of a gene product with the activity of a gene product conferring the activity of “sll0254-protein”, especially from Synechocystis sp. or its functional equivalent or its homolog, e.g. the increase of
[10937] (a) a gene product of a gene comprising the nucleic acid molecule as shown in the respective line in column 5 of Table I, application no. 2, preferably the coding region thereof, or a homolog or a fragment thereof, and being depicted in the same respective line as said Sll0254, or a functional equivalent or a homolog thereof as shown in column 8 of Table I, application no. 2, preferably the coding region thereof, particularly a homolog or functional equivalent as shown in column 8 of Table I B, application no. 2, and being depicted in the same respective line as said Sll0254, and preferably the activity is increased mitochondrial, or
[10938] (b) a polypeptide comprising a polypeptide, a consensus sequence or at least a polypeptide motif as shown in the respective line in column 5 of Table II or in column 8 of Table IV, application no. 2, respectively, and being depicted in the same respective line as said Sll0254, or a functional equivalent or a homolog thereof as depicted in column 8 of Table II, application no. 2, preferably a homolog or functional equivalent as depicted in column 8 of Table II B, application no. 2, and being depicted in the same respective line as said Sll0254, and preferably the activity is increased mitochondrial.

[10939] Accordingly, in one embodiment, the molecule which activity is to be increased in the process of the invention is the gene product with an activity as a “sll0254-protein”, preferably it is the molecule of section (a) or (b) of this paragraph.

[10940] In particular, it was observed that in plants, especially in Arabidopsis thaliana, increasing or generating the activity of a gene product mitochondrial with the activity of a “sll0254-protein”, preferably being encoded by a gene comprising the nucleic acid sequence SEQ ID NO. 49800, preferably the coding region thereof, conferred the production of or the increase in proline compared with the wild type control.

[10941] The nucleic acid sequence of Sll0290 from Synechocystis sp., e.g. as shown in the respective line in column 5 of Table I, application no. 2, has been published in Nakamura et al., Nucleic Acids Res. 28(1), 72 (2000). And the activity of the gene product thereof is the activity of polyphosphate kinase.

[10942] Accordingly, in one embodiment, the process of the present invention for producing proline in a non-human organism, like a microorganism or a plant or a part thereof, comprises increasing or generating the activity of a gene product with the activity of a gene product conferring the activity of “polyphosphate kinase”, especially from Synechocystis sp. or its functional equivalent or its homolog, e.g. the increase of
[10943] (a) a gene product of a gene comprising the nucleic acid molecule as shown in the respective line in column 5 of Table I, application no. 2, preferably the coding region thereof, or a homolog or a fragment thereof, and being depicted in the same respective line as said Sll0290, or a functional equivalent or a homolog thereof as shown in column 8 of Table I, application no. 2, preferably the coding region thereof, particularly a homolog or functional equivalent as shown in column 8 of Table I B, application no. 2, and being depicted in the same respective line as said Sll0290, and preferably the activity is increased non-targeted, or
[10944] (b) a polypeptide comprising a polypeptide, a consensus sequence or at least a polypeptide motif as shown in the respective line in column 5 of Table II or in column 8 of Table IV, application no. 2, respectively, and being depicted in the same respective line as said Sll0290, or a functional equivalent or a homolog thereof as depicted in column 8 of Table II, application no. 2, preferably a homolog or functional equivalent as depicted in column 8 of Table II B, application no. 2, and being depicted in the same respective line as said Sll0290, and preferably the activity is increased non-targeted.

[10945] Accordingly, in one embodiment, the molecule which activity is to be increased in the process of the invention is the gene product with an activity as a “polyphosphate kinase”, preferably it is the molecule of section (a) or (b) of this paragraph.

[10946] In particular, it was observed that in plants, especially in Arabidopsis thaliana, increasing or generating the activity of a gene product non-targeted with the activity of a “polyphosphate kinase”, preferably being encoded by a gene comprising the nucleic acid sequence SEQ ID NO. 49828, preferably the coding region thereof, conferred the production of or the increase in proline compared with the wild type control.

[10947] The nucleic acid sequence of Sll0354 from Synechocystis sp., e.g. as shown in the respective line in column 5 of Table I, application no. 2, has been published in Nakamura et al., Nucleic Acids Res. 28(1), 72 (2000). And the activity of the gene product thereof is the activity of sll0354-protein.

[10948] Accordingly, in one embodiment, the process of the present invention for producing proline in a non-human organism, like a microorganism or a plant or a part thereof, comprises increasing or generating the activity of a gene product with the activity of a gene product conferring the activity of “sll0354-protein”, especially from Synechocystis sp. or its functional equivalent or its homolog, e.g. the increase of
[10949] (a) a gene product of a gene comprising the nucleic acid molecule as shown in the respective line in column 5 of Table I, application no. 2, preferably the coding region thereof, or a homolog or a fragment thereof, and being depicted in the same respective line as said Sll0354, or a functional equivalent or a homolog thereof as shown in column 8 of Table I, application no. 2, preferably the coding region thereof, particularly a homolog or functional equivalent as shown in column 8 of Table I B, application no. 2, and being depicted in the same respective line as said Sll0354, and preferably the activity is increased non-targeted, or
[10950] (b) a polypeptide comprising a polypeptide, a consensus sequence or at least a polypeptide motif as shown in the respective line in column 5 of Table II or in column 8 of Table IV, application no. 2, respectively, and being depicted in the same respective line as said Sll0354, or a functional equivalent or a homolog thereof as depicted in column 8 of Table II, application no. 2, preferably a homolog or functional equivalent as depicted in column 8 of Table II B, application no. 2, and being depicted in the same respective line as said Sll0354, and preferably the activity is increased non-targeted.

[10951] Accordingly, in one embodiment, the molecule which activity is to be increased in the process of the invention is the gene product with an activity as a “sll0354-protein”, preferably it is the molecule of section (a) or (b) of this paragraph.

[10952] In particular, it was observed that in plants, especially in Arabidopsis thaliana, increasing or generating the activity of a gene product non-targeted with the activity of a “sll0354-protein”, preferably being encoded by a gene comprising the nucleic acid sequence SEQ ID NO. 50070, preferably the coding region thereof, conferred the production of or the increase in proline compared with the wild type control.

[10953] The nucleic acid sequence of Sll0420 from Synechocystis sp., e.g. as shown in the respective line in column 5 of Table I, application no. 2, has been published in Nakamura et al., Nucleic Acids Res. 28(1), 72 (2000). And the activity of the gene product thereof is the activity of urease subunit.

[10954] Accordingly, in one embodiment, the process of the present invention for producing proline in a non-human organism, like a microorganism or a plant or a part thereof, comprises increasing or generating the activity of a gene product with the activity of a gene product conferring the activity of “urease subunit”, especially from Synechocystis sp. or its functional equivalent or its homolog, e.g. the increase of
[10955] (a) a gene product of a gene comprising the nucleic acid molecule as shown in the respective line in column 5 of Table I, application no. 2, preferably the coding region thereof, or a homolog or a fragment thereof, and being depicted in the same respective line as said Sll0420, or a functional equivalent or a homolog thereof as shown in column 8 of Table I, application no. 2, preferably the coding region thereof, particularly a homolog or functional equivalent as shown in column 8 of Table I B, application no. 2, and being depicted in the same respective line as said Sll0420, and preferably the activity is increased non-targeted, or
[10956] (b) a polypeptide comprising a polypeptide, a consensus sequence or at least a polypeptide motif as shown in the respective line in column 5 of Table II or in column 8 of Table IV, application no. 2, respectively, and being depicted in the same respective line as said Sll0420, or a functional equivalent or a homolog thereof as depicted in column 8 of Table II, application no. 2, preferably a homolog or functional equivalent as depicted in column 8 of Table II B, application no. 2, and being depicted in the same respective line as said Sll0420, and preferably the activity is increased non-targeted.

[10957] Accordingly, in one embodiment, the molecule which activity is to be increased in the process of the invention is the gene product with an activity as a “urease subunit”, preferably it is the molecule of section (a) or (b) of this paragraph.

[10958] In particular, it was observed that in plants, especially in Arabidopsis thaliana, increasing or generating the activity of a gene product non-targeted with the activity of a “urease subunit”, preferably being encoded by a gene comprising the nucleic acid sequence SEQ ID NO. 50104, preferably the coding region thereof, conferred the production of or the increase in proline compared with the wild type control.

[10959] The nucleic acid sequence of Sll0521 from Synechocystis sp., e.g. as shown in the respective line in column 5 of Table I, application no. 2, has been published in Nakamura et al., Nucleic Acids Res. 28(1), 72 (2000). And the activity of the gene product thereof is the activity of NAD(P)H-quinone oxidoreductase subunit.

[10960] Accordingly, in one embodiment, the process of the present invention for producing arginine in a non-human organism, like a microorganism or a plant or a part thereof, comprises increasing or generating the activity of a gene product with the activity of a gene product conferring the activity of “NAD(P)H-quinone oxidoreductase subunit”, especially from Synechocystis sp. or its functional equivalent or its homolog, e.g. the increase of
[10961] (a) a gene product of a gene comprising the nucleic acid molecule as shown in the respective line in column 5 of Table I, application no. 2, preferably the coding region thereof, or a homolog or a fragment thereof, and being depicted in the same respective line as said Sll0521, or a functional equivalent or a homolog thereof as shown in column 8 of Table I, application no. 2, preferably the coding region thereof, particularly a homolog or functional equivalent as shown in column 8 of Table I B, application no. 2, and being depicted in the same respective line as said Sll0521, and preferably the activity is increased plastidic, or
[10962] (b) a polypeptide comprising a polypeptide, a consensus sequence or at least a polypeptide motif as shown in the respective line in column 5 of Table II or in column 8 of Table IV, application no. 2, respectively, and being depicted in the same respective line as said Sll0521, or a functional equivalent or a homolog thereof as depicted in column 8 of Table II, application no. 2, preferably a homolog or functional equivalent as depicted in column 8 of Table II B, application no. 2, and being depicted in the same respective line as said Sll0521, and preferably the activity is increased plastidic.

[10963] Accordingly, in one embodiment, the molecule which activity is to be increased in the process of the invention is the gene product with an activity as a “NAD(P)H-quinone oxidoreductase subunit”, preferably it is the molecule of section (a) or (b) of this paragraph.

[10964] In particular, it was observed that in plants, especially in Arabidopsis thaliana, increasing or generating the activity of a gene product plastidic with the activity of a “NAD(P)H-quinone oxidoreductase subunit”, preferably being encoded by a gene comprising the nucleic acid sequence SEQ ID NO. 50339, preferably the coding region thereof, conferred the production of or the increase in arginine compared with the wild type control.

[10965] The nucleic acid sequence of Sll0622 from Synechocystis sp., e.g. as shown in the respective line in column 5 of Table I, application no. 2, has been published in Nakamura et al., Nucleic Acids Res. 28(1), 72 (2000). And the activity of the gene product thereof is the activity of quinolinate synthetase.

[10966] Accordingly, in one embodiment, the process of the present invention for producing proline in a non-human organism, like a microorganism or a plant or a part thereof, comprises increasing or generating the activity of a gene product with the activity of a gene product conferring the activity of “quinolinate synthetase”, especially from Synechocystis sp. or its functional equivalent or its homolog, e.g. the increase of
[10967] (a) a gene product of a gene comprising the nucleic acid molecule as shown in the respective line in column 5 of Table I, application no. 2, preferably the coding region thereof, or a homolog or a fragment thereof, and being depicted in the same respective line as said Sll0622, or a functional equivalent or a homolog thereof as shown in column 8 of Table I, application no. 2, preferably the coding region thereof, particularly a homolog or functional equivalent as shown in column 8 of Table I B, application no. 2, and being depicted in the same respective line as said Sll0622, and preferably the activity is increased mitochondrial, or
[10968] (b) a polypeptide comprising a polypeptide, a consensus sequence or at least a polypeptide motif as shown in the respective line in column 5 of Table II or in column 8 of Table IV, application no. 2, respectively, and being depicted in the same respective line as said Sll0622, or a functional equivalent or a homolog thereof as depicted in column 8 of Table II, application no. 2, preferably a homolog or functional equivalent as depicted in column 8 of Table II B, application no. 2, and being depicted in the same respective line as said Sll0622, and preferably the activity is increased mitochondrial.

[10969] Accordingly, in one embodiment, the molecule which activity is to be increased in the process of the invention is the gene product with an activity as a “quinolinate synthetase”, preferably it is the molecule of section (a) or (b) of this paragraph.

[10970] In particular, it was observed that in plants, especially in Arabidopsis thaliana, increasing or generating the activity of a gene product mitochondrial with the activity of a “quinolinate synthetase”, preferably being encoded by a gene comprising the nucleic acid sequence SEQ ID NO. 50713, preferably the coding region thereof, conferred the production of or the increase in proline compared with the wild type control.

[10971] he nucleic acid sequence of Sll0682 from Synechocystis sp., e.g. as shown in the respective line in column 5 of Table I, application no. 2, has been published in Nakamura et al., Nucleic Acids Res. 28(1), 72 (2000). And the activity of the gene product thereof is the activity of permease protein of phosphate ABC transporter.

[10972] Accordingly, in one embodiment, the process of the present invention for producing glutamate in a non-human organism, like a microorganism or a plant or a part thereof, comprises increasing or generating the activity of a gene product with the activity of a gene product conferring the activity of “permease protein of phosphate ABC transporter”, especially from Synechocystis sp. or its functional equivalent or its homolog, e.g. the increase of
[10973] (a) a gene product of a gene comprising the nucleic acid molecule as shown in the respective line in column 5 of Table I, application no. 2, preferably the coding region thereof, or a homolog or a fragment thereof, and being depicted in the same respective line as said Sll0682, or a functional equivalent or a homolog thereof as shown in column 8 of Table I, application no. 2, preferably the coding region thereof, particularly a homolog or functional equivalent as shown in column 8 of Table I B, application no. 2, and being depicted in the same respective line as said Sll0682, and preferably the activity is increased non-targeted, or
[10974] (b) a polypeptide comprising a polypeptide, a consensus sequence or at least a polypeptide motif as shown in the respective line in column 5 of Table II or in column 8 of Table IV, application no. 2, respectively, and being depicted in the same respective line as said Sll0682, or a functional equivalent or a homolog thereof as depicted in column 8 of Table II, application no. 2, preferably a homolog or functional equivalent as depicted in column 8 of Table II B, application no. 2, and being depicted in the same respective line as said Sll0682, and preferably the activity is increased non-targeted.

[10975] Accordingly, in one embodiment, the molecule which activity is to be increased in the process of the invention is the gene product with an activity as a “permease protein of phosphate ABC transporter”, preferably it is the molecule of section (a) or (b) of this paragraph.

[10976] In particular, it was observed that in plants, especially in Arabidopsis thaliana, increasing or generating the activity of a gene product non-targeted with the activity of a “permease protein of phosphate ABC transporter”, preferably being encoded by a gene comprising the nucleic acid sequence SEQ ID NO. 50950, preferably the coding region thereof, conferred the production of or the increase in glutamate compared with the wild type control.

[10977] The nucleic acid sequence of Sll0682 from Synechocystis sp., e.g. as shown in the respective line in column 5 of Table I, application no. 2, has been published in Synechocystis Nakamura et al., Nucleic Acids Res. 28(1), 72 (2000). And the activity of the gene product thereof is the activity of permease protein of phosphate ABC transporter.

[10978] Accordingly, in one embodiment, the process of the present invention for producing proline in a non-human organism, like a microorganism or a plant or a part thereof, comprises increasing or generating the activity of a gene product with the activity of a gene product conferring the activity of “permease protein of phosphate ABC transporter”, especially from Synechocystis sp. or its functional equivalent or its homolog, e.g. the increase of
[10979] (a) a gene product of a gene comprising the nucleic acid molecule as shown in the respective line in column 5 of Table I, application no. 2, preferably the coding region thereof, or a homolog or a fragment thereof, and being depicted in the same respective line as said Sll0682, or a functional equivalent or a homolog thereof as shown in column 8 of Table I, application no. 2, preferably the coding region thereof, particularly a homolog or functional equivalent as shown in column 8 of Table I B, application no. 2, and being depicted in the same respective line as said Sll0682, and preferably the activity is increased non-targeted, or
[10980] (b) a polypeptide comprising a polypeptide, a consensus sequence or at least a polypeptide motif as shown in the respective line in column 5 of Table II or in column 8 of Table IV, application no. 2, respectively, and being depicted in the same respective line as said Sll0682, or a functional equivalent or a homolog thereof as depicted in column 8 of Table II, application no. 2, preferably a homolog or functional equivalent as depicted in column 8 of Table II B, application no. 2, and being depicted in the same respective line as said Sll0682, and preferably the activity is increased non-targeted.

[10981] Accordingly, in one embodiment, the molecule which activity is to be increased in the process of the invention is the gene product with an activity as a “permease protein of phosphate ABC transporter”, preferably it is the molecule of section (a) or (b) of this paragraph.

[10982] In particular, it was observed that in plants, especially in Arabidopsis thaliana, increasing or generating the activity of a gene product non-targeted with the activity of a “permease protein of phosphate ABC transporter”, preferably being encoded by a gene comprising the nucleic acid sequence SEQ ID NO. 50950, preferably the coding region thereof, conferred the production of or the increase in proline compared with the wild type control.

[10983] The nucleic acid sequence of Sll0816 from Synechocystis sp., e.g. as shown in the respective line in column 5 of Table I, application no. 2, has been published in Synechocystis Nakamura et al., Nucleic Acids Res. 28(1), 72 (2000). And the activity of the gene product thereof is the activity of oxireductase.

[10984] Accordingly, in one embodiment, the process of the present invention for producing arginine in a non-human organism, like a microorganism or a plant or a part thereof, comprises increasing or generating the activity of a gene product with the activity of a gene product conferring the activity of “oxireductase”, especially from Synechocystis sp. or its functional equivalent or its homolog, e.g. the increase of
[10985] (a) a gene product of a gene comprising the nucleic acid molecule as shown in the respective line in column 5 of Table I, application no. 2, preferably the coding region thereof, or a homolog or a fragment thereof, and being depicted in the same respective line as said Sll0816, or a functional equivalent or a homolog thereof as shown in column 8 of Table I, application no. 2, preferably the coding region thereof, particularly a homolog or functional equivalent as shown in column 8 of Table I B, application no. 2, and being depicted in the same respective line as said Sll0816, and preferably the activity is increased non-targeted, or
[10986] (b) a polypeptide comprising a polypeptide, a consensus sequence or at least a polypeptide motif as shown in the respective line in column 5 of Table II or in column 8 of Table IV, application no. 2, respectively, and being depicted in the same respective line as said Sll0816, or a functional equivalent or a homolog thereof as depicted in column 8 of Table II, application no. 2, preferably a homolog or functional equivalent as depicted in column 8 of Table II B, application no. 2, and being depicted in the same respective line as said Sll0816, and preferably the activity is increased non-targeted.

[10987] Accordingly, in one embodiment, the molecule which activity is to be increased in the process of the invention is the gene product with an activity as a “oxireductase”, preferably it is the molecule of section (a) or (b) of this paragraph.

[10988] In particular, it was observed that in plants, especially in Arabidopsis thaliana, increasing or generating the activity of a gene product non-targeted with the activity of a “oxireductase”, preferably being encoded by a gene comprising the nucleic acid sequence SEQ ID NO. 51198, preferably the coding region thereof, conferred the production of or the increase in arginine compared with the wild type control.

[10989] The nucleic acid sequence of Sll0816 from Synechocystis sp., e.g. as shown in the respective line in column 5 of Table I, application no. 2, has been published in Nakamura et al., Nucleic Acids Res. 28(1), 72 (2000). And the activity of the gene product thereof is the activity of oxireductase.

[10990] Accordingly, in one embodiment, the process of the present invention for producing glutamate in a non-human organism, like a microorganism or a plant or a part thereof, comprises increasing or generating the activity of a gene product with the activity of a gene product conferring the activity of “oxireductase”, especially from Synechocystis sp. or its functional equivalent or its homolog, e.g. the increase of
[10991] (a) a gene product of a gene comprising the nucleic acid molecule as shown in the respective line in column 5 of Table I, application no. 2, preferably the coding region thereof, or a homolog or a fragment thereof, and being depicted in the same respective line as said Sll0816, or a functional equivalent or a homolog thereof as shown in column 8 of Table I, application no. 2, preferably the coding region thereof, particularly a homolog or functional equivalent as shown in column 8 of Table I B, application no. 2, and being depicted in the same respective line as said Sll0816, and preferably the activity is increased non-targeted, or
[10992] (b) a polypeptide comprising a polypeptide, a consensus sequence or at least a polypeptide motif as shown in the respective line in column 5 of Table II or in column 8 of Table IV, application no. 2, respectively, and being depicted in the same respective line as said Sll0816, or a functional equivalent or a homolog thereof as depicted in column 8 of Table II, application no. 2, preferably a homolog or functional equivalent as depicted in column 8 of Table II B, application no. 2, and being depicted in the same respective line as said Sll0816, and preferably the activity is increased non-targeted.

[10993] Accordingly, in one embodiment, the molecule which activity is to be increased in the process of the invention is the gene product with an activity as a “oxireductase”, preferably it is the molecule of section (a) or (b) of this paragraph.

[10994] In particular, it was observed that in plants, especially in Arabidopsis thaliana, increasing or generating the activity of a gene product non-targeted with the activity of a “oxireductase”, preferably being encoded by a gene comprising the nucleic acid sequence SEQ ID NO. 51198, preferably the coding region thereof, conferred the production of or the increase in glutamate compared with the wild type control.

[10995] The nucleic acid sequence of Sll0816 from Synechocystis sp., e.g. as shown in the respective line in column 5 of Table I, application no. 2, has been published in Nakamura et al., Nucleic Acids Res. 28(1), 72 (2000). And the activity of the gene product thereof is the activity of oxireductase.

[10996] Accordingly, in one embodiment, the process of the present invention for producing glutamine in a non-human organism, like a microorganism or a plant or a part thereof, comprises increasing or generating the activity of a gene product with the activity of a gene product conferring the activity of “oxireductase”, especially from Synechocystis sp. or its functional equivalent or its homolog, e.g. the increase of
[10997] (a) a gene product of a gene comprising the nucleic acid molecule as shown in the respective line in column 5 of Table I, application no. 2, preferably the coding region thereof, or a homolog or a fragment thereof, and being depicted in the same respective line as said Sll0816, or a functional equivalent or a homolog thereof as shown in column 8 of Table I, application no. 2, preferably the coding region thereof, particularly a homolog or functional equivalent as shown in column 8 of Table I B, application no. 2, and being depicted in the same respective line as said Sll0816, and preferably the activity is increased non-targeted, or
[10998] (b) a polypeptide comprising a polypeptide, a consensus sequence or at least a polypeptide motif as shown in the respective line in column 5 of Table II or in column 8 of Table IV, application no. 2, respectively, and being depicted in the same respective line as said Sll0816, or a functional equivalent or a homolog thereof as depicted in column 8 of Table II, application no. 2, preferably a homolog or functional equivalent as depicted in column 8 of Table II B, application no. 2, and being depicted in the same respective line as said Sll0816, and preferably the activity is increased non-targeted.

[10999] Accordingly, in one embodiment, the molecule which activity is to be increased in the process of the invention is the gene product with an activity as a “oxireductase”, preferably it is the molecule of section (a) or (b) of this paragraph.

[11000] In particular, it was observed that in plants, especially in Arabidopsis thaliana, increasing or generating the activity of a gene product non-targeted with the activity of a “oxireductase”, preferably being encoded by a gene comprising the nucleic acid sequence SEQ ID NO. 51198, preferably the coding region thereof, conferred the production of or the increase in glutamine compared with the wild type control.

[11001] The nucleic acid sequence of Sll0891 from Synechocystis sp., e.g. as shown in the respective line in column 5 of Table I, application no. 2, has been published in Nakamura et al., Nucleic Acids Res. 28(1), 72 (2000). And the activity of the gene product thereof is the activity of malate dehydrogenase.

[11002] Accordingly, in one embodiment, the process of the present invention for producing arginine in a non-human organism, like a microorganism or a plant or a part thereof, comprises increasing or generating the activity of a gene product with the activity of a gene product conferring the activity of “malate dehydrogenase”, especially from Synechocystis sp. or its functional equivalent or its homolog, e.g. the increase of
[11003] (a) a gene product of a gene comprising the nucleic acid molecule as shown in the respective line in column 5 of Table I, application no. 2, preferably the coding region thereof, or a homolog or a fragment thereof, and being depicted in the same respective line as said Sll0891, or a functional equivalent or a homolog thereof as shown in column 8 of Table I, application no. 2, preferably the coding region thereof, particularly a homolog or functional equivalent as shown in column 8 of Table I B, application no. 2, and being depicted in the same respective line as said Sll0891, and preferably the activity is increased plastidic, or
[11004] (b) a polypeptide comprising a polypeptide, a consensus sequence or at least a polypeptide motif as shown in the respective line in column 5 of Table II or in column 8 of Table IV, application no. 2, respectively, and being depicted in the same respective line as said Sll0891, or a functional equivalent or a homolog thereof as depicted in column 8 of Table II, application no. 2, preferably a homolog or functional equivalent as depicted in column 8 of Table II B, application no. 2, and being depicted in the same respective line as said Sll0891, and preferably the activity is increased plastidic.

[11005] Accordingly, in one embodiment, the molecule which activity is to be increased in the process of the invention is the gene product with an activity as a “malate dehydrogenase”, preferably it is the molecule of section (a) or (b) of this paragraph.

[11006] In particular, it was observed that in plants, especially in Arabidopsis thaliana, increasing or generating the activity of a gene product plastidic with the activity of a “malate dehydrogenase”, preferably being encoded by a gene comprising the nucleic acid sequence SEQ ID NO. 51268, preferably the coding region thereof, conferred the production of or the increase in arginine compared with the wild type control.

[11007] The nucleic acid sequence of Sll0891 from Synechocystis sp., e.g. as shown in the respective line in column 5 of Table I, application no. 2, has been published in Nakamura et al., Nucleic Acids Res. 28(1), 72 (2000). And the activity of the gene product thereof is the activity of malate dehydrogenase.

[11008] Accordingly, in one embodiment, the process of the present invention for producing glutamine in a non-human organism, like a microorganism or a plant or a part thereof, comprises increasing or generating the activity of a gene product with the activity of a gene product conferring the activity of “malate dehydrogenase”, especially from Synechocystis sp. or its functional equivalent or its homolog, e.g. the increase of
[11009] (a) a gene product of a gene comprising the nucleic acid molecule as shown in the respective line in column 5 of Table I, application no. 2, preferably the coding region thereof, or a homolog or a fragment thereof, and being depicted in the same respective line as said Sll0891, or a functional equivalent or a homolog thereof as shown in column 8 of Table I, application no. 2, preferably the coding region thereof, particularly a homolog or functional equivalent as shown in column 8 of Table I B, application no. 2, and being depicted in the same respective line as said Sll0891, and preferably the activity is increased plastidic, or
[11010] (b) a polypeptide comprising a polypeptide, a consensus sequence or at least a polypeptide motif as shown in the respective line in column 5 of Table II or in column 8 of Table IV, application no. 2, respectively, and being depicted in the same respective line as said Sll0891, or a functional equivalent or a homolog thereof as depicted in column 8 of Table II, application no. 2, preferably a homolog or functional equivalent as depicted in column 8 of Table II B, application no. 2, and being depicted in the same respective line as said Sll0891, and preferably the activity is increased plastidic.

[11011] Accordingly, in one embodiment, the molecule which activity is to be increased in the process of the invention is the gene product with an activity as a “malate dehydrogenase”, preferably it is the molecule of section (a) or (b) of this paragraph.

[11012] In particular, it was observed that in plants, especially in Arabidopsis thaliana, increasing or generating the activity of a gene product plastidic with the activity of a “malate dehydrogenase”, preferably being encoded by a gene comprising the nucleic acid sequence SEQ ID NO. 51268, preferably the coding region thereof, conferred the production of or the increase in glutamine compared with the wild type control.

[11013] The nucleic acid sequence of Sll0891 from Synechocystis sp., e.g. as shown in the respective line in column 5 of Table I, application no. 2, has been published in Nakamura et al., Nucleic Acids Res. 28(1), 72 (2000). And the activity of the gene product thereof is the activity of malate dehydrogenase.

[11014] Accordingly, in one embodiment, the process of the present invention for producing proline in a non-human organism, like a microorganism or a plant or a part thereof, comprises increasing or generating the activity of a gene product with the activity of a gene product conferring the activity of “malate dehydrogenase”, especially from Synechocystis sp. or its functional equivalent or its homolog, e.g. the increase of
[11015] (a) a gene product of a gene comprising the nucleic acid molecule as shown in the respective line in column 5 of Table I, application no. 2, preferably the coding region thereof, or a homolog or a fragment thereof, and being depicted in the same respective line as said Sll0891, or a functional equivalent or a homolog thereof as shown in column 8 of Table I, application no. 2, preferably the coding region thereof, particularly a homolog or functional equivalent as shown in column 8 of Table I B, application no. 2, and being depicted in the same respective line as said Sll0891, and preferably the activity is increased plastidic, or
[11016] (b) a polypeptide comprising a polypeptide, a consensus sequence or at least a polypeptide motif as shown in the respective line in column 5 of Table II or in column 8 of Table IV, application no. 2, respectively, and being depicted in the same respective line as said Sll0891, or a functional equivalent or a homolog thereof as depicted in column 8 of Table II, application no. 2, preferably a homolog or functional equivalent as depicted in column 8 of Table II B, application no. 2, and being depicted in the same respective line as said Sll0891, and preferably the activity is increased plastidic.

[11017] Accordingly, in one embodiment, the molecule which activity is to be increased in the process of the invention is the gene product with an activity as a “malate dehydrogenase”, preferably it is the molecule of section (a) or (b) of this paragraph.

[11018] In particular, it was observed that in plants, especially in Arabidopsis thaliana, increasing or generating the activity of a gene product plastidic with the activity of a “malate dehydrogenase”, preferably being encoded by a gene comprising the nucleic acid sequence SEQ ID NO. 51268, preferably the coding region thereof, conferred the production of or the increase in proline compared with the wild type control.

[11019] The nucleic acid sequence of Sll0901 from Synechocystis sp., e.g. as shown in the respective line in column 5 of Table I, application no. 2, has been published in Nakamura et al., Nucleic Acids Res. 28(1), 72 (2000). And the activity of the gene product thereof is the activity of phosphoribosylaminoimidazole carboxylase catalytic subunit.

[11020] Accordingly, in one embodiment, the process of the present invention for producing proline in a non-human organism, like a microorganism or a plant or a part thereof, comprises increasing or generating the activity of a gene product with the activity of a gene product conferring the activity of “phosphoribosylaminoimidazole carboxylase catalytic subunit”, especially from Synechocystis sp. or its functional equivalent or its homolog, e.g. the increase of
[11021] (a) a gene product of a gene comprising the nucleic acid molecule as shown in the respective line in column 5 of Table I, application no. 2, preferably the coding region thereof, or a homolog or a fragment thereof, and being depicted in the same respective line as said Sll0901, or a functional equivalent or a homolog thereof as shown in column 8 of Table I, application no. 2, preferably the coding region thereof, particularly a homolog or functional equivalent as shown in column 8 of Table I B, application no. 2, and being depicted in the same respective line as said Sll0901, and preferably the activity is increased mitochondrial, or
[11022] (b) a polypeptide comprising a polypeptide, a consensus sequence or at least a polypeptide motif as shown in the respective line in column 5 of Table II or in column 8 of Table IV, application no. 2, respectively, and being depicted in the same respective line as said Sll0901, or a functional equivalent or a homolog thereof as depicted in column 8 of Table II, application no. 2, preferably a homolog or functional equivalent as depicted in column 8 of Table II B, application no. 2, and being depicted in the same respective line as said Sll0901, and preferably the activity is increased mitochondrial.

[11023] Accordingly, in one embodiment, the molecule which activity is to be increased in the process of the invention is the gene product with an activity as a “phosphoribosylaminoimidazole carboxylase catalytic subunit”, preferably it is the molecule of section (a) or (b) of this paragraph.

[11024] In particular, it was observed that in plants, especially in Arabidopsis thaliana, increasing or generating the activity of a gene product mitochondrial with the activity of a “phosphoribosylaminoimidazole carboxylase catalytic subunit”, preferably being encoded by a gene comprising the nucleic acid sequence SEQ ID NO. 51632, preferably the coding region thereof, conferred the production of or the increase in proline compared with the wild type control.

[11025] The nucleic acid sequence of Sll0934 from Synechocystis sp., e.g. as shown in the respective line in column 5 of Table I, application no. 2, has been published in Nakamura et al., Nucleic Acids Res. 28(1), 72 (2000). And the activity of the gene product thereof is the activity of 3-deoxy-7-phosphoheptulonate synthase.

[11026] Accordingly, in one embodiment, the process of the present invention for producing glutamine in a non-human organism, like a microorganism or a plant or a part thereof, comprises increasing or generating the activity of a gene product with the activity of a gene product conferring the activity of “3-deoxy-7-phosphoheptulonate synthase”, especially from Synechocystis sp. or its functional equivalent or its homolog, e.g. the increase of
[11027] (a) a gene product of a gene comprising the nucleic acid molecule as shown in the respective line in column 5 of Table I, application no. 2, preferably the coding region thereof, or a homolog or a fragment thereof, and being depicted in the same respective line as said Sll0934, or a functional equivalent or a homolog thereof as shown in column 8 of Table I, application no. 2, preferably the coding region thereof, particularly a homolog or functional equivalent as shown in column 8 of Table I B, application no. 2, and being depicted in the same respective line as said Sll0934, and preferably the activity is increased mitochondrial, or
[11028] (b) a polypeptide comprising a polypeptide, a consensus sequence or at least a polypeptide motif as shown in the respective line in column 5 of Table II or in column 8 of Table IV, application no. 2, respectively, and being depicted in the same respective line as said Sll0934, or a functional equivalent or a homolog thereof as depicted in column 8 of Table II, application no. 2, preferably a homolog or functional equivalent as depicted in column 8 of Table II B, application no. 2, and being depicted in the same respective line as said Sll0934, and preferably the activity is increased mitochondrial.

[11029] Accordingly, in one embodiment, the molecule which activity is to be increased in the process of the invention is the gene product with an activity as a “3-deoxy-7-phosphoheptulonate synthase”, preferably it is the molecule of section (a) or (b) of this paragraph.

[11030] In particular, it was observed that in plants, especially in Arabidopsis thaliana, increasing or generating the activity of a gene product mitochondrial with the activity of a “3-deoxy-7-phosphoheptulonate synthase”, preferably being encoded by a gene comprising the nucleic acid sequence SEQ ID NO. 52246, preferably the coding region thereof, conferred the production of or the increase in glutamine compared with the wild type control.

[11031] The nucleic acid sequence of Sll0945 from Synechocystis sp., e.g. as shown in the respective line in column 5 of Table I, application no. 2, has been published in Nakamura et al., Nucleic Acids Res. 28(1), 72 (2000). And the activity of the gene product thereof is the activity of glycogen synthase.

[11032] Accordingly, in one embodiment, the process of the present invention for producing proline in a non-human organism, like a microorganism or a plant or a part thereof, comprises increasing or generating the activity of a gene product with the activity of a gene product conferring the activity of “glycogen synthase”, especially from Synechocystis sp. or its functional equivalent or its homolog, e.g. the increase of
[11033] (a) a gene product of a gene comprising the nucleic acid molecule as shown in the respective line in column 5 of Table I, application no. 2, preferably the coding region thereof, or a homolog or a fragment thereof, and being depicted in the same respective line as said Sll0945, or a functional equivalent or a homolog thereof as shown in column 8 of Table I, application no. 2, preferably the coding region thereof, particularly a homolog or functional equivalent as shown in column 8 of Table I B, application no. 2, and being depicted in the same respective line as said Sll0945, and preferably the activity is increased non-targeted, or
[11034] (b) a polypeptide comprising a polypeptide, a consensus sequence or at least a polypeptide motif as shown in the respective line in column 5 of Table II or in column 8 of Table IV, application no. 2, respectively, and being depicted in the same respective line as said Sll0945, or a functional equivalent or a homolog thereof as depicted in column 8 of Table II, application no. 2, preferably a homolog or functional equivalent as depicted in column 8 of Table II B, application no. 2, and being depicted in the same respective line as said Sll0945, and preferably the activity is increased non-targeted.

[11035] Accordingly, in one embodiment, the molecule which activity is to be increased in the process of the invention is the gene product with an activity as a “glycogen synthase”, preferably it is the molecule of section (a) or (b) of this paragraph.

[11036] In particular, it was observed that in plants, especially in Arabidopsis thaliana, increasing or generating the activity of a gene product non-targeted with the activity of a “glycogen synthase”, preferably being encoded by a gene comprising the nucleic acid sequence SEQ ID NO. 52364, preferably the coding region thereof, conferred the production of or the increase in proline compared with the wild type control.

[11037] The nucleic acid sequence of Sll1031 from Synechocystis sp., e.g. as shown in the respective line in column 5 of Table I, application no. 2, has been published in Nakamura et al., Nucleic Acids Res. 28(1), 72 (2000). And the activity of the gene product thereof is the activity of carbon dioxide concentrating mechanism protein.

[11038] Accordingly, in one embodiment, the process of the present invention for producing glutamate in a non-human organism, like a microorganism or a plant or a part thereof, comprises increasing or generating the activity of a gene product with the activity of a gene product conferring the activity of “carbon dioxide concentrating mechanism protein”, especially from Synechocystis sp. or its functional equivalent or its homolog, e.g. the increase of
[11039] (a) a gene product of a gene comprising the nucleic acid molecule as shown in the respective line in column 5 of Table I, application no. 2, preferably the coding region thereof, or a homolog or a fragment thereof, and being depicted in the same respective line as said Sll1031, or a functional equivalent or a homolog thereof as shown in column 8 of Table I, application no. 2, preferably the coding region thereof, particularly a homolog or functional equivalent as shown in column 8 of Table I B, application no. 2, and being depicted in the same respective line as said Sll1031, and preferably the activity is increased mitochondrial, or
[11040] (b) a polypeptide comprising a polypeptide, a consensus sequence or at least a polypeptide motif as shown in the respective line in column 5 of Table II or in column 8 of Table IV, application no. 2, respectively, and being depicted in the same respective line as said Sll1031, or a functional equivalent or a homolog thereof as depicted in column 8 of Table II, application no. 2, preferably a homolog or functional equivalent as depicted in column 8 of Table II B, application no. 2, and being depicted in the same respective line as said Sll1031, and preferably the activity is increased mitochondrial.

[11041] Accordingly, in one embodiment, the molecule which activity is to be increased in the process of the invention is the gene product with an activity as a “carbon dioxide concentrating mechanism protein”, preferably it is the molecule of section (a) or (b) of this paragraph.

[11042] In particular, it was observed that in plants, especially in Arabidopsis thaliana, increasing or generating the activity of a gene product mitochondrial with the activity of a “carbon dioxide concentrating mechanism protein”, preferably being encoded by a gene comprising the nucleic acid sequence SEQ ID NO. 52634, preferably the coding region thereof, conferred the production of or the increase in glutamate compared with the wild type control.

[11043] The nucleic acid sequence of Sll1031 from Synechocystis sp., e.g. as shown in the respective line in column 5 of Table I, application no. 2, has been published in Synechocystis Nakamura et al., Nucleic Acids Res. 28(1), 72 (2000). And the activity of the gene product thereof is the activity of carbon dioxide concentrating mechanism protein.

[11044] Accordingly, in one embodiment, the process of the present invention for producing glutamine in a non-human organism, like a microorganism or a plant or a part thereof, comprises increasing or generating the activity of a gene product with the activity of a gene product conferring the activity of “carbon dioxide concentrating mechanism protein”, especially from Synechocystis sp. or its functional equivalent or its homolog, e.g. the increase of
[11045] (a) a gene product of a gene comprising the nucleic acid molecule as shown in the respective line in column 5 of Table I, application no. 2, preferably the coding region thereof, or a homolog or a fragment thereof, and being depicted in the same respective line as said Sll1031, or a functional equivalent or a homolog thereof as shown in column 8 of Table I, application no. 2, preferably the coding region thereof, particularly a homolog or functional equivalent as shown in column 8 of Table I B, application no. 2, and being depicted in the same respective line as said Sll1031, and preferably the activity is increased mitochondrial, or
[11046] (b) a polypeptide comprising a polypeptide, a consensus sequence or at least a polypeptide motif as shown in the respective line in column 5 of Table II or in column 8 of Table IV, application no. 2, respectively, and being depicted in the same respective line as said Sll1031, or a functional equivalent or a homolog thereof as depicted in column 8 of Table II, application no. 2, preferably a homolog or functional equivalent as depicted in column 8 of Table II B, application no. 2, and being depicted in the same respective line as said Sll1031, and preferably the activity is increased mitochondrial.

[11047] Accordingly, in one embodiment, the molecule which activity is to be increased in the process of the invention is the gene product with an activity as a “carbon dioxide concentrating mechanism protein”, preferably it is the molecule of section (a) or (b) of this paragraph.

[11048] In particular, it was observed that in plants, especially in Arabidopsis thaliana, increasing or generating the activity of a gene product mitochondrial with the activity of a “carbon dioxide concentrating mechanism protein”, preferably being encoded by a gene comprising the nucleic acid sequence SEQ ID NO. 52634, preferably the coding region thereof, conferred the production of or the increase in glutamine compared with the wild type control.

[11049] The nucleic acid sequence of Sll1031 from Synechocystis sp., e.g. as shown in the respective line in column 5 of Table I, application no. 2, has been published in Nakamura et al., Nucleic Acids Res. 28(1), 72 (2000). And the activity of the gene product thereof is the activity of carbon dioxide concentrating mechanism protein.

[11050] Accordingly, in one embodiment, the process of the present invention for producing proline in a non-human organism, like a microorganism or a plant or a part thereof, comprises increasing or generating the activity of a gene product with the activity of a gene product conferring the activity of “carbon dioxide concentrating mechanism protein”, especially from Synechocystis sp. or its functional equivalent or its homolog, e.g. the increase of
[11051] (a) a gene product of a gene comprising the nucleic acid molecule as shown in the respective line in column 5 of Table I, application no. 2, preferably the coding region thereof, or a homolog or a fragment thereof, and being depicted in the same respective line as said Sll1031, or a functional equivalent or a homolog thereof as shown in column 8 of Table I, application no. 2, preferably the coding region thereof, particularly a homolog or functional equivalent as shown in column 8 of Table I B, application no. 2, and being depicted in the same respective line as said Sll1031, and preferably the activity is increased mitochondrial, or
[11052] (b) a polypeptide comprising a polypeptide, a consensus sequence or at least a polypeptide motif as shown in the respective line in column 5 of Table II or in column 8 of Table IV, application no. 2, respectively, and being depicted in the same respective line as said Sll1031, or a functional equivalent or a homolog thereof as depicted in column 8 of Table II, application no. 2, preferably a homolog or functional equivalent as depicted in column 8 of Table II B, application no. 2, and being depicted in the same respective line as said Sll1031, and preferably the activity is increased mitochondrial.

[11053] Accordingly, in one embodiment, the molecule which activity is to be increased in the process of the invention is the gene product with an activity as a “carbon dioxide concentrating mechanism protein”, preferably it is the molecule of section (a) or (b) of this paragraph.

[11054] In particular, it was observed that in plants, especially in Arabidopsis thaliana, increasing or generating the activity of a gene product mitochondrial with the activity of a “carbon dioxide concentrating mechanism protein”, preferably being encoded by a gene comprising the nucleic acid sequence SEQ ID NO. 52634, preferably the coding region thereof, conferred the production of or the increase in proline compared with the wild type control.

[11055] The nucleic acid sequence of Sll1056 from Synechocystis sp., e.g. as shown in the respective line in column 5 of Table I, application no. 2, has been published in Synechocystis Nakamura et al., Nucleic Acids Res. 28(1), 72 (2000). And the activity of the gene product thereof is the activity of phosphoribosylformyl glycinamidine synthase subunit.

[11056] Accordingly, in one embodiment, the process of the present invention for producing proline in a non-human organism, like a microorganism or a plant or a part thereof, comprises increasing or generating the activity of a gene product with the activity of a gene product conferring the activity of “phosphoribosylformyl glycinamidine synthase subunit”, especially from Synechocystis sp. or its functional equivalent or its homolog, e.g. the increase of
[11057] (a) a gene product of a gene comprising the nucleic acid molecule as shown in the respective line in column 5 of Table I, application no. 2, preferably the coding region thereof, or a homolog or a fragment thereof, and being depicted in the same respective line as said Sll1056, or a functional equivalent or a homolog thereof as shown in column 8 of Table I, application no. 2, preferably the coding region thereof, particularly a homolog or functional equivalent as shown in column 8 of Table I B, application no. 2, and being depicted in the same respective line as said Sll1056, and preferably the activity is increased plastidic, or
[11058] (b) a polypeptide comprising a polypeptide, a consensus sequence or at least a polypeptide motif as shown in the respective line in column 5 of Table II or in column 8 of Table IV, application no. 2, respectively, and being depicted in the same respective line as said Sll1056, or a functional equivalent or a homolog thereof as depicted in column 8 of Table II, application no. 2, preferably a homolog or functional equivalent as depicted in column 8 of Table II B, application no. 2, and being depicted in the same respective line as said Sll1056, and preferably the activity is increased plastidic.

[11059] Accordingly, in one embodiment, the molecule which activity is to be increased in the process of the invention is the gene product with an activity as a “phosphoribosylformyl glycinamidine synthase subunit”, preferably it is the molecule of section (a) or (b) of this paragraph.

[11060] In particular, it was observed that in plants, especially in Arabidopsis thaliana, increasing or generating the activity of a gene product plastidic with the activity of a “phosphoribosylformyl glycinamidine synthase subunit”, preferably being encoded by a gene comprising the nucleic acid sequence SEQ ID NO. 52660, preferably the coding region thereof, conferred the production of or the increase in proline compared with the wild type control.

[11061] The nucleic acid sequence of Sll1185 from Synechocystis sp., e.g. as shown in the respective line in column 5 of Table I, application no. 2, has been published in Nakamura et al., Nucleic Acids Res. 28(1), 72 (2000). And the activity of the gene product thereof is the activity of coproporphyrinogen oxidase.

[11062] Accordingly, in one embodiment, the process of the present invention for producing glutamate in a non-human organism, like a microorganism or a plant or a part thereof, comprises increasing or generating the activity of a gene product with the activity of a gene product conferring the activity of “coproporphyrinogen oxidase”, especially from Synechocystis sp. or its functional equivalent or its homolog, e.g. the increase of
[11063] (a) a gene product of a gene comprising the nucleic acid molecule as shown in the respective line in column 5 of Table I, application no. 2, preferably the coding region thereof, or a homolog or a fragment thereof, and being depicted in the same respective line as said Sll1185, or a functional equivalent or a homolog thereof as shown in column 8 of Table I, application no. 2, preferably the coding region thereof, particularly a homolog or functional equivalent as shown in column 8 of Table I B, application no. 2, and being depicted in the same respective line as said Sll1185, and preferably the activity is increased non-targeted, or
[11064] (b) a polypeptide comprising a polypeptide, a consensus sequence or at least a polypeptide motif as shown in the respective line in column 5 of Table II or in column 8 of Table IV, application no. 2, respectively, and being depicted in the same respective line as said Sll1185, or a functional equivalent or a homolog thereof as depicted in column 8 of Table II, application no. 2, preferably a homolog or functional equivalent as depicted in column 8 of Table II B, application no. 2, and being depicted in the same respective line as said Sll1185, and preferably the activity is increased non-targeted.

[11065] Accordingly, in one embodiment, the molecule which activity is to be increased in the process of the invention is the gene product with an activity as a “coproporphyrinogen oxidase”, preferably it is the molecule of section (a) or (b) of this paragraph.

[11066] In particular, it was observed that in plants, especially in Arabidopsis thaliana, increasing or generating the activity of a gene product non-targeted with the activity of a “coproporphyrinogen oxidase”, preferably being encoded by a gene comprising the nucleic acid sequence SEQ ID NO. 53189, preferably the coding region thereof, conferred the production of or the increase in glutamate compared with the wild type control.

[11067] The nucleic acid sequence of Sll1393 from Synechocystis sp., e.g. as shown in the respective line in column 5 of Table I, application no. 2, has been published in Nakamura et al., Nucleic Acids Res. 28(1), 72 (2000). And the activity of the gene product thereof is the activity of glycogen (starch) synthase.

[11068] Accordingly, in one embodiment, the process of the present invention for producing glutamine in a non-human organism, like a microorganism or a plant or a part thereof, comprises increasing or generating the activity of a gene product with the activity of a gene product conferring the activity of “glycogen (starch) synthase”, especially from Synechocystis sp. or its functional equivalent or its homolog, e.g. the increase of
[11069] (a) a gene product of a gene comprising the nucleic acid molecule as shown in the respective line in column 5 of Table I, application no. 2, preferably the coding region thereof, or a homolog or a fragment thereof, and being depicted in the same respective line as said Sll1393, or a functional equivalent or a homolog thereof as shown in column 8 of Table I, application no. 2, preferably the coding region thereof, particularly a homolog or functional equivalent as shown in column 8 of Table I B, application no. 2, and being depicted in the same respective line as said Sll1393, and preferably the activity is increased non-targeted, or
[11070] (b) a polypeptide comprising a polypeptide, a consensus sequence or at least a polypeptide motif as shown in the respective line in column 5 of Table II or in column 8 of Table IV, application no. 2, respectively, and being depicted in the same respective line as said Sll1393, or a functional equivalent or a homolog thereof as depicted in column 8 of Table II, application no. 2, preferably a homolog or functional equivalent as depicted in column 8 of Table II B, application no. 2, and being depicted in the same respective line as said Sll1393, and preferably the activity is increased non-targeted.

[11071] Accordingly, in one embodiment, the molecule which activity is to be increased in the process of the invention is the gene product with an activity as a “glycogen (starch) synthase”, preferably it is the molecule of section (a) or (b) of this paragraph.

[11072] In particular, it was observed that in plants, especially in Arabidopsis thaliana, increasing or generating the activity of a gene product non-targeted with the activity of a “glycogen (starch) synthase”, preferably being encoded by a gene comprising the nucleic acid sequence SEQ ID NO. 53456, preferably the coding region thereof, conferred the production of or the increase in glutamine compared with the wild type control.

[11073] The nucleic acid sequence of Sll1393 from Synechocystis sp., e.g. as shown in the respective line in column 5 of Table I, application no. 2, has been published in Nakamura et al., Nucleic Acids Res. 28(1), 72 (2000). And the activity of the gene product thereof is the activity of glycogen (starch) synthase.

[11074] Accordingly, in one embodiment, the process of the present invention for producing proline in a non-human organism, like a microorganism or a plant or a part thereof, comprises increasing or generating the activity of a gene product with the activity of a gene product conferring the activity of “glycogen (starch) synthase”, especially from Synechocystis sp. or its functional equivalent or its homolog, e.g. the increase of
[11075] (a) a gene product of a gene comprising the nucleic acid molecule as shown in the respective line in column 5 of Table I, application no. 2, preferably the coding region thereof, or a homolog or a fragment thereof, and being depicted in the same respective line as said Sll1393, or a functional equivalent or a homolog thereof as shown in column 8 of Table I, application no. 2, preferably the coding region thereof, particularly a homolog or functional equivalent as shown in column 8 of Table I B, application no. 2, and being depicted in the same respective line as said Sll1393, and preferably the activity is increased non-targeted, or
[11076] (b) a polypeptide comprising a polypeptide, a consensus sequence or at least a polypeptide motif as shown in the respective line in column 5 of Table II or in column 8 of Table IV, application no. 2, respectively, and being depicted in the same respective line as said Sll1393, or a functional equivalent or a homolog thereof as depicted in column 8 of Table II, application no. 2, preferably a homolog or functional equivalent as depicted in column 8 of Table II B, application no. 2, and being depicted in the same respective line as said Sll1393, and preferably the activity is increased non-targeted.

[11077] Accordingly, in one embodiment, the molecule which activity is to be increased in the process of the invention is the gene product with an activity as a “glycogen (starch) synthase”, preferably it is the molecule of section (a) or (b) of this paragraph.

[11078] In particular, it was observed that in plants, especially in Arabidopsis thaliana, increasing or generating the activity of a gene product non-targeted with the activity of a “glycogen (starch) synthase”, preferably being encoded by a gene comprising the nucleic acid sequence SEQ ID NO. 53456, preferably the coding region thereof, conferred the production of or the increase in proline compared with the wild type control.

[11079] The nucleic acid sequence of Sll1441 from Synechocystis sp., e.g. as shown in the respective line in column 5 of Table I, application no. 2, has been published in Nakamura et al., Nucleic Acids Res. 28(1), 72 (2000). And the activity of the gene product thereof is the activity of fatty acid desaturase.

[11080] Accordingly, in one embodiment, the process of the present invention for producing glutamine in a non-human organism, like a microorganism or a plant or a part thereof, comprises increasing or generating the activity of a gene product with the activity of a gene product conferring the activity of “fatty acid desaturase”, especially from Synechocystis sp. or its functional equivalent or its homolog, e.g. the increase of
[11081] (a) a gene product of a gene comprising the nucleic acid molecule as shown in the respective line in column 5 of Table I, application no. 2, preferably the coding region thereof, or a homolog or a fragment thereof, and being depicted in the same respective line as said Sll1441, or a functional equivalent or a homolog thereof as shown in column 8 of Table I, application no. 2, preferably the coding region thereof, particularly a homolog or functional equivalent as shown in column 8 of Table I B, application no. 2, and being depicted in the same respective line as said Sll1441, and preferably the activity is increased non-targeted, or
[11082] (b) a polypeptide comprising a polypeptide, a consensus sequence or at least a polypeptide motif as shown in the respective line in column 5 of Table II or in column 8 of Table IV, application no. 2, respectively, and being depicted in the same respective line as said Sll1441, or a functional equivalent or a homolog thereof as depicted in column 8 of Table II, application no. 2, preferably a homolog or functional equivalent as depicted in column 8 of Table II B, application no. 2, and being depicted in the same respective line as said Sll1441, and preferably the activity is increased non-targeted.

[11083] Accordingly, in one embodiment, the molecule which activity is to be increased in the process of the invention is the gene product with an activity as a “fatty acid desaturase”, preferably it is the molecule of section (a) or (b) of this paragraph.

[11084] In particular, it was observed that in plants, especially in Arabidopsis thaliana, increasing or generating the activity of a gene product non-targeted with the activity of a “fatty acid desaturase”, preferably being encoded by a gene comprising the nucleic acid sequence SEQ ID NO. 53608, preferably the coding region thereof, conferred the production of or the increase in glutamine compared with the wild type control.

[11085] The nucleic acid sequence of Sll1443 from Synechocystis sp., e.g. as shown in the respective line in column 5 of Table I, application no. 2, has been published in Nakamura et al., Nucleic Acids Res. 28(1), 72 (2000). And the activity of the gene product thereof is the activity of CTP synthetase.

[11086] Accordingly, in one embodiment, the process of the present invention for producing glutamate in a non-human organism, like a microorganism or a plant or a part thereof, comprises increasing or generating the activity of a gene product with the activity of a gene product conferring the activity of “CTP synthetase”, especially from Synechocystis sp. or its functional equivalent or its homolog, e.g. the increase of
[11087] (a) a gene product of a gene comprising the nucleic acid molecule as shown in the respective line in column 5 of Table I, application no. 2, preferably the coding region thereof, or a homolog or a fragment thereof, and being depicted in the same respective line as said Sll1443, or a functional equivalent or a homolog thereof as shown in column 8 of Table I, application no. 2, preferably the coding region thereof, particularly a homolog or functional equivalent as shown in column 8 of Table I B, application no. 2, and being depicted in the same respective line as said Sll1443, and preferably the activity is increased mitochondrial, or
[11088] (b) a polypeptide comprising a polypeptide, a consensus sequence or at least a polypeptide motif as shown in the respective line in column 5 of Table II or in column 8 of Table IV, application no. 2, respectively, and being depicted in the same respective line as said Sll1443, or a functional equivalent or a homolog thereof as depicted in column 8 of Table II, application no. 2, preferably a homolog or functional equivalent as depicted in column 8 of Table II B, application no. 2, and being depicted in the same respective line as said Sll1443, and preferably the activity is increased mitochondrial.

[11089] Accordingly, in one embodiment, the molecule which activity is to be increased in the process of the invention is the gene product with an activity as a “CTP synthetase”, preferably it is the molecule of section (a) or (b) of this paragraph.

[11090] In particular, it was observed that in plants, especially in Arabidopsis thaliana, increasing or generating the activity of a gene product mitochondrial with the activity of a “CTP synthetase”, preferably being encoded by a gene comprising the nucleic acid sequence SEQ ID NO. 53878, preferably the coding region thereof, conferred the production of or the increase in glutamate compared with the wild type control.

[11091] The nucleic acid sequence of Sll1450 from Synechocystis sp., e.g. as shown in the respective line in column 5 of Table I, application no. 2, has been published in Synechocystis Nakamura et al., Nucleic Acids Res. 28(1), 72 (2000). And the activity of the gene product thereof is the activity of nitrate/nitrite transport protein.

[11092] Accordingly, in one embodiment, the process of the present invention for producing glutamate in a non-human organism, like a microorganism or a plant or a part thereof, comprises increasing or generating the activity of a gene product with the activity of a gene product conferring the activity of “nitrate/nitrite transport protein”, especially from Synechocystis sp. or its functional equivalent or its homolog, e.g. the increase of
[11093] (a) a gene product of a gene comprising the nucleic acid molecule as shown in the respective line in column 5 of Table I, application no. 2, preferably the coding region thereof, or a homolog or a fragment thereof, and being depicted in the same respective line as said Sll1450, or a functional equivalent or a homolog thereof as shown in column 8 of Table I, application no. 2, preferably the coding region thereof, particularly a homolog or functional equivalent as shown in column 8 of Table I B, application no. 2, and being depicted in the same respective line as said Sll1450, and preferably the activity is increased mitochondrial, or
[11094] (b) a polypeptide comprising a polypeptide, a consensus sequence or at least a polypeptide motif as shown in the respective line in column 5 of Table II or in column 8 of Table IV, application no. 2, respectively, and being depicted in the same respective line as said Sll1450, or a functional equivalent or a homolog thereof as depicted in column 8 of Table II, application no. 2, preferably a homolog or functional equivalent as depicted in column 8 of Table II B, application no. 2, and being depicted in the same respective line as said Sll1450, and preferably the activity is increased mitochondrial.

[11095] Accordingly, in one embodiment, the molecule which activity is to be increased in the process of the invention is the gene product with an activity as a “nitrate/nitrite transport protein”, preferably it is the molecule of section (a) or (b) of this paragraph.

[11096] In particular, it was observed that in plants, especially in Arabidopsis thaliana, increasing or generating the activity of a gene product mitochondrial with the activity of a “nitrate/nitrite transport protein”, preferably being encoded by a gene comprising the nucleic acid sequence SEQ ID NO. 54337, preferably the coding region thereof, conferred the production of or the increase in glutamate compared with the wild type control.

[11097] The nucleic acid sequence of Sll1522 from Synechocystis sp., e.g. as shown in the respective line in column 5 of Table I, application no. 2, has been published in Synechocystis Nakamura et al., Nucleic Acids Res. 28(1), 72 (2000). And the activity of the gene product thereof is the activity of CDP-diacylglycerol-glycerol-3-phosphate 3-phosphatidyltransferase.

[11098] Accordingly, in one embodiment, the process of the present invention for producing glutamate in a non-human organism, like a microorganism or a plant or a part thereof, comprises increasing or generating the activity of a gene product with the activity of a gene product conferring the activity of “CDP-diacylglycerol-glycerol-3-phosphate 3-phosphatidyltransferase”, especially from Synechocystis sp. or its functional equivalent or its homolog, e.g. the increase of
[11099] (a) a gene product of a gene comprising the nucleic acid molecule as shown in the respective line in column 5 of Table I, application no. 2, preferably the coding region thereof, or a homolog or a fragment thereof, and being depicted in the same respective line as said Sll1522, or a functional equivalent or a homolog thereof as shown in column 8 of Table I, application no. 2, preferably the coding region thereof, particularly a homolog or functional equivalent as shown in column 8 of Table I B, application no. 2, and being depicted in the same respective line as said Sll1522, and preferably the activity is increased plastidic, or
[11100] (b) a polypeptide comprising a polypeptide, a consensus sequence or at least a polypeptide motif as shown in the respective line in column 5 of Table II or in column 8 of Table IV, application no. 2, respectively, and being depicted in the same respective line as said Sll1522, or a functional equivalent or a homolog thereof as depicted in column 8 of Table II, application no. 2, preferably a homolog or functional equivalent as depicted in column 8 of Table II B, application no. 2, and being depicted in the same respective line as said Sll1522, and preferably the activity is increased plastidic.

[11101] Accordingly, in one embodiment, the molecule which activity is to be increased in the process of the invention is the gene product with an activity as a “CDP-diacylglycerol-glycerol-3-phosphate 3-phosphatidyltransferase”, preferably it is the molecule of section (a) or (b) of this paragraph.

[11102] In particular, it was observed that in plants, especially in Arabidopsis thaliana, increasing or generating the activity of a gene product plastidic with the activity of a “CDP-diacylglycerol-glycerol-3-phosphate 3-phosphatidyltransferase”, preferably being encoded by a gene comprising the nucleic acid sequence SEQ ID NO. 54452, preferably the coding region thereof, conferred the production of or the increase in glutamate compared with the wild type control.

[11103] The nucleic acid sequence of Sll1545 from Synechocystis sp., e.g. as shown in the respective line in column 5 of Table I, application no. 2, has been published in Synechocystis Nakamura et al., Nucleic Acids Res. 28(1), 72 (2000). And the activity of the gene product thereof is the activity of glutathione S-transferase.

[11104] Accordingly, in one embodiment, the process of the present invention for producing arginine in a non-human organism, like a microorganism or a plant or a part thereof, comprises increasing or generating the activity of a gene product with the activity of a gene product conferring the activity of “glutathione S-transferase”, especially from Synechocystis sp. or its functional equivalent or its homolog, e.g. the increase of
[11105] (a) a gene product of a gene comprising the nucleic acid molecule as shown in the respective line in column 5 of Table I, application no. 2, preferably the coding region thereof, or a homolog or a fragment thereof, and being depicted in the same respective line as said Sll1545, or a functional equivalent or a homolog thereof as shown in column 8 of Table I, application no. 2, preferably the coding region thereof, particularly a homolog or functional equivalent as shown in column 8 of Table I B, application no. 2, and being depicted in the same respective line as said Sll1545, and preferably the activity is increased non-targeted, or
[11106] (b) a polypeptide comprising a polypeptide, a consensus sequence or at least a polypeptide motif as shown in the respective line in column 5 of Table II or in column 8 of Table IV, application no. 2, respectively, and being depicted in the same respective line as said Sll1545, or a functional equivalent or a homolog thereof as depicted in column 8 of Table II, application no. 2, preferably a homolog or functional equivalent as depicted in column 8 of Table II B, application no. 2, and being depicted in the same respective line as said Sll1545, and preferably the activity is increased non-targeted.

[11107] Accordingly, in one embodiment, the molecule which activity is to be increased in the process of the invention is the gene product with an activity as a “glutathione S-transferase”, preferably it is the molecule of section (a) or (b) of this paragraph.

[11108] In particular, it was observed that in plants, especially in Arabidopsis thaliana, increasing or generating the activity of a gene product non-targeted with the activity of a “glutathione S-transferase”, preferably being encoded by a gene comprising the nucleic acid sequence SEQ ID NO. 11423, preferably the coding region thereof, conferred the production of or the increase in arginine compared with the wild type control.

[11109] The nucleic acid sequence of Sll1545 from Synechocystis sp., e.g. as shown in the respective line in column 5 of Table I, application no. 2, has been published in Nakamura et al., Nucleic Acids Res. 28(1), 72 (2000). And the activity of the gene product thereof is the activity of glutathione S-transferase.

[11110] Accordingly, in one embodiment, the process of the present invention for producing glutamine in a non-human organism, like a microorganism or a plant or a part thereof, comprises increasing or generating the activity of a gene product with the activity of a gene product conferring the activity of “glutathione S-transferase”, especially from Synechocystis sp. or its functional equivalent or its homolog, e.g. the increase of
[11111] (a) a gene product of a gene comprising the nucleic acid molecule as shown in the respective line in column 5 of Table I, application no. 2, preferably the coding region thereof, or a homolog or a fragment thereof, and being depicted in the same respective line as said Sll1545, or a functional equivalent or a homolog thereof as shown in column 8 of Table I, application no. 2, preferably the coding region thereof, particularly a homolog or functional equivalent as shown in column 8 of Table I B, application no. 2, and being depicted in the same respective line as said Sll1545, and preferably the activity is increased mitochondrial, or
[11112] (b) a polypeptide comprising a polypeptide, a consensus sequence or at least a polypeptide motif as shown in the respective line in column 5 of Table II or in column 8 of Table IV, application no. 2, respectively, and being depicted in the same respective line as said Sll1545, or a functional equivalent or a homolog thereof as depicted in column 8 of Table II, application no. 2, preferably a homolog or functional equivalent as depicted in column 8 of Table II B, application no. 2, and being depicted in the same respective line as said Sll1545, and preferably the activity is increased mitochondrial.

[11113] Accordingly, in one embodiment, the molecule which activity is to be increased in the process of the invention is the gene product with an activity as a “glutathione S-transferase”, preferably it is the molecule of section (a) or (b) of this paragraph.

[11114] In particular, it was observed that in plants, especially in Arabidopsis thaliana, increasing or generating the activity of a gene product mitochondrial with the activity of a “glutathione S-transferase”, preferably being encoded by a gene comprising the nucleic acid sequence SEQ ID NO. 11423, preferably the coding region thereof, conferred the production of or the increase in glutamine compared with the wild type control.

[11115] The nucleic acid sequence of Sll1545 from Synechocystis sp., e.g. as shown in the respective line in column 5 of Table I, application no. 2, has been published in Nakamura et al., Nucleic Acids Res. 28(1), 72 (2000). And the activity of the gene product thereof is the activity of glutathione S-transferase.

[11116] Accordingly, in one embodiment, the process of the present invention for producing proline in a non-human organism, like a microorganism or a plant or a part thereof, comprises increasing or generating the activity of a gene product with the activity of a gene product conferring the activity of “glutathione S-transferase”, especially from Synechocystis sp. or its functional equivalent or its homolog, e.g. the increase of
[11117] (a) a gene product of a gene comprising the nucleic acid molecule as shown in the respective line in column 5 of Table I, application no. 2, preferably the coding region thereof, or a homolog or a fragment thereof, and being depicted in the same respective line as said Sll1545, or a functional equivalent or a homolog thereof as shown in column 8 of Table I, application no. 2, preferably the coding region thereof, particularly a homolog or functional equivalent as shown in column 8 of Table I B, application no. 2, and being depicted in the same respective line as said Sll1545, and preferably the activity is increased mitochondrial, or
[11118] (b) a polypeptide comprising a polypeptide, a consensus sequence or at least a polypeptide motif as shown in the respective line in column 5 of Table II or in column 8 of Table IV, application no. 2, respectively, and being depicted in the same respective line as said Sll1545, or a functional equivalent or a homolog thereof as depicted in column 8 of Table II, application no. 2, preferably a homolog or functional equivalent as depicted in column 8 of Table II B, application no. 2, and being depicted in the same respective line as said Sll1545, and preferably the activity is increased mitochondrial.

[11119] Accordingly, in one embodiment, the molecule which activity is to be increased in the process of the invention is the gene product with an activity as a “glutathione S-transferase”, preferably it is the molecule of section (a) or (b) of this paragraph.

[11120] In particular, it was observed that in plants, especially in Arabidopsis thaliana, increasing or generating the activity of a gene product mitochondrial with the activity of a “glutathione S-transferase”, preferably being encoded by a gene comprising the nucleic acid sequence SEQ ID NO. 11423, preferably the coding region thereof, conferred the production of or the increase in proline compared with the wild type control.

[11121] The nucleic acid sequence of Sll1546 from Synechocystis sp., e.g. as shown in the respective line in column 5 of Table I, application no. 2, has been published in Nakamura et al., Nucleic Acids Res. 28(1), 72 (2000). And the activity of the gene product thereof is the activity of exopolyphosphatase.

[11122] Accordingly, in one embodiment, the process of the present invention for producing arginine in a non-human organism, like a microorganism or a plant or a part thereof, comprises increasing or generating the activity of a gene product with the activity of a gene product conferring the activity of “exopolyphosphatase”, especially from Synechocystis sp. or its functional equivalent or its homolog, e.g. the increase of (a) a gene product of a gene comprising the nucleic acid molecule as shown in the respective line in column 5 of Table I, application no. 2, preferably the coding region thereof, or a homolog or a fragment thereof, and being depicted in the same respective line as said Sll1546, or a functional equivalent or a homolog thereof as shown in column 8 of Table I, application no. 2, preferably the coding region thereof, particularly a homolog or functional equivalent as shown in column 8 of Table I B, application no. 2, and being depicted in the same respective line as said Sll1546, and preferably the activity is increased non-targeted, or
[11123] (b) a polypeptide comprising a polypeptide, a consensus sequence or at least a polypeptide motif as shown in the respective line in column 5 of Table II or in column 8 of Table IV, application no. 2, respectively, and being depicted in the same respective line as said Sll1546, or a functional equivalent or a homolog thereof as depicted in column 8 of Table II, application no. 2, preferably a homolog or functional equivalent as depicted in column 8 of Table II B, application no. 2, and being depicted in the same respective line as said

[11124] Sll1546, and preferably the activity is increased non-targeted.

[11125] Accordingly, in one embodiment, the molecule which activity is to be increased in the process of the invention is the gene product with an activity as a “exopolyphosphatase”, preferably it is the molecule of section (a) or (b) of this paragraph.

[11126] In particular, it was observed that in plants, especially in Arabidopsis thaliana, increasing or generating the activity of a gene product non-targeted with the activity of a “exopolyphosphatase”, preferably being encoded by a gene comprising the nucleic acid sequence SEQ ID NO. 54804, preferably the coding region thereof, conferred the production of or the increase in arginine compared with the wild type control.

[11127] The nucleic acid sequence of Sll1676 from Synechocystis sp., e.g. as shown in the respective line in column 5 of Table I, application no. 2, has been published in Nakamura et al., Nucleic Acids Res. 28(1), 72 (2000). And the activity of the gene product thereof is the activity of 4-alpha-glucanotransferase.

[11128] Accordingly, in one embodiment, the process of the present invention for producing proline in a non-human organism, like a microorganism or a plant or a part thereof, comprises increasing or generating the activity of a gene product with the activity of a gene product conferring the activity of “4-alpha-glucanotransferase”, especially from Synechocystis sp. or its functional equivalent or its homolog, e.g. the increase of
[11129] (a) a gene product of a gene comprising the nucleic acid molecule as shown in the respective line in column 5 of Table I, application no. 2, preferably the coding region thereof, or a homolog or a fragment thereof, and being depicted in the same respective line as said Sll1676, or a functional equivalent or a homolog thereof as shown in column 8 of Table I, application no. 2, preferably the coding region thereof, particularly a homolog or functional equivalent as shown in column 8 of Table I B, application no. 2, and being depicted in the same respective line as said Sll1676, and preferably the activity is increased non-targeted, or
[11130] (b) a polypeptide comprising a polypeptide, a consensus sequence or at least a polypeptide motif as shown in the respective line in column 5 of Table II or in column 8 of Table IV, application no. 2, respectively, and being depicted in the same respective line as said Sll1676, or a functional equivalent or a homolog thereof as depicted in column 8 of Table II, application no. 2, preferably a homolog or functional equivalent as depicted in column 8 of Table II B, application no. 2, and being depicted in the same respective line as said Sll1676, and preferably the activity is increased non-targeted.

[11131] Accordingly, in one embodiment, the molecule which activity is to be increased in the process of the invention is the gene product with an activity as a “4-alpha-glucanotransferase”, preferably it is the molecule of section (a) or (b) of this paragraph.

[11132] In particular, it was observed that in plants, especially in Arabidopsis thaliana, increasing or generating the activity of a gene product non-targeted with the activity of a “4-alphaglucanotransferase”, preferably being encoded by a gene comprising the nucleic acid sequence SEQ ID NO. 54897, preferably the coding region thereof, conferred the production of or the increase in proline compared with the wild type control.

[11133] The nucleic acid sequence of Sll1682 from Synechocystis sp., e.g. as shown in the respective line in column 5 of Table I, application no. 2, has been published in Nakamura et al., Nucleic Acids Res. 28(1), 72 (2000). And the activity of the gene product thereof is the activity of alanine dehydrogenase.

[11134] Accordingly, in one embodiment, the process of the present invention for producing proline in a non-human organism, like a microorganism or a plant or a part thereof, comprises increasing or generating the activity of a gene product with the activity of a gene product conferring the activity of “alanine dehydrogenase”, especially from Synechocystis sp. or its functional equivalent or its homolog, e.g. the increase of
[11135] (a) a gene product of a gene comprising the nucleic acid molecule as shown in the respective line in column 5 of Table I, application no. 2, preferably the coding region thereof, or a homolog or a fragment thereof, and being depicted in the same respective line as said Sll1682, or a functional equivalent or a homolog thereof as shown in column 8 of Table I, application no. 2, preferably the coding region thereof, particularly a homolog or functional equivalent as shown in column 8 of Table I B, application no. 2, and being depicted in the same respective line as said Sll1682, and preferably the activity is increased plastidic, or
[11136] (b) a polypeptide comprising a polypeptide, a consensus sequence or at least a polypeptide motif as shown in the respective line in column 5 of Table II or in column 8 of Table IV, application no. 2, respectively, and being depicted in the same respective line as said Sll1682, or a functional equivalent or a homolog thereof as depicted in column 8 of Table II, application no. 2, preferably a homolog or functional equivalent as depicted in column 8 of Table II B, application no. 2, and being depicted in the same respective line as said Sll1682, and preferably the activity is increased plastidic.

[11137] Accordingly, in one embodiment, the molecule which activity is to be increased in the process of the invention is the gene product with an activity as a “alanine dehydrogenase”, preferably it is the molecule of section (a) or (b) of this paragraph.

[11138] In particular, it was observed that in plants, especially in Arabidopsis thaliana, increasing or generating the activity of a gene product plastidic with the activity of a “alanine dehydrogenase”, preferably being encoded by a gene comprising the nucleic acid sequence SEQ ID NO. 55063, preferably the coding region thereof, conferred the production of or the increase in proline compared with the wild type control.

[11139] The nucleic acid sequence of Sll1761 from Synechocystis sp., e.g. as shown in the respective line in column 5 of Table I, application no. 2, has been published in S Nakamura et al., Nucleic Acids Res. 28(1), 72 (2000). And the activity of the gene product thereof is the activity of Sll1761-protein.

[11140] Accordingly, in one embodiment, the process of the present invention for producing arginine in a non-human organism, like a microorganism or a plant or a part thereof, comprises increasing or generating the activity of a gene product with the activity of a gene product conferring the activity of “sll1761-protein”, especially from Synechocystis sp. or its functional equivalent or its homolog, e.g. the increase of
[11141] (a) a gene product of a gene comprising the nucleic acid molecule as shown in the respective line in column 5 of Table I, application no. 2, preferably the coding region thereof, or a homolog or a fragment thereof, and being depicted in the same respective line as said Sll1761, or a functional equivalent or a homolog thereof as shown in column 8 of Table I, application no. 2, preferably the coding region thereof, particularly a homolog or functional equivalent as shown in column 8 of Table I B, application no. 2, and being depicted in the same respective line as said Sll1761, and preferably the activity is increased non-targeted, or
[11142] (b) a polypeptide comprising a polypeptide, a consensus sequence or at least a polypeptide motif as shown in the respective line in column 5 of Table II or in column 8 of Table IV, application no. 2, respectively, and being depicted in the same respective line as said Sll1761, or a functional equivalent or a homolog thereof as depicted in column 8 of Table II, application no. 2, preferably a homolog or functional equivalent as depicted in column 8 of Table II B, application no. 2, and being depicted in the same respective line as said Sll1761, and preferably the activity is increased non-targeted.

[11143] Accordingly, in one embodiment, the molecule which activity is to be increased in the process of the invention is the gene product with an activity as a “sll1761-protein”, preferably it is the molecule of section (a) or (b) of this paragraph.

[11144] In particular, it was observed that in plants, especially in Arabidopsis thaliana, increasing or generating the activity of a gene product non-targeted with the activity of a “sll1761-protein”, preferably being encoded by a gene comprising the nucleic acid sequence SEQ ID NO. 55379, preferably the coding region thereof, conferred the production of or the increase in arginine compared with the wild type control.

[11145] The nucleic acid sequence of Sll1761 from Synechocystis sp., e.g. as shown in the respective line in column 5 of Table I, application no. 2, has been published in Nakamura et al., Nucleic Acids Res. 28(1), 72 (2000). And the activity of the gene product thereof is the activity of sll1761-protein.

[11146] Accordingly, in one embodiment, the process of the present invention for producing proline in a non-human organism, like a microorganism or a plant or a part thereof, comprises increasing or generating the activity of a gene product with the activity of a gene product conferring the activity of “sll1761-protein”, especially from Synechocystis sp. or its functional equivalent or its homolog, e.g. the increase of
[11147] (a) a gene product of a gene comprising the nucleic acid molecule as shown in the respective line in column 5 of Table I, application no. 2, preferably the coding region thereof, or a homolog or a fragment thereof, and being depicted in the same respective line as said Sll1761, or a functional equivalent or a homolog thereof as shown in column 8 of Table I, application no. 2, preferably the coding region thereof, particularly a homolog or functional equivalent as shown in column 8 of Table I B, application no. 2, and being depicted in the same respective line as said Sll1761, and preferably the activity is increased non-targeted, or
[11148] (b) a polypeptide comprising a polypeptide, a consensus sequence or at least a polypeptide motif as shown in the respective line in column 5 of Table II or in column 8 of Table IV, application no. 2, respectively, and being depicted in the same respective line as said Sll1761, or a functional equivalent or a homolog thereof as depicted in column 8 of Table II, application no. 2, preferably a homolog or functional equivalent as depicted in column 8 of Table II B, application no. 2, and being depicted in the same respective line as said Sll1761, and preferably the activity is increased non-targeted.

[11149] Accordingly, in one embodiment, the molecule which activity is to be increased in the process of the invention is the gene product with an activity as a “sll1761-protein”, preferably it is the molecule of section (a) or (b) of this paragraph.

[11150] In particular, it was observed that in plants, especially in Arabidopsis thaliana, increasing or generating the activity of a gene product non-targeted with the activity of a “sll1761-protein”, preferably being encoded by a gene comprising the nucleic acid sequence SEQ ID NO. 55379, preferably the coding region thereof, conferred the production of or the increase in proline compared with the wild type control.

[11151] The nucleic acid sequence of Sll1917 from Synechocystis sp., e.g. as shown in the respective line in column 5 of Table I, application no. 2, has been published in Nakamura et al., Nucleic Acids Res. 28(1), 72 (2000). And the activity of the gene product thereof is the activity of coproporphyrinogen III oxidase.

[11152] Accordingly, in one embodiment, the process of the present invention for producing glutamate in a non-human organism, like a microorganism or a plant or a part thereof, comprises increasing or generating the activity of a gene product with the activity of a gene product conferring the activity of “coproporphyrinogen III oxidase”, especially from Synechocystis sp. or its functional equivalent or its homolog, e.g. the increase of
[11153] (a) a gene product of a gene comprising the nucleic acid molecule as shown in the respective line in column 5 of Table I, application no. 2, preferably the coding region thereof, or a homolog or a fragment thereof, and being depicted in the same respective line as said Sll1917, or a functional equivalent or a homolog thereof as shown in column 8 of Table I, application no. 2, preferably the coding region thereof, particularly a homolog or functional equivalent as shown in column 8 of Table I B, application no. 2, and being depicted in the same respective line as said Sll1917, and preferably the activity is increased mitochondrial, or
[11154] (b) a polypeptide comprising a polypeptide, a consensus sequence or at least a polypeptide motif as shown in the respective line in column 5 of Table II or in column 8 of Table IV, application no. 2, respectively, and being depicted in the same respective line as said Sll1917, or a functional equivalent or a homolog thereof as depicted in column 8 of Table II, application no. 2, preferably a homolog or functional equivalent as depicted in column 8 of Table II B, application no. 2, and being depicted in the same respective line as said Sll1917, and preferably the activity is increased mitochondrial.

[11155] Accordingly, in one embodiment, the molecule which activity is to be increased in the process of the invention is the gene product with an activity as a “coproporphyrinogen III oxidase”, preferably it is the molecule of section (a) or (b) of this paragraph.

[11156] In particular, it was observed that in plants, especially in Arabidopsis thaliana, increasing or generating the activity of a gene product mitochondrial with the activity of a “coproporphyrinogen III oxidase”, preferably being encoded by a gene comprising the nucleic acid sequence SEQ ID NO. 11471, preferably the coding region thereof, conferred the production of or the increase in glutamate compared with the wild type control.

[11157] The nucleic acid sequence of Sll1917 from Synechocystis sp., e.g. as shown in the respective line in column 5 of Table I, application no. 2, has been published in S Nakamura et al., Nucleic Acids Res. 28(1), 72 (2000). And the activity of the gene product thereof is the activity of coproporphyrinogen III oxidase.

[11158] Accordingly, in one embodiment, the process of the present invention for producing glutamine in a non-human organism, like a microorganism or a plant or a part thereof, comprises increasing or generating the activity of a gene product with the activity of a gene product conferring the activity of “coproporphyrinogen III oxidase”, especially from Synechocystis sp. or its functional equivalent or its homolog, e.g. the increase of
[11159] (a) a gene product of a gene comprising the nucleic acid molecule as shown in the respective line in column 5 of Table I, application no. 2, preferably the coding region thereof, or a homolog or a fragment thereof, and being depicted in the same respective line as said Sll1917, or a functional equivalent or a homolog thereof as shown in column 8 of Table I, application no. 2, preferably the coding region thereof, particularly a homolog or functional equivalent as shown in column 8 of Table I B, application no. 2, and being depicted in the same respective line as said Sll1917, and preferably the activity is increased mitochondrial, or
[11160] (b) a polypeptide comprising a polypeptide, a consensus sequence or at least a polypeptide motif as shown in the respective line in column 5 of Table II or in column 8 of Table IV, application no. 2, respectively, and being depicted in the same respective line as said Sll1917, or a functional equivalent or a homolog thereof as depicted in column 8 of Table II, application no. 2, preferably a homolog or functional equivalent as depicted in column 8 of Table II B, application no. 2, and being depicted in the same respective line as said Sll1917, and preferably the activity is increased mitochondrial.

[11161] Accordingly, in one embodiment, the molecule which activity is to be increased in the process of the invention is the gene product with an activity as a “coproporphyrinogen III oxidase”, preferably it is the molecule of section (a) or (b) of this paragraph.

[11162] In particular, it was observed that in plants, especially in Arabidopsis thaliana, increasing or generating the activity of a gene product mitochondrial with the activity of a “coproporphyrinogen III oxidase”, preferably being encoded by a gene comprising the nucleic acid sequence SEQ ID NO. 11471, preferably the coding region thereof, conferred the production of or the increase in glutamine compared with the wild type control.

[11163] The nucleic acid sequence of Sll1917 from Synechocystis sp., e.g. as shown in the respective line in column 5 of Table I, application no. 2, has been published in Nakamura et al., Nucleic Acids Res. 28(1), 72 (2000). And the activity of the gene product thereof is the activity of coproporphyrinogen III oxidase.

[11164] Accordingly, in one embodiment, the process of the present invention for producing proline in a non-human organism, like a microorganism or a plant or a part thereof, comprises increasing or generating the activity of a gene product with the activity of a gene product conferring the activity of “coproporphyrinogen III oxidase”, especially from Synechocystis sp. or its functional equivalent or its homolog, e.g. the increase of
[11165] (a) a gene product of a gene comprising the nucleic acid molecule as shown in the respective line in column 5 of Table I, application no. 2, preferably the coding region thereof, or a homolog or a fragment thereof, and being depicted in the same respective line as said Sll1917, or a functional equivalent or a homolog thereof as shown in column 8 of Table I, application no. 2, preferably the coding region thereof, particularly a homolog or functional equivalent as shown in column 8 of Table I B, application no. 2, and being depicted in the same respective line as said Sll1917, and preferably the activity is increased mitochondrial, or
[11166] (b) a polypeptide comprising a polypeptide, a consensus sequence or at least a polypeptide motif as shown in the respective line in column 5 of Table II or in column 8 of Table IV, application no. 2, respectively, and being depicted in the same respective line as said Sll1917, or a functional equivalent or a homolog thereof as depicted in column 8 of Table II, application no. 2, preferably a homolog or functional equivalent as depicted in column 8 of Table II B, application no. 2, and being depicted in the same respective line as said Sll1917, and preferably the activity is increased mitochondrial.

[11167] Accordingly, in one embodiment, the molecule which activity is to be increased in the process of the invention is the gene product with an activity as a “coproporphyrinogen III oxidase”, preferably it is the molecule of section (a) or (b) of this paragraph.

[11168] In particular, it was observed that in plants, especially in Arabidopsis thaliana, increasing or generating the activity of a gene product mitochondrial with the activity of a “coproporphyrinogen III oxidase”, preferably being encoded by a gene comprising the nucleic acid sequence SEQ ID NO. 11471, preferably the coding region thereof, conferred the production of or the increase in proline compared with the wild type control.

[11169] The nucleic acid sequence of Sll1920 from Synechocystis sp., e.g. as shown in the respective line in column 5 of Table I, application no. 2, has been published in Nakamura et al., Nucleic Acids Res. 28(1), 72 (2000). And the activity of the gene product thereof is the activity of cationtransporting ATPase.

[11170] Accordingly, in one embodiment, the process of the present invention for producing glutamate in a non-human organism, like a microorganism or a plant or a part thereof, comprises increasing or generating the activity of a gene product with the activity of a gene product conferring the activity of “cation-transporting ATPase”, especially from Synechocystis sp. or its functional equivalent or its homolog, e.g. the increase of
[11171] (a) a gene product of a gene comprising the nucleic acid molecule as shown in the respective line in column 5 of Table I, application no. 2, preferably the coding region thereof, or a homolog or a fragment thereof, and being depicted in the same respective line as said Sll1920, or a functional equivalent or a homolog thereof as shown in column 8 of Table I, application no. 2, preferably the coding region thereof, particularly a homolog or functional equivalent as shown in column 8 of Table I B, application no. 2, and being depicted in the same respective line as said Sll1920, and preferably the activity is increased mitochondrial, or
[11172] (b) a polypeptide comprising a polypeptide, a consensus sequence or at least a polypeptide motif as shown in the respective line in column 5 of Table II or in column 8 of Table IV, application no. 2, respectively, and being depicted in the same respective line as said Sll1920, or a functional equivalent or a homolog thereof as depicted in column 8 of Table II, application no. 2, preferably a homolog or functional equivalent as depicted in column 8 of Table II B, application no. 2, and being depicted in the same respective line as said Sll1920, and preferably the activity is increased mitochondrial.

[11173] Accordingly, in one embodiment, the molecule which activity is to be increased in the process of the invention is the gene product with an activity as a “cation-transporting ATPase”, preferably it is the molecule of section (a) or (b) of this paragraph.

[11174] In particular, it was observed that in plants, especially in Arabidopsis thaliana, increasing or generating the activity of a gene product mitochondrial with the activity of a “cation-transporting ATPase”, preferably being encoded by a gene comprising the nucleic acid sequence SEQ ID NO. 55385, preferably the coding region thereof, conferred the production of or the increase in glutamate compared with the wild type control.

[11175] The nucleic acid sequence of Sll1920 from Synechocystis sp., e.g. as shown in the respective line in column 5 of Table I, application no. 2, has been published in Nakamura et al., Nucleic Acids Res. 28(1), 72 (2000). And the activity of the gene product thereof is the activity of cationtransporting ATPase.

[11176] Accordingly, in one embodiment, the process of the present invention for producing glutamine in a non-human organism, like a microorganism or a plant or a part thereof, comprises increasing or generating the activity of a gene product with the activity of a gene product conferring the activity of “cation-transporting ATPase”, especially from Synechocystis sp. or its functional equivalent or its homolog, e.g. the increase of
[11177] (a) a gene product of a gene comprising the nucleic acid molecule as shown in the respective line in column 5 of Table I, application no. 2, preferably the coding region thereof, or a homolog or a fragment thereof, and being depicted in the same respective line as said Sll1920, or a functional equivalent or a homolog thereof as shown in column 8 of Table I, application no. 2, preferably the coding region thereof, particularly a homolog or functional equivalent as shown in column 8 of Table I B, application no. 2, and being depicted in the same respective line as said Sll1920, and preferably the activity is increased mitochondrial, or
[11178] (b) a polypeptide comprising a polypeptide, a consensus sequence or at least a polypeptide motif as shown in the respective line in column 5 of Table II or in column 8 of Table IV, application no. 2, respectively, and being depicted in the same respective line as said Sll1920, or a functional equivalent or a homolog thereof as depicted in column 8 of Table II, application no. 2, preferably a homolog or functional equivalent as depicted in column 8 of Table II B, application no. 2, and being depicted in the same respective line as said Sll1920, and preferably the activity is increased mitochondrial.

[11179] Accordingly, in one embodiment, the molecule which activity is to be increased in the process of the invention is the gene product with an activity as a “cation-transporting ATPase”, preferably it is the molecule of section (a) or (b) of this paragraph.

[11180] In particular, it was observed that in plants, especially in Arabidopsis thaliana, increasing or generating the activity of a gene product mitochondrial with the activity of a “cation-transporting ATPase”, preferably being encoded by a gene comprising the nucleic acid sequence SEQ ID NO. 55385, preferably the coding region thereof, conferred the production of or the increase in glutamine compared with the wild type control.

[11181] The nucleic acid sequence of Slr0237 from Synechocystis sp., e.g. as shown in the respective line in column 5 of Table I, application no. 2, has been published in Nakamura et al., Nucleic Acids Res. 28(1), 72 (2000). And the activity of the gene product thereof is the activity of glycosidase.

[11182] Accordingly, in one embodiment, the process of the present invention for producing arginine in a non-human organism, like a microorganism or a plant or a part thereof, comprises increasing or generating the activity of a gene product with the activity of a gene product conferring the activity of “glycosidase”, especially from Synechocystis sp. or its functional equivalent or its homolog, e.g. the increase of
[11183] (a) a gene product of a gene comprising the nucleic acid molecule as shown in the respective line in column 5 of Table I, application no. 2, preferably the coding region thereof, or a homolog or a fragment thereof, and being depicted in the same respective line as said Slr0237, or a functional equivalent or a homolog thereof as shown in column 8 of Table I, application no. 2, preferably the coding region thereof, particularly a homolog or functional equivalent as shown in column 8 of Table I B, application no. 2, and being depicted in the same respective line as said Slr0237, and preferably the activity is increased non-targeted, or
[11184] (b) a polypeptide comprising a polypeptide, a consensus sequence or at least a polypeptide motif as shown in the respective line in column 5 of Table II or in column 8 of Table IV, application no. 2, respectively, and being depicted in the same respective line as said Slr0237, or a functional equivalent or a homolog thereof as depicted in column 8 of Table II, application no. 2, preferably a homolog or functional equivalent as depicted in column 8 of Table II B, application no. 2, and being depicted in the same respective line as said Slr0237, and preferably the activity is increased non-targeted.

[11185] Accordingly, in one embodiment, the molecule which activity is to be increased in the process of the invention is the gene product with an activity as a “glycosidase”, preferably it is the molecule of section (a) or (b) of this paragraph.

[11186] In particular, it was observed that in plants, especially in Arabidopsis thaliana, increasing or generating the activity of a gene product non-targeted with the activity of a “glycosidase”, preferably being encoded by a gene comprising the nucleic acid sequence SEQ ID NO. 55771, preferably the coding region thereof, conferred the production of or the increase in arginine compared with the wild type control.

[11187] The nucleic acid sequence of Slr0237 from Synechocystis sp., e.g. as shown in the respective line in column 5 of Table I, application no. 2, has been published in Nakamura et al., Nucleic Acids Res. 28(1), 72 (2000). And the activity of the gene product thereof is the activity of glycosidase.

[11188] Accordingly, in one embodiment, the process of the present invention for producing glutamine in a non-human organism, like a microorganism or a plant or a part thereof, comprises increasing or generating the activity of a gene product with the activity of a gene product conferring the activity of “glycosidase”, especially from Synechocystis sp. or its functional equivalent or its homolog, e.g. the increase of
[11189] (a) a gene product of a gene comprising the nucleic acid molecule as shown in the respective line in column 5 of Table I, application no. 2, preferably the coding region thereof, or a homolog or a fragment thereof, and being depicted in the same respective line as said Slr0237, or a functional equivalent or a homolog thereof as shown in column 8 of Table I, application no. 2, preferably the coding region thereof, particularly a homolog or functional equivalent as shown in column 8 of Table I B, application no. 2, and being depicted in the same respective line as said Slr0237, and preferably the activity is increased non-targeted, or
[11190] (b) a polypeptide comprising a polypeptide, a consensus sequence or at least a polypeptide motif as shown in the respective line in column 5 of Table II or in column 8 of Table IV, application no. 2, respectively, and being depicted in the same respective line as said Slr0237, or a functional equivalent or a homolog thereof as depicted in column 8 of Table II, application no. 2, preferably a homolog or functional equivalent as depicted in column 8 of Table II B, application no. 2, and being depicted in the same respective line as said Slr0237, and preferably the activity is increased non-targeted.

[11191] Accordingly, in one embodiment, the molecule which activity is to be increased in the process of the invention is the gene product with an activity as a “glycosidase”, preferably it is the molecule of section (a) or (b) of this paragraph.

[11192] In particular, it was observed that in plants, especially in Arabidopsis thaliana, increasing or generating the activity of a gene product non-targeted with the activity of a “glycosidase”, preferably being encoded by a gene comprising the nucleic acid sequence SEQ ID NO. 55771, preferably the coding region thereof, conferred the production of or the increase in glutamine compared with the wild type control.

[11193] The nucleic acid sequence of Slr0477 from Synechocystis sp., e.g. as shown in the respective line in column 5 of Table I, application no. 2, has been published in Nakamura et al., Nucleic Acids Res. 28(1), 72 (2000). And the activity of the gene product thereof is the activity of phosphoribosylglycinamide formyltransferase.

[11194] Accordingly, in one embodiment, the process of the present invention for producing proline in a non-human organism, like a microorganism or a plant or a part thereof, comprises increasing or generating the activity of a gene product with the activity of a gene product conferring the activity of “phosphoribosylglycinamide formyltransferase”, especially from Synechocystis sp. or its functional equivalent or its homolog, e.g. the increase of
[11195] (a) a gene product of a gene comprising the nucleic acid molecule as shown in the respective line in column 5 of Table I, application no. 2, preferably the coding region thereof, or a homolog or a fragment thereof, and being depicted in the same respective line as said Slr0477, or a functional equivalent or a homolog thereof as shown in column 8 of Table I, application no. 2, preferably the coding region thereof, particularly a homolog or functional equivalent as shown in column 8 of Table I B, application no. 2, and being depicted in the same respective line as said Slr0477, and preferably the activity is increased plastidic, or
[11196] (b) a polypeptide comprising a polypeptide, a consensus sequence or at least a polypeptide motif as shown in the respective line in column 5 of Table II or in column 8 of Table IV, application no. 2, respectively, and being depicted in the same respective line as said Slr0477, or a functional equivalent or a homolog thereof as depicted in column 8 of Table II, application no. 2, preferably a homolog or functional equivalent as depicted in column 8 of Table II B, application no. 2, and being depicted in the same respective line as said Slr0477, and preferably the activity is increased plastidic.

[11197] Accordingly, in one embodiment, the molecule which activity is to be increased in the process of the invention is the gene product with an activity as a “phosphoribosylglycinamide formyltransferase”, preferably it is the molecule of section (a) or (b) of this paragraph.

[11198] In particular, it was observed that in plants, especially in Arabidopsis thaliana, increasing or generating the activity of a gene product plastidic with the activity of a “phosphoribosylglycinamide formyltransferase”, preferably being encoded by a gene comprising the nucleic acid sequence SEQ ID NO. 55978, preferably the coding region thereof, conferred the production of or the increase in proline compared with the wild type control.

[11199] The nucleic acid sequence of Slr0597 from Synechocystis sp., e.g. as shown in the respective line in column 5 of Table I, application no. 2, has been published in Nakamura et al., Nucleic Acids Res. 28(1), 72 (2000). And the activity of the gene product thereof is the activity of bifunctional purine biosynthesis protein.

[11200] Accordingly, in one embodiment, the process of the present invention for producing glutamate in a non-human organism, like a microorganism or a plant or a part thereof, comprises increasing or generating the activity of a gene product with the activity of a gene product conferring the activity of “bifunctional purine biosynthesis protein”, especially from Synechocystis sp. or its functional equivalent or its homolog, e.g. the increase of
[11201] (a) a gene product of a gene comprising the nucleic acid molecule as shown in the respective line in column 5 of Table I, application no. 2, preferably the coding region thereof, or a homolog or a fragment thereof, and being depicted in the same respective line as said Slr0597, or a functional equivalent or a homolog thereof as shown in column 8 of Table I, application no. 2, preferably the coding region thereof, particularly a homolog or functional equivalent as shown in column 8 of Table I B, application no. 2, and being depicted in the same respective line as said Slr0597, and preferably the activity is increased plastidic, or
[11202] (b) a polypeptide comprising a polypeptide, a consensus sequence or at least a polypeptide motif as shown in the respective line in column 5 of Table II or in column 8 of Table IV, application no. 2, respectively, and being depicted in the same respective line as said Slr0597, or a functional equivalent or a homolog thereof as depicted in column 8 of Table II, application no. 2, preferably a homolog or functional equivalent as depicted in column 8 of Table II B, application no. 2, and being depicted in the same respective line as said Slr0597, and preferably the activity is increased plastidic.

[11203] Accordingly, in one embodiment, the molecule which activity is to be increased in the process of the invention is the gene product with an activity as a “bifunctional purine biosynthesis protein”, preferably it is the molecule of section (a) or (b) of this paragraph.

[11204] In particular, it was observed that in plants, especially in Arabidopsis thaliana, increasing or generating the activity of a gene product plastidic with the activity of a “bifunctional purine biosynthesis protein”, preferably being encoded by a gene comprising the nucleic acid sequence SEQ ID NO. 56153, preferably the coding region thereof, conferred the production of or the increase in glutamate compared with the wild type control.

[11205] The nucleic acid sequence of Slr0600 from Synechocystis sp., e.g. as shown in the respective line in column 5 of Table I, application no. 2, has been published in Nakamura et al., Nucleic Acids Res. 28(1), 72 (2000). And the activity of the gene product thereof is the activity of slr0600-protein.

[11206] Accordingly, in one embodiment, the process of the present invention for producing proline in a non-human organism, like a microorganism or a plant or a part thereof, comprises increasing or generating the activity of a gene product with the activity of a gene product conferring the activity of “s1r0600-protein”, especially from Synechocystis sp. or its functional equivalent or its homolog, e.g. the increase of
[11207] (a) a gene product of a gene comprising the nucleic acid molecule as shown in the respective line in column 5 of Table I, application no. 2, preferably the coding region thereof, or a homolog or a fragment thereof, and being depicted in the same respective line as said Slr0600, or a functional equivalent or a homolog thereof as shown in column 8 of Table I, application no. 2, preferably the coding region thereof, particularly a homolog or functional equivalent as shown in column 8 of Table I B, application no. 2, and being depicted in the same respective line as said Slr0600, and preferably the activity is increased non-targeted, or
[11208] (b) a polypeptide comprising a polypeptide, a consensus sequence or at least a polypeptide motif as shown in the respective line in column 5 of Table II or in column 8 of Table IV, application no. 2, respectively, and being depicted in the same respective line as said Slr0600, or a functional equivalent or a homolog thereof as depicted in column 8 of Table II, application no. 2, preferably a homolog or functional equivalent as depicted in column 8 of Table II B, application no. 2, and being depicted in the same respective line as said Slr0600, and preferably the activity is increased non-targeted.

[11209] Accordingly, in one embodiment, the molecule which activity is to be increased in the process of the invention is the gene product with an activity as a “slr0600-protein”, preferably it is the molecule of section (a) or (b) of this paragraph.

[11210] In particular, it was observed that in plants, especially in Arabidopsis thaliana, increasing or generating the activity of a gene product non-targeted with the activity of a “slr0600-protein”, preferably being encoded by a gene comprising the nucleic acid sequence SEQ ID NO. 56514, preferably the coding region thereof, conferred the production of or the increase in proline compared with the wild type control.

[11211] The nucleic acid sequence of Slr0661 from Synechocystis sp., e.g. as shown in the respective line in column 5 of Table I, application no. 2, has been published in Nakamura et al., Nucleic Acids Res. 28(1), 72 (2000). And the activity of the gene product thereof is the activity of pyrroline carboxylate reductase.

[11212] Accordingly, in one embodiment, the process of the present invention for producing proline in a non-human organism, like a microorganism or a plant or a part thereof, comprises increasing or generating the activity of a gene product with the activity of a gene product conferring the activity of “pyrroline carboxylate reductase”, especially from Synechocystis sp. or its functional equivalent or its homolog, e.g. the increase of
[11213] (a) a gene product of a gene comprising the nucleic acid molecule as shown in the respective line in column 5 of Table I, application no. 2, preferably the coding region thereof, or a homolog or a fragment thereof, and being depicted in the same respective line as said Slr0661, or a functional equivalent or a homolog thereof as shown in column 8 of Table I, application no. 2, preferably the coding region thereof, particularly a homolog or functional equivalent as shown in column 8 of Table I B, application no. 2, and being depicted in the same respective line as said Slr0661, and preferably the activity is increased mitochondrial, or
[11214] (b) a polypeptide comprising a polypeptide, a consensus sequence or at least a polypeptide motif as shown in the respective line in column 5 of Table II or in column 8 of Table IV, application no. 2, respectively, and being depicted in the same respective line as said Slr0661, or a functional equivalent or a homolog thereof as depicted in column 8 of Table II, application no. 2, preferably a homolog or functional equivalent as depicted in column 8 of Table II B, application no. 2, and being depicted in the same respective line as said Slr0661, and preferably the activity is increased mitochondrial.

[11215] Accordingly, in one embodiment, the molecule which activity is to be increased in the process of the invention is the gene product with an activity as a “pyrroline carboxylate reductase”, preferably it is the molecule of section (a) or (b) of this paragraph.

[11216] In particular, it was observed that in plants, especially in Arabidopsis thaliana, increasing or generating the activity of a gene product mitochondrial with the activity of a “pyrroline carboxylate reductase”, preferably being encoded by a gene comprising the nucleic acid sequence SEQ ID NO. 56576, preferably the coding region thereof, conferred the production of or the increase in proline compared with the wild type control.

[11217] The nucleic acid sequence of Slr0710 from Synechocystis sp., e.g. as shown in the respective line in column 5 of Table I, application no. 2, has been published in Nakamura et al., Nucleic Acids Res. 28(1), 72 (2000). And the activity of the gene product thereof is the activity of Glu/Leu/Phe/Val dehydrogenase.

[11218] Accordingly, in one embodiment, the process of the present invention for producing arginine in a non-human organism, like a microorganism or a plant or a part thereof, comprises increasing or generating the activity of a gene product with the activity of a gene product conferring the activity of “Glu/Leu/PheNal dehydrogenase”, especially from Synechocystis sp. or its functional equivalent or its homolog, e.g. the increase of
[11219] (a) a gene product of a gene comprising the nucleic acid molecule as shown in the respective line in column 5 of Table I, application no. 2, preferably the coding region thereof, or a homolog or a fragment thereof, and being depicted in the same respective line as said Slr0710, or a functional equivalent or a homolog thereof as shown in column 8 of Table I, application no. 2, preferably the coding region thereof, particularly a homolog or functional equivalent as shown in column 8 of Table I B, application no. 2, and being depicted in the same respective line as said Slr0710, and preferably the activity is increased mitochondrial, or
[11220] (b) a polypeptide comprising a polypeptide, a consensus sequence or at least a polypeptide motif as shown in the respective line in column 5 of Table II or in column 8 of Table IV, application no. 2, respectively, and being depicted in the same respective line as said Slr0710, or a functional equivalent or a homolog thereof as depicted in column 8 of Table II, application no. 2, preferably a homolog or functional equivalent as depicted in column 8 of Table II B, application no. 2, and being depicted in the same respective line as said Slr0710, and preferably the activity is increased mitochondrial.

[11221] Accordingly, in one embodiment, the molecule which activity is to be increased in the process of the invention is the gene product with an activity as a “Glu/Leu/PheNal dehydrogenase”, preferably it is the molecule of section (a) or (b) of this paragraph.

[11222] In particular, it was observed that in plants, especially in Arabidopsis thaliana, increasing or generating the activity of a gene product mitochondrial with the activity of a “Glu/Leu/Phe/Val dehydrogenase”, preferably being encoded by a gene comprising the nucleic acid sequence SEQ ID NO. 56894, preferably the coding region thereof, conferred the production of or the increase in arginine compared with the wild type control.

[11223] The nucleic acid sequence of Slr0739 from Synechocystis sp., e.g. as shown in the respective line in column 5 of Table I, application no. 2, has been published in Nakamura et al., Nucleic Acids Res. 28(1), 72 (2000). And the activity of the gene product thereof is the activity of geranylgeranyl pyrophosphate synthase.

[11224] Accordingly, in one embodiment, the process of the present invention for producing arginine in a non-human organism, like a microorganism or a plant or a part thereof, comprises increasing or generating the activity of a gene product with the activity of a gene product conferring the activity of “geranylgeranyl pyrophosphate synthase”, especially from Synechocystis sp. or its functional equivalent or its homolog, e.g. the increase of
[11225] (a) a gene product of a gene comprising the nucleic acid molecule as shown in the respective line in column 5 of Table I, application no. 2, preferably the coding region thereof, or a homolog or a fragment thereof, and being depicted in the same respective line as said Slr0739, or a functional equivalent or a homolog thereof as shown in column 8 of Table I, application no. 2, preferably the coding region thereof, particularly a homolog or functional equivalent as shown in column 8 of Table I B, application no. 2, and being depicted in the same respective line as said Slr0739, and preferably the activity is increased plastidic, or
[11226] (b) a polypeptide comprising a polypeptide, a consensus sequence or at least a polypeptide motif as shown in the respective line in column 5 of Table II or in column 8 of Table IV, application no. 2, respectively, and being depicted in the same respective line as said Slr0739, or a functional equivalent or a homolog thereof as depicted in column 8 of Table II, application no. 2, preferably a homolog or functional equivalent as depicted in column 8 of Table II B, application no. 2, and being depicted in the same respective line as said Slr0739, and preferably the activity is increased plastidic.

[11227] Accordingly, in one embodiment, the molecule which activity is to be increased in the process of the invention is the gene product with an activity as a “geranylgeranyl pyrophosphate synthase”, preferably it is the molecule of section (a) or (b) of this paragraph.

[11228] In particular, it was observed that in plants, especially in Arabidopsis thaliana, increasing or generating the activity of a gene product plastidic with the activity of a “geranylgeranyl pyrophosphate synthase”, preferably being encoded by a gene comprising the nucleic acid sequence SEQ ID NO. 57235, preferably the coding region thereof, conferred the production of or the increase in arginine compared with the wild type control.

[11229] The nucleic acid sequence of Slr0739 from Synechocystis sp., e.g. as shown in the respective line in column 5 of Table I, application no. 2, has been published in Nakamura et al., Nucleic Acids Res. 28(1), 72 (2000). And the activity of the gene product thereof is the activity of geranylgeranyl pyrophosphate synthase.

[11230] Accordingly, in one embodiment, the process of the present invention for producing glutamine in a non-human organism, like a microorganism or a plant or a part thereof, comprises increasing or generating the activity of a gene product with the activity of a gene product conferring the activity of “geranylgeranyl pyrophosphate synthase”, especially from Synechocystis sp. or its functional equivalent or its homolog, e.g. the increase of
[11231] (a) a gene product of a gene comprising the nucleic acid molecule as shown in the respective line in column 5 of Table I, application no. 2, preferably the coding region thereof, or a homolog or a fragment thereof, and being depicted in the same respective line as said Slr0739, or a functional equivalent or a homolog thereof as shown in column 8 of Table I, application no. 2, preferably the coding region thereof, particularly a homolog or functional equivalent as shown in column 8 of Table I B, application no. 2, and being depicted in the same respective line as said Slr0739, and preferably the activity is increased plastidic, or
[11232] (b) a polypeptide comprising a polypeptide, a consensus sequence or at least a polypeptide motif as shown in the respective line in column 5 of Table II or in column 8 of Table IV, application no. 2, respectively, and being depicted in the same respective line as said Slr0739, or a functional equivalent or a homolog thereof as depicted in column 8 of Table II, application no. 2, preferably a homolog or functional equivalent as depicted in column 8 of Table II B, application no. 2, and being depicted in the same respective line as said Slr0739, and preferably the activity is increased plastidic.

[11233] Accordingly, in one embodiment, the molecule which activity is to be increased in the process of the invention is the gene product with an activity as a “geranylgeranyl pyrophosphate synthase”, preferably it is the molecule of section (a) or (b) of this paragraph.

[11234] In particular, it was observed that in plants, especially in Arabidopsis thaliana, increasing or generating the activity of a gene product plastidic with the activity of a “geranylgeranyl pyrophosphate synthase”, preferably being encoded by a gene comprising the nucleic acid sequence SEQ ID NO. 57235, preferably the coding region thereof, conferred the production of or the increase in glutamine compared with the wild type control.

[11235] The nucleic acid sequence of Slr0739 from Synechocystis sp., e.g. as shown in the respective line in column 5 of Table I, application no. 2, has been published in Nakamura et al., Nucleic Acids Res. 28(1), 72 (2000). And the activity of the gene product thereof is the activity of geranylgeranyl pyrophosphate synthase.

[11236] Accordingly, in one embodiment, the process of the present invention for producing proline in a non-human organism, like a microorganism or a plant or a part thereof, comprises increasing or generating the activity of a gene product with the activity of a gene product conferring the activity of “geranylgeranyl pyrophosphate synthase”, especially from Synechocystis sp. or its functional equivalent or its homolog, e.g. the increase of
[11237] (a) a gene product of a gene comprising the nucleic acid molecule as shown in the respective line in column 5 of Table I, application no. 2, preferably the coding region thereof, or a homolog or a fragment thereof, and being depicted in the same respective line as said Slr0739, or a functional equivalent or a homolog thereof as shown in column 8 of Table I, application no. 2, preferably the coding region thereof, particularly a homolog or functional equivalent as shown in column 8 of Table I B, application no. 2, and being depicted in the same respective line as said Slr0739, and preferably the activity is increased plastidic, or
[11238] (b) a polypeptide comprising a polypeptide, a consensus sequence or at least a polypeptide motif as shown in the respective line in column 5 of Table II or in column 8 of Table IV, application no. 2, respectively, and being depicted in the same respective line as said Slr0739, or a functional equivalent or a homolog thereof as depicted in column 8 of Table II, application no. 2, preferably a homolog or functional equivalent as depicted in column 8 of Table II B, application no. 2, and being depicted in the same respective line as said Slr0739, and preferably the activity is increased plastidic.

[11239] Accordingly, in one embodiment, the molecule which activity is to be increased in the process of the invention is the gene product with an activity as a “geranylgeranyl pyrophosphate synthase”, preferably it is the molecule of section (a) or (b) of this paragraph.

[11240] In particular, it was observed that in plants, especially in Arabidopsis thaliana, increasing or generating the activity of a gene product plastidic with the activity of a “geranylgeranyl pyrophosphate synthase”, preferably being encoded by a gene comprising the nucleic acid sequence SEQ ID NO. 57235, preferably the coding region thereof, conferred the production of or the increase in proline compared with the wild type control.

[11241] The nucleic acid sequence of Slr0756 from Synechocystis sp., e.g. as shown in the respective line in column 5 of Table I, application no. 2, has been published in Nakamura et al., Nucleic Acids Res. 28(1), 72 (2000). And the activity of the gene product thereof is the activity of circadian clock protein.

[11242] Accordingly, in one embodiment, the process of the present invention for producing arginine in a non-human organism, like a microorganism or a plant or a part thereof, comprises increasing or generating the activity of a gene product with the activity of a gene product conferring the activity of “circadian clock protein”, especially from Synechocystis sp. or its functional equivalent or its homolog, e.g. the increase of
[11243] (a) a gene product of a gene comprising the nucleic acid molecule as shown in the respective line in column 5 of Table I, application no. 2, preferably the coding region thereof, or a homolog or a fragment thereof, and being depicted in the same respective line as said Slr0756, or a functional equivalent or a homolog thereof as shown in column 8 of Table I, application no. 2, preferably the coding region thereof, particularly a homolog or functional equivalent as shown in column 8 of Table I B, application no. 2, and being depicted in the same respective line as said Slr0756, and preferably the activity is increased non-targeted, or
[11244] (b) a polypeptide comprising a polypeptide, a consensus sequence or at least a polypeptide motif as shown in the respective line in column 5 of Table II or in column 8 of Table IV, application no. 2, respectively, and being depicted in the same respective line as said Slr0756, or a functional equivalent or a homolog thereof as depicted in column 8 of Table II, application no. 2, preferably a homolog or functional equivalent as depicted in column 8 of Table II B, application no. 2, and being depicted in the same respective line as said Slr0756, and preferably the activity is increased non-targeted.

[11245] Accordingly, in one embodiment, the molecule which activity is to be increased in the process of the invention is the gene product with an activity as a “circadian clock protein”, preferably it is the molecule of section (a) or (b) of this paragraph.

[11246] In particular, it was observed that in plants, especially in Arabidopsis thaliana, increasing or generating the activity of a gene product non-targeted with the activity of a “circadian clock protein”, preferably being encoded by a gene comprising the nucleic acid sequence SEQ ID NO. 57663, preferably the coding region thereof, conferred the production of or the increase in arginine compared with the wild type control.

[11247] The nucleic acid sequence of Slr0756 from Synechocystis sp., e.g. as shown in the respective line in column 5 of Table I, application no. 2, has been published in Nakamura et al., Nucleic Acids Res. 28(1), 72 (2000). And the activity of the gene product thereof is the activity of circadian clock protein.

[11248] Accordingly, in one embodiment, the process of the present invention for producing proline in a non-human organism, like a microorganism or a plant or a part thereof, comprises increasing or generating the activity of a gene product with the activity of a gene product conferring the activity of “circadian clock protein”, especially from Synechocystis sp. or its functional equivalent or its homolog, e.g. the increase of
[11249] (a) a gene product of a gene comprising the nucleic acid molecule as shown in the respective line in column 5 of Table I, application no. 2, preferably the coding region thereof, or a homolog or a fragment thereof, and being depicted in the same respective line as said Slr0756, or a functional equivalent or a homolog thereof as shown in column 8 of Table I, application no. 2, preferably the coding region thereof, particularly a homolog or functional equivalent as shown in column 8 of Table I B, application no. 2, and being depicted in the same respective line as said Slr0756, and preferably the activity is increased non-targeted, or
[11250] (b) a polypeptide comprising a polypeptide, a consensus sequence or at least a polypeptide motif as shown in the respective line in column 5 of Table II or in column 8 of Table IV, application no. 2, respectively, and being depicted in the same respective line as said Slr0756, or a functional equivalent or a homolog thereof as depicted in column 8 of Table II, application no. 2, preferably a homolog or functional equivalent as depicted in column 8 of Table II B, application no. 2, and being depicted in the same respective line as said Slr0756, and preferably the activity is increased non-targeted.

[11251] Accordingly, in one embodiment, the molecule which activity is to be increased in the process of the invention is the gene product with an activity as a “circadian clock protein”, preferably it is the molecule of section (a) or (b) of this paragraph.

[11252] In particular, it was observed that in plants, especially in Arabidopsis thaliana, increasing or generating the activity of a gene product non-targeted with the activity of a “circadian clock protein”, preferably being encoded by a gene comprising the nucleic acid sequence SEQ ID NO. 57663, preferably the coding region thereof, conferred the production of or the increase in proline compared with the wild type control.

[11253] The nucleic acid sequence of Slr0782 from Synechocystis sp., e.g. as shown in the respective line in column 5 of Table I, application no. 2, has been published in Nakamura et al., Nucleic Acids Res. 28(1), 72 (2000). And the activity of the gene product thereof is the activity of amine oxidase.

[11254] Accordingly, in one embodiment, the process of the present invention for producing proline in a non-human organism, like a microorganism or a plant or a part thereof, comprises increasing or generating the activity of a gene product with the activity of a gene product conferring the activity of “amine oxidase”, especially from Synechocystis sp. or its functional equivalent or its homolog, e.g. the increase of
[11255] (a) a gene product of a gene comprising the nucleic acid molecule as shown in the respective line in column 5 of Table I, application no. 2, preferably the coding region thereof, or a homolog or a fragment thereof, and being depicted in the same respective line as said Slr0782, or a functional equivalent or a homolog thereof as shown in column 8 of Table I, application no. 2, preferably the coding region thereof, particularly a homolog or functional equivalent as shown in column 8 of Table I B, application no. 2, and being depicted in the same respective line as said Slr0782, and preferably the activity is increased mitochondrial, or
[11256] (b) a polypeptide comprising a polypeptide, a consensus sequence or at least a polypeptide motif as shown in the respective line in column 5 of Table II or in column 8 of Table IV, application no. 2, respectively, and being depicted in the same respective line as said Slr0782, or a functional equivalent or a homolog thereof as depicted in column 8 of Table II, application no. 2, preferably a homolog or functional equivalent as depicted in column 8 of Table II B, application no. 2, and being depicted in the same respective line as said Slr0782, and preferably the activity is increased mitochondrial.

[11257] Accordingly, in one embodiment, the molecule which activity is to be increased in the process of the invention is the gene product with an activity as a “amine oxidase”, preferably it is the molecule of section (a) or (b) of this paragraph.

[11258] In particular, it was observed that in plants, especially in Arabidopsis thaliana, increasing or generating the activity of a gene product mitochondrial with the activity of a “amine oxidase”, preferably being encoded by a gene comprising the nucleic acid sequence SEQ ID NO. 57679, preferably the coding region thereof, conferred the production of or the increase in proline compared with the wild type control.

[11259] The nucleic acid sequence of Slr1096 from Synechocystis sp., e.g. as shown in the respective line in column 5 of Table I, application no. 2, has been published in Nakamura et al., Nucleic Acids Res. 28(1), 72 (2000). And the activity of the gene product thereof is the activity of dihydrolipoamide dehydrogenase.

[11260] Accordingly, in one embodiment, the process of the present invention for producing glutamate in a non-human organism, like a microorganism or a plant or a part thereof, comprises increasing or generating the activity of a gene product with the activity of a gene product conferring the activity of “dihydrolipoamide dehydrogenase”, especially from Synechocystis sp. or its functional equivalent or its homolog, e.g. the increase of
[11261] (a) a gene product of a gene comprising the nucleic acid molecule as shown in the respective line in column 5 of Table I, application no. 2, preferably the coding region thereof, or a homolog or a fragment thereof, and being depicted in the same respective line as said Slr1096, or a functional equivalent or a homolog thereof as shown in column 8 of Table I, application no. 2, preferably the coding region thereof, particularly a homolog or functional equivalent as shown in column 8 of Table I B, application no. 2, and being depicted in the same respective line as said Slr1096, and preferably the activity is increased non-targeted, or
[11262] (b) a polypeptide comprising a polypeptide, a consensus sequence or at least a polypeptide motif as shown in the respective line in column 5 of Table II or in column 8 of Table IV, application no. 2, respectively, and being depicted in the same respective line as said Slr1096, or a functional equivalent or a homolog thereof as depicted in column 8 of Table II, application no. 2, preferably a homolog or functional equivalent as depicted in column 8 of Table II B, application no. 2, and being depicted in the same respective line as said Slr1096, and preferably the activity is increased non-targeted.

[11263] Accordingly, in one embodiment, the molecule which activity is to be increased in the process of the invention is the gene product with an activity as a “dihydrolipoamide dehydrogenase”, preferably it is the molecule of section (a) or (b) of this paragraph.

[11264] In particular, it was observed that in plants, especially in Arabidopsis thaliana, increasing or generating the activity of a gene product non-targeted with the activity of a “dihydrolipoamide dehydrogenase”, preferably being encoded by a gene comprising the nucleic acid sequence SEQ ID NO. 57734, preferably the coding region thereof, conferred the production of or the increase in glutamate compared with the wild type control.

[11265] The nucleic acid sequence of Slr1269 from Synechocystis sp., e.g. as shown in the respective line in column 5 of Table I, application no. 2, has been published in Nakamura et al., Nucleic Acids Res. 28(1), 72 (2000). And the activity of the gene product thereof is the activity of gamma-glutamyltranspeptidase.

[11266] Accordingly, in one embodiment, the process of the present invention for producing arginine in a non-human organism, like a microorganism or a plant or a part thereof, comprises increasing or generating the activity of a gene product with the activity of a gene product conferring the activity of “gamma-glutamyltranspeptidase”, especially from Synechocystis sp. or its functional equivalent or its homolog, e.g. the increase of
[11267] (a) a gene product of a gene comprising the nucleic acid molecule as shown in the respective line in column 5 of Table I, application no. 2, preferably the coding region thereof, or a homolog or a fragment thereof, and being depicted in the same respective line as said Slr1269, or a functional equivalent or a homolog thereof as shown in column 8 of Table I, application no. 2, preferably the coding region thereof, particularly a homolog or functional equivalent as shown in column 8 of Table I B, application no. 2, and being depicted in the same respective line as said Slr1269, and preferably the activity is increased non-targeted, or
[11268] (b) a polypeptide comprising a polypeptide, a consensus sequence or at least a polypeptide motif as shown in the respective line in column 5 of Table II or in column 8 of Table IV, application no. 2, respectively, and being depicted in the same respective line as said Slr1269, or a functional equivalent or a homolog thereof as depicted in column 8 of Table II, application no. 2, preferably a homolog or functional equivalent as depicted in column 8 of Table II B, application no. 2, and being depicted in the same respective line as said Slr1269, and preferably the activity is increased non-targeted.

[11269] Accordingly, in one embodiment, the molecule which activity is to be increased in the process of the invention is the gene product with an activity as a “gamma-glutamyltranspeptidase”, preferably it is the molecule of section (a) or (b) of this paragraph.

[11270] In particular, it was observed that in plants, especially in Arabidopsis thaliana, increasing or generating the activity of a gene product non-targeted with the activity of a “gammaglutamyltranspeptidase”, preferably being encoded by a gene comprising the nucleic acid sequence SEQ ID NO. 58058, preferably the coding region thereof, conferred the production of or the increase in arginine compared with the wild type control.

[11271] The nucleic acid sequence of Slr1269 from Synechocystis sp., e.g. as shown in the respective line in column 5 of Table I, application no. 2, has been published in Nakamura et al., Nucleic Acids Res. 28(1), 72 (2000). And the activity of the gene product thereof is the activity of gamma-glutamyltranspeptidase.

[11272] Accordingly, in one embodiment, the process of the present invention for producing glutamate in a non-human organism, like a microorganism or a plant or a part thereof, comprises increasing or generating the activity of a gene product with the activity of a gene product conferring the activity of “gamma-glutamyltranspeptidase”, especially from Synechocystis sp. or its functional equivalent or its homolog, e.g. the increase of
[11273] (a) a gene product of a gene comprising the nucleic acid molecule as shown in the respective line in column 5 of Table I, application no. 2, preferably the coding region thereof, or a homolog or a fragment thereof, and being depicted in the same respective line as said Slr1269, or a functional equivalent or a homolog thereof as shown in column 8 of Table I, application no. 2, preferably the coding region thereof, particularly a homolog or functional equivalent as shown in column 8 of Table I B, application no. 2, and being depicted in the same respective line as said Slr1269, and preferably the activity is increased non-targeted, or
[11274] (b) a polypeptide comprising a polypeptide, a consensus sequence or at least a polypeptide motif as shown in the respective line in column 5 of Table II or in column 8 of Table IV, application no. 2, respectively, and being depicted in the same respective line as said Slr1269, or a functional equivalent or a homolog thereof as depicted in column 8 of Table II, application no. 2, preferably a homolog or functional equivalent as depicted in column 8 of Table II B, application no. 2, and being depicted in the same respective line as said Slr1269, and preferably the activity is increased non-targeted.

[11275] Accordingly, in one embodiment, the molecule which activity is to be increased in the process of the invention is the gene product with an activity as a “gamma-glutamyltranspeptidase”, preferably it is the molecule of section (a) or (b) of this paragraph.

[11276] In particular, it was observed that in plants, especially in Arabidopsis thaliana, increasing or generating the activity of a gene product non-targeted with the activity of a “gammaglutamyltranspeptidase”, preferably being encoded by a gene comprising the nucleic acid sequence SEQ ID NO. 58058, preferably the coding region thereof, conferred the production of or the increase in glutamate compared with the wild type control.

[11277] The nucleic acid sequence of Slr1312 from Synechocystis sp., e.g. as shown in the respective line in column 5 of Table I, application no. 2, has been published in Nakamura et al., Nucleic Acids Res. 28(1), 72 (2000). And the activity of the gene product thereof is the activity of arginine decarboxylase.

[11278] Accordingly, in one embodiment, the process of the present invention for producing arginine in a non-human organism, like a microorganism or a plant or a part thereof, comprises increasing or generating the activity of a gene product with the activity of a gene product conferring the activity of “arginine decarboxylase”, especially from Synechocystis sp. or its functional equivalent or its homolog, e.g. the increase of
[11279] (a) a gene product of a gene comprising the nucleic acid molecule as shown in the respective line in column 5 of Table I, application no. 2, preferably the coding region thereof, or a homolog or a fragment thereof, and being depicted in the same respective line as said Slr1312, or a functional equivalent or a homolog thereof as shown in column 8 of Table I, application no. 2, preferably the coding region thereof, particularly a homolog or functional equivalent as shown in column 8 of Table I B, application no. 2, and being depicted in the same respective line as said Slr1312, and preferably the activity is increased non-targeted, or
[11280] (b) a polypeptide comprising a polypeptide, a consensus sequence or at least a polypeptide motif as shown in the respective line in column 5 of Table II or in column 8 of Table IV, application no. 2, respectively, and being depicted in the same respective line as said Slr1312, or a functional equivalent or a homolog thereof as depicted in column 8 of Table II, application no. 2, preferably a homolog or functional equivalent as depicted in column 8 of Table II B, application no. 2, and being depicted in the same respective line as said Slr1312, and preferably the activity is increased non-targeted.

[11281] Accordingly, in one embodiment, the molecule which activity is to be increased in the process of the invention is the gene product with an activity as a “arginine decarboxylase”, preferably it is the molecule of section (a) or (b) of this paragraph.

[11282] In particular, it was observed that in plants, especially in Arabidopsis thaliana, increasing or generating the activity of a gene product non-targeted with the activity of a “arginine decarboxylase”, preferably being encoded by a gene comprising the nucleic acid sequence SEQ ID NO. 58324, preferably the coding region thereof, conferred the production of or the increase in arginine compared with the wild type control.

[11283] The nucleic acid sequence of Slr1369 from Synechocystis sp., e.g. as shown in the respective line in column 5 of Table I, application no. 2, has been published in Nakamura et al., Nucleic Acids Res. 28(1), 72 (2000). And the activity of the gene product thereof is the activity of CDP-diglyceride synthetase.

[11284] Accordingly, in one embodiment, the process of the present invention for producing glutamate in a non-human organism, like a microorganism or a plant or a part thereof, comprises increasing or generating the activity of a gene product with the activity of a gene product conferring the activity of “CDP-diglyceride synthetase”, especially from Synechocystis sp. or its functional equivalent or its homolog, e.g. the increase of
[11285] (a) a gene product of a gene comprising the nucleic acid molecule as shown in the respective line in column 5 of Table I, application no. 2, preferably the coding region thereof, or a homolog or a fragment thereof, and being depicted in the same respective line as said Slr1369, or a functional equivalent or a homolog thereof as shown in column 8 of Table I, application no. 2, preferably the coding region thereof, particularly a homolog or functional equivalent as shown in column 8 of Table I B, application no. 2, and being depicted in the same respective line as said Slr1369, and preferably the activity is increased mitochondrial, or
[11286] (b) a polypeptide comprising a polypeptide, a consensus sequence or at least a polypeptide motif as shown in the respective line in column 5 of Table II or in column 8 of Table IV, application no. 2, respectively, and being depicted in the same respective line as said Slr1369, or a functional equivalent or a homolog thereof as depicted in column 8 of Table II, application no. 2, preferably a homolog or functional equivalent as depicted in column 8 of Table II B, application no. 2, and being depicted in the same respective line as said Slr1369, and preferably the activity is increased mitochondrial.

[11287] Accordingly, in one embodiment, the molecule which activity is to be increased in the process of the invention is the gene product with an activity as a “CDP-diglyceride synthetase”, preferably it is the molecule of section (a) or (b) of this paragraph.

[11288] In particular, it was observed that in plants, especially in Arabidopsis thaliana, increasing or generating the activity of a gene product mitochondrial with the activity of a “CDP-diglyceride synthetase”, preferably being encoded by a gene comprising the nucleic acid sequence SEQ ID NO. 58472, preferably the coding region thereof, conferred the production of or the increase in glutamate compared with the wild type control.

[11289] The nucleic acid sequence of Slr1420 from Synechocystis sp., e.g. as shown in the respective line in column 5 of Table I, application no. 2, has been published in Nakamura et al., Nucleic Acids Res. 28(1), 72 (2000). And the activity of the gene product thereof is the activity of carbohydrate kinase.

[11290] Accordingly, in one embodiment, the process of the present invention for producing glutamate in a non-human organism, like a microorganism or a plant or a part thereof, comprises increasing or generating the activity of a gene product with the activity of a gene product conferring the activity of “carbohydrate kinase”, especially from Synechocystis sp. or its functional equivalent or its homolog, e.g. the increase of
[11291] (a) a gene product of a gene comprising the nucleic acid molecule as shown in the respective line in column 5 of Table I, application no. 2, preferably the coding region thereof, or a homolog or a fragment thereof, and being depicted in the same respective line as said Slr1420, or a functional equivalent or a homolog thereof as shown in column 8 of Table I, application no. 2, preferably the coding region thereof, particularly a homolog or functional equivalent as shown in column 8 of Table I B, application no. 2, and being depicted in the same respective line as said Slr1420, and preferably the activity is increased non-targeted, or
[11292] (b) a polypeptide comprising a polypeptide, a consensus sequence or at least a polypeptide motif as shown in the respective line in column 5 of Table II or in column 8 of Table IV, application no. 2, respectively, and being depicted in the same respective line as said Slr1420, or a functional equivalent or a homolog thereof as depicted in column 8 of Table II, application no. 2, preferably a homolog or functional equivalent as depicted in column 8 of Table II B, application no. 2, and being depicted in the same respective line as said Slr1420, and preferably the activity is increased non-targeted.

[11293] Accordingly, in one embodiment, the molecule which activity is to be increased in the process of the invention is the gene product with an activity as a “carbohydrate kinase”, preferably it is the molecule of section (a) or (b) of this paragraph.

[11294] In particular, it was observed that in plants, especially in Arabidopsis thaliana, increasing or generating the activity of a gene product non-targeted with the activity of a “carbohydrate kinase”, preferably being encoded by a gene comprising the nucleic acid sequence SEQ ID NO. 58590, preferably the coding region thereof, conferred the production of or the increase in glutamate compared with the wild type control.

[11295] The nucleic acid sequence of Slr1492 from Synechocystis sp., e.g. as shown in the respective line in column 5 of Table I, application no. 2, has been published in Nakamura et al., Nucleic Acids Res. 28(1), 72 (2000). And the activity of the gene product thereof is the activity of iron(III) dicitrate-binding protein.

[11296] Accordingly, in one embodiment, the process of the present invention for producing glutamine in a non-human organism, like a microorganism or a plant or a part thereof, comprises increasing or generating the activity of a gene product with the activity of a gene product conferring the activity of “iron(III) dicitrate-binding protein”, especially from Synechocystis sp. or its functional equivalent or its homolog, e.g. the increase of
[11297] (a) a gene product of a gene comprising the nucleic acid molecule as shown in the respective line in column 5 of Table I, application no. 2, preferably the coding region thereof, or a homolog or a fragment thereof, and being depicted in the same respective line as said Slr1492, or a functional equivalent or a homolog thereof as shown in column 8 of Table I, application no. 2, preferably the coding region thereof, particularly a homolog or functional equivalent as shown in column 8 of Table I B, application no. 2, and being depicted in the same respective line as said Slr1492, and preferably the activity is increased mitochondrial, or
[11298] (b) a polypeptide comprising a polypeptide, a consensus sequence or at least a polypeptide motif as shown in the respective line in column 5 of Table II or in column 8 of Table IV, application no. 2, respectively, and being depicted in the same respective line as said Slr1492, or a functional equivalent or a homolog thereof as depicted in column 8 of Table II, application no. 2, preferably a homolog or functional equivalent as depicted in column 8 of Table II B, application no. 2, and being depicted in the same respective line as said Slr1492, and preferably the activity is increased mitochondrial.

[11299] Accordingly, in one embodiment, the molecule which activity is to be increased in the process of the invention is the gene product with an activity as a “iron(III) dicitrate-binding protein”, preferably it is the molecule of section (a) or (b) of this paragraph.

[11300] In particular, it was observed that in plants, especially in Arabidopsis thaliana, increasing or generating the activity of a gene product mitochondrial with the activity of a “iron(III) dicitratebinding protein”, preferably being encoded by a gene comprising the nucleic acid sequence SEQ ID NO. 58668, preferably the coding region thereof, conferred the production of or the increase in glutamine compared with the wild type control.

[11301] The nucleic acid sequence of Slr1655 from Synechocystis sp., e.g. as shown in the respective line in column 5 of Table I, application no. 2, has been published in Nakamura et al., Nucleic Acids Res. 28(1), 72 (2000). And the activity of the gene product thereof is the activity of Photosystem I reaction center subunit XI.

[11302] Accordingly, in one embodiment, the process of the present invention for producing proline in a non-human organism, like a microorganism or a plant or a part thereof, comprises increasing or generating the activity of a gene product with the activity of a gene product conferring the activity of “Photosystem I reaction center subunit XI”, especially from Synechocystis sp. or its functional equivalent or its homolog, e.g. the increase of
[11303] (a) a gene product of a gene comprising the nucleic acid molecule as shown in the respective line in column 5 of Table I, application no. 2, preferably the coding region thereof, or a homolog or a fragment thereof, and being depicted in the same respective line as said Slr1655, or a functional equivalent or a homolog thereof as shown in column 8 of Table I, application no. 2, preferably the coding region thereof, particularly a homolog or functional equivalent as shown in column 8 of Table I B, application no. 2, and being depicted in the same respective line as said Slr1655, and preferably the activity is increased mitochondrial, or
[11304] (b) a polypeptide comprising a polypeptide, a consensus sequence or at least a polypeptide motif as shown in the respective line in column 5 of Table II or in column 8 of Table IV, application no. 2, respectively, and being depicted in the same respective line as said Slr1655, or a functional equivalent or a homolog thereof as depicted in column 8 of Table II, application no. 2, preferably a homolog or functional equivalent as depicted in column 8 of Table II B, application no. 2, and being depicted in the same respective line as said Slr1655, and preferably the activity is increased mitochondrial.

[11305] Accordingly, in one embodiment, the molecule which activity is to be increased in the process of the invention is the gene product with an activity as a “Photosystem I reaction center subunit XI”, preferably it is the molecule of section (a) or (b) of this paragraph.

[11306] In particular, it was observed that in plants, especially in Arabidopsis thaliana, increasing or generating the activity of a gene product mitochondrial with the activity of a “Photosystem I reaction center subunit XI”, preferably being encoded by a gene comprising the nucleic acid sequence SEQ ID NO. 12070, preferably the coding region thereof, conferred the production of or the increase in proline compared with the wild type control.

[11307] The nucleic acid sequence of Slr1739 from Synechocystis sp., e.g. as shown in the respective line in column 5 of Table I, application no. 2, has been published in Nakamura et al., Nucleic Acids Res. 28(1), 72 (2000). And the activity of the gene product thereof is the activity of photosystem II protein.

[11308] Accordingly, in one embodiment, the process of the present invention for producing arginine in a non-human organism, like a microorganism or a plant or a part thereof, comprises increasing or generating the activity of a gene product with the activity of a gene product conferring the activity of “photosystem II protein”, especially from Synechocystis sp. or its functional equivalent or its homolog, e.g. the increase of
[11309] (a) a gene product of a gene comprising the nucleic acid molecule as shown in the respective line in column 5 of Table I, application no. 2, preferably the coding region thereof, or a homolog or a fragment thereof, and being depicted in the same respective line as said Slr1739, or a functional equivalent or a homolog thereof as shown in column 8 of Table I, application no. 2, preferably the coding region thereof, particularly a homolog or functional equivalent as shown in column 8 of Table I B, application no. 2, and being depicted in the same respective line as said Slr1739, and preferably the activity is increased plastidic, or
[11310] (b) a polypeptide comprising a polypeptide, a consensus sequence or at least a polypeptide motif as shown in the respective line in column 5 of Table II or in column 8 of Table IV, application no. 2, respectively, and being depicted in the same respective line as said Slr1739, or a functional equivalent or a homolog thereof as depicted in column 8 of Table II, application no. 2, preferably a homolog or functional equivalent as depicted in column 8 of Table II B, application no. 2, and being depicted in the same respective line as said Slr1739, and preferably the activity is increased plastidic.

[11311] Accordingly, in one embodiment, the molecule which activity is to be increased in the process of the invention is the gene product with an activity as a “photosystem II protein”, preferably it is the molecule of section (a) or (b) of this paragraph.

[11312] In particular, it was observed that in plants, especially in Arabidopsis thaliana, increasing or generating the activity of a gene product plastidic with the activity of a “photosystem II protein”, preferably being encoded by a gene comprising the nucleic acid sequence SEQ ID NO. 58731, preferably the coding region thereof, conferred the production of or the increase in arginine compared with the wild type control.

[11313] The nucleic acid sequence of Slr1739 from Synechocystis sp., e.g. as shown in the respective line in column 5 of Table I, application no. 2, has been published in Nakamura et al., Nucleic Acids Res. 28(1), 72 (2000). And the activity of the gene product thereof is the activity of photosystem II protein.

[11314] Accordingly, in one embodiment, the process of the present invention for producing glutamine in a non-human organism, like a microorganism or a plant or a part thereof, comprises increasing or generating the activity of a gene product with the activity of a gene product conferring the activity of “photosystem II protein”, especially from Synechocystis sp. or its functional equivalent or its homolog, e.g. the increase of
[11315] (a) a gene product of a gene comprising the nucleic acid molecule as shown in the respective line in column 5 of Table I, application no. 2, preferably the coding region thereof, or a homolog or a fragment thereof, and being depicted in the same respective line as said Slr1739, or a functional equivalent or a homolog thereof as shown in column 8 of Table I, application no. 2, preferably the coding region thereof, particularly a homolog or functional equivalent as shown in column 8 of Table I B, application no. 2, and being depicted in the same respective line as said Slr1739, and preferably the activity is increased plastidic, or
[11316] (b) a polypeptide comprising a polypeptide, a consensus sequence or at least a polypeptide motif as shown in the respective line in column 5 of Table II or in column 8 of Table IV, application no. 2, respectively, and being depicted in the same respective line as said Slr1739, or a functional equivalent or a homolog thereof as depicted in column 8 of Table II, application no. 2, preferably a homolog or functional equivalent as depicted in column 8 of Table II B, application no. 2, and being depicted in the same respective line as said Slr1739, and preferably the activity is increased plastidic.

[11317] Accordingly, in one embodiment, the molecule which activity is to be increased in the process of the invention is the gene product with an activity as a “photosystem II protein”, preferably it is the molecule of section (a) or (b) of this paragraph.

[11318] In particular, it was observed that in plants, especially in Arabidopsis thaliana, increasing or generating the activity of a gene product plastidic with the activity of a “photosystem II protein”, preferably being encoded by a gene comprising the nucleic acid sequence SEQ ID NO. 58731, preferably the coding region thereof, conferred the production of or the increase in glutamine compared with the wild type control.

[11319] The nucleic acid sequence of Slr1742 from Synechocystis sp., e.g. as shown in the respective line in column 5 of Table I, application no. 2, has been published in Nakamura et al., Nucleic Acids Res. 28(1), 72 (2000). And the activity of the gene product thereof is the activity of glutamine amidotransferase.

[11320] Accordingly, in one embodiment, the process of the present invention for producing proline in a non-human organism, like a microorganism or a plant or a part thereof, comprises increasing or generating the activity of a gene product with the activity of a gene product conferring the activity of “glutamine amidotransferase”, especially from Synechocystis sp. or its functional equivalent or its homolog, e.g. the increase of
[11321] (a) a gene product of a gene comprising the nucleic acid molecule as shown in the respective line in column 5 of Table I, application no. 2, preferably the coding region thereof, or a homolog or a fragment thereof, and being depicted in the same respective line as said Slr1742, or a functional equivalent or a homolog thereof as shown in column 8 of Table I, application no. 2, preferably the coding region thereof, particularly a homolog or functional equivalent as shown in column 8 of Table I B, application no. 2, and being depicted in the same respective line as said Slr1742, and preferably the activity is increased mitochondrial, or
[11322] (b) a polypeptide comprising a polypeptide, a consensus sequence or at least a polypeptide motif as shown in the respective line in column 5 of Table II or in column 8 of Table IV, application no. 2, respectively, and being depicted in the same respective line as said Slr1742, or a functional equivalent or a homolog thereof as depicted in column 8 of Table II, application no. 2, preferably a homolog or functional equivalent as depicted in column 8 of Table II B, application no. 2, and being depicted in the same respective line as said Slr1742, and preferably the activity is increased mitochondrial.

[11323] Accordingly, in one embodiment, the molecule which activity is to be increased in the process of the invention is the gene product with an activity as a “glutamine amidotransferase”, preferably it is the molecule of section (a) or (b) of this paragraph.

[11324] In particular, it was observed that in plants, especially in Arabidopsis thaliana, increasing or generating the activity of a gene product mitochondrial with the activity of a “glutamine amidotransferase”, preferably being encoded by a gene comprising the nucleic acid sequence SEQ ID NO. 58751, preferably the coding region thereof, conferred the production of or the increase in proline compared with the wild type control.

[11325] The nucleic acid sequence of Slr1755 from Synechocystis sp., e.g. as shown in the respective line in column 5 of Table I, application no. 2, has been published in Nakamura et al., Nucleic Acids Res. 28(1), 72 (2000). And the activity of the gene product thereof is the activity of glycerol-3-phosphate dehydrogenase.

[11326] Accordingly, in one embodiment, the process of the present invention for producing glutamate in a non-human organism, like a microorganism or a plant or a part thereof, comprises increasing or generating the activity of a gene product with the activity of a gene product conferring the activity of “glycerol-3-phosphate dehydrogenase”, especially from Synechocystis sp. or its functional equivalent or its homolog, e.g. the increase of
[11327] (a) a gene product of a gene comprising the nucleic acid molecule as shown in the respective line in column 5 of Table I, application no. 2, preferably the coding region thereof, or a homolog or a fragment thereof, and being depicted in the same respective line as said Slr1755, or a functional equivalent or a homolog thereof as shown in column 8 of Table I, application no. 2, preferably the coding region thereof, particularly a homolog or functional equivalent as shown in column 8 of Table I B, application no. 2, and being depicted in the same respective line as said Slr1755, and preferably the activity is increased mitochondrial, or
[11328] (b) a polypeptide comprising a polypeptide, a consensus sequence or at least a polypeptide motif as shown in the respective line in column 5 of Table II or in column 8 of Table IV, application no. 2, respectively, and being depicted in the same respective line as said Slr1755, or a functional equivalent or a homolog thereof as depicted in column 8 of Table II, application no. 2, preferably a homolog or functional equivalent as depicted in column 8 of Table II B, application no. 2, and being depicted in the same respective line as said Slr1755, and preferably the activity is increased mitochondrial.

[11329] Accordingly, in one embodiment, the molecule which activity is to be increased in the process of the invention is the gene product with an activity as a “glycerol-3-phosphate dehydrogenase”, preferably it is the molecule of section (a) or (b) of this paragraph.

[11330] In particular, it was observed that in plants, especially in Arabidopsis thaliana, increasing or generating the activity of a gene product mitochondrial with the activity of a “glycerol-3-phosphate dehydrogenase”, preferably being encoded by a gene comprising the nucleic acid sequence SEQ ID NO. 58823, preferably the coding region thereof, conferred the production of or the increase in glutamate compared with the wild type control.

[11331] The nucleic acid sequence of Slr1791 from Synechocystis sp., e.g. as shown in the respective line in column 5 of Table I, application no. 2, has been published in Nakamura et al., Nucleic Acids Res. 28(1), 72 (2000). And the activity of the gene product thereof is the activity of phosphoadenosine phosphosulfate reductase.

[11332] Accordingly, in one embodiment, the process of the present invention for producing proline in a non-human organism, like a microorganism or a plant or a part thereof, comprises increasing or generating the activity of a gene product with the activity of a gene product conferring the activity of “phosphoadenosine phosphosulfate reductase”, especially from Synechocystis sp. or its functional equivalent or its homolog, e.g. the increase of
[11333] (a) a gene product of a gene comprising the nucleic acid molecule as shown in the respective line in column 5 of Table I, application no. 2, preferably the coding region thereof, or a homolog or a fragment thereof, and being depicted in the same respective line as said Slr1791, or a functional equivalent or a homolog thereof as shown in column 8 of Table I, application no. 2, preferably the coding region thereof, particularly a homolog or functional equivalent as shown in column 8 of Table I B, application no. 2, and being depicted in the same respective line as said Slr1791, and preferably the activity is increased plastidic, or
[11334] (b) a polypeptide comprising a polypeptide, a consensus sequence or at least a polypeptide motif as shown in the respective line in column 5 of Table II or in column 8 of Table IV, application no. 2, respectively, and being depicted in the same respective line as said Slr1791, or a functional equivalent or a homolog thereof as depicted in column 8 of Table II, application no. 2, preferably a homolog or functional equivalent as depicted in column 8 of Table II B, application no. 2, and being depicted in the same respective line as said Slr1791, and preferably the activity is increased plastidic.

[11335] Accordingly, in one embodiment, the molecule which activity is to be increased in the process of the invention is the gene product with an activity as a “phosphoadenosine phosphosulfate reductase”, preferably it is the molecule of section (a) or (b) of this paragraph.

[11336] In particular, it was observed that in plants, especially in Arabidopsis thaliana, increasing or generating the activity of a gene product plastidic with the activity of a “phosphoadenosine phosphosulfate reductase”, preferably being encoded by a gene comprising the nucleic acid sequence SEQ ID NO. 12140, preferably the coding region thereof, conferred the production of or the increase in proline compared with the wild type control.

[11337] The nucleic acid sequence of Slr1882 from Synechocystis sp., e.g. as shown in the respective line in column 5 of Table I, application no. 2, has been published in Nakamura et al., Nucleic Acids Res. 28(1), 72 (2000). And the activity of the gene product thereof is the activity of riboflavin biosynthesis protein.

[11338] Accordingly, in one embodiment, the process of the present invention for producing glutamate in a non-human organism, like a microorganism or a plant or a part thereof, comprises increasing or generating the activity of a gene product with the activity of a gene product conferring the activity of “riboflavin biosynthesis protein”, especially from Synechocystis sp. or its functional equivalent or its homolog, e.g. the increase of
[11339] (a) a gene product of a gene comprising the nucleic acid molecule as shown in the respective line in column 5 of Table I, application no. 2, preferably the coding region thereof, or a homolog or a fragment thereof, and being depicted in the same respective line as said Slr1882, or a functional equivalent or a homolog thereof as shown in column 8 of Table I, application no. 2, preferably the coding region thereof, particularly a homolog or functional equivalent as shown in column 8 of Table I B, application no. 2, and being depicted in the same respective line as said Slr1882, and preferably the activity is increased non-targeted, or
[11340] (b) a polypeptide comprising a polypeptide, a consensus sequence or at least a polypeptide motif as shown in the respective line in column 5 of Table II or in column 8 of Table IV, application no. 2, respectively, and being depicted in the same respective line as said Slr1882, or a functional equivalent or a homolog thereof as depicted in column 8 of Table II, application no. 2, preferably a homolog or functional equivalent as depicted in column 8 of Table II B, application no. 2, and being depicted in the same respective line as said Slr1882, and preferably the activity is increased non-targeted.

[11341] Accordingly, in one embodiment, the molecule which activity is to be increased in the process of the invention is the gene product with an activity as a “riboflavin biosynthesis protein”, preferably it is the molecule of section (a) or (b) of this paragraph.

[11342] In particular, it was observed that in plants, especially in Arabidopsis thaliana, increasing or generating the activity of a gene product non-targeted with the activity of a “riboflavin biosynthesis protein”, preferably being encoded by a gene comprising the nucleic acid sequence SEQ ID NO. 59041, preferably the coding region thereof, conferred the production of or the increase in glutamate compared with the wild type control.

[11343] The nucleic acid sequence of Slr2023 from Synechocystis sp., e.g. as shown in the respective line in column 5 of Table I, application no. 2, has been published in Nakamura et al., Nucleic Acids Res. 28(1), 72 (2000). And the activity of the gene product thereof is the activity of malonyl CoA-acyl carrier protein transacylase.

[11344] Accordingly, in one embodiment, the process of the present invention for producing glutamate in a non-human organism, like a microorganism or a plant or a part thereof, comprises increasing or generating the activity of a gene product with the activity of a gene product conferring the activity of “malonyl CoA-acyl carrier protein transacylase”, especially from Synechocystis sp. or its functional equivalent or its homolog, e.g. the increase of
[11345] (a) a gene product of a gene comprising the nucleic acid molecule as shown in the respective line in column 5 of Table I, application no. 2, preferably the coding region thereof, or a homolog or a fragment thereof, and being depicted in the same respective line as said Slr2023, or a functional equivalent or a homolog thereof as shown in column 8 of Table I, application no. 2, preferably the coding region thereof, particularly a homolog or functional equivalent as shown in column 8 of Table I B, application no. 2, and being depicted in the same respective line as said Slr2023, and preferably the activity is increased plastidic, or
[11346] (b) a polypeptide comprising a polypeptide, a consensus sequence or at least a polypeptide motif as shown in the respective line in column 5 of Table II or in column 8 of Table IV, application no. 2, respectively, and being depicted in the same respective line as said Slr2023, or a functional equivalent or a homolog thereof as depicted in column 8 of Table II, application no. 2, preferably a homolog or functional equivalent as depicted in column 8 of Table II B, application no. 2, and being depicted in the same respective line as said Slr2023, and preferably the activity is increased plastidic.

[11347] Accordingly, in one embodiment, the molecule which activity is to be increased in the process of the invention is the gene product with an activity as a “malonyl CoA-acyl carrier protein transacylase”, preferably it is the molecule of section (a) or (b) of this paragraph.

[11348] In particular, it was observed that in plants, especially in Arabidopsis thaliana, increasing or generating the activity of a gene product plastidic with the activity of a “malonyl CoA-acyl carrier protein transacylase”, preferably being encoded by a gene comprising the nucleic acid sequence SEQ ID NO. 59165, preferably the coding region thereof, conferred the production of or the increase in glutamate compared with the wild type control.

[11349] The nucleic acid sequence of Slr2023 from Synechocystis sp., e.g. as shown in the respective line in column 5 of Table I, application no. 2, has been published in Nakamura et al., Nucleic Acids Res. 28(1), 72 (2000). And the activity of the gene product thereof is the activity of malonyl CoA-acyl carrier protein transacylase.

[11350] Accordingly, in one embodiment, the process of the present invention for producing glutamine in a non-human organism, like a microorganism or a plant or a part thereof, comprises increasing or generating the activity of a gene product with the activity of a gene product conferring the activity of “malonyl CoA-acyl carrier protein transacylase”, especially from Synechocystis sp. or its functional equivalent or its homolog, e.g. the increase of
[11351] (a) a gene product of a gene comprising the nucleic acid molecule as shown in the respective line in column 5 of Table I, application no. 2, preferably the coding region thereof, or a homolog or a fragment thereof, and being depicted in the same respective line as said Slr2023, or a functional equivalent or a homolog thereof as shown in column 8 of Table I, application no. 2, preferably the coding region thereof, particularly a homolog or functional equivalent as shown in column 8 of Table I B, application no. 2, and being depicted in the same respective line as said Slr2023, and preferably the activity is increased plastidic, or
[11352] (b) a polypeptide comprising a polypeptide, a consensus sequence or at least a polypeptide motif as shown in the respective line in column 5 of Table II or in column 8 of Table IV, application no. 2, respectively, and being depicted in the same respective line as said Slr2023, or a functional equivalent or a homolog thereof as depicted in column 8 of Table II, application no. 2, preferably a homolog or functional equivalent as depicted in column 8 of Table II B, application no. 2, and being depicted in the same respective line as said Slr2023, and preferably the activity is increased plastidic.

[11353] Accordingly, in one embodiment, the molecule which activity is to be increased in the process of the invention is the gene product with an activity as a “malonyl CoA-acyl carrier protein transacylase”, preferably it is the molecule of section (a) or (b) of this paragraph.

[11354] In particular, it was observed that in plants, especially in Arabidopsis thaliana, increasing or generating the activity of a gene product plastidic with the activity of a “malonyl CoA-acyl carrier protein transacylase”, preferably being encoded by a gene comprising the nucleic acid sequence SEQ ID NO. 59165, preferably the coding region thereof, conferred the production of or the increase in glutamine compared with the wild type control.

[11355] The nucleic acid sequence of Slr2124 from Synechocystis sp., e.g. as shown in the respective line in column 5 of Table I, application no. 2, has been published in Nakamura et al., Nucleic Acids Res. 28(1), 72 (2000). And the activity of the gene product thereof is the activity of shortchain alcohol dehydrogenase family.

[11356] Accordingly, in one embodiment, the process of the present invention for producing proline in a non-human organism, like a microorganism or a plant or a part thereof, comprises increasing or generating the activity of a gene product with the activity of a gene product conferring the activity of “short-chain alcohol dehydrogenase family”, especially from Synechocystis sp. or its functional equivalent or its homolog, e.g. the increase of
[11357] (a) a gene product of a gene comprising the nucleic acid molecule as shown in the respective line in column 5 of Table I, application no. 2, preferably the coding region thereof, or a homolog or a fragment thereof, and being depicted in the same respective line as said Slr2124, or a functional equivalent or a homolog thereof as shown in column 8 of Table I, application no. 2, preferably the coding region thereof, particularly a homolog or functional equivalent as shown in column 8 of Table I B, application no. 2, and being depicted in the same respective line as said Slr2124, and preferably the activity is increased plastidic, or
[11358] (b) a polypeptide comprising a polypeptide, a consensus sequence or at least a polypeptide motif as shown in the respective line in column 5 of Table II or in column 8 of Table IV, application no. 2, respectively, and being depicted in the same respective line as said Slr2124, or a functional equivalent or a homolog thereof as depicted in column 8 of Table II, application no. 2, preferably a homolog or functional equivalent as depicted in column 8 of Table II B, application no. 2, and being depicted in the same respective line as said Slr2124, and preferably the activity is increased plastidic.

[11359] Accordingly, in one embodiment, the molecule which activity is to be increased in the process of the invention is the gene product with an activity as a “short-chain alcohol dehydrogenase family”, preferably it is the molecule of section (a) or (b) of this paragraph.

[11360] In particular, it was observed that in plants, especially in Arabidopsis thaliana, increasing or generating the activity of a gene product plastidic with the activity of a “short-chain alcohol dehydrogenase family”, preferably being encoded by a gene comprising the nucleic acid sequence SEQ ID NO. 59370, preferably the coding region thereof, conferred the production of or the increase in proline compared with the wild type control.

[11361] The nucleic acid sequence of TTC0019 from Thermus thermophilus, e.g. as shown in the respective line in column 5 of Table I, application no. 2, has been published in Henne et al., Nat. Biotechnol. 22 (5), 547 (2004). And the activity of the gene product thereof is the activity of Sec-independent protein translocase subunit.

[11362] Accordingly, in one embodiment, the process of the present invention for producing glutamine in a non-human organism, like a microorganism or a plant or a part thereof, comprises increasing or generating the activity of a gene product with the activity of a gene product conferring the activity of “Sec-independent protein translocase subunit”, especially from Thermus thermophilus or its functional equivalent or its homolog, e.g. the increase of
[11363] (a) a gene product of a gene comprising the nucleic acid molecule as shown in the respective line in column 5 of Table I, application no. 2, preferably the coding region thereof, or a homolog or a fragment thereof, and being depicted in the same respective line as said TTC0019, or a functional equivalent or a homolog thereof as shown in column 8 of Table I, application no. 2, preferably the coding region thereof, particularly a homolog or functional equivalent as shown in column 8 of Table I B, application no. 2, and being depicted in the same respective line as said TTC0019, and preferably the activity is increased non-targeted, or
[11364] (b) a polypeptide comprising a polypeptide, a consensus sequence or at least a polypeptide motif as shown in the respective line in column 5 of Table II or in column 8 of Table IV, application no. 2, respectively, and being depicted in the same respective line as said TTC0019, or a functional equivalent or a homolog thereof as depicted in column 8 of Table II, application no. 2, preferably a homolog or functional equivalent as depicted in column 8 of Table II B, application no. 2, and being depicted in the same respective line as said TTC0019, and preferably the activity is increased non-targeted.

[11365] Accordingly, in one embodiment, the molecule which activity is to be increased in the process of the invention is the gene product with an activity as a “Sec-independent protein translocase subunit”, preferably it is the molecule of section (a) or (b) of this paragraph. In particular, it was observed that in plants, especially in Arabidopsis thaliana, increasing or generating the activity of a gene product non-targeted with the activity of a “Sec-independent protein translocase subunit”, preferably being encoded by a gene comprising the nucleic acid sequence SEQ ID NO. 12698, preferably the coding region thereof, conferred the production of or the increase in glutamine compared with the wild type control.

[11366] The nucleic acid sequence of TTC0019 from Thermus thermophilus, e.g. as shown in the respective line in column 5 of Table I, application no. 2, has been published in S Henne et al., Nat. Biotechnol. 22 (5), 547 (2004). And the activity of the gene product thereof is the activity of Sec-independent protein translocase subunit.

[11367] Accordingly, in one embodiment, the process of the present invention for producing proline in a non-human organism, like a microorganism or a plant or a part thereof, comprises increasing or generating the activity of a gene product with the activity of a gene product conferring the activity of “Sec-independent protein translocase subunit”, especially from Thermus thermophilus or its functional equivalent or its homolog, e.g. the increase of
[11368] (a) a gene product of a gene comprising the nucleic acid molecule as shown in the respective line in column 5 of Table I, application no. 2, preferably the coding region thereof, or a homolog or a fragment thereof, and being depicted in the same respective line as said TTC0019, or a functional equivalent or a homolog thereof as shown in column 8 of Table I, application no. 2, preferably the coding region thereof, particularly a homolog or functional equivalent as shown in column 8 of Table I B, application no. 2, and being depicted in the same respective line as said TTC0019, and preferably the activity is increased non-targeted, or
[11369] (b) a polypeptide comprising a polypeptide, a consensus sequence or at least a polypeptide motif as shown in the respective line in column 5 of Table II or in column 8 of Table IV, application no. 2, respectively, and being depicted in the same respective line as said TTC0019, or a functional equivalent or a homolog thereof as depicted in column 8 of Table II, application no. 2, preferably a homolog or functional equivalent as depicted in column 8 of Table II B, application no. 2, and being depicted in the same respective line as said TTC0019, and preferably the activity is increased non-targeted.

[11370] Accordingly, in one embodiment, the molecule which activity is to be increased in the process of the invention is the gene product with an activity as a “Sec-independent protein translocase subunit”, preferably it is the molecule of section (a) or (b) of this paragraph.

[11371] In particular, it was observed that in plants, especially in Arabidopsis thaliana, increasing or generating the activity of a gene product non-targeted with the activity of a “Sec-independent protein translocase subunit”, preferably being encoded by a gene comprising the nucleic acid sequence SEQ ID NO. 12698, preferably the coding region thereof, conferred the production of or the increase in proline compared with the wild type control.

[11372] The nucleic acid sequence of TTC0035 from Thermus thermophilus, e.g. as shown in the respective line in column 5 of Table I, application no. 2, has been published in Henne et al., Nat. Biotechnol. 22 (5), 547 (2004). And the activity of the gene product thereof is the activity of cell division protein.

[11373] Accordingly, in one embodiment, the process of the present invention for producing proline in a non-human organism, like a microorganism or a plant or a part thereof, comprises increasing or generating the activity of a gene product with the activity of a gene product conferring the activity of “cell division protein”, especially from Thermus thermophilus or its functional equivalent or its homolog, e.g. the increase of
[11374] (a) a gene product of a gene comprising the nucleic acid molecule as shown in the respective line in column 5 of Table I, application no. 2, preferably the coding region thereof, or a homolog or a fragment thereof, and being depicted in the same respective line as said TTC0035, or a functional equivalent or a homolog thereof as shown in column 8 of Table I, application no. 2, preferably the coding region thereof, particularly a homolog or functional equivalent as shown in column 8 of Table I B, application no. 2, and being depicted in the same respective line as said TTC0035, and preferably the activity is increased non-targeted, or
[11375] (b) a polypeptide comprising a polypeptide, a consensus sequence or at least a polypeptide motif as shown in the respective line in column 5 of Table II or in column 8 of Table IV, application no. 2, respectively, and being depicted in the same respective line as said TTC0035, or a functional equivalent or a homolog thereof as depicted in column 8 of Table II, application no. 2, preferably a homolog or functional equivalent as depicted in column 8 of Table II B, application no. 2, and being depicted in the same respective line as said TTC0035, and preferably the activity is increased non-targeted.

[11376] Accordingly, in one embodiment, the molecule which activity is to be increased in the process of the invention is the gene product with an activity as a “cell division protein”, preferably it is the molecule of section (a) or (b) of this paragraph.

[11377] In particular, it was observed that in plants, especially in Arabidopsis thaliana, increasing or generating the activity of a gene product non-targeted with the activity of a “cell division protein”, preferably being encoded by a gene comprising the nucleic acid sequence SEQ ID NO. 60301, preferably the coding region thereof, conferred the production of or the increase in proline compared with the wild type control.

[11378] The nucleic acid sequence of TTC0216 from Thermus thermophilus, e.g. as shown in the respective line in column 5 of Table I, application no. 2, has been published in Henne et al., Nat. Biotechnol. 22 (5), 547 (2004). And the activity of the gene product thereof is the activity of branched-chain amino acid ABC transporter permease protein.

[11379] Accordingly, in one embodiment, the process of the present invention for producing proline in a non-human organism, like a microorganism or a plant or a part thereof, comprises increasing or generating the activity of a gene product with the activity of a gene product conferring the activity of “branched-chain amino acid ABC transporter permease protein”, especially from Thermus thermophilus or its functional equivalent or its homolog, e.g. the increase of
[11380] (a) a gene product of a gene comprising the nucleic acid molecule as shown in the respective line in column 5 of Table I, application no. 2, preferably the coding region thereof, or a homolog or a fragment thereof, and being depicted in the same respective line as said TTC0216, or a functional equivalent or a homolog thereof as shown in column 8 of Table I, application no. 2, preferably the coding region thereof, particularly a homolog or functional equivalent as shown in column 8 of Table I B, application no. 2, and being depicted in the same respective line as said TTC0216, and preferably the activity is increased non-targeted, or
[11381] (b) a polypeptide comprising a polypeptide, a consensus sequence or at least a polypeptide motif as shown in the respective line in column 5 of Table II or in column 8 of Table IV, application no. 2, respectively, and being depicted in the same respective line as said TTC0216, or a functional equivalent or a homolog thereof as depicted in column 8 of Table II, application no. 2, preferably a homolog or functional equivalent as depicted in column 8 of Table II B, application no. 2, and being depicted in the same respective line as said TTC0216, and preferably the activity is increased non-targeted.

[11382] Accordingly, in one embodiment, the molecule which activity is to be increased in the process of the invention is the gene product with an activity as a “branched-chain amino acid ABC transporter permease protein”, preferably it is the molecule of section (a) or (b) of this paragraph.

[11383] In particular, it was observed that in plants, especially in Arabidopsis thaliana, increasing or generating the activity of a gene product non-targeted with the activity of a “branched-chain amino acid ABC transporter permease protein”, preferably being encoded by a gene comprising the nucleic acid sequence SEQ ID NO. 60859, preferably the coding region thereof, conferred the production of or the increase in proline compared with the wild type control.

[11384] The nucleic acid sequence of TTC0337 from Thermus thermophilus, e.g. as shown in the respective line in column 5 of Table I, application no. 2, has been published in Henne et al., Nat. Biotechnol. 22 (5), 547 (2004). And the activity of the gene product thereof is the activity of amino acid ABC transporter permease protein.

[11385] Accordingly, in one embodiment, the process of the present invention for producing proline in a non-human organism, like a microorganism or a plant or a part thereof, comprises increasing or generating the activity of a gene product with the activity of a gene product conferring the activity of “amino acid ABC transporter permease protein”, especially from Thermus thermophilus or its functional equivalent or its homolog, e.g. the increase of
[11386] (a) a gene product of a gene comprising the nucleic acid molecule as shown in the respective line in column 5 of Table I, application no. 2, preferably the coding region thereof, or a homolog or a fragment thereof, and being depicted in the same respective line as said TTC0337, or a functional equivalent or a homolog thereof as shown in column 8 of Table I, application no. 2, preferably the coding region thereof, particularly a homolog or functional equivalent as shown in column 8 of Table I B, application no. 2, and being depicted in the same respective line as said TTC0337, and preferably the activity is increased non-targeted, or
[11387] (b) a polypeptide comprising a polypeptide, a consensus sequence or at least a polypeptide motif as shown in the respective line in column 5 of Table II or in column 8 of Table IV, application no. 2, respectively, and being depicted in the same respective line as said TTC0337, or a functional equivalent or a homolog thereof as depicted in column 8 of Table II, application no. 2, preferably a homolog or functional equivalent as depicted in column 8 of Table II B, application no. 2, and being depicted in the same respective line as said TTC0337, and preferably the activity is increased non-targeted.

[11388] Accordingly, in one embodiment, the molecule which activity is to be increased in the process of the invention is the gene product with an activity as a “amino acid ABC transporter permease protein”, preferably it is the molecule of section (a) or (b) of this paragraph.

[11389] In particular, it was observed that in plants, especially in Arabidopsis thaliana, increasing or generating the activity of a gene product non-targeted with the activity of a “amino acid ABC transporter permease protein”, preferably being encoded by a gene comprising the nucleic acid sequence SEQ ID NO. 61070, preferably the coding region thereof, conferred the production of or the increase in proline compared with the wild type control.

[11390] The nucleic acid sequence of TTC0768 from Thermus thermophilus, e.g. as shown in the respective line in column 5 of Table I, application no. 2, has been published in Henne et al., Nat. Biotechnol. 22 (5), 547 (2004). And the activity of the gene product thereof is the activity of TTC0768-protein.

[11391] Accordingly, in one embodiment, the process of the present invention for producing proline in a non-human organism, like a microorganism or a plant or a part thereof, comprises increasing or generating the activity of a gene product with the activity of a gene product conferring the activity of “TTC0768-protein”, especially from Thermus thermophilus or its functional equivalent or its homolog, e.g. the increase of
[11392] (a) a gene product of a gene comprising the nucleic acid molecule as shown in the respective line in column 5 of Table I, application no. 2, preferably the coding region thereof, or a homolog or a fragment thereof, and being depicted in the same respective line as said TTC0768, or a functional equivalent or a homolog thereof as shown in column 8 of Table I, application no. 2, preferably the coding region thereof, particularly a homolog or functional equivalent as shown in column 8 of Table I B, application no. 2, and being depicted in the same respective line as said TTC0768, and preferably the activity is increased non-targeted, or
[11393] (b) a polypeptide comprising a polypeptide, a consensus sequence or at least a polypeptide motif as shown in the respective line in column 5 of Table II or in column 8 of Table IV, application no. 2, respectively, and being depicted in the same respective line as said TTC0768, or a functional equivalent or a homolog thereof as depicted in column 8 of Table II, application no. 2, preferably a homolog or functional equivalent as depicted in column 8 of Table II B, application no. 2, and being depicted in the same respective line as said TTC0768, and preferably the activity is increased non-targeted.

[11394] Accordingly, in one embodiment, the molecule which activity is to be increased in the process of the invention is the gene product with an activity as a “TTC0768-protein”, preferably it is the molecule of section (a) or (b) of this paragraph.

[11395] In particular, it was observed that in plants, especially in Arabidopsis thaliana, increasing or generating the activity of a gene product non-targeted with the activity of a “TTC0768-protein”, preferably being encoded by a gene comprising the nucleic acid sequence SEQ ID NO. 61532, preferably the coding region thereof, conferred the production of or the increase in proline compared with the wild type control.

[11396] The nucleic acid sequence of TTC0917 from Thermus thermophilus, e.g. as shown in the respective line in column 5 of Table I, application no. 2, has been published in Henne et al., Nat. Biotechnol. 22 (5), 547 (2004). And the activity of the gene product thereof is the activity of metal-dependent hydrolase.

[11397] Accordingly, in one embodiment, the process of the present invention for producing glutamine in a non-human organism, like a microorganism or a plant or a part thereof, comprises increasing or generating the activity of a gene product with the activity of a gene product conferring the activity of “metal-dependent hydrolase”, especially from Thermus thermophilus or its functional equivalent or its homolog, e.g. the increase of
[11398] (a) a gene product of a gene comprising the nucleic acid molecule as shown in the respective line in column 5 of Table I, application no. 2, preferably the coding region thereof, or a homolog or a fragment thereof, and being depicted in the same respective line as said TTC0917, or a functional equivalent or a homolog thereof as shown in column 8 of Table I, application no. 2, preferably the coding region thereof, particularly a homolog or functional equivalent as shown in column 8 of Table I B, application no. 2, and being depicted in the same respective line as said TTC0917, and preferably the activity is increased non-targeted, or
[11399] (b) a polypeptide comprising a polypeptide, a consensus sequence or at least a polypeptide motif as shown in the respective line in column 5 of Table II or in column 8 of Table IV, application no. 2, respectively, and being depicted in the same respective line as said TTC0917, or a functional equivalent or a homolog thereof as depicted in column 8 of Table II, application no. 2, preferably a homolog or functional equivalent as depicted in column 8 of Table II B, application no. 2, and being depicted in the same respective line as said TTC0917, and preferably the activity is increased non-targeted.

[11400] Accordingly, in one embodiment, the molecule which activity is to be increased in the process of the invention is the gene product with an activity as a “metal-dependent hydrolase”, preferably it is the molecule of section (a) or (b) of this paragraph.

[11401] In particular, it was observed that in plants, especially in Arabidopsis thaliana, increasing or generating the activity of a gene product non-targeted with the activity of a “metal-dependent hydrolase”, preferably being encoded by a gene comprising the nucleic acid sequence SEQ ID NO. 61553, preferably the coding region thereof, conferred the production of or the increase in glutamine compared with the wild type control.

[11402] The nucleic acid sequence of TTC1193 from Thermus thermophilus, e.g. as shown in the respective line in column 5 of Table I, application no. 2, has been published in Henne et al., Nat. Biotechnol. 22 (5), 547 (2004). And the activity of the gene product thereof is the activity of multiple antibiotic resistance protein.

[11403] Accordingly, in one embodiment, the process of the present invention for producing glutamate in a non-human organism, like a microorganism or a plant or a part thereof, comprises increasing or generating the activity of a gene product with the activity of a gene product conferring the activity of “multiple antibiotic resistance protein”, especially from Thermus thermophilus or its functional equivalent or its homolog, e.g. the increase of
[11404] (a) a gene product of a gene comprising the nucleic acid molecule as shown in the respective line in column 5 of Table I, application no. 2, preferably the coding region thereof, or a homolog or a fragment thereof, and being depicted in the same respective line as said TTC1193, or a functional equivalent or a homolog thereof as shown in column 8 of Table I, application no. 2, preferably the coding region thereof, particularly a homolog or functional equivalent as shown in column 8 of Table I B, application no. 2, and being depicted in the same respective line as said TTC1193, and preferably the activity is increased non-targeted, or
[11405] (b) a polypeptide comprising a polypeptide, a consensus sequence or at least a polypeptide motif as shown in the respective line in column 5 of Table II or in column 8 of Table IV, application no. 2, respectively, and being depicted in the same respective line as said TTC1193, or a functional equivalent or a homolog thereof as depicted in column 8 of Table II, application no. 2, preferably a homolog or functional equivalent as depicted in column 8 of Table II B, application no. 2, and being depicted in the same respective line as said TTC1193, and preferably the activity is increased non-targeted.

[11406] Accordingly, in one embodiment, the molecule which activity is to be increased in the process of the invention is the gene product with an activity as a “multiple antibiotic resistance protein”, preferably it is the molecule of section (a) or (b) of this paragraph.

[11407] In particular, it was observed that in plants, especially in Arabidopsis thaliana, increasing or generating the activity of a gene product non-targeted with the activity of a “multiple antibiotic resistance protein”, preferably being encoded by a gene comprising the nucleic acid sequence SEQ ID NO. 61723, preferably the coding region thereof, conferred the production of or the increase in glutamate compared with the wild type control.

[11408] The nucleic acid sequence of TTC1386 from Thermus thermophilus, e.g. as shown in the respective line in column 5 of Table I, application no. 2, has been published in Henne et al., Nat. Biotechnol. 22 (5), 547 (2004). And the activity of the gene product thereof is the activity of TTC1386-protein.

[11409] Accordingly, in one embodiment, the process of the present invention for producing glutamate in a non-human organism, like a microorganism or a plant or a part thereof, comprises increasing or generating the activity of a gene product with the activity of a gene product conferring the activity of “TTC1386-protein”, especially from Thermus thermophilus or its functional equivalent or its homolog, e.g. the increase of
[11410] (a) a gene product of a gene comprising the nucleic acid molecule as shown in the respective line in column 5 of Table I, application no. 2, preferably the coding region thereof, or a homolog or a fragment thereof, and being depicted in the same respective line as said TTC1386, or a functional equivalent or a homolog thereof as shown in column 8 of Table I, application no. 2, preferably the coding region thereof, particularly a homolog or functional equivalent as shown in column 8 of Table I B, application no. 2, and being depicted in the same respective line as said TTC1386, and preferably the activity is increased non-targeted, or
[11411] (b) a polypeptide comprising a polypeptide, a consensus sequence or at least a polypeptide motif as shown in the respective line in column 5 of Table II or in column 8 of Table IV, application no. 2, respectively, and being depicted in the same respective line as said TTC1386, or a functional equivalent or a homolog thereof as depicted in column 8 of Table II, application no. 2, preferably a homolog or functional equivalent as depicted in column 8 of Table II B, application no. 2, and being depicted in the same respective line as said TTC1386, and preferably the activity is increased non-targeted.

[11412] Accordingly, in one embodiment, the molecule which activity is to be increased in the process of the invention is the gene product with an activity as a “TTC1386-protein”, preferably it is the molecule of section (a) or (b) of this paragraph.

[11413] In particular, it was observed that in plants, especially in Arabidopsis thaliana, increasing or generating the activity of a gene product non-targeted with the activity of a “TTC1386-protein”, preferably being encoded by a gene comprising the nucleic acid sequence SEQ ID NO. 62079, preferably the coding region thereof, conferred the production of or the increase in glutamate compared with the wild type control.

[11414] The nucleic acid sequence of TTC1550 from Thermus thermophilus, e.g. as shown in the respective line in column 5 of Table I, application no. 2, has been published in Henne et al., Nat. Biotechnol. 22 (5), 547 (2004). And the activity of the gene product thereof is the activity of homocitrate synthase.

[11415] Accordingly, in one embodiment, the process of the present invention for producing glutamine in a non-human organism, like a microorganism or a plant or a part thereof, comprises increasing or generating the activity of a gene product with the activity of a gene product conferring the activity of “homocitrate synthase”, especially from Thermus thermophilus or its functional equivalent or its homolog, e.g. the increase of
[11416] (a) a gene product of a gene comprising the nucleic acid molecule as shown in the respective line in column 5 of Table I, application no. 2, preferably the coding region thereof, or a homolog or a fragment thereof, and being depicted in the same respective line as said TTC1550, or a functional equivalent or a homolog thereof as shown in column 8 of Table I, application no. 2, preferably the coding region thereof, particularly a homolog or functional equivalent as shown in column 8 of Table I B, application no. 2, and being depicted in the same respective line as said TTC1550, and preferably the activity is increased non-targeted, or
[11417] (b) a polypeptide comprising a polypeptide, a consensus sequence or at least a polypeptide motif as shown in the respective line in column 5 of Table II or in column 8 of Table IV, application no. 2, respectively, and being depicted in the same respective line as said TTC1550, or a functional equivalent or a homolog thereof as depicted in column 8 of Table II, application no. 2, preferably a homolog or functional equivalent as depicted in column 8 of Table II B, application no. 2, and being depicted in the same respective line as said TTC1550, and preferably the activity is increased non-targeted.

[11418] Accordingly, in one embodiment, the molecule which activity is to be increased in the process of the invention is the gene product with an activity as a “homocitrate synthase”, preferably it is the molecule of section (a) or (b) of this paragraph.

[11419] In particular, it was observed that in plants, especially in Arabidopsis thaliana, increasing or generating the activity of a gene product non-targeted with the activity of a “homocitrate synthase”, preferably being encoded by a gene comprising the nucleic acid sequence SEQ ID NO. 12974, preferably the coding region thereof, conferred the production of or the increase in glutamine compared with the wild type control.

[11420] The nucleic acid sequence of TTC1550 from Thermus thermophilus, e.g. as shown in the respective line in column 5 of Table I, application no. 2, has been published in Henne et al., Nat. Biotechnol. 22 (5), 547 (2004). And the activity of the gene product thereof is the activity of homocitrate synthase.

[11421] Accordingly, in one embodiment, the process of the present invention for producing proline in a non-human organism, like a microorganism or a plant or a part thereof, comprises increasing or generating the activity of a gene product with the activity of a gene product conferring the activity of “homocitrate synthase”, especially from Thermus thermophilus or its functional equivalent or its homolog, e.g. the increase of
[11422] (a) a gene product of a gene comprising the nucleic acid molecule as shown in the respective line in column 5 of Table I, application no. 2, preferably the coding region thereof, or a homolog or a fragment thereof, and being depicted in the same respective line as said TTC1550, or a functional equivalent or a homolog thereof as shown in column 8 of Table I, application no. 2, preferably the coding region thereof, particularly a homolog or functional equivalent as shown in column 8 of Table I B, application no. 2, and being depicted in the same respective line as said TTC1550, and preferably the activity is increased non-targeted, or
[11423] (b) a polypeptide comprising a polypeptide, a consensus sequence or at least a polypeptide motif as shown in the respective line in column 5 of Table II or in column 8 of Table IV, application no. 2, respectively, and being depicted in the same respective line as said TTC1550, or a functional equivalent or a homolog thereof as depicted in column 8 of Table II, application no. 2, preferably a homolog or functional equivalent as depicted in column 8 of Table II B, application no. 2, and being depicted in the same respective line as said TTC1550, and preferably the activity is increased non-targeted.

[11424] Accordingly, in one embodiment, the molecule which activity is to be increased in the process of the invention is the gene product with an activity as a “homocitrate synthase”, preferably it is the molecule of section (a) or (b) of this paragraph.

[11425] In particular, it was observed that in plants, especially in Arabidopsis thaliana, increasing or generating the activity of a gene product non-targeted with the activity of a “homocitrate synthase”, preferably being encoded by a gene comprising the nucleic acid sequence SEQ ID NO. 12974, preferably the coding region thereof, conferred the production of or the increase in proline compared with the wild type control.

[11426] The nucleic acid sequence of TTC1918 from Thermus thermophilus, e.g. as shown in the respective line in column 5 of Table I, application no. 2, has been published in Henne et al., Nat. Biotechnol. 22 (5), 547 (2004). And the activity of the gene product thereof is the activity of oxidoreductase subunit.

[11427] Accordingly, in one embodiment, the process of the present invention for producing glutamate in a non-human organism, like a microorganism or a plant or a part thereof, comprises increasing or generating the activity of a gene product with the activity of a gene product conferring the activity of “oxidoreductase subunit”, especially from Thermus thermophilus or its functional equivalent or its homolog, e.g. the increase of
[11428] (a) a gene product of a gene comprising the nucleic acid molecule as shown in the respective line in column 5 of Table I, application no. 2, preferably the coding region thereof, or a homolog or a fragment thereof, and being depicted in the same respective line as said TTC1918, or a functional equivalent or a homolog thereof as shown in column 8 of Table I, application no. 2, preferably the coding region thereof, particularly a homolog or functional equivalent as shown in column 8 of Table I B, application no. 2, and being depicted in the same respective line as said TTC1918, and preferably the activity is increased non-targeted, or
[11429] (b) a polypeptide comprising a polypeptide, a consensus sequence or at least a polypeptide motif as shown in the respective line in column 5 of Table II or in column 8 of Table IV, application no. 2, respectively, and being depicted in the same respective line as said TTC1918, or a functional equivalent or a homolog thereof as depicted in column 8 of Table II, application no. 2, preferably a homolog or functional equivalent as depicted in column 8 of Table II B, application no. 2, and being depicted in the same respective line as said TTC1918, and preferably the activity is increased non-targeted.

[11430] Accordingly, in one embodiment, the molecule which activity is to be increased in the process of the invention is the gene product with an activity as a “oxidoreductase subunit”, preferably it is the molecule of section (a) or (b) of this paragraph.

[11431] In particular, it was observed that in plants, especially in Arabidopsis thaliana, increasing or generating the activity of a gene product non-targeted with the activity of a “oxidoreductase subunit”, preferably being encoded by a gene comprising the nucleic acid sequence SEQ ID NO. 62160, preferably the coding region thereof, conferred the production of or the increase in glutamate compared with the wild type control.

[11432] The nucleic acid sequence of TTC1918 from Thermus thermophilus, e.g. as shown in the respective line in column 5 of Table I, application no. 2, has been published in Henne et al., Nat. Biotechnol. 22 (5), 547 (2004). And the activity of the gene product thereof is the activity of oxidoreductase subunit.

[11433] Accordingly, in one embodiment, the process of the present invention for producing glutamine in a non-human organism, like a microorganism or a plant or a part thereof, comprises increasing or generating the activity of a gene product with the activity of a gene product conferring the activity of “oxidoreductase subunit”, especially from Thermus thermophilus or its functional equivalent or its homolog, e.g. the increase of
[11434] (a) a gene product of a gene comprising the nucleic acid molecule as shown in the respective line in column 5 of Table I, application no. 2, preferably the coding region thereof, or a homolog or a fragment thereof, and being depicted in the same respective line as said TTC1918, or a functional equivalent or a homolog thereof as shown in column 8 of Table I, application no. 2, preferably the coding region thereof, particularly a homolog or functional equivalent as shown in column 8 of Table I B, application no. 2, and being depicted in the same respective line as said TTC1918, and preferably the activity is increased non-targeted, or
[11435] (b) a polypeptide comprising a polypeptide, a consensus sequence or at least a polypeptide motif as shown in the respective line in column 5 of Table II or in column 8 of Table IV, application no. 2, respectively, and being depicted in the same respective line as said TTC1918, or a functional equivalent or a homolog thereof as depicted in column 8 of Table II, application no. 2, preferably a homolog or functional equivalent as depicted in column 8 of Table II B, application no. 2, and being depicted in the same respective line as said TTC1918, and preferably the activity is increased non-targeted.

[11436] Accordingly, in one embodiment, the molecule which activity is to be increased in the process of the invention is the gene product with an activity as a “oxidoreductase subunit”, preferably it is the molecule of section (a) or (b) of this paragraph.

[11437] In particular, it was observed that in plants, especially in Arabidopsis thaliana, increasing or generating the activity of a gene product non-targeted with the activity of a “oxidoreductase subunit”, preferably being encoded by a gene comprising the nucleic acid sequence SEQ ID NO. 62160, preferably the coding region thereof, conferred the production of or the increase in glutamine compared with the wild type control.

[11438] The nucleic acid sequence of XM_{—}473199 from Oryza sativa, e.g. as shown in the respective line in column 5 of Table I, application no. 2 is unpublished. And the activity of the gene product thereof is the activity of XM_{—}473199-protein.

[11439] Accordingly, in one embodiment, the process of the present invention for producing glutamate in a non-human organism, like a microorganism or a plant or a part thereof, comprises increasing or generating the activity of a gene product with the activity of a gene product conferring the activity of “XM_{—}473199-protein”, especially from Oryza sativa or its functional equivalent or its homolog, e.g. the increase of
[11440] (a) a gene product of a gene comprising the nucleic acid molecule as shown in the respective line in column 5 of Table I, application no. 2, preferably the coding region thereof, or a homolog or a fragment thereof, and being depicted in the same respective line as said XM_{—}473199, or a functional equivalent or a homolog thereof as shown in column 8 of Table I, application no. 2, preferably the coding region thereof, particularly a homolog or functional equivalent as shown in column 8 of Table I B, application no. 2, and being depicted in the same respective line as said XM_{—}473199, and preferably the activity is increased non-targeted, or
[11441] (b) a polypeptide comprising a polypeptide, a consensus sequence or at least a polypeptide motif as shown in the respective line in column 5 of Table II or in column 8 of Table IV, application no. 2, respectively, and being depicted in the same respective line as said XM_{—}473199, or a functional equivalent or a homolog thereof as depicted in column 8 of Table II, application no. 2, preferably a homolog or functional equivalent as depicted in column 8 of Table II B, application no. 2, and being depicted in the same respective line as said XM_{—}473199, and preferably the activity is increased non-targeted.

[11442] Accordingly, in one embodiment, the molecule which activity is to be increased in the process of the invention is the gene product with an activity as a “XM_{—}473199-protein”, preferably it is the molecule of section (a) or (b) of this paragraph.

[11443] In particular, it was observed that in plants, especially in Arabidopsis thaliana, increasing or generating the activity of a gene product non-targeted with the activity of a “XM_{—}473199-protein”, preferably being encoded by a gene comprising the nucleic acid sequence SEQ ID NO. 62244, preferably the coding region thereof, conferred the production of or the increase in glutamate compared with the wild type control.

[11444] The nucleic acid sequence of XM_{—}473199 from Oryza sativa, e.g. as shown in the respective line in column 5 of Table I, application no. 2 is unpublished. And the activity of the gene product thereof is the activity of XM_{—}473199-protein.

[11445] Accordingly, in one embodiment, the process of the present invention for producing glutamine in a non-human organism, like a microorganism or a plant or a part thereof, comprises increasing or generating the activity of a gene product with the activity of a gene product conferring the activity of “XM_{—}473199-protein”, especially from Oryza sativa or its functional equivalent or its homolog, e.g. the increase of
[11446] (a) a gene product of a gene comprising the nucleic acid molecule as shown in the respective line in column 5 of Table I, application no. 2, preferably the coding region thereof, or a homolog or a fragment thereof, and being depicted in the same respective line as said XM_{—}473199, or a functional equivalent or a homolog thereof as shown in column 8 of Table I, application no. 2, preferably the coding region thereof, particularly a homolog or functional equivalent as shown in column 8 of Table I B, application no. 2, and being depicted in the same respective line as said XM_{—}473199, and preferably the activity is increased non-targeted, or
[11447] (b) a polypeptide comprising a polypeptide, a consensus sequence or at least a polypeptide motif as shown in the respective line in column 5 of Table II or in column 8 of Table IV, application no. 2, respectively, and being depicted in the same respective line as said XM_{—}473199, or a functional equivalent or a homolog thereof as depicted in column 8 of Table II, application no. 2, preferably a homolog or functional equivalent as depicted in column 8 of Table II B, application no. 2, and being depicted in the same respective line as said XM_{—}473199, and preferably the activity is increased non-targeted.

[11448] Accordingly, in one embodiment, the molecule which activity is to be increased in the process of the invention is the gene product with an activity as a “XM_{—}473199-protein”, preferably it is the molecule of section (a) or (b) of this paragraph.

[11449] In particular, it was observed that in plants, especially in Arabidopsis thaliana, increasing or generating the activity of a gene product non-targeted with the activity of a “XM_{—}473199-protein”, preferably being encoded by a gene comprising the nucleic acid sequence SEQ ID NO. 62244, preferably the coding region thereof, conferred the production of or the increase in glutamine compared with the wild type control.

[11450] The nucleic acid sequence of Ybl021c from Saccharomyces cerevisiae, e.g. as shown in the respective line in column 5 of Table I, application no. 2, has been published in Goffeau et al., Science 274 (5287), 546 (1996). And the activity of the gene product thereof is the activity of transcription factor.

[11451] Accordingly, in one embodiment, the process of the present invention for producing proline in a non-human organism, like a microorganism or a plant or a part thereof, comprises increasing or generating the activity of a gene product with the activity of a gene product conferring the activity of “transcription factor”, especially from Saccharomyces cerevisiae or its functional equivalent or its homolog, e.g. the increase of
[11452] (a) a gene product of a gene comprising the nucleic acid molecule as shown in the respective line in column 5 of Table I, application no. 2, preferably the coding region thereof, or a homolog or a fragment thereof, and being depicted in the same respective line as said Ybl021c, or a functional equivalent or a homolog thereof as shown in column 8 of Table I, application no. 2, preferably the coding region thereof, particularly a homolog or functional equivalent as shown in column 8 of Table I B, application no. 2, and being depicted in the same respective line as said Ybl021c, and preferably the activity is increased non-targeted, or
[11453] (b) a polypeptide comprising a polypeptide, a consensus sequence or at least a polypeptide motif as shown in the respective line in column 5 of Table II or in column 8 of Table IV, application no. 2, respectively, and being depicted in the same respective line as said Ybl021c, or a functional equivalent or a homolog thereof as depicted in column 8 of Table II, application no. 2, preferably a homolog or functional equivalent as depicted in column 8 of Table II B, application no. 2, and being depicted in the same respective line as said Ybl021c, and preferably the activity is increased non-targeted.

[11454] Accordingly, in one embodiment, the molecule which activity is to be increased in the process of the invention is the gene product with an activity as a “transcription factor”, preferably it is the molecule of section (a) or (b) of this paragraph.

[11455] In particular, it was observed that in plants, especially in Arabidopsis thaliana, increasing or generating the activity of a gene product non-targeted with the activity of a “transcription factor”, preferably being encoded by a gene comprising the nucleic acid sequence SEQ ID NO. 62524, preferably the coding region thereof, conferred the production of or the increase in proline compared with the wild type control.

[11456] The nucleic acid sequence of Ybr160w from Saccharomyces cerevisiae, e.g. as shown in the respective line in column 5 of Table I, application no. 2, has been published in Goffeau et al., Science 274 (5287), 546 (1996). And the activity of the gene product thereof is the activity of cell division control protein.

[11457] Accordingly, in one embodiment, the process of the present invention for producing glutamate in a non-human organism, like a microorganism or a plant or a part thereof, comprises increasing or generating the activity of a gene product with the activity of a gene product conferring the activity of “cell division control protein”, especially from Saccharomyces cerevisiae or its functional equivalent or its homolog, e.g. the increase of
[11458] (a) a gene product of a gene comprising the nucleic acid molecule as shown in the respective line in column 5 of Table I, application no. 2, preferably the coding region thereof, or a homolog or a fragment thereof, and being depicted in the same respective line as said Ybr160w, or a functional equivalent or a homolog thereof as shown in column 8 of Table I, application no. 2, preferably the coding region thereof, particularly a homolog or functional equivalent as shown in column 8 of Table I B, application no. 2, and being depicted in the same respective line as said Ybr160w, and preferably the activity is increased non-targeted, or
[11459] (b) a polypeptide comprising a polypeptide, a consensus sequence or at least a polypeptide motif as shown in the respective line in column 5 of Table II or in column 8 of Table IV, application no. 2, respectively, and being depicted in the same respective line as said Ybr160w, or a functional equivalent or a homolog thereof as depicted in column 8 of Table II, application no. 2, preferably a homolog or functional equivalent as depicted in column 8 of Table II B, application no. 2, and being depicted in the same respective line as said Ybr160w, and preferably the activity is increased non-targeted.

[11460] Accordingly, in one embodiment, the molecule which activity is to be increased in the process of the invention is the gene product with an activity as a “cell division control protein”, preferably it is the molecule of section (a) or (b) of this paragraph.

[11461] In particular, it was observed that in plants, especially in Arabidopsis thaliana, increasing or generating the activity of a gene product non-targeted with the activity of a “cell division control protein”, preferably being encoded by a gene comprising the nucleic acid sequence SEQ ID NO. 62717, preferably the coding region thereof, conferred the production of or the increase in glutamate compared with the wild type control.

[11462] The nucleic acid sequence of Ybr160w from Saccharomyces cerevisiae, e.g. as shown in the respective line in column 5 of Table I, application no. 2, has been published in Goffeau et al., Science 274 (5287), 546 (1996). And the activity of the gene product thereof is the activity of cell division control protein.

[11463] Accordingly, in one embodiment, the process of the present invention for producing proline in a non-human organism, like a microorganism or a plant or a part thereof, comprises increasing or generating the activity of a gene product with the activity of a gene product conferring the activity of “cell division control protein”, especially from Saccharomyces cerevisiae or its functional equivalent or its homolog, e.g. the increase of
[11464] (a) a gene product of a gene comprising the nucleic acid molecule as shown in the respective line in column 5 of Table I, application no. 2, preferably the coding region thereof, or a homolog or a fragment thereof, and being depicted in the same respective line as said Ybr160w, or a functional equivalent or a homolog thereof as shown in column 8 of Table I, application no. 2, preferably the coding region thereof, particularly a homolog or functional equivalent as shown in column 8 of Table I B, application no. 2, and being depicted in the same respective line as said Ybr160w, and preferably the activity is increased non-targeted, or
[11465] (b) a polypeptide comprising a polypeptide, a consensus sequence or at least a polypeptide motif as shown in the respective line in column 5 of Table II or in column 8 of Table IV, application no. 2, respectively, and being depicted in the same respective line as said Ybr160w, or a functional equivalent or a homolog thereof as depicted in column 8 of Table II, application no. 2, preferably a homolog or functional equivalent as depicted in column 8 of Table II B, application no. 2, and being depicted in the same respective line as said Ybr160w, and preferably the activity is increased non-targeted.

[11466] Accordingly, in one embodiment, the molecule which activity is to be increased in the process of the invention is the gene product with an activity as a “cell division control protein”, preferably it is the molecule of section (a) or (b) of this paragraph.

[11467] In particular, it was observed that in plants, especially in Arabidopsis thaliana, increasing or generating the activity of a gene product non-targeted with the activity of a “cell division control protein”, preferably being encoded by a gene comprising the nucleic acid sequence SEQ ID NO. 62717, preferably the coding region thereof, conferred the production of or the increase in proline compared with the wild type control.

[11468] The nucleic acid sequence of Yc1026c-a from Saccharomyces cerevisiae, e.g. as shown in the respective line in column 5 of Table I, application no. 2, has been published in Goffeau et al., Science 274 (5287), 546 (1996). And the activity of the gene product thereof is the activity of YCL026C-A-protein.

[11469] Accordingly, in one embodiment, the process of the present invention for producing proline in a non-human organism, like a microorganism or a plant or a part thereof, comprises increasing or generating the activity of a gene product with the activity of a gene product conferring the activity of “YCL026C-A-protein”, especially from Saccharomyces cerevisiae or its functional equivalent or its homolog, e.g. the increase of
[11470] (a) a gene product of a gene comprising the nucleic acid molecule as shown in the respective line in column 5 of Table I, application no. 2, preferably the coding region thereof, or a homolog or a fragment thereof, and being depicted in the same respective line as said Yc1026c-a, or a functional equivalent or a homolog thereof as shown in column 8 of Table I, application no. 2, preferably the coding region thereof, particularly a homolog or functional equivalent as shown in column 8 of Table I B, application no. 2, and being depicted in the same respective line as said Yc1026c-a, and preferably the activity is increased non-targeted, or
[11471] (b) a polypeptide comprising a polypeptide, a consensus sequence or at least a polypeptide motif as shown in the respective line in column 5 of Table II or in column 8 of Table IV, application no. 2, respectively, and being depicted in the same respective line as said Yc1026c-a, or a functional equivalent or a homolog thereof as depicted in column 8 of Table II, application no. 2, preferably a homolog or functional equivalent as depicted in column 8 of Table II B, application no. 2, and being depicted in the same respective line as said Yc1026c-a, and preferably the activity is increased non-targeted.

[11472] Accordingly, in one embodiment, the molecule which activity is to be increased in the process of the invention is the gene product with an activity as a “YCL026C-A-protein”, preferably it is the molecule of section (a) or (b) of this paragraph.

[11473] In particular, it was observed that in plants, especially in Arabidopsis thaliana, increasing or generating the activity of a gene product non-targeted with the activity of a “YCL026C-A-protein”, preferably being encoded by a gene comprising the nucleic acid sequence SEQ ID NO. 63167, preferably the coding region thereof, conferred the production of or the increase in proline compared with the wild type control.

[11474] The nucleic acid sequence of Ycr102c from Saccharomyces cerevisiae, e.g. as shown in the respective line in column 5 of Table I, application no. 2, has been published in Goffeau et al., Science 274 (5287), 546 (1996). And the activity of the gene product thereof is the activity of ycr102c-protein.

[11475] Accordingly, in one embodiment, the process of the present invention for producing arginine in a non-human organism, like a microorganism or a plant or a part thereof, comprises increasing or generating the activity of a gene product with the activity of a gene product conferring the activity of “ycr102c-protein”, especially from Saccharomyces cerevisiae or its functional equivalent or its homolog, e.g. the increase of
[11476] (a) a gene product of a gene comprising the nucleic acid molecule as shown in the respective line in column 5 of Table I, application no. 2, preferably the coding region thereof, or a homolog or a fragment thereof, and being depicted in the same respective line as said Ycr102c, or a functional equivalent or a homolog thereof as shown in column 8 of Table I, application no. 2, preferably the coding region thereof, particularly a homolog or functional equivalent as shown in column 8 of Table I B, application no. 2, and being depicted in the same respective line as said Ycr102c, and preferably the activity is increased plastidic, or
[11477] (b) a polypeptide comprising a polypeptide, a consensus sequence or at least a polypeptide motif as shown in the respective line in column 5 of Table II or in column 8 of Table IV, application no. 2, respectively, and being depicted in the same respective line as said Ycr102c, or a functional equivalent or a homolog thereof as depicted in column 8 of Table II, application no. 2, preferably a homolog or functional equivalent as depicted in column 8 of Table II B, application no. 2, and being depicted in the same respective line as said Ycr102c, and preferably the activity is increased plastidic.

[11478] Accordingly, in one embodiment, the molecule which activity is to be increased in the process of the invention is the gene product with an activity as a “ycr102c-protein”, preferably it is the molecule of section (a) or (b) of this paragraph.

[11479] In particular, it was observed that in plants, especially in Arabidopsis thaliana, increasing or generating the activity of a gene product plastidic with the activity of a “ycr102c-protein”, preferably being encoded by a gene comprising the nucleic acid sequence SEQ ID NO. 63264, preferably the coding region thereof, conferred the production of or the increase in arginine compared with the wild type control.

[11480] The nucleic acid sequence of Ydl168w from Saccharomyces cerevisiae, e.g. as shown in the respective line in column 5 of Table I, application no. 2, has been published in Goffeau et al., Science 274 (5287), 546 (1996). And the activity of the gene product thereof is the activity of protein kinase.

[11481] Accordingly, in one embodiment, the process of the present invention for producing proline in a non-human organism, like a microorganism or a plant or a part thereof, comprises increasing or generating the activity of a gene product with the activity of a gene product conferring the activity of “protein kinase”, especially from Saccharomyces cerevisiae or its functional equivalent or its homolog, e.g. the increase of
[11482] (a) a gene product of a gene comprising the nucleic acid molecule as shown in the respective line in column 5 of Table I, application no. 2, preferably the coding region thereof, or a homolog or a fragment thereof, and being depicted in the same respective line as said Ydl168w, or a functional equivalent or a homolog thereof as shown in column 8 of Table I, application no. 2, preferably the coding region thereof, particularly a homolog or functional equivalent as shown in column 8 of Table I B, application no. 2, and being depicted in the same respective line as said Ydl168w, and preferably the activity is increased plastidic, or
[11483] (b) a polypeptide comprising a polypeptide, a consensus sequence or at least a polypeptide motif as shown in the respective line in column 5 of Table II or in column 8 of Table IV, application no. 2, respectively, and being depicted in the same respective line as said Ydl168w, or a functional equivalent or a homolog thereof as depicted in column 8 of Table II, application no. 2, preferably a homolog or functional equivalent as depicted in column 8 of Table II B, application no. 2, and being depicted in the same respective line as said Ydl168w, and preferably the activity is increased plastidic.

[11484] Accordingly, in one embodiment, the molecule which activity is to be increased in the process of the invention is the gene product with an activity as a “protein kinase”, preferably it is the molecule of section (a) or (b) of this paragraph.

[11485] In particular, it was observed that in plants, especially in Arabidopsis thaliana, increasing or generating the activity of a gene product plastidic with the activity of a “protein kinase”, preferably being encoded by a gene comprising the nucleic acid sequence SEQ ID NO. 14302, preferably the coding region thereof, conferred the production of or the increase in proline compared with the wild type control.

[11486] The nucleic acid sequence of Ydr044w from Saccharomyces cerevisiae, e.g. as shown in the respective line in column 5 of Table I, application no. 2, has been published in Goffeau et al., Science 274 (5287), 546 (1996). And the activity of the gene product thereof is the activity of coproporphyrinogen III oxidase.

[11487] Accordingly, in one embodiment, the process of the present invention for producing proline in a non-human organism, like a microorganism or a plant or a part thereof, comprises increasing or generating the activity of a gene product with the activity of a gene product conferring the activity of “coproporphyrinogen III oxidase”, especially from Saccharomyces cerevisiae or its functional equivalent or its homolog, e.g. the increase of
[11488] (a) a gene product of a gene comprising the nucleic acid molecule as shown in the respective line in column 5 of Table I, application no. 2, preferably the coding region thereof, or a homolog or a fragment thereof, and being depicted in the same respective line as said Ydr044w, or a functional equivalent or a homolog thereof as shown in column 8 of Table I, application no. 2, preferably the coding region thereof, particularly a homolog or functional equivalent as shown in column 8 of Table I B, application no. 2, and being depicted in the same respective line as said Ydr044w, and preferably the activity is increased plastidic, or
[11489] (b) a polypeptide comprising a polypeptide, a consensus sequence or at least a polypeptide motif as shown in the respective line in column 5 of Table II or in column 8 of Table IV, application no. 2, respectively, and being depicted in the same respective line as said Ydr044w, or a functional equivalent or a homolog thereof as depicted in column 8 of Table II, application no. 2, preferably a homolog or functional equivalent as depicted in column 8 of Table II B, application no. 2, and being depicted in the same respective line as said Ydr044w, and preferably the activity is increased plastidic.

[11490] Accordingly, in one embodiment, the molecule which activity is to be increased in the process of the invention is the gene product with an activity as a “coproporphyrinogen III oxidase”, preferably it is the molecule of section (a) or (b) of this paragraph.

[11491] In particular, it was observed that in plants, especially in Arabidopsis thaliana, increasing or generating the activity of a gene product plastidic with the activity of a “coproporphyrinogen III oxidase”, preferably being encoded by a gene comprising the nucleic acid sequence SEQ ID NO. 63334, preferably the coding region thereof, conferred the production of or the increase in proline compared with the wild type control.

[11492] The nucleic acid sequence of Ydr046c from Saccharomyces cerevisiae, e.g. as shown in the respective line in column 5 of Table I, application no. 2, has been published in Goffeau et al., Science 274 (5287), 546 (1996). And the activity of the gene product thereof is the activity of branched-chain amino acid permease.

[11493] Accordingly, in one embodiment, the process of the present invention for producing proline in a non-human organism, like a microorganism or a plant or a part thereof, comprises increasing or generating the activity of a gene product with the activity of a gene product conferring the activity of “branched-chain amino acid permease”, especially from Saccharomyces cerevisiae or its functional equivalent or its homolog, e.g. the increase of
[11494] (a) a gene product of a gene comprising the nucleic acid molecule as shown in the respective line in column 5 of Table I, application no. 2, preferably the coding region thereof, or a homolog or a fragment thereof, and being depicted in the same respective line as said Ydr046c, or a functional equivalent or a homolog thereof as shown in column 8 of Table I, application no. 2, preferably the coding region thereof, particularly a homolog or functional equivalent as shown in column 8 of Table I B, application no. 2, and being depicted in the same respective line as said Ydr046c, and preferably the activity is increased plastidic, or
[11495] (b) a polypeptide comprising a polypeptide, a consensus sequence or at least a polypeptide motif as shown in the respective line in column 5 of Table II or in column 8 of Table IV, application no. 2, respectively, and being depicted in the same respective line as said Ydr046c, or a functional equivalent or a homolog thereof as depicted in column 8 of Table II, application no. 2, preferably a homolog or functional equivalent as depicted in column 8 of Table II B, application no. 2, and being depicted in the same respective line as said Ydr046c, and preferably the activity is increased plastidic.

[11496] Accordingly, in one embodiment, the molecule which activity is to be increased in the process of the invention is the gene product with an activity as a “branched-chain amino acid permease”, preferably it is the molecule of section (a) or (b) of this paragraph.

[11497] In particular, it was observed that in plants, especially in Arabidopsis thaliana, increasing or generating the activity of a gene product plastidic with the activity of a “branched-chain amino acid permease”, preferably being encoded by a gene comprising the nucleic acid sequence SEQ ID NO. 63544, preferably the coding region thereof, conferred the production of or the increase in proline compared with the wild type control.

[11498] The nucleic acid sequence of Ydr265w from Saccharomyces cerevisiae, e.g. as shown in the respective line in column 5 of Table I, application no. 2, has been published in Goffeau et al., Science 274 (5287), 546 (1996). And the activity of the gene product thereof is the activity of peroxisome assembly protein.

[11499] Accordingly, in one embodiment, the process of the present invention for producing arginine in a non-human organism, like a microorganism or a plant or a part thereof, comprises increasing or generating the activity of a gene product with the activity of a gene product conferring the activity of “peroxisome assembly protein”, especially from Saccharomyces cerevisiae or its functional equivalent or its homolog, e.g. the increase of
[11500] (a) a gene product of a gene comprising the nucleic acid molecule as shown in the respective line in column 5 of Table I, application no. 2, preferably the coding region thereof, or a homolog or a fragment thereof, and being depicted in the same respective line as said Ydr265w, or a functional equivalent or a homolog thereof as shown in column 8 of Table I, application no. 2, preferably the coding region thereof, particularly a homolog or functional equivalent as shown in column 8 of Table I B, application no. 2, and being depicted in the same respective line as said Ydr265w, and preferably the activity is increased plastidic, or
[11501] (b) a polypeptide comprising a polypeptide, a consensus sequence or at least a polypeptide motif as shown in the respective line in column 5 of Table II or in column 8 of Table IV, application no. 2, respectively, and being depicted in the same respective line as said Ydr265w, or a functional equivalent or a homolog thereof as depicted in column 8 of Table II, application no. 2, preferably a homolog or functional equivalent as depicted in column 8 of Table II B, application no. 2, and being depicted in the same respective line as said Ydr265w, and preferably the activity is increased plastidic.

[11502] Accordingly, in one embodiment, the molecule which activity is to be increased in the process of the invention is the gene product with an activity as a “peroxisome assembly protein”, preferably it is the molecule of section (a) or (b) of this paragraph.

[11503] In particular, it was observed that in plants, especially in Arabidopsis thaliana, increasing or generating the activity of a gene product plastidic with the activity of a “peroxisome assembly protein”, preferably being encoded by a gene comprising the nucleic acid sequence SEQ ID NO. 63665, preferably the coding region thereof, conferred the production of or the increase in arginine compared with the wild type control.

[11504] The nucleic acid sequence of Ydr338c from Saccharomyces cerevisiae, e.g. as shown in the respective line in column 5 of Table I, application no. 2, has been published in Goffeau et al., Science 274 (5287), 546 (1996). And the activity of the gene product thereof is the activity of ydr338c-protein.

[11505] Accordingly, in one embodiment, the process of the present invention for producing arginine in a non-human organism, like a microorganism or a plant or a part thereof, comprises increasing or generating the activity of a gene product with the activity of a gene product conferring the activity of “ydr338c-protein”, especially from Saccharomyces cerevisiae or its functional equivalent or its homolog, e.g. the increase of
[11506] (a) a gene product of a gene comprising the nucleic acid molecule as shown in the respective line in column 5 of Table I, application no. 2, preferably the coding region thereof, or a homolog or a fragment thereof, and being depicted in the same respective line as said Ydr338c, or a functional equivalent or a homolog thereof as shown in column 8 of Table I, application no. 2, preferably the coding region thereof, particularly a homolog or functional equivalent as shown in column 8 of Table I B, application no. 2, and being depicted in the same respective line as said Ydr338c, and preferably the activity is increased plastidic, or
[11507] (b) a polypeptide comprising a polypeptide, a consensus sequence or at least a polypeptide motif as shown in the respective line in column 5 of Table II or in column 8 of Table IV, application no. 2, respectively, and being depicted in the same respective line as said Ydr338c, or a functional equivalent or a homolog thereof as depicted in column 8 of Table II, application no. 2, preferably a homolog or functional equivalent as depicted in column 8 of Table II B, application no. 2, and being depicted in the same respective line as said Ydr338c, and preferably the activity is increased plastidic.

[11508] Accordingly, in one embodiment, the molecule which activity is to be increased in the process of the invention is the gene product with an activity as a “ydr338c-protein”, preferably it is the molecule of section (a) or (b) of this paragraph.

[11509] In particular, it was observed that in plants, especially in Arabidopsis thaliana, increasing or generating the activity of a gene product plastidic with the activity of a “ydr338c-protein”, preferably being encoded by a gene comprising the nucleic acid sequence SEQ ID NO. 63713, preferably the coding region thereof, conferred the production of or the increase in arginine compared with the wild type control.

[11510] The nucleic acid sequence of Yer014w from Saccharomyces cerevisiae, e.g. as shown in the respective line in column 5 of Table I, application no. 2, has been published in Goffeau et al., Science 274 (5287), 546 (1996). And the activity of the gene product thereof is the activity of yer014w-protein.

[11511] Accordingly, in one embodiment, the process of the present invention for producing glutamine in a non-human organism, like a microorganism or a plant or a part thereof, comprises increasing or generating the activity of a gene product with the activity of a gene product conferring the activity of “yer014w-protein”, especially from Saccharomyces cerevisiae or its functional equivalent or its homolog, e.g. the increase of
[11512] (a) a gene product of a gene comprising the nucleic acid molecule as shown in the respective line in column 5 of Table I, application no. 2, preferably the coding region thereof, or a homolog or a fragment thereof, and being depicted in the same respective line as said Yer014w, or a functional equivalent or a homolog thereof as shown in column 8 of Table I, application no. 2, preferably the coding region thereof, particularly a homolog or functional equivalent as shown in column 8 of Table I B, application no. 2, and being depicted in the same respective line as said Yer014w, and preferably the activity is increased plastidic, or
[11513] (b) a polypeptide comprising a polypeptide, a consensus sequence or at least a polypeptide motif as shown in the respective line in column 5 of Table II or in column 8 of Table IV, application no. 2, respectively, and being depicted in the same respective line as said Yer014w, or a functional equivalent or a homolog thereof as depicted in column 8 of Table II, application no. 2, preferably a homolog or functional equivalent as depicted in column 8 of Table II B, application no. 2, and being depicted in the same respective line as said Yer014w, and preferably the activity is increased plastidic.

[11514] Accordingly, in one embodiment, the molecule which activity is to be increased in the process of the invention is the gene product with an activity as a “yer014w-protein”, preferably it is the molecule of section (a) or (b) of this paragraph.

[11515] In particular, it was observed that in plants, especially in Arabidopsis thaliana, increasing or generating the activity of a gene product plastidic with the activity of a “yer014w-protein”, preferably being encoded by a gene comprising the nucleic acid sequence SEQ ID NO. 63745, preferably the coding region thereof, conferred the production of or the increase in glutamine compared with the wild type control.

[11516] The nucleic acid sequence of Yer106w from Saccharomyces cerevisiae, e.g. as shown in the respective line in column 5 of Table I, application no. 2, has been published in Goffeau et al., Science 274 (5287), 546 (1996). And the activity of the gene product thereof is the activity of yer106w-protein.

[11517] Accordingly, in one embodiment, the process of the present invention for producing glutamine in a non-human organism, like a microorganism or a plant or a part thereof, comprises increasing or generating the activity of a gene product with the activity of a gene product conferring the activity of “yer106w-protein”, especially from Saccharomyces cerevisiae or its functional equivalent or its homolog, e.g. the increase of
[11518] (a) a gene product of a gene comprising the nucleic acid molecule as shown in the respective line in column 5 of Table I, application no. 2, preferably the coding region thereof, or a homolog or a fragment thereof, and being depicted in the same respective line as said Yer106w, or a functional equivalent or a homolog thereof as shown in column 8 of Table I, application no. 2, preferably the coding region thereof, particularly a homolog or functional equivalent as shown in column 8 of Table I B, application no. 2, and being depicted in the same respective line as said Yer106w, and preferably the activity is increased plastidic, or
[11519] (b) a polypeptide comprising a polypeptide, a consensus sequence or at least a polypeptide motif as shown in the respective line in column 5 of Table II or in column 8 of Table IV, application no. 2, respectively, and being depicted in the same respective line as said Yer106w, or a functional equivalent or a homolog thereof as depicted in column 8 of Table II, application no. 2, preferably a homolog or functional equivalent as depicted in column 8 of Table II B, application no. 2, and being depicted in the same respective line as said Yer106w, and preferably the activity is increased plastidic.

[11520] Accordingly, in one embodiment, the molecule which activity is to be increased in the process of the invention is the gene product with an activity as a “yer106w-protein”, preferably it is the molecule of section (a) or (b) of this paragraph.

[11521] In particular, it was observed that in plants, especially in Arabidopsis thaliana, increasing or generating the activity of a gene product plastidic with the activity of a “yer106w-protein”, preferably being encoded by a gene comprising the nucleic acid sequence SEQ ID NO. 63803, preferably the coding region thereof, conferred the production of or the increase in glutamine compared with the wild type control.

[11522] The nucleic acid sequence of Yfl016c from Saccharomyces cerevisiae, e.g. as shown in the respective line in column 5 of Table I, application no. 2, has been published in Goffeau et al., Science 274 (5287), 546 (1996). And the activity of the gene product thereof is the activity of molecular chaperone portein.

[11523] Accordingly, in one embodiment, the process of the present invention for producing proline in a non-human organism, like a microorganism or a plant or a part thereof, comprises increasing or generating the activity of a gene product with the activity of a gene product conferring the activity of “molecular chaperone portein”, especially from Saccharomyces cerevisiae or its functional equivalent or its homolog, e.g. the increase of
[11524] (a) a gene product of a gene comprising the nucleic acid molecule as shown in the respective line in column 5 of Table I, application no. 2, preferably the coding region thereof, or a homolog or a fragment thereof, and being depicted in the same respective line as said Yfl016c, or a functional equivalent or a homolog thereof as shown in column 8 of Table I, application no. 2, preferably the coding region thereof, particularly a homolog or functional equivalent as shown in column 8 of Table I B, application no. 2, and being depicted in the same respective line as said Yfl016c, and preferably the activity is increased non-targeted, or
[11525] (b) a polypeptide comprising a polypeptide, a consensus sequence or at least a polypeptide motif as shown in the respective line in column 5 of Table II or in column 8 of Table IV, application no. 2, respectively, and being depicted in the same respective line as said Yfl016c, or a functional equivalent or a homolog thereof as depicted in column 8 of Table II, application no. 2, preferably a homolog or functional equivalent as depicted in column 8 of Table II B, application no. 2, and being depicted in the same respective line as said Yfl016c, and preferably the activity is increased non-targeted.

[11526] Accordingly, in one embodiment, the molecule which activity is to be increased in the process of the invention is the gene product with an activity as a “molecular chaperone portein”, preferably it is the molecule of section (a) or (b) of this paragraph. In particular, it was observed that in plants, especially in Arabidopsis thaliana, increasing or generating the activity of a gene product non-targeted with the activity of a “molecular chaperone portein”, preferably being encoded by a gene comprising the nucleic acid sequence SEQ ID NO. 63807, preferably the coding region thereof, conferred the production of or the increase in proline compared with the wild type control.

[11527] The nucleic acid sequence of Yfl019c from Saccharomyces cerevisiae, e.g. as shown in the respective line in column 5 of Table I, application no. 2, has been published in Goffeau et al., Science 274 (5287), 546 (1996). And the activity of the gene product thereof is the activity of YFL019C-protein.

[11528] Accordingly, in one embodiment, the process of the present invention for producing proline in a non-human organism, like a microorganism or a plant or a part thereof, comprises increasing or generating the activity of a gene product with the activity of a gene product conferring the activity of “YFL0190-protein”, especially from Saccharomyces cerevisiae or its functional equivalent or its homolog, e.g. the increase of
[11529] (a) a gene product of a gene comprising the nucleic acid molecule as shown in the respective line in column 5 of Table I, application no. 2, preferably the coding region thereof, or a homolog or a fragment thereof, and being depicted in the same respective line as said Yfl019c, or a functional equivalent or a homolog thereof as shown in column 8 of Table I, application no. 2, preferably the coding region thereof, particularly a homolog or functional equivalent as shown in column 8 of Table I B, application no. 2, and being depicted in the same respective line as said Yfl019c, and preferably the activity is increased non-targeted, or
[11530] (b) a polypeptide comprising a polypeptide, a consensus sequence or at least a polypeptide motif as shown in the respective line in column 5 of Table II or in column 8 of Table IV, application no. 2, respectively, and being depicted in the same respective line as said Yfl019c, or a functional equivalent or a homolog thereof as depicted in column 8 of Table II, application no. 2, preferably a homolog or functional equivalent as depicted in column 8 of Table II B, application no. 2, and being depicted in the same respective line as said Yfl019c, and preferably the activity is increased non-targeted.

[11531] Accordingly, in one embodiment, the molecule which activity is to be increased in the process of the invention is the gene product with an activity as a “YFL0190-protein”, preferably it is the molecule of section (a) or (b) of this paragraph.

[11532] In particular, it was observed that in plants, especially in Arabidopsis thaliana, increasing or generating the activity of a gene product non-targeted with the activity of a “YFL019C-protein”, preferably being encoded by a gene comprising the nucleic acid sequence SEQ ID NO. 64144, preferably the coding region thereof, conferred the production of or the increase in proline compared with the wild type control.

[11533] The nucleic acid sequence of Yfl054c from Saccharomyces cerevisiae, e.g. as shown in the respective line in column 5 of Table I, application no. 2, has been published in Goffeau et al., Science 274 (5287), 546 (1996). And the activity of the gene product thereof is the activity of yf1054c-protein.

[11534] Accordingly, in one embodiment, the process of the present invention for producing arginine in a non-human organism, like a microorganism or a plant or a part thereof, comprises increasing or generating the activity of a gene product with the activity of a gene product conferring the activity of “yf1054c-protein”, especially from Saccharomyces cerevisiae or its functional equivalent or its homolog, e.g. the increase of
[11535] (a) a gene product of a gene comprising the nucleic acid molecule as shown in the respective line in column 5 of Table I, application no. 2, preferably the coding region thereof, or a homolog or a fragment thereof, and being depicted in the same respective line as said Yfl054c, or a functional equivalent or a homolog thereof as shown in column 8 of Table I, application no. 2, preferably the coding region thereof, particularly a homolog or functional equivalent as shown in column 8 of Table I B, application no. 2, and being depicted in the same respective line as said Yfl054c, and preferably the activity is increased plastidic, or
[11536] (b) a polypeptide comprising a polypeptide, a consensus sequence or at least a polypeptide motif as shown in the respective line in column 5 of Table II or in column 8 of Table IV, application no. 2, respectively, and being depicted in the same respective line as said Yfl054c, or a functional equivalent or a homolog thereof as depicted in column 8 of Table II, application no. 2, preferably a homolog or functional equivalent as depicted in column 8 of Table II B, application no. 2, and being depicted in the same respective line as said

[11537] Yfl054c, and preferably the activity is increased plastidic.

[11538] Accordingly, in one embodiment, the molecule which activity is to be increased in the process of the invention is the gene product with an activity as a “yf1054c-protein”, preferably it is the molecule of section (a) or (b) of this paragraph.

[11539] In particular, it was observed that in plants, especially in Arabidopsis thaliana, increasing or generating the activity of a gene product plastidic with the activity of a “yf1054c-protein”, preferably being encoded by a gene comprising the nucleic acid sequence SEQ ID NO. 64148, preferably the coding region thereof, conferred the production of or the increase in arginine compared with the wild type control.

[11540] The nucleic acid sequence of Yfl054c from Saccharomyces cerevisiae, e.g. as shown in the respective line in column 5 of Table I, application no. 2, has been published in Goffeau et al., Science 274 (5287), 546 (1996). And the activity of the gene product thereof is the activity of yf1054c-protein.

[11541] Accordingly, in one embodiment, the process of the present invention for producing glutamine in a non-human organism, like a microorganism or a plant or a part thereof, comprises increasing or generating the activity of a gene product with the activity of a gene product conferring the activity of “yf1054c-protein”, especially from Saccharomyces cerevisiae or its functional equivalent or its homolog, e.g. the increase of
[11542] (a) a gene product of a gene comprising the nucleic acid molecule as shown in the respective line in column 5 of Table I, application no. 2, preferably the coding region thereof, or a homolog or a fragment thereof, and being depicted in the same respective line as said Yfl054c, or a functional equivalent or a homolog thereof as shown in column 8 of Table I, application no. 2, preferably the coding region thereof, particularly a homolog or functional equivalent as shown in column 8 of Table I B, application no. 2, and being depicted in the same respective line as said Yfl054c, and preferably the activity is increased plastidic, or
[11543] (b) a polypeptide comprising a polypeptide, a consensus sequence or at least a polypeptide motif as shown in the respective line in column 5 of Table II or in column 8 of Table IV, application no. 2, respectively, and being depicted in the same respective line as said Yfl054c, or a functional equivalent or a homolog thereof as depicted in column 8 of Table II, application no. 2, preferably a homolog or functional equivalent as depicted in column 8 of Table II B, application no. 2, and being depicted in the same respective line as said Yfl054c, and preferably the activity is increased plastidic.

[11544] Accordingly, in one embodiment, the molecule which activity is to be increased in the process of the invention is the gene product with an activity as a “yf1054c-protein”, preferably it is the molecule of section (a) or (b) of this paragraph.

[11545] In particular, it was observed that in plants, especially in Arabidopsis thaliana, increasing or generating the activity of a gene product plastidic with the activity of a “yf1054c-protein”, preferably being encoded by a gene comprising the nucleic acid sequence SEQ ID NO. 64148, preferably the coding region thereof, conferred the production of or the increase in glutamine compared with the wild type control.

[11546] The nucleic acid sequence of Yg1174w from Saccharomyces cerevisiae, e.g. as shown in the respective line in column 5 of Table I, application no. 2, has been published in Goffeau et al., Science 274 (5287), 546 (1996). And the activity of the gene product thereof is the activity of pre-mRNA-splicing factor.

[11547] Accordingly, in one embodiment, the process of the present invention for producing arginine in a non-human organism, like a microorganism or a plant or a part thereof, comprises increasing or generating the activity of a gene product with the activity of a gene product conferring the activity of “pre-mRNA-splicing factor”, especially from Saccharomyces cerevisiae or its functional equivalent or its homolog, e.g. the increase of
[11548] (a) a gene product of a gene comprising the nucleic acid molecule as shown in the respective line in column 5 of Table I, application no. 2, preferably the coding region thereof, or a homolog or a fragment thereof, and being depicted in the same respective line as said Yg1174w, or a functional equivalent or a homolog thereof as shown in column 8 of Table I, application no. 2, preferably the coding region thereof, particularly a homolog or functional equivalent as shown in column 8 of Table I B, application no. 2, and being depicted in the same respective line as said Yg1174w, and preferably the activity is increased plastidic, or
[11549] (b) a polypeptide comprising a polypeptide, a consensus sequence or at least a polypeptide motif as shown in the respective line in column 5 of Table II or in column 8 of Table IV, application no. 2, respectively, and being depicted in the same respective line as said Yg1174w, or a functional equivalent or a homolog thereof as depicted in column 8 of Table II, application no. 2, preferably a homolog or functional equivalent as depicted in column 8 of Table II B, application no. 2, and being depicted in the same respective line as said Yg1174w, and preferably the activity is increased plastidic.

[11550] Accordingly, in one embodiment, the molecule which activity is to be increased in the process of the invention is the gene product with an activity as a “pre-mRNA-splicing factor”, preferably it is the molecule of section (a) or (b) of this paragraph.

[11551] In particular, it was observed that in plants, especially in Arabidopsis thaliana, increasing or generating the activity of a gene product plastidic with the activity of a “pre-mRNA-splicing factor”, preferably being encoded by a gene comprising the nucleic acid sequence SEQ ID NO. 64157, preferably the coding region thereof, conferred the production of or the increase in arginine compared with the wild type control.

[11552] The nucleic acid sequence of Yg1237c from Saccharomyces cerevisiae, e.g. as shown in the respective line in column 5 of Table I, application no. 2, has been published in Goffeau et al., Science 274 (5287), 546 (1996). And the activity of the gene product thereof is the activity of yg1237c-protein.

[11553] Accordingly, in one embodiment, the process of the present invention for producing proline in a non-human organism, like a microorganism or a plant or a part thereof, comprises increasing or generating the activity of a gene product with the activity of a gene product conferring the activity of “yg1237c-protein”, especially from Saccharomyces cerevisiae or its functional equivalent or its homolog, e.g. the increase of
[11554] (a) a gene product of a gene comprising the nucleic acid molecule as shown in the respective line in column 5 of Table I, application no. 2, preferably the coding region thereof, or a homolog or a fragment thereof, and being depicted in the same respective line as said Yg1237c, or a functional equivalent or a homolog thereof as shown in column 8 of Table I, application no. 2, preferably the coding region thereof, particularly a homolog or functional equivalent as shown in column 8 of Table I B, application no. 2, and being depicted in the same respective line as said Yg1237c, and preferably the activity is increased non-targeted, or
[11555] (b) a polypeptide comprising a polypeptide, a consensus sequence or at least a polypeptide motif as shown in the respective line in column 5 of Table II or in column 8 of Table IV, application no. 2, respectively, and being depicted in the same respective line as said Yg1237c, or a functional equivalent or a homolog thereof as depicted in column 8 of Table II, application no. 2, preferably a homolog or functional equivalent as depicted in column 8 of Table II B, application no. 2, and being depicted in the same respective line as said Yg1237c, and preferably the activity is increased non-targeted,.

[11556] Accordingly, in one embodiment, the molecule which activity is to be increased in the process of the invention is the gene product with an activity as a “yg1237c-protein”, preferably it is the molecule of section (a) or (b) of this paragraph.

[11557] In particular, it was observed that in plants, especially in Arabidopsis thaliana, increasing or generating the activity of a gene product non-targeted with the activity of a “yg1237c-protein”, preferably being encoded by a gene comprising the nucleic acid sequence SEQ ID NO. 64177, preferably the coding region thereof, conferred the production of or the increase in proline compared with the wild type control.

[11558] The nucleic acid sequence of Ygr068c from Saccharomyces cerevisiae, e.g. as shown in the respective line in column 5 of Table I, application no. 2, has been published in Goffeau et al., Science 274 (5287), 546 (1996). And the activity of the gene product thereof is the activity of ygr068c-protein.

[11559] Accordingly, in one embodiment, the process of the present invention for producing glutamine in a non-human organism, like a microorganism or a plant or a part thereof, comprises increasing or generating the activity of a gene product with the activity of a gene product conferring the activity of “ygr068c-protein”, especially from Saccharomyces cerevisiae or its functional equivalent or its homolog, e.g. the increase of
[11560] (a) a gene product of a gene comprising the nucleic acid molecule as shown in the respective line in column 5 of Table I, application no. 2, preferably the coding region thereof, or a homolog or a fragment thereof, and being depicted in the same respective line as said Ygr068c, or a functional equivalent or a homolog thereof as shown in column 8 of Table I, application no. 2, preferably the coding region thereof, particularly a homolog or functional equivalent as shown in column 8 of Table I B, application no. 2, and being depicted in the same respective line as said Ygr068c, and preferably the activity is increased plastidic, or
[11561] (b) a polypeptide comprising a polypeptide, a consensus sequence or at least a polypeptide motif as shown in the respective line in column 5 of Table II or in column 8 of Table IV, application no. 2, respectively, and being depicted in the same respective line as said Ygr068c, or a functional equivalent or a homolog thereof as depicted in column 8 of Table II, application no. 2, preferably a homolog or functional equivalent as depicted in column 8 of Table II B, application no. 2, and being depicted in the same respective line as said Ygr068c, and preferably the activity is increased plastidic.

[11562] Accordingly, in one embodiment, the molecule which activity is to be increased in the process of the invention is the gene product with an activity as a “ygr068c-protein”, preferably it is the molecule of section (a) or (b) of this paragraph.

[11563] In particular, it was observed that in plants, especially in Arabidopsis thaliana, increasing or generating the activity of a gene product plastidic with the activity of a “ygr068c-protein”, preferably being encoded by a gene comprising the nucleic acid sequence SEQ ID NO. 64198, preferably the coding region thereof, conferred the production of or the increase in glutamine compared with the wild type control.

[11564] The nucleic acid sequence of Ygr175c from Saccharomyces cerevisiae, e.g. as shown in the respective line in column 5 of Table I, application no. 2, has been published in Goffeau et al., Science 274 (5287), 546 (1996). And the activity of the gene product thereof is the activity of squalene monooxygenase.

[11565] Accordingly, in one embodiment, the process of the present invention for producing proline in a non-human organism, like a microorganism or a plant or a part thereof, comprises increasing or generating the activity of a gene product with the activity of a gene product conferring the activity of “squalene monooxygenase”, especially from Saccharomyces cerevisiae or its functional equivalent or its homolog, e.g. the increase of
[11566] (a) a gene product of a gene comprising the nucleic acid molecule as shown in the respective line in column 5 of Table I, application no. 2, preferably the coding region thereof, or a homolog or a fragment thereof, and being depicted in the same respective line as said Ygr175c, or a functional equivalent or a homolog thereof as shown in column 8 of Table I, application no. 2, preferably the coding region thereof, particularly a homolog or functional equivalent as shown in column 8 of Table I B, application no. 2, and being depicted in the same respective line as said Ygr175c, and preferably the activity is increased plastidic, or
[11567] (b) a polypeptide comprising a polypeptide, a consensus sequence or at least a polypeptide motif as shown in the respective line in column 5 of Table II or in column 8 of Table IV, application no. 2, respectively, and being depicted in the same respective line as said Ygr175c, or a functional equivalent or a homolog thereof as depicted in column 8 of Table II, application no. 2, preferably a homolog or functional equivalent as depicted in column 8 of Table II B, application no. 2, and being depicted in the same respective line as said Ygr175c, and preferably the activity is increased plastidic.

[11568] Accordingly, in one embodiment, the molecule which activity is to be increased in the process of the invention is the gene product with an activity as a “squalene monooxygenase”, preferably it is the molecule of section (a) or (b) of this paragraph.

[11569] In particular, it was observed that in plants, especially in Arabidopsis thaliana, increasing or generating the activity of a gene product plastidic with the activity of a “squalene monooxygenase”, preferably being encoded by a gene comprising the nucleic acid sequence SEQ ID NO. 64218, preferably the coding region thereof, conferred the production of or the increase in proline compared with the wild type control.

[11570] The nucleic acid sequence of Ygr221c from Saccharomyces cerevisiae, e.g. as shown in the respective line in column 5 of Table I, application no. 2, has been published in Goffeau et al., Science 274 (5287), 546 (1996). And the activity of the gene product thereof is the activity of ygr221c-protein.

[11571] Accordingly, in one embodiment, the process of the present invention for producing glutamate in a non-human organism, like a microorganism or a plant or a part thereof, comprises increasing or generating the activity of a gene product with the activity of a gene product conferring the activity of “ygr221c-protein”, especially from Saccharomyces cerevisiae or its functional equivalent or its homolog, e.g. the increase of
[11572] (a) a gene product of a gene comprising the nucleic acid molecule as shown in the respective line in column 5 of Table I, application no. 2, preferably the coding region thereof, or a homolog or a fragment thereof, and being depicted in the same respective line as said Ygr221c, or a functional equivalent or a homolog thereof as shown in column 8 of Table I, application no. 2, preferably the coding region thereof, particularly a homolog or functional equivalent as shown in column 8 of Table I B, application no. 2, and being depicted in the same respective line as said Ygr221c, and preferably the activity is increased plastidic, or
[11573] (b) a polypeptide comprising a polypeptide, a consensus sequence or at least a polypeptide motif as shown in the respective line in column 5 of Table II or in column 8 of Table IV, application no. 2, respectively, and being depicted in the same respective line as said Ygr221c, or a functional equivalent or a homolog thereof as depicted in column 8 of Table II, application no. 2, preferably a homolog or functional equivalent as depicted in column 8 of Table II B, application no. 2, and being depicted in the same respective line as said Ygr221c, and preferably the activity is increased plastidic.

[11574] Accordingly, in one embodiment, the molecule which activity is to be increased in the process of the invention is the gene product with an activity as a “ygr221c-protein”, preferably it is the molecule of section (a) or (b) of this paragraph.

[11575] In particular, it was observed that in plants, especially in Arabidopsis thaliana, increasing or generating the activity of a gene product plastidic with the activity of a “ygr221c-protein”, preferably being encoded by a gene comprising the nucleic acid sequence SEQ ID NO. 64315, preferably the coding region thereof, conferred the production of or the increase in glutamate compared with the wild type control.

[11576] The nucleic acid sequence of Ygr221c from Saccharomyces cerevisiae, e.g. as shown in the respective line in column 5 of Table I, application no. 2, has been published in Goffeau et al., Science 274 (5287), 546 (1996). And the activity of the gene product thereof is the activity of ygr221c-protein.

[11577] Accordingly, in one embodiment, the process of the present invention for producing glutamine in a non-human organism, like a microorganism or a plant or a part thereof, comprises increasing or generating the activity of a gene product with the activity of a gene product conferring the activity of “ygr221c-protein”, especially from Saccharomyces cerevisiae or its functional equivalent or its homolog, e.g. the increase of
[11578] (a) a gene product of a gene comprising the nucleic acid molecule as shown in the respective line in column 5 of Table I, application no. 2, preferably the coding region thereof, or a homolog or a fragment thereof, and being depicted in the same respective line as said Ygr221c, or a functional equivalent or a homolog thereof as shown in column 8 of Table I, application no. 2, preferably the coding region thereof, particularly a homolog or functional equivalent as shown in column 8 of Table I B, application no. 2, and being depicted in the same respective line as said Ygr221c, and preferably the activity is increased plastidic, or
[11579] (b) a polypeptide comprising a polypeptide, a consensus sequence or at least a polypeptide motif as shown in the respective line in column 5 of Table II or in column 8 of Table IV, application no. 2, respectively, and being depicted in the same respective line as said Ygr221c, or a functional equivalent or a homolog thereof as depicted in column 8 of Table II, application no. 2, preferably a homolog or functional equivalent as depicted in column 8 of Table II B, application no. 2, and being depicted in the same respective line as said Ygr221c, and preferably the activity is increased plastidic.

[11580] Accordingly, in one embodiment, the molecule which activity is to be increased in the process of the invention is the gene product with an activity as a “ygr221c-protein”, preferably it is the molecule of section (a) or (b) of this paragraph.

[11581] In particular, it was observed that in plants, especially in Arabidopsis thaliana, increasing or generating the activity of a gene product plastidic with the activity of a “ygr221c-protein”, preferably being encoded by a gene comprising the nucleic acid sequence SEQ ID NO. 64315, preferably the coding region thereof, conferred the production of or the increase in glutamine compared with the wild type control.

[11582] The nucleic acid sequence of Yhl013c from Saccharomyces cerevisiae, e.g. as shown in the respective line in column 5 of Table I, application no. 2, has been published in Goffeau et al., Science 274 (5287), 546 (1996). And the activity of the gene product thereof is the activity of yhl013c-protein.

[11583] Accordingly, in one embodiment, the process of the present invention for producing proline in a non-human organism, like a microorganism or a plant or a part thereof, comprises increasing or generating the activity of a gene product with the activity of a gene product conferring the activity of “yhl013c-protein”, especially from Saccharomyces cerevisiae or its functional equivalent or its homolog, e.g. the increase of
[11584] (a) a gene product of a gene comprising the nucleic acid molecule as shown in the respective line in column 5 of Table I, application no. 2, preferably the coding region thereof, or a homolog or a fragment thereof, and being depicted in the same respective line as said Yhl013c, or a functional equivalent or a homolog thereof as shown in column 8 of Table I, application no. 2, preferably the coding region thereof, particularly a homolog or functional equivalent as shown in column 8 of Table I B, application no. 2, and being depicted in the same respective line as said Yhl013c, and preferably the activity is increased plastidic, or
[11585] (b) a polypeptide comprising a polypeptide, a consensus sequence or at least a polypeptide motif as shown in the respective line in column 5 of Table II or in column 8 of Table IV, application no. 2, respectively, and being depicted in the same respective line as said Yhl013c, or a functional equivalent or a homolog thereof as depicted in column 8 of Table II, application no. 2, preferably a homolog or functional equivalent as depicted in column 8 of Table II B, application no. 2, and being depicted in the same respective line as said Yhl013c, and preferably the activity is increased plastidic.

[11586] Accordingly, in one embodiment, the molecule which activity is to be increased in the process of the invention is the gene product with an activity as a “yhl013c-protein”, preferably it is the molecule of section (a) or (b) of this paragraph.

[11587] In particular, it was observed that in plants, especially in Arabidopsis thaliana, increasing or generating the activity of a gene product plastidic with the activity of a “yhl013c-protein”, preferably being encoded by a gene comprising the nucleic acid sequence SEQ ID NO. 14715, preferably the coding region thereof, conferred the production of or the increase in proline compared with the wild type control.

[11588] The nucleic acid sequence of Yhr024c from Saccharomyces cerevisiae, e.g. as shown in the respective line in column 5 of Table I, application no. 2, has been published in Goffeau et al., Science 274 (5287), 546 (1996). And the activity of the gene product thereof is the activity of mitochondrial processing protease.

[11589] Accordingly, in one embodiment, the process of the present invention for producing arginine in a non-human organism, like a microorganism or a plant or a part thereof, comprises increasing or generating the activity of a gene product with the activity of a gene product conferring the activity of “mitochondrial processing protease”, especially from Saccharomyces cerevisiae or its functional equivalent or its homolog, e.g. the increase of
[11590] (a) a gene product of a gene comprising the nucleic acid molecule as shown in the respective line in column 5 of Table I, application no. 2, preferably the coding region thereof, or a homolog or a fragment thereof, and being depicted in the same respective line as said Yhr024c, or a functional equivalent or a homolog thereof as shown in column 8 of Table I, application no. 2, preferably the coding region thereof, particularly a homolog or functional equivalent as shown in column 8 of Table I B, application no. 2, and being depicted in the same respective line as said Yhr024c, and preferably the activity is increased plastidic, or
[11591] (b) a polypeptide comprising a polypeptide, a consensus sequence or at least a polypeptide motif as shown in the respective line in column 5 of Table II or in column 8 of Table IV, application no. 2, respectively, and being depicted in the same respective line as said Yhr024c, or a functional equivalent or a homolog thereof as depicted in column 8 of Table II, application no. 2, preferably a homolog or functional equivalent as depicted in column 8 of Table II B, application no. 2, and being depicted in the same respective line as said Yhr024c, and preferably the activity is increased plastidic.

[11592] Accordingly, in one embodiment, the molecule which activity is to be increased in the process of the invention is the gene product with an activity as a “mitochondrial processing protease”, preferably it is the molecule of section (a) or (b) of this paragraph.

[11593] In particular, it was observed that in plants, especially in Arabidopsis thaliana, increasing or generating the activity of a gene product plastidic with the activity of a “mitochondrial processing protease”, preferably being encoded by a gene comprising the nucleic acid sequence SEQ ID NO. 64336, preferably the coding region thereof, conferred the production of or the increase in arginine compared with the wild type control.

[11594] The nucleic acid sequence of Yhr072w-a from Saccharomyces cerevisiae, e.g. as shown in the respective line in column 5 of Table I, application no. 2, has been published in Goffeau et al., Science 274 (5287), 546 (1996). And the activity of the gene product thereof is the activity of H/ACA ribonucleoprotein complex subunit 3.

[11595] Accordingly, in one embodiment, the process of the present invention for producing proline in a non-human organism, like a microorganism or a plant or a part thereof, comprises increasing or generating the activity of a gene product with the activity of a gene product conferring the activity of “H/ACA ribonucleoprotein complex subunit 3”, especially from Saccharomyces cerevisiae or its functional equivalent or its homolog, e.g. the increase of
[11596] (a) a gene product of a gene comprising the nucleic acid molecule as shown in the respective line in column 5 of Table I, application no. 2, preferably the coding region thereof, or a homolog or a fragment thereof, and being depicted in the same respective line as said Yhr072w-a, or a functional equivalent or a homolog thereof as shown in column 8 of Table I, application no. 2, preferably the coding region thereof, particularly a homolog or functional equivalent as shown in column 8 of Table I B, application no. 2, and being depicted in the same respective line as said Yhr072w-a, and preferably the activity is increased non-targeted, or
[11597] (b) a polypeptide comprising a polypeptide, a consensus sequence or at least a polypeptide motif as shown in the respective line in column 5 of Table II or in column 8 of Table IV, application no. 2, respectively, and being depicted in the same respective line as said Yhr072w-a, or a functional equivalent or a homolog thereof as depicted in column 8 of Table II, application no. 2, preferably a homolog or functional equivalent as depicted in column 8 of Table II B, application no. 2, and being depicted in the same respective line as said Yhr072w-a, and preferably the activity is increased non-targeted.

[11598] Accordingly, in one embodiment, the molecule which activity is to be increased in the process of the invention is the gene product with an activity as a “H/ACA ribonucleoprotein complex subunit 3”, preferably it is the molecule of section (a) or (b) of this paragraph.

[11599] In particular, it was observed that in plants, especially in Arabidopsis thaliana, increasing or generating the activity of a gene product non-targeted with the activity of a “H/ACA ribonucleoprotein complex subunit 3”, preferably being encoded by a gene comprising the nucleic acid sequence SEQ ID NO. 64470, preferably the coding region thereof, conferred the production of or the increase in proline compared with the wild type control.

[11600] The nucleic acid sequence of Yhr207c from Saccharomyces cerevisiae, e.g. as shown in the respective line in column 5 of Table I, application no. 2, has been published in Goffeau et al., Science 274 (5287), 546 (1996). And the activity of the gene product thereof is the activity of yhr207c-protein.

[11601] Accordingly, in one embodiment, the process of the present invention for producing glutamate in a non-human organism, like a microorganism or a plant or a part thereof, comprises increasing or generating the activity of a gene product with the activity of a gene product conferring the activity of “yhr207c-protein”, especially from Saccharomyces cerevisiae or its functional equivalent or its homolog, e.g. the increase of
[11602] (a) a gene product of a gene comprising the nucleic acid molecule as shown in the respective line in column 5 of Table I, application no. 2, preferably the coding region thereof, or a homolog or a fragment thereof, and being depicted in the same respective line as said Yhr207c, or a functional equivalent or a homolog thereof as shown in column 8 of Table I, application no. 2, preferably the coding region thereof, particularly a homolog or functional equivalent as shown in column 8 of Table I B, application no. 2, and being depicted in the same respective line as said Yhr207c, and preferably the activity is increased plastidic, or
[11603] (b) a polypeptide comprising a polypeptide, a consensus sequence or at least a polypeptide motif as shown in the respective line in column 5 of Table II or in column 8 of Table IV, application no. 2, respectively, and being depicted in the same respective line as said Yhr207c, or a functional equivalent or a homolog thereof as depicted in column 8 of Table II, application no. 2, preferably a homolog or functional equivalent as depicted in column 8 of Table II B, application no. 2, and being depicted in the same respective line as said Yhr207c, and preferably the activity is increased plastidic.

[11604] Accordingly, in one embodiment, the molecule which activity is to be increased in the process of the invention is the gene product with an activity as a “yhr207c-protein”, preferably it is the molecule of section (a) or (b) of this paragraph.

[11605] In particular, it was observed that in plants, especially in Arabidopsis thaliana, increasing or generating the activity of a gene product plastidic with the activity of a “yhr207c-protein”, preferably being encoded by a gene comprising the nucleic acid sequence SEQ ID NO. 64546, preferably the coding region thereof, conferred the production of or the increase in glutamate compared with the wild type control.

[11606] The nucleic acid sequence of Yil074c from Saccharomyces cerevisiae, e.g. as shown in the respective line in column 5 of Table I, application no. 2, has been published in Goffeau et al., Science 274 (5287), 546 (1996). And the activity of the gene product thereof is the activity of 3-phosphoglycerate dehydrogenase.

[11607] Accordingly, in one embodiment, the process of the present invention for producing arginine in a non-human organism, like a microorganism or a plant or a part thereof, comprises increasing or generating the activity of a gene product with the activity of a gene product conferring the activity of “3-phosphoglycerate dehydrogenase”, especially from Saccharomyces cerevisiae or its functional equivalent or its homolog, e.g. the increase of
[11608] (a) a gene product of a gene comprising the nucleic acid molecule as shown in the respective line in column 5 of Table I, application no. 2, preferably the coding region thereof, or a homolog or a fragment thereof, and being depicted in the same respective line as said Yil074c, or a functional equivalent or a homolog thereof as shown in column 8 of Table I, application no. 2, preferably the coding region thereof, particularly a homolog or functional equivalent as shown in column 8 of Table I B, application no. 2, and being depicted in the same respective line as said Yil074c, and preferably the activity is increased plastidic, or
[11609] (b) a polypeptide comprising a polypeptide, a consensus sequence or at least a polypeptide motif as shown in the respective line in column 5 of Table II or in column 8 of Table IV, application no. 2, respectively, and being depicted in the same respective line as said Yil074c, or a functional equivalent or a homolog thereof as depicted in column 8 of Table II, application no. 2, preferably a homolog or functional equivalent as depicted in column 8 of Table II B, application no. 2, and being depicted in the same respective line as said Yil074c, and preferably the activity is increased plastidic.

[11610] Accordingly, in one embodiment, the molecule which activity is to be increased in the process of the invention is the gene product with an activity as a “3-phosphoglycerate dehydrogenase”, preferably it is the molecule of section (a) or (b) of this paragraph.

[11611] In particular, it was observed that in plants, especially in Arabidopsis thaliana, increasing or generating the activity of a gene product plastidic with the activity of a “3-phosphoglycerate dehydrogenase”, preferably being encoded by a gene comprising the nucleic acid sequence SEQ ID NO. 64563, preferably the coding region thereof, conferred the production of or the increase in arginine compared with the wild type control.

[11612] The nucleic acid sequence of Yir027c from Saccharomyces cerevisiae, e.g. as shown in the respective line in column 5 of Table I, application no. 2, has been published in Goffeau et al., Science 274 (5287), 546 (1996). And the activity of the gene product thereof is the activity of allantoinase.

[11613] Accordingly, in one embodiment, the process of the present invention for producing proline in a non-human organism, like a microorganism or a plant or a part thereof, comprises increasing or generating the activity of a gene product with the activity of a gene product conferring the activity of “allantoinase”, especially from Saccharomyces cerevisiae or its functional equivalent or its homolog, e.g. the increase of
[11614] (a) a gene product of a gene comprising the nucleic acid molecule as shown in the respective line in column 5 of Table I, application no. 2, preferably the coding region thereof, or a homolog or a fragment thereof, and being depicted in the same respective line as said Yir027c, or a functional equivalent or a homolog thereof as shown in column 8 of Table I, application no. 2, preferably the coding region thereof, particularly a homolog or functional equivalent as shown in column 8 of Table I B, application no. 2, and being depicted in the same respective line as said Yir027c, and preferably the activity is increased plastidic, or
[11615] (b) a polypeptide comprising a polypeptide, a consensus sequence or at least a polypeptide motif as shown in the respective line in column 5 of Table II or in column 8 of Table IV, application no. 2, respectively, and being depicted in the same respective line as said Yir027c, or a functional equivalent or a homolog thereof as depicted in column 8 of Table II, application no. 2, preferably a homolog or functional equivalent as depicted in column 8 of Table II B, application no. 2, and being depicted in the same respective line as said Yir027c, and preferably the activity is increased plastidic.

[11616] Accordingly, in one embodiment, the molecule which activity is to be increased in the process of the invention is the gene product with an activity as a “allantoinase”, preferably it is the molecule of section (a) or (b) of this paragraph.

[11617] In particular, it was observed that in plants, especially in Arabidopsis thaliana, increasing or generating the activity of a gene product plastidic with the activity of a “allantoinase”, preferably being encoded by a gene comprising the nucleic acid sequence SEQ ID NO. 64773, preferably the coding region thereof, conferred the production of or the increase in proline compared with the wild type control.

[11618] The nucleic acid sequence of Yir029w from Saccharomyces cerevisiae, e.g. as shown in the respective line in column 5 of Table I, application no. 2, has been published in Goffeau et al., Science 274 (5287), 546 (1996). And the activity of the gene product thereof is the activity of allantoicase.

[11619] Accordingly, in one embodiment, the process of the present invention for producing arginine in a non-human organism, like a microorganism or a plant or a part thereof, comprises increasing or generating the activity of a gene product with the activity of a gene product conferring the activity of “allantoicase”, especially from Saccharomyces cerevisiae or its functional equivalent or its homolog, e.g. the increase of
[11620] (a) a gene product of a gene comprising the nucleic acid molecule as shown in the respective line in column 5 of Table I, application no. 2, preferably the coding region thereof, or a homolog or a fragment thereof, and being depicted in the same respective line as said Yir029w, or a functional equivalent or a homolog thereof as shown in column 8 of Table I, application no. 2, preferably the coding region thereof, particularly a homolog or functional equivalent as shown in column 8 of Table I B, application no. 2, and being depicted in the same respective line as said Yir029w, and preferably the activity is increased plastidic, or
[11621] (b) a polypeptide comprising a polypeptide, a consensus sequence or at least a polypeptide motif as shown in the respective line in column 5 of Table II or in column 8 of Table IV, application no. 2, respectively, and being depicted in the same respective line as said Yir029w, or a functional equivalent or a homolog thereof as depicted in column 8 of Table II, application no. 2, preferably a homolog or functional equivalent as depicted in column 8 of Table II B, application no. 2, and being depicted in the same respective line as said Yir029w, and preferably the activity is increased plastidic.

[11622] Accordingly, in one embodiment, the molecule which activity is to be increased in the process of the invention is the gene product with an activity as a “allantoicase”, preferably it is the molecule of section (a) or (b) of this paragraph.

[11623] In particular, it was observed that in plants, especially in Arabidopsis thaliana, increasing or generating the activity of a gene product plastidic with the activity of a “allantoicase”, preferably being encoded by a gene comprising the nucleic acid sequence SEQ ID NO. 64894, preferably the coding region thereof, conferred the production of or the increase in arginine compared with the wild type control.

[11624] The nucleic acid sequence of Yjl073w from Saccharomyces cerevisiae, e.g. as shown in the respective line in column 5 of Table I, application no. 2, has been published in Goffeau et al., Science 274 (5287), 546 (1996). And the activity of the gene product thereof is the activity of DnaJ-like chaperone.

[11625] Accordingly, in one embodiment, the process of the present invention for producing glutamine in a non-human organism, like a microorganism or a plant or a part thereof, comprises increasing or generating the activity of a gene product with the activity of a gene product conferring the activity of “DnaJ-like chaperone”, especially from Saccharomyces cerevisiae or its functional equivalent or its homolog, e.g. the increase of
[11626] (a) a gene product of a gene comprising the nucleic acid molecule as shown in the respective line in column 5 of Table I, application no. 2, preferably the coding region thereof, or a homolog or a fragment thereof, and being depicted in the same respective line as said Yjl073w, or a functional equivalent or a homolog thereof as shown in column 8 of Table I, application no. 2, preferably the coding region thereof, particularly a homolog or functional equivalent as shown in column 8 of Table I B, application no. 2, and being depicted in the same respective line as said Yjl073w, and preferably the activity is increased plastidic, or
[11627] (b) a polypeptide comprising a polypeptide, a consensus sequence or at least a polypeptide motif as shown in the respective line in column 5 of Table II or in column 8 of Table IV, application no. 2, respectively, and being depicted in the same respective line as said Yjl073w, or a functional equivalent or a homolog thereof as depicted in column 8 of Table II, application no. 2, preferably a homolog or functional equivalent as depicted in column 8 of Table II B, application no. 2, and being depicted in the same respective line as said Yjl073w, and preferably the activity is increased plastidic.

[11628] Accordingly, in one embodiment, the molecule which activity is to be increased in the process of the invention is the gene product with an activity as a “DnaJ-like chaperone”, preferably it is the molecule of section (a) or (b) of this paragraph.

[11629] In particular, it was observed that in plants, especially in Arabidopsis thaliana, increasing or generating the activity of a gene product plastidic with the activity of a “DnaJ-like chaperone”, preferably being encoded by a gene comprising the nucleic acid sequence SEQ ID NO. 64964, preferably the coding region thereof, conferred the production of or the increase in glutamine compared with the wild type control.

[11630] The nucleic acid sequence of Yjl088w from Saccharomyces cerevisiae, e.g. as shown in the respective line in column 5 of Table I, application no. 2, has been published in Goffeau et al., Science 274 (5287), 546 (1996). And the activity of the gene product thereof is the activity of ornithine carbamoyltransferase.

[11631] Accordingly, in one embodiment, the process of the present invention for producing arginine in a non-human organism, like a microorganism or a plant or a part thereof, comprises increasing or generating the activity of a gene product with the activity of a gene product conferring the activity of “ornithine carbamoyltransferase”, especially from Saccharomyces cerevisiae or its functional equivalent or its homolog, e.g. the increase of
[11632] (a) a gene product of a gene comprising the nucleic acid molecule as shown in the respective line in column 5 of Table I, application no. 2, preferably the coding region thereof, or a homolog or a fragment thereof, and being depicted in the same respective line as said Yjl088w, or a functional equivalent or a homolog thereof as shown in column 8 of Table I, application no. 2, preferably the coding region thereof, particularly a homolog or functional equivalent as shown in column 8 of Table I B, application no. 2, and being depicted in the same respective line as said Yjl088w, and preferably the activity is increased non-targeted, or
[11633] (b) a polypeptide comprising a polypeptide, a consensus sequence or at least a polypeptide motif as shown in the respective line in column 5 of Table II or in column 8 of Table IV, application no. 2, respectively, and being depicted in the same respective line as said Yjl088w, or a functional equivalent or a homolog thereof as depicted in column 8 of Table II, application no. 2, preferably a homolog or functional equivalent as depicted in column 8 of Table II B, application no. 2, and being depicted in the same respective line as said Yjl088w, and preferably the activity is increased non-targeted.

[11634] Accordingly, in one embodiment, the molecule which activity is to be increased in the process of the invention is the gene product with an activity as a “ornithine carbamoyltransferase”, preferably it is the molecule of section (a) or (b) of this paragraph.

[11635] In particular, it was observed that in plants, especially in Arabidopsis thaliana, increasing or generating the activity of a gene product non-targeted with the activity of a “ornithine carbamoyltransferase”, preferably being encoded by a gene comprising the nucleic acid sequence SEQ ID NO. 64975, preferably the coding region thereof, conferred the production of or the increase in arginine compared with the wild type control.

[11636] The nucleic acid sequence of Yjl129c from Saccharomyces cerevisiae, e.g. as shown in the respective line in column 5 of Table I, application no. 2, has been published in Goffeau et al., Science 274 (5287), 546 (1996). And the activity of the gene product thereof is the activity of potassium transport protein.

[11637] Accordingly, in one embodiment, the process of the present invention for producing proline in a non-human organism, like a microorganism or a plant or a part thereof, comprises increasing or generating the activity of a gene product with the activity of a gene product conferring the activity of “potassium transport protein”, especially from Saccharomyces cerevisiae or its functional equivalent or its homolog, e.g. the increase of
[11638] (a) a gene product of a gene comprising the nucleic acid molecule as shown in the respective line in column 5 of Table I, application no. 2, preferably the coding region thereof, or a homolog or a fragment thereof, and being depicted in the same respective line as said Yjl129c, or a functional equivalent or a homolog thereof as shown in column 8 of Table I, application no. 2, preferably the coding region thereof, particularly a homolog or functional equivalent as shown in column 8 of Table I B, application no. 2, and being depicted in the same respective line as said Yjl129c, and preferably the activity is increased plastidic, or
[11639] (b) a polypeptide comprising a polypeptide, a consensus sequence or at least a polypeptide motif as shown in the respective line in column 5 of Table II or in column 8 of Table IV, application no. 2, respectively, and being depicted in the same respective line as said Yjl129c, or a functional equivalent or a homolog thereof as depicted in column 8 of Table II, application no. 2, preferably a homolog or functional equivalent as depicted in column 8 of Table II B, application no. 2, and being depicted in the same respective line as said Yjl129c, and preferably the activity is increased plastidic.

[11640] Accordingly, in one embodiment, the molecule which activity is to be increased in the process of the invention is the gene product with an activity as a “potassium transport protein”, preferably it is the molecule of section (a) or (b) of this paragraph.

[11641] In particular, it was observed that in plants, especially in Arabidopsis thaliana, increasing or generating the activity of a gene product plastidic with the activity of a “potassium transport protein”, preferably being encoded by a gene comprising the nucleic acid sequence SEQ ID NO. 65181, preferably the coding region thereof, conferred the production of or the increase in proline compared with the wild type control.

[11642] The nucleic acid sequence of Yjl137c from Saccharomyces cerevisiae, e.g. as shown in the respective line in column 5 of Table I, application no. 2, has been published in Goffeau et al., Science 274 (5287), 546 (1996). And the activity of the gene product thereof is the activity of glycogenin.

[11643] Accordingly, in one embodiment, the process of the present invention for producing arginine in a non-human organism, like a microorganism or a plant or a part thereof, comprises increasing or generating the activity of a gene product with the activity of a gene product conferring the activity of “glycogenin”, especially from Saccharomyces cerevisiae or its functional equivalent or its homolog, e.g. the increase of
[11644] (a) a gene product of a gene comprising the nucleic acid molecule as shown in the respective line in column 5 of Table I, application no. 2, preferably the coding region thereof, or a homolog or a fragment thereof, and being depicted in the same respective line as said YjI137c, or a functional equivalent or a homolog thereof as shown in column 8 of Table I, application no. 2, preferably the coding region thereof, particularly a homolog or functional equivalent as shown in column 8 of Table I B, application no. 2, and being depicted in the same respective line as said Yjl137c, and preferably the activity is increased plastidic, or
[11645] (b) a polypeptide comprising a polypeptide, a consensus sequence or at least a polypeptide motif as shown in the respective line in column 5 of Table II or in column 8 of Table IV, application no. 2, respectively, and being depicted in the same respective line as said Yjl137c, or a functional equivalent or a homolog thereof as depicted in column 8 of Table II, application no. 2, preferably a homolog or functional equivalent as depicted in column 8 of Table II B, application no. 2, and being depicted in the same respective line as said Yjl137c, and preferably the activity is increased plastidic.

[11646] Accordingly, in one embodiment, the molecule which activity is to be increased in the process of the invention is the gene product with an activity as a “glycogenin”, preferably it is the molecule of section (a) or (b) of this paragraph.

[11647] In particular, it was observed that in plants, especially in Arabidopsis thaliana, increasing or generating the activity of a gene product plastidic with the activity of a “glycogenin”, preferably being encoded by a gene comprising the nucleic acid sequence SEQ ID NO. 14821, preferably the coding region thereof, conferred the production of or the increase in arginine compared with the wild type control.

[11648] The nucleic acid sequence of Yjl138c from Saccharomyces cerevisiae, e.g. as shown in the respective line in column 5 of Table I, application no. 2, has been published in Goffeau et al., Science 274 (5287), 546 (1996). And the activity of the gene product thereof is the activity of ATP-dependent RNA helicase.

[11649] Accordingly, in one embodiment, the process of the present invention for producing proline in a non-human organism, like a microorganism or a plant or a part thereof, comprises increasing or generating the activity of a gene product with the activity of a gene product conferring the activity of “ATP-dependent RNA helicase”, especially from Saccharomyces cerevisiae or its functional equivalent or its homolog, e.g. the increase of
[11650] (a) a gene product of a gene comprising the nucleic acid molecule as shown in the respective line in column 5 of Table I, application no. 2, preferably the coding region thereof, or a homolog or a fragment thereof, and being depicted in the same respective line as said YjI138c, or a functional equivalent or a homolog thereof as shown in column 8 of Table I, application no. 2, preferably the coding region thereof, particularly a homolog or functional equivalent as shown in column 8 of Table I B, application no. 2, and being depicted in the same respective line as said YjI138c, and preferably the activity is increased non-targeted, or
[11651] (b) a polypeptide comprising a polypeptide, a consensus sequence or at least a polypeptide motif as shown in the respective line in column 5 of Table II or in column 8 of Table IV, application no. 2, respectively, and being depicted in the same respective line as said YjI138c, or a functional equivalent or a homolog thereof as depicted in column 8 of Table II, application no. 2, preferably a homolog or functional equivalent as depicted in column 8 of Table II B, application no. 2, and being depicted in the same respective line as said YjI138c, and preferably the activity is increased non-targeted.

[11652] Accordingly, in one embodiment, the molecule which activity is to be increased in the process of the invention is the gene product with an activity as a “ATP-dependent RNA helicase”, preferably it is the molecule of section (a) or (b) of this paragraph.

[11653] In particular, it was observed that in plants, especially in Arabidopsis thaliana, increasing or generating the activity of a gene product non-targeted with the activity of a “ATP-dependent RNA helicase”, preferably being encoded by a gene comprising the nucleic acid sequence SEQ ID NO. 65224, preferably the coding region thereof, conferred the production of or the increase in proline compared with the wild type control.

[11654] The nucleic acid sequence of Yjr133w from Saccharomyces cerevisiae, e.g. as shown in the respective line in column 5 of Table I, application no. 2, has been published in Goffeau et al., Science 274 (5287), 546 (1996). And the activity of the gene product thereof is the activity of phosphoribosyltransferase.

[11655] Accordingly, in one embodiment, the process of the present invention for producing glutamine in a non-human organism, like a microorganism or a plant or a part thereof, comprises increasing or generating the activity of a gene product with the activity of a gene product conferring the activity of “phosphoribosyltransferase”, especially from Saccharomyces cerevisiae or its functional equivalent or its homolog, e.g. the increase of
[11656] (a) a gene product of a gene comprising the nucleic acid molecule as shown in the respective line in column 5 of Table I, application no. 2, preferably the coding region thereof, or a homolog or a fragment thereof, and being depicted in the same respective line as said Yjr133w, or a functional equivalent or a homolog thereof as shown in column 8 of Table I, application no. 2, preferably the coding region thereof, particularly a homolog or functional equivalent as shown in column 8 of Table I B, application no. 2, and being depicted in the same respective line as said Yjr133w, and preferably the activity is increased plastidic, or
[11657] (b) a polypeptide comprising a polypeptide, a consensus sequence or at least a polypeptide motif as shown in the respective line in column 5 of Table II or in column 8 of Table IV, application no. 2, respectively, and being depicted in the same respective line as said Yjr133w, or a functional equivalent or a homolog thereof as depicted in column 8 of Table II, application no. 2, preferably a homolog or functional equivalent as depicted in column 8 of Table II B, application no. 2, and being depicted in the same respective line as said Yjr133w, and preferably the activity is increased plastidic.

[11658] Accordingly, in one embodiment, the molecule which activity is to be increased in the process of the invention is the gene product with an activity as a “phosphoribosyltransferase”, preferably it is the molecule of section (a) or (b) of this paragraph.

[11659] In particular, it was observed that in plants, especially in Arabidopsis thaliana, increasing or generating the activity of a gene product plastidic with the activity of a “phosphoribosyltransferase”, preferably being encoded by a gene comprising the nucleic acid sequence SEQ ID NO. 66225, preferably the coding region thereof, conferred the production of or the increase in glutamine compared with the wild type control.

[11660] The nucleic acid sequence of Yjr153w from Saccharomyces cerevisiae, e.g. as shown in the respective line in column 5 of Table I, application no. 2, has been published in Goffeau et al., Science 274 (5287), 546 (1996). And the activity of the gene product thereof is the activity of polygalacturonase.

[11661] Accordingly, in one embodiment, the process of the present invention for producing glutamate in a non-human organism, like a microorganism or a plant or a part thereof, comprises increasing or generating the activity of a gene product with the activity of a gene product conferring the activity of “polygalacturonase”, especially from Saccharomyces cerevisiae or its functional equivalent or its homolog, e.g. the increase of
[11662] (a) a gene product of a gene comprising the nucleic acid molecule as shown in the respective line in column 5 of Table I, application no. 2, preferably the coding region thereof, or a homolog or a fragment thereof, and being depicted in the same respective line as said Yjr153w, or a functional equivalent or a homolog thereof as shown in column 8 of Table I, application no. 2, preferably the coding region thereof, particularly a homolog or functional equivalent as shown in column 8 of Table I B, application no. 2, and being depicted in the same respective line as said Yjr153w, and preferably the activity is increased non-targeted, or
[11663] (b) a polypeptide comprising a polypeptide, a consensus sequence or at least a polypeptide motif as shown in the respective line in column 5 of Table II or in column 8 of Table IV, application no. 2, respectively, and being depicted in the same respective line as said Yjr153w, or a functional equivalent or a homolog thereof as depicted in column 8 of Table II, application no. 2, preferably a homolog or functional equivalent as depicted in column 8 of Table II B, application no. 2, and being depicted in the same respective line as said Yjr153w, and preferably the activity is increased non-targeted.

[11664] Accordingly, in one embodiment, the molecule which activity is to be increased in the process of the invention is the gene product with an activity as a “polygalacturonase”, preferably it is the molecule of section (a) or (b) of this paragraph.
[11665] In particular, it was observed that in plants, especially in Arabidopsis thaliana, increasing or generating the activity of a gene product non-targeted with the activity of a “polygalacturonase”, preferably being encoded by a gene comprising the nucleic acid sequence SEQ ID NO. 66274, preferably the coding region thereof, conferred the production of or the increase in glutamate compared with the wild type control.

[11666] The nucleic acid sequence of Ykl106w from Saccharomyces cerevisiae, e.g. as shown in the respective line in column 5 of Table I, application no. 2, has been published in Goffeau et al., Science 274 (5287), 546 (1996). And the activity of the gene product thereof is the activity of aspartate aminotransferase.

[11667] Accordingly, in one embodiment, the process of the present invention for producing proline in a non-human organism, like a microorganism or a plant or a part thereof, comprises increasing or generating the activity of a gene product with the activity of a gene product conferring the activity of “aspartate aminotransferase”, especially from Saccharomyces cerevisiae or its functional equivalent or its homolog, e.g. the increase of
[11668] (a) a gene product of a gene comprising the nucleic acid molecule as shown in the respective line in column 5 of Table I, application no. 2, preferably the coding region thereof, or a homolog or a fragment thereof, and being depicted in the same respective line as said Ykl106w, or a functional equivalent or a homolog thereof as shown in column 8 of Table I, application no. 2, preferably the coding region thereof, particularly a homolog or functional equivalent as shown in column 8 of Table I B, application no. 2, and being depicted in the same respective line as said Ykl106w, and preferably the activity is increased non-targeted, or
[11669] (b) a polypeptide comprising a polypeptide, a consensus sequence or at least a polypeptide motif as shown in the respective line in column 5 of Table II or in column 8 of Table IV, application no. 2, respectively, and being depicted in the same respective line as said Ykl106w, or a functional equivalent or a homolog thereof as depicted in column 8 of Table II, application no. 2, preferably a homolog or functional equivalent as depicted in column 8 of Table II B, application no. 2, and being depicted in the same respective line as said Ykl106w, and preferably the activity is increased non-targeted.

[11670] Accordingly, in one embodiment, the molecule which activity is to be increased in the process of the invention is the gene product with an activity as a “aspartate aminotransferase”, preferably it is the molecule of section (a) or (b) of this paragraph.

[11671] In particular, it was observed that in plants, especially in Arabidopsis thaliana, increasing or generating the activity of a gene product non-targeted with the activity of a “aspartate aminotransferase”, preferably being encoded by a gene comprising the nucleic acid sequence SEQ ID NO. 66419, preferably the coding region thereof, conferred the production of or the increase in proline compared with the wild type control.

[11672] The nucleic acid sequence of Ylr065c from Saccharomyces cerevisiae, e.g. as shown in the respective line in column 5 of Table I, application no. 2, has been published in Goffeau et al., Science 274 (5287), 546 (1996). And the activity of the gene product thereof is the activity of ylr065c-protein.

[11673] Accordingly, in one embodiment, the process of the present invention for producing glutamate in a non-human organism, like a microorganism or a plant or a part thereof, comprises increasing or generating the activity of a gene product with the activity of a gene product conferring the activity of “ylr065c-protein”, especially from Saccharomyces cerevisiae or its functional equivalent or its homolog, e.g. the increase of
[11674] (a) a gene product of a gene comprising the nucleic acid molecule as shown in the respective line in column 5 of Table I, application no. 2, preferably the coding region thereof, or a homolog or a fragment thereof, and being depicted in the same respective line as said Ylr065c, or a functional equivalent or a homolog thereof as shown in column 8 of Table I, application no. 2, preferably the coding region thereof, particularly a homolog or functional equivalent as shown in column 8 of Table I B, application no. 2, and being depicted in the same respective line as said Ylr065c, and preferably the activity is increased plastidic, or
[11675] (b) a polypeptide comprising a polypeptide, a consensus sequence or at least a polypeptide motif as shown in the respective line in column 5 of Table II or in column 8 of Table IV, application no. 2, respectively, and being depicted in the same respective line as said Ylr065c, or a functional equivalent or a homolog thereof as depicted in column 8 of Table II, application no. 2, preferably a homolog or functional equivalent as depicted in column 8 of Table II B, application no. 2, and being depicted in the same respective line as said Ylr065c, and preferably the activity is increased plastidic.

[11676] Accordingly, in one embodiment, the molecule which activity is to be increased in the process of the invention is the gene product with an activity as a “ylr065c-protein”, preferably it is the molecule of section (a) or (b) of this paragraph.

[11677] In particular, it was observed that in plants, especially in Arabidopsis thaliana, increasing or generating the activity of a gene product plastidic with the activity of a “ylr065c-protein”, preferably being encoded by a gene comprising the nucleic acid sequence SEQ ID NO. 66695, preferably the coding region thereof, conferred the production of or the increase in glutamate compared with the wild type control.

[11678] The nucleic acid sequence of Ylr178c from Saccharomyces cerevisiae, e.g. as shown in the respective line in column 5 of Table I, application no. 2, has been published in Goffeau et al., Science 274 (5287), 546 (1996). And the activity of the gene product thereof is the activity of ylr178c-protein.

[11679] Accordingly, in one embodiment, the process of the present invention for producing glutamine in a non-human organism, like a microorganism or a plant or a part thereof, comprises increasing or generating the activity of a gene product with the activity of a gene product conferring the activity of “yid 78c-protein”, especially from Saccharomyces cerevisiae or its functional equivalent or its homolog, e.g. the increase of
[11680] (a) a gene product of a gene comprising the nucleic acid molecule as shown in the respective line in column 5 of Table I, application no. 2, preferably the coding region thereof, or a homolog or a fragment thereof, and being depicted in the same respective line as said Ylr178c, or a functional equivalent or a homolog thereof as shown in column 8 of Table I, application no. 2, preferably the coding region thereof, particularly a homolog or functional equivalent as shown in column 8 of Table I B, application no. 2, and being depicted in the same respective line as said Ylr178c, and preferably the activity is increased plastidic, or
[11681] (b) a polypeptide comprising a polypeptide, a consensus sequence or at least a polypeptide motif as shown in the respective line in column 5 of Table II or in column 8 of Table IV, application no. 2, respectively, and being depicted in the same respective line as said Ylr178c, or a functional equivalent or a homolog thereof as depicted in column 8 of Table II, application no. 2, preferably a homolog or functional equivalent as depicted in column 8 of Table II B, application no. 2, and being depicted in the same respective line as said Ylr178c, and preferably the activity is increased plastidic.

[11682] Accordingly, in one embodiment, the molecule which activity is to be increased in the process of the invention is the gene product with an activity as a “ylr178c-protein”, preferably it is the molecule of section (a) or (b) of this paragraph.

[11683] In particular, it was observed that in plants, especially in Arabidopsis thaliana, increasing or generating the activity of a gene product plastidic with the activity of a “ylr178c-protein”, preferably being encoded by a gene comprising the nucleic acid sequence SEQ ID NO. 66715, preferably the coding region thereof, conferred the production of or the increase in glutamine compared with the wild type control.

[11684] The nucleic acid sequence of Ylr304c from Saccharomyces cerevisiae, e.g. as shown in the respective line in column 5 of Table I, application no. 2, has been published in Goffeau et al., Science 274 (5287), 546 (1996). And the activity of the gene product thereof is the activity of aconitate hydratase.

[11685] Accordingly, in one embodiment, the process of the present invention for producing proline in a non-human organism, like a microorganism or a plant or a part thereof, comprises increasing or generating the activity of a gene product with the activity of a gene product conferring the activity of “aconitate hydratase”, especially from Saccharomyces cerevisiae or its functional equivalent or its homolog, e.g. the increase of
[11686] (a) a gene product of a gene comprising the nucleic acid molecule as shown in the respective line in column 5 of Table I, application no. 2, preferably the coding region thereof, or a homolog or a fragment thereof, and being depicted in the same respective line as said Ylr304c, or a functional equivalent or a homolog thereof as shown in column 8 of Table I, application no. 2, preferably the coding region thereof, particularly a homolog or functional equivalent as shown in column 8 of Table I B, application no. 2, and being depicted in the same respective line as said Ylr304c, and preferably the activity is increased non-targeted, or
[11687] (b) a polypeptide comprising a polypeptide, a consensus sequence or at least a polypeptide motif as shown in the respective line in column 5 of Table II or in column 8 of Table IV, application no. 2, respectively, and being depicted in the same respective line as said Ylr304c, or a functional equivalent or a homolog thereof as depicted in column 8 of Table II, application no. 2, preferably a homolog or functional equivalent as depicted in column 8 of Table II B, application no. 2, and being depicted in the same respective line as said Ylr304c, and preferably the activity is increased non-targeted.

[11688] Accordingly, in one embodiment, the molecule which activity is to be increased in the process of the invention is the gene product with an activity as a “aconitate hydratase”, preferably it is the molecule of section (a) or (b) of this paragraph.

[11689] In particular, it was observed that in plants, especially in Arabidopsis thaliana, increasing or generating the activity of a gene product non-targeted with the activity of a “aconitate hydratase”, preferably being encoded by a gene comprising the nucleic acid sequence SEQ ID NO. 66772, preferably the coding region thereof, conferred the production of or the increase in proline compared with the wild type control.

[11690] The nucleic acid sequence of Ylr359w from Saccharomyces cerevisiae, e.g. as shown in the respective line in column 5 of Table I, application no. 2, has been published in Goffeau et al., Science 274 (5287), 546 (1996). And the activity of the gene product thereof is the activity of adenylosuccinate lyase.

[11691] Accordingly, in one embodiment, the process of the present invention for producing proline in a non-human organism, like a microorganism or a plant or a part thereof, comprises increasing or generating the activity of a gene product with the activity of a gene product conferring the activity of “adenylosuccinate lyase”, especially from Saccharomyces cerevisiae or its functional equivalent or its homolog, e.g. the increase of
[11692] (a) a gene product of a gene comprising the nucleic acid molecule as shown in the respective line in column 5 of Table I, application no. 2, preferably the coding region thereof, or a homolog or a fragment thereof, and being depicted in the same respective line as said Ylr359w, or a functional equivalent or a homolog thereof as shown in column 8 of Table I, application no. 2, preferably the coding region thereof, particularly a homolog or functional equivalent as shown in column 8 of Table I B, application no. 2, and being depicted in the same respective line as said Ylr359w, and preferably the activity is increased plastidic, or
[11693] (b) a polypeptide comprising a polypeptide, a consensus sequence or at least a polypeptide motif as shown in the respective line in column 5 of Table II or in column 8 of Table IV, application no. 2, respectively, and being depicted in the same respective line as said Ylr359w, or a functional equivalent or a homolog thereof as depicted in column 8 of Table II, application no. 2, preferably a homolog or functional equivalent as depicted in column 8 of Table II B, application no. 2, and being depicted in the same respective line as said Ylr359w, and preferably the activity is increased plastidic,.

[11694] Accordingly, in one embodiment, the molecule which activity is to be increased in the process of the invention is the gene product with an activity as a “adenylosuccinate lyase”, preferably it is the molecule of section (a) or (b) of this paragraph.

[11695] In particular, it was observed that in plants, especially in Arabidopsis thaliana, increasing or generating the activity of a gene product plastidic with the activity of a “adenylosuccinate lyase”, preferably being encoded by a gene comprising the nucleic acid sequence SEQ ID NO. 67190, preferably the coding region thereof, conferred the production of or the increase in proline compared with the wild type control.

[11696] The nucleic acid sequence of Yn1142w from Saccharomyces cerevisiae, e.g. as shown in the respective line in column 5 of Table I, application no. 2, has been published in Goffeau et al., Science 274 (5287), 546 (1996). And the activity of the gene product thereof is the activity of ynl142w-protein.

[11697] Accordingly, in one embodiment, the process of the present invention for producing glutamine in a non-human organism, like a microorganism or a plant or a part thereof, comprises increasing or generating the activity of a gene product with the activity of a gene product conferring the activity of “ynl142w-protein”, especially from Saccharomyces cerevisiae or its functional equivalent or its homolog, e.g. the increase of
[11698] (a) a gene product of a gene comprising the nucleic acid molecule as shown in the respective line in column 5 of Table I, application no. 2, preferably the coding region thereof, or a homolog or a fragment thereof, and being depicted in the same respective line as said Yn1142w, or a functional equivalent or a homolog thereof as shown in column 8 of Table I, application no. 2, preferably the coding region thereof, particularly a homolog or functional equivalent as shown in column 8 of Table I B, application no. 2, and being depicted in the same respective line as said Ynl142w, and preferably the activity is increased non-targeted, or
[11699] (b) a polypeptide comprising a polypeptide, a consensus sequence or at least a polypeptide motif as shown in the respective line in column 5 of Table II or in column 8 of Table IV, application no. 2, respectively, and being depicted in the same respective line as said Ynl142w, or a functional equivalent or a homolog thereof as depicted in column 8 of Table II, application no. 2, preferably a homolog or functional equivalent as depicted in column 8 of Table II B, application no. 2, and being depicted in the same respective line as said Ynl142w, and preferably the activity is increased non-targeted.

[11700] Accordingly, in one embodiment, the molecule which activity is to be increased in the process of the invention is the gene product with an activity as a “ynl142w-protein”, preferably it is the molecule of section (a) or (b) of this paragraph.

[11701] In particular, it was observed that in plants, especially in Arabidopsis thaliana, increasing or generating the activity of a gene product non-targeted with the activity of a “ynl142w-protein”, preferably being encoded by a gene comprising the nucleic acid sequence SEQ ID NO. 67299, preferably the coding region thereof, conferred the production of or the increase in glutamine compared with the wild type control.

[11702] The nucleic acid sequence of Ynr019w from Saccharomyces cerevisiae, e.g. as shown in the respective line in column 5 of Table I, application no. 2, has been published in Goffeau et al., Science 274 (5287), 546 (1996). And the activity of the gene product thereof is the activity of sterol O-acyltransferase.

[11703] Accordingly, in one embodiment, the process of the present invention for producing proline in a non-human organism, like a microorganism or a plant or a part thereof, comprises increasing or generating the activity of a gene product with the activity of a gene product conferring the activity of “sterol O-acyltransferase”, especially from Saccharomyces cerevisiae or its functional equivalent or its homolog, e.g. the increase of
[11704] (a) a gene product of a gene comprising the nucleic acid molecule as shown in the respective line in column 5 of Table I, application no. 2, preferably the coding region thereof, or a homolog or a fragment thereof, and being depicted in the same respective line as said Ynr019w, or a functional equivalent or a homolog thereof as shown in column 8 of Table I, application no. 2, preferably the coding region thereof, particularly a homolog or functional equivalent as shown in column 8 of Table I B, application no. 2, and being depicted in the same respective line as said Ynr019w, and preferably the activity is increased plastidic, or
[11705] (b) a polypeptide comprising a polypeptide, a consensus sequence or at least a polypeptide motif as shown in the respective line in column 5 of Table II or in column 8 of Table IV, application no. 2, respectively, and being depicted in the same respective line as said Ynr019w, or a functional equivalent or a homolog thereof as depicted in column 8 of Table II, application no. 2, preferably a homolog or functional equivalent as depicted in column 8 of Table II B, application no. 2, and being depicted in the same respective line as said Ynr019w, and preferably the activity is increased plastidic.

[11706] Accordingly, in one embodiment, the molecule which activity is to be increased in the process of the invention is the gene product with an activity as a “sterol O-acyltransferase”, preferably it is the molecule of section (a) or (b) of this paragraph.

[11707] In particular, it was observed that in plants, especially in Arabidopsis thaliana, increasing or generating the activity of a gene product plastidic with the activity of a “sterol O-acyltransferase”, preferably being encoded by a gene comprising the nucleic acid sequence SEQ ID NO. 67646, preferably the coding region thereof, conferred the production of or the increase in proline compared with the wild type control.

[11708] The nucleic acid sequence of Yol045w from Saccharomyces cerevisiae, e.g. as shown in the respective line in column 5 of Table I, application no. 2, has been published in Goffeau et al., Science 274 (5287), 546 (1996). And the activity of the gene product thereof is the activity of protein kinase.

[11709] Accordingly, in one embodiment, the process of the present invention for producing arginine in a non-human organism, like a microorganism or a plant or a part thereof, comprises increasing or generating the activity of a gene product with the activity of a gene product conferring the activity of “protein kinase”, especially from Saccharomyces cerevisiae or its functional equivalent or its homolog, e.g. the increase of
[11710] (a) a gene product of a gene comprising the nucleic acid molecule as shown in the respective line in column 5 of Table I, application no. 2, preferably the coding region thereof, or a homolog or a fragment thereof, and being depicted in the same respective line as said Yol045w, or a functional equivalent or a homolog thereof as shown in column 8 of Table I, application no. 2, preferably the coding region thereof, particularly a homolog or functional equivalent as shown in column 8 of Table I B, application no. 2, and being depicted in the same respective line as said Yol045w, and preferably the activity is increased plastidic, or
[11711] (b) a polypeptide comprising a polypeptide, a consensus sequence or at least a polypeptide motif as shown in the respective line in column 5 of Table II or in column 8 of Table IV, application no. 2, respectively, and being depicted in the same respective line as said Yol045w, or a functional equivalent or a homolog thereof as depicted in column 8 of Table II, application no. 2, preferably a homolog or functional equivalent as depicted in column 8 of Table II B, application no. 2, and being depicted in the same respective line as said Yol045w, and preferably the activity is increased plastidic.

[11712] Accordingly, in one embodiment, the molecule which activity is to be increased in the process of the invention is the gene product with an activity as a “protein kinase”, preferably it is the molecule of section (a) or (b) of this paragraph.

[11713] In particular, it was observed that in plants, especially in Arabidopsis thaliana, increasing or generating the activity of a gene product plastidic with the activity of a “protein kinase”, preferably being encoded by a gene comprising the nucleic acid sequence SEQ ID NO. 67684, preferably the coding region thereof, conferred the production of or the increase in arginine compared with the wild type control.

[11714] The nucleic acid sequence of Yor168w from Saccharomyces cerevisiae, e.g. as shown in the respective line in column 5 of Table I, application no. 2, has been published in Goffeau et al., Science 274 (5287), 546 (1996). And the activity of the gene product thereof is the activity of glutaminyl-tRNA synthetase.

[11715] Accordingly, in one embodiment, the process of the present invention for producing glutamate in a non-human organism, like a microorganism or a plant or a part thereof, comprises increasing or generating the activity of a gene product with the activity of a gene product conferring the activity of “glutaminyl-tRNA synthetase”, especially from Saccharomyces cerevisiae or its functional equivalent or its homolog, e.g. the increase of
[11716] (a) a gene product of a gene comprising the nucleic acid molecule as shown in the respective line in column 5 of Table I, application no. 2, preferably the coding region thereof, or a homolog or a fragment thereof, and being depicted in the same respective line as said Yor168w, or a functional equivalent or a homolog thereof as shown in column 8 of Table I, application no. 2, preferably the coding region thereof, particularly a homolog or functional equivalent as shown in column 8 of Table I B, application no. 2, and being depicted in the same respective line as said Yor168w, and preferably the activity is increased non-targeted, or
[11717] (b) a polypeptide comprising a polypeptide, a consensus sequence or at least a polypeptide motif as shown in the respective line in column 5 of Table II or in column 8 of Table IV, application no. 2, respectively, and being depicted in the same respective line as said Yor168w, or a functional equivalent or a homolog thereof as depicted in column 8 of Table II, application no. 2, preferably a homolog or functional equivalent as depicted in column 8 of Table II B, application no. 2, and being depicted in the same respective line as said Yor168w, and preferably the activity is increased non-targeted.

[11718] Accordingly, in one embodiment, the molecule which activity is to be increased in the process of the invention is the gene product with an activity as a “glutaminyl-tRNA synthetase”, preferably it is the molecule of section (a) or (b) of this paragraph.

[11719] In particular, it was observed that in plants, especially in Arabidopsis thaliana, increasing or generating the activity of a gene product non-targeted with the activity of a “glutaminyl-tRNA synthetase”, preferably being encoded by a gene comprising the nucleic acid sequence SEQ ID NO. 67710, preferably the coding region thereof, conferred the production of or the increase in glutamate compared with the wild type control.

[11720] The nucleic acid sequence of Yor168w from Saccharomyces cerevisiae, e.g. as shown in the respective line in column 5 of Table I, application no. 2, has been published in Goffeau et al., Science 274 (5287), 546 (1996). And the activity of the gene product thereof is the activity of glutaminyl-tRNA synthetase.

[11721] Accordingly, in one embodiment, the process of the present invention for producing glutamine in a non-human organism, like a microorganism or a plant or a part thereof, comprises increasing or generating the activity of a gene product with the activity of a gene product conferring the activity of “glutaminyl-tRNA synthetase”, especially from Saccharomyces cerevisiae or its functional equivalent or its homolog, e.g. the increase of
[11722] (a) a gene product of a gene comprising the nucleic acid molecule as shown in the respective line in column 5 of Table I, application no. 2, preferably the coding region thereof, or a homolog or a fragment thereof, and being depicted in the same respective line as said Yor168w, or a functional equivalent or a homolog thereof as shown in column 8 of Table I, application no. 2, preferably the coding region thereof, particularly a homolog or functional equivalent as shown in column 8 of Table I B, application no. 2, and being depicted in the same respective line as said Yor168w, and preferably the activity is increased non-targeted, or
[11723] (b) a polypeptide comprising a polypeptide, a consensus sequence or at least a polypeptide motif as shown in the respective line in column 5 of Table II or in column 8 of Table IV, application no. 2, respectively, and being depicted in the same respective line as said Yor168w, or a functional equivalent or a homolog thereof as depicted in column 8 of Table II, application no. 2, preferably a homolog or functional equivalent as depicted in column 8 of Table II B, application no. 2, and being depicted in the same respective line as said Yor168w, and preferably the activity is increased non-targeted.

[11724] Accordingly, in one embodiment, the molecule which activity is to be increased in the process of the invention is the gene product with an activity as a “glutaminyl-tRNA synthetase”, preferably it is the molecule of section (a) or (b) of this paragraph.

[11725] In particular, it was observed that in plants, especially in Arabidopsis thaliana, increasing or generating the activity of a gene product non-targeted with the activity of a “glutaminyl-tRNA synthetase”, preferably being encoded by a gene comprising the nucleic acid sequence SEQ ID NO. 67710, preferably the coding region thereof, conferred the production of or the increase in glutamine compared with the wild type control.

[11726] The nucleic acid sequence of Yor221c from Saccharomyces cerevisiae, e.g. as shown in the respective line in column 5 of Table I, application no. 2, has been published in Goffeau et al., Science 274 (5287), 546 (1996). And the activity of the gene product thereof is the activity of yor221c-protein.

[11727] Accordingly, in one embodiment, the process of the present invention for producing proline in a non-human organism, like a microorganism or a plant or a part thereof, comprises increasing or generating the activity of a gene product with the activity of a gene product conferring the activity of “yor221c-protein”, especially from Saccharomyces cerevisiae or its functional equivalent or its homolog, e.g. the increase of
[11728] (a) a gene product of a gene comprising the nucleic acid molecule as shown in the respective line in column 5 of Table I, application no. 2, preferably the coding region thereof, or a homolog or a fragment thereof, and being depicted in the same respective line as said Yor221c, or a functional equivalent or a homolog thereof as shown in column 8 of Table I, application no. 2, preferably the coding region thereof, particularly a homolog or functional equivalent as shown in column 8 of Table I B, application no. 2, and being depicted in the same respective line as said Yor221c, and preferably the activity is increased non-targeted, or
[11729] (b) a polypeptide comprising a polypeptide, a consensus sequence or at least a polypeptide motif as shown in the respective line in column 5 of Table II or in column 8 of Table IV, application no. 2, respectively, and being depicted in the same respective line as said Yor221c, or a functional equivalent or a homolog thereof as depicted in column 8 of Table II, application no. 2, preferably a homolog or functional equivalent as depicted in column 8 of Table II B, application no. 2, and being depicted in the same respective line as said Yor221c, and preferably the activity is increased non-targeted.

[11730] Accordingly, in one embodiment, the molecule which activity is to be increased in the process of the invention is the gene product with an activity as a “yor221c-protein”, preferably it is the molecule of section (a) or (b) of this paragraph.

[11731] In particular, it was observed that in plants, especially in Arabidopsis thaliana, increasing or generating the activity of a gene product non-targeted with the activity of a “yor221c-protein”, preferably being encoded by a gene comprising the nucleic acid sequence SEQ ID NO. 67951, preferably the coding region thereof, conferred the production of or the increase in proline compared with the wild type control.

[11732] The nucleic acid sequence of Yor233w from Saccharomyces cerevisiae, e.g. as shown in the respective line in column 5 of Table I, application no. 2, has been published in Goffeau et al., Science 274 (5287), 546 (1996). And the activity of the gene product thereof is the activity of protein kinase.

[11733] Accordingly, in one embodiment, the process of the present invention for producing proline in a non-human organism, like a microorganism or a plant or a part thereof, comprises increasing or generating the activity of a gene product with the activity of a gene product conferring the activity of “protein kinase”, especially from Saccharomyces cerevisiae or its functional equivalent or its homolog, e.g. the increase of
[11734] (a) a gene product of a gene comprising the nucleic acid molecule as shown in the respective line in column 5 of Table I, application no. 2, preferably the coding region thereof, or a homolog or a fragment thereof, and being depicted in the same respective line as said Yor233w, or a functional equivalent or a homolog thereof as shown in column 8 of Table I, application no. 2, preferably the coding region thereof, particularly a homolog or functional equivalent as shown in column 8 of Table I B, application no. 2, and being depicted in the same respective line as said Yor233w, and preferably the activity is increased non-targeted, or
[11735] (b) a polypeptide comprising a polypeptide, a consensus sequence or at least a polypeptide motif as shown in the respective line in column 5 of Table II or in column 8 of Table IV, application no. 2, respectively, and being depicted in the same respective line as said Yor233w, or a functional equivalent or a homolog thereof as depicted in column 8 of Table II, application no. 2, preferably a homolog or functional equivalent as depicted in column 8 of Table II B, application no. 2, and being depicted in the same respective line as said Yor233w, and preferably the activity is increased non-targeted.

[11736] Accordingly, in one embodiment, the molecule which activity is to be increased in the process of the invention is the gene product with an activity as a “protein kinase”, preferably it is the molecule of section (a) or (b) of this paragraph.

[11737] In particular, it was observed that in plants, especially in Arabidopsis thaliana, increasing or generating the activity of a gene product non-targeted with the activity of a “protein kinase”, preferably being encoded by a gene comprising the nucleic acid sequence SEQ ID NO. 67968, preferably the coding region thereof, conferred the production of or the increase in proline compared with the wild type control.

[11738] The nucleic acid sequence of Ypl117c from Saccharomyces cerevisiae, e.g. as shown in the respective line in column 5 of Table I, application no. 2, has been published in Goffeau et al., Science 274 (5287), 546 (1996). And the activity of the gene product thereof is the activity of isopentenyl diphosphate isomerase.

[11739] Accordingly, in one embodiment, the process of the present invention for producing arginine in a non-human organism, like a microorganism or a plant or a part thereof, comprises increasing or generating the activity of a gene product with the activity of a gene product conferring the activity of “isopentenyl diphosphate isomerase”, especially from Saccharomyces cerevisiae or its functional equivalent or its homolog, e.g. the increase of
[11740] (a) a gene product of a gene comprising the nucleic acid molecule as shown in the respective line in column 5 of Table I, application no. 2, preferably the coding region thereof, or a homolog or a fragment thereof, and being depicted in the same respective line as said Ypl117c, or a functional equivalent or a homolog thereof as shown in column 8 of Table I, application no. 2, preferably the coding region thereof, particularly a homolog or functional equivalent as shown in column 8 of Table I B, application no. 2, and being depicted in the same respective line as said Ypl117c, and preferably the activity is increased plastidic, or
[11741] (b) a polypeptide comprising a polypeptide, a consensus sequence or at least a polypeptide motif as shown in the respective line in column 5 of Table II or in column 8 of Table IV, application no. 2, respectively, and being depicted in the same respective line as said Ypl117c, or a functional equivalent or a homolog thereof as depicted in column 8 of Table II, application no. 2, preferably a homolog or functional equivalent as depicted in column 8 of Table II B, application no. 2, and being depicted in the same respective line as said Ypl117c, and preferably the activity is increased plastidic.

[11742] Accordingly, in one embodiment, the molecule which activity is to be increased in the process of the invention is the gene product with an activity as a “isopentenyl diphosphate isomerase”, preferably it is the molecule of section (a) or (b) of this paragraph.

[11743] In particular, it was observed that in plants, especially in Arabidopsis thaliana, increasing or generating the activity of a gene product plastidic with the activity of a “isopentenyl diphosphate isomerase”, preferably being encoded by a gene comprising the nucleic acid sequence SEQ ID NO. 67998, preferably the coding region thereof, conferred the production of or the increase in arginine compared with the wild type control.

[11744] The nucleic acid sequence of Zm_{—}4842_BE510522 from Zea mays, e.g. as shown in the respective line in column 5 of Table I, application no. 2, is unpublished. And the activity of the gene product thereof is the activity of Zm_{—}4842_BE510522-protein.

[11745] Accordingly, in one embodiment, the process of the present invention for producing arginine in a non-human organism, like a microorganism or a plant or a part thereof, comprises increasing or generating the activity of a gene product with the activity of a gene product conferring the activity of “Zm_{—}4842_BE510522-protein”, especially from Zea mays or its functional equivalent or its homolog, e.g. the increase of
[11746] (a) a gene product of a gene comprising the nucleic acid molecule as shown in the respective line in column 5 of Table I, application no. 2, preferably the coding region thereof, or a homolog or a fragment thereof, and being depicted in the same respective line as said Zm_{—}4842_BE510522, or a functional equivalent or a homolog thereof as shown in column 8 of Table I, application no. 2, preferably the coding region thereof, particularly a homolog or functional equivalent as shown in column 8 of Table I B, application no. 2, and being depicted in the same respective line as said Zm_{—}4842_BE510522, and preferably the activity is increased non-targeted, or
[11747] (b) a polypeptide comprising a polypeptide, a consensus sequence or at least a polypeptide motif as shown in the respective line in column 5 of Table II or in column 8 of Table IV, application no. 2, respectively, and being depicted in the same respective line as said Zm_{—}4842_BE510522, or a functional equivalent or a homolog thereof as depicted in column 8 of Table II, application no. 2, preferably a homolog or functional equivalent as depicted in column 8 of Table II B, application no. 2, and being depicted in the same respective line as said Zm_{—}4842_BE510522, and preferably the activity is increased non-targeted.

[11748] Accordingly, in one embodiment, the molecule which activity is to be increased in the process of the invention is the gene product with an activity as a “Zm_{—}4842_BE510522-protein”, preferably it is the molecule of section (a) or (b) of this paragraph.

[11749] In particular, it was observed that in plants, especially in Arabidopsis thaliana, increasing or generating the activity of a gene product non-targeted with the activity of a “Zm_{—}4842_BE510522-protein”, preferably being encoded by a gene comprising the nucleic acid sequence SEQ ID NO. 68413, preferably the coding region thereof, conferred the production of or the increase in arginine compared with the wild type control.

[11750] The nucleic acid sequence of Zm_{—}4842_BE510522 from Zea mays, e.g. as shown in the respective line in column 5 of Table I, application no. 2, is unpublished. And the activity of the gene product thereof is the activity of Zm_{—}4842_BE510522-protein.

[11751] Accordingly, in one embodiment, the process of the present invention for producing glutamine in a non-human organism, like a microorganism or a plant or a part thereof, comprises increasing or generating the activity of a gene product with the activity of a gene product conferring the activity of “Zm_{—}4842_BE510522-protein”, especially from Zea mays or its functional equivalent or its homolog, e.g. the increase of
[11752] (a) a gene product of a gene comprising the nucleic acid molecule as shown in the respective line in column 5 of Table I, application no. 2, preferably the coding region thereof, or a homolog or a fragment thereof, and being depicted in the same respective line as said Zm_{—}4842_BE510522, or a functional equivalent or a homolog thereof as shown in column 8 of Table I, application no. 2, preferably the coding region thereof, particularly a homolog or functional equivalent as shown in column 8 of Table I B, application no. 2, and being depicted in the same respective line as said Zm_{—}4842_BE510522, and preferably the activity is increased non-targeted, or
[11753] (b) a polypeptide comprising a polypeptide, a consensus sequence or at least a polypeptide motif as shown in the respective line in column 5 of Table II or in column 8 of Table IV, application no. 2, respectively, and being depicted in the same respective line as said Zm_{—}4842_BE510522, or a functional equivalent or a homolog thereof as depicted in column 8 of Table II, application no. 2, preferably a homolog or functional equivalent as depicted in column 8 of Table II B, application no. 2, and being depicted in the same respective line as said Zm_{—}4842_BE510522, and preferably the activity is increased non-targeted.

[11754] Accordingly, in one embodiment, the molecule which activity is to be increased in the process of the invention is the gene product with an activity as a “Zm_{—}4842_BE510522-protein”, preferably it is the molecule of section (a) or (b) of this paragraph.

[11755] In particular, it was observed that in plants, especially in Arabidopsis thaliana, increasing or generating the activity of a gene product non-targeted with the activity of a “Zm_{—}4842_BE510522-protein”, preferably being encoded by a gene comprising the nucleic acid sequence SEQ ID NO. 68413, preferably the coding region thereof, conferred the production of or the increase in glutamine compared with the wild type control.

[11756] The nucleic acid sequence of Zm_{—}4842_BE510522 from Zea mays, e.g. as shown in the respective line in column 5 of Table I, application no. 2, is unpublished. And the activity of the gene product thereof is the activity of Zm_{—}4842_BE510522-protein.

[11757] Accordingly, in one embodiment, the process of the present invention for producing proline in a non-human organism, like a microorganism or a plant or a part thereof, comprises increasing or generating the activity of a gene product with the activity of a gene product conferring the activity of “Zm_{—}4842_BE510522-protein”, especially from Zea mays or its functional equivalent or its homolog, e.g. the increase of
[11758] (a) a gene product of a gene comprising the nucleic acid molecule as shown in the respective line in column 5 of Table I, application no. 2, preferably the coding region thereof, or a homolog or a fragment thereof, and being depicted in the same respective line as said Zm_{—}4842_BE510522, or a functional equivalent or a homolog thereof as shown in column 8 of Table I, application no. 2, preferably the coding region thereof, particularly a homolog or functional equivalent as shown in column 8 of Table I B, application no. 2, and being depicted in the same respective line as said Zm_{—}4842_BE510522, and preferably the activity is increased non-targeted, or
[11759] (b) a polypeptide comprising a polypeptide, a consensus sequence or at least a polypeptide motif as shown in the respective line in column 5 of Table II or in column 8 of Table IV, application no. 2, respectively, and being depicted in the same respective line as said Zm_{—}4842_BE510522, or a functional equivalent or a homolog thereof as depicted in column 8 of Table II, application no. 2, preferably a homolog or functional equivalent as depicted in column 8 of Table II B, application no. 2, and being depicted in the same respective line as said Zm_{—}4842_BE510522, and preferably the activity is increased non-targeted.

[11760] Accordingly, in one embodiment, the molecule which activity is to be increased in the process of the invention is the gene product with an activity as a “Zm_{—}4842_BE510522-protein”, preferably it is the molecule of section (a) or (b) of this paragraph.

[11761] In particular, it was observed that in plants, especially in Arabidopsis thaliana, increasing or generating the activity of a gene product non-targeted with the activity of a “Zm_{—}4842_BE510522-protein”, preferably being encoded by a gene comprising the nucleic acid sequence SEQ ID NO. 68413, preferably the coding region thereof, conferred the production of or the increase in proline compared with the wild type control.

[11762] The nucleic acid sequence of ZMO6LC1143 from Zea mays, e.g. as shown in the respective line in column 5 of Table I, application no. 2, is unpublished. And the activity of the gene product thereof is the activity of phosphopantothenoylcysteine decarboxylase.

[11763] Accordingly, in one embodiment, the process of the present invention for producing arginine in a non-human organism, like a microorganism or a plant or a part thereof, comprises increasing or generating the activity of a gene product with the activity of a gene product conferring the activity of “phosphopantothenoylcysteine decarboxylase”, especially from Zea mays or its functional equivalent or its homolog, e.g. the increase of
[11764] (a) a gene product of a gene comprising the nucleic acid molecule as shown in the respective line in column 5 of Table I, application no. 2, preferably the coding region thereof, or a homolog or a fragment thereof, and being depicted in the same respective line as said ZM06LC1143, or a functional equivalent or a homolog thereof as shown in column 8 of Table I, application no. 2, preferably the coding region thereof, particularly a homolog or functional equivalent as shown in column 8 of Table I B, application no. 2, and being depicted in the same respective line as said ZMO6LC1143, and preferably the activity is increased non-targeted, or
[11765] (b) a polypeptide comprising a polypeptide, a consensus sequence or at least a polypeptide motif as shown in the respective line in column 5 of Table II or in column 8 of Table IV, application no. 2, respectively, and being depicted in the same respective line as said ZM06LC1143, or a functional equivalent or a homolog thereof as depicted in column 8 of Table II, application no. 2, preferably a homolog or functional equivalent as depicted in column 8 of Table II B, application no. 2, and being depicted in the same respective line as said ZM06LC1143, and preferably the activity is increased non-targeted.

[11766] Accordingly, in one embodiment, the molecule which activity is to be increased in the process of the invention is the gene product with an activity as a “phosphopantothenoylcysteine decarboxylase”, preferably it is the molecule of section (a) or (b) of this paragraph.

[11767] In particular, it was observed that in plants, especially in Arabidopsis thaliana, increasing or generating the activity of a gene product non-targeted with the activity of a “phosphopantothenoylcysteine decarboxylase”, preferably being encoded by a gene comprising the nucleic acid sequence SEQ ID NO. 68132, preferably the coding region thereof, conferred the production of or the increase in arginine compared with the wild type control.

[11768] The nucleic acid sequence of ZM06LC11975 from Zea mays, e.g. as shown in the respective line in column 5 of Table I, application no. 2 is unpublished. And the activity of the gene product thereof is the activity of ZM06LC11975-protein.

[11769] Accordingly, in one embodiment, the process of the present invention for producing proline in a non-human organism, like a microorganism or a plant or a part thereof, comprises increasing or generating the activity of a gene product with the activity of a gene product conferring the activity of “ZM06LC11975-protein”, especially from Zea mays or its functional equivalent or its homolog, e.g. the increase of
[11770] (a) a gene product of a gene comprising the nucleic acid molecule as shown in the respective line in column 5 of Table I, application no. 2, preferably the coding region thereof, or a homolog or a fragment thereof, and being depicted in the same respective line as said ZM06LC11975, or a functional equivalent or a homolog thereof as shown in column 8 of Table I, application no. 2, preferably the coding region thereof, particularly a homolog or functional equivalent as shown in column 8 of Table I B, application no. 2, and being depicted in the same respective line as said ZM06LC11975, and preferably the activity is increased non-targeted, or
[11771] (b) a polypeptide comprising a polypeptide, a consensus sequence or at least a polypeptide motif as shown in the respective line in column 5 of Table II or in column 8 of Table IV, application no. 2, respectively, and being depicted in the same respective line as said ZM06LC11975, or a functional equivalent or a homolog thereof as depicted in column 8 of Table II, application no. 2, preferably a homolog or functional equivalent as depicted in column 8 of Table II B, application no. 2, and being depicted in the same respective line as said ZM06LC11975, and preferably the activity is increased non-targeted.

[11772] Accordingly, in one embodiment, the molecule which activity is to be increased in the process of the invention is the gene product with an activity as a “ZM06LC11975-protein”, preferably it is the molecule of section (a) or (b) of this paragraph.

[11773] In particular, it was observed that in plants, especially in Arabidopsis thaliana, increasing or generating the activity of a gene product non-targeted with the activity of a “ZM06LC11975protein”, preferably being encoded by a gene comprising the nucleic acid sequence SEQ ID NO. 68363, preferably the coding region thereof, conferred the production of or the increase in proline compared with the wild type control.

[11774] [0105.1.1.2] to [0107.1.1.2] for the disclosure of these paragraphs see [0105.1.1.1] to [0107.1.1.1] above.

[11775] A protein having an activity conferring an increase in the amount or level of the fine chemical arginine, glutamate, glutamine, or proline, upon targeting to the plastids or mitochondria or upon non-targeting, preferably has the structure of the respective polypeptide described herein, in particular of the polypeptides comprising the consensus sequence or at least one polypeptide motifs as shown in the respective line in Table IV, application no. 2, column 8 or of the polypeptide comprising an amino acid sequence as disclosed in the respective line in Table II, application no. 2, columns 5 or 8, or homolos or fragments thereof as described herein, or is encoded by the nucleic acid molecule characterized herein or the nucleic acid molecule according to the invention, for example by the nucleic acid molecule as shown in the respective line in Table I, application no. 2, columns 5 or 8, preferably the coding region thereof, or homologs or fragments thereof and has the herein mentioned activity.

[11776] [0109.1.1.2] to [0110.1.1.2] for the disclosure of these paragraphs see [0109.1.1.1] to [0110.1.1.1] above.

[11777] In one embodiment, the process of the present invention comprises one or more of the following steps
[11778] (a) stabilizing a protein conferring the generation or increased expression of a protein encoded by the nucleic acid molecule of the invention or of the polypeptide of the invention, e.g. of a polypeptide having the activity selected from the group consisting of 2,3-dihydroxy-2,3-dihydrophenylpropionatedehydrogenase, 2-oxoglutarate dehydrogenase E1 subunit, 30S ribosomal protein, 3-deoxy-7-phosphoheptulonate synthase, 3-phosphoglycerate dehydrogenase, 47266012-protein, 49747384_SOYBEAN-protein, 4-alpha-glucanotransferase, ABC transporter permease protein, acetyl CoA carboxylase, acetyltransferase, acid shock protein, aconitate hydratase, acyl-CoA dehydrogenase, acyl-CoA synthase, acyltransferase, adenylosuccinate lyase, adenylylsulfate kinase, alanine dehydrogenase, aldehyde dehydrogenase, allantoicase, allantoinase, amine oxidase, amino acid ABC transporter permease protein, amino acid acetyltransferase, aminotransferase, ankyrin repeat family protein, anthranilate synthase component II, arginine decarboxylase, arginine exporter protein, asparaginase, aspartase, aspartate aminotransferase, At1g17440-protein, At1g19800-protein, At1g29350-protein, At1g47380-protein, Atl g67340-protein, At4g32480-protein, At5g16650-protein, ATP synthase subunit beta, ATP-binding component of a transport system, ATP-dependent RNA helicase, AX653549-protein, AY087308-protein, b0456-protein, b0518-protein, b1003-protein, b1024-protein, b1108-protein, b1137-protein, b1163-protein, b1259-protein, b1280-protein, b1330-protein, b1445-protein, b1522-protein, b1898-protein, b2107-protein, b2121-protein, b2360-protein, b2399-protein, b2474-protein, b2513-protein, b2548-protein, b2613-protein, b2673-protein, b2812-protein, b2846-protein, b2909-protein, b2936-protein, b2999-protein, b3121-protein, b3151-protein, b3346-protein, b3410-protein, B3427-protein, b3509-protein, b3814-protein, b3817-protein, b3989-protein, b4029-protein, b4121-protein, beta-galactosidase, beta-hydroxylase, bifunctional purine biosynthesis protein, branched-chain amino acid ABC transporter permease protein, branched-chain amino acid permease, calcium-dependent protein kinase, carbohydrate kinase, carbon dioxide concentrating mechanism protein, cation/acetate symporter, cation-transporting ATPase, CBL-interacting protein kinase, CCAAT-binding transcription factor, CDP-diacylglycerol-glycerol-3-phosphate 3- phosphatidyltransferase, CDP-diglyceride synthetase, cell division control protein, cell division protein, Chaperone protein CIpB, circadian clock protein, coproporphyrinogen III oxidase, coproporphyrinogen oxidase, CTP synthase, CTP synthetase, cullin, cyclin D, cysteine synthase A, delta-1-pyrroline 5-carboxylase synthetase, dihydrolipoamide acetyltransferase, dihydrolipoamide dehydrogenase, DNA binding protein, DNA helicase II, DNA helicase IV, DNA mismatch repair protein, DnaJ-like chaperone, electron transport complex protein, elongation factor Tu, enoyl-CoA hydratase, enterobacterial common antigen polymerase, ethanolamine utilization protein, eukaryotic translation initiation factor 5, exopolyphosphatase, fatty acid desaturase, flavodoxin, fumarylacetoacetate hydrolase, gamma-glutamyltranspeptidase, geranylgeranyl pyrophosphate synthase, gibberellin 20-oxidase, Glu/Leu/Phe/Val dehydrogenase, gluconate transport system permease 3, glucose dehydrogenase, glucose-1-phosphate cytidylyltransferase, glucose-6-phosphate 1-dehydrogenase, glutamateammonia-ligase, glutamine amidotransferase, glutamine synthetase, glutaminyl-tRNA synthetase, glutaredoxin, glutathione S-transferase, glycerol dehydrogenase, glycerol-3-phosphate dehydrogenase, glycogen (starch) synthase, glycogen synthase, glycogenin, glycoprotease, glycosidase, glycosyl transferase, GM02LC11114-protein, GM02LC17485-protein, GM02LC46-protein, GM02LC5744-protein, H/ACA ribonucleoprotein complex subunit 3, harpin-induced family protein, heat shock protein, heat shock transcription factor, HesB/YadR/YfhF family protein, histone H2A, homocitrate synthase, hydrolase, integral membrane transporter family protein, iron(III) dicitrate-binding protein, isochorismate synthase, isocitrate dehydrogenase, isopentenyl diphosphate isomerase, L-asparaginase, L-aspartate oxidase, Leucyl/phenylalanyl-tRNA-protein transferase, lipoprotein precursor, L-ribulose-5-phosphate 4-epimerase, lysyl-tRNA synthetase, major facilitator superfamily transporter protein, malate dehydrogenase, malic enzyme, malonyl CoA-acyl carrier protein transacylase, membrane protein, membrane transport protein, metal-dependent hydrolase, methylglyoxal synthase, methyltransferase, mitochondrial processing protease, molecular chaperone portein, monothiol glutaredoxin, monthiol glutaredoxin, multiple antibiotic resistance protein, murein transglycosylase, N-acetyl-gamma-glutamyl-phosphate reductase, NAD(P)H-quinone oxidoreductase subunit, NADH dehydrogenase I chain I, nitrate/nitrite transport protein, ornithine carbamoyltransferase, oxidoreductase, oxidoreductase subunit, oxireductase, permease protein of phosphate ABC transporter, peroxisome assembly protein, phosphatidylinositol 3- and 4-kinase family protein, phosphoadenosine phosphosulfate reductase, phosphoanhydride phosphorylase, phosphopantetheine adenylyltransferase, phosphopantothenoylcysteine decarboxylase, phosphopantothenoylcysteinesynthetase/decarboxylase, phosphoribosylaminoimidazole carboxylase catalytic subunit, phosphoribosylformyl glycinamidine synthase subunit, phosphoribosylglycinamide formyltransferase, phosphoribosyltransferase, Photosystem I reaction center subunit XI, photosystem II protein, polygalacturonase, polyphosphate kinase, potassium transport protein, pre-mRNA-splicing factor, protease, protein kinase, protein phosphatase, purine nucleoside phosphorylase, purine-nucleoside phosphorylase, pyrroline carboxylate reductase, pyruvate kinase, quinolinate synthetase, riboflavin biosynthesis protein, ribosephosphate isomerase, constitutive, RNA binding protein, s_pp015018333r-protein, sec-independent protein translocase, Sec-independent protein translocase subunit, serine protease, serine protease inhibitor, short-chain alcohol dehydrogenase family, sll0064-protein, sll0254-protein, sll0354-protein, sll1761-protein, slr0600-protein, sodium/proton antiporter, squalene monooxygenase, sterol O-acyltransferase, thioredoxin, thioredoxin family protein, threonine dehydrogenase, threonine synthase, transcription factor, transcriptional regulator, transcriptional regulator protein, translation initiation factor subunit, transport protein, TTC0768-protein, TTC1386-protein, urease subunit, uridine/cytidine kinase, valine-pyruvate transaminase, XM_{—}473199-protein, YCL026C-A-protein, ycr102c-protein, ydr338c-protein, yer014w-protein, yer106w-protein, YFL019C-protein, yf1054cprotein, yg1237c-protein, ygr068c-protein, ygr221c-protein, yhl013c-protein, yhr207cprotein, ylr065c-protein, ylr178c-protein, ynl142w-protein, yor221c-protein, zinc finger protein, zinc transporter, Zm_{—}4842_BE510522-protein, and ZM06LC11975-protein, or of a polypeptide as indicated in the respective line in Table II, application no. 2, columns 5 or 8, or its homologs or fragments, and conferring the production of or an increase in arginine, glutamate, glutamine, or proline, respectively; and/or
[11779] (b) stabilizing a mRNA conferring the generation or increased expression of a FCRP, e.g. protein encoded by the nucleic acid molecule of the invention or its homologs or fragments, or of a mRNA encoding the polypeptide of the present invention having the hereinmentioned activity selected from the group consisting of said activities mentioned in (a) and conferring the production of or an increase in arginine, glutamate, glutamine, or proline, respectively; and/or
[11780] (c) increasing the specific activity of a protein conferring the increased expression of a FCRP, e.g. a protein encoded by the nucleic acid molecule of the invention or of the polypeptide of the present invention having herein-mentioned arginine, glutamate, glutamine, or proline generating or increasing activity, respectively, e.g. of a polypeptide having the activity of a protein as indicated in the respective line in Table II, application no. 2, columns 5 or 8, or its homologs or fragments, or decreasing the inhibitiory regulation of the polypeptide of the invention; and/or
[11781] (d) generating or increasing the expression of an endogenous or artificial transcription factor mediating the expression of a protein conferring the generation or increased expression of a FCRP, e.g. a protein encoded by the nucleic acid molecule of the invention or of the polypeptide of the invention having herein-mentioned activity selected from the group consisting of said activities mentioned in (a) and conferring a arginine, glutamate, glutamine, or proline increasing activity, respectively, e.g. of a polypeptide having the activity of a protein as indicated in the respective line in Table II, application no. 2, columns 5 or 8 or its homologs; and/or
[11782] (e) stimulating activity of a protein conferring the increased expression of a FCRP, e.g. a protein encoded by the nucleic acid molecule of the present invention or a polypeptide of the present invention having herein-mentioned activity selected from the group consisting of said activities mentioned in (a) and conferring a arginine, glutamate, glutamine, or proline increasing activity, respectively, e.g. of a polypeptide having the activity of a protein as indicated in the respective line in Table II, application no. 2, columns 5 or 8, or its homologs or fragments, by adding one or more exogenous inducing factors to the non-human organism or parts thereof; and/or
[11783] (f) expressing a transgenic gene encoding a protein conferring the increased expression of a FCRP, e.g. a polypeptide encoded by the nucleic acid molecule of the present invention or a polypeptide of the present invention, having herein-mentioned activity selected from the group consisting of said activities mentioned in (a) and conferring a arginine, glutamate, glutamine, or proline increasing activity, respectively, e.g. of a polypeptide having the activity of a protein as indicated in the respective line in Table II, application no. 2, columns 5 or 8, or its homologs or fragments, and/or
[11784] (g) increasing the copy number of a gene conferring the increased expression of a nucleic acid molecule encoding a FCRP, e.g. a polypeptide encoded by the nucleic acid molecule of the invention or the polypeptide of the invention having herein-mentioned activity selected from the group consisting of said activities mentioned in (a) and conferring a arginine, glutamate, glutamine, or proline increasing activity, respectively, e.g. of a polypeptide having the activity of a protein as indicated in the respective line in Table II, application no. 2, columns 5 or 8, or its homologs or fragments; and/or
[11785] (h) increasing the expression of the endogenous gene encoding the FCRP, polypeptide of the invention, e.g. a polypeptide encoded by the nucleic acid molecule of the invention or the polypeptide of the invention having herein-mentioned activity selected from the group consisting of said activities mentioned in (a) and conferring a arginine, glutamate, glutamine, or proline; increasing activity, respectively, e.g. of a polypeptide having the activity of a protein as indicated in the respective line in Table II, application no. 2, columns 5 or 8, or its homologs or fragments, by adding positive expression or removing negative expression elements, e.g. homologous recombination can be used to either introduce positive regulatory elements like for plants the 35S enhancer into the promoter or to remove repressor elements form regulatory regions. Further gene conversion methods can be used to disrupt repressor elements or to enhance to acitivty of positive elements. Positive elements can be randomly introduced in plants by T-DNA or transposon mutagenesis and lines can be identified in which the positive elements have be integrated near to a gene of the invention, the expression of which is thereby enhanced; and/or
[11786] (i) modulating growth conditions of the non-human organism in such a manner, that the expression or activity of the gene encoding the FCRP, e.g. a protein of the invention or the protein itself is enhanced, for example microorganisms or plants can be grown for example under a higher temperature regime leading to an enhanced expression of heat shock proteins, which can lead to an enhanced arginine, glutamate, glutamine, or proline production, respectively; and/or
[11787] (j) selecting of non-human organisms with especially high activity of the proteins of the invention from natural or from mutagenized resources and breeding them into the target organisms, e.g. the elite crops; and/or
[11788] (k) directing a protein encoded by the nucleic acid molecule of the invention or of the polypeptide of the present invention having herein-mentioned activity selected from the group consisting of said activities mentioned in (a) and conferring a arginine, glutamate, glutamine, or proline increasing activity, respectively, e.g. of a polypeptide having the activity of a protein as indicated in the respective line in Table II, application no. 2, columns 5 or 8, or its homologs or fragments, if for the corresponding nucleic acid molecule in the respüective line in column 6 of Table I the term “plastidic” is indicated, to the plastids by the addition of a plastidial targeting sequence or if for the corresponding nucleic acid molecule in the respective line in column 6 of Table I the term “mitochondrial” is indicated, to the mitochondria by the addition of a mitochondrial targeting sequence; and/or
[11789] (l) generating the expression of a protein encoded by the nucleic acid molecule of the invention or of the polypeptide of the present invention having herein-mentioned activity selected from the group consisting of said activities mentioned in (a) and conferring a arginine, glutamate, glutamine, or proline increasing activity, respectively, e.g. of a polypeptide having the activity of a protein as indicated in the respective line in Table II, application no. 2, columns 5 or 8, or its homologs or fragments, if for the corresponding nucleic acid molecule in the respectzive line in column 6 of Table I the term “plastidic” or “mitochondrial” is indicated, in these organelles by the stable or transient transformation, advantageously stable transformation, of organelles, preferably plastids or mitochondria, with an inventive nucleic acid sequence preferably in form of an expression cassette containing said sequence leading to the expression of the nucleic acids or polypeptides of the invention in the respective organelle; and/or
[11790] (m) generating the expression of a protein encoded by the nucleic acid molecule of the invention or of the polypeptide of the present invention having herein-mentioned activity selected from the group consisting of said activities mentioned in (a) and conferring a arginine, glutamate, glutamine, and/or proline increasing activity, respectively, e.g. of a polypeptide having the activity of a protein as indicated in the respective line in Table II, application no. 2, columns 5 or 8, or its homologs or fragments, if for the corresponding nucleic acid molecule in the respective line in column 6 of Table I the term “plastidic” or “mitochondrial” is indicated, in these organelles by integration of a nucleic acid of the invention into the genome of the respective organelle under control of preferable a promoter selective for the respective organelle.

[11791] Preferably, said mRNA is the coding region of the nucleic acid molecule of the present invention and/or the protein conferring the increased expression of a protein encoded by the coding region of the nucleic acid molecule of the present invention alone or linked to a transit nucleic acid sequence or transit peptide encoding nucleic acid sequence or the polypeptide having the herein mentioned activity, e.g. conferring the generation of or increase of arginine, glutamate, glutamine, or proline, respectively, after increasing the expression or activity of the encoded polypeptide, non-targeted or in organelles such as plastids and/or mitochondria, preferably plastids, or having the activity of a polypeptide having an activity as the protein as shown in the respective line in Table II, application no. 2, column 3, or its homologs. Preferably the increase of arginine, glutamate, glutamine, or proline, respectively, takes place non-targeted or in plastids and/or mitochondria, preferably non-targeted or in plastids.

[11792] [0113.1.1.2] to [0122.1.1.2] for the disclosure of these paragraphs see [0113.1.1.1] to [0122.1.1.1] above.

[11793] The activation of an endogenous polypeptide having above-mentioned activity, e.g. having the activity of a protein as shown in the respective line in Table II, application no. 2, column 3 or of the polypeptide of the invention, e.g. conferring the increase of the fine chemical arginine, glutamate, glutamine, or proline, respectively, by increase of expression or activity in the cytoplasm, and/or in the cytosol, and/or in an organelle, such as plastids or mitochondria, can also be increased by introducing a synthetic transcription factor, which binds close to the coding region of the gene encoding the protein as shown in the respective line inTable II, application no. 2, column 5 or 8, or homologs or fragments thereof, and activates its transcription. A chimeric zinc finger protein can be constructed, which comprises a specific DNA-binding domain and an activation domain as e.g. the VP16 domain of Herpes Simplex virus. The specific binding domain can bind to the regulatory region of the gene encoding the protein as shown in the respective line in Table II, application no. 2, column 5 or 8, or homologs or fragments thereof. The expression of the chimeric transcription factor in a non-human organism, in particular in a plant, leads to a specific expression of the protein as shown in the respective line in Table II, application no. 2, column 5 or 8, or homologs or fragments thereof, see e.g. in WO01/52620, Oriz, Proc. Natl. Acad. Sci. USA 99, 13290 (2002), or Guan, Proc. Natl. Acad. Sci. USA 99, 13296 (2002).

[11794] [0124.1.1.2] to [0127.1.1.2] for the disclosure of these paragraphs see [0124.1.1.1] to [0127.1.1.1] above.

[11795] Owing to the introduction of a gene or a plurality of genes conferring the expression of the nucleic acid molecule of the invention or the polypeptide of the invention, for example the nucleic acid construct mentioned below, or encoding the protein as shown in the respective line in Table II, application no. 2, column 5 or 8, or homologs or fragments thereof, into a non-human organism alone or in combination with other genes, it is possible not only to increase the biosynthetic flux towards the end product, but also to increase, modify or create de novo an advantageous, preferably novel metabolites composition in the non-human organism, e.g. an advantageous composition comprising a higher content of (from a viewpoint of nutrional physiology limited) arginine, glutamate, glutamine, or proline and if desired other amino acids, and/or other metabolites, in free or bound form.

[11796] [0129.1.1.2] for the disclosure of this paragraph see [0129.1.1.1] above.

[11797] Accordingly, in one embodiment, the process according to the invention relates to a process, which comprises:
[11798] (a) providing a non-human organism, preferably a microorganism, a plant cell, a plant tissue, a plant or a part thereof, more preferably a microorganism, a plant tissue, a plant or a part thereof;
[11799] (b) increasing the activity of a protein as shown in the respective line in Table II, application no. 2, column 3 or of a polypeptide being encoded by the respective nucleic acid molecule of the present invention and described below, e.g. conferring an increase of the fine chemical arginine, glutamate, glutamine, or proline, respectively, in the non-human organism, preferably in the microorganism, the plant cell, the plant tissue, the plant or a part thereof, more preferably a microorganism, a plant tissue, a plant or a part thereof, especially cytoplasmic or in an organelle, like plastids or mitochondria,
[11800] (c) growing the non-human organism, preferably the microorganism, the plant cell, the plant tissue, the plant or a part thereof, under conditions which permit the production of said chemical in the non-human organism, preferably the microorganism, the plant cell, the plant tissue, the plant or a part thereof; and
[11801] (d) if desired, recovering, optionally isolating, said fine chemical, in free and/or bound form, and, optionally further free and/or bound amino acids, and/or oher metabolites synthetized by the non-human organism, the microorganism, the plant cell, the plant tissue, the plant or a part thereof.

[11802] [0131.1.1.2] to [0139.1.1.2] for the disclosure of these paragraphs see [0131.1.1.1] to [0139.1.1.1] above.

[11803] In another embodiment, the invention relates to a (isolated) nucleic acid molecule, which comprises a nucleic acid molecule selected from the group consisting of:
[11804] (a) a nucleic acid molecule encoding a polypeptide shown in Table II, application no. 2, column 5 or 8, preferably shown in Table II B, application no. 2, column 8, or a homolog or a fragment thereof;
[11805] (b) a nucleic acid molecule shown in Table I, application no. 2, column 5 or 8, preferably shown in Table I B, application no. 2, column 8, preferably the coding region thereof, or a homolog or a fragment thereof;
[11806] (c) a nucleic acid molecule, which, as a result of the degeneracy of the genetic code, can be derived from a polypeptide sequence depicted in column 5 or 8 of Table II, application no. 2, preferably in column 8 of Table II B, application no. 2;
[11807] (d) a nucleic acid molecule having at least 30% identity, preferably at least 40%, 50%, 60%, 70%, 75%, 80%, 85%, 90%, 95%, 96%, 97%, 98%, 99%, 99.5%, with the nucleic acid molecule sequence of a polynucleotide comprising the nucleic acid molecule shown in column 5 or 8 of Table I, application no. 2, preferably shown in column 8 of Table I B, application no. 2, preferably the coding region thereof;
[11808] (e) a nucleic acid molecule encoding a polypeptide having at least 30% identity, preferably at least 40%, 50% 60%, 70%, 75%, 80%, 85%, 90%, 95%, 96%, 97%, 98%, 99%, 99.5%, identity with the amino acid sequence of the polypeptide encoded by the nucleic acid molecule of (a), (b), (c) or (d);
[11809] (f) a nucleic acid molecule which hybridizes with a nucleic acid molecule of (a), (b), (c), (d) or
[11810] (e) under stringent hybridisation conditions;
[11811] (g) a nucleic acid molecule encoding a polypeptide which can be isolated with the aid of monoclonal or polyclonal antibodies made against a polypeptide encoded by one of the nucleic acid molecules of (a), (b), (c), (d), (e) or (f);
[11812] (h) a nucleic acid molecule encoding a polypeptide comprising the consensus sequence or one or more polypeptide motifs as shown in column 8 of Table IV, application no. 2;
[11813] (i) a nucleic acid molecule encoding a polypeptide having the activity represented by a respective protein as depicted in column 5 of Table II, application no. 2;
[11814] (j) a nucleic acid molecule comprising a polynucleotide which is obtained by amplifying a cDNA library or a genomic library using the primers in Table III, application no. 2, column 8;
[11815] and
[11816] (k) nucleic acid molecule which is obtainable by screening a suitable nucleic acid library, especially a cDNA library and/or a genomic library, under stringent hybridization conditions with a probe comprising one of the sequences of the nucleic acid molecule of (a), (b), (c), (d), (e), (f), (g), (h), (i) or (j) or with a fragment of at least 15 nt, preferably 20 nt, 30 nt, 50 nt, 100 nt, 200 nt,500 nt, 1000 nt, 1500 nt, 2000 nt or 3000 nt of the nucleic acid molecule characterized in (a), (b), (c), (d), (e), (f), (g), (h), (i) or (j);
   or a nucleic acid molecule comprising a sequence which is complementary thereto.
   (All the references to Tables I to IV are references to the corresponding lines of Tables I to IV.)

[11817] In a preferred embodiment thereof said nucleic acid molecule according to (a), (b), (c), (d), (e), (f), (g), (h), (i), (j) or (k) encodes a polypeptide which has the activity of the respective polypeptide represented by a protein comprising a polypeptide as depicted in the respective line in column 5 of Table II, application no. 2.

[11818] In another preferred embodiment thereof said nucleic acid molecule according to (a), (b), (c), (d), (e), (f), (g), (h), (i), (j) or (k) confers a generation or an increase of the respective fine chemical in a non-human organism or a part thereof as compared to a corresponding wild-type non-human organism or part thereof.

[11819] In another preferred embodiment thereof said nucleic acid molecule according to (a), (b), (c), (d), (e), (f), (g), (h), (i), (j) or (k) encodes a polypeptide which has the activity of the respective polypeptide represented by a protein as depicted in the respective line in column 5 of Table II application no. 2 and confers a generation or an increase of the respective fine chemical in a non-human organism or a part thereof as compared to a corresponding wild-type non-human organism or part thereof.

[11820] In another embodiment, the invention relates to a (isolated) nucleic acid molecule, which comprises a nucleic acid molecule selected from the group consisting of:
[11821] (a) a nucleic acid molecule encoding a polypeptide shown in Table II, column 5 or 8, application no. 2, preferably shown in Table II A, application no. 2, in column 5 or in Table II A, application no. 2, column 8 or in Table II B, application no. 2, column 8, or a homolog or a fragment thereof;
[11822] (b) a nucleic acid molecule shown in Table I, application no. 2, column 5 or 8, preferably shown in Table I A, application no. 2, in column 5 or in Table I A, application no. 2, column 8 or in Table I B, application no. 2, column 8, preferably the coding region thereof, or a homolog or a fragment thereof;
[11823] (c) a nucleic acid molecule, which, as a result of the degeneracy of the genetic code, can be derived from a polypeptide sequence depicted in column 5 or 8 of Table II, application no. 2, preferably shown in Table II A, application no. 2, in column 5 or in Table II A, application no. 2, column 8 or in Table II B, application no. 2, column 8;
[11824] (d) a nucleic acid molecule having at least 30% identity, preferably at least 40%, 50%, 60%, 70%, 75%, 80%, 85%, 90%, 95%, 96%, 97%, 98%, 99%, 99.5%, with the nucleic acid molecule sequence of a polynucleotide comprising the nucleic acid molecule shown in column 5 or 8 of Table I, application no. 2, preferably shown in Table I A, application no. 2, in column 5 or in Table I A, application no. 2, column 8 or in Table I B column 8, preferably the coding region thereof;
[11825] (e) a nucleic acid molecule encoding a polypeptide having at least 30% identity, preferably at least 40%, 50% 60%, 70%, 75%, 80%, 85%, 90%, 95%, 96%, 97%, 98%, 99%, 99.5%, identity with the amino acid sequence of the polypeptide encoded by the nucleic acid molecule of (a), (b), (c) or (d);
[11826] (f) a nucleic acid molecule which hybridizes with a nucleic acid molecule of (a), (b), (c), (d) or (e) under stringent hybridisation conditions;
[11827] (g) a nucleic acid molecule encoding a polypeptide which can be isolated with the aid of monoclonal or polyclonal antibodies made against a polypeptide encoded by one of the nucleic acid molecules of (a), (b), (c), (d), (e) or (f);
[11828] (h) a nucleic acid molecule encoding a polypeptide comprising the consensus sequence or one or more polypeptide motifs as shown in column 8 of Table IV, application no. 2;
[11829] (i) a nucleic acid molecule encoding a polypeptide having the activity represented by a respective protein as depicted in column 5 of Table II, application no. 2;
[11830] (j) a nucleic acid molecule comprising a polynucleotide which is obtained by amplifying a cDNA library or a genomic library using the primers in Table III, application no. 2, column 8;
[11831] and
[11832] (k) nucleic acid molecule which is obtainable by screening a suitable nucleic acid library, especially a cDNA library and/or a genomic library, under stringent hybridization conditions with a probe comprising one of the sequences of the nucleic acid molecule of (a), (b), (c), (d), (e), (f), (g), (h), (i) or (j) or with a fragment thereof having at least 15 nt, preferably 20 nt, 30 nt, 50 nt, 100 nt, 200 nt,500 nt, 1000 nt, 1500 nt, 2000 nt or 3000 nt of the nucleic acid molecule complementary to a nucleic acid sequence characterized in (a), (b), (c), (d), (e), (f), (g), (h), (i) or (j);
   or a nucleic acid molecule comprising a sequence which is complementary thereto;
   whereby, preferably, the nucleic acid molecule according to (a), (b), (c), (d), (e), (f), (g), (h), (i), (j) or (k) distinguishes over the sequence depicted in Table I A and/or I B, application no. 2, column 5 or 8, or the coding regions thereof, by one or more nucleotides (especially but not exceeding 5%, preferably 4%, 3%, 2%, 1%, 0.5%, 0.2% or 0.1%). In an embodiment, the nucleic acid molecule of the invention does not consist of the sequence shown in Table I A and/or I B, application no. 2, column 5 or 8, or the coding region thereof. In another embodiment, the nucleic acid molecule of the present invention, preferably the coding region thereof, is at least 30%, 40%, 50%, 60%, 70%, 80%, 90%, 95% identical but less than 100%, 99.999%, 99.99%, 99.9%, 99%, 98%, 97%, 96% or 95% identical to the sequence shown in Table I A and/or I B, application no. 2, column 5 or 8, or the coding region thereof, respectively. In a further embodiment the nucleic acid molecule does not encode the polypeptide sequence shown in Table II A and/or II B, application no. 2, column 5 or 8 but homologs thereof. Accordingly, in one embodiment, the nucleic acid molecule of the present invention encodes in one embodiment a polypeptide which differs at least in one or more amino acids (especially but not exceeding 5%, preferably 4%, 3%, 2%, 1%, 0.5%, 0.2% or 0.1%) from the polypeptide shown in Table II, application no. 2, column 5 or 8 and does not encode a protein of the sequence shown in Table II A and/or II B, application no. 2, column 5 or 8. Accordingly, in one embodiment, the protein encoded by a sequence of a nucleic acid according to (a), (b), (c), (d), (e), (f), (g), (h), (i), (j) or (k) does not consist of the sequence shown in Table I A and/or I B, application no. 2, column 5 or 8, or the coding region thereof. In a further embodiment, the protein of the present invention is at least 30%, 40%, 50%, 60%, 70%, 80%, 90%, 95% identical to protein sequence depicted in Table II A and/or II B, application no. 2, column 5 or 8 but less than 100%, preferably less than 99.999%, 99.99%, 99.9%, 99%, 98%, 97%, 96% or 95% identical to the sequence shown in Table II A and/or II B, application no. 2, column 5 or 8.
   (All the references to Tables I to IV are references to the corresponding lines of Tables I to IV.)

[11833] In a preferred embodiment thereof said nucleic acid molecule according to (a), (b), (c), (d), (e), (f), (g), (h), (i), (j) or (k) encodes a polypeptide which has the activity of the respective polypeptide represented by a protein comprising a polypeptide as depicted in the respective line in column 5 of Table II, application no. 2.

[11834] In another preferred embodiment thereof said nucleic acid molecule according to (a), (b), (c), (d), (e), (f), (g), (h), (i), (j) or (k) confers a generation or an increase of the respective fine chemical in a non-human organism or a part thereof as compared to a corresponding wild-type non-human organism or part thereof.

[11835] In another preferred embodiment thereof said nucleic acid molecule according to (a), (b), (c), (d), (e), (f), (g), (h), (i), (j) or (k) encodes a polypeptide which has the activity of the respective polypeptide represented by a protein as depicted in the respective line in column 5 of Table II, application no. 2, and confers a generation or an increase of the respective fine chemical in a non-human organism or a part thereof as compared to a corresponding wild-type non-human organism or part thereof.

[11836] [144.1.1.2] to [0155.1.1.2] for the disclosure of these paragraphs see [0144.1.1.1] to [0155.1.1.1] above.

[11837] In a preferred embodiment a nucleic acid construct, for example an expression cassette, comprises upstream, i.e. at the 5′ end of the encoding sequence, a promoter and downstream, i.e. at the 3′ end, a polyadenylation signal and optionally other regulatory elements which are operably linked to the intervening encoding sequence with one of the nucleic acids as depicted in the respective line in Table I, application no. 2, column 5 or 8, preferably the coding region thereof, or a homolog or a fragment thereof. By an operable linkage is meant the sequential arrangement of promoter, encoding sequence, terminator, optionally other regulatory elements and optionally targeting sequences in such a way that each of the regulatory elements/targeting sequence can fulfill its function in the expression of the encoding sequence in due manner. In one embodiment the sequences preferred for operable linkage are targeting sequences for ensuring subcellular localization in organelles, like plastids or mitochondria. However, targeting sequences for ensuring subcellular localization in the endoplasmic reticulum (=ER), in the nucleus, in oil corpuscles or other compartments may also be employed as well as translation promoters such as the 5′ lead sequence in tobacco mosaic virus (Gallie et al., Nucl. Acids Res. 15, 8693 (1987)).

[11838] for the disclosure of this paragraph see [0157.1.1.1] above.

[11839] In an embodiment, the invention relates to an expression cassette, comprising

1) a promoter, prefereably a promoter selected from the group consisting of Big35S, PCUbi, Super and USP;
2) a nucleic acid molecule selected from the group consisting of
[11840] (a) a nucleic acid molecule encoding a polypeptide shown in Table II, application no. 2, column 5 or 8, preferably shown in Table II A, application no. 2, column 5, or in Table II A, application no. 2, column 8, or in Table II B, application no. 2, column 8, or a homolog or a fragment thereof;
[11841] (b) a nucleic acid molecule shown in Table I, application no. 2, column 5 or 8, preferably shown in Table I A, application no. 2, column 5, or in Table I A, application no. 2, column 8, or in Table I B, application no. 2, column 8, preferably the coding region thereof, or a homolog or a fragment thereof;
[11842] (c) a nucleic acid molecule, which, as a result of the degeneracy of the genetic code, can be derived from a polypeptide sequence depicted in column 5 or 8 of Table II, application no. 2, preferably shown in Table II A, application no. 2, column 5, or in Table II A, application no. 2, column 8, or in Table II B, application no. 2, column 8;
[11843] (d) a nucleic acid molecule having at least 30% identity, preferably at least 40%, 50%, 60%, 70%, 75%, 80%, 85%, 90%, 95%, 96%, 97%, 98%, 99%, 99.5%, with the nucleic acid molecule sequence of a polynucleotide comprising the nucleic acid molecule shown in column 5 or 8 of Table I, application no. 2, preferably shown in Table I A, application no. 2, column 5, or in Table I A, application no. 2, column 8,or in Table I B, application no. 2, column 8, preferably the coding region thereof;
[11844] (e) a nucleic acid molecule encoding a polypeptide having at least 30% identity, preferably at least 40%, 50% 60%, 70%, 75%, 80%, 85%, 90%, 95%, 96%, 97%, 98%, 99%, 99.5%, identity with the amino acid sequence of the polypeptide encoded by the nucleic acid molecule of (a), (b), (c) or (d);
[11845] (f) a nucleic acid molecule which hybridizes with a nucleic acid molecule of (a), (b), (c), (d) or (e) under stringent hybridisation conditions;
[11846] (g) a nucleic acid molecule encoding a polypeptide which can be isolated with the aid of monoclonal or polyclonal antibodies made against a polypeptide encoded by one of the nucleic acid molecules of (a), (b), (c), (d), (e) or (f);
[11847] (h) a nucleic acid molecule encoding a polypeptide comprising the consensus sequence or one or more polypeptide motifs as shown in column 8 of Table IV, application no. 2;
[11848] (i) a nucleic acid molecule encoding a polypeptide having the activity represented by a respective protein as depicted in column 5 of Table II, application no. 2;
[11849] (j) a nucleic acid molecule comprising a polynucleotide which is obtained by amplifying a cDNA library or a genomic library using the primers in Table III, application no. 2, column 8;
[11850] and
[11851] (k) nucleic acid molecule which is obtainable by screening a suitable nucleic acid library, especially a cDNA library and/or a genomic library, under stringent hybridization conditions with a probe comprising one of the sequences of the nucleic acid molecule of (a), (b), (c), (d), (e), (f), (g), (h), (i) or (j) or with a fragment of at least 15 nt, preferably 20 nt, 30 nt, 50 nt, 100 nt, 200 nt,500 nt, 1000 nt, 1500 nt, 2000 nt or 3000 nt of the nucleic acid molecule characterized in (a), (b), (c), (d), (e), (f), (g), (h), (i) or (j);
[11852] or a nucleic acid molecule comprising a sequence which is complementary thereto.
   and, optionally
   3) nucleic acid molecule encoding a transit peptide, preferably encoding a plastidal transit peptide or a mitochondrial transit peptide;
   which are operable linked.
   (All the references to Tables I to IV are references to the corresponding lines of Tables I to IV.)

[11853] In a preferred embodiment thereof said nucleic acid molecule according to 2 (a), (b), (c), (d), (e), (f), (g), (h), (i), (j) or (k) encodes a polypeptide which has the activity of the respective polypeptide represented by a protein comprising a polypeptide as depicted in the respective line in column 5 of Table II, application no. 2.

[11854] In another preferred embodiment thereof said nucleic acid molecule according to 2 (a), (b), (c), (d), (e), (f), (g), (h), (i), (j) or (k) confers a generation or an increase of the respective fine chemical in a non-human organism or a part thereof as compared to a corresponding wild-type non-human organism or part thereof.

[11855] In another preferred embodiment thereof said nucleic acid molecule according to 2 (a), (b), (c), (d), (e), (f), (g), (h), (i), (j) or (k) encodes a polypeptide which has the activity of the respective polypeptide represented by a protein as depicted in the respective line in column 5 of Table II application no. 2 and confers a generation or an increase of the respective fine chemical in a non-human organism or a part thereof as compared to a corresponding wild-type non-human organism or part thereof.

[11856] In another embodiment thereof the expression cassette comprises 3) a nucleic acid molecule encoding a transit peptide, preferably encoding a plastidal transit peptide, especially in case in column 6 of Table I, application no. 2, in the same line as of the respective nucleic acid molecule according to 2) “plastidic” is depicted, or encoding a mitochondrial transit peptide, especially in case in column 6 of Table I, application no. 2, in the same line as of the respective nucleic acid molecule according to 2) “mitochondrial” is depicted.

[11857] In another embodiment thereof the expression cassette does not comprise 3) a nucleic acid molecule encoding a transit peptide, especially in case in column 6 of Table I, application no. 2, in the same line as of the respective nucleic acid molecule according to 2) “non-targeted” is depicted.

[11858] In a further embodiment, the invention relates to an expression cassette, comprising

1) a promoter, prefereably a promoter selected from the group consisting of Big35S, PCUbi, Super and USP;
2) a nucleic acid molecule selected from the group consisting of
[11859] (a) a nucleic acid molecule encoding a polypeptide shown in Table II, application no. 2, column 5 or 8, preferably shown in Table II A, application no. 2, column 5, or in Table II A, application no. 2, column 8, or in Table II B, application no. 2, column 8, or a homolog or a fragment thereof;
[11860] (b) a nucleic acid molecule shown in Table I, application no. 2, column 5 or 8, preferably shown in Table I A, application no. 2, column 5, or in Table I A, application no. 2, column 8, or in Table I B, application no. 2, column 8, preferably the coding region thereof, or a homolog or a fragment thereof;
[11861] (c) a nucleic acid molecule, which, as a result of the degeneracy of the genetic code, can be derived from a polypeptide sequence depicted in column 5 or 8 of Table II, application no. 2, preferably shown in Table II A, application no. 2, column 5, or in Table II A, application no. 2, column 8, or in Table II B, application no. 2, column 8;
[11862] (d) a nucleic acid molecule having at least 30% identity, preferably at least 40%, 50%, 60%, 70%, 75%, 80%, 85%, 90%, 95%, 96%, 97%, 98%, 99%, 99.5%, with the nucleic acid molecule sequence of a polynucleotide comprising the nucleic acid molecule shown in column 5 or 8 of Table I, application no. 2, preferably shown in Table I A, application no. 2, column 5, or in Table I A, application no. 2, column 8,or in Table I B, application no. 2, column 8, preferably the coding region thereof;
[11863] (e) a nucleic acid molecule encoding a polypeptide having at least 30% identity, preferably at least 40%, 50% 60%, 70%, 75%, 80%, 85%, 90%, 95%, 96%, 97%, 98%, 99%, 99.5%, identity with the amino acid sequence of the polypeptide encoded by the nucleic acid molecule of (a), (b), (c) or (d);
[11864] (f) a nucleic acid molecule which hybridizes with a nucleic acid molecule of (a), (b), (c), (d) or (e) under stringent hybridisation conditions;
[11865] (g) a nucleic acid molecule encoding a polypeptide which can be isolated with the aid of monoclonal or polyclonal antibodies made against a polypeptide encoded by one of the nucleic acid molecules of (a), (b), (c), (d), (e) or (f);
[11866] (h) a nucleic acid molecule encoding a polypeptide comprising the consensus sequence or one or more polypeptide motifs as shown in column 8 of Table IV, application no. 2;
[11867] (i) a nucleic acid molecule encoding a polypeptide having the activity represented by a respective protein as depicted in column 5 of Table II, application no. 2;
[11868] (j) a nucleic acid molecule comprising a polynucleotide which is obtained by amplifying a cDNA library or a genomic library using the primers in Table III, application no. 2, column 8;
[11869] and
[11870] (k) nucleic acid molecule which is obtainable by screening a suitable nucleic acid library, especially a cDNA library and/or a genomic library, under stringent hybridization conditions with a probe comprising one of the sequences of the nucleic acid molecule of (a), (b), (c), (d), (e), (f), (g), (h), (i) or (j) or with a fragment of at least 15 nt, preferably 20 nt, 30 nt, 50 nt, 100 nt, 200 nt,500 nt, 1000 nt, 1500 nt, 2000 nt or 3000 nt of the nucleic acid molecule characterized in (a), (b), (c), (d), (e), (f), (g), (h), (i) or (j);
   or a nucleic acid molecule comprising a sequence which is complementary thereto;
   and, optionally
   3) nucleic acid molecule encoding a transit peptide, preferably encoding a plastidal transit peptide or a mitochondrial transit peptide;
   which are operable linked and
   whereby, preferably, the nucleic acid molecule according to 2 (a), (b), (c), (d), (e), (f), (g), (h), (i), (j) or (k) distinguishes over the sequence depicted in Table I A and/or I B, application no. 2, column 5 or 8, or the coding region thereof, by one or more nucleotides (especially but not exceeding 5%, preferably 4%, 3%, 2%, 1%, 0.5%, 0.2% or 0.1%). In an embodiment, the nucleic acid molecule of the invention according to 2) does not consist of the sequence shown in Table I A and/or I B, application no. 2, column 5 or 8, or the coding region thereof. In another embodiment, the nucleic acid molecule of the present invention, preferably the coding region thereof, is at least 30%, 40%, 50%, 60%, 70%, 80%, 90%, 95% identical but less than 100%, 99.999%, 99.99%, 99.9%, 99%, 98%, 97%, 96% or 95% identical to the sequence shown in Table I A and/or I B, application no. 2, column 5 or 8, or the coding region thereof, respectively. In a further embodiment the nucleic acid molecule does not encode the polypeptide sequence shown in Table II A and/or II B, application no. 2, column 5 or 8 but homologs thereof. Accordingly, in one embodiment, the nucleic acid molecule of the present invention encodes in one embodiment a polypeptide which differs at least in one or more amino acids (especially but not exceeding 5%, preferably 4%, 3%, 2%, 1%, 0.5%, 0.2% or 0.1%) from the polypeptide shown in Table II, application no. 2, column 5 or 8 and does not encode a protein of the sequence shown in Table II A and/or II B, application no. 2, column 5 or 8. Accordingly, in one embodiment, the protein encoded by a sequence of a nucleic acid according to 2(a), (b), (c), (d), (e), (f), (g), (h), (i), (j) or (k) does not consist of the sequence shown in Table I A and/or I B, application no. 2, column 5 or 8, or the coding region thereof. In a further embodiment, the protein of the present invention is at least 30%, 40%, 50%, 60%, 70%, 80%, 90%, 95% identical to protein sequence depicted in Table II A and/or II B, application no. 2, column 5 or 8 but less than 100%, 99.999%, 99.99%, 99.9%, 99%, 98%, 97%, 96% or 95% identical to the sequence shown in Table II A and/or II B, application no. 2, column 5 or 8.
   (All the references to Tables I to IV are references to the corresponding lines of Tables I to IV.)

[11871] In a preferred embodiment thereof said nucleic acid molecule according to 2 (a), (b), (c), (d), (e), (f), (g), (h), (i), (j) or (k) encodes a polypeptide which has the activity of the respective polypeptide represented by a protein comprising a polypeptide as depicted in the respective line in column 5 of Table II, application no. 2.

[11872] In another preferred embodiment thereof said nucleic acid molecule according to 2 (a), (b), (c), (d), (e), (f), (g), (h), (i), (j) or (k) confers a generation or an increase of the respective fine chemical in a non-human organism or a part thereof as compared to a corresponding wild-type non-human organism or part thereof.

[11873] In another preferred embodiment thereof said nucleic acid molecule according to 2 (a), (b), (c), (d), (e), (f), (g), (h), (i), (j) or (k) encodes a polypeptide which has the activity of the respective polypeptide represented by a protein as depicted in the respective line in column 5 of Table II application no. 2 and confers a generation or an increase of the respective fine chemical in a non-human organism or a part thereof as compared to a corresponding wild-type non-human organism or part thereof.

[11874] In another embodiment thereof the expression cassette comprises 3) a nucleic acid molecule encoding a transit peptide, preferably encoding a plastidal transit peptide, especially in case in column 6 of Table I, application no. 2, in the same line as of the respective nucleic acid molecule according to 2) “plastidic” is depicted, or encoding a mitochondrial transit peptide, especially in case in column 6 of Table I, application no. 2, in the same line as of the respective nucleic acid molecule according to 2) “mitochondrial” is depicted.

[11875] In another embodiment thereof the expression cassette does not comprise 3) a nucleic acid molecule encoding a transit peptide, especially in case in column 6 of Table I, application no. 2, in the same line as of the respective nucleic acid molecule according to 2) “non-targeted” is depicted.

[11876] In an embodiment the present invention relates to an expresssion cassette comprising a) a promoter, prefereably a promoter selected from the group consisting of Big35S, PCUbi, Super and USP, in particular Super; and b) the nucleic acid SEQ ID NO. 36670, or a homolog or fragment thereof, or a homolog thereof being depicted in Table I, application no. 2, column 8, in the same line as SEQ ID NO. 36670, preferably the coding region thereof, a homolog or a fragment thereof; which are operable linked.

[11877] In an embodiment thereof the expression cassette comprises in addition c) a nucleic acid molecule encoding a transit peptide, especially a plastidal transit petide in case in Table I, application no. 2, in column 6 in the same line as SEQ ID NO. 36670 is depicted, plastidic is mentioned, or a mitochondrial transit petide in case in Table I, application no. 2, in column 6 in the same line as SEQ ID NO. 36670 is depicted, mitochondrial is mentioned; which is operable linke, too.

[11878] In another embodiment thereof the expression cassette does not comprise an additional transit peptide in case in Table I, application no. 2, in column 6 in the same line as SEQ ID NO. 36670 is depicted, non-targeted is mentioned.

[11879] In an embodiment the present invention relates to an expresssion cassette comprising a) a promoter, prefereably a promoter selected from the group consisting of Big35S, PCUbi, Super and USP, in particular Super; and b) the nucleic acid SEQ ID NO. 35875, or a homolog or fragment thereof, or a homolog thereof being depicted in Table I, application no. 2, column 8, in the same line as SEQ ID NO. 35875, preferably the coding region thereof, a homolog or a fragment thereof; which are operable linked.

[11880] In an embodiment thereof the expression cassette comprises in addition c) a nucleic acid molecule encoding a transit peptide, especially a plastidal transit petide in case in Table I, application no. 2, in column 6 in the same line as SEQ ID NO. 35875 is depicted, plastidic is mentioned, or a mitochondrial transit petide in case in Table I, application no. 2, in column 6 in the same line as SEQ ID NO. 35875 is depicted, mitochondrial is mentioned; which is operable linke, too.

[11881] In another embodiment thereof the expression cassette does not comprise an additional transit peptide in case in Table I, application no. 2, in column 6 in the same line as SEQ ID NO. 35875 is depicted, non-targeted is mentioned.

[11882] In an embodiment the present invention relates to an expresssion cassette comprising a) a promoter, prefereably a promoter selected from the group consisting of Big35S, PCUbi, Super and USP, in particular Super; and b) the nucleic acid SEQ ID NO. 7686, or a homolog or fragment thereof, or a homolog thereof being depicted in Table I, application no. 2, column 8, in the same line as SEQ ID NO. 7686, preferably the coding region thereof, a homolog or a fragment thereof; which are operable linked.

[11883] In an embodiment thereof the expression cassette comprises in addition c) a nucleic acid molecule encoding a transit peptide, especially a plastidal transit petide in case in Table I, application no. 2, in column 6 in the same line as SEQ ID NO. 7686 is depicted, plastidic is mentioned, or a mitochondrial transit petide in case in Table I, application no. 2, in column 6 in the same line as SEQ ID NO. 7686 is depicted, mitochondrial is mentioned; which is operable linke, too.

[11884] In another embodiment thereof the expression cassette does not comprise an additional transit peptide in case in Table I, application no. 2, in column 6 in the same line as SEQ ID NO. 7686 is depicted, non-targeted is mentioned.

[11885] In an embodiment the present invention relates to an expresssion cassette comprising a) a promoter, prefereably a promoter selected from the group consisting of Big35S, PCUbi, Super and USP, in particular Super; and b) the nucleic acid SEQ ID NO. 35936, or a homolog or fragment thereof, or a homolog thereof being depicted in Table I, application no. 2, column 8, in the same line as SEQ ID NO. 35936, preferably the coding region thereof, a homolog or a fragment thereof; which are operable linked.

[11886] In an embodiment thereof the expression cassette comprises in addition c) a nucleic acid molecule encoding a transit peptide, especially a plastidal transit petide in case in Table I, application no. 2, in column 6 in the same line as SEQ ID NO. 35936 is depicted, plastidic is mentioned, or a mitochondrial transit petide in case in Table I, application no. 2, in column 6 in the same line as SEQ ID NO. 35936 is depicted, mitochondrial is mentioned; which is operable linke, too.

[11887] In another embodiment thereof the expression cassette does not comprise an additional transit peptide in case in Table I, application no. 2, in column 6 in the same line as SEQ ID NO. 35936 is depicted, non-targeted is mentioned.

[11888] In an embodiment the present invention relates to an expresssion cassette comprising a) a promoter, prefereably a promoter selected from the group consisting of Big35S, PCUbi, Super and USP, in particular Super; and b) the nucleic acid SEQ ID NO. 35967, or a homolog or fragment thereof, or a homolog thereof being depicted in Table I, application no. 2, column 8, in the same line as SEQ ID NO. 35967, preferably the coding region thereof, a homolog or a fragment thereof; which are operable linked.

[11889] In an embodiment thereof the expression cassette comprises in addition c) a nucleic acid molecule encoding a transit peptide, especially a plastidal transit petide in case in Table I, application no. 2, in column 6 in the same line as SEQ ID NO. 35967 is depicted, plastidic is mentioned, or a mitochondrial transit petide in case in Table I, application no. 2, in column 6 in the same line as SEQ ID NO. 35967 is depicted, mitochondrial is mentioned; which is operable linke, too.

[11890] In another embodiment thereof the expression cassette does not comprise an additional transit peptide in case in Table I, application no. 2, in column 6 in the same line as SEQ ID NO. 35967 is depicted, non-targeted is mentioned.

[11891] In an embodiment the present invention relates to an expresssion cassette comprising a) a promoter, prefereably a promoter selected from the group consisting of Big35S, PCUbi, Super and USP, in particular Super; and b) the nucleic acid SEQ ID NO. 36114, or a homolog or fragment thereof, or a homolog thereof being depicted in Table I, application no. 2, column 8, in the same line as SEQ ID NO. 36114, preferably the coding region thereof, a homolog or a fragment thereof; which are operable linked.

[11892] In an embodiment thereof the expression cassette comprises in addition c) a nucleic acid molecule encoding a transit peptide, especially a plastidal transit petide in case in Table I, application no. 2, in column 6 in the same line as SEQ ID NO. 36114 is depicted, plastidic is mentioned, or a mitochondrial transit petide in case in Table I, application no. 2, in column 6 in the same line as SEQ ID NO. 36114 is depicted, mitochondrial is mentioned; which is operable linke, too.

[11893] In another embodiment thereof the expression cassette does not comprise an additional transit peptide in case in Table I, application no. 2, in column 6 in the same line as SEQ ID NO. 36114 is depicted, non-targeted is mentioned.

[11894] In an embodiment the present invention relates to an expresssion cassette comprising a) a promoter, prefereably a promoter selected from the group consisting of Big35S, PCUbi, Super and USP, in particular Super; and b) the nucleic acid SEQ ID NO. 36299, or a homolog or fragment thereof, or a homolog thereof being depicted in Table I, application no. 2, column 8, in the same line as SEQ ID NO. 36299, preferably the coding region thereof, a homolog or a fragment thereof; which are operable linked.

[11895] In an embodiment thereof the expression cassette comprises in addition c) a nucleic acid molecule encoding a transit peptide, especially a plastidal transit petide in case in Table I, application no. 2, in column 6 in the same line as SEQ ID NO. 36299 is depicted, plastidic is mentioned, or a mitochondrial transit petide in case in Table I, application no. 2, in column 6 in the same line as SEQ ID NO. 36299 is depicted, mitochondrial is mentioned; which is operable linke, too.

[11896] In another embodiment thereof the expression cassette does not comprise an additional transit peptide in case in Table I, application no. 2, in column 6 in the same line as SEQ ID NO. 36299 is depicted, non-targeted is mentioned.

[11897] In an embodiment the present invention relates to an expresssion cassette comprising a) a promoter, prefereably a promoter selected from the group consisting of Big35S, PCUbi, Super and USP, in particular Superand b) the nucleic acid SEQ ID NO. 36489, or a homolog or fragment thereof, or a homolog thereof being depicted in Table I, application no. 2, column 8, in the same line as SEQ ID NO. 36489, preferably the coding region thereof, a homolog or a fragment thereof; which are operable linked.

[11898] In an embodiment thereof the expression cassette comprises in addition c) a nucleic acid molecule encoding a transit peptide, especially a plastidal transit petide in case in Table I, application no. 2, in column 6 in the same line as SEQ ID NO. 36489 is depicted, plastidic is mentioned, or a mitochondrial transit petide in case in Table I, application no. 2, in column 6 in the same line as SEQ ID NO. 36489 is depicted, mitochondrial is mentioned; which is operable linke, too.

[11899] In another embodiment thereof the expression cassette does not comprise an additional transit peptide in case in Table I, application no. 2, in column 6 in the same line as SEQ ID NO. 36489 is depicted, non-targeted is mentioned.

[11900] In an embodiment the present invention relates to an expresssion cassette comprising a) a promoter, prefereably a promoter selected from the group consisting of Big35S, PCUbi, Super and USP, in particular Super; and b) the nucleic acid SEQ ID NO. 9333, or a homolog or fragment thereof, or a homolog thereof being depicted in Table I, application no. 2, column 8, in the same line as SEQ ID NO. 9333, preferably the coding region thereof, a homolog or a fragment thereof; which are operable linked.

[11901] In an embodiment thereof the expression cassette comprises in addition c) a nucleic acid molecule encoding a transit peptide, especially a plastidal transit petide in case in Table I, application no. 2, in column 6 in the same line as SEQ ID NO. 9333 is depicted, plastidic is mentioned, or a mitochondrial transit petide in case in Table I, application no. 2, in column 6 in the same line as SEQ ID NO. 9333 is depicted, mitochondrial is mentioned; which is operable linke, too.

[11902] In another embodiment thereof the expression cassette does not comprise an additional transit peptide in case in Table I, application no. 2, in column 6 in the same line as SEQ ID NO. 9333 is depicted, non-targeted is mentioned.

[11903] In an embodiment the present invention relates to an expresssion cassette comprising a) a promoter, prefereably a promoter selected from the group consisting of Big35S, PCUbi, Super and USP, in particular USP; and b) the nucleic acid SEQ ID NO. 36623, or a homolog or fragment thereof, or a homolog thereof being depicted in Table I, application no. 2, column 8, in the same line as SEQ ID NO. 36623, preferably the coding region thereof, a homolog or a fragment thereof; which are operable linked.

[11904] In an embodiment thereof the expression cassette comprises in addition c) a nucleic acid molecule encoding a transit peptide, especially a plastidal transit petide in case in Table I, application no. 2, in column 6 in the same line as SEQ ID NO. 36623 is depicted, plastidic is mentioned, or a mitochondrial transit petide in case in Table I, application no. 2, in column 6 in the same line as SEQ ID NO. 36623 is depicted, mitochondrial is mentioned; which is operable linke, too.

[11905] In another embodiment thereof the expression cassette does not comprise an additional transit peptide in case in Table I, application no. 2, in column 6 in the same line as SEQ ID NO. 36623 is depicted, non-targeted is mentioned.

[11906] In an embodiment the present invention relates to an expresssion cassette comprising a) a promoter, prefereably a promoter selected from the group consisting of Big35S, PCUbi, Super and USP, in particular Super; and b) the nucleic acid SEQ ID NO. 35590, or a homolog or fragment thereof, or a homolog thereof being depicted in Table I, application no. 2, column 8, in the same line as SEQ ID NO. 35590, preferably the coding region thereof, a homolog or a fragment thereof; which are operable linked.

[11907] In an embodiment thereof the expression cassette comprises in addition c) a nucleic acid molecule encoding a transit peptide, especially a plastidal transit petide in case in Table I, application no. 2, in column 6 in the same line as SEQ ID NO. 35590 is depicted, plastidic is mentioned, or a mitochondrial transit petide in case in Table I, application no. 2, in column 6 in the same line as SEQ ID NO. 35590 is depicted, mitochondrial is mentioned; which is operable linke, too.

[11908] In another embodiment thereof the expression cassette does not comprise an additional transit peptide in case in Table I, application no. 2, in column 6 in the same line as SEQ ID NO. 35590 is depicted, non-targeted is mentioned.

[11909] In an embodiment the present invention relates to an expresssion cassette comprising a) a promoter, prefereably a promoter selected from the group consisting of Big35S, PCUbi, Super and USP, in particular USP; and b) the nucleic acid SEQ ID NO. 36809, or a homolog or fragment thereof, or a homolog thereof being depicted in Table I, application no. 2, column 8, in the same line as SEQ ID NO. 36809, preferably the coding region thereof, a homolog or a fragment thereof; which are operable linked.

[11910] In an embodiment thereof the expression cassette comprises in addition c) a nucleic acid molecule encoding a transit peptide, especially a plastidal transit petide in case in Table I, application no. 2, in column 6 in the same line as SEQ ID NO. 36809 is depicted, plastidic is mentioned, or a mitochondrial transit petide in case in Table I, application no. 2, in column 6 in the same line as SEQ ID NO. 36809 is depicted, mitochondrial is mentioned; which is operable linke, too.

[11911] In another embodiment thereof the expression cassette does not comprise an additional transit peptide in case in Table I, application no. 2, in column 6 in the same line as SEQ ID NO. 36809 is depicted, non-targeted is mentioned.

[11912] In an embodiment the present invention relates to an expresssion cassette comprising a) a promoter, prefereably a promoter selected from the group consisting of Big35S, PCUbi, Super and USP, in particular Super; and b) the nucleic acid SEQ ID NO. 7941, or a homolog or fragment thereof, or a homolog thereof being depicted in Table I, application no. 2, column 8, in the same line as SEQ ID NO. 7941, preferably the coding region thereof, a homolog or a fragment thereof; which are operable linked.

[11913] In an embodiment thereof the expression cassette comprises in addition c) a nucleic acid molecule encoding a transit peptide, especially a plastidal transit petide in case in Table I, application no. 2, in column 6 in the same line as SEQ ID NO. 7941 is depicted, plastidic is mentioned, or a mitochondrial transit petide in case in Table I, application no. 2, in column 6 in the same line as SEQ ID NO. 7941 is depicted, mitochondrial is mentioned; which is operable linke, too.

[11914] In another embodiment thereof the expression cassette does not comprise an additional transit peptide in case in Table I, application no. 2, in column 6 in the same line as SEQ ID NO. 7941 is depicted, non-targeted is mentioned.

[11915] In an embodiment the present invention relates to an expresssion cassette comprising a) a promoter, prefereably a promoter selected from the group consisting of Big35S, PCUbi, Super and USP, in particular Super; and b) the nucleic acid SEQ ID NO. 36880, or a homolog or fragment thereof, or a homolog thereof being depicted in Table I, application no. 2, column 8, in the same line as SEQ ID NO. 36880, preferably the coding region thereof, a homolog or a fragment thereof; which are operable linked.

[11916] In an embodiment thereof the expression cassette comprises in addition c) a nucleic acid molecule encoding a transit peptide, especially a plastidal transit petide in case in Table I, application no. 2, in column 6 in the same line as SEQ ID NO. 36880 is depicted, plastidic is mentioned, or a mitochondrial transit petide in case in Table I, application no. 2, in column 6 in the same line as SEQ ID NO. 36880 is depicted, mitochondrial is mentioned; which is operable linke, too.

[11917] In another embodiment thereof the expression cassette does not comprise an additional transit peptide in case in Table I, application no. 2, in column 6 in the same line as SEQ ID NO. 36880 is depicted, non-targeted is mentioned.

[11918] In an embodiment the present invention relates to an expresssion cassette comprising a) a promoter, prefereably a promoter selected from the group consisting of Big35S, PCUbi, Super and USP, in particular Super; and b) the nucleic acid SEQ ID NO. 36907, or a homolog or fragment thereof, or a homolog thereof being depicted in Table I, application no. 2, column 8, in the same line as SEQ ID NO. 36907, preferably the coding region thereof, a homolog or a fragment thereof; which are operable linked.

[11919] In an embodiment thereof the expression cassette comprises in addition c) a nucleic acid molecule encoding a transit peptide, especially a plastidal transit petide in case in Table I, application no. 2, in column 6 in the same line as SEQ ID NO. 36907 is depicted, plastidic is mentioned, or a mitochondrial transit petide in case in Table I, application no. 2, in column 6 in the same line as SEQ ID NO. 36907 is depicted, mitochondrial is mentioned; which is operable linke, too.

[11920] In another embodiment thereof the expression cassette does not comprise an additional transit peptide in case in Table I, application no. 2, in column 6 in the same line as SEQ ID NO. 36907 is depicted, non-targeted is mentioned.

[11921] In an embodiment the present invention relates to an expresssion cassette comprising a) a promoter, prefereably a promoter selected from the group consisting of Big35S, PCUbi, Super and USP, in particular Super; and b) the nucleic acid SEQ ID NO. 36937, or a homolog or fragment thereof, or a homolog thereof being depicted in Table I, application no. 2, column 8, in the same line as SEQ ID NO. 36937, preferably the coding region thereof, a homolog or a fragment thereof; which are operable linked.

[11922] In an embodiment thereof the expression cassette comprises in addition c) a nucleic acid molecule encoding a transit peptide, especially a plastidal transit petide in case in Table I, application no. 2, in column 6 in the same line as SEQ ID NO. 36937 is depicted, plastidic is mentioned, or a mitochondrial transit petide in case in Table I, application no. 2, in column 6 in the same line as SEQ ID NO. 36937 is depicted, mitochondrial is mentioned; which is operable linke, too.

[11923] In another embodiment thereof the expression cassette does not comprise an additional transit peptide in case in Table I, application no. 2, in column 6 in the same line as SEQ ID NO. 36937 is depicted, non-targeted is mentioned.

[11924] In an embodiment the present invention relates to an expresssion cassette comprising a) a promoter, prefereably a promoter selected from the group consisting of Big35S, PCUbi, Super and USP, in particular Super; and b) the nucleic acid SEQ ID NO. 36971, or a homolog or fragment thereof, or a homolog thereof being depicted in Table I, application no. 2, column 8, in the same line as SEQ ID NO. 36971, preferably the coding region thereof, a homolog or a fragment thereof; which are operable linked.

[11925] In an embodiment thereof the expression cassette comprises in addition c) a nucleic acid molecule encoding a transit peptide, especially a plastidal transit petide in case in Table I, application no. 2, in column 6 in the same line as SEQ ID NO. 36971 is depicted, plastidic is mentioned, or a mitochondrial transit petide in case in Table I, application no. 2, in column 6 in the same line as SEQ ID NO. 36971 is depicted, mitochondrial is mentioned; which is operable linke, too.

[11926] In another embodiment thereof the expression cassette does not comprise an additional transit peptide in case in Table I, application no. 2, in column 6 in the same line as SEQ ID NO. 36971 is depicted, non-targeted is mentioned.

[11927] In an embodiment the present invention relates to an expresssion cassette comprising a) a promoter, prefereably a promoter selected from the group consisting of Big35S, PCUbi, Super and USP, in particular Super; and b) the nucleic acid SEQ ID NO. 37390, or a homolog or fragment thereof, or a homolog thereof being depicted in Table I, application no. 2, column 8, in the same line as SEQ ID NO. 37390, preferably the coding region thereof, a homolog or a fragment thereof; which are operable linked.

[11928] In an embodiment thereof the expression cassette comprises in addition c) a nucleic acid molecule encoding a transit peptide, especially a plastidal transit petide in case in Table I, application no. 2, in column 6 in the same line as SEQ ID NO. 37390 is depicted, plastidic is mentioned, or a mitochondrial transit petide in case in Table I, application no. 2, in column 6 in the same line as SEQ ID NO. 37390 is depicted, mitochondrial is mentioned; which is operable linke, too.

[11929] In another embodiment thereof the expression cassette does not comprise an additional transit peptide in case in Table I, application no. 2, in column 6 in the same line as SEQ ID NO. 37390 is depicted, non-targeted is mentioned.

[11930] In an embodiment the present invention relates to an expresssion cassette comprising a) a promoter, prefereably a promoter selected from the group consisting of Big35S, PCUbi, Super and USP, in particular Super; and b) the nucleic acid SEQ ID NO. 7917, or a homolog or fragment thereof, or a homolog thereof being depicted in Table I, application no. 2, column 8, in the same line as SEQ ID NO. 7917, preferably the coding region thereof, a homolog or a fragment thereof; which are operable linked.

[11931] In an embodiment thereof the expression cassette comprises in addition c) a nucleic acid molecule encoding a transit peptide, especially a plastidal transit petide in case in Table I, application no. 2, in column 6 in the same line as SEQ ID NO. 7917 is depicted, plastidic is mentioned, or a mitochondrial transit petide in case in Table I, application no. 2, in column 6 in the same line as SEQ ID NO. 7917 is depicted, mitochondrial is mentioned; which is operable linke, too.

[11932] In another embodiment thereof the expression cassette does not comprise an additional transit peptide in case in Table I, application no. 2, in column 6 in the same line as SEQ ID NO. 7917 is depicted, non-targeted is mentioned.

[11933] In an embodiment the present invention relates to an expresssion cassette comprising a) a promoter, prefereably a promoter selected from the group consisting of Big35S, PCUbi, Super and USP, in particular PCUbi; and b) the nucleic acid SEQ ID NO. 34204, or a homolog or fragment thereof, or a homolog thereof being depicted in Table I, application no. 2, column 8, in the same line as SEQ ID NO. 34204, preferably the coding region thereof, a homolog or a fragment thereof; which are operable linked.

[11934] In an embodiment thereof the expression cassette comprises in addition c) a nucleic acid molecule encoding a transit peptide, especially a plastidal transit petide in case in Table I, application no. 2, in column 6 in the same line as SEQ ID NO. 34204 is depicted, plastidic is mentioned, or a mitochondrial transit petide in case in Table I, application no. 2, in column 6 in the same line as SEQ ID NO. 34204 is depicted, mitochondrial is mentioned; which is operable linke, too.

[11935] In another embodiment thereof the expression cassette does not comprise an additional transit peptide in case in Table I, application no. 2, in column 6 in the same line as SEQ ID NO. 34204 is depicted, non-targeted is mentioned.

[11936] In an embodiment the present invention relates to an expresssion cassette comprising a) a promoter, prefereably a promoter selected from the group consisting of Big35S, PCUbi, Super and USP, in particular PCUbi; and b) the nucleic acid SEQ ID NO. 31926, or a homolog or fragment thereof, or a homolog thereof being depicted in Table I, application no. 2, column 8, in the same line as SEQ ID NO. 31926, preferably the coding region thereof, a homolog or a fragment thereof; which are operable linked.

[11937] In an embodiment thereof the expression cassette comprises in addition c) a nucleic acid molecule encoding a transit peptide, especially a plastidal transit petide in case in Table I, application no. 2, in column 6 in the same line as SEQ ID NO. 31926 is depicted, plastidic is mentioned, or a mitochondrial transit petide in case in Table I, application no. 2, in column 6 in the same line as SEQ ID NO. 31926 is depicted, mitochondrial is mentioned; which is operable linke, too.

[11938] In another embodiment thereof the expression cassette does not comprise an additional transit peptide in case in Table I, application no. 2, in column 6 in the same line as SEQ ID NO. 31926 is depicted, non-targeted is mentioned.

[11939] In an embodiment the present invention relates to an expresssion cassette comprising a) a promoter, prefereably a promoter selected from the group consisting of Big35S, PCUbi, Super and USP, in particular PCUbi; and b) the nucleic acid SEQ ID NO. 6510, or a homolog or fragment thereof, or a homolog thereof being depicted in Table I, application no. 2, column 8, in the same line as SEQ ID NO. 6510, preferably the coding region thereof, a homolog or a fragment thereof; which are operable linked.

[11940] In an embodiment thereof the expression cassette comprises in addition c) a nucleic acid molecule encoding a transit peptide, especially a plastidal transit petide in case in Table I, application no. 2, in column 6 in the same line as SEQ ID NO. 6510 is depicted, plastidic is mentioned, or a mitochondrial transit petide in case in Table I, application no. 2, in column 6 in the same line as SEQ ID NO. 6510 is depicted, mitochondrial is mentioned; which is operable linke, too.

[11941] In another embodiment thereof the expression cassette does not comprise an additional transit peptide in case in Table I, application no. 2, in column 6 in the same line as SEQ ID NO. 6510 is depicted, non-targeted is mentioned.

[11942] In an embodiment the present invention relates to an expresssion cassette comprising a) a promoter, prefereably a promoter selected from the group consisting of Big35S, PCUbi, Super and USP, in particular PCUbi; and b) the nucleic acid SEQ ID NO. 32037, or a homolog or fragment thereof, or a homolog thereof being depicted in Table I, application no. 2, column 8, in the same line as SEQ ID NO. 32037, preferably the coding region thereof, a homolog or a fragment thereof; which are operable linked.

[11943] In an embodiment thereof the expression cassette comprises in addition c) a nucleic acid molecule encoding a transit peptide, especially a plastidal transit petide in case in Table I, application no. 2, in column 6 in the same line as SEQ ID NO. 32037 is depicted, plastidic is mentioned, or a mitochondrial transit petide in case in Table I, application no. 2, in column 6 in the same line as SEQ ID NO. 32037 is depicted, mitochondrial is mentioned; which is operable linke, too.

[11944] In another embodiment thereof the expression cassette does not comprise an additional transit peptide in case in Table I, application no. 2, in column 6 in the same line as SEQ ID NO. 32037 is depicted, non-targeted is mentioned.

[11945] In an embodiment the present invention relates to an expresssion cassette comprising a) a promoter, prefereably a promoter selected from the group consisting of Big35S, PCUbi, Super and USP, in particular PCUbi; and b) the nucleic acid SEQ ID NO. 32308, or a homolog or fragment thereof, or a homolog thereof being depicted in Table I, application no. 2, column 8, in the same line as SEQ ID NO. 32308, preferably the coding region thereof, a homolog or a fragment thereof; which are operable linked.

[11946] In an embodiment thereof the expression cassette comprises in addition c) a nucleic acid molecule encoding a transit peptide, especially a plastidal transit petide in case in Table I, application no. 2, in column 6 in the same line as SEQ ID NO. 32308 is depicted, plastidic is mentioned, or a mitochondrial transit petide in case in Table I, application no. 2, in column 6 in the same line as SEQ ID NO. 32308 is depicted, mitochondrial is mentioned; which is operable linke, too.

[11947] In another embodiment thereof the expression cassette does not comprise an additional transit peptide in case in Table I, application no. 2, in column 6 in the same line as SEQ ID NO. 32308 is depicted, non-targeted is mentioned.

[11948] In an embodiment the present invention relates to an expresssion cassette comprising a) a promoter, prefereably a promoter selected from the group consisting of Big35S, PCUbi, Super and USP, in particular PCUbi; and b) the nucleic acid SEQ ID NO. 32648, or a homolog or fragment thereof, or a homolog thereof being depicted in Table I, application no. 2, column 8, in the same line as SEQ ID NO. 32648, preferably the coding region thereof, a homolog or a fragment thereof; which are operable linked.

[11949] In an embodiment thereof the expression cassette comprises in addition c) a nucleic acid molecule encoding a transit peptide, especially a plastidal transit petide in case in Table I, application no. 2, in column 6 in the same line as SEQ ID NO. 32648 is depicted, plastidic is mentioned, or a mitochondrial transit petide in case in Table I, application no. 2, in column 6 in the same line as SEQ ID NO. 32648 is depicted, mitochondrial is mentioned; which is operable linke, too.

[11950] In another embodiment thereof the expression cassette does not comprise an additional transit peptide in case in Table I, application no. 2, in column 6 in the same line as SEQ ID NO. 32648 is depicted, non-targeted is mentioned.

[11951] In an embodiment the present invention relates to an expresssion cassette comprising a) a promoter, prefereably a promoter selected from the group consisting of Big35S, PCUbi, Super and USP, in particular PCUbi; and b) the nucleic acid SEQ ID NO. 33085, or a homolog or fragment thereof, or a homolog thereof being depicted in Table I, application no. 2, column 8, in the same line as SEQ ID NO. 33085, preferably the coding region thereof, a homolog or a fragment thereof; which are operable linked.

[11952] In an embodiment thereof the expression cassette comprises in addition c) a nucleic acid molecule encoding a transit peptide, especially a plastidal transit petide in case in Table I, application no. 2, in column 6 in the same line as SEQ ID NO. 33085 is depicted, plastidic is mentioned, or a mitochondrial transit petide in case in Table I, application no. 2, in column 6 in the same line as SEQ ID NO. 33085 is depicted, mitochondrial is mentioned; which is operable linke, too.

[11953] In another embodiment thereof the expression cassette does not comprise an additional transit peptide in case in Table I, application no. 2, in column 6 in the same line as SEQ ID NO. 33085 is depicted, non-targeted is mentioned.

[11954] In an embodiment the present invention relates to an expresssion cassette comprising a) a promoter, prefereably a promoter selected from the group consisting of Big35S, PCUbi, Super and USP, in particular PCUbi; and b) the nucleic acid SEQ ID NO. 33457, or a homolog or fragment thereof, or a homolog thereof being depicted in Table I, application no. 2, column 8, in the same line as SEQ ID NO. 33457, preferably the coding region thereof, a homolog or a fragment thereof; which are operable linked.

[11955] In an embodiment thereof the expression cassette comprises in addition c) a nucleic acid molecule encoding a transit peptide, especially a plastidal transit petide in case in Table I, application no. 2, in column 6 in the same line as SEQ ID NO. 33457 is depicted, plastidic is mentioned, or a mitochondrial transit petide in case in Table I, application no. 2, in column 6 in the same line as SEQ ID NO. 33457 is depicted, mitochondrial is mentioned; which is operable linke, too.

[11956] In another embodiment thereof the expression cassette does not comprise an additional transit peptide in case in Table I, application no. 2, in column 6 in the same line as SEQ ID NO. 33457 is depicted, non-targeted is mentioned.

[11957] In an embodiment the present invention relates to an expresssion cassette comprising a) a promoter, prefereably a promoter selected from the group consisting of Big35S, PCUbi, Super and USP, in particular Super; and b) the nucleic acid SEQ ID NO. 7333, or a homolog or fragment thereof, or a homolog thereof being depicted in Table I, application no. 2, column 8, in the same line as SEQ ID NO. 7333, preferably the coding region thereof, a homolog or a fragment thereof; which are operable linked.

[11958] In an embodiment thereof the expression cassette comprises in addition c) a nucleic acid molecule encoding a transit peptide, especially a plastidal transit petide in case in Table I, application no. 2, in column 6 in the same line as SEQ ID NO. 7333 is depicted, plastidic is mentioned, or a mitochondrial transit petide in case in Table I, application no. 2, in column 6 in the same line as SEQ ID NO. 7333 is depicted, mitochondrial is mentioned; which is operable linke, too.

[11959] In another embodiment thereof the expression cassette does not comprise an additional transit peptide in case in Table I, application no. 2, in column 6 in the same line as SEQ ID NO. 7333 is depicted, non-targeted is mentioned.

[11960] In an embodiment the present invention relates to an expresssion cassette comprising a) a promoter, prefereably a promoter selected from the group consisting of Big35S, PCUbi, Super and USP, in particular PCUbi; and b) the nucleic acid SEQ ID NO. 34044, or a homolog or fragment thereof, or a homolog thereof being depicted in Table I, application no. 2, column 8, in the same line as SEQ ID NO. 34044, preferably the coding region thereof, a homolog or a fragment thereof; which are operable linked.

[11961] In an embodiment thereof the expression cassette comprises in addition c) a nucleic acid molecule encoding a transit peptide, especially a plastidal transit petide in case in Table I, application no. 2, in column 6 in the same line as SEQ ID NO. 34044 is depicted, plastidic is mentioned, or a mitochondrial transit petide in case in Table I, application no. 2, in column 6 in the same line as SEQ ID NO. 34044 is depicted, mitochondrial is mentioned; which is operable linke, too.

[11962] In another embodiment thereof the expression cassette does not comprise an additional transit peptide in case in Table I, application no. 2, in column 6 in the same line as SEQ ID NO. 34044 is depicted, non-targeted is mentioned.

[11963] In an embodiment the present invention relates to an expresssion cassette comprising a) a promoter, prefereably a promoter selected from the group consisting of Big35S, PCUbi, Super and USP, in particular USP; and b) the nucleic acid SEQ ID NO. 35733, or a homolog or fragment thereof, or a homolog thereof being depicted in Table I, application no. 2, column 8, in the same line as SEQ ID NO. 35733, preferably the coding region thereof, a homolog or a fragment thereof; which are operable linked.

[11964] In an embodiment thereof the expression cassette comprises in addition c) a nucleic acid molecule encoding a transit peptide, especially a plastidal transit petide in case in Table I, application no. 2, in column 6 in the same line as SEQ ID NO. 35733 is depicted, plastidic is mentioned, or a mitochondrial transit petide in case in Table I, application no. 2, in column 6 in the same line as SEQ ID NO. 35733 is depicted, mitochondrial is mentioned; which is operable linke, too.

[11965] In another embodiment thereof the expression cassette does not comprise an additional transit peptide in case in Table I, application no. 2, in column 6 in the same line as SEQ ID NO. 35733 is depicted, non-targeted is mentioned.

[11966] In an embodiment the present invention relates to an expresssion cassette comprising a) a promoter, prefereably a promoter selected from the group consisting of Big35S, PCUbi, Super and USP, in particular PCUbi; and b) the nucleic acid SEQ ID NO. 34301, or a homolog or fragment thereof, or a homolog thereof being depicted in Table I, application no. 2, column 8, in the same line as SEQ ID NO. 34301, preferably the coding region thereof, a homolog or a fragment thereof; which are operable linked.

[11967] In an embodiment thereof the expression cassette comprises in addition c) a nucleic acid molecule encoding a transit peptide, especially a plastidal transit petide in case in Table I, application no. 2, in column 6 in the same line as SEQ ID NO. 34301 is depicted, plastidic is mentioned, or a mitochondrial transit petide in case in Table I, application no. 2, in column 6 in the same line as SEQ ID NO. 34301 is depicted, mitochondrial is mentioned; which is operable linke, too.

[11968] In another embodiment thereof the expression cassette does not comprise an additional transit peptide in case in Table I, application no. 2, in column 6 in the same line as SEQ ID NO. 34301 is depicted, non-targeted is mentioned.

[11969] In an embodiment the present invention relates to an expresssion cassette comprising a) a promoter, prefereably a promoter selected from the group consisting of Big35S, PCUbi, Super and USP, in particular PCUbi; and b) the nucleic acid SEQ ID NO. 34602, or a homolog or fragment thereof, or a homolog thereof being depicted in Table I, application no. 2, column 8, in the same line as SEQ ID NO. 34602, preferably the coding region thereof, a homolog or a fragment thereof; which are operable linked.

[11970] In an embodiment thereof the expression cassette comprises in addition c) a nucleic acid molecule encoding a transit peptide, especially a plastidal transit petide in case in Table I, application no. 2, in column 6 in the same line as SEQ ID NO. 34602 is depicted, plastidic is mentioned, or a mitochondrial transit petide in case in Table I, application no. 2, in column 6 in the same line as SEQ ID NO. 34602 is depicted, mitochondrial is mentioned; which is operable linke, too.

[11971] In another embodiment thereof the expression cassette does not comprise an additional transit peptide in case in Table I, application no. 2, in column 6 in the same line as SEQ ID NO. 34602 is depicted, non-targeted is mentioned.

[11972] In an embodiment the present invention relates to an expresssion cassette comprising a) a promoter, prefereably a promoter selected from the group consisting of Big35S, PCUbi, Super and USP, in particular Super; and b) the nucleic acid SEQ ID NO. 34889, or a homolog or fragment thereof, or a homolog thereof being depicted in Table I, application no. 2, column 8, in the same line as SEQ ID NO. 34889, preferably the coding region thereof, a homolog or a fragment thereof; which are operable linked.

[11973] In an embodiment thereof the expression cassette comprises in addition c) a nucleic acid molecule encoding a transit peptide, especially a plastidal transit petide in case in Table I, application no. 2, in column 6 in the same line as SEQ ID NO. 34889 is depicted, plastidic is mentioned, or a mitochondrial transit petide in case in Table I, application no. 2, in column 6 in the same line as SEQ ID NO. 34889 is depicted, mitochondrial is mentioned; which is operable linke, too.

[11974] In another embodiment thereof the expression cassette does not comprise an additional transit peptide in case in Table I, application no. 2, in column 6 in the same line as SEQ ID NO. 34889 is depicted, non-targeted is mentioned.

[11975] In an embodiment the present invention relates to an expresssion cassette comprising a) a promoter, prefereably a promoter selected from the group consisting of Big35S, PCUbi, Super and USP, in particular USP; and b) the nucleic acid SEQ ID NO. 35204, or a homolog or fragment thereof, or a homolog thereof being depicted in Table I, application no. 2, column 8, in the same line as SEQ ID NO. 35204, preferably the coding region thereof, a homolog or a fragment thereof; which are operable linked.

[11976] In an embodiment thereof the expression cassette comprises in addition c) a nucleic acid molecule encoding a transit peptide, especially a plastidal transit petide in case in Table I, application no. 2, in column 6 in the same line as SEQ ID NO. 35204 is depicted, plastidic is mentioned, or a mitochondrial transit petide in case in Table I, application no. 2, in column 6 in the same line as SEQ ID NO. 35204 is depicted, mitochondrial is mentioned; which is operable linke, too.

[11977] In another embodiment thereof the expression cassette does not comprise an additional transit peptide in case in Table I, application no. 2, in column 6 in the same line as SEQ ID NO. 35204 is depicted, non-targeted is mentioned.

[11978] In an embodiment the present invention relates to an expresssion cassette comprising a) a promoter, prefereably a promoter selected from the group consisting of Big35S, PCUbi, Super and USP, in particular USP; and b) the nucleic acid SEQ ID NO. 35366, or a homolog or fragment thereof, or a homolog thereof being depicted in Table I, application no. 2, column 8, in the same line as SEQ ID NO. 35366, preferably the coding region thereof, a homolog or a fragment thereof; which are operable linked.

[11979] In an embodiment thereof the expression cassette comprises in addition c) a nucleic acid molecule encoding a transit peptide, especially a plastidal transit petide in case in Table I, application no. 2, in column 6 in the same line as SEQ ID NO. 35366 is depicted, plastidic is mentioned, or a mitochondrial transit petide in case in Table I, application no. 2, in column 6 in the same line as SEQ ID NO. 35366 is depicted, mitochondrial is mentioned; which is operable linke, too.

[11980] In another embodiment thereof the expression cassette does not comprise an additional transit peptide in case in Table I, application no. 2, in column 6 in the same line as SEQ ID NO. 35366 is depicted, non-targeted is mentioned.

[11981] In an embodiment the present invention relates to an expresssion cassette comprising a) a promoter, prefereably a promoter selected from the group consisting of Big35S, PCUbi, Super and USP, in particular Super and USP; and b) the nucleic acid SEQ ID NO. 35482, or a homolog or fragment thereof, or a homolog thereof being depicted in Table I, application no. 2, column 8, in the same line as SEQ ID NO. 35482, preferably the coding region thereof, a homolog or a fragment thereof; which are operable linked.

[11982] In an embodiment thereof the expression cassette comprises in addition c) a nucleic acid molecule encoding a transit peptide, especially a plastidal transit petide in case in Table I, application no. 2, in column 6 in the same line as SEQ ID NO. 35482 is depicted, plastidic is mentioned, or a mitochondrial transit petide in case in Table I, application no. 2, in column 6 in the same line as SEQ ID NO. 35482 is depicted, mitochondrial is mentioned; which is operable linke, too.

[11983] In another embodiment thereof the expression cassette does not comprise an additional transit peptide in case in Table I, application no. 2, in column 6 in the same line as SEQ ID NO. 35482 is depicted, non-targeted is mentioned.

[11984] In an embodiment the present invention relates to an expresssion cassette comprising a) a promoter, prefereably a promoter selected from the group consisting of Big35S, PCUbi, Super and USP, in particular Super; and b) the nucleic acid SEQ ID NO. 7081, or a homolog or fragment thereof, or a homolog thereof being depicted in Table I, application no. 2, column 8, in the same line as SEQ ID NO. 7081, preferably the coding region thereof, a homolog or a fragment thereof; which are operable linked.

[11985] In an embodiment thereof the expression cassette comprises in addition c) a nucleic acid molecule encoding a transit peptide, especially a plastidal transit petide in case in Table I, application no. 2, in column 6 in the same line as SEQ ID NO. 7081 is depicted, plastidic is mentioned, or a mitochondrial transit petide in case in Table I, application no. 2, in column 6 in the same line as SEQ ID NO. 7081 is depicted, mitochondrial is mentioned; which is operable linke, too.

[11986] In another embodiment thereof the expression cassette does not comprise an additional transit peptide in case in Table I, application no. 2, in column 6 in the same line as SEQ ID NO. 7081 is depicted, non-targeted is mentioned.

[11987] In an embodiment the present invention relates to an expresssion cassette comprising a) a promoter, prefereably a promoter selected from the group consisting of Big35S, PCUbi, Super and USP, in particular Super; and b) the nucleic acid SEQ ID NO. 37483, or a homolog or fragment thereof, or a homolog thereof being depicted in Table I, application no. 2, column 8, in the same line as SEQ ID NO. 37483, preferably the coding region thereof, a homolog or a fragment thereof; which are operable linked.

[11988] In an embodiment thereof the expression cassette comprises in addition c) a nucleic acid molecule encoding a transit peptide, especially a plastidal transit petide in case in Table I, application no. 2, in column 6 in the same line as SEQ ID NO. 37483 is depicted, plastidic is mentioned, or a mitochondrial transit petide in case in Table I, application no. 2, in column 6 in the same line as SEQ ID NO. 37483 is depicted, mitochondrial is mentioned; which is operable linke, too.

[11989] In another embodiment thereof the expression cassette does not comprise an additional transit peptide in case in Table I, application no. 2, in column 6 in the same line as SEQ ID NO. 37483 is depicted, non-targeted is mentioned.

[11990] In an embodiment the present invention relates to an expresssion cassette comprising a) a promoter, prefereably a promoter selected from the group consisting of Big35S, PCUbi, Super and USP, in particular PCUbi; and b) the nucleic acid SEQ ID NO. 33596, or a homolog or fragment thereof, or a homolog thereof being depicted in Table I, application no. 2, column 8, in the same line as SEQ ID NO. 33596, preferably the coding region thereof, a homolog or a fragment thereof; which are operable linked.

[11991] In an embodiment thereof the expression cassette comprises in addition c) a nucleic acid molecule encoding a transit peptide, especially a plastidal transit petide in case in Table I, application no. 2, in column 6 in the same line as SEQ ID NO. 33596 is depicted, plastidic is mentioned, or a mitochondrial transit petide in case in Table I, application no. 2, in column 6 in the same line as SEQ ID NO. 33596 is depicted, mitochondrial is mentioned; which is operable linke, too.

[11992] In another embodiment thereof the expression cassette does not comprise an additional transit peptide in case in Table I, application no. 2, in column 6 in the same line as SEQ ID NO. 33596 is depicted, non-targeted is mentioned.

[11993] In an embodiment the present invention relates to an expresssion cassette comprising a) a promoter, prefereably a promoter selected from the group consisting of Big35S, PCUbi, Super and USP, in particular Super; and b) the nucleic acid SEQ ID NO. 40637, or a homolog or fragment thereof, or a homolog thereof being depicted in Table I, application no. 2, column 8, in the same line as SEQ ID NO. 40637, preferably the coding region thereof, a homolog or a fragment thereof; which are operable linked.

[11994] In an embodiment thereof the expression cassette comprises in addition c) a nucleic acid molecule encoding a transit peptide, especially a plastidal transit petide in case in Table I, application no. 2, in column 6 in the same line as SEQ ID NO. 40637 is depicted, plastidic is mentioned, or a mitochondrial transit petide in case in Table I, application no. 2, in column 6 in the same line as SEQ ID NO. 40637 is depicted, mitochondrial is mentioned; which is operable linke, too.

[11995] In another embodiment thereof the expression cassette does not comprise an additional transit peptide in case in Table I, application no. 2, in column 6 in the same line as SEQ ID NO. 40637 is depicted, non-targeted is mentioned.

[11996] In an embodiment the present invention relates to an expresssion cassette comprising a) a promoter, prefereably a promoter selected from the group consisting of Big35S, PCUbi, Super and USP, in particular Super; and b) the nucleic acid SEQ ID NO. 37394, or a homolog or fragment thereof, or a homolog thereof being depicted in Table I, application no. 2, column 8, in the same line as SEQ ID NO. 37394, preferably the coding region thereof, a homolog or a fragment thereof; which are operable linked.

[11997] In an embodiment thereof the expression cassette comprises in addition c) a nucleic acid molecule encoding a transit peptide, especially a plastidal transit petide in case in Table I, application no. 2, in column 6 in the same line as SEQ ID NO. 37394 is depicted, plastidic is mentioned, or a mitochondrial transit petide in case in Table I, application no. 2, in column 6 in the same line as SEQ ID NO. 37394 is depicted, mitochondrial is mentioned; which is operable linke, too.

[11998] In another embodiment thereof the expression cassette does not comprise an additional transit peptide in case in Table I, application no. 2, in column 6 in the same line as SEQ ID NO. 37394 is depicted, non-targeted is mentioned.

[11999] In an embodiment the present invention relates to an expresssion cassette comprising a) a promoter, prefereably a promoter selected from the group consisting of Big35S, PCUbi, Super and USP, in particular Super; and b) the nucleic acid SEQ ID NO. 39219, or a homolog or fragment thereof, or a homolog thereof being depicted in Table I, application no. 2, column 8, in the same line as SEQ ID NO. 39219, preferably the coding region thereof, a homolog or a fragment thereof; which are operable linked.

[12000] In an embodiment thereof the expression cassette comprises in addition c) a nucleic acid molecule encoding a transit peptide, especially a plastidal transit petide in case in Table I, application no. 2, in column 6 in the same line as SEQ ID NO. 39219 is depicted, plastidic is mentioned, or a mitochondrial transit petide in case in Table I, application no. 2, in column 6 in the same line as SEQ ID NO. 39219 is depicted, mitochondrial is mentioned; which is operable linke, too.

[12001] In another embodiment thereof the expression cassette does not comprise an additional transit peptide in case in Table I, application no. 2, in column 6 in the same line as SEQ ID NO. 39219 is depicted, non-targeted is mentioned.

[12002] In an embodiment the present invention relates to an expresssion cassette comprising a) a promoter, prefereably a promoter selected from the group consisting of Big35S, PCUbi, Super and USP, in particular Super; and b) the nucleic acid SEQ ID NO. 39237, or a homolog or fragment thereof, or a homolog thereof being depicted in Table I, application no. 2, column 8, in the same line as SEQ ID NO. 39237, preferably the coding region thereof, a homolog or a fragment thereof; which are operable linked.

[12003] In an embodiment thereof the expression cassette comprises in addition c) a nucleic acid molecule encoding a transit peptide, especially a plastidal transit petide in case in Table I, application no. 2, in column 6 in the same line as SEQ ID NO. 39237 is depicted, plastidic is mentioned, or a mitochondrial transit petide in case in Table I, application no. 2, in column 6 in the same line as SEQ ID NO. 39237 is depicted, mitochondrial is mentioned; which is operable linke, too.

[12004] In another embodiment thereof the expression cassette does not comprise an additional transit peptide in case in Table I, application no. 2, in column 6 in the same line as SEQ ID NO. 39237 is depicted, non-targeted is mentioned.

[12005] In an embodiment the present invention relates to an expresssion cassette comprising a) a promoter, prefereably a promoter selected from the group consisting of Big35S, PCUbi, Super and USP, in particular Super; and b) the nucleic acid SEQ ID NO. 39255, or a homolog or fragment thereof, or a homolog thereof being depicted in Table I, application no. 2, column 8, in the same line as SEQ ID NO. 39255, preferably the coding region thereof, a homolog or a fragment thereof; which are operable linked.

[12006] In an embodiment thereof the expression cassette comprises in addition c) a nucleic acid molecule encoding a transit peptide, especially a plastidal transit petide in case in Table I, application no. 2, in column 6 in the same line as SEQ ID NO. 39255 is depicted, plastidic is mentioned, or a mitochondrial transit petide in case in Table I, application no. 2, in column 6 in the same line as SEQ ID NO. 39255 is depicted, mitochondrial is mentioned; which is operable linke, too.

[12007] In another embodiment thereof the expression cassette does not comprise an additional transit peptide in case in Table I, application no. 2, in column 6 in the same line as SEQ ID NO. 39255 is depicted, non-targeted is mentioned.

[12008] In an embodiment the present invention relates to an expresssion cassette comprising a) a promoter, prefereably a promoter selected from the group consisting of Big35S, PCUbi, Super and USP, in particular Super; and b) the nucleic acid SEQ ID NO. 39300, or a homolog or fragment thereof, or a homolog thereof being depicted in Table I, application no. 2, column 8, in the same line as SEQ ID NO. 39300, preferably the coding region thereof, a homolog or a fragment thereof; which are operable linked.

[12009] In an embodiment thereof the expression cassette comprises in addition c) a nucleic acid molecule encoding a transit peptide, especially a plastidal transit petide in case in Table I, application no. 2, in column 6 in the same line as SEQ ID NO. 39300 is depicted, plastidic is mentioned, or a mitochondrial transit petide in case in Table I, application no. 2, in column 6 in the same line as SEQ ID NO. 39300 is depicted, mitochondrial is mentioned; which is operable linke, too.

[12010] In another embodiment thereof the expression cassette does not comprise an additional transit peptide in case in Table I, application no. 2, in column 6 in the same line as SEQ ID NO. 39300 is depicted, non-targeted is mentioned.

[12011] In an embodiment the present invention relates to an expresssion cassette comprising a) a promoter, prefereably a promoter selected from the group consisting of Big35S, PCUbi, Super and USP, in particular Super; and b) the nucleic acid SEQ ID NO. 40299, or a homolog or fragment thereof, or a homolog thereof being depicted in Table I, application no. 2, column 8, in the same line as SEQ ID NO. 40299, preferably the coding region thereof, a homolog or a fragment thereof; which are operable linked.

[12012] In an embodiment thereof the expression cassette comprises in addition c) a nucleic acid molecule encoding a transit peptide, especially a plastidal transit petide in case in Table I, application no. 2, in column 6 in the same line as SEQ ID NO. 40299 is depicted, plastidic is mentioned, or a mitochondrial transit petide in case in Table I, application no. 2, in column 6 in the same line as SEQ ID NO. 40299 is depicted, mitochondrial is mentioned; which is operable linke, too.

[12013] In another embodiment thereof the expression cassette does not comprise an additional transit peptide in case in Table I, application no. 2, in column 6 in the same line as SEQ ID NO. 40299 is depicted, non-targeted is mentioned.

[12014] In an embodiment the present invention relates to an expresssion cassette comprising a) a promoter, prefereably a promoter selected from the group consisting of Big35S, PCUbi, Super and USP, in particular Super; and b) the nucleic acid SEQ ID NO. 40329, or a homolog or fragment thereof, or a homolog thereof being depicted in Table I, application no. 2, column 8, in the same line as SEQ ID NO. 40329, preferably the coding region thereof, a homolog or a fragment thereof; which are operable linked.

[12015] In an embodiment thereof the expression cassette comprises in addition c) a nucleic acid molecule encoding a transit peptide, especially a plastidal transit petide in case in Table I, application no. 2, in column 6 in the same line as SEQ ID NO. 40329 is depicted, plastidic is mentioned, or a mitochondrial transit petide in case in Table I, application no. 2, in column 6 in the same line as SEQ ID NO. 40329 is depicted, mitochondrial is mentioned; which is operable linke, too.

[12016] In another embodiment thereof the expression cassette does not comprise an additional transit peptide in case in Table I, application no. 2, in column 6 in the same line as SEQ ID NO. 40329 is depicted, non-targeted is mentioned.

[12017] In an embodiment the present invention relates to an expresssion cassette comprising a) a promoter, prefereably a promoter selected from the group consisting of Big35S, PCUbi, Super and USP, in particular Super; and b) the nucleic acid SEQ ID NO. 39040, or a homolog or fragment thereof, or a homolog thereof being depicted in Table I, application no. 2, column 8, in the same line as SEQ ID NO. 39040, preferably the coding region thereof, a homolog or a fragment thereof; which are operable linked.

[12018] In an embodiment thereof the expression cassette comprises in addition c) a nucleic acid molecule encoding a transit peptide, especially a plastidal transit petide in case in Table I, application no. 2, in column 6 in the same line as SEQ ID NO. 39040 is depicted, plastidic is mentioned, or a mitochondrial transit petide in case in Table I, application no. 2, in column 6 in the same line as SEQ ID NO. 39040 is depicted, mitochondrial is mentioned; which is operable linke, too.

[12019] In another embodiment thereof the expression cassette does not comprise an additional transit peptide in case in Table I, application no. 2, in column 6 in the same line as SEQ ID NO. 39040 is depicted, non-targeted is mentioned.

[12020] In an embodiment the present invention relates to an expresssion cassette comprising a) a promoter, prefereably a promoter selected from the group consisting of Big35S, PCUbi, Super and USP, in particular Super; and b) the nucleic acid SEQ ID NO. 40383, or a homolog or fragment thereof, or a homolog thereof being depicted in Table I, application no. 2, column 8, in the same line as SEQ ID NO. 40383, preferably the coding region thereof, a homolog or a fragment thereof; which are operable linked.

[12021] In an embodiment thereof the expression cassette comprises in addition c) a nucleic acid molecule encoding a transit peptide, especially a plastidal transit petide in case in Table I, application no. 2, in column 6 in the same line as SEQ ID NO. 40383 is depicted, plastidic is mentioned, or a mitochondrial transit petide in case in Table I, application no. 2, in column 6 in the same line as SEQ ID NO. 40383 is depicted, mitochondrial is mentioned; which is operable linke, too.

[12022] In another embodiment thereof the expression cassette does not comprise an additional transit peptide in case in Table I, application no. 2, in column 6 in the same line as SEQ ID NO. 40383 is depicted, non-targeted is mentioned.

[12023] In an embodiment the present invention relates to an expresssion cassette comprising a) a promoter, prefereably a promoter selected from the group consisting of Big35S, PCUbi, Super and USP, in particular Super; and b) the nucleic acid SEQ ID NO. 39013, or a homolog or fragment thereof, or a homolog thereof being depicted in Table I, application no. 2, column 8, in the same line as SEQ ID NO. 39013, preferably the coding region thereof, a homolog or a fragment thereof; which are operable linked.

[12024] In an embodiment thereof the expression cassette comprises in addition c) a nucleic acid molecule encoding a transit peptide, especially a plastidal transit petide in case in Table I, application no. 2, in column 6 in the same line as SEQ ID NO. 39013 is depicted, plastidic is mentioned, or a mitochondrial transit petide in case in Table I, application no. 2, in column 6 in the same line as SEQ ID NO. 39013 is depicted, mitochondrial is mentioned; which is operable linke, too.

[12025] In another embodiment thereof the expression cassette does not comprise an additional transit peptide in case in Table I, application no. 2, in column 6 in the same line as SEQ ID NO. 39013 is depicted, non-targeted is mentioned.

[12026] In an embodiment the present invention relates to an expresssion cassette comprising a) a promoter, prefereably a promoter selected from the group consisting of Big35S, PCUbi, Super and USP, in particular Super; and b) the nucleic acid SEQ ID NO. 40665, or a homolog or fragment thereof, or a homolog thereof being depicted in Table I, application no. 2, column 8, in the same line as SEQ ID NO. 40665, preferably the coding region thereof, a homolog or a fragment thereof; which are operable linked.

[12027] In an embodiment thereof the expression cassette comprises in addition c) a nucleic acid molecule encoding a transit peptide, especially a plastidal transit petide in case in Table I, application no. 2, in column 6 in the same line as SEQ ID NO. 40665 is depicted, plastidic is mentioned, or a mitochondrial transit petide in case in Table I, application no. 2, in column 6 in the same line as SEQ ID NO. 40665 is depicted, mitochondrial is mentioned; which is operable linke, too.

[12028] In another embodiment thereof the expression cassette does not comprise an additional transit peptide in case in Table I, application no. 2, in column 6 in the same line as SEQ ID NO. 40665 is depicted, non-targeted is mentioned.

[12029] In an embodiment the present invention relates to an expresssion cassette comprising a) a promoter, prefereably a promoter selected from the group consisting of Big35S, PCUbi, Super and USP, in particular Super; and b) the nucleic acid SEQ ID NO. 40726, or a homolog or fragment thereof, or a homolog thereof being depicted in Table I, application no. 2, column 8, in the same line as SEQ ID NO. 40726, preferably the coding region thereof, a homolog or a fragment thereof; which are operable linked.

[12030] In an embodiment thereof the expression cassette comprises in addition c) a nucleic acid molecule encoding a transit peptide, especially a plastidal transit petide in case in Table I, application no. 2, in column 6 in the same line as SEQ ID NO. 40726 is depicted, plastidic is mentioned, or a mitochondrial transit petide in case in Table I, application no. 2, in column 6 in the same line as SEQ ID NO. 40726 is depicted, mitochondrial is mentioned; which is operable linke, too.

[12031] In another embodiment thereof the expression cassette does not comprise an additional transit peptide in case in Table I, application no. 2, in column 6 in the same line as SEQ ID NO. 40726 is depicted, non-targeted is mentioned.

[12032] In an embodiment the present invention relates to an expresssion cassette comprising a) a promoter, prefereably a promoter selected from the group consisting of Big35S, PCUbi, Super and USP, in particular Super; and b) the nucleic acid SEQ ID NO. 9244, or a homolog or fragment thereof, or a homolog thereof being depicted in Table I, application no. 2, column 8, in the same line as SEQ ID NO. 9244, preferably the coding region thereof, a homolog or a fragment thereof; which are operable linked.

[12033] In an embodiment thereof the expression cassette comprises in addition c) a nucleic acid molecule encoding a transit peptide, especially a plastidal transit petide in case in Table I, application no. 2, in column 6 in the same line as SEQ ID NO. 9244 is depicted, plastidic is mentioned, or a mitochondrial transit petide in case in Table I, application no. 2, in column 6 in the same line as SEQ ID NO. 9244 is depicted, mitochondrial is mentioned; which is operable linke, too.

[12034] In another embodiment thereof the expression cassette does not comprise an additional transit peptide in case in Table I, application no. 2, in column 6 in the same line as SEQ ID NO. 9244 is depicted, non-targeted is mentioned.

[12035] In an embodiment the present invention relates to an expresssion cassette comprising a) a promoter, prefereably a promoter selected from the group consisting of Big35S, PCUbi, Super and USP, in particular Super; and b) the nucleic acid SEQ ID NO. 40741, or a homolog or fragment thereof, or a homolog thereof being depicted in Table I, application no. 2, column 8, in the same line as SEQ ID NO. 40741, preferably the coding region thereof, a homolog or a fragment thereof; which are operable linked.

[12036] In an embodiment thereof the expression cassette comprises in addition c) a nucleic acid molecule encoding a transit peptide, especially a plastidal transit petide in case in Table I, application no. 2, in column 6 in the same line as SEQ ID NO. 40741 is depicted, plastidic is mentioned, or a mitochondrial transit petide in case in Table I, application no. 2, in column 6 in the same line as SEQ ID NO. 40741 is depicted, mitochondrial is mentioned; which is operable linke, too.

[12037] In another embodiment thereof the expression cassette does not comprise an additional transit peptide in case in Table I, application no. 2, in column 6 in the same line as SEQ ID NO. 40741 is depicted, non-targeted is mentioned.

[12038] In an embodiment the present invention relates to an expresssion cassette comprising a) a promoter, prefereably a promoter selected from the group consisting of Big35S, PCUbi, Super and USP, in particular Super; and b) the nucleic acid SEQ ID NO. 40795, or a homolog or fragment thereof, or a homolog thereof being depicted in Table I, application no. 2, column 8, in the same line as SEQ ID NO. 40795, preferably the coding region thereof, a homolog or a fragment thereof; which are operable linked.

[12039] In an embodiment thereof the expression cassette comprises in addition c) a nucleic acid molecule encoding a transit peptide, especially a plastidal transit petide in case in Table I, application no. 2, in column 6 in the same line as SEQ ID NO. 40795 is depicted, plastidic is mentioned, or a mitochondrial transit petide in case in Table I, application no. 2, in column 6 in the same line as SEQ ID NO. 40795 is depicted, mitochondrial is mentioned; which is operable linke, too.

[12040] In another embodiment thereof the expression cassette does not comprise an additional transit peptide in case in Table I, application no. 2, in column 6 in the same line as SEQ ID NO. 40795 is depicted, non-targeted is mentioned.

[12041] In an embodiment the present invention relates to an expresssion cassette comprising a) a promoter, prefereably a promoter selected from the group consisting of Big35S, PCUbi, Super and USP, in particular Super; and b) the nucleic acid SEQ ID NO. 40984, or a homolog or fragment thereof, or a homolog thereof being depicted in Table I, application no. 2, column 8, in the same line as SEQ ID NO. 40984, preferably the coding region thereof, a homolog or a fragment thereof; which are operable linked.

[12042] In an embodiment thereof the expression cassette comprises in addition c) a nucleic acid molecule encoding a transit peptide, especially a plastidal transit petide in case in Table I, application no. 2, in column 6 in the same line as SEQ ID NO. 40984 is depicted, plastidic is mentioned, or a mitochondrial transit petide in case in Table I, application no. 2, in column 6 in the same line as SEQ ID NO. 40984 is depicted, mitochondrial is mentioned; which is operable linke, too.

[12043] In another embodiment thereof the expression cassette does not comprise an additional transit peptide in case in Table I, application no. 2, in column 6 in the same line as SEQ ID NO. 40984 is depicted, non-targeted is mentioned.

[12044] In an embodiment the present invention relates to an expresssion cassette comprising a) a promoter, prefereably a promoter selected from the group consisting of Big35S, PCUbi, Super and USP, in particular Super; and b) the nucleic acid SEQ ID NO. 41006, or a homolog or fragment thereof, or a homolog thereof being depicted in Table I, application no. 2, column 8, in the same line as SEQ ID NO. 41006, preferably the coding region thereof, a homolog or a fragment thereof; which are operable linked.

[12045] In an embodiment thereof the expression cassette comprises in addition c) a nucleic acid molecule encoding a transit peptide, especially a plastidal transit petide in case in Table I, application no. 2, in column 6 in the same line as SEQ ID NO. 41006 is depicted, plastidic is mentioned, or a mitochondrial transit petide in case in Table I, application no. 2, in column 6 in the same line as SEQ ID NO. 41006 is depicted, mitochondrial is mentioned; which is operable linke, too.

[12046] In another embodiment thereof the expression cassette does not comprise an additional transit peptide in case in Table I, application no. 2, in column 6 in the same line as SEQ ID NO. 41006 is depicted, non-targeted is mentioned.

[12047] In an embodiment the present invention relates to an expresssion cassette comprising a) a promoter, prefereably a promoter selected from the group consisting of Big35S, PCUbi, Super and USP, in particular PCUbi; and b) the nucleic acid SEQ ID NO. 15187, or a homolog or fragment thereof, or a homolog thereof being depicted in Table I, application no. 2, column 8, in the same line as SEQ ID NO. 15187, preferably the coding region thereof, a homolog or a fragment thereof; which are operable linked.

[12048] In an embodiment thereof the expression cassette comprises in addition c) a nucleic acid molecule encoding a transit peptide, especially a plastidal transit petide in case in Table I, application no. 2, in column 6 in the same line as SEQ ID NO. 15187 is depicted, plastidic is mentioned, or a mitochondrial transit petide in case in Table I, application no. 2, in column 6 in the same line as SEQ ID NO. 15187 is depicted, mitochondrial is mentioned; which is operable linke, too.

[12049] In another embodiment thereof the expression cassette does not comprise an additional transit peptide in case in Table I, application no. 2, in column 6 in the same line as SEQ ID NO. 15187 is depicted, non-targeted is mentioned.

[12050] In an embodiment the present invention relates to an expresssion cassette comprising a) a promoter, prefereably a promoter selected from the group consisting of Big35S, PCUbi, Super and USP, in particular Super; and b) the nucleic acid SEQ ID NO. 9167, or a homolog or fragment thereof, or a homolog thereof being depicted in Table I, application no. 2, column 8, in the same line as SEQ ID NO. 9167, preferably the coding region thereof, a homolog or a fragment thereof; which are operable linked.

[12051] In an embodiment thereof the expression cassette comprises in addition c) a nucleic acid molecule encoding a transit peptide, especially a plastidal transit petide in case in Table I, application no. 2, in column 6 in the same line as SEQ ID NO. 9167 is depicted, plastidic is mentioned, or a mitochondrial transit petide in case in Table I, application no. 2, in column 6 in the same line as SEQ ID NO. 9167 is depicted, mitochondrial is mentioned; which is operable linke, too.

[12052] In another embodiment thereof the expression cassette does not comprise an additional transit peptide in case in Table I, application no. 2, in column 6 in the same line as SEQ ID NO. 9167 is depicted, non-targeted is mentioned.

[12053] In an embodiment the present invention relates to an expresssion cassette comprising a) a promoter, prefereably a promoter selected from the group consisting of Big35S, PCUbi, Super and USP, in particular Super; and b) the nucleic acid SEQ ID NO. 7947, or a homolog or fragment thereof, or a homolog thereof being depicted in Table I, application no. 2, column 8, in the same line as SEQ ID NO. 7947, preferably the coding region thereof, a homolog or a fragment thereof; which are operable linked.

[12054] In an embodiment thereof the expression cassette comprises in addition c) a nucleic acid molecule encoding a transit peptide, especially a plastidal transit petide in case in Table I, application no. 2, in column 6 in the same line as SEQ ID NO. 7947 is depicted, plastidic is mentioned, or a mitochondrial transit petide in case in Table I, application no. 2, in column 6 in the same line as SEQ ID NO. 7947 is depicted, mitochondrial is mentioned; which is operable linke, too.

[12055] In another embodiment thereof the expression cassette does not comprise an additional transit peptide in case in Table I, application no. 2, in column 6 in the same line as SEQ ID NO. 7947 is depicted, non-targeted is mentioned.

[12056] In an embodiment the present invention relates to an expresssion cassette comprising a) a promoter, prefereably a promoter selected from the group consisting of Big35S, PCUbi, Super and USP, in particular PCUbi; and b) the nucleic acid SEQ ID NO. 30464, or a homolog or fragment thereof, or a homolog thereof being depicted in Table I, application no. 2, column 8, in the same line as SEQ ID NO. 30464, preferably the coding region thereof, a homolog or a fragment thereof; which are operable linked.

[12057] In an embodiment thereof the expression cassette comprises in addition c) a nucleic acid molecule encoding a transit peptide, especially a plastidal transit petide in case in Table I, application no. 2, in column 6 in the same line as SEQ ID NO. 30464 is depicted, plastidic is mentioned, or a mitochondrial transit petide in case in Table I, application no. 2, in column 6 in the same line as SEQ ID NO. 30464 is depicted, mitochondrial is mentioned; which is operable linke, too.

[12058] In another embodiment thereof the expression cassette does not comprise an additional transit peptide in case in Table I, application no. 2, in column 6 in the same line as SEQ ID NO. 30464 is depicted, non-targeted is mentioned.

[12059] In an embodiment the present invention relates to an expresssion cassette comprising a) a promoter, prefereably a promoter selected from the group consisting of Big35S, PCUbi, Super and USP, in particular Super; and b) the nucleic acid SEQ ID NO. 37503, or a homolog or fragment thereof, or a homolog thereof being depicted in Table I, application no. 2, column 8, in the same line as SEQ ID NO. 37503, preferably the coding region thereof, a homolog or a fragment thereof; which are operable linked.

[12060] In an embodiment thereof the expression cassette comprises in addition c) a nucleic acid molecule encoding a transit peptide, especially a plastidal transit petide in case in Table I, application no. 2, in column 6 in the same line as SEQ ID NO. 37503 is depicted, plastidic is mentioned, or a mitochondrial transit petide in case in Table I, application no. 2, in column 6 in the same line as SEQ ID NO. 37503 is depicted, mitochondrial is mentioned; which is operable linke, too.

[12061] In another embodiment thereof the expression cassette does not comprise an additional transit peptide in case in Table I, application no. 2, in column 6 in the same line as SEQ ID NO. 37503 is depicted, non-targeted is mentioned.

[12062] In an embodiment the present invention relates to an expresssion cassette comprising a) a promoter, prefereably a promoter selected from the group consisting of Big35S, PCUbi, Super and USP, in particular USP; and b) the nucleic acid SEQ ID NO. 37539, or a homolog or fragment thereof, or a homolog thereof being depicted in Table I, application no. 2, column 8, in the same line as SEQ ID NO. 37539, preferably the coding region thereof, a homolog or a fragment thereof; which are operable linked.

[12063] In an embodiment thereof the expression cassette comprises in addition c) a nucleic acid molecule encoding a transit peptide, especially a plastidal transit petide in case in Table I, application no. 2, in column 6 in the same line as SEQ ID NO. 37539 is depicted, plastidic is mentioned, or a mitochondrial transit petide in case in Table I, application no. 2, in column 6 in the same line as SEQ ID NO. 37539 is depicted, mitochondrial is mentioned; which is operable linke, too.

[12064] In another embodiment thereof the expression cassette does not comprise an additional transit peptide in case in Table I, application no. 2, in column 6 in the same line as SEQ ID NO. 37539 is depicted, non-targeted is mentioned.

[12065] In an embodiment the present invention relates to an expresssion cassette comprising a) a promoter, prefereably a promoter selected from the group consisting of Big35S, PCUbi, Super and USP, in particular Super; and b) the nucleic acid SEQ ID NO. 37573, or a homolog or fragment thereof, or a homolog thereof being depicted in Table I, application no. 2, column 8, in the same line as SEQ ID NO. 37573, preferably the coding region thereof, a homolog or a fragment thereof; which are operable linked.

[12066] In an embodiment thereof the expression cassette comprises in addition c) a nucleic acid molecule encoding a transit peptide, especially a plastidal transit petide in case in Table I, application no. 2, in column 6 in the same line as SEQ ID NO. 37573 is depicted, plastidic is mentioned, or a mitochondrial transit petide in case in Table I, application no. 2, in column 6 in the same line as SEQ ID NO. 37573 is depicted, mitochondrial is mentioned; which is operable linke, too.

[12067] In another embodiment thereof the expression cassette does not comprise an additional transit peptide in case in Table I, application no. 2, in column 6 in the same line as SEQ ID NO. 37573 is depicted, non-targeted is mentioned.

[12068] In an embodiment the present invention relates to an expresssion cassette comprising a) a promoter, prefereably a promoter selected from the group consisting of Big35S, PCUbi, Super and USP, in particular USP; and b) the nucleic acid SEQ ID NO. 37658, or a homolog or fragment thereof, or a homolog thereof being depicted in Table I, application no. 2, column 8, in the same line as SEQ ID NO. 37658, preferably the coding region thereof, a homolog or a fragment thereof; which are operable linked.

[12069] In an embodiment thereof the expression cassette comprises in addition c) a nucleic acid molecule encoding a transit peptide, especially a plastidal transit petide in case in Table I, application no. 2, in column 6 in the same line as SEQ ID NO. 37658 is depicted, plastidic is mentioned, or a mitochondrial transit petide in case in Table I, application no. 2, in column 6 in the same line as SEQ ID NO. 37658 is depicted, mitochondrial is mentioned; which is operable linke, too.

[12070] In another embodiment thereof the expression cassette does not comprise an additional transit peptide in case in Table I, application no. 2, in column 6 in the same line as SEQ ID NO. 37658 is depicted, non-targeted is mentioned.

[12071] In an embodiment the present invention relates to an expresssion cassette comprising a) a promoter, prefereably a promoter selected from the group consisting of Big35S, PCUbi, Super and USP, in particular Super; and b) the nucleic acid SEQ ID NO. 37807, or a homolog or fragment thereof, or a homolog thereof being depicted in Table I, application no. 2, column 8, in the same line as SEQ ID NO. 37807, preferably the coding region thereof, a homolog or a fragment thereof; which are operable linked.

[12072] In an embodiment thereof the expression cassette comprises in addition c) a nucleic acid molecule encoding a transit peptide, especially a plastidal transit petide in case in Table I, application no. 2, in column 6 in the same line as SEQ ID NO. 37807 is depicted, plastidic is mentioned, or a mitochondrial transit petide in case in Table I, application no. 2, in column 6 in the same line as SEQ ID NO. 37807 is depicted, mitochondrial is mentioned; which is operable linke, too.

[12073] In another embodiment thereof the expression cassette does not comprise an additional transit peptide in case in Table I, application no. 2, in column 6 in the same line as SEQ ID NO. 37807 is depicted, non-targeted is mentioned.

[12074] In an embodiment the present invention relates to an expresssion cassette comprising a) a promoter, prefereably a promoter selected from the group consisting of Big35S, PCUbi, Super and USP, in particular Super; and b) the nucleic acid SEQ ID NO. 38226, or a homolog or fragment thereof, or a homolog thereof being depicted in Table I, application no. 2, column 8, in the same line as SEQ ID NO. 38226, preferably the coding region thereof, a homolog or a fragment thereof; which are operable linked.

[12075] In an embodiment thereof the expression cassette comprises in addition c) a nucleic acid molecule encoding a transit peptide, especially a plastidal transit petide in case in Table I, application no. 2, in column 6 in the same line as SEQ ID NO. 38226 is depicted, plastidic is mentioned, or a mitochondrial transit petide in case in Table I, application no. 2, in column 6 in the same line as SEQ ID NO. 38226 is depicted, mitochondrial is mentioned; which is operable linke, too.

[12076] In another embodiment thereof the expression cassette does not comprise an additional transit peptide in case in Table I, application no. 2, in column 6 in the same line as SEQ ID NO. 38226 is depicted, non-targeted is mentioned.

[12077] In an embodiment the present invention relates to an expresssion cassette comprising a) a promoter, prefereably a promoter selected from the group consisting of Big35S, PCUbi, Super and USP, in particular USP; and b) the nucleic acid SEQ ID NO. 39120, or a homolog or fragment thereof, or a homolog thereof being depicted in Table I, application no. 2, column 8, in the same line as SEQ ID NO. 39120, preferably the coding region thereof, a homolog or a fragment thereof; which are operable linked.

[12078] In an embodiment thereof the expression cassette comprises in addition c) a nucleic acid molecule encoding a transit peptide, especially a plastidal transit petide in case in Table I, application no. 2, in column 6 in the same line as SEQ ID NO. 39120 is depicted, plastidic is mentioned, or a mitochondrial transit petide in case in Table I, application no. 2, in column 6 in the same line as SEQ ID NO. 39120 is depicted, mitochondrial is mentioned; which is operable linke, too.

[12079] In another embodiment thereof the expression cassette does not comprise an additional transit peptide in case in Table I, application no. 2, in column 6 in the same line as SEQ ID NO. 39120 is depicted, non-targeted is mentioned.

[12080] In an embodiment the present invention relates to an expresssion cassette comprising a) a promoter, prefereably a promoter selected from the group consisting of Big35S, PCUbi, Super and USP, in particular Super; and b) the nucleic acid SEQ ID NO. 38289, or a homolog or fragment thereof, or a homolog thereof being depicted in Table I, application no. 2, column 8, in the same line as SEQ ID NO. 38289, preferably the coding region thereof, a homolog or a fragment thereof; which are operable linked.

[12081] In an embodiment thereof the expression cassette comprises in addition c) a nucleic acid molecule encoding a transit peptide, especially a plastidal transit petide in case in Table I, application no. 2, in column 6 in the same line as SEQ ID NO. 38289 is depicted, plastidic is mentioned, or a mitochondrial transit petide in case in Table I, application no. 2, in column 6 in the same line as SEQ ID NO. 38289 is depicted, mitochondrial is mentioned; which is operable linke, too.

[12082] In another embodiment thereof the expression cassette does not comprise an additional transit peptide in case in Table I, application no. 2, in column 6 in the same line as SEQ ID NO. 38289 is depicted, non-targeted is mentioned.

[12083] In an embodiment the present invention relates to an expresssion cassette comprising a) a promoter, prefereably a promoter selected from the group consisting of Big35S, PCUbi, Super and USP, in particular Super; and b) the nucleic acid SEQ ID NO. 37400, or a homolog or fragment thereof, or a homolog thereof being depicted in Table I, application no. 2, column 8, in the same line as SEQ ID NO. 37400, preferably the coding region thereof, a homolog or a fragment thereof; which are operable linked.

[12084] In an embodiment thereof the expression cassette comprises in addition c) a nucleic acid molecule encoding a transit peptide, especially a plastidal transit petide in case in Table I, application no. 2, in column 6 in the same line as SEQ ID NO. 37400 is depicted, plastidic is mentioned, or a mitochondrial transit petide in case in Table I, application no. 2, in column 6 in the same line as SEQ ID NO. 37400 is depicted, mitochondrial is mentioned; which is operable linke, too.

[12085] In another embodiment thereof the expression cassette does not comprise an additional transit peptide in case in Table I, application no. 2, in column 6 in the same line as SEQ ID NO. 37400 is depicted, non-targeted is mentioned.

[12086] In an embodiment the present invention relates to an expresssion cassette comprising a) a promoter, prefereably a promoter selected from the group consisting of Big35S, PCUbi, Super and USP, in particular Super; and b) the nucleic acid SEQ ID NO. 38300, or a homolog or fragment thereof, or a homolog thereof being depicted in Table I, application no. 2, column 8, in the same line as SEQ ID NO. 38300, preferably the coding region thereof, a homolog or a fragment thereof; which are operable linked.

[12087] In an embodiment thereof the expression cassette comprises in addition c) a nucleic acid molecule encoding a transit peptide, especially a plastidal transit petide in case in Table I, application no. 2, in column 6 in the same line as SEQ ID NO. 38300 is depicted, plastidic is mentioned, or a mitochondrial transit petide in case in Table I, application no. 2, in column 6 in the same line as SEQ ID NO. 38300 is depicted, mitochondrial is mentioned; which is operable linke, too.

[12088] In another embodiment thereof the expression cassette does not comprise an additional transit peptide in case in Table I, application no. 2, in column 6 in the same line as SEQ ID NO. 38300 is depicted, non-targeted is mentioned.

[12089] In an embodiment the present invention relates to an expresssion cassette comprising a) a promoter, prefereably a promoter selected from the group consisting of Big35S, PCUbi, Super and USP, in particular Super; and b) the nucleic acid SEQ ID NO. 38345, or a homolog or fragment thereof, or a homolog thereof being depicted in Table I, application no. 2, column 8, in the same line as SEQ ID NO. 38345, preferably the coding region thereof, a homolog or a fragment thereof; which are operable linked.

[12090] In an embodiment thereof the expression cassette comprises in addition c) a nucleic acid molecule encoding a transit peptide, especially a plastidal transit petide in case in Table I, application no. 2, in column 6 in the same line as SEQ ID NO. 38345 is depicted, plastidic is mentioned, or a mitochondrial transit petide in case in Table I, application no. 2, in column 6 in the same line as SEQ ID NO. 38345 is depicted, mitochondrial is mentioned; which is operable linke, too.

[12091] In another embodiment thereof the expression cassette does not comprise an additional transit peptide in case in Table I, application no. 2, in column 6 in the same line as SEQ ID NO. 38345 is depicted, non-targeted is mentioned.

[12092] In an embodiment the present invention relates to an expresssion cassette comprising a) a promoter, prefereably a promoter selected from the group consisting of Big35S, PCUbi, Super and USP, in particular Super; and b) the nucleic acid SEQ ID NO. 38573, or a homolog or fragment thereof, or a homolog thereof being depicted in Table I, application no. 2, column 8, in the same line as SEQ ID NO. 38573, preferably the coding region thereof, a homolog or a fragment thereof; which are operable linked.

[12093] In an embodiment thereof the expression cassette comprises in addition c) a nucleic acid molecule encoding a transit peptide, especially a plastidal transit petide in case in Table I, application no. 2, in column 6 in the same line as SEQ ID NO. 38573 is depicted, plastidic is mentioned, or a mitochondrial transit petide in case in Table I, application no. 2, in column 6 in the same line as SEQ ID NO. 38573 is depicted, mitochondrial is mentioned; which is operable linke, too.

[12094] In another embodiment thereof the expression cassette does not comprise an additional transit peptide in case in Table I, application no. 2, in column 6 in the same line as SEQ ID NO. 38573 is depicted, non-targeted is mentioned.

[12095] In an embodiment the present invention relates to an expresssion cassette comprising a) a promoter, prefereably a promoter selected from the group consisting of Big35S, PCUbi, Super and USP, in particular Super; and b) the nucleic acid SEQ ID NO. 38767, or a homolog or fragment thereof, or a homolog thereof being depicted in Table I, application no. 2, column 8, in the same line as SEQ ID NO. 38767, preferably the coding region thereof, a homolog or a fragment thereof; which are operable linked.

[12096] In an embodiment thereof the expression cassette comprises in addition c) a nucleic acid molecule encoding a transit peptide, especially a plastidal transit petide in case in Table I, application no. 2, in column 6 in the same line as SEQ ID NO. 38767 is depicted, plastidic is mentioned, or a mitochondrial transit petide in case in Table I, application no. 2, in column 6 in the same line as SEQ ID NO. 38767 is depicted, mitochondrial is mentioned; which is operable linke, too.

[12097] In another embodiment thereof the expression cassette does not comprise an additional transit peptide in case in Table I, application no. 2, in column 6 in the same line as SEQ ID NO. 38767 is depicted, non-targeted is mentioned.

[12098] In an embodiment the present invention relates to an expresssion cassette comprising a) a promoter, prefereably a promoter selected from the group consisting of Big35S, PCUbi, Super and USP, in particular Super; and b) the nucleic acid SEQ ID NO. 38899, or a homolog or fragment thereof, or a homolog thereof being depicted in Table I, application no. 2, column 8, in the same line as SEQ ID NO. 38899, preferably the coding region thereof, a homolog or a fragment thereof; which are operable linked.

[12099] In an embodiment thereof the expression cassette comprises in addition c) a nucleic acid molecule encoding a transit peptide, especially a plastidal transit petide in case in Table I, application no. 2, in column 6 in the same line as SEQ ID NO. 38899 is depicted, plastidic is mentioned, or a mitochondrial transit petide in case in Table I, application no. 2, in column 6 in the same line as SEQ ID NO. 38899 is depicted, mitochondrial is mentioned; which is operable linke, too.

[12100] In another embodiment thereof the expression cassette does not comprise an additional transit peptide in case in Table I, application no. 2, in column 6 in the same line as SEQ ID NO. 38899 is depicted, non-targeted is mentioned.

[12101] In an embodiment the present invention relates to an expresssion cassette comprising a) a promoter, prefereably a promoter selected from the group consisting of Big35S, PCUbi, Super and USP, in particular Super; and b) the nucleic acid SEQ ID NO. 38947, or a homolog or fragment thereof, or a homolog thereof being depicted in Table I, application no. 2, column 8, in the same line as SEQ ID NO. 38947, preferably the coding region thereof, a homolog or a fragment thereof; which are operable linked.

[12102] In an embodiment thereof the expression cassette comprises in addition c) a nucleic acid molecule encoding a transit peptide, especially a plastidal transit petide in case in Table I, application no. 2, in column 6 in the same line as SEQ ID NO. 38947 is depicted, plastidic is mentioned, or a mitochondrial transit petide in case in Table I, application no. 2, in column 6 in the same line as SEQ ID NO. 38947 is depicted, mitochondrial is mentioned; which is operable linke, too.

[12103] In another embodiment thereof the expression cassette does not comprise an additional transit peptide in case in Table I, application no. 2, in column 6 in the same line as SEQ ID NO. 38947 is depicted, non-targeted is mentioned.

[12104] In an embodiment the present invention relates to an expresssion cassette comprising a) a promoter, prefereably a promoter selected from the group consisting of Big35S, PCUbi, Super and USP, in particular Super; and b) the nucleic acid SEQ ID NO. 8937, or a homolog or fragment thereof, or a homolog thereof being depicted in Table I, application no. 2, column 8, in the same line as SEQ ID NO. 8937, preferably the coding region thereof, a homolog or a fragment thereof; which are operable linked.

[12105] In an embodiment thereof the expression cassette comprises in addition c) a nucleic acid molecule encoding a transit peptide, especially a plastidal transit petide in case in Table I, application no. 2, in column 6 in the same line as SEQ ID NO. 8937 is depicted, plastidic is mentioned, or a mitochondrial transit petide in case in Table I, application no. 2, in column 6 in the same line as SEQ ID NO. 8937 is depicted, mitochondrial is mentioned; which is operable linke, too.

[12106] In another embodiment thereof the expression cassette does not comprise an additional transit peptide in case in Table I, application no. 2, in column 6 in the same line as SEQ ID NO. 8937 is depicted, non-targeted is mentioned.

[12107] In an embodiment the present invention relates to an expresssion cassette comprising a) a promoter, prefereably a promoter selected from the group consisting of Big35S, PCUbi, Super and USP, in particular Super; and b) the nucleic acid SEQ ID NO. 39002, or a homolog or fragment thereof, or a homolog thereof being depicted in Table I, application no. 2, column 8, in the same line as SEQ ID NO. 39002, preferably the coding region thereof, a homolog or a fragment thereof; which are operable linked.

[12108] In an embodiment thereof the expression cassette comprises in addition c) a nucleic acid molecule encoding a transit peptide, especially a plastidal transit petide in case in Table I, application no. 2, in column 6 in the same line as SEQ ID NO. 39002 is depicted, plastidic is mentioned, or a mitochondrial transit petide in case in Table I, application no. 2, in column 6 in the same line as SEQ ID NO. 39002 is depicted, mitochondrial is mentioned; which is operable linke, too.

[12109] In another embodiment thereof the expression cassette does not comprise an additional transit peptide in case in Table I, application no. 2, in column 6 in the same line as SEQ ID NO. 39002 is depicted, non-targeted is mentioned.

[12110] In an embodiment the present invention relates to an expresssion cassette comprising a) a promoter, prefereably a promoter selected from the group consisting of Big35S, PCUbi, Super and USP, in particular Super; and b) the nucleic acid SEQ ID NO. 38266, or a homolog or fragment thereof, or a homolog thereof being depicted in Table I, application no. 2, column 8, in the same line as SEQ ID NO. 38266, preferably the coding region thereof, a homolog or a fragment thereof; which are operable linked.

[12111] In an embodiment thereof the expression cassette comprises in addition c) a nucleic acid molecule encoding a transit peptide, especially a plastidal transit petide in case in Table I, application no. 2, in column 6 in the same line as SEQ ID NO. 38266 is depicted, plastidic is mentioned, or a mitochondrial transit petide in case in Table I, application no. 2, in column 6 in the same line as SEQ ID NO. 38266 is depicted, mitochondrial is mentioned; which is operable linke, too.

[12112] In another embodiment thereof the expression cassette does not comprise an additional transit peptide in case in Table I, application no. 2, in column 6 in the same line as SEQ ID NO. 38266 is depicted, non-targeted is mentioned.

[12113] In an embodiment the present invention relates to an expresssion cassette comprising a) a promoter, prefereably a promoter selected from the group consisting of Big35S, PCUbi, Super and USP, in particular PCUbi; and b) the nucleic acid SEQ ID NO. 21497, or a homolog or fragment thereof, or a homolog thereof being depicted in Table I, application no. 2, column 8, in the same line as SEQ ID NO. 21497, preferably the coding region thereof, a homolog or a fragment thereof; which are operable linked.

[12114] In an embodiment thereof the expression cassette comprises in addition c) a nucleic acid molecule encoding a transit peptide, especially a plastidal transit petide in case in Table I, application no. 2, in column 6 in the same line as SEQ ID NO. 21497 is depicted, plastidic is mentioned, or a mitochondrial transit petide in case in Table I, application no. 2, in column 6 in the same line as SEQ ID NO. 21497 is depicted, mitochondrial is mentioned; which is operable linke, too.

[12115] In another embodiment thereof the expression cassette does not comprise an additional transit peptide in case in Table I, application no. 2, in column 6 in the same line as SEQ ID NO. 21497 is depicted, non-targeted is mentioned.

[12116] In an embodiment the present invention relates to an expresssion cassette comprising a) a promoter, prefereably a promoter selected from the group consisting of Big35S, PCUbi, Super and USP, in particular PCUbi; and b) the nucleic acid SEQ ID NO. 23002, or a homolog or fragment thereof, or a homolog thereof being depicted in Table I, application no. 2, column 8, in the same line as SEQ ID NO. 23002, preferably the coding region thereof, a homolog or a fragment thereof; which are operable linked.

[12117] In an embodiment thereof the expression cassette comprises in addition c) a nucleic acid molecule encoding a transit peptide, especially a plastidal transit petide in case in Table I, application no. 2, in column 6 in the same line as SEQ ID NO. 23002 is depicted, plastidic is mentioned, or a mitochondrial transit petide in case in Table I, application no. 2, in column 6 in the same line as SEQ ID NO. 23002 is depicted, mitochondrial is mentioned; which is operable linke, too.

[12118] In another embodiment thereof the expression cassette does not comprise an additional transit peptide in case in Table I, application no. 2, in column 6 in the same line as SEQ ID NO. 23002 is depicted, non-targeted is mentioned.

[12119] In an embodiment the present invention relates to an expresssion cassette comprising a) a promoter, prefereably a promoter selected from the group consisting of Big35S, PCUbi, Super and USP, in particular PCUbi; and b) the nucleic acid SEQ ID NO. 19671, or a homolog or fragment thereof, or a homolog thereof being depicted in Table I, application no. 2, column 8, in the same line as SEQ ID NO. 19671, preferably the coding region thereof, a homolog or a fragment thereof; which are operable linked.

[12120] In an embodiment thereof the expression cassette comprises in addition c) a nucleic acid molecule encoding a transit peptide, especially a plastidal transit petide in case in Table I, application no. 2, in column 6 in the same line as SEQ ID NO. 19671 is depicted, plastidic is mentioned, or a mitochondrial transit petide in case in Table I, application no. 2, in column 6 in the same line as SEQ ID NO. 19671 is depicted, mitochondrial is mentioned; which is operable linke, too.

[12121] In another embodiment thereof the expression cassette does not comprise an additional transit peptide in case in Table I, application no. 2, in column 6 in the same line as SEQ ID NO. 19671 is depicted, non-targeted is mentioned.

[12122] In an embodiment the present invention relates to an expresssion cassette comprising a) a promoter, prefereably a promoter selected from the group consisting of Big35S, PCUbi, Super and USP, in particular PCUbi; and b) the nucleic acid SEQ ID NO. 19874, or a homolog or fragment thereof, or a homolog thereof being depicted in Table I, application no. 2, column 8, in the same line as SEQ ID NO. 19874, preferably the coding region thereof, a homolog or a fragment thereof; which are operable linked.

[12123] In an embodiment thereof the expression cassette comprises in addition c) a nucleic acid molecule encoding a transit peptide, especially a plastidal transit petide in case in Table I, application no. 2, in column 6 in the same line as SEQ ID NO. 19874 is depicted, plastidic is mentioned, or a mitochondrial transit petide in case in Table I, application no. 2, in column 6 in the same line as SEQ ID NO. 19874 is depicted, mitochondrial is mentioned; which is operable linke, too.

[12124] In another embodiment thereof the expression cassette does not comprise an additional transit peptide in case in Table I, application no. 2, in column 6 in the same line as SEQ ID NO. 19874 is depicted, non-targeted is mentioned.

[12125] In an embodiment the present invention relates to an expresssion cassette comprising a) a promoter, prefereably a promoter selected from the group consisting of Big35S, PCUbi, Super and USP, in particular PCUbi; and b) the nucleic acid SEQ ID NO. 19919, or a homolog or fragment thereof, or a homolog thereof being depicted in Table I, application no. 2, column 8, in the same line as SEQ ID NO. 19919, preferably the coding region thereof, a homolog or a fragment thereof; which are operable linked.

[12126] In an embodiment thereof the expression cassette comprises in addition c) a nucleic acid molecule encoding a transit peptide, especially a plastidal transit petide in case in Table I, application no. 2, in column 6 in the same line as SEQ ID NO. 19919 is depicted, plastidic is mentioned, or a mitochondrial transit petide in case in Table I, application no. 2, in column 6 in the same line as SEQ ID NO. 19919 is depicted, mitochondrial is mentioned; which is operable linke, too.

[12127] In another embodiment thereof the expression cassette does not comprise an additional transit peptide in case in Table I, application no. 2, in column 6 in the same line as SEQ ID NO. 19919 is depicted, non-targeted is mentioned.

[12128] In an embodiment the present invention relates to an expresssion cassette comprising a) a promoter, prefereably a promoter selected from the group consisting of Big35S, PCUbi, Super and USP, in particular PCUbi; and b) the nucleic acid SEQ ID NO. 20346, or a homolog or fragment thereof, or a homolog thereof being depicted in Table I, application no. 2, column 8, in the same line as SEQ ID NO. 20346, preferably the coding region thereof, a homolog or a fragment thereof; which are operable linked.

[12129] In an embodiment thereof the expression cassette comprises in addition c) a nucleic acid molecule encoding a transit peptide, especially a plastidal transit petide in case in Table I, application no. 2, in column 6 in the same line as SEQ ID NO. 20346 is depicted, plastidic is mentioned, or a mitochondrial transit petide in case in Table I, application no. 2, in column 6 in the same line as SEQ ID NO. 20346 is depicted, mitochondrial is mentioned; which is operable linke, too.

[12130] In another embodiment thereof the expression cassette does not comprise an additional transit peptide in case in Table I, application no. 2, in column 6 in the same line as SEQ ID NO. 20346 is depicted, non-targeted is mentioned.

[12131] In an embodiment the present invention relates to an expresssion cassette comprising a) a promoter, prefereably a promoter selected from the group consisting of Big35S, PCUbi, Super and USP, in particular PCUbi; and b) the nucleic acid SEQ ID NO. 20578, or a homolog or fragment thereof, or a homolog thereof being depicted in Table I, application no. 2, column 8, in the same line as SEQ ID NO. 20578, preferably the coding region thereof, a homolog or a fragment thereof; which are operable linked.

[12132] In an embodiment thereof the expression cassette comprises in addition c) a nucleic acid molecule encoding a transit peptide, especially a plastidal transit petide in case in Table I, application no. 2, in column 6 in the same line as SEQ ID NO. 20578 is depicted, plastidic is mentioned, or a mitochondrial transit petide in case in Table I, application no. 2, in column 6 in the same line as SEQ ID NO. 20578 is depicted, mitochondrial is mentioned; which is operable linke, too.

[12133] In another embodiment thereof the expression cassette does not comprise an additional transit peptide in case in Table I, application no. 2, in column 6 in the same line as SEQ ID NO. 20578 is depicted, non-targeted is mentioned.

[12134] In an embodiment the present invention relates to an expresssion cassette comprising a) a promoter, prefereably a promoter selected from the group consisting of Big35S, PCUbi, Super and USP, in particular PCUbi; and b) the nucleic acid SEQ ID NO. 21008, or a homolog or fragment thereof, or a homolog thereof being depicted in Table I, application no. 2, column 8, in the same line as SEQ ID NO. 21008, preferably the coding region thereof, a homolog or a fragment thereof; which are operable linked.

[12135] In an embodiment thereof the expression cassette comprises in addition c) a nucleic acid molecule encoding a transit peptide, especially a plastidal transit petide in case in Table I, application no. 2, in column 6 in the same line as SEQ ID NO. 21008 is depicted, plastidic is mentioned, or a mitochondrial transit petide in case in Table I, application no. 2, in column 6 in the same line as SEQ ID NO. 21008 is depicted, mitochondrial is mentioned; which is operable linke, too.

[12136] In another embodiment thereof the expression cassette does not comprise an additional transit peptide in case in Table I, application no. 2, in column 6 in the same line as SEQ ID NO. 21008 is depicted, non-targeted is mentioned.

[12137] In an embodiment the present invention relates to an expresssion cassette comprising a) a promoter, prefereably a promoter selected from the group consisting of Big35S, PCUbi, Super and USP, in particular PCUbi; and b) the nucleic acid SEQ ID NO. 19502, or a homolog or fragment thereof, or a homolog thereof being depicted in Table I, application no. 2, column 8, in the same line as SEQ ID NO. 19502, preferably the coding region thereof, a homolog or a fragment thereof; which are operable linked.

[12138] In an embodiment thereof the expression cassette comprises in addition c) a nucleic acid molecule encoding a transit peptide, especially a plastidal transit petide in case in Table I, application no. 2, in column 6 in the same line as SEQ ID NO. 19502 is depicted, plastidic is mentioned, or a mitochondrial transit petide in case in Table I, application no. 2, in column 6 in the same line as SEQ ID NO. 19502 is depicted, mitochondrial is mentioned; which is operable linke, too.

[12139] In another embodiment thereof the expression cassette does not comprise an additional transit peptide in case in Table I, application no. 2, in column 6 in the same line as SEQ ID NO. 19502 is depicted, non-targeted is mentioned.

[12140] In an embodiment the present invention relates to an expresssion cassette comprising a) a promoter, prefereably a promoter selected from the group consisting of Big35S, PCUbi, Super and USP, in particular PCUbi; and b) the nucleic acid SEQ ID NO. 21159, or a homolog or fragment thereof, or a homolog thereof being depicted in Table I, application no. 2, column 8, in the same line as SEQ ID NO. 21159, preferably the coding region thereof, a homolog or a fragment thereof; which are operable linked.

[12141] In an embodiment thereof the expression cassette comprises in addition c) a nucleic acid molecule encoding a transit peptide, especially a plastidal transit petide in case in Table I, application no. 2, in column 6 in the same line as SEQ ID NO. 21159 is depicted, plastidic is mentioned, or a mitochondrial transit petide in case in Table I, application no. 2, in column 6 in the same line as SEQ ID NO. 21159 is depicted, mitochondrial is mentioned; which is operable linke, too.

[12142] In another embodiment thereof the expression cassette does not comprise an additional transit peptide in case in Table I, application no. 2, in column 6 in the same line as SEQ ID NO. 21159 is depicted, non-targeted is mentioned.

[12143] In an embodiment the present invention relates to an expresssion cassette comprising a) a promoter, prefereably a promoter selected from the group consisting of Big35S, PCUbi, Super and USP, in particular PCUbi; and b) the nucleic acid SEQ ID NO. 19419, or a homolog or fragment thereof, or a homolog thereof being depicted in Table I, application no. 2, column 8, in the same line as SEQ ID NO. 19419, preferably the coding region thereof, a homolog or a fragment thereof; which are operable linked.

[12144] In an embodiment thereof the expression cassette comprises in addition c) a nucleic acid molecule encoding a transit peptide, especially a plastidal transit petide in case in Table I, application no. 2, in column 6 in the same line as SEQ ID NO. 19419 is depicted, plastidic is mentioned, or a mitochondrial transit petide in case in Table I, application no. 2, in column 6 in the same line as SEQ ID NO. 19419 is depicted, mitochondrial is mentioned; which is operable linke, too.

[12145] In another embodiment thereof the expression cassette does not comprise an additional transit peptide in case in Table I, application no. 2, in column 6 in the same line as SEQ ID NO. 19419 is depicted, non-targeted is mentioned.

[12146] In an embodiment the present invention relates to an expresssion cassette comprising a) a promoter, prefereably a promoter selected from the group consisting of Big35S, PCUbi, Super and USP, in particular PCUbi; and b) the nucleic acid SEQ ID NO. 21902, or a homolog or fragment thereof, or a homolog thereof being depicted in Table I, application no. 2, column 8, in the same line as SEQ ID NO. 21902, preferably the coding region thereof, a homolog or a fragment thereof; which are operable linked.

[12147] In an embodiment thereof the expression cassette comprises in addition c) a nucleic acid molecule encoding a transit peptide, especially a plastidal transit petide in case in Table I, application no. 2, in column 6 in the same line as SEQ ID NO. 21902 is depicted, plastidic is mentioned, or a mitochondrial transit petide in case in Table I, application no. 2, in column 6 in the same line as SEQ ID NO. 21902 is depicted, mitochondrial is mentioned; which is operable linke, too.

[12148] In another embodiment thereof the expression cassette does not comprise an additional transit peptide in case in Table I, application no. 2, in column 6 in the same line as SEQ ID NO. 21902 is depicted, non-targeted is mentioned.

[12149] In an embodiment the present invention relates to an expresssion cassette comprising a) a promoter, prefereably a promoter selected from the group consisting of Big35S, PCUbi, Super and USP, in particular PCUbi; and b) the nucleic acid SEQ ID NO. 22015, or a homolog or fragment thereof, or a homolog thereof being depicted in Table I, application no. 2, column 8, in the same line as SEQ ID NO. 22015, preferably the coding region thereof, a homolog or a fragment thereof; which are operable linked.

[12150] In an embodiment thereof the expression cassette comprises in addition c) a nucleic acid molecule encoding a transit peptide, especially a plastidal transit petide in case in Table I, application no. 2, in column 6 in the same line as SEQ ID NO. 22015 is depicted, plastidic is mentioned, or a mitochondrial transit petide in case in Table I, application no. 2, in column 6 in the same line as SEQ ID NO. 22015 is depicted, mitochondrial is mentioned; which is operable linke, too.

[12151] In another embodiment thereof the expression cassette does not comprise an additional transit peptide in case in Table I, application no. 2, in column 6 in the same line as SEQ ID NO. 22015 is depicted, non-targeted is mentioned.

[12152] In an embodiment the present invention relates to an expresssion cassette comprising a) a promoter, prefereably a promoter selected from the group consisting of Big35S, PCUbi, Super and USP, in particular PCUbi; and b) the nucleic acid SEQ ID NO. 22249, or a homolog or fragment thereof, or a homolog thereof being depicted in Table I, application no. 2, column 8, in the same line as SEQ ID NO. 22249, preferably the coding region thereof, a homolog or a fragment thereof; which are operable linked.

[12153] In an embodiment thereof the expression cassette comprises in addition c) a nucleic acid molecule encoding a transit peptide, especially a plastidal transit petide in case in Table I, application no. 2, in column 6 in the same line as SEQ ID NO. 22249 is depicted, plastidic is mentioned, or a mitochondrial transit petide in case in Table I, application no. 2, in column 6 in the same line as SEQ ID NO. 22249 is depicted, mitochondrial is mentioned; which is operable linke, too.

[12154] In another embodiment thereof the expression cassette does not comprise an additional transit peptide in case in Table I, application no. 2, in column 6 in the same line as SEQ ID NO. 22249 is depicted, non-targeted is mentioned.

[12155] In an embodiment the present invention relates to an expresssion cassette comprising a) a promoter, prefereably a promoter selected from the group consisting of Big35S, PCUbi, Super and USP, in particular PCUbi; and b) the nucleic acid SEQ ID NO. 22611, or a homolog or fragment thereof, or a homolog thereof being depicted in Table I, application no. 2, column 8, in the same line as SEQ ID NO. 22611, preferably the coding region thereof, a homolog or a fragment thereof; which are operable linked.

[12156] In an embodiment thereof the expression cassette comprises in addition c) a nucleic acid molecule encoding a transit peptide, especially a plastidal transit petide in case in Table I, application no. 2, in column 6 in the same line as SEQ ID NO. 22611 is depicted, plastidic is mentioned, or a mitochondrial transit petide in case in Table I, application no. 2, in column 6 in the same line as SEQ ID NO. 22611 is depicted, mitochondrial is mentioned; which is operable linke, too.

[12157] In another embodiment thereof the expression cassette does not comprise an additional transit peptide in case in Table I, application no. 2, in column 6 in the same line as SEQ ID NO. 22611 is depicted, non-targeted is mentioned.

[12158] In an embodiment the present invention relates to an expresssion cassette comprising a) a promoter, prefereably a promoter selected from the group consisting of Big35S, PCUbi, Super and USP, in particular PCUbi; and b) the nucleic acid SEQ ID NO. 22699, or a homolog or fragment thereof, or a homolog thereof being depicted in Table I, application no. 2, column 8, in the same line as SEQ ID NO. 22699, preferably the coding region thereof, a homolog or a fragment thereof; which are operable linked.

[12159] In an embodiment thereof the expression cassette comprises in addition c) a nucleic acid molecule encoding a transit peptide, especially a plastidal transit petide in case in Table I, application no. 2, in column 6 in the same line as SEQ ID NO. 22699 is depicted, plastidic is mentioned, or a mitochondrial transit petide in case in Table I, application no. 2, in column 6 in the same line as SEQ ID NO. 22699 is depicted, mitochondrial is mentioned; which is operable linke, too.

[12160] In another embodiment thereof the expression cassette does not comprise an additional transit peptide in case in Table I, application no. 2, in column 6 in the same line as SEQ ID NO. 22699 is depicted, non-targeted is mentioned.

[12161] In an embodiment the present invention relates to an expresssion cassette comprising a) a promoter, prefereably a promoter selected from the group consisting of Big35S, PCUbi, Super and USP, in particular PCUbi; and b) the nucleic acid SEQ ID NO. 22832, or a homolog or fragment thereof, or a homolog thereof being depicted in Table I, application no. 2, column 8, in the same line as SEQ ID NO. 22832, preferably the coding region thereof, a homolog or a fragment thereof; which are operable linked.

[12162] In an embodiment thereof the expression cassette comprises in addition c) a nucleic acid molecule encoding a transit peptide, especially a plastidal transit petide in case in Table I, application no. 2, in column 6 in the same line as SEQ ID NO. 22832 is depicted, plastidic is mentioned, or a mitochondrial transit petide in case in Table I, application no. 2, in column 6 in the same line as SEQ ID NO. 22832 is depicted, mitochondrial is mentioned; which is operable linke, too.

[12163] In another embodiment thereof the expression cassette does not comprise an additional transit peptide in case in Table I, application no. 2, in column 6 in the same line as SEQ ID NO. 22832 is depicted, non-targeted is mentioned.

[12164] In an embodiment the present invention relates to an expresssion cassette comprising a) a promoter, prefereably a promoter selected from the group consisting of Big35S, PCUbi, Super and USP, in particular PCUbi; and b) the nucleic acid SEQ ID NO. 22921, or a homolog or fragment thereof, or a homolog thereof being depicted in Table I, application no. 2, column 8, in the same line as SEQ ID NO. 22921, preferably the coding region thereof, a homolog or a fragment thereof; which are operable linked.

[12165] In an embodiment thereof the expression cassette comprises in addition c) a nucleic acid molecule encoding a transit peptide, especially a plastidal transit petide in case in Table I, application no. 2, in column 6 in the same line as SEQ ID NO. 22921 is depicted, plastidic is mentioned, or a mitochondrial transit petide in case in Table I, application no. 2, in column 6 in the same line as SEQ ID NO. 22921 is depicted, mitochondrial is mentioned; which is operable linke, too.

[12166] In another embodiment thereof the expression cassette does not comprise an additional transit peptide in case in Table I, application no. 2, in column 6 in the same line as SEQ ID NO. 22921 is depicted, non-targeted is mentioned.

[12167] In an embodiment the present invention relates to an expresssion cassette comprising a) a promoter, prefereably a promoter selected from the group consisting of Big35S, PCUbi, Super and USP, in particular PCUbi; and b) the nucleic acid SEQ ID NO. 31717, or a homolog or fragment thereof, or a homolog thereof being depicted in Table I, application no. 2, column 8, in the same line as SEQ ID NO. 31717, preferably the coding region thereof, a homolog or a fragment thereof; which are operable linked.

[12168] In an embodiment thereof the expression cassette comprises in addition c) a nucleic acid molecule encoding a transit peptide, especially a plastidal transit petide in case in Table I, application no. 2, in column 6 in the same line as SEQ ID NO. 31717 is depicted, plastidic is mentioned, or a mitochondrial transit petide in case in Table I, application no. 2, in column 6 in the same line as SEQ ID NO. 31717 is depicted, mitochondrial is mentioned; which is operable linke, too.

[12169] In another embodiment thereof the expression cassette does not comprise an additional transit peptide in case in Table I, application no. 2, in column 6 in the same line as SEQ ID NO. 31717 is depicted, non-targeted is mentioned.

[12170] In an embodiment the present invention relates to an expresssion cassette comprising a) a promoter, prefereably a promoter selected from the group consisting of Big35S, PCUbi, Super and USP, in particular PCUbi; and b) the nucleic acid SEQ ID NO. 21106, or a homolog or fragment thereof, or a homolog thereof being depicted in Table I, application no. 2, column 8, in the same line as SEQ ID NO. 21106, preferably the coding region thereof, a homolog or a fragment thereof; which are operable linked.

[12171] In an embodiment thereof the expression cassette comprises in addition c) a nucleic acid molecule encoding a transit peptide, especially a plastidal transit petide in case in Table I, application no. 2, in column 6 in the same line as SEQ ID NO. 21106 is depicted, plastidic is mentioned, or a mitochondrial transit petide in case in Table I, application no. 2, in column 6 in the same line as SEQ ID NO. 21106 is depicted, mitochondrial is mentioned; which is operable linke, too.

[12172] In another embodiment thereof the expression cassette does not comprise an additional transit peptide in case in Table I, application no. 2, in column 6 in the same line as SEQ ID NO. 21106 is depicted, non-targeted is mentioned.

[12173] In an embodiment the present invention relates to an expresssion cassette comprising a) a promoter, prefereably a promoter selected from the group consisting of Big35S, PCUbi, Super and USP, in particular PCUbi; and b) the nucleic acid SEQ ID NO. 17701, or a homolog or fragment thereof, or a homolog thereof being depicted in Table I, application no. 2, column 8, in the same line as SEQ ID NO. 17701, preferably the coding region thereof, a homolog or a fragment thereof; which are operable linked.

[12174] In an embodiment thereof the expression cassette comprises in addition c) a nucleic acid molecule encoding a transit peptide, especially a plastidal transit petide in case in Table I, application no. 2, in column 6 in the same line as SEQ ID NO. 17701 is depicted, plastidic is mentioned, or a mitochondrial transit petide in case in Table I, application no. 2, in column 6 in the same line as SEQ ID NO. 17701 is depicted, mitochondrial is mentioned; which is operable linke, too.

[12175] In another embodiment thereof the expression cassette does not comprise an additional transit peptide in case in Table I, application no. 2, in column 6 in the same line as SEQ ID NO. 17701 is depicted, non-targeted is mentioned.

[12176] In an embodiment the present invention relates to an expresssion cassette comprising a) a promoter, prefereably a promoter selected from the group consisting of Big35S, PCUbi, Super and USP, in particular PCUbi; and b) the nucleic acid SEQ ID NO. 69, or a homolog or fragment thereof, or a homolog thereof being depicted in Table I, application no. 2, column 8, in the same line as SEQ ID NO. 69, preferably the coding region thereof, a homolog or a fragment thereof;

[12177] which are operable linked.

[12178] In an embodiment thereof the expression cassette comprises in addition c) a nucleic acid molecule encoding a transit peptide, especially a plastidal transit petide in case in Table I, application no. 2, in column 6 in the same line as SEQ ID NO. 69 is depicted, plastidic is mentioned, or a mitochondrial transit petide in case in Table I, application no. 2, in column 6 in the same line as SEQ ID NO. 69 is depicted, mitochondrial is mentioned; which is operable linke, too.

[12179] In another embodiment thereof the expression cassette does not comprise an additional transit peptide in case in Table I, application no. 2, in column 6 in the same line as SEQ ID NO. 69 is depicted, non-targeted is mentioned.

[12180] In an embodiment the present invention relates to an expresssion cassette comprising a) a promoter, prefereably a promoter selected from the group consisting of Big35S, PCUbi, Super and USP, in particular PCUbi,; and b) the nucleic acid SEQ ID NO. 15532, or a homolog or fragment thereof, or a homolog thereof being depicted in Table I, application no. 2, column 8, in the same line as SEQ ID NO. 15532, preferably the coding region thereof, a homolog or a fragment thereof; which are operable linked.

[12181] In an embodiment thereof the expression cassette comprises in addition c) a nucleic acid molecule encoding a transit peptide, especially a plastidal transit petide in case in Table I, application no. 2, in column 6 in the same line as SEQ ID NO. 15532 is depicted, plastidic is mentioned, or a mitochondrial transit petide in case in Table I, application no. 2, in column 6 in the same line as SEQ ID NO. 15532 is depicted, mitochondrial is mentioned; which is operable linke, too.

[12182] In another embodiment thereof the expression cassette does not comprise an additional transit peptide in case in Table I, application no. 2, in column 6 in the same line as SEQ ID NO. 15532 is depicted, non-targeted is mentioned.

[12183] In an embodiment the present invention relates to an expresssion cassette comprising a) a promoter, prefereably a promoter selected from the group consisting of Big35S, PCUbi, Super and USP, in particular PCUbi; and b) the nucleic acid SEQ ID NO. 16155, or a homolog or fragment thereof, or a homolog thereof being depicted in Table I, application no. 2, column 8, in the same line as SEQ ID NO. 16155, preferably the coding region thereof, a homolog or a fragment thereof; which are operable linked.

[12184] In an embodiment thereof the expression cassette comprises in addition c) a nucleic acid molecule encoding a transit peptide, especially a plastidal transit petide in case in Table I, application no. 2, in column 6 in the same line as SEQ ID NO. 16155 is depicted, plastidic is mentioned, or a mitochondrial transit petide in case in Table I, application no. 2, in column 6 in the same line as SEQ ID NO. 16155 is depicted, mitochondrial is mentioned; which is operable linke, too.

[12185] In another embodiment thereof the expression cassette does not comprise an additional transit peptide in case in Table I, application no. 2, in column 6 in the same line as SEQ ID NO. 16155 is depicted, non-targeted is mentioned.

[12186] In an embodiment the present invention relates to an expresssion cassette comprising a) a promoter, prefereably a promoter selected from the group consisting of Big35S, PCUbi, Super and USP, in particular PCUbi; and b) the nucleic acid SEQ ID NO. 16263, or a homolog or fragment thereof, or a homolog thereof being depicted in Table I, application no. 2, column 8, in the same line as SEQ ID NO. 16263, preferably the coding region thereof, a homolog or a fragment thereof; which are operable linked.

[12187] In an embodiment thereof the expression cassette comprises in addition c) a nucleic acid molecule encoding a transit peptide, especially a plastidal transit petide in case in Table I, application no. 2, in column 6 in the same line as SEQ ID NO. 16263 is depicted, plastidic is mentioned, or a mitochondrial transit petide in case in Table I, application no. 2, in column 6 in the same line as SEQ ID NO. 16263 is depicted, mitochondrial is mentioned; which is operable linke, too.

[12188] In another embodiment thereof the expression cassette does not comprise an additional transit peptide in case in Table I, application no. 2, in column 6 in the same line as SEQ ID NO. 16263 is depicted, non-targeted is mentioned.

[12189] In an embodiment the present invention relates to an expresssion cassette comprising a) a promoter, prefereably a promoter selected from the group consisting of Big35S, PCUbi, Super and USP, in particular PCUbi; and b) the nucleic acid SEQ ID NO. 16883, or a homolog or fragment thereof, or a homolog thereof being depicted in Table I, application no. 2, column 8, in the same line as SEQ ID NO. 16883, preferably the coding region thereof, a homolog or a fragment thereof; which are operable linked.

[12190] In an embodiment thereof the expression cassette comprises in addition c) a nucleic acid molecule encoding a transit peptide, especially a plastidal transit petide in case in Table I, application no. 2, in column 6 in the same line as SEQ ID NO. 16883 is depicted, plastidic is mentioned, or a mitochondrial transit petide in case in Table I, application no. 2, in column 6 in the same line as SEQ ID NO. 16883 is depicted, mitochondrial is mentioned; which is operable linke, too.

[12191] In another embodiment thereof the expression cassette does not comprise an additional transit peptide in case in Table I, application no. 2, in column 6 in the same line as SEQ ID NO. 16883 is depicted, non-targeted is mentioned.

[12192] In an embodiment the present invention relates to an expresssion cassette comprising a) a promoter, prefereably a promoter selected from the group consisting of Big35S, PCUbi, Super and USP, in particular PCUbi; and b) the nucleic acid SEQ ID NO. 17356, or a homolog or fragment thereof, or a homolog thereof being depicted in Table I, application no. 2, column 8, in the same line as SEQ ID NO. 17356, preferably the coding region thereof, a homolog or a fragment thereof; which are operable linked.

[12193] In an embodiment thereof the expression cassette comprises in addition c) a nucleic acid molecule encoding a transit peptide, especially a plastidal transit petide in case in Table I, application no. 2, in column 6 in the same line as SEQ ID NO. 17356 is depicted, plastidic is mentioned, or a mitochondrial transit petide in case in Table I, application no. 2, in column 6 in the same line as SEQ ID NO. 17356 is depicted, mitochondrial is mentioned; which is operable linke, too.

[12194] In another embodiment thereof the expression cassette does not comprise an additional transit peptide in case in Table I, application no. 2, in column 6 in the same line as SEQ ID NO. 17356 is depicted, non-targeted is mentioned.

[12195] In an embodiment the present invention relates to an expresssion cassette comprising a) a promoter, prefereably a promoter selected from the group consisting of Big35S, PCUbi, Super and USP, in particular PCUbi; and b) the nucleic acid SEQ ID NO. 17451, or a homolog or fragment thereof, or a homolog thereof being depicted in Table I, application no. 2, column 8, in the same line as SEQ ID NO. 17451, preferably the coding region thereof, a homolog or a fragment thereof; which are operable linked.

[12196] In an embodiment thereof the expression cassette comprises in addition c) a nucleic acid molecule encoding a transit peptide, especially a plastidal transit petide in case in Table I, application no. 2, in column 6 in the same line as SEQ ID NO. 17451 is depicted, plastidic is mentioned, or a mitochondrial transit petide in case in Table I, application no. 2, in column 6 in the same line as SEQ ID NO. 17451 is depicted, mitochondrial is mentioned; which is operable linke, too.

[12197] In another embodiment thereof the expression cassette does not comprise an additional transit peptide in case in Table I, application no. 2, in column 6 in the same line as SEQ ID NO. 17451 is depicted, non-targeted is mentioned.

[12198] In an embodiment the present invention relates to an expresssion cassette comprising a) a promoter, prefereably a promoter selected from the group consisting of Big35S, PCUbi, Super and USP, in particular PCUbi; and b) the nucleic acid SEQ ID NO. 1298, or a homolog or fragment thereof, or a homolog thereof being depicted in Table I, application no. 2, column 8, in the same line as SEQ ID NO. 1298, preferably the coding region thereof, a homolog or a fragment thereof; which are operable linked.

[12199] In an embodiment thereof the expression cassette comprises in addition c) a nucleic acid molecule encoding a transit peptide, especially a plastidal transit petide in case in Table I, application no. 2, in column 6 in the same line as SEQ ID NO. 1298 is depicted, plastidic is mentioned, or a mitochondrial transit petide in case in Table I, application no. 2, in column 6 in the same line as SEQ ID NO. 1298 is depicted, mitochondrial is mentioned; which is operable linke, too.

[12200] In another embodiment thereof the expression cassette does not comprise an additional transit peptide in case in Table I, application no. 2, in column 6 in the same line as SEQ ID NO. 1298 is depicted, non-targeted is mentioned.

[12201] In an embodiment the present invention relates to an expresssion cassette comprising a) a promoter, prefereably a promoter selected from the group consisting of Big35S, PCUbi, Super and USP, in particular PCUbi; and b) the nucleic acid SEQ ID NO. 17637, or a homolog or fragment thereof, or a homolog thereof being depicted in Table I, application no. 2, column 8, in the same line as SEQ ID NO. 17637, preferably the coding region thereof, a homolog or a fragment thereof; which are operable linked.

[12202] In an embodiment thereof the expression cassette comprises in addition c) a nucleic acid molecule encoding a transit peptide, especially a plastidal transit petide in case in Table I, application no. 2, in column 6 in the same line as SEQ ID NO. 17637 is depicted, plastidic is mentioned, or a mitochondrial transit petide in case in Table I, application no. 2, in column 6 in the same line as SEQ ID NO. 17637 is depicted, mitochondrial is mentioned; which is operable linke, too.

[12203] In another embodiment thereof the expression cassette does not comprise an additional transit peptide in case in Table I, application no. 2, in column 6 in the same line as SEQ ID NO. 17637 is depicted, non-targeted is mentioned.

[12204] In an embodiment the present invention relates to an expresssion cassette comprising a) a promoter, prefereably a promoter selected from the group consisting of Big35S, PCUbi, Super and USP, in particular PCUbi; and b) the nucleic acid SEQ ID NO. 2573, or a homolog or fragment thereof, or a homolog thereof being depicted in Table I, application no. 2, column 8, in the same line as SEQ ID NO. 2573, preferably the coding region thereof, a homolog or a fragment thereof; which are operable linked.

[12205] In an embodiment thereof the expression cassette comprises in addition c) a nucleic acid molecule encoding a transit peptide, especially a plastidal transit petide in case in Table I, application no. 2, in column 6 in the same line as SEQ ID NO. 2573 is depicted, plastidic is mentioned, or a mitochondrial transit petide in case in Table I, application no. 2, in column 6 in the same line as SEQ ID NO. 2573 is depicted, mitochondrial is mentioned; which is operable linke, too.

[12206] In another embodiment thereof the expression cassette does not comprise an additional transit peptide in case in Table I, application no. 2, in column 6 in the same line as SEQ ID NO. 2573 is depicted, non-targeted is mentioned.

[12207] In an embodiment the present invention relates to an expresssion cassette comprising a) a promoter, prefereably a promoter selected from the group consisting of Big35S, PCUbi, Super and USP, in particular PCUbi; and b) the nucleic acid SEQ ID NO. 17901, or a homolog or fragment thereof, or a homolog thereof being depicted in Table I, application no. 2, column 8, in the same line as SEQ ID NO. 17901, preferably the coding region thereof, a homolog or a fragment thereof; which are operable linked.

[12208] In an embodiment thereof the expression cassette comprises in addition c) a nucleic acid molecule encoding a transit peptide, especially a plastidal transit petide in case in Table I, application no. 2, in column 6 in the same line as SEQ ID NO. 17901 is depicted, plastidic is mentioned, or a mitochondrial transit petide in case in Table I, application no. 2, in column 6 in the same line as SEQ ID NO. 17901 is depicted, mitochondrial is mentioned; which is operable linke, too.

[12209] In another embodiment thereof the expression cassette does not comprise an additional transit peptide in case in Table I, application no. 2, in column 6 in the same line as SEQ ID NO. 17901 is depicted, non-targeted is mentioned.

[12210] In an embodiment the present invention relates to an expresssion cassette comprising a) a promoter, prefereably a promoter selected from the group consisting of Big35S, PCUbi, Super and USP, in particular PCUbi; and b) the nucleic acid SEQ ID NO. 17968, or a homolog or fragment thereof, or a homolog thereof being depicted in Table I, application no. 2, column 8, in the same line as SEQ ID NO. 17968, preferably the coding region thereof, a homolog or a fragment thereof; which are operable linked.

[12211] In an embodiment thereof the expression cassette comprises in addition c) a nucleic acid molecule encoding a transit peptide, especially a plastidal transit petide in case in Table I, application no. 2, in column 6 in the same line as SEQ ID NO. 17968 is depicted, plastidic is mentioned, or a mitochondrial transit petide in case in Table I, application no. 2, in column 6 in the same line as SEQ ID NO. 17968 is depicted, mitochondrial is mentioned; which is operable linke, too.

[12212] In another embodiment thereof the expression cassette does not comprise an additional transit peptide in case in Table I, application no. 2, in column 6 in the same line as SEQ ID NO. 17968 is depicted, non-targeted is mentioned.

[12213] In an embodiment the present invention relates to an expresssion cassette comprising a) a promoter, prefereably a promoter selected from the group consisting of Big35S, PCUbi, Super and USP, in particular PCUbi; and b) the nucleic acid SEQ ID NO. 18070, or a homolog or fragment thereof, or a homolog thereof being depicted in Table I, application no. 2, column 8, in the same line as SEQ ID NO. 18070, preferably the coding region thereof, a homolog or a fragment thereof; which are operable linked.

[12214] In an embodiment thereof the expression cassette comprises in addition c) a nucleic acid molecule encoding a transit peptide, especially a plastidal transit petide in case in Table I, application no. 2, in column 6 in the same line as SEQ ID NO. 18070 is depicted, plastidic is mentioned, or a mitochondrial transit petide in case in Table I, application no. 2, in column 6 in the same line as SEQ ID NO. 18070 is depicted, mitochondrial is mentioned; which is operable linke, too.

[12215] In another embodiment thereof the expression cassette does not comprise an additional transit peptide in case in Table I, application no. 2, in column 6 in the same line as SEQ ID NO. 18070 is depicted, non-targeted is mentioned.

[12216] In an embodiment the present invention relates to an expresssion cassette comprising a) a promoter, prefereably a promoter selected from the group consisting of Big35S, PCUbi, Super and USP, in particular PCUbi; and b) the nucleic acid SEQ ID NO. 18122, or a homolog or fragment thereof, or a homolog thereof being depicted in Table I, application no. 2, column 8, in the same line as SEQ ID NO. 18122, preferably the coding region thereof, a homolog or a fragment thereof; which are operable linked.

[12217] In an embodiment thereof the expression cassette comprises in addition c) a nucleic acid molecule encoding a transit peptide, especially a plastidal transit petide in case in Table I, application no. 2, in column 6 in the same line as SEQ ID NO. 18122 is depicted, plastidic is mentioned, or a mitochondrial transit petide in case in Table I, application no. 2, in column 6 in the same line as SEQ ID NO. 18122 is depicted, mitochondrial is mentioned; which is operable linke, too.

[12218] In another embodiment thereof the expression cassette does not comprise an additional transit peptide in case in Table I, application no. 2, in column 6 in the same line as SEQ ID NO. 18122 is depicted, non-targeted is mentioned.

[12219] In an embodiment the present invention relates to an expresssion cassette comprising a) a promoter, prefereably a promoter selected from the group consisting of Big35S, PCUbi, Super and USP, in particular PCUbi; and b) the nucleic acid SEQ ID NO. 18235, or a homolog or fragment thereof, or a homolog thereof being depicted in Table I, application no. 2, column 8, in the same line as SEQ ID NO. 18235, preferably the coding region thereof, a homolog or a fragment thereof; which are operable linked.

[12220] In an embodiment thereof the expression cassette comprises in addition c) a nucleic acid molecule encoding a transit peptide, especially a plastidal transit petide in case in Table I, application no. 2, in column 6 in the same line as SEQ ID NO. 18235 is depicted, plastidic is mentioned, or a mitochondrial transit petide in case in Table I, application no. 2, in column 6 in the same line as SEQ ID NO. 18235 is depicted, mitochondrial is mentioned; which is operable linke, too.

[12221] In another embodiment thereof the expression cassette does not comprise an additional transit peptide in case in Table I, application no. 2, in column 6 in the same line as SEQ ID NO. 18235 is depicted, non-targeted is mentioned.

[12222] In an embodiment the present invention relates to an expresssion cassette comprising a) a promoter, prefereably a promoter selected from the group consisting of Big35S, PCUbi, Super and USP, in particular PCUbi; and b) the nucleic acid SEQ ID NO. 18869, or a homolog or fragment thereof, or a homolog thereof being depicted in Table I, application no. 2, column 8, in the same line as SEQ ID NO. 18869, preferably the coding region thereof, a homolog or a fragment thereof; which are operable linked.

[12223] In an embodiment thereof the expression cassette comprises in addition c) a nucleic acid molecule encoding a transit peptide, especially a plastidal transit petide in case in Table I, application no. 2, in column 6 in the same line as SEQ ID NO. 18869 is depicted, plastidic is mentioned, or a mitochondrial transit petide in case in Table I, application no. 2, in column 6 in the same line as SEQ ID NO. 18869 is depicted, mitochondrial is mentioned; which is operable linke, too.

[12224] In another embodiment thereof the expression cassette does not comprise an additional transit peptide in case in Table I, application no. 2, in column 6 in the same line as SEQ ID NO. 18869 is depicted, non-targeted is mentioned.

[12225] In an embodiment the present invention relates to an expresssion cassette comprising a) a promoter, prefereably a promoter selected from the group consisting of Big35S, PCUbi, Super and USP, in particular PCUbi; and b) the nucleic acid SEQ ID NO. 19364, or a homolog or fragment thereof, or a homolog thereof being depicted in Table I, application no. 2, column 8, in the same line as SEQ ID NO. 19364, preferably the coding region thereof, a homolog or a fragment thereof; which are operable linked.

[12226] In an embodiment thereof the expression cassette comprises in addition c) a nucleic acid molecule encoding a transit peptide, especially a plastidal transit petide in case in Table I, application no. 2, in column 6 in the same line as SEQ ID NO. 19364 is depicted, plastidic is mentioned, or a mitochondrial transit petide in case in Table I, application no. 2, in column 6 in the same line as SEQ ID NO. 19364 is depicted, mitochondrial is mentioned; which is operable linke, too.

[12227] In another embodiment thereof the expression cassette does not comprise an additional transit peptide in case in Table I, application no. 2, in column 6 in the same line as SEQ ID NO. 19364 is depicted, non-targeted is mentioned.

[12228] In an embodiment the present invention relates to an expresssion cassette comprising a) a promoter, prefereably a promoter selected from the group consisting of Big35S, PCUbi, Super and USP, in particular PCUbi; and b) the nucleic acid SEQ ID NO. 1061, or a homolog or fragment thereof, or a homolog thereof being depicted in Table I, application no. 2, column 8, in the same line as SEQ ID NO. 1061, preferably the coding region thereof, a homolog or a fragment thereof; which are operable linked.

[12229] In an embodiment thereof the expression cassette comprises in addition c) a nucleic acid molecule encoding a transit peptide, especially a plastidal transit petide in case in Table I, application no. 2, in column 6 in the same line as SEQ ID NO. 1061 is depicted, plastidic is mentioned, or a mitochondrial transit petide in case in Table I, application no. 2, in column 6 in the same line as SEQ ID NO. 1061 is depicted, mitochondrial is mentioned; which is operable linke, too.

[12230] In another embodiment thereof the expression cassette does not comprise an additional transit peptide in case in Table I, application no. 2, in column 6 in the same line as SEQ ID NO. 1061 is depicted, non-targeted is mentioned.

[12231] In an embodiment the present invention relates to an expresssion cassette comprising a) a promoter, prefereably a promoter selected from the group consisting of Big35S, PCUbi, Super and USP, in particular PCUbi; and b) the nucleic acid SEQ ID NO. 17601, or a homolog or fragment thereof, or a homolog thereof being depicted in Table I, application no. 2, column 8, in the same line as SEQ ID NO. 17601, preferably the coding region thereof, a homolog or a fragment thereof; which are operable linked.

[12232] In an embodiment thereof the expression cassette comprises in addition c) a nucleic acid molecule encoding a transit peptide, especially a plastidal transit petide in case in Table I, application no. 2, in column 6 in the same line as SEQ ID NO. 17601 is depicted, plastidic is mentioned, or a mitochondrial transit petide in case in Table I, application no. 2, in column 6 in the same line as SEQ ID NO. 17601 is depicted, mitochondrial is mentioned; which is operable linke, too.

[12233] In another embodiment thereof the expression cassette does not comprise an additional transit peptide in case in Table I, application no. 2, in column 6 in the same line as SEQ ID NO. 17601 is depicted, non-targeted is mentioned.

[12234] In an embodiment the present invention relates to an expresssion cassette comprising a) a promoter, prefereably a promoter selected from the group consisting of Big35S, PCUbi, Super and USP, in particular PCUbi; and b) the nucleic acid SEQ ID NO. 28040, or a homolog or fragment thereof, or a homolog thereof being depicted in Table I, application no. 2, column 8, in the same line as SEQ ID NO. 28040, preferably the coding region thereof, a homolog or a fragment thereof; which are operable linked.

[12235] In an embodiment thereof the expression cassette comprises in addition c) a nucleic acid molecule encoding a transit peptide, especially a plastidal transit petide in case in Table I, application no. 2, in column 6 in the same line as SEQ ID NO. 28040 is depicted, plastidic is mentioned, or a mitochondrial transit petide in case in Table I, application no. 2, in column 6 in the same line as SEQ ID NO. 28040 is depicted, mitochondrial is mentioned; which is operable linke, too.

[12236] In another embodiment thereof the expression cassette does not comprise an additional transit peptide in case in Table I, application no. 2, in column 6 in the same line as SEQ ID NO. 28040 is depicted, non-targeted is mentioned.

[12237] In an embodiment the present invention relates to an expresssion cassette comprising a) a promoter, prefereably a promoter selected from the group consisting of Big35S, PCUbi, Super and USP, in particular PCUbi; and b) the nucleic acid SEQ ID NO. 1815, or a homolog or fragment thereof, or a homolog thereof being depicted in Table I, application no. 2, column 8, in the same line as SEQ ID NO. 1815, preferably the coding region thereof, a homolog or a fragment thereof; which are operable linked.

[12238] In an embodiment thereof the expression cassette comprises in addition c) a nucleic acid molecule encoding a transit peptide, especially a plastidal transit petide in case in Table I, application no. 2, in column 6 in the same line as SEQ ID NO. 1815 is depicted, plastidic is mentioned, or a mitochondrial transit petide in case in Table I, application no. 2, in column 6 in the same line as SEQ ID NO. 1815 is depicted, mitochondrial is mentioned; which is operable linke, too.

[12239] In another embodiment thereof the expression cassette does not comprise an additional transit peptide in case in Table I, application no. 2, in column 6 in the same line as SEQ ID NO. 1815 is depicted, non-targeted is mentioned.

[12240] In an embodiment the present invention relates to an expresssion cassette comprising a) a promoter, prefereably a promoter selected from the group consisting of Big35S, PCUbi, Super and USP, in particular PCUbi; and b) the nucleic acid SEQ ID NO. 25780, or a homolog or fragment thereof, or a homolog thereof being depicted in Table I, application no. 2, column 8, in the same line as SEQ ID NO. 25780, preferably the coding region thereof, a homolog or a fragment thereof; which are operable linked.

[12241] In an embodiment thereof the expression cassette comprises in addition c) a nucleic acid molecule encoding a transit peptide, especially a plastidal transit petide in case in Table I, application no. 2, in column 6 in the same line as SEQ ID NO. 25780 is depicted, plastidic is mentioned, or a mitochondrial transit petide in case in Table I, application no. 2, in column 6 in the same line as SEQ ID NO. 25780 is depicted, mitochondrial is mentioned; which is operable linke, too.

[12242] In another embodiment thereof the expression cassette does not comprise an additional transit peptide in case in Table I, application no. 2, in column 6 in the same line as SEQ ID NO. 25780 is depicted, non-targeted is mentioned.

[12243] In an embodiment the present invention relates to an expresssion cassette comprising a) a promoter, prefereably a promoter selected from the group consisting of Big35S, PCUbi, Super and USP, in particular PCUbi; and b) the nucleic acid SEQ ID NO. 5557, or a homolog or fragment thereof, or a homolog thereof being depicted in Table I, application no. 2, column 8, in the same line as SEQ ID NO. 5557, preferably the coding region thereof, a homolog or a fragment thereof; which are operable linked.

[12244] In an embodiment thereof the expression cassette comprises in addition c) a nucleic acid molecule encoding a transit peptide, especially a plastidal transit petide in case in Table I, application no. 2, in column 6 in the same line as SEQ ID NO. 5557 is depicted, plastidic is mentioned, or a mitochondrial transit petide in case in Table I, application no. 2, in column 6 in the same line as SEQ ID NO. 5557 is depicted, mitochondrial is mentioned; which is operable linke, too.

[12245] In another embodiment thereof the expression cassette does not comprise an additional transit peptide in case in Table I, application no. 2, in column 6 in the same line as SEQ ID NO. 5557 is depicted, non-targeted is mentioned.

[12246] In an embodiment the present invention relates to an expresssion cassette comprising a) a promoter, prefereably a promoter selected from the group consisting of Big35S, PCUbi, Super and USP, in particular PCUbi; and b) the nucleic acid SEQ ID NO. 26120, or a homolog or fragment thereof, or a homolog thereof being depicted in Table I, application no. 2, column 8, in the same line as SEQ ID NO. 26120, preferably the coding region thereof, a homolog or a fragment thereof; which are operable linked.

[12247] In an embodiment thereof the expression cassette comprises in addition c) a nucleic acid molecule encoding a transit peptide, especially a plastidal transit petide in case in Table I, application no. 2, in column 6 in the same line as SEQ ID NO. 26120 is depicted, plastidic is mentioned, or a mitochondrial transit petide in case in Table I, application no. 2, in column 6 in the same line as SEQ ID NO. 26120 is depicted, mitochondrial is mentioned; which is operable linke, too.

[12248] In another embodiment thereof the expression cassette does not comprise an additional transit peptide in case in Table I, application no. 2, in column 6 in the same line as SEQ ID NO. 26120 is depicted, non-targeted is mentioned.

[12249] In an embodiment the present invention relates to an expresssion cassette comprising a) a promoter, prefereably a promoter selected from the group consisting of Big35S, PCUbi, Super and USP, in particular PCUbi; and b) the nucleic acid SEQ ID NO. 26196, or a homolog or fragment thereof, or a homolog thereof being depicted in Table I, application no. 2, column 8, in the same line as SEQ ID NO. 26196, preferably the coding region thereof, a homolog or a fragment thereof; which are operable linked.

[12250] In an embodiment thereof the expression cassette comprises in addition c) a nucleic acid molecule encoding a transit peptide, especially a plastidal transit petide in case in Table I, application no. 2, in column 6 in the same line as SEQ ID NO. 26196 is depicted, plastidic is mentioned, or a mitochondrial transit petide in case in Table I, application no. 2, in column 6 in the same line as SEQ ID NO. 26196 is depicted, mitochondrial is mentioned; which is operable linke, too.

[12251] In another embodiment thereof the expression cassette does not comprise an additional transit peptide in case in Table I, application no. 2, in column 6 in the same line as SEQ ID NO. 26196 is depicted, non-targeted is mentioned.

[12252] In an embodiment the present invention relates to an expresssion cassette comprising a) a promoter, prefereably a promoter selected from the group consisting of Big35S, PCUbi, Super and USP, in particular PCUbi; and b) the nucleic acid SEQ ID NO. 26434, or a homolog or fragment thereof, or a homolog thereof being depicted in Table I, application no. 2, column 8, in the same line as SEQ ID NO. 26434, preferably the coding region thereof, a homolog or a fragment thereof; which are operable linked.

[12253] In an embodiment thereof the expression cassette comprises in addition c) a nucleic acid molecule encoding a transit peptide, especially a plastidal transit petide in case in Table I, application no. 2, in column 6 in the same line as SEQ ID NO. 26434 is depicted, plastidic is mentioned, or a mitochondrial transit petide in case in Table I, application no. 2, in column 6 in the same line as SEQ ID NO. 26434 is depicted, mitochondrial is mentioned; which is operable linke, too.

[12254] In another embodiment thereof the expression cassette does not comprise an additional transit peptide in case in Table I, application no. 2, in column 6 in the same line as SEQ ID NO. 26434 is depicted, non-targeted is mentioned.

[12255] In an embodiment the present invention relates to an expresssion cassette comprising a) a promoter, prefereably a promoter selected from the group consisting of Big35S, PCUbi, Super and USP, in particular PCUbiand b) the nucleic acid SEQ ID NO. 6040, or a homolog or fragment thereof, or a homolog thereof being depicted in Table I, application no. 2, column 8, in the same line as SEQ ID NO. 6040, preferably the coding region thereof, a homolog or a fragment thereof; which are operable linked.

[12256] In an embodiment thereof the expression cassette comprises in addition c) a nucleic acid molecule encoding a transit peptide, especially a plastidal transit petide in case in Table I, application no. 2, in column 6 in the same line as SEQ ID NO. 6040 is depicted, plastidic is mentioned, or a mitochondrial transit petide in case in Table I, application no. 2, in column 6 in the same line as SEQ ID NO. 6040 is depicted, mitochondrial is mentioned; which is operable linke, too.

[12257] In another embodiment thereof the expression cassette does not comprise an additional transit peptide in case in Table I, application no. 2, in column 6 in the same line as SEQ ID NO. 6040 is depicted, non-targeted is mentioned.

[12258] In an embodiment the present invention relates to an expresssion cassette comprising a) a promoter, prefereably a promoter selected from the group consisting of Big35S, PCUbi, Super and USP, in particular PCUbi; and b) the nucleic acid SEQ ID NO. 5493, or a homolog or fragment thereof, or a homolog thereof being depicted in Table I, application no. 2, column 8, in the same line as SEQ ID NO. 5493, preferably the coding region thereof, a homolog or a fragment thereof; which are operable linked.

[12259] In an embodiment thereof the expression cassette comprises in addition c) a nucleic acid molecule encoding a transit peptide, especially a plastidal transit petide in case in Table I, application no. 2, in column 6 in the same line as SEQ ID NO. 5493 is depicted, plastidic is mentioned, or a mitochondrial transit petide in case in Table I, application no. 2, in column 6 in the same line as SEQ ID NO. 5493 is depicted, mitochondrial is mentioned; which is operable linke, too.

[12260] In another embodiment thereof the expression cassette does not comprise an additional transit peptide in case in Table I, application no. 2, in column 6 in the same line as SEQ ID NO. 5493 is depicted, non-targeted is mentioned.

[12261] In an embodiment the present invention relates to an expresssion cassette comprising a) a promoter, prefereably a promoter selected from the group consisting of Big35S, PCUbi, Super and USP, in particular PCUbi; and b) the nucleic acid SEQ ID NO. 27882, or a homolog or fragment thereof, or a homolog thereof being depicted in Table I, application no. 2, column 8, in the same line as SEQ ID NO. 27882, preferably the coding region thereof, a homolog or a fragment thereof; which are operable linked.

[12262] In an embodiment thereof the expression cassette comprises in addition c) a nucleic acid molecule encoding a transit peptide, especially a plastidal transit petide in case in Table I, application no. 2, in column 6 in the same line as SEQ ID NO. 27882 is depicted, plastidic is mentioned, or a mitochondrial transit petide in case in Table I, application no. 2, in column 6 in the same line as SEQ ID NO. 27882 is depicted, mitochondrial is mentioned; which is operable linke, too.

[12263] In another embodiment thereof the expression cassette does not comprise an additional transit peptide in case in Table I, application no. 2, in column 6 in the same line as SEQ ID NO. 27882 is depicted, non-targeted is mentioned.

[12264] In an embodiment the present invention relates to an expresssion cassette comprising a) a promoter, prefereably a promoter selected from the group consisting of Big35S, PCUbi, Super and USP, in particular PCUbi; and b) the nucleic acid SEQ ID NO. 25498, or a homolog or fragment thereof, or a homolog thereof being depicted in Table I, application no. 2, column 8, in the same line as SEQ ID NO. 25498, preferably the coding region thereof, a homolog or a fragment thereof; which are operable linked.

[12265] In an embodiment thereof the expression cassette comprises in addition c) a nucleic acid molecule encoding a transit peptide, especially a plastidal transit petide in case in Table I, application no. 2, in column 6 in the same line as SEQ ID NO. 25498 is depicted, plastidic is mentioned, or a mitochondrial transit petide in case in Table I, application no. 2, in column 6 in the same line as SEQ ID NO. 25498 is depicted, mitochondrial is mentioned; which is operable linke, too.

[12266] In another embodiment thereof the expression cassette does not comprise an additional transit peptide in case in Table I, application no. 2, in column 6 in the same line as SEQ ID NO. 25498 is depicted, non-targeted is mentioned.

[12267] In an embodiment the present invention relates to an expresssion cassette comprising a) a promoter, prefereably a promoter selected from the group consisting of Big35S, PCUbi, Super and USP, in particular PCUbi; and b) the nucleic acid SEQ ID NO. 6075, or a homolog or fragment thereof, or a homolog thereof being depicted in Table I, application no. 2, column 8, in the same line as SEQ ID NO. 6075, preferably the coding region thereof, a homolog or a fragment thereof; which are operable linked.

[12268] In an embodiment thereof the expression cassette comprises in addition c) a nucleic acid molecule encoding a transit peptide, especially a plastidal transit petide in case in Table I, application no. 2, in column 6 in the same line as SEQ ID NO. 6075 is depicted, plastidic is mentioned, or a mitochondrial transit petide in case in Table I, application no. 2, in column 6 in the same line as SEQ ID NO. 6075 is depicted, mitochondrial is mentioned; which is operable linke, too.

[12269] In another embodiment thereof the expression cassette does not comprise an additional transit peptide in case in Table I, application no. 2, in column 6 in the same line as SEQ ID NO. 6075 is depicted, non-targeted is mentioned.

[12270] In an embodiment the present invention relates to an expresssion cassette comprising a) a promoter, prefereably a promoter selected from the group consisting of Big35S, PCUbi, Super and USP, in particular PCUbi; and b) the nucleic acid SEQ ID NO. 28738, or a homolog or fragment thereof, or a homolog thereof being depicted in Table I, application no. 2, column 8, in the same line as SEQ ID NO. 28738, preferably the coding region thereof, a homolog or a fragment thereof; which are operable linked.

[12271] In an embodiment thereof the expression cassette comprises in addition c) a nucleic acid molecule encoding a transit peptide, especially a plastidal transit petide in case in Table I, application no. 2, in column 6 in the same line as SEQ ID NO. 28738 is depicted, plastidic is mentioned, or a mitochondrial transit petide in case in Table I, application no. 2, in column 6 in the same line as SEQ ID NO. 28738 is depicted, mitochondrial is mentioned; which is operable linke, too.

[12272] In another embodiment thereof the expression cassette does not comprise an additional transit peptide in case in Table I, application no. 2, in column 6 in the same line as SEQ ID NO. 28738 is depicted, non-targeted is mentioned.

[12273] In an embodiment the present invention relates to an expresssion cassette comprising a) a promoter, prefereably a promoter selected from the group consisting of Big35S, PCUbi, Super and USP, in particular PCUbi; and b) the nucleic acid SEQ ID NO. 29246, or a homolog or fragment thereof, or a homolog thereof being depicted in Table I, application no. 2, column 8, in the same line as SEQ ID NO. 29246, preferably the coding region thereof, a homolog or a fragment thereof; which are operable linked.

[12274] In an embodiment thereof the expression cassette comprises in addition c) a nucleic acid molecule encoding a transit peptide, especially a plastidal transit petide in case in Table I, application no. 2, in column 6 in the same line as SEQ ID NO. 29246 is depicted, plastidic is mentioned, or a mitochondrial transit petide in case in Table I, application no. 2, in column 6 in the same line as SEQ ID NO. 29246 is depicted, mitochondrial is mentioned; which is operable linke, too.

[12275] In another embodiment thereof the expression cassette does not comprise an additional transit peptide in case in Table I, application no. 2, in column 6 in the same line as SEQ ID NO. 29246 is depicted, non-targeted is mentioned.

[12276] In an embodiment the present invention relates to an expresssion cassette comprising a) a promoter, prefereably a promoter selected from the group consisting of Big35S, PCUbi, Super and USP, in particular PCUbi; and b) the nucleic acid SEQ ID NO. 29286, or a homolog or fragment thereof, or a homolog thereof being depicted in Table I, application no. 2, column 8, in the same line as SEQ ID NO. 29286, preferably the coding region thereof, a homolog or a fragment thereof; which are operable linked.

[12277] In an embodiment thereof the expression cassette comprises in addition c) a nucleic acid molecule encoding a transit peptide, especially a plastidal transit petide in case in Table I, application no. 2, in column 6 in the same line as SEQ ID NO. 29286 is depicted, plastidic is mentioned, or a mitochondrial transit petide in case in Table I, application no. 2, in column 6 in the same line as SEQ ID NO. 29286 is depicted, mitochondrial is mentioned; which is operable linke, too.

[12278] In another embodiment thereof the expression cassette does not comprise an additional transit peptide in case in Table I, application no. 2, in column 6 in the same line as SEQ ID NO. 29286 is depicted, non-targeted is mentioned.

[12279] In an embodiment the present invention relates to an expresssion cassette comprising a) a promoter, prefereably a promoter selected from the group consisting of Big35S, PCUbi, Super and USP, in particular PCUbi; and b) the nucleic acid SEQ ID NO. 29397, or a homolog or fragment thereof, or a homolog thereof being depicted in Table I, application no. 2, column 8, in the same line as SEQ ID NO. 29397, preferably the coding region thereof, a homolog or a fragment thereof; which are operable linked.

[12280] In an embodiment thereof the expression cassette comprises in addition c) a nucleic acid molecule encoding a transit peptide, especially a plastidal transit petide in case in Table I, application no. 2, in column 6 in the same line as SEQ ID NO. 29397 is depicted, plastidic is mentioned, or a mitochondrial transit petide in case in Table I, application no. 2, in column 6 in the same line as SEQ ID NO. 29397 is depicted, mitochondrial is mentioned; which is operable linke, too.

[12281] In another embodiment thereof the expression cassette does not comprise an additional transit peptide in case in Table I, application no. 2, in column 6 in the same line as SEQ ID NO. 29397 is depicted, non-targeted is mentioned.

[12282] In an embodiment the present invention relates to an expresssion cassette comprising a) a promoter, prefereably a promoter selected from the group consisting of Big35S, PCUbi, Super and USP, in particular PCUbi; and b) the nucleic acid SEQ ID NO. 29500, or a homolog or fragment thereof, or a homolog thereof being depicted in Table I, application no. 2, column 8, in the same line as SEQ ID NO. 29500, preferably the coding region thereof, a homolog or a fragment thereof; which are operable linked.

[12283] In an embodiment thereof the expression cassette comprises in addition c) a nucleic acid molecule encoding a transit peptide, especially a plastidal transit petide in case in Table I, application no. 2, in column 6 in the same line as SEQ ID NO. 29500 is depicted, plastidic is mentioned, or a mitochondrial transit petide in case in Table I, application no. 2, in column 6 in the same line as SEQ ID NO. 29500 is depicted, mitochondrial is mentioned; which is operable linke, too.

[12284] In another embodiment thereof the expression cassette does not comprise an additional transit peptide in case in Table I, application no. 2, in column 6 in the same line as SEQ ID NO. 29500 is depicted, non-targeted is mentioned.

[12285] In an embodiment the present invention relates to an expresssion cassette comprising a) a promoter, prefereably a promoter selected from the group consisting of Big35S, PCUbi, Super and USP, in particular PCUbi; and b) the nucleic acid SEQ ID NO. 30039, or a homolog or fragment thereof, or a homolog thereof being depicted in Table I, application no. 2, column 8, in the same line as SEQ ID NO. 30039, preferably the coding region thereof, a homolog or a fragment thereof; which are operable linked.

[12286] In an embodiment thereof the expression cassette comprises in addition c) a nucleic acid molecule encoding a transit peptide, especially a plastidal transit petide in case in Table I, application no. 2, in column 6 in the same line as SEQ ID NO. 30039 is depicted, plastidic is mentioned, or a mitochondrial transit petide in case in Table I, application no. 2, in column 6 in the same line as SEQ ID NO. 30039 is depicted, mitochondrial is mentioned; which is operable linke, too.

[12287] In another embodiment thereof the expression cassette does not comprise an additional transit peptide in case in Table I, application no. 2, in column 6 in the same line as SEQ ID NO. 30039 is depicted, non-targeted is mentioned.

[12288] In an embodiment the present invention relates to an expresssion cassette comprising a) a promoter, prefereably a promoter selected from the group consisting of Big35S, PCUbi, Super and USP, in particular Super; and b) the nucleic acid SEQ ID NO. 41442, or a homolog or fragment thereof, or a homolog thereof being depicted in Table I, application no. 2, column 8, in the same line as SEQ ID NO. 41442, preferably the coding region thereof, a homolog or a fragment thereof; which are operable linked.

[12289] In an embodiment thereof the expression cassette comprises in addition c) a nucleic acid molecule encoding a transit peptide, especially a plastidal transit petide in case in Table I, application no. 2, in column 6 in the same line as SEQ ID NO. 41442 is depicted, plastidic is mentioned, or a mitochondrial transit petide in case in Table I, application no. 2, in column 6 in the same line as SEQ ID NO. 41442 is depicted, mitochondrial is mentioned; which is operable linke, too.

[12290] In another embodiment thereof the expression cassette does not comprise an additional transit peptide in case in Table I, application no. 2, in column 6 in the same line as SEQ ID NO. 41442 is depicted, non-targeted is mentioned.

[12291] In an embodiment the present invention relates to an expresssion cassette comprising a) a promoter, prefereably a promoter selected from the group consisting of Big35S, PCUbi, Super and USP, in particular PCUbi; and b) the nucleic acid SEQ ID NO. 27021, or a homolog or fragment thereof, or a homolog thereof being depicted in Table I, application no. 2, column 8, in the same line as SEQ ID NO. 27021, preferably the coding region thereof, a homolog or a fragment thereof; which are operable linked.

[12292] In an embodiment thereof the expression cassette comprises in addition c) a nucleic acid molecule encoding a transit peptide, especially a plastidal transit petide in case in Table I, application no. 2, in column 6 in the same line as SEQ ID NO. 27021 is depicted, plastidic is mentioned, or a mitochondrial transit petide in case in Table I, application no. 2, in column 6 in the same line as SEQ ID NO. 27021 is depicted, mitochondrial is mentioned; which is operable linke, too.

[12293] In another embodiment thereof the expression cassette does not comprise an additional transit peptide in case in Table I, application no. 2, in column 6 in the same line as SEQ ID NO. 27021 is depicted, non-targeted is mentioned.

[12294] In an embodiment the present invention relates to an expresssion cassette comprising a) a promoter, prefereably a promoter selected from the group consisting of Big35S, PCUbi, Super and USP, in particular PCUbi; and b) the nucleic acid SEQ ID NO. 4348, or a homolog or fragment thereof, or a homolog thereof being depicted in Table I, application no. 2, column 8, in the same line as SEQ ID NO. 4348, preferably the coding region thereof, a homolog or a fragment thereof; which are operable linked.

[12295] In an embodiment thereof the expression cassette comprises in addition c) a nucleic acid molecule encoding a transit peptide, especially a plastidal transit petide in case in Table I, application no. 2, in column 6 in the same line as SEQ ID NO. 4348 is depicted, plastidic is mentioned, or a mitochondrial transit petide in case in Table I, application no. 2, in column 6 in the same line as SEQ ID NO. 4348 is depicted, mitochondrial is mentioned; which is operable linke, too.

[12296] In another embodiment thereof the expression cassette does not comprise an additional transit peptide in case in Table I, application no. 2, in column 6 in the same line as SEQ ID NO. 4348 is depicted, non-targeted is mentioned.

[12297] In an embodiment the present invention relates to an expresssion cassette comprising a) a promoter, prefereably a promoter selected from the group consisting of Big35S, PCUbi, Super and USP, in particular PCUbi; and b) the nucleic acid SEQ ID NO. 2935, or a homolog or fragment thereof, or a homolog thereof being depicted in Table I, application no. 2, column 8, in the same line as SEQ ID NO. 2935, preferably the coding region thereof, a homolog or a fragment thereof; which are operable linked.

[12298] In an embodiment thereof the expression cassette comprises in addition c) a nucleic acid molecule encoding a transit peptide, especially a plastidal transit petide in case in Table I, application no. 2, in column 6 in the same line as SEQ ID NO. 2935 is depicted, plastidic is mentioned, or a mitochondrial transit petide in case in Table I, application no. 2, in column 6 in the same line as SEQ ID NO. 2935 is depicted, mitochondrial is mentioned; which is operable linke, too.

[12299] In another embodiment thereof the expression cassette does not comprise an additional transit peptide in case in Table I, application no. 2, in column 6 in the same line as SEQ ID NO. 2935 is depicted, non-targeted is mentioned.

[12300] In an embodiment the present invention relates to an expresssion cassette comprising a) a promoter, prefereably a promoter selected from the group consisting of Big35S, PCUbi, Super and USP, in particular PCUbi; and b) the nucleic acid SEQ ID NO. 23482, or a homolog or fragment thereof, or a homolog thereof being depicted in Table I, application no. 2, column 8, in the same line as SEQ ID NO. 23482, preferably the coding region thereof, a homolog or a fragment thereof; which are operable linked.

[12301] In an embodiment thereof the expression cassette comprises in addition c) a nucleic acid molecule encoding a transit peptide, especially a plastidal transit petide in case in Table I, application no. 2, in column 6 in the same line as SEQ ID NO. 23482 is depicted, plastidic is mentioned, or a mitochondrial transit petide in case in Table I, application no. 2, in column 6 in the same line as SEQ ID NO. 23482 is depicted, mitochondrial is mentioned; which is operable linke, too.

[12302] In another embodiment thereof the expression cassette does not comprise an additional transit peptide in case in Table I, application no. 2, in column 6 in the same line as SEQ ID NO. 23482 is depicted, non-targeted is mentioned.

[12303] In an embodiment the present invention relates to an expresssion cassette comprising a) a promoter, prefereably a promoter selected from the group consisting of Big35S, PCUbi, Super and USP, in particular PCUbi; and b) the nucleic acid SEQ ID NO. 3279, or a homolog or fragment thereof, or a homolog thereof being depicted in Table I, application no. 2, column 8, in the same line as SEQ ID NO. 3279, preferably the coding region thereof, a homolog or a fragment thereof; which are operable linked.

[12304] In an embodiment thereof the expression cassette comprises in addition c) a nucleic acid molecule encoding a transit peptide, especially a plastidal transit petide in case in Table I, application no. 2, in column 6 in the same line as SEQ ID NO. 3279 is depicted, plastidic is mentioned, or a mitochondrial transit petide in case in Table I, application no. 2, in column 6 in the same line as SEQ ID NO. 3279 is depicted, mitochondrial is mentioned; which is operable linke, too.

[12305] In another embodiment thereof the expression cassette does not comprise an additional transit peptide in case in Table I, application no. 2, in column 6 in the same line as SEQ ID NO. 3279 is depicted, non-targeted is mentioned.

[12306] In an embodiment the present invention relates to an expresssion cassette comprising a) a promoter, prefereably a promoter selected from the group consisting of Big35S, PCUbi, Super and USP, in particular PCUbi; and b) the nucleic acid SEQ ID NO. 23844, or a homolog or fragment thereof, or a homolog thereof being depicted in Table I, application no. 2, column 8, in the same line as SEQ ID NO. 23844, preferably the coding region thereof, a homolog or a fragment thereof; which are operable linked.

[12307] In an embodiment thereof the expression cassette comprises in addition c) a nucleic acid molecule encoding a transit peptide, especially a plastidal transit petide in case in Table I, application no. 2, in column 6 in the same line as SEQ ID NO. 23844 is depicted, plastidic is mentioned, or a mitochondrial transit petide in case in Table I, application no. 2, in column 6 in the same line as SEQ ID NO. 23844 is depicted, mitochondrial is mentioned; which is operable linke, too.

[12308] In another embodiment thereof the expression cassette does not comprise an additional transit peptide in case in Table I, application no. 2, in column 6 in the same line as SEQ ID NO. 23844 is depicted, non-targeted is mentioned.

[12309] In an embodiment the present invention relates to an expresssion cassette comprising a) a promoter, prefereably a promoter selected from the group consisting of Big35S, PCUbi, Super and USP, in particular PCUbi; and b) the nucleic acid SEQ ID NO. 3654, or a homolog or fragment thereof, or a homolog thereof being depicted in Table I, application no. 2, column 8, in the same line as SEQ ID NO. 3654, preferably the coding region thereof, a homolog or a fragment thereof; which are operable linked.

[12310] In an embodiment thereof the expression cassette comprises in addition c) a nucleic acid molecule encoding a transit peptide, especially a plastidal transit petide in case in Table I, application no. 2, in column 6 in the same line as SEQ ID NO. 3654 is depicted, plastidic is mentioned, or a mitochondrial transit petide in case in Table I, application no. 2, in column 6 in the same line as SEQ ID NO. 3654 is depicted, mitochondrial is mentioned; which is operable linke, too.

[12311] In another embodiment thereof the expression cassette does not comprise an additional transit peptide in case in Table I, application no. 2, in column 6 in the same line as SEQ ID NO. 3654 is depicted, non-targeted is mentioned.

[12312] In an embodiment the present invention relates to an expresssion cassette comprising a) a promoter, prefereably a promoter selected from the group consisting of Big35S, PCUbi, Super and USP, in particular PCUbi; and b) the nucleic acid SEQ ID NO. 24232, or a homolog or fragment thereof, or a homolog thereof being depicted in Table I, application no. 2, column 8, in the same line as SEQ ID NO. 24232, preferably the coding region thereof, a homolog or a fragment thereof; which are operable linked.

[12313] In an embodiment thereof the expression cassette comprises in addition c) a nucleic acid molecule encoding a transit peptide, especially a plastidal transit petide in case in Table I, application no. 2, in column 6 in the same line as SEQ ID NO. 24232 is depicted, plastidic is mentioned, or a mitochondrial transit petide in case in Table I, application no. 2, in column 6 in the same line as SEQ ID NO. 24232 is depicted, mitochondrial is mentioned; which is operable linke, too.

[12314] In another embodiment thereof the expression cassette does not comprise an additional transit peptide in case in Table I, application no. 2, in column 6 in the same line as SEQ ID NO. 24232 is depicted, non-targeted is mentioned.

[12315] In an embodiment the present invention relates to an expresssion cassette comprising a) a promoter, prefereably a promoter selected from the group consisting of Big35S, PCUbi, Super and USP, in particular PCUbi; and b) the nucleic acid SEQ ID NO. 4040, or a homolog or fragment thereof, or a homolog thereof being depicted in Table I, application no. 2, column 8, in the same line as SEQ ID NO. 4040, preferably the coding region thereof, a homolog or a fragment thereof; which are operable linked.

[12316] In an embodiment thereof the expression cassette comprises in addition c) a nucleic acid molecule encoding a transit peptide, especially a plastidal transit petide in case in Table I, application no. 2, in column 6 in the same line as SEQ ID NO. 4040 is depicted, plastidic is mentioned, or a mitochondrial transit petide in case in Table I, application no. 2, in column 6 in the same line as SEQ ID NO. 4040 is depicted, mitochondrial is mentioned; which is operable linke, too.

[12317] In another embodiment thereof the expression cassette does not comprise an additional transit peptide in case in Table I, application no. 2, in column 6 in the same line as SEQ ID NO. 4040 is depicted, non-targeted is mentioned.

[12318] In an embodiment the present invention relates to an expresssion cassette comprising a) a promoter, prefereably a promoter selected from the group consisting of Big35S, PCUbi, Super and USP, in particular PCUbi; and b) the nucleic acid SEQ ID NO. 25676, or a homolog or fragment thereof, or a homolog thereof being depicted in Table I, application no. 2, column 8, in the same line as SEQ ID NO. 25676, preferably the coding region thereof, a homolog or a fragment thereof; which are operable linked.

[12319] In an embodiment thereof the expression cassette comprises in addition c) a nucleic acid molecule encoding a transit peptide, especially a plastidal transit petide in case in Table I, application no. 2, in column 6 in the same line as SEQ ID NO. 25676 is depicted, plastidic is mentioned, or a mitochondrial transit petide in case in Table I, application no. 2, in column 6 in the same line as SEQ ID NO. 25676 is depicted, mitochondrial is mentioned; which is operable linke, too.

[12320] In another embodiment thereof the expression cassette does not comprise an additional transit peptide in case in Table I, application no. 2, in column 6 in the same line as SEQ ID NO. 25676 is depicted, non-targeted is mentioned.

[12321] In an embodiment the present invention relates to an expresssion cassette comprising a) a promoter, prefereably a promoter selected from the group consisting of Big35S, PCUbi, Super and USP, in particular PCUbi; and b) the nucleic acid SEQ ID NO. 24311, or a homolog or fragment thereof, or a homolog thereof being depicted in Table I, application no. 2, column 8, in the same line as SEQ ID NO. 24311, preferably the coding region thereof, a homolog or a fragment thereof; which are operable linked.

[12322] In an embodiment thereof the expression cassette comprises in addition c) a nucleic acid molecule encoding a transit peptide, especially a plastidal transit petide in case in Table I, application no. 2, in column 6 in the same line as SEQ ID NO. 24311 is depicted, plastidic is mentioned, or a mitochondrial transit petide in case in Table I, application no. 2, in column 6 in the same line as SEQ ID NO. 24311 is depicted, mitochondrial is mentioned; which is operable linke, too.

[12323] In another embodiment thereof the expression cassette does not comprise an additional transit peptide in case in Table I, application no. 2, in column 6 in the same line as SEQ ID NO. 24311 is depicted, non-targeted is mentioned.

[12324] In an embodiment the present invention relates to an expresssion cassette comprising a) a promoter, prefereably a promoter selected from the group consisting of Big35S, PCUbi, Super and USP, in particular PCUbi; and b) the nucleic acid SEQ ID NO. 31026, or a homolog or fragment thereof, or a homolog thereof being depicted in Table I, application no. 2, column 8, in the same line as SEQ ID NO. 31026, preferably the coding region thereof, a homolog or a fragment thereof; which are operable linked.

[12325] In an embodiment thereof the expression cassette comprises in addition c) a nucleic acid molecule encoding a transit peptide, especially a plastidal transit petide in case in Table I, application no. 2, in column 6 in the same line as SEQ ID NO. 31026 is depicted, plastidic is mentioned, or a mitochondrial transit petide in case in Table I, application no. 2, in column 6 in the same line as SEQ ID NO. 31026 is depicted, mitochondrial is mentioned; which is operable linke, too.

[12326] In another embodiment thereof the expression cassette does not comprise an additional transit peptide in case in Table I, application no. 2, in column 6 in the same line as SEQ ID NO. 31026 is depicted, non-targeted is mentioned.

[12327] In an embodiment the present invention relates to an expresssion cassette comprising a) a promoter, prefereably a promoter selected from the group consisting of Big35S, PCUbi, Super and USP, in particular PCUbi; and b) the nucleic acid SEQ ID NO. 24438, or a homolog or fragment thereof, or a homolog thereof being depicted in Table I, application no. 2, column 8, in the same line as SEQ ID NO. 24438, preferably the coding region thereof, a homolog or a fragment thereof; which are operable linked.

[12328] In an embodiment thereof the expression cassette comprises in addition c) a nucleic acid molecule encoding a transit peptide, especially a plastidal transit petide in case in Table I, application no. 2, in column 6 in the same line as SEQ ID NO. 24438 is depicted, plastidic is mentioned, or a mitochondrial transit petide in case in Table I, application no. 2, in column 6 in the same line as SEQ ID NO. 24438 is depicted, mitochondrial is mentioned; which is operable linke, too.

[12329] In another embodiment thereof the expression cassette does not comprise an additional transit peptide in case in Table I, application no. 2, in column 6 in the same line as SEQ ID NO. 24438 is depicted, non-targeted is mentioned.

[12330] In an embodiment the present invention relates to an expresssion cassette comprising a) a promoter, prefereably a promoter selected from the group consisting of Big35S, PCUbi, Super and USP, in particular PCUbi; and b) the nucleic acid SEQ ID NO. 24492, or a homolog or fragment thereof, or a homolog thereof being depicted in Table I, application no. 2, column 8, in the same line as SEQ ID NO. 24492, preferably the coding region thereof, a homolog or a fragment thereof; which are operable linked.

[12331] In an embodiment thereof the expression cassette comprises in addition c) a nucleic acid molecule encoding a transit peptide, especially a plastidal transit petide in case in Table I, application no. 2, in column 6 in the same line as SEQ ID NO. 24492 is depicted, plastidic is mentioned, or a mitochondrial transit petide in case in Table I, application no. 2, in column 6 in the same line as SEQ ID NO. 24492 is depicted, mitochondrial is mentioned; which is operable linke, too.

[12332] In another embodiment thereof the expression cassette does not comprise an additional transit peptide in case in Table I, application no. 2, in column 6 in the same line as SEQ ID NO. 24492 is depicted, non-targeted is mentioned.

[12333] In an embodiment the present invention relates to an expresssion cassette comprising a) a promoter, prefereably a promoter selected from the group consisting of Big35S, PCUbi, Super and USP, in particular PCUbi; and b) the nucleic acid SEQ ID NO. 25222, or a homolog or fragment thereof, or a homolog thereof being depicted in Table I, application no. 2, column 8, in the same line as SEQ ID NO. 25222, preferably the coding region thereof, a homolog or a fragment thereof; which are operable linked.

[12334] In an embodiment thereof the expression cassette comprises in addition c) a nucleic acid molecule encoding a transit peptide, especially a plastidal transit petide in case in Table I, application no. 2, in column 6 in the same line as SEQ ID NO. 25222 is depicted, plastidic is mentioned, or a mitochondrial transit petide in case in Table I, application no. 2, in column 6 in the same line as SEQ ID NO. 25222 is depicted, mitochondrial is mentioned; which is operable linke, too.

[12335] In another embodiment thereof the expression cassette does not comprise an additional transit peptide in case in Table I, application no. 2, in column 6 in the same line as SEQ ID NO. 25222 is depicted, non-targeted is mentioned.

[12336] In an embodiment the present invention relates to an expresssion cassette comprising a) a promoter, prefereably a promoter selected from the group consisting of Big35S, PCUbi, Super and USP, in particular PCUbi; and b) the nucleic acid SEQ ID NO. 25283, or a homolog or fragment thereof, or a homolog thereof being depicted in Table I, application no. 2, column 8, in the same line as SEQ ID NO. 25283, preferably the coding region thereof, a homolog or a fragment thereof; which are operable linked.

[12337] In an embodiment thereof the expression cassette comprises in addition c) a nucleic acid molecule encoding a transit peptide, especially a plastidal transit petide in case in Table I, application no. 2, in column 6 in the same line as SEQ ID NO. 25283 is depicted, plastidic is mentioned, or a mitochondrial transit petide in case in Table I, application no. 2, in column 6 in the same line as SEQ ID NO. 25283 is depicted, mitochondrial is mentioned; which is operable linke, too.

[12338] In another embodiment thereof the expression cassette does not comprise an additional transit peptide in case in Table I, application no. 2, in column 6 in the same line as SEQ ID NO. 25283 is depicted, non-targeted is mentioned.

[12339] In an embodiment the present invention relates to an expresssion cassette comprising a) a promoter, prefereably a promoter selected from the group consisting of Big35S, PCUbi, Super and USP, in particular PCUbi; and b) the nucleic acid SEQ ID NO. 4904, or a homolog or fragment thereof, or a homolog thereof being depicted in Table I, application no. 2, column 8, in the same line as SEQ ID NO. 4904, preferably the coding region thereof, a homolog or a fragment thereof; which are operable linked.

[12340] In an embodiment thereof the expression cassette comprises in addition c) a nucleic acid molecule encoding a transit peptide, especially a plastidal transit petide in case in Table I, application no. 2, in column 6 in the same line as SEQ ID NO. 4904 is depicted, plastidic is mentioned, or a mitochondrial transit petide in case in Table I, application no. 2, in column 6 in the same line as

[12341] SEQ ID NO. 4904 is depicted, mitochondrial is mentioned; which is operable linke, too.

[12342] In another embodiment thereof the expression cassette does not comprise an additional transit peptide in case in Table I, application no. 2, in column 6 in the same line as SEQ ID NO. 4904 is depicted, non-targeted is mentioned.

[12343] In an embodiment the present invention relates to an expresssion cassette comprising a) a promoter, prefereably a promoter selected from the group consisting of Big35S, PCUbi, Super and USP, in particular PCUbi; and b) the nucleic acid SEQ ID NO. 25344, or a homolog or fragment thereof, or a homolog thereof being depicted in Table I, application no. 2, column 8, in the same line as SEQ ID NO. 25344, preferably the coding region thereof, a homolog or a fragment thereof; which are operable linked.

[12344] In an embodiment thereof the expression cassette comprises in addition c) a nucleic acid molecule encoding a transit peptide, especially a plastidal transit petide in case in Table I, application no. 2, in column 6 in the same line as SEQ ID NO. 25344 is depicted, plastidic is mentioned, or a mitochondrial transit petide in case in Table I, application no. 2, in column 6 in the same line as SEQ ID NO. 25344 is depicted, mitochondrial is mentioned; which is operable linke, too.

[12345] In another embodiment thereof the expression cassette does not comprise an additional transit peptide in case in Table I, application no. 2, in column 6 in the same line as SEQ ID NO. 25344 is depicted, non-targeted is mentioned.

[12346] In an embodiment the present invention relates to an expresssion cassette comprising a) a promoter, prefereably a promoter selected from the group consisting of Big35S, PCUbi, Super and USP, in particular PCUbi; and b) the nucleic acid SEQ ID NO. 25428, or a homolog or fragment thereof, or a homolog thereof being depicted in Table I, application no. 2, column 8, in the same line as SEQ ID NO. 25428, preferably the coding region thereof, a homolog or a fragment thereof; which are operable linked.

[12347] In an embodiment thereof the expression cassette comprises in addition c) a nucleic acid molecule encoding a transit peptide, especially a plastidal transit petide in case in Table I, application no. 2, in column 6 in the same line as SEQ ID NO. 25428 is depicted, plastidic is mentioned, or a mitochondrial transit petide in case in Table I, application no. 2, in column 6 in the same line as SEQ ID NO. 25428 is depicted, mitochondrial is mentioned; which is operable linke, too.

[12348] In another embodiment thereof the expression cassette does not comprise an additional transit peptide in case in Table I, application no. 2, in column 6 in the same line as SEQ ID NO. 25428 is depicted, non-targeted is mentioned.

[12349] In an embodiment the present invention relates to an expresssion cassette comprising a) a promoter, prefereably a promoter selected from the group consisting of Big35S, PCUbi, Super and USP, in particular PCUbi; and b) the nucleic acid SEQ ID NO. 5318, or a homolog or fragment thereof, or a homolog thereof being depicted in Table I, application no. 2, column 8, in the same line as SEQ ID NO. 5318, preferably the coding region thereof, a homolog or a fragment thereof; which are operable linked.

[12350] In an embodiment thereof the expression cassette comprises in addition c) a nucleic acid molecule encoding a transit peptide, especially a plastidal transit petide in case in Table I, application no. 2, in column 6 in the same line as SEQ ID NO. 5318 is depicted, plastidic is mentioned, or a mitochondrial transit petide in case in Table I, application no. 2, in column 6 in the same line as SEQ ID NO. 5318 is depicted, mitochondrial is mentioned; which is operable linke, too.

[12351] In another embodiment thereof the expression cassette does not comprise an additional transit peptide in case in Table I, application no. 2, in column 6 in the same line as SEQ ID NO. 5318 is depicted, non-targeted is mentioned.

[12352] In an embodiment the present invention relates to an expresssion cassette comprising a) a promoter, prefereably a promoter selected from the group consisting of Big35S, PCUbi, Super and USP, in particular PCUbi; and b) the nucleic acid SEQ ID NO. 4102, or a homolog or fragment thereof, or a homolog thereof being depicted in Table I, application no. 2, column 8, in the same line as SEQ ID NO. 4102, preferably the coding region thereof, a homolog or a fragment thereof; which are operable linked.

[12353] In an embodiment thereof the expression cassette comprises in addition c) a nucleic acid molecule encoding a transit peptide, especially a plastidal transit petide in case in Table I, application no. 2, in column 6 in the same line as SEQ ID NO. 4102 is depicted, plastidic is mentioned, or a mitochondrial transit petide in case in Table I, application no. 2, in column 6 in the same line as SEQ ID NO. 4102 is depicted, mitochondrial is mentioned; which is operable linke, too.

[12354] In another embodiment thereof the expression cassette does not comprise an additional transit peptide in case in Table I, application no. 2, in column 6 in the same line as SEQ ID NO. 4102 is depicted, non-targeted is mentioned.

[12355] In an embodiment the present invention relates to an expresssion cassette comprising a) a promoter, prefereably a promoter selected from the group consisting of Big35S, PCUbi, Super and USP, in particular PCUbi; and b) the nucleic acid SEQ ID NO. 62244, or a homolog or fragment thereof, or a homolog thereof being depicted in Table I, application no. 2, column 8, in the same line as SEQ ID NO. 62244, preferably the coding region thereof, a homolog or a fragment thereof; which are operable linked.

[12356] In an embodiment thereof the expression cassette comprises in addition c) a nucleic acid molecule encoding a transit peptide, especially a plastidal transit petide in case in Table I, application no. 2, in column 6 in the same line as SEQ ID NO. 62244 is depicted, plastidic is mentioned, or a mitochondrial transit petide in case in Table I, application no. 2, in column 6 in the same line as SEQ ID NO. 62244 is depicted, mitochondrial is mentioned; which is operable linke, too.

[12357] In another embodiment thereof the expression cassette does not comprise an additional transit peptide in case in Table I, application no. 2, in column 6 in the same line as SEQ ID NO. 62244 is depicted, non-targeted is mentioned.

[12358] In an embodiment the present invention relates to an expresssion cassette comprising a) a promoter, prefereably a promoter selected from the group consisting of Big35S, PCUbi, Super and USP, in particular PCUbi; and b) the nucleic acid SEQ ID NO. 60301, or a homolog or fragment thereof, or a homolog thereof being depicted in Table I, application no. 2, column 8, in the same line as SEQ ID NO. 60301, preferably the coding region thereof, a homolog or a fragment thereof; which are operable linked.

[12359] In an embodiment thereof the expression cassette comprises in addition c) a nucleic acid molecule encoding a transit peptide, especially a plastidal transit petide in case in Table I, application no. 2, in column 6 in the same line as SEQ ID NO. 60301 is depicted, plastidic is mentioned, or a mitochondrial transit petide in case in Table I, application no. 2, in column 6 in the same line as SEQ ID NO. 60301 is depicted, mitochondrial is mentioned; which is operable linke, too.

[12360] In another embodiment thereof the expression cassette does not comprise an additional transit peptide in case in Table I, application no. 2, in column 6 in the same line as SEQ ID NO. 60301 is depicted, non-targeted is mentioned.

[12361] In an embodiment the present invention relates to an expresssion cassette comprising a) a promoter, prefereably a promoter selected from the group consisting of Big35S, PCUbi, Super and USP, in particular PCUbi; and b) the nucleic acid SEQ ID NO. 60859, or a homolog or fragment thereof, or a homolog thereof being depicted in Table I, application no. 2, column 8, in the same line as SEQ ID NO. 60859, preferably the coding region thereof, a homolog or a fragment thereof; which are operable linked.

[12362] In an embodiment thereof the expression cassette comprises in addition c) a nucleic acid molecule encoding a transit peptide, especially a plastidal transit petide in case in Table I, application no. 2, in column 6 in the same line as SEQ ID NO. 60859 is depicted, plastidic is mentioned, or a mitochondrial transit petide in case in Table I, application no. 2, in column 6 in the same line as SEQ ID NO. 60859 is depicted, mitochondrial is mentioned; which is operable linke, too.

[12363] In another embodiment thereof the expression cassette does not comprise an additional transit peptide in case in Table I, application no. 2, in column 6 in the same line as SEQ ID NO. 60859 is depicted, non-targeted is mentioned.

[12364] In an embodiment the present invention relates to an expresssion cassette comprising a) a promoter, prefereably a promoter selected from the group consisting of Big35S, PCUbi, Super and USP, in particular PCUbi; and b) the nucleic acid SEQ ID NO. 61070, or a homolog or fragment thereof, or a homolog thereof being depicted in Table I, application no. 2, column 8, in the same line as SEQ ID NO. 61070, preferably the coding region thereof, a homolog or a fragment thereof; which are operable linked.

[12365] In an embodiment thereof the expression cassette comprises in addition c) a nucleic acid molecule encoding a transit peptide, especially a plastidal transit petide in case in Table I, application no. 2, in column 6 in the same line as SEQ ID NO. 61070 is depicted, plastidic is mentioned, or a mitochondrial transit petide in case in Table I, application no. 2, in column 6 in the same line as SEQ ID NO. 61070 is depicted, mitochondrial is mentioned; which is operable linke, too.

[12366] In another embodiment thereof the expression cassette does not comprise an additional transit peptide in case in Table I, application no. 2, in column 6 in the same line as SEQ ID NO. 61070 is depicted, non-targeted is mentioned.

[12367] In an embodiment the present invention relates to an expresssion cassette comprising a) a promoter, prefereably a promoter selected from the group consisting of Big35S, PCUbi, Super and USP, in particular PCUbi; and b) the nucleic acid SEQ ID NO. 61532, or a homolog or fragment thereof, or a homolog thereof being depicted in Table I, application no. 2, column 8, in the same line as SEQ ID NO. 61532, preferably the coding region thereof, a homolog or a fragment thereof; which are operable linked.

[12368] In an embodiment thereof the expression cassette comprises in addition c) a nucleic acid molecule encoding a transit peptide, especially a plastidal transit petide in case in Table I, application no. 2, in column 6 in the same line as SEQ ID NO. 61532 is depicted, plastidic is mentioned, or a mitochondrial transit petide in case in Table I, application no. 2, in column 6 in the same line as SEQ ID NO. 61532 is depicted, mitochondrial is mentioned; which is operable linke, too.

[12369] In another embodiment thereof the expression cassette does not comprise an additional transit peptide in case in Table I, application no. 2, in column 6 in the same line as SEQ ID NO. 61532 is depicted, non-targeted is mentioned.

[12370] In an embodiment the present invention relates to an expresssion cassette comprising a) a promoter, prefereably a promoter selected from the group consisting of Big35S, PCUbi, Super and USP, in particular PCUbi; and b) the nucleic acid SEQ ID NO. 61553, or a homolog or fragment thereof, or a homolog thereof being depicted in Table I, application no. 2, column 8, in the same line as SEQ ID NO. 61553, preferably the coding region thereof, a homolog or a fragment thereof; which are operable linked.

[12371] In an embodiment thereof the expression cassette comprises in addition c) a nucleic acid molecule encoding a transit peptide, especially a plastidal transit petide in case in Table I, application no. 2, in column 6 in the same line as SEQ ID NO. 61553 is depicted, plastidic is mentioned, or a mitochondrial transit petide in case in Table I, application no. 2, in column 6 in the same line as SEQ ID NO. 61553 is depicted, mitochondrial is mentioned; which is operable linke, too.

[12372] In another embodiment thereof the expression cassette does not comprise an additional transit peptide in case in Table I, application no. 2, in column 6 in the same line as SEQ ID NO. 61553 is depicted, non-targeted is mentioned.

[12373] In an embodiment the present invention relates to an expresssion cassette comprising a) a promoter, prefereably a promoter selected from the group consisting of Big35S, PCUbi, Super and USP, in particular PCUbi; and b) the nucleic acid SEQ ID NO. 61723, or a homolog or fragment thereof, or a homolog thereof being depicted in Table I, application no. 2, column 8, in the same line as SEQ ID NO. 61723, preferably the coding region thereof, a homolog or a fragment thereof; which are operable linked.

[12374] In an embodiment thereof the expression cassette comprises in addition c) a nucleic acid molecule encoding a transit peptide, especially a plastidal transit petide in case in Table I, application no. 2, in column 6 in the same line as SEQ ID NO. 61723 is depicted, plastidic is mentioned, or a mitochondrial transit petide in case in Table I, application no. 2, in column 6 in the same line as SEQ ID NO. 61723 is depicted, mitochondrial is mentioned; which is operable linke, too.

[12375] In another embodiment thereof the expression cassette does not comprise an additional transit peptide in case in Table I, application no. 2, in column 6 in the same line as SEQ ID NO. 61723 is depicted, non-targeted is mentioned.

[12376] In an embodiment the present invention relates to an expresssion cassette comprising a) a promoter, prefereably a promoter selected from the group consisting of Big35S, PCUbi, Super and USP, in particular PCUbi; and b) the nucleic acid SEQ ID NO. 62079, or a homolog or fragment thereof, or a homolog thereof being depicted in Table I, application no. 2, column 8, in the same line as SEQ ID NO. 62079, preferably the coding region thereof, a homolog or a fragment thereof; which are operable linked.

[12377] In an embodiment thereof the expression cassette comprises in addition c) a nucleic acid molecule encoding a transit peptide, especially a plastidal transit petide in case in Table I, application no. 2, in column 6 in the same line as SEQ ID NO. 62079 is depicted, plastidic is mentioned, or a mitochondrial transit petide in case in Table I, application no. 2, in column 6 in the same line as SEQ ID NO. 62079 is depicted, mitochondrial is mentioned; which is operable linke, too.

[12378] In another embodiment thereof the expression cassette does not comprise an additional transit peptide in case in Table I, application no. 2, in column 6 in the same line as SEQ ID NO. 62079 is depicted, non-targeted is mentioned.

[12379] In an embodiment the present invention relates to an expresssion cassette comprising a) a promoter, prefereably a promoter selected from the group consisting of Big35S, PCUbi, Super and USP, in particular USP; and b) the nucleic acid SEQ ID NO. 41073, or a homolog or fragment thereof, or a homolog thereof being depicted in Table I, application no. 2, column 8, in the same line as SEQ ID NO. 41073, preferably the coding region thereof, a homolog or a fragment thereof; which are operable linked.

[12380] In an embodiment thereof the expression cassette comprises in addition c) a nucleic acid molecule encoding a transit peptide, especially a plastidal transit petide in case in Table I, application no. 2, in column 6 in the same line as SEQ ID NO. 41073 is depicted, plastidic is mentioned, or a mitochondrial transit petide in case in Table I, application no. 2, in column 6 in the same line as SEQ ID NO. 41073 is depicted, mitochondrial is mentioned; which is operable linke, too.

[12381] In another embodiment thereof the expression cassette does not comprise an additional transit peptide in case in Table I, application no. 2, in column 6 in the same line as SEQ ID NO. 41073 is depicted, non-targeted is mentioned.

[12382] In an embodiment the present invention relates to an expresssion cassette comprising a) a promoter, prefereably a promoter selected from the group consisting of Big35S, PCUbi, Super and USP, in particular PCUbi; and b) the nucleic acid SEQ ID NO. 62160, or a homolog or fragment thereof, or a homolog thereof being depicted in Table I, application no. 2, column 8, in the same line as SEQ ID NO. 62160, preferably the coding region thereof, a homolog or a fragment thereof; which are operable linked.

[12383] In an embodiment thereof the expression cassette comprises in addition c) a nucleic acid molecule encoding a transit peptide, especially a plastidal transit petide in case in Table I, application no. 2, in column 6 in the same line as SEQ ID NO. 62160 is depicted, plastidic is mentioned, or a mitochondrial transit petide in case in Table I, application no. 2, in column 6 in the same line as SEQ ID NO. 62160 is depicted, mitochondrial is mentioned; which is operable linke, too.

[12384] In another embodiment thereof the expression cassette does not comprise an additional transit peptide in case in Table I, application no. 2, in column 6 in the same line as SEQ ID NO. 62160 is depicted, non-targeted is mentioned.

[12385] In an embodiment the present invention relates to an expresssion cassette comprising a) a promoter, prefereably a promoter selected from the group consisting of Big35S, PCUbi, Super and USP, in particular PCUbi; and b) the nucleic acid SEQ ID NO. 59370, or a homolog or fragment thereof, or a homolog thereof being depicted in Table I, application no. 2, column 8, in the same line as SEQ ID NO. 59370, preferably the coding region thereof, a homolog or a fragment thereof; which are operable linked.

[12386] In an embodiment thereof the expression cassette comprises in addition c) a nucleic acid molecule encoding a transit peptide, especially a plastidal transit petide in case in Table I, application no. 2, in column 6 in the same line as SEQ ID NO. 59370 is depicted, plastidic is mentioned, or a mitochondrial transit petide in case in Table I, application no. 2, in column 6 in the same line as SEQ ID NO. 59370 is depicted, mitochondrial is mentioned; which is operable linke, too.

[12387] In another embodiment thereof the expression cassette does not comprise an additional transit peptide in case in Table I, application no. 2, in column 6 in the same line as SEQ ID NO. 59370 is depicted, non-targeted is mentioned.

[12388] In an embodiment the present invention relates to an expresssion cassette comprising a) a promoter, prefereably a promoter selected from the group consisting of Big35S, PCUbi, Super and USP, in particular Big35S; and b) the nucleic acid SEQ ID NO. 62524, or a homolog or fragment thereof, or a homolog thereof being depicted in Table I, application no. 2, column 8, in the same line as SEQ ID NO. 62524, preferably the coding region thereof, a homolog or a fragment thereof; which are operable linked.

[12389] In an embodiment thereof the expression cassette comprises in addition c) a nucleic acid molecule encoding a transit peptide, especially a plastidal transit petide in case in Table I, application no. 2, in column 6 in the same line as SEQ ID NO. 62524 is depicted, plastidic is mentioned, or a mitochondrial transit petide in case in Table I, application no. 2, in column 6 in the same line as SEQ ID NO. 62524 is depicted, mitochondrial is mentioned; which is operable linke, too.

[12390] In another embodiment thereof the expression cassette does not comprise an additional transit peptide in case in Table I, application no. 2, in column 6 in the same line as SEQ ID NO. 62524 is depicted, non-targeted is mentioned.

[12391] In an embodiment the present invention relates to an expresssion cassette comprising a) a promoter, prefereably a promoter selected from the group consisting of Big35S, PCUbi, Super and USP, in particular Big35S; and b) the nucleic acid SEQ ID NO. 62717, or a homolog or fragment thereof, or a homolog thereof being depicted in Table I, application no. 2, column 8, in the same line as SEQ ID NO. 62717, preferably the coding region thereof, a homolog or a fragment thereof; which are operable linked.

[12392] In an embodiment thereof the expression cassette comprises in addition c) a nucleic acid molecule encoding a transit peptide, especially a plastidal transit petide in case in Table I, application no. 2, in column 6 in the same line as SEQ ID NO. 62717 is depicted, plastidic is mentioned, or a mitochondrial transit petide in case in Table I, application no. 2, in column 6 in the same line as SEQ ID NO. 62717 is depicted, mitochondrial is mentioned; which is operable linke, too.

[12393] In another embodiment thereof the expression cassette does not comprise an additional transit peptide in case in Table I, application no. 2, in column 6 in the same line as SEQ ID NO. 62717 is depicted, non-targeted is mentioned.

[12394] In an embodiment the present invention relates to an expresssion cassette comprising a) a promoter, prefereably a promoter selected from the group consisting of Big35S, PCUbi, Super and USP, in particular Big35S; and b) the nucleic acid SEQ ID NO. 63167, or a homolog or fragment thereof, or a homolog thereof being depicted in Table I, application no. 2, column 8, in the same line as SEQ ID NO. 63167, preferably the coding region thereof, a homolog or a fragment thereof; which are operable linked.

[12395] In an embodiment thereof the expression cassette comprises in addition c) a nucleic acid molecule encoding a transit peptide, especially a plastidal transit petide in case in Table I, application no. 2, in column 6 in the same line as SEQ ID NO. 63167 is depicted, plastidic is mentioned, or a mitochondrial transit petide in case in Table I, application no. 2, in column 6 in the same line as SEQ ID NO. 63167 is depicted, mitochondrial is mentioned; which is operable linke, too.

[12396] In another embodiment thereof the expression cassette does not comprise an additional transit peptide in case in Table I, application no. 2, in column 6 in the same line as SEQ ID NO. 63167 is depicted, non-targeted is mentioned.

[12397] In an embodiment the present invention relates to an expresssion cassette comprising a) a promoter, prefereably a promoter selected from the group consisting of Big35S, PCUbi, Super and USP, in particular Super; and b) the nucleic acid SEQ ID NO. 63264, or a homolog or fragment thereof, or a homolog thereof being depicted in Table I, application no. 2, column 8, in the same line as SEQ ID NO. 63264, preferably the coding region thereof, a homolog or a fragment thereof; which are operable linked.

[12398] In an embodiment thereof the expression cassette comprises in addition c) a nucleic acid molecule encoding a transit peptide, especially a plastidal transit petide in case in Table I, application no. 2, in column 6 in the same line as SEQ ID NO. 63264 is depicted, plastidic is mentioned, or a mitochondrial transit petide in case in Table I, application no. 2, in column 6 in the same line as SEQ ID NO. 63264 is depicted, mitochondrial is mentioned; which is operable linke, too.

[12399] In another embodiment thereof the expression cassette does not comprise an additional transit peptide in case in Table I, application no. 2, in column 6 in the same line as SEQ ID NO. 63264 is depicted, non-targeted is mentioned.

[12400] In an embodiment the present invention relates to an expresssion cassette comprising a) a promoter, prefereably a promoter selected from the group consisting of Big35S, PCUbi, Super and USP, in particular Super; and b) the nucleic acid SEQ ID NO. 14302, or a homolog or fragment thereof, or a homolog thereof being depicted in Table I, application no. 2, column 8, in the same line as SEQ ID NO. 14302, preferably the coding region thereof, a homolog or a fragment thereof; which are operable linked.

[12401] In an embodiment thereof the expression cassette comprises in addition c) a nucleic acid molecule encoding a transit peptide, especially a plastidal transit petide in case in Table I, application no. 2, in column 6 in the same line as SEQ ID NO. 14302 is depicted, plastidic is mentioned, or a mitochondrial transit petide in case in Table I, application no. 2, in column 6 in the same line as SEQ ID NO. 14302 is depicted, mitochondrial is mentioned; which is operable linke, too.

[12402] In another embodiment thereof the expression cassette does not comprise an additional transit peptide in case in Table I, application no. 2, in column 6 in the same line as SEQ ID NO. 14302 is depicted, non-targeted is mentioned.

[12403] In an embodiment the present invention relates to an expresssion cassette comprising a) a promoter, prefereably a promoter selected from the group consisting of Big35S, PCUbi, Super and USP, in particular PCUbi; and b) the nucleic acid SEQ ID NO. 63334, or a homolog or fragment thereof, or a homolog thereof being depicted in Table I, application no. 2, column 8, in the same line as SEQ ID NO. 63334, preferably the coding region thereof, a homolog or a fragment thereof; which are operable linked.

[12404] In an embodiment thereof the expression cassette comprises in addition c) a nucleic acid molecule encoding a transit peptide, especially a plastidal transit petide in case in Table I, application no. 2, in column 6 in the same line as SEQ ID NO. 63334 is depicted, plastidic is mentioned, or a mitochondrial transit petide in case in Table I, application no. 2, in column 6 in the same line as SEQ ID NO. 63334 is depicted, mitochondrial is mentioned; which is operable linke, too.

[12405] In another embodiment thereof the expression cassette does not comprise an additional transit peptide in case in Table I, application no. 2, in column 6 in the same line as SEQ ID NO. 63334 is depicted, non-targeted is mentioned.

[12406] In an embodiment the present invention relates to an expresssion cassette comprising a) a promoter, prefereably a promoter selected from the group consisting of Big35S, PCUbi, Super and USP, in particular Super; and b) the nucleic acid SEQ ID NO. 63544, or a homolog or fragment thereof, or a homolog thereof being depicted in Table I, application no. 2, column 8, in the same line as SEQ ID NO. 63544, preferably the coding region thereof, a homolog or a fragment thereof; which are operable linked.

[12407] In an embodiment thereof the expression cassette comprises in addition c) a nucleic acid molecule encoding a transit peptide, especially a plastidal transit petide in case in Table I, application no. 2, in column 6 in the same line as SEQ ID NO. 63544 is depicted, plastidic is mentioned, or a mitochondrial transit petide in case in Table I, application no. 2, in column 6 in the same line as SEQ ID NO. 63544 is depicted, mitochondrial is mentioned; which is operable linke, too.

[12408] In another embodiment thereof the expression cassette does not comprise an additional transit peptide in case in Table I, application no. 2, in column 6 in the same line as SEQ ID NO. 63544 is depicted, non-targeted is mentioned.

[12409] In an embodiment the present invention relates to an expresssion cassette comprising a) a promoter, prefereably a promoter selected from the group consisting of Big35S, PCUbi, Super and USP, in particular PCUbi; and b) the nucleic acid SEQ ID NO. 12974, or a homolog or fragment thereof, or a homolog thereof being depicted in Table I, application no. 2, column 8, in the same line as SEQ ID NO. 12974, preferably the coding region thereof, a homolog or a fragment thereof; which are operable linked.

[12410] In an embodiment thereof the expression cassette comprises in addition c) a nucleic acid molecule encoding a transit peptide, especially a plastidal transit petide in case in Table I, application no. 2, in column 6 in the same line as SEQ ID NO. 12974 is depicted, plastidic is mentioned, or a mitochondrial transit petide in case in Table I, application no. 2, in column 6 in the same line as SEQ ID NO. 12974 is depicted, mitochondrial is mentioned; which is operable linke, too.

[12411] In another embodiment thereof the expression cassette does not comprise an additional transit peptide in case in Table I, application no. 2, in column 6 in the same line as SEQ ID NO. 12974 is depicted, non-targeted is mentioned.

[12412] In an embodiment the present invention relates to an expresssion cassette comprising a) a promoter, prefereably a promoter selected from the group consisting of Big35S, PCUbi, Super and USP, in particular PCUbi; and b) the nucleic acid SEQ ID NO. 58668, or a homolog or fragment thereof, or a homolog thereof being depicted in Table I, application no. 2, column 8, in the same line as SEQ ID NO. 58668, preferably the coding region thereof, a homolog or a fragment thereof; which are operable linked.

[12413] In an embodiment thereof the expression cassette comprises in addition c) a nucleic acid molecule encoding a transit peptide, especially a plastidal transit petide in case in Table I, application no. 2, in column 6 in the same line as SEQ ID NO. 58668 is depicted, plastidic is mentioned, or a mitochondrial transit petide in case in Table I, application no. 2, in column 6 in the same line as SEQ ID NO. 58668 is depicted, mitochondrial is mentioned; which is operable linke, too.

[12414] In another embodiment thereof the expression cassette does not comprise an additional transit peptide in case in Table I, application no. 2, in column 6 in the same line as SEQ ID NO. 58668 is depicted, non-targeted is mentioned.

[12415] In an embodiment the present invention relates to an expresssion cassette comprising a) a promoter, prefereably a promoter selected from the group consisting of Big35S, PCUbi, Super and USP, in particular PCUbi; and b) the nucleic acid SEQ ID NO. 56894, or a homolog or fragment thereof, or a homolog thereof being depicted in Table I, application no. 2, column 8, in the same line as SEQ ID NO. 56894, preferably the coding region thereof, a homolog or a fragment thereof; which are operable linked.

[12416] In an embodiment thereof the expression cassette comprises in addition c) a nucleic acid molecule encoding a transit peptide, especially a plastidal transit petide in case in Table I, application no. 2, in column 6 in the same line as SEQ ID NO. 56894 is depicted, plastidic is mentioned, or a mitochondrial transit petide in case in Table I, application no. 2, in column 6 in the same line as SEQ ID NO. 56894 is depicted, mitochondrial is mentioned; which is operable linke, too.

[12417] In another embodiment thereof the expression cassette does not comprise an additional transit peptide in case in Table I, application no. 2, in column 6 in the same line as SEQ ID NO. 56894 is depicted, non-targeted is mentioned.

[12418] In an embodiment the present invention relates to an expresssion cassette comprising a) a promoter, prefereably a promoter selected from the group consisting of Big35S, PCUbi, Super and USP, in particular PCUbi; and b) the nucleic acid SEQ ID NO. 57235, or a homolog or fragment thereof, or a homolog thereof being depicted in Table I, application no. 2, column 8, in the same line as SEQ ID NO. 57235, preferably the coding region thereof, a homolog or a fragment thereof; which are operable linked.

[12419] In an embodiment thereof the expression cassette comprises in addition c) a nucleic acid molecule encoding a transit peptide, especially a plastidal transit petide in case in Table I, application no. 2, in column 6 in the same line as SEQ ID NO. 57235 is depicted, plastidic is mentioned, or a mitochondrial transit petide in case in Table I, application no. 2, in column 6 in the same line as SEQ ID NO. 57235 is depicted, mitochondrial is mentioned; which is operable linke, too.

[12420] In another embodiment thereof the expression cassette does not comprise an additional transit peptide in case in Table I, application no. 2, in column 6 in the same line as SEQ ID NO. 57235 is depicted, non-targeted is mentioned.

[12421] In an embodiment the present invention relates to an expresssion cassette comprising a) a promoter, prefereably a promoter selected from the group consisting of Big35S, PCUbi, Super and USP, in particular PCUbi; and b) the nucleic acid SEQ ID NO. 57663, or a homolog or fragment thereof, or a homolog thereof being depicted in Table I, application no. 2, column 8, in the same line as SEQ ID NO. 57663, preferably the coding region thereof, a homolog or a fragment thereof; which are operable linked.

[12422] In an embodiment thereof the expression cassette comprises in addition c) a nucleic acid molecule encoding a transit peptide, especially a plastidal transit petide in case in Table I, application no. 2, in column 6 in the same line as SEQ ID NO. 57663 is depicted, plastidic is mentioned, or a mitochondrial transit petide in case in Table I, application no. 2, in column 6 in the same line as SEQ ID NO. 57663 is depicted, mitochondrial is mentioned; which is operable linke, too.

[12423] In another embodiment thereof the expression cassette does not comprise an additional transit peptide in case in Table I, application no. 2, in column 6 in the same line as SEQ ID NO. 57663 is depicted, non-targeted is mentioned.

[12424] In an embodiment the present invention relates to an expresssion cassette comprising a) a promoter, prefereably a promoter selected from the group consisting of Big35S, PCUbi, Super and USP, in particular PCUbi; and b) the nucleic acid SEQ ID NO. 57679, or a homolog or fragment thereof, or a homolog thereof being depicted in Table I, application no. 2, column 8, in the same line as SEQ ID NO. 57679, preferably the coding region thereof, a homolog or a fragment thereof; which are operable linked.

[12425] In an embodiment thereof the expression cassette comprises in addition c) a nucleic acid molecule encoding a transit peptide, especially a plastidal transit petide in case in Table I, application no. 2, in column 6 in the same line as SEQ ID NO. 57679 is depicted, plastidic is mentioned, or a mitochondrial transit petide in case in Table I, application no. 2, in column 6 in the same line as SEQ ID NO. 57679 is depicted, mitochondrial is mentioned; which is operable linke, too.

[12426] In another embodiment thereof the expression cassette does not comprise an additional transit peptide in case in Table I, application no. 2, in column 6 in the same line as SEQ ID NO. 57679 is depicted, non-targeted is mentioned.

[12427] In an embodiment the present invention relates to an expresssion cassette comprising a) a promoter, prefereably a promoter selected from the group consisting of Big35S, PCUbi, Super and USP, in particular PCUbi; and b) the nucleic acid SEQ ID NO. 57734, or a homolog or fragment thereof, or a homolog thereof being depicted in Table I, application no. 2, column 8, in the same line as SEQ ID NO. 57734, preferably the coding region thereof, a homolog or a fragment thereof; which are operable linked.

[12428] In an embodiment thereof the expression cassette comprises in addition c) a nucleic acid molecule encoding a transit peptide, especially a plastidal transit petide in case in Table I, application no. 2, in column 6 in the same line as SEQ ID NO. 57734 is depicted, plastidic is mentioned, or a mitochondrial transit petide in case in Table I, application no. 2, in column 6 in the same line as SEQ ID NO. 57734 is depicted, mitochondrial is mentioned; which is operable linke, too.

[12429] In another embodiment thereof the expression cassette does not comprise an additional transit peptide in case in Table I, application no. 2, in column 6 in the same line as SEQ ID NO. 57734 is depicted, non-targeted is mentioned.

[12430] In an embodiment the present invention relates to an expresssion cassette comprising a) a promoter, prefereably a promoter selected from the group consisting of Big35S, PCUbi, Super and USP, in particular PCUbi; and b) the nucleic acid SEQ ID NO. 58058, or a homolog or fragment thereof, or a homolog thereof being depicted in Table I, application no. 2, column 8, in the same line as SEQ ID NO. 58058, preferably the coding region thereof, a homolog or a fragment thereof; which are operable linked.

[12431] In an embodiment thereof the expression cassette comprises in addition c) a nucleic acid molecule encoding a transit peptide, especially a plastidal transit petide in case in Table I, application no. 2, in column 6 in the same line as SEQ ID NO. 58058 is depicted, plastidic is mentioned, or a mitochondrial transit petide in case in Table I, application no. 2, in column 6 in the same line as SEQ ID NO. 58058 is depicted, mitochondrial is mentioned; which is operable linke, too.

[12432] In another embodiment thereof the expression cassette does not comprise an additional transit peptide in case in Table I, application no. 2, in column 6 in the same line as SEQ ID NO. 58058 is depicted, non-targeted is mentioned.

[12433] In an embodiment the present invention relates to an expresssion cassette comprising a) a promoter, prefereably a promoter selected from the group consisting of Big35S, PCUbi, Super and USP, in particular PCUbi; and b) the nucleic acid SEQ ID NO. 58324, or a homolog or fragment thereof, or a homolog thereof being depicted in Table I, application no. 2, column 8, in the same line as SEQ ID NO. 58324, preferably the coding region thereof, a homolog or a fragment thereof; which are operable linked.

[12434] In an embodiment thereof the expression cassette comprises in addition c) a nucleic acid molecule encoding a transit peptide, especially a plastidal transit petide in case in Table I, application no. 2, in column 6 in the same line as SEQ ID NO. 58324 is depicted, plastidic is mentioned, or a mitochondrial transit petide in case in Table I, application no. 2, in column 6 in the same line as SEQ ID NO. 58324 is depicted, mitochondrial is mentioned; which is operable linke, too.

[12435] In another embodiment thereof the expression cassette does not comprise an additional transit peptide in case in Table I, application no. 2, in column 6 in the same line as SEQ ID NO. 58324 is depicted, non-targeted is mentioned.

[12436] In an embodiment the present invention relates to an expresssion cassette comprising a) a promoter, prefereably a promoter selected from the group consisting of Big35S, PCUbi, Super and USP, in particular PCUbi; and b) the nucleic acid SEQ ID NO. 12698, or a homolog or fragment thereof, or a homolog thereof being depicted in Table I, application no. 2, column 8, in the same line as SEQ ID NO. 12698, preferably the coding region thereof, a homolog or a fragment thereof; which are operable linked.

[12437] In an embodiment thereof the expression cassette comprises in addition c) a nucleic acid molecule encoding a transit peptide, especially a plastidal transit petide in case in Table I, application no. 2, in column 6 in the same line as SEQ ID NO. 12698 is depicted, plastidic is mentioned, or a mitochondrial transit petide in case in Table I, application no. 2, in column 6 in the same line as SEQ ID NO. 12698 is depicted, mitochondrial is mentioned; which is operable linke, too.

[12438] In another embodiment thereof the expression cassette does not comprise an additional transit peptide in case in Table I, application no. 2, in column 6 in the same line as SEQ ID NO. 12698 is depicted, non-targeted is mentioned.

[12439] In an embodiment the present invention relates to an expresssion cassette comprising a) a promoter, prefereably a promoter selected from the group consisting of Big35S, PCUbi, Super and USP, in particular PCUbi; and b) the nucleic acid SEQ ID NO. 58590, or a homolog or fragment thereof, or a homolog thereof being depicted in Table I, application no. 2, column 8, in the same line as SEQ ID NO. 58590, preferably the coding region thereof, a homolog or a fragment thereof; which are operable linked.

[12440] In an embodiment thereof the expression cassette comprises in addition c) a nucleic acid molecule encoding a transit peptide, especially a plastidal transit petide in case in Table I, application no. 2, in column 6 in the same line as SEQ ID NO. 58590 is depicted, plastidic is mentioned, or a mitochondrial transit petide in case in Table I, application no. 2, in column 6 in the same line as SEQ ID NO. 58590 is depicted, mitochondrial is mentioned; which is operable linke, too.

[12441] In another embodiment thereof the expression cassette does not comprise an additional transit peptide in case in Table I, application no. 2, in column 6 in the same line as SEQ ID NO. 58590 is depicted, non-targeted is mentioned.

[12442] In an embodiment the present invention relates to an expresssion cassette comprising a) a promoter, prefereably a promoter selected from the group consisting of Big35S, PCUbi, Super and USP, in particular Super; and b) the nucleic acid SEQ ID NO. 59851, or a homolog or fragment thereof, or a homolog thereof being depicted in Table I, application no. 2, column 8, in the same line as SEQ ID NO. 59851, preferably the coding region thereof, a homolog or a fragment thereof; which are operable linked.

[12443] In an embodiment thereof the expression cassette comprises in addition c) a nucleic acid molecule encoding a transit peptide, especially a plastidal transit petide in case in Table I, application no. 2, in column 6 in the same line as SEQ ID NO. 59851 is depicted, plastidic is mentioned, or a mitochondrial transit petide in case in Table I, application no. 2, in column 6 in the same line as SEQ ID NO. 59851 is depicted, mitochondrial is mentioned; which is operable linke, too.

[12444] In another embodiment thereof the expression cassette does not comprise an additional transit peptide in case in Table I, application no. 2, in column 6 in the same line as SEQ ID NO. 59851 is depicted, non-targeted is mentioned.

[12445] In an embodiment the present invention relates to an expresssion cassette comprising a) a promoter, prefereably a promoter selected from the group consisting of Big35S, PCUbi, Super and USP, in particular PCUbi; and b) the nucleic acid SEQ ID NO. 12070, or a homolog or fragment thereof, or a homolog thereof being depicted in Table I, application no. 2, column 8, in the same line as SEQ ID NO. 12070, preferably the coding region thereof, a homolog or a fragment thereof; which are operable linked.

[12446] In an embodiment thereof the expression cassette comprises in addition c) a nucleic acid molecule encoding a transit peptide, especially a plastidal transit petide in case in Table I, application no. 2, in column 6 in the same line as SEQ ID NO. 12070 is depicted, plastidic is mentioned, or a mitochondrial transit petide in case in Table I, application no. 2, in column 6 in the same line as SEQ ID NO. 12070 is depicted, mitochondrial is mentioned; which is operable linke, too.

[12447] In another embodiment thereof the expression cassette does not comprise an additional transit peptide in case in Table I, application no. 2, in column 6 in the same line as SEQ ID NO. 12070 is depicted, non-targeted is mentioned.

[12448] In an embodiment the present invention relates to an expresssion cassette comprising a) a promoter, prefereably a promoter selected from the group consisting of Big35S, PCUbi, Super and USP, in particular PCUbi; and b) the nucleic acid SEQ ID NO. 58731, or a homolog or fragment thereof, or a homolog thereof being depicted in Table I, application no. 2, column 8, in the same line as SEQ ID NO. 58731, preferably the coding region thereof, a homolog or a fragment thereof; which are operable linked.

[12449] In an embodiment thereof the expression cassette comprises in addition c) a nucleic acid molecule encoding a transit peptide, especially a plastidal transit petide in case in Table I, application no. 2, in column 6 in the same line as SEQ ID NO. 58731 is depicted, plastidic is mentioned, or a mitochondrial transit petide in case in Table I, application no. 2, in column 6 in the same line as SEQ ID NO. 58731 is depicted, mitochondrial is mentioned; which is operable linke, too.

[12450] In another embodiment thereof the expression cassette does not comprise an additional transit peptide in case in Table I, application no. 2, in column 6 in the same line as SEQ ID NO. 58731 is depicted, non-targeted is mentioned.

[12451] In an embodiment the present invention relates to an expresssion cassette comprising a) a promoter, prefereably a promoter selected from the group consisting of Big35S, PCUbi, Super and USP, in particular PCUbi; and b) the nucleic acid SEQ ID NO. 58751, or a homolog or fragment thereof, or a homolog thereof being depicted in Table I, application no. 2, column 8, in the same line as SEQ ID NO. 58751, preferably the coding region thereof, a homolog or a fragment thereof; which are operable linked.

[12452] In an embodiment thereof the expression cassette comprises in addition c) a nucleic acid molecule encoding a transit peptide, especially a plastidal transit petide in case in Table I, application no. 2, in column 6 in the same line as SEQ ID NO. 58751 is depicted, plastidic is mentioned, or a mitochondrial transit petide in case in Table I, application no. 2, in column 6 in the same line as SEQ ID NO. 58751 is depicted, mitochondrial is mentioned; which is operable linke, too.

[12453] In another embodiment thereof the expression cassette does not comprise an additional transit peptide in case in Table I, application no. 2, in column 6 in the same line as SEQ ID NO. 58751 is depicted, non-targeted is mentioned.

[12454] In an embodiment the present invention relates to an expresssion cassette comprising a) a promoter, prefereably a promoter selected from the group consisting of Big35S, PCUbi, Super and USP, in particular PCUbi; and b) the nucleic acid SEQ ID NO. 58823, or a homolog or fragment thereof, or a homolog thereof being depicted in Table I, application no. 2, column 8, in the same line as SEQ ID NO. 58823, preferably the coding region thereof, a homolog or a fragment thereof; which are operable linked.

[12455] In an embodiment thereof the expression cassette comprises in addition c) a nucleic acid molecule encoding a transit peptide, especially a plastidal transit petide in case in Table I, application no. 2, in column 6 in the same line as SEQ ID NO. 58823 is depicted, plastidic is mentioned, or a mitochondrial transit petide in case in Table I, application no. 2, in column 6 in the same line as SEQ ID NO. 58823 is depicted, mitochondrial is mentioned; which is operable linke, too.

[12456] In another embodiment thereof the expression cassette does not comprise an additional transit peptide in case in Table I, application no. 2, in column 6 in the same line as SEQ ID NO. 58823 is depicted, non-targeted is mentioned.

[12457] In an embodiment the present invention relates to an expresssion cassette comprising a) a promoter, prefereably a promoter selected from the group consisting of Big35S, PCUbi, Super and USP, in particular PCUbi; and b) the nucleic acid SEQ ID NO. 12140, or a homolog or fragment thereof, or a homolog thereof being depicted in Table I, application no. 2, column 8, in the same line as SEQ ID NO. 12140, preferably the coding region thereof, a homolog or a fragment thereof; which are operable linked.

[12458] In an embodiment thereof the expression cassette comprises in addition c) a nucleic acid molecule encoding a transit peptide, especially a plastidal transit petide in case in Table I, application no. 2, in column 6 in the same line as SEQ ID NO. 12140 is depicted, plastidic is mentioned, or a mitochondrial transit petide in case in Table I, application no. 2, in column 6 in the same line as SEQ ID NO. 12140 is depicted, mitochondrial is mentioned; which is operable linke, too.

[12459] In another embodiment thereof the expression cassette does not comprise an additional transit peptide in case in Table I, application no. 2, in column 6 in the same line as SEQ ID NO. 12140 is depicted, non-targeted is mentioned.

[12460] In an embodiment the present invention relates to an expresssion cassette comprising a) a promoter, prefereably a promoter selected from the group consisting of Big35S, PCUbi, Super and USP, in particular PCUbi; and b) the nucleic acid SEQ ID NO. 59041, or a homolog or fragment thereof, or a homolog thereof being depicted in Table I, application no. 2, column 8, in the same line as SEQ ID NO. 59041, preferably the coding region thereof, a homolog or a fragment thereof; which are operable linked.

[12461] In an embodiment thereof the expression cassette comprises in addition c) a nucleic acid molecule encoding a transit peptide, especially a plastidal transit petide in case in Table I, application no. 2, in column 6 in the same line as SEQ ID NO. 59041 is depicted, plastidic is mentioned, or a mitochondrial transit petide in case in Table I, application no. 2, in column 6 in the same line as SEQ ID NO. 59041 is depicted, mitochondrial is mentioned; which is operable linke, too.

[12462] In another embodiment thereof the expression cassette does not comprise an additional transit peptide in case in Table I, application no. 2, in column 6 in the same line as SEQ ID NO. 59041 is depicted, non-targeted is mentioned.

[12463] In an embodiment the present invention relates to an expresssion cassette comprising a) a promoter, prefereably a promoter selected from the group consisting of Big35S, PCUbi, Super and USP, in particular PCUbi; and b) the nucleic acid SEQ ID NO. 59165, or a homolog or fragment thereof, or a homolog thereof being depicted in Table I, application no. 2, column 8, in the same line as SEQ ID NO. 59165, preferably the coding region thereof, a homolog or a fragment thereof; which are operable linked.

[12464] In an embodiment thereof the expression cassette comprises in addition c) a nucleic acid molecule encoding a transit peptide, especially a plastidal transit petide in case in Table I, application no. 2, in column 6 in the same line as SEQ ID NO. 59165 is depicted, plastidic is mentioned, or a mitochondrial transit petide in case in Table I, application no. 2, in column 6 in the same line as SEQ ID NO. 59165 is depicted, mitochondrial is mentioned; which is operable linke, too.

[12465] In another embodiment thereof the expression cassette does not comprise an additional transit peptide in case in Table I, application no. 2, in column 6 in the same line as SEQ ID NO. 59165 is depicted, non-targeted is mentioned.

[12466] In an embodiment the present invention relates to an expresssion cassette comprising a) a promoter, prefereably a promoter selected from the group consisting of Big35S, PCUbi, Super and USP, in particular PCUbi; and b) the nucleic acid SEQ ID NO. 63745, or a homolog or fragment thereof, or a homolog thereof being depicted in Table I, application no. 2, column 8, in the same line as SEQ ID NO. 63745, preferably the coding region thereof, a homolog or a fragment thereof; which are operable linked.

[12467] In an embodiment thereof the expression cassette comprises in addition c) a nucleic acid molecule encoding a transit peptide, especially a plastidal transit petide in case in Table I, application no. 2, in column 6 in the same line as SEQ ID NO. 63745 is depicted, plastidic is mentioned, or a mitochondrial transit petide in case in Table I, application no. 2, in column 6 in the same line as SEQ ID NO. 63745 is depicted, mitochondrial is mentioned; which is operable linke, too.

[12468] In another embodiment thereof the expression cassette does not comprise an additional transit peptide in case in Table I, application no. 2, in column 6 in the same line as SEQ ID NO. 63745 is depicted, non-targeted is mentioned.

[12469] In an embodiment the present invention relates to an expresssion cassette comprising a) a promoter, prefereably a promoter selected from the group consisting of Big35S, PCUbi, Super and USP, in particular PCUbi; and b) the nucleic acid SEQ ID NO. 58472, or a homolog or fragment thereof, or a homolog thereof being depicted in Table I, application no. 2, column 8, in the same line as SEQ ID NO. 58472, preferably the coding region thereof, a homolog or a fragment thereof; which are operable linked.

[12470] In an embodiment thereof the expression cassette comprises in addition c) a nucleic acid molecule encoding a transit peptide, especially a plastidal transit petide in case in Table I, application no. 2, in column 6 in the same line as SEQ ID NO. 58472 is depicted, plastidic is mentioned, or a mitochondrial transit petide in case in Table I, application no. 2, in column 6 in the same line as SEQ ID NO. 58472 is depicted, mitochondrial is mentioned; which is operable linke, too.

[12471] In another embodiment thereof the expression cassette does not comprise an additional transit peptide in case in Table I, application no. 2, in column 6 in the same line as SEQ ID NO. 58472 is depicted, non-targeted is mentioned.

[12472] In an embodiment the present invention relates to an expresssion cassette comprising a) a promoter, prefereably a promoter selected from the group consisting of Big35S, PCUbi, Super and USP, in particular PCUbi; and b) the nucleic acid SEQ ID NO. 67299, or a homolog or fragment thereof, or a homolog thereof being depicted in Table I, application no. 2, column 8, in the same line as SEQ ID NO. 67299, preferably the coding region thereof, a homolog or a fragment thereof; which are operable linked.

[12473] In an embodiment thereof the expression cassette comprises in addition c) a nucleic acid molecule encoding a transit peptide, especially a plastidal transit petide in case in Table I, application no. 2, in column 6 in the same line as SEQ ID NO. 67299 is depicted, plastidic is mentioned, or a mitochondrial transit petide in case in Table I, application no. 2, in column 6 in the same line as SEQ ID NO. 67299 is depicted, mitochondrial is mentioned; which is operable linke, too.

[12474] In another embodiment thereof the expression cassette does not comprise an additional transit peptide in case in Table I, application no. 2, in column 6 in the same line as SEQ ID NO. 67299 is depicted, non-targeted is mentioned.

[12475] In an embodiment the present invention relates to an expresssion cassette comprising a) a promoter, prefereably a promoter selected from the group consisting of Big35S, PCUbi, Super and USP, in particular PCUbi; and b) the nucleic acid SEQ ID NO. 63665, or a homolog or fragment thereof, or a homolog thereof being depicted in Table I, application no. 2, column 8, in the same line as SEQ ID NO. 63665, preferably the coding region thereof, a homolog or a fragment thereof; which are operable linked.

[12476] In an embodiment thereof the expression cassette comprises in addition c) a nucleic acid molecule encoding a transit peptide, especially a plastidal transit petide in case in Table I, application no. 2, in column 6 in the same line as SEQ ID NO. 63665 is depicted, plastidic is mentioned, or a mitochondrial transit petide in case in Table I, application no. 2, in column 6 in the same line as SEQ ID NO. 63665 is depicted, mitochondrial is mentioned; which is operable linke, too.

[12477] In another embodiment thereof the expression cassette does not comprise an additional transit peptide in case in Table I, application no. 2, in column 6 in the same line as SEQ ID NO. 63665 is depicted, non-targeted is mentioned.

[12478] In an embodiment the present invention relates to an expresssion cassette comprising a) a promoter, prefereably a promoter selected from the group consisting of Big35S, PCUbi, Super and USP, in particular PCUbi; and b) the nucleic acid SEQ ID NO. 65224, or a homolog or fragment thereof, or a homolog thereof being depicted in Table I, application no. 2, column 8, in the same line as SEQ ID NO. 65224, preferably the coding region thereof, a homolog or a fragment thereof; which are operable linked.

[12479] In an embodiment thereof the expression cassette comprises in addition c) a nucleic acid molecule encoding a transit peptide, especially a plastidal transit petide in case in Table I, application no. 2, in column 6 in the same line as SEQ ID NO. 65224 is depicted, plastidic is mentioned, or a mitochondrial transit petide in case in Table I, application no. 2, in column 6 in the same line as SEQ ID NO. 65224 is depicted, mitochondrial is mentioned; which is operable linke, too.

[12480] In another embodiment thereof the expression cassette does not comprise an additional transit peptide in case in Table I, application no. 2, in column 6 in the same line as SEQ ID NO. 65224 is depicted, non-targeted is mentioned.

[12481] In an embodiment the present invention relates to an expresssion cassette comprising a) a promoter, prefereably a promoter selected from the group consisting of Big35S, PCUbi, Super and USP, in particular Super; and b) the nucleic acid SEQ ID NO. 66225, or a homolog or fragment thereof, or a homolog thereof being depicted in Table I, application no. 2, column 8, in the same line as SEQ ID NO. 66225, preferably the coding region thereof, a homolog or a fragment thereof; which are operable linked.

[12482] In an embodiment thereof the expression cassette comprises in addition c) a nucleic acid molecule encoding a transit peptide, especially a plastidal transit petide in case in Table I, application no. 2, in column 6 in the same line as SEQ ID NO. 66225 is depicted, plastidic is mentioned, or a mitochondrial transit petide in case in Table I, application no. 2, in column 6 in the same line as SEQ ID NO. 66225 is depicted, mitochondrial is mentioned; which is operable linke, too.

[12483] In another embodiment thereof the expression cassette does not comprise an additional transit peptide in case in Table I, application no. 2, in column 6 in the same line as SEQ ID NO. 66225 is depicted, non-targeted is mentioned.

[12484] In an embodiment the present invention relates to an expresssion cassette comprising a) a promoter, prefereably a promoter selected from the group consisting of Big35S, PCUbi, Super and USP, in particular PCUbi; and b) the nucleic acid SEQ ID NO. 66274, or a homolog or fragment thereof, or a homolog thereof being depicted in Table I, application no. 2, column 8, in the same line as SEQ ID NO. 66274, preferably the coding region thereof, a homolog or a fragment thereof; which are operable linked.

[12485] In an embodiment thereof the expression cassette comprises in addition c) a nucleic acid molecule encoding a transit peptide, especially a plastidal transit petide in case in Table I, application no. 2, in column 6 in the same line as SEQ ID NO. 66274 is depicted, plastidic is mentioned, or a mitochondrial transit petide in case in Table I, application no. 2, in column 6 in the same line as SEQ ID NO. 66274 is depicted, mitochondrial is mentioned; which is operable linke, too.

[12486] In another embodiment thereof the expression cassette does not comprise an additional transit peptide in case in Table I, application no. 2, in column 6 in the same line as SEQ ID NO. 66274 is depicted, non-targeted is mentioned.

[12487] In an embodiment the present invention relates to an expresssion cassette comprising a) a promoter, prefereably a promoter selected from the group consisting of Big35S, PCUbi, Super and USP, in particular PCUbi; and b) the nucleic acid SEQ ID NO. 66419, or a homolog or fragment thereof, or a homolog thereof being depicted in Table I, application no. 2, column 8, in the same line as SEQ ID NO. 66419, preferably the coding region thereof, a homolog or a fragment thereof; which are operable linked.

[12488] In an embodiment thereof the expression cassette comprises in addition c) a nucleic acid molecule encoding a transit peptide, especially a plastidal transit petide in case in Table I, application no. 2, in column 6 in the same line as SEQ ID NO. 66419 is depicted, plastidic is mentioned, or a mitochondrial transit petide in case in Table I, application no. 2, in column 6 in the same line as SEQ ID NO. 66419 is depicted, mitochondrial is mentioned; which is operable linke, too.

[12489] In another embodiment thereof the expression cassette does not comprise an additional transit peptide in case in Table I, application no. 2, in column 6 in the same line as SEQ ID NO. 66419 is depicted, non-targeted is mentioned.

[12490] In an embodiment the present invention relates to an expresssion cassette comprising a) a promoter, prefereably a promoter selected from the group consisting of Big35S, PCUbi, Super and USP, in particular Super; and b) the nucleic acid SEQ ID NO. 66695, or a homolog or fragment thereof, or a homolog thereof being depicted in Table I, application no. 2, column 8, in the same line as SEQ ID NO. 66695, preferably the coding region thereof, a homolog or a fragment thereof; which are operable linked.

[12491] In an embodiment thereof the expression cassette comprises in addition c) a nucleic acid molecule encoding a transit peptide, especially a plastidal transit petide in case in Table I, application no. 2, in column 6 in the same line as SEQ ID NO. 66695 is depicted, plastidic is mentioned, or a mitochondrial transit petide in case in Table I, application no. 2, in column 6 in the same line as SEQ ID NO. 66695 is depicted, mitochondrial is mentioned; which is operable linke, too.

[12492] In another embodiment thereof the expression cassette does not comprise an additional transit peptide in case in Table I, application no. 2, in column 6 in the same line as SEQ ID NO. 66695 is depicted, non-targeted is mentioned.

[12493] In an embodiment the present invention relates to an expresssion cassette comprising a) a promoter, prefereably a promoter selected from the group consisting of Big35S, PCUbi, Super and USP, in particular Super; and b) the nucleic acid SEQ ID NO. 66715, or a homolog or fragment thereof, or a homolog thereof being depicted in Table I, application no. 2, column 8, in the same line as SEQ ID NO. 66715, preferably the coding region thereof, a homolog or a fragment thereof; which are operable linked.

[12494] In an embodiment thereof the expression cassette comprises in addition c) a nucleic acid molecule encoding a transit peptide, especially a plastidal transit petide in case in Table I, application no. 2, in column 6 in the same line as SEQ ID NO. 66715 is depicted, plastidic is mentioned, or a mitochondrial transit petide in case in Table I, application no. 2, in column 6 in the same line as SEQ ID NO. 66715 is depicted, mitochondrial is mentioned; which is operable linke, too.

[12495] In another embodiment thereof the expression cassette does not comprise an additional transit peptide in case in Table I, application no. 2, in column 6 in the same line as SEQ ID NO. 66715 is depicted, non-targeted is mentioned.

[12496] In an embodiment the present invention relates to an expresssion cassette comprising a) a promoter, prefereably a promoter selected from the group consisting of Big35S, PCUbi, Super and USP, in particular Super; and b) the nucleic acid SEQ ID NO. 65181, or a homolog or fragment thereof, or a homolog thereof being depicted in Table I, application no. 2, column 8, in the same line as SEQ ID NO. 65181, preferably the coding region thereof, a homolog or a fragment thereof; which are operable linked.

[12497] In an embodiment thereof the expression cassette comprises in addition c) a nucleic acid molecule encoding a transit peptide, especially a plastidal transit petide in case in Table I, application no. 2, in column 6 in the same line as SEQ ID NO. 65181 is depicted, plastidic is mentioned, or a mitochondrial transit petide in case in Table I, application no. 2, in column 6 in the same line as SEQ ID NO. 65181 is depicted, mitochondrial is mentioned; which is operable linke, too.

[12498] In another embodiment thereof the expression cassette does not comprise an additional transit peptide in case in Table I, application no. 2, in column 6 in the same line as SEQ ID NO. 65181 is depicted, non-targeted is mentioned.

[12499] In an embodiment the present invention relates to an expresssion cassette comprising a) a promoter, prefereably a promoter selected from the group consisting of Big35S, PCUbi, Super and USP, in particular Super; and b) the nucleic acid SEQ ID NO. 67190, or a homolog or fragment thereof, or a homolog thereof being depicted in Table I, application no. 2, column 8, in the same line as SEQ ID NO. 67190, preferably the coding region thereof, a homolog or a fragment thereof; which are operable linked.

[12500] In an embodiment thereof the expression cassette comprises in addition c) a nucleic acid molecule encoding a transit peptide, especially a plastidal transit petide in case in Table I, application no. 2, in column 6 in the same line as SEQ ID NO. 67190 is depicted, plastidic is mentioned, or a mitochondrial transit petide in case in Table I, application no. 2, in column 6 in the same line as SEQ ID NO. 67190 is depicted, mitochondrial is mentioned; which is operable linke, too.

[12501] In another embodiment thereof the expression cassette does not comprise an additional transit peptide in case in Table I, application no. 2, in column 6 in the same line as SEQ ID NO. 67190 is depicted, non-targeted is mentioned.

[12502] In an embodiment the present invention relates to an expresssion cassette comprising a) a promoter, prefereably a promoter selected from the group consisting of Big35S, PCUbi, Super and USP, in particular Big35S; and b) the nucleic acid SEQ ID NO. 64975, or a homolog or fragment thereof, or a homolog thereof being depicted in Table I, application no. 2, column 8, in the same line as SEQ ID NO. 64975, preferably the coding region thereof, a homolog or a fragment thereof; which are operable linked.

[12503] In an embodiment thereof the expression cassette comprises in addition c) a nucleic acid molecule encoding a transit peptide, especially a plastidal transit petide in case in Table I, application no. 2, in column 6 in the same line as SEQ ID NO. 64975 is depicted, plastidic is mentioned, or a mitochondrial transit petide in case in Table I, application no. 2, in column 6 in the same line as SEQ ID NO. 64975 is depicted, mitochondrial is mentioned; which is operable linke, too.

[12504] In another embodiment thereof the expression cassette does not comprise an additional transit peptide in case in Table I, application no. 2, in column 6 in the same line as SEQ ID NO. 64975 is depicted, non-targeted is mentioned.

[12505] In an embodiment the present invention relates to an expresssion cassette comprising a) a promoter, prefereably a promoter selected from the group consisting of Big35S, PCUbi, Super and USP, in particular PCUbi; and b) the nucleic acid SEQ ID NO. 67646, or a homolog or fragment thereof, or a homolog thereof being depicted in Table I, application no. 2, column 8, in the same line as SEQ ID NO. 67646, preferably the coding region thereof, a homolog or a fragment thereof; which are operable linked.

[12506] In an embodiment thereof the expression cassette comprises in addition c) a nucleic acid molecule encoding a transit peptide, especially a plastidal transit petide in case in Table I, application no. 2, in column 6 in the same line as SEQ ID NO. 67646 is depicted, plastidic is mentioned, or a mitochondrial transit petide in case in Table I, application no. 2, in column 6 in the same line as SEQ ID NO. 67646 is depicted, mitochondrial is mentioned; which is operable linke, too.

[12507] In another embodiment thereof the expression cassette does not comprise an additional transit peptide in case in Table I, application no. 2, in column 6 in the same line as SEQ ID NO. 67646 is depicted, non-targeted is mentioned.

[12508] In an embodiment the present invention relates to an expresssion cassette comprising a) a promoter, prefereably a promoter selected from the group consisting of Big35S, PCUbi, Super and USP, in particular Super; and b) the nucleic acid SEQ ID NO. 67684, or a homolog or fragment thereof, or a homolog thereof being depicted in Table I, application no. 2, column 8, in the same line as SEQ ID NO. 67684, preferably the coding region thereof, a homolog or a fragment thereof; which are operable linked.

[12509] In an embodiment thereof the expression cassette comprises in addition c) a nucleic acid molecule encoding a transit peptide, especially a plastidal transit petide in case in Table I, application no. 2, in column 6 in the same line as SEQ ID NO. 67684 is depicted, plastidic is mentioned, or a mitochondrial transit petide in case in Table I, application no. 2, in column 6 in the same line as SEQ ID NO. 67684 is depicted, mitochondrial is mentioned; which is operable linke, too.

[12510] In another embodiment thereof the expression cassette does not comprise an additional transit peptide in case in Table I, application no. 2, in column 6 in the same line as SEQ ID NO. 67684 is depicted, non-targeted is mentioned.

[12511] In an embodiment the present invention relates to an expresssion cassette comprising a) a promoter, prefereably a promoter selected from the group consisting of Big35S, PCUbi, Super and USP, in particular Big35S; and b) the nucleic acid SEQ ID NO. 67710, or a homolog or fragment thereof, or a homolog thereof being depicted in Table I, application no. 2, column 8, in the same line as SEQ ID NO. 67710, preferably the coding region thereof, a homolog or a fragment thereof; which are operable linked.

[12512] In an embodiment thereof the expression cassette comprises in addition c) a nucleic acid molecule encoding a transit peptide, especially a plastidal transit petide in case in Table I, application no. 2, in column 6 in the same line as SEQ ID NO. 67710 is depicted, plastidic is mentioned, or a mitochondrial transit petide in case in Table I, application no. 2, in column 6 in the same line as SEQ ID NO. 67710 is depicted, mitochondrial is mentioned; which is operable linke, too.

[12513] In another embodiment thereof the expression cassette does not comprise an additional transit peptide in case in Table I, application no. 2, in column 6 in the same line as SEQ ID NO. 67710 is depicted, non-targeted is mentioned.

[12514] In an embodiment the present invention relates to an expresssion cassette comprising a) a promoter, prefereably a promoter selected from the group consisting of Big35S, PCUbi, Super and USP, in particular PCUbi; and b) the nucleic acid SEQ ID NO. 67951, or a homolog or fragment thereof, or a homolog thereof being depicted in Table I, application no. 2, column 8, in the same line as SEQ ID NO. 67951, preferably the coding region thereof, a homolog or a fragment thereof; which are operable linked.

[12515] In an embodiment thereof the expression cassette comprises in addition c) a nucleic acid molecule encoding a transit peptide, especially a plastidal transit petide in case in Table I, application no. 2, in column 6 in the same line as SEQ ID NO. 67951 is depicted, plastidic is mentioned, or a mitochondrial transit petide in case in Table I, application no. 2, in column 6 in the same line as SEQ ID NO. 67951 is depicted, mitochondrial is mentioned; which is operable linke, too.

[12516] In another embodiment thereof the expression cassette does not comprise an additional transit peptide in case in Table I, application no. 2, in column 6 in the same line as SEQ ID NO. 67951 is depicted, non-targeted is mentioned.

[12517] In an embodiment the present invention relates to an expresssion cassette comprising a) a promoter, prefereably a promoter selected from the group consisting of Big35S, PCUbi, Super and USP, in particular Big35S; and b) the nucleic acid SEQ ID NO. 67968, or a homolog or fragment thereof, or a homolog thereof being depicted in Table I, application no. 2, column 8, in the same line as SEQ ID NO. 67968, preferably the coding region thereof, a homolog or a fragment thereof; which are operable linked.

[12518] In an embodiment thereof the expression cassette comprises in addition c) a nucleic acid molecule encoding a transit peptide, especially a plastidal transit petide in case in Table I, application no. 2, in column 6 in the same line as SEQ ID NO. 67968 is depicted, plastidic is mentioned, or a mitochondrial transit petide in case in Table I, application no. 2, in column 6 in the same line as SEQ ID NO. 67968 is depicted, mitochondrial is mentioned; which is operable linke, too.

[12519] In another embodiment thereof the expression cassette does not comprise an additional transit peptide in case in Table I, application no. 2, in column 6 in the same line as SEQ ID NO. 67968 is depicted, non-targeted is mentioned.

[12520] In an embodiment the present invention relates to an expresssion cassette comprising a) a promoter, prefereably a promoter selected from the group consisting of Big35S, PCUbi, Super and USP, in particular PCUbi; and b) the nucleic acid SEQ ID NO. 67998, or a homolog or fragment thereof, or a homolog thereof being depicted in Table I, application no. 2, column 8, in the same line as SEQ ID NO. 67998, preferably the coding region thereof, a homolog or a fragment thereof; which are operable linked.

[12521] In an embodiment thereof the expression cassette comprises in addition c) a nucleic acid molecule encoding a transit peptide, especially a plastidal transit petide in case in Table I, application no. 2, in column 6 in the same line as SEQ ID NO. 67998 is depicted, plastidic is mentioned, or a mitochondrial transit petide in case in Table I, application no. 2, in column 6 in the same line as SEQ ID NO. 67998 is depicted, mitochondrial is mentioned; which is operable linke, too.

[12522] In another embodiment thereof the expression cassette does not comprise an additional transit peptide in case in Table I, application no. 2, in column 6 in the same line as SEQ ID NO. 67998 is depicted, non-targeted is mentioned.

[12523] In an embodiment the present invention relates to an expresssion cassette comprising a) a promoter, prefereably a promoter selected from the group consisting of Big35S, PCUbi, Super and USP, in particular PCUbi; and b) the nucleic acid SEQ ID NO. 68132, or a homolog or fragment thereof, or a homolog thereof being depicted in Table I, application no. 2, column 8, in the same line as SEQ ID NO. 68132, preferably the coding region thereof, a homolog or a fragment thereof; which are operable linked.

[12524] In an embodiment thereof the expression cassette comprises in addition c) a nucleic acid molecule encoding a transit peptide, especially a plastidal transit petide in case in Table I, application no. 2, in column 6 in the same line as SEQ ID NO. 68132 is depicted, plastidic is mentioned, or a mitochondrial transit petide in case in Table I, application no. 2, in column 6 in the same line as SEQ ID NO. 68132 is depicted, mitochondrial is mentioned; which is operable linke, too.

[12525] In another embodiment thereof the expression cassette does not comprise an additional transit peptide in case in Table I, application no. 2, in column 6 in the same line as SEQ ID NO. 68132 is depicted, non-targeted is mentioned.

[12526] In an embodiment the present invention relates to an expresssion cassette comprising a) a promoter, prefereably a promoter selected from the group consisting of Big35S, PCUbi, Super and USP, in particular PCUbi; and b) the nucleic acid SEQ ID NO. 68363, or a homolog or fragment thereof, or a homolog thereof being depicted in Table I, application no. 2, column 8, in the same line as SEQ ID NO. 68363, preferably the coding region thereof, a homolog or a fragment thereof; which are operable linked.

[12527] In an embodiment thereof the expression cassette comprises in addition c) a nucleic acid molecule encoding a transit peptide, especially a plastidal transit petide in case in Table I, application no. 2, in column 6 in the same line as SEQ ID NO. 68363 is depicted, plastidic is mentioned, or a mitochondrial transit petide in case in Table I, application no. 2, in column 6 in the same line as SEQ ID NO. 68363 is depicted, mitochondrial is mentioned; which is operable linke, too.

[12528] In another embodiment thereof the expression cassette does not comprise an additional transit peptide in case in Table I, application no. 2, in column 6 in the same line as SEQ ID NO. 68363 is depicted, non-targeted is mentioned.

[12529] In an embodiment the present invention relates to an expresssion cassette comprising a) a promoter, prefereably a promoter selected from the group consisting of Big35S, PCUbi, Super and USP, in particular Big35S; and b) the nucleic acid SEQ ID NO. 66772, or a homolog or fragment thereof, or a homolog thereof being depicted in Table I, application no. 2, column 8, in the same line as SEQ ID NO. 66772, preferably the coding region thereof, a homolog or a fragment thereof; which are operable linked.

[12530] In an embodiment thereof the expression cassette comprises in addition c) a nucleic acid molecule encoding a transit peptide, especially a plastidal transit petide in case in Table I, application no. 2, in column 6 in the same line as SEQ ID NO. 66772 is depicted, plastidic is mentioned, or a mitochondrial transit petide in case in Table I, application no. 2, in column 6 in the same line as SEQ ID NO. 66772 is depicted, mitochondrial is mentioned; which is operable linke, too.

[12531] In another embodiment thereof the expression cassette does not comprise an additional transit peptide in case in Table I, application no. 2, in column 6 in the same line as SEQ ID NO. 66772 is depicted, non-targeted is mentioned.

[12532] In an embodiment the present invention relates to an expresssion cassette comprising a) a promoter, prefereably a promoter selected from the group consisting of Big35S, PCUbi, Super and USP, in particular Super; and b) the nucleic acid SEQ ID NO. 64315, or a homolog or fragment thereof, or a homolog thereof being depicted in Table I, application no. 2, column 8, in the same line as SEQ ID NO. 64315, preferably the coding region thereof, a homolog or a fragment thereof; which are operable linked.

[12533] In an embodiment thereof the expression cassette comprises in addition c) a nucleic acid molecule encoding a transit peptide, especially a plastidal transit petide in case in Table I, application no. 2, in column 6 in the same line as SEQ ID NO. 64315 is depicted, plastidic is mentioned, or a mitochondrial transit petide in case in Table I, application no. 2, in column 6 in the same line as SEQ ID NO. 64315 is depicted, mitochondrial is mentioned; which is operable linke, too.

[12534] In another embodiment thereof the expression cassette does not comprise an additional transit peptide in case in Table I, application no. 2, in column 6 in the same line as SEQ ID NO. 64315 is depicted, non-targeted is mentioned.

[12535] In an embodiment the present invention relates to an expresssion cassette comprising a) a promoter, prefereably a promoter selected from the group consisting of Big35S, PCUbi, Super and USP, in particular PCUbi; and b) the nucleic acid SEQ ID NO. 56153, or a homolog or fragment thereof, or a homolog thereof being depicted in Table I, application no. 2, column 8, in the same line as SEQ ID NO. 56153, preferably the coding region thereof, a homolog or a fragment thereof; which are operable linked.

[12536] In an embodiment thereof the expression cassette comprises in addition c) a nucleic acid molecule encoding a transit peptide, especially a plastidal transit petide in case in Table I, application no. 2, in column 6 in the same line as SEQ ID NO. 56153 is depicted, plastidic is mentioned, or a mitochondrial transit petide in case in Table I, application no. 2, in column 6 in the same line as SEQ ID NO. 56153 is depicted, mitochondrial is mentioned; which is operable linke, too.

[12537] In another embodiment thereof the expression cassette does not comprise an additional transit peptide in case in Table I, application no. 2, in column 6 in the same line as SEQ ID NO. 56153 is depicted, non-targeted is mentioned.

[12538] In an embodiment the present invention relates to an expresssion cassette comprising a) a promoter, prefereably a promoter selected from the group consisting of Big35S, PCUbi, Super and USP, in particular Super; and b) the nucleic acid SEQ ID NO. 63803, or a homolog or fragment thereof, or a homolog thereof being depicted in Table I, application no. 2, column 8, in the same line as SEQ ID NO. 63803, preferably the coding region thereof, a homolog or a fragment thereof; which are operable linked.

[12539] In an embodiment thereof the expression cassette comprises in addition c) a nucleic acid molecule encoding a transit peptide, especially a plastidal transit petide in case in Table I, application no. 2, in column 6 in the same line as SEQ ID NO. 63803 is depicted, plastidic is mentioned, or a mitochondrial transit petide in case in Table I, application no. 2, in column 6 in the same line as SEQ ID NO. 63803 is depicted, mitochondrial is mentioned; which is operable linke, too.

[12540] In another embodiment thereof the expression cassette does not comprise an additional transit peptide in case in Table I, application no. 2, in column 6 in the same line as SEQ ID NO. 63803 is depicted, non-targeted is mentioned.

[12541] In an embodiment the present invention relates to an expresssion cassette comprising a) a promoter, prefereably a promoter selected from the group consisting of Big35S, PCUbi, Super and USP, in particular Big35S; and b) the nucleic acid SEQ ID NO. 63807, or a homolog or fragment thereof, or a homolog thereof being depicted in Table I, application no. 2, column 8, in the same line as SEQ ID NO. 63807, preferably the coding region thereof, a homolog or a fragment thereof; which are operable linked.

[12542] In an embodiment thereof the expression cassette comprises in addition c) a nucleic acid molecule encoding a transit peptide, especially a plastidal transit petide in case in Table I, application no. 2, in column 6 in the same line as SEQ ID NO. 63807 is depicted, plastidic is mentioned, or a mitochondrial transit petide in case in Table I, application no. 2, in column 6 in the same line as SEQ ID NO. 63807 is depicted, mitochondrial is mentioned; which is operable linke, too.

[12543] In another embodiment thereof the expression cassette does not comprise an additional transit peptide in case in Table I, application no. 2, in column 6 in the same line as SEQ ID NO. 63807 is depicted, non-targeted is mentioned.

[12544] In an embodiment the present invention relates to an expresssion cassette comprising a) a promoter, prefereably a promoter selected from the group consisting of Big35S, PCUbi, Super and USP, in particular Big35S; and b) the nucleic acid SEQ ID NO. 64144, or a homolog or fragment thereof, or a homolog thereof being depicted in Table I, application no. 2, column 8, in the same line as SEQ ID NO. 64144, preferably the coding region thereof, a homolog or a fragment thereof; which are operable linked.

[12545] In an embodiment thereof the expression cassette comprises in addition c) a nucleic acid molecule encoding a transit peptide, especially a plastidal transit petide in case in Table I, application no. 2, in column 6 in the same line as SEQ ID NO. 64144 is depicted, plastidic is mentioned, or a mitochondrial transit petide in case in Table I, application no. 2, in column 6 in the same line as SEQ ID NO. 64144 is depicted, mitochondrial is mentioned; which is operable linke, too.

[12546] In another embodiment thereof the expression cassette does not comprise an additional transit peptide in case in Table I, application no. 2, in column 6 in the same line as SEQ ID NO. 64144 is depicted, non-targeted is mentioned.

[12547] In an embodiment the present invention relates to an expresssion cassette comprising a) a promoter, prefereably a promoter selected from the group consisting of Big35S, PCUbi, Super and USP, in particular Super; and b) the nucleic acid SEQ ID NO. 64148, or a homolog or fragment thereof, or a homolog thereof being depicted in Table I, application no. 2, column 8, in the same line as SEQ ID NO. 64148, preferably the coding region thereof, a homolog or a fragment thereof; which are operable linked.

[12548] In an embodiment thereof the expression cassette comprises in addition c) a nucleic acid molecule encoding a transit peptide, especially a plastidal transit petide in case in Table I, application no. 2, in column 6 in the same line as SEQ ID NO. 64148 is depicted, plastidic is mentioned, or a mitochondrial transit petide in case in Table I, application no. 2, in column 6 in the same line as SEQ ID NO. 64148 is depicted, mitochondrial is mentioned; which is operable linke, too.

[12549] In another embodiment thereof the expression cassette does not comprise an additional transit peptide in case in Table I, application no. 2, in column 6 in the same line as SEQ ID NO. 64148 is depicted, non-targeted is mentioned.

[12550] In an embodiment the present invention relates to an expresssion cassette comprising a) a promoter, prefereably a promoter selected from the group consisting of Big35S, PCUbi, Super and USP, in particular Super; and b) the nucleic acid SEQ ID NO. 64157, or a homolog or fragment thereof, or a homolog thereof being depicted in Table I, application no. 2, column 8, in the same line as SEQ ID NO. 64157, preferably the coding region thereof, a homolog or a fragment thereof; which are operable linked.

[12551] In an embodiment thereof the expression cassette comprises in addition c) a nucleic acid molecule encoding a transit peptide, especially a plastidal transit petide in case in Table I, application no. 2, in column 6 in the same line as SEQ ID NO. 64157 is depicted, plastidic is mentioned, or a mitochondrial transit petide in case in Table I, application no. 2, in column 6 in the same line as SEQ ID NO. 64157 is depicted, mitochondrial is mentioned; which is operable linke, too.

[12552] In another embodiment thereof the expression cassette does not comprise an additional transit peptide in case in Table I, application no. 2, in column 6 in the same line as SEQ ID NO. 64157 is depicted, non-targeted is mentioned.

[12553] In an embodiment the present invention relates to an expresssion cassette comprising a) a promoter, prefereably a promoter selected from the group consisting of Big35S, PCUbi, Super and USP, in particular Big35S; and b) the nucleic acid SEQ ID NO. 64177, or a homolog or fragment thereof, or a homolog thereof being depicted in Table I, application no. 2, column 8, in the same line as SEQ ID NO. 64177, preferably the coding region thereof, a homolog or a fragment thereof; which are operable linked.

[12554] In an embodiment thereof the expression cassette comprises in addition c) a nucleic acid molecule encoding a transit peptide, especially a plastidal transit petide in case in Table I, application no. 2, in column 6 in the same line as SEQ ID NO. 64177 is depicted, plastidic is mentioned, or a mitochondrial transit petide in case in Table I, application no. 2, in column 6 in the same line as SEQ ID NO. 64177 is depicted, mitochondrial is mentioned; which is operable linke, too.

[12555] In another embodiment thereof the expression cassette does not comprise an additional transit peptide in case in Table I, application no. 2, in column 6 in the same line as SEQ ID NO. 64177 is depicted, non-targeted is mentioned.

[12556] In an embodiment the present invention relates to an expresssion cassette comprising a) a promoter, prefereably a promoter selected from the group consisting of Big35S, PCUbi, Super and USP, in particular Super; and b) the nucleic acid SEQ ID NO. 14821, or a homolog or fragment thereof, or a homolog thereof being depicted in Table I, application no. 2, column 8, in the same line as SEQ ID NO. 14821, preferably the coding region thereof, a homolog or a fragment thereof; which are operable linked.

[12557] In an embodiment thereof the expression cassette comprises in addition c) a nucleic acid molecule encoding a transit peptide, especially a plastidal transit petide in case in Table I, application no. 2, in column 6 in the same line as SEQ ID NO. 14821 is depicted, plastidic is mentioned, or a mitochondrial transit petide in case in Table I, application no. 2, in column 6 in the same line as SEQ ID NO. 14821 is depicted, mitochondrial is mentioned; which is operable linke, too.

[12558] In another embodiment thereof the expression cassette does not comprise an additional transit peptide in case in Table I, application no. 2, in column 6 in the same line as SEQ ID NO. 14821 is depicted, non-targeted is mentioned.

[12559] In an embodiment the present invention relates to an expresssion cassette comprising a) a promoter, prefereably a promoter selected from the group consisting of Big35S, PCUbi, Super and USP, in particular PCUbi; and b) the nucleic acid SEQ ID NO. 64218, or a homolog or fragment thereof, or a homolog thereof being depicted in Table I, application no. 2, column 8, in the same line as SEQ ID NO. 64218, preferably the coding region thereof, a homolog or a fragment thereof; which are operable linked.

[12560] In an embodiment thereof the expression cassette comprises in addition c) a nucleic acid molecule encoding a transit peptide, especially a plastidal transit petide in case in Table I, application no. 2, in column 6 in the same line as SEQ ID NO. 64218 is depicted, plastidic is mentioned, or a mitochondrial transit petide in case in Table I, application no. 2, in column 6 in the same line as SEQ ID NO. 64218 is depicted, mitochondrial is mentioned; which is operable linke, too.

[12561] In another embodiment thereof the expression cassette does not comprise an additional transit peptide in case in Table I, application no. 2, in column 6 in the same line as SEQ ID NO. 64218 is depicted, non-targeted is mentioned.

[12562] In an embodiment the present invention relates to an expresssion cassette comprising a) a promoter, prefereably a promoter selected from the group consisting of Big35S, PCUbi, Super and USP, in particular Super; and b) the nucleic acid SEQ ID NO. 63713, or a homolog or fragment thereof, or a homolog thereof being depicted in Table I, application no. 2, column 8, in the same line as SEQ ID NO. 63713, preferably the coding region thereof, a homolog or a fragment thereof; which are operable linked.

[12563] In an embodiment thereof the expression cassette comprises in addition c) a nucleic acid molecule encoding a transit peptide, especially a plastidal transit petide in case in Table I, application no. 2, in column 6 in the same line as SEQ ID NO. 63713 is depicted, plastidic is mentioned, or a mitochondrial transit petide in case in Table I, application no. 2, in column 6 in the same line as SEQ ID NO. 63713 is depicted, mitochondrial is mentioned; which is operable linke, too.

[12564] In another embodiment thereof the expression cassette does not comprise an additional transit peptide in case in Table I, application no. 2, in column 6 in the same line as SEQ ID NO. 63713 is depicted, non-targeted is mentioned.

[12565] In an embodiment the present invention relates to an expresssion cassette comprising a) a promoter, prefereably a promoter selected from the group consisting of Big35S, PCUbi, Super and USP, in particular Super; and b) the nucleic acid SEQ ID NO. 14715, or a homolog or fragment thereof, or a homolog thereof being depicted in Table I, application no. 2, column 8, in the same line as SEQ ID NO. 14715, preferably the coding region thereof, a homolog or a fragment thereof; which are operable linked.

[12566] In an embodiment thereof the expression cassette comprises in addition c) a nucleic acid molecule encoding a transit peptide, especially a plastidal transit petide in case in Table I, application no. 2, in column 6 in the same line as SEQ ID NO. 14715 is depicted, plastidic is mentioned, or a mitochondrial transit petide in case in Table I, application no. 2, in column 6 in the same line as SEQ ID NO. 14715 is depicted, mitochondrial is mentioned; which is operable linke, too.

[12567] In another embodiment thereof the expression cassette does not comprise an additional transit peptide in case in Table I, application no. 2, in column 6 in the same line as SEQ ID NO. 14715 is depicted, non-targeted is mentioned.

[12568] In an embodiment the present invention relates to an expresssion cassette comprising a) a promoter, prefereably a promoter selected from the group consisting of Big35S, PCUbi, Super and USP, in particular Super; and b) the nucleic acid SEQ ID NO. 64336, or a homolog or fragment thereof, or a homolog thereof being depicted in Table I, application no. 2, column 8, in the same line as SEQ ID NO. 64336, preferably the coding region thereof, a homolog or a fragment thereof; which are operable linked.

[12569] In an embodiment thereof the expression cassette comprises in addition c) a nucleic acid molecule encoding a transit peptide, especially a plastidal transit petide in case in Table I, application no. 2, in column 6 in the same line as SEQ ID NO. 64336 is depicted, plastidic is mentioned, or a mitochondrial transit petide in case in Table I, application no. 2, in column 6 in the same line as SEQ ID NO. 64336 is depicted, mitochondrial is mentioned; which is operable linke, too.

[12570] In another embodiment thereof the expression cassette does not comprise an additional transit peptide in case in Table I, application no. 2, in column 6 in the same line as SEQ ID NO. 64336 is depicted, non-targeted is mentioned.

[12571] In an embodiment the present invention relates to an expresssion cassette comprising a) a promoter, prefereably a promoter selected from the group consisting of Big35S, PCUbi, Super and USP, in particular USP; and b) the nucleic acid SEQ ID NO. 64470, or a homolog or fragment thereof, or a homolog thereof being depicted in Table I, application no. 2, column 8, in the same line as SEQ ID NO. 64470, preferably the coding region thereof, a homolog or a fragment thereof; which are operable linked.

[12572] In an embodiment thereof the expression cassette comprises in addition c) a nucleic acid molecule encoding a transit peptide, especially a plastidal transit petide in case in Table I, application no. 2, in column 6 in the same line as SEQ ID NO. 64470 is depicted, plastidic is mentioned, or a mitochondrial transit petide in case in Table I, application no. 2, in column 6 in the same line as SEQ ID NO. 64470 is depicted, mitochondrial is mentioned; which is operable linke, too.

[12573] In another embodiment thereof the expression cassette does not comprise an additional transit peptide in case in Table I, application no. 2, in column 6 in the same line as SEQ ID NO. 64470 is depicted, non-targeted is mentioned.

[12574] In an embodiment the present invention relates to an expresssion cassette comprising a) a promoter, prefereably a promoter selected from the group consisting of Big35S, PCUbi, Super and USP, in particular Super; and b) the nucleic acid SEQ ID NO. 64546, or a homolog or fragment thereof, or a homolog thereof being depicted in Table I, application no. 2, column 8, in the same line as SEQ ID NO. 64546, preferably the coding region thereof, a homolog or a fragment thereof; which are operable linked.

[12575] In an embodiment thereof the expression cassette comprises in addition c) a nucleic acid molecule encoding a transit peptide, especially a plastidal transit petide in case in Table I, application no. 2, in column 6 in the same line as SEQ ID NO. 64546 is depicted, plastidic is mentioned, or a mitochondrial transit petide in case in Table I, application no. 2, in column 6 in the same line as SEQ ID NO. 64546 is depicted, mitochondrial is mentioned; which is operable linke, too.

[12576] In another embodiment thereof the expression cassette does not comprise an additional transit peptide in case in Table I, application no. 2, in column 6 in the same line as SEQ ID NO. 64546 is depicted, non-targeted is mentioned.

[12577] In an embodiment the present invention relates to an expresssion cassette comprising a) a promoter, prefereably a promoter selected from the group consisting of Big35S, PCUbi, Super and USP, in particular Super; and b) the nucleic acid SEQ ID NO. 64563, or a homolog or fragment thereof, or a homolog thereof being depicted in Table I, application no. 2, column 8, in the same line as SEQ ID NO. 64563, preferably the coding region thereof, a homolog or a fragment thereof; which are operable linked.

[12578] In an embodiment thereof the expression cassette comprises in addition c) a nucleic acid molecule encoding a transit peptide, especially a plastidal transit petide in case in Table I, application no. 2, in column 6 in the same line as SEQ ID NO. 64563 is depicted, plastidic is mentioned, or a mitochondrial transit petide in case in Table I, application no. 2, in column 6 in the same line as SEQ ID NO. 64563 is depicted, mitochondrial is mentioned; which is operable linke, too.

[12579] In another embodiment thereof the expression cassette does not comprise an additional transit peptide in case in Table I, application no. 2, in column 6 in the same line as SEQ ID NO. 64563 is depicted, non-targeted is mentioned.

[12580] In an embodiment the present invention relates to an expresssion cassette comprising a) a promoter, prefereably a promoter selected from the group consisting of Big35S, PCUbi, Super and USP, in particular Super; and b) the nucleic acid SEQ ID NO. 64773, or a homolog or fragment thereof, or a homolog thereof being depicted in Table I, application no. 2, column 8, in the same line as SEQ ID NO. 64773, preferably the coding region thereof, a homolog or a fragment thereof; which are operable linked.

[12581] In an embodiment thereof the expression cassette comprises in addition c) a nucleic acid molecule encoding a transit peptide, especially a plastidal transit petide in case in Table I, application no. 2, in column 6 in the same line as SEQ ID NO. 64773 is depicted, plastidic is mentioned, or a mitochondrial transit petide in case in Table I, application no. 2, in column 6 in the same line as SEQ ID NO. 64773 is depicted, mitochondrial is mentioned; which is operable linke, too.

[12582] In another embodiment thereof the expression cassette does not comprise an additional transit peptide in case in Table I, application no. 2, in column 6 in the same line as SEQ ID NO. 64773 is depicted, non-targeted is mentioned.

[12583] In an embodiment the present invention relates to an expresssion cassette comprising a) a promoter, prefereably a promoter selected from the group consisting of Big35S, PCUbi, Super and USP, in particular Super; and b) the nucleic acid SEQ ID NO. 64894, or a homolog or fragment thereof, or a homolog thereof being depicted in Table I, application no. 2, column 8, in the same line as SEQ ID NO. 64894, preferably the coding region thereof, a homolog or a fragment thereof; which are operable linked.

[12584] In an embodiment thereof the expression cassette comprises in addition c) a nucleic acid molecule encoding a transit peptide, especially a plastidal transit petide in case in Table I, application no. 2, in column 6 in the same line as SEQ ID NO. 64894 is depicted, plastidic is mentioned, or a mitochondrial transit petide in case in Table I, application no. 2, in column 6 in the same line as SEQ ID NO. 64894 is depicted, mitochondrial is mentioned; which is operable linke, too.

[12585] In another embodiment thereof the expression cassette does not comprise an additional transit peptide in case in Table I, application no. 2, in column 6 in the same line as SEQ ID NO. 64894 is depicted, non-targeted is mentioned.

[12586] In an embodiment the present invention relates to an expresssion cassette comprising a) a promoter, prefereably a promoter selected from the group consisting of Big35S, PCUbi, Super and USP, in particular Super; and b) the nucleic acid SEQ ID NO. 64964, or a homolog or fragment thereof, or a homolog thereof being depicted in Table I, application no. 2, column 8, in the same line as SEQ ID NO. 64964, preferably the coding region thereof, a homolog or a fragment thereof; which are operable linked.

[12587] In an embodiment thereof the expression cassette comprises in addition c) a nucleic acid molecule encoding a transit peptide, especially a plastidal transit petide in case in Table I, application no. 2, in column 6 in the same line as SEQ ID NO. 64964 is depicted, plastidic is mentioned, or a mitochondrial transit petide in case in Table I, application no. 2, in column 6 in the same line as SEQ ID NO. 64964 is depicted, mitochondrial is mentioned; which is operable linke, too.

[12588] In another embodiment thereof the expression cassette does not comprise an additional transit peptide in case in Table I, application no. 2, in column 6 in the same line as SEQ ID NO. 64964 is depicted, non-targeted is mentioned.

[12589] In an embodiment the present invention relates to an expresssion cassette comprising a) a promoter, prefereably a promoter selected from the group consisting of Big35S, PCUbi, Super and USP, in particular Super; and b) the nucleic acid SEQ ID NO. 64198, or a homolog or fragment thereof, or a homolog thereof being depicted in Table I, application no. 2, column 8, in the same line as SEQ ID NO. 64198, preferably the coding region thereof, a homolog or a fragment thereof; which are operable linked.

[12590] In an embodiment thereof the expression cassette comprises in addition c) a nucleic acid molecule encoding a transit peptide, especially a plastidal transit petide in case in Table I, application no. 2, in column 6 in the same line as SEQ ID NO. 64198 is depicted, plastidic is mentioned, or a mitochondrial transit petide in case in Table I, application no. 2, in column 6 in the same line as SEQ ID NO. 64198 is depicted, mitochondrial is mentioned; which is operable linke, too.

[12591] In another embodiment thereof the expression cassette does not comprise an additional transit peptide in case in Table I, application no. 2, in column 6 in the same line as SEQ ID NO. 64198 is depicted, non-targeted is mentioned.

[12592] In an embodiment the present invention relates to an expresssion cassette comprising a) a promoter, prefereably a promoter selected from the group consisting of Big35S, PCUbi, Super and USP, in particular Super; and b) the nucleic acid SEQ ID NO. 45394, or a homolog or fragment thereof, or a homolog thereof being depicted in Table I, application no. 2, column 8, in the same line as SEQ ID NO. 45394, preferably the coding region thereof, a homolog or a fragment thereof; which are operable linked.

[12593] In an embodiment thereof the expression cassette comprises in addition c) a nucleic acid molecule encoding a transit peptide, especially a plastidal transit petide in case in Table I, application no. 2, in column 6 in the same line as SEQ ID NO. 45394 is depicted, plastidic is mentioned, or a mitochondrial transit petide in case in Table I, application no. 2, in column 6 in the same line as SEQ ID NO. 45394 is depicted, mitochondrial is mentioned; which is operable linke, too.

[12594] In another embodiment thereof the expression cassette does not comprise an additional transit peptide in case in Table I, application no. 2, in column 6 in the same line as SEQ ID NO. 45394 is depicted, non-targeted is mentioned.

[12595] In an embodiment the present invention relates to an expresssion cassette comprising a) a promoter, prefereably a promoter selected from the group consisting of Big35S, PCUbi, Super and USP, in particular PCUbi; and b) the nucleic acid SEQ ID NO. 46850, or a homolog or fragment thereof, or a homolog thereof being depicted in Table I, application no. 2, column 8, in the same line as SEQ ID NO. 46850, preferably the coding region thereof, a homolog or a fragment thereof; which are operable linked.

[12596] In an embodiment thereof the expression cassette comprises in addition c) a nucleic acid molecule encoding a transit peptide, especially a plastidal transit petide in case in Table I, application no. 2, in column 6 in the same line as SEQ ID NO. 46850 is depicted, plastidic is mentioned, or a mitochondrial transit petide in case in Table I, application no. 2, in column 6 in the same line as SEQ ID NO. 46850 is depicted, mitochondrial is mentioned; which is operable linke, too.

[12597] In another embodiment thereof the expression cassette does not comprise an additional transit peptide in case in Table I, application no. 2, in column 6 in the same line as SEQ ID NO. 46850 is depicted, non-targeted is mentioned.

[12598] In an embodiment the present invention relates to an expresssion cassette comprising a) a promoter, prefereably a promoter selected from the group consisting of Big35S, PCUbi, Super and USP, in particular Super; and b) the nucleic acid SEQ ID NO. 44372, or a homolog or fragment thereof, or a homolog thereof being depicted in Table I, application no. 2, column 8, in the same line as SEQ ID NO. 44372, preferably the coding region thereof, a homolog or a fragment thereof; which are operable linked.

[12599] In an embodiment thereof the expression cassette comprises in addition c) a nucleic acid molecule encoding a transit peptide, especially a plastidal transit petide in case in Table I, application no. 2, in column 6 in the same line as SEQ ID NO. 44372 is depicted, plastidic is mentioned, or a mitochondrial transit petide in case in Table I, application no. 2, in column 6 in the same line as SEQ ID NO. 44372 is depicted, mitochondrial is mentioned; which is operable linke, too.

[12600] In another embodiment thereof the expression cassette does not comprise an additional transit peptide in case in Table I, application no. 2, in column 6 in the same line as SEQ ID NO. 44372 is depicted, non-targeted is mentioned.

[12601] In an embodiment the present invention relates to an expresssion cassette comprising a) a promoter, prefereably a promoter selected from the group consisting of Big35S, PCUbi, Super and USP, in particular USP; and b) the nucleic acid SEQ ID NO. 44378, or a homolog or fragment thereof, or a homolog thereof being depicted in Table I, application no. 2, column 8, in the same line as SEQ ID NO. 44378, preferably the coding region thereof, a homolog or a fragment thereof; which are operable linked.

[12602] In an embodiment thereof the expression cassette comprises in addition c) a nucleic acid molecule encoding a transit peptide, especially a plastidal transit petide in case in Table I, application no. 2, in column 6 in the same line as SEQ ID NO. 44378 is depicted, plastidic is mentioned, or a mitochondrial transit petide in case in Table I, application no. 2, in column 6 in the same line as SEQ ID NO. 44378 is depicted, mitochondrial is mentioned; which is operable linke, too.

[12603] In another embodiment thereof the expression cassette does not comprise an additional transit peptide in case in Table I, application no. 2, in column 6 in the same line as SEQ ID NO. 44378 is depicted, non-targeted is mentioned.

[12604] In an embodiment the present invention relates to an expresssion cassette comprising a) a promoter, prefereably a promoter selected from the group consisting of Big35S, PCUbi, Super and USP, in particular Super; and b) the nucleic acid SEQ ID NO. 10740, or a homolog or fragment thereof, or a homolog thereof being depicted in Table I, application no. 2, column 8, in the same line as SEQ ID NO. 10740, preferably the coding region thereof, a homolog or a fragment thereof; which are operable linked.

[12605] In an embodiment thereof the expression cassette comprises in addition c) a nucleic acid molecule encoding a transit peptide, especially a plastidal transit petide in case in Table I, application no. 2, in column 6 in the same line as SEQ ID NO. 10740 is depicted, plastidic is mentioned, or a mitochondrial transit petide in case in Table I, application no. 2, in column 6 in the same line as SEQ ID NO. 10740 is depicted, mitochondrial is mentioned; which is operable linke, too.

[12606] In another embodiment thereof the expression cassette does not comprise an additional transit peptide in case in Table I, application no. 2, in column 6 in the same line as SEQ ID NO. 10740 is depicted, non-targeted is mentioned.

[12607] In an embodiment the present invention relates to an expresssion cassette comprising a) a promoter, prefereably a promoter selected from the group consisting of Big35S, PCUbi, Super and USP, in particular Super; and b) the nucleic acid SEQ ID NO. 44466, or a homolog or fragment thereof, or a homolog thereof being depicted in Table I, application no. 2, column 8, in the same line as SEQ ID NO. 44466, preferably the coding region thereof, a homolog or a fragment thereof; which are operable linked.

[12608] In an embodiment thereof the expression cassette comprises in addition c) a nucleic acid molecule encoding a transit peptide, especially a plastidal transit petide in case in Table I, application no. 2, in column 6 in the same line as SEQ ID NO. 44466 is depicted, plastidic is mentioned, or a mitochondrial transit petide in case in Table I, application no. 2, in column 6 in the same line as SEQ ID NO. 44466 is depicted, mitochondrial is mentioned; which is operable linke, too.

[12609] In another embodiment thereof the expression cassette does not comprise an additional transit peptide in case in Table I, application no. 2, in column 6 in the same line as SEQ ID NO. 44466 is depicted, non-targeted is mentioned.

[12610] In an embodiment the present invention relates to an expresssion cassette comprising a) a promoter, prefereably a promoter selected from the group consisting of Big35S, PCUbi, Super and USP, in particular Super; and b) the nucleic acid SEQ ID NO. 44609, or a homolog or fragment thereof, or a homolog thereof being depicted in Table I, application no. 2, column 8, in the same line as SEQ ID NO. 44609, preferably the coding region thereof, a homolog or a fragment thereof; which are operable linked.

[12611] In an embodiment thereof the expression cassette comprises in addition c) a nucleic acid molecule encoding a transit peptide, especially a plastidal transit petide in case in Table I, application no. 2, in column 6 in the same line as SEQ ID NO. 44609 is depicted, plastidic is mentioned, or a mitochondrial transit petide in case in Table I, application no. 2, in column 6 in the same line as SEQ ID NO. 44609 is depicted, mitochondrial is mentioned; which is operable linke, too.

[12612] In another embodiment thereof the expression cassette does not comprise an additional transit peptide in case in Table I, application no. 2, in column 6 in the same line as SEQ ID NO. 44609 is depicted, non-targeted is mentioned.

[12613] In an embodiment the present invention relates to an expresssion cassette comprising a) a promoter, prefereably a promoter selected from the group consisting of Big35S, PCUbi, Super and USP, in particular USP; and b) the nucleic acid SEQ ID NO. 44662, or a homolog or fragment thereof, or a homolog thereof being depicted in Table I, application no. 2, column 8, in the same line as SEQ ID NO. 44662, preferably the coding region thereof, a homolog or a fragment thereof; which are operable linked.

[12614] In an embodiment thereof the expression cassette comprises in addition c) a nucleic acid molecule encoding a transit peptide, especially a plastidal transit petide in case in Table I, application no. 2, in column 6 in the same line as SEQ ID NO. 44662 is depicted, plastidic is mentioned, or a mitochondrial transit petide in case in Table I, application no. 2, in column 6 in the same line as SEQ ID NO. 44662 is depicted, mitochondrial is mentioned; which is operable linke, too.

[12615] In another embodiment thereof the expression cassette does not comprise an additional transit peptide in case in Table I, application no. 2, in column 6 in the same line as SEQ ID NO. 44662 is depicted, non-targeted is mentioned.

[12616] In an embodiment the present invention relates to an expresssion cassette comprising a) a promoter, prefereably a promoter selected from the group consisting of Big35S, PCUbi, Super and USP, in particular Super; and b) the nucleic acid SEQ ID NO. 10708, or a homolog or fragment thereof, or a homolog thereof being depicted in Table I, application no. 2, column 8, in the same line as SEQ ID NO. 10708, preferably the coding region thereof, a homolog or a fragment thereof; which are operable linked.

[12617] In an embodiment thereof the expression cassette comprises in addition c) a nucleic acid molecule encoding a transit peptide, especially a plastidal transit petide in case in Table I, application no. 2, in column 6 in the same line as SEQ ID NO. 10708 is depicted, plastidic is mentioned, or a mitochondrial transit petide in case in Table I, application no. 2, in column 6 in the same line as SEQ ID NO. 10708 is depicted, mitochondrial is mentioned; which is operable linke, too.

[12618] In another embodiment thereof the expression cassette does not comprise an additional transit peptide in case in Table I, application no. 2, in column 6 in the same line as SEQ ID NO. 10708 is depicted, non-targeted is mentioned.

[12619] In an embodiment the present invention relates to an expresssion cassette comprising a) a promoter, prefereably a promoter selected from the group consisting of Big35S, PCUbi, Super and USP, in particular Super; and b) the nucleic acid SEQ ID NO. 45321, or a homolog or fragment thereof, or a homolog thereof being depicted in Table I, application no. 2, column 8, in the same line as SEQ ID NO. 45321, preferably the coding region thereof, a homolog or a fragment thereof; which are operable linked.

[12620] In an embodiment thereof the expression cassette comprises in addition c) a nucleic acid molecule encoding a transit peptide, especially a plastidal transit petide in case in Table I, application no. 2, in column 6 in the same line as SEQ ID NO. 45321 is depicted, plastidic is mentioned, or a mitochondrial transit petide in case in Table I, application no. 2, in column 6 in the same line as SEQ ID NO. 45321 is depicted, mitochondrial is mentioned; which is operable linke, too.

[12621] In another embodiment thereof the expression cassette does not comprise an additional transit peptide in case in Table I, application no. 2, in column 6 in the same line as SEQ ID NO. 45321 is depicted, non-targeted is mentioned.

[12622] In an embodiment the present invention relates to an expresssion cassette comprising a) a promoter, prefereably a promoter selected from the group consisting of Big35S, PCUbi, Super and USP, in particular Super; and b) the nucleic acid SEQ ID NO. 44196, or a homolog or fragment thereof, or a homolog thereof being depicted in Table I, application no. 2, column 8, in the same line as SEQ ID NO. 44196, preferably the coding region thereof, a homolog or a fragment thereof; which are operable linked.

[12623] In an embodiment thereof the expression cassette comprises in addition c) a nucleic acid molecule encoding a transit peptide, especially a plastidal transit petide in case in Table I, application no. 2, in column 6 in the same line as SEQ ID NO. 44196 is depicted, plastidic is mentioned, or a mitochondrial transit petide in case in Table I, application no. 2, in column 6 in the same line as SEQ ID NO. 44196 is depicted, mitochondrial is mentioned; which is operable linke, too.

[12624] In another embodiment thereof the expression cassette does not comprise an additional transit peptide in case in Table I, application no. 2, in column 6 in the same line as SEQ ID NO. 44196 is depicted, non-targeted is mentioned.

[12625] In an embodiment the present invention relates to an expresssion cassette comprising a) a promoter, prefereably a promoter selected from the group consisting of Big35S, PCUbi, Super and USP, in particular USP; and b) the nucleic acid SEQ ID NO. 45556, or a homolog or fragment thereof, or a homolog thereof being depicted in Table I, application no. 2, column 8, in the same line as SEQ ID NO. 45556, preferably the coding region thereof, a homolog or a fragment thereof; which are operable linked.

[12626] In an embodiment thereof the expression cassette comprises in addition c) a nucleic acid molecule encoding a transit peptide, especially a plastidal transit petide in case in Table I, application no. 2, in column 6 in the same line as SEQ ID NO. 45556 is depicted, plastidic is mentioned, or a mitochondrial transit petide in case in Table I, application no. 2, in column 6 in the same line as SEQ ID NO. 45556 is depicted, mitochondrial is mentioned; which is operable linke, too.

[12627] In another embodiment thereof the expression cassette does not comprise an additional transit peptide in case in Table I, application no. 2, in column 6 in the same line as SEQ ID NO. 45556 is depicted, non-targeted is mentioned.

[12628] In an embodiment the present invention relates to an expresssion cassette comprising a) a promoter, prefereably a promoter selected from the group consisting of Big35S, PCUbi, Super and USP, in particular Super; and b) the nucleic acid SEQ ID NO. 45757, or a homolog or fragment thereof, or a homolog thereof being depicted in Table I, application no. 2, column 8, in the same line as SEQ ID NO. 45757, preferably the coding region thereof, a homolog or a fragment thereof; which are operable linked.

[12629] In an embodiment thereof the expression cassette comprises in addition c) a nucleic acid molecule encoding a transit peptide, especially a plastidal transit petide in case in Table I, application no. 2, in column 6 in the same line as SEQ ID NO. 45757 is depicted, plastidic is mentioned, or a mitochondrial transit petide in case in Table I, application no. 2, in column 6 in the same line as SEQ ID NO. 45757 is depicted, mitochondrial is mentioned; which is operable linke, too.

[12630] In another embodiment thereof the expression cassette does not comprise an additional transit peptide in case in Table I, application no. 2, in column 6 in the same line as SEQ ID NO. 45757 is depicted, non-targeted is mentioned.

[12631] In an embodiment the present invention relates to an expresssion cassette comprising a) a promoter, prefereably a promoter selected from the group consisting of Big35S, PCUbi, Super and USP, in particular PCUbi; and b) the nucleic acid SEQ ID NO. 45795, or a homolog or fragment thereof, or a homolog thereof being depicted in Table I, application no. 2, column 8, in the same line as SEQ ID NO. 45795, preferably the coding region thereof, a homolog or a fragment thereof; which are operable linked.

[12632] In an embodiment thereof the expression cassette comprises in addition c) a nucleic acid molecule encoding a transit peptide, especially a plastidal transit petide in case in Table I, application no. 2, in column 6 in the same line as SEQ ID NO. 45795 is depicted, plastidic is mentioned, or a mitochondrial transit petide in case in Table I, application no. 2, in column 6 in the same line as SEQ ID NO. 45795 is depicted, mitochondrial is mentioned; which is operable linke, too.

[12633] In another embodiment thereof the expression cassette does not comprise an additional transit peptide in case in Table I, application no. 2, in column 6 in the same line as SEQ ID NO. 45795 is depicted, non-targeted is mentioned.

[12634] In an embodiment the present invention relates to an expresssion cassette comprising a) a promoter, prefereably a promoter selected from the group consisting of Big35S, PCUbi, Super and USP, in particular PCUbi; and b) the nucleic acid SEQ ID NO. 10811, or a homolog or fragment thereof, or a homolog thereof being depicted in Table I, application no. 2, column 8, in the same line as SEQ ID NO. 10811, preferably the coding region thereof, a homolog or a fragment thereof; which are operable linked.

[12635] In an embodiment thereof the expression cassette comprises in addition c) a nucleic acid molecule encoding a transit peptide, especially a plastidal transit petide in case in Table I, application no. 2, in column 6 in the same line as SEQ ID NO. 10811 is depicted, plastidic is mentioned, or a mitochondrial transit petide in case in Table I, application no. 2, in column 6 in the same line as SEQ ID NO. 10811 is depicted, mitochondrial is mentioned; which is operable linke, too.

[12636] In another embodiment thereof the expression cassette does not comprise an additional transit peptide in case in Table I, application no. 2, in column 6 in the same line as SEQ ID NO. 10811 is depicted, non-targeted is mentioned.

[12637] In an embodiment the present invention relates to an expresssion cassette comprising a) a promoter, prefereably a promoter selected from the group consisting of Big35S, PCUbi, Super and USP, in particular PCUbi; and b) the nucleic acid SEQ ID NO. 45897, or a homolog or fragment thereof, or a homolog thereof being depicted in Table I, application no. 2, column 8, in the same line as SEQ ID NO. 45897, preferably the coding region thereof, a homolog or a fragment thereof; which are operable linked.

[12638] In an embodiment thereof the expression cassette comprises in addition c) a nucleic acid molecule encoding a transit peptide, especially a plastidal transit petide in case in Table I, application no. 2, in column 6 in the same line as SEQ ID NO. 45897 is depicted, plastidic is mentioned, or a mitochondrial transit petide in case in Table I, application no. 2, in column 6 in the same line as SEQ ID NO. 45897 is depicted, mitochondrial is mentioned; which is operable linke, too.

[12639] In another embodiment thereof the expression cassette does not comprise an additional transit peptide in case in Table I, application no. 2, in column 6 in the same line as SEQ ID NO. 45897 is depicted, non-targeted is mentioned.

[12640] In an embodiment the present invention relates to an expresssion cassette comprising a) a promoter, prefereably a promoter selected from the group consisting of Big35S, PCUbi, Super and USP, in particular PCUbi; and b) the nucleic acid SEQ ID NO. 46405, or a homolog or fragment thereof, or a homolog thereof being depicted in Table I, application no. 2, column 8, in the same line as SEQ ID NO. 46405, preferably the coding region thereof, a homolog or a fragment thereof; which are operable linked.

[12641] In an embodiment thereof the expression cassette comprises in addition c) a nucleic acid molecule encoding a transit peptide, especially a plastidal transit petide in case in Table I, application no. 2, in column 6 in the same line as SEQ ID NO. 46405 is depicted, plastidic is mentioned, or a mitochondrial transit petide in case in Table I, application no. 2, in column 6 in the same line as SEQ ID NO. 46405 is depicted, mitochondrial is mentioned; which is operable linke, too.

[12642] In another embodiment thereof the expression cassette does not comprise an additional transit peptide in case in Table I, application no. 2, in column 6 in the same line as SEQ ID NO. 46405 is depicted, non-targeted is mentioned.

[12643] In an embodiment the present invention relates to an expresssion cassette comprising a) a promoter, prefereably a promoter selected from the group consisting of Big35S, PCUbi, Super and USP, in particular PCUbi; and b) the nucleic acid SEQ ID NO. 46515, or a homolog or fragment thereof, or a homolog thereof being depicted in Table I, application no. 2, column 8, in the same line as SEQ ID NO. 46515, preferably the coding region thereof, a homolog or a fragment thereof; which are operable linked.

[12644] In an embodiment thereof the expression cassette comprises in addition c) a nucleic acid molecule encoding a transit peptide, especially a plastidal transit petide in case in Table I, application no. 2, in column 6 in the same line as SEQ ID NO. 46515 is depicted, plastidic is mentioned, or a mitochondrial transit petide in case in Table I, application no. 2, in column 6 in the same line as SEQ ID NO. 46515 is depicted, mitochondrial is mentioned; which is operable linke, too.

[12645] In another embodiment thereof the expression cassette does not comprise an additional transit peptide in case in Table I, application no. 2, in column 6 in the same line as SEQ ID NO. 46515 is depicted, non-targeted is mentioned.

[12646] In an embodiment the present invention relates to an expresssion cassette comprising a) a promoter, prefereably a promoter selected from the group consisting of Big35S, PCUbi, Super and USP, in particular PCUbi; and b) the nucleic acid SEQ ID NO. 56576, or a homolog or fragment thereof, or a homolog thereof being depicted in Table I, application no. 2, column 8, in the same line as SEQ ID NO. 56576, preferably the coding region thereof, a homolog or a fragment thereof; which are operable linked.

[12647] In an embodiment thereof the expression cassette comprises in addition c) a nucleic acid molecule encoding a transit peptide, especially a plastidal transit petide in case in Table I, application no. 2, in column 6 in the same line as SEQ ID NO. 56576 is depicted, plastidic is mentioned, or a mitochondrial transit petide in case in Table I, application no. 2, in column 6 in the same line as SEQ ID NO. 56576 is depicted, mitochondrial is mentioned; which is operable linke, too.

[12648] In another embodiment thereof the expression cassette does not comprise an additional transit peptide in case in Table I, application no. 2, in column 6 in the same line as SEQ ID NO. 56576 is depicted, non-targeted is mentioned.

[12649] In an embodiment the present invention relates to an expresssion cassette comprising a) a promoter, prefereably a promoter selected from the group consisting of Big35S, PCUbi, Super and USP, in particular USP; and b) the nucleic acid SEQ ID NO. 45022, or a homolog or fragment thereof, or a homolog thereof being depicted in Table I, application no. 2, column 8, in the same line as SEQ ID NO. 45022, preferably the coding region thereof, a homolog or a fragment thereof; which are operable linked.

[12650] In an embodiment thereof the expression cassette comprises in addition c) a nucleic acid molecule encoding a transit peptide, especially a plastidal transit petide in case in Table I, application no. 2, in column 6 in the same line as SEQ ID NO. 45022 is depicted, plastidic is mentioned, or a mitochondrial transit petide in case in Table I, application no. 2, in column 6 in the same line as SEQ ID NO. 45022 is depicted, mitochondrial is mentioned; which is operable linke, too.

[12651] In another embodiment thereof the expression cassette does not comprise an additional transit peptide in case in Table I, application no. 2, in column 6 in the same line as SEQ ID NO. 45022 is depicted, non-targeted is mentioned.

[12652] In an embodiment the present invention relates to an expresssion cassette comprising a) a promoter, prefereably a promoter selected from the group consisting of Big35S, PCUbi, Super and USP, in particular Super; and b) the nucleic acid SEQ ID NO. 42559, or a homolog or fragment thereof, or a homolog thereof being depicted in Table I, application no. 2, column 8, in the same line as SEQ ID NO. 42559, preferably the coding region thereof, a homolog or a fragment thereof; which are operable linked.

[12653] In an embodiment thereof the expression cassette comprises in addition c) a nucleic acid molecule encoding a transit peptide, especially a plastidal transit petide in case in Table I, application no. 2, in column 6 in the same line as SEQ ID NO. 42559 is depicted, plastidic is mentioned, or a mitochondrial transit petide in case in Table I, application no. 2, in column 6 in the same line as SEQ ID NO. 42559 is depicted, mitochondrial is mentioned; which is operable linke, too.

[12654] In another embodiment thereof the expression cassette does not comprise an additional transit peptide in case in Table I, application no. 2, in column 6 in the same line as SEQ ID NO. 42559 is depicted, non-targeted is mentioned.

[12655] In an embodiment the present invention relates to an expresssion cassette comprising a) a promoter, prefereably a promoter selected from the group consisting of Big35S, PCUbi, Super and USP, in particular Super; and b) the nucleic acid SEQ ID NO. 41499, or a homolog or fragment thereof, or a homolog thereof being depicted in Table I, application no. 2, column 8, in the same line as SEQ ID NO. 41499, preferably the coding region thereof, a homolog or a fragment thereof; which are operable linked.

[12656] In an embodiment thereof the expression cassette comprises in addition c) a nucleic acid molecule encoding a transit peptide, especially a plastidal transit petide in case in Table I, application no. 2, in column 6 in the same line as SEQ ID NO. 41499 is depicted, plastidic is mentioned, or a mitochondrial transit petide in case in Table I, application no. 2, in column 6 in the same line as SEQ ID NO. 41499 is depicted, mitochondrial is mentioned; which is operable linke, too.

[12657] In another embodiment thereof the expression cassette does not comprise an additional transit peptide in case in Table I, application no. 2, in column 6 in the same line as SEQ ID NO. 41499 is depicted, non-targeted is mentioned.

[12658] In an embodiment the present invention relates to an expresssion cassette comprising a) a promoter, prefereably a promoter selected from the group consisting of Big35S, PCUbi, Super and USP, in particular Super; and b) the nucleic acid SEQ ID NO. 41732, or a homolog or fragment thereof, or a homolog thereof being depicted in Table I, application no. 2, column 8, in the same line as SEQ ID NO. 41732, preferably the coding region thereof, a homolog or a fragment thereof; which are operable linked.

[12659] In an embodiment thereof the expression cassette comprises in addition c) a nucleic acid molecule encoding a transit peptide, especially a plastidal transit petide in case in Table I, application no. 2, in column 6 in the same line as SEQ ID NO. 41732 is depicted, plastidic is mentioned, or a mitochondrial transit petide in case in Table I, application no. 2, in column 6 in the same line as SEQ ID NO. 41732 is depicted, mitochondrial is mentioned; which is operable linke, too.

[12660] In another embodiment thereof the expression cassette does not comprise an additional transit peptide in case in Table I, application no. 2, in column 6 in the same line as SEQ ID NO. 41732 is depicted, non-targeted is mentioned.

[12661] In an embodiment the present invention relates to an expresssion cassette comprising a) a promoter, prefereably a promoter selected from the group consisting of Big35S, PCUbi, Super and USP, in particular Super; and b) the nucleic acid SEQ ID NO. 41797, or a homolog or fragment thereof, or a homolog thereof being depicted in Table I, application no. 2, column 8, in the same line as SEQ ID NO. 41797, preferably the coding region thereof, a homolog or a fragment thereof; which are operable linked.

[12662] In an embodiment thereof the expression cassette comprises in addition c) a nucleic acid molecule encoding a transit peptide, especially a plastidal transit petide in case in Table I, application no. 2, in column 6 in the same line as SEQ ID NO. 41797 is depicted, plastidic is mentioned, or a mitochondrial transit petide in case in Table I, application no. 2, in column 6 in the same line as SEQ ID NO. 41797 is depicted, mitochondrial is mentioned; which is operable linke, too.

[12663] In another embodiment thereof the expression cassette does not comprise an additional transit peptide in case in Table I, application no. 2, in column 6 in the same line as SEQ ID NO. 41797 is depicted, non-targeted is mentioned.

[12664] In an embodiment the present invention relates to an expresssion cassette comprising a) a promoter, prefereably a promoter selected from the group consisting of Big35S, PCUbi, Super and USP, in particular Super; and b) the nucleic acid SEQ ID NO. 42046, or a homolog or fragment thereof, or a homolog thereof being depicted in Table I, application no. 2, column 8, in the same line as SEQ ID NO. 42046, preferably the coding region thereof, a homolog or a fragment thereof; which are operable linked.

[12665] In an embodiment thereof the expression cassette comprises in addition c) a nucleic acid molecule encoding a transit peptide, especially a plastidal transit petide in case in Table I, application no. 2, in column 6 in the same line as SEQ ID NO. 42046 is depicted, plastidic is mentioned, or a mitochondrial transit petide in case in Table I, application no. 2, in column 6 in the same line as SEQ ID NO. 42046 is depicted, mitochondrial is mentioned; which is operable linke, too.

[12666] In another embodiment thereof the expression cassette does not comprise an additional transit peptide in case in Table I, application no. 2, in column 6 in the same line as SEQ ID NO. 42046 is depicted, non-targeted is mentioned.

[12667] In an embodiment the present invention relates to an expresssion cassette comprising a) a promoter, prefereably a promoter selected from the group consisting of Big35S, PCUbi, Super and USP, in particular Super; and b) the nucleic acid SEQ ID NO. 42471, or a homolog or fragment thereof, or a homolog thereof being depicted in Table I, application no. 2, column 8, in the same line as SEQ ID NO. 42471, preferably the coding region thereof, a homolog or a fragment thereof; which are operable linked.

[12668] In an embodiment thereof the expression cassette comprises in addition c) a nucleic acid molecule encoding a transit peptide, especially a plastidal transit petide in case in Table I, application no. 2, in column 6 in the same line as SEQ ID NO. 42471 is depicted, plastidic is mentioned, or a mitochondrial transit petide in case in Table I, application no. 2, in column 6 in the same line as SEQ ID NO. 42471 is depicted, mitochondrial is mentioned; which is operable linke, too.

[12669] In another embodiment thereof the expression cassette does not comprise an additional transit peptide in case in Table I, application no. 2, in column 6 in the same line as SEQ ID NO. 42471 is depicted, non-targeted is mentioned.

[12670] In an embodiment the present invention relates to an expresssion cassette comprising a) a promoter, prefereably a promoter selected from the group consisting of Big35S, PCUbi, Super and USP, in particular Super; and b) the nucleic acid SEQ ID NO. 42477, or a homolog or fragment thereof, or a homolog thereof being depicted in Table I, application no. 2, column 8, in the same line as SEQ ID NO. 42477, preferably the coding region thereof, a homolog or a fragment thereof; which are operable linked.

[12671] In an embodiment thereof the expression cassette comprises in addition c) a nucleic acid molecule encoding a transit peptide, especially a plastidal transit petide in case in Table I, application no. 2, in column 6 in the same line as SEQ ID NO. 42477 is depicted, plastidic is mentioned, or a mitochondrial transit petide in case in Table I, application no. 2, in column 6 in the same line as SEQ ID NO. 42477 is depicted, mitochondrial is mentioned; which is operable linke, too.

[12672] In another embodiment thereof the expression cassette does not comprise an additional transit peptide in case in Table I, application no. 2, in column 6 in the same line as SEQ ID NO. 42477 is depicted, non-targeted is mentioned.

[12673] In an embodiment the present invention relates to an expresssion cassette comprising a) a promoter, prefereably a promoter selected from the group consisting of Big35S, PCUbi, Super and USP, in particular USP; and b) the nucleic acid SEQ ID NO. 9492, or a homolog or fragment thereof, or a homolog thereof being depicted in Table I, application no. 2, column 8, in the same line as SEQ ID NO. 9492, preferably the coding region thereof, a homolog or a fragment thereof; which are operable linked.

[12674] In an embodiment thereof the expression cassette comprises in addition c) a nucleic acid molecule encoding a transit peptide, especially a plastidal transit petide in case in Table I, application no. 2, in column 6 in the same line as SEQ ID NO. 9492 is depicted, plastidic is mentioned, or a mitochondrial transit petide in case in Table I, application no. 2, in column 6 in the same line as SEQ ID NO. 9492 is depicted, mitochondrial is mentioned; which is operable linke, too.

[12675] In another embodiment thereof the expression cassette does not comprise an additional transit peptide in case in Table I, application no. 2, in column 6 in the same line as SEQ ID NO. 9492 is depicted, non-targeted is mentioned.

[12676] In an embodiment the present invention relates to an expresssion cassette comprising a) a promoter, prefereably a promoter selected from the group consisting of Big35S, PCUbi, Super and USP, in particular USP; and b) the nucleic acid SEQ ID NO. 44223, or a homolog or fragment thereof, or a homolog thereof being depicted in Table I, application no. 2, column 8, in the same line as SEQ ID NO. 44223, preferably the coding region thereof, a homolog or a fragment thereof; which are operable linked.

[12677] In an embodiment thereof the expression cassette comprises in addition c) a nucleic acid molecule encoding a transit peptide, especially a plastidal transit petide in case in Table I, application no. 2, in column 6 in the same line as SEQ ID NO. 44223 is depicted, plastidic is mentioned, or a mitochondrial transit petide in case in Table I, application no. 2, in column 6 in the same line as SEQ ID NO. 44223 is depicted, mitochondrial is mentioned; which is operable linke, too.

[12678] In another embodiment thereof the expression cassette does not comprise an additional transit peptide in case in Table I, application no. 2, in column 6 in the same line as SEQ ID NO. 44223 is depicted, non-targeted is mentioned.

[12679] In an embodiment the present invention relates to an expresssion cassette comprising a) a promoter, prefereably a promoter selected from the group consisting of Big35S, PCUbi, Super and USP, in particular Super; and b) the nucleic acid SEQ ID NO. 10104, or a homolog or fragment thereof, or a homolog thereof being depicted in Table I, application no. 2, column 8, in the same line as SEQ ID NO. 10104, preferably the coding region thereof, a homolog or a fragment thereof; which are operable linked.

[12680] In an embodiment thereof the expression cassette comprises in addition c) a nucleic acid molecule encoding a transit peptide, especially a plastidal transit petide in case in Table I, application no. 2, in column 6 in the same line as SEQ ID NO. 10104 is depicted, plastidic is mentioned, or a mitochondrial transit petide in case in Table I, application no. 2, in column 6 in the same line as SEQ ID NO. 10104 is depicted, mitochondrial is mentioned; which is operable linke, too.

[12681] In another embodiment thereof the expression cassette does not comprise an additional transit peptide in case in Table I, application no. 2, in column 6 in the same line as SEQ ID NO. 10104 is depicted, non-targeted is mentioned.

[12682] In an embodiment the present invention relates to an expresssion cassette comprising a) a promoter, prefereably a promoter selected from the group consisting of Big35S, PCUbi, Super and USP, in particular PCUbi; and b) the nucleic acid SEQ ID NO. 47026, or a homolog or fragment thereof, or a homolog thereof being depicted in Table I, application no. 2, column 8, in the same line as SEQ ID NO. 47026, preferably the coding region thereof, a homolog or a fragment thereof; which are operable linked.

[12683] In an embodiment thereof the expression cassette comprises in addition c) a nucleic acid molecule encoding a transit peptide, especially a plastidal transit petide in case in Table I, application no. 2, in column 6 in the same line as SEQ ID NO. 47026 is depicted, plastidic is mentioned, or a mitochondrial transit petide in case in Table I, application no. 2, in column 6 in the same line as SEQ ID NO. 47026 is depicted, mitochondrial is mentioned; which is operable linke, too.

[12684] In another embodiment thereof the expression cassette does not comprise an additional transit peptide in case in Table I, application no. 2, in column 6 in the same line as SEQ ID NO. 47026 is depicted, non-targeted is mentioned.

[12685] In an embodiment the present invention relates to an expresssion cassette comprising a) a promoter, prefereably a promoter selected from the group consisting of Big35S, PCUbi, Super and USP, in particular Super; and b) the nucleic acid SEQ ID NO. 42579, or a homolog or fragment thereof, or a homolog thereof being depicted in Table I, application no. 2, column 8, in the same line as SEQ ID NO. 42579, preferably the coding region thereof, a homolog or a fragment thereof; which are operable linked.

[12686] In an embodiment thereof the expression cassette comprises in addition c) a nucleic acid molecule encoding a transit peptide, especially a plastidal transit petide in case in Table I, application no. 2, in column 6 in the same line as SEQ ID NO. 42579 is depicted, plastidic is mentioned, or a mitochondrial transit petide in case in Table I, application no. 2, in column 6 in the same line as SEQ ID NO. 42579 is depicted, mitochondrial is mentioned; which is operable linke, too.

[12687] In another embodiment thereof the expression cassette does not comprise an additional transit peptide in case in Table I, application no. 2, in column 6 in the same line as SEQ ID NO. 42579 is depicted, non-targeted is mentioned.

[12688] In an embodiment the present invention relates to an expresssion cassette comprising a) a promoter, prefereably a promoter selected from the group consisting of Big35S, PCUbi, Super and USP, in particular Super; and b) the nucleic acid SEQ ID NO. 42592, or a homolog or fragment thereof, or a homolog thereof being depicted in Table I, application no. 2, column 8, in the same line as SEQ ID NO. 42592, preferably the coding region thereof, a homolog or a fragment thereof; which are operable linked.

[12689] In an embodiment thereof the expression cassette comprises in addition c) a nucleic acid molecule encoding a transit peptide, especially a plastidal transit petide in case in Table I, application no. 2, in column 6 in the same line as SEQ ID NO. 42592 is depicted, plastidic is mentioned, or a mitochondrial transit petide in case in Table I, application no. 2, in column 6 in the same line as SEQ ID NO. 42592 is depicted, mitochondrial is mentioned; which is operable linke, too.

[12690] In another embodiment thereof the expression cassette does not comprise an additional transit peptide in case in Table I, application no. 2, in column 6 in the same line as SEQ ID NO. 42592 is depicted, non-targeted is mentioned.

[12691] In an embodiment the present invention relates to an expresssion cassette comprising a) a promoter, prefereably a promoter selected from the group consisting of Big35S, PCUbi, Super and USP, in particular USP; and b) the nucleic acid SEQ ID NO. 10172, or a homolog or fragment thereof, or a homolog thereof being depicted in Table I, application no. 2, column 8, in the same line as SEQ ID NO. 10172, preferably the coding region thereof, a homolog or a fragment thereof; which are operable linked.

[12692] In an embodiment thereof the expression cassette comprises in addition c) a nucleic acid molecule encoding a transit peptide, especially a plastidal transit petide in case in Table I, application no. 2, in column 6 in the same line as SEQ ID NO. 10172 is depicted, plastidic is mentioned, or a mitochondrial transit petide in case in Table I, application no. 2, in column 6 in the same line as SEQ ID NO. 10172 is depicted, mitochondrial is mentioned; which is operable linke, too.

[12693] In another embodiment thereof the expression cassette does not comprise an additional transit peptide in case in Table I, application no. 2, in column 6 in the same line as SEQ ID NO. 10172 is depicted, non-targeted is mentioned.

[12694] In an embodiment the present invention relates to an expresssion cassette comprising a) a promoter, prefereably a promoter selected from the group consisting of Big35S, PCUbi, Super and USP, in particular Super; and b) the nucleic acid SEQ ID NO. 42600, or a homolog or fragment thereof, or a homolog thereof being depicted in Table I, application no. 2, column 8, in the same line as SEQ ID NO. 42600, preferably the coding region thereof, a homolog or a fragment thereof; which are operable linked.

[12695] In an embodiment thereof the expression cassette comprises in addition c) a nucleic acid molecule encoding a transit peptide, especially a plastidal transit petide in case in Table I, application no. 2, in column 6 in the same line as SEQ ID NO. 42600 is depicted, plastidic is mentioned, or a mitochondrial transit petide in case in Table I, application no. 2, in column 6 in the same line as SEQ ID NO. 42600 is depicted, mitochondrial is mentioned; which is operable linke, too.

[12696] In another embodiment thereof the expression cassette does not comprise an additional transit peptide in case in Table I, application no. 2, in column 6 in the same line as SEQ ID NO. 42600 is depicted, non-targeted is mentioned.

[12697] In an embodiment the present invention relates to an expresssion cassette comprising a) a promoter, prefereably a promoter selected from the group consisting of Big35S, PCUbi, Super and USP, in particular Super; and b) the nucleic acid SEQ ID NO. 42931, or a homolog or fragment thereof, or a homolog thereof being depicted in Table I, application no. 2, column 8, in the same line as SEQ ID NO. 42931, preferably the coding region thereof, a homolog or a fragment thereof; which are operable linked.

[12698] In an embodiment thereof the expression cassette comprises in addition c) a nucleic acid molecule encoding a transit peptide, especially a plastidal transit petide in case in Table I, application no. 2, in column 6 in the same line as SEQ ID NO. 42931 is depicted, plastidic is mentioned, or a mitochondrial transit petide in case in Table I, application no. 2, in column 6 in the same line as SEQ ID NO. 42931 is depicted, mitochondrial is mentioned; which is operable linke, too.

[12699] In another embodiment thereof the expression cassette does not comprise an additional transit peptide in case in Table I, application no. 2, in column 6 in the same line as SEQ ID NO. 42931 is depicted, non-targeted is mentioned.

[12700] In an embodiment the present invention relates to an expresssion cassette comprising a) a promoter, prefereably a promoter selected from the group consisting of Big35S, PCUbi, Super and USP, in particular Super; and b) the nucleic acid SEQ ID NO. 43248, or a homolog or fragment thereof, or a homolog thereof being depicted in Table I, application no. 2, column 8, in the same line as SEQ ID NO. 43248, preferably the coding region thereof, a homolog or a fragment thereof; which are operable linked.

[12701] In an embodiment thereof the expression cassette comprises in addition c) a nucleic acid molecule encoding a transit peptide, especially a plastidal transit petide in case in Table I, application no. 2, in column 6 in the same line as SEQ ID NO. 43248 is depicted, plastidic is mentioned, or a mitochondrial transit petide in case in Table I, application no. 2, in column 6 in the same line as SEQ ID NO. 43248 is depicted, mitochondrial is mentioned; which is operable linke, too.

[12702] In another embodiment thereof the expression cassette does not comprise an additional transit peptide in case in Table I, application no. 2, in column 6 in the same line as SEQ ID NO. 43248 is depicted, non-targeted is mentioned.

[12703] In an embodiment the present invention relates to an expresssion cassette comprising a) a promoter, prefereably a promoter selected from the group consisting of Big35S, PCUbi, Super and USP, in particular Super; and b) the nucleic acid SEQ ID NO. 43800, or a homolog or fragment thereof, or a homolog thereof being depicted in Table I, application no. 2, column 8, in the same line as SEQ ID NO. 43800, preferably the coding region thereof, a homolog or a fragment thereof; which are operable linked.

[12704] In an embodiment thereof the expression cassette comprises in addition c) a nucleic acid molecule encoding a transit peptide, especially a plastidal transit petide in case in Table I, application no. 2, in column 6 in the same line as SEQ ID NO. 43800 is depicted, plastidic is mentioned, or a mitochondrial transit petide in case in Table I, application no. 2, in column 6 in the same line as SEQ ID NO. 43800 is depicted, mitochondrial is mentioned; which is operable linke, too.

[12705] In another embodiment thereof the expression cassette does not comprise an additional transit peptide in case in Table I, application no. 2, in column 6 in the same line as SEQ ID NO. 43800 is depicted, non-targeted is mentioned.

[12706] In an embodiment the present invention relates to an expresssion cassette comprising a) a promoter, prefereably a promoter selected from the group consisting of Big35S, PCUbi, Super and USP, in particular USP; and b) the nucleic acid SEQ ID NO. 43839, or a homolog or fragment thereof, or a homolog thereof being depicted in Table I, application no. 2, column 8, in the same line as SEQ ID NO. 43839, preferably the coding region thereof, a homolog or a fragment thereof; which are operable linked.

[12707] In an embodiment thereof the expression cassette comprises in addition c) a nucleic acid molecule encoding a transit peptide, especially a plastidal transit petide in case in Table I, application no. 2, in column 6 in the same line as SEQ ID NO. 43839 is depicted, plastidic is mentioned, or a mitochondrial transit petide in case in Table I, application no. 2, in column 6 in the same line as SEQ ID NO. 43839 is depicted, mitochondrial is mentioned; which is operable linke, too.

[12708] In another embodiment thereof the expression cassette does not comprise an additional transit peptide in case in Table I, application no. 2, in column 6 in the same line as SEQ ID NO. 43839 is depicted, non-targeted is mentioned.

[12709] In an embodiment the present invention relates to an expresssion cassette comprising a) a promoter, prefereably a promoter selected from the group consisting of Big35S, PCUbi, Super and USP, in particular Super; and b) the nucleic acid SEQ ID NO. 42502, or a homolog or fragment thereof, or a homolog thereof being depicted in Table I, application no. 2, column 8, in the same line as SEQ ID NO. 42502, preferably the coding region thereof, a homolog or a fragment thereof; which are operable linked.

[12710] In an embodiment thereof the expression cassette comprises in addition c) a nucleic acid molecule encoding a transit peptide, especially a plastidal transit petide in case in Table I, application no. 2, in column 6 in the same line as SEQ ID NO. 42502 is depicted, plastidic is mentioned, or a mitochondrial transit petide in case in Table I, application no. 2, in column 6 in the same line as SEQ ID NO. 42502 is depicted, mitochondrial is mentioned; which is operable linke, too.

[12711] In another embodiment thereof the expression cassette does not comprise an additional transit peptide in case in Table I, application no. 2, in column 6 in the same line as SEQ ID NO. 42502 is depicted, non-targeted is mentioned.

[12712] In an embodiment the present invention relates to an expresssion cassette comprising a) a promoter, prefereably a promoter selected from the group consisting of Big35S, PCUbi, Super and USP, in particular PCUbi; and b) the nucleic acid SEQ ID NO. 54804, or a homolog or fragment thereof, or a homolog thereof being depicted in Table I, application no. 2, column 8, in the same line as SEQ ID NO. 54804, preferably the coding region thereof, a homolog or a fragment thereof; which are operable linked.

[12713] In an embodiment thereof the expression cassette comprises in addition c) a nucleic acid molecule encoding a transit peptide, especially a plastidal transit petide in case in Table I, application no. 2, in column 6 in the same line as SEQ ID NO. 54804 is depicted, plastidic is mentioned, or a mitochondrial transit petide in case in Table I, application no. 2, in column 6 in the same line as SEQ ID NO. 54804 is depicted, mitochondrial is mentioned; which is operable linke, too.

[12714] In another embodiment thereof the expression cassette does not comprise an additional transit peptide in case in Table I, application no. 2, in column 6 in the same line as SEQ ID NO. 54804 is depicted, non-targeted is mentioned.

[12715] In an embodiment the present invention relates to an expresssion cassette comprising a) a promoter, prefereably a promoter selected from the group consisting of Big35S, PCUbi, Super and USP, in particular PCUbi; and b) the nucleic acid SEQ ID NO. 46751, or a homolog or fragment thereof, or a homolog thereof being depicted in Table I, application no. 2, column 8, in the same line as SEQ ID NO. 46751, preferably the coding region thereof, a homolog or a fragment thereof; which are operable linked.

[12716] In an embodiment thereof the expression cassette comprises in addition c) a nucleic acid molecule encoding a transit peptide, especially a plastidal transit petide in case in Table I, application no. 2, in column 6 in the same line as SEQ ID NO. 46751 is depicted, plastidic is mentioned, or a mitochondrial transit petide in case in Table I, application no. 2, in column 6 in the same line as SEQ ID NO. 46751 is depicted, mitochondrial is mentioned; which is operable linke, too.

[12717] In another embodiment thereof the expression cassette does not comprise an additional transit peptide in case in Table I, application no. 2, in column 6 in the same line as SEQ ID NO. 46751 is depicted, non-targeted is mentioned.

[12718] In an embodiment the present invention relates to an expresssion cassette comprising a) a promoter, prefereably a promoter selected from the group consisting of Big35S, PCUbi, Super and USP, in particular PCUbi; and b) the nucleic acid SEQ ID NO. 52660, or a homolog or fragment thereof, or a homolog thereof being depicted in Table I, application no. 2, column 8, in the same line as SEQ ID NO. 52660, preferably the coding region thereof, a homolog or a fragment thereof; which are operable linked.

[12719] In an embodiment thereof the expression cassette comprises in addition c) a nucleic acid molecule encoding a transit peptide, especially a plastidal transit petide in case in Table I, application no. 2, in column 6 in the same line as SEQ ID NO. 52660 is depicted, plastidic is mentioned, or a mitochondrial transit petide in case in Table I, application no. 2, in column 6 in the same line as SEQ ID NO. 52660 is depicted, mitochondrial is mentioned; which is operable linke, too.

[12720] In another embodiment thereof the expression cassette does not comprise an additional transit peptide in case in Table I, application no. 2, in column 6 in the same line as SEQ ID NO. 52660 is depicted, non-targeted is mentioned.

[12721] In an embodiment the present invention relates to an expresssion cassette comprising a) a promoter, prefereably a promoter selected from the group consisting of Big35S, PCUbi, Super and USP, in particular PCUbi; and b) the nucleic acid SEQ ID NO. 53189, or a homolog or fragment thereof, or a homolog thereof being depicted in Table I, application no. 2, column 8, in the same line as SEQ ID NO. 53189, preferably the coding region thereof, a homolog or a fragment thereof; which are operable linked.

[12722] In an embodiment thereof the expression cassette comprises in addition c) a nucleic acid molecule encoding a transit peptide, especially a plastidal transit petide in case in Table I, application no. 2, in column 6 in the same line as SEQ ID NO. 53189 is depicted, plastidic is mentioned, or a mitochondrial transit petide in case in Table I, application no. 2, in column 6 in the same line as SEQ ID NO. 53189 is depicted, mitochondrial is mentioned; which is operable linke, too.

[12723] In another embodiment thereof the expression cassette does not comprise an additional transit peptide in case in Table I, application no. 2, in column 6 in the same line as SEQ ID NO. 53189 is depicted, non-targeted is mentioned.

[12724] In an embodiment the present invention relates to an expresssion cassette comprising a) a promoter, prefereably a promoter selected from the group consisting of Big35S, PCUbi, Super and USP, in particular PCUbi; and b) the nucleic acid SEQ ID NO. 53456, or a homolog or fragment thereof, or a homolog thereof being depicted in Table I, application no. 2, column 8, in the same line as SEQ ID NO. 53456, preferably the coding region thereof, a homolog or a fragment thereof; which are operable linked.

[12725] In an embodiment thereof the expression cassette comprises in addition c) a nucleic acid molecule encoding a transit peptide, especially a plastidal transit petide in case in Table I, application no. 2, in column 6 in the same line as SEQ ID NO. 53456 is depicted, plastidic is mentioned, or a mitochondrial transit petide in case in Table I, application no. 2, in column 6 in the same line as SEQ ID NO. 53456 is depicted, mitochondrial is mentioned; which is operable linke, too.

[12726] In another embodiment thereof the expression cassette does not comprise an additional transit peptide in case in Table I, application no. 2, in column 6 in the same line as SEQ ID NO. 53456 is depicted, non-targeted is mentioned.

[12727] In an embodiment the present invention relates to an expresssion cassette comprising a) a promoter, prefereably a promoter selected from the group consisting of Big35S, PCUbi, Super and USP, in particular PCUbi; and b) the nucleic acid SEQ ID NO. 53608, or a homolog or fragment thereof, or a homolog thereof being depicted in Table I, application no. 2, column 8, in the same line as SEQ ID NO. 53608, preferably the coding region thereof, a homolog or a fragment thereof; which are operable linked.

[12728] In an embodiment thereof the expression cassette comprises in addition c) a nucleic acid molecule encoding a transit peptide, especially a plastidal transit petide in case in Table I, application no. 2, in column 6 in the same line as SEQ ID NO. 53608 is depicted, plastidic is mentioned, or a mitochondrial transit petide in case in Table I, application no. 2, in column 6 in the same line as SEQ ID NO. 53608 is depicted, mitochondrial is mentioned; which is operable linke, too.

[12729] In another embodiment thereof the expression cassette does not comprise an additional transit peptide in case in Table I, application no. 2, in column 6 in the same line as SEQ ID NO. 53608 is depicted, non-targeted is mentioned.

[12730] In an embodiment the present invention relates to an expresssion cassette comprising a) a promoter, prefereably a promoter selected from the group consisting of Big35S, PCUbi, Super and USP, in particular PCUbi; and b) the nucleic acid SEQ ID NO. 53878, or a homolog or fragment thereof, or a homolog thereof being depicted in Table I, application no. 2, column 8, in the same line as SEQ ID NO. 53878, preferably the coding region thereof, a homolog or a fragment thereof; which are operable linked.

[12731] In an embodiment thereof the expression cassette comprises in addition c) a nucleic acid molecule encoding a transit peptide, especially a plastidal transit petide in case in Table I, application no. 2, in column 6 in the same line as SEQ ID NO. 53878 is depicted, plastidic is mentioned, or a mitochondrial transit petide in case in Table I, application no. 2, in column 6 in the same line as SEQ ID NO. 53878 is depicted, mitochondrial is mentioned; which is operable linke, too.

[12732] In another embodiment thereof the expression cassette does not comprise an additional transit peptide in case in Table I, application no. 2, in column 6 in the same line as SEQ ID NO. 53878 is depicted, non-targeted is mentioned.

[12733] In an embodiment the present invention relates to an expresssion cassette comprising a) a promoter, prefereably a promoter selected from the group consisting of Big35S, PCUbi, Super and USP, in particular PCUbi; and b) the nucleic acid SEQ ID NO. 54337, or a homolog or fragment thereof, or a homolog thereof being depicted in Table I, application no. 2, column 8, in the same line as SEQ ID NO. 54337, preferably the coding region thereof, a homolog or a fragment thereof; which are operable linked.

[12734] In an embodiment thereof the expression cassette comprises in addition c) a nucleic acid molecule encoding a transit peptide, especially a plastidal transit petide in case in Table I, application no. 2, in column 6 in the same line as SEQ ID NO. 54337 is depicted, plastidic is mentioned, or a mitochondrial transit petide in case in Table I, application no. 2, in column 6 in the same line as SEQ ID NO. 54337 is depicted, mitochondrial is mentioned; which is operable linke, too.

[12735] In another embodiment thereof the expression cassette does not comprise an additional transit peptide in case in Table I, application no. 2, in column 6 in the same line as SEQ ID NO. 54337 is depicted, non-targeted is mentioned.

[12736] In an embodiment the present invention relates to an expresssion cassette comprising a) a promoter, prefereably a promoter selected from the group consisting of Big35S, PCUbi, Super and USP, in particular PCUbi; and b) the nucleic acid SEQ ID NO. 52364, or a homolog or fragment thereof, or a homolog thereof being depicted in Table I, application no. 2, column 8, in the same line as SEQ ID NO. 52364, preferably the coding region thereof, a homolog or a fragment thereof; which are operable linked.

[12737] In an embodiment thereof the expression cassette comprises in addition c) a nucleic acid molecule encoding a transit peptide, especially a plastidal transit petide in case in Table I, application no. 2, in column 6 in the same line as SEQ ID NO. 52364 is depicted, plastidic is mentioned, or a mitochondrial transit petide in case in Table I, application no. 2, in column 6 in the same line as SEQ ID NO. 52364 is depicted, mitochondrial is mentioned; which is operable linke, too.

[12738] In another embodiment thereof the expression cassette does not comprise an additional transit peptide in case in Table I, application no. 2, in column 6 in the same line as SEQ ID NO. 52364 is depicted, non-targeted is mentioned.

[12739] In an embodiment the present invention relates to an expresssion cassette comprising a) a promoter, prefereably a promoter selected from the group consisting of Big35S, PCUbi, Super and USP, in particular PCUbi; and b) the nucleic acid SEQ ID NO. 11423, or a homolog or fragment thereof, or a homolog thereof being depicted in Table I, application no. 2, column 8, in the same line as SEQ ID NO. 11423, preferably the coding region thereof, a homolog or a fragment thereof; which are operable linked.

[12740] In an embodiment thereof the expression cassette comprises in addition c) a nucleic acid molecule encoding a transit peptide, especially a plastidal transit petide in case in Table I, application no. 2, in column 6 in the same line as SEQ ID NO. 11423 is depicted, plastidic is mentioned, or a mitochondrial transit petide in case in Table I, application no. 2, in column 6 in the same line as SEQ ID NO. 11423 is depicted, mitochondrial is mentioned; which is operable linke, too.

[12741] In another embodiment thereof the expression cassette does not comprise an additional transit peptide in case in Table I, application no. 2, in column 6 in the same line as SEQ ID NO. 11423 is depicted, non-targeted is mentioned.

[12742] In an embodiment the present invention relates to an expresssion cassette comprising a) a promoter, prefereably a promoter selected from the group consisting of Big35S, PCUbi, Super and USP, in particular PCUbi; and b) the nucleic acid SEQ ID NO. 52246, or a homolog or fragment thereof, or a homolog thereof being depicted in Table I, application no. 2, column 8, in the same line as SEQ ID NO. 52246, preferably the coding region thereof, a homolog or a fragment thereof; which are operable linked.

[12743] In an embodiment thereof the expression cassette comprises in addition c) a nucleic acid molecule encoding a transit peptide, especially a plastidal transit petide in case in Table I, application no. 2, in column 6 in the same line as SEQ ID NO. 52246 is depicted, plastidic is mentioned, or a mitochondrial transit petide in case in Table I, application no. 2, in column 6 in the same line as SEQ ID NO. 52246 is depicted, mitochondrial is mentioned; which is operable linke, too.

[12744] In another embodiment thereof the expression cassette does not comprise an additional transit peptide in case in Table I, application no. 2, in column 6 in the same line as SEQ ID NO. 52246 is depicted, non-targeted is mentioned.

[12745] In an embodiment the present invention relates to an expresssion cassette comprising a) a promoter, prefereably a promoter selected from the group consisting of Big35S, PCUbi, Super and USP, in particular PCUbi; and b) the nucleic acid SEQ ID NO. 54897, or a homolog or fragment thereof, or a homolog thereof being depicted in Table I, application no. 2, column 8, in the same line as SEQ ID NO. 54897, preferably the coding region thereof, a homolog or a fragment thereof; which are operable linked.

[12746] In an embodiment thereof the expression cassette comprises in addition c) a nucleic acid molecule encoding a transit peptide, especially a plastidal transit petide in case in Table I, application no. 2, in column 6 in the same line as SEQ ID NO. 54897 is depicted, plastidic is mentioned, or a mitochondrial transit petide in case in Table I, application no. 2, in column 6 in the same line as SEQ ID NO. 54897 is depicted, mitochondrial is mentioned; which is operable linke, too.

[12747] In another embodiment thereof the expression cassette does not comprise an additional transit peptide in case in Table I, application no. 2, in column 6 in the same line as SEQ ID NO. 54897 is depicted, non-targeted is mentioned.

[12748] In an embodiment the present invention relates to an expresssion cassette comprising a) a promoter, prefereably a promoter selected from the group consisting of Big35S, PCUbi, Super and USP, in particular PCUbi; and b) the nucleic acid SEQ ID NO. 55063, or a homolog or fragment thereof, or a homolog thereof being depicted in Table I, application no. 2, column 8, in the same line as SEQ ID NO. 55063, preferably the coding region thereof, a homolog or a fragment thereof; which are operable linked.

[12749] In an embodiment thereof the expression cassette comprises in addition c) a nucleic acid molecule encoding a transit peptide, especially a plastidal transit petide in case in Table I, application no. 2, in column 6 in the same line as SEQ ID NO. 55063 is depicted, plastidic is mentioned, or a mitochondrial transit petide in case in Table I, application no. 2, in column 6 in the same line as SEQ ID NO. 55063 is depicted, mitochondrial is mentioned; which is operable linke, too.

[12750] In another embodiment thereof the expression cassette does not comprise an additional transit peptide in case in Table I, application no. 2, in column 6 in the same line as SEQ ID NO. 55063 is depicted, non-targeted is mentioned.

[12751] In an embodiment the present invention relates to an expresssion cassette comprising a) a promoter, prefereably a promoter selected from the group consisting of Big35S, PCUbi, Super and USP, in particular PCUbi; and b) the nucleic acid SEQ ID NO. 55379, or a homolog or fragment thereof, or a homolog thereof being depicted in Table I, application no. 2, column 8, in the same line as SEQ ID NO. 55379, preferably the coding region thereof, a homolog or a fragment thereof; which are operable linked.

[12752] In an embodiment thereof the expression cassette comprises in addition c) a nucleic acid molecule encoding a transit peptide, especially a plastidal transit petide in case in Table I, application no. 2, in column 6 in the same line as SEQ ID NO. 55379 is depicted, plastidic is mentioned, or a mitochondrial transit petide in case in Table I, application no. 2, in column 6 in the same line as SEQ ID NO. 55379 is depicted, mitochondrial is mentioned; which is operable linke, too.

[12753] In another embodiment thereof the expression cassette does not comprise an additional transit peptide in case in Table I, application no. 2, in column 6 in the same line as SEQ ID NO. 55379 is depicted, non-targeted is mentioned.

[12754] In an embodiment the present invention relates to an expresssion cassette comprising a) a promoter, prefereably a promoter selected from the group consisting of Big35S, PCUbi, Super and USP, in particular PCUbi; and b) the nucleic acid SEQ ID NO. 11471, or a homolog or fragment thereof, or a homolog thereof being depicted in Table I, application no. 2, column 8, in the same line as SEQ ID NO. 11471, preferably the coding region thereof, a homolog or a fragment thereof; which are operable linked.

[12755] In an embodiment thereof the expression cassette comprises in addition c) a nucleic acid molecule encoding a transit peptide, especially a plastidal transit petide in case in Table I, application no. 2, in column 6 in the same line as SEQ ID NO. 11471 is depicted, plastidic is mentioned, or a mitochondrial transit petide in case in Table I, application no. 2, in column 6 in the same line as SEQ ID NO. 11471 is depicted, mitochondrial is mentioned; which is operable linke, too.

[12756] In another embodiment thereof the expression cassette does not comprise an additional transit peptide in case in Table I, application no. 2, in column 6 in the same line as SEQ ID NO. 11471 is depicted, non-targeted is mentioned.

[12757] In an embodiment the present invention relates to an expresssion cassette comprising a) a promoter, prefereably a promoter selected from the group consisting of Big35S, PCUbi, Super and USP, in particular PCUbi; and b) the nucleic acid SEQ ID NO. 55385, or a homolog or fragment thereof, or a homolog thereof being depicted in Table I, application no. 2, column 8, in the same line as SEQ ID NO. 55385, preferably the coding region thereof, a homolog or a fragment thereof; which are operable linked.

[12758] In an embodiment thereof the expression cassette comprises in addition c) a nucleic acid molecule encoding a transit peptide, especially a plastidal transit petide in case in Table I, application no. 2, in column 6 in the same line as SEQ ID NO. 55385 is depicted, plastidic is mentioned, or a mitochondrial transit petide in case in Table I, application no. 2, in column 6 in the same line as SEQ ID NO. 55385 is depicted, mitochondrial is mentioned; which is operable linke, too.

[12759] In another embodiment thereof the expression cassette does not comprise an additional transit peptide in case in Table I, application no. 2, in column 6 in the same line as SEQ ID NO. 55385 is depicted, non-targeted is mentioned.

[12760] In an embodiment the present invention relates to an expresssion cassette comprising a) a promoter, prefereably a promoter selected from the group consisting of Big35S, PCUbi, Super and USP, in particular PCUbi; and b) the nucleic acid SEQ ID NO. 55771, or a homolog or fragment thereof, or a homolog thereof being depicted in Table I, application no. 2, column 8, in the same line as SEQ ID NO. 55771, preferably the coding region thereof, a homolog or a fragment thereof; which are operable linked.

[12761] In an embodiment thereof the expression cassette comprises in addition c) a nucleic acid molecule encoding a transit peptide, especially a plastidal transit petide in case in Table I, application no. 2, in column 6 in the same line as SEQ ID NO. 55771 is depicted, plastidic is mentioned, or a mitochondrial transit petide in case in Table I, application no. 2, in column 6 in the same line as SEQ ID NO. 55771 is depicted, mitochondrial is mentioned; which is operable linke, too.

[12762] In another embodiment thereof the expression cassette does not comprise an additional transit peptide in case in Table I, application no. 2, in column 6 in the same line as SEQ ID NO. 55771 is depicted, non-targeted is mentioned.

[12763] In an embodiment the present invention relates to an expresssion cassette comprising a) a promoter, prefereably a promoter selected from the group consisting of Big35S, PCUbi, Super and USP, in particular PCUbi; and b) the nucleic acid SEQ ID NO. 55978, or a homolog or fragment thereof, or a homolog thereof being depicted in Table I, application no. 2, column 8, in the same line as SEQ ID NO. 55978, preferably the coding region thereof, a homolog or a fragment thereof; which are operable linked.

[12764] In an embodiment thereof the expression cassette comprises in addition c) a nucleic acid molecule encoding a transit peptide, especially a plastidal transit petide in case in Table I, application no. 2, in column 6 in the same line as SEQ ID NO. 55978 is depicted, plastidic is mentioned, or a mitochondrial transit petide in case in Table I, application no. 2, in column 6 in the same line as SEQ ID NO. 55978 is depicted, mitochondrial is mentioned; which is operable linke, too.

[12765] In another embodiment thereof the expression cassette does not comprise an additional transit peptide in case in Table I, application no. 2, in column 6 in the same line as SEQ ID NO. 55978 is depicted, non-targeted is mentioned.

[12766] In an embodiment the present invention relates to an expresssion cassette comprising a) a promoter, prefereably a promoter selected from the group consisting of Big35S, PCUbi, Super and USP, in particular PCUbi; and b) the nucleic acid SEQ ID NO. 68413, or a homolog or fragment thereof, or a homolog thereof being depicted in Table I, application no. 2, column 8, in the same line as SEQ ID NO. 68413, preferably the coding region thereof, a homolog or a fragment thereof; which are operable linked.

[12767] In an embodiment thereof the expression cassette comprises in addition c) a nucleic acid molecule encoding a transit peptide, especially a plastidal transit petide in case in Table I, application no. 2, in column 6 in the same line as SEQ ID NO. 68413 is depicted, plastidic is mentioned, or a mitochondrial transit petide in case in Table I, application no. 2, in column 6 in the same line as SEQ ID NO. 68413 is depicted, mitochondrial is mentioned; which is operable linke, too.

[12768] In another embodiment thereof the expression cassette does not comprise an additional transit peptide in case in Table I, application no. 2, in column 6 in the same line as SEQ ID NO. 68413 is depicted, non-targeted is mentioned.

[12769] In an embodiment the present invention relates to an expresssion cassette comprising a) a promoter, prefereably a promoter selected from the group consisting of Big35S, PCUbi, Super and USP, in particular PCUbi; and b) the nucleic acid SEQ ID NO. 54452, or a homolog or fragment thereof, or a homolog thereof being depicted in Table I, application no. 2, column 8, in the same line as SEQ ID NO. 54452, preferably the coding region thereof, a homolog or a fragment thereof; which are operable linked.

[12770] In an embodiment thereof the expression cassette comprises in addition c) a nucleic acid molecule encoding a transit peptide, especially a plastidal transit petide in case in Table I, application no. 2, in column 6 in the same line as SEQ ID NO. 54452 is depicted, plastidic is mentioned, or a mitochondrial transit petide in case in Table I, application no. 2, in column 6 in the same line as SEQ ID NO. 54452 is depicted, mitochondrial is mentioned; which is operable linke, too.

[12771] In another embodiment thereof the expression cassette does not comprise an additional transit peptide in case in Table I, application no. 2, in column 6 in the same line as SEQ ID NO. 54452 is depicted, non-targeted is mentioned.

[12772] In an embodiment the present invention relates to an expresssion cassette comprising a) a promoter, prefereably a promoter selected from the group consisting of Big35S, PCUbi, Super and USP, in particular PCUbi; and b) the nucleic acid SEQ ID NO. 49828, or a homolog or fragment thereof, or a homolog thereof being depicted in Table I, application no. 2, column 8, in the same line as SEQ ID NO. 49828, preferably the coding region thereof, a homolog or a fragment thereof; which are operable linked.

[12773] In an embodiment thereof the expression cassette comprises in addition c) a nucleic acid molecule encoding a transit peptide, especially a plastidal transit petide in case in Table I, application no. 2, in column 6 in the same line as SEQ ID NO. 49828 is depicted, plastidic is mentioned, or a mitochondrial transit petide in case in Table I, application no. 2, in column 6 in the same line as SEQ ID NO. 49828 is depicted, mitochondrial is mentioned; which is operable linke, too.

[12774] In another embodiment thereof the expression cassette does not comprise an additional transit peptide in case in Table I, application no. 2, in column 6 in the same line as SEQ ID NO. 49828 is depicted, non-targeted is mentioned.

[12775] In an embodiment the present invention relates to an expresssion cassette comprising a) a promoter, prefereably a promoter selected from the group consisting of Big35S, PCUbi, Super and USP, in particular PCUbi; and b) the nucleic acid SEQ ID NO. 47076, or a homolog or fragment thereof, or a homolog thereof being depicted in Table I, application no. 2, column 8, in the same line as SEQ ID NO. 47076, preferably the coding region thereof, a homolog or a fragment thereof; which are operable linked.

[12776] In an embodiment thereof the expression cassette comprises in addition c) a nucleic acid molecule encoding a transit peptide, especially a plastidal transit petide in case in Table I, application no. 2, in column 6 in the same line as SEQ ID NO. 47076 is depicted, plastidic is mentioned, or a mitochondrial transit petide in case in Table I, application no. 2, in column 6 in the same line as SEQ ID NO. 47076 is depicted, mitochondrial is mentioned; which is operable linke, too.

[12777] In another embodiment thereof the expression cassette does not comprise an additional transit peptide in case in Table I, application no. 2, in column 6 in the same line as SEQ ID NO. 47076 is depicted, non-targeted is mentioned.

[12778] In an embodiment the present invention relates to an expresssion cassette comprising a) a promoter, prefereably a promoter selected from the group consisting of Big35S, PCUbi, Super and USP, in particular PCUbi; and b) the nucleic acid SEQ ID NO. 47105, or a homolog or fragment thereof, or a homolog thereof being depicted in Table I, application no. 2, column 8, in the same line as SEQ ID NO. 47105, preferably the coding region thereof, a homolog or a fragment thereof; which are operable linked.

[12779] In an embodiment thereof the expression cassette comprises in addition c) a nucleic acid molecule encoding a transit peptide, especially a plastidal transit petide in case in Table I, application no. 2, in column 6 in the same line as SEQ ID NO. 47105 is depicted, plastidic is mentioned, or a mitochondrial transit petide in case in Table I, application no. 2, in column 6 in the same line as SEQ ID NO. 47105 is depicted, mitochondrial is mentioned; which is operable linke, too.

[12780] In another embodiment thereof the expression cassette does not comprise an additional transit peptide in case in Table I, application no. 2, in column 6 in the same line as SEQ ID NO. 47105 is depicted, non-targeted is mentioned.

[12781] In an embodiment the present invention relates to an expresssion cassette comprising a) a promoter, prefereably a promoter selected from the group consisting of Big35S, PCUbi, Super and USP, in particular PCUbi; and b) the nucleic acid SEQ ID NO. 47159, or a homolog or fragment thereof, or a homolog thereof being depicted in Table I, application no. 2, column 8, in the same line as SEQ ID NO. 47159, preferably the coding region thereof, a homolog or a fragment thereof; which are operable linked.

[12782] In an embodiment thereof the expression cassette comprises in addition c) a nucleic acid molecule encoding a transit peptide, especially a plastidal transit petide in case in Table I, application no. 2, in column 6 in the same line as SEQ ID NO. 47159 is depicted, plastidic is mentioned, or a mitochondrial transit petide in case in Table I, application no. 2, in column 6 in the same line as SEQ ID NO. 47159 is depicted, mitochondrial is mentioned; which is operable linke, too.

[12783] In another embodiment thereof the expression cassette does not comprise an additional transit peptide in case in Table I, application no. 2, in column 6 in the same line as SEQ ID NO. 47159 is depicted, non-targeted is mentioned.

[12784] In an embodiment the present invention relates to an expresssion cassette comprising a) a promoter, prefereably a promoter selected from the group consisting of Big35S, PCUbi, Super and USP, in particular PCUbi; and b) the nucleic acid SEQ ID NO. 47526, or a homolog or fragment thereof, or a homolog thereof being depicted in Table I, application no. 2, column 8, in the same line as SEQ ID NO. 47526, preferably the coding region thereof, a homolog or a fragment thereof; which are operable linked.

[12785] In an embodiment thereof the expression cassette comprises in addition c) a nucleic acid molecule encoding a transit peptide, especially a plastidal transit petide in case in Table I, application no. 2, in column 6 in the same line as SEQ ID NO. 47526 is depicted, plastidic is mentioned, or a mitochondrial transit petide in case in Table I, application no. 2, in column 6 in the same line as SEQ ID NO. 47526 is depicted, mitochondrial is mentioned; which is operable linke, too.

[12786] In another embodiment thereof the expression cassette does not comprise an additional transit peptide in case in Table I, application no. 2, in column 6 in the same line as SEQ ID NO. 47526 is depicted, non-targeted is mentioned.

[12787] In an embodiment the present invention relates to an expresssion cassette comprising a) a promoter, prefereably a promoter selected from the group consisting of Big35S, PCUbi, Super and USP, in particular PCUbi; and b) the nucleic acid SEQ ID NO. 47566, or a homolog or fragment thereof, or a homolog thereof being depicted in Table I, application no. 2, column 8, in the same line as SEQ ID NO. 47566, preferably the coding region thereof, a homolog or a fragment thereof; which are operable linked.

[12788] In an embodiment thereof the expression cassette comprises in addition c) a nucleic acid molecule encoding a transit peptide, especially a plastidal transit petide in case in Table I, application no. 2, in column 6 in the same line as SEQ ID NO. 47566 is depicted, plastidic is mentioned, or a mitochondrial transit petide in case in Table I, application no. 2, in column 6 in the same line as SEQ ID NO. 47566 is depicted, mitochondrial is mentioned; which is operable linke, too.

[12789] In another embodiment thereof the expression cassette does not comprise an additional transit peptide in case in Table I, application no. 2, in column 6 in the same line as SEQ ID NO. 47566 is depicted, non-targeted is mentioned.

[12790] In an embodiment the present invention relates to an expresssion cassette comprising a) a promoter, prefereably a promoter selected from the group consisting of Big35S, PCUbi, Super and USP, in particular PCUbi; and b) the nucleic acid SEQ ID NO. 48138, or a homolog or fragment thereof, or a homolog thereof being depicted in Table I, application no. 2, column 8, in the same line as SEQ ID NO. 48138, preferably the coding region thereof, a homolog or a fragment thereof; which are operable linked.

[12791] In an embodiment thereof the expression cassette comprises in addition c) a nucleic acid molecule encoding a transit peptide, especially a plastidal transit petide in case in Table I, application no. 2, in column 6 in the same line as SEQ ID NO. 48138 is depicted, plastidic is mentioned, or a mitochondrial transit petide in case in Table I, application no. 2, in column 6 in the same line as SEQ ID NO. 48138 is depicted, mitochondrial is mentioned; which is operable linke, too.

[12792] In another embodiment thereof the expression cassette does not comprise an additional transit peptide in case in Table I, application no. 2, in column 6 in the same line as SEQ ID NO. 48138 is depicted, non-targeted is mentioned.

[12793] In an embodiment the present invention relates to an expresssion cassette comprising a) a promoter, prefereably a promoter selected from the group consisting of Big35S, PCUbi, Super and USP, in particular PCUbi; and b) the nucleic acid SEQ ID NO. 49143, or a homolog or fragment thereof, or a homolog thereof being depicted in Table I, application no. 2, column 8, in the same line as SEQ ID NO. 49143, preferably the coding region thereof, a homolog or a fragment thereof; which are operable linked.

[12794] In an embodiment thereof the expression cassette comprises in addition c) a nucleic acid molecule encoding a transit peptide, especially a plastidal transit petide in case in Table I, application no. 2, in column 6 in the same line as SEQ ID NO. 49143 is depicted, plastidic is mentioned, or a mitochondrial transit petide in case in Table I, application no. 2, in column 6 in the same line as SEQ ID NO. 49143 is depicted, mitochondrial is mentioned; which is operable linke, too.

[12795] In another embodiment thereof the expression cassette does not comprise an additional transit peptide in case in Table I, application no. 2, in column 6 in the same line as SEQ ID NO. 49143 is depicted, non-targeted is mentioned.

[12796] In an embodiment the present invention relates to an expresssion cassette comprising a) a promoter, prefereably a promoter selected from the group consisting of Big35S, PCUbi, Super and USP, in particular PCUbi and b) the nucleic acid SEQ ID NO. 52634, or a homolog or fragment thereof, or a homolog thereof being depicted in Table I, application no. 2, column 8, in the same line as SEQ ID NO. 52634, preferably the coding region thereof, a homolog or a fragment thereof; which are operable linked.

[12797] In an embodiment thereof the expression cassette comprises in addition c) a nucleic acid molecule encoding a transit peptide, especially a plastidal transit petide in case in Table I, application no. 2, in column 6 in the same line as SEQ ID NO. 52634 is depicted, plastidic is mentioned, or a mitochondrial transit petide in case in Table I, application no. 2, in column 6 in the same line as SEQ ID NO. 52634 is depicted, mitochondrial is mentioned; which is operable linke, too.

[12798] In another embodiment thereof the expression cassette does not comprise an additional transit peptide in case in Table I, application no. 2, in column 6 in the same line as SEQ ID NO. 52634 is depicted, non-targeted is mentioned.

[12799] In an embodiment the present invention relates to an expresssion cassette comprising a) a promoter, prefereably a promoter selected from the group consisting of Big35S, PCUbi, Super and USP, in particular PCUbi; and b) the nucleic acid SEQ ID NO. 49800, or a homolog or fragment thereof, or a homolog thereof being depicted in Table I, application no. 2, column 8, in the same line as SEQ ID NO. 49800, preferably the coding region thereof, a homolog or a fragment thereof; which are operable linked.

[12800] In an embodiment thereof the expression cassette comprises in addition c) a nucleic acid molecule encoding a transit peptide, especially a plastidal transit petide in case in Table I, application no. 2, in column 6 in the same line as SEQ ID NO. 49800 is depicted, plastidic is mentioned, or a mitochondrial transit petide in case in Table I, application no. 2, in column 6 in the same line as SEQ ID NO. 49800 is depicted, mitochondrial is mentioned; which is operable linke, too.

[12801] In another embodiment thereof the expression cassette does not comprise an additional transit peptide in case in Table I, application no. 2, in column 6 in the same line as SEQ ID NO. 49800 is depicted, non-targeted is mentioned.

[12802] In an embodiment the present invention relates to an expresssion cassette comprising a) a promoter, prefereably a promoter selected from the group consisting of Big35S, PCUbi, Super and USP, in particularPCUbi; and b) the nucleic acid SEQ ID NO. 56514, or a homolog or fragment thereof, or a homolog thereof being depicted in Table I, application no. 2, column 8, in the same line as SEQ ID NO. 56514, preferably the coding region thereof, a homolog or a fragment thereof; which are operable linked.

[12803] In an embodiment thereof the expression cassette comprises in addition c) a nucleic acid molecule encoding a transit peptide, especially a plastidal transit petide in case in Table I, application no. 2, in column 6 in the same line as SEQ ID NO. 56514 is depicted, plastidic is mentioned, or a mitochondrial transit petide in case in Table I, application no. 2, in column 6 in the same line as SEQ ID NO. 56514 is depicted, mitochondrial is mentioned; which is operable linke, too.

[12804] In another embodiment thereof the expression cassette does not comprise an additional transit peptide in case in Table I, application no. 2, in column 6 in the same line as SEQ ID NO. 56514 is depicted, non-targeted is mentioned.

[12805] In an embodiment the present invention relates to an expresssion cassette comprising a) a promoter, prefereably a promoter selected from the group consisting of Big35S, PCUbi, Super and USP, in particular PCUbi; and b) the nucleic acid SEQ ID NO. 50070, or a homolog or fragment thereof, or a homolog thereof being depicted in Table I, application no. 2, column 8, in the same line as SEQ ID NO. 50070, preferably the coding region thereof, a homolog or a fragment thereof; which are operable linked.

[12806] In an embodiment thereof the expression cassette comprises in addition c) a nucleic acid molecule encoding a transit peptide, especially a plastidal transit petide in case in Table I, application no. 2, in column 6 in the same line as SEQ ID NO. 50070 is depicted, plastidic is mentioned, or a mitochondrial transit petide in case in Table I, application no. 2, in column 6 in the same line as SEQ ID NO. 50070 is depicted, mitochondrial is mentioned; which is operable linke, too.

[12807] In another embodiment thereof the expression cassette does not comprise an additional transit peptide in case in Table I, application no. 2, in column 6 in the same line as SEQ ID NO. 50070 is depicted, non-targeted is mentioned.

[12808] In an embodiment the present invention relates to an expresssion cassette comprising a) a promoter, prefereably a promoter selected from the group consisting of Big35S, PCUbi, Super and USP, in particular PCUbi; and b) the nucleic acid SEQ ID NO. 50104, or a homolog or fragment thereof, or a homolog thereof being depicted in Table I, application no. 2, column 8, in the same line as SEQ ID NO. 50104, preferably the coding region thereof, a homolog or a fragment thereof; which are operable linked.

[12809] In an embodiment thereof the expression cassette comprises in addition c) a nucleic acid molecule encoding a transit peptide, especially a plastidal transit petide in case in Table I, application no. 2, in column 6 in the same line as SEQ ID NO. 50104 is depicted, plastidic is mentioned, or a mitochondrial transit petide in case in Table I, application no. 2, in column 6 in the same line as SEQ ID NO. 50104 is depicted, mitochondrial is mentioned; which is operable linke, too.

[12810] In another embodiment thereof the expression cassette does not comprise an additional transit peptide in case in Table I, application no. 2, in column 6 in the same line as SEQ ID NO. 50104 is depicted, non-targeted is mentioned.

[12811] In an embodiment the present invention relates to an expresssion cassette comprising a) a promoter, prefereably a promoter selected from the group consisting of Big35S, PCUbi, Super and USP, in particular PCUbi; and b) the nucleic acid SEQ ID NO. 50339, or a homolog or fragment thereof, or a homolog thereof being depicted in Table I, application no. 2, column 8, in the same line as SEQ ID NO. 50339, preferably the coding region thereof, a homolog or a fragment thereof; which are operable linked.

[12812] In an embodiment thereof the expression cassette comprises in addition c) a nucleic acid molecule encoding a transit peptide, especially a plastidal transit petide in case in Table I, application no. 2, in column 6 in the same line as SEQ ID NO. 50339 is depicted, plastidic is mentioned, or a mitochondrial transit petide in case in Table I, application no. 2, in column 6 in the same line as SEQ ID NO. 50339 is depicted, mitochondrial is mentioned; which is operable linke, too.

[12813] In another embodiment thereof the expression cassette does not comprise an additional transit peptide in case in Table I, application no. 2, in column 6 in the same line as SEQ ID NO. 50339 is depicted, non-targeted is mentioned.

[12814] In an embodiment the present invention relates to an expresssion cassette comprising a) a promoter, prefereably a promoter selected from the group consisting of Big35S, PCUbi, Super and USP, in particular PCUbi; and b) the nucleic acid SEQ ID NO. 50713, or a homolog or fragment thereof, or a homolog thereof being depicted in Table I, application no. 2, column 8, in the same line as SEQ ID NO. 50713, preferably the coding region thereof, a homolog or a fragment thereof; which are operable linked.

[12815] In an embodiment thereof the expression cassette comprises in addition c) a nucleic acid molecule encoding a transit peptide, especially a plastidal transit petide in case in Table I, application no. 2, in column 6 in the same line as SEQ ID NO. 50713 is depicted, plastidic is mentioned, or a mitochondrial transit petide in case in Table I, application no. 2, in column 6 in the same line as SEQ ID NO. 50713 is depicted, mitochondrial is mentioned; which is operable linke, too.

[12816] In another embodiment thereof the expression cassette does not comprise an additional transit peptide in case in Table I, application no. 2, in column 6 in the same line as SEQ ID NO. 50713 is depicted, non-targeted is mentioned.

[12817] In an embodiment the present invention relates to an expresssion cassette comprising a) a promoter, prefereably a promoter selected from the group consisting of Big35S, PCUbi, Super and USP, in particular PCUbi; and b) the nucleic acid SEQ ID NO. 50950, or a homolog or fragment thereof, or a homolog thereof being depicted in Table I, application no. 2, column 8, in the same line as SEQ ID NO. 50950, preferably the coding region thereof, a homolog or a fragment thereof; which are operable linked.

[12818] In an embodiment thereof the expression cassette comprises in addition c) a nucleic acid molecule encoding a transit peptide, especially a plastidal transit petide in case in Table I, application no. 2, in column 6 in the same line as SEQ ID NO. 50950 is depicted, plastidic is mentioned, or a mitochondrial transit petide in case in Table I, application no. 2, in column 6 in the same line as SEQ ID NO. 50950 is depicted, mitochondrial is mentioned; which is operable linke, too.

[12819] In another embodiment thereof the expression cassette does not comprise an additional transit peptide in case in Table I, application no. 2, in column 6 in the same line as SEQ ID NO. 50950 is depicted, non-targeted is mentioned.

[12820] In an embodiment the present invention relates to an expresssion cassette comprising a) a promoter, prefereably a promoter selected from the group consisting of Big35S, PCUbi, Super and USP, in particular PCUbi; and b) the nucleic acid SEQ ID NO. 51198, or a homolog or fragment thereof, or a homolog thereof being depicted in Table I, application no. 2, column 8, in the same line as SEQ ID NO. 51198, preferably the coding region thereof, a homolog or a fragment thereof; which are operable linked.

[12821] In an embodiment thereof the expression cassette comprises in addition c) a nucleic acid molecule encoding a transit peptide, especially a plastidal transit petide in case in Table I, application no. 2, in column 6 in the same line as SEQ ID NO. 51198 is depicted, plastidic is mentioned, or a mitochondrial transit petide in case in Table I, application no. 2, in column 6 in the same line as SEQ ID NO. 51198 is depicted, mitochondrial is mentioned; which is operable linke, too.

[12822] In another embodiment thereof the expression cassette does not comprise an additional transit peptide in case in Table I, application no. 2, in column 6 in the same line as SEQ ID NO. 51198 is depicted, non-targeted is mentioned.

[12823] In an embodiment the present invention relates to an expresssion cassette comprising a) a promoter, prefereably a promoter selected from the group consisting of Big35S, PCUbi, Super and USP, in particular PCUbi; and b) the nucleic acid SEQ ID NO. 51268, or a homolog or fragment thereof, or a homolog thereof being depicted in Table I, application no. 2, column 8, in the same line as SEQ ID NO. 51268, preferably the coding region thereof, a homolog or a fragment thereof; which are operable linked.

[12824] In an embodiment thereof the expression cassette comprises in addition c) a nucleic acid molecule encoding a transit peptide, especially a plastidal transit petide in case in Table I, application no. 2, in column 6 in the same line as SEQ ID NO. 51268 is depicted, plastidic is mentioned, or a mitochondrial transit petide in case in Table I, application no. 2, in column 6 in the same line as SEQ ID NO. 51268 is depicted, mitochondrial is mentioned; which is operable linke, too.

[12825] In another embodiment thereof the expression cassette does not comprise an additional transit peptide in case in Table I, application no. 2, in column 6 in the same line as SEQ ID NO. 51268 is depicted, non-targeted is mentioned.

[12826] In an embodiment the present invention relates to an expresssion cassette comprising a) a promoter, prefereably a promoter selected from the group consisting of Big35S, PCUbi, Super and USP, in particular PCUbi; and b) the nucleic acid SEQ ID NO. 51632, or a homolog or fragment thereof, or a homolog thereof being depicted in Table I, application no. 2, column 8, in the same line as SEQ ID NO. 51632, preferably the coding region thereof, a homolog or a fragment thereof; which are operable linked.

[12827] In an embodiment thereof the expression cassette comprises in addition c) a nucleic acid molecule encoding a transit peptide, especially a plastidal transit petide in case in Table I, application no. 2, in column 6 in the same line as SEQ ID NO. 51632 is depicted, plastidic is mentioned, or a mitochondrial transit petide in case in Table I, application no. 2, in column 6 in the same line as SEQ ID NO. 51632 is depicted, mitochondrial is mentioned; which is operable linke, too.

[12828] In another embodiment thereof the expression cassette does not comprise an additional transit peptide in case in Table I, application no. 2, in column 6 in the same line as SEQ ID NO. 51632 is depicted, non-targeted is mentioned.

[12829] In an embodiment the present invention relates to an expresssion cassette comprising a) a promoter, prefereably a promoter selected from the group consisting of Big35S, PCUbi, Super and USP, in particular PCUbi; and b) the nucleic acid SEQ ID NO. 49342, or a homolog or fragment thereof, or a homolog thereof being depicted in Table I, application no. 2, column 8, in the same line as SEQ ID NO. 49342, preferably the coding region thereof, a homolog or a fragment thereof; which are operable linked.

[12830] In an embodiment thereof the expression cassette comprises in addition c) a nucleic acid molecule encoding a transit peptide, especially a plastidal transit petide in case in Table I, application no. 2, in column 6 in the same line as SEQ ID NO. 49342 is depicted, plastidic is mentioned, or a mitochondrial transit petide in case in Table I, application no. 2, in column 6 in the same line as SEQ ID NO. 49342 is depicted, mitochondrial is mentioned; which is operable linke, too.

[12831] In another embodiment thereof the expression cassette does not comprise an additional transit peptide in case in Table I, application no. 2, in column 6 in the same line as SEQ ID NO. 49342 is depicted, non-targeted is mentioned.

[12832] [0165.1.1.2] to [0170.1.1.2] for the disclosure of these paragraphs see [0165.1.1.1] to [0170.1.1.1] above.

[12833] The invention further provides a vector, comprising a nucleic acid molecule comprising 1) a nucleic acid molecule selected from the group consisting of:
[12834] (a) a nucleic acid molecule encoding a polypeptide shown in Table II, column 5 or 8, application no. 2, preferably shown in Table II A, application no. 2, in column 5, or in Table II A, application no. 2, column 8, or in Table II B, application no. 2, column 8, or a homolog or a fragment thereof;

[12835] (b) a nucleic acid molecule shown in Table I, application no. 2, column 5 or 8, preferably shown in Table I A, application no. 2, in column 5, or in Table I A, application no. 2, column 8, or in Table I B, application no. 2, column 8, preferably the coding region thereof, or a homolog or a fragment thereof;
[12836] (c) a nucleic acid molecule, which, as a result of the degeneracy of the genetic code, can be derived from a polypeptide sequence depicted in column 5 or 8 of Table II, application no. 2, preferably shown in Table II A, application no. 2, in column 5, or in Table II A, application no. 2, column 8, or in Table II B, application no.,2, column 8;
[12837] (d) a nucleic acid molecule having at least 30% identity, preferably at least 40%, 50%, 60%, 70%, 75%, 80%, 85%, 90%, 95%, 96%, 97%, 98%, 99%, 99.5%, with the nucleic acid molecule sequence of a polynucleotide comprising the nucleic acid molecule shown in column 5 or 8 of Table I, application no. 2, preferably shown in Table I A, application no. 2, in column 5, or in Table I A, application no. 2, column 8, or in Table I B, application no. 2,column 8, preferably the coding region thereof;
[12838] (e) a nucleic acid molecule encoding a polypeptide having at least 30% identity, preferably at least 40%, 50% 60%, 70%, 75%, 80%, 85%, 90%, 95%, 96%, 97%, 98%, 99%, 99.5%, identity with the amino acid sequence of the polypeptide encoded by the nucleic acid molecule of (a), (b), (c), or (d);
[12839] (f) a nucleic acid molecule which hybridizes with a nucleic acid molecule of (a), (b), (c), (d), or (e) under under stringent hybridisation conditions;
[12840] (g) a nucleic acid molecule encoding a polypeptide which can be isolated with the aid of monoclonal or polyclonal antibodies made against a polypeptide encoded by one of the nucleic acid molecules of (a), (b), (c), (d), (e) or (f);
[12841] (h) a nucleic acid molecule encoding a polypeptide comprising the consensus sequence or one or more polypeptide motifs as shown in column 8 of Table IV, application no. 2;
[12842] (i) a nucleic acid molecule encoding a polypeptide having the activity represented by a protein as depicted in column 5 of Table II, application no. 2;
[12843] (j) a nucleic acid molecule comprising a polynucleotide which is obtained by amplifying a cDNA library or a genomic library using the primers in Table III, application no. 2, column 8;
[12844] and
[12845] (k) nucleic acid molecule which is obtainable by screening a suitable nucleic acid library, especially a cDNA library and/or a genomic library, under stringent hybridization conditions with a probe comprising one of the sequences of the nucleic acid molecule of (a), (b), (c), (d), (e), (f), (g), (h), (i) or (j) or with a fragment thereof having at least 15 nt, preferably 20 nt, 30 nt, 50 nt, 100 nt, 200 nt, 500 nt, 1000 nt, 1500 nt, 2000 nt or 3000 nt of the nucleic acid molecule complementary to a nucleic acid sequence characterized in (a), (b), (c), (d), (e), (f), (g), (h), (i) or (j);
   or a nucleic acid molecule comprising a sequence which is complementary thereto.
   (All the references to Tables I to IV are references to the corresponding lines of Tables I to IV.)

[12846] In a preferred embodiment of said vector said nucleic acid molecule according to 1 (a), (b), (c), (d), (e), (f), (g), (h), (i), (j) or (k) encodes a polypeptide which has the activity of the respective polypeptide represented by a protein comprising a polypeptide as depicted in the respective line in column 5 of Table II, application no. 2.

[12847] In another preferred embodiment of said vector said nucleic acid molecule according to 1 (a), (b), (c), (d), (e), (f), (g), (h), (i), (j) or (k) confers a generation or an increase of the respective fine chemical in a non-human organism or a part thereof as compared to a corresponding wild-type non-human organism or part thereof.

[12848] In another preferred embodiment of said vector said nucleic acid molecule according to 1 (a), (b), (c), (d), (e), (f), (g), (h), (i), (j) or (k) encodes a polypeptide which has the activity of the respective polypeptide represented by a protein as depicted in the respective line in column 5 of Table II, application no. 2, and confers a generation or an increase of the respective fine chemical in a non-human organism or a part thereof as compared to a corresponding wild-type non-human organism or part thereof.

[12849] In another embodiment thereof said vector comprises beneath said nucleic acid molecule according to 1 (a), (b), (c), (d), (e), (f), (g), (h), (i), (j) or (k), a promoter, prefereably a promoter selected from the group consisting of Big35S, PCUbi, Super and USP, which are operable linked.

[12850] In a preferred embodiment thereof said vector comprises beneath said nucleic acid molecule according to 1 (a), (b), (c), (d), (e), (f), (g), (h), (i), (j) or (k), a promoter, prefereably a promoter selected from the group consisting of Big35S, PCUbi, Super and USP, which are operable linked; and said nucleic acid molecule according to 1 (a), (b), (c), (d), (e), (f), (g), (h), (i), (j) or (k) encodes a polypeptide which has the activity of the respective polypeptide represented by a protein comprising a polypeptide as depicted in the respective line in column 5 of Table II, application no. 2.

[12851] In another preferred embodiment thereof said vector comprises beneath said nucleic acid molecule according to 1 (a), (b), (c), (d), (e), (f), (g), (h), (i), (j) or (k), a promoter, prefereably a promoter selected from the group consisting of Big35S, PCUbi, Super and USP, which are operable linked; and said nucleic acid molecule according to 1 (a), (b), (c), (d), (e), (f), (g), (h), (i), (j) or (k) confers a generation or an increase of the respective fine chemical in a non-human organism or a part thereof as compared to a corresponding wild-type non-human organism or part thereof.

[12852] In another preferred embodiment thereof said vector comprises beneath said nucleic acid molecule according to 1 (a), (b), (c), (d), (e), (f), (g), (h), (i), (j) or (k), a promoter, prefereably a promoter selected from the group consisting of Big35S, PCUbi, Super and USP, which are operable linked; and said nucleic acid molecule according to 1 (a), (b), (c), (d), (e), (f), (g), (h), (i), (j) or (k) encodes a polypeptide which has the activity of the respective polypeptide represented by a protein as depicted in the respective line in column 5 of Table II, application no. 2, and confers a generation or an increase of the respective fine chemical in a non-human organism or a part thereof as compared to a corresponding wild-type non-human organism or part thereof.

[12853] In another embodiment thereof said vector comprises beneath said nucleic acid molecule according to 1 (a), (b), (c), (d), (e), (f), (g), (h), (i), (j) or (k), a nucleic acid molecule encoding a transit peptide, preferably encoding a plastidal transit peptide, especially in case in column 6 of Table I, application no. 2, in the same line as of the respective nucleic acid molecule according to 1) “plastidic” is depicted, or encoding a mitochondrial transit peptide, especially in case in column 6 of Table I, application no. 2, in the same line as of the respective nucleic acid molecule according to 1) “mitochondrial” is depicted, which are operable linked.

[12854] In another embodiment thereof said vector does not comprise beneath said nucleic acid molecule according to 1 (a), (b), (c), (d), (e), (f), (g), (h), (i), (j) or (k), a nucleic acid molecule encoding a transit peptide in case in column 6 of Table I, application no. 2, in the same line as of the respective nucleic acid molecule according to 1) “non-targeted” is depicted.

[12855] In another embodiment thereof said vector comprises beneath said nucleic acid molecule according to 1 (a), (b), (c), (d), (e), (f), (g), (h), (i), (j) or (k), and a promoter, prefereably a promoter selected from the group consisting of Big35S, PCUbi, Super and USP; a nucleic acid molecule encoding a transit peptide, preferably encoding a plastidal transit peptide, especially in case in column 6 of Table I, application no. 2, in the same line as of the respective nucleic acid molecule according to 1) “plastidic” is depicted, or encoding a mitochondrial transit peptide, especially in case in column 6 of Table I, application no. 2, in the same line as of the respective nucleic acid molecule according to 1) “mitochondrial” is depicted, which are operable linked.

[12856] In another embodiment thereof said vector does not comprise beneath said nucleic acid molecule according to 1 (a), (b), (c), (d), (e), (f), (g), (h), (i), (j) or (k), and a promoter, prefereably a promoter selected from the group consisting of Big35S, PCUbi, Super and USP, which are operable linked; a nucleic acid molecule encoding a transit peptide, especially in case in column 6 of Table I, application no. 2, in the same line as of the respective nucleic acid molecule according to 1) “non-targeted” is depicted.

[12857] In another embodiment thereof said vector comprises beneath said nucleic acid molecule according to 1 (a), (b), (c), (d), (e), (f), (g), (h), (i), (j) or (k), and a promoter, prefereably a promoter selected from the group consisting of Big35S, PCUbi, Super and USP; a nucleic acid molecule encoding a transit peptide, preferably encoding a plastidal transit peptide, especially in case in column 6 of Table I, application no. 2, in the same line as of the respective nucleic acid molecule according to 1) “plastidic” is depicted, or encoding a mitochondrial transit peptide, especially in case in column 6 of Table I, application no. 2, in the same line as of the respective nucleic acid molecule according to 1) “mitochondrial” is depicted, which are operable linked; and wherein said nucleic acid molecule according to 1 (a), (b), (c), (d), (e), (f), (g), (h), (i), (j) or (k) encodes a polypeptide which has the activity of the respective polypeptide represented by a protein comprising a polypeptide as depicted in column 5 of Table II, application no. 2 (in the same line).

[12858] In another embodiment thereof said vector does not comprise beneath said nucleic acid molecule according to 1 (a), (b), (c), (d), (e), (f), (g), (h), (i), (j) or (k), and a promoter, prefereably a promoter selected from the group consisting of Big35S, PCUbi, Super and USP, which are operatively linked; a nucleic acid molecule encoding a transit peptide, especially in case in column 6 of Table I, application no. 2, in the same line as of the respective nucleic acid molecule according to 1) “non-targeted” is depicted; and wherein said nucleic acid molecule according to 1 (a), (b), (c), (d), (e), (f), (g), (h), (i), (j) or (k) encodes a polypeptide which has the activity of the respective polypeptide represented by a protein comprising a polypeptide as depicted in column 5 of Table II, application no. 2.

[12859] In another embodiment thereof said vector comprises beneath said nucleic acid molecule according to 1 (a), (b), (c), (d), (e), (f), (g), (h), (i), (j) or (k), and a promoter, prefereably a promoter selected from the group consisting of Big35S, PCUbi, Super and USP; a nucleic acid molecule encoding a transit peptide, preferably encoding a plastidal transit peptide, especially in case in column 6 of Table I, application no. 2, in the same line as of the respective nucleic acid molecule according to 1) “plastidic” is depicted, or encoding a mitochondrial transit peptide, especially in case in column 6 of Table I, application no. 2, in the same line as of the respective nucleic acid molecule according to 1) “mitochondrial” is depicted, which are operable linked; and wherein said nucleic acid molecule according to 1 (a), (b), (c), (d), (e), (f), (g), (h), (i), (j) or (k) confers a generation or an increase of the respective fine chemical in a non-human organism or a part thereof as compared to a corresponding wild-type non-human organism or part thereof.

[12860] In another embodiment thereof said vector does not comprise beneath said nucleic acid molecule according to 1 (a), (b), (c), (d), (e), (f), (g), (h), (i), (j) or (k), and a promoter, prefereably a promoter selected from the group consisting of Big35S, PCUbi, Super and USP, which are operatively linked; a nucleic acid molecule encoding a transit peptide, especially in case in column 6 of Table I, application no. 2, in the same line as of the respective nucleic acid molecule according to 1) “non-targeted” is depicted; and wherein said nucleic acid molecule according to 1 (a), (b), (c), (d), (e), (f), (g), (h), (i), (j) or (k) confers a generation or an increase of the respective fine chemical in a non-human organism or a part thereof as compared to a corresponding wild-type non-human organism or part thereof.

[12861] In another embodiment thereof said vector comprises beneath said nucleic acid molecule according to 1 (a), (b), (c), (d), (e), (f), (g), (h), (i), (j) or (k), and a promoter, prefereably a promoter selected from the group consisting of Big35S, PCUbi, Super and USP; a nucleic acid molecule encoding a transit peptide, preferably encoding a plastidal transit peptide, especially in case in column 6 of Table I, application no. 2, in the same line as of the respective nucleic acid molecule according to 1) “plastidic” is depicted, or encoding a mitochondrial transit peptide, especially in case in column 6 of Table I, application no. 2, in the same line as of the respective nucleic acid molecule according to 1) “mitochondrial” is depicted, which are operable linked; and wherein said nucleic acid molecule according to 1 (a), (b), (c), (d), (e), (f), (g), (h), (i), (j) or (k) encodes a polypeptide which has the activity of the respective polypeptide represented by a protein as depicted in column 5 of Table II application no. 2 and confers a generation or an increase of the respective fine chemical in a non-human organism or a part thereof as compared to a corresponding wild-type non-human organism or part thereof.

[12862] In another embodiment thereof said vector does not comprise beneath said nucleic acid molecule according to 1 (a), (b), (c), (d), (e), (f), (g), (h), (i), (j) or (k), and a promoter, prefereably a promoter selected from the group consisting of Big35S, PCUbi, Super and USP, which are operatively linked; a nucleic acid molecule encoding a transit peptide, especially in case in column 6 of Table I, application no. 2, in the same line as of the respective nucleic acid molecule according to 1) “non-targeted” is depicted; and wherein said nucleic acid molecule according to 1 (a), (b), (c), (d), (e), (f), (g), (h), (i), (j) or (k) encodes a polypeptide which has the activity of the respective polypeptide represented by a protein as depicted in column 5 of Table II application no. 2 (in the same line) and confers a generation or an increase of the respective fine chemical in a non-human organism or a part thereof as compared to a corresponding wild-type non-human organism or part thereof.

[12863] In a prefered embodiment of said vector said nucleic acid molecule according to 1 (a), (b), (c), (d), (e), (f), (g), (h), (i), (j) or (k), said promoter and optionally said nucleic acid molecule encoding a transit peptide are encompassed in an expression cassette. Accordingly in an embodiment the invention provides a vector comprising an expression casssette comprising said nucleic acid molecule according to 1 (a), (b), (c), (d), (e), (f), (g), (h), (i), (j) or (k), said promoter and optionally said a nucleic acid molecule encoding a transit peptide, operable linked. Said expression cassette may encompass a terminator, too.

[12864] The invention further provides a vector comprising a nucleic acid molecule comprising 1) a nucleic acid molecule selected from the group consisting of:
[12865] (a) a nucleic acid molecule encoding a polypeptide shown in Table II, column 5 or 8, application no. 2, preferably shown in Table II A, application no. 2, in column 5, or in Table II A, application no. 2, column 8, or in Table II B, application no. 2, column 8, or a homolog or a fragment thereof;
[12866] (b) a nucleic acid molecule shown in Table I, application no. 2, column 5 or 8, preferably shown in Table I A, application no. 2, in column 5, or in Table I A, application no. 2, column 8, or in Table I B, application no. 2, column 8, preferably the coding region thereof, or a homolog or a fragment thereof;
[12867] (c) a nucleic acid molecule, which, as a result of the degeneracy of the genetic code, can be derived from a polypeptide sequence depicted in column 5 or 8 of Table II, application no. 2, preferably shown in Table II A, application no. 2, in column 5, or in Table II A, application no. 2, column 8, or in Table II B, application no. 2, column 8;
[12868] (d) a nucleic acid molecule having at least 30% identity, preferably at least 40%, 50%, 60%, 70%, 75%, 80%, 85%, 90%, 95%, 96%, 97%, 98%, 99%, 99.5%, with the nucleic acid molecule sequence of a polynucleotide comprising the nucleic acid molecule shown in column 5 or 8 of Table I, application no. 2, preferably shown in Table I A, application no. 2, in column 5, or in Table I A, application no. 2, column 8, or in Table I B, application no. 2, column 8, preferably the coding region thereof;
[12869] (e) a nucleic acid molecule encoding a polypeptide having at least 30% identity, preferably at least 40%, 50% 60%, 70%, 75%, 80%, 85%, 90%, 95%, 96%, 97%, 98%, 99%, 99.5%, identity with the amino acid sequence of the polypeptide encoded by the nucleic acid molecule of (a), (b), (c), or (d);
[12870] (f) a nucleic acid molecule which hybridizes with a nucleic acid molecule of (a), (b), (c), (d), or (e) under under stringent hybridisation conditions;
[12871] (g) a nucleic acid molecule encoding a polypeptide which can be isolated with the aid of monoclonal or polyclonal antibodies made against a polypeptide encoded by one of the nucleic acid molecules of (a), (b), (c), (d), (e) or (f);
[12872] (h) a nucleic acid molecule encoding a polypeptide comprising the consensus sequence or one or more polypeptide motifs as shown in column 8 of Table IV, application no. 2;
[12873] (i) a nucleic acid molecule encoding a polypeptide having the activity represented by a protein as depicted in column 5 of Table II, application no. 2;
[12874] (j) a nucleic acid molecule comprising a polynucleotide which is obtained by amplifying a cDNA library or a genomic library using the primers in Table III, application no. 2, column 8;
[12875] and
[12876] (k) nucleic acid molecule which is obtainable by screening a suitable nucleic acid library, especially a cDNA library and/or a genomic library, under stringent hybridization conditions with a probe comprising one of the sequences of the nucleic acid molecule of (a), (b), (c), (d), (e), (f), (g), (h), (i) or (j) or with a fragment thereof having at least 15 nt, preferably 20 nt, 30 nt, 50 nt, 100 nt, 200 nt, 500 nt, 1000 nt, 1500 nt, 2000 nt or 3000 nt of the nucleic acid molecule complementary to a nucleic acid sequence characterized in (a), (b), (c), (d), (e), (f), (g), (h), (i) or (j);
   or a nucleic acid molecule comprising a sequence which is complementary thereto;
   whereby, preferably, the nucleic acid molecule according to 1 (a), (b), (c), (d), (e), (f), (g), (h), (i), (j) or (k) distinguishes over the sequence depicted in Table I A and/or I B, application no. 2, column 5 or 8, or the coding region thereof, by one or more nucleotides (especially but not exceeding 5%, preferably 4%, 3%, 2%, 1%, 0.5%, 0.2% or 0.1%). In an embodiment, the nucleic acid molecule of the invention does not consist of the sequence shown in Table I A and/or I B, application no. 2, column 5 or 8, or the coding region thereof, respectively. In another embodiment, the nucleic acid molecule of the present invention, preferably the coding region thereof, is 30%, 40%, 50%, 60%, 70%, 80%, 90%, 95% identical but less than 100%, 99.999%, 99.99%, 99.9%, 99%, 98%, 97%, 96% or 95% identical to the sequence shown in Table I A and/or I B, application no. 2, column 5 or 8, or the coding region thereof, respectively. In a further embodiment the nucleic acid molecule does not encode the polypeptide sequence shown in Table II A and/or II B, application no. 2, column 5 or 8 but homologs thereof. Accordingly, in one embodiment, the nucleic acid molecule of the present invention encodes in one embodiment a polypeptide which differs at least in one or more amino acids (especially but not exceeding 5%, preferably 4%, 3%, 2%, 1%, 0.5%, 0.2% or 0.1%) from the polypeptide shown in Table II, application no. 2, column 5 or 8 and does not encode a protein of the sequence shown in Table II A and/or II B, application no. 2, column 5 or 8. Accordingly, in one embodiment, the protein encoded by a sequence of a nucleic acid according to (a), (b), (c), (d), (e), (f), (g), (h), (i), (j) or (k) does not consist of the sequence shown in Table I A and/or I B, application no. 2, column 5 and 8, or the coding region thereof. In a further embodiment, the protein of the present invention is at least 30%,40%, 50%, 60%, 70%, 80%, 90%, 95% identical to protein sequence depicted in Table II A and/or II B, application no. 2, column 5 or 8 but less than 100%, preferably less than 99.999%, 99.99% or 99.9%, more preferably less than 99%, 985, 97%, 96% or 95% identical to the sequence shown in Table II A and/or II B, application no. 2, column 5 or 8.
   (All the references to Tables I to IV are references to the corresponding lines of Tables I to IV.)

[12877] In a preferred embodiment of said vector said nucleic acid molecule according to 1 (a), (b), (c), (d), (e), (f), (g), (h), (i), (j) or (k) encodes a polypeptide which has the activity of the respective polypeptide represented by a protein comprising a polypeptide as depicted in the respective line in column 5 of Table II, application no. 2.

[12878] In another preferred embodiment of said vector said nucleic acid molecule according to 1 (a), (b), (c), (d), (e), (f), (g), (h), (i), (j) or (k) confers a generation or an increase of the respective fine chemical in a non-human organism or a part thereof as compared to a corresponding wild-type non-human organism or part thereof.

[12879] In another preferred embodiment of said vector said nucleic acid molecule according to 1 (a), (b), (c), (d), (e), (f), (g), (h), (i), (j) or (k) encodes a polypeptide which has the activity of the respective polypeptide represented by a protein as depicted in the respective line in column 5 of

[12880] Table II, application no. 2, and confers a generation or an increase of the respective fine chemical in a non-human organism or a part thereof as compared to a corresponding wild-type non-human organism or part thereof.

[12881] In another embodiment thereof said vector comprises beneath said nucleic acid molecule according to 1 (a), (b), (c), (d), (e), (f), (g), (h), (i), (j) or (k), a promoter, prefereably a promoter selected from the group consisting of Big35S, PCUbi, Super and USP, which are operable linked.

[12882] In a preferred embodiment thereof said vector comprises beneath said nucleic acid molecule according to 1 (a), (b), (c), (d), (e), (f), (g), (h), (i), (j) or (k), a promoter, prefereably a promoter selected from the group consisting of Big35S, PCUbi, Super and USP, which are operable linked; and said nucleic acid molecule according to 1 (a), (b), (c), (d), (e), (f), (g), (h), (i), (j) or (k) encodes a polypeptide which has the activity of the respective polypeptide represented by a protein comprising a polypeptide as depicted in the respective line in column 5 of Table II, application no. 2.

[12883] In another preferred embodiment thereof said vector comprises beneath said nucleic acid molecule according to 1 (a), (b), (c), (d), (e), (f), (g), (h), (i), (j) or (k), a promoter, prefereably a promoter selected from the group consisting of Big35S, PCUbi, Super and USP, which are operable linked; and said nucleic acid molecule according to 1 (a), (b), (c), (d), (e), (f), (g), (h), (i), (j) or (k) confers a generation or an increase of the respective fine chemical in a non-human organism or a part thereof as compared to a corresponding wild-type non-human organism or part thereof.

[12884] In another preferred embodiment thereof said vector comprises beneath said nucleic acid molecule according to 1 (a), (b), (c), (d), (e), (f), (g), (h), (i), (j) or (k), a promoter, prefereably a promoter selected from the group consisting of Big35S, PCUbi, Super and USP, which are operable linked; and said nucleic acid molecule according to 1 (a), (b), (c), (d), (e), (f), (g), (h), (i), (j) or (k) encodes a polypeptide which has the activity of the respective polypeptide represented by a protein as depicted in the respective line in column 5 of Table II, application no. 2, and confers a generation or an increase of the respective fine chemical in a non-human organism or a part thereof as compared to a corresponding wild-type non-human organism or part thereof.

[12885] In another embodiment thereof said vector comprises beneath said nucleic acid molecule according to 1 (a), (b), (c), (d), (e), (f), (g), (h), (i), (j) or (k), a nucleic acid molecule encoding a transit peptide, preferably encoding a plastidal transit peptide, especially in case in column 6 of Table I, application no. 2, in the same line as of the respective nucleic acid molecule according to 1) “plastidic” is depicted, or encoding a mitochondrial transit peptide, especially in case in column 6 of Table I, application no. 2, in the same line as of the respective nucleic acid molecule according to 1) “mitochondrial” is depicted, which are operable linked.

[12886] In another embodiment thereof said vector does not comprise beneath said nucleic acid molecule according to 1 (a), (b), (c), (d), (e), (f), (g), (h), (i), (j) or (k), a nucleic acid molecule encoding a transit peptide in case in column 6 of Table I, application no. 2, in the same line as of the respective nucleic acid molecule according to 1) “non-targeted” is depicted.

[12887] In another embodiment thereof said vector comprises beneath said nucleic acid molecule according to 1 (a), (b), (c), (d), (e), (f), (g), (h), (i), (j) or (k), and a promoter, prefereably a promoter selected from the group consisting of Big35S, PCUbi, Super and USP; a nucleic acid molecule encoding a transit peptide, preferably encoding a plastidal transit peptide, especially in case in column 6 of Table I, application no. 2, in the same line as of the respective nucleic acid molecule according to 1) “plastidic” is depicted, or encoding a mitochondrial transit peptide, especially in case in column 6 of Table I, application no. 2, in the same line as of the respective nucleic acid molecule according to 1) “mitochondrial” is depicted, which are operable linked.

[12888] In another embodiment thereof said vector does not comprise beneath said nucleic acid molecule according to 1 (a), (b), (c), (d), (e), (f), (g), (h), (i), (j) or (k), and a promoter, prefereably a promoter selected from the group consisting of Big35S, PCUbi, Super and USP, which are operatively linked; a nucleic acid molecule encoding a transit peptide, especially in case in column 6 of Table I, application no. 2, in the same line as of the respective nucleic acid molecule according to 1) “non-targeted” is depicted.

[12889] In another embodiment thereof said vector comprises beneath said nucleic acid molecule according to 1 (a), (b), (c), (d), (e), (f), (g), (h), (i), (j) or (k), and a promoter, prefereably a promoter selected from the group consisting of Big35S, PCUbi, Super and USP; a nucleic acid molecule encoding a transit peptide, preferably encoding a plastidal transit peptide, especially in case in column 6 of Table I, application no. 2, in the same line as of the respective nucleic acid molecule according to 1) “plastidic” is depicted, or encoding a mitochondrial transit peptide, especially in case in column 6 of Table I, application no. 2, in the same line as of the respective nucleic acid molecule according to 1) “mitochondrial” is depicted, which are operable linked; and wherein said nucleic acid molecule according to 1 (a), (b), (c), (d), (e), (f), (g), (h), (i), (j) or (k) encodes a polypeptide which has the activity of the respective polypeptide represented by a protein comprising a polypeptide as depicted in column 5 of Table II, application no. 2.

[12890] In another embodiment thereof said vector does not comprise beneath said nucleic acid molecule according to 1 (a), (b), (c), (d), (e), (f), (g), (h), (i), (j) or (k), and a promoter, prefereably a promoter selected from the group consisting of Big35S, PCUbi, Super and USP, which are operatively linked; a nucleic acid molecule encoding a transit peptide, especially in case in column 6 of Table I, application no. 2, in the same line as of the respective nucleic acid molecule according to 1) “non-targeted” is depicted; and wherein said nucleic acid molecule according to 1 (a), (b), (c), (d), (e), (f), (g), (h), (i), (j) or (k) encodes a polypeptide which has the activity of the respective polypeptide represented by a protein comprising a polypeptide as depicted in column 5 of Table II, application no. 2.

[12891] In another embodiment thereof said vector comprises beneath said nucleic acid molecule according to 1 (a), (b), (c), (d), (e), (f), (g), (h), (i), (j) or (k), and a promoter, prefereably a promoter selected from the group consisting of Big35S, PCUbi, Super and USP; a nucleic acid molecule encoding a transit peptide, preferably encoding a plastidal transit peptide, especially in case in column 6 of Table I, application no. 2, in the same line as of the respective nucleic acid molecule according to 1) “plastidic” is depicted, or encoding a mitochondrial transit peptide, especially in case in column 6 of Table I, application no. 2, in the same line as of the respective nucleic acid molecule according to 1) “mitochondrial” is depicted, which are operable linked; and wherein said nucleic acid molecule according to 1 (a), (b), (c), (d), (e), (f), (g), (h), (i), (j) or (k) confers a generation or an increase of the respective fine chemical in a non-human organism or a part thereof as compared to a corresponding wild-type non-human organism or part thereof.

[12892] In another embodiment thereof said vector does not comprise beneath said nucleic acid molecule according to 1 (a), (b), (c), (d), (e), (f), (g), (h), (i), (j) or (k), and a promoter, prefereably a promoter selected from the group consisting of Big35S, PCUbi, Super and USP, which are operatively linked; a nucleic acid molecule encoding a transit peptide, especially in case in column 6 of Table I, application no. 2, in the same line as of the respective nucleic acid molecule according to 1) “non-targeted” is depicted; and wherein said nucleic acid molecule according to 1 (a), (b), (c), (d), (e), (f), (g), (h), (i), (j) or (k) confers a generation or an increase of the respective fine chemical in a non-human organism or a part thereof as compared to a corresponding wild-type non-human organism or part thereof.

[12893] In another embodiment thereof said vector comprises beneath said nucleic acid molecule according to 1 (a), (b), (c), (d), (e), (f), (g), (h), (i), (j) or (k), and a promoter, prefereably a promoter selected from the group consisting of Big35S, PCUbi, Super and USP; a nucleic acid molecule encoding a transit peptide, preferably encoding a plastidal transit peptide, especially in case in column 6 of Table I, application no. 2, in the same line as of the respective nucleic acid molecule according to 1) “plastidic” is depicted, or encoding a mitochondrial transit peptide, especially in case in column 6 of Table I, application no. 2, in the same line as of the respective nucleic acid molecule according to 1) “mitochondrial” is depicted, which are operable linked; and wherein said nucleic acid molecule according to 1 (a), (b), (c), (d), (e), (f), (g), (h), (i), (j) or (k) encodes a polypeptide which has the activity of the respective polypeptide represented by a protein as depicted in column 5 of Table II application no. 2 and confers a generation or an increase of the respective fine chemical in a non-human organism or a part thereof as compared to a corresponding wild-type non-human organism or part thereof.

[12894] In another embodiment thereof said vector does not comprise beneath said nucleic acid molecule according to 1 (a), (b), (c), (d), (e), (f), (g), (h), (i), (j) or (k), and a promoter, prefereably a promoter selected from the group consisting of Big35S, PCUbi, Super and USP, which are operatively linked; a nucleic acid molecule encoding a transit peptide, especially in case in column 6 of Table I, application no. 2, in the same line as of the respective nucleic acid molecule according to 1) “non-targeted” is depicted; and wherein said nucleic acid molecule according to 1 (a), (b), (c), (d), (e), (f), (g), (h), (i), (j) or (k) encodes a polypeptide which has the activity of the respective polypeptide represented by a protein as depicted in column 5 of Table II application no. 2 and confers a generation or an increase of the respective fine chemical in a non-human organism or a part thereof as compared to a corresponding wild-type non-human organism or part thereof.

[12895] [0181.1.1.2] to [0209.1.1.2] for the disclosure of these paragraphs see [0181.1.1.1] to [0209.1.1.1] above.

[12896] The genes of the invention, coding for an activity selected from the group consisting of 2,3-dihydroxy-2,3-d ihyd rophenylpropionatedehyd rogenase, 2-oxoglutarate dehyd rogenase E1 subunit, 30S ribosomal protein, 3-deoxy-7-phosphoheptulonate synthase, 3-phosphoglycerate dehydrogenase, 47266012-protein, 49747384_SOYBEAN-protein, 4-alphaglucanotransferase, ABC transporter permease protein, acetyl CoA carboxylase, acetyltransferase, acid shock protein, aconitate hydratase, acyl-CoA dehydrogenase, acyl-CoA synthase, acyltransferase, adenylosuccinate lyase, adenylylsulfate kinase, alanine dehydrogenase, aldehyde dehydrogenase, allantoicase, allantoinase, amine oxidase, amino acid ABC transporter permease protein, amino acid acetyltransferase, aminotransferase, ankyrin repeat family protein, anthranilate synthase component II, arginine decarboxylase, arginine exporter protein, asparaginase, aspartase, aspartate aminotransferase, At1g17440-protein, At1g19800-protein, At1 g29350-protein, At1 g47380-protein, At1g67340-protein, At4g32480-protein, At5g16650-protein, ATP synthase subunit beta, ATP-binding component of a transport system, ATP-dependent RNA helicase, AX653549-protein, AY087308-protein, b0456-protein, b0518-protein, b1003-protein, b1024-protein, b1108-protein, b1137-protein, b1163-protein, b1259-protein, b1280-protein, b1330-protein, b1445-protein, b1522-protein, b1898-protein, b2107-protein, b2121-protein, b2360-protein, b2399-protein, b2474-protein, b2513-protein, b2548-protein, b2613-protein, b2673-protein, b2812-protein, b2846-protein, b2909-protein, b2936-protein, b2999-protein, b3121-protein, b3151-protein, b3346-protein, b3410-protein, B3427-protein, b3509-protein, b3814-protein, b3817-protein, b3989-protein, b4029-protein, b4121-protein, beta-galactosidase, beta-hydroxylase, bifunctional purine biosynthesis protein, branched-chain amino acid ABC transporter permease protein, branched-chain amino acid permease, calcium-dependent protein kinase, carbohydrate kinase, carbon dioxide concentrating mechanism protein, cation/acetate symporter, cation-transporting ATPase, CBL-interacting protein kinase, CCAAT-binding transcription factor, CDP-diacylglycerol-glycerol-3-phosphate 3-phosphatidyltransferase, CDP-diglyceride synthetase, cell division control protein, cell division protein,

[12897] Chaperone protein CIpB, circadian clock protein, coproporphyrinogen III oxidase, coproporphyrinogen oxidase, CTP synthase, CTP synthetase, cullin, cyclin D, cysteine synthase A, delta-1-pyrroline 5-carboxylase synthetase, dihydrolipoamide acetyltransferase, dihydrolipoamide dehydrogenase, DNA binding protein, DNA helicase II, DNA helicase IV, DNA mismatch repair protein, DnaJ-like chaperone, electron transport complex protein, elongation factor Tu, enoyl-CoA hydratase, enterobacterial common antigen polymerase, ethanolamine utilization protein, eukaryotic translation initiation factor 5, exopolyphosphatase, fatty acid desaturase, flavodoxin, fumarylacetoacetate hydrolase, gamma-glutamyltranspeptidase, geranylgeranyl pyrophosphate synthase, gibberellin 20-oxidase, Glu/Leu/Phe/Val dehydrogenase, gluconate transport system permease 3, glucose dehydrogenase, glucose-1-phosphate cytidylyltransferase, glucose-6-phosphate 1-dehydrogenase, glutamate-ammonia-ligase, glutamine amidotransferase, glutamine synthetase, glutaminyl-tRNA synthetase, glutaredoxin, glutathione S-transferase, glycerol dehydrogenase, glycerol-3-phosphate dehydrogenase, glycogen (starch) synthase, glycogen synthase, glycogenin, glycoprotease, glycosidase, glycosyl transferase, GM02LC11114-protein, GM02LC17485-protein, GM02LC46-protein, GM02LC5744-protein, H/ACA ribonucleoprotein complex subunit 3, harpin-induced family protein, heat shock protein, heat shock transcription factor, HesB/YadR/YfhF family protein, histone H2A, homocitrate synthase, hydrolase, integral membrane transporter family protein, iron(III) dicitrate-binding protein, isochorismate synthase, isocitrate dehydrogenase, isopentenyl diphosphate isomerase, L-asparaginase, L-aspartate oxidase, Leucyl/phenylalanyl-tRNA-protein transferase, lipoprotein precursor, L-ribulose-5-phosphate 4-epimerase, lysyl-tRNA synthetase, major facilitator superfamily transporter protein, malate dehydrogenase, malic enzyme, malonyl CoA-acyl carrier protein transacylase, membrane protein, membrane transport protein, metal-dependent hydrolase, methylglyoxal synthase, methyltransferase, mitochondrial processing protease, molecular chaperone portein, monothiol glutaredoxin, monthiol glutaredoxin, multiple antibiotic resistance protein, murein transglycosylase, N-acetyl-gamma-glutamyl-phosphate reductase, NAD(P)H-quinone oxidoreductase subunit, NADH dehydrogenase I chain I, nitrate/nitrite transport protein, ornithine carbamoyltransferase, oxidoreductase, oxidoreductase subunit, oxireductase, permease protein of phosphate ABC transporter, peroxisome assembly protein, phosphatidylinositol 3- and 4-kinase family protein, phosphoadenosine phosphosulfate reductase, phosphoanhydride phosphorylase, phosphopantetheine adenylyltransferase, phosphopantothenoylcysteine decarboxylase, phosphopantothenoylcysteinesynthetase/decarboxylase, phosphoribosylaminoimidazole carboxylase catalytic subunit, phosphoribosylformyl glycinamidine synthase subunit, phosphoribosylglycinamide formyltransferase, phosphoribosyltransferase, Photosystem I reaction center subunit XI, photosystem II protein, polygalacturonase, polyphosphate kinase, potassium transport protein, pre-mRNA-splicing factor, protease, protein kinase, protein phosphatase, purine nucleoside phosphorylase, purine-nucleoside phosphorylase, pyrroline carboxylate reductase, pyruvate kinase, quinolinate synthetase, riboflavin biosynthesis protein, ribosephosphate isomerase, constitutive, RNA binding protein, s_pp015018333r-protein, sec-independent protein translocase, Sec-independent protein translocase subunit, serine protease, serine protease inhibitor, short-chain alcohol dehydrogenase family, sll0064-protein, sll0254-protein, sll0354-protein, sll1761-protein, slr0600-protein, sodium/proton antiporter, squalene monooxygenase, sterol 0-acyltransferase, thioredoxin, thioredoxin family protein, threonine dehydrogenase, threonine synthase, transcription factor, transcriptional regulator, transcriptional regulator protein, translation initiation factor subunit, transport protein, TTC0768-protein, TTC1386-protein, urease subunit, uridine/cytidine kinase, valine-pyruvate transaminase, XM_{—}473199-protein, YCL026C-A-protein, ycr102c-protein, ydr338c-protein, yer014w-protein, yer106w-protein, YFL019C-protein, yfl054c-protein, ygl237c-protein, ygr068c-protein, ygr221 c-protein, yhl013c-protein, yhr207c-protein, ylr065c-protein, ylr178c-protein, ynl142w-protein, yor221c-protein, zinc finger protein, zinc transporter, Zm_{—}4842_BE510522-protein, and ZM06LC11975-protein are also called “FCRP genes”.

[12898] [0211.1.1.2] to [0225.1.1.2] for the disclosure of these paragraphs see [0211.1.1.1] to [0225.1.1.1] above.

[12899] In addition to the sequence mentioned in Table I, application no. 2, column 5 or 8, preferably the coding region thereof, or its homologs or fragments, it may be advantageous additionally to express and/or mutate further genes in the non-human organisms. Especially advantageously, additionally at least one further gene of the biosynthetic pathway of the fine chemical is expressed in the non-human organisms such as plants or microorganisms. It is also possible that the regulation of the natural genes has been modified advantageously so that the gene and/or its gene product is no longer subject to the regulatory mechanisms which exist in the non-human organisms. This leads to an increased synthesis of the respective amino acid since, for example, feedback regulations no longer exist to the same extent or not at all. In addition it might be advantageously to combine the nucleic acids sequences of the invention containing the sequences shown in the respective line in Table I, application no. 2, column 5 or 8, preferably the coding region thereof, or homologs or fragments thereof, with genes which generally support or enhance the growth or yield of the target non-human organisms, for example genes which lead to faster growth rate of non human organism like microorganisms or plants or genes which produce stress-, pathogen-, or herbicide-resistant plants.

[12900] [0227.1.1.2] to [0239.1.1.2] for the disclosure of these paragraphs see [0227.1.1.1] to [0239.1.1.1] above.

[12901] In an embodiment of the present invention the nucleic acid construct of the present invention comprises a nucleic acid molecule as depicted in the respective line in Table I, application no. 2, column 5 or 8, preferably the coding region thereof, a fragment or a homolog thereof, and a plant promoter, such as the Big 35S promoter, the DC3 promoter, the PC Ubi promoter, the LegB4-promoter, the Super promoter, the USP promoter or the like. In another embodiment the nucleic acid construct of the present invention comprises a nucleic acid molecule as depicted in th erespective line in Table I, application no. 2, column 5 or 8, preferably the coding region thereof, a fragment or a homolog thereof, and a plant promoter such as, for example, the USP, the LegB4-, the DC3 promoter or the ubiquitin promoter from parsley or other herein mentioned promoters. In a further embodiment the nucleic acid construct of the present invention comprises a nucleic acid molecule as depicted in th erespective line in Table I, application no. 2, column 5 or 8, preferably the coding region thereof, a fragment or a homolog thereof, and a plant promoter, such as the Big 35S promoter, the PC Ubi promoter, the Super promoter, the USP promoter or the like. In addition different terminators may advantageously be used in these nucleic acid constructs; examples for transcriptional termination are polyadenylation signals.

[12902] [0241.1.1.2] to [0245.1.1.2] for the disclosure of these paragraphs see [0241.1.1.1] to [0245.1.1.1] above.

[12903] Other preferred sequences for use in operable linkage in gene expression constructs are targeting sequences, which are required for targeting the gene product into specific cell compartments (for a review, see Kermode, Crit. Rev. Plant Sci. 15 (4), 285 (1996) and references cited therein), for example into the vacuole, the nucleus, all types of plastids, such as amyloplasts, chloroplasts, chromoplasts, the extracellular space, the mitochondria, the endoplasmic reticulum, elaioplasts, peroxisomes, glycosomes, and other compartments of cells or extracellular; preferred are sequences, which are involved in targeting to plastids as mentioned above. Sequences, which must be mentioned in this context are, in particular, the signal-peptide- or transit-peptide-encoding sequences which are known per se. For example, plastid-transit-peptide-encoding sequences enable the targeting of the expression product into the plastids of a plant cell. Targeting sequences are also known for eukaryotic and to a lower extent for prokaryotic organisms and can advantageously be operable linked with the nucleic acid molecule of the present invention as shown in Table I, application no. 2, columns 5 and 8, opreferably the coding region thereof, or homologs or fragments thereof, and described herein to achieve an expression in one of said compartments or extracellular.

[12904] [0247.1.1.2] to [0266.1.1.2] for the disclosure of these paragraphs see [0247.1.1.1] to [0266.1.1.1] above.

[12905] An embodiment of the invention relates to a vector where the nucleic acid molecule according to the invention is linked operably to regulatory sequences which permit the expression in a prokaryotic or eukaryotic host. A further embodiment of the invention relates to a vector in which a nucleic acid sequence encoding one of the polypeptides shown in therespective line in Table II, application no. 2, columns 5 or 8, or homologs or fragments thereof, is functionally linked to a targeting sequence such as a plastidial or mitochondrial targeting sequence. A further embodiment of the invention relates to a vector in which a nucleic acid sequence encoding one of the polypeptides shown in the respective line in Table II, application no. 2, columns 5 or 8, or homologs or fragments thereof, is functionally linked to (a) regulatory sequence which permit the expression in an organelle,such as plastids or mitochondria, preferably plastids.

[12906] A further embodiment of the invention relates to a vector which comprises a nucleic acid sequence encoding one of the polypeptides shown in the respective line in Table II, application no. 2, columns 5 or 8, or homologs or fragments thereof, but no additional targeting sequence.

[12907] [0268.1.1.2] to [0273.1.1.2] for the disclosure of these paragraphs see [0268.1.1.1] to [0273.1.1.1] above.

[12908] A further object of the invention relates to the use of a nucleic acid construct, e.g. an expression cassette, comprising one or more nucleic acid molecules encoding one or more polypeptides as depicted in the respective line(s) in Table II, application no. 2, columns 5 or 8, or homologs or fragments thereof, or comprising one or more nucleic acid molecules as depicted in the respective line(s) in Table I, application no. 2, columns 5 or 8, preferably the coding region thereof, or homologs or fragments thereof, or comprising a nucleic acid molecule hybridizing therewith for the transformation of a microorganism or a plant cell, plant tissues or a part of a plant

[12909] In doing so, depending on the choice of promoter, the nucleic acid molecules shown in the respective line in Table I, application no. 2, column 5 or 8, preferably the coding region thereof, or homologs or fragments thereof, or the nucleic acid molecules encoding a polypeptide as depicted in the respective line in Table II, application no. 2, column 5 or 8, or homologs or fragments thereof, can be expressed in the whole plant or specifically e.g. in the leaves, in the seeds, the nodules, in roots, in the stem or other parts of the plant. Those transgenic plants overproducing sequences, e.g. as depicted in the respective line in Table I, application no. 2, column 5 or 8, preferably the coding region thereof, or homologs or fragments thereof, the plant cell, plant tissuesplants, the reproductive material thereof, or parrts thereof are a further object of the present invention.

[12910] Within the framework of the present invention, the production of the arginine, glutamate, glutamine, or proline is due to the generation or over-expression of one or more polypeptides as depicted in the respective line(s) in Table II, application no. 2, column 5 or 8, or homologs or fragments thereof, or encoded by the corresponding nucleic acid molecules as depicted in the respective line(s) in Table I, application no. 2, column 5 or 8, preferably the coding region thereof, or homologs or fragments thereof, in the non-human organism according to the invention, advantageously in the transgenic microorganism or plant according to the invention, at least for the duration of at least one plant generation.

[12911] A constitutive expression of the polypeptide as depicted in the respective line in Table II, application no. 2, column 5 or 8, or homologs or fragments thereof, or encoded by the respective nucleic acid molecule as depicted in the respective line in Table I, application no. 2, column 5 or 8, preferably the coding region thereof, or homologs or fragments thereof, may be advantageous. On the other hand, an inducible expression may also appear desirable. Expression of the polypeptide sequences of the invention can be either directed to the cytosol or to the organelles, such as plastids or mitochondria, preferably the plastids of the host cells, preferably the plant cells, or non-targeted.

[12912] for the disclosure of this paragraph see [0278.1.1.1] above.

[12913] In a further embodiment the invention relates to a transgenic non-human organisms such as transgenic microorganism or transgenic plant comprising a nucleic acid molecule comprising

[1) a nucleic acid molecule selected from the group consisting of
[12914] (a) a nucleic acid molecule encoding a polypeptide shown in Table II, application no. 2, column 5 or 8, preferably shown in Table II A, application no. 2, column 5, or in Table II A, application no. 2, column 8, or in Table II B, application no. 2, column 8, or a homolog or a fragment thereof;
[12915] (b) a nucleic acid molecule shown in Table I, application no. 2, column 5 or 8, preferably shown in Table I A, application no. 2, column 5, or in Table I A, application no. 2, column 8, or in Table I B, application no. 2, column 8, preferably the coding region thereof, or a homolog or a fragment thereof;
[12916] (c) a nucleic acid molecule, which, as a result of the degeneracy of the genetic code, can be derived from a polypeptide sequence depicted in column 5 or 8 of Table II, application no. 2, preferably shown in Table II A, application no. 2, column 5, or in Table II A, application no. 2, column 8, or in Table II B, application no. 2, column 8;
[12917] (d) a nucleic acid molecule having at least 30% identity, preferably at least 40%, 50%, 60%, 70%, 75%, 80%, 85%, 90%, 95%, 96%, 97%, 98%, 99%, 99.5%, with the nucleic acid molecule sequence of a polynucleotide comprising the nucleic acid molecule shown in column 5 or 8 of Table I, application no. 2, preferably shown in Table I A, application no. 2, column 5, or in Table I A, application no. 2, column 8,or in Table I B, application no. 2, column 8, preferably the coding region thereof;
[12918] (e) a nucleic acid molecule encoding a polypeptide having at least 30% identity, preferably at least 40%, 50% 60%, 70%, 75%, 80%, 85%, 90%, 95%, 96%, 97%, 98%, 99%, 99.5%, identity with the amino acid sequence of the polypeptide encoded by the nucleic acid molecule of (a), (b), (c) or (d);
[12919] (f) a nucleic acid molecule which hybridizes with a nucleic acid molecule of (a), (b), (c), (d) or (e) under stringent hybridisation conditions;
[12920] (g) a nucleic acid molecule encoding a polypeptide which can be isolated with the aid of monoclonal or polyclonal antibodies made against a polypeptide encoded by one of the nucleic acid molecules of (a), (b), (c), (d), (e) or (f);
[12921] (h) a nucleic acid molecule encoding a polypeptide comprising the consensus sequence or one or more polypeptide motifs as shown in column 8 of Table IV, application no. 2;
[12922] (i) a nucleic acid molecule encoding a polypeptide having the activity represented by a respective protein as depicted in column 5 of Table II, application no. 2;
[12923] (j) a nucleic acid molecule comprising a polynucleotide which is obtained by amplifying a cDNA library or a genomic library using the primers in Table III, application no. 2, column 8;
[12924] and
[12925] (k) nucleic acid molecule which is obtainable by screening a suitable nucleic acid library, especially a cDNA library and/or a genomic library, under stringent hybridization conditions with a probe comprising one of the sequences of the nucleic acid molecule of (a), (b), (c), (d), (e), (f), (g), (h), (i) or (j) or with a fragment of at least 15 nt, preferably 20 nt, 30 nt, 50 nt, 100 nt, 200 nt,500 nt, 1000 nt, 1500 nt, 2000 nt or 3000 nt of the nucleic acid molecule characterized in (a), (b), (c), (d), (e), (f), (g), (h), (i) or (j);
   or a nucleic acid molecule comprising a sequence which is complementary thereto; and, if desired
   2) nucleic acid molecule encoding a transit peptide, preferably encoding a plastidal transit peptide or a mitochondrial transit peptide; which are operable linked;]
   or comprising an expression cassette comprising
   [0) a promoter, prefereably a promoter selected from the group consisting of Big35S, PCUbi, Super and USP; and
   1) a nucleic acid molecule selected from the group consisting of
[12926] (a) a nucleic acid molecule encoding a polypeptide shown in Table II, application no. 2, column 5 or 8, preferably shown in Table II A, application no. 2, column 5, or in Table II A, application no. 2, column 8, or in Table II B, application no. 2, column 8, or a homolog or a fragment thereof;
[12927] (b) a nucleic acid molecule shown in Table I, application no. 2, column 5 or 8, preferably shown in Table I A, application no. 2, column 5, or in Table I A, application no. 2, column 8, or in Table I B, application no. 2, column 8, preferably the coding region thereof, or a homolog or a fragment thereof;
[12928] (c) a nucleic acid molecule, which, as a result of the degeneracy of the genetic code, can be derived from a polypeptide sequence depicted in column 5 or 8 of Table II, application no. 2, preferably shown in Table II A, application no. 2, column 5, or in Table II A, application no. 2, column 8, or in Table II B, application no. 2, column 8;
[12929] (d) a nucleic acid molecule having at least 30% identity, preferably at least 40%, 50%, 60%, 70%, 75%, 80%, 85%, 90%, 95%, 96%, 97%, 98%, 99%, 99.5%, with the nucleic acid molecule sequence of a polynucleotide comprising the nucleic acid molecule shown in column 5 or 8 of Table I, application no. 2, preferably shown in Table I A, application no. 2, column 5, or in Table I A, application no. 2, column 8,or in Table I B, application no. 2, column 8, preferably the coding region thereof;
[12930] (e) a nucleic acid molecule encoding a polypeptide having at least 30% identity, preferably at least 40%, 50% 60%, 70%, 75%, 80%, 85%, 90%, 95%, 96%, 97%, 98%, 99%, 99.5%, identity with the amino acid sequence of the polypeptide encoded by the nucleic acid molecule of (a), (b), (c) or (d);
[12931] (f) a nucleic acid molecule which hybridizes with a nucleic acid molecule of (a), (b), (c), (d) or (e) under stringent hybridisation conditions;
[12932] (g) a nucleic acid molecule encoding a polypeptide which can be isolated with the aid of monoclonal or polyclonal antibodies made against a polypeptide encoded by one of the nucleic acid molecules of (a), (b), (c), (d), (e) or (f);
[12933] (h) a nucleic acid molecule encoding a polypeptide comprising the consensus sequence or one or more polypeptide motifs as shown in column 8 of Table IV, application no. 2;
[12934] (i) a nucleic acid molecule encoding a polypeptide having the activity represented by a respective protein as depicted in column 5 of Table II, application no. 2;
[12935] (j) a nucleic acid molecule comprising a polynucleotide which is obtained by amplifying a cDNA library or a genomic library using the primers in Table III, application no. 2, column 8;
[12936] and
[12937] (k) nucleic acid molecule which is obtainable by screening a suitable nucleic acid library, especially a cDNA library and/or a genomic library, under stringent hybridization conditions with a probe comprising one of the sequences of the nucleic acid molecule of (a), (b), (c), (d), (e), (f), (g), (h), (i) or (j) or with a fragment of at least 15 nt, preferably 20 nt, 30 nt, 50 nt, 100 nt, 200 nt,500 nt, 1000 nt, 1500 nt, 2000 nt or 3000 nt of the nucleic acid molecule characterized in (a), (b), (c), (d), (e), (f), (g), (h), (i) or (j);
   or a nucleic acid molecule comprising a sequence which is complementary thereto; and, if desired 2) nucleic acid molecule encoding a transit peptide, preferably encoding a plastidal transit peptide or a mitochondrial transit peptide;
   which are operable linked;]
   or comprising or being transformed by a vector comprising
   [1) a nucleic acid molecule selected from the group consisting of
[12938] (a) a nucleic acid molecule encoding a polypeptide shown in Table II, application no. 2, column 5 or 8, preferably shown in Table II A, application no. 2, column 5, or in Table II A, application no. 2, column 8, or in Table II B, application no. 2, column 8, or a homolog or a fragment thereof;
[12939] (b) a nucleic acid molecule shown in Table I, application no. 2, column 5 or 8, preferably shown in Table I A, application no. 2, column 5, or in Table I A, application no. 2, column 8, or in Table I B, application no. 2, column 8, preferably the coding region thereof, or a homolog or a fragment thereof;
[12940] (c) a nucleic acid molecule, which, as a result of the degeneracy of the genetic code, can be derived from a polypeptide sequence depicted in column 5 or 8 of Table II, application no. 2, preferably shown in Table II A, application no. 2, column 5, or in Table II A, application no. 2, column 8, or in Table II B, application no. 2, column 8;
[12941] (d) a nucleic acid molecule having at least 30% identity, preferably at least 40%, 50%, 60%, 70%, 75%, 80%, 85%, 90%, 95%, 96%, 97%, 98%, 99%, 99.5%, with the nucleic acid molecule sequence of a polynucleotide comprising the nucleic acid molecule shown in column 5 or 8 of Table I, application no. 2, preferably shown in Table I A, application no. 2, column 5, or in Table I A, application no. 2, column 8, or in Table I B, application no. 2, column 8, preferably the coding region thereof;
[12942] (e) a nucleic acid molecule encoding a polypeptide having at least 30% identity, preferably at least 40%, 50% 60%, 70%, 75%, 80%, 85%, 90%, 95%, 96%, 97%, 98%, 99%, 99.5%, identity with the amino acid sequence of the polypeptide encoded by the nucleic acid molecule of (a), (b), (c) or (d);
[12943] (f) a nucleic acid molecule which hybridizes with a nucleic acid molecule of (a), (b), (c), (d) or (e) under stringent hybridisation conditions;
[12944] (g) a nucleic acid molecule encoding a polypeptide which can be isolated with the aid of monoclonal or polyclonal antibodies made against a polypeptide encoded by one of the nucleic acid molecules of (a), (b), (c), (d), (e) or (f);
[12945] (h) a nucleic acid molecule encoding a polypeptide comprising the consensus sequence or one or more polypeptide motifs as shown in column 8 of Table IV, application no. 2;
[12946] (i) a nucleic acid molecule encoding a polypeptide having the activity represented by a respective protein as depicted in column 5 of Table II, application no. 2;
[12947] (j) a nucleic acid molecule comprising a polynucleotide which is obtained by amplifying a cDNA library or a genomic library using the primers in Table III, application no. 2, column 8;
[12948] and
[12949] (k) nucleic acid molecule which is obtainable by screening a suitable nucleic acid library, especially a cDNA library and/or a genomic library, under stringent hybridization conditions with a probe comprising one of the sequences of the nucleic acid molecule of (a), (b), (c), (d), (e), (f), (g), (h), (i) or (j) or with a fragment of at least 15 nt, preferably 20 nt, 30 nt, 50 nt, 100 nt, 200 nt,500 nt, 1000 nt, 1500 nt, 2000 nt or 3000 nt of the nucleic acid molecule characterized in (a), (b), (c), (d), (e), (f), (g), (h), (i) or (j);
   or a nucleic acid molecule comprising a sequence which is complementary thereto;]
   as well as respective transgenic cells, tissue, parts of such non-human organism, e.g. plant cells, plant tissue, part of plants, like leaves, roots, stems, blossoms, seeds, fruits, pollen and the like.
   (All the references to Tables I to IV are references to the corresponding lines of Tables I to IV.)

[12950] In a preferred embodiment of said transgenic non-human organism said nucleic acid molecule according to 1 (a), (b), (c), (d), (e), (f), (g), (h), (i), (j) or (k) encodes a polypeptide which has the activity of the respective polypeptide represented by a protein comprising a polypeptide as depicted in the respective line in column 5 of Table II, application no. 2.

[12951] In another preferred embodiment of said transgenic non-human organism said nucleic acid molecule according to 1 (a), (b), (c), (d), (e), (f), (g), (h), (i), (j) or (k) confers a generation or an increase of the respective fine chemical in a non-human organism or a part thereof as compared to a corresponding wild-type non-human organism or part thereof.

[12952] In another preferred embodiment of said transgenic non-human organism said nucleic acid molecule according to 1 (a), (b), (c), (d), (e), (f), (g), (h), (i), (j) or (k) encodes a polypeptide which has the activity of the respective polypeptide represented by a protein as depicted in the respective line in column 5 of Table II application no. 2 and confers a generation or an increase of the respective fine chemical in a non-human organism or a part thereof as compared to a corresponding wild-type non-human organism or part thereof.

[12953] In another embodiment of said transgenic non-human organism the expression cassette comprises 2) a nucleic acid molecule encoding a transit peptide, preferably encoding a plastidal transit peptide, especially in case in column 6 of Table I, application no. 2, in the same line as of the respective nucleic acid molecule according to 1) “plastidic” is depicted, or encoding a mitochondrial transit peptide, especially in case in column 6 of Table I, application no. 2, in the same line as of the respective nucleic acid molecule according to 1) “mitochondrial” is depicted.

[12954] In another embodiment of said transgenic non-human organism the expression cassette does not comprise 2) a nucleic acid molecule encoding a transit peptide, especially in case in column 6 of Table I, application no. 2, in the same line as of the respective nucleic acid molecule according to 1) “non-targeted” is depicted.

[12955] In another embodiment of said transgenic non-human organism said vector comprises beneath said nucleic acid molecule according to 1 (a), (b), (c), (d), (e), (f), (g), (h), (i), (j) or (k), a promoter, prefereably a promoter selected from the group consisting of Big35S, PCUbi, Super and USP, which are operable linked.

[12956] In a preferred embodiment of said transgenic non-human organism said vector comprises beneath said nucleic acid molecule according to 1 (a), (b), (c), (d), (e), (f), (g), (h), (i), (j) or (k), a promoter, prefereably a promoter selected from the group consisting of Big35S, PCUbi, Super and USP, which are operable linked; and said nucleic acid molecule according to 1 (a), (b), (c), (d), (e), (f), (g), (h), (i), (j) or (k) encodes a polypeptide which has the activity of the respective polypeptide represented by a protein comprising a polypeptide as depicted in the respective line in column 5 of Table II, application no. 2.

[12957] In another preferred embodiment of said transgenic non-human organism said vector comprises beneath said nucleic acid molecule according to 1 (a), (b), (c), (d), (e), (f), (g), (h), (i), (j) or (k), a promoter, prefereably a promoter selected from the group consisting of Big35S, PCUbi, Super and USP, which are operable linked; and said nucleic acid molecule according to 1 (a), (b), (c), (d), (e), (f), (g), (h), (i), (j) or (k) confers a generation or an increase of the respective fine chemical in a non-human organism or a part thereof as compared to a corresponding wild-type non-human organism or part thereof.

[12958] In another preferred embodiment of said transgenic non-human organism said vector comprises beneath said nucleic acid molecule according to 1 (a), (b), (c), (d), (e), (f), (g), (h), (i), (j) or (k), a promoter, prefereably a promoter selected from the group consisting of Big35S, PCUbi, Super and USP, which are operable linked; and said nucleic acid molecule according to 1 (a), (b), (c), (d), (e), (f), (g), (h), (i), (j) or (k) encodes a polypeptide which has the activity of the respective polypeptide represented by a protein as depicted in the respective line in column 5 of Table II, application no. 2, and confers a generation or an increase of the respective fine chemical in a non-human organism or a part thereof as compared to a corresponding wild-type non-human organism or part thereof.

[12959] In another embodiment of said transgenic non-human organism said vector comprises beneath said nucleic acid molecule according to 1 (a), (b), (c), (d), (e), (f), (g), (h), (i), (j) or (k), a nucleic acid molecule encoding a transit peptide, preferably encoding a plastidal transit peptide, especially in case in column 6 of Table I, application no. 2, in the same line as of the respective nucleic acid molecule according to 1) “plastidic” is depicted, or encoding a mitochondrial transit peptide, especially in case in column 6 of Table I, application no. 2, in the same line as of the respective nucleic acid molecule according to 1) “mitochondrial” is depicted, which are operable linked.

[12960] In another embodiment of said transgenic non-human organism said vector does not comprise beneath said nucleic acid molecule according to 1 (a), (b), (c), (d), (e), (f), (g), (h), (i), (j) or (k), a nucleic acid molecule encoding a transit peptide in case in column 6 of Table I, application no. 2, in the same line as of the respective nucleic acid molecule according to 1) “non-targeted” is depicted, which are operable linked.

[12961] In another embodiment of said transgenic non-human organism said vector comprises beneath said nucleic acid molecule according to 1 (a), (b), (c), (d), (e), (f), (g), (h), (i), (j) or (k), and a promoter, prefereably a promoter selected from the group consisting of Big35S, PCUbi, Super and USP; a nucleic acid molecule encoding a transit peptide, preferably encoding a plastidal transit peptide, especially in case in column 6 of Table I, application no. 2, in the same line as of the respective nucleic acid molecule according to 1) “plastidic” is depicted, or encoding a mitochondrial transit peptide, especially in case in column 6 of Table I, application no. 2, in the same line as of the respective nucleic acid molecule according to 1) “mitochondrial” is depicted, which are operable linked.

[12962] In another embodiment of said transgenic non-human organism said vector does not comprise beneath said nucleic acid molecule according to 1 (a), (b), (c), (d), (e), (f), (g), (h), (i), (j) or (k), and a promoter, prefereably a promoter selected from the group consisting of Big35S, PCUbi, Super and USP; a nucleic acid molecule encoding a transit peptide, especially in case in column 6 of Table I, application no. 2, in the same line as of the respective nucleic acid molecule according to 1) “non-targeted” is depicted, which are operable linked.

[12963] In another embodiment of said transgenic non-human organism said vector comprises beneath said nucleic acid molecule according to 1 (a), (b), (c), (d), (e), (f), (g), (h), (i), (j) or (k), and a promoter, prefereably a promoter selected from the group consisting of Big35S, PCUbi, Super and USP; a nucleic acid molecule encoding a transit peptide, preferably encoding a plastidal transit peptide, especially in case in column 6 of Table I, application no. 2, in the same line as of the respective nucleic acid molecule according to 1) “plastidic” is depicted, or encoding a mitochondrial transit peptide, especially in case in column 6 of Table I, application no. 2, in the same line as of the respective nucleic acid molecule according to 1) “mitochondrial” is depicted, which are operable linked; and wherein said nucleic acid molecule according to 1 (a), (b), (c), (d), (e), (f), (g), (h), (i), (j) or (k) encodes a polypeptide which has the activity of the respective polypeptide represented by a protein comprising a polypeptide as depicted in the respective line in column 5 of Table II, application no. 2.

[12964] In another embodiment of said transgenic non-human organism said vector does not comprise beneath said nucleic acid molecule according to 1 (a), (b), (c), (d), (e), (f), (g), (h), (i), (j) or (k), and a promoter, prefereably a promoter selected from the group consisting of Big35S, PCUbi, Super and USP; a nucleic acid molecule encoding a transit peptide, especially in case in column 6 of Table I, application no. 2, in the same line as of the respective nucleic acid molecule according to 1) “non-targeted” is depicted, which are operable linked; and wherein said nucleic acid molecule according to 1 (a), (b), (c), (d), (e), (f), (g), (h), (i), (j) or (k) encodes a polypeptide which has the activity of the respective polypeptide represented by a protein comprising a polypeptide as depicted in the respective line in column 5 of Table II, application no. 2.

[12965] In another embodiment of said transgenic non-human organism said vector comprises beneath said nucleic acid molecule according to 1 (a), (b), (c), (d), (e), (f), (g), (h), (i), (j) or (k), and a promoter, prefereably a promoter selected from the group consisting of Big35S, PCUbi, Super and USP; a nucleic acid molecule encoding a transit peptide, preferably encoding a plastidal transit peptide, especially in case in column 6 of Table I, application no. 2, in the same line as of the respective nucleic acid molecule according to 1) “plastidic” is depicted, or encoding a mitochondrial transit peptide, especially in case in column 6 of Table I, application no. 2, in the same line as of the respective nucleic acid molecule according to 1) “mitochondrial” is depicted, which are operable linked; and wherein said nucleic acid molecule according to 1 (a), (b), (c), (d), (e), (f), (g), (h), (i), (j) or (k) confers a generation or an increase of the respective fine chemical in a non-human organism or a part thereof as compared to a corresponding wild-type non-human organism or part thereof.

[12966] In another embodiment of said transgenic non-human organism said vector does not comprise beneath said nucleic acid molecule according to 1 (a), (b), (c), (d), (e), (f), (g), (h), (i), (j) or (k), and a promoter, prefereably a promoter selected from the group consisting of Big35S, PCUbi, Super and USP; a nucleic acid molecule encoding a transit peptide, especially in case in column 6 of Table I, application no. 2, in the same line as of the respective nucleic acid molecule according to 1) “non-targeted” is depicted, which are operable linked; and wherein said nucleic acid molecule according to 1 (a), (b), (c), (d), (e), (f), (g), (h), (i), (j) or (k) confers a generation or an increase of the respective fine chemical in a non-human organism or a part thereof as compared to a corresponding wild-type non-human organism or part thereof.

[12967] In another embodiment of said transgenic non-human organism said vector comprises beneath said nucleic acid molecule according to 1 (a), (b), (c), (d), (e), (f), (g), (h), (i), (j) or (k), and a promoter, prefereably a promoter selected from the group consisting of Big35S, PCUbi, Super and USP; a nucleic acid molecule encoding a transit peptide, preferably encoding a plastidal transit peptide, especially in case in column 6 of Table I, application no. 2, in the same line as of the respective nucleic acid molecule according to 1) “plastidic” is depicted, or encoding a mitochondrial transit peptide, especially in case in column 6 of Table I, application no. 2, in the same line as of the respective nucleic acid molecule according to 1) “mitochondrial” is depicted, which are operable linked; and wherein said nucleic acid molecule according to 1 (a), (b), (c), (d), (e), (f), (g), (h), (i), (j) or (k) encodes a polypeptide which has the activity of the respective polypeptide represented by a protein as depicted in the respective line in column 5 of Table II application no. 2 and confers a generation or an increase of the respective fine chemical in a non-human organism or a part thereof as compared to a corresponding wild-type non-human organism or part thereof.

[12968] In another embodiment of said transgenic non-human organism said vector does not comprise beneath said nucleic acid molecule according to 1 (a), (b), (c), (d), (e), (f), (g), (h), (i), (j) or (k), and a promoter, prefereably a promoter selected from the group consisting of Big35S, PCUbi, Super and USP; a nucleic acid molecule encoding a transit peptide, especially in case in column 6 of Table I, application no. 2, in the same line as of the respective nucleic acid molecule according to 1) “non-targeted” is depicted, which are operable linked; and wherein said nucleic acid molecule according to 1 (a), (b), (c), (d), (e), (f), (g), (h), (i), (j) or (k) encodes a polypeptide which has the activity of the respective polypeptide represented by a protein as depicted in the respective line in column 5 of Table II application no. 2 (in the same line) and confers a generation or an increase of the respective fine chemical in a non-human organism or a part thereof as compared to a corresponding wild-type non-human organism or part thereof.

[12969] In a prefered embodiment of said transgenic non-human organism said nucleic acid molecule according to 1 (a), (b), (c), (d), (e), (f), (g), (h), (i), (j) or (k), said promoter and optionally said nucleic acid molecule encoding a transit peptide are encompassed in an expression cassette in said vector. Accordingly an embodiment the invention provides a non-human organism comprising or being transformed by a vector comprising an expression casssette comprising said nucleic acid molecule according to 1 (a), (b), (c), (d), (e), (f), (g), (h), (i), (j) or (k), said promoter and optionally said a nucleic acid molecule encoding a transit peptide, operable linked. Said expression cassette may encompass a terminator, too.

[12970] In a further embodiment the invention relates to a transgenic non-human organisms such as transgenic microorganism or transgenic plant comprising a nucleic acid molecule comprising

[1) a nucleic acid molecule selected from the group consisting of
[12971] (a) a nucleic acid molecule encoding a polypeptide shown in Table II, application no. 2, column 5 or 8, preferably shown in Table II A, application no. 2, column 5, or in Table II A, application no. 2, column 8, or in Table II B, application no. 2, column 8, or a homolog or a fragment thereof;
[12972] (b) a nucleic acid molecule shown in Table I, application no. 2, column 5 or 8, preferably shown in Table I A, application no. 2, column 5, or in Table I A, application no. 2, column 8, or in Table I B, application no. 2, column 8, preferably the coding region thereof, or a homolog or a fragment thereof;
[12973] (c) a nucleic acid molecule, which, as a result of the degeneracy of the genetic code, can be derived from a polypeptide sequence depicted in column 5 or 8 of Table II, application no. 2, preferably shown in Table II A, application no. 2, column 5, or in Table II A, application no. 2, column 8, or in Table II B, application no. 2, column 8;
[12974] (d) a nucleic acid molecule having at least 30% identity, preferably at least 40%, 50%, 60%, 70%, 75%, 80%, 85%, 90%, 95%, 96%, 97%, 98%, 99%, 99.5%, with the nucleic acid molecule sequence of a polynucleotide comprising the nucleic acid molecule shown in column 5 or 8 of Table I, application no. 2, preferably shown in Table I A, application no. 2, column 5, or in Table I A, application no. 2, column 8,or in Table I B, application no. 2, column 8, preferably the coding region thereof;
[12975] (e) a nucleic acid molecule encoding a polypeptide having at least 30% identity, preferably at least 40%, 50% 60%, 70%, 75%, 80%, 85%, 90%, 95%, 96%, 97%, 98%, 99%, 99.5%, identity with the amino acid sequence of the polypeptide encoded by the nucleic acid molecule of (a), (b), (c) or (d);
[12976] (f) a nucleic acid molecule which hybridizes with a nucleic acid molecule of (a), (b), (c), (d) or (e) under stringent hybridisation conditions;
[12977] (g) a nucleic acid molecule encoding a polypeptide which can be isolated with the aid of monoclonal or polyclonal antibodies made against a polypeptide encoded by one of the nucleic acid molecules of (a), (b), (c), (d), (e) or (f);
[12978] (h) a nucleic acid molecule encoding a polypeptide comprising the consensus sequence or one or more polypeptide motifs as shown in column 8 of Table IV, application no. 2;
[12979] (i) a nucleic acid molecule encoding a polypeptide having the activity represented by a respective protein as depicted in column 5 of Table II, application no. 2;
[12980] (j) a nucleic acid molecule comprising a polynucleotide which is obtained by amplifying a cDNA library or a genomic library using the primers in Table III, application no. 2, column 8;
[12981] and
[12982] (k) nucleic acid molecule which is obtainable by screening a suitable nucleic acid library, especially a cDNA library and/or a genomic library, under stringent hybridization conditions with a probe comprising one of the sequences of the nucleic acid molecule of (a), (b), (c), (d), (e), (f), (g), (h), (i) or (j) or with a fragment of at least 15 nt, preferably 20 nt, 30 nt, 50 nt, 100 nt, 200 nt,500 nt, 1000 nt, 1500 nt, 2000 nt or 3000 nt of the nucleic acid molecule characterized in (a), (b), (c), (d), (e), (f), (g), (h), (i) or (j);
   or a nucleic acid molecule comprising a sequence which is complementary thereto; and, if desired
   2) nucleic acid molecule encoding a transit peptide, preferably encoding a plastidal transit peptide or a mitochondrial transit peptide; which are operable linked;]
   or comprising an expression cassette comprising
   [0) a promoter, prefereably a promoter selected from the group consisting of Big35S, PCUbi, Super and USP; and
   1) a nucleic acid molecule selected from the group consisting of
[12983] (a) a nucleic acid molecule encoding a polypeptide shown in Table II, application no. 2, column 5 or 8, preferably shown in Table II A, application no. 2, column 5, or in Table II A, application no. 2, column 8, or in Table II B, application no. 2, column 8, or a homolog or a fragment thereof;
[12984] (b) a nucleic acid molecule shown in Table I, application no. 2, column 5 or 8, preferably shown in Table I A, application no. 2, column 5, or in Table I A, application no. 2, column 8, or in Table I B, application no. 2, column 8, preferably the coding region thereof, or a homolog or a fragment thereof;
[12985] (c) a nucleic acid molecule, which, as a result of the degeneracy of the genetic code, can be derived from a polypeptide sequence depicted in column 5 or 8 of Table II, application no. 2, preferably shown in Table II A, application no. 2, column 5, or in Table II A, application no. 2, column 8, or in Table II B, application no. 2, column 8;
[12986] (d) a nucleic acid molecule having at least 30% identity, preferably at least 40%, 50%, 60%, 70%, 75%, 80%, 85%, 90%, 95%, 96%, 97%, 98%, 99%, 99.5%, with the nucleic acid molecule sequence of a polynucleotide comprising the nucleic acid molecule shown in column 5 or 8 of Table I, application no. 2, preferably shown in Table I A, application no. 2, column 5, or in Table I A, application no. 2, column 8,or in Table I B, application no. 2, column 8, preferably the coding region thereof;
[12987] (e) a nucleic acid molecule encoding a polypeptide having at least 30% identity, preferably at least 40%, 50% 60%, 70%, 75%, 80%, 85%, 90%, 95%, 96%, 97%, 98%, 99%, 99.5%, identity with the amino acid sequence of the polypeptide encoded by the nucleic acid molecule of (a), (b), (c) or (d);
[12988] (f) a nucleic acid molecule which hybridizes with a nucleic acid molecule of (a), (b), (c), (d) or (e) under stringent hybridisation conditions;
[12989] (g) a nucleic acid molecule encoding a polypeptide which can be isolated with the aid of monoclonal or polyclonal antibodies made against a polypeptide encoded by one of the nucleic acid molecules of (a), (b), (c), (d), (e) or (f);
[12990] (h) a nucleic acid molecule encoding a polypeptide comprising the consensus sequence or one or more polypeptide motifs as shown in column 8 of Table IV, application no. 2;
[12991] (i) a nucleic acid molecule encoding a polypeptide having the activity represented by a respective protein as depicted in column 5 of Table II, application no. 2;
[12992] (j) a nucleic acid molecule comprising a polynucleotide which is obtained by amplifying a cDNA library or a genomic library using the primers in Table III, application no. 2, column 8;
[12993] and
[12994] (k) nucleic acid molecule which is obtainable by screening a suitable nucleic acid library, especially a cDNA library and/or a genomic library, under stringent hybridization conditions with a probe comprising one of the sequences of the nucleic acid molecule of (a), (b), (c), (d), (e), (f), (g), (h), (i) or (j) or with a fragment of at least 15 nt, preferably 20 nt, 30 nt, 50 nt, 100 nt, 200 nt,500 nt, 1000 nt, 1500 nt, 2000 nt or 3000 nt of the nucleic acid molecule characterized in (a), (b), (c), (d), (e), (f), (g), (h), (i) or (j);
   or a nucleic acid molecule comprising a sequence which is complementary thereto;]and, if desired 2) nucleic acid molecule encoding a transit peptide, preferably encoding a plastidal transit peptide or a mitochondrial transit peptide; which are operable linked;]
   or comprising or being transformed by a vector comprising
   [1) a nucleic acid molecule selected from the group consisting of
[12995] (a) a nucleic acid molecule encoding a polypeptide shown in Table II, application no. 2, column 5 or 8, preferably shown in Table II A, application no. 2, column 5, or in Table II A, application no. 2, column 8, or in Table II B, application no. 2, column 8, or a homolog or a fragment thereof;
[12996] (b) a nucleic acid molecule shown in Table I, application no. 2, column 5 or 8, preferably shown in Table I A, application no. 2, column 5, or in Table I A, application no. 2, column 8, or in Table I B, application no. 2, column 8, preferably the coding region thereof, or a homolog or a fragment thereof;
[12997] (c) a nucleic acid molecule, which, as a result of the degeneracy of the genetic code, can be derived from a polypeptide sequence depicted in column 5 or 8 of Table II, application no. 2, preferably shown in Table II A, application no. 2, column 5, or in Table II A, application no. 2, column 8, or in Table II B, application no. 2, column 8;
[12998] (d) a nucleic acid molecule having at least 30% identity, preferably at least 40%, 50%, 60%, 70%, 75%, 80%, 85%, 90%, 95%, 96%, 97%, 98%, 99%, 99.5%, with the nucleic acid molecule sequence of a polynucleotide comprising the nucleic acid molecule shown in column 5 or 8 of Table I, application no. 2, preferably shown in Table I A, application no. 2, column 5, or in Table I A, application no. 2, column 8,or in Table I B, application no. 2, column 8, preferably the coding region thereof;
[12999] (e) a nucleic acid molecule encoding a polypeptide having at least 30% identity, preferably at least 40%, 50% 60%, 70%, 75%, 80%, 85%, 90%, 95%, 96%, 97%, 98%, 99%, 99.5%, identity with the amino acid sequence of the polypeptide encoded by the nucleic acid molecule of (a), (b), (c) or (d);
[13000] (f) a nucleic acid molecule which hybridizes with a nucleic acid molecule of (a), (b), (c), (d) or (e) under stringent hybridisation conditions;
[13001] (g) a nucleic acid molecule encoding a polypeptide which can be isolated with the aid of monoclonal or polyclonal antibodies made against a polypeptide encoded by one of the nucleic acid molecules of (a), (b), (c), (d), (e) or (f);
[13002] (h) a nucleic acid molecule encoding a polypeptide comprising the consensus sequence or one or more polypeptide motifs as shown in column 8 of Table IV, application no. 2;
[13003] (i) a nucleic acid molecule encoding a polypeptide having the activity represented by a respective protein as depicted in column 5 of Table II, application no. 2;
[13004] (j) a nucleic acid molecule comprising a polynucleotide which is obtained by amplifying a cDNA library or a genomic library using the primers in Table III, application no. 2, column 8;
[13005] and
[13006] (k) nucleic acid molecule which is obtainable by screening a suitable nucleic acid library, especially a cDNA library and/or a genomic library, under stringent hybridization conditions with a probe comprising one of the sequences of the nucleic acid molecule of (a), (b), (c), (d), (e), (f), (g), (h), (i) or (j) or with a fragment of at least 15 nt, preferably 20 nt, 30 nt, 50 nt, 100 nt, 200 nt,500 nt, 1000 nt, 1500 nt, 2000 nt or 3000 nt of the nucleic acid molecule characterized in (a), (b), (c), (d), (e), (f), (g), (h), (i) or (j);
   or a nucleic acid molecule comprising a sequence which is complementary thereto;]
   whereby, preferably, the nucleic acid molecule according to 1 (a), (b), (c), (d), (e), (f), (g), (h), (i), (j) or (k) distinguishes over the sequence depicted in Table I A and/or I B, application no. 2, column 5 or 8, or the coding regions thereof, by one or more nucleotides (especially but not exceeding 5%, preferably 4%, 3%, 2%, 1%, 0.5%, 0.2% or 0.1%). In an embodiment, the nucleic acid molecule of the invention does not consist of the sequence shown in Table I A and/or I B, application no. 2, column 5 or 8, or the coding region thereof. In another embodiment, the nucleic acid molecule of the present invention, preferably the coding region thereof, is at least 30%, 40%, 50%, 60%, 70%, 80%, 90%, 95% identical but less than 100%, 99.999%, 99.99%, 99.9%, 99%, 98%, 97%, 96% or 95% identical to the sequence shown in Table I A and/or I B, application no. 2, column 5 or 8, or the coding region thereof, respectively. In a further embodiment the nucleic acid molecule does not encode the polypeptide sequence shown in Table II A and/or II B, application no. 2, column 5 or 8 but homologs thereof. Accordingly, in one embodiment, the nucleic acid molecule of the present invention encodes in one embodiment a polypeptide which differs at least in one or more amino acids (especially but not exceeding 5%, preferably 4%, 3%, 2%, 1%, 0.5%, 0.2% or 0.1%) from the polypeptide shown in Table II, application no. 2, column 5 or 8 and does not encode a protein of the sequence shown in Table II A and/or II B, application no. 2, column 5 or 8. Accordingly, in one embodiment, the protein encoded by a sequence of a nucleic acid according to 1 (a), (b), (c), (d), (e), (f), (g), (h), (i), (j) or (k) does not consist of the sequence shown in Table I A and/or I B, application no. 2, column 5 or 8, or the coding region thereof. In a further embodiment, the protein of the present invention is at least 30%, 40%, 50%, 60%, 70%, 80%, 90%, 95% identical to protein sequence depicted in Table II A and/or II B, application no. 2, column 5 or 8 but less than 100%, preferably less than 99.999%, 99.99%, 99.9%, 99%, 98%, 97%, 96% or 95% identical to the sequence shown in Table II A and/or II B, application no. 2, column 5 or 8;
   as well as respective transgenic cells, tissue, parts of such non-human organism, e.g. plant cells, plant tissue, part of plants, like leaves, roots, stems, blossoms, seeds, fruits, pollen and the like.
   (All the references to Tables I to IV are references to the corresponding lines of Tables I to IV.)

[13007] In a preferred embodiment of said transgenic non-human organism said nucleic acid molecule according to 1 (a), (b), (c), (d), (e), (f), (g), (h), (i), (j) or (k) encodes a polypeptide which has the activity of the respective polypeptide represented by a protein comprising a polypeptide as depicted in the respective line in column 5 of Table II, application no. 2.

[13008] In another preferred embodiment of said transgenic non-human organism said nucleic acid molecule according to 1 (a), (b), (c), (d), (e), (f), (g), (h), (i), (j) or (k) confers a generation or an increase of the respective fine chemical in a non-human organism or a part thereof as compared to a corresponding wild-type non-human organism or part thereof.

[13009] In another preferred embodiment of said transgenic non-human organism said nucleic acid molecule according to 1 (a), (b), (c), (d), (e), (f), (g), (h), (i), (j) or (k) encodes a polypeptide which has the activity of the respective polypeptide represented by a protein as depicted in the respective line in column 5 of Table II application no. 2 and confers a generation or an increase of the respective fine chemical in a non-human organism or a part thereof as compared to a corresponding wild-type non-human organism or part thereof.

[13010] In another embodiment of said transgenic non-human organism the expression cassette comprises 2) a nucleic acid molecule encoding a transit peptide, preferably encoding a plastidal transit peptide, especially in case in column 6 of Table I, application no. 2, in the same line as of the respective nucleic acid molecule according to 1) “plastidic” is depicted, or encoding a mitochondrial transit peptide, especially in case in column 6 of Table I, application no. 2, in the same line as of the respective nucleic acid molecule according to 1) “mitochondrial” is depicted.

[13011] In another embodiment thereof the expression cassette does not comprise 2) a nucleic acid molecule encoding a transit peptide, especially in case in column 6 of Table I, application no. 2, in the same line as of the respective nucleic acid molecule according to 1) “non-targeted” is depicted.

[13012] In another embodiment of said transgenic non-human organism said vector comprises beneath said nucleic acid molecule according to 1 (a), (b), (c), (d), (e), (f), (g), (h), (i), (j) or (k), a promoter, prefereably a promoter selected from the group consisting of Big35S, PCUbi, Super and USP, which are operable linked.

[13013] In a preferred embodiment of said transgenic non-human organism said vector comprises beneath said nucleic acid molecule according to 1 (a), (b), (c), (d), (e), (f), (g), (h), (i), (j) or (k), a promoter, prefereably a promoter selected from the group consisting of Big35S, PCUbi, Super and USP, which are operable linked; and said nucleic acid molecule according to 1 (a), (b), (c), (d), (e), (f), (g), (h), (i), (j) or (k) encodes a polypeptide which has the activity of the respective polypeptide represented by a protein comprising a polypeptide as depicted in the respective line in column 5 of Table II, application no. 2.

[13014] In another preferred embodiment of said transgenic non-human organism said vector comprises beneath said nucleic acid molecule according to 1 (a), (b), (c), (d), (e), (f), (g), (h), (i), (j) or (k), a promoter, prefereably a promoter selected from the group consisting of Big35S, PCUbi, Super and USP, which are operable linked; and said nucleic acid molecule according to 1 (a), (b), (c), (d), (e), (f), (g), (h), (i), (j) or (k) confers a generation or an increase of the respective fine chemical in a non-human organism or a part thereof as compared to a corresponding wild-type non-human organism or part thereof.

[13015] In another preferred embodiment of said transgenic non-human organism said vector comprises beneath said nucleic acid molecule according to 1 (a), (b), (c), (d), (e), (f), (g), (h), (i), (j) or (k), a promoter, prefereably a promoter selected from the group consisting of Big35S, PCUbi, Super and USP, which are operable linked; and said nucleic acid molecule according to 1 (a), (b), (c), (d), (e), (f), (g), (h), (i), (j) or (k) encodes a polypeptide which has the activity of the respective polypeptide represented by a protein as depicted in the same line in column 5 of Table II, application no. 2, and confers a generation or an increase of the respective fine chemical in a non-human organism or a part thereof as compared to a corresponding wild-type non-human organism or part thereof.

[13016] In another embodiment of said transgenic non-human organism said vector comprises beneath said nucleic acid molecule according to 1 (a), (b), (c), (d), (e), (f), (g), (h), (i), (j) or (k), a nucleic acid molecule encoding a transit peptide, preferably encoding a plastidal transit peptide, especially in case in column 6 of Table I, application no. 2, in the same line as of the respective nucleic acid molecule according to 1) “plastidic” is depicted, or encoding a mitochondrial transit peptide, especially in case in column 6 of Table I, application no. 2, in the same line as of the respective nucleic acid molecule according to 1) “mitochondrial” is depicted, which are operable linked.

[13017] In another embodiment of said transgenic non-human organism said vector does not comprise beneath said nucleic acid molecule according to 1 (a), (b), (c), (d), (e), (f), (g), (h), (i), (j) or (k), a nucleic acid molecule encoding a transit peptide in case in column 6 of Table I, application no.

[13018] 2, in the same line as of the respective nucleic acid molecule according to 1) “non-targeted” is depicted, which are operable linked.

[13019] In another embodiment of said transgenic non-human organism said vector comprises beneath said nucleic acid molecule according to 1 (a), (b), (c), (d), (e), (f), (g), (h), (i), (j) or (k), and a promoter, prefereably a promoter selected from the group consisting of Big35S, PCUbi, Super and USP; a nucleic acid molecule encoding a transit peptide, preferably encoding a plastidal transit peptide, especially in case in column 6 of Table I, application no. 2, in the same line as of the respective nucleic acid molecule according to 1) “plastidic” is depicted, or encoding a mitochondrial transit peptide, especially in case in column 6 of Table I, application no. 2, in the same line as of the respective nucleic acid molecule according to 1) “mitochondrial” is depicted, which are operable linked.

[13020] In another embodiment of said transgenic non-human organism said vector does not comprise beneath said nucleic acid molecule according to 1 (a), (b), (c), (d), (e), (f), (g), (h), (i), (j) or (k), and a promoter, prefereably a promoter selected from the group consisting of Big35S, PCUbi, Super and USP; a nucleic acid molecule encoding a transit peptide, especially in case in column 6 of Table I, application no. 2, in the same line as of the respective nucleic acid molecule according to 1) “non-targeted” is depicted, which are operable linked.

[13021] In another embodiment of said transgenic non-human organism said vector comprises beneath said nucleic acid molecule according to 1 (a), (b), (c), (d), (e), (f), (g), (h), (i), (j) or (k), and a promoter, prefereably a promoter selected from the group consisting of Big35S, PCUbi, Super and USP; a nucleic acid molecule encoding a transit peptide, preferably encoding a plastidal transit peptide, especially in case in column 6 of Table I, application no. 2, in the same line as of the respective nucleic acid molecule according to 1) “plastidic” is depicted, or encoding a mitochondrial transit peptide, especially in case in column 6 of Table I, application no. 2, in the same line as of the respective nucleic acid molecule according to 1) “mitochondrial” is depicted, which are operable linked; and wherein said nucleic acid molecule according to 1 (a), (b), (c), (d), (e), (f), (g), (h), (i), (j) or (k) encodes a polypeptide which has the activity of the respective polypeptide represented by a protein comprising a polypeptide as depicted in the respective line in column 5 of Table II, application no. 2.

[13022] In another embodiment of said transgenic non-human organism said vector does not comprise beneath said nucleic acid molecule according to 1 (a), (b), (c), (d), (e), (f), (g), (h), (i), (j) or (k), and a promoter, prefereably a promoter selected from the group consisting of Big35S, PCUbi, Super and USP; a nucleic acid molecule encoding a transit peptide, especially in case in column 6 of Table I, application no. 2, in the same line as of the respective nucleic acid molecule according to 1) “non-targeted” is depicted, which are operable linked; and wherein said nucleic acid molecule according to 1 (a), (b), (c), (d), (e), (f), (g), (h), (i), (j) or (k) encodes a polypeptide which has the activity of the respective polypeptide represented by a protein comprising a polypeptide as depicted in the respective line in column 5 of Table II, application no. 2.

[13023] In another embodiment of said transgenic non-human organism said vector comprises beneath said nucleic acid molecule according to 1 (a), (b), (c), (d), (e), (f), (g), (h), (i), (j) or (k), and a promoter, prefereably a promoter selected from the group consisting of Big35S, PCUbi, Super and USP; a nucleic acid molecule encoding a transit peptide, preferably encoding a plastidal transit peptide, especially in case in column 6 of Table I, application no. 2, in the same line as of the respective nucleic acid molecule according to 1) “plastidic” is depicted, or encoding a mitochondrial transit peptide, especially in case in column 6 of Table I, application no. 2, in the same line as of the respective nucleic acid molecule according to 1) “mitochondrial” is depicted, which are operable linked; and wherein said nucleic acid molecule according to 1 (a), (b), (c), (d), (e), (f), (g), (h), (i), (j) or (k) confers a generation or an increase of the respective fine chemical in a non-human organism or a part thereof as compared to a corresponding wild-type non-human organism or part thereof.

[13024] In another embodiment of said transgenic non-human organism said vector does not comprise beneath said nucleic acid molecule according to 1 (a), (b), (c), (d), (e), (f), (g), (h), (i), (j) or (k), and a promoter, prefereably a promoter selected from the group consisting of Big35S, PCUbi, Super and USP; a nucleic acid molecule encoding a transit peptide, especially in case in column 6 of Table I, application no. 2, in the same line as of the respective nucleic acid molecule according to 1) “non-targeted” is depicted, which are operable linked; and wherein said nucleic acid molecule according to 1 (a), (b), (c), (d), (e), (f), (g), (h), (i), (j) or (k) confers a generation or an increase of the respective fine chemical in a non-human organism or a part thereof as compared to a corresponding wild-type non-human organism or part thereof.

[13025] In another embodiment of said transgenic non-human organism said vector comprises beneath said nucleic acid molecule according to 1 (a), (b), (c), (d), (e), (f), (g), (h), (i), (j) or (k), and a promoter, prefereably a promoter selected from the group consisting of Big35S, PCUbi, Super and USP; a nucleic acid molecule encoding a transit peptide, preferably encoding a plastidal transit peptide, especially in case in column 6 of Table I, application no. 2, in the same line as of the respective nucleic acid molecule according to 1) “plastidic” is depicted, or encoding a mitochondrial transit peptide, especially in case in column 6 of Table I, application no. 2, in the same line as of the respective nucleic acid molecule according to 1) “mitochondrial” is depicted, which are operable linked; and wherein said nucleic acid molecule according to 1 (a), (b), (c), (d), (e), (f), (g), (h), (i), (j) or (k) encodes a polypeptide which has the activity of the respective polypeptide represented by a protein as depicted in the respective line in column 5 of Table II application no. 2 and confers a generation or an increase of the respective fine chemical in a non-human organism or a part thereof as compared to a corresponding wild-type non-human organism or part thereof.

[13026] In another embodiment of said transgenic non-human organism said vector does not comprise beneath said nucleic acid molecule according to 1 (a), (b), (c), (d), (e), (f), (g), (h), (i), (j) or (k), and a promoter, prefereably a promoter selected from the group consisting of Big35S, PCUbi, Super and USP; a nucleic acid molecule encoding a transit peptide, especially in case in column 6 of Table I, application no. 2, in the same line as of the respective nucleic acid molecule according to 1) “non-targeted” is depicted, which are operable linked; and wherein said nucleic acid molecule according to 1 (a), (b), (c), (d), (e), (f), (g), (h), (i), (j) or (k) encodes a polypeptide which has the activity of the respective polypeptide represented by a protein as depicted in the respective line in column 5 of Table II application no. 2 and confers a generation or an increase of the respective fine chemical in a non-human organism or a part thereof as compared to a corresponding wild-type non-human organism or part thereof.

[13027] In a prefered embodiment of said transgenic non-human organism said nucleic acid molecule according to 1 (a), (b), (c), (d), (e), (f), (g), (h), (i), (j) or (k), said promoter and optionally said nucleic acid molecule encoding a transit peptide are encompassed in an expression cassette in said vector. Accordingly an embodiment the invention provides a non-human organism comprising or being transformed by a vector comprising an expression casssette comprising said nucleic acid molecule according to 1 (a), (b), (c), (d), (e), (f), (g), (h), (i), (j) or (k), said promoter and optionally said a nucleic acid molecule encoding a transit peptide, operable linked. Said expression cassette may encompass a terminator, too.

[13028] [0291.1.1.2] to [0299.1.1.2] for the disclosure of these paragraphs see [0291.1.1.1] to [0299.1.1.1] above.

[13029] The term “biological active portion” or “biological activity” means a polypeptide as depicted in the respective line in Table II, application no. 2, column 3 or a portion of said polypeptide which still has at least 10% or 20%, preferably 30%, 40%, 50% or 60%, especially preferably 70%, 75%, 80%, 90% or 95% of the enzymatic or biological activity of the natural or starting enzyme or protein.

[13030] [301.1.1.2] to [0304.1.1.2] for the disclosure of these paragraphs see [0301.1.1.1] to [0304.1.1.1] above.

[13031] Synthetic oligonucleotide primers for the amplification, e.g. as shown in the respective line in Table III, application no. 2, column 8, by means of polymerase chain reaction can be generated on the basis of a sequence shown herein, for example the sequence shown in the respective line in Table I, application no. 2, columns 5 or 8, or the sequences derived from Table II, application no. 2, columns 5 or 8, respectively.

[13032] Moreover, it is possible to identify a conserved region of a protein from various organism by carrying out protein sequence alignments with the polypeptide encoded by the nucleic acid molecules of the present invention, in particular with the sequences encoded by the nucleic acid molecule shown in the respective line in column 5 or 8 of Table I, application no. 2, from which conserved regions, and in turn, degenerate primers can be derived. Conserved regions are those, which show a very little variation in the amino acid in one particular position of several homologs from different origin. The consensus sequence and polypeptide motifs shown in the respective line in column 8 of Table IV, application no. 2, are derived from such alignments of homologous proteins.

[13033] In an embodiment of the present invention, in the method of the present invention the activity of a polypeptide comprising or consisting of a consensus sequence or at least one polypeptide motif shown in the respective line in Table IV, application no.2, column 8, is increased. In another embodiment thereof, the method of the present invention relates to a polypeptide comprising or consisting of a consensus sequence shown in the respective line in

[13034] Table IV, application no. 2, column 8 or comprising at least one polypeptide motif shown in the respective line in Table IV, application no. 2, column 8, whereby not more than 20, 15, 10, 9, 8, 7, 6, 5 4, 3, 2 or 1, or 0 of the amino acid positions indicated can be replaced by any amino acid. In another embodiment thereof, the method of the present invention relates to a polypeptide comprising or consisting of a consensus sequence shown in the respective line in Table IV, application no. 2, column 8 or comprising at least one polypeptide motif shown in the respective line in Table IV, application no. 2, column 8, whereby not more than 15%, 10%, 5%, 4%, 3%, 2% or 1%, or 0% of the amino acid positions defined as distinct specific amino acids are/is replaced by another amino acid. In another embodiment thereof, the method of the present invention relates to a polypeptide comprising or consisting of a consensus sequence shown in the respective line in Table IV, application no. 2, column 8 or comprising at least one polypeptide motif shown in the respective line in Table IV, application no. 2, column 8, whereby not more than than 20, 15, 10, 9, 8, 7, 6, 5, 4, 3, 2 or 1, or 0 amino acids are inserted into a consensus sequence or polypeptide motif.

[13035] In an embodiment of the present invention, in the method of the present invention the activity of a polypeptide comprising or consisting of a consensus sequence or at least one polypeptide motif shown in the respective line in Table IV, application no.2, column 8, is increased, whereby said polypeptide distinguishes over the sequence depicted in Table II, application no. 2, columns 5 or 8 by one or more amino acids.

[13036] In one embodiment, said polypeptide of the invention distinguishes over the sequence shown in the respective line in Table II, application no. 2, columns 5 and 8 by more than 5, 6, 7, 8 or 9 amino acids, preferably by more than 10, 15, 20, 25 or 30 amino acids, even more preferred are more than 40, 50, or 60 amino acids and, preferably, the sequence of the polypeptide of the invention distinguishes from the sequence shown in the respective line in Table II B, application no. 2, columns 5 and 8 by not more than 80%, 70%, 60%, 50%, 40%, 30%, 20%, 10%, 5%, 4%, 3%, 2%, 1% or 0.5%. In another embodiment, said polypeptide of the invention does not consist of the sequence shown in Table II, application no. 2, columns 5 or 8.

[13037] [0309.1.1.2] to [0321.1.1.2] for the disclosure of these paragraphs see [0309.1.1.1] to [0321.1.1.1] above.

[13038] Polypeptides having above-mentioned activity, i.e. conferring the production or the increased production of the fine chemical arginine, glutamate, glutamine, or proline as compared to a corresponding, e.g. non-transformed, wild type non-human organism, like a microorganism or a plant cell, plant or part thereof, can be encoded by other DNA sequences which hybridize to the sequences shown in the respective line in Table I, application no. 2, columns 5 and 8, preferably the coding region therof, at least under relaxed hybridization conditions and which encode the expression of polypeptides conferring the production or the increased production of the respective fine chemical arginine, glutamate, glutamine, or proline as compared to a corresponding, e.g. non-transformed, wild type non-human organism, like a microorganism or a plant cell, plant or part thereof.

[13039] [0323.1.1.2] to [0329.1.1.2] for the disclosure of these paragraphs see [0323.1.1.1] to [0329.1.1.1] above.

[13040] Further, the nucleic acid molecule of the invention comprises a nucleic acid molecule, which is a complement of one of the nucleotide sequences of above-mentioned nucleic acid molecules or a portion thereof. A nucleic acid molecule or its sequence which is complementary to one of the nucleotide molecules or sequences shown in the respective line in Table I, application no. 2, columns 5 or 8, preferably the coding rgion thereof, homologs or fragments thereof, is one which is sufficiently complementary to one of the nucleotide molecules or sequences shown in the respective line inTable I, application no. 2, columns 5 or 8, preferably the coding rgion thereof, homologs or fragments thereof, such that it can hybridize to one of the nucleotide sequences shown in Table I, application no. 2, columns 5 or 8, preferably the coding rgion thereof, homologs or fragments thereof, thereby forming a stable duplex. Preferably, the hybridization is performed under stringent hybrization conditions. However, a complement of one of the herein disclosed sequences is preferably a sequence complement thereto according to the base pairing of nucleic acid molecules well known to the skilled person. For example, the bases A and G undergo base pairing with the bases T and U or C, resp. and visa versa. Modifications of the bases can influence the base-pairing partner.

[13041] The nucleic acid molecule of the invention comprises a nucleotide sequence which is at least about 30%, 35%, 40%, 45%, 50%, 55%, 60%, 65%, 70%, 75%, 80%, 90%, 95%, 96%, 97%, 98%, 99%, 99.5% or more homologous to a nucleotide sequence shown in Table I, application no. 2, columns 5 or 8, preferably the coding region thereof, homologs or fragments thereof, and preferably has above-mentioned activity, in particular conferring the production or the increased production of the fine chemical arginine, glutamate, glutamine, or proline, respectively, after increasing the activity or an activity of a gene as shown in the respective line in Table I or of a gene product, e.g. as shown in the respective line in Table II, application no. 2, column 5 or 8, by for example in one embodiment expression either in the cytsol or in an organelle such as a plastid or mitochondria or both, preferably in a plastid, or in another embodiment non-targeted or targeted.

[13042] The nucleic acid molecule of the invention comprises a nucleotide sequence or molecule which hybridizes, preferably hybridizes under stringent conditions as defined herein, to one of the nucleic acid molecule shown in the respective line in Table I, preferably Table IB, application no. 2, columns 5 or 8, preferably the coding region therof, fragements or homolos therof, and encodes a protein having above-mentioned activity, e.g. conferring the production or the increased production of the respective fine chemical arginine, glutamate, glutamine, or proline as compared to a corresponding, e.g. non-transformed, wild type non-human organism, like a microorganism or a plant cell, plant or part thereof, by for example in one embodiment expression either in the cytsol or in an organelle such as a plastid or mitochondria or both, preferably in a plastid, or in another embodiment non-targeted or targeted, and optionally, the activity thereof is selected from the group consisting of 2,3-dihydroxy-2,3-dihydrophenylpropionatedehydrogenase, 2-oxoglutarate dehydrogenase E1 subunit, 30S ribosomal protein, 3-deoxy-7-phosphoheptulonate synthase, 3-phosphoglycerate dehydrogenase, 47266012-protein, 49747384_SOYBEAN-protein, 4-alpha-glucanotransferase, ABC transporter permease protein, acetyl CoA carboxylase, acetyltransferase, acid shock protein, aconitate hydratase, acyl-CoA dehydrogenase, acyl-CoA synthase, acyltransferase, adenylosuccinate lyase, adenylylsulfate kinase, alanine dehydrogenase, aldehyde dehydrogenase, allantoicase, allantoinase, amine oxidase, amino acid ABC transporter permease protein, amino acid acetyltransferase, aminotransferase, ankyrin repeat family protein, anthranilate synthase component II, arginine decarboxylase, arginine exporter protein, asparaginase, aspartase, aspartate aminotransferase, At1g17440-protein, At1g19800-protein, At1g29350-protein, At1g47380-protein, At1g67340-protein, At4g32480-protein, At5g16650-protein, ATP synthase subunit beta, ATP-binding component of a transport system, ATP-dependent RNA helicase, AX653549-protein, AY087308-protein, b0456-protein, b0518-protein, b1003-protein, b1024-protein, b1108-protein, b1137-protein, b1163-protein, b1259-protein, b1280-protein, b1330-protein, b1445-protein, b1522-protein, b1898-protein, b2107-protein, b2121-protein, b2360-protein, b2399-protein, b2474-protein, b2513-protein, b2548-protein, b2613-protein, b2673-protein, b2812-protein, b2846-protein, b2909-protein, b2936-protein, b2999-protein, b3121-protein, b3151-protein, b3346-protein, b3410-protein, B3427-protein, b3509-protein, b3814-protein, b3817-protein, b3989-protein, b4029-protein, b4121-protein, beta-galactosidase, beta-hydroxylase, bifunctional purine biosynthesis protein, branched-chain amino acid ABC transporter permease protein, branched-chain amino acid permease, calcium-dependent protein kinase, carbohydrate kinase, carbon dioxide concentrating mechanism protein, cation/acetate symporter, cation-transporting ATPase, CBL-interacting protein kinase, CCAAT-binding transcription factor, CDP-diacylglycerol-glycerol-3-phosphate 3-phosphatidyltransferase, CDP-diglyceride synthetase, cell division control protein, cell division protein, Chaperone protein CIpB, circadian clock protein, coproporphyrinogen III oxidase, coproporphyrinogen oxidase, CTP synthase, CTP synthetase, cullin, cyclin D, cysteine synthase A, delta-1-pyrroline 5-carboxylase synthetase, dihydrolipoamide acetyltransferase, dihydrolipoamide dehydrogenase, DNA binding protein, DNA helicase II, DNA helicase IV, DNA mismatch repair protein, DnaJ-like chaperone, electron transport complex protein, elongation factor Tu, enoyl-CoA hydratase, enterobacterial common antigen polymerase, ethanolamine utilization protein, eukaryotic translation initiation factor 5, exopolyphosphatase, fatty acid desaturase, flavodoxin, fumarylacetoacetate hydrolase, gamma-glutamyltranspeptidase, geranylgeranyl pyrophosphate synthase, gibberellin 20-oxidase, Glu/Leu/Phe/Val dehydrogenase, gluconate transport system permease 3, glucose dehydrogenase, glucose-1-phosphate cytidylyltransferase, glucose-6-phosphate 1-dehydrogenase, glutamate-ammonia-ligase, glutamine amidotransferase, glutamine synthetase, glutaminyl-tRNA synthetase, glutaredoxin, glutathione S-transferase, glycerol dehydrogenase, glycerol-3-phosphate dehydrogenase, glycogen (starch) synthase, glycogen synthase, glycogenin, glycoprotease, glycosidase, glycosyl transferase, GM02LC11114-protein, GM02LC17485-protein, GM02LC46-protein, GM02LC5744-protein, H/ACA ribonucleoprotein complex subunit 3, harpin-induced family protein, heat shock protein, heat shock transcription factor, HesB/YadR/YfhF family protein, histone H2A, homocitrate synthase, hydrolase, integral membrane transporter family protein, iron(III) dicitrate-binding protein, isochorismate synthase, isocitrate dehydrogenase, isopentenyl diphosphate isomerase, L-asparaginase, L-aspartate oxidase, Leucyl/phenylalanyl-tRNA-protein transferase, lipoprotein precursor, L-ribulose-5-phosphate 4-epimerase, lysyl-tRNA synthetase, major facilitator superfamily transporter protein, malate dehydrogenase, malic enzyme, malonyl CoA-acyl carrier protein transacylase, membrane protein, membrane transport protein, metal-dependent hydrolase, methylglyoxal synthase, methyltransferase, mitochondrial processing protease, molecular chaperone portein, monothiol glutaredoxin, monthiol glutaredoxin, multiple antibiotic resistance protein, murein transglycosylase, N-acetyl-gamma-glutamyl-phosphate reductase, NAD(P)H-quinone oxidoreductase subunit, NADH dehydrogenase I chain I, nitrate/nitrite transport protein, ornithine carbamoyltransferase, oxidoreductase, oxidoreductase subunit, oxireductase, permease protein of phosphate ABC transporter, peroxisome assembly protein, phosphatidylinositol 3- and 4-kinase family protein, phosphoadenosine phosphosulfate reductase, phosphoanhydride phosphorylase, phosphopantetheine adenylyltransferase, phosphopantothenoylcysteine decarboxylase, phosphopantothenoylcysteinesynthetase/decarboxylase, phosphoribosylaminoimidazole carboxylase catalytic subunit, phosphoribosylformyl glycinamidine synthase subunit, phosphoribosylglycinamide formyltransferase, phosphoribosyltransferase, Photosystem I reaction center subunit XI, photosystem II protein, polygalacturonase, polyphosphate kinase, potassium transport protein, prem-RNA-splicing factor, protease, protein kinase, protein phosphatase, purine nucleoside phosphorylase, purine-nucleoside phosphorylase, pyrroline carboxylate reductase, pyruvate kinase, quinolinate synthetase, riboflavin biosynthesis protein, ribosephosphate isomerase, constitutive, RNA binding protein, s_pp015018333r-protein, sec-independent protein translocase, Sec-independent protein translocase subunit, serine protease, serine protease inhibitor, short-chain alcohol dehydrogenase family, sll0064-protein, sll0254-protein, sll0354-protein, sll1761-protein, slr0600-protein, sodium/proton antiporter, squalene monooxygenase, sterol O-acyltransferase, thioredoxin, thioredoxin family protein, threonine dehydrogenase, threonine synthase, transcription factor, transcriptional regulator, transcriptional regulator protein, translation initiation factor subunit, transport protein, TTC0768-protein, TTC1386-protein, urease subunit, uridine/cytidine kinase, valine-pyruvate transaminase, XM_{—}473199-protein, YCL026C-A-protein, ycr102c-protein, ydr338c-protein, yer014w-protein, yer106w-protein, YFLO19C-protein, yf1054c-protein, ygl237c-protein, ygr068c-protein, ygr221 c-protein, yhl013c-protein, yhr207c-protein, ylr065c-protein, ylr178c-protein, ynl142w-protein, yor221c-protein, zinc finger protein, zinc transporter, Zm_{—}4842_BE510522-protein, and ZM06LC11975-protein, respectively.

[13043] Moreover, the nucleic acid molecule of the invention can comprise only a portion of the coding region of one of the nucleic acid molecules depicted in Table I, application no. 2, columns 5 or 8, for example a fragment which can be used as a probe or primer or a fragment encoding a biologically active portion of the polypeptide of the present invention or of a polypeptide used in the process of the present invention, i.e. having above-mentioned activity, e.g. conferring the production or the increased production of the respective fine chemical arginine, glutamate, glutamine, or proline as compared to a corresponding, e.g. non-transformed, wild type non-human organism, like a microorganism or a plant cell, plant or part thereof, by for example in one embodiment expression either in the cytsol or in an organelle such as a plastid or mitochondria or both, preferably in a plastid, or in another embodiment non-targeted or targeted. The nucleotide sequences determined from the cloning of the present protein-accordingt-to-the-invention-encoding gene allows for the generation of probes and primers designed for use in identifying and/or cloning its homologues from other cell types and organisms. The probe/primer typically comprises a substantially purified oligonucleotide. The oligonucleotide typically comprises a region of nucleotide sequence that hybridizes under stringent conditions to at least about 12, 15 preferably about 20 or 25, more preferably about 40, 50 or 75 consecutive nucleotides of a sense strand of one of the sequences set forth, e.g., in the respective line in Table I, application no. 2, column 5 or 8, preferably the coding region thereof, or a homolog or a fragment thereof, an anti-sense sequence of one of the sequences, e.g., set forth in the respective line in Table I, application no. 2, columns 5 or 8, preferably the coding region thereof, or a homolog or a fragment thereof or naturally occurring mutants thereof. Primers based on a nucleic acid molecule of the invention can be used in PCR reactions to clone homologs of the polypeptide of the invention or of the polypeptide used in the process of the invention, e.g. as the primers described in the examples of the present invention, e.g. as shown in the examples. A PCR with the primers shown in the respective line in Table Ill, column 8 will result in a fragment of the gene product as shown in Table II, application no. 2, column 5.

[13044] Primer sets are interchangeable. The person skilled in the art knows how to desing and combine said primers to result in the desired product, e.g. in a full length clone or a partial sequence. Probes based on the sequences of the nucleic acid molecule of the invention or used in the process of the present invention can be used to detect transcripts or genomic sequences encoding the same or homologous proteins. The probe can further comprise a label group attached thereto, e.g. the label group can be a radioisotope, a fluorescent compound, an enzyme, or an enzyme co-factor. Such probes can be used as a part of a genomic marker test kit for identifying cells which express a polypeptide of the invention or used in the process of the present invention, such as by measuring a level of an encoding nucleic acid molecule in a sample of cells, e.g. detecting mRNA levels or determining, whether a genomic gene comprising the sequence of the polynucleotide of the invention or used in the processes of the present invention has been mutated or deleted.

[13045] As the expression of a respective nucleic acids of the invention is related to the synthesis of the respective fine chemical arginine, glutamate, glutamine, or proline its function as a probe extends to the detection of microorganisms, plant tissues, plants, plant variets, plant ecotypes or plant genera with varying capability or potential for synthesis of the respective fine chemical arginine, glutamate, glutamine, or proline. Therefore in one embodiment the present invention relates to a method for analyzing the capability or potential of a plant tissue, a plant, a plant variety or plant ecotype to produce the fine chemical arginine, glutamate, glutamine, or proline by using the nucleic acid of the invention or parts thereof as a probe to detect the amount of the nucleic acid of the invention in the non-human organism or a part thereof in comparision to another non-human organism.

[13046] The nucleic acid molecule of the invention encodes a polypeptide or portion thereof which includes an amino acid sequence which is sufficiently homologous to the amino acid sequence shown in respective line in Table II, application no. 2, columns 5 or 8 such that the protein or portion thereof maintains the ability to confer the production or the increased production of the respective fine chemical arginine, glutamate, glutamine, or proline as compared to a corresponding, e.g. non-transformed, wild type non-human organism, like a microorganism or a plant cell, plant or part thereof, in particular increasing the activity as mentioned above or as described in the examples in microorganisms or plants.

[13047] As used herein, the language “sufficiently homologous” refers to proteins or portions thereof which have amino acid sequences which include a minimum number of identical or equivalent amino acids (e.g. an amino acid which has a similar side chain as an amino acid in one of the sequences of the polypeptide of the present invention) to an amino acid sequence shown in the respective line in Table II, application no. 2, columns 5 or 8 such that the protein or portion thereof is able to confer the production or the increased production of the respective fine chemical arginine, glutamate, glutamine, or proline as compared to a corresponding, e.g. non-transformed, wild type non-human organism, like a microorganism or a plant cell, plant or part thereof. For example having the activity of a protein as shown in the respective line in Table II, application no. 2, column 3 and as described herein.

[13048] In an embodiment of the present invention, the nucleic acid molecule of the present invention comprises a nucleic acid molecule that encodes a portion of the protein of the present invention. The protein is at least about 30%, 35%, 40%, 45% 50%, 55%, 60%, 65%, 70%, 75%, 80%, 85%, 90%, 91%, 92%, 93%, 94%, 95%, 96%, 97%, 98%, 99%, 99.5% or more homologous to an entire amino acid sequence shown in the respective line of Table II, application no. 2, column 5 or 8 and has the above-mentioned activity, e.g. conferring the production or the increased production of the respective fine chemical arginine, glutamate, glutamine, or proline as compared to a corresponding, e.g. non-transformed, wild type non-human organism, like a microorganism or a plant cell, plant or part thereof by, for example in a embodiment expression either in the cytsol or in an organelle such as a plastid or mitochondria or both, preferably in a plastid, or in another embodiment by targeted or non-targeted expression.

[13049] [0338.1.1.2] to [0339.1.1.2] for the disclosure of these paragraphs see [0338.1.1.1] to [0339.1.1.1] above.

[13050] The invention further relates to nucleic acid molecules or methods using said nucleic acid molecules that differ from one of the nucleotide sequences shown in the respective line in Table I, application no. 2, columns 5 or 8, preferably the coding region thereof, or fragments or homologs thereof, due to degeneracy of the genetic code but encode a polypeptide of the present invention, in particular a polypeptide having the above-mentioned activity, e.g. as those polypeptides depicted in the respective line in Table II, application no.2, columns 5 or 8, fragments or homologs thereof. Advantageously, the nucleic acid molecule of the invention comprises, or in an other embodiment has, a nucleotide sequence encoding a protein comprising, or in an other embodiment having, an amino acid sequence shown in the respective line in Table II, application no. 2, columns 5 or 8, fragments or homologs thereof. In a further embodiment, the nucleic acid molecule of the invention encodes a full length protein which is substantially homologous to an amino acid sequence shown in the respective line in Table II, application no. 2, columns 5 or 8, or homologs thereof. However, in an embodiment, the nucleic acid molecule of the present invention does not consist of the sequence shown in the respective line in Table I, preferably Table IA, application no. 2, columns 5 or 8, preferably the coding region thereof, but the functional homologs thereof.

[13051] [0341.1.1.2] to [0343.1.1.2] for the disclosure of these paragraphs see [0341.1.1.1] to [0343.1.1.1] above.

[13052] Accordingly, in another embodiment, a nucleic acid molecule of the invention is at least 15, 20, 25 or 30 nucleotides in length. Preferably, it hybridizes under stringent conditions to a nucleic acid molecule comprising a nucleotide sequence of the nucleic acid molecule of the present invention or used in the process of the present invention, e.g. comprising the sequence shown in the respective line in Table I, application no. 2, columns 5 or 8, preferably the coding region thereof. In another embodiment the nucleic acid molecule is preferably at least 20, 30, 50, 100, 250 or more nucleotides in length.

[13053] for the disclosure of this paragraph see [0345.1.1.1] above.

[13054] Preferably, a nucleic acid molecule of the invention that hybridizes under stringent conditions to a sequence shown in the respective line in Table I, application no. 2, columns 5 or 8, preferably the coding region thereof, corresponds to a naturally-occurring nucleic acid molecule of the invention. As used herein, a “naturally-occurring” nucleic acid molecule refers to a RNA or DNA molecule having a nucleotide sequence that occurs in nature (e.g. encodes a natural protein). Preferably, the nucleic acid molecule encodes a natural protein having above-mentioned activity, e.g. conferring the production or the increased production of the respective fine chemical arginine, glutamate, glutamine, or proline as compared to a corresponding, e.g. non-transformed, wild type non-human organism, like a microorganism or a plant cell, plant or part thereof after increasing the expression or activity thereof or the activity of a protein of the invention or used in the process of the invention, in an embodiment for example expression either in the cytsol or in an organelle such as a plastid or mitochondria, preferably in plastids, or, in another embodiment by targeted or non-targeted expression.

[13055] for the disclosure of this paragraph see [0347.1.1.1] above.

[13056] For example, nucleotide substitutions leading to amino acid substitutions at “non-essential” amino acid residues can be made in a sequence of the nucleic acid molecule of the invention or used in the process of the invention, e.g. shown in the respective line in Table I, application no. 2, columns 5 or 8, preferably the coding region thereof, or fragments or homologs thereof.

[13057] [0349.1.1.2] to [0350.1.1.2] for the disclosure of these paragraphs see [0349.1.1.1] to [0350.1.1.1] above.

[13058] Accordingly, the invention relates to nucleic acid molecules encoding a polypeptide having above-mentioned activity, in an non-human organisms or parts thereof by for example expression either in the cytsol or in an organelle such as a plastid or mitochondria or both, preferably in plastids, that contain changes in amino acid residues that are not essential for said activity. Such polypeptides differ in amino acid sequence from a sequence depicted in the respective line in Table II, especially Table IIA, application no. 2, columns 5 or 8, but retain said activity described herein. The nucleic acid molecule can comprise a nucleotide sequence encoding a polypeptide, wherein the polypeptide comprises an amino acid sequence at least about 50% identical to an amino acid sequence shown in the respective line in Table II, application no. 2, columns 5 or 8, and is capable of conferring the production or the increased production of the respective fine chemical arginine, glutamate, glutamine or proline as compared to a corresponding, e.g. non-transformed, wild type non-human organism, like a microorganism or a plant cell, plant or part thereof, after increasing its activity for example in an embodiment by expression either in the cytsol or in an organelle such as a plastid or mitochondria or both, preferably in plastids, or, in another embodiment by targeted or non-targeted expression. Preferably, the protein encoded by the nucleic acid molecule is at least about 60%, 70%, 80%, 90%, 95%, 96%, 97%, 98%, 99% or 99.5% identical to the sequence shown in the respective line in Table II, application no. 2, columns 5 or 8.

[13059] [0352.1.1.2] to [0357.1.1.2] for the disclosure of these paragraphs see [0352.1.1.1] to [0357.1.1.1] above.

[13060] Functional equivalents of the nucleic acid molecules according to the present invention and/or used in the process according to the present invention represent an embodiment of homologs. Functional equivalents derived from the nucleic acid molecules as shown in the respective line in Table I, application no. 2, columns 5 or 8, preferably the coding region thereof, according to the invention by substitution, insertion or deletion have at least 30%, 35%, 40%, 45%, 50%, 55%, 60%, 65%, 70%, 75%, 80%, 85%, 90%, 91%, 92%, 93%, 94%, 95%, 96%, 97%, 98%, 99% or 99.5% homology with one of the nucleic acid molecules as shown in the respective line in Table I, application no. 2, columns 5 or 8, preferably the coding region thereof, according to the invention and encode polypeptides having essentially the same properties as the polypeptide as shown in the respective line in Table II, application no. 2, columns 5 or 8.

[13061] Functional equivalents derived from one of the polypeptides as shown in the respective line in Table II, application no. 2, columns 5 or 8 according to the invention by substitution, insertion or deletion have at least 30%, 35%, 40%, 45%, 50%, 55%, 60%, 65%, 70%, 75%, 80%, 85%, 90%, 91%, 92%, 93%, 94%, 95%, 96%, 97%, 98%, 99% or 99.5% homology with one of the polypeptides as shown in the respective line in Table II, application no. 2, columns 5 or 8 according to the invention and having essentially the same properties as the polypeptide as shown in the respective line in Table II, application no. 2, columns 5 or 8.

[13062] for the disclosure of this paragraph see [0359.1.1.1] above.

[13063] A nucleic acid molecule encoding a homolog to a polypeptide depicted in the respective line in Table II, application no. 2, columns 5 or 8 can be created by introducing one or more nucleotide substitutions, additions or deletions into the nucleic acid molecule of the present invention, in particular of Table I, application no. 2, columns 5 or 8, in the respective line, such that one or more amino acid substitutions, additions or deletions are introduced into the encoded protein. Mutations can be introduced into the nucleic acid molecules as depicted in the respective line in Table I, application no. 2, columns 5 or 8, preferably the coding region thereof, by standard techniques, such as site-directed mutagenesis,PCR-mediated mutagenesis or other methods known to the person skilled in the art.

[13064] [0361.1.1.2] to [0363.1.1.2] for the disclosure of these paragraphs see [0361.1.1.1] to [0363.1.1.1] above.

[13065] Homologues of the nucleic acid sequences used, with the sequences shown in the respective line in Table I, application no. 2, columns 5 or 8, perferably the coding region thereof, comprise also allelic variants with at least approximately 30%, 35%, 40%, 45%, 50%, 55%, 60%, 65%, 70%, 75%, 80%, 85%, 90%, 91%, 92%, 93%, 94% 95%. 96%, 97%, 98%, 99%, 99.5% or more % homology with one of the nucleotide sequences shown or the above-mentioned derived nucleic acid sequences or their homologues or derivatives or parts of these. Allelic variants encompass in particular functional variants which can be obtained by deletion, insertion or substitution of nucleotides from the sequences shown in the respective line, preferably in Table I, columns 5 or 8, preferably the coding region theeof, or from the derived nucleic acid sequences, the intention being, however, that the enzymatic activity or the biological activity of the resulting proteins synthesized is advantageously retained or increased.

[13066] In one embodiment of the present invention, the nucleic acid molecule of the invention or used in the process of the invention comprises the sequences shown in the respective line in any of the Table I, application no. 2, columns 5 or 8, preferably the coding region thereof, fragments or homologs thereof. It is preferred that the nucleic acid molecule comprises as little as possible other nucleotides not shown in the respective line in any one of Table I, application no. 2, columns 5 or 8, preferably the coding region thereof, fragments or homologs thereof. In one embodiment, the nucleic acid molecule comprises less than 500, 400, 300, 200, 100, 90, 80, 70, 60, 50 or 40 further nucleotides. In a further embodiment, the nucleic acid molecule comprises less than 30, 20 or 10 further nucleotides. In one embodiment, the nucleic acid molecule used in the process of the invention is identical to the sequences shown in the respective line in Table I, application no. 2, columns 5 or 8, preferably the coding region thereof.

[13067] Also preferred is that the nucleic acid molecule used in the process of the invention encodes a polypeptide comprising the sequence shown in the respective line in Table II, application no. 2, columns 5 or 8, fragments or homologs thereof. In one embodiment, the nucleic acid molecule encodes less than 150, 130, 100, 80, 60, 50, 40 or 30 further amino acids. In a further embodiment, the encoded polypeptide comprises less than 20, 15, 10, 9, 8, 7, 6 or 5 further amino acids. In one embodiment used in the inventive process, the encoded polypeptide is identical to the sequences shown in the respective line in Table II, application no. 2, columns 5 or 8.

[13068] In one embodiment, the nucleic acid molecule of the invention or used in the process encodes a polypeptide comprising the sequence shown in the respective line in Table II, application no. 2, columns 5 or 8, or fragments or homologs thereof, and comprises less than 100 further nucleotides. In a further embodiment, said nucleic acid molecule comprises less than 30 further nucleotides. In one embodiment, the nucleic acid molecule used in the process is identical to a coding sequence of the sequences shown in the respective line in Table I, application no. 2, columns 5 or 8.

[13069] Polypeptides (=proteins), which still have the essential biological or enzymatic activity of the polypeptide of the present invention conferring the production or the increased production of the respective fine chemical arginine, glutamate, glutamine, or proline as compared to a corresponding, e.g. non-transformed, wild type non-human organism, like a microorganism or a plant cell, plant or part thereof, i.e. whose activity is essentially not reduced, are polypeptides with at least 10%, 20%, 30%, 40%, 50%, 60%, 70%, 80%, 90%, 95% or more of the wild type biological activity or enzymatic activity, advantageously, the activity is essentially not reduced in comparison with the activity of a polypeptide shown in the respective line in Table II, application no.2, columns 5 or 8 expressed under identical conditions.

[13070] Homologues of nucleic acid molecules shown in the respective line in Table I, application no. 2, columns 5 or 8, preferably the coding region thereof, or fragments thereof, or of the derived sequences shown in the respective line in Table II, application no. 2, columns 5 or 8, or fragments thereof, also mean truncated sequences, cDNA, single-stranded DNA or RNA of the coding and noncoding DNA sequence. Homologues of said sequences are also understood as meaning derivatives, which comprise noncoding regions such as, for example, UTRs, introns, terminators, enhancers or promoter variants. The promoters upstream of the nucleotide sequences stated can be modified by one or more nucleotide substitution(s), insertion(s) and/or deletion(s) without, however, interfering with the functionality or activity either of the promoters, the open reading frame (=ORF) or with the 3′-regulatory region such as terminators or other 3′-regulatory regions, which are far away from the ORF. It is furthermore possible that the activity of the promoters is increased by modification of their sequence, or that they are replaced completely by more active promoters, even promoters from heterologous organisms. Appropriate promoters are known to the person skilled in the art and are mentioned herein below.

[13071] [0370.1.1.2] to [0379.1.1.2] for the disclosure of these paragraphs see [0370.1.1.1] to [0379.1.1.1] above.

[13072] Moreover, a native polypeptide conferring the increase of the respective fine chemical arginine, glutamate, glutamine, or proline in a non-human organism or a part thereof can be isolated from cells (e.g., endothelial cells), for example using the antibody of the present invention as described below, in particular, an antibody against proteins having 2,3-dihydroxy-2,3-dihydrophenylpropionatedehydrogenase, 2-oxoglutarate dehydrogenase E1 subunit, 30S ribosomal protein, 3-deoxy-7-phosphoheptulonate synthase, 3-phosphoglycerate dehydrogenase, 47266012-protein, 49747384_SOYBEAN-protein, 4-alpha-glucanotransferase, ABC transporter permease protein, acetyl CoA carboxylase, acetyltransferase, acid shock protein, aconitate hydratase, acyl-CoA dehydrogenase, acyl-CoA synthase, acyltransferase, adenylosuccinate lyase, adenylylsulfate kinase, alanine dehydrogenase, aldehyde dehydrogenase, allantoicase, allantoinase, amine oxidase, amino acid ABC transporter permease protein, amino acid acetyltransferase, aminotransferase, ankyrin repeat family protein, anthranilate synthase component II, arginine decarboxylase, arginine exporter protein, asparaginase, aspartase, aspartate aminotransferase, At1g17440-protein, At1g19800-protein, At1g29350-protein, At1g47380-protein, At1g67340-protein, At4g32480-protein, At5g16650-protein, ATP synthase subunit beta, ATP-binding component of a transport system, ATP-dependent RNA helicase, AX653549-protein, AY087308-protein, b0456-protein, b0518-protein, b1003-protein, b1024-protein, b1108-protein, b1137-protein, b1163-protein, b1259-protein, b1280-protein, b1330-protein, b1445-protein, b1522-protein, b1898-protein, b2107-protein, b2121-protein, b2360-protein, b2399-protein, b2474-protein, b2513-protein, b2548-protein, b2613-protein, b2673-protein, b2812-protein, b2846-protein, b2909-protein, b2936-protein, b2999-protein, b3121-protein, b3151-protein, b3346-protein, b3410-protein, B3427-protein, b3509-protein, b3814-protein, b3817-protein, b3989-protein, b4029-protein, b4121-protein, beta-galactosidase, betahydroxylase, bifunctional purine biosynthesis protein, branched-chain amino acid ABC transporter permease protein, branched-chain amino acid permease, calcium-dependent protein kinase, carbohydrate kinase, carbon dioxide concentrating mechanism protein, cation/acetate symporter, cation-transporting ATPase, CBL-interacting protein kinase, CCAAT-binding transcription factor, CDP-diacylglycerol-glycerol-3-phosphate 3-phosphatidyltransferase, CDP-diglyceride synthetase, cell division control protein, cell division protein, Chaperone protein CIpB, circadian clock protein, coproporphyrinogen III oxidase, coproporphyrinogen oxidase, CTP synthase, CTP synthetase, cullin, cyclin D , cysteine synthase A, delta-1-pyrroline 5-carboxylase synthetase, dihydrolipoamide acetyltransferase, dihydrolipoamide dehydrogenase, DNA binding protein, DNA helicase II, DNA helicase IV, DNA mismatch repair protein, DnaJ-like chaperone, electron transport complex protein, elongation factor Tu, enoyl-CoA hydratase, enterobacterial common antigen polymerase, ethanolamine utilization protein, eukaryotic translation initiation factor 5, exopolyphosphatase, fatty acid desaturase, flavodoxin, fumarylacetoacetate hydrolase, gamma-glutamyltranspeptidase, geranylgeranyl pyrophosphate synthase, gibberellin 20-oxidase, Glu/Leu/Phe/Val dehydrogenase , gluconate transport system permease 3, glucose dehydrogenase, glucose-1-phosphate cytidylyltransferase, glucose-6-phosphate 1-dehydrogenase, glutamate-ammonia-ligase, glutamine amidotransferase, glutamine synthetase, glutaminyl-tRNA synthetase, glutaredoxin, glutathione S-transferase, glycerol dehydrogenase, glycerol-3-phosphate dehydrogenase, glycogen (starch) synthase, glycogen synthase, glycogenin, glycoprotease, glycosidase, glycosyl transferase, GM02LC11114-protein, GM02LC17485-protein, GM02LC46-protein, GM02LC5744-protein, H/ACA ribonucleoprotein complex subunit 3, harpin-induced family protein, heat shock protein, heat shock transcription factor, HesB/YadR/YfhF family protein, histone H2A, homocitrate synthase, hydrolase, integral membrane transporter family protein, iron(III) dicitrate-binding protein, isochorismate synthase, isocitrate dehydrogenase, isopentenyl diphosphate isomerase, L-asparaginase, L-aspartate oxidase, Leucyl/phenylalanyl-tRNA-protein transferase, lipoprotein precursor, L-ribulose-5-phosphate 4-epimerase, lysyl-tRNA synthetase, major facilitator superfamily transporter protein, malate dehydrogenase, malic enzyme, malonyl CoA-acyl carrier protein transacylase, membrane protein, membrane transport protein, metal-dependent hydrolase, methylglyoxal synthase, methyltransferase, mitochondrial processing protease, molecular chaperone portein, monothiol glutaredoxin, monthiol glutaredoxin, multiple antibiotic resistance protein, murein transglycosylase, N-acetyl-gamma-glutamyl-phosphate reductase, NAD(P)H-quinone oxidoreductase subunit, NADH dehydrogenase I chain I, nitrate/nitrite transport protein, ornithine carbamoyltransferase, oxidoreductase, oxidoreductase subunit, oxireductase, permease protein of phosphate ABC transporter, peroxisome assembly protein, phosphatidylinositol 3- and 4-kinase family protein, phosphoadenosine phosphosulfate reductase , phosphoanhydride phosphorylase, phosphopantetheine adenylyltransferase, phosphopantothenoylcysteine decarboxylase, phosphopantothenoylcysteinesynthetase/decarboxylase, phosphoribosylaminoimidazole carboxylase catalytic subunit, phosphoribosylformyl glycinamidine synthase subunit, phosphoribosylglycinamide formyltransferase, phosphoribosyltransferase, Photosystem I reaction center subunit XI, photosystem II protein, polygalacturonase, polyphosphate kinase, potassium transport protein, pre-mRNA-splicing factor, protease, protein kinase, protein phosphatase, purine nucleoside phosphorylase, purine-nucleoside phosphorylase, pyrroline carboxylate reductase, pyruvate kinase, quinolinate synthetase, riboflavin biosynthesis protein, ribosephosphate isomerase, constitutive, RNA binding protein, s_pp015018333r-protein, sec-independent protein translocase, Sec-independent protein translocase subunit, serine protease, serine protease inhibitor, short-chain alcohol dehydrogenase family, sll0064-protein, sll0254-protein, sll0354-protein, sll1761-protein, slr0600-protein, sodium/proton antiporter, squalene monooxygenase, sterol O-acyltransferase, thioredoxin, thioredoxin family protein, threonine dehydrogenase, threonine synthase, transcription factor, transcriptional regulator, transcriptional regulator protein, translation initiation factor subunit, transport protein, TTC0768-protein, TTC1386-protein, urease subunit, uridine/cytidine kinase, valine-pyruvate transaminase, XM_{—}473199-protein, YCL026C-A-protein, ycr102c-protein, ydr338c-protein, yer014w-protein, yer106w-protein, YFL019C-protein, yfl054c-protein, ygl237c-protein, ygr068c-protein, ygr221c-protein, yhl013c-protein, yhr207c-protein, ylr065c-protein, ylr178c-protein, ynl142w-protein, yor221c-protein, zinc finger protein, zinc transporter, Zm_{—}4842_BE510522-protein, or ZM06LC11975-protein activity, respectively, or an antibody against polypeptides as shown in the respective line in Table II, application no. 2, columns 5 or 8, or fragments or homologs thereof which can be produced by standard techniques utilizing the polypeptid of the present invention or fragment thereof, i.e., the polypeptide of this invention (FCRP). Preferred are monoclonal antibodies.

[13073] for the disclosure of this paragraph see [0381.1.1.1] above.

[13074] In one embodiment, the present invention relates to a polypeptide as depicted in the respective line in Table II, especially in Table IIA or especially in Table IIB, application no. 2, columns 5 or 8, or fragment or homolog thereof or as coded by the nucleic acid molecule shown in the respective line in Table I, especially Table IA or especially Table IB, application no. 2, columns 5 or 8, preferably the coding region thereof, or fragment or homolog thereof.

[13075] In an embodiment, the present invention relates to a polypeptide comprising or consisting of a consensus sequence shown in the respective line in Table IV, application no. 2, column 8 or at least one polypeptide motif shown in the respective line in Table IV, application no. 2, column 8.

[13076] In an embodiment thereof, the present invention relates to a polypeptide comprising or consisting of a consensus sequence shown in the respective line in Table IV, application no. 2, column 8 or comprising at least one polypeptide motif shown in the respective line in Table IV, application no. 2, column 8, whereby not more than 20, 15, 10, 9, 8, 7, 6, 5, 4, 3, 2, or 1, or 0 of the amino acids can be replaced by any amino acid.

[13077] In another embodiment thereof, the present invention relates to a polypeptide comprising or consisting of a consensus sequence shown in the respective line in Table IV, application no. 2, column 8 or comprising at least one polypeptide motif shown in the respective line in Table IV, application no. 2, column 8, whereby not more than 15%, 10%, 5%, 4%, 3%, 2% or 1% or 0% of the amino acids defined as distinct specific amino acidsare/is replaced by another amino acid.

[13078] In another embodiment thereof, the present invention relates to a polypeptide comprising or consisting of a consensus sequence shown in the respective line in Table IV, application no. 2, column 8 or comprising at least one polypeptide motif shown in the respective line in Table IV, application no. 2, column 8, whereby not more than 20, 15, 10, 9, 8, 7, 6, 5, 4, 3, 2, or 1, or 0 amino acids are inserted into the consensus sequence or polypeptide motif.

[13079] In an embodiment of the present invention, the polypeptide of the present invention comprises or consists of a consensus sequence or at least one polypeptide motif shown in the respective line in Table IV, application no. 2, column 8, whereby said polypeptide distinguishes over the sequence depicted in the respective line in Table II, application no. 2, columns 5 or 8 by one or more amino acids. In one embodiment, said polypeptide of the invention distinguishes over the sequence shown in the respective line in Table II, application no. 2, columns 5 and 8 by more than 5, 6, 7, 8 or 9 amino acids, preferably by more than 10, 15, 20, 25 or 30 amino acids, even more preferred are more than 40, 50, or 60 amino acids and, preferably, the sequence of the polypeptide of the invention distinguishes from the sequence shown in the respective line in Table II, application no. 2, columns 5 and 8 by not more than 80%, 70%, 60%, 50%, 40%, 30%, 20%, 10%, 5%, 4%, 3%, 2%, 1% or 0.5%. In another embodiment, said polypeptide of the invention does not consist of the sequence shown in the respective line in Table II, application no. 2, columns 5 and 8.

[13080] In an embodiment, the invention relates to a polypeptide conferring an increase in the respective fine chemical arginine, glutamate, glutamine, or proline in a non-human organism, especially a microorganism or a plant, or a part thereof, being encoded by the nucleic acid molecule of the invention or used in the process of the invention and having a sequence which distinguishes over the sequence as shown in the respective line in Table II, application no. 2, columns 5 or 8 by one or more amino acids (but not exceeding 5%, preferably 4%, 3%, 2%, 1%, 0.5%, 0.2% or 0.1%). In an embodiment, said polypeptide of the invention does not comprise or consist of the sequence shown in the respective line in Table II, application no. 2, columns 5 or 8. In an embodiment, said polypeptide of the present invention is less than 100%, 99.999%, 99.99%, 99.9% or 99% identical. In one embodiment, said polypeptide which differs at least in one or more amino acids (but not exceeding 5%, preferably 4%, 3%, 2%, 1%, 0.5%, 0.2% or 0.1%) from the polypeptide shown in the respective line in Table II, application no. 2, columns 5 and 8 does not comprise a protein of the sequence shown in the respective line in Table II A and/or II B, application no. 2, columns 5 or 8.

[13081] In an embodiment, the present invention relates to a polypeptide having the activity of the protein as shown in the respective line in Table II, application no. 2, column 3, which distinguishes over the sequence depicted in the respective line in Table II, application no. 2, columns 5 or 8 by one or more amino acids, preferably by more than 5, 6, 7, 8 or 9 amino acids, preferably by more than 10, 15, 20, 25 or 30 amino acids, evenmore preferred are more than 40, 50, or 60 amino acids and, preferably, the sequence of the polypeptide of the invention distinguishes from the sequence shown in the respective line in Table II, application no. 2, columns 5 and 8 by not more than 80%, 70%, 60%, 50%, 40%, 30%, 20%, 10%, 5%, 4%, 3%, 2%, 1% or 0.5%.

[13082] In another embodiment the polypeptide of the invention takes the form of a preprotein consisting of a plastidial or mitochondrial transit peptide joint to a polypeptide having the activity of the protein as shown in Table II, column 3, from which the transit peptide is preferably cleaved off upon transport of the preprotein into the organelle for example into the plastid or mitochondrion.

[13083] In another embodiment the polypeptide of the invention takes not the form of a preprotein.

[13084] [0390.1.1.2] to [0391.1.1.2] for the disclosure of these paragraphs see [0390.1.1.1] to [0391.1.1.1] above.

[13085] A polypeptide of the invention can participate in the process of the present invention. The polypeptide or a portion thereof comprises preferably an amino acid sequence, which is sufficiently homologous to an amino acid sequence shown in the respective line in Table II A and/or II B, application no. 2, columns 5 or 8.

[13086] Further, the polypeptide can have an amino acid sequence which is encoded by a nucleotide sequence which hybridizes, preferably hybridizes under stringent conditions as described above, to a nucleotide sequence of the nucleic acid molecule of the present invention. Accordingly, the polypeptide has an amino acid sequence which is encoded by a nucleotide sequence that is at least about 35%, 40%, 45%, 50%, 55%, 60%, 65%, 70%, 75%, 80%, 85%, 90%, 91%, 92%, 93%, 94%, 95%, 96%, 97%, 98%, 99%, 99.5% or more homologous to one of the amino acid sequences as shown in the respective line in Table II A and/or II B, application no. 2, columns 5 or 8, or fragments thereof. The preferred polypeptide of the present invention preferably possesses at least one of the activities according to the invention and described herein. A preferred polypeptide of the present invention includes an amino acid sequence encoded by a nucleotide sequence which hybridizes, preferably hybridizes under stringent conditions, to a nucleotide sequence shown in the respective line in Table I A and/or I B, application no. 2, columns 5 or 8, preferably the coding region thereof, or fragments thereto or which is homologous thereto, as defined above.

[13087] The polypeptide of the present invention can vary from the sequences shown in the respective line in Table II A and/or II B, application no. 2, columns 5 or 8 in amino acid sequence due to natural variation or mutagenesis, as described in detail herein. Accordingly, the polypeptide comprise an amino acid sequence which is at least about 35%, 40%, 45%, 50%, 55%, 60%, 65%, 70%, 75%, 80%, 85% or 90, 91%, 92%, 93%, 94%, 95%, 96%, 97%, 98%, 99%, 99.5% or more homologous to an entire amino acid sequence shown in the respective line in Table II A and/or II B, application no. 2, columns 5 or 8.

[13088] Biologically active portions of a polypeptide of the present invention include peptides comprising amino acid sequences derived from the amino acid sequence of the polypeptide of the present invention or used in the process of the present invention, e.g., the amino acid sequence shown in the respective line in Table II, application no. 2, columns 5 or 8 or the amino acid sequence of a protein homologous thereto, which include fewer amino acids than a full length polypeptide of the present invention or used in the process of the present invention or the full length protein which is homologous to a polypeptide of the present invention or used in the process of the present invention depicted herein, and exhibit at least one activity of a polypeptide of the present invention or used in the process of the present invention.

[13089] for the disclosure of this paragraph see [0396.1.1.1] above.

[13090] Manipulation of the nucleic acid molecule of the invention may result in the production of a protein having differences from the protein as shown in the respective line in Table II, application no. 2, column 5 or 8. Differences shall mean at least one amino acid different from the sequences as shown in the respective line in Table II, application no. 2, column 5 or 8, preferably at least 2, 3, 4, 5, 6, 7, 8, 9 or 10 amino acids (especially but not exceeding 0.1%, preferably 0.2%, 0.5%, 1%, 2%, 3% 4% or 5%), more preferably at least 15, 20, 25, 30, 35, 40, 45 or 50 amino acids (especially but not exceeding 0.5%, preferably 1%, 2%, 3% 4%, 5%, 10% or 25%) different from the sequences as shown in the respective line in Table II, application no. 2, column 5 or 8. These proteins may be improved in efficiency or activity, or may be more stable and therefore present in greater numbers in the cell as compared to the wild-type cell.

[13091] Any mutagenesis strategies for the polypeptide of the present invention or the polypeptide used in the process of the present invention to result in increasing said activity are not meant to be limiting; variations on these strategies will be readily apparent to one skilled in the art. Using such strategies, and incorporating the mechanisms disclosed herein, the nucleic acid molecule and polypeptide of the invention may be utilized to generate algae, ciliates, fungi, other microorganisms like C. glutamicum or plants or parts thereof, expressing proteins as shown in the respective line in Table II, application no. 2, column 5 or 8, or mutated proteins thereof. The nucleic acid molecules and polypeptide molecules of the invention are expressed such that the yield, production, and/or efficiency of production of a desired compound is improved.

[13092] [0399.1.1.2] to [0401.1.1.2] for the disclosure of these paragraphs see [0399.1.1.1] to [0401.1.1.1] above.

[13093] In one embodiment, a protein (=polypeptide) as shown in the respective line in Table II, application no. 2, column 5 or 8 refers to a polypeptide having an amino acid sequence corresponding to the polypeptide of the invention, especially to a polypeptide as shown in Table II, application no. 2, colunms 5 or 8 or homologs thereof, or used in the process of the invention, whereas a “non- inventive protein or polypeptide” or “other polypeptide” refers to a polypeptide having an amino acid sequence corresponding to a protein which is not substantially homologous to a polypeptide of the invention, preferably which is not substantially homologous to a polypeptide or protein as shown in the respective line in Table II, application no. 2, column 5 or 8 or homologs thereof, e.g., a protein which does not confer the activity described herein and which is derived from the same or a different organism.

[13094] [0403.1.1.2] to [0409.1.1.2] for the disclosure of these paragraphs see [0403.1.1.1] to [0409.1.1.1] above.

[13095] As the nucleic acid molecules of the invention and/or to expression thereof is related to the synthesis of the respective fine chemical arginine, glutamate, glutamine, or proline its function as a probe extends to the detection of microorganisms, plant tissues, plants, plant variets, plant ecotypes or plant genera with varying, advantageously increased, capability or potential for synthesis of the respective fine chemical arginine, glutamate, glutamine, or proline.

[13096] Therefore in one embodiment the present invention relates to a method for analyzing the capability or potential of a plant tissue, a plant, a plant variety or ecotype to produce the respective fine chemical arginine, glutamate, glutamine, or proline by using the respective antibody of the invention as a probe to detect the amount of the polypeptide encoded by said nucleic acid molecule of the invention in a non-human organism in comparision to another organism.

[13097] Therefore in one embodiment the invention relates to a method to probe a non-human organism for its capability for the production of the respective fine chemical comprising the steps of
[13098] a) analyzing the sequence and/or the expression of the respective nucleic acid molecule of the invention in least two non-human organisms which differ in the capability to produce the respective fine chemical;
[13099] b) associate thedifferent sequence and/or expression level of the nucleic acid molecules of the invention with their different capability to produce the respective fine chemical;
[13100] c) analyse the sequence and/or the expression of the nucleic acid molecule of the invention in at least a third non-human organism;
[13101] d) predict the capability of the at least third organism to produce the respective fine chemical based by comparing the sequence and/or expression of the nucleic acid of the invention to the sequences and/or expression levels of the nucleic acid molecule of the invention of the at least two organisms analyzed in step a.

[13102] [0411.1.1.2] to [0430.1.1.2] for the disclosure of these paragraphs see [0411.1.1.1] to 0430.1.1.1] above.

[13103] Accordingly the present invention relates to any cell transgenic for any nucleic acid characterized as part of the invention, e.g. conferring the increase of the respective fine chemical arginine, glutamate, glutamine, or proline in a cell or a non-human organism or a part thereof, e.g. the nucleic acid molecule of the invention, the nucleic acid construct of the invention, the vector of the invention, the expression cassette according to the invention, or a nucleic acid molecule encoding the polypeptide of the invention, e.g. encoding a polypeptide having an activity as the protein as shown in the respective line in Table II, application no. 2, column 3.

[13104] Due to the above-mentioned activity the respective fine chemical arginine, glutamate, glutamine, or proline content in a cell or a non-human organism is increased. For example, due to modulation or manupulation, the cellular activity is increased, in a preferred embodiment in organelles such as plastids or mitochondria, e.g. due to an increased expression or specific activity or specific targeting of the subject matters of the invention in a cell or a non-human organism or a part thereof especially in organelles such as plastids or mitochondria, or in another embodiment in the cytosol. Transgenic for a polypeptide having a protein or a protein activity means herein that due to modulation or manipulation of the genome, the activity of protein as shown in the respective line in Table II, application no. 2, column 3 or a protein as shown in the respective line in Table II, application no. 2, column 3-like activity is increased in the cell or non-human organism or part thereof, especially in organelles such as plastids or mitochondria, or especuially in the cytosol. Examples are described above in context with the process of the invention.

[13105] for the disclosure of this paragraph see [0432.1.1.1] above.

[13106] A naturally occurring expression cassette—for example the naturally occurring combination of the promoter of the gene encoding a protein as shown in the respective line in Table II, application no. 2, column 5 or 8, preferably the coding region thereof, or fragments or homologs thereof with the corresponding encoding gene—becomes a transgenic expression cassette when it is modified by non-natural, synthetic “artificial” methods such as, for example, mutagenesis. Such methods have been described (U.S. Pat. No. 5,565,350; WO 00/15815; also see above).

[13107] [0434.1.1.2] to [0435.1.1.2] for the disclosure of these paragraphs see [0434.1.1.1] to [0435.1.1.1] above.

[13108] Transgenic plants comprising the respective fine chemical(s) synthesized in the process according to the invention can be marketed directly without isolation of the fine chemical synthesized. In the process according to the invention, plants are understood as meaning all plant parts, plant organs such as leaf, stalk, root, tubers or seeds or propagation material or harvested material or the intact plant. In this context, the seed encompasses all parts of the seed such as the seed coats, epidermal cells, seed cells, endosperm or embryonic tissue. The fine chemical produced in the process according to the invention may, however, also be isolated from the plant. In case of arginine, glutamate, glutamine, or proline this can be in free form or bound to proteins. Fine chemical(s) produced by this process can be harvested by harvesting the non-human organisms either from the culture in which they grow or from the field. For example, this can be done via squeezing, grinding and/or extraction, salt precipitation and/or ion-exchange chromatography of the plant parts, preferably the plant seeds, plant fruits, plant tubers and the like.

[13109] [0437.1.1.2] to [0440.1.1.2] for the disclosure of these paragraphs see [0437.1.1.1] to [0440.1.1.1] above.

[13110] [0442.1.1.2] to [0454.1.1.2] for the disclosure of these paragraphs see [0442.1.1.1] to to [0454.1.1.1] above.

[13111] In one embodiment, the present invention relates to a method for the identification of a gene product conferring the production of or an increase in the fine chemical production in a non-human cell, comprising the following steps:
[13112] (a) contacting, e.g. hybridising, a, some or all nucleic acid molecules of a sample, e.g. cells, tissues, plants or microorganisms or a nucleic acid library, which can contain a candidate gene encoding a gene product conferring the production of or an increase in the fine chemical after expression, with the nucleic acid molecule of the present invention as shown in the respective line in column 5 or 8 of Table I A or B of application no. 2, preferably the coding region thereof, or a fragment or homolog thereof;
[13113] (b) identifying the nucleic acid molecules, which hybridize under relaxed stringent conditions with the nucleic acid molecule of the present invention in particular to the nucleic acid molecule sequence shown in the respective line in Table I, application no. 2, columns 5 or 8, preferably the coding region thereof, of a fragment or a homolog thereof, preferably in Table I B, application no. 2, columns 5 or 8, preferably the coding region thereof, of a fragment or a homolog thereof, and, optionally, isolating the full length cDNA clone or complete genomic clone;
[13114] (c) introducing the candidate nucleic acid molecules or a fragment thereof in host cells, preferably in a plant cell or a microorganism, appropriate for producing the fine chemical;
[13115] (d) expressing the identified nucleic acid molecules in the host cells for which the production of or the increased production of the fine chemical is desired;
[13116] (e) assaying the the fine chemical level in the non-human host cells; and
[13117] (f) identifying the nucleic acid molecule and/or its gene product which expression confers the production of or an increase in the the fine chemical level in the non-human host cell after expression compared to the wild type.

[13118] for the disclosure of this paragraph see [0456.1.1.1] above.

[13119] In another embodiment, the present invention relates to a method for the identification of a gene product conferring the production of or an increase in the fine chemical production in a cell, comprising the following steps:
[13120] (a) identifiying a nucleic acid molecule of a non-human organism, which is at least 20%, 25%, 30%, 35%, 40%, 50%, 60%, 70%, 80%, 90%, 95%, 96%, 97%, 98%, 99%, 99.5% or more homolog to the nucleic acid molecule encoding a polypeptide comprising the polypeptide molecule as shown in the respective line in column 5 or 8 of Table II, application no. 2, or comprising a consensus sequence or a polypeptide motif as shown in the respective line in column 8 of Table IV, application no. 2, or being encoded by a nucleic acid molecule comprising a polynucleotide as shown in the respective line in column 5 or 8 of Table I, application no. 2, preferably the coding region thereof, or a homologue thereof as described herein, for example via homology search in a data bank;
[13121] (b) introducing the candidate nucleic acid molecule in non-human host cells, preferably in a plant cell or a microorganism, appropriate for producing the fine chemical;
[13122] (c) expressing the identified nucleic acid molecule in the non-human host cells;
[13123] (d) assaying the fine chemcial level in the non-human host cells; and
[13124] (e) identifying the nucleic acid molecule and its gene product which expression confers the production of or an increase in the the fine chemical level in the non-human host cell after expression compared to the wild type.

[13125] for the disclosure of this paragraph see [0458.1.1.1] above.

[13126] Further, the nucleic acid molecules disclosed herein, in particular the nucleic acid molecules shown in the respective line in column 5 or 8 of Table I A or B of application no. 2, may be sufficiently homologous to the sequences of related species such that these nucleic acid molecules may serve as markers for the construction of a genomic map in related organism or for association mapping. Furthermore natural variation in the genomic regions corresponding to nucleic acids disclosed herein, in particular the nucleic acid molecule shown in the respective line in column 5 or 8 of Table I A or B, of application no. 2 or homologous thereof, may lead to variation in the activity of the proteins disclosed herein, in particular the proteins comprising polypeptides as shown in the respective lins in column 5 or 8 of Table II A or B, of application no. 2 or their homologous, or comprising the consensus sequence or the polypeptide motif as shown in the respective line in column 8 of Table IV, and in consequence in a natural variation of an increased fine chemical production.

[13127] In consequence natural variation eventually also exists in form of more active allelic variants leading already to a relative increase in the fine chemical. Different variants of the nucleic acid molecules disclosed herein, in particular the nucleic acid molecules comprising the nucleic acid molecules as shown in the respective line in column 5 or 8 of Table I A or B of application no. 2, preferably the coding region thereof, which corresponds to different levels of increase in fine chemical, e.g. different levels of increase in fine chemical, can be indentified and used for marker assisted breeding for an enhanced production of the fine chemical.

[13128] Natural variation may also exist in the regulatory regions, e.g. the promotors of the natural genes comprising the nucleic acid molecules as shown in the respective line column 5 or 8 of Table I A or B of application no. 2, preferably the coding region thereof, which can similarily correspond to different levels of increase in the fine chemical, e.g. different levels of increase in the fine chemical can be identified and used for marker assisted breeding for an enhanced production of the fine chemical.

[13129] Accordingly, the present invention relates to a method for breeding plants for the production of the fine chemical, comprising
[13130] (a) selecting a first plant variety with an increased production of the fine chemical, e.g. based on an increased expression of a nucleic acid molecule of the invention as disclosed herein, in particular of a nucleic acid molecule comprising a nucleic acid molecule as shown in the respective line in column 5 or 8 of Table I A or B of application no. 2, preferably the coding region thereof, or fragments or homologs thereof, or a polypeptide comprising a polypeptide as shown in the respective line in column 5 or 8 of Table II A or B of application no. 2, or fragments or homologs thereof, or comprising a consensus sequence or a polypeptide motif as shown in the respective line in column 8 of Table IV, or a homolog thereof, as described herein;
[13131] (b) associating the level of increased production of the fine chemical, with the expression level or the genomic structure of a gene encoding said polypeptide or said nucleic acid molecule;
[13132] (c) crossing the first plant variety with a second plant variety, which significantly differs in its level of fine chemical; and
[13133] (d) identifying, which of the offspring varieties has got increased production of the fine chemical by the expression level of said polypeptide or nucleic acid molecule or the genomic structure of the gene(s) encoding said polypeptide or nucleic acid molecule of the invention.

[13134] [0462.1.1.2] to [0482.1.1.2] for the disclosure of these paragraphs see [0462.1.1.1] to [0482.1.1.1] above.

[13135] A further embodiment of this invention is related to genes which increase or generate the production of the fine chemical arginine, glutamine or glutamate, respectively, or proline, respectively, in plant cells, plants or part thereof. Phenotypes thereto are associated with yield of plants (=yield related phenotypes). In accordance with the invention, therefore, the respective genes identified in Table I, wherein in column 7 arginine, glutamine or glutamate, respectively, or proline, respectively, are mentioned, especially the coding region thereof, or homologs or fragments thereof, may be employed to enhance any yield-related phenotype. Increased yield may be determined in field trials of transgenic plants and suitable control plants.

[13136] Alternatively, a transgene's ability to increase yield may be determined in a model plant. An increased yield phenotype may be determined in the field test or in a model plant by measuring any one or any combination of the following phenotypes, in comparison to a control plant: yield of dry harvestable parts of the plant, yield of dry aerial harvestable parts of the plant, yield of underground dry harvestable parts of the plant, yield of fresh weight harvestable parts of the plant, yield of aerial fresh weight harvestable parts of the plant yield of underground fresh weight harvestable parts of the plant, yield of the plant's fruit (both fresh and dried), grain dry weight, yield of seeds (both fresh and dry), and the like.

[13137] The most basic yield-related phenotype is increased yield associated with the presence of the gene or a homolog or a fragment thereof as a transgene in the plant, i.e., the intrinsic yield of the plant. Intrinsic yield capacity of a plant can be, for example, manifested in a field test or in a model system by demonstrating an improvement of seed yield (e.g. in terms of increased seed/grain size, increased ear number, increased seed number per ear, improvement of seed filling, improvement of seed composition, embryo and/or endosperm improvements, and the like);

[13138] modification and improvement of inherent growth and development mechanisms of a plant (such as plant height, plant growth rate, pod number, pod position on the plant, number of internodes, incidence of pod shatter, efficiency of nodulation and nitrogen fixation, efficiency of carbon assimilation, improvement of seedling vigour/early vigour, enhanced efficiency of germination (under non-stressed conditions), improvement in plant architecture.

[13139] Increased yield-related phenotypes may also be measured to determine tolerance to abiotic environmental stress. Abiotic stresses include drought, low temperature, nutrient deficiency, salinity, osmotic stress, shade, high plant density, mechanical stresses, and oxidative stress, and yield-related phenotypes are encompassed by tolerance to such abiotic stresses. Additional phenotypes that can be monitored to determine enhanced tolerance to abiotic environmental stress include, without limitation, wilting; leaf browning; loss of turgor, which results in drooping of leaves or needles stems, and flowers; drooping and/or shedding of leaves or needles; the leaves are green but leaf angled slightly toward the ground compared with controls; leaf blades begun to fold (curl) inward; premature senescence of leaves or needles; loss of chlorophyll in leaves or needles and/or yellowing. Any of the yield-related phenotypes described above may be monitored in field tests or in model plants to demonstrate that a transgenic plant has increased tolerance to abiotic environmental stress. In accordance with the invention, the respective genes identified in Table 1, especially the coding region thereof, or homologs or fragments thereof, wherein in the respective same line arginine, glutamine or glutamate,respectively or proline, respectively, are mentioned, may be employed to enhance tolerance to abiotic environmental stress in a plant when confronted with abiotic environmental stress.

[13140] A polypeptide conferring an yield-increasing activity can be encoded by a respective nucleic acid sequence as shown in Table I, column 5 or 8, and/or comprises or consists of a respective polypeptide as depicted in Table II, column 5 and 8, and/or can be amplified with the respective primer set shown in Table III, column 8, in case in column 7 the metabolite “glutamate”, “glutamine” or “arginine”, respectively or “proline”, respectively, is indicated.

[13141] “Improved adaptation” to environmental stress like e.g. freezing and/or chilling temperatures refers to an improved plant performance under environmental stress conditions.

[13142] A modification, i.e. an increase, can be caused by endogenous or exogenous factors. For example, an increase in activity in an organism or a part thereof can be caused by adding a gene product or a precursor or an activator or an agonist to the media or nutrition or can be caused by introducing said subjects into a organism, transient or stable. Furthermore such an increase can be reached by the introduction of the respective inventive nucleic acid sequence or the encoded protein in the correct cell compartment for example into the nucleus or cytoplasmic respectively or into plastids either by transformation and/or targeting.

[13143] The term “yield” as used herein generally refers to a measurable produce from a plant, particularly a crop. Yield and yield increase (in comparison to a non-transformed starting or wild-type plant) can be measured in a number of ways, and it is understood that a skilled person will be able to apply the correct meaning in view of the particular embodiments, the particular crop concerned and the specific purpose or application concerned. The terms “improved yield” or “increased yield” can be used interchangeable.

[13144] As used herein, the term “improved yield” or the term “increased yield” means any improvement in the yield of any measured plant product, such as grain, fruit or fiber. In accordance with the invention, changes in different phenotypic traits may improve yield. For example, and without limitation, parameters such as floral organ development, root initiation, root biomass, seed number, seed weight, harvest index, tolerance to abiotic environmental stress, leaf formation, phototropism, apical dominance, and fruit development, are suitable measurements of improved yield. Any increase in yield is an improved yield in accordance with the invention. For example, the improvement in yield can comprise a 0.1%, 0.5%, 1%, 3%, 5%, 10%, 15%, 20%, 30%, 40%, 50%, 60%, 70%, 80%, 90% or greater increase in any measured parameter. For example, an increase in the bushel/acre yield of soybeans or corn derived from a crop comprising plants which are transgenic for the nucleotides and polypeptides of Table I, in case in column 7 the metabolite “glutamate”, “glutamine” or “arginine”, respectively or “proline”, respectively, is indicated, as compared with the bushel/acre yield from untreated soybeans or corn cultivated under the same conditions, is an improved yield in accordance with the invention. The increased or improved yield can be achieved in the absence or presence of stress conditions.

[13145] For example, enhanced or increased “yield” refers to one or more yield parameters selected from the group consisting of biomass yield, dry biomass yield, aerial dry biomass yield, underground dry biomass yield, fresh-weight biomass yield, aerial fresh-weight biomass yield, underground fresh-weight biomass yield; enhanced yield of harvestable parts, either dry or freshweight or both, either aerial or underground or both; enhanced yield of crop fruit, either dry or fresh-weight or both, either aerial or underground or both; and preferably enhanced yield of seeds, either dry or fresh-weight or both, either aerial or underground or both.

[13146] Crop yield is defined herein as the number of bushels of relevant agricultural product (such as grain, forage, or seed) harvested per acre. Crop yield is impacted by abiotic stresses, such as drought, heat, salinity, and cold stress, and by the size (biomass) of the plant. Traditional plant breeding strategies are relatively slow and have in general not been successful in conferring increased tolerance to abiotic stresses. Grain yield improvements by conventional breeding have nearly reached a plateau in maize.

[13147] Accordingly, the yield of a plant can depend on the specific plant/crop of interest as well as its intended application (such as food production, feed production, processed food production, biofuel, biogas or alcohol production, or the like) of interest in each particular case. Thus, in one embodiment, yield is calculated as harvest index (expressed as a ratio of the weight of the respective harvestable parts divided by the total biomass), harvestable parts weight per area (acre, square meter, or the like); and the like. The harvest index, i.e., the ratio of yield biomass to the total cumulative biomass at harvest, in maize has remained essentially unchanged during selective breeding for grain yield over the last hundred years. Accordingly, recent yield improvements that have occurred in maize are the result of the increased total biomass production per unit land area. This increased total biomass has been achieved by increasing planting density, which has led to adaptive phenotypic alterations, such as a reduction in leaf angle, which may reduce shading of lower leaves, and tassel size, which may increase harvest index. Harvest index is relatively stable under many environmental conditions, and so a robust correlation between plant size and grain yield is possible. Plant size and grain yield are intrinsically linked, because the majority of grain biomass is dependent on current or stored photosynthetic productivity by the leaves and stem of the plant. As with abiotic stress tolerance, measurements of plant size in early development, under standardized conditions in a growth chamber or greenhouse, are standard practices to measure potential yield advantages conferred by the presence of a transgene.

[13148] Acccordingly, the yield of a plant can be increased by improving one or more of the yield-related phenotypes.

[13149] Such yield-related phenotypes or traits of a plant the improvement of which results in increased yield comprise, without limitation, the increase of the intrinsic yield capacity of a plant and/or increased stress tolerance, e.g. improved nutrient use efficiency, improved drought tolerance, improved cold tolerance.

[13150] For example, yield refers to biomass yield, e.g. to dry weight biomass yield and/or fresh-weight biomass yield. Biomass yield refers to the aerial or underground parts of a plant, depending on the specific circumstances (test conditions, specific crop of interest, application of interest, and the like). In one embodiment, biomass yield refers to the aerial and underground parts. Biomass yield may be calculated as fresh-weight, dry weight or a moisture adjusted basis. Biomass yield may be calculated on a per plant basis or in relation to a specific area (e.g. biomass yield per acre/square meter/or the like).

[13151] In other embodiment, “yield” refers to seed yield which can be measured by one or more of the following parameters: number of seeds or number of filled seeds (per plant or per area (acre/square meter/or the like)); seed filling rate (ratio between number of filled seeds and total number of seeds); number of flowers per plant; seed biomass or total seeds weight (per plant or per area (acre/square meter/or the like); thousand kernel weight (TKW; extrapolated from the number of filled seeds counted and their total weight; an increase in TKW may be caused by an increased seed size, an increased seed weight, an increased embryo size, and/or an increased endosperm). Other parameters allowing to measure seed yield are also known in the art. Seed yield may be determined on a dry weight or on a fresh weight basis, or typically on a moisture adjusted basis, e.g. at 15.5 percent moisture.

[13152] For example, the term “increased yield” means that the a plant, exhibits an increased growth rate, under conditions of abiotic environmental stress, compared to the corresponding wild-type plant.

[13153] An increased growth rate may be reflected inter alia by or confers an increased biomass production of the whole plant, or an increased biomass production of the aerial parts of a plant, or by an increased biomass production of the underground parts of a plant, or by an increased biomass production of parts of a plant, like stems, leaves, blossoms, fruits, and/or seeds.

[13154] Increased yield includes higher fruit yields, higher seed yields, higher fresh matter production, and/or higher dry matter production.

[13155] The term “increased yield” means that the plant, exhibits an prolonged growth under conditions of abiotic environmental stress, as compared to the corresponding, e.g. non-transformed, wild type organism. A prolonged growth comprises survival and/or continued growth of the plant, at the moment when the non-transformed wild type organism shows visual symptoms of deficiency and/or death.

[13156] When the plant of the invention is a corn plant, increased yield for corn plants means, for example, increased seed yield, in particular for corn varieties used for feed or food. Increased seed yield of corn refers to an increased kernel size or weight, an increased kernel per ear, or increased ears per plant. Alternatively or in addition the cob yield may be increased, or the length or size of the cob is increased, or the kernel per cob ratio is improved.

[13157] When the plant of the invention is a soy plant, increased yield for soy plants means increased seed yield, in particular for soy varieties used for feed or food. Increased seed yield of soy refers for example to an increased kernel size or weight, an increased kernel per pod, or increased pods per plant.

[13158] When the plant of the invention is an oil seed rape (OSR) plant, increased yield for OSR plants means increased seed yield, in particular for OSR varieties used for feed or food. Increased seed yield of OSR refers to an increased seed size or weight, an increased seed number per silique, or increased siliques per plant.

[13159] When the plant of the invention is a cotton plant. Increased yield for cotton plants means increased lint yield. Increased lint yield of cotton refers in one embodiment to an increased length of lint.

[13160] Said increased yield can typically be achieved by enhancing or improving, one or more yieldrelated traits of the plant. Such yield-related traits of a plant comprise, without limitation, the increase of the intrinsic yield capacity of a plant and/or increased stress tolerance, in particular increased abiotic stress tolerance, like for example improved nutrient use efficiency, e.g. nitrogen use efficiency, and/or improved water use efficiency, and or improved cold tolerance.

[13161] Intrinsic yield capacity of a plant can be, for example, manifested by improving the specific (intrinsic) seed yield (e.g. in terms of increased seed/ grain size, increased ear number, increased seed number per ear, improvement of seed filling, improvement of seed composition, embryo and/or endosperm improvements, or the like); modification and improvement of inherent growth and development mechanisms of a plant (such as plant height, plant growth rate, pod number, pod position on the plant, number of internodes, incidence of pod shatter, efficiency of nodulation and nitrogen fixation, efficiency of carbon assimilation, improvement of seedling vigour/early vigour, enhanced efficiency of germination (under stressed or non-stressed conditions), improvement in plant architecture, cell cycle modifications, photosynthesis modifications, various signaling pathway modifications, modification of transcriptional regulation, modification of translational regulation, modification of enzyme activities, and the like); and/or the like.

[13162] The improvement or increase of stress tolerance of a plant can for example be manifested by improving or increasing a plant's tolerance against stress, particularly abiotic stress. In the present application, abiotic stress refers generally to abiotic environmental conditions a plant is typically confronted with, including, but not limited to, drought (tolerance to drought may be achieved as a result of improved water use efficiency), heat, low temperatures and cold conditions (such as freezing and chilling conditions), nutrient depletion, salinity, osmotic stress, shade, high plant density, mechanical stress, oxidative stress, and the like.

[13163] The increased plant yield can for example be mediated by increasing the “nutrient use efficiency of a plant”, e.g. by improving the use efficiency of nutrients including, but not limited to, phosphorus, potassium, and nitrogen. Further, higher yields may be obtained with current or standard levels of nitrogen use.

[13164] Generally, the term “increased tolerance to stress” can be defined as survival of plants, and/or higher yield production, under stress conditions as compared to a non-transformed wild type or starting plant: For example, the plant of the invention or produced according to the method of the invention is better adapted to the stress conditions. “Improved adaptation” to environmental stress like e.g. drought, heat, nutrient depletion, freezing and/or chilling temperatures refers herein to an improved plant performance resulting in an increased yield, particularly with regard to one or more of the yield related traits as defined in more detail above.

[13165] During its life-cycle, a plant is generally confronted with a diversity of environmental conditions. Any such conditions, which may, under certain circumstances, have an impact on plant yield, are herein referred to as “stress” condition. Environmental stresses may generally be divided into biotic and abiotic (environmental) stresses. Unfavorable nutrient conditions are also referred to as “environmental stress”. The present invention does also contemplate solutions for this kind of environmental stress, e.g. referring to increased nutrient use efficiency.

[13166] For the purposes of the description of the present invention, the terms “enhanced tolerance to abiotic stress”, “enhanced resistance to abiotic environmental stress”, “enhanced tolerance to environmental stress”, “improved adaptation to environmental stress” and other variations and expressions similar in its meaning are used interchangeably and refer, without limitation, to an improvement in tolerance to one or more abiotic environmental stress(es) as described herein and as compared to a corresponding origin or wild type plant or a part thereof.

[13167] The term abiotic stress tolerance(s) refers for example low temperature tolerance, drought tolerance or improved water use efficiency (WUE), heat tolerance, salt stress tolerance, improved nutrient efficiency, especially improved nitrogen use efficiency (NUE) and others. Studies of a plant's response to desiccation, osmotic shock, and temperature extremes are also employed to determine the plant's tolerance or resistance to abiotic stresses. Water use efficiency (WUE) is a parameter often correlated with drought tolerance. In selecting traits for improving crops, a decrease in water use, without a change in growth would have particular merit in an irrigated agricultural system where the water input costs were high. An increase in growth without a corresponding jump in water use would have applicability to all agricultural systems. In many agricultural systems where water supply is not limiting, an increase in growth, even if it came at the expense of an increase in water use also increases yield.

[13168] Drought stress means any environmental stress which leads to a lack of water in plants or reduction of water supply to plants, including a secondary stress by low temperature and/or salt, and/or a primary stress during drought or heat, e.g. desiccation etc.

### Specific Embodiments

[13169] Accordingly, this invention provides respective measures and methods to produce plants with increased yield, e.g. genes conferring an increased yield-related trait, for example enhanced tolerance to abiotic environmental stress, for example an increased drought tolerance and/or low temperature tolerance and/or an increased nutrient use efficiency, and/or intrinsic yield and/or another increased yield-related trait, upon expression or over-expression. Accordingly, the present invention provides genes derived from plants in case in column 7 of the respective Table “arginine”, glutamate” or “glutamine”, respectively, or proline”, respectively, is indicated; in particular, respective genes are described in column 5 as well as in column 8 of Tables I or II.

[13170] Accordingly, the present invention provides respective transgenic plants showing one or more improved yield-related traits as compared to the corresponding origin or the wild type plant and methods for producing such transgenic plants with increased yield in case in column 7 of the respective Table “arginine”, “glutamate”, or “glutamine”, respectively, or proline”, respectively, is indicated.

[13171] In one embodiment, one or more of said yield-increasing activities are increased by increasing the amount and/or the specific activity of one or more proteins listed in Table I, column 5 or 8 in a compartment of a cell indicated in Table I, column 6 in case in column 7 of the respective Table “arginine”, “glutamate”, or “glutamine”, respectively, or proline”, respectively is indicated.

[13172] Accordingly to present invention, the yield of the plant of the invention is increased by improving one or more of the yield-related traits as defined herein. Said increased yield in accordance with the present invention can typically be achieved by enhancing or improving, in comparison to an origin or wild-type plant, one or more yield-related traits of said plant. Such yield-related traits of a plant the improvement of which results in increased yield comprise, without limitation, the increase of the intrinsic yield capacity of a plant, and/or increased stress tolerance, especially inctreased abiotic stress tolerance.

[13173] In a particular embodyment the present the invention relates to plants with a increased nutrient efficiency, especially a nitrogen use efficiency in case a plant is transformed with a gene being depited in Table I, and wherein in the same line of said gene in column 7 “arginine”, “glutamate”, or “glutamine” is indicated.

[13174] In another embodiment the present the invention relates to plants with an incresed water use efficiency/drought tolerance and/or low temperature tolerance in case a plant is transformed with a gene being depited in Table I, and wherein in the same line of said gene in column 7 “proline” is indicated.

[13175] In a further embodiment the present invention is characterized by the features as disclosed in the following items:

[13176] Item 1. A process for the production of the respective fine chemical arginine, glutamate, glutamine or proline, which comprises
[13177] (a) increasing or generating one or more respective activities selected from the group consisting of 2,3-dihydroxy-2,3-dihydrophenylpropionatedehydrogenase, 2-oxoglutarate dehydrogenase E1 subunit, 30S ribosomal protein, 3-deoxy-7-phosphoheptulonate synthase, 3-phosphoglycerate dehydrogenase, 47266012protein, 49747384_SOYBEAN-protein, 4-alpha-glucanotransferase, ABC transporter permease protein, acetyl CoA carboxylase, acetyltransferase, acid shock protein, aconitate hydratase, acyl-CoA dehydrogenase, acyl-CoA synthase, acyltransferase, adenylosuccinate lyase, adenylylsulfate kinase, alanine dehydrogenase, aldehyde dehydrogenase, allantoicase, allantoinase, amine oxidase, amino acid ABC transporter permease protein, amino acid acetyltransferase, aminotransferase, ankyrin repeat family protein, anthranilate synthase component II, arginine decarboxylase, arginine exporter protein, asparaginase, aspartase, aspartate aminotransferase, At1g17440-protein, At1g19800-protein, At1g29350-protein, At1g47380-protein, At1g67340-protein, At4g32480-protein, At5g16650-protein, ATP synthase subunit beta, ATP-binding component of a transport system, ATP-dependent RNA helicase,

[13178] AX653549-protein, AY087308-protein, b0456-protein, b0518-protein, b1003-protein, b1024-protein, b1108-protein, b1137-protein, b1163-protein, b1259-protein, b1280-protein, b1330-protein, b1445-protein, b1522-protein, b1898-protein, b2107-protein, b2121-protein, b2360-protein, b2399-protein, b2474-protein, b2513-protein, b2548-protein, b2613-protein, b2673-protein, b2812-protein, b2846-protein, b2909-protein, b2936-protein, b2999-protein, b3121-protein, b3151-protein, b3346-protein, b3410protein, B3427-protein, b3509-protein, b3814-protein, b3817-protein, b3989-protein, b4029-protein, b4121-protein, beta-galactosidase, beta-hydroxylase, bifunctional purine biosynthesis protein, branched-chain amino acid ABC transporter permease protein, branched-chain amino acid permease, calcium-dependent protein kinase, carbohydrate kinase, carbon dioxide concentrating mechanism protein, cation/acetate symporter, cation-transporting ATPase, CBL-interacting protein kinase, CCAAT-binding transcription factor, CDP-diacylglycerol-glycerol-3-phosphate 3-phosphatidyltransferase, CDP-diglyceride synthetase, cell division control protein, cell division protein, Chaperone protein CIpB, circadian clock protein, coproporphyrinogen III oxidase, coproporphyrinogen oxidase, CTP synthase, CTP synthetase, cullin, cyclin D, cysteine synthase A, delta-1-pyrroline 5-carboxylase synthetase, dihydrolipoamide acetyltransferase, dihydrolipoamide dehydrogenase, DNA binding protein, DNA helicase II, DNA helicase IV, DNA mismatch repair protein, DnaJ-like chaperone, electron transport complex protein, elongation factor Tu, enoyl-CoA hydratase, enterobacterial common antigen polymerase, ethanolamine utilization protein, eukaryotic translation initiation factor 5, exopolyphosphatase, fatty acid desaturase, flavodoxin, fumarylacetoacetate hydrolase, gammaglutamyltranspeptidase, geranylgeranyl pyrophosphate synthase, gibberellin 20-oxidase, Glu/Leu/Phe/Val dehydrogenase, gluconate transport system permease 3, glucose dehydrogenase, glucose-1-phosphate cytidylyltransferase, glucose-6-phosphate 1-dehydrogenase, glutamate-ammonia-ligase, glutamine amidotransferase, glutamine synthetase, glutaminyl-tRNA synthetase, glutaredoxin, glutathione S-transferase, glycerol dehydrogenase, glycerol-3-phosphate dehydrogenase, glycogen (starch) synthase, glycogen synthase, glycogenin, glycoprotease, glycosidase, glycosyl transferase, GM02LC11114-protein, GM02LC17485-protein, GM02LC46-protein, GM02LC5744-protein, H/ACA ribonucleoprotein complex subunit 3, harpin-induced family protein, heat shock protein, heat shock transcription factor, HesB/YadR/YfhF family protein, histone H2A, homocitrate synthase, hydrolase, integral membrane transporter family protein, iron(III) dicitrate-binding protein, isochorismate synthase, isocitrate dehydrogenase, isopentenyl diphosphate isomerase, L-asparaginase, L-aspartate oxidase, Leucyl/phenylalanyl-tRNA-protein transferase, lipoprotein precursor, L-ribulose-5-phosphate 4-epimerase, lysyl-tRNA synthetase, major facilitator superfamily transporter protein, malate dehydrogenase, malic enzyme, malonyl CoA-acyl carrier protein transacylase, membrane protein, membrane transport protein, metal-dependent hydrolase, methylglyoxal synthase, methyltransferase, mitochondrial processing protease, molecular chaperone portein, monothiol glutaredoxin, monthiol glutaredoxin, multiple antibiotic resistance protein, murein transglycosylase, N-acetyl-gamma-glutamyl-phosphate reductase, NAD(P)H-quinone oxidoreductase subunit, NADH dehydrogenase I chain I, nitrate/nitrite transport protein, ornithine carbamoyltransferase, oxidoreductase, oxidoreductase subunit, oxireductase, permease protein of phosphate ABC transporter, peroxisome assembly protein, phosphatidylinositol 3- and 4-kinase family protein, phosphoadenosine phosphosulfate reductase, phosphoanhydride phosphorylase, phosphopantetheine adenylyltransferase, phosphopantothenoylcysteine decarboxylase, phosphopantothenoylcysteinesynthetase/decarboxylase, phosphoribosylaminoimidazole carboxylase catalytic subunit, phosphoribosylformyl glycinamidine synthase subunit, phosphoribosylglycinamide formyltransferase, phosphoribosyltransferase, Photosystem I reaction center subunit XI, photosystem II protein, polygalacturonase, polyphosphate kinase, potassium transport protein, pre-mRNA-splicing factor, protease, protein kinase, protein phosphatase, purine nucleoside phosphorylase, purinenucleoside phosphorylase, pyrroline carboxylate reductase, pyruvate kinase, quinolinate synthetase, riboflavin biosynthesis protein, ribosephosphate isomerase, constitutive, RNA binding protein, s_pp015018333r-protein, sec-independent protein translocase, Sec-independent protein translocase subunit, serine protease, serine protease inhibitor, short-chain alcohol dehydrogenase family, sll0064-protein, sll0254-protein, sll0354-protein, sll1761-protein, slr0600-protein, sodium/proton antiporter, squalene monooxygenase, sterol O-acyltransferase, thioredoxin, thioredoxin family protein, threonine dehydrogenase, threonine synthase, transcription factor, transcriptional regulator, transcriptional regulator protein, translation initiation factor subunit, transport protein, TTC0768-protein, TTC1386-protein, urease subunit, uridine/cytidine kinase, valine-pyruvate transaminase, XM_{—}473199-protein, YCL026C-A-protein, ycr102c-protein, ydr338c-protein, yer014w-protein, yer106w-protein, YFL019C-protein, yfl054c-protein, yg1237c-protein, ygr068c-protein, ygr221 c-protein, yhl013c-protein, yhr207c-protein, ylr065c-protein, ylr178c-protein, ynl142w-protein, yor221c-protein, zinc finger protein, zinc transporter, Zm_{—}4842_BE510522-protein, and ZM06LC11975-protein, in a non-human organism or a part thereof, preferably a microorganism, a plant cell, a plant or a part thereof, as compared to a corresponding non-transformed wild type non-human organism or a part thereof; and
[13179] (b) growing the non-human organism or a part thereof under conditions which permit the production of arginine, glutamate, glutamine or proline, respectively, or a composition comprising arginine, glutamate, glutamine or proline, respectively, in said non-human organism or in the culture medium surrounding said non-human organism.

[13180] Item 2. A process for the production of the respective fine chemical arginine, glutamate, glutamine or proline, respectively, which comprises

### (A)

[13181] (i) increasing or generating of the expression of; and/or
[13182] (ii) increasing or generating the expression of an expression product of; and/or
[13183] (iii) increasing or generating one or more activities of an expression product encoded by;
[13184] at least one respective nucleic acid molecule comprising a nucleic acid molecule selected from the group consisting of:
[13185] (a) a nucleic acid molecule encoding the polypeptide shown in column 5 or 8 of

[13186] Table II, preferably Table II B, application no. 1, or a homolog or a fragment thereof, whereby the respective line discloses in column 7 arginine, glutamate, glutamine or proline, respectively;
[13187] (b) a nucleic acid molecule shown in column 5 or 8 of Table I, preferably Table I B, application no. 1, or a homolog or a fragment thereof (preferably the coding region thereof), whereby the respective line discloses in column 7 arginine, glutamate, glutamine or proline, respectively;
[13188] (c) a nucleic acid molecule, which, as a result of the degeneracy of the genetic code, can be derived from a polypeptide sequence depicted in column 5 or 8 of Table II, preferably Table II B, application no. 1, whereby the respective line discloses in column 7 arginine, glutamate, glutamine or proline, respectively;
[13189] (d) a nucleic acid molecule having at least 30%, in particular at least 50%, 60%, 70%, 80%, 85%, 90%, 95%, 97%, 98%, 99% or 99.5% identity with the nucleic acid molecule sequence of a polynucleotide comprising the nucleic acid molecule shown in column 5 or 8 of Table I, preferably Table I B, application no. 1, or the coding region thereof, whereby the respective line discloses in column 7 arginine, glutamate, glutamine or proline, respectively;
[13190] (e) a nucleic acid molecule encoding a polypeptide having at least 30%, in particular 50%, 60%, 70%, 80%, 85%, 90%, 95%, 97%, 98%, 99% or 99.5% identity with the amino acid sequence of the polypeptide encoded by the nucleic acid molecule of (a), (b), (c) or (d);
[13191] (f) a nucleic acid molecule which hybridizes with a nucleic acid molecule of (a), (b), (c), (d) or (e) under stringent hybridization conditions;
[13192] (g) a nucleic acid molecule encoding a polypeptide which can be isolated with the aid of monoclonal or polyclonal antibodies made against a polypeptide encoded by one of the nucleic acid molecules of (a), (b), (c), (d), (e) or (f);
[13193] (h) a nucleic acid molecule encoding a polypeptide comprising the consensus sequence or one or more polypeptide motifs as shown in column 8 of Table IV, application no. 1, whereby the respective line discloses in column 7 arginine, glutamate, glutamine or proline, respectively;
[13194] (i) a nucleic acid molecule encoding a polypeptide having the activity represented by a respective protein as depicted in column 5 of Table II, application no. 1, whereby the respective line discloses in column 7 arginine, glutamate, glutamine or proline, respectively;
[13195] (j) a nucleic acid molecule which comprises a polynucleotide, which is obtained by amplifying a cDNA library or a genomic library using the primers as depicted in column 8 of Table III, application no. 1, whereby the respective line discloses in column 7 arginine, glutamate, glutamine or proline, respectively; and
[13196] (k) a nucleic acid molecule which is obtainable by screening a suitable nucleic acid library, especially a cDNA library and/or a genomic library, under stringent hybridization conditions with a probe comprising a complementary sequence of a nucleic acid molecule of (a), (b), (c), (d), (e), (f), (g), (h), (i) or (j) or with a fragment thereof, having at least 15 nt, preferably 20 nt, 30 nt, 50 nt, 100 nt, 200 nt, 500 nt, 1000 nt, 1500 nt, 2000 nt or 3000 nt of a nucleic acid molecule complementary to a nucleic acid molecule sequence characterized in (a), (b), (c), (d), (e), (f), (g), (h), (i) or (j);
   or a nucleic acid molecule comprising a sequence which is complementary thereto; in a non-human organism or a part thereof, preferably a microorganism, a plant cell, a plant or a part thereof, as compared to a corresponding non-transformed wild type non-human organism or a part thereof; and
   (B) growing the non-human organism or a part thereof under conditions which permit the production of arginine, glutamate, glutamine or proline, respectively, or a composition comprising arginine, glutamate, glutamine or proline, respectively, in said non-human organism or in the culture medium surrounding said non-human organism.

[13197] Item 3. A process of items 1 or 2, comprising of recovering the respective fine chemical in its free or bound form.

[13198] Item 4. The process of any one of items 1 to 3, comprising the folowing steps:
[13199] (a) selecting a non-human organism or a part thereof expressing a polypeptide encoded by the nucleic acid molecule characterized in item 2;
[13200] (b) mutagenizing the selected non-human organism or the part thereof;
[13201] (c) comparing the activity or the expression level of said polypeptide in the mutagenized non-human organism or the part thereof with the activity or the expression of said polypeptide of the selected non-human organisms or the part thereof;
[13202] (d) selecting the mutated non-human organisms or parts thereof, which comprise an increased activity or expression level of said polypeptide compared to the selected non-human organism or the part thereof;
[13203] (e) optionally, growing and cultivating the non-human organisms or the parts thereof; and
[13204] (f) recovering, and optionally isolating, the free or bound arginine, glutamate, glutamine or proline, respectively, produced by the selected mutated non-human organisms or parts thereof.

[13205] Item 5. The process of any one of items 1 to 4 wherein the activity of said protein or the expression of said nucleic acid molecule is increased or generated transiently or stably.

[13206] Item 6. An isolated nucleic acid molecule comprising a nucleic acid molecule selected from the group consisting of:
[13207] (a) a nucleic acid molecule encoding a polypeptide shown in Table II, application no. 1, column 5 or 8, preferably shown in Table II B, application no. 1, column 8, or a homolog or a fragment thereof;
[13208] (b) a nucleic acid molecule shown in Table I, application no. 1, column 5 or 8, preferably shown in Table I B, application no. 1, column 8, preferably the coding region thereof, or a homolog or a fragment thereof;
[13209] (c) a nucleic acid molecule, which, as a result of the degeneracy of the genetic code, can be derived from a polypeptide sequence depicted in column 5 or 8 of Table II, application no. 1, preferably in column 8 of Table II B, application no. 1;
[13210] (d) a nucleic acid molecule having at least 30% identity, preferably at least 40%, 50%, 60%, 70%, 75%, 80%, 85%, 90%, 95%, 96%, 97%, 98%, 99%, 99.5%, with the nucleic acid molecule sequence of a polynucleotide comprising the nucleic acid molecule shown in column 5 or 8 of Table I, application no. 1, preferably shown in column 8 of Table I B, application no. 1, preferably the coding region thereof;
[13211] (e) a nucleic acid molecule encoding a polypeptide having at least 30% identity, preferably at least 40%, 50% 60%, 70%, 75%, 80%, 85%, 90%, 95%, 96%, 97%, 98%, 99%, 99.5%, identity with the amino acid sequence of the polypeptide encoded by the nucleic acid molecule of (a), (b), (c) or (d);
[13212] (f) a nucleic acid molecule which hybridizes with a nucleic acid molecule of (a), (b), (c), (d) or (e) under stringent hybridisation conditions;
[13213] (g) a nucleic acid molecule encoding a polypeptide which can be isolated with the aid of monoclonal or polyclonal antibodies made against a polypeptide encoded by one of the nucleic acid molecules of (a), (b), (c), (d), (e) or (f);
[13214] (h) a nucleic acid molecule encoding a polypeptide comprising the consensus sequence or one or more polypeptide motifs as shown in column 8 of Table IV, application no. 1,
[13215] (i) a nucleic acid molecule encoding a polypeptide having the activity represented by a respective protein as depicted in column 5 of Table II, application no. 1;
[13216] (j) a nucleic acid molecule comprising a polynucleotide which is obtained by amplifying a cDNA library or a genomic library using the primers in Table III, application no. 1, column 8;
[13217] and
[13218] (k) nucleic acid molecule which is obtainable by screening a suitable nucleic acid library, especially a cDNA library and/or a genomic library, under stringent hybridization conditions with a probe comprising one of the sequences of the nucleic acid molecule of (a), (b), (c), (d), (e), (f), (g), (h), (i) or (j) or with a fragment of at least 15 nt, preferably 20 nt, 30 nt, 50 nt, 100 nt, 200 nt,500 nt, 1000 nt, 1500 nt, 2000 nt or 3000 nt of the nucleic acid molecule characterized in (a), (b), (c), (d), (e), (f), (g), (h), (i) or (j) ;
   or a nucleic acid molecule comprising a sequence which is complementary thereto.

[13219] Item 7. A nucleic acid construct which confers the expression of the nucleic acid molecule as defined in item 6, comprising one or more regulatory elements.

[13220] Item 8. An expression cassette comprising
[13221] (a) a promoter, preferably selected from the group consisting of Big35S, PCUbi, Super ans USP;
[13222] (b) a nucleic acid molecule as defined in item 6.

[13223] Item 9. A vector comprising the nucleic acid molecule as defined in item 6 or the nucleic acid construct as claimed in item 7 or the expression cassette as claimed in item 8.

[13224] Item 10. A host cell or a plant organelle, which has been transformed with the vector as claimed in item 9 or the nucleic acid molecule as defined in item 6 or the nucleic acid construct as claimed in item 7 or the expression cassette as claimed in item 8.

[13225] Item 11. The host cell of item 10, which is a plant cell or a microorganism.

[13226] Item 12. A process for producing a polypeptide, wherein the polypeptide is expressed in a host cell as claimed in item 10 or 11.

[13227] Item 13. A polypeptide produced by the process as claimed in item 12 or encoded by the nucleic acid molecule as defined in item 6.

[13228] Item 14. An antibody, which binds specifically to the polypeptide as claimed in item 13.

[13229] Item 15. A plant tissue, propagation material, harvested material or a plant or s part thereof comprising the host cell as claimed in item 10 or 11.

[13230] Item 16. A process for the identification of a compound conferring an increase in arginine, glutamate, glutamine or proline production, respectively, in a non-human organism, comprising the steps:
[13231] (a) culturing a plant cell or tissue or microorganism or maintaining a plant expressing the polypeptide encoded by the nucleic acid molecule as defined in item 6 conferring an increase in the amount of arginine, glutamate, glutamine or proline, respectively, in a non-human organism or a part thereof and a readout system capable of interacting with the polypeptide under suitable conditions which permit the interaction of the polypeptide with said readout system in the presence of a compound or a sample comprising a plurality of compounds and capable of providing a detectable signal in response to the binding of a compound to said polypeptide under conditions which permit the expression of said readout system and of the polypeptide encoded by the nucleic acid molecule of item 6 conferring an increase in the amount of arginine, glutamate, glutamine or proline, respectively, in a non-human organism or a part thereof;
[13232] (b) identifying if the compound is an effective agonist by detecting the presence or absence or increase of a signal produced by said readout system.

[13233] Item 17. A method for the production of an agricultural composition comprising the steps of the method of item 16 and formulating the compound identified in item 16 in a form acceptable for an application in agriculture.

[13234] Item 18. A composition comprising the nucleic acid molecule as defined in item 6, the polypeptide as claimed in item 13, the nucleic acid construct as claimed in item 7, the expression cassette as claimed in item 8, the vector as claimed in item 9, the compound as claimed in item 16, the antibody as claimed in item 14, and optionally an agricultural acceptable carrier.

[13235] Item 19. Use of the nucleic acid molecule as defined in item 6 for the identification of a nucleic acid molecule conferring an increase in arginine, glutamate, glutamine or proline, respectively, after expression.

[13236] Item 20. Cosmetic, pharmaceutical, food or feed composition comprising the nucleic acid moleculeas defined in item 6, the polypeptide as claimed in item 13, the nucleic acid construct as claimed in item 7, the expression cassette as claimed in item 8, the vector as claimed in item 9, the antibody as claimed in item 14 , the plant or a part thereof, or plant tissue as claimed in item 15, the harvested material or propagation material as claimed in item 15 or the host cell as claimed in items 10 or 11.

[13237] Item 21. Use of the nucleic acid molecule as defined in item 6, the polypeptide as claimed in item 13, the nucleic acid construct as claimed in item 7, the expression cassette as claimed in item 8, the vector as claimed in item 9, the plant or plant tissue as claimed in item 15, or the host cell as claimed initem 10 to 11 for the production of plant resistant to a herbicide inhibiting the production of arginine, glutamate, glutamine or proline.

[13238] Item 22. A method for producing a plant with increased yield as compared to a corresponding non-transformed wild type plant, whereby the method comprises
[13239] (i) increasing or generating of the expression of; and/or
[13240] (ii) increasing or generating the expression of an expression product of; and/or
[13241] (iii) increasing or generating one or more activities of an expression product encoded by; at least one respective nucleic acid molecule comprising a nucleic acid molecule selected from the group consisting of:
[13242] (a) a nucleic acid molecule encoding the polypeptide shown in column 5 or 8 of Table II, preferably Table II B, application no. 7, or a homolog or a fragment thereof, in case in column 7 arginine, glutamate, glutamine or proline, respectively is indicated;
[13243] (b) a nucleic acid molecule shown in column 5 or 8 of Table I, preferably Table I B, application no. 7, or a homolog or a fragment thereof (preferably the coding region thereof) , in case in column 7 arginine, glutamate, glutamine or proline, respectively, is indicated;
[13244] (c) a nucleic acid molecule, which, as a result of the degeneracy of the genetic code, can be derived from a polypeptide sequence depicted in column 5 or 8 of Table II, preferably Table II B, application no. 7, in case in column 7 arginine, glutamate, glutamine or proline, respectively, is indicated;
[13245] (d) a nucleic acid molecule having at least 30%, in particular at least 50%, 60%, 70%, 80%, 85%, 90%, 95%, 97%, 98%, 99% or 99.5% identity with the nucleic acid molecule sequence of a polynucleotide comprising the nucleic acid molecule shown in column 5 or 8 of Table I, preferably Table I B, application no. 7, or the coding region thereof, in case in column 7 arginine, glutamate, glutamine or proline , respectively, is indicated;
[13246] (e) a nucleic acid molecule encoding a polypeptide having at least 30%, in particular 50%, 60%, 70%, 80%, 85%, 90%, 95%, 97%, 98%, 99% or 99.5% identity with the amino acid sequence of the polypeptide encoded by the nucleic acid molecule of (a), (b), (c) or (d);
[13247] (f) a nucleic acid molecule which hybridizes with a nucleic acid molecule of (a), (b), (c), (d) or (e) under stringent hybridization conditions;
[13248] (g) a nucleic acid molecule encoding a polypeptide which can be isolated with the aid of monoclonal or polyclonal antibodies made against a polypeptide encoded by one of the nucleic acid molecules of (a), (b), (c), (d), (e) or (f);
[13249] (h) a nucleic acid molecule encoding a polypeptide comprising the consensus sequence or one or more polypeptide motifs as shown in column 8 of Table IV, application no. 7, in case in column 7 arginine, glutamate, glutamine or proline, respectively, is indicated;
[13250] (i) a nucleic acid molecule encoding a polypeptide having the activity represented by a respective protein as depicted in column 5 of Table II, application no. 7, in case in column 7 arginine, glutamate, glutamine or proline, respectively, is indicated;
[13251] (j) a nucleic acid molecule which comprises a polynucleotide, which is obtained by amplifying a cDNA library or a genomic library using the primers as depicted in column 8 of Table III, application no. 7, in case in column 7 arginine, glutamate, glutamine or proline , respectively, is indicated; and
[13252] (k) a nucleic acid molecule which is obtainable by screening a suitable nucleic acid library, especially a cDNA library and/or a genomic library, under stringent hybridization conditions with a probe comprising a complementary sequence of a nucleic acid molecule of (a), (b), (c), (d), (e), (f), (g), (h), (i) or (j) or with a fragment thereof, having at least 15 nt, preferably 20 nt, 30 nt, 50 nt, 100 nt, 200 nt, 500 nt, 1000 nt, 1500 nt, 2000 nt or 3000 nt of a nucleic acid molecule complementary to a nucleic acid molecule sequence characterized in (a), (b), (c), (d), (e), (f), (g), (h), (i) or (j);
   or a nucleic acid molecule comprising a sequence which is complementary thereto; in a plant cell, plant or a part thereof.

[13253] Item 23. A method for producing a plant with increased yield according to item 22, which comprises in addition the regeneration of a plant from such transformed plant cell, plant cell compartment, plant cell nucleus, plant cell or plant tissue with increased yield.

[13254] [0483.1.1.2] to [0494.1.1.2] for the disclosure of these paragraphs see [0483.1.1.1] to [0494.1.1.1] above.

### Example 11a

### PCR Amplification of the Sequences

[13255] Unless otherwise specified, standard methods as described in Sambrook et al., Molecular Cloning: A laboratory manual, Cold Spring Harbor 1989, Cold Spring Harbor Laboratory Press are used.

[13256] The inventive sequences as shown in the respective line in Table I, column 5, prefareably the coding region thereof, were amplified by PCR as described in the protocol of the Pfu Ultra, Pfu Turbo or Herculase DNA polymerase (Stratagene). The composition for the protocol of the Pfu

[13257] Ultra, Pfu Turbo or Herculase DNA polymerase was as follows: 1×PCR buffer (Stratagene), 0.2 mM of each dNTP, 100 ng genomic DNA of Saccharomyces cerevisiae (strain S288C; Research Genetics, Inc., now Invitrogen), Escherichia coli (strain MG1655; E. coli Genetic Stock Center), Synechocystis sp. (strain PCC6803), Azotobacter vinelandii (strain N.R. Smith,16), Thermus thermophilus (HB8) or 50 ng cDNA from various tissues and development stages of Arabidopsis thaliana (ecotype Columbia), Physcomitrella patens, Glycine max (variety Resnick), Brassica napus, Oryza sativa or Zea mays (variety B73, Mo17, A188), 50 pmol forward primer, 50 pmol reverse primer, with or without 1 M Betaine, 2.5 u Pfu Ultra, Pfu Turbo or Herculase DNA polymerase.

[13258] The amplification cycles were as follows:

[13259] 1 cycle of 2-3 minutes at 94-95° C., then 25-36 cycles with 30-60 seconds at 94-95° C., 30-45 seconds at 50-60° C. and 210-480 seconds at 72° C., followed by 1 cycle of 5-10 minutes at 72° C., then 4-16° C.—preferably for Saccharomyces cerevisiae, Escherichia coli, Synechocystis sp., Azotobacter vinelandii, Thermus thermophilus.

[13260] In case of Arabidopsis thaliana, Brassica napus, Glycine max, Oryza sativa, Physcomitrella patens, Zea mays the amplification cycles were as follows:

[13261] 1 cycle with 30 seconds at 94° C., 30 seconds at 61° C., 15 minutes at 72° C., then 2 cycles with 30 seconds at 94° C., 30 seconds at 60° C., 15 minutes at 72° C., then 3 cycles with 30 seconds at 94° C., 30 seconds at 59° C., 15 minutes at 72° C., then 4 cycles with 30 seconds at 94° C., 30 seconds at 58° C., 15 minutes at 72° C., then 25 cycles with 30 seconds at 94° C., 30 seconds at 57° C., 15 minutes at 72° C., then 1 cycle with 10 minutes at 72° C., then finally 4-16° C.

[13262] RNAs were generated with the RNeasy Plant Kit according to the standard protocol (Qiagen) and Superscript II Reverse Transkriptase was used to produce double stranded cDNA according to the standard protocol (Invitrogen).

[13263] ORF specific primer pairs for the genes to be expressed are shown in the respective line in Table III, column 8. The following adapter sequences were added to Saccharomyces cerevisiae ORF specific primers (see Table III) for cloning purposes:

SEQ ID NO: 20

| | | |
|---|---|---|
| i) | foward primer: | 5′-GGAATTCCAGCTGACCACC-3′ |

SEQ ID NO: 21

| | | |
|---|---|---|
| ii) | reverse primer: | 5′-GATCCCCGGGAATTGCCATG-3′ |

[13264] These adaptor sequences allow cloning of the ORF into the various vectors containing the Resgen adaptors, see table column E of Table c.

[13265] The following adapter sequences were added to Saccharomyces cerevisiae, Escherichia coli, Synechocystis sp., Azotobacter vinelandii, Thermus thermophilus, Arabidopsis thaliana, Brassica napus, Glycine max, Oryza sativa, Physcomitrella patens, or Zea mays ORF specific primers for cloning purposes:

| SEQ ID NO: 22 | | |
|---|---|---|
| iii) | forward primer: | 5′-TTGCTCTTCC-3′ |
| SEQ ID NO: 23 | | |
| iiii) | reverse primer: | 5′-TTGCTCTTCG-3′ |

[13266] The adaptor sequences allow cloning of the ORF into the various vectors containing the Colic adaptors, see table column E of Table c.

[13267] Therefore for amplification and cloning of Saccharomyces cerevisiae SEQ ID NO: 14302, a primer consisting of the adaptor sequence i) and the ORF specific sequence SEQ ID NO: 14696 and a second primer consisting of the adaptor sequence ii) and the ORF specific sequence SEQ ID NO: 14697 were used.

[13268] For amplification and cloning of Escherichia coli SEQ ID NO: 7081, a primer consisting of the adaptor sequence iii) and the ORF specific sequence SEQ ID NO: 7261 and a second primer consisting of the adaptor sequence iiii) and the ORF specific sequence SEQ ID NO: 7262 were used.

[13269] For amplification and cloning of Synechocystis sp. SEQ ID NO: 11423, a primer consisting of the adaptor sequence iii) and the ORF specific sequence SEQ ID NO: 11465 and a second primer consisting of the adaptor sequence iiii) and the ORF specific sequence SEQ ID NO: 11466 were used.

[13270] For amplification and cloning of Arabidopsis thaliana SEQ ID NO: 1061, a primer consisting of the adaptor sequence iii) and the ORF specific sequence SEQ ID NO: 1293 and a second primer consisting of the adaptor sequence iiii) and the ORF specific sequence SEQ ID NO:

[13271] 1294 were used.

[13272] For amplification and cloning of Azotobacter vinelandii SEQ ID NO: 5557, a primer consisting of the adaptor sequence iii) and the ORF specific sequence SEQ ID NO: 6033 and a second primer consisting of the adaptor sequence iiii) and the ORF specific sequence SEQ ID NO: 6034 were used.

[13273] For amplification and cloning of Brassica napus SEQ ID NO: 15532, a primer consisting of the adaptor sequence iii) and the ORF specific sequence SEQ ID NO: 16150 and a second primer consisting of the adaptor sequence iiii) and the ORF specific sequence SEQ ID NO: 16151 were used.

[13274] For amplification and cloning of Glycine max SEQ ID NO: 69, a primer consisting of the adaptor sequence iii) and the ORF specific sequence SEQ ID NO: 343 and a second primer consisting of the adaptor sequence iiii) and the ORF specific sequence SEQ ID NO: 344 were used.

[13275] For amplification and cloning of Oryza sativa SEQ ID NO: 34301, a primer consisting of the adaptor sequence iii) and the ORF specific sequence SEQ ID NO: 34595 and a second primer consisting of the adaptor sequence iiii) and the ORF specific sequence SEQ ID NO: 34596 were used.

[13276] For amplification and cloning of Physcomytrella patens SEQ ID NO: 45757, a primer consisting of the adaptor sequence iii) and the ORF specific sequence SEQ ID NO: 45791 and a second primer consisting of the adaptor sequence iiii) and the ORF specific sequence SEQ ID NO: 45792 were used.

[13277] For amplification and cloning of Thermus thermophilus SEQ ID NO: 12698, a primer consisting of the adaptor sequence iii) and the ORF specific sequence SEQ ID NO: 12970 and a second primer consisting of the adaptor sequence iiii) and the ORF specific sequence SEQ ID NO: 12971 were used.

[13278] For amplification and cloning of Zea mays SEQ ID NO: 68132, a primer consisting of the adaptor sequence iii) and the ORF specific sequence SEQ ID NO: 68358 and a second primer consisting of the adaptor sequence iiii) and the ORF specific sequence SEQ ID NO: 68359 were used.

[13279] Following these examples every sequence disclosed in Table I, preferably column 5, especially the coding region thereof can be cloned by fusing the adaptor sequences to the respective specific primers sequences as disclosed in Table III, column 8 using the respective vectors shown in Table c.

[13280] [0496.1.1.2] to [0499.1.1.2] for the disclosure of these paragraphs see [0496.1.1.1] to [0499.1.1.1] above.

### Example 11e

### Cloning of Inventive Sequences as Shown in Table I, Column 5 in the Different Expression Vectors

[13281] For cloning of for example SEQ ID NO: 7081 from Escherichia coli or any other ORF from Escherichia coli, Synechocystis sp., Azotobacter vinelandii, Thermus thermophilus, Arabidopsis thaliana, Brassica napus, Glycine max, Oryza sativa, Physcomitrella patens, or Zea mays the vector DNA was treated with the restriction enzymes Pacl and Ncol following the standard protocol (MBI Fermentas).

[13282] For cloning for example the ORFs of SEQ ID NO: 66772 from Saccharomyces cerevisiae or any other ORF from Saccharomyces cerevisiae into vectors containing the Resgen adaptor sequence the respective vector DNA was treated with the restriction enzyme Ncol.

[13283] For cloning of for example ORFs SEQ ID NO: 66419 from Saccharomyces cerevisiae or any other ORF from Saccharomyces cerevisiae into vectors containing the Colic adaptor sequence, the respective vector DNA was treated with the restriction enzymes Pacl and Ncol following the standard protocol (MBI Fermentas).

[13284] In all cases the reaction was stopped by inactivation at 70° C. for 20 minutes and purified over QlAquick or NucleoSpin Extract II columns following the standard protocol (Qiagen or Macherey-Nagel).

[13285] Then the PCR-product representing the amplified ORF with the respective adapter sequences and the vector DNA were treated with T4 DNA polymerase according to the standard protocol (MBI Fermentas) to produce single stranded overhangs with the parameters 1 unit T4 DNA polymerase at 37° C. for 2-10 minutes for the vector and 1-2 u T4 DNA polymerase at 15-17° C. for 10-60 minutes for the PCR product representing SEQ ID NO: 7081.

[13286] The reaction was stopped by addition of high-salt buffer and purified over QlAquick or NucleoSpin Extract II columns following the standard protocol (Qiagen or Macherey-Nagel).

[13287] According to this example the skilled person is able to clone all sequences disclosed in Table I, preferably column 5 or column 8, especially the coding region thereof.

[13288] Approximately 30-60 ng of prepared vector and a defined amount of prepared amplificate were mixed and hybridized at 65° C. for 15 minutes followed by 37° C. 0,1 ° C./1 seconds, followed by 37° C. 10 minutes, followed by 0,1 ° C./1 seconds, then 4-10 ° C.

[13289] The ligated constructs were transformed in the same reaction vessel by addition of competent E. coli cells (strain DHSalpha) and incubation for 20 minutes at 1° C. followed by a heat shock for 90 seconds at 42° C. and cooling to 1-4° C. Then, complete medium (SOC) was added and the mixture was incubated for 45 minutes at 37° C. The entire mixture was subsequently plated onto an agar plate with 0.05 mg/ml kanamycin and incubated overnight at 37° C.

[13290] The outcome of the cloning step was verified by amplification with the aid of primers which bind upstream and downstream of the integration site, thus allowing the amplification of the insertion.

[13291] The amplifications were carried out as described in the protocol of Taq DNA polymerase (Gibco-BRL).

[13292] The amplification cycles were as follows:

[13293] 1 cycle of 1-5 minutes at 94° C., followed by 35 cycles of in each case 15-60 seconds at 94° C., 15-60 seconds at 50-66° C. and 5-15 minutes at 72° C., followed by 1 cycle of 10 minutes at 72° C., then 4-16° C.

[13294] Several colonies were checked, but only one colony for which a PCR product of the expected size was detected was used in the following steps.

[13295] A portion of this positive colony was transferred into a reaction vessel filled with complete medium (LB) supplemented with kanamycin and incubated overnight at 37° C.

[13296] The plasmid preparation was carried out as specified in the Qiaprep or NucleoSpin Multi-96 Plus standard protocol (Qiagen or Macherey-Nagel).

[13297] [0501.1.1.2] to [0503.1.1.2] for the disclosure of these paragraphs see [0501.1.1.1] to [0503.1.1.1] above.

### Table d Showing Results of Plant Analyses

TABLE d

| SeqID | Target | Locus | Metabolite | Source | Promotor | Method | Min | Max |
|---|---|---|---|---|---|---|---|---|
| 15187 | non- | 47266012_SOYBEAN | glutamate | ARA_LEAF | p-PcUBI | GC | 42 | 96 |
| | targeted | | | | | | | |
| 15187 | non- | 47266012_SOYBEAN | glutamine | ARA_LEAF | p-PcUBI | GC | 72 | 234 |
| | targeted | | | | | | | |
| 69 | non- | 49747384_SOYBEAN | glutamate | ARA_LEAF | p-PcUBI | GC | 37 | 122 |
| | targeted | | | | | | | |
| 15532 | plastidic | 51340801_CANOLA | glutamate | ARA_LEAF | p-PcUBI | LC | 35 | 135 |
| 15532 | plastidic | 51340801_CANOLA | proline | ARA_LEAF | p-PcUBI | GC | 38 | 189 |
| 16155 | non- | 59547452_SOYBEAN | arginine | ARA_LEAF | p-PcUBI | LC | 65 | 457 |
| | targeted | | | | | | | |
| 16263 | plastidic | 59554615_SOYBEAN | glutamate | ARA_LEAF | p-PcUBI | LC | 44 | 80 |
| 16883 | plastidic | 59582753_SOYBEAN | arginine | ARA_LEAF | p-PcUBI | LC | 66 | 241 |
| 16883 | plastidic | 59582753_SOYBEAN | proline | ARA_LEAF | p-PcUBI | GC | 34 | 204 |
| 17356 | plastidic | AAC43185 | arginine | ARA_LEAF | p-PcUBI | LC | 586 | 3134 |
| 17451 | non- | At1g07430 | glutamate | ARA_LEAF | p-PcUBI | LC | 39 | 67 |
| | targeted | | | | | | | |
| 17451 | non- | At1g07430 | glutamine | ARA_LEAF | p-PcUBI | LC | 27 | 35 |
| | targeted | | | | | | | |
| 17601 | non- | At1g17440 | arginine | ARA_LEAF | p-PcUBI | LC | 54 | 181 |
| | targeted | | | | | | | |
| 17637 | non- | At1g19800 | glutamine | ARA_LEAF | p-PcUBI | GC | 53 | 175 |
| | targeted | | | | | | | |
| 17701 | non- | At1g26830 | arginine | ARA_LEAF | p-PcUBI | LC | 64 | 354 |
| | targeted | | | | | | | |
| 17701 | non- | At1g26830 | proline | ARA_LEAF | p-PcUBI | GC | 65 | 193 |
| | targeted | | | | | | | |
| 17901 | non- | At1g29350 | arginine | ARA_LEAF | p-PcUBI | LC | 51 | 249 |
| | targeted | | | | | | | |
| 17968 | non- | At1g36730 | arginine | ARA_LEAF | p-PcUBI | LC | 56 | 193 |
| | targeted | | | | | | | |
| 17968 | non- | At1g36730 | glutamine | ARA_LEAF | p-PcUBI | GC | 48 | 136 |
| | targeted | | | | | | | |
| 18070 | non- | At1g43850 | arginine | ARA_LEAF | p-PcUBI | LC | 49 | 294 |
| | targeted | | | | | | | |
| 18070 | non- | At1g43850 | glutamate | ARA_LEAF | p-PcUBI | GC | 54 | 158 |
| | targeted | | | | | | | |
| 18070 | non- | At1g43850 | glutamine | ARA_LEAF | p-PcUBI | GC | 42 | 488 |
| | targeted | | | | | | | |
| 18070 | non- | At1g43850 | proline | ARA_LEAF | p-PcUBI | GC | 38 | 520 |
| | targeted | | | | | | | |
| 18122 | non- | At1g47380 | proline | ARA_LEAF | p-PcUBI | GC | 39 | 237 |
| | targeted | | | | | | | |
| 18235 | non- | At1g48260 | arginine | ARA_LEAF | p-PcUBI | LC | 70 | 338 |
| | targeted | | | | | | | |
| 18235 | non- | At1g48260 | glutamate | ARA_LEAF | p-PcUBI | GC | 53 | 362 |
| | targeted | | | | | | | |
| 18235 | non- | At1g48260 | proline | ARA_LEAF | p-PcUBI | GC | 34 | 108 |
| | targeted | | | | | | | |
| 18869 | non- | At1g61950 | arginine | ARA_LEAF | p-PcUBI | LC | 89 | 385 |
| | targeted | | | | | | | |
| 18869 | non- | At1g61950 | glutamine | ARA_LEAF | p-PcUBI | GC | 54 | 319 |
| | targeted | | | | | | | |
| 19364 | non- | At1g67340 | proline | ARA_LEAF | p-PcUBI | GC | 36 | 86 |
| | targeted | | | | | | | |
| 1061 | non- | At1g68320 | glutamine | ARA_LEAF | p-PcUBI | GC | 57 | 183 |
| | targeted | | | | | | | |
| 19419 | non- | At1g72770 | glutamine | ARA_LEAF | p-PcUBI | GC | 44 | 290 |
| | targeted | | | | | | | |
| 19502 | non- | At2g17560 | proline | ARA_LEAF | p-PcUBI | GC | 39 | 181 |
| | targeted | | | | | | | |
| 1298 | non- | At2g25070 | glutamate | ARA_LEAF | p-PcUBI | LC | 33 | 77 |
| | targeted | | | | | | | |
| 1298 | non- | At2g25070 | glutamine | ARA_LEAF | p-PcUBI | GC | 60 | 213 |
| | targeted | | | | | | | |
| 19671 | non- | At2g26390 | proline | ARA_LEAF | p-PcUBI | GC | 38 | 120 |
| | targeted | | | | | | | |
| 19874 | non- | At2g28890 | proline | ARA_LEAF | p-PcUBI | GC | 36 | 716 |
| | targeted | | | | | | | |
| 19919 | non- | At2g30360 | glutamine | ARA_LEAF | p-PcUBI | GC | 46 | 170 |
| | targeted | | | | | | | |
| 19919 | non- | At2g30360 | proline | ARA_LEAF | p-PcUBI | LC | 43 | 132 |
| | targeted | | | | | | | |
| 20346 | non- | At2g30540 | arginine | ARA_LEAF | p-PcUBI | LC | 62 | 285 |
| | targeted | | | | | | | |
| 20346 | non- | At2g30540 | proline | ARA_LEAF | p-PcUBI | GC | 71 | 1094 |
| | targeted | | | | | | | |
| 20578 | non- | At2g34180 | proline | ARA_LEAF | p-PcUBI | GC | 37 | 136 |
| | targeted | | | | | | | |
| 21008 | non- | At2g39800 | proline | ARA_LEAF | p-PcUBI | GC | 106 | 4073 |
| | targeted | | | | | | | |
| 21106 | non- | At2g46500 | glutamine | ARA_LEAF | p-PcUBI | GC | 44 | 135 |
| | targeted | | | | | | | |
| 21159 | non- | At2g47880 | arginine | ARA_LEAF | p-PcUBI | LC | 253 | 1026 |
| | targeted | | | | | | | |
| 21159 | non- | At2g47880 | glutamine | ARA_LEAF | p-PcUBI | LC | 90 | 179 |
| | targeted | | | | | | | |
| 21159 | non- | At2g47880 | proline | ARA_LEAF | p-PcUBI | LC | 49 | 717 |
| | targeted | | | | | | | |
| 21497 | plastidic | At3g04050 | glutamate | ARA_LEAF | p-PcUBI | GC | 36 | 311 |
| 21497 | plastidic | At3g04050 | proline | ARA_LEAF | p-PcUBI | GC | 33 | 272 |
| 21902 | non- | At3g04710 | proline | ARA_LEAF | p-PcUBI | GC | 35 | 230 |
| | targeted | | | | | | | |
| 22015 | non- | At3g06270 | glutamate | ARA_LEAF | p-PcUBI | GC | 36 | 99 |
| | targeted | | | | | | | |
| 22249 | non- | At3g08710 | arginine | ARA_LEAF | p-PcUBI | LC | 56 | 513 |
| | targeted | | | | | | | |
| 22249 | non- | At3g08710 | glutamate | ARA_LEAF | p-PcUBI | GC | 45 | 167 |
| | targeted | | | | | | | |
| 22249 | non- | At3g08710 | glutamine | ARA_LEAF | p-PcUBI | GC | 76 | 558 |
| | targeted | | | | | | | |
| 22249 | non- | At3g08710 | proline | ARA_LEAF | p-PcUBI | GC | 70 | 169 |
| | targeted | | | | | | | |
| 22611 | non- | At3g11650 | arginine | ARA_LEAF | p-PcUBI | LC | 46 | 397 |
| | targeted | | | | | | | |
| 22611 | non- | At3g11650 | glutamine | ARA_LEAF | p-PcUBI | GC | 44 | 124 |
| | targeted | | | | | | | |
| 22611 | non- | At3g11650 | proline | ARA_LEAF | p-PcUBI | LC | 50 | 129 |
| | targeted | | | | | | | |
| 22699 | plastidic | At3g14230 | proline | ARA_LEAF | p-PcUBI | GC | 53 | 142 |
| 22832 | non- | At3g18524 | proline | ARA_LEAF | p-PcUBI | GC | 38 | 75 |
| | targeted | | | | | | | |
| 22921 | non- | At3g20910 | proline | ARA_LEAF | p-PcUBI | GC | 61 | 204 |
| | targeted | | | | | | | |
| 1815 | non- | At3g23000 | glutamine | ARA_LEAF | p-PcUBI | GC | 79 | 288 |
| | targeted | | | | | | | |
| 23002 | non- | At3g27300 | proline | ARA_LEAF | p-PcUBI | GC | 38 | 123 |
| | targeted | | | | | | | |
| 2573 | non- | At3g62930 | glutamate | ARA_LEAF | p-PcUBI | GC | 39 | 132 |
| | targeted | | | | | | | |
| 2573 | non- | At3g62930 | glutamine | ARA_LEAF | p-PcUBI | GC | 51 | 277 |
| | targeted | | | | | | | |
| 2935 | non- | At3g62950 | glutamate | ARA_LEAF | p-PcUBI | LC | 33 | 89 |
| | targeted | | | | | | | |
| 2935 | non- | At3g62950 | glutamine | ARA_LEAF | p-PcUBI | GC | 127 | 250 |
| | targeted | | | | | | | |
| 23482 | non- | At4g15660 | glutamate | ARA_LEAF | p-PcUBI | GC | 38 | 164 |
| | targeted | | | | | | | |
| 23482 | non- | At4g15660 | glutamine | ARA_LEAF | p-PcUBI | GC | 44 | 116 |
| | targeted | | | | | | | |
| 3279 | non- | At4g15670 | glutamate | ARA_LEAF | p-PcUBI | GC | 77 | 165 |
| | targeted | | | | | | | |
| 23844 | non- | At4g15690 | glutamate | ARA_LEAF | p-PcUBI | GC | 47 | 145 |
| | targeted | | | | | | | |
| 23844 | non- | At4g15690 | glutamine | ARA_LEAF | p-PcUBI | GC | 53 | 270 |
| | targeted | | | | | | | |
| 23844 | non- | At4g15690 | proline | ARA_LEAF | p-PcUBI | LC | 44 | 156 |
| | targeted | | | | | | | |
| 3654 | non- | At4g15700 | glutamine | ARA_LEAF | p-PcUBI | GC | 55 | 267 |
| | targeted | | | | | | | |
| 24232 | non- | At4g18880 | proline | ARA_LEAF | p-PcUBI | GC | 46 | 216 |
| | targeted | | | | | | | |
| 4040 | non- | At4g32480 | arginine | ARA_LEAF | p-PcUBI | LC | 52 | 215 |
| | targeted | | | | | | | |
| 4040 | non- | At4g32480 | glutamine | ARA_LEAF | p-PcUBI | GC | 301 | 4258 |
| | targeted | | | | | | | |
| 4040 | non- | At4g32480 | proline | ARA_LEAF | p-PcUBI | GC | 45 | 111 |
| | targeted | | | | | | | |
| 4102 | non- | At4g33040 | glutamate | ARA_LEAF | p-PcUBI | GC | 46 | 104 |
| | targeted | | | | | | | |
| 24311 | non- | At4g34160 | arginine | ARA_LEAF | p-PcUBI | LC | 90 | 236 |
| | targeted | | | | | | | |
| 24311 | non- | At4g34160 | glutamine | ARA_LEAF | p-PcUBI | GC | 51 | 313 |
| | targeted | | | | | | | |
| 24311 | non- | At4g34160 | proline | ARA_LEAF | p-PcUBI | GC | 49 | 772 |
| | targeted | | | | | | | |
| 4348 | non- | At4g35310 | arginine | ARA_LEAF | p-PcUBI | LC | 58 | 499 |
| | targeted | | | | | | | |
| 4348 | non- | At4g35310 | proline | ARA_LEAF | p-PcUBI | GC | 126 | 329 |
| | targeted | | | | | | | |
| 24438 | non- | At5g03720 | glutamate | ARA_LEAF | p-PcUBI | GC | 67 | 186 |
| | targeted | | | | | | | |
| 24492 | non- | At5g07200 | proline | ARA_LEAF | p-PcUBI | LC | 44 | 99 |
| | targeted | | | | | | | |
| 25222 | non- | At5g10820 | glutamate | ARA_LEAF | p-PcUBI | LC | 34 | 69 |
| | targeted | | | | | | | |
| 25222 | non- | At5g10820 | glutamine | ARA_LEAF | p-PcUBI | GC | 45 | 139 |
| | targeted | | | | | | | |
| 25283 | non- | At5g16650 | arginine | ARA_LEAF | p-PcUBI | LC | 104 | 361 |
| | targeted | | | | | | | |
| 25283 | non- | At5g16650 | glutamine | ARA_LEAF | p-PcUBI | GC | 48 | 238 |
| | targeted | | | | | | | |
| 25283 | non- | At5g16650 | proline | ARA_LEAF | p-PcUBI | GC | 41 | 177 |
| | targeted | | | | | | | |
| 4904 | non- | At5g18600 | glutamine | ARA_LEAF | p-PcUBI | GC | 82 | 254 |
| | targeted | | | | | | | |
| 25344 | non- | At5g27640 | arginine | ARA_LEAF | p-PcUBI | LC | 67 | 139 |
| | targeted | | | | | | | |
| 25428 | non- | At5g39760 | glutamate | ARA_LEAF | p-PcUBI | LC | 40 | 78 |
| | targeted | | | | | | | |
| 25428 | non- | At5g39760 | proline | ARA_LEAF | p-PcUBI | GC | 32 | 275 |
| | targeted | | | | | | | |
| 5318 | non- | At5g57050 | glutamine | ARA_LEAF | p-PcUBI | LC | 34 | 63 |
| | targeted | | | | | | | |
| 25498 | non- | At5g59220 | glutamine | ARA_LEAF | p-PcUBI | LC | 32 | 52 |
| | targeted | | | | | | | |
| 5493 | non- | At5g64920 | arginine | ARA_LEAF | p-PcUBI | LC | 53 | 291 |
| | targeted | | | | | | | |
| 5493 | non- | At5g64920 | glutamine | ARA_LEAF | p-PcUBI | GC | 52 | 199 |
| | targeted | | | | | | | |
| 25676 | non- | Avin- | glutamate | ARA_LEAF | p-PcUBI | GC | 55 | 90 |
| | targeted | DRAFT_1045 | | | | | | |
| 25780 | non- | Avin- | glutamate | ARA_LEAF | p-PcUBI | LC | 42 | 44 |
| | targeted | DRAFT_1398 | | | | | | |
| 25780 | non- | Avin- | glutamine | ARA_LEAF | p-PcUBI | GC | 56 | 79 |
| | targeted | DRAFT_1398 | | | | | | |
| 5557 | non- | Avin- | glutamine | ARA_LEAF | p-PcUBI | GC | 54 | 292 |
| | targeted | DRAFT_1495 | | | | | | |
| 5557 | non- | Avin- | proline | ARA_LEAF | p-PcUBI | GC | 111 | 227 |
| | targeted | DRAFT_1495 | | | | | | |
| 26120 | non- | Avin- | proline | ARA_LEAF | p-PcUBI | LC | 44 | 119 |
| | targeted | DRAFT_1534 | | | | | | |
| 26196 | non- | Avin- | proline | ARA_LEAF | p-PcUBI | GC | 35 | 78 |
| | targeted | DRAFT_1624 | | | | | | |
| 26434 | non- | Avin- | glutamate | ARA_LEAF | p-PcUBI | LC | 76 | 95 |
| | targeted | DRAFT_1806 | | | | | | |
| 6040 | non- | Avin- | arginine | ARA_LEAF | p-PcUBI | LC | 64 | 530 |
| | targeted | DRAFT_2091 | | | | | | |
| 27021 | non- | Avin- | arginine | ARA_LEAF | p-PcUBI | LC | 115 | 495 |
| | targeted | DRAFT_2344 | | | | | | |
| 27021 | non- | Avin- | glutamate | ARA_LEAF | p-PcUBI | GC | 44 | 145 |
| | targeted | DRAFT_2344 | | | | | | |
| 27021 | non- | Avin- | glutamine | ARA_LEAF | p-PcUBI | GC | 76 | 770 |
| | targeted | DRAFT_2344 | | | | | | |
| 27882 | non- | Avin- | glutamine | ARA_LEAF | p-PcUBI | GC | 58 | 197 |
| | targeted | DRAFT_2521 | | | | | | |
| 27882 | non- | Avin- | proline | ARA_LEAF | p-PcUBI | GC | 39 | 466 |
| | targeted | DRAFT_2521 | | | | | | |
| 28040 | non- | Avin- | arginine | ARA_LEAF | p-PcUBI | LC | 73 | 227 |
| | targeted | DRAFT_2754 | | | | | | |
| 28040 | non- | Avin- | glutamate | ARA_LEAF | p-PcUBI | GC | 38 | 297 |
| | targeted | DRAFT_2754 | | | | | | |
| 28040 | non- | Avin- | glutamine | ARA_LEAF | p-PcUBI | GC | 80 | 466 |
| | targeted | DRAFT_2754 | | | | | | |
| 28040 | non- | Avin- | proline | ARA_LEAF | p-PcUBI | GC | 36 | 170 |
| | targeted | DRAFT_2754 | | | | | | |
| 6075 | non- | Avin- | glutamate | ARA_LEAF | p-PcUBI | GC | 64 | 185 |
| | targeted | DRAFT_3028 | | | | | | |
| 28738 | non- | Avin- | arginine | ARA_LEAF | p-PcUBI | LC | 64 | 144 |
| | targeted | DRAFT_3159 | | | | | | |
| 28738 | non- | Avin- | proline | ARA_LEAF | p-PcUBI | GC | 63 | 531 |
| | targeted | DRAFT_3159 | | | | | | |
| 29246 | non- | Avin- | glutamate | ARA_LEAF | p-PcUBI | GC | 38 | 91 |
| | targeted | DRAFT_3186 | | | | | | |
| 29286 | non- | Avin- | proline | ARA_LEAF | p-PcUBI | LC | 105 | 202 |
| | targeted | DRAFT_3209 | | | | | | |
| 29397 | non- | Avin- | proline | ARA_LEAF | p-PcUBI | GC | 50 | 405 |
| | targeted | DRAFT_3250 | | | | | | |
| 29500 | non- | Avin- | glutamate | ARA_LEAF | p-PcUBI | LC | 34 | 63 |
| | targeted | DRAFT_3253 | | | | | | |
| 29500 | non- | Avin- | glutamine | ARA_LEAF | p-PcUBI | GC | 53 | 128 |
| | targeted | DRAFT_3253 | | | | | | |
| 30039 | non- | Avin- | glutamine | ARA_LEAF | p-PcUBI | LC | 37 | 65 |
| | targeted | DRAFT_3556 | | | | | | |
| 30464 | non- | Avin- | glutamate | ARA_LEAF | p-PcUBI | GC | 36 | 71 |
| | targeted | DRAFT_3587 | | | | | | |
| 31026 | non- | Avin- | glutamate | ARA_LEAF | p-PcUBI | LC | 35 | 57 |
| | targeted | DRAFT_3605 | | | | | | |
| 31026 | non- | Avin- | glutamine | ARA_LEAF | p-PcUBI | GC | 60 | 275 |
| | targeted | DRAFT_3605 | | | | | | |
| 31717 | non- | Avin- | glutamate | ARA_LEAF | p-PcUBI | GC | 35 | 98 |
| | targeted | DRAFT_4384 | | | | | | |
| 31717 | non- | Avin- | glutamine | ARA_LEAF | p-PcUBI | GC | 75 | 196 |
| | targeted | DRAFT_4384 | | | | | | |
| 31717 | non- | Avin- | proline | ARA_LEAF | p-PcUBI | GC | 49 | 109 |
| | targeted | DRAFT_4384 | | | | | | |
| 31926 | non- | Avin- | arginine | ARA_LEAF | p-PcUBI | LC | 58 | 219 |
| | targeted | DRAFT_4562 | | | | | | |
| 6510 | non- | Avin- | proline | ARA_LEAF | p-PcUBI | LC | 66 | 289 |
| | targeted | DRAFT_5103 | | | | | | |
| 32037 | non- | Avin- | arginine | ARA_LEAF | p-PcUBI | LC | 71 | 419 |
| | targeted | DRAFT_5246 | | | | | | |
| 32037 | non- | Avin- | glutamine | ARA_LEAF | p-PcUBI | GC | 70 | 363 |
| | targeted | DRAFT_5246 | | | | | | |
| 32037 | non- | Avin- | proline | ARA_LEAF | p-PcUBI | GC | 69 | 218 |
| | targeted | DRAFT_5246 | | | | | | |
| 32308 | non- | Avin- | proline | ARA_LEAF | p-PcUBI | LC | 47 | 172 |
| | targeted | DRAFT_5292 | | | | | | |
| 32648 | non- | Avin- | arginine | ARA_LEAF | p-PcUBI | LC | 49 | 171 |
| | targeted | DRAFT_5467 | | | | | | |
| 32648 | non- | Avin- | glutamine | ARA_LEAF | p-PcUBI | GC | 45 | 123 |
| | targeted | DRAFT_5467 | | | | | | |
| 32648 | non- | Avin- | proline | ARA_LEAF | p-PcUBI | GC | 50 | 132 |
| | targeted | DRAFT_5467 | | | | | | |
| 33085 | non- | Avin- | proline | ARA_LEAF | p-PcUBI | GC | 51 | 152 |
| | targeted | DRAFT_5644 | | | | | | |
| 33457 | non- | Avin- | arginine | ARA_LEAF | p-PcUBI | LC | 62 | 368 |
| | targeted | DRAFT_5651 | | | | | | |
| 33457 | non- | Avin- | glutamine | ARA_LEAF | p-PcUBI | GC | 92 | 226 |
| | targeted | DRAFT_5651 | | | | | | |
| 33596 | non- | Avin- | proline | ARA_LEAF | p-PcUBI | LC | 42 | 112 |
| | targeted | DRAFT_6093 | | | | | | |
| 34044 | non- | Avin- | arginine | ARA_LEAF | p-PcUBI | LC | 99 | 186 |
| | targeted | DRAFT_6700 | | | | | | |
| 34044 | non- | Avin- | glutamine | ARA_LEAF | p-PcUBI | GC | 45 | 168 |
| | targeted | DRAFT_6700 | | | | | | |
| 34044 | non- | Avin- | proline | ARA_LEAF | p-PcUBI | LC | 47 | 112 |
| | targeted | DRAFT_6700 | | | | | | |
| 34204 | non- | Avin- | proline | ARA_LEAF | p-PcUBI | LC | 47 | 75 |
| | targeted | DRAFT_6864 | | | | | | |
| 34301 | non- | AX653549 | glutamate | ARA_LEAF | p-PcUBI | GC | 47 | 57 |
| | targeted | | | | | | | |
| 34301 | non- | AX653549 | glutamine | ARA_LEAF | p-PcUBI | GC | 58 | 355 |
| | targeted | | | | | | | |
| 34602 | non- | AY087308 | glutamine | ARA_LEAF | p-PcUBI | GC | 53 | 114 |
| | targeted | | | | | | | |
| 34889 | plastidic | B0004 | arginine | ARA_LEAF | p-Super | LC | 56 | 2425 |
| 34889 | plastidic | B0004 | glutamine | ARA_LEAF | p-Super | GC | 49 | 4802 |
| 34889 | plastidic | B0004 | proline | ARA_LEAF | p-Super | GC | 40 | 1754 |
| 35204 | non- | B0061 | proline | ARA_SEED_2 | p-USP | LC | 137 | 1181 |
| | targeted | | | | | | | |
| 35366 | plastidic | B0115 | glutamine | ARA_SEED_2 | p-USP | LC | 67 | 86 |
| 35482 | non- | B0124 | arginine | ARA_LEAF | p-Super | LC | 53 | 395 |
| | targeted | | | | | | | |
| 35482 | plastidic | B0124 | proline | ARA_SEED_2 | p-USP | GC | 47 | 389 |
| 35482 | non- | B0124 | proline | ARA_LEAF | p-Super | LC | 47 | 124 |
| | targeted | | | | | | | |
| 7081 | non- | B0161 | proline | ARA_LEAF | p-Super | GC | 100 | 233 |
| | targeted | | | | | | | |
| 35590 | non- | B0221 | arginine | ARA_LEAF | p-Super | LC | 61 | 202 |
| | targeted | | | | | | | |
| 35590 | non- | B0221 | glutamate | ARA_LEAF | p-Super | GC | 54 | 78 |
| | targeted | | | | | | | |
| 35733 | plastidic | B0344 | proline | ARA_SEED_2 | p-USP | LC | 118 | 227 |
| 7333 | non- | B0449 | glutamine | ARA_LEAF | p-Super | GC | 51 | 961 |
| | targeted | | | | | | | |
| 35875 | non- | B0456 | proline | ARA_LEAF | p-Super | GC | 75 | 121 |
| | targeted | | | | | | | |
| 7686 | non- | B0486 | arginine | ARA_LEAF | p-Super | LC | 67 | 213 |
| | targeted | | | | | | | |
| 7686 | non- | B0486 | glutamate | ARA_LEAF | p-Super | LC | 33 | 57 |
| | targeted | | | | | | | |
| 35936 | non- | B0518 | glutamine | ARA_LEAF | p-Super | GC | 48 | 190 |
| | targeted | | | | | | | |
| 35967 | plastidic | B0593 | arginine | ARA_LEAF | p-Super | LC | 137 | 775 |
| 35967 | plastidic | B0593 | glutamate | ARA_LEAF | p-Super | LC | 36 | 80 |
| 35967 | plastidic | B0593 | glutamine | ARA_LEAF | p-Super | LC | 34 | 132 |
| 35967 | plastidic | B0593 | proline | ARA_LEAF | p-Super | LC | 71 | 148 |
| 36114 | non- | B0752 | glutamine | ARA_LEAF | p-Super | GC | 60 | 126 |
| | targeted | | | | | | | |
| 36299 | non- | B0828 | glutamine | ARA_LEAF | p-Super | LC | 35 | 80 |
| | targeted | | | | | | | |
| 36489 | non- | B0885 | glutamine | ARA_LEAF | p-Super | LC | 29 | 80 |
| | targeted | | | | | | | |
| 36489 | non- | B0885 | proline | ARA_LEAF | p-Super | GC | 50 | 181 |
| | targeted | | | | | | | |
| 7917 | non- | B0898 | glutamate | ARA_LEAF | p-Super | GC | 39 | 138 |
| | targeted | | | | | | | |
| 7917 | non- | B0898 | proline | ARA_LEAF | p-Super | GC | 68 | 8167 |
| | targeted | | | | | | | |
| 36623 | non- | B0962 | proline | ARA_SEED_2 | p-USP | LC | 114 | 475 |
| | targeted | | | | | | | |
| 36670 | non- | B0963 | proline | ARA_LEAF | p-Super | GC | 40 | 332 |
| | targeted | | | | | | | |
| 36809 | non- | B0980 | proline | ARA_SEED_2 | p-USP | LC | 233 | 304 |
| | targeted | | | | | | | |
| 7941 | non- | B1003 | glutamine | ARA_LEAF | p-Super | GC | 71 | 2938 |
| | targeted | | | | | | | |
| 7941 | non- | B1003 | proline | ARA_LEAF | p-Super | GC | 56 | 1315 |
| | targeted | | | | | | | |
| 36880 | non- | B1023 | arginine | ARA_LEAF | p-Super | LC | 53 | 554 |
| | targeted | | | | | | | |
| 36907 | non- | B1024 | glutamate | ARA_LEAF | p-Super | GC | 38 | 55 |
| | targeted | | | | | | | |
| 36937 | non- | B1108 | glutamine | ARA_LEAF | p-Super | GC | 61 | 491 |
| | targeted | | | | | | | |
| 36937 | non- | B1108 | proline | ARA_LEAF | p-Super | GC | 34 | 225 |
| | targeted | | | | | | | |
| 36971 | plastidic | B1136 | proline | ARA_LEAF | p-Super | GC | 47 | 549 |
| 37390 | non- | B1137 | arginine | ARA_LEAF | p-Super | LC | 85 | 748 |
| | targeted | | | | | | | |
| 37390 | non- | B1137 | glutamate | ARA_LEAF | p-Super | GC | 48 | 69 |
| | targeted | | | | | | | |
| 37390 | non- | B1137 | proline | ARA_LEAF | p-Super | GC | 40 | 169 |
| | targeted | | | | | | | |
| 37394 | non- | B1163 | glutamine | ARA_LEAF | p-Super | LC | 30 | 36 |
| | targeted | | | | | | | |
| 37400 | non- | B1186 | proline | ARA_LEAF | p-Super | GC | 36 | 164 |
| | targeted | | | | | | | |
| 37483 | non- | B1255 | glutamine | ARA_LEAF | p-Super | GC | 42 | 80 |
| | targeted | | | | | | | |
| 37483 | non- | B1255 | proline | ARA_LEAF | p-Super | GC | 39 | 520 |
| | targeted | | | | | | | |
| 37503 | non- | B1259 | arginine | ARA_LEAF | p-Super | LC | 66 | 105 |
| | targeted | | | | | | | |
| 37503 | non- | B1259 | glutamine | ARA_LEAF | p-Super | GC | 58 | 291 |
| | targeted | | | | | | | |
| 37539 | plastidic | B1263 | glutamine | ARA_SEED_2 | p-USP | LC | 68 | 176 |
| 37573 | non- | B1280 | glutamine | ARA_LEAF | p-Super | GC | 94 | 179 |
| | targeted | | | | | | | |
| 37658 | plastidic | B1297 | glutamine | ARA_SEED_2 | p-USP | LC | 70 | 412 |
| 37807 | non- | B1300 | glutamate | ARA_LEAF | p-Super | LC | 39 | 89 |
| | targeted | | | | | | | |
| 38226 | non- | B1330 | glutamate | ARA_LEAF | p-Super | LC | 50 | 97 |
| | targeted | | | | | | | |
| 38226 | non- | B1330 | glutamine | ARA_LEAF | p-Super | LC | 28 | 102 |
| | targeted | | | | | | | |
| 38266 | plastidic | B1431 | glutamate | ARA_LEAF | p-Super | LC | 33 | 52 |
| 38266 | plastidic | B1431 | glutamine | ARA_LEAF | p-Super | GC | 63 | 83 |
| 38289 | non- | B1445 | glutamate | ARA_LEAF | p-Super | LC | 36 | 165 |
| | targeted | | | | | | | |
| 38289 | non- | B1445 | glutamine | ARA_LEAF | p-Super | GC | 43 | 134 |
| | targeted | | | | | | | |
| 7947 | non- | B1522 | glutamate | ARA_LEAF | p-Super | GC | 38 | 281 |
| | targeted | | | | | | | |
| 38300 | non- | B1597 | glutamine | ARA_LEAF | p-Super | LC | 38 | 69 |
| | targeted | | | | | | | |
| 38345 | non- | B1627 | glutamine | ARA_LEAF | p-Super | GC | 43 | 239 |
| | targeted | | | | | | | |
| 38573 | non- | B1845 | glutamate | ARA_LEAF | p-Super | GC | 48 | 147 |
| | targeted | | | | | | | |
| 38767 | non- | B1898 | glutamate | ARA_LEAF | p-Super | LC | 40 | 45 |
| | targeted | | | | | | | |
| 38899 | non- | B1981 | glutamine | ARA_LEAF | p-Super | GC | 87 | 481 |
| | targeted | | | | | | | |
| 38947 | non- | B2063 | glutamate | ARA_LEAF | p-Super | GC | 57 | 134 |
| | targeted | | | | | | | |
| 38947 | non- | B2063 | glutamine | ARA_LEAF | p-Super | GC | 42 | 448 |
| | targeted | | | | | | | |
| 38947 | non- | B2063 | proline | ARA_LEAF | p-Super | GC | 54 | 722 |
| | targeted | | | | | | | |
| 8937 | mitochondrial | B2066 | glutamine | ARA_LEAF | p-Super | GC | 58 | 476 |
| 39002 | non- | B2107 | glutamate | ARA_LEAF | p-Super | GC | 35 | 185 |
| | targeted | | | | | | | |
| 39013 | non- | B2121 | glutamine | ARA_LEAF | p-Super | GC | 70 | 156 |
| | targeted | | | | | | | |
| 39040 | non- | B2178 | glutamate | ARA_LEAF | p-Super | GC | 75 | 139 |
| | targeted | | | | | | | |
| 39040 | non- | B2178 | glutamine | ARA_LEAF | p-Super | GC | 43 | 350 |
| | targeted | | | | | | | |
| 39040 | non- | B2178 | proline | ARA_LEAF | p-Super | GC | 41 | 288 |
| | targeted | | | | | | | |
| 39120 | non- | B2281 | glutamine | ARA_SEED_2 | p-USP | LC | 76 | 275 |
| | targeted | | | | | | | |
| 39219 | non- | B2360 | glutamate | ARA_LEAF | p-Super | GC | 42 | 121 |
| | targeted | | | | | | | |
| 39237 | non- | B2399 | proline | ARA_LEAF | p-Super | GC | 146 | 3262 |
| | targeted | | | | | | | |
| 39255 | non- | B2405 | glutamate | ARA_LEAF | p-Super | LC | 33 | 66 |
| | targeted | | | | | | | |
| 39300 | non- | B2414 | arginine | ARA_LEAF | p-Super | LC | 49 | 161 |
| | targeted | | | | | | | |
| 39300 | non- | B2414 | glutamate | ARA_LEAF | p-Super | LC | 35 | 55 |
| | targeted | | | | | | | |
| 40299 | non- | B2461 | proline | ARA_LEAF | p-Super | GC | 40 | 408 |
| | targeted | | | | | | | |
| 40329 | non- | B2474 | proline | ARA_LEAF | p-Super | GC | 42 | 89 |
| | targeted | | | | | | | |
| 9167 | non- | B2513 | glutamate | ARA_LEAF | p-Super | GC | 39 | 228 |
| | targeted | | | | | | | |
| 9167 | non- | B2513 | glutamine | ARA_LEAF | p-Super | GC | 63 | 239 |
| | targeted | | | | | | | |
| 40383 | non- | B2541 | arginine | ARA_LEAF | p-Super | LC | 121 | 441 |
| | targeted | | | | | | | |
| 40383 | non- | B2541 | glutamate | ARA_LEAF | p-Super | LC | 40 | 107 |
| | targeted | | | | | | | |
| 40637 | non- | B2548 | glutamine | ARA_LEAF | p-Super | LC | 36 | 62 |
| | targeted | | | | | | | |
| 40665 | non- | B2613 | glutamine | ARA_LEAF | p-Super | LC | 38 | 52 |
| | targeted | | | | | | | |
| 40665 | non- | B2613 | proline | ARA_LEAF | p-Super | GC | 33 | 191 |
| | targeted | | | | | | | |
| 40726 | non- | B2634 | glutamate | ARA_LEAF | p-Super | GC | 56 | 220 |
| | targeted | | | | | | | |
| 40726 | non- | B2634 | glutamine | ARA_LEAF | p-Super | GC | 92 | 1167 |
| | targeted | | | | | | | |
| 40726 | non- | B2634 | proline | ARA_LEAF | p-Super | GC | 54 | 1631 |
| | targeted | | | | | | | |
| 9244 | non- | B2673 | glutamate | ARA_LEAF | p-Super | GC | 102 | 157 |
| | targeted | | | | | | | |
| 9244 | non- | B2673 | glutamine | ARA_LEAF | p-Super | GC | 126 | 263 |
| | targeted | | | | | | | |
| 40741 | non- | B2714 | glutamine | ARA_LEAF | p-Super | LC | 37 | 46 |
| | targeted | | | | | | | |
| 40741 | non- | B2714 | proline | ARA_LEAF | p-Super | LC | 50 | 67 |
| | targeted | | | | | | | |
| 40795 | non- | B2812 | glutamate | ARA_LEAF | p-Super | GC | 37 | 130 |
| | targeted | | | | | | | |
| 40795 | non- | B2812 | glutamine | ARA_LEAF | p-Super | LC | 32 | 50 |
| | targeted | | | | | | | |
| 40795 | non- | B2812 | proline | ARA_LEAF | p-Super | LC | 43 | 104 |
| | targeted | | | | | | | |
| 40984 | non- | B2846 | proline | ARA_LEAF | p-Super | LC | 50 | 63 |
| | targeted | | | | | | | |
| 41006 | non- | B2909 | arginine | ARA_LEAF | p-Super | LC | 69 | 445 |
| | targeted | | | | | | | |
| 41006 | non- | B2909 | proline | ARA_LEAF | p-Super | GC | 39 | 248 |
| | targeted | | | | | | | |
| 41073 | non- | B2914 | glutamate | ARA_SEED_2 | p-USP | GC | 44 | 95 |
| | targeted | | | | | | | |
| 9333 | non- | B2923 | glutamate | ARA_LEAF | p-Super | LC | 41 | 77 |
| | targeted | | | | | | | |
| 41442 | non- | B2936 | proline | ARA_LEAF | p-Super | GC | 50 | 178 |
| | targeted | | | | | | | |
| 41499 | non- | B2957 | proline | ARA_LEAF | p-Super | GC | 34 | 262 |
| | targeted | | | | | | | |
| 41732 | plastidic | B2963 | proline | ARA_LEAF | p-Super | LC | 53 | 57 |
| 41797 | non- | B2999 | arginine | ARA_LEAF | p-Super | LC | 52 | 278 |
| | targeted | | | | | | | |
| 42046 | non- | B3064 | proline | ARA_SEED_2 | p-Super | GC | 57 | 255 |
| | targeted | | | | | | | |
| 42471 | non- | B3121 | arginine | ARA_LEAF | p-Super | LC | 63 | 201 |
| | targeted | | | | | | | |
| 42471 | non- | B3121 | proline | ARA_LEAF | p-Super | GC | 33 | 104 |
| | targeted | | | | | | | |
| 42477 | non- | B3151 | proline | ARA_LEAF | p-Super | GC | 45 | 689 |
| | targeted | | | | | | | |
| 9492 | non- | B3256 | arginine | ARA_SEED_2 | p-USP | LC | 100 | 2020 |
| | targeted | | | | | | | |
| 9492 | non- | B3256 | glutamate | ARA_SEED_2 | p-USP | GC | 57 | 194 |
| | targeted | | | | | | | |
| 42502 | non- | B3262 | arginine | ARA_LEAF | p-Super | LC | 50 | 273 |
| | targeted | | | | | | | |
| 42502 | non- | B3262 | glutamate | ARA_LEAF | p-Super | GC | 79 | 126 |
| | targeted | | | | | | | |
| 42502 | non- | B3262 | glutamine | ARA_LEAF | p-Super | LC | 27 | 113 |
| | targeted | | | | | | | |
| 42502 | non- | B3262 | proline | ARA_LEAF | p-Super | LC | 78 | 302 |
| | targeted | | | | | | | |
| 10104 | non- | B3346 | proline | ARA_LEAF | p-Super | LC | 48 | 193 |
| | targeted | | | | | | | |
| 42559 | non- | B3410 | glutamine | ARA_LEAF | p-Super | LC | 40 | 86 |
| | targeted | | | | | | | |
| 42579 | non- | B3427 | arginine | ARA_LEAF | p-Super | LC | 66 | 148 |
| | targeted | | | | | | | |
| 42592 | non- | B3509 | glutamate | ARA_LEAF | p-Super | LC | 47 | 65 |
| | targeted | | | | | | | |
| 10172 | plastidic | B3572 | proline | ARA_SEED_2 | p-USP | GC | 55 | 376 |
| 42600 | non- | B3616 | glutamine | ARA_LEAF | p-Super | GC | 45 | 225 |
| | targeted | | | | | | | |
| 42600 | non- | B3616 | proline | ARA_LEAF | p-Super | LC | 49 | 107 |
| | targeted | | | | | | | |
| 42931 | non- | B3634 | proline | ARA_LEAF | p-Super | GC | 34 | 162 |
| | targeted | | | | | | | |
| 43248 | non- | B3732 | glutamine | ARA_LEAF | p-Super | LC | 30 | 36 |
| | targeted | | | | | | | |
| 43800 | non- | B3793 | arginine | ARA_LEAF | p-Super | LC | 58 | 229 |
| | targeted | | | | | | | |
| 43800 | non- | B3793 | glutamate | ARA_LEAF | p-Super | GC | 78 | 212 |
| | targeted | | | | | | | |
| 43839 | non- | B3813 | proline | ARA_SEED_2 | p-USP | LC | 104 | 159 |
| | targeted | | | | | | | |
| 44196 | non- | B3814 | glutamine | ARA_LEAF | p-Super | GC | 54 | 94 |
| | targeted | | | | | | | |
| 10708 | non- | B3817 | proline | ARA_LEAF | p-Super | GC | 607 | 890 |
| | targeted | | | | | | | |
| 44223 | non- | B3945 | glutamine | ARA_SEED_2 | p-USP | LC | 68 | 125 |
| | targeted | | | | | | | |
| 44372 | non- | B3989 | glutamine | ARA_LEAF | p-Super | LC | 28 | 90 |
| | targeted | | | | | | | |
| 44378 | non- | B4012 | glutamate | ARA_SEED_2 | p-USP | GC | 39 | 76 |
| | targeted | | | | | | | |
| 10740 | non- | B4029 | arginine | ARA_LEAF | p-Super | LC | 58 | 478 |
| | targeted | | | | | | | |
| 10740 | non- | B4029 | glutamine | ARA_LEAF | p-Super | GC | 52 | 2052 |
| | targeted | | | | | | | |
| 10740 | non- | B4029 | proline | ARA_LEAF | p-Super | GC | 32 | 836 |
| | targeted | | | | | | | |
| 44466 | non- | B4067 | arginine | ARA_LEAF | p-Super | LC | 46 | 154 |
| | targeted | | | | | | | |
| 44609 | non- | B4121 | arginine | ARA_LEAF | p-Super | LC | 46 | 442 |
| | targeted | | | | | | | |
| 44609 | non- | B4121 | proline | ARA_LEAF | p-Super | GC | 33 | 151 |
| | targeted | | | | | | | |
| 44662 | non- | B4129 | proline | ARA_SEED_2 | p-USP | LC | 126 | 168 |
| | targeted | | | | | | | |
| 45022 | non- | B4139 | glutamine | ARA_SEED_2 | p-USP | LC | 196 | 629 |
| | targeted | | | | | | | |
| 45321 | non- | B4256 | arginine | ARA_LEAF | p-Super | LC | 93 | 838 |
| | targeted | | | | | | | |
| 45321 | non- | B4256 | glutamine | ARA_LEAF | p-Super | LC | 43 | 153 |
| | targeted | | | | | | | |
| 45321 | non- | B4256 | proline | ARA_LEAF | p-Super | GC | 39 | 843 |
| | targeted | | | | | | | |
| 45394 | non- | B4321 | arginine | ARA_LEAF | p-Super | LC | 75 | 181 |
| | targeted | | | | | | | |
| 45556 | non- | B4384 | glutamate | ARA_SEED_2 | p-USP | GC | 59 | 124 |
| | targeted | | | | | | | |
| 45556 | non- | B4384 | proline | ARA_SEED_2 | p-USP | LC | 107 | 506 |
| | targeted | | | | | | | |
| 45757 | non- | C_pp004096192r | arginine | ARA_LEAF | p-Super | LC | 61 | 306 |
| | targeted | | | | | | | |
| 45795 | non- | GM02LC11114 | proline | ARA_LEAF | p-PcUBI | GC | 40 | 127 |
| | targeted | | | | | | | |
| 10811 | non- | GM02LC12622 | glutamine | ARA_LEAF | p-PcUBI | GC | 68 | 261 |
| | targeted | | | | | | | |
| 45897 | non- | GM02LC15313 | arginine | ARA_LEAF | p-PcUBI | LC | 63 | 488 |
| | targeted | | | | | | | |
| 45897 | non- | GM02LC15313 | proline | ARA_LEAF | p-PcUBI | GC | 37 | 144 |
| | targeted | | | | | | | |
| 46405 | non- | GM02LC17485 | glutamine | ARA_LEAF | p-PcUBI | GC | 45 | 157 |
| | targeted | | | | | | | |
| 46515 | non- | GM02LC17556 | arginine | ARA_LEAF | p-PcUBI | LC | 98 | 362 |
| | targeted | | | | | | | |
| 46751 | non- | GM02LC19289 | proline | ARA_LEAF | p-PcUBI | GC | 36 | 231 |
| | targeted | | | | | | | |
| 46850 | non- | GM02LC44512 | proline | ARA_LEAF | p-PcUBI | GC | 72 | 410 |
| | targeted | | | | | | | |
| 47026 | non- | GM02LC46 | proline | ARA_LEAF | p-PcUBI | LC | 59 | 113 |
| | targeted | | | | | | | |
| 47076 | non- | GM02LC5744 | proline | ARA_LEAF | p-PcUBI | LC | 42 | 73 |
| | targeted | | | | | | | |
| 47105 | non- | GM02LC6021 | glutamate | ARA_LEAF | p-PcUBI | GC | 37 | 66 |
| | targeted | | | | | | | |
| 47159 | non- | NZ_AAAU02000016.150 | proline | ARA_LEAF | p-PcUBI | GC | 37 | 58 |
| | targeted | | | | | | | |
| 59851 | non- | S_pp015018333r | arginine | ARA_LEAF | p-Super | LC | 106 | 460 |
| | targeted | | | | | | | |
| 59851 | non- | S_pp015018333r | glutamine | ARA_LEAF | p-Super | GC | 44 | 187 |
| | targeted | | | | | | | |
| 47526 | mitochondrial | Sll0064 | proline | ARA_LEAF | p-PcUBI | GC | 62 | 111 |
| 47566 | plastidic | Sll0080 | glutamate | ARA_LEAF | p-PcUBI | LC | 51 | 61 |
| 48138 | non- | Sll0170 | glutamate | ARA_LEAF | p-PcUBI | GC | 39 | 234 |
| | targeted | | | | | | | |
| 49143 | plastidic | Sll0248 | arginine | ARA_LEAF | p-PcUBI | LC | 49 | 438 |
| 49342 | non- | Sll0250 | proline | ARA_LEAF | p-PcUBI | GC | 139 | 160 |
| | targeted | | | | | | | |
| 49800 | mitochondrial | Sll0254 | glutamine | ARA_LEAF | p-PcUBI | GC | 49 | 391 |
| 49800 | mitochondrial | Sll0254 | proline | ARA_LEAF | p-PcUBI | GC | 40 | 179 |
| 49828 | non- | Sll0290 | proline | ARA_LEAF | p-PcUBI | GC | 34 | 190 |
| | targeted | | | | | | | |
| 50070 | non- | Sll0354 | proline | ARA_LEAF | p-PcUBI | GC | 42 | 129 |
| | targeted | | | | | | | |
| 50104 | non- | Sll0420 | proline | ARA_LEAF | p-PcUBI | GC | 33 | 45 |
| | targeted | | | | | | | |
| 50339 | plastidic | Sll0521 | arginine | ARA_LEAF | p-PcUBI | LC | 51 | 185 |
| 50713 | mitochondrial | Sll0622 | proline | ARA_LEAF | p-PcUBI | LC | 46 | 106 |
| 50950 | non- | Sll0682 | glutamate | ARA_LEAF | p-PcUBI | GC | 45 | 153 |
| | targeted | | | | | | | |
| 50950 | non- | Sll0682 | proline | ARA_LEAF | p-PcUBI | GC | 32 | 90 |
| | targeted | | | | | | | |
| 51198 | non- | Sll0816 | arginine | ARA_LEAF | p-PcUBI | LC | 61 | 392 |
| | targeted | | | | | | | |
| 51198 | non- | Sll0816 | glutamate | ARA_LEAF | p-PcUBI | LC | 39 | 190 |
| | targeted | | | | | | | |
| 51198 | non- | Sll0816 | glutamine | ARA_LEAF | p-PcUBI | GC | 81 | 382 |
| | targeted | | | | | | | |
| 51268 | plastidic | Sll0891 | arginine | ARA_LEAF | p-PcUBI | LC | 47 | 289 |
| 51268 | plastidic | Sll0891 | glutamine | ARA_LEAF | p-PcUBI | LC | 28 | 28 |
| 51268 | plastidic | Sll0891 | proline | ARA_LEAF | p-PcUBI | LC | 52 | 77 |
| 51632 | mitochondrial | Sll0901 | proline | ARA_LEAF | p-PcUBI | GC | 38 | 273 |
| 52246 | mitochondrial | Sll0934 | glutamine | ARA_LEAF | p-PcUBI | GC | 72 | 148 |
| 52364 | non- | Sll0945 | proline | ARA_LEAF | p-PcUBI | GC | 34 | 293 |
| | targeted | | | | | | | |
| 52634 | mitochondrial | Sll1031 | glutamate | ARA_LEAF | p-PcUBI | LC | 37 | 133 |
| 52634 | mitochondrial | Sll1031 | glutamine | ARA_LEAF | p-PcUBI | GC | 55 | 461 |
| 52634 | mitochondrial | Sll1031 | proline | ARA_LEAF | p-PcUBI | GC | 32 | 110 |
| 52660 | plastidic | Sll1056 | proline | ARA_LEAF | p-PcUBI | LC | 45 | 113 |
| 53189 | non- | Sll1185 | glutamate | ARA_LEAF | p-PcUBI | LC | 33 | 55 |
| | targeted | | | | | | | |
| 53456 | non- | Sll1393 | glutamine | ARA_LEAF | p-PcUBI | GC | 49 | 73 |
| | targeted | | | | | | | |
| 53456 | non- | Sll1393 | proline | ARA_LEAF | p-PcUBI | GC | 36 | 105 |
| | targeted | | | | | | | |
| 53608 | non- | Sll1441 | glutamine | ARA_LEAF | p-PcUBI | LC | 37 | 37 |
| | targeted | | | | | | | |
| 53878 | mitochondrial | Sll1443 | glutamate | ARA_LEAF | p-PcUBI | LC | 33 | 61 |
| 54337 | mitochondrial | Sll1450 | glutamate | ARA_LEAF | p-PcUBI | LC | 34 | 90 |
| 54452 | plastidic | Sll1522 | glutamate | ARA_LEAF | p-PcUBI | GC | 63 | 154 |
| 11423 | non- | Sll1545 | arginine | ARA_LEAF | p-PcUBI | LC | 51 | 152 |
| | targeted | | | | | | | |
| 11423 | mitochondrial | Sll1545 | glutamine | ARA_LEAF | p-PcUBI | LC | 29 | 35 |
| 11423 | mitochondrial | Sll1545 | proline | ARA_LEAF | p-PcUBI | GC | 75 | 130 |
| 54804 | non- | Sll1546 | arginine | ARA_LEAF | p-PcUBI | LC | 64 | 260 |
| | targeted | | | | | | | |
| 54897 | non- | Sll1676 | proline | ARA_LEAF | p-PcUBI | LC | 44 | 186 |
| | targeted | | | | | | | |
| 55063 | plastidic | Sll1682 | proline | ARA_LEAF | p-PcUBI | GC | 76 | 272 |
| 55379 | non- | Sll1761 | arginine | ARA_LEAF | p-PcUBI | LC | 69 | 387 |
| | targeted | | | | | | | |
| 55379 | non- | Sll1761 | proline | ARA_LEAF | p-PcUBI | GC | 36 | 269 |
| | targeted | | | | | | | |
| 11471 | mitochondrial | Sll1917 | glutamate | ARA_LEAF | p-PcUBI | GC | 42 | 167 |
| 11471 | mitochondrial | Sll1917 | glutamine | ARA_LEAF | p-PcUBI | GC | 47 | 318 |
| 11471 | mitochondrial | Sll1917 | proline | ARA_LEAF | p-PcUBI | GC | 34 | 176 |
| 55385 | mitochondrial | Sll1920 | glutamate | ARA_LEAF | p-PcUBI | GC | 46 | 113 |
| 55385 | mitochondrial | Sll1920 | glutamine | ARA_LEAF | p-PcUBI | GC | 44 | 372 |
| 55771 | non- | Slr0237 | arginine | ARA_LEAF | p-PcUBI | LC | 84 | 104 |
| | targeted | | | | | | | |
| 55771 | non- | Slr0237 | glutamine | ARA_LEAF | p-PcUBI | LC | 30 | 40 |
| | targeted | | | | | | | |
| 55978 | plastidic | Slr0477 | proline | ARA_LEAF | p-PcUBI | LC | 42 | 86 |
| 56153 | plastidic | Slr0597 | glutamate | ARA_LEAF | p-PcUBI | GC | 43 | 100 |
| 56514 | non- | Slr0600 | proline | ARA_LEAF | p-PcUBI | LC | 43 | 60 |
| | targeted | | | | | | | |
| 56576 | mitochondrial | Slr0661 | proline | ARA_LEAF | p-PcUBI | LC | 45 | 85 |
| 56894 | mitochondrial | Slr0710 | arginine | ARA_LEAF | p-PcUBI | LC | 47 | 175 |
| 57235 | plastidic | Slr0739 | arginine | ARA_LEAF | p-PcUBI | LC | 347 | 910 |
| 57235 | plastidic | Slr0739 | glutamine | ARA_LEAF | p-PcUBI | GC | 46 | 519 |
| 57235 | plastidic | Slr0739 | proline | ARA_LEAF | p-PcUBI | GC | 105 | 801 |
| 57663 | non- | Slr0756 | arginine | ARA_LEAF | p-PcUBI | LC | 48 | 280 |
| | targeted | | | | | | | |
| 57663 | non- | Slr0756 | proline | ARA_LEAF | p-PcUBI | GC | 32 | 91 |
| | targeted | | | | | | | |
| 57679 | mitochondrial | Slr0782 | proline | ARA_LEAF | p-PcUBI | LC | 43 | 94 |
| 57734 | non- | Slr1096 | glutamate | ARA_LEAF | p-PcUBI | LC | 41 | 79 |
| | targeted | | | | | | | |
| 58058 | non- | Slr1269 | arginine | ARA_LEAF | p-PcUBI | LC | 65 | 209 |
| | targeted | | | | | | | |
| 58058 | non- | Slr1269 | glutamate | ARA_LEAF | p-PcUBI | GC | 63 | 150 |
| | targeted | | | | | | | |
| 58324 | non- | Slr1312 | arginine | ARA_LEAF | p-PcUBI | LC | 52 | 306 |
| | targeted | | | | | | | |
| 58472 | mitochondrial | Slr1369 | glutamate | ARA_LEAF | p-PcUBI | GC | 39 | 86 |
| 58590 | non- | Slr1420 | glutamate | ARA_LEAF | p-PcUBI | LC | 35 | 196 |
| | targeted | | | | | | | |
| 58668 | mitochondrial | Slr1492 | glutamine | ARA_LEAF | p-PcUBI | LC | 30 | 46 |
| 12070 | mitochondrial | Slr1655 | proline | ARA_LEAF | p-PcUBI | GC | 40 | 164 |
| 58731 | plastidic | Slr1739 | arginine | ARA_LEAF | p-PcUBI | LC | 99 | 193 |
| 58731 | plastidic | Slr1739 | glutamine | ARA_LEAF | p-PcUBI | GC | 42 | 229 |
| 58751 | mitochondrial | Slr1742 | proline | ARA_LEAF | p-PcUBI | LC | 49 | 75 |
| 58823 | mitochondrial | Slr1755 | glutamate | ARA_LEAF | p-PcUBI | GC | 40 | 62 |
| 12140 | plastidic | Slr1791 | proline | ARA_LEAF | p-PcUBI | GC | 32 | 53 |
| 59041 | non- | Slr1882 | glutamate | ARA_LEAF | p-PcUBI | LC | 34 | 114 |
| | targeted | | | | | | | |
| 59165 | plastidic | Slr2023 | glutamate | ARA_LEAF | p-PcUBI | GC | 123 | 185 |
| 59165 | plastidic | Slr2023 | glutamine | ARA_LEAF | p-PcUBI | GC | 70 | 355 |
| 59370 | plastidic | Slr2124 | proline | ARA_LEAF | p-PcUBI | LC | 53 | 228 |
| 12698 | non- | TTC0019 | glutamine | ARA_LEAF | p-PcUBI | LC | 72 | 162 |
| | targeted | | | | | | | |
| 12698 | non- | TTC0019 | proline | ARA_LEAF | p-PcUBI | GC | 45 | 228 |
| | targeted | | | | | | | |
| 60301 | non- | TTC0035 | proline | ARA_LEAF | p-PcUBI | LC | 44 | 145 |
| | targeted | | | | | | | |
| 60859 | non- | TTC0216 | proline | ARA_LEAF | p-PcUBI | GC | 37 | 137 |
| | targeted | | | | | | | |
| 61070 | non- | TTC0337 | proline | ARA_LEAF | p-PcUBI | GC | 37 | 74 |
| | targeted | | | | | | | |
| 61532 | non- | TTC0768 | proline | ARA_LEAF | p-PcUBI | LC | 48 | 77 |
| | targeted | | | | | | | |
| 61553 | non- | TTC0917 | glutamine | ARA_LEAF | p-PcUBI | GC | 58 | 79 |
| | targeted | | | | | | | |
| 61723 | non- | TTC1193 | glutamate | ARA_LEAF | p-PcUBI | LC | 35 | 73 |
| | targeted | | | | | | | |
| 62079 | non- | TTC1386 | glutamate | ARA_LEAF | p-PcUBI | GC | 66 | 106 |
| | targeted | | | | | | | |
| 12974 | non- | TTC1550 | glutamine | ARA_LEAF | p-PcUBI | GC | 56 | 248 |
| | targeted | | | | | | | |
| 12974 | non- | TTC1550 | proline | ARA_LEAF | p-PcUBI | LC | 54 | 320 |
| | targeted | | | | | | | |
| 62160 | non- | TTC1918 | glutamate | ARA_LEAF | p-PcUBI | GC | 43 | 128 |
| | targeted | | | | | | | |
| 62160 | non- | TTC1918 | glutamine | ARA_LEAF | p-PcUBI | GC | 42 | 139 |
| | targeted | | | | | | | |
| 62244 | non- | XM_473199 | glutamate | ARA_LEAF | p-PcUBI | GC | 45 | 75 |
| | targeted | | | | | | | |
| 62244 | non- | XM_473199 | glutamine | ARA_LEAF | p-PcUBI | GC | 62 | 173 |
| | targeted | | | | | | | |
| 62524 | non- | Ybl021c | proline | ARA_LEAF | Big35S | GC | 35 | 804 |
| | targeted | | | | | | | |
| 62717 | non- | Ybr160w | glutamate | ARA_LEAF | Big35S | GC | 37 | 118 |
| | targeted | | | | | | | |
| 62717 | non- | Ybr160w | proline | ARA_LEAF | Big35S | GC | 36 | 323 |
| | targeted | | | | | | | |
| 63167 | non- | Ycl026c-a | proline | ARA_LEAF | Big35S | LC | 51 | 68 |
| | targeted | | | | | | | |
| 63264 | plastidic | Ycr102c | arginine | ARA_LEAF | p-Super | LC | 78 | 107 |
| 14302 | plastidic | Ydl168w | proline | ARA_LEAF | p-Super | LC | 42 | 99 |
| 63334 | plastidic | Ydr044w | proline | ARA_LEAF | p-PcUBI | LC | 47 | 228 |
| 63544 | plastidic | Ydr046c | proline | ARA_LEAF | p-Super | LC | 66 | 75 |
| 63665 | plastidic | Ydr265w | arginine | ARA_LEAF | p-PcUBI | LC | 88 | 276 |
| 63713 | plastidic | Ydr338c | arginine | ARA_LEAF | p-Super | LC | 67 | 165 |
| 63745 | plastidic | Yer014w | glutamine | ARA_LEAF | p-PcUBI | GC | 74 | 186 |
| 63803 | plastidic | Yer106w | glutamine | ARA_LEAF | p-Super | GC | 43 | 118 |
| 63807 | non- | Yfl016c | proline | ARA_LEAF | Big35S | GC | 43 | 83 |
| | targeted | | | | | | | |
| 64144 | non- | Yfl019c | proline | ARA_LEAF | Big35S | GC | 32 | 235 |
| | targeted | | | | | | | |
| 64148 | plastidic | Yfl054c | arginine | ARA_LEAF | p-Super | LC | 87 | 268 |
| 64148 | plastidic | Yfl054c | glutamine | ARA_LEAF | p-Super | LC | 30 | 75 |
| 64157 | plastidic | Ygl174w | arginine | ARA_LEAF | p-Super | LC | 85 | 199 |
| 64177 | non- | Ygl237c | proline | ARA_LEAF | Big35S | LC | 42 | 388 |
| | targeted | | | | | | | |
| 64198 | plastidic | Ygr068c | glutamine | ARA_LEAF | p-Super | GC | 60 | 428 |
| 64218 | plastidic | Ygr175c | proline | ARA_LEAF | p-PcUBI | GC | 43 | 69 |
| 64315 | plastidic | Ygr221c | glutamate | ARA_LEAF | p-Super | LC | 33 | 65 |
| 64315 | plastidic | Ygr221c | glutamine | ARA_LEAF | p-Super | LC | 24 | 30 |
| 14715 | plastidic | Yhl013c | proline | ARA_LEAF | p-Super | GC | 33 | 402 |
| 64336 | plastidic | Yhr024c | arginine | ARA_LEAF | p-Super | LC | 72 | 166 |
| 64470 | non- | Yhr072w-a | proline | ARA_SEED_2 | p-USP | GC | 53 | 260 |
| | targeted | | | | | | | |
| 64546 | plastidic | Yhr207c | glutamate | ARA_LEAF | p-Super | LC | 33 | 47 |
| 64563 | plastidic | Yil074c | arginine | ARA_LEAF | p-Super | LC | 47 | 129 |
| 64773 | plastidic | Yir027c | proline | ARA_LEAF | p-Super | LC | 39 | 46 |
| 64894 | plastidic | Yir029w | arginine | ARA_LEAF | p-Super | LC | 52 | 316 |
| 64964 | plastidic | Yjl073w | glutamine | ARA_LEAF | p-Super | LC | 28 | 29 |
| 64975 | non- | Yjl088w | arginine | ARA_LEAF | Big35S | LC | 52 | 124 |
| | targeted | | | | | | | |
| 65181 | plastidic | Yjl129c | proline | ARA_LEAF | p-Super | GC | 37 | 89 |
| 14821 | plastidic | Yjl137c | arginine | ARA_LEAF | p-Super | LC | 47 | 152 |
| 65224 | non- | Yjl138c | proline | ARA_SEED_2 | p-PcUBI | LC | 112 | 770 |
| | targeted | | | | | | | |
| 66225 | plastidic | Yjr133w | glutamine | ARA_LEAF | p-Super | LC | 29 | 46 |
| 66274 | non- | Yjr153w | glutamate | ARA_LEAF | p-PcUBI | LC | 36 | 124 |
| | targeted | | | | | | | |
| 66419 | non- | Ykl106w | proline | ARA_LEAF | p-PcUBI | GC | 42 | 54 |
| | targeted | | | | | | | |
| 66695 | plastidic | Ylr065c | glutamate | ARA_LEAF | p-Super | LC | 39 | 62 |
| 66715 | plastidic | Ylr178c | glutamine | ARA_LEAF | p-Super | LC | 29 | 59 |
| 66772 | non- | Ylr304c | proline | ARA_LEAF | Big35S | LC | 42 | 53 |
| | targeted | | | | | | | |
| 67190 | plastidic | Ylr359w | proline | ARA_LEAF | p-Super | GC | 72 | 309 |
| 67299 | non- | Ynl142w | glutamine | ARA_SEED_2 | p-PcUBI | LC | 98 | 182 |
| | targeted | | | | | | | |
| 67646 | plastidic | Ynr019w | proline | ARA_LEAF | p-PcUBI | LC | 59 | 77 |
| 67684 | plastidic | Yol045w | arginine | ARA_LEAF | p-Super | LC | 49 | 140 |
| 67710 | non- | Yor168w | glutamate | ARA_LEAF | Big35S | LC | 38 | 112 |
| | targeted | | | | | | | |
| 67710 | non- | Yor168w | glutamine | ARA_LEAF | Big35S | LC | 28 | 112 |
| | targeted | | | | | | | |
| 67951 | non- | Yor221c | proline | ARA_SEED_2 | p-PcUBI | GC | 55 | 420 |
| | targeted | | | | | | | |
| 67968 | non- | Yor233w | proline | ARA_LEAF | Big35S | GC | 40 | 167 |
| | targeted | | | | | | | |
| 67998 | plastidic | Ypl117c | arginine | ARA_LEAF | p-PcUBI | LC | 77 | 341 |
| 68413 | non- | Zm_4842_BE510522 | arginine | ARA_LEAF | p-PcUBI | LC | 52 | 238 |
| | targeted | | | | | | | |
| 68413 | non- | Zm_4842_BE510522 | glutamine | ARA_LEAF | p-PcUBI | GC | 49 | 411 |
| | targeted | | | | | | | |
| 68413 | non- | Zm_4842_BE510522 | proline | ARA_LEAF | p-PcUBI | GC | 44 | 103 |
| | targeted | | | | | | | |
| 68132 | non- | ZM06LC1143 | arginine | ARA_LEAF | p-PcUBI | LC | 49 | 117 |
| | targeted | | | | | | | |
| 68363 | non- | ZM06LC11975 | proline | ARA_LEAF | p-PcUBI | GC | 33 | 136 |
| | targeted | | | | | | | |

[13299] Column 1 shows the SEQ ID NO, Column 2 shows the expression type (targeted or non-targeted), Column 3 shows the “gene name” (locus), Column 4 shows the metabolite analyzed, Column 5 indicates the A. thaliana source tissue analyzed, Column 6 indicates the used promoter for expression, Column 7 indicates the analytical method. Columns 8 and 9 show the minumum and the maximum increase of the analyzed metabolite (in percent) in comparison to the wild type (=ratio_by_weight, given as percent increase).

[13300] When the analyses were repeated independently, all results proved to be significant.

[13301] [0505.1.1.2] to [0515.1.1.2] for the disclosure of these paragraphs see [0505.1.1.1] to [0515.1.1.1] above.

[13302] In a further embodiment, the present invention relates in paragraphs

[13303] [0000.1.1.3] to [0514.1.1.3] to a further process for the production of at least a, preferably a, fine chemical selected from the group consisting of 3,4-dihydroxyphenylalanine (dopa), 5-oxoproline, alanine, asparagine, aspartate, citrulline, glycine, homoserine, ornithine, phenylalanine, serine, and/or tyrosine defined below and corresponding embodiments as described herein as follows [0001.1.1.3] to [0012.1.3.3] for the disclosure of these paragraphs see [0001.1.1.1] to [0011.1.1.1] above.

[13304] It is an object of the present invention to develop an inexpensive process for the synthesis of 3,4-dihydroxyphenylalanine (dopa), 5-oxoproline, alanine, asparagine, aspartate, citrulline, glycine, homoserine, ornithine, phenylalanine, serine, and/or tyrosine.

[13305] for the disclosure of this paragraph see [0013.1.1.1] above.

[13306] Accordingly, in a first embodiment, the invention relates to a process for the production of at least one, preferably a, fine chemical selected from the group consisting of: 3,4-dihydroxyphenylalanine (dopa), 5-oxoproline, alanine, asparagine, aspartate, citrulline, glycine, homoserine, ornithine, phenylalanine, serine and tyrosine, or, in other words, of the “fine chemical” or “fine chemical of the invention”.

[13307] The terms “fine chemical of the invention”, “fine chemical” or “the fine chemical” are used herein equally and relate in context of the paragraphs or sections [0014.1.3.3] to [0514.1.1.3] essentially to the metabolite or the metabolites indicated in column 7, application no. 3 of Tables I, II and IV in the respective line.

[13308] Further, the term “in context of any of the paragraphs [0014.1.3.3] to [0514.1.1.3]” as used herein means that for any of said paragraphs [0014.1.3.3] to [0514.1.1.3] the term “the fine chemical” is understood to follow the definition of paragraphs or sections [0014.1.3.3] and [0015.1.3.3], independently whether it refers to any other paragraph or not and whether the reference recites the term “fine chemical” in an other context.

[13309] Thus, in cases where one or more paragraphs or sections are incorporated by reference into any of the present paragraphs [0014.1.3.3] to [0514.1.1.3], e.g. by usage of the term “see paragraph” or the term “for the disclosure of this paragraph see the disclosure of paragraph” or the term “incorporated by reference” or a corresponding term, the incorporated paragraph, section or term “the fine chemical” is also understood to have the meaning according to the definition of paragraph [0014.1.3.3] and [0015.1.3.3].

[13310] Accordingly, in one embodiment, the term “fine chemical of the invention”, “fine chemical” or “the fine chemical” as used herein (alone or in combination, like in FCRP) means “3,4-dihydroxyphenylalanine (dopa) in context of the nucleic acid or polypeptide sequences listed in the respective same line of any one of Tables I to IV of application no. 3 and indicating in column 7 the metabolite “3,4-dihydroxyphenylalanine (dopa)”.

[13311] In one embodiment, the term 3,4-dihydroxyphenylalanine (dopa) or the term “fine chemical” mean in context of the paragraphs or sections [0014.1.3.3] to [0514.1.1.3] at least one chemical compound with an activity of the above mentioned 3,4-dihydroxyphenylalanine (dopa), respectively.

[13312] Accordingly, in one embodiment, the term “fine chemical of the invention”, “fine chemical” or “the fine chemical” as used herein (alone or in combination, like in FCRP) means “5-oxoproline in context of the nucleic acid or polypeptide sequences listed in the respective same line of any one of Tables Ito IV of application no. 3 and indicating in column 7 the metabolite “5-oxoproline”.

[13313] In one embodiment, the term 5-oxoproline or the term “fine chemical” mean in context of the paragraphs or sections [0014.1.3.3] to [0514.1.1.3] at least one chemical compound with an activity of the above mentioned 5-oxoproline, respectively.

[13314] Accordingly, in one embodiment, the term “fine chemical of the invention”, “fine chemical” or “the fine chemical” as used herein (alone or in combination, like in FCRP) means “alanine in context of the nucleic acid or polypeptide sequences listed in the respective same line of any one of Tables Ito IV of application no. 3 and indicating in column 7 the metabolite “alanine”.

[13315] In one embodiment, the term alanine or the term “fine chemical” mean in context of the paragraphs or sections [0014.1.3.3] to [0514.1.1.3] at least one chemical compound with an activity of the above mentioned alanine, respectively.

[13316] Accordingly, in one embodiment, the term “fine chemical of the invention”, “fine chemical” or “the fine chemical” as used herein (alone or in combination, like in FCRP) means “asparagine in context of the nucleic acid or polypeptide sequences listed in the respective same line of any one of Tables I to IV of application no. 3 and indicating in column 7 the metabolite “asparagine”.

[13317] In one embodiment, the term asparagine or the term “fine chemical” mean in context of the paragraphs or sections [0014.1.3.3] to [0514.1.1.3] at least one chemical compound with an activity of the above mentioned asparagine, respectively.

[13318] Accordingly, in one embodiment, the term “fine chemical of the invention”, “fine chemical” or “the fine chemical” as used herein (alone or in combination, like in FCRP) means “aspartate in context of the nucleic acid or polypeptide sequences listed in the respective same line of any one of Tables I to IV of application no. 3 and indicating in column 7 the metabolite “aspartate”.

[13319] In one embodiment, the term aspartate or the term “fine chemical” mean in context of the paragraphs or sections [0014.1.3.3] to [0514.1.1.3] at least one chemical compound with an activity of the above mentioned aspartate, respectively.

[13320] Accordingly, in one embodiment, the term “fine chemical of the invention”, “fine chemical” or “the fine chemical” as used herein (alone or in combination, like in FCRP) means “citrulline in context of the nucleic acid or polypeptide sequences listed in the respective same line of any one of Tables I to IV of application no. 3 and indicating in column 7 the metabolite “citrulline”.

[13321] In one embodiment, the term citrulline or the term “fine chemical” mean in context of the paragraphs or sections [0014.1.3.3] to [0514.1.1.3] at least one chemical compound with an activity of the above mentioned citrulline, respectively.

[13322] Accordingly, in one embodiment, the term “fine chemical of the invention”, “fine chemical” or “the fine chemical” as used herein (alone or in combination, like in FCRP) means “glycine in context of the nucleic acid or polypeptide sequences listed in the respective same line of any one of Tables I to IV of application no. 3 and indicating in column 7 the metabolite “glycine”.

[13323] In one embodiment, the term glycine or the term “fine chemical” mean in context of the paragraphs or sections [0014.1.3.3] to [0514.1.1.3] at least one chemical compound with an activity of the above mentioned glycine, respectively.

[13324] Accordingly, in one embodiment, the term “fine chemical of the invention”, “fine chemical” or “the fine chemical” as used herein (alone or in combination, like in FCRP) means “homoserine in context of the nucleic acid or polypeptide sequences listed in the respective same line of any one of Tables I to IV of application no. 3 and indicating in column 7 the metabolite “homoserine”.

[13325] In one embodiment, the term homoserine or the term “fine chemical” mean in context of the paragraphs or sections [0014.1.3.3] to [0514.1.1.3] at least one chemical compound with an activity of the above mentioned homoserine, respectively.

[13326] Accordingly, in one embodiment, the term “fine chemical of the invention”, “fine chemical” or “the fine chemical” as used herein (alone or in combination, like in FCRP) means “ornithine in context of the nucleic acid or polypeptide sequences listed in the respective same line of any one of Tables I to IV of application no. 3 and indicating in column 7 the metabolite “ornithine”.

[13327] In one embodiment, the term ornithine or the term “fine chemical” mean in context of the paragraphs or sections [0014.1.3.3] to [0514.1.1.3] at least one chemical compound with an activity of the above mentioned ornithine, respectively.

[13328] Accordingly, in one embodiment, the term “fine chemical of the invention”, “fine chemical” or “the fine chemical” as used herein (alone or in combination, like in FCRP) means “phenylalanine in context of the nucleic acid or polypeptide sequences listed in the respective same line of any one of Tables I to IV of application no. 3 and indicating in column 7 the metabolite “phenylalanine”.

[13329] In one embodiment, the term phenylalanine or the term “fine chemical” mean in context of the paragraphs or sections [0014.1.3.3] to [0514.1.1.3] at least one chemical compound with an activity of the above mentioned phenylalanine, respectively.

[13330] Accordingly, in one embodiment, the term “fine chemical of the invention”, “fine chemical” or “the fine chemical” as used herein (alone or in combination, like in FCRP) means “serine in context of the nucleic acid or polypeptide sequences listed in the respective same line of any one of

[13331] Tables I to IV of application no. 3 and indicating in column 7 the metabolite “serine”.

[13332] In one embodiment, the term serine or the term “fine chemical” mean in context of the paragraphs or sections [0014.1.3.3] to [0514.1.1.3] at least one chemical compound with an activity of the above mentioned serine, respectively.

[13333] Accordingly, in one embodiment, the term “fine chemical of the invention”, “fine chemical” or “the fine chemical” as used herein (alone or in combination, like in FCRP) means “tyrosine in context of the nucleic acid or polypeptide sequences listed in the respective same line of any one of Tables I to IV of application no. 3 and indicating in column 7 the metabolite “tyrosine”.

[13334] In one embodiment, the term tyrosine or the term “fine chemical” mean in context of the paragraphs or sections [0014.1.3.3] to [0514.1.1.3] at least one chemical compound with an activity of the above mentioned tyrosine, respectively.

[13335] Accordingly, in one embodiment, the terms “fine chemical of the invention”, “fine chemical” or “the fine chemical” mean in context of any of the paragraphs [0014.1.3.3] to [0514.1.1.3] 3,4-dihydroxyphenylalanine (dopa), preferably the L-enantiomer of 3,4-dihydroxyphenylalanine (dopa), its salts, ester or amides in free form or bound to proteins. In a preferred embodiment, the term “the fine chemical” means 3,4-dihydroxyphenylalanine (dopa) or its salts, in free form or bound to proteins. In a preferred embodiment, the term “the fine chemical” means the L-enantiomer of 3,4-dihydroxyphenylalanine (dopa).

[13336] On the other hand in case “3,4-dihydroxyphenylalanine (dopa)” is stated it means 3,4-dihydroxyphenylalanine (dopa) itself, its salts, ester or amides in free form or bound to proteins, preferably the L-enantiomer of 3,4-dihydroxyphenylalanine (dopa), its salts, ester or amides in free form or bound to proteins. In a preferred embodiment “3,4-dihydroxyphenylalanine (dopa)” means the L-enantiomer of 3,4-dihydroxyphenylalanine (dopa) in free form. In another preferred embodiment “3,4-dihydroxyphenylalanine (dopa)” means the L-enantiomer of 3,4-dihydroxyphenylalanine (dopa) bound to proteins.

[13337] Accordingly, in one embodiment, the terms “fine chemical of the invention”, “fine chemical” or “the fine chemical” mean in context of any of the paragraphs [0014.1.3.3] to [0514.1.1.3] 5oxoproline, preferably the L-enantiomer of 5-oxoproline, its salts, ester or amides in free form or bound to proteins. In a preferred embodiment, the term “the fine chemical” means 5-oxoproline or its salts, in free form or bound to proteins. In a preferred embodiment, the term “the fine chemical” means the L-enantiomer of 5-oxoproline.

[13338] On the other hand in case “5-oxoproline” is stated it means 5-oxoproline itself, its salts, ester or amides in free form or bound to proteins, preferably the L-enantiomer of 5-oxoproline, its salts, ester or amides in free form or bound to proteins. In a preferred embodiment “5-oxoproline” means the L-enantiomer of 5-oxoproline in free form. In another preferred embodiment “5-oxoproline” means the L-enantiomer of 5-oxoproline bound to proteins.

[13339] Accordingly, in one embodiment, the terms “fine chemical of the invention”, “fine chemical” or “the fine chemical” mean in context of any of the paragraphs [0014.1.3.3] to [0514.1.1.3] alanine, preferably the L-enantiomer of alanine, its salts, ester or amides in free form or bound to proteins. In a preferred embodiment, the term “the fine chemical” means alanine or its salts, in free form or bound to proteins. In a preferred embodiment, the term “the fine chemical” means the L-enantiomer of alanine.

[13340] On the other hand in case “alanine” is stated it means alanine itself, its salts, ester or amides in free form or bound to proteins, preferably the L-enantiomer of alanine, its salts, ester or amides in free form or bound to proteins. In a preferred embodiment “alanine” means the L-enantiomer of alanine in free form. In another preferred embodiment “alanine” means the L-enantiomer of alanine bound to proteins.

[13341] Accordingly, in one embodiment, the terms “fine chemical of the invention”, “fine chemical” or “the fine chemical” mean in context of any of the paragraphs [0014.1.3.3] to [0514.1.1.3] asparagine, preferably the L-enantiomer of asparagine, its salts, ester or amides in free form or bound to proteins. In a preferred embodiment, the term “the fine chemical” means asparagine or its salts, in free form or bound to proteins. In a preferred embodiment, the term “the fine chemical” means the L-enantiomer of asparagine.

[13342] On the other hand in case “asparagine” is stated it means asparagine itself, its salts, ester or amides in free form or bound to proteins, preferably the L-enantiomer of asparagine, its salts, ester or amides in free form or bound to proteins. In a preferred embodiment “asparagine” means the L-enantiomer of asparagine in free form. In another preferred embodiment “asparagine” means the L-enantiomer of asparagine bound to proteins.

[13343] Accordingly, in one embodiment, the terms “fine chemical of the invention”, “fine chemical” or “the fine chemical” mean in context of any of the paragraphs [0014.1.3.3] to [0514.1.1.3] aspartate, preferably the L-enantiomer of aspartate, its salts, ester or amides in free form or bound to proteins. In a preferred embodiment, the term “the fine chemical” means aspartate or its salts, in free form or bound to proteins. In a preferred embodiment, the term “the fine chemical” means the L-enantiomer of aspartate.

[13344] On the other hand in case “aspartate” is stated it means aspartate itself, its salts, ester or amides in free form or bound to proteins, preferably the L-enantiomer of aspartate, its salts, ester or amides in free form or bound to proteins. In a preferred embodiment “aspartate” means the L-enantiomer of aspartate in free form. In another preferred embodiment “aspartate” means the L-enantiomer of aspartate bound to proteins.

[13345] Accordingly, in one embodiment, the terms “fine chemical of the invention”, “fine chemical” or “the fine chemical” mean in context of any of the paragraphs [0014.1.3.3] to [0514 .1.1.3] citrulline, preferably the L-enantiomer of citrulline, its salts, ester or amides in free form or bound to proteins. In a preferred embodiment, the term “the fine chemical” means citrulline or its salts, in free form or bound to proteins. In a preferred embodiment, the term “the fine chemical” means the L-enantiomer of citrulline.

[13346] On the other hand in case “citrulline” is stated it means citrulline itself, its salts, ester or amides in free form or bound to proteins, preferably the L-enantiomer of citrulline, its salts, ester or amides in free form or bound to proteins. In a preferred embodiment “citrulline” means the L-enantiomer of citrulline in free form. In another preferred embodiment “citrulline” means the L-enantiomer of citrulline bound to proteins.

[13347] Accordingly, in one embodiment, the terms “fine chemical of the invention”, “fine chemical” or “the fine chemical” mean in context of any of the paragraphs [0014.1.3.3] to [0514.1.1.3] glycine, its salts, ester or amides in free form or bound to proteins. In a preferred embodiment, the term “the fine chemical” means glycine or its salts, in free form or bound to proteins.

[13348] On the other hand in case “glycine” is stated it means glycine itself, its salts, ester or amides in free form or bound to proteins

[13349] Accordingly, in one embodiment, the terms “fine chemical of the invention”, “fine chemical” or “the fine chemical” mean in context of any of the paragraphs [0014.1.3.3] to [0514.1.1.3] homoserine, preferably the L-enantiomer of homoserine, its salts, ester or amides in free form or bound to proteins. In a preferred embodiment, the term “the fine chemical” means homoserine or its salts, in free form or bound to proteins. In a preferred embodiment, the term “the fine chemical” means the L-enantiomer of homoserine.

[13350] On the other hand in case “homoserine” is stated it means homoserine itself, its salts, ester or amides in free form or bound to proteins, preferably the L-enantiomer of homoserine, its salts, ester or amides in free form or bound to proteins. In a preferred embodiment “homoserine” means the L-enantiomer of homoserine in free form. In another preferred embodiment “homoserine” means the L-enantiomer of homoserine bound to proteins.

[13351] Accordingly, in one embodiment, the terms “fine chemical of the invention”, “fine chemical” or “the fine chemical” mean in context of any of the paragraphs [0014.1.3.3] to [0514.1.1.3] ornithine, preferably the L-enantiomer of ornithine, its salts, ester or amides in free form or bound to proteins. In a preferred embodiment, the term “the fine chemical” means ornithine or its salts, in free form or bound to proteins. In a preferred embodiment, the term “the fine chemical” means the L-enantiomer of ornithine.

[13352] On the other hand in case “ornithine” is stated it means ornithine itself, its salts, ester or amides in free form or bound to proteins, preferably the L-enantiomer of ornithine, its salts, ester or amides in free form or bound to proteins. In a preferred embodiment “ornithine” means the L-enantiomer of ornithine in free form. In another preferred embodiment “ornithine” means the L-enantiomer of ornithine bound to proteins.

[13353] Accordingly, in one embodiment, the terms “fine chemical of the invention”, “fine chemical” or “the fine chemical” mean in context of any of the paragraphs [0014.1.3.3] to [0514.1.1.3] phenylalanine, preferably the L-enantiomer of phenylalanine, its salts, ester or amides in free form or bound to proteins. In a preferred embodiment, the term “the fine chemical” means phenylalanine or its salts, in free form or bound to proteins. In a preferred embodiment, the term “the fine chemical” means the L-enantiomer of phenylalanine. On the other hand in case “phenylalanine” is stated it means phenylalanine itself, its salts, ester or amides in free form or bound to proteins, preferably the L-enantiomer of phenylalanine, its salts, ester or amides in free form or bound to proteins. In a preferred embodiment “phenylalanine” means the L-enantiomer of phenylalanine in free form. In another preferred embodiment “phenylalanine” means the L-enantiomer of phenylalanine bound to proteins.

[13354] Accordingly, in one embodiment, the terms “fine chemical of the invention”, “fine chemical” or “the fine chemical” mean in context of any of the paragraphs [0014.1.3.3] to [0514.1.1.3] serine, preferably the L-enantiomer of serine, its salts, ester or amides in free form or bound to proteins. In a preferred embodiment, the term “the fine chemical” means serine or its salts, in free form or bound to proteins. In a preferred embodiment, the term “the fine chemical” means the L-enantiomer of serine.

[13355] On the other hand in case “serine” is stated it means serine itself, its salts, ester or amides in free form or bound to proteins, preferably the L-enantiomer of serine, its salts, ester or amides in free form or bound to proteins. In a preferred embodiment “serine” means the L-enantiomer of serine in free form. In another preferred embodiment “serine” means the L-enantiomer of serine bound to proteins.

[13356] Accordingly, in one embodiment, the terms “fine chemical of the invention”, “fine chemical” or “the fine chemical” mean in context of any of the paragraphs [0014.1.3.3] to [051541.1.3] tyrosine, preferably the L-enantiomer of tyrosine, its salts, ester or amides in free form or bound to proteins. In a preferred embodiment, the term “the fine chemical” means tyrosine or its salts, in free form or bound to proteins. In a preferred embodiment, the term “the fine chemical” means the L-enantiomer of tyrosine.

[13357] On the other hand in case “tyrosine” is stated it means tyrosine itself, its salts, ester or amides in free form or bound to proteins, preferably the L-enantiomer of tyrosine, its salts, ester or amides in free form or bound to proteins. In a preferred embodiment “tyrosine” means the L-enantiomer of tyrosine in free form. In another preferred embodiment “tyrosine” means the L-enantiomer of tyrosine bound to proteins.

[13358] Further, the term “in context of any of the paragraphs [0014.1.3.3] to [0514.1.1.3]” as used herein means that for any of said paragraphs [0014.1.3.3] to [0514.1.1.3] the term “the fine chemical” is understood to follow the definition of section [0014.1.3.3] or section [0015.1.3.3], independently whether it refers to any other paragraph or not and whether the reference recites the term “fine chemical” in an other context.

[13359] Thus, in cases where one or more paragraphs or sections are incorporated by reference into any of the present paragraphs [0014.1.3.3] to [0514.1.1.3], e.g. by usage of the term “see paragraph” or the term “for the disclosure of this paragraph see the disclosure of paragraph” or the term “incorporated by reference” or a corresponding term, the incorporated paragraph, section or term “the fine chemical” is also understood to have the meaning according to this definition of this paragraph [0015.1.3.3].

[13360] Further, the term “fine chemicals” as used herein relates to compositions comprising said fine chemical(s), i.e. comprising 3,4-dihydroxyphenylalanine (dopa), 5-oxoproline, alanine, asparagine, aspartate, citrulline, glycine, homoserine, ornithine, phenylalanine, serine, and/or tyrosine, respectively.

[13361] Accordingly, the present invention relates to a process for the production of aspartate, which comprises
[13362] (a) increasing or generating one or more activities selected from the group consisting of 47266012-protein in a non-human organism or a part thereof, preferably a microorganism, a plant cell, a plant or a part thereof, as compared to a corresponding non-transformed wild type non-human organism or a part thereof; and
[13363] (b) growing the non-human organism or a part thereof under conditions which permit the production of aspartate or a composition comprising aspartate in said non-human organism or in the culture medium surrounding said non-human organism.

[13364] Accordingly, the present invention relates to a process for the production of tyrosine, which comprises
[13365] (a) increasing or generating one or more activities selected from the group consisting of 47266012-protein in a non-human organism or a part thereof, preferably a microorganism, a plant cell, a plant or a part thereof, as compared to a corresponding non-transformed wild type non-human organism or a part thereof; and
[13366] (b) growing the non-human organism or a part thereof under conditions which permit the production of tyrosine or a composition comprising tyrosine in said non-human organism or in the culture medium surrounding said non-human organism.

[13367] Accordingly, the present invention relates to a process for the production of 5-oxoproline, which comprises
[13368] (a) increasing or generating one or more activities selected from the group consisting of 47266012-protein in a non-human organism or a part thereof, preferably a microorganism, a plant cell, a plant or a part thereof, as compared to a corresponding non-transformed wild type non-human organism or a part thereof; and
[13369] (b) growing the non-human organism or a part thereof under conditions which permit the production of 5-oxoproline or a composition comprising 5-oxoproline in said non-human organism or in the culture medium surrounding said non-human organism.

[13370] Accordingly, the present invention relates to a process for the production of aspartate, which comprises
[13371] (a) increasing or generating one or more activities selected from the group consisting of 49747384_SOYBEAN-protein in a non-human organism or a part thereof, preferably a microorganism, a plant cell, a plant or a part thereof, as compared to a corresponding non-transformed wild type non-human organism or a part thereof; and
[13372] (b) growing the non-human organism or a part thereof under conditions which permit the production of aspartate or a composition comprising aspartate in said non-human organism or in the culture medium surrounding said non-human organism.

[13373] Accordingly, the present invention relates to a process for the production of tyrosine, which comprises
[13374] (a) increasing or generating one or more activities selected from the group consisting of 49747384_SOYBEAN-protein in a non-human organism or a part thereof, preferably a microorganism, a plant cell, a plant or a part thereof, as compared to a corresponding non-transformed wild type non-human organism or a part thereof; and
[13375] (b) growing the non-human organism or a part thereof under conditions which permit the production of tyrosine or a composition comprising tyrosine in said non-human organism or in the culture medium surrounding said non-human organism.

[13376] Accordingly, the present invention relates to a process for the production of 5-oxoproline, which comprises
[13377] (a) increasing or generating one or more activities selected from the group consisting of 49747384_SOYBEAN-protein in a non-human organism or a part thereof, preferably a microorganism, a plant cell, a plant or a part thereof, as compared to a corresponding non-transformed wild type non-human organism or a part thereof; and
[13378] (b) growing the non-human organism or a part thereof under conditions which permit the production of 5-oxoproline or a composition comprising 5-oxoproline in said non-human organism or in the culture medium surrounding said non-human organism.

[13379] Accordingly, the present invention relates to a process for the production of alanine, which comprises
[13380] (a) increasing or generating one or more activities selected from the group consisting of pyruvate kinase in a non-human organism or a part thereof, preferably a microorganism, a plant cell, a plant or a part thereof, as compared to a corresponding non-transformed wild type non-human organism or a part thereof; and
[13381] (b) growing the non-human organism or a part thereof under conditions which permit the production of alanine or a composition comprising alanine in said non-human organism or in the culture medium surrounding said non-human organism.

[13382] Accordingly, the present invention relates to a process for the production of phenylalanine, which comprises
[13383] (a) increasing or generating one or more activities selected from the group consisting of pyruvate kinase in a non-human organism or a part thereof, preferably a microorganism, a plant cell, a plant or a part thereof, as compared to a corresponding non-transformed wild type non-human organism or a part thereof; and
[13384] (b) growing the non-human organism or a part thereof under conditions which permit the production of phenylalanine or a composition comprising phenylalanine in said non-human organism or in the culture medium surrounding said non-human organism.

[13385] Accordingly, the present invention relates to a process for the production of tyrosine, which comprises
[13386] (a) increasing or generating one or more activities selected from the group consisting of pyruvate kinase in a non-human organism or a part thereof, preferably a microorganism, a plant cell, a plant or a part thereof, as compared to a corresponding non-transformed wild type non-human organism or a part thereof; and
[13387] (b) growing the non-human organism or a part thereof under conditions which permit the production of tyrosine or a composition comprising tyrosine in said non-human organism or in the culture medium surrounding said non-human organism.

[13388] Accordingly, the present invention relates to a process for the production of citrulline, which comprises
[13389] (a) increasing or generating one or more activities selected from the group consisting of acetyltransferase in a non-human organism or a part thereof, preferably a microorganism, a plant cell, a plant or a part thereof, as compared to a corresponding non-transformed wild type non-human organism or a part thereof; and
[13390] (b) growing the non-human organism or a part thereof under conditions which permit the production of citrulline or a composition comprising citrulline in said non-human organism or in the culture medium surrounding said non-human organism.

[13391] Accordingly, the present invention relates to a process for the production of asparagine, which comprises
[13392] (a) increasing or generating one or more activities selected from the group consisting of pyruvate kinase in a non-human organism or a part thereof, preferably a microorganism, a plant cell, a plant or a part thereof, as compared to a corresponding non-transformed wild type non-human organism or a part thereof; and
[13393] (b) growing the non-human organism or a part thereof under conditions which permit the production of asparagine or a composition comprising asparagine in said non-human organism or in the culture medium surrounding said non-human organism.

[13394] Accordingly, the present invention relates to a process for the production of serine, which comprises
[13395] (a) increasing or generating one or more activities selected from the group consisting of pyruvate kinase in a non-human organism or a part thereof, preferably a microorganism, a plant cell, a plant or a part thereof, as compared to a corresponding non-transformed wild type non-human organism or a part thereof; and
[13396] (b) growing the non-human organism or a part thereof under conditions which permit the production of serine or a composition comprising serine in said non-human organism or in the culture medium surrounding said non-human organism.

[13397] Accordingly, the present invention relates to a process for the production of alanine, which comprises
[13398] (a) increasing or generating one or more activities selected from the group consisting of glucose-6-phosphate 1-dehydrogenase in a non-human organism or a part thereof, preferably a microorganism, a plant cell, a plant or a part thereof, as compared to a corresponding non-transformed wild type non-human organism or a part thereof; and
[13399] (b) growing the non-human organism or a part thereof under conditions which permit the production of alanine or a composition comprising alanine in said non-human organism or in the culture medium surrounding said non-human organism.

[13400] Accordingly, the present invention relates to a process for the production of phenylalanine, which comprises
[13401] (a) increasing or generating one or more activities selected from the group consisting of glucose-6-phosphate 1-dehydrogenase in a non-human organism or a part thereof, preferably a microorganism, a plant cell, a plant or a part thereof, as compared to a corresponding non-transformed wild type non-human organism or a part thereof; and
[13402] (b) growing the non-human organism or a part thereof under conditions which permit the production of phenylalanine or a composition comprising phenylalanine in said non-human organism or in the culture medium surrounding said non-human organism.

[13403] Accordingly, the present invention relates to a process for the production of tyrosine, which comprises
[13404] (a) increasing or generating one or more activities selected from the group consisting of glucose-6-phosphate 1-dehydrogenase in a non-human organism or a part thereof, preferably a microorganism, a plant cell, a plant or a part thereof, as compared to a corresponding non-transformed wild type non-human organism or a part thereof; and
[13405] (b) growing the non-human organism or a part thereof under conditions which permit the production of tyrosine or a composition comprising tyrosine in said non-human organism or in the culture medium surrounding said non-human organism.

[13406] Accordingly, the present invention relates to a process for the production of alanine, which comprises
[13407] (a) increasing or generating one or more activities selected from the group consisting of amino acid acetyltransferase in a non-human organism or a part thereof, preferably a microorganism, a plant cell, a plant or a part thereof, as compared to a corresponding non-transformed wild type non-human organism or a part thereof; and
[13408] (b) growing the non-human organism or a part thereof under conditions which permit the production of alanine or a composition comprising alanine in said non-human organism or in the culture medium surrounding said non-human organism.

[13409] Accordingly, the present invention relates to a process for the production of citrulline, which comprises
[13410] (a) increasing or generating one or more activities selected from the group consisting of amino acid acetyltransferase in a non-human organism or a part thereof, preferably a microorganism, a plant cell, a plant or a part thereof, as compared to a corresponding non-transformed wild type non-human organism or a part thereof; and
[13411] (b) growing the non-human organism or a part thereof under conditions which permit the production of citrulline or a composition comprising citrulline in said non-human organism or in the culture medium surrounding said non-human organism.

[13412] Accordingly, the present invention relates to a process for the production of phenylalanine, which comprises
[13413] (a) increasing or generating one or more activities selected from the group consisting of amino acid acetyltransferase in a non-human organism or a part thereof, preferably a microorganism, a plant cell, a plant or a part thereof, as compared to a corresponding non-transformed wild type non-human organism or a part thereof; and
[13414] (b) growing the non-human organism or a part thereof under conditions which permit the production of phenylalanine or a composition comprising phenylalanine in said non-human organism or in the culture medium surrounding said non-human organism.

[13415] Accordingly, the present invention relates to a process for the production of citrulline, which comprises
[13416] (a) increasing or generating one or more activities selected from the group consisting of protein phosphatase in a non-human organism or a part thereof, preferably a microorganism, a plant cell, a plant or a part thereof, as compared to a corresponding non-transformed wild type non-human organism or a part thereof; and
[13417] (b) growing the non-human organism or a part thereof under conditions which permit the production of citrulline or a composition comprising citrulline in said non-human organism or in the culture medium surrounding said non-human organism.

[13418] Accordingly, the present invention relates to a process for the production of glycine, which comprises
[13419] (a) increasing or generating one or more activities selected from the group consisting of DNA-binding protein in a non-human organism or a part thereof, preferably a microorganism, a plant cell, a plant or a part thereof, as compared to a corresponding non-transformed wild type non-human organism or a part thereof; and
[13420] (b) growing the non-human organism or a part thereof under conditions which permit the production of glycine or a composition comprising glycine in said non-human organism or in the culture medium surrounding said non-human organism.

[13421] Accordingly, the present invention relates to a process for the production of serine, which comprises
[13422] (a) increasing or generating one or more activities selected from the group consisting of

[13423] DNA-binding protein in a non-human organism or a part thereof, preferably a microorganism, a plant cell, a plant or a part thereof, as compared to a corresponding non-transformed wild type non-human organism or a part thereof; and
[13424] (b) growing the non-human organism or a part thereof under conditions which permit the production of serine or a composition comprising serine in said non-human organism or in the culture medium surrounding said non-human organism.

[13425] Accordingly, the present invention relates to a process for the production of phenylalanine, which comprises
[13426] (a) increasing or generating one or more activities selected from the group consisting of At1g17440-protein in a non-human organism or a part thereof, preferably a microorganism, a plant cell, a plant or a part thereof, as compared to a corresponding non-transformed wild type non-human organism or a part thereof; and
[13427] (b) growing the non-human organism or a part thereof under conditions which permit the production of phenylalanine or a composition comprising phenylalanine in said non-human organism or in the culture medium surrounding said non-human organism.

[13428] Accordingly, the present invention relates to a process for the production of tyrosine, which comprises
[13429] (a) increasing or generating one or more activities selected from the group consisting of At1g17440-protein in a non-human organism or a part thereof, preferably a microorganism, a plant cell, a plant or a part thereof, as compared to a corresponding non-transformed wild type non-human organism or a part thereof; and
[13430] (b) growing the non-human organism or a part thereof under conditions which permit the production of tyrosine or a composition comprising tyrosine in said non-human organism or in the culture medium surrounding said non-human organism.

[13431] Accordingly, the present invention relates to a process for the production of aspartate, which comprises
[13432] (a) increasing or generating one or more activities selected from the group consisting of At1g19800-protein in a non-human organism or a part thereof, preferably a microorganism, a plant cell, a plant or a part thereof, as compared to a corresponding non-transformed wild type non-human organism or a part thereof; and
[13433] (b) growing the non-human organism or a part thereof under conditions which permit the production of aspartate or a composition comprising aspartate in said non-human organism or in the culture medium surrounding said non-human organism.

[13434] Accordingly, the present invention relates to a process for the production of citrulline, which comprises
[13435] (a) increasing or generating one or more activities selected from the group consisting of At1g19800-protein in a non-human organism or a part thereof, preferably a microorganism, a plant cell, a plant or a part thereof, as compared to a corresponding non-transformed wild type non-human organism or a part thereof; and
[13436] (b) growing the non-human organism or a part thereof under conditions which permit the production of citrulline or a composition comprising citrulline in said non-human organism or in the culture medium surrounding said non-human organism.

[13437] Accordingly, the present invention relates to a process for the production of tyrosine, which comprises
[13438] (a) increasing or generating one or more activities selected from the group consisting of At1g19800-protein in a non-human organism or a part thereof, preferably a microorganism, a plant cell, a plant or a part thereof, as compared to a corresponding non-transformed wild type non-human organism or a part thereof; and
[13439] (b) growing the non-human organism or a part thereof under conditions which permit the production of tyrosine or a composition comprising tyrosine in said non-human organism or in the culture medium surrounding said non-human organism.

[13440] Accordingly, the present invention relates to a process for the production of phenylalanine, which comprises
[13441] (a) increasing or generating one or more activities selected from the group consisting of cullin in a non-human organism or a part thereof, preferably a microorganism, a plant cell, a plant or a part thereof, as compared to a corresponding non-transformed wild type non-human organism or a part thereof; and
[13442] (b) growing the non-human organism or a part thereof under conditions which permit the production of phenylalanine or a composition comprising phenylalanine in said non-human organism or in the culture medium surrounding said non-human organism.

[13443] Accordingly, the present invention relates to a process for the production of tyrosine, which comprises
[13444] (a) increasing or generating one or more activities selected from the group consisting of cullin in a non-human organism or a part thereof, preferably a microorganism, a plant cell, a plant or a part thereof, as compared to a corresponding non-transformed wild type non-human organism or a part thereof; and
[13445] (b) growing the non-human organism or a part thereof under conditions which permit the production of tyrosine or a composition comprising tyrosine in said non-human organism or in the culture medium surrounding said non-human organism.

[13446] Accordingly, the present invention relates to a process for the production of homoserine, which comprises
[13447] (a) increasing or generating one or more activities selected from the group consisting of bifunctional aspartokinase/homoserine dehydrogenase in a non-human organism or a part thereof, preferably a microorganism, a plant cell, a plant or a part thereof, as compared to a corresponding non-transformed wild type non-human organism or a part thereof; and
[13448] (b) growing the non-human organism or a part thereof under conditions which permit the production of homoserine or a composition comprising homoserine in said non-human organism or in the culture medium surrounding said non-human organism.

[13449] Accordingly, the present invention relates to a process for the production of aspartate, which comprises
[13450] (a) increasing or generating one or more activities selected from the group consisting of eukaryotic translation initiation factor 5 in a non-human organism or a part thereof, preferably a microorganism, a plant cell, a plant or a part thereof, as compared to a corresponding non-transformed wild type non-human organism or a part thereof; and
[13451] (b) growing the non-human organism or a part thereof under conditions which permit the production of aspartate or a composition comprising aspartate in said non-human organism or in the culture medium surrounding said non-human organism.

[13452] Accordingly, the present invention relates to a process for the production of phenylalanine, which comprises
[13453] (a) increasing or generating one or more activities selected from the group consisting of eukaryotic translation initiation factor 5 in a non-human organism or a part thereof, preferably a microorganism, a plant cell, a plant or a part thereof, as compared to a corresponding non-transformed wild type non-human organism or a part thereof; and
[13454] (b) growing the non-human organism or a part thereof under conditions which permit the production of phenylalanine or a composition comprising phenylalanine in said non-human organism or in the culture medium surrounding said non-human organism.

[13455] Accordingly, the present invention relates to a process for the production of serine, which comprises
[13456] (a) increasing or generating one or more activities selected from the group consisting of eukaryotic translation initiation factor 5 in a non-human organism or a part thereof, preferably a microorganism, a plant cell, a plant or a part thereof, as compared to a corresponding non-transformed wild type non-human organism or a part thereof; and
[13457] (b) growing the non-human organism or a part thereof under conditions which permit the production of serine or a composition comprising serine in said non-human organism or in the culture medium surrounding said non-human organism.

[13458] Accordingly, the present invention relates to a process for the production of tyrosine, which comprises
[13459] (a) increasing or generating one or more activities selected from the group consisting of eukaryotic translation initiation factor 5 in a non-human organism or a part thereof, preferably a microorganism, a plant cell, a plant or a part thereof, as compared to a corresponding non-transformed wild type non-human organism or a part thereof; and
[13460] (b) growing the non-human organism or a part thereof under conditions which permit the production of tyrosine or a composition comprising tyrosine in said non-human organism or in the culture medium surrounding said non-human organism.

[13461] Accordingly, the present invention relates to a process for the production of 5-oxoproline, which comprises
[13462] (a) increasing or generating one or more activities selected from the group consisting of eukaryotic translation initiation factor 5 in a non-human organism or a part thereof, preferably a microorganism, a plant cell, a plant or a part thereof, as compared to a corresponding non-transformed wild type non-human organism or a part thereof; and
[13463] (b) growing the non-human organism or a part thereof under conditions which permit the production of 5-oxoproline or a composition comprising 5-oxoproline in said non-human organism or in the culture medium surrounding said non-human organism.

[13464] Accordingly, the present invention relates to a process for the production of phenylalanine, which comprises
[13465] (a) increasing or generating one or more activities selected from the group consisting of transcriptional regulator in a non-human organism or a part thereof, preferably a microorganism, a plant cell, a plant or a part thereof, as compared to a corresponding non-transformed wild type non-human organism or a part thereof; and
[13466] (b) growing the non-human organism or a part thereof under conditions which permit the production of phenylalanine or a composition comprising phenylalanine in said non-human organism or in the culture medium surrounding said non-human organism.

[13467] Accordingly, the present invention relates to a process for the production of serine, which comprises
[13468] (a) increasing or generating one or more activities selected from the group consisting of transcriptional regulator in a non-human organism or a part thereof, preferably a microorganism, a plant cell, a plant or a part thereof, as compared to a corresponding non-transformed wild type non-human organism or a part thereof; and
[13469] (b) growing the non-human organism or a part thereof under conditions which permit the production of serine or a composition comprising serine in said non-human organism or in the culture medium surrounding said non-human organism.

[13470] Accordingly, the present invention relates to a process for the production of tyrosine, which comprises
[13471] (a) increasing or generating one or more activities selected from the group consisting of transcriptional regulator in a non-human organism or a part thereof, preferably a microorganism, a plant cell, a plant or a part thereof, as compared to a corresponding non-transformed wild type non-human organism or a part thereof; and
[13472] (b) growing the non-human organism or a part thereof under conditions which permit the production of tyrosine or a composition comprising tyrosine in said non-human organism or in the culture medium surrounding said non-human organism.

[13473] Accordingly, the present invention relates to a process for the production of 5-oxoproline, which comprises
[13474] (a) increasing or generating one or more activities selected from the group consisting of transcriptional regulator in a non-human organism or a part thereof, preferably a microorganism, a plant cell, a plant or a part thereof, as compared to a corresponding non-transformed wild type non-human organism or a part thereof; and
[13475] (b) growing the non-human organism or a part thereof under conditions which permit the production of 5-oxoproline or a composition comprising 5-oxoproline in said non-human organism or in the culture medium surrounding said non-human organism.

[13476] Accordingly, the present invention relates to a process for the production of glycine, which comprises
[13477] (a) increasing or generating one or more activities selected from the group consisting of protein phosphatase in a non-human organism or a part thereof, preferably a microorganism, a plant cell, a plant or a part thereof, as compared to a corresponding non-transformed wild type non-human organism or a part thereof; and
[13478] (b) growing the non-human organism or a part thereof under conditions which permit the production of glycine or a composition comprising glycine in said non-human organism or in the culture medium surrounding said non-human organism.

[13479] Accordingly, the present invention relates to a process for the production of phenylalanine, which comprises
[13480] (a) increasing or generating one or more activities selected from the group consisting of protein kinase in a non-human organism or a part thereof, preferably a microorganism, a plant cell, a plant or a part thereof, as compared to a corresponding non-transformed wild type non-human organism or a part thereof; and
[13481] (b) growing the non-human organism or a part thereof under conditions which permit the production of phenylalanine or a composition comprising phenylalanine in said non-human organism or in the culture medium surrounding said non-human organism.

[13482] Accordingly, the present invention relates to a process for the production of serine, which comprises
[13483] (a) increasing or generating one or more activities selected from the group consisting of protein kinase in a non-human organism or a part thereof, preferably a microorganism, a plant cell, a plant or a part thereof, as compared to a corresponding non-transformed wild type non-human organism or a part thereof; and
[13484] (b) growing the non-human organism or a part thereof under conditions which permit the production of serine or a composition comprising serine in said non-human organism or in the culture medium surrounding said non-human organism.

[13485] Accordingly, the present invention relates to a process for the production of tyrosine, which comprises
[13486] (a) increasing or generating one or more activities selected from the group consisting of protein kinase in a non-human organism or a part thereof, preferably a microorganism, a plant cell, a plant or a part thereof, as compared to a corresponding non-transformed wild type non-human organism or a part thereof; and
[13487] (b) growing the non-human organism or a part thereof under conditions which permit the production of tyrosine or a composition comprising tyrosine in said non-human organism or in the culture medium surrounding said non-human organism.

[13488] Accordingly, the present invention relates to a process for the production of aspartate, which comprises
[13489] (a) increasing or generating one or more activities selected from the group consisting of calcium-dependent protein kinase in a non-human organism or a part thereof, preferably a microorganism, a plant cell, a plant or a part thereof, as compared to a corresponding non-transformed wild type non-human organism or a part thereof; and
[13490] (b) growing the non-human organism or a part thereof under conditions which permit the production of aspartate or a composition comprising aspartate in said non-human organism or in the culture medium surrounding said non-human organism.

[13491] Accordingly, the present invention relates to a process for the production of phenylalanine, which comprises
[13492] (a) increasing or generating one or more activities selected from the group consisting of calcium-dependent protein kinase in a non-human organism or a part thereof, preferably a microorganism, a plant cell, a plant or a part thereof, as compared to a corresponding non-transformed wild type non-human organism or a part thereof; and
[13493] (b) growing the non-human organism or a part thereof under conditions which permit the production of phenylalanine or a composition comprising phenylalanine in said non-human organism or in the culture medium surrounding said non-human organism.

[13494] Accordingly, the present invention relates to a process for the production of alanine, which comprises
[13495] (a) increasing or generating one or more activities selected from the group consisting of protein phosphatase in a non-human organism or a part thereof, preferably a microorganism, a plant cell, a plant or a part thereof, as compared to a corresponding non-transformed wild type non-human organism or a part thereof; and
[13496] (b) growing the non-human organism or a part thereof under conditions which permit the production of alanine or a composition comprising alanine in said non-human organism or in the culture medium surrounding said non-human organism.

[13497] Accordingly, the present invention relates to a process for the production of glycine, which comprises
[13498] (a) increasing or generating one or more activities selected from the group consisting of protein phosphatase in a non-human organism or a part thereof, preferably a microorganism, a plant cell, a plant or a part thereof, as compared to a corresponding non-transformed wild type non-human organism or a part thereof; and
[13499] (b) growing the non-human organism or a part thereof under conditions which permit the production of glycine or a composition comprising glycine in said non-human organism or in the culture medium surrounding said non-human organism.

[13500] Accordingly, the present invention relates to a process for the production of tyrosine, which comprises
[13501] (a) increasing or generating one or more activities selected from the group consisting of protein phosphatase in a non-human organism or a part thereof, preferably a microorganism, a plant cell, a plant or a part thereof, as compared to a corresponding non-transformed wild type non-human organism or a part thereof; and
[13502] (b) growing the non-human organism or a part thereof under conditions which permit the production of tyrosine or a composition comprising tyrosine in said non-human organism or in the culture medium surrounding said non-human organism.

[13503] Accordingly, the present invention relates to a process for the production of 5-oxoproline, which comprises
[13504] (a) increasing or generating one or more activities selected from the group consisting of protein phosphatase in a non-human organism or a part thereof, preferably a microorganism, a plant cell, a plant or a part thereof, as compared to a corresponding non-transformed wild type non-human organism or a part thereof; and
[13505] (b) growing the non-human organism or a part thereof under conditions which permit the production of 5-oxoproline or a composition comprising 5-oxoproline in said non-human organism or in the culture medium surrounding said non-human organism.

[13506] Accordingly, the present invention relates to a process for the production of alanine, which comprises
[13507] (a) increasing or generating one or more activities selected from the group consisting of aminotransferase in a non-human organism or a part thereof, preferably a microorganism, a plant cell, a plant or a part thereof, as compared to a corresponding non-transformed wild type non-human organism or a part thereof; and
[13508] (b) growing the non-human organism or a part thereof under conditions which permit the production of alanine or a composition comprising alanine in said non-human organism or in the culture medium surrounding said non-human organism.

[13509] Accordingly, the present invention relates to a process for the production of phenylalanine, which comprises
[13510] (a) increasing or generating one or more activities selected from the group consisting of transcription factor in a non-human organism or a part thereof, preferably a microorganism, a plant cell, a plant or a part thereof, as compared to a corresponding non-transformed wild type non-human organism or a part thereof; and
[13511] (b) growing the non-human organism or a part thereof under conditions which permit the production of phenylalanine or a composition comprising phenylalanine in said non-human organism or in the culture medium surrounding said non-human organism.

[13512] Accordingly, the present invention relates to a process for the production of tyrosine, which comprises
[13513] (a) increasing or generating one or more activities selected from the group consisting of transcription factor in a non-human organism or a part thereof, preferably a microorganism, a plant cell, a plant or a part thereof, as compared to a corresponding non-transformed wild type non-human organism or a part thereof; and
[13514] (b) growing the non-human organism or a part thereof under conditions which permit the production of tyrosine or a composition comprising tyrosine in said non-human organism or in the culture medium surrounding said non-human organism.

[13515] Accordingly, the present invention relates to a process for the production of aspartate, which comprises
[13516] (a) increasing or generating one or more activities selected from the group consisting of protein phosphatase in a non-human organism or a part thereof, preferably a microorganism, a plant cell, a plant or a part thereof, as compared to a corresponding non-transformed wild type non-human organism or a part thereof; and
[13517] (b) growing the non-human organism or a part thereof under conditions which permit the production of aspartate or a composition comprising aspartate in said non-human organism or in the culture medium surrounding said non-human organism.

[13518] Accordingly, the present invention relates to a process for the production of 5-oxoproline, which comprises
[13519] (a) increasing or generating one or more activities selected from the group consisting of protein phosphatase in a non-human organism or a part thereof, preferably a microorganism, a plant cell, a plant or a part thereof, as compared to a corresponding non-transformed wild type non-human organism or a part thereof; and
[13520] (b) growing the non-human organism or a part thereof under conditions which permit the production of 5-oxoproline or a composition comprising 5-oxoproline in said non-human organism or in the culture medium surrounding said non-human organism.

[13521] Accordingly, the present invention relates to a process for the production of asparagine, which comprises
[13522] (a) increasing or generating one or more activities selected from the group consisting of protein phosphatase in a non-human organism or a part thereof, preferably a microorganism, a plant cell, a plant or a part thereof, as compared to a corresponding non-transformed wild type non-human organism or a part thereof; and
[13523] (b) growing the non-human organism or a part thereof under conditions which permit the production of asparagine or a composition comprising asparagine in said non-human organism or in the culture medium surrounding said non-human organism.

[13524] Accordingly, the present invention relates to a process for the production of phenylalanine, which comprises
[13525] (a) increasing or generating one or more activities selected from the group consisting of protein phosphatase in a non-human organism or a part thereof, preferably a microorganism, a plant cell, a plant or a part thereof, as compared to a corresponding non-transformed wild type non-human organism or a part thereof; and
[13526] (b) growing the non-human organism or a part thereof under conditions which permit the production of phenylalanine or a composition comprising phenylalanine in said non-human organism or in the culture medium surrounding said non-human organism.

[13527] Accordingly, the present invention relates to a process for the production of serine, which comprises
[13528] (a) increasing or generating one or more activities selected from the group consisting of protein phosphatase in a non-human organism or a part thereof, preferably a microorganism, a plant cell, a plant or a part thereof, as compared to a corresponding non-transformed wild type non-human organism or a part thereof; and
[13529] (b) growing the non-human organism or a part thereof under conditions which permit the production of serine or a composition comprising serine in said non-human organism or in the culture medium surrounding said non-human organism.

[13530] Accordingly, the present invention relates to a process for the production of tyrosine, which comprises
[13531] (a) increasing or generating one or more activities selected from the group consisting of protein phosphatase in a non-human organism or a part thereof, preferably a microorganism, a plant cell, a plant or a part thereof, as compared to a corresponding non-transformed wild type non-human organism or a part thereof; and
[13532] (b) growing the non-human organism or a part thereof under conditions which permit the production of tyrosine or a composition comprising tyrosine in said non-human organism or in the culture medium surrounding said non-human organism.

[13533] Accordingly, the present invention relates to a process for the production of phenylalanine, which comprises
[13534] (a) increasing or generating one or more activities selected from the group consisting of CBL-interacting protein kinase in a non-human organism or a part thereof, preferably a microorganism, a plant cell, a plant or a part thereof, as compared to a corresponding non-transformed wild type non-human organism or a part thereof; and
[13535] (b) growing the non-human organism or a part thereof under conditions which permit the production of phenylalanine or a composition comprising phenylalanine in said non-human organism or in the culture medium surrounding said non-human organism.

[13536] Accordingly, the present invention relates to a process for the production of tyrosine, which comprises
[13537] (a) increasing or generating one or more activities selected from the group consisting of CBL-interacting protein kinase in a non-human organism or a part thereof, preferably a microorganism, a plant cell, a plant or a part thereof, as compared to a corresponding non-transformed wild type non-human organism or a part thereof; and
[13538] (b) growing the non-human organism or a part thereof under conditions which permit the production of tyrosine or a composition comprising tyrosine in said non-human organism or in the culture medium surrounding said non-human organism.

[13539] Accordingly, the present invention relates to a process for the production of 5-oxoproline, which comprises
[13540] (a) increasing or generating one or more activities selected from the group consisting of CBL-interacting protein kinase in a non-human organism or a part thereof, preferably a microorganism, a plant cell, a plant or a part thereof, as compared to a corresponding non-transformed wild type non-human organism or a part thereof; and
[13541] (b) growing the non-human organism or a part thereof under conditions which permit the production of 5-oxoproline or a composition comprising 5-oxoproline in said non-human organism or in the culture medium surrounding said non-human organism.

[13542] Accordingly, the present invention relates to a process for the production of serine, which comprises
[13543] (a) increasing or generating one or more activities selected from the group consisting of glutaredoxin in a non-human organism or a part thereof, preferably a microorganism, a plant cell, a plant or a part thereof, as compared to a corresponding non-transformed wild type non-human organism or a part thereof; and
[13544] (b) growing the non-human organism or a part thereof under conditions which permit the production of serine or a composition comprising serine in said non-human organism or in the culture medium surrounding said non-human organism.

[13545] Accordingly, the present invention relates to a process for the production of tyrosine, which comprises
[13546] (a) increasing or generating one or more activities selected from the group consisting of glutaredoxin in a non-human organism or a part thereof, preferably a microorganism, a plant cell, a plant or a part thereof, as compared to a corresponding non-transformed wild type non-human organism or a part thereof; and
[13547] (b) growing the non-human organism or a part thereof under conditions which permit the production of tyrosine or a composition comprising tyrosine in said non-human organism or in the culture medium surrounding said non-human organism.

[13548] Accordingly, the present invention relates to a process for the production of glycine, which comprises
[13549] (a) increasing or generating one or more activities selected from the group consisting of CBL-interacting protein kinase in a non-human organism or a part thereof, preferably a microorganism, a plant cell, a plant or a part thereof, as compared to a corresponding non-transformed wild type non-human organism or a part thereof; and
[13550] (b) growing the non-human organism or a part thereof under conditions which permit the production of glycine or a composition comprising glycine in said non-human organism or in the culture medium surrounding said non-human organism.

[13551] Accordingly, the present invention relates to a process for the production of alanine, which comprises
[13552] (a) increasing or generating one or more activities selected from the group consisting of delta-1-pyrroline 5-carboxylase synthetase in a non-human organism or a part thereof, preferably a microorganism, a plant cell, a plant or a part thereof, as compared to a corresponding non-transformed wild type non-human organism or a part thereof; and
[13553] (b) growing the non-human organism or a part thereof under conditions which permit the production of alanine or a composition comprising alanine in said non-human organism or in the culture medium surrounding said non-human organism.

[13554] Accordingly, the present invention relates to a process for the production of glycine, which comprises
[13555] (a) increasing or generating one or more activities selected from the group consisting of delta-1-pyrroline 5-carboxylase synthetase in a non-human organism or a part thereof, preferably a microorganism, a plant cell, a plant or a part thereof, as compared to a corresponding non-transformed wild type non-human organism or a part thereof; and
[13556] (b) growing the non-human organism or a part thereof under conditions which permit the production of glycine or a composition comprising glycine in said non-human organism or in the culture medium surrounding said non-human organism.

[13557] Accordingly, the present invention relates to a process for the production of phenylalanine, which comprises
[13558] (a) increasing or generating one or more activities selected from the group consisting of glutaredoxin in a non-human organism or a part thereof, preferably a microorganism, a plant cell, a plant or a part thereof, as compared to a corresponding non-transformed wild type non-human organism or a part thereof; and
[13559] (b) growing the non-human organism or a part thereof under conditions which permit the production of phenylalanine or a composition comprising phenylalanine in said non-human organism or in the culture medium surrounding said non-human organism.

[13560] Accordingly, the present invention relates to a process for the production of tyrosine, which comprises
[13561] (a) increasing or generating one or more activities selected from the group consisting of glutaredoxin in a non-human organism or a part thereof, preferably a microorganism, a plant cell, a plant or a part thereof, as compared to a corresponding non-transformed wild type non-human organism or a part thereof; and
[13562] (b) growing the non-human organism or a part thereof under conditions which permit the production of tyrosine or a composition comprising tyrosine in said non-human organism or in the culture medium surrounding said non-human organism.

[13563] Accordingly, the present invention relates to a process for the production of tyrosine, which comprises
[13564] (a) increasing or generating one or more activities selected from the group consisting of heat shock transcription factor in a non-human organism or a part thereof, preferably a microorganism, a plant cell, a plant or a part thereof, as compared to a corresponding non-transformed wild type non-human organism or a part thereof; and
[13565] (b) growing the non-human organism or a part thereof under conditions which permit the production of tyrosine or a composition comprising tyrosine in said non-human organism or in the culture medium surrounding said non-human organism.

[13566] Accordingly, the present invention relates to a process for the production of alanine, which comprises
[13567] (a) increasing or generating one or more activities selected from the group consisting of pyruvate kinase in a non-human organism or a part thereof, preferably a microorganism, a plant cell, a plant or a part thereof, as compared to a corresponding non-transformed wild type non-human organism or a part thereof; and
[13568] (b) growing the non-human organism or a part thereof under conditions which permit the production of alanine or a composition comprising alanine in said non-human organism or in the culture medium surrounding said non-human organism.

[13569] Accordingly, the present invention relates to a process for the production of phenylalanine, which comprises
[13570] (a) increasing or generating one or more activities selected from the group consisting of pyruvate kinase in a non-human organism or a part thereof, preferably a microorganism, a plant cell, a plant or a part thereof, as compared to a corresponding non-transformed wild type non-human organism or a part thereof; and
[13571] (b) growing the non-human organism or a part thereof under conditions which permit the production of phenylalanine or a composition comprising phenylalanine in said non-human organism or in the culture medium surrounding said non-human organism.

[13572] Accordingly, the present invention relates to a process for the production of tyrosine, which comprises
[13573] (a) increasing or generating one or more activities selected from the group consisting of pyruvate kinase in a non-human organism or a part thereof, preferably a microorganism, a plant cell, a plant or a part thereof, as compared to a corresponding non-transformed wild type non-human organism or a part thereof; and
[13574] (b) growing the non-human organism or a part thereof under conditions which permit the production of tyrosine or a composition comprising tyrosine in said non-human organism or in the culture medium surrounding said non-human organism.

[13575] Accordingly, the present invention relates to a process for the production of phenylalanine, which comprises
[13576] (a) increasing or generating one or more activities selected from the group consisting of ankyrin repeat family protein in a non-human organism or a part thereof, preferably a microorganism, a plant cell, a plant or a part thereof, as compared to a corresponding non-transformed wild type non-human organism or a part thereof; and
[13577] (b) growing the non-human organism or a part thereof under conditions which permit the production of phenylalanine or a composition comprising phenylalanine in said non-human organism or in the culture medium surrounding said non-human organism.

[13578] Accordingly, the present invention relates to a process for the production of tyrosine, which comprises
[13579] (a) increasing or generating one or more activities selected from the group consisting of protein phosphatase in a non-human organism or a part thereof, preferably a microorganism, a plant cell, a plant or a part thereof, as compared to a corresponding non-transformed wild type non-human organism or a part thereof; and
[13580] (b) growing the non-human organism or a part thereof under conditions which permit the production of tyrosine or a composition comprising tyrosine in said non-human organism or in the culture medium surrounding said non-human organism.

[13581] Accordingly, the present invention relates to a process for the production of aspartate, which comprises
[13582] (a) increasing or generating one or more activities selected from the group consisting of thioredoxin family protein in a non-human organism or a part thereof, preferably a microorganism, a plant cell, a plant or a part thereof, as compared to a corresponding non-transformed wild type non-human organism or a part thereof; and
[13583] (b) growing the non-human organism or a part thereof under conditions which permit the production of aspartate or a composition comprising aspartate in said non-human organism or in the culture medium surrounding said non-human organism.

[13584] Accordingly, the present invention relates to a process for the production of phenylalanine, which comprises
[13585] (a) increasing or generating one or more activities selected from the group consisting of thioredoxin family protein in a non-human organism or a part thereof, preferably a microorganism, a plant cell, a plant or a part thereof, as compared to a corresponding non-transformed wild type non-human organism or a part thereof; and
[13586] (b) growing the non-human organism or a part thereof under conditions which permit the production of phenylalanine or a composition comprising phenylalanine in said non-human organism or in the culture medium surrounding said non-human organism.

[13587] Accordingly, the present invention relates to a process for the production of tyrosine, which comprises
[13588] (a) increasing or generating one or more activities selected from the group consisting of thioredoxin family protein in a non-human organism or a part thereof, preferably a microorganism, a plant cell, a plant or a part thereof, as compared to a corresponding non-transformed wild type non-human organism or a part thereof; and
[13589] (b) growing the non-human organism or a part thereof under conditions which permit the production of tyrosine or a composition comprising tyrosine in said non-human organism or in the culture medium surrounding said non-human organism.

[13590] Accordingly, the present invention relates to a process for the production of phenylalanine, which comprises
[13591] (a) increasing or generating one or more activities selected from the group consisting of harpin-induced family protein in a non-human organism or a part thereof, preferably a microorganism, a plant cell, a plant or a part thereof, as compared to a corresponding non-transformed wild type non-human organism or a part thereof; and
[13592] (b) growing the non-human organism or a part thereof under conditions which permit the production of phenylalanine or a composition comprising phenylalanine in said non-human organism or in the culture medium surrounding said non-human organism.

[13593] Accordingly, the present invention relates to a process for the production of serine, which comprises
[13594] (a) increasing or generating one or more activities selected from the group consisting of harpin-induced family protein in a non-human organism or a part thereof, preferably a microorganism, a plant cell, a plant or a part thereof, as compared to a corresponding non-transformed wild type non-human organism or a part thereof; and
[13595] (b) growing the non-human organism or a part thereof under conditions which permit the production of serine or a composition comprising serine in said non-human organism or in the culture medium surrounding said non-human organism.

[13596] Accordingly, the present invention relates to a process for the production of tyrosine, which comprises
[13597] (a) increasing or generating one or more activities selected from the group consisting of harpin-induced family protein in a non-human organism or a part thereof, preferably a microorganism, a plant cell, a plant or a part thereof, as compared to a corresponding non-transformed wild type non-human organism or a part thereof; and
[13598] (b) growing the non-human organism or a part thereof under conditions which permit the production of tyrosine or a composition comprising tyrosine in said non-human organism or in the culture medium surrounding said non-human organism.

[13599] Accordingly, the present invention relates to a process for the production of phenylalanine, which comprises
[13600] (a) increasing or generating one or more activities selected from the group consisting of DNA mismatch repair protein in a non-human organism or a part thereof, preferably a microorganism, a plant cell, a plant or a part thereof, as compared to a corresponding non-transformed wild type non-human organism or a part thereof; and
[13601] (b) growing the non-human organism or a part thereof under conditions which permit the production of phenylalanine or a composition comprising phenylalanine in said non-human organism or in the culture medium surrounding said non-human organism.

[13602] Accordingly, the present invention relates to a process for the production of phenylalanine, which comprises
[13603] (a) increasing or generating one or more activities selected from the group consisting of protein kinase in a non-human organism or a part thereof, preferably a microorganism, a plant cell, a plant or a part thereof, as compared to a corresponding non-transformed wild type non-human organism or a part thereof; and
[13604] (b) growing the non-human organism or a part thereof under conditions which permit the production of phenylalanine or a composition comprising phenylalanine in said non-human organism or in the culture medium surrounding said non-human organism.

[13605] Accordingly, the present invention relates to a process for the production of serine, which comprises
[13606] (a) increasing or generating one or more activities selected from the group consisting of protein kinase in a non-human organism or a part thereof, preferably a microorganism, a plant cell, a plant or a part thereof, as compared to a corresponding non-transformed wild type non-human organism or a part thereof; and
[13607] (b) growing the non-human organism or a part thereof under conditions which permit the production of serine or a composition comprising serine in said non-human organism or in the culture medium surrounding said non-human organism.

[13608] Accordingly, the present invention relates to a process for the production of tyrosine, which comprises
[13609] (a) increasing or generating one or more activities selected from the group consisting of protein kinase in a non-human organism or a part thereof, preferably a microorganism, a plant cell, a plant or a part thereof, as compared to a corresponding non-transformed wild type non-human organism or a part thereof; and
[13610] (b) growing the non-human organism or a part thereof under conditions which permit the production of tyrosine or a composition comprising tyrosine in said non-human organism or in the culture medium surrounding said non-human organism.

[13611] Accordingly, the present invention relates to a process for the production of 5-oxoproline, which comprises
[13612] (a) increasing or generating one or more activities selected from the group consisting of protein kinase in a non-human organism or a part thereof, preferably a microorganism, a plant cell, a plant or a part thereof, as compared to a corresponding non-transformed wild type non-human organism or a part thereof; and
[13613] (b) growing the non-human organism or a part thereof under conditions which permit the production of 5-oxoproline or a composition comprising 5-oxoproline in said non-human organism or in the culture medium surrounding said non-human organism.

[13614] Accordingly, the present invention relates to a process for the production of serine, which comprises
[13615] (a) increasing or generating one or more activities selected from the group consisting of eukaryotic translation initiation factor in a non-human organism or a part thereof, preferably a microorganism, a plant cell, a plant or a part thereof, as compared to a corresponding non-transformed wild type non-human organism or a part thereof; and
[13616] (b) growing the non-human organism or a part thereof under conditions which permit the production of serine or a composition comprising serine in said non-human organism or in the culture medium surrounding said non-human organism.

[13617] Accordingly, the present invention relates to a process for the production of tyrosine, which comprises
[13618] (a) increasing or generating one or more activities selected from the group consisting of glucose-6-phosphate 1-dehydrogenase in a non-human organism or a part thereof, preferably a microorganism, a plant cell, a plant or a part thereof, as compared to a corresponding non-transformed wild type non-human organism or a part thereof; and
[13619] (b) growing the non-human organism or a part thereof under conditions which permit the production of tyrosine or a composition comprising tyrosine in said non-human organism or in the culture medium surrounding said non-human organism.

[13620] Accordingly, the present invention relates to a process for the production of phenylalanine, which comprises
[13621] (a) increasing or generating one or more activities selected from the group consisting of glycosy) transferase in a non-human organism or a part thereof, preferably a microorganism, a plant cell, a plant or a part thereof, as compared to a corresponding non-transformed wild type non-human organism or a part thereof; and
[13622] (b) growing the non-human organism or a part thereof under conditions which permit the production of phenylalanine or a composition comprising phenylalanine in said non-human organism or in the culture medium surrounding said non-human organism.

[13623] Accordingly, the present invention relates to a process for the production of tyrosine, which comprises
[13624] (a) increasing or generating one or more activities selected from the group consisting of glycosyl transferase in a non-human organism or a part thereof, preferably a microorganism, a plant cell, a plant or a part thereof, as compared to a corresponding non-transformed wild type non-human organism or a part thereof; and
[13625] (b) growing the non-human organism or a part thereof under conditions which permit the production of tyrosine or a composition comprising tyrosine in said non-human organism or in the culture medium surrounding said non-human organism.

[13626] Accordingly, the present invention relates to a process for the production of phenylalanine, which comprises
[13627] (a) increasing or generating one or more activities selected from the group consisting of auxin response factor in a non-human organism or a part thereof, preferably a microorganism, a plant cell, a plant or a part thereof, as compared to a corresponding non-transformed wild type non-human organism or a part thereof; and
[13628] (b) growing the non-human organism or a part thereof under conditions which permit the production of phenylalanine or a composition comprising phenylalanine in said non-human organism or in the culture medium surrounding said non-human organism.

[13629] Accordingly, the present invention relates to a process for the production of tyrosine, which comprises
[13630] (a) increasing or generating one or more activities selected from the group consisting of auxin response factor in a non-human organism or a part thereof, preferably a microorganism, a plant cell, a plant or a part thereof, as compared to a corresponding non-transformed wild type non-human organism or a part thereof; and
[13631] (b) growing the non-human organism or a part thereof under conditions which permit the production of tyrosine or a composition comprising tyrosine in said non-human organism or in the culture medium surrounding said non-human organism.

[13632] Accordingly, the present invention relates to a process for the production of aspartate, which comprises
[13633] (a) increasing or generating one or more activities selected from the group consisting of monthiol glutaredoxin in a non-human organism or a part thereof, preferably a microorganism, a plant cell, a plant or a part thereof, as compared to a corresponding non-transformed wild type non-human organism or a part thereof; and
[13634] (b) growing the non-human organism or a part thereof under conditions which permit the production of aspartate or a composition comprising aspartate in said non-human organism or in the culture medium surrounding said non-human organism.

[13635] Accordingly, the present invention relates to a process for the production of phenylalanine, which comprises
[13636] (a) increasing or generating one or more activities selected from the group consisting of monthiol glutaredoxin in a non-human organism or a part thereof, preferably a microorganism, a plant cell, a plant or a part thereof, as compared to a corresponding non-transformed wild type non-human organism or a part thereof; and
[13637] (b) growing the non-human organism or a part thereof under conditions which permit the production of phenylalanine or a composition comprising phenylalanine in said non-human organism or in the culture medium surrounding said non-human organism.

[13638] Accordingly, the present invention relates to a process for the production of phenylalanine, which comprises
[13639] (a) increasing or generating one or more activities selected from the group consisting of glutaredoxin in a non-human organism or a part thereof, preferably a microorganism, a plant cell, a plant or a part thereof, as compared to a corresponding non-transformed wild type non-human organism or a part thereof; and
[13640] (b) growing the non-human organism or a part thereof under conditions which permit the production of phenylalanine or a composition comprising phenylalanine in said non-human organism or in the culture medium surrounding said non-human organism.

[13641] Accordingly, the present invention relates to a process for the production of tyrosine, which comprises
[13642] (a) increasing or generating one or more activities selected from the group consisting of glutaredoxin in a non-human organism or a part thereof, preferably a microorganism, a plant cell, a plant or a part thereof, as compared to a corresponding non-transformed wild type non-human organism or a part thereof; and
[13643] (b) growing the non-human organism or a part thereof under conditions which permit the production of tyrosine or a composition comprising tyrosine in said non-human organism or in the culture medium surrounding said non-human organism.

[13644] Accordingly, the present invention relates to a process for the production of 5-oxoproline, which comprises
[13645] (a) increasing or generating one or more activities selected from the group consisting of glutaredoxin in a non-human organism or a part thereof, preferably a microorganism, a plant cell, a plant or a part thereof, as compared to a corresponding non-transformed wild type non-human organism or a part thereof; and
[13646] (b) growing the non-human organism or a part thereof under conditions which permit the production of 5-oxoproline or a composition comprising 5-oxoproline in said non-human organism or in the culture medium surrounding said non-human organism.

[13647] Accordingly, the present invention relates to a process for the production of phenylalanine, which comprises
[13648] (a) increasing or generating one or more activities selected from the group consisting of monothiol glutaredoxin in a non-human organism or a part thereof, preferably a microorganism, a plant cell, a plant or a part thereof, as compared to a corresponding non-transformed wild type non-human organism or a part thereof; and
[13649] (b) growing the non-human organism or a part thereof under conditions which permit the production of phenylalanine or a composition comprising phenylalanine in said non-human organism or in the culture medium surrounding said non-human organism.

[13650] Accordingly, the present invention relates to a process for the production of tyrosine, which comprises
[13651] (a) increasing or generating one or more activities selected from the group consisting of monothiol glutaredoxin in a non-human organism or a part thereof, preferably a microorganism, a plant cell, a plant or a part thereof, as compared to a corresponding non-transformed wild type non-human organism or a part thereof; and
[13652] (b) growing the non-human organism or a part thereof under conditions which permit the production of tyrosine or a composition comprising tyrosine in said non-human organism or in the culture medium surrounding said non-human organism.

[13653] Accordingly, the present invention relates to a process for the production of tyrosine, which comprises
[13654] (a) increasing or generating one or more activities selected from the group consisting of monothiol glutaredoxin in a non-human organism or a part thereof, preferably a microorganism, a plant cell, a plant or a part thereof, as compared to a corresponding non-transformed wild type non-human organism or a part thereof; and
[13655] (b) growing the non-human organism or a part thereof under conditions which permit the production of tyrosine or a composition comprising tyrosine in said non-human organism or in the culture medium surrounding said non-human organism.

[13656] Accordingly, the present invention relates to a process for the production of aspartate, which comprises
[13657] (a) increasing or generating one or more activities selected from the group consisting of monothiol glutaredoxin in a non-human organism or a part thereof, preferably a microorganism, a plant cell, a plant or a part thereof, as compared to a corresponding non-transformed wild type non-human organism or a part thereof; and
[13658] (b) growing the non-human organism or a part thereof under conditions which permit the production of aspartate or a composition comprising aspartate in said non-human organism or in the culture medium surrounding said non-human organism.

[13659] Accordingly, the present invention relates to a process for the production of phenylalanine, which comprises
[13660] (a) increasing or generating one or more activities selected from the group consisting of monothiol glutaredoxin in a non-human organism or a part thereof, preferably a microorganism, a plant cell, a plant or a part thereof, as compared to a corresponding non-transformed wild type non-human organism or a part thereof; and
[13661] (b) growing the non-human organism or a part thereof under conditions which permit the production of phenylalanine or a composition comprising phenylalanine in said non-human organism or in the culture medium surrounding said non-human organism.

[13662] Accordingly, the present invention relates to a process for the production of tyrosine, which comprises
[13663] (a) increasing or generating one or more activities selected from the group consisting of monothiol glutaredoxin in a non-human organism or a part thereof, preferably a microorganism, a plant cell, a plant or a part thereof, as compared to a corresponding non-transformed wild type non-human organism or a part thereof; and
[13664] (b) growing the non-human organism or a part thereof under conditions which permit the production of tyrosine or a composition comprising tyrosine in said non-human organism or in the culture medium surrounding said non-human organism.

[13665] Accordingly, the present invention relates to a process for the production of 5-oxoproline, which comprises
[13666] (a) increasing or generating one or more activities selected from the group consisting of monothiol glutaredoxin in a non-human organism or a part thereof, preferably a microorganism, a plant cell, a plant or a part thereof, as compared to a corresponding non-transformed wild type non-human organism or a part thereof; and
[13667] (b) growing the non-human organism or a part thereof under conditions which permit the production of 5-oxoproline or a composition comprising 5-oxoproline in said non-human organism or in the culture medium surrounding said non-human organism.

[13668] Accordingly, the present invention relates to a process for the production of tyrosine, which comprises
[13669] (a) increasing or generating one or more activities selected from the group consisting of monothiol glutaredoxin in a non-human organism or a part thereof, preferably a microorganism, a plant cell, a plant or a part thereof, as compared to a corresponding non-transformed wild type non-human organism or a part thereof; and
[13670] (b) growing the non-human organism or a part thereof under conditions which permit the production of tyrosine or a composition comprising tyrosine in said non-human organism or in the culture medium surrounding said non-human organism.

[13671] Accordingly, the present invention relates to a process for the production of serine, which comprises
[13672] (a) increasing or generating one or more activities selected from the group consisting of heat shock transcription factor in a non-human organism or a part thereof, preferably a microorganism, a plant cell, a plant or a part thereof, as compared to a corresponding non-transformed wild type non-human organism or a part thereof; and
[13673] (b) growing the non-human organism or a part thereof under conditions which permit the production of serine or a composition comprising serine in said non-human organism or in the culture medium surrounding said non-human organism.

[13674] Accordingly, the present invention relates to a process for the production of alanine, which comprises
[13675] (a) increasing or generating one or more activities selected from the group consisting of protein phosphatase in a non-human organism or a part thereof, preferably a microorganism, a plant cell, a plant or a part thereof, as compared to a corresponding non-transformed wild type non-human organism or a part thereof; and
[13676] (b) growing the non-human organism or a part thereof under conditions which permit the production of alanine or a composition comprising alanine in said non-human organism or in the culture medium surrounding said non-human organism.

[13677] Accordingly, the present invention relates to a process for the production of aspartate, which comprises
[13678] (a) increasing or generating one or more activities selected from the group consisting of protein phosphatase in a non-human organism or a part thereof, preferably a microorganism, a plant cell, a plant or a part thereof, as compared to a corresponding non-transformed wild type non-human organism or a part thereof; and
[13679] (b) growing the non-human organism or a part thereof under conditions which permit the production of aspartate or a composition comprising aspartate in said non-human organism or in the culture medium surrounding said non-human organism.

[13680] Accordingly, the present invention relates to a process for the production of citrulline, which comprises
[13681] (a) increasing or generating one or more activities selected from the group consisting of protein phosphatase in a non-human organism or a part thereof, preferably a microorganism, a plant cell, a plant or a part thereof, as compared to a corresponding non-transformed wild type non-human organism or a part thereof; and
[13682] (b) growing the non-human organism or a part thereof under conditions which permit the production of citrulline or a composition comprising citrulline in said non-human organism or in the culture medium surrounding said non-human organism.

[13683] Accordingly, the present invention relates to a process for the production of alanine, which comprises
[13684] (a) increasing or generating one or more activities selected from the group consisting of At4g32480-protein in a non-human organism or a part thereof, preferably a microorganism, a plant cell, a plant or a part thereof, as compared to a corresponding non-transformed wild type non-human organism or a part thereof; and
[13685] (b) growing the non-human organism or a part thereof under conditions which permit the production of alanine or a composition comprising alanine in said non-human organism or in the culture medium surrounding said non-human organism.

[13686] Accordingly, the present invention relates to a process for the production of asparagine, which comprises
[13687] (a) increasing or generating one or more activities selected from the group consisting of At4g32480-protein in a non-human organism or a part thereof, preferably a microorganism, a plant cell, a plant or a part thereof, as compared to a corresponding non-transformed wild type non-human organism or a part thereof; and
[13688] (b) growing the non-human organism or a part thereof under conditions which permit the production of asparagine or a composition comprising asparagine in said non-human organism or in the culture medium surrounding said non-human organism.

[13689] Accordingly, the present invention relates to a process for the production of glycine, which comprises
[13690] (a) increasing or generating one or more activities selected from the group consisting of At4g32480-protein in a non-human organism or a part thereof, preferably a microorganism, a plant cell, a plant or a part thereof, as compared to a corresponding non-transformed wild type non-human organism or a part thereof; and
[13691] (b) growing the non-human organism or a part thereof under conditions which permit the production of glycine or a composition comprising glycine in said non-human organism or in the culture medium surrounding said non-human organism.

[13692] Accordingly, the present invention relates to a process for the production of phenylalanine, which comprises
[13693] (a) increasing or generating one or more activities selected from the group consisting of At4g32480-protein in a non-human organism or a part thereof, preferably a microorganism, a plant cell, a plant or a part thereof, as compared to a corresponding non-transformed wild type non-human organism or a part thereof; and
[13694] (b) growing the non-human organism or a part thereof under conditions which permit the production of phenylalanine or a composition comprising phenylalanine in said non-human organism or in the culture medium surrounding said non-human organism.

[13695] Accordingly, the present invention relates to a process for the production of serine, which comprises
[13696] (a) increasing or generating one or more activities selected from the group consisting of At4g32480-protein in a non-human organism or a part thereof, preferably a microorganism, a plant cell, a plant or a part thereof, as compared to a corresponding non-transformed wild type non-human organism or a part thereof; and
[13697] (b) growing the non-human organism or a part thereof under conditions which permit the production of serine or a composition comprising serine in said non-human organism or in the culture medium surrounding said non-human organism.

[13698] Accordingly, the present invention relates to a process for the production of tyrosine, which comprises
[13699] (a) increasing or generating one or more activities selected from the group consisting of At4g32480-protein in a non-human organism or a part thereof, preferably a microorganism, a plant cell, a plant or a part thereof, as compared to a corresponding non-transformed wild type non-human organism or a part thereof; and
[13700] (b) growing the non-human organism or a part thereof under conditions which permit the production of tyrosine or a composition comprising tyrosine in said non-human organism or in the culture medium surrounding said non-human organism.

[13701] Accordingly, the present invention relates to a process for the production of aspartate, which comprises
[13702] (a) increasing or generating one or more activities selected from the group consisting of glutaredoxin in a non-human organism or a part thereof, preferably a microorganism, a plant cell, a plant or a part thereof, as compared to a corresponding non-transformed wild type non-human organism or a part thereof; and
[13703] (b) growing the non-human organism or a part thereof under conditions which permit the production of aspartate or a composition comprising aspartate in said non-human organism or in the culture medium surrounding said non-human organism.

[13704] Accordingly, the present invention relates to a process for the production of citrulline, which comprises
[13705] (a) increasing or generating one or more activities selected from the group consisting of glutaredoxin in a non-human organism or a part thereof, preferably a microorganism, a plant cell, a plant or a part thereof, as compared to a corresponding non-transformed wild type non-human organism or a part thereof; and
[13706] (b) growing the non-human organism or a part thereof under conditions which permit the production of citrulline or a composition comprising citrulline in said non-human organism or in the culture medium surrounding said non-human organism.

[13707] Accordingly, the present invention relates to a process for the production of phenylalanine, which comprises
[13708] (a) increasing or generating one or more activities selected from the group consisting of cyclin D in a non-human organism or a part thereof, preferably a microorganism, a plant cell, a plant or a part thereof, as compared to a corresponding non-transformed wild type non-human organism or a part thereof; and
[13709] (b) growing the non-human organism or a part thereof under conditions which permit the production of phenylalanine or a composition comprising phenylalanine in said non-human organism or in the culture medium surrounding said non-human organism.

[13710] Accordingly, the present invention relates to a process for the production of asparagine, which comprises
[13711] (a) increasing or generating one or more activities selected from the group consisting of calcium-dependent protein kinase in a non-human organism or a part thereof, preferably a microorganism, a plant cell, a plant or a part thereof, as compared to a corresponding non-transformed wild type non-human organism or a part thereof; and
[13712] (b) growing the non-human organism or a part thereof under conditions which permit the production of asparagine or a composition comprising asparagine in said non-human organism or in the culture medium surrounding said non-human organism.

[13713] Accordingly, the present invention relates to a process for the production of phenylalanine, which comprises
[13714] (a) increasing or generating one or more activities selected from the group consisting of calcium-dependent protein kinase in a non-human organism or a part thereof, preferably a microorganism, a plant cell, a plant or a part thereof, as compared to a corresponding non-transformed wild type non-human organism or a part thereof; and
[13715] (b) growing the non-human organism or a part thereof under conditions which permit the production of phenylalanine or a composition comprising phenylalanine in said non-human organism or in the culture medium surrounding said non-human organism.

[13716] Accordingly, the present invention relates to a process for the production of serine, which comprises
[13717] (a) increasing or generating one or more activities selected from the group consisting of calcium-dependent protein kinase in a non-human organism or a part thereof, preferably a microorganism, a plant cell, a plant or a part thereof, as compared to a corresponding non-transformed wild type non-human organism or a part thereof; and
[13718] (b) growing the non-human organism or a part thereof under conditions which permit the production of serine or a composition comprising serine in said non-human organism or in the culture medium surrounding said non-human organism.

[13719] Accordingly, the present invention relates to a process for the production of tyrosine, which comprises
[13720] (a) increasing or generating one or more activities selected from the group consisting of calcium-dependent protein kinase in a non-human organism or a part thereof, preferably a microorganism, a plant cell, a plant or a part thereof, as compared to a corresponding non-transformed wild type non-human organism or a part thereof; and
[13721] (b) growing the non-human organism or a part thereof under conditions which permit the production of tyrosine or a composition comprising tyrosine in said non-human organism or in the culture medium surrounding said non-human organism.

[13722] Accordingly, the present invention relates to a process for the production of 5-oxoproline, which comprises
[13723] (a) increasing or generating one or more activities selected from the group consisting of calcium-dependent protein kinase in a non-human organism or a part thereof, preferably a microorganism, a plant cell, a plant or a part thereof, as compared to a corresponding non-transformed wild type non-human organism or a part thereof; and
[13724] (b) growing the non-human organism or a part thereof under conditions which permit the production of 5-oxoproline or a composition comprising 5-oxoproline in said non-human organism or in the culture medium surrounding said non-human organism.

[13725] Accordingly, the present invention relates to a process for the production of tyrosine, which comprises
[13726] (a) increasing or generating one or more activities selected from the group consisting of protein phosphatase in a non-human organism or a part thereof, preferably a microorganism, a plant cell, a plant or a part thereof, as compared to a corresponding non-transformed wild type non-human organism or a part thereof; and
[13727] (b) growing the non-human organism or a part thereof under conditions which permit the production of tyrosine or a composition comprising tyrosine in said non-human organism or in the culture medium surrounding said non-human organism.

[13728] Accordingly, the present invention relates to a process for the production of aspartate, which comprises
[13729] (a) increasing or generating one or more activities selected from the group consisting of heat shock transcription factor in a non-human organism or a part thereof, preferably a microorganism, a plant cell, a plant or a part thereof, as compared to a corresponding non-transformed wild type non-human organism or a part thereof; and
[13730] (b) growing the non-human organism or a part thereof under conditions which permit the production of aspartate or a composition comprising aspartate in said non-human organism or in the culture medium surrounding said non-human organism.

[13731] Accordingly, the present invention relates to a process for the production of 3,4-dihydroxyphenylalanine (dopa), which comprises
[13732] (a) increasing or generating one or more activities selected from the group consisting of heat shock transcription factor in a non-human organism or a part thereof, preferably a microorganism, a plant cell, a plant or a part thereof, as compared to a corresponding non-transformed wild type non-human organism or a part thereof; and
[13733] (b) growing the non-human organism or a part thereof under conditions which permit the production of 3,4-dihydroxyphenylalanine (dopa) or a composition comprising 3,4-dihydroxyphenylalanine (dopa) in said non-human organism or in the culture medium surrounding said non-human organism.

[13734] Accordingly, the present invention relates to a process for the production of phenylalanine, which comprises
[13735] (a) increasing or generating one or more activities selected from the group consisting of gibberellin 20-oxidase in a non-human organism or a part thereof, preferably a microorganism, a plant cell, a plant or a part thereof, as compared to a corresponding non-transformed wild type non-human organism or a part thereof; and
[13736] (b) growing the non-human organism or a part thereof under conditions which permit the production of phenylalanine or a composition comprising phenylalanine in said non-human organism or in the culture medium surrounding said non-human organism.

[13737] Accordingly, the present invention relates to a process for the production of serine, which comprises
[13738] (a) increasing or generating one or more activities selected from the group consisting of gibberellin 20-oxidase in a non-human organism or a part thereof, preferably a microorganism, a plant cell, a plant or a part thereof, as compared to a corresponding non-transformed wild type non-human organism or a part thereof; and
[13739] (b) growing the non-human organism or a part thereof under conditions which permit the production of serine or a composition comprising serine in said non-human organism or in the culture medium surrounding said non-human organism.

[13740] Accordingly, the present invention relates to a process for the production of serine, which comprises
[13741] (a) increasing or generating one or more activities selected from the group consisting of integral membrane transporter family protein in a non-human organism or a part thereof, preferably a microorganism, a plant cell, a plant or a part thereof, as compared to a corresponding non-transformed wild type non-human organism or a part thereof; and
[13742] (b) growing the non-human organism or a part thereof under conditions which permit the production of serine or a composition comprising serine in said non-human organism or in the culture medium surrounding said non-human organism.

[13743] Accordingly, the present invention relates to a process for the production of phenylalanine, which comprises
[13744] (a) increasing or generating one or more activities selected from the group consisting of glutaredoxin in a non-human organism or a part thereof, preferably a microorganism, a plant cell, a plant or a part thereof, as compared to a corresponding non-transformed wild type non-human organism or a part thereof; and
[13745] (b) growing the non-human organism or a part thereof under conditions which permit the production of phenylalanine or a composition comprising phenylalanine in said non-human organism or in the culture medium surrounding said non-human organism.

[13746] Accordingly, the present invention relates to a process for the production of asparagine, which comprises
[13747] (a) increasing or generating one or more activities selected from the group consisting of At5g16650-protein in a non-human organism or a part thereof, preferably a microorganism, a plant cell, a plant or a part thereof, as compared to a corresponding non-transformed wild type non-human organism or a part thereof; and
[13748] (b) growing the non-human organism or a part thereof under conditions which permit the production of asparagine or a composition comprising asparagine in said non-human organism or in the culture medium surrounding said non-human organism.

[13749] Accordingly, the present invention relates to a process for the production of aspartate, which comprises
[13750] (a) increasing or generating one or more activities selected from the group consisting of At5g16650-protein in a non-human organism or a part thereof, preferably a microorganism, a plant cell, a plant or a part thereof, as compared to a corresponding non-transformed wild type non-human organism or a part thereof; and
[13751] (b) growing the non-human organism or a part thereof under conditions which permit the production of aspartate or a composition comprising aspartate in said non-human organism or in the culture medium surrounding said non-human organism.

[13752] Accordingly, the present invention relates to a process for the production of serine, which comprises
[13753] (a) increasing or generating one or more activities selected from the group consisting of At5g16650-protein in a non-human organism or a part thereof, preferably a microorganism, a plant cell, a plant or a part thereof, as compared to a corresponding non-transformed wild type non-human organism or a part thereof; and
[13754] (b) growing the non-human organism or a part thereof under conditions which permit the production of serine or a composition comprising serine in said non-human organism or in the culture medium surrounding said non-human organism.

[13755] Accordingly, the present invention relates to a process for the production of 5-oxoproline, which comprises
[13756] (a) increasing or generating one or more activities selected from the group consisting of At5g16650-protein in a non-human organism or a part thereof, preferably a microorganism, a plant cell, a plant or a part thereof, as compared to a corresponding non-transformed wild type non-human organism or a part thereof; and
[13757] (b) growing the non-human organism or a part thereof under conditions which permit the production of 5-oxoproline or a composition comprising 5-oxoproline in said non-human organism or in the culture medium surrounding said non-human organism.

[13758] Accordingly, the present invention relates to a process for the production of phenylalanine, which comprises
[13759] (a) increasing or generating one or more activities selected from the group consisting of monothiol glutaredoxin in a non-human organism or a part thereof, preferably a microorganism, a plant cell, a plant or a part thereof, as compared to a corresponding non-transformed wild type non-human organism or a part thereof; and
[13760] (b) growing the non-human organism or a part thereof under conditions which permit the production of phenylalanine or a composition comprising phenylalanine in said non-human organism or in the culture medium surrounding said non-human organism.

[13761] Accordingly, the present invention relates to a process for the production of tyrosine, which comprises
[13762] (a) increasing or generating one or more activities selected from the group consisting of monothiol glutaredoxin in a non-human organism or a part thereof, preferably a microorganism, a plant cell, a plant or a part thereof, as compared to a corresponding non-transformed wild type non-human organism or a part thereof; and
[13763] (b) growing the non-human organism or a part thereof under conditions which permit the production of tyrosine or a composition comprising tyrosine in said non-human organism or in the culture medium surrounding said non-human organism.

[13764] Accordingly, the present invention relates to a process for the production of phenylalanine, which comprises
[13765] (a) increasing or generating one or more activities selected from the group consisting of at5g21910-protein in a non-human organism or a part thereof, preferably a microorganism, a plant cell, a plant or a part thereof, as compared to a corresponding non-transformed wild type non-human organism or a part thereof; and
[13766] (b) growing the non-human organism or a part thereof under conditions which permit the production of phenylalanine or a composition comprising phenylalanine in said non-human organism or in the culture medium surrounding said non-human organism.

[13767] Accordingly, the present invention relates to a process for the production of tyrosine, which comprises
[13768] (a) increasing or generating one or more activities selected from the group consisting of transcription factor in a non-human organism or a part thereof, preferably a microorganism, a plant cell, a plant or a part thereof, as compared to a corresponding non-transformed wild type non-human organism or a part thereof; and
[13769] (b) growing the non-human organism or a part thereof under conditions which permit the production of tyrosine or a composition comprising tyrosine in said non-human organism or in the culture medium surrounding said non-human organism.

[13770] Accordingly, the present invention relates to a process for the production of serine, which comprises
[13771] (a) increasing or generating one or more activities selected from the group consisting of thioredoxin in a non-human organism or a part thereof, preferably a microorganism, a plant cell, a plant or a part thereof, as compared to a corresponding non-transformed wild type non-human organism or a part thereof; and
[13772] (b) growing the non-human organism or a part thereof under conditions which permit the production of serine or a composition comprising serine in said non-human organism or in the culture medium surrounding said non-human organism.

[13773] Accordingly, the present invention relates to a process for the production of alanine, which comprises
[13774] (a) increasing or generating one or more activities selected from the group consisting of protein phosphatase in a non-human organism or a part thereof, preferably a microorganism, a plant cell, a plant or a part thereof, as compared to a corresponding non-transformed wild type non-human organism or a part thereof; and
[13775] (b) growing the non-human organism or a part thereof under conditions which permit the production of alanine or a composition comprising alanine in said non-human organism or in the culture medium surrounding said non-human organism.

[13776] Accordingly, the present invention relates to a process for the production of citrulline, which comprises
[13777] (a) increasing or generating one or more activities selected from the group consisting of protein phosphatase in a non-human organism or a part thereof, preferably a microorganism, a plant cell, a plant or a part thereof, as compared to a corresponding non-transformed wild type non-human organism or a part thereof; and
[13778] (b) growing the non-human organism or a part thereof under conditions which permit the production of citrulline or a composition comprising citrulline in said non-human organism or in the culture medium surrounding said non-human organism.

[13779] Accordingly, the present invention relates to a process for the production of citrulline, which comprises
[13780] (a) increasing or generating one or more activities selected from the group consisting of protein phosphatase in a non-human organism or a part thereof, preferably a microorganism, a plant cell, a plant or a part thereof, as compared to a corresponding non-transformed wild type non-human organism or a part thereof; and
[13781] (b) growing the non-human organism or a part thereof under conditions which permit the production of citrulline or a composition comprising citrulline in said non-human organism or in the culture medium surrounding said non-human organism.

[13782] Accordingly, the present invention relates to a process for the production of phenylalanine, which comprises
[13783] (a) increasing or generating one or more activities selected from the group consisting of RNA-binding protein in a non-human organism or a part thereof, preferably a microorganism, a plant cell, a plant or a part thereof, as compared to a corresponding non-transformed wild type non-human organism or a part thereof; and
[13784] (b) growing the non-human organism or a part thereof under conditions which permit the production of phenylalanine or a composition comprising phenylalanine in said non-human organism or in the culture medium surrounding said non-human organism.

[13785] Accordingly, the present invention relates to a process for the production of tyrosine, which comprises
[13786] (a) increasing or generating one or more activities selected from the group consisting of RNA-binding protein in a non-human organism or a part thereof, preferably a microorganism, a plant cell, a plant or a part thereof, as compared to a corresponding non-transformed wild type non-human organism or a part thereof; and
[13787] (b) growing the non-human organism or a part thereof under conditions which permit the production of tyrosine or a composition comprising tyrosine in said non-human organism or in the culture medium surrounding said non-human organism.

[13788] Accordingly, the present invention relates to a process for the production of alanine, which comprises
[13789] (a) increasing or generating one or more activities selected from the group consisting of pyruvate kinase in a non-human organism or a part thereof, preferably a microorganism, a plant cell, a plant or a part thereof, as compared to a corresponding non-transformed wild type non-human organism or a part thereof; and
[13790] (b) growing the non-human organism or a part thereof under conditions which permit the production of alanine or a composition comprising alanine in said non-human organism or in the culture medium surrounding said non-human organism.

[13791] Accordingly, the present invention relates to a process for the production of alanine, which comprises
[13792] (a) increasing or generating one or more activities selected from the group consisting of zinc finger protein in a non-human organism or a part thereof, preferably a microorganism, a plant cell, a plant or a part thereof, as compared to a corresponding non-transformed wild type non-human organism or a part thereof; and
[13793] (b) growing the non-human organism or a part thereof under conditions which permit the production of alanine or a composition comprising alanine in said non-human organism or in the culture medium surrounding said non-human organism.

[13794] Accordingly, the present invention relates to a process for the production of phenylalanine, which comprises
[13795] (a) increasing or generating one or more activities selected from the group consisting of zinc finger protein in a non-human organism or a part thereof, preferably a microorganism, a plant cell, a plant or a part thereof, as compared to a corresponding non-transformed wild type non-human organism or a part thereof; and
[13796] (b) growing the non-human organism or a part thereof under conditions which permit the production of phenylalanine or a composition comprising phenylalanine in said non-human organism or in the culture medium surrounding said non-human organism.

[13797] Accordingly, the present invention relates to a process for the production of serine, which comprises
[13798] (a) increasing or generating one or more activities selected from the group consisting of zinc finger protein in a non-human organism or a part thereof, preferably a microorganism, a plant cell, a plant or a part thereof, as compared to a corresponding non-transformed wild type non-human organism or a part thereof; and
[13799] (b) growing the non-human organism or a part thereof under conditions which permit the production of serine or a composition comprising serine in said non-human organism or in the culture medium surrounding said non-human organism.

[13800] Accordingly, the present invention relates to a process for the production of 5-oxoproline, which comprises
[13801] (a) increasing or generating one or more activities selected from the group consisting of zinc finger protein in a non-human organism or a part thereof, preferably a microorganism, a plant cell, a plant or a part thereof, as compared to a corresponding non-transformed wild type non-human organism or a part thereof; and
[13802] (b) growing the non-human organism or a part thereof under conditions which permit the production of 5-oxoproline or a composition comprising 5-oxoproline in said non-human organism or in the culture medium surrounding said non-human organism.

[13803] Accordingly, the present invention relates to a process for the production of aspartate, which comprises
[13804] (a) increasing or generating one or more activities selected from the group consisting of

[13805] CDP-diacylglycerol-serine 0-phosphatidyltransferase in a non-human organism or a part thereof, preferably a microorganism, a plant cell, a plant or a part thereof, as compared to a corresponding non-transformed wild type non-human organism or a part thereof; and
[13806] (b) growing the non-human organism or a part thereof under conditions which permit the production of aspartate or a composition comprising aspartate in said non-human organism or in the culture medium surrounding said non-human organism.

[13807] Accordingly, the present invention relates to a process for the production of 5-oxoproline, which comprises
[13808] (a) increasing or generating one or more activities selected from the group consisting of

[13809] CDP-diacylglycerol-serine 0-phosphatidyltransferase in a non-human organism or a part thereof, preferably a microorganism, a plant cell, a plant or a part thereof, as compared to a corresponding non-transformed wild type non-human organism or a part thereof; and
[13810] (b) growing the non-human organism or a part thereof under conditions which permit the production of 5-oxoproline or a composition comprising 5-oxoproline in said non-human organism or in the culture medium surrounding said non-human organism.

[13811] Accordingly, the present invention relates to a process for the production of serine, which comprises
[13812] (a) increasing or generating one or more activities selected from the group consisting of Glycine cleavage system T aminomethyltransferase in a non-human organism or a part thereof, preferably a microorganism, a plant cell, a plant or a part thereof, as compared to a corresponding non-transformed wild type non-human organism or a part thereof; and
[13813] (b) growing the non-human organism or a part thereof under conditions which permit the production of serine or a composition comprising serine in said non-human organism or in the culture medium surrounding said non-human organism.

[13814] Accordingly, the present invention relates to a process for the production of serine, which comprises
[13815] (a) increasing or generating one or more activities selected from the group consisting of transcriptional regulator in a non-human organism or a part thereof, preferably a microorganism, a plant cell, a plant or a part thereof, as compared to a corresponding non-transformed wild type non-human organism or a part thereof; and
[13816] (b) growing the non-human organism or a part thereof under conditions which permit the production of serine or a composition comprising serine in said non-human organism or in the culture medium surrounding said non-human organism.

[13817] Accordingly, the present invention relates to a process for the production of aspartate, which comprises
[13818] (a) increasing or generating one or more activities selected from the group consisting of adenylylsulfate kinase in a non-human organism or a part thereof, preferably a microorganism, a plant cell, a plant or a part thereof, as compared to a corresponding non-transformed wild type non-human organism or a part thereof; and
[13819] (b) growing the non-human organism or a part thereof under conditions which permit the production of aspartate or a composition comprising aspartate in said non-human organism or in the culture medium surrounding said non-human organism.

[13820] Accordingly, the present invention relates to a process for the production of alanine, which comprises
[13821] (a) increasing or generating one or more activities selected from the group consisting of malic enzyme in a non-human organism or a part thereof, preferably a microorganism, a plant cell, a plant or a part thereof, as compared to a corresponding non-transformed wild type non-human organism or a part thereof; and
[13822] (b) growing the non-human organism or a part thereof under conditions which permit the production of alanine or a composition comprising alanine in said non-human organism or in the culture medium surrounding said non-human organism.

[13823] Accordingly, the present invention relates to a process for the production of phenylalanine, which comprises
[13824] (a) increasing or generating one or more activities selected from the group consisting of malic enzyme in a non-human organism or a part thereof, preferably a microorganism, a plant cell, a plant or a part thereof, as compared to a corresponding non-transformed wild type non-human organism or a part thereof; and
[13825] (b) growing the non-human organism or a part thereof under conditions which permit the production of phenylalanine or a composition comprising phenylalanine in said non-human organism or in the culture medium surrounding said non-human organism.

[13826] Accordingly, the present invention relates to a process for the production of serine, which comprises
[13827] (a) increasing or generating one or more activities selected from the group consisting of malic enzyme in a non-human organism or a part thereof, preferably a microorganism, a plant cell, a plant or a part thereof, as compared to a corresponding non-transformed wild type non-human organism or a part thereof; and
[13828] (b) growing the non-human organism or a part thereof under conditions which permit the production of serine or a composition comprising serine in said non-human organism or in the culture medium surrounding said non-human organism.

[13829] Accordingly, the present invention relates to a process for the production of alanine, which comprises
[13830] (a) increasing or generating one or more activities selected from the group consisting of sec-independent protein translocase in a non-human organism or a part thereof, preferably a microorganism, a plant cell, a plant or a part thereof, as compared to a corresponding non-transformed wild type non-human organism or a part thereof; and
[13831] (b) growing the non-human organism or a part thereof under conditions which permit the production of alanine or a composition comprising alanine in said non-human organism or in the culture medium surrounding said non-human organism.

[13832] Accordingly, the present invention relates to a process for the production of alanine, which comprises
[13833] (a) increasing or generating one or more activities selected from the group consisting of pyruvate kinase in a non-human organism or a part thereof, preferably a microorganism, a plant cell, a plant or a part thereof, as compared to a corresponding non-transformed wild type non-human organism or a part thereof; and
[13834] (b) growing the non-human organism or a part thereof under conditions which permit the production of alanine or a composition comprising alanine in said non-human organism or in the culture medium surrounding said non-human organism.

[13835] Accordingly, the present invention relates to a process for the production of alanine, which comprises
[13836] (a) increasing or generating one or more activities selected from the group consisting of beta-hydroxylase in a non-human organism or a part thereof, preferably a microorganism, a plant cell, a plant or a part thereof, as compared to a corresponding non-transformed wild type non-human organism or a part thereof; and
[13837] (b) growing the non-human organism or a part thereof under conditions which permit the production of alanine or a composition comprising alanine in said non-human organism or in the culture medium surrounding said non-human organism.

[13838] Accordingly, the present invention relates to a process for the production of aspartate, which comprises
[13839] (a) increasing or generating one or more activities selected from the group consisting of beta-hydroxylase in a non-human organism or a part thereof, preferably a microorganism, a plant cell, a plant or a part thereof, as compared to a corresponding non-transformed wild type non-human organism or a part thereof; and
[13840] (b) growing the non-human organism or a part thereof under conditions which permit the production of aspartate or a composition comprising aspartate in said non-human organism or in the culture medium surrounding said non-human organism.

[13841] Accordingly, the present invention relates to a process for the production of serine, which comprises
[13842] (a) increasing or generating one or more activities selected from the group consisting of beta-hydroxylase in a non-human organism or a part thereof, preferably a microorganism, a plant cell, a plant or a part thereof, as compared to a corresponding non-transformed wild type non-human organism or a part thereof; and
[13843] (b) growing the non-human organism or a part thereof under conditions which permit the production of serine or a composition comprising serine in said non-human organism or in the culture medium surrounding said non-human organism.

[13844] Accordingly, the present invention relates to a process for the production of aspartate, which comprises
[13845] (a) increasing or generating one or more activities selected from the group consisting of elongation factor Tu in a non-human organism or a part thereof, preferably a microorganism, a plant cell, a plant or a part thereof, as compared to a corresponding non-transformed wild type non-human organism or a part thereof; and
[13846] (b) growing the non-human organism or a part thereof under conditions which permit the production of aspartate or a composition comprising aspartate in said non-human organism or in the culture medium surrounding said non-human organism.

[13847] Accordingly, the present invention relates to a process for the production of phenylalanine, which comprises
[13848] (a) increasing or generating one or more activities selected from the group consisting of elongation factor Tu in a non-human organism or a part thereof, preferably a microorganism, a plant cell, a plant or a part thereof, as compared to a corresponding non-transformed wild type non-human organism or a part thereof; and
[13849] (b) growing the non-human organism or a part thereof under conditions which permit the production of phenylalanine or a composition comprising phenylalanine in said non-human organism or in the culture medium surrounding said non-human organism.

[13850] Accordingly, the present invention relates to a process for the production of serine, which comprises
[13851] (a) increasing or generating one or more activities selected from the group consisting of elongation factor Tu in a non-human organism or a part thereof, preferably a microorganism, a plant cell, a plant or a part thereof, as compared to a corresponding non-transformed wild type non-human organism or a part thereof; and
[13852] (b) growing the non-human organism or a part thereof under conditions which permit the production of serine or a composition comprising serine in said non-human organism or in the culture medium surrounding said non-human organism.

[13853] Accordingly, the present invention relates to a process for the production of tyrosine, which comprises
[13854] (a) increasing or generating one or more activities selected from the group consisting of elongation factor Tu in a non-human organism or a part thereof, preferably a microorganism, a plant cell, a plant or a part thereof, as compared to a corresponding non-transformed wild type non-human organism or a part thereof; and
[13855] (b) growing the non-human organism or a part thereof under conditions which permit the production of tyrosine or a composition comprising tyrosine in said non-human organism or in the culture medium surrounding said non-human organism.

[13856] Accordingly, the present invention relates to a process for the production of 5-oxoproline, which comprises
[13857] (a) increasing or generating one or more activities selected from the group consisting of elongation factor Tu in a non-human organism or a part thereof, preferably a microorganism, a plant cell, a plant or a part thereof, as compared to a corresponding non-transformed wild type non-human organism or a part thereof; and
[13858] (b) growing the non-human organism or a part thereof under conditions which permit the production of 5-oxoproline or a composition comprising 5-oxoproline in said non-human organism or in the culture medium surrounding said non-human organism.

[13859] Accordingly, the present invention relates to a process for the production of tyrosine, which comprises
[13860] (a) increasing or generating one or more activities selected from the group consisting of 30S ribosomal protein S3 in a non-human organism or a part thereof, preferably a microorganism, a plant cell, a plant or a part thereof, as compared to a corresponding non-transformed wild type non-human organism or a part thereof; and
[13861] (b) growing the non-human organism or a part thereof under conditions which permit the production of tyrosine or a composition comprising tyrosine in said non-human organism or in the culture medium surrounding said non-human organism.

[13862] Accordingly, the present invention relates to a process for the production of asparagine, which comprises
[13863] (a) increasing or generating one or more activities selected from the group consisting of 50S ribosomal protein L14 in a non-human organism or a part thereof, preferably a microorganism, a plant cell, a plant or a part thereof, as compared to a corresponding non-transformed wild type non-human organism or a part thereof; and
[13864] (b) growing the non-human organism or a part thereof under conditions which permit the production of asparagine or a composition comprising asparagine in said non-human organism or in the culture medium surrounding said non-human organism.

[13865] Accordingly, the present invention relates to a process for the production of tyrosine, which comprises
[13866] (a) increasing or generating one or more activities selected from the group consisting of ABC transporter permease protein in a non-human organism or a part thereof, preferably a microorganism, a plant cell, a plant or a part thereof, as compared to a corresponding non-transformed wild type non-human organism or a part thereof; and
[13867] (b) growing the non-human organism or a part thereof under conditions which permit the production of tyrosine or a composition comprising tyrosine in said non-human organism or in the culture medium surrounding said non-human organism.

[13868] Accordingly, the present invention relates to a process for the production of aspartate, which comprises
[13869] (a) increasing or generating one or more activities selected from the group consisting of acyl-CoA synthase in a non-human organism or a part thereof, preferably a microorganism, a plant cell, a plant or a part thereof, as compared to a corresponding non-transformed wild type non-human organism or a part thereof; and
[13870] (b) growing the non-human organism or a part thereof under conditions which permit the production of aspartate or a composition comprising aspartate in said non-human organism or in the culture medium surrounding said non-human organism.

[13871] Accordingly, the present invention relates to a process for the production of tyrosine, which comprises
[13872] (a) increasing or generating one or more activities selected from the group consisting of acyl-CoA synthase in a non-human organism or a part thereof, preferably a microorganism, a plant cell, a plant or a part thereof, as compared to a corresponding non-transformed wild type non-human organism or a part thereof; and
[13873] (b) growing the non-human organism or a part thereof under conditions which permit the production of tyrosine or a composition comprising tyrosine in said non-human organism or in the culture medium surrounding said non-human organism.

[13874] Accordingly, the present invention relates to a process for the production of 5-oxoproline, which comprises
[13875] (a) increasing or generating one or more activities selected from the group consisting of acyl-CoA synthase in a non-human organism or a part thereof, preferably a microorganism, a plant cell, a plant or a part thereof, as compared to a corresponding non-transformed wild type non-human organism or a part thereof; and
[13876] (b) growing the non-human organism or a part thereof under conditions which permit the production of 5-oxoproline or a composition comprising 5-oxoproline in said non-human organism or in the culture medium surrounding said non-human organism.

[13877] Accordingly, the present invention relates to a process for the production of aspartate, which comprises
[13878] (a) increasing or generating one or more activities selected from the group consisting of 2-oxoglutarate dehydrogenase E1 subunit in a non-human organism or a part thereof, preferably a microorganism, a plant cell, a plant or a part thereof, as compared to a corresponding non-transformed wild type non-human organism or a part thereof; and
[13879] (b) growing the non-human organism or a part thereof under conditions which permit the production of aspartate or a composition comprising aspartate in said non-human organism or in the culture medium surrounding said non-human organism.

[13880] Accordingly, the present invention relates to a process for the production of 5-oxoproline, which comprises
[13881] (a) increasing or generating one or more activities selected from the group consisting of 2-oxoglutarate dehydrogenase E1 subunit in a non-human organism or a part thereof, preferably a microorganism, a plant cell, a plant or a part thereof, as compared to a corresponding non-transformed wild type non-human organism or a part thereof; and
[13882] (b) growing the non-human organism or a part thereof under conditions which permit the production of 5-oxoproline or a composition comprising 5-oxoproline in said non-human organism or in the culture medium surrounding said non-human organism.

[13883] Accordingly, the present invention relates to a process for the production of serine, which comprises
[13884] (a) increasing or generating one or more activities selected from the group consisting of

[13885] GDP-mannose dehydrogenase in a non-human organism or a part thereof, preferably a microorganism, a plant cell, a plant or a part thereof, as compared to a corresponding non-transformed wild type non-human organism or a part thereof; and
[13886] (b) growing the non-human organism or a part thereof under conditions which permit the production of serine or a composition comprising serine in said non-human organism or in the culture medium surrounding said non-human organism.

[13887] Accordingly, the present invention relates to a process for the production of serine, which comprises
[13888] (a) increasing or generating one or more activities selected from the group consisting of transcriptional regulator in a non-human organism or a part thereof, preferably a microorganism, a plant cell, a plant or a part thereof, as compared to a corresponding non-transformed wild type non-human organism or a part thereof; and
[13889] (b) growing the non-human organism or a part thereof under conditions which permit the production of serine or a composition comprising serine in said non-human organism or in the culture medium surrounding said non-human organism.

[13890] Accordingly, the present invention relates to a process for the production of phenylalanine, which comprises
[13891] (a) increasing or generating one or more activities selected from the group consisting of transcriptional regulator in a non-human organism or a part thereof, preferably a microorganism, a plant cell, a plant or a part thereof, as compared to a corresponding non-transformed wild type non-human organism or a part thereof; and
[13892] (b) growing the non-human organism or a part thereof under conditions which permit the production of phenylalanine or a composition comprising phenylalanine in said non-human organism or in the culture medium surrounding said non-human organism.

[13893] Accordingly, the present invention relates to a process for the production of aspartate, which comprises
[13894] (a) increasing or generating one or more activities selected from the group consisting of oxidoreductase in a non-human organism or a part thereof, preferably a microorganism, a plant cell, a plant or a part thereof, as compared to a corresponding non-transformed wild type non-human organism or a part thereof; and
[13895] (b) growing the non-human organism or a part thereof under conditions which permit the production of aspartate or a composition comprising aspartate in said non-human organism or in the culture medium surrounding said non-human organism.

[13896] Accordingly, the present invention relates to a process for the production of tyrosine, which comprises
[13897] (a) increasing or generating one or more activities selected from the group consisting of oxidoreductase in a non-human organism or a part thereof, preferably a microorganism, a plant cell, a plant or a part thereof, as compared to a corresponding non-transformed wild type non-human organism or a part thereof; and
[13898] (b) growing the non-human organism or a part thereof under conditions which permit the production of tyrosine or a composition comprising tyrosine in said non-human organism or in the culture medium surrounding said non-human organism.

[13899] Accordingly, the present invention relates to a process for the production of citrulline, which comprises
[13900] (a) increasing or generating one or more activities selected from the group consisting of lysyl-tRNA synthetase in a non-human organism or a part thereof, preferably a microorganism, a plant cell, a plant or a part thereof, as compared to a corresponding non-transformed wild type non-human organism or a part thereof; and
[13901] (b) growing the non-human organism or a part thereof under conditions which permit the production of citrulline or a composition comprising citrulline in said non-human organism or in the culture medium surrounding said non-human organism.

[13902] Accordingly, the present invention relates to a process for the production of asparagine, which comprises
[13903] (a) increasing or generating one or more activities selected from the group consisting of ABC transporter component in a non-human organism or a part thereof, preferably a microorganism, a plant cell, a plant or a part thereof, as compared to a corresponding non-transformed wild type non-human organism or a part thereof; and
[13904] (b) growing the non-human organism or a part thereof under conditions which permit the production of asparagine or a composition comprising asparagine in said non-human organism or in the culture medium surrounding said non-human organism.

[13905] Accordingly, the present invention relates to a process for the production of aspartate, which comprises
[13906] (a) increasing or generating one or more activities selected from the group consisting of glucose-1-phosphate cytidylyltransferase in a non-human organism or a part thereof, preferably a microorganism, a plant cell, a plant or a part thereof, as compared to a corresponding non-transformed wild type non-human organism or a part thereof; and
[13907] (b) growing the non-human organism or a part thereof under conditions which permit the production of aspartate or a composition comprising aspartate in said non-human organism or in the culture medium surrounding said non-human organism.

[13908] Accordingly, the present invention relates to a process for the production of glycine, which comprises
[13909] (a) increasing or generating one or more activities selected from the group consisting of CDP-glucose-4,6-dehydratase in a non-human organism or a part thereof, preferably a microorganism, a plant cell, a plant or a part thereof, as compared to a corresponding non-transformed wild type non-human organism or a part thereof; and
[13910] (b) growing the non-human organism or a part thereof under conditions which permit the production of glycine or a composition comprising glycine in said non-human organism or in the culture medium surrounding said non-human organism.

[13911] Accordingly, the present invention relates to a process for the production of phenylalanine, which comprises
[13912] (a) increasing or generating one or more activities selected from the group consisting of enoyl-CoA hydratase in a non-human organism or a part thereof, preferably a microorganism, a plant cell, a plant or a part thereof, as compared to a corresponding non-transformed wild type non-human organism or a part thereof; and
[13913] (b) growing the non-human organism or a part thereof under conditions which permit the production of phenylalanine or a composition comprising phenylalanine in said non-human organism or in the culture medium surrounding said non-human organism.

[13914] Accordingly, the present invention relates to a process for the production of alanine, which comprises
[13915] (a) increasing or generating one or more activities selected from the group consisting of glutathione peroxidase in a non-human organism or a part thereof, preferably a microorganism, a plant cell, a plant or a part thereof, as compared to a corresponding non-transformed wild type non-human organism or a part thereof; and
[13916] (b) growing the non-human organism or a part thereof under conditions which permit the production of alanine or a composition comprising alanine in said non-human organism or in the culture medium surrounding said non-human organism.

[13917] Accordingly, the present invention relates to a process for the production of asparagine, which comprises
[13918] (a) increasing or generating one or more activities selected from the group consisting of aminotransferase in a non-human organism or a part thereof, preferably a microorganism, a plant cell, a plant or a part thereof, as compared to a corresponding non-transformed wild type non-human organism or a part thereof; and
[13919] (b) growing the non-human organism or a part thereof under conditions which permit the production of asparagine or a composition comprising asparagine in said non-human organism or in the culture medium surrounding said non-human organism.

[13920] Accordingly, the present invention relates to a process for the production of phenylalanine, which comprises
[13921] (a) increasing or generating one or more activities selected from the group consisting of aminotransferase in a non-human organism or a part thereof, preferably a microorganism, a plant cell, a plant or a part thereof, as compared to a corresponding non-transformed wild type non-human organism or a part thereof; and
[13922] (b) growing the non-human organism or a part thereof under conditions which permit the production of phenylalanine or a composition comprising phenylalanine in said non-human organism or in the culture medium surrounding said non-human organism.

[13923] Accordingly, the present invention relates to a process for the production of tyrosine, which comprises
[13924] (a) increasing or generating one or more activities selected from the group consisting of NADH-quinone oxidoreductase subunit in a non-human organism or a part thereof, preferably a microorganism, a plant cell, a plant or a part thereof, as compared to a corresponding non-transformed wild type non-human organism or a part thereof; and
[13925] (b) growing the non-human organism or a part thereof under conditions which permit the production of tyrosine or a composition comprising tyrosine in said non-human organism or in the culture medium surrounding said non-human organism.

[13926] Accordingly, the present invention relates to a process for the production of phenylalanine, which comprises
[13927] (a) increasing or generating one or more activities selected from the group consisting of glutamate-ammonia-ligase in a non-human organism or a part thereof, preferably a microorganism, a plant cell, a plant or a part thereof, as compared to a corresponding non-transformed wild type non-human organism or a part thereof; and
[13928] (b) growing the non-human organism or a part thereof under conditions which permit the production of phenylalanine or a composition comprising phenylalanine in said non-human organism or in the culture medium surrounding said non-human organism.

[13929] Accordingly, the present invention relates to a process for the production of tyrosine, which comprises
[13930] (a) increasing or generating one or more activities selected from the group consisting of glutamate-ammonia-ligase in a non-human organism or a part thereof, preferably a microorganism, a plant cell, a plant or a part thereof, as compared to a corresponding non-transformed wild type non-human organism or a part thereof; and
[13931] (b) growing the non-human organism or a part thereof under conditions which permit the production of tyrosine or a composition comprising tyrosine in said non-human organism or in the culture medium surrounding said non-human organism.

[13932] Accordingly, the present invention relates to a process for the production of 5-oxoproline, which comprises
[13933] (a) increasing or generating one or more activities selected from the group consisting of RNA polymerase sigma factor in a non-human organism or a part thereof, preferably a microorganism, a plant cell, a plant or a part thereof, as compared to a corresponding non-transformed wild type non-human organism or a part thereof; and
[13934] (b) growing the non-human organism or a part thereof under conditions which permit the production of 5-oxoproline or a composition comprising 5-oxoproline in said non-human organism or in the culture medium surrounding said non-human organism.

[13935] Accordingly, the present invention relates to a process for the production of phenylalanine, which comprises
[13936] (a) increasing or generating one or more activities selected from the group consisting of hydrolase in a non-human organism or a part thereof, preferably a microorganism, a plant cell, a plant or a part thereof, as compared to a corresponding non-transformed wild type non-human organism or a part thereof; and
[13937] (b) growing the non-human organism or a part thereof under conditions which permit the production of phenylalanine or a composition comprising phenylalanine in said non-human organism or in the culture medium surrounding said non-human organism.

[13938] Accordingly, the present invention relates to a process for the production of tyrosine, which comprises
[13939] (a) increasing or generating one or more activities selected from the group consisting of hydrolase in a non-human organism or a part thereof, preferably a microorganism, a plant cell, a plant or a part thereof, as compared to a corresponding non-transformed wild type non-human organism or a part thereof; and
[13940] (b) growing the non-human organism or a part thereof under conditions which permit the production of tyrosine or a composition comprising tyrosine in said non-human organism or in the culture medium surrounding said non-human organism.

[13941] Accordingly, the present invention relates to a process for the production of 5-oxoproline, which comprises
[13942] (a) increasing or generating one or more activities selected from the group consisting of hydrolase in a non-human organism or a part thereof, preferably a microorganism, a plant cell, a plant or a part thereof, as compared to a corresponding non-transformed wild type non-human organism or a part thereof; and
[13943] (b) growing the non-human organism or a part thereof under conditions which permit the production of 5-oxoproline or a composition comprising 5-oxoproline in said non-human organism or in the culture medium surrounding said non-human organism.

[13944] Accordingly, the present invention relates to a process for the production of aspartate, which comprises
[13945] (a) increasing or generating one or more activities selected from the group consisting of glutamate-ammonia-ligase in a non-human organism or a part thereof, preferably a microorganism, a plant cell, a plant or a part thereof, as compared to a corresponding non-transformed wild type non-human organism or a part thereof; and
[13946] (b) growing the non-human organism or a part thereof under conditions which permit the production of aspartate or a composition comprising aspartate in said non-human organism or in the culture medium surrounding said non-human organism.

[13947] Accordingly, the present invention relates to a process for the production of serine, which comprises
[13948] (a) increasing or generating one or more activities selected from the group consisting of glutamate-ammonia-ligase in a non-human organism or a part thereof, preferably a microorganism, a plant cell, a plant or a part thereof, as compared to a corresponding non-transformed wild type non-human organism or a part thereof; and
[13949] (b) growing the non-human organism or a part thereof under conditions which permit the production of serine or a composition comprising serine in said non-human organism or in the culture medium surrounding said non-human organism.

[13950] Accordingly, the present invention relates to a process for the production of tyrosine, which comprises
[13951] (a) increasing or generating one or more activities selected from the group consisting of glutamate-ammonia-ligase in a non-human organism or a part thereof, preferably a microorganism, a plant cell, a plant or a part thereof, as compared to a corresponding non-transformed wild type non-human organism or a part thereof; and
[13952] (b) growing the non-human organism or a part thereof under conditions which permit the production of tyrosine or a composition comprising tyrosine in said non-human organism or in the culture medium surrounding said non-human organism.

[13953] Accordingly, the present invention relates to a process for the production of phenylalanine, which comprises
[13954] (a) increasing or generating one or more activities selected from the group consisting of fumarylacetoacetate hydrolase in a non-human organism or a part thereof, preferably a microorganism, a plant cell, a plant or a part thereof, as compared to a corresponding non-transformed wild type non-human organism or a part thereof; and
[13955] (b) growing the non-human organism or a part thereof under conditions which permit the production of phenylalanine or a composition comprising phenylalanine in said non-human organism or in the culture medium surrounding said non-human organism.

[13956] Accordingly, the present invention relates to a process for the production of tyrosine, which comprises
[13957] (a) increasing or generating one or more activities selected from the group consisting of fumarylacetoacetate hydrolase in a non-human organism or a part thereof, preferably a microorganism, a plant cell, a plant or a part thereof, as compared to a corresponding non-transformed wild type non-human organism or a part thereof; and
[13958] (b) growing the non-human organism or a part thereof under conditions which permit the production of tyrosine or a composition comprising tyrosine in said non-human organism or in the culture medium surrounding said non-human organism.

[13959] Accordingly, the present invention relates to a process for the production of serine, which comprises
[13960] (a) increasing or generating one or more activities selected from the group consisting of HesB/YadR/YfhF family protein in a non-human organism or a part thereof, preferably a microorganism, a plant cell, a plant or a part thereof, as compared to a corresponding non-transformed wild type non-human organism or a part thereof; and
[13961] (b) growing the non-human organism or a part thereof under conditions which permit the production of serine or a composition comprising serine in said non-human organism or in the culture medium surrounding said non-human organism.

[13962] Accordingly, the present invention relates to a process for the production of aspartate, which comprises
[13963] (a) increasing or generating one or more activities selected from the group consisting of peptidase in a non-human organism or a part thereof, preferably a microorganism, a plant cell, a plant or a part thereof, as compared to a corresponding non-transformed wild type non-human organism or a part thereof; and
[13964] (b) growing the non-human organism or a part thereof under conditions which permit the production of aspartate or a composition comprising aspartate in said non-human organism or in the culture medium surrounding said non-human organism.

[13965] Accordingly, the present invention relates to a process for the production of aspartate, which comprises
[13966] (a) increasing or generating one or more activities selected from the group consisting of L-aspartate oxidase in a non-human organism or a part thereof, preferably a microorganism, a plant cell, a plant or a part thereof, as compared to a corresponding non-transformed wild type non-human organism or a part thereof; and
[13967] (b) growing the non-human organism or a part thereof under conditions which permit the production of aspartate or a composition comprising aspartate in said non-human organism or in the culture medium surrounding said non-human organism.

[13968] Accordingly, the present invention relates to a process for the production of phenylalanine, which comprises
[13969] (a) increasing or generating one or more activities selected from the group consisting of

[13970] Chaperone protein CIpB in a non-human organism or a part thereof, preferably a microorganism, a plant cell, a plant or a part thereof, as compared to a corresponding non-transformed wild type non-human organism or a part thereof; and
[13971] (b) growing the non-human organism or a part thereof under conditions which permit the production of phenylalanine or a composition comprising phenylalanine in said non-human organism or in the culture medium surrounding said non-human organism.

[13972] Accordingly, the present invention relates to a process for the production of phenylalanine, which comprises
[13973] (a) increasing or generating one or more activities selected from the group consisting of electron transfer flavoprotein subunit beta in a non-human organism or a part thereof, preferably a microorganism, a plant cell, a plant or a part thereof, as compared to a corresponding non-transformed wild type non-human organism or a part thereof; and
[13974] (b) growing the non-human organism or a part thereof under conditions which permit the production of phenylalanine or a composition comprising phenylalanine in said non-human organism or in the culture medium surrounding said non-human organism.

[13975] Accordingly, the present invention relates to a process for the production of tyrosine, which comprises
[13976] (a) increasing or generating one or more activities selected from the group consisting of electron transfer flavoprotein subunit beta in a non-human organism or a part thereof, preferably a microorganism, a plant cell, a plant or a part thereof, as compared to a corresponding non-transformed wild type non-human organism or a part thereof; and
[13977] (b) growing the non-human organism or a part thereof under conditions which permit the production of tyrosine or a composition comprising tyrosine in said non-human organism or in the culture medium surrounding said non-human organism.

[13978] Accordingly, the present invention relates to a process for the production of citrulline, which comprises
[13979] (a) increasing or generating one or more activities selected from the group consisting of AX653549-protein in a non-human organism or a part thereof, preferably a microorganism, a plant cell, a plant or a part thereof, as compared to a corresponding non-transformed wild type non-human organism or a part thereof; and
[13980] (b) growing the non-human organism or a part thereof under conditions which permit the production of citrulline or a composition comprising citrulline in said non-human organism or in the culture medium surrounding said non-human organism.

[13981] Accordingly, the present invention relates to a process for the production of 5-oxoproline, which comprises
[13982] (a) increasing or generating one or more activities selected from the group consisting of AX653549-protein in a non-human organism or a part thereof, preferably a microorganism, a plant cell, a plant or a part thereof, as compared to a corresponding non-transformed wild type non-human organism or a part thereof; and
[13983] (b) growing the non-human organism or a part thereof under conditions which permit the production of 5-oxoproline or a composition comprising 5-oxoproline in said non-human organism or in the culture medium surrounding said non-human organism.

[13984] Accordingly, the present invention relates to a process for the production of aspartate, which comprises
[13985] (a) increasing or generating one or more activities selected from the group consisting of AY087308-protein in a non-human organism or a part thereof, preferably a microorganism, a plant cell, a plant or a part thereof, as compared to a corresponding non-transformed wild type non-human organism or a part thereof; and
[13986] (b) growing the non-human organism or a part thereof under conditions which permit the production of aspartate or a composition comprising aspartate in said non-human organism or in the culture medium surrounding said non-human organism.

[13987] Accordingly, the present invention relates to a process for the production of 5-oxoproline, which comprises
[13988] (a) increasing or generating one or more activities selected from the group consisting of AY087308-protein in a non-human organism or a part thereof, preferably a microorganism, a plant cell, a plant or a part thereof, as compared to a corresponding non-transformed wild type non-human organism or a part thereof; and
[13989] (b) growing the non-human organism or a part thereof under conditions which permit the production of 5-oxoproline or a composition comprising 5-oxoproline in said non-human organism or in the culture medium surrounding said non-human organism.

[13990] Accordingly, the present invention relates to a process for the production of alanine, which comprises
[13991] (a) increasing or generating one or more activities selected from the group consisting of threonine synthase in a non-human organism or a part thereof, preferably a microorganism, a plant cell, a plant or a part thereof, as compared to a corresponding non-transformed wild type non-human organism or a part thereof; and
[13992] (b) growing the non-human organism or a part thereof under conditions which permit the production of alanine or a composition comprising alanine in said non-human organism or in the culture medium surrounding said non-human organism.

[13993] Accordingly, the present invention relates to a process for the production of phenylalanine, which comprises
[13994] (a) increasing or generating one or more activities selected from the group consisting of threonine synthase in a non-human organism or a part thereof, preferably a microorganism, a plant cell, a plant or a part thereof, as compared to a corresponding non-transformed wild type non-human organism or a part thereof; and
[13995] (b) growing the non-human organism or a part thereof under conditions which permit the production of phenylalanine or a composition comprising phenylalanine in said non-human organism or in the culture medium surrounding said non-human organism.

[13996] Accordingly, the present invention relates to a process for the production of serine, which comprises
[13997] (a) increasing or generating one or more activities selected from the group consisting of threonine synthase in a non-human organism or a part thereof, preferably a microorganism, a plant cell, a plant or a part thereof, as compared to a corresponding non-transformed wild type non-human organism or a part thereof; and
[13998] (b) growing the non-human organism or a part thereof under conditions which permit the production of serine or a composition comprising serine in said non-human organism or in the culture medium surrounding said non-human organism.

[13999] Accordingly, the present invention relates to a process for the production of tyrosine, which comprises
[14000] (a) increasing or generating one or more activities selected from the group consisting of threonine synthase in a non-human organism or a part thereof, preferably a microorganism, a plant cell, a plant or a part thereof, as compared to a corresponding non-transformed wild type non-human organism or a part thereof; and
[14001] (b) growing the non-human organism or a part thereof under conditions which permit the production of tyrosine or a composition comprising tyrosine in said non-human organism or in the culture medium surrounding said non-human organism.

[14002] Accordingly, the present invention relates to a process for the production of 5-oxoproline, which comprises
[14003] (a) increasing or generating one or more activities selected from the group consisting of threonine synthase in a non-human organism or a part thereof, preferably a microorganism, a plant cell, a plant or a part thereof, as compared to a corresponding non-transformed wild type non-human organism or a part thereof; and
[14004] (b) growing the non-human organism or a part thereof under conditions which permit the production of 5-oxoproline or a composition comprising 5-oxoproline in said non-human organism or in the culture medium surrounding said non-human organism.

[14005] Accordingly, the present invention relates to a process for the production of phenylalanine, which comprises
[14006] (a) increasing or generating one or more activities selected from the group consisting of acetolactate synthase small subunit in a non-human organism or a part thereof, preferably a microorganism, a plant cell, a plant or a part thereof, as compared to a corresponding non-transformed wild type non-human organism or a part thereof; and
[14007] (b) growing the non-human organism or a part thereof under conditions which permit the production of phenylalanine or a composition comprising phenylalanine in said non-human organism or in the culture medium surrounding said non-human organism.

[14008] Accordingly, the present invention relates to a process for the production of glycine, which comprises
[14009] (a) increasing or generating one or more activities selected from the group consisting of glucose dehydrogenase in a non-human organism or a part thereof, preferably a microorganism, a plant cell, a plant or a part thereof, as compared to a corresponding non-transformed wild type non-human organism or a part thereof; and
[14010] (b) growing the non-human organism or a part thereof under conditions which permit the production of glycine or a composition comprising glycine in said non-human organism or in the culture medium surrounding said non-human organism.

[14011] Accordingly, the present invention relates to a process for the production of phenylalanine, which comprises
[14012] (a) increasing or generating one or more activities selected from the group consisting of glucose dehydrogenase in a non-human organism or a part thereof, preferably a microorganism, a plant cell, a plant or a part thereof, as compared to a corresponding non-transformed wild type non-human organism or a part thereof; and
[14013] (b) growing the non-human organism or a part thereof under conditions which permit the production of phenylalanine or a composition comprising phenylalanine in said non-human organism or in the culture medium surrounding said non-human organism.

[14014] Accordingly, the present invention relates to a process for the production of serine, which comprises
[14015] (a) increasing or generating one or more activities selected from the group consisting of glucose dehydrogenase in a non-human organism or a part thereof, preferably a microorganism, a plant cell, a plant or a part thereof, as compared to a corresponding non-transformed wild type non-human organism or a part thereof; and
[14016] (b) growing the non-human organism or a part thereof under conditions which permit the production of serine or a composition comprising serine in said non-human organism or in the culture medium surrounding said non-human organism.

[14017] Accordingly, the present invention relates to a process for the production of tyrosine, which comprises
[14018] (a) increasing or generating one or more activities selected from the group consisting of glucose dehydrogenase in a non-human organism or a part thereof, preferably a microorganism, a plant cell, a plant or a part thereof, as compared to a corresponding non-transformed wild type non-human organism or a part thereof; and
[14019] (b) growing the non-human organism or a part thereof under conditions which permit the production of tyrosine or a composition comprising tyrosine in said non-human organism or in the culture medium surrounding said non-human organism.

[14020] Accordingly, the present invention relates to a process for the production of asparagine, which comprises
[14021] (a) increasing or generating one or more activities selected from the group consisting of aspartate 1-decarboxylase in a non-human organism or a part thereof, preferably a microorganism, a plant cell, a plant or a part thereof, as compared to a corresponding non-transformed wild type non-human organism or a part thereof; and
[14022] (b) growing the non-human organism or a part thereof under conditions which permit the production of asparagine or a composition comprising asparagine in said non-human organism or in the culture medium surrounding said non-human organism.

[14023] Accordingly, the present invention relates to a process for the production of serine, which comprises
[14024] (a) increasing or generating one or more activities selected from the group consisting of aspartate 1-decarboxylase in a non-human organism or a part thereof, preferably a microorganism, a plant cell, a plant or a part thereof, as compared to a corresponding non-transformed wild type non-human organism or a part thereof; and
[14025] (b) growing the non-human organism or a part thereof under conditions which permit the production of serine or a composition comprising serine in said non-human organism or in the culture medium surrounding said non-human organism.

[14026] Accordingly, the present invention relates to a process for the production of alanine, which comprises
[14027] (a) increasing or generating one or more activities selected from the group consisting of serine protease in a non-human organism or a part thereof, preferably a microorganism, a plant cell, a plant or a part thereof, as compared to a corresponding non-transformed wild type non-human organism or a part thereof; and
[14028] (b) growing the non-human organism or a part thereof under conditions which permit the production of alanine or a composition comprising alanine in said non-human organism or in the culture medium surrounding said non-human organism.

[14029] Accordingly, the present invention relates to a process for the production of serine, which comprises
[14030] (a) increasing or generating one or more activities selected from the group consisting of serine protease in a non-human organism or a part thereof, preferably a microorganism, a plant cell, a plant or a part thereof, as compared to a corresponding non-transformed wild type non-human organism or a part thereof; and
[14031] (b) growing the non-human organism or a part thereof under conditions which permit the production of serine or a composition comprising serine in said non-human organism or in the culture medium surrounding said non-human organism.

[14032] Accordingly, the present invention relates to a process for the production of tyrosine, which comprises
[14033] (a) increasing or generating one or more activities selected from the group consisting of serine protease in a non-human organism or a part thereof, preferably a microorganism, a plant cell, a plant or a part thereof, as compared to a corresponding non-transformed wild type non-human organism or a part thereof; and
[14034] (b) growing the non-human organism or a part thereof under conditions which permit the production of tyrosine or a composition comprising tyrosine in said non-human organism or in the culture medium surrounding said non-human organism.

[14035] Accordingly, the present invention relates to a process for the production of serine, which comprises
[14036] (a) increasing or generating one or more activities selected from the group consisting of acyl-CoA dehydrogenase in a non-human organism or a part thereof, preferably a microorganism, a plant cell, a plant or a part thereof, as compared to a corresponding non-transformed wild type non-human organism or a part thereof; and
[14037] (b) growing the non-human organism or a part thereof under conditions which permit the production of serine or a composition comprising serine in said non-human organism or in the culture medium surrounding said non-human organism.

[14038] Accordingly, the present invention relates to a process for the production of tyrosine, which comprises
[14039] (a) increasing or generating one or more activities selected from the group consisting of acyl-CoA dehydrogenase in a non-human organism or a part thereof, preferably a microorganism, a plant cell, a plant or a part thereof, as compared to a corresponding non-transformed wild type non-human organism or a part thereof; and
[14040] (b) growing the non-human organism or a part thereof under conditions which permit the production of tyrosine or a composition comprising tyrosine in said non-human organism or in the culture medium surrounding said non-human organism.

[14041] Accordingly, the present invention relates to a process for the production of tyrosine, which comprises
[14042] (a) increasing or generating one or more activities selected from the group consisting of beta-galactosidase in a non-human organism or a part thereof, preferably a microorganism, a plant cell, a plant or a part thereof, as compared to a corresponding non-transformed wild type non-human organism or a part thereof; and
[14043] (b) growing the non-human organism or a part thereof under conditions which permit the production of tyrosine or a composition comprising tyrosine in said non-human organism or in the culture medium surrounding said non-human organism.

[14044] Accordingly, the present invention relates to a process for the production of 5-oxoproline, which comprises
[14045] (a) increasing or generating one or more activities selected from the group consisting of beta-galactosidase in a non-human organism or a part thereof, preferably a microorganism, a plant cell, a plant or a part thereof, as compared to a corresponding non-transformed wild type non-human organism or a part thereof; and
[14046] (b) growing the non-human organism or a part thereof under conditions which permit the production of 5-oxoproline or a composition comprising 5-oxoproline in said non-human organism or in the culture medium surrounding said non-human organism.

[14047] Accordingly, the present invention relates to a process for the production of glycine, which comprises
[14048] (a) increasing or generating one or more activities selected from the group consisting of 2,3-dihydroxyphenylpropionate 1,2-dioxygenase in a non-human organism or a part thereof, preferably a microorganism, a plant cell, a plant or a part thereof, as compared to a corresponding non-transformed wild type non-human organism or a part thereof; and
[14049] (b) growing the non-human organism or a part thereof under conditions which permit the production of glycine or a composition comprising glycine in said non-human organism or in the culture medium surrounding said non-human organism.

[14050] Accordingly, the present invention relates to a process for the production of phenylalanine, which comprises
[14051] (a) increasing or generating one or more activities selected from the group consisting of 2,3-dihydroxyphenylpropionate 1,2-dioxygenase in a non-human organism or a part thereof, preferably a microorganism, a plant cell, a plant or a part thereof, as compared to a corresponding non-transformed wild type non-human organism or a part thereof; and
[14052] (b) growing the non-human organism or a part thereof under conditions which permit the production of phenylalanine or a composition comprising phenylalanine in said non-human organism or in the culture medium surrounding said non-human organism.

[14053] Accordingly, the present invention relates to a process for the production of serine, which comprises
[14054] (a) increasing or generating one or more activities selected from the group consisting of 2,3-dihydroxyphenylpropionate 1,2-dioxygenase in a non-human organism or a part thereof, preferably a microorganism, a plant cell, a plant or a part thereof, as compared to a corresponding non-transformed wild type non-human organism or a part thereof; and
[14055] (b) growing the non-human organism or a part thereof under conditions which permit the production of serine or a composition comprising serine in said non-human organism or in the culture medium surrounding said non-human organism.

[14056] Accordingly, the present invention relates to a process for the production of tyrosine, which comprises
[14057] (a) increasing or generating one or more activities selected from the group consisting of 2,3-dihydroxyphenylpropionate 1,2-dioxygenase in a non-human organism or a part thereof, preferably a microorganism, a plant cell, a plant or a part thereof, as compared to a corresponding non-transformed wild type non-human organism or a part thereof; and
[14058] (b) growing the non-human organism or a part thereof under conditions which permit the production of tyrosine or a composition comprising tyrosine in said non-human organism or in the culture medium surrounding said non-human organism.

[14059] Accordingly, the present invention relates to a process for the production of aspartate, which comprises
[14060] (a) increasing or generating one or more activities selected from the group consisting of b0391-protein in a non-human organism or a part thereof, preferably a microorganism, a plant cell, a plant or a part thereof, as compared to a corresponding non-transformed wild type non-human organism or a part thereof; and
[14061] (b) growing the non-human organism or a part thereof under conditions which permit the production of aspartate or a composition comprising aspartate in said non-human organism or in the culture medium surrounding said non-human organism.

[14062] Accordingly, the present invention relates to a process for the production of asparagine, which comprises
[14063] (a) increasing or generating one or more activities selected from the group consisting of ATP-binding component of a transport system in a non-human organism or a part thereof, preferably a microorganism, a plant cell, a plant or a part thereof, as compared to a corresponding non-transformed wild type non-human organism or a part thereof; and
[14064] (b) growing the non-human organism or a part thereof under conditions which permit the production of asparagine or a composition comprising asparagine in said non-human organism or in the culture medium surrounding said non-human organism.

[14065] Accordingly, the present invention relates to a process for the production of aspartate, which comprises
[14066] (a) increasing or generating one or more activities selected from the group consisting of ATP-binding component of a transport system in a non-human organism or a part thereof, preferably a microorganism, a plant cell, a plant or a part thereof, as compared to a corresponding non-transformed wild type non-human organism or a part thereof; and
[14067] (b) growing the non-human organism or a part thereof under conditions which permit the production of aspartate or a composition comprising aspartate in said non-human organism or in the culture medium surrounding said non-human organism.

[14068] Accordingly, the present invention relates to a process for the production of phenylalanine, which comprises
[14069] (a) increasing or generating one or more activities selected from the group consisting of ATP-binding component of a transport system in a non-human organism or a part thereof, preferably a microorganism, a plant cell, a plant or a part thereof, as compared to a corresponding non-transformed wild type non-human organism or a part thereof; and
[14070] (b) growing the non-human organism or a part thereof under conditions which permit the production of phenylalanine or a composition comprising phenylalanine in said non-human organism or in the culture medium surrounding said non-human organism.

[14071] Accordingly, the present invention relates to a process for the production of serine, which comprises
[14072] (a) increasing or generating one or more activities selected from the group consisting of ATP-binding component of a transport system in a non-human organism or a part thereof, preferably a microorganism, a plant cell, a plant or a part thereof, as compared to a corresponding non-transformed wild type non-human organism or a part thereof; and
[14073] (b) growing the non-human organism or a part thereof under conditions which permit the production of serine or a composition comprising serine in said non-human organism or in the culture medium surrounding said non-human organism.

[14074] Accordingly, the present invention relates to a process for the production of tyrosine, which comprises
[14075] (a) increasing or generating one or more activities selected from the group consisting of ATP-binding component of a transport system in a non-human organism or a part thereof, preferably a microorganism, a plant cell, a plant or a part thereof, as compared to a corresponding non-transformed wild type non-human organism or a part thereof; and
[14076] (b) growing the non-human organism or a part thereof under conditions which permit the production of tyrosine or a composition comprising tyrosine in said non-human organism or in the culture medium surrounding said non-human organism.

[14077] Accordingly, the present invention relates to a process for the production of alanine, which comprises
[14078] (a) increasing or generating one or more activities selected from the group consisting of b0456-protein in a non-human organism or a part thereof, preferably a microorganism, a plant cell, a plant or a part thereof, as compared to a corresponding non-transformed wild type non-human organism or a part thereof; and
[14079] (b) growing the non-human organism or a part thereof under conditions which permit the production of alanine or a composition comprising alanine in said non-human organism or in the culture medium surrounding said non-human organism.

[14080] Accordingly, the present invention relates to a process for the production of aspartate, which comprises
[14081] (a) increasing or generating one or more activities selected from the group consisting of membrane transport protein in a non-human organism or a part thereof, preferably a microorganism, a plant cell, a plant or a part thereof, as compared to a corresponding non-transformed wild type non-human organism or a part thereof; and
[14082] (b) growing the non-human organism or a part thereof under conditions which permit the production of aspartate or a composition comprising aspartate in said non-human organism or in the culture medium surrounding said non-human organism.

[14083] Accordingly, the present invention relates to a process for the production of phenylalanine, which comprises
[14084] (a) increasing or generating one or more activities selected from the group consisting of membrane transport protein in a non-human organism or a part thereof, preferably a microorganism, a plant cell, a plant or a part thereof, as compared to a corresponding non-transformed wild type non-human organism or a part thereof; and
[14085] (b) growing the non-human organism or a part thereof under conditions which permit the production of phenylalanine or a composition comprising phenylalanine in said non-human organism or in the culture medium surrounding said non-human organism.

[14086] Accordingly, the present invention relates to a process for the production of tyrosine, which comprises
[14087] (a) increasing or generating one or more activities selected from the group consisting of membrane transport protein in a non-human organism or a part thereof, preferably a microorganism, a plant cell, a plant or a part thereof, as compared to a corresponding non-transformed wild type non-human organism or a part thereof; and
[14088] (b) growing the non-human organism or a part thereof under conditions which permit the production of tyrosine or a composition comprising tyrosine in said non-human organism or in the culture medium surrounding said non-human organism.

[14089] Accordingly, the present invention relates to a process for the production of homoserine, which comprises
[14090] (a) increasing or generating one or more activities selected from the group consisting of b0518-protein in a non-human organism or a part thereof, preferably a microorganism, a plant cell, a plant or a part thereof, as compared to a corresponding non-transformed wild type non-human organism or a part thereof; and
[14091] (b) growing the non-human organism or a part thereof under conditions which permit the production of homoserine or a composition comprising homoserine in said non-human organism or in the culture medium surrounding said non-human organism.

[14092] Accordingly, the present invention relates to a process for the production of aspartate, which comprises
[14093] (a) increasing or generating one or more activities selected from the group consisting of isochorismate synthase in a non-human organism or a part thereof, preferably a microorganism, a plant cell, a plant or a part thereof, as compared to a corresponding non-transformed wild type non-human organism or a part thereof; and
[14094] (b) growing the non-human organism or a part thereof under conditions which permit the production of aspartate or a composition comprising aspartate in said non-human organism or in the culture medium surrounding said non-human organism.

[14095] Accordingly, the present invention relates to a process for the production of phenylalanine, which comprises
[14096] (a) increasing or generating one or more activities selected from the group consisting of isochorismate synthase in a non-human organism or a part thereof, preferably a microorganism, a plant cell, a plant or a part thereof, as compared to a corresponding non-transformed wild type non-human organism or a part thereof; and
[14097] (b) growing the non-human organism or a part thereof under conditions which permit the production of phenylalanine or a composition comprising phenylalanine in said non-human organism or in the culture medium surrounding said non-human organism.

[14098] Accordingly, the present invention relates to a process for the production of serine, which comprises
[14099] (a) increasing or generating one or more activities selected from the group consisting of isochorismate synthase in a non-human organism or a part thereof, preferably a microorganism, a plant cell, a plant or a part thereof, as compared to a corresponding non-transformed wild type non-human organism or a part thereof; and
[14100] (b) growing the non-human organism or a part thereof under conditions which permit the production of serine or a composition comprising serine in said non-human organism or in the culture medium surrounding said non-human organism.

[14101] Accordingly, the present invention relates to a process for the production of tyrosine, which comprises
[14102] (a) increasing or generating one or more activities selected from the group consisting of isochorismate synthase in a non-human organism or a part thereof, preferably a microorganism, a plant cell, a plant or a part thereof, as compared to a corresponding non-transformed wild type non-human organism or a part thereof; and
[14103] (b) growing the non-human organism or a part thereof under conditions which permit the production of tyrosine or a composition comprising tyrosine in said non-human organism or in the culture medium surrounding said non-human organism.

[14104] Accordingly, the present invention relates to a process for the production of 3,4-dihydroxyphenylalanine (dopa), which comprises
[14105] (a) increasing or generating one or more activities selected from the group consisting of isochorismate synthase in a non-human organism or a part thereof, preferably a microorganism, a plant cell, a plant or a part thereof, as compared to a corresponding non-transformed wild type non-human organism or a part thereof; and
[14106] (b) growing the non-human organism or a part thereof under conditions which permit the production of 3,4-dihydroxyphenylalanine (dopa) or a composition comprising 3,4-dihydroxyphenylalanine (dopa) in said non-human organism or in the culture medium surrounding said non-human organism.

[14107] Accordingly, the present invention relates to a process for the production of 5-oxoproline, which comprises
[14108] (a) increasing or generating one or more activities selected from the group consisting of isochorismate synthase in a non-human organism or a part thereof, preferably a microorganism, a plant cell, a plant or a part thereof, as compared to a corresponding non-transformed wild type non-human organism or a part thereof; and
[14109] (b) growing the non-human organism or a part thereof under conditions which permit the production of 5-oxoproline or a composition comprising 5-oxoproline in said non-human organism or in the culture medium surrounding said non-human organism.

[14110] Accordingly, the present invention relates to a process for the production of tyrosine, which comprises
[14111] (a) increasing or generating one or more activities selected from the group consisting of zinc transporter in a non-human organism or a part thereof, preferably a microorganism, a plant cell, a plant or a part thereof, as compared to a corresponding non-transformed wild type non-human organism or a part thereof; and
[14112] (b) growing the non-human organism or a part thereof under conditions which permit the production of tyrosine or a composition comprising tyrosine in said non-human organism or in the culture medium surrounding said non-human organism.

[14113] Accordingly, the present invention relates to a process for the production of tyrosine, which comprises
[14114] (a) increasing or generating one or more activities selected from the group consisting of 3-deoxy-D-arabinoheptulosonate-7-phosphatesynthase in a non-human organism or a part thereof, preferably a microorganism, a plant cell, a plant or a part thereof, as compared to a corresponding non-transformed wild type non-human organism or a part thereof; and
[14115] (b) growing the non-human organism or a part thereof under conditions which permit the production of tyrosine or a composition comprising tyrosine in said non-human organism or in the culture medium surrounding said non-human organism.

[14116] Accordingly, the present invention relates to a process for the production of tyrosine, which comprises
[14117] (a) increasing or generating one or more activities selected from the group consisting of b0801-protein in a non-human organism or a part thereof, preferably a microorganism, a plant cell, a plant or a part thereof, as compared to a corresponding non-transformed wild type non-human organism or a part thereof; and
[14118] (b) growing the non-human organism or a part thereof under conditions which permit the production of tyrosine or a composition comprising tyrosine in said non-human organism or in the culture medium surrounding said non-human organism.

[14119] Accordingly, the present invention relates to a process for the production of alanine, which comprises
[14120] (a) increasing or generating one or more activities selected from the group consisting of asparaginase in a non-human organism or a part thereof, preferably a microorganism, a plant cell, a plant or a part thereof, as compared to a corresponding non-transformed wild type non-human organism or a part thereof; and
[14121] (b) growing the non-human organism or a part thereof under conditions which permit the production of alanine or a composition comprising alanine in said non-human organism or in the culture medium surrounding said non-human organism.

[14122] Accordingly, the present invention relates to a process for the production of glycine, which comprises
[14123] (a) increasing or generating one or more activities selected from the group consisting of b0841-protein in a non-human organism or a part thereof, preferably a microorganism, a plant cell, a plant or a part thereof, as compared to a corresponding non-transformed wild type non-human organism or a part thereof; and
[14124] (b) growing the non-human organism or a part thereof under conditions which permit the production of glycine or a composition comprising glycine in said non-human organism or in the culture medium surrounding said non-human organism.

[14125] Accordingly, the present invention relates to a process for the production of homoserine, which comprises
[14126] (a) increasing or generating one or more activities selected from the group consisting of b0841-protein in a non-human organism or a part thereof, preferably a microorganism, a plant cell, a plant or a part thereof, as compared to a corresponding non-transformed wild type non-human organism or a part thereof; and
[14127] (b) growing the non-human organism or a part thereof under conditions which permit the production of homoserine or a composition comprising homoserine in said non-human organism or in the culture medium surrounding said non-human organism.

[14128] Accordingly, the present invention relates to a process for the production of phenylalanine, which comprises
[14129] (a) increasing or generating one or more activities selected from the group consisting of major facilitator superfamily transporter protein in a non-human organism or a part thereof, preferably a microorganism, a plant cell, a plant or a part thereof, as compared to a corresponding non-transformed wild type non-human organism or a part thereof; and
[14130] (b) growing the non-human organism or a part thereof under conditions which permit the production of phenylalanine or a composition comprising phenylalanine in said non-human organism or in the culture medium surrounding said non-human organism.

[14131] Accordingly, the present invention relates to a process for the production of serine, which comprises
[14132] (a) increasing or generating one or more activities selected from the group consisting of major facilitator superfamily transporter protein in a non-human organism or a part thereof, preferably a microorganism, a plant cell, a plant or a part thereof, as compared to a corresponding non-transformed wild type non-human organism or a part thereof; and
[14133] (b) growing the non-human organism or a part thereof under conditions which permit the production of serine or a composition comprising serine in said non-human organism or in the culture medium surrounding said non-human organism.

[14134] Accordingly, the present invention relates to a process for the production of tyrosine, which comprises
[14135] (a) increasing or generating one or more activities selected from the group consisting of major facilitator superfamily transporter protein in a non-human organism or a part thereof, preferably a microorganism, a plant cell, a plant or a part thereof, as compared to a corresponding non-transformed wild type non-human organism or a part thereof; and
[14136] (b) growing the non-human organism or a part thereof under conditions which permit the production of tyrosine or a composition comprising tyrosine in said non-human organism or in the culture medium surrounding said non-human organism.

[14137] Accordingly, the present invention relates to a process for the production of 5-oxoproline, which comprises
[14138] (a) increasing or generating one or more activities selected from the group consisting of major facilitator superfamily transporter protein in a non-human organism or a part thereof, preferably a microorganism, a plant cell, a plant or a part thereof, as compared to a corresponding non-transformed wild type non-human organism or a part thereof; and
[14139] (b) growing the non-human organism or a part thereof under conditions which permit the production of 5-oxoproline or a composition comprising 5-oxoproline in said non-human organism or in the culture medium surrounding said non-human organism.

[14140] Accordingly, the present invention relates to a process for the production of citrulline, which comprises
[14141] (a) increasing or generating one or more activities selected from the group consisting of b0917-protein in a non-human organism or a part thereof, preferably a microorganism, a plant cell, a plant or a part thereof, as compared to a corresponding non-transformed wild type non-human organism or a part thereof; and
[14142] (b) growing the non-human organism or a part thereof under conditions which permit the production of citrulline or a composition comprising citrulline in said non-human organism or in the culture medium surrounding said non-human organism.

[14143] Accordingly, the present invention relates to a process for the production of glycine, which comprises
[14144] (a) increasing or generating one or more activities selected from the group consisting of b0917-protein in a non-human organism or a part thereof, preferably a microorganism, a plant cell, a plant or a part thereof, as compared to a corresponding non-transformed wild type non-human organism or a part thereof; and
[14145] (b) growing the non-human organism or a part thereof under conditions which permit the production of glycine or a composition comprising glycine in said non-human organism or in the culture medium surrounding said non-human organism.

[14146] Accordingly, the present invention relates to a process for the production of phenylalanine, which comprises
[14147] (a) increasing or generating one or more activities selected from the group consisting of b0917-protein in a non-human organism or a part thereof, preferably a microorganism, a plant cell, a plant or a part thereof, as compared to a corresponding non-transformed wild type non-human organism or a part thereof; and
[14148] (b) growing the non-human organism or a part thereof under conditions which permit the production of phenylalanine or a composition comprising phenylalanine in said non-human organism or in the culture medium surrounding said non-human organism.

[14149] Accordingly, the present invention relates to a process for the production of 5-oxoproline, which comprises
[14150] (a) increasing or generating one or more activities selected from the group consisting of b0917-protein in a non-human organism or a part thereof, preferably a microorganism, a plant cell, a plant or a part thereof, as compared to a corresponding non-transformed wild type non-human organism or a part thereof; and
[14151] (b) growing the non-human organism or a part thereof under conditions which permit the production of 5-oxoproline or a composition comprising 5-oxoproline in said non-human organism or in the culture medium surrounding said non-human organism.

[14152] Accordingly, the present invention relates to a process for the production of alanine, which comprises
[14153] (a) increasing or generating one or more activities selected from the group consisting of methylglyoxal synthase in a non-human organism or a part thereof, preferably a microorganism, a plant cell, a plant or a part thereof, as compared to a corresponding non-transformed wild type non-human organism or a part thereof; and
[14154] (b) growing the non-human organism or a part thereof under conditions which permit the production of alanine or a composition comprising alanine in said non-human organism or in the culture medium surrounding said non-human organism.

[14155] Accordingly, the present invention relates to a process for the production of phenylalanine, which comprises
[14156] (a) increasing or generating one or more activities selected from the group consisting of methylglyoxal synthase in a non-human organism or a part thereof, preferably a microorganism, a plant cell, a plant or a part thereof, as compared to a corresponding non-transformed wild type non-human organism or a part thereof; and
[14157] (b) growing the non-human organism or a part thereof under conditions which permit the production of phenylalanine or a composition comprising phenylalanine in said non-human organism or in the culture medium surrounding said non-human organism.

[14158] Accordingly, the present invention relates to a process for the production of tyrosine, which comprises
[14159] (a) increasing or generating one or more activities selected from the group consisting of methylglyoxal synthase in a non-human organism or a part thereof, preferably a microorganism, a plant cell, a plant or a part thereof, as compared to a corresponding non-transformed wild type non-human organism or a part thereof; and
[14160] (b) growing the non-human organism or a part thereof under conditions which permit the production of tyrosine or a composition comprising tyrosine in said non-human organism or in the culture medium surrounding said non-human organism.

[14161] Accordingly, the present invention relates to a process for the production of phenylalanine, which comprises
[14162] (a) increasing or generating one or more activities selected from the group consisting of phosphoanhydride phosphorylase in a non-human organism or a part thereof, preferably a microorganism, a plant cell, a plant or a part thereof, as compared to a corresponding non-transformed wild type non-human organism or a part thereof; and
[14163] (b) growing the non-human organism or a part thereof under conditions which permit the production of phenylalanine or a composition comprising phenylalanine in said non-human organism or in the culture medium surrounding said non-human organism.

[14164] Accordingly, the present invention relates to a process for the production of alanine, which comprises
[14165] (a) increasing or generating one or more activities selected from the group consisting of b1003-protein in a non-human organism or a part thereof, preferably a microorganism, a plant cell, a plant or a part thereof, as compared to a corresponding non-transformed wild type non-human organism or a part thereof; and
[14166] (b) growing the non-human organism or a part thereof under conditions which permit the production of alanine or a composition comprising alanine in said non-human organism or in the culture medium surrounding said non-human organism.

[14167] Accordingly, the present invention relates to a process for the production of aspartate, which comprises
[14168] (a) increasing or generating one or more activities selected from the group consisting of b1003-protein in a non-human organism or a part thereof, preferably a microorganism, a plant cell, a plant or a part thereof, as compared to a corresponding non-transformed wild type non-human organism or a part thereof; and
[14169] (b) growing the non-human organism or a part thereof under conditions which permit the production of aspartate or a composition comprising aspartate in said non-human organism or in the culture medium surrounding said non-human organism.

[14170] Accordingly, the present invention relates to a process for the production of phenylalanine, which comprises
[14171] (a) increasing or generating one or more activities selected from the group consisting of b1003-protein in a non-human organism or a part thereof, preferably a microorganism, a plant cell, a plant or a part thereof, as compared to a corresponding non-transformed wild type non-human organism or a part thereof; and
[14172] (b) growing the non-human organism or a part thereof under conditions which permit the production of phenylalanine or a composition comprising phenylalanine in said non-human organism or in the culture medium surrounding said non-human organism.

[14173] Accordingly, the present invention relates to a process for the production of serine, which comprises
[14174] (a) increasing or generating one or more activities selected from the group consisting of b1003-protein in a non-human organism or a part thereof, preferably a microorganism, a plant cell, a plant or a part thereof, as compared to a corresponding non-transformed wild type non-human organism or a part thereof; and
[14175] (b) growing the non-human organism or a part thereof under conditions which permit the production of serine or a composition comprising serine in said non-human organism or in the culture medium surrounding said non-human organism.

[14176] Accordingly, the present invention relates to a process for the production of tyrosine, which comprises
[14177] (a) increasing or generating one or more activities selected from the group consisting of b1003-protein in a non-human organism or a part thereof, preferably a microorganism, a plant cell, a plant or a part thereof, as compared to a corresponding non-transformed wild type non-human organism or a part thereof; and
[14178] (b) growing the non-human organism or a part thereof under conditions which permit the production of tyrosine or a composition comprising tyrosine in said non-human organism or in the culture medium surrounding said non-human organism.

[14179] Accordingly, the present invention relates to a process for the production of 3,4-dihydroxyphenylalanine (dopa), which comprises
[14180] (a) increasing or generating one or more activities selected from the group consisting of b1003-protein in a non-human organism or a part thereof, preferably a microorganism, a plant cell, a plant or a part thereof, as compared to a corresponding non-transformed wild type non-human organism or a part thereof; and
[14181] (b) growing the non-human organism or a part thereof under conditions which permit the production of 3,4-dihydroxyphenylalanine (dopa) or a composition comprising 3,4-dihydroxyphenylalanine (dopa) in said non-human organism or in the culture medium surrounding said non-human organism.

[14182] Accordingly, the present invention relates to a process for the production of 5-oxoproline, which comprises
[14183] (a) increasing or generating one or more activities selected from the group consisting of b1003-protein in a non-human organism or a part thereof, preferably a microorganism, a plant cell, a plant or a part thereof, as compared to a corresponding non-transformed wild type non-human organism or a part thereof; and
[14184] (b) growing the non-human organism or a part thereof under conditions which permit the production of 5-oxoproline or a composition comprising 5-oxoproline in said non-human organism or in the culture medium surrounding said non-human organism.

[14185] Accordingly, the present invention relates to a process for the production of citrulline, which comprises
[14186] (a) increasing or generating one or more activities selected from the group consisting of lipoprotein precursor in a non-human organism or a part thereof, preferably a microorganism, a plant cell, a plant or a part thereof, as compared to a corresponding non-transformed wild type non-human organism or a part thereof; and
[14187] (b) growing the non-human organism or a part thereof under conditions which permit the production of citrulline or a composition comprising citrulline in said non-human organism or in the culture medium surrounding said non-human organism.

[14188] Accordingly, the present invention relates to a process for the production of 5-oxoproline, which comprises
[14189] (a) increasing or generating one or more activities selected from the group consisting of lipoprotein precursor in a non-human organism or a part thereof, preferably a microorganism, a plant cell, a plant or a part thereof, as compared to a corresponding non-transformed wild type non-human organism or a part thereof; and
[14190] (b) growing the non-human organism or a part thereof under conditions which permit the production of 5-oxoproline or a composition comprising 5-oxoproline in said non-human organism or in the culture medium surrounding said non-human organism.

[14191] Accordingly, the present invention relates to a process for the production of aspartate, which comprises
[14192] (a) increasing or generating one or more activities selected from the group consisting of b1024-protein in a non-human organism or a part thereof, preferably a microorganism, a plant cell, a plant or a part thereof, as compared to a corresponding non-transformed wild type non-human organism or a part thereof; and
[14193] (b) growing the non-human organism or a part thereof under conditions which permit the production of aspartate or a composition comprising aspartate in said non-human organism or in the culture medium surrounding said non-human organism.

[14194] Accordingly, the present invention relates to a process for the production of aspartate, which comprises
[14195] (a) increasing or generating one or more activities selected from the group consisting of multidrug resistance protein in a non-human organism or a part thereof, preferably a microorganism, a plant cell, a plant or a part thereof, as compared to a corresponding non-transformed wild type non-human organism or a part thereof; and
[14196] (b) growing the non-human organism or a part thereof under conditions which permit the production of aspartate or a composition comprising aspartate in said non-human organism or in the culture medium surrounding said non-human organism.

[14197] Accordingly, the present invention relates to a process for the production of tyrosine, which comprises
[14198] (a) increasing or generating one or more activities selected from the group consisting of multidrug resistance protein in a non-human organism or a part thereof, preferably a microorganism, a plant cell, a plant or a part thereof, as compared to a corresponding non-transformed wild type non-human organism or a part thereof; and
[14199] (b) growing the non-human organism or a part thereof under conditions which permit the production of tyrosine or a composition comprising tyrosine in said non-human organism or in the culture medium surrounding said non-human organism.

[14200] Accordingly, the present invention relates to a process for the production of serine, which comprises
[14201] (a) increasing or generating one or more activities selected from the group consisting of b1137-protein in a non-human organism or a part thereof, preferably a microorganism, a plant cell, a plant or a part thereof, as compared to a corresponding non-transformed wild type non-human organism or a part thereof; and
[14202] (b) growing the non-human organism or a part thereof under conditions which permit the production of serine or a composition comprising serine in said non-human organism or in the culture medium surrounding said non-human organism.

[14203] Accordingly, the present invention relates to a process for the production of phenylalanine, which comprises
[14204] (a) increasing or generating one or more activities selected from the group consisting of b1155-protein in a non-human organism or a part thereof, preferably a microorganism, a plant cell, a plant or a part thereof, as compared to a corresponding non-transformed wild type non-human organism or a part thereof; and
[14205] (b) growing the non-human organism or a part thereof under conditions which permit the production of phenylalanine or a composition comprising phenylalanine in said non-human organism or in the culture medium surrounding said non-human organism.

[14206] Accordingly, the present invention relates to a process for the production of phenylalanine, which comprises
[14207] (a) increasing or generating one or more activities selected from the group consisting of b1163-protein in a non-human organism or a part thereof, preferably a microorganism, a plant cell, a plant or a part thereof, as compared to a corresponding non-transformed wild type non-human organism or a part thereof; and
[14208] (b) growing the non-human organism or a part thereof under conditions which permit the production of phenylalanine or a composition comprising phenylalanine in said non-human organism or in the culture medium surrounding said non-human organism.

[14209] Accordingly, the present invention relates to a process for the production of tyrosine, which comprises
[14210] (a) increasing or generating one or more activities selected from the group consisting of b1163-protein in a non-human organism or a part thereof, preferably a microorganism, a plant cell, a plant or a part thereof, as compared to a corresponding non-transformed wild type non-human organism or a part thereof; and
[14211] (b) growing the non-human organism or a part thereof under conditions which permit the production of tyrosine or a composition comprising tyrosine in said non-human organism or in the culture medium surrounding said non-human organism.

[14212] Accordingly, the present invention relates to a process for the production of citrulline, which comprises
[14213] (a) increasing or generating one or more activities selected from the group consisting of b1179-protein in a non-human organism or a part thereof, preferably a microorganism, a plant cell, a plant or a part thereof, as compared to a corresponding non-transformed wild type non-human organism or a part thereof; and
[14214] (b) growing the non-human organism or a part thereof under conditions which permit the production of citrulline or a composition comprising citrulline in said non-human organism or in the culture medium surrounding said non-human organism.

[14215] Accordingly, the present invention relates to a process for the production of alanine, which comprises
[14216] (a) increasing or generating one or more activities selected from the group consisting of sodium/proton antiporter in a non-human organism or a part thereof, preferably a microorganism, a plant cell, a plant or a part thereof, as compared to a corresponding non-transformed wild type non-human organism or a part thereof; and
[14217] (b) growing the non-human organism or a part thereof under conditions which permit the production of alanine or a composition comprising alanine in said non-human organism or in the culture medium surrounding said non-human organism.

[14218] Accordingly, the present invention relates to a process for the production of serine, which comprises
[14219] (a) increasing or generating one or more activities selected from the group consisting of sodium/proton antiporter in a non-human organism or a part thereof, preferably a microorganism, a plant cell, a plant or a part thereof, as compared to a corresponding non-transformed wild type non-human organism or a part thereof; and
[14220] (b) growing the non-human organism or a part thereof under conditions which permit the production of serine or a composition comprising serine in said non-human organism or in the culture medium surrounding said non-human organism.

[14221] Accordingly, the present invention relates to a process for the production of citrulline, which comprises
[14222] (a) increasing or generating one or more activities selected from the group consisting of b1205-protein in a non-human organism or a part thereof, preferably a microorganism, a plant cell, a plant or a part thereof, as compared to a corresponding non-transformed wild type non-human organism or a part thereof; and
[14223] (b) growing the non-human organism or a part thereof under conditions which permit the production of citrulline or a composition comprising citrulline in said non-human organism or in the culture medium surrounding said non-human organism.

[14224] Accordingly, the present invention relates to a process for the production of phenylalanine, which comprises
[14225] (a) increasing or generating one or more activities selected from the group consisting of b1229-protein in a non-human organism or a part thereof, preferably a microorganism, a plant cell, a plant or a part thereof, as compared to a corresponding non-transformed wild type non-human organism or a part thereof; and
[14226] (b) growing the non-human organism or a part thereof under conditions which permit the production of phenylalanine or a composition comprising phenylalanine in said non-human organism or in the culture medium surrounding said non-human organism.

[14227] Accordingly, the present invention relates to a process for the production of tyrosine, which comprises
[14228] (a) increasing or generating one or more activities selected from the group consisting of membrane protein in a non-human organism or a part thereof, preferably a microorganism, a plant cell, a plant or a part thereof, as compared to a corresponding non-transformed wild type non-human organism or a part thereof; and
[14229] (b) growing the non-human organism or a part thereof under conditions which permit the production of tyrosine or a composition comprising tyrosine in said non-human organism or in the culture medium surrounding said non-human organism.

[14230] Accordingly, the present invention relates to a process for the production of citrulline, which comprises
[14231] (a) increasing or generating one or more activities selected from the group consisting of b1259-protein in a non-human organism or a part thereof, preferably a microorganism, a plant cell, a plant or a part thereof, as compared to a corresponding non-transformed wild type non-human organism or a part thereof; and
[14232] (b) growing the non-human organism or a part thereof under conditions which permit the production of citrulline or a composition comprising citrulline in said non-human organism or in the culture medium surrounding said non-human organism.

[14233] Accordingly, the present invention relates to a process for the production of 5-oxoproline, which comprises
[14234] (a) increasing or generating one or more activities selected from the group consisting of b1259-protein in a non-human organism or a part thereof, preferably a microorganism, a plant cell, a plant or a part thereof, as compared to a corresponding non-transformed wild type non-human organism or a part thereof; and
[14235] (b) growing the non-human organism or a part thereof under conditions which permit the production of 5-oxoproline or a composition comprising 5-oxoproline in said non-human organism or in the culture medium surrounding said non-human organism.

[14236] Accordingly, the present invention relates to a process for the production of tyrosine, which comprises
[14237] (a) increasing or generating one or more activities selected from the group consisting of tryptophan biosynthesis protein in a non-human organism or a part thereof, preferably a microorganism, a plant cell, a plant or a part thereof, as compared to a corresponding non-transformed wild type non-human organism or a part thereof; and
[14238] (b) growing the non-human organism or a part thereof under conditions which permit the production of tyrosine or a composition comprising tyrosine in said non-human organism or in the culture medium surrounding said non-human organism.

[14239] Accordingly, the present invention relates to a process for the production of phenylalanine, which comprises
[14240] (a) increasing or generating one or more activities selected from the group consisting of anthranilate synthase component I in a non-human organism or a part thereof, preferably a microorganism, a plant cell, a plant or a part thereof, as compared to a corresponding non-transformed wild type non-human organism or a part thereof; and
[14241] (b) growing the non-human organism or a part thereof under conditions which permit the production of phenylalanine or a composition comprising phenylalanine in said non-human organism or in the culture medium surrounding said non-human organism.

[14242] Accordingly, the present invention relates to a process for the production of glycine, which comprises
[14243] (a) increasing or generating one or more activities selected from the group consisting of b1280-protein in a non-human organism or a part thereof, preferably a microorganism, a plant cell, a plant or a part thereof, as compared to a corresponding non-transformed wild type non-human organism or a part thereof; and
[14244] (b) growing the non-human organism or a part thereof under conditions which permit the production of glycine or a composition comprising glycine in said non-human organism or in the culture medium surrounding said non-human organism.

[14245] Accordingly, the present invention relates to a process for the production of serine, which comprises
[14246] (a) increasing or generating one or more activities selected from the group consisting of b1280-protein in a non-human organism or a part thereof, preferably a microorganism, a plant cell, a plant or a part thereof, as compared to a corresponding non-transformed wild type non-human organism or a part thereof; and
[14247] (b) growing the non-human organism or a part thereof under conditions which permit the production of serine or a composition comprising serine in said non-human organism or in the culture medium surrounding said non-human organism.

[14248] Accordingly, the present invention relates to a process for the production of 5-oxoproline, which comprises
[14249] (a) increasing or generating one or more activities selected from the group consisting of b1280-protein in a non-human organism or a part thereof, preferably a microorganism, a plant cell, a plant or a part thereof, as compared to a corresponding non-transformed wild type non-human organism or a part thereof; and
[14250] (b) growing the non-human organism or a part thereof under conditions which permit the production of 5-oxoproline or a composition comprising 5-oxoproline in said non-human organism or in the culture medium surrounding said non-human organism.

[14251] Accordingly, the present invention relates to a process for the production of alanine, which comprises
[14252] (a) increasing or generating one or more activities selected from the group consisting of glutamine synthetase in a non-human organism or a part thereof, preferably a microorganism, a plant cell, a plant or a part thereof, as compared to a corresponding non-transformed wild type non-human organism or a part thereof; and
[14253] (b) growing the non-human organism or a part thereof under conditions which permit the production of alanine or a composition comprising alanine in said non-human organism or in the culture medium surrounding said non-human organism.

[14254] Accordingly, the present invention relates to a process for the production of glycine, which comprises
[14255] (a) increasing or generating one or more activities selected from the group consisting of glutamine synthetase in a non-human organism or a part thereof, preferably a microorganism, a plant cell, a plant or a part thereof, as compared to a corresponding non-transformed wild type non-human organism or a part thereof; and
[14256] (b) growing the non-human organism or a part thereof under conditions which permit the production of glycine or a composition comprising glycine in said non-human organism or in the culture medium surrounding said non-human organism.

[14257] Accordingly, the present invention relates to a process for the production of phenylalanine, which comprises
[14258] (a) increasing or generating one or more activities selected from the group consisting of aldehyde dehydrogenase in a non-human organism or a part thereof, preferably a microorganism, a plant cell, a plant or a part thereof, as compared to a corresponding non-transformed wild type non-human organism or a part thereof; and
[14259] (b) growing the non-human organism or a part thereof under conditions which permit the production of phenylalanine or a composition comprising phenylalanine in said non-human organism or in the culture medium surrounding said non-human organism.

[14260] Accordingly, the present invention relates to a process for the production of tyrosine, which comprises
[14261] (a) increasing or generating one or more activities selected from the group consisting of aldehyde dehydrogenase in a non-human organism or a part thereof, preferably a microorganism, a plant cell, a plant or a part thereof, as compared to a corresponding non-transformed wild type non-human organism or a part thereof; and
[14262] (b) growing the non-human organism or a part thereof under conditions which permit the production of tyrosine or a composition comprising tyrosine in said non-human organism or in the culture medium surrounding said non-human organism.

[14263] Accordingly, the present invention relates to a process for the production of citrulline, which comprises
[14264] (a) increasing or generating one or more activities selected from the group consisting of ABC transporter substrate-binding protein in a non-human organism or a part thereof, preferably a microorganism, a plant cell, a plant or a part thereof, as compared to a corresponding non-transformed wild type non-human organism or a part thereof; and
[14265] (b) growing the non-human organism or a part thereof under conditions which permit the production of citrulline or a composition comprising citrulline in said non-human organism or in the culture medium surrounding said non-human organism.

[14266] Accordingly, the present invention relates to a process for the production of citrulline, which comprises
[14267] (a) increasing or generating one or more activities selected from the group consisting of b1330-protein in a non-human organism or a part thereof, preferably a microorganism, a plant cell, a plant or a part thereof, as compared to a corresponding non-transformed wild type non-human organism or a part thereof; and
[14268] (b) growing the non-human organism or a part thereof under conditions which permit the production of citrulline or a composition comprising citrulline in said non-human organism or in the culture medium surrounding said non-human organism.

[14269] Accordingly, the present invention relates to a process for the production of phenylalanine, which comprises
[14270] (a) increasing or generating one or more activities selected from the group consisting of ATPdependent RNA helicase in a non-human organism or a part thereof, preferably a microorganism, a plant cell, a plant or a part thereof, as compared to a corresponding non-transformed wild type non-human organism or a part thereof; and
[14271] (b) growing the non-human organism or a part thereof under conditions which permit the production of phenylalanine or a composition comprising phenylalanine in said non-human organism or in the culture medium surrounding said non-human organism.

[14272] Accordingly, the present invention relates to a process for the production of alanine, which comprises
[14273] (a) increasing or generating one or more activities selected from the group consisting of restriction alleviation protein in a non-human organism or a part thereof, preferably a microorganism, a plant cell, a plant or a part thereof, as compared to a corresponding non-transformed wild type non-human organism or a part thereof; and
[14274] (b) growing the non-human organism or a part thereof under conditions which permit the production of alanine or a composition comprising alanine in said non-human organism or in the culture medium surrounding said non-human organism.

[14275] Accordingly, the present invention relates to a process for the production of glycine, which comprises
[14276] (a) increasing or generating one or more activities selected from the group consisting of restriction alleviation protein in a non-human organism or a part thereof, preferably a microorganism, a plant cell, a plant or a part thereof, as compared to a corresponding non-transformed wild type non-human organism or a part thereof; and
[14277] (b) growing the non-human organism or a part thereof under conditions which permit the production of glycine or a composition comprising glycine in said non-human organism or in the culture medium surrounding said non-human organism.

[14278] Accordingly, the present invention relates to a process for the production of 5-oxoproline, which comprises
[14279] (a) increasing or generating one or more activities selected from the group consisting of lipoprotein precursor in a non-human organism or a part thereof, preferably a microorganism, a plant cell, a plant or a part thereof, as compared to a corresponding non-transformed wild type non-human organism or a part thereof; and
[14280] (b) growing the non-human organism or a part thereof under conditions which permit the production of 5-oxoproline or a composition comprising 5-oxoproline in said non-human organism or in the culture medium surrounding said non-human organism.

[14281] Accordingly, the present invention relates to a process for the production of alanine, which comprises
[14282] (a) increasing or generating one or more activities selected from the group consisting of b1445-protein in a non-human organism or a part thereof, preferably a microorganism, a plant cell, a plant or a part thereof, as compared to a corresponding non-transformed wild type non-human organism or a part thereof; and
[14283] (b) growing the non-human organism or a part thereof under conditions which permit the production of alanine or a composition comprising alanine in said non-human organism or in the culture medium surrounding said non-human organism.

[14284] Accordingly, the present invention relates to a process for the production of citrulline, which comprises
[14285] (a) increasing or generating one or more activities selected from the group consisting of b1445-protein in a non-human organism or a part thereof, preferably a microorganism, a plant cell, a plant or a part thereof, as compared to a corresponding non-transformed wild type non-human organism or a part thereof; and
[14286] (b) growing the non-human organism or a part thereof under conditions which permit the production of citrulline or a composition comprising citrulline in said non-human organism or in the culture medium surrounding said non-human organism.

[14287] Accordingly, the present invention relates to a process for the production of glycine, which comprises
[14288] (a) increasing or generating one or more activities selected from the group consisting of b1445-protein in a non-human organism or a part thereof, preferably a microorganism, a plant cell, a plant or a part thereof, as compared to a corresponding non-transformed wild type non-human organism or a part thereof; and
[14289] (b) growing the non-human organism or a part thereof under conditions which permit the production of glycine or a composition comprising glycine in said non-human organism or in the culture medium surrounding said non-human organism.

[14290] Accordingly, the present invention relates to a process for the production of phenylalanine, which comprises
[14291] (a) increasing or generating one or more activities selected from the group consisting of b1445-protein in a non-human organism or a part thereof, preferably a microorganism, a plant cell, a plant or a part thereof, as compared to a corresponding non-transformed wild type non-human organism or a part thereof; and
[14292] (b) growing the non-human organism or a part thereof under conditions which permit the production of phenylalanine or a composition comprising phenylalanine in said non-human organism or in the culture medium surrounding said non-human organism.

[14293] Accordingly, the present invention relates to a process for the production of serine, which comprises
[14294] (a) increasing or generating one or more activities selected from the group consisting of b1445-protein in a non-human organism or a part thereof, preferably a microorganism, a plant cell, a plant or a part thereof, as compared to a corresponding non-transformed wild type non-human organism or a part thereof; and
[14295] (b) growing the non-human organism or a part thereof under conditions which permit the production of serine or a composition comprising serine in said non-human organism or in the culture medium surrounding said non-human organism.

[14296] Accordingly, the present invention relates to a process for the production of alanine, which comprises
[14297] (a) increasing or generating one or more activities selected from the group consisting of NADP-dependent malic enzyme in a non-human organism or a part thereof, preferably a microorganism, a plant cell, a plant or a part thereof, as compared to a corresponding non-transformed wild type non-human organism or a part thereof; and
[14298] (b) growing the non-human organism or a part thereof under conditions which permit the production of alanine or a composition comprising alanine in said non-human organism or in the culture medium surrounding said non-human organism.

[14299] Accordingly, the present invention relates to a process for the production of glycine, which comprises
[14300] (a) increasing or generating one or more activities selected from the group consisting of NADP-dependent malic enzyme in a non-human organism or a part thereof, preferably a microorganism, a plant cell, a plant or a part thereof, as compared to a corresponding non-transformed wild type non-human organism or a part thereof; and
[14301] (b) growing the non-human organism or a part thereof under conditions which permit the production of glycine or a composition comprising glycine in said non-human organism or in the culture medium surrounding said non-human organism.

[14302] Accordingly, the present invention relates to a process for the production of phenylalanine, which comprises
[14303] (a) increasing or generating one or more activities selected from the group consisting of NADP-dependent malic enzyme in a non-human organism or a part thereof, preferably a microorganism, a plant cell, a plant or a part thereof, as compared to a corresponding non-transformed wild type non-human organism or a part thereof; and
[14304] (b) growing the non-human organism or a part thereof under conditions which permit the production of phenylalanine or a composition comprising phenylalanine in said non-human organism or in the culture medium surrounding said non-human organism.

[14305] Accordingly, the present invention relates to a process for the production of serine, which comprises
[14306] (a) increasing or generating one or more activities selected from the group consisting of NADP-dependent malic enzyme in a non-human organism or a part thereof, preferably a microorganism, a plant cell, a plant or a part thereof, as compared to a corresponding non-transformed wild type non-human organism or a part thereof; and
[14307] (b) growing the non-human organism or a part thereof under conditions which permit the production of serine or a composition comprising serine in said non-human organism or in the culture medium surrounding said non-human organism.

[14308] Accordingly, the present invention relates to a process for the production of tyrosine, which comprises
[14309] (a) increasing or generating one or more activities selected from the group consisting of NADP-dependent malic enzyme in a non-human organism or a part thereof, preferably a microorganism, a plant cell, a plant or a part thereof, as compared to a corresponding non-transformed wild type non-human organism or a part thereof; and
[14310] (b) growing the non-human organism or a part thereof under conditions which permit the production of tyrosine or a composition comprising tyrosine in said non-human organism or in the culture medium surrounding said non-human organism.

[14311] Accordingly, the present invention relates to a process for the production of asparagine, which comprises
[14312] (a) increasing or generating one or more activities selected from the group consisting of b1522-protein in a non-human organism or a part thereof, preferably a microorganism, a plant cell, a plant or a part thereof, as compared to a corresponding non-transformed wild type non-human organism or a part thereof; and
[14313] (b) growing the non-human organism or a part thereof under conditions which permit the production of asparagine or a composition comprising asparagine in said non-human organism or in the culture medium surrounding said non-human organism.

[14314] Accordingly, the present invention relates to a process for the production of aspartate, which comprises
[14315] (a) increasing or generating one or more activities selected from the group consisting of b1522-protein in a non-human organism or a part thereof, preferably a microorganism, a plant cell, a plant or a part thereof, as compared to a corresponding non-transformed wild type non-human organism or a part thereof; and
[14316] (b) growing the non-human organism or a part thereof under conditions which permit the production of aspartate or a composition comprising aspartate in said non-human organism or in the culture medium surrounding said non-human organism.

[14317] Accordingly, the present invention relates to a process for the production of phenylalanine, which comprises
[14318] (a) increasing or generating one or more activities selected from the group consisting of b1522-protein in a non-human organism or a part thereof, preferably a microorganism, a plant cell, a plant or a part thereof, as compared to a corresponding non-transformed wild type non-human organism or a part thereof; and
[14319] (b) growing the non-human organism or a part thereof under conditions which permit the production of phenylalanine or a composition comprising phenylalanine in said non-human organism or in the culture medium surrounding said non-human organism.

[14320] Accordingly, the present invention relates to a process for the production of serine, which comprises
[14321] (a) increasing or generating one or more activities selected from the group consisting of b1522-protein in a non-human organism or a part thereof, preferably a microorganism, a plant cell, a plant or a part thereof, as compared to a corresponding non-transformed wild type non-human organism or a part thereof; and
[14322] (b) growing the non-human organism or a part thereof under conditions which permit the production of serine or a composition comprising serine in said non-human organism or in the culture medium surrounding said non-human organism.

[14323] Accordingly, the present invention relates to a process for the production of tyrosine, which comprises
[14324] (a) increasing or generating one or more activities selected from the group consisting of b1522-protein in a non-human organism or a part thereof, preferably a microorganism, a plant cell, a plant or a part thereof, as compared to a corresponding non-transformed wild type non-human organism or a part thereof; and
[14325] (b) growing the non-human organism or a part thereof under conditions which permit the production of tyrosine or a composition comprising tyrosine in said non-human organism or in the culture medium surrounding said non-human organism.

[14326] Accordingly, the present invention relates to a process for the production of 5-oxoproline, which comprises
[14327] (a) increasing or generating one or more activities selected from the group consisting of b1522-protein in a non-human organism or a part thereof, preferably a microorganism, a plant cell, a plant or a part thereof, as compared to a corresponding non-transformed wild type non-human organism or a part thereof; and
[14328] (b) growing the non-human organism or a part thereof under conditions which permit the production of 5-oxoproline or a composition comprising 5-oxoproline in said non-human organism or in the culture medium surrounding said non-human organism.

[14329] Accordingly, the present invention relates to a process for the production of tyrosine, which comprises
[14330] (a) increasing or generating one or more activities selected from the group consisting of b1583-protein in a non-human organism or a part thereof, preferably a microorganism, a plant cell, a plant or a part thereof, as compared to a corresponding non-transformed wild type non-human organism or a part thereof; and
[14331] (b) growing the non-human organism or a part thereof under conditions which permit the production of tyrosine or a composition comprising tyrosine in said non-human organism or in the culture medium surrounding said non-human organism.

[14332] Accordingly, the present invention relates to a process for the production of aspartate, which comprises
[14333] (a) increasing or generating one or more activities selected from the group consisting of Fe—S subunit of oxidoreductase in a non-human organism or a part thereof, preferably a microorganism, a plant cell, a plant or a part thereof, as compared to a corresponding non-transformed wild type non-human organism or a part thereof; and
[14334] (b) growing the non-human organism or a part thereof under conditions which permit the production of aspartate or a composition comprising aspartate in said non-human organism or in the culture medium surrounding said non-human organism.

[14335] Accordingly, the present invention relates to a process for the production of phenylalanine, which comprises
[14336] (a) increasing or generating one or more activities selected from the group consisting of acid shock protein in a non-human organism or a part thereof, preferably a microorganism, a plant cell, a plant or a part thereof, as compared to a corresponding non-transformed wild type non-human organism or a part thereof; and
[14337] (b) growing the non-human organism or a part thereof under conditions which permit the production of phenylalanine or a composition comprising phenylalanine in said non-human organism or in the culture medium surrounding said non-human organism.

[14338] Accordingly, the present invention relates to a process for the production of tyrosine, which comprises
[14339] (a) increasing or generating one or more activities selected from the group consisting of acid shock protein in a non-human organism or a part thereof, preferably a microorganism, a plant cell, a plant or a part thereof, as compared to a corresponding non-transformed wild type non-human organism or a part thereof; and
[14340] (b) growing the non-human organism or a part thereof under conditions which permit the production of tyrosine or a composition comprising tyrosine in said non-human organism or in the culture medium surrounding said non-human organism.

[14341] Accordingly, the present invention relates to a process for the production of alanine, which comprises
[14342] (a) increasing or generating one or more activities selected from the group consisting of methylglyoxalase in a non-human organism or a part thereof, preferably a microorganism, a plant cell, a plant or a part thereof, as compared to a corresponding non-transformed wild type non-human organism or a part thereof; and
[14343] (b) growing the non-human organism or a part thereof under conditions which permit the production of alanine or a composition comprising alanine in said non-human organism or in the culture medium surrounding said non-human organism.

[14344] Accordingly, the present invention relates to a process for the production of aspartate, which comprises
[14345] (a) increasing or generating one or more activities selected from the group consisting of b1670-protein in a non-human organism or a part thereof, preferably a microorganism, a plant cell, a plant or a part thereof, as compared to a corresponding non-transformed wild type non-human organism or a part thereof; and
[14346] (b) growing the non-human organism or a part thereof under conditions which permit the production of aspartate or a composition comprising aspartate in said non-human organism or in the culture medium surrounding said non-human organism.

[14347] Accordingly, the present invention relates to a process for the production of aspartate, which comprises
[14348] (a) increasing or generating one or more activities selected from the group consisting of b1672-protein in a non-human organism or a part thereof, preferably a microorganism, a plant cell, a plant or a part thereof, as compared to a corresponding non-transformed wild type non-human organism or a part thereof; and
[14349] (b) growing the non-human organism or a part thereof under conditions which permit the production of aspartate or a composition comprising aspartate in said non-human organism or in the culture medium surrounding said non-human organism.

[14350] Accordingly, the present invention relates to a process for the production of alanine, which comprises
[14351] (a) increasing or generating one or more activities selected from the group consisting of arginine N-succinyltransferase in a non-human organism or a part thereof, preferably a microorganism, a plant cell, a plant or a part thereof, as compared to a corresponding non-transformed wild type non-human organism or a part thereof; and
[14352] (b) growing the non-human organism or a part thereof under conditions which permit the production of alanine or a composition comprising alanine in said non-human organism or in the culture medium surrounding said non-human organism.

[14353] Accordingly, the present invention relates to a process for the production of aspartate, which comprises
[14354] (a) increasing or generating one or more activities selected from the group consisting of ABC transporter permease protein in a non-human organism or a part thereof, preferably a microorganism, a plant cell, a plant or a part thereof, as compared to a corresponding non-transformed wild type non-human organism or a part thereof; and
[14355] (b) growing the non-human organism or a part thereof under conditions which permit the production of aspartate or a composition comprising aspartate in said non-human organism or in the culture medium surrounding said non-human organism.

[14356] Accordingly, the present invention relates to a process for the production of tyrosine, which comprises
[14357] (a) increasing or generating one or more activities selected from the group consisting of ABC transporter permease protein in a non-human organism or a part thereof, preferably a microorganism, a plant cell, a plant or a part thereof, as compared to a corresponding non-transformed wild type non-human organism or a part thereof; and
[14358] (b) growing the non-human organism or a part thereof under conditions which permit the production of tyrosine or a composition comprising tyrosine in said non-human organism or in the culture medium surrounding said non-human organism.

[14359] Accordingly, the present invention relates to a process for the production of aspartate, which comprises
[14360] (a) increasing or generating one or more activities selected from the group consisting of transport protein in a non-human organism or a part thereof, preferably a microorganism, a plant cell, a plant or a part thereof, as compared to a corresponding non-transformed wild type non-human organism or a part thereof; and
[14361] (b) growing the non-human organism or a part thereof under conditions which permit the production of aspartate or a composition comprising aspartate in said non-human organism or in the culture medium surrounding said non-human organism.

[14362] Accordingly, the present invention relates to a process for the production of aspartate, which comprises
[14363] (a) increasing or generating one or more activities selected from the group consisting of b1837-protein in a non-human organism or a part thereof, preferably a microorganism, a plant cell, a plant or a part thereof, as compared to a corresponding non-transformed wild type non-human organism or a part thereof; and
[14364] (b) growing the non-human organism or a part thereof under conditions which permit the production of aspartate or a composition comprising aspartate in said non-human organism or in the culture medium surrounding said non-human organism.

[14365] Accordingly, the present invention relates to a process for the production of aspartate, which comprises
[14366] (a) increasing or generating one or more activities selected from the group consisting of serine/threonine-protein phosphatase in a non-human organism or a part thereof, preferably a microorganism, a plant cell, a plant or a part thereof, as compared to a corresponding non-transformed wild type non-human organism or a part thereof; and
[14367] (b) growing the non-human organism or a part thereof under conditions which permit the production of aspartate or a composition comprising aspartate in said non-human organism or in the culture medium surrounding said non-human organism.

[14368] Accordingly, the present invention relates to a process for the production of aspartate, which comprises
[14369] (a) increasing or generating one or more activities selected from the group consisting of protease in a non-human organism or a part thereof, preferably a microorganism, a plant cell, a plant or a part thereof, as compared to a corresponding non-transformed wild type non-human organism or a part thereof; and
[14370] (b) growing the non-human organism or a part thereof under conditions which permit the production of aspartate or a composition comprising aspartate in said non-human organism or in the culture medium surrounding said non-human organism.

[14371] Accordingly, the present invention relates to a process for the production of serine, which comprises
[14372] (a) increasing or generating one or more activities selected from the group consisting of protease in a non-human organism or a part thereof, preferably a microorganism, a plant cell, a plant or a part thereof, as compared to a corresponding non-transformed wild type non-human organism or a part thereof; and
[14373] (b) growing the non-human organism or a part thereof under conditions which permit the production of serine or a composition comprising serine in said non-human organism or in the culture medium surrounding said non-human organism.

[14374] Accordingly, the present invention relates to a process for the production of asparagine, which comprises
[14375] (a) increasing or generating one or more activities selected from the group consisting of pyruvate kinase in a non-human organism or a part thereof, preferably a microorganism, a plant cell, a plant or a part thereof, as compared to a corresponding non-transformed wild type non-human organism or a part thereof; and
[14376] (b) growing the non-human organism or a part thereof under conditions which permit the production of asparagine or a composition comprising asparagine in said non-human organism or in the culture medium surrounding said non-human organism.

[14377] Accordingly, the present invention relates to a process for the production of tyrosine, which comprises
[14378] (a) increasing or generating one or more activities selected from the group consisting of cytochrome c-type protein in a non-human organism or a part thereof, preferably a microorganism, a plant cell, a plant or a part thereof, as compared to a corresponding non-transformed wild type non-human organism or a part thereof; and
[14379] (b) growing the non-human organism or a part thereof under conditions which permit the production of tyrosine or a composition comprising tyrosine in said non-human organism or in the culture medium surrounding said non-human organism.

[14380] Accordingly, the present invention relates to a process for the production of phenylalanine, which comprises
[14381] (a) increasing or generating one or more activities selected from the group consisting of trehalose-phosphatase in a non-human organism or a part thereof, preferably a microorganism, a plant cell, a plant or a part thereof, as compared to a corresponding non-transformed wild type non-human organism or a part thereof; and
[14382] (b) growing the non-human organism or a part thereof under conditions which permit the production of phenylalanine or a composition comprising phenylalanine in said non-human organism or in the culture medium surrounding said non-human organism.

[14383] Accordingly, the present invention relates to a process for the production of tyrosine, which comprises
[14384] (a) increasing or generating one or more activities selected from the group consisting of trehalose-phosphatase in a non-human organism or a part thereof, preferably a microorganism, a plant cell, a plant or a part thereof, as compared to a corresponding non-transformed wild type non-human organism or a part thereof; and
[14385] (b) growing the non-human organism or a part thereof under conditions which permit the production of tyrosine or a composition comprising tyrosine in said non-human organism or in the culture medium surrounding said non-human organism.

[14386] Accordingly, the present invention relates to a process for the production of serine, which comprises
[14387] (a) increasing or generating one or more activities selected from the group consisting of b1898-protein in a non-human organism or a part thereof, preferably a microorganism, a plant cell, a plant or a part thereof, as compared to a corresponding non-transformed wild type non-human organism or a part thereof; and
[14388] (b) growing the non-human organism or a part thereof under conditions which permit the production of serine or a composition comprising serine in said non-human organism or in the culture medium surrounding said non-human organism.

[14389] Accordingly, the present invention relates to a process for the production of serine, which comprises
[14390] (a) increasing or generating one or more activities selected from the group consisting of b1930-protein in a non-human organism or a part thereof, preferably a microorganism, a plant cell, a plant or a part thereof, as compared to a corresponding non-transformed wild type non-human organism or a part thereof; and
[14391] (b) growing the non-human organism or a part thereof under conditions which permit the production of serine or a composition comprising serine in said non-human organism or in the culture medium surrounding said non-human organism.

[14392] Accordingly, the present invention relates to a process for the production of aspartate, which comprises
[14393] (a) increasing or generating one or more activities selected from the group consisting of transport protein in a non-human organism or a part thereof, preferably a microorganism, a plant cell, a plant or a part thereof, as compared to a corresponding non-transformed wild type non-human organism or a part thereof; and
[14394] (b) growing the non-human organism or a part thereof under conditions which permit the production of aspartate or a composition comprising aspartate in said non-human organism or in the culture medium surrounding said non-human organism.

[14395] Accordingly, the present invention relates to a process for the production of tyrosine, which comprises
[14396] (a) increasing or generating one or more activities selected from the group consisting of O-antigen chain length determinant in a non-human organism or a part thereof, preferably a microorganism, a plant cell, a plant or a part thereof, as compared to a corresponding non-transformed wild type non-human organism or a part thereof; and
[14397] (b) growing the non-human organism or a part thereof under conditions which permit the production of tyrosine or a composition comprising tyrosine in said non-human organism or in the culture medium surrounding said non-human organism.

[14398] Accordingly, the present invention relates to a process for the production of aspartate, which comprises
[14399] (a) increasing or generating one or more activities selected from the group consisting of b2032-protein in a non-human organism or a part thereof, preferably a microorganism, a plant cell, a plant or a part thereof, as compared to a corresponding non-transformed wild type non-human organism or a part thereof; and
[14400] (b) growing the non-human organism or a part thereof under conditions which permit the production of aspartate or a composition comprising aspartate in said non-human organism or in the culture medium surrounding said non-human organism.

[14401] Accordingly, the present invention relates to a process for the production of aspartate, which comprises
[14402] (a) increasing or generating one or more activities selected from the group consisting of transport protein in a non-human organism or a part thereof, preferably a microorganism, a plant cell, a plant or a part thereof, as compared to a corresponding non-transformed wild type non-human organism or a part thereof; and
[14403] (b) growing the non-human organism or a part thereof under conditions which permit the production of aspartate or a composition comprising aspartate in said non-human organism or in the culture medium surrounding said non-human organism.

[14404] Accordingly, the present invention relates to a process for the production of phenylalanine, which comprises
[14405] (a) increasing or generating one or more activities selected from the group consisting of transport protein in a non-human organism or a part thereof, preferably a microorganism, a plant cell, a plant or a part thereof, as compared to a corresponding non-transformed wild type non-human organism or a part thereof; and
[14406] (b) growing the non-human organism or a part thereof under conditions which permit the production of phenylalanine or a composition comprising phenylalanine in said non-human organism or in the culture medium surrounding said non-human organism.

[14407] Accordingly, the present invention relates to a process for the production of serine, which comprises
[14408] (a) increasing or generating one or more activities selected from the group consisting of transport protein in a non-human organism or a part thereof, preferably a microorganism, a plant cell, a plant or a part thereof, as compared to a corresponding non-transformed wild type non-human organism or a part thereof; and
[14409] (b) growing the non-human organism or a part thereof under conditions which permit the production of serine or a composition comprising serine in said non-human organism or in the culture medium surrounding said non-human organism.

[14410] Accordingly, the present invention relates to a process for the production of tyrosine, which comprises
[14411] (a) increasing or generating one or more activities selected from the group consisting of transport protein in a non-human organism or a part thereof, preferably a microorganism, a plant cell, a plant or a part thereof, as compared to a corresponding non-transformed wild type non-human organism or a part thereof; and
[14412] (b) growing the non-human organism or a part thereof under conditions which permit the production of tyrosine or a composition comprising tyrosine in said non-human organism or in the culture medium surrounding said non-human organism.

[14413] Accordingly, the present invention relates to a process for the production of 5-oxoproline, which comprises
[14414] (a) increasing or generating one or more activities selected from the group consisting of uridine/cytidine kinase in a non-human organism or a part thereof, preferably a microorganism, a plant cell, a plant or a part thereof, as compared to a corresponding non-transformed wild type non-human organism or a part thereof; and
[14415] (b) growing the non-human organism or a part thereof under conditions which permit the production of 5-oxoproline or a composition comprising 5-oxoproline in said non-human organism or in the culture medium surrounding said non-human organism.

[14416] Accordingly, the present invention relates to a process for the production of aspartate, which comprises
[14417] (a) increasing or generating one or more activities selected from the group consisting of b2107-protein in a non-human organism or a part thereof, preferably a microorganism, a plant cell, a plant or a part thereof, as compared to a corresponding non-transformed wild type non-human organism or a part thereof; and
[14418] (b) growing the non-human organism or a part thereof under conditions which permit the production of aspartate or a composition comprising aspartate in said non-human organism or in the culture medium surrounding said non-human organism.

[14419] Accordingly, the present invention relates to a process for the production of aspartate, which comprises
[14420] (a) increasing or generating one or more activities selected from the group consisting of ABC transporter permease protein in a non-human organism or a part thereof, preferably a microorganism, a plant cell, a plant or a part thereof, as compared to a corresponding non-transformed wild type non-human organism or a part thereof; and
[14421] (b) growing the non-human organism or a part thereof under conditions which permit the production of aspartate or a composition comprising aspartate in said non-human organism or in the culture medium surrounding said non-human organism.

[14422] Accordingly, the present invention relates to a process for the production of citrulline, which comprises
[14423] (a) increasing or generating one or more activities selected from the group consisting of ABC transporter permease protein in a non-human organism or a part thereof, preferably a microorganism, a plant cell, a plant or a part thereof, as compared to a corresponding non-transformed wild type non-human organism or a part thereof; and
[14424] (b) growing the non-human organism or a part thereof under conditions which permit the production of citrulline or a composition comprising citrulline in said non-human organism or in the culture medium surrounding said non-human organism.

[14425] Accordingly, the present invention relates to a process for the production of phenylalanine, which comprises
[14426] (a) increasing or generating one or more activities selected from the group consisting of ABC transporter permease protein in a non-human organism or a part thereof, preferably a microorganism, a plant cell, a plant or a part thereof, as compared to a corresponding non-transformed wild type non-human organism or a part thereof; and
[14427] (b) growing the non-human organism or a part thereof under conditions which permit the production of phenylalanine or a composition comprising phenylalanine in said non-human organism or in the culture medium surrounding said non-human organism.

[14428] Accordingly, the present invention relates to a process for the production of serine, which comprises
[14429] (a) increasing or generating one or more activities selected from the group consisting of ABC transporter permease protein in a non-human organism or a part thereof, preferably a microorganism, a plant cell, a plant or a part thereof, as compared to a corresponding non-transformed wild type non-human organism or a part thereof; and
[14430] (b) growing the non-human organism or a part thereof under conditions which permit the production of serine or a composition comprising serine in said non-human organism or in the culture medium surrounding said non-human organism.

[14431] Accordingly, the present invention relates to a process for the production of tyrosine, which comprises
[14432] (a) increasing or generating one or more activities selected from the group consisting of ABC transporter permease protein in a non-human organism or a part thereof, preferably a microorganism, a plant cell, a plant or a part thereof, as compared to a corresponding non-transformed wild type non-human organism or a part thereof; and
[14433] (b) growing the non-human organism or a part thereof under conditions which permit the production of tyrosine or a composition comprising tyrosine in said non-human organism or in the culture medium surrounding said non-human organism.

[14434] Accordingly, the present invention relates to a process for the production of glycine, which comprises
[14435] (a) increasing or generating one or more activities selected from the group consisting of sn-glycerol-3-phosphate dehydrogenase in a non-human organism or a part thereof, preferably a microorganism, a plant cell, a plant or a part thereof, as compared to a corresponding non-transformed wild type non-human organism or a part thereof; and
[14436] (b) growing the non-human organism or a part thereof under conditions which permit the production of glycine or a composition comprising glycine in said non-human organism or in the culture medium surrounding said non-human organism.

[14437] Accordingly, the present invention relates to a process for the production of asparagine, which comprises
[14438] (a) increasing or generating one or more activities selected from the group consisting of NADH dehydrogenase I chain I in a non-human organism or a part thereof, preferably a microorganism, a plant cell, a plant or a part thereof, as compared to a corresponding non-transformed wild type non-human organism or a part thereof; and
[14439] (b) growing the non-human organism or a part thereof under conditions which permit the production of asparagine or a composition comprising asparagine in said non-human organism or in the culture medium surrounding said non-human organism.

[14440] Accordingly, the present invention relates to a process for the production of aspartate, which comprises
[14441] (a) increasing or generating one or more activities selected from the group consisting of b2360-protein in a non-human organism or a part thereof, preferably a microorganism, a plant cell, a plant or a part thereof, as compared to a corresponding non-transformed wild type non-human organism or a part thereof; and
[14442] (b) growing the non-human organism or a part thereof under conditions which permit the production of aspartate or a composition comprising aspartate in said non-human organism or in the culture medium surrounding said non-human organism.

[14443] Accordingly, the present invention relates to a process for the production of serine, which comprises
[14444] (a) increasing or generating one or more activities selected from the group consisting of D-serine dehydratase in a non-human organism or a part thereof, preferably a microorganism, a plant cell, a plant or a part thereof, as compared to a corresponding non-transformed wild type non-human organism or a part thereof; and
[14445] (b) growing the non-human organism or a part thereof under conditions which permit the production of serine or a composition comprising serine in said non-human organism or in the culture medium surrounding said non-human organism.

[14446] Accordingly, the present invention relates to a process for the production of tyrosine, which comprises
[14447] (a) increasing or generating one or more activities selected from the group consisting of b2399-protein in a non-human organism or a part thereof, preferably a microorganism, a plant cell, a plant or a part thereof, as compared to a corresponding non-transformed wild type non-human organism or a part thereof; and
[14448] (b) growing the non-human organism or a part thereof under conditions which permit the production of tyrosine or a composition comprising tyrosine in said non-human organism or in the culture medium surrounding said non-human organism.

[14449] Accordingly, the present invention relates to a process for the production of 3,4-dihydroxyphenylalanine (dopa), which comprises
[14450] (a) increasing or generating one or more activities selected from the group consisting of b2399-protein in a non-human organism or a part thereof, preferably a microorganism, a plant cell, a plant or a part thereof, as compared to a corresponding non-transformed wild type non-human organism or a part thereof; and
[14451] (b) growing the non-human organism or a part thereof under conditions which permit the production of 3,4-dihydroxyphenylalanine (dopa) or a composition comprising 3,4-dihydroxyphenylalanine (dopa) in said non-human organism or in the culture medium surrounding said non-human organism.

[14452] Accordingly, the present invention relates to a process for the production of 5-oxoproline, which comprises
[14453] (a) increasing or generating one or more activities selected from the group consisting of b2399-protein in a non-human organism or a part thereof, preferably a microorganism, a plant cell, a plant or a part thereof, as compared to a corresponding non-transformed wild type non-human organism or a part thereof; and
[14454] (b) growing the non-human organism or a part thereof under conditions which permit the production of 5-oxoproline or a composition comprising 5-oxoproline in said non-human organism or in the culture medium surrounding said non-human organism.

[14455] Accordingly, the present invention relates to a process for the production of alanine, which comprises
[14456] (a) increasing or generating one or more activities selected from the group consisting of transcriptional regulator in a non-human organism or a part thereof, preferably a microorganism, a plant cell, a plant or a part thereof, as compared to a corresponding non-transformed wild type non-human organism or a part thereof; and
[14457] (b) growing the non-human organism or a part thereof under conditions which permit the production of alanine or a composition comprising alanine in said non-human organism or in the culture medium surrounding said non-human organism.

[14458] Accordingly, the present invention relates to a process for the production of aspartate, which comprises
[14459] (a) increasing or generating one or more activities selected from the group consisting of transcriptional regulator in a non-human organism or a part thereof, preferably a microorganism, a plant cell, a plant or a part thereof, as compared to a corresponding non-transformed wild type non-human organism or a part thereof; and
[14460] (b) growing the non-human organism or a part thereof under conditions which permit the production of aspartate or a composition comprising aspartate in said non-human organism or in the culture medium surrounding said non-human organism.

[14461] Accordingly, the present invention relates to a process for the production of phenylalanine, which comprises
[14462] (a) increasing or generating one or more activities selected from the group consisting of PTS system N-acetylmuramic acid-specific EIIBC component in a non-human organism or a part thereof, preferably a microorganism, a plant cell, a plant or a part thereof, as compared to a corresponding non-transformed wild type non-human organism or a part thereof; and
[14463] (b) growing the non-human organism or a part thereof under conditions which permit the production of phenylalanine or a composition comprising phenylalanine in said non-human organism or in the culture medium surrounding said non-human organism.

[14464] Accordingly, the present invention relates to a process for the production of citrulline, which comprises
[14465] (a) increasing or generating one or more activities selected from the group consisting of b2474-protein in a non-human organism or a part thereof, preferably a microorganism, a plant cell, a plant or a part thereof, as compared to a corresponding non-transformed wild type non-human organism or a part thereof; and
[14466] (b) growing the non-human organism or a part thereof under conditions which permit the production of citrulline or a composition comprising citrulline in said non-human organism or in the culture medium surrounding said non-human organism.

[14467] Accordingly, the present invention relates to a process for the production of glycine, which comprises
[14468] (a) increasing or generating one or more activities selected from the group consisting of b2474-protein in a non-human organism or a part thereof, preferably a microorganism, a plant cell, a plant or a part thereof, as compared to a corresponding non-transformed wild type non-human organism or a part thereof; and
[14469] (b) growing the non-human organism or a part thereof under conditions which permit the production of glycine or a composition comprising glycine in said non-human organism or in the culture medium surrounding said non-human organism.

[14470] Accordingly, the present invention relates to a process for the production of serine, which comprises
[14471] (a) increasing or generating one or more activities selected from the group consisting of NADH dehydrogenase subunit N in a non-human organism or a part thereof, preferably a microorganism, a plant cell, a plant or a part thereof, as compared to a corresponding non-transformed wild type non-human organism or a part thereof; and
[14472] (b) growing the non-human organism or a part thereof under conditions which permit the production of serine or a composition comprising serine in said non-human organism or in the culture medium surrounding said non-human organism.

[14473] Accordingly, the present invention relates to a process for the production of 5-oxoproline, which comprises
[14474] (a) increasing or generating one or more activities selected from the group consisting of NADH dehydrogenase subunit N in a non-human organism or a part thereof, preferably a microorganism, a plant cell, a plant or a part thereof, as compared to a corresponding non-transformed wild type non-human organism or a part thereof; and
[14475] (b) growing the non-human organism or a part thereof under conditions which permit the production of 5-oxoproline or a composition comprising 5-oxoproline in said non-human organism or in the culture medium surrounding said non-human organism.

[14476] Accordingly, the present invention relates to a process for the production of phenylalanine, which comprises
[14477] (a) increasing or generating one or more activities selected from the group consisting of b2513-protein in a non-human organism or a part thereof, preferably a microorganism, a plant cell, a plant or a part thereof, as compared to a corresponding non-transformed wild type non-human organism or a part thereof; and
[14478] (b) growing the non-human organism or a part thereof under conditions which permit the production of phenylalanine or a composition comprising phenylalanine in said non-human organism or in the culture medium surrounding said non-human organism.

[14479] Accordingly, the present invention relates to a process for the production of tyrosine, which comprises
[14480] (a) increasing or generating one or more activities selected from the group consisting of b2513-protein in a non-human organism or a part thereof, preferably a microorganism, a plant cell, a plant or a part thereof, as compared to a corresponding non-transformed wild type non-human organism or a part thereof; and
[14481] (b) growing the non-human organism or a part thereof under conditions which permit the production of tyrosine or a composition comprising tyrosine in said non-human organism or in the culture medium surrounding said non-human organism.

[14482] Accordingly, the present invention relates to a process for the production of serine, which comprises
[14483] (a) increasing or generating one or more activities selected from the group consisting of serine hydroxymethyltransferase in a non-human organism or a part thereof, preferably a microorganism, a plant cell, a plant or a part thereof, as compared to a corresponding non-transformed wild type non-human organism or a part thereof; and
[14484] (b) growing the non-human organism or a part thereof under conditions which permit the production of serine or a composition comprising serine in said non-human organism or in the culture medium surrounding said non-human organism.

[14485] Accordingly, the present invention relates to a process for the production of phenylalanine, which comprises
[14486] (a) increasing or generating one or more activities selected from the group consisting of chorismate mutase-T and prephenate dehydrogenase in a non-human organism or a part thereof, preferably a microorganism, a plant cell, a plant or a part thereof, as compared to a corresponding non-transformed wild type non-human organism or a part thereof; and
[14487] (b) growing the non-human organism or a part thereof under conditions which permit the production of phenylalanine or a composition comprising phenylalanine in said non-human organism or in the culture medium surrounding said non-human organism.

[14488] Accordingly, the present invention relates to a process for the production of alanine, which comprises
[14489] (a) increasing or generating one or more activities selected from the group consisting of b2613-protein in a non-human organism or a part thereof, preferably a microorganism, a plant cell, a plant or a part thereof, as compared to a corresponding non-transformed wild type non-human organism or a part thereof; and
[14490] (b) growing the non-human organism or a part thereof under conditions which permit the production of alanine or a composition comprising alanine in said non-human organism or in the culture medium surrounding said non-human organism.

[14491] Accordingly, the present invention relates to a process for the production of phenylalanine, which comprises
[14492] (a) increasing or generating one or more activities selected from the group consisting of transcriptional regulator in a non-human organism or a part thereof, preferably a microorganism, a plant cell, a plant or a part thereof, as compared to a corresponding non-transformed wild type non-human organism or a part thereof; and
[14493] (b) growing the non-human organism or a part thereof under conditions which permit the production of phenylalanine or a composition comprising phenylalanine in said non-human organism or in the culture medium surrounding said non-human organism.

[14494] Accordingly, the present invention relates to a process for the production of tyrosine, which comprises
[14495] (a) increasing or generating one or more activities selected from the group consisting of transcriptional regulator in a non-human organism or a part thereof, preferably a microorganism, a plant cell, a plant or a part thereof, as compared to a corresponding non-transformed wild type non-human organism or a part thereof; and
[14496] (b) growing the non-human organism or a part thereof under conditions which permit the production of tyrosine or a composition comprising tyrosine in said non-human organism or in the culture medium surrounding said non-human organism.

[14497] Accordingly, the present invention relates to a process for the production of phenylalanine, which comprises
[14498] (a) increasing or generating one or more activities selected from the group consisting of b2673-protein in a non-human organism or a part thereof, preferably a microorganism, a plant cell, a plant or a part thereof, as compared to a corresponding non-transformed wild type non-human organism or a part thereof; and
[14499] (b) growing the non-human organism or a part thereof under conditions which permit the production of phenylalanine or a composition comprising phenylalanine in said non-human organism or in the culture medium surrounding said non-human organism.

[14500] Accordingly, the present invention relates to a process for the production of tyrosine, which comprises
[14501] (a) increasing or generating one or more activities selected from the group consisting of b2673-protein in a non-human organism or a part thereof, preferably a microorganism, a plant cell, a plant or a part thereof, as compared to a corresponding non-transformed wild type non-human organism or a part thereof; and
[14502] (b) growing the non-human organism or a part thereof under conditions which permit the production of tyrosine or a composition comprising tyrosine in said non-human organism or in the culture medium surrounding said non-human organism.

[14503] Accordingly, the present invention relates to a process for the production of aspartate, which comprises
[14504] (a) increasing or generating one or more activities selected from the group consisting of transport protein in a non-human organism or a part thereof, preferably a microorganism, a plant cell, a plant or a part thereof, as compared to a corresponding non-transformed wild type non-human organism or a part thereof; and
[14505] (b) growing the non-human organism or a part thereof under conditions which permit the production of aspartate or a composition comprising aspartate in said non-human organism or in the culture medium surrounding said non-human organism.

[14506] Accordingly, the present invention relates to a process for the production of alanine, which comprises
[14507] (a) increasing or generating one or more activities selected from the group consisting of murein transglycosylase in a non-human organism or a part thereof, preferably a microorganism, a plant cell, a plant or a part thereof, as compared to a corresponding non-transformed wild type non-human organism or a part thereof; and
[14508] (b) growing the non-human organism or a part thereof under conditions which permit the production of alanine or a composition comprising alanine in said non-human organism or in the culture medium surrounding said non-human organism.

[14509] Accordingly, the present invention relates to a process for the production of phenylalanine, which comprises
[14510] (a) increasing or generating one or more activities selected from the group consisting of murein transglycosylase in a non-human organism or a part thereof, preferably a microorganism, a plant cell, a plant or a part thereof, as compared to a corresponding non-transformed wild type non-human organism or a part thereof; and
[14511] (b) growing the non-human organism or a part thereof under conditions which permit the production of phenylalanine or a composition comprising phenylalanine in said non-human organism or in the culture medium surrounding said non-human organism.

[14512] Accordingly, the present invention relates to a process for the production of tyrosine, which comprises
[14513] (a) increasing or generating one or more activities selected from the group consisting of murein transglycosylase in a non-human organism or a part thereof, preferably a microorganism, a plant cell, a plant or a part thereof, as compared to a corresponding non-transformed wild type non-human organism or a part thereof; and
[14514] (b) growing the non-human organism or a part thereof under conditions which permit the production of tyrosine or a composition comprising tyrosine in said non-human organism or in the culture medium surrounding said non-human organism.

[14515] Accordingly, the present invention relates to a process for the production of alanine, which comprises
[14516] (a) increasing or generating one or more activities selected from the group consisting of transcriptional regulator in a non-human organism or a part thereof, preferably a microorganism, a plant cell, a plant or a part thereof, as compared to a corresponding non-transformed wild type non-human organism or a part thereof; and
[14517] (b) growing the non-human organism or a part thereof under conditions which permit the production of alanine or a composition comprising alanine in said non-human organism or in the culture medium surrounding said non-human organism.

[14518] Accordingly, the present invention relates to a process for the production of alanine, which comprises
[14519] (a) increasing or generating one or more activities selected from the group consisting of b2739-protein in a non-human organism or a part thereof, preferably a microorganism, a plant cell, a plant or a part thereof, as compared to a corresponding non-transformed wild type non-human organism or a part thereof; and
[14520] (b) growing the non-human organism or a part thereof under conditions which permit the production of alanine or a composition comprising alanine in said non-human organism or in the culture medium surrounding said non-human organism.

[14521] Accordingly, the present invention relates to a process for the production of phenylalanine, which comprises
[14522] (a) increasing or generating one or more activities selected from the group consisting of b2739-protein in a non-human organism or a part thereof, preferably a microorganism, a plant cell, a plant or a part thereof, as compared to a corresponding non-transformed wild type non-human organism or a part thereof; and
[14523] (b) growing the non-human organism or a part thereof under conditions which permit the production of phenylalanine or a composition comprising phenylalanine in said non-human organism or in the culture medium surrounding said non-human organism.

[14524] Accordingly, the present invention relates to a process for the production of tyrosine, which comprises
[14525] (a) increasing or generating one or more activities selected from the group consisting of b2739-protein in a non-human organism or a part thereof, preferably a microorganism, a plant cell, a plant or a part thereof, as compared to a corresponding non-transformed wild type non-human organism or a part thereof; and
[14526] (b) growing the non-human organism or a part thereof under conditions which permit the production of tyrosine or a composition comprising tyrosine in said non-human organism or in the culture medium surrounding said non-human organism.

[14527] Accordingly, the present invention relates to a process for the production of tyrosine, which comprises
[14528] (a) increasing or generating one or more activities selected from the group consisting of 2-C-methyl-D-erythritol 4-phosphate cytidylyltransferase in a non-human organism or a part thereof, preferably a microorganism, a plant cell, a plant or a part thereof, as compared to a corresponding non-transformed wild type non-human organism or a part thereof; and
[14529] (b) growing the non-human organism or a part thereof under conditions which permit the production of tyrosine or a composition comprising tyrosine in said non-human organism or in the culture medium surrounding said non-human organism.

[14530] Accordingly, the present invention relates to a process for the production of 5-oxoproline, which comprises
[14531] (a) increasing or generating one or more activities selected from the group consisting of 2-C-methyl-D-erythritol 4-phosphate cytidylyltransferase in a non-human organism or a part thereof, preferably a microorganism, a plant cell, a plant or a part thereof, as compared to a corresponding non-transformed wild type non-human organism or a part thereof; and
[14532] (b) growing the non-human organism or a part thereof under conditions which permit the production of 5-oxoproline or a composition comprising 5-oxoproline in said non-human organism or in the culture medium surrounding said non-human organism.

[14533] Accordingly, the present invention relates to a process for the production of phenylalanine, which comprises
[14534] (a) increasing or generating one or more activities selected from the group consisting of phosphoadenosine phosphosulfate reductase in a non-human organism or a part thereof, preferably a microorganism, a plant cell, a plant or a part thereof, as compared to a corresponding non-transformed wild type non-human organism or a part thereof; and
[14535] (b) growing the non-human organism or a part thereof under conditions which permit the production of phenylalanine or a composition comprising phenylalanine in said non-human organism or in the culture medium surrounding said non-human organism.

[14536] Accordingly, the present invention relates to a process for the production of phenylalanine, which comprises
[14537] (a) increasing or generating one or more activities selected from the group consisting of b2812-protein in a non-human organism or a part thereof, preferably a microorganism, a plant cell, a plant or a part thereof, as compared to a corresponding non-transformed wild type non-human organism or a part thereof; and
[14538] (b) growing the non-human organism or a part thereof under conditions which permit the production of phenylalanine or a composition comprising phenylalanine in said non-human organism or in the culture medium surrounding said non-human organism.

[14539] Accordingly, the present invention relates to a process for the production of serine, which comprises
[14540] (a) increasing or generating one or more activities selected from the group consisting of b2812-protein in a non-human organism or a part thereof, preferably a microorganism, a plant cell, a plant or a part thereof, as compared to a corresponding non-transformed wild type non-human organism or a part thereof; and
[14541] (b) growing the non-human organism or a part thereof under conditions which permit the production of serine or a composition comprising serine in said non-human organism or in the culture medium surrounding said non-human organism.

[14542] Accordingly, the present invention relates to a process for the production of tyrosine, which comprises
[14543] (a) increasing or generating one or more activities selected from the group consisting of b2812-protein in a non-human organism or a part thereof, preferably a microorganism, a plant cell, a plant or a part thereof, as compared to a corresponding non-transformed wild type non-human organism or a part thereof; and
[14544] (b) growing the non-human organism or a part thereof under conditions which permit the production of tyrosine or a composition comprising tyrosine in said non-human organism or in the culture medium surrounding said non-human organism.

[14545] Accordingly, the present invention relates to a process for the production of phenylalanine, which comprises
[14546] (a) increasing or generating one or more activities selected from the group consisting of amino-acid acetyltransferase in a non-human organism or a part thereof, preferably a microorganism, a plant cell, a plant or a part thereof, as compared to a corresponding non-transformed wild type non-human organism or a part thereof; and
[14547] (b) growing the non-human organism or a part thereof under conditions which permit the production of phenylalanine or a composition comprising phenylalanine in said non-human organism or in the culture medium surrounding said non-human organism.

[14548] Accordingly, the present invention relates to a process for the production of tyrosine, which comprises
[14549] (a) increasing or generating one or more activities selected from the group consisting of amino-acid acetyltransferase in a non-human organism or a part thereof, preferably a microorganism, a plant cell, a plant or a part thereof, as compared to a corresponding non-transformed wild type non-human organism or a part thereof; and
[14550] (b) growing the non-human organism or a part thereof under conditions which permit the production of tyrosine or a composition comprising tyrosine in said non-human organism or in the culture medium surrounding said non-human organism.

[14551] Accordingly, the present invention relates to a process for the production of 5-oxoproline, which comprises
[14552] (a) increasing or generating one or more activities selected from the group consisting of amino-acid acetyltransferase in a non-human organism or a part thereof, preferably a microorganism, a plant cell, a plant or a part thereof, as compared to a corresponding non-transformed wild type non-human organism or a part thereof; and
[14553] (b) growing the non-human organism or a part thereof under conditions which permit the production of 5-oxoproline or a composition comprising 5-oxoproline in said non-human organism or in the culture medium surrounding said non-human organism.

[14554] Accordingly, the present invention relates to a process for the production of aspartate, which comprises
[14555] (a) increasing or generating one or more activities selected from the group consisting of prolipoprotein diacylglyceryl transferase in a non-human organism or a part thereof, preferably a microorganism, a plant cell, a plant or a part thereof, as compared to a corresponding non-transformed wild type non-human organism or a part thereof; and
[14556] (b) growing the non-human organism or a part thereof under conditions which permit the production of aspartate or a composition comprising aspartate in said non-human organism or in the culture medium surrounding said non-human organism.

[14557] Accordingly, the present invention relates to a process for the production of tyrosine, which comprises
[14558] (a) increasing or generating one or more activities selected from the group consisting of transcriptional regulator in a non-human organism or a part thereof, preferably a microorganism, a plant cell, a plant or a part thereof, as compared to a corresponding non-transformed wild type non-human organism or a part thereof; and
[14559] (b) growing the non-human organism or a part thereof under conditions which permit the production of tyrosine or a composition comprising tyrosine in said non-human organism or in the culture medium surrounding said non-human organism.

[14560] Accordingly, the present invention relates to a process for the production of phenylalanine, which comprises
[14561] (a) increasing or generating one or more activities selected from the group consisting of b2849-protein in a non-human organism or a part thereof, preferably a microorganism, a plant cell, a plant or a part thereof, as compared to a corresponding non-transformed wild type non-human organism or a part thereof; and
[14562] (b) growing the non-human organism or a part thereof under conditions which permit the production of phenylalanine or a composition comprising phenylalanine in said non-human organism or in the culture medium surrounding said non-human organism.

[14563] Accordingly, the present invention relates to a process for the production of glycine, which comprises
[14564] (a) increasing or generating one or more activities selected from the group consisting of D-3-phosphoglycerate dehydrogenase in a non-human organism or a part thereof, preferably a microorganism, a plant cell, a plant or a part thereof, as compared to a corresponding non-transformed wild type non-human organism or a part thereof; and
[14565] (b) growing the non-human organism or a part thereof under conditions which permit the production of glycine or a composition comprising glycine in said non-human organism or in the culture medium surrounding said non-human organism.

[14566] Accordingly, the present invention relates to a process for the production of serine, which comprises
[14567] (a) increasing or generating one or more activities selected from the group consisting of D-3-phosphoglycerate dehydrogenase in a non-human organism or a part thereof, preferably a microorganism, a plant cell, a plant or a part thereof, as compared to a corresponding non-transformed wild type non-human organism or a part thereof; and
[14568] (b) growing the non-human organism or a part thereof under conditions which permit the production of serine or a composition comprising serine in said non-human organism or in the culture medium surrounding said non-human organism.

[14569] Accordingly, the present invention relates to a process for the production of aspartate, which comprises
[14570] (a) increasing or generating one or more activities selected from the group consisting of arginine exporter protein in a non-human organism or a part thereof, preferably a microorganism, a plant cell, a plant or a part thereof, as compared to a corresponding non-transformed wild type non-human organism or a part thereof; and
[14571] (b) growing the non-human organism or a part thereof under conditions which permit the production of aspartate or a composition comprising aspartate in said non-human organism or in the culture medium surrounding said non-human organism.

[14572] Accordingly, the present invention relates to a process for the production of asparagine, which comprises
[14573] (a) increasing or generating one or more activities selected from the group consisting of glycoprotease in a non-human organism or a part thereof, preferably a microorganism, a plant cell, a plant or a part thereof, as compared to a corresponding non-transformed wild type non-human organism or a part thereof; and
[14574] (b) growing the non-human organism or a part thereof under conditions which permit the production of asparagine or a composition comprising asparagine in said non-human organism or in the culture medium surrounding said non-human organism.

[14575] Accordingly, the present invention relates to a process for the production of phenylalanine, which comprises
[14576] (a) increasing or generating one or more activities selected from the group consisting of b3083-protein in a non-human organism or a part thereof, preferably a microorganism, a plant cell, a plant or a part thereof, as compared to a corresponding non-transformed wild type non-human organism or a part thereof; and
[14577] (b) growing the non-human organism or a part thereof under conditions which permit the production of phenylalanine or a composition comprising phenylalanine in said non-human organism or in the culture medium surrounding said non-human organism.

[14578] Accordingly, the present invention relates to a process for the production of serine, which comprises
[14579] (a) increasing or generating one or more activities selected from the group consisting of b3083-protein in a non-human organism or a part thereof, preferably a microorganism, a plant cell, a plant or a part thereof, as compared to a corresponding non-transformed wild type non-human organism or a part thereof; and
[14580] (b) growing the non-human organism or a part thereof under conditions which permit the production of serine or a composition comprising serine in said non-human organism or in the culture medium surrounding said non-human organism.

[14581] Accordingly, the present invention relates to a process for the production of tyrosine, which comprises
[14582] (a) increasing or generating one or more activities selected from the group consisting of b3083-protein in a non-human organism or a part thereof, preferably a microorganism, a plant cell, a plant or a part thereof, as compared to a corresponding non-transformed wild type non-human organism or a part thereof; and
[14583] (b) growing the non-human organism or a part thereof under conditions which permit the production of tyrosine or a composition comprising tyrosine in said non-human organism or in the culture medium surrounding said non-human organism.

[14584] Accordingly, the present invention relates to a process for the production of alanine, which comprises
[14585] (a) increasing or generating one or more activities selected from the group consisting of b3098-protein in a non-human organism or a part thereof, preferably a microorganism, a plant cell, a plant or a part thereof, as compared to a corresponding non-transformed wild type non-human organism or a part thereof; and
[14586] (b) growing the non-human organism or a part thereof under conditions which permit the production of alanine or a composition comprising alanine in said non-human organism or in the culture medium surrounding said non-human organism.

[14587] Accordingly, the present invention relates to a process for the production of glycine, which comprises
[14588] (a) increasing or generating one or more activities selected from the group consisting of b3098-protein in a non-human organism or a part thereof, preferably a microorganism, a plant cell, a plant or a part thereof, as compared to a corresponding non-transformed wild type non-human organism or a part thereof; and
[14589] (b) growing the non-human organism or a part thereof under conditions which permit the production of glycine or a composition comprising glycine in said non-human organism or in the culture medium surrounding said non-human organism.

[14590] Accordingly, the present invention relates to a process for the production of tyrosine, which comprises
[14591] (a) increasing or generating one or more activities selected from the group consisting of b3121-protein in a non-human organism or a part thereof, preferably a microorganism, a plant cell, a plant or a part thereof, as compared to a corresponding non-transformed wild type non-human organism or a part thereof; and
[14592] (b) growing the non-human organism or a part thereof under conditions which permit the production of tyrosine or a composition comprising tyrosine in said non-human organism or in the culture medium surrounding said non-human organism.

[14593] Accordingly, the present invention relates to a process for the production of tyrosine, which comprises
[14594] (a) increasing or generating one or more activities selected from the group consisting of b3221-protein in a non-human organism or a part thereof, preferably a microorganism, a plant cell, a plant or a part thereof, as compared to a corresponding non-transformed wild type non-human organism or a part thereof; and
[14595] (b) growing the non-human organism or a part thereof under conditions which permit the production of tyrosine or a composition comprising tyrosine in said non-human organism or in the culture medium surrounding said non-human organism.

[14596] Accordingly, the present invention relates to a process for the production of serine, which comprises
[14597] (a) increasing or generating one or more activities selected from the group consisting of b3246-protein in a non-human organism or a part thereof, preferably a microorganism, a plant cell, a plant or a part thereof, as compared to a corresponding non-transformed wild type non-human organism or a part thereof; and
[14598] (b) growing the non-human organism or a part thereof under conditions which permit the production of serine or a composition comprising serine in said non-human organism or in the culture medium surrounding said non-human organism.

[14599] Accordingly, the present invention relates to a process for the production of 5-oxoproline, which comprises
[14600] (a) increasing or generating one or more activities selected from the group consisting of b3246-protein in a non-human organism or a part thereof, preferably a microorganism, a plant cell, a plant or a part thereof, as compared to a corresponding non-transformed wild type non-human organism or a part thereof; and
[14601] (b) growing the non-human organism or a part thereof under conditions which permit the production of 5-oxoproline or a composition comprising 5-oxoproline in said non-human organism or in the culture medium surrounding said non-human organism.

[14602] Accordingly, the present invention relates to a process for the production of asparagine, which comprises
[14603] (a) increasing or generating one or more activities selected from the group consisting of acetyl CoA carboxylase in a non-human organism or a part thereof, preferably a microorganism, a plant cell, a plant or a part thereof, as compared to a corresponding non-transformed wild type non-human organism or a part thereof; and
[14604] (b) growing the non-human organism or a part thereof under conditions which permit the production of asparagine or a composition comprising asparagine in said non-human organism or in the culture medium surrounding said non-human organism.

[14605] Accordingly, the present invention relates to a process for the production of glycine, which comprises
[14606] (a) increasing or generating one or more activities selected from the group consisting of acetyl CoA carboxylase in a non-human organism or a part thereof, preferably a microorganism, a plant cell, a plant or a part thereof, as compared to a corresponding non-transformed wild type non-human organism or a part thereof; and
[14607] (b) growing the non-human organism or a part thereof under conditions which permit the production of glycine or a composition comprising glycine in said non-human organism or in the culture medium surrounding said non-human organism.

[14608] Accordingly, the present invention relates to a process for the production of serine, which comprises
[14609] (a) increasing or generating one or more activities selected from the group consisting of acetyl CoA carboxylase in a non-human organism or a part thereof, preferably a microorganism, a plant cell, a plant or a part thereof, as compared to a corresponding non-transformed wild type non-human organism or a part thereof; and
[14610] (b) growing the non-human organism or a part thereof under conditions which permit the production of serine or a composition comprising serine in said non-human organism or in the culture medium surrounding said non-human organism.

[14611] Accordingly, the present invention relates to a process for the production of 5-oxoproline, which comprises
[14612] (a) increasing or generating one or more activities selected from the group consisting of acetyl CoA carboxylase in a non-human organism or a part thereof, preferably a microorganism, a plant cell, a plant or a part thereof, as compared to a corresponding non-transformed wild type non-human organism or a part thereof; and
[14613] (b) growing the non-human organism or a part thereof under conditions which permit the production of 5-oxoproline or a composition comprising 5-oxoproline in said non-human organism or in the culture medium surrounding said non-human organism.

[14614] Accordingly, the present invention relates to a process for the production of alanine, which comprises
[14615] (a) increasing or generating one or more activities selected from the group consisting of methyltransferase in a non-human organism or a part thereof, preferably a microorganism, a plant cell, a plant or a part thereof, as compared to a corresponding non-transformed wild type non-human organism or a part thereof; and
[14616] (b) growing the non-human organism or a part thereof under conditions which permit the production of alanine or a composition comprising alanine in said non-human organism or in the culture medium surrounding said non-human organism.

[14617] Accordingly, the present invention relates to a process for the production of phenylalanine, which comprises
[14618] (a) increasing or generating one or more activities selected from the group consisting of methyltransferase in a non-human organism or a part thereof, preferably a microorganism, a plant cell, a plant or a part thereof, as compared to a corresponding non-transformed wild type non-human organism or a part thereof; and
[14619] (b) growing the non-human organism or a part thereof under conditions which permit the production of phenylalanine or a composition comprising phenylalanine in said non-human organism or in the culture medium surrounding said non-human organism.

[14620] Accordingly, the present invention relates to a process for the production of serine, which comprises
[14621] (a) increasing or generating one or more activities selected from the group consisting of methyltransferase in a non-human organism or a part thereof, preferably a microorganism, a plant cell, a plant or a part thereof, as compared to a corresponding non-transformed wild type non-human organism or a part thereof; and
[14622] (b) growing the non-human organism or a part thereof under conditions which permit the production of serine or a composition comprising serine in said non-human organism or in the culture medium surrounding said non-human organism.

[14623] Accordingly, the present invention relates to a process for the production of tyrosine, which comprises
[14624] (a) increasing or generating one or more activities selected from the group consisting of methyltransferase in a non-human organism or a part thereof, preferably a microorganism, a plant cell, a plant or a part thereof, as compared to a corresponding non-transformed wild type non-human organism or a part thereof; and
[14625] (b) growing the non-human organism or a part thereof under conditions which permit the production of tyrosine or a composition comprising tyrosine in said non-human organism or in the culture medium surrounding said non-human organism.

[14626] Accordingly, the present invention relates to a process for the production of 5-oxoproline, which comprises
[14627] (a) increasing or generating one or more activities selected from the group consisting of methyltransferase in a non-human organism or a part thereof, preferably a microorganism, a plant cell, a plant or a part thereof, as compared to a corresponding non-transformed wild type non-human organism or a part thereof; and
[14628] (b) growing the non-human organism or a part thereof under conditions which permit the production of 5-oxoproline or a composition comprising 5-oxoproline in said non-human organism or in the culture medium surrounding said non-human organism.

[14629] Accordingly, the present invention relates to a process for the production of alanine, which comprises
[14630] (a) increasing or generating one or more activities selected from the group consisting of b3346-protein in a non-human organism or a part thereof, preferably a microorganism, a plant cell, a plant or a part thereof, as compared to a corresponding non-transformed wild type non-human organism or a part thereof; and
[14631] (b) growing the non-human organism or a part thereof under conditions which permit the production of alanine or a composition comprising alanine in said non-human organism or in the culture medium surrounding said non-human organism.

[14632] Accordingly, the present invention relates to a process for the production of alanine, which comprises
[14633] (a) increasing or generating one or more activities selected from the group consisting of ABC transporter ATP-binding protein in a non-human organism or a part thereof, preferably a microorganism, a plant cell, a plant or a part thereof, as compared to a corresponding non-transformed wild type non-human organism or a part thereof; and
[14634] (b) growing the non-human organism or a part thereof under conditions which permit the production of alanine or a composition comprising alanine in said non-human organism or in the culture medium surrounding said non-human organism.

[14635] Accordingly, the present invention relates to a process for the production of glycine, which comprises
[14636] (a) increasing or generating one or more activities selected from the group consisting of ABC transporter ATP-binding protein in a non-human organism or a part thereof, preferably a microorganism, a plant cell, a plant or a part thereof, as compared to a corresponding non-transformed wild type non-human organism or a part thereof; and
[14637] (b) growing the non-human organism or a part thereof under conditions which permit the production of glycine or a composition comprising glycine in said non-human organism or in the culture medium surrounding said non-human organism.

[14638] Accordingly, the present invention relates to a process for the production of aspartate, which comprises
[14639] (a) increasing or generating one or more activities selected from the group consisting of b3392-protein in a non-human organism or a part thereof, preferably a microorganism, a plant cell, a plant or a part thereof, as compared to a corresponding non-transformed wild type non-human organism or a part thereof; and
[14640] (b) growing the non-human organism or a part thereof under conditions which permit the production of aspartate or a composition comprising aspartate in said non-human organism or in the culture medium surrounding said non-human organism.

[14641] Accordingly, the present invention relates to a process for the production of phenylalanine, which comprises
[14642] (a) increasing or generating one or more activities selected from the group consisting of phosphoenolpyruvate carboxykinase in a non-human organism or a part thereof, preferably a microorganism, a plant cell, a plant or a part thereof, as compared to a corresponding non-transformed wild type non-human organism or a part thereof; and
[14643] (b) growing the non-human organism or a part thereof under conditions which permit the production of phenylalanine or a composition comprising phenylalanine in said non-human organism or in the culture medium surrounding said non-human organism.

[14644] Accordingly, the present invention relates to a process for the production of serine, which comprises
[14645] (a) increasing or generating one or more activities selected from the group consisting of phosphoenolpyruvate carboxykinase in a non-human organism or a part thereof, preferably a microorganism, a plant cell, a plant or a part thereof, as compared to a corresponding non-transformed wild type non-human organism or a part thereof; and
[14646] (b) growing the non-human organism or a part thereof under conditions which permit the production of serine or a composition comprising serine in said non-human organism or in the culture medium surrounding said non-human organism.

[14647] Accordingly, the present invention relates to a process for the production of alanine, which comprises
[14648] (a) increasing or generating one or more activities selected from the group consisting of b3410-protein in a non-human organism or a part thereof, preferably a microorganism, a plant cell, a plant or a part thereof, as compared to a corresponding non-transformed wild type non-human organism or a part thereof; and
[14649] (b) growing the non-human organism or a part thereof under conditions which permit the production of alanine or a composition comprising alanine in said non-human organism or in the culture medium surrounding said non-human organism.

[14650] Accordingly, the present invention relates to a process for the production of serine, which comprises
[14651] (a) increasing or generating one or more activities selected from the group consisting of b3509-protein in a non-human organism or a part thereof, preferably a microorganism, a plant cell, a plant or a part thereof, as compared to a corresponding non-transformed wild type non-human organism or a part thereof; and
[14652] (b) growing the non-human organism or a part thereof under conditions which permit the production of serine or a composition comprising serine in said non-human organism or in the culture medium surrounding said non-human organism.

[14653] Accordingly, the present invention relates to a process for the production of aspartate, which comprises
[14654] (a) increasing or generating one or more activities selected from the group consisting of cellulose synthase catalytic subunit in a non-human organism or a part thereof, preferably a microorganism, a plant cell, a plant or a part thereof, as compared to a corresponding non-transformed wild type non-human organism or a part thereof; and
[14655] (b) growing the non-human organism or a part thereof under conditions which permit the production of aspartate or a composition comprising aspartate in said non-human organism or in the culture medium surrounding said non-human organism.

[14656] Accordingly, the present invention relates to a process for the production of phenylalanine, which comprises
[14657] (a) increasing or generating one or more activities selected from the group consisting of serine acetyltransferase in a non-human organism or a part thereof, preferably a microorganism, a plant cell, a plant or a part thereof, as compared to a corresponding non-transformed wild type non-human organism or a part thereof; and
[14658] (b) growing the non-human organism or a part thereof under conditions which permit the production of phenylalanine or a composition comprising phenylalanine in said non-human organism or in the culture medium surrounding said non-human organism.

[14659] Accordingly, the present invention relates to a process for the production of tyrosine, which comprises
[14660] (a) increasing or generating one or more activities selected from the group consisting of serine acetyltransferase in a non-human organism or a part thereof, preferably a microorganism, a plant cell, a plant or a part thereof, as compared to a corresponding non-transformed wild type non-human organism or a part thereof; and
[14661] (b) growing the non-human organism or a part thereof under conditions which permit the production of tyrosine or a composition comprising tyrosine in said non-human organism or in the culture medium surrounding said non-human organism.

[14662] Accordingly, the present invention relates to a process for the production of alanine, which comprises
[14663] (a) increasing or generating one or more activities selected from the group consisting of phosphopantetheine adenylyltransferase in a non-human organism or a part thereof, preferably a microorganism, a plant cell, a plant or a part thereof, as compared to a corresponding non-transformed wild type non-human organism or a part thereof; and
[14664] (b) growing the non-human organism or a part thereof under conditions which permit the production of alanine or a composition comprising alanine in said non-human organism or in the culture medium surrounding said non-human organism.

[14665] Accordingly, the present invention relates to a process for the production of asparagine, which comprises
[14666] (a) increasing or generating one or more activities selected from the group consisting of phosphopantetheine adenylyltransferase in a non-human organism or a part thereof, preferably a microorganism, a plant cell, a plant or a part thereof, as compared to a corresponding non-transformed wild type non-human organism or a part thereof; and
[14667] (b) growing the non-human organism or a part thereof under conditions which permit the production of asparagine or a composition comprising asparagine in said non-human organism or in the culture medium surrounding said non-human organism.

[14668] Accordingly, the present invention relates to a process for the production of phenylalanine, which comprises
[14669] (a) increasing or generating one or more activities selected from the group consisting of phosphopantetheine adenylyltransferase in a non-human organism or a part thereof, preferably a microorganism, a plant cell, a plant or a part thereof, as compared to a corresponding non-transformed wild type non-human organism or a part thereof; and
[14670] (b) growing the non-human organism or a part thereof under conditions which permit the production of phenylalanine or a composition comprising phenylalanine in said non-human organism or in the culture medium surrounding said non-human organism.

[14671] Accordingly, the present invention relates to a process for the production of glycine, which comprises
[14672] (a) increasing or generating one or more activities selected from the group consisting of b3646-protein in a non-human organism or a part thereof, preferably a microorganism, a plant cell, a plant or a part thereof, as compared to a corresponding non-transformed wild type non-human organism or a part thereof; and
[14673] (b) growing the non-human organism or a part thereof under conditions which permit the production of glycine or a composition comprising glycine in said non-human organism or in the culture medium surrounding said non-human organism.

[14674] Accordingly, the present invention relates to a process for the production of tyrosine, which comprises
[14675] (a) increasing or generating one or more activities selected from the group consisting of acetolactate synthase in a non-human organism or a part thereof, preferably a microorganism, a plant cell, a plant or a part thereof, as compared to a corresponding non-transformed wild type non-human organism or a part thereof; and
[14676] (b) growing the non-human organism or a part thereof under conditions which permit the production of tyrosine or a composition comprising tyrosine in said non-human organism or in the culture medium surrounding said non-human organism.

[14677] Accordingly, the present invention relates to a process for the production of asparagine, which comprises
[14678] (a) increasing or generating one or more activities selected from the group consisting of aspartate-ammonia ligase in a non-human organism or a part thereof, preferably a microorganism, a plant cell, a plant or a part thereof, as compared to a corresponding non-transformed wild type non-human organism or a part thereof; and
[14679] (b) growing the non-human organism or a part thereof under conditions which permit the production of asparagine or a composition comprising asparagine in said non-human organism or in the culture medium surrounding said non-human organism.

[14680] Accordingly, the present invention relates to a process for the production of glycine, which comprises
[14681] (a) increasing or generating one or more activities selected from the group consisting of dihydroxyacid dehydratase in a non-human organism or a part thereof, preferably a microorganism, a plant cell, a plant or a part thereof, as compared to a corresponding non-transformed wild type non-human organism or a part thereof; and
[14682] (b) growing the non-human organism or a part thereof under conditions which permit the production of glycine or a composition comprising glycine in said non-human organism or in the culture medium surrounding said non-human organism.

[14683] Accordingly, the present invention relates to a process for the production of phenylalanine, which comprises
[14684] (a) increasing or generating one or more activities selected from the group consisting of dihydroxyacid dehydratase in a non-human organism or a part thereof, preferably a microorganism, a plant cell, a plant or a part thereof, as compared to a corresponding non-transformed wild type non-human organism or a part thereof; and
[14685] (b) growing the non-human organism or a part thereof under conditions which permit the production of phenylalanine or a composition comprising phenylalanine in said non-human organism or in the culture medium surrounding said non-human organism.

[14686] Accordingly, the present invention relates to a process for the production of aspartate, which comprises
[14687] (a) increasing or generating one or more activities selected from the group consisting of b3791-protein in a non-human organism or a part thereof, preferably a microorganism, a plant cell, a plant or a part thereof, as compared to a corresponding non-transformed wild type non-human organism or a part thereof; and
[14688] (b) growing the non-human organism or a part thereof under conditions which permit the production of aspartate or a composition comprising aspartate in said non-human organism or in the culture medium surrounding said non-human organism.

[14689] Accordingly, the present invention relates to a process for the production of 5-oxoproline, which comprises
[14690] (a) increasing or generating one or more activities selected from the group consisting of b3791-protein in a non-human organism or a part thereof, preferably a microorganism, a plant cell, a plant or a part thereof, as compared to a corresponding non-transformed wild type non-human organism or a part thereof; and
[14691] (b) growing the non-human organism or a part thereof under conditions which permit the production of 5-oxoproline or a composition comprising 5-oxoproline in said non-human organism or in the culture medium surrounding said non-human organism.

[14692] Accordingly, the present invention relates to a process for the production of phenylalanine, which comprises
[14693] (a) increasing or generating one or more activities selected from the group consisting of enterobacterial common antigen polymerase in a non-human organism or a part thereof, preferably a microorganism, a plant cell, a plant or a part thereof, as compared to a corresponding non-transformed wild type non-human organism or a part thereof; and
[14694] (b) growing the non-human organism or a part thereof under conditions which permit the production of phenylalanine or a composition comprising phenylalanine in said non-human organism or in the culture medium surrounding said non-human organism.

[14695] Accordingly, the present invention relates to a process for the production of phenylalanine, which comprises
[14696] (a) increasing or generating one or more activities selected from the group consisting of DNA helicase II in a non-human organism or a part thereof, preferably a microorganism, a plant cell, a plant or a part thereof, as compared to a corresponding non-transformed wild type non-human organism or a part thereof; and
[14697] (b) growing the non-human organism or a part thereof under conditions which permit the production of phenylalanine or a composition comprising phenylalanine in said non-human organism or in the culture medium surrounding said non-human organism.

[14698] Accordingly, the present invention relates to a process for the production of citrulline, which comprises
[14699] (a) increasing or generating one or more activities selected from the group consisting of b3814-protein in a non-human organism or a part thereof, preferably a microorganism, a plant cell, a plant or a part thereof, as compared to a corresponding non-transformed wild type non-human organism or a part thereof; and
[14700] (b) growing the non-human organism or a part thereof under conditions which permit the production of citrulline or a composition comprising citrulline in said non-human organism or in the culture medium surrounding said non-human organism.

[14701] Accordingly, the present invention relates to a process for the production of alanine, which comprises
[14702] (a) increasing or generating one or more activities selected from the group consisting of transcriptional regulator in a non-human organism or a part thereof, preferably a microorganism, a plant cell, a plant or a part thereof, as compared to a corresponding non-transformed wild type non-human organism or a part thereof; and
[14703] (b) growing the non-human organism or a part thereof under conditions which permit the production of alanine or a composition comprising alanine in said non-human organism or in the culture medium surrounding said non-human organism.

[14704] Accordingly, the present invention relates to a process for the production of aspartate, which comprises
[14705] (a) increasing or generating one or more activities selected from the group consisting of transcriptional regulator in a non-human organism or a part thereof, preferably a microorganism, a plant cell, a plant or a part thereof, as compared to a corresponding non-transformed wild type non-human organism or a part thereof; and
[14706] (b) growing the non-human organism or a part thereof under conditions which permit the production of aspartate or a composition comprising aspartate in said non-human organism or in the culture medium surrounding said non-human organism.

[14707] Accordingly, the present invention relates to a process for the production of serine, which comprises
[14708] (a) increasing or generating one or more activities selected from the group consisting of transcriptional regulator in a non-human organism or a part thereof, preferably a microorganism, a plant cell, a plant or a part thereof, as compared to a corresponding non-transformed wild type non-human organism or a part thereof; and
[14709] (b) growing the non-human organism or a part thereof under conditions which permit the production of serine or a composition comprising serine in said non-human organism or in the culture medium surrounding said non-human organism.

[14710] Accordingly, the present invention relates to a process for the production of tyrosine, which comprises
[14711] (a) increasing or generating one or more activities selected from the group consisting of transcriptional regulator in a non-human organism or a part thereof, preferably a microorganism, a plant cell, a plant or a part thereof, as compared to a corresponding non-transformed wild type non-human organism or a part thereof; and
[14712] (b) growing the non-human organism or a part thereof under conditions which permit the production of tyrosine or a composition comprising tyrosine in said non-human organism or in the culture medium surrounding said non-human organism.

[14713] Accordingly, the present invention relates to a process for the production of phenylalanine, which comprises
[14714] (a) increasing or generating one or more activities selected from the group consisting of b3989-protein in a non-human organism or a part thereof, preferably a microorganism, a plant cell, a plant or a part thereof, as compared to a corresponding non-transformed wild type non-human organism or a part thereof; and
[14715] (b) growing the non-human organism or a part thereof under conditions which permit the production of phenylalanine or a composition comprising phenylalanine in said non-human organism or in the culture medium surrounding said non-human organism.

[14716] Accordingly, the present invention relates to a process for the production of tyrosine, which comprises
[14717] (a) increasing or generating one or more activities selected from the group consisting of b3989-protein in a non-human organism or a part thereof, preferably a microorganism, a plant cell, a plant or a part thereof, as compared to a corresponding non-transformed wild type non-human organism or a part thereof; and
[14718] (b) growing the non-human organism or a part thereof under conditions which permit the production of tyrosine or a composition comprising tyrosine in said non-human organism or in the culture medium surrounding said non-human organism.

[14719] Accordingly, the present invention relates to a process for the production of aspartate, which comprises
[14720] (a) increasing or generating one or more activities selected from the group consisting of acetyltransferase in a non-human organism or a part thereof, preferably a microorganism, a plant cell, a plant or a part thereof, as compared to a corresponding non-transformed wild type non-human organism or a part thereof; and
[14721] (b) growing the non-human organism or a part thereof under conditions which permit the production of aspartate or a composition comprising aspartate in said non-human organism or in the culture medium surrounding said non-human organism.

[14722] Accordingly, the present invention relates to a process for the production of 5-oxoproline, which comprises
[14723] (a) increasing or generating one or more activities selected from the group consisting of acetyltransferase in a non-human organism or a part thereof, preferably a microorganism, a plant cell, a plant or a part thereof, as compared to a corresponding non-transformed wild type non-human organism or a part thereof; and
[14724] (b) growing the non-human organism or a part thereof under conditions which permit the production of 5-oxoproline or a composition comprising 5-oxoproline in said non-human organism or in the culture medium surrounding said non-human organism.

[14725] Accordingly, the present invention relates to a process for the production of glycine, which comprises
[14726] (a) increasing or generating one or more activities selected from the group consisting of aspartate kinase in a non-human organism or a part thereof, preferably a microorganism, a plant cell, a plant or a part thereof, as compared to a corresponding non-transformed wild type non-human organism or a part thereof; and
[14727] (b) growing the non-human organism or a part thereof under conditions which permit the production of glycine or a composition comprising glycine in said non-human organism or in the culture medium surrounding said non-human organism.

[14728] Accordingly, the present invention relates to a process for the production of serine, which comprises
[14729] (a) increasing or generating one or more activities selected from the group consisting of aspartate kinase in a non-human organism or a part thereof, preferably a microorganism, a plant cell, a plant or a part thereof, as compared to a corresponding non-transformed wild type non-human organism or a part thereof; and
[14730] (b) growing the non-human organism or a part thereof under conditions which permit the production of serine or a composition comprising serine in said non-human organism or in the culture medium surrounding said non-human organism.

[14731] Accordingly, the present invention relates to a process for the production of alanine, which comprises
[14732] (a) increasing or generating one or more activities selected from the group consisting of b4029-protein in a non-human organism or a part thereof, preferably a microorganism, a plant cell, a plant or a part thereof, as compared to a corresponding non-transformed wild type non-human organism or a part thereof; and
[14733] (b) growing the non-human organism or a part thereof under conditions which permit the production of alanine or a composition comprising alanine in said non-human organism or in the culture medium surrounding said non-human organism.

[14734] Accordingly, the present invention relates to a process for the production of aspartate, which comprises
[14735] (a) increasing or generating one or more activities selected from the group consisting of b4029-protein in a non-human organism or a part thereof, preferably a microorganism, a plant cell, a plant or a part thereof, as compared to a corresponding non-transformed wild type non-human organism or a part thereof; and
[14736] (b) growing the non-human organism or a part thereof under conditions which permit the production of aspartate or a composition comprising aspartate in said non-human organism or in the culture medium surrounding said non-human organism.

[14737] Accordingly, the present invention relates to a process for the production of glycine, which comprises
[14738] (a) increasing or generating one or more activities selected from the group consisting of b4029-protein in a non-human organism or a part thereof, preferably a microorganism, a plant cell, a plant or a part thereof, as compared to a corresponding non-transformed wild type non-human organism or a part thereof; and
[14739] (b) growing the non-human organism or a part thereof under conditions which permit the production of glycine or a composition comprising glycine in said non-human organism or in the culture medium surrounding said non-human organism.

[14740] Accordingly, the present invention relates to a process for the production of phenylalanine, which comprises
[14741] (a) increasing or generating one or more activities selected from the group consisting of b4029-protein in a non-human organism or a part thereof, preferably a microorganism, a plant cell, a plant or a part thereof, as compared to a corresponding non-transformed wild type non-human organism or a part thereof; and
[14742] (b) growing the non-human organism or a part thereof under conditions which permit the production of phenylalanine or a composition comprising phenylalanine in said non-human organism or in the culture medium surrounding said non-human organism.

[14743] Accordingly, the present invention relates to a process for the production of serine, which comprises
[14744] (a) increasing or generating one or more activities selected from the group consisting of b4029-protein in a non-human organism or a part thereof, preferably a microorganism, a plant cell, a plant or a part thereof, as compared to a corresponding non-transformed wild type non-human organism or a part thereof; and
[14745] (b) growing the non-human organism or a part thereof under conditions which permit the production of serine or a composition comprising serine in said non-human organism or in the culture medium surrounding said non-human organism.

[14746] Accordingly, the present invention relates to a process for the production of tyrosine, which comprises
[14747] (a) increasing or generating one or more activities selected from the group consisting of b4029-protein in a non-human organism or a part thereof, preferably a microorganism, a plant cell, a plant or a part thereof, as compared to a corresponding non-transformed wild type non-human organism or a part thereof; and
[14748] (b) growing the non-human organism or a part thereof under conditions which permit the production of tyrosine or a composition comprising tyrosine in said non-human organism or in the culture medium surrounding said non-human organism.

[14749] Accordingly, the present invention relates to a process for the production of 5-oxoproline, which comprises
[14750] (a) increasing or generating one or more activities selected from the group consisting of b4029-protein in a non-human organism or a part thereof, preferably a microorganism, a plant cell, a plant or a part thereof, as compared to a corresponding non-transformed wild type non-human organism or a part thereof; and
[14751] (b) growing the non-human organism or a part thereof under conditions which permit the production of 5-oxoproline or a composition comprising 5-oxoproline in said non-human organism or in the culture medium surrounding said non-human organism.

[14752] Accordingly, the present invention relates to a process for the production of serine, which comprises
[14753] (a) increasing or generating one or more activities selected from the group consisting of b4121-protein in a non-human organism or a part thereof, preferably a microorganism, a plant cell, a plant or a part thereof, as compared to a corresponding non-transformed wild type non-human organism or a part thereof; and
[14754] (b) growing the non-human organism or a part thereof under conditions which permit the production of serine or a composition comprising serine in said non-human organism or in the culture medium surrounding said non-human organism.

[14755] Accordingly, the present invention relates to a process for the production of aspartate, which comprises
[14756] (a) increasing or generating one or more activities selected from the group consisting of acetyltransferase in a non-human organism or a part thereof, preferably a microorganism, a plant cell, a plant or a part thereof, as compared to a corresponding non-transformed wild type non-human organism or a part thereof; and
[14757] (b) growing the non-human organism or a part thereof under conditions which permit the production of aspartate or a composition comprising aspartate in said non-human organism or in the culture medium surrounding said non-human organism.

[14758] Accordingly, the present invention relates to a process for the production of phenylalanine, which comprises
[14759] (a) increasing or generating one or more activities selected from the group consisting of acetyltransferase in a non-human organism or a part thereof, preferably a microorganism, a plant cell, a plant or a part thereof, as compared to a corresponding non-transformed wild type non-human organism or a part thereof; and
[14760] (b) growing the non-human organism or a part thereof under conditions which permit the production of phenylalanine or a composition comprising phenylalanine in said non-human organism or in the culture medium surrounding said non-human organism.

[14761] Accordingly, the present invention relates to a process for the production of serine, which comprises
[14762] (a) increasing or generating one or more activities selected from the group consisting of acetyltransferase in a non-human organism or a part thereof, preferably a microorganism, a plant cell, a plant or a part thereof, as compared to a corresponding non-transformed wild type non-human organism or a part thereof; and
[14763] (b) growing the non-human organism or a part thereof under conditions which permit the production of serine or a composition comprising serine in said non-human organism or in the culture medium surrounding said non-human organism.

[14764] Accordingly, the present invention relates to a process for the production of tyrosine, which comprises
[14765] (a) increasing or generating one or more activities selected from the group consisting of acetyltransferase in a non-human organism or a part thereof, preferably a microorganism, a plant cell, a plant or a part thereof, as compared to a corresponding non-transformed wild type non-human organism or a part thereof; and
[14766] (b) growing the non-human organism or a part thereof under conditions which permit the production of tyrosine or a composition comprising tyrosine in said non-human organism or in the culture medium surrounding said non-human organism.

[14767] Accordingly, the present invention relates to a process for the production of serine, which comprises
[14768] (a) increasing or generating one or more activities selected from the group consisting of thioredoxin in a non-human organism or a part thereof, preferably a microorganism, a plant cell, a plant or a part thereof, as compared to a corresponding non-transformed wild type non-human organism or a part thereof; and
[14769] (b) growing the non-human organism or a part thereof under conditions which permit the production of serine or a composition comprising serine in said non-human organism or in the culture medium surrounding said non-human organism.

[14770] Accordingly, the present invention relates to a process for the production of alanine, which comprises
[14771] (a) increasing or generating one or more activities selected from the group consisting of lysine decarboxylase in a non-human organism or a part thereof, preferably a microorganism, a plant cell, a plant or a part thereof, as compared to a corresponding non-transformed wild type non-human organism or a part thereof; and
[14772] (b) growing the non-human organism or a part thereof under conditions which permit the production of alanine or a composition comprising alanine in said non-human organism or in the culture medium surrounding said non-human organism.

[14773] Accordingly, the present invention relates to a process for the production of asparagine, which comprises
[14774] (a) increasing or generating one or more activities selected from the group consisting of GM02LC11114-protein in a non-human organism or a part thereof, preferably a microorganism, a plant cell, a plant or a part thereof, as compared to a corresponding non-transformed wild type non-human organism or a part thereof; and
[14775] (b) growing the non-human organism or a part thereof under conditions which permit the production of asparagine or a composition comprising asparagine in said non-human organism or in the culture medium surrounding said non-human organism.

[14776] Accordingly, the present invention relates to a process for the production of phenylalanine, which comprises
[14777] (a) increasing or generating one or more activities selected from the group consisting of GM02LC11114-protein in a non-human organism or a part thereof, preferably a microorganism, a plant cell, a plant or a part thereof, as compared to a corresponding non-transformed wild type non-human organism or a part thereof; and
[14778] (b) growing the non-human organism or a part thereof under conditions which permit the production of phenylalanine or a composition comprising phenylalanine in said non-human organism or in the culture medium surrounding said non-human organism.

[14779] Accordingly, the present invention relates to a process for the production of alanine, which comprises
[14780] (a) increasing or generating one or more activities selected from the group consisting of glutaredoxin in a non-human organism or a part thereof, preferably a microorganism, a plant cell, a plant or a part thereof, as compared to a corresponding non-transformed wild type non-human organism or a part thereof; and
[14781] (b) growing the non-human organism or a part thereof under conditions which permit the production of alanine or a composition comprising alanine in said non-human organism or in the culture medium surrounding said non-human organism.

[14782] Accordingly, the present invention relates to a process for the production of phenylalanine, which comprises
[14783] (a) increasing or generating one or more activities selected from the group consisting of glutaredoxin in a non-human organism or a part thereof, preferably a microorganism, a plant cell, a plant or a part thereof, as compared to a corresponding non-transformed wild type non-human organism or a part thereof; and
[14784] (b) growing the non-human organism or a part thereof under conditions which permit the production of phenylalanine or a composition comprising phenylalanine in said non-human organism or in the culture medium surrounding said non-human organism.

[14785] Accordingly, the present invention relates to a process for the production of tyrosine, which comprises
[14786] (a) increasing or generating one or more activities selected from the group consisting of glutaredoxin in a non-human organism or a part thereof, preferably a microorganism, a plant cell, a plant or a part thereof, as compared to a corresponding non-transformed wild type non-human organism or a part thereof; and
[14787] (b) growing the non-human organism or a part thereof under conditions which permit the production of tyrosine or a composition comprising tyrosine in said non-human organism or in the culture medium surrounding said non-human organism.

[14788] Accordingly, the present invention relates to a process for the production of phenylalanine, which comprises
[14789] (a) increasing or generating one or more activities selected from the group consisting of histone H2A in a non-human organism or a part thereof, preferably a microorganism, a plant cell, a plant or a part thereof, as compared to a corresponding non-transformed wild type non-human organism or a part thereof; and
[14790] (b) growing the non-human organism or a part thereof under conditions which permit the production of phenylalanine or a composition comprising phenylalanine in said non-human organism or in the culture medium surrounding said non-human organism.

[14791] Accordingly, the present invention relates to a process for the production of tyrosine, which comprises
[14792] (a) increasing or generating one or more activities selected from the group consisting of histone H2A in a non-human organism or a part thereof, preferably a microorganism, a plant cell, a plant or a part thereof, as compared to a corresponding non-transformed wild type non-human organism or a part thereof; and
[14793] (b) growing the non-human organism or a part thereof under conditions which permit the production of tyrosine or a composition comprising tyrosine in said non-human organism or in the culture medium surrounding said non-human organism.

[14794] Accordingly, the present invention relates to a process for the production of aspartate, which comprises
[14795] (a) increasing or generating one or more activities selected from the group consisting of GM02LC17485-protein in a non-human organism or a part thereof, preferably a microorganism, a plant cell, a plant or a part thereof, as compared to a corresponding non-transformed wild type non-human organism or a part thereof; and
[14796] (b) growing the non-human organism or a part thereof under conditions which permit the production of aspartate or a composition comprising aspartate in said non-human organism or in the culture medium surrounding said non-human organism.

[14797] Accordingly, the present invention relates to a process for the production of phenylalanine, which comprises
[14798] (a) increasing or generating one or more activities selected from the group consisting of RNA binding protein in a non-human organism or a part thereof, preferably a microorganism, a plant cell, a plant or a part thereof, as compared to a corresponding non-transformed wild type non-human organism or a part thereof; and
[14799] (b) growing the non-human organism or a part thereof under conditions which permit the production of phenylalanine or a composition comprising phenylalanine in said non-human organism or in the culture medium surrounding said non-human organism.

[14800] Accordingly, the present invention relates to a process for the production of tyrosine, which comprises
[14801] (a) increasing or generating one or more activities selected from the group consisting of RNA binding protein in a non-human organism or a part thereof, preferably a microorganism, a plant cell, a plant or a part thereof, as compared to a corresponding non-transformed wild type non-human organism or a part thereof; and
[14802] (b) growing the non-human organism or a part thereof under conditions which permit the production of tyrosine or a composition comprising tyrosine in said non-human organism or in the culture medium surrounding said non-human organism.

[14803] Accordingly, the present invention relates to a process for the production of phenylalanine, which comprises
[14804] (a) increasing or generating one or more activities selected from the group consisting of transcription factor in a non-human organism or a part thereof, preferably a microorganism, a plant cell, a plant or a part thereof, as compared to a corresponding non-transformed wild type non-human organism or a part thereof; and
[14805] (b) growing the non-human organism or a part thereof under conditions which permit the production of phenylalanine or a composition comprising phenylalanine in said non-human organism or in the culture medium surrounding said non-human organism.

[14806] Accordingly, the present invention relates to a process for the production of serine, which comprises
[14807] (a) increasing or generating one or more activities selected from the group consisting of transcription factor in a non-human organism or a part thereof, preferably a microorganism, a plant cell, a plant or a part thereof, as compared to a corresponding non-transformed wild type non-human organism or a part thereof; and
[14808] (b) growing the non-human organism or a part thereof under conditions which permit the production of serine or a composition comprising serine in said non-human organism or in the culture medium surrounding said non-human organism.

[14809] Accordingly, the present invention relates to a process for the production of tyrosine, which comprises
[14810] (a) increasing or generating one or more activities selected from the group consisting of transcription factor in a non-human organism or a part thereof, preferably a microorganism, a plant cell, a plant or a part thereof, as compared to a corresponding non-transformed wild type non-human organism or a part thereof; and
[14811] (b) growing the non-human organism or a part thereof under conditions which permit the production of tyrosine or a composition comprising tyrosine in said non-human organism or in the culture medium surrounding said non-human organism.

[14812] Accordingly, the present invention relates to a process for the production of alanine, which comprises
[14813] (a) increasing or generating one or more activities selected from the group consisting of cyclin D in a non-human organism or a part thereof, preferably a microorganism, a plant cell, a plant or a part thereof, as compared to a corresponding non-transformed wild type non-human organism or a part thereof; and
[14814] (b) growing the non-human organism or a part thereof under conditions which permit the production of alanine or a composition comprising alanine in said non-human organism or in the culture medium surrounding said non-human organism.

[14815] Accordingly, the present invention relates to a process for the production of serine, which comprises
[14816] (a) increasing or generating one or more activities selected from the group consisting of cyclin D in a non-human organism or a part thereof, preferably a microorganism, a plant cell, a plant or a part thereof, as compared to a corresponding non-transformed wild type non-human organism or a part thereof; and
[14817] (b) growing the non-human organism or a part thereof under conditions which permit the production of serine or a composition comprising serine in said non-human organism or in the culture medium surrounding said non-human organism.

[14818] Accordingly, the present invention relates to a process for the production of alanine, which comprises
[14819] (a) increasing or generating one or more activities selected from the group consisting of glutaredoxin in a non-human organism or a part thereof, preferably a microorganism, a plant cell, a plant or a part thereof, as compared to a corresponding non-transformed wild type non-human organism or a part thereof; and
[14820] (b) growing the non-human organism or a part thereof under conditions which permit the production of alanine or a composition comprising alanine in said non-human organism or in the culture medium surrounding said non-human organism.

[14821] Accordingly, the present invention relates to a process for the production of glycine, which comprises
[14822] (a) increasing or generating one or more activities selected from the group consisting of glutaredoxin in a non-human organism or a part thereof, preferably a microorganism, a plant cell, a plant or a part thereof, as compared to a corresponding non-transformed wild type non-human organism or a part thereof; and
[14823] (b) growing the non-human organism or a part thereof under conditions which permit the production of glycine or a composition comprising glycine in said non-human organism or in the culture medium surrounding said non-human organism.

[14824] Accordingly, the present invention relates to a process for the production of serine, which comprises
[14825] (a) increasing or generating one or more activities selected from the group consisting of glutaredoxin in a non-human organism or a part thereof, preferably a microorganism, a plant cell, a plant or a part thereof, as compared to a corresponding non-transformed wild type non-human organism or a part thereof; and
[14826] (b) growing the non-human organism or a part thereof under conditions which permit the production of serine or a composition comprising serine in said non-human organism or in the culture medium surrounding said non-human organism.

[14827] Accordingly, the present invention relates to a process for the production of asparagine, which comprises
[14828] (a) increasing or generating one or more activities selected from the group consisting of s_pp015018333r-protein in a non-human organism or a part thereof, preferably a microorganism, a plant cell, a plant or a part thereof, as compared to a corresponding non-transformed wild type non-human organism or a part thereof; and
[14829] (b) growing the non-human organism or a part thereof under conditions which permit the production of asparagine or a composition comprising asparagine in said non-human organism or in the culture medium surrounding said non-human organism.

[14830] Accordingly, the present invention relates to a process for the production of phenylalanine, which comprises
[14831] (a) increasing or generating one or more activities selected from the group consisting of s_pp015018333r-protein in a non-human organism or a part thereof, preferably a microorganism, a plant cell, a plant or a part thereof, as compared to a corresponding non-transformed wild type non-human organism or a part thereof; and
[14832] (b) growing the non-human organism or a part thereof under conditions which permit the production of phenylalanine or a composition comprising phenylalanine in said non-human organism or in the culture medium surrounding said non-human organism.

[14833] Accordingly, the present invention relates to a process for the production of tyrosine, which comprises
[14834] (a) increasing or generating one or more activities selected from the group consisting of s_pp015018333r-protein in a non-human organism or a part thereof, preferably a microorganism, a plant cell, a plant or a part thereof, as compared to a corresponding non-transformed wild type non-human organism or a part thereof; and
[14835] (b) growing the non-human organism or a part thereof under conditions which permit the production of tyrosine or a composition comprising tyrosine in said non-human organism or in the culture medium surrounding said non-human organism.

[14836] Accordingly, the present invention relates to a process for the production of 5-oxoproline, which comprises
[14837] (a) increasing or generating one or more activities selected from the group consisting of s_pp015018333r-protein in a non-human organism or a part thereof, preferably a microorganism, a plant cell, a plant or a part thereof, as compared to a corresponding non-transformed wild type non-human organism or a part thereof; and
[14838] (b) growing the non-human organism or a part thereof under conditions which permit the production of 5-oxoproline or a composition comprising 5-oxoproline in said non-human organism or in the culture medium surrounding said non-human organism.

[14839] Accordingly, the present invention relates to a process for the production of citrulline, which comprises
[14840] (a) increasing or generating one or more activities selected from the group consisting of N-acetyl-gamma-glutamyl-phosphate reductase in a non-human organism or a part thereof, preferably a microorganism, a plant cell, a plant or a part thereof, as compared to a corresponding non-transformed wild type non-human organism or a part thereof; and
[14841] (b) growing the non-human organism or a part thereof under conditions which permit the production of citrulline or a composition comprising citrulline in said non-human organism or in the culture medium surrounding said non-human organism.

[14842] Accordingly, the present invention relates to a process for the production of asparagine, which comprises
[14843] (a) increasing or generating one or more activities selected from the group consisting of agmatinase in a non-human organism or a part thereof, preferably a microorganism, a plant cell, a plant or a part thereof, as compared to a corresponding non-transformed wild type non-human organism or a part thereof; and
[14844] (b) growing the non-human organism or a part thereof under conditions which permit the production of asparagine or a composition comprising asparagine in said non-human organism or in the culture medium surrounding said non-human organism.

[14845] Accordingly, the present invention relates to a process for the production of tyrosine, which comprises
[14846] (a) increasing or generating one or more activities selected from the group consisting of agmatinase in a non-human organism or a part thereof, preferably a microorganism, a plant cell, a plant or a part thereof, as compared to a corresponding non-transformed wild type non-human organism or a part thereof; and
[14847] (b) growing the non-human organism or a part thereof under conditions which permit the production of tyrosine or a composition comprising tyrosine in said non-human organism or in the culture medium surrounding said non-human organism.

[14848] Accordingly, the present invention relates to a process for the production of alanine, which comprises
[14849] (a) increasing or generating one or more activities selected from the group consisting of ABC transporter ATP binding component in a non-human organism or a part thereof, preferably a microorganism, a plant cell, a plant or a part thereof, as compared to a corresponding non-transformed wild type non-human organism or a part thereof; and
[14850] (b) growing the non-human organism or a part thereof under conditions which permit the production of alanine or a composition comprising alanine in said non-human organism or in the culture medium surrounding said non-human organism.

[14851] Accordingly, the present invention relates to a process for the production of phenylalanine, which comprises
[14852] (a) increasing or generating one or more activities selected from the group consisting of flavodoxin in a non-human organism or a part thereof, preferably a microorganism, a plant cell, a plant or a part thereof, as compared to a corresponding non-transformed wild type non-human organism or a part thereof; and
[14853] (b) growing the non-human organism or a part thereof under conditions which permit the production of phenylalanine or a composition comprising phenylalanine in said non-human organism or in the culture medium surrounding said non-human organism.

[14854] Accordingly, the present invention relates to a process for the production of tyrosine, which comprises
[14855] (a) increasing or generating one or more activities selected from the group consisting of flavodoxin in a non-human organism or a part thereof, preferably a microorganism, a plant cell, a plant or a part thereof, as compared to a corresponding non-transformed wild type non-human organism or a part thereof; and
[14856] (b) growing the non-human organism or a part thereof under conditions which permit the production of tyrosine or a composition comprising tyrosine in said non-human organism or in the culture medium surrounding said non-human organism.

[14857] Accordingly, the present invention relates to a process for the production of alanine, which comprises
[14858] (a) increasing or generating one or more activities selected from the group consisting of sll0281-protein in a non-human organism or a part thereof, preferably a microorganism, a plant cell, a plant or a part thereof, as compared to a corresponding non-transformed wild type non-human organism or a part thereof; and
[14859] (b) growing the non-human organism or a part thereof under conditions which permit the production of alanine or a composition comprising alanine in said non-human organism or in the culture medium surrounding said non-human organism.

[14860] Accordingly, the present invention relates to a process for the production of serine, which comprises
[14861] (a) increasing or generating one or more activities selected from the group consisting of uroporphyrin-III C-methyltransferase in a non-human organism or a part thereof, preferably a microorganism, a plant cell, a plant or a part thereof, as compared to a corresponding non-transformed wild type non-human organism or a part thereof; and
[14862] (b) growing the non-human organism or a part thereof under conditions which permit the production of serine or a composition comprising serine in said non-human organism or in the culture medium surrounding said non-human organism.

[14863] Accordingly, the present invention relates to a process for the production of phenylalanine, which comprises
[14864] (a) increasing or generating one or more activities selected from the group consisting of urease subunit in a non-human organism or a part thereof, preferably a microorganism, a plant cell, a plant or a part thereof, as compared to a corresponding non-transformed wild type non-human organism or a part thereof; and
[14865] (b) growing the non-human organism or a part thereof under conditions which permit the production of phenylalanine or a composition comprising phenylalanine in said non-human organism or in the culture medium surrounding said non-human organism.

[14866] Accordingly, the present invention relates to a process for the production of tyrosine, which comprises
[14867] (a) increasing or generating one or more activities selected from the group consisting of urease subunit in a non-human organism or a part thereof, preferably a microorganism, a plant cell, a plant or a part thereof, as compared to a corresponding non-transformed wild type non-human organism or a part thereof; and
[14868] (b) growing the non-human organism or a part thereof under conditions which permit the production of tyrosine or a composition comprising tyrosine in said non-human organism or in the culture medium surrounding said non-human organism.

[14869] Accordingly, the present invention relates to a process for the production of citrulline, which comprises
[14870] (a) increasing or generating one or more activities selected from the group consisting of glucokinase in a non-human organism or a part thereof, preferably a microorganism, a plant cell, a plant or a part thereof, as compared to a corresponding non-transformed wild type non-human organism or a part thereof; and
[14871] (b) growing the non-human organism or a part thereof under conditions which permit the production of citrulline or a composition comprising citrulline in said non-human organism or in the culture medium surrounding said non-human organism.

[14872] Accordingly, the present invention relates to a process for the production of serine, which comprises
[14873] (a) increasing or generating one or more activities selected from the group consisting of permease protein of phosphate ABC transporter in a non-human organism or a part thereof, preferably a microorganism, a plant cell, a plant or a part thereof, as compared to a corresponding non-transformed wild type non-human organism or a part thereof; and
[14874] (b) growing the non-human organism or a part thereof under conditions which permit the production of serine or a composition comprising serine in said non-human organism or in the culture medium surrounding said non-human organism.

[14875] Accordingly, the present invention relates to a process for the production of 5-oxoproline, which comprises
[14876] (a) increasing or generating one or more activities selected from the group consisting of permease protein of phosphate ABC transporter in a non-human organism or a part thereof, preferably a microorganism, a plant cell, a plant or a part thereof, as compared to a corresponding non-transformed wild type non-human organism or a part thereof; and
[14877] (b) growing the non-human organism or a part thereof under conditions which permit the production of 5-oxoproline or a composition comprising 5-oxoproline in said non-human organism or in the culture medium surrounding said non-human organism.

[14878] Accordingly, the present invention relates to a process for the production of aspartate, which comprises
[14879] (a) increasing or generating one or more activities selected from the group consisting of oxireductase in a non-human organism or a part thereof, preferably a microorganism, a plant cell, a plant or a part thereof, as compared to a corresponding non-transformed wild type non-human organism or a part thereof; and
[14880] (b) growing the non-human organism or a part thereof under conditions which permit the production of aspartate or a composition comprising aspartate in said non-human organism or in the culture medium surrounding said non-human organism.

[14881] Accordingly, the present invention relates to a process for the production of glycine, which comprises
[14882] (a) increasing or generating one or more activities selected from the group consisting of oxireductase in a non-human organism or a part thereof, preferably a microorganism, a plant cell, a plant or a part thereof, as compared to a corresponding non-transformed wild type non-human organism or a part thereof; and
[14883] (b) growing the non-human organism or a part thereof under conditions which permit the production of glycine or a composition comprising glycine in said non-human organism or in the culture medium surrounding said non-human organism.

[14884] Accordingly, the present invention relates to a process for the production of serine, which comprises
[14885] (a) increasing or generating one or more activities selected from the group consisting of oxireductase in a non-human organism or a part thereof, preferably a microorganism, a plant cell, a plant or a part thereof, as compared to a corresponding non-transformed wild type non-human organism or a part thereof; and
[14886] (b) growing the non-human organism or a part thereof under conditions which permit the production of serine or a composition comprising serine in said non-human organism or in the culture medium surrounding said non-human organism.

[14887] Accordingly, the present invention relates to a process for the production of tyrosine, which comprises
[14888] (a) increasing or generating one or more activities selected from the group consisting of oxireductase in a non-human organism or a part thereof, preferably a microorganism, a plant cell, a plant or a part thereof, as compared to a corresponding non-transformed wild type non-human organism or a part thereof; and
[14889] (b) growing the non-human organism or a part thereof under conditions which permit the production of tyrosine or a composition comprising tyrosine in said non-human organism or in the culture medium surrounding said non-human organism.

[14890] Accordingly, the present invention relates to a process for the production of aspartate, which comprises
[14891] (a) increasing or generating one or more activities selected from the group consisting of malate dehydrogenase in a non-human organism or a part thereof, preferably a microorganism, a plant cell, a plant or a part thereof, as compared to a corresponding non-transformed wild type non-human organism or a part thereof; and
[14892] (b) growing the non-human organism or a part thereof under conditions which permit the production of aspartate or a composition comprising aspartate in said non-human organism or in the culture medium surrounding said non-human organism.

[14893] Accordingly, the present invention relates to a process for the production of phenylalanine, which comprises
[14894] (a) increasing or generating one or more activities selected from the group consisting of malate dehydrogenase in a non-human organism or a part thereof, preferably a microorganism, a plant cell, a plant or a part thereof, as compared to a corresponding non-transformed wild type non-human organism or a part thereof; and
[14895] (b) growing the non-human organism or a part thereof under conditions which permit the production of phenylalanine or a composition comprising phenylalanine in said non-human organism or in the culture medium surrounding said non-human organism.

[14896] Accordingly, the present invention relates to a process for the production of serine, which comprises
[14897] (a) increasing or generating one or more activities selected from the group consisting of malate dehydrogenase in a non-human organism or a part thereof, preferably a microorganism, a plant cell, a plant or a part thereof, as compared to a corresponding non-transformed wild type non-human organism or a part thereof; and
[14898] (b) growing the non-human organism or a part thereof under conditions which permit the production of serine or a composition comprising serine in said non-human organism or in the culture medium surrounding said non-human organism.

[14899] Accordingly, the present invention relates to a process for the production of aspartate, which comprises
[14900] (a) increasing or generating one or more activities selected from the group consisting of 3-deoxy-7-phosphoheptulonate synthase in a non-human organism or a part thereof, preferably a microorganism, a plant cell, a plant or a part thereof, as compared to a corresponding non-transformed wild type non-human organism or a part thereof; and
[14901] (b) growing the non-human organism or a part thereof under conditions which permit the production of aspartate or a composition comprising aspartate in said non-human organism or in the culture medium surrounding said non-human organism.

[14902] Accordingly, the present invention relates to a process for the production of serine, which comprises
[14903] (a) increasing or generating one or more activities selected from the group consisting of glycogen synthase in a non-human organism or a part thereof, preferably a microorganism, a plant cell, a plant or a part thereof, as compared to a corresponding non-transformed wild type non-human organism or a part thereof; and
[14904] (b) growing the non-human organism or a part thereof under conditions which permit the production of serine or a composition comprising serine in said non-human organism or in the culture medium surrounding said non-human organism.

[14905] Accordingly, the present invention relates to a process for the production of aspartate, which comprises
[14906] (a) increasing or generating one or more activities selected from the group consisting of carbon dioxide concentrating mechanism protein in a non-human organism or a part thereof, preferably a microorganism, a plant cell, a plant or a part thereof, as compared to a corresponding non-transformed wild type non-human organism or a part thereof; and
[14907] (b) growing the non-human organism or a part thereof under conditions which permit the production of aspartate or a composition comprising aspartate in said non-human organism or in the culture medium surrounding said non-human organism.

[14908] Accordingly, the present invention relates to a process for the production of phenylalanine, which comprises
[14909] (a) increasing or generating one or more activities selected from the group consisting of carbon dioxide concentrating mechanism protein in a non-human organism or a part thereof, preferably a microorganism, a plant cell, a plant or a part thereof, as compared to a corresponding non-transformed wild type non-human organism or a part thereof; and
[14910] (b) growing the non-human organism or a part thereof under conditions which permit the production of phenylalanine or a composition comprising phenylalanine in said non-human organism or in the culture medium surrounding said non-human organism.

[14911] Accordingly, the present invention relates to a process for the production of serine, which comprises
[14912] (a) increasing or generating one or more activities selected from the group consisting of carbon dioxide concentrating mechanism protein in a non-human organism or a part thereof, preferably a microorganism, a plant cell, a plant or a part thereof, as compared to a corresponding non-transformed wild type non-human organism or a part thereof; and
[14913] (b) growing the non-human organism or a part thereof under conditions which permit the production of serine or a composition comprising serine in said non-human organism or in the culture medium surrounding said non-human organism.

[14914] Accordingly, the present invention relates to a process for the production of aspartate, which comprises
[14915] (a) increasing or generating one or more activities selected from the group consisting of sll1032-protein in a non-human organism or a part thereof, preferably a microorganism, a plant cell, a plant or a part thereof, as compared to a corresponding non-transformed wild type non-human organism or a part thereof; and
[14916] (b) growing the non-human organism or a part thereof under conditions which permit the production of aspartate or a composition comprising aspartate in said non-human organism or in the culture medium surrounding said non-human organism.

[14917] Accordingly, the present invention relates to a process for the production of serine, which comprises
[14918] (a) increasing or generating one or more activities selected from the group consisting of phosphoribosylformyl glycinamidine synthase subunit in a non-human organism or a part thereof, preferably a microorganism, a plant cell, a plant or a part thereof, as compared to a corresponding non-transformed wild type non-human organism or a part thereof; and
[14919] (b) growing the non-human organism or a part thereof under conditions which permit the production of serine or a composition comprising serine in said non-human organism or in the culture medium surrounding said non-human organism.

[14920] Accordingly, the present invention relates to a process for the production of aspartate, which comprises
[14921] (a) increasing or generating one or more activities selected from the group consisting of 5′-nucleotidase in a non-human organism or a part thereof, preferably a microorganism, a plant cell, a plant or a part thereof, as compared to a corresponding non-transformed wild type non-human organism or a part thereof; and
[14922] (b) growing the non-human organism or a part thereof under conditions which permit the production of aspartate or a composition comprising aspartate in said non-human organism or in the culture medium surrounding said non-human organism.

[14923] Accordingly, the present invention relates to a process for the production of 5-oxoproline, which comprises
[14924] (a) increasing or generating one or more activities selected from the group consisting of 5′-nucleotidase in a non-human organism or a part thereof, preferably a microorganism, a plant cell, a plant or a part thereof, as compared to a corresponding non-transformed wild type non-human organism or a part thereof; and
[14925] (b) growing the non-human organism or a part thereof under conditions which permit the production of 5-oxoproline or a composition comprising 5-oxoproline in said non-human organism or in the culture medium surrounding said non-human organism.

[14926] Accordingly, the present invention relates to a process for the production of asparagine, which comprises
[14927] (a) increasing or generating one or more activities selected from the group consisting of glycogen (starch) synthase in a non-human organism or a part thereof, preferably a microorganism, a plant cell, a plant or a part thereof, as compared to a corresponding non-transformed wild type non-human organism or a part thereof; and
[14928] (b) growing the non-human organism or a part thereof under conditions which permit the production of asparagine or a composition comprising asparagine in said non-human organism or in the culture medium surrounding said non-human organism.

[14929] Accordingly, the present invention relates to a process for the production of tyrosine, which comprises
[14930] (a) increasing or generating one or more activities selected from the group consisting of glycogen (starch) synthase in a non-human organism or a part thereof, preferably a microorganism, a plant cell, a plant or a part thereof, as compared to a corresponding non-transformed wild type non-human organism or a part thereof; and
[14931] (b) growing the non-human organism or a part thereof under conditions which permit the production of tyrosine or a composition comprising tyrosine in said non-human organism or in the culture medium surrounding said non-human organism.

[14932] Accordingly, the present invention relates to a process for the production of aspartate, which comprises
[14933] (a) increasing or generating one or more activities selected from the group consisting of CTP synthetase in a non-human organism or a part thereof, preferably a microorganism, a plant cell, a plant or a part thereof, as compared to a corresponding non-transformed wild type non-human organism or a part thereof; and
[14934] (b) growing the non-human organism or a part thereof under conditions which permit the production of aspartate or a composition comprising aspartate in said non-human organism or in the culture medium surrounding said non-human organism.

[14935] Accordingly, the present invention relates to a process for the production of glycine, which comprises
[14936] (a) increasing or generating one or more activities selected from the group consisting of nitrate/nitrite transport protein in a non-human organism or a part thereof, preferably a microorganism, a plant cell, a plant or a part thereof, as compared to a corresponding non-transformed wild type non-human organism or a part thereof; and
[14937] (b) growing the non-human organism or a part thereof under conditions which permit the production of glycine or a composition comprising glycine in said non-human organism or in the culture medium surrounding said non-human organism.

[14938] Accordingly, the present invention relates to a process for the production of phenylalanine, which comprises
[14939] (a) increasing or generating one or more activities selected from the group consisting of nitrate/nitrite transport protein in a non-human organism or a part thereof, preferably a microorganism, a plant cell, a plant or a part thereof, as compared to a corresponding non-transformed wild type non-human organism or a part thereof; and
[14940] (b) growing the non-human organism or a part thereof under conditions which permit the production of phenylalanine or a composition comprising phenylalanine in said non-human organism or in the culture medium surrounding said non-human organism.

[14941] Accordingly, the present invention relates to a process for the production of serine, which comprises
[14942] (a) increasing or generating one or more activities selected from the group consisting of nitrate/nitrite transport protein in a non-human organism or a part thereof, preferably a microorganism, a plant cell, a plant or a part thereof, as compared to a corresponding non-transformed wild type non-human organism or a part thereof; and
[14943] (b) growing the non-human organism or a part thereof under conditions which permit the production of serine or a composition comprising serine in said non-human organism or in the culture medium surrounding said non-human organism.

[14944] Accordingly, the present invention relates to a process for the production of tyrosine, which comprises
[14945] (a) increasing or generating one or more activities selected from the group consisting of nitrate/nitrite transport protein in a non-human organism or a part thereof, preferably a microorganism, a plant cell, a plant or a part thereof, as compared to a corresponding non-transformed wild type non-human organism or a part thereof; and
[14946] (b) growing the non-human organism or a part thereof under conditions which permit the production of tyrosine or a composition comprising tyrosine in said non-human organism or in the culture medium surrounding said non-human organism.

[14947] Accordingly, the present invention relates to a process for the production of aspartate, which comprises
[14948] (a) increasing or generating one or more activities selected from the group consisting of CDP-diacylglycerol-glycerol-3-phosphate 3-phosphatidyltransferase in a non-human organism or a part thereof, preferably a microorganism, a plant cell, a plant or a part thereof, as compared to a corresponding non-transformed wild type non-human organism or a part thereof; and
[14949] (b) growing the non-human organism or a part thereof under conditions which permit the production of aspartate or a composition comprising aspartate in said non-human organism or in the culture medium surrounding said non-human organism.

[14950] Accordingly, the present invention relates to a process for the production of 5-oxoproline, which comprises
[14951] (a) increasing or generating one or more activities selected from the group consisting of

[14952] CDP-diacylglycerol-glycerol-3-phosphate 3-phosphatidyltransferase in a non-human organism or a part thereof, preferably a microorganism, a plant cell, a plant or a part thereof, as compared to a corresponding non-transformed wild type non-human organism or a part thereof; and
[14953] (b) growing the non-human organism or a part thereof under conditions which permit the production of 5-oxoproline or a composition comprising 5-oxoproline in said non-human organism or in the culture medium surrounding said non-human organism.

[14954] Accordingly, the present invention relates to a process for the production of serine, which comprises
[14955] (a) increasing or generating one or more activities selected from the group consisting of glutathione S-transferase in a non-human organism or a part thereof, preferably a microorganism, a plant cell, a plant or a part thereof, as compared to a corresponding non-transformed wild type non-human organism or a part thereof; and
[14956] (b) growing the non-human organism or a part thereof under conditions which permit the production of serine or a composition comprising serine in said non-human organism or in the culture medium surrounding said non-human organism.

[14957] Accordingly, the present invention relates to a process for the production of aspartate, which comprises
[14958] (a) increasing or generating one or more activities selected from the group consisting of exopolyphosphatase in a non-human organism or a part thereof, preferably a microorganism, a plant cell, a plant or a part thereof, as compared to a corresponding non-transformed wild type non-human organism or a part thereof; and
[14959] (b) growing the non-human organism or a part thereof under conditions which permit the production of aspartate or a composition comprising aspartate in said non-human organism or in the culture medium surrounding said non-human organism.

[14960] Accordingly, the present invention relates to a process for the production of phenylalanine, which comprises
[14961] (a) increasing or generating one or more activities selected from the group consisting of exopolyphosphatase in a non-human organism or a part thereof, preferably a microorganism, a plant cell, a plant or a part thereof, as compared to a corresponding non-transformed wild type non-human organism or a part thereof; and
[14962] (b) growing the non-human organism or a part thereof under conditions which permit the production of phenylalanine or a composition comprising phenylalanine in said non-human organism or in the culture medium surrounding said non-human organism.

[14963] Accordingly, the present invention relates to a process for the production of serine, which comprises
[14964] (a) increasing or generating one or more activities selected from the group consisting of exopolyphosphatase in a non-human organism or a part thereof, preferably a microorganism, a plant cell, a plant or a part thereof, as compared to a corresponding non-transformed wild type non-human organism or a part thereof; and
[14965] (b) growing the non-human organism or a part thereof under conditions which permit the production of serine or a composition comprising serine in said non-human organism or in the culture medium surrounding said non-human organism.

[14966] Accordingly, the present invention relates to a process for the production of aspartate, which comprises
[14967] (a) increasing or generating one or more activities selected from the group consisting of ABC metal ion transporter substrate-binding protein in a non-human organism or a part thereof, preferably a microorganism, a plant cell, a plant or a part thereof, as compared to a corresponding non-transformed wild type non-human organism or a part thereof; and
[14968] (b) growing the non-human organism or a part thereof under conditions which permit the production of aspartate or a composition comprising aspartate in said non-human organism or in the culture medium surrounding said non-human organism.

[14969] Accordingly, the present invention relates to a process for the production of phenylalanine, which comprises
[14970] (a) increasing or generating one or more activities selected from the group consisting of ABC metal ion transporter substrate-binding protein in a non-human organism or a part thereof, preferably a microorganism, a plant cell, a plant or a part thereof, as compared to a corresponding non-transformed wild type non-human organism or a part thereof; and
[14971] (b) growing the non-human organism or a part thereof under conditions which permit the production of phenylalanine or a composition comprising phenylalanine in said non-human organism or in the culture medium surrounding said non-human organism.

[14972] Accordingly, the present invention relates to a process for the production of serine, which comprises
[14973] (a) increasing or generating one or more activities selected from the group consisting of sll1761-protein in a non-human organism or a part thereof, preferably a microorganism, a plant cell, a plant or a part thereof, as compared to a corresponding non-transformed wild type non-human organism or a part thereof; and
[14974] (b) growing the non-human organism or a part thereof under conditions which permit the production of serine or a composition comprising serine in said non-human organism or in the culture medium surrounding said non-human organism.

[14975] Accordingly, the present invention relates to a process for the production of tyrosine, which comprises
[14976] (a) increasing or generating one or more activities selected from the group consisting of sll1761-protein in a non-human organism or a part thereof, preferably a microorganism, a plant cell, a plant or a part thereof, as compared to a corresponding non-transformed wild type non-human organism or a part thereof; and
[14977] (b) growing the non-human organism or a part thereof under conditions which permit the production of tyrosine or a composition comprising tyrosine in said non-human organism or in the culture medium surrounding said non-human organism.

[14978] Accordingly, the present invention relates to a process for the production of alanine, which comprises
[14979] (a) increasing or generating one or more activities selected from the group consisting of adenylate kinase in a non-human organism or a part thereof, preferably a microorganism, a plant cell, a plant or a part thereof, as compared to a corresponding non-transformed wild type non-human organism or a part thereof; and
[14980] (b) growing the non-human organism or a part thereof under conditions which permit the production of alanine or a composition comprising alanine in said non-human organism or in the culture medium surrounding said non-human organism.

[14981] Accordingly, the present invention relates to a process for the production of citrulline, which comprises
[14982] (a) increasing or generating one or more activities selected from the group consisting of adenylate kinase in a non-human organism or a part thereof, preferably a microorganism, a plant cell, a plant or a part thereof, as compared to a corresponding non-transformed wild type non-human organism or a part thereof; and
[14983] (b) growing the non-human organism or a part thereof under conditions which permit the production of citrulline or a composition comprising citrulline in said non-human organism or in the culture medium surrounding said non-human organism.

[14984] Accordingly, the present invention relates to a process for the production of glycine, which comprises
[14985] (a) increasing or generating one or more activities selected from the group consisting of adenylate kinase in a non-human organism or a part thereof, preferably a microorganism, a plant cell, a plant or a part thereof, as compared to a corresponding non-transformed wild type non-human organism or a part thereof; and
[14986] (b) growing the non-human organism or a part thereof under conditions which permit the production of glycine or a composition comprising glycine in said non-human organism or in the culture medium surrounding said non-human organism.

[14987] Accordingly, the present invention relates to a process for the production of serine, which comprises
[14988] (a) increasing or generating one or more activities selected from the group consisting of adenylate kinase in a non-human organism or a part thereof, preferably a microorganism, a plant cell, a plant or a part thereof, as compared to a corresponding non-transformed wild type non-human organism or a part thereof; and
[14989] (b) growing the non-human organism or a part thereof under conditions which permit the production of serine or a composition comprising serine in said non-human organism or in the culture medium surrounding said non-human organism.

[14990] Accordingly, the present invention relates to a process for the production of tyrosine, which comprises
[14991] (a) increasing or generating one or more activities selected from the group consisting of adenylate kinase in a non-human organism or a part thereof, preferably a microorganism, a plant cell, a plant or a part thereof, as compared to a corresponding non-transformed wild type non-human organism or a part thereof; and
[14992] (b) growing the non-human organism or a part thereof under conditions which permit the production of tyrosine or a composition comprising tyrosine in said non-human organism or in the culture medium surrounding said non-human organism.

[14993] Accordingly, the present invention relates to a process for the production of glycine, which comprises
[14994] (a) increasing or generating one or more activities selected from the group consisting of acyl transferase in a non-human organism or a part thereof, preferably a microorganism, a plant cell, a plant or a part thereof, as compared to a corresponding non-transformed wild type non-human organism or a part thereof; and
[14995] (b) growing the non-human organism or a part thereof under conditions which permit the production of glycine or a composition comprising glycine in said non-human organism or in the culture medium surrounding said non-human organism.

[14996] Accordingly, the present invention relates to a process for the production of phenylalanine, which comprises
[14997] (a) increasing or generating one or more activities selected from the group consisting of acyl transferase in a non-human organism or a part thereof, preferably a microorganism, a plant cell, a plant or a part thereof, as compared to a corresponding non-transformed wild type non-human organism or a part thereof; and
[14998] (b) growing the non-human organism or a part thereof under conditions which permit the production of phenylalanine or a composition comprising phenylalanine in said non-human organism or in the culture medium surrounding said non-human organism.

[14999] Accordingly, the present invention relates to a process for the production of serine, which comprises
[15000] (a) increasing or generating one or more activities selected from the group consisting of acyl transferase in a non-human organism or a part thereof, preferably a microorganism, a plant cell, a plant or a part thereof, as compared to a corresponding non-transformed wild type non-human organism or a part thereof; and
[15001] (b) growing the non-human organism or a part thereof under conditions which permit the production of serine or a composition comprising serine in said non-human organism or in the culture medium surrounding said non-human organism.

[15002] Accordingly, the present invention relates to a process for the production of aspartate, which comprises
[15003] (a) increasing or generating one or more activities selected from the group consisting of coproporphyrinogen III oxidase in a non-human organism or a part thereof, preferably a microorganism, a plant cell, a plant or a part thereof, as compared to a corresponding non-transformed wild type non-human organism or a part thereof; and
[15004] (b) growing the non-human organism or a part thereof under conditions which permit the production of aspartate or a composition comprising aspartate in said non-human organism or in the culture medium surrounding said non-human organism.

[15005] Accordingly, the present invention relates to a process for the production of citrulline, which comprises
[15006] (a) increasing or generating one or more activities selected from the group consisting of coproporphyrinogen III oxidase in a non-human organism or a part thereof, preferably a microorganism, a plant cell, a plant or a part thereof, as compared to a corresponding non-transformed wild type non-human organism or a part thereof; and
[15007] (b) growing the non-human organism or a part thereof under conditions which permit the production of citrulline or a composition comprising citrulline in said non-human organism or in the culture medium surrounding said non-human organism.

[15008] Accordingly, the present invention relates to a process for the production of phenylalanine, which comprises
[15009] (a) increasing or generating one or more activities selected from the group consisting of coproporphyrinogen III oxidase in a non-human organism or a part thereof, preferably a microorganism, a plant cell, a plant or a part thereof, as compared to a corresponding non-transformed wild type non-human organism or a part thereof; and
[15010] (b) growing the non-human organism or a part thereof under conditions which permit the production of phenylalanine or a composition comprising phenylalanine in said non-human organism or in the culture medium surrounding said non-human organism.

[15011] Accordingly, the present invention relates to a process for the production of serine, which comprises
[15012] (a) increasing or generating one or more activities selected from the group consisting of coproporphyrinogen III oxidase in a non-human organism or a part thereof, preferably a microorganism, a plant cell, a plant or a part thereof, as compared to a corresponding non-transformed wild type non-human organism or a part thereof; and
[15013] (b) growing the non-human organism or a part thereof under conditions which permit the production of serine or a composition comprising serine in said non-human organism or in the culture medium surrounding said non-human organism.

[15014] Accordingly, the present invention relates to a process for the production of tyrosine, which comprises
[15015] (a) increasing or generating one or more activities selected from the group consisting of coproporphyrinogen Ill oxidase in a non-human organism or a part thereof, preferably a microorganism, a plant cell, a plant or a part thereof, as compared to a corresponding non-transformed wild type non-human organism or a part thereof; and
[15016] (b) growing the non-human organism or a part thereof under conditions which permit the production of tyrosine or a composition comprising tyrosine in said non-human organism or in the culture medium surrounding said non-human organism.

[15017] Accordingly, the present invention relates to a process for the production of aspartate, which comprises
[15018] (a) increasing or generating one or more activities selected from the group consisting of cation-transporting ATPase in a non-human organism or a part thereof, preferably a microorganism, a plant cell, a plant or a part thereof, as compared to a corresponding non-transformed wild type non-human organism or a part thereof; and
[15019] (b) growing the non-human organism or a part thereof under conditions which permit the production of aspartate or a composition comprising aspartate in said non-human organism or in the culture medium surrounding said non-human organism.

[15020] Accordingly, the present invention relates to a process for the production of aspartate, which comprises
[15021] (a) increasing or generating one or more activities selected from the group consisting of cation-transporting ATPase in a non-human organism or a part thereof, preferably a microorganism, a plant cell, a plant or a part thereof, as compared to a corresponding non-transformed wild type non-human organism or a part thereof; and
[15022] (b) growing the non-human organism or a part thereof under conditions which permit the production of aspartate or a composition comprising aspartate in said non-human organism or in the culture medium surrounding said non-human organism.

[15023] Accordingly, the present invention relates to a process for the production of glycine, which comprises
[15024] (a) increasing or generating one or more activities selected from the group consisting of glycosyl transferase in a non-human organism or a part thereof, preferably a microorganism, a plant cell, a plant or a part thereof, as compared to a corresponding non-transformed wild type non-human organism or a part thereof; and
[15025] (b) growing the non-human organism or a part thereof under conditions which permit the production of glycine or a composition comprising glycine in said non-human organism or in the culture medium surrounding said non-human organism.

[15026] Accordingly, the present invention relates to a process for the production of phenylalanine, which comprises
[15027] (a) increasing or generating one or more activities selected from the group consisting of precorrin methylase in a non-human organism or a part thereof, preferably a microorganism, a plant cell, a plant or a part thereof, as compared to a corresponding non-transformed wild type non-human organism or a part thereof; and
[15028] (b) growing the non-human organism or a part thereof under conditions which permit the production of phenylalanine or a composition comprising phenylalanine in said non-human organism or in the culture medium surrounding said non-human organism.

[15029] Accordingly, the present invention relates to a process for the production of tyrosine, which comprises
[15030] (a) increasing or generating one or more activities selected from the group consisting of precorrin methylase in a non-human organism or a part thereof, preferably a microorganism, a plant cell, a plant or a part thereof, as compared to a corresponding non-transformed wild type non-human organism or a part thereof; and
[15031] (b) growing the non-human organism or a part thereof under conditions which permit the production of tyrosine or a composition comprising tyrosine in said non-human organism or in the culture medium surrounding said non-human organism.

[15032] Accordingly, the present invention relates to a process for the production of citrulline, which comprises
[15033] (a) increasing or generating one or more activities selected from the group consisting of aldehyde dehydrogenase in a non-human organism or a part thereof, preferably a microorganism, a plant cell, a plant or a part thereof, as compared to a corresponding non-transformed wild type non-human organism or a part thereof; and
[15034] (b) growing the non-human organism or a part thereof under conditions which permit the production of citrulline or a composition comprising citrulline in said non-human organism or in the culture medium surrounding said non-human organism.

[15035] Accordingly, the present invention relates to a process for the production of alanine, which comprises
[15036] (a) increasing or generating one or more activities selected from the group consisting of bifunctional purine biosynthesis protein in a non-human organism or a part thereof, preferably a microorganism, a plant cell, a plant or a part thereof, as compared to a corresponding non-transformed wild type non-human organism or a part thereof; and
[15037] (b) growing the non-human organism or a part thereof under conditions which permit the production of alanine or a composition comprising alanine in said non-human organism or in the culture medium surrounding said non-human organism.

[15038] Accordingly, the present invention relates to a process for the production of serine, which comprises
[15039] (a) increasing or generating one or more activities selected from the group consisting of bifunctional purine biosynthesis protein in a non-human organism or a part thereof, preferably a microorganism, a plant cell, a plant or a part thereof, as compared to a corresponding non-transformed wild type non-human organism or a part thereof; and
[15040] (b) growing the non-human organism or a part thereof under conditions which permit the production of serine or a composition comprising serine in said non-human organism or in the culture medium surrounding said non-human organism.

[15041] Accordingly, the present invention relates to a process for the production of 5-oxoproline, which comprises
[15042] (a) increasing or generating one or more activities selected from the group consisting of bifunctional purine biosynthesis protein in a non-human organism or a part thereof, preferably a microorganism, a plant cell, a plant or a part thereof, as compared to a corresponding non-transformed wild type non-human organism or a part thereof; and
[15043] (b) growing the non-human organism or a part thereof under conditions which permit the production of 5-oxoproline or a composition comprising 5-oxoproline in said non-human organism or in the culture medium surrounding said non-human organism.

[15044] Accordingly, the present invention relates to a process for the production of asparagine, which comprises
[15045] (a) increasing or generating one or more activities selected from the group consisting of Glu/Leu/Phe/Val dehydrogenase in a non-human organism or a part thereof, preferably a microorganism, a plant cell, a plant or a part thereof, as compared to a corresponding non-transformed wild type non-human organism or a part thereof; and
[15046] (b) growing the non-human organism or a part thereof under conditions which permit the production of asparagine or a composition comprising asparagine in said non-human organism or in the culture medium surrounding said non-human organism.

[15047] Accordingly, the present invention relates to a process for the production of phenylalanine, which comprises
[15048] (a) increasing or generating one or more activities selected from the group consisting of Glu/Leu/Phe/Val dehydrogenase in a non-human organism or a part thereof, preferably a microorganism, a plant cell, a plant or a part thereof, as compared to a corresponding non-transformed wild type non-human organism or a part thereof; and
[15049] (b) growing the non-human organism or a part thereof under conditions which permit the production of phenylalanine or a composition comprising phenylalanine in said non-human organism or in the culture medium surrounding said non-human organism.

[15050] Accordingly, the present invention relates to a process for the production of tyrosine, which comprises
[15051] (a) increasing or generating one or more activities selected from the group consisting of Glu/Leu/Phe/Val dehydrogenase in a non-human organism or a part thereof, preferably a microorganism, a plant cell, a plant or a part thereof, as compared to a corresponding non-transformed wild type non-human organism or a part thereof; and
[15052] (b) growing the non-human organism or a part thereof under conditions which permit the production of tyrosine or a composition comprising tyrosine in said non-human organism or in the culture medium surrounding said non-human organism.

[15053] Accordingly, the present invention relates to a process for the production of phenylalanine, which comprises
[15054] (a) increasing or generating one or more activities selected from the group consisting of malate dehydrogenase in a non-human organism or a part thereof, preferably a microorganism, a plant cell, a plant or a part thereof, as compared to a corresponding non-transformed wild type non-human organism or a part thereof; and
[15055] (b) growing the non-human organism or a part thereof under conditions which permit the production of phenylalanine or a composition comprising phenylalanine in said non-human organism or in the culture medium surrounding said non-human organism.

[15056] Accordingly, the present invention relates to a process for the production of alanine, which comprises
[15057] (a) increasing or generating one or more activities selected from the group consisting of geranylgeranyl pyrophosphate synthase in a non-human organism or a part thereof, preferably a microorganism, a plant cell, a plant or a part thereof, as compared to a corresponding non-transformed wild type non-human organism or a part thereof; and
[15058] (b) growing the non-human organism or a part thereof under conditions which permit the production of alanine or a composition comprising alanine in said non-human organism or in the culture medium surrounding said non-human organism.

[15059] Accordingly, the present invention relates to a process for the production of asparagine, which comprises
[15060] (a) increasing or generating one or more activities selected from the group consisting of geranylgeranyl pyrophosphate synthase in a non-human organism or a part thereof, preferably a microorganism, a plant cell, a plant or a part thereof, as compared to a corresponding non-transformed wild type non-human organism or a part thereof; and
[15061] (b) growing the non-human organism or a part thereof under conditions which permit the production of asparagine or a composition comprising asparagine in said non-human organism or in the culture medium surrounding said non-human organism.

[15062] Accordingly, the present invention relates to a process for the production of phenylalanine, which comprises
[15063] (a) increasing or generating one or more activities selected from the group consisting of geranylgeranyl pyrophosphate synthase in a non-human organism or a part thereof, preferably a microorganism, a plant cell, a plant or a part thereof, as compared to a corresponding non-transformed wild type non-human organism or a part thereof; and
[15064] (b) growing the non-human organism or a part thereof under conditions which permit the production of phenylalanine or a composition comprising phenylalanine in said non-human organism or in the culture medium surrounding said non-human organism.

[15065] Accordingly, the present invention relates to a process for the production of serine, which comprises
[15066] (a) increasing or generating one or more activities selected from the group consisting of geranylgeranyl pyrophosphate synthase in a non-human organism or a part thereof, preferably a microorganism, a plant cell, a plant or a part thereof, as compared to a corresponding non-transformed wild type non-human organism or a part thereof; and
[15067] (b) growing the non-human organism or a part thereof under conditions which permit the production of serine or a composition comprising serine in said non-human organism or in the culture medium surrounding said non-human organism.

[15068] Accordingly, the present invention relates to a process for the production of tyrosine, which comprises
[15069] (a) increasing or generating one or more activities selected from the group consisting of geranylgeranyl pyrophosphate synthase in a non-human organism or a part thereof, preferably a microorganism, a plant cell, a plant or a part thereof, as compared to a corresponding non-transformed wild type non-human organism or a part thereof; and
[15070] (b) growing the non-human organism or a part thereof under conditions which permit the production of tyrosine or a composition comprising tyrosine in said non-human organism or in the culture medium surrounding said non-human organism.

[15071] Accordingly, the present invention relates to a process for the production of 5-oxoproline, which comprises
[15072] (a) increasing or generating one or more activities selected from the group consisting of geranylgeranyl pyrophosphate synthase in a non-human organism or a part thereof, preferably a microorganism, a plant cell, a plant or a part thereof, as compared to a corresponding non-transformed wild type non-human organism or a part thereof; and
[15073] (b) growing the non-human organism or a part thereof under conditions which permit the production of 5-oxoproline or a composition comprising 5-oxoproline in said non-human organism or in the culture medium surrounding said non-human organism.

[15074] Accordingly, the present invention relates to a process for the production of phenylalanine, which comprises
[15075] (a) increasing or generating one or more activities selected from the group consisting of amine oxidase in a non-human organism or a part thereof, preferably a microorganism, a plant cell, a plant or a part thereof, as compared to a corresponding non-transformed wild type non-human organism or a part thereof; and
[15076] (b) growing the non-human organism or a part thereof under conditions which permit the production of phenylalanine or a composition comprising phenylalanine in said non-human organism or in the culture medium surrounding said non-human organism.

[15077] Accordingly, the present invention relates to a process for the production of serine, which comprises
[15078] (a) increasing or generating one or more activities selected from the group consisting of kinase in a non-human organism or a part thereof, preferably a microorganism, a plant cell, a plant or a part thereof, as compared to a corresponding non-transformed wild type non-human organism or a part thereof; and
[15079] (b) growing the non-human organism or a part thereof under conditions which permit the production of serine or a composition comprising serine in said non-human organism or in the culture medium surrounding said non-human organism.

[15080] Accordingly, the present invention relates to a process for the production of tyrosine, which comprises
[15081] (a) increasing or generating one or more activities selected from the group consisting of tryptophan synthase alpha chain in a non-human organism or a part thereof, preferably a microorganism, a plant cell, a plant or a part thereof, as compared to a corresponding non-transformed wild type non-human organism or a part thereof; and
[15082] (b) growing the non-human organism or a part thereof under conditions which permit the production of tyrosine or a composition comprising tyrosine in said non-human organism or in the culture medium surrounding said non-human organism.

[15083] Accordingly, the present invention relates to a process for the production of ornithine, which comprises
[15084] (a) increasing or generating one or more activities selected from the group consisting of argininosuccinate lyase in a non-human organism or a part thereof, preferably a microorganism, a plant cell, a plant or a part thereof, as compared to a corresponding non-transformed wild type non-human organism or a part thereof; and
[15085] (b) growing the non-human organism or a part thereof under conditions which permit the production of ornithine or a composition comprising ornithine in said non-human organism or in the culture medium surrounding said non-human organism.

[15086] Accordingly, the present invention relates to a process for the production of serine, which comprises
[15087] (a) increasing or generating one or more activities selected from the group consisting of argininosuccinate lyase in a non-human organism or a part thereof, preferably a microorganism, a plant cell, a plant or a part thereof, as compared to a corresponding non-transformed wild type non-human organism or a part thereof; and
[15088] (b) growing the non-human organism or a part thereof under conditions which permit the production of serine or a composition comprising serine in said non-human organism or in the culture medium surrounding said non-human organism.

[15089] Accordingly, the present invention relates to a process for the production of asparagine, which comprises
[15090] (a) increasing or generating one or more activities selected from the group consisting of gamma-glutamyltranspeptidase in a non-human organism or a part thereof, preferably a microorganism, a plant cell, a plant or a part thereof, as compared to a corresponding non-transformed wild type non-human organism or a part thereof; and
[15091] (b) growing the non-human organism or a part thereof under conditions which permit the production of asparagine or a composition comprising asparagine in said non-human organism or in the culture medium surrounding said non-human organism.

[15092] Accordingly, the present invention relates to a process for the production of aspartate, which comprises
[15093] (a) increasing or generating one or more activities selected from the group consisting of iron(III) dicitrate-binding protein in a non-human organism or a part thereof, preferably a microorganism, a plant cell, a plant or a part thereof, as compared to a corresponding non-transformed wild type non-human organism or a part thereof; and
[15094] (b) growing the non-human organism or a part thereof under conditions which permit the production of aspartate or a composition comprising aspartate in said non-human organism or in the culture medium surrounding said non-human organism.

[15095] Accordingly, the present invention relates to a process for the production of phenylalanine, which comprises
[15096] (a) increasing or generating one or more activities selected from the group consisting of iron(III) dicitrate-binding protein in a non-human organism or a part thereof, preferably a microorganism, a plant cell, a plant or a part thereof, as compared to a corresponding non-transformed wild type non-human organism or a part thereof; and
[15097] (b) growing the non-human organism or a part thereof under conditions which permit the production of phenylalanine or a composition comprising phenylalanine in said non-human organism or in the culture medium surrounding said non-human organism.

[15098] Accordingly, the present invention relates to a process for the production of phenylalanine, which comprises
[15099] (a) increasing or generating one or more activities selected from the group consisting of Na+/K+ transporter in a non-human organism or a part thereof, preferably a microorganism, a plant cell, a plant or a part thereof, as compared to a corresponding non-transformed wild type non-human organism or a part thereof; and
[15100] (b) growing the non-human organism or a part thereof under conditions which permit the production of phenylalanine or a composition comprising phenylalanine in said non-human organism or in the culture medium surrounding said non-human organism.

[15101] Accordingly, the present invention relates to a process for the production of tyrosine, which comprises
[15102] (a) increasing or generating one or more activities selected from the group consisting of Na+/K+ transporter in a non-human organism or a part thereof, preferably a microorganism, a plant cell, a plant or a part thereof, as compared to a corresponding non-transformed wild type non-human organism or a part thereof; and
[15103] (b) growing the non-human organism or a part thereof under conditions which permit the production of tyrosine or a composition comprising tyrosine in said non-human organism or in the culture medium surrounding said non-human organism.

[15104] Accordingly, the present invention relates to a process for the production of phenylalanine, which comprises
[15105] (a) increasing or generating one or more activities selected from the group consisting of 3-oxoacyl-[acyl-carrier-protein] synthase in a non-human organism or a part thereof, preferably a microorganism, a plant cell, a plant or a part thereof, as compared to a corresponding non-transformed wild type non-human organism or a part thereof; and
[15106] (b) growing the non-human organism or a part thereof under conditions which permit the production of phenylalanine or a composition comprising phenylalanine in said non-human organism or in the culture medium surrounding said non-human organism.

[15107] Accordingly, the present invention relates to a process for the production of serine, which comprises
[15108] (a) increasing or generating one or more activities selected from the group consisting of 3-oxoacyl-[acyl-carrier-protein] synthase in a non-human organism or a part thereof, preferably a microorganism, a plant cell, a plant or a part thereof, as compared to a corresponding non-transformed wild type non-human organism or a part thereof; and
[15109] (b) growing the non-human organism or a part thereof under conditions which permit the production of serine or a composition comprising serine in said non-human organism or in the culture medium surrounding said non-human organism.

[15110] Accordingly, the present invention relates to a process for the production of phenylalanine, which comprises
[15111] (a) increasing or generating one or more activities selected from the group consisting of Photosystem I reaction center subunit XI in a non-human organism or a part thereof, preferably a microorganism, a plant cell, a plant or a part thereof, as compared to a corresponding non-transformed wild type non-human organism or a part thereof; and
[15112] (b) growing the non-human organism or a part thereof under conditions which permit the production of phenylalanine or a composition comprising phenylalanine in said non-human organism or in the culture medium surrounding said non-human organism.

[15113] Accordingly, the present invention relates to a process for the production of serine, which comprises
[15114] (a) increasing or generating one or more activities selected from the group consisting of Photosystem I reaction center subunit XI in a non-human organism or a part thereof, preferably a microorganism, a plant cell, a plant or a part thereof, as compared to a corresponding non-transformed wild type non-human organism or a part thereof; and
[15115] (b) growing the non-human organism or a part thereof under conditions which permit the production of serine or a composition comprising serine in said non-human organism or in the culture medium surrounding said non-human organism.

[15116] Accordingly, the present invention relates to a process for the production of tyrosine, which comprises
[15117] (a) increasing or generating one or more activities selected from the group consisting of Photosystem I reaction center subunit XI in a non-human organism or a part thereof, preferably a microorganism, a plant cell, a plant or a part thereof, as compared to a corresponding non-transformed wild type non-human organism or a part thereof; and
[15118] (b) growing the non-human organism or a part thereof under conditions which permit the production of tyrosine or a composition comprising tyrosine in said non-human organism or in the culture medium surrounding said non-human organism.

[15119] Accordingly, the present invention relates to a process for the production of phenylalanine, which comprises
[15120] (a) increasing or generating one or more activities selected from the group consisting of photosystem II protein in a non-human organism or a part thereof, preferably a microorganism, a plant cell, a plant or a part thereof, as compared to a corresponding non-transformed wild type non-human organism or a part thereof; and
[15121] (b) growing the non-human organism or a part thereof under conditions which permit the production of phenylalanine or a composition comprising phenylalanine in said non-human organism or in the culture medium surrounding said non-human organism.

[15122] Accordingly, the present invention relates to a process for the production of serine, which comprises
[15123] (a) increasing or generating one or more activities selected from the group consisting of photosystem II protein in a non-human organism or a part thereof, preferably a microorganism, a plant cell, a plant or a part thereof, as compared to a corresponding non-transformed wild type non-human organism or a part thereof; and
[15124] (b) growing the non-human organism or a part thereof under conditions which permit the production of serine or a composition comprising serine in said non-human organism or in the culture medium surrounding said non-human organism.

[15125] Accordingly, the present invention relates to a process for the production of tyrosine, which comprises
[15126] (a) increasing or generating one or more activities selected from the group consisting of photosystem II protein in a non-human organism or a part thereof, preferably a microorganism, a plant cell, a plant or a part thereof, as compared to a corresponding non-transformed wild type non-human organism or a part thereof; and
[15127] (b) growing the non-human organism or a part thereof under conditions which permit the production of tyrosine or a composition comprising tyrosine in said non-human organism or in the culture medium surrounding said non-human organism.

[15128] Accordingly, the present invention relates to a process for the production of 5-oxoproline, which comprises
[15129] (a) increasing or generating one or more activities selected from the group consisting of photosystem II protein in a non-human organism or a part thereof, preferably a microorganism, a plant cell, a plant or a part thereof, as compared to a corresponding non-transformed wild type non-human organism or a part thereof; and
[15130] (b) growing the non-human organism or a part thereof under conditions which permit the production of 5-oxoproline or a composition comprising 5-oxoproline in said non-human organism or in the culture medium surrounding said non-human organism.

[15131] Accordingly, the present invention relates to a process for the production of asparagine, which comprises
[15132] (a) increasing or generating one or more activities selected from the group consisting of glutamine amidotransferase in a non-human organism or a part thereof, preferably a microorganism, a plant cell, a plant or a part thereof, as compared to a corresponding non-transformed wild type non-human organism or a part thereof; and
[15133] (b) growing the non-human organism or a part thereof under conditions which permit the production of asparagine or a composition comprising asparagine in said non-human organism or in the culture medium surrounding said non-human organism.

[15134] Accordingly, the present invention relates to a process for the production of citrulline, which comprises
[15135] (a) increasing or generating one or more activities selected from the group consisting of phosphoadenosine phosphosulfate reductase in a non-human organism or a part thereof, preferably a microorganism, a plant cell, a plant or a part thereof, as compared to a corresponding non-transformed wild type non-human organism or a part thereof; and
[15136] (b) growing the non-human organism or a part thereof under conditions which permit the production of citrulline or a composition comprising citrulline in said non-human organism or in the culture medium surrounding said non-human organism.

[15137] Accordingly, the present invention relates to a process for the production of asparagine, which comprises
[15138] (a) increasing or generating one or more activities selected from the group consisting of riboflavin biosynthesis protein in a non-human organism or a part thereof, preferably a microorganism, a plant cell, a plant or a part thereof, as compared to a corresponding non-transformed wild type non-human organism or a part thereof; and
[15139] (b) growing the non-human organism or a part thereof under conditions which permit the production of asparagine or a composition comprising asparagine in said non-human organism or in the culture medium surrounding said non-human organism.

[15140] Accordingly, the present invention relates to a process for the production of homoserine, which comprises
[15141] (a) increasing or generating one or more activities selected from the group consisting of threonine dehydratase in a non-human organism or a part thereof, preferably a microorganism, a plant cell, a plant or a part thereof, as compared to a corresponding non-transformed wild type non-human organism or a part thereof; and
[15142] (b) growing the non-human organism or a part thereof under conditions which permit the production of homoserine or a composition comprising homoserine in said non-human organism or in the culture medium surrounding said non-human organism.

[15143] Accordingly, the present invention relates to a process for the production of tyrosine, which comprises
[15144] (a) increasing or generating one or more activities selected from the group consisting of threonine dehydratase in a non-human organism or a part thereof, preferably a microorganism, a plant cell, a plant or a part thereof, as compared to a corresponding non-transformed wild type non-human organism or a part thereof; and
[15145] (b) growing the non-human organism or a part thereof under conditions which permit the production of tyrosine or a composition comprising tyrosine in said non-human organism or in the culture medium surrounding said non-human organism.

[15146] Accordingly, the present invention relates to a process for the production of alanine, which comprises
[15147] (a) increasing or generating one or more activities selected from the group consisting of short-chain alcohol dehydrogenase family in a non-human organism or a part thereof, preferably a microorganism, a plant cell, a plant or a part thereof, as compared to a corresponding non-transformed wild type non-human organism or a part thereof; and
[15148] (b) growing the non-human organism or a part thereof under conditions which permit the production of alanine or a composition comprising alanine in said non-human organism or in the culture medium surrounding said non-human organism.

[15149] Accordingly, the present invention relates to a process for the production of phenylalanine, which comprises
[15150] (a) increasing or generating one or more activities selected from the group consisting of short-chain alcohol dehydrogenase family in a non-human organism or a part thereof, preferably a microorganism, a plant cell, a plant or a part thereof, as compared to a corresponding non-transformed wild type non-human organism or a part thereof; and
[15151] (b) growing the non-human organism or a part thereof under conditions which permit the production of phenylalanine or a composition comprising phenylalanine in said non-human organism or in the culture medium surrounding said non-human organism.

[15152] Accordingly, the present invention relates to a process for the production of tyrosine, which comprises
[15153] (a) increasing or generating one or more activities selected from the group consisting of short-chain alcohol dehydrogenase family in a non-human organism or a part thereof, preferably a microorganism, a plant cell, a plant or a part thereof, as compared to a corresponding non-transformed wild type non-human organism or a part thereof; and
[15154] (b) growing the non-human organism or a part thereof under conditions which permit the production of tyrosine or a composition comprising tyrosine in said non-human organism or in the culture medium surrounding said non-human organism.

[15155] Accordingly, the present invention relates to a process for the production of phenylalanine, which comprises
[15156] (a) increasing or generating one or more activities selected from the group consisting of Sec-independent protein translocase subunit in a non-human organism or a part thereof, preferably a microorganism, a plant cell, a plant or a part thereof, as compared to a corresponding non-transformed wild type non-human organism or a part thereof; and
[15157] (b) growing the non-human organism or a part thereof under conditions which permit the production of phenylalanine or a composition comprising phenylalanine in said non-human organism or in the culture medium surrounding said non-human organism.

[15158] Accordingly, the present invention relates to a process for the production of tyrosine, which comprises
[15159] (a) increasing or generating one or more activities selected from the group consisting of Sec-independent protein translocase subunit in a non-human organism or a part thereof, preferably a microorganism, a plant cell, a plant or a part thereof, as compared to a corresponding non-transformed wild type non-human organism or a part thereof; and
[15160] (b) growing the non-human organism or a part thereof under conditions which permit the production of tyrosine or a composition comprising tyrosine in said non-human organism or in the culture medium surrounding said non-human organism.

[15161] Accordingly, the present invention relates to a process for the production of 5-oxoproline, which comprises
[15162] (a) increasing or generating one or more activities selected from the group consisting of Sec-independent protein translocase subunit in a non-human organism or a part thereof, preferably a microorganism, a plant cell, a plant or a part thereof, as compared to a corresponding non-transformed wild type non-human organism or a part thereof; and
[15163] (b) growing the non-human organism or a part thereof under conditions which permit the production of 5-oxoproline or a composition comprising 5-oxoproline in said non-human organism or in the culture medium surrounding said non-human organism.

[15164] Accordingly, the present invention relates to a process for the production of tyrosine, which comprises
[15165] (a) increasing or generating one or more activities selected from the group consisting of transcriptional regulator in a non-human organism or a part thereof, preferably a microorganism, a plant cell, a plant or a part thereof, as compared to a corresponding non-transformed wild type non-human organism or a part thereof; and
[15166] (b) growing the non-human organism or a part thereof under conditions which permit the production of tyrosine or a composition comprising tyrosine in said non-human organism or in the culture medium surrounding said non-human organism.

[15167] Accordingly, the present invention relates to a process for the production of asparagine, which comprises
[15168] (a) increasing or generating one or more activities selected from the group consisting of amino acid ABC transporter permease protein in a non-human organism or a part thereof, preferably a microorganism, a plant cell, a plant or a part thereof, as compared to a corresponding non-transformed wild type non-human organism or a part thereof; and
[15169] (b) growing the non-human organism or a part thereof under conditions which permit the production of asparagine or a composition comprising asparagine in said non-human organism or in the culture medium surrounding said non-human organism.

[15170] Accordingly, the present invention relates to a process for the production of tyrosine, which comprises
[15171] (a) increasing or generating one or more activities selected from the group consisting of TTC0768-protein in a non-human organism or a part thereof, preferably a microorganism, a plant cell, a plant or a part thereof, as compared to a corresponding non-transformed wild type non-human organism or a part thereof; and
[15172] (b) growing the non-human organism or a part thereof under conditions which permit the production of tyrosine or a composition comprising tyrosine in said non-human organism or in the culture medium surrounding said non-human organism.

[15173] Accordingly, the present invention relates to a process for the production of alanine, which comprises
[15174] (a) increasing or generating one or more activities selected from the group consisting of TTC0881-protein in a non-human organism or a part thereof, preferably a microorganism, a plant cell, a plant or a part thereof, as compared to a corresponding non-transformed wild type non-human organism or a part thereof; and
[15175] (b) growing the non-human organism or a part thereof under conditions which permit the production of alanine or a composition comprising alanine in said non-human organism or in the culture medium surrounding said non-human organism.

[15176] Accordingly, the present invention relates to a process for the production of serine, which comprises
[15177] (a) increasing or generating one or more activities selected from the group consisting of TTC0881-protein in a non-human organism or a part thereof, preferably a microorganism, a plant cell, a plant or a part thereof, as compared to a corresponding non-transformed wild type non-human organism or a part thereof; and
[15178] (b) growing the non-human organism or a part thereof under conditions which permit the production of serine or a composition comprising serine in said non-human organism or in the culture medium surrounding said non-human organism.

[15179] Accordingly, the present invention relates to a process for the production of alanine, which comprises
[15180] (a) increasing or generating one or more activities selected from the group consisting of metal-dependent hydrolase in a non-human organism or a part thereof, preferably a microorganism, a plant cell, a plant or a part thereof, as compared to a corresponding non-transformed wild type non-human organism or a part thereof; and
[15181] (b) growing the non-human organism or a part thereof under conditions which permit the production of alanine or a composition comprising alanine in said non-human organism or in the culture medium surrounding said non-human organism.

[15182] Accordingly, the present invention relates to a process for the production of serine, which comprises
[15183] (a) increasing or generating one or more activities selected from the group consisting of metal-dependent hydrolase in a non-human organism or a part thereof, preferably a microorganism, a plant cell, a plant or a part thereof, as compared to a corresponding non-transformed wild type non-human organism or a part thereof; and
[15184] (b) growing the non-human organism or a part thereof under conditions which permit the production of serine or a composition comprising serine in said non-human organism or in the culture medium surrounding said non-human organism.

[15185] Accordingly, the present invention relates to a process for the production of phenylalanine, which comprises
[15186] (a) increasing or generating one or more activities selected from the group consisting of multiple antibiotic resistance protein in a non-human organism or a part thereof, preferably a microorganism, a plant cell, a plant or a part thereof, as compared to a corresponding non-transformed wild type non-human organism or a part thereof; and
[15187] (b) growing the non-human organism or a part thereof under conditions which permit the production of phenylalanine or a composition comprising phenylalanine in said non-human organism or in the culture medium surrounding said non-human organism.

[15188] Accordingly, the present invention relates to a process for the production of tyrosine, which comprises
[15189] (a) increasing or generating one or more activities selected from the group consisting of multiple antibiotic resistance protein in a non-human organism or a part thereof, preferably a microorganism, a plant cell, a plant or a part thereof, as compared to a corresponding non-transformed wild type non-human organism or a part thereof; and
[15190] (b) growing the non-human organism or a part thereof under conditions which permit the production of tyrosine or a composition comprising tyrosine in said non-human organism or in the culture medium surrounding said non-human organism.

[15191] Accordingly, the present invention relates to a process for the production of alanine, which comprises
[15192] (a) increasing or generating one or more activities selected from the group consisting of TTC1386-protein in a non-human organism or a part thereof, preferably a microorganism, a plant cell, a plant or a part thereof, as compared to a corresponding non-transformed wild type non-human organism or a part thereof; and
[15193] (b) growing the non-human organism or a part thereof under conditions which permit the production of alanine or a composition comprising alanine in said non-human organism or in the culture medium surrounding said non-human organism.

[15194] Accordingly, the present invention relates to a process for the production of glycine, which comprises
[15195] (a) increasing or generating one or more activities selected from the group consisting of TTC1386-protein in a non-human organism or a part thereof, preferably a microorganism, a plant cell, a plant or a part thereof, as compared to a corresponding non-transformed wild type non-human organism or a part thereof; and
[15196] (b) growing the non-human organism or a part thereof under conditions which permit the production of glycine or a composition comprising glycine in said non-human organism or in the culture medium surrounding said non-human organism.

[15197] Accordingly, the present invention relates to a process for the production of phenylalanine, which comprises
[15198] (a) increasing or generating one or more activities selected from the group consisting of TTC1386-protein in a non-human organism or a part thereof, preferably a microorganism, a plant cell, a plant or a part thereof, as compared to a corresponding non-transformed wild type non-human organism or a part thereof; and
[15199] (b) growing the non-human organism or a part thereof under conditions which permit the production of phenylalanine or a composition comprising phenylalanine in said non-human organism or in the culture medium surrounding said non-human organism.

[15200] Accordingly, the present invention relates to a process for the production of serine, which comprises
[15201] (a) increasing or generating one or more activities selected from the group consisting of TTC1386-protein in a non-human organism or a part thereof, preferably a microorganism, a plant cell, a plant or a part thereof, as compared to a corresponding non-transformed wild type non-human organism or a part thereof; and
[15202] (b) growing the non-human organism or a part thereof under conditions which permit the production of serine or a composition comprising serine in said non-human organism or in the culture medium surrounding said non-human organism.

[15203] Accordingly, the present invention relates to a process for the production of tyrosine, which comprises
[15204] (a) increasing or generating one or more activities selected from the group consisting of TCC1386-protein in a non-human organism or a part thereof, preferably a microorganism, a plant cell, a plant or a part thereof, as compared to a corresponding non-transformed wild type non-human organism or a part thereof; and
[15205] (b) growing the non-human organism or a part thereof under conditions which permit the production of tyrosine or a composition comprising tyrosine in said non-human organism or in the culture medium surrounding said non-human organism.

[15206] Accordingly, the present invention relates to a process for the production of alanine, which comprises
[15207] (a) increasing or generating one or more activities selected from the group consisting of homocitrate synthase in a non-human organism or a part thereof, preferably a microorganism, a plant cell, a plant or a part thereof, as compared to a corresponding non-transformed wild type non-human organism or a part thereof; and
[15208] (b) growing the non-human organism or a part thereof under conditions which permit the production of alanine or a composition comprising alanine in said non-human organism or in the culture medium surrounding said non-human organism.

[15209] Accordingly, the present invention relates to a process for the production of phenylalanine, which comprises
[15210] (a) increasing or generating one or more activities selected from the group consisting of homocitrate synthase in a non-human organism or a part thereof, preferably a microorganism, a plant cell, a plant or a part thereof, as compared to a corresponding non-transformed wild type non-human organism or a part thereof; and
[15211] (b) growing the non-human organism or a part thereof under conditions which permit the production of phenylalanine or a composition comprising phenylalanine in said non-human organism or in the culture medium surrounding said non-human organism.

[15212] Accordingly, the present invention relates to a process for the production of serine, which comprises
[15213] (a) increasing or generating one or more activities selected from the group consisting of homocitrate synthase in a non-human organism or a part thereof, preferably a microorganism, a plant cell, a plant or a part thereof, as compared to a corresponding non-transformed wild type non-human organism or a part thereof; and
[15214] (b) growing the non-human organism or a part thereof under conditions which permit the production of serine or a composition comprising serine in said non-human organism or in the culture medium surrounding said non-human organism.

[15215] Accordingly, the present invention relates to a process for the production of tyrosine, which comprises
[15216] (a) increasing or generating one or more activities selected from the group consisting of homocitrate synthase in a non-human organism or a part thereof, preferably a microorganism, a plant cell, a plant or a part thereof, as compared to a corresponding non-transformed wild type non-human organism or a part thereof; and
[15217] (b) growing the non-human organism or a part thereof under conditions which permit the production of tyrosine or a composition comprising tyrosine in said non-human organism or in the culture medium surrounding said non-human organism.

[15218] Accordingly, the present invention relates to a process for the production of 5-oxoproline, which comprises
[15219] (a) increasing or generating one or more activities selected from the group consisting of homocitrate synthase in a non-human organism or a part thereof, preferably a microorganism, a plant cell, a plant or a part thereof, as compared to a corresponding non-transformed wild type non-human organism or a part thereof; and
[15220] (b) growing the non-human organism or a part thereof under conditions which permit the production of 5-oxoproline or a composition comprising 5-oxoproline in said non-human organism or in the culture medium surrounding said non-human organism.

[15221] Accordingly, the present invention relates to a process for the production of aspartate, which comprises
[15222] (a) increasing or generating one or more activities selected from the group consisting of oxidoreductase subunit in a non-human organism or a part thereof, preferably a microorganism, a plant cell, a plant or a part thereof, as compared to a corresponding non-transformed wild type non-human organism or a part thereof; and
[15223] (b) growing the non-human organism or a part thereof under conditions which permit the production of aspartate or a composition comprising aspartate in said non-human organism or in the culture medium surrounding said non-human organism.

[15224] Accordingly, the present invention relates to a process for the production of serine, which comprises
[15225] (a) increasing or generating one or more activities selected from the group consisting of oxidoreductase subunit in a non-human organism or a part thereof, preferably a microorganism, a plant cell, a plant or a part thereof, as compared to a corresponding non-transformed wild type non-human organism or a part thereof; and
[15226] (b) growing the non-human organism or a part thereof under conditions which permit the production of serine or a composition comprising serine in said non-human organism or in the culture medium surrounding said non-human organism.

[15227] Accordingly, the present invention relates to a process for the production of aspartate, which comprises
[15228] (a) increasing or generating one or more activities selected from the group consisting of XM_{—}473199-protein in a non-human organism or a part thereof, preferably a microorganism, a plant cell, a plant or a part thereof, as compared to a corresponding non-transformed wild type non-human organism or a part thereof; and
[15229] (b) growing the non-human organism or a part thereof under conditions which permit the production of aspartate or a composition comprising aspartate in said non-human organism or in the culture medium surrounding said non-human organism.

[15230] Accordingly, the present invention relates to a process for the production of phenylalanine, which comprises
[15231] (a) increasing or generating one or more activities selected from the group consisting of XM_{—}473199-protein in a non-human organism or a part thereof, preferably a microorganism, a plant cell, a plant or a part thereof, as compared to a corresponding non-transformed wild type non-human organism or a part thereof; and
[15232] (b) growing the non-human organism or a part thereof under conditions which permit the production of phenylalanine or a composition comprising phenylalanine in said non-human organism or in the culture medium surrounding said non-human organism.

[15233] Accordingly, the present invention relates to a process for the production of tyrosine, which comprises
[15234] (a) increasing or generating one or more activities selected from the group consisting of XM_{—}473199-protein in a non-human organism or a part thereof, preferably a microorganism, a plant cell, a plant or a part thereof, as compared to a corresponding non-transformed wild type non-human organism or a part thereof; and
[15235] (b) growing the non-human organism or a part thereof under conditions which permit the production of tyrosine or a composition comprising tyrosine in said non-human organism or in the culture medium surrounding said non-human organism.

[15236] Accordingly, the present invention relates to a process for the production of 5-oxoproline, which comprises
[15237] (a) increasing or generating one or more activities selected from the group consisting of XM_{—}473199-protein in a non-human organism or a part thereof, preferably a microorganism, a plant cell, a plant or a part thereof, as compared to a corresponding non-transformed wild type non-human organism or a part thereof; and
[15238] (b) growing the non-human organism or a part thereof under conditions which permit the production of 5-oxoproline or a composition comprising 5-oxoproline in said non-human organism or in the culture medium surrounding said non-human organism.

[15239] Accordingly, the present invention relates to a process for the production of glycine, which comprises
[15240] (a) increasing or generating one or more activities selected from the group consisting of transcription factor in a non-human organism or a part thereof, preferably a microorganism, a plant cell, a plant or a part thereof, as compared to a corresponding non-transformed wild type non-human organism or a part thereof; and
[15241] (b) growing the non-human organism or a part thereof under conditions which permit the production of glycine or a composition comprising glycine in said non-human organism or in the culture medium surrounding said non-human organism.

[15242] Accordingly, the present invention relates to a process for the production of phenylalanine, which comprises
[15243] (a) increasing or generating one or more activities selected from the group consisting of transcription factor in a non-human organism or a part thereof, preferably a microorganism, a plant cell, a plant or a part thereof, as compared to a corresponding non-transformed wild type non-human organism or a part thereof; and
[15244] (b) growing the non-human organism or a part thereof under conditions which permit the production of phenylalanine or a composition comprising phenylalanine in said non-human organism or in the culture medium surrounding said non-human organism.

[15245] Accordingly, the present invention relates to a process for the production of aspartate, which comprises
[15246] (a) increasing or generating one or more activities selected from the group consisting of cell division control protein in a non-human organism or a part thereof, preferably a microorganism, a plant cell, a plant or a part thereof, as compared to a corresponding non-transformed wild type non-human organism or a part thereof; and
[15247] (b) growing the non-human organism or a part thereof under conditions which permit the production of aspartate or a composition comprising aspartate in said non-human organism or in the culture medium surrounding said non-human organism.

[15248] Accordingly, the present invention relates to a process for the production of tyrosine, which comprises
[15249] (a) increasing or generating one or more activities selected from the group consisting of cell division control protein in a non-human organism or a part thereof, preferably a microorganism, a plant cell, a plant or a part thereof, as compared to a corresponding non-transformed wild type non-human organism or a part thereof; and
[15250] (b) growing the non-human organism or a part thereof under conditions which permit the production of tyrosine or a composition comprising tyrosine in said non-human organism or in the culture medium surrounding said non-human organism.

[15251] Accordingly, the present invention relates to a process for the production of phenylalanine, which comprises
[15252] (a) increasing or generating one or more activities selected from the group consisting of 3-deoxy-7-phosphoheptulonate synthase in a non-human organism or a part thereof, preferably a microorganism, a plant cell, a plant or a part thereof, as compared to a corresponding non-transformed wild type non-human organism or a part thereof; and
[15253] (b) growing the non-human organism or a part thereof under conditions which permit the production of phenylalanine or a composition comprising phenylalanine in said non-human organism or in the culture medium surrounding said non-human organism.

[15254] Accordingly, the present invention relates to a process for the production of tyrosine, which comprises
[15255] (a) increasing or generating one or more activities selected from the group consisting of 3-deoxy-7-phosphoheptulonate synthase in a non-human organism or a part thereof, preferably a microorganism, a plant cell, a plant or a part thereof, as compared to a corresponding non-transformed wild type non-human organism or a part thereof; and
[15256] (b) growing the non-human organism or a part thereof under conditions which permit the production of tyrosine or a composition comprising tyrosine in said non-human organism or in the culture medium surrounding said non-human organism.

[15257] Accordingly, the present invention relates to a process for the production of 5-oxoproline, which comprises
[15258] (a) increasing or generating one or more activities selected from the group consisting of phosphate permease in a non-human organism or a part thereof, preferably a microorganism, a plant cell, a plant or a part thereof, as compared to a corresponding non-transformed wild type non-human organism or a part thereof; and
[15259] (b) growing the non-human organism or a part thereof under conditions which permit the production of 5-oxoproline or a composition comprising 5-oxoproline in said non-human organism or in the culture medium surrounding said non-human organism.

[15260] Accordingly, the present invention relates to a process for the production of alanine, which comprises
[15261] (a) increasing or generating one or more activities selected from the group consisting of serine/threonine dehydratase in a non-human organism or a part thereof, preferably a microorganism, a plant cell, a plant or a part thereof, as compared to a corresponding non-transformed wild type non-human organism or a part thereof; and
[15262] (b) growing the non-human organism or a part thereof under conditions which permit the production of alanine or a composition comprising alanine in said non-human organism or in the culture medium surrounding said non-human organism.

[15263] Accordingly, the present invention relates to a process for the production of glycine, which comprises
[15264] (a) increasing or generating one or more activities selected from the group consisting of serine/threonine dehydratase in a non-human organism or a part thereof, preferably a microorganism, a plant cell, a plant or a part thereof, as compared to a corresponding non-transformed wild type non-human organism or a part thereof; and
[15265] (b) growing the non-human organism or a part thereof under conditions which permit the production of glycine or a composition comprising glycine in said non-human organism or in the culture medium surrounding said non-human organism.

[15266] Accordingly, the present invention relates to a process for the production of aspartate, which comprises
[15267] (a) increasing or generating one or more activities selected from the group consisting of protein kinase in a non-human organism or a part thereof, preferably a microorganism, a plant cell, a plant or a part thereof, as compared to a corresponding non-transformed wild type non-human organism or a part thereof; and
[15268] (b) growing the non-human organism or a part thereof under conditions which permit the production of aspartate or a composition comprising aspartate in said non-human organism or in the culture medium surrounding said non-human organism.

[15269] Accordingly, the present invention relates to a process for the production of homoserine, which comprises
[15270] (a) increasing or generating one or more activities selected from the group consisting of Serine/threonine-protein phosphatase in a non-human organism or a part thereof, preferably a microorganism, a plant cell, a plant or a part thereof, as compared to a corresponding non-transformed wild type non-human organism or a part thereof; and
[15271] (b) growing the non-human organism or a part thereof under conditions which permit the production of homoserine or a composition comprising homoserine in said non-human organism or in the culture medium surrounding said non-human organism.

[15272] Accordingly, the present invention relates to a process for the production of phenylalanine, which comprises
[15273] (a) increasing or generating one or more activities selected from the group consisting of Serine/threonine-protein phosphatase in a non-human organism or a part thereof, preferably a microorganism, a plant cell, a plant or a part thereof, as compared to a corresponding non-transformed wild type non-human organism or a part thereof; and
[15274] (b) growing the non-human organism or a part thereof under conditions which permit the production of phenylalanine or a composition comprising phenylalanine in said non-human organism or in the culture medium surrounding said non-human organism.

[15275] Accordingly, the present invention relates to a process for the production of 5-oxoproline, which comprises
[15276] (a) increasing or generating one or more activities selected from the group consisting of Pre-mRNA-splicing factor in a non-human organism or a part thereof, preferably a microorganism, a plant cell, a plant or a part thereof, as compared to a corresponding non-transformed wild type non-human organism or a part thereof; and
[15277] (b) growing the non-human organism or a part thereof under conditions which permit the production of 5-oxoproline or a composition comprising 5-oxoproline in said non-human organism or in the culture medium surrounding said non-human organism.

[15278] Accordingly, the present invention relates to a process for the production of phenylalanine, which comprises
[15279] (a) increasing or generating one or more activities selected from the group consisting of N-(5′-phosphoribosyl)anthranilate isomerase in a non-human organism or a part thereof, preferably a microorganism, a plant cell, a plant or a part thereof, as compared to a corresponding non-transformed wild type non-human organism or a part thereof; and
[15280] (b) growing the non-human organism or a part thereof under conditions which permit the production of phenylalanine or a composition comprising phenylalanine in said non-human organism or in the culture medium surrounding said non-human organism.

[15281] Accordingly, the present invention relates to a process for the production of tyrosine, which comprises
[15282] (a) increasing or generating one or more activities selected from the group consisting of branched-chain amino acid permease in a non-human organism or a part thereof, preferably a microorganism, a plant cell, a plant or a part thereof, as compared to a corresponding non-transformed wild type non-human organism or a part thereof; and
[15283] (b) growing the non-human organism or a part thereof under conditions which permit the production of tyrosine or a composition comprising tyrosine in said non-human organism or in the culture medium surrounding said non-human organism.

[15284] Accordingly, the present invention relates to a process for the production of serine, which comprises
[15285] (a) increasing or generating one or more activities selected from the group consisting of ydr183w-protein in a non-human organism or a part thereof, preferably a microorganism, a plant cell, a plant or a part thereof, as compared to a corresponding non-transformed wild type non-human organism or a part thereof; and
[15286] (b) growing the non-human organism or a part thereof under conditions which permit the production of serine or a composition comprising serine in said non-human organism or in the culture medium surrounding said non-human organism.

[15287] Accordingly, the present invention relates to a process for the production of aspartate, which comprises
[15288] (a) increasing or generating one or more activities selected from the group consisting of ydr273w-protein in a non-human organism or a part thereof, preferably a microorganism, a plant cell, a plant or a part thereof, as compared to a corresponding non-transformed wild type non-human organism or a part thereof; and
[15289] (b) growing the non-human organism or a part thereof under conditions which permit the production of aspartate or a composition comprising aspartate in said non-human organism or in the culture medium surrounding said non-human organism.

[15290] Accordingly, the present invention relates to a process for the production of citrulline, which comprises
[15291] (a) increasing or generating one or more activities selected from the group consisting of ydr273w-protein in a non-human organism or a part thereof, preferably a microorganism, a plant cell, a plant or a part thereof, as compared to a corresponding non-transformed wild type non-human organism or a part thereof; and
[15292] (b) growing the non-human organism or a part thereof under conditions which permit the production of citrulline or a composition comprising citrulline in said non-human organism or in the culture medium surrounding said non-human organism.

[15293] Accordingly, the present invention relates to a process for the production of aspartate, which comprises
[15294] (a) increasing or generating one or more activities selected from the group consisting of ydr507c-protein in a non-human organism or a part thereof, preferably a microorganism, a plant cell, a plant or a part thereof, as compared to a corresponding non-transformed wild type non-human organism or a part thereof; and
[15295] (b) growing the non-human organism or a part thereof under conditions which permit the production of aspartate or a composition comprising aspartate in said non-human organism or in the culture medium surrounding said non-human organism.

[15296] Accordingly, the present invention relates to a process for the production of asparagine, which comprises
[15297] (a) increasing or generating one or more activities selected from the group consisting of yer014w-protein in a non-human organism or a part thereof, preferably a microorganism, a plant cell, a plant or a part thereof, as compared to a corresponding non-transformed wild type non-human organism or a part thereof; and
[15298] (b) growing the non-human organism or a part thereof under conditions which permit the production of asparagine or a composition comprising asparagine in said non-human organism or in the culture medium surrounding said non-human organism.

[15299] Accordingly, the present invention relates to a process for the production of aspartate, which comprises
[15300] (a) increasing or generating one or more activities selected from the group consisting of yer014w-protein in a non-human organism or a part thereof, preferably a microorganism, a plant cell, a plant or a part thereof, as compared to a corresponding non-transformed wild type non-human organism or a part thereof; and
[15301] (b) growing the non-human organism or a part thereof under conditions which permit the production of aspartate or a composition comprising aspartate in said non-human organism or in the culture medium surrounding said non-human organism.

[15302] Accordingly, the present invention relates to a process for the production of serine, which comprises
[15303] (a) increasing or generating one or more activities selected from the group consisting of yer014w-protein in a non-human organism or a part thereof, preferably a microorganism, a plant cell, a plant or a part thereof, as compared to a corresponding non-transformed wild type non-human organism or a part thereof; and
[15304] (b) growing the non-human organism or a part thereof under conditions which permit the production of serine or a composition comprising serine in said non-human organism or in the culture medium surrounding said non-human organism.

[15305] Accordingly, the present invention relates to a process for the production of citrulline, which comprises
[15306] (a) increasing or generating one or more activities selected from the group consisting of yer106w-protein in a non-human organism or a part thereof, preferably a microorganism, a plant cell, a plant or a part thereof, as compared to a corresponding non-transformed wild type non-human organism or a part thereof; and
[15307] (b) growing the non-human organism or a part thereof under conditions which permit the production of citrulline or a composition comprising citrulline in said non-human organism or in the culture medium surrounding said non-human organism.

[15308] Accordingly, the present invention relates to a process for the production of serine, which comprises
[15309] (a) increasing or generating one or more activities selected from the group consisting of molecular chaperone portein in a non-human organism or a part thereof, preferably a microorganism, a plant cell, a plant or a part thereof, as compared to a corresponding non-transformed wild type non-human organism or a part thereof; and
[15310] (b) growing the non-human organism or a part thereof under conditions which permit the production of serine or a composition comprising serine in said non-human organism or in the culture medium surrounding said non-human organism.

[15311] Accordingly, the present invention relates to a process for the production of tyrosine, which comprises
[15312] (a) increasing or generating one or more activities selected from the group consisting of molecular chaperone portein in a non-human organism or a part thereof, preferably a microorganism, a plant cell, a plant or a part thereof, as compared to a corresponding non-transformed wild type non-human organism or a part thereof; and
[15313] (b) growing the non-human organism or a part thereof under conditions which permit the production of tyrosine or a composition comprising tyrosine in said non-human organism or in the culture medium surrounding said non-human organism.

[15314] Accordingly, the present invention relates to a process for the production of aspartate, which comprises
[15315] (a) increasing or generating one or more activities selected from the group consisting of YFL019C-protein in a non-human organism or a part thereof, preferably a microorganism, a plant cell, a plant or a part thereof, as compared to a corresponding non-transformed wild type non-human organism or a part thereof; and
[15316] (b) growing the non-human organism or a part thereof under conditions which permit the production of aspartate or a composition comprising aspartate in said non-human organism or in the culture medium surrounding said non-human organism.

[15317] Accordingly, the present invention relates to a process for the production of phenylalanine, which comprises
[15318] (a) increasing or generating one or more activities selected from the group consisting of YFL019C-protein in a non-human organism or a part thereof, preferably a microorganism, a plant cell, a plant or a part thereof, as compared to a corresponding non-transformed wild type non-human organism or a part thereof; and
[15319] (b) growing the non-human organism or a part thereof under conditions which permit the production of phenylalanine or a composition comprising phenylalanine in said non-human organism or in the culture medium surrounding said non-human organism.

[15320] Accordingly, the present invention relates to a process for the production of alanine, which comprises
[15321] (a) increasing or generating one or more activities selected from the group consisting of aminotransferase in a non-human organism or a part thereof, preferably a microorganism, a plant cell, a plant or a part thereof, as compared to a corresponding non-transformed wild type non-human organism or a part thereof; and
[15322] (b) growing the non-human organism or a part thereof under conditions which permit the production of alanine or a composition comprising alanine in said non-human organism or in the culture medium surrounding said non-human organism.

[15323] Accordingly, the present invention relates to a process for the production of glycine, which comprises
[15324] (a) increasing or generating one or more activities selected from the group consisting of aminotransferase in a non-human organism or a part thereof, preferably a microorganism, a plant cell, a plant or a part thereof, as compared to a corresponding non-transformed wild type non-human organism or a part thereof; and
[15325] (b) growing the non-human organism or a part thereof under conditions which permit the production of glycine or a composition comprising glycine in said non-human organism or in the culture medium surrounding said non-human organism.

[15326] Accordingly, the present invention relates to a process for the production of phenylalanine, which comprises
[15327] (a) increasing or generating one or more activities selected from the group consisting of yfl054c-protein in a non-human organism or a part thereof, preferably a microorganism, a plant cell, a plant or a part thereof, as compared to a corresponding non-transformed wild type non-human organism or a part thereof; and
[15328] (b) growing the non-human organism or a part thereof under conditions which permit the production of phenylalanine or a composition comprising phenylalanine in said non-human organism or in the culture medium surrounding said non-human organism.

[15329] Accordingly, the present invention relates to a process for the production of serine, which comprises
[15330] (a) increasing or generating one or more activities selected from the group consisting of yfl054c-protein in a non-human organism or a part thereof, preferably a microorganism, a plant cell, a plant or a part thereof, as compared to a corresponding non-transformed wild type non-human organism or a part thereof; and
[15331] (b) growing the non-human organism or a part thereof under conditions which permit the production of serine or a composition comprising serine in said non-human organism or in the culture medium surrounding said non-human organism.

[15332] Accordingly, the present invention relates to a process for the production of 5-oxoproline, which comprises
[15333] (a) increasing or generating one or more activities selected from the group consisting of ygl096w-protein in a non-human organism or a part thereof, preferably a microorganism, a plant cell, a plant or a part thereof, as compared to a corresponding non-transformed wild type non-human organism or a part thereof; and
[15334] (b) growing the non-human organism or a part thereof under conditions which permit the production of 5-oxoproline or a composition comprising 5-oxoproline in said non-human organism or in the culture medium surrounding said non-human organism.

[15335] Accordingly, the present invention relates to a process for the production of tyrosine, which comprises
[15336] (a) increasing or generating one or more activities selected from the group consisting of ygl237c-protein in a non-human organism or a part thereof, preferably a microorganism, a plant cell, a plant or a part thereof, as compared to a corresponding non-transformed wild type non-human organism or a part thereof; and
[15337] (b) growing the non-human organism or a part thereof under conditions which permit the production of tyrosine or a composition comprising tyrosine in said non-human organism or in the culture medium surrounding said non-human organism.

[15338] Accordingly, the present invention relates to a process for the production of aspartate, which comprises
[15339] (a) increasing or generating one or more activities selected from the group consisting of ygr221 c-protein in a non-human organism or a part thereof, preferably a microorganism, a plant cell, a plant or a part thereof, as compared to a corresponding non-transformed wild type non-human organism or a part thereof; and
[15340] (b) growing the non-human organism or a part thereof under conditions which permit the production of aspartate or a composition comprising aspartate in said non-human organism or in the culture medium surrounding said non-human organism.

[15341] Accordingly, the present invention relates to a process for the production of 5-oxoproline, which comprises
[15342] (a) increasing or generating one or more activities selected from the group consisting of ygr221 c-protein in a non-human organism or a part thereof, preferably a microorganism, a plant cell, a plant or a part thereof, as compared to a corresponding non-transformed wild type non-human organism or a part thereof; and
[15343] (b) growing the non-human organism or a part thereof under conditions which permit the production of 5-oxoproline or a composition comprising 5-oxoproline in said non-human organism or in the culture medium surrounding said non-human organism.

[15344] Accordingly, the present invention relates to a process for the production of phenylalanine, which comprises
[15345] (a) increasing or generating one or more activities selected from the group consisting of yhl013c-protein in a non-human organism or a part thereof, preferably a microorganism, a plant cell, a plant or a part thereof, as compared to a corresponding non-transformed wild type non-human organism or a part thereof; and
[15346] (b) growing the non-human organism or a part thereof under conditions which permit the production of phenylalanine or a composition comprising phenylalanine in said non-human organism or in the culture medium surrounding said non-human organism.

[15347] Accordingly, the present invention relates to a process for the production of phenylalanine, which comprises
[15348] (a) increasing or generating one or more activities selected from the group consisting of yhr006w-protein in a non-human organism or a part thereof, preferably a microorganism, a plant cell, a plant or a part thereof, as compared to a corresponding non-transformed wild type non-human organism or a part thereof; and
[15349] (b) growing the non-human organism or a part thereof under conditions which permit the production of phenylalanine or a composition comprising phenylalanine in said non-human organism or in the culture medium surrounding said non-human organism.

[15350] Accordingly, the present invention relates to a process for the production of tyrosine, which comprises
[15351] (a) increasing or generating one or more activities selected from the group consisting of yhr006w-protein in a non-human organism or a part thereof, preferably a microorganism, a plant cell, a plant or a part thereof, as compared to a corresponding non-transformed wild type non-human organism or a part thereof; and
[15352] (b) growing the non-human organism or a part thereof under conditions which permit the production of tyrosine or a composition comprising tyrosine in said non-human organism or in the culture medium surrounding said non-human organism.

[15353] Accordingly, the present invention relates to a process for the production of aspartate, which comprises
[15354] (a) increasing or generating one or more activities selected from the group consisting of yhr207c-protein in a non-human organism or a part thereof, preferably a microorganism, a plant cell, a plant or a part thereof, as compared to a corresponding non-transformed wild type non-human organism or a part thereof; and
[15355] (b) growing the non-human organism or a part thereof under conditions which permit the production of aspartate or a composition comprising aspartate in said non-human organism or in the culture medium surrounding said non-human organism.

[15356] Accordingly, the present invention relates to a process for the production of citrulline, which comprises
[15357] (a) increasing or generating one or more activities selected from the group consisting of 3-phosphoglycerate dehydrogenase in a non-human organism or a part thereof, preferably a microorganism, a plant cell, a plant or a part thereof, as compared to a corresponding non-transformed wild type non-human organism or a part thereof; and
[15358] (b) growing the non-human organism or a part thereof under conditions which permit the production of citrulline or a composition comprising citrulline in said non-human organism or in the culture medium surrounding said non-human organism.

[15359] Accordingly, the present invention relates to a process for the production of glycine, which comprises
[15360] (a) increasing or generating one or more activities selected from the group consisting of 3-phosphoglycerate dehydrogenase in a non-human organism or a part thereof, preferably a microorganism, a plant cell, a plant or a part thereof, as compared to a corresponding non-transformed wild type non-human organism or a part thereof; and
[15361] (b) growing the non-human organism or a part thereof under conditions which permit the production of glycine or a composition comprising glycine in said non-human organism or in the culture medium surrounding said non-human organism.

[15362] Accordingly, the present invention relates to a process for the production of aspartate, which comprises
[15363] (a) increasing or generating one or more activities selected from the group consisting of glutathione S-transferase in a non-human organism or a part thereof, preferably a microorganism, a plant cell, a plant or a part thereof, as compared to a corresponding non-transformed wild type non-human organism or a part thereof; and
[15364] (b) growing the non-human organism or a part thereof under conditions which permit the production of aspartate or a composition comprising aspartate in said non-human organism or in the culture medium surrounding said non-human organism.

[15365] Accordingly, the present invention relates to a process for the production of citrulline, which comprises
[15366] (a) increasing or generating one or more activities selected from the group consisting of glutathione S-transferase in a non-human organism or a part thereof, preferably a microorganism, a plant cell, a plant or a part thereof, as compared to a corresponding non-transformed wild type non-human organism or a part thereof; and
[15367] (b) growing the non-human organism or a part thereof under conditions which permit the production of citrulline or a composition comprising citrulline in said non-human organism or in the culture medium surrounding said non-human organism.

[15368] Accordingly, the present invention relates to a process for the production of aspartate, which comprises
[15369] (a) increasing or generating one or more activities selected from the group consisting of DnaJ-like chaperone in a non-human organism or a part thereof, preferably a microorganism, a plant cell, a plant or a part thereof, as compared to a corresponding non-transformed wild type non-human organism or a part thereof; and
[15370] (b) growing the non-human organism or a part thereof under conditions which permit the production of aspartate or a composition comprising aspartate in said non-human organism or in the culture medium surrounding said non-human organism.

[15371] Accordingly, the present invention relates to a process for the production of phenylalanine, which comprises
[15372] (a) increasing or generating one or more activities selected from the group consisting of cystathionine gamma-synthase in a non-human organism or a part thereof, preferably a microorganism, a plant cell, a plant or a part thereof, as compared to a corresponding non-transformed wild type non-human organism or a part thereof; and
[15373] (b) growing the non-human organism or a part thereof under conditions which permit the production of phenylalanine or a composition comprising phenylalanine in said non-human organism or in the culture medium surrounding said non-human organism.

[15374] Accordingly, the present invention relates to a process for the production of citrulline, which comprises
[15375] (a) increasing or generating one or more activities selected from the group consisting of branched chain aminotransferase in a non-human organism or a part thereof, preferably a microorganism, a plant cell, a plant or a part thereof, as compared to a corresponding non-transformed wild type non-human organism or a part thereof; and
[15376] (b) growing the non-human organism or a part thereof under conditions which permit the production of citrulline or a composition comprising citrulline in said non-human organism or in the culture medium surrounding said non-human organism.

[15377] Accordingly, the present invention relates to a process for the production of aspartate, which comprises
[15378] (a) increasing or generating one or more activities selected from the group consisting of polygalacturonase in a non-human organism or a part thereof, preferably a microorganism, a plant cell, a plant or a part thereof, as compared to a corresponding non-transformed wild type non-human organism or a part thereof; and
[15379] (b) growing the non-human organism or a part thereof under conditions which permit the production of aspartate or a composition comprising aspartate in said non-human organism or in the culture medium surrounding said non-human organism.

[15380] Accordingly, the present invention relates to a process for the production of phenylalanine, which comprises
[15381] (a) increasing or generating one or more activities selected from the group consisting of polygalacturonase in a non-human organism or a part thereof, preferably a microorganism, a plant cell, a plant or a part thereof, as compared to a corresponding non-transformed wild type non-human organism or a part thereof; and
[15382] (b) growing the non-human organism or a part thereof under conditions which permit the production of phenylalanine or a composition comprising phenylalanine in said non-human organism or in the culture medium surrounding said non-human organism.

[15383] Accordingly, the present invention relates to a process for the production of alanine, which comprises
[15384] (a) increasing or generating one or more activities selected from the group consisting of YKL038W-protein in a non-human organism or a part thereof, preferably a microorganism, a plant cell, a plant or a part thereof, as compared to a corresponding non-transformed wild type non-human organism or a part thereof; and
[15385] (b) growing the non-human organism or a part thereof under conditions which permit the production of alanine or a composition comprising alanine in said non-human organism or in the culture medium surrounding said non-human organism.

[15386] Accordingly, the present invention relates to a process for the production of aspartate, which comprises
[15387] (a) increasing or generating one or more activities selected from the group consisting of YKL038W-protein in a non-human organism or a part thereof, preferably a microorganism, a plant cell, a plant or a part thereof, as compared to a corresponding non-transformed wild type non-human organism or a part thereof; and
[15388] (b) growing the non-human organism or a part thereof under conditions which permit the production of aspartate or a composition comprising aspartate in said non-human organism or in the culture medium surrounding said non-human organism.

[15389] Accordingly, the present invention relates to a process for the production of serine, which comprises
[15390] (a) increasing or generating one or more activities selected from the group consisting of YKL038W-protein in a non-human organism or a part thereof, preferably a microorganism, a plant cell, a plant or a part thereof, as compared to a corresponding non-transformed wild type non-human organism or a part thereof; and
[15391] (b) growing the non-human organism or a part thereof under conditions which permit the production of serine or a composition comprising serine in said non-human organism or in the culture medium surrounding said non-human organism.

[15392] Accordingly, the present invention relates to a process for the production of glycine, which comprises
[15393] (a) increasing or generating one or more activities selected from the group consisting of aspartate aminotransferase in a non-human organism or a part thereof, preferably a microorganism, a plant cell, a plant or a part thereof, as compared to a corresponding non-transformed wild type non-human organism or a part thereof; and
[15394] (b) growing the non-human organism or a part thereof under conditions which permit the production of glycine or a composition comprising glycine in said non-human organism or in the culture medium surrounding said non-human organism.

[15395] Accordingly, the present invention relates to a process for the production of serine, which comprises
[15396] (a) increasing or generating one or more activities selected from the group consisting of thioredoxin in a non-human organism or a part thereof, preferably a microorganism, a plant cell, a plant or a part thereof, as compared to a corresponding non-transformed wild type non-human organism or a part thereof; and
[15397] (b) growing the non-human organism or a part thereof under conditions which permit the production of serine or a composition comprising serine in said non-human organism or in the culture medium surrounding said non-human organism.

[15398] Accordingly, the present invention relates to a process for the production of tyrosine, which comprises
[15399] (a) increasing or generating one or more activities selected from the group consisting of thioredoxin in a non-human organism or a part thereof, preferably a microorganism, a plant cell, a plant or a part thereof, as compared to a corresponding non-transformed wild type non-human organism or a part thereof; and
[15400] (b) growing the non-human organism or a part thereof under conditions which permit the production of tyrosine or a composition comprising tyrosine in said non-human organism or in the culture medium surrounding said non-human organism.

[15401] Accordingly, the present invention relates to a process for the production of alanine, which comprises
[15402] (a) increasing or generating one or more activities selected from the group consisting of sterol 24-C-methyltransferase in a non-human organism or a part thereof, preferably a microorganism, a plant cell, a plant or a part thereof, as compared to a corresponding non-transformed wild type non-human organism or a part thereof; and
[15403] (b) growing the non-human organism or a part thereof under conditions which permit the production of alanine or a composition comprising alanine in said non-human organism or in the culture medium surrounding said non-human organism.

[15404] Accordingly, the present invention relates to a process for the production of glycine, which comprises
[15405] (a) increasing or generating one or more activities selected from the group consisting of sterol 24-C-methyltransferase in a non-human organism or a part thereof, preferably a microorganism, a plant cell, a plant or a part thereof, as compared to a corresponding non-transformed wild type non-human organism or a part thereof; and
[15406] (b) growing the non-human organism or a part thereof under conditions which permit the production of glycine or a composition comprising glycine in said non-human organism or in the culture medium surrounding said non-human organism.

[15407] Accordingly, the present invention relates to a process for the production of homoserine, which comprises
[15408] (a) increasing or generating one or more activities selected from the group consisting of sterol 24-C-methyltransferase in a non-human organism or a part thereof, preferably a microorganism, a plant cell, a plant or a part thereof, as compared to a corresponding non-transformed wild type non-human organism or a part thereof; and
[15409] (b) growing the non-human organism or a part thereof under conditions which permit the production of homoserine or a composition comprising homoserine in said non-human organism or in the culture medium surrounding said non-human organism.

[15410] Accordingly, the present invention relates to a process for the production of 5-oxoproline, which comprises
[15411] (a) increasing or generating one or more activities selected from the group consisting of sterol 24-C-methyltransferase in a non-human organism or a part thereof, preferably a microorganism, a plant cell, a plant or a part thereof, as compared to a corresponding non-transformed wild type non-human organism or a part thereof; and
[15412] (b) growing the non-human organism or a part thereof under conditions which permit the production of 5-oxoproline or a composition comprising 5-oxoproline in said non-human organism or in the culture medium surrounding said non-human organism.

[15413] Accordingly, the present invention relates to a process for the production of alanine, which comprises
[15414] (a) increasing or generating one or more activities selected from the group consisting of yml083c-protein in a non-human organism or a part thereof, preferably a microorganism, a plant cell, a plant or a part thereof, as compared to a corresponding non-transformed wild type non-human organism or a part thereof; and
[15415] (b) growing the non-human organism or a part thereof under conditions which permit the production of alanine or a composition comprising alanine in said non-human organism or in the culture medium surrounding said non-human organism.

[15416] Accordingly, the present invention relates to a process for the production of phenylalanine, which comprises
[15417] (a) increasing or generating one or more activities selected from the group consisting of phosphate transporter in a non-human organism or a part thereof, preferably a microorganism, a plant cell, a plant or a part thereof, as compared to a corresponding non-transformed wild type non-human organism or a part thereof; and
[15418] (b) growing the non-human organism or a part thereof under conditions which permit the production of phenylalanine or a composition comprising phenylalanine in said non-human organism or in the culture medium surrounding said non-human organism.

[15419] Accordingly, the present invention relates to a process for the production of tyrosine, which comprises
[15420] (a) increasing or generating one or more activities selected from the group consisting of phosphate transporter in a non-human organism or a part thereof, preferably a microorganism, a plant cell, a plant or a part thereof, as compared to a corresponding non-transformed wild type non-human organism or a part thereof; and
[15421] (b) growing the non-human organism or a part thereof under conditions which permit the production of tyrosine or a composition comprising tyrosine in said non-human organism or in the culture medium surrounding said non-human organism.

[15422] Accordingly, the present invention relates to a process for the production of tyrosine, which comprises
[15423] (a) increasing or generating one or more activities selected from the group consisting of ymr013c-protein in a non-human organism or a part thereof, preferably a microorganism, a plant cell, a plant or a part thereof, as compared to a corresponding non-transformed wild type non-human organism or a part thereof; and
[15424] (b) growing the non-human organism or a part thereof under conditions which permit the production of tyrosine or a composition comprising tyrosine in said non-human organism or in the culture medium surrounding said non-human organism.

[15425] Accordingly, the present invention relates to a process for the production of glycine, which comprises
[15426] (a) increasing or generating one or more activities selected from the group consisting of purine biosynthesis protein in a non-human organism or a part thereof, preferably a microorganism, a plant cell, a plant or a part thereof, as compared to a corresponding non-transformed wild type non-human organism or a part thereof; and
[15427] (b) growing the non-human organism or a part thereof under conditions which permit the production of glycine or a composition comprising glycine in said non-human organism or in the culture medium surrounding said non-human organism.

[15428] Accordingly, the present invention relates to a process for the production of phenylalanine, which comprises
[15429] (a) increasing or generating one or more activities selected from the group consisting of mitochondrial inner membrane protease subunit in a non-human organism or a part thereof, preferably a microorganism, a plant cell, a plant or a part thereof, as compared to a corresponding non-transformed wild type non-human organism or a part thereof; and
[15430] (b) growing the non-human organism or a part thereof under conditions which permit the production of phenylalanine or a composition comprising phenylalanine in said non-human organism or in the culture medium surrounding said non-human organism.

[15431] Accordingly, the present invention relates to a process for the production of homoserine, which comprises
[15432] (a) increasing or generating one or more activities selected from the group consisting of YNL086W-protein in a non-human organism or a part thereof, preferably a microorganism, a plant cell, a plant or a part thereof, as compared to a corresponding non-transformed wild type non-human organism or a part thereof; and
[15433] (b) growing the non-human organism or a part thereof under conditions which permit the production of homoserine or a composition comprising homoserine in said non-human organism or in the culture medium surrounding said non-human organism.

[15434] Accordingly, the present invention relates to a process for the production of tyrosine, which comprises
[15435] (a) increasing or generating one or more activities selected from the group consisting of amino acid transporter in a non-human organism or a part thereof, preferably a microorganism, a plant cell, a plant or a part thereof, as compared to a corresponding non-transformed wild type non-human organism or a part thereof; and
[15436] (b) growing the non-human organism or a part thereof under conditions which permit the production of tyrosine or a composition comprising tyrosine in said non-human organism or in the culture medium surrounding said non-human organism.

[15437] Accordingly, the present invention relates to a process for the production of homoserine, which comprises
[15438] (a) increasing or generating one or more activities selected from the group consisting of homoserine O-acetyltransferase in a non-human organism or a part thereof, preferably a microorganism, a plant cell, a plant or a part thereof, as compared to a corresponding non-transformed wild type non-human organism or a part thereof; and
[15439] (b) growing the non-human organism or a part thereof under conditions which permit the production of homoserine or a composition comprising homoserine in said non-human organism or in the culture medium surrounding said non-human organism.

[15440] Accordingly, the present invention relates to a process for the production of alanine, which comprises
[15441] (a) increasing or generating one or more activities selected from the group consisting of metal ion transporter in a non-human organism or a part thereof, preferably a microorganism, a plant cell, a plant or a part thereof, as compared to a corresponding non-transformed wild type non-human organism or a part thereof; and
[15442] (b) growing the non-human organism or a part thereof under conditions which permit the production of alanine or a composition comprising alanine in said non-human organism or in the culture medium surrounding said non-human organism.

[15443] Accordingly, the present invention relates to a process for the production of aspartate, which comprises
[15444] (a) increasing or generating one or more activities selected from the group consisting of yol160w-protein in a non-human organism or a part thereof, preferably a microorganism, a plant cell, a plant or a part thereof, as compared to a corresponding non-transformed wild type non-human organism or a part thereof; and
[15445] (b) growing the non-human organism or a part thereof under conditions which permit the production of aspartate or a composition comprising aspartate in said non-human organism or in the culture medium surrounding said non-human organism.

[15446] Accordingly, the present invention relates to a process for the production of citrulline, which comprises
[15447] (a) increasing or generating one or more activities selected from the group consisting of protein kinase in a non-human organism or a part thereof, preferably a microorganism, a plant cell, a plant or a part thereof, as compared to a corresponding non-transformed wild type non-human organism or a part thereof; and
[15448] (b) growing the non-human organism or a part thereof under conditions which permit the production of citrulline or a composition comprising citrulline in said non-human organism or in the culture medium surrounding said non-human organism.

[15449] Accordingly, the present invention relates to a process for the production of phenylalanine, which comprises
[15450] (a) increasing or generating one or more activities selected from the group consisting of histone acetyltransferase in a non-human organism or a part thereof, preferably a microorganism, a plant cell, a plant or a part thereof, as compared to a corresponding non-transformed wild type non-human organism or a part thereof; and
[15451] (b) growing the non-human organism or a part thereof under conditions which permit the production of phenylalanine or a composition comprising phenylalanine in said non-human organism or in the culture medium surrounding said non-human organism.

[15452] Accordingly, the present invention relates to a process for the production of tyrosine, which comprises
[15453] (a) increasing or generating one or more activities selected from the group consisting of histone acetyltransferase in a non-human organism or a part thereof, preferably a microorganism, a plant cell, a plant or a part thereof, as compared to a corresponding non-transformed wild type non-human organism or a part thereof; and
[15454] (b) growing the non-human organism or a part thereof under conditions which permit the production of tyrosine or a composition comprising tyrosine in said non-human organism or in the culture medium surrounding said non-human organism.

[15455] Accordingly, the present invention relates to a process for the production of homoserine, which comprises
[15456] (a) increasing or generating one or more activities selected from the group consisting of diacylglycerol O-acyltransferase in a non-human organism or a part thereof, preferably a microorganism, a plant cell, a plant or a part thereof, as compared to a corresponding non-transformed wild type non-human organism or a part thereof; and
[15457] (b) growing the non-human organism or a part thereof under conditions which permit the production of homoserine or a composition comprising homoserine in said non-human organism or in the culture medium surrounding said non-human organism.

[15458] Accordingly, the present invention relates to a process for the production of serine, which comprises
[15459] (a) increasing or generating one or more activities selected from the group consisting of diacylglycerol O-acyltransferase in a non-human organism or a part thereof, preferably a microorganism, a plant cell, a plant or a part thereof, as compared to a corresponding non-transformed wild type non-human organism or a part thereof; and
[15460] (b) growing the non-human organism or a part thereof under conditions which permit the production of serine or a composition comprising serine in said non-human organism or in the culture medium surrounding said non-human organism.

[15461] Accordingly, the present invention relates to a process for the production of 5-oxoproline, which comprises
[15462] (a) increasing or generating one or more activities selected from the group consisting of diacylglycerol O-acyltransferase in a non-human organism or a part thereof, preferably a microorganism, a plant cell, a plant or a part thereof, as compared to a corresponding non-transformed wild type non-human organism or a part thereof; and
[15463] (b) growing the non-human organism or a part thereof under conditions which permit the production of 5-oxoproline or a composition comprising 5-oxoproline in said non-human organism or in the culture medium surrounding said non-human organism.

[15464] Accordingly, the present invention relates to a process for the production of glycine, which comprises
[15465] (a) increasing or generating one or more activities selected from the group consisting of acetyl-CoA acetyltransferase in a non-human organism or a part thereof, preferably a microorganism, a plant cell, a plant or a part thereof, as compared to a corresponding non-transformed wild type non-human organism or a part thereof; and
[15466] (b) growing the non-human organism or a part thereof under conditions which permit the production of glycine or a composition comprising glycine in said non-human organism or in the culture medium surrounding said non-human organism.

[15467] Accordingly, the present invention relates to a process for the production of serine, which comprises
[15468] (a) increasing or generating one or more activities selected from the group consisting of citrate synthase in a non-human organism or a part thereof, preferably a microorganism, a plant cell, a plant or a part thereof, as compared to a corresponding non-transformed wild type non-human organism or a part thereof; and
[15469] (b) growing the non-human organism or a part thereof under conditions which permit the production of serine or a composition comprising serine in said non-human organism or in the culture medium surrounding said non-human organism.

[15470] Accordingly, the present invention relates to a process for the production of aspartate, which comprises
[15471] (a) increasing or generating one or more activities selected from the group consisting of ammonium transporter in a non-human organism or a part thereof, preferably a microorganism, a plant cell, a plant or a part thereof, as compared to a corresponding non-transformed wild type non-human organism or a part thereof; and
[15472] (b) growing the non-human organism or a part thereof under conditions which permit the production of aspartate or a composition comprising aspartate in said non-human organism or in the culture medium surrounding said non-human organism.

[15473] Accordingly, the present invention relates to a process for the production of phenylalanine, which comprises
[15474] (a) increasing or generating one or more activities selected from the group consisting of Zm_{—}4842_BE510522-protein in a non-human organism or a part thereof, preferably a microorganism, a plant cell, a plant or a part thereof, as compared to a corresponding non-transformed wild type non-human organism or a part thereof; and
[15475] (b) growing the non-human organism or a part thereof under conditions which permit the production of phenylalanine or a composition comprising phenylalanine in said non-human organism or in the culture medium surrounding said non-human organism.

[15476] Accordingly, the present invention relates to a process for the production of serine, which comprises
[15477] (a) increasing or generating one or more activities selected from the group consisting of Zm_{—}4842_BE510522-protein in a non-human organism or a part thereof, preferably a microorganism, a plant cell, a plant or a part thereof, as compared to a corresponding non-transformed wild type non-human organism or a part thereof; and
[15478] (b) growing the non-human organism or a part thereof under conditions which permit the production of serine or a composition comprising serine in said non-human organism or in the culture medium surrounding said non-human organism.

[15479] Accordingly, the present invention relates to a process for the production of tyrosine, which comprises
[15480] (a) increasing or generating one or more activities selected from the group consisting of Zm_{—}4842_BE510522-protein in a non-human organism or a part thereof, preferably a microorganism, a plant cell, a plant or a part thereof, as compared to a corresponding non-transformed wild type non-human organism or a part thereof; and
[15481] (b) growing the non-human organism or a part thereof under conditions which permit the production of tyrosine or a composition comprising tyrosine in said non-human organism or in the culture medium surrounding said non-human organism.

[15482] Accordingly, the present invention relates to a process for the production of 5-oxoproline, which comprises
[15483] (a) increasing or generating one or more activities selected from the group consisting of Zm_{—}4842_BE510522-protein in a non-human organism or a part thereof, preferably a microorganism, a plant cell, a plant or a part thereof, as compared to a corresponding non-transformed wild type non-human organism or a part thereof; and
[15484] (b) growing the non-human organism or a part thereof under conditions which permit the production of 5-oxoproline or a composition comprising 5-oxoproline in said non-human organism or in the culture medium surrounding said non-human organism.

[15485] An embodiment of the present invention relates to a process for the production of 3,4-dihydroxyphenylalanine (dopa), which comprises
[15486] (a1) increasing or generating the activity of a polypeptide comprising a polypeptide as depicted in a respective line in column 5 or 8 of Table II, application no. 3, or a homolog or a fragment thereof, a consensus sequence or at least one polypeptide motif as depicted in the respective line in column 8 of Table IV, application no. 3, whereby the respective line discloses in column 7 3,4-dihydroxyphenylalanine (dopa); or
[15487] (a2) increasing or generating the activity of an expression product of one or more nucleic acid molecule(s) comprising a polynucleotide as depicted in the respective line in column 5 or 8 of Table I, application no. 3, preferably the coding region thereof, or a homolog or a fragment thereof, whereby the respective line discloses in column 7 3,4-dihydroxyphenylalanine (dopa); or
[15488] (a3) increasing or generating the activity of a functional equivalent of (a1) or (a2);
[15489] in a non-human organism or a part thereof; preferably a microorganism, a plant cell, a plant or a part thereof, as compared to a corresponding non-transformed wild type non-human organism or a part thereof; and
[15490] (b) growing the non-human organism under conditions which permit the production of 3,4-dihydroxyphenylalanine (dopa) or a composition comprising 3,4-dihydroxyphenylalanine (dopa) in said non-human organism or in the culture medium surrounding said non-human organism.

[15491] An embodiment of the present invention relates to a process for the production of 5-oxoproline, which comprises
[15492] (a1) increasing or generating the activity of a polypeptide comprising a polypeptide as depicted in a respective line in column 5 or 8 of Table II, application no. 3, or a homolog or a fragment thereof, a consensus sequence or at least one polypeptide motif as depicted in the respective line in column 8 of Table IV, application no. 3, whereby the respective line discloses in column 7 5-oxoproline; or
[15493] (a2) increasing or generating the activity of an expression product of one or more nucleic acid molecule(s) comprising a polynucleotide as depicted in the respective line in column 5 or 8 of Table I, application no. 3, preferably the coding region thereof, or a homolog or a fragment thereof, whereby the respective line discloses in column 7 5-oxoproline; or
[15494] (a3) increasing or generating the activity of a functional equivalent of (a1) or (a2);
[15495] in a non-human organism or a part thereof; preferably a microorganism, a plant cell, a plant or a part thereof, as compared to a corresponding non-transformed wild type non-human organism or a part thereof; and
[15496] (b) growing the non-human organism under conditions which permit the production of 5-oxoproline or a composition comprising 5-oxoproline in said non-human organism or in the culture medium surrounding said non-human organism.

[15497] An embodiment of the present invention relates to a process for the production of alanine, which comprises
[15498] (a1) increasing or generating the activity of a polypeptide comprising a polypeptide as depicted in a respective line in column 5 or 8 of Table II, application no. 3, or a homolog or a fragment thereof, a consensus sequence or at least one polypeptide motif as depicted in the respective line in column 8 of Table IV, application no. 3, whereby the respective line discloses in column 7 alanine; or
[15499] (a2) increasing or generating the activity of an expression product of one or more nucleic acid molecule(s) comprising a polynucleotide as depicted in the respective line in column 5 or 8 of Table I, application no. 3, preferably the coding region thereof, or a homolog or a fragment thereof, whereby the respective line discloses in column 7 alanine; or
[15500] (a3) increasing or generating the activity of a functional equivalent of (a1) or (a2);
[15501] in a non-human organism or a part thereof; preferably a microorganism, a plant cell, a plant or a part thereof, as compared to a corresponding non-transformed wild type non-human organism or a part thereof; and
[15502] (b) growing the non-human organism under conditions which permit the production of alanine or a composition comprising alanine in said non-human organism or in the culture medium surrounding said non-human organism.

[15503] An embodiment of the present invention relates to a process for the production of asparagine, which comprises
[15504] (a1) increasing or generating the activity of a polypeptide comprising a polypeptide as depicted in a respective line in column 5 or 8 of Table II, application no. 3, or a homolog or a fragment thereof, a consensus sequence or at least one polypeptide motif as depicted in the respective line in column 8 of Table IV, application no. 3, whereby the respective line discloses in column 7 asparagine; or
[15505] (a2) increasing or generating the activity of an expression product of one or more nucleic acid molecule(s) comprising a polynucleotide as depicted in the respective line in column 5 or 8 of Table I, application no. 3, preferably the coding region thereof, or a homolog or a fragment thereof, whereby the respective line discloses in column 7 asparagine; or
[15506] (a3) increasing or generating the activity of a functional equivalent of (a1) or (a2);
[15507] in a non-human organism or a part thereof; preferably a microorganism, a plant cell, a plant or a part thereof, as compared to a corresponding non-transformed wild type non-human organism or a part thereof; and
[15508] (b) growing the non-human organism under conditions which permit the production of asparagine or a composition comprising asparagine in said non-human organism or in the culture medium surrounding said non-human organism.

[15509] An embodiment of the present invention relates to a process for the production of aspartate, which comprises
[15510] (a1) increasing or generating the activity of a polypeptide comprising a polypeptide as depicted in a respective line in column 5 or 8 of Table II, application no. 3, or a homolog or a fragment thereof, a consensus sequence or at least one polypeptide motif as depicted in the respective line in column 8 of Table IV, application no. 3, whereby the respective line discloses in column 7 aspartate; or
[15511] (a2) increasing or generating the activity of an expression product of one or more nucleic acid molecule(s) comprising a polynucleotide as depicted in the respective line in column 5 or 8 of Table I, application no. 3, preferably the coding region thereof, or a homolog or a fragment thereof, whereby the respective line discloses in column 7 aspartate; or
[15512] (a3) increasing or generating the activity of a functional equivalent of (a1) or (a2);
[15513] in a non-human organism or a part thereof; preferably a microorganism, a plant cell, a plant or a part thereof, as compared to a corresponding non-transformed wild type non-human organism or a part thereof; and
[15514] (b) growing the non-human organism under conditions which permit the production of aspartate or a composition comprising aspartate in said non-human organism or in the culture medium surrounding said non-human organism.

[15515] An embodiment of the present invention relates to a process for the production of citrulline, which comprises
[15516] (a1) increasing or generating the activity of a polypeptide comprising a polypeptide as depicted in a respective line in column 5 or 8 of Table II, application no. 3, or a homolog or a fragment thereof, a consensus sequence or at least one polypeptide motif as depicted in the respective line in column 8 of Table IV, application no. 3, whereby the respective line discloses in column 7 citrulline; or
[15517] (a2) increasing or generating the activity of an expression product of one or more nucleic acid molecule(s) comprising a polynucleotide as depicted in the respective line in column 5 or 8 of Table I, application no. 3, preferably the coding region thereof, or a homolog or a fragment thereof, whereby the respective line discloses in column 7 citrulline; or
[15518] (a3) increasing or generating the activity of a functional equivalent of (a1) or (a2);
[15519] in a non-human organism or a part thereof; preferably a microorganism, a plant cell, a plant or a part thereof, as compared to a corresponding non-transformed wild type non-human organism or a part thereof; and
[15520] (b) growing the non-human organism under conditions which permit the production of citrulline or a composition comprising citrulline in said non-human organism or in the culture medium surrounding said non-human organism.

[15521] An embodiment of the present invention relates to a process for the production of glycine, which comprises
[15522] (a1) increasing or generating the activity of a polypeptide comprising a polypeptide as depicted in a respective line in column 5 or 8 of Table II, application no. 3, or a homolog or a fragment thereof, a consensus sequence or at least one polypeptide motif as depicted in the respective line in column 8 of Table IV, application no. 3, whereby the respective line discloses in column 7 glycine; or
[15523] (a2) increasing or generating the activity of an expression product of one or more nucleic acid molecule(s) comprising a polynucleotide as depicted in the respective line in column 5 or 8 of Table I, application no. 3, preferably the coding region thereof, or a homolog or a fragment thereof, whereby the respective line discloses in column 7 glycine; or
[15524] (a3) increasing or generating the activity of a functional equivalent of (a1) or (a2);
[15525] in a non-human organism or a part thereof; preferably a microorganism, a plant cell, a plant or a part thereof, as compared to a corresponding non-transformed wild type non-human organism or a part thereof; and
[15526] (b) growing the non-human organism under conditions which permit the production of glycine or a composition comprising glycine in said non-human organism or in the culture medium surrounding said non-human organism.

[15527] An embodiment of the present invention relates to a process for the production of homoserine, which comprises
[15528] (a1) increasing or generating the activity of a polypeptide comprising a polypeptide as depicted in a respective line in column 5 or 8 of Table II, application no. 3, or a homolog or a fragment thereof, a consensus sequence or at least one polypeptide motif as depicted in the respective line in column 8 of Table IV, application no. 3, whereby the respective line discloses in column 7 homoserine; or
[15529] (a2) increasing or generating the activity of an expression product of one or more nucleic acid molecule(s) comprising a polynucleotide as depicted in the respective line in column 5 or 8 of Table I, application no. 3, preferably the coding region thereof, or a homolog or a fragment thereof, whereby the respective line discloses in column 7 homoserine; or
[15530] (a3) increasing or generating the activity of a functional equivalent of (a1) or (a2);
[15531] in a non-human organism or a part thereof; preferably a microorganism, a plant cell, a plant or a part thereof, as compared to a corresponding non-transformed wild type non-human organism or a part thereof; and
[15532] (b) growing the non-human organism under conditions which permit the production of homoserine or a composition comprising homoserine in said non-human organism or in the culture medium surrounding said non-human organism.

[15533] An embodiment of the present invention relates to a process for the production of ornithine, which comprises
[15534] (a1) increasing or generating the activity of a polypeptide comprising a polypeptide as depicted in a respective line in column 5 or 8 of Table II, application no. 3, or a homolog or a fragment thereof, a consensus sequence or at least one polypeptide motif as depicted in the respective line in column 8 of Table IV, application no. 3, whereby the respective line discloses in column 7 ornithine; or
[15535] (a2) increasing or generating the activity of an expression product of one or more nucleic acid molecule(s) comprising a polynucleotide as depicted in the respective line in column 5 or 8 of Table I, application no. 3, preferably the coding region thereof, or a homolog or a fragment thereof, whereby the respective line discloses in column 7 ornithine; or
[15536] (a3) increasing or generating the activity of a functional equivalent of (a1) or (a2);
[15537] in a non-human organism or a part thereof; preferably a microorganism, a plant cell, a plant or a part thereof, as compared to a corresponding non-transformed wild type non-human organism or a part thereof; and
[15538] (b) growing the non-human organism under conditions which permit the production of ornithine or a composition comprising ornithine in said non-human organism or in the culture medium surrounding said non-human organism.

[15539] An embodiment of the present invention relates to a process for the production of phenylalanine, which comprises
[15540] (a1) increasing or generating the activity of a polypeptide comprising a polypeptide as depicted in a respective line in column 5 or 8 of Table II, application no. 3, or a homolog or a fragment thereof, a consensus sequence or at least one polypeptide motif as depicted in the respective line in column 8 of Table IV, application no. 3, whereby the respective line discloses in column 7 phenylalanine; or
[15541] (a2) increasing or generating the activity of an expression product of one or more nucleic acid molecule(s) comprising a polynucleotide as depicted in the respective line in column 5 or 8 of Table I, application no. 3, preferably the coding region thereof, or a homolog or a fragment thereof, whereby the respective line discloses in column 7 phenylalanine; or
[15542] (a3) increasing or generating the activity of a functional equivalent of (a1) or (a2);
[15543] in a non-human organism or a part thereof; preferably a microorganism, a plant cell, a plant or a part thereof, as compared to a corresponding non-transformed wild type non-human organism or a part thereof; and
[15544] (b) growing the non-human organism under conditions which permit the production of phenylalanine or a composition comprising phenylalanine in said non-human organism or in the culture medium surrounding said non-human organism.

[15545] An embodiment of the present invention relates to a process for the production of serine, which comprises
[15546] (a1) increasing or generating the activity of a polypeptide comprising a polypeptide as depicted in a respective line in column 5 or 8 of Table II, application no. 3, or a homolog or a fragment thereof, a consensus sequence or at least one polypeptide motif as depicted in the respective line in column 8 of Table IV, application no. 3, whereby the respective line discloses in column 7 serine; or
[15547] (a2) increasing or generating the activity of an expression product of one or more nucleic acid molecule(s) comprising a polynucleotide as depicted in the respective line in column 5 or 8 of Table I, application no. 3, preferably the coding region thereof, or a homolog or a fragment thereof, whereby the respective line discloses in column 7 serine; or
[15548] (a3) increasing or generating the activity of a functional equivalent of (a1) or (a2);
[15549] in a non-human organism or a part thereof; preferably a microorganism, a plant cell, a plant or a part thereof, as compared to a corresponding non-transformed wild type non-human organism or a part thereof; and
[15550] (b) growing the non-human organism under conditions which permit the production of serine or a composition comprising serine in said non-human organism or in the culture medium surrounding said non-human organism.

[15551] An embodiment of the present invention relates to a process for the production of tyrosine, which comprises
[15552] (a1) increasing or generating the activity of a polypeptide comprising a polypeptide as depicted in a respective line in column 5 or 8 of Table II, application no. 3, or a homolog or a fragment thereof, a consensus sequence or at least one polypeptide motif as depicted in the respective line in column 8 of Table IV, application no. 3, whereby the respective line discloses in column 7 tyrosine; or
[15553] (a2) increasing or generating the activity of an expression product of one or more nucleic acid molecule(s) comprising a polynucleotide as depicted in the respective line in column 5 or 8 of Table I, application no. 3, preferably the coding region thereof, or a homolog or a fragment thereof, whereby the respective line discloses in column 7 tyrosine; or
[15554] (a3) increasing or generating the activity of a functional equivalent of (a1) or (a2);
[15555] in a non-human organism or a part thereof; preferably a microorganism, a plant cell, a plant or a part thereof, as compared to a corresponding non-transformed wild type non-human organism or a part thereof; and
[15556] (b) growing the non-human organism under conditions which permit the production of tyrosine or a composition comprising tyrosine in said non-human organism or in the culture medium surrounding said non-human organism.

[15557] Accordingly, the increase or generation of one or more said activities is for example conferred by one or more expression products of said nucleic acid molecule, e.g. proteins. Accordingly, in the present invention described above, the increase or generation of one or more said activities is for example conferred by one or more protein(s) each comprising a polypeptide selected from the group as depicted in Table II, application no. 3, column 5 and 8, or a homolog or a fragment thereof.

[15558] The process of the invention comprises in one embodiment the following steps:
[15559] (i) increasing or generating of the expression of; and/or
[15560] (ii) increasing or generating the expression of an expression product of; and/or
[15561] (iii) increasing or generating one or more activities of an expression product encoded by; at least one nucleic acid molecule (in the following “Fine Chemical Related Protein (FCRP)”-encoding gene or “FCRP”-gene) comprising a nucleic acid molecule selected from the group consisting of:
[15562] (a) a nucleic acid molecule encoding the polypeptide shown in column 5 or 8 of Table II, preferably Table II B, application no. 3, or a homolog or a fragment thereof;
[15563] (b) a nucleic acid molecule shown in column 5 or 8 of Table I, preferably Table I B, application no. 3, or a homolog or a fragment thereof (preferably the coding region thereof);
[15564] (c) a nucleic acid molecule, which, as a result of the degeneracy of the genetic code, can be derived from a polypeptide sequence depicted in column 5 or 8 of Table II, preferably Table II B, application no. 3;
[15565] (d) a nucleic acid molecule having at least 30%, in particular at least 50%, 60%, 70%, 80%, 85%, 90%, 95%, 97%, 98%, 99% or 99.5% identity with the nucleic acid molecule sequence of a polynucleotide comprising the nucleic acid molecule shown in column 5 or 8 of Table I, preferably Table I B, application no. 3, or the coding region thereof;
[15566] (e) a nucleic acid molecule encoding a polypeptide having at least 30%, in particular 50%, 60%, 70%, 80%, 85%, 90%, 95%, 97%, 98%, 99% or 99.5% identity with the amino acid sequence of the polypeptide encoded by the nucleic acid molecule of (a), (b), (c) or (d),
[15567] (f) a nucleic acid molecule which hybridizes with a nucleic acid molecule of (a), (b), (c), (d) or (e) under stringent hybridization conditions;
[15568] (g) a nucleic acid molecule encoding a polypeptide which can be isolated with the aid of monoclonal or polyclonal antibodies made against a polypeptide encoded by one of the nucleic acid molecules of (a), (b), (c), (d), (e) or (f);
[15569] (h) a nucleic acid molecule encoding a polypeptide comprising the consensus sequence or one or more polypeptide motifs as shown in column 8 of Table IV, application no. 3;
[15570] (i) a nucleic acid molecule encoding a polypeptide having the activity represented by a respective protein as depicted in column 5 of Table II, application no. 3;
[15571] (j) a nucleic acid molecule which comprises a polynucleotide, which is obtained by amplifying a cDNA library or a genomic library using the primers as depicted in column 8 of Table III, application no. 3; and
[15572] (k) a nucleic acid molecule which is obtainable by screening a suitable nucleic acid library, especially a cDNA library and/or a genomic library, under stringent hybridization conditions with a probe comprising a complementary sequence of a nucleic acid molecule of (a), (b), (c), (d), (e), (f), (g), (h), (i) or (j) or with a fragment thereof, having at least 15 nt, preferably 20 nt, 30 nt, 50 nt, 100 nt, 200 nt, 500 nt, 1000 nt, 1500 nt, 2000 nt or 3000 nt of a nucleic acid molecule complementary to a nucleic acid molecule sequence characterized in (a), (b), (c), (d), (e), (f), (g), (h), (i) or (j);
   or a nucleic acid molecule comprising a sequence which is complementary thereto.
   (All the references to Tables I to IV are references to the corresponding lines of Tables I to IV.)

[15573] In a preferred embodiment thereof said nucleic acid molecule encodes a polypeptide which has the activity of the polypeptide represented by a protein comprising a polypeptide as depicted in the corresponding hit in column 5 of Table II, application no. 3.

[15574] In another preferred embodiment thereof said nucleic acid molecule confers a generation or an increase of the respective fine chemical in a non-human organism or a part thereof as compared to a corresponding wild-type non-human organism or part thereof.

[15575] In another preferred embodiment thereof said nucleic acid molecule encodes a polypeptide which has the activity of the polypeptide represented by a protein as depicted in the corresponding hit in column 5 of Table II, application no. 3, and confers a generation or an increase of the respective fine chemical in a non-human organism or a part thereof as compared to a corresponding wild-type non-human organism or part thereof.

[15576] Accordingly, the genes of the present invention or used in accordance with the present invention, which respectively encode a protein having an activity of 2,3-dihydroxyphenylpropionate 1,2-dioxygenase, 2-C-methyl-D-erythritol 4-phosphate cytidylyltransferase, 2-oxoglutarate dehydrogenase E1 subunit, 30S ribosomal protein S3, 3-deoxy-7-phosphoheptulonate synthase, 3-deoxy-D-arabinoheptulosonate-7-phosphatesynthase, 3oxoacyl-[acyl-carrier-protein] synthase, 3-phosphoglycerate dehydrogenase, 47266012-protein, 49747384_SOYBEAN-protein, 50S ribosomal protein L14, 5′-nucleotidase, ABC metal ion transporter substrate-binding protein, ABC transporter ATP binding component, ABC transporter ATP-binding protein, ABC transporter component, ABC transporter permease protein, ABC transporter substrate-binding protein, acetolactate synthase, acetolactate synthase small subunit, acetyl CoA carboxylase, acetyl-CoA acetyltransferase, acetyltransferase, acid shock protein, acyl transferase, acyl-CoA dehydrogenase, acyl-CoA synthase, adenylate kinase, adenylylsulfate kinase, agmatinase, aldehyde dehydrogenase, amine oxidase, amino acid ABC transporter permease protein, amino acid acetyltransferase, amino acid transporter, amino-acid acetyltransferase, aminotransferase, ammonium transporter, ankyrin repeat family protein, anthranilate synthase component I, arginine exporter protein, arginine N-succinyltransferase, argininosuccinate lyase, asparaginase, aspartate 1-decarboxylase, aspartate aminotransferase, aspartate kinase, aspartate-ammonia ligase, At1g17440-protein, At1g19800-protein, At4g32480-protein, At5g16650-protein, at5g21910-protein, ATP-binding component of a transport system, ATP-dependent RNA helicase, auxin response factor, AX653549-protein, AY087308-protein, b0391-protein, b0456-protein, b0518-protein, b0801-protein, b0841-protein, b0917-protein, b1003-protein, b1024-protein, b1137-protein, b1155-protein, b1163-protein, b1179-protein, b1205-protein, b1229-protein, b1259-protein, b1280-protein, b1330-protein, b1445-protein, b1522-protein, b1583-protein, b1670-protein, b1672-protein, b1837-protein, b1898-protein, b1930-protein, b2032-protein, b2107-protein, b2360-protein, b2399-protein, b2474-protein, b2513-protein, b2613-protein, b2673-protein, b2739-protein, b2812-protein, b2849-protein, b3083-protein, b3098-protein, b3121-protein, b3221-protein, b3246-protein, b3346-protein, b3392-protein, b3410-protein, b3509-protein, b3646-protein, b3791-protein, b3814-protein, b3989-protein, b4029-protein, b4121-protein, beta-galactosidase, betahydroxylase, bifunctional aspartokinase/homoserine dehydrogenase, bifunctional purine biosynthesis protein, branched chain aminotransferase, branched-chain amino acid permease, calcium-dependent protein kinase, carbon dioxide concentrating mechanism protein, cation-transporting ATPase, CBL-interacting protein kinase, CDP-diacylglycerol-glycerol-3-phosphate 3-phosphatidyltransferase, CDP-diacylglycerol-serine 0-phosphatidyltransferase, CDP-glucose-4,6-dehydratase, cell division control protein, cellulose synthase catalytic subunit, Chaperone protein CIpB, chorismate mutase-T and prephenate dehydrogenase, citrate synthase, coproporphyrinogen Ill oxidase, CTP synthetase, cullin, cyclin D, cystathionine gammasynthase, cytochrome c-type protein, D-3-phosphoglycerate dehydrogenase, delta-1-pyrroline 5-carboxylase synthetase, diacylglycerol O-acyltransferase, dihydroxyacid dehydratase, DNA helicase II, DNA mismatch repair protein, DNA-binding protein, DnaJ-like chaperone, D-serine dehydratase, electron transfer flavoprotein subunit beta, elongation factor Tu, enoyl-CoA hydratase, enterobacterial common antigen polymerase, eukaryotic translation initiation factor, eukaryotic translation initiation factor 5, exopolyphosphatase, Fe—S subunit of oxidoreductase, flavodoxin, fumarylacetoacetate hydrolase, gamma-glutamyltranspeptidase, GDP-mannose dehydrogenase, geranylgeranyl pyrophosphate synthase, gibberellin 20-oxidase, Glu/Leu/Phe/Val dehydrogenase , glucokinase, glucose dehydrogenase, glucose-1-phosphate cytidylyltransferase, glucose-6-phosphate 1-dehydrogenase, glutamate-ammonia-ligase, glutamine amidotransferase, glutamine synthetase, glutaredoxin, glutathione peroxidase, glutathione S-transferase, Glycine cleavage system T aminomethyltransferase, glycogen (starch) synthase, glycogen synthase, glycoprotease, glycosyl transferase, GM02LC11114-protein, GM02LC17485-protein, harpin-induced family protein, heat shock transcription factor, HesB/YadR/YfhF family protein, histone acetyltransferase, histone H2A, homocitrate synthase, homoserine O-acetyltransferase, hydrolase, integral membrane transporter family protein, iron(III) dicitrate-binding protein, isochorismate synthase, kinase, L-aspartate oxidase, lipoprotein precursor, lysine decarboxylase, lysyl-tRNA synthetase, major facilitator superfamily transporter protein, malate dehydrogenase, malic enzyme, membrane protein, membrane transport protein, metal ion transporter, metal-dependent hydrolase, methylglyoxal synthase, methylglyoxalase, methyltransferase, mitochondrial inner membrane protease subunit, molecular chaperone portein, monothiol glutaredoxin, monthiol glutaredoxin, multidrug resistance protein, multiple antibiotic resistance protein, murein transglycosylase, N-(5′-phosphoribosyl)anthranilate isomerase, Na+/K+ transporter, N-acetyl-gamma-glutamyl-phosphate reductase, NADH dehydrogenase I chain I, NADH dehydrogenase subunit N, NADH-quinone oxidoreductase subunit, NADP-dependent malic enzyme, nitrate/nitrite transport protein, O-antigen chain length determinant, oxidoreductase, oxidoreductase subunit, oxireductase, peptidase, permease protein of phosphate ABC transporter, phosphate permease, phosphate transporter, phosphoadenosine phosphosulfate reductase , phosphoanhydride phosphorylase, phosphoenolpyruvate carboxykinase, phosphopantetheine adenylyltransferase, phosphoribosylformyl glycinamidine synthase subunit, Photosystem 1 reaction center subunit XI, photosystem II protein, polygalacturonase, precorrin methylase, Pre-mRNA-splicing factor, prolipoprotein diacylglyceryl transferase, protease, protein kinase, protein phosphatase, PTS system N-acetylmuramic acid-specific EllBC component, purine biosynthesis protein, pyruvate kinase, restriction alleviation protein, riboflavin biosynthesis protein, RNA binding protein, RNA polymerase sigma factor, RNA-binding protein, s_pp015018333r-protein, sec-independent protein translocase, Sec-independent protein translocase subunit, serine acetyltransferase, serine hydroxymethyltransferase, serine protease, serine/threonine dehydratase, Serine/threonine-protein phosphatase, short-chain alcohol dehydrogenase family, sll0281-protein, sill 032-protein, sill 761-protein, sn-glycerol-3-phosphate dehydrogenase, sodium/proton antiporter, sterol 24-C-methyltransferase, thioredoxin, thioredoxin family protein, threonine dehydratase, threonine synthase, transcription factor, transcriptional regulator, transport protein, trehalose-phosphatase, tryptophan biosynthesis protein, tryptophan synthase alpha chain, TTC0768-protein, TTC0881-protein, TTC1386-protein, urease subunit, uridine/cytidine kinase, uroporphyrin-III C-methyltransferase, XM_{—}473199-protein, ydr183w-protein, ydr273w-protein, ydr507c-protein, yer014w-protein, yer106w-protein, YFLO19C-protein, yfl054c-protein, ygl096w-protein, ygl237c-protein, ygr221c-protein, yhl013c-protein, yhr006w-protein, yhr207c-protein, YKL038W-protein, yml083c-protein, ymr013c-protein, YNL086W-protein, yol160w-protein, zinc finger protein, zinc transporter, or Zm_{—}4842_BE510522-protein, which respectively encode a protein comprising a polypeptide encoded by a nucleic acid sequence as shown in Table I, application no. 3, column 5 or 8, (preferably the coding region thereof), or a homolog or a fragment thereof, which respectively encode a protein comprising a polypeptide as depicted in Table II, application no. 3, column 5 or 8, or a homolg or a fragment thereof, and/or which respectively can be amplified with the primer set shown in Table III, application no. 3, column 8, are also referred to as “FCRP genes”.

[15577] Proteins or polypeptides encoded by “FCRP-genes” are referred to as “Fine Chemical Related Proteins” or “FCRP”. For the purposes of the description of the present invention, the respective protein having an activity of 2,3-dihydroxyphenylpropionate 1,2-dioxygenase, 2-C-methyl-D-erythritol 4-phosphate cytidylyltransferase, 2-oxoglutarate dehydrogenase E1 subunit, 30S ribosomal protein S3, 3-deoxy-7-phosphoheptulonate synthase, 3-deoxy-D-arabinoheptulosonate-7-phosphatesynthase, 3-oxoacyl-[acyl-carrier-protein] synthase, 3-phosphoglycerate dehydrogenase, 47266012-protein, 49747384_SOYBEAN-protein, 50S ribosomal protein L14, 5′-nucleotidase, ABC metal ion transporter substrate-binding protein, ABC transporter ATP binding component, ABC transporter ATP-binding protein, ABC transporter component, ABC transporter permease protein, ABC transporter substrate-binding protein, acetolactate synthase, acetolactate synthase small subunit, acetyl CoA carboxylase, acetyl-CoA acetyltransferase, acetyltransferase, acid shock protein, acyl transferase, acyl-CoA dehydrogenase, acyl-CoA synthase, adenylate kinase, adenylylsulfate kinase, agmatinase, aldehyde dehydrogenase, amine oxidase, amino acid ABC transporter permease protein, amino acid acetyltransferase, amino acid transporter, amino-acid acetyltransferase, aminotransferase, ammonium transporter, ankyrin repeat family protein, anthranilate synthase component I, arginine exporter protein, arginine N-succinyltransferase, argininosuccinate lyase, asparaginase, aspartate 1-decarboxylase, aspartate aminotransferase, aspartate kinase, aspartate-ammonia ligase, At1g17440-protein, At1g19800-protein, At4g32480-protein, At5g16650-protein, at5g21910-protein, ATP-binding component of a transport system, ATP-dependent RNA helicase, auxin response factor, AX653549-protein, AY087308-protein, b0391-protein, b0456protein, b0518-protein, b0801-protein, b0841-protein, b0917-protein, b1003-protein, b1024-protein, b1137-protein, b1155-protein, b1163-protein, b1179-protein, b1205-protein, b1229-protein, b1259-protein, b1280-protein, b1330-protein, b1445-protein, b1522-protein, b1583-protein, b1670-protein, b1672-protein, b1837-protein, b1898-protein, b1930-protein, b2032-protein, b2107-protein, b2360-protein, b2399-protein, b2474-protein, b2513-protein, b2613-protein, b2673-protein, b2739-protein, b2812-protein, b2849-protein, b3083-protein, b3098-protein, b3121-protein, b3221-protein, b3246-protein, b3346-protein, b3392-protein, b3410-protein, b3509-protein, b3646-protein, b3791-protein, b3814-protein, b3989-protein, b4029-protein, b4121-protein, beta-galactosidase, beta-hydroxylase, bifunctional aspartokinase/homoserine dehydrogenase, bifunctional purine biosynthesis protein, branched chain aminotransferase, branched-chain amino acid permease, calcium-dependent protein kinase, carbon dioxide concentrating mechanism protein, cation-transporting ATPase, CBL-interacting protein kinase, CDP-diacylglycerol-glycerol-3-phosphate 3-phosphatidyltransferase, CDP-diacylglycerol-serine O-phosphatidyltransferase, CDP-glucose-4,6-dehydratase, cell division control protein, cellulose synthase catalytic subunit, Chaperone protein CIpB, chorismate mutase-T and prephenate dehydrogenase, citrate synthase, coproporphyrinogen III oxidase, CTP synthetase, cullin, cyclin D, cystathionine gamma-synthase, cytochrome c-type protein, D-3-phosphoglycerate dehydrogenase, delta-1-pyrroline 5-carboxylase synthetase, diacylglycerol O-acyltransferase, dihydroxyacid dehydratase, DNA helicase II, DNA mismatch repair protein, DNA-binding protein, DnaJ-like chaperone, D-serine dehydratase, electron transfer flavoprotein subunit beta, elongation factor Tu, enoyl-CoA hydratase, enterobacterial common antigen polymerase, eukaryotic translation initiation factor, eukaryotic translation initiation factor 5, exopolyphosphatase, Fe—S subunit of oxidoreductase, flavodoxin, fumarylacetoacetate hydrolase, gamma-glutamyltranspeptidase, GDP-mannose dehydrogenase, geranylgeranyl pyrophosphate synthase, gibberellin 20-oxidase, Glu/Leu/Phe/Val dehydrogenase , glucokinase, glucose dehydrogenase, glucose-1-phosphate cytidylyltransferase, glucose-6-phosphate 1-dehydrogenase, glutamate-ammonia-ligase, glutamine amidotransferase, glutamine synthetase, glutaredoxin, glutathione peroxidase, glutathione S-transferase, Glycine cleavage system T aminomethyltransferase, glycogen (starch) synthase, glycogen synthase, glycoprotease, glycosyl transferase, GM02LC11114-protein, GM02LC17485-protein, harpin-induced family protein, heat shock transcription factor, HesB/YadR/YfhF family protein, histone acetyltransferase, histone H2A, homocitrate synthase, homoserine O-acetyltransferase, hydrolase, integral membrane transporter family protein, iron(III) dicitrate-binding protein, isochorismate synthase, kinase, L-aspartate oxidase, lipoprotein precursor, lysine decarboxylase, lysyl-tRNA synthetase, major facilitator superfamily transporter protein, malate dehydrogenase, malic enzyme, membrane protein, membrane transport protein, metal ion transporter, metal-dependent hydrolase, methylglyoxal synthase, methylglyoxalase, methyltransferase, mitochondrial inner membrane protease subunit, molecular chaperone portein, monothiol glutaredoxin, monthiol glutaredoxin, multidrug resistance protein, multiple antibiotic resistance protein, murein transglycosylase, N-(5′-phosphoribosyl)anthranilate isomerase, Na+/K+ transporter, N-acetyl-gamma-glutamylphosphate reductase, NADH dehydrogenase I chain I, NADH dehydrogenase subunit N, NADH-quinone oxidoreductase subunit, NADP-dependent malic enzyme, nitrate/nitrite transport protein, O-antigen chain length determinant, oxidoreductase, oxidoreductase subunit, oxireductase, peptidase, permease protein of phosphate ABC transporter, phosphate permease, phosphate transporter, phosphoadenosine phosphosulfate reductase , phosphoanhydride phosphorylase, phosphoenolpyruvate carboxykinase, phosphopantetheine adenylyltransferase, phosphoribosylformyl glycinamidine synthase subunit, Photosystem I reaction center subunit XI, photosystem II protein, polygalacturonase, precorrin methylase, Pre-mRNA-splicing factor, prolipoprotein diacylglyceryl transferase, protease, protein kinase, protein phosphatase, PTS system N-acetylmuramic acid-specific EIIBC component, purine biosynthesis protein, pyruvate kinase, restriction alleviation protein, riboflavin biosynthesis protein, RNA binding protein, RNA polymerase sigma factor, RNA-binding protein, s_pp015018333r-protein, sec-independent protein translocase, Sec-independent protein translocase subunit, serine acetyltransferase, serine hydroxymethyltransferase, serine protease, serine/threonine dehydratase, Serine/threonineprotein phosphatase, short-chain alcohol dehydrogenase family, sll0281-protein, sll1032-protein, sll1761-protein, sn-glycerol-3-phosphate dehydrogenase, sodium/proton antiporter, sterol 24-C-methyltransferase, thioredoxin, thioredoxin family protein, threonine dehydratase, threonine synthase, transcription factor, transcriptional regulator, transport protein, trehalosephosphatase, tryptophan biosynthesis protein, tryptophan synthase alpha chain, TTC0768protein, TTC0881-protein, TTC1386-protein, urease subunit, uridine/cytidine kinase, uroporphyrin-III C-methyltransferase, XM_{—}473199-protein, ydr183w-protein, ydr273w-protein, ydr507c-protein, yer014w-protein, yer106w-protein, YFL019C-protein, yfl054c-protein, ygl096w-protein, ygl237c-protein, ygr221 c-protein, yhl013c-protein, yhr006w-protein, yhr207c-protein, YKL038W-protein, yml083c-protein, ymr013c-protein, YNL086W-protein, yol160w-protein, zinc finger protein, zinc transporter, or Zm_{—}4842_BE510522-protein, the respective protein comprising a polypeptide encoded by one or more respective nucleic acid sequences as shown in Table I, application no. 3, column 5 or 8, (preferably the coding region thereof), or a homolog or fragment thereof, the respective protein comprising a respective polypeptide as depicted in Table II, application no. 3, column 5 or 8, or a homolog or fragment thereof, the respective protein comprising a sequence corresponding to the consensus sequence as shown in Table IV, application no. 3, column 8, and/or the respective protein comprising at least one polypeptide motif as shown in Table IV, application no. 3, column 8 is also referred to as Fine Chemical Related Protein” or “FCRP”.

[15578] Thus, in one embodiment, the present invention provides a process of the production of 3,4-dihydroxyphenylalanine (dopa), 5-oxoproline, alanine, asparagine, aspartate, citrulline, glycine, homoserine, ornithine, phenylalanine, serine, and/or tyrosine, by increasing or generating one or more activities, especially selected from the group consisting of 2,3-dihydroxyphenylpropionate 1,2-dioxygenase, 2-C-methyl-D-erythritol 4-phosphate cytidylyltransferase, 2-oxoglutarate dehydrogenase E1 subunit, 30S ribosomal protein S3, 3-deoxy-7-phosphoheptulonate synthase, 3-deoxy-D-arabinoheptulosonate-7-phosphatesynthase, 3-oxoacyl-[acyl-carrier-protein] synthase, 3-phosphoglycerate dehydrogenase, 47266012-protein, 49747384_SOYBEAN-protein, 50S ribosomal protein L14, 5′-nucleotidase, ABC metal ion transporter substrate-binding protein, ABC transporter ATP binding component, ABC transporter ATP-binding protein, ABC transporter component, ABC transporter permease protein, ABC transporter substrate-binding protein, acetolactate synthase, acetolactate synthase small subunit, acetyl CoA carboxylase, acetyl-CoA acetyltransferase, acetyltransferase, acid shock protein, acyl transferase, acyl-CoA dehydrogenase, acyl-CoA synthase, adenylate kinase, adenylylsulfate kinase, agmatinase, aldehyde dehydrogenase, amine oxidase, amino acid ABC transporter permease protein, amino acid acetyltransferase, amino acid transporter, amino-acid acetyltransferase, aminotransferase, ammonium transporter, ankyrin repeat family protein, anthranilate synthase component I, arginine exporter protein, arginine N-succinyltransferase, argininosuccinate lyase, asparaginase, aspartate 1-decarboxylase, aspartate aminotransferase, aspartate kinase, aspartate-ammonia ligase, At1g17440-protein, At1g19800-protein, At4g32480-protein, At5g16650-protein, at5g21910-protein, ATP-binding component of a transport system, ATP-dependent RNA helicase, auxin response factor, AX653549-protein, AY087308-protein, b0391-protein, b0456-protein, b0518-protein, b0801-protein, b0841-protein, b0917-protein, b1003-protein, b1024-protein, b1137-protein, b1155-protein, b1163-protein, b1179-protein, b1205-protein, b1229-protein, b1259-protein, b1280-protein, b1330-protein, b1445-protein, b1522-protein, b1583-protein, b1670-protein, b1672-protein, b1837-protein, b1898-protein, b1930-protein, b2032-protein, b2107-protein, b2360-protein, b2399-protein, b2474-protein, b2513-protein, b2613-protein, b2673-protein, b2739-protein, b2812-protein, b2849-protein, b3083-protein, b3098-protein, b3121-protein, b3221-protein, b3246-protein, b3346-protein, b3392-protein, b3410-protein, b3509-protein, b3646-protein, b3791-protein, b3814-protein, b3989-protein, b4029-protein, b4121-protein, beta-galactosidase, betahydroxylase, bifunctional aspartokinase/homoserine dehydrogenase, bifunctional purine biosynthesis protein, branched chain aminotransferase, branched-chain amino acid permease, calcium-dependent protein kinase, carbon dioxide concentrating mechanism protein, cation-transporting ATPase, CBL-interacting protein kinase, CDP-diacylglycerol-glycerol-3-phosphate 3-phosphatidyltransferase, CDP-diacylglycerol-serine O-phosphatidyltransferase, CDP-glucose-4,6-dehydratase, cell division control protein, cellulose synthase catalytic subunit, Chaperone protein CIpB, chorismate mutase-T and prephenate dehydrogenase, citrate synthase, coproporphyrinogen III oxidase, CTP synthetase, cullin, cyclin D, cystathionine gammasynthase, cytochrome c-type protein, D-3-phosphoglycerate dehydrogenase, delta-1-pyrroline 5-carboxylase synthetase, diacylglycerol O-acyltransferase, dihydroxyacid dehydratase, DNA helicase II, DNA mismatch repair protein, DNA-binding protein, DnaJ-like chaperone, D-serine dehydratase, electron transfer flavoprotein subunit beta, elongation factor Tu, enoyl-CoA hydratase, enterobacterial common antigen polymerase, eukaryotic translation initiation factor, eukaryotic translation initiation factor 5, exopolyphosphatase, Fe—S subunit of oxidoreductase, flavodoxin, fumarylacetoacetate hydrolase, gamma-glutamyltranspeptidase, GDP-mannose dehydrogenase, geranylgeranyl pyrophosphate synthase, gibberellin 20-oxidase, Glu/Leu/Phe/Val dehydrogenase , glucokinase, glucose dehydrogenase, glucose-1-phosphate cytidylyltransferase, glucose-6-phosphate 1-dehydrogenase, glutamate-ammonia-ligase, glutamine amidotransferase, glutamine synthetase, glutaredoxin, glutathione peroxidase, glutathione S-transferase, Glycine cleavage system T aminomethyltransferase, glycogen (starch) synthase, glycogen synthase, glycoprotease, glycosyl transferase, GM02LC11114-protein, GM02LC17485-protein, harpin-induced family protein, heat shock transcription factor, HesB/YadR/YfhF family protein, histone acetyltransferase, histone H2A, homocitrate synthase, homoserine O-acetyltransferase, hydrolase, integral membrane transporter family protein, iron(III) dicitrate-binding protein, isochorismate synthase, kinase, L-aspartate oxidase, lipoprotein precursor, lysine decarboxylase, lysyl-tRNA synthetase, major facilitator superfamily transporter protein, malate dehydrogenase, malic enzyme, membrane protein, membrane transport protein, metal ion transporter, metal-dependent hydrolase, methylglyoxal synthase, methylglyoxalase, methyltransferase, mitochondrial inner membrane protease subunit, molecular chaperone portein, monothiol glutaredoxin, monthiol glutaredoxin, multidrug resistance protein, multiple antibiotic resistance protein, murein transglycosylase, N-(5′-phosphoribosyl)anthranilate isomerase, Na+/K+ transporter, N-acetyl-gamma-glutamyl-phosphate reductase, NADH dehydrogenase I chain I, NADH dehydrogenase subunit N, NADH-quinone oxidoreductase subunit, NADP-dependent malic enzyme, nitrate/nitrite transport protein, O-antigen chain length determinant, oxidoreductase, oxidoreductase subunit, oxireductase, peptidase, permease protein of phosphate ABC transporter, phosphate permease, phosphate transporter, phosphoadenosine phosphosulfate reductase , phosphoanhydride phosphorylase, phosphoenolpyruvate carboxykinase, phosphopantetheine adenylyltransferase, phosphoribosylformyl glycinamidine synthase subunit, Photosystem I reaction center subunit XI, photosystem II protein, polygalacturonase, precorrin methylase, Pre-mRNA-splicing factor, prolipoprotein diacylglyceryl transferase, protease, protein kinase, protein phosphatase, PTS system N-acetylmuramic acid-specific Ell BC component, purine biosynthesis protein, pyruvate kinase, restriction alleviation protein, riboflavin biosynthesis protein, RNA binding protein, RNA polymerase sigma factor, RNA-binding protein, s_pp015018333r-protein, sec-independent protein translocase, Sec-independent protein translocase subunit, serine acetyltransferase, serine hydroxymethyltransferase, serine protease, serine/threonine dehydratase, Serine/threonine-protein phosphatase, short-chain alcohol dehydrogenase family, sll0281-protein, sill 032-protein, sill 761-protein, sn-glycerol-3-phosphate dehydrogenase, sodium/proton antiporter, sterol 24-C-methyltransferase, thioredoxin, thioredoxin family protein, threonine dehydratase, threonine synthase, transcription factor, transcriptional regulator, transport protein, trehalose-phosphatase, tryptophan biosynthesis protein, tryptophan synthase alpha chain, TTC0768-protein, TTC0881-protein, TTC1386-protein, urease subunit, uridine/cytidine kinase, uroporphyrin-III C-methyltransferase, XM_{—}473199-protein, ydr183w-protein, ydr273w-protein, ydr507c-protein, yer014w-protein, yer106w-protein, YFLO19C-protein, yfl054c-protein, ygl096w-protein, ygl237c-protein, ygr221c-protein, yhl013c-protein, yhr006w-protein, yhr207c-protein, YKL038W-protein, yml083c-protein, ymr013c-protein, YNL086W-protein, yol160w-protein, zinc finger protein, zinc transporter, and Zm_{—}4842_BE510522-protein, which is conferred by one or more FCRPs or the gene product of one or more FCRP-genes, for example by the gene product of a nucleic acid sequences comprising a polynucleotide selected from the group as shown in Table I, application no. 3, column 5 or 8, (preferably by the coding region thereof), or a homolog or a fragment thereof, e.g. or by one or more proteins each comprising a polypeptide encoded by one or more nucleic acid sequences selected from the group as shown in Table I, application no. 3, column 5 or 8, (preferably by the coding region thereof), or a homolog or a fragment thereof, or by one or more protein(s) each comprising a polypeptide selected from the group as depicted in Table II, application no. 3, column 5 and 8, or a homolog thereof, or a protein comprising a sequence corresponding to the consensus sequence or comprising at least one polypeptide motif as shown in Table IV, application no. 3, column 8.

[15579] for the disclosure of this paragraph see [0025.1.1.1] above.

[15580] In an embodiment, the process comprises increasing or generating the activity of one or more polypeptides having said activity, e.g. by generating or increasing the amount and/or specific activity in the cell or a compartment of a cell of one of more FCRP, especially selected from the group consisting of 2,3-dihydroxyphenylpropionate 1,2-dioxygenase, 2-C-methyl-D-erythritol 4-phosphate cytidylyltransferase, 2-oxoglutarate dehydrogenase E1 subunit, 30S ribosomal protein S3, 3-deoxy-7-phosphoheptulonate synthase, 3-deoxy-D-arabinoheptulosonate-7-phosphatesynthase, 3-oxoacyl-[acyl-carrier-protein] synthase, 3-phosphoglycerate dehydrogenase, 47266012-protein, 49747384_SOYBEAN-protein, 50S ribosomal protein L14, 5′-nucleotidase, ABC metal ion transporter substrate-binding protein, ABC transporter ATP binding component, ABC transporter ATP-binding protein, ABC transporter component, ABC transporter permease protein, ABC transporter substrate-binding protein, acetolactate synthase, acetolactate synthase small subunit, acetyl CoA carboxylase, acetyl-CoA acetyltransferase, acetyltransferase, acid shock protein, acyl transferase, acyl-CoA dehydrogenase, acyl-CoA synthase, adenylate kinase, adenylylsulfate kinase, agmatinase, aldehyde dehydrogenase, amine oxidase, amino acid ABC transporter permease protein, amino acid acetyltransferase, amino acid transporter, amino-acid acetyltransferase, aminotransferase, ammonium transporter, ankyrin repeat family protein, anthranilate synthase component I, arginine exporter protein, arginine N-succinyltransferase, argininosuccinate lyase, asparaginase, aspartate 1-decarboxylase, aspartate aminotransferase, aspartate kinase, aspartate-ammonia ligase, At1g17440-protein, At1g19800-protein, At4g32480-protein, At5g16650-protein, at5g21910-protein, ATP-binding component of a transport system, ATP-dependent RNA helicase, auxin response factor, AX653549-protein, AY087308-protein, b0391-protein, b0456-protein, b0518-protein, b0801-protein, b0841-protein, b0917-protein, b1003-protein, b1024-protein, b1137-protein, b1155-protein, b1163-protein, b1179-protein, b1205-protein, b1229-protein, b1259-protein, b1280-protein, b1330-protein, b1445-protein, b1522-protein, b1583-protein, b1670-protein, b1672-protein, b1837-protein, b1898-protein, b1930-protein, b2032-protein, b2107-protein, b2360-protein, b2399-protein, b2474-protein, b2513-protein, b2613-protein, b2673-protein, b2739-protein, b2812-protein, b2849-protein, b3083-protein, b3098-protein, b3121-protein, b3221-protein, b3246-protein, b3346-protein, b3392-protein, b3410-protein, b3509-protein, b3646-protein, b3791-protein, b3814-protein, b3989-protein, b4029-protein, b4121-protein, beta-galactosidase, beta-hydroxylase, bifunctional aspartokinase/homoserine dehydrogenase, bifunctional purine biosynthesis protein, branched chain aminotransferase, branched-chain amino acid permease, calcium-dependent protein kinase, carbon dioxide concentrating mechanism protein, cation-transporting ATPase, CBL-interacting protein kinase, CDP-diacylglycerol-glycerol-3-phosphate 3-phosphatidyltransferase, CDP-diacylglycerol-serine O-phosphatidyltransferase, CDP-glucose-4,6-dehydratase, cell division control protein, cellulose synthase catalytic subunit, Chaperone protein CIpB, chorismate mutase-T and prephenate dehydrogenase, citrate synthase, coproporphyrinogen III oxidase, CTP synthetase, cullin, cyclin D, cystathionine gammasynthase, cytochrome c-type protein, D-3-phosphoglycerate dehydrogenase, delta-1-pyrroline 5-carboxylase synthetase, diacylglycerol O-acyltransferase, dihydroxyacid dehydratase, DNA helicase II, DNA mismatch repair protein, DNA-binding protein, DnaJ-like chaperone, D-serine dehydratase, electron transfer flavoprotein subunit beta, elongation factor Tu, enoyl-CoA hydratase, enterobacterial common antigen polymerase, eukaryotic translation initiation factor, eukaryotic translation initiation factor 5, exopolyphosphatase, Fe—S subunit of oxidoreductase, flavodoxin, fumarylacetoacetate hydrolase, gamma-glutamyltranspeptidase, GDP-mannose dehydrogenase, geranylgeranyl pyrophosphate synthase, gibberellin 20-oxidase, Glu/Leu/Phe/Val dehydrogenase , glucokinase, glucose dehydrogenase, glucose-1-phosphate cytidylyltransferase, glucose-6-phosphate 1-dehydrogenase, glutamate-ammonia-ligase, glutamine amidotransferase, glutamine synthetase, glutaredoxin, glutathione peroxidase, glutathione S-transferase, Glycine cleavage system T aminomethyltransferase, glycogen (starch) synthase, glycogen synthase, glycoprotease, glycosyl transferase, GM02LC11114-protein, GM02LC17485-protein, harpin-induced family protein, heat shock transcription factor, HesB/YadR/YfhF family protein, histone acetyltransferase, histone H2A, homocitrate synthase, homoserine O-acetyltransferase, hydrolase, integral membrane transporter family protein, iron(III) dicitrate-binding protein, isochorismate synthase, kinase, L-aspartate oxidase, lipoprotein precursor, lysine decarboxylase, lysyl-tRNA synthetase, major facilitator superfamily transporter protein, malate dehydrogenase, malic enzyme, membrane protein, membrane transport protein, metal ion transporter, metal-dependent hydrolase, methylglyoxal synthase, methylglyoxalase, methyltransferase, mitochondrial inner membrane protease subunit, molecular chaperone portein, monothiol glutaredoxin, monthiol glutaredoxin, multidrug resistance protein, multiple antibiotic resistance protein, murein transglycosylase, N-(5′-phosphoribosyl)anthranilate isomerase, Na+/K+ transporter, N-acetyl-gamma-glutamyl-phosphate reductase, NADH dehydrogenase I chain I, NADH dehydrogenase subunit N, NADH-quinone oxidoreductase subunit, NADP-dependent malic enzyme, nitrate/nitrite transport protein, O-antigen chain length determinant, oxidoreductase, oxidoreductase subunit, oxireductase, peptidase, permease protein of phosphate ABC transporter, phosphate permease, phosphate transporter, phosphoadenosine phosphosulfate reductase , phosphoanhydride phosphorylase, phosphoenolpyruvate carboxykinase, phosphopantetheine adenylyltransferase, phosphoribosylformyl glycinamidine synthase subunit, Photosystem I reaction center subunit XI, photosystem II protein, polygalacturonase, precorrin methylase, Pre-mRNA-splicing factor, prolipoprotein diacylglyceryl transferase, protease, protein kinase, protein phosphatase, PTS system N-acetylmuramic acid-specific Ell BC component, purine biosynthesis protein, pyruvate kinase, restriction alleviation protein, riboflavin biosynthesis protein, RNA binding protein, RNA polymerase sigma factor, RNA-binding protein, s_pp015018333r-protein, sec-independent protein translocase, Sec-independent protein translocase subunit, serine acetyltransferase, serine hydroxymethyltransferase, serine protease, serine/threonine dehydratase, Serine/threonine-protein phosphatase, short-chain alcohol dehydrogenase family, sll0281-protein, sll1032-protein, sll1761-protein, sn-glycerol-3-phosphate dehydrogenase, sodium/proton antiporter, sterol 24-C-methyltransferase, thioredoxin, thioredoxin family protein, threonine dehydratase, threonine synthase, transcription factor, transcriptional regulator, transport protein, trehalose-phosphatase, tryptophan biosynthesis protein, tryptophan synthase alpha chain, TTC0768-protein, TTC0881-protein, TTC1386protein, urease subunit, uridine/cytidine kinase, uroporphyrin-111C-methyltransferase, XM_{—}473199-protein, ydr183w-protein, ydr273w-protein, ydr507c-protein, yer014w-protein, yer106w-protein, YFLO19C-protein, yfl054c-protein, ygl096w-protein, ygl237c-protein, ygr221 cprotein, yhl013c-protein, yhr006w-protein, yhr207c-protein, YKL038W-protein, yml083c-protein, ymr013c-protein, YNL086W-protein, yol160w-protein, zinc finger protein, zinc transporter, and Zm_{—}4842_BE510522-protein, for example of the respective polypeptide as depicted in Table II, application no. 3, column 5 and 8, or a homolog or a fragment thereof, or the respective polypeptide comprising a sequence corresponding to the consensus sequences as shown in Table IV, application no. 3, column 8, or the respective polypeptide comprising at least one polypeptide motif as depicted in Table IV, application no. 3, column 8.

[15581] A further embodiment of the present invention relates to a process for the production of aspartate, which comprises
[15582] (a) increasing or generating the activity of a 47266012-protein non-targeted in a non-human organism or a part thereof, preferably a microorganism, a plant cell, a plant or a part thereof, as compared to a corresponding non-transformed wild type non-human organism or a part thereof; and
[15583] (b) growing the non-human organism or a part thereof under conditions which permit the production of aspartate or a composition comprising aspartate in said non-human organism or in the culture medium surrounding said non-human organism.

[15584] A further embodiment of the present invention relates to a process for the production of tyrosine, which comprises
[15585] (a) increasing or generating the activity of a 47266012-protein non-targeted in a non-human organism or a part thereof, preferably a microorganism, a plant cell, a plant or a part thereof, as compared to a corresponding non-transformed wild type non-human organism or a part thereof; and
[15586] (b) growing the non-human organism or a part thereof under conditions which permit the production of tyrosine or a composition comprising tyrosine in said non-human organism or in the culture medium surrounding said non-human organism.

[15587] A further embodiment of the present invention relates to a process for the production of 5-oxoproline, which comprises
[15588] (a) increasing or generating the activity of a 47266012-protein non-targeted in a non-human organism or a part thereof, preferably a microorganism, a plant cell, a plant or a part thereof, as compared to a corresponding non-transformed wild type non-human organism or a part thereof; and
[15589] (b) growing the non-human organism or a part thereof under conditions which permit the production of 5-oxoproline or a composition comprising 5-oxoproline in said non-human organism or in the culture medium surrounding said non-human organism.

[15590] A further embodiment of the present invention relates to a process for the production of aspartate, which comprises
[15591] (a) increasing or generating the activity of a 49747384_SOYBEAN-protein non-targeted in a non-human organism or a part thereof, preferably a microorganism, a plant cell, a plant or a part thereof, as compared to a corresponding non-transformed wild type non-human organism or a part thereof; and
[15592] (b) growing the non-human organism or a part thereof under conditions which permit the production of aspartate or a composition comprising aspartate in said non-human organism or in the culture medium surrounding said non-human organism.

[15593] A further embodiment of the present invention relates to a process for the production of tyrosine, which comprises
[15594] (a) increasing or generating the activity of a 49747384_SOYBEAN-protein non-targeted in a non-human organism or a part thereof, preferably a microorganism, a plant cell, a plant or a part thereof, as compared to a corresponding non-transformed wild type non-human organism or a part thereof; and
[15595] (b) growing the non-human organism or a part thereof under conditions which permit the production of tyrosine or a composition comprising tyrosine in said non-human organism or in the culture medium surrounding said non-human organism.

[15596] A further embodiment of the present invention relates to a process for the production of 5-oxoproline, which comprises
[15597] (a) increasing or generating the activity of a 49747384_SOYBEAN-protein non-targeted in a non-human organism or a part thereof, preferably a microorganism, a plant cell, a plant or a part thereof, as compared to a corresponding non-transformed wild type non-human organism or a part thereof; and
[15598] (b) growing the non-human organism or a part thereof under conditions which permit the production of 5-oxoproline or a composition comprising 5-oxoproline in said non-human organism or in the culture medium surrounding said non-human organism.

[15599] A further embodiment of the present invention relates to a process for the production of alanine, which comprises
[15600] (a) increasing or generating the activity of a pyruvate kinase non-targeted in a non-human organism or a part thereof, preferably a microorganism, a plant cell, a plant or a part thereof, as compared to a corresponding non-transformed wild type non-human organism or a part thereof; and
[15601] (b) growing the non-human organism or a part thereof under conditions which permit the production of alanine or a composition comprising alanine in said non-human organism or in the culture medium surrounding said non-human organism.

[15602] A further embodiment of the present invention relates to a process for the production of phenylalanine, which comprises
[15603] (a) increasing or generating the activity of a pyruvate kinase non-targeted in a non-human organism or a part thereof, preferably a microorganism, a plant cell, a plant or a part thereof, as compared to a corresponding non-transformed wild type non-human organism or a part thereof; and
[15604] (b) growing the non-human organism or a part thereof under conditions which permit the production of phenylalanine or a composition comprising phenylalanine in said non-human organism or in the culture medium surrounding said non-human organism.

[15605] A further embodiment of the present invention relates to a process for the production of tyrosine, which comprises
[15606] (a) increasing or generating the activity of a pyruvate kinase non-targeted in a non-human organism or a part thereof, preferably a microorganism, a plant cell, a plant or a part thereof, as compared to a corresponding non-transformed wild type non-human organism or a part thereof; and
[15607] (b) growing the non-human organism or a part thereof under conditions which permit the production of tyrosine or a composition comprising tyrosine in said non-human organism or in the culture medium surrounding said non-human organism.

[15608] A further embodiment of the present invention relates to a process for the production of citrulline, which comprises
[15609] (a) increasing or generating the activity of a acetyltransferase non-targeted in a non-human organism or a part thereof, preferably a microorganism, a plant cell, a plant or a part thereof, as compared to a corresponding non-transformed wild type non-human organism or a part thereof; and
[15610] (b) growing the non-human organism or a part thereof under conditions which permit the production of citrulline or a composition comprising citrulline in said non-human organism or in the culture medium surrounding said non-human organism.

[15611] A further embodiment of the present invention relates to a process for the production of asparagine, which comprises
[15612] (a) increasing or generating the activity of a pyruvate kinase non-targeted in a non-human organism or a part thereof, preferably a microorganism, a plant cell, a plant or a part thereof, as compared to a corresponding non-transformed wild type non-human organism or a part thereof; and
[15613] (b) growing the non-human organism or a part thereof under conditions which permit the production of asparagine or a composition comprising asparagine in said non-human organism or in the culture medium surrounding said non-human organism.

[15614] A further embodiment of the present invention relates to a process for the production of serine, which comprises
[15615] (a) increasing or generating the activity of a pyruvate kinase non-targeted in a non-human organism or a part thereof, preferably a microorganism, a plant cell, a plant or a part thereof, as compared to a corresponding non-transformed wild type non-human organism or a part thereof; and
[15616] (b) growing the non-human organism or a part thereof under conditions which permit the production of serine or a composition comprising serine in said non-human organism or in the culture medium surrounding said non-human organism.

[15617] A further embodiment of the present invention relates to a process for the production of alanine, which comprises
[15618] (a) increasing or generating the activity of a glucose-6-phosphate 1-dehydrogenase non-targeted in a non-human organism or a part thereof, preferably a microorganism, a plant cell, a plant or a part thereof, as compared to a corresponding non-transformed wild type non-human organism or a part thereof; and
[15619] (b) growing the non-human organism or a part thereof under conditions which permit the production of alanine or a composition comprising alanine in said non-human organism or in the culture medium surrounding said non-human organism.

[15620] A further embodiment of the present invention relates to a process for the production of phenylalanine, which comprises
[15621] (a) increasing or generating the activity of a glucose-6-phosphate 1-dehydrogenase non-targeted in a non-human organism or a part thereof, preferably a microorganism, a plant cell, a plant or a part thereof, as compared to a corresponding non-transformed wild type non-human organism or a part thereof; and
[15622] (b) growing the non-human organism or a part thereof under conditions which permit the production of phenylalanine or a composition comprising phenylalanine in said non-human organism or in the culture medium surrounding said non-human organism.

[15623] A further embodiment of the present invention relates to a process for the production of tyrosine, which comprises
[15624] (a) increasing or generating the activity of a glucose-6-phosphate 1-dehydrogenase non-targeted in a non-human organism or a part thereof, preferably a microorganism, a plant cell, a plant or a part thereof, as compared to a corresponding non-transformed wild type non-human organism or a part thereof; and
[15625] (b) growing the non-human organism or a part thereof under conditions which permit the production of tyrosine or a composition comprising tyrosine in said non-human organism or in the culture medium surrounding said non-human organism.

[15626] A further embodiment of the present invention relates to a process for the production of alanine, which comprises
[15627] (a) increasing or generating the activity of a amino acid acetyltransferase non-targeted in a non-human organism or a part thereof, preferably a microorganism, a plant cell, a plant or a part thereof, as compared to a corresponding non-transformed wild type non-human organism or a part thereof; and
[15628] (b) growing the non-human organism or a part thereof under conditions which permit the production of alanine or a composition comprising alanine in said non-human organism or in the culture medium surrounding said non-human organism.

[15629] A further embodiment of the present invention relates to a process for the production of citrulline, which comprises
[15630] (a) increasing or generating the activity of a amino acid acetyltransferase non-targeted in a non-human organism or a part thereof, preferably a microorganism, a plant cell, a plant or a part thereof, as compared to a corresponding non-transformed wild type non-human organism or a part thereof; and
[15631] (b) growing the non-human organism or a part thereof under conditions which permit the production of citrulline or a composition comprising citrulline in said non-human organism or in the culture medium surrounding said non-human organism.

[15632] A further embodiment of the present invention relates to a process for the production of phenylalanine, which comprises
[15633] (a) increasing or generating the activity of a amino acid acetyltransferase non-targeted in a non-human organism or a part thereof, preferably a microorganism, a plant cell, a plant or a part thereof, as compared to a corresponding non-transformed wild type non-human organism or a part thereof; and
[15634] (b) growing the non-human organism or a part thereof under conditions which permit the production of phenylalanine or a composition comprising phenylalanine in said non-human organism or in the culture medium surrounding said non-human organism.

[15635] A further embodiment of the present invention relates to a process for the production of citrulline, which comprises
[15636] (a) increasing or generating the activity of a protein phosphatase non-targeted in a non-human organism or a part thereof, preferably a microorganism, a plant cell, a plant or a part thereof, as compared to a corresponding non-transformed wild type non-human organism or a part thereof; and
[15637] (b) growing the non-human organism or a part thereof under conditions which permit the production of citrulline or a composition comprising citrulline in said non-human organism or in the culture medium surrounding said non-human organism.

[15638] A further embodiment of the present invention relates to a process for the production of glycine, which comprises
[15639] (a) increasing or generating the activity of a DNA-binding protein non-targeted in a non-human organism or a part thereof, preferably a microorganism, a plant cell, a plant or a part thereof, as compared to a corresponding non-transformed wild type non-human organism or a part thereof; and
[15640] (b) growing the non-human organism or a part thereof under conditions which permit the production of glycine or a composition comprising glycine in said non-human organism or in the culture medium surrounding said non-human organism.

[15641] A further embodiment of the present invention relates to a process for the production of serine, which comprises
[15642] (a) increasing or generating the activity of a DNA-binding protein non-targeted in a non-human organism or a part thereof, preferably a microorganism, a plant cell, a plant or a part thereof, as compared to a corresponding non-transformed wild type non-human organism or a part thereof; and
[15643] (b) growing the non-human organism or a part thereof under conditions which permit the production of serine or a composition comprising serine in said non-human organism or in the culture medium surrounding said non-human organism.

[15644] A further embodiment of the present invention relates to a process for the production of phenylalanine, which comprises
[15645] (a) increasing or generating the activity of a At1g17440-protein non-targeted in a non-human organism or a part thereof, preferably a microorganism, a plant cell, a plant or a part thereof, as compared to a corresponding non-transformed wild type non-human organism or a part thereof; and
[15646] (b) growing the non-human organism or a part thereof under conditions which permit the production of phenylalanine or a composition comprising phenylalanine in said non-human organism or in the culture medium surrounding said non-human organism.

[15647] A further embodiment of the present invention relates to a process for the production of tyrosine, which comprises
[15648] (a) increasing or generating the activity of a At1g17440-protein non-targeted in a non-human organism or a part thereof, preferably a microorganism, a plant cell, a plant or a part thereof, as compared to a corresponding non-transformed wild type non-human organism or a part thereof; and
[15649] (b) growing the non-human organism or a part thereof under conditions which permit the production of tyrosine or a composition comprising tyrosine in said non-human organism or in the culture medium surrounding said non-human organism.

[15650] A further embodiment of the present invention relates to a process for the production of aspartate, which comprises
[15651] (a) increasing or generating the activity of a At1g19800-protein non-targeted in a non-human organism or a part thereof, preferably a microorganism, a plant cell, a plant or a part thereof, as compared to a corresponding non-transformed wild type non-human organism or a part thereof; and
[15652] (b) growing the non-human organism or a part thereof under conditions which permit the production of aspartate or a composition comprising aspartate in said non-human organism or in the culture medium surrounding said non-human organism.

[15653] A further embodiment of the present invention relates to a process for the production of citrulline, which comprises
[15654] (a) increasing or generating the activity of a At1g19800-protein non-targeted in a non-human organism or a part thereof, preferably a microorganism, a plant cell, a plant or a part thereof, as compared to a corresponding non-transformed wild type non-human organism or a part thereof; and
[15655] (b) growing the non-human organism or a part thereof under conditions which permit the production of citrulline or a composition comprising citrulline in said non-human organism or in the culture medium surrounding said non-human organism.

[15656] A further embodiment of the present invention relates to a process for the production of tyrosine, which comprises
[15657] (a) increasing or generating the activity of a At1g19800-protein non-targeted in a non-human organism or a part thereof, preferably a microorganism, a plant cell, a plant or a part thereof, as compared to a corresponding non-transformed wild type non-human organism or a part thereof; and
[15658] (b) growing the non-human organism or a part thereof under conditions which permit the production of tyrosine or a composition comprising tyrosine in said non-human organism or in the culture medium surrounding said non-human organism.

[15659] A further embodiment of the present invention relates to a process for the production of phenylalanine, which comprises
[15660] (a) increasing or generating the activity of a cullin non-targeted in a non-human organism or a part thereof, preferably a microorganism, a plant cell, a plant or a part thereof, as compared to a corresponding non-transformed wild type non-human organism or a part thereof; and
[15661] (b) growing the non-human organism or a part thereof under conditions which permit the production of phenylalanine or a composition comprising phenylalanine in said non-human organism or in the culture medium surrounding said non-human organism.

[15662] A further embodiment of the present invention relates to a process for the production of tyrosine, which comprises
[15663] (a) increasing or generating the activity of a cullin non-targeted in a non-human organism or a part thereof, preferably a microorganism, a plant cell, a plant or a part thereof, as compared to a corresponding non-transformed wild type non-human organism or a part thereof; and
[15664] (b) growing the non-human organism or a part thereof under conditions which permit the production of tyrosine or a composition comprising tyrosine in said non-human organism or in the culture medium surrounding said non-human organism.

[15665] A further embodiment of the present invention relates to a process for the production of homoserine, which comprises
[15666] (a) increasing or generating the activity of a bifunctional aspartokinase/homoserine dehydrogenase non-targeted in a non-human organism or a part thereof, preferably a microorganism, a plant cell, a plant or a part thereof, as compared to a corresponding non-transformed wild type non-human organism or a part thereof; and
[15667] (b) growing the non-human organism or a part thereof under conditions which permit the production of homoserine or a composition comprising homoserine in said non-human organism or in the culture medium surrounding said non-human organism.

[15668] A further embodiment of the present invention relates to a process for the production of aspartate, which comprises
[15669] (a) increasing or generating the activity of a eukaryotic translation initiation factor 5 non-targeted in a non-human organism or a part thereof, preferably a microorganism, a plant cell, a plant or a part thereof, as compared to a corresponding non-transformed wild type non-human organism or a part thereof; and
[15670] (b) growing the non-human organism or a part thereof under conditions which permit the production of aspartate or a composition comprising aspartate in said non-human organism or in the culture medium surrounding said non-human organism.

[15671] A further embodiment of the present invention relates to a process for the production of phenylalanine, which comprises
[15672] (a) increasing or generating the activity of a eukaryotic translation initiation factor 5 non-targeted in a non-human organism or a part thereof, preferably a microorganism, a plant cell, a plant or a part thereof, as compared to a corresponding non-transformed wild type non-human organism or a part thereof; and
[15673] (b) growing the non-human organism or a part thereof under conditions which permit the production of phenylalanine or a composition comprising phenylalanine in said non-human organism or in the culture medium surrounding said non-human organism.

[15674] A further embodiment of the present invention relates to a process for the production of serine, which comprises
[15675] (a) increasing or generating the activity of a eukaryotic translation initiation factor 5 non-targeted in a non-human organism or a part thereof, preferably a microorganism, a plant cell, a plant or a part thereof, as compared to a corresponding non-transformed wild type non-human organism or a part thereof; and
[15676] (b) growing the non-human organism or a part thereof under conditions which permit the production of serine or a composition comprising serine in said non-human organism or in the culture medium surrounding said non-human organism.

[15677] A further embodiment of the present invention relates to a process for the production of tyrosine, which comprises
[15678] (a) increasing or generating the activity of a eukaryotic translation initiation factor 5 non-targeted in a non-human organism or a part thereof, preferably a microorganism, a plant cell, a plant or a part thereof, as compared to a corresponding non-transformed wild type non-human organism or a part thereof; and
[15679] (b) growing the non-human organism or a part thereof under conditions which permit the production of tyrosine or a composition comprising tyrosine in said non-human organism or in the culture medium surrounding said non-human organism.

[15680] A further embodiment of the present invention relates to a process for the production of 5-oxoproline, which comprises
[15681] (a) increasing or generating the activity of a eukaryotic translation initiation factor 5 non-targeted in a non-human organism or a part thereof, preferably a microorganism, a plant cell, a plant or a part thereof, as compared to a corresponding non-transformed wild type non-human organism or a part thereof; and
[15682] (b) growing the non-human organism or a part thereof under conditions which permit the production of 5-oxoproline or a composition comprising 5-oxoproline in said non-human organism or in the culture medium surrounding said non-human organism.

[15683] A further embodiment of the present invention relates to a process for the production of phenylalanine, which comprises
[15684] (a) increasing or generating the activity of a transcriptional regulator non-targeted in a non-human organism or a part thereof, preferably a microorganism, a plant cell, a plant or a part thereof, as compared to a corresponding non-transformed wild type non-human organism or a part thereof; and
[15685] (b) growing the non-human organism or a part thereof under conditions which permit the production of phenylalanine or a composition comprising phenylalanine in said non-human organism or in the culture medium surrounding said non-human organism.

[15686] A further embodiment of the present invention relates to a process for the production of serine, which comprises
[15687] (a) increasing or generating the activity of a transcriptional regulator non-targeted in a non-human organism or a part thereof, preferably a microorganism, a plant cell, a plant or a part thereof, as compared to a corresponding non-transformed wild type non-human organism or a part thereof; and
[15688] (b) growing the non-human organism or a part thereof under conditions which permit the production of serine or a composition comprising serine in said non-human organism or in the culture medium surrounding said non-human organism.

[15689] A further embodiment of the present invention relates to a process for the production of tyrosine, which comprises
[15690] (a) increasing or generating the activity of a transcriptional regulator non-targeted in a non-human organism or a part thereof, preferably a microorganism, a plant cell, a plant or a part thereof, as compared to a corresponding non-transformed wild type non-human organism or a part thereof; and
[15691] (b) growing the non-human organism or a part thereof under conditions which permit the production of tyrosine or a composition comprising tyrosine in said non-human organism or in the culture medium surrounding said non-human organism.

[15692] A further embodiment of the present invention relates to a process for the production of 5-oxoproline, which comprises
[15693] (a) increasing or generating the activity of a transcriptional regulator non-targeted in a non-human organism or a part thereof, preferably a microorganism, a plant cell, a plant or a part thereof, as compared to a corresponding non-transformed wild type non-human organism or a part thereof; and
[15694] (b) growing the non-human organism or a part thereof under conditions which permit the production of 5-oxoproline or a composition comprising 5-oxoproline in said non-human organism or in the culture medium surrounding said non-human organism.

[15695] A further embodiment of the present invention relates to a process for the production of glycine, which comprises
[15696] (a) increasing or generating the activity of a protein phosphatase non-targeted in a non-human organism or a part thereof, preferably a microorganism, a plant cell, a plant or a part thereof, as compared to a corresponding non-transformed wild type non-human organism or a part thereof; and
[15697] (b) growing the non-human organism or a part thereof under conditions which permit the production of glycine or a composition comprising glycine in said non-human organism or in the culture medium surrounding said non-human organism.

[15698] A further embodiment of the present invention relates to a process for the production of phenylalanine, which comprises
[15699] (a) increasing or generating the activity of a protein kinase non-targeted in a non-human organism or a part thereof, preferably a microorganism, a plant cell, a plant or a part thereof, as compared to a corresponding non-transformed wild type non-human organism or a part thereof; and
[15700] (b) growing the non-human organism or a part thereof under conditions which permit the production of phenylalanine or a composition comprising phenylalanine in said non-human organism or in the culture medium surrounding said non-human organism.

[15701] A further embodiment of the present invention relates to a process for the production of serine, which comprises
[15702] (a) increasing or generating the activity of a protein kinase non-targeted in a non-human organism or a part thereof, preferably a microorganism, a plant cell, a plant or a part thereof, as compared to a corresponding non-transformed wild type non-human organism or a part thereof; and
[15703] (b) growing the non-human organism or a part thereof under conditions which permit the production of serine or a composition comprising serine in said non-human organism or in the culture medium surrounding said non-human organism.

[15704] A further embodiment of the present invention relates to a process for the production of tyrosine, which comprises
[15705] (a) increasing or generating the activity of a protein kinase non-targeted in a non-human organism or a part thereof, preferably a microorganism, a plant cell, a plant or a part thereof, as compared to a corresponding non-transformed wild type non-human organism or a part thereof; and
[15706] (b) growing the non-human organism or a part thereof under conditions which permit the production of tyrosine or a composition comprising tyrosine in said non-human organism or in the culture medium surrounding said non-human organism.

[15707] A further embodiment of the present invention relates to a process for the production of aspartate, which comprises
[15708] (a) increasing or generating the activity of a calcium-dependent protein kinase non-targeted in a non-human organism or a part thereof, preferably a microorganism, a plant cell, a plant or a part thereof, as compared to a corresponding non-transformed wild type non-human organism or a part thereof; and
[15709] (b) growing the non-human organism or a part thereof under conditions which permit the production of aspartate or a composition comprising aspartate in said non-human organism or in the culture medium surrounding said non-human organism.

[15710] A further embodiment of the present invention relates to a process for the production of phenylalanine, which comprises
[15711] (a) increasing or generating the activity of a calcium-dependent protein kinase non-targeted in a non-human organism or a part thereof, preferably a microorganism, a plant cell, a plant or a part thereof, as compared to a corresponding non-transformed wild type non-human organism or a part thereof; and
[15712] (b) growing the non-human organism or a part thereof under conditions which permit the production of phenylalanine or a composition comprising phenylalanine in said non-human organism or in the culture medium surrounding said non-human organism.

[15713] A further embodiment of the present invention relates to a process for the production of alanine, which comprises
[15714] (a) increasing or generating the activity of a protein phosphatase non-targeted in a non-human organism or a part thereof, preferably a microorganism, a plant cell, a plant or a part thereof, as compared to a corresponding non-transformed wild type non-human organism or a part thereof; and
[15715] (b) growing the non-human organism or a part thereof under conditions which permit the production of alanine or a composition comprising alanine in said non-human organism or in the culture medium surrounding said non-human organism.

[15716] A further embodiment of the present invention relates to a process for the production of glycine, which comprises
[15717] (a) increasing or generating the activity of a protein phosphatase non-targeted in a non-human organism or a part thereof, preferably a microorganism, a plant cell, a plant or a part thereof, as compared to a corresponding non-transformed wild type non-human organism or a part thereof; and
[15718] (b) growing the non-human organism or a part thereof under conditions which permit the production of glycine or a composition comprising glycine in said non-human organism or in the culture medium surrounding said non-human organism.

[15719] A further embodiment of the present invention relates to a process for the production of tyrosine, which comprises
[15720] (a) increasing or generating the activity of a protein phosphatase non-targeted in a non-human organism or a part thereof, preferably a microorganism, a plant cell, a plant or a part thereof, as compared to a corresponding non-transformed wild type non-human organism or a part thereof; and
[15721] (b) growing the non-human organism or a part thereof under conditions which permit the production of tyrosine or a composition comprising tyrosine in said non-human organism or in the culture medium surrounding said non-human organism.

[15722] A further embodiment of the present invention relates to a process for the production of 5-oxoproline, which comprises
[15723] (a) increasing or generating the activity of a protein phosphatase non-targeted in a non-human organism or a part thereof, preferably a microorganism, a plant cell, a plant or a part thereof, as compared to a corresponding non-transformed wild type non-human organism or a part thereof; and
[15724] (b) growing the non-human organism or a part thereof under conditions which permit the production of 5-oxoproline or a composition comprising 5-oxoproline in said non-human organism or in the culture medium surrounding said non-human organism.

[15725] A further embodiment of the present invention relates to a process for the production of alanine, which comprises
[15726] (a) increasing or generating the activity of a aminotransferase non-targeted in a non-human organism or a part thereof, preferably a microorganism, a plant cell, a plant or a part thereof, as compared to a corresponding non-transformed wild type non-human organism or a part thereof; and
[15727] (b) growing the non-human organism or a part thereof under conditions which permit the production of alanine or a composition comprising alanine in said non-human organism or in the culture medium surrounding said non-human organism.

[15728] A further embodiment of the present invention relates to a process for the production of phenylalanine, which comprises
[15729] (a) increasing or generating the activity of a transcription factor non-targeted in a non-human organism or a part thereof, preferably a microorganism, a plant cell, a plant or a part thereof, as compared to a corresponding non-transformed wild type non-human organism or a part thereof; and
[15730] (b) growing the non-human organism or a part thereof under conditions which permit the production of phenylalanine or a composition comprising phenylalanine in said non-human organism or in the culture medium surrounding said non-human organism.

[15731] A further embodiment of the present invention relates to a process for the production of tyrosine, which comprises
[15732] (a) increasing or generating the activity of a transcription factor non-targeted in a non-human organism or a part thereof, preferably a microorganism, a plant cell, a plant or a part thereof, as compared to a corresponding non-transformed wild type non-human organism or a part thereof; and
[15733] (b) growing the non-human organism or a part thereof under conditions which permit the production of tyrosine or a composition comprising tyrosine in said non-human organism or in the culture medium surrounding said non-human organism.

[15734] A further embodiment of the present invention relates to a process for the production of aspartate, which comprises
[15735] (a) increasing or generating the activity of a protein phosphatase non-targeted in a non-human organism or a part thereof, preferably a microorganism, a plant cell, a plant or a part thereof, as compared to a corresponding non-transformed wild type non-human organism or a part thereof; and
[15736] (b) growing the non-human organism or a part thereof under conditions which permit the production of aspartate or a composition comprising aspartate in said non-human organism or in the culture medium surrounding said non-human organism.

[15737] A further embodiment of the present invention relates to a process for the production of 5-oxoproline, which comprises
[15738] (a) increasing or generating the activity of a protein phosphatase non-targeted in a non-human organism or a part thereof, preferably a microorganism, a plant cell, a plant or a part thereof, as compared to a corresponding non-transformed wild type non-human organism or a part thereof; and
[15739] (b) growing the non-human organism or a part thereof under conditions which permit the production of 5-oxoproline or a composition comprising 5-oxoproline in said non-human organism or in the culture medium surrounding said non-human organism.

[15740] A further embodiment of the present invention relates to a process for the production of asparagine, which comprises
[15741] (a) increasing or generating the activity of a protein phosphatase non-targeted in a non-human organism or a part thereof, preferably a microorganism, a plant cell, a plant or a part thereof, as compared to a corresponding non-transformed wild type non-human organism or a part thereof; and
[15742] (b) growing the non-human organism or a part thereof under conditions which permit the production of asparagine or a composition comprising asparagine in said non-human organism or in the culture medium surrounding said non-human organism.

[15743] A further embodiment of the present invention relates to a process for the production of phenylalanine, which comprises
[15744] (a) increasing or generating the activity of a protein phosphatase non-targeted in a non-human organism or a part thereof, preferably a microorganism, a plant cell, a plant or a part thereof, as compared to a corresponding non-transformed wild type non-human organism or a part thereof; and
[15745] (b) growing the non-human organism or a part thereof under conditions which permit the production of phenylalanine or a composition comprising phenylalanine in said non-human organism or in the culture medium surrounding said non-human organism.

[15746] A further embodiment of the present invention relates to a process for the production of serine, which comprises
[15747] (a) increasing or generating the activity of a protein phosphatase non-targeted in a non-human organism or a part thereof, preferably a microorganism, a plant cell, a plant or a part thereof, as compared to a corresponding non-transformed wild type non-human organism or a part thereof; and
[15748] (b) growing the non-human organism or a part thereof under conditions which permit the production of serine or a composition comprising serine in said non-human organism or in the culture medium surrounding said non-human organism.

[15749] A further embodiment of the present invention relates to a process for the production of tyrosine, which comprises
[15750] (a) increasing or generating the activity of a protein phosphatase non-targeted in a non-human organism or a part thereof, preferably a microorganism, a plant cell, a plant or a part thereof, as compared to a corresponding non-transformed wild type non-human organism or a part thereof; and
[15751] (b) growing the non-human organism or a part thereof under conditions which permit the production of tyrosine or a composition comprising tyrosine in said non-human organism or in the culture medium surrounding said non-human organism.

[15752] A further embodiment of the present invention relates to a process for the production of phenylalanine, which comprises
[15753] (a) increasing or generating the activity of a CBL-interacting protein kinase non-targeted in a non-human organism or a part thereof, preferably a microorganism, a plant cell, a plant or a part thereof, as compared to a corresponding non-transformed wild type non-human organism or a part thereof; and
[15754] (b) growing the non-human organism or a part thereof under conditions which permit the production of phenylalanine or a composition comprising phenylalanine in said non-human organism or in the culture medium surrounding said non-human organism.

[15755] A further embodiment of the present invention relates to a process for the production of tyrosine, which comprises
[15756] (a) increasing or generating the activity of a CBL-interacting protein kinase non-targeted in a non-human organism or a part thereof, preferably a microorganism, a plant cell, a plant or a part thereof, as compared to a corresponding non-transformed wild type non-human organism or a part thereof; and
[15757] (b) growing the non-human organism or a part thereof under conditions which permit the production of tyrosine or a composition comprising tyrosine in said non-human organism or in the culture medium surrounding said non-human organism.

[15758] A further embodiment of the present invention relates to a process for the production of 5-oxoproline, which comprises
[15759] (a) increasing or generating the activity of a CBL-interacting protein kinase non-targeted in a non-human organism or a part thereof, preferably a microorganism, a plant cell, a plant or a part thereof, as compared to a corresponding non-transformed wild type non-human organism or a part thereof; and
[15760] (b) growing the non-human organism or a part thereof under conditions which permit the production of 5-oxoproline or a composition comprising 5-oxoproline in said non-human organism or in the culture medium surrounding said non-human organism.

[15761] A further embodiment of the present invention relates to a process for the production of serine, which comprises
[15762] (a) increasing or generating the activity of a glutaredoxin non-targeted in a non-human organism or a part thereof, preferably a microorganism, a plant cell, a plant or a part thereof, as compared to a corresponding non-transformed wild type non-human organism or a part thereof; and
[15763] (b) growing the non-human organism or a part thereof under conditions which permit the production of serine or a composition comprising serine in said non-human organism or in the culture medium surrounding said non-human organism.

[15764] A further embodiment of the present invention relates to a process for the production of tyrosine, which comprises
[15765] (a) increasing or generating the activity of a glutaredoxin non-targeted in a non-human organism or a part thereof, preferably a microorganism, a plant cell, a plant or a part thereof, as compared to a corresponding non-transformed wild type non-human organism or a part thereof; and
[15766] (b) growing the non-human organism or a part thereof under conditions which permit the production of tyrosine or a composition comprising tyrosine in said non-human organism or in the culture medium surrounding said non-human organism.

[15767] A further embodiment of the present invention relates to a process for the production of glycine, which comprises
[15768] (a) increasing or generating the activity of a CBL-interacting protein kinase non-targeted in a non-human organism or a part thereof, preferably a microorganism, a plant cell, a plant or a part thereof, as compared to a corresponding non-transformed wild type non-human organism or a part thereof; and
[15769] (b) growing the non-human organism or a part thereof under conditions which permit the production of glycine or a composition comprising glycine in said non-human organism or in the culture medium surrounding said non-human organism.

[15770] A further embodiment of the present invention relates to a process for the production of alanine, which comprises
[15771] (a) increasing or generating the activity of a delta-1-pyrroline 5-carboxylase synthetase non-targeted in a non-human organism or a part thereof, preferably a microorganism, a plant cell, a plant or a part thereof, as compared to a corresponding non-transformed wild type non-human organism or a part thereof; and
[15772] (b) growing the non-human organism or a part thereof under conditions which permit the production of alanine or a composition comprising alanine in said non-human organism or in the culture medium surrounding said non-human organism.

[15773] A further embodiment of the present invention relates to a process for the production of glycine, which comprises
[15774] (a) increasing or generating the activity of a delta-1-pyrroline 5-carboxylase synthetase non-targeted in a non-human organism or a part thereof, preferably a microorganism, a plant cell, a plant or a part thereof, as compared to a corresponding non-transformed wild type non-human organism or a part thereof; and
[15775] (b) growing the non-human organism or a part thereof under conditions which permit the production of glycine or a composition comprising glycine in said non-human organism or in the culture medium surrounding said non-human organism.

[15776] A further embodiment of the present invention relates to a process for the production of phenylalanine, which comprises
[15777] (a) increasing or generating the activity of a glutaredoxin non-targeted in a non-human organism or a part thereof, preferably a microorganism, a plant cell, a plant or a part thereof, as compared to a corresponding non-transformed wild type non-human organism or a part thereof; and
[15778] (b) growing the non-human organism or a part thereof under conditions which permit the production of phenylalanine or a composition comprising phenylalanine in said non-human organism or in the culture medium surrounding said non-human organism.

[15779] A further embodiment of the present invention relates to a process for the production of tyrosine, which comprises
[15780] (a) increasing or generating the activity of a glutaredoxin non-targeted in a non-human organism or a part thereof, preferably a microorganism, a plant cell, a plant or a part thereof, as compared to a corresponding non-transformed wild type non-human organism or a part thereof; and
[15781] (b) growing the non-human organism or a part thereof under conditions which permit the production of tyrosine or a composition comprising tyrosine in said non-human organism or in the culture medium surrounding said non-human organism.

[15782] A further embodiment of the present invention relates to a process for the production of tyrosine, which comprises
[15783] (a) increasing or generating the activity of a heat shock transcription factor non-targeted in a non-human organism or a part thereof, preferably a microorganism, a plant cell, a plant or a part thereof, as compared to a corresponding non-transformed wild type non-human organism or a part thereof; and
[15784] (b) growing the non-human organism or a part thereof under conditions which permit the production of tyrosine or a composition comprising tyrosine in said non-human organism or in the culture medium surrounding said non-human organism.

[15785] A further embodiment of the present invention relates to a process for the production of alanine, which comprises
[15786] (a) increasing or generating the activity of a pyruvate kinase non-targeted in a non-human organism or a part thereof, preferably a microorganism, a plant cell, a plant or a part thereof, as compared to a corresponding non-transformed wild type non-human organism or a part thereof; and
[15787] (b) growing the non-human organism or a part thereof under conditions which permit the production of alanine or a composition comprising alanine in said non-human organism or in the culture medium surrounding said non-human organism.

[15788] A further embodiment of the present invention relates to a process for the production of phenylalanine, which comprises
[15789] (a) increasing or generating the activity of a pyruvate kinase non-targeted in a non-human organism or a part thereof, preferably a microorganism, a plant cell, a plant or a part thereof, as compared to a corresponding non-transformed wild type non-human organism or a part thereof; and
[15790] (b) growing the non-human organism or a part thereof under conditions which permit the production of phenylalanine or a composition comprising phenylalanine in said non-human organism or in the culture medium surrounding said non-human organism.

[15791] A further embodiment of the present invention relates to a process for the production of tyrosine, which comprises
[15792] (a) increasing or generating the activity of a pyruvate kinase non-targeted in a non-human organism or a part thereof, preferably a microorganism, a plant cell, a plant or a part thereof, as compared to a corresponding non-transformed wild type non-human organism or a part thereof; and
[15793] (b) growing the non-human organism or a part thereof under conditions which permit the production of tyrosine or a composition comprising tyrosine in said non-human organism or in the culture medium surrounding said non-human organism.

[15794] A further embodiment of the present invention relates to a process for the production of phenylalanine, which comprises
[15795] (a) increasing or generating the activity of a ankyrin repeat family protein non-targeted in a non-human organism or a part thereof, preferably a microorganism, a plant cell, a plant or a part thereof, as compared to a corresponding non-transformed wild type non-human organism or a part thereof; and
[15796] (b) growing the non-human organism or a part thereof under conditions which permit the production of phenylalanine or a composition comprising phenylalanine in said non-human organism or in the culture medium surrounding said non-human organism.

[15797] A further embodiment of the present invention relates to a process for the production of tyrosine, which comprises
[15798] (a) increasing or generating the activity of a protein phosphatase non-targeted in a non-human organism or a part thereof, preferably a microorganism, a plant cell, a plant or a part thereof, as compared to a corresponding non-transformed wild type non-human organism or a part thereof; and
[15799] (b) growing the non-human organism or a part thereof under conditions which permit the production of tyrosine or a composition comprising tyrosine in said non-human organism or in the culture medium surrounding said non-human organism.

[15800] A further embodiment of the present invention relates to a process for the production of aspartate, which comprises
[15801] (a) increasing or generating the activity of a thioredoxin family protein non-targeted in a non-human organism or a part thereof, preferably a microorganism, a plant cell, a plant or a part thereof, as compared to a corresponding non-transformed wild type non-human organism or a part thereof; and
[15802] (b) growing the non-human organism or a part thereof under conditions which permit the production of aspartate or a composition comprising aspartate in said non-human organism or in the culture medium surrounding said non-human organism.

[15803] A further embodiment of the present invention relates to a process for the production of phenylalanine, which comprises
[15804] (a) increasing or generating the activity of a thioredoxin family protein non-targeted in a non-human organism or a part thereof, preferably a microorganism, a plant cell, a plant or a part thereof, as compared to a corresponding non-transformed wild type non-human organism or a part thereof; and
[15805] (b) growing the non-human organism or a part thereof under conditions which permit the production of phenylalanine or a composition comprising phenylalanine in said non-human organism or in the culture medium surrounding said non-human organism.

[15806] A further embodiment of the present invention relates to a process for the production of tyrosine, which comprises
[15807] (a) increasing or generating the activity of a thioredoxin family protein non-targeted in a non-human organism or a part thereof, preferably a microorganism, a plant cell, a plant or a part thereof, as compared to a corresponding non-transformed wild type non-human organism or a part thereof; and
[15808] (b) growing the non-human organism or a part thereof under conditions which permit the production of tyrosine or a composition comprising tyrosine in said non-human organism or in the culture medium surrounding said non-human organism.

[15809] A further embodiment of the present invention relates to a process for the production of phenylalanine, which comprises
[15810] (a) increasing or generating the activity of a harpin-induced family protein non-targeted in a non-human organism or a part thereof, preferably a microorganism, a plant cell, a plant or a part thereof, as compared to a corresponding non-transformed wild type non-human organism or a part thereof; and
[15811] (b) growing the non-human organism or a part thereof under conditions which permit the production of phenylalanine or a composition comprising phenylalanine in said non-human organism or in the culture medium surrounding said non-human organism.

[15812] A further embodiment of the present invention relates to a process for the production of serine, which comprises
[15813] (a) increasing or generating the activity of a harpin-induced family protein non-targeted in a non-human organism or a part thereof, preferably a microorganism, a plant cell, a plant or a part thereof, as compared to a corresponding non-transformed wild type non-human organism or a part thereof; and
[15814] (b) growing the non-human organism or a part thereof under conditions which permit the production of serine or a composition comprising serine in said non-human organism or in the culture medium surrounding said non-human organism.

[15815] A further embodiment of the present invention relates to a process for the production of tyrosine, which comprises
[15816] (a) increasing or generating the activity of a harpin-induced family protein non-targeted in a non-human organism or a part thereof, preferably a microorganism, a plant cell, a plant or a part thereof, as compared to a corresponding non-transformed wild type non-human organism or a part thereof; and
[15817] (b) growing the non-human organism or a part thereof under conditions which permit the production of tyrosine or a composition comprising tyrosine in said non-human organism or in the culture medium surrounding said non-human organism.

[15818] A further embodiment of the present invention relates to a process for the production of phenylalanine, which comprises
[15819] (a) increasing or generating the activity of a DNA mismatch repair protein non-targeted in a non-human organism or a part thereof, preferably a microorganism, a plant cell, a plant or a part thereof, as compared to a corresponding non-transformed wild type non-human organism or a part thereof; and
[15820] (b) growing the non-human organism or a part thereof under conditions which permit the production of phenylalanine or a composition comprising phenylalanine in said non-human organism or in the culture medium surrounding said non-human organism.

[15821] A further embodiment of the present invention relates to a process for the production of phenylalanine, which comprises
[15822] (a) increasing or generating the activity of a protein kinase non-targeted in a non-human organism or a part thereof, preferably a microorganism, a plant cell, a plant or a part thereof, as compared to a corresponding non-transformed wild type non-human organism or a part thereof; and
[15823] (b) growing the non-human organism or a part thereof under conditions which permit the production of phenylalanine or a composition comprising phenylalanine in said non-human organism or in the culture medium surrounding said non-human organism.

[15824] A further embodiment of the present invention relates to a process for the production of serine, which comprises
[15825] (a) increasing or generating the activity of a protein kinase non-targeted in a non-human organism or a part thereof, preferably a microorganism, a plant cell, a plant or a part thereof, as compared to a corresponding non-transformed wild type non-human organism or a part thereof; and
[15826] (b) growing the non-human organism or a part thereof under conditions which permit the production of serine or a composition comprising serine in said non-human organism or in the culture medium surrounding said non-human organism.

[15827] A further embodiment of the present invention relates to a process for the production of tyrosine, which comprises
[15828] (a) increasing or generating the activity of a protein kinase non-targeted in a non-human organism or a part thereof, preferably a microorganism, a plant cell, a plant or a part thereof, as compared to a corresponding non-transformed wild type non-human organism or a part thereof; and
[15829] (b) growing the non-human organism or a part thereof under conditions which permit the production of tyrosine or a composition comprising tyrosine in said non-human organism or in the culture medium surrounding said non-human organism.

[15830] A further embodiment of the present invention relates to a process for the production of 5-oxoproline, which comprises
[15831] (a) increasing or generating the activity of a protein kinase non-targeted in a non-human organism or a part thereof, preferably a microorganism, a plant cell, a plant or a part thereof, as compared to a corresponding non-transformed wild type non-human organism or a part thereof; and
[15832] (b) growing the non-human organism or a part thereof under conditions which permit the production of 5-oxoproline or a composition comprising 5-oxoproline in said non-human organism or in the culture medium surrounding said non-human organism.

[15833] A further embodiment of the present invention relates to a process for the production of serine, which comprises
[15834] (a) increasing or generating the activity of a eukaryotic translation initiation factor non-targeted in a non-human organism or a part thereof, preferably a microorganism, a plant cell, a plant or a part thereof, as compared to a corresponding non-transformed wild type non-human organism or a part thereof; and
[15835] (b) growing the non-human organism or a part thereof under conditions which permit the production of serine or a composition comprising serine in said non-human organism or in the culture medium surrounding said non-human organism.

[15836] A further embodiment of the present invention relates to a process for the production of tyrosine, which comprises
[15837] (a) increasing or generating the activity of a glucose-6-phosphate 1-dehydrogenase non-targeted in a non-human organism or a part thereof, preferably a microorganism, a plant cell, a plant or a part thereof, as compared to a corresponding non-transformed wild type non-human organism or a part thereof; and
[15838] (b) growing the non-human organism or a part thereof under conditions which permit the production of tyrosine or a composition comprising tyrosine in said non-human organism or in the culture medium surrounding said non-human organism.

[15839] A further embodiment of the present invention relates to a process for the production of phenylalanine, which comprises
[15840] (a) increasing or generating the activity of a glycosyl transferase non-targeted in a non-human organism or a part thereof, preferably a microorganism, a plant cell, a plant or a part thereof, as compared to a corresponding non-transformed wild type non-human organism or a part thereof; and
[15841] (b) growing the non-human organism or a part thereof under conditions which permit the production of phenylalanine or a composition comprising phenylalanine in said non-human organism or in the culture medium surrounding said non-human organism.

[15842] A further embodiment of the present invention relates to a process for the production of tyrosine, which comprises
[15843] (a) increasing or generating the activity of a glycosyl transferase non-targeted in a non-human organism or a part thereof, preferably a microorganism, a plant cell, a plant or a part thereof, as compared to a corresponding non-transformed wild type non-human organism or a part thereof; and
[15844] (b) growing the non-human organism or a part thereof under conditions which permit the production of tyrosine or a composition comprising tyrosine in said non-human organism or in the culture medium surrounding said non-human organism.

[15845] A further embodiment of the present invention relates to a process for the production of phenylalanine, which comprises
[15846] (a) increasing or generating the activity of a auxin response factor non-targeted in a non-human organism or a part thereof, preferably a microorganism, a plant cell, a plant or a part thereof, as compared to a corresponding non-transformed wild type non-human organism or a part thereof; and
[15847] (b) growing the non-human organism or a part thereof under conditions which permit the production of phenylalanine or a composition comprising phenylalanine in said non-human organism or in the culture medium surrounding said non-human organism.

[15848] A further embodiment of the present invention relates to a process for the production of tyrosine, which comprises
[15849] (a) increasing or generating the activity of a auxin response factor non-targeted in a non-human organism or a part thereof, preferably a microorganism, a plant cell, a plant or a part thereof, as compared to a corresponding non-transformed wild type non-human organism or a part thereof; and
[15850] (b) growing the non-human organism or a part thereof under conditions which permit the production of tyrosine or a composition comprising tyrosine in said non-human organism or in the culture medium surrounding said non-human organism.

[15851] A further embodiment of the present invention relates to a process for the production of aspartate, which comprises
[15852] (a) increasing or generating the activity of a monthiol glutaredoxin non-targeted in a non-human organism or a part thereof, preferably a microorganism, a plant cell, a plant or a part thereof, as compared to a corresponding non-transformed wild type non-human organism or a part thereof; and
[15853] (b) growing the non-human organism or a part thereof under conditions which permit the production of aspartate or a composition comprising aspartate in said non-human organism or in the culture medium surrounding said non-human organism.

[15854] A further embodiment of the present invention relates to a process for the production of phenylalanine, which comprises
[15855] (a) increasing or generating the activity of a monthiol glutaredoxin non-targeted in a non-human organism or a part thereof, preferably a microorganism, a plant cell, a plant or a part thereof, as compared to a corresponding non-transformed wild type non-human organism or a part thereof; and
[15856] (b) growing the non-human organism or a part thereof under conditions which permit the production of phenylalanine or a composition comprising phenylalanine in said non-human organism or in the culture medium surrounding said non-human organism.

[15857] A further embodiment of the present invention relates to a process for the production of phenylalanine, which comprises
[15858] (a) increasing or generating the activity of a glutaredoxin non-targeted in a non-human organism or a part thereof, preferably a microorganism, a plant cell, a plant or a part thereof, as compared to a corresponding non-transformed wild type non-human organism or a part thereof; and
[15859] (b) growing the non-human organism or a part thereof under conditions which permit the production of phenylalanine or a composition comprising phenylalanine in said non-human organism or in the culture medium surrounding said non-human organism.

[15860] A further embodiment of the present invention relates to a process for the production of tyrosine, which comprises
[15861] (a) increasing or generating the activity of a glutaredoxin non-targeted in a non-human organism or a part thereof, preferably a microorganism, a plant cell, a plant or a part thereof, as compared to a corresponding non-transformed wild type non-human organism or a part thereof; and
[15862] (b) growing the non-human organism or a part thereof under conditions which permit the production of tyrosine or a composition comprising tyrosine in said non-human organism or in the culture medium surrounding said non-human organism.

[15863] A further embodiment of the present invention relates to a process for the production of 5-oxoproline, which comprises
[15864] (a) increasing or generating the activity of a glutaredoxin non-targeted in a non-human organism or a part thereof, preferably a microorganism, a plant cell, a plant or a part thereof, as compared to a corresponding non-transformed wild type non-human organism or a part thereof; and
[15865] (b) growing the non-human organism or a part thereof under conditions which permit the production of 5-oxoproline or a composition comprising 5-oxoproline in said non-human organism or in the culture medium surrounding said non-human organism.

[15866] A further embodiment of the present invention relates to a process for the production of phenylalanine, which comprises
[15867] (a) increasing or generating the activity of a monothiol glutaredoxin non-targeted in a non-human organism or a part thereof, preferably a microorganism, a plant cell, a plant or a part thereof, as compared to a corresponding non-transformed wild type non-human organism or a part thereof; and
[15868] (b) growing the non-human organism or a part thereof under conditions which permit the production of phenylalanine or a composition comprising phenylalanine in said non-human organism or in the culture medium surrounding said non-human organism.

[15869] A further embodiment of the present invention relates to a process for the production of tyrosine, which comprises
[15870] (a) increasing or generating the activity of a monothiol glutaredoxin non-targeted in a non-human organism or a part thereof, preferably a microorganism, a plant cell, a plant or a part thereof, as compared to a corresponding non-transformed wild type non-human organism or a part thereof; and
[15871] (b) growing the non-human organism or a part thereof under conditions which permit the production of tyrosine or a composition comprising tyrosine in said non-human organism or in the culture medium surrounding said non-human organism.

[15872] A further embodiment of the present invention relates to a process for the production of tyrosine, which comprises
[15873] (a) increasing or generating the activity of a monothiol glutaredoxin non-targeted in a non-human organism or a part thereof, preferably a microorganism, a plant cell, a plant or a part thereof, as compared to a corresponding non-transformed wild type non-human organism or a part thereof; and
[15874] (b) growing the non-human organism or a part thereof under conditions which permit the production of tyrosine or a composition comprising tyrosine in said non-human organism or in the culture medium surrounding said non-human organism.

[15875] A further embodiment of the present invention relates to a process for the production of aspartate, which comprises
[15876] (a) increasing or generating the activity of a monothiol glutaredoxin non-targeted in a non-human organism or a part thereof, preferably a microorganism, a plant cell, a plant or a part thereof, as compared to a corresponding non-transformed wild type non-human organism or a part thereof; and
[15877] (b) growing the non-human organism or a part thereof under conditions which permit the production of aspartate or a composition comprising aspartate in said non-human organism or in the culture medium surrounding said non-human organism.

[15878] A further embodiment of the present invention relates to a process for the production of phenylalanine, which comprises
[15879] (a) increasing or generating the activity of a monothiol glutaredoxin non-targeted in a non-human organism or a part thereof, preferably a microorganism, a plant cell, a plant or a part thereof, as compared to a corresponding non-transformed wild type non-human organism or a part thereof; and
[15880] (b) growing the non-human organism or a part thereof under conditions which permit the production of phenylalanine or a composition comprising phenylalanine in said non-human organism or in the culture medium surrounding said non-human organism.

[15881] A further embodiment of the present invention relates to a process for the production of tyrosine, which comprises
[15882] (a) increasing or generating the activity of a monothiol glutaredoxin non-targeted in a non-human organism or a part thereof, preferably a microorganism, a plant cell, a plant or a part thereof, as compared to a corresponding non-transformed wild type non-human organism or a part thereof; and
[15883] (b) growing the non-human organism or a part thereof under conditions which permit the production of tyrosine or a composition comprising tyrosine in said non-human organism or in the culture medium surrounding said non-human organism.

[15884] A further embodiment of the present invention relates to a process for the production of 5-oxoproline, which comprises
[15885] (a) increasing or generating the activity of a monothiol glutaredoxin non-targeted in a non-human organism or a part thereof, preferably a microorganism, a plant cell, a plant or a part thereof, as compared to a corresponding non-transformed wild type non-human organism or a part thereof; and
[15886] (b) growing the non-human organism or a part thereof under conditions which permit the production of 5-oxoproline or a composition comprising 5-oxoproline in said non-human organism or in the culture medium surrounding said non-human organism.

[15887] A further embodiment of the present invention relates to a process for the production of tyrosine, which comprises
[15888] (a) increasing or generating the activity of a monothiol glutaredoxin non-targeted in a non-human organism or a part thereof, preferably a microorganism, a plant cell, a plant or a part thereof, as compared to a corresponding non-transformed wild type non-human organism or a part thereof; and
[15889] (b) growing the non-human organism or a part thereof under conditions which permit the production of tyrosine or a composition comprising tyrosine in said non-human organism or in the culture medium surrounding said non-human organism.

[15890] A further embodiment of the present invention relates to a process for the production of serine, which comprises
[15891] (a) increasing or generating the activity of a heat shock transcription factor non-targeted in a non-human organism or a part thereof, preferably a microorganism, a plant cell, a plant or a part thereof, as compared to a corresponding non-transformed wild type non-human organism or a part thereof; and
[15892] (b) growing the non-human organism or a part thereof under conditions which permit the production of serine or a composition comprising serine in said non-human organism or in the culture medium surrounding said non-human organism.

[15893] A further embodiment of the present invention relates to a process for the production of alanine, which comprises
[15894] (a) increasing or generating the activity of a protein phosphatase non-targeted in a non-human organism or a part thereof, preferably a microorganism, a plant cell, a plant or a part thereof, as compared to a corresponding non-transformed wild type non-human organism or a part thereof; and
[15895] (b) growing the non-human organism or a part thereof under conditions which permit the production of alanine or a composition comprising alanine in said non-human organism or in the culture medium surrounding said non-human organism.

[15896] A further embodiment of the present invention relates to a process for the production of aspartate, which comprises
[15897] (a) increasing or generating the activity of a protein phosphatase non-targeted in a non-human organism or a part thereof, preferably a microorganism, a plant cell, a plant or a part thereof, as compared to a corresponding non-transformed wild type non-human organism or a part thereof; and
[15898] (b) growing the non-human organism or a part thereof under conditions which permit the production of aspartate or a composition comprising aspartate in said non-human organism or in the culture medium surrounding said non-human organism.

[15899] A further embodiment of the present invention relates to a process for the production of citrulline, which comprises
[15900] (a) increasing or generating the activity of a protein phosphatase non-targeted in a non-human organism or a part thereof, preferably a microorganism, a plant cell, a plant or a part thereof, as compared to a corresponding non-transformed wild type non-human organism or a part thereof; and
[15901] (b) growing the non-human organism or a part thereof under conditions which permit the production of citrulline or a composition comprising citrulline in said non-human organism or in the culture medium surrounding said non-human organism.

[15902] A further embodiment of the present invention relates to a process for the production of alanine, which comprises
[15903] (a) increasing or generating the activity of a At4g32480-protein non-targeted in a non-human organism or a part thereof, preferably a microorganism, a plant cell, a plant or a part thereof, as compared to a corresponding non-transformed wild type non-human organism or a part thereof; and
[15904] (b) growing the non-human organism or a part thereof under conditions which permit the production of alanine or a composition comprising alanine in said non-human organism or in the culture medium surrounding said non-human organism.

[15905] A further embodiment of the present invention relates to a process for the production of asparagine, which comprises
[15906] (a) increasing or generating the activity of a At4g32480-protein non-targeted in a non-human organism or a part thereof, preferably a microorganism, a plant cell, a plant or a part thereof, as compared to a corresponding non-transformed wild type non-human organism or a part thereof; and
[15907] (b) growing the non-human organism or a part thereof under conditions which permit the production of asparagine or a composition comprising asparagine in said non-human organism or in the culture medium surrounding said non-human organism.

[15908] A further embodiment of the present invention relates to a process for the production of glycine, which comprises
[15909] (a) increasing or generating the activity of a At4g32480-protein non-targeted in a non-human organism or a part thereof, preferably a microorganism, a plant cell, a plant or a part thereof, as compared to a corresponding non-transformed wild type non-human organism or a part thereof; and
[15910] (b) growing the non-human organism or a part thereof under conditions which permit the production of glycine or a composition comprising glycine in said non-human organism or in the culture medium surrounding said non-human organism.

[15911] A further embodiment of the present invention relates to a process for the production of phenylalanine, which comprises
[15912] (a) increasing or generating the activity of a At4g32480-protein non-targeted in a non-human organism or a part thereof, preferably a microorganism, a plant cell, a plant or a part thereof, as compared to a corresponding non-transformed wild type non-human organism or a part thereof; and
[15913] (b) growing the non-human organism or a part thereof under conditions which permit the production of phenylalanine or a composition comprising phenylalanine in said non-human organism or in the culture medium surrounding said non-human organism.

[15914] A further embodiment of the present invention relates to a process for the production of serine, which comprises
[15915] (a) increasing or generating the activity of a At4g32480-protein non-targeted in a non-human organism or a part thereof, preferably a microorganism, a plant cell, a plant or a part thereof, as compared to a corresponding non-transformed wild type non-human organism or a part thereof; and
[15916] (b) growing the non-human organism or a part thereof under conditions which permit the production of serine or a composition comprising serine in said non-human organism or in the culture medium surrounding said non-human organism.

[15917] A further embodiment of the present invention relates to a process for the production of tyrosine, which comprises
[15918] (a) increasing or generating the activity of a At4g32480-protein non-targeted in a non-human organism or a part thereof, preferably a microorganism, a plant cell, a plant or a part thereof, as compared to a corresponding non-transformed wild type non-human organism or a part thereof; and
[15919] (b) growing the non-human organism or a part thereof under conditions which permit the production of tyrosine or a composition comprising tyrosine in said non-human organism or in the culture medium surrounding said non-human organism.

[15920] A further embodiment of the present invention relates to a process for the production of aspartate, which comprises
[15921] (a) increasing or generating the activity of a glutaredoxin non-targeted in a non-human organism or a part thereof, preferably a microorganism, a plant cell, a plant or a part thereof, as compared to a corresponding non-transformed wild type non-human organism or a part thereof; and
[15922] (b) growing the non-human organism or a part thereof under conditions which permit the production of aspartate or a composition comprising aspartate in said non-human organism or in the culture medium surrounding said non-human organism.

[15923] A further embodiment of the present invention relates to a process for the production of citrulline, which comprises
[15924] (a) increasing or generating the activity of a glutaredoxin non-targeted in a non-human organism or a part thereof, preferably a microorganism, a plant cell, a plant or a part thereof, as compared to a corresponding non-transformed wild type non-human organism or a part thereof; and
[15925] (b) growing the non-human organism or a part thereof under conditions which permit the production of citrulline or a composition comprising citrulline in said non-human organism or in the culture medium surrounding said non-human organism.

[15926] A further embodiment of the present invention relates to a process for the production of phenylalanine, which comprises
[15927] (a) increasing or generating the activity of a cyclin D non-targeted in a non-human organism or a part thereof, preferably a microorganism, a plant cell, a plant or a part thereof, as compared to a corresponding non-transformed wild type non-human organism or a part thereof; and
[15928] (b) growing the non-human organism or a part thereof under conditions which permit the production of phenylalanine or a composition comprising phenylalanine in said non-human organism or in the culture medium surrounding said non-human organism.

[15929] A further embodiment of the present invention relates to a process for the production of asparagine, which comprises
[15930] (a) increasing or generating the activity of a calcium-dependent protein kinase non-targeted in a non-human organism or a part thereof, preferably a microorganism, a plant cell, a plant or a part thereof, as compared to a corresponding non-transformed wild type non-human organism or a part thereof; and
[15931] (b) growing the non-human organism or a part thereof under conditions which permit the production of asparagine or a composition comprising asparagine in said non-human organism or in the culture medium surrounding said non-human organism.

[15932] A further embodiment of the present invention relates to a process for the production of phenylalanine, which comprises
[15933] (a) increasing or generating the activity of a calcium-dependent protein kinase non-targeted in a non-human organism or a part thereof, preferably a microorganism, a plant cell, a plant or a part thereof, as compared to a corresponding non-transformed wild type non-human organism or a part thereof; and
[15934] (b) growing the non-human organism or a part thereof under conditions which permit the production of phenylalanine or a composition comprising phenylalanine in said non-human organism or in the culture medium surrounding said non-human organism.

[15935] A further embodiment of the present invention relates to a process for the production of serine, which comprises
[15936] (a) increasing or generating the activity of a calcium-dependent protein kinase non-targeted in a non-human organism or a part thereof, preferably a microorganism, a plant cell, a plant or a part thereof, as compared to a corresponding non-transformed wild type non-human organism or a part thereof; and
[15937] (b) growing the non-human organism or a part thereof under conditions which permit the production of serine or a composition comprising serine in said non-human organism or in the culture medium surrounding said non-human organism.

[15938] A further embodiment of the present invention relates to a process for the production of tyrosine, which comprises
[15939] (a) increasing or generating the activity of a calcium-dependent protein kinase non-targeted in a non-human organism or a part thereof, preferably a microorganism, a plant cell, a plant or a part thereof, as compared to a corresponding non-transformed wild type non-human organism or a part thereof; and
[15940] (b) growing the non-human organism or a part thereof under conditions which permit the production of tyrosine or a composition comprising tyrosine in said non-human organism or in the culture medium surrounding said non-human organism.

[15941] A further embodiment of the present invention relates to a process for the production of 5-oxoproline, which comprises
[15942] (a) increasing or generating the activity of a calcium-dependent protein kinase non-targeted in a non-human organism or a part thereof, preferably a microorganism, a plant cell, a plant or a part thereof, as compared to a corresponding non-transformed wild type non-human organism or a part thereof; and
[15943] (b) growing the non-human organism or a part thereof under conditions which permit the production of 5-oxoproline or a composition comprising 5-oxoproline in said non-human organism or in the culture medium surrounding said non-human organism.

[15944] A further embodiment of the present invention relates to a process for the production of tyrosine, which comprises
[15945] (a) increasing or generating the activity of a protein phosphatase non-targeted in a non-human organism or a part thereof, preferably a microorganism, a plant cell, a plant or a part thereof, as compared to a corresponding non-transformed wild type non-human organism or a part thereof; and
[15946] (b) growing the non-human organism or a part thereof under conditions which permit the production of tyrosine or a composition comprising tyrosine in said non-human organism or in the culture medium surrounding said non-human organism.

[15947] A further embodiment of the present invention relates to a process for the production of aspartate, which comprises
[15948] (a) increasing or generating the activity of a heat shock transcription factor non-targeted in a non-human organism or a part thereof, preferably a microorganism, a plant cell, a plant or a part thereof, as compared to a corresponding non-transformed wild type non-human organism or a part thereof; and
[15949] (b) growing the non-human organism or a part thereof under conditions which permit the production of aspartate or a composition comprising aspartate in said non-human organism or in the culture medium surrounding said non-human organism.

[15950] A further embodiment of the present invention relates to a process for the production of 3,4-dihydroxyphenylalanine (dopa), which comprises
[15951] (a) increasing or generating the activity of a heat shock transcription factor non-targeted in a non-human organism or a part thereof, preferably a microorganism, a plant cell, a plant or a part thereof, as compared to a corresponding non-transformed wild type non-human organism or a part thereof; and
[15952] (b) growing the non-human organism or a part thereof under conditions which permit the production of 3,4-dihydroxyphenylalanine (dopa) or a composition comprising 3,4-dihydroxyphenylalanine (dopa) in said non-human organism or in the culture medium surrounding said non-human organism.

[15953] A further embodiment of the present invention relates to a process for the production of phenylalanine, which comprises
[15954] (a) increasing or generating the activity of a gibberellin 20-oxidase non-targeted in a non-human organism or a part thereof, preferably a microorganism, a plant cell, a plant or a part thereof, as compared to a corresponding non-transformed wild type non-human organism or a part thereof; and
[15955] (b) growing the non-human organism or a part thereof under conditions which permit the production of phenylalanine or a composition comprising phenylalanine in said non-human organism or in the culture medium surrounding said non-human organism.

[15956] A further embodiment of the present invention relates to a process for the production of serine, which comprises
[15957] (a) increasing or generating the activity of a gibberellin 20-oxidase non-targeted in a non-human organism or a part thereof, preferably a microorganism, a plant cell, a plant or a part thereof, as compared to a corresponding non-transformed wild type non-human organism or a part thereof; and
[15958] (b) growing the non-human organism or a part thereof under conditions which permit the production of serine or a composition comprising serine in said non-human organism or in the culture medium surrounding said non-human organism.

[15959] A further embodiment of the present invention relates to a process for the production of serine, which comprises
[15960] (a) increasing or generating the activity of a integral membrane transporter family protein non-targeted in a non-human organism or a part thereof, preferably a microorganism, a plant cell, a plant or a part thereof, as compared to a corresponding non-transformed wild type non-human organism or a part thereof; and
[15961] (b) growing the non-human organism or a part thereof under conditions which permit the production of serine or a composition comprising serine in said non-human organism or in the culture medium surrounding said non-human organism.

[15962] A further embodiment of the present invention relates to a process for the production of phenylalanine, which comprises
[15963] (a) increasing or generating the activity of a glutaredoxin non-targeted in a non-human organism or a part thereof, preferably a microorganism, a plant cell, a plant or a part thereof, as compared to a corresponding non-transformed wild type non-human organism or a part thereof; and
[15964] (b) growing the non-human organism or a part thereof under conditions which permit the production of phenylalanine or a composition comprising phenylalanine in said non-human organism or in the culture medium surrounding said non-human organism.

[15965] A further embodiment of the present invention relates to a process for the production of asparagine, which comprises
[15966] (a) increasing or generating the activity of a At5g16650-protein non-targeted in a non-human organism or a part thereof, preferably a microorganism, a plant cell, a plant or a part thereof, as compared to a corresponding non-transformed wild type non-human organism or a part thereof; and
[15967] (b) growing the non-human organism or a part thereof under conditions which permit the production of asparagine or a composition comprising asparagine in said non-human organism or in the culture medium surrounding said non-human organism.

[15968] A further embodiment of the present invention relates to a process for the production of aspartate, which comprises
[15969] (a) increasing or generating the activity of a At5g16650-protein non-targeted in a non-human organism or a part thereof, preferably a microorganism, a plant cell, a plant or a part thereof, as compared to a corresponding non-transformed wild type non-human organism or a part thereof; and
[15970] (b) growing the non-human organism or a part thereof under conditions which permit the production of aspartate or a composition comprising aspartate in said non-human organism or in the culture medium surrounding said non-human organism.

[15971] A further embodiment of the present invention relates to a process for the production of serine, which comprises
[15972] (a) increasing or generating the activity of a At5g16650-protein non-targeted in a non-human organism or a part thereof, preferably a microorganism, a plant cell, a plant or a part thereof, as compared to a corresponding non-transformed wild type non-human organism or a part thereof; and
[15973] (b) growing the non-human organism or a part thereof under conditions which permit the production of serine or a composition comprising serine in said non-human organism or in the culture medium surrounding said non-human organism.

[15974] A further embodiment of the present invention relates to a process for the production of 5-oxoproline, which comprises
[15975] (a) increasing or generating the activity of a At5g16650-protein non-targeted in a non-human organism or a part thereof, preferably a microorganism, a plant cell, a plant or a part thereof, as compared to a corresponding non-transformed wild type non-human organism or a part thereof; and
[15976] (b) growing the non-human organism or a part thereof under conditions which permit the production of 5-oxoproline or a composition comprising 5-oxoproline in said non-human organism or in the culture medium surrounding said non-human organism.

[15977] A further embodiment of the present invention relates to a process for the production of phenylalanine, which comprises
[15978] (a) increasing or generating the activity of a monothiol glutaredoxin non-targeted in a non-human organism or a part thereof, preferably a microorganism, a plant cell, a plant or a part thereof, as compared to a corresponding non-transformed wild type non-human organism or a part thereof; and
[15979] (b) growing the non-human organism or a part thereof under conditions which permit the production of phenylalanine or a composition comprising phenylalanine in said non-human organism or in the culture medium surrounding said non-human organism.

[15980] A further embodiment of the present invention relates to a process for the production of tyrosine, which comprises
[15981] (a) increasing or generating the activity of a monothiol glutaredoxin non-targeted in a non-human organism or a part thereof, preferably a microorganism, a plant cell, a plant or a part thereof, as compared to a corresponding non-transformed wild type non-human organism or a part thereof; and
[15982] (b) growing the non-human organism or a part thereof under conditions which permit the production of tyrosine or a composition comprising tyrosine in said non-human organism or in the culture medium surrounding said non-human organism.

[15983] A further embodiment of the present invention relates to a process for the production of phenylalanine, which comprises
[15984] (a) increasing or generating the activity of a at5g21910-protein non-targeted in a non-human organism or a part thereof, preferably a microorganism, a plant cell, a plant or a part thereof, as compared to a corresponding non-transformed wild type non-human organism or a part thereof; and
[15985] (b) growing the non-human organism or a part thereof under conditions which permit the production of phenylalanine or a composition comprising phenylalanine in said non-human organism or in the culture medium surrounding said non-human organism.

[15986] A further embodiment of the present invention relates to a process for the production of tyrosine, which comprises
[15987] (a) increasing or generating the activity of a transcription factor non-targeted in a non-human organism or a part thereof, preferably a microorganism, a plant cell, a plant or a part thereof, as compared to a corresponding non-transformed wild type non-human organism or a part thereof; and
[15988] (b) growing the non-human organism or a part thereof under conditions which permit the production of tyrosine or a composition comprising tyrosine in said non-human organism or in the culture medium surrounding said non-human organism.

[15989] A further embodiment of the present invention relates to a process for the production of serine, which comprises
[15990] (a) increasing or generating the activity of a thioredoxin non-targeted in a non-human organism or a part thereof, preferably a microorganism, a plant cell, a plant or a part thereof, as compared to a corresponding non-transformed wild type non-human organism or a part thereof; and
[15991] (b) growing the non-human organism or a part thereof under conditions which permit the production of serine or a composition comprising serine in said non-human organism or in the culture medium surrounding said non-human organism.

[15992] A further embodiment of the present invention relates to a process for the production of alanine, which comprises
[15993] (a) increasing or generating the activity of a protein phosphatase non-targeted in a non-human organism or a part thereof, preferably a microorganism, a plant cell, a plant or a part thereof, as compared to a corresponding non-transformed wild type non-human organism or a part thereof; and
[15994] (b) growing the non-human organism or a part thereof under conditions which permit the production of alanine or a composition comprising alanine in said non-human organism or in the culture medium surrounding said non-human organism.

[15995] A further embodiment of the present invention relates to a process for the production of citrulline, which comprises
[15996] (a) increasing or generating the activity of a protein phosphatase non-targeted in a non-human organism or a part thereof, preferably a microorganism, a plant cell, a plant or a part thereof, as compared to a corresponding non-transformed wild type non-human organism or a part thereof; and
[15997] (b) growing the non-human organism or a part thereof under conditions which permit the production of citrulline or a composition comprising citrulline in said non-human organism or in the culture medium surrounding said non-human organism.

[15998] A further embodiment of the present invention relates to a process for the production of citrulline, which comprises
[15999] (a) increasing or generating the activity of a protein phosphatase non-targeted in a non-human organism or a part thereof, preferably a microorganism, a plant cell, a plant or a part thereof, as compared to a corresponding non-transformed wild type non-human organism or a part thereof; and
[16000] (b) growing the non-human organism or a part thereof under conditions which permit the production of citrulline or a composition comprising citrulline in said non-human organism or in the culture medium surrounding said non-human organism.

[16001] A further embodiment of the present invention relates to a process for the production of phenylalanine, which comprises
[16002] (a) increasing or generating the activity of a RNA-binding protein non-targeted in a non-human organism or a part thereof, preferably a microorganism, a plant cell, a plant or a part thereof, as compared to a corresponding non-transformed wild type non-human organism or a part thereof; and
[16003] (b) growing the non-human organism or a part thereof under conditions which permit the production of phenylalanine or a composition comprising phenylalanine in said non-human organism or in the culture medium surrounding said non-human organism.

[16004] A further embodiment of the present invention relates to a process for the production of tyrosine, which comprises
[16005] (a) increasing or generating the activity of a RNA-binding protein non-targeted in a non-human organism or a part thereof, preferably a microorganism, a plant cell, a plant or a part thereof, as compared to a corresponding non-transformed wild type non-human organism or a part thereof; and
[16006] (b) growing the non-human organism or a part thereof under conditions which permit the production of tyrosine or a composition comprising tyrosine in said non-human organism or in the culture medium surrounding said non-human organism.

[16007] A further embodiment of the present invention relates to a process for the production of alanine, which comprises
[16008] (a) increasing or generating the activity of a pyruvate kinase non-targeted in a non-human organism or a part thereof, preferably a microorganism, a plant cell, a plant or a part thereof, as compared to a corresponding non-transformed wild type non-human organism or a part thereof; and
[16009] (b) growing the non-human organism or a part thereof under conditions which permit the production of alanine or a composition comprising alanine in said non-human organism or in the culture medium surrounding said non-human organism.

[16010] A further embodiment of the present invention relates to a process for the production of alanine, which comprises
[16011] (a) increasing or generating the activity of a zinc finger protein non-targeted in a non-human organism or a part thereof, preferably a microorganism, a plant cell, a plant or a part thereof, as compared to a corresponding non-transformed wild type non-human organism or a part thereof; and
[16012] (b) growing the non-human organism or a part thereof under conditions which permit the production of alanine or a composition comprising alanine in said non-human organism or in the culture medium surrounding said non-human organism.

[16013] A further embodiment of the present invention relates to a process for the production of phenylalanine, which comprises
[16014] (a) increasing or generating the activity of a zinc finger protein non-targeted in a non-human organism or a part thereof, preferably a microorganism, a plant cell, a plant or a part thereof, as compared to a corresponding non-transformed wild type non-human organism or a part thereof; and
[16015] (b) growing the non-human organism or a part thereof under conditions which permit the production of phenylalanine or a composition comprising phenylalanine in said non-human organism or in the culture medium surrounding said non-human organism.

[16016] A further embodiment of the present invention relates to a process for the production of serine, which comprises
[16017] (a) increasing or generating the activity of a zinc finger protein non-targeted in a non-human organism or a part thereof, preferably a microorganism, a plant cell, a plant or a part thereof, as compared to a corresponding non-transformed wild type non-human organism or a part thereof; and
[16018] (b) growing the non-human organism or a part thereof under conditions which permit the production of serine or a composition comprising serine in said non-human organism or in the culture medium surrounding said non-human organism.

[16019] A further embodiment of the present invention relates to a process for the production of 5-oxoproline, which comprises
[16020] (a) increasing or generating the activity of a zinc finger protein non-targeted in a non-human organism or a part thereof, preferably a microorganism, a plant cell, a plant or a part thereof, as compared to a corresponding non-transformed wild type non-human organism or a part thereof; and
[16021] (b) growing the non-human organism or a part thereof under conditions which permit the production of 5-oxoproline or a composition comprising 5-oxoproline in said non-human organism or in the culture medium surrounding said non-human organism.

[16022] A further embodiment of the present invention relates to a process for the production of aspartate, which comprises
[16023] (a) increasing or generating the activity of a CDP-diacylglycerol-serine O-phosphatidyltransferase non-targeted in a non-human organism or a part thereof, preferably a microorganism, a plant cell, a plant or a part thereof, as compared to a corresponding non-transformed wild type non-human organism or a part thereof; and
[16024] (b) growing the non-human organism or a part thereof under conditions which permit the production of aspartate or a composition comprising aspartate in said non-human organism or in the culture medium surrounding said non-human organism.

[16025] A further embodiment of the present invention relates to a process for the production of 5-oxoproline, which comprises
[16026] (a) increasing or generating the activity of a CDP-diacylglycerol-serine O-phosphatidyltransferase non-targeted in a non-human organism or a part thereof, preferably a microorganism, a plant cell, a plant or a part thereof, as compared to a corresponding non-transformed wild type non-human organism or a part thereof; and
[16027] (b) growing the non-human organism or a part thereof under conditions which permit the production of 5-oxoproline or a composition comprising 5-oxoproline in said non-human organism or in the culture medium surrounding said non-human organism.

[16028] A further embodiment of the present invention relates to a process for the production of serine, which comprises
[16029] (a) increasing or generating the activity of a Glycine cleavage system T aminomethyltransferase non-targeted in a non-human organism or a part thereof, preferably a microorganism, a plant cell, a plant or a part thereof, as compared to a corresponding non-transformed wild type non-human organism or a part thereof; and
[16030] (b) growing the non-human organism or a part thereof under conditions which permit the production of serine or a composition comprising serine in said non-human organism or in the culture medium surrounding said non-human organism.

[16031] A further embodiment of the present invention relates to a process for the production of serine, which comprises
[16032] (a) increasing or generating the activity of a transcriptional regulator non-targeted in a non-human organism or a part thereof, preferably a microorganism, a plant cell, a plant or a part thereof, as compared to a corresponding non-transformed wild type non-human organism or a part thereof; and
[16033] (b) growing the non-human organism or a part thereof under conditions which permit the production of serine or a composition comprising serine in said non-human organism or in the culture medium surrounding said non-human organism.

[16034] A further embodiment of the present invention relates to a process for the production of aspartate, which comprises
[16035] (a) increasing or generating the activity of a adenylylsulfate kinase non-targeted in a non-human organism or a part thereof, preferably a microorganism, a plant cell, a plant or a part thereof, as compared to a corresponding non-transformed wild type non-human organism or a part thereof; and
[16036] (b) growing the non-human organism or a part thereof under conditions which permit the production of aspartate or a composition comprising aspartate in said non-human organism or in the culture medium surrounding said non-human organism.

[16037] A further embodiment of the present invention relates to a process for the production of alanine, which comprises
[16038] (a) increasing or generating the activity of a malic enzyme non-targeted in a non-human organism or a part thereof, preferably a microorganism, a plant cell, a plant or a part thereof, as compared to a corresponding non-transformed wild type non-human organism or a part thereof; and
[16039] (b) growing the non-human organism or a part thereof under conditions which permit the production of alanine or a composition comprising alanine in said non-human organism or in the culture medium surrounding said non-human organism.

[16040] A further embodiment of the present invention relates to a process for the production of phenylalanine, which comprises
[16041] (a) increasing or generating the activity of a malic enzyme non-targeted in a non-human organism or a part thereof, preferably a microorganism, a plant cell, a plant or a part thereof, as compared to a corresponding non-transformed wild type non-human organism or a part thereof; and
[16042] (b) growing the non-human organism or a part thereof under conditions which permit the production of phenylalanine or a composition comprising phenylalanine in said non-human organism or in the culture medium surrounding said non-human organism.

[16043] A further embodiment of the present invention relates to a process for the production of serine, which comprises
[16044] (a) increasing or generating the activity of a malic enzyme non-targeted in a non-human organism or a part thereof, preferably a microorganism, a plant cell, a plant or a part thereof, as compared to a corresponding non-transformed wild type non-human organism or a part thereof; and
[16045] (b) growing the non-human organism or a part thereof under conditions which permit the production of serine or a composition comprising serine in said non-human organism or in the culture medium surrounding said non-human organism.

[16046] A further embodiment of the present invention relates to a process for the production of alanine, which comprises
[16047] (a) increasing or generating the activity of a sec-independent protein translocase non-targeted in a non-human organism or a part thereof, preferably a microorganism, a plant cell, a plant or a part thereof, as compared to a corresponding non-transformed wild type non-human organism or a part thereof; and
[16048] (b) growing the non-human organism or a part thereof under conditions which permit the production of alanine or a composition comprising alanine in said non-human organism or in the culture medium surrounding said non-human organism.

[16049] A further embodiment of the present invention relates to a process for the production of alanine, which comprises
[16050] (a) increasing or generating the activity of a pyruvate kinase non-targeted in a non-human organism or a part thereof, preferably a microorganism, a plant cell, a plant or a part thereof, as compared to a corresponding non-transformed wild type non-human organism or a part thereof; and
[16051] (b) growing the non-human organism or a part thereof under conditions which permit the production of alanine or a composition comprising alanine in said non-human organism or in the culture medium surrounding said non-human organism.

[16052] A further embodiment of the present invention relates to a process for the production of alanine, which comprises
[16053] (a) increasing or generating the activity of a beta-hydroxylase non-targeted in a non-human organism or a part thereof, preferably a microorganism, a plant cell, a plant or a part thereof, as compared to a corresponding non-transformed wild type non-human organism or a part thereof; and
[16054] (b) growing the non-human organism or a part thereof under conditions which permit the production of alanine or a composition comprising alanine in said non-human organism or in the culture medium surrounding said non-human organism.

[16055] A further embodiment of the present invention relates to a process for the production of aspartate, which comprises
[16056] (a) increasing or generating the activity of a beta-hydroxylase non-targeted in a non-human organism or a part thereof, preferably a microorganism, a plant cell, a plant or a part thereof, as compared to a corresponding non-transformed wild type non-human organism or a part thereof; and
[16057] (b) growing the non-human organism or a part thereof under conditions which permit the production of aspartate or a composition comprising aspartate in said non-human organism or in the culture medium surrounding said non-human organism.

[16058] A further embodiment of the present invention relates to a process for the production of serine, which comprises
[16059] (a) increasing or generating the activity of a beta-hydroxylase non-targeted in a non-human organism or a part thereof, preferably a microorganism, a plant cell, a plant or a part thereof, as compared to a corresponding non-transformed wild type non-human organism or a part thereof; and
[16060] (b) growing the non-human organism or a part thereof under conditions which permit the production of serine or a composition comprising serine in said non-human organism or in the culture medium surrounding said non-human organism.

[16061] A further embodiment of the present invention relates to a process for the production of aspartate, which comprises
[16062] (a) increasing or generating the activity of a elongation factor Tu non-targeted in a non-human organism or a part thereof, preferably a microorganism, a plant cell, a plant or a part thereof, as compared to a corresponding non-transformed wild type non-human organism or a part thereof; and
[16063] (b) growing the non-human organism or a part thereof under conditions which permit the production of aspartate or a composition comprising aspartate in said non-human organism or in the culture medium surrounding said non-human organism.

[16064] A further embodiment of the present invention relates to a process for the production of phenylalanine, which comprises
[16065] (a) increasing or generating the activity of a elongation factor Tu non-targeted in a non-human organism or a part thereof, preferably a microorganism, a plant cell, a plant or a part thereof, as compared to a corresponding non-transformed wild type non-human organism or a part thereof; and
[16066] (b) growing the non-human organism or a part thereof under conditions which permit the production of phenylalanine or a composition comprising phenylalanine in said non-human organism or in the culture medium surrounding said non-human organism.

[16067] A further embodiment of the present invention relates to a process for the production of serine, which comprises
[16068] (a) increasing or generating the activity of a elongation factor Tu non-targeted in a non-human organism or a part thereof, preferably a microorganism, a plant cell, a plant or a part thereof, as compared to a corresponding non-transformed wild type non-human organism or a part thereof; and
[16069] (b) growing the non-human organism or a part thereof under conditions which permit the production of serine or a composition comprising serine in said non-human organism or in the culture medium surrounding said non-human organism.

[16070] A further embodiment of the present invention relates to a process for the production of tyrosine, which comprises
[16071] (a) increasing or generating the activity of a elongation factor Tu non-targeted in a non-human organism or a part thereof, preferably a microorganism, a plant cell, a plant or a part thereof, as compared to a corresponding non-transformed wild type non-human organism or a part thereof; and
[16072] (b) growing the non-human organism or a part thereof under conditions which permit the production of tyrosine or a composition comprising tyrosine in said non-human organism or in the culture medium surrounding said non-human organism.

[16073] A further embodiment of the present invention relates to a process for the production of 5-oxoproline, which comprises
[16074] (a) increasing or generating the activity of a elongation factor Tu non-targeted in a non-human organism or a part thereof, preferably a microorganism, a plant cell, a plant or a part thereof, as compared to a corresponding non-transformed wild type non-human organism or a part thereof; and
[16075] (b) growing the non-human organism or a part thereof under conditions which permit the production of 5-oxoproline or a composition comprising 5-oxoproline in said non-human organism or in the culture medium surrounding said non-human organism.

[16076] A further embodiment of the present invention relates to a process for the production of tyrosine, which comprises
[16077] (a) increasing or generating the activity of a 30S ribosomal protein S3 non-targeted in a non-human organism or a part thereof, preferably a microorganism, a plant cell, a plant or a part thereof, as compared to a corresponding non-transformed wild type non-human organism or a part thereof; and
[16078] (b) growing the non-human organism or a part thereof under conditions which permit the production of tyrosine or a composition comprising tyrosine in said non-human organism or in the culture medium surrounding said non-human organism.

[16079] A further embodiment of the present invention relates to a process for the production of asparagine, which comprises
[16080] (a) increasing or generating the activity of a 50S ribosomal protein L14 non-targeted in a non-human organism or a part thereof, preferably a microorganism, a plant cell, a plant or a part thereof, as compared to a corresponding non-transformed wild type non-human organism or a part thereof; and
[16081] (b) growing the non-human organism or a part thereof under conditions which permit the production of asparagine or a composition comprising asparagine in said non-human organism or in the culture medium surrounding said non-human organism.

[16082] A further embodiment of the present invention relates to a process for the production of tyrosine, which comprises
[16083] (a) increasing or generating the activity of a ABC transporter permease protein non-targeted in a non-human organism or a part thereof, preferably a microorganism, a plant cell, a plant or a part thereof, as compared to a corresponding non-transformed wild type non-human organism or a part thereof; and
[16084] (b) growing the non-human organism or a part thereof under conditions which permit the production of tyrosine or a composition comprising tyrosine in said non-human organism or in the culture medium surrounding said non-human organism.

[16085] A further embodiment of the present invention relates to a process for the production of aspartate, which comprises
[16086] (a) increasing or generating the activity of a acyl-CoA synthase non-targeted in a non-human organism or a part thereof, preferably a microorganism, a plant cell, a plant or a part thereof, as compared to a corresponding non-transformed wild type non-human organism or a part thereof; and
[16087] (b) growing the non-human organism or a part thereof under conditions which permit the production of aspartate or a composition comprising aspartate in said non-human organism or in the culture medium surrounding said non-human organism.

[16088] A further embodiment of the present invention relates to a process for the production of tyrosine, which comprises
[16089] (a) increasing or generating the activity of a acyl-CoA synthase non-targeted in a non-human organism or a part thereof, preferably a microorganism, a plant cell, a plant or a part thereof, as compared to a corresponding non-transformed wild type non-human organism or a part thereof; and
[16090] (b) growing the non-human organism or a part thereof under conditions which permit the production of tyrosine or a composition comprising tyrosine in said non-human organism or in the culture medium surrounding said non-human organism.

[16091] A further embodiment of the present invention relates to a process for the production of 5-oxoproline, which comprises
[16092] (a) increasing or generating the activity of a acyl-CoA synthase non-targeted in a non-human organism or a part thereof, preferably a microorganism, a plant cell, a plant or a part thereof, as compared to a corresponding non-transformed wild type non-human organism or a part thereof; and
[16093] (b) growing the non-human organism or a part thereof under conditions which permit the production of 5-oxoproline or a composition comprising 5-oxoproline in said non-human organism or in the culture medium surrounding said non-human organism.

[16094] A further embodiment of the present invention relates to a process for the production of aspartate, which comprises
[16095] (a) increasing or generating the activity of a 2-oxoglutarate dehydrogenase E1 subunit non-targeted in a non-human organism or a part thereof, preferably a microorganism, a plant cell, a plant or a part thereof, as compared to a corresponding non-transformed wild type non-human organism or a part thereof; and
[16096] (b) growing the non-human organism or a part thereof under conditions which permit the production of aspartate or a composition comprising aspartate in said non-human organism or in the culture medium surrounding said non-human organism.

[16097] A further embodiment of the present invention relates to a process for the production of 5-oxoproline, which comprises
[16098] (a) increasing or generating the activity of a 2-oxoglutarate dehydrogenase E1 subunit non-targeted in a non-human organism or a part thereof, preferably a microorganism, a plant cell, a plant or a part thereof, as compared to a corresponding non-transformed wild type non-human organism or a part thereof; and
[16099] (b) growing the non-human organism or a part thereof under conditions which permit the production of 5-oxoproline or a composition comprising 5-oxoproline in said non-human organism or in the culture medium surrounding said non-human organism.

[16100] A further embodiment of the present invention relates to a process for the production of serine, which comprises
[16101] (a) increasing or generating the activity of a GDP-mannose dehydrogenase non-targeted in a non-human organism or a part thereof, preferably a microorganism, a plant cell, a plant or a part thereof, as compared to a corresponding non-transformed wild type non-human organism or a part thereof; and
[16102] (b) growing the non-human organism or a part thereof under conditions which permit the production of serine or a composition comprising serine in said non-human organism or in the culture medium surrounding said non-human organism.

[16103] A further embodiment of the present invention relates to a process for the production of serine, which comprises
[16104] (a) increasing or generating the activity of a transcriptional regulator non-targeted in a non-human organism or a part thereof, preferably a microorganism, a plant cell, a plant or a part thereof, as compared to a corresponding non-transformed wild type non-human organism or a part thereof; and
[16105] (b) growing the non-human organism or a part thereof under conditions which permit the production of serine or a composition comprising serine in said non-human organism or in the culture medium surrounding said non-human organism.

[16106] A further embodiment of the present invention relates to a process for the production of phenylalanine, which comprises
[16107] (a) increasing or generating the activity of a transcriptional regulator non-targeted in a non-human organism or a part thereof, preferably a microorganism, a plant cell, a plant or a part thereof, as compared to a corresponding non-transformed wild type non-human organism or a part thereof; and
[16108] (b) growing the non-human organism or a part thereof under conditions which permit the production of phenylalanine or a composition comprising phenylalanine in said non-human organism or in the culture medium surrounding said non-human organism.

[16109] A further embodiment of the present invention relates to a process for the production of aspartate, which comprises
[16110] (a) increasing or generating the activity of a oxidoreductase non-targeted in a non-human organism or a part thereof, preferably a microorganism, a plant cell, a plant or a part thereof, as compared to a corresponding non-transformed wild type non-human organism or a part thereof; and
[16111] (b) growing the non-human organism or a part thereof under conditions which permit the production of aspartate or a composition comprising aspartate in said non-human organism or in the culture medium surrounding said non-human organism.

[16112] A further embodiment of the present invention relates to a process for the production of tyrosine, which comprises
[16113] (a) increasing or generating the activity of a oxidoreductase non-targeted in a non-human organism or a part thereof, preferably a microorganism, a plant cell, a plant or a part thereof, as compared to a corresponding non-transformed wild type non-human organism or a part thereof; and
[16114] (b) growing the non-human organism or a part thereof under conditions which permit the production of tyrosine or a composition comprising tyrosine in said non-human organism or in the culture medium surrounding said non-human organism.

[16115] A further embodiment of the present invention relates to a process for the production of citrulline, which comprises
[16116] (a) increasing or generating the activity of a lysyl-tRNA synthetase non-targeted in a non-human organism or a part thereof, preferably a microorganism, a plant cell, a plant or a part thereof, as compared to a corresponding non-transformed wild type non-human organism or a part thereof; and
[16117] (b) growing the non-human organism or a part thereof under conditions which permit the production of citrulline or a composition comprising citrulline in said non-human organism or in the culture medium surrounding said non-human organism.

[16118] A further embodiment of the present invention relates to a process for the production of asparagine, which comprises
[16119] (a) increasing or generating the activity of a ABC transporter component non-targeted in a non-human organism or a part thereof, preferably a microorganism, a plant cell, a plant or a part thereof, as compared to a corresponding non-transformed wild type non-human organism or a part thereof; and
[16120] (b) growing the non-human organism or a part thereof under conditions which permit the production of asparagine or a composition comprising asparagine in said non-human organism or in the culture medium surrounding said non-human organism.

[16121] A further embodiment of the present invention relates to a process for the production of aspartate, which comprises
[16122] (a) increasing or generating the activity of a glucose-1-phosphate cytidylyltransferase non-targeted in a non-human organism or a part thereof, preferably a microorganism, a plant cell, a plant or a part thereof, as compared to a corresponding non-transformed wild type non-human organism or a part thereof; and
[16123] (b) growing the non-human organism or a part thereof under conditions which permit the production of aspartate or a composition comprising aspartate in said non-human organism or in the culture medium surrounding said non-human organism.

[16124] A further embodiment of the present invention relates to a process for the production of glycine, which comprises
[16125] (a) increasing or generating the activity of a CDP-glucose-4,6-dehydratase non-targeted in a non-human organism or a part thereof, preferably a microorganism, a plant cell, a plant or a part thereof, as compared to a corresponding non-transformed wild type non-human organism or a part thereof; and
[16126] (b) growing the non-human organism or a part thereof under conditions which permit the production of glycine or a composition comprising glycine in said non-human organism or in the culture medium surrounding said non-human organism.

[16127] A further embodiment of the present invention relates to a process for the production of phenylalanine, which comprises
[16128] (a) increasing or generating the activity of a enoyl-CoA hydratase non-targeted in a non-human organism or a part thereof, preferably a microorganism, a plant cell, a plant or a part thereof, as compared to a corresponding non-transformed wild type non-human organism or a part thereof; and
[16129] (b) growing the non-human organism or a part thereof under conditions which permit the production of phenylalanine or a composition comprising phenylalanine in said non-human organism or in the culture medium surrounding said non-human organism.

[16130] A further embodiment of the present invention relates to a process for the production of alanine, which comprises
[16131] (a) increasing or generating the activity of a glutathione peroxidase non-targeted in a non-human organism or a part thereof, preferably a microorganism, a plant cell, a plant or a part thereof, as compared to a corresponding non-transformed wild type non-human organism or a part thereof; and
[16132] (b) growing the non-human organism or a part thereof under conditions which permit the production of alanine or a composition comprising alanine in said non-human organism or in the culture medium surrounding said non-human organism.

[16133] A further embodiment of the present invention relates to a process for the production of asparagine, which comprises
[16134] (a) increasing or generating the activity of a aminotransferase non-targeted in a non-human organism or a part thereof, preferably a microorganism, a plant cell, a plant or a part thereof, as compared to a corresponding non-transformed wild type non-human organism or a part thereof; and
[16135] (b) growing the non-human organism or a part thereof under conditions which permit the production of asparagine or a composition comprising asparagine in said non-human organism or in the culture medium surrounding said non-human organism.

[16136] A further embodiment of the present invention relates to a process for the production of phenylalanine, which comprises
[16137] (a) increasing or generating the activity of a aminotransferase non-targeted in a non-human organism or a part thereof, preferably a microorganism, a plant cell, a plant or a part thereof, as compared to a corresponding non-transformed wild type non-human organism or a part thereof; and
[16138] (b) growing the non-human organism or a part thereof under conditions which permit the production of phenylalanine or a composition comprising phenylalanine in said non-human organism or in the culture medium surrounding said non-human organism.

[16139] A further embodiment of the present invention relates to a process for the production of tyrosine, which comprises
[16140] (a) increasing or generating the activity of a NADH-quinone oxidoreductase subunit non-targeted in a non-human organism or a part thereof, preferably a microorganism, a plant cell, a plant or a part thereof, as compared to a corresponding non-transformed wild type non-human organism or a part thereof; and
[16141] (b) growing the non-human organism or a part thereof under conditions which permit the production of tyrosine or a composition comprising tyrosine in said non-human organism or in the culture medium surrounding said non-human organism.

[16142] A further embodiment of the present invention relates to a process for the production of phenylalanine, which comprises
[16143] (a) increasing or generating the activity of a glutamate-ammonia-ligase non-targeted in a non-human organism or a part thereof, preferably a microorganism, a plant cell, a plant or a part thereof, as compared to a corresponding non-transformed wild type non-human organism or a part thereof; and
[16144] (b) growing the non-human organism or a part thereof under conditions which permit the production of phenylalanine or a composition comprising phenylalanine in said non-human organism or in the culture medium surrounding said non-human organism.

[16145] A further embodiment of the present invention relates to a process for the production of tyrosine, which comprises
[16146] (a) increasing or generating the activity of a glutamate-ammonia-ligase non-targeted in a non-human organism or a part thereof, preferably a microorganism, a plant cell, a plant or a part thereof, as compared to a corresponding non-transformed wild type non-human organism or a part thereof; and
[16147] (b) growing the non-human organism or a part thereof under conditions which permit the production of tyrosine or a composition comprising tyrosine in said non-human organism or in the culture medium surrounding said non-human organism.

[16148] A further embodiment of the present invention relates to a process for the production of 5-oxoproline, which comprises
[16149] (a) increasing or generating the activity of a RNA polymerase sigma factor non-targeted in a non-human organism or a part thereof, preferably a microorganism, a plant cell, a plant or a part thereof, as compared to a corresponding non-transformed wild type non-human organism or a part thereof; and
[16150] (b) growing the non-human organism or a part thereof under conditions which permit the production of 5-oxoproline or a composition comprising 5-oxoproline in said non-human organism or in the culture medium surrounding said non-human organism.

[16151] A further embodiment of the present invention relates to a process for the production of phenylalanine, which comprises
[16152] (a) increasing or generating the activity of a hydrolase non-targeted in a non-human organism or a part thereof, preferably a microorganism, a plant cell, a plant or a part thereof, as compared to a corresponding non-transformed wild type non-human organism or a part thereof; and
[16153] (b) growing the non-human organism or a part thereof under conditions which permit the production of phenylalanine or a composition comprising phenylalanine in said non-human organism or in the culture medium surrounding said non-human organism.

[16154] A further embodiment of the present invention relates to a process for the production of tyrosine, which comprises
[16155] (a) increasing or generating the activity of a hydrolase non-targeted in a non-human organism or a part thereof, preferably a microorganism, a plant cell, a plant or a part thereof, as compared to a corresponding non-transformed wild type non-human organism or a part thereof; and
[16156] (b) growing the non-human organism or a part thereof under conditions which permit the production of tyrosine or a composition comprising tyrosine in said non-human organism or in the culture medium surrounding said non-human organism.

[16157] A further embodiment of the present invention relates to a process for the production of 5-oxoproline, which comprises
[16158] (a) increasing or generating the activity of a hydrolase non-targeted in a non-human organism or a part thereof, preferably a microorganism, a plant cell, a plant or a part thereof, as compared to a corresponding non-transformed wild type non-human organism or a part thereof; and
[16159] (b) growing the non-human organism or a part thereof under conditions which permit the production of 5-oxoproline or a composition comprising 5-oxoproline in said non-human organism or in the culture medium surrounding said non-human organism.

[16160] A further embodiment of the present invention relates to a process for the production of aspartate, which comprises
[16161] (a) increasing or generating the activity of a glutamate-ammonia-ligase non-targeted in a non-human organism or a part thereof, preferably a microorganism, a plant cell, a plant or a part thereof, as compared to a corresponding non-transformed wild type non-human organism or a part thereof; and
[16162] (b) growing the non-human organism or a part thereof under conditions which permit the production of aspartate or a composition comprising aspartate in said non-human organism or in the culture medium surrounding said non-human organism.

[16163] A further embodiment of the present invention relates to a process for the production of serine, which comprises
[16164] (a) increasing or generating the activity of a glutamate-ammonia-ligase non-targeted in a non-human organism or a part thereof, preferably a microorganism, a plant cell, a plant or a part thereof, as compared to a corresponding non-transformed wild type non-human organism or a part thereof; and
[16165] (b) growing the non-human organism or a part thereof under conditions which permit the production of serine or a composition comprising serine in said non-human organism or in the culture medium surrounding said non-human organism.

[16166] A further embodiment of the present invention relates to a process for the production of tyrosine, which comprises
[16167] (a) increasing or generating the activity of a glutamate-ammonia-ligase non-targeted in a non-human organism or a part thereof, preferably a microorganism, a plant cell, a plant or a part thereof, as compared to a corresponding non-transformed wild type non-human organism or a part thereof; and
[16168] (b) growing the non-human organism or a part thereof under conditions which permit the production of tyrosine or a composition comprising tyrosine in said non-human organism or in the culture medium surrounding said non-human organism.

[16169] A further embodiment of the present invention relates to a process for the production of phenylalanine, which comprises
[16170] (a) increasing or generating the activity of a fumarylacetoacetate hydrolase non-targeted in a non-human organism or a part thereof, preferably a microorganism, a plant cell, a plant or a part thereof, as compared to a corresponding non-transformed wild type non-human organism or a part thereof; and
[16171] (b) growing the non-human organism or a part thereof under conditions which permit the production of phenylalanine or a composition comprising phenylalanine in said non-human organism or in the culture medium surrounding said non-human organism.

[16172] A further embodiment of the present invention relates to a process for the production of tyrosine, which comprises
[16173] (a) increasing or generating the activity of a fumarylacetoacetate hydrolase non-targeted in a non-human organism or a part thereof, preferably a microorganism, a plant cell, a plant or a part thereof, as compared to a corresponding non-transformed wild type non-human organism or a part thereof; and
[16174] (b) growing the non-human organism or a part thereof under conditions which permit the production of tyrosine or a composition comprising tyrosine in said non-human organism or in the culture medium surrounding said non-human organism.

[16175] A further embodiment of the present invention relates to a process for the production of serine, which comprises
[16176] (a) increasing or generating the activity of a HesB/YadR/YfhF family protein non-targeted in a non-human organism or a part thereof, preferably a microorganism, a plant cell, a plant or a part thereof, as compared to a corresponding non-transformed wild type non-human organism or a part thereof; and
[16177] (b) growing the non-human organism or a part thereof under conditions which permit the production of serine or a composition comprising serine in said non-human organism or in the culture medium surrounding said non-human organism.

[16178] A further embodiment of the present invention relates to a process for the production of aspartate, which comprises
[16179] (a) increasing or generating the activity of a peptidase non-targeted in a non-human organism or a part thereof, preferably a microorganism, a plant cell, a plant or a part thereof, as compared to a corresponding non-transformed wild type non-human organism or a part thereof; and
[16180] (b) growing the non-human organism or a part thereof under conditions which permit the production of aspartate or a composition comprising aspartate in said non-human organism or in the culture medium surrounding said non-human organism.

[16181] A further embodiment of the present invention relates to a process for the production of aspartate, which comprises
[16182] (a) increasing or generating the activity of a L-aspartate oxidase non-targeted in a non-human organism or a part thereof, preferably a microorganism, a plant cell, a plant or a part thereof, as compared to a corresponding non-transformed wild type non-human organism or a part thereof; and
[16183] (b) growing the non-human organism or a part thereof under conditions which permit the production of aspartate or a composition comprising aspartate in said non-human organism or in the culture medium surrounding said non-human organism.

[16184] A further embodiment of the present invention relates to a process for the production of phenylalanine, which comprises
[16185] (a) increasing or generating the activity of a Chaperone protein CIpB non-targeted in a non-human organism or a part thereof, preferably a microorganism, a plant cell, a plant or a part thereof, as compared to a corresponding non-transformed wild type non-human organism or a part thereof; and
[16186] (b) growing the non-human organism or a part thereof under conditions which permit the production of phenylalanine or a composition comprising phenylalanine in said non-human organism or in the culture medium surrounding said non-human organism.

[16187] A further embodiment of the present invention relates to a process for the production of phenylalanine, which comprises
[16188] (a) increasing or generating the activity of a electron transfer flavoprotein subunit beta non-targeted in a non-human organism or a part thereof, preferably a microorganism, a plant cell, a plant or a part thereof, as compared to a corresponding non-transformed wild type non-human organism or a part thereof; and
[16189] (b) growing the non-human organism or a part thereof under conditions which permit the production of phenylalanine or a composition comprising phenylalanine in said non-human organism or in the culture medium surrounding said non-human organism.

[16190] A further embodiment of the present invention relates to a process for the production of tyrosine, which comprises
[16191] (a) increasing or generating the activity of a electron transfer flavoprotein subunit beta non-targeted in a non-human organism or a part thereof, preferably a microorganism, a plant cell, a plant or a part thereof, as compared to a corresponding non-transformed wild type non-human organism or a part thereof; and
[16192] (b) growing the non-human organism or a part thereof under conditions which permit the production of tyrosine or a composition comprising tyrosine in said non-human organism or in the culture medium surrounding said non-human organism.

[16193] A further embodiment of the present invention relates to a process for the production of citrulline, which comprises
[16194] (a) increasing or generating the activity of a AX653549-protein non-targeted in a non-human organism or a part thereof, preferably a microorganism, a plant cell, a plant or a part thereof, as compared to a corresponding non-transformed wild type non-human organism or a part thereof; and
[16195] (b) growing the non-human organism or a part thereof under conditions which permit the production of citrulline or a composition comprising citrulline in said non-human organism or in the culture medium surrounding said non-human organism.

[16196] A further embodiment of the present invention relates to a process for the production of 5-oxoproline, which comprises
[16197] (a) increasing or generating the activity of a AX653549-protein non-targeted in a non-human organism or a part thereof, preferably a microorganism, a plant cell, a plant or a part thereof, as compared to a corresponding non-transformed wild type non-human organism or a part thereof; and
[16198] (b) growing the non-human organism or a part thereof under conditions which permit the production of 5-oxoproline or a composition comprising 5-oxoproline in said non-human organism or in the culture medium surrounding said non-human organism.

[16199] A further embodiment of the present invention relates to a process for the production of aspartate, which comprises
[16200] (a) increasing or generating the activity of a AY087308-protein non-targeted in a non-human organism or a part thereof, preferably a microorganism, a plant cell, a plant or a part thereof, as compared to a corresponding non-transformed wild type non-human organism or a part thereof; and
[16201] (b) growing the non-human organism or a part thereof under conditions which permit the production of aspartate or a composition comprising aspartate in said non-human organism or in the culture medium surrounding said non-human organism.

[16202] A further embodiment of the present invention relates to a process for the production of 5-oxoproline, which comprises
[16203] (a) increasing or generating the activity of a AY087308-protein non-targeted in a non-human organism or a part thereof, preferably a microorganism, a plant cell, a plant or a part thereof, as compared to a corresponding non-transformed wild type non-human organism or a part thereof; and
[16204] (b) growing the non-human organism or a part thereof under conditions which permit the production of 5-oxoproline or a composition comprising 5-oxoproline in said non-human organism or in the culture medium surrounding said non-human organism.

[16205] A further embodiment of the present invention relates to a process for the production of alanine, which comprises
[16206] (a) increasing or generating the activity of a threonine synthase non-targeted in a non-human organism or a part thereof, preferably a microorganism, a plant cell, a plant or a part thereof, as compared to a corresponding non-transformed wild type non-human organism or a part thereof; and
[16207] (b) growing the non-human organism or a part thereof under conditions which permit the production of alanine or a composition comprising alanine in said non-human organism or in the culture medium surrounding said non-human organism.

[16208] A further embodiment of the present invention relates to a process for the production of phenylalanine, which comprises
[16209] (a) increasing or generating the activity of a threonine synthase non-targeted in a non-human organism or a part thereof, preferably a microorganism, a plant cell, a plant or a part thereof, as compared to a corresponding non-transformed wild type non-human organism or a part thereof; and
[16210] (b) growing the non-human organism or a part thereof under conditions which permit the production of phenylalanine or a composition comprising phenylalanine in said non-human organism or in the culture medium surrounding said non-human organism.

[16211] A further embodiment of the present invention relates to a process for the production of serine, which comprises
[16212] (a) increasing or generating the activity of a threonine synthase non-targeted in a non-human organism or a part thereof, preferably a microorganism, a plant cell, a plant or a part thereof, as compared to a corresponding non-transformed wild type non-human organism or a part thereof; and
[16213] (b) growing the non-human organism or a part thereof under conditions which permit the production of serine or a composition comprising serine in said non-human organism or in the culture medium surrounding said non-human organism.

[16214] A further embodiment of the present invention relates to a process for the production of tyrosine, which comprises
[16215] (a) increasing or generating the activity of a threonine synthase non-targeted in a non-human organism or a part thereof, preferably a microorganism, a plant cell, a plant or a part thereof, as compared to a corresponding non-transformed wild type non-human organism or a part thereof; and
[16216] (b) growing the non-human organism or a part thereof under conditions which permit the production of tyrosine or a composition comprising tyrosine in said non-human organism or in the culture medium surrounding said non-human organism.

[16217] A further embodiment of the present invention relates to a process for the production of 5-oxoproline, which comprises
[16218] (a) increasing or generating the activity of a threonine synthase non-targeted in a non-human organism or a part thereof, preferably a microorganism, a plant cell, a plant or a part thereof, as compared to a corresponding non-transformed wild type non-human organism or a part thereof; and
[16219] (b) growing the non-human organism or a part thereof under conditions which permit the production of 5-oxoproline or a composition comprising 5-oxoproline in said non-human organism or in the culture medium surrounding said non-human organism.

[16220] A further embodiment of the present invention relates to a process for the production of phenylalanine, which comprises
[16221] (a) increasing or generating the activity of a acetolactate synthase small subunit non-targeted in a non-human organism or a part thereof, preferably a microorganism, a plant cell, a plant or a part thereof, as compared to a corresponding non-transformed wild type non-human organism or a part thereof; and
[16222] (b) growing the non-human organism or a part thereof under conditions which permit the production of phenylalanine or a composition comprising phenylalanine in said non-human organism or in the culture medium surrounding said non-human organism.

[16223] A further embodiment of the present invention relates to a process for the production of glycine, which comprises
[16224] (a) increasing or generating the activity of a glucose dehydrogenase non-targeted in a non-human organism or a part thereof, preferably a microorganism, a plant cell, a plant or a part thereof, as compared to a corresponding non-transformed wild type non-human organism or a part thereof; and
[16225] (b) growing the non-human organism or a part thereof under conditions which permit the production of glycine or a composition comprising glycine in said non-human organism or in the culture medium surrounding said non-human organism.

[16226] A further embodiment of the present invention relates to a process for the production of phenylalanine, which comprises
[16227] (a) increasing or generating the activity of a glucose dehydrogenase non-targeted in a non-human organism or a part thereof, preferably a microorganism, a plant cell, a plant or a part thereof, as compared to a corresponding non-transformed wild type non-human organism or a part thereof; and
[16228] (b) growing the non-human organism or a part thereof under conditions which permit the production of phenylalanine or a composition comprising phenylalanine in said non-human organism or in the culture medium surrounding said non-human organism.

[16229] A further embodiment of the present invention relates to a process for the production of serine, which comprises
[16230] (a) increasing or generating the activity of a glucose dehydrogenase non-targeted in a non-human organism or a part thereof, preferably a microorganism, a plant cell, a plant or a part thereof, as compared to a corresponding non-transformed wild type non-human organism or a part thereof; and
[16231] (b) growing the non-human organism or a part thereof under conditions which permit the production of serine or a composition comprising serine in said non-human organism or in the culture medium surrounding said non-human organism.

[16232] A further embodiment of the present invention relates to a process for the production of tyrosine, which comprises
[16233] (a) increasing or generating the activity of a glucose dehydrogenase non-targeted in a non-human organism or a part thereof, preferably a microorganism, a plant cell, a plant or a part thereof, as compared to a corresponding non-transformed wild type non-human organism or a part thereof; and
[16234] (b) growing the non-human organism or a part thereof under conditions which permit the production of tyrosine or a composition comprising tyrosine in said non-human organism or in the culture medium surrounding said non-human organism.

[16235] A further embodiment of the present invention relates to a process for the production of asparagine, which comprises
[16236] (a) increasing or generating the activity of a aspartate 1-decarboxylase non-targeted in a non-human organism or a part thereof, preferably a microorganism, a plant cell, a plant or a part thereof, as compared to a corresponding non-transformed wild type non-human organism or a part thereof; and
[16237] (b) growing the non-human organism or a part thereof under conditions which permit the production of asparagine or a composition comprising asparagine in said non-human organism or in the culture medium surrounding said non-human organism.

[16238] A further embodiment of the present invention relates to a process for the production of serine, which comprises
[16239] (a) increasing or generating the activity of a aspartate 1-decarboxylase non-targeted in a non-human organism or a part thereof, preferably a microorganism, a plant cell, a plant or a part thereof, as compared to a corresponding non-transformed wild type non-human organism or a part thereof; and
[16240] (b) growing the non-human organism or a part thereof under conditions which permit the production of serine or a composition comprising serine in said non-human organism or in the culture medium surrounding said non-human organism.

[16241] A further embodiment of the present invention relates to a process for the production of alanine, which comprises
[16242] (a) increasing or generating the activity of a serine protease non-targeted in a non-human organism or a part thereof, preferably a microorganism, a plant cell, a plant or a part thereof, as compared to a corresponding non-transformed wild type non-human organism or a part thereof; and
[16243] (b) growing the non-human organism or a part thereof under conditions which permit the production of alanine or a composition comprising alanine in said non-human organism or in the culture medium surrounding said non-human organism.

[16244] A further embodiment of the present invention relates to a process for the production of serine, which comprises
[16245] (a) increasing or generating the activity of a serine protease non-targeted in a non-human organism or a part thereof, preferably a microorganism, a plant cell, a plant or a part thereof, as compared to a corresponding non-transformed wild type non-human organism or a part thereof; and
[16246] (b) growing the non-human organism or a part thereof under conditions which permit the production of serine or a composition comprising serine in said non-human organism or in the culture medium surrounding said non-human organism.

[16247] A further embodiment of the present invention relates to a process for the production of tyrosine, which comprises
[16248] (a) increasing or generating the activity of a serine protease non-targeted in a non-human organism or a part thereof, preferably a microorganism, a plant cell, a plant or a part thereof, as compared to a corresponding non-transformed wild type non-human organism or a part thereof; and
[16249] (b) growing the non-human organism or a part thereof under conditions which permit the production of tyrosine or a composition comprising tyrosine in said non-human organism or in the culture medium surrounding said non-human organism.

[16250] A further embodiment of the present invention relates to a process for the production of serine, which comprises
[16251] (a) increasing or generating the activity of a acyl-CoA dehydrogenase non-targeted in a non-human organism or a part thereof, preferably a microorganism, a plant cell, a plant or a part thereof, as compared to a corresponding non-transformed wild type non-human organism or a part thereof; and
[16252] (b) growing the non-human organism or a part thereof under conditions which permit the production of serine or a composition comprising serine in said non-human organism or in the culture medium surrounding said non-human organism.

[16253] A further embodiment of the present invention relates to a process for the production of tyrosine, which comprises
[16254] (a) increasing or generating the activity of a acyl-CoA dehydrogenase non-targeted in a non-human organism or a part thereof, preferably a microorganism, a plant cell, a plant or a part thereof, as compared to a corresponding non-transformed wild type non-human organism or a part thereof; and
[16255] (b) growing the non-human organism or a part thereof under conditions which permit the production of tyrosine or a composition comprising tyrosine in said non-human organism or in the culture medium surrounding said non-human organism.

[16256] A further embodiment of the present invention relates to a process for the production of tyrosine, which comprises
[16257] (a) increasing or generating the activity of a beta-galactosidase non-targeted in a non-human organism or a part thereof, preferably a microorganism, a plant cell, a plant or a part thereof, as compared to a corresponding non-transformed wild type non-human organism or a part thereof; and
[16258] (b) growing the non-human organism or a part thereof under conditions which permit the production of tyrosine or a composition comprising tyrosine in said non-human organism or in the culture medium surrounding said non-human organism.

[16259] A further embodiment of the present invention relates to a process for the production of 5-oxoproline, which comprises
[16260] (a) increasing or generating the activity of a beta-galactosidase non-targeted in a non-human organism or a part thereof, preferably a microorganism, a plant cell, a plant or a part thereof, as compared to a corresponding non-transformed wild type non-human organism or a part thereof; and
[16261] (b) growing the non-human organism or a part thereof under conditions which permit the production of 5-oxoproline or a composition comprising 5-oxoproline in said non-human organism or in the culture medium surrounding said non-human organism.

[16262] A further embodiment of the present invention relates to a process for the production of glycine, which comprises
[16263] (a) increasing or generating the activity of a 2,3-dihydroxyphenylpropionate 1,2-dioxygenase non-targeted in a non-human organism or a part thereof, preferably a microorganism, a plant cell, a plant or a part thereof, as compared to a corresponding non-transformed wild type non-human organism or a part thereof; and
[16264] (b) growing the non-human organism or a part thereof under conditions which permit the production of glycine or a composition comprising glycine in said non-human organism or in the culture medium surrounding said non-human organism.

[16265] A further embodiment of the present invention relates to a process for the production of phenylalanine, which comprises
[16266] (a) increasing or generating the activity of a 2,3-dihydroxyphenylpropionate 1,2-dioxygenase non-targeted in a non-human organism or a part thereof, preferably a microorganism, a plant cell, a plant or a part thereof, as compared to a corresponding non-transformed wild type non-human organism or a part thereof; and
[16267] (b) growing the non-human organism or a part thereof under conditions which permit the production of phenylalanine or a composition comprising phenylalanine in said non-human organism or in the culture medium surrounding said non-human organism.

[16268] A further embodiment of the present invention relates to a process for the production of serine, which comprises
[16269] (a) increasing or generating the activity of a 2,3-dihydroxyphenylpropionate 1,2-dioxygenase non-targeted in a non-human organism or a part thereof, preferably a microorganism, a plant cell, a plant or a part thereof, as compared to a corresponding non-transformed wild type non-human organism or a part thereof; and
[16270] (b) growing the non-human organism or a part thereof under conditions which permit the production of serine or a composition comprising serine in said non-human organism or in the culture medium surrounding said non-human organism.

[16271] A further embodiment of the present invention relates to a process for the production of tyrosine, which comprises
[16272] (a) increasing or generating the activity of a 2,3-dihydroxyphenylpropionate 1,2-dioxygenase non-targeted in a non-human organism or a part thereof, preferably a microorganism, a plant cell, a plant or a part thereof, as compared to a corresponding non-transformed wild type non-human organism or a part thereof; and
[16273] (b) growing the non-human organism or a part thereof under conditions which permit the production of tyrosine or a composition comprising tyrosine in said non-human organism or in the culture medium surrounding said non-human organism.

[16274] A further embodiment of the present invention relates to a process for the production of aspartate, which comprises
[16275] (a) increasing or generating the activity of a b0391-protein non-targeted in a non-human organism or a part thereof, preferably a microorganism, a plant cell, a plant or a part thereof, as compared to a corresponding non-transformed wild type non-human organism or a part thereof; and
[16276] (b) growing the non-human organism or a part thereof under conditions which permit the production of aspartate or a composition comprising aspartate in said non-human organism or in the culture medium surrounding said non-human organism.

[16277] A further embodiment of the present invention relates to a process for the production of asparagine, which comprises
[16278] (a) increasing or generating the activity of a ATP-binding component of a transport system non-targeted in a non-human organism or a part thereof, preferably a microorganism, a plant cell, a plant or a part thereof, as compared to a corresponding non-transformed wild type non-human organism or a part thereof; and
[16279] (b) growing the non-human organism or a part thereof under conditions which permit the production of asparagine or a composition comprising asparagine in said non-human organism or in the culture medium surrounding said non-human organism.

[16280] A further embodiment of the present invention relates to a process for the production of aspartate, which comprises
[16281] (a) increasing or generating the activity of a ATP-binding component of a transport system non-targeted in a non-human organism or a part thereof, preferably a microorganism, a plant cell, a plant or a part thereof, as compared to a corresponding non-transformed wild type non-human organism or a part thereof; and
[16282] (b) growing the non-human organism or a part thereof under conditions which permit the production of aspartate or a composition comprising aspartate in said non-human organism or in the culture medium surrounding said non-human organism.

[16283] A further embodiment of the present invention relates to a process for the production of phenylalanine, which comprises
[16284] (a) increasing or generating the activity of a ATP-binding component of a transport system non-targeted in a non-human organism or a part thereof, preferably a microorganism, a plant cell, a plant or a part thereof, as compared to a corresponding non-transformed wild type non-human organism or a part thereof; and
[16285] (b) growing the non-human organism or a part thereof under conditions which permit the production of phenylalanine or a composition comprising phenylalanine in said non-human organism or in the culture medium surrounding said non-human organism.

[16286] A further embodiment of the present invention relates to a process for the production of serine, which comprises
[16287] (a) increasing or generating the activity of a ATP-binding component of a transport system non-targeted in a non-human organism or a part thereof, preferably a microorganism, a plant cell, a plant or a part thereof, as compared to a corresponding non-transformed wild type non-human organism or a part thereof; and
[16288] (b) growing the non-human organism or a part thereof under conditions which permit the production of serine or a composition comprising serine in said non-human organism or in the culture medium surrounding said non-human organism.

[16289] A further embodiment of the present invention relates to a process for the production of tyrosine, which comprises
[16290] (a) increasing or generating the activity of a ATP-binding component of a transport system non-targeted in a non-human organism or a part thereof, preferably a microorganism, a plant cell, a plant or a part thereof, as compared to a corresponding non-transformed wild type non-human organism or a part thereof; and
[16291] (b) growing the non-human organism or a part thereof under conditions which permit the production of tyrosine or a composition comprising tyrosine in said non-human organism or in the culture medium surrounding said non-human organism.

[16292] A further embodiment of the present invention relates to a process for the production of alanine, which comprises
[16293] (a) increasing or generating the activity of a b0456-protein non-targeted in a non-human organism or a part thereof, preferably a microorganism, a plant cell, a plant or a part thereof, as compared to a corresponding non-transformed wild type non-human organism or a part thereof; and
[16294] (b) growing the non-human organism or a part thereof under conditions which permit the production of alanine or a composition comprising alanine in said non-human organism or in the culture medium surrounding said non-human organism.

[16295] A further embodiment of the present invention relates to a process for the production of aspartate, which comprises
[16296] (a) increasing or generating the activity of a membrane transport protein non-targeted in a non-human organism or a part thereof, preferably a microorganism, a plant cell, a plant or a part thereof, as compared to a corresponding non-transformed wild type non-human organism or a part thereof; and
[16297] (b) growing the non-human organism or a part thereof under conditions which permit the production of aspartate or a composition comprising aspartate in said non-human organism or in the culture medium surrounding said non-human organism.

[16298] A further embodiment of the present invention relates to a process for the production of phenylalanine, which comprises
[16299] (a) increasing or generating the activity of a membrane transport protein non-targeted in a non-human organism or a part thereof, preferably a microorganism, a plant cell, a plant or a part thereof, as compared to a corresponding non-transformed wild type non-human organism or a part thereof; and
[16300] (b) growing the non-human organism or a part thereof under conditions which permit the production of phenylalanine or a composition comprising phenylalanine in said non-human organism or in the culture medium surrounding said non-human organism.

[16301] A further embodiment of the present invention relates to a process for the production of tyrosine, which comprises
[16302] (a) increasing or generating the activity of a membrane transport protein non-targeted in a non-human organism or a part thereof, preferably a microorganism, a plant cell, a plant or a part thereof, as compared to a corresponding non-transformed wild type non-human organism or a part thereof; and
[16303] (b) growing the non-human organism or a part thereof under conditions which permit the production of tyrosine or a composition comprising tyrosine in said non-human organism or in the culture medium surrounding said non-human organism.

[16304] A further embodiment of the present invention relates to a process for the production of homoserine, which comprises
[16305] (a) increasing or generating the activity of a b0518-protein non-targeted in a non-human organism or a part thereof, preferably a microorganism, a plant cell, a plant or a part thereof, as compared to a corresponding non-transformed wild type non-human organism or a part thereof; and
[16306] (b) growing the non-human organism or a part thereof under conditions which permit the production of homoserine or a composition comprising homoserine in said non-human organism or in the culture medium surrounding said non-human organism.

[16307] A further embodiment of the present invention relates to a process for the production of aspartate, which comprises
[16308] (a) increasing or generating the activity of a isochorismate synthase non-targeted in a non-human organism or a part thereof, preferably a microorganism, a plant cell, a plant or a part thereof, as compared to a corresponding non-transformed wild type non-human organism or a part thereof; and
[16309] (b) growing the non-human organism or a part thereof under conditions which permit the production of aspartate or a composition comprising aspartate in said non-human organism or in the culture medium surrounding said non-human organism.

[16310] A further embodiment of the present invention relates to a process for the production of phenylalanine, which comprises
[16311] (a) increasing or generating the activity of a isochorismate synthase non-targeted in a non-human organism or a part thereof, preferably a microorganism, a plant cell, a plant or a part thereof, as compared to a corresponding non-transformed wild type non-human organism or a part thereof; and
[16312] (b) growing the non-human organism or a part thereof under conditions which permit the production of phenylalanine or a composition comprising phenylalanine in said non-human organism or in the culture medium surrounding said non-human organism.

[16313] A further embodiment of the present invention relates to a process for the production of serine, which comprises
[16314] (a) increasing or generating the activity of a isochorismate synthase non-targeted in a non-human organism or a part thereof, preferably a microorganism, a plant cell, a plant or a part thereof, as compared to a corresponding non-transformed wild type non-human organism or a part thereof; and
[16315] (b) growing the non-human organism or a part thereof under conditions which permit the production of serine or a composition comprising serine in said non-human organism or in the culture medium surrounding said non-human organism.

[16316] A further embodiment of the present invention relates to a process for the production of tyrosine, which comprises
[16317] (a) increasing or generating the activity of a isochorismate synthase non-targeted in a non-human organism or a part thereof, preferably a microorganism, a plant cell, a plant or a part thereof, as compared to a corresponding non-transformed wild type non-human organism or a part thereof; and
[16318] (b) growing the non-human organism or a part thereof under conditions which permit the production of tyrosine or a composition comprising tyrosine in said non-human organism or in the culture medium surrounding said non-human organism.

[16319] A further embodiment of the present invention relates to a process for the production of 3,4-dihydroxyphenylalanine (dopa), which comprises
[16320] (a) increasing or generating the activity of a isochorismate synthase non-targeted in a non-human organism or a part thereof, preferably a microorganism, a plant cell, a plant or a part thereof, as compared to a corresponding non-transformed wild type non-human organism or a part thereof; and
[16321] (b) growing the non-human organism or a part thereof under conditions which permit the production of 3,4-dihydroxyphenylalanine (dopa) or a composition comprising 3,4-dihydroxyphenylalanine (dopa) in said non-human organism or in the culture medium surrounding said non-human organism.

[16322] A further embodiment of the present invention relates to a process for the production of 5-oxoproline, which comprises
[16323] (a) increasing or generating the activity of a isochorismate synthase non-targeted in a non-human organism or a part thereof, preferably a microorganism, a plant cell, a plant or a part thereof, as compared to a corresponding non-transformed wild type non-human organism or a part thereof; and
[16324] (b) growing the non-human organism or a part thereof under conditions which permit the production of 5-oxoproline or a composition comprising 5-oxoproline in said non-human organism or in the culture medium surrounding said non-human organism.

[16325] A further embodiment of the present invention relates to a process for the production of tyrosine, which comprises
[16326] (a) increasing or generating the activity of a zinc transporter non-targeted in a non-human organism or a part thereof, preferably a microorganism, a plant cell, a plant or a part thereof, as compared to a corresponding non-transformed wild type non-human organism or a part thereof; and
[16327] (b) growing the non-human organism or a part thereof under conditions which permit the production of tyrosine or a composition comprising tyrosine in said non-human organism or in the culture medium surrounding said non-human organism.

[16328] A further embodiment of the present invention relates to a process for the production of tyrosine, which comprises
[16329] (a) increasing or generating the activity of a 3-deoxy-D-arabinoheptulosonate-7-phosphatesynthase non-targeted in a non-human organism or a part thereof, preferably a microorganism, a plant cell, a plant or a part thereof, as compared to a corresponding non-transformed wild type non-human organism or a part thereof; and
[16330] (b) growing the non-human organism or a part thereof under conditions which permit the production of tyrosine or a composition comprising tyrosine in said non-human organism or in the culture medium surrounding said non-human organism.

[16331] A further embodiment of the present invention relates to a process for the production of tyrosine, which comprises
[16332] (a) increasing or generating the activity of a b0801-protein non-targeted in a non-human organism or a part thereof, preferably a microorganism, a plant cell, a plant or a part thereof, as compared to a corresponding non-transformed wild type non-human organism or a part thereof; and
[16333] (b) growing the non-human organism or a part thereof under conditions which permit the production of tyrosine or a composition comprising tyrosine in said non-human organism or in the culture medium surrounding said non-human organism.

[16334] A further embodiment of the present invention relates to a process for the production of alanine, which comprises
[16335] (a) increasing or generating the activity of a asparaginase non-targeted in a non-human organism or a part thereof, preferably a microorganism, a plant cell, a plant or a part thereof, as compared to a corresponding non-transformed wild type non-human organism or a part thereof; and
[16336] (b) growing the non-human organism or a part thereof under conditions which permit the production of alanine or a composition comprising alanine in said non-human organism or in the culture medium surrounding said non-human organism.

[16337] A further embodiment of the present invention relates to a process for the production of glycine, which comprises
[16338] (a) increasing or generating the activity of a b0841-protein non-targeted in a non-human organism or a part thereof, preferably a microorganism, a plant cell, a plant or a part thereof, as compared to a corresponding non-transformed wild type non-human organism or a part thereof; and
[16339] (b) growing the non-human organism or a part thereof under conditions which permit the production of glycine or a composition comprising glycine in said non-human organism or in the culture medium surrounding said non-human organism.

[16340] A further embodiment of the present invention relates to a process for the production of homoserine, which comprises
[16341] (a) increasing or generating the activity of a b0841-protein non-targeted in a non-human organism or a part thereof, preferably a microorganism, a plant cell, a plant or a part thereof, as compared to a corresponding non-transformed wild type non-human organism or a part thereof; and
[16342] (b) growing the non-human organism or a part thereof under conditions which permit the production of homoserine or a composition comprising homoserine in said non-human organism or in the culture medium surrounding said non-human organism.

[16343] A further embodiment of the present invention relates to a process for the production of phenylalanine, which comprises
[16344] (a) increasing or generating the activity of a major facilitator superfamily transporter protein non-targeted in a non-human organism or a part thereof, preferably a microorganism, a plant cell, a plant or a part thereof, as compared to a corresponding non-transformed wild type non-human organism or a part thereof; and
[16345] (b) growing the non-human organism or a part thereof under conditions which permit the production of phenylalanine or a composition comprising phenylalanine in said non-human organism or in the culture medium surrounding said non-human organism.

[16346] A further embodiment of the present invention relates to a process for the production of serine, which comprises
[16347] (a) increasing or generating the activity of a major facilitator superfamily transporter protein non-targeted in a non-human organism or a part thereof, preferably a microorganism, a plant cell, a plant or a part thereof, as compared to a corresponding non-transformed wild type non-human organism or a part thereof; and
[16348] (b) growing the non-human organism or a part thereof under conditions which permit the production of serine or a composition comprising serine in said non-human organism or in the culture medium surrounding said non-human organism.

[16349] A further embodiment of the present invention relates to a process for the production of tyrosine, which comprises
[16350] (a) increasing or generating the activity of a major facilitator superfamily transporter protein non-targeted in a non-human organism or a part thereof, preferably a microorganism, a plant cell, a plant or a part thereof, as compared to a corresponding non-transformed wild type non-human organism or a part thereof; and
[16351] (b) growing the non-human organism or a part thereof under conditions which permit the production of tyrosine or a composition comprising tyrosine in said non-human organism or in the culture medium surrounding said non-human organism.

[16352] A further embodiment of the present invention relates to a process for the production of 5-oxoproline, which comprises
[16353] (a) increasing or generating the activity of a major facilitator superfamily transporter protein non-targeted in a non-human organism or a part thereof, preferably a microorganism, a plant cell, a plant or a part thereof, as compared to a corresponding non-transformed wild type non-human organism or a part thereof; and
[16354] (b) growing the non-human organism or a part thereof under conditions which permit the production of 5-oxoproline or a composition comprising 5-oxoproline in said non-human organism or in the culture medium surrounding said non-human organism.

[16355] A further embodiment of the present invention relates to a process for the production of citrulline, which comprises
[16356] (a) increasing or generating the activity of a b0917-protein non-targeted in a non-human organism or a part thereof, preferably a microorganism, a plant cell, a plant or a part thereof, as compared to a corresponding non-transformed wild type non-human organism or a part thereof; and
[16357] (b) growing the non-human organism or a part thereof under conditions which permit the production of citrulline or a composition comprising citrulline in said non-human organism or in the culture medium surrounding said non-human organism.

[16358] A further embodiment of the present invention relates to a process for the production of glycine, which comprises
[16359] (a) increasing or generating the activity of a b0917-protein non-targeted in a non-human organism or a part thereof, preferably a microorganism, a plant cell, a plant or a part thereof, as compared to a corresponding non-transformed wild type non-human organism or a part thereof; and
[16360] (b) growing the non-human organism or a part thereof under conditions which permit the production of glycine or a composition comprising glycine in said non-human organism or in the culture medium surrounding said non-human organism.

[16361] A further embodiment of the present invention relates to a process for the production of phenylalanine, which comprises
[16362] (a) increasing or generating the activity of a b0917-protein non-targeted in a non-human organism or a part thereof, preferably a microorganism, a plant cell, a plant or a part thereof, as compared to a corresponding non-transformed wild type non-human organism or a part thereof; and
[16363] (b) growing the non-human organism or a part thereof under conditions which permit the production of phenylalanine or a composition comprising phenylalanine in said non-human organism or in the culture medium surrounding said non-human organism.

[16364] A further embodiment of the present invention relates to a process for the production of 5-oxoproline, which comprises
[16365] (a) increasing or generating the activity of a b0917-protein non-targeted in a non-human organism or a part thereof, preferably a microorganism, a plant cell, a plant or a part thereof, as compared to a corresponding non-transformed wild type non-human organism or a part thereof; and
[16366] (b) growing the non-human organism or a part thereof under conditions which permit the production of 5-oxoproline or a composition comprising 5-oxoproline in said non-human organism or in the culture medium surrounding said non-human organism.

[16367] A further embodiment of the present invention relates to a process for the production of alanine, which comprises
[16368] (a) increasing or generating the activity of a methylglyoxal synthase non-targeted in a non-human organism or a part thereof, preferably a microorganism, a plant cell, a plant or a part thereof, as compared to a corresponding non-transformed wild type non-human organism or a part thereof; and
[16369] (b) growing the non-human organism or a part thereof under conditions which permit the production of alanine or a composition comprising alanine in said non-human organism or in the culture medium surrounding said non-human organism.

[16370] A further embodiment of the present invention relates to a process for the production of phenylalanine, which comprises
[16371] (a) increasing or generating the activity of a methylglyoxal synthase non-targeted in a non-human organism or a part thereof, preferably a microorganism, a plant cell, a plant or a part thereof, as compared to a corresponding non-transformed wild type non-human organism or a part thereof; and
[16372] (b) growing the non-human organism or a part thereof under conditions which permit the production of phenylalanine or a composition comprising phenylalanine in said non-human organism or in the culture medium surrounding said non-human organism.

[16373] A further embodiment of the present invention relates to a process for the production of tyrosine, which comprises
[16374] (a) increasing or generating the activity of a methylglyoxal synthase non-targeted in a non-human organism or a part thereof, preferably a microorganism, a plant cell, a plant or a part thereof, as compared to a corresponding non-transformed wild type non-human organism or a part thereof; and
[16375] (b) growing the non-human organism or a part thereof under conditions which permit the production of tyrosine or a composition comprising tyrosine in said non-human organism or in the culture medium surrounding said non-human organism.

[16376] A further embodiment of the present invention relates to a process for the production of phenylalanine, which comprises
[16377] (a) increasing or generating the activity of a phosphoanhydride phosphorylase non-targeted in a non-human organism or a part thereof, preferably a microorganism, a plant cell, a plant or a part thereof, as compared to a corresponding non-transformed wild type non-human organism or a part thereof; and
[16378] (b) growing the non-human organism or a part thereof under conditions which permit the production of phenylalanine or a composition comprising phenylalanine in said non-human organism or in the culture medium surrounding said non-human organism.

[16379] A further embodiment of the present invention relates to a process for the production of alanine, which comprises
[16380] (a) increasing or generating the activity of a b1003-protein non-targeted in a non-human organism or a part thereof, preferably a microorganism, a plant cell, a plant or a part thereof, as compared to a corresponding non-transformed wild type non-human organism or a part thereof; and
[16381] (b) growing the non-human organism or a part thereof under conditions which permit the production of alanine or a composition comprising alanine in said non-human organism or in the culture medium surrounding said non-human organism.

[16382] A further embodiment of the present invention relates to a process for the production of aspartate, which comprises
[16383] (a) increasing or generating the activity of a b1003-protein non-targeted in a non-human organism or a part thereof, preferably a microorganism, a plant cell, a plant or a part thereof, as compared to a corresponding non-transformed wild type non-human organism or a part thereof; and
[16384] (b) growing the non-human organism or a part thereof under conditions which permit the production of aspartate or a composition comprising aspartate in said non-human organism or in the culture medium surrounding said non-human organism.

[16385] A further embodiment of the present invention relates to a process for the production of phenylalanine, which comprises
[16386] (a) increasing or generating the activity of a b1003-protein non-targeted in a non-human organism or a part thereof, preferably a microorganism, a plant cell, a plant or a part thereof, as compared to a corresponding non-transformed wild type non-human organism or a part thereof; and
[16387] (b) growing the non-human organism or a part thereof under conditions which permit the production of phenylalanine or a composition comprising phenylalanine in said non-human organism or in the culture medium surrounding said non-human organism.

[16388] A further embodiment of the present invention relates to a process for the production of serine, which comprises
[16389] (a) increasing or generating the activity of a b1003-protein non-targeted in a non-human organism or a part thereof, preferably a microorganism, a plant cell, a plant or a part thereof, as compared to a corresponding non-transformed wild type non-human organism or a part thereof; and
[16390] (b) growing the non-human organism or a part thereof under conditions which permit the production of serine or a composition comprising serine in said non-human organism or in the culture medium surrounding said non-human organism.

[16391] A further embodiment of the present invention relates to a process for the production of tyrosine, which comprises
[16392] (a) increasing or generating the activity of a b1003-protein non-targeted in a non-human organism or a part thereof, preferably a microorganism, a plant cell, a plant or a part thereof, as compared to a corresponding non-transformed wild type non-human organism or a part thereof; and
[16393] (b) growing the non-human organism or a part thereof under conditions which permit the production of tyrosine or a composition comprising tyrosine in said non-human organism or in the culture medium surrounding said non-human organism.

[16394] A further embodiment of the present invention relates to a process for the production of 3,4-dihydroxyphenylalanine (dopa), which comprises
[16395] (a) increasing or generating the activity of a b1003-protein non-targeted in a non-human organism or a part thereof, preferably a microorganism, a plant cell, a plant or a part thereof, as compared to a corresponding non-transformed wild type non-human organism or a part thereof; and
[16396] (b) growing the non-human organism or a part thereof under conditions which permit the production of 3,4-dihydroxyphenylalanine (dopa) or a composition comprising 3,4-dihydroxyphenylalanine (dopa) in said non-human organism or in the culture medium surrounding said non-human organism.

[16397] A further embodiment of the present invention relates to a process for the production of 5-oxoproline, which comprises
[16398] (a) increasing or generating the activity of a b1003-protein non-targeted in a non-human organism or a part thereof, preferably a microorganism, a plant cell, a plant or a part thereof, as compared to a corresponding non-transformed wild type non-human organism or a part thereof; and
[16399] (b) growing the non-human organism or a part thereof under conditions which permit the production of 5-oxoproline or a composition comprising 5-oxoproline in said non-human organism or in the culture medium surrounding said non-human organism.

[16400] A further embodiment of the present invention relates to a process for the production of citrulline, which comprises
[16401] (a) increasing or generating the activity of a lipoprotein precursor non-targeted in a non-human organism or a part thereof, preferably a microorganism, a plant cell, a plant or a part thereof, as compared to a corresponding non-transformed wild type non-human organism or a part thereof; and
[16402] (b) growing the non-human organism or a part thereof under conditions which permit the production of citrulline or a composition comprising citrulline in said non-human organism or in the culture medium surrounding said non-human organism.

[16403] A further embodiment of the present invention relates to a process for the production of 5-oxoproline, which comprises
[16404] (a) increasing or generating the activity of a lipoprotein precursor non-targeted in a non-human organism or a part thereof, preferably a microorganism, a plant cell, a plant or a part thereof, as compared to a corresponding non-transformed wild type non-human organism or a part thereof; and
[16405] (b) growing the non-human organism or a part thereof under conditions which permit the production of 5-oxoproline or a composition comprising 5-oxoproline in said non-human organism or in the culture medium surrounding said non-human organism.

[16406] A further embodiment of the present invention relates to a process for the production of aspartate, which comprises
[16407] (a) increasing or generating the activity of a b1024-protein non-targeted in a non-human organism or a part thereof, preferably a microorganism, a plant cell, a plant or a part thereof, as compared to a corresponding non-transformed wild type non-human organism or a part thereof; and
[16408] (b) growing the non-human organism or a part thereof under conditions which permit the production of aspartate or a composition comprising aspartate in said non-human organism or in the culture medium surrounding said non-human organism.

[16409] A further embodiment of the present invention relates to a process for the production of aspartate, which comprises
[16410] (a) increasing or generating the activity of a multidrug resistance protein non-targeted in a non-human organism or a part thereof, preferably a microorganism, a plant cell, a plant or a part thereof, as compared to a corresponding non-transformed wild type non-human organism or a part thereof; and
[16411] (b) growing the non-human organism or a part thereof under conditions which permit the production of aspartate or a composition comprising aspartate in said non-human organism or in the culture medium surrounding said non-human organism.

[16412] A further embodiment of the present invention relates to a process for the production of tyrosine, which comprises
[16413] (a) increasing or generating the activity of a multidrug resistance protein non-targeted in a non-human organism or a part thereof, preferably a microorganism, a plant cell, a plant or a part thereof, as compared to a corresponding non-transformed wild type non-human organism or a part thereof; and
[16414] (b) growing the non-human organism or a part thereof under conditions which permit the production of tyrosine or a composition comprising tyrosine in said non-human organism or in the culture medium surrounding said non-human organism.

[16415] A further embodiment of the present invention relates to a process for the production of serine, which comprises
[16416] (a) increasing or generating the activity of a b1137-protein non-targeted in a non-human organism or a part thereof, preferably a microorganism, a plant cell, a plant or a part thereof, as compared to a corresponding non-transformed wild type non-human organism or a part thereof; and
[16417] (b) growing the non-human organism or a part thereof under conditions which permit the production of serine or a composition comprising serine in said non-human organism or in the culture medium surrounding said non-human organism.

[16418] A further embodiment of the present invention relates to a process for the production of phenylalanine, which comprises
[16419] (a) increasing or generating the activity of a b1155-protein non-targeted in a non-human organism or a part thereof, preferably a microorganism, a plant cell, a plant or a part thereof, as compared to a corresponding non-transformed wild type non-human organism or a part thereof; and
[16420] (b) growing the non-human organism or a part thereof under conditions which permit the production of phenylalanine or a composition comprising phenylalanine in said non-human organism or in the culture medium surrounding said non-human organism.

[16421] A further embodiment of the present invention relates to a process for the production of phenylalanine, which comprises
[16422] (a) increasing or generating the activity of a b1163-protein non-targeted in a non-human organism or a part thereof, preferably a microorganism, a plant cell, a plant or a part thereof, as compared to a corresponding non-transformed wild type non-human organism or a part thereof; and
[16423] (b) growing the non-human organism or a part thereof under conditions which permit the production of phenylalanine or a composition comprising phenylalanine in said non-human organism or in the culture medium surrounding said non-human organism.

[16424] A further embodiment of the present invention relates to a process for the production of tyrosine, which comprises
[16425] (a) increasing or generating the activity of a b1163-protein non-targeted in a non-human organism or a part thereof, preferably a microorganism, a plant cell, a plant or a part thereof, as compared to a corresponding non-transformed wild type non-human organism or a part thereof; and
[16426] (b) growing the non-human organism or a part thereof under conditions which permit the production of tyrosine or a composition comprising tyrosine in said non-human organism or in the culture medium surrounding said non-human organism.

[16427] A further embodiment of the present invention relates to a process for the production of citrulline, which comprises
[16428] (a) increasing or generating the activity of a b1179-protein non-targeted in a non-human organism or a part thereof, preferably a microorganism, a plant cell, a plant or a part thereof, as compared to a corresponding non-transformed wild type non-human organism or a part thereof; and
[16429] (b) growing the non-human organism or a part thereof under conditions which permit the production of citrulline or a composition comprising citrulline in said non-human organism or in the culture medium surrounding said non-human organism.

[16430] A further embodiment of the present invention relates to a process for the production of alanine, which comprises
[16431] (a) increasing or generating the activity of a sodium/proton antiporter non-targeted in a non-human organism or a part thereof, preferably a microorganism, a plant cell, a plant or a part thereof, as compared to a corresponding non-transformed wild type non-human organism or a part thereof; and
[16432] (b) growing the non-human organism or a part thereof under conditions which permit the production of alanine or a composition comprising alanine in said non-human organism or in the culture medium surrounding said non-human organism.

[16433] A further embodiment of the present invention relates to a process for the production of serine, which comprises
[16434] (a) increasing or generating the activity of a sodium/proton antiporter non-targeted in a non-human organism or a part thereof, preferably a microorganism, a plant cell, a plant or a part thereof, as compared to a corresponding non-transformed wild type non-human organism or a part thereof; and
[16435] (b) growing the non-human organism or a part thereof under conditions which permit the production of serine or a composition comprising serine in said non-human organism or in the culture medium surrounding said non-human organism.

[16436] A further embodiment of the present invention relates to a process for the production of citrulline, which comprises
[16437] (a) increasing or generating the activity of a b1205-protein non-targeted in a non-human organism or a part thereof, preferably a microorganism, a plant cell, a plant or a part thereof, as compared to a corresponding non-transformed wild type non-human organism or a part thereof; and
[16438] (b) growing the non-human organism or a part thereof under conditions which permit the production of citrulline or a composition comprising citrulline in said non-human organism or in the culture medium surrounding said non-human organism.

[16439] A further embodiment of the present invention relates to a process for the production of phenylalanine, which comprises
[16440] (a) increasing or generating the activity of a b1229-protein non-targeted in a non-human organism or a part thereof, preferably a microorganism, a plant cell, a plant or a part thereof, as compared to a corresponding non-transformed wild type non-human organism or a part thereof; and
[16441] (b) growing the non-human organism or a part thereof under conditions which permit the production of phenylalanine or a composition comprising phenylalanine in said non-human organism or in the culture medium surrounding said non-human organism.

[16442] A further embodiment of the present invention relates to a process for the production of tyrosine, which comprises
[16443] (a) increasing or generating the activity of a membrane protein non-targeted in a non-human organism or a part thereof, preferably a microorganism, a plant cell, a plant or a part thereof, as compared to a corresponding non-transformed wild type non-human organism or a part thereof; and
[16444] (b) growing the non-human organism or a part thereof under conditions which permit the production of tyrosine or a composition comprising tyrosine in said non-human organism or in the culture medium surrounding said non-human organism.

[16445] A further embodiment of the present invention relates to a process for the production of citrulline, which comprises
[16446] (a) increasing or generating the activity of a b1259-protein non-targeted in a non-human organism or a part thereof, preferably a microorganism, a plant cell, a plant or a part thereof, as compared to a corresponding non-transformed wild type non-human organism or a part thereof; and
[16447] (b) growing the non-human organism or a part thereof under conditions which permit the production of citrulline or a composition comprising citrulline in said non-human organism or in the culture medium surrounding said non-human organism.

[16448] A further embodiment of the present invention relates to a process for the production of 5-oxoproline, which comprises
[16449] (a) increasing or generating the activity of a b1259-protein non-targeted in a non-human organism or a part thereof, preferably a microorganism, a plant cell, a plant or a part thereof, as compared to a corresponding non-transformed wild type non-human organism or a part thereof; and
[16450] (b) growing the non-human organism or a part thereof under conditions which permit the production of 5-oxoproline or a composition comprising 5-oxoproline in said non-human organism or in the culture medium surrounding said non-human organism.

[16451] A further embodiment of the present invention relates to a process for the production of tyrosine, which comprises
[16452] (a) increasing or generating the activity of a tryptophan biosynthesis protein non-targeted in a non-human organism or a part thereof, preferably a microorganism, a plant cell, a plant or a part thereof, as compared to a corresponding non-transformed wild type non-human organism or a part thereof; and
[16453] (b) growing the non-human organism or a part thereof under conditions which permit the production of tyrosine or a composition comprising tyrosine in said non-human organism or in the culture medium surrounding said non-human organism.

[16454] A further embodiment of the present invention relates to a process for the production of phenylalanine, which comprises
[16455] (a) increasing or generating the activity of a anthranilate synthase component I non-targeted in a non-human organism or a part thereof, preferably a microorganism, a plant cell, a plant or a part thereof, as compared to a corresponding non-transformed wild type non-human organism or a part thereof; and
[16456] (b) growing the non-human organism or a part thereof under conditions which permit the production of phenylalanine or a composition comprising phenylalanine in said non-human organism or in the culture medium surrounding said non-human organism.

[16457] A further embodiment of the present invention relates to a process for the production of glycine, which comprises
[16458] (a) increasing or generating the activity of a b1280-protein non-targeted in a non-human organism or a part thereof, preferably a microorganism, a plant cell, a plant or a part thereof, as compared to a corresponding non-transformed wild type non-human organism or a part thereof; and
[16459] (b) growing the non-human organism or a part thereof under conditions which permit the production of glycine or a composition comprising glycine in said non-human organism or in the culture medium surrounding said non-human organism.

[16460] A further embodiment of the present invention relates to a process for the production of serine, which comprises
[16461] (a) increasing or generating the activity of a b1280-protein non-targeted in a non-human organism or a part thereof, preferably a microorganism, a plant cell, a plant or a part thereof, as compared to a corresponding non-transformed wild type non-human organism or a part thereof; and
[16462] (b) growing the non-human organism or a part thereof under conditions which permit the production of serine or a composition comprising serine in said non-human organism or in the culture medium surrounding said non-human organism.

[16463] A further embodiment of the present invention relates to a process for the production of 5-oxoproline, which comprises
[16464] (a) increasing or generating the activity of a b1280-protein non-targeted in a non-human organism or a part thereof, preferably a microorganism, a plant cell, a plant or a part thereof, as compared to a corresponding non-transformed wild type non-human organism or a part thereof; and
[16465] (b) growing the non-human organism or a part thereof under conditions which permit the production of 5-oxoproline or a composition comprising 5-oxoproline in said non-human organism or in the culture medium surrounding said non-human organism.

[16466] A further embodiment of the present invention relates to a process for the production of alanine, which comprises
[16467] (a) increasing or generating the activity of a glutamine synthetase non-targeted in a non-human organism or a part thereof, preferably a microorganism, a plant cell, a plant or a part thereof, as compared to a corresponding non-transformed wild type non-human organism or a part thereof; and
[16468] (b) growing the non-human organism or a part thereof under conditions which permit the production of alanine or a composition comprising alanine in said non-human organism or in the culture medium surrounding said non-human organism.

[16469] A further embodiment of the present invention relates to a process for the production of glycine, which comprises
[16470] (a) increasing or generating the activity of a glutamine synthetase non-targeted in a non-human organism or a part thereof, preferably a microorganism, a plant cell, a plant or a part thereof, as compared to a corresponding non-transformed wild type non-human organism or a part thereof; and
[16471] (b) growing the non-human organism or a part thereof under conditions which permit the production of glycine or a composition comprising glycine in said non-human organism or in the culture medium surrounding said non-human organism.

[16472] A further embodiment of the present invention relates to a process for the production of phenylalanine, which comprises
[16473] (a) increasing or generating the activity of a aldehyde dehydrogenase non-targeted in a non-human organism or a part thereof, preferably a microorganism, a plant cell, a plant or a part thereof, as compared to a corresponding non-transformed wild type non-human organism or a part thereof; and
[16474] (b) growing the non-human organism or a part thereof under conditions which permit the production of phenylalanine or a composition comprising phenylalanine in said non-human organism or in the culture medium surrounding said non-human organism.

[16475] A further embodiment of the present invention relates to a process for the production of tyrosine, which comprises
[16476] (a) increasing or generating the activity of a aldehyde dehydrogenase non-targeted in a non-human organism or a part thereof, preferably a microorganism, a plant cell, a plant or a part thereof, as compared to a corresponding non-transformed wild type non-human organism or a part thereof; and
[16477] (b) growing the non-human organism or a part thereof under conditions which permit the production of tyrosine or a composition comprising tyrosine in said non-human organism or in the culture medium surrounding said non-human organism.

[16478] A further embodiment of the present invention relates to a process for the production of citrulline, which comprises
[16479] (a) increasing or generating the activity of a ABC transporter substrate-binding protein non-targeted in a non-human organism or a part thereof, preferably a microorganism, a plant cell, a plant or a part thereof, as compared to a corresponding non-transformed wild type non-human organism or a part thereof; and
[16480] (b) growing the non-human organism or a part thereof under conditions which permit the production of citrulline or a composition comprising citrulline in said non-human organism or in the culture medium surrounding said non-human organism.

[16481] A further embodiment of the present invention relates to a process for the production of citrulline, which comprises
[16482] (a) increasing or generating the activity of a b1330-protein non-targeted in a non-human organism or a part thereof, preferably a microorganism, a plant cell, a plant or a part thereof, as compared to a corresponding non-transformed wild type non-human organism or a part thereof; and
[16483] (b) growing the non-human organism or a part thereof under conditions which permit the production of citrulline or a composition comprising citrulline in said non-human organism or in the culture medium surrounding said non-human organism.

[16484] A further embodiment of the present invention relates to a process for the production of phenylalanine, which comprises
[16485] (a) increasing or generating the activity of a ATP-dependent RNA helicase non-targeted in a non-human organism or a part thereof, preferably a microorganism, a plant cell, a plant or a part thereof, as compared to a corresponding non-transformed wild type non-human organism or a part thereof; and
[16486] (b) growing the non-human organism or a part thereof under conditions which permit the production of phenylalanine or a composition comprising phenylalanine in said non-human organism or in the culture medium surrounding said non-human organism.

[16487] A further embodiment of the present invention relates to a process for the production of alanine, which comprises
[16488] (a) increasing or generating the activity of a restriction alleviation protein non-targeted in a non-human organism or a part thereof, preferably a microorganism, a plant cell, a plant or a part thereof, as compared to a corresponding non-transformed wild type non-human organism or a part thereof; and
[16489] (b) growing the non-human organism or a part thereof under conditions which permit the production of alanine or a composition comprising alanine in said non-human organism or in the culture medium surrounding said non-human organism.

[16490] A further embodiment of the present invention relates to a process for the production of glycine, which comprises
[16491] (a) increasing or generating the activity of a restriction alleviation protein non-targeted in a non-human organism or a part thereof, preferably a microorganism, a plant cell, a plant or a part thereof, as compared to a corresponding non-transformed wild type non-human organism or a part thereof; and
[16492] (b) growing the non-human organism or a part thereof under conditions which permit the production of glycine or a composition comprising glycine in said non-human organism or in the culture medium surrounding said non-human organism.

[16493] A further embodiment of the present invention relates to a process for the production of 5-oxoproline, which comprises
[16494] (a) increasing or generating the activity of a lipoprotein precursor non-targeted in a non-human organism or a part thereof, preferably a microorganism, a plant cell, a plant or a part thereof, as compared to a corresponding non-transformed wild type non-human organism or a part thereof; and
[16495] (b) growing the non-human organism or a part thereof under conditions which permit the production of 5-oxoproline or a composition comprising 5-oxoproline in said non-human organism or in the culture medium surrounding said non-human organism.

[16496] A further embodiment of the present invention relates to a process for the production of alanine, which comprises
[16497] (a) increasing or generating the activity of a b1445-protein non-targeted in a non-human organism or a part thereof, preferably a microorganism, a plant cell, a plant or a part thereof, as compared to a corresponding non-transformed wild type non-human organism or a part thereof; and
[16498] (b) growing the non-human organism or a part thereof under conditions which permit the production of alanine or a composition comprising alanine in said non-human organism or in the culture medium surrounding said non-human organism.

[16499] A further embodiment of the present invention relates to a process for the production of citrulline, which comprises
[16500] (a) increasing or generating the activity of a b1445-protein non-targeted in a non-human organism or a part thereof, preferably a microorganism, a plant cell, a plant or a part thereof, as compared to a corresponding non-transformed wild type non-human organism or a part thereof; and
[16501] (b) growing the non-human organism or a part thereof under conditions which permit the production of citrulline or a composition comprising citrulline in said non-human organism or in the culture medium surrounding said non-human organism.

[16502] A further embodiment of the present invention relates to a process for the production of glycine, which comprises
[16503] (a) increasing or generating the activity of a b1445-protein non-targeted in a non-human organism or a part thereof, preferably a microorganism, a plant cell, a plant or a part thereof, as compared to a corresponding non-transformed wild type non-human organism or a part thereof; and
[16504] (b) growing the non-human organism or a part thereof under conditions which permit the production of glycine or a composition comprising glycine in said non-human organism or in the culture medium surrounding said non-human organism.

[16505] A further embodiment of the present invention relates to a process for the production of phenylalanine, which comprises
[16506] (a) increasing or generating the activity of a b1445-protein non-targeted in a non-human organism or a part thereof, preferably a microorganism, a plant cell, a plant or a part thereof, as compared to a corresponding non-transformed wild type non-human organism or a part thereof; and
[16507] (b) growing the non-human organism or a part thereof under conditions which permit the production of phenylalanine or a composition comprising phenylalanine in said non-human organism or in the culture medium surrounding said non-human organism.

[16508] A further embodiment of the present invention relates to a process for the production of serine, which comprises
[16509] (a) increasing or generating the activity of a b1445-protein non-targeted in a non-human organism or a part thereof, preferably a microorganism, a plant cell, a plant or a part thereof, as compared to a corresponding non-transformed wild type non-human organism or a part thereof; and
[16510] (b) growing the non-human organism or a part thereof under conditions which permit the production of serine or a composition comprising serine in said non-human organism or in the culture medium surrounding said non-human organism.

[16511] A further embodiment of the present invention relates to a process for the production of alanine, which comprises
[16512] (a) increasing or generating the activity of a NADP-dependent malic enzyme non-targeted in a non-human organism or a part thereof, preferably a microorganism, a plant cell, a plant or a part thereof, as compared to a corresponding non-transformed wild type non-human organism or a part thereof; and
[16513] (b) growing the non-human organism or a part thereof under conditions which permit the production of alanine or a composition comprising alanine in said non-human organism or in the culture medium surrounding said non-human organism.

[16514] A further embodiment of the present invention relates to a process for the production of glycine, which comprises
[16515] (a) increasing or generating the activity of a NADP-dependent malic enzyme non-targeted in a non-human organism or a part thereof, preferably a microorganism, a plant cell, a plant or a part thereof, as compared to a corresponding non-transformed wild type non-human organism or a part thereof; and
[16516] (b) growing the non-human organism or a part thereof under conditions which permit the production of glycine or a composition comprising glycine in said non-human organism or in the culture medium surrounding said non-human organism.

[16517] A further embodiment of the present invention relates to a process for the production of phenylalanine, which comprises
[16518] (a) increasing or generating the activity of a NADP-dependent malic enzyme non-targeted in a non-human organism or a part thereof, preferably a microorganism, a plant cell, a plant or a part thereof, as compared to a corresponding non-transformed wild type non-human organism or a part thereof; and
[16519] (b) growing the non-human organism or a part thereof under conditions which permit the production of phenylalanine or a composition comprising phenylalanine in said non-human organism or in the culture medium surrounding said non-human organism.

[16520] A further embodiment of the present invention relates to a process for the production of serine, which comprises
[16521] (a) increasing or generating the activity of a NADP-dependent malic enzyme non-targeted in a non-human organism or a part thereof, preferably a microorganism, a plant cell, a plant or a part thereof, as compared to a corresponding non-transformed wild type non-human organism or a part thereof; and
[16522] (b) growing the non-human organism or a part thereof under conditions which permit the production of serine or a composition comprising serine in said non-human organism or in the culture medium surrounding said non-human organism.

[16523] A further embodiment of the present invention relates to a process for the production of tyrosine, which comprises
[16524] (a) increasing or generating the activity of a NADP-dependent malic enzyme non-targeted in a non-human organism or a part thereof, preferably a microorganism, a plant cell, a plant or a part thereof, as compared to a corresponding non-transformed wild type non-human organism or a part thereof; and
[16525] (b) growing the non-human organism or a part thereof under conditions which permit the production of tyrosine or a composition comprising tyrosine in said non-human organism or in the culture medium surrounding said non-human organism.

[16526] A further embodiment of the present invention relates to a process for the production of asparagine, which comprises
[16527] (a) increasing or generating the activity of a b1522-protein non-targeted in a non-human organism or a part thereof, preferably a microorganism, a plant cell, a plant or a part thereof, as compared to a corresponding non-transformed wild type non-human organism or a part thereof; and
[16528] (b) growing the non-human organism or a part thereof under conditions which permit the production of asparagine or a composition comprising asparagine in said non-human organism or in the culture medium surrounding said non-human organism.

[16529] A further embodiment of the present invention relates to a process for the production of aspartate, which comprises
[16530] (a) increasing or generating the activity of a b1522-protein non-targeted in a non-human organism or a part thereof, preferably a microorganism, a plant cell, a plant or a part thereof, as compared to a corresponding non-transformed wild type non-human organism or a part thereof; and
[16531] (b) growing the non-human organism or a part thereof under conditions which permit the production of aspartate or a composition comprising aspartate in said non-human organism or in the culture medium surrounding said non-human organism.

[16532] A further embodiment of the present invention relates to a process for the production of phenylalanine, which comprises
[16533] (a) increasing or generating the activity of a b1522-protein non-targeted in a non-human organism or a part thereof, preferably a microorganism, a plant cell, a plant or a part thereof, as compared to a corresponding non-transformed wild type non-human organism or a part thereof; and
[16534] (b) growing the non-human organism or a part thereof under conditions which permit the production of phenylalanine or a composition comprising phenylalanine in said non-human organism or in the culture medium surrounding said non-human organism.

[16535] A further embodiment of the present invention relates to a process for the production of serine, which comprises
[16536] (a) increasing or generating the activity of a b1522-protein non-targeted in a non-human organism or a part thereof, preferably a microorganism, a plant cell, a plant or a part thereof, as compared to a corresponding non-transformed wild type non-human organism or a part thereof; and
[16537] (b) growing the non-human organism or a part thereof under conditions which permit the production of serine or a composition comprising serine in said non-human organism or in the culture medium surrounding said non-human organism.

[16538] A further embodiment of the present invention relates to a process for the production of tyrosine, which comprises
[16539] (a) increasing or generating the activity of a b1522-protein non-targeted in a non-human organism or a part thereof, preferably a microorganism, a plant cell, a plant or a part thereof, as compared to a corresponding non-transformed wild type non-human organism or a part thereof; and
[16540] (b) growing the non-human organism or a part thereof under conditions which permit the production of tyrosine or a composition comprising tyrosine in said non-human organism or in the culture medium surrounding said non-human organism.

[16541] A further embodiment of the present invention relates to a process for the production of 5-oxoproline, which comprises
[16542] (a) increasing or generating the activity of a b1522-protein non-targeted in a non-human organism or a part thereof, preferably a microorganism, a plant cell, a plant or a part thereof, as compared to a corresponding non-transformed wild type non-human organism or a part thereof; and
[16543] (b) growing the non-human organism or a part thereof under conditions which permit the production of 5-oxoproline or a composition comprising 5-oxoproline in said non-human organism or in the culture medium surrounding said non-human organism.

[16544] A further embodiment of the present invention relates to a process for the production of tyrosine, which comprises
[16545] (a) increasing or generating the activity of a b1583-protein non-targeted in a non-human organism or a part thereof, preferably a microorganism, a plant cell, a plant or a part thereof, as compared to a corresponding non-transformed wild type non-human organism or a part thereof; and
[16546] (b) growing the non-human organism or a part thereof under conditions which permit the production of tyrosine or a composition comprising tyrosine in said non-human organism or in the culture medium surrounding said non-human organism.

[16547] A further embodiment of the present invention relates to a process for the production of aspartate, which comprises
[16548] (a) increasing or generating the activity of a Fe—S subunit of oxidoreductase non-targeted in a non-human organism or a part thereof, preferably a microorganism, a plant cell, a plant or a part thereof, as compared to a corresponding non-transformed wild type non-human organism or a part thereof; and
[16549] (b) growing the non-human organism or a part thereof under conditions which permit the production of aspartate or a composition comprising aspartate in said non-human organism or in the culture medium surrounding said non-human organism.

[16550] A further embodiment of the present invention relates to a process for the production of phenylalanine, which comprises
[16551] (a) increasing or generating the activity of a acid shock protein non-targeted in a non-human organism or a part thereof, preferably a microorganism, a plant cell, a plant or a part thereof, as compared to a corresponding non-transformed wild type non-human organism or a part thereof; and
[16552] (b) growing the non-human organism or a part thereof under conditions which permit the production of phenylalanine or a composition comprising phenylalanine in said non-human organism or in the culture medium surrounding said non-human organism.

[16553] A further embodiment of the present invention relates to a process for the production of tyrosine, which comprises
[16554] (a) increasing or generating the activity of a acid shock protein non-targeted in a non-human organism or a part thereof, preferably a microorganism, a plant cell, a plant or a part thereof, as compared to a corresponding non-transformed wild type non-human organism or a part thereof; and
[16555] (b) growing the non-human organism or a part thereof under conditions which permit the production of tyrosine or a composition comprising tyrosine in said non-human organism or in the culture medium surrounding said non-human organism.

[16556] A further embodiment of the present invention relates to a process for the production of alanine, which comprises
[16557] (a) increasing or generating the activity of a methylglyoxalase non-targeted in a non-human organism or a part thereof, preferably a microorganism, a plant cell, a plant or a part thereof, as compared to a corresponding non-transformed wild type non-human organism or a part thereof; and
[16558] (b) growing the non-human organism or a part thereof under conditions which permit the production of alanine or a composition comprising alanine in said non-human organism or in the culture medium surrounding said non-human organism.

[16559] A further embodiment of the present invention relates to a process for the production of aspartate, which comprises
[16560] (a) increasing or generating the activity of a b1670-protein non-targeted in a non-human organism or a part thereof, preferably a microorganism, a plant cell, a plant or a part thereof, as compared to a corresponding non-transformed wild type non-human organism or a part thereof; and
[16561] (b) growing the non-human organism or a part thereof under conditions which permit the production of aspartate or a composition comprising aspartate in said non-human organism or in the culture medium surrounding said non-human organism.

[16562] A further embodiment of the present invention relates to a process for the production of aspartate, which comprises
[16563] (a) increasing or generating the activity of a b1672-protein non-targeted in a non-human organism or a part thereof, preferably a microorganism, a plant cell, a plant or a part thereof, as compared to a corresponding non-transformed wild type non-human organism or a part thereof; and
[16564] (b) growing the non-human organism or a part thereof under conditions which permit the production of aspartate or a composition comprising aspartate in said non-human organism or in the culture medium surrounding said non-human organism.

[16565] A further embodiment of the present invention relates to a process for the production of alanine, which comprises
[16566] (a) increasing or generating the activity of a arginine N-succinyltransferase non-targeted in a non-human organism or a part thereof, preferably a microorganism, a plant cell, a plant or a part thereof, as compared to a corresponding non-transformed wild type non-human organism or a part thereof; and
[16567] (b) growing the non-human organism or a part thereof under conditions which permit the production of alanine or a composition comprising alanine in said non-human organism or in the culture medium surrounding said non-human organism.

[16568] A further embodiment of the present invention relates to a process for the production of aspartate, which comprises
[16569] (a) increasing or generating the activity of a ABC transporter permease protein non-targeted in a non-human organism or a part thereof, preferably a microorganism, a plant cell, a plant or a part thereof, as compared to a corresponding non-transformed wild type non-human organism or a part thereof; and
[16570] (b) growing the non-human organism or a part thereof under conditions which permit the production of aspartate or a composition comprising aspartate in said non-human organism or in the culture medium surrounding said non-human organism.

[16571] A further embodiment of the present invention relates to a process for the production of tyrosine, which comprises
[16572] (a) increasing or generating the activity of a ABC transporter permease protein non-targeted in a non-human organism or a part thereof, preferably a microorganism, a plant cell, a plant or a part thereof, as compared to a corresponding non-transformed wild type non-human organism or a part thereof; and
[16573] (b) growing the non-human organism or a part thereof under conditions which permit the production of tyrosine or a composition comprising tyrosine in said non-human organism or in the culture medium surrounding said non-human organism.

[16574] A further embodiment of the present invention relates to a process for the production of aspartate, which comprises
[16575] (a) increasing or generating the activity of a transport protein non-targeted in a non-human organism or a part thereof, preferably a microorganism, a plant cell, a plant or a part thereof, as compared to a corresponding non-transformed wild type non-human organism or a part thereof; and
[16576] (b) growing the non-human organism or a part thereof under conditions which permit the production of aspartate or a composition comprising aspartate in said non-human organism or in the culture medium surrounding said non-human organism.

[16577] A further embodiment of the present invention relates to a process for the production of aspartate, which comprises
[16578] (a) increasing or generating the activity of a b1837-protein non-targeted in a non-human organism or a part thereof, preferably a microorganism, a plant cell, a plant or a part thereof, as compared to a corresponding non-transformed wild type non-human organism or a part thereof; and
[16579] (b) growing the non-human organism or a part thereof under conditions which permit the production of aspartate or a composition comprising aspartate in said non-human organism or in the culture medium surrounding said non-human organism.

[16580] A further embodiment of the present invention relates to a process for the production of aspartate, which comprises
[16581] (a) increasing or generating the activity of a serine/threonine-protein phosphatase non-targeted in a non-human organism or a part thereof, preferably a microorganism, a plant cell, a plant or a part thereof, as compared to a corresponding non-transformed wild type non-human organism or a part thereof; and
[16582] (b) growing the non-human organism or a part thereof under conditions which permit the production of aspartate or a composition comprising aspartate in said non-human organism or in the culture medium surrounding said non-human organism.

[16583] A further embodiment of the present invention relates to a process for the production of aspartate, which comprises
[16584] (a) increasing or generating the activity of a protease non-targeted in a non-human organism or a part thereof, preferably a microorganism, a plant cell, a plant or a part thereof, as compared to a corresponding non-transformed wild type non-human organism or a part thereof; and
[16585] (b) growing the non-human organism or a part thereof under conditions which permit the production of aspartate or a composition comprising aspartate in said non-human organism or in the culture medium surrounding said non-human organism.

[16586] A further embodiment of the present invention relates to a process for the production of serine, which comprises
[16587] (a) increasing or generating the activity of a protease non-targeted in a non-human organism or a part thereof, preferably a microorganism, a plant cell, a plant or a part thereof, as compared to a corresponding non-transformed wild type non-human organism or a part thereof; and
[16588] (b) growing the non-human organism or a part thereof under conditions which permit the production of serine or a composition comprising serine in said non-human organism or in the culture medium surrounding said non-human organism.

[16589] A further embodiment of the present invention relates to a process for the production of asparagine, which comprises
[16590] (a) increasing or generating the activity of a pyruvate kinase non-targeted in a non-human organism or a part thereof, preferably a microorganism, a plant cell, a plant or a part thereof, as compared to a corresponding non-transformed wild type non-human organism or a part thereof; and
[16591] (b) growing the non-human organism or a part thereof under conditions which permit the production of asparagine or a composition comprising asparagine in said non-human organism or in the culture medium surrounding said non-human organism.

[16592] A further embodiment of the present invention relates to a process for the production of tyrosine, which comprises
[16593] (a) increasing or generating the activity of a cytochrome c-type protein non-targeted in a non-human organism or a part thereof, preferably a microorganism, a plant cell, a plant or a part thereof, as compared to a corresponding non-transformed wild type non-human organism or a part thereof; and
[16594] (b) growing the non-human organism or a part thereof under conditions which permit the production of tyrosine or a composition comprising tyrosine in said non-human organism or in the culture medium surrounding said non-human organism.

[16595] A further embodiment of the present invention relates to a process for the production of phenylalanine, which comprises
[16596] (a) increasing or generating the activity of a trehalose-phosphatase non-targeted in a non-human organism or a part thereof, preferably a microorganism, a plant cell, a plant or a part thereof, as compared to a corresponding non-transformed wild type non-human organism or a part thereof; and
[16597] (b) growing the non-human organism or a part thereof under conditions which permit the production of phenylalanine or a composition comprising phenylalanine in said non-human organism or in the culture medium surrounding said non-human organism.

[16598] A further embodiment of the present invention relates to a process for the production of tyrosine, which comprises
[16599] (a) increasing or generating the activity of a trehalose-phosphatase non-targeted in a non-human organism or a part thereof, preferably a microorganism, a plant cell, a plant or a part thereof, as compared to a corresponding non-transformed wild type non-human organism or a part thereof; and
[16600] (b) growing the non-human organism or a part thereof under conditions which permit the production of tyrosine or a composition comprising tyrosine in said non-human organism or in the culture medium surrounding said non-human organism.

[16601] A further embodiment of the present invention relates to a process for the production of serine, which comprises
[16602] (a) increasing or generating the activity of a b1898-protein non-targeted in a non-human organism or a part thereof, preferably a microorganism, a plant cell, a plant or a part thereof, as compared to a corresponding non-transformed wild type non-human organism or a part thereof; and
[16603] (b) growing the non-human organism or a part thereof under conditions which permit the production of serine or a composition comprising serine in said non-human organism or in the culture medium surrounding said non-human organism.

[16604] A further embodiment of the present invention relates to a process for the production of serine, which comprises
[16605] (a) increasing or generating the activity of a b1930-protein non-targeted in a non-human organism or a part thereof, preferably a microorganism, a plant cell, a plant or a part thereof, as compared to a corresponding non-transformed wild type non-human organism or a part thereof; and
[16606] (b) growing the non-human organism or a part thereof under conditions which permit the production of serine or a composition comprising serine in said non-human organism or in the culture medium surrounding said non-human organism.

[16607] A further embodiment of the present invention relates to a process for the production of aspartate, which comprises
[16608] (a) increasing or generating the activity of a transport protein non-targeted in a non-human organism or a part thereof, preferably a microorganism, a plant cell, a plant or a part thereof, as compared to a corresponding non-transformed wild type non-human organism or a part thereof; and
[16609] (b) growing the non-human organism or a part thereof under conditions which permit the production of aspartate or a composition comprising aspartate in said non-human organism or in the culture medium surrounding said non-human organism.

[16610] A further embodiment of the present invention relates to a process for the production of tyrosine, which comprises
[16611] (a) increasing or generating the activity of a O-antigen chain length determinant non-targeted in a non-human organism or a part thereof, preferably a microorganism, a plant cell, a plant or a part thereof, as compared to a corresponding non-transformed wild type non-human organism or a part thereof; and
[16612] (b) growing the non-human organism or a part thereof under conditions which permit the production of tyrosine or a composition comprising tyrosine in said non-human organism or in the culture medium surrounding said non-human organism.

[16613] A further embodiment of the present invention relates to a process for the production of aspartate, which comprises
[16614] (a) increasing or generating the activity of a b2032-protein non-targeted in a non-human organism or a part thereof, preferably a microorganism, a plant cell, a plant or a part thereof, as compared to a corresponding non-transformed wild type non-human organism or a part thereof; and
[16615] (b) growing the non-human organism or a part thereof under conditions which permit the production of aspartate or a composition comprising aspartate in said non-human organism or in the culture medium surrounding said non-human organism.

[16616] A further embodiment of the present invention relates to a process for the production of aspartate, which comprises
[16617] (a) increasing or generating the activity of a transport protein non-targeted in a non-human organism or a part thereof, preferably a microorganism, a plant cell, a plant or a part thereof, as compared to a corresponding non-transformed wild type non-human organism or a part thereof; and
[16618] (b) growing the non-human organism or a part thereof under conditions which permit the production of aspartate or a composition comprising aspartate in said non-human organism or in the culture medium surrounding said non-human organism.

[16619] A further embodiment of the present invention relates to a process for the production of phenylalanine, which comprises
[16620] (a) increasing or generating the activity of a transport protein non-targeted in a non-human organism or a part thereof, preferably a microorganism, a plant cell, a plant or a part thereof, as compared to a corresponding non-transformed wild type non-human organism or a part thereof; and
[16621] (b) growing the non-human organism or a part thereof under conditions which permit the production of phenylalanine or a composition comprising phenylalanine in said non-human organism or in the culture medium surrounding said non-human organism.

[16622] A further embodiment of the present invention relates to a process for the production of serine, which comprises
[16623] (a) increasing or generating the activity of a transport protein non-targeted in a non-human organism or a part thereof, preferably a microorganism, a plant cell, a plant or a part thereof, as compared to a corresponding non-transformed wild type non-human organism or a part thereof; and
[16624] (b) growing the non-human organism or a part thereof under conditions which permit the production of serine or a composition comprising serine in said non-human organism or in the culture medium surrounding said non-human organism.

[16625] A further embodiment of the present invention relates to a process for the production of tyrosine, which comprises
[16626] (a) increasing or generating the activity of a transport protein non-targeted in a non-human organism or a part thereof, preferably a microorganism, a plant cell, a plant or a part thereof, as compared to a corresponding non-transformed wild type non-human organism or a part thereof; and
[16627] (b) growing the non-human organism or a part thereof under conditions which permit the production of tyrosine or a composition comprising tyrosine in said non-human organism or in the culture medium surrounding said non-human organism.

[16628] A further embodiment of the present invention relates to a process for the production of 5-oxoproline, which comprises
[16629] (a) increasing or generating the activity of a uridine/cytidine kinase non-targeted in a non-human organism or a part thereof, preferably a microorganism, a plant cell, a plant or a part thereof, as compared to a corresponding non-transformed wild type non-human organism or a part thereof; and
[16630] (b) growing the non-human organism or a part thereof under conditions which permit the production of 5-oxoproline or a composition comprising 5-oxoproline in said non-human organism or in the culture medium surrounding said non-human organism.

[16631] A further embodiment of the present invention relates to a process for the production of aspartate, which comprises
[16632] (a) increasing or generating the activity of a b2107-protein non-targeted in a non-human organism or a part thereof, preferably a microorganism, a plant cell, a plant or a part thereof, as compared to a corresponding non-transformed wild type non-human organism or a part thereof; and
[16633] (b) growing the non-human organism or a part thereof under conditions which permit the production of aspartate or a composition comprising aspartate in said non-human organism or in the culture medium surrounding said non-human organism.

[16634] A further embodiment of the present invention relates to a process for the production of aspartate, which comprises
[16635] (a) increasing or generating the activity of a ABC transporter permease protein non-targeted in a non-human organism or a part thereof, preferably a microorganism, a plant cell, a plant or a part thereof, as compared to a corresponding non-transformed wild type non-human organism or a part thereof; and
[16636] (b) growing the non-human organism or a part thereof under conditions which permit the production of aspartate or a composition comprising aspartate in said non-human organism or in the culture medium surrounding said non-human organism.

[16637] A further embodiment of the present invention relates to a process for the production of citrulline, which comprises
[16638] (a) increasing or generating the activity of a ABC transporter permease protein non-targeted in a non-human organism or a part thereof, preferably a microorganism, a plant cell, a plant or a part thereof, as compared to a corresponding non-transformed wild type non-human organism or a part thereof; and
[16639] (b) growing the non-human organism or a part thereof under conditions which permit the production of citrulline or a composition comprising citrulline in said non-human organism or in the culture medium surrounding said non-human organism.

[16640] A further embodiment of the present invention relates to a process for the production of phenylalanine, which comprises
[16641] (a) increasing or generating the activity of a ABC transporter permease protein non-targeted in a non-human organism or a part thereof, preferably a microorganism, a plant cell, a plant or a part thereof, as compared to a corresponding non-transformed wild type non-human organism or a part thereof; and
[16642] (b) growing the non-human organism or a part thereof under conditions which permit the production of phenylalanine or a composition comprising phenylalanine in said non-human organism or in the culture medium surrounding said non-human organism.

[16643] A further embodiment of the present invention relates to a process for the production of serine, which comprises
[16644] (a) increasing or generating the activity of a ABC transporter permease protein non-targeted in a non-human organism or a part thereof, preferably a microorganism, a plant cell, a plant or a part thereof, as compared to a corresponding non-transformed wild type non-human organism or a part thereof; and
[16645] (b) growing the non-human organism or a part thereof under conditions which permit the production of serine or a composition comprising serine in said non-human organism or in the culture medium surrounding said non-human organism.

[16646] A further embodiment of the present invention relates to a process for the production of tyrosine, which comprises
[16647] (a) increasing or generating the activity of a ABC transporter permease protein non-targeted in a non-human organism or a part thereof, preferably a microorganism, a plant cell, a plant or a part thereof, as compared to a corresponding non-transformed wild type non-human organism or a part thereof; and
[16648] (b) growing the non-human organism or a part thereof under conditions which permit the production of tyrosine or a composition comprising tyrosine in said non-human organism or in the culture medium surrounding said non-human organism.

[16649] A further embodiment of the present invention relates to a process for the production of glycine, which comprises
[16650] (a) increasing or generating the activity of a sn-glycerol-3-phosphate dehydrogenase non-targeted in a non-human organism or a part thereof, preferably a microorganism, a plant cell, a plant or a part thereof, as compared to a corresponding non-transformed wild type non-human organism or a part thereof; and
[16651] (b) growing the non-human organism or a part thereof under conditions which permit the production of glycine or a composition comprising glycine in said non-human organism or in the culture medium surrounding said non-human organism.

[16652] A further embodiment of the present invention relates to a process for the production of asparagine, which comprises
[16653] (a) increasing or generating the activity of a NADH dehydrogenase I chain I non-targeted in a non-human organism or a part thereof, preferably a microorganism, a plant cell, a plant or a part thereof, as compared to a corresponding non-transformed wild type non-human organism or a part thereof; and
[16654] (b) growing the non-human organism or a part thereof under conditions which permit the production of asparagine or a composition comprising asparagine in said non-human organism or in the culture medium surrounding said non-human organism.

[16655] A further embodiment of the present invention relates to a process for the production of aspartate, which comprises
[16656] (a) increasing or generating the activity of a b2360-protein non-targeted in a non-human organism or a part thereof, preferably a microorganism, a plant cell, a plant or a part thereof, as compared to a corresponding non-transformed wild type non-human organism or a part thereof; and
[16657] (b) growing the non-human organism or a part thereof under conditions which permit the production of aspartate or a composition comprising aspartate in said non-human organism or in the culture medium surrounding said non-human organism.

[16658] A further embodiment of the present invention relates to a process for the production of serine, which comprises
[16659] (a) increasing or generating the activity of a D-serine dehydratase non-targeted in a non-human organism or a part thereof, preferably a microorganism, a plant cell, a plant or a part thereof, as compared to a corresponding non-transformed wild type non-human organism or a part thereof; and
[16660] (b) growing the non-human organism or a part thereof under conditions which permit the production of serine or a composition comprising serine in said non-human organism or in the culture medium surrounding said non-human organism.

[16661] A further embodiment of the present invention relates to a process for the production of tyrosine, which comprises
[16662] (a) increasing or generating the activity of a b2399-protein non-targeted in a non-human organism or a part thereof, preferably a microorganism, a plant cell, a plant or a part thereof, as compared to a corresponding non-transformed wild type non-human organism or a part thereof; and
[16663] (b) growing the non-human organism or a part thereof under conditions which permit the production of tyrosine or a composition comprising tyrosine in said non-human organism or in the culture medium surrounding said non-human organism.

[16664] A further embodiment of the present invention relates to a process for the production of 3,4-dihydroxyphenylalanine (dopa), which comprises
[16665] (a) increasing or generating the activity of a b2399-protein non-targeted in a non-human organism or a part thereof, preferably a microorganism, a plant cell, a plant or a part thereof, as compared to a corresponding non-transformed wild type non-human organism or a part thereof; and
[16666] (b) growing the non-human organism or a part thereof under conditions which permit the production of 3,4-dihydroxyphenylalanine (dopa) or a composition comprising 3,4-dihydroxyphenylalanine (dopa) in said non-human organism or in the culture medium surrounding said non-human organism.

[16667] A further embodiment of the present invention relates to a process for the production of 5-oxoproline, which comprises
[16668] (a) increasing or generating the activity of a b2399-protein non-targeted in a non-human organism or a part thereof, preferably a microorganism, a plant cell, a plant or a part thereof, as compared to a corresponding non-transformed wild type non-human organism or a part thereof; and
[16669] (b) growing the non-human organism or a part thereof under conditions which permit the production of 5-oxoproline or a composition comprising 5-oxoproline in said non-human organism or in the culture medium surrounding said non-human organism.

[16670] A further embodiment of the present invention relates to a process for the production of alanine, which comprises
[16671] (a) increasing or generating the activity of a transcriptional regulator non-targeted in a non-human organism or a part thereof, preferably a microorganism, a plant cell, a plant or a part thereof, as compared to a corresponding non-transformed wild type non-human organism or a part thereof; and
[16672] (b) growing the non-human organism or a part thereof under conditions which permit the production of alanine or a composition comprising alanine in said non-human organism or in the culture medium surrounding said non-human organism.

[16673] A further embodiment of the present invention relates to a process for the production of aspartate, which comprises
[16674] (a) increasing or generating the activity of a transcriptional regulator non-targeted in a non-human organism or a part thereof, preferably a microorganism, a plant cell, a plant or a part thereof, as compared to a corresponding non-transformed wild type non-human organism or a part thereof; and
[16675] (b) growing the non-human organism or a part thereof under conditions which permit the production of aspartate or a composition comprising aspartate in said non-human organism or in the culture medium surrounding said non-human organism.

[16676] A further embodiment of the present invention relates to a process for the production of phenylalanine, which comprises
[16677] (a) increasing or generating the activity of a PTS system N-acetylmuramic acid-specific EIIBC component non-targeted in a non-human organism or a part thereof, preferably a microorganism, a plant cell, a plant or a part thereof, as compared to a corresponding non-transformed wild type non-human organism or a part thereof; and
[16678] (b) growing the non-human organism or a part thereof under conditions which permit the production of phenylalanine or a composition comprising phenylalanine in said non-human organism or in the culture medium surrounding said non-human organism.

[16679] A further embodiment of the present invention relates to a process for the production of citrulline, which comprises
[16680] (a) increasing or generating the activity of a b2474-protein non-targeted in a non-human organism or a part thereof, preferably a microorganism, a plant cell, a plant or a part thereof, as compared to a corresponding non-transformed wild type non-human organism or a part thereof; and
[16681] (b) growing the non-human organism or a part thereof under conditions which permit the production of citrulline or a composition comprising citrulline in said non-human organism or in the culture medium surrounding said non-human organism.

[16682] A further embodiment of the present invention relates to a process for the production of glycine, which comprises
[16683] (a) increasing or generating the activity of a b2474-protein non-targeted in a non-human organism or a part thereof, preferably a microorganism, a plant cell, a plant or a part thereof, as compared to a corresponding non-transformed wild type non-human organism or a part thereof; and
[16684] (b) growing the non-human organism or a part thereof under conditions which permit the production of glycine or a composition comprising glycine in said non-human organism or in the culture medium surrounding said non-human organism.

[16685] A further embodiment of the present invention relates to a process for the production of serine, which comprises
[16686] (a) increasing or generating the activity of a NADH dehydrogenase subunit N non-targeted in a non-human organism or a part thereof, preferably a microorganism, a plant cell, a plant or a part thereof, as compared to a corresponding non-transformed wild type non-human organism or a part thereof; and
[16687] (b) growing the non-human organism or a part thereof under conditions which permit the production of serine or a composition comprising serine in said non-human organism or in the culture medium surrounding said non-human organism.

[16688] A further embodiment of the present invention relates to a process for the production of 5-oxoproline, which comprises
[16689] (a) increasing or generating the activity of a NADH dehydrogenase subunit N non-targeted in a non-human organism or a part thereof, preferably a microorganism, a plant cell, a plant or a part thereof, as compared to a corresponding non-transformed wild type non-human organism or a part thereof; and
[16690] (b) growing the non-human organism or a part thereof under conditions which permit the production of 5-oxoproline or a composition comprising 5-oxoproline in said non-human organism or in the culture medium surrounding said non-human organism.

[16691] A further embodiment of the present invention relates to a process for the production of phenylalanine, which comprises
[16692] (a) increasing or generating the activity of a b2513-protein non-targeted in a non-human organism or a part thereof, preferably a microorganism, a plant cell, a plant or a part thereof, as compared to a corresponding non-transformed wild type non-human organism or a part thereof; and
[16693] (b) growing the non-human organism or a part thereof under conditions which permit the production of phenylalanine or a composition comprising phenylalanine in said non-human organism or in the culture medium surrounding said non-human organism.

[16694] A further embodiment of the present invention relates to a process for the production of tyrosine, which comprises
[16695] (a) increasing or generating the activity of a b2513-protein non-targeted in a non-human organism or a part thereof, preferably a microorganism, a plant cell, a plant or a part thereof, as compared to a corresponding non-transformed wild type non-human organism or a part thereof; and
[16696] (b) growing the non-human organism or a part thereof under conditions which permit the production of tyrosine or a composition comprising tyrosine in said non-human organism or in the culture medium surrounding said non-human organism.

[16697] A further embodiment of the present invention relates to a process for the production of serine, which comprises
[16698] (a) increasing or generating the activity of a serine hydroxymethyltransferase non-targeted in a non-human organism or a part thereof, preferably a microorganism, a plant cell, a plant or a part thereof, as compared to a corresponding non-transformed wild type non-human organism or a part thereof; and
[16699] (b) growing the non-human organism or a part thereof under conditions which permit the production of serine or a composition comprising serine in said non-human organism or in the culture medium surrounding said non-human organism.

[16700] A further embodiment of the present invention relates to a process for the production of phenylalanine, which comprises
[16701] (a) increasing or generating the activity of a chorismate mutase-T and prephenate dehydrogenase non-targeted in a non-human organism or a part thereof, preferably a microorganism, a plant cell, a plant or a part thereof, as compared to a corresponding non-transformed wild type non-human organism or a part thereof; and
[16702] (b) growing the non-human organism or a part thereof under conditions which permit the production of phenylalanine or a composition comprising phenylalanine in said non-human organism or in the culture medium surrounding said non-human organism.

[16703] A further embodiment of the present invention relates to a process for the production of alanine, which comprises
[16704] (a) increasing or generating the activity of a b2613-protein non-targeted in a non-human organism or a part thereof, preferably a microorganism, a plant cell, a plant or a part thereof, as compared to a corresponding non-transformed wild type non-human organism or a part thereof; and
[16705] (b) growing the non-human organism or a part thereof under conditions which permit the production of alanine or a composition comprising alanine in said non-human organism or in the culture medium surrounding said non-human organism.

[16706] A further embodiment of the present invention relates to a process for the production of phenylalanine, which comprises
[16707] (a) increasing or generating the activity of a transcriptional regulator non-targeted in a non-human organism or a part thereof, preferably a microorganism, a plant cell, a plant or a part thereof, as compared to a corresponding non-transformed wild type non-human organism or a part thereof; and
[16708] (b) growing the non-human organism or a part thereof under conditions which permit the production of phenylalanine or a composition comprising phenylalanine in said non-human organism or in the culture medium surrounding said non-human organism.

[16709] A further embodiment of the present invention relates to a process for the production of tyrosine, which comprises
[16710] (a) increasing or generating the activity of a transcriptional regulator non-targeted in a non-human organism or a part thereof, preferably a microorganism, a plant cell, a plant or a part thereof, as compared to a corresponding non-transformed wild type non-human organism or a part thereof; and
[16711] (b) growing the non-human organism or a part thereof under conditions which permit the production of tyrosine or a composition comprising tyrosine in said non-human organism or in the culture medium surrounding said non-human organism.

[16712] A further embodiment of the present invention relates to a process for the production of phenylalanine, which comprises
[16713] (a) increasing or generating the activity of a b2673-protein non-targeted in a non-human organism or a part thereof, preferably a microorganism, a plant cell, a plant or a part thereof, as compared to a corresponding non-transformed wild type non-human organism or a part thereof; and
[16714] (b) growing the non-human organism or a part thereof under conditions which permit the production of phenylalanine or a composition comprising phenylalanine in said non-human organism or in the culture medium surrounding said non-human organism.

[16715] A further embodiment of the present invention relates to a process for the production of tyrosine, which comprises
[16716] (a) increasing or generating the activity of a b2673-protein non-targeted in a non-human organism or a part thereof, preferably a microorganism, a plant cell, a plant or a part thereof, as compared to a corresponding non-transformed wild type non-human organism or a part thereof; and
[16717] (b) growing the non-human organism or a part thereof under conditions which permit the production of tyrosine or a composition comprising tyrosine in said non-human organism or in the culture medium surrounding said non-human organism.

[16718] A further embodiment of the present invention relates to a process for the production of aspartate, which comprises
[16719] (a) increasing or generating the activity of a transport protein non-targeted in a non-human organism or a part thereof, preferably a microorganism, a plant cell, a plant or a part thereof, as compared to a corresponding non-transformed wild type non-human organism or a part thereof; and
[16720] (b) growing the non-human organism or a part thereof under conditions which permit the production of aspartate or a composition comprising aspartate in said non-human organism or in the culture medium surrounding said non-human organism.

[16721] A further embodiment of the present invention relates to a process for the production of alanine, which comprises
[16722] (a) increasing or generating the activity of a murein transglycosylase non-targeted in a non-human organism or a part thereof, preferably a microorganism, a plant cell, a plant or a part thereof, as compared to a corresponding non-transformed wild type non-human organism or a part thereof; and
[16723] (b) growing the non-human organism or a part thereof under conditions which permit the production of alanine or a composition comprising alanine in said non-human organism or in the culture medium surrounding said non-human organism.

[16724] A further embodiment of the present invention relates to a process for the production of phenylalanine, which comprises
[16725] (a) increasing or generating the activity of a murein transglycosylase non-targeted in a non-human organism or a part thereof, preferably a microorganism, a plant cell, a plant or a part thereof, as compared to a corresponding non-transformed wild type non-human organism or a part thereof; and
[16726] (b) growing the non-human organism or a part thereof under conditions which permit the production of phenylalanine or a composition comprising phenylalanine in said non-human organism or in the culture medium surrounding said non-human organism.

[16727] A further embodiment of the present invention relates to a process for the production of tyrosine, which comprises
[16728] (a) increasing or generating the activity of a murein transglycosylase non-targeted in a non-human organism or a part thereof, preferably a microorganism, a plant cell, a plant or a part thereof, as compared to a corresponding non-transformed wild type non-human organism or a part thereof; and
[16729] (b) growing the non-human organism or a part thereof under conditions which permit the production of tyrosine or a composition comprising tyrosine in said non-human organism or in the culture medium surrounding said non-human organism.

[16730] A further embodiment of the present invention relates to a process for the production of alanine, which comprises
[16731] (a) increasing or generating the activity of a transcriptional regulator non-targeted in a non-human organism or a part thereof, preferably a microorganism, a plant cell, a plant or a part thereof, as compared to a corresponding non-transformed wild type non-human organism or a part thereof; and
[16732] (b) growing the non-human organism or a part thereof under conditions which permit the production of alanine or a composition comprising alanine in said non-human organism or in the culture medium surrounding said non-human organism.

[16733] A further embodiment of the present invention relates to a process for the production of alanine, which comprises
[16734] (a) increasing or generating the activity of a b2739-protein non-targeted in a non-human organism or a part thereof, preferably a microorganism, a plant cell, a plant or a part thereof, as compared to a corresponding non-transformed wild type non-human organism or a part thereof; and
[16735] (b) growing the non-human organism or a part thereof under conditions which permit the production of alanine or a composition comprising alanine in said non-human organism or in the culture medium surrounding said non-human organism.

[16736] A further embodiment of the present invention relates to a process for the production of phenylalanine, which comprises
[16737] (a) increasing or generating the activity of a b2739-protein non-targeted in a non-human organism or a part thereof, preferably a microorganism, a plant cell, a plant or a part thereof, as compared to a corresponding non-transformed wild type non-human organism or a part thereof; and
[16738] (b) growing the non-human organism or a part thereof under conditions which permit the production of phenylalanine or a composition comprising phenylalanine in said non-human organism or in the culture medium surrounding said non-human organism.

[16739] A further embodiment of the present invention relates to a process for the production of tyrosine, which comprises
[16740] (a) increasing or generating the activity of a b2739-protein non-targeted in a non-human organism or a part thereof, preferably a microorganism, a plant cell, a plant or a part thereof, as compared to a corresponding non-transformed wild type non-human organism or a part thereof; and
[16741] (b) growing the non-human organism or a part thereof under conditions which permit the production of tyrosine or a composition comprising tyrosine in said non-human organism or in the culture medium surrounding said non-human organism.

[16742] A further embodiment of the present invention relates to a process for the production of tyrosine, which comprises
[16743] (a) increasing or generating the activity of a 2-C-methyl-D-erythritol 4-phosphate cytidylyltransferase non-targeted in a non-human organism or a part thereof, preferably a microorganism, a plant cell, a plant or a part thereof, as compared to a corresponding non-transformed wild type non-human organism or a part thereof; and
[16744] (b) growing the non-human organism or a part thereof under conditions which permit the production of tyrosine or a composition comprising tyrosine in said non-human organism or in the culture medium surrounding said non-human organism.

[16745] A further embodiment of the present invention relates to a process for the production of 5-oxoproline, which comprises
[16746] (a) increasing or generating the activity of a 2-C-methyl-D-erythritol 4-phosphate cytidylyltransferase non-targeted in a non-human organism or a part thereof, preferably a microorganism, a plant cell, a plant or a part thereof, as compared to a corresponding non-transformed wild type non-human organism or a part thereof; and
[16747] (b) growing the non-human organism or a part thereof under conditions which permit the production of 5-oxoproline or a composition comprising 5-oxoproline in said non-human organism or in the culture medium surrounding said non-human organism.

[16748] A further embodiment of the present invention relates to a process for the production of phenylalanine, which comprises
[16749] (a) increasing or generating the activity of a phosphoadenosine phosphosulfate reductase non-targeted in a non-human organism or a part thereof, preferably a microorganism, a plant cell, a plant or a part thereof, as compared to a corresponding non-transformed wild type non-human organism or a part thereof; and
[16750] (b) growing the non-human organism or a part thereof under conditions which permit the production of phenylalanine or a composition comprising phenylalanine in said non-human organism or in the culture medium surrounding said non-human organism.

[16751] A further embodiment of the present invention relates to a process for the production of phenylalanine, which comprises
[16752] (a) increasing or generating the activity of a b2812-protein non-targeted in a non-human organism or a part thereof, preferably a microorganism, a plant cell, a plant or a part thereof, as compared to a corresponding non-transformed wild type non-human organism or a part thereof; and
[16753] (b) growing the non-human organism or a part thereof under conditions which permit the production of phenylalanine or a composition comprising phenylalanine in said non-human organism or in the culture medium surrounding said non-human organism.

[16754] A further embodiment of the present invention relates to a process for the production of serine, which comprises
[16755] (a) increasing or generating the activity of a b2812-protein non-targeted in a non-human organism or a part thereof, preferably a microorganism, a plant cell, a plant or a part thereof, as compared to a corresponding non-transformed wild type non-human organism or a part thereof; and
[16756] (b) growing the non-human organism or a part thereof under conditions which permit the production of serine or a composition comprising serine in said non-human organism or in the culture medium surrounding said non-human organism.

[16757] A further embodiment of the present invention relates to a process for the production of tyrosine, which comprises
[16758] (a) increasing or generating the activity of a b2812-protein non-targeted in a non-human organism or a part thereof, preferably a microorganism, a plant cell, a plant or a part thereof, as compared to a corresponding non-transformed wild type non-human organism or a part thereof; and
[16759] (b) growing the non-human organism or a part thereof under conditions which permit the production of tyrosine or a composition comprising tyrosine in said non-human organism or in the culture medium surrounding said non-human organism.

[16760] A further embodiment of the present invention relates to a process for the production of phenylalanine, which comprises
[16761] (a) increasing or generating the activity of a amino-acid acetyltransferase non-targeted in a non-human organism or a part thereof, preferably a microorganism, a plant cell, a plant or a part thereof, as compared to a corresponding non-transformed wild type non-human organism or a part thereof; and
[16762] (b) growing the non-human organism or a part thereof under conditions which permit the production of phenylalanine or a composition comprising phenylalanine in said non-human organism or in the culture medium surrounding said non-human organism.

[16763] A further embodiment of the present invention relates to a process for the production of tyrosine, which comprises
[16764] (a) increasing or generating the activity of a amino-acid acetyltransferase non-targeted in a non-human organism or a part thereof, preferably a microorganism, a plant cell, a plant or a part thereof, as compared to a corresponding non-transformed wild type non-human organism or a part thereof; and
[16765] (b) growing the non-human organism or a part thereof under conditions which permit the production of tyrosine or a composition comprising tyrosine in said non-human organism or in the culture medium surrounding said non-human organism.

[16766] A further embodiment of the present invention relates to a process for the production of 5-oxoproline, which comprises
[16767] (a) increasing or generating the activity of a amino-acid acetyltransferase non-targeted in a non-human organism or a part thereof, preferably a microorganism, a plant cell, a plant or a part thereof, as compared to a corresponding non-transformed wild type non-human organism or a part thereof; and
[16768] (b) growing the non-human organism or a part thereof under conditions which permit the production of 5-oxoproline or a composition comprising 5-oxoproline in said non-human organism or in the culture medium surrounding said non-human organism.

[16769] A further embodiment of the present invention relates to a process for the production of aspartate, which comprises
[16770] (a) increasing or generating the activity of a prolipoprotein diacylglyceryl transferase non-targeted in a non-human organism or a part thereof, preferably a microorganism, a plant cell, a plant or a part thereof, as compared to a corresponding non-transformed wild type non-human organism or a part thereof; and
[16771] (b) growing the non-human organism or a part thereof under conditions which permit the production of aspartate or a composition comprising aspartate in said non-human organism or in the culture medium surrounding said non-human organism.

[16772] A further embodiment of the present invention relates to a process for the production of tyrosine, which comprises
[16773] (a) increasing or generating the activity of a transcriptional regulator non-targeted in a non-human organism or a part thereof, preferably a microorganism, a plant cell, a plant or a part thereof, as compared to a corresponding non-transformed wild type non-human organism or a part thereof; and
[16774] (b) growing the non-human organism or a part thereof under conditions which permit the production of tyrosine or a composition comprising tyrosine in said non-human organism or in the culture medium surrounding said non-human organism.

[16775] A further embodiment of the present invention relates to a process for the production of phenylalanine, which comprises
[16776] (a) increasing or generating the activity of a b2849-protein non-targeted in a non-human organism or a part thereof, preferably a microorganism, a plant cell, a plant or a part thereof, as compared to a corresponding non-transformed wild type non-human organism or a part thereof; and
[16777] (b) growing the non-human organism or a part thereof under conditions which permit the production of phenylalanine or a composition comprising phenylalanine in said non-human organism or in the culture medium surrounding said non-human organism.

[16778] A further embodiment of the present invention relates to a process for the production of glycine, which comprises
[16779] (a) increasing or generating the activity of a D-3-phosphoglycerate dehydrogenase non-targeted in a non-human organism or a part thereof, preferably a microorganism, a plant cell, a plant or a part thereof, as compared to a corresponding non-transformed wild type non-human organism or a part thereof; and
[16780] (b) growing the non-human organism or a part thereof under conditions which permit the production of glycine or a composition comprising glycine in said non-human organism or in the culture medium surrounding said non-human organism.

[16781] A further embodiment of the present invention relates to a process for the production of serine, which comprises
[16782] (a) increasing or generating the activity of a D-3-phosphoglycerate dehydrogenase non-targeted in a non-human organism or a part thereof, preferably a microorganism, a plant cell, a plant or a part thereof, as compared to a corresponding non-transformed wild type non-human organism or a part thereof; and
[16783] (b) growing the non-human organism or a part thereof under conditions which permit the production of serine or a composition comprising serine in said non-human organism or in the culture medium surrounding said non-human organism.

[16784] A further embodiment of the present invention relates to a process for the production of aspartate, which comprises
[16785] (a) increasing or generating the activity of a arginine exporter protein non-targeted in a non-human organism or a part thereof, preferably a microorganism, a plant cell, a plant or a part thereof, as compared to a corresponding non-transformed wild type non-human organism or a part thereof; and
[16786] (b) growing the non-human organism or a part thereof under conditions which permit the production of aspartate or a composition comprising aspartate in said non-human organism or in the culture medium surrounding said non-human organism.

[16787] A further embodiment of the present invention relates to a process for the production of asparagine, which comprises
[16788] (a) increasing or generating the activity of a glycoprotease non-targeted in a non-human organism or a part thereof, preferably a microorganism, a plant cell, a plant or a part thereof, as compared to a corresponding non-transformed wild type non-human organism or a part thereof; and
[16789] (b) growing the non-human organism or a part thereof under conditions which permit the production of asparagine or a composition comprising asparagine in said non-human organism or in the culture medium surrounding said non-human organism.

[16790] A further embodiment of the present invention relates to a process for the production of phenylalanine, which comprises
[16791] (a) increasing or generating the activity of a b3083-protein non-targeted in a non-human organism or a part thereof, preferably a microorganism, a plant cell, a plant or a part thereof, as compared to a corresponding non-transformed wild type non-human organism or a part thereof; and
[16792] (b) growing the non-human organism or a part thereof under conditions which permit the production of phenylalanine or a composition comprising phenylalanine in said non-human organism or in the culture medium surrounding said non-human organism.

[16793] A further embodiment of the present invention relates to a process for the production of serine, which comprises
[16794] (a) increasing or generating the activity of a b3083-protein non-targeted in a non-human organism or a part thereof, preferably a microorganism, a plant cell, a plant or a part thereof, as compared to a corresponding non-transformed wild type non-human organism or a part thereof; and
[16795] (b) growing the non-human organism or a part thereof under conditions which permit the production of serine or a composition comprising serine in said non-human organism or in the culture medium surrounding said non-human organism.

[16796] A further embodiment of the present invention relates to a process for the production of tyrosine, which comprises
[16797] (a) increasing or generating the activity of a b3083-protein non-targeted in a non-human organism or a part thereof, preferably a microorganism, a plant cell, a plant or a part thereof, as compared to a corresponding non-transformed wild type non-human organism or a part thereof; and
[16798] (b) growing the non-human organism or a part thereof under conditions which permit the production of tyrosine or a composition comprising tyrosine in said non-human organism or in the culture medium surrounding said non-human organism.

[16799] A further embodiment of the present invention relates to a process for the production of alanine, which comprises
[16800] (a) increasing or generating the activity of a b3098-protein non-targeted in a non-human organism or a part thereof, preferably a microorganism, a plant cell, a plant or a part thereof, as compared to a corresponding non-transformed wild type non-human organism or a part thereof; and
[16801] (b) growing the non-human organism or a part thereof under conditions which permit the production of alanine or a composition comprising alanine in said non-human organism or in the culture medium surrounding said non-human organism.

[16802] A further embodiment of the present invention relates to a process for the production of glycine, which comprises
[16803] (a) increasing or generating the activity of a b3098-protein non-targeted in a non-human organism or a part thereof, preferably a microorganism, a plant cell, a plant or a part thereof, as compared to a corresponding non-transformed wild type non-human organism or a part thereof; and
[16804] (b) growing the non-human organism or a part thereof under conditions which permit the production of glycine or a composition comprising glycine in said non-human organism or in the culture medium surrounding said non-human organism.

[16805] A further embodiment of the present invention relates to a process for the production of tyrosine, which comprises
[16806] (a) increasing or generating the activity of a b3121-protein non-targeted in a non-human organism or a part thereof, preferably a microorganism, a plant cell, a plant or a part thereof, as compared to a corresponding non-transformed wild type non-human organism or a part thereof; and
[16807] (b) growing the non-human organism or a part thereof under conditions which permit the production of tyrosine or a composition comprising tyrosine in said non-human organism or in the culture medium surrounding said non-human organism.

[16808] A further embodiment of the present invention relates to a process for the production of tyrosine, which comprises
[16809] (a) increasing or generating the activity of a b3221-protein non-targeted in a non-human organism or a part thereof, preferably a microorganism, a plant cell, a plant or a part thereof, as compared to a corresponding non-transformed wild type non-human organism or a part thereof; and
[16810] (b) growing the non-human organism or a part thereof under conditions which permit the production of tyrosine or a composition comprising tyrosine in said non-human organism or in the culture medium surrounding said non-human organism.

[16811] A further embodiment of the present invention relates to a process for the production of serine, which comprises
[16812] (a) increasing or generating the activity of a b3246-protein non-targeted in a non-human organism or a part thereof, preferably a microorganism, a plant cell, a plant or a part thereof, as compared to a corresponding non-transformed wild type non-human organism or a part thereof; and
[16813] (b) growing the non-human organism or a part thereof under conditions which permit the production of serine or a composition comprising serine in said non-human organism or in the culture medium surrounding said non-human organism.

[16814] A further embodiment of the present invention relates to a process for the production of 5-oxoproline, which comprises
[16815] (a) increasing or generating the activity of a b3246-protein non-targeted in a non-human organism or a part thereof, preferably a microorganism, a plant cell, a plant or a part thereof, as compared to a corresponding non-transformed wild type non-human organism or a part thereof; and
[16816] (b) growing the non-human organism or a part thereof under conditions which permit the production of 5-oxoproline or a composition comprising 5-oxoproline in said non-human organism or in the culture medium surrounding said non-human organism.

[16817] A further embodiment of the present invention relates to a process for the production of asparagine, which comprises
[16818] (a) increasing or generating the activity of a acetyl CoA carboxylase non-targeted in a non-human organism or a part thereof, preferably a microorganism, a plant cell, a plant or a part thereof, as compared to a corresponding non-transformed wild type non-human organism or a part thereof; and
[16819] (b) growing the non-human organism or a part thereof under conditions which permit the production of asparagine or a composition comprising asparagine in said non-human organism or in the culture medium surrounding said non-human organism.

[16820] A further embodiment of the present invention relates to a process for the production of glycine, which comprises
[16821] (a) increasing or generating the activity of a acetyl CoA carboxylase non-targeted in a non-human organism or a part thereof, preferably a microorganism, a plant cell, a plant or a part thereof, as compared to a corresponding non-transformed wild type non-human organism or a part thereof; and
[16822] (b) growing the non-human organism or a part thereof under conditions which permit the production of glycine or a composition comprising glycine in said non-human organism or in the culture medium surrounding said non-human organism.

[16823] A further embodiment of the present invention relates to a process for the production of serine, which comprises
[16824] (a) increasing or generating the activity of a acetyl CoA carboxylase non-targeted in a non-human organism or a part thereof, preferably a microorganism, a plant cell, a plant or a part thereof, as compared to a corresponding non-transformed wild type non-human organism or a part thereof; and
[16825] (b) growing the non-human organism or a part thereof under conditions which permit the production of serine or a composition comprising serine in said non-human organism or in the culture medium surrounding said non-human organism.

[16826] A further embodiment of the present invention relates to a process for the production of 5-oxoproline, which comprises
[16827] (a) increasing or generating the activity of a acetyl CoA carboxylase non-targeted in a non-human organism or a part thereof, preferably a microorganism, a plant cell, a plant or a part thereof, as compared to a corresponding non-transformed wild type non-human organism or a part thereof; and
[16828] (b) growing the non-human organism or a part thereof under conditions which permit the production of 5-oxoproline or a composition comprising 5-oxoproline in said non-human organism or in the culture medium surrounding said non-human organism.

[16829] A further embodiment of the present invention relates to a process for the production of alanine, which comprises
[16830] (a) increasing or generating the activity of a methyltransferase non-targeted in a non-human organism or a part thereof, preferably a microorganism, a plant cell, a plant or a part thereof, as compared to a corresponding non-transformed wild type non-human organism or a part thereof; and
[16831] (b) growing the non-human organism or a part thereof under conditions which permit the production of alanine or a composition comprising alanine in said non-human organism or in the culture medium surrounding said non-human organism.

[16832] A further embodiment of the present invention relates to a process for the production of phenylalanine, which comprises
[16833] (a) increasing or generating the activity of a methyltransferase non-targeted in a non-human organism or a part thereof, preferably a microorganism, a plant cell, a plant or a part thereof, as compared to a corresponding non-transformed wild type non-human organism or a part thereof; and
[16834] (b) growing the non-human organism or a part thereof under conditions which permit the production of phenylalanine or a composition comprising phenylalanine in said non-human organism or in the culture medium surrounding said non-human organism.

[16835] A further embodiment of the present invention relates to a process for the production of serine, which comprises
[16836] (a) increasing or generating the activity of a methyltransferase non-targeted in a non-human organism or a part thereof, preferably a microorganism, a plant cell, a plant or a part thereof, as compared to a corresponding non-transformed wild type non-human organism or a part thereof; and
[16837] (b) growing the non-human organism or a part thereof under conditions which permit the production of serine or a composition comprising serine in said non-human organism or in the culture medium surrounding said non-human organism.

[16838] A further embodiment of the present invention relates to a process for the production of tyrosine, which comprises
[16839] (a) increasing or generating the activity of a methyltransferase non-targeted in a non-human organism or a part thereof, preferably a microorganism, a plant cell, a plant or a part thereof, as compared to a corresponding non-transformed wild type non-human organism or a part thereof; and
[16840] (b) growing the non-human organism or a part thereof under conditions which permit the production of tyrosine or a composition comprising tyrosine in said non-human organism or in the culture medium surrounding said non-human organism.

[16841] A further embodiment of the present invention relates to a process for the production of 5-oxoproline, which comprises
[16842] (a) increasing or generating the activity of a methyltransferase non-targeted in a non-human organism or a part thereof, preferably a microorganism, a plant cell, a plant or a part thereof, as compared to a corresponding non-transformed wild type non-human organism or a part thereof; and
[16843] (b) growing the non-human organism or a part thereof under conditions which permit the production of 5-oxoproline or a composition comprising 5-oxoproline in said non-human organism or in the culture medium surrounding said non-human organism.

[16844] A further embodiment of the present invention relates to a process for the production of alanine, which comprises
[16845] (a) increasing or generating the activity of a b3346-protein non-targeted in a non-human organism or a part thereof, preferably a microorganism, a plant cell, a plant or a part thereof, as compared to a corresponding non-transformed wild type non-human organism or a part thereof; and
[16846] (b) growing the non-human organism or a part thereof under conditions which permit the production of alanine or a composition comprising alanine in said non-human organism or in the culture medium surrounding said non-human organism.

[16847] A further embodiment of the present invention relates to a process for the production of alanine, which comprises
[16848] (a) increasing or generating the activity of a ABC transporter ATP-binding protein non-targeted in a non-human organism or a part thereof, preferably a microorganism, a plant cell, a plant or a part thereof, as compared to a corresponding non-transformed wild type non-human organism or a part thereof; and
[16849] (b) growing the non-human organism or a part thereof under conditions which permit the production of alanine or a composition comprising alanine in said non-human organism or in the culture medium surrounding said non-human organism.

[16850] A further embodiment of the present invention relates to a process for the production of glycine, which comprises
[16851] (a) increasing or generating the activity of a ABC transporter ATP-binding protein non-targeted in a non-human organism or a part thereof, preferably a microorganism, a plant cell, a plant or a part thereof, as compared to a corresponding non-transformed wild type non-human organism or a part thereof; and
[16852] (b) growing the non-human organism or a part thereof under conditions which permit the production of glycine or a composition comprising glycine in said non-human organism or in the culture medium surrounding said non-human organism.

[16853] A further embodiment of the present invention relates to a process for the production of aspartate, which comprises
[16854] (a) increasing or generating the activity of a b3392-protein non-targeted in a non-human organism or a part thereof, preferably a microorganism, a plant cell, a plant or a part thereof, as compared to a corresponding non-transformed wild type non-human organism or a part thereof; and
[16855] (b) growing the non-human organism or a part thereof under conditions which permit the production of aspartate or a composition comprising aspartate in said non-human organism or in the culture medium surrounding said non-human organism.

[16856] A further embodiment of the present invention relates to a process for the production of phenylalanine, which comprises
[16857] (a) increasing or generating the activity of a phosphoenolpyruvate carboxykinase non-targeted in a non-human organism or a part thereof, preferably a microorganism, a plant cell, a plant or a part thereof, as compared to a corresponding non-transformed wild type non-human organism or a part thereof; and
[16858] (b) growing the non-human organism or a part thereof under conditions which permit the production of phenylalanine or a composition comprising phenylalanine in said non-human organism or in the culture medium surrounding said non-human organism.

[16859] A further embodiment of the present invention relates to a process for the production of serine, which comprises
[16860] (a) increasing or generating the activity of a phosphoenolpyruvate carboxykinase non-targeted in a non-human organism or a part thereof, preferably a microorganism, a plant cell, a plant or a part thereof, as compared to a corresponding non-transformed wild type non-human organism or a part thereof; and
[16861] (b) growing the non-human organism or a part thereof under conditions which permit the production of serine or a composition comprising serine in said non-human organism or in the culture medium surrounding said non-human organism.

[16862] A further embodiment of the present invention relates to a process for the production of alanine, which comprises
[16863] (a) increasing or generating the activity of a b3410-protein non-targeted in a non-human organism or a part thereof, preferably a microorganism, a plant cell, a plant or a part thereof, as compared to a corresponding non-transformed wild type non-human organism or a part thereof; and
[16864] (b) growing the non-human organism or a part thereof under conditions which permit the production of alanine or a composition comprising alanine in said non-human organism or in the culture medium surrounding said non-human organism.

[16865] A further embodiment of the present invention relates to a process for the production of serine, which comprises
[16866] (a) increasing or generating the activity of a b3509-protein non-targeted in a non-human organism or a part thereof, preferably a microorganism, a plant cell, a plant or a part thereof, as compared to a corresponding non-transformed wild type non-human organism or a part thereof; and
[16867] (b) growing the non-human organism or a part thereof under conditions which permit the production of serine or a composition comprising serine in said non-human organism or in the culture medium surrounding said non-human organism.

[16868] A further embodiment of the present invention relates to a process for the production of aspartate, which comprises
[16869] (a) increasing or generating the activity of a cellulose synthase catalytic subunit non-targeted in a non-human organism or a part thereof, preferably a microorganism, a plant cell, a plant or a part thereof, as compared to a corresponding non-transformed wild type non-human organism or a part thereof; and
[16870] (b) growing the non-human organism or a part thereof under conditions which permit the production of aspartate or a composition comprising aspartate in said non-human organism or in the culture medium surrounding said non-human organism.

[16871] A further embodiment of the present invention relates to a process for the production of phenylalanine, which comprises
[16872] (a) increasing or generating the activity of a serine acetyltransferase non-targeted in a non-human organism or a part thereof, preferably a microorganism, a plant cell, a plant or a part thereof, as compared to a corresponding non-transformed wild type non-human organism or a part thereof; and
[16873] (b) growing the non-human organism or a part thereof under conditions which permit the production of phenylalanine or a composition comprising phenylalanine in said non-human organism or in the culture medium surrounding said non-human organism.

[16874] A further embodiment of the present invention relates to a process for the production of tyrosine, which comprises
[16875] (a) increasing or generating the activity of a serine acetyltransferase non-targeted in a non-human organism or a part thereof, preferably a microorganism, a plant cell, a plant or a part thereof, as compared to a corresponding non-transformed wild type non-human organism or a part thereof; and
[16876] (b) growing the non-human organism or a part thereof under conditions which permit the production of tyrosine or a composition comprising tyrosine in said non-human organism or in the culture medium surrounding said non-human organism.

[16877] A further embodiment of the present invention relates to a process for the production of alanine, which comprises
[16878] (a) increasing or generating the activity of a phosphopantetheine adenylyltransferase non-targeted in a non-human organism or a part thereof, preferably a microorganism, a plant cell, a plant or a part thereof, as compared to a corresponding non-transformed wild type non-human organism or a part thereof; and
[16879] (b) growing the non-human organism or a part thereof under conditions which permit the production of alanine or a composition comprising alanine in said non-human organism or in the culture medium surrounding said non-human organism.

[16880] A further embodiment of the present invention relates to a process for the production of asparagine, which comprises
[16881] (a) increasing or generating the activity of a phosphopantetheine adenylyltransferase non-targeted in a non-human organism or a part thereof, preferably a microorganism, a plant cell, a plant or a part thereof, as compared to a corresponding non-transformed wild type non-human organism or a part thereof; and
[16882] (b) growing the non-human organism or a part thereof under conditions which permit the production of asparagine or a composition comprising asparagine in said non-human organism or in the culture medium surrounding said non-human organism.

[16883] A further embodiment of the present invention relates to a process for the production of phenylalanine, which comprises
[16884] (a) increasing or generating the activity of a phosphopantetheine adenylyltransferase non-targeted in a non-human organism or a part thereof, preferably a microorganism, a plant cell, a plant or a part thereof, as compared to a corresponding non-transformed wild type non-human organism or a part thereof; and
[16885] (b) growing the non-human organism or a part thereof under conditions which permit the production of phenylalanine or a composition comprising phenylalanine in said non-human organism or in the culture medium surrounding said non-human organism.

[16886] A further embodiment of the present invention relates to a process for the production of glycine, which comprises
[16887] (a) increasing or generating the activity of a b3646-protein non-targeted in a non-human organism or a part thereof, preferably a microorganism, a plant cell, a plant or a part thereof, as compared to a corresponding non-transformed wild type non-human organism or a part thereof; and
[16888] (b) growing the non-human organism or a part thereof under conditions which permit the production of glycine or a composition comprising glycine in said non-human organism or in the culture medium surrounding said non-human organism.

[16889] A further embodiment of the present invention relates to a process for the production of tyrosine, which comprises
[16890] (a) increasing or generating the activity of a acetolactate synthase non-targeted in a non-human organism or a part thereof, preferably a microorganism, a plant cell, a plant or a part thereof, as compared to a corresponding non-transformed wild type non-human organism or a part thereof; and
[16891] (b) growing the non-human organism or a part thereof under conditions which permit the production of tyrosine or a composition comprising tyrosine in said non-human organism or in the culture medium surrounding said non-human organism.

[16892] A further embodiment of the present invention relates to a process for the production of asparagine, which comprises
[16893] (a) increasing or generating the activity of a aspartate-ammonia ligase non-targeted in a non-human organism or a part thereof, preferably a microorganism, a plant cell, a plant or a part thereof, as compared to a corresponding non-transformed wild type non-human organism or a part thereof; and
[16894] (b) growing the non-human organism or a part thereof under conditions which permit the production of asparagine or a composition comprising asparagine in said non-human organism or in the culture medium surrounding said non-human organism.

[16895] A further embodiment of the present invention relates to a process for the production of glycine, which comprises
[16896] (a) increasing or generating the activity of a dihydroxyacid dehydratase non-targeted in a non-human organism or a part thereof, preferably a microorganism, a plant cell, a plant or a part thereof, as compared to a corresponding non-transformed wild type non-human organism or a part thereof; and
[16897] (b) growing the non-human organism or a part thereof under conditions which permit the production of glycine or a composition comprising glycine in said non-human organism or in the culture medium surrounding said non-human organism.

[16898] A further embodiment of the present invention relates to a process for the production of phenylalanine, which comprises
[16899] (a) increasing or generating the activity of a dihydroxyacid dehydratase non-targeted in a non-human organism or a part thereof, preferably a microorganism, a plant cell, a plant or a part thereof, as compared to a corresponding non-transformed wild type non-human organism or a part thereof; and
[16900] (b) growing the non-human organism or a part thereof under conditions which permit the production of phenylalanine or a composition comprising phenylalanine in said non-human organism or in the culture medium surrounding said non-human organism.

[16901] A further embodiment of the present invention relates to a process for the production of aspartate, which comprises
[16902] (a) increasing or generating the activity of a b3791-protein non-targeted in a non-human organism or a part thereof, preferably a microorganism, a plant cell, a plant or a part thereof, as compared to a corresponding non-transformed wild type non-human organism or a part thereof; and
[16903] (b) growing the non-human organism or a part thereof under conditions which permit the production of aspartate or a composition comprising aspartate in said non-human organism or in the culture medium surrounding said non-human organism.

[16904] A further embodiment of the present invention relates to a process for the production of 5-oxoproline, which comprises
[16905] (a) increasing or generating the activity of a b3791-protein non-targeted in a non-human organism or a part thereof, preferably a microorganism, a plant cell, a plant or a part thereof, as compared to a corresponding non-transformed wild type non-human organism or a part thereof; and
[16906] (b) growing the non-human organism or a part thereof under conditions which permit the production of 5-oxoproline or a composition comprising 5-oxoproline in said non-human organism or in the culture medium surrounding said non-human organism.

[16907] A further embodiment of the present invention relates to a process for the production of phenylalanine, which comprises
[16908] (a) increasing or generating the activity of a enterobacterial common antigen polymerase non-targeted in a non-human organism or a part thereof, preferably a microorganism, a plant cell, a plant or a part thereof, as compared to a corresponding non-transformed wild type non-human organism or a part thereof; and
[16909] (b) growing the non-human organism or a part thereof under conditions which permit the production of phenylalanine or a composition comprising phenylalanine in said non-human organism or in the culture medium surrounding said non-human organism.

[16910] A further embodiment of the present invention relates to a process for the production of phenylalanine, which comprises
[16911] (a) increasing or generating the activity of a DNA helicase II non-targeted in a non-human organism or a part thereof, preferably a microorganism, a plant cell, a plant or a part thereof, as compared to a corresponding non-transformed wild type non-human organism or a part thereof; and
[16912] (b) growing the non-human organism or a part thereof under conditions which permit the production of phenylalanine or a composition comprising phenylalanine in said non-human organism or in the culture medium surrounding said non-human organism.

[16913] A further embodiment of the present invention relates to a process for the production of citrulline, which comprises
[16914] (a) increasing or generating the activity of a b3814-protein non-targeted in a non-human organism or a part thereof, preferably a microorganism, a plant cell, a plant or a part thereof, as compared to a corresponding non-transformed wild type non-human organism or a part thereof; and
[16915] (b) growing the non-human organism or a part thereof under conditions which permit the production of citrulline or a composition comprising citrulline in said non-human organism or in the culture medium surrounding said non-human organism.

[16916] A further embodiment of the present invention relates to a process for the production of alanine, which comprises
[16917] (a) increasing or generating the activity of a transcriptional regulator non-targeted in a non-human organism or a part thereof, preferably a microorganism, a plant cell, a plant or a part thereof, as compared to a corresponding non-transformed wild type non-human organism or a part thereof; and
[16918] (b) growing the non-human organism or a part thereof under conditions which permit the production of alanine or a composition comprising alanine in said non-human organism or in the culture medium surrounding said non-human organism.

[16919] A further embodiment of the present invention relates to a process for the production of aspartate, which comprises
[16920] (a) increasing or generating the activity of a transcriptional regulator non-targeted in a non-human organism or a part thereof, preferably a microorganism, a plant cell, a plant or a part thereof, as compared to a corresponding non-transformed wild type non-human organism or a part thereof; and
[16921] (b) growing the non-human organism or a part thereof under conditions which permit the production of aspartate or a composition comprising aspartate in said non-human organism or in the culture medium surrounding said non-human organism.

[16922] A further embodiment of the present invention relates to a process for the production of serine, which comprises
[16923] (a) increasing or generating the activity of a transcriptional regulator non-targeted in a non-human organism or a part thereof, preferably a microorganism, a plant cell, a plant or a part thereof, as compared to a corresponding non-transformed wild type non-human organism or a part thereof; and
[16924] (b) growing the non-human organism or a part thereof under conditions which permit the production of serine or a composition comprising serine in said non-human organism or in the culture medium surrounding said non-human organism.

[16925] A further embodiment of the present invention relates to a process for the production of tyrosine, which comprises
[16926] (a) increasing or generating the activity of a transcriptional regulator non-targeted in a non-human organism or a part thereof, preferably a microorganism, a plant cell, a plant or a part thereof, as compared to a corresponding non-transformed wild type non-human organism or a part thereof; and
[16927] (b) growing the non-human organism or a part thereof under conditions which permit the production of tyrosine or a composition comprising tyrosine in said non-human organism or in the culture medium surrounding said non-human organism.

[16928] A further embodiment of the present invention relates to a process for the production of phenylalanine, which comprises
[16929] (a) increasing or generating the activity of a b3989-protein non-targeted in a non-human organism or a part thereof, preferably a microorganism, a plant cell, a plant or a part thereof, as compared to a corresponding non-transformed wild type non-human organism or a part thereof; and
[16930] (b) growing the non-human organism or a part thereof under conditions which permit the production of phenylalanine or a composition comprising phenylalanine in said non-human organism or in the culture medium surrounding said non-human organism.

[16931] A further embodiment of the present invention relates to a process for the production of tyrosine, which comprises
[16932] (a) increasing or generating the activity of a b3989-protein non-targeted in a non-human organism or a part thereof, preferably a microorganism, a plant cell, a plant or a part thereof, as compared to a corresponding non-transformed wild type non-human organism or a part thereof; and
[16933] (b) growing the non-human organism or a part thereof under conditions which permit the production of tyrosine or a composition comprising tyrosine in said non-human organism or in the culture medium surrounding said non-human organism.

[16934] A further embodiment of the present invention relates to a process for the production of aspartate, which comprises
[16935] (a) increasing or generating the activity of a acetyltransferase non-targeted in a non-human organism or a part thereof, preferably a microorganism, a plant cell, a plant or a part thereof, as compared to a corresponding non-transformed wild type non-human organism or a part thereof; and
[16936] (b) growing the non-human organism or a part thereof under conditions which permit the production of aspartate or a composition comprising aspartate in said non-human organism or in the culture medium surrounding said non-human organism.

[16937] A further embodiment of the present invention relates to a process for the production of 5-oxoproline, which comprises
[16938] (a) increasing or generating the activity of a acetyltransferase non-targeted in a non-human organism or a part thereof, preferably a microorganism, a plant cell, a plant or a part thereof, as compared to a corresponding non-transformed wild type non-human organism or a part thereof; and
[16939] (b) growing the non-human organism or a part thereof under conditions which permit the production of 5-oxoproline or a composition comprising 5-oxoproline in said non-human organism or in the culture medium surrounding said non-human organism.

[16940] A further embodiment of the present invention relates to a process for the production of glycine, which comprises
[16941] (a) increasing or generating the activity of a aspartate kinase non-targeted in a non-human organism or a part thereof, preferably a microorganism, a plant cell, a plant or a part thereof, as compared to a corresponding non-transformed wild type non-human organism or a part thereof; and
[16942] (b) growing the non-human organism or a part thereof under conditions which permit the production of glycine or a composition comprising glycine in said non-human organism or in the culture medium surrounding said non-human organism.

[16943] A further embodiment of the present invention relates to a process for the production of serine, which comprises
[16944] (a) increasing or generating the activity of a aspartate kinase non-targeted in a non-human organism or a part thereof, preferably a microorganism, a plant cell, a plant or a part thereof, as compared to a corresponding non-transformed wild type non-human organism or a part thereof; and
[16945] (b) growing the non-human organism or a part thereof under conditions which permit the production of serine or a composition comprising serine in said non-human organism or in the culture medium surrounding said non-human organism.

[16946] A further embodiment of the present invention relates to a process for the production of alanine, which comprises
[16947] (a) increasing or generating the activity of a b4029-protein non-targeted in a non-human organism or a part thereof, preferably a microorganism, a plant cell, a plant or a part thereof, as compared to a corresponding non-transformed wild type non-human organism or a part thereof; and
[16948] (b) growing the non-human organism or a part thereof under conditions which permit the production of alanine or a composition comprising alanine in said non-human organism or in the culture medium surrounding said non-human organism.

[16949] A further embodiment of the present invention relates to a process for the production of aspartate, which comprises
[16950] (a) increasing or generating the activity of a b4029-protein non-targeted in a non-human organism or a part thereof, preferably a microorganism, a plant cell, a plant or a part thereof, as compared to a corresponding non-transformed wild type non-human organism or a part thereof; and
[16951] (b) growing the non-human organism or a part thereof under conditions which permit the production of aspartate or a composition comprising aspartate in said non-human organism or in the culture medium surrounding said non-human organism.

[16952] A further embodiment of the present invention relates to a process for the production of glycine, which comprises
[16953] (a) increasing or generating the activity of a b4029-protein non-targeted in a non-human organism or a part thereof, preferably a microorganism, a plant cell, a plant or a part thereof, as compared to a corresponding non-transformed wild type non-human organism or a part thereof; and
[16954] (b) growing the non-human organism or a part thereof under conditions which permit the production of glycine or a composition comprising glycine in said non-human organism or in the culture medium surrounding said non-human organism.

[16955] A further embodiment of the present invention relates to a process for the production of phenylalanine, which comprises
[16956] (a) increasing or generating the activity of a b4029-protein non-targeted in a non-human organism or a part thereof, preferably a microorganism, a plant cell, a plant or a part thereof, as compared to a corresponding non-transformed wild type non-human organism or a part thereof; and
[16957] (b) growing the non-human organism or a part thereof under conditions which permit the production of phenylalanine or a composition comprising phenylalanine in said non-human organism or in the culture medium surrounding said non-human organism.

[16958] A further embodiment of the present invention relates to a process for the production of serine, which comprises
[16959] (a) increasing or generating the activity of a b4029-protein non-targeted in a non-human organism or a part thereof, preferably a microorganism, a plant cell, a plant or a part thereof, as compared to a corresponding non-transformed wild type non-human organism or a part thereof; and
[16960] (b) growing the non-human organism or a part thereof under conditions which permit the production of serine or a composition comprising serine in said non-human organism or in the culture medium surrounding said non-human organism.

[16961] A further embodiment of the present invention relates to a process for the production of tyrosine, which comprises
[16962] (a) increasing or generating the activity of a b4029-protein non-targeted in a non-human organism or a part thereof, preferably a microorganism, a plant cell, a plant or a part thereof, as compared to a corresponding non-transformed wild type non-human organism or a part thereof; and
[16963] (b) growing the non-human organism or a part thereof under conditions which permit the production of tyrosine or a composition comprising tyrosine in said non-human organism or in the culture medium surrounding said non-human organism.

[16964] A further embodiment of the present invention relates to a process for the production of 5-oxoproline, which comprises
[16965] (a) increasing or generating the activity of a b4029-protein non-targeted in a non-human organism or a part thereof, preferably a microorganism, a plant cell, a plant or a part thereof, as compared to a corresponding non-transformed wild type non-human organism or a part thereof; and
[16966] (b) growing the non-human organism or a part thereof under conditions which permit the production of 5-oxoproline or a composition comprising 5-oxoproline in said non-human organism or in the culture medium surrounding said non-human organism.

[16967] A further embodiment of the present invention relates to a process for the production of serine, which comprises
[16968] (a) increasing or generating the activity of a b4121-protein non-targeted in a non-human organism or a part thereof, preferably a microorganism, a plant cell, a plant or a part thereof, as compared to a corresponding non-transformed wild type non-human organism or a part thereof; and
[16969] (b) growing the non-human organism or a part thereof under conditions which permit the production of serine or a composition comprising serine in said non-human organism or in the culture medium surrounding said non-human organism.

[16970] A further embodiment of the present invention relates to a process for the production of aspartate, which comprises
[16971] (a) increasing or generating the activity of a acetyltransferase non-targeted in a non-human organism or a part thereof, preferably a microorganism, a plant cell, a plant or a part thereof, as compared to a corresponding non-transformed wild type non-human organism or a part thereof; and
[16972] (b) growing the non-human organism or a part thereof under conditions which permit the production of aspartate or a composition comprising aspartate in said non-human organism or in the culture medium surrounding said non-human organism.

[16973] A further embodiment of the present invention relates to a process for the production of phenylalanine, which comprises
[16974] (a) increasing or generating the activity of a acetyltransferase non-targeted in a non-human organism or a part thereof, preferably a microorganism, a plant cell, a plant or a part thereof, as compared to a corresponding non-transformed wild type non-human organism or a part thereof; and
[16975] (b) growing the non-human organism or a part thereof under conditions which permit the production of phenylalanine or a composition comprising phenylalanine in said non-human organism or in the culture medium surrounding said non-human organism.

[16976] A further embodiment of the present invention relates to a process for the production of serine, which comprises
[16977] (a) increasing or generating the activity of a acetyltransferase non-targeted in a non-human organism or a part thereof, preferably a microorganism, a plant cell, a plant or a part thereof, as compared to a corresponding non-transformed wild type non-human organism or a part thereof; and
[16978] (b) growing the non-human organism or a part thereof under conditions which permit the production of serine or a composition comprising serine in said non-human organism or in the culture medium surrounding said non-human organism.

[16979] A further embodiment of the present invention relates to a process for the production of tyrosine, which comprises
[16980] (a) increasing or generating the activity of a acetyltransferase non-targeted in a non-human organism or a part thereof, preferably a microorganism, a plant cell, a plant or a part thereof, as compared to a corresponding non-transformed wild type non-human organism or a part thereof; and
[16981] (b) growing the non-human organism or a part thereof under conditions which permit the production of tyrosine or a composition comprising tyrosine in said non-human organism or in the culture medium surrounding said non-human organism.

[16982] A further embodiment of the present invention relates to a process for the production of serine, which comprises
[16983] (a) increasing or generating the activity of a thioredoxin non-targeted in a non-human organism or a part thereof, preferably a microorganism, a plant cell, a plant or a part thereof, as compared to a corresponding non-transformed wild type non-human organism or a part thereof; and
[16984] (b) growing the non-human organism or a part thereof under conditions which permit the production of serine or a composition comprising serine in said non-human organism or in the culture medium surrounding said non-human organism.

[16985] A further embodiment of the present invention relates to a process for the production of alanine, which comprises
[16986] (a) increasing or generating the activity of a lysine decarboxylase non-targeted in a non-human organism or a part thereof, preferably a microorganism, a plant cell, a plant or a part thereof, as compared to a corresponding non-transformed wild type non-human organism or a part thereof; and
[16987] (b) growing the non-human organism or a part thereof under conditions which permit the production of alanine or a composition comprising alanine in said non-human organism or in the culture medium surrounding said non-human organism.

[16988] A further embodiment of the present invention relates to a process for the production of asparagine, which comprises
[16989] (a) increasing or generating the activity of a GM02LC11114-protein non-targeted in a non-human organism or a part thereof, preferably a microorganism, a plant cell, a plant or a part thereof, as compared to a corresponding non-transformed wild type non-human organism or a part thereof; and
[16990] (b) growing the non-human organism or a part thereof under conditions which permit the production of asparagine or a composition comprising asparagine in said non-human organism or in the culture medium surrounding said non-human organism.

[16991] A further embodiment of the present invention relates to a process for the production of phenylalanine, which comprises
[16992] (a) increasing or generating the activity of a GM02LC11114-protein non-targeted in a non-human organism or a part thereof, preferably a microorganism, a plant cell, a plant or a part thereof, as compared to a corresponding non-transformed wild type non-human organism or a part thereof; and
[16993] (b) growing the non-human organism or a part thereof under conditions which permit the production of phenylalanine or a composition comprising phenylalanine in said non-human organism or in the culture medium surrounding said non-human organism.

[16994] A further embodiment of the present invention relates to a process for the production of alanine, which comprises
[16995] (a) increasing or generating the activity of a glutaredoxin non-targeted in a non-human organism or a part thereof, preferably a microorganism, a plant cell, a plant or a part thereof, as compared to a corresponding non-transformed wild type non-human organism or a part thereof; and
[16996] (b) growing the non-human organism or a part thereof under conditions which permit the production of alanine or a composition comprising alanine in said non-human organism or in the culture medium surrounding said non-human organism.

[16997] A further embodiment of the present invention relates to a process for the production of phenylalanine, which comprises
[16998] (a) increasing or generating the activity of a glutaredoxin non-targeted in a non-human organism or a part thereof, preferably a microorganism, a plant cell, a plant or a part thereof, as compared to a corresponding non-transformed wild type non-human organism or a part thereof; and
[16999] (b) growing the non-human organism or a part thereof under conditions which permit the production of phenylalanine or a composition comprising phenylalanine in said non-human organism or in the culture medium surrounding said non-human organism.

[17000] A further embodiment of the present invention relates to a process for the production of tyrosine, which comprises
[17001] (a) increasing or generating the activity of a glutaredoxin non-targeted in a non-human organism or a part thereof, preferably a microorganism, a plant cell, a plant or a part thereof, as compared to a corresponding non-transformed wild type non-human organism or a part thereof; and
[17002] (b) growing the non-human organism or a part thereof under conditions which permit the production of tyrosine or a composition comprising tyrosine in said non-human organism or in the culture medium surrounding said non-human organism.

[17003] A further embodiment of the present invention relates to a process for the production of phenylalanine, which comprises
[17004] (a) increasing or generating the activity of a histone H2A non-targeted in a non-human organism or a part thereof, preferably a microorganism, a plant cell, a plant or a part thereof, as compared to a corresponding non-transformed wild type non-human organism or a part thereof; and
[17005] (b) growing the non-human organism or a part thereof under conditions which permit the production of phenylalanine or a composition comprising phenylalanine in said non-human organism or in the culture medium surrounding said non-human organism.

[17006] A further embodiment of the present invention relates to a process for the production of tyrosine, which comprises
[17007] (a) increasing or generating the activity of a histone H2A non-targeted in a non-human organism or a part thereof, preferably a microorganism, a plant cell, a plant or a part thereof, as compared to a corresponding non-transformed wild type non-human organism or a part thereof; and
[17008] (b) growing the non-human organism or a part thereof under conditions which permit the production of tyrosine or a composition comprising tyrosine in said non-human organism or in the culture medium surrounding said non-human organism.

[17009] A further embodiment of the present invention relates to a process for the production of aspartate, which comprises
[17010] (a) increasing or generating the activity of a GM02LC17485-protein non-targeted in a non-human organism or a part thereof, preferably a microorganism, a plant cell, a plant or a part thereof, as compared to a corresponding non-transformed wild type non-human organism or a part thereof; and
[17011] (b) growing the non-human organism or a part thereof under conditions which permit the production of aspartate or a composition comprising aspartate in said non-human organism or in the culture medium surrounding said non-human organism.

[17012] A further embodiment of the present invention relates to a process for the production of phenylalanine, which comprises
[17013] (a) increasing or generating the activity of a RNA binding protein non-targeted in a non-human organism or a part thereof, preferably a microorganism, a plant cell, a plant or a part thereof, as compared to a corresponding non-transformed wild type non-human organism or a part thereof; and
[17014] (b) growing the non-human organism or a part thereof under conditions which permit the production of phenylalanine or a composition comprising phenylalanine in said non-human organism or in the culture medium surrounding said non-human organism.

[17015] A further embodiment of the present invention relates to a process for the production of tyrosine, which comprises
[17016] (a) increasing or generating the activity of a RNA binding protein non-targeted in a non-human organism or a part thereof, preferably a microorganism, a plant cell, a plant or a part thereof, as compared to a corresponding non-transformed wild type non-human organism or a part thereof; and
[17017] (b) growing the non-human organism or a part thereof under conditions which permit the production of tyrosine or a composition comprising tyrosine in said non-human organism or in the culture medium surrounding said non-human organism.

[17018] A further embodiment of the present invention relates to a process for the production of phenylalanine, which comprises
[17019] (a) increasing or generating the activity of a transcription factor non-targeted in a non-human organism or a part thereof, preferably a microorganism, a plant cell, a plant or a part thereof, as compared to a corresponding non-transformed wild type non-human organism or a part thereof; and
[17020] (b) growing the non-human organism or a part thereof under conditions which permit the production of phenylalanine or a composition comprising phenylalanine in said non-human organism or in the culture medium surrounding said non-human organism.

[17021] A further embodiment of the present invention relates to a process for the production of serine, which comprises
[17022] (a) increasing or generating the activity of a transcription factor non-targeted in a non-human organism or a part thereof, preferably a microorganism, a plant cell, a plant or a part thereof, as compared to a corresponding non-transformed wild type non-human organism or a part thereof; and
[17023] (b) growing the non-human organism or a part thereof under conditions which permit the production of serine or a composition comprising serine in said non-human organism or in the culture medium surrounding said non-human organism.

[17024] A further embodiment of the present invention relates to a process for the production of tyrosine, which comprises
[17025] (a) increasing or generating the activity of a transcription factor non-targeted in a non-human organism or a part thereof, preferably a microorganism, a plant cell, a plant or a part thereof, as compared to a corresponding non-transformed wild type non-human organism or a part thereof; and
[17026] (b) growing the non-human organism or a part thereof under conditions which permit the production of tyrosine or a composition comprising tyrosine in said non-human organism or in the culture medium surrounding said non-human organism.

[17027] A further embodiment of the present invention relates to a process for the production of alanine, which comprises
[17028] (a) increasing or generating the activity of a cyclin D non-targeted in a non-human organism or a part thereof, preferably a microorganism, a plant cell, a plant or a part thereof, as compared to a corresponding non-transformed wild type non-human organism or a part thereof; and
[17029] (b) growing the non-human organism or a part thereof under conditions which permit the production of alanine or a composition comprising alanine in said non-human organism or in the culture medium surrounding said non-human organism.

[17030] A further embodiment of the present invention relates to a process for the production of serine, which comprises
[17031] (a) increasing or generating the activity of a cyclin D non-targeted in a non-human organism or a part thereof, preferably a microorganism, a plant cell, a plant or a part thereof, as compared to a corresponding non-transformed wild type non-human organism or a part thereof; and
[17032] (b) growing the non-human organism or a part thereof under conditions which permit the production of serine or a composition comprising serine in said non-human organism or in the culture medium surrounding said non-human organism.

[17033] A further embodiment of the present invention relates to a process for the production of alanine, which comprises
[17034] (a) increasing or generating the activity of a glutaredoxin non-targeted in a non-human organism or a part thereof, preferably a microorganism, a plant cell, a plant or a part thereof, as compared to a corresponding non-transformed wild type non-human organism or a part thereof; and
[17035] (b) growing the non-human organism or a part thereof under conditions which permit the production of alanine or a composition comprising alanine in said non-human organism or in the culture medium surrounding said non-human organism.

[17036] A further embodiment of the present invention relates to a process for the production of glycine, which comprises
[17037] (a) increasing or generating the activity of a glutaredoxin non-targeted in a non-human organism or a part thereof, preferably a microorganism, a plant cell, a plant or a part thereof, as compared to a corresponding non-transformed wild type non-human organism or a part thereof; and
[17038] (b) growing the non-human organism or a part thereof under conditions which permit the production of glycine or a composition comprising glycine in said non-human organism or in the culture medium surrounding said non-human organism.

[17039] A further embodiment of the present invention relates to a process for the production of serine, which comprises
[17040] (a) increasing or generating the activity of a glutaredoxin non-targeted in a non-human organism or a part thereof, preferably a microorganism, a plant cell, a plant or a part thereof, as compared to a corresponding non-transformed wild type non-human organism or a part thereof; and
[17041] (b) growing the non-human organism or a part thereof under conditions which permit the production of serine or a composition comprising serine in said non-human organism or in the culture medium surrounding said non-human organism.

[17042] A further embodiment of the present invention relates to a process for the production of asparagine, which comprises
[17043] (a) increasing or generating the activity of a s_pp015018333r-protein non-targeted in a non-human organism or a part thereof, preferably a microorganism, a plant cell, a plant or a part thereof, as compared to a corresponding non-transformed wild type non-human organism or a part thereof; and
[17044] (b) growing the non-human organism or a part thereof under conditions which permit the production of asparagine or a composition comprising asparagine in said non-human organism or in the culture medium surrounding said non-human organism.

[17045] A further embodiment of the present invention relates to a process for the production of phenylalanine, which comprises
[17046] (a) increasing or generating the activity of a s_pp015018333r-protein non-targeted in a non-human organism or a part thereof, preferably a microorganism, a plant cell, a plant or a part thereof, as compared to a corresponding non-transformed wild type non-human organism or a part thereof; and
[17047] (b) growing the non-human organism or a part thereof under conditions which permit the production of phenylalanine or a composition comprising phenylalanine in said non-human organism or in the culture medium surrounding said non-human organism.

[17048] A further embodiment of the present invention relates to a process for the production of tyrosine, which comprises
[17049] (a) increasing or generating the activity of a s_pp015018333r-protein non-targeted in a non-human organism or a part thereof, preferably a microorganism, a plant cell, a plant or a part thereof, as compared to a corresponding non-transformed wild type non-human organism or a part thereof; and
[17050] (b) growing the non-human organism or a part thereof under conditions which permit the production of tyrosine or a composition comprising tyrosine in said non-human organism or in the culture medium surrounding said non-human organism.

[17051] A further embodiment of the present invention relates to a process for the production of 5-oxoproline, which comprises
[17052] (a) increasing or generating the activity of a s_pp015018333r-protein non-targeted in a non-human organism or a part thereof, preferably a microorganism, a plant cell, a plant or a part thereof, as compared to a corresponding non-transformed wild type non-human organism or a part thereof; and
[17053] (b) growing the non-human organism or a part thereof under conditions which permit the production of 5-oxoproline or a composition comprising 5-oxoproline in said non-human organism or in the culture medium surrounding said non-human organism.

[17054] A further embodiment of the present invention relates to a process for the production of citrulline, which comprises
[17055] (a) increasing or generating the activity of a N-acetyl-gamma-glutamyl-phosphate reductase non-targeted in a non-human organism or a part thereof, preferably a microorganism, a plant cell, a plant or a part thereof, as compared to a corresponding non-transformed wild type non-human organism or a part thereof; and
[17056] (b) growing the non-human organism or a part thereof under conditions which permit the production of citrulline or a composition comprising citrulline in said non-human organism or in the culture medium surrounding said non-human organism.

[17057] A further embodiment of the present invention relates to a process for the production of asparagine, which comprises
[17058] (a) increasing or generating the activity of a agmatinase non-targeted in a non-human organism or a part thereof, preferably a microorganism, a plant cell, a plant or a part thereof, as compared to a corresponding non-transformed wild type non-human organism or a part thereof; and
[17059] (b) growing the non-human organism or a part thereof under conditions which permit the production of asparagine or a composition comprising asparagine in said non-human organism or in the culture medium surrounding said non-human organism.

[17060] A further embodiment of the present invention relates to a process for the production of tyrosine, which comprises
[17061] (a) increasing or generating the activity of a agmatinase non-targeted in a non-human organism or a part thereof, preferably a microorganism, a plant cell, a plant or a part thereof, as compared to a corresponding non-transformed wild type non-human organism or a part thereof; and
[17062] (b) growing the non-human organism or a part thereof under conditions which permit the production of tyrosine or a composition comprising tyrosine in said non-human organism or in the culture medium surrounding said non-human organism.

[17063] A further embodiment of the present invention relates to a process for the production of alanine, which comprises
[17064] (a) increasing or generating the activity of a ABC transporter ATP binding component non-targeted in a non-human organism or a part thereof, preferably a microorganism, a plant cell, a plant or a part thereof, as compared to a corresponding non-transformed wild type non-human organism or a part thereof; and
[17065] (b) growing the non-human organism or a part thereof under conditions which permit the production of alanine or a composition comprising alanine in said non-human organism or in the culture medium surrounding said non-human organism.

[17066] A further embodiment of the present invention relates to a process for the production of phenylalanine, which comprises
[17067] (a) increasing or generating the activity of a flavodoxin non-targeted in a non-human organism or a part thereof, preferably a microorganism, a plant cell, a plant or a part thereof, as compared to a corresponding non-transformed wild type non-human organism or a part thereof; and
[17068] (b) growing the non-human organism or a part thereof under conditions which permit the production of phenylalanine or a composition comprising phenylalanine in said non-human organism or in the culture medium surrounding said non-human organism.

[17069] A further embodiment of the present invention relates to a process for the production of tyrosine, which comprises
[17070] (a) increasing or generating the activity of a flavodoxin non-targeted in a non-human organism or a part thereof, preferably a microorganism, a plant cell, a plant or a part thereof, as compared to a corresponding non-transformed wild type non-human organism or a part thereof; and
[17071] (b) growing the non-human organism or a part thereof under conditions which permit the production of tyrosine or a composition comprising tyrosine in said non-human organism or in the culture medium surrounding said non-human organism.

[17072] A further embodiment of the present invention relates to a process for the production of alanine, which comprises
[17073] (a) increasing or generating the activity of a sll0281-protein non-targeted in a non-human organism or a part thereof, preferably a microorganism, a plant cell, a plant or a part thereof, as compared to a corresponding non-transformed wild type non-human organism or a part thereof; and
[17074] (b) growing the non-human organism or a part thereof under conditions which permit the production of alanine or a composition comprising alanine in said non-human organism or in the culture medium surrounding said non-human organism.

[17075] A further embodiment of the present invention relates to a process for the production of serine, which comprises
[17076] (a) increasing or generating the activity of a uroporphyrin-III C-methyltransferase non-targeted in a non-human organism or a part thereof, preferably a microorganism, a plant cell, a plant or a part thereof, as compared to a corresponding non-transformed wild type non-human organism or a part thereof; and
[17077] (b) growing the non-human organism or a part thereof under conditions which permit the production of serine or a composition comprising serine in said non-human organism or in the culture medium surrounding said non-human organism.

[17078] A further embodiment of the present invention relates to a process for the production of phenylalanine, which comprises
[17079] (a) increasing or generating the activity of a urease subunit non-targeted in a non-human organism or a part thereof, preferably a microorganism, a plant cell, a plant or a part thereof, as compared to a corresponding non-transformed wild type non-human organism or a part thereof; and
[17080] (b) growing the non-human organism or a part thereof under conditions which permit the production of phenylalanine or a composition comprising phenylalanine in said non-human organism or in the culture medium surrounding said non-human organism.

[17081] A further embodiment of the present invention relates to a process for the production of tyrosine, which comprises
[17082] (a) increasing or generating the activity of a urease subunit non-targeted in a non-human organism or a part thereof, preferably a microorganism, a plant cell, a plant or a part thereof, as compared to a corresponding non-transformed wild type non-human organism or a part thereof; and
[17083] (b) growing the non-human organism or a part thereof under conditions which permit the production of tyrosine or a composition comprising tyrosine in said non-human organism or in the culture medium surrounding said non-human organism.

[17084] A further embodiment of the present invention relates to a process for the production of citrulline, which comprises
[17085] (a) increasing or generating the activity of a glucokinase non-targeted in a non-human organism or a part thereof, preferably a microorganism, a plant cell, a plant or a part thereof, as compared to a corresponding non-transformed wild type non-human organism or a part thereof; and
[17086] (b) growing the non-human organism or a part thereof under conditions which permit the production of citrulline or a composition comprising citrulline in said non-human organism or in the culture medium surrounding said non-human organism.

[17087] A further embodiment of the present invention relates to a process for the production of serine, which comprises
[17088] (a) increasing or generating the activity of a permease protein of phosphate ABC transporter non-targeted in a non-human organism or a part thereof, preferably a microorganism, a plant cell, a plant or a part thereof, as compared to a corresponding non-transformed wild type non-human organism or a part thereof; and
[17089] (b) growing the non-human organism or a part thereof under conditions which permit the production of serine or a composition comprising serine in said non-human organism or in the culture medium surrounding said non-human organism.

[17090] A further embodiment of the present invention relates to a process for the production of 5-oxoproline, which comprises
[17091] (a) increasing or generating the activity of a permease protein of phosphate ABC transporter non-targeted in a non-human organism or a part thereof, preferably a microorganism, a plant cell, a plant or a part thereof, as compared to a corresponding non-transformed wild type non-human organism or a part thereof; and
[17092] (b) growing the non-human organism or a part thereof under conditions which permit the production of 5-oxoproline or a composition comprising 5-oxoproline in said non-human organism or in the culture medium surrounding said non-human organism.

[17093] A further embodiment of the present invention relates to a process for the production of aspartate, which comprises
[17094] (a) increasing or generating the activity of a oxireductase non-targeted in a non-human organism or a part thereof, preferably a microorganism, a plant cell, a plant or a part thereof, as compared to a corresponding non-transformed wild type non-human organism or a part thereof; and
[17095] (b) growing the non-human organism or a part thereof under conditions which permit the production of aspartate or a composition comprising aspartate in said non-human organism or in the culture medium surrounding said non-human organism.

[17096] A further embodiment of the present invention relates to a process for the production of glycine, which comprises
[17097] (a) increasing or generating the activity of a oxireductase non-targeted in a non-human organism or a part thereof, preferably a microorganism, a plant cell, a plant or a part thereof, as compared to a corresponding non-transformed wild type non-human organism or a part thereof; and
[17098] (b) growing the non-human organism or a part thereof under conditions which permit the production of glycine or a composition comprising glycine in said non-human organism or in the culture medium surrounding said non-human organism.

[17099] A further embodiment of the present invention relates to a process for the production of serine, which comprises
[17100] (a) increasing or generating the activity of a oxireductase non-targeted in a non-human organism or a part thereof, preferably a microorganism, a plant cell, a plant or a part thereof, as compared to a corresponding non-transformed wild type non-human organism or a part thereof; and
[17101] (b) growing the non-human organism or a part thereof under conditions which permit the production of serine or a composition comprising serine in said non-human organism or in the culture medium surrounding said non-human organism.

[17102] A further embodiment of the present invention relates to a process for the production of tyrosine, which comprises
[17103] (a) increasing or generating the activity of a oxireductase non-targeted in a non-human organism or a part thereof, preferably a microorganism, a plant cell, a plant or a part thereof, as compared to a corresponding non-transformed wild type non-human organism or a part thereof; and
[17104] (b) growing the non-human organism or a part thereof under conditions which permit the production of tyrosine or a composition comprising tyrosine in said non-human organism or in the culture medium surrounding said non-human organism.

[17105] A further embodiment of the present invention relates to a process for the production of aspartate, which comprises
[17106] (a) increasing or generating the activity of a malate dehydrogenase non-targeted in a non-human organism or a part thereof, preferably a microorganism, a plant cell, a plant or a part thereof, as compared to a corresponding non-transformed wild type non-human organism or a part thereof; and
[17107] (b) growing the non-human organism or a part thereof under conditions which permit the production of aspartate or a composition comprising aspartate in said non-human organism or in the culture medium surrounding said non-human organism.

[17108] A further embodiment of the present invention relates to a process for the production of phenylalanine, which comprises
[17109] (a) increasing or generating the activity of a malate dehydrogenase non-targeted in a non-human organism or a part thereof, preferably a microorganism, a plant cell, a plant or a part thereof, as compared to a corresponding non-transformed wild type non-human organism or a part thereof; and
[17110] (b) growing the non-human organism or a part thereof under conditions which permit the production of phenylalanine or a composition comprising phenylalanine in said non-human organism or in the culture medium surrounding said non-human organism.

[17111] A further embodiment of the present invention relates to a process for the production of serine, which comprises
[17112] (a) increasing or generating the activity of a malate dehydrogenase non-targeted in a non-human organism or a part thereof, preferably a microorganism, a plant cell, a plant or a part thereof, as compared to a corresponding non-transformed wild type non-human organism or a part thereof; and
[17113] (b) growing the non-human organism or a part thereof under conditions which permit the production of serine or a composition comprising serine in said non-human organism or in the culture medium surrounding said non-human organism.

[17114] A further embodiment of the present invention relates to a process for the production of aspartate, which comprises
[17115] (a) increasing or generating the activity of a 3-deoxy-7-phosphoheptulonate synthase non-targeted in a non-human organism or a part thereof, preferably a microorganism, a plant cell, a plant or a part thereof, as compared to a corresponding non-transformed wild type non-human organism or a part thereof; and
[17116] (b) growing the non-human organism or a part thereof under conditions which permit the production of aspartate or a composition comprising aspartate in said non-human organism or in the culture medium surrounding said non-human organism.

[17117] A further embodiment of the present invention relates to a process for the production of serine, which comprises
[17118] (a) increasing or generating the activity of a glycogen synthase non-targeted in a non-human organism or a part thereof, preferably a microorganism, a plant cell, a plant or a part thereof, as compared to a corresponding non-transformed wild type non-human organism or a part thereof; and
[17119] (b) growing the non-human organism or a part thereof under conditions which permit the production of serine or a composition comprising serine in said non-human organism or in the culture medium surrounding said non-human organism.

[17120] A further embodiment of the present invention relates to a process for the production of aspartate, which comprises
[17121] (a) increasing or generating the activity of a carbon dioxide concentrating mechanism protein non-targeted in a non-human organism or a part thereof, preferably a microorganism, a plant cell, a plant or a part thereof, as compared to a corresponding non-transformed wild type non-human organism or a part thereof; and
[17122] (b) growing the non-human organism or a part thereof under conditions which permit the production of aspartate or a composition comprising aspartate in said non-human organism or in the culture medium surrounding said non-human organism.

[17123] A further embodiment of the present invention relates to a process for the production of phenylalanine, which comprises
[17124] (a) increasing or generating the activity of a carbon dioxide concentrating mechanism protein non-targeted in a non-human organism or a part thereof, preferably a microorganism, a plant cell, a plant or a part thereof, as compared to a corresponding non-transformed wild type non-human organism or a part thereof; and
[17125] (b) growing the non-human organism or a part thereof under conditions which permit the production of phenylalanine or a composition comprising phenylalanine in said non-human organism or in the culture medium surrounding said non-human organism.

[17126] A further embodiment of the present invention relates to a process for the production of serine, which comprises
[17127] (a) increasing or generating the activity of a carbon dioxide concentrating mechanism protein non-targeted in a non-human organism or a part thereof, preferably a microorganism, a plant cell, a plant or a part thereof, as compared to a corresponding non-transformed wild type non-human organism or a part thereof; and
[17128] (b) growing the non-human organism or a part thereof under conditions which permit the production of serine or a composition comprising serine in said non-human organism or in the culture medium surrounding said non-human organism.

[17129] A further embodiment of the present invention relates to a process for the production of aspartate, which comprises
[17130] (a) increasing or generating the activity of a sll1032-protein non-targeted in a non-human organism or a part thereof, preferably a microorganism, a plant cell, a plant or a part thereof, as compared to a corresponding non-transformed wild type non-human organism or a part thereof; and
[17131] (b) growing the non-human organism or a part thereof under conditions which permit the production of aspartate or a composition comprising aspartate in said non-human organism or in the culture medium surrounding said non-human organism.

[17132] A further embodiment of the present invention relates to a process for the production of serine, which comprises
[17133] (a) increasing or generating the activity of a phosphoribosylformyl glycinamidine synthase subunit non-targeted in a non-human organism or a part thereof, preferably a microorganism, a plant cell, a plant or a part thereof, as compared to a corresponding non-transformed wild type non-human organism or a part thereof; and
[17134] (b) growing the non-human organism or a part thereof under conditions which permit the production of serine or a composition comprising serine in said non-human organism or in the culture medium surrounding said non-human organism.

[17135] A further embodiment of the present invention relates to a process for the production of aspartate, which comprises
[17136] (a) increasing or generating the activity of a 5′-nucleotidase non-targeted in a non-human organism or a part thereof, preferably a microorganism, a plant cell, a plant or a part thereof, as compared to a corresponding non-transformed wild type non-human organism or a part thereof; and
[17137] (b) growing the non-human organism or a part thereof under conditions which permit the production of aspartate or a composition comprising aspartate in said non-human organism or in the culture medium surrounding said non-human organism.

[17138] A further embodiment of the present invention relates to a process for the production of 5-oxoproline, which comprises
[17139] (a) increasing or generating the activity of a 5′-nucleotidase non-targeted in a non-human organism or a part thereof, preferably a microorganism, a plant cell, a plant or a part thereof, as compared to a corresponding non-transformed wild type non-human organism or a part thereof; and
[17140] (b) growing the non-human organism or a part thereof under conditions which permit the production of 5-oxoproline or a composition comprising 5-oxoproline in said non-human organism or in the culture medium surrounding said non-human organism.

[17141] A further embodiment of the present invention relates to a process for the production of asparagine, which comprises
[17142] (a) increasing or generating the activity of a glycogen (starch) synthase non-targeted in a non-human organism or a part thereof, preferably a microorganism, a plant cell, a plant or a part thereof, as compared to a corresponding non-transformed wild type non-human organism or a part thereof; and
[17143] (b) growing the non-human organism or a part thereof under conditions which permit the production of asparagine or a composition comprising asparagine in said non-human organism or in the culture medium surrounding said non-human organism.

[17144] A further embodiment of the present invention relates to a process for the production of tyrosine, which comprises
[17145] (a) increasing or generating the activity of a glycogen (starch) synthase non-targeted in a non-human organism or a part thereof, preferably a microorganism, a plant cell, a plant or a part thereof, as compared to a corresponding non-transformed wild type non-human organism or a part thereof; and
[17146] (b) growing the non-human organism or a part thereof under conditions which permit the production of tyrosine or a composition comprising tyrosine in said non-human organism or in the culture medium surrounding said non-human organism.

[17147] A further embodiment of the present invention relates to a process for the production of aspartate, which comprises
[17148] (a) increasing or generating the activity of a CTP synthetase non-targeted in a non-human organism or a part thereof, preferably a microorganism, a plant cell, a plant or a part thereof, as compared to a corresponding non-transformed wild type non-human organism or a part thereof; and
[17149] (b) growing the non-human organism or a part thereof under conditions which permit the production of aspartate or a composition comprising aspartate in said non-human organism or in the culture medium surrounding said non-human organism.

[17150] A further embodiment of the present invention relates to a process for the production of glycine, which comprises
[17151] (a) increasing or generating the activity of a nitrate/nitrite transport protein non-targeted in a non-human organism or a part thereof, preferably a microorganism, a plant cell, a plant or a part thereof, as compared to a corresponding non-transformed wild type non-human organism or a part thereof; and
[17152] (b) growing the non-human organism or a part thereof under conditions which permit the production of glycine or a composition comprising glycine in said non-human organism or in the culture medium surrounding said non-human organism.

[17153] A further embodiment of the present invention relates to a process for the production of phenylalanine, which comprises
[17154] (a) increasing or generating the activity of a nitrate/nitrite transport protein non-targeted in a non-human organism or a part thereof, preferably a microorganism, a plant cell, a plant or a part thereof, as compared to a corresponding non-transformed wild type non-human organism or a part thereof; and
[17155] (b) growing the non-human organism or a part thereof under conditions which permit the production of phenylalanine or a composition comprising phenylalanine in said non-human organism or in the culture medium surrounding said non-human organism.

[17156] A further embodiment of the present invention relates to a process for the production of serine, which comprises
[17157] (a) increasing or generating the activity of a nitrate/nitrite transport protein non-targeted in a non-human organism or a part thereof, preferably a microorganism, a plant cell, a plant or a part thereof, as compared to a corresponding non-transformed wild type non-human organism or a part thereof; and
[17158] (b) growing the non-human organism or a part thereof under conditions which permit the production of serine or a composition comprising serine in said non-human organism or in the culture medium surrounding said non-human organism.

[17159] A further embodiment of the present invention relates to a process for the production of tyrosine, which comprises
[17160] (a) increasing or generating the activity of a nitrate/nitrite transport protein non-targeted in a non-human organism or a part thereof, preferably a microorganism, a plant cell, a plant or a part thereof, as compared to a corresponding non-transformed wild type non-human organism or a part thereof; and
[17161] (b) growing the non-human organism or a part thereof under conditions which permit the production of tyrosine or a composition comprising tyrosine in said non-human organism or in the culture medium surrounding said non-human organism.

[17162] A further embodiment of the present invention relates to a process for the production of aspartate, which comprises
[17163] (a) increasing or generating the activity of a CDP-diacylglycerol-glycerol-3-phosphate 3-phosphatidyltransferase non-targeted in a non-human organism or a part thereof, preferably a microorganism, a plant cell, a plant or a part thereof, as compared to a corresponding non-transformed wild type non-human organism or a part thereof; and
[17164] (b) growing the non-human organism or a part thereof under conditions which permit the production of aspartate or a composition comprising aspartate in said non-human organism or in the culture medium surrounding said non-human organism.

[17165] A further embodiment of the present invention relates to a process for the production of 5-oxoproline, which comprises
[17166] (a) increasing or generating the activity of a CDP-diacylglycerol-glycerol-3-phosphate 3-phosphatidyltransferase non-targeted in a non-human organism or a part thereof, preferably a microorganism, a plant cell, a plant or a part thereof, as compared to a corresponding non-transformed wild type non-human organism or a part thereof; and
[17167] (b) growing the non-human organism or a part thereof under conditions which permit the production of 5-oxoproline or a composition comprising 5-oxoproline in said non-human organism or in the culture medium surrounding said non-human organism.

[17168] A further embodiment of the present invention relates to a process for the production of serine, which comprises
[17169] (a) increasing or generating the activity of a glutathione S-transferase non-targeted in a non-human organism or a part thereof, preferably a microorganism, a plant cell, a plant or a part thereof, as compared to a corresponding non-transformed wild type non-human organism or a part thereof; and
[17170] (b) growing the non-human organism or a part thereof under conditions which permit the production of serine or a composition comprising serine in said non-human organism or in the culture medium surrounding said non-human organism.

[17171] A further embodiment of the present invention relates to a process for the production of aspartate, which comprises
[17172] (a) increasing or generating the activity of a exopolyphosphatase non-targeted in a non-human organism or a part thereof, preferably a microorganism, a plant cell, a plant or a part thereof, as compared to a corresponding non-transformed wild type non-human organism or a part thereof; and
[17173] (b) growing the non-human organism or a part thereof under conditions which permit the production of aspartate or a composition comprising aspartate in said non-human organism or in the culture medium surrounding said non-human organism.

[17174] A further embodiment of the present invention relates to a process for the production of phenylalanine, which comprises
[17175] (a) increasing or generating the activity of a exopolyphosphatase non-targeted in a non-human organism or a part thereof, preferably a microorganism, a plant cell, a plant or a part thereof, as compared to a corresponding non-transformed wild type non-human organism or a part thereof; and
[17176] (b) growing the non-human organism or a part thereof under conditions which permit the production of phenylalanine or a composition comprising phenylalanine in said non-human organism or in the culture medium surrounding said non-human organism.

[17177] A further embodiment of the present invention relates to a process for the production of serine, which comprises
[17178] (a) increasing or generating the activity of a exopolyphosphatase non-targeted in a non-human organism or a part thereof, preferably a microorganism, a plant cell, a plant or a part thereof, as compared to a corresponding non-transformed wild type non-human organism or a part thereof; and
[17179] (b) growing the non-human organism or a part thereof under conditions which permit the production of serine or a composition comprising serine in said non-human organism or in the culture medium surrounding said non-human organism.

[17180] A further embodiment of the present invention relates to a process for the production of aspartate, which comprises
[17181] (a) increasing or generating the activity of a ABC metal ion transporter substrate-binding protein non-targeted in a non-human organism or a part thereof, preferably a microorganism, a plant cell, a plant or a part thereof, as compared to a corresponding non-transformed wild type non-human organism or a part thereof; and
[17182] (b) growing the non-human organism or a part thereof under conditions which permit the production of aspartate or a composition comprising aspartate in said non-human organism or in the culture medium surrounding said non-human organism.

[17183] A further embodiment of the present invention relates to a process for the production of phenylalanine, which comprises
[17184] (a) increasing or generating the activity of a ABC metal ion transporter substrate-binding protein non-targeted in a non-human organism or a part thereof, preferably a microorganism, a plant cell, a plant or a part thereof, as compared to a corresponding non-transformed wild type non-human organism or a part thereof; and
[17185] (b) growing the non-human organism or a part thereof under conditions which permit the production of phenylalanine or a composition comprising phenylalanine in said non-human organism or in the culture medium surrounding said non-human organism.

[17186] A further embodiment of the present invention relates to a process for the production of serine, which comprises
[17187] (a) increasing or generating the activity of a sll1761-protein non-targeted in a non-human organism or a part thereof, preferably a microorganism, a plant cell, a plant or a part thereof, as compared to a corresponding non-transformed wild type non-human organism or a part thereof; and
[17188] (b) growing the non-human organism or a part thereof under conditions which permit the production of serine or a composition comprising serine in said non-human organism or in the culture medium surrounding said non-human organism.

[17189] A further embodiment of the present invention relates to a process for the production of tyrosine, which comprises
[17190] (a) increasing or generating the activity of a sll1761-protein non-targeted in a non-human organism or a part thereof, preferably a microorganism, a plant cell, a plant or a part thereof, as compared to a corresponding non-transformed wild type non-human organism or a part thereof; and
[17191] (b) growing the non-human organism or a part thereof under conditions which permit the production of tyrosine or a composition comprising tyrosine in said non-human organism or in the culture medium surrounding said non-human organism.

[17192] A further embodiment of the present invention relates to a process for the production of alanine, which comprises
[17193] (a) increasing or generating the activity of a adenylate kinase non-targeted in a non-human organism or a part thereof, preferably a microorganism, a plant cell, a plant or a part thereof, as compared to a corresponding non-transformed wild type non-human organism or a part thereof; and
[17194] (b) growing the non-human organism or a part thereof under conditions which permit the production of alanine or a composition comprising alanine in said non-human organism or in the culture medium surrounding said non-human organism.

[17195] A further embodiment of the present invention relates to a process for the production of citrulline, which comprises
[17196] (a) increasing or generating the activity of a adenylate kinase non-targeted in a non-human organism or a part thereof, preferably a microorganism, a plant cell, a plant or a part thereof, as compared to a corresponding non-transformed wild type non-human organism or a part thereof; and
[17197] (b) growing the non-human organism or a part thereof under conditions which permit the production of citrulline or a composition comprising citrulline in said non-human organism or in the culture medium surrounding said non-human organism.

[17198] A further embodiment of the present invention relates to a process for the production of glycine, which comprises
[17199] (a) increasing or generating the activity of a adenylate kinase non-targeted in a non-human organism or a part thereof, preferably a microorganism, a plant cell, a plant or a part thereof, as compared to a corresponding non-transformed wild type non-human organism or a part thereof; and
[17200] (b) growing the non-human organism or a part thereof under conditions which permit the production of glycine or a composition comprising glycine in said non-human organism or in the culture medium surrounding said non-human organism.

[17201] A further embodiment of the present invention relates to a process for the production of serine, which comprises
[17202] (a) increasing or generating the activity of a adenylate kinase non-targeted in a non-human organism or a part thereof, preferably a microorganism, a plant cell, a plant or a part thereof, as compared to a corresponding non-transformed wild type non-human organism or a part thereof; and
[17203] (b) growing the non-human organism or a part thereof under conditions which permit the production of serine or a composition comprising serine in said non-human organism or in the culture medium surrounding said non-human organism.

[17204] A further embodiment of the present invention relates to a process for the production of tyrosine, which comprises
[17205] (a) increasing or generating the activity of a adenylate kinase non-targeted in a non-human organism or a part thereof, preferably a microorganism, a plant cell, a plant or a part thereof, as compared to a corresponding non-transformed wild type non-human organism or a part thereof; and
[17206] (b) growing the non-human organism or a part thereof under conditions which permit the production of tyrosine or a composition comprising tyrosine in said non-human organism or in the culture medium surrounding said non-human organism.

[17207] A further embodiment of the present invention relates to a process for the production of glycine, which comprises
[17208] (a) increasing or generating the activity of a acyl transferase non-targeted in a non-human organism or a part thereof, preferably a microorganism, a plant cell, a plant or a part thereof, as compared to a corresponding non-transformed wild type non-human organism or a part thereof; and
[17209] (b) growing the non-human organism or a part thereof under conditions which permit the production of glycine or a composition comprising glycine in said non-human organism or in the culture medium surrounding said non-human organism.

[17210] A further embodiment of the present invention relates to a process for the production of phenylalanine, which comprises
[17211] (a) increasing or generating the activity of a acyl transferase non-targeted in a non-human organism or a part thereof, preferably a microorganism, a plant cell, a plant or a part thereof, as compared to a corresponding non-transformed wild type non-human organism or a part thereof; and
[17212] (b) growing the non-human organism or a part thereof under conditions which permit the production of phenylalanine or a composition comprising phenylalanine in said non-human organism or in the culture medium surrounding said non-human organism.

[17213] A further embodiment of the present invention relates to a process for the production of serine, which comprises
[17214] (a) increasing or generating the activity of a acyl transferase non-targeted in a non-human organism or a part thereof, preferably a microorganism, a plant cell, a plant or a part thereof, as compared to a corresponding non-transformed wild type non-human organism or a part thereof; and
[17215] (b) growing the non-human organism or a part thereof under conditions which permit the production of serine or a composition comprising serine in said non-human organism or in the culture medium surrounding said non-human organism.

[17216] A further embodiment of the present invention relates to a process for the production of aspartate, which comprises
[17217] (a) increasing or generating the activity of a coproporphyrinogen III oxidase non-targeted in a non-human organism or a part thereof, preferably a microorganism, a plant cell, a plant or a part thereof, as compared to a corresponding non-transformed wild type non-human organism or a part thereof; and
[17218] (b) growing the non-human organism or a part thereof under conditions which permit the production of aspartate or a composition comprising aspartate in said non-human organism or in the culture medium surrounding said non-human organism.

[17219] A further embodiment of the present invention relates to a process for the production of citrulline, which comprises
[17220] (a) increasing or generating the activity of a coproporphyrinogen III oxidase non-targeted in a non-human organism or a part thereof, preferably a microorganism, a plant cell, a plant or a part thereof, as compared to a corresponding non-transformed wild type non-human organism or a part thereof; and
[17221] (b) growing the non-human organism or a part thereof under conditions which permit the production of citrulline or a composition comprising citrulline in said non-human organism or in the culture medium surrounding said non-human organism.

[17222] A further embodiment of the present invention relates to a process for the production of phenylalanine, which comprises
[17223] (a) increasing or generating the activity of a coproporphyrinogen III oxidase non-targeted in a non-human organism or a part thereof, preferably a microorganism, a plant cell, a plant or a part thereof, as compared to a corresponding non-transformed wild type non-human organism or a part thereof; and
[17224] (b) growing the non-human organism or a part thereof under conditions which permit the production of phenylalanine or a composition comprising phenylalanine in said non-human organism or in the culture medium surrounding said non-human organism.

[17225] A further embodiment of the present invention relates to a process for the production of serine, which comprises
[17226] (a) increasing or generating the activity of a coproporphyrinogen III oxidase non-targeted in a non-human organism or a part thereof, preferably a microorganism, a plant cell, a plant or a part thereof, as compared to a corresponding non-transformed wild type non-human organism or a part thereof; and
[17227] (b) growing the non-human organism or a part thereof under conditions which permit the production of serine or a composition comprising serine in said non-human organism or in the culture medium surrounding said non-human organism.

[17228] A further embodiment of the present invention relates to a process for the production of tyrosine, which comprises
[17229] (a) increasing or generating the activity of a coproporphyrinogen III oxidase non-targeted in a non-human organism or a part thereof, preferably a microorganism, a plant cell, a plant or a part thereof, as compared to a corresponding non-transformed wild type non-human organism or a part thereof; and
[17230] (b) growing the non-human organism or a part thereof under conditions which permit the production of tyrosine or a composition comprising tyrosine in said non-human organism or in the culture medium surrounding said non-human organism.

[17231] A further embodiment of the present invention relates to a process for the production of aspartate, which comprises
[17232] (a) increasing or generating the activity of a cation-transporting ATPase non-targeted in a non-human organism or a part thereof, preferably a microorganism, a plant cell, a plant or a part thereof, as compared to a corresponding non-transformed wild type non-human organism or a part thereof; and
[17233] (b) growing the non-human organism or a part thereof under conditions which permit the production of aspartate or a composition comprising aspartate in said non-human organism or in the culture medium surrounding said non-human organism.

[17234] A further embodiment of the present invention relates to a process for the production of aspartate, which comprises
[17235] (a) increasing or generating the activity of a cation-transporting ATPase non-targeted in a non-human organism or a part thereof, preferably a microorganism, a plant cell, a plant or a part thereof, as compared to a corresponding non-transformed wild type non-human organism or a part thereof; and
[17236] (b) growing the non-human organism or a part thereof under conditions which permit the production of aspartate or a composition comprising aspartate in said non-human organism or in the culture medium surrounding said non-human organism.

[17237] A further embodiment of the present invention relates to a process for the production of glycine, which comprises
[17238] (a) increasing or generating the activity of a glycosyl transferase non-targeted in a non-human organism or a part thereof, preferably a microorganism, a plant cell, a plant or a part thereof, as compared to a corresponding non-transformed wild type non-human organism or a part thereof; and
[17239] (b) growing the non-human organism or a part thereof under conditions which permit the production of glycine or a composition comprising glycine in said non-human organism or in the culture medium surrounding said non-human organism.

[17240] A further embodiment of the present invention relates to a process for the production of phenylalanine, which comprises
[17241] (a) increasing or generating the activity of a precorrin methylase non-targeted in a non-human organism or a part thereof, preferably a microorganism, a plant cell, a plant or a part thereof, as compared to a corresponding non-transformed wild type non-human organism or a part thereof; and
[17242] (b) growing the non-human organism or a part thereof under conditions which permit the production of phenylalanine or a composition comprising phenylalanine in said non-human organism or in the culture medium surrounding said non-human organism.

[17243] A further embodiment of the present invention relates to a process for the production of tyrosine, which comprises
[17244] (a) increasing or generating the activity of a precorrin methylase non-targeted in a non-human organism or a part thereof, preferably a microorganism, a plant cell, a plant or a part thereof, as compared to a corresponding non-transformed wild type non-human organism or a part thereof; and
[17245] (b) growing the non-human organism or a part thereof under conditions which permit the production of tyrosine or a composition comprising tyrosine in said non-human organism or in the culture medium surrounding said non-human organism.

[17246] A further embodiment of the present invention relates to a process for the production of citrulline, which comprises
[17247] (a) increasing or generating the activity of a aldehyde dehydrogenase non-targeted in a non-human organism or a part thereof, preferably a microorganism, a plant cell, a plant or a part thereof, as compared to a corresponding non-transformed wild type non-human organism or a part thereof; and
[17248] (b) growing the non-human organism or a part thereof under conditions which permit the production of citrulline or a composition comprising citrulline in said non-human organism or in the culture medium surrounding said non-human organism.

[17249] A further embodiment of the present invention relates to a process for the production of alanine, which comprises
[17250] (a) increasing or generating the activity of a bifunctional purine biosynthesis protein non-targeted in a non-human organism or a part thereof, preferably a microorganism, a plant cell, a plant or a part thereof, as compared to a corresponding non-transformed wild type non-human organism or a part thereof; and
[17251] (b) growing the non-human organism or a part thereof under conditions which permit the production of alanine or a composition comprising alanine in said non-human organism or in the culture medium surrounding said non-human organism.

[17252] A further embodiment of the present invention relates to a process for the production of serine, which comprises
[17253] (a) increasing or generating the activity of a bifunctional purine biosynthesis protein non-targeted in a non-human organism or a part thereof, preferably a microorganism, a plant cell, a plant or a part thereof, as compared to a corresponding non-transformed wild type non-human organism or a part thereof; and
[17254] (b) growing the non-human organism or a part thereof under conditions which permit the production of serine or a composition comprising serine in said non-human organism or in the culture medium surrounding said non-human organism.

[17255] A further embodiment of the present invention relates to a process for the production of 5-oxoproline, which comprises
[17256] (a) increasing or generating the activity of a bifunctional purine biosynthesis protein non-targeted in a non-human organism or a part thereof, preferably a microorganism, a plant cell, a plant or a part thereof, as compared to a corresponding non-transformed wild type non-human organism or a part thereof; and
[17257] (b) growing the non-human organism or a part thereof under conditions which permit the production of 5-oxoproline or a composition comprising 5-oxoproline in said non-human organism or in the culture medium surrounding said non-human organism.

[17258] A further embodiment of the present invention relates to a process for the production of asparagine, which comprises
[17259] (a) increasing or generating the activity of a Glu/Leu/Phe/Val dehydrogenase non-targeted in a non-human organism or a part thereof, preferably a microorganism, a plant cell, a plant or a part thereof, as compared to a corresponding non-transformed wild type non-human organism or a part thereof; and
[17260] (b) growing the non-human organism or a part thereof under conditions which permit the production of asparagine or a composition comprising asparagine in said non-human organism or in the culture medium surrounding said non-human organism.

[17261] A further embodiment of the present invention relates to a process for the production of phenylalanine, which comprises
[17262] (a) increasing or generating the activity of a Glu/Leu/Phe/Val dehydrogenase non-targeted in a non-human organism or a part thereof, preferably a microorganism, a plant cell, a plant or a part thereof, as compared to a corresponding non-transformed wild type non-human organism or a part thereof; and
[17263] (b) growing the non-human organism or a part thereof under conditions which permit the production of phenylalanine or a composition comprising phenylalanine in said non-human organism or in the culture medium surrounding said non-human organism.

[17264] A further embodiment of the present invention relates to a process for the production of tyrosine, which comprises
[17265] (a) increasing or generating the activity of a Glu/Leu/Phe/Val dehydrogenase non-targeted in a non-human organism or a part thereof, preferably a microorganism, a plant cell, a plant or a part thereof, as compared to a corresponding non-transformed wild type non-human organism or a part thereof; and
[17266] (b) growing the non-human organism or a part thereof under conditions which permit the production of tyrosine or a composition comprising tyrosine in said non-human organism or in the culture medium surrounding said non-human organism.

[17267] A further embodiment of the present invention relates to a process for the production of phenylalanine, which comprises
[17268] (a) increasing or generating the activity of a malate dehydrogenase non-targeted in a non-human organism or a part thereof, preferably a microorganism, a plant cell, a plant or a part thereof, as compared to a corresponding non-transformed wild type non-human organism or a part thereof; and
[17269] (b) growing the non-human organism or a part thereof under conditions which permit the production of phenylalanine or a composition comprising phenylalanine in said non-human organism or in the culture medium surrounding said non-human organism.

[17270] A further embodiment of the present invention relates to a process for the production of alanine, which comprises
[17271] (a) increasing or generating the activity of a geranylgeranyl pyrophosphate synthase non-targeted in a non-human organism or a part thereof, preferably a microorganism, a plant cell, a plant or a part thereof, as compared to a corresponding non-transformed wild type non-human organism or a part thereof; and
[17272] (b) growing the non-human organism or a part thereof under conditions which permit the production of alanine or a composition comprising alanine in said non-human organism or in the culture medium surrounding said non-human organism.

[17273] A further embodiment of the present invention relates to a process for the production of asparagine, which comprises
[17274] (a) increasing or generating the activity of a geranylgeranyl pyrophosphate synthase non-targeted in a non-human organism or a part thereof, preferably a microorganism, a plant cell, a plant or a part thereof, as compared to a corresponding non-transformed wild type non-human organism or a part thereof; and
[17275] (b) growing the non-human organism or a part thereof under conditions which permit the production of asparagine or a composition comprising asparagine in said non-human organism or in the culture medium surrounding said non-human organism.

[17276] A further embodiment of the present invention relates to a process for the production of phenylalanine, which comprises
[17277] (a) increasing or generating the activity of a geranylgeranyl pyrophosphate synthase non-targeted in a non-human organism or a part thereof, preferably a microorganism, a plant cell, a plant or a part thereof, as compared to a corresponding non-transformed wild type non-human organism or a part thereof; and
[17278] (b) growing the non-human organism or a part thereof under conditions which permit the production of phenylalanine or a composition comprising phenylalanine in said non-human organism or in the culture medium surrounding said non-human organism.

[17279] A further embodiment of the present invention relates to a process for the production of serine, which comprises
[17280] (a) increasing or generating the activity of a geranylgeranyl pyrophosphate synthase non-targeted in a non-human organism or a part thereof, preferably a microorganism, a plant cell, a plant or a part thereof, as compared to a corresponding non-transformed wild type non-human organism or a part thereof; and
[17281] (b) growing the non-human organism or a part thereof under conditions which permit the production of serine or a composition comprising serine in said non-human organism or in the culture medium surrounding said non-human organism.

[17282] A further embodiment of the present invention relates to a process for the production of tyrosine, which comprises
[17283] (a) increasing or generating the activity of a geranylgeranyl pyrophosphate synthase non-targeted in a non-human organism or a part thereof, preferably a microorganism, a plant cell, a plant or a part thereof, as compared to a corresponding non-transformed wild type non-human organism or a part thereof; and
[17284] (b) growing the non-human organism or a part thereof under conditions which permit the production of tyrosine or a composition comprising tyrosine in said non-human organism or in the culture medium surrounding said non-human organism.

[17285] A further embodiment of the present invention relates to a process for the production of 5-oxoproline, which comprises
[17286] (a) increasing or generating the activity of a geranylgeranyl pyrophosphate synthase non-targeted in a non-human organism or a part thereof, preferably a microorganism, a plant cell, a plant or a part thereof, as compared to a corresponding non-transformed wild type non-human organism or a part thereof; and
[17287] (b) growing the non-human organism or a part thereof under conditions which permit the production of 5-oxoproline or a composition comprising 5-oxoproline in said non-human organism or in the culture medium surrounding said non-human organism.

[17288] A further embodiment of the present invention relates to a process for the production of phenylalanine, which comprises
[17289] (a) increasing or generating the activity of a amine oxidase non-targeted in a non-human organism or a part thereof, preferably a microorganism, a plant cell, a plant or a part thereof, as compared to a corresponding non-transformed wild type non-human organism or a part thereof; and
[17290] (b) growing the non-human organism or a part thereof under conditions which permit the production of phenylalanine or a composition comprising phenylalanine in said non-human organism or in the culture medium surrounding said non-human organism.

[17291] A further embodiment of the present invention relates to a process for the production of serine, which comprises
[17292] (a) increasing or generating the activity of a kinase non-targeted in a non-human organism or a part thereof, preferably a microorganism, a plant cell, a plant or a part thereof, as compared to a corresponding non-transformed wild type non-human organism or a part thereof; and
[17293] (b) growing the non-human organism or a part thereof under conditions which permit the production of serine or a composition comprising serine in said non-human organism or in the culture medium surrounding said non-human organism.

[17294] A further embodiment of the present invention relates to a process for the production of tyrosine, which comprises
[17295] (a) increasing or generating the activity of a tryptophan synthase alpha chain non-targeted in a non-human organism or a part thereof, preferably a microorganism, a plant cell, a plant or a part thereof, as compared to a corresponding non-transformed wild type non-human organism or a part thereof; and
[17296] (b) growing the non-human organism or a part thereof under conditions which permit the production of tyrosine or a composition comprising tyrosine in said non-human organism or in the culture medium surrounding said non-human organism.

[17297] A further embodiment of the present invention relates to a process for the production of ornithine, which comprises
[17298] (a) increasing or generating the activity of a argininosuccinate lyase non-targeted in a non-human organism or a part thereof, preferably a microorganism, a plant cell, a plant or a part thereof, as compared to a corresponding non-transformed wild type non-human organism or a part thereof; and
[17299] (b) growing the non-human organism or a part thereof under conditions which permit the production of ornithine or a composition comprising ornithine in said non-human organism or in the culture medium surrounding said non-human organism.

[17300] A further embodiment of the present invention relates to a process for the production of serine, which comprises
[17301] (a) increasing or generating the activity of a argininosuccinate lyase non-targeted in a non-human organism or a part thereof, preferably a microorganism, a plant cell, a plant or a part thereof, as compared to a corresponding non-transformed wild type non-human organism or a part thereof; and
[17302] (b) growing the non-human organism or a part thereof under conditions which permit the production of serine or a composition comprising serine in said non-human organism or in the culture medium surrounding said non-human organism.

[17303] A further embodiment of the present invention relates to a process for the production of asparagine, which comprises
[17304] (a) increasing or generating the activity of a gamma-glutamyltranspeptidase non-targeted in a non-human organism or a part thereof, preferably a microorganism, a plant cell, a plant or a part thereof, as compared to a corresponding non-transformed wild type non-human organism or a part thereof; and
[17305] (b) growing the non-human organism or a part thereof under conditions which permit the production of asparagine or a composition comprising asparagine in said non-human organism or in the culture medium surrounding said non-human organism.

[17306] A further embodiment of the present invention relates to a process for the production of aspartate, which comprises
[17307] (a) increasing or generating the activity of a iron(III) dicitrate-binding protein non-targeted in a non-human organism or a part thereof, preferably a microorganism, a plant cell, a plant or a part thereof, as compared to a corresponding non-transformed wild type non-human organism or a part thereof; and
[17308] (b) growing the non-human organism or a part thereof under conditions which permit the production of aspartate or a composition comprising aspartate in said non-human organism or in the culture medium surrounding said non-human organism.

[17309] A further embodiment of the present invention relates to a process for the production of phenylalanine, which comprises
[17310] (a) increasing or generating the activity of a iron(III) dicitrate-binding protein non-targeted in a non-human organism or a part thereof, preferably a microorganism, a plant cell, a plant or a part thereof, as compared to a corresponding non-transformed wild type non-human organism or a part thereof; and
[17311] (b) growing the non-human organism or a part thereof under conditions which permit the production of phenylalanine or a composition comprising phenylalanine in said non-human organism or in the culture medium surrounding said non-human organism.

[17312] A further embodiment of the present invention relates to a process for the production of phenylalanine, which comprises
[17313] (a) increasing or generating the activity of a Na+/K+ transporter non-targeted in a non-human organism or a part thereof, preferably a microorganism, a plant cell, a plant or a part thereof, as compared to a corresponding non-transformed wild type non-human organism or a part thereof; and
[17314] (b) growing the non-human organism or a part thereof under conditions which permit the production of phenylalanine or a composition comprising phenylalanine in said non-human organism or in the culture medium surrounding said non-human organism.

[17315] A further embodiment of the present invention relates to a process for the production of tyrosine, which comprises
[17316] (a) increasing or generating the activity of a Na+/K+ transporter non-targeted in a non-human organism or a part thereof, preferably a microorganism, a plant cell, a plant or a part thereof, as compared to a corresponding non-transformed wild type non-human organism or a part thereof; and
[17317] (b) growing the non-human organism or a part thereof under conditions which permit the production of tyrosine or a composition comprising tyrosine in said non-human organism or in the culture medium surrounding said non-human organism.

[17318] A further embodiment of the present invention relates to a process for the production of phenylalanine, which comprises
[17319] (a) increasing or generating the activity of a 3-oxoacyl-[acyl-carrier-protein] synthase non-targeted in a non-human organism or a part thereof, preferably a microorganism, a plant cell, a plant or a part thereof, as compared to a corresponding non-transformed wild type non-human organism or a part thereof; and
[17320] (b) growing the non-human organism or a part thereof under conditions which permit the production of phenylalanine or a composition comprising phenylalanine in said non-human organism or in the culture medium surrounding said non-human organism.

[17321] A further embodiment of the present invention relates to a process for the production of serine, which comprises
[17322] (a) increasing or generating the activity of a 3-oxoacyl-[acyl-carrier-protein] synthase non-targeted in a non-human organism or a part thereof, preferably a microorganism, a plant cell, a plant or a part thereof, as compared to a corresponding non-transformed wild type non-human organism or a part thereof; and
[17323] (b) growing the non-human organism or a part thereof under conditions which permit the production of serine or a composition comprising serine in said non-human organism or in the culture medium surrounding said non-human organism.

[17324] A further embodiment of the present invention relates to a process for the production of phenylalanine, which comprises
[17325] (a) increasing or generating the activity of a Photosystem I reaction center subunit XI non-targeted in a non-human organism or a part thereof, preferably a microorganism, a plant cell, a plant or a part thereof, as compared to a corresponding non-transformed wild type non-human organism or a part thereof; and
[17326] (b) growing the non-human organism or a part thereof under conditions which permit the production of phenylalanine or a composition comprising phenylalanine in said non-human organism or in the culture medium surrounding said non-human organism.

[17327] A further embodiment of the present invention relates to a process for the production of serine, which comprises
[17328] (a) increasing or generating the activity of a Photosystem I reaction center subunit XI non-targeted in a non-human organism or a part thereof, preferably a microorganism, a plant cell, a plant or a part thereof, as compared to a corresponding non-transformed wild type non-human organism or a part thereof; and
[17329] (b) growing the non-human organism or a part thereof under conditions which permit the production of serine or a composition comprising serine in said non-human organism or in the culture medium surrounding said non-human organism.

[17330] A further embodiment of the present invention relates to a process for the production of tyrosine, which comprises
[17331] (a) increasing or generating the activity of a Photosystem I reaction center subunit XI non-targeted in a non-human organism or a part thereof, preferably a microorganism, a plant cell, a plant or a part thereof, as compared to a corresponding non-transformed wild type non-human organism or a part thereof; and
[17332] (b) growing the non-human organism or a part thereof under conditions which permit the production of tyrosine or a composition comprising tyrosine in said non-human organism or in the culture medium surrounding said non-human organism.

[17333] A further embodiment of the present invention relates to a process for the production of phenylalanine, which comprises
[17334] (a) increasing or generating the activity of a photosystem II protein non-targeted in a non-human organism or a part thereof, preferably a microorganism, a plant cell, a plant or a part thereof, as compared to a corresponding non-transformed wild type non-human organism or a part thereof; and
[17335] (b) growing the non-human organism or a part thereof under conditions which permit the production of phenylalanine or a composition comprising phenylalanine in said non-human organism or in the culture medium surrounding said non-human organism.

[17336] A further embodiment of the present invention relates to a process for the production of serine, which comprises
[17337] (a) increasing or generating the activity of a photosystem II protein non-targeted in a non-human organism or a part thereof, preferably a microorganism, a plant cell, a plant or a part thereof, as compared to a corresponding non-transformed wild type non-human organism or a part thereof; and
[17338] (b) growing the non-human organism or a part thereof under conditions which permit the production of serine or a composition comprising serine in said non-human organism or in the culture medium surrounding said non-human organism.

[17339] A further embodiment of the present invention relates to a process for the production of tyrosine, which comprises
[17340] (a) increasing or generating the activity of a photosystem II protein non-targeted in a non-human organism or a part thereof, preferably a microorganism, a plant cell, a plant or a part thereof, as compared to a corresponding non-transformed wild type non-human organism or a part thereof; and
[17341] (b) growing the non-human organism or a part thereof under conditions which permit the production of tyrosine or a composition comprising tyrosine in said non-human organism or in the culture medium surrounding said non-human organism.

[17342] A further embodiment of the present invention relates to a process for the production of 5-oxoproline, which comprises
[17343] (a) increasing or generating the activity of a photosystem II protein non-targeted in a non-human organism or a part thereof, preferably a microorganism, a plant cell, a plant or a part thereof, as compared to a corresponding non-transformed wild type non-human organism or a part thereof; and
[17344] (b) growing the non-human organism or a part thereof under conditions which permit the production of 5-oxoproline or a composition comprising 5-oxoproline in said non-human organism or in the culture medium surrounding said non-human organism.

[17345] A further embodiment of the present invention relates to a process for the production of asparagine, which comprises
[17346] (a) increasing or generating the activity of a glutamine amidotransferase non-targeted in a non-human organism or a part thereof, preferably a microorganism, a plant cell, a plant or a part thereof, as compared to a corresponding non-transformed wild type non-human organism or a part thereof; and
[17347] (b) growing the non-human organism or a part thereof under conditions which permit the production of asparagine or a composition comprising asparagine in said non-human organism or in the culture medium surrounding said non-human organism.

[17348] A further embodiment of the present invention relates to a process for the production of citrulline, which comprises
[17349] (a) increasing or generating the activity of a phosphoadenosine phosphosulfate reductase non-targeted in a non-human organism or a part thereof, preferably a microorganism, a plant cell, a plant or a part thereof, as compared to a corresponding non-transformed wild type non-human organism or a part thereof; and
[17350] (b) growing the non-human organism or a part thereof under conditions which permit the production of citrulline or a composition comprising citrulline in said non-human organism or in the culture medium surrounding said non-human organism.

[17351] A further embodiment of the present invention relates to a process for the production of asparagine, which comprises
[17352] (a) increasing or generating the activity of a riboflavin biosynthesis protein non-targeted in a non-human organism or a part thereof, preferably a microorganism, a plant cell, a plant or a part thereof, as compared to a corresponding non-transformed wild type non-human organism or a part thereof; and
[17353] (b) growing the non-human organism or a part thereof under conditions which permit the production of asparagine or a composition comprising asparagine in said non-human organism or in the culture medium surrounding said non-human organism.

[17354] A further embodiment of the present invention relates to a process for the production of homoserine, which comprises
[17355] (a) increasing or generating the activity of a threonine dehydratase non-targeted in a non-human organism or a part thereof, preferably a microorganism, a plant cell, a plant or a part thereof, as compared to a corresponding non-transformed wild type non-human organism or a part thereof; and
[17356] (b) growing the non-human organism or a part thereof under conditions which permit the production of homoserine or a composition comprising homoserine in said non-human organism or in the culture medium surrounding said non-human organism.

[17357] A further embodiment of the present invention relates to a process for the production of tyrosine, which comprises
[17358] (a) increasing or generating the activity of a threonine dehydratase non-targeted in a non-human organism or a part thereof, preferably a microorganism, a plant cell, a plant or a part thereof, as compared to a corresponding non-transformed wild type non-human organism or a part thereof; and
[17359] (b) growing the non-human organism or a part thereof under conditions which permit the production of tyrosine or a composition comprising tyrosine in said non-human organism or in the culture medium surrounding said non-human organism.

[17360] A further embodiment of the present invention relates to a process for the production of alanine, which comprises
[17361] (a) increasing or generating the activity of a short-chain alcohol dehydrogenase family non-targeted in a non-human organism or a part thereof, preferably a microorganism, a plant cell, a plant or a part thereof, as compared to a corresponding non-transformed wild type non-human organism or a part thereof; and
[17362] (b) growing the non-human organism or a part thereof under conditions which permit the production of alanine or a composition comprising alanine in said non-human organism or in the culture medium surrounding said non-human organism.

[17363] A further embodiment of the present invention relates to a process for the production of phenylalanine, which comprises
[17364] (a) increasing or generating the activity of a short-chain alcohol dehydrogenase family non-targeted in a non-human organism or a part thereof, preferably a microorganism, a plant cell, a plant or a part thereof, as compared to a corresponding non-transformed wild type non-human organism or a part thereof; and
[17365] (b) growing the non-human organism or a part thereof under conditions which permit the production of phenylalanine or a composition comprising phenylalanine in said non-human organism or in the culture medium surrounding said non-human organism.

[17366] A further embodiment of the present invention relates to a process for the production of tyrosine, which comprises
[17367] (a) increasing or generating the activity of a short-chain alcohol dehydrogenase family non-targeted in a non-human organism or a part thereof, preferably a microorganism, a plant cell, a plant or a part thereof, as compared to a corresponding non-transformed wild type non-human organism or a part thereof; and
[17368] (b) growing the non-human organism or a part thereof under conditions which permit the production of tyrosine or a composition comprising tyrosine in said non-human organism or in the culture medium surrounding said non-human organism.

[17369] A further embodiment of the present invention relates to a process for the production of phenylalanine, which comprises
[17370] (a) increasing or generating the activity of a Sec-independent protein translocase subunit non-targeted in a non-human organism or a part thereof, preferably a microorganism, a plant cell, a plant or a part thereof, as compared to a corresponding non-transformed wild type non-human organism or a part thereof; and
[17371] (b) growing the non-human organism or a part thereof under conditions which permit the production of phenylalanine or a composition comprising phenylalanine in said non-human organism or in the culture medium surrounding said non-human organism.

[17372] A further embodiment of the present invention relates to a process for the production of tyrosine, which comprises
[17373] (a) increasing or generating the activity of a Sec-independent protein translocase subunit non-targeted in a non-human organism or a part thereof, preferably a microorganism, a plant cell, a plant or a part thereof, as compared to a corresponding non-transformed wild type non-human organism or a part thereof; and
[17374] (b) growing the non-human organism or a part thereof under conditions which permit the production of tyrosine or a composition comprising tyrosine in said non-human organism or in the culture medium surrounding said non-human organism.

[17375] A further embodiment of the present invention relates to a process for the production of 5-oxoproline, which comprises
[17376] (a) increasing or generating the activity of a Sec-independent protein translocase subunit non-targeted in a non-human organism or a part thereof, preferably a microorganism, a plant cell, a plant or a part thereof, as compared to a corresponding non-transformed wild type non-human organism or a part thereof; and
[17377] (b) growing the non-human organism or a part thereof under conditions which permit the production of 5-oxoproline or a composition comprising 5-oxoproline in said non-human organism or in the culture medium surrounding said non-human organism.

[17378] A further embodiment of the present invention relates to a process for the production of tyrosine, which comprises
[17379] (a) increasing or generating the activity of a transcriptional regulator non-targeted in a non-human organism or a part thereof, preferably a microorganism, a plant cell, a plant or a part thereof, as compared to a corresponding non-transformed wild type non-human organism or a part thereof; and
[17380] (b) growing the non-human organism or a part thereof under conditions which permit the production of tyrosine or a composition comprising tyrosine in said non-human organism or in the culture medium surrounding said non-human organism.

[17381] A further embodiment of the present invention relates to a process for the production of asparagine, which comprises
[17382] (a) increasing or generating the activity of a amino acid ABC transporter permease protein non-targeted in a non-human organism or a part thereof, preferably a microorganism, a plant cell, a plant or a part thereof, as compared to a corresponding non-transformed wild type non-human organism or a part thereof; and
[17383] (b) growing the non-human organism or a part thereof under conditions which permit the production of asparagine or a composition comprising asparagine in said non-human organism or in the culture medium surrounding said non-human organism.

[17384] A further embodiment of the present invention relates to a process for the production of tyrosine, which comprises
[17385] (a) increasing or generating the activity of a TTC0768-protein non-targeted in a non-human organism or a part thereof, preferably a microorganism, a plant cell, a plant or a part thereof, as compared to a corresponding non-transformed wild type non-human organism or a part thereof; and
[17386] (b) growing the non-human organism or a part thereof under conditions which permit the production of tyrosine or a composition comprising tyrosine in said non-human organism or in the culture medium surrounding said non-human organism.

[17387] A further embodiment of the present invention relates to a process for the production of alanine, which comprises
[17388] (a) increasing or generating the activity of a TTC0881-protein non-targeted in a non-human organism or a part thereof, preferably a microorganism, a plant cell, a plant or a part thereof, as compared to a corresponding non-transformed wild type non-human organism or a part thereof; and
[17389] (b) growing the non-human organism or a part thereof under conditions which permit the production of alanine or a composition comprising alanine in said non-human organism or in the culture medium surrounding said non-human organism.

[17390] A further embodiment of the present invention relates to a process for the production of serine, which comprises
[17391] (a) increasing or generating the activity of a TTC0881-protein non-targeted in a non-human organism or a part thereof, preferably a microorganism, a plant cell, a plant or a part thereof, as compared to a corresponding non-transformed wild type non-human organism or a part thereof; and
[17392] (b) growing the non-human organism or a part thereof under conditions which permit the production of serine or a composition comprising serine in said non-human organism or in the culture medium surrounding said non-human organism.

[17393] A further embodiment of the present invention relates to a process for the production of alanine, which comprises
[17394] (a) increasing or generating the activity of a metal-dependent hydrolase non-targeted in a non-human organism or a part thereof, preferably a microorganism, a plant cell, a plant or a part thereof, as compared to a corresponding non-transformed wild type non-human organism or a part thereof; and
[17395] (b) growing the non-human organism or a part thereof under conditions which permit the production of alanine or a composition comprising alanine in said non-human organism or in the culture medium surrounding said non-human organism.

[17396] A further embodiment of the present invention relates to a process for the production of serine, which comprises
[17397] (a) increasing or generating the activity of a metal-dependent hydrolase non-targeted in a non-human organism or a part thereof, preferably a microorganism, a plant cell, a plant or a part thereof, as compared to a corresponding non-transformed wild type non-human organism or a part thereof; and
[17398] (b) growing the non-human organism or a part thereof under conditions which permit the production of serine or a composition comprising serine in said non-human organism or in the culture medium surrounding said non-human organism.

[17399] A further embodiment of the present invention relates to a process for the production of phenylalanine, which comprises
[17400] (a) increasing or generating the activity of a multiple antibiotic resistance protein non-targeted in a non-human organism or a part thereof, preferably a microorganism, a plant cell, a plant or a part thereof, as compared to a corresponding non-transformed wild type non-human organism or a part thereof; and
[17401] (b) growing the non-human organism or a part thereof under conditions which permit the production of phenylalanine or a composition comprising phenylalanine in said non-human organism or in the culture medium surrounding said non-human organism.

[17402] A further embodiment of the present invention relates to a process for the production of tyrosine, which comprises
[17403] (a) increasing or generating the activity of a multiple antibiotic resistance protein non-targeted in a non-human organism or a part thereof, preferably a microorganism, a plant cell, a plant or a part thereof, as compared to a corresponding non-transformed wild type non-human organism or a part thereof; and
[17404] (b) growing the non-human organism or a part thereof under conditions which permit the production of tyrosine or a composition comprising tyrosine in said non-human organism or in the culture medium surrounding said non-human organism.

[17405] A further embodiment of the present invention relates to a process for the production of alanine, which comprises
[17406] (a) increasing or generating the activity of a TTC1386-protein non-targeted in a non-human organism or a part thereof, preferably a microorganism, a plant cell, a plant or a part thereof, as compared to a corresponding non-transformed wild type non-human organism or a part thereof; and
[17407] (b) growing the non-human organism or a part thereof under conditions which permit the production of alanine or a composition comprising alanine in said non-human organism or in the culture medium surrounding said non-human organism.

[17408] A further embodiment of the present invention relates to a process for the production of glycine, which comprises
[17409] (a) increasing or generating the activity of a TTC1386-protein non-targeted in a non-human organism or a part thereof, preferably a microorganism, a plant cell, a plant or a part thereof, as compared to a corresponding non-transformed wild type non-human organism or a part thereof; and
[17410] (b) growing the non-human organism or a part thereof under conditions which permit the production of glycine or a composition comprising glycine in said non-human organism or in the culture medium surrounding said non-human organism.

[17411] A further embodiment of the present invention relates to a process for the production of phenylalanine, which comprises
[17412] (a) increasing or generating the activity of a TTC1386-protein non-targeted in a non-human organism or a part thereof, preferably a microorganism, a plant cell, a plant or a part thereof, as compared to a corresponding non-transformed wild type non-human organism or a part thereof; and
[17413] (b) growing the non-human organism or a part thereof under conditions which permit the production of phenylalanine or a composition comprising phenylalanine in said non-human organism or in the culture medium surrounding said non-human organism.

[17414] A further embodiment of the present invention relates to a process for the production of serine, which comprises
[17415] (a) increasing or generating the activity of a TTC1386-protein non-targeted in a non-human organism or a part thereof, preferably a microorganism, a plant cell, a plant or a part thereof, as compared to a corresponding non-transformed wild type non-human organism or a part thereof; and
[17416] (b) growing the non-human organism or a part thereof under conditions which permit the production of serine or a composition comprising serine in said non-human organism or in the culture medium surrounding said non-human organism.

[17417] A further embodiment of the present invention relates to a process for the production of tyrosine, which comprises
[17418] (a) increasing or generating the activity of a TTC1386-protein non-targeted in a non-human organism or a part thereof, preferably a microorganism, a plant cell, a plant or a part thereof, as compared to a corresponding non-transformed wild type non-human organism or a part thereof; and
[17419] (b) growing the non-human organism or a part thereof under conditions which permit the production of tyrosine or a composition comprising tyrosine in said non-human organism or in the culture medium surrounding said non-human organism.

[17420] A further embodiment of the present invention relates to a process for the production of alanine, which comprises
[17421] (a) increasing or generating the activity of a homocitrate synthase non-targeted in a non-human organism or a part thereof, preferably a microorganism, a plant cell, a plant or a part thereof, as compared to a corresponding non-transformed wild type non-human organism or a part thereof; and
[17422] (b) growing the non-human organism or a part thereof under conditions which permit the production of alanine or a composition comprising alanine in said non-human organism or in the culture medium surrounding said non-human organism.

[17423] A further embodiment of the present invention relates to a process for the production of phenylalanine, which comprises
[17424] (a) increasing or generating the activity of a homocitrate synthase non-targeted in a non-human organism or a part thereof, preferably a microorganism, a plant cell, a plant or a part thereof, as compared to a corresponding non-transformed wild type non-human organism or a part thereof; and
[17425] (b) growing the non-human organism or a part thereof under conditions which permit the production of phenylalanine or a composition comprising phenylalanine in said non-human organism or in the culture medium surrounding said non-human organism.

[17426] A further embodiment of the present invention relates to a process for the production of serine, which comprises
[17427] (a) increasing or generating the activity of a homocitrate synthase non-targeted in a non-human organism or a part thereof, preferably a microorganism, a plant cell, a plant or a part thereof, as compared to a corresponding non-transformed wild type non-human organism or a part thereof; and
[17428] (b) growing the non-human organism or a part thereof under conditions which permit the production of serine or a composition comprising serine in said non-human organism or in the culture medium surrounding said non-human organism.

[17429] A further embodiment of the present invention relates to a process for the production of tyrosine, which comprises
[17430] (a) increasing or generating the activity of a homocitrate synthase non-targeted in a non-human organism or a part thereof, preferably a microorganism, a plant cell, a plant or a part thereof, as compared to a corresponding non-transformed wild type non-human organism or a part thereof; and
[17431] (b) growing the non-human organism or a part thereof under conditions which permit the production of tyrosine or a composition comprising tyrosine in said non-human organism or in the culture medium surrounding said non-human organism.

[17432] A further embodiment of the present invention relates to a process for the production of 5-oxoproline, which comprises
[17433] (a) increasing or generating the activity of a homocitrate synthase non-targeted in a non-human organism or a part thereof, preferably a microorganism, a plant cell, a plant or a part thereof, as compared to a corresponding non-transformed wild type non-human organism or a part thereof; and
[17434] (b) growing the non-human organism or a part thereof under conditions which permit the production of 5-oxoproline or a composition comprising 5-oxoproline in said non-human organism or in the culture medium surrounding said non-human organism.

[17435] A further embodiment of the present invention relates to a process for the production of aspartate, which comprises
[17436] (a) increasing or generating the activity of a oxidoreductase subunit non-targeted in a non-human organism or a part thereof, preferably a microorganism, a plant cell, a plant or a part thereof, as compared to a corresponding non-transformed wild type non-human organism or a part thereof; and
[17437] (b) growing the non-human organism or a part thereof under conditions which permit the production of aspartate or a composition comprising aspartate in said non-human organism or in the culture medium surrounding said non-human organism.

[17438] A further embodiment of the present invention relates to a process for the production of serine, which comprises
[17439] (a) increasing or generating the activity of a oxidoreductase subunit non-targeted in a non-human organism or a part thereof, preferably a microorganism, a plant cell, a plant or a part thereof, as compared to a corresponding non-transformed wild type non-human organism or a part thereof; and
[17440] (b) growing the non-human organism or a part thereof under conditions which permit the production of serine or a composition comprising serine in said non-human organism or in the culture medium surrounding said non-human organism.

[17441] A further embodiment of the present invention relates to a process for the production of aspartate, which comprises
[17442] (a) increasing or generating the activity of a XM_{—}473199-protein non-targeted in a non-human organism or a part thereof, preferably a microorganism, a plant cell, a plant or a part thereof, as compared to a corresponding non-transformed wild type non-human organism or a part thereof; and
[17443] (b) growing the non-human organism or a part thereof under conditions which permit the production of aspartate or a composition comprising aspartate in said non-human organism or in the culture medium surrounding said non-human organism.

[17444] A further embodiment of the present invention relates to a process for the production of phenylalanine, which comprises
[17445] (a) increasing or generating the activity of a XM_{—}473199-protein non-targeted in a non-human organism or a part thereof, preferably a microorganism, a plant cell, a plant or a part thereof, as compared to a corresponding non-transformed wild type non-human organism or a part thereof; and
[17446] (b) growing the non-human organism or a part thereof under conditions which permit the production of phenylalanine or a composition comprising phenylalanine in said non-human organism or in the culture medium surrounding said non-human organism.

[17447] A further embodiment of the present invention relates to a process for the production of tyrosine, which comprises
[17448] (a) increasing or generating the activity of a XM_{—}473199-protein non-targeted in a non-human organism or a part thereof, preferably a microorganism, a plant cell, a plant or a part thereof, as compared to a corresponding non-transformed wild type non-human organism or a part thereof; and
[17449] (b) growing the non-human organism or a part thereof under conditions which permit the production of tyrosine or a composition comprising tyrosine in said non-human organism or in the culture medium surrounding said non-human organism.

[17450] A further embodiment of the present invention relates to a process for the production of 5-oxoproline, which comprises
[17451] (a) increasing or generating the activity of a XM_{—}473199-protein non-targeted in a non-human organism or a part thereof, preferably a microorganism, a plant cell, a plant or a part thereof, as compared to a corresponding non-transformed wild type non-human organism or a part thereof; and
[17452] (b) growing the non-human organism or a part thereof under conditions which permit the production of 5-oxoproline or a composition comprising 5-oxoproline in said non-human organism or in the culture medium surrounding said non-human organism.

[17453] A further embodiment of the present invention relates to a process for the production of glycine, which comprises
[17454] (a) increasing or generating the activity of a transcription factor non-targeted in a non-human organism or a part thereof, preferably a microorganism, a plant cell, a plant or a part thereof, as compared to a corresponding non-transformed wild type non-human organism or a part thereof; and
[17455] (b) growing the non-human organism or a part thereof under conditions which permit the production of glycine or a composition comprising glycine in said non-human organism or in the culture medium surrounding said non-human organism.

[17456] A further embodiment of the present invention relates to a process for the production of phenylalanine, which comprises
[17457] (a) increasing or generating the activity of a transcription factor non-targeted in a non-human organism or a part thereof, preferably a microorganism, a plant cell, a plant or a part thereof, as compared to a corresponding non-transformed wild type non-human organism or a part thereof; and
[17458] (b) growing the non-human organism or a part thereof under conditions which permit the production of phenylalanine or a composition comprising phenylalanine in said non-human organism or in the culture medium surrounding said non-human organism.

[17459] A further embodiment of the present invention relates to a process for the production of aspartate, which comprises
[17460] (a) increasing or generating the activity of a cell division control protein non-targeted in a non-human organism or a part thereof, preferably a microorganism, a plant cell, a plant or a part thereof, as compared to a corresponding non-transformed wild type non-human organism or a part thereof; and
[17461] (b) growing the non-human organism or a part thereof under conditions which permit the production of aspartate or a composition comprising aspartate in said non-human organism or in the culture medium surrounding said non-human organism.

[17462] A further embodiment of the present invention relates to a process for the production of tyrosine, which comprises
[17463] (a) increasing or generating the activity of a cell division control protein non-targeted in a non-human organism or a part thereof, preferably a microorganism, a plant cell, a plant or a part thereof, as compared to a corresponding non-transformed wild type non-human organism or a part thereof; and
[17464] (b) growing the non-human organism or a part thereof under conditions which permit the production of tyrosine or a composition comprising tyrosine in said non-human organism or in the culture medium surrounding said non-human organism.

[17465] A further embodiment of the present invention relates to a process for the production of phenylalanine, which comprises
[17466] (a) increasing or generating the activity of a 3-deoxy-7-phosphoheptulonate synthase non-targeted in a non-human organism or a part thereof, preferably a microorganism, a plant cell, a plant or a part thereof, as compared to a corresponding non-transformed wild type non-human organism or a part thereof; and
[17467] (b) growing the non-human organism or a part thereof under conditions which permit the production of phenylalanine or a composition comprising phenylalanine in said non-human organism or in the culture medium surrounding said non-human organism.

[17468] A further embodiment of the present invention relates to a process for the production of tyrosine, which comprises
[17469] (a) increasing or generating the activity of a 3-deoxy-7-phosphoheptulonate synthase non-targeted in a non-human organism or a part thereof, preferably a microorganism, a plant cell, a plant or a part thereof, as compared to a corresponding non-transformed wild type non-human organism or a part thereof; and
[17470] (b) growing the non-human organism or a part thereof under conditions which permit the production of tyrosine or a composition comprising tyrosine in said non-human organism or in the culture medium surrounding said non-human organism.

[17471] A further embodiment of the present invention relates to a process for the production of 5-oxoproline, which comprises
[17472] (a) increasing or generating the activity of a phosphate permease non-targeted in a non-human organism or a part thereof, preferably a microorganism, a plant cell, a plant or a part thereof, as compared to a corresponding non-transformed wild type non-human organism or a part thereof; and
[17473] (b) growing the non-human organism or a part thereof under conditions which permit the production of 5-oxoproline or a composition comprising 5-oxoproline in said non-human organism or in the culture medium surrounding said non-human organism.

[17474] A further embodiment of the present invention relates to a process for the production of alanine, which comprises
[17475] (a) increasing or generating the activity of a serine/threonine dehydratase non-targeted in a non-human organism or a part thereof, preferably a microorganism, a plant cell, a plant or a part thereof, as compared to a corresponding non-transformed wild type non-human organism or a part thereof; and
[17476] (b) growing the non-human organism or a part thereof under conditions which permit the production of alanine or a composition comprising alanine in said non-human organism or in the culture medium surrounding said non-human organism.

[17477] A further embodiment of the present invention relates to a process for the production of glycine, which comprises
[17478] (a) increasing or generating the activity of a serine/threonine dehydratase non-targeted in a non-human organism or a part thereof, preferably a microorganism, a plant cell, a plant or a part thereof, as compared to a corresponding non-transformed wild type non-human organism or a part thereof; and
[17479] (b) growing the non-human organism or a part thereof under conditions which permit the production of glycine or a composition comprising glycine in said non-human organism or in the culture medium surrounding said non-human organism.

[17480] A further embodiment of the present invention relates to a process for the production of aspartate, which comprises
[17481] (a) increasing or generating the activity of a protein kinase non-targeted in a non-human organism or a part thereof, preferably a microorganism, a plant cell, a plant or a part thereof, as compared to a corresponding non-transformed wild type non-human organism or a part thereof; and
[17482] (b) growing the non-human organism or a part thereof under conditions which permit the production of aspartate or a composition comprising aspartate in said non-human organism or in the culture medium surrounding said non-human organism.

[17483] A further embodiment of the present invention relates to a process for the production of homoserine, which comprises
[17484] (a) increasing or generating the activity of a Serine/threonine-protein phosphatase non-targeted in a non-human organism or a part thereof, preferably a microorganism, a plant cell, a plant or a part thereof, as compared to a corresponding non-transformed wild type non-human organism or a part thereof; and
[17485] (b) growing the non-human organism or a part thereof under conditions which permit the production of homoserine or a composition comprising homoserine in said non-human organism or in the culture medium surrounding said non-human organism.

[17486] A further embodiment of the present invention relates to a process for the production of phenylalanine, which comprises
[17487] (a) increasing or generating the activity of a Serine/threonine-protein phosphatase non-targeted in a non-human organism or a part thereof, preferably a microorganism, a plant cell, a plant or a part thereof, as compared to a corresponding non-transformed wild type non-human organism or a part thereof; and
[17488] (b) growing the non-human organism or a part thereof under conditions which permit the production of phenylalanine or a composition comprising phenylalanine in said non-human organism or in the culture medium surrounding said non-human organism.

[17489] A further embodiment of the present invention relates to a process for the production of 5-oxoproline, which comprises
[17490] (a) increasing or generating the activity of a Pre-mRNA-splicing factor non-targeted in a non-human organism or a part thereof, preferably a microorganism, a plant cell, a plant or a part thereof, as compared to a corresponding non-transformed wild type non-human organism or a part thereof; and
[17491] (b) growing the non-human organism or a part thereof under conditions which permit the production of 5-oxoproline or a composition comprising 5-oxoproline in said non-human organism or in the culture medium surrounding said non-human organism.

[17492] A further embodiment of the present invention relates to a process for the production of phenylalanine, which comprises
[17493] (a) increasing or generating the activity of a N-(5′-phosphoribosyl)anthranilate isomerase non-targeted in a non-human organism or a part thereof, preferably a microorganism, a plant cell, a plant or a part thereof, as compared to a corresponding non-transformed wild type non-human organism or a part thereof; and
[17494] (b) growing the non-human organism or a part thereof under conditions which permit the production of phenylalanine or a composition comprising phenylalanine in said non-human organism or in the culture medium surrounding said non-human organism.

[17495] A further embodiment of the present invention relates to a process for the production of tyrosine, which comprises
[17496] (a) increasing or generating the activity of a branched-chain amino acid permease non-targeted in a non-human organism or a part thereof, preferably a microorganism, a plant cell, a plant or a part thereof, as compared to a corresponding non-transformed wild type non-human organism or a part thereof; and
[17497] (b) growing the non-human organism or a part thereof under conditions which permit the production of tyrosine or a composition comprising tyrosine in said non-human organism or in the culture medium surrounding said non-human organism.

[17498] A further embodiment of the present invention relates to a process for the production of serine, which comprises
[17499] (a) increasing or generating the activity of a ydr183w-protein non-targeted in a non-human organism or a part thereof, preferably a microorganism, a plant cell, a plant or a part thereof, as compared to a corresponding non-transformed wild type non-human organism or a part thereof; and
[17500] (b) growing the non-human organism or a part thereof under conditions which permit the production of serine or a composition comprising serine in said non-human organism or in the culture medium surrounding said non-human organism.

[17501] A further embodiment of the present invention relates to a process for the production of aspartate, which comprises
[17502] (a) increasing or generating the activity of a ydr273w-protein non-targeted in a non-human organism or a part thereof, preferably a microorganism, a plant cell, a plant or a part thereof, as compared to a corresponding non-transformed wild type non-human organism or a part thereof; and
[17503] (b) growing the non-human organism or a part thereof under conditions which permit the production of aspartate or a composition comprising aspartate in said non-human organism or in the culture medium surrounding said non-human organism.

[17504] A further embodiment of the present invention relates to a process for the production of citrulline, which comprises
[17505] (a) increasing or generating the activity of a ydr273w-protein non-targeted in a non-human organism or a part thereof, preferably a microorganism, a plant cell, a plant or a part thereof, as compared to a corresponding non-transformed wild type non-human organism or a part thereof; and
[17506] (b) growing the non-human organism or a part thereof under conditions which permit the production of citrulline or a composition comprising citrulline in said non-human organism or in the culture medium surrounding said non-human organism.

[17507] A further embodiment of the present invention relates to a process for the production of aspartate, which comprises
[17508] (a) increasing or generating the activity of a ydr507c-protein non-targeted in a non-human organism or a part thereof, preferably a microorganism, a plant cell, a plant or a part thereof, as compared to a corresponding non-transformed wild type non-human organism or a part thereof; and
[17509] (b) growing the non-human organism or a part thereof under conditions which permit the production of aspartate or a composition comprising aspartate in said non-human organism or in the culture medium surrounding said non-human organism.

[17510] A further embodiment of the present invention relates to a process for the production of asparagine, which comprises
[17511] (a) increasing or generating the activity of a yer014w-protein non-targeted in a non-human organism or a part thereof, preferably a microorganism, a plant cell, a plant or a part thereof, as compared to a corresponding non-transformed wild type non-human organism or a part thereof; and
[17512] (b) growing the non-human organism or a part thereof under conditions which permit the production of asparagine or a composition comprising asparagine in said non-human organism or in the culture medium surrounding said non-human organism.

[17513] A further embodiment of the present invention relates to a process for the production of aspartate, which comprises
[17514] (a) increasing or generating the activity of a yer014w-protein non-targeted in a non-human organism or a part thereof, preferably a microorganism, a plant cell, a plant or a part thereof, as compared to a corresponding non-transformed wild type non-human organism or a part thereof; and
[17515] (b) growing the non-human organism or a part thereof under conditions which permit the production of aspartate or a composition comprising aspartate in said non-human organism or in the culture medium surrounding said non-human organism.

[17516] A further embodiment of the present invention relates to a process for the production of serine, which comprises
[17517] (a) increasing or generating the activity of a yer014w-protein non-targeted in a non-human organism or a part thereof, preferably a microorganism, a plant cell, a plant or a part thereof, as compared to a corresponding non-transformed wild type non-human organism or a part thereof; and
[17518] (b) growing the non-human organism or a part thereof under conditions which permit the production of serine or a composition comprising serine in said non-human organism or in the culture medium surrounding said non-human organism.

[17519] A further embodiment of the present invention relates to a process for the production of citrulline, which comprises
[17520] (a) increasing or generating the activity of a yer106w-protein non-targeted in a non-human organism or a part thereof, preferably a microorganism, a plant cell, a plant or a part thereof, as compared to a corresponding non-transformed wild type non-human organism or a part thereof; and
[17521] (b) growing the non-human organism or a part thereof under conditions which permit the production of citrulline or a composition comprising citrulline in said non-human organism or in the culture medium surrounding said non-human organism.

[17522] A further embodiment of the present invention relates to a process for the production of serine, which comprises
[17523] (a) increasing or generating the activity of a molecular chaperone portein non-targeted in a non-human organism or a part thereof, preferably a microorganism, a plant cell, a plant or a part thereof, as compared to a corresponding non-transformed wild type non-human organism or a part thereof; and
[17524] (b) growing the non-human organism or a part thereof under conditions which permit the production of serine or a composition comprising serine in said non-human organism or in the culture medium surrounding said non-human organism.

[17525] A further embodiment of the present invention relates to a process for the production of tyrosine, which comprises
[17526] (a) increasing or generating the activity of a molecular chaperone portein non-targeted in a non-human organism or a part thereof, preferably a microorganism, a plant cell, a plant or a part thereof, as compared to a corresponding non-transformed wild type non-human organism or a part thereof; and
[17527] (b) growing the non-human organism or a part thereof under conditions which permit the production of tyrosine or a composition comprising tyrosine in said non-human organism or in the culture medium surrounding said non-human organism.

[17528] A further embodiment of the present invention relates to a process for the production of aspartate, which comprises
[17529] (a) increasing or generating the activity of a YFL019C-protein non-targeted in a non-human organism or a part thereof, preferably a microorganism, a plant cell, a plant or a part thereof, as compared to a corresponding non-transformed wild type non-human organism or a part thereof; and
[17530] (b) growing the non-human organism or a part thereof under conditions which permit the production of aspartate or a composition comprising aspartate in said non-human organism or in the culture medium surrounding said non-human organism.

[17531] A further embodiment of the present invention relates to a process for the production of phenylalanine, which comprises
[17532] (a) increasing or generating the activity of a YFL019C-protein non-targeted in a non-human organism or a part thereof, preferably a microorganism, a plant cell, a plant or a part thereof, as compared to a corresponding non-transformed wild type non-human organism or a part thereof; and
[17533] (b) growing the non-human organism or a part thereof under conditions which permit the production of phenylalanine or a composition comprising phenylalanine in said non-human organism or in the culture medium surrounding said non-human organism.

[17534] A further embodiment of the present invention relates to a process for the production of alanine, which comprises
[17535] (a) increasing or generating the activity of a aminotransferase non-targeted in a non-human organism or a part thereof, preferably a microorganism, a plant cell, a plant or a part thereof, as compared to a corresponding non-transformed wild type non-human organism or a part thereof; and
[17536] (b) growing the non-human organism or a part thereof under conditions which permit the production of alanine or a composition comprising alanine in said non-human organism or in the culture medium surrounding said non-human organism.

[17537] A further embodiment of the present invention relates to a process for the production of glycine, which comprises
[17538] (a) increasing or generating the activity of a aminotransferase non-targeted in a non-human organism or a part thereof, preferably a microorganism, a plant cell, a plant or a part thereof, as compared to a corresponding non-transformed wild type non-human organism or a part thereof; and
[17539] (b) growing the non-human organism or a part thereof under conditions which permit the production of glycine or a composition comprising glycine in said non-human organism or in the culture medium surrounding said non-human organism.

[17540] A further embodiment of the present invention relates to a process for the production of phenylalanine, which comprises
[17541] (a) increasing or generating the activity of a yfl054c-protein non-targeted in a non-human organism or a part thereof, preferably a microorganism, a plant cell, a plant or a part thereof, as compared to a corresponding non-transformed wild type non-human organism or a part thereof; and
[17542] (b) growing the non-human organism or a part thereof under conditions which permit the production of phenylalanine or a composition comprising phenylalanine in said non-human organism or in the culture medium surrounding said non-human organism.

[17543] A further embodiment of the present invention relates to a process for the production of serine, which comprises
[17544] (a) increasing or generating the activity of a yfl054c-protein non-targeted in a non-human organism or a part thereof, preferably a microorganism, a plant cell, a plant or a part thereof, as compared to a corresponding non-transformed wild type non-human organism or a part thereof; and
[17545] (b) growing the non-human organism or a part thereof under conditions which permit the production of serine or a composition comprising serine in said non-human organism or in the culture medium surrounding said non-human organism.

[17546] A further embodiment of the present invention relates to a process for the production of 5-oxoproline, which comprises
[17547] (a) increasing or generating the activity of a ygl096w-protein non-targeted in a non-human organism or a part thereof, preferably a microorganism, a plant cell, a plant or a part thereof, as compared to a corresponding non-transformed wild type non-human organism or a part thereof; and
[17548] (b) growing the non-human organism or a part thereof under conditions which permit the production of 5-oxoproline or a composition comprising 5-oxoproline in said non-human organism or in the culture medium surrounding said non-human organism.

[17549] A further embodiment of the present invention relates to a process for the production of tyrosine, which comprises
[17550] (a) increasing or generating the activity of a ygl237c-protein non-targeted in a non-human organism or a part thereof, preferably a microorganism, a plant cell, a plant or a part thereof, as compared to a corresponding non-transformed wild type non-human organism or a part thereof; and
[17551] (b) growing the non-human organism or a part thereof under conditions which permit the production of tyrosine or a composition comprising tyrosine in said non-human organism or in the culture medium surrounding said non-human organism.

[17552] A further embodiment of the present invention relates to a process for the production of aspartate, which comprises
[17553] (a) increasing or generating the activity of a ygr221 c-protein non-targeted in a non-human organism or a part thereof, preferably a microorganism, a plant cell, a plant or a part thereof, as compared to a corresponding non-transformed wild type non-human organism or a part thereof; and
[17554] (b) growing the non-human organism or a part thereof under conditions which permit the production of aspartate or a composition comprising aspartate in said non-human organism or in the culture medium surrounding said non-human organism.

[17555] A further embodiment of the present invention relates to a process for the production of 5-oxoproline, which comprises
[17556] (a) increasing or generating the activity of a ygr221 c-protein non-targeted in a non-human organism or a part thereof, preferably a microorganism, a plant cell, a plant or a part thereof, as compared to a corresponding non-transformed wild type non-human organism or a part thereof; and
[17557] (b) growing the non-human organism or a part thereof under conditions which permit the production of 5-oxoproline or a composition comprising 5-oxoproline in said non-human organism or in the culture medium surrounding said non-human organism.

[17558] A further embodiment of the present invention relates to a process for the production of phenylalanine, which comprises
[17559] (a) increasing or generating the activity of a yhl013c-protein non-targeted in a non-human organism or a part thereof, preferably a microorganism, a plant cell, a plant or a part thereof, as compared to a corresponding non-transformed wild type non-human organism or a part thereof; and
[17560] (b) growing the non-human organism or a part thereof under conditions which permit the production of phenylalanine or a composition comprising phenylalanine in said non-human organism or in the culture medium surrounding said non-human organism.

[17561] A further embodiment of the present invention relates to a process for the production of phenylalanine, which comprises
[17562] (a) increasing or generating the activity of a yhr006w-protein non-targeted in a non-human organism or a part thereof, preferably a microorganism, a plant cell, a plant or a part thereof, as compared to a corresponding non-transformed wild type non-human organism or a part thereof; and
[17563] (b) growing the non-human organism or a part thereof under conditions which permit the production of phenylalanine or a composition comprising phenylalanine in said non-human organism or in the culture medium surrounding said non-human organism.

[17564] A further embodiment of the present invention relates to a process for the production of tyrosine, which comprises
[17565] (a) increasing or generating the activity of a yhr006w-protein non-targeted in a non-human organism or a part thereof, preferably a microorganism, a plant cell, a plant or a part thereof, as compared to a corresponding non-transformed wild type non-human organism or a part thereof; and
[17566] (b) growing the non-human organism or a part thereof under conditions which permit the production of tyrosine or a composition comprising tyrosine in said non-human organism or in the culture medium surrounding said non-human organism.

[17567] A further embodiment of the present invention relates to a process for the production of aspartate, which comprises
[17568] (a) increasing or generating the activity of a yhr207c-protein non-targeted in a non-human organism or a part thereof, preferably a microorganism, a plant cell, a plant or a part thereof, as compared to a corresponding non-transformed wild type non-human organism or a part thereof; and
[17569] (b) growing the non-human organism or a part thereof under conditions which permit the production of aspartate or a composition comprising aspartate in said non-human organism or in the culture medium surrounding said non-human organism.

[17570] A further embodiment of the present invention relates to a process for the production of citrulline, which comprises
[17571] (a) increasing or generating the activity of a 3-phosphoglycerate dehydrogenase non-targeted in a non-human organism or a part thereof, preferably a microorganism, a plant cell, a plant or a part thereof, as compared to a corresponding non-transformed wild type non-human organism or a part thereof; and
[17572] (b) growing the non-human organism or a part thereof under conditions which permit the production of citrulline or a composition comprising citrulline in said non-human organism or in the culture medium surrounding said non-human organism.

[17573] A further embodiment of the present invention relates to a process for the production of glycine, which comprises
[17574] (a) increasing or generating the activity of a 3-phosphoglycerate dehydrogenase non-targeted in a non-human organism or a part thereof, preferably a microorganism, a plant cell, a plant or a part thereof, as compared to a corresponding non-transformed wild type non-human organism or a part thereof; and
[17575] (b) growing the non-human organism or a part thereof under conditions which permit the production of glycine or a composition comprising glycine in said non-human organism or in the culture medium surrounding said non-human organism.

[17576] A further embodiment of the present invention relates to a process for the production of aspartate, which comprises
[17577] (a) increasing or generating the activity of a glutathione S-transferase non-targeted in a non-human organism or a part thereof, preferably a microorganism, a plant cell, a plant or a part thereof, as compared to a corresponding non-transformed wild type non-human organism or a part thereof; and
[17578] (b) growing the non-human organism or a part thereof under conditions which permit the production of aspartate or a composition comprising aspartate in said non-human organism or in the culture medium surrounding said non-human organism.

[17579] A further embodiment of the present invention relates to a process for the production of citrulline, which comprises
[17580] (a) increasing or generating the activity of a glutathione S-transferase non-targeted in a non-human organism or a part thereof, preferably a microorganism, a plant cell, a plant or a part thereof, as compared to a corresponding non-transformed wild type non-human organism or a part thereof; and
[17581] (b) growing the non-human organism or a part thereof under conditions which permit the production of citrulline or a composition comprising citrulline in said non-human organism or in the culture medium surrounding said non-human organism.

[17582] A further embodiment of the present invention relates to a process for the production of aspartate, which comprises
[17583] (a) increasing or generating the activity of a DnaJ-like chaperone non-targeted in a non-human organism or a part thereof, preferably a microorganism, a plant cell, a plant or a part thereof, as compared to a corresponding non-transformed wild type non-human organism or a part thereof; and
[17584] (b) growing the non-human organism or a part thereof under conditions which permit the production of aspartate or a composition comprising aspartate in said non-human organism or in the culture medium surrounding said non-human organism.

[17585] A further embodiment of the present invention relates to a process for the production of phenylalanine, which comprises
[17586] (a) increasing or generating the activity of a cystathionine gamma-synthase non-targeted in a non-human organism or a part thereof, preferably a microorganism, a plant cell, a plant or a part thereof, as compared to a corresponding non-transformed wild type non-human organism or a part thereof; and
[17587] (b) growing the non-human organism or a part thereof under conditions which permit the production of phenylalanine or a composition comprising phenylalanine in said non-human organism or in the culture medium surrounding said non-human organism.

[17588] A further embodiment of the present invention relates to a process for the production of citrulline, which comprises
[17589] (a) increasing or generating the activity of a branched chain aminotransferase non-targeted in a non-human organism or a part thereof, preferably a microorganism, a plant cell, a plant or a part thereof, as compared to a corresponding non-transformed wild type non-human organism or a part thereof; and
[17590] (b) growing the non-human organism or a part thereof under conditions which permit the production of citrulline or a composition comprising citrulline in said non-human organism or in the culture medium surrounding said non-human organism.

[17591] A further embodiment of the present invention relates to a process for the production of aspartate, which comprises
[17592] (a) increasing or generating the activity of a polygalacturonase non-targeted in a non-human organism or a part thereof, preferably a microorganism, a plant cell, a plant or a part thereof, as compared to a corresponding non-transformed wild type non-human organism or a part thereof; and
[17593] (b) growing the non-human organism or a part thereof under conditions which permit the production of aspartate or a composition comprising aspartate in said non-human organism or in the culture medium surrounding said non-human organism.

[17594] A further embodiment of the present invention relates to a process for the production of phenylalanine, which comprises
[17595] (a) increasing or generating the activity of a polygalacturonase non-targeted in a non-human organism or a part thereof, preferably a microorganism, a plant cell, a plant or a part thereof, as compared to a corresponding non-transformed wild type non-human organism or a part thereof; and
[17596] (b) growing the non-human organism or a part thereof under conditions which permit the production of phenylalanine or a composition comprising phenylalanine in said non-human organism or in the culture medium surrounding said non-human organism.

[17597] A further embodiment of the present invention relates to a process for the production of alanine, which comprises
[17598] (a) increasing or generating the activity of a YKL038W-protein non-targeted in a non-human organism or a part thereof, preferably a microorganism, a plant cell, a plant or a part thereof, as compared to a corresponding non-transformed wild type non-human organism or a part thereof; and
[17599] (b) growing the non-human organism or a part thereof under conditions which permit the production of alanine or a composition comprising alanine in said non-human organism or in the culture medium surrounding said non-human organism.

[17600] A further embodiment of the present invention relates to a process for the production of aspartate, which comprises
[17601] (a) increasing or generating the activity of a YKL038W-protein non-targeted in a non-human organism or a part thereof, preferably a microorganism, a plant cell, a plant or a part thereof, as compared to a corresponding non-transformed wild type non-human organism or a part thereof; and
[17602] (b) growing the non-human organism or a part thereof under conditions which permit the production of aspartate or a composition comprising aspartate in said non-human organism or in the culture medium surrounding said non-human organism.

[17603] A further embodiment of the present invention relates to a process for the production of serine, which comprises
[17604] (a) increasing or generating the activity of a YKL038W-protein non-targeted in a non-human organism or a part thereof, preferably a microorganism, a plant cell, a plant or a part thereof, as compared to a corresponding non-transformed wild type non-human organism or a part thereof; and
[17605] (b) growing the non-human organism or a part thereof under conditions which permit the production of serine or a composition comprising serine in said non-human organism or in the culture medium surrounding said non-human organism.

[17606] A further embodiment of the present invention relates to a process for the production of glycine, which comprises
[17607] (a) increasing or generating the activity of a aspartate aminotransferase non-targeted in a non-human organism or a part thereof, preferably a microorganism, a plant cell, a plant or a part thereof, as compared to a corresponding non-transformed wild type non-human organism or a part thereof; and
[17608] (b) growing the non-human organism or a part thereof under conditions which permit the production of glycine or a composition comprising glycine in said non-human organism or in the culture medium surrounding said non-human organism.

[17609] A further embodiment of the present invention relates to a process for the production of serine, which comprises
[17610] (a) increasing or generating the activity of a thioredoxin non-targeted in a non-human organism or a part thereof, preferably a microorganism, a plant cell, a plant or a part thereof, as compared to a corresponding non-transformed wild type non-human organism or a part thereof; and
[17611] (b) growing the non-human organism or a part thereof under conditions which permit the production of serine or a composition comprising serine in said non-human organism or in the culture medium surrounding said non-human organism.

[17612] A further embodiment of the present invention relates to a process for the production of tyrosine, which comprises
[17613] (a) increasing or generating the activity of a thioredoxin non-targeted in a non-human organism or a part thereof, preferably a microorganism, a plant cell, a plant or a part thereof, as compared to a corresponding non-transformed wild type non-human organism or a part thereof; and
[17614] (b) growing the non-human organism or a part thereof under conditions which permit the production of tyrosine or a composition comprising tyrosine in said non-human organism or in the culture medium surrounding said non-human organism.

[17615] A further embodiment of the present invention relates to a process for the production of alanine, which comprises
[17616] (a) increasing or generating the activity of a sterol 24-C-methyltransferase non-targeted in a non-human organism or a part thereof, preferably a microorganism, a plant cell, a plant or a part thereof, as compared to a corresponding non-transformed wild type non-human organism or a part thereof; and
[17617] (b) growing the non-human organism or a part thereof under conditions which permit the production of alanine or a composition comprising alanine in said non-human organism or in the culture medium surrounding said non-human organism.

[17618] A further embodiment of the present invention relates to a process for the production of glycine, which comprises
[17619] (a) increasing or generating the activity of a sterol 24-C-methyltransferase non-targeted in a non-human organism or a part thereof, preferably a microorganism, a plant cell, a plant or a part thereof, as compared to a corresponding non-transformed wild type non-human organism or a part thereof; and
[17620] (b) growing the non-human organism or a part thereof under conditions which permit the production of glycine or a composition comprising glycine in said non-human organism or in the culture medium surrounding said non-human organism.

[17621] A further embodiment of the present invention relates to a process for the production of homoserine, which comprises
[17622] (a) increasing or generating the activity of a sterol 24-C-methyltransferase non-targeted in a non-human organism or a part thereof, preferably a microorganism, a plant cell, a plant or a part thereof, as compared to a corresponding non-transformed wild type non-human organism or a part thereof; and
[17623] (b) growing the non-human organism or a part thereof under conditions which permit the production of homoserine or a composition comprising homoserine in said non-human organism or in the culture medium surrounding said non-human organism.

[17624] A further embodiment of the present invention relates to a process for the production of 5-oxoproline, which comprises
[17625] (a) increasing or generating the activity of a sterol 24-C-methyltransferase non-targeted in a non-human organism or a part thereof, preferably a microorganism, a plant cell, a plant or a part thereof, as compared to a corresponding non-transformed wild type non-human organism or a part thereof; and
[17626] (b) growing the non-human organism or a part thereof under conditions which permit the production of 5-oxoproline or a composition comprising 5-oxoproline in said non-human organism or in the culture medium surrounding said non-human organism.

[17627] A further embodiment of the present invention relates to a process for the production of alanine, which comprises
[17628] (a) increasing or generating the activity of a yml083c-protein non-targeted in a non-human organism or a part thereof, preferably a microorganism, a plant cell, a plant or a part thereof, as compared to a corresponding non-transformed wild type non-human organism or a part thereof; and
[17629] (b) growing the non-human organism or a part thereof under conditions which permit the production of alanine or a composition comprising alanine in said non-human organism or in the culture medium surrounding said non-human organism.

[17630] A further embodiment of the present invention relates to a process for the production of phenylalanine, which comprises
[17631] (a) increasing or generating the activity of a phosphate transporter non-targeted in a non-human organism or a part thereof, preferably a microorganism, a plant cell, a plant or a part thereof, as compared to a corresponding non-transformed wild type non-human organism or a part thereof; and
[17632] (b) growing the non-human organism or a part thereof under conditions which permit the production of phenylalanine or a composition comprising phenylalanine in said non-human organism or in the culture medium surrounding said non-human organism.

[17633] A further embodiment of the present invention relates to a process for the production of tyrosine, which comprises
[17634] (a) increasing or generating the activity of a phosphate transporter non-targeted in a non-human organism or a part thereof, preferably a microorganism, a plant cell, a plant or a part thereof, as compared to a corresponding non-transformed wild type non-human organism or a part thereof; and
[17635] (b) growing the non-human organism or a part thereof under conditions which permit the production of tyrosine or a composition comprising tyrosine in said non-human organism or in the culture medium surrounding said non-human organism.

[17636] A further embodiment of the present invention relates to a process for the production of tyrosine, which comprises
[17637] (a) increasing or generating the activity of a ymr013c-protein non-targeted in a non-human organism or a part thereof, preferably a microorganism, a plant cell, a plant or a part thereof, as compared to a corresponding non-transformed wild type non-human organism or a part thereof; and
[17638] (b) growing the non-human organism or a part thereof under conditions which permit the production of tyrosine or a composition comprising tyrosine in said non-human organism or in the culture medium surrounding said non-human organism.

[17639] A further embodiment of the present invention relates to a process for the production of glycine, which comprises
[17640] (a) increasing or generating the activity of a purine biosynthesis protein non-targeted in a non-human organism or a part thereof, preferably a microorganism, a plant cell, a plant or a part thereof, as compared to a corresponding non-transformed wild type non-human organism or a part thereof; and
[17641] (b) growing the non-human organism or a part thereof under conditions which permit the production of glycine or a composition comprising glycine in said non-human organism or in the culture medium surrounding said non-human organism.

[17642] A further embodiment of the present invention relates to a process for the production of phenylalanine, which comprises
[17643] (a) increasing or generating the activity of a mitochondrial inner membrane protease subunit non-targeted in a non-human organism or a part thereof, preferably a microorganism, a plant cell, a plant or a part thereof, as compared to a corresponding non-transformed wild type non-human organism or a part thereof; and
[17644] (b) growing the non-human organism or a part thereof under conditions which permit the production of phenylalanine or a composition comprising phenylalanine in said non-human organism or in the culture medium surrounding said non-human organism.

[17645] A further embodiment of the present invention relates to a process for the production of homoserine, which comprises
[17646] (a) increasing or generating the activity of a YNL086W-protein non-targeted in a non-human organism or a part thereof, preferably a microorganism, a plant cell, a plant or a part thereof, as compared to a corresponding non-transformed wild type non-human organism or a part thereof; and
[17647] (b) growing the non-human organism or a part thereof under conditions which permit the production of homoserine or a composition comprising homoserine in said non-human organism or in the culture medium surrounding said non-human organism.

[17648] A further embodiment of the present invention relates to a process for the production of tyrosine, which comprises
[17649] (a) increasing or generating the activity of a amino acid transporter non-targeted in a non-human organism or a part thereof, preferably a microorganism, a plant cell, a plant or a part thereof, as compared to a corresponding non-transformed wild type non-human organism or a part thereof; and
[17650] (b) growing the non-human organism or a part thereof under conditions which permit the production of tyrosine or a composition comprising tyrosine in said non-human organism or in the culture medium surrounding said non-human organism.

[17651] A further embodiment of the present invention relates to a process for the production of homoserine, which comprises
[17652] (a) increasing or generating the activity of a homoserine O-acetyltransferase non-targeted in a non-human organism or a part thereof, preferably a microorganism, a plant cell, a plant or a part thereof, as compared to a corresponding non-transformed wild type non-human organism or a part thereof; and
[17653] (b) growing the non-human organism or a part thereof under conditions which permit the production of homoserine or a composition comprising homoserine in said non-human organism or in the culture medium surrounding said non-human organism.

[17654] A further embodiment of the present invention relates to a process for the production of alanine, which comprises
[17655] (a) increasing or generating the activity of a metal ion transporter non-targeted in a non-human organism or a part thereof, preferably a microorganism, a plant cell, a plant or a part thereof, as compared to a corresponding non-transformed wild type non-human organism or a part thereof; and
[17656] (b) growing the non-human organism or a part thereof under conditions which permit the production of alanine or a composition comprising alanine in said non-human organism or in the culture medium surrounding said non-human organism.

[17657] A further embodiment of the present invention relates to a process for the production of aspartate, which comprises
[17658] (a) increasing or generating the activity of a yol160w-protein non-targeted in a non-human organism or a part thereof, preferably a microorganism, a plant cell, a plant or a part thereof, as compared to a corresponding non-transformed wild type non-human organism or a part thereof; and
[17659] (b) growing the non-human organism or a part thereof under conditions which permit the production of aspartate or a composition comprising aspartate in said non-human organism or in the culture medium surrounding said non-human organism.

[17660] A further embodiment of the present invention relates to a process for the production of citrulline, which comprises
[17661] (a) increasing or generating the activity of a protein kinase non-targeted in a non-human organism or a part thereof, preferably a microorganism, a plant cell, a plant or a part thereof, as compared to a corresponding non-transformed wild type non-human organism or a part thereof; and
[17662] (b) growing the non-human organism or a part thereof under conditions which permit the production of citrulline or a composition comprising citrulline in said non-human organism or in the culture medium surrounding said non-human organism.

[17663] A further embodiment of the present invention relates to a process for the production of phenylalanine, which comprises
[17664] (a) increasing or generating the activity of a histone acetyltransferase non-targeted in a non-human organism or a part thereof, preferably a microorganism, a plant cell, a plant or a part thereof, as compared to a corresponding non-transformed wild type non-human organism or a part thereof; and
[17665] (b) growing the non-human organism or a part thereof under conditions which permit the production of phenylalanine or a composition comprising phenylalanine in said non-human organism or in the culture medium surrounding said non-human organism.

[17666] A further embodiment of the present invention relates to a process for the production of tyrosine, which comprises
[17667] (a) increasing or generating the activity of a histone acetyltransferase non-targeted in a non-human organism or a part thereof, preferably a microorganism, a plant cell, a plant or a part thereof, as compared to a corresponding non-transformed wild type non-human organism or a part thereof; and
[17668] (b) growing the non-human organism or a part thereof under conditions which permit the production of tyrosine or a composition comprising tyrosine in said non-human organism or in the culture medium surrounding said non-human organism.

[17669] A further embodiment of the present invention relates to a process for the production of homoserine, which comprises
[17670] (a) increasing or generating the activity of a diacylglycerol O-acyltransferase non-targeted in a non-human organism or a part thereof, preferably a microorganism, a plant cell, a plant or a part thereof, as compared to a corresponding non-transformed wild type non-human organism or a part thereof; and
[17671] (b) growing the non-human organism or a part thereof under conditions which permit the production of homoserine or a composition comprising homoserine in said non-human organism or in the culture medium surrounding said non-human organism.

[17672] A further embodiment of the present invention relates to a process for the production of serine, which comprises
[17673] (a) increasing or generating the activity of a diacylglycerol O-acyltransferase non-targeted in a non-human organism or a part thereof, preferably a microorganism, a plant cell, a plant or a part thereof, as compared to a corresponding non-transformed wild type non-human organism or a part thereof; and
[17674] (b) growing the non-human organism or a part thereof under conditions which permit the production of serine or a composition comprising serine in said non-human organism or in the culture medium surrounding said non-human organism.

[17675] A further embodiment of the present invention relates to a process for the production of 5-oxoproline, which comprises
[17676] (a) increasing or generating the activity of a diacylglycerol O-acyltransferase non-targeted in a non-human organism or a part thereof, preferably a microorganism, a plant cell, a plant or a part thereof, as compared to a corresponding non-transformed wild type non-human organism or a part thereof; and
[17677] (b) growing the non-human organism or a part thereof under conditions which permit the production of 5-oxoproline or a composition comprising 5-oxoproline in said non-human organism or in the culture medium surrounding said non-human organism.

[17678] A further embodiment of the present invention relates to a process for the production of glycine, which comprises
[17679] (a) increasing or generating the activity of a acetyl-CoA acetyltransferase non-targeted in a non-human organism or a part thereof, preferably a microorganism, a plant cell, a plant or a part thereof, as compared to a corresponding non-transformed wild type non-human organism or a part thereof; and
[17680] (b) growing the non-human organism or a part thereof under conditions which permit the production of glycine or a composition comprising glycine in said non-human organism or in the culture medium surrounding said non-human organism.

[17681] A further embodiment of the present invention relates to a process for the production of serine, which comprises
[17682] (a) increasing or generating the activity of a citrate synthase non-targeted in a non-human organism or a part thereof, preferably a microorganism, a plant cell, a plant or a part thereof, as compared to a corresponding non-transformed wild type non-human organism or a part thereof; and
[17683] (b) growing the non-human organism or a part thereof under conditions which permit the production of serine or a composition comprising serine in said non-human organism or in the culture medium surrounding said non-human organism.

[17684] A further embodiment of the present invention relates to a process for the production of aspartate, which comprises
[17685] (a) increasing or generating the activity of a ammonium transporter non-targeted in a non-human organism or a part thereof, preferably a microorganism, a plant cell, a plant or a part thereof, as compared to a corresponding non-transformed wild type non-human organism or a part thereof; and
[17686] (b) growing the non-human organism or a part thereof under conditions which permit the production of aspartate or a composition comprising aspartate in said non-human organism or in the culture medium surrounding said non-human organism.

[17687] A further embodiment of the present invention relates to a process for the production of phenylalanine, which comprises
[17688] (a) increasing or generating the activity of a Zm_{—}4842_BE510522-protein non-targeted in a non-human organism or a part thereof, preferably a microorganism, a plant cell, a plant or a part thereof, as compared to a corresponding non-transformed wild type non-human organism or a part thereof; and
[17689] (b) growing the non-human organism or a part thereof under conditions which permit the production of phenylalanine or a composition comprising phenylalanine in said non-human organism or in the culture medium surrounding said non-human organism.

[17690] A further embodiment of the present invention relates to a process for the production of serine, which comprises
[17691] (a) increasing or generating the activity of a Zm_{—}4842_BE510522-protein non-targeted in a non-human organism or a part thereof, preferably a microorganism, a plant cell, a plant or a part thereof, as compared to a corresponding non-transformed wild type non-human organism or a part thereof; and
[17692] (b) growing the non-human organism or a part thereof under conditions which permit the production of serine or a composition comprising serine in said non-human organism or in the culture medium surrounding said non-human organism.

[17693] A further embodiment of the present invention relates to a process for the production of tyrosine, which comprises
[17694] (a) increasing or generating the activity of a Zm_{—}4842_BE510522-protein non-targeted in a non-human organism or a part thereof, preferably a microorganism, a plant cell, a plant or a part thereof, as compared to a corresponding non-transformed wild type non-human organism or a part thereof; and
[17695] (b) growing the non-human organism or a part thereof under conditions which permit the production of tyrosine or a composition comprising tyrosine in said non-human organism or in the culture medium surrounding said non-human organism.

[17696] A further embodiment of the present invention relates to a process for the production of 5-oxoproline, which comprises
[17697] (a) increasing or generating the activity of a Zm_{—}4842_BE510522-protein non-targeted in a non-human organism or a part thereof, preferably a microorganism, a plant cell, a plant or a part thereof, as compared to a corresponding non-transformed wild type non-human organism or a part thereof; and
[17698] (b) growing the non-human organism or a part thereof under conditions which permit the production of 5-oxoproline or a composition comprising 5-oxoproline in said non-human organism or in the culture medium surrounding said non-human organism.

[17699] A further embodiment of the present invention relates to a process for the production of 3,4-dihydroxyphenylalanine (dopa), which comprises
[17700] (a) increasing or generating the activity of a polypeptide comprising a polypeptide as depicted in the respective line in column 5 or 8 of Table II, application no. 3, or a homolog or a fragment thereof, a consensus sequence or at least one polypeptide motif as depicted in the respective line in column 8 of Table IV, application no. 3, whereby the respective line discloses in column 7 3,4-dihydroxyphenylalanine (dopa); or
[17701] increasing or generating the activity of an expression product of one or more nucleic acid molecule(s) comprising a polynucleotide as depicted in the respective line in column 5 or 8 of Table I, application no. 3, preferably the coding region thereof, or a homolog or a fragment thereof, whereby the respective line discloses in column 7 3,4-dihydroxyphenylalanine (dopa);
[17702] non-targeted in a non-human organism or a part thereof; preferably a microorganism, a plant cell, a plant or a part thereof, as compared to a corresponding non-transformed wild type non-human organism or a part thereof; and
[17703] (b) growing the non-human organism under conditions which permit the production of 3,4-dihydroxyphenylalanine (dopa), or a composition comprising 3,4-dihydroxyphenylalanine (dopa) in said non-human organism or in the culture medium surrounding said non-human organism.

[17704] A further embodiment of the present invention relates to a process for the production of 5-oxoproline, which comprises
[17705] (a) increasing or generating the activity of a polypeptide comprising a polypeptide as depicted in the respective line in column 5 or 8 of Table II, application no. 3, or a homolog or a fragment thereof, a consensus sequence or at least one polypeptide motif as depicted in the respective line in column 8 of Table IV, application no. 3, whereby the respective line discloses in column 7 5-oxoproline; or
[17706] increasing or generating the activity of an expression product of one or more nucleic acid molecule(s) comprising a polynucleotide as depicted in the respective line in column 5 or 8 of Table I, application no. 3, preferably the coding region thereof, or a homolog or a fragment thereof, whereby the respective line discloses in column 7 5-oxoproline;
[17707] non-targeted in a non-human organism or a part thereof; preferably a microorganism, a plant cell, a plant or a part thereof, as compared to a corresponding non-transformed wild type non-human organism or a part thereof; and
[17708] (b) growing the non-human organism under conditions which permit the production of 5-oxoproline, or a composition comprising 5-oxoproline in said non-human organism or in the culture medium surrounding said non-human organism.

[17709] A further embodiment of the present invention relates to a process for the production of alanine, which comprises
[17710] (a) increasing or generating the activity of a polypeptide comprising a polypeptide as depicted in the respective line in column 5 or 8 of Table II, application no. 3, or a homolog or a fragment thereof, a consensus sequence or at least one polypeptide motif as depicted in the respective line in column 8 of Table IV, application no. 3, whereby the respective line discloses in column 7 alanine; or
[17711] increasing or generating the activity of an expression product of one or more nucleic acid molecule(s) comprising a polynucleotide as depicted in the respective line in column 5 or 8 of Table I, application no. 3, preferably the coding region thereof, or a homolog or a fragment thereof, whereby the respective line discloses in column 7 alanine;
[17712] non-targeted in a non-human organism or a part thereof; preferably a microorganism, a plant cell, a plant or a part thereof, as compared to a corresponding non-transformed wild type non-human organism or a part thereof; and
[17713] (b) growing the non-human organism under conditions which permit the production of alanine, or a composition comprising alanine in said non-human organism or in the culture medium surrounding said non-human organism.

[17714] A further embodiment of the present invention relates to a process for the production of asparagine, which comprises
[17715] (a) increasing or generating the activity of a polypeptide comprising a polypeptide as depicted in the respective line in column 5 or 8 of Table II, application no. 3, or a homolog or a fragment thereof, a consensus sequence or at least one polypeptide motif as depicted in the respective line in column 8 of Table IV, application no. 3, whereby the respective line discloses in column 7 asparagine; or
[17716] increasing or generating the activity of an expression product of one or more nucleic acid molecule(s) comprising a polynucleotide as depicted in the respective line in column 5 or 8 of Table I, application no. 3, preferably the coding region thereof, or a homolog or a fragment thereof, whereby the respective line discloses in column 7 asparagine;
[17717] non-targeted in a non-human organism or a part thereof; preferably a microorganism, a plant cell, a plant or a part thereof, as compared to a corresponding non-transformed wild type non-human organism or a part thereof; and
[17718] (b) growing the non-human organism under conditions which permit the production of asparagine, or a composition comprising asparagine in said non-human organism or in the culture medium surrounding said non-human organism.

[17719] A further embodiment of the present invention relates to a process for the production of aspartate, which comprises
[17720] (a) increasing or generating the activity of a polypeptide comprising a polypeptide as depicted in the respective line in column 5 or 8 of Table II, application no. 3, or a homolog or a fragment thereof, a consensus sequence or at least one polypeptide motif as depicted in the respective line in column 8 of Table IV, application no. 3, whereby the respective line discloses in column 7 aspartate; or
[17721] increasing or generating the activity of an expression product of one or more nucleic acid molecule(s) comprising a polynucleotide as depicted in the respective line in column 5 or 8 of Table I, application no. 3, preferably the coding region thereof, or a homolog or a fragment thereof, whereby the respective line discloses in column 7 aspartate;
[17722] non-targeted in a non-human organism or a part thereof; preferably a microorganism, a plant cell, a plant or a part thereof, as compared to a corresponding non-transformed wild type non-human organism or a part thereof; and
[17723] (b) growing the non-human organism under conditions which permit the production of aspartate, or a composition comprising aspartate in said non-human organism or in the culture medium surrounding said non-human organism.

[17724] A further embodiment of the present invention relates to a process for the production of citrulline, which comprises
[17725] (a) increasing or generating the activity of a polypeptide comprising a polypeptide as depicted in the respective line in column 5 or 8 of Table II, application no. 3, or a homolog or a fragment thereof, a consensus sequence or at least one polypeptide motif as depicted in the respective line in column 8 of Table IV, application no. 3, whereby the respective line discloses in column 7 citrulline; or
[17726] increasing or generating the activity of an expression product of one or more nucleic acid molecule(s) comprising a polynucleotide as depicted in the respective line in column 5 or 8 of Table I, application no. 3, preferably the coding region thereof, or a homolog or a fragment thereof, whereby the respective line discloses in column 7 citrulline;
[17727] non-targeted in a non-human organism or a part thereof; preferably a microorganism, a plant cell, a plant or a part thereof, as compared to a corresponding non-transformed wild type non-human organism or a part thereof; and
[17728] (b) growing the non-human organism under conditions which permit the production of citrulline, or a composition comprising citrulline in said non-human organism or in the culture medium surrounding said non-human organism.

[17729] A further embodiment of the present invention relates to a process for the production of glycine, which comprises
[17730] (a) increasing or generating the activity of a polypeptide comprising a polypeptide as depicted in the respective line in column 5 or 8 of Table II, application no. 3, or a homolog or a fragment thereof, a consensus sequence or at least one polypeptide motif as depicted in the respective line in column 8 of Table IV, application no. 3, whereby the respective line discloses in column 7 glycine; or
[17731] increasing or generating the activity of an expression product of one or more nucleic acid molecule(s) comprising a polynucleotide as depicted in the respective line in column 5 or 8 of Table I, application no. 3, preferably the coding region thereof, or a homolog or a fragment thereof, whereby the respective line discloses in column 7 glycine;
[17732] non-targeted in a non-human organism or a part thereof; preferably a microorganism, a plant cell, a plant or a part thereof, as compared to a corresponding non-transformed wild type non-human organism or a part thereof; and
[17733] (b) growing the non-human organism under conditions which permit the production of glycine, or a composition comprising glycine in said non-human organism or in the culture medium surrounding said non-human organism.

[17734] A further embodiment of the present invention relates to a process for the production of homoserine, which comprises
[17735] (a) increasing or generating the activity of a polypeptide comprising a polypeptide as depicted in the respective line in column 5 or 8 of Table II, application no. 3, or a homolog or a fragment thereof, a consensus sequence or at least one polypeptide motif as depicted in the respective line in column 8 of Table IV, application no. 3, whereby the respective line discloses in column 7 homoserine; or
[17736] increasing or generating the activity of an expression product of one or more nucleic acid molecule(s) comprising a polynucleotide as depicted in the respective line in column 5 or 8 of Table I, application no. 3, preferably the coding region thereof, or a homolog or a fragment thereof, whereby the respective line discloses in column 7 homoserine;
[17737] non-targeted in a non-human organism or a part thereof; preferably a microorganism, a plant cell, a plant or a part thereof, as compared to a corresponding non-transformed wild type non-human organism or a part thereof; and
[17738] (b) growing the non-human organism under conditions which permit the production of homoserine, or a composition comprising homoserine in said non-human organism or in the culture medium surrounding said non-human organism.

[17739] A further embodiment of the present invention relates to a process for the production of ornithine, which comprises
[17740] (a) increasing or generating the activity of a polypeptide comprising a polypeptide as depicted in the respective line in column 5 or 8 of Table II, application no. 3, or a homolog or a fragment thereof, a consensus sequence or at least one polypeptide motif as depicted in the respective line in column 8 of Table IV, application no. 3, whereby the respective line discloses in column 7 ornithine; or
[17741] increasing or generating the activity of an expression product of one or more nucleic acid molecule(s) comprising a polynucleotide as depicted in the respective line in column 5 or 8 of Table I, application no. 3, preferably the coding region thereof, or a homolog or a fragment thereof, whereby the respective line discloses in column 7 ornithine;
[17742] non-targeted in a non-human organism or a part thereof; preferably a microorganism, a plant cell, a plant or a part thereof, as compared to a corresponding non-transformed wild type non-human organism or a part thereof; and
[17743] (b) growing the non-human organism under conditions which permit the production of ornithine, or a composition comprising ornithine in said non-human organism or in the culture medium surrounding said non-human organism.

[17744] A further embodiment of the present invention relates to a process for the production of phenylalanine, which comprises
[17745] (a) increasing or generating the activity of a polypeptide comprising a polypeptide as depicted in the respective line in column 5 or 8 of Table II, application no. 3, or a homolog or a fragment thereof, a consensus sequence or at least one polypeptide motif as depicted in the respective line in column 8 of Table IV, application no. 3, whereby the respective line discloses in column 7 phenylalanine; or
[17746] increasing or generating the activity of an expression product of one or more nucleic acid molecule(s) comprising a polynucleotide as depicted in the respective line in column 5 or 8 of Table I, application no. 3, preferably the coding region thereof, or a homolog or a fragment thereof, whereby the respective line discloses in column 7 phenylalanine;
[17747] non-targeted in a non-human organism or a part thereof; preferably a microorganism, a plant cell, a plant or a part thereof, as compared to a corresponding non-transformed wild type non-human organism or a part thereof; and
[17748] (b) growing the non-human organism under conditions which permit the production of phenylalanine, or a composition comprising phenylalanine in said non-human organism or in the culture medium surrounding said non-human organism.

[17749] A further embodiment of the present invention relates to a process for the production of serine, which comprises
[17750] (a) increasing or generating the activity of a polypeptide comprising a polypeptide as depicted in the respective line in column 5 or 8 of Table II, application no. 3, or a homolog or a fragment thereof, a consensus sequence or at least one polypeptide motif as depicted in the respective line in column 8 of Table IV, application no. 3, whereby the respective line discloses in column 7 serine; or
[17751] increasing or generating the activity of an expression product of one or more nucleic acid molecule(s) comprising a polynucleotide as depicted in the respective line in column 5 or 8 of Table I, application no. 3, preferably the coding region thereof, or a homolog or a fragment thereof, whereby the respective line discloses in column 7 serine;
[17752] non-targeted in a non-human organism or a part thereof; preferably a microorganism, a plant cell, a plant or a part thereof, as compared to a corresponding non-transformed wild type non-human organism or a part thereof; and
[17753] (b) growing the non-human organism under conditions which permit the production of serine, or a composition comprising serine in said non-human organism or in the culture medium surrounding said non-human organism.

[17754] A further embodiment of the present invention relates to a process for the production of tyrosine, which comprises
[17755] (a) increasing or generating the activity of a polypeptide comprising a polypeptide as depicted in the respective line in column 5 or 8 of Table II, application no. 3, or a homolog or a fragment thereof, a consensus sequence or at least one polypeptide motif as depicted in the respective line in column 8 of Table IV, application no. 3 , whereby the respective line discloses in column 7 tyrosine; or
[17756] increasing or generating the activity of an expression product of one or more nucleic acid molecule(s) comprising a polynucleotide as depicted in the respective line in column 5 or 8 of Table I, application no. 3, preferably the coding region thereof, or a homolog or a fragment thereof, whereby the respective line discloses in column 7 tyrosine;
[17757] non-targeted in a non-human organism or a part thereof; preferably a microorganism, a plant cell, a plant or a part thereof, as compared to a corresponding non-transformed wild type non-human organism or a part thereof; and
[17758] (b) growing the non-human organism under conditions which permit the production of tyrosine, or a composition comprising tyrosine in said non-human organism or in the culture medium surrounding said non-human organism.

[17759] A further embodiment of the present invention relates to a process for the production of aspartate, which comprises
[17760] (a) increasing or generating one or more activities selected from the group consisting of 47266012-protein in an organelle, preferably in plastids or mitochondria, especially in plastids, of a non-human organism or a part thereof, preferably a microorganism, a plant cell, a plant or a part thereof, as compared to a corresponding non-transformed wild type non-human organism or a part thereof; and
[17761] (b) growing the non-human organism or a part thereof under conditions which permit the production of aspartate or a composition comprising aspartate in said non-human organism or in the culture medium surrounding said non-human organism.

[17762] A further embodiment of the present invention relates to a process for the production of tyrosine, which comprises
[17763] (a) increasing or generating one or more activities selected from the group consisting of 47266012-protein in an organelle, preferably in plastids or mitochondria, especially in plastids, of a non-human organism or a part thereof, preferably a microorganism, a plant cell, a plant or a part thereof, as compared to a corresponding non-transformed wild type non-human organism or a part thereof; and
[17764] (b) growing the non-human organism or a part thereof under conditions which permit the production of tyrosine or a composition comprising tyrosine in said non-human organism or in the culture medium surrounding said non-human organism.

[17765] A further embodiment of the present invention relates to a process for the production of 5-oxoproline, which comprises
[17766] (a) increasing or generating one or more activities selected from the group consisting of 47266012-protein in an organelle, preferably in plastids or mitochondria, especially in plastids, of a non-human organism or a part thereof, preferably a microorganism, a plant cell, a plant or a part thereof, as compared to a corresponding non-transformed wild type non-human organism or a part thereof; and
[17767] (b) growing the non-human organism or a part thereof under conditions which permit the production of 5-oxoproline or a composition comprising 5-oxoproline in said non-human organism or in the culture medium surrounding said non-human organism.

[17768] A further embodiment of the present invention relates to a process for the production of aspartate, which comprises
[17769] (a) increasing or generating one or more activities selected from the group consisting of 49747384_SOYBEAN-protein in an organelle, preferably in plastids or mitochondria, especially in plastids, of a non-human organism or a part thereof, preferably a microorganism, a plant cell, a plant or a part thereof, as compared to a corresponding non-transformed wild type non-human organism or a part thereof; and
[17770] (b) growing the non-human organism or a part thereof under conditions which permit the production of aspartate or a composition comprising aspartate in said non-human organism or in the culture medium surrounding said non-human organism.

[17771] A further embodiment of the present invention relates to a process for the production of tyrosine, which comprises
[17772] (a) increasing or generating one or more activities selected from the group consisting of 49747384_SOYBEAN-protein in an organelle, preferably in plastids or mitochondria, especially in plastids, of a non-human organism or a part thereof, preferably a microorganism, a plant cell, a plant or a part thereof, as compared to a corresponding non-transformed wild type non-human organism or a part thereof; and
[17773] (b) growing the non-human organism or a part thereof under conditions which permit the production of tyrosine or a composition comprising tyrosine in said non-human organism or in the culture medium surrounding said non-human organism.

[17774] A further embodiment of the present invention relates to a process for the production of 5-oxoproline, which comprises
[17775] (a) increasing or generating one or more activities selected from the group consisting of 49747384_SOYBEAN-protein in an organelle, preferably in plastids or mitochondria, especially in plastids, of a non-human organism or a part thereof, preferably a microorganism, a plant cell, a plant or a part thereof, as compared to a corresponding non-transformed wild type non-human organism or a part thereof; and
[17776] (b) growing the non-human organism or a part thereof under conditions which permit the production of 5-oxoproline or a composition comprising 5-oxoproline in said non-human organism or in the culture medium surrounding said non-human organism.

[17777] A further embodiment of the present invention relates to a process for the production of alanine, which comprises
[17778] (a) increasing or generating one or more activities selected from the group consisting of pyruvate kinase in an organelle, preferably in plastids or mitochondria, especially in plastids, of a non-human organism or a part thereof, preferably a microorganism, a plant cell, a plant or a part thereof, as compared to a corresponding non-transformed wild type non-human organism or a part thereof; and
[17779] (b) growing the non-human organism or a part thereof under conditions which permit the production of alanine or a composition comprising alanine in said non-human organism or in the culture medium surrounding said non-human organism.

[17780] A further embodiment of the present invention relates to a process for the production of phenylalanine, which comprises
[17781] (a) increasing or generating one or more activities selected from the group consisting of pyruvate kinase in an organelle, preferably in plastids or mitochondria, especially in plastids, of a non-human organism or a part thereof, preferably a microorganism, a plant cell, a plant or a part thereof, as compared to a corresponding non-transformed wild type non-human organism or a part thereof; and
[17782] (b) growing the non-human organism or a part thereof under conditions which permit the production of phenylalanine or a composition comprising phenylalanine in said non-human organism or in the culture medium surrounding said non-human organism.

[17783] A further embodiment of the present invention relates to a process for the production of tyrosine, which comprises
[17784] (a) increasing or generating one or more activities selected from the group consisting of pyruvate kinase in an organelle, preferably in plastids or mitochondria, especially in plastids, of a non-human organism or a part thereof, preferably a microorganism, a plant cell, a plant or a part thereof, as compared to a corresponding non-transformed wild type non-human organism or a part thereof; and
[17785] (b) growing the non-human organism or a part thereof under conditions which permit the production of tyrosine or a composition comprising tyrosine in said non-human organism or in the culture medium surrounding said non-human organism.

[17786] A further embodiment of the present invention relates to a process for the production of citrulline, which comprises
[17787] (a) increasing or generating one or more activities selected from the group consisting of acetyltransferase in an organelle, preferably in plastids or mitochondria, especially in plastids, of a non-human organism or a part thereof, preferably a microorganism, a plant cell, a plant or a part thereof, as compared to a corresponding non-transformed wild type non-human organism or a part thereof; and
[17788] (b) growing the non-human organism or a part thereof under conditions which permit the production of citrulline or a composition comprising citrulline in said non-human organism or in the culture medium surrounding said non-human organism.

[17789] A further embodiment of the present invention relates to a process for the production of asparagine, which comprises
[17790] (a) increasing or generating one or more activities selected from the group consisting of pyruvate kinase in an organelle, preferably in plastids or mitochondria, especially in plastids, of a non-human organism or a part thereof, preferably a microorganism, a plant cell, a plant or a part thereof, as compared to a corresponding non-transformed wild type non-human organism or a part thereof; and
[17791] (b) growing the non-human organism or a part thereof under conditions which permit the production of asparagine or a composition comprising asparagine in said non-human organism or in the culture medium surrounding said non-human organism.

[17792] A further embodiment of the present invention relates to a process for the production of serine, which comprises
[17793] (a) increasing or generating one or more activities selected from the group consisting of pyruvate kinase in an organelle, preferably in plastids or mitochondria, especially in plastids, of a non-human organism or a part thereof, preferably a microorganism, a plant cell, a plant or a part thereof, as compared to a corresponding non-transformed wild type non-human organism or a part thereof; and
[17794] (b) growing the non-human organism or a part thereof under conditions which permit the production of serine or a composition comprising serine in said non-human organism or in the culture medium surrounding said non-human organism.

[17795] A further embodiment of the present invention relates to a process for the production of alanine, which comprises
[17796] (a) increasing or generating one or more activities selected from the group consisting of glucose-6-phosphate 1-dehydrogenase in an organelle, preferably in plastids or mitochondria, especially in plastids, of a non-human organism or a part thereof, preferably a microorganism, a plant cell, a plant or a part thereof, as compared to a corresponding non-transformed wild type non-human organism or a part thereof; and
[17797] (b) growing the non-human organism or a part thereof under conditions which permit the production of alanine or a composition comprising alanine in said non-human organism or in the culture medium surrounding said non-human organism.

[17798] A further embodiment of the present invention relates to a process for the production of phenylalanine, which comprises
[17799] (a) increasing or generating one or more activities selected from the group consisting of glucose-6-phosphate 1-dehydrogenase in an organelle, preferably in plastids or mitochondria, especially in plastids, of a non-human organism or a part thereof, preferably a microorganism, a plant cell, a plant or a part thereof, as compared to a corresponding non-transformed wild type non-human organism or a part thereof; and
[17800] (b) growing the non-human organism or a part thereof under conditions which permit the production of phenylalanine or a composition comprising phenylalanine in said non-human organism or in the culture medium surrounding said non-human organism.

[17801] A further embodiment of the present invention relates to a process for the production of tyrosine, which comprises
[17802] (a) increasing or generating one or more activities selected from the group consisting of glucose-6-phosphate 1-dehydrogenase in an organelle, preferably in plastids or mitochondria, especially in plastids, of a non-human organism or a part thereof, preferably a microorganism, a plant cell, a plant or a part thereof, as compared to a corresponding non-transformed wild type non-human organism or a part thereof; and
[17803] (b) growing the non-human organism or a part thereof under conditions which permit the production of tyrosine or a composition comprising tyrosine in said non-human organism or in the culture medium surrounding said non-human organism.

[17804] A further embodiment of the present invention relates to a process for the production of alanine, which comprises
[17805] (a) increasing or generating one or more activities selected from the group consisting of amino acid acetyltransferase in an organelle, preferably in plastids or mitochondria, especially in plastids, of a non-human organism or a part thereof, preferably a microorganism, a plant cell, a plant or a part thereof, as compared to a corresponding non-transformed wild type non-human organism or a part thereof; and
[17806] (b) growing the non-human organism or a part thereof under conditions which permit the production of alanine or a composition comprising alanine in said non-human organism or in the culture medium surrounding said non-human organism.

[17807] A further embodiment of the present invention relates to a process for the production of citrulline, which comprises
[17808] (a) increasing or generating one or more activities selected from the group consisting of amino acid acetyltransferase in an organelle, preferably in plastids or mitochondria, especially in plastids, of a non-human organism or a part thereof, preferably a microorganism, a plant cell, a plant or a part thereof, as compared to a corresponding non-transformed wild type non-human organism or a part thereof; and
[17809] (b) growing the non-human organism or a part thereof under conditions which permit the production of citrulline or a composition comprising citrulline in said non-human organism or in the culture medium surrounding said non-human organism.

[17810] A further embodiment of the present invention relates to a process for the production of phenylalanine, which comprises
[17811] (a) increasing or generating one or more activities selected from the group consisting of amino acid acetyltransferase in an organelle, preferably in plastids or mitochondria, especially in plastids, of a non-human organism or a part thereof, preferably a microorganism, a plant cell, a plant or a part thereof, as compared to a corresponding non-transformed wild type non-human organism or a part thereof; and
[17812] (b) growing the non-human organism or a part thereof under conditions which permit the production of phenylalanine or a composition comprising phenylalanine in said non-human organism or in the culture medium surrounding said non-human organism.

[17813] A further embodiment of the present invention relates to a process for the production of citrulline, which comprises
[17814] (a) increasing or generating one or more activities selected from the group consisting of protein phosphatase in an organelle, preferably in plastids or mitochondria, especially in plastids, of a non-human organism or a part thereof, preferably a microorganism, a plant cell, a plant or a part thereof, as compared to a corresponding non-transformed wild type non-human organism or a part thereof; and
[17815] (b) growing the non-human organism or a part thereof under conditions which permit the production of citrulline or a composition comprising citrulline in said non-human organism or in the culture medium surrounding said non-human organism.

[17816] A further embodiment of the present invention relates to a process for the production of glycine, which comprises
[17817] (a) increasing or generating one or more activities selected from the group consisting of DNA-binding protein in an organelle, preferably in plastids or mitochondria, especially in plastids, of a non-human organism or a part thereof, preferably a microorganism, a plant cell, a plant or a part thereof, as compared to a corresponding non-transformed wild type non-human organism or a part thereof; and
[17818] (b) growing the non-human organism or a part thereof under conditions which permit the production of glycine or a composition comprising glycine in said non-human organism or in the culture medium surrounding said non-human organism.

[17819] A further embodiment of the present invention relates to a process for the production of serine, which comprises
[17820] (a) increasing or generating one or more activities selected from the group consisting of DNA-binding protein in an organelle, preferably in plastids or mitochondria, especially in plastids, of a non-human organism or a part thereof, preferably a microorganism, a plant cell, a plant or a part thereof, as compared to a corresponding non-transformed wild type non-human organism or a part thereof; and
[17821] (b) growing the non-human organism or a part thereof under conditions which permit the production of serine or a composition comprising serine in said non-human organism or in the culture medium surrounding said non-human organism.

[17822] A further embodiment of the present invention relates to a process for the production of phenylalanine, which comprises
[17823] (a) increasing or generating one or more activities selected from the group consisting of At1g17440-protein in an organelle, preferably in plastids or mitochondria, especially in plastids, of a non-human organism or a part thereof, preferably a microorganism, a plant cell, a plant or a part thereof, as compared to a corresponding non-transformed wild type non-human organism or a part thereof; and
[17824] (b) growing the non-human organism or a part thereof under conditions which permit the production of phenylalanine or a composition comprising phenylalanine in said non-human organism or in the culture medium surrounding said non-human organism.

[17825] A further embodiment of the present invention relates to a process for the production of tyrosine, which comprises
[17826] (a) increasing or generating one or more activities selected from the group consisting of At1g17440-protein in an organelle, preferably in plastids or mitochondria, especially in plastids, of a non-human organism or a part thereof, preferably a microorganism, a plant cell, a plant or a part thereof, as compared to a corresponding non-transformed wild type non-human organism or a part thereof; and
[17827] (b) growing the non-human organism or a part thereof under conditions which permit the production of tyrosine or a composition comprising tyrosine in said non-human organism or in the culture medium surrounding said non-human organism.

[17828] A further embodiment of the present invention relates to a process for the production of aspartate, which comprises
[17829] (a) increasing or generating one or more activities selected from the group consisting of At1g19800-protein in an organelle, preferably in plastids or mitochondria, especially in plastids, of a non-human organism or a part thereof, preferably a microorganism, a plant cell, a plant or a part thereof, as compared to a corresponding non-transformed wild type non-human organism or a part thereof; and
[17830] (b) growing the non-human organism or a part thereof under conditions which permit the production of aspartate or a composition comprising aspartate in said non-human organism or in the culture medium surrounding said non-human organism.

[17831] A further embodiment of the present invention relates to a process for the production of citrulline, which comprises
[17832] (a) increasing or generating one or more activities selected from the group consisting of At1g19800-protein in an organelle, preferably in plastids or mitochondria, especially in plastids, of a non-human organism or a part thereof, preferably a microorganism, a plant cell, a plant or a part thereof, as compared to a corresponding non-transformed wild type non-human organism or a part thereof; and
[17833] (b) growing the non-human organism or a part thereof under conditions which permit the production of citrulline or a composition comprising citrulline in said non-human organism or in the culture medium surrounding said non-human organism.

[17834] A further embodiment of the present invention relates to a process for the production of tyrosine, which comprises
[17835] (a) increasing or generating one or more activities selected from the group consisting of At1g19800-protein in an organelle, preferably in plastids or mitochondria, especially in plastids, of a non-human organism or a part thereof, preferably a microorganism, a plant cell, a plant or a part thereof, as compared to a corresponding non-transformed wild type non-human organism or a part thereof; and
[17836] (b) growing the non-human organism or a part thereof under conditions which permit the production of tyrosine or a composition comprising tyrosine in said non-human organism or in the culture medium surrounding said non-human organism.

[17837] A further embodiment of the present invention relates to a process for the production of phenylalanine, which comprises
[17838] (a) increasing or generating one or more activities selected from the group consisting of cullin in an organelle, preferably in plastids or mitochondria, especially in plastids, of a non-human organism or a part thereof, preferably a microorganism, a plant cell, a plant or a part thereof, as compared to a corresponding non-transformed wild type non-human organism or a part thereof; and
[17839] (b) growing the non-human organism or a part thereof under conditions which permit the production of phenylalanine or a composition comprising phenylalanine in said non-human organism or in the culture medium surrounding said non-human organism.

[17840] A further embodiment of the present invention relates to a process for the production of tyrosine, which comprises
[17841] (a) increasing or generating one or more activities selected from the group consisting of cullin in an organelle, preferably in plastids or mitochondria, especially in plastids, of a non-human organism or a part thereof, preferably a microorganism, a plant cell, a plant or a part thereof, as compared to a corresponding non-transformed wild type non-human organism or a part thereof; and
[17842] (b) growing the non-human organism or a part thereof under conditions which permit the production of tyrosine or a composition comprising tyrosine in said non-human organism or in the culture medium surrounding said non-human organism.

[17843] A further embodiment of the present invention relates to a process for the production of homoserine, which comprises
[17844] (a) increasing or generating one or more activities selected from the group consisting of bifunctional aspartokinase/homoserine dehydrogenase in an organelle, preferably in plastids or mitochondria, especially in plastids, of a non-human organism or a part thereof, preferably a microorganism, a plant cell, a plant or a part thereof, as compared to a corresponding non-transformed wild type non-human organism or a part thereof; and
[17845] (b) growing the non-human organism or a part thereof under conditions which permit the production of homoserine or a composition comprising homoserine in said non-human organism or in the culture medium surrounding said non-human organism.

[17846] A further embodiment of the present invention relates to a process for the production of aspartate, which comprises
[17847] (a) increasing or generating one or more activities selected from the group consisting of eukaryotic translation initiation factor 5 in an organelle, preferably in plastids or mitochondria, especially in plastids, of a non-human organism or a part thereof, preferably a microorganism, a plant cell, a plant or a part thereof, as compared to a corresponding non-transformed wild type non-human organism or a part thereof; and
[17848] (b) growing the non-human organism or a part thereof under conditions which permit the production of aspartate or a composition comprising aspartate in said non-human organism or in the culture medium surrounding said non-human organism.

[17849] A further embodiment of the present invention relates to a process for the production of phenylalanine, which comprises
[17850] (a) increasing or generating one or more activities selected from the group consisting of eukaryotic translation initiation factor 5 in an organelle, preferably in plastids or mitochondria, especially in plastids, of a non-human organism or a part thereof, preferably a microorganism, a plant cell, a plant or a part thereof, as compared to a corresponding non-transformed wild type non-human organism or a part thereof; and
[17851] (b) growing the non-human organism or a part thereof under conditions which permit the production of phenylalanine or a composition comprising phenylalanine in said non-human organism or in the culture medium surrounding said non-human organism.

[17852] A further embodiment of the present invention relates to a process for the production of serine, which comprises
[17853] (a) increasing or generating one or more activities selected from the group consisting of eukaryotic translation initiation factor 5 in an organelle, preferably in plastids or mitochondria, especially in plastids, of a non-human organism or a part thereof, preferably a microorganism, a plant cell, a plant or a part thereof, as compared to a corresponding non-transformed wild type non-human organism or a part thereof; and
[17854] (b) growing the non-human organism or a part thereof under conditions which permit the production of serine or a composition comprising serine in said non-human organism or in the culture medium surrounding said non-human organism.

[17855] A further embodiment of the present invention relates to a process for the production of tyrosine, which comprises
[17856] (a) increasing or generating one or more activities selected from the group consisting of eukaryotic translation initiation factor 5 in an organelle, preferably in plastids or mitochondria, especially in plastids, of a non-human organism or a part thereof, preferably a microorganism, a plant cell, a plant or a part thereof, as compared to a corresponding non-transformed wild type non-human organism or a part thereof; and
[17857] (b) growing the non-human organism or a part thereof under conditions which permit the production of tyrosine or a composition comprising tyrosine in said non-human organism or in the culture medium surrounding said non-human organism.

[17858] A further embodiment of the present invention relates to a process for the production of 5-oxoproline, which comprises
[17859] (a) increasing or generating one or more activities selected from the group consisting of eukaryotic translation initiation factor 5 in an organelle, preferably in plastids or mitochondria, especially in plastids, of a non-human organism or a part thereof, preferably a microorganism, a plant cell, a plant or a part thereof, as compared to a corresponding non-transformed wild type non-human organism or a part thereof; and
[17860] (b) growing the non-human organism or a part thereof under conditions which permit the production of 5-oxoproline or a composition comprising 5-oxoproline in said non-human organism or in the culture medium surrounding said non-human organism.

[17861] A further embodiment of the present invention relates to a process for the production of phenylalanine, which comprises
[17862] (a) increasing or generating one or more activities selected from the group consisting of transcriptional regulator in an organelle, preferably in plastids or mitochondria, especially in plastids, of a non-human organism or a part thereof, preferably a microorganism, a plant cell, a plant or a part thereof, as compared to a corresponding non-transformed wild type non-human organism or a part thereof; and
[17863] (b) growing the non-human organism or a part thereof under conditions which permit the production of phenylalanine or a composition comprising phenylalanine in said non-human organism or in the culture medium surrounding said non-human organism.

[17864] A further embodiment of the present invention relates to a process for the production of serine, which comprises
[17865] (a) increasing or generating one or more activities selected from the group consisting of transcriptional regulator in an organelle, preferably in plastids or mitochondria, especially in plastids, of a non-human organism or a part thereof, preferably a microorganism, a plant cell, a plant or a part thereof, as compared to a corresponding non-transformed wild type non-human organism or a part thereof; and
[17866] (b) growing the non-human organism or a part thereof under conditions which permit the production of serine or a composition comprising serine in said non-human organism or in the culture medium surrounding said non-human organism.

[17867] A further embodiment of the present invention relates to a process for the production of tyrosine, which comprises
[17868] (a) increasing or generating one or more activities selected from the group consisting of transcriptional regulator in an organelle, preferably in plastids or mitochondria, especially in plastids, of a non-human organism or a part thereof, preferably a microorganism, a plant cell, a plant or a part thereof, as compared to a corresponding non-transformed wild type non-human organism or a part thereof; and
[17869] (b) growing the non-human organism or a part thereof under conditions which permit the production of tyrosine or a composition comprising tyrosine in said non-human organism or in the culture medium surrounding said non-human organism.

[17870] A further embodiment of the present invention relates to a process for the production of 5-oxoproline, which comprises
[17871] (a) increasing or generating one or more activities selected from the group consisting of transcriptional regulator in an organelle, preferably in plastids or mitochondria, especially in plastids, of a non-human organism or a part thereof, preferably a microorganism, a plant cell, a plant or a part thereof, as compared to a corresponding non-transformed wild type non-human organism or a part thereof; and
[17872] (b) growing the non-human organism or a part thereof under conditions which permit the production of 5-oxoproline or a composition comprising 5-oxoproline in said non-human organism or in the culture medium surrounding said non-human organism.

[17873] A further embodiment of the present invention relates to a process for the production of glycine, which comprises
[17874] (a) increasing or generating one or more activities selected from the group consisting of protein phosphatase in an organelle, preferably in plastids or mitochondria, especially in plastids, of a non-human organism or a part thereof, preferably a microorganism, a plant cell, a plant or a part thereof, as compared to a corresponding non-transformed wild type non-human organism or a part thereof; and
[17875] (b) growing the non-human organism or a part thereof under conditions which permit the production of glycine or a composition comprising glycine in said non-human organism or in the culture medium surrounding said non-human organism.

[17876] A further embodiment of the present invention relates to a process for the production of phenylalanine, which comprises
[17877] (a) increasing or generating one or more activities selected from the group consisting of protein kinase in an organelle, preferably in plastids or mitochondria, especially in plastids, of a non-human organism or a part thereof, preferably a microorganism, a plant cell, a plant or a part thereof, as compared to a corresponding non-transformed wild type non-human organism or a part thereof; and
[17878] (b) growing the non-human organism or a part thereof under conditions which permit the production of phenylalanine or a composition comprising phenylalanine in said non-human organism or in the culture medium surrounding said non-human organism.

[17879] A further embodiment of the present invention relates to a process for the production of serine, which comprises
[17880] (a) increasing or generating one or more activities selected from the group consisting of protein kinase in an organelle, preferably in plastids or mitochondria, especially in plastids, of a non-human organism or a part thereof, preferably a microorganism, a plant cell, a plant or a part thereof, as compared to a corresponding non-transformed wild type non-human organism or a part thereof; and
[17881] (b) growing the non-human organism or a part thereof under conditions which permit the production of serine or a composition comprising serine in said non-human organism or in the culture medium surrounding said non-human organism.

[17882] A further embodiment of the present invention relates to a process for the production of tyrosine, which comprises
[17883] (a) increasing or generating one or more activities selected from the group consisting of protein kinase in an organelle, preferably in plastids or mitochondria, especially in plastids, of a non-human organism or a part thereof, preferably a microorganism, a plant cell, a plant or a part thereof, as compared to a corresponding non-transformed wild type non-human organism or a part thereof; and
[17884] (b) growing the non-human organism or a part thereof under conditions which permit the production of tyrosine or a composition comprising tyrosine in said non-human organism or in the culture medium surrounding said non-human organism.

[17885] A further embodiment of the present invention relates to a process for the production of aspartate, which comprises
[17886] (a) increasing or generating one or more activities selected from the group consisting of calcium-dependent protein kinase in an organelle, preferably in plastids or mitochondria, especially in plastids, of a non-human organism or a part thereof, preferably a microorganism, a plant cell, a plant or a part thereof, as compared to a corresponding non-transformed wild type non-human organism or a part thereof; and
[17887] (b) growing the non-human organism or a part thereof under conditions which permit the production of aspartate or a composition comprising aspartate in said non-human organism or in the culture medium surrounding said non-human organism.

[17888] A further embodiment of the present invention relates to a process for the production of phenylalanine, which comprises
[17889] (a) increasing or generating one or more activities selected from the group consisting of calcium-dependent protein kinase in an organelle, preferably in plastids or mitochondria, especially in plastids, of a non-human organism or a part thereof, preferably a microorganism, a plant cell, a plant or a part thereof, as compared to a corresponding non-transformed wild type non-human organism or a part thereof; and
[17890] (b) growing the non-human organism or a part thereof under conditions which permit the production of phenylalanine or a composition comprising phenylalanine in said non-human organism or in the culture medium surrounding said non-human organism.

[17891] A further embodiment of the present invention relates to a process for the production of alanine, which comprises
[17892] (a) increasing or generating one or more activities selected from the group consisting of protein phosphatase in an organelle, preferably in plastids or mitochondria, especially in plastids, of a non-human organism or a part thereof, preferably a microorganism, a plant cell, a plant or a part thereof, as compared to a corresponding non-transformed wild type non-human organism or a part thereof; and
[17893] (b) growing the non-human organism or a part thereof under conditions which permit the production of alanine or a composition comprising alanine in said non-human organism or in the culture medium surrounding said non-human organism.

[17894] A further embodiment of the present invention relates to a process for the production of glycine, which comprises
[17895] (a) increasing or generating one or more activities selected from the group consisting of protein phosphatase in an organelle, preferably in plastids or mitochondria, especially in plastids, of a non-human organism or a part thereof, preferably a microorganism, a plant cell, a plant or a part thereof, as compared to a corresponding non-transformed wild type non-human organism or a part thereof; and
[17896] (b) growing the non-human organism or a part thereof under conditions which permit the production of glycine or a composition comprising glycine in said non-human organism or in the culture medium surrounding said non-human organism.

[17897] A further embodiment of the present invention relates to a process for the production of tyrosine, which comprises
[17898] (a) increasing or generating one or more activities selected from the group consisting of protein phosphatase in an organelle, preferably in plastids or mitochondria, especially in plastids, of a non-human organism or a part thereof, preferably a microorganism, a plant cell, a plant or a part thereof, as compared to a corresponding non-transformed wild type non-human organism or a part thereof; and
[17899] (b) growing the non-human organism or a part thereof under conditions which permit the production of tyrosine or a composition comprising tyrosine in said non-human organism or in the culture medium surrounding said non-human organism.

[17900] A further embodiment of the present invention relates to a process for the production of 5-oxoproline, which comprises
[17901] (a) increasing or generating one or more activities selected from the group consisting of protein phosphatase in an organelle, preferably in plastids or mitochondria, especially in plastids, of a non-human organism or a part thereof, preferably a microorganism, a plant cell, a plant or a part thereof, as compared to a corresponding non-transformed wild type non-human organism or a part thereof; and
[17902] (b) growing the non-human organism or a part thereof under conditions which permit the production of 5-oxoproline or a composition comprising 5-oxoproline in said non-human organism or in the culture medium surrounding said non-human organism.

[17903] A further embodiment of the present invention relates to a process for the production of alanine, which comprises
[17904] (a) increasing or generating one or more activities selected from the group consisting of aminotransferase in an organelle, preferably in plastids or mitochondria, especially in plastids, of a non-human organism or a part thereof, preferably a microorganism, a plant cell, a plant or a part thereof, as compared to a corresponding non-transformed wild type non-human organism or a part thereof; and
[17905] (b) growing the non-human organism or a part thereof under conditions which permit the production of alanine or a composition comprising alanine in said non-human organism or in the culture medium surrounding said non-human organism.

[17906] A further embodiment of the present invention relates to a process for the production of phenylalanine, which comprises
[17907] (a) increasing or generating one or more activities selected from the group consisting of transcription factor in an organelle, preferably in plastids or mitochondria, especially in plastids, of a non-human organism or a part thereof, preferably a microorganism, a plant cell, a plant or a part thereof, as compared to a corresponding non-transformed wild type non-human organism or a part thereof; and
[17908] (b) growing the non-human organism or a part thereof under conditions which permit the production of phenylalanine or a composition comprising phenylalanine in said non-human organism or in the culture medium surrounding said non-human organism.

[17909] A further embodiment of the present invention relates to a process for the production of tyrosine, which comprises
[17910] (a) increasing or generating one or more activities selected from the group consisting of transcription factor in an organelle, preferably in plastids or mitochondria, especially in plastids, of a non-human organism or a part thereof, preferably a microorganism, a plant cell, a plant or a part thereof, as compared to a corresponding non-transformed wild type non-human organism or a part thereof; and
[17911] (b) growing the non-human organism or a part thereof under conditions which permit the production of tyrosine or a composition comprising tyrosine in said non-human organism or in the culture medium surrounding said non-human organism.

[17912] A further embodiment of the present invention relates to a process for the production of aspartate, which comprises
[17913] (a) increasing or generating one or more activities selected from the group consisting of protein phosphatase in an organelle, preferably in plastids or mitochondria, especially in plastids, of a non-human organism or a part thereof, preferably a microorganism, a plant cell, a plant or a part thereof, as compared to a corresponding non-transformed wild type non-human organism or a part thereof; and
[17914] (b) growing the non-human organism or a part thereof under conditions which permit the production of aspartate or a composition comprising aspartate in said non-human organism or in the culture medium surrounding said non-human organism.

[17915] A further embodiment of the present invention relates to a process for the production of 5-oxoproline, which comprises
[17916] (a) increasing or generating one or more activities selected from the group consisting of protein phosphatase in an organelle, preferably in plastids or mitochondria, especially in plastids, of a non-human organism or a part thereof, preferably a microorganism, a plant cell, a plant or a part thereof, as compared to a corresponding non-transformed wild type non-human organism or a part thereof; and
[17917] (b) growing the non-human organism or a part thereof under conditions which permit the production of 5-oxoproline or a composition comprising 5-oxoproline in said non-human organism or in the culture medium surrounding said non-human organism.

[17918] A further embodiment of the present invention relates to a process for the production of asparagine, which comprises
[17919] (a) increasing or generating one or more activities selected from the group consisting of protein phosphatase in an organelle, preferably in plastids or mitochondria, especially in plastids, of a non-human organism or a part thereof, preferably a microorganism, a plant cell, a plant or a part thereof, as compared to a corresponding non-transformed wild type non-human organism or a part thereof; and
[17920] (b) growing the non-human organism or a part thereof under conditions which permit the production of asparagine or a composition comprising asparagine in said non-human organism or in the culture medium surrounding said non-human organism.

[17921] A further embodiment of the present invention relates to a process for the production of phenylalanine, which comprises
[17922] (a) increasing or generating one or more activities selected from the group consisting of protein phosphatase in an organelle, preferably in plastids or mitochondria, especially in plastids, of a non-human organism or a part thereof, preferably a microorganism, a plant cell, a plant or a part thereof, as compared to a corresponding non-transformed wild type non-human organism or a part thereof; and
[17923] (b) growing the non-human organism or a part thereof under conditions which permit the production of phenylalanine or a composition comprising phenylalanine in said non-human organism or in the culture medium surrounding said non-human organism.

[17924] A further embodiment of the present invention relates to a process for the production of serine, which comprises
[17925] (a) increasing or generating one or more activities selected from the group consisting of protein phosphatase in an organelle, preferably in plastids or mitochondria, especially in plastids, of a non-human organism or a part thereof, preferably a microorganism, a plant cell, a plant or a part thereof, as compared to a corresponding non-transformed wild type non-human organism or a part thereof; and
[17926] (b) growing the non-human organism or a part thereof under conditions which permit the production of serine or a composition comprising serine in said non-human organism or in the culture medium surrounding said non-human organism.

[17927] A further embodiment of the present invention relates to a process for the production of tyrosine, which comprises
[17928] (a) increasing or generating one or more activities selected from the group consisting of protein phosphatase in an organelle, preferably in plastids or mitochondria, especially in plastids, of a non-human organism or a part thereof, preferably a microorganism, a plant cell, a plant or a part thereof, as compared to a corresponding non-transformed wild type non-human organism or a part thereof; and
[17929] (b) growing the non-human organism or a part thereof under conditions which permit the production of tyrosine or a composition comprising tyrosine in said non-human organism or in the culture medium surrounding said non-human organism.

[17930] A further embodiment of the present invention relates to a process for the production of phenylalanine, which comprises
[17931] (a) increasing or generating one or more activities selected from the group consisting of CBL-interacting protein kinase in an organelle, preferably in plastids or mitochondria, especially in plastids, of a non-human organism or a part thereof, preferably a microorganism, a plant cell, a plant or a part thereof, as compared to a corresponding non-transformed wild type non-human organism or a part thereof; and
[17932] (b) growing the non-human organism or a part thereof under conditions which permit the production of phenylalanine or a composition comprising phenylalanine in said non-human organism or in the culture medium surrounding said non-human organism.

[17933] A further embodiment of the present invention relates to a process for the production of tyrosine, which comprises
[17934] (a) increasing or generating one or more activities selected from the group consisting of CBL-interacting protein kinase in an organelle, preferably in plastids or mitochondria, especially in plastids, of a non-human organism or a part thereof, preferably a microorganism, a plant cell, a plant or a part thereof, as compared to a corresponding non-transformed wild type non-human organism or a part thereof; and
[17935] (b) growing the non-human organism or a part thereof under conditions which permit the production of tyrosine or a composition comprising tyrosine in said non-human organism or in the culture medium surrounding said non-human organism.

[17936] A further embodiment of the present invention relates to a process for the production of 5-oxoproline, which comprises
[17937] (a) increasing or generating one or more activities selected from the group consisting of CBL-interacting protein kinase in an organelle, preferably in plastids or mitochondria, especially in plastids, of a non-human organism or a part thereof, preferably a microorganism, a plant cell, a plant or a part thereof, as compared to a corresponding non-transformed wild type non-human organism or a part thereof; and
[17938] (b) growing the non-human organism or a part thereof under conditions which permit the production of 5-oxoproline or a composition comprising 5-oxoproline in said non-human organism or in the culture medium surrounding said non-human organism.

[17939] A further embodiment of the present invention relates to a process for the production of serine, which comprises
[17940] (a) increasing or generating one or more activities selected from the group consisting of glutaredoxin in an organelle, preferably in plastids or mitochondria, especially in plastids, of a non-human organism or a part thereof, preferably a microorganism, a plant cell, a plant or a part thereof, as compared to a corresponding non-transformed wild type non-human organism or a part thereof; and
[17941] (b) growing the non-human organism or a part thereof under conditions which permit the production of serine or a composition comprising serine in said non-human organism or in the culture medium surrounding said non-human organism.

[17942] A further embodiment of the present invention relates to a process for the production of tyrosine, which comprises
[17943] (a) increasing or generating one or more activities selected from the group consisting of glutaredoxin in an organelle, preferably in plastids or mitochondria, especially in plastids, of a non-human organism or a part thereof, preferably a microorganism, a plant cell, a plant or a part thereof, as compared to a corresponding non-transformed wild type non-human organism or a part thereof; and
[17944] (b) growing the non-human organism or a part thereof under conditions which permit the production of tyrosine or a composition comprising tyrosine in said non-human organism or in the culture medium surrounding said non-human organism.

[17945] A further embodiment of the present invention relates to a process for the production of glycine, which comprises
[17946] (a) increasing or generating one or more activities selected from the group consisting of CBL-interacting protein kinase in an organelle, preferably in plastids or mitochondria, especially in plastids, of a non-human organism or a part thereof, preferably a microorganism, a plant cell, a plant or a part thereof, as compared to a corresponding non-transformed wild type non-human organism or a part thereof; and
[17947] (b) growing the non-human organism or a part thereof under conditions which permit the production of glycine or a composition comprising glycine in said non-human organism or in the culture medium surrounding said non-human organism.

[17948] A further embodiment of the present invention relates to a process for the production of alanine, which comprises
[17949] (a) increasing or generating one or more activities selected from the group consisting of delta-1-pyrroline 5-carboxylase synthetase in an organelle, preferably in plastids or mitochondria, especially in plastids, of a non-human organism or a part thereof, preferably a microorganism, a plant cell, a plant or a part thereof, as compared to a corresponding non-transformed wild type non-human organism or a part thereof; and
[17950] (b) growing the non-human organism or a part thereof under conditions which permit the production of alanine or a composition comprising alanine in said non-human organism or in the culture medium surrounding said non-human organism.

[17951] A further embodiment of the present invention relates to a process for the production of glycine, which comprises
[17952] (a) increasing or generating one or more activities selected from the group consisting of delta-1-pyrroline 5-carboxylase synthetase in an organelle, preferably in plastids or mitochondria, especially in plastids, of a non-human organism or a part thereof, preferably a microorganism, a plant cell, a plant or a part thereof, as compared to a corresponding non-transformed wild type non-human organism or a part thereof; and
[17953] (b) growing the non-human organism or a part thereof under conditions which permit the production of glycine or a composition comprising glycine in said non-human organism or in the culture medium surrounding said non-human organism.

[17954] A further embodiment of the present invention relates to a process for the production of phenylalanine, which comprises
[17955] (a) increasing or generating one or more activities selected from the group consisting of glutaredoxin in an organelle, preferably in plastids or mitochondria, especially in plastids, of a non-human organism or a part thereof, preferably a microorganism, a plant cell, a plant or a part thereof, as compared to a corresponding non-transformed wild type non-human organism or a part thereof; and
[17956] (b) growing the non-human organism or a part thereof under conditions which permit the production of phenylalanine or a composition comprising phenylalanine in said non-human organism or in the culture medium surrounding said non-human organism.

[17957] A further embodiment of the present invention relates to a process for the production of tyrosine, which comprises
[17958] (a) increasing or generating one or more activities selected from the group consisting of glutaredoxin in an organelle, preferably in plastids or mitochondria, especially in plastids, of a non-human organism or a part thereof, preferably a microorganism, a plant cell, a plant or a part thereof, as compared to a corresponding non-transformed wild type non-human organism or a part thereof; and
[17959] (b) growing the non-human organism or a part thereof under conditions which permit the production of tyrosine or a composition comprising tyrosine in said non-human organism or in the culture medium surrounding said non-human organism.

[17960] A further embodiment of the present invention relates to a process for the production of tyrosine, which comprises
[17961] (a) increasing or generating one or more activities selected from the group consisting of heat shock transcription factor in an organelle, preferably in plastids or mitochondria, especially in plastids, of a non-human organism or a part thereof, preferably a microorganism, a plant cell, a plant or a part thereof, as compared to a corresponding non-transformed wild type non-human organism or a part thereof; and
[17962] (b) growing the non-human organism or a part thereof under conditions which permit the production of tyrosine or a composition comprising tyrosine in said non-human organism or in the culture medium surrounding said non-human organism.

[17963] A further embodiment of the present invention relates to a process for the production of alanine, which comprises
[17964] (a) increasing or generating one or more activities selected from the group consisting of pyruvate kinase in an organelle, preferably in plastids or mitochondria, especially in plastids, of a non-human organism or a part thereof, preferably a microorganism, a plant cell, a plant or a part thereof, as compared to a corresponding non-transformed wild type non-human organism or a part thereof; and
[17965] (b) growing the non-human organism or a part thereof under conditions which permit the production of alanine or a composition comprising alanine in said non-human organism or in the culture medium surrounding said non-human organism.

[17966] A further embodiment of the present invention relates to a process for the production of phenylalanine, which comprises
[17967] (a) increasing or generating one or more activities selected from the group consisting of pyruvate kinase in an organelle, preferably in plastids or mitochondria, especially in plastids, of a non-human organism or a part thereof, preferably a microorganism, a plant cell, a plant or a part thereof, as compared to a corresponding non-transformed wild type non-human organism or a part thereof; and
[17968] (b) growing the non-human organism or a part thereof under conditions which permit the production of phenylalanine or a composition comprising phenylalanine in said non-human organism or in the culture medium surrounding said non-human organism.

[17969] A further embodiment of the present invention relates to a process for the production of tyrosine, which comprises
[17970] (a) increasing or generating one or more activities selected from the group consisting of pyruvate kinase in an organelle, preferably in plastids or mitochondria, especially in plastids, of a non-human organism or a part thereof, preferably a microorganism, a plant cell, a plant or a part thereof, as compared to a corresponding non-transformed wild type non-human organism or a part thereof; and
[17971] (b) growing the non-human organism or a part thereof under conditions which permit the production of tyrosine or a composition comprising tyrosine in said non-human organism or in the culture medium surrounding said non-human organism.

[17972] A further embodiment of the present invention relates to a process for the production of phenylalanine, which comprises
[17973] (a) increasing or generating one or more activities selected from the group consisting of ankyrin repeat family protein in an organelle, preferably in plastids or mitochondria, especially in plastids, of a non-human organism or a part thereof, preferably a microorganism, a plant cell, a plant or a part thereof, as compared to a corresponding non-transformed wild type non-human organism or a part thereof; and
[17974] (b) growing the non-human organism or a part thereof under conditions which permit the production of phenylalanine or a composition comprising phenylalanine in said non-human organism or in the culture medium surrounding said non-human organism.

[17975] A further embodiment of the present invention relates to a process for the production of tyrosine, which comprises
[17976] (a) increasing or generating one or more activities selected from the group consisting of protein phosphatase in an organelle, preferably in plastids or mitochondria, especially in plastids, of a non-human organism or a part thereof, preferably a microorganism, a plant cell, a plant or a part thereof, as compared to a corresponding non-transformed wild type non-human organism or a part thereof; and
[17977] (b) growing the non-human organism or a part thereof under conditions which permit the production of tyrosine or a composition comprising tyrosine in said non-human organism or in the culture medium surrounding said non-human organism.

[17978] A further embodiment of the present invention relates to a process for the production of aspartate, which comprises
[17979] (a) increasing or generating one or more activities selected from the group consisting of thioredoxin family protein in an organelle, preferably in plastids or mitochondria, especially in plastids, of a non-human organism or a part thereof, preferably a microorganism, a plant cell, a plant or a part thereof, as compared to a corresponding non-transformed wild type non-human organism or a part thereof; and
[17980] (b) growing the non-human organism or a part thereof under conditions which permit the production of aspartate or a composition comprising aspartate in said non-human organism or in the culture medium surrounding said non-human organism.

[17981] A further embodiment of the present invention relates to a process for the production of phenylalanine, which comprises
[17982] (a) increasing or generating one or more activities selected from the group consisting of thioredoxin family protein in an organelle, preferably in plastids or mitochondria, especially in plastids, of a non-human organism or a part thereof, preferably a microorganism, a plant cell, a plant or a part thereof, as compared to a corresponding non-transformed wild type non-human organism or a part thereof; and
[17983] (b) growing the non-human organism or a part thereof under conditions which permit the production of phenylalanine or a composition comprising phenylalanine in said non-human organism or in the culture medium surrounding said non-human organism.

[17984] A further embodiment of the present invention relates to a process for the production of tyrosine, which comprises
[17985] (a) increasing or generating one or more activities selected from the group consisting of thioredoxin family protein in an organelle, preferably in plastids or mitochondria, especially in plastids, of a non-human organism or a part thereof, preferably a microorganism, a plant cell, a plant or a part thereof, as compared to a corresponding non-transformed wild type non-human organism or a part thereof; and
[17986] (b) growing the non-human organism or a part thereof under conditions which permit the production of tyrosine or a composition comprising tyrosine in said non-human organism or in the culture medium surrounding said non-human organism.

[17987] A further embodiment of the present invention relates to a process for the production of phenylalanine, which comprises
[17988] (a) increasing or generating one or more activities selected from the group consisting of harpin-induced family protein in an organelle, preferably in plastids or mitochondria, especially in plastids, of a non-human organism or a part thereof, preferably a microorganism, a plant cell, a plant or a part thereof, as compared to a corresponding non-transformed wild type non-human organism or a part thereof; and
[17989] (b) growing the non-human organism or a part thereof under conditions which permit the production of phenylalanine or a composition comprising phenylalanine in said non-human organism or in the culture medium surrounding said non-human organism.

[17990] A further embodiment of the present invention relates to a process for the production of serine, which comprises
[17991] (a) increasing or generating one or more activities selected from the group consisting of harpin-induced family protein in an organelle, preferably in plastids or mitochondria, especially in plastids, of a non-human organism or a part thereof, preferably a microorganism, a plant cell, a plant or a part thereof, as compared to a corresponding non-transformed wild type non-human organism or a part thereof; and
[17992] (b) growing the non-human organism or a part thereof under conditions which permit the production of serine or a composition comprising serine in said non-human organism or in the culture medium surrounding said non-human organism.

[17993] A further embodiment of the present invention relates to a process for the production of tyrosine, which comprises
[17994] (a) increasing or generating one or more activities selected from the group consisting of harpin-induced family protein in an organelle, preferably in plastids or mitochondria, especially in plastids, of a non-human organism or a part thereof, preferably a microorganism, a plant cell, a plant or a part thereof, as compared to a corresponding non-transformed wild type non-human organism or a part thereof; and
[17995] (b) growing the non-human organism or a part thereof under conditions which permit the production of tyrosine or a composition comprising tyrosine in said non-human organism or in the culture medium surrounding said non-human organism.

[17996] A further embodiment of the present invention relates to a process for the production of phenylalanine, which comprises
[17997] (a) increasing or generating one or more activities selected from the group consisting of DNA mismatch repair protein in an organelle, preferably in plastids or mitochondria, especially in plastids, of a non-human organism or a part thereof, preferably a microorganism, a plant cell, a plant or a part thereof, as compared to a corresponding non-transformed wild type non-human organism or a part thereof; and
[17998] (b) growing the non-human organism or a part thereof under conditions which permit the production of phenylalanine or a composition comprising phenylalanine in said non-human organism or in the culture medium surrounding said non-human organism.

[17999] A further embodiment of the present invention relates to a process for the production of phenylalanine, which comprises
[18000] (a) increasing or generating one or more activities selected from the group consisting of protein kinase in an organelle, preferably in plastids or mitochondria, especially in plastids, of a non-human organism or a part thereof, preferably a microorganism, a plant cell, a plant or a part thereof, as compared to a corresponding non-transformed wild type non-human organism or a part thereof; and
[18001] (b) growing the non-human organism or a part thereof under conditions which permit the production of phenylalanine or a composition comprising phenylalanine in said non-human organism or in the culture medium surrounding said non-human organism.

[18002] A further embodiment of the present invention relates to a process for the production of serine, which comprises
[18003] (a) increasing or generating one or more activities selected from the group consisting of protein kinase in an organelle, preferably in plastids or mitochondria, especially in plastids, of a non-human organism or a part thereof, preferably a microorganism, a plant cell, a plant or a part thereof, as compared to a corresponding non-transformed wild type non-human organism or a part thereof; and
[18004] (b) growing the non-human organism or a part thereof under conditions which permit the production of serine or a composition comprising serine in said non-human organism or in the culture medium surrounding said non-human organism.

[18005] A further embodiment of the present invention relates to a process for the production of tyrosine, which comprises
[18006] (a) increasing or generating one or more activities selected from the group consisting of protein kinase in an organelle, preferably in plastids or mitochondria, especially in plastids, of a non-human organism or a part thereof, preferably a microorganism, a plant cell, a plant or a part thereof, as compared to a corresponding non-transformed wild type non-human organism or a part thereof; and
[18007] (b) growing the non-human organism or a part thereof under conditions which permit the production of tyrosine or a composition comprising tyrosine in said non-human organism or in the culture medium surrounding said non-human organism.

[18008] A further embodiment of the present invention relates to a process for the production of 5-oxoproline, which comprises
[18009] (a) increasing or generating one or more activities selected from the group consisting of protein kinase in an organelle, preferably in plastids or mitochondria, especially in plastids, of a non-human organism or a part thereof, preferably a microorganism, a plant cell, a plant or a part thereof, as compared to a corresponding non-transformed wild type non-human organism or a part thereof; and
[18010] (b) growing the non-human organism or a part thereof under conditions which permit the production of 5-oxoproline or a composition comprising 5-oxoproline in said non-human organism or in the culture medium surrounding said non-human organism.

[18011] A further embodiment of the present invention relates to a process for the production of serine, which comprises
[18012] (a) increasing or generating one or more activities selected from the group consisting of eukaryotic translation initiation factor in an organelle, preferably in plastids or mitochondria, especially in plastids, of a non-human organism or a part thereof, preferably a microorganism, a plant cell, a plant or a part thereof, as compared to a corresponding non-transformed wild type non-human organism or a part thereof; and
[18013] (b) growing the non-human organism or a part thereof under conditions which permit the production of serine or a composition comprising serine in said non-human organism or in the culture medium surrounding said non-human organism.

[18014] A further embodiment of the present invention relates to a process for the production of tyrosine, which comprises
[18015] (a) increasing or generating one or more activities selected from the group consisting of glucose-6-phosphate 1-dehydrogenase in an organelle, preferably in plastids or mitochondria, especially in plastids, of a non-human organism or a part thereof, preferably a microorganism, a plant cell, a plant or a part thereof, as compared to a corresponding non-transformed wild type non-human organism or a part thereof; and
[18016] (b) growing the non-human organism or a part thereof under conditions which permit the production of tyrosine or a composition comprising tyrosine in said non-human organism or in the culture medium surrounding said non-human organism.

[18017] A further embodiment of the present invention relates to a process for the production of phenylalanine, which comprises
[18018] (a) increasing or generating one or more activities selected from the group consisting of glycosyl transferase in an organelle, preferably in plastids or mitochondria, especially in plastids, of a non-human organism or a part thereof, preferably a microorganism, a plant cell, a plant or a part thereof, as compared to a corresponding non-transformed wild type non-human organism or a part thereof; and
[18019] (b) growing the non-human organism or a part thereof under conditions which permit the production of phenylalanine or a composition comprising phenylalanine in said non-human organism or in the culture medium surrounding said non-human organism.

[18020] A further embodiment of the present invention relates to a process for the production of tyrosine, which comprises
[18021] (a) increasing or generating one or more activities selected from the group consisting of glycosyl transferase in an organelle, preferably in plastids or mitochondria, especially in plastids, of a non-human organism or a part thereof, preferably a microorganism, a plant cell, a plant or a part thereof, as compared to a corresponding non-transformed wild type non-human organism or a part thereof; and
[18022] (b) growing the non-human organism or a part thereof under conditions which permit the production of tyrosine or a composition comprising tyrosine in said non-human organism or in the culture medium surrounding said non-human organism.

[18023] A further embodiment of the present invention relates to a process for the production of phenylalanine, which comprises
[18024] (a) increasing or generating one or more activities selected from the group consisting of auxin response factor in an organelle, preferably in plastids or mitochondria, especially in plastids, of a non-human organism or a part thereof, preferably a microorganism, a plant cell, a plant or a part thereof, as compared to a corresponding non-transformed wild type non-human organism or a part thereof; and
[18025] (b) growing the non-human organism or a part thereof under conditions which permit the production of phenylalanine or a composition comprising phenylalanine in said non-human organism or in the culture medium surrounding said non-human organism.

[18026] A further embodiment of the present invention relates to a process for the production of tyrosine, which comprises
[18027] (a) increasing or generating one or more activities selected from the group consisting of auxin response factor in an organelle, preferably in plastids or mitochondria, especially in plastids, of a non-human organism or a part thereof, preferably a microorganism, a plant cell, a plant or a part thereof, as compared to a corresponding non-transformed wild type non-human organism or a part thereof; and
[18028] (b) growing the non-human organism or a part thereof under conditions which permit the production of tyrosine or a composition comprising tyrosine in said non-human organism or in the culture medium surrounding said non-human organism.

[18029] A further embodiment of the present invention relates to a process for the production of aspartate, which comprises
[18030] (a) increasing or generating one or more activities selected from the group consisting of monthiol glutaredoxin in an organelle, preferably in plastids or mitochondria, especially in plastids, of a non-human organism or a part thereof, preferably a microorganism, a plant cell, a plant or a part thereof, as compared to a corresponding non-transformed wild type non-human organism or a part thereof; and
[18031] (b) growing the non-human organism or a part thereof under conditions which permit the production of aspartate or a composition comprising aspartate in said non-human organism or in the culture medium surrounding said non-human organism.

[18032] A further embodiment of the present invention relates to a process for the production of phenylalanine, which comprises
[18033] (a) increasing or generating one or more activities selected from the group consisting of monthiol glutaredoxin in an organelle, preferably in plastids or mitochondria, especially in plastids, of a non-human organism or a part thereof, preferably a microorganism, a plant cell, a plant or a part thereof, as compared to a corresponding non-transformed wild type non-human organism or a part thereof; and
[18034] (b) growing the non-human organism or a part thereof under conditions which permit the production of phenylalanine or a composition comprising phenylalanine in said non-human organism or in the culture medium surrounding said non-human organism.

[18035] A further embodiment of the present invention relates to a process for the production of phenylalanine, which comprises
[18036] (a) increasing or generating one or more activities selected from the group consisting of glutaredoxin in an organelle, preferably in plastids or mitochondria, especially in plastids, of a non-human organism or a part thereof, preferably a microorganism, a plant cell, a plant or a part thereof, as compared to a corresponding non-transformed wild type non-human organism or a part thereof; and
[18037] (b) growing the non-human organism or a part thereof under conditions which permit the production of phenylalanine or a composition comprising phenylalanine in said non-human organism or in the culture medium surrounding said non-human organism.

[18038] A further embodiment of the present invention relates to a process for the production of tyrosine, which comprises
[18039] (a) increasing or generating one or more activities selected from the group consisting of glutaredoxin in an organelle, preferably in plastids or mitochondria, especially in plastids, of a non-human organism or a part thereof, preferably a microorganism, a plant cell, a plant or a part thereof, as compared to a corresponding non-transformed wild type non-human organism or a part thereof; and
[18040] (b) growing the non-human organism or a part thereof under conditions which permit the production of tyrosine or a composition comprising tyrosine in said non-human organism or in the culture medium surrounding said non-human organism.

[18041] A further embodiment of the present invention relates to a process for the production of 5-oxoproline, which comprises
[18042] (a) increasing or generating one or more activities selected from the group consisting of glutaredoxin in an organelle, preferably in plastids or mitochondria, especially in plastids, of a non-human organism or a part thereof, preferably a microorganism, a plant cell, a plant or a part thereof, as compared to a corresponding non-transformed wild type non-human organism or a part thereof; and
[18043] (b) growing the non-human organism or a part thereof under conditions which permit the production of 5-oxoproline or a composition comprising 5-oxoproline in said non-human organism or in the culture medium surrounding said non-human organism.

[18044] A further embodiment of the present invention relates to a process for the production of phenylalanine, which comprises
[18045] (a) increasing or generating one or more activities selected from the group consisting of monothiol glutaredoxin in an organelle, preferably in plastids or mitochondria, especially in plastids, of a non-human organism or a part thereof, preferably a microorganism, a plant cell, a plant or a part thereof, as compared to a corresponding non-transformed wild type non-human organism or a part thereof; and
[18046] (b) growing the non-human organism or a part thereof under conditions which permit the production of phenylalanine or a composition comprising phenylalanine in said non-human organism or in the culture medium surrounding said non-human organism.

[18047] A further embodiment of the present invention relates to a process for the production of tyrosine, which comprises
[18048] (a) increasing or generating one or more activities selected from the group consisting of monothiol glutaredoxin in an organelle, preferably in plastids or mitochondria, especially in plastids, of a non-human organism or a part thereof, preferably a microorganism, a plant cell, a plant or a part thereof, as compared to a corresponding non-transformed wild type non-human organism or a part thereof; and
[18049] (b) growing the non-human organism or a part thereof under conditions which permit the production of tyrosine or a composition comprising tyrosine in said non-human organism or in the culture medium surrounding said non-human organism.

[18050] A further embodiment of the present invention relates to a process for the production of tyrosine, which comprises
[18051] (a) increasing or generating one or more activities selected from the group consisting of monothiol glutaredoxin in an organelle, preferably in plastids or mitochondria, especially in plastids, of a non-human organism or a part thereof, preferably a microorganism, a plant cell, a plant or a part thereof, as compared to a corresponding non-transformed wild type non-human organism or a part thereof; and
[18052] (b) growing the non-human organism or a part thereof under conditions which permit the production of tyrosine or a composition comprising tyrosine in said non-human organism or in the culture medium surrounding said non-human organism.

[18053] A further embodiment of the present invention relates to a process for the production of aspartate, which comprises
[18054] (a) increasing or generating one or more activities selected from the group consisting of monothiol glutaredoxin in an organelle, preferably in plastids or mitochondria, especially in plastids, of a non-human organism or a part thereof, preferably a microorganism, a plant cell, a plant or a part thereof, as compared to a corresponding non-transformed wild type non-human organism or a part thereof; and
[18055] (b) growing the non-human organism or a part thereof under conditions which permit the production of aspartate or a composition comprising aspartate in said non-human organism or in the culture medium surrounding said non-human organism.

[18056] A further embodiment of the present invention relates to a process for the production of phenylalanine, which comprises
[18057] (a) increasing or generating one or more activities selected from the group consisting of monothiol glutaredoxin in an organelle, preferably in plastids or mitochondria, especially in plastids, of a non-human organism or a part thereof, preferably a microorganism, a plant cell, a plant or a part thereof, as compared to a corresponding non-transformed wild type non-human organism or a part thereof; and
[18058] (b) growing the non-human organism or a part thereof under conditions which permit the production of phenylalanine or a composition comprising phenylalanine in said non-human organism or in the culture medium surrounding said non-human organism.

[18059] A further embodiment of the present invention relates to a process for the production of tyrosine, which comprises
[18060] (a) increasing or generating one or more activities selected from the group consisting of monothiol glutaredoxin in an organelle, preferably in plastids or mitochondria, especially in plastids, of a non-human organism or a part thereof, preferably a microorganism, a plant cell, a plant or a part thereof, as compared to a corresponding non-transformed wild type non-human organism or a part thereof; and
[18061] (b) growing the non-human organism or a part thereof under conditions which permit the production of tyrosine or a composition comprising tyrosine in said non-human organism or in the culture medium surrounding said non-human organism.

[18062] A further embodiment of the present invention relates to a process for the production of 5-oxoproline, which comprises
[18063] (a) increasing or generating one or more activities selected from the group consisting of monothiol glutaredoxin in an organelle, preferably in plastids or mitochondria, especially in plastids, of a non-human organism or a part thereof, preferably a microorganism, a plant cell, a plant or a part thereof, as compared to a corresponding non-transformed wild type non-human organism or a part thereof; and
[18064] (b) growing the non-human organism or a part thereof under conditions which permit the production of 5-oxoproline or a composition comprising 5-oxoproline in said non-human organism or in the culture medium surrounding said non-human organism.

[18065] A further embodiment of the present invention relates to a process for the production of tyrosine, which comprises
[18066] (a) increasing or generating one or more activities selected from the group consisting of monothiol glutaredoxin in an organelle, preferably in plastids or mitochondria, especially in plastids, of a non-human organism or a part thereof, preferably a microorganism, a plant cell, a plant or a part thereof, as compared to a corresponding non-transformed wild type non-human organism or a part thereof; and
[18067] (b) growing the non-human organism or a part thereof under conditions which permit the production of tyrosine or a composition comprising tyrosine in said non-human organism or in the culture medium surrounding said non-human organism.

[18068] A further embodiment of the present invention relates to a process for the production of serine, which comprises
[18069] (a) increasing or generating one or more activities selected from the group consisting of heat shock transcription factor in an organelle, preferably in plastids or mitochondria, especially in plastids, of a non-human organism or a part thereof, preferably a microorganism, a plant cell, a plant or a part thereof, as compared to a corresponding non-transformed wild type non-human organism or a part thereof; and
[18070] (b) growing the non-human organism or a part thereof under conditions which permit the production of serine or a composition comprising serine in said non-human organism or in the culture medium surrounding said non-human organism.

[18071] A further embodiment of the present invention relates to a process for the production of alanine, which comprises
[18072] (a) increasing or generating one or more activities selected from the group consisting of protein phosphatase in an organelle, preferably in plastids or mitochondria, especially in plastids, of a non-human organism or a part thereof, preferably a microorganism, a plant cell, a plant or a part thereof, as compared to a corresponding non-transformed wild type non-human organism or a part thereof; and
[18073] (b) growing the non-human organism or a part thereof under conditions which permit the production of alanine or a composition comprising alanine in said non-human organism or in the culture medium surrounding said non-human organism.

[18074] A further embodiment of the present invention relates to a process for the production of aspartate, which comprises
[18075] (a) increasing or generating one or more activities selected from the group consisting of protein phosphatase in an organelle, preferably in plastids or mitochondria, especially in plastids, of a non-human organism or a part thereof, preferably a microorganism, a plant cell, a plant or a part thereof, as compared to a corresponding non-transformed wild type non-human organism or a part thereof; and
[18076] (b) growing the non-human organism or a part thereof under conditions which permit the production of aspartate or a composition comprising aspartate in said non-human organism or in the culture medium surrounding said non-human organism.

[18077] A further embodiment of the present invention relates to a process for the production of citrulline, which comprises
[18078] (a) increasing or generating one or more activities selected from the group consisting of protein phosphatase in an organelle, preferably in plastids or mitochondria, especially in plastids, of a non-human organism or a part thereof, preferably a microorganism, a plant cell, a plant or a part thereof, as compared to a corresponding non-transformed wild type non-human organism or a part thereof; and
[18079] (b) growing the non-human organism or a part thereof under conditions which permit the production of citrulline or a composition comprising citrulline in said non-human organism or in the culture medium surrounding said non-human organism.

[18080] A further embodiment of the present invention relates to a process for the production of alanine, which comprises
[18081] (a) increasing or generating one or more activities selected from the group consisting of At4g32480-protein in an organelle, preferably in plastids or mitochondria, especially in plastids, of a non-human organism or a part thereof, preferably a microorganism, a plant cell, a plant or a part thereof, as compared to a corresponding non-transformed wild type non-human organism or a part thereof; and
[18082] (b) growing the non-human organism or a part thereof under conditions which permit the production of alanine or a composition comprising alanine in said non-human organism or in the culture medium surrounding said non-human organism.

[18083] A further embodiment of the present invention relates to a process for the production of asparagine, which comprises
[18084] (a) increasing or generating one or more activities selected from the group consisting of At4g32480-protein in an organelle, preferably in plastids or mitochondria, especially in plastids, of a non-human organism or a part thereof, preferably a microorganism, a plant cell, a plant or a part thereof, as compared to a corresponding non-transformed wild type non-human organism or a part thereof; and
[18085] (b) growing the non-human organism or a part thereof under conditions which permit the production of asparagine or a composition comprising asparagine in said non-human organism or in the culture medium surrounding said non-human organism.

[18086] A further embodiment of the present invention relates to a process for the production of glycine, which comprises
[18087] (a) increasing or generating one or more activities selected from the group consisting of At4g32480-protein in an organelle, preferably in plastids or mitochondria, especially in plastids, of a non-human organism or a part thereof, preferably a microorganism, a plant cell, a plant or a part thereof, as compared to a corresponding non-transformed wild type non-human organism or a part thereof; and
[18088] (b) growing the non-human organism or a part thereof under conditions which permit the production of glycine or a composition comprising glycine in said non-human organism or in the culture medium surrounding said non-human organism.

[18089] A further embodiment of the present invention relates to a process for the production of phenylalanine, which comprises
[18090] (a) increasing or generating one or more activities selected from the group consisting of At4g32480-protein in an organelle, preferably in plastids or mitochondria, especially in plastids, of a non-human organism or a part thereof, preferably a microorganism, a plant cell, a plant or a part thereof, as compared to a corresponding non-transformed wild type non-human organism or a part thereof; and
[18091] (b) growing the non-human organism or a part thereof under conditions which permit the production of phenylalanine or a composition comprising phenylalanine in said non-human organism or in the culture medium surrounding said non-human organism.

[18092] A further embodiment of the present invention relates to a process for the production of serine, which comprises
[18093] (a) increasing or generating one or more activities selected from the group consisting of At4g32480-protein in an organelle, preferably in plastids or mitochondria, especially in plastids, of a non-human organism or a part thereof, preferably a microorganism, a plant cell, a plant or a part thereof, as compared to a corresponding non-transformed wild type non-human organism or a part thereof; and
[18094] (b) growing the non-human organism or a part thereof under conditions which permit the production of serine or a composition comprising serine in said non-human organism or in the culture medium surrounding said non-human organism.

[18095] A further embodiment of the present invention relates to a process for the production of tyrosine, which comprises
[18096] (a) increasing or generating one or more activities selected from the group consisting of At4g32480-protein in an organelle, preferably in plastids or mitochondria, especially in plastids, of a non-human organism or a part thereof, preferably a microorganism, a plant cell, a plant or a part thereof, as compared to a corresponding non-transformed wild type non-human organism or a part thereof; and
[18097] (b) growing the non-human organism or a part thereof under conditions which permit the production of tyrosine or a composition comprising tyrosine in said non-human organism or in the culture medium surrounding said non-human organism.

[18098] A further embodiment of the present invention relates to a process for the production of aspartate, which comprises
[18099] (a) increasing or generating one or more activities selected from the group consisting of glutaredoxin in an organelle, preferably in plastids or mitochondria, especially in plastids, of a non-human organism or a part thereof, preferably a microorganism, a plant cell, a plant or a part thereof, as compared to a corresponding non-transformed wild type non-human organism or a part thereof; and
[18100] (b) growing the non-human organism or a part thereof under conditions which permit the production of aspartate or a composition comprising aspartate in said non-human organism or in the culture medium surrounding said non-human organism.

[18101] A further embodiment of the present invention relates to a process for the production of citrulline, which comprises
[18102] (a) increasing or generating one or more activities selected from the group consisting of glutaredoxin in an organelle, preferably in plastids or mitochondria, especially in plastids, of a non-human organism or a part thereof, preferably a microorganism, a plant cell, a plant or a part thereof, as compared to a corresponding non-transformed wild type non-human organism or a part thereof; and
[18103] (b) growing the non-human organism or a part thereof under conditions which permit the production of citrulline or a composition comprising citrulline in said non-human organism or in the culture medium surrounding said non-human organism.

[18104] A further embodiment of the present invention relates to a process for the production of phenylalanine, which comprises
[18105] (a) increasing or generating one or more activities selected from the group consisting of cyclin D in an organelle, preferably in plastids or mitochondria, especially in plastids, of a non-human organism or a part thereof, preferably a microorganism, a plant cell, a plant or a part thereof, as compared to a corresponding non-transformed wild type non-human organism or a part thereof; and
[18106] (b) growing the non-human organism or a part thereof under conditions which permit the production of phenylalanine or a composition comprising phenylalanine in said non-human organism or in the culture medium surrounding said non-human organism.

[18107] A further embodiment of the present invention relates to a process for the production of asparagine, which comprises
[18108] (a) increasing or generating one or more activities selected from the group consisting of calcium-dependent protein kinase in an organelle, preferably in plastids or mitochondria, especially in plastids, of a non-human organism or a part thereof, preferably a microorganism, a plant cell, a plant or a part thereof, as compared to a corresponding non-transformed wild type non-human organism or a part thereof; and
[18109] (b) growing the non-human organism or a part thereof under conditions which permit the production of asparagine or a composition comprising asparagine in said non-human organism or in the culture medium surrounding said non-human organism.

[18110] A further embodiment of the present invention relates to a process for the production of phenylalanine, which comprises
[18111] (a) increasing or generating one or more activities selected from the group consisting of calcium-dependent protein kinase in an organelle, preferably in plastids or mitochondria, especially in plastids, of a non-human organism or a part thereof, preferably a microorganism, a plant cell, a plant or a part thereof, as compared to a corresponding non-transformed wild type non-human organism or a part thereof; and
[18112] (b) growing the non-human organism or a part thereof under conditions which permit the production of phenylalanine or a composition comprising phenylalanine in said non-human organism or in the culture medium surrounding said non-human organism.

[18113] A further embodiment of the present invention relates to a process for the production of serine, which comprises
[18114] (a) increasing or generating one or more activities selected from the group consisting of calcium-dependent protein kinase in an organelle, preferably in plastids or mitochondria, especially in plastids, of a non-human organism or a part thereof, preferably a microorganism, a plant cell, a plant or a part thereof, as compared to a corresponding non-transformed wild type non-human organism or a part thereof; and
[18115] (b) growing the non-human organism or a part thereof under conditions which permit the production of serine or a composition comprising serine in said non-human organism or in the culture medium surrounding said non-human organism.

[18116] A further embodiment of the present invention relates to a process for the production of tyrosine, which comprises
[18117] (a) increasing or generating one or more activities selected from the group consisting of calcium-dependent protein kinase in an organelle, preferably in plastids or mitochondria, especially in plastids, of a non-human organism or a part thereof, preferably a microorganism, a plant cell, a plant or a part thereof, as compared to a corresponding non-transformed wild type non-human organism or a part thereof; and
[18118] (b) growing the non-human organism or a part thereof under conditions which permit the production of tyrosine or a composition comprising tyrosine in said non-human organism or in the culture medium surrounding said non-human organism.

[18119] A further embodiment of the present invention relates to a process for the production of 5-oxoproline, which comprises
[18120] (a) increasing or generating one or more activities selected from the group consisting of calcium-dependent protein kinase in an organelle, preferably in plastids or mitochondria, especially in plastids, of a non-human organism or a part thereof, preferably a microorganism, a plant cell, a plant or a part thereof, as compared to a corresponding non-transformed wild type non-human organism or a part thereof; and
[18121] (b) growing the non-human organism or a part thereof under conditions which permit the production of 5-oxoproline or a composition comprising 5-oxoproline in said non-human organism or in the culture medium surrounding said non-human organism.

[18122] A further embodiment of the present invention relates to a process for the production of tyrosine, which comprises
[18123] (a) increasing or generating one or more activities selected from the group consisting of protein phosphatase in an organelle, preferably in plastids or mitochondria, especially in plastids, of a non-human organism or a part thereof, preferably a microorganism, a plant cell, a plant or a part thereof, as compared to a corresponding non-transformed wild type non-human organism or a part thereof; and
[18124] (b) growing the non-human organism or a part thereof under conditions which permit the production of tyrosine or a composition comprising tyrosine in said non-human organism or in the culture medium surrounding said non-human organism.

[18125] A further embodiment of the present invention relates to a process for the production of aspartate, which comprises
[18126] (a) increasing or generating one or more activities selected from the group consisting of heat shock transcription factor in an organelle, preferably in plastids or mitochondria, especially in plastids, of a non-human organism or a part thereof, preferably a microorganism, a plant cell, a plant or a part thereof, as compared to a corresponding non-transformed wild type non-human organism or a part thereof; and
[18127] (b) growing the non-human organism or a part thereof under conditions which permit the production of aspartate or a composition comprising aspartate in said non-human organism or in the culture medium surrounding said non-human organism.

[18128] A further embodiment of the present invention relates to a process for the production of 3,4-dihydroxyphenylalanine (dopa), which comprises
[18129] (a) increasing or generating one or more activities selected from the group consisting of heat shock transcription factor in an organelle, preferably in plastids or mitochondria, especially in plastids, of a non-human organism or a part thereof, preferably a microorganism, a plant cell, a plant or a part thereof, as compared to a corresponding non-transformed wild type non-human organism or a part thereof; and
[18130] (b) growing the non-human organism or a part thereof under conditions which permit the production of 3,4-dihydroxyphenylalanine (dopa) or a composition comprising 3,4-dihydroxyphenylalanine (dopa) in said non-human organism or in the culture medium surrounding said non-human organism.

[18131] A further embodiment of the present invention relates to a process for the production of phenylalanine, which comprises
[18132] (a) increasing or generating one or more activities selected from the group consisting of gibberellin 20-oxidase in an organelle, preferably in plastids or mitochondria, especially in plastids, of a non-human organism or a part thereof, preferably a microorganism, a plant cell, a plant or a part thereof, as compared to a corresponding non-transformed wild type non-human organism or a part thereof; and
[18133] (b) growing the non-human organism or a part thereof under conditions which permit the production of phenylalanine or a composition comprising phenylalanine in said non-human organism or in the culture medium surrounding said non-human organism.

[18134] A further embodiment of the present invention relates to a process for the production of serine, which comprises
[18135] (a) increasing or generating one or more activities selected from the group consisting of gibberellin 20-oxidase in an organelle, preferably in plastids or mitochondria, especially in plastids, of a non-human organism or a part thereof, preferably a microorganism, a plant cell, a plant or a part thereof, as compared to a corresponding non-transformed wild type non-human organism or a part thereof; and
[18136] (b) growing the non-human organism or a part thereof under conditions which permit the production of serine or a composition comprising serine in said non-human organism or in the culture medium surrounding said non-human organism.

[18137] A further embodiment of the present invention relates to a process for the production of serine, which comprises
[18138] (a) increasing or generating one or more activities selected from the group consisting of integral membrane transporter family protein in an organelle, preferably in plastids or mitochondria, especially in plastids, of a non-human organism or a part thereof, preferably a microorganism, a plant cell, a plant or a part thereof, as compared to a corresponding non-transformed wild type non-human organism or a part thereof; and
[18139] (b) growing the non-human organism or a part thereof under conditions which permit the production of serine or a composition comprising serine in said non-human organism or in the culture medium surrounding said non-human organism.

[18140] A further embodiment of the present invention relates to a process for the production of phenylalanine, which comprises
[18141] (a) increasing or generating one or more activities selected from the group consisting of glutaredoxin in an organelle, preferably in plastids or mitochondria, especially in plastids, of a non-human organism or a part thereof, preferably a microorganism, a plant cell, a plant or a part thereof, as compared to a corresponding non-transformed wild type non-human organism or a part thereof; and
[18142] (b) growing the non-human organism or a part thereof under conditions which permit the production of phenylalanine or a composition comprising phenylalanine in said non-human organism or in the culture medium surrounding said non-human organism.

[18143] A further embodiment of the present invention relates to a process for the production of asparagine, which comprises
[18144] (a) increasing or generating one or more activities selected from the group consisting of At5g16650-protein in an organelle, preferably in plastids or mitochondria, especially in plastids, of a non-human organism or a part thereof, preferably a microorganism, a plant cell, a plant or a part thereof, as compared to a corresponding non-transformed wild type non-human organism or a part thereof; and
[18145] (b) growing the non-human organism or a part thereof under conditions which permit the production of asparagine or a composition comprising asparagine in said non-human organism or in the culture medium surrounding said non-human organism.

[18146] A further embodiment of the present invention relates to a process for the production of aspartate, which comprises
[18147] (a) increasing or generating one or more activities selected from the group consisting of At5g16650-protein in an organelle, preferably in plastids or mitochondria, especially in plastids, of a non-human organism or a part thereof, preferably a microorganism, a plant cell, a plant or a part thereof, as compared to a corresponding non-transformed wild type non-human organism or a part thereof; and
[18148] (b) growing the non-human organism or a part thereof under conditions which permit the production of aspartate or a composition comprising aspartate in said non-human organism or in the culture medium surrounding said non-human organism.

[18149] A further embodiment of the present invention relates to a process for the production of serine, which comprises
[18150] (a) increasing or generating one or more activities selected from the group consisting of At5g16650-protein in an organelle, preferably in plastids or mitochondria, especially in plastids, of a non-human organism or a part thereof, preferably a microorganism, a plant cell, a plant or a part thereof, as compared to a corresponding non-transformed wild type non-human organism or a part thereof; and
[18151] (b) growing the non-human organism or a part thereof under conditions which permit the production of serine or a composition comprising serine in said non-human organism or in the culture medium surrounding said non-human organism.

[18152] A further embodiment of the present invention relates to a process for the production of 5-oxoproline, which comprises
[18153] (a) increasing or generating one or more activities selected from the group consisting of At5g16650-protein in an organelle, preferably in plastids or mitochondria, especially in plastids, of a non-human organism or a part thereof, preferably a microorganism, a plant cell, a plant or a part thereof, as compared to a corresponding non-transformed wild type non-human organism or a part thereof; and
[18154] (b) growing the non-human organism or a part thereof under conditions which permit the production of 5-oxoproline or a composition comprising 5-oxoproline in said non-human organism or in the culture medium surrounding said non-human organism.

[18155] A further embodiment of the present invention relates to a process for the production of phenylalanine, which comprises
[18156] (a) increasing or generating one or more activities selected from the group consisting of monothiol glutaredoxin in an organelle, preferably in plastids or mitochondria, especially in plastids, of a non-human organism or a part thereof, preferably a microorganism, a plant cell, a plant or a part thereof, as compared to a corresponding non-transformed wild type non-human organism or a part thereof; and
[18157] (b) growing the non-human organism or a part thereof under conditions which permit the production of phenylalanine or a composition comprising phenylalanine in said non-human organism or in the culture medium surrounding said non-human organism.

[18158] A further embodiment of the present invention relates to a process for the production of tyrosine, which comprises
[18159] (a) increasing or generating one or more activities selected from the group consisting of monothiol glutaredoxin in an organelle, preferably in plastids or mitochondria, especially in plastids, of a non-human organism or a part thereof, preferably a microorganism, a plant cell, a plant or a part thereof, as compared to a corresponding non-transformed wild type non-human organism or a part thereof; and
[18160] (b) growing the non-human organism or a part thereof under conditions which permit the production of tyrosine or a composition comprising tyrosine in said non-human organism or in the culture medium surrounding said non-human organism.

[18161] A further embodiment of the present invention relates to a process for the production of phenylalanine, which comprises
[18162] (a) increasing or generating one or more activities selected from the group consisting of at5g21910-protein in an organelle, preferably in plastids or mitochondria, especially in plastids, of a non-human organism or a part thereof, preferably a microorganism, a plant cell, a plant or a part thereof, as compared to a corresponding non-transformed wild type non-human organism or a part thereof; and
[18163] (b) growing the non-human organism or a part thereof under conditions which permit the production of phenylalanine or a composition comprising phenylalanine in said non-human organism or in the culture medium surrounding said non-human organism.

[18164] A further embodiment of the present invention relates to a process for the production of tyrosine, which comprises
[18165] (a) increasing or generating one or more activities selected from the group consisting of transcription factor in an organelle, preferably in plastids or mitochondria, especially in plastids, of a non-human organism or a part thereof, preferably a microorganism, a plant cell, a plant or a part thereof, as compared to a corresponding non-transformed wild type non-human organism or a part thereof; and
[18166] (b) growing the non-human organism or a part thereof under conditions which permit the production of tyrosine or a composition comprising tyrosine in said non-human organism or in the culture medium surrounding said non-human organism.

[18167] A further embodiment of the present invention relates to a process for the production of serine, which comprises
[18168] (a) increasing or generating one or more activities selected from the group consisting of thioredoxin in an organelle, preferably in plastids or mitochondria, especially in plastids, of a non-human organism or a part thereof, preferably a microorganism, a plant cell, a plant or a part thereof, as compared to a corresponding non-transformed wild type non-human organism or a part thereof; and
[18169] (b) growing the non-human organism or a part thereof under conditions which permit the production of serine or a composition comprising serine in said non-human organism or in the culture medium surrounding said non-human organism.

[18170] A further embodiment of the present invention relates to a process for the production of alanine, which comprises
[18171] (a) increasing or generating one or more activities selected from the group consisting of protein phosphatase in an organelle, preferably in plastids or mitochondria, especially in plastids, of a non-human organism or a part thereof, preferably a microorganism, a plant cell, a plant or a part thereof, as compared to a corresponding non-transformed wild type non-human organism or a part thereof; and
[18172] (b) growing the non-human organism or a part thereof under conditions which permit the production of alanine or a composition comprising alanine in said non-human organism or in the culture medium surrounding said non-human organism.

[18173] A further embodiment of the present invention relates to a process for the production of citrulline, which comprises
[18174] (a) increasing or generating one or more activities selected from the group consisting of protein phosphatase in an organelle, preferably in plastids or mitochondria, especially in plastids, of a non-human organism or a part thereof, preferably a microorganism, a plant cell, a plant or a part thereof, as compared to a corresponding non-transformed wild type non-human organism or a part thereof; and
[18175] (b) growing the non-human organism or a part thereof under conditions which permit the production of citrulline or a composition comprising citrulline in said non-human organism or in the culture medium surrounding said non-human organism.

[18176] A further embodiment of the present invention relates to a process for the production of citrulline, which comprises
[18177] (a) increasing or generating one or more activities selected from the group consisting of protein phosphatase in an organelle, preferably in plastids or mitochondria, especially in plastids, of a non-human organism or a part thereof, preferably a microorganism, a plant cell, a plant or a part thereof, as compared to a corresponding non-transformed wild type non-human organism or a part thereof; and
[18178] (b) growing the non-human organism or a part thereof under conditions which permit the production of citrulline or a composition comprising citrulline in said non-human organism or in the culture medium surrounding said non-human organism.

[18179] A further embodiment of the present invention relates to a process for the production of phenylalanine, which comprises
[18180] (a) increasing or generating one or more activities selected from the group consisting of RNA-binding protein in an organelle, preferably in plastids or mitochondria, especially in plastids, of a non-human organism or a part thereof, preferably a microorganism, a plant cell, a plant or a part thereof, as compared to a corresponding non-transformed wild type non-human organism or a part thereof; and
[18181] (b) growing the non-human organism or a part thereof under conditions which permit the production of phenylalanine or a composition comprising phenylalanine in said non-human organism or in the culture medium surrounding said non-human organism.

[18182] A further embodiment of the present invention relates to a process for the production of tyrosine, which comprises
[18183] (a) increasing or generating one or more activities selected from the group consisting of RNA-binding protein in an organelle, preferably in plastids or mitochondria, especially in plastids, of a non-human organism or a part thereof, preferably a microorganism, a plant cell, a plant or a part thereof, as compared to a corresponding non-transformed wild type non-human organism or a part thereof; and
[18184] (b) growing the non-human organism or a part thereof under conditions which permit the production of tyrosine or a composition comprising tyrosine in said non-human organism or in the culture medium surrounding said non-human organism.

[18185] A further embodiment of the present invention relates to a process for the production of alanine, which comprises
[18186] (a) increasing or generating one or more activities selected from the group consisting of pyruvate kinase in an organelle, preferably in plastids or mitochondria, especially in plastids, of a non-human organism or a part thereof, preferably a microorganism, a plant cell, a plant or a part thereof, as compared to a corresponding non-transformed wild type non-human organism or a part thereof; and
[18187] (b) growing the non-human organism or a part thereof under conditions which permit the production of alanine or a composition comprising alanine in said non-human organism or in the culture medium surrounding said non-human organism.

[18188] A further embodiment of the present invention relates to a process for the production of alanine, which comprises
[18189] (a) increasing or generating one or more activities selected from the group consisting of zinc finger protein in an organelle, preferably in plastids or mitochondria, especially in plastids, of a non-human organism or a part thereof, preferably a microorganism, a plant cell, a plant or a part thereof, as compared to a corresponding non-transformed wild type non-human organism or a part thereof; and
[18190] (b) growing the non-human organism or a part thereof under conditions which permit the production of alanine or a composition comprising alanine in said non-human organism or in the culture medium surrounding said non-human organism.

[18191] A further embodiment of the present invention relates to a process for the production of phenylalanine, which comprises
[18192] (a) increasing or generating one or more activities selected from the group consisting of zinc finger protein in an organelle, preferably in plastids or mitochondria, especially in plastids, of a non-human organism or a part thereof, preferably a microorganism, a plant cell, a plant or a part thereof, as compared to a corresponding non-transformed wild type non-human organism or a part thereof; and
[18193] (b) growing the non-human organism or a part thereof under conditions which permit the production of phenylalanine or a composition comprising phenylalanine in said non-human organism or in the culture medium surrounding said non-human organism.

[18194] A further embodiment of the present invention relates to a process for the production of serine, which comprises
[18195] (a) increasing or generating one or more activities selected from the group consisting of zinc finger protein in an organelle, preferably in plastids or mitochondria, especially in plastids, of a non-human organism or a part thereof, preferably a microorganism, a plant cell, a plant or a part thereof, as compared to a corresponding non-transformed wild type non-human organism or a part thereof; and
[18196] (b) growing the non-human organism or a part thereof under conditions which permit the production of serine or a composition comprising serine in said non-human organism or in the culture medium surrounding said non-human organism.

[18197] A further embodiment of the present invention relates to a process for the production of 5-oxoproline, which comprises
[18198] (a) increasing or generating one or more activities selected from the group consisting of zinc finger protein in an organelle, preferably in plastids or mitochondria, especially in plastids, of a non-human organism or a part thereof, preferably a microorganism, a plant cell, a plant or a part thereof, as compared to a corresponding non-transformed wild type non-human organism or a part thereof; and
[18199] (b) growing the non-human organism or a part thereof under conditions which permit the production of 5-oxoproline or a composition comprising 5-oxoproline in said non-human organism or in the culture medium surrounding said non-human organism.

[18200] A further embodiment of the present invention relates to a process for the production of aspartate, which comprises
[18201] (a) increasing or generating one or more activities selected from the group consisting of CDP-diacylglycerol-serine O-phosphatidyltransferase in an organelle, preferably in plastids or mitochondria, especially in plastids, of a non-human organism or a part thereof, preferably a microorganism, a plant cell, a plant or a part thereof, as compared to a corresponding non-transformed wild type non-human organism or a part thereof; and
[18202] (b) growing the non-human organism or a part thereof under conditions which permit the production of aspartate or a composition comprising aspartate in said non-human organism or in the culture medium surrounding said non-human organism.

[18203] A further embodiment of the present invention relates to a process for the production of 5-oxoproline, which comprises
[18204] (a) increasing or generating one or more activities selected from the group consisting of CDP-diacylglycerol-serine O-phosphatidyltransferase in an organelle, preferably in plastids or mitochondria, especially in plastids, of a non-human organism or a part thereof, preferably a microorganism, a plant cell, a plant or a part thereof, as compared to a corresponding non-transformed wild type non-human organism or a part thereof; and
[18205] (b) growing the non-human organism or a part thereof under conditions which permit the production of 5-oxoproline or a composition comprising 5-oxoproline in said non-human organism or in the culture medium surrounding said non-human organism.

[18206] A further embodiment of the present invention relates to a process for the production of serine, which comprises
[18207] (a) increasing or generating one or more activities selected from the group consisting of Glycine cleavage system T aminomethyltransferase in an organelle, preferably in plastids or mitochondria, especially in plastids, of a non-human organism or a part thereof, preferably a microorganism, a plant cell, a plant or a part thereof, as compared to a corresponding non-transformed wild type non-human organism or a part thereof; and
[18208] (b) growing the non-human organism or a part thereof under conditions which permit the production of serine or a composition comprising serine in said non-human organism or in the culture medium surrounding said non-human organism.

[18209] A further embodiment of the present invention relates to a process for the production of serine, which comprises
[18210] (a) increasing or generating one or more activities selected from the group consisting of transcriptional regulator in an organelle, preferably in plastids or mitochondria, especially in plastids, of a non-human organism or a part thereof, preferably a microorganism, a plant cell, a plant or a part thereof, as compared to a corresponding non-transformed wild type non-human organism or a part thereof; and
[18211] (b) growing the non-human organism or a part thereof under conditions which permit the production of serine or a composition comprising serine in said non-human organism or in the culture medium surrounding said non-human organism.

[18212] A further embodiment of the present invention relates to a process for the production of aspartate, which comprises
[18213] (a) increasing or generating one or more activities selected from the group consisting of adenylylsulfate kinase in an organelle, preferably in plastids or mitochondria, especially in plastids, of a non-human organism or a part thereof, preferably a microorganism, a plant cell, a plant or a part thereof, as compared to a corresponding non-transformed wild type non-human organism or a part thereof; and
[18214] (b) growing the non-human organism or a part thereof under conditions which permit the production of aspartate or a composition comprising aspartate in said non-human organism or in the culture medium surrounding said non-human organism.

[18215] A further embodiment of the present invention relates to a process for the production of alanine, which comprises
[18216] (a) increasing or generating one or more activities selected from the group consisting of malic enzyme in an organelle, preferably in plastids or mitochondria, especially in plastids, of a non-human organism or a part thereof, preferably a microorganism, a plant cell, a plant or a part thereof, as compared to a corresponding non-transformed wild type non-human organism or a part thereof; and
[18217] (b) growing the non-human organism or a part thereof under conditions which permit the production of alanine or a composition comprising alanine in said non-human organism or in the culture medium surrounding said non-human organism.

[18218] A further embodiment of the present invention relates to a process for the production of phenylalanine, which comprises
[18219] (a) increasing or generating one or more activities selected from the group consisting of malic enzyme in an organelle, preferably in plastids or mitochondria, especially in plastids, of a non-human organism or a part thereof, preferably a microorganism, a plant cell, a plant or a part thereof, as compared to a corresponding non-transformed wild type non-human organism or a part thereof; and
[18220] (b) growing the non-human organism or a part thereof under conditions which permit the production of phenylalanine or a composition comprising phenylalanine in said non-human organism or in the culture medium surrounding said non-human organism.

[18221] A further embodiment of the present invention relates to a process for the production of serine, which comprises
[18222] (a) increasing or generating one or more activities selected from the group consisting of malic enzyme in an organelle, preferably in plastids or mitochondria, especially in plastids, of a non-human organism or a part thereof, preferably a microorganism, a plant cell, a plant or a part thereof, as compared to a corresponding non-transformed wild type non-human organism or a part thereof; and
[18223] (b) growing the non-human organism or a part thereof under conditions which permit the production of serine or a composition comprising serine in said non-human organism or in the culture medium surrounding said non-human organism.

[18224] A further embodiment of the present invention relates to a process for the production of alanine, which comprises
[18225] (a) increasing or generating one or more activities selected from the group consisting of sec-independent protein translocase in an organelle, preferably in plastids or mitochondria, especially in plastids, of a non-human organism or a part thereof, preferably a microorganism, a plant cell, a plant or a part thereof, as compared to a corresponding non-transformed wild type non-human organism or a part thereof; and
[18226] (b) growing the non-human organism or a part thereof under conditions which permit the production of alanine or a composition comprising alanine in said non-human organism or in the culture medium surrounding said non-human organism.

[18227] A further embodiment of the present invention relates to a process for the production of alanine, which comprises
[18228] (a) increasing or generating one or more activities selected from the group consisting of pyruvate kinase in an organelle, preferably in plastids or mitochondria, especially in plastids, of a non-human organism or a part thereof, preferably a microorganism, a plant cell, a plant or a part thereof, as compared to a corresponding non-transformed wild type non-human organism or a part thereof; and
[18229] (b) growing the non-human organism or a part thereof under conditions which permit the production of alanine or a composition comprising alanine in said non-human organism or in the culture medium surrounding said non-human organism.

[18230] A further embodiment of the present invention relates to a process for the production of alanine, which comprises
[18231] (a) increasing or generating one or more activities selected from the group consisting of beta-hydroxylase in an organelle, preferably in plastids or mitochondria, especially in plastids, of a non-human organism or a part thereof, preferably a microorganism, a plant cell, a plant or a part thereof, as compared to a corresponding non-transformed wild type non-human organism or a part thereof; and
[18232] (b) growing the non-human organism or a part thereof under conditions which permit the production of alanine or a composition comprising alanine in said non-human organism or in the culture medium surrounding said non-human organism.

[18233] A further embodiment of the present invention relates to a process for the production of aspartate, which comprises
[18234] (a) increasing or generating one or more activities selected from the group consisting of beta-hydroxylase in an organelle, preferably in plastids or mitochondria, especially in plastids, of a non-human organism or a part thereof, preferably a microorganism, a plant cell, a plant or a part thereof, as compared to a corresponding non-transformed wild type non-human organism or a part thereof; and
[18235] (b) growing the non-human organism or a part thereof under conditions which permit the production of aspartate or a composition comprising aspartate in said non-human organism or in the culture medium surrounding said non-human organism.

[18236] A further embodiment of the present invention relates to a process for the production of serine, which comprises
[18237] (a) increasing or generating one or more activities selected from the group consisting of beta-hydroxylase in an organelle, preferably in plastids or mitochondria, especially in plastids, of a non-human organism or a part thereof, preferably a microorganism, a plant cell, a plant or a part thereof, as compared to a corresponding non-transformed wild type non-human organism or a part thereof; and
[18238] (b) growing the non-human organism or a part thereof under conditions which permit the production of serine or a composition comprising serine in said non-human organism or in the culture medium surrounding said non-human organism.

[18239] A further embodiment of the present invention relates to a process for the production of aspartate, which comprises
[18240] (a) increasing or generating one or more activities selected from the group consisting of elongation factor Tu in an organelle, preferably in plastids or mitochondria, especially in plastids, of a non-human organism or a part thereof, preferably a microorganism, a plant cell, a plant or a part thereof, as compared to a corresponding non-transformed wild type non-human organism or a part thereof; and
[18241] (b) growing the non-human organism or a part thereof under conditions which permit the production of aspartate or a composition comprising aspartate in said non-human organism or in the culture medium surrounding said non-human organism.

[18242] A further embodiment of the present invention relates to a process for the production of phenylalanine, which comprises
[18243] (a) increasing or generating one or more activities selected from the group consisting of elongation factor Tu in an organelle, preferably in plastids or mitochondria, especially in plastids, of a non-human organism or a part thereof, preferably a microorganism, a plant cell, a plant or a part thereof, as compared to a corresponding non-transformed wild type non-human organism or a part thereof; and
[18244] (b) growing the non-human organism or a part thereof under conditions which permit the production of phenylalanine or a composition comprising phenylalanine in said non-human organism or in the culture medium surrounding said non-human organism.

[18245] A further embodiment of the present invention relates to a process for the production of serine, which comprises
[18246] (a) increasing or generating one or more activities selected from the group consisting of elongation factor Tu in an organelle, preferably in plastids or mitochondria, especially in plastids, of a non-human organism or a part thereof, preferably a microorganism, a plant cell, a plant or a part thereof, as compared to a corresponding non-transformed wild type non-human organism or a part thereof; and
[18247] (b) growing the non-human organism or a part thereof under conditions which permit the production of serine or a composition comprising serine in said non-human organism or in the culture medium surrounding said non-human organism.

[18248] A further embodiment of the present invention relates to a process for the production of tyrosine, which comprises
[18249] (a) increasing or generating one or more activities selected from the group consisting of elongation factor Tu in an organelle, preferably in plastids or mitochondria, especially in plastids, of a non-human organism or a part thereof, preferably a microorganism, a plant cell, a plant or a part thereof, as compared to a corresponding non-transformed wild type non-human organism or a part thereof; and
[18250] (b) growing the non-human organism or a part thereof under conditions which permit the production of tyrosine or a composition comprising tyrosine in said non-human organism or in the culture medium surrounding said non-human organism.

[18251] A further embodiment of the present invention relates to a process for the production of 5-oxoproline, which comprises
[18252] (a) increasing or generating one or more activities selected from the group consisting of elongation factor Tu in an organelle, preferably in plastids or mitochondria, especially in plastids, of a non-human organism or a part thereof, preferably a microorganism, a plant cell, a plant or a part thereof, as compared to a corresponding non-transformed wild type non-human organism or a part thereof; and
[18253] (b) growing the non-human organism or a part thereof under conditions which permit the production of 5-oxoproline or a composition comprising 5-oxoproline in said non-human organism or in the culture medium surrounding said non-human organism.

[18254] A further embodiment of the present invention relates to a process for the production of tyrosine, which comprises
[18255] (a) increasing or generating one or more activities selected from the group consisting of 30S ribosomal protein S3 in an organelle, preferably in plastids or mitochondria, especially in plastids, of a non-human organism or a part thereof, preferably a microorganism, a plant cell, a plant or a part thereof, as compared to a corresponding non-transformed wild type non-human organism or a part thereof; and
[18256] (b) growing the non-human organism or a part thereof under conditions which permit the production of tyrosine or a composition comprising tyrosine in said non-human organism or in the culture medium surrounding said non-human organism.

[18257] A further embodiment of the present invention relates to a process for the production of asparagine, which comprises
[18258] (a) increasing or generating one or more activities selected from the group consisting of 50S ribosomal protein L14 in an organelle, preferably in plastids or mitochondria, especially in plastids, of a non-human organism or a part thereof, preferably a microorganism, a plant cell, a plant or a part thereof, as compared to a corresponding non-transformed wild type non-human organism or a part thereof; and
[18259] (b) growing the non-human organism or a part thereof under conditions which permit the production of asparagine or a composition comprising asparagine in said non-human organism or in the culture medium surrounding said non-human organism.

[18260] A further embodiment of the present invention relates to a process for the production of tyrosine, which comprises
[18261] (a) increasing or generating one or more activities selected from the group consisting of ABC transporter permease protein in an organelle, preferably in plastids or mitochondria, especially in plastids, of a non-human organism or a part thereof, preferably a microorganism, a plant cell, a plant or a part thereof, as compared to a corresponding non-transformed wild type non-human organism or a part thereof; and
[18262] (b) growing the non-human organism or a part thereof under conditions which permit the production of tyrosine or a composition comprising tyrosine in said non-human organism or in the culture medium surrounding said non-human organism.

[18263] A further embodiment of the present invention relates to a process for the production of aspartate, which comprises
[18264] (a) increasing or generating one or more activities selected from the group consisting of acyl-CoA synthase in an organelle, preferably in plastids or mitochondria, especially in plastids, of a non-human organism or a part thereof, preferably a microorganism, a plant cell, a plant or a part thereof, as compared to a corresponding non-transformed wild type non-human organism or a part thereof; and
[18265] (b) growing the non-human organism or a part thereof under conditions which permit the production of aspartate or a composition comprising aspartate in said non-human organism or in the culture medium surrounding said non-human organism.

[18266] A further embodiment of the present invention relates to a process for the production of tyrosine, which comprises
[18267] (a) increasing or generating one or more activities selected from the group consisting of acyl-CoA synthase in an organelle, preferably in plastids or mitochondria, especially in plastids, of a non-human organism or a part thereof, preferably a microorganism, a plant cell, a plant or a part thereof, as compared to a corresponding non-transformed wild type non-human organism or a part thereof; and
[18268] (b) growing the non-human organism or a part thereof under conditions which permit the production of tyrosine or a composition comprising tyrosine in said non-human organism or in the culture medium surrounding said non-human organism.

[18269] A further embodiment of the present invention relates to a process for the production of 5-oxoproline, which comprises
[18270] (a) increasing or generating one or more activities selected from the group consisting of acyl-CoA synthase in an organelle, preferably in plastids or mitochondria, especially in plastids, of a non-human organism or a part thereof, preferably a microorganism, a plant cell, a plant or a part thereof, as compared to a corresponding non-transformed wild type non-human organism or a part thereof; and
[18271] (b) growing the non-human organism or a part thereof under conditions which permit the production of 5-oxoproline or a composition comprising 5-oxoproline in said non-human organism or in the culture medium surrounding said non-human organism.

[18272] A further embodiment of the present invention relates to a process for the production of aspartate, which comprises
[18273] (a) increasing or generating one or more activities selected from the group consisting of 2-oxoglutarate dehydrogenase E1 subunit in an organelle, preferably in plastids or mitochondria, especially in plastids, of a non-human organism or a part thereof, preferably a microorganism, a plant cell, a plant or a part thereof, as compared to a corresponding non-transformed wild type non-human organism or a part thereof; and
[18274] (b) growing the non-human organism or a part thereof under conditions which permit the production of aspartate or a composition comprising aspartate in said non-human organism or in the culture medium surrounding said non-human organism.

[18275] A further embodiment of the present invention relates to a process for the production of 5-oxoproline, which comprises
[18276] (a) increasing or generating one or more activities selected from the group consisting of 2-oxoglutarate dehydrogenase E1 subunit in an organelle, preferably in plastids or mitochondria, especially in plastids, of a non-human organism or a part thereof, preferably a microorganism, a plant cell, a plant or a part thereof, as compared to a corresponding non-transformed wild type non-human organism or a part thereof; and
[18277] (b) growing the non-human organism or a part thereof under conditions which permit the production of 5-oxoproline or a composition comprising 5-oxoproline in said non-human organism or in the culture medium surrounding said non-human organism.

[18278] A further embodiment of the present invention relates to a process for the production of serine, which comprises
[18279] (a) increasing or generating one or more activities selected from the group consisting of GDP-mannose dehydrogenase in an organelle, preferably in plastids or mitochondria, especially in plastids, of a non-human organism or a part thereof, preferably a microorganism, a plant cell, a plant or a part thereof, as compared to a corresponding non-transformed wild type non-human organism or a part thereof; and
[18280] (b) growing the non-human organism or a part thereof under conditions which permit the production of serine or a composition comprising serine in said non-human organism or in the culture medium surrounding said non-human organism.

[18281] A further embodiment of the present invention relates to a process for the production of serine, which comprises
[18282] (a) increasing or generating one or more activities selected from the group consisting of transcriptional regulator in an organelle, preferably in plastids or mitochondria, especially in plastids, of a non-human organism or a part thereof, preferably a microorganism, a plant cell, a plant or a part thereof, as compared to a corresponding non-transformed wild type non-human organism or a part thereof; and
[18283] (b) growing the non-human organism or a part thereof under conditions which permit the production of serine or a composition comprising serine in said non-human organism or in the culture medium surrounding said non-human organism.

[18284] A further embodiment of the present invention relates to a process for the production of phenylalanine, which comprises
[18285] (a) increasing or generating one or more activities selected from the group consisting of transcriptional regulator in an organelle, preferably in plastids or mitochondria, especially in plastids, of a non-human organism or a part thereof, preferably a microorganism, a plant cell, a plant or a part thereof, as compared to a corresponding non-transformed wild type non-human organism or a part thereof; and
[18286] (b) growing the non-human organism or a part thereof under conditions which permit the production of phenylalanine or a composition comprising phenylalanine in said non-human organism or in the culture medium surrounding said non-human organism.

[18287] A further embodiment of the present invention relates to a process for the production of aspartate, which comprises
[18288] (a) increasing or generating one or more activities selected from the group consisting of oxidoreductase in an organelle, preferably in plastids or mitochondria, especially in plastids, of a non-human organism or a part thereof, preferably a microorganism, a plant cell, a plant or a part thereof, as compared to a corresponding non-transformed wild type non-human organism or a part thereof; and
[18289] (b) growing the non-human organism or a part thereof under conditions which permit the production of aspartate or a composition comprising aspartate in said non-human organism or in the culture medium surrounding said non-human organism.

[18290] A further embodiment of the present invention relates to a process for the production of tyrosine, which comprises
[18291] (a) increasing or generating one or more activities selected from the group consisting of oxidoreductase in an organelle, preferably in plastids or mitochondria, especially in plastids, of a non-human organism or a part thereof, preferably a microorganism, a plant cell, a plant or a part thereof, as compared to a corresponding non-transformed wild type non-human organism or a part thereof; and
[18292] (b) growing the non-human organism or a part thereof under conditions which permit the production of tyrosine or a composition comprising tyrosine in said non-human organism or in the culture medium surrounding said non-human organism.

[18293] A further embodiment of the present invention relates to a process for the production of citrulline, which comprises
[18294] (a) increasing or generating one or more activities selected from the group consisting of lysyl-tRNA synthetase in an organelle, preferably in plastids or mitochondria, especially in plastids, of a non-human organism or a part thereof, preferably a microorganism, a plant cell, a plant or a part thereof, as compared to a corresponding non-transformed wild type non-human organism or a part thereof; and
[18295] (b) growing the non-human organism or a part thereof under conditions which permit the production of citrulline or a composition comprising citrulline in said non-human organism or in the culture medium surrounding said non-human organism.

[18296] A further embodiment of the present invention relates to a process for the production of asparagine, which comprises
[18297] (a) increasing or generating one or more activities selected from the group consisting of ABC transporter component in an organelle, preferably in plastids or mitochondria, especially in plastids, of a non-human organism or a part thereof, preferably a microorganism, a plant cell, a plant or a part thereof, as compared to a corresponding non-transformed wild type non-human organism or a part thereof; and
[18298] (b) growing the non-human organism or a part thereof under conditions which permit the production of asparagine or a composition comprising asparagine in said non-human organism or in the culture medium surrounding said non-human organism.

[18299] A further embodiment of the present invention relates to a process for the production of aspartate, which comprises
[18300] (a) increasing or generating one or more activities selected from the group consisting of glucose-1-phosphate cytidylyltransferase in an organelle, preferably in plastids or mitochondria, especially in plastids, of a non-human organism or a part thereof, preferably a microorganism, a plant cell, a plant or a part thereof, as compared to a corresponding non-transformed wild type non-human organism or a part thereof; and
[18301] (b) growing the non-human organism or a part thereof under conditions which permit the production of aspartate or a composition comprising aspartate in said non-human organism or in the culture medium surrounding said non-human organism.

[18302] A further embodiment of the present invention relates to a process for the production of glycine, which comprises
[18303] (a) increasing or generating one or more activities selected from the group consisting of CDP-glucose-4,6-dehydratase in an organelle, preferably in plastids or mitochondria, especially in plastids, of a non-human organism or a part thereof, preferably a microorganism, a plant cell, a plant or a part thereof, as compared to a corresponding non-transformed wild type non-human organism or a part thereof; and
[18304] (b) growing the non-human organism or a part thereof under conditions which permit the production of glycine or a composition comprising glycine in said non-human organism or in the culture medium surrounding said non-human organism.

[18305] A further embodiment of the present invention relates to a process for the production of phenylalanine, which comprises
[18306] (a) increasing or generating one or more activities selected from the group consisting of enoyl-CoA hydratase in an organelle, preferably in plastids or mitochondria, especially in plastids, of a non-human organism or a part thereof, preferably a microorganism, a plant cell, a plant or a part thereof, as compared to a corresponding non-transformed wild type non-human organism or a part thereof; and
[18307] (b) growing the non-human organism or a part thereof under conditions which permit the production of phenylalanine or a composition comprising phenylalanine in said non-human organism or in the culture medium surrounding said non-human organism.

[18308] A further embodiment of the present invention relates to a process for the production of alanine, which comprises
[18309] (a) increasing or generating one or more activities selected from the group consisting of glutathione peroxidase in an organelle, preferably in plastids or mitochondria, especially in plastids, of a non-human organism or a part thereof, preferably a microorganism, a plant cell, a plant or a part thereof, as compared to a corresponding non-transformed wild type non-human organism or a part thereof; and
[18310] (b) growing the non-human organism or a part thereof under conditions which permit the production of alanine or a composition comprising alanine in said non-human organism or in the culture medium surrounding said non-human organism.

[18311] A further embodiment of the present invention relates to a process for the production of asparagine, which comprises
[18312] (a) increasing or generating one or more activities selected from the group consisting of aminotransferase in an organelle, preferably in plastids or mitochondria, especially in plastids, of a non-human organism or a part thereof, preferably a microorganism, a plant cell, a plant or a part thereof, as compared to a corresponding non-transformed wild type non-human organism or a part thereof; and
[18313] (b) growing the non-human organism or a part thereof under conditions which permit the production of asparagine or a composition comprising asparagine in said non-human organism or in the culture medium surrounding said non-human organism.

[18314] A further embodiment of the present invention relates to a process for the production of phenylalanine, which comprises
[18315] (a) increasing or generating one or more activities selected from the group consisting of aminotransferase in an organelle, preferably in plastids or mitochondria, especially in plastids, of a non-human organism or a part thereof, preferably a microorganism, a plant cell, a plant or a part thereof, as compared to a corresponding non-transformed wild type non-human organism or a part thereof; and
[18316] (b) growing the non-human organism or a part thereof under conditions which permit the production of phenylalanine or a composition comprising phenylalanine in said non-human organism or in the culture medium surrounding said non-human organism.

[18317] A further embodiment of the present invention relates to a process for the production of tyrosine, which comprises
[18318] (a) increasing or generating one or more activities selected from the group consisting of NADH-quinone oxidoreductase subunit in an organelle, preferably in plastids or mitochondria, especially in plastids, of a non-human organism or a part thereof, preferably a microorganism, a plant cell, a plant or a part thereof, as compared to a corresponding non-transformed wild type non-human organism or a part thereof; and
[18319] (b) growing the non-human organism or a part thereof under conditions which permit the production of tyrosine or a composition comprising tyrosine in said non-human organism or in the culture medium surrounding said non-human organism.

[18320] A further embodiment of the present invention relates to a process for the production of phenylalanine, which comprises
[18321] (a) increasing or generating one or more activities selected from the group consisting of glutamate-ammonia-ligase in an organelle, preferably in plastids or mitochondria, especially in plastids, of a non-human organism or a part thereof, preferably a microorganism, a plant cell, a plant or a part thereof, as compared to a corresponding non-transformed wild type non-human organism or a part thereof; and
[18322] (b) growing the non-human organism or a part thereof under conditions which permit the production of phenylalanine or a composition comprising phenylalanine in said non-human organism or in the culture medium surrounding said non-human organism.

[18323] A further embodiment of the present invention relates to a process for the production of tyrosine, which comprises
[18324] (a) increasing or generating one or more activities selected from the group consisting of glutamate-ammonia-ligase in an organelle, preferably in plastids or mitochondria, especially in plastids, of a non-human organism or a part thereof, preferably a microorganism, a plant cell, a plant or a part thereof, as compared to a corresponding non-transformed wild type non-human organism or a part thereof; and
[18325] (b) growing the non-human organism or a part thereof under conditions which permit the production of tyrosine or a composition comprising tyrosine in said non-human organism or in the culture medium surrounding said non-human organism.

[18326] A further embodiment of the present invention relates to a process for the production of 5-oxoproline, which comprises
[18327] (a) increasing or generating one or more activities selected from the group consisting of RNA polymerase sigma factor in an organelle, preferably in plastids or mitochondria, especially in plastids, of a non-human organism or a part thereof, preferably a microorganism, a plant cell, a plant or a part thereof, as compared to a corresponding non-transformed wild type non-human organism or a part thereof; and
[18328] (b) growing the non-human organism or a part thereof under conditions which permit the production of 5-oxoproline or a composition comprising 5-oxoproline in said non-human organism or in the culture medium surrounding said non-human organism.

[18329] A further embodiment of the present invention relates to a process for the production of phenylalanine, which comprises
[18330] (a) increasing or generating one or more activities selected from the group consisting of hydrolase in an organelle, preferably in plastids or mitochondria, especially in plastids, of a non-human organism or a part thereof, preferably a microorganism, a plant cell, a plant or a part thereof, as compared to a corresponding non-transformed wild type non-human organism or a part thereof; and
[18331] (b) growing the non-human organism or a part thereof under conditions which permit the production of phenylalanine or a composition comprising phenylalanine in said non-human organism or in the culture medium surrounding said non-human organism.

[18332] A further embodiment of the present invention relates to a process for the production of tyrosine, which comprises
[18333] (a) increasing or generating one or more activities selected from the group consisting of hydrolase in an organelle, preferably in plastids or mitochondria, especially in plastids, of a non-human organism or a part thereof, preferably a microorganism, a plant cell, a plant or a part thereof, as compared to a corresponding non-transformed wild type non-human organism or a part thereof; and
[18334] (b) growing the non-human organism or a part thereof under conditions which permit the production of tyrosine or a composition comprising tyrosine in said non-human organism or in the culture medium surrounding said non-human organism.

[18335] A further embodiment of the present invention relates to a process for the production of 5-oxoproline, which comprises
[18336] (a) increasing or generating one or more activities selected from the group consisting of hydrolase in an organelle, preferably in plastids or mitochondria, especially in plastids, of a non-human organism or a part thereof, preferably a microorganism, a plant cell, a plant or a part thereof, as compared to a corresponding non-transformed wild type non-human organism or a part thereof; and
[18337] (b) growing the non-human organism or a part thereof under conditions which permit the production of 5-oxoproline or a composition comprising 5-oxoproline in said non-human organism or in the culture medium surrounding said non-human organism.

[18338] A further embodiment of the present invention relates to a process for the production of aspartate, which comprises
[18339] (a) increasing or generating one or more activities selected from the group consisting of glutamate-ammonia-ligase in an organelle, preferably in plastids or mitochondria, especially in plastids, of a non-human organism or a part thereof, preferably a microorganism, a plant cell, a plant or a part thereof, as compared to a corresponding non-transformed wild type non-human organism or a part thereof; and
[18340] (b) growing the non-human organism or a part thereof under conditions which permit the production of aspartate or a composition comprising aspartate in said non-human organism or in the culture medium surrounding said non-human organism.

[18341] A further embodiment of the present invention relates to a process for the production of serine, which comprises
[18342] (a) increasing or generating one or more activities selected from the group consisting of glutamate-ammonia-ligase in an organelle, preferably in plastids or mitochondria, especially in plastids, of a non-human organism or a part thereof, preferably a microorganism, a plant cell, a plant or a part thereof, as compared to a corresponding non-transformed wild type non-human organism or a part thereof; and
[18343] (b) growing the non-human organism or a part thereof under conditions which permit the production of serine or a composition comprising serine in said non-human organism or in the culture medium surrounding said non-human organism.

[18344] A further embodiment of the present invention relates to a process for the production of tyrosine, which comprises
[18345] (a) increasing or generating one or more activities selected from the group consisting of glutamate-ammonia-ligase in an organelle, preferably in plastids or mitochondria, especially in plastids, of a non-human organism or a part thereof, preferably a microorganism, a plant cell, a plant or a part thereof, as compared to a corresponding non-transformed wild type non-human organism or a part thereof; and
[18346] (b) growing the non-human organism or a part thereof under conditions which permit the production of tyrosine or a composition comprising tyrosine in said non-human organism or in the culture medium surrounding said non-human organism.

[18347] A further embodiment of the present invention relates to a process for the production of phenylalanine, which comprises
[18348] (a) increasing or generating one or more activities selected from the group consisting of fumarylacetoacetate hydrolase in an organelle, preferably in plastids or mitochondria, especially in plastids, of a non-human organism or a part thereof, preferably a microorganism, a plant cell, a plant or a part thereof, as compared to a corresponding non-transformed wild type non-human organism or a part thereof; and
[18349] (b) growing the non-human organism or a part thereof under conditions which permit the production of phenylalanine or a composition comprising phenylalanine in said non-human organism or in the culture medium surrounding said non-human organism.

[18350] A further embodiment of the present invention relates to a process for the production of tyrosine, which comprises
[18351] (a) increasing or generating one or more activities selected from the group consisting of fumarylacetoacetate hydrolase in an organelle, preferably in plastids or mitochondria, especially in plastids, of a non-human organism or a part thereof, preferably a microorganism, a plant cell, a plant or a part thereof, as compared to a corresponding non-transformed wild type non-human organism or a part thereof; and
[18352] (b) growing the non-human organism or a part thereof under conditions which permit the production of tyrosine or a composition comprising tyrosine in said non-human organism or in the culture medium surrounding said non-human organism.

[18353] A further embodiment of the present invention relates to a process for the production of serine, which comprises
[18354] (a) increasing or generating one or more activities selected from the group consisting of HesB/YadR/YfhF family protein in an organelle, preferably in plastids or mitochondria, especially in plastids, of a non-human organism or a part thereof, preferably a microorganism, a plant cell, a plant or a part thereof, as compared to a corresponding non-transformed wild type non-human organism or a part thereof; and
[18355] (b) growing the non-human organism or a part thereof under conditions which permit the production of serine or a composition comprising serine in said non-human organism or in the culture medium surrounding said non-human organism.

[18356] A further embodiment of the present invention relates to a process for the production of aspartate, which comprises
[18357] (a) increasing or generating one or more activities selected from the group consisting of peptidase in an organelle, preferably in plastids or mitochondria, especially in plastids, of a non-human organism or a part thereof, preferably a microorganism, a plant cell, a plant or a part thereof, as compared to a corresponding non-transformed wild type non-human organism or a part thereof; and
[18358] (b) growing the non-human organism or a part thereof under conditions which permit the production of aspartate or a composition comprising aspartate in said non-human organism or in the culture medium surrounding said non-human organism.

[18359] A further embodiment of the present invention relates to a process for the production of aspartate, which comprises
[18360] (a) increasing or generating one or more activities selected from the group consisting of L-aspartate oxidase in an organelle, preferably in plastids or mitochondria, especially in plastids, of a non-human organism or a part thereof, preferably a microorganism, a plant cell, a plant or a part thereof, as compared to a corresponding non-transformed wild type non-human organism or a part thereof; and
[18361] (b) growing the non-human organism or a part thereof under conditions which permit the production of aspartate or a composition comprising aspartate in said non-human organism or in the culture medium surrounding said non-human organism.

[18362] A further embodiment of the present invention relates to a process for the production of phenylalanine, which comprises
[18363] (a) increasing or generating one or more activities selected from the group consisting of Chaperone protein CIpB in an organelle, preferably in plastids or mitochondria, especially in plastids, of a non-human organism or a part thereof, preferably a microorganism, a plant cell, a plant or a part thereof, as compared to a corresponding non-transformed wild type non-human organism or a part thereof; and
[18364] (b) growing the non-human organism or a part thereof under conditions which permit the production of phenylalanine or a composition comprising phenylalanine in said non-human organism or in the culture medium surrounding said non-human organism.

[18365] A further embodiment of the present invention relates to a process for the production of phenylalanine, which comprises
[18366] (a) increasing or generating one or more activities selected from the group consisting of electron transfer flavoprotein subunit beta in an organelle, preferably in plastids or mitochondria, especially in plastids, of a non-human organism or a part thereof, preferably a microorganism, a plant cell, a plant or a part thereof, as compared to a corresponding non-transformed wild type non-human organism or a part thereof; and
[18367] (b) growing the non-human organism or a part thereof under conditions which permit the production of phenylalanine or a composition comprising phenylalanine in said non-human organism or in the culture medium surrounding said non-human organism.

[18368] A further embodiment of the present invention relates to a process for the production of tyrosine, which comprises
[18369] (a) increasing or generating one or more activities selected from the group consisting of electron transfer flavoprotein subunit beta in an organelle, preferably in plastids or mitochondria, especially in plastids, of a non-human organism or a part thereof, preferably a microorganism, a plant cell, a plant or a part thereof, as compared to a corresponding non-transformed wild type non-human organism or a part thereof; and
[18370] (b) growing the non-human organism or a part thereof under conditions which permit the production of tyrosine or a composition comprising tyrosine in said non-human organism or in the culture medium surrounding said non-human organism.

[18371] A further embodiment of the present invention relates to a process for the production of citrulline, which comprises
[18372] (a) increasing or generating one or more activities selected from the group consisting of AX653549-protein in an organelle, preferably in plastids or mitochondria, especially in plastids, of a non-human organism or a part thereof, preferably a microorganism, a plant cell, a plant or a part thereof, as compared to a corresponding non-transformed wild type non-human organism or a part thereof; and
[18373] (b) growing the non-human organism or a part thereof under conditions which permit the production of citrulline or a composition comprising citrulline in said non-human organism or in the culture medium surrounding said non-human organism.

[18374] A further embodiment of the present invention relates to a process for the production of 5-oxoproline, which comprises
[18375] (a) increasing or generating one or more activities selected from the group consisting of AX653549-protein in an organelle, preferably in plastids or mitochondria, especially in plastids, of a non-human organism or a part thereof, preferably a microorganism, a plant cell, a plant or a part thereof, as compared to a corresponding non-transformed wild type non-human organism or a part thereof; and
[18376] (b) growing the non-human organism or a part thereof under conditions which permit the production of 5-oxoproline or a composition comprising 5-oxoproline in said non-human organism or in the culture medium surrounding said non-human organism.

[18377] A further embodiment of the present invention relates to a process for the production of aspartate, which comprises
[18378] (a) increasing or generating one or more activities selected from the group consisting of AY087308-protein in an organelle, preferably in plastids or mitochondria, especially in plastids, of a non-human organism or a part thereof, preferably a microorganism, a plant cell, a plant or a part thereof, as compared to a corresponding non-transformed wild type non-human organism or a part thereof; and
[18379] (b) growing the non-human organism or a part thereof under conditions which permit the production of aspartate or a composition comprising aspartate in said non-human organism or in the culture medium surrounding said non-human organism.

[18380] A further embodiment of the present invention relates to a process for the production of 5-oxoproline, which comprises
[18381] (a) increasing or generating one or more activities selected from the group consisting of AY087308-protein in an organelle, preferably in plastids or mitochondria, especially in plastids, of a non-human organism or a part thereof, preferably a microorganism, a plant cell, a plant or a part thereof, as compared to a corresponding non-transformed wild type non-human organism or a part thereof; and
[18382] (b) growing the non-human organism or a part thereof under conditions which permit the production of 5-oxoproline or a composition comprising 5-oxoproline in said non-human organism or in the culture medium surrounding said non-human organism.

[18383] A further embodiment of the present invention relates to a process for the production of alanine, which comprises
[18384] (a) increasing or generating one or more activities selected from the group consisting of threonine synthase in an organelle, preferably in plastids or mitochondria, especially in plastids, of a non-human organism or a part thereof, preferably a microorganism, a plant cell, a plant or a part thereof, as compared to a corresponding non-transformed wild type non-human organism or a part thereof; and
[18385] (b) growing the non-human organism or a part thereof under conditions which permit the production of alanine or a composition comprising alanine in said non-human organism or in the culture medium surrounding said non-human organism.

[18386] A further embodiment of the present invention relates to a process for the production of phenylalanine, which comprises
[18387] (a) increasing or generating one or more activities selected from the group consisting of threonine synthase in an organelle, preferably in plastids or mitochondria, especially in plastids, of a non-human organism or a part thereof, preferably a microorganism, a plant cell, a plant or a part thereof, as compared to a corresponding non-transformed wild type non-human organism or a part thereof; and
[18388] (b) growing the non-human organism or a part thereof under conditions which permit the production of phenylalanine or a composition comprising phenylalanine in said non-human organism or in the culture medium surrounding said non-human organism.

[18389] A further embodiment of the present invention relates to a process for the production of serine, which comprises
[18390] (a) increasing or generating one or more activities selected from the group consisting of threonine synthase in an organelle, preferably in plastids or mitochondria, especially in plastids, of a non-human organism or a part thereof, preferably a microorganism, a plant cell, a plant or a part thereof, as compared to a corresponding non-transformed wild type non-human organism or a part thereof; and
[18391] (b) growing the non-human organism or a part thereof under conditions which permit the production of serine or a composition comprising serine in said non-human organism or in the culture medium surrounding said non-human organism.

[18392] A further embodiment of the present invention relates to a process for the production of tyrosine, which comprises
[18393] (a) increasing or generating one or more activities selected from the group consisting of threonine synthase in an organelle, preferably in plastids or mitochondria, especially in plastids, of a non-human organism or a part thereof, preferably a microorganism, a plant cell, a plant or a part thereof, as compared to a corresponding non-transformed wild type non-human organism or a part thereof; and
[18394] (b) growing the non-human organism or a part thereof under conditions which permit the production of tyrosine or a composition comprising tyrosine in said non-human organism or in the culture medium surrounding said non-human organism.

[18395] A further embodiment of the present invention relates to a process for the production of 5-oxoproline, which comprises
[18396] (a) increasing or generating one or more activities selected from the group consisting of threonine synthase in an organelle, preferably in plastids or mitochondria, especially in plastids, of a non-human organism or a part thereof, preferably a microorganism, a plant cell, a plant or a part thereof, as compared to a corresponding non-transformed wild type non-human organism or a part thereof; and
[18397] (b) growing the non-human organism or a part thereof under conditions which permit the production of 5-oxoproline or a composition comprising 5-oxoproline in said non-human organism or in the culture medium surrounding said non-human organism.

[18398] A further embodiment of the present invention relates to a process for the production of phenylalanine, which comprises
[18399] (a) increasing or generating one or more activities selected from the group consisting of acetolactate synthase small subunit in an organelle, preferably in plastids or mitochondria, especially in plastids, of a non-human organism or a part thereof, preferably a microorganism, a plant cell, a plant or a part thereof, as compared to a corresponding non-transformed wild type non-human organism or a part thereof; and
[18400] (b) growing the non-human organism or a part thereof under conditions which permit the production of phenylalanine or a composition comprising phenylalanine in said non-human organism or in the culture medium surrounding said non-human organism.

[18401] A further embodiment of the present invention relates to a process for the production of glycine, which comprises
[18402] (a) increasing or generating one or more activities selected from the group consisting of glucose dehydrogenase in an organelle, preferably in plastids or mitochondria, especially in plastids, of a non-human organism or a part thereof, preferably a microorganism, a plant cell, a plant or a part thereof, as compared to a corresponding non-transformed wild type non-human organism or a part thereof; and
[18403] (b) growing the non-human organism or a part thereof under conditions which permit the production of glycine or a composition comprising glycine in said non-human organism or in the culture medium surrounding said non-human organism.

[18404] A further embodiment of the present invention relates to a process for the production of phenylalanine, which comprises
[18405] (a) increasing or generating one or more activities selected from the group consisting of glucose dehydrogenase in an organelle, preferably in plastids or mitochondria, especially in plastids, of a non-human organism or a part thereof, preferably a microorganism, a plant cell, a plant or a part thereof, as compared to a corresponding non-transformed wild type non-human organism or a part thereof; and
[18406] (b) growing the non-human organism or a part thereof under conditions which permit the production of phenylalanine or a composition comprising phenylalanine in said non-human organism or in the culture medium surrounding said non-human organism.

[18407] A further embodiment of the present invention relates to a process for the production of serine, which comprises
[18408] (a) increasing or generating one or more activities selected from the group consisting of glucose dehydrogenase in an organelle, preferably in plastids or mitochondria, especially in plastids, of a non-human organism or a part thereof, preferably a microorganism, a plant cell, a plant or a part thereof, as compared to a corresponding non-transformed wild type non-human organism or a part thereof; and
[18409] (b) growing the non-human organism or a part thereof under conditions which permit the production of serine or a composition comprising serine in said non-human organism or in the culture medium surrounding said non-human organism.

[18410] A further embodiment of the present invention relates to a process for the production of tyrosine, which comprises
[18411] (a) increasing or generating one or more activities selected from the group consisting of glucose dehydrogenase in an organelle, preferably in plastids or mitochondria, especially in plastids, of a non-human organism or a part thereof, preferably a microorganism, a plant cell, a plant or a part thereof, as compared to a corresponding non-transformed wild type non-human organism or a part thereof; and
[18412] (b) growing the non-human organism or a part thereof under conditions which permit the production of tyrosine or a composition comprising tyrosine in said non-human organism or in the culture medium surrounding said non-human organism.

[18413] A further embodiment of the present invention relates to a process for the production of asparagine, which comprises
[18414] (a) increasing or generating one or more activities selected from the group consisting of aspartate 1-decarboxylase in an organelle, preferably in plastids or mitochondria, especially in plastids, of a non-human organism or a part thereof, preferably a microorganism, a plant cell, a plant or a part thereof, as compared to a corresponding non-transformed wild type non-human organism or a part thereof; and
[18415] (b) growing the non-human organism or a part thereof under conditions which permit the production of asparagine or a composition comprising asparagine in said non-human organism or in the culture medium surrounding said non-human organism.

[18416] A further embodiment of the present invention relates to a process for the production of serine, which comprises
[18417] (a) increasing or generating one or more activities selected from the group consisting of aspartate 1-decarboxylase in an organelle, preferably in plastids or mitochondria, especially in plastids, of a non-human organism or a part thereof, preferably a microorganism, a plant cell, a plant or a part thereof, as compared to a corresponding non-transformed wild type non-human organism or a part thereof; and
[18418] (b) growing the non-human organism or a part thereof under conditions which permit the production of serine or a composition comprising serine in said non-human organism or in the culture medium surrounding said non-human organism.

[18419] A further embodiment of the present invention relates to a process for the production of alanine, which comprises
[18420] (a) increasing or generating one or more activities selected from the group consisting of serine protease in an organelle, preferably in plastids or mitochondria, especially in plastids, of a non-human organism or a part thereof, preferably a microorganism, a plant cell, a plant or a part thereof, as compared to a corresponding non-transformed wild type non-human organism or a part thereof; and
[18421] (b) growing the non-human organism or a part thereof under conditions which permit the production of alanine or a composition comprising alanine in said non-human organism or in the culture medium surrounding said non-human organism.

[18422] A further embodiment of the present invention relates to a process for the production of serine, which comprises
[18423] (a) increasing or generating one or more activities selected from the group consisting of serine protease in an organelle, preferably in plastids or mitochondria, especially in plastids, of a non-human organism or a part thereof, preferably a microorganism, a plant cell, a plant or a part thereof, as compared to a corresponding non-transformed wild type non-human organism or a part thereof; and
[18424] (b) growing the non-human organism or a part thereof under conditions which permit the production of serine or a composition comprising serine in said non-human organism or in the culture medium surrounding said non-human organism.

[18425] A further embodiment of the present invention relates to a process for the production of tyrosine, which comprises
[18426] (a) increasing or generating one or more activities selected from the group consisting of serine protease in an organelle, preferably in plastids or mitochondria, especially in plastids, of a non-human organism or a part thereof, preferably a microorganism, a plant cell, a plant or a part thereof, as compared to a corresponding non-transformed wild type non-human organism or a part thereof; and
[18427] (b) growing the non-human organism or a part thereof under conditions which permit the production of tyrosine or a composition comprising tyrosine in said non-human organism or in the culture medium surrounding said non-human organism.

[18428] A further embodiment of the present invention relates to a process for the production of serine, which comprises
[18429] (a) increasing or generating one or more activities selected from the group consisting of acyl-CoA dehydrogenase in an organelle, preferably in plastids or mitochondria, especially in plastids, of a non-human organism or a part thereof, preferably a microorganism, a plant cell, a plant or a part thereof, as compared to a corresponding non-transformed wild type non-human organism or a part thereof; and
[18430] (b) growing the non-human organism or a part thereof under conditions which permit the production of serine or a composition comprising serine in said non-human organism or in the culture medium surrounding said non-human organism.

[18431] A further embodiment of the present invention relates to a process for the production of tyrosine, which comprises
[18432] (a) increasing or generating one or more activities selected from the group consisting of acyl-CoA dehydrogenase in an organelle, preferably in plastids or mitochondria, especially in plastids, of a non-human organism or a part thereof, preferably a microorganism, a plant cell, a plant or a part thereof, as compared to a corresponding non-transformed wild type non-human organism or a part thereof; and
[18433] (b) growing the non-human organism or a part thereof under conditions which permit the production of tyrosine or a composition comprising tyrosine in said non-human organism or in the culture medium surrounding said non-human organism.

[18434] A further embodiment of the present invention relates to a process for the production of tyrosine, which comprises
[18435] (a) increasing or generating one or more activities selected from the group consisting of beta-galactosidase in an organelle, preferably in plastids or mitochondria, especially in plastids, of a non-human organism or a part thereof, preferably a microorganism, a plant cell, a plant or a part thereof, as compared to a corresponding non-transformed wild type non-human organism or a part thereof; and
[18436] (b) growing the non-human organism or a part thereof under conditions which permit the production of tyrosine or a composition comprising tyrosine in said non-human organism or in the culture medium surrounding said non-human organism.

[18437] A further embodiment of the present invention relates to a process for the production of 5-oxoproline, which comprises
[18438] (a) increasing or generating one or more activities selected from the group consisting of beta-galactosidase in an organelle, preferably in plastids or mitochondria, especially in plastids, of a non-human organism or a part thereof, preferably a microorganism, a plant cell, a plant or a part thereof, as compared to a corresponding non-transformed wild type non-human organism or a part thereof; and
[18439] (b) growing the non-human organism or a part thereof under conditions which permit the production of 5-oxoproline or a composition comprising 5-oxoproline in said non-human organism or in the culture medium surrounding said non-human organism.

[18440] A further embodiment of the present invention relates to a process for the production of glycine, which comprises
[18441] (a) increasing or generating one or more activities selected from the group consisting of 2,3-dihydroxyphenylpropionate 1,2-dioxygenase in an organelle, preferably in plastids or mitochondria, especially in plastids, of a non-human organism or a part thereof, preferably a microorganism, a plant cell, a plant or a part thereof, as compared to a corresponding non-transformed wild type non-human organism or a part thereof; and
[18442] (b) growing the non-human organism or a part thereof under conditions which permit the production of glycine or a composition comprising glycine in said non-human organism or in the culture medium surrounding said non-human organism.

[18443] A further embodiment of the present invention relates to a process for the production of phenylalanine, which comprises
[18444] (a) increasing or generating one or more activities selected from the group consisting of 2,3-dihydroxyphenylpropionate 1,2-dioxygenase in an organelle, preferably in plastids or mitochondria, especially in plastids, of a non-human organism or a part thereof, preferably a microorganism, a plant cell, a plant or a part thereof, as compared to a corresponding non-transformed wild type non-human organism or a part thereof; and
[18445] (b) growing the non-human organism or a part thereof under conditions which permit the production of phenylalanine or a composition comprising phenylalanine in said non-human organism or in the culture medium surrounding said non-human organism.

[18446] A further embodiment of the present invention relates to a process for the production of serine, which comprises
[18447] (a) increasing or generating one or more activities selected from the group consisting of 2,3-dihydroxyphenylpropionate 1,2-dioxygenase in an organelle, preferably in plastids or mitochondria, especially in plastids, of a non-human organism or a part thereof, preferably a microorganism, a plant cell, a plant or a part thereof, as compared to a corresponding non-transformed wild type non-human organism or a part thereof; and
[18448] (b) growing the non-human organism or a part thereof under conditions which permit the production of serine or a composition comprising serine in said non-human organism or in the culture medium surrounding said non-human organism.

[18449] A further embodiment of the present invention relates to a process for the production of tyrosine, which comprises
[18450] (a) increasing or generating one or more activities selected from the group consisting of 2,3-dihydroxyphenylpropionate 1,2-dioxygenase in an organelle, preferably in plastids or mitochondria, especially in plastids, of a non-human organism or a part thereof, preferably a microorganism, a plant cell, a plant or a part thereof, as compared to a corresponding non-transformed wild type non-human organism or a part thereof; and
[18451] (b) growing the non-human organism or a part thereof under conditions which permit the production of tyrosine or a composition comprising tyrosine in said non-human organism or in the culture medium surrounding said non-human organism.

[18452] A further embodiment of the present invention relates to a process for the production of aspartate, which comprises
[18453] (a) increasing or generating one or more activities selected from the group consisting of b0391-protein in an organelle, preferably in plastids or mitochondria, especially in plastids, of a non-human organism or a part thereof, preferably a microorganism, a plant cell, a plant or a part thereof, as compared to a corresponding non-transformed wild type non-human organism or a part thereof; and
[18454] (b) growing the non-human organism or a part thereof under conditions which permit the production of aspartate or a composition comprising aspartate in said non-human organism or in the culture medium surrounding said non-human organism.

[18455] A further embodiment of the present invention relates to a process for the production of asparagine, which comprises
[18456] (a) increasing or generating one or more activities selected from the group consisting of ATP-binding component of a transport system in an organelle, preferably in plastids or mitochondria, especially in plastids, of a non-human organism or a part thereof, preferably a microorganism, a plant cell, a plant or a part thereof, as compared to a corresponding non-transformed wild type non-human organism or a part thereof; and
[18457] (b) growing the non-human organism or a part thereof under conditions which permit the production of asparagine or a composition comprising asparagine in said non-human organism or in the culture medium surrounding said non-human organism.

[18458] A further embodiment of the present invention relates to a process for the production of aspartate, which comprises
[18459] (a) increasing or generating one or more activities selected from the group consisting of ATP-binding component of a transport system in an organelle, preferably in plastids or mitochondria, especially in plastids, of a non-human organism or a part thereof, preferably a microorganism, a plant cell, a plant or a part thereof, as compared to a corresponding non-transformed wild type non-human organism or a part thereof; and
[18460] (b) growing the non-human organism or a part thereof under conditions which permit the production of aspartate or a composition comprising aspartate in said non-human organism or in the culture medium surrounding said non-human organism.

[18461] A further embodiment of the present invention relates to a process for the production of phenylalanine, which comprises
[18462] (a) increasing or generating one or more activities selected from the group consisting of ATP-binding component of a transport system in an organelle, preferably in plastids or mitochondria, especially in plastids, of a non-human organism or a part thereof, preferably a microorganism, a plant cell, a plant or a part thereof, as compared to a corresponding non-transformed wild type non-human organism or a part thereof; and
[18463] (b) growing the non-human organism or a part thereof under conditions which permit the production of phenylalanine or a composition comprising phenylalanine in said non-human organism or in the culture medium surrounding said non-human organism.

[18464] A further embodiment of the present invention relates to a process for the production of serine, which comprises
[18465] (a) increasing or generating one or more activities selected from the group consisting of ATP-binding component of a transport system in an organelle, preferably in plastids or mitochondria, especially in plastids, of a non-human organism or a part thereof, preferably a microorganism, a plant cell, a plant or a part thereof, as compared to a corresponding non-transformed wild type non-human organism or a part thereof; and
[18466] (b) growing the non-human organism or a part thereof under conditions which permit the production of serine or a composition comprising serine in said non-human organism or in the culture medium surrounding said non-human organism.

[18467] A further embodiment of the present invention relates to a process for the production of tyrosine, which comprises
[18468] (a) increasing or generating one or more activities selected from the group consisting of ATP-binding component of a transport system in an organelle, preferably in plastids or mitochondria, especially in plastids, of a non-human organism or a part thereof, preferably a microorganism, a plant cell, a plant or a part thereof, as compared to a corresponding non-transformed wild type non-human organism or a part thereof; and
[18469] (b) growing the non-human organism or a part thereof under conditions which permit the production of tyrosine or a composition comprising tyrosine in said non-human organism or in the culture medium surrounding said non-human organism.

[18470] A further embodiment of the present invention relates to a process for the production of alanine, which comprises
[18471] (a) increasing or generating one or more activities selected from the group consisting of b0456-protein in an organelle, preferably in plastids or mitochondria, especially in plastids, of a non-human organism or a part thereof, preferably a microorganism, a plant cell, a plant or a part thereof, as compared to a corresponding non-transformed wild type non-human organism or a part thereof; and
[18472] (b) growing the non-human organism or a part thereof under conditions which permit the production of alanine or a composition comprising alanine in said non-human organism or in the culture medium surrounding said non-human organism.

[18473] A further embodiment of the present invention relates to a process for the production of aspartate, which comprises
[18474] (a) increasing or generating one or more activities selected from the group consisting of membrane transport protein in an organelle, preferably in plastids or mitochondria, especially in plastids, of a non-human organism or a part thereof, preferably a microorganism, a plant cell, a plant or a part thereof, as compared to a corresponding non-transformed wild type non-human organism or a part thereof; and
[18475] (b) growing the non-human organism or a part thereof under conditions which permit the production of aspartate or a composition comprising aspartate in said non-human organism or in the culture medium surrounding said non-human organism.

[18476] A further embodiment of the present invention relates to a process for the production of phenylalanine, which comprises
[18477] (a) increasing or generating one or more activities selected from the group consisting of membrane transport protein in an organelle, preferably in plastids or mitochondria, especially in plastids, of a non-human organism or a part thereof, preferably a microorganism, a plant cell, a plant or a part thereof, as compared to a corresponding non-transformed wild type non-human organism or a part thereof; and
[18478] (b) growing the non-human organism or a part thereof under conditions which permit the production of phenylalanine or a composition comprising phenylalanine in said non-human organism or in the culture medium surrounding said non-human organism.

[18479] A further embodiment of the present invention relates to a process for the production of tyrosine, which comprises
[18480] (a) increasing or generating one or more activities selected from the group consisting of membrane transport protein in an organelle, preferably in plastids or mitochondria, especially in plastids, of a non-human organism or a part thereof, preferably a microorganism, a plant cell, a plant or a part thereof, as compared to a corresponding non-transformed wild type non-human organism or a part thereof; and
[18481] (b) growing the non-human organism or a part thereof under conditions which permit the production of tyrosine or a composition comprising tyrosine in said non-human organism or in the culture medium surrounding said non-human organism.

[18482] A further embodiment of the present invention relates to a process for the production of homoserine, which comprises
[18483] (a) increasing or generating one or more activities selected from the group consisting of b0518-protein in an organelle, preferably in plastids or mitochondria, especially in plastids, of a non-human organism or a part thereof, preferably a microorganism, a plant cell, a plant or a part thereof, as compared to a corresponding non-transformed wild type non-human organism or a part thereof; and
[18484] (b) growing the non-human organism or a part thereof under conditions which permit the production of homoserine or a composition comprising homoserine in said non-human organism or in the culture medium surrounding said non-human organism.

[18485] A further embodiment of the present invention relates to a process for the production of aspartate, which comprises
[18486] (a) increasing or generating one or more activities selected from the group consisting of isochorismate synthase in an organelle, preferably in plastids or mitochondria, especially in plastids, of a non-human organism or a part thereof, preferably a microorganism, a plant cell, a plant or a part thereof, as compared to a corresponding non-transformed wild type non-human organism or a part thereof; and
[18487] (b) growing the non-human organism or a part thereof under conditions which permit the production of aspartate or a composition comprising aspartate in said non-human organism or in the culture medium surrounding said non-human organism.

[18488] A further embodiment of the present invention relates to a process for the production of phenylalanine, which comprises
[18489] (a) increasing or generating one or more activities selected from the group consisting of isochorismate synthase in an organelle, preferably in plastids or mitochondria, especially in plastids, of a non-human organism or a part thereof, preferably a microorganism, a plant cell, a plant or a part thereof, as compared to a corresponding non-transformed wild type non-human organism or a part thereof; and
[18490] (b) growing the non-human organism or a part thereof under conditions which permit the production of phenylalanine or a composition comprising phenylalanine in said non-human organism or in the culture medium surrounding said non-human organism.

[18491] A further embodiment of the present invention relates to a process for the production of serine, which comprises
[18492] (a) increasing or generating one or more activities selected from the group consisting of isochorismate synthase in an organelle, preferably in plastids or mitochondria, especially in plastids, of a non-human organism or a part thereof, preferably a microorganism, a plant cell, a plant or a part thereof, as compared to a corresponding non-transformed wild type non-human organism or a part thereof; and
[18493] (b) growing the non-human organism or a part thereof under conditions which permit the production of serine or a composition comprising serine in said non-human organism or in the culture medium surrounding said non-human organism.

[18494] A further embodiment of the present invention relates to a process for the production of tyrosine, which comprises
[18495] (a) increasing or generating one or more activities selected from the group consisting of isochorismate synthase in an organelle, preferably in plastids or mitochondria, especially in plastids, of a non-human organism or a part thereof, preferably a microorganism, a plant cell, a plant or a part thereof, as compared to a corresponding non-transformed wild type non-human organism or a part thereof; and
[18496] (b) growing the non-human organism or a part thereof under conditions which permit the production of tyrosine or a composition comprising tyrosine in said non-human organism or in the culture medium surrounding said non-human organism.

[18497] A further embodiment of the present invention relates to a process for the production of 3,4-dihydroxyphenylalanine (dopa), which comprises
[18498] (a) increasing or generating one or more activities selected from the group consisting of isochorismate synthase in an organelle, preferably in plastids or mitochondria, especially in plastids, of a non-human organism or a part thereof, preferably a microorganism, a plant cell, a plant or a part thereof, as compared to a corresponding non-transformed wild type non-human organism or a part thereof; and
[18499] (b) growing the non-human organism or a part thereof under conditions which permit the production of 3,4-dihydroxyphenylalanine (dopa) or a composition comprising 3,4-dihydroxyphenylalanine (dopa) in said non-human organism or in the culture medium surrounding said non-human organism.

[18500] A further embodiment of the present invention relates to a process for the production of 5-oxoproline, which comprises
[18501] (a) increasing or generating one or more activities selected from the group consisting of isochorismate synthase in an organelle, preferably in plastids or mitochondria, especially in plastids, of a non-human organism or a part thereof, preferably a microorganism, a plant cell, a plant or a part thereof, as compared to a corresponding non-transformed wild type non-human organism or a part thereof; and
[18502] (b) growing the non-human organism or a part thereof under conditions which permit the production of 5-oxoproline or a composition comprising 5-oxoproline in said non-human organism or in the culture medium surrounding said non-human organism.

[18503] A further embodiment of the present invention relates to a process for the production of tyrosine, which comprises
[18504] (a) increasing or generating one or more activities selected from the group consisting of zinc transporter in an organelle, preferably in plastids or mitochondria, especially in plastids, of a non-human organism or a part thereof, preferably a microorganism, a plant cell, a plant or a part thereof, as compared to a corresponding non-transformed wild type non-human organism or a part thereof; and
[18505] (b) growing the non-human organism or a part thereof under conditions which permit the production of tyrosine or a composition comprising tyrosine in said non-human organism or in the culture medium surrounding said non-human organism.

[18506] A further embodiment of the present invention relates to a process for the production of tyrosine, which comprises
[18507] (a) increasing or generating one or more activities selected from the group consisting of 3-deoxy-D-arabinoheptulosonate-7-phosphatesynthase in an organelle, preferably in plastids or mitochondria, especially in plastids, of a non-human organism or a part thereof, preferably a microorganism, a plant cell, a plant or a part thereof, as compared to a corresponding non-transformed wild type non-human organism or a part thereof; and
[18508] (b) growing the non-human organism or a part thereof under conditions which permit the production of tyrosine or a composition comprising tyrosine in said non-human organism or in the culture medium surrounding said non-human organism.

[18509] A further embodiment of the present invention relates to a process for the production of tyrosine, which comprises
[18510] (a) increasing or generating one or more activities selected from the group consisting of b0801-protein in an organelle, preferably in plastids or mitochondria, especially in plastids, of a non-human organism or a part thereof, preferably a microorganism, a plant cell, a plant or a part thereof, as compared to a corresponding non-transformed wild type non-human organism or a part thereof; and
[18511] (b) growing the non-human organism or a part thereof under conditions which permit the production of tyrosine or a composition comprising tyrosine in said non-human organism or in the culture medium surrounding said non-human organism.

[18512] A further embodiment of the present invention relates to a process for the production of alanine, which comprises
[18513] (a) increasing or generating one or more activities selected from the group consisting of asparaginase in an organelle, preferably in plastids or mitochondria, especially in plastids, of a non-human organism or a part thereof, preferably a microorganism, a plant cell, a plant or a part thereof, as compared to a corresponding non-transformed wild type non-human organism or a part thereof; and
[18514] (b) growing the non-human organism or a part thereof under conditions which permit the production of alanine or a composition comprising alanine in said non-human organism or in the culture medium surrounding said non-human organism.

[18515] A further embodiment of the present invention relates to a process for the production of glycine, which comprises
[18516] (a) increasing or generating one or more activities selected from the group consisting of b0841-protein in an organelle, preferably in plastids or mitochondria, especially in plastids, of a non-human organism or a part thereof, preferably a microorganism, a plant cell, a plant or a part thereof, as compared to a corresponding non-transformed wild type non-human organism or a part thereof; and
[18517] (b) growing the non-human organism or a part thereof under conditions which permit the production of glycine or a composition comprising glycine in said non-human organism or in the culture medium surrounding said non-human organism.

[18518] A further embodiment of the present invention relates to a process for the production of homoserine, which comprises
[18519] (a) increasing or generating one or more activities selected from the group consisting of b0841-protein in an organelle, preferably in plastids or mitochondria, especially in plastids, of a non-human organism or a part thereof, preferably a microorganism, a plant cell, a plant or a part thereof, as compared to a corresponding non-transformed wild type non-human organism or a part thereof; and
[18520] (b) growing the non-human organism or a part thereof under conditions which permit the production of homoserine or a composition comprising homoserine in said non-human organism or in the culture medium surrounding said non-human organism.

[18521] A further embodiment of the present invention relates to a process for the production of phenylalanine, which comprises
[18522] (a) increasing or generating one or more activities selected from the group consisting of major facilitator superfamily transporter protein in an organelle, preferably in plastids or mitochondria, especially in plastids, of a non-human organism or a part thereof, preferably a microorganism, a plant cell, a plant or a part thereof, as compared to a corresponding non-transformed wild type non-human organism or a part thereof; and
[18523] (b) growing the non-human organism or a part thereof under conditions which permit the production of phenylalanine or a composition comprising phenylalanine in said non-human organism or in the culture medium surrounding said non-human organism.

[18524] A further embodiment of the present invention relates to a process for the production of serine, which comprises
[18525] (a) increasing or generating one or more activities selected from the group consisting of major facilitator superfamily transporter protein in an organelle, preferably in plastids or mitochondria, especially in plastids, of a non-human organism or a part thereof, preferably a microorganism, a plant cell, a plant or a part thereof, as compared to a corresponding non-transformed wild type non-human organism or a part thereof; and
[18526] (b) growing the non-human organism or a part thereof under conditions which permit the production of serine or a composition comprising serine in said non-human organism or in the culture medium surrounding said non-human organism.

[18527] A further embodiment of the present invention relates to a process for the production of tyrosine, which comprises
[18528] (a) increasing or generating one or more activities selected from the group consisting of major facilitator superfamily transporter protein in an organelle, preferably in plastids or mitochondria, especially in plastids, of a non-human organism or a part thereof, preferably a microorganism, a plant cell, a plant or a part thereof, as compared to a corresponding non-transformed wild type non-human organism or a part thereof; and
[18529] (b) growing the non-human organism or a part thereof under conditions which permit the production of tyrosine or a composition comprising tyrosine in said non-human organism or in the culture medium surrounding said non-human organism.

[18530] A further embodiment of the present invention relates to a process for the production of 5-oxoproline, which comprises
[18531] (a) increasing or generating one or more activities selected from the group consisting of major facilitator superfamily transporter protein in an organelle, preferably in plastids or mitochondria, especially in plastids, of a non-human organism or a part thereof, preferably a microorganism, a plant cell, a plant or a part thereof, as compared to a corresponding non-transformed wild type non-human organism or a part thereof; and
[18532] (b) growing the non-human organism or a part thereof under conditions which permit the production of 5-oxoproline or a composition comprising 5-oxoproline in said non-human organism or in the culture medium surrounding said non-human organism.

[18533] A further embodiment of the present invention relates to a process for the production of citrulline, which comprises
[18534] (a) increasing or generating one or more activities selected from the group consisting of b0917-protein in an organelle, preferably in plastids or mitochondria, especially in plastids, of a non-human organism or a part thereof, preferably a microorganism, a plant cell, a plant or a part thereof, as compared to a corresponding non-transformed wild type non-human organism or a part thereof; and
[18535] (b) growing the non-human organism or a part thereof under conditions which permit the production of citrulline or a composition comprising citrulline in said non-human organism or in the culture medium surrounding said non-human organism.

[18536] A further embodiment of the present invention relates to a process for the production of glycine, which comprises
[18537] (a) increasing or generating one or more activities selected from the group consisting of b0917-protein in an organelle, preferably in plastids or mitochondria, especially in plastids, of a non-human organism or a part thereof, preferably a microorganism, a plant cell, a plant or a part thereof, as compared to a corresponding non-transformed wild type non-human organism or a part thereof; and
[18538] (b) growing the non-human organism or a part thereof under conditions which permit the production of glycine or a composition comprising glycine in said non-human organism or in the culture medium surrounding said non-human organism.

[18539] A further embodiment of the present invention relates to a process for the production of phenylalanine, which comprises
[18540] (a) increasing or generating one or more activities selected from the group consisting of b0917-protein in an organelle, preferably in plastids or mitochondria, especially in plastids, of a non-human organism or a part thereof, preferably a microorganism, a plant cell, a plant or a part thereof, as compared to a corresponding non-transformed wild type non-human organism or a part thereof; and
[18541] (b) growing the non-human organism or a part thereof under conditions which permit the production of phenylalanine or a composition comprising phenylalanine in said non-human organism or in the culture medium surrounding said non-human organism.

[18542] A further embodiment of the present invention relates to a process for the production of 5-oxoproline, which comprises
[18543] (a) increasing or generating one or more activities selected from the group consisting of b0917-protein in an organelle, preferably in plastids or mitochondria, especially in plastids, of a non-human organism or a part thereof, preferably a microorganism, a plant cell, a plant or a part thereof, as compared to a corresponding non-transformed wild type non-human organism or a part thereof; and
[18544] (b) growing the non-human organism or a part thereof under conditions which permit the production of 5-oxoproline or a composition comprising 5-oxoproline in said non-human organism or in the culture medium surrounding said non-human organism.

[18545] A further embodiment of the present invention relates to a process for the production of alanine, which comprises
[18546] (a) increasing or generating one or more activities selected from the group consisting of methylglyoxal synthase in an organelle, preferably in plastids or mitochondria, especially in plastids, of a non-human organism or a part thereof, preferably a microorganism, a plant cell, a plant or a part thereof, as compared to a corresponding non-transformed wild type non-human organism or a part thereof; and
[18547] (b) growing the non-human organism or a part thereof under conditions which permit the production of alanine or a composition comprising alanine in said non-human organism or in the culture medium surrounding said non-human organism.

[18548] A further embodiment of the present invention relates to a process for the production of phenylalanine, which comprises
[18549] (a) increasing or generating one or more activities selected from the group consisting of methylglyoxal synthase in an organelle, preferably in plastids or mitochondria, especially in plastids, of a non-human organism or a part thereof, preferably a microorganism, a plant cell, a plant or a part thereof, as compared to a corresponding non-transformed wild type non-human organism or a part thereof; and
[18550] (b) growing the non-human organism or a part thereof under conditions which permit the production of phenylalanine or a composition comprising phenylalanine in said non-human organism or in the culture medium surrounding said non-human organism.

[18551] A further embodiment of the present invention relates to a process for the production of tyrosine, which comprises
[18552] (a) increasing or generating one or more activities selected from the group consisting of methylglyoxal synthase in an organelle, preferably in plastids or mitochondria, especially in plastids, of a non-human organism or a part thereof, preferably a microorganism, a plant cell, a plant or a part thereof, as compared to a corresponding non-transformed wild type non-human organism or a part thereof; and
[18553] (b) growing the non-human organism or a part thereof under conditions which permit the production of tyrosine or a composition comprising tyrosine in said non-human organism or in the culture medium surrounding said non-human organism.

[18554] A further embodiment of the present invention relates to a process for the production of phenylalanine, which comprises
[18555] (a) increasing or generating one or more activities selected from the group consisting of phosphoanhydride phosphorylase in an organelle, preferably in plastids or mitochondria, especially in plastids, of a non-human organism or a part thereof, preferably a microorganism, a plant cell, a plant or a part thereof, as compared to a corresponding non-transformed wild type non-human organism or a part thereof; and
[18556] (b) growing the non-human organism or a part thereof under conditions which permit the production of phenylalanine or a composition comprising phenylalanine in said non-human organism or in the culture medium surrounding said non-human organism.

[18557] A further embodiment of the present invention relates to a process for the production of alanine, which comprises
[18558] (a) increasing or generating one or more activities selected from the group consisting of b1003-protein in an organelle, preferably in plastids or mitochondria, especially in plastids, of a non-human organism or a part thereof, preferably a microorganism, a plant cell, a plant or a part thereof, as compared to a corresponding non-transformed wild type non-human organism or a part thereof; and
[18559] (b) growing the non-human organism or a part thereof under conditions which permit the production of alanine or a composition comprising alanine in said non-human organism or in the culture medium surrounding said non-human organism.

[18560] A further embodiment of the present invention relates to a process for the production of aspartate, which comprises
[18561] (a) increasing or generating one or more activities selected from the group consisting of b1003-protein in an organelle, preferably in plastids or mitochondria, especially in plastids, of a non-human organism or a part thereof, preferably a microorganism, a plant cell, a plant or a part thereof, as compared to a corresponding non-transformed wild type non-human organism or a part thereof; and
[18562] (b) growing the non-human organism or a part thereof under conditions which permit the production of aspartate or a composition comprising aspartate in said non-human organism or in the culture medium surrounding said non-human organism.

[18563] A further embodiment of the present invention relates to a process for the production of phenylalanine, which comprises
[18564] (a) increasing or generating one or more activities selected from the group consisting of b1003-protein in an organelle, preferably in plastids or mitochondria, especially in plastids, of a non-human organism or a part thereof, preferably a microorganism, a plant cell, a plant or a part thereof, as compared to a corresponding non-transformed wild type non-human organism or a part thereof; and
[18565] (b) growing the non-human organism or a part thereof under conditions which permit the production of phenylalanine or a composition comprising phenylalanine in said non-human organism or in the culture medium surrounding said non-human organism.

[18566] A further embodiment of the present invention relates to a process for the production of serine, which comprises
[18567] (a) increasing or generating one or more activities selected from the group consisting of b1003-protein in an organelle, preferably in plastids or mitochondria, especially in plastids, of a non-human organism or a part thereof, preferably a microorganism, a plant cell, a plant or a part thereof, as compared to a corresponding non-transformed wild type non-human organism or a part thereof; and
[18568] (b) growing the non-human organism or a part thereof under conditions which permit the production of serine or a composition comprising serine in said non-human organism or in the culture medium surrounding said non-human organism.

[18569] A further embodiment of the present invention relates to a process for the production of tyrosine, which comprises
[18570] (a) increasing or generating one or more activities selected from the group consisting of b1003-protein in an organelle, preferably in plastids or mitochondria, especially in plastids, of a non-human organism or a part thereof, preferably a microorganism, a plant cell, a plant or a part thereof, as compared to a corresponding non-transformed wild type non-human organism or a part thereof; and
[18571] (b) growing the non-human organism or a part thereof under conditions which permit the production of tyrosine or a composition comprising tyrosine in said non-human organism or in the culture medium surrounding said non-human organism.

[18572] A further embodiment of the present invention relates to a process for the production of 3,4-dihydroxyphenylalanine (dopa), which comprises
[18573] (a) increasing or generating one or more activities selected from the group consisting of b1003-protein in an organelle, preferably in plastids or mitochondria, especially in plastids, of a non-human organism or a part thereof, preferably a microorganism, a plant cell, a plant or a part thereof, as compared to a corresponding non-transformed wild type non-human organism or a part thereof; and
[18574] (b) growing the non-human organism or a part thereof under conditions which permit the production of 3,4-dihydroxyphenylalanine (dopa) or a composition comprising 3,4-dihydroxyphenylalanine (dopa) in said non-human organism or in the culture medium surrounding said non-human organism.

[18575] A further embodiment of the present invention relates to a process for the production of 5-oxoproline, which comprises
[18576] (a) increasing or generating one or more activities selected from the group consisting of b1003-protein in an organelle, preferably in plastids or mitochondria, especially in plastids, of a non-human organism or a part thereof, preferably a microorganism, a plant cell, a plant or a part thereof, as compared to a corresponding non-transformed wild type non-human organism or a part thereof; and
[18577] (b) growing the non-human organism or a part thereof under conditions which permit the production of 5-oxoproline or a composition comprising 5-oxoproline in said non-human organism or in the culture medium surrounding said non-human organism.

[18578] A further embodiment of the present invention relates to a process for the production of citrulline, which comprises
[18579] (a) increasing or generating one or more activities selected from the group consisting of lipoprotein precursor in an organelle, preferably in plastids or mitochondria, especially in plastids, of a non-human organism or a part thereof, preferably a microorganism, a plant cell, a plant or a part thereof, as compared to a corresponding non-transformed wild type non-human organism or a part thereof; and
[18580] (b) growing the non-human organism or a part thereof under conditions which permit the production of citrulline or a composition comprising citrulline in said non-human organism or in the culture medium surrounding said non-human organism.

[18581] A further embodiment of the present invention relates to a process for the production of 5-oxoproline, which comprises
[18582] (a) increasing or generating one or more activities selected from the group consisting of lipoprotein precursor in an organelle, preferably in plastids or mitochondria, especially in plastids, of a non-human organism or a part thereof, preferably a microorganism, a plant cell, a plant or a part thereof, as compared to a corresponding non-transformed wild type non-human organism or a part thereof; and
[18583] (b) growing the non-human organism or a part thereof under conditions which permit the production of 5-oxoproline or a composition comprising 5-oxoproline in said non-human organism or in the culture medium surrounding said non-human organism.

[18584] A further embodiment of the present invention relates to a process for the production of aspartate, which comprises
[18585] (a) increasing or generating one or more activities selected from the group consisting of b1024-protein in an organelle, preferably in plastids or mitochondria, especially in plastids, of a non-human organism or a part thereof, preferably a microorganism, a plant cell, a plant or a part thereof, as compared to a corresponding non-transformed wild type non-human organism or a part thereof; and
[18586] (b) growing the non-human organism or a part thereof under conditions which permit the production of aspartate or a composition comprising aspartate in said non-human organism or in the culture medium surrounding said non-human organism.

[18587] A further embodiment of the present invention relates to a process for the production of aspartate, which comprises
[18588] (a) increasing or generating one or more activities selected from the group consisting of multidrug resistance protein in an organelle, preferably in plastids or mitochondria, especially in plastids, of a non-human organism or a part thereof, preferably a microorganism, a plant cell, a plant or a part thereof, as compared to a corresponding non-transformed wild type non-human organism or a part thereof; and
[18589] (b) growing the non-human organism or a part thereof under conditions which permit the production of aspartate or a composition comprising aspartate in said non-human organism or in the culture medium surrounding said non-human organism.

[18590] A further embodiment of the present invention relates to a process for the production of tyrosine, which comprises
[18591] (a) increasing or generating one or more activities selected from the group consisting of multidrug resistance protein in an organelle, preferably in plastids or mitochondria, especially in plastids, of a non-human organism or a part thereof, preferably a microorganism, a plant cell, a plant or a part thereof, as compared to a corresponding non-transformed wild type non-human organism or a part thereof; and
[18592] (b) growing the non-human organism or a part thereof under conditions which permit the production of tyrosine or a composition comprising tyrosine in said non-human organism or in the culture medium surrounding said non-human organism.

[18593] A further embodiment of the present invention relates to a process for the production of serine, which comprises
[18594] (a) increasing or generating one or more activities selected from the group consisting of b1137-protein in an organelle, preferably in plastids or mitochondria, especially in plastids, of a non-human organism or a part thereof, preferably a microorganism, a plant cell, a plant or a part thereof, as compared to a corresponding non-transformed wild type non-human organism or a part thereof; and
[18595] (b) growing the non-human organism or a part thereof under conditions which permit the production of serine or a composition comprising serine in said non-human organism or in the culture medium surrounding said non-human organism.

[18596] A further embodiment of the present invention relates to a process for the production of phenylalanine, which comprises
[18597] (a) increasing or generating one or more activities selected from the group consisting of b1155-protein in an organelle, preferably in plastids or mitochondria, especially in plastids, of a non-human organism or a part thereof, preferably a microorganism, a plant cell, a plant or a part thereof, as compared to a corresponding non-transformed wild type non-human organism or a part thereof; and
[18598] (b) growing the non-human organism or a part thereof under conditions which permit the production of phenylalanine or a composition comprising phenylalanine in said non-human organism or in the culture medium surrounding said non-human organism.

[18599] A further embodiment of the present invention relates to a process for the production of phenylalanine, which comprises
[18600] (a) increasing or generating one or more activities selected from the group consisting of b1163-protein in an organelle, preferably in plastids or mitochondria, especially in plastids, of a non-human organism or a part thereof, preferably a microorganism, a plant cell, a plant or a part thereof, as compared to a corresponding non-transformed wild type non-human organism or a part thereof; and
[18601] (b) growing the non-human organism or a part thereof under conditions which permit the production of phenylalanine or a composition comprising phenylalanine in said non-human organism or in the culture medium surrounding said non-human organism.

[18602] A further embodiment of the present invention relates to a process for the production of tyrosine, which comprises
[18603] (a) increasing or generating one or more activities selected from the group consisting of b1163-protein in an organelle, preferably in plastids or mitochondria, especially in plastids, of a non-human organism or a part thereof, preferably a microorganism, a plant cell, a plant or a part thereof, as compared to a corresponding non-transformed wild type non-human organism or a part thereof; and
[18604] (b) growing the non-human organism or a part thereof under conditions which permit the production of tyrosine or a composition comprising tyrosine in said non-human organism or in the culture medium surrounding said non-human organism.

[18605] A further embodiment of the present invention relates to a process for the production of citrulline, which comprises
[18606] (a) increasing or generating one or more activities selected from the group consisting of b1179-protein in an organelle, preferably in plastids or mitochondria, especially in plastids, of a non-human organism or a part thereof, preferably a microorganism, a plant cell, a plant or a part thereof, as compared to a corresponding non-transformed wild type non-human organism or a part thereof; and
[18607] (b) growing the non-human organism or a part thereof under conditions which permit the production of citrulline or a composition comprising citrulline in said non-human organism or in the culture medium surrounding said non-human organism.

[18608] A further embodiment of the present invention relates to a process for the production of alanine, which comprises
[18609] (a) increasing or generating one or more activities selected from the group consisting of sodium/proton antiporter in an organelle, preferably in plastids or mitochondria, especially in plastids, of a non-human organism or a part thereof, preferably a microorganism, a plant cell, a plant or a part thereof, as compared to a corresponding non-transformed wild type non-human organism or a part thereof; and
[18610] (b) growing the non-human organism or a part thereof under conditions which permit the production of alanine or a composition comprising alanine in said non-human organism or in the culture medium surrounding said non-human organism.

[18611] A further embodiment of the present invention relates to a process for the production of serine, which comprises
[18612] (a) increasing or generating one or more activities selected from the group consisting of sodium/proton antiporter in an organelle, preferably in plastids or mitochondria, especially in plastids, of a non-human organism or a part thereof, preferably a microorganism, a plant cell, a plant or a part thereof, as compared to a corresponding non-transformed wild type non-human organism or a part thereof; and
[18613] (b) growing the non-human organism or a part thereof under conditions which permit the production of serine or a composition comprising serine in said non-human organism or in the culture medium surrounding said non-human organism.

[18614] A further embodiment of the present invention relates to a process for the production of citrulline, which comprises
[18615] (a) increasing or generating one or more activities selected from the group consisting of b1205-protein in an organelle, preferably in plastids or mitochondria, especially in plastids, of a non-human organism or a part thereof, preferably a microorganism, a plant cell, a plant or a part thereof, as compared to a corresponding non-transformed wild type non-human organism or a part thereof; and
[18616] (b) growing the non-human organism or a part thereof under conditions which permit the production of citrulline or a composition comprising citrulline in said non-human organism or in the culture medium surrounding said non-human organism.

[18617] A further embodiment of the present invention relates to a process for the production of phenylalanine, which comprises
[18618] (a) increasing or generating one or more activities selected from the group consisting of b1229-protein in an organelle, preferably in plastids or mitochondria, especially in plastids, of a non-human organism or a part thereof, preferably a microorganism, a plant cell, a plant or a part thereof, as compared to a corresponding non-transformed wild type non-human organism or a part thereof; and
[18619] (b) growing the non-human organism or a part thereof under conditions which permit the production of phenylalanine or a composition comprising phenylalanine in said non-human organism or in the culture medium surrounding said non-human organism.

[18620] A further embodiment of the present invention relates to a process for the production of tyrosine, which comprises
[18621] (a) increasing or generating one or more activities selected from the group consisting of membrane protein in an organelle, preferably in plastids or mitochondria, especially in plastids, of a non-human organism or a part thereof, preferably a microorganism, a plant cell, a plant or a part thereof, as compared to a corresponding non-transformed wild type non-human organism or a part thereof; and
[18622] (b) growing the non-human organism or a part thereof under conditions which permit the production of tyrosine or a composition comprising tyrosine in said non-human organism or in the culture medium surrounding said non-human organism.

[18623] A further embodiment of the present invention relates to a process for the production of citrulline, which comprises
[18624] (a) increasing or generating one or more activities selected from the group consisting of b1259-protein in an organelle, preferably in plastids or mitochondria, especially in plastids, of a non-human organism or a part thereof, preferably a microorganism, a plant cell, a plant or a part thereof, as compared to a corresponding non-transformed wild type non-human organism or a part thereof; and
[18625] (b) growing the non-human organism or a part thereof under conditions which permit the production of citrulline or a composition comprising citrulline in said non-human organism or in the culture medium surrounding said non-human organism.

[18626] A further embodiment of the present invention relates to a process for the production of 5-oxoproline, which comprises
[18627] (a) increasing or generating one or more activities selected from the group consisting of b1259-protein in an organelle, preferably in plastids or mitochondria, especially in plastids, of a non-human organism or a part thereof, preferably a microorganism, a plant cell, a plant or a part thereof, as compared to a corresponding non-transformed wild type non-human organism or a part thereof; and
[18628] (b) growing the non-human organism or a part thereof under conditions which permit the production of 5-oxoproline or a composition comprising 5-oxoproline in said non-human organism or in the culture medium surrounding said non-human organism.

[18629] A further embodiment of the present invention relates to a process for the production of tyrosine, which comprises
[18630] (a) increasing or generating one or more activities selected from the group consisting of tryptophan biosynthesis protein in an organelle, preferably in plastids or mitochondria, especially in plastids, of a non-human organism or a part thereof, preferably a microorganism, a plant cell, a plant or a part thereof, as compared to a corresponding non-transformed wild type non-human organism or a part thereof; and
[18631] (b) growing the non-human organism or a part thereof under conditions which permit the production of tyrosine or a composition comprising tyrosine in said non-human organism or in the culture medium surrounding said non-human organism.

[18632] A further embodiment of the present invention relates to a process for the production of phenylalanine, which comprises
[18633] (a) increasing or generating one or more activities selected from the group consisting of anthranilate synthase component I in an organelle, preferably in plastids or mitochondria, especially in plastids, of a non-human organism or a part thereof, preferably a microorganism, a plant cell, a plant or a part thereof, as compared to a corresponding non-transformed wild type non-human organism or a part thereof; and
[18634] (b) growing the non-human organism or a part thereof under conditions which permit the production of phenylalanine or a composition comprising phenylalanine in said non-human organism or in the culture medium surrounding said non-human organism.

[18635] A further embodiment of the present invention relates to a process for the production of glycine, which comprises
[18636] (a) increasing or generating one or more activities selected from the group consisting of b1280-protein in an organelle, preferably in plastids or mitochondria, especially in plastids, of a non-human organism or a part thereof, preferably a microorganism, a plant cell, a plant or a part thereof, as compared to a corresponding non-transformed wild type non-human organism or a part thereof; and
[18637] (b) growing the non-human organism or a part thereof under conditions which permit the production of glycine or a composition comprising glycine in said non-human organism or in the culture medium surrounding said non-human organism.

[18638] A further embodiment of the present invention relates to a process for the production of serine, which comprises
[18639] (a) increasing or generating one or more activities selected from the group consisting of b1280-protein in an organelle, preferably in plastids or mitochondria, especially in plastids, of a non-human organism or a part thereof, preferably a microorganism, a plant cell, a plant or a part thereof, as compared to a corresponding non-transformed wild type non-human organism or a part thereof; and
[18640] (b) growing the non-human organism or a part thereof under conditions which permit the production of serine or a composition comprising serine in said non-human organism or in the culture medium surrounding said non-human organism.

[18641] A further embodiment of the present invention relates to a process for the production of 5-oxoproline, which comprises
[18642] (a) increasing or generating one or more activities selected from the group consisting of b1280-protein in an organelle, preferably in plastids or mitochondria, especially in plastids, of a non-human organism or a part thereof, preferably a microorganism, a plant cell, a plant or a part thereof, as compared to a corresponding non-transformed wild type non-human organism or a part thereof; and
[18643] (b) growing the non-human organism or a part thereof under conditions which permit the production of 5-oxoproline or a composition comprising 5-oxoproline in said non-human organism or in the culture medium surrounding said non-human organism.

[18644] A further embodiment of the present invention relates to a process for the production of alanine, which comprises
[18645] (a) increasing or generating one or more activities selected from the group consisting of glutamine synthetase in an organelle, preferably in plastids or mitochondria, especially in plastids, of a non-human organism or a part thereof, preferably a microorganism, a plant cell, a plant or a part thereof, as compared to a corresponding non-transformed wild type non-human organism or a part thereof; and
[18646] (b) growing the non-human organism or a part thereof under conditions which permit the production of alanine or a composition comprising alanine in said non-human organism or in the culture medium surrounding said non-human organism.

[18647] A further embodiment of the present invention relates to a process for the production of glycine, which comprises
[18648] (a) increasing or generating one or more activities selected from the group consisting of glutamine synthetase in an organelle, preferably in plastids or mitochondria, especially in plastids, of a non-human organism or a part thereof, preferably a microorganism, a plant cell, a plant or a part thereof, as compared to a corresponding non-transformed wild type non-human organism or a part thereof; and
[18649] (b) growing the non-human organism or a part thereof under conditions which permit the production of glycine or a composition comprising glycine in said non-human organism or in the culture medium surrounding said non-human organism.

[18650] A further embodiment of the present invention relates to a process for the production of phenylalanine, which comprises
[18651] (a) increasing or generating one or more activities selected from the group consisting of aldehyde dehydrogenase in an organelle, preferably in plastids or mitochondria, especially in plastids, of a non-human organism or a part thereof, preferably a microorganism, a plant cell, a plant or a part thereof, as compared to a corresponding non-transformed wild type non-human organism or a part thereof; and
[18652] (b) growing the non-human organism or a part thereof under conditions which permit the production of phenylalanine or a composition comprising phenylalanine in said non-human organism or in the culture medium surrounding said non-human organism.

[18653] A further embodiment of the present invention relates to a process for the production of tyrosine, which comprises
[18654] (a) increasing or generating one or more activities selected from the group consisting of aldehyde dehydrogenase in an organelle, preferably in plastids or mitochondria, especially in plastids, of a non-human organism or a part thereof, preferably a microorganism, a plant cell, a plant or a part thereof, as compared to a corresponding non-transformed wild type non-human organism or a part thereof; and
[18655] (b) growing the non-human organism or a part thereof under conditions which permit the production of tyrosine or a composition comprising tyrosine in said non-human organism or in the culture medium surrounding said non-human organism.

[18656] A further embodiment of the present invention relates to a process for the production of citrulline, which comprises
[18657] (a) increasing or generating one or more activities selected from the group consisting of ABC transporter substrate-binding protein in an organelle, preferably in plastids or mitochondria, especially in plastids, of a non-human organism or a part thereof, preferably a microorganism, a plant cell, a plant or a part thereof, as compared to a corresponding non-transformed wild type non-human organism or a part thereof; and
[18658] (b) growing the non-human organism or a part thereof under conditions which permit the production of citrulline or a composition comprising citrulline in said non-human organism or in the culture medium surrounding said non-human organism.

[18659] A further embodiment of the present invention relates to a process for the production of citrulline, which comprises
[18660] (a) increasing or generating one or more activities selected from the group consisting of b1330-protein in an organelle, preferably in plastids or mitochondria, especially in plastids, of a non-human organism or a part thereof, preferably a microorganism, a plant cell, a plant or a part thereof, as compared to a corresponding non-transformed wild type non-human organism or a part thereof; and
[18661] (b) growing the non-human organism or a part thereof under conditions which permit the production of citrulline or a composition comprising citrulline in said non-human organism or in the culture medium surrounding said non-human organism.

[18662] A further embodiment of the present invention relates to a process for the production of phenylalanine, which comprises
[18663] (a) increasing or generating one or more activities selected from the group consisting of ATPdependent RNA helicase in an organelle, preferably in plastids or mitochondria, especially in plastids, of a non-human organism or a part thereof, preferably a microorganism, a plant cell, a plant or a part thereof, as compared to a corresponding non-transformed wild type non-human organism or a part thereof; and
[18664] (b) growing the non-human organism or a part thereof under conditions which permit the production of phenylalanine or a composition comprising phenylalanine in said non-human organism or in the culture medium surrounding said non-human organism.

[18665] A further embodiment of the present invention relates to a process for the production of alanine, which comprises
[18666] (a) increasing or generating one or more activities selected from the group consisting of restriction alleviation protein in an organelle, preferably in plastids or mitochondria, especially in plastids, of a non-human organism or a part thereof, preferably a microorganism, a plant cell, a plant or a part thereof, as compared to a corresponding non-transformed wild type non-human organism or a part thereof; and
[18667] (b) growing the non-human organism or a part thereof under conditions which permit the production of alanine or a composition comprising alanine in said non-human organism or in the culture medium surrounding said non-human organism.

[18668] A further embodiment of the present invention relates to a process for the production of glycine, which comprises
[18669] (a) increasing or generating one or more activities selected from the group consisting of restriction alleviation protein in an organelle, preferably in plastids or mitochondria, especially in plastids, of a non-human organism or a part thereof, preferably a microorganism, a plant cell, a plant or a part thereof, as compared to a corresponding non-transformed wild type non-human organism or a part thereof; and
[18670] (b) growing the non-human organism or a part thereof under conditions which permit the production of glycine or a composition comprising glycine in said non-human organism or in the culture medium surrounding said non-human organism.

[18671] A further embodiment of the present invention relates to a process for the production of 5-oxoproline, which comprises
[18672] (a) increasing or generating one or more activities selected from the group consisting of lipoprotein precursor in an organelle, preferably in plastids or mitochondria, especially in plastids, of a non-human organism or a part thereof, preferably a microorganism, a plant cell, a plant or a part thereof, as compared to a corresponding non-transformed wild type non-human organism or a part thereof; and
[18673] (b) growing the non-human organism or a part thereof under conditions which permit the production of 5-oxoproline or a composition comprising 5-oxoproline in said non-human organism or in the culture medium surrounding said non-human organism.

[18674] A further embodiment of the present invention relates to a process for the production of alanine, which comprises
[18675] (a) increasing or generating one or more activities selected from the group consisting of b1445-protein in an organelle, preferably in plastids or mitochondria, especially in plastids, of a non-human organism or a part thereof, preferably a microorganism, a plant cell, a plant or a part thereof, as compared to a corresponding non-transformed wild type non-human organism or a part thereof; and
[18676] (b) growing the non-human organism or a part thereof under conditions which permit the production of alanine or a composition comprising alanine in said non-human organism or in the culture medium surrounding said non-human organism.

[18677] A further embodiment of the present invention relates to a process for the production of citrulline, which comprises
[18678] (a) increasing or generating one or more activities selected from the group consisting of b1445-protein in an organelle, preferably in plastids or mitochondria, especially in plastids, of a non-human organism or a part thereof, preferably a microorganism, a plant cell, a plant or a part thereof, as compared to a corresponding non-transformed wild type non-human organism or a part thereof; and
[18679] (b) growing the non-human organism or a part thereof under conditions which permit the production of citrulline or a composition comprising citrulline in said non-human organism or in the culture medium surrounding said non-human organism.

[18680] A further embodiment of the present invention relates to a process for the production of glycine, which comprises
[18681] (a) increasing or generating one or more activities selected from the group consisting of b1445-protein in an organelle, preferably in plastids or mitochondria, especially in plastids, of a non-human organism or a part thereof, preferably a microorganism, a plant cell, a plant or a part thereof, as compared to a corresponding non-transformed wild type non-human organism or a part thereof; and
[18682] (b) growing the non-human organism or a part thereof under conditions which permit the production of glycine or a composition comprising glycine in said non-human organism or in the culture medium surrounding said non-human organism.

[18683] A further embodiment of the present invention relates to a process for the production of phenylalanine, which comprises
[18684] (a) increasing or generating one or more activities selected from the group consisting of b1445-protein in an organelle, preferably in plastids or mitochondria, especially in plastids, of a non-human organism or a part thereof, preferably a microorganism, a plant cell, a plant or a part thereof, as compared to a corresponding non-transformed wild type non-human organism or a part thereof; and
[18685] (b) growing the non-human organism or a part thereof under conditions which permit the production of phenylalanine or a composition comprising phenylalanine in said non-human organism or in the culture medium surrounding said non-human organism.

[18686] A further embodiment of the present invention relates to a process for the production of serine, which comprises
[18687] (a) increasing or generating one or more activities selected from the group consisting of b1445-protein in an organelle, preferably in plastids or mitochondria, especially in plastids, of a non-human organism or a part thereof, preferably a microorganism, a plant cell, a plant or a part thereof, as compared to a corresponding non-transformed wild type non-human organism or a part thereof; and
[18688] (b) growing the non-human organism or a part thereof under conditions which permit the production of serine or a composition comprising serine in said non-human organism or in the culture medium surrounding said non-human organism.

[18689] A further embodiment of the present invention relates to a process for the production of alanine, which comprises
[18690] (a) increasing or generating one or more activities selected from the group consisting of NADP-dependent malic enzyme in an organelle, preferably in plastids or mitochondria, especially in plastids, of a non-human organism or a part thereof, preferably a microorganism, a plant cell, a plant or a part thereof, as compared to a corresponding non-transformed wild type non-human organism or a part thereof; and
[18691] (b) growing the non-human organism or a part thereof under conditions which permit the production of alanine or a composition comprising alanine in said non-human organism or in the culture medium surrounding said non-human organism.

[18692] A further embodiment of the present invention relates to a process for the production of glycine, which comprises
[18693] (a) increasing or generating one or more activities selected from the group consisting of NADP-dependent malic enzyme in an organelle, preferably in plastids or mitochondria, especially in plastids, of a non-human organism or a part thereof, preferably a microorganism, a plant cell, a plant or a part thereof, as compared to a corresponding non-transformed wild type non-human organism or a part thereof; and
[18694] (b) growing the non-human organism or a part thereof under conditions which permit the production of glycine or a composition comprising glycine in said non-human organism or in the culture medium surrounding said non-human organism.

[18695] A further embodiment of the present invention relates to a process for the production of phenylalanine, which comprises
[18696] (a) increasing or generating one or more activities selected from the group consisting of NADP-dependent malic enzyme in an organelle, preferably in plastids or mitochondria, especially in plastids, of a non-human organism or a part thereof, preferably a microorganism, a plant cell, a plant or a part thereof, as compared to a corresponding non-transformed wild type non-human organism or a part thereof; and
[18697] (b) growing the non-human organism or a part thereof under conditions which permit the production of phenylalanine or a composition comprising phenylalanine in said non-human organism or in the culture medium surrounding said non-human organism.

[18698] A further embodiment of the present invention relates to a process for the production of serine, which comprises
[18699] (a) increasing or generating one or more activities selected from the group consisting of NADP-dependent malic enzyme in an organelle, preferably in plastids or mitochondria, especially in plastids, of a non-human organism or a part thereof, preferably a microorganism, a plant cell, a plant or a part thereof, as compared to a corresponding non-transformed wild type non-human organism or a part thereof; and
[18700] (b) growing the non-human organism or a part thereof under conditions which permit the production of serine or a composition comprising serine in said non-human organism or in the culture medium surrounding said non-human organism.

[18701] A further embodiment of the present invention relates to a process for the production of tyrosine, which comprises
[18702] (a) increasing or generating one or more activities selected from the group consisting of NADP-dependent malic enzyme in an organelle, preferably in plastids or mitochondria, especially in plastids, of a non-human organism or a part thereof, preferably a microorganism, a plant cell, a plant or a part thereof, as compared to a corresponding non-transformed wild type non-human organism or a part thereof; and
[18703] (b) growing the non-human organism or a part thereof under conditions which permit the production of tyrosine or a composition comprising tyrosine in said non-human organism or in the culture medium surrounding said non-human organism.

[18704] A further embodiment of the present invention relates to a process for the production of asparagine, which comprises
[18705] (a) increasing or generating one or more activities selected from the group consisting of b1522-protein in an organelle, preferably in plastids or mitochondria, especially in plastids, of a non-human organism or a part thereof, preferably a microorganism, a plant cell, a plant or a part thereof, as compared to a corresponding non-transformed wild type non-human organism or a part thereof; and
[18706] (b) growing the non-human organism or a part thereof under conditions which permit the production of asparagine or a composition comprising asparagine in said non-human organism or in the culture medium surrounding said non-human organism.

[18707] A further embodiment of the present invention relates to a process for the production of aspartate, which comprises
[18708] (a) increasing or generating one or more activities selected from the group consisting of b1522-protein in an organelle, preferably in plastids or mitochondria, especially in plastids, of a non-human organism or a part thereof, preferably a microorganism, a plant cell, a plant or a part thereof, as compared to a corresponding non-transformed wild type non-human organism or a part thereof; and
[18709] (b) growing the non-human organism or a part thereof under conditions which permit the production of aspartate or a composition comprising aspartate in said non-human organism or in the culture medium surrounding said non-human organism.

[18710] A further embodiment of the present invention relates to a process for the production of phenylalanine, which comprises
[18711] (a) increasing or generating one or more activities selected from the group consisting of b1522-protein in an organelle, preferably in plastids or mitochondria, especially in plastids, of a non-human organism or a part thereof, preferably a microorganism, a plant cell, a plant or a part thereof, as compared to a corresponding non-transformed wild type non-human organism or a part thereof; and
[18712] (b) growing the non-human organism or a part thereof under conditions which permit the production of phenylalanine or a composition comprising phenylalanine in said non-human organism or in the culture medium surrounding said non-human organism.

[18713] A further embodiment of the present invention relates to a process for the production of serine, which comprises
[18714] (a) increasing or generating one or more activities selected from the group consisting of b1522-protein in an organelle, preferably in plastids or mitochondria, especially in plastids, of a non-human organism or a part thereof, preferably a microorganism, a plant cell, a plant or a part thereof, as compared to a corresponding non-transformed wild type non-human organism or a part thereof; and
[18715] (b) growing the non-human organism or a part thereof under conditions which permit the production of serine or a composition comprising serine in said non-human organism or in the culture medium surrounding said non-human organism.

[18716] A further embodiment of the present invention relates to a process for the production of tyrosine, which comprises
[18717] (a) increasing or generating one or more activities selected from the group consisting of b1522-protein in an organelle, preferably in plastids or mitochondria, especially in plastids, of a non-human organism or a part thereof, preferably a microorganism, a plant cell, a plant or a part thereof, as compared to a corresponding non-transformed wild type non-human organism or a part thereof; and
[18718] (b) growing the non-human organism or a part thereof under conditions which permit the production of tyrosine or a composition comprising tyrosine in said non-human organism or in the culture medium surrounding said non-human organism.

[18719] A further embodiment of the present invention relates to a process for the production of 5-oxoproline, which comprises
[18720] (a) increasing or generating one or more activities selected from the group consisting of b1522-protein in an organelle, preferably in plastids or mitochondria, especially in plastids, of a non-human organism or a part thereof, preferably a microorganism, a plant cell, a plant or a part thereof, as compared to a corresponding non-transformed wild type non-human organism or a part thereof; and
[18721] (b) growing the non-human organism or a part thereof under conditions which permit the production of 5-oxoproline or a composition comprising 5-oxoproline in said non-human organism or in the culture medium surrounding said non-human organism.

[18722] A further embodiment of the present invention relates to a process for the production of tyrosine, which comprises
[18723] (a) increasing or generating one or more activities selected from the group consisting of b1583-protein in an organelle, preferably in plastids or mitochondria, especially in plastids, of a non-human organism or a part thereof, preferably a microorganism, a plant cell, a plant or a part thereof, as compared to a corresponding non-transformed wild type non-human organism or a part thereof; and
[18724] (b) growing the non-human organism or a part thereof under conditions which permit the production of tyrosine or a composition comprising tyrosine in said non-human organism or in the culture medium surrounding said non-human organism.

[18725] A further embodiment of the present invention relates to a process for the production of aspartate, which comprises
[18726] (a) increasing or generating one or more activities selected from the group consisting of Fe—S subunit of oxidoreductase in an organelle, preferably in plastids or mitochondria, especially in plastids, of a non-human organism or a part thereof, preferably a microorganism, a plant cell, a plant or a part thereof, as compared to a corresponding non-transformed wild type non-human organism or a part thereof; and
[18727] (b) growing the non-human organism or a part thereof under conditions which permit the production of aspartate or a composition comprising aspartate in said non-human organism or in the culture medium surrounding said non-human organism.

[18728] A further embodiment of the present invention relates to a process for the production of phenylalanine, which comprises
[18729] (a) increasing or generating one or more activities selected from the group consisting of acid shock protein in an organelle, preferably in plastids or mitochondria, especially in plastids, of a non-human organism or a part thereof, preferably a microorganism, a plant cell, a plant or a part thereof, as compared to a corresponding non-transformed wild type non-human organism or a part thereof; and
[18730] (b) growing the non-human organism or a part thereof under conditions which permit the production of phenylalanine or a composition comprising phenylalanine in said non-human organism or in the culture medium surrounding said non-human organism.

[18731] A further embodiment of the present invention relates to a process for the production of tyrosine, which comprises
[18732] (a) increasing or generating one or more activities selected from the group consisting of acid shock protein in an organelle, preferably in plastids or mitochondria, especially in plastids, of a non-human organism or a part thereof, preferably a microorganism, a plant cell, a plant or a part thereof, as compared to a corresponding non-transformed wild type non-human organism or a part thereof; and
[18733] (b) growing the non-human organism or a part thereof under conditions which permit the production of tyrosine or a composition comprising tyrosine in said non-human organism or in the culture medium surrounding said non-human organism.

[18734] A further embodiment of the present invention relates to a process for the production of alanine, which comprises
[18735] (a) increasing or generating one or more activities selected from the group consisting of methylglyoxalase in an organelle, preferably in plastids or mitochondria, especially in plastids, of a non-human organism or a part thereof, preferably a microorganism, a plant cell, a plant or a part thereof, as compared to a corresponding non-transformed wild type non-human organism or a part thereof; and
[18736] (b) growing the non-human organism or a part thereof under conditions which permit the production of alanine or a composition comprising alanine in said non-human organism or in the culture medium surrounding said non-human organism.

[18737] A further embodiment of the present invention relates to a process for the production of aspartate, which comprises
[18738] (a) increasing or generating one or more activities selected from the group consisting of b1670-protein in an organelle, preferably in plastids or mitochondria, especially in plastids, of a non-human organism or a part thereof, preferably a microorganism, a plant cell, a plant or a part thereof, as compared to a corresponding non-transformed wild type non-human organism or a part thereof; and
[18739] (b) growing the non-human organism or a part thereof under conditions which permit the production of aspartate or a composition comprising aspartate in said non-human organism or in the culture medium surrounding said non-human organism.

[18740] A further embodiment of the present invention relates to a process for the production of aspartate, which comprises
[18741] (a) increasing or generating one or more activities selected from the group consisting of b1672-protein in an organelle, preferably in plastids or mitochondria, especially in plastids, of a non-human organism or a part thereof, preferably a microorganism, a plant cell, a plant or a part thereof, as compared to a corresponding non-transformed wild type non-human organism or a part thereof; and
[18742] (b) growing the non-human organism or a part thereof under conditions which permit the production of aspartate or a composition comprising aspartate in said non-human organism or in the culture medium surrounding said non-human organism.

[18743] A further embodiment of the present invention relates to a process for the production of alanine, which comprises
[18744] (a) increasing or generating one or more activities selected from the group consisting of arginine N-succinyltransferase in an organelle, preferably in plastids or mitochondria, especially in plastids, of a non-human organism or a part thereof, preferably a microorganism, a plant cell, a plant or a part thereof, as compared to a corresponding non-transformed wild type non-human organism or a part thereof; and
[18745] (b) growing the non-human organism or a part thereof under conditions which permit the production of alanine or a composition comprising alanine in said non-human organism or in the culture medium surrounding said non-human organism.

[18746] A further embodiment of the present invention relates to a process for the production of aspartate, which comprises
[18747] (a) increasing or generating one or more activities selected from the group consisting of ABC transporter permease protein in an organelle, preferably in plastids or mitochondria, especially in plastids, of a non-human organism or a part thereof, preferably a microorganism, a plant cell, a plant or a part thereof, as compared to a corresponding non-transformed wild type non-human organism or a part thereof; and
[18748] (b) growing the non-human organism or a part thereof under conditions which permit the production of aspartate or a composition comprising aspartate in said non-human organism or in the culture medium surrounding said non-human organism.

[18749] A further embodiment of the present invention relates to a process for the production of tyrosine, which comprises
[18750] (a) increasing or generating one or more activities selected from the group consisting of ABC transporter permease protein in an organelle, preferably in plastids or mitochondria, especially in plastids, of a non-human organism or a part thereof, preferably a microorganism, a plant cell, a plant or a part thereof, as compared to a corresponding non-transformed wild type non-human organism or a part thereof; and
[18751] (b) growing the non-human organism or a part thereof under conditions which permit the production of tyrosine or a composition comprising tyrosine in said non-human organism or in the culture medium surrounding said non-human organism.

[18752] A further embodiment of the present invention relates to a process for the production of aspartate, which comprises
[18753] (a) increasing or generating one or more activities selected from the group consisting of transport protein in an organelle, preferably in plastids or mitochondria, especially in plastids, of a non-human organism or a part thereof, preferably a microorganism, a plant cell, a plant or a part thereof, as compared to a corresponding non-transformed wild type non-human organism or a part thereof; and
[18754] (b) growing the non-human organism or a part thereof under conditions which permit the production of aspartate or a composition comprising aspartate in said non-human organism or in the culture medium surrounding said non-human organism.

[18755] A further embodiment of the present invention relates to a process for the production of aspartate, which comprises
[18756] (a) increasing or generating one or more activities selected from the group consisting of b1837-protein in an organelle, preferably in plastids or mitochondria, especially in plastids, of a non-human organism or a part thereof, preferably a microorganism, a plant cell, a plant or a part thereof, as compared to a corresponding non-transformed wild type non-human organism or a part thereof; and
[18757] (b) growing the non-human organism or a part thereof under conditions which permit the production of aspartate or a composition comprising aspartate in said non-human organism or in the culture medium surrounding said non-human organism.

[18758] A further embodiment of the present invention relates to a process for the production of aspartate, which comprises
[18759] (a) increasing or generating one or more activities selected from the group consisting of serine/threonine-protein phosphatase in an organelle, preferably in plastids or mitochondria, especially in plastids, of a non-human organism or a part thereof, preferably a microorganism, a plant cell, a plant or a part thereof, as compared to a corresponding non-transformed wild type non-human organism or a part thereof; and
[18760] (b) growing the non-human organism or a part thereof under conditions which permit the production of aspartate or a composition comprising aspartate in said non-human organism or in the culture medium surrounding said non-human organism.

[18761] A further embodiment of the present invention relates to a process for the production of aspartate, which comprises
[18762] (a) increasing or generating one or more activities selected from the group consisting of protease in an organelle, preferably in plastids or mitochondria, especially in plastids, of a non-human organism or a part thereof, preferably a microorganism, a plant cell, a plant or a part thereof, as compared to a corresponding non-transformed wild type non-human organism or a part thereof; and
[18763] (b) growing the non-human organism or a part thereof under conditions which permit the production of aspartate or a composition comprising aspartate in said non-human organism or in the culture medium surrounding said non-human organism.

[18764] A further embodiment of the present invention relates to a process for the production of serine, which comprises
[18765] (a) increasing or generating one or more activities selected from the group consisting of protease in an organelle, preferably in plastids or mitochondria, especially in plastids, of a non-human organism or a part thereof, preferably a microorganism, a plant cell, a plant or a part thereof, as compared to a corresponding non-transformed wild type non-human organism or a part thereof; and
[18766] (b) growing the non-human organism or a part thereof under conditions which permit the production of serine or a composition comprising serine in said non-human organism or in the culture medium surrounding said non-human organism.

[18767] A further embodiment of the present invention relates to a process for the production of asparagine, which comprises
[18768] (a) increasing or generating one or more activities selected from the group consisting of pyruvate kinase in an organelle, preferably in plastids or mitochondria, especially in plastids, of a non-human organism or a part thereof, preferably a microorganism, a plant cell, a plant or a part thereof, as compared to a corresponding non-transformed wild type non-human organism or a part thereof; and
[18769] (b) growing the non-human organism or a part thereof under conditions which permit the production of asparagine or a composition comprising asparagine in said non-human organism or in the culture medium surrounding said non-human organism.

[18770] A further embodiment of the present invention relates to a process for the production of tyrosine, which comprises
[18771] (a) increasing or generating one or more activities selected from the group consisting of cytochrome c-type protein in an organelle, preferably in plastids or mitochondria, especially in plastids, of a non-human organism or a part thereof, preferably a microorganism, a plant cell, a plant or a part thereof, as compared to a corresponding non-transformed wild type non-human organism or a part thereof; and
[18772] (b) growing the non-human organism or a part thereof under conditions which permit the production of tyrosine or a composition comprising tyrosine in said non-human organism or in the culture medium surrounding said non-human organism.

[18773] A further embodiment of the present invention relates to a process for the production of phenylalanine, which comprises
[18774] (a) increasing or generating one or more activities selected from the group consisting of trehalose-phosphatase in an organelle, preferably in plastids or mitochondria, especially in plastids, of a non-human organism or a part thereof, preferably a microorganism, a plant cell, a plant or a part thereof, as compared to a corresponding non-transformed wild type non-human organism or a part thereof; and
[18775] (b) growing the non-human organism or a part thereof under conditions which permit the production of phenylalanine or a composition comprising phenylalanine in said non-human organism or in the culture medium surrounding said non-human organism.

[18776] A further embodiment of the present invention relates to a process for the production of tyrosine, which comprises
[18777] (a) increasing or generating one or more activities selected from the group consisting of trehalose-phosphatase in an organelle, preferably in plastids or mitochondria, especially in plastids, of a non-human organism or a part thereof, preferably a microorganism, a plant cell, a plant or a part thereof, as compared to a corresponding non-transformed wild type non-human organism or a part thereof; and
[18778] (b) growing the non-human organism or a part thereof under conditions which permit the production of tyrosine or a composition comprising tyrosine in said non-human organism or in the culture medium surrounding said non-human organism.

[18779] A further embodiment of the present invention relates to a process for the production of serine, which comprises
[18780] (a) increasing or generating one or more activities selected from the group consisting of b1898-protein in an organelle, preferably in plastids or mitochondria, especially in plastids, of a non-human organism or a part thereof, preferably a microorganism, a plant cell, a plant or a part thereof, as compared to a corresponding non-transformed wild type non-human organism or a part thereof; and
[18781] (b) growing the non-human organism or a part thereof under conditions which permit the production of serine or a composition comprising serine in said non-human organism or in the culture medium surrounding said non-human organism.

[18782] A further embodiment of the present invention relates to a process for the production of serine, which comprises
[18783] (a) increasing or generating one or more activities selected from the group consisting of b1930-protein in an organelle, preferably in plastids or mitochondria, especially in plastids, of a non-human organism or a part thereof, preferably a microorganism, a plant cell, a plant or a part thereof, as compared to a corresponding non-transformed wild type non-human organism or a part thereof; and
[18784] (b) growing the non-human organism or a part thereof under conditions which permit the production of serine or a composition comprising serine in said non-human organism or in the culture medium surrounding said non-human organism.

[18785] A further embodiment of the present invention relates to a process for the production of aspartate, which comprises
[18786] (a) increasing or generating one or more activities selected from the group consisting of transport protein in an organelle, preferably in plastids or mitochondria, especially in plastids, of a non-human organism or a part thereof, preferably a microorganism, a plant cell, a plant or a part thereof, as compared to a corresponding non-transformed wild type non-human organism or a part thereof; and
[18787] (b) growing the non-human organism or a part thereof under conditions which permit the production of aspartate or a composition comprising aspartate in said non-human organism or in the culture medium surrounding said non-human organism.

[18788] A further embodiment of the present invention relates to a process for the production of tyrosine, which comprises
[18789] (a) increasing or generating one or more activities selected from the group consisting of O-antigen chain length determinant in an organelle, preferably in plastids or mitochondria, especially in plastids, of a non-human organism or a part thereof, preferably a microorganism, a plant cell, a plant or a part thereof, as compared to a corresponding non-transformed wild type non-human organism or a part thereof; and
[18790] (b) growing the non-human organism or a part thereof under conditions which permit the production of tyrosine or a composition comprising tyrosine in said non-human organism or in the culture medium surrounding said non-human organism.

[18791] A further embodiment of the present invention relates to a process for the production of aspartate, which comprises
[18792] (a) increasing or generating one or more activities selected from the group consisting of b2032-protein in an organelle, preferably in plastids or mitochondria, especially in plastids, of a non-human organism or a part thereof, preferably a microorganism, a plant cell, a plant or a part thereof, as compared to a corresponding non-transformed wild type non-human organism or a part thereof; and
[18793] (b) growing the non-human organism or a part thereof under conditions which permit the production of aspartate or a composition comprising aspartate in said non-human organism or in the culture medium surrounding said non-human organism.

[18794] A further embodiment of the present invention relates to a process for the production of aspartate, which comprises
[18795] (a) increasing or generating one or more activities selected from the group consisting of transport protein in an organelle, preferably in plastids or mitochondria, especially in plastids, of a non-human organism or a part thereof, preferably a microorganism, a plant cell, a plant or a part thereof, as compared to a corresponding non-transformed wild type non-human organism or a part thereof; and
[18796] (b) growing the non-human organism or a part thereof under conditions which permit the production of aspartate or a composition comprising aspartate in said non-human organism or in the culture medium surrounding said non-human organism.

[18797] A further embodiment of the present invention relates to a process for the production of phenylalanine, which comprises
[18798] (a) increasing or generating one or more activities selected from the group consisting of transport protein in an organelle, preferably in plastids or mitochondria, especially in plastids, of a non-human organism or a part thereof, preferably a microorganism, a plant cell, a plant or a part thereof, as compared to a corresponding non-transformed wild type non-human organism or a part thereof; and
[18799] (b) growing the non-human organism or a part thereof under conditions which permit the production of phenylalanine or a composition comprising phenylalanine in said non-human organism or in the culture medium surrounding said non-human organism.

[18800] A further embodiment of the present invention relates to a process for the production of serine, which comprises
[18801] (a) increasing or generating one or more activities selected from the group consisting of transport protein in an organelle, preferably in plastids or mitochondria, especially in plastids, of a non-human organism or a part thereof, preferably a microorganism, a plant cell, a plant or a part thereof, as compared to a corresponding non-transformed wild type non-human organism or a part thereof; and
[18802] (b) growing the non-human organism or a part thereof under conditions which permit the production of serine or a composition comprising serine in said non-human organism or in the culture medium surrounding said non-human organism.

[18803] A further embodiment of the present invention relates to a process for the production of tyrosine, which comprises
[18804] (a) increasing or generating one or more activities selected from the group consisting of transport protein in an organelle, preferably in plastids or mitochondria, especially in plastids, of a non-human organism or a part thereof, preferably a microorganism, a plant cell, a plant or a part thereof, as compared to a corresponding non-transformed wild type non-human organism or a part thereof; and
[18805] (b) growing the non-human organism or a part thereof under conditions which permit the production of tyrosine or a composition comprising tyrosine in said non-human organism or in the culture medium surrounding said non-human organism.

[18806] A further embodiment of the present invention relates to a process for the production of 5-oxoproline, which comprises
[18807] (a) increasing or generating one or more activities selected from the group consisting of uridine/cytidine kinase in an organelle, preferably in plastids or mitochondria, especially in plastids, of a non-human organism or a part thereof, preferably a microorganism, a plant cell, a plant or a part thereof, as compared to a corresponding non-transformed wild type non-human organism or a part thereof; and
[18808] (b) growing the non-human organism or a part thereof under conditions which permit the production of 5-oxoproline or a composition comprising 5-oxoproline in said non-human organism or in the culture medium surrounding said non-human organism.

[18809] A further embodiment of the present invention relates to a process for the production of aspartate, which comprises
[18810] (a) increasing or generating one or more activities selected from the group consisting of b2107-protein in an organelle, preferably in plastids or mitochondria, especially in plastids, of a non-human organism or a part thereof, preferably a microorganism, a plant cell, a plant or a part thereof, as compared to a corresponding non-transformed wild type non-human organism or a part thereof; and
[18811] (b) growing the non-human organism or a part thereof under conditions which permit the production of aspartate or a composition comprising aspartate in said non-human organism or in the culture medium surrounding said non-human organism.

[18812] A further embodiment of the present invention relates to a process for the production of aspartate, which comprises
[18813] (a) increasing or generating one or more activities selected from the group consisting of ABC transporter permease protein in an organelle, preferably in plastids or mitochondria, especially in plastids, of a non-human organism or a part thereof, preferably a microorganism, a plant cell, a plant or a part thereof, as compared to a corresponding non-transformed wild type non-human organism or a part thereof; and
[18814] (b) growing the non-human organism or a part thereof under conditions which permit the production of aspartate or a composition comprising aspartate in said non-human organism or in the culture medium surrounding said non-human organism.

[18815] A further embodiment of the present invention relates to a process for the production of citrulline, which comprises
[18816] (a) increasing or generating one or more activities selected from the group consisting of ABC transporter permease protein in an organelle, preferably in plastids or mitochondria, especially in plastids, of a non-human organism or a part thereof, preferably a microorganism, a plant cell, a plant or a part thereof, as compared to a corresponding non-transformed wild type non-human organism or a part thereof; and
[18817] (b) growing the non-human organism or a part thereof under conditions which permit the production of citrulline or a composition comprising citrulline in said non-human organism or in the culture medium surrounding said non-human organism.

[18818] A further embodiment of the present invention relates to a process for the production of phenylalanine, which comprises
[18819] (a) increasing or generating one or more activities selected from the group consisting of ABC transporter permease protein in an organelle, preferably in plastids or mitochondria, especially in plastids, of a non-human organism or a part thereof, preferably a microorganism, a plant cell, a plant or a part thereof, as compared to a corresponding non-transformed wild type non-human organism or a part thereof; and
[18820] (b) growing the non-human organism or a part thereof under conditions which permit the production of phenylalanine or a composition comprising phenylalanine in said non-human organism or in the culture medium surrounding said non-human organism.

[18821] A further embodiment of the present invention relates to a process for the production of serine, which comprises
[18822] (a) increasing or generating one or more activities selected from the group consisting of ABC transporter permease protein in an organelle, preferably in plastids or mitochondria, especially in plastids, of a non-human organism or a part thereof, preferably a microorganism, a plant cell, a plant or a part thereof, as compared to a corresponding non-transformed wild type non-human organism or a part thereof; and
[18823] (b) growing the non-human organism or a part thereof under conditions which permit the production of serine or a composition comprising serine in said non-human organism or in the culture medium surrounding said non-human organism.

[18824] A further embodiment of the present invention relates to a process for the production of tyrosine, which comprises
[18825] (a) increasing or generating one or more activities selected from the group consisting of ABC transporter permease protein in an organelle, preferably in plastids or mitochondria, especially in plastids, of a non-human organism or a part thereof, preferably a microorganism, a plant cell, a plant or a part thereof, as compared to a corresponding non-transformed wild type non-human organism or a part thereof; and
[18826] (b) growing the non-human organism or a part thereof under conditions which permit the production of tyrosine or a composition comprising tyrosine in said non-human organism or in the culture medium surrounding said non-human organism.

[18827] A further embodiment of the present invention relates to a process for the production of glycine, which comprises
[18828] (a) increasing or generating one or more activities selected from the group consisting of sn-glycerol-3-phosphate dehydrogenase in an organelle, preferably in plastids or mitochondria, especially in plastids, of a non-human organism or a part thereof, preferably a microorganism, a plant cell, a plant or a part thereof, as compared to a corresponding non-transformed wild type non-human organism or a part thereof; and
[18829] (b) growing the non-human organism or a part thereof under conditions which permit the production of glycine or a composition comprising glycine in said non-human organism or in the culture medium surrounding said non-human organism.

[18830] A further embodiment of the present invention relates to a process for the production of asparagine, which comprises
[18831] (a) increasing or generating one or more activities selected from the group consisting of NADH dehydrogenase I chain I in an organelle, preferably in plastids or mitochondria, especially in plastids, of a non-human organism or a part thereof, preferably a microorganism, a plant cell, a plant or a part thereof, as compared to a corresponding non-transformed wild type non-human organism or a part thereof; and
[18832] (b) growing the non-human organism or a part thereof under conditions which permit the production of asparagine or a composition comprising asparagine in said non-human organism or in the culture medium surrounding said non-human organism.

[18833] A further embodiment of the present invention relates to a process for the production of aspartate, which comprises
[18834] (a) increasing or generating one or more activities selected from the group consisting of b2360-protein in an organelle, preferably in plastids or mitochondria, especially in plastids, of a non-human organism or a part thereof, preferably a microorganism, a plant cell, a plant or a part thereof, as compared to a corresponding non-transformed wild type non-human organism or a part thereof; and
[18835] (b) growing the non-human organism or a part thereof under conditions which permit the production of aspartate or a composition comprising aspartate in said non-human organism or in the culture medium surrounding said non-human organism.

[18836] A further embodiment of the present invention relates to a process for the production of serine, which comprises
[18837] (a) increasing or generating one or more activities selected from the group consisting of D-serine dehydratase in an organelle, preferably in plastids or mitochondria, especially in plastids, of a non-human organism or a part thereof, preferably a microorganism, a plant cell, a plant or a part thereof, as compared to a corresponding non-transformed wild type non-human organism or a part thereof; and
[18838] (b) growing the non-human organism or a part thereof under conditions which permit the production of serine or a composition comprising serine in said non-human organism or in the culture medium surrounding said non-human organism.

[18839] A further embodiment of the present invention relates to a process for the production of tyrosine, which comprises
[18840] (a) increasing or generating one or more activities selected from the group consisting of b2399-protein in an organelle, preferably in plastids or mitochondria, especially in plastids, of a non-human organism or a part thereof, preferably a microorganism, a plant cell, a plant or a part thereof, as compared to a corresponding non-transformed wild type non-human organism or a part thereof; and
[18841] (b) growing the non-human organism or a part thereof under conditions which permit the production of tyrosine or a composition comprising tyrosine in said non-human organism or in the culture medium surrounding said non-human organism.

[18842] A further embodiment of the present invention relates to a process for the production of 3,4-dihydroxyphenylalanine (dopa), which comprises
[18843] (a) increasing or generating one or more activities selected from the group consisting of b2399-protein in an organelle, preferably in plastids or mitochondria, especially in plastids, of a non-human organism or a part thereof, preferably a microorganism, a plant cell, a plant or a part thereof, as compared to a corresponding non-transformed wild type non-human organism or a part thereof; and
[18844] (b) growing the non-human organism or a part thereof under conditions which permit the production of 3,4-dihydroxyphenylalanine (dopa) or a composition comprising 3,4-dihydroxyphenylalanine (dopa) in said non-human organism or in the culture medium surrounding said non-human organism.

[18845] A further embodiment of the present invention relates to a process for the production of 5-oxoproline, which comprises
[18846] (a) increasing or generating one or more activities selected from the group consisting of b2399-protein in an organelle, preferably in plastids or mitochondria, especially in plastids, of a non-human organism or a part thereof, preferably a microorganism, a plant cell, a plant or a part thereof, as compared to a corresponding non-transformed wild type non-human organism or a part thereof; and
[18847] (b) growing the non-human organism or a part thereof under conditions which permit the production of 5-oxoproline or a composition comprising 5-oxoproline in said non-human organism or in the culture medium surrounding said non-human organism.

[18848] A further embodiment of the present invention relates to a process for the production of alanine, which comprises
[18849] (a) increasing or generating one or more activities selected from the group consisting of transcriptional regulator in an organelle, preferably in plastids or mitochondria, especially in plastids, of a non-human organism or a part thereof, preferably a microorganism, a plant cell, a plant or a part thereof, as compared to a corresponding non-transformed wild type non-human organism or a part thereof; and
[18850] (b) growing the non-human organism or a part thereof under conditions which permit the production of alanine or a composition comprising alanine in said non-human organism or in the culture medium surrounding said non-human organism.

[18851] A further embodiment of the present invention relates to a process for the production of aspartate, which comprises
[18852] (a) increasing or generating one or more activities selected from the group consisting of transcriptional regulator in an organelle, preferably in plastids or mitochondria, especially in plastids, of a non-human organism or a part thereof, preferably a microorganism, a plant cell, a plant or a part thereof, as compared to a corresponding non-transformed wild type non-human organism or a part thereof; and
[18853] (b) growing the non-human organism or a part thereof under conditions which permit the production of aspartate or a composition comprising aspartate in said non-human organism or in the culture medium surrounding said non-human organism.

[18854] A further embodiment of the present invention relates to a process for the production of phenylalanine, which comprises
[18855] (a) increasing or generating one or more activities selected from the group consisting of PTS system N-acetylmuramic acid-specific EIIBC component in an organelle, preferably in plastids or mitochondria, especially in plastids, of a non-human organism or a part thereof, preferably a microorganism, a plant cell, a plant or a part thereof, as compared to a corresponding non-transformed wild type non-human organism or a part thereof; and
[18856] (b) growing the non-human organism or a part thereof under conditions which permit the production of phenylalanine or a composition comprising phenylalanine in said non-human organism or in the culture medium surrounding said non-human organism.

[18857] A further embodiment of the present invention relates to a process for the production of citrulline, which comprises
[18858] (a) increasing or generating one or more activities selected from the group consisting of b2474-protein in an organelle, preferably in plastids or mitochondria, especially in plastids, of a non-human organism or a part thereof, preferably a microorganism, a plant cell, a plant or a part thereof, as compared to a corresponding non-transformed wild type non-human organism or a part thereof; and
[18859] (b) growing the non-human organism or a part thereof under conditions which permit the production of citrulline or a composition comprising citrulline in said non-human organism or in the culture medium surrounding said non-human organism.

[18860] A further embodiment of the present invention relates to a process for the production of glycine, which comprises
[18861] (a) increasing or generating one or more activities selected from the group consisting of b2474-protein in an organelle, preferably in plastids or mitochondria, especially in plastids, of a non-human organism or a part thereof, preferably a microorganism, a plant cell, a plant or a part thereof, as compared to a corresponding non-transformed wild type non-human organism or a part thereof; and
[18862] (b) growing the non-human organism or a part thereof under conditions which permit the production of glycine or a composition comprising glycine in said non-human organism or in the culture medium surrounding said non-human organism.

[18863] A further embodiment of the present invention relates to a process for the production of serine, which comprises
[18864] (a) increasing or generating one or more activities selected from the group consisting of NADH dehydrogenase subunit N in an organelle, preferably in plastids or mitochondria, especially in plastids, of a non-human organism or a part thereof, preferably a microorganism, a plant cell, a plant or a part thereof, as compared to a corresponding non-transformed wild type non-human organism or a part thereof; and
[18865] (b) growing the non-human organism or a part thereof under conditions which permit the production of serine or a composition comprising serine in said non-human organism or in the culture medium surrounding said non-human organism.

[18866] A further embodiment of the present invention relates to a process for the production of 5-oxoproline, which comprises
[18867] (a) increasing or generating one or more activities selected from the group consisting of NADH dehydrogenase subunit N in an organelle, preferably in plastids or mitochondria, especially in plastids, of a non-human organism or a part thereof, preferably a microorganism, a plant cell, a plant or a part thereof, as compared to a corresponding non-transformed wild type non-human organism or a part thereof; and
[18868] (b) growing the non-human organism or a part thereof under conditions which permit the production of 5-oxoproline or a composition comprising 5-oxoproline in said non-human organism or in the culture medium surrounding said non-human organism.

[18869] A further embodiment of the present invention relates to a process for the production of phenylalanine, which comprises
[18870] (a) increasing or generating one or more activities selected from the group consisting of b2513-protein in an organelle, preferably in plastids or mitochondria, especially in plastids, of a non-human organism or a part thereof, preferably a microorganism, a plant cell, a plant or a part thereof, as compared to a corresponding non-transformed wild type non-human organism or a part thereof; and
[18871] (b) growing the non-human organism or a part thereof under conditions which permit the production of phenylalanine or a composition comprising phenylalanine in said non-human organism or in the culture medium surrounding said non-human organism.

[18872] A further embodiment of the present invention relates to a process for the production of tyrosine, which comprises
[18873] (a) increasing or generating one or more activities selected from the group consisting of b2513-protein in an organelle, preferably in plastids or mitochondria, especially in plastids, of a non-human organism or a part thereof, preferably a microorganism, a plant cell, a plant or a part thereof, as compared to a corresponding non-transformed wild type non-human organism or a part thereof; and
[18874] (b) growing the non-human organism or a part thereof under conditions which permit the production of tyrosine or a composition comprising tyrosine in said non-human organism or in the culture medium surrounding said non-human organism.

[18875] A further embodiment of the present invention relates to a process for the production of serine, which comprises
[18876] (a) increasing or generating one or more activities selected from the group consisting of serine hydroxymethyltransferase in an organelle, preferably in plastids or mitochondria, especially in plastids, of a non-human organism or a part thereof, preferably a microorganism, a plant cell, a plant or a part thereof, as compared to a corresponding non-transformed wild type non-human organism or a part thereof; and
[18877] (b) growing the non-human organism or a part thereof under conditions which permit the production of serine or a composition comprising serine in said non-human organism or in the culture medium surrounding said non-human organism.

[18878] A further embodiment of the present invention relates to a process for the production of phenylalanine, which comprises
[18879] (a) increasing or generating one or more activities selected from the group consisting of chorismate mutase-T and prephenate dehydrogenase in an organelle, preferably in plastids or mitochondria, especially in plastids, of a non-human organism or a part thereof, preferably a microorganism, a plant cell, a plant or a part thereof, as compared to a corresponding non-transformed wild type non-human organism or a part thereof; and
[18880] (b) growing the non-human organism or a part thereof under conditions which permit the production of phenylalanine or a composition comprising phenylalanine in said non-human organism or in the culture medium surrounding said non-human organism.

[18881] A further embodiment of the present invention relates to a process for the production of alanine, which comprises
[18882] (a) increasing or generating one or more activities selected from the group consisting of b2613-protein in an organelle, preferably in plastids or mitochondria, especially in plastids, of a non-human organism or a part thereof, preferably a microorganism, a plant cell, a plant or a part thereof, as compared to a corresponding non-transformed wild type non-human organism or a part thereof; and
[18883] (b) growing the non-human organism or a part thereof under conditions which permit the production of alanine or a composition comprising alanine in said non-human organism or in the culture medium surrounding said non-human organism.

[18884] A further embodiment of the present invention relates to a process for the production of phenylalanine, which comprises
[18885] (a) increasing or generating one or more activities selected from the group consisting of transcriptional regulator in an organelle, preferably in plastids or mitochondria, especially in plastids, of a non-human organism or a part thereof, preferably a microorganism, a plant cell, a plant or a part thereof, as compared to a corresponding non-transformed wild type non-human organism or a part thereof; and
[18886] (b) growing the non-human organism or a part thereof under conditions which permit the production of phenylalanine or a composition comprising phenylalanine in said non-human organism or in the culture medium surrounding said non-human organism.

[18887] A further embodiment of the present invention relates to a process for the production of tyrosine, which comprises
[18888] (a) increasing or generating one or more activities selected from the group consisting of transcriptional regulator in an organelle, preferably in plastids or mitochondria, especially in plastids, of a non-human organism or a part thereof, preferably a microorganism, a plant cell, a plant or a part thereof, as compared to a corresponding non-transformed wild type non-human organism or a part thereof; and
[18889] (b) growing the non-human organism or a part thereof under conditions which permit the production of tyrosine or a composition comprising tyrosine in said non-human organism or in the culture medium surrounding said non-human organism.

[18890] A further embodiment of the present invention relates to a process for the production of phenylalanine, which comprises
[18891] (a) increasing or generating one or more activities selected from the group consisting of b2673-protein in an organelle, preferably in plastids or mitochondria, especially in plastids, of a non-human organism or a part thereof, preferably a microorganism, a plant cell, a plant or a part thereof, as compared to a corresponding non-transformed wild type non-human organism or a part thereof; and
[18892] (b) growing the non-human organism or a part thereof under conditions which permit the production of phenylalanine or a composition comprising phenylalanine in said non-human organism or in the culture medium surrounding said non-human organism.

[18893] A further embodiment of the present invention relates to a process for the production of tyrosine, which comprises
[18894] (a) increasing or generating one or more activities selected from the group consisting of b2673-protein in an organelle, preferably in plastids or mitochondria, especially in plastids, of a non-human organism or a part thereof, preferably a microorganism, a plant cell, a plant or a part thereof, as compared to a corresponding non-transformed wild type non-human organism or a part thereof; and
[18895] (b) growing the non-human organism or a part thereof under conditions which permit the production of tyrosine or a composition comprising tyrosine in said non-human organism or in the culture medium surrounding said non-human organism.

[18896] A further embodiment of the present invention relates to a process for the production of aspartate, which comprises
[18897] (a) increasing or generating one or more activities selected from the group consisting of transport protein in an organelle, preferably in plastids or mitochondria, especially in plastids, of a non-human organism or a part thereof, preferably a microorganism, a plant cell, a plant or a part thereof, as compared to a corresponding non-transformed wild type non-human organism or a part thereof; and
[18898] (b) growing the non-human organism or a part thereof under conditions which permit the production of aspartate or a composition comprising aspartate in said non-human organism or in the culture medium surrounding said non-human organism.

[18899] A further embodiment of the present invention relates to a process for the production of alanine, which comprises
[18900] (a) increasing or generating one or more activities selected from the group consisting of murein transglycosylase in an organelle, preferably in plastids or mitochondria, especially in plastids, of a non-human organism or a part thereof, preferably a microorganism, a plant cell, a plant or a part thereof, as compared to a corresponding non-transformed wild type non-human organism or a part thereof; and
[18901] (b) growing the non-human organism or a part thereof under conditions which permit the production of alanine or a composition comprising alanine in said non-human organism or in the culture medium surrounding said non-human organism.

[18902] A further embodiment of the present invention relates to a process for the production of phenylalanine, which comprises
[18903] (a) increasing or generating one or more activities selected from the group consisting of murein transglycosylase in an organelle, preferably in plastids or mitochondria, especially in plastids, of a non-human organism or a part thereof, preferably a microorganism, a plant cell, a plant or a part thereof, as compared to a corresponding non-transformed wild type non-human organism or a part thereof; and
[18904] (b) growing the non-human organism or a part thereof under conditions which permit the production of phenylalanine or a composition comprising phenylalanine in said non-human organism or in the culture medium surrounding said non-human organism.

[18905] A further embodiment of the present invention relates to a process for the production of tyrosine, which comprises
[18906] (a) increasing or generating one or more activities selected from the group consisting of murein transglycosylase in an organelle, preferably in plastids or mitochondria, especially in plastids, of a non-human organism or a part thereof, preferably a microorganism, a plant cell, a plant or a part thereof, as compared to a corresponding non-transformed wild type non-human organism or a part thereof; and
[18907] (b) growing the non-human organism or a part thereof under conditions which permit the production of tyrosine or a composition comprising tyrosine in said non-human organism or in the culture medium surrounding said non-human organism.

[18908] A further embodiment of the present invention relates to a process for the production of alanine, which comprises
[18909] (a) increasing or generating one or more activities selected from the group consisting of transcriptional regulator in an organelle, preferably in plastids or mitochondria, especially in plastids, of a non-human organism or a part thereof, preferably a microorganism, a plant cell, a plant or a part thereof, as compared to a corresponding non-transformed wild type non-human organism or a part thereof; and
[18910] (b) growing the non-human organism or a part thereof under conditions which permit the production of alanine or a composition comprising alanine in said non-human organism or in the culture medium surrounding said non-human organism.

[18911] A further embodiment of the present invention relates to a process for the production of alanine, which comprises
[18912] (a) increasing or generating one or more activities selected from the group consisting of b2739-protein in an organelle, preferably in plastids or mitochondria, especially in plastids, of a non-human organism or a part thereof, preferably a microorganism, a plant cell, a plant or a part thereof, as compared to a corresponding non-transformed wild type non-human organism or a part thereof; and
[18913] (b) growing the non-human organism or a part thereof under conditions which permit the production of alanine or a composition comprising alanine in said non-human organism or in the culture medium surrounding said non-human organism.

[18914] A further embodiment of the present invention relates to a process for the production of phenylalanine, which comprises
[18915] (a) increasing or generating one or more activities selected from the group consisting of b2739-protein in an organelle, preferably in plastids or mitochondria, especially in plastids, of a non-human organism or a part thereof, preferably a microorganism, a plant cell, a plant or a part thereof, as compared to a corresponding non-transformed wild type non-human organism or a part thereof; and
[18916] (b) growing the non-human organism or a part thereof under conditions which permit the production of phenylalanine or a composition comprising phenylalanine in said non-human organism or in the culture medium surrounding said non-human organism.

[18917] A further embodiment of the present invention relates to a process for the production of tyrosine, which comprises
[18918] (a) increasing or generating one or more activities selected from the group consisting of b2739-protein in an organelle, preferably in plastids or mitochondria, especially in plastids, of a non-human organism or a part thereof, preferably a microorganism, a plant cell, a plant or a part thereof, as compared to a corresponding non-transformed wild type non-human organism or a part thereof; and
[18919] (b) growing the non-human organism or a part thereof under conditions which permit the production of tyrosine or a composition comprising tyrosine in said non-human organism or in the culture medium surrounding said non-human organism.

[18920] A further embodiment of the present invention relates to a process for the production of tyrosine, which comprises
[18921] (a) increasing or generating one or more activities selected from the group consisting of 2-C-methyl-D-erythritol 4-phosphate cytidylyltransferase in an organelle, preferably in plastids or mitochondria, especially in plastids, of a non-human organism or a part thereof, preferably a microorganism, a plant cell, a plant or a part thereof, as compared to a corresponding non-transformed wild type non-human organism or a part thereof; and
[18922] (b) growing the non-human organism or a part thereof under conditions which permit the production of tyrosine or a composition comprising tyrosine in said non-human organism or in the culture medium surrounding said non-human organism.

[18923] A further embodiment of the present invention relates to a process for the production of 5-oxoproline, which comprises
[18924] (a) increasing or generating one or more activities selected from the group consisting of 2-C-methyl-D-erythritol 4-phosphate cytidylyltransferase in an organelle, preferably in plastids or mitochondria, especially in plastids, of a non-human organism or a part thereof, preferably a microorganism, a plant cell, a plant or a part thereof, as compared to a corresponding non-transformed wild type non-human organism or a part thereof; and
[18925] (b) growing the non-human organism or a part thereof under conditions which permit the production of 5-oxoproline or a composition comprising 5-oxoproline in said non-human organism or in the culture medium surrounding said non-human organism.

[18926] A further embodiment of the present invention relates to a process for the production of phenylalanine, which comprises
[18927] (a) increasing or generating one or more activities selected from the group consisting of phosphoadenosine phosphosulfate reductase in an organelle, preferably in plastids or mitochondria, especially in plastids, of a non-human organism or a part thereof, preferably a microorganism, a plant cell, a plant or a part thereof, as compared to a corresponding non-transformed wild type non-human organism or a part thereof; and
[18928] (b) growing the non-human organism or a part thereof under conditions which permit the production of phenylalanine or a composition comprising phenylalanine in said non-human organism or in the culture medium surrounding said non-human organism.

[18929] A further embodiment of the present invention relates to a process for the production of phenylalanine, which comprises
[18930] (a) increasing or generating one or more activities selected from the group consisting of b2812-protein in an organelle, preferably in plastids or mitochondria, especially in plastids, of a non-human organism or a part thereof, preferably a microorganism, a plant cell, a plant or a part thereof, as compared to a corresponding non-transformed wild type non-human organism or a part thereof; and
[18931] (b) growing the non-human organism or a part thereof under conditions which permit the production of phenylalanine or a composition comprising phenylalanine in said non-human organism or in the culture medium surrounding said non-human organism.

[18932] A further embodiment of the present invention relates to a process for the production of serine, which comprises
[18933] (a) increasing or generating one or more activities selected from the group consisting of b2812-protein in an organelle, preferably in plastids or mitochondria, especially in plastids, of a non-human organism or a part thereof, preferably a microorganism, a plant cell, a plant or a part thereof, as compared to a corresponding non-transformed wild type non-human organism or a part thereof; and
[18934] (b) growing the non-human organism or a part thereof under conditions which permit the production of serine or a composition comprising serine in said non-human organism or in the culture medium surrounding said non-human organism.

[18935] A further embodiment of the present invention relates to a process for the production of tyrosine, which comprises
[18936] (a) increasing or generating one or more activities selected from the group consisting of b2812-protein in an organelle, preferably in plastids or mitochondria, especially in plastids, of a non-human organism or a part thereof, preferably a microorganism, a plant cell, a plant or a part thereof, as compared to a corresponding non-transformed wild type non-human organism or a part thereof; and
[18937] (b) growing the non-human organism or a part thereof under conditions which permit the production of tyrosine or a composition comprising tyrosine in said non-human organism or in the culture medium surrounding said non-human organism.

[18938] A further embodiment of the present invention relates to a process for the production of phenylalanine, which comprises
[18939] (a) increasing or generating one or more activities selected from the group consisting of amino-acid acetyltransferase in an organelle, preferably in plastids or mitochondria, especially in plastids, of a non-human organism or a part thereof, preferably a microorganism, a plant cell, a plant or a part thereof, as compared to a corresponding non-transformed wild type non-human organism or a part thereof; and
[18940] (b) growing the non-human organism or a part thereof under conditions which permit the production of phenylalanine or a composition comprising phenylalanine in said non-human organism or in the culture medium surrounding said non-human organism.

[18941] A further embodiment of the present invention relates to a process for the production of tyrosine, which comprises
[18942] (a) increasing or generating one or more activities selected from the group consisting of amino-acid acetyltransferase in an organelle, preferably in plastids or mitochondria, especially in plastids, of a non-human organism or a part thereof, preferably a microorganism, a plant cell, a plant or a part thereof, as compared to a corresponding non-transformed wild type non-human organism or a part thereof; and
[18943] (b) growing the non-human organism or a part thereof under conditions which permit the production of tyrosine or a composition comprising tyrosine in said non-human organism or in the culture medium surrounding said non-human organism.

[18944] A further embodiment of the present invention relates to a process for the production of 5-oxoproline, which comprises
[18945] (a) increasing or generating one or more activities selected from the group consisting of amino-acid acetyltransferase in an organelle, preferably in plastids or mitochondria, especially in plastids, of a non-human organism or a part thereof, preferably a microorganism, a plant cell, a plant or a part thereof, as compared to a corresponding non-transformed wild type non-human organism or a part thereof; and
[18946] (b) growing the non-human organism or a part thereof under conditions which permit the production of 5-oxoproline or a composition comprising 5-oxoproline in said non-human organism or in the culture medium surrounding said non-human organism.

[18947] A further embodiment of the present invention relates to a process for the production of aspartate, which comprises
[18948] (a) increasing or generating one or more activities selected from the group consisting of prolipoprotein diacylglyceryl transferase in an organelle, preferably in plastids or mitochondria, especially in plastids, of a non-human organism or a part thereof, preferably a microorganism, a plant cell, a plant or a part thereof, as compared to a corresponding non-transformed wild type non-human organism or a part thereof; and
[18949] (b) growing the non-human organism or a part thereof under conditions which permit the production of aspartate or a composition comprising aspartate in said non-human organism or in the culture medium surrounding said non-human organism.

[18950] A further embodiment of the present invention relates to a process for the production of tyrosine, which comprises
[18951] (a) increasing or generating one or more activities selected from the group consisting of transcriptional regulator in an organelle, preferably in plastids or mitochondria, especially in plastids, of a non-human organism or a part thereof, preferably a microorganism, a plant cell, a plant or a part thereof, as compared to a corresponding non-transformed wild type non-human organism or a part thereof; and
[18952] (b) growing the non-human organism or a part thereof under conditions which permit the production of tyrosine or a composition comprising tyrosine in said non-human organism or in the culture medium surrounding said non-human organism.

[18953] A further embodiment of the present invention relates to a process for the production of phenylalanine, which comprises
[18954] (a) increasing or generating one or more activities selected from the group consisting of b2849-protein in an organelle, preferably in plastids or mitochondria, especially in plastids, of a non-human organism or a part thereof, preferably a microorganism, a plant cell, a plant or a part thereof, as compared to a corresponding non-transformed wild type non-human organism or a part thereof; and
[18955] (b) growing the non-human organism or a part thereof under conditions which permit the production of phenylalanine or a composition comprising phenylalanine in said non-human organism or in the culture medium surrounding said non-human organism.

[18956] A further embodiment of the present invention relates to a process for the production of glycine, which comprises
[18957] (a) increasing or generating one or more activities selected from the group consisting of D-3-phosphoglycerate dehydrogenase in an organelle, preferably in plastids or mitochondria, especially in plastids, of a non-human organism or a part thereof, preferably a microorganism, a plant cell, a plant or a part thereof, as compared to a corresponding non-transformed wild type non-human organism or a part thereof; and
[18958] (b) growing the non-human organism or a part thereof under conditions which permit the production of glycine or a composition comprising glycine in said non-human organism or in the culture medium surrounding said non-human organism.

[18959] A further embodiment of the present invention relates to a process for the production of serine, which comprises
[18960] (a) increasing or generating one or more activities selected from the group consisting of D-3-phosphoglycerate dehydrogenase in an organelle, preferably in plastids or mitochondria, especially in plastids, of a non-human organism or a part thereof, preferably a microorganism, a plant cell, a plant or a part thereof, as compared to a corresponding non-transformed wild type non-human organism or a part thereof; and
[18961] (b) growing the non-human organism or a part thereof under conditions which permit the production of serine or a composition comprising serine in said non-human organism or in the culture medium surrounding said non-human organism.

[18962] A further embodiment of the present invention relates to a process for the production of aspartate, which comprises
[18963] (a) increasing or generating one or more activities selected from the group consisting of arginine exporter protein in an organelle, preferably in plastids or mitochondria, especially in plastids, of a non-human organism or a part thereof, preferably a microorganism, a plant cell, a plant or a part thereof, as compared to a corresponding non-transformed wild type non-human organism or a part thereof; and
[18964] (b) growing the non-human organism or a part thereof under conditions which permit the production of aspartate or a composition comprising aspartate in said non-human organism or in the culture medium surrounding said non-human organism.

[18965] A further embodiment of the present invention relates to a process for the production of asparagine, which comprises
[18966] (a) increasing or generating one or more activities selected from the group consisting of glycoprotease in an organelle, preferably in plastids or mitochondria, especially in plastids, of a non-human organism or a part thereof, preferably a microorganism, a plant cell, a plant or a part thereof, as compared to a corresponding non-transformed wild type non-human organism or a part thereof; and
[18967] (b) growing the non-human organism or a part thereof under conditions which permit the production of asparagine or a composition comprising asparagine in said non-human organism or in the culture medium surrounding said non-human organism.

[18968] A further embodiment of the present invention relates to a process for the production of phenylalanine, which comprises
[18969] (a) increasing or generating one or more activities selected from the group consisting of b3083-protein in an organelle, preferably in plastids or mitochondria, especially in plastids, of a non-human organism or a part thereof, preferably a microorganism, a plant cell, a plant or a part thereof, as compared to a corresponding non-transformed wild type non-human organism or a part thereof; and
[18970] (b) growing the non-human organism or a part thereof under conditions which permit the production of phenylalanine or a composition comprising phenylalanine in said non-human organism or in the culture medium surrounding said non-human organism.

[18971] A further embodiment of the present invention relates to a process for the production of serine, which comprises
[18972] (a) increasing or generating one or more activities selected from the group consisting of b3083-protein in an organelle, preferably in plastids or mitochondria, especially in plastids, of a non-human organism or a part thereof, preferably a microorganism, a plant cell, a plant or a part thereof, as compared to a corresponding non-transformed wild type non-human organism or a part thereof; and
[18973] (b) growing the non-human organism or a part thereof under conditions which permit the production of serine or a composition comprising serine in said non-human organism or in the culture medium surrounding said non-human organism.

[18974] A further embodiment of the present invention relates to a process for the production of tyrosine, which comprises
[18975] (a) increasing or generating one or more activities selected from the group consisting of b3083-protein in an organelle, preferably in plastids or mitochondria, especially in plastids, of a non-human organism or a part thereof, preferably a microorganism, a plant cell, a plant or a part thereof, as compared to a corresponding non-transformed wild type non-human organism or a part thereof; and
[18976] (b) growing the non-human organism or a part thereof under conditions which permit the production of tyrosine or a composition comprising tyrosine in said non-human organism or in the culture medium surrounding said non-human organism.

[18977] A further embodiment of the present invention relates to a process for the production of alanine, which comprises
[18978] (a) increasing or generating one or more activities selected from the group consisting of b3098-protein in an organelle, preferably in plastids or mitochondria, especially in plastids, of a non-human organism or a part thereof, preferably a microorganism, a plant cell, a plant or a part thereof, as compared to a corresponding non-transformed wild type non-human organism or a part thereof; and
[18979] (b) growing the non-human organism or a part thereof under conditions which permit the production of alanine or a composition comprising alanine in said non-human organism or in the culture medium surrounding said non-human organism.

[18980] A further embodiment of the present invention relates to a process for the production of glycine, which comprises
[18981] (a) increasing or generating one or more activities selected from the group consisting of b3098-protein in an organelle, preferably in plastids or mitochondria, especially in plastids, of a non-human organism or a part thereof, preferably a microorganism, a plant cell, a plant or a part thereof, as compared to a corresponding non-transformed wild type non-human organism or a part thereof; and
[18982] (b) growing the non-human organism or a part thereof under conditions which permit the production of glycine or a composition comprising glycine in said non-human organism or in the culture medium surrounding said non-human organism.

[18983] A further embodiment of the present invention relates to a process for the production of tyrosine, which comprises
[18984] (a) increasing or generating one or more activities selected from the group consisting of b3121-protein in an organelle, preferably in plastids or mitochondria, especially in plastids, of a non-human organism or a part thereof, preferably a microorganism, a plant cell, a plant or a part thereof, as compared to a corresponding non-transformed wild type non-human organism or a part thereof; and
[18985] (b) growing the non-human organism or a part thereof under conditions which permit the production of tyrosine or a composition comprising tyrosine in said non-human organism or in the culture medium surrounding said non-human organism.

[18986] A further embodiment of the present invention relates to a process for the production of tyrosine, which comprises
[18987] (a) increasing or generating one or more activities selected from the group consisting of b3221-protein in an organelle, preferably in plastids or mitochondria, especially in plastids, of a non-human organism or a part thereof, preferably a microorganism, a plant cell, a plant or a part thereof, as compared to a corresponding non-transformed wild type non-human organism or a part thereof; and
[18988] (b) growing the non-human organism or a part thereof under conditions which permit the production of tyrosine or a composition comprising tyrosine in said non-human organism or in the culture medium surrounding said non-human organism.

[18989] A further embodiment of the present invention relates to a process for the production of serine, which comprises
[18990] (a) increasing or generating one or more activities selected from the group consisting of b3246-protein in an organelle, preferably in plastids or mitochondria, especially in plastids, of a non-human organism or a part thereof, preferably a microorganism, a plant cell, a plant or a part thereof, as compared to a corresponding non-transformed wild type non-human organism or a part thereof; and
[18991] (b) growing the non-human organism or a part thereof under conditions which permit the production of serine or a composition comprising serine in said non-human organism or in the culture medium surrounding said non-human organism.

[18992] A further embodiment of the present invention relates to a process for the production of 5-oxoproline, which comprises
[18993] (a) increasing or generating one or more activities selected from the group consisting of b3246-protein in an organelle, preferably in plastids or mitochondria, especially in plastids, of a non-human organism or a part thereof, preferably a microorganism, a plant cell, a plant or a part thereof, as compared to a corresponding non-transformed wild type non-human organism or a part thereof; and
[18994] (b) growing the non-human organism or a part thereof under conditions which permit the production of 5-oxoproline or a composition comprising 5-oxoproline in said non-human organism or in the culture medium surrounding said non-human organism.

[18995] A further embodiment of the present invention relates to a process for the production of asparagine, which comprises
[18996] (a) increasing or generating one or more activities selected from the group consisting of acetyl CoA carboxylase in an organelle, preferably in plastids or mitochondria, especially in plastids, of a non-human organism or a part thereof, preferably a microorganism, a plant cell, a plant or a part thereof, as compared to a corresponding non-transformed wild type non-human organism or a part thereof; and
[18997] (b) growing the non-human organism or a part thereof under conditions which permit the production of asparagine or a composition comprising asparagine in said non-human organism or in the culture medium surrounding said non-human organism.

[18998] A further embodiment of the present invention relates to a process for the production of glycine, which comprises
[18999] (a) increasing or generating one or more activities selected from the group consisting of acetyl CoA carboxylase in an organelle, preferably in plastids or mitochondria, especially in plastids, of a non-human organism or a part thereof, preferably a microorganism, a plant cell, a plant or a part thereof, as compared to a corresponding non-transformed wild type non-human organism or a part thereof; and
[19000] (b) growing the non-human organism or a part thereof under conditions which permit the production of glycine or a composition comprising glycine in said non-human organism or in the culture medium surrounding said non-human organism.

[19001] A further embodiment of the present invention relates to a process for the production of serine, which comprises
[19002] (a) increasing or generating one or more activities selected from the group consisting of acetyl CoA carboxylase in an organelle, preferably in plastids or mitochondria, especially in plastids, of a non-human organism or a part thereof, preferably a microorganism, a plant cell, a plant or a part thereof, as compared to a corresponding non-transformed wild type non-human organism or a part thereof; and
[19003] (b) growing the non-human organism or a part thereof under conditions which permit the production of serine or a composition comprising serine in said non-human organism or in the culture medium surrounding said non-human organism.

[19004] A further embodiment of the present invention relates to a process for the production of 5-oxoproline, which comprises
[19005] (a) increasing or generating one or more activities selected from the group consisting of acetyl CoA carboxylase in an organelle, preferably in plastids or mitochondria, especially in plastids, of a non-human organism or a part thereof, preferably a microorganism, a plant cell, a plant or a part thereof, as compared to a corresponding non-transformed wild type non-human organism or a part thereof; and
[19006] (b) growing the non-human organism or a part thereof under conditions which permit the production of 5-oxoproline or a composition comprising 5-oxoproline in said non-human organism or in the culture medium surrounding said non-human organism.

[19007] A further embodiment of the present invention relates to a process for the production of alanine, which comprises
[19008] (a) increasing or generating one or more activities selected from the group consisting of methyltransferase in an organelle, preferably in plastids or mitochondria, especially in plastids, of a non-human organism or a part thereof, preferably a microorganism, a plant cell, a plant or a part thereof, as compared to a corresponding non-transformed wild type non-human organism or a part thereof; and
[19009] (b) growing the non-human organism or a part thereof under conditions which permit the production of alanine or a composition comprising alanine in said non-human organism or in the culture medium surrounding said non-human organism.

[19010] A further embodiment of the present invention relates to a process for the production of phenylalanine, which comprises
[19011] (a) increasing or generating one or more activities selected from the group consisting of methyltransferase in an organelle, preferably in plastids or mitochondria, especially in plastids, of a non-human organism or a part thereof, preferably a microorganism, a plant cell, a plant or a part thereof, as compared to a corresponding non-transformed wild type non-human organism or a part thereof; and
[19012] (b) growing the non-human organism or a part thereof under conditions which permit the production of phenylalanine or a composition comprising phenylalanine in said non-human organism or in the culture medium surrounding said non-human organism.

[19013] A further embodiment of the present invention relates to a process for the production of serine, which comprises
[19014] (a) increasing or generating one or more activities selected from the group consisting of methyltransferase in an organelle, preferably in plastids or mitochondria, especially in plastids, of a non-human organism or a part thereof, preferably a microorganism, a plant cell, a plant or a part thereof, as compared to a corresponding non-transformed wild type non-human organism or a part thereof; and
[19015] (b) growing the non-human organism or a part thereof under conditions which permit the production of serine or a composition comprising serine in said non-human organism or in the culture medium surrounding said non-human organism.

[19016] A further embodiment of the present invention relates to a process for the production of tyrosine, which comprises
[19017] (a) increasing or generating one or more activities selected from the group consisting of methyltransferase in an organelle, preferably in plastids or mitochondria, especially in plastids, of a non-human organism or a part thereof, preferably a microorganism, a plant cell, a plant or a part thereof, as compared to a corresponding non-transformed wild type non-human organism or a part thereof; and
[19018] (b) growing the non-human organism or a part thereof under conditions which permit the production of tyrosine or a composition comprising tyrosine in said non-human organism or in the culture medium surrounding said non-human organism.

[19019] A further embodiment of the present invention relates to a process for the production of 5-oxoproline, which comprises
[19020] (a) increasing or generating one or more activities selected from the group consisting of methyltransferase in an organelle, preferably in plastids or mitochondria, especially in plastids, of a non-human organism or a part thereof, preferably a microorganism, a plant cell, a plant or a part thereof, as compared to a corresponding non-transformed wild type non-human organism or a part thereof; and
[19021] (b) growing the non-human organism or a part thereof under conditions which permit the production of 5-oxoproline or a composition comprising 5-oxoproline in said non-human organism or in the culture medium surrounding said non-human organism.

[19022] A further embodiment of the present invention relates to a process for the production of alanine, which comprises
[19023] (a) increasing or generating one or more activities selected from the group consisting of b3346-protein in an organelle, preferably in plastids or mitochondria, especially in plastids, of a non-human organism or a part thereof, preferably a microorganism, a plant cell, a plant or a part thereof, as compared to a corresponding non-transformed wild type non-human organism or a part thereof; and
[19024] (b) growing the non-human organism or a part thereof under conditions which permit the production of alanine or a composition comprising alanine in said non-human organism or in the culture medium surrounding said non-human organism.

[19025] A further embodiment of the present invention relates to a process for the production of alanine, which comprises
[19026] (a) increasing or generating one or more activities selected from the group consisting of ABC transporter ATP-binding protein in an organelle, preferably in plastids or mitochondria, especially in plastids, of a non-human organism or a part thereof, preferably a microorganism, a plant cell, a plant or a part thereof, as compared to a corresponding non-transformed wild type non-human organism or a part thereof; and
[19027] (b) growing the non-human organism or a part thereof under conditions which permit the production of alanine or a composition comprising alanine in said non-human organism or in the culture medium surrounding said non-human organism.

[19028] A further embodiment of the present invention relates to a process for the production of glycine, which comprises
[19029] (a) increasing or generating one or more activities selected from the group consisting of ABC transporter ATP-binding protein in an organelle, preferably in plastids or mitochondria, especially in plastids, of a non-human organism or a part thereof, preferably a microorganism, a plant cell, a plant or a part thereof, as compared to a corresponding non-transformed wild type non-human organism or a part thereof; and
[19030] (b) growing the non-human organism or a part thereof under conditions which permit the production of glycine or a composition comprising glycine in said non-human organism or in the culture medium surrounding said non-human organism.

[19031] A further embodiment of the present invention relates to a process for the production of aspartate, which comprises
[19032] (a) increasing or generating one or more activities selected from the group consisting of b3392-protein in an organelle, preferably in plastids or mitochondria, especially in plastids, of a non-human organism or a part thereof, preferably a microorganism, a plant cell, a plant or a part thereof, as compared to a corresponding non-transformed wild type non-human organism or a part thereof; and
[19033] (b) growing the non-human organism or a part thereof under conditions which permit the production of aspartate or a composition comprising aspartate in said non-human organism or in the culture medium surrounding said non-human organism.

[19034] A further embodiment of the present invention relates to a process for the production of phenylalanine, which comprises
[19035] (a) increasing or generating one or more activities selected from the group consisting of phosphoenolpyruvate carboxykinase in an organelle, preferably in plastids or mitochondria, especially in plastids, of a non-human organism or a part thereof, preferably a microorganism, a plant cell, a plant or a part thereof, as compared to a corresponding non-transformed wild type non-human organism or a part thereof; and
[19036] (b) growing the non-human organism or a part thereof under conditions which permit the production of phenylalanine or a composition comprising phenylalanine in said non-human organism or in the culture medium surrounding said non-human organism.

[19037] A further embodiment of the present invention relates to a process for the production of serine, which comprises
[19038] (a) increasing or generating one or more activities selected from the group consisting of phosphoenolpyruvate carboxykinase in an organelle, preferably in plastids or mitochondria, especially in plastids, of a non-human organism or a part thereof, preferably a microorganism, a plant cell, a plant or a part thereof, as compared to a corresponding non-transformed wild type non-human organism or a part thereof; and
[19039] (b) growing the non-human organism or a part thereof under conditions which permit the production of serine or a composition comprising serine in said non-human organism or in the culture medium surrounding said non-human organism.

[19040] A further embodiment of the present invention relates to a process for the production of alanine, which comprises
[19041] (a) increasing or generating one or more activities selected from the group consisting of b3410-protein in an organelle, preferably in plastids or mitochondria, especially in plastids, of a non-human organism or a part thereof, preferably a microorganism, a plant cell, a plant or a part thereof, as compared to a corresponding non-transformed wild type non-human organism or a part thereof; and
[19042] (b) growing the non-human organism or a part thereof under conditions which permit the production of alanine or a composition comprising alanine in said non-human organism or in the culture medium surrounding said non-human organism.

[19043] A further embodiment of the present invention relates to a process for the production of serine, which comprises
[19044] (a) increasing or generating one or more activities selected from the group consisting of b3509-protein in an organelle, preferably in plastids or mitochondria, especially in plastids, of a non-human organism or a part thereof, preferably a microorganism, a plant cell, a plant or a part thereof, as compared to a corresponding non-transformed wild type non-human organism or a part thereof; and
[19045] (b) growing the non-human organism or a part thereof under conditions which permit the production of serine or a composition comprising serine in said non-human organism or in the culture medium surrounding said non-human organism.

[19046] A further embodiment of the present invention relates to a process for the production of aspartate, which comprises
[19047] (a) increasing or generating one or more activities selected from the group consisting of cellulose synthase catalytic subunit in an organelle, preferably in plastids or mitochondria, especially in plastids, of a non-human organism or a part thereof, preferably a microorganism, a plant cell, a plant or a part thereof, as compared to a corresponding non-transformed wild type non-human organism or a part thereof; and
[19048] (b) growing the non-human organism or a part thereof under conditions which permit the production of aspartate or a composition comprising aspartate in said non-human organism or in the culture medium surrounding said non-human organism.

[19049] A further embodiment of the present invention relates to a process for the production of phenylalanine, which comprises
[19050] (a) increasing or generating one or more activities selected from the group consisting of serine acetyltransferase in an organelle, preferably in plastids or mitochondria, especially in plastids, of a non-human organism or a part thereof, preferably a microorganism, a plant cell, a plant or a part thereof, as compared to a corresponding non-transformed wild type non-human organism or a part thereof; and
[19051] (b) growing the non-human organism or a part thereof under conditions which permit the production of phenylalanine or a composition comprising phenylalanine in said non-human organism or in the culture medium surrounding said non-human organism.

[19052] A further embodiment of the present invention relates to a process for the production of tyrosine, which comprises
[19053] (a) increasing or generating one or more activities selected from the group consisting of serine acetyltransferase in an organelle, preferably in plastids or mitochondria, especially in plastids, of a non-human organism or a part thereof, preferably a microorganism, a plant cell, a plant or a part thereof, as compared to a corresponding non-transformed wild type non-human organism or a part thereof; and
[19054] (b) growing the non-human organism or a part thereof under conditions which permit the production of tyrosine or a composition comprising tyrosine in said non-human organism or in the culture medium surrounding said non-human organism.

[19055] A further embodiment of the present invention relates to a process for the production of alanine, which comprises
[19056] (a) increasing or generating one or more activities selected from the group consisting of phosphopantetheine adenylyltransferase in an organelle, preferably in plastids or mitochondria, especially in plastids, of a non-human organism or a part thereof, preferably a microorganism, a plant cell, a plant or a part thereof, as compared to a corresponding non-transformed wild type non-human organism or a part thereof; and
[19057] (b) growing the non-human organism or a part thereof under conditions which permit the production of alanine or a composition comprising alanine in said non-human organism or in the culture medium surrounding said non-human organism.

[19058] A further embodiment of the present invention relates to a process for the production of asparagine, which comprises
[19059] (a) increasing or generating one or more activities selected from the group consisting of phosphopantetheine adenylyltransferase in an organelle, preferably in plastids or mitochondria, especially in plastids, of a non-human organism or a part thereof, preferably a microorganism, a plant cell, a plant or a part thereof, as compared to a corresponding non-transformed wild type non-human organism or a part thereof; and
[19060] (b) growing the non-human organism or a part thereof under conditions which permit the production of asparagine or a composition comprising asparagine in said non-human organism or in the culture medium surrounding said non-human organism.

[19061] A further embodiment of the present invention relates to a process for the production of phenylalanine, which comprises
[19062] (a) increasing or generating one or more activities selected from the group consisting of phosphopantetheine adenylyltransferase in an organelle, preferably in plastids or mitochondria, especially in plastids, of a non-human organism or a part thereof, preferably a microorganism, a plant cell, a plant or a part thereof, as compared to a corresponding non-transformed wild type non-human organism or a part thereof; and
[19063] (b) growing the non-human organism or a part thereof under conditions which permit the production of phenylalanine or a composition comprising phenylalanine in said non-human organism or in the culture medium surrounding said non-human organism.

[19064] A further embodiment of the present invention relates to a process for the production of glycine, which comprises
[19065] (a) increasing or generating one or more activities selected from the group consisting of b3646-protein in an organelle, preferably in plastids or mitochondria, especially in plastids, of a non-human organism or a part thereof, preferably a microorganism, a plant cell, a plant or a part thereof, as compared to a corresponding non-transformed wild type non-human organism or a part thereof; and
[19066] (b) growing the non-human organism or a part thereof under conditions which permit the production of glycine or a composition comprising glycine in said non-human organism or in the culture medium surrounding said non-human organism.

[19067] A further embodiment of the present invention relates to a process for the production of tyrosine, which comprises
[19068] (a) increasing or generating one or more activities selected from the group consisting of acetolactate synthase in an organelle, preferably in plastids or mitochondria, especially in plastids, of a non-human organism or a part thereof, preferably a microorganism, a plant cell, a plant or a part thereof, as compared to a corresponding non-transformed wild type non-human organism or a part thereof; and
[19069] (b) growing the non-human organism or a part thereof under conditions which permit the production of tyrosine or a composition comprising tyrosine in said non-human organism or in the culture medium surrounding said non-human organism.

[19070] A further embodiment of the present invention relates to a process for the production of asparagine, which comprises
[19071] (a) increasing or generating one or more activities selected from the group consisting of aspartate-ammonia ligase in an organelle, preferably in plastids or mitochondria, especially in plastids, of a non-human organism or a part thereof, preferably a microorganism, a plant cell, a plant or a part thereof, as compared to a corresponding non-transformed wild type non-human organism or a part thereof; and
[19072] (b) growing the non-human organism or a part thereof under conditions which permit the production of asparagine or a composition comprising asparagine in said non-human organism or in the culture medium surrounding said non-human organism.

[19073] A further embodiment of the present invention relates to a process for the production of glycine, which comprises
[19074] (a) increasing or generating one or more activities selected from the group consisting of dihydroxyacid dehydratase in an organelle, preferably in plastids or mitochondria, especially in plastids, of a non-human organism or a part thereof, preferably a microorganism, a plant cell, a plant or a part thereof, as compared to a corresponding non-transformed wild type non-human organism or a part thereof; and
[19075] (b) growing the non-human organism or a part thereof under conditions which permit the production of glycine or a composition comprising glycine in said non-human organism or in the culture medium surrounding said non-human organism.

[19076] A further embodiment of the present invention relates to a process for the production of phenylalanine, which comprises
[19077] (a) increasing or generating one or more activities selected from the group consisting of dihydroxyacid dehydratase in an organelle, preferably in plastids or mitochondria, especially in plastids, of a non-human organism or a part thereof, preferably a microorganism, a plant cell, a plant or a part thereof, as compared to a corresponding non-transformed wild type non-human organism or a part thereof; and
[19078] (b) growing the non-human organism or a part thereof under conditions which permit the production of phenylalanine or a composition comprising phenylalanine in said non-human organism or in the culture medium surrounding said non-human organism.

[19079] A further embodiment of the present invention relates to a process for the production of aspartate, which comprises
[19080] (a) increasing or generating one or more activities selected from the group consisting of b3791-protein in an organelle, preferably in plastids or mitochondria, especially in plastids, of a non-human organism or a part thereof, preferably a microorganism, a plant cell, a plant or a part thereof, as compared to a corresponding non-transformed wild type non-human organism or a part thereof; and
[19081] (b) growing the non-human organism or a part thereof under conditions which permit the production of aspartate or a composition comprising aspartate in said non-human organism or in the culture medium surrounding said non-human organism.

[19082] A further embodiment of the present invention relates to a process for the production of 5-oxoproline, which comprises
[19083] (a) increasing or generating one or more activities selected from the group consisting of b3791-protein in an organelle, preferably in plastids or mitochondria, especially in plastids, of a non-human organism or a part thereof, preferably a microorganism, a plant cell, a plant or a part thereof, as compared to a corresponding non-transformed wild type non-human organism or a part thereof; and
[19084] (b) growing the non-human organism or a part thereof under conditions which permit the production of 5-oxoproline or a composition comprising 5-oxoproline in said non-human organism or in the culture medium surrounding said non-human organism.

[19085] A further embodiment of the present invention relates to a process for the production of phenylalanine, which comprises
[19086] (a) increasing or generating one or more activities selected from the group consisting of enterobacterial common antigen polymerase in an organelle, preferably in plastids or mitochondria, especially in plastids, of a non-human organism or a part thereof, preferably a microorganism, a plant cell, a plant or a part thereof, as compared to a corresponding non-transformed wild type non-human organism or a part thereof; and
[19087] (b) growing the non-human organism or a part thereof under conditions which permit the production of phenylalanine or a composition comprising phenylalanine in said non-human organism or in the culture medium surrounding said non-human organism.

[19088] A further embodiment of the present invention relates to a process for the production of phenylalanine, which comprises
[19089] (a) increasing or generating one or more activities selected from the group consisting of DNA helicase II in an organelle, preferably in plastids or mitochondria, especially in plastids, of a non-human organism or a part thereof, preferably a microorganism, a plant cell, a plant or a part thereof, as compared to a corresponding non-transformed wild type non-human organism or a part thereof; and
[19090] (b) growing the non-human organism or a part thereof under conditions which permit the production of phenylalanine or a composition comprising phenylalanine in said non-human organism or in the culture medium surrounding said non-human organism.

[19091] A further embodiment of the present invention relates to a process for the production of citrulline, which comprises
[19092] (a) increasing or generating one or more activities selected from the group consisting of b3814-protein in an organelle, preferably in plastids or mitochondria, especially in plastids, of a non-human organism or a part thereof, preferably a microorganism, a plant cell, a plant or a part thereof, as compared to a corresponding non-transformed wild type non-human organism or a part thereof; and
[19093] (b) growing the non-human organism or a part thereof under conditions which permit the production of citrulline or a composition comprising citrulline in said non-human organism or in the culture medium surrounding said non-human organism.

[19094] A further embodiment of the present invention relates to a process for the production of alanine, which comprises
[19095] (a) increasing or generating one or more activities selected from the group consisting of transcriptional regulator in an organelle, preferably in plastids or mitochondria, especially in plastids, of a non-human organism or a part thereof, preferably a microorganism, a plant cell, a plant or a part thereof, as compared to a corresponding non-transformed wild type non-human organism or a part thereof; and
[19096] (b) growing the non-human organism or a part thereof under conditions which permit the production of alanine or a composition comprising alanine in said non-human organism or in the culture medium surrounding said non-human organism.

[19097] A further embodiment of the present invention relates to a process for the production of aspartate, which comprises
[19098] (a) increasing or generating one or more activities selected from the group consisting of transcriptional regulator in an organelle, preferably in plastids or mitochondria, especially in plastids, of a non-human organism or a part thereof, preferably a microorganism, a plant cell, a plant or a part thereof, as compared to a corresponding non-transformed wild type non-human organism or a part thereof; and
[19099] (b) growing the non-human organism or a part thereof under conditions which permit the production of aspartate or a composition comprising aspartate in said non-human organism or in the culture medium surrounding said non-human organism.

[19100] A further embodiment of the present invention relates to a process for the production of serine, which comprises
[19101] (a) increasing or generating one or more activities selected from the group consisting of transcriptional regulator in an organelle, preferably in plastids or mitochondria, especially in plastids, of a non-human organism or a part thereof, preferably a microorganism, a plant cell, a plant or a part thereof, as compared to a corresponding non-transformed wild type non-human organism or a part thereof; and
[19102] (b) growing the non-human organism or a part thereof under conditions which permit the production of serine or a composition comprising serine in said non-human organism or in the culture medium surrounding said non-human organism.

[19103] A further embodiment of the present invention relates to a process for the production of tyrosine, which comprises
[19104] (a) increasing or generating one or more activities selected from the group consisting of transcriptional regulator in an organelle, preferably in plastids or mitochondria, especially in plastids, of a non-human organism or a part thereof, preferably a microorganism, a plant cell, a plant or a part thereof, as compared to a corresponding non-transformed wild type non-human organism or a part thereof; and
[19105] (b) growing the non-human organism or a part thereof under conditions which permit the production of tyrosine or a composition comprising tyrosine in said non-human organism or in the culture medium surrounding said non-human organism.

[19106] A further embodiment of the present invention relates to a process for the production of phenylalanine, which comprises
[19107] (a) increasing or generating one or more activities selected from the group consisting of b3989-protein in an organelle, preferably in plastids or mitochondria, especially in plastids, of a non-human organism or a part thereof, preferably a microorganism, a plant cell, a plant or a part thereof, as compared to a corresponding non-transformed wild type non-human organism or a part thereof; and
[19108] (b) growing the non-human organism or a part thereof under conditions which permit the production of phenylalanine or a composition comprising phenylalanine in said non-human organism or in the culture medium surrounding said non-human organism.

[19109] A further embodiment of the present invention relates to a process for the production of tyrosine, which comprises
[19110] (a) increasing or generating one or more activities selected from the group consisting of b3989-protein in an organelle, preferably in plastids or mitochondria, especially in plastids, of a non-human organism or a part thereof, preferably a microorganism, a plant cell, a plant or a part thereof, as compared to a corresponding non-transformed wild type non-human organism or a part thereof; and
[19111] (b) growing the non-human organism or a part thereof under conditions which permit the production of tyrosine or a composition comprising tyrosine in said non-human organism or in the culture medium surrounding said non-human organism.

[19112] A further embodiment of the present invention relates to a process for the production of aspartate, which comprises
[19113] (a) increasing or generating one or more activities selected from the group consisting of acetyltransferase in an organelle, preferably in plastids or mitochondria, especially in plastids, of a non-human organism or a part thereof, preferably a microorganism, a plant cell, a plant or a part thereof, as compared to a corresponding non-transformed wild type non-human organism or a part thereof; and
[19114] (b) growing the non-human organism or a part thereof under conditions which permit the production of aspartate or a composition comprising aspartate in said non-human organism or in the culture medium surrounding said non-human organism.

[19115] A further embodiment of the present invention relates to a process for the production of 5-oxoproline, which comprises
[19116] (a) increasing or generating one or more activities selected from the group consisting of acetyltransferase in an organelle, preferably in plastids or mitochondria, especially in plastids, of a non-human organism or a part thereof, preferably a microorganism, a plant cell, a plant or a part thereof, as compared to a corresponding non-transformed wild type non-human organism or a part thereof; and
[19117] (b) growing the non-human organism or a part thereof under conditions which permit the production of 5-oxoproline or a composition comprising 5-oxoproline in said non-human organism or in the culture medium surrounding said non-human organism.

[19118] A further embodiment of the present invention relates to a process for the production of glycine, which comprises
[19119] (a) increasing or generating one or more activities selected from the group consisting of aspartate kinase in an organelle, preferably in plastids or mitochondria, especially in plastids, of a non-human organism or a part thereof, preferably a microorganism, a plant cell, a plant or a part thereof, as compared to a corresponding non-transformed wild type non-human organism or a part thereof; and
[19120] (b) growing the non-human organism or a part thereof under conditions which permit the production of glycine or a composition comprising glycine in said non-human organism or in the culture medium surrounding said non-human organism.

[19121] A further embodiment of the present invention relates to a process for the production of serine, which comprises
[19122] (a) increasing or generating one or more activities selected from the group consisting of aspartate kinase in an organelle, preferably in plastids or mitochondria, especially in plastids, of a non-human organism or a part thereof, preferably a microorganism, a plant cell, a plant or a part thereof, as compared to a corresponding non-transformed wild type non-human organism or a part thereof; and
[19123] (b) growing the non-human organism or a part thereof under conditions which permit the production of serine or a composition comprising serine in said non-human organism or in the culture medium surrounding said non-human organism.

[19124] A further embodiment of the present invention relates to a process for the production of alanine, which comprises
[19125] (a) increasing or generating one or more activities selected from the group consisting of b4029-protein in an organelle, preferably in plastids or mitochondria, especially in plastids, of a non-human organism or a part thereof, preferably a microorganism, a plant cell, a plant or a part thereof, as compared to a corresponding non-transformed wild type non-human organism or a part thereof; and
[19126] (b) growing the non-human organism or a part thereof under conditions which permit the production of alanine or a composition comprising alanine in said non-human organism or in the culture medium surrounding said non-human organism.

[19127] A further embodiment of the present invention relates to a process for the production of aspartate, which comprises
[19128] (a) increasing or generating one or more activities selected from the group consisting of b4029-protein in an organelle, preferably in plastids or mitochondria, especially in plastids, of a non-human organism or a part thereof, preferably a microorganism, a plant cell, a plant or a part thereof, as compared to a corresponding non-transformed wild type non-human organism or a part thereof; and
[19129] (b) growing the non-human organism or a part thereof under conditions which permit the production of aspartate or a composition comprising aspartate in said non-human organism or in the culture medium surrounding said non-human organism.

[19130] A further embodiment of the present invention relates to a process for the production of glycine, which comprises
[19131] (a) increasing or generating one or more activities selected from the group consisting of b4029-protein in an organelle, preferably in plastids or mitochondria, especially in plastids, of a non-human organism or a part thereof, preferably a microorganism, a plant cell, a plant or a part thereof, as compared to a corresponding non-transformed wild type non-human organism or a part thereof; and
[19132] (b) growing the non-human organism or a part thereof under conditions which permit the production of glycine or a composition comprising glycine in said non-human organism or in the culture medium surrounding said non-human organism.

[19133] A further embodiment of the present invention relates to a process for the production of phenylalanine, which comprises
[19134] (a) increasing or generating one or more activities selected from the group consisting of b4029-protein in an organelle, preferably in plastids or mitochondria, especially in plastids, of a non-human organism or a part thereof, preferably a microorganism, a plant cell, a plant or a part thereof, as compared to a corresponding non-transformed wild type non-human organism or a part thereof; and
[19135] (b) growing the non-human organism or a part thereof under conditions which permit the production of phenylalanine or a composition comprising phenylalanine in said non-human organism or in the culture medium surrounding said non-human organism.

[19136] A further embodiment of the present invention relates to a process for the production of serine, which comprises
[19137] (a) increasing or generating one or more activities selected from the group consisting of b4029-protein in an organelle, preferably in plastids or mitochondria, especially in plastids, of a non-human organism or a part thereof, preferably a microorganism, a plant cell, a plant or a part thereof, as compared to a corresponding non-transformed wild type non-human organism or a part thereof; and
[19138] (b) growing the non-human organism or a part thereof under conditions which permit the production of serine or a composition comprising serine in said non-human organism or in the culture medium surrounding said non-human organism.

[19139] A further embodiment of the present invention relates to a process for the production of tyrosine, which comprises
[19140] (a) increasing or generating one or more activities selected from the group consisting of b4029-protein in an organelle, preferably in plastids or mitochondria, especially in plastids, of a non-human organism or a part thereof, preferably a microorganism, a plant cell, a plant or a part thereof, as compared to a corresponding non-transformed wild type non-human organism or a part thereof; and
[19141] (b) growing the non-human organism or a part thereof under conditions which permit the production of tyrosine or a composition comprising tyrosine in said non-human organism or in the culture medium surrounding said non-human organism.

[19142] A further embodiment of the present invention relates to a process for the production of 5-oxoproline, which comprises
[19143] (a) increasing or generating one or more activities selected from the group consisting of b4029-protein in an organelle, preferably in plastids or mitochondria, especially in plastids, of a non-human organism or a part thereof, preferably a microorganism, a plant cell, a plant or a part thereof, as compared to a corresponding non-transformed wild type non-human organism or a part thereof; and
[19144] (b) growing the non-human organism or a part thereof under conditions which permit the production of 5-oxoproline or a composition comprising 5-oxoproline in said non-human organism or in the culture medium surrounding said non-human organism.

[19145] A further embodiment of the present invention relates to a process for the production of serine, which comprises
[19146] (a) increasing or generating one or more activities selected from the group consisting of b4121-protein in an organelle, preferably in plastids or mitochondria, especially in plastids, of a non-human organism or a part thereof, preferably a microorganism, a plant cell, a plant or a part thereof, as compared to a corresponding non-transformed wild type non-human organism or a part thereof; and
[19147] (b) growing the non-human organism or a part thereof under conditions which permit the production of serine or a composition comprising serine in said non-human organism or in the culture medium surrounding said non-human organism.

[19148] A further embodiment of the present invention relates to a process for the production of aspartate, which comprises
[19149] (a) increasing or generating one or more activities selected from the group consisting of acetyltransferase in an organelle, preferably in plastids or mitochondria, especially in plastids, of a non-human organism or a part thereof, preferably a microorganism, a plant cell, a plant or a part thereof, as compared to a corresponding non-transformed wild type non-human organism or a part thereof; and
[19150] (b) growing the non-human organism or a part thereof under conditions which permit the production of aspartate or a composition comprising aspartate in said non-human organism or in the culture medium surrounding said non-human organism.

[19151] A further embodiment of the present invention relates to a process for the production of phenylalanine, which comprises
[19152] (a) increasing or generating one or more activities selected from the group consisting of acetyltransferase in an organelle, preferably in plastids or mitochondria, especially in plastids, of a non-human organism or a part thereof, preferably a microorganism, a plant cell, a plant or a part thereof, as compared to a corresponding non-transformed wild type non-human organism or a part thereof; and
[19153] (b) growing the non-human organism or a part thereof under conditions which permit the production of phenylalanine or a composition comprising phenylalanine in said non-human organism or in the culture medium surrounding said non-human organism.

[19154] A further embodiment of the present invention relates to a process for the production of serine, which comprises
[19155] (a) increasing or generating one or more activities selected from the group consisting of acetyltransferase in an organelle, preferably in plastids or mitochondria, especially in plastids, of a non-human organism or a part thereof, preferably a microorganism, a plant cell, a plant or a part thereof, as compared to a corresponding non-transformed wild type non-human organism or a part thereof; and
[19156] (b) growing the non-human organism or a part thereof under conditions which permit the production of serine or a composition comprising serine in said non-human organism or in the culture medium surrounding said non-human organism.

[19157] A further embodiment of the present invention relates to a process for the production of tyrosine, which comprises
[19158] (a) increasing or generating one or more activities selected from the group consisting of acetyltransferase in an organelle, preferably in plastids or mitochondria, especially in plastids, of a non-human organism or a part thereof, preferably a microorganism, a plant cell, a plant or a part thereof, as compared to a corresponding non-transformed wild type non-human organism or a part thereof; and
[19159] (b) growing the non-human organism or a part thereof under conditions which permit the production of tyrosine or a composition comprising tyrosine in said non-human organism or in the culture medium surrounding said non-human organism.

[19160] A further embodiment of the present invention relates to a process for the production of serine, which comprises
[19161] (a) increasing or generating one or more activities selected from the group consisting of thioredoxin in an organelle, preferably in plastids or mitochondria, especially in plastids, of a non-human organism or a part thereof, preferably a microorganism, a plant cell, a plant or a part thereof, as compared to a corresponding non-transformed wild type non-human organism or a part thereof; and
[19162] (b) growing the non-human organism or a part thereof under conditions which permit the production of serine or a composition comprising serine in said non-human organism or in the culture medium surrounding said non-human organism.

[19163] A further embodiment of the present invention relates to a process for the production of alanine, which comprises
[19164] (a) increasing or generating one or more activities selected from the group consisting of lysine decarboxylase in an organelle, preferably in plastids or mitochondria, especially in plastids, of a non-human organism or a part thereof, preferably a microorganism, a plant cell, a plant or a part thereof, as compared to a corresponding non-transformed wild type non-human organism or a part thereof; and
[19165] (b) growing the non-human organism or a part thereof under conditions which permit the production of alanine or a composition comprising alanine in said non-human organism or in the culture medium surrounding said non-human organism.

[19166] A further embodiment of the present invention relates to a process for the production of asparagine, which comprises
[19167] (a) increasing or generating one or more activities selected from the group consisting of GM02LC11114-protein in an organelle, preferably in plastids or mitochondria, especially in plastids, of a non-human organism or a part thereof, preferably a microorganism, a plant cell, a plant or a part thereof, as compared to a corresponding non-transformed wild type non-human organism or a part thereof; and
[19168] (b) growing the non-human organism or a part thereof under conditions which permit the production of asparagine or a composition comprising asparagine in said non-human organism or in the culture medium surrounding said non-human organism.

[19169] A further embodiment of the present invention relates to a process for the production of phenylalanine, which comprises
[19170] (a) increasing or generating one or more activities selected from the group consisting of GM02LC11114-protein in an organelle, preferably in plastids or mitochondria, especially in plastids, of a non-human organism or a part thereof, preferably a microorganism, a plant cell, a plant or a part thereof, as compared to a corresponding non-transformed wild type non-human organism or a part thereof; and
[19171] (b) growing the non-human organism or a part thereof under conditions which permit the production of phenylalanine or a composition comprising phenylalanine in said non-human organism or in the culture medium surrounding said non-human organism.

[19172] A further embodiment of the present invention relates to a process for the production of alanine, which comprises
[19173] (a) increasing or generating one or more activities selected from the group consisting of glutaredoxin in an organelle, preferably in plastids or mitochondria, especially in plastids, of a non-human organism or a part thereof, preferably a microorganism, a plant cell, a plant or a part thereof, as compared to a corresponding non-transformed wild type non-human organism or a part thereof; and
[19174] (b) growing the non-human organism or a part thereof under conditions which permit the production of alanine or a composition comprising alanine in said non-human organism or in the culture medium surrounding said non-human organism.

[19175] A further embodiment of the present invention relates to a process for the production of phenylalanine, which comprises
[19176] (a) increasing or generating one or more activities selected from the group consisting of glutaredoxin in an organelle, preferably in plastids or mitochondria, especially in plastids, of a non-human organism or a part thereof, preferably a microorganism, a plant cell, a plant or a part thereof, as compared to a corresponding non-transformed wild type non-human organism or a part thereof; and
[19177] (b) growing the non-human organism or a part thereof under conditions which permit the production of phenylalanine or a composition comprising phenylalanine in said non-human organism or in the culture medium surrounding said non-human organism.

[19178] A further embodiment of the present invention relates to a process for the production of tyrosine, which comprises
[19179] (a) increasing or generating one or more activities selected from the group consisting of glutaredoxin in an organelle, preferably in plastids or mitochondria, especially in plastids, of a non-human organism or a part thereof, preferably a microorganism, a plant cell, a plant or a part thereof, as compared to a corresponding non-transformed wild type non-human organism or a part thereof; and
[19180] (b) growing the non-human organism or a part thereof under conditions which permit the production of tyrosine or a composition comprising tyrosine in said non-human organism or in the culture medium surrounding said non-human organism.

[19181] A further embodiment of the present invention relates to a process for the production of phenylalanine, which comprises
[19182] (a) increasing or generating one or more activities selected from the group consisting of histone H2A in an organelle, preferably in plastids or mitochondria, especially in plastids, of a non-human organism or a part thereof, preferably a microorganism, a plant cell, a plant or a part thereof, as compared to a corresponding non-transformed wild type non-human organism or a part thereof; and
[19183] (b) growing the non-human organism or a part thereof under conditions which permit the production of phenylalanine or a composition comprising phenylalanine in said non-human organism or in the culture medium surrounding said non-human organism.

[19184] A further embodiment of the present invention relates to a process for the production of tyrosine, which comprises
[19185] (a) increasing or generating one or more activities selected from the group consisting of histone H2A in an organelle, preferably in plastids or mitochondria, especially in plastids, of a non-human organism or a part thereof, preferably a microorganism, a plant cell, a plant or a part thereof, as compared to a corresponding non-transformed wild type non-human organism or a part thereof; and
[19186] (b) growing the non-human organism or a part thereof under conditions which permit the production of tyrosine or a composition comprising tyrosine in said non-human organism or in the culture medium surrounding said non-human organism.

[19187] A further embodiment of the present invention relates to a process for the production of aspartate, which comprises
[19188] (a) increasing or generating one or more activities selected from the group consisting of GM02LC17485-protein in an organelle, preferably in plastids or mitochondria, especially in plastids, of a non-human organism or a part thereof, preferably a microorganism, a plant cell, a plant or a part thereof, as compared to a corresponding non-transformed wild type non-human organism or a part thereof; and
[19189] (b) growing the non-human organism or a part thereof under conditions which permit the production of aspartate or a composition comprising aspartate in said non-human organism or in the culture medium surrounding said non-human organism.

[19190] A further embodiment of the present invention relates to a process for the production of phenylalanine, which comprises
[19191] (a) increasing or generating one or more activities selected from the group consisting of RNA binding protein in an organelle, preferably in plastids or mitochondria, especially in plastids, of a non-human organism or a part thereof, preferably a microorganism, a plant cell, a plant or a part thereof, as compared to a corresponding non-transformed wild type non-human organism or a part thereof; and
[19192] (b) growing the non-human organism or a part thereof under conditions which permit the production of phenylalanine or a composition comprising phenylalanine in said non-human organism or in the culture medium surrounding said non-human organism.

[19193] A further embodiment of the present invention relates to a process for the production of tyrosine, which comprises
[19194] (a) increasing or generating one or more activities selected from the group consisting of RNA binding protein in an organelle, preferably in plastids or mitochondria, especially in plastids, of a non-human organism or a part thereof, preferably a microorganism, a plant cell, a plant or a part thereof, as compared to a corresponding non-transformed wild type non-human organism or a part thereof; and
[19195] (b) growing the non-human organism or a part thereof under conditions which permit the production of tyrosine or a composition comprising tyrosine in said non-human organism or in the culture medium surrounding said non-human organism.

[19196] A further embodiment of the present invention relates to a process for the production of phenylalanine, which comprises
[19197] (a) increasing or generating one or more activities selected from the group consisting of transcription factor in an organelle, preferably in plastids or mitochondria, especially in plastids, of a non-human organism or a part thereof, preferably a microorganism, a plant cell, a plant or a part thereof, as compared to a corresponding non-transformed wild type non-human organism or a part thereof; and
[19198] (b) growing the non-human organism or a part thereof under conditions which permit the production of phenylalanine or a composition comprising phenylalanine in said non-human organism or in the culture medium surrounding said non-human organism.

[19199] A further embodiment of the present invention relates to a process for the production of serine, which comprises
[19200] (a) increasing or generating one or more activities selected from the group consisting of transcription factor in an organelle, preferably in plastids or mitochondria, especially in plastids, of a non-human organism or a part thereof, preferably a microorganism, a plant cell, a plant or a part thereof, as compared to a corresponding non-transformed wild type non-human organism or a part thereof; and
[19201] (b) growing the non-human organism or a part thereof under conditions which permit the production of serine or a composition comprising serine in said non-human organism or in the culture medium surrounding said non-human organism.

[19202] A further embodiment of the present invention relates to a process for the production of tyrosine, which comprises
[19203] (a) increasing or generating one or more activities selected from the group consisting of transcription factor in an organelle, preferably in plastids or mitochondria, especially in plastids, of a non-human organism or a part thereof, preferably a microorganism, a plant cell, a plant or a part thereof, as compared to a corresponding non-transformed wild type non-human organism or a part thereof; and
[19204] (b) growing the non-human organism or a part thereof under conditions which permit the production of tyrosine or a composition comprising tyrosine in said non-human organism or in the culture medium surrounding said non-human organism.

[19205] A further embodiment of the present invention relates to a process for the production of alanine, which comprises
[19206] (a) increasing or generating one or more activities selected from the group consisting of cyclin D in an organelle, preferably in plastids or mitochondria, especially in plastids, of a non-human organism or a part thereof, preferably a microorganism, a plant cell, a plant or a part thereof, as compared to a corresponding non-transformed wild type non-human organism or a part thereof; and
[19207] (b) growing the non-human organism or a part thereof under conditions which permit the production of alanine or a composition comprising alanine in said non-human organism or in the culture medium surrounding said non-human organism.

[19208] A further embodiment of the present invention relates to a process for the production of serine, which comprises
[19209] (a) increasing or generating one or more activities selected from the group consisting of cyclin D in an organelle, preferably in plastids or mitochondria, especially in plastids, of a non-human organism or a part thereof, preferably a microorganism, a plant cell, a plant or a part thereof, as compared to a corresponding non-transformed wild type non-human organism or a part thereof; and
[19210] (b) growing the non-human organism or a part thereof under conditions which permit the production of serine or a composition comprising serine in said non-human organism or in the culture medium surrounding said non-human organism.

[19211] A further embodiment of the present invention relates to a process for the production of alanine, which comprises
[19212] (a) increasing or generating one or more activities selected from the group consisting of glutaredoxin in an organelle, preferably in plastids or mitochondria, especially in plastids, of a non-human organism or a part thereof, preferably a microorganism, a plant cell, a plant or a part thereof, as compared to a corresponding non-transformed wild type non-human organism or a part thereof; and
[19213] (b) growing the non-human organism or a part thereof under conditions which permit the production of alanine or a composition comprising alanine in said non-human organism or in the culture medium surrounding said non-human organism.

[19214] A further embodiment of the present invention relates to a process for the production of glycine, which comprises
[19215] (a) increasing or generating one or more activities selected from the group consisting of glutaredoxin in an organelle, preferably in plastids or mitochondria, especially in plastids, of a non-human organism or a part thereof, preferably a microorganism, a plant cell, a plant or a part thereof, as compared to a corresponding non-transformed wild type non-human organism or a part thereof; and
[19216] (b) growing the non-human organism or a part thereof under conditions which permit the production of glycine or a composition comprising glycine in said non-human organism or in the culture medium surrounding said non-human organism.

[19217] A further embodiment of the present invention relates to a process for the production of serine, which comprises
[19218] (a) increasing or generating one or more activities selected from the group consisting of glutaredoxin in an organelle, preferably in plastids or mitochondria, especially in plastids, of a non-human organism or a part thereof, preferably a microorganism, a plant cell, a plant or a part thereof, as compared to a corresponding non-transformed wild type non-human organism or a part thereof; and
[19219] (b) growing the non-human organism or a part thereof under conditions which permit the production of serine or a composition comprising serine in said non-human organism or in the culture medium surrounding said non-human organism.

[19220] A further embodiment of the present invention relates to a process for the production of asparagine, which comprises
[19221] (a) increasing or generating one or more activities selected from the group consisting of s_pp015018333r-protein in an organelle, preferably in plastids or mitochondria, especially in plastids, of a non-human organism or a part thereof, preferably a microorganism, a plant cell, a plant or a part thereof, as compared to a corresponding non-transformed wild type non-human organism or a part thereof; and
[19222] (b) growing the non-human organism or a part thereof under conditions which permit the production of asparagine or a composition comprising asparagine in said non-human organism or in the culture medium surrounding said non-human organism.

[19223] A further embodiment of the present invention relates to a process for the production of phenylalanine, which comprises
[19224] (a) increasing or generating one or more activities selected from the group consisting of s_pp015018333r-protein in an organelle, preferably in plastids or mitochondria, especially in plastids, of a non-human organism or a part thereof, preferably a microorganism, a plant cell, a plant or a part thereof, as compared to a corresponding non-transformed wild type non-human organism or a part thereof; and
[19225] (b) growing the non-human organism or a part thereof under conditions which permit the production of phenylalanine or a composition comprising phenylalanine in said non-human organism or in the culture medium surrounding said non-human organism.

[19226] A further embodiment of the present invention relates to a process for the production of tyrosine, which comprises
[19227] (a) increasing or generating one or more activities selected from the group consisting of s_pp015018333r-protein in an organelle, preferably in plastids or mitochondria, especially in plastids, of a non-human organism or a part thereof, preferably a microorganism, a plant cell, a plant or a part thereof, as compared to a corresponding non-transformed wild type non-human organism or a part thereof; and
[19228] (b) growing the non-human organism or a part thereof under conditions which permit the production of tyrosine or a composition comprising tyrosine in said non-human organism or in the culture medium surrounding said non-human organism.

[19229] A further embodiment of the present invention relates to a process for the production of 5-oxoproline, which comprises
[19230] (a) increasing or generating one or more activities selected from the group consisting of s_pp015018333r-protein in an organelle, preferably in plastids or mitochondria, especially in plastids, of a non-human organism or a part thereof, preferably a microorganism, a plant cell, a plant or a part thereof, as compared to a corresponding non-transformed wild type non-human organism or a part thereof; and
[19231] (b) growing the non-human organism or a part thereof under conditions which permit the production of 5-oxoproline or a composition comprising 5-oxoproline in said non-human organism or in the culture medium surrounding said non-human organism.

[19232] A further embodiment of the present invention relates to a process for the production of citrulline, which comprises
[19233] (a) increasing or generating one or more activities selected from the group consisting of N-acetyl-gamma-glutamyl-phosphate reductase in an organelle, preferably in plastids or mitochondria, especially in plastids, of a non-human organism or a part thereof, preferably a microorganism, a plant cell, a plant or a part thereof, as compared to a corresponding non-transformed wild type non-human organism or a part thereof; and
[19234] (b) growing the non-human organism or a part thereof under conditions which permit the production of citrulline or a composition comprising citrulline in said non-human organism or in the culture medium surrounding said non-human organism.

[19235] A further embodiment of the present invention relates to a process for the production of asparagine, which comprises
[19236] (a) increasing or generating one or more activities selected from the group consisting of agmatinase in an organelle, preferably in plastids or mitochondria, especially in plastids, of a non-human organism or a part thereof, preferably a microorganism, a plant cell, a plant or a part thereof, as compared to a corresponding non-transformed wild type non-human organism or a part thereof; and
[19237] (b) growing the non-human organism or a part thereof under conditions which permit the production of asparagine or a composition comprising asparagine in said non-human organism or in the culture medium surrounding said non-human organism.

[19238] A further embodiment of the present invention relates to a process for the production of tyrosine, which comprises
[19239] (a) increasing or generating one or more activities selected from the group consisting of agmatinase in an organelle, preferably in plastids or mitochondria, especially in plastids, of a non-human organism or a part thereof, preferably a microorganism, a plant cell, a plant or a part thereof, as compared to a corresponding non-transformed wild type non-human organism or a part thereof; and
[19240] (b) growing the non-human organism or a part thereof under conditions which permit the production of tyrosine or a composition comprising tyrosine in said non-human organism or in the culture medium surrounding said non-human organism.

[19241] A further embodiment of the present invention relates to a process for the production of alanine, which comprises
[19242] (a) increasing or generating one or more activities selected from the group consisting of ABC transporter ATP binding component in an organelle, preferably in plastids or mitochondria, especially in plastids, of a non-human organism or a part thereof, preferably a microorganism, a plant cell, a plant or a part thereof, as compared to a corresponding non-transformed wild type non-human organism or a part thereof; and
[19243] (b) growing the non-human organism or a part thereof under conditions which permit the production of alanine or a composition comprising alanine in said non-human organism or in the culture medium surrounding said non-human organism.

[19244] A further embodiment of the present invention relates to a process for the production of phenylalanine, which comprises
[19245] (a) increasing or generating one or more activities selected from the group consisting of flavodoxin in an organelle, preferably in plastids or mitochondria, especially in plastids, of a non-human organism or a part thereof, preferably a microorganism, a plant cell, a plant or a part thereof, as compared to a corresponding non-transformed wild type non-human organism or a part thereof; and
[19246] (b) growing the non-human organism or a part thereof under conditions which permit the production of phenylalanine or a composition comprising phenylalanine in said non-human organism or in the culture medium surrounding said non-human organism.

[19247] A further embodiment of the present invention relates to a process for the production of tyrosine, which comprises
[19248] (a) increasing or generating one or more activities selected from the group consisting of flavodoxin in an organelle, preferably in plastids or mitochondria, especially in plastids, of a non-human organism or a part thereof, preferably a microorganism, a plant cell, a plant or a part thereof, as compared to a corresponding non-transformed wild type non-human organism or a part thereof; and
[19249] (b) growing the non-human organism or a part thereof under conditions which permit the production of tyrosine or a composition comprising tyrosine in said non-human organism or in the culture medium surrounding said non-human organism.

[19250] A further embodiment of the present invention relates to a process for the production of alanine, which comprises
[19251] (a) increasing or generating one or more activities selected from the group consisting of sll0281-protein in an organelle, preferably in plastids or mitochondria, especially in plastids, of a non-human organism or a part thereof, preferably a microorganism, a plant cell, a plant or a part thereof, as compared to a corresponding non-transformed wild type non-human organism or a part thereof; and
[19252] (b) growing the non-human organism or a part thereof under conditions which permit the production of alanine or a composition comprising alanine in said non-human organism or in the culture medium surrounding said non-human organism.

[19253] A further embodiment of the present invention relates to a process for the production of serine, which comprises
[19254] (a) increasing or generating one or more activities selected from the group consisting of uroporphyrin-III C-methyltransferase in an organelle, preferably in plastids or mitochondria, especially in plastids, of a non-human organism or a part thereof, preferably a microorganism, a plant cell, a plant or a part thereof, as compared to a corresponding non-transformed wild type non-human organism or a part thereof; and
[19255] (b) growing the non-human organism or a part thereof under conditions which permit the production of serine or a composition comprising serine in said non-human organism or in the culture medium surrounding said non-human organism.

[19256] A further embodiment of the present invention relates to a process for the production of phenylalanine, which comprises
[19257] (a) increasing or generating one or more activities selected from the group consisting of urease subunit in an organelle, preferably in plastids or mitochondria, especially in plastids, of a non-human organism or a part thereof, preferably a microorganism, a plant cell, a plant or a part thereof, as compared to a corresponding non-transformed wild type non-human organism or a part thereof; and
[19258] (b) growing the non-human organism or a part thereof under conditions which permit the production of phenylalanine or a composition comprising phenylalanine in said non-human organism or in the culture medium surrounding said non-human organism.

[19259] A further embodiment of the present invention relates to a process for the production of tyrosine, which comprises
[19260] (a) increasing or generating one or more activities selected from the group consisting of urease subunit in an organelle, preferably in plastids or mitochondria, especially in plastids, of a non-human organism or a part thereof, preferably a microorganism, a plant cell, a plant or a part thereof, as compared to a corresponding non-transformed wild type non-human organism or a part thereof; and
[19261] (b) growing the non-human organism or a part thereof under conditions which permit the production of tyrosine or a composition comprising tyrosine in said non-human organism or in the culture medium surrounding said non-human organism.

[19262] A further embodiment of the present invention relates to a process for the production of citrulline, which comprises
[19263] (a) increasing or generating one or more activities selected from the group consisting of glucokinase in an organelle, preferably in plastids or mitochondria, especially in plastids, of a non-human organism or a part thereof, preferably a microorganism, a plant cell, a plant or a part thereof, as compared to a corresponding non-transformed wild type non-human organism or a part thereof; and
[19264] (b) growing the non-human organism or a part thereof under conditions which permit the production of citrulline or a composition comprising citrulline in said non-human organism or in the culture medium surrounding said non-human organism.

[19265] A further embodiment of the present invention relates to a process for the production of serine, which comprises
[19266] (a) increasing or generating one or more activities selected from the group consisting of permease protein of phosphate ABC transporter in an organelle, preferably in plastids or mitochondria, especially in plastids, of a non-human organism or a part thereof, preferably a microorganism, a plant cell, a plant or a part thereof, as compared to a corresponding non-transformed wild type non-human organism or a part thereof; and
[19267] (b) growing the non-human organism or a part thereof under conditions which permit the production of serine or a composition comprising serine in said non-human organism or in the culture medium surrounding said non-human organism.

[19268] A further embodiment of the present invention relates to a process for the production of 5-oxoproline, which comprises
[19269] (a) increasing or generating one or more activities selected from the group consisting of permease protein of phosphate ABC transporter in an organelle, preferably in plastids or mitochondria, especially in plastids, of a non-human organism or a part thereof, preferably a microorganism, a plant cell, a plant or a part thereof, as compared to a corresponding non-transformed wild type non-human organism or a part thereof; and
[19270] (b) growing the non-human organism or a part thereof under conditions which permit the production of 5-oxoproline or a composition comprising 5-oxoproline in said non-human organism or in the culture medium surrounding said non-human organism.

[19271] A further embodiment of the present invention relates to a process for the production of aspartate, which comprises
[19272] (a) increasing or generating one or more activities selected from the group consisting of oxireductase in an organelle, preferably in plastids or mitochondria, especially in plastids, of a non-human organism or a part thereof, preferably a microorganism, a plant cell, a plant or a part thereof, as compared to a corresponding non-transformed wild type non-human organism or a part thereof; and
[19273] (b) growing the non-human organism or a part thereof under conditions which permit the production of aspartate or a composition comprising aspartate in said non-human organism or in the culture medium surrounding said non-human organism.

[19274] A further embodiment of the present invention relates to a process for the production of glycine, which comprises
[19275] (a) increasing or generating one or more activities selected from the group consisting of oxireductase in an organelle, preferably in plastids or mitochondria, especially in plastids, of a non-human organism or a part thereof, preferably a microorganism, a plant cell, a plant or a part thereof, as compared to a corresponding non-transformed wild type non-human organism or a part thereof; and
[19276] (b) growing the non-human organism or a part thereof under conditions which permit the production of glycine or a composition comprising glycine in said non-human organism or in the culture medium surrounding said non-human organism.

[19277] A further embodiment of the present invention relates to a process for the production of serine, which comprises
[19278] (a) increasing or generating one or more activities selected from the group consisting of oxireductase in an organelle, preferably in plastids or mitochondria, especially in plastids, of a non-human organism or a part thereof, preferably a microorganism, a plant cell, a plant or a part thereof, as compared to a corresponding non-transformed wild type non-human organism or a part thereof; and
[19279] (b) growing the non-human organism or a part thereof under conditions which permit the production of serine or a composition comprising serine in said non-human organism or in the culture medium surrounding said non-human organism.

[19280] A further embodiment of the present invention relates to a process for the production of tyrosine, which comprises
[19281] (a) increasing or generating one or more activities selected from the group consisting of oxireductase in an organelle, preferably in plastids or mitochondria, especially in plastids, of a non-human organism or a part thereof, preferably a microorganism, a plant cell, a plant or a part thereof, as compared to a corresponding non-transformed wild type non-human organism or a part thereof; and
[19282] (b) growing the non-human organism or a part thereof under conditions which permit the production of tyrosine or a composition comprising tyrosine in said non-human organism or in the culture medium surrounding said non-human organism.

[19283] A further embodiment of the present invention relates to a process for the production of aspartate, which comprises
[19284] (a) increasing or generating one or more activities selected from the group consisting of malate dehydrogenase in an organelle, preferably in plastids or mitochondria, especially in plastids, of a non-human organism or a part thereof, preferably a microorganism, a plant cell, a plant or a part thereof, as compared to a corresponding non-transformed wild type non-human organism or a part thereof; and
[19285] (b) growing the non-human organism or a part thereof under conditions which permit the production of aspartate or a composition comprising aspartate in said non-human organism or in the culture medium surrounding said non-human organism.

[19286] A further embodiment of the present invention relates to a process for the production of phenylalanine, which comprises
[19287] (a) increasing or generating one or more activities selected from the group consisting of malate dehydrogenase in an organelle, preferably in plastids or mitochondria, especially in plastids, of a non-human organism or a part thereof, preferably a microorganism, a plant cell, a plant or a part thereof, as compared to a corresponding non-transformed wild type non-human organism or a part thereof; and
[19288] (b) growing the non-human organism or a part thereof under conditions which permit the production of phenylalanine or a composition comprising phenylalanine in said non-human organism or in the culture medium surrounding said non-human organism.

[19289] A further embodiment of the present invention relates to a process for the production of serine, which comprises
[19290] (a) increasing or generating one or more activities selected from the group consisting of malate dehydrogenase in an organelle, preferably in plastids or mitochondria, especially in plastids, of a non-human organism or a part thereof, preferably a microorganism, a plant cell, a plant or a part thereof, as compared to a corresponding non-transformed wild type non-human organism or a part thereof; and
[19291] (b) growing the non-human organism or a part thereof under conditions which permit the production of serine or a composition comprising serine in said non-human organism or in the culture medium surrounding said non-human organism.

[19292] A further embodiment of the present invention relates to a process for the production of aspartate, which comprises
[19293] (a) increasing or generating one or more activities selected from the group consisting of 3-deoxy-7-phosphoheptulonate synthase in an organelle, preferably in plastids or mitochondria, especially in plastids, of a non-human organism or a part thereof, preferably a microorganism, a plant cell, a plant or a part thereof, as compared to a corresponding non-transformed wild type non-human organism or a part thereof; and
[19294] (b) growing the non-human organism or a part thereof under conditions which permit the production of aspartate or a composition comprising aspartate in said non-human organism or in the culture medium surrounding said non-human organism.

[19295] A further embodiment of the present invention relates to a process for the production of serine, which comprises
[19296] (a) increasing or generating one or more activities selected from the group consisting of glycogen synthase in an organelle, preferably in plastids or mitochondria, especially in plastids, of a non-human organism or a part thereof, preferably a microorganism, a plant cell, a plant or a part thereof, as compared to a corresponding non-transformed wild type non-human organism or a part thereof; and
[19297] (b) growing the non-human organism or a part thereof under conditions which permit the production of serine or a composition comprising serine in said non-human organism or in the culture medium surrounding said non-human organism.

[19298] A further embodiment of the present invention relates to a process for the production of aspartate, which comprises
[19299] (a) increasing or generating one or more activities selected from the group consisting of carbon dioxide concentrating mechanism protein in an organelle, preferably in plastids or mitochondria, especially in plastids, of a non-human organism or a part thereof, preferably a microorganism, a plant cell, a plant or a part thereof, as compared to a corresponding non-transformed wild type non-human organism or a part thereof; and
[19300] (b) growing the non-human organism or a part thereof under conditions which permit the production of aspartate or a composition comprising aspartate in said non-human organism or in the culture medium surrounding said non-human organism.

[19301] A further embodiment of the present invention relates to a process for the production of phenylalanine, which comprises
[19302] (a) increasing or generating one or more activities selected from the group consisting of carbon dioxide concentrating mechanism protein in an organelle, preferably in plastids or mitochondria, especially in plastids, of a non-human organism or a part thereof, preferably a microorganism, a plant cell, a plant or a part thereof, as compared to a corresponding non-transformed wild type non-human organism or a part thereof; and
[19303] (b) growing the non-human organism or a part thereof under conditions which permit the production of phenylalanine or a composition comprising phenylalanine in said non-human organism or in the culture medium surrounding said non-human organism.

[19304] A further embodiment of the present invention relates to a process for the production of serine, which comprises
[19305] (a) increasing or generating one or more activities selected from the group consisting of carbon dioxide concentrating mechanism protein in an organelle, preferably in plastids or mitochondria, especially in plastids, of a non-human organism or a part thereof, preferably a microorganism, a plant cell, a plant or a part thereof, as compared to a corresponding non-transformed wild type non-human organism or a part thereof; and
[19306] (b) growing the non-human organism or a part thereof under conditions which permit the production of serine or a composition comprising serine in said non-human organism or in the culture medium surrounding said non-human organism.

[19307] A further embodiment of the present invention relates to a process for the production of aspartate, which comprises
[19308] (a) increasing or generating one or more activities selected from the group consisting of sll1032-protein in an organelle, preferably in plastids or mitochondria, especially in plastids, of a non-human organism or a part thereof, preferably a microorganism, a plant cell, a plant or a part thereof, as compared to a corresponding non-transformed wild type non-human organism or a part thereof; and
[19309] (b) growing the non-human organism or a part thereof under conditions which permit the production of aspartate or a composition comprising aspartate in said non-human organism or in the culture medium surrounding said non-human organism.

[19310] A further embodiment of the present invention relates to a process for the production of serine, which comprises
[19311] (a) increasing or generating one or more activities selected from the group consisting of phosphoribosylformyl glycinamidine synthase subunit in an organelle, preferably in plastids or mitochondria, especially in plastids, of a non-human organism or a part thereof, preferably a microorganism, a plant cell, a plant or a part thereof, as compared to a corresponding non-transformed wild type non-human organism or a part thereof; and
[19312] (b) growing the non-human organism or a part thereof under conditions which permit the production of serine or a composition comprising serine in said non-human organism or in the culture medium surrounding said non-human organism.

[19313] A further embodiment of the present invention relates to a process for the production of aspartate, which comprises
[19314] (a) increasing or generating one or more activities selected from the group consisting of 5′-nucleotidase in an organelle, preferably in plastids or mitochondria, especially in plastids, of a non-human organism or a part thereof, preferably a microorganism, a plant cell, a plant or a part thereof, as compared to a corresponding non-transformed wild type non-human organism or a part thereof; and
[19315] (b) growing the non-human organism or a part thereof under conditions which permit the production of aspartate or a composition comprising aspartate in said non-human organism or in the culture medium surrounding said non-human organism.

[19316] A further embodiment of the present invention relates to a process for the production of 5-oxoproline, which comprises
[19317] (a) increasing or generating one or more activities selected from the group consisting of 5′-nucleotidase in an organelle, preferably in plastids or mitochondria, especially in plastids, of a non-human organism or a part thereof, preferably a microorganism, a plant cell, a plant or a part thereof, as compared to a corresponding non-transformed wild type non-human organism or a part thereof; and
[19318] (b) growing the non-human organism or a part thereof under conditions which permit the production of 5-oxoproline or a composition comprising 5-oxoproline in said non-human organism or in the culture medium surrounding said non-human organism.

[19319] A further embodiment of the present invention relates to a process for the production of asparagine, which comprises
[19320] (a) increasing or generating one or more activities selected from the group consisting of glycogen (starch) synthase in an organelle, preferably in plastids or mitochondria, especially in plastids, of a non-human organism or a part thereof, preferably a microorganism, a plant cell, a plant or a part thereof, as compared to a corresponding non-transformed wild type non-human organism or a part thereof; and
[19321] (b) growing the non-human organism or a part thereof under conditions which permit the production of asparagine or a composition comprising asparagine in said non-human organism or in the culture medium surrounding said non-human organism.

[19322] A further embodiment of the present invention relates to a process for the production of tyrosine, which comprises
[19323] (a) increasing or generating one or more activities selected from the group consisting of glycogen (starch) synthase in an organelle, preferably in plastids or mitochondria, especially in plastids, of a non-human organism or a part thereof, preferably a microorganism, a plant cell, a plant or a part thereof, as compared to a corresponding non-transformed wild type non-human organism or a part thereof; and
[19324] (b) growing the non-human organism or a part thereof under conditions which permit the production of tyrosine or a composition comprising tyrosine in said non-human organism or in the culture medium surrounding said non-human organism.

[19325] A further embodiment of the present invention relates to a process for the production of aspartate, which comprises
[19326] (a) increasing or generating one or more activities selected from the group consisting of CTP synthetase in an organelle, preferably in plastids or mitochondria, especially in plastids, of a non-human organism or a part thereof, preferably a microorganism, a plant cell, a plant or a part thereof, as compared to a corresponding non-transformed wild type non-human organism or a part thereof; and
[19327] (b) growing the non-human organism or a part thereof under conditions which permit the production of aspartate or a composition comprising aspartate in said non-human organism or in the culture medium surrounding said non-human organism.

[19328] A further embodiment of the present invention relates to a process for the production of glycine, which comprises
[19329] (a) increasing or generating one or more activities selected from the group consisting of nitrate /nitrite transport protein in an organelle, preferably in plastids or mitochondria, especially in plastids, of a non-human organism or a part thereof, preferably a microorganism, a plant cell, a plant or a part thereof, as compared to a corresponding non-transformed wild type non-human organism or a part thereof; and
[19330] (b) growing the non-human organism or a part thereof under conditions which permit the production of glycine or a composition comprising glycine in said non-human organism or in the culture medium surrounding said non-human organism.

[19331] A further embodiment of the present invention relates to a process for the production of phenylalanine, which comprises
[19332] (a) increasing or generating one or more activities selected from the group consisting of nitrate /nitrite transport protein in an organelle, preferably in plastids or mitochondria, especially in plastids, of a non-human organism or a part thereof, preferably a microorganism, a plant cell, a plant or a part thereof, as compared to a corresponding non-transformed wild type non-human organism or a part thereof; and
[19333] (b) growing the non-human organism or a part thereof under conditions which permit the production of phenylalanine or a composition comprising phenylalanine in said non-human organism or in the culture medium surrounding said non-human organism.

[19334] A further embodiment of the present invention relates to a process for the production of serine, which comprises
[19335] (a) increasing or generating one or more activities selected from the group consisting of nitrate /nitrite transport protein in an organelle, preferably in plastids or mitochondria, especially in plastids, of a non-human organism or a part thereof, preferably a microorganism, a plant cell, a plant or a part thereof, as compared to a corresponding non-transformed wild type non-human organism or a part thereof; and
[19336] (b) growing the non-human organism or a part thereof under conditions which permit the production of serine or a composition comprising serine in said non-human organism or in the culture medium surrounding said non-human organism.

[19337] A further embodiment of the present invention relates to a process for the production of tyrosine, which comprises
[19338] (a) increasing or generating one or more activities selected from the group consisting of nitrate/nitrite transport protein in an organelle, preferably in plastids or mitochondria, especially in plastids, of a non-human organism or a part thereof, preferably a microorganism, a plant cell, a plant or a part thereof, as compared to a corresponding non-transformed wild type non-human organism or a part thereof; and
[19339] (b) growing the non-human organism or a part thereof under conditions which permit the production of tyrosine or a composition comprising tyrosine in said non-human organism or in the culture medium surrounding said non-human organism.

[19340] A further embodiment of the present invention relates to a process for the production of aspartate, which comprises
[19341] (a) increasing or generating one or more activities selected from the group consisting of CDP-diacylglycerol-glycerol-3-phosphate 3-phosphatidyltransferase in an organelle, preferably in plastids or mitochondria, especially in plastids, of a non-human organism or a part thereof, preferably a microorganism, a plant cell, a plant or a part thereof, as compared to a corresponding non-transformed wild type non-human organism or a part thereof; and
[19342] (b) growing the non-human organism or a part thereof under conditions which permit the production of aspartate or a composition comprising aspartate in said non-human organism or in the culture medium surrounding said non-human organism.

[19343] A further embodiment of the present invention relates to a process for the production of 5-oxoproline, which comprises
[19344] (a) increasing or generating one or more activities selected from the group consisting of CDP-diacylglycerol-glycerol-3-phosphate 3-phosphatidyltransferase in an organelle, preferably in plastids or mitochondria, especially in plastids, of a non-human organism or a part thereof, preferably a microorganism, a plant cell, a plant or a part thereof, as compared to a corresponding non-transformed wild type non-human organism or a part thereof; and
[19345] (b) growing the non-human organism or a part thereof under conditions which permit the production of 5-oxoproline or a composition comprising 5-oxoproline in said non-human organism or in the culture medium surrounding said non-human organism.

[19346] A further embodiment of the present invention relates to a process for the production of serine, which comprises
[19347] (a) increasing or generating one or more activities selected from the group consisting of glutathione S-transferase in an organelle, preferably in plastids or mitochondria, especially in plastids, of a non-human organism or a part thereof, preferably a microorganism, a plant cell, a plant or a part thereof, as compared to a corresponding non-transformed wild type non-human organism or a part thereof; and
[19348] (b) growing the non-human organism or a part thereof under conditions which permit the production of serine or a composition comprising serine in said non-human organism or in the culture medium surrounding said non-human organism.

[19349] A further embodiment of the present invention relates to a process for the production of aspartate, which comprises
[19350] (a) increasing or generating one or more activities selected from the group consisting of exopolyphosphatase in an organelle, preferably in plastids or mitochondria, especially in plastids, of a non-human organism or a part thereof, preferably a microorganism, a plant cell, a plant or a part thereof, as compared to a corresponding non-transformed wild type non-human organism or a part thereof; and
[19351] (b) growing the non-human organism or a part thereof under conditions which permit the production of aspartate or a composition comprising aspartate in said non-human organism or in the culture medium surrounding said non-human organism.

[19352] A further embodiment of the present invention relates to a process for the production of phenylalanine, which comprises
[19353] (a) increasing or generating one or more activities selected from the group consisting of exopolyphosphatase in an organelle, preferably in plastids or mitochondria, especially in plastids, of a non-human organism or a part thereof, preferably a microorganism, a plant cell, a plant or a part thereof, as compared to a corresponding non-transformed wild type non-human organism or a part thereof; and
[19354] (b) growing the non-human organism or a part thereof under conditions which permit the production of phenylalanine or a composition comprising phenylalanine in said non-human organism or in the culture medium surrounding said non-human organism.

[19355] A further embodiment of the present invention relates to a process for the production of serine, which comprises
[19356] (a) increasing or generating one or more activities selected from the group consisting of exopolyphosphatase in an organelle, preferably in plastids or mitochondria, especially in plastids, of a non-human organism or a part thereof, preferably a microorganism, a plant cell, a plant or a part thereof, as compared to a corresponding non-transformed wild type non-human organism or a part thereof; and
[19357] (b) growing the non-human organism or a part thereof under conditions which permit the production of serine or a composition comprising serine in said non-human organism or in the culture medium surrounding said non-human organism.

[19358] A further embodiment of the present invention relates to a process for the production of aspartate, which comprises
[19359] (a) increasing or generating one or more activities selected from the group consisting of ABC metal ion transporter substrate-binding protein in an organelle, preferably in plastids or mitochondria, especially in plastids, of a non-human organism or a part thereof, preferably a microorganism, a plant cell, a plant or a part thereof, as compared to a corresponding non-transformed wild type non-human organism or a part thereof; and
[19360] (b) growing the non-human organism or a part thereof under conditions which permit the production of aspartate or a composition comprising aspartate in said non-human organism or in the culture medium surrounding said non-human organism.

[19361] A further embodiment of the present invention relates to a process for the production of phenylalanine, which comprises
[19362] (a) increasing or generating one or more activities selected from the group consisting of ABC metal ion transporter substrate-binding protein in an organelle, preferably in plastids or mitochondria, especially in plastids, of a non-human organism or a part thereof, preferably a microorganism, a plant cell, a plant or a part thereof, as compared to a corresponding non-transformed wild type non-human organism or a part thereof; and
[19363] (b) growing the non-human organism or a part thereof under conditions which permit the production of phenylalanine or a composition comprising phenylalanine in said non-human organism or in the culture medium surrounding said non-human organism.

[19364] A further embodiment of the present invention relates to a process for the production of serine, which comprises
[19365] (a) increasing or generating one or more activities selected from the group consisting of sll1761-protein in an organelle, preferably in plastids or mitochondria, especially in plastids, of a non-human organism or a part thereof, preferably a microorganism, a plant cell, a plant or a part thereof, as compared to a corresponding non-transformed wild type non-human organism or a part thereof; and
[19366] (b) growing the non-human organism or a part thereof under conditions which permit the production of serine or a composition comprising serine in said non-human organism or in the culture medium surrounding said non-human organism.

[19367] A further embodiment of the present invention relates to a process for the production of tyrosine, which comprises
[19368] (a) increasing or generating one or more activities selected from the group consisting of sll1761-protein in an organelle, preferably in plastids or mitochondria, especially in plastids, of a non-human organism or a part thereof, preferably a microorganism, a plant cell, a plant or a part thereof, as compared to a corresponding non-transformed wild type non-human organism or a part thereof; and
[19369] (b) growing the non-human organism or a part thereof under conditions which permit the production of tyrosine or a composition comprising tyrosine in said non-human organism or in the culture medium surrounding said non-human organism.

[19370] A further embodiment of the present invention relates to a process for the production of alanine, which comprises
[19371] (a) increasing or generating one or more activities selected from the group consisting of adenylate kinase in an organelle, preferably in plastids or mitochondria, especially in plastids, of a non-human organism or a part thereof, preferably a microorganism, a plant cell, a plant or a part thereof, as compared to a corresponding non-transformed wild type non-human organism or a part thereof; and
[19372] (b) growing the non-human organism or a part thereof under conditions which permit the production of alanine or a composition comprising alanine in said non-human organism or in the culture medium surrounding said non-human organism.

[19373] A further embodiment of the present invention relates to a process for the production of citrulline, which comprises
[19374] (a) increasing or generating one or more activities selected from the group consisting of adenylate kinase in an organelle, preferably in plastids or mitochondria, especially in plastids, of a non-human organism or a part thereof, preferably a microorganism, a plant cell, a plant or a part thereof, as compared to a corresponding non-transformed wild type non-human organism or a part thereof; and
[19375] (b) growing the non-human organism or a part thereof under conditions which permit the production of citrulline or a composition comprising citrulline in said non-human organism or in the culture medium surrounding said non-human organism.

[19376] A further embodiment of the present invention relates to a process for the production of glycine, which comprises
[19377] (a) increasing or generating one or more activities selected from the group consisting of adenylate kinase in an organelle, preferably in plastids or mitochondria, especially in plastids, of a non-human organism or a part thereof, preferably a microorganism, a plant cell, a plant or a part thereof, as compared to a corresponding non-transformed wild type non-human organism or a part thereof; and
[19378] (b) growing the non-human organism or a part thereof under conditions which permit the production of glycine or a composition comprising glycine in said non-human organism or in the culture medium surrounding said non-human organism.

[19379] A further embodiment of the present invention relates to a process for the production of serine, which comprises
[19380] (a) increasing or generating one or more activities selected from the group consisting of adenylate kinase in an organelle, preferably in plastids or mitochondria, especially in plastids, of a non-human organism or a part thereof, preferably a microorganism, a plant cell, a plant or a part thereof, as compared to a corresponding non-transformed wild type non-human organism or a part thereof; and
[19381] (b) growing the non-human organism or a part thereof under conditions which permit the production of serine or a composition comprising serine in said non-human organism or in the culture medium surrounding said non-human organism.

[19382] A further embodiment of the present invention relates to a process for the production of tyrosine, which comprises
[19383] (a) increasing or generating one or more activities selected from the group consisting of adenylate kinase in an organelle, preferably in plastids or mitochondria, especially in plastids, of a non-human organism or a part thereof, preferably a microorganism, a plant cell, a plant or a part thereof, as compared to a corresponding non-transformed wild type non-human organism or a part thereof; and
[19384] (b) growing the non-human organism or a part thereof under conditions which permit the production of tyrosine or a composition comprising tyrosine in said non-human organism or in the culture medium surrounding said non-human organism.

[19385] A further embodiment of the present invention relates to a process for the production of glycine, which comprises
[19386] (a) increasing or generating one or more activities selected from the group consisting of acyl transferase in an organelle, preferably in plastids or mitochondria, especially in plastids, of a non-human organism or a part thereof, preferably a microorganism, a plant cell, a plant or a part thereof, as compared to a corresponding non-transformed wild type non-human organism or a part thereof; and
[19387] (b) growing the non-human organism or a part thereof under conditions which permit the production of glycine or a composition comprising glycine in said non-human organism or in the culture medium surrounding said non-human organism.

[19388] A further embodiment of the present invention relates to a process for the production of phenylalanine, which comprises
[19389] (a) increasing or generating one or more activities selected from the group consisting of acyl transferase in an organelle, preferably in plastids or mitochondria, especially in plastids, of a non-human organism or a part thereof, preferably a microorganism, a plant cell, a plant or a part thereof, as compared to a corresponding non-transformed wild type non-human organism or a part thereof; and
[19390] (b) growing the non-human organism or a part thereof under conditions which permit the production of phenylalanine or a composition comprising phenylalanine in said non-human organism or in the culture medium surrounding said non-human organism.

[19391] A further embodiment of the present invention relates to a process for the production of serine, which comprises
[19392] (a) increasing or generating one or more activities selected from the group consisting of acyl transferase in an organelle, preferably in plastids or mitochondria, especially in plastids, of a non-human organism or a part thereof, preferably a microorganism, a plant cell, a plant or a part thereof, as compared to a corresponding non-transformed wild type non-human organism or a part thereof; and
[19393] (b) growing the non-human organism or a part thereof under conditions which permit the production of serine or a composition comprising serine in said non-human organism or in the culture medium surrounding said non-human organism.

[19394] A further embodiment of the present invention relates to a process for the production of aspartate, which comprises
[19395] (a) increasing or generating one or more activities selected from the group consisting of coproporphyrinogen Ill oxidase in an organelle, preferably in plastids or mitochondria, especially in plastids, of a non-human organism or a part thereof, preferably a microorganism, a plant cell, a plant or a part thereof, as compared to a corresponding non-transformed wild type non-human organism or a part thereof; and
[19396] (b) growing the non-human organism or a part thereof under conditions which permit the production of aspartate or a composition comprising aspartate in said non-human organism or in the culture medium surrounding said non-human organism.

[19397] A further embodiment of the present invention relates to a process for the production of citrulline, which comprises
[19398] (a) increasing or generating one or more activities selected from the group consisting of coproporphyrinogen Ill oxidase in an organelle, preferably in plastids or mitochondria, especially in plastids, of a non-human organism or a part thereof, preferably a microorganism, a plant cell, a plant or a part thereof, as compared to a corresponding non-transformed wild type non-human organism or a part thereof; and
[19399] (b) growing the non-human organism or a part thereof under conditions which permit the production of citrulline or a composition comprising citrulline in said non-human organism or in the culture medium surrounding said non-human organism.

[19400] A further embodiment of the present invention relates to a process for the production of phenylalanine, which comprises
[19401] (a) increasing or generating one or more activities selected from the group consisting of coproporphyrinogen III oxidase in an organelle, preferably in plastids or mitochondria, especially in plastids, of a non-human organism or a part thereof, preferably a microorganism, a plant cell, a plant or a part thereof, as compared to a corresponding non-transformed wild type non-human organism or a part thereof; and
[19402] (b) growing the non-human organism or a part thereof under conditions which permit the production of phenylalanine or a composition comprising phenylalanine in said non-human organism or in the culture medium surrounding said non-human organism.

[19403] A further embodiment of the present invention relates to a process for the production of serine, which comprises
[19404] (a) increasing or generating one or more activities selected from the group consisting of coproporphyrinogen III oxidase in an organelle, preferably in plastids or mitochondria, especially in plastids, of a non-human organism or a part thereof, preferably a microorganism, a plant cell, a plant or a part thereof, as compared to a corresponding non-transformed wild type non-human organism or a part thereof; and
[19405] (b) growing the non-human organism or a part thereof under conditions which permit the production of serine or a composition comprising serine in said non-human organism or in the culture medium surrounding said non-human organism.

[19406] A further embodiment of the present invention relates to a process for the production of tyrosine, which comprises
[19407] (a) increasing or generating one or more activities selected from the group consisting of coproporphyrinogen III oxidase in an organelle, preferably in plastids or mitochondria, especially in plastids, of a non-human organism or a part thereof, preferably a microorganism, a plant cell, a plant or a part thereof, as compared to a corresponding non-transformed wild type non-human organism or a part thereof; and
[19408] (b) growing the non-human organism or a part thereof under conditions which permit the production of tyrosine or a composition comprising tyrosine in said non-human organism or in the culture medium surrounding said non-human organism.

[19409] A further embodiment of the present invention relates to a process for the production of aspartate, which comprises
[19410] (a) increasing or generating one or more activities selected from the group consisting of cation-transporting ATPase in an organelle, preferably in plastids or mitochondria, especially in plastids, of a non-human organism or a part thereof, preferably a microorganism, a plant cell, a plant or a part thereof, as compared to a corresponding non-transformed wild type non-human organism or a part thereof; and
[19411] (b) growing the non-human organism or a part thereof under conditions which permit the production of aspartate or a composition comprising aspartate in said non-human organism or in the culture medium surrounding said non-human organism.

[19412] A further embodiment of the present invention relates to a process for the production of aspartate, which comprises
[19413] (a) increasing or generating one or more activities selected from the group consisting of cation-transporting ATPase in an organelle, preferably in plastids or mitochondria, especially in plastids, of a non-human organism or a part thereof, preferably a microorganism, a plant cell, a plant or a part thereof, as compared to a corresponding non-transformed wild type non-human organism or a part thereof; and
[19414] (b) growing the non-human organism or a part thereof under conditions which permit the production of aspartate or a composition comprising aspartate in said non-human organism or in the culture medium surrounding said non-human organism.

[19415] A further embodiment of the present invention relates to a process for the production of glycine, which comprises
[19416] (a) increasing or generating one or more activities selected from the group consisting of glycosyl transferase in an organelle, preferably in plastids or mitochondria, especially in plastids, of a non-human organism or a part thereof, preferably a microorganism, a plant cell, a plant or a part thereof, as compared to a corresponding non-transformed wild type non-human organism or a part thereof; and
[19417] (b) growing the non-human organism or a part thereof under conditions which permit the production of glycine or a composition comprising glycine in said non-human organism or in the culture medium surrounding said non-human organism.

[19418] A further embodiment of the present invention relates to a process for the production of phenylalanine, which comprises
[19419] (a) increasing or generating one or more activities selected from the group consisting of precorrin methylase in an organelle, preferably in plastids or mitochondria, especially in plastids, of a non-human organism or a part thereof, preferably a microorganism, a plant cell, a plant or a part thereof, as compared to a corresponding non-transformed wild type non-human organism or a part thereof; and
[19420] (b) growing the non-human organism or a part thereof under conditions which permit the production of phenylalanine or a composition comprising phenylalanine in said non-human organism or in the culture medium surrounding said non-human organism.

[19421] A further embodiment of the present invention relates to a process for the production of tyrosine, which comprises
[19422] (a) increasing or generating one or more activities selected from the group consisting of precorrin methylase in an organelle, preferably in plastids or mitochondria, especially in plastids, of a non-human organism or a part thereof, preferably a microorganism, a plant cell, a plant or a part thereof, as compared to a corresponding non-transformed wild type non-human organism or a part thereof; and
[19423] (b) growing the non-human organism or a part thereof under conditions which permit the production of tyrosine or a composition comprising tyrosine in said non-human organism or in the culture medium surrounding said non-human organism.

[19424] A further embodiment of the present invention relates to a process for the production of citrulline, which comprises
[19425] (a) increasing or generating one or more activities selected from the group consisting of aldehyde dehydrogenase in an organelle, preferably in plastids or mitochondria, especially in plastids, of a non-human organism or a part thereof, preferably a microorganism, a plant cell, a plant or a part thereof, as compared to a corresponding non-transformed wild type non-human organism or a part thereof; and
[19426] (b) growing the non-human organism or a part thereof under conditions which permit the production of citrulline or a composition comprising citrulline in said non-human organism or in the culture medium surrounding said non-human organism.

[19427] A further embodiment of the present invention relates to a process for the production of alanine, which comprises
[19428] (a) increasing or generating one or more activities selected from the group consisting of bifunctional purine biosynthesis protein in an organelle, preferably in plastids or mitochondria, especially in plastids, of a non-human organism or a part thereof, preferably a microorganism, a plant cell, a plant or a part thereof, as compared to a corresponding non-transformed wild type non-human organism or a part thereof; and
[19429] (b) growing the non-human organism or a part thereof under conditions which permit the production of alanine or a composition comprising alanine in said non-human organism or in the culture medium surrounding said non-human organism.

[19430] A further embodiment of the present invention relates to a process for the production of serine, which comprises
[19431] (a) increasing or generating one or more activities selected from the group consisting of bifunctional purine biosynthesis protein in an organelle, preferably in plastids or mitochondria, especially in plastids, of a non-human organism or a part thereof, preferably a microorganism, a plant cell, a plant or a part thereof, as compared to a corresponding non-transformed wild type non-human organism or a part thereof; and
[19432] (b) growing the non-human organism or a part thereof under conditions which permit the production of serine or a composition comprising serine in said non-human organism or in the culture medium surrounding said non-human organism.

[19433] A further embodiment of the present invention relates to a process for the production of 5-oxoproline, which comprises
[19434] (a) increasing or generating one or more activities selected from the group consisting of bifunctional purine biosynthesis protein in an organelle, preferably in plastids or mitochondria, especially in plastids, of a non-human organism or a part thereof, preferably a microorganism, a plant cell, a plant or a part thereof, as compared to a corresponding non-transformed wild type non-human organism or a part thereof; and
[19435] (b) growing the non-human organism or a part thereof under conditions which permit the production of 5-oxoproline or a composition comprising 5-oxoproline in said non-human organism or in the culture medium surrounding said non-human organism.

[19436] A further embodiment of the present invention relates to a process for the production of asparagine, which comprises
[19437] (a) increasing or generating one or more activities selected from the group consisting of Glu/Leu/Phe/Val dehydrogenase in an organelle, preferably in plastids or mitochondria, especially in plastids, of a non-human organism or a part thereof, preferably a microorganism, a plant cell, a plant or a part thereof, as compared to a corresponding non-transformed wild type non-human organism or a part thereof; and
[19438] (b) growing the non-human organism or a part thereof under conditions which permit the production of asparagine or a composition comprising asparagine in said non-human organism or in the culture medium surrounding said non-human organism.

[19439] A further embodiment of the present invention relates to a process for the production of phenylalanine, which comprises
[19440] (a) increasing or generating one or more activities selected from the group consisting of Glu/Leu/Phe/Val dehydrogenase in an organelle, preferably in plastids or mitochondria, especially in plastids, of a non-human organism or a part thereof, preferably a microorganism, a plant cell, a plant or a part thereof, as compared to a corresponding non-transformed wild type non-human organism or a part thereof; and
[19441] (b) growing the non-human organism or a part thereof under conditions which permit the production of phenylalanine or a composition comprising phenylalanine in said non-human organism or in the culture medium surrounding said non-human organism.

[19442] A further embodiment of the present invention relates to a process for the production of tyrosine, which comprises
[19443] (a) increasing or generating one or more activities selected from the group consisting of Glu/Leu/Phe/Val dehydrogenase in an organelle, preferably in plastids or mitochondria, especially in plastids, of a non-human organism or a part thereof, preferably a microorganism, a plant cell, a plant or a part thereof, as compared to a corresponding non-transformed wild type non-human organism or a part thereof; and
[19444] (b) growing the non-human organism or a part thereof under conditions which permit the production of tyrosine or a composition comprising tyrosine in said non-human organism or in the culture medium surrounding said non-human organism.

[19445] A further embodiment of the present invention relates to a process for the production of phenylalanine, which comprises
[19446] (a) increasing or generating one or more activities selected from the group consisting of malate dehydrogenase in an organelle, preferably in plastids or mitochondria, especially in plastids, of a non-human organism or a part thereof, preferably a microorganism, a plant cell, a plant or a part thereof, as compared to a corresponding non-transformed wild type non-human organism or a part thereof; and
[19447] (b) growing the non-human organism or a part thereof under conditions which permit the production of phenylalanine or a composition comprising phenylalanine in said non-human organism or in the culture medium surrounding said non-human organism.

[19448] A further embodiment of the present invention relates to a process for the production of alanine, which comprises
[19449] (a) increasing or generating one or more activities selected from the group consisting of geranylgeranyl pyrophosphate synthase in an organelle, preferably in plastids or mitochondria, especially in plastids, of a non-human organism or a part thereof, preferably a microorganism, a plant cell, a plant or a part thereof, as compared to a corresponding non-transformed wild type non-human organism or a part thereof; and
[19450] (b) growing the non-human organism or a part thereof under conditions which permit the production of alanine or a composition comprising alanine in said non-human organism or in the culture medium surrounding said non-human organism.

[19451] A further embodiment of the present invention relates to a process for the production of asparagine, which comprises
[19452] (a) increasing or generating one or more activities selected from the group consisting of geranylgeranyl pyrophosphate synthase in an organelle, preferably in plastids or mitochondria, especially in plastids, of a non-human organism or a part thereof, preferably a microorganism, a plant cell, a plant or a part thereof, as compared to a corresponding non-transformed wild type non-human organism or a part thereof; and
[19453] (b) growing the non-human organism or a part thereof under conditions which permit the production of asparagine or a composition comprising asparagine in said non-human organism or in the culture medium surrounding said non-human organism.

[19454] A further embodiment of the present invention relates to a process for the production of phenylalanine, which comprises
[19455] (a) increasing or generating one or more activities selected from the group consisting of geranylgeranyl pyrophosphate synthase in an organelle, preferably in plastids or mitochondria, especially in plastids, of a non-human organism or a part thereof, preferably a microorganism, a plant cell, a plant or a part thereof, as compared to a corresponding non-transformed wild type non-human organism or a part thereof; and
[19456] (b) growing the non-human organism or a part thereof under conditions which permit the production of phenylalanine or a composition comprising phenylalanine in said non-human organism or in the culture medium surrounding said non-human organism.

[19457] A further embodiment of the present invention relates to a process for the production of serine, which comprises
[19458] (a) increasing or generating one or more activities selected from the group consisting of geranylgeranyl pyrophosphate synthase in an organelle, preferably in plastids or mitochondria, especially in plastids, of a non-human organism or a part thereof, preferably a microorganism, a plant cell, a plant or a part thereof, as compared to a corresponding non-transformed wild type non-human organism or a part thereof; and
[19459] (b) growing the non-human organism or a part thereof under conditions which permit the production of serine or a composition comprising serine in said non-human organism or in the culture medium surrounding said non-human organism.

[19460] A further embodiment of the present invention relates to a process for the production of tyrosine, which comprises
[19461] (a) increasing or generating one or more activities selected from the group consisting of geranylgeranyl pyrophosphate synthase in an organelle, preferably in plastids or mitochondria, especially in plastids, of a non-human organism or a part thereof, preferably a microorganism, a plant cell, a plant or a part thereof, as compared to a corresponding non-transformed wild type non-human organism or a part thereof; and
[19462] (b) growing the non-human organism or a part thereof under conditions which permit the production of tyrosine or a composition comprising tyrosine in said non-human organism or in the culture medium surrounding said non-human organism.

[19463] A further embodiment of the present invention relates to a process for the production of 5-oxoproline, which comprises
[19464] (a) increasing or generating one or more activities selected from the group consisting of geranylgeranyl pyrophosphate synthase in an organelle, preferably in plastids or mitochondria, especially in plastids, of a non-human organism or a part thereof, preferably a microorganism, a plant cell, a plant or a part thereof, as compared to a corresponding non-transformed wild type non-human organism or a part thereof; and
[19465] (b) growing the non-human organism or a part thereof under conditions which permit the production of 5-oxoproline or a composition comprising 5-oxoproline in said non-human organism or in the culture medium surrounding said non-human organism.

[19466] A further embodiment of the present invention relates to a process for the production of phenylalanine, which comprises
[19467] (a) increasing or generating one or more activities selected from the group consisting of amine oxidase in an organelle, preferably in plastids or mitochondria, especially in plastids, of a non-human organism or a part thereof, preferably a microorganism, a plant cell, a plant or a part thereof, as compared to a corresponding non-transformed wild type non-human organism or a part thereof; and
[19468] (b) growing the non-human organism or a part thereof under conditions which permit the production of phenylalanine or a composition comprising phenylalanine in said non-human organism or in the culture medium surrounding said non-human organism.

[19469] A further embodiment of the present invention relates to a process for the production of serine, which comprises
[19470] (a) increasing or generating one or more activities selected from the group consisting of kinase in an organelle, preferably in plastids or mitochondria, especially in plastids, of a non-human organism or a part thereof, preferably a microorganism, a plant cell, a plant or a part thereof, as compared to a corresponding non-transformed wild type non-human organism or a part thereof; and
[19471] (b) growing the non-human organism or a part thereof under conditions which permit the production of serine or a composition comprising serine in said non-human organism or in the culture medium surrounding said non-human organism.

[19472] A further embodiment of the present invention relates to a process for the production of tyrosine, which comprises
[19473] (a) increasing or generating one or more activities selected from the group consisting of tryptophan synthase alpha chain in an organelle, preferably in plastids or mitochondria, especially in plastids, of a non-human organism or a part thereof, preferably a microorganism, a plant cell, a plant or a part thereof, as compared to a corresponding non-transformed wild type non-human organism or a part thereof; and
[19474] (b) growing the non-human organism or a part thereof under conditions which permit the production of tyrosine or a composition comprising tyrosine in said non-human organism or in the culture medium surrounding said non-human organism.

[19475] A further embodiment of the present invention relates to a process for the production of ornithine, which comprises
[19476] (a) increasing or generating one or more activities selected from the group consisting of argininosuccinate lyase in an organelle, preferably in plastids or mitochondria, especially in plastids, of a non-human organism or a part thereof, preferably a microorganism, a plant cell, a plant or a part thereof, as compared to a corresponding non-transformed wild type non-human organism or a part thereof; and
[19477] (b) growing the non-human organism or a part thereof under conditions which permit the production of ornithine or a composition comprising ornithine in said non-human organism or in the culture medium surrounding said non-human organism.

[19478] A further embodiment of the present invention relates to a process for the production of serine, which comprises
[19479] (a) increasing or generating one or more activities selected from the group consisting of argininosuccinate lyase in an organelle, preferably in plastids or mitochondria, especially in plastids, of a non-human organism or a part thereof, preferably a microorganism, a plant cell, a plant or a part thereof, as compared to a corresponding non-transformed wild type non-human organism or a part thereof; and
[19480] (b) growing the non-human organism or a part thereof under conditions which permit the production of serine or a composition comprising serine in said non-human organism or in the culture medium surrounding said non-human organism.

[19481] A further embodiment of the present invention relates to a process for the production of asparagine, which comprises
[19482] (a) increasing or generating one or more activities selected from the group consisting of gamma-glutamyltranspeptidase in an organelle, preferably in plastids or mitochondria, especially in plastids, of a non-human organism or a part thereof, preferably a microorganism, a plant cell, a plant or a part thereof, as compared to a corresponding non-transformed wild type non-human organism or a part thereof; and
[19483] (b) growing the non-human organism or a part thereof under conditions which permit the production of asparagine or a composition comprising asparagine in said non-human organism or in the culture medium surrounding said non-human organism.

[19484] A further embodiment of the present invention relates to a process for the production of aspartate, which comprises
[19485] (a) increasing or generating one or more activities selected from the group consisting of iron(III) dicitrate-binding protein in an organelle, preferably in plastids or mitochondria, especially in plastids, of a non-human organism or a part thereof, preferably a microorganism, a plant cell, a plant or a part thereof, as compared to a corresponding non-transformed wild type non-human organism or a part thereof; and
[19486] (b) growing the non-human organism or a part thereof under conditions which permit the production of aspartate or a composition comprising aspartate in said non-human organism or in the culture medium surrounding said non-human organism.

[19487] A further embodiment of the present invention relates to a process for the production of phenylalanine, which comprises
[19488] (a) increasing or generating one or more activities selected from the group consisting of iron(III) dicitrate-binding protein in an organelle, preferably in plastids or mitochondria, especially in plastids, of a non-human organism or a part thereof, preferably a microorganism, a plant cell, a plant or a part thereof, as compared to a corresponding non-transformed wild type non-human organism or a part thereof; and
[19489] (b) growing the non-human organism or a part thereof under conditions which permit the production of phenylalanine or a composition comprising phenylalanine in said non-human organism or in the culture medium surrounding said non-human organism.

[19490] A further embodiment of the present invention relates to a process for the production of phenylalanine, which comprises
[19491] (a) increasing or generating one or more activities selected from the group consisting of Na+/K+ transporter in an organelle, preferably in plastids or mitochondria, especially in plastids, of a non-human organism or a part thereof, preferably a microorganism, a plant cell, a plant or a part thereof, as compared to a corresponding non-transformed wild type non-human organism or a part thereof; and
[19492] (b) growing the non-human organism or a part thereof under conditions which permit the production of phenylalanine or a composition comprising phenylalanine in said non-human organism or in the culture medium surrounding said non-human organism.

[19493] A further embodiment of the present invention relates to a process for the production of tyrosine, which comprises
[19494] (a) increasing or generating one or more activities selected from the group consisting of Na+/K+ transporter in an organelle, preferably in plastids or mitochondria, especially in plastids, of a non-human organism or a part thereof, preferably a microorganism, a plant cell, a plant or a part thereof, as compared to a corresponding non-transformed wild type non-human organism or a part thereof; and
[19495] (b) growing the non-human organism or a part thereof under conditions which permit the production of tyrosine or a composition comprising tyrosine in said non-human organism or in the culture medium surrounding said non-human organism.

[19496] A further embodiment of the present invention relates to a process for the production of phenylalanine, which comprises
[19497] (a) increasing or generating one or more activities selected from the group consisting of 3-oxoacyl-[acyl-carrier-protein] synthase in an organelle, preferably in plastids or mitochondria, especially in plastids, of a non-human organism or a part thereof, preferably a microorganism, a plant cell, a plant or a part thereof, as compared to a corresponding non-transformed wild type non-human organism or a part thereof; and
[19498] (b) growing the non-human organism or a part thereof under conditions which permit the production of phenylalanine or a composition comprising phenylalanine in said non-human organism or in the culture medium surrounding said non-human organism.

[19499] A further embodiment of the present invention relates to a process for the production of serine, which comprises
[19500] (a) increasing or generating one or more activities selected from the group consisting of 3-oxoacyl-[acyl-carrier-protein] synthase in an organelle, preferably in plastids or mitochondria, especially in plastids, of a non-human organism or a part thereof, preferably a microorganism, a plant cell, a plant or a part thereof, as compared to a corresponding non-transformed wild type non-human organism or a part thereof; and
[19501] (b) growing the non-human organism or a part thereof under conditions which permit the production of serine or a composition comprising serine in said non-human organism or in the culture medium surrounding said non-human organism.

[19502] A further embodiment of the present invention relates to a process for the production of phenylalanine, which comprises
[19503] (a) increasing or generating one or more activities selected from the group consisting of Photosystem I reaction center subunit XI in an organelle, preferably in plastids or mitochondria, especially in plastids, of a non-human organism or a part thereof, preferably a microorganism, a plant cell, a plant or a part thereof, as compared to a corresponding non-transformed wild type non-human organism or a part thereof; and
[19504] (b) growing the non-human organism or a part thereof under conditions which permit the production of phenylalanine or a composition comprising phenylalanine in said non-human organism or in the culture medium surrounding said non-human organism.

[19505] A further embodiment of the present invention relates to a process for the production of serine, which comprises
[19506] (a) increasing or generating one or more activities selected from the group consisting of Photosystem I reaction center subunit XI in an organelle, preferably in plastids or mitochondria, especially in plastids, of a non-human organism or a part thereof, preferably a microorganism, a plant cell, a plant or a part thereof, as compared to a corresponding non-transformed wild type non-human organism or a part thereof; and
[19507] (b) growing the non-human organism or a part thereof under conditions which permit the production of serine or a composition comprising serine in said non-human organism or in the culture medium surrounding said non-human organism.

[19508] A further embodiment of the present invention relates to a process for the production of tyrosine, which comprises
[19509] (a) increasing or generating one or more activities selected from the group consisting of Photosystem I reaction center subunit XI in an organelle, preferably in plastids or mitochondria, especially in plastids, of a non-human organism or a part thereof, preferably a microorganism, a plant cell, a plant or a part thereof, as compared to a corresponding non-transformed wild type non-human organism or a part thereof; and
[19510] (b) growing the non-human organism or a part thereof under conditions which permit the production of tyrosine or a composition comprising tyrosine in said non-human organism or in the culture medium surrounding said non-human organism.

[19511] A further embodiment of the present invention relates to a process for the production of phenylalanine, which comprises
[19512] (a) increasing or generating one or more activities selected from the group consisting of photosystem II protein in an organelle, preferably in plastids or mitochondria, especially in plastids, of a non-human organism or a part thereof, preferably a microorganism, a plant cell, a plant or a part thereof, as compared to a corresponding non-transformed wild type non-human organism or a part thereof; and
[19513] (b) growing the non-human organism or a part thereof under conditions which permit the production of phenylalanine or a composition comprising phenylalanine in said non-human organism or in the culture medium surrounding said non-human organism.

[19514] A further embodiment of the present invention relates to a process for the production of serine, which comprises
[19515] (a) increasing or generating one or more activities selected from the group consisting of photosystem II protein in an organelle, preferably in plastids or mitochondria, especially in plastids, of a non-human organism or a part thereof, preferably a microorganism, a plant cell, a plant or a part thereof, as compared to a corresponding non-transformed wild type non-human organism or a part thereof; and
[19516] (b) growing the non-human organism or a part thereof under conditions which permit the production of serine or a composition comprising serine in said non-human organism or in the culture medium surrounding said non-human organism.

[19517] A further embodiment of the present invention relates to a process for the production of tyrosine, which comprises
[19518] (a) increasing or generating one or more activities selected from the group consisting of photosystem II protein in an organelle, preferably in plastids or mitochondria, especially in plastids, of a non-human organism or a part thereof, preferably a microorganism, a plant cell, a plant or a part thereof, as compared to a corresponding non-transformed wild type non-human organism or a part thereof; and
[19519] (b) growing the non-human organism or a part thereof under conditions which permit the production of tyrosine or a composition comprising tyrosine in said non-human organism or in the culture medium surrounding said non-human organism.

[19520] A further embodiment of the present invention relates to a process for the production of 5-oxoproline, which comprises
[19521] (a) increasing or generating one or more activities selected from the group consisting of photosystem II protein in an organelle, preferably in plastids or mitochondria, especially in plastids, of a non-human organism or a part thereof, preferably a microorganism, a plant cell, a plant or a part thereof, as compared to a corresponding non-transformed wild type non-human organism or a part thereof; and
[19522] (b) growing the non-human organism or a part thereof under conditions which permit the production of 5-oxoproline or a composition comprising 5-oxoproline in said non-human organism or in the culture medium surrounding said non-human organism.

[19523] A further embodiment of the present invention relates to a process for the production of asparagine, which comprises
[19524] (a) increasing or generating one or more activities selected from the group consisting of glutamine amidotransferase in an organelle, preferably in plastids or mitochondria, especially in plastids, of a non-human organism or a part thereof, preferably a microorganism, a plant cell, a plant or a part thereof, as compared to a corresponding non-transformed wild type non-human organism or a part thereof; and
[19525] (b) growing the non-human organism or a part thereof under conditions which permit the production of asparagine or a composition comprising asparagine in said non-human organism or in the culture medium surrounding said non-human organism.

[19526] A further embodiment of the present invention relates to a process for the production of citrulline, which comprises
[19527] (a) increasing or generating one or more activities selected from the group consisting of phosphoadenosine phosphosulfate reductase in an organelle, preferably in plastids or mitochondria, especially in plastids, of a non-human organism or a part thereof, preferably a microorganism, a plant cell, a plant or a part thereof, as compared to a corresponding non-transformed wild type non-human organism or a part thereof; and
[19528] (b) growing the non-human organism or a part thereof under conditions which permit the production of citrulline or a composition comprising citrulline in said non-human organism or in the culture medium surrounding said non-human organism.

[19529] A further embodiment of the present invention relates to a process for the production of asparagine, which comprises
[19530] (a) increasing or generating one or more activities selected from the group consisting of riboflavin biosynthesis protein in an organelle, preferably in plastids or mitochondria, especially in plastids, of a non-human organism or a part thereof, preferably a microorganism, a plant cell, a plant or a part thereof, as compared to a corresponding non-transformed wild type non-human organism or a part thereof; and
[19531] (b) growing the non-human organism or a part thereof under conditions which permit the production of asparagine or a composition comprising asparagine in said non-human organism or in the culture medium surrounding said non-human organism.

[19532] A further embodiment of the present invention relates to a process for the production of homoserine, which comprises
[19533] (a) increasing or generating one or more activities selected from the group consisting of threonine dehydratase in an organelle, preferably in plastids or mitochondria, especially in plastids, of a non-human organism or a part thereof, preferably a microorganism, a plant cell, a plant or a part thereof, as compared to a corresponding non-transformed wild type non-human organism or a part thereof; and
[19534] (b) growing the non-human organism or a part thereof under conditions which permit the production of homoserine or a composition comprising homoserine in said non-human organism or in the culture medium surrounding said non-human organism.

[19535] A further embodiment of the present invention relates to a process for the production of tyrosine, which comprises
[19536] (a) increasing or generating one or more activities selected from the group consisting of threonine dehydratase in an organelle, preferably in plastids or mitochondria, especially in plastids, of a non-human organism or a part thereof, preferably a microorganism, a plant cell, a plant or a part thereof, as compared to a corresponding non-transformed wild type non-human organism or a part thereof; and
[19537] (b) growing the non-human organism or a part thereof under conditions which permit the production of tyrosine or a composition comprising tyrosine in said non-human organism or in the culture medium surrounding said non-human organism.

[19538] A further embodiment of the present invention relates to a process for the production of alanine, which comprises
[19539] (a) increasing or generating one or more activities selected from the group consisting of short-chain alcohol dehydrogenase family in an organelle, preferably in plastids or mitochondria, especially in plastids, of a non-human organism or a part thereof, preferably a microorganism, a plant cell, a plant or a part thereof, as compared to a corresponding non-transformed wild type non-human organism or a part thereof; and
[19540] (b) growing the non-human organism or a part thereof under conditions which permit the production of alanine or a composition comprising alanine in said non-human organism or in the culture medium surrounding said non-human organism.

[19541] A further embodiment of the present invention relates to a process for the production of phenylalanine, which comprises
[19542] (a) increasing or generating one or more activities selected from the group consisting of short-chain alcohol dehydrogenase family in an organelle, preferably in plastids or mitochondria, especially in plastids, of a non-human organism or a part thereof, preferably a microorganism, a plant cell, a plant or a part thereof, as compared to a corresponding non-transformed wild type non-human organism or a part thereof; and
[19543] (b) growing the non-human organism or a part thereof under conditions which permit the production of phenylalanine or a composition comprising phenylalanine in said non-human organism or in the culture medium surrounding said non-human organism.

[19544] A further embodiment of the present invention relates to a process for the production of tyrosine, which comprises
[19545] (a) increasing or generating one or more activities selected from the group consisting of short-chain alcohol dehydrogenase family in an organelle, preferably in plastids or mitochondria, especially in plastids, of a non-human organism or a part thereof, preferably a microorganism, a plant cell, a plant or a part thereof, as compared to a corresponding non-transformed wild type non-human organism or a part thereof; and
[19546] (b) growing the non-human organism or a part thereof under conditions which permit the production of tyrosine or a composition comprising tyrosine in said non-human organism or in the culture medium surrounding said non-human organism.

[19547] A further embodiment of the present invention relates to a process for the production of phenylalanine, which comprises
[19548] (a) increasing or generating one or more activities selected from the group consisting of Sec-independent protein translocase subunit in an organelle, preferably in plastids or mitochondria, especially in plastids, of a non-human organism or a part thereof, preferably a microorganism, a plant cell, a plant or a part thereof, as compared to a corresponding non-transformed wild type non-human organism or a part thereof; and
[19549] (b) growing the non-human organism or a part thereof under conditions which permit the production of phenylalanine or a composition comprising phenylalanine in said non-human organism or in the culture medium surrounding said non-human organism.

[19550] A further embodiment of the present invention relates to a process for the production of tyrosine, which comprises
[19551] (a) increasing or generating one or more activities selected from the group consisting of Sec-independent protein translocase subunit in an organelle, preferably in plastids or mitochondria, especially in plastids, of a non-human organism or a part thereof, preferably a microorganism, a plant cell, a plant or a part thereof, as compared to a corresponding non-transformed wild type non-human organism or a part thereof; and
[19552] (b) growing the non-human organism or a part thereof under conditions which permit the production of tyrosine or a composition comprising tyrosine in said non-human organism or in the culture medium surrounding said non-human organism.

[19553] A further embodiment of the present invention relates to a process for the production of 5-oxoproline, which comprises
[19554] (a) increasing or generating one or more activities selected from the group consisting of Sec-independent protein translocase subunit in an organelle, preferably in plastids or mitochondria, especially in plastids, of a non-human organism or a part thereof, preferably a microorganism, a plant cell, a plant or a part thereof, as compared to a corresponding non-transformed wild type non-human organism or a part thereof; and
[19555] (b) growing the non-human organism or a part thereof under conditions which permit the production of 5-oxoproline or a composition comprising 5-oxoproline in said non-human organism or in the culture medium surrounding said non-human organism.

[19556] A further embodiment of the present invention relates to a process for the production of tyrosine, which comprises
[19557] (a) increasing or generating one or more activities selected from the group consisting of transcriptional regulator in an organelle, preferably in plastids or mitochondria, especially in plastids, of a non-human organism or a part thereof, preferably a microorganism, a plant cell, a plant or a part thereof, as compared to a corresponding non-transformed wild type non-human organism or a part thereof; and
[19558] (b) growing the non-human organism or a part thereof under conditions which permit the production of tyrosine or a composition comprising tyrosine in said non-human organism or in the culture medium surrounding said non-human organism.

[19559] A further embodiment of the present invention relates to a process for the production of asparagine, which comprises
[19560] (a) increasing or generating one or more activities selected from the group consisting of amino acid ABC transporter permease protein in an organelle, preferably in plastids or mitochondria, especially in plastids, of a non-human organism or a part thereof, preferably a microorganism, a plant cell, a plant or a part thereof, as compared to a corresponding non-transformed wild type non-human organism or a part thereof; and
[19561] (b) growing the non-human organism or a part thereof under conditions which permit the production of asparagine or a composition comprising asparagine in said non-human organism or in the culture medium surrounding said non-human organism.

[19562] A further embodiment of the present invention relates to a process for the production of tyrosine, which comprises
[19563] (a) increasing or generating one or more activities selected from the group consisting of TCC0768-protein in an organelle, preferably in plastids or mitochondria, especially in plastids, of a non-human organism or a part thereof, preferably a microorganism, a plant cell, a plant or a part thereof, as compared to a corresponding non-transformed wild type non-human organism or a part thereof; and
[19564] (b) growing the non-human organism or a part thereof under conditions which permit the production of tyrosine or a composition comprising tyrosine in said non-human organism or in the culture medium surrounding said non-human organism.

[19565] A further embodiment of the present invention relates to a process for the production of alanine, which comprises
[19566] (a) increasing or generating one or more activities selected from the group consisting of TCC0881-protein in an organelle, preferably in plastids or mitochondria, especially in plastids, of a non-human organism or a part thereof, preferably a microorganism, a plant cell, a plant or a part thereof, as compared to a corresponding non-transformed wild type non-human organism or a part thereof; and
[19567] (b) growing the non-human organism or a part thereof under conditions which permit the production of alanine or a composition comprising alanine in said non-human organism or in the culture medium surrounding said non-human organism.

[19568] A further embodiment of the present invention relates to a process for the production of serine, which comprises
[19569] (a) increasing or generating one or more activities selected from the group consisting of TCC0881-protein in an organelle, preferably in plastids or mitochondria, especially in plastids, of a non-human organism or a part thereof, preferably a microorganism, a plant cell, a plant or a part thereof, as compared to a corresponding non-transformed wild type non-human organism or a part thereof; and
[19570] (b) growing the non-human organism or a part thereof under conditions which permit the production of serine or a composition comprising serine in said non-human organism or in the culture medium surrounding said non-human organism.

[19571] A further embodiment of the present invention relates to a process for the production of alanine, which comprises
[19572] (a) increasing or generating one or more activities selected from the group consisting of metal-dependent hydrolase in an organelle, preferably in plastids or mitochondria, especially in plastids, of a non-human organism or a part thereof, preferably a microorganism, a plant cell, a plant or a part thereof, as compared to a corresponding non-transformed wild type non-human organism or a part thereof; and
[19573] (b) growing the non-human organism or a part thereof under conditions which permit the production of alanine or a composition comprising alanine in said non-human organism or in the culture medium surrounding said non-human organism.

[19574] A further embodiment of the present invention relates to a process for the production of serine, which comprises
[19575] (a) increasing or generating one or more activities selected from the group consisting of metal-dependent hydrolase in an organelle, preferably in plastids or mitochondria, especially in plastids, of a non-human organism or a part thereof, preferably a microorganism, a plant cell, a plant or a part thereof, as compared to a corresponding non-transformed wild type non-human organism or a part thereof; and
[19576] (b) growing the non-human organism or a part thereof under conditions which permit the production of serine or a composition comprising serine in said non-human organism or in the culture medium surrounding said non-human organism.

[19577] A further embodiment of the present invention relates to a process for the production of phenylalanine, which comprises
[19578] (a) increasing or generating one or more activities selected from the group consisting of multiple antibiotic resistance protein in an organelle, preferably in plastids or mitochondria, especially in plastids, of a non-human organism or a part thereof, preferably a microorganism, a plant cell, a plant or a part thereof, as compared to a corresponding non-transformed wild type non-human organism or a part thereof; and
[19579] (b) growing the non-human organism or a part thereof under conditions which permit the production of phenylalanine or a composition comprising phenylalanine in said non-human organism or in the culture medium surrounding said non-human organism.

[19580] A further embodiment of the present invention relates to a process for the production of tyrosine, which comprises
[19581] (a) increasing or generating one or more activities selected from the group consisting of multiple antibiotic resistance protein in an organelle, preferably in plastids or mitochondria, especially in plastids, of a non-human organism or a part thereof, preferably a microorganism, a plant cell, a plant or a part thereof, as compared to a corresponding non-transformed wild type non-human organism or a part thereof; and
[19582] (b) growing the non-human organism or a part thereof under conditions which permit the production of tyrosine or a composition comprising tyrosine in said non-human organism or in the culture medium surrounding said non-human organism.

[19583] A further embodiment of the present invention relates to a process for the production of alanine, which comprises
[19584] (a) increasing or generating one or more activities selected from the group consisting of TTC1386-protein in an organelle, preferably in plastids or mitochondria, especially in plastids, of a non-human organism or a part thereof, preferably a microorganism, a plant cell, a plant or a part thereof, as compared to a corresponding non-transformed wild type non-human organism or a part thereof; and
[19585] (b) growing the non-human organism or a part thereof under conditions which permit the production of alanine or a composition comprising alanine in said non-human organism or in the culture medium surrounding said non-human organism.

[19586] A further embodiment of the present invention relates to a process for the production of glycine, which comprises
[19587] (a) increasing or generating one or more activities selected from the group consisting of TTC1386-protein in an organelle, preferably in plastids or mitochondria, especially in plastids, of a non-human organism or a part thereof, preferably a microorganism, a plant cell, a plant or a part thereof, as compared to a corresponding non-transformed wild type non-human organism or a part thereof; and
[19588] (b) growing the non-human organism or a part thereof under conditions which permit the production of glycine or a composition comprising glycine in said non-human organism or in the culture medium surrounding said non-human organism.

[19589] A further embodiment of the present invention relates to a process for the production of phenylalanine, which comprises
[19590] (a) increasing or generating one or more activities selected from the group consisting of TTC1386-protein in an organelle, preferably in plastids or mitochondria, especially in plastids, of a non-human organism or a part thereof, preferably a microorganism, a plant cell, a plant or a part thereof, as compared to a corresponding non-transformed wild type non-human organism or a part thereof; and
[19591] (b) growing the non-human organism or a part thereof under conditions which permit the production of phenylalanine or a composition comprising phenylalanine in said non-human organism or in the culture medium surrounding said non-human organism.

[19592] A further embodiment of the present invention relates to a process for the production of serine, which comprises
[19593] (a) increasing or generating one or more activities selected from the group consisting of TTC1386-protein in an organelle, preferably in plastids or mitochondria, especially in plastids, of a non-human organism or a part thereof, preferably a microorganism, a plant cell, a plant or a part thereof, as compared to a corresponding non-transformed wild type non-human organism or a part thereof; and
[19594] (b) growing the non-human organism or a part thereof under conditions which permit the production of serine or a composition comprising serine in said non-human organism or in the culture medium surrounding said non-human organism.

[19595] A further embodiment of the present invention relates to a process for the production of tyrosine, which comprises
[19596] (a) increasing or generating one or more activities selected from the group consisting of TCC1386-protein in an organelle, preferably in plastids or mitochondria, especially in plastids, of a non-human organism or a part thereof, preferably a microorganism, a plant cell, a plant or a part thereof, as compared to a corresponding non-transformed wild type non-human organism or a part thereof; and
[19597] (b) growing the non-human organism or a part thereof under conditions which permit the production of tyrosine or a composition comprising tyrosine in said non-human organism or in the culture medium surrounding said non-human organism.

[19598] A further embodiment of the present invention relates to a process for the production of alanine, which comprises
[19599] (a) increasing or generating one or more activities selected from the group consisting of homocitrate synthase in an organelle, preferably in plastids or mitochondria, especially in plastids, of a non-human organism or a part thereof, preferably a microorganism, a plant cell, a plant or a part thereof, as compared to a corresponding non-transformed wild type non-human organism or a part thereof; and
[19600] (b) growing the non-human organism or a part thereof under conditions which permit the production of alanine or a composition comprising alanine in said non-human organism or in the culture medium surrounding said non-human organism.

[19601] A further embodiment of the present invention relates to a process for the production of phenylalanine, which comprises
[19602] (a) increasing or generating one or more activities selected from the group consisting of homocitrate synthase in an organelle, preferably in plastids or mitochondria, especially in plastids, of a non-human organism or a part thereof, preferably a microorganism, a plant cell, a plant or a part thereof, as compared to a corresponding non-transformed wild type non-human organism or a part thereof; and
[19603] (b) growing the non-human organism or a part thereof under conditions which permit the production of phenylalanine or a composition comprising phenylalanine in said non-human organism or in the culture medium surrounding said non-human organism.

[19604] A further embodiment of the present invention relates to a process for the production of serine, which comprises
[19605] (a) increasing or generating one or more activities selected from the group consisting of homocitrate synthase in an organelle, preferably in plastids or mitochondria, especially in plastids, of a non-human organism or a part thereof, preferably a microorganism, a plant cell, a plant or a part thereof, as compared to a corresponding non-transformed wild type non-human organism or a part thereof; and
[19606] (b) growing the non-human organism or a part thereof under conditions which permit the production of serine or a composition comprising serine in said non-human organism or in the culture medium surrounding said non-human organism.

[19607] A further embodiment of the present invention relates to a process for the production of tyrosine, which comprises
[19608] (a) increasing or generating one or more activities selected from the group consisting of homocitrate synthase in an organelle, preferably in plastids or mitochondria, especially in plastids, of a non-human organism or a part thereof, preferably a microorganism, a plant cell, a plant or a part thereof, as compared to a corresponding non-transformed wild type non-human organism or a part thereof; and
[19609] (b) growing the non-human organism or a part thereof under conditions which permit the production of tyrosine or a composition comprising tyrosine in said non-human organism or in the culture medium surrounding said non-human organism.

[19610] A further embodiment of the present invention relates to a process for the production of 5-oxoproline, which comprises
[19611] (a) increasing or generating one or more activities selected from the group consisting of homocitrate synthase in an organelle, preferably in plastids or mitochondria, especially in plastids, of a non-human organism or a part thereof, preferably a microorganism, a plant cell, a plant or a part thereof, as compared to a corresponding non-transformed wild type non-human organism or a part thereof; and
[19612] (b) growing the non-human organism or a part thereof under conditions which permit the production of 5-oxoproline or a composition comprising 5-oxoproline in said non-human organism or in the culture medium surrounding said non-human organism.

[19613] A further embodiment of the present invention relates to a process for the production of aspartate, which comprises
[19614] (a) increasing or generating one or more activities selected from the group consisting of oxidoreductase subunit in an organelle, preferably in plastids or mitochondria, especially in plastids, of a non-human organism or a part thereof, preferably a microorganism, a plant cell, a plant or a part thereof, as compared to a corresponding non-transformed wild type non-human organism or a part thereof; and
[19615] (b) growing the non-human organism or a part thereof under conditions which permit the production of aspartate or a composition comprising aspartate in said non-human organism or in the culture medium surrounding said non-human organism.

[19616] A further embodiment of the present invention relates to a process for the production of serine, which comprises
[19617] (a) increasing or generating one or more activities selected from the group consisting of oxidoreductase subunit in an organelle, preferably in plastids or mitochondria, especially in plastids, of a non-human organism or a part thereof, preferably a microorganism, a plant cell, a plant or a part thereof, as compared to a corresponding non-transformed wild type non-human organism or a part thereof; and
[19618] (b) growing the non-human organism or a part thereof under conditions which permit the production of serine or a composition comprising serine in said non-human organism or in the culture medium surrounding said non-human organism.

[19619] A further embodiment of the present invention relates to a process for the production of aspartate, which comprises
[19620] (a) increasing or generating one or more activities selected from the group consisting of XM_{—}473199-protein in an organelle, preferably in plastids or mitochondria, especially in plastids, of a non-human organism or a part thereof, preferably a microorganism, a plant cell, a plant or a part thereof, as compared to a corresponding non-transformed wild type non-human organism or a part thereof; and
[19621] (b) growing the non-human organism or a part thereof under conditions which permit the production of aspartate or a composition comprising aspartate in said non-human organism or in the culture medium surrounding said non-human organism.

[19622] A further embodiment of the present invention relates to a process for the production of phenylalanine, which comprises
[19623] (a) increasing or generating one or more activities selected from the group consisting of XM_{—}473199-protein in an organelle, preferably in plastids or mitochondria, especially in plastids, of a non-human organism or a part thereof, preferably a microorganism, a plant cell, a plant or a part thereof, as compared to a corresponding non-transformed wild type non-human organism or a part thereof; and
[19624] (b) growing the non-human organism or a part thereof under conditions which permit the production of phenylalanine or a composition comprising phenylalanine in said non-human organism or in the culture medium surrounding said non-human organism.

[19625] A further embodiment of the present invention relates to a process for the production of tyrosine, which comprises
[19626] (a) increasing or generating one or more activities selected from the group consisting of XM_{—}473199-protein in an organelle, preferably in plastids or mitochondria, especially in plastids, of a non-human organism or a part thereof, preferably a microorganism, a plant cell, a plant or a part thereof, as compared to a corresponding non-transformed wild type non-human organism or a part thereof; and
[19627] (b) growing the non-human organism or a part thereof under conditions which permit the production of tyrosine or a composition comprising tyrosine in said non-human organism or in the culture medium surrounding said non-human organism.

[19628] A further embodiment of the present invention relates to a process for the production of 5-oxoproline, which comprises
[19629] (a) increasing or generating one or more activities selected from the group consisting of XM_{—}473199-protein in an organelle, preferably in plastids or mitochondria, especially in plastids, of a non-human organism or a part thereof, preferably a microorganism, a plant cell, a plant or a part thereof, as compared to a corresponding non-transformed wild type non-human organism or a part thereof; and
[19630] (b) growing the non-human organism or a part thereof under conditions which permit the production of 5-oxoproline or a composition comprising 5-oxoproline in said non-human organism or in the culture medium surrounding said non-human organism.

[19631] A further embodiment of the present invention relates to a process for the production of glycine, which comprises
[19632] (a) increasing or generating one or more activities selected from the group consisting of transcription factor in an organelle, preferably in plastids or mitochondria, especially in plastids, of a non-human organism or a part thereof, preferably a microorganism, a plant cell, a plant or a part thereof, as compared to a corresponding non-transformed wild type non-human organism or a part thereof; and
[19633] (b) growing the non-human organism or a part thereof under conditions which permit the production of glycine or a composition comprising glycine in said non-human organism or in the culture medium surrounding said non-human organism.

[19634] A further embodiment of the present invention relates to a process for the production of phenylalanine, which comprises
[19635] (a) increasing or generating one or more activities selected from the group consisting of transcription factor in an organelle, preferably in plastids or mitochondria, especially in plastids, of a non-human organism or a part thereof, preferably a microorganism, a plant cell, a plant or a part thereof, as compared to a corresponding non-transformed wild type non-human organism or a part thereof; and
[19636] (b) growing the non-human organism or a part thereof under conditions which permit the production of phenylalanine or a composition comprising phenylalanine in said non-human organism or in the culture medium surrounding said non-human organism.

[19637] A further embodiment of the present invention relates to a process for the production of aspartate, which comprises
[19638] (a) increasing or generating one or more activities selected from the group consisting of cell division control protein in an organelle, preferably in plastids or mitochondria, especially in plastids, of a non-human organism or a part thereof, preferably a microorganism, a plant cell, a plant or a part thereof, as compared to a corresponding non-transformed wild type non-human organism or a part thereof; and
[19639] (b) growing the non-human organism or a part thereof under conditions which permit the production of aspartate or a composition comprising aspartate in said non-human organism or in the culture medium surrounding said non-human organism.

[19640] A further embodiment of the present invention relates to a process for the production of tyrosine, which comprises
[19641] (a) increasing or generating one or more activities selected from the group consisting of cell division control protein in an organelle, preferably in plastids or mitochondria, especially in plastids, of a non-human organism or a part thereof, preferably a microorganism, a plant cell, a plant or a part thereof, as compared to a corresponding non-transformed wild type non-human organism or a part thereof; and
[19642] (b) growing the non-human organism or a part thereof under conditions which permit the production of tyrosine or a composition comprising tyrosine in said non-human organism or in the culture medium surrounding said non-human organism.

[19643] A further embodiment of the present invention relates to a process for the production of phenylalanine, which comprises
[19644] (a) increasing or generating one or more activities selected from the group consisting of 3-deoxy-7-phosphoheptulonate synthase in an organelle, preferably in plastids or mitochondria, especially in plastids, of a non-human organism or a part thereof, preferably a microorganism, a plant cell, a plant or a part thereof, as compared to a corresponding non-transformed wild type non-human organism or a part thereof; and
[19645] (b) growing the non-human organism or a part thereof under conditions which permit the production of phenylalanine or a composition comprising phenylalanine in said non-human organism or in the culture medium surrounding said non-human organism.

[19646] A further embodiment of the present invention relates to a process for the production of tyrosine, which comprises
[19647] (a) increasing or generating one or more activities selected from the group consisting of 3-deoxy-7-phosphoheptulonate synthase in an organelle, preferably in plastids or mitochondria, especially in plastids, of a non-human organism or a part thereof, preferably a microorganism, a plant cell, a plant or a part thereof, as compared to a corresponding non-transformed wild type non-human organism or a part thereof; and
[19648] (b) growing the non-human organism or a part thereof under conditions which permit the production of tyrosine or a composition comprising tyrosine in said non-human organism or in the culture medium surrounding said non-human organism.

[19649] A further embodiment of the present invention relates to a process for the production of 5-oxoproline, which comprises
[19650] (a) increasing or generating one or more activities selected from the group consisting of phosphate permease in an organelle, preferably in plastids or mitochondria, especially in plastids, of a non-human organism or a part thereof, preferably a microorganism, a plant cell, a plant or a part thereof, as compared to a corresponding non-transformed wild type non-human organism or a part thereof; and
[19651] (b) growing the non-human organism or a part thereof under conditions which permit the production of 5-oxoproline or a composition comprising 5-oxoproline in said non-human organism or in the culture medium surrounding said non-human organism.

[19652] A further embodiment of the present invention relates to a process for the production of alanine, which comprises
[19653] (a) increasing or generating one or more activities selected from the group consisting of serine/threonine dehydratase in an organelle, preferably in plastids or mitochondria, especially in plastids, of a non-human organism or a part thereof, preferably a microorganism, a plant cell, a plant or a part thereof, as compared to a corresponding non-transformed wild type non-human organism or a part thereof; and
[19654] (b) growing the non-human organism or a part thereof under conditions which permit the production of alanine or a composition comprising alanine in said non-human organism or in the culture medium surrounding said non-human organism.

[19655] A further embodiment of the present invention relates to a process for the production of glycine, which comprises
[19656] (a) increasing or generating one or more activities selected from the group consisting of serine/threonine dehydratase in an organelle, preferably in plastids or mitochondria, especially in plastids, of a non-human organism or a part thereof, preferably a microorganism, a plant cell, a plant or a part thereof, as compared to a corresponding non-transformed wild type non-human organism or a part thereof; and
[19657] (b) growing the non-human organism or a part thereof under conditions which permit the production of glycine or a composition comprising glycine in said non-human organism or in the culture medium surrounding said non-human organism.

[19658] A further embodiment of the present invention relates to a process for the production of aspartate, which comprises
[19659] (a) increasing or generating one or more activities selected from the group consisting of protein kinase in an organelle, preferably in plastids or mitochondria, especially in plastids, of a non-human organism or a part thereof, preferably a microorganism, a plant cell, a plant or a part thereof, as compared to a corresponding non-transformed wild type non-human organism or a part thereof; and
[19660] (b) growing the non-human organism or a part thereof under conditions which permit the production of aspartate or a composition comprising aspartate in said non-human organism or in the culture medium surrounding said non-human organism.

[19661] A further embodiment of the present invention relates to a process for the production of homoserine, which comprises
[19662] (a) increasing or generating one or more activities selected from the group consisting of Serine/threonine-protein phosphatase in an organelle, preferably in plastids or mitochondria, especially in plastids, of a non-human organism or a part thereof, preferably a microorganism, a plant cell, a plant or a part thereof, as compared to a corresponding non-transformed wild type non-human organism or a part thereof; and
[19663] (b) growing the non-human organism or a part thereof under conditions which permit the production of homoserine or a composition comprising homoserine in said non-human organism or in the culture medium surrounding said non-human organism.

[19664] A further embodiment of the present invention relates to a process for the production of phenylalanine, which comprises
[19665] (a) increasing or generating one or more activities selected from the group consisting of Serine/threonine-protein phosphatase in an organelle, preferably in plastids or mitochondria, especially in plastids, of a non-human organism or a part thereof, preferably a microorganism, a plant cell, a plant or a part thereof, as compared to a corresponding non-transformed wild type non-human organism or a part thereof; and
[19666] (b) growing the non-human organism or a part thereof under conditions which permit the production of phenylalanine or a composition comprising phenylalanine in said non-human organism or in the culture medium surrounding said non-human organism.

[19667] A further embodiment of the present invention relates to a process for the production of 5-oxoproline, which comprises
[19668] (a) increasing or generating one or more activities selected from the group consisting of Pre-mRNA-splicing factor in an organelle, preferably in plastids or mitochondria, especially in plastids, of a non-human organism or a part thereof, preferably a microorganism, a plant cell, a plant or a part thereof, as compared to a corresponding non-transformed wild type non-human organism or a part thereof; and
[19669] (b) growing the non-human organism or a part thereof under conditions which permit the production of 5-oxoproline or a composition comprising 5-oxoproline in said non-human organism or in the culture medium surrounding said non-human organism.

[19670] A further embodiment of the present invention relates to a process for the production of phenylalanine, which comprises
[19671] (a) increasing or generating one or more activities selected from the group consisting of N-(5′-phosphoribosyl)anthranilate isomerase in an organelle, preferably in plastids or mitochondria, especially in plastids, of a non-human organism or a part thereof, preferably a microorganism, a plant cell, a plant or a part thereof, as compared to a corresponding non-transformed wild type non-human organism or a part thereof; and
[19672] (b) growing the non-human organism or a part thereof under conditions which permit the production of phenylalanine or a composition comprising phenylalanine in said non-human organism or in the culture medium surrounding said non-human organism.

[19673] A further embodiment of the present invention relates to a process for the production of tyrosine, which comprises
[19674] (a) increasing or generating one or more activities selected from the group consisting of branched-chain amino acid permease in an organelle, preferably in plastids or mitochondria, especially in plastids, of a non-human organism or a part thereof, preferably a microorganism, a plant cell, a plant or a part thereof, as compared to a corresponding non-transformed wild type non-human organism or a part thereof; and
[19675] (b) growing the non-human organism or a part thereof under conditions which permit the production of tyrosine or a composition comprising tyrosine in said non-human organism or in the culture medium surrounding said non-human organism.

[19676] A further embodiment of the present invention relates to a process for the production of serine, which comprises
[19677] (a) increasing or generating one or more activities selected from the group consisting of ydr183w-protein in an organelle, preferably in plastids or mitochondria, especially in plastids, of a non-human organism or a part thereof, preferably a microorganism, a plant cell, a plant or a part thereof, as compared to a corresponding non-transformed wild type non-human organism or a part thereof; and
[19678] (b) growing the non-human organism or a part thereof under conditions which permit the production of serine or a composition comprising serine in said non-human organism or in the culture medium surrounding said non-human organism.

[19679] A further embodiment of the present invention relates to a process for the production of aspartate, which comprises
[19680] (a) increasing or generating one or more activities selected from the group consisting of ydr273w-protein in an organelle, preferably in plastids or mitochondria, especially in plastids, of a non-human organism or a part thereof, preferably a microorganism, a plant cell, a plant or a part thereof, as compared to a corresponding non-transformed wild type non-human organism or a part thereof; and
[19681] (b) growing the non-human organism or a part thereof under conditions which permit the production of aspartate or a composition comprising aspartate in said non-human organism or in the culture medium surrounding said non-human organism.

[19682] A further embodiment of the present invention relates to a process for the production of citrulline, which comprises
[19683] (a) increasing or generating one or more activities selected from the group consisting of ydr273w-protein in an organelle, preferably in plastids or mitochondria, especially in plastids, of a non-human organism or a part thereof, preferably a microorganism, a plant cell, a plant or a part thereof, as compared to a corresponding non-transformed wild type non-human organism or a part thereof; and
[19684] (b) growing the non-human organism or a part thereof under conditions which permit the production of citrulline or a composition comprising citrulline in said non-human organism or in the culture medium surrounding said non-human organism.

[19685] A further embodiment of the present invention relates to a process for the production of aspartate, which comprises
[19686] (a) increasing or generating one or more activities selected from the group consisting of ydr507c-protein in an organelle, preferably in plastids or mitochondria, especially in plastids, of a non-human organism or a part thereof, preferably a microorganism, a plant cell, a plant or a part thereof, as compared to a corresponding non-transformed wild type non-human organism or a part thereof; and
[19687] (b) growing the non-human organism or a part thereof under conditions which permit the production of aspartate or a composition comprising aspartate in said non-human organism or in the culture medium surrounding said non-human organism.

[19688] A further embodiment of the present invention relates to a process for the production of asparagine, which comprises
[19689] (a) increasing or generating one or more activities selected from the group consisting of yer014w-protein in an organelle, preferably in plastids or mitochondria, especially in plastids, of a non-human organism or a part thereof, preferably a microorganism, a plant cell, a plant or a part thereof, as compared to a corresponding non-transformed wild type non-human organism or a part thereof; and
[19690] (b) growing the non-human organism or a part thereof under conditions which permit the production of asparagine or a composition comprising asparagine in said non-human organism or in the culture medium surrounding said non-human organism.

[19691] A further embodiment of the present invention relates to a process for the production of aspartate, which comprises
[19692] (a) increasing or generating one or more activities selected from the group consisting of yer014w-protein in an organelle, preferably in plastids or mitochondria, especially in plastids, of a non-human organism or a part thereof, preferably a microorganism, a plant cell, a plant or a part thereof, as compared to a corresponding non-transformed wild type non-human organism or a part thereof; and
[19693] (b) growing the non-human organism or a part thereof under conditions which permit the production of aspartate or a composition comprising aspartate in said non-human organism or in the culture medium surrounding said non-human organism.

[19694] A further embodiment of the present invention relates to a process for the production of serine, which comprises
[19695] (a) increasing or generating one or more activities selected from the group consisting of yer014w-protein in an organelle, preferably in plastids or mitochondria, especially in plastids, of a non-human organism or a part thereof, preferably a microorganism, a plant cell, a plant or a part thereof, as compared to a corresponding non-transformed wild type non-human organism or a part thereof; and
[19696] (b) growing the non-human organism or a part thereof under conditions which permit the production of serine or a composition comprising serine in said non-human organism or in the culture medium surrounding said non-human organism.

[19697] A further embodiment of the present invention relates to a process for the production of citrulline, which comprises
[19698] (a) increasing or generating one or more activities selected from the group consisting of yer106w-protein in an organelle, preferably in plastids or mitochondria, especially in plastids, of a non-human organism or a part thereof, preferably a microorganism, a plant cell, a plant or a part thereof, as compared to a corresponding non-transformed wild type non-human organism or a part thereof; and
[19699] (b) growing the non-human organism or a part thereof under conditions which permit the production of citrulline or a composition comprising citrulline in said non-human organism or in the culture medium surrounding said non-human organism.

[19700] A further embodiment of the present invention relates to a process for the production of serine, which comprises
[19701] (a) increasing or generating one or more activities selected from the group consisting of molecular chaperone portein in an organelle, preferably in plastids or mitochondria, especially in plastids, of a non-human organism or a part thereof, preferably a microorganism, a plant cell, a plant or a part thereof, as compared to a corresponding non-transformed wild type non-human organism or a part thereof; and
[19702] (b) growing the non-human organism or a part thereof under conditions which permit the production of serine or a composition comprising serine in said non-human organism or in the culture medium surrounding said non-human organism.

[19703] A further embodiment of the present invention relates to a process for the production of tyrosine, which comprises
[19704] (a) increasing or generating one or more activities selected from the group consisting of molecular chaperone portein in an organelle, preferably in plastids or mitochondria, especially in plastids, of a non-human organism or a part thereof, preferably a microorganism, a plant cell, a plant or a part thereof, as compared to a corresponding non-transformed wild type non-human organism or a part thereof; and
[19705] (b) growing the non-human organism or a part thereof under conditions which permit the production of tyrosine or a composition comprising tyrosine in said non-human organism or in the culture medium surrounding said non-human organism.

[19706] A further embodiment of the present invention relates to a process for the production of aspartate, which comprises
[19707] (a) increasing or generating one or more activities selected from the group consisting of YFL019C-protein in an organelle, preferably in plastids or mitochondria, especially in plastids, of a non-human organism or a part thereof, preferably a microorganism, a plant cell, a plant or a part thereof, as compared to a corresponding non-transformed wild type non-human organism or a part thereof; and
[19708] (b) growing the non-human organism or a part thereof under conditions which permit the production of aspartate or a composition comprising aspartate in said non-human organism or in the culture medium surrounding said non-human organism.

[19709] A further embodiment of the present invention relates to a process for the production of phenylalanine, which comprises
[19710] (a) increasing or generating one or more activities selected from the group consisting of YFL019C-protein in an organelle, preferably in plastids or mitochondria, especially in plastids, of a non-human organism or a part thereof, preferably a microorganism, a plant cell, a plant or a part thereof, as compared to a corresponding non-transformed wild type non-human organism or a part thereof; and
[19711] (b) growing the non-human organism or a part thereof under conditions which permit the production of phenylalanine or a composition comprising phenylalanine in said non-human organism or in the culture medium surrounding said non-human organism.

[19712] A further embodiment of the present invention relates to a process for the production of alanine, which comprises
[19713] (a) increasing or generating one or more activities selected from the group consisting of aminotransferase in an organelle, preferably in plastids or mitochondria, especially in plastids, of a non-human organism or a part thereof, preferably a microorganism, a plant cell, a plant or a part thereof, as compared to a corresponding non-transformed wild type non-human organism or a part thereof; and
[19714] (b) growing the non-human organism or a part thereof under conditions which permit the production of alanine or a composition comprising alanine in said non-human organism or in the culture medium surrounding said non-human organism.

[19715] A further embodiment of the present invention relates to a process for the production of glycine, which comprises
[19716] (a) increasing or generating one or more activities selected from the group consisting of aminotransferase in an organelle, preferably in plastids or mitochondria, especially in plastids, of a non-human organism or a part thereof, preferably a microorganism, a plant cell, a plant or a part thereof, as compared to a corresponding non-transformed wild type non-human organism or a part thereof; and
[19717] (b) growing the non-human organism or a part thereof under conditions which permit the production of glycine or a composition comprising glycine in said non-human organism or in the culture medium surrounding said non-human organism.

[19718] A further embodiment of the present invention relates to a process for the production of phenylalanine, which comprises
[19719] (a) increasing or generating one or more activities selected from the group consisting of yfl054c-protein in an organelle, preferably in plastids or mitochondria, especially in plastids, of a non-human organism or a part thereof, preferably a microorganism, a plant cell, a plant or a part thereof, as compared to a corresponding non-transformed wild type non-human organism or a part thereof; and
[19720] (b) growing the non-human organism or a part thereof under conditions which permit the production of phenylalanine or a composition comprising phenylalanine in said non-human organism or in the culture medium surrounding said non-human organism.

[19721] A further embodiment of the present invention relates to a process for the production of serine, which comprises
[19722] (a) increasing or generating one or more activities selected from the group consisting of yfl054c-protein in an organelle, preferably in plastids or mitochondria, especially in plastids, of a non-human organism or a part thereof, preferably a microorganism, a plant cell, a plant or a part thereof, as compared to a corresponding non-transformed wild type non-human organism or a part thereof; and
[19723] (b) growing the non-human organism or a part thereof under conditions which permit the production of serine or a composition comprising serine in said non-human organism or in the culture medium surrounding said non-human organism.

[19724] A further embodiment of the present invention relates to a process for the production of 5-oxoproline, which comprises
[19725] (a) increasing or generating one or more activities selected from the group consisting of ygl096w-protein in an organelle, preferably in plastids or mitochondria, especially in plastids, of a non-human organism or a part thereof, preferably a microorganism, a plant cell, a plant or a part thereof, as compared to a corresponding non-transformed wild type non-human organism or a part thereof; and
[19726] (b) growing the non-human organism or a part thereof under conditions which permit the production of 5-oxoproline or a composition comprising 5-oxoproline in said non-human organism or in the culture medium surrounding said non-human organism.

[19727] A further embodiment of the present invention relates to a process for the production of tyrosine, which comprises
[19728] (a) increasing or generating one or more activities selected from the group consisting of ygl237c-protein in an organelle, preferably in plastids or mitochondria, especially in plastids, of a non-human organism or a part thereof, preferably a microorganism, a plant cell, a plant or a part thereof, as compared to a corresponding non-transformed wild type non-human organism or a part thereof; and
[19729] (b) growing the non-human organism or a part thereof under conditions which permit the production of tyrosine or a composition comprising tyrosine in said non-human organism or in the culture medium surrounding said non-human organism.

[19730] A further embodiment of the present invention relates to a process for the production of aspartate, which comprises
[19731] (a) increasing or generating one or more activities selected from the group consisting of ygr221c-protein in an organelle, preferably in plastids or mitochondria, especially in plastids, of a non-human organism or a part thereof, preferably a microorganism, a plant cell, a plant or a part thereof, as compared to a corresponding non-transformed wild type non-human organism or a part thereof; and
[19732] (b) growing the non-human organism or a part thereof under conditions which permit the production of aspartate or a composition comprising aspartate in said non-human organism or in the culture medium surrounding said non-human organism.

[19733] A further embodiment of the present invention relates to a process for the production of 5-oxoproline, which comprises
[19734] (a) increasing or generating one or more activities selected from the group consisting of ygr221c-protein in an organelle, preferably in plastids or mitochondria, especially in plastids, of a non-human organism or a part thereof, preferably a microorganism, a plant cell, a plant or a part thereof, as compared to a corresponding non-transformed wild type non-human organism or a part thereof; and
[19735] (b) growing the non-human organism or a part thereof under conditions which permit the production of 5-oxoproline or a composition comprising 5-oxoproline in said non-human organism or in the culture medium surrounding said non-human organism.

[19736] A further embodiment of the present invention relates to a process for the production of phenylalanine, which comprises
[19737] (a) increasing or generating one or more activities selected from the group consisting of yhl013c-protein in an organelle, preferably in plastids or mitochondria, especially in plastids, of a non-human organism or a part thereof, preferably a microorganism, a plant cell, a plant or a part thereof, as compared to a corresponding non-transformed wild type non-human organism or a part thereof; and
[19738] (b) growing the non-human organism or a part thereof under conditions which permit the production of phenylalanine or a composition comprising phenylalanine in said non-human organism or in the culture medium surrounding said non-human organism.

[19739] A further embodiment of the present invention relates to a process for the production of phenylalanine, which comprises
[19740] (a) increasing or generating one or more activities selected from the group consisting of yhr006w-protein in an organelle, preferably in plastids or mitochondria, especially in plastids, of a non-human organism or a part thereof, preferably a microorganism, a plant cell, a plant or a part thereof, as compared to a corresponding non-transformed wild type non-human organism or a part thereof; and
[19741] (b) growing the non-human organism or a part thereof under conditions which permit the production of phenylalanine or a composition comprising phenylalanine in said non-human organism or in the culture medium surrounding said non-human organism.

[19742] A further embodiment of the present invention relates to a process for the production of tyrosine, which comprises
[19743] (a) increasing or generating one or more activities selected from the group consisting of yhr006w-protein in an organelle, preferably in plastids or mitochondria, especially in plastids, of a non-human organism or a part thereof, preferably a microorganism, a plant cell, a plant or a part thereof, as compared to a corresponding non-transformed wild type non-human organism or a part thereof; and
[19744] (b) growing the non-human organism or a part thereof under conditions which permit the production of tyrosine or a composition comprising tyrosine in said non-human organism or in the culture medium surrounding said non-human organism.

[19745] A further embodiment of the present invention relates to a process for the production of aspartate, which comprises
[19746] (a) increasing or generating one or more activities selected from the group consisting of yhr207c-protein in an organelle, preferably in plastids or mitochondria, especially in plastids, of a non-human organism or a part thereof, preferably a microorganism, a plant cell, a plant or a part thereof, as compared to a corresponding non-transformed wild type non-human organism or a part thereof; and
[19747] (b) growing the non-human organism or a part thereof under conditions which permit the production of aspartate or a composition comprising aspartate in said non-human organism or in the culture medium surrounding said non-human organism.

[19748] A further embodiment of the present invention relates to a process for the production of citrulline, which comprises
[19749] (a) increasing or generating one or more activities selected from the group consisting of 3-phosphoglycerate dehydrogenase in an organelle, preferably in plastids or mitochondria, especially in plastids, of a non-human organism or a part thereof, preferably a microorganism, a plant cell, a plant or a part thereof, as compared to a corresponding non-transformed wild type non-human organism or a part thereof; and
[19750] (b) growing the non-human organism or a part thereof under conditions which permit the production of citrulline or a composition comprising citrulline in said non-human organism or in the culture medium surrounding said non-human organism.

[19751] A further embodiment of the present invention relates to a process for the production of glycine, which comprises
[19752] (a) increasing or generating one or more activities selected from the group consisting of 3-phosphoglycerate dehydrogenase in an organelle, preferably in plastids or mitochondria, especially in plastids, of a non-human organism or a part thereof, preferably a microorganism, a plant cell, a plant or a part thereof, as compared to a corresponding non-transformed wild type non-human organism or a part thereof; and
[19753] (b) growing the non-human organism or a part thereof under conditions which permit the production of glycine or a composition comprising glycine in said non-human organism or in the culture medium surrounding said non-human organism.

[19754] A further embodiment of the present invention relates to a process for the production of aspartate, which comprises
[19755] (a) increasing or generating one or more activities selected from the group consisting of glutathione S-transferase in an organelle, preferably in plastids or mitochondria, especially in plastids, of a non-human organism or a part thereof, preferably a microorganism, a plant cell, a plant or a part thereof, as compared to a corresponding non-transformed wild type non-human organism or a part thereof; and
[19756] (b) growing the non-human organism or a part thereof under conditions which permit the production of aspartate or a composition comprising aspartate in said non-human organism or in the culture medium surrounding said non-human organism.

[19757] A further embodiment of the present invention relates to a process for the production of citrulline, which comprises
[19758] (a) increasing or generating one or more activities selected from the group consisting of glutathione S-transferase in an organelle, preferably in plastids or mitochondria, especially in plastids, of a non-human organism or a part thereof, preferably a microorganism, a plant cell, a plant or a part thereof, as compared to a corresponding non-transformed wild type non-human organism or a part thereof; and
[19759] (b) growing the non-human organism or a part thereof under conditions which permit the production of citrulline or a composition comprising citrulline in said non-human organism or in the culture medium surrounding said non-human organism.

[19760] A further embodiment of the present invention relates to a process for the production of aspartate, which comprises
[19761] (a) increasing or generating one or more activities selected from the group consisting of DnaJ-like chaperone in an organelle, preferably in plastids or mitochondria, especially in plastids, of a non-human organism or a part thereof, preferably a microorganism, a plant cell, a plant or a part thereof, as compared to a corresponding non-transformed wild type non-human organism or a part thereof; and
[19762] (b) growing the non-human organism or a part thereof under conditions which permit the production of aspartate or a composition comprising aspartate in said non-human organism or in the culture medium surrounding said non-human organism.

[19763] A further embodiment of the present invention relates to a process for the production of phenylalanine, which comprises
[19764] (a) increasing or generating one or more activities selected from the group consisting of cystathionine gamma-synthase in an organelle, preferably in plastids or mitochondria, especially in plastids, of a non-human organism or a part thereof, preferably a microorganism, a plant cell, a plant or a part thereof, as compared to a corresponding non-transformed wild type non-human organism or a part thereof; and
[19765] (b) growing the non-human organism or a part thereof under conditions which permit the production of phenylalanine or a composition comprising phenylalanine in said non-human organism or in the culture medium surrounding said non-human organism.

[19766] A further embodiment of the present invention relates to a process for the production of citrulline, which comprises
[19767] (a) increasing or generating one or more activities selected from the group consisting of branched chain aminotransferase in an organelle, preferably in plastids or mitochondria, especially in plastids, of a non-human organism or a part thereof, preferably a microorganism, a plant cell, a plant or a part thereof, as compared to a corresponding non-transformed wild type non-human organism or a part thereof; and
[19768] (b) growing the non-human organism or a part thereof under conditions which permit the production of citrulline or a composition comprising citrulline in said non-human organism or in the culture medium surrounding said non-human organism.

[19769] A further embodiment of the present invention relates to a process for the production of aspartate, which comprises
[19770] (a) increasing or generating one or more activities selected from the group consisting of polygalacturonase in an organelle, preferably in plastids or mitochondria, especially in plastids, of a non-human organism or a part thereof, preferably a microorganism, a plant cell, a plant or a part thereof, as compared to a corresponding non-transformed wild type non-human organism or a part thereof; and
[19771] (b) growing the non-human organism or a part thereof under conditions which permit the production of aspartate or a composition comprising aspartate in said non-human organism or in the culture medium surrounding said non-human organism.

[19772] A further embodiment of the present invention relates to a process for the production of phenylalanine, which comprises
[19773] (a) increasing or generating one or more activities selected from the group consisting of polygalacturonase in an organelle, preferably in plastids or mitochondria, especially in plastids, of a non-human organism or a part thereof, preferably a microorganism, a plant cell, a plant or a part thereof, as compared to a corresponding non-transformed wild type non-human organism or a part thereof; and
[19774] (b) growing the non-human organism or a part thereof under conditions which permit the production of phenylalanine or a composition comprising phenylalanine in said non-human organism or in the culture medium surrounding said non-human organism.

[19775] A further embodiment of the present invention relates to a process for the production of alanine, which comprises
[19776] (a) increasing or generating one or more activities selected from the group consisting of YKL038W-protein in an organelle, preferably in plastids or mitochondria, especially in plastids, of a non-human organism or a part thereof, preferably a microorganism, a plant cell, a plant or a part thereof, as compared to a corresponding non-transformed wild type non-human organism or a part thereof; and
[19777] (b) growing the non-human organism or a part thereof under conditions which permit the production of alanine or a composition comprising alanine in said non-human organism or in the culture medium surrounding said non-human organism.

[19778] A further embodiment of the present invention relates to a process for the production of aspartate, which comprises
[19779] (a) increasing or generating one or more activities selected from the group consisting of YKL038W-protein in an organelle, preferably in plastids or mitochondria, especially in plastids, of a non-human organism or a part thereof, preferably a microorganism, a plant cell, a plant or a part thereof, as compared to a corresponding non-transformed wild type non-human organism or a part thereof; and
[19780] (b) growing the non-human organism or a part thereof under conditions which permit the production of aspartate or a composition comprising aspartate in said non-human organism or in the culture medium surrounding said non-human organism.

[19781] A further embodiment of the present invention relates to a process for the production of serine, which comprises
[19782] (a) increasing or generating one or more activities selected from the group consisting of YKL038W-protein in an organelle, preferably in plastids or mitochondria, especially in plastids, of a non-human organism or a part thereof, preferably a microorganism, a plant cell, a plant or a part thereof, as compared to a corresponding non-transformed wild type non-human organism or a part thereof; and
[19783] (b) growing the non-human organism or a part thereof under conditions which permit the production of serine or a composition comprising serine in said non-human organism or in the culture medium surrounding said non-human organism.

[19784] A further embodiment of the present invention relates to a process for the production of glycine, which comprises
[19785] (a) increasing or generating one or more activities selected from the group consisting of aspartate aminotransferase in an organelle, preferably in plastids or mitochondria, especially in plastids, of a non-human organism or a part thereof, preferably a microorganism, a plant cell, a plant or a part thereof, as compared to a corresponding non-transformed wild type non-human organism or a part thereof; and
[19786] (b) growing the non-human organism or a part thereof under conditions which permit the production of glycine or a composition comprising glycine in said non-human organism or in the culture medium surrounding said non-human organism.

[19787] A further embodiment of the present invention relates to a process for the production of serine, which comprises
[19788] (a) increasing or generating one or more activities selected from the group consisting of thioredoxin in an organelle, preferably in plastids or mitochondria, especially in plastids, of a non-human organism or a part thereof, preferably a microorganism, a plant cell, a plant or a part thereof, as compared to a corresponding non-transformed wild type non-human organism or a part thereof; and
[19789] (b) growing the non-human organism or a part thereof under conditions which permit the production of serine or a composition comprising serine in said non-human organism or in the culture medium surrounding said non-human organism.

[19790] A further embodiment of the present invention relates to a process for the production of tyrosine, which comprises
[19791] (a) increasing or generating one or more activities selected from the group consisting of thioredoxin in an organelle, preferably in plastids or mitochondria, especially in plastids, of a non-human organism or a part thereof, preferably a microorganism, a plant cell, a plant or a part thereof, as compared to a corresponding non-transformed wild type non-human organism or a part thereof; and
[19792] (b) growing the non-human organism or a part thereof under conditions which permit the production of tyrosine or a composition comprising tyrosine in said non-human organism or in the culture medium surrounding said non-human organism.

[19793] A further embodiment of the present invention relates to a process for the production of alanine, which comprises
[19794] (a) increasing or generating one or more activities selected from the group consisting of sterol 24-C-methyltransferase in an organelle, preferably in plastids or mitochondria, especially in plastids, of a non-human organism or a part thereof, preferably a microorganism, a plant cell, a plant or a part thereof, as compared to a corresponding non-transformed wild type non-human organism or a part thereof; and
[19795] (b) growing the non-human organism or a part thereof under conditions which permit the production of alanine or a composition comprising alanine in said non-human organism or in the culture medium surrounding said non-human organism.

[19796] A further embodiment of the present invention relates to a process for the production of glycine, which comprises
[19797] (a) increasing or generating one or more activities selected from the group consisting of sterol 24-C-methyltransferase in an organelle, preferably in plastids or mitochondria, especially in plastids, of a non-human organism or a part thereof, preferably a microorganism, a plant cell, a plant or a part thereof, as compared to a corresponding non-transformed wild type non-human organism or a part thereof; and
[19798] (b) growing the non-human organism or a part thereof under conditions which permit the production of glycine or a composition comprising glycine in said non-human organism or in the culture medium surrounding said non-human organism.

[19799] A further embodiment of the present invention relates to a process for the production of homoserine, which comprises
[19800] (a) increasing or generating one or more activities selected from the group consisting of sterol 24-C-methyltransferase in an organelle, preferably in plastids or mitochondria, especially in plastids, of a non-human organism or a part thereof, preferably a microorganism, a plant cell, a plant or a part thereof, as compared to a corresponding non-transformed wild type non-human organism or a part thereof; and
[19801] (b) growing the non-human organism or a part thereof under conditions which permit the production of homoserine or a composition comprising homoserine in said non-human organism or in the culture medium surrounding said non-human organism.

[19802] A further embodiment of the present invention relates to a process for the production of 5-oxoproline, which comprises
[19803] (a) increasing or generating one or more activities selected from the group consisting of sterol 24-C-methyltransferase in an organelle, preferably in plastids or mitochondria, especially in plastids, of a non-human organism or a part thereof, preferably a microorganism, a plant cell, a plant or a part thereof, as compared to a corresponding non-transformed wild type non-human organism or a part thereof; and
[19804] (b) growing the non-human organism or a part thereof under conditions which permit the production of 5-oxoproline or a composition comprising 5-oxoproline in said non-human organism or in the culture medium surrounding said non-human organism.

[19805] A further embodiment of the present invention relates to a process for the production of alanine, which comprises
[19806] (a) increasing or generating one or more activities selected from the group consisting of yml083c-protein in an organelle, preferably in plastids or mitochondria, especially in plastids, of a non-human organism or a part thereof, preferably a microorganism, a plant cell, a plant or a part thereof, as compared to a corresponding non-transformed wild type non-human organism or a part thereof; and
[19807] (b) growing the non-human organism or a part thereof under conditions which permit the production of alanine or a composition comprising alanine in said non-human organism or in the culture medium surrounding said non-human organism.

[19808] A further embodiment of the present invention relates to a process for the production of phenylalanine, which comprises
[19809] (a) increasing or generating one or more activities selected from the group consisting of phosphate transporter in an organelle, preferably in plastids or mitochondria, especially in plastids, of a non-human organism or a part thereof, preferably a microorganism, a plant cell, a plant or a part thereof, as compared to a corresponding non-transformed wild type non-human organism or a part thereof; and
[19810] (b) growing the non-human organism or a part thereof under conditions which permit the production of phenylalanine or a composition comprising phenylalanine in said non-human organism or in the culture medium surrounding said non-human organism.

[19811] A further embodiment of the present invention relates to a process for the production of tyrosine, which comprises
[19812] (a) increasing or generating one or more activities selected from the group consisting of phosphate transporter in an organelle, preferably in plastids or mitochondria, especially in plastids, of a non-human organism or a part thereof, preferably a microorganism, a plant cell, a plant or a part thereof, as compared to a corresponding non-transformed wild type non-human organism or a part thereof; and
[19813] (b) growing the non-human organism or a part thereof under conditions which permit the production of tyrosine or a composition comprising tyrosine in said non-human organism or in the culture medium surrounding said non-human organism.

[19814] A further embodiment of the present invention relates to a process for the production of tyrosine, which comprises
[19815] (a) increasing or generating one or more activities selected from the group consisting of ymr013c-protein in an organelle, preferably in plastids or mitochondria, especially in plastids, of a non-human organism or a part thereof, preferably a microorganism, a plant cell, a plant or a part thereof, as compared to a corresponding non-transformed wild type non-human organism or a part thereof; and
[19816] (b) growing the non-human organism or a part thereof under conditions which permit the production of tyrosine or a composition comprising tyrosine in said non-human organism or in the culture medium surrounding said non-human organism.

[19817] A further embodiment of the present invention relates to a process for the production of glycine, which comprises
[19818] (a) increasing or generating one or more activities selected from the group consisting of purine biosynthesis protein in an organelle, preferably in plastids or mitochondria, especially in plastids, of a non-human organism or a part thereof, preferably a microorganism, a plant cell, a plant or a part thereof, as compared to a corresponding non-transformed wild type non-human organism or a part thereof; and
[19819] (b) growing the non-human organism or a part thereof under conditions which permit the production of glycine or a composition comprising glycine in said non-human organism or in the culture medium surrounding said non-human organism.

[19820] A further embodiment of the present invention relates to a process for the production of phenylalanine, which comprises
[19821] (a) increasing or generating one or more activities selected from the group consisting of mitochondrial inner membrane protease subunit in an organelle, preferably in plastids or mitochondria, especially in plastids, of a non-human organism or a part thereof, preferably a microorganism, a plant cell, a plant or a part thereof, as compared to a corresponding non-transformed wild type non-human organism or a part thereof; and
[19822] (b) growing the non-human organism or a part thereof under conditions which permit the production of phenylalanine or a composition comprising phenylalanine in said non-human organism or in the culture medium surrounding said non-human organism.

[19823] A further embodiment of the present invention relates to a process for the production of homoserine, which comprises
[19824] (a) increasing or generating one or more activities selected from the group consisting of YNL086W-protein in an organelle, preferably in plastids or mitochondria, especially in plastids, of a non-human organism or a part thereof, preferably a microorganism, a plant cell, a plant or a part thereof, as compared to a corresponding non-transformed wild type non-human organism or a part thereof; and
[19825] (b) growing the non-human organism or a part thereof under conditions which permit the production of homoserine or a composition comprising homoserine in said non-human organism or in the culture medium surrounding said non-human organism.

[19826] A further embodiment of the present invention relates to a process for the production of tyrosine, which comprises
[19827] (a) increasing or generating one or more activities selected from the group consisting of amino acid transporter in an organelle, preferably in plastids or mitochondria, especially in plastids, of a non-human organism or a part thereof, preferably a microorganism, a plant cell, a plant or a part thereof, as compared to a corresponding non-transformed wild type non-human organism or a part thereof; and
[19828] (b) growing the non-human organism or a part thereof under conditions which permit the production of tyrosine or a composition comprising tyrosine in said non-human organism or in the culture medium surrounding said non-human organism.

[19829] A further embodiment of the present invention relates to a process for the production of homoserine, which comprises
[19830] (a) increasing or generating one or more activities selected from the group consisting of homoserine O-acetyltransferase in an organelle, preferably in plastids or mitochondria, especially in plastids, of a non-human organism or a part thereof, preferably a microorganism, a plant cell, a plant or a part thereof, as compared to a corresponding non-transformed wild type non-human organism or a part thereof; and
[19831] (b) growing the non-human organism or a part thereof under conditions which permit the production of homoserine or a composition comprising homoserine in said non-human organism or in the culture medium surrounding said non-human organism.

[19832] A further embodiment of the present invention relates to a process for the production of alanine, which comprises
[19833] (a) increasing or generating one or more activities selected from the group consisting of metal ion transporter in an organelle, preferably in plastids or mitochondria, especially in plastids, of a non-human organism or a part thereof, preferably a microorganism, a plant cell, a plant or a part thereof, as compared to a corresponding non-transformed wild type non-human organism or a part thereof; and
[19834] (b) growing the non-human organism or a part thereof under conditions which permit the production of alanine or a composition comprising alanine in said non-human organism or in the culture medium surrounding said non-human organism.

[19835] A further embodiment of the present invention relates to a process for the production of aspartate, which comprises
[19836] (a) increasing or generating one or more activities selected from the group consisting of yol160w-protein in an organelle, preferably in plastids or mitochondria, especially in plastids, of a non-human organism or a part thereof, preferably a microorganism, a plant cell, a plant or a part thereof, as compared to a corresponding non-transformed wild type non-human organism or a part thereof; and
[19837] (b) growing the non-human organism or a part thereof under conditions which permit the production of aspartate or a composition comprising aspartate in said non-human organism or in the culture medium surrounding said non-human organism.

[19838] A further embodiment of the present invention relates to a process for the production of citrulline, which comprises
[19839] (a) increasing or generating one or more activities selected from the group consisting of protein kinase in an organelle, preferably in plastids or mitochondria, especially in plastids, of a non-human organism or a part thereof, preferably a microorganism, a plant cell, a plant or a part thereof, as compared to a corresponding non-transformed wild type non-human organism or a part thereof; and
[19840] (b) growing the non-human organism or a part thereof under conditions which permit the production of citrulline or a composition comprising citrulline in said non-human organism or in the culture medium surrounding said non-human organism.

[19841] A further embodiment of the present invention relates to a process for the production of phenylalanine, which comprises
[19842] (a) increasing or generating one or more activities selected from the group consisting of histone acetyltransferase in an organelle, preferably in plastids or mitochondria, especially in plastids, of a non-human organism or a part thereof, preferably a microorganism, a plant cell, a plant or a part thereof, as compared to a corresponding non-transformed wild type non-human organism or a part thereof; and
[19843] (b) growing the non-human organism or a part thereof under conditions which permit the production of phenylalanine or a composition comprising phenylalanine in said non-human organism or in the culture medium surrounding said non-human organism.

[19844] A further embodiment of the present invention relates to a process for the production of tyrosine, which comprises
[19845] (a) increasing or generating one or more activities selected from the group consisting of histone acetyltransferase in an organelle, preferably in plastids or mitochondria, especially in plastids, of a non-human organism or a part thereof, preferably a microorganism, a plant cell, a plant or a part thereof, as compared to a corresponding non-transformed wild type non-human organism or a part thereof; and
[19846] (b) growing the non-human organism or a part thereof under conditions which permit the production of tyrosine or a composition comprising tyrosine in said non-human organism or in the culture medium surrounding said non-human organism.

[19847] A further embodiment of the present invention relates to a process for the production of homoserine, which comprises
[19848] (a) increasing or generating one or more activities selected from the group consisting of diacylglycerol O-acyltransferase in an organelle, preferably in plastids or mitochondria, especially in plastids, of a non-human organism or a part thereof, preferably a microorganism, a plant cell, a plant or a part thereof, as compared to a corresponding non-transformed wild type non-human organism or a part thereof; and
[19849] (b) growing the non-human organism or a part thereof under conditions which permit the production of homoserine or a composition comprising homoserine in said non-human organism or in the culture medium surrounding said non-human organism.

[19850] A further embodiment of the present invention relates to a process for the production of serine, which comprises
[19851] (a) increasing or generating one or more activities selected from the group consisting of diacylglycerol O-acyltransferase in an organelle, preferably in plastids or mitochondria, especially in plastids, of a non-human organism or a part thereof, preferably a microorganism, a plant cell, a plant or a part thereof, as compared to a corresponding non-transformed wild type non-human organism or a part thereof; and
[19852] (b) growing the non-human organism or a part thereof under conditions which permit the production of serine or a composition comprising serine in said non-human organism or in the culture medium surrounding said non-human organism.

[19853] A further embodiment of the present invention relates to a process for the production of 5-oxoproline, which comprises
[19854] (a) increasing or generating one or more activities selected from the group consisting of diacylglycerol O-acyltransferase in an organelle, preferably in plastids or mitochondria, especially in plastids, of a non-human organism or a part thereof, preferably a microorganism, a plant cell, a plant or a part thereof, as compared to a corresponding non-transformed wild type non-human organism or a part thereof; and
[19855] (b) growing the non-human organism or a part thereof under conditions which permit the production of 5-oxoproline or a composition comprising 5-oxoproline in said non-human organism or in the culture medium surrounding said non-human organism.

[19856] A further embodiment of the present invention relates to a process for the production of glycine, which comprises
[19857] (a) increasing or generating one or more activities selected from the group consisting of acetyl-CoA acetyltransferase in an organelle, preferably in plastids or mitochondria, especially in plastids, of a non-human organism or a part thereof, preferably a microorganism, a plant cell, a plant or a part thereof, as compared to a corresponding non-transformed wild type non-human organism or a part thereof; and
[19858] (b) growing the non-human organism or a part thereof under conditions which permit the production of glycine or a composition comprising glycine in said non-human organism or in the culture medium surrounding said non-human organism.

[19859] A further embodiment of the present invention relates to a process for the production of serine, which comprises
[19860] (a) increasing or generating one or more activities selected from the group consisting of citrate synthase in an organelle, preferably in plastids or mitochondria, especially in plastids, of a non-human organism or a part thereof, preferably a microorganism, a plant cell, a plant or a part thereof, as compared to a corresponding non-transformed wild type non-human organism or a part thereof; and
[19861] (b) growing the non-human organism or a part thereof under conditions which permit the production of serine or a composition comprising serine in said non-human organism or in the culture medium surrounding said non-human organism.

[19862] A further embodiment of the present invention relates to a process for the production of aspartate, which comprises
[19863] (a) increasing or generating one or more activities selected from the group consisting of ammonium transporter in an organelle, preferably in plastids or mitochondria, especially in plastids, of a non-human organism or a part thereof, preferably a microorganism, a plant cell, a plant or a part thereof, as compared to a corresponding non-transformed wild type non-human organism or a part thereof; and
[19864] (b) growing the non-human organism or a part thereof under conditions which permit the production of aspartate or a composition comprising aspartate in said non-human organism or in the culture medium surrounding said non-human organism.

[19865] A further embodiment of the present invention relates to a process for the production of phenylalanine, which comprises
[19866] (a) increasing or generating one or more activities selected from the group consisting of Zm_{—}4842_BE510522-protein in an organelle, preferably in plastids or mitochondria, especially in plastids, of a non-human organism or a part thereof, preferably a microorganism, a plant cell, a plant or a part thereof, as compared to a corresponding non-transformed wild type non-human organism or a part thereof; and
[19867] (b) growing the non-human organism or a part thereof under conditions which permit the production of phenylalanine or a composition comprising phenylalanine in said non-human organism or in the culture medium surrounding said non-human organism.

[19868] A further embodiment of the present invention relates to a process for the production of serine, which comprises
[19869] (a) increasing or generating one or more activities selected from the group consisting of Zm_{—}4842_BE510522-protein in an organelle, preferably in plastids or mitochondria, especially in plastids, of a non-human organism or a part thereof, preferably a microorganism, a plant cell, a plant or a part thereof, as compared to a corresponding non-transformed wild type non-human organism or a part thereof; and
[19870] (b) growing the non-human organism or a part thereof under conditions which permit the production of serine or a composition comprising serine in said non-human organism or in the culture medium surrounding said non-human organism.

[19871] A further embodiment of the present invention relates to a process for the production of tyrosine, which comprises
[19872] (a) increasing or generating one or more activities selected from the group consisting of Zm_{—}4842_BE510522-protein in an organelle, preferably in plastids or mitochondria, especially in plastids, of a non-human organism or a part thereof, preferably a microorganism, a plant cell, a plant or a part thereof, as compared to a corresponding non-transformed wild type non-human organism or a part thereof; and
[19873] (b) growing the non-human organism or a part thereof under conditions which permit the production of tyrosine or a composition comprising tyrosine in said non-human organism or in the culture medium surrounding said non-human organism.

[19874] A further embodiment of the present invention relates to a process for the production of 5-oxoproline, which comprises
[19875] (a) increasing or generating one or more activities selected from the group consisting of Zm_{—}4842_BE510522-protein in an organelle, preferably in plastids or mitochondria, especially in plastids, of a non-human organism or a part thereof, preferably a microorganism, a plant cell, a plant or a part thereof, as compared to a corresponding non-transformed wild type non-human organism or a part thereof; and
[19876] (b) growing the non-human organism or a part thereof under conditions which permit the production of 5-oxoproline or a composition comprising 5-oxoproline in said non-human organism or in the culture medium surrounding said non-human organism.

[19877] A further embodiment of the present invention relates to a process for the production of 3,4-dihydroxyphenylalanine (dopa), which comprises
[19878] (a1) increasing or generating the activity of a polypeptide comprising a polypeptide as depicted in the respective line in column 5 or 8 of Table II, application no. 3, or a homolog or fragment thereof, a consensus sequence or at least one polypeptide motif as depicted in column 8 of Table IV, application no. 3; or
[19879] increasing or generating the activity of an expression product of one or more nucleic acid molecule(s) comprising a polynucleotide as depicted in the respective line in column 5 or 8 of Table I, application no. 3, preferably the coding region thereof, or a homolog or a fragment thereof;
[19880] in an organelle, preferably in plastids or mitochondria, especially in plastids, in a non-human organism or a part thereof; preferably a microorganism, a plant cell, a plant or a part thereof, as compared to a corresponding non-transformed wild type non-human organism or a part thereof; or
[19881] (a2) increasing or generating the activity of a polypeptide comprising a polypeptide as depicted in the respective line in column 5 or 8 of Table II, application no. 3, or a homolog or a fragment thereof, a consensus sequence or at least one polypeptide motif as depicted in the respective line in column 8 of Table IV, application no. 3, which is joined to a transit peptide; or
[19882] increasing or generating the activity of an expression product of one or more nucleic acid molecule(s) comprising a polynucleotide as depicted in the respective line in column 5 or 8 of Table I, application no. 3, preferably the coding region thereof, or a homolog or a fragment thereof, which is joined to a nucleic acid sequence encoding an organelle localization sequence, preferably a plastid or a mitochondrion localization sequence, especially a plastid localization sequence;
[19883] in a non-human organism or a part thereof; preferably a microorganism, a plant cell, a plant or a part thereof, as compared to a corresponding non-transformed wild type non-human organism or a part thereof; or
[19884] (a3) increasing or generating the activity of a polypeptide comprising a polypeptide as depicted in the respective line in column 5 or 8 of Table II, application no. 3, or a homolog or a fragment thereof, a consensus sequence or at least one polypeptide motif as depicted in the respective line in column 8 of Table IV, application no. 3; or
[19885] increasing or generating the activity of an expression product of one or more nucleic acid molecule(s) comprising a polynucleotide as depicted in the respective line in column 5 or 8 of Table I, application no. 3, preferably the coding region thereof, or a homolog or a fragment thereof;
[19886] in an organelle, preferably in plastids or mitochondria, especially in plastids, in a non-human organism or a part thereof; preferably a microorganism, a plant cell, a plant or a part thereof, through transformation of the organelle, as compared to a corresponding non-transformed wild type non-human organism or a part thereof;
   (wherein in the respective line in the respective Table in column 7 3,4-dihydroxyphenylalanine (dopa) is depicted)
   and
[19887] (b) growing the non-human organism under conditions which permit the production of 3,4-dihydroxyphenylalanine (dopa), or a composition comprising 3,4-dihydroxyphenylalanine (dopa) in said non-human organism or in the culture medium surrounding said non-human organism.

[19888] A further embodiment of the present invention relates to a process for the production of 5-oxoproline, which comprises
[19889] (a1) increasing or generating the activity of a polypeptide comprising a polypeptide as depicted in the respective line in column 5 or 8 of Table II, application no. 3, or a homolog or fragment thereof, a consensus sequence or at least one polypeptide motif as depicted in column 8 of Table IV, application no. 3; or
[19890] increasing or generating the activity of an expression product of one or more nucleic acid molecule(s) comprising a polynucleotide as depicted in the respective line in column 5 or 8 of Table I, application no. 3, preferably the coding region thereof, or a homolog or a fragment thereof;
[19891] in an organelle, preferably in plastids or mitochondria, especially in plastids, in a non-human organism or a part thereof; preferably a microorganism, a plant cell, a plant or a part thereof, as compared to a corresponding non-transformed wild type non-human organism or a part thereof; or
[19892] (a2) increasing or generating the activity of a polypeptide comprising a polypeptide as depicted in the respective line in column 5 or 8 of Table II, application no. 3, or a homolog or a fragment thereof, a consensus sequence or at least one polypeptide motif as depicted in the respective line in column 8 of Table IV, application no. 3, which is joined to a transit peptide; or
[19893] increasing or generating the activity of an expression product of one or more nucleic acid molecule(s) comprising a polynucleotide as depicted in the respective line in column 5 or 8 of Table I, application no. 3, preferably the coding region thereof, or a homolog or a fragment thereof, which is joined to a nucleic acid sequence encoding an organelle localization sequence, preferably a plastid or a mitochondrion localization sequence, especially a plastid localization sequence;
[19894] in a non-human organism or a part thereof; preferably a microorganism, a plant cell, a plant or a part thereof, as compared to a corresponding non-transformed wild type non-human organism or a part thereof; or
[19895] (a3) increasing or generating the activity of a polypeptide comprising a polypeptide as depicted in the respective line in column 5 or 8 of Table II, application no. 3, or a homolog or a fragment thereof, a consensus sequence or at least one polypeptide motif as depicted in the respective line in column 8 of Table IV, application no. 3; or
[19896] increasing or generating the activity of an expression product of one or more nucleic acid molecule(s) comprising a polynucleotide as depicted in the respective line in column 5 or 8 of Table I, application no. 3, preferably the coding region thereof, or a homolog or a fragment thereof;
[19897] in an organelle, preferably in plastids or mitochondria, especially in plastids, in a non-human organism or a part thereof; preferably a microorganism, a plant cell, a plant or a part thereof, through transformation of the organelle, as compared to a corresponding non-transformed wild type non-human organism or a part thereof;
   (wherein in the respective line in the respective Table in column 7 5-oxoproline is depicted) and
[19898] (b) growing the non-human organism under conditions which permit the production of 5-oxoproline, or a composition comprising 5-oxoproline in said non-human organism or in the culture medium surrounding said non-human organism.

[19899] A further embodiment of the present invention relates to a process for the production of alanine, which comprises
[19900] (a1) increasing or generating the activity of a polypeptide comprising a polypeptide as depicted in the respective line in column 5 or 8 of Table II, application no. 3, or a homolog or fragment thereof, a consensus sequence or at least one polypeptide motif as depicted in column 8 of Table IV, application no. 3; or increasing or generating the activity of an expression product of one or more nucleic acid molecule(s) comprising a polynucleotide as depicted in the respective line in column 5 or 8 of Table I, application no. 3, preferably the coding region thereof, or a homolog or a fragment thereof;
[19901] in an organelle, preferably in plastids or mitochondria, especially in plastids, in a non-human organism or a part thereof; preferably a microorganism, a plant cell, a plant or a part thereof, as compared to a corresponding non-transformed wild type non-human organism or a part thereof; or
[19902] (a2) increasing or generating the activity of a polypeptide comprising a polypeptide as depicted in the respective line in column 5 or 8 of Table II, application no. 3, or a homolog or a fragment thereof, a consensus sequence or at least one polypeptide motif as depicted in the respective line in column 8 of Table IV, application no. 3, which is joined to a transit peptide; or
[19903] increasing or generating the activity of an expression product of one or more nucleic acid molecule(s) comprising a polynucleotide as depicted in the respective line in column 5 or 8 of Table I, application no. 3, preferably the coding region thereof, or a homolog or a fragment thereof, which is joined to a nucleic acid sequence encoding an organelle localization sequence, preferably a plastid or a mitochondrion localization sequence, especially a plastid localization sequence;
[19904] in a non-human organism or a part thereof; preferably a microorganism, a plant cell, a plant or a part thereof, as compared to a corresponding non-transformed wild type non-human organism or a part thereof; or
[19905] (a3) increasing or generating the activity of a polypeptide comprising a polypeptide as depicted in the respective line in column 5 or 8 of Table II, application no. 3, or a homolog or a fragment thereof, a consensus sequence or at least one polypeptide motif as depicted in the respective line in column 8 of Table IV, application no. 3; or
[19906] increasing or generating the activity of an expression product of one or more nucleic acid molecule(s) comprising a polynucleotide as depicted in the respective line in column 5 or 8 of Table I, application no. 3, preferably the coding region thereof, or a homolog or a fragment thereof;
[19907] in an organelle, preferably in plastids or mitochondria, especially in plastids, in a non-human organism or a part thereof; preferably a microorganism, a plant cell, a plant or a part thereof, through transformation of the organelle, as compared to a corresponding non-transformed wild type non-human organism or a part thereof;
   (wherein in the respective line in the respective Table in column 7 alanine is depicted)
   and
[19908] (b) growing the non-human organism under conditions which permit the production of alanine, or a composition comprising alanine in said non-human organism or in the culture medium surrounding said non-human organism.

[19909] A further embodiment of the present invention relates to a process for the production of asparagine, which comprises
[19910] (a1) increasing or generating the activity of a polypeptide comprising a polypeptide as depicted in the respective line in column 5 or 8 of Table II, application no. 3, or a homolog or fragment thereof, a consensus sequence or at least one polypeptide motif as depicted in column 8 of Table IV, application no. 3; or
[19911] increasing or generating the activity of an expression product of one or more nucleic acid molecule(s) comprising a polynucleotide as depicted in the respective line in column 5 or 8 of Table I, application no. 3, preferably the coding region thereof, or a homolog or a fragment thereof;
[19912] in an organelle, preferably in plastids or mitochondria, especially in plastids, in a non-human organism or a part thereof; preferably a microorganism, a plant cell, a plant or a part thereof, as compared to a corresponding non-transformed wild type non-human organism or a part thereof; or
[19913] (a2) increasing or generating the activity of a polypeptide comprising a polypeptide as depicted in the respective line in column 5 or 8 of Table II, application no. 3, or a homolog or a fragment thereof, a consensus sequence or at least one polypeptide motif as depicted in the respective line in column 8 of Table IV, application no. 3, which is joined to a transit peptide; or
[19914] increasing or generating the activity of an expression product of one or more nucleic acid molecule(s) comprising a polynucleotide as depicted in the respective line in column 5 or 8 of Table I, application no. 3, preferably the coding region thereof, or a homolog or a fragment thereof, which is joined to a nucleic acid sequence encoding an organelle localization sequence, preferably a plastid or a mitochondrion localization sequence, especially a plastid localization sequence;
[19915] in a non-human organism or a part thereof; preferably a microorganism, a plant cell, a plant or a part thereof, as compared to a corresponding non-transformed wild type non-human organism or a part thereof; or
[19916] (a3) increasing or generating the activity of a polypeptide comprising a polypeptide as depicted in the respective line in column 5 or 8 of Table II, application no. 3, or a homolog or a fragment thereof, a consensus sequence or at least one polypeptide motif as depicted in the respective line in column 8 of Table IV, application no. 3; or increasing or generating the activity of an expression product of one or more nucleic acid molecule(s) comprising a polynucleotide as depicted in the respective line in column 5 or 8 of Table I, application no. 3, preferably the coding region thereof, or a homolog or a fragment thereof;
[19917] in an organelle, preferably in plastids or mitochondria, especially in plastids, in a non-human organism or a part thereof; preferably a microorganism, a plant cell, a plant or a part thereof, through transformation of the organelle, as compared to a corresponding non-transformed wild type non-human organism or a part thereof;
   (wherein in the respective line in the respective Table in column 7 asparagine is depicted)
[19918] and
[19919] (b) growing the non-human organism under conditions which permit the production of asparagine, or a composition comprising asparagine in said non-human organism or in the culture medium surrounding said non-human organism.

[19920] A further embodiment of the present invention relates to a process for the production of aspartate, which comprises
[19921] (a1) increasing or generating the activity of a polypeptide comprising a polypeptide as depicted in the respective line in column 5 or 8 of Table II, application no. 3, or a homolog or fragment thereof, a consensus sequence or at least one polypeptide motif as depicted in column 8 of Table IV, application no. 3; or
[19922] increasing or generating the activity of an expression product of one or more nucleic acid molecule(s) comprising a polynucleotide as depicted in the respective line in column 5 or 8 of Table I, application no. 3, preferably the coding region thereof, or a homolog or a fragment thereof;
[19923] in an organelle, preferably in plastids or mitochondria, especially in plastids, in a non-human organism or a part thereof; preferably a microorganism, a plant cell, a plant or a part thereof, as compared to a corresponding non-transformed wild type non-human organism or a part thereof; or
[19924] (a2) increasing or generating the activity of a polypeptide comprising a polypeptide as depicted in the respective line in column 5 or 8 of Table II, application no. 3, or a homolog or a fragment thereof, a consensus sequence or at least one polypeptide motif as depicted in the respective line in column 8 of Table IV, application no. 3, which is joined to a transit peptide; or
[19925] increasing or generating the activity of an expression product of one or more nucleic acid molecule(s) comprising a polynucleotide as depicted in the respective line in column 5 or 8 of Table I, application no. 3, preferably the coding region thereof, or a homolog or a fragment thereof, which is joined to a nucleic acid sequence encoding an organelle localization sequence, preferably a plastid or a mitochondrion localization sequence, especially a plastid localization sequence;
[19926] in a non-human organism or a part thereof; preferably a microorganism, a plant cell, a plant or a part thereof, as compared to a corresponding non-transformed wild type non-human organism or a part thereof; or
[19927] (a3) increasing or generating the activity of a polypeptide comprising a polypeptide as depicted in the respective line in column 5 or 8 of Table II, application no. 3, or a homolog or a fragment thereof, a consensus sequence or at least one polypeptide motif as depicted in the respective line in column 8 of Table IV, application no. 3; or
[19928] increasing or generating the activity of an expression product of one or more nucleic acid molecule(s) comprising a polynucleotide as depicted in the respective line in column 5 or 8 of Table I, application no. 3, preferably the coding region thereof, or a homolog or a fragment thereof;
[19929] in an organelle, preferably in plastids or mitochondria, especially in plastids, in a non-human organism or a part thereof; preferably a microorganism, a plant cell, a plant or a part thereof, through transformation of the organelle, as compared to a corresponding non-transformed wild type non-human organism or a part thereof;
   (wherein in the respective line in the respective Table in column 7 aspartate is depicted)
   and
[19930] (b) growing the non-human organism under conditions which permit the production of aspartate, or a composition comprising aspartate in said non-human organism or in the culture medium surrounding said non-human organism.

[19931] A further embodiment of the present invention relates to a process for the production of citrulline, which comprises
[19932] (a1) increasing or generating the activity of a polypeptide comprising a polypeptide as depicted in the respective line in column 5 or 8 of Table II, application no. 3, or a homolog or fragment thereof, a consensus sequence or at least one polypeptide motif as depicted in column 8 of Table IV, application no. 3; or
[19933] increasing or generating the activity of an expression product of one or more nucleic acid molecule(s) comprising a polynucleotide as depicted in the respective line in column 5 or 8 of Table I, application no. 3, preferably the coding region thereof, or a homolog or a fragment thereof;
[19934] in an organelle, preferably in plastids or mitochondria, especially in plastids, in a non-human organism or a part thereof; preferably a microorganism, a plant cell, a plant or a part thereof, as compared to a corresponding non-transformed wild type non-human organism or a part thereof; or
[19935] (a2) increasing or generating the activity of a polypeptide comprising a polypeptide as depicted in the respective line in column 5 or 8 of Table II, application no. 3, or a homolog or a fragment thereof, a consensus sequence or at least one polypeptide motif as depicted in the respective line in column 8 of Table IV, application no. 3, which is joined to a transit peptide; or
[19936] increasing or generating the activity of an expression product of one or more nucleic acid molecule(s) comprising a polynucleotide as depicted in the respective line in column 5 or 8 of Table I, application no. 3, preferably the coding region thereof, or a homolog or a fragment thereof, which is joined to a nucleic acid sequence encoding an organelle localization sequence, preferably a plastid or a mitochondrion localization sequence, especially a plastid localization sequence;
[19937] in a non-human organism or a part thereof; preferably a microorganism, a plant cell, a plant or a part thereof, as compared to a corresponding non-transformed wild type non-human organism or a part thereof; or
[19938] (a3) increasing or generating the activity of a polypeptide comprising a polypeptide as depicted in the respective line in column 5 or 8 of Table II, application no. 3, or a homolog or a fragment thereof, a consensus sequence or at least one polypeptide motif as depicted in the respective line in column 8 of Table IV, application no. 3; or
[19939] increasing or generating the activity of an expression product of one or more nucleic acid molecule(s) comprising a polynucleotide as depicted in the respective line in column 5 or 8 of Table I, application no. 3, preferably the coding region thereof, or a homolog or a fragment thereof;
[19940] in an organelle, preferably in plastids or mitochondria, especially in plastids, in a non-human organism or a part thereof; preferably a microorganism, a plant cell, a plant or a part thereof, through transformation of the organelle, as compared to a corresponding non-transformed wild type non-human organism or a part thereof;
   (wherein in the respective line in the respective Table in column 7 citrulline is depicted)
   and
[19941] (b) growing the non-human organism under conditions which permit the production of citrulline, or a composition comprising citrulline in said non-human organism or in the culture medium surrounding said non-human organism.

[19942] A further embodiment of the present invention relates to a process for the production of glycine, which comprises
[19943] (a1) increasing or generating the activity of a polypeptide comprising a polypeptide as depicted in the respective line in column 5 or 8 of Table II, application no. 3, or a homolog or fragment thereof, a consensus sequence or at least one polypeptide motif as depicted in column 8 of Table IV, application no. 3; or
[19944] increasing or generating the activity of an expression product of one or more nucleic acid molecule(s) comprising a polynucleotide as depicted in the respective line in column 5 or 8 of Table I, application no. 3, preferably the coding region thereof, or a homolog or a fragment thereof;
[19945] in an organelle, preferably in plastids or mitochondria, especially in plastids, in a non-human organism or a part thereof; preferably a microorganism, a plant cell, a plant or a part thereof, as compared to a corresponding non-transformed wild type non-human organism or a part thereof; or
[19946] (a2) increasing or generating the activity of a polypeptide comprising a polypeptide as depicted in the respective line in column 5 or 8 of Table II, application no. 3, or a homolog or a fragment thereof, a consensus sequence or at least one polypeptide motif as depicted in the respective line in column 8 of Table IV, application no. 3, which is joined to a transit peptide; or
[19947] increasing or generating the activity of an expression product of one or more nucleic acid molecule(s) comprising a polynucleotide as depicted in the respective line in column 5 or 8 of Table I, application no. 3, preferably the coding region thereof, or a homolog or a fragment thereof, which is joined to a nucleic acid sequence encoding an organelle localization sequence, preferably a plastid or a mitochondrion localization sequence, especially a plastid localization sequence;
[19948] in a non-human organism or a part thereof; preferably a microorganism, a plant cell, a plant or a part thereof, as compared to a corresponding non-transformed wild type non-human organism or a part thereof; or
[19949] (a3) increasing or generating the activity of a polypeptide comprising a polypeptide as depicted in the respective line in column 5 or 8 of Table II, application no. 3, or a homolog or a fragment thereof, a consensus sequence or at least one polypeptide motif as depicted in the respective line in column 8 of Table IV, application no. 3; or
[19950] increasing or generating the activity of an expression product of one or more nucleic acid molecule(s) comprising a polynucleotide as depicted in the respective line in column 5 or 8 of Table I, application no. 3, preferably the coding region thereof, or a homolog or a fragment thereof;
[19951] in an organelle, preferably in plastids or mitochondria, especially in plastids, in a non-human organism or a part thereof; preferably a microorganism, a plant cell, a plant or a part thereof, through transformation of the organelle, as compared to a corresponding non-transformed wild type non-human organism or a part thereof;
   (wherein in the respective line in the respective Table in column 7 glycine is depicted)
   and
[19952] (b) growing the non-human organism under conditions which permit the production of glycine, or a composition comprising glycine in said non-human organism or in the culture medium surrounding said non-human organism.

[19953] A further embodiment of the present invention relates to a process for the production of homoserine, which comprises
[19954] (a1) increasing or generating the activity of a polypeptide comprising a polypeptide as depicted in the respective line in column 5 or 8 of Table II, application no. 3, or a homolog or fragment thereof, a consensus sequence or at least one polypeptide motif as depicted in column 8 of Table IV, application no. 3; or
[19955] increasing or generating the activity of an expression product of one or more nucleic acid molecule(s) comprising a polynucleotide as depicted in the respective line in column 5 or 8 of Table I, application no. 3, preferably the coding region thereof, or a homolog or a fragment thereof;
[19956] in an organelle, preferably in plastids or mitochondria, especially in plastids, in a non-human organism or a part thereof; preferably a microorganism, a plant cell, a plant or a part thereof, as compared to a corresponding non-transformed wild type non-human organism or a part thereof; or
[19957] (a2) increasing or generating the activity of a polypeptide comprising a polypeptide as depicted in the respective line in column 5 or 8 of Table II, application no. 3, or a homolog or a fragment thereof, a consensus sequence or at least one polypeptide motif as depicted in the respective line in column 8 of Table IV, application no. 3, which is joined to a transit peptide; or
[19958] increasing or generating the activity of an expression product of one or more nucleic acid molecule(s) comprising a polynucleotide as depicted in the respective line in column 5 or 8 of Table I, application no. 3, preferably the coding region thereof, or a homolog or a fragment thereof, which is joined to a nucleic acid sequence encoding an organelle localization sequence, preferably a plastid or a mitochondrion localization sequence, especially a plastid localization sequence;
[19959] in a non-human organism or a part thereof; preferably a microorganism, a plant cell, a plant or a part thereof, as compared to a corresponding non-transformed wild type non-human organism or a part thereof; or
[19960] (a3) increasing or generating the activity of a polypeptide comprising a polypeptide as depicted in the respective line in column 5 or 8 of Table II, application no. 3, or a homolog or a fragment thereof, a consensus sequence or at least one polypeptide motif as depicted in the respective line in column 8 of Table IV, application no. 3; or
[19961] increasing or generating the activity of an expression product of one or more nucleic acid molecule(s) comprising a polynucleotide as depicted in the respective line in column 5 or 8 of Table I, application no. 3, preferably the coding region thereof, or a homolog or a fragment thereof;
[19962] in an organelle, preferably in plastids or mitochondria, especially in plastids, in a non-human organism or a part thereof; preferably a microorganism, a plant cell, a plant or a part thereof, through transformation of the organelle, as compared to a corresponding non-transformed wild type non-human organism or a part thereof;
   (wherein in the respective line in the respective Table in column 7 homoserine is depicted)
   and
[19963] (b) growing the non-human organism under conditions which permit the production of homoserine, or a composition comprising homoserine in said non-human organism or in the culture medium surrounding said non-human organism.

[19964] A further embodiment of the present invention relates to a process for the production of ornithine, which comprises
[19965] (a1) increasing or generating the activity of a polypeptide comprising a polypeptide as depicted in the respective line in column 5 or 8 of Table II, application no. 3, or a homolog or fragment thereof, a consensus sequence or at least one polypeptide motif as depicted in column 8 of Table IV, application no. 3; or
[19966] increasing or generating the activity of an expression product of one or more nucleic acid molecule(s) comprising a polynucleotide as depicted in the respective line in column 5 or 8 of Table I, application no. 3, preferably the coding region thereof, or a homolog or a fragment thereof;
[19967] in an organelle, preferably in plastids or mitochondria, especially in plastids, in a non-human organism or a part thereof; preferably a microorganism, a plant cell, a plant or a part thereof, as compared to a corresponding non-transformed wild type non-human organism or a part thereof; or
[19968] (a2) increasing or generating the activity of a polypeptide comprising a polypeptide as depicted in the respective line in column 5 or 8 of Table II, application no. 3, or a homolog or a fragment thereof, a consensus sequence or at least one polypeptide motif as depicted in the respective line in column 8 of Table IV, application no. 3, which is joined to a transit peptide; or
[19969] increasing or generating the activity of an expression product of one or more nucleic acid molecule(s) comprising a polynucleotide as depicted in the respective line in column 5 or 8 of Table I, application no. 3, preferably the coding region thereof, or a homolog or a fragment thereof, which is joined to a nucleic acid sequence encoding an organelle localization sequence, preferably a plastid or a mitochondrion localization sequence, especially a plastid localization sequence;
[19970] in a non-human organism or a part thereof; preferably a microorganism, a plant cell, a plant or a part thereof, as compared to a corresponding non-transformed wild type non-human organism or a part thereof; or
[19971] (a3) increasing or generating the activity of a polypeptide comprising a polypeptide as depicted in the respective line in column 5 or 8 of Table II, application no. 3, or a homolog or a fragment thereof, a consensus sequence or at least one polypeptide motif as depicted in the respective line in column 8 of Table IV, application no. 3; or
[19972] increasing or generating the activity of an expression product of one or more nucleic acid molecule(s) comprising a polynucleotide as depicted in the respective line in column 5 or 8 of Table I, application no. 3, preferably the coding region thereof, or a homolog or a fragment thereof;
[19973] in an organelle, preferably in plastids or mitochondria, especially in plastids, in a non-human organism or a part thereof; preferably a microorganism, a plant cell, a plant or a part thereof, through transformation of the organelle, as compared to a corresponding non-transformed wild type non-human organism or a part thereof;
   (wherein in the respective line in the respective Table in column 7 orthinine is depicted)
   and
[19974] (b) growing the non-human organism under conditions which permit the production of ornithine, or a composition comprising ornithine in said non-human organism or in the culture medium surrounding said non-human organism.

[19975] A further embodiment of the present invention relates to a process for the production of phenylalanine, which comprises
[19976] (a1) increasing or generating the activity of a polypeptide comprising a polypeptide as depicted in the respective line in column 5 or 8 of Table II, application no. 3, or a homolog or fragment thereof, a consensus sequence or at least one polypeptide motif as depicted in column 8 of Table IV, application no. 3; or
[19977] increasing or generating the activity of an expression product of one or more nucleic acid molecule(s) comprising a polynucleotide as depicted in the respective line in column 5 or 8 of Table I, application no. 3, preferably the coding region thereof, or a homolog or a fragment thereof;
[19978] in an organelle, preferably in plastids or mitochondria, especially in plastids, in a non-human organism or a part thereof; preferably a microorganism, a plant cell, a plant or a part thereof, as compared to a corresponding non-transformed wild type non-human organism or a part thereof; or
[19979] (a2) increasing or generating the activity of a polypeptide comprising a polypeptide as depicted in the respective line in column 5 or 8 of Table II, application no. 3, or a homolog or a fragment thereof, a consensus sequence or at least one polypeptide motif as depicted in the respective line in column 8 of Table IV, application no. 3, which is joined to a transit peptide; or
[19980] increasing or generating the activity of an expression product of one or more nucleic acid molecule(s) comprising a polynucleotide as depicted in the respective line in column 5 or 8 of Table I, application no. 3, preferably the coding region thereof, or a homolog or a fragment thereof, which is joined to a nucleic acid sequence encoding an organelle localization sequence, preferably a plastid or a mitochondrion localization sequence, especially a plastid localization sequence;
[19981] in a non-human organism or a part thereof; preferably a microorganism, a plant cell, a plant or a part thereof, as compared to a corresponding non-transformed wild type non-human organism or a part thereof; or
[19982] (a3) increasing or generating the activity of a polypeptide comprising a polypeptide as depicted in the respective line in column 5 or 8 of Table II, application no. 3, or a homolog or a fragment thereof, a consensus sequence or at least one polypeptide motif as depicted in the respective line in column 8 of Table IV, application no. 3; or
[19983] increasing or generating the activity of an expression product of one or more nucleic acid molecule(s) comprising a polynucleotide as depicted in the respective line in column 5 or 8 of Table I, application no. 3, preferably the coding region thereof, or a homolog or a fragment thereof;
[19984] in an organelle, preferably in plastids or mitochondria, especially in plastids, in a non-human organism or a part thereof; preferably a microorganism, a plant cell, a plant or a part thereof, through transformation of the organelle, as compared to a corresponding non-transformed wild type non-human organism or a part thereof;
   (wherein in the respective line in the respective Table in column 7 phenylalanine is depicted)
   and
[19985] (b) growing the non-human organism under conditions which permit the production of phenylalanine, or a composition comprising phenylalanine in said non-human organism or in the culture medium surrounding said non-human organism.

[19986] A further embodiment of the present invention relates to a process for the production of serine, which comprises
[19987] (a1) increasing or generating the activity of a polypeptide comprising a polypeptide as depicted in the respective line in column 5 or 8 of Table II, application no. 3, or a homolog or fragment thereof, a consensus sequence or at least one polypeptide motif as depicted in column 8 of Table IV, application no. 3; or
[19988] increasing or generating the activity of an expression product of one or more nucleic acid molecule(s) comprising a polynucleotide as depicted in the respective line in column 5 or 8 of Table I, application no. 3, preferably the coding region thereof, or a homolog or a fragment thereof;
[19989] in an organelle, preferably in plastids or mitochondria, especially in plastids, in a non-human organism or a part thereof; preferably a microorganism, a plant cell, a plant or a part thereof, as compared to a corresponding non-transformed wild type non-human organism or a part thereof; or
[19990] (a2) increasing or generating the activity of a polypeptide comprising a polypeptide as depicted in the respective line in column 5 or 8 of Table II, application no. 3, or a homolog or a fragment thereof, a consensus sequence or at least one polypeptide motif as depicted in the respective line in column 8 of Table IV, application no. 3, which is joined to a transit peptide; or
[19991] increasing or generating the activity of an expression product of one or more nucleic acid molecule(s) comprising a polynucleotide as depicted in the respective line in column 5 or 8 of Table I, application no. 3, preferably the coding region thereof, or a homolog or a fragment thereof, which is joined to a nucleic acid sequence encoding an organelle localization sequence, preferably a plastid or a mitochondrion localization sequence, especially a plastid localization sequence;
[19992] in a non-human organism or a part thereof; preferably a microorganism, a plant cell, a plant or a part thereof, as compared to a corresponding non-transformed wild type non-human organism or a part thereof; or
[19993] (a3) increasing or generating the activity of a polypeptide comprising a polypeptide as depicted in the respective line in column 5 or 8 of Table II, application no. 3, or a homolog or a fragment thereof, a consensus sequence or at least one polypeptide motif as depicted in the respective line in column 8 of Table IV, application no. 3; or
[19994] increasing or generating the activity of an expression product of one or more nucleic acid molecule(s) comprising a polynucleotide as depicted in the respective line in column 5 or 8 of Table I, application no. 3, preferably the coding region thereof, or a homolog or a fragment thereof;
[19995] in an organelle, preferably in plastids or mitochondria, especially in plastids, in a non-human organism or a part thereof; preferably a microorganism, a plant cell, a plant or a part thereof, through transformation of the organelle, as compared to a corresponding non-transformed wild type non-human organism or a part thereof;
   (wherein in the respective line in the respective Table in column 7 serine is depicted)
   and
[19996] (b) growing the non-human organism under conditions which permit the production of serine, or a composition comprising serine in said non-human organism or in the culture medium surrounding said non-human organism.

[19997] A further embodiment of the present invention relates to a process for the production of tyrosine, which comprises
[19998] (a1) increasing or generating the activity of a polypeptide comprising a polypeptide as depicted in the respective line in column 5 or 8 of Table II, application no. 3, or a homolog or fragment thereof, a consensus sequence or at least one polypeptide motif as depicted in column 8 of Table IV, application no. 3; or
[19999] increasing or generating the activity of an expression product of one or more nucleic acid molecule(s) comprising a polynucleotide as depicted in the respective line in column 5 or 8 of Table I, application no. 3, preferably the coding region thereof, or a homolog or a fragment thereof;
[20000] in an organelle, preferably in plastids or mitochondria, especially in plastids, in a non-human organism or a part thereof; preferably a microorganism, a plant cell, a plant or a part thereof, as compared to a corresponding non-transformed wild type non-human organism or a part thereof; or
[20001] (a2) increasing or generating the activity of a polypeptide comprising a polypeptide as depicted in the respective line in column 5 or 8 of Table II, application no. 3, or a homolog or a fragment thereof, a consensus sequence or at least one polypeptide motif as depicted in the respective line in column 8 of Table IV, application no. 3, which is joined to a transit peptide; or
[20002] increasing or generating the activity of an expression product of one or more nucleic acid molecule(s) comprising a polynucleotide as depicted in the respective line in column 5 or 8 of Table I, application no. 3, preferably the coding region thereof, or a homolog or a fragment thereof, which is joined to a nucleic acid sequence encoding an organelle localization sequence, preferably a plastid or a mitochondrion localization sequence, especially a plastid localization sequence;
[20003] in a non-human organism or a part thereof; preferably a microorganism, a plant cell, a plant or a part thereof, as compared to a corresponding non-transformed wild type non-human organism or a part thereof; or
[20004] (a3) increasing or generating the activity of a polypeptide comprising a polypeptide as depicted in the respective line in column 5 or 8 of Table II, application no. 3, or a homolog or a fragment thereof, a consensus sequence or at least one polypeptide motif as depicted in the respective line in column 8 of Table IV, application no. 3; or
[20005] increasing or generating the activity of an expression product of one or more nucleic acid molecule(s) comprising a polynucleotide as depicted in the respective line in column 5 or 8 of Table I, application no. 3, preferably the coding region thereof, or a homolog or a fragment thereof;
[20006] in an organelle, preferably in plastids or mitochondria, especially in plastids, in a non-human organism or a part thereof; preferably a microorganism, a plant cell, a plant or a part thereof, through transformation of the organelle, as compared to a corresponding non-transformed wild type non-human organism or a part thereof;
   (wherein in the respective line in the respective Table in column 7 tyrosine is depicted)
   and
[20007] (b) growing the non-human organism under conditions which permit the production of tyrosine, or a composition comprising tyrosine in said non-human organism or in the culture medium surrounding said non-human organism.

[20008] Accordingly, the present invention relates to a process for the production of aspartate, which comprises
[20009] (a) increasing or generating the activity of a 47266012-protein in the cytosol of a cell of a non-human organism or a part thereof, preferably a microorganism, a plant cell, a plant or a part thereof, as compared to a corresponding non-transformed wild type non-human organism or a part thereof; and
[20010] (b) growing the non-human organism or a part thereof under conditions which permit the production of aspartate or a composition comprising aspartate in said non-human organism or in the culture medium surrounding said non-human organism.

[20011] Accordingly, the present invention relates to a process for the production of tyrosine, which comprises
[20012] (a) increasing or generating the activity of a 47266012-protein in the cytosol of a cell of a non-human organism or a part thereof, preferably a microorganism, a plant cell, a plant or a part thereof, as compared to a corresponding non-transformed wild type non-human organism or a part thereof; and
[20013] (b) growing the non-human organism or a part thereof under conditions which permit the production of tyrosine or a composition comprising tyrosine in said non-human organism or in the culture medium surrounding said non-human organism.

[20014] Accordingly, the present invention relates to a process for the production of 5-oxoproline, which comprises
[20015] (a) increasing or generating the activity of a 47266012-protein in the cytosol of a cell of a non-human organism or a part thereof, preferably a microorganism, a plant cell, a plant or a part thereof, as compared to a corresponding non-transformed wild type non-human organism or a part thereof; and
[20016] (b) growing the non-human organism or a part thereof under conditions which permit the production of 5-oxoproline or a composition comprising 5-oxoproline in said non-human organism or in the culture medium surrounding said non-human organism.

[20017] Accordingly, the present invention relates to a process for the production of aspartate, which comprises
[20018] (a) increasing or generating the activity of a 49747384_SOYBEAN-protein in the cytosol of a cell of a non-human organism or a part thereof, preferably a microorganism, a plant cell, a plant or a part thereof, as compared to a corresponding non-transformed wild type non-human organism or a part thereof; and
[20019] (b) growing the non-human organism or a part thereof under conditions which permit the production of aspartate or a composition comprising aspartate in said non-human organism or in the culture medium surrounding said non-human organism.

[20020] Accordingly, the present invention relates to a process for the production of tyrosine, which comprises
[20021] (a) increasing or generating the activity of a 49747384_SOYBEAN-protein in the cytosol of a cell of a non-human organism or a part thereof, preferably a microorganism, a plant cell, a plant or a part thereof, as compared to a corresponding non-transformed wild type non-human organism or a part thereof; and
[20022] (b) growing the non-human organism or a part thereof under conditions which permit the production of tyrosine or a composition comprising tyrosine in said non-human organism or in the culture medium surrounding said non-human organism.

[20023] Accordingly, the present invention relates to a process for the production of 5-oxoproline, which comprises
[20024] (a) increasing or generating the activity of a 49747384_SOYBEAN-protein in the cytosol of a cell of a non-human organism or a part thereof, preferably a microorganism, a plant cell, a plant or a part thereof, as compared to a corresponding non-transformed wild type non-human organism or a part thereof; and
[20025] (b) growing the non-human organism or a part thereof under conditions which permit the production of 5-oxoproline or a composition comprising 5-oxoproline in said non-human organism or in the culture medium surrounding said non-human organism.

[20026] Accordingly, the present invention relates to a process for the production of alanine, which comprises
[20027] (a) increasing or generating the activity of a pyruvate kinase in the cytosol of a cell of a non-human organism or a part thereof, preferably a microorganism, a plant cell, a plant or a part thereof, as compared to a corresponding non-transformed wild type non-human organism or a part thereof; and
[20028] (b) growing the non-human organism or a part thereof under conditions which permit the production of alanine or a composition comprising alanine in said non-human organism or in the culture medium surrounding said non-human organism.

[20029] Accordingly, the present invention relates to a process for the production of phenylalanine, which comprises
[20030] (a) increasing or generating the activity of a pyruvate kinase in the cytosol of a cell of a non-human organism or a part thereof, preferably a microorganism, a plant cell, a plant or a part thereof, as compared to a corresponding non-transformed wild type non-human organism or a part thereof; and
[20031] (b) growing the non-human organism or a part thereof under conditions which permit the production of phenylalanine or a composition comprising phenylalanine in said non-human organism or in the culture medium surrounding said non-human organism.

[20032] Accordingly, the present invention relates to a process for the production of tyrosine, which comprises
[20033] (a) increasing or generating the activity of a pyruvate kinase in the cytosol of a cell of a non-human organism or a part thereof, preferably a microorganism, a plant cell, a plant or a part thereof, as compared to a corresponding non-transformed wild type non-human organism or a part thereof; and
[20034] (b) growing the non-human organism or a part thereof under conditions which permit the production of tyrosine or a composition comprising tyrosine in said non-human organism or in the culture medium surrounding said non-human organism.

[20035] Accordingly, the present invention relates to a process for the production of citrulline, which comprises
[20036] (a) increasing or generating the activity of a acetyltransferase in the cytosol of a cell of a non-human organism or a part thereof, preferably a microorganism, a plant cell, a plant or a part thereof, as compared to a corresponding non-transformed wild type non-human organism or a part thereof; and
[20037] (b) growing the non-human organism or a part thereof under conditions which permit the production of citrulline or a composition comprising citrulline in said non-human organism or in the culture medium surrounding said non-human organism.

[20038] Accordingly, the present invention relates to a process for the production of asparagine, which comprises
[20039] (a) increasing or generating the activity of a pyruvate kinase in the cytosol of a cell of a non-human organism or a part thereof, preferably a microorganism, a plant cell, a plant or a part thereof, as compared to a corresponding non-transformed wild type non-human organism or a part thereof; and
[20040] (b) growing the non-human organism or a part thereof under conditions which permit the production of asparagine or a composition comprising asparagine in said non-human organism or in the culture medium surrounding said non-human organism.

[20041] Accordingly, the present invention relates to a process for the production of serine, which comprises
[20042] (a) increasing or generating the activity of a pyruvate kinase in the cytosol of a cell of a non-human organism or a part thereof, preferably a microorganism, a plant cell, a plant or a part thereof, as compared to a corresponding non-transformed wild type non-human organism or a part thereof; and
[20043] (b) growing the non-human organism or a part thereof under conditions which permit the production of serine or a composition comprising serine in said non-human organism or in the culture medium surrounding said non-human organism.

[20044] Accordingly, the present invention relates to a process for the production of alanine, which comprises
[20045] (a) increasing or generating the activity of a glucose-6-phosphate 1-dehydrogenase in the cytosol of a cell of a non-human organism or a part thereof, preferably a microorganism, a plant cell, a plant or a part thereof, as compared to a corresponding non-transformed wild type non-human organism or a part thereof; and
[20046] (b) growing the non-human organism or a part thereof under conditions which permit the production of alanine or a composition comprising alanine in said non-human organism or in the culture medium surrounding said non-human organism.

[20047] Accordingly, the present invention relates to a process for the production of phenylalanine, which comprises
[20048] (a) increasing or generating the activity of a glucose-6-phosphate 1-dehydrogenase in the cytosol of a cell of a non-human organism or a part thereof, preferably a microorganism, a plant cell, a plant or a part thereof, as compared to a corresponding non-transformed wild type non-human organism or a part thereof; and
[20049] (b) growing the non-human organism or a part thereof under conditions which permit the production of phenylalanine or a composition comprising phenylalanine in said non-human organism or in the culture medium surrounding said non-human organism.

[20050] Accordingly, the present invention relates to a process for the production of tyrosine, which comprises
[20051] (a) increasing or generating the activity of a glucose-6-phosphate 1-dehydrogenase in the cytosol of a cell of a non-human organism or a part thereof, preferably a microorganism, a plant cell, a plant or a part thereof, as compared to a corresponding non-transformed wild type non-human organism or a part thereof; and
[20052] (b) growing the non-human organism or a part thereof under conditions which permit the production of tyrosine or a composition comprising tyrosine in said non-human organism or in the culture medium surrounding said non-human organism.

[20053] Accordingly, the present invention relates to a process for the production of alanine, which comprises
[20054] (a) increasing or generating the activity of a amino acid acetyltransferase in the cytosol of a cell of a non-human organism or a part thereof, preferably a microorganism, a plant cell, a plant or a part thereof, as compared to a corresponding non-transformed wild type non-human organism or a part thereof; and
[20055] (b) growing the non-human organism or a part thereof under conditions which permit the production of alanine or a composition comprising alanine in said non-human organism or in the culture medium surrounding said non-human organism.

[20056] Accordingly, the present invention relates to a process for the production of citrulline, which comprises
[20057] (a) increasing or generating the activity of a amino acid acetyltransferase in the cytosol of a cell of a non-human organism or a part thereof, preferably a microorganism, a plant cell, a plant or a part thereof, as compared to a corresponding non-transformed wild type non-human organism or a part thereof; and
[20058] (b) growing the non-human organism or a part thereof under conditions which permit the production of citrulline or a composition comprising citrulline in said non-human organism or in the culture medium surrounding said non-human organism.

[20059] Accordingly, the present invention relates to a process for the production of phenylalanine, which comprises
[20060] (a) increasing or generating the activity of a amino acid acetyltransferase in the cytosol of a cell of a non-human organism or a part thereof, preferably a microorganism, a plant cell, a plant or a part thereof, as compared to a corresponding non-transformed wild type non-human organism or a part thereof; and
[20061] (b) growing the non-human organism or a part thereof under conditions which permit the production of phenylalanine or a composition comprising phenylalanine in said non-human organism or in the culture medium surrounding said non-human organism.

[20062] Accordingly, the present invention relates to a process for the production of citrulline, which comprises
[20063] (a) increasing or generating the activity of a protein phosphatase in the cytosol of a cell of a non-human organism or a part thereof, preferably a microorganism, a plant cell, a plant or a part thereof, as compared to a corresponding non-transformed wild type non-human organism or a part thereof; and
[20064] (b) growing the non-human organism or a part thereof under conditions which permit the production of citrulline or a composition comprising citrulline in said non-human organism or in the culture medium surrounding said non-human organism.

[20065] Accordingly, the present invention relates to a process for the production of glycine, which comprises
[20066] (a) increasing or generating the activity of a DNA-binding protein in the cytosol of a cell of a non-human organism or a part thereof, preferably a microorganism, a plant cell, a plant or a part thereof, as compared to a corresponding non-transformed wild type non-human organism or a part thereof; and
[20067] (b) growing the non-human organism or a part thereof under conditions which permit the production of glycine or a composition comprising glycine in said non-human organism or in the culture medium surrounding said non-human organism.

[20068] Accordingly, the present invention relates to a process for the production of serine, which comprises
[20069] (a) increasing or generating the activity of a DNA-binding protein in the cytosol of a cell of a non-human organism or a part thereof, preferably a microorganism, a plant cell, a plant or a part thereof, as compared to a corresponding non-transformed wild type non-human organism or a part thereof; and
[20070] (b) growing the non-human organism or a part thereof under conditions which permit the production of serine or a composition comprising serine in said non-human organism or in the culture medium surrounding said non-human organism.

[20071] Accordingly, the present invention relates to a process for the production of phenylalanine, which comprises
[20072] (a) increasing or generating the activity of a At1 g17440-protein in the cytosol of a cell of a non-human organism or a part thereof, preferably a microorganism, a plant cell, a plant or a part thereof, as compared to a corresponding non-transformed wild type non-human organism or a part thereof; and
[20073] (b) growing the non-human organism or a part thereof under conditions which permit the production of phenylalanine or a composition comprising phenylalanine in said non-human organism or in the culture medium surrounding said non-human organism.

[20074] Accordingly, the present invention relates to a process for the production of tyrosine, which comprises
[20075] (a) increasing or generating the activity of a At1g17440-protein in the cytosol of a cell of a non-human organism or a part thereof, preferably a microorganism, a plant cell, a plant or a part thereof, as compared to a corresponding non-transformed wild type non-human organism or a part thereof; and
[20076] (b) growing the non-human organism or a part thereof under conditions which permit the production of tyrosine or a composition comprising tyrosine in said non-human organism or in the culture medium surrounding said non-human organism.

[20077] Accordingly, the present invention relates to a process for the production of aspartate, which comprises
[20078] (a) increasing or generating the activity of a At1g19800-protein in the cytosol of a cell of a non-human organism or a part thereof, preferably a microorganism, a plant cell, a plant or a part thereof, as compared to a corresponding non-transformed wild type non-human organism or a part thereof; and
[20079] (b) growing the non-human organism or a part thereof under conditions which permit the production of aspartate or a composition comprising aspartate in said non-human organism or in the culture medium surrounding said non-human organism.

[20080] Accordingly, the present invention relates to a process for the production of citrulline, which comprises
[20081] (a) increasing or generating the activity of a At1g19800-protein in the cytosol of a cell of a non-human organism or a part thereof, preferably a microorganism, a plant cell, a plant or a part thereof, as compared to a corresponding non-transformed wild type non-human organism or a part thereof; and
[20082] (b) growing the non-human organism or a part thereof under conditions which permit the production of citrulline or a composition comprising citrulline in said non-human organism or in the culture medium surrounding said non-human organism.

[20083] Accordingly, the present invention relates to a process for the production of tyrosine, which comprises
[20084] (a) increasing or generating the activity of a At1g19800-protein in the cytosol of a cell of a non-human organism or a part thereof, preferably a microorganism, a plant cell, a plant or a part thereof, as compared to a corresponding non-transformed wild type non-human organism or a part thereof; and
[20085] (b) growing the non-human organism or a part thereof under conditions which permit the production of tyrosine or a composition comprising tyrosine in said non-human organism or in the culture medium surrounding said non-human organism.

[20086] Accordingly, the present invention relates to a process for the production of phenylalanine, which comprises
[20087] (a) increasing or generating the activity of a cullin in the cytosol of a cell of a non-human organism or a part thereof, preferably a microorganism, a plant cell, a plant or a part thereof, as compared to a corresponding non-transformed wild type non-human organism or a part thereof; and
[20088] (b) growing the non-human organism or a part thereof under conditions which permit the production of phenylalanine or a composition comprising phenylalanine in said non-human organism or in the culture medium surrounding said non-human organism.

[20089] Accordingly, the present invention relates to a process for the production of tyrosine, which comprises
[20090] (a) increasing or generating the activity of a cullin in the cytosol of a cell of a non-human organism or a part thereof, preferably a microorganism, a plant cell, a plant or a part thereof, as compared to a corresponding non-transformed wild type non-human organism or a part thereof; and
[20091] (b) growing the non-human organism or a part thereof under conditions which permit the production of tyrosine or a composition comprising tyrosine in said non-human organism or in the culture medium surrounding said non-human organism.

[20092] Accordingly, the present invention relates to a process for the production of homoserine, which comprises
[20093] (a) increasing or generating the activity of a bifunctional aspartokinase/homoserine dehydrogenase in the cytosol of a cell of a non-human organism or a part thereof, preferably a microorganism, a plant cell, a plant or a part thereof, as compared to a corresponding non-transformed wild type non-human organism or a part thereof; and
[20094] (b) growing the non-human organism or a part thereof under conditions which permit the production of homoserine or a composition comprising homoserine in said non-human organism or in the culture medium surrounding said non-human organism.

[20095] Accordingly, the present invention relates to a process for the production of aspartate, which comprises
[20096] (a) increasing or generating the activity of a eukaryotic translation initiation factor 5 in the cytosol of a cell of a non-human organism or a part thereof, preferably a microorganism, a plant cell, a plant or a part thereof, as compared to a corresponding non-transformed wild type non-human organism or a part thereof; and
[20097] (b) growing the non-human organism or a part thereof under conditions which permit the production of aspartate or a composition comprising aspartate in said non-human organism or in the culture medium surrounding said non-human organism.

[20098] Accordingly, the present invention relates to a process for the production of phenylalanine, which comprises
[20099] (a) increasing or generating the activity of a eukaryotic translation initiation factor 5 in the cytosol of a cell of a non-human organism or a part thereof, preferably a microorganism, a plant cell, a plant or a part thereof, as compared to a corresponding non-transformed wild type non-human organism or a part thereof; and
[20100] (b) growing the non-human organism or a part thereof under conditions which permit the production of phenylalanine or a composition comprising phenylalanine in said non-human organism or in the culture medium surrounding said non-human organism.

[20101] Accordingly, the present invention relates to a process for the production of serine, which comprises
[20102] (a) increasing or generating the activity of a eukaryotic translation initiation factor 5 in the cytosol of a cell of a non-human organism or a part thereof, preferably a microorganism, a plant cell, a plant or a part thereof, as compared to a corresponding non-transformed wild type non-human organism or a part thereof; and
[20103] (b) growing the non-human organism or a part thereof under conditions which permit the production of serine or a composition comprising serine in said non-human organism or in the culture medium surrounding said non-human organism.

[20104] Accordingly, the present invention relates to a process for the production of tyrosine, which comprises
[20105] (a) increasing or generating the activity of a eukaryotic translation initiation factor 5 in the cytosol of a cell of a non-human organism or a part thereof, preferably a microorganism, a plant cell, a plant or a part thereof, as compared to a corresponding non-transformed wild type non-human organism or a part thereof; and
[20106] (b) growing the non-human organism or a part thereof under conditions which permit the production of tyrosine or a composition comprising tyrosine in said non-human organism or in the culture medium surrounding said non-human organism.

[20107] Accordingly, the present invention relates to a process for the production of 5-oxoproline, which comprises
[20108] (a) increasing or generating the activity of a eukaryotic translation initiation factor 5 in the cytosol of a cell of a non-human organism or a part thereof, preferably a microorganism, a plant cell, a plant or a part thereof, as compared to a corresponding non-transformed wild type non-human organism or a part thereof; and
[20109] (b) growing the non-human organism or a part thereof under conditions which permit the production of 5-oxoproline or a composition comprising 5-oxoproline in said non-human organism or in the culture medium surrounding said non-human organism.

[20110] Accordingly, the present invention relates to a process for the production of phenylalanine, which comprises
[20111] (a) increasing or generating the activity of a transcriptional regulator in the cytosol of a cell of a non-human organism or a part thereof, preferably a microorganism, a plant cell, a plant or a part thereof, as compared to a corresponding non-transformed wild type non-human organism or a part thereof; and
[20112] (b) growing the non-human organism or a part thereof under conditions which permit the production of phenylalanine or a composition comprising phenylalanine in said non-human organism or in the culture medium surrounding said non-human organism.

[20113] Accordingly, the present invention relates to a process for the production of serine, which comprises
[20114] (a) increasing or generating the activity of a transcriptional regulator in the cytosol of a cell of a non-human organism or a part thereof, preferably a microorganism, a plant cell, a plant or a part thereof, as compared to a corresponding non-transformed wild type non-human organism or a part thereof; and
[20115] (b) growing the non-human organism or a part thereof under conditions which permit the production of serine or a composition comprising serine in said non-human organism or in the culture medium surrounding said non-human organism.

[20116] Accordingly, the present invention relates to a process for the production of tyrosine, which comprises
[20117] (a) increasing or generating the activity of a transcriptional regulator in the cytosol of a cell of a non-human organism or a part thereof, preferably a microorganism, a plant cell, a plant or a part thereof, as compared to a corresponding non-transformed wild type non-human organism or a part thereof; and
[20118] (b) growing the non-human organism or a part thereof under conditions which permit the production of tyrosine or a composition comprising tyrosine in said non-human organism or in the culture medium surrounding said non-human organism.

[20119] Accordingly, the present invention relates to a process for the production of 5-oxoproline, which comprises
[20120] (a) increasing or generating the activity of a transcriptional regulator in the cytosol of a cell of a non-human organism or a part thereof, preferably a microorganism, a plant cell, a plant or a part thereof, as compared to a corresponding non-transformed wild type non-human organism or a part thereof; and
[20121] (b) growing the non-human organism or a part thereof under conditions which permit the production of 5-oxoproline or a composition comprising 5-oxoproline in said non-human organism or in the culture medium surrounding said non-human organism.

[20122] Accordingly, the present invention relates to a process for the production of glycine, which comprises
[20123] (a) increasing or generating the activity of a protein phosphatase in the cytosol of a cell of a non-human organism or a part thereof, preferably a microorganism, a plant cell, a plant or a part thereof, as compared to a corresponding non-transformed wild type non-human organism or a part thereof; and
[20124] (b) growing the non-human organism or a part thereof under conditions which permit the production of glycine or a composition comprising glycine in said non-human organism or in the culture medium surrounding said non-human organism.

[20125] Accordingly, the present invention relates to a process for the production of phenylalanine, which comprises
[20126] (a) increasing or generating the activity of a protein kinase in the cytosol of a cell of a non-human organism or a part thereof, preferably a microorganism, a plant cell, a plant or a part thereof, as compared to a corresponding non-transformed wild type non-human organism or a part thereof; and
[20127] (b) growing the non-human organism or a part thereof under conditions which permit the production of phenylalanine or a composition comprising phenylalanine in said non-human organism or in the culture medium surrounding said non-human organism.

[20128] Accordingly, the present invention relates to a process for the production of serine, which comprises
[20129] (a) increasing or generating the activity of a protein kinase in the cytosol of a cell of a non-human organism or a part thereof, preferably a microorganism, a plant cell, a plant or a part thereof, as compared to a corresponding non-transformed wild type non-human organism or a part thereof; and
[20130] (b) growing the non-human organism or a part thereof under conditions which permit the production of serine or a composition comprising serine in said non-human organism or in the culture medium surrounding said non-human organism.

[20131] Accordingly, the present invention relates to a process for the production of tyrosine, which comprises
[20132] (a) increasing or generating the activity of a protein kinase in the cytosol of a cell of a non-human organism or a part thereof, preferably a microorganism, a plant cell, a plant or a part thereof, as compared to a corresponding non-transformed wild type non-human organism or a part thereof; and
[20133] (b) growing the non-human organism or a part thereof under conditions which permit the production of tyrosine or a composition comprising tyrosine in said non-human organism or in the culture medium surrounding said non-human organism.

[20134] Accordingly, the present invention relates to a process for the production of aspartate, which comprises
[20135] (a) increasing or generating the activity of a calcium-dependent protein kinase in the cytosol of a cell of a non-human organism or a part thereof, preferably a microorganism, a plant cell, a plant or a part thereof, as compared to a corresponding non-transformed wild type non-human organism or a part thereof; and
[20136] (b) growing the non-human organism or a part thereof under conditions which permit the production of aspartate or a composition comprising aspartate in said non-human organism or in the culture medium surrounding said non-human organism.

[20137] Accordingly, the present invention relates to a process for the production of phenylalanine, which comprises
[20138] (a) increasing or generating the activity of a calcium-dependent protein kinase in the cytosol of a cell of a non-human organism or a part thereof, preferably a microorganism, a plant cell, a plant or a part thereof, as compared to a corresponding non-transformed wild type non-human organism or a part thereof; and
[20139] (b) growing the non-human organism or a part thereof under conditions which permit the production of phenylalanine or a composition comprising phenylalanine in said non-human organism or in the culture medium surrounding said non-human organism.

[20140] Accordingly, the present invention relates to a process for the production of alanine, which comprises
[20141] (a) increasing or generating the activity of a protein phosphatase in the cytosol of a cell of a non-human organism or a part thereof, preferably a microorganism, a plant cell, a plant or a part thereof, as compared to a corresponding non-transformed wild type non-human organism or a part thereof; and
[20142] (b) growing the non-human organism or a part thereof under conditions which permit the production of alanine or a composition comprising alanine in said non-human organism or in the culture medium surrounding said non-human organism.

[20143] Accordingly, the present invention relates to a process for the production of glycine, which comprises
[20144] (a) increasing or generating the activity of a protein phosphatase in the cytosol of a cell of a non-human organism or a part thereof, preferably a microorganism, a plant cell, a plant or a part thereof, as compared to a corresponding non-transformed wild type non-human organism or a part thereof; and
[20145] (b) growing the non-human organism or a part thereof under conditions which permit the production of glycine or a composition comprising glycine in said non-human organism or in the culture medium surrounding said non-human organism.

[20146] Accordingly, the present invention relates to a process for the production of tyrosine, which comprises
[20147] (a) increasing or generating the activity of a protein phosphatase in the cytosol of a cell of a non-human organism or a part thereof, preferably a microorganism, a plant cell, a plant or a part thereof, as compared to a corresponding non-transformed wild type non-human organism or a part thereof; and
[20148] (b) growing the non-human organism or a part thereof under conditions which permit the production of tyrosine or a composition comprising tyrosine in said non-human organism or in the culture medium surrounding said non-human organism.

[20149] Accordingly, the present invention relates to a process for the production of 5-oxoproline, which comprises
[20150] (a) increasing or generating the activity of a protein phosphatase in the cytosol of a cell of a non-human organism or a part thereof, preferably a microorganism, a plant cell, a plant or a part thereof, as compared to a corresponding non-transformed wild type non-human organism or a part thereof; and
[20151] (b) growing the non-human organism or a part thereof under conditions which permit the production of 5-oxoproline or a composition comprising 5-oxoproline in said non-human organism or in the culture medium surrounding said non-human organism.

[20152] Accordingly, the present invention relates to a process for the production of alanine, which comprises
[20153] (a) increasing or generating the activity of a aminotransferase in the cytosol of a cell of a non-human organism or a part thereof, preferably a microorganism, a plant cell, a plant or a part thereof, as compared to a corresponding non-transformed wild type non-human organism or a part thereof; and
[20154] (b) growing the non-human organism or a part thereof under conditions which permit the production of alanine or a composition comprising alanine in said non-human organism or in the culture medium surrounding said non-human organism.

[20155] Accordingly, the present invention relates to a process for the production of phenylalanine, which comprises
[20156] (a) increasing or generating the activity of a transcription factor in the cytosol of a cell of a non-human organism or a part thereof, preferably a microorganism, a plant cell, a plant or a part thereof, as compared to a corresponding non-transformed wild type non-human organism or a part thereof; and
[20157] (b) growing the non-human organism or a part thereof under conditions which permit the production of phenylalanine or a composition comprising phenylalanine in said non-human organism or in the culture medium surrounding said non-human organism.

[20158] Accordingly, the present invention relates to a process for the production of tyrosine, which comprises
[20159] (a) increasing or generating the activity of a transcription factor in the cytosol of a cell of a non-human organism or a part thereof, preferably a microorganism, a plant cell, a plant or a part thereof, as compared to a corresponding non-transformed wild type non-human organism or a part thereof; and
[20160] (b) growing the non-human organism or a part thereof under conditions which permit the production of tyrosine or a composition comprising tyrosine in said non-human organism or in the culture medium surrounding said non-human organism.

[20161] Accordingly, the present invention relates to a process for the production of aspartate, which comprises
[20162] (a) increasing or generating the activity of a protein phosphatase in the cytosol of a cell of a non-human organism or a part thereof, preferably a microorganism, a plant cell, a plant or a part thereof, as compared to a corresponding non-transformed wild type non-human organism or a part thereof; and
[20163] (b) growing the non-human organism or a part thereof under conditions which permit the production of aspartate or a composition comprising aspartate in said non-human organism or in the culture medium surrounding said non-human organism.

[20164] Accordingly, the present invention relates to a process for the production of 5-oxoproline, which comprises
[20165] (a) increasing or generating the activity of a protein phosphatase in the cytosol of a cell of a non-human organism or a part thereof, preferably a microorganism, a plant cell, a plant or a part thereof, as compared to a corresponding non-transformed wild type non-human organism or a part thereof; and
[20166] (b) growing the non-human organism or a part thereof under conditions which permit the production of 5-oxoproline or a composition comprising 5-oxoproline in said non-human organism or in the culture medium surrounding said non-human organism.

[20167] Accordingly, the present invention relates to a process for the production of asparagine, which comprises
[20168] (a) increasing or generating the activity of a protein phosphatase in the cytosol of a cell of a non-human organism or a part thereof, preferably a microorganism, a plant cell, a plant or a part thereof, as compared to a corresponding non-transformed wild type non-human organism or a part thereof; and
[20169] (b) growing the non-human organism or a part thereof under conditions which permit the production of asparagine or a composition comprising asparagine in said non-human organism or in the culture medium surrounding said non-human organism.

[20170] Accordingly, the present invention relates to a process for the production of phenylalanine, which comprises
[20171] (a) increasing or generating the activity of a protein phosphatase in the cytosol of a cell of a non-human organism or a part thereof, preferably a microorganism, a plant cell, a plant or a part thereof, as compared to a corresponding non-transformed wild type non-human organism or a part thereof; and
[20172] (b) growing the non-human organism or a part thereof under conditions which permit the production of phenylalanine or a composition comprising phenylalanine in said non-human organism or in the culture medium surrounding said non-human organism.

[20173] Accordingly, the present invention relates to a process for the production of serine, which comprises
[20174] (a) increasing or generating the activity of a protein phosphatase in the cytosol of a cell of a non-human organism or a part thereof, preferably a microorganism, a plant cell, a plant or a part thereof, as compared to a corresponding non-transformed wild type non-human organism or a part thereof; and
[20175] (b) growing the non-human organism or a part thereof under conditions which permit the production of serine or a composition comprising serine in said non-human organism or in the culture medium surrounding said non-human organism.

[20176] Accordingly, the present invention relates to a process for the production of tyrosine, which comprises
[20177] (a) increasing or generating the activity of a protein phosphatase in the cytosol of a cell of a non-human organism or a part thereof, preferably a microorganism, a plant cell, a plant or a part thereof, as compared to a corresponding non-transformed wild type non-human organism or a part thereof; and
[20178] (b) growing the non-human organism or a part thereof under conditions which permit the production of tyrosine or a composition comprising tyrosine in said non-human organism or in the culture medium surrounding said non-human organism.

[20179] Accordingly, the present invention relates to a process for the production of phenylalanine, which comprises
[20180] (a) increasing or generating the activity of a CBL-interacting protein kinase in the cytosol of a cell of a non-human organism or a part thereof, preferably a microorganism, a plant cell, a plant or a part thereof, as compared to a corresponding non-transformed wild type non-human organism or a part thereof; and
[20181] (b) growing the non-human organism or a part thereof under conditions which permit the production of phenylalanine or a composition comprising phenylalanine in said non-human organism or in the culture medium surrounding said non-human organism.

[20182] Accordingly, the present invention relates to a process for the production of tyrosine, which comprises
[20183] (a) increasing or generating the activity of a CBL-interacting protein kinase in the cytosol of a cell of a non-human organism or a part thereof, preferably a microorganism, a plant cell, a plant or a part thereof, as compared to a corresponding non-transformed wild type non-human organism or a part thereof; and
[20184] (b) growing the non-human organism or a part thereof under conditions which permit the production of tyrosine or a composition comprising tyrosine in said non-human organism or in the culture medium surrounding said non-human organism.

[20185] Accordingly, the present invention relates to a process for the production of 5-oxoproline, which comprises
[20186] (a) increasing or generating the activity of a CBL-interacting protein kinase in the cytosol of a cell of a non-human organism or a part thereof, preferably a microorganism, a plant cell, a plant or a part thereof, as compared to a corresponding non-transformed wild type non-human organism or a part thereof; and
[20187] (b) growing the non-human organism or a part thereof under conditions which permit the production of 5-oxoproline or a composition comprising 5-oxoproline in said non-human organism or in the culture medium surrounding said non-human organism.

[20188] Accordingly, the present invention relates to a process for the production of serine, which comprises
[20189] (a) increasing or generating the activity of a glutaredoxin in the cytosol of a cell of a non-human organism or a part thereof, preferably a microorganism, a plant cell, a plant or a part thereof, as compared to a corresponding non-transformed wild type non-human organism or a part thereof; and
[20190] (b) growing the non-human organism or a part thereof under conditions which permit the production of serine or a composition comprising serine in said non-human organism or in the culture medium surrounding said non-human organism.

[20191] Accordingly, the present invention relates to a process for the production of tyrosine, which comprises
[20192] (a) increasing or generating the activity of a glutaredoxin in the cytosol of a cell of a non-human organism or a part thereof, preferably a microorganism, a plant cell, a plant or a part thereof, as compared to a corresponding non-transformed wild type non-human organism or a part thereof; and
[20193] (b) growing the non-human organism or a part thereof under conditions which permit the production of tyrosine or a composition comprising tyrosine in said non-human organism or in the culture medium surrounding said non-human organism.

[20194] Accordingly, the present invention relates to a process for the production of glycine, which comprises
[20195] (a) increasing or generating the activity of a CBL-interacting protein kinase in the cytosol of a cell of a non-human organism or a part thereof, preferably a microorganism, a plant cell, a plant or a part thereof, as compared to a corresponding non-transformed wild type non-human organism or a part thereof; and
[20196] (b) growing the non-human organism or a part thereof under conditions which permit the production of glycine or a composition comprising glycine in said non-human organism or in the culture medium surrounding said non-human organism.

[20197] Accordingly, the present invention relates to a process for the production of alanine, which comprises
[20198] (a) increasing or generating the activity of a delta-1-pyrroline 5-carboxylase synthetase in the cytosol of a cell of a non-human organism or a part thereof, preferably a microorganism, a plant cell, a plant or a part thereof, as compared to a corresponding non-transformed wild type non-human organism or a part thereof; and
[20199] (b) growing the non-human organism or a part thereof under conditions which permit the production of alanine or a composition comprising alanine in said non-human organism or in the culture medium surrounding said non-human organism.

[20200] Accordingly, the present invention relates to a process for the production of glycine, which comprises
[20201] (a) increasing or generating the activity of a delta-1-pyrroline 5-carboxylase synthetase in the cytosol of a cell of a non-human organism or a part thereof, preferably a microorganism, a plant cell, a plant or a part thereof, as compared to a corresponding non-transformed wild type non-human organism or a part thereof; and
[20202] (b) growing the non-human organism or a part thereof under conditions which permit the production of glycine or a composition comprising glycine in said non-human organism or in the culture medium surrounding said non-human organism.

[20203] Accordingly, the present invention relates to a process for the production of phenylalanine, which comprises
[20204] (a) increasing or generating the activity of a glutaredoxin in the cytosol of a cell of a non-human organism or a part thereof, preferably a microorganism, a plant cell, a plant or a part thereof, as compared to a corresponding non-transformed wild type non-human organism or a part thereof; and
[20205] (b) growing the non-human organism or a part thereof under conditions which permit the production of phenylalanine or a composition comprising phenylalanine in said non-human organism or in the culture medium surrounding said non-human organism.

[20206] Accordingly, the present invention relates to a process for the production of tyrosine, which comprises
[20207] (a) increasing or generating the activity of a glutaredoxin in the cytosol of a cell of a non-human organism or a part thereof, preferably a microorganism, a plant cell, a plant or a part thereof, as compared to a corresponding non-transformed wild type non-human organism or a part thereof; and
[20208] (b) growing the non-human organism or a part thereof under conditions which permit the production of tyrosine or a composition comprising tyrosine in said non-human organism or in the culture medium surrounding said non-human organism.

[20209] Accordingly, the present invention relates to a process for the production of tyrosine, which comprises
[20210] (a) increasing or generating the activity of a heat shock transcription factor in the cytosol of a cell of a non-human organism or a part thereof, preferably a microorganism, a plant cell, a plant or a part thereof, as compared to a corresponding non-transformed wild type non-human organism or a part thereof; and
[20211] (b) growing the non-human organism or a part thereof under conditions which permit the production of tyrosine or a composition comprising tyrosine in said non-human organism or in the culture medium surrounding said non-human organism.

[20212] Accordingly, the present invention relates to a process for the production of alanine, which comprises
[20213] (a) increasing or generating the activity of a pyruvate kinase in the cytosol of a cell of a non-human organism or a part thereof, preferably a microorganism, a plant cell, a plant or a part thereof, as compared to a corresponding non-transformed wild type non-human organism or a part thereof; and
[20214] (b) growing the non-human organism or a part thereof under conditions which permit the production of alanine or a composition comprising alanine in said non-human organism or in the culture medium surrounding said non-human organism.

[20215] Accordingly, the present invention relates to a process for the production of phenylalanine, which comprises
[20216] (a) increasing or generating the activity of a pyruvate kinase in the cytosol of a cell of a non-human organism or a part thereof, preferably a microorganism, a plant cell, a plant or a part thereof, as compared to a corresponding non-transformed wild type non-human organism or a part thereof; and
[20217] (b) growing the non-human organism or a part thereof under conditions which permit the production of phenylalanine or a composition comprising phenylalanine in said non-human organism or in the culture medium surrounding said non-human organism.

[20218] Accordingly, the present invention relates to a process for the production of tyrosine, which comprises
[20219] (a) increasing or generating the activity of a pyruvate kinase in the cytosol of a cell of a non-human organism or a part thereof, preferably a microorganism, a plant cell, a plant or a part thereof, as compared to a corresponding non-transformed wild type non-human organism or a part thereof; and
[20220] (b) growing the non-human organism or a part thereof under conditions which permit the production of tyrosine or a composition comprising tyrosine in said non-human organism or in the culture medium surrounding said non-human organism.

[20221] Accordingly, the present invention relates to a process for the production of phenylalanine, which comprises
[20222] (a) increasing or generating the activity of a ankyrin repeat family protein in the cytosol of a cell of a non-human organism or a part thereof, preferably a microorganism, a plant cell, a plant or a part thereof, as compared to a corresponding non-transformed wild type non-human organism or a part thereof; and
[20223] (b) growing the non-human organism or a part thereof under conditions which permit the production of phenylalanine or a composition comprising phenylalanine in said non-human organism or in the culture medium surrounding said non-human organism.

[20224] Accordingly, the present invention relates to a process for the production of tyrosine, which comprises
[20225] (a) increasing or generating the activity of a protein phosphatase in the cytosol of a cell of a non-human organism or a part thereof, preferably a microorganism, a plant cell, a plant or a part thereof, as compared to a corresponding non-transformed wild type non-human organism or a part thereof; and
[20226] (b) growing the non-human organism or a part thereof under conditions which permit the production of tyrosine or a composition comprising tyrosine in said non-human organism or in the culture medium surrounding said non-human organism.

[20227] Accordingly, the present invention relates to a process for the production of aspartate, which comprises
[20228] (a) increasing or generating the activity of a thioredoxin family protein in the cytosol of a cell of a non-human organism or a part thereof, preferably a microorganism, a plant cell, a plant or a part thereof, as compared to a corresponding non-transformed wild type non-human organism or a part thereof; and
[20229] (b) growing the non-human organism or a part thereof under conditions which permit the production of aspartate or a composition comprising aspartate in said non-human organism or in the culture medium surrounding said non-human organism.

[20230] Accordingly, the present invention relates to a process for the production of phenylalanine, which comprises
[20231] (a) increasing or generating the activity of a thioredoxin family protein in the cytosol of a cell of a non-human organism or a part thereof, preferably a microorganism, a plant cell, a plant or a part thereof, as compared to a corresponding non-transformed wild type non-human organism or a part thereof; and
[20232] (b) growing the non-human organism or a part thereof under conditions which permit the production of phenylalanine or a composition comprising phenylalanine in said non-human organism or in the culture medium surrounding said non-human organism.

[20233] Accordingly, the present invention relates to a process for the production of tyrosine, which comprises
[20234] (a) increasing or generating the activity of a thioredoxin family protein in the cytosol of a cell of a non-human organism or a part thereof, preferably a microorganism, a plant cell, a plant or a part thereof, as compared to a corresponding non-transformed wild type non-human organism or a part thereof; and
[20235] (b) growing the non-human organism or a part thereof under conditions which permit the production of tyrosine or a composition comprising tyrosine in said non-human organism or in the culture medium surrounding said non-human organism.

[20236] Accordingly, the present invention relates to a process for the production of phenylalanine, which comprises
[20237] (a) increasing or generating the activity of a harpin-induced family protein in the cytosol of a cell of a non-human organism or a part thereof, preferably a microorganism, a plant cell, a plant or a part thereof, as compared to a corresponding non-transformed wild type non-human organism or a part thereof; and
[20238] (b) growing the non-human organism or a part thereof under conditions which permit the production of phenylalanine or a composition comprising phenylalanine in said non-human organism or in the culture medium surrounding said non-human organism.

[20239] Accordingly, the present invention relates to a process for the production of serine, which comprises
[20240] (a) increasing or generating the activity of a harpin-induced family protein in the cytosol of a cell of a non-human organism or a part thereof, preferably a microorganism, a plant cell, a plant or a part thereof, as compared to a corresponding non-transformed wild type non-human organism or a part thereof; and
[20241] (b) growing the non-human organism or a part thereof under conditions which permit the production of serine or a composition comprising serine in said non-human organism or in the culture medium surrounding said non-human organism.

[20242] Accordingly, the present invention relates to a process for the production of tyrosine, which comprises
[20243] (a) increasing or generating the activity of a harpin-induced family protein in the cytosol of a cell of a non-human organism or a part thereof, preferably a microorganism, a plant cell, a plant or a part thereof, as compared to a corresponding non-transformed wild type non-human organism or a part thereof; and
[20244] (b) growing the non-human organism or a part thereof under conditions which permit the production of tyrosine or a composition comprising tyrosine in said non-human organism or in the culture medium surrounding said non-human organism.

[20245] Accordingly, the present invention relates to a process for the production of phenylalanine, which comprises
[20246] (a) increasing or generating the activity of a DNA mismatch repair protein in the cytosol of a cell of a non-human organism or a part thereof, preferably a microorganism, a plant cell, a plant or a part thereof, as compared to a corresponding non-transformed wild type non-human organism or a part thereof; and
[20247] (b) growing the non-human organism or a part thereof under conditions which permit the production of phenylalanine or a composition comprising phenylalanine in said non-human organism or in the culture medium surrounding said non-human organism.

[20248] Accordingly, the present invention relates to a process for the production of phenylalanine, which comprises
[20249] (a) increasing or generating the activity of a protein kinase in the cytosol of a cell of a non-human organism or a part thereof, preferably a microorganism, a plant cell, a plant or a part thereof, as compared to a corresponding non-transformed wild type non-human organism or a part thereof; and
[20250] (b) growing the non-human organism or a part thereof under conditions which permit the production of phenylalanine or a composition comprising phenylalanine in said non-human organism or in the culture medium surrounding said non-human organism.

[20251] Accordingly, the present invention relates to a process for the production of serine, which comprises
[20252] (a) increasing or generating the activity of a protein kinase in the cytosol of a cell of a non-human organism or a part thereof, preferably a microorganism, a plant cell, a plant or a part thereof, as compared to a corresponding non-transformed wild type non-human organism or a part thereof; and
[20253] (b) growing the non-human organism or a part thereof under conditions which permit the production of serine or a composition comprising serine in said non-human organism or in the culture medium surrounding said non-human organism.

[20254] Accordingly, the present invention relates to a process for the production of tyrosine, which comprises
[20255] (a) increasing or generating the activity of a protein kinase in the cytosol of a cell of a non-human organism or a part thereof, preferably a microorganism, a plant cell, a plant or a part thereof, as compared to a corresponding non-transformed wild type non-human organism or a part thereof; and
[20256] (b) growing the non-human organism or a part thereof under conditions which permit the production of tyrosine or a composition comprising tyrosine in said non-human organism or in the culture medium surrounding said non-human organism.

[20257] Accordingly, the present invention relates to a process for the production of 5-oxoproline, which comprises
[20258] (a) increasing or generating the activity of a protein kinase in the cytosol of a cell of a non-human organism or a part thereof, preferably a microorganism, a plant cell, a plant or a part thereof, as compared to a corresponding non-transformed wild type non-human organism or a part thereof; and
[20259] (b) growing the non-human organism or a part thereof under conditions which permit the production of 5-oxoproline or a composition comprising 5-oxoproline in said non-human organism or in the culture medium surrounding said non-human organism.

[20260] Accordingly, the present invention relates to a process for the production of serine, which comprises
[20261] (a) increasing or generating the activity of a eukaryotic translation initiation factor in the cytosol of a cell of a non-human organism or a part thereof, preferably a microorganism, a plant cell, a plant or a part thereof, as compared to a corresponding non-transformed wild type non-human organism or a part thereof; and
[20262] (b) growing the non-human organism or a part thereof under conditions which permit the production of serine or a composition comprising serine in said non-human organism or in the culture medium surrounding said non-human organism.

[20263] Accordingly, the present invention relates to a process for the production of tyrosine, which comprises
[20264] (a) increasing or generating the activity of a glucose-6-phosphate 1-dehydrogenase in the cytosol of a cell of a non-human organism or a part thereof, preferably a microorganism, a plant cell, a plant or a part thereof, as compared to a corresponding non-transformed wild type non-human organism or a part thereof; and
[20265] (b) growing the non-human organism or a part thereof under conditions which permit the production of tyrosine or a composition comprising tyrosine in said non-human organism or in the culture medium surrounding said non-human organism.

[20266] Accordingly, the present invention relates to a process for the production of phenylalanine, which comprises
[20267] (a) increasing or generating the activity of a glycosyl transferase in the cytosol of a cell of a non-human organism or a part thereof, preferably a microorganism, a plant cell, a plant or a part thereof, as compared to a corresponding non-transformed wild type non-human organism or a part thereof; and
[20268] (b) growing the non-human organism or a part thereof under conditions which permit the production of phenylalanine or a composition comprising phenylalanine in said non-human organism or in the culture medium surrounding said non-human organism.

[20269] Accordingly, the present invention relates to a process for the production of tyrosine, which comprises
[20270] (a) increasing or generating the activity of a glycosyl transferase in the cytosol of a cell of a non-human organism or a part thereof, preferably a microorganism, a plant cell, a plant or a part thereof, as compared to a corresponding non-transformed wild type non-human organism or a part thereof; and
[20271] (b) growing the non-human organism or a part thereof under conditions which permit the production of tyrosine or a composition comprising tyrosine in said non-human organism or in the culture medium surrounding said non-human organism.

[20272] Accordingly, the present invention relates to a process for the production of phenylalanine, which comprises
[20273] (a) increasing or generating the activity of a auxin response factor in the cytosol of a cell of a non-human organism or a part thereof, preferably a microorganism, a plant cell, a plant or a part thereof, as compared to a corresponding non-transformed wild type non-human organism or a part thereof; and
[20274] (b) growing the non-human organism or a part thereof under conditions which permit the production of phenylalanine or a composition comprising phenylalanine in said non-human organism or in the culture medium surrounding said non-human organism.

[20275] Accordingly, the present invention relates to a process for the production of tyrosine, which comprises
[20276] (a) increasing or generating the activity of a auxin response factor in the cytosol of a cell of a non-human organism or a part thereof, preferably a microorganism, a plant cell, a plant or a part thereof, as compared to a corresponding non-transformed wild type non-human organism or a part thereof; and
[20277] (b) growing the non-human organism or a part thereof under conditions which permit the production of tyrosine or a composition comprising tyrosine in said non-human organism or in the culture medium surrounding said non-human organism.

[20278] Accordingly, the present invention relates to a process for the production of aspartate, which comprises
[20279] (a) increasing or generating the activity of a monthiol glutaredoxin in the cytosol of a cell of a non-human organism or a part thereof, preferably a microorganism, a plant cell, a plant or a part thereof, as compared to a corresponding non-transformed wild type non-human organism or a part thereof; and
[20280] (b) growing the non-human organism or a part thereof under conditions which permit the production of aspartate or a composition comprising aspartate in said non-human organism or in the culture medium surrounding said non-human organism.

[20281] Accordingly, the present invention relates to a process for the production of phenylalanine, which comprises
[20282] (a) increasing or generating the activity of a monthiol glutaredoxin in the cytosol of a cell of a non-human organism or a part thereof, preferably a microorganism, a plant cell, a plant or a part thereof, as compared to a corresponding non-transformed wild type non-human organism or a part thereof; and
[20283] (b) growing the non-human organism or a part thereof under conditions which permit the production of phenylalanine or a composition comprising phenylalanine in said non-human organism or in the culture medium surrounding said non-human organism.

[20284] Accordingly, the present invention relates to a process for the production of phenylalanine, which comprises
[20285] (a) increasing or generating the activity of a glutaredoxin in the cytosol of a cell of a non-human organism or a part thereof, preferably a microorganism, a plant cell, a plant or a part thereof, as compared to a corresponding non-transformed wild type non-human organism or a part thereof; and
[20286] (b) growing the non-human organism or a part thereof under conditions which permit the production of phenylalanine or a composition comprising phenylalanine in said non-human organism or in the culture medium surrounding said non-human organism.

[20287] Accordingly, the present invention relates to a process for the production of tyrosine, which comprises
[20288] (a) increasing or generating the activity of a glutaredoxin in the cytosol of a cell of a non-human organism or a part thereof, preferably a microorganism, a plant cell, a plant or a part thereof, as compared to a corresponding non-transformed wild type non-human organism or a part thereof; and
[20289] (b) growing the non-human organism or a part thereof under conditions which permit the production of tyrosine or a composition comprising tyrosine in said non-human organism or in the culture medium surrounding said non-human organism.

[20290] Accordingly, the present invention relates to a process for the production of 5-oxoproline, which comprises
[20291] (a) increasing or generating the activity of a glutaredoxin in the cytosol of a cell of a non-human organism or a part thereof, preferably a microorganism, a plant cell, a plant or a part thereof, as compared to a corresponding non-transformed wild type non-human organism or a part thereof; and
[20292] (b) growing the non-human organism or a part thereof under conditions which permit the production of 5-oxoproline or a composition comprising 5-oxoproline in said non-human organism or in the culture medium surrounding said non-human organism.

[20293] Accordingly, the present invention relates to a process for the production of phenylalanine, which comprises
[20294] (a) increasing or generating the activity of a monothiol glutaredoxin in the cytosol of a cell of a non-human organism or a part thereof, preferably a microorganism, a plant cell, a plant or a part thereof, as compared to a corresponding non-transformed wild type non-human organism or a part thereof; and
[20295] (b) growing the non-human organism or a part thereof under conditions which permit the production of phenylalanine or a composition comprising phenylalanine in said non-human organism or in the culture medium surrounding said non-human organism.

[20296] Accordingly, the present invention relates to a process for the production of tyrosine, which comprises
[20297] (a) increasing or generating the activity of a monothiol glutaredoxin in the cytosol of a cell of a non-human organism or a part thereof, preferably a microorganism, a plant cell, a plant or a part thereof, as compared to a corresponding non-transformed wild type non-human organism or a part thereof; and
[20298] (b) growing the non-human organism or a part thereof under conditions which permit the production of tyrosine or a composition comprising tyrosine in said non-human organism or in the culture medium surrounding said non-human organism.

[20299] Accordingly, the present invention relates to a process for the production of tyrosine, which comprises
[20300] (a) increasing or generating the activity of a monothiol glutaredoxin in the cytosol of a cell of a non-human organism or a part thereof, preferably a microorganism, a plant cell, a plant or a part thereof, as compared to a corresponding non-transformed wild type non-human organism or a part thereof; and
[20301] (b) growing the non-human organism or a part thereof under conditions which permit the production of tyrosine or a composition comprising tyrosine in said non-human organism or in the culture medium surrounding said non-human organism.

[20302] Accordingly, the present invention relates to a process for the production of aspartate, which comprises
[20303] (a) increasing or generating the activity of a monothiol glutaredoxin in the cytosol of a cell of a non-human organism or a part thereof, preferably a microorganism, a plant cell, a plant or a part thereof, as compared to a corresponding non-transformed wild type non-human organism or a part thereof; and
[20304] (b) growing the non-human organism or a part thereof under conditions which permit the production of aspartate or a composition comprising aspartate in said non-human organism or in the culture medium surrounding said non-human organism.

[20305] Accordingly, the present invention relates to a process for the production of phenylalanine, which comprises
[20306] (a) increasing or generating the activity of a monothiol glutaredoxin in the cytosol of a cell of a non-human organism or a part thereof, preferably a microorganism, a plant cell, a plant or a part thereof, as compared to a corresponding non-transformed wild type non-human organism or a part thereof; and
[20307] (b) growing the non-human organism or a part thereof under conditions which permit the production of phenylalanine or a composition comprising phenylalanine in said non-human organism or in the culture medium surrounding said non-human organism.

[20308] Accordingly, the present invention relates to a process for the production of tyrosine, which comprises
[20309] (a) increasing or generating the activity of a monothiol glutaredoxin in the cytosol of a cell of a non-human organism or a part thereof, preferably a microorganism, a plant cell, a plant or a part thereof, as compared to a corresponding non-transformed wild type non-human organism or a part thereof; and
[20310] (b) growing the non-human organism or a part thereof under conditions which permit the production of tyrosine or a composition comprising tyrosine in said non-human organism or in the culture medium surrounding said non-human organism.

[20311] Accordingly, the present invention relates to a process for the production of 5-oxoproline, which comprises
[20312] (a) increasing or generating the activity of a monothiol glutaredoxin in the cytosol of a cell of a non-human organism or a part thereof, preferably a microorganism, a plant cell, a plant or a part thereof, as compared to a corresponding non-transformed wild type non-human organism or a part thereof; and
[20313] (b) growing the non-human organism or a part thereof under conditions which permit the production of 5-oxoproline or a composition comprising 5-oxoproline in said non-human organism or in the culture medium surrounding said non-human organism.

[20314] Accordingly, the present invention relates to a process for the production of tyrosine, which comprises
[20315] (a) increasing or generating the activity of a monothiol glutaredoxin in the cytosol of a cell of a non-human organism or a part thereof, preferably a microorganism, a plant cell, a plant or a part thereof, as compared to a corresponding non-transformed wild type non-human organism or a part thereof; and
[20316] (b) growing the non-human organism or a part thereof under conditions which permit the production of tyrosine or a composition comprising tyrosine in said non-human organism or in the culture medium surrounding said non-human organism.

[20317] Accordingly, the present invention relates to a process for the production of serine, which comprises
[20318] (a) increasing or generating the activity of a heat shock transcription factor in the cytosol of a cell of a non-human organism or a part thereof, preferably a microorganism, a plant cell, a plant or a part thereof, as compared to a corresponding non-transformed wild type non-human organism or a part thereof; and
[20319] (b) growing the non-human organism or a part thereof under conditions which permit the production of serine or a composition comprising serine in said non-human organism or in the culture medium surrounding said non-human organism.

[20320] Accordingly, the present invention relates to a process for the production of alanine, which comprises
[20321] (a) increasing or generating the activity of a protein phosphatase in the cytosol of a cell of a non-human organism or a part thereof, preferably a microorganism, a plant cell, a plant or a part thereof, as compared to a corresponding non-transformed wild type non-human organism or a part thereof; and
[20322] (b) growing the non-human organism or a part thereof under conditions which permit the production of alanine or a composition comprising alanine in said non-human organism or in the culture medium surrounding said non-human organism.

[20323] Accordingly, the present invention relates to a process for the production of aspartate, which comprises
[20324] (a) increasing or generating the activity of a protein phosphatase in the cytosol of a cell of a non-human organism or a part thereof, preferably a microorganism, a plant cell, a plant or a part thereof, as compared to a corresponding non-transformed wild type non-human organism or a part thereof; and
[20325] (b) growing the non-human organism or a part thereof under conditions which permit the production of aspartate or a composition comprising aspartate in said non-human organism or in the culture medium surrounding said non-human organism.

[20326] Accordingly, the present invention relates to a process for the production of citrulline, which comprises
[20327] (a) increasing or generating the activity of a protein phosphatase in the cytosol of a cell of a non-human organism or a part thereof, preferably a microorganism, a plant cell, a plant or a part thereof, as compared to a corresponding non-transformed wild type non-human organism or a part thereof; and
[20328] (b) growing the non-human organism or a part thereof under conditions which permit the production of citrulline or a composition comprising citrulline in said non-human organism or in the culture medium surrounding said non-human organism.

[20329] Accordingly, the present invention relates to a process for the production of alanine, which comprises
[20330] (a) increasing or generating the activity of a At4g32480-protein in the cytosol of a cell of a non-human organism or a part thereof, preferably a microorganism, a plant cell, a plant or a part thereof, as compared to a corresponding non-transformed wild type non-human organism or a part thereof; and
[20331] (b) growing the non-human organism or a part thereof under conditions which permit the production of alanine or a composition comprising alanine in said non-human organism or in the culture medium surrounding said non-human organism.

[20332] Accordingly, the present invention relates to a process for the production of asparagine, which comprises
[20333] (a) increasing or generating the activity of a At4g32480-protein in the cytosol of a cell of a non-human organism or a part thereof, preferably a microorganism, a plant cell, a plant or a part thereof, as compared to a corresponding non-transformed wild type non-human organism or a part thereof; and
[20334] (b) growing the non-human organism or a part thereof under conditions which permit the production of asparagine or a composition comprising asparagine in said non-human organism or in the culture medium surrounding said non-human organism.

[20335] Accordingly, the present invention relates to a process for the production of glycine, which comprises
[20336] (a) increasing or generating the activity of a At4g32480-protein in the cytosol of a cell of a non-human organism or a part thereof, preferably a microorganism, a plant cell, a plant or a part thereof, as compared to a corresponding non-transformed wild type non-human organism or a part thereof; and
[20337] (b) growing the non-human organism or a part thereof under conditions which permit the production of glycine or a composition comprising glycine in said non-human organism or in the culture medium surrounding said non-human organism.

[20338] Accordingly, the present invention relates to a process for the production of phenylalanine, which comprises
[20339] (a) increasing or generating the activity of a At4g32480-protein in the cytosol of a cell of a non-human organism or a part thereof, preferably a microorganism, a plant cell, a plant or a part thereof, as compared to a corresponding non-transformed wild type non-human organism or a part thereof; and
[20340] (b) growing the non-human organism or a part thereof under conditions which permit the production of phenylalanine or a composition comprising phenylalanine in said non-human organism or in the culture medium surrounding said non-human organism.

[20341] Accordingly, the present invention relates to a process for the production of serine, which comprises
[20342] (a) increasing or generating the activity of a At4g32480-protein in the cytosol of a cell of a non-human organism or a part thereof, preferably a microorganism, a plant cell, a plant or a part thereof, as compared to a corresponding non-transformed wild type non-human organism or a part thereof; and
[20343] (b) growing the non-human organism or a part thereof under conditions which permit the production of serine or a composition comprising serine in said non-human organism or in the culture medium surrounding said non-human organism.

[20344] Accordingly, the present invention relates to a process for the production of tyrosine, which comprises
[20345] (a) increasing or generating the activity of a At4g32480-protein in the cytosol of a cell of a non-human organism or a part thereof, preferably a microorganism, a plant cell, a plant or a part thereof, as compared to a corresponding non-transformed wild type non-human organism or a part thereof; and
[20346] (b) growing the non-human organism or a part thereof under conditions which permit the production of tyrosine or a composition comprising tyrosine in said non-human organism or in the culture medium surrounding said non-human organism.

[20347] Accordingly, the present invention relates to a process for the production of aspartate, which comprises
[20348] (a) increasing or generating the activity of a glutaredoxin in the cytosol of a cell of a non-human organism or a part thereof, preferably a microorganism, a plant cell, a plant or a part thereof, as compared to a corresponding non-transformed wild type non-human organism or a part thereof; and
[20349] (b) growing the non-human organism or a part thereof under conditions which permit the production of aspartate or a composition comprising aspartate in said non-human organism or in the culture medium surrounding said non-human organism.

[20350] Accordingly, the present invention relates to a process for the production of citrulline, which comprises
[20351] (a) increasing or generating the activity of a glutaredoxin in the cytosol of a cell of a non-human organism or a part thereof, preferably a microorganism, a plant cell, a plant or a part thereof, as compared to a corresponding non-transformed wild type non-human organism or a part thereof; and
[20352] (b) growing the non-human organism or a part thereof under conditions which permit the production of citrulline or a composition comprising citrulline in said non-human organism or in the culture medium surrounding said non-human organism.

[20353] Accordingly, the present invention relates to a process for the production of phenylalanine, which comprises
[20354] (a) increasing or generating the activity of a cyclin D in the cytosol of a cell of a non-human organism or a part thereof, preferably a microorganism, a plant cell, a plant or a part thereof, as compared to a corresponding non-transformed wild type non-human organism or a part thereof; and
[20355] (b) growing the non-human organism or a part thereof under conditions which permit the production of phenylalanine or a composition comprising phenylalanine in said non-human organism or in the culture medium surrounding said non-human organism.

[20356] Accordingly, the present invention relates to a process for the production of asparagine, which comprises
[20357] (a) increasing or generating the activity of a calcium-dependent protein kinase in the cytosol of a cell of a non-human organism or a part thereof, preferably a microorganism, a plant cell, a plant or a part thereof, as compared to a corresponding non-transformed wild type non-human organism or a part thereof; and
[20358] (b) growing the non-human organism or a part thereof under conditions which permit the production of asparagine or a composition comprising asparagine in said non-human organism or in the culture medium surrounding said non-human organism.

[20359] Accordingly, the present invention relates to a process for the production of phenylalanine, which comprises
[20360] (a) increasing or generating the activity of a calcium-dependent protein kinase in the cytosol of a cell of a non-human organism or a part thereof, preferably a microorganism, a plant cell, a plant or a part thereof, as compared to a corresponding non-transformed wild type non-human organism or a part thereof; and
[20361] (b) growing the non-human organism or a part thereof under conditions which permit the production of phenylalanine or a composition comprising phenylalanine in said non-human organism or in the culture medium surrounding said non-human organism.

[20362] Accordingly, the present invention relates to a process for the production of serine, which comprises
[20363] (a) increasing or generating the activity of a calcium-dependent protein kinase in the cytosol of a cell of a non-human organism or a part thereof, preferably a microorganism, a plant cell, a plant or a part thereof, as compared to a corresponding non-transformed wild type non-human organism or a part thereof; and
[20364] (b) growing the non-human organism or a part thereof under conditions which permit the production of serine or a composition comprising serine in said non-human organism or in the culture medium surrounding said non-human organism.

[20365] Accordingly, the present invention relates to a process for the production of tyrosine, which comprises
[20366] (a) increasing or generating the activity of a calcium-dependent protein kinase in the cytosol of a cell of a non-human organism or a part thereof, preferably a microorganism, a plant cell, a plant or a part thereof, as compared to a corresponding non-transformed wild type non-human organism or a part thereof; and
[20367] (b) growing the non-human organism or a part thereof under conditions which permit the production of tyrosine or a composition comprising tyrosine in said non-human organism or in the culture medium surrounding said non-human organism.

[20368] Accordingly, the present invention relates to a process for the production of 5-oxoproline, which comprises
[20369] (a) increasing or generating the activity of a calcium-dependent protein kinase in the cytosol of a cell of a non-human organism or a part thereof, preferably a microorganism, a plant cell, a plant or a part thereof, as compared to a corresponding non-transformed wild type non-human organism or a part thereof; and
[20370] (b) growing the non-human organism or a part thereof under conditions which permit the production of 5-oxoproline or a composition comprising 5-oxoproline in said non-human organism or in the culture medium surrounding said non-human organism.

[20371] Accordingly, the present invention relates to a process for the production of tyrosine, which comprises
[20372] (a) increasing or generating the activity of a protein phosphatase in the cytosol of a cell of a non-human organism or a part thereof, preferably a microorganism, a plant cell, a plant or a part thereof, as compared to a corresponding non-transformed wild type non-human organism or a part thereof; and
[20373] (b) growing the non-human organism or a part thereof under conditions which permit the production of tyrosine or a composition comprising tyrosine in said non-human organism or in the culture medium surrounding said non-human organism.

[20374] Accordingly, the present invention relates to a process for the production of aspartate, which comprises
[20375] (a) increasing or generating the activity of a heat shock transcription factor in the cytosol of a cell of a non-human organism or a part thereof, preferably a microorganism, a plant cell, a plant or a part thereof, as compared to a corresponding non-transformed wild type non-human organism or a part thereof; and
[20376] (b) growing the non-human organism or a part thereof under conditions which permit the production of aspartate or a composition comprising aspartate in said non-human organism or in the culture medium surrounding said non-human organism.

[20377] Accordingly, the present invention relates to a process for the production of 3,4-dihydroxyphenylalanine (dopa), which comprises
[20378] (a) increasing or generating the activity of a heat shock transcription factor in the cytosol of a cell of a non-human organism or a part thereof, preferably a microorganism, a plant cell, a plant or a part thereof, as compared to a corresponding non-transformed wild type non-human organism or a part thereof; and
[20379] (b) growing the non-human organism or a part thereof under conditions which permit the production of 3,4-dihydroxyphenylalanine (dopa) or a composition comprising 3,4-dihydroxyphenylalanine (dopa) in said non-human organism or in the culture medium surrounding said non-human organism.

[20380] Accordingly, the present invention relates to a process for the production of phenylalanine, which comprises
[20381] (a) increasing or generating the activity of a gibberellin 20-oxidase in the cytosol of a cell of a non-human organism or a part thereof, preferably a microorganism, a plant cell, a plant or a part thereof, as compared to a corresponding non-transformed wild type non-human organism or a part thereof; and
[20382] (b) growing the non-human organism or a part thereof under conditions which permit the production of phenylalanine or a composition comprising phenylalanine in said non-human organism or in the culture medium surrounding said non-human organism.

[20383] Accordingly, the present invention relates to a process for the production of serine, which comprises
[20384] (a) increasing or generating the activity of a gibberellin 20-oxidase in the cytosol of a cell of a non-human organism or a part thereof, preferably a microorganism, a plant cell, a plant or a part thereof, as compared to a corresponding non-transformed wild type non-human organism or a part thereof; and
[20385] (b) growing the non-human organism or a part thereof under conditions which permit the production of serine or a composition comprising serine in said non-human organism or in the culture medium surrounding said non-human organism.

[20386] Accordingly, the present invention relates to a process for the production of serine, which comprises
[20387] (a) increasing or generating the activity of a integral membrane transporter family protein in the cytosol of a cell of a non-human organism or a part thereof, preferably a microorganism, a plant cell, a plant or a part thereof, as compared to a corresponding non-transformed wild type non-human organism or a part thereof; and
[20388] (b) growing the non-human organism or a part thereof under conditions which permit the production of serine or a composition comprising serine in said non-human organism or in the culture medium surrounding said non-human organism.

[20389] Accordingly, the present invention relates to a process for the production of phenylalanine, which comprises
[20390] (a) increasing or generating the activity of a glutaredoxin in the cytosol of a cell of a non-human organism or a part thereof, preferably a microorganism, a plant cell, a plant or a part thereof, as compared to a corresponding non-transformed wild type non-human organism or a part thereof; and
[20391] (b) growing the non-human organism or a part thereof under conditions which permit the production of phenylalanine or a composition comprising phenylalanine in said non-human organism or in the culture medium surrounding said non-human organism.

[20392] Accordingly, the present invention relates to a process for the production of asparagine, which comprises
[20393] (a) increasing or generating the activity of a At5g16650-protein in the cytosol of a cell of a non-human organism or a part thereof, preferably a microorganism, a plant cell, a plant or a part thereof, as compared to a corresponding non-transformed wild type non-human organism or a part thereof; and
[20394] (b) growing the non-human organism or a part thereof under conditions which permit the production of asparagine or a composition comprising asparagine in said non-human organism or in the culture medium surrounding said non-human organism.

[20395] Accordingly, the present invention relates to a process for the production of aspartate, which comprises
[20396] (a) increasing or generating the activity of a At5g16650-protein in the cytosol of a cell of a non-human organism or a part thereof, preferably a microorganism, a plant cell, a plant or a part thereof, as compared to a corresponding non-transformed wild type non-human organism or a part thereof; and
[20397] (b) growing the non-human organism or a part thereof under conditions which permit the production of aspartate or a composition comprising aspartate in said non-human organism or in the culture medium surrounding said non-human organism.

[20398] Accordingly, the present invention relates to a process for the production of serine, which comprises
[20399] (a) increasing or generating the activity of a At5g16650-protein in the cytosol of a cell of a non-human organism or a part thereof, preferably a microorganism, a plant cell, a plant or a part thereof, as compared to a corresponding non-transformed wild type non-human organism or a part thereof; and
[20400] (b) growing the non-human organism or a part thereof under conditions which permit the production of serine or a composition comprising serine in said non-human organism or in the culture medium surrounding said non-human organism.

[20401] Accordingly, the present invention relates to a process for the production of 5-oxoproline, which comprises
[20402] (a) increasing or generating the activity of a At5g16650-protein in the cytosol of a cell of a non-human organism or a part thereof, preferably a microorganism, a plant cell, a plant or a part thereof, as compared to a corresponding non-transformed wild type non-human organism or a part thereof; and
[20403] (b) growing the non-human organism or a part thereof under conditions which permit the production of 5-oxoproline or a composition comprising 5-oxoproline in said non-human organism or in the culture medium surrounding said non-human organism.

[20404] Accordingly, the present invention relates to a process for the production of phenylalanine, which comprises
[20405] (a) increasing or generating the activity of a monothiol glutaredoxin in the cytosol of a cell of a non-human organism or a part thereof, preferably a microorganism, a plant cell, a plant or a part thereof, as compared to a corresponding non-transformed wild type non-human organism or a part thereof; and
[20406] (b) growing the non-human organism or a part thereof under conditions which permit the production of phenylalanine or a composition comprising phenylalanine in said non-human organism or in the culture medium surrounding said non-human organism.

[20407] Accordingly, the present invention relates to a process for the production of tyrosine, which comprises
[20408] (a) increasing or generating the activity of a monothiol glutaredoxin in the cytosol of a cell of a non-human organism or a part thereof, preferably a microorganism, a plant cell, a plant or a part thereof, as compared to a corresponding non-transformed wild type non-human organism or a part thereof; and
[20409] (b) growing the non-human organism or a part thereof under conditions which permit the production of tyrosine or a composition comprising tyrosine in said non-human organism or in the culture medium surrounding said non-human organism.

[20410] Accordingly, the present invention relates to a process for the production of phenylalanine, which comprises
[20411] (a) increasing or generating the activity of a at5g21910-protein in the cytosol of a cell of a non-human organism or a part thereof, preferably a microorganism, a plant cell, a plant or a part thereof, as compared to a corresponding non-transformed wild type non-human organism or a part thereof; and
[20412] (b) growing the non-human organism or a part thereof under conditions which permit the production of phenylalanine or a composition comprising phenylalanine in said non-human organism or in the culture medium surrounding said non-human organism.

[20413] Accordingly, the present invention relates to a process for the production of tyrosine, which comprises
[20414] (a) increasing or generating the activity of a transcription factor in the cytosol of a cell of a non-human organism or a part thereof, preferably a microorganism, a plant cell, a plant or a part thereof, as compared to a corresponding non-transformed wild type non-human organism or a part thereof; and
[20415] (b) growing the non-human organism or a part thereof under conditions which permit the production of tyrosine or a composition comprising tyrosine in said non-human organism or in the culture medium surrounding said non-human organism.

[20416] Accordingly, the present invention relates to a process for the production of serine, which comprises
[20417] (a) increasing or generating the activity of a thioredoxin in the cytosol of a cell of a non-human organism or a part thereof, preferably a microorganism, a plant cell, a plant or a part thereof, as compared to a corresponding non-transformed wild type non-human organism or a part thereof; and
[20418] (b) growing the non-human organism or a part thereof under conditions which permit the production of serine or a composition comprising serine in said non-human organism or in the culture medium surrounding said non-human organism.

[20419] Accordingly, the present invention relates to a process for the production of alanine, which comprises
[20420] (a) increasing or generating the activity of a protein phosphatase in the cytosol of a cell of a non-human organism or a part thereof, preferably a microorganism, a plant cell, a plant or a part thereof, as compared to a corresponding non-transformed wild type non-human organism or a part thereof; and
[20421] (b) growing the non-human organism or a part thereof under conditions which permit the production of alanine or a composition comprising alanine in said non-human organism or in the culture medium surrounding said non-human organism.

[20422] Accordingly, the present invention relates to a process for the production of citrulline, which comprises
[20423] (a) increasing or generating the activity of a protein phosphatase in the cytosol of a cell of a non-human organism or a part thereof, preferably a microorganism, a plant cell, a plant or a part thereof, as compared to a corresponding non-transformed wild type non-human organism or a part thereof; and
[20424] (b) growing the non-human organism or a part thereof under conditions which permit the production of citrulline or a composition comprising citrulline in said non-human organism or in the culture medium surrounding said non-human organism.

[20425] Accordingly, the present invention relates to a process for the production of citrulline, which comprises
[20426] (a) increasing or generating the activity of a protein phosphatase in the cytosol of a cell of a non-human organism or a part thereof, preferably a microorganism, a plant cell, a plant or a part thereof, as compared to a corresponding non-transformed wild type non-human organism or a part thereof; and
[20427] (b) growing the non-human organism or a part thereof under conditions which permit the production of citrulline or a composition comprising citrulline in said non-human organism or in the culture medium surrounding said non-human organism.

[20428] Accordingly, the present invention relates to a process for the production of phenylalanine, which comprises
[20429] (a) increasing or generating the activity of a RNA-binding protein in the cytosol of a cell of a non-human organism or a part thereof, preferably a microorganism, a plant cell, a plant or a part thereof, as compared to a corresponding non-transformed wild type non-human organism or a part thereof; and
[20430] (b) growing the non-human organism or a part thereof under conditions which permit the production of phenylalanine or a composition comprising phenylalanine in said non-human organism or in the culture medium surrounding said non-human organism.

[20431] Accordingly, the present invention relates to a process for the production of tyrosine, which comprises
[20432] (a) increasing or generating the activity of a RNA-binding protein in the cytosol of a cell of a non-human organism or a part thereof, preferably a microorganism, a plant cell, a plant or a part thereof, as compared to a corresponding non-transformed wild type non-human organism or a part thereof; and
[20433] (b) growing the non-human organism or a part thereof under conditions which permit the production of tyrosine or a composition comprising tyrosine in said non-human organism or in the culture medium surrounding said non-human organism.

[20434] Accordingly, the present invention relates to a process for the production of alanine, which comprises
[20435] (a) increasing or generating the activity of a pyruvate kinase in the cytosol of a cell of a non-human organism or a part thereof, preferably a microorganism, a plant cell, a plant or a part thereof, as compared to a corresponding non-transformed wild type non-human organism or a part thereof; and
[20436] (b) growing the non-human organism or a part thereof under conditions which permit the production of alanine or a composition comprising alanine in said non-human organism or in the culture medium surrounding said non-human organism.

[20437] Accordingly, the present invention relates to a process for the production of alanine, which comprises
[20438] (a) increasing or generating the activity of a zinc finger protein in the cytosol of a cell of a non-human organism or a part thereof, preferably a microorganism, a plant cell, a plant or a part thereof, as compared to a corresponding non-transformed wild type non-human organism or a part thereof; and
[20439] (b) growing the non-human organism or a part thereof under conditions which permit the production of alanine or a composition comprising alanine in said non-human organism or in the culture medium surrounding said non-human organism.

[20440] Accordingly, the present invention relates to a process for the production of phenylalanine, which comprises
[20441] (a) increasing or generating the activity of a zinc finger protein in the cytosol of a cell of a non-human organism or a part thereof, preferably a microorganism, a plant cell, a plant or a part thereof, as compared to a corresponding non-transformed wild type non-human organism or a part thereof; and
[20442] (b) growing the non-human organism or a part thereof under conditions which permit the production of phenylalanine or a composition comprising phenylalanine in said non-human organism or in the culture medium surrounding said non-human organism.

[20443] Accordingly, the present invention relates to a process for the production of serine, which comprises
[20444] (a) increasing or generating the activity of a zinc finger protein in the cytosol of a cell of a non-human organism or a part thereof, preferably a microorganism, a plant cell, a plant or a part thereof, as compared to a corresponding non-transformed wild type non-human organism or a part thereof; and
[20445] (b) growing the non-human organism or a part thereof under conditions which permit the production of serine or a composition comprising serine in said non-human organism or in the culture medium surrounding said non-human organism.

[20446] Accordingly, the present invention relates to a process for the production of 5-oxoproline, which comprises
[20447] (a) increasing or generating the activity of a zinc finger protein in the cytosol of a cell of a non-human organism or a part thereof, preferably a microorganism, a plant cell, a plant or a part thereof, as compared to a corresponding non-transformed wild type non-human organism or a part thereof; and
[20448] (b) growing the non-human organism or a part thereof under conditions which permit the production of 5-oxoproline or a composition comprising 5-oxoproline in said non-human organism or in the culture medium surrounding said non-human organism.

[20449] Accordingly, the present invention relates to a process for the production of aspartate, which comprises
[20450] (a) increasing or generating the activity of a CDP-diacylglycerol-serine O-phosphatidyltransferase in the cytosol of a cell of a non-human organism or a part thereof, preferably a microorganism, a plant cell, a plant or a part thereof, as compared to a corresponding non-transformed wild type non-human organism or a part thereof; and
[20451] (b) growing the non-human organism or a part thereof under conditions which permit the production of aspartate or a composition comprising aspartate in said non-human organism or in the culture medium surrounding said non-human organism.

[20452] Accordingly, the present invention relates to a process for the production of 5-oxoproline, which comprises
[20453] (a) increasing or generating the activity of a CDP-diacylglycerol-serine O-phosphatidyltransferase in the cytosol of a cell of a non-human organism or a part thereof, preferably a microorganism, a plant cell, a plant or a part thereof, as compared to a corresponding non-transformed wild type non-human organism or a part thereof; and
[20454] (b) growing the non-human organism or a part thereof under conditions which permit the production of 5-oxoproline or a composition comprising 5-oxoproline in said non-human organism or in the culture medium surrounding said non-human organism.

[20455] Accordingly, the present invention relates to a process for the production of serine, which comprises
[20456] (a) increasing or generating the activity of a Glycine cleavage system T aminomethyltransferase in the cytosol of a cell of a non-human organism or a part thereof, preferably a microorganism, a plant cell, a plant or a part thereof, as compared to a corresponding non-transformed wild type non-human organism or a part thereof; and
[20457] (b) growing the non-human organism or a part thereof under conditions which permit the production of serine or a composition comprising serine in said non-human organism or in the culture medium surrounding said non-human organism.

[20458] Accordingly, the present invention relates to a process for the production of serine, which comprises
[20459] (a) increasing or generating the activity of a transcriptional regulator in the cytosol of a cell of a non-human organism or a part thereof, preferably a microorganism, a plant cell, a plant or a part thereof, as compared to a corresponding non-transformed wild type non-human organism or a part thereof; and
[20460] (b) growing the non-human organism or a part thereof under conditions which permit the production of serine or a composition comprising serine in said non-human organism or in the culture medium surrounding said non-human organism.

[20461] Accordingly, the present invention relates to a process for the production of aspartate, which comprises
[20462] (a) increasing or generating the activity of a adenylylsulfate kinase in the cytosol of a cell of a non-human organism or a part thereof, preferably a microorganism, a plant cell, a plant or a part thereof, as compared to a corresponding non-transformed wild type non-human organism or a part thereof; and
[20463] (b) growing the non-human organism or a part thereof under conditions which permit the production of aspartate or a composition comprising aspartate in said non-human organism or in the culture medium surrounding said non-human organism.

[20464] Accordingly, the present invention relates to a process for the production of alanine, which comprises
[20465] (a) increasing or generating the activity of a malic enzyme in the cytosol of a cell of a non-human organism or a part thereof, preferably a microorganism, a plant cell, a plant or a part thereof, as compared to a corresponding non-transformed wild type non-human organism or a part thereof; and
[20466] (b) growing the non-human organism or a part thereof under conditions which permit the production of alanine or a composition comprising alanine in said non-human organism or in the culture medium surrounding said non-human organism.

[20467] Accordingly, the present invention relates to a process for the production of phenylalanine, which comprises
[20468] (a) increasing or generating the activity of a malic enzyme in the cytosol of a cell of a non-human organism or a part thereof, preferably a microorganism, a plant cell, a plant or a part thereof, as compared to a corresponding non-transformed wild type non-human organism or a part thereof; and
[20469] (b) growing the non-human organism or a part thereof under conditions which permit the production of phenylalanine or a composition comprising phenylalanine in said non-human organism or in the culture medium surrounding said non-human organism.

[20470] Accordingly, the present invention relates to a process for the production of serine, which comprises
[20471] (a) increasing or generating the activity of a malic enzyme in the cytosol of a cell of a non-human organism or a part thereof, preferably a microorganism, a plant cell, a plant or a part thereof, as compared to a corresponding non-transformed wild type non-human organism or a part thereof; and
[20472] (b) growing the non-human organism or a part thereof under conditions which permit the production of serine or a composition comprising serine in said non-human organism or in the culture medium surrounding said non-human organism.

[20473] Accordingly, the present invention relates to a process for the production of alanine, which comprises
[20474] (a) increasing or generating the activity of a sec-independent protein translocase in the cytosol of a cell of a non-human organism or a part thereof, preferably a microorganism, a plant cell, a plant or a part thereof, as compared to a corresponding non-transformed wild type non-human organism or a part thereof; and
[20475] (b) growing the non-human organism or a part thereof under conditions which permit the production of alanine or a composition comprising alanine in said non-human organism or in the culture medium surrounding said non-human organism.

[20476] Accordingly, the present invention relates to a process for the production of alanine, which comprises
[20477] (a) increasing or generating the activity of a pyruvate kinase in the cytosol of a cell of a non-human organism or a part thereof, preferably a microorganism, a plant cell, a plant or a part thereof, as compared to a corresponding non-transformed wild type non-human organism or a part thereof; and
[20478] (b) growing the non-human organism or a part thereof under conditions which permit the production of alanine or a composition comprising alanine in said non-human organism or in the culture medium surrounding said non-human organism.

[20479] Accordingly, the present invention relates to a process for the production of alanine, which comprises
[20480] (a) increasing or generating the activity of a beta-hydroxylase in the cytosol of a cell of a non-human organism or a part thereof, preferably a microorganism, a plant cell, a plant or a part thereof, as compared to a corresponding non-transformed wild type non-human organism or a part thereof; and
[20481] (b) growing the non-human organism or a part thereof under conditions which permit the production of alanine or a composition comprising alanine in said non-human organism or in the culture medium surrounding said non-human organism.

[20482] Accordingly, the present invention relates to a process for the production of aspartate, which comprises
[20483] (a) increasing or generating the activity of a beta-hydroxylase in the cytosol of a cell of a non-human organism or a part thereof, preferably a microorganism, a plant cell, a plant or a part thereof, as compared to a corresponding non-transformed wild type non-human organism or a part thereof; and
[20484] (b) growing the non-human organism or a part thereof under conditions which permit the production of aspartate or a composition comprising aspartate in said non-human organism or in the culture medium surrounding said non-human organism.

[20485] Accordingly, the present invention relates to a process for the production of serine, which comprises
[20486] (a) increasing or generating the activity of a beta-hydroxylase in the cytosol of a cell of a non-human organism or a part thereof, preferably a microorganism, a plant cell, a plant or a part thereof, as compared to a corresponding non-transformed wild type non-human organism or a part thereof; and
[20487] (b) growing the non-human organism or a part thereof under conditions which permit the production of serine or a composition comprising serine in said non-human organism or in the culture medium surrounding said non-human organism.

[20488] Accordingly, the present invention relates to a process for the production of aspartate, which comprises
[20489] (a) increasing or generating the activity of a elongation factor Tu in the cytosol of a cell of a non-human organism or a part thereof, preferably a microorganism, a plant cell, a plant or a part thereof, as compared to a corresponding non-transformed wild type non-human organism or a part thereof; and
[20490] (b) growing the non-human organism or a part thereof under conditions which permit the production of aspartate or a composition comprising aspartate in said non-human organism or in the culture medium surrounding said non-human organism.

[20491] Accordingly, the present invention relates to a process for the production of phenylalanine, which comprises
[20492] (a) increasing or generating the activity of a elongation factor Tu in the cytosol of a cell of a non-human organism or a part thereof, preferably a microorganism, a plant cell, a plant or a part thereof, as compared to a corresponding non-transformed wild type non-human organism or a part thereof; and
[20493] (b) growing the non-human organism or a part thereof under conditions which permit the production of phenylalanine or a composition comprising phenylalanine in said non-human organism or in the culture medium surrounding said non-human organism.

[20494] Accordingly, the present invention relates to a process for the production of serine, which comprises
[20495] (a) increasing or generating the activity of a elongation factor Tu in the cytosol of a cell of a non-human organism or a part thereof, preferably a microorganism, a plant cell, a plant or a part thereof, as compared to a corresponding non-transformed wild type non-human organism or a part thereof; and
[20496] (b) growing the non-human organism or a part thereof under conditions which permit the production of serine or a composition comprising serine in said non-human organism or in the culture medium surrounding said non-human organism.

[20497] Accordingly, the present invention relates to a process for the production of tyrosine, which comprises
[20498] (a) increasing or generating the activity of a elongation factor Tu in the cytosol of a cell of a non-human organism or a part thereof, preferably a microorganism, a plant cell, a plant or a part thereof, as compared to a corresponding non-transformed wild type non-human organism or a part thereof; and
[20499] (b) growing the non-human organism or a part thereof under conditions which permit the production of tyrosine or a composition comprising tyrosine in said non-human organism or in the culture medium surrounding said non-human organism.

[20500] Accordingly, the present invention relates to a process for the production of 5-oxoproline, which comprises
[20501] (a) increasing or generating the activity of a elongation factor Tu in the cytosol of a cell of a non-human organism or a part thereof, preferably a microorganism, a plant cell, a plant or a part thereof, as compared to a corresponding non-transformed wild type non-human organism or a part thereof; and
[20502] (b) growing the non-human organism or a part thereof under conditions which permit the production of 5-oxoproline or a composition comprising 5-oxoproline in said non-human organism or in the culture medium surrounding said non-human organism.

[20503] Accordingly, the present invention relates to a process for the production of tyrosine, which comprises
[20504] (a) increasing or generating the activity of a 30S ribosomal protein S3 in the cytosol of a cell of a non-human organism or a part thereof, preferably a microorganism, a plant cell, a plant or a part thereof, as compared to a corresponding non-transformed wild type non-human organism or a part thereof; and
[20505] (b) growing the non-human organism or a part thereof under conditions which permit the production of tyrosine or a composition comprising tyrosine in said non-human organism or in the culture medium surrounding said non-human organism.

[20506] Accordingly, the present invention relates to a process for the production of asparagine, which comprises
[20507] (a) increasing or generating the activity of a 50S ribosomal protein L14 in the cytosol of a cell of a non-human organism or a part thereof, preferably a microorganism, a plant cell, a plant or a part thereof, as compared to a corresponding non-transformed wild type non-human organism or a part thereof; and
[20508] (b) growing the non-human organism or a part thereof under conditions which permit the production of asparagine or a composition comprising asparagine in said non-human organism or in the culture medium surrounding said non-human organism.

[20509] Accordingly, the present invention relates to a process for the production of tyrosine, which comprises
[20510] (a) increasing or generating the activity of a ABC transporter permease protein in the cytosol of a cell of a non-human organism or a part thereof, preferably a microorganism, a plant cell, a plant or a part thereof, as compared to a corresponding non-transformed wild type non-human organism or a part thereof; and
[20511] (b) growing the non-human organism or a part thereof under conditions which permit the production of tyrosine or a composition comprising tyrosine in said non-human organism or in the culture medium surrounding said non-human organism.

[20512] Accordingly, the present invention relates to a process for the production of aspartate, which comprises
[20513] (a) increasing or generating the activity of a acyl-CoA synthase in the cytosol of a cell of a non-human organism or a part thereof, preferably a microorganism, a plant cell, a plant or a part thereof, as compared to a corresponding non-transformed wild type non-human organism or a part thereof; and
[20514] (b) growing the non-human organism or a part thereof under conditions which permit the production of aspartate or a composition comprising aspartate in said non-human organism or in the culture medium surrounding said non-human organism.

[20515] Accordingly, the present invention relates to a process for the production of tyrosine, which comprises
[20516] (a) increasing or generating the activity of a acyl-CoA synthase in the cytosol of a cell of a non-human organism or a part thereof, preferably a microorganism, a plant cell, a plant or a part thereof, as compared to a corresponding non-transformed wild type non-human organism or a part thereof; and
[20517] (b) growing the non-human organism or a part thereof under conditions which permit the production of tyrosine or a composition comprising tyrosine in said non-human organism or in the culture medium surrounding said non-human organism.

[20518] Accordingly, the present invention relates to a process for the production of 5-oxoproline, which comprises
[20519] (a) increasing or generating the activity of a acyl-CoA synthase in the cytosol of a cell of a non-human organism or a part thereof, preferably a microorganism, a plant cell, a plant or a part thereof, as compared to a corresponding non-transformed wild type non-human organism or a part thereof; and
[20520] (b) growing the non-human organism or a part thereof under conditions which permit the production of 5-oxoproline or a composition comprising 5-oxoproline in said non-human organism or in the culture medium surrounding said non-human organism.

[20521] Accordingly, the present invention relates to a process for the production of aspartate, which comprises
[20522] (a) increasing or generating the activity of a 2-oxoglutarate dehydrogenase E1 subunit in the cytosol of a cell of a non-human organism or a part thereof, preferably a microorganism, a plant cell, a plant or a part thereof, as compared to a corresponding non-transformed wild type non-human organism or a part thereof; and
[20523] (b) growing the non-human organism or a part thereof under conditions which permit the production of aspartate or a composition comprising aspartate in said non-human organism or in the culture medium surrounding said non-human organism.

[20524] Accordingly, the present invention relates to a process for the production of 5-oxoproline, which comprises
[20525] (a) increasing or generating the activity of a 2-oxoglutarate dehydrogenase E1 subunit in the cytosol of a cell of a non-human organism or a part thereof, preferably a microorganism, a plant cell, a plant or a part thereof, as compared to a corresponding non-transformed wild type non-human organism or a part thereof; and
[20526] (b) growing the non-human organism or a part thereof under conditions which permit the production of 5-oxoproline or a composition comprising 5-oxoproline in said non-human organism or in the culture medium surrounding said non-human organism.

[20527] Accordingly, the present invention relates to a process for the production of serine, which comprises
[20528] (a) increasing or generating the activity of a GDP-mannose dehydrogenase in the cytosol of a cell of a non-human organism or a part thereof, preferably a microorganism, a plant cell, a plant or a part thereof, as compared to a corresponding non-transformed wild type non-human organism or a part thereof; and
[20529] (b) growing the non-human organism or a part thereof under conditions which permit the production of serine or a composition comprising serine in said non-human organism or in the culture medium surrounding said non-human organism.

[20530] Accordingly, the present invention relates to a process for the production of serine, which comprises
[20531] (a) increasing or generating the activity of a transcriptional regulator in the cytosol of a cell of a non-human organism or a part thereof, preferably a microorganism, a plant cell, a plant or a part thereof, as compared to a corresponding non-transformed wild type non-human organism or a part thereof; and
[20532] (b) growing the non-human organism or a part thereof under conditions which permit the production of serine or a composition comprising serine in said non-human organism or in the culture medium surrounding said non-human organism.

[20533] Accordingly, the present invention relates to a process for the production of phenylalanine, which comprises
[20534] (a) increasing or generating the activity of a transcriptional regulator in the cytosol of a cell of a non-human organism or a part thereof, preferably a microorganism, a plant cell, a plant or a part thereof, as compared to a corresponding non-transformed wild type non-human organism or a part thereof; and
[20535] (b) growing the non-human organism or a part thereof under conditions which permit the production of phenylalanine or a composition comprising phenylalanine in said non-human organism or in the culture medium surrounding said non-human organism.

[20536] Accordingly, the present invention relates to a process for the production of aspartate, which comprises
[20537] (a) increasing or generating the activity of a oxidoreductase in the cytosol of a cell of a non-human organism or a part thereof, preferably a microorganism, a plant cell, a plant or a part thereof, as compared to a corresponding non-transformed wild type non-human organism or a part thereof; and
[20538] (b) growing the non-human organism or a part thereof under conditions which permit the production of aspartate or a composition comprising aspartate in said non-human organism or in the culture medium surrounding said non-human organism.

[20539] Accordingly, the present invention relates to a process for the production of tyrosine, which comprises
[20540] (a) increasing or generating the activity of a oxidoreductase in the cytosol of a cell of a non-human organism or a part thereof, preferably a microorganism, a plant cell, a plant or a part thereof, as compared to a corresponding non-transformed wild type non-human organism or a part thereof; and
[20541] (b) growing the non-human organism or a part thereof under conditions which permit the production of tyrosine or a composition comprising tyrosine in said non-human organism or in the culture medium surrounding said non-human organism.

[20542] Accordingly, the present invention relates to a process for the production of citrulline, which comprises
[20543] (a) increasing or generating the activity of a lysyl-tRNA synthetase in the cytosol of a cell of a non-human organism or a part thereof, preferably a microorganism, a plant cell, a plant or a part thereof, as compared to a corresponding non-transformed wild type non-human organism or a part thereof; and
[20544] (b) growing the non-human organism or a part thereof under conditions which permit the production of citrulline or a composition comprising citrulline in said non-human organism or in the culture medium surrounding said non-human organism.

[20545] Accordingly, the present invention relates to a process for the production of asparagine, which comprises
[20546] (a) increasing or generating the activity of a ABC transporter component in the cytosol of a cell of a non-human organism or a part thereof, preferably a microorganism, a plant cell, a plant or a part thereof, as compared to a corresponding non-transformed wild type non-human organism or a part thereof; and
[20547] (b) growing the non-human organism or a part thereof under conditions which permit the production of asparagine or a composition comprising asparagine in said non-human organism or in the culture medium surrounding said non-human organism.

[20548] Accordingly, the present invention relates to a process for the production of aspartate, which comprises
[20549] (a) increasing or generating the activity of a glucose-1-phosphate cytidylyltransferase in the cytosol of a cell of a non-human organism or a part thereof, preferably a microorganism, a plant cell, a plant or a part thereof, as compared to a corresponding non-transformed wild type non-human organism or a part thereof; and
[20550] (b) growing the non-human organism or a part thereof under conditions which permit the production of aspartate or a composition comprising aspartate in said non-human organism or in the culture medium surrounding said non-human organism.

[20551] Accordingly, the present invention relates to a process for the production of glycine, which comprises
[20552] (a) increasing or generating the activity of a CDP-glucose-4,6-dehydratase in the cytosol of a cell of a non-human organism or a part thereof, preferably a microorganism, a plant cell, a plant or a part thereof, as compared to a corresponding non-transformed wild type non-human organism or a part thereof; and
[20553] (b) growing the non-human organism or a part thereof under conditions which permit the production of glycine or a composition comprising glycine in said non-human organism or in the culture medium surrounding said non-human organism.

[20554] Accordingly, the present invention relates to a process for the production of phenylalanine, which comprises
[20555] (a) increasing or generating the activity of a enoyl-CoA hydratase in the cytosol of a cell of a non-human organism or a part thereof, preferably a microorganism, a plant cell, a plant or a part thereof, as compared to a corresponding non-transformed wild type non-human organism or a part thereof; and
[20556] (b) growing the non-human organism or a part thereof under conditions which permit the production of phenylalanine or a composition comprising phenylalanine in said non-human organism or in the culture medium surrounding said non-human organism.

[20557] Accordingly, the present invention relates to a process for the production of alanine, which comprises
[20558] (a) increasing or generating the activity of a glutathione peroxidase in the cytosol of a cell of a non-human organism or a part thereof, preferably a microorganism, a plant cell, a plant or a part thereof, as compared to a corresponding non-transformed wild type non-human organism or a part thereof; and
[20559] (b) growing the non-human organism or a part thereof under conditions which permit the production of alanine or a composition comprising alanine in said non-human organism or in the culture medium surrounding said non-human organism.

[20560] Accordingly, the present invention relates to a process for the production of asparagine, which comprises
[20561] (a) increasing or generating the activity of a aminotransferase in the cytosol of a cell of a non-human organism or a part thereof, preferably a microorganism, a plant cell, a plant or a part thereof, as compared to a corresponding non-transformed wild type non-human organism or a part thereof; and
[20562] (b) growing the non-human organism or a part thereof under conditions which permit the production of asparagine or a composition comprising asparagine in said non-human organism or in the culture medium surrounding said non-human organism.

[20563] Accordingly, the present invention relates to a process for the production of phenylalanine, which comprises
[20564] (a) increasing or generating the activity of a aminotransferase in the cytosol of a cell of a non-human organism or a part thereof, preferably a microorganism, a plant cell, a plant or a part thereof, as compared to a corresponding non-transformed wild type non-human organism or a part thereof; and
[20565] (b) growing the non-human organism or a part thereof under conditions which permit the production of phenylalanine or a composition comprising phenylalanine in said non-human organism or in the culture medium surrounding said non-human organism.

[20566] Accordingly, the present invention relates to a process for the production of tyrosine, which comprises
[20567] (a) increasing or generating the activity of a NADH-quinone oxidoreductase subunit in the cytosol of a cell of a non-human organism or a part thereof, preferably a microorganism, a plant cell, a plant or a part thereof, as compared to a corresponding non-transformed wild type non-human organism or a part thereof; and
[20568] (b) growing the non-human organism or a part thereof under conditions which permit the production of tyrosine or a composition comprising tyrosine in said non-human organism or in the culture medium surrounding said non-human organism.

[20569] Accordingly, the present invention relates to a process for the production of phenylalanine, which comprises
[20570] (a) increasing or generating the activity of a glutamate-ammonia-ligase in the cytosol of a cell of a non-human organism or a part thereof, preferably a microorganism, a plant cell, a plant or a part thereof, as compared to a corresponding non-transformed wild type non-human organism or a part thereof; and
[20571] (b) growing the non-human organism or a part thereof under conditions which permit the production of phenylalanine or a composition comprising phenylalanine in said non-human organism or in the culture medium surrounding said non-human organism.

[20572] Accordingly, the present invention relates to a process for the production of tyrosine, which comprises
[20573] (a) increasing or generating the activity of a glutamate-ammonia-ligase in the cytosol of a cell of a non-human organism or a part thereof, preferably a microorganism, a plant cell, a plant or a part thereof, as compared to a corresponding non-transformed wild type non-human organism or a part thereof; and
[20574] (b) growing the non-human organism or a part thereof under conditions which permit the production of tyrosine or a composition comprising tyrosine in said non-human organism or in the culture medium surrounding said non-human organism.

[20575] Accordingly, the present invention relates to a process for the production of 5-oxoproline, which comprises
[20576] (a) increasing or generating the activity of a RNA polymerase sigma factor in the cytosol of a cell of a non-human organism or a part thereof, preferably a microorganism, a plant cell, a plant or a part thereof, as compared to a corresponding non-transformed wild type non-human organism or a part thereof; and
[20577] (b) growing the non-human organism or a part thereof under conditions which permit the production of 5-oxoproline or a composition comprising 5-oxoproline in said non-human organism or in the culture medium surrounding said non-human organism.

[20578] Accordingly, the present invention relates to a process for the production of phenylalanine, which comprises
[20579] (a) increasing or generating the activity of a hydrolase in the cytosol of a cell of a non-human organism or a part thereof, preferably a microorganism, a plant cell, a plant or a part thereof, as compared to a corresponding non-transformed wild type non-human organism or a part thereof; and
[20580] (b) growing the non-human organism or a part thereof under conditions which permit the production of phenylalanine or a composition comprising phenylalanine in said non-human organism or in the culture medium surrounding said non-human organism.

[20581] Accordingly, the present invention relates to a process for the production of tyrosine, which comprises
[20582] (a) increasing or generating the activity of a hydrolase in the cytosol of a cell of a non-human organism or a part thereof, preferably a microorganism, a plant cell, a plant or a part thereof, as compared to a corresponding non-transformed wild type non-human organism or a part thereof; and
[20583] (b) growing the non-human organism or a part thereof under conditions which permit the production of tyrosine or a composition comprising tyrosine in said non-human organism or in the culture medium surrounding said non-human organism.

[20584] Accordingly, the present invention relates to a process for the production of 5-oxoproline, which comprises
[20585] (a) increasing or generating the activity of a hydrolase in the cytosol of a cell of a non-human organism or a part thereof, preferably a microorganism, a plant cell, a plant or a part thereof, as compared to a corresponding non-transformed wild type non-human organism or a part thereof; and
[20586] (b) growing the non-human organism or a part thereof under conditions which permit the production of 5-oxoproline or a composition comprising 5-oxoproline in said non-human organism or in the culture medium surrounding said non-human organism.

[20587] Accordingly, the present invention relates to a process for the production of aspartate, which comprises
[20588] (a) increasing or generating the activity of a glutamate-ammonia-ligase in the cytosol of a cell of a non-human organism or a part thereof, preferably a microorganism, a plant cell, a plant or a part thereof, as compared to a corresponding non-transformed wild type non-human organism or a part thereof; and
[20589] (b) growing the non-human organism or a part thereof under conditions which permit the production of aspartate or a composition comprising aspartate in said non-human organism or in the culture medium surrounding said non-human organism.

[20590] Accordingly, the present invention relates to a process for the production of serine, which comprises
[20591] (a) increasing or generating the activity of a glutamate-ammonia-ligase in the cytosol of a cell of a non-human organism or a part thereof, preferably a microorganism, a plant cell, a plant or a part thereof, as compared to a corresponding non-transformed wild type non-human organism or a part thereof; and
[20592] (b) growing the non-human organism or a part thereof under conditions which permit the production of serine or a composition comprising serine in said non-human organism or in the culture medium surrounding said non-human organism.

[20593] Accordingly, the present invention relates to a process for the production of tyrosine, which comprises
[20594] (a) increasing or generating the activity of a glutamate-ammonia-ligase in the cytosol of a cell of a non-human organism or a part thereof, preferably a microorganism, a plant cell, a plant or a part thereof, as compared to a corresponding non-transformed wild type non-human organism or a part thereof; and
[20595] (b) growing the non-human organism or a part thereof under conditions which permit the production of tyrosine or a composition comprising tyrosine in said non-human organism or in the culture medium surrounding said non-human organism.

[20596] Accordingly, the present invention relates to a process for the production of phenylalanine, which comprises
[20597] (a) increasing or generating the activity of a fumarylacetoacetate hydrolase in the cytosol of a cell of a non-human organism or a part thereof, preferably a microorganism, a plant cell, a plant or a part thereof, as compared to a corresponding non-transformed wild type non-human organism or a part thereof; and
[20598] (b) growing the non-human organism or a part thereof under conditions which permit the production of phenylalanine or a composition comprising phenylalanine in said non-human organism or in the culture medium surrounding said non-human organism.

[20599] Accordingly, the present invention relates to a process for the production of tyrosine, which comprises
[20600] (a) increasing or generating the activity of a fumarylacetoacetate hydrolase in the cytosol of a cell of a non-human organism or a part thereof, preferably a microorganism, a plant cell, a plant or a part thereof, as compared to a corresponding non-transformed wild type non-human organism or a part thereof; and
[20601] (b) growing the non-human organism or a part thereof under conditions which permit the production of tyrosine or a composition comprising tyrosine in said non-human organism or in the culture medium surrounding said non-human organism.

[20602] Accordingly, the present invention relates to a process for the production of serine, which comprises
[20603] (a) increasing or generating the activity of a HesB/YadR/YfhF family protein in the cytosol of a cell of a non-human organism or a part thereof, preferably a microorganism, a plant cell, a plant or a part thereof, as compared to a corresponding non-transformed wild type non-human organism or a part thereof; and
[20604] (b) growing the non-human organism or a part thereof under conditions which permit the production of serine or a composition comprising serine in said non-human organism or in the culture medium surrounding said non-human organism.

[20605] Accordingly, the present invention relates to a process for the production of aspartate, which comprises
[20606] (a) increasing or generating the activity of a peptidase in the cytosol of a cell of a non-human organism or a part thereof, preferably a microorganism, a plant cell, a plant or a part thereof, as compared to a corresponding non-transformed wild type non-human organism or a part thereof; and
[20607] (b) growing the non-human organism or a part thereof under conditions which permit the production of aspartate or a composition comprising aspartate in said non-human organism or in the culture medium surrounding said non-human organism.

[20608] Accordingly, the present invention relates to a process for the production of aspartate, which comprises
[20609] (a) increasing or generating the activity of a L-aspartate oxidase in the cytosol of a cell of a non-human organism or a part thereof, preferably a microorganism, a plant cell, a plant or a part thereof, as compared to a corresponding non-transformed wild type non-human organism or a part thereof; and
[20610] (b) growing the non-human organism or a part thereof under conditions which permit the production of aspartate or a composition comprising aspartate in said non-human organism or in the culture medium surrounding said non-human organism.

[20611] Accordingly, the present invention relates to a process for the production of phenylalanine, which comprises
[20612] (a) increasing or generating the activity of a Chaperone protein CIpB in the cytosol of a cell of a non-human organism or a part thereof, preferably a microorganism, a plant cell, a plant or a part thereof, as compared to a corresponding non-transformed wild type non-human organism or a part thereof; and
[20613] (b) growing the non-human organism or a part thereof under conditions which permit the production of phenylalanine or a composition comprising phenylalanine in said non-human organism or in the culture medium surrounding said non-human organism.

[20614] Accordingly, the present invention relates to a process for the production of phenylalanine, which comprises
[20615] (a) increasing or generating the activity of a electron transfer flavoprotein subunit beta in the cytosol of a cell of a non-human organism or a part thereof, preferably a microorganism, a plant cell, a plant or a part thereof, as compared to a corresponding non-transformed wild type non-human organism or a part thereof; and
[20616] (b) growing the non-human organism or a part thereof under conditions which permit the production of phenylalanine or a composition comprising phenylalanine in said non-human organism or in the culture medium surrounding said non-human organism.

[20617] Accordingly, the present invention relates to a process for the production of tyrosine, which comprises
[20618] (a) increasing or generating the activity of a electron transfer flavoprotein subunit beta in the cytosol of a cell of a non-human organism or a part thereof, preferably a microorganism, a plant cell, a plant or a part thereof, as compared to a corresponding non-transformed wild type non-human organism or a part thereof; and
[20619] (b) growing the non-human organism or a part thereof under conditions which permit the production of tyrosine or a composition comprising tyrosine in said non-human organism or in the culture medium surrounding said non-human organism.

[20620] Accordingly, the present invention relates to a process for the production of citrulline, which comprises
[20621] (a) increasing or generating the activity of a AX653549-protein in the cytosol of a cell of a non-human organism or a part thereof, preferably a microorganism, a plant cell, a plant or a part thereof, as compared to a corresponding non-transformed wild type non-human organism or a part thereof; and
[20622] (b) growing the non-human organism or a part thereof under conditions which permit the production of citrulline or a composition comprising citrulline in said non-human organism or in the culture medium surrounding said non-human organism.

[20623] Accordingly, the present invention relates to a process for the production of 5-oxoproline, which comprises
[20624] (a) increasing or generating the activity of a AX653549-protein in the cytosol of a cell of a non-human organism or a part thereof, preferably a microorganism, a plant cell, a plant or a part thereof, as compared to a corresponding non-transformed wild type non-human organism or a part thereof; and
[20625] (b) growing the non-human organism or a part thereof under conditions which permit the production of 5-oxoproline or a composition comprising 5-oxoproline in said non-human organism or in the culture medium surrounding said non-human organism.

[20626] Accordingly, the present invention relates to a process for the production of aspartate, which comprises
[20627] (a) increasing or generating the activity of a AY087308-protein in the cytosol of a cell of a non-human organism or a part thereof, preferably a microorganism, a plant cell, a plant or a part thereof, as compared to a corresponding non-transformed wild type non-human organism or a part thereof; and
[20628] (b) growing the non-human organism or a part thereof under conditions which permit the production of aspartate or a composition comprising aspartate in said non-human organism or in the culture medium surrounding said non-human organism.

[20629] Accordingly, the present invention relates to a process for the production of 5-oxoproline, which comprises
[20630] (a) increasing or generating the activity of a AY087308-protein in the cytosol of a cell of a non-human organism or a part thereof, preferably a microorganism, a plant cell, a plant or a part thereof, as compared to a corresponding non-transformed wild type non-human organism or a part thereof; and
[20631] (b) growing the non-human organism or a part thereof under conditions which permit the production of 5-oxoproline or a composition comprising 5-oxoproline in said non-human organism or in the culture medium surrounding said non-human organism.

[20632] Accordingly, the present invention relates to a process for the production of alanine, which comprises
[20633] (a) increasing or generating the activity of a threonine synthase in the cytosol of a cell of a non-human organism or a part thereof, preferably a microorganism, a plant cell, a plant or a part thereof, as compared to a corresponding non-transformed wild type non-human organism or a part thereof; and
[20634] (b) growing the non-human organism or a part thereof under conditions which permit the production of alanine or a composition comprising alanine in said non-human organism or in the culture medium surrounding said non-human organism.

[20635] Accordingly, the present invention relates to a process for the production of phenylalanine, which comprises
[20636] (a) increasing or generating the activity of a threonine synthase in the cytosol of a cell of a non-human organism or a part thereof, preferably a microorganism, a plant cell, a plant or a part thereof, as compared to a corresponding non-transformed wild type non-human organism or a part thereof; and
[20637] (b) growing the non-human organism or a part thereof under conditions which permit the production of phenylalanine or a composition comprising phenylalanine in said non-human organism or in the culture medium surrounding said non-human organism.

[20638] Accordingly, the present invention relates to a process for the production of serine, which comprises
[20639] (a) increasing or generating the activity of a threonine synthase in the cytosol of a cell of a non-human organism or a part thereof, preferably a microorganism, a plant cell, a plant or a part thereof, as compared to a corresponding non-transformed wild type non-human organism or a part thereof; and
[20640] (b) growing the non-human organism or a part thereof under conditions which permit the production of serine or a composition comprising serine in said non-human organism or in the culture medium surrounding said non-human organism.

[20641] Accordingly, the present invention relates to a process for the production of tyrosine, which comprises
[20642] (a) increasing or generating the activity of a threonine synthase in the cytosol of a cell of a non-human organism or a part thereof, preferably a microorganism, a plant cell, a plant or a part thereof, as compared to a corresponding non-transformed wild type non-human organism or a part thereof; and
[20643] (b) growing the non-human organism or a part thereof under conditions which permit the production of tyrosine or a composition comprising tyrosine in said non-human organism or in the culture medium surrounding said non-human organism.

[20644] Accordingly, the present invention relates to a process for the production of 5-oxoproline, which comprises
[20645] (a) increasing or generating the activity of a threonine synthase in the cytosol of a cell of a non-human organism or a part thereof, preferably a microorganism, a plant cell, a plant or a part thereof, as compared to a corresponding non-transformed wild type non-human organism or a part thereof; and
[20646] (b) growing the non-human organism or a part thereof under conditions which permit the production of 5-oxoproline or a composition comprising 5-oxoproline in said non-human organism or in the culture medium surrounding said non-human organism.

[20647] Accordingly, the present invention relates to a process for the production of phenylalanine, which comprises
[20648] (a) increasing or generating the activity of a acetolactate synthase small subunit in the cytosol of a cell of a non-human organism or a part thereof, preferably a microorganism, a plant cell, a plant or a part thereof, as compared to a corresponding non-transformed wild type non-human organism or a part thereof; and
[20649] (b) growing the non-human organism or a part thereof under conditions which permit the production of phenylalanine or a composition comprising phenylalanine in said non-human organism or in the culture medium surrounding said non-human organism.

[20650] Accordingly, the present invention relates to a process for the production of glycine, which comprises
[20651] (a) increasing or generating the activity of a glucose dehydrogenase in the cytosol of a cell of a non-human organism or a part thereof, preferably a microorganism, a plant cell, a plant or a part thereof, as compared to a corresponding non-transformed wild type non-human organism or a part thereof; and
[20652] (b) growing the non-human organism or a part thereof under conditions which permit the production of glycine or a composition comprising glycine in said non-human organism or in the culture medium surrounding said non-human organism.

[20653] Accordingly, the present invention relates to a process for the production of phenylalanine, which comprises
[20654] (a) increasing or generating the activity of a glucose dehydrogenase in the cytosol of a cell of a non-human organism or a part thereof, preferably a microorganism, a plant cell, a plant or a part thereof, as compared to a corresponding non-transformed wild type non-human organism or a part thereof; and
[20655] (b) growing the non-human organism or a part thereof under conditions which permit the production of phenylalanine or a composition comprising phenylalanine in said non-human organism or in the culture medium surrounding said non-human organism.

[20656] Accordingly, the present invention relates to a process for the production of serine, which comprises
[20657] (a) increasing or generating the activity of a glucose dehydrogenase in the cytosol of a cell of a non-human organism or a part thereof, preferably a microorganism, a plant cell, a plant or a part thereof, as compared to a corresponding non-transformed wild type non-human organism or a part thereof; and
[20658] (b) growing the non-human organism or a part thereof under conditions which permit the production of serine or a composition comprising serine in said non-human organism or in the culture medium surrounding said non-human organism.

[20659] Accordingly, the present invention relates to a process for the production of tyrosine, which comprises
[20660] (a) increasing or generating the activity of a glucose dehydrogenase in the cytosol of a cell of a non-human organism or a part thereof, preferably a microorganism, a plant cell, a plant or a part thereof, as compared to a corresponding non-transformed wild type non-human organism or a part thereof; and
[20661] (b) growing the non-human organism or a part thereof under conditions which permit the production of tyrosine or a composition comprising tyrosine in said non-human organism or in the culture medium surrounding said non-human organism.

[20662] Accordingly, the present invention relates to a process for the production of asparagine, which comprises
[20663] (a) increasing or generating the activity of a aspartate 1-decarboxylase in the cytosol of a cell of a non-human organism or a part thereof, preferably a microorganism, a plant cell, a plant or a part thereof, as compared to a corresponding non-transformed wild type non-human organism or a part thereof; and
[20664] (b) growing the non-human organism or a part thereof under conditions which permit the production of asparagine or a composition comprising asparagine in said non-human organism or in the culture medium surrounding said non-human organism.

[20665] Accordingly, the present invention relates to a process for the production of serine, which comprises
[20666] (a) increasing or generating the activity of a aspartate 1-decarboxylase in the cytosol of a cell of a non-human organism or a part thereof, preferably a microorganism, a plant cell, a plant or a part thereof, as compared to a corresponding non-transformed wild type non-human organism or a part thereof; and
[20667] (b) growing the non-human organism or a part thereof under conditions which permit the production of serine or a composition comprising serine in said non-human organism or in the culture medium surrounding said non-human organism.

[20668] Accordingly, the present invention relates to a process for the production of alanine, which comprises
[20669] (a) increasing or generating the activity of a serine protease in the cytosol of a cell of a non-human organism or a part thereof, preferably a microorganism, a plant cell, a plant or a part thereof, as compared to a corresponding non-transformed wild type non-human organism or a part thereof; and
[20670] (b) growing the non-human organism or a part thereof under conditions which permit the production of alanine or a composition comprising alanine in said non-human organism or in the culture medium surrounding said non-human organism.

[20671] Accordingly, the present invention relates to a process for the production of serine, which comprises
[20672] (a) increasing or generating the activity of a serine protease in the cytosol of a cell of a non-human organism or a part thereof, preferably a microorganism, a plant cell, a plant or a part thereof, as compared to a corresponding non-transformed wild type non-human organism or a part thereof; and
[20673] (b) growing the non-human organism or a part thereof under conditions which permit the production of serine or a composition comprising serine in said non-human organism or in the culture medium surrounding said non-human organism.

[20674] Accordingly, the present invention relates to a process for the production of tyrosine, which comprises
[20675] (a) increasing or generating the activity of a serine protease in the cytosol of a cell of a non-human organism or a part thereof, preferably a microorganism, a plant cell, a plant or a part thereof, as compared to a corresponding non-transformed wild type non-human organism or a part thereof; and
[20676] (b) growing the non-human organism or a part thereof under conditions which permit the production of tyrosine or a composition comprising tyrosine in said non-human organism or in the culture medium surrounding said non-human organism.

[20677] Accordingly, the present invention relates to a process for the production of serine, which comprises
[20678] (a) increasing or generating the activity of a acyl-CoA dehydrogenase in the cytosol of a cell of a non-human organism or a part thereof, preferably a microorganism, a plant cell, a plant or a part thereof, as compared to a corresponding non-transformed wild type non-human organism or a part thereof; and
[20679] (b) growing the non-human organism or a part thereof under conditions which permit the production of serine or a composition comprising serine in said non-human organism or in the culture medium surrounding said non-human organism.

[20680] Accordingly, the present invention relates to a process for the production of tyrosine, which comprises
[20681] (a) increasing or generating the activity of a acyl-CoA dehydrogenase in the cytosol of a cell of a non-human organism or a part thereof, preferably a microorganism, a plant cell, a plant or a part thereof, as compared to a corresponding non-transformed wild type non-human organism or a part thereof; and
[20682] (b) growing the non-human organism or a part thereof under conditions which permit the production of tyrosine or a composition comprising tyrosine in said non-human organism or in the culture medium surrounding said non-human organism.

[20683] Accordingly, the present invention relates to a process for the production of tyrosine, which comprises
[20684] (a) increasing or generating the activity of a beta-galactosidase in the cytosol of a cell of a non-human organism or a part thereof, preferably a microorganism, a plant cell, a plant or a part thereof, as compared to a corresponding non-transformed wild type non-human organism or a part thereof; and
[20685] (b) growing the non-human organism or a part thereof under conditions which permit the production of tyrosine or a composition comprising tyrosine in said non-human organism or in the culture medium surrounding said non-human organism.

[20686] Accordingly, the present invention relates to a process for the production of 5-oxoproline, which comprises
[20687] (a) increasing or generating the activity of a beta-galactosidase in the cytosol of a cell of a non-human organism or a part thereof, preferably a microorganism, a plant cell, a plant or a part thereof, as compared to a corresponding non-transformed wild type non-human organism or a part thereof; and
[20688] (b) growing the non-human organism or a part thereof under conditions which permit the production of 5-oxoproline or a composition comprising 5-oxoproline in said non-human organism or in the culture medium surrounding said non-human organism.

[20689] Accordingly, the present invention relates to a process for the production of glycine, which comprises
[20690] (a) increasing or generating the activity of a 2,3-dihydroxyphenylpropionate 1,2-dioxygenase in the cytosol of a cell of a non-human organism or a part thereof, preferably a microorganism, a plant cell, a plant or a part thereof, as compared to a corresponding non-transformed wild type non-human organism or a part thereof; and
[20691] (b) growing the non-human organism or a part thereof under conditions which permit the production of glycine or a composition comprising glycine in said non-human organism or in the culture medium surrounding said non-human organism.

[20692] Accordingly, the present invention relates to a process for the production of phenylalanine, which comprises
[20693] (a) increasing or generating the activity of a 2,3-dihydroxyphenylpropionate 1,2-dioxygenase in the cytosol of a cell of a non-human organism or a part thereof, preferably a microorganism, a plant cell, a plant or a part thereof, as compared to a corresponding non-transformed wild type non-human organism or a part thereof; and
[20694] (b) growing the non-human organism or a part thereof under conditions which permit the production of phenylalanine or a composition comprising phenylalanine in said non-human organism or in the culture medium surrounding said non-human organism.

[20695] Accordingly, the present invention relates to a process for the production of serine, which comprises
[20696] (a) increasing or generating the activity of a 2,3-dihydroxyphenylpropionate 1,2-dioxygenase in the cytosol of a cell of a non-human organism or a part thereof, preferably a microorganism, a plant cell, a plant or a part thereof, as compared to a corresponding non-transformed wild type non-human organism or a part thereof; and
[20697] (b) growing the non-human organism or a part thereof under conditions which permit the production of serine or a composition comprising serine in said non-human organism or in the culture medium surrounding said non-human organism.

[20698] Accordingly, the present invention relates to a process for the production of tyrosine, which comprises
[20699] (a) increasing or generating the activity of a 2,3-dihydroxyphenylpropionate 1,2-dioxygenase in the cytosol of a cell of a non-human organism or a part thereof, preferably a microorganism, a plant cell, a plant or a part thereof, as compared to a corresponding non-transformed wild type non-human organism or a part thereof; and
[20700] (b) growing the non-human organism or a part thereof under conditions which permit the production of tyrosine or a composition comprising tyrosine in said non-human organism or in the culture medium surrounding said non-human organism.

[20701] Accordingly, the present invention relates to a process for the production of aspartate, which comprises
[20702] (a) increasing or generating the activity of a b0391-protein in the cytosol of a cell of a non-human organism or a part thereof, preferably a microorganism, a plant cell, a plant or a part thereof, as compared to a corresponding non-transformed wild type non-human organism or a part thereof; and
[20703] (b) growing the non-human organism or a part thereof under conditions which permit the production of aspartate or a composition comprising aspartate in said non-human organism or in the culture medium surrounding said non-human organism.

[20704] Accordingly, the present invention relates to a process for the production of asparagine, which comprises
[20705] (a) increasing or generating the activity of a ATP-binding component of a transport system in the cytosol of a cell of a non-human organism or a part thereof, preferably a microorganism, a plant cell, a plant or a part thereof, as compared to a corresponding non-transformed wild type non-human organism or a part thereof; and
[20706] (b) growing the non-human organism or a part thereof under conditions which permit the production of asparagine or a composition comprising asparagine in said non-human organism or in the culture medium surrounding said non-human organism.

[20707] Accordingly, the present invention relates to a process for the production of aspartate, which comprises
[20708] (a) increasing or generating the activity of a ATP-binding component of a transport system in the cytosol of a cell of a non-human organism or a part thereof, preferably a microorganism, a plant cell, a plant or a part thereof, as compared to a corresponding non-transformed wild type non-human organism or a part thereof; and
[20709] (b) growing the non-human organism or a part thereof under conditions which permit the production of aspartate or a composition comprising aspartate in said non-human organism or in the culture medium surrounding said non-human organism.

[20710] Accordingly, the present invention relates to a process for the production of phenylalanine, which comprises
[20711] (a) increasing or generating the activity of a ATP-binding component of a transport system in the cytosol of a cell of a non-human organism or a part thereof, preferably a microorganism, a plant cell, a plant or a part thereof, as compared to a corresponding non-transformed wild type non-human organism or a part thereof; and
[20712] (b) growing the non-human organism or a part thereof under conditions which permit the production of phenylalanine or a composition comprising phenylalanine in said non-human organism or in the culture medium surrounding said non-human organism.

[20713] Accordingly, the present invention relates to a process for the production of serine, which comprises
[20714] (a) increasing or generating the activity of a ATP-binding component of a transport system in the cytosol of a cell of a non-human organism or a part thereof, preferably a microorganism, a plant cell, a plant or a part thereof, as compared to a corresponding non-transformed wild type non-human organism or a part thereof; and
[20715] (b) growing the non-human organism or a part thereof under conditions which permit the production of serine or a composition comprising serine in said non-human organism or in the culture medium surrounding said non-human organism.

[20716] Accordingly, the present invention relates to a process for the production of tyrosine, which comprises
[20717] (a) increasing or generating the activity of a ATP-binding component of a transport system in the cytosol of a cell of a non-human organism or a part thereof, preferably a microorganism, a plant cell, a plant or a part thereof, as compared to a corresponding non-transformed wild type non-human organism or a part thereof; and
[20718] (b) growing the non-human organism or a part thereof under conditions which permit the production of tyrosine or a composition comprising tyrosine in said non-human organism or in the culture medium surrounding said non-human organism.

[20719] Accordingly, the present invention relates to a process for the production of alanine, which comprises
[20720] (a) increasing or generating the activity of a b0456-protein in the cytosol of a cell of a non-human organism or a part thereof, preferably a microorganism, a plant cell, a plant or a part thereof, as compared to a corresponding non-transformed wild type non-human organism or a part thereof; and
[20721] (b) growing the non-human organism or a part thereof under conditions which permit the production of alanine or a composition comprising alanine in said non-human organism or in the culture medium surrounding said non-human organism.

[20722] Accordingly, the present invention relates to a process for the production of aspartate, which comprises
[20723] (a) increasing or generating the activity of a membrane transport protein in the cytosol of a cell of a non-human organism or a part thereof, preferably a microorganism, a plant cell, a plant or a part thereof, as compared to a corresponding non-transformed wild type non-human organism or a part thereof; and
[20724] (b) growing the non-human organism or a part thereof under conditions which permit the production of aspartate or a composition comprising aspartate in said non-human organism or in the culture medium surrounding said non-human organism.

[20725] Accordingly, the present invention relates to a process for the production of phenylalanine, which comprises
[20726] (a) increasing or generating the activity of a membrane transport protein in the cytosol of a cell of a non-human organism or a part thereof, preferably a microorganism, a plant cell, a plant or a part thereof, as compared to a corresponding non-transformed wild type non-human organism or a part thereof; and
[20727] (b) growing the non-human organism or a part thereof under conditions which permit the production of phenylalanine or a composition comprising phenylalanine in said non-human organism or in the culture medium surrounding said non-human organism.

[20728] Accordingly, the present invention relates to a process for the production of tyrosine, which comprises
[20729] (a) increasing or generating the activity of a membrane transport protein in the cytosol of a cell of a non-human organism or a part thereof, preferably a microorganism, a plant cell, a plant or a part thereof, as compared to a corresponding non-transformed wild type non-human organism or a part thereof; and
[20730] (b) growing the non-human organism or a part thereof under conditions which permit the production of tyrosine or a composition comprising tyrosine in said non-human organism or in the culture medium surrounding said non-human organism.

[20731] Accordingly, the present invention relates to a process for the production of homoserine, which comprises
[20732] (a) increasing or generating the activity of a b0518-protein in the cytosol of a cell of a non-human organism or a part thereof, preferably a microorganism, a plant cell, a plant or a part thereof, as compared to a corresponding non-transformed wild type non-human organism or a part thereof; and
[20733] (b) growing the non-human organism or a part thereof under conditions which permit the production of homoserine or a composition comprising homoserine in said non-human organism or in the culture medium surrounding said non-human organism.

[20734] Accordingly, the present invention relates to a process for the production of aspartate, which comprises
[20735] (a) increasing or generating the activity of a isochorismate synthase in the cytosol of a cell of a non-human organism or a part thereof, preferably a microorganism, a plant cell, a plant or a part thereof, as compared to a corresponding non-transformed wild type non-human organism or a part thereof; and
[20736] (b) growing the non-human organism or a part thereof under conditions which permit the production of aspartate or a composition comprising aspartate in said non-human organism or in the culture medium surrounding said non-human organism.

[20737] Accordingly, the present invention relates to a process for the production of phenylalanine, which comprises
[20738] (a) increasing or generating the activity of a isochorismate synthase in the cytosol of a cell of a non-human organism or a part thereof, preferably a microorganism, a plant cell, a plant or a part thereof, as compared to a corresponding non-transformed wild type non-human organism or a part thereof; and
[20739] (b) growing the non-human organism or a part thereof under conditions which permit the production of phenylalanine or a composition comprising phenylalanine in said non-human organism or in the culture medium surrounding said non-human organism.

[20740] Accordingly, the present invention relates to a process for the production of serine, which comprises
[20741] (a) increasing or generating the activity of a isochorismate synthase in the cytosol of a cell of a non-human organism or a part thereof, preferably a microorganism, a plant cell, a plant or a part thereof, as compared to a corresponding non-transformed wild type non-human organism or a part thereof; and
[20742] (b) growing the non-human organism or a part thereof under conditions which permit the production of serine or a composition comprising serine in said non-human organism or in the culture medium surrounding said non-human organism.

[20743] Accordingly, the present invention relates to a process for the production of tyrosine, which comprises
[20744] (a) increasing or generating the activity of a isochorismate synthase in the cytosol of a cell of a non-human organism or a part thereof, preferably a microorganism, a plant cell, a plant or a part thereof, as compared to a corresponding non-transformed wild type non-human organism or a part thereof; and
[20745] (b) growing the non-human organism or a part thereof under conditions which permit the production of tyrosine or a composition comprising tyrosine in said non-human organism or in the culture medium surrounding said non-human organism.

[20746] Accordingly, the present invention relates to a process for the production of 3,4-dihydroxyphenylalanine (dopa), which comprises
[20747] (a) increasing or generating the activity of a isochorismate synthase in the cytosol of a cell of a non-human organism or a part thereof, preferably a microorganism, a plant cell, a plant or a part thereof, as compared to a corresponding non-transformed wild type non-human organism or a part thereof; and
[20748] (b) growing the non-human organism or a part thereof under conditions which permit the production of 3,4-dihydroxyphenylalanine (dopa) or a composition comprising 3,4-dihydroxyphenylalanine (dopa) in said non-human organism or in the culture medium surrounding said non-human organism.

[20749] Accordingly, the present invention relates to a process for the production of 5-oxoproline, which comprises
[20750] (a) increasing or generating the activity of a isochorismate synthase in the cytosol of a cell of a non-human organism or a part thereof, preferably a microorganism, a plant cell, a plant or a part thereof, as compared to a corresponding non-transformed wild type non-human organism or a part thereof; and
[20751] (b) growing the non-human organism or a part thereof under conditions which permit the production of 5-oxoproline or a composition comprising 5-oxoproline in said non-human organism or in the culture medium surrounding said non-human organism.

[20752] Accordingly, the present invention relates to a process for the production of tyrosine, which comprises
[20753] (a) increasing or generating the activity of a zinc transporter in the cytosol of a cell of a non-human organism or a part thereof, preferably a microorganism, a plant cell, a plant or a part thereof, as compared to a corresponding non-transformed wild type non-human organism or a part thereof; and
[20754] (b) growing the non-human organism or a part thereof under conditions which permit the production of tyrosine or a composition comprising tyrosine in said non-human organism or in the culture medium surrounding said non-human organism.

[20755] Accordingly, the present invention relates to a process for the production of tyrosine, which comprises
[20756] (a) increasing or generating the activity of a 3-deoxy-D-arabinoheptulosonate-7-phosphatesynthase in the cytosol of a cell of a non-human organism or a part thereof, preferably a microorganism, a plant cell, a plant or a part thereof, as compared to a corresponding non-transformed wild type non-human organism or a part thereof; and
[20757] (b) growing the non-human organism or a part thereof under conditions which permit the production of tyrosine or a composition comprising tyrosine in said non-human organism or in the culture medium surrounding said non-human organism.

[20758] Accordingly, the present invention relates to a process for the production of tyrosine, which comprises
[20759] (a) increasing or generating the activity of a b0801-protein in the cytosol of a cell of a non-human organism or a part thereof, preferably a microorganism, a plant cell, a plant or a part thereof, as compared to a corresponding non-transformed wild type non-human organism or a part thereof; and
[20760] (b) growing the non-human organism or a part thereof under conditions which permit the production of tyrosine or a composition comprising tyrosine in said non-human organism or in the culture medium surrounding said non-human organism.

[20761] Accordingly, the present invention relates to a process for the production of alanine, which comprises
[20762] (a) increasing or generating the activity of a asparaginase in the cytosol of a cell of a non-human organism or a part thereof, preferably a microorganism, a plant cell, a plant or a part thereof, as compared to a corresponding non-transformed wild type non-human organism or a part thereof; and
[20763] (b) growing the non-human organism or a part thereof under conditions which permit the production of alanine or a composition comprising alanine in said non-human organism or in the culture medium surrounding said non-human organism.

[20764] Accordingly, the present invention relates to a process for the production of glycine, which comprises
[20765] (a) increasing or generating the activity of a b0841-protein in the cytosol of a cell of a non-human organism or a part thereof, preferably a microorganism, a plant cell, a plant or a part thereof, as compared to a corresponding non-transformed wild type non-human organism or a part thereof; and
[20766] (b) growing the non-human organism or a part thereof under conditions which permit the production of glycine or a composition comprising glycine in said non-human organism or in the culture medium surrounding said non-human organism.

[20767] Accordingly, the present invention relates to a process for the production of homoserine, which comprises
[20768] (a) increasing or generating the activity of a b0841-protein in the cytosol of a cell of a non-human organism or a part thereof, preferably a microorganism, a plant cell, a plant or a part thereof, as compared to a corresponding non-transformed wild type non-human organism or a part thereof; and
[20769] (b) growing the non-human organism or a part thereof under conditions which permit the production of homoserine or a composition comprising homoserine in said non-human organism or in the culture medium surrounding said non-human organism.

[20770] Accordingly, the present invention relates to a process for the production of phenylalanine, which comprises
[20771] (a) increasing or generating the activity of a major facilitator superfamily transporter protein in the cytosol of a cell of a non-human organism or a part thereof, preferably a microorganism, a plant cell, a plant or a part thereof, as compared to a corresponding non-transformed wild type non-human organism or a part thereof; and
[20772] (b) growing the non-human organism or a part thereof under conditions which permit the production of phenylalanine or a composition comprising phenylalanine in said non-human organism or in the culture medium surrounding said non-human organism.

[20773] Accordingly, the present invention relates to a process for the production of serine, which comprises
[20774] (a) increasing or generating the activity of a major facilitator superfamily transporter protein in the cytosol of a cell of a non-human organism or a part thereof, preferably a microorganism, a plant cell, a plant or a part thereof, as compared to a corresponding non-transformed wild type non-human organism or a part thereof; and
[20775] (b) growing the non-human organism or a part thereof under conditions which permit the production of serine or a composition comprising serine in said non-human organism or in the culture medium surrounding said non-human organism.

[20776] Accordingly, the present invention relates to a process for the production of tyrosine, which comprises
[20777] (a) increasing or generating the activity of a major facilitator superfamily transporter protein in the cytosol of a cell of a non-human organism or a part thereof, preferably a microorganism, a plant cell, a plant or a part thereof, as compared to a corresponding non-transformed wild type non-human organism or a part thereof; and
[20778] (b) growing the non-human organism or a part thereof under conditions which permit the production of tyrosine or a composition comprising tyrosine in said non-human organism or in the culture medium surrounding said non-human organism.

[20779] Accordingly, the present invention relates to a process for the production of 5-oxoproline, which comprises
[20780] (a) increasing or generating the activity of a major facilitator superfamily transporter protein in the cytosol of a cell of a non-human organism or a part thereof, preferably a microorganism, a plant cell, a plant or a part thereof, as compared to a corresponding non-transformed wild type non-human organism or a part thereof; and
[20781] (b) growing the non-human organism or a part thereof under conditions which permit the production of 5-oxoproline or a composition comprising 5-oxoproline in said non-human organism or in the culture medium surrounding said non-human organism.

[20782] Accordingly, the present invention relates to a process for the production of citrulline, which comprises
[20783] (a) increasing or generating the activity of a b0917-protein in the cytosol of a cell of a non-human organism or a part thereof, preferably a microorganism, a plant cell, a plant or a part thereof, as compared to a corresponding non-transformed wild type non-human organism or a part thereof; and
[20784] (b) growing the non-human organism or a part thereof under conditions which permit the production of citrulline or a composition comprising citrulline in said non-human organism or in the culture medium surrounding said non-human organism.

[20785] Accordingly, the present invention relates to a process for the production of glycine, which comprises
[20786] (a) increasing or generating the activity of a b0917-protein in the cytosol of a cell of a non-human organism or a part thereof, preferably a microorganism, a plant cell, a plant or a part thereof, as compared to a corresponding non-transformed wild type non-human organism or a part thereof; and
[20787] (b) growing the non-human organism or a part thereof under conditions which permit the production of glycine or a composition comprising glycine in said non-human organism or in the culture medium surrounding said non-human organism.

[20788] Accordingly, the present invention relates to a process for the production of phenylalanine, which comprises
[20789] (a) increasing or generating the activity of a b0917-protein in the cytosol of a cell of a non-human organism or a part thereof, preferably a microorganism, a plant cell, a plant or a part thereof, as compared to a corresponding non-transformed wild type non-human organism or a part thereof; and
[20790] (b) growing the non-human organism or a part thereof under conditions which permit the production of phenylalanine or a composition comprising phenylalanine in said non-human organism or in the culture medium surrounding said non-human organism.

[20791] Accordingly, the present invention relates to a process for the production of 5-oxoproline, which comprises
[20792] (a) increasing or generating the activity of a b0917-protein in the cytosol of a cell of a non-human organism or a part thereof, preferably a microorganism, a plant cell, a plant or a part thereof, as compared to a corresponding non-transformed wild type non-human organism or a part thereof; and
[20793] (b) growing the non-human organism or a part thereof under conditions which permit the production of 5-oxoproline or a composition comprising 5-oxoproline in said non-human organism or in the culture medium surrounding said non-human organism.

[20794] Accordingly, the present invention relates to a process for the production of alanine, which comprises
[20795] (a) increasing or generating the activity of a methylglyoxal synthase in the cytosol of a cell of a non-human organism or a part thereof, preferably a microorganism, a plant cell, a plant or a part thereof, as compared to a corresponding non-transformed wild type non-human organism or a part thereof; and
[20796] (b) growing the non-human organism or a part thereof under conditions which permit the production of alanine or a composition comprising alanine in said non-human organism or in the culture medium surrounding said non-human organism.

[20797] Accordingly, the present invention relates to a process for the production of phenylalanine, which comprises
[20798] (a) increasing or generating the activity of a methylglyoxal synthase in the cytosol of a cell of a non-human organism or a part thereof, preferably a microorganism, a plant cell, a plant or a part thereof, as compared to a corresponding non-transformed wild type non-human organism or a part thereof; and
[20799] (b) growing the non-human organism or a part thereof under conditions which permit the production of phenylalanine or a composition comprising phenylalanine in said non-human organism or in the culture medium surrounding said non-human organism.

[20800] Accordingly, the present invention relates to a process for the production of tyrosine, which comprises
[20801] (a) increasing or generating the activity of a methylglyoxal synthase in the cytosol of a cell of a non-human organism or a part thereof, preferably a microorganism, a plant cell, a plant or a part thereof, as compared to a corresponding non-transformed wild type non-human organism or a part thereof; and
[20802] (b) growing the non-human organism or a part thereof under conditions which permit the production of tyrosine or a composition comprising tyrosine in said non-human organism or in the culture medium surrounding said non-human organism.

[20803] Accordingly, the present invention relates to a process for the production of phenylalanine, which comprises
[20804] (a) increasing or generating the activity of a phosphoanhydride phosphorylase in the cytosol of a cell of a non-human organism or a part thereof, preferably a microorganism, a plant cell, a plant or a part thereof, as compared to a corresponding non-transformed wild type non-human organism or a part thereof; and
[20805] (b) growing the non-human organism or a part thereof under conditions which permit the production of phenylalanine or a composition comprising phenylalanine in said non-human organism or in the culture medium surrounding said non-human organism.

[20806] Accordingly, the present invention relates to a process for the production of alanine, which comprises
[20807] (a) increasing or generating the activity of a b1003-protein in the cytosol of a cell of a non-human organism or a part thereof, preferably a microorganism, a plant cell, a plant or a part thereof, as compared to a corresponding non-transformed wild type non-human organism or a part thereof; and
[20808] (b) growing the non-human organism or a part thereof under conditions which permit the production of alanine or a composition comprising alanine in said non-human organism or in the culture medium surrounding said non-human organism.

[20809] Accordingly, the present invention relates to a process for the production of aspartate, which comprises
[20810] (a) increasing or generating the activity of a b1003-protein in the cytosol of a cell of a non-human organism or a part thereof, preferably a microorganism, a plant cell, a plant or a part thereof, as compared to a corresponding non-transformed wild type non-human organism or a part thereof; and
[20811] (b) growing the non-human organism or a part thereof under conditions which permit the production of aspartate or a composition comprising aspartate in said non-human organism or in the culture medium surrounding said non-human organism.

[20812] Accordingly, the present invention relates to a process for the production of phenylalanine, which comprises
[20813] (a) increasing or generating the activity of a b1003-protein in the cytosol of a cell of a non-human organism or a part thereof, preferably a microorganism, a plant cell, a plant or a part thereof, as compared to a corresponding non-transformed wild type non-human organism or a part thereof; and
[20814] (b) growing the non-human organism or a part thereof under conditions which permit the production of phenylalanine or a composition comprising phenylalanine in said non-human organism or in the culture medium surrounding said non-human organism.

[20815] Accordingly, the present invention relates to a process for the production of serine, which comprises
[20816] (a) increasing or generating the activity of a b1003-protein in the cytosol of a cell of a non-human organism or a part thereof, preferably a microorganism, a plant cell, a plant or a part thereof, as compared to a corresponding non-transformed wild type non-human organism or a part thereof; and
[20817] (b) growing the non-human organism or a part thereof under conditions which permit the production of serine or a composition comprising serine in said non-human organism or in the culture medium surrounding said non-human organism.

[20818] Accordingly, the present invention relates to a process for the production of tyrosine, which comprises
[20819] (a) increasing or generating the activity of a b1003-protein in the cytosol of a cell of a non-human organism or a part thereof, preferably a microorganism, a plant cell, a plant or a part thereof, as compared to a corresponding non-transformed wild type non-human organism or a part thereof; and
[20820] (b) growing the non-human organism or a part thereof under conditions which permit the production of tyrosine or a composition comprising tyrosine in said non-human organism or in the culture medium surrounding said non-human organism.

[20821] Accordingly, the present invention relates to a process for the production of 3,4-dihydroxyphenylalanine (dopa), which comprises
[20822] (a) increasing or generating the activity of a b1003-protein in the cytosol of a cell of a non-human organism or a part thereof, preferably a microorganism, a plant cell, a plant or a part thereof, as compared to a corresponding non-transformed wild type non-human organism or a part thereof; and
[20823] (b) growing the non-human organism or a part thereof under conditions which permit the production of 3,4-dihydroxyphenylalanine (dopa) or a composition comprising 3,4-dihydroxyphenylalanine (dopa) in said non-human organism or in the culture medium surrounding said non-human organism.

[20824] Accordingly, the present invention relates to a process for the production of 5-oxoproline, which comprises
[20825] (a) increasing or generating the activity of a b1003-protein in the cytosol of a cell of a non-human organism or a part thereof, preferably a microorganism, a plant cell, a plant or a part thereof, as compared to a corresponding non-transformed wild type non-human organism or a part thereof; and
[20826] (b) growing the non-human organism or a part thereof under conditions which permit the production of 5-oxoproline or a composition comprising 5-oxoproline in said non-human organism or in the culture medium surrounding said non-human organism.

[20827] Accordingly, the present invention relates to a process for the production of citrulline, which comprises
[20828] (a) increasing or generating the activity of a lipoprotein precursor in the cytosol of a cell of a non-human organism or a part thereof, preferably a microorganism, a plant cell, a plant or a part thereof, as compared to a corresponding non-transformed wild type non-human organism or a part thereof; and
[20829] (b) growing the non-human organism or a part thereof under conditions which permit the production of citrulline or a composition comprising citrulline in said non-human organism or in the culture medium surrounding said non-human organism.

[20830] Accordingly, the present invention relates to a process for the production of 5-oxoproline, which comprises
[20831] (a) increasing or generating the activity of a lipoprotein precursor in the cytosol of a cell of a non-human organism or a part thereof, preferably a microorganism, a plant cell, a plant or a part thereof, as compared to a corresponding non-transformed wild type non-human organism or a part thereof; and
[20832] (b) growing the non-human organism or a part thereof under conditions which permit the production of 5-oxoproline or a composition comprising 5-oxoproline in said non-human organism or in the culture medium surrounding said non-human organism.

[20833] Accordingly, the present invention relates to a process for the production of aspartate, which comprises
[20834] (a) increasing or generating the activity of a b1024-protein in the cytosol of a cell of a non-human organism or a part thereof, preferably a microorganism, a plant cell, a plant or a part thereof, as compared to a corresponding non-transformed wild type non-human organism or a part thereof; and
[20835] (b) growing the non-human organism or a part thereof under conditions which permit the production of aspartate or a composition comprising aspartate in said non-human organism or in the culture medium surrounding said non-human organism.

[20836] Accordingly, the present invention relates to a process for the production of aspartate, which comprises
[20837] (a) increasing or generating the activity of a multidrug resistance protein in the cytosol of a cell of a non-human organism or a part thereof, preferably a microorganism, a plant cell, a plant or a part thereof, as compared to a corresponding non-transformed wild type non-human organism or a part thereof; and
[20838] (b) growing the non-human organism or a part thereof under conditions which permit the production of aspartate or a composition comprising aspartate in said non-human organism or in the culture medium surrounding said non-human organism.

[20839] Accordingly, the present invention relates to a process for the production of tyrosine, which comprises
[20840] (a) increasing or generating the activity of a multidrug resistance protein in the cytosol of a cell of a non-human organism or a part thereof, preferably a microorganism, a plant cell, a plant or a part thereof, as compared to a corresponding non-transformed wild type non-human organism or a part thereof; and
[20841] (b) growing the non-human organism or a part thereof under conditions which permit the production of tyrosine or a composition comprising tyrosine in said non-human organism or in the culture medium surrounding said non-human organism.

[20842] Accordingly, the present invention relates to a process for the production of serine, which comprises
[20843] (a) increasing or generating the activity of a b1137-protein in the cytosol of a cell of a non-human organism or a part thereof, preferably a microorganism, a plant cell, a plant or a part thereof, as compared to a corresponding non-transformed wild type non-human organism or a part thereof; and
[20844] (b) growing the non-human organism or a part thereof under conditions which permit the production of serine or a composition comprising serine in said non-human organism or in the culture medium surrounding said non-human organism.

[20845] Accordingly, the present invention relates to a process for the production of phenylalanine, which comprises
[20846] (a) increasing or generating the activity of a b1155-protein in the cytosol of a cell of a non-human organism or a part thereof, preferably a microorganism, a plant cell, a plant or a part thereof, as compared to a corresponding non-transformed wild type non-human organism or a part thereof; and
[20847] (b) growing the non-human organism or a part thereof under conditions which permit the production of phenylalanine or a composition comprising phenylalanine in said non-human organism or in the culture medium surrounding said non-human organism.

[20848] Accordingly, the present invention relates to a process for the production of phenylalanine, which comprises
[20849] (a) increasing or generating the activity of a b1163-protein in the cytosol of a cell of a non-human organism or a part thereof, preferably a microorganism, a plant cell, a plant or a part thereof, as compared to a corresponding non-transformed wild type non-human organism or a part thereof; and
[20850] (b) growing the non-human organism or a part thereof under conditions which permit the production of phenylalanine or a composition comprising phenylalanine in said non-human organism or in the culture medium surrounding said non-human organism.

[20851] Accordingly, the present invention relates to a process for the production of tyrosine, which comprises
[20852] (a) increasing or generating the activity of a b1163-protein in the cytosol of a cell of a non-human organism or a part thereof, preferably a microorganism, a plant cell, a plant or a part thereof, as compared to a corresponding non-transformed wild type non-human organism or a part thereof; and
[20853] (b) growing the non-human organism or a part thereof under conditions which permit the production of tyrosine or a composition comprising tyrosine in said non-human organism or in the culture medium surrounding said non-human organism.

[20854] Accordingly, the present invention relates to a process for the production of citrulline, which comprises
[20855] (a) increasing or generating the activity of a b1179-protein in the cytosol of a cell of a non-human organism or a part thereof, preferably a microorganism, a plant cell, a plant or a part thereof, as compared to a corresponding non-transformed wild type non-human organism or a part thereof; and
[20856] (b) growing the non-human organism or a part thereof under conditions which permit the production of citrulline or a composition comprising citrulline in said non-human organism or in the culture medium surrounding said non-human organism.

[20857] Accordingly, the present invention relates to a process for the production of alanine, which comprises
[20858] (a) increasing or generating the activity of a sodium/proton antiporter in the cytosol of a cell of a non-human organism or a part thereof, preferably a microorganism, a plant cell, a plant or a part thereof, as compared to a corresponding non-transformed wild type non-human organism or a part thereof; and
[20859] (b) growing the non-human organism or a part thereof under conditions which permit the production of alanine or a composition comprising alanine in said non-human organism or in the culture medium surrounding said non-human organism.

[20860] Accordingly, the present invention relates to a process for the production of serine, which comprises
[20861] (a) increasing or generating the activity of a sodium/proton antiporter in the cytosol of a cell of a non-human organism or a part thereof, preferably a microorganism, a plant cell, a plant or a part thereof, as compared to a corresponding non-transformed wild type non-human organism or a part thereof; and
[20862] (b) growing the non-human organism or a part thereof under conditions which permit the production of serine or a composition comprising serine in said non-human organism or in the culture medium surrounding said non-human organism.

[20863] Accordingly, the present invention relates to a process for the production of citrulline, which comprises
[20864] (a) increasing or generating the activity of a b1205-protein in the cytosol of a cell of a non-human organism or a part thereof, preferably a microorganism, a plant cell, a plant or a part thereof, as compared to a corresponding non-transformed wild type non-human organism or a part thereof; and
[20865] (b) growing the non-human organism or a part thereof under conditions which permit the production of citrulline or a composition comprising citrulline in said non-human organism or in the culture medium surrounding said non-human organism.

[20866] Accordingly, the present invention relates to a process for the production of phenylalanine, which comprises
[20867] (a) increasing or generating the activity of a b1229-protein in the cytosol of a cell of a non-human organism or a part thereof, preferably a microorganism, a plant cell, a plant or a part thereof, as compared to a corresponding non-transformed wild type non-human organism or a part thereof; and
[20868] (b) growing the non-human organism or a part thereof under conditions which permit the production of phenylalanine or a composition comprising phenylalanine in said non-human organism or in the culture medium surrounding said non-human organism.

[20869] Accordingly, the present invention relates to a process for the production of tyrosine, which comprises
[20870] (a) increasing or generating the activity of a membrane protein in the cytosol of a cell of a non-human organism or a part thereof, preferably a microorganism, a plant cell, a plant or a part thereof, as compared to a corresponding non-transformed wild type non-human organism or a part thereof; and
[20871] (b) growing the non-human organism or a part thereof under conditions which permit the production of tyrosine or a composition comprising tyrosine in said non-human organism or in the culture medium surrounding said non-human organism.

[20872] Accordingly, the present invention relates to a process for the production of citrulline, which comprises
[20873] (a) increasing or generating the activity of a b1259-protein in the cytosol of a cell of a non-human organism or a part thereof, preferably a microorganism, a plant cell, a plant or a part thereof, as compared to a corresponding non-transformed wild type non-human organism or a part thereof; and
[20874] (b) growing the non-human organism or a part thereof under conditions which permit the production of citrulline or a composition comprising citrulline in said non-human organism or in the culture medium surrounding said non-human organism.

[20875] Accordingly, the present invention relates to a process for the production of 5-oxoproline, which comprises
[20876] (a) increasing or generating the activity of a b1259-protein in the cytosol of a cell of a non-human organism or a part thereof, preferably a microorganism, a plant cell, a plant or a part thereof, as compared to a corresponding non-transformed wild type non-human organism or a part thereof; and
[20877] (b) growing the non-human organism or a part thereof under conditions which permit the production of 5-oxoproline or a composition comprising 5-oxoproline in said non-human organism or in the culture medium surrounding said non-human organism.

[20878] Accordingly, the present invention relates to a process for the production of tyrosine, which comprises
[20879] (a) increasing or generating the activity of a tryptophan biosynthesis protein in the cytosol of a cell of a non-human organism or a part thereof, preferably a microorganism, a plant cell, a plant or a part thereof, as compared to a corresponding non-transformed wild type non-human organism or a part thereof; and
[20880] (b) growing the non-human organism or a part thereof under conditions which permit the production of tyrosine or a composition comprising tyrosine in said non-human organism or in the culture medium surrounding said non-human organism.

[20881] Accordingly, the present invention relates to a process for the production of phenylalanine, which comprises
[20882] (a) increasing or generating the activity of a anthranilate synthase component I in the cytosol of a cell of a non-human organism or a part thereof, preferably a microorganism, a plant cell, a plant or a part thereof, as compared to a corresponding non-transformed wild type non-human organism or a part thereof; and
[20883] (b) growing the non-human organism or a part thereof under conditions which permit the production of phenylalanine or a composition comprising phenylalanine in said non-human organism or in the culture medium surrounding said non-human organism.

[20884] Accordingly, the present invention relates to a process for the production of glycine, which comprises
[20885] (a) increasing or generating the activity of a b1280-protein in the cytosol of a cell of a non-human organism or a part thereof, preferably a microorganism, a plant cell, a plant or a part thereof, as compared to a corresponding non-transformed wild type non-human organism or a part thereof; and
[20886] (b) growing the non-human organism or a part thereof under conditions which permit the production of glycine or a composition comprising glycine in said non-human organism or in the culture medium surrounding said non-human organism.

[20887] Accordingly, the present invention relates to a process for the production of serine, which comprises
[20888] (a) increasing or generating the activity of a b1280-protein in the cytosol of a cell of a non-human organism or a part thereof, preferably a microorganism, a plant cell, a plant or a part thereof, as compared to a corresponding non-transformed wild type non-human organism or a part thereof; and
[20889] (b) growing the non-human organism or a part thereof under conditions which permit the production of serine or a composition comprising serine in said non-human organism or in the culture medium surrounding said non-human organism.

[20890] Accordingly, the present invention relates to a process for the production of 5-oxoproline, which comprises
[20891] (a) increasing or generating the activity of a b1280-protein in the cytosol of a cell of a non-human organism or a part thereof, preferably a microorganism, a plant cell, a plant or a part thereof, as compared to a corresponding non-transformed wild type non-human organism or a part thereof; and
[20892] (b) growing the non-human organism or a part thereof under conditions which permit the production of 5-oxoproline or a composition comprising 5-oxoproline in said non-human organism or in the culture medium surrounding said non-human organism.

[20893] Accordingly, the present invention relates to a process for the production of alanine, which comprises
[20894] (a) increasing or generating the activity of a glutamine synthetase in the cytosol of a cell of a non-human organism or a part thereof, preferably a microorganism, a plant cell, a plant or a part thereof, as compared to a corresponding non-transformed wild type non-human organism or a part thereof; and
[20895] (b) growing the non-human organism or a part thereof under conditions which permit the production of alanine or a composition comprising alanine in said non-human organism or in the culture medium surrounding said non-human organism.

[20896] Accordingly, the present invention relates to a process for the production of glycine, which comprises
[20897] (a) increasing or generating the activity of a glutamine synthetase in the cytosol of a cell of a non-human organism or a part thereof, preferably a microorganism, a plant cell, a plant or a part thereof, as compared to a corresponding non-transformed wild type non-human organism or a part thereof; and
[20898] (b) growing the non-human organism or a part thereof under conditions which permit the production of glycine or a composition comprising glycine in said non-human organism or in the culture medium surrounding said non-human organism.

[20899] Accordingly, the present invention relates to a process for the production of phenylalanine, which comprises
[20900] (a) increasing or generating the activity of a aldehyde dehydrogenase in the cytosol of a cell of a non-human organism or a part thereof, preferably a microorganism, a plant cell, a plant or a part thereof, as compared to a corresponding non-transformed wild type non-human organism or a part thereof; and
[20901] (b) growing the non-human organism or a part thereof under conditions which permit the production of phenylalanine or a composition comprising phenylalanine in said non-human organism or in the culture medium surrounding said non-human organism.

[20902] Accordingly, the present invention relates to a process for the production of tyrosine, which comprises
[20903] (a) increasing or generating the activity of a aldehyde dehydrogenase in the cytosol of a cell of a non-human organism or a part thereof, preferably a microorganism, a plant cell, a plant or a part thereof, as compared to a corresponding non-transformed wild type non-human organism or a part thereof; and
[20904] (b) growing the non-human organism or a part thereof under conditions which permit the production of tyrosine or a composition comprising tyrosine in said non-human organism or in the culture medium surrounding said non-human organism.

[20905] Accordingly, the present invention relates to a process for the production of citrulline, which comprises
[20906] (a) increasing or generating the activity of a ABC transporter substrate-binding protein in the cytosol of a cell of a non-human organism or a part thereof, preferably a microorganism, a plant cell, a plant or a part thereof, as compared to a corresponding non-transformed wild type non-human organism or a part thereof; and
[20907] (b) growing the non-human organism or a part thereof under conditions which permit the production of citrulline or a composition comprising citrulline in said non-human organism or in the culture medium surrounding said non-human organism.

[20908] Accordingly, the present invention relates to a process for the production of citrulline, which comprises
[20909] (a) increasing or generating the activity of a b1330-protein in the cytosol of a cell of a non-human organism or a part thereof, preferably a microorganism, a plant cell, a plant or a part thereof, as compared to a corresponding non-transformed wild type non-human organism or a part thereof; and
[20910] (b) growing the non-human organism or a part thereof under conditions which permit the production of citrulline or a composition comprising citrulline in said non-human organism or in the culture medium surrounding said non-human organism.

[20911] Accordingly, the present invention relates to a process for the production of phenylalanine, which comprises
[20912] (a) increasing or generating the activity of a ATP-dependent RNA helicase in the cytosol of a cell of a non-human organism or a part thereof, preferably a microorganism, a plant cell, a plant or a part thereof, as compared to a corresponding non-transformed wild type non-human organism or a part thereof; and
[20913] (b) growing the non-human organism or a part thereof under conditions which permit the production of phenylalanine or a composition comprising phenylalanine in said non-human organism or in the culture medium surrounding said non-human organism.

[20914] Accordingly, the present invention relates to a process for the production of alanine, which comprises
[20915] (a) increasing or generating the activity of a restriction alleviation protein in the cytosol of a cell of a non-human organism or a part thereof, preferably a microorganism, a plant cell, a plant or a part thereof, as compared to a corresponding non-transformed wild type non-human organism or a part thereof; and
[20916] (b) growing the non-human organism or a part thereof under conditions which permit the production of alanine or a composition comprising alanine in said non-human organism or in the culture medium surrounding said non-human organism.

[20917] Accordingly, the present invention relates to a process for the production of glycine, which comprises
[20918] (a) increasing or generating the activity of a restriction alleviation protein in the cytosol of a cell of a non-human organism or a part thereof, preferably a microorganism, a plant cell, a plant or a part thereof, as compared to a corresponding non-transformed wild type non-human organism or a part thereof; and
[20919] (b) growing the non-human organism or a part thereof under conditions which permit the production of glycine or a composition comprising glycine in said non-human organism or in the culture medium surrounding said non-human organism.

[20920] Accordingly, the present invention relates to a process for the production of 5-oxoproline, which comprises
[20921] (a) increasing or generating the activity of a lipoprotein precursor in the cytosol of a cell of a non-human organism or a part thereof, preferably a microorganism, a plant cell, a plant or a part thereof, as compared to a corresponding non-transformed wild type non-human organism or a part thereof; and
[20922] (b) growing the non-human organism or a part thereof under conditions which permit the production of 5-oxoproline or a composition comprising 5-oxoproline in said non-human organism or in the culture medium surrounding said non-human organism.

[20923] Accordingly, the present invention relates to a process for the production of alanine, which comprises
[20924] (a) increasing or generating the activity of a b1445-protein in the cytosol of a cell of a non-human organism or a part thereof, preferably a microorganism, a plant cell, a plant or a part thereof, as compared to a corresponding non-transformed wild type non-human organism or a part thereof; and
[20925] (b) growing the non-human organism or a part thereof under conditions which permit the production of alanine or a composition comprising alanine in said non-human organism or in the culture medium surrounding said non-human organism.

[20926] Accordingly, the present invention relates to a process for the production of citrulline, which comprises
[20927] (a) increasing or generating the activity of a b1445-protein in the cytosol of a cell of a non-human organism or a part thereof, preferably a microorganism, a plant cell, a plant or a part thereof, as compared to a corresponding non-transformed wild type non-human organism or a part thereof; and
[20928] (b) growing the non-human organism or a part thereof under conditions which permit the production of citrulline or a composition comprising citrulline in said non-human organism or in the culture medium surrounding said non-human organism.

[20929] Accordingly, the present invention relates to a process for the production of glycine, which comprises
[20930] (a) increasing or generating the activity of a b1445-protein in the cytosol of a cell of a non-human organism or a part thereof, preferably a microorganism, a plant cell, a plant or a part thereof, as compared to a corresponding non-transformed wild type non-human organism or a part thereof; and
[20931] (b) growing the non-human organism or a part thereof under conditions which permit the production of glycine or a composition comprising glycine in said non-human organism or in the culture medium surrounding said non-human organism.

[20932] Accordingly, the present invention relates to a process for the production of phenylalanine, which comprises
[20933] (a) increasing or generating the activity of a b1445-protein in the cytosol of a cell of a non-human organism or a part thereof, preferably a microorganism, a plant cell, a plant or a part thereof, as compared to a corresponding non-transformed wild type non-human organism or a part thereof; and
[20934] (b) growing the non-human organism or a part thereof under conditions which permit the production of phenylalanine or a composition comprising phenylalanine in said non-human organism or in the culture medium surrounding said non-human organism.

[20935] Accordingly, the present invention relates to a process for the production of serine, which comprises
[20936] (a) increasing or generating the activity of a b1445-protein in the cytosol of a cell of a non-human organism or a part thereof, preferably a microorganism, a plant cell, a plant or a part thereof, as compared to a corresponding non-transformed wild type non-human organism or a part thereof; and
[20937] (b) growing the non-human organism or a part thereof under conditions which permit the production of serine or a composition comprising serine in said non-human organism or in the culture medium surrounding said non-human organism.

[20938] Accordingly, the present invention relates to a process for the production of alanine, which comprises
[20939] (a) increasing or generating the activity of a NADP-dependent malic enzyme in the cytosol of a cell of a non-human organism or a part thereof, preferably a microorganism, a plant cell, a plant or a part thereof, as compared to a corresponding non-transformed wild type non-human organism or a part thereof; and
[20940] (b) growing the non-human organism or a part thereof under conditions which permit the production of alanine or a composition comprising alanine in said non-human organism or in the culture medium surrounding said non-human organism.

[20941] Accordingly, the present invention relates to a process for the production of glycine, which comprises
[20942] (a) increasing or generating the activity of a NADP-dependent malic enzyme in the cytosol of a cell of a non-human organism or a part thereof, preferably a microorganism, a plant cell, a plant or a part thereof, as compared to a corresponding non-transformed wild type non-human organism or a part thereof; and
[20943] (b) growing the non-human organism or a part thereof under conditions which permit the production of glycine or a composition comprising glycine in said non-human organism or in the culture medium surrounding said non-human organism.

[20944] Accordingly, the present invention relates to a process for the production of phenylalanine, which comprises
[20945] (a) increasing or generating the activity of a NADP-dependent malic enzyme in the cytosol of a cell of a non-human organism or a part thereof, preferably a microorganism, a plant cell, a plant or a part thereof, as compared to a corresponding non-transformed wild type non-human organism or a part thereof; and
[20946] (b) growing the non-human organism or a part thereof under conditions which permit the production of phenylalanine or a composition comprising phenylalanine in said non-human organism or in the culture medium surrounding said non-human organism.

[20947] Accordingly, the present invention relates to a process for the production of serine, which comprises
[20948] (a) increasing or generating the activity of a NADP-dependent malic enzyme in the cytosol of a cell of a non-human organism or a part thereof, preferably a microorganism, a plant cell, a plant or a part thereof, as compared to a corresponding non-transformed wild type non-human organism or a part thereof; and
[20949] (b) growing the non-human organism or a part thereof under conditions which permit the production of serine or a composition comprising serine in said non-human organism or in the culture medium surrounding said non-human organism.

[20950] Accordingly, the present invention relates to a process for the production of tyrosine, which comprises
[20951] (a) increasing or generating the activity of a NADP-dependent malic enzyme in the cytosol of a cell of a non-human organism or a part thereof, preferably a microorganism, a plant cell, a plant or a part thereof, as compared to a corresponding non-transformed wild type non-human organism or a part thereof; and
[20952] (b) growing the non-human organism or a part thereof under conditions which permit the production of tyrosine or a composition comprising tyrosine in said non-human organism or in the culture medium surrounding said non-human organism.

[20953] Accordingly, the present invention relates to a process for the production of asparagine, which comprises
[20954] (a) increasing or generating the activity of a b1522-protein in the cytosol of a cell of a non-human organism or a part thereof, preferably a microorganism, a plant cell, a plant or a part thereof, as compared to a corresponding non-transformed wild type non-human organism or a part thereof; and
[20955] (b) growing the non-human organism or a part thereof under conditions which permit the production of asparagine or a composition comprising asparagine in said non-human organism or in the culture medium surrounding said non-human organism.

[20956] Accordingly, the present invention relates to a process for the production of aspartate, which comprises
[20957] (a) increasing or generating the activity of a b1522-protein in the cytosol of a cell of a non-human organism or a part thereof, preferably a microorganism, a plant cell, a plant or a part thereof, as compared to a corresponding non-transformed wild type non-human organism or a part thereof; and
[20958] (b) growing the non-human organism or a part thereof under conditions which permit the production of aspartate or a composition comprising aspartate in said non-human organism or in the culture medium surrounding said non-human organism.

[20959] Accordingly, the present invention relates to a process for the production of phenylalanine, which comprises
[20960] (a) increasing or generating the activity of a b1522-protein in the cytosol of a cell of a non-human organism or a part thereof, preferably a microorganism, a plant cell, a plant or a part thereof, as compared to a corresponding non-transformed wild type non-human organism or a part thereof; and
[20961] (b) growing the non-human organism or a part thereof under conditions which permit the production of phenylalanine or a composition comprising phenylalanine in said non-human organism or in the culture medium surrounding said non-human organism.

[20962] Accordingly, the present invention relates to a process for the production of serine, which comprises
[20963] (a) increasing or generating the activity of a b1522-protein in the cytosol of a cell of a non-human organism or a part thereof, preferably a microorganism, a plant cell, a plant or a part thereof, as compared to a corresponding non-transformed wild type non-human organism or a part thereof; and
[20964] (b) growing the non-human organism or a part thereof under conditions which permit the production of serine or a composition comprising serine in said non-human organism or in the culture medium surrounding said non-human organism.

[20965] Accordingly, the present invention relates to a process for the production of tyrosine, which comprises
[20966] (a) increasing or generating the activity of a b1522-protein in the cytosol of a cell of a non-human organism or a part thereof, preferably a microorganism, a plant cell, a plant or a part thereof, as compared to a corresponding non-transformed wild type non-human organism or a part thereof; and
[20967] (b) growing the non-human organism or a part thereof under conditions which permit the production of tyrosine or a composition comprising tyrosine in said non-human organism or in the culture medium surrounding said non-human organism.

[20968] Accordingly, the present invention relates to a process for the production of 5-oxoproline, which comprises
[20969] (a) increasing or generating the activity of a b1522-protein in the cytosol of a cell of a non-human organism or a part thereof, preferably a microorganism, a plant cell, a plant or a part thereof, as compared to a corresponding non-transformed wild type non-human organism or a part thereof; and
[20970] (b) growing the non-human organism or a part thereof under conditions which permit the production of 5-oxoproline or a composition comprising 5-oxoproline in said non-human organism or in the culture medium surrounding said non-human organism.

[20971] Accordingly, the present invention relates to a process for the production of tyrosine, which comprises
[20972] (a) increasing or generating the activity of a b1583-protein in the cytosol of a cell of a non-human organism or a part thereof, preferably a microorganism, a plant cell, a plant or a part thereof, as compared to a corresponding non-transformed wild type non-human organism or a part thereof; and
[20973] (b) growing the non-human organism or a part thereof under conditions which permit the production of tyrosine or a composition comprising tyrosine in said non-human organism or in the culture medium surrounding said non-human organism.

[20974] Accordingly, the present invention relates to a process for the production of aspartate, which comprises
[20975] (a) increasing or generating the activity of a Fe—S subunit of oxidoreductase in the cytosol of a cell of a non-human organism or a part thereof, preferably a microorganism, a plant cell, a plant or a part thereof, as compared to a corresponding non-transformed wild type non-human organism or a part thereof; and
[20976] (b) growing the non-human organism or a part thereof under conditions which permit the production of aspartate or a composition comprising aspartate in said non-human organism or in the culture medium surrounding said non-human organism.

[20977] Accordingly, the present invention relates to a process for the production of phenylalanine, which comprises
[20978] (a) increasing or generating the activity of a acid shock protein in the cytosol of a cell of a non-human organism or a part thereof, preferably a microorganism, a plant cell, a plant or a part thereof, as compared to a corresponding non-transformed wild type non-human organism or a part thereof; and
[20979] (b) growing the non-human organism or a part thereof under conditions which permit the production of phenylalanine or a composition comprising phenylalanine in said non-human organism or in the culture medium surrounding said non-human organism.

[20980] Accordingly, the present invention relates to a process for the production of tyrosine, which comprises
[20981] (a) increasing or generating the activity of a acid shock protein in the cytosol of a cell of a non-human organism or a part thereof, preferably a microorganism, a plant cell, a plant or a part thereof, as compared to a corresponding non-transformed wild type non-human organism or a part thereof; and
[20982] (b) growing the non-human organism or a part thereof under conditions which permit the production of tyrosine or a composition comprising tyrosine in said non-human organism or in the culture medium surrounding said non-human organism.

[20983] Accordingly, the present invention relates to a process for the production of alanine, which comprises
[20984] (a) increasing or generating the activity of a methylglyoxalase in the cytosol of a cell of a non-human organism or a part thereof, preferably a microorganism, a plant cell, a plant or a part thereof, as compared to a corresponding non-transformed wild type non-human organism or a part thereof; and
[20985] (b) growing the non-human organism or a part thereof under conditions which permit the production of alanine or a composition comprising alanine in said non-human organism or in the culture medium surrounding said non-human organism.

[20986] Accordingly, the present invention relates to a process for the production of aspartate, which comprises
[20987] (a) increasing or generating the activity of a b1670-protein in the cytosol of a cell of a non-human organism or a part thereof, preferably a microorganism, a plant cell, a plant or a part thereof, as compared to a corresponding non-transformed wild type non-human organism or a part thereof; and
[20988] (b) growing the non-human organism or a part thereof under conditions which permit the production of aspartate or a composition comprising aspartate in said non-human organism or in the culture medium surrounding said non-human organism.

[20989] Accordingly, the present invention relates to a process for the production of aspartate, which comprises
[20990] (a) increasing or generating the activity of a b1672-protein in the cytosol of a cell of a non-human organism or a part thereof, preferably a microorganism, a plant cell, a plant or a part thereof, as compared to a corresponding non-transformed wild type non-human organism or a part thereof; and
[20991] (b) growing the non-human organism or a part thereof under conditions which permit the production of aspartate or a composition comprising aspartate in said non-human organism or in the culture medium surrounding said non-human organism.

[20992] Accordingly, the present invention relates to a process for the production of alanine, which comprises
[20993] (a) increasing or generating the activity of a arginine N-succinyltransferase in the cytosol of a cell of a non-human organism or a part thereof, preferably a microorganism, a plant cell, a plant or a part thereof, as compared to a corresponding non-transformed wild type non-human organism or a part thereof; and
[20994] (b) growing the non-human organism or a part thereof under conditions which permit the production of alanine or a composition comprising alanine in said non-human organism or in the culture medium surrounding said non-human organism.

[20995] Accordingly, the present invention relates to a process for the production of aspartate, which comprises
[20996] (a) increasing or generating the activity of a ABC transporter permease protein in the cytosol of a cell of a non-human organism or a part thereof, preferably a microorganism, a plant cell, a plant or a part thereof, as compared to a corresponding non-transformed wild type non-human organism or a part thereof; and
[20997] (b) growing the non-human organism or a part thereof under conditions which permit the production of aspartate or a composition comprising aspartate in said non-human organism or in the culture medium surrounding said non-human organism.

[20998] Accordingly, the present invention relates to a process for the production of tyrosine, which comprises
[20999] (a) increasing or generating the activity of a ABC transporter permease protein in the cytosol of a cell of a non-human organism or a part thereof, preferably a microorganism, a plant cell, a plant or a part thereof, as compared to a corresponding non-transformed wild type non-human organism or a part thereof; and
[21000] (b) growing the non-human organism or a part thereof under conditions which permit the production of tyrosine or a composition comprising tyrosine in said non-human organism or in the culture medium surrounding said non-human organism.

[21001] Accordingly, the present invention relates to a process for the production of aspartate, which comprises
[21002] (a) increasing or generating the activity of a transport protein in the cytosol of a cell of a non-human organism or a part thereof, preferably a microorganism, a plant cell, a plant or a part thereof, as compared to a corresponding non-transformed wild type non-human organism or a part thereof; and
[21003] (b) growing the non-human organism or a part thereof under conditions which permit the production of aspartate or a composition comprising aspartate in said non-human organism or in the culture medium surrounding said non-human organism.

[21004] Accordingly, the present invention relates to a process for the production of aspartate, which comprises
[21005] (a) increasing or generating the activity of a b1837-protein in the cytosol of a cell of a non-human organism or a part thereof, preferably a microorganism, a plant cell, a plant or a part thereof, as compared to a corresponding non-transformed wild type non-human organism or a part thereof; and
[21006] (b) growing the non-human organism or a part thereof under conditions which permit the production of aspartate or a composition comprising aspartate in said non-human organism or in the culture medium surrounding said non-human organism.

[21007] Accordingly, the present invention relates to a process for the production of aspartate, which comprises
[21008] (a) increasing or generating the activity of a serine/threonine-protein phosphatase in the cytosol of a cell of a non-human organism or a part thereof, preferably a microorganism, a plant cell, a plant or a part thereof, as compared to a corresponding non-transformed wild type non-human organism or a part thereof; and
[21009] (b) growing the non-human organism or a part thereof under conditions which permit the production of aspartate or a composition comprising aspartate in said non-human organism or in the culture medium surrounding said non-human organism.

[21010] Accordingly, the present invention relates to a process for the production of aspartate, which comprises
[21011] (a) increasing or generating the activity of a protease in the cytosol of a cell of a non-human organism or a part thereof, preferably a microorganism, a plant cell, a plant or a part thereof, as compared to a corresponding non-transformed wild type non-human organism or a part thereof; and
[21012] (b) growing the non-human organism or a part thereof under conditions which permit the production of aspartate or a composition comprising aspartate in said non-human organism or in the culture medium surrounding said non-human organism.

[21013] Accordingly, the present invention relates to a process for the production of serine, which comprises
[21014] (a) increasing or generating the activity of a protease in the cytosol of a cell of a non-human organism or a part thereof, preferably a microorganism, a plant cell, a plant or a part thereof, as compared to a corresponding non-transformed wild type non-human organism or a part thereof; and
[21015] (b) growing the non-human organism or a part thereof under conditions which permit the production of serine or a composition comprising serine in said non-human organism or in the culture medium surrounding said non-human organism.

[21016] Accordingly, the present invention relates to a process for the production of asparagine, which comprises
[21017] (a) increasing or generating the activity of a pyruvate kinase in the cytosol of a cell of a non-human organism or a part thereof, preferably a microorganism, a plant cell, a plant or a part thereof, as compared to a corresponding non-transformed wild type non-human organism or a part thereof; and
[21018] (b) growing the non-human organism or a part thereof under conditions which permit the production of asparagine or a composition comprising asparagine in said non-human organism or in the culture medium surrounding said non-human organism.

[21019] Accordingly, the present invention relates to a process for the production of tyrosine, which comprises
[21020] (a) increasing or generating the activity of a cytochrome c-type protein in the cytosol of a cell of a non-human organism or a part thereof, preferably a microorganism, a plant cell, a plant or a part thereof, as compared to a corresponding non-transformed wild type non-human organism or a part thereof; and
[21021] (b) growing the non-human organism or a part thereof under conditions which permit the production of tyrosine or a composition comprising tyrosine in said non-human organism or in the culture medium surrounding said non-human organism.

[21022] Accordingly, the present invention relates to a process for the production of phenylalanine, which comprises
[21023] (a) increasing or generating the activity of a trehalose-phosphatase in the cytosol of a cell of a non-human organism or a part thereof, preferably a microorganism, a plant cell, a plant or a part thereof, as compared to a corresponding non-transformed wild type non-human organism or a part thereof; and
[21024] (b) growing the non-human organism or a part thereof under conditions which permit the production of phenylalanine or a composition comprising phenylalanine in said non-human organism or in the culture medium surrounding said non-human organism.

[21025] Accordingly, the present invention relates to a process for the production of tyrosine, which comprises
[21026] (a) increasing or generating the activity of a trehalose-phosphatase in the cytosol of a cell of a non-human organism or a part thereof, preferably a microorganism, a plant cell, a plant or a part thereof, as compared to a corresponding non-transformed wild type non-human organism or a part thereof; and
[21027] (b) growing the non-human organism or a part thereof under conditions which permit the production of tyrosine or a composition comprising tyrosine in said non-human organism or in the culture medium surrounding said non-human organism.

[21028] Accordingly, the present invention relates to a process for the production of serine, which comprises
[21029] (a) increasing or generating the activity of a b1898-protein in the cytosol of a cell of a non-human organism or a part thereof, preferably a microorganism, a plant cell, a plant or a part thereof, as compared to a corresponding non-transformed wild type non-human organism or a part thereof; and
[21030] (b) growing the non-human organism or a part thereof under conditions which permit the production of serine or a composition comprising serine in said non-human organism or in the culture medium surrounding said non-human organism.

[21031] Accordingly, the present invention relates to a process for the production of serine, which comprises
[21032] (a) increasing or generating the activity of a b1930-protein in the cytosol of a cell of a non-human organism or a part thereof, preferably a microorganism, a plant cell, a plant or a part thereof, as compared to a corresponding non-transformed wild type non-human organism or a part thereof; and
[21033] (b) growing the non-human organism or a part thereof under conditions which permit the production of serine or a composition comprising serine in said non-human organism or in the culture medium surrounding said non-human organism.

[21034] Accordingly, the present invention relates to a process for the production of aspartate, which comprises
[21035] (a) increasing or generating the activity of a transport protein in the cytosol of a cell of a non-human organism or a part thereof, preferably a microorganism, a plant cell, a plant or a part thereof, as compared to a corresponding non-transformed wild type non-human organism or a part thereof; and
[21036] (b) growing the non-human organism or a part thereof under conditions which permit the production of aspartate or a composition comprising aspartate in said non-human organism or in the culture medium surrounding said non-human organism.

[21037] Accordingly, the present invention relates to a process for the production of tyrosine, which comprises
[21038] (a) increasing or generating the activity of a O-antigen chain length determinant in the cytosol of a cell of a non-human organism or a part thereof, preferably a microorganism, a plant cell, a plant or a part thereof, as compared to a corresponding non-transformed wild type non-human organism or a part thereof; and
[21039] (b) growing the non-human organism or a part thereof under conditions which permit the production of tyrosine or a composition comprising tyrosine in said non-human organism or in the culture medium surrounding said non-human organism.

[21040] Accordingly, the present invention relates to a process for the production of aspartate, which comprises
[21041] (a) increasing or generating the activity of a b2032-protein in the cytosol of a cell of a non-human organism or a part thereof, preferably a microorganism, a plant cell, a plant or a part thereof, as compared to a corresponding non-transformed wild type non-human organism or a part thereof; and
[21042] (b) growing the non-human organism or a part thereof under conditions which permit the production of aspartate or a composition comprising aspartate in said non-human organism or in the culture medium surrounding said non-human organism.

[21043] Accordingly, the present invention relates to a process for the production of aspartate, which comprises
[21044] (a) increasing or generating the activity of a transport protein in the cytosol of a cell of a non-human organism or a part thereof, preferably a microorganism, a plant cell, a plant or a part thereof, as compared to a corresponding non-transformed wild type non-human organism or a part thereof; and
[21045] (b) growing the non-human organism or a part thereof under conditions which permit the production of aspartate or a composition comprising aspartate in said non-human organism or in the culture medium surrounding said non-human organism.

[21046] Accordingly, the present invention relates to a process for the production of phenylalanine, which comprises
[21047] (a) increasing or generating the activity of a transport protein in the cytosol of a cell of a non-human organism or a part thereof, preferably a microorganism, a plant cell, a plant or a part thereof, as compared to a corresponding non-transformed wild type non-human organism or a part thereof; and
[21048] (b) growing the non-human organism or a part thereof under conditions which permit the production of phenylalanine or a composition comprising phenylalanine in said non-human organism or in the culture medium surrounding said non-human organism.

[21049] Accordingly, the present invention relates to a process for the production of serine, which comprises
[21050] (a) increasing or generating the activity of a transport protein in the cytosol of a cell of a non-human organism or a part thereof, preferably a microorganism, a plant cell, a plant or a part thereof, as compared to a corresponding non-transformed wild type non-human organism or a part thereof; and
[21051] (b) growing the non-human organism or a part thereof under conditions which permit the production of serine or a composition comprising serine in said non-human organism or in the culture medium surrounding said non-human organism.

[21052] Accordingly, the present invention relates to a process for the production of tyrosine, which comprises
[21053] (a) increasing or generating the activity of a transport protein in the cytosol of a cell of a non-human organism or a part thereof, preferably a microorganism, a plant cell, a plant or a part thereof, as compared to a corresponding non-transformed wild type non-human organism or a part thereof; and
[21054] (b) growing the non-human organism or a part thereof under conditions which permit the production of tyrosine or a composition comprising tyrosine in said non-human organism or in the culture medium surrounding said non-human organism.

[21055] Accordingly, the present invention relates to a process for the production of 5-oxoproline, which comprises
[21056] (a) increasing or generating the activity of a uridine/cytidine kinase in the cytosol of a cell of a non-human organism or a part thereof, preferably a microorganism, a plant cell, a plant or a part thereof, as compared to a corresponding non-transformed wild type non-human organism or a part thereof; and
[21057] (b) growing the non-human organism or a part thereof under conditions which permit the production of 5-oxoproline or a composition comprising 5-oxoproline in said non-human organism or in the culture medium surrounding said non-human organism.

[21058] Accordingly, the present invention relates to a process for the production of aspartate, which comprises
[21059] (a) increasing or generating the activity of a b2107-protein in the cytosol of a cell of a non-human organism or a part thereof, preferably a microorganism, a plant cell, a plant or a part thereof, as compared to a corresponding non-transformed wild type non-human organism or a part thereof; and
[21060] (b) growing the non-human organism or a part thereof under conditions which permit the production of aspartate or a composition comprising aspartate in said non-human organism or in the culture medium surrounding said non-human organism.

[21061] Accordingly, the present invention relates to a process for the production of aspartate, which comprises
[21062] (a) increasing or generating the activity of a ABC transporter permease protein in the cytosol of a cell of a non-human organism or a part thereof, preferably a microorganism, a plant cell, a plant or a part thereof, as compared to a corresponding non-transformed wild type non-human organism or a part thereof; and
[21063] (b) growing the non-human organism or a part thereof under conditions which permit the production of aspartate or a composition comprising aspartate in said non-human organism or in the culture medium surrounding said non-human organism.

[21064] Accordingly, the present invention relates to a process for the production of citrulline, which comprises
[21065] (a) increasing or generating the activity of a ABC transporter permease protein in the cytosol of a cell of a non-human organism or a part thereof, preferably a microorganism, a plant cell, a plant or a part thereof, as compared to a corresponding non-transformed wild type non-human organism or a part thereof; and
[21066] (b) growing the non-human organism or a part thereof under conditions which permit the production of citrulline or a composition comprising citrulline in said non-human organism or in the culture medium surrounding said non-human organism.

[21067] Accordingly, the present invention relates to a process for the production of phenylalanine, which comprises
[21068] (a) increasing or generating the activity of a ABC transporter permease protein in the cytosol of a cell of a non-human organism or a part thereof, preferably a microorganism, a plant cell, a plant or a part thereof, as compared to a corresponding non-transformed wild type non-human organism or a part thereof; and
[21069] (b) growing the non-human organism or a part thereof under conditions which permit the production of phenylalanine or a composition comprising phenylalanine in said non-human organism or in the culture medium surrounding said non-human organism.

[21070] Accordingly, the present invention relates to a process for the production of serine, which comprises
[21071] (a) increasing or generating the activity of a ABC transporter permease protein in the cytosol of a cell of a non-human organism or a part thereof, preferably a microorganism, a plant cell, a plant or a part thereof, as compared to a corresponding non-transformed wild type non-human organism or a part thereof; and
[21072] (b) growing the non-human organism or a part thereof under conditions which permit the production of serine or a composition comprising serine in said non-human organism or in the culture medium surrounding said non-human organism.

[21073] Accordingly, the present invention relates to a process for the production of tyrosine, which comprises
[21074] (a) increasing or generating the activity of a ABC transporter permease protein in the cytosol of a cell of a non-human organism or a part thereof, preferably a microorganism, a plant cell, a plant or a part thereof, as compared to a corresponding non-transformed wild type non-human organism or a part thereof; and
[21075] (b) growing the non-human organism or a part thereof under conditions which permit the production of tyrosine or a composition comprising tyrosine in said non-human organism or in the culture medium surrounding said non-human organism.

[21076] Accordingly, the present invention relates to a process for the production of glycine, which comprises
[21077] (a) increasing or generating the activity of a sn-glycerol-3-phosphate dehydrogenase in the cytosol of a cell of a non-human organism or a part thereof, preferably a microorganism, a plant cell, a plant or a part thereof, as compared to a corresponding non-transformed wild type non-human organism or a part thereof; and
[21078] (b) growing the non-human organism or a part thereof under conditions which permit the production of glycine or a composition comprising glycine in said non-human organism or in the culture medium surrounding said non-human organism.

[21079] Accordingly, the present invention relates to a process for the production of asparagine, which comprises
[21080] (a) increasing or generating the activity of a NADH dehydrogenase I chain I in the cytosol of a cell of a non-human organism or a part thereof, preferably a microorganism, a plant cell, a plant or a part thereof, as compared to a corresponding non-transformed wild type non-human organism or a part thereof; and
[21081] (b) growing the non-human organism or a part thereof under conditions which permit the production of asparagine or a composition comprising asparagine in said non-human organism or in the culture medium surrounding said non-human organism.

[21082] Accordingly, the present invention relates to a process for the production of aspartate, which comprises
[21083] (a) increasing or generating the activity of a b2360-protein in the cytosol of a cell of a non-human organism or a part thereof, preferably a microorganism, a plant cell, a plant or a part thereof, as compared to a corresponding non-transformed wild type non-human organism or a part thereof; and
[21084] (b) growing the non-human organism or a part thereof under conditions which permit the production of aspartate or a composition comprising aspartate in said non-human organism or in the culture medium surrounding said non-human organism.

[21085] Accordingly, the present invention relates to a process for the production of serine, which comprises
[21086] (a) increasing or generating the activity of a D-serine dehydratase in the cytosol of a cell of a non-human organism or a part thereof, preferably a microorganism, a plant cell, a plant or a part thereof, as compared to a corresponding non-transformed wild type non-human organism or a part thereof; and
[21087] (b) growing the non-human organism or a part thereof under conditions which permit the production of serine or a composition comprising serine in said non-human organism or in the culture medium surrounding said non-human organism.

[21088] Accordingly, the present invention relates to a process for the production of tyrosine, which comprises
[21089] (a) increasing or generating the activity of a b2399-protein in the cytosol of a cell of a non-human organism or a part thereof, preferably a microorganism, a plant cell, a plant or a part thereof, as compared to a corresponding non-transformed wild type non-human organism or a part thereof; and
[21090] (b) growing the non-human organism or a part thereof under conditions which permit the production of tyrosine or a composition comprising tyrosine in said non-human organism or in the culture medium surrounding said non-human organism.

[21091] Accordingly, the present invention relates to a process for the production of 3,4-dihydroxyphenylalanine (dopa), which comprises
[21092] (a) increasing or generating the activity of a b2399-protein in the cytosol of a cell of a non-human organism or a part thereof, preferably a microorganism, a plant cell, a plant or a part thereof, as compared to a corresponding non-transformed wild type non-human organism or a part thereof; and
[21093] (b) growing the non-human organism or a part thereof under conditions which permit the production of 3,4-dihydroxyphenylalanine (dopa) or a composition comprising 3,4-dihydroxyphenylalanine (dopa) in said non-human organism or in the culture medium surrounding said non-human organism.

[21094] Accordingly, the present invention relates to a process for the production of 5-oxoproline, which comprises
[21095] (a) increasing or generating the activity of a b2399-protein in the cytosol of a cell of a non-human organism or a part thereof, preferably a microorganism, a plant cell, a plant or a part thereof, as compared to a corresponding non-transformed wild type non-human organism or a part thereof; and
[21096] (b) growing the non-human organism or a part thereof under conditions which permit the production of 5-oxoproline or a composition comprising 5-oxoproline in said non-human organism or in the culture medium surrounding said non-human organism.

[21097] Accordingly, the present invention relates to a process for the production of alanine, which comprises
[21098] (a) increasing or generating the activity of a transcriptional regulator in the cytosol of a cell of a non-human organism or a part thereof, preferably a microorganism, a plant cell, a plant or a part thereof, as compared to a corresponding non-transformed wild type non-human organism or a part thereof; and
[21099] (b) growing the non-human organism or a part thereof under conditions which permit the production of alanine or a composition comprising alanine in said non-human organism or in the culture medium surrounding said non-human organism.

[21100] Accordingly, the present invention relates to a process for the production of aspartate, which comprises
[21101] (a) increasing or generating the activity of a transcriptional regulator in the cytosol of a cell of a non-human organism or a part thereof, preferably a microorganism, a plant cell, a plant or a part thereof, as compared to a corresponding non-transformed wild type non-human organism or a part thereof; and
[21102] (b) growing the non-human organism or a part thereof under conditions which permit the production of aspartate or a composition comprising aspartate in said non-human organism or in the culture medium surrounding said non-human organism.

[21103] Accordingly, the present invention relates to a process for the production of phenylalanine, which comprises
[21104] (a) increasing or generating the activity of a PTS system N-acetylmuramic acid-specific EIIBC component in the cytosol of a cell of a non-human organism or a part thereof, preferably a microorganism, a plant cell, a plant or a part thereof, as compared to a corresponding non-transformed wild type non-human organism or a part thereof; and
[21105] (b) growing the non-human organism or a part thereof under conditions which permit the production of phenylalanine or a composition comprising phenylalanine in said non-human organism or in the culture medium surrounding said non-human organism.

[21106] Accordingly, the present invention relates to a process for the production of citrulline, which comprises
[21107] (a) increasing or generating the activity of a b2474-protein in the cytosol of a cell of a non-human organism or a part thereof, preferably a microorganism, a plant cell, a plant or a part thereof, as compared to a corresponding non-transformed wild type non-human organism or a part thereof; and
[21108] (b) growing the non-human organism or a part thereof under conditions which permit the production of citrulline or a composition comprising citrulline in said non-human organism or in the culture medium surrounding said non-human organism.

[21109] Accordingly, the present invention relates to a process for the production of glycine, which comprises
[21110] (a) increasing or generating the activity of a b2474-protein in the cytosol of a cell of a non-human organism or a part thereof, preferably a microorganism, a plant cell, a plant or a part thereof, as compared to a corresponding non-transformed wild type non-human organism or a part thereof; and
[21111] (b) growing the non-human organism or a part thereof under conditions which permit the production of glycine or a composition comprising glycine in said non-human organism or in the culture medium surrounding said non-human organism.

[21112] Accordingly, the present invention relates to a process for the production of serine, which comprises
[21113] (a) increasing or generating the activity of a NADH dehydrogenase subunit N in the cytosol of a cell of a non-human organism or a part thereof, preferably a microorganism, a plant cell, a plant or a part thereof, as compared to a corresponding non-transformed wild type non-human organism or a part thereof; and
[21114] (b) growing the non-human organism or a part thereof under conditions which permit the production of serine or a composition comprising serine in said non-human organism or in the culture medium surrounding said non-human organism.

[21115] Accordingly, the present invention relates to a process for the production of 5-oxoproline, which comprises
[21116] (a) increasing or generating the activity of a NADH dehydrogenase subunit N in the cytosol of a cell of a non-human organism or a part thereof, preferably a microorganism, a plant cell, a plant or a part thereof, as compared to a corresponding non-transformed wild type non-human organism or a part thereof; and
[21117] (b) growing the non-human organism or a part thereof under conditions which permit the production of 5-oxoproline or a composition comprising 5-oxoproline in said non-human organism or in the culture medium surrounding said non-human organism.

[21118] Accordingly, the present invention relates to a process for the production of phenylalanine, which comprises
[21119] (a) increasing or generating the activity of a b2513-protein in the cytosol of a cell of a non-human organism or a part thereof, preferably a microorganism, a plant cell, a plant or a part thereof, as compared to a corresponding non-transformed wild type non-human organism or a part thereof; and
[21120] (b) growing the non-human organism or a part thereof under conditions which permit the production of phenylalanine or a composition comprising phenylalanine in said non-human organism or in the culture medium surrounding said non-human organism.

[21121] Accordingly, the present invention relates to a process for the production of tyrosine, which comprises
[21122] (a) increasing or generating the activity of a b2513-protein in the cytosol of a cell of a non-human organism or a part thereof, preferably a microorganism, a plant cell, a plant or a part thereof, as compared to a corresponding non-transformed wild type non-human organism or a part thereof; and
[21123] (b) growing the non-human organism or a part thereof under conditions which permit the production of tyrosine or a composition comprising tyrosine in said non-human organism or in the culture medium surrounding said non-human organism.

[21124] Accordingly, the present invention relates to a process for the production of serine, which comprises
[21125] (a) increasing or generating the activity of a serine hydroxymethyltransferase in the cytosol of a cell of a non-human organism or a part thereof, preferably a microorganism, a plant cell, a plant or a part thereof, as compared to a corresponding non-transformed wild type non-human organism or a part thereof; and
[21126] (b) growing the non-human organism or a part thereof under conditions which permit the production of serine or a composition comprising serine in said non-human organism or in the culture medium surrounding said non-human organism.

[21127] Accordingly, the present invention relates to a process for the production of phenylalanine, which comprises
[21128] (a) increasing or generating the activity of a chorismate mutase-T and prephenate dehydrogenase in the cytosol of a cell of a non-human organism or a part thereof, preferably a microorganism, a plant cell, a plant or a part thereof, as compared to a corresponding non-transformed wild type non-human organism or a part thereof; and
[21129] (b) growing the non-human organism or a part thereof under conditions which permit the production of phenylalanine or a composition comprising phenylalanine in said non-human organism or in the culture medium surrounding said non-human organism.

[21130] Accordingly, the present invention relates to a process for the production of alanine, which comprises
[21131] (a) increasing or generating the activity of a b2613-protein in the cytosol of a cell of a non-human organism or a part thereof, preferably a microorganism, a plant cell, a plant or a part thereof, as compared to a corresponding non-transformed wild type non-human organism or a part thereof; and
[21132] (b) growing the non-human organism or a part thereof under conditions which permit the production of alanine or a composition comprising alanine in said non-human organism or in the culture medium surrounding said non-human organism.

[21133] Accordingly, the present invention relates to a process for the production of phenylalanine, which comprises
[21134] (a) increasing or generating the activity of a transcriptional regulator in the cytosol of a cell of a non-human organism or a part thereof, preferably a microorganism, a plant cell, a plant or a part thereof, as compared to a corresponding non-transformed wild type non-human organism or a part thereof; and
[21135] (b) growing the non-human organism or a part thereof under conditions which permit the production of phenylalanine or a composition comprising phenylalanine in said non-human organism or in the culture medium surrounding said non-human organism.

[21136] Accordingly, the present invention relates to a process for the production of tyrosine, which comprises
[21137] (a) increasing or generating the activity of a transcriptional regulator in the cytosol of a cell of a non-human organism or a part thereof, preferably a microorganism, a plant cell, a plant or a part thereof, as compared to a corresponding non-transformed wild type non-human organism or a part thereof; and
[21138] (b) growing the non-human organism or a part thereof under conditions which permit the production of tyrosine or a composition comprising tyrosine in said non-human organism or in the culture medium surrounding said non-human organism.

[21139] Accordingly, the present invention relates to a process for the production of phenylalanine, which comprises
[21140] (a) increasing or generating the activity of a b2673-protein in the cytosol of a cell of a non-human organism or a part thereof, preferably a microorganism, a plant cell, a plant or a part thereof, as compared to a corresponding non-transformed wild type non-human organism or a part thereof; and
[21141] (b) growing the non-human organism or a part thereof under conditions which permit the production of phenylalanine or a composition comprising phenylalanine in said non-human organism or in the culture medium surrounding said non-human organism.

[21142] Accordingly, the present invention relates to a process for the production of tyrosine, which comprises
[21143] (a) increasing or generating the activity of a b2673-protein in the cytosol of a cell of a non-human organism or a part thereof, preferably a microorganism, a plant cell, a plant or a part thereof, as compared to a corresponding non-transformed wild type non-human organism or a part thereof; and
[21144] (b) growing the non-human organism or a part thereof under conditions which permit the production of tyrosine or a composition comprising tyrosine in said non-human organism or in the culture medium surrounding said non-human organism.

[21145] Accordingly, the present invention relates to a process for the production of aspartate, which comprises
[21146] (a) increasing or generating the activity of a transport protein in the cytosol of a cell of a non-human organism or a part thereof, preferably a microorganism, a plant cell, a plant or a part thereof, as compared to a corresponding non-transformed wild type non-human organism or a part thereof; and
[21147] (b) growing the non-human organism or a part thereof under conditions which permit the production of aspartate or a composition comprising aspartate in said non-human organism or in the culture medium surrounding said non-human organism.

[21148] Accordingly, the present invention relates to a process for the production of alanine, which comprises
[21149] (a) increasing or generating the activity of a murein transglycosylase in the cytosol of a cell of a non-human organism or a part thereof, preferably a microorganism, a plant cell, a plant or a part thereof, as compared to a corresponding non-transformed wild type non-human organism or a part thereof; and
[21150] (b) growing the non-human organism or a part thereof under conditions which permit the production of alanine or a composition comprising alanine in said non-human organism or in the culture medium surrounding said non-human organism.

[21151] Accordingly, the present invention relates to a process for the production of phenylalanine, which comprises
[21152] (a) increasing or generating the activity of a murein transglycosylase in the cytosol of a cell of a non-human organism or a part thereof, preferably a microorganism, a plant cell, a plant or a part thereof, as compared to a corresponding non-transformed wild type non-human organism or a part thereof; and
[21153] (b) growing the non-human organism or a part thereof under conditions which permit the production of phenylalanine or a composition comprising phenylalanine in said non-human organism or in the culture medium surrounding said non-human organism.

[21154] Accordingly, the present invention relates to a process for the production of tyrosine, which comprises
[21155] (a) increasing or generating the activity of a murein transglycosylase in the cytosol of a cell of a non-human organism or a part thereof, preferably a microorganism, a plant cell, a plant or a part thereof, as compared to a corresponding non-transformed wild type non-human organism or a part thereof; and
[21156] (b) growing the non-human organism or a part thereof under conditions which permit the production of tyrosine or a composition comprising tyrosine in said non-human organism or in the culture medium surrounding said non-human organism.

[21157] Accordingly, the present invention relates to a process for the production of alanine, which comprises
[21158] (a) increasing or generating the activity of a transcriptional regulator in the cytosol of a cell of a non-human organism or a part thereof, preferably a microorganism, a plant cell, a plant or a part thereof, as compared to a corresponding non-transformed wild type non-human organism or a part thereof; and
[21159] (b) growing the non-human organism or a part thereof under conditions which permit the production of alanine or a composition comprising alanine in said non-human organism or in the culture medium surrounding said non-human organism.

[21160] Accordingly, the present invention relates to a process for the production of alanine, which comprises
[21161] (a) increasing or generating the activity of a b2739-protein in the cytosol of a cell of a non-human organism or a part thereof, preferably a microorganism, a plant cell, a plant or a part thereof, as compared to a corresponding non-transformed wild type non-human organism or a part thereof; and
[21162] (b) growing the non-human organism or a part thereof under conditions which permit the production of alanine or a composition comprising alanine in said non-human organism or in the culture medium surrounding said non-human organism.

[21163] Accordingly, the present invention relates to a process for the production of phenylalanine, which comprises
[21164] (a) increasing or generating the activity of a b2739-protein in the cytosol of a cell of a non-human organism or a part thereof, preferably a microorganism, a plant cell, a plant or a part thereof, as compared to a corresponding non-transformed wild type non-human organism or a part thereof; and
[21165] (b) growing the non-human organism or a part thereof under conditions which permit the production of phenylalanine or a composition comprising phenylalanine in said non-human organism or in the culture medium surrounding said non-human organism.

[21166] Accordingly, the present invention relates to a process for the production of tyrosine, which comprises
[21167] (a) increasing or generating the activity of a b2739-protein in the cytosol of a cell of a non-human organism or a part thereof, preferably a microorganism, a plant cell, a plant or a part thereof, as compared to a corresponding non-transformed wild type non-human organism or a part thereof; and
[21168] (b) growing the non-human organism or a part thereof under conditions which permit the production of tyrosine or a composition comprising tyrosine in said non-human organism or in the culture medium surrounding said non-human organism.

[21169] Accordingly, the present invention relates to a process for the production of tyrosine, which comprises
[21170] (a) increasing or generating the activity of a 2-C-methyl-D-erythritol 4-phosphate cytidylyltransferase in the cytosol of a cell of a non-human organism or a part thereof, preferably a microorganism, a plant cell, a plant or a part thereof, as compared to a corresponding non-transformed wild type non-human organism or a part thereof; and
[21171] (b) growing the non-human organism or a part thereof under conditions which permit the production of tyrosine or a composition comprising tyrosine in said non-human organism or in the culture medium surrounding said non-human organism.

[21172] Accordingly, the present invention relates to a process for the production of 5-oxoproline, which comprises
[21173] (a) increasing or generating the activity of a 2-C-methyl-D-erythritol 4-phosphate cytidylyltransferase in the cytosol of a cell of a non-human organism or a part thereof, preferably a microorganism, a plant cell, a plant or a part thereof, as compared to a corresponding non-transformed wild type non-human organism or a part thereof; and
[21174] (b) growing the non-human organism or a part thereof under conditions which permit the production of 5-oxoproline or a composition comprising 5-oxoproline in said non-human organism or in the culture medium surrounding said non-human organism.

[21175] Accordingly, the present invention relates to a process for the production of phenylalanine, which comprises
[21176] (a) increasing or generating the activity of a phosphoadenosine phosphosulfate reductase in the cytosol of a cell of a non-human organism or a part thereof, preferably a microorganism, a plant cell, a plant or a part thereof, as compared to a corresponding non-transformed wild type non-human organism or a part thereof; and
[21177] (b) growing the non-human organism or a part thereof under conditions which permit the production of phenylalanine or a composition comprising phenylalanine in said non-human organism or in the culture medium surrounding said non-human organism.

[21178] Accordingly, the present invention relates to a process for the production of phenylalanine, which comprises
[21179] (a) increasing or generating the activity of a b2812-protein in the cytosol of a cell of a non-human organism or a part thereof, preferably a microorganism, a plant cell, a plant or a part thereof, as compared to a corresponding non-transformed wild type non-human organism or a part thereof; and
[21180] (b) growing the non-human organism or a part thereof under conditions which permit the production of phenylalanine or a composition comprising phenylalanine in said non-human organism or in the culture medium surrounding said non-human organism.

[21181] Accordingly, the present invention relates to a process for the production of serine, which comprises
[21182] (a) increasing or generating the activity of a b2812-protein in the cytosol of a cell of a non-human organism or a part thereof, preferably a microorganism, a plant cell, a plant or a part thereof, as compared to a corresponding non-transformed wild type non-human organism or a part thereof; and
[21183] (b) growing the non-human organism or a part thereof under conditions which permit the production of serine or a composition comprising serine in said non-human organism or in the culture medium surrounding said non-human organism.

[21184] Accordingly, the present invention relates to a process for the production of tyrosine, which comprises
[21185] (a) increasing or generating the activity of a b2812-protein in the cytosol of a cell of a non-human organism or a part thereof, preferably a microorganism, a plant cell, a plant or a part thereof, as compared to a corresponding non-transformed wild type non-human organism or a part thereof; and
[21186] (b) growing the non-human organism or a part thereof under conditions which permit the production of tyrosine or a composition comprising tyrosine in said non-human organism or in the culture medium surrounding said non-human organism.

[21187] Accordingly, the present invention relates to a process for the production of phenylalanine, which comprises
[21188] (a) increasing or generating the activity of a amino-acid acetyltransferase in the cytosol of a cell of a non-human organism or a part thereof, preferably a microorganism, a plant cell, a plant or a part thereof, as compared to a corresponding non-transformed wild type non-human organism or a part thereof; and
[21189] (b) growing the non-human organism or a part thereof under conditions which permit the production of phenylalanine or a composition comprising phenylalanine in said non-human organism or in the culture medium surrounding said non-human organism.

[21190] Accordingly, the present invention relates to a process for the production of tyrosine, which comprises
[21191] (a) increasing or generating the activity of a amino-acid acetyltransferase in the cytosol of a cell of a non-human organism or a part thereof, preferably a microorganism, a plant cell, a plant or a part thereof, as compared to a corresponding non-transformed wild type non-human organism or a part thereof; and
[21192] (b) growing the non-human organism or a part thereof under conditions which permit the production of tyrosine or a composition comprising tyrosine in said non-human organism or in the culture medium surrounding said non-human organism.

[21193] Accordingly, the present invention relates to a process for the production of 5-oxoproline, which comprises
[21194] (a) increasing or generating the activity of a amino-acid acetyltransferase in the cytosol of a cell of a non-human organism or a part thereof, preferably a microorganism, a plant cell, a plant or a part thereof, as compared to a corresponding non-transformed wild type non-human organism or a part thereof; and
[21195] (b) growing the non-human organism or a part thereof under conditions which permit the production of 5-oxoproline or a composition comprising 5-oxoproline in said non-human organism or in the culture medium surrounding said non-human organism.

[21196] Accordingly, the present invention relates to a process for the production of aspartate, which comprises
[21197] (a) increasing or generating the activity of a prolipoprotein diacylglyceryl transferase in the cytosol of a cell of a non-human organism or a part thereof, preferably a microorganism, a plant cell, a plant or a part thereof, as compared to a corresponding non-transformed wild type non-human organism or a part thereof; and
[21198] (b) growing the non-human organism or a part thereof under conditions which permit the production of aspartate or a composition comprising aspartate in said non-human organism or in the culture medium surrounding said non-human organism.

[21199] Accordingly, the present invention relates to a process for the production of tyrosine, which comprises
[21200] (a) increasing or generating the activity of a transcriptional regulator in the cytosol of a cell of a non-human organism or a part thereof, preferably a microorganism, a plant cell, a plant or a part thereof, as compared to a corresponding non-transformed wild type non-human organism or a part thereof; and
[21201] (b) growing the non-human organism or a part thereof under conditions which permit the production of tyrosine or a composition comprising tyrosine in said non-human organism or in the culture medium surrounding said non-human organism.

[21202] Accordingly, the present invention relates to a process for the production of phenylalanine, which comprises
[21203] (a) increasing or generating the activity of a b2849-protein in the cytosol of a cell of a non-human organism or a part thereof, preferably a microorganism, a plant cell, a plant or a part thereof, as compared to a corresponding non-transformed wild type non-human organism or a part thereof; and
[21204] (b) growing the non-human organism or a part thereof under conditions which permit the production of phenylalanine or a composition comprising phenylalanine in said non-human organism or in the culture medium surrounding said non-human organism.

[21205] Accordingly, the present invention relates to a process for the production of glycine, which comprises
[21206] (a) increasing or generating the activity of a D-3-phosphoglycerate dehydrogenase in the cytosol of a cell of a non-human organism or a part thereof, preferably a microorganism, a plant cell, a plant or a part thereof, as compared to a corresponding non-transformed wild type non-human organism or a part thereof; and
[21207] (b) growing the non-human organism or a part thereof under conditions which permit the production of glycine or a composition comprising glycine in said non-human organism or in the culture medium surrounding said non-human organism.

[21208] Accordingly, the present invention relates to a process for the production of serine, which comprises
[21209] (a) increasing or generating the activity of a D-3-phosphoglycerate dehydrogenase in the cytosol of a cell of a non-human organism or a part thereof, preferably a microorganism, a plant cell, a plant or a part thereof, as compared to a corresponding non-transformed wild type non-human organism or a part thereof; and
[21210] (b) growing the non-human organism or a part thereof under conditions which permit the production of serine or a composition comprising serine in said non-human organism or in the culture medium surrounding said non-human organism.

[21211] Accordingly, the present invention relates to a process for the production of aspartate, which comprises
[21212] (a) increasing or generating the activity of a arginine exporter protein in the cytosol of a cell of a non-human organism or a part thereof, preferably a microorganism, a plant cell, a plant or a part thereof, as compared to a corresponding non-transformed wild type non-human organism or a part thereof; and
[21213] (b) growing the non-human organism or a part thereof under conditions which permit the production of aspartate or a composition comprising aspartate in said non-human organism or in the culture medium surrounding said non-human organism.

[21214] Accordingly, the present invention relates to a process for the production of asparagine, which comprises
[21215] (a) increasing or generating the activity of a glycoprotease in the cytosol of a cell of a non-human organism or a part thereof, preferably a microorganism, a plant cell, a plant or a part thereof, as compared to a corresponding non-transformed wild type non-human organism or a part thereof; and
[21216] (b) growing the non-human organism or a part thereof under conditions which permit the production of asparagine or a composition comprising asparagine in said non-human organism or in the culture medium surrounding said non-human organism.

[21217] Accordingly, the present invention relates to a process for the production of phenylalanine, which comprises
[21218] (a) increasing or generating the activity of a b3083-protein in the cytosol of a cell of a non-human organism or a part thereof, preferably a microorganism, a plant cell, a plant or a part thereof, as compared to a corresponding non-transformed wild type non-human organism or a part thereof; and
[21219] (b) growing the non-human organism or a part thereof under conditions which permit the production of phenylalanine or a composition comprising phenylalanine in said non-human organism or in the culture medium surrounding said non-human organism.

[21220] Accordingly, the present invention relates to a process for the production of serine, which comprises
[21221] (a) increasing or generating the activity of a b3083-protein in the cytosol of a cell of a non-human organism or a part thereof, preferably a microorganism, a plant cell, a plant or a part thereof, as compared to a corresponding non-transformed wild type non-human organism or a part thereof; and
[21222] (b) growing the non-human organism or a part thereof under conditions which permit the production of serine or a composition comprising serine in said non-human organism or in the culture medium surrounding said non-human organism.

[21223] Accordingly, the present invention relates to a process for the production of tyrosine, which comprises
[21224] (a) increasing or generating the activity of a b3083-protein in the cytosol of a cell of a non-human organism or a part thereof, preferably a microorganism, a plant cell, a plant or a part thereof, as compared to a corresponding non-transformed wild type non-human organism or a part thereof; and
[21225] (b) growing the non-human organism or a part thereof under conditions which permit the production of tyrosine or a composition comprising tyrosine in said non-human organism or in the culture medium surrounding said non-human organism.

[21226] Accordingly, the present invention relates to a process for the production of alanine, which comprises
[21227] (a) increasing or generating the activity of a b3098-protein in the cytosol of a cell of a non-human organism or a part thereof, preferably a microorganism, a plant cell, a plant or a part thereof, as compared to a corresponding non-transformed wild type non-human organism or a part thereof; and
[21228] (b) growing the non-human organism or a part thereof under conditions which permit the production of alanine or a composition comprising alanine in said non-human organism or in the culture medium surrounding said non-human organism.

[21229] Accordingly, the present invention relates to a process for the production of glycine, which comprises
[21230] (a) increasing or generating the activity of a b3098-protein in the cytosol of a cell of a non-human organism or a part thereof, preferably a microorganism, a plant cell, a plant or a part thereof, as compared to a corresponding non-transformed wild type non-human organism or a part thereof; and
[21231] (b) growing the non-human organism or a part thereof under conditions which permit the production of glycine or a composition comprising glycine in said non-human organism or in the culture medium surrounding said non-human organism.

[21232] Accordingly, the present invention relates to a process for the production of tyrosine, which comprises
[21233] (a) increasing or generating the activity of a b3121-protein in the cytosol of a cell of a non-human organism or a part thereof, preferably a microorganism, a plant cell, a plant or a part thereof, as compared to a corresponding non-transformed wild type non-human organism or a part thereof; and
[21234] (b) growing the non-human organism or a part thereof under conditions which permit the production of tyrosine or a composition comprising tyrosine in said non-human organism or in the culture medium surrounding said non-human organism.

[21235] Accordingly, the present invention relates to a process for the production of tyrosine, which comprises
[21236] (a) increasing or generating the activity of a b3221-protein in the cytosol of a cell of a non-human organism or a part thereof, preferably a microorganism, a plant cell, a plant or a part thereof, as compared to a corresponding non-transformed wild type non-human organism or a part thereof; and
[21237] (b) growing the non-human organism or a part thereof under conditions which permit the production of tyrosine or a composition comprising tyrosine in said non-human organism or in the culture medium surrounding said non-human organism.

[21238] Accordingly, the present invention relates to a process for the production of serine, which comprises
[21239] (a) increasing or generating the activity of a b3246-protein in the cytosol of a cell of a non-human organism or a part thereof, preferably a microorganism, a plant cell, a plant or a part thereof, as compared to a corresponding non-transformed wild type non-human organism or a part thereof; and
[21240] (b) growing the non-human organism or a part thereof under conditions which permit the production of serine or a composition comprising serine in said non-human organism or in the culture medium surrounding said non-human organism.

[21241] Accordingly, the present invention relates to a process for the production of 5-oxoproline, which comprises
[21242] (a) increasing or generating the activity of a b3246-protein in the cytosol of a cell of a non-human organism or a part thereof, preferably a microorganism, a plant cell, a plant or a part thereof, as compared to a corresponding non-transformed wild type non-human organism or a part thereof; and
[21243] (b) growing the non-human organism or a part thereof under conditions which permit the production of 5-oxoproline or a composition comprising 5-oxoproline in said non-human organism or in the culture medium surrounding said non-human organism.

[21244] Accordingly, the present invention relates to a process for the production of asparagine, which comprises
[21245] (a) increasing or generating the activity of a acetyl CoA carboxylase in the cytosol of a cell of a non-human organism or a part thereof, preferably a microorganism, a plant cell, a plant or a part thereof, as compared to a corresponding non-transformed wild type non-human organism or a part thereof; and
[21246] (b) growing the non-human organism or a part thereof under conditions which permit the production of asparagine or a composition comprising asparagine in said non-human organism or in the culture medium surrounding said non-human organism.

[21247] Accordingly, the present invention relates to a process for the production of glycine, which comprises
[21248] (a) increasing or generating the activity of a acetyl CoA carboxylase in the cytosol of a cell of a non-human organism or a part thereof, preferably a microorganism, a plant cell, a plant or a part thereof, as compared to a corresponding non-transformed wild type non-human organism or a part thereof; and
[21249] (b) growing the non-human organism or a part thereof under conditions which permit the production of glycine or a composition comprising glycine in said non-human organism or in the culture medium surrounding said non-human organism.

[21250] Accordingly, the present invention relates to a process for the production of serine, which comprises
[21251] (a) increasing or generating the activity of a acetyl CoA carboxylase in the cytosol of a cell of a non-human organism or a part thereof, preferably a microorganism, a plant cell, a plant or a part thereof, as compared to a corresponding non-transformed wild type non-human organism or a part thereof; and
[21252] (b) growing the non-human organism or a part thereof under conditions which permit the production of serine or a composition comprising serine in said non-human organism or in the culture medium surrounding said non-human organism.

[21253] Accordingly, the present invention relates to a process for the production of 5-oxoproline, which comprises
[21254] (a) increasing or generating the activity of a acetyl CoA carboxylase in the cytosol of a cell of a non-human organism or a part thereof, preferably a microorganism, a plant cell, a plant or a part thereof, as compared to a corresponding non-transformed wild type non-human organism or a part thereof; and
[21255] (b) growing the non-human organism or a part thereof under conditions which permit the production of 5-oxoproline or a composition comprising 5-oxoproline in said non-human organism or in the culture medium surrounding said non-human organism.

[21256] Accordingly, the present invention relates to a process for the production of alanine, which comprises
[21257] (a) increasing or generating the activity of a methyltransferase in the cytosol of a cell of a non-human organism or a part thereof, preferably a microorganism, a plant cell, a plant or a part thereof, as compared to a corresponding non-transformed wild type non-human organism or a part thereof; and
[21258] (b) growing the non-human organism or a part thereof under conditions which permit the production of alanine or a composition comprising alanine in said non-human organism or in the culture medium surrounding said non-human organism.

[21259] Accordingly, the present invention relates to a process for the production of phenylalanine, which comprises
[21260] (a) increasing or generating the activity of a methyltransferase in the cytosol of a cell of a non-human organism or a part thereof, preferably a microorganism, a plant cell, a plant or a part thereof, as compared to a corresponding non-transformed wild type non-human organism or a part thereof; and
[21261] (b) growing the non-human organism or a part thereof under conditions which permit the production of phenylalanine or a composition comprising phenylalanine in said non-human organism or in the culture medium surrounding said non-human organism.

[21262] Accordingly, the present invention relates to a process for the production of serine, which comprises
[21263] (a) increasing or generating the activity of a methyltransferase in the cytosol of a cell of a non-human organism or a part thereof, preferably a microorganism, a plant cell, a plant or a part thereof, as compared to a corresponding non-transformed wild type non-human organism or a part thereof; and
[21264] (b) growing the non-human organism or a part thereof under conditions which permit the production of serine or a composition comprising serine in said non-human organism or in the culture medium surrounding said non-human organism.

[21265] Accordingly, the present invention relates to a process for the production of tyrosine, which comprises
[21266] (a) increasing or generating the activity of a methyltransferase in the cytosol of a cell of a non-human organism or a part thereof, preferably a microorganism, a plant cell, a plant or a part thereof, as compared to a corresponding non-transformed wild type non-human organism or a part thereof; and
[21267] (b) growing the non-human organism or a part thereof under conditions which permit the production of tyrosine or a composition comprising tyrosine in said non-human organism or in the culture medium surrounding said non-human organism.

[21268] Accordingly, the present invention relates to a process for the production of 5-oxoproline, which comprises
[21269] (a) increasing or generating the activity of a methyltransferase in the cytosol of a cell of a non-human organism or a part thereof, preferably a microorganism, a plant cell, a plant or a part thereof, as compared to a corresponding non-transformed wild type non-human organism or a part thereof; and
[21270] (b) growing the non-human organism or a part thereof under conditions which permit the production of 5-oxoproline or a composition comprising 5-oxoproline in said non-human organism or in the culture medium surrounding said non-human organism.

[21271] Accordingly, the present invention relates to a process for the production of alanine, which comprises
[21272] (a) increasing or generating the activity of a b3346-protein in the cytosol of a cell of a non-human organism or a part thereof, preferably a microorganism, a plant cell, a plant or a part thereof, as compared to a corresponding non-transformed wild type non-human organism or a part thereof; and
[21273] (b) growing the non-human organism or a part thereof under conditions which permit the production of alanine or a composition comprising alanine in said non-human organism or in the culture medium surrounding said non-human organism.

[21274] Accordingly, the present invention relates to a process for the production of alanine, which comprises
[21275] (a) increasing or generating the activity of a ABC transporter ATP-binding protein in the cytosol of a cell of a non-human organism or a part thereof, preferably a microorganism, a plant cell, a plant or a part thereof, as compared to a corresponding non-transformed wild type non-human organism or a part thereof; and
[21276] (b) growing the non-human organism or a part thereof under conditions which permit the production of alanine or a composition comprising alanine in said non-human organism or in the culture medium surrounding said non-human organism.

[21277] Accordingly, the present invention relates to a process for the production of glycine, which comprises
[21278] (a) increasing or generating the activity of a ABC transporter ATP-binding protein in the cytosol of a cell of a non-human organism or a part thereof, preferably a microorganism, a plant cell, a plant or a part thereof, as compared to a corresponding non-transformed wild type non-human organism or a part thereof; and
[21279] (b) growing the non-human organism or a part thereof under conditions which permit the production of glycine or a composition comprising glycine in said non-human organism or in the culture medium surrounding said non-human organism.

[21280] Accordingly, the present invention relates to a process for the production of aspartate, which comprises
[21281] (a) increasing or generating the activity of a b3392-protein in the cytosol of a cell of a non-human organism or a part thereof, preferably a microorganism, a plant cell, a plant or a part thereof, as compared to a corresponding non-transformed wild type non-human organism or a part thereof; and
[21282] (b) growing the non-human organism or a part thereof under conditions which permit the production of aspartate or a composition comprising aspartate in said non-human organism or in the culture medium surrounding said non-human organism.

[21283] Accordingly, the present invention relates to a process for the production of phenylalanine, which comprises
[21284] (a) increasing or generating the activity of a phosphoenolpyruvate carboxykinase in the cytosol of a cell of a non-human organism or a part thereof, preferably a microorganism, a plant cell, a plant or a part thereof, as compared to a corresponding non-transformed wild type non-human organism or a part thereof; and
[21285] (b) growing the non-human organism or a part thereof under conditions which permit the production of phenylalanine or a composition comprising phenylalanine in said non-human organism or in the culture medium surrounding said non-human organism.

[21286] Accordingly, the present invention relates to a process for the production of serine, which comprises
[21287] (a) increasing or generating the activity of a phosphoenolpyruvate carboxykinase in the cytosol of a cell of a non-human organism or a part thereof, preferably a microorganism, a plant cell, a plant or a part thereof, as compared to a corresponding non-transformed wild type non-human organism or a part thereof; and
[21288] (b) growing the non-human organism or a part thereof under conditions which permit the production of serine or a composition comprising serine in said non-human organism or in the culture medium surrounding said non-human organism.

[21289] Accordingly, the present invention relates to a process for the production of alanine, which comprises
[21290] (a) increasing or generating the activity of a b3410-protein in the cytosol of a cell of a non-human organism or a part thereof, preferably a microorganism, a plant cell, a plant or a part thereof, as compared to a corresponding non-transformed wild type non-human organism or a part thereof; and
[21291] (b) growing the non-human organism or a part thereof under conditions which permit the production of alanine or a composition comprising alanine in said non-human organism or in the culture medium surrounding said non-human organism.

[21292] Accordingly, the present invention relates to a process for the production of serine, which comprises
[21293] (a) increasing or generating the activity of a b3509-protein in the cytosol of a cell of a non-human organism or a part thereof, preferably a microorganism, a plant cell, a plant or a part thereof, as compared to a corresponding non-transformed wild type non-human organism or a part thereof; and
[21294] (b) growing the non-human organism or a part thereof under conditions which permit the production of serine or a composition comprising serine in said non-human organism or in the culture medium surrounding said non-human organism.

[21295] Accordingly, the present invention relates to a process for the production of aspartate, which comprises
[21296] (a) increasing or generating the activity of a cellulose synthase catalytic subunit in the cytosol of a cell of a non-human organism or a part thereof, preferably a microorganism, a plant cell, a plant or a part thereof, as compared to a corresponding non-transformed wild type non-human organism or a part thereof; and
[21297] (b) growing the non-human organism or a part thereof under conditions which permit the production of aspartate or a composition comprising aspartate in said non-human organism or in the culture medium surrounding said non-human organism.

[21298] Accordingly, the present invention relates to a process for the production of phenylalanine, which comprises
[21299] (a) increasing or generating the activity of a serine acetyltransferase in the cytosol of a cell of a non-human organism or a part thereof, preferably a microorganism, a plant cell, a plant or a part thereof, as compared to a corresponding non-transformed wild type non-human organism or a part thereof; and
[21300] (b) growing the non-human organism or a part thereof under conditions which permit the production of phenylalanine or a composition comprising phenylalanine in said non-human organism or in the culture medium surrounding said non-human organism.

[21301] Accordingly, the present invention relates to a process for the production of tyrosine, which comprises
[21302] (a) increasing or generating the activity of a serine acetyltransferase in the cytosol of a cell of a non-human organism or a part thereof, preferably a microorganism, a plant cell, a plant or a part thereof, as compared to a corresponding non-transformed wild type non-human organism or a part thereof; and
[21303] (b) growing the non-human organism or a part thereof under conditions which permit the production of tyrosine or a composition comprising tyrosine in said non-human organism or in the culture medium surrounding said non-human organism.

[21304] Accordingly, the present invention relates to a process for the production of alanine, which comprises
[21305] (a) increasing or generating the activity of a phosphopantetheine adenylyltransferase in the cytosol of a cell of a non-human organism or a part thereof, preferably a microorganism, a plant cell, a plant or a part thereof, as compared to a corresponding non-transformed wild type non-human organism or a part thereof; and
[21306] (b) growing the non-human organism or a part thereof under conditions which permit the production of alanine or a composition comprising alanine in said non-human organism or in the culture medium surrounding said non-human organism.

[21307] Accordingly, the present invention relates to a process for the production of asparagine, which comprises
[21308] (a) increasing or generating the activity of a phosphopantetheine adenylyltransferase in the cytosol of a cell of a non-human organism or a part thereof, preferably a microorganism, a plant cell, a plant or a part thereof, as compared to a corresponding non-transformed wild type non-human organism or a part thereof; and
[21309] (b) growing the non-human organism or a part thereof under conditions which permit the production of asparagine or a composition comprising asparagine in said non-human organism or in the culture medium surrounding said non-human organism.

[21310] Accordingly, the present invention relates to a process for the production of phenylalanine, which comprises
[21311] (a) increasing or generating the activity of a phosphopantetheine adenylyltransferase in the cytosol of a cell of a non-human organism or a part thereof, preferably a microorganism, a plant cell, a plant or a part thereof, as compared to a corresponding non-transformed wild type non-human organism or a part thereof; and
[21312] (b) growing the non-human organism or a part thereof under conditions which permit the production of phenylalanine or a composition comprising phenylalanine in said non-human organism or in the culture medium surrounding said non-human organism.

[21313] Accordingly, the present invention relates to a process for the production of glycine, which comprises
[21314] (a) increasing or generating the activity of a b3646-protein in the cytosol of a cell of a non-human organism or a part thereof, preferably a microorganism, a plant cell, a plant or a part thereof, as compared to a corresponding non-transformed wild type non-human organism or a part thereof; and
[21315] (b) growing the non-human organism or a part thereof under conditions which permit the production of glycine or a composition comprising glycine in said non-human organism or in the culture medium surrounding said non-human organism.

[21316] Accordingly, the present invention relates to a process for the production of tyrosine, which comprises
[21317] (a) increasing or generating the activity of a acetolactate synthase in the cytosol of a cell of a non-human organism or a part thereof, preferably a microorganism, a plant cell, a plant or a part thereof, as compared to a corresponding non-transformed wild type non-human organism or a part thereof; and
[21318] (b) growing the non-human organism or a part thereof under conditions which permit the production of tyrosine or a composition comprising tyrosine in said non-human organism or in the culture medium surrounding said non-human organism.

[21319] Accordingly, the present invention relates to a process for the production of asparagine, which comprises
[21320] (a) increasing or generating the activity of a aspartate-ammonia ligase in the cytosol of a cell of a non-human organism or a part thereof, preferably a microorganism, a plant cell, a plant or a part thereof, as compared to a corresponding non-transformed wild type non-human organism or a part thereof; and
[21321] (b) growing the non-human organism or a part thereof under conditions which permit the production of asparagine or a composition comprising asparagine in said non-human organism or in the culture medium surrounding said non-human organism.

[21322] Accordingly, the present invention relates to a process for the production of glycine, which comprises
[21323] (a) increasing or generating the activity of a dihydroxyacid dehydratase in the cytosol of a cell of a non-human organism or a part thereof, preferably a microorganism, a plant cell, a plant or a part thereof, as compared to a corresponding non-transformed wild type non-human organism or a part thereof; and
[21324] (b) growing the non-human organism or a part thereof under conditions which permit the production of glycine or a composition comprising glycine in said non-human organism or in the culture medium surrounding said non-human organism.

[21325] Accordingly, the present invention relates to a process for the production of phenylalanine, which comprises
[21326] (a) increasing or generating the activity of a dihydroxyacid dehydratase in the cytosol of a cell of a non-human organism or a part thereof, preferably a microorganism, a plant cell, a plant or a part thereof, as compared to a corresponding non-transformed wild type non-human organism or a part thereof; and
[21327] (b) growing the non-human organism or a part thereof under conditions which permit the production of phenylalanine or a composition comprising phenylalanine in said non-human organism or in the culture medium surrounding said non-human organism.

[21328] Accordingly, the present invention relates to a process for the production of aspartate, which comprises
[21329] (a) increasing or generating the activity of a b3791-protein in the cytosol of a cell of a non-human organism or a part thereof, preferably a microorganism, a plant cell, a plant or a part thereof, as compared to a corresponding non-transformed wild type non-human organism or a part thereof; and
[21330] (b) growing the non-human organism or a part thereof under conditions which permit the production of aspartate or a composition comprising aspartate in said non-human organism or in the culture medium surrounding said non-human organism.

[21331] Accordingly, the present invention relates to a process for the production of 5-oxoproline, which comprises
[21332] (a) increasing or generating the activity of a b3791-protein in the cytosol of a cell of a non-human organism or a part thereof, preferably a microorganism, a plant cell, a plant or a part thereof, as compared to a corresponding non-transformed wild type non-human organism or a part thereof; and
[21333] (b) growing the non-human organism or a part thereof under conditions which permit the production of 5-oxoproline or a composition comprising 5-oxoproline in said non-human organism or in the culture medium surrounding said non-human organism.

[21334] Accordingly, the present invention relates to a process for the production of phenylalanine, which comprises
[21335] (a) increasing or generating the activity of a enterobacterial common antigen polymerase in the cytosol of a cell of a non-human organism or a part thereof, preferably a microorganism, a plant cell, a plant or a part thereof, as compared to a corresponding non-transformed wild type non-human organism or a part thereof; and
[21336] (b) growing the non-human organism or a part thereof under conditions which permit the production of phenylalanine or a composition comprising phenylalanine in said non-human organism or in the culture medium surrounding said non-human organism.

[21337] Accordingly, the present invention relates to a process for the production of phenylalanine, which comprises
[21338] (a) increasing or generating the activity of a DNA helicase II in the cytosol of a cell of a non-human organism or a part thereof, preferably a microorganism, a plant cell, a plant or a part thereof, as compared to a corresponding non-transformed wild type non-human organism or a part thereof; and
[21339] (b) growing the non-human organism or a part thereof under conditions which permit the production of phenylalanine or a composition comprising phenylalanine in said non-human organism or in the culture medium surrounding said non-human organism.

[21340] Accordingly, the present invention relates to a process for the production of citrulline, which comprises
[21341] (a) increasing or generating the activity of a b3814-protein in the cytosol of a cell of a non-human organism or a part thereof, preferably a microorganism, a plant cell, a plant or a part thereof, as compared to a corresponding non-transformed wild type non-human organism or a part thereof; and
[21342] (b) growing the non-human organism or a part thereof under conditions which permit the production of citrulline or a composition comprising citrulline in said non-human organism or in the culture medium surrounding said non-human organism.

[21343] Accordingly, the present invention relates to a process for the production of alanine, which comprises
[21344] (a) increasing or generating the activity of a transcriptional regulator in the cytosol of a cell of a non-human organism or a part thereof, preferably a microorganism, a plant cell, a plant or a part thereof, as compared to a corresponding non-transformed wild type non-human organism or a part thereof; and
[21345] (b) growing the non-human organism or a part thereof under conditions which permit the production of alanine or a composition comprising alanine in said non-human organism or in the culture medium surrounding said non-human organism.

[21346] Accordingly, the present invention relates to a process for the production of aspartate, which comprises
[21347] (a) increasing or generating the activity of a transcriptional regulator in the cytosol of a cell of a non-human organism or a part thereof, preferably a microorganism, a plant cell, a plant or a part thereof, as compared to a corresponding non-transformed wild type non-human organism or a part thereof; and
[21348] (b) growing the non-human organism or a part thereof under conditions which permit the production of aspartate or a composition comprising aspartate in said non-human organism or in the culture medium surrounding said non-human organism.

[21349] Accordingly, the present invention relates to a process for the production of serine, which comprises
[21350] (a) increasing or generating the activity of a transcriptional regulator in the cytosol of a cell of a non-human organism or a part thereof, preferably a microorganism, a plant cell, a plant or a part thereof, as compared to a corresponding non-transformed wild type non-human organism or a part thereof; and
[21351] (b) growing the non-human organism or a part thereof under conditions which permit the production of serine or a composition comprising serine in said non-human organism or in the culture medium surrounding said non-human organism.

[21352] Accordingly, the present invention relates to a process for the production of tyrosine, which comprises
[21353] (a) increasing or generating the activity of a transcriptional regulator in the cytosol of a cell of a non-human organism or a part thereof, preferably a microorganism, a plant cell, a plant or a part thereof, as compared to a corresponding non-transformed wild type non-human organism or a part thereof; and
[21354] (b) growing the non-human organism or a part thereof under conditions which permit the production of tyrosine or a composition comprising tyrosine in said non-human organism or in the culture medium surrounding said non-human organism.

[21355] Accordingly, the present invention relates to a process for the production of phenylalanine, which comprises
[21356] (a) increasing or generating the activity of a b3989-protein in the cytosol of a cell of a non-human organism or a part thereof, preferably a microorganism, a plant cell, a plant or a part thereof, as compared to a corresponding non-transformed wild type non-human organism or a part thereof; and
[21357] (b) growing the non-human organism or a part thereof under conditions which permit the production of phenylalanine or a composition comprising phenylalanine in said non-human organism or in the culture medium surrounding said non-human organism.

[21358] Accordingly, the present invention relates to a process for the production of tyrosine, which comprises
[21359] (a) increasing or generating the activity of a b3989-protein in the cytosol of a cell of a non-human organism or a part thereof, preferably a microorganism, a plant cell, a plant or a part thereof, as compared to a corresponding non-transformed wild type non-human organism or a part thereof; and
[21360] (b) growing the non-human organism or a part thereof under conditions which permit the production of tyrosine or a composition comprising tyrosine in said non-human organism or in the culture medium surrounding said non-human organism.

[21361] Accordingly, the present invention relates to a process for the production of aspartate, which comprises
[21362] (a) increasing or generating the activity of a acetyltransferase in the cytosol of a cell of a non-human organism or a part thereof, preferably a microorganism, a plant cell, a plant or a part thereof, as compared to a corresponding non-transformed wild type non-human organism or a part thereof; and
[21363] (b) growing the non-human organism or a part thereof under conditions which permit the production of aspartate or a composition comprising aspartate in said non-human organism or in the culture medium surrounding said non-human organism.

[21364] Accordingly, the present invention relates to a process for the production of 5-oxoproline, which comprises
[21365] (a) increasing or generating the activity of a acetyltransferase in the cytosol of a cell of a non-human organism or a part thereof, preferably a microorganism, a plant cell, a plant or a part thereof, as compared to a corresponding non-transformed wild type non-human organism or a part thereof; and
[21366] (b) growing the non-human organism or a part thereof under conditions which permit the production of 5-oxoproline or a composition comprising 5-oxoproline in said non-human organism or in the culture medium surrounding said non-human organism.

[21367] Accordingly, the present invention relates to a process for the production of glycine, which comprises
[21368] (a) increasing or generating the activity of a aspartate kinase in the cytosol of a cell of a non-human organism or a part thereof, preferably a microorganism, a plant cell, a plant or a part thereof, as compared to a corresponding non-transformed wild type non-human organism or a part thereof; and
[21369] (b) growing the non-human organism or a part thereof under conditions which permit the production of glycine or a composition comprising glycine in said non-human organism or in the culture medium surrounding said non-human organism.

[21370] Accordingly, the present invention relates to a process for the production of serine, which comprises
[21371] (a) increasing or generating the activity of a aspartate kinase in the cytosol of a cell of a non-human organism or a part thereof, preferably a microorganism, a plant cell, a plant or a part thereof, as compared to a corresponding non-transformed wild type non-human organism or a part thereof; and
[21372] (b) growing the non-human organism or a part thereof under conditions which permit the production of serine or a composition comprising serine in said non-human organism or in the culture medium surrounding said non-human organism.

[21373] Accordingly, the present invention relates to a process for the production of alanine, which comprises
[21374] (a) increasing or generating the activity of a b4029-protein in the cytosol of a cell of a non-human organism or a part thereof, preferably a microorganism, a plant cell, a plant or a part thereof, as compared to a corresponding non-transformed wild type non-human organism or a part thereof; and
[21375] (b) growing the non-human organism or a part thereof under conditions which permit the production of alanine or a composition comprising alanine in said non-human organism or in the culture medium surrounding said non-human organism.

[21376] Accordingly, the present invention relates to a process for the production of aspartate, which comprises
[21377] (a) increasing or generating the activity of a b4029-protein in the cytosol of a cell of a non-human organism or a part thereof, preferably a microorganism, a plant cell, a plant or a part thereof, as compared to a corresponding non-transformed wild type non-human organism or a part thereof; and
[21378] (b) growing the non-human organism or a part thereof under conditions which permit the production of aspartate or a composition comprising aspartate in said non-human organism or in the culture medium surrounding said non-human organism.

[21379] Accordingly, the present invention relates to a process for the production of glycine, which comprises
[21380] (a) increasing or generating the activity of a b4029-protein in the cytosol of a cell of a non-human organism or a part thereof, preferably a microorganism, a plant cell, a plant or a part thereof, as compared to a corresponding non-transformed wild type non-human organism or a part thereof; and
[21381] (b) growing the non-human organism or a part thereof under conditions which permit the production of glycine or a composition comprising glycine in said non-human organism or in the culture medium surrounding said non-human organism.

[21382] Accordingly, the present invention relates to a process for the production of phenylalanine, which comprises
[21383] (a) increasing or generating the activity of a b4029-protein in the cytosol of a cell of a non-human organism or a part thereof, preferably a microorganism, a plant cell, a plant or a part thereof, as compared to a corresponding non-transformed wild type non-human organism or a part thereof; and
[21384] (b) growing the non-human organism or a part thereof under conditions which permit the production of phenylalanine or a composition comprising phenylalanine in said non-human organism or in the culture medium surrounding said non-human organism.

[21385] Accordingly, the present invention relates to a process for the production of serine, which comprises
[21386] (a) increasing or generating the activity of a b4029-protein in the cytosol of a cell of a non-human organism or a part thereof, preferably a microorganism, a plant cell, a plant or a part thereof, as compared to a corresponding non-transformed wild type non-human organism or a part thereof; and
[21387] (b) growing the non-human organism or a part thereof under conditions which permit the production of serine or a composition comprising serine in said non-human organism or in the culture medium surrounding said non-human organism.

[21388] Accordingly, the present invention relates to a process for the production of tyrosine, which comprises
[21389] (a) increasing or generating the activity of a b4029-protein in the cytosol of a cell of a non-human organism or a part thereof, preferably a microorganism, a plant cell, a plant or a part thereof, as compared to a corresponding non-transformed wild type non-human organism or a part thereof; and
[21390] (b) growing the non-human organism or a part thereof under conditions which permit the production of tyrosine or a composition comprising tyrosine in said non-human organism or in the culture medium surrounding said non-human organism.

[21391] Accordingly, the present invention relates to a process for the production of 5-oxoproline, which comprises
[21392] (a) increasing or generating the activity of a b4029-protein in the cytosol of a cell of a non-human organism or a part thereof, preferably a microorganism, a plant cell, a plant or a part thereof, as compared to a corresponding non-transformed wild type non-human organism or a part thereof; and
[21393] (b) growing the non-human organism or a part thereof under conditions which permit the production of 5-oxoproline or a composition comprising 5-oxoproline in said non-human organism or in the culture medium surrounding said non-human organism.

[21394] Accordingly, the present invention relates to a process for the production of serine, which comprises
[21395] (a) increasing or generating the activity of a b4121-protein in the cytosol of a cell of a non-human organism or a part thereof, preferably a microorganism, a plant cell, a plant or a part thereof, as compared to a corresponding non-transformed wild type non-human organism or a part thereof; and
[21396] (b) growing the non-human organism or a part thereof under conditions which permit the production of serine or a composition comprising serine in said non-human organism or in the culture medium surrounding said non-human organism.

[21397] Accordingly, the present invention relates to a process for the production of aspartate, which comprises
[21398] (a) increasing or generating the activity of a acetyltransferase in the cytosol of a cell of a non-human organism or a part thereof, preferably a microorganism, a plant cell, a plant or a part thereof, as compared to a corresponding non-transformed wild type non-human organism or a part thereof; and
[21399] (b) growing the non-human organism or a part thereof under conditions which permit the production of aspartate or a composition comprising aspartate in said non-human organism or in the culture medium surrounding said non-human organism.

[21400] Accordingly, the present invention relates to a process for the production of phenylalanine, which comprises
[21401] (a) increasing or generating the activity of a acetyltransferase in the cytosol of a cell of a non-human organism or a part thereof, preferably a microorganism, a plant cell, a plant or a part thereof, as compared to a corresponding non-transformed wild type non-human organism or a part thereof; and
[21402] (b) growing the non-human organism or a part thereof under conditions which permit the production of phenylalanine or a composition comprising phenylalanine in said non-human organism or in the culture medium surrounding said non-human organism.

[21403] Accordingly, the present invention relates to a process for the production of serine, which comprises
[21404] (a) increasing or generating the activity of a acetyltransferase in the cytosol of a cell of a non-human organism or a part thereof, preferably a microorganism, a plant cell, a plant or a part thereof, as compared to a corresponding non-transformed wild type non-human organism or a part thereof; and
[21405] (b) growing the non-human organism or a part thereof under conditions which permit the production of serine or a composition comprising serine in said non-human organism or in the culture medium surrounding said non-human organism.

[21406] Accordingly, the present invention relates to a process for the production of tyrosine, which comprises
[21407] (a) increasing or generating the activity of a acetyltransferase in the cytosol of a cell of a non-human organism or a part thereof, preferably a microorganism, a plant cell, a plant or a part thereof, as compared to a corresponding non-transformed wild type non-human organism or a part thereof; and
[21408] (b) growing the non-human organism or a part thereof under conditions which permit the production of tyrosine or a composition comprising tyrosine in said non-human organism or in the culture medium surrounding said non-human organism.

[21409] Accordingly, the present invention relates to a process for the production of serine, which comprises
[21410] (a) increasing or generating the activity of a thioredoxin in the cytosol of a cell of a non-human organism or a part thereof, preferably a microorganism, a plant cell, a plant or a part thereof, as compared to a corresponding non-transformed wild type non-human organism or a part thereof; and
[21411] (b) growing the non-human organism or a part thereof under conditions which permit the production of serine or a composition comprising serine in said non-human organism or in the culture medium surrounding said non-human organism.

[21412] Accordingly, the present invention relates to a process for the production of alanine, which comprises
[21413] (a) increasing or generating the activity of a lysine decarboxylase in the cytosol of a cell of a non-human organism or a part thereof, preferably a microorganism, a plant cell, a plant or a part thereof, as compared to a corresponding non-transformed wild type non-human organism or a part thereof; and
[21414] (b) growing the non-human organism or a part thereof under conditions which permit the production of alanine or a composition comprising alanine in said non-human organism or in the culture medium surrounding said non-human organism.

[21415] Accordingly, the present invention relates to a process for the production of asparagine, which comprises
[21416] (a) increasing or generating the activity of a GM02LC11114-protein in the cytosol of a cell of a non-human organism or a part thereof, preferably a microorganism, a plant cell, a plant or a part thereof, as compared to a corresponding non-transformed wild type non-human organism or a part thereof; and
[21417] (b) growing the non-human organism or a part thereof under conditions which permit the production of asparagine or a composition comprising asparagine in said non-human organism or in the culture medium surrounding said non-human organism.

[21418] Accordingly, the present invention relates to a process for the production of phenylalanine, which comprises
[21419] (a) increasing or generating the activity of a GM02LC11114-protein in the cytosol of a cell of a non-human organism or a part thereof, preferably a microorganism, a plant cell, a plant or a part thereof, as compared to a corresponding non-transformed wild type non-human organism or a part thereof; and
[21420] (b) growing the non-human organism or a part thereof under conditions which permit the production of phenylalanine or a composition comprising phenylalanine in said non-human organism or in the culture medium surrounding said non-human organism.

[21421] Accordingly, the present invention relates to a process for the production of alanine, which comprises
[21422] (a) increasing or generating the activity of a glutaredoxin in the cytosol of a cell of a non-human organism or a part thereof, preferably a microorganism, a plant cell, a plant or a part thereof, as compared to a corresponding non-transformed wild type non-human organism or a part thereof; and
[21423] (b) growing the non-human organism or a part thereof under conditions which permit the production of alanine or a composition comprising alanine in said non-human organism or in the culture medium surrounding said non-human organism.

[21424] Accordingly, the present invention relates to a process for the production of phenylalanine, which comprises
[21425] (a) increasing or generating the activity of a glutaredoxin in the cytosol of a cell of a non-human organism or a part thereof, preferably a microorganism, a plant cell, a plant or a part thereof, as compared to a corresponding non-transformed wild type non-human organism or a part thereof; and
[21426] (b) growing the non-human organism or a part thereof under conditions which permit the production of phenylalanine or a composition comprising phenylalanine in said non-human organism or in the culture medium surrounding said non-human organism.

[21427] Accordingly, the present invention relates to a process for the production of tyrosine, which comprises
[21428] (a) increasing or generating the activity of a glutaredoxin in the cytosol of a cell of a non-human organism or a part thereof, preferably a microorganism, a plant cell, a plant or a part thereof, as compared to a corresponding non-transformed wild type non-human organism or a part thereof; and
[21429] (b) growing the non-human organism or a part thereof under conditions which permit the production of tyrosine or a composition comprising tyrosine in said non-human organism or in the culture medium surrounding said non-human organism.

[21430] Accordingly, the present invention relates to a process for the production of phenylalanine, which comprises
[21431] (a) increasing or generating the activity of a histone H2A in the cytosol of a cell of a non-human organism or a part thereof, preferably a microorganism, a plant cell, a plant or a part thereof, as compared to a corresponding non-transformed wild type non-human organism or a part thereof; and
[21432] (b) growing the non-human organism or a part thereof under conditions which permit the production of phenylalanine or a composition comprising phenylalanine in said non-human organism or in the culture medium surrounding said non-human organism.

[21433] Accordingly, the present invention relates to a process for the production of tyrosine, which comprises
[21434] (a) increasing or generating the activity of a histone H2A in the cytosol of a cell of a non-human organism or a part thereof, preferably a microorganism, a plant cell, a plant or a part thereof, as compared to a corresponding non-transformed wild type non-human organism or a part thereof; and
[21435] (b) growing the non-human organism or a part thereof under conditions which permit the production of tyrosine or a composition comprising tyrosine in said non-human organism or in the culture medium surrounding said non-human organism.

[21436] Accordingly, the present invention relates to a process for the production of aspartate, which comprises
[21437] (a) increasing or generating the activity of a GM02LC17485-protein in the cytosol of a cell of a non-human organism or a part thereof, preferably a microorganism, a plant cell, a plant or a part thereof, as compared to a corresponding non-transformed wild type non-human organism or a part thereof; and
[21438] (b) growing the non-human organism or a part thereof under conditions which permit the production of aspartate or a composition comprising aspartate in said non-human organism or in the culture medium surrounding said non-human organism.

[21439] Accordingly, the present invention relates to a process for the production of phenylalanine, which comprises
[21440] (a) increasing or generating the activity of a RNA binding protein in the cytosol of a cell of a non-human organism or a part thereof, preferably a microorganism, a plant cell, a plant or a part thereof, as compared to a corresponding non-transformed wild type non-human organism or a part thereof; and
[21441] (b) growing the non-human organism or a part thereof under conditions which permit the production of phenylalanine or a composition comprising phenylalanine in said non-human organism or in the culture medium surrounding said non-human organism.

[21442] Accordingly, the present invention relates to a process for the production of tyrosine, which comprises
[21443] (a) increasing or generating the activity of a RNA binding protein in the cytosol of a cell of a non-human organism or a part thereof, preferably a microorganism, a plant cell, a plant or a part thereof, as compared to a corresponding non-transformed wild type non-human organism or a part thereof; and
[21444] (b) growing the non-human organism or a part thereof under conditions which permit the production of tyrosine or a composition comprising tyrosine in said non-human organism or in the culture medium surrounding said non-human organism.

[21445] Accordingly, the present invention relates to a process for the production of phenylalanine, which comprises
[21446] (a) increasing or generating the activity of a transcription factor in the cytosol of a cell of a non-human organism or a part thereof, preferably a microorganism, a plant cell, a plant or a part thereof, as compared to a corresponding non-transformed wild type non-human organism or a part thereof; and
[21447] (b) growing the non-human organism or a part thereof under conditions which permit the production of phenylalanine or a composition comprising phenylalanine in said non-human organism or in the culture medium surrounding said non-human organism.

[21448] Accordingly, the present invention relates to a process for the production of serine, which comprises
[21449] (a) increasing or generating the activity of a transcription factor in the cytosol of a cell of a non-human organism or a part thereof, preferably a microorganism, a plant cell, a plant or a part thereof, as compared to a corresponding non-transformed wild type non-human organism or a part thereof; and
[21450] (b) growing the non-human organism or a part thereof under conditions which permit the production of serine or a composition comprising serine in said non-human organism or in the culture medium surrounding said non-human organism.

[21451] Accordingly, the present invention relates to a process for the production of tyrosine, which comprises
[21452] (a) increasing or generating the activity of a transcription factor in the cytosol of a cell of a non-human organism or a part thereof, preferably a microorganism, a plant cell, a plant or a part thereof, as compared to a corresponding non-transformed wild type non-human organism or a part thereof; and
[21453] (b) growing the non-human organism or a part thereof under conditions which permit the production of tyrosine or a composition comprising tyrosine in said non-human organism or in the culture medium surrounding said non-human organism.

[21454] Accordingly, the present invention relates to a process for the production of alanine, which comprises
[21455] (a) increasing or generating the activity of a cyclin D in the cytosol of a cell of a non-human organism or a part thereof, preferably a microorganism, a plant cell, a plant or a part thereof, as compared to a corresponding non-transformed wild type non-human organism or a part thereof; and
[21456] (b) growing the non-human organism or a part thereof under conditions which permit the production of alanine or a composition comprising alanine in said non-human organism or in the culture medium surrounding said non-human organism.

[21457] Accordingly, the present invention relates to a process for the production of serine, which comprises
[21458] (a) increasing or generating the activity of a cyclin D in the cytosol of a cell of a non-human organism or a part thereof, preferably a microorganism, a plant cell, a plant or a part thereof, as compared to a corresponding non-transformed wild type non-human organism or a part thereof; and
[21459] (b) growing the non-human organism or a part thereof under conditions which permit the production of serine or a composition comprising serine in said non-human organism or in the culture medium surrounding said non-human organism.

[21460] Accordingly, the present invention relates to a process for the production of alanine, which comprises
[21461] (a) increasing or generating the activity of a glutaredoxin in the cytosol of a cell of a non-human organism or a part thereof, preferably a microorganism, a plant cell, a plant or a part thereof, as compared to a corresponding non-transformed wild type non-human organism or a part thereof; and
[21462] (b) growing the non-human organism or a part thereof under conditions which permit the production of alanine or a composition comprising alanine in said non-human organism or in the culture medium surrounding said non-human organism.

[21463] Accordingly, the present invention relates to a process for the production of glycine, which comprises
[21464] (a) increasing or generating the activity of a glutaredoxin in the cytosol of a cell of a non-human organism or a part thereof, preferably a microorganism, a plant cell, a plant or a part thereof, as compared to a corresponding non-transformed wild type non-human organism or a part thereof; and
[21465] (b) growing the non-human organism or a part thereof under conditions which permit the production of glycine or a composition comprising glycine in said non-human organism or in the culture medium surrounding said non-human organism.

[21466] Accordingly, the present invention relates to a process for the production of serine, which comprises
[21467] (a) increasing or generating the activity of a glutaredoxin in the cytosol of a cell of a non-human organism or a part thereof, preferably a microorganism, a plant cell, a plant or a part thereof, as compared to a corresponding non-transformed wild type non-human organism or a part thereof; and
[21468] (b) growing the non-human organism or a part thereof under conditions which permit the production of serine or a composition comprising serine in said non-human organism or in the culture medium surrounding said non-human organism.

[21469] Accordingly, the present invention relates to a process for the production of asparagine, which comprises
[21470] (a) increasing or generating the activity of a s_pp015018333r-protein in the cytosol of a cell of a non-human organism or a part thereof, preferably a microorganism, a plant cell, a plant or a part thereof, as compared to a corresponding non-transformed wild type non-human organism or a part thereof; and
[21471] (b) growing the non-human organism or a part thereof under conditions which permit the production of asparagine or a composition comprising asparagine in said non-human organism or in the culture medium surrounding said non-human organism.

[21472] Accordingly, the present invention relates to a process for the production of phenylalanine, which comprises
[21473] (a) increasing or generating the activity of a s_pp015018333r-protein in the cytosol of a cell of a non-human organism or a part thereof, preferably a microorganism, a plant cell, a plant or a part thereof, as compared to a corresponding non-transformed wild type non-human organism or a part thereof; and
[21474] (b) growing the non-human organism or a part thereof under conditions which permit the production of phenylalanine or a composition comprising phenylalanine in said non-human organism or in the culture medium surrounding said non-human organism.

[21475] Accordingly, the present invention relates to a process for the production of tyrosine, which comprises
[21476] (a) increasing or generating the activity of a s_pp015018333r-protein in the cytosol of a cell of a non-human organism or a part thereof, preferably a microorganism, a plant cell, a plant or a part thereof, as compared to a corresponding non-transformed wild type non-human organism or a part thereof; and
[21477] (b) growing the non-human organism or a part thereof under conditions which permit the production of tyrosine or a composition comprising tyrosine in said non-human organism or in the culture medium surrounding said non-human organism.

[21478] Accordingly, the present invention relates to a process for the production of 5-oxoproline, which comprises
[21479] (a) increasing or generating the activity of a s_pp015018333r-protein in the cytosol of a cell of a non-human organism or a part thereof, preferably a microorganism, a plant cell, a plant or a part thereof, as compared to a corresponding non-transformed wild type non-human organism or a part thereof; and
[21480] (b) growing the non-human organism or a part thereof under conditions which permit the production of 5-oxoproline or a composition comprising 5-oxoproline in said non-human organism or in the culture medium surrounding said non-human organism.

[21481] Accordingly, the present invention relates to a process for the production of citrulline, which comprises
[21482] (a) increasing or generating the activity of a N-acetyl-gamma-glutamyl-phosphate reductase in the cytosol of a cell of a non-human organism or a part thereof, preferably a microorganism, a plant cell, a plant or a part thereof, as compared to a corresponding non-transformed wild type non-human organism or a part thereof; and
[21483] (b) growing the non-human organism or a part thereof under conditions which permit the production of citrulline or a composition comprising citrulline in said non-human organism or in the culture medium surrounding said non-human organism.

[21484] Accordingly, the present invention relates to a process for the production of asparagine, which comprises
[21485] (a) increasing or generating the activity of a agmatinase in the cytosol of a cell of a non-human organism or a part thereof, preferably a microorganism, a plant cell, a plant or a part thereof, as compared to a corresponding non-transformed wild type non-human organism or a part thereof; and
[21486] (b) growing the non-human organism or a part thereof under conditions which permit the production of asparagine or a composition comprising asparagine in said non-human organism or in the culture medium surrounding said non-human organism.

[21487] Accordingly, the present invention relates to a process for the production of tyrosine, which comprises
[21488] (a) increasing or generating the activity of a agmatinase in the cytosol of a cell of a non-human organism or a part thereof, preferably a microorganism, a plant cell, a plant or a part thereof, as compared to a corresponding non-transformed wild type non-human organism or a part thereof; and
[21489] (b) growing the non-human organism or a part thereof under conditions which permit the production of tyrosine or a composition comprising tyrosine in said non-human organism or in the culture medium surrounding said non-human organism.

[21490] Accordingly, the present invention relates to a process for the production of alanine, which comprises
[21491] (a) increasing or generating the activity of a ABC transporter ATP binding component in the cytosol of a cell of a non-human organism or a part thereof, preferably a microorganism, a plant cell, a plant or a part thereof, as compared to a corresponding non-transformed wild type non-human organism or a part thereof; and
[21492] (b) growing the non-human organism or a part thereof under conditions which permit the production of alanine or a composition comprising alanine in said non-human organism or in the culture medium surrounding said non-human organism.

[21493] Accordingly, the present invention relates to a process for the production of phenylalanine, which comprises
[21494] (a) increasing or generating the activity of a flavodoxin in the cytosol of a cell of a non-human organism or a part thereof, preferably a microorganism, a plant cell, a plant or a part thereof, as compared to a corresponding non-transformed wild type non-human organism or a part thereof; and
[21495] (b) growing the non-human organism or a part thereof under conditions which permit the production of phenylalanine or a composition comprising phenylalanine in said non-human organism or in the culture medium surrounding said non-human organism.

[21496] Accordingly, the present invention relates to a process for the production of tyrosine, which comprises
[21497] (a) increasing or generating the activity of a flavodoxin in the cytosol of a cell of a non-human organism or a part thereof, preferably a microorganism, a plant cell, a plant or a part thereof, as compared to a corresponding non-transformed wild type non-human organism or a part thereof; and
[21498] (b) growing the non-human organism or a part thereof under conditions which permit the production of tyrosine or a composition comprising tyrosine in said non-human organism or in the culture medium surrounding said non-human organism.

[21499] Accordingly, the present invention relates to a process for the production of alanine, which comprises
[21500] (a) increasing or generating the activity of a sll0281-protein in the cytosol of a cell of a non-human organism or a part thereof, preferably a microorganism, a plant cell, a plant or a part thereof, as compared to a corresponding non-transformed wild type non-human organism or a part thereof; and
[21501] (b) growing the non-human organism or a part thereof under conditions which permit the production of alanine or a composition comprising alanine in said non-human organism or in the culture medium surrounding said non-human organism.

[21502] Accordingly, the present invention relates to a process for the production of serine, which comprises
[21503] (a) increasing or generating the activity of a uroporphyrin-III C-methyltransferase in the cytosol of a cell of a non-human organism or a part thereof, preferably a microorganism, a plant cell, a plant or a part thereof, as compared to a corresponding non-transformed wild type non-human organism or a part thereof; and
[21504] (b) growing the non-human organism or a part thereof under conditions which permit the production of serine or a composition comprising serine in said non-human organism or in the culture medium surrounding said non-human organism.

[21505] Accordingly, the present invention relates to a process for the production of phenylalanine, which comprises
[21506] (a) increasing or generating the activity of a urease subunit in the cytosol of a cell of a non-human organism or a part thereof, preferably a microorganism, a plant cell, a plant or a part thereof, as compared to a corresponding non-transformed wild type non-human organism or a part thereof; and
[21507] (b) growing the non-human organism or a part thereof under conditions which permit the production of phenylalanine or a composition comprising phenylalanine in said non-human organism or in the culture medium surrounding said non-human organism.

[21508] Accordingly, the present invention relates to a process for the production of tyrosine, which comprises
[21509] (a) increasing or generating the activity of a urease subunit in the cytosol of a cell of a non-human organism or a part thereof, preferably a microorganism, a plant cell, a plant or a part thereof, as compared to a corresponding non-transformed wild type non-human organism or a part thereof; and
[21510] (b) growing the non-human organism or a part thereof under conditions which permit the production of tyrosine or a composition comprising tyrosine in said non-human organism or in the culture medium surrounding said non-human organism.

[21511] Accordingly, the present invention relates to a process for the production of citrulline, which comprises
[21512] (a) increasing or generating the activity of a glucokinase in the cytosol of a cell of a non-human organism or a part thereof, preferably a microorganism, a plant cell, a plant or a part thereof, as compared to a corresponding non-transformed wild type non-human organism or a part thereof; and
[21513] (b) growing the non-human organism or a part thereof under conditions which permit the production of citrulline or a composition comprising citrulline in said non-human organism or in the culture medium surrounding said non-human organism.

[21514] Accordingly, the present invention relates to a process for the production of serine, which comprises
[21515] (a) increasing or generating the activity of a permease protein of phosphate ABC transporter in the cytosol of a cell of a non-human organism or a part thereof, preferably a microorganism, a plant cell, a plant or a part thereof, as compared to a corresponding non-transformed wild type non-human organism or a part thereof; and
[21516] (b) growing the non-human organism or a part thereof under conditions which permit the production of serine or a composition comprising serine in said non-human organism or in the culture medium surrounding said non-human organism.

[21517] Accordingly, the present invention relates to a process for the production of 5-oxoproline, which comprises
[21518] (a) increasing or generating the activity of a permease protein of phosphate ABC transporter in the cytosol of a cell of a non-human organism or a part thereof, preferably a microorganism, a plant cell, a plant or a part thereof, as compared to a corresponding non-transformed wild type non-human organism or a part thereof; and
[21519] (b) growing the non-human organism or a part thereof under conditions which permit the production of 5-oxoproline or a composition comprising 5-oxoproline in said non-human organism or in the culture medium surrounding said non-human organism.

[21520] Accordingly, the present invention relates to a process for the production of aspartate, which comprises
[21521] (a) increasing or generating the activity of a oxireductase in the cytosol of a cell of a non-human organism or a part thereof, preferably a microorganism, a plant cell, a plant or a part thereof, as compared to a corresponding non-transformed wild type non-human organism or a part thereof; and
[21522] (b) growing the non-human organism or a part thereof under conditions which permit the production of aspartate or a composition comprising aspartate in said non-human organism or in the culture medium surrounding said non-human organism.

[21523] Accordingly, the present invention relates to a process for the production of glycine, which comprises
[21524] (a) increasing or generating the activity of a oxireductase in the cytosol of a cell of a non-human organism or a part thereof, preferably a microorganism, a plant cell, a plant or a part thereof, as compared to a corresponding non-transformed wild type non-human organism or a part thereof; and
[21525] (b) growing the non-human organism or a part thereof under conditions which permit the production of glycine or a composition comprising glycine in said non-human organism or in the culture medium surrounding said non-human organism.

[21526] Accordingly, the present invention relates to a process for the production of serine, which comprises
[21527] (a) increasing or generating the activity of a oxireductase in the cytosol of a cell of a non-human organism or a part thereof, preferably a microorganism, a plant cell, a plant or a part thereof, as compared to a corresponding non-transformed wild type non-human organism or a part thereof; and
[21528] (b) growing the non-human organism or a part thereof under conditions which permit the production of serine or a composition comprising serine in said non-human organism or in the culture medium surrounding said non-human organism.

[21529] Accordingly, the present invention relates to a process for the production of tyrosine, which comprises
[21530] (a) increasing or generating the activity of a oxireductase in the cytosol of a cell of a non-human organism or a part thereof, preferably a microorganism, a plant cell, a plant or a part thereof, as compared to a corresponding non-transformed wild type non-human organism or a part thereof; and
[21531] (b) growing the non-human organism or a part thereof under conditions which permit the production of tyrosine or a composition comprising tyrosine in said non-human organism or in the culture medium surrounding said non-human organism.

[21532] Accordingly, the present invention relates to a process for the production of aspartate, which comprises
[21533] (a) increasing or generating the activity of a malate dehydrogenase in the cytosol of a cell of a non-human organism or a part thereof, preferably a microorganism, a plant cell, a plant or a part thereof, as compared to a corresponding non-transformed wild type non-human organism or a part thereof; and
[21534] (b) growing the non-human organism or a part thereof under conditions which permit the production of aspartate or a composition comprising aspartate in said non-human organism or in the culture medium surrounding said non-human organism.

[21535] Accordingly, the present invention relates to a process for the production of phenylalanine, which comprises
[21536] (a) increasing or generating the activity of a malate dehydrogenase in the cytosol of a cell of a non-human organism or a part thereof, preferably a microorganism, a plant cell, a plant or a part thereof, as compared to a corresponding non-transformed wild type non-human organism or a part thereof; and
[21537] (b) growing the non-human organism or a part thereof under conditions which permit the production of phenylalanine or a composition comprising phenylalanine in said non-human organism or in the culture medium surrounding said non-human organism.

[21538] Accordingly, the present invention relates to a process for the production of serine, which comprises
[21539] (a) increasing or generating the activity of a malate dehydrogenase in the cytosol of a cell of a non-human organism or a part thereof, preferably a microorganism, a plant cell, a plant or a part thereof, as compared to a corresponding non-transformed wild type non-human organism or a part thereof; and
[21540] (b) growing the non-human organism or a part thereof under conditions which permit the production of serine or a composition comprising serine in said non-human organism or in the culture medium surrounding said non-human organism.

[21541] Accordingly, the present invention relates to a process for the production of aspartate, which comprises
[21542] (a) increasing or generating the activity of a 3-deoxy-7-phosphoheptulonate synthase in the cytosol of a cell of a non-human organism or a part thereof, preferably a microorganism, a plant cell, a plant or a part thereof, as compared to a corresponding non-transformed wild type non-human organism or a part thereof; and
[21543] (b) growing the non-human organism or a part thereof under conditions which permit the production of aspartate or a composition comprising aspartate in said non-human organism or in the culture medium surrounding said non-human organism.

[21544] Accordingly, the present invention relates to a process for the production of serine, which comprises
[21545] (a) increasing or generating the activity of a glycogen synthase in the cytosol of a cell of a non-human organism or a part thereof, preferably a microorganism, a plant cell, a plant or a part thereof, as compared to a corresponding non-transformed wild type non-human organism or a part thereof; and
[21546] (b) growing the non-human organism or a part thereof under conditions which permit the production of serine or a composition comprising serine in said non-human organism or in the culture medium surrounding said non-human organism.

[21547] Accordingly, the present invention relates to a process for the production of aspartate, which comprises
[21548] (a) increasing or generating the activity of a carbon dioxide concentrating mechanism protein in the cytosol of a cell of a non-human organism or a part thereof, preferably a microorganism, a plant cell, a plant or a part thereof, as compared to a corresponding non-transformed wild type non-human organism or a part thereof; and
[21549] (b) growing the non-human organism or a part thereof under conditions which permit the production of aspartate or a composition comprising aspartate in said non-human organism or in the culture medium surrounding said non-human organism.

[21550] Accordingly, the present invention relates to a process for the production of phenylalanine, which comprises
[21551] (a) increasing or generating the activity of a carbon dioxide concentrating mechanism protein in the cytosol of a cell of a non-human organism or a part thereof, preferably a microorganism, a plant cell, a plant or a part thereof, as compared to a corresponding non-transformed wild type non-human organism or a part thereof; and
[21552] (b) growing the non-human organism or a part thereof under conditions which permit the production of phenylalanine or a composition comprising phenylalanine in said non-human organism or in the culture medium surrounding said non-human organism.

[21553] Accordingly, the present invention relates to a process for the production of serine, which comprises
[21554] (a) increasing or generating the activity of a carbon dioxide concentrating mechanism protein in the cytosol of a cell of a non-human organism or a part thereof, preferably a microorganism, a plant cell, a plant or a part thereof, as compared to a corresponding non-transformed wild type non-human organism or a part thereof; and
[21555] (b) growing the non-human organism or a part thereof under conditions which permit the production of serine or a composition comprising serine in said non-human organism or in the culture medium surrounding said non-human organism.

[21556] Accordingly, the present invention relates to a process for the production of aspartate, which comprises
[21557] (a) increasing or generating the activity of a sll1032-protein in the cytosol of a cell of a non-human organism or a part thereof, preferably a microorganism, a plant cell, a plant or a part thereof, as compared to a corresponding non-transformed wild type non-human organism or a part thereof; and
[21558] (b) growing the non-human organism or a part thereof under conditions which permit the production of aspartate or a composition comprising aspartate in said non-human organism or in the culture medium surrounding said non-human organism.

[21559] Accordingly, the present invention relates to a process for the production of serine, which comprises
[21560] (a) increasing or generating the activity of a phosphoribosylformyl glycinamidine synthase subunit in the cytosol of a cell of a non-human organism or a part thereof, preferably a microorganism, a plant cell, a plant or a part thereof, as compared to a corresponding non-transformed wild type non-human organism or a part thereof; and
[21561] (b) growing the non-human organism or a part thereof under conditions which permit the production of serine or a composition comprising serine in said non-human organism or in the culture medium surrounding said non-human organism.

[21562] Accordingly, the present invention relates to a process for the production of aspartate, which comprises
[21563] (a) increasing or generating the activity of a 5′-nucleotidase in the cytosol of a cell of a non-human organism or a part thereof, preferably a microorganism, a plant cell, a plant or a part thereof, as compared to a corresponding non-transformed wild type non-human organism or a part thereof; and
[21564] (b) growing the non-human organism or a part thereof under conditions which permit the production of aspartate or a composition comprising aspartate in said non-human organism or in the culture medium surrounding said non-human organism.

[21565] Accordingly, the present invention relates to a process for the production of 5-oxoproline, which comprises
[21566] (a) increasing or generating the activity of a 5′-nucleotidase in the cytosol of a cell of a non-human organism or a part thereof, preferably a microorganism, a plant cell, a plant or a part thereof, as compared to a corresponding non-transformed wild type non-human organism or a part thereof; and
[21567] (b) growing the non-human organism or a part thereof under conditions which permit the production of 5-oxoproline or a composition comprising 5-oxoproline in said non-human organism or in the culture medium surrounding said non-human organism.

[21568] Accordingly, the present invention relates to a process for the production of asparagine, which comprises
[21569] (a) increasing or generating the activity of a glycogen (starch) synthase in the cytosol of a cell of a non-human organism or a part thereof, preferably a microorganism, a plant cell, a plant or a part thereof, as compared to a corresponding non-transformed wild type non-human organism or a part thereof; and
[21570] (b) growing the non-human organism or a part thereof under conditions which permit the production of asparagine or a composition comprising asparagine in said non-human organism or in the culture medium surrounding said non-human organism.

[21571] Accordingly, the present invention relates to a process for the production of tyrosine, which comprises
[21572] (a) increasing or generating the activity of a glycogen (starch) synthase in the cytosol of a cell of a non-human organism or a part thereof, preferably a microorganism, a plant cell, a plant or a part thereof, as compared to a corresponding non-transformed wild type non-human organism or a part thereof; and
[21573] (b) growing the non-human organism or a part thereof under conditions which permit the production of tyrosine or a composition comprising tyrosine in said non-human organism or in the culture medium surrounding said non-human organism.

[21574] Accordingly, the present invention relates to a process for the production of aspartate, which comprises
[21575] (a) increasing or generating the activity of a CTP synthetase in the cytosol of a cell of a non-human organism or a part thereof, preferably a microorganism, a plant cell, a plant or a part thereof, as compared to a corresponding non-transformed wild type non-human organism or a part thereof; and
[21576] (b) growing the non-human organism or a part thereof under conditions which permit the production of aspartate or a composition comprising aspartate in said non-human organism or in the culture medium surrounding said non-human organism.

[21577] Accordingly, the present invention relates to a process for the production of glycine, which comprises
[21578] (a) increasing or generating the activity of a nitrate/nitrite transport protein in the cytosol of a cell of a non-human organism or a part thereof, preferably a microorganism, a plant cell, a plant or a part thereof, as compared to a corresponding non-transformed wild type non-human organism or a part thereof; and
[21579] (b) growing the non-human organism or a part thereof under conditions which permit the production of glycine or a composition comprising glycine in said non-human organism or in the culture medium surrounding said non-human organism.

[21580] Accordingly, the present invention relates to a process for the production of phenylalanine, which comprises
[21581] (a) increasing or generating the activity of a nitrate/nitrite transport protein in the cytosol of a cell of a non-human organism or a part thereof, preferably a microorganism, a plant cell, a plant or a part thereof, as compared to a corresponding non-transformed wild type non-human organism or a part thereof; and
[21582] (b) growing the non-human organism or a part thereof under conditions which permit the production of phenylalanine or a composition comprising phenylalanine in said non-human organism or in the culture medium surrounding said non-human organism.

[21583] Accordingly, the present invention relates to a process for the production of serine, which comprises
[21584] (a) increasing or generating the activity of a nitrate/nitrite transport protein in the cytosol of a cell of a non-human organism or a part thereof, preferably a microorganism, a plant cell, a plant or a part thereof, as compared to a corresponding non-transformed wild type non-human organism or a part thereof; and
[21585] (b) growing the non-human organism or a part thereof under conditions which permit the production of serine or a composition comprising serine in said non-human organism or in the culture medium surrounding said non-human organism.

[21586] Accordingly, the present invention relates to a process for the production of tyrosine, which comprises
[21587] (a) increasing or generating the activity of a nitrate/nitrite transport protein in the cytosol of a cell of a non-human organism or a part thereof, preferably a microorganism, a plant cell, a plant or a part thereof, as compared to a corresponding non-transformed wild type non-human organism or a part thereof; and
[21588] (b) growing the non-human organism or a part thereof under conditions which permit the production of tyrosine or a composition comprising tyrosine in said non-human organism or in the culture medium surrounding said non-human organism.

[21589] Accordingly, the present invention relates to a process for the production of aspartate, which comprises
[21590] (a) increasing or generating the activity of a CDP-diacylglycerol-glycerol-3-phosphate 3-phosphatidyltransferase in the cytosol of a cell of a non-human organism or a part thereof, preferably a microorganism, a plant cell, a plant or a part thereof, as compared to a corresponding non-transformed wild type non-human organism or a part thereof; and
[21591] (b) growing the non-human organism or a part thereof under conditions which permit the production of aspartate or a composition comprising aspartate in said non-human organism or in the culture medium surrounding said non-human organism.

[21592] Accordingly, the present invention relates to a process for the production of 5-oxoproline, which comprises
[21593] (a) increasing or generating the activity of a CDP-diacylglycerol-glycerol-3-phosphate 3-phosphatidyltransferase in the cytosol of a cell of a non-human organism or a part thereof, preferably a microorganism, a plant cell, a plant or a part thereof, as compared to a corresponding non-transformed wild type non-human organism or a part thereof; and
[21594] (b) growing the non-human organism or a part thereof under conditions which permit the production of 5-oxoproline or a composition comprising 5-oxoproline in said non-human organism or in the culture medium surrounding said non-human organism.

[21595] Accordingly, the present invention relates to a process for the production of serine, which comprises
[21596] (a) increasing or generating the activity of a glutathione S-transferase in the cytosol of a cell of a non-human organism or a part thereof, preferably a microorganism, a plant cell, a plant or a part thereof, as compared to a corresponding non-transformed wild type non-human organism or a part thereof; and
[21597] (b) growing the non-human organism or a part thereof under conditions which permit the production of serine or a composition comprising serine in said non-human organism or in the culture medium surrounding said non-human organism.

[21598] Accordingly, the present invention relates to a process for the production of aspartate, which comprises
[21599] (a) increasing or generating the activity of a exopolyphosphatase in the cytosol of a cell of a non-human organism or a part thereof, preferably a microorganism, a plant cell, a plant or a part thereof, as compared to a corresponding non-transformed wild type non-human organism or a part thereof; and
[21600] (b) growing the non-human organism or a part thereof under conditions which permit the production of aspartate or a composition comprising aspartate in said non-human organism or in the culture medium surrounding said non-human organism.

[21601] Accordingly, the present invention relates to a process for the production of phenylalanine, which comprises
[21602] (a) increasing or generating the activity of a exopolyphosphatase in the cytosol of a cell of a non-human organism or a part thereof, preferably a microorganism, a plant cell, a plant or a part thereof, as compared to a corresponding non-transformed wild type non-human organism or a part thereof; and
[21603] (b) growing the non-human organism or a part thereof under conditions which permit the production of phenylalanine or a composition comprising phenylalanine in said non-human organism or in the culture medium surrounding said non-human organism.

[21604] Accordingly, the present invention relates to a process for the production of serine, which comprises
[21605] (a) increasing or generating the activity of a exopolyphosphatase in the cytosol of a cell of a non-human organism or a part thereof, preferably a microorganism, a plant cell, a plant or a part thereof, as compared to a corresponding non-transformed wild type non-human organism or a part thereof; and
[21606] (b) growing the non-human organism or a part thereof under conditions which permit the production of serine or a composition comprising serine in said non-human organism or in the culture medium surrounding said non-human organism.

[21607] Accordingly, the present invention relates to a process for the production of aspartate, which comprises
[21608] (a) increasing or generating the activity of a ABC metal ion transporter substrate-binding protein in the cytosol of a cell of a non-human organism or a part thereof, preferably a microorganism, a plant cell, a plant or a part thereof, as compared to a corresponding non-transformed wild type non-human organism or a part thereof; and
[21609] (b) growing the non-human organism or a part thereof under conditions which permit the production of aspartate or a composition comprising aspartate in said non-human organism or in the culture medium surrounding said non-human organism.

[21610] Accordingly, the present invention relates to a process for the production of phenylalanine, which comprises
[21611] (a) increasing or generating the activity of a ABC metal ion transporter substrate-binding protein in the cytosol of a cell of a non-human organism or a part thereof, preferably a microorganism, a plant cell, a plant or a part thereof, as compared to a corresponding non-transformed wild type non-human organism or a part thereof; and
[21612] (b) growing the non-human organism or a part thereof under conditions which permit the production of phenylalanine or a composition comprising phenylalanine in said non-human organism or in the culture medium surrounding said non-human organism.

[21613] Accordingly, the present invention relates to a process for the production of serine, which comprises
[21614] (a) increasing or generating the activity of a sll1761-protein in the cytosol of a cell of a non-human organism or a part thereof, preferably a microorganism, a plant cell, a plant or a part thereof, as compared to a corresponding non-transformed wild type non-human organism or a part thereof; and
[21615] (b) growing the non-human organism or a part thereof under conditions which permit the production of serine or a composition comprising serine in said non-human organism or in the culture medium surrounding said non-human organism.

[21616] Accordingly, the present invention relates to a process for the production of tyrosine, which comprises
[21617] (a) increasing or generating the activity of a sll1761-protein in the cytosol of a cell of a non-human organism or a part thereof, preferably a microorganism, a plant cell, a plant or a part thereof, as compared to a corresponding non-transformed wild type non-human organism or a part thereof; and
[21618] (b) growing the non-human organism or a part thereof under conditions which permit the production of tyrosine or a composition comprising tyrosine in said non-human organism or in the culture medium surrounding said non-human organism.

[21619] Accordingly, the present invention relates to a process for the production of alanine, which comprises
[21620] (a) increasing or generating the activity of a adenylate kinase in the cytosol of a cell of a non-human organism or a part thereof, preferably a microorganism, a plant cell, a plant or a part thereof, as compared to a corresponding non-transformed wild type non-human organism or a part thereof; and
[21621] (b) growing the non-human organism or a part thereof under conditions which permit the production of alanine or a composition comprising alanine in said non-human organism or in the culture medium surrounding said non-human organism.

[21622] Accordingly, the present invention relates to a process for the production of citrulline, which comprises
[21623] (a) increasing or generating the activity of a adenylate kinase in the cytosol of a cell of a non-human organism or a part thereof, preferably a microorganism, a plant cell, a plant or a part thereof, as compared to a corresponding non-transformed wild type non-human organism or a part thereof; and
[21624] (b) growing the non-human organism or a part thereof under conditions which permit the production of citrulline or a composition comprising citrulline in said non-human organism or in the culture medium surrounding said non-human organism.

[21625] Accordingly, the present invention relates to a process for the production of glycine, which comprises
[21626] (a) increasing or generating the activity of a adenylate kinase in the cytosol of a cell of a non-human organism or a part thereof, preferably a microorganism, a plant cell, a plant or a part thereof, as compared to a corresponding non-transformed wild type non-human organism or a part thereof; and
[21627] (b) growing the non-human organism or a part thereof under conditions which permit the production of glycine or a composition comprising glycine in said non-human organism or in the culture medium surrounding said non-human organism.

[21628] Accordingly, the present invention relates to a process for the production of serine, which comprises
[21629] (a) increasing or generating the activity of a adenylate kinase in the cytosol of a cell of a non-human organism or a part thereof, preferably a microorganism, a plant cell, a plant or a part thereof, as compared to a corresponding non-transformed wild type non-human organism or a part thereof; and
[21630] (b) growing the non-human organism or a part thereof under conditions which permit the production of serine or a composition comprising serine in said non-human organism or in the culture medium surrounding said non-human organism.

[21631] Accordingly, the present invention relates to a process for the production of tyrosine, which comprises
[21632] (a) increasing or generating the activity of a adenylate kinase in the cytosol of a cell of a non-human organism or a part thereof, preferably a microorganism, a plant cell, a plant or a part thereof, as compared to a corresponding non-transformed wild type non-human organism or a part thereof; and
[21633] (b) growing the non-human organism or a part thereof under conditions which permit the production of tyrosine or a composition comprising tyrosine in said non-human organism or in the culture medium surrounding said non-human organism.

[21634] Accordingly, the present invention relates to a process for the production of glycine, which comprises
[21635] (a) increasing or generating the activity of a acyl transferase in the cytosol of a cell of a non-human organism or a part thereof, preferably a microorganism, a plant cell, a plant or a part thereof, as compared to a corresponding non-transformed wild type non-human organism or a part thereof; and
[21636] (b) growing the non-human organism or a part thereof under conditions which permit the production of glycine or a composition comprising glycine in said non-human organism or in the culture medium surrounding said non-human organism.

[21637] Accordingly, the present invention relates to a process for the production of phenylalanine, which comprises
[21638] (a) increasing or generating the activity of a acyl transferase in the cytosol of a cell of a non-human organism or a part thereof, preferably a microorganism, a plant cell, a plant or a part thereof, as compared to a corresponding non-transformed wild type non-human organism or a part thereof; and
[21639] (b) growing the non-human organism or a part thereof under conditions which permit the production of phenylalanine or a composition comprising phenylalanine in said non-human organism or in the culture medium surrounding said non-human organism.

[21640] Accordingly, the present invention relates to a process for the production of serine, which comprises
[21641] (a) increasing or generating the activity of a acyl transferase in the cytosol of a cell of a non-human organism or a part thereof, preferably a microorganism, a plant cell, a plant or a part thereof, as compared to a corresponding non-transformed wild type non-human organism or a part thereof; and
[21642] (b) growing the non-human organism or a part thereof under conditions which permit the production of serine or a composition comprising serine in said non-human organism or in the culture medium surrounding said non-human organism.

[21643] Accordingly, the present invention relates to a process for the production of aspartate, which comprises
[21644] (a) increasing or generating the activity of a coproporphyrinogen III oxidase in the cytosol of a cell of a non-human organism or a part thereof, preferably a microorganism, a plant cell, a plant or a part thereof, as compared to a corresponding non-transformed wild type non-human organism or a part thereof; and
[21645] (b) growing the non-human organism or a part thereof under conditions which permit the production of aspartate or a composition comprising aspartate in said non-human organism or in the culture medium surrounding said non-human organism.

[21646] Accordingly, the present invention relates to a process for the production of citrulline, which comprises
[21647] (a) increasing or generating the activity of a coproporphyrinogen III oxidase in the cytosol of a cell of a non-human organism or a part thereof, preferably a microorganism, a plant cell, a plant or a part thereof, as compared to a corresponding non-transformed wild type non-human organism or a part thereof; and
[21648] (b) growing the non-human organism or a part thereof under conditions which permit the production of citrulline or a composition comprising citrulline in said non-human organism or in the culture medium surrounding said non-human organism.

[21649] Accordingly, the present invention relates to a process for the production of phenylalanine, which comprises
[21650] (a) increasing or generating the activity of a coproporphyrinogen III oxidase in the cytosol of a cell of a non-human organism or a part thereof, preferably a microorganism, a plant cell, a plant or a part thereof, as compared to a corresponding non-transformed wild type non-human organism or a part thereof; and
[21651] (b) growing the non-human organism or a part thereof under conditions which permit the production of phenylalanine or a composition comprising phenylalanine in said non-human organism or in the culture medium surrounding said non-human organism.

[21652] Accordingly, the present invention relates to a process for the production of serine, which comprises
[21653] (a) increasing or generating the activity of a coproporphyrinogen III oxidase in the cytosol of a cell of a non-human organism or a part thereof, preferably a microorganism, a plant cell, a plant or a part thereof, as compared to a corresponding non-transformed wild type non-human organism or a part thereof; and
[21654] (b) growing the non-human organism or a part thereof under conditions which permit the production of serine or a composition comprising serine in said non-human organism or in the culture medium surrounding said non-human organism.

[21655] Accordingly, the present invention relates to a process for the production of tyrosine, which comprises
[21656] (a) increasing or generating the activity of a coproporphyrinogen Ill oxidase in the cytosol of a cell of a non-human organism or a part thereof, preferably a microorganism, a plant cell, a plant or a part thereof, as compared to a corresponding non-transformed wild type non-human organism or a part thereof; and
[21657] (b) growing the non-human organism or a part thereof under conditions which permit the production of tyrosine or a composition comprising tyrosine in said non-human organism or in the culture medium surrounding said non-human organism.

[21658] Accordingly, the present invention relates to a process for the production of aspartate, which comprises
[21659] (a) increasing or generating the activity of a cation-transporting ATPase in the cytosol of a cell of a non-human organism or a part thereof, preferably a microorganism, a plant cell, a plant or a part thereof, as compared to a corresponding non-transformed wild type non-human organism or a part thereof; and
[21660] (b) growing the non-human organism or a part thereof under conditions which permit the production of aspartate or a composition comprising aspartate in said non-human organism or in the culture medium surrounding said non-human organism.

[21661] Accordingly, the present invention relates to a process for the production of aspartate, which comprises
[21662] (a) increasing or generating the activity of a cation-transporting ATPase in the cytosol of a cell of a non-human organism or a part thereof, preferably a microorganism, a plant cell, a plant or a part thereof, as compared to a corresponding non-transformed wild type non-human organism or a part thereof; and
[21663] (b) growing the non-human organism or a part thereof under conditions which permit the production of aspartate or a composition comprising aspartate in said non-human organism or in the culture medium surrounding said non-human organism.

[21664] Accordingly, the present invention relates to a process for the production of glycine, which comprises
[21665] (a) increasing or generating the activity of a glycosyl transferase in the cytosol of a cell of a non-human organism or a part thereof, preferably a microorganism, a plant cell, a plant or a part thereof, as compared to a corresponding non-transformed wild type non-human organism or a part thereof; and
[21666] (b) growing the non-human organism or a part thereof under conditions which permit the production of glycine or a composition comprising glycine in said non-human organism or in the culture medium surrounding said non-human organism.

[21667] Accordingly, the present invention relates to a process for the production of phenylalanine, which comprises
[21668] (a) increasing or generating the activity of a precorrin methylase in the cytosol of a cell of a non-human organism or a part thereof, preferably a microorganism, a plant cell, a plant or a part thereof, as compared to a corresponding non-transformed wild type non-human organism or a part thereof; and
[21669] (b) growing the non-human organism or a part thereof under conditions which permit the production of phenylalanine or a composition comprising phenylalanine in said non-human organism or in the culture medium surrounding said non-human organism.

[21670] Accordingly, the present invention relates to a process for the production of tyrosine, which comprises
[21671] (a) increasing or generating the activity of a precorrin methylase in the cytosol of a cell of a non-human organism or a part thereof, preferably a microorganism, a plant cell, a plant or a part thereof, as compared to a corresponding non-transformed wild type non-human organism or a part thereof; and
[21672] (b) growing the non-human organism or a part thereof under conditions which permit the production of tyrosine or a composition comprising tyrosine in said non-human organism or in the culture medium surrounding said non-human organism.

[21673] Accordingly, the present invention relates to a process for the production of citrulline, which comprises
[21674] (a) increasing or generating the activity of a aldehyde dehydrogenase in the cytosol of a cell of a non-human organism or a part thereof, preferably a microorganism, a plant cell, a plant or a part thereof, as compared to a corresponding non-transformed wild type non-human organism or a part thereof; and
[21675] (b) growing the non-human organism or a part thereof under conditions which permit the production of citrulline or a composition comprising citrulline in said non-human organism or in the culture medium surrounding said non-human organism.

[21676] Accordingly, the present invention relates to a process for the production of alanine, which comprises
[21677] (a) increasing or generating the activity of a bifunctional purine biosynthesis protein in the cytosol of a cell of a non-human organism or a part thereof, preferably a microorganism, a plant cell, a plant or a part thereof, as compared to a corresponding non-transformed wild type non-human organism or a part thereof; and
[21678] (b) growing the non-human organism or a part thereof under conditions which permit the production of alanine or a composition comprising alanine in said non-human organism or in the culture medium surrounding said non-human organism.

[21679] Accordingly, the present invention relates to a process for the production of serine, which comprises
[21680] (a) increasing or generating the activity of a bifunctional purine biosynthesis protein in the cytosol of a cell of a non-human organism or a part thereof, preferably a microorganism, a plant cell, a plant or a part thereof, as compared to a corresponding non-transformed wild type non-human organism or a part thereof; and
[21681] (b) growing the non-human organism or a part thereof under conditions which permit the production of serine or a composition comprising serine in said non-human organism or in the culture medium surrounding said non-human organism.

[21682] Accordingly, the present invention relates to a process for the production of 5-oxoproline, which comprises
[21683] (a) increasing or generating the activity of a bifunctional purine biosynthesis protein in the cytosol of a cell of a non-human organism or a part thereof, preferably a microorganism, a plant cell, a plant or a part thereof, as compared to a corresponding non-transformed wild type non-human organism or a part thereof; and
[21684] (b) growing the non-human organism or a part thereof under conditions which permit the production of 5-oxoproline or a composition comprising 5-oxoproline in said non-human organism or in the culture medium surrounding said non-human organism.

[21685] Accordingly, the present invention relates to a process for the production of asparagine, which comprises
[21686] (a) increasing or generating the activity of a Glu/Leu/Phe/Val dehydrogenase in the cytosol of a cell of a non-human organism or a part thereof, preferably a microorganism, a plant cell, a plant or a part thereof, as compared to a corresponding non-transformed wild type non-human organism or a part thereof; and
[21687] (b) growing the non-human organism or a part thereof under conditions which permit the production of asparagine or a composition comprising asparagine in said non-human organism or in the culture medium surrounding said non-human organism.

[21688] Accordingly, the present invention relates to a process for the production of phenylalanine, which comprises
[21689] (a) increasing or generating the activity of a Glu/Leu/Phe/Val dehydrogenase in the cytosol of a cell of a non-human organism or a part thereof, preferably a microorganism, a plant cell, a plant or a part thereof, as compared to a corresponding non-transformed wild type non-human organism or a part thereof; and
[21690] (b) growing the non-human organism or a part thereof under conditions which permit the production of phenylalanine or a composition comprising phenylalanine in said non-human organism or in the culture medium surrounding said non-human organism.

[21691] Accordingly, the present invention relates to a process for the production of tyrosine, which comprises
[21692] (a) increasing or generating the activity of a Glu/Leu/Phe/Val dehydrogenase in the cytosol of a cell of a non-human organism or a part thereof, preferably a microorganism, a plant cell, a plant or a part thereof, as compared to a corresponding non-transformed wild type non-human organism or a part thereof; and
[21693] (b) growing the non-human organism or a part thereof under conditions which permit the production of tyrosine or a composition comprising tyrosine in said non-human organism or in the culture medium surrounding said non-human organism.

[21694] Accordingly, the present invention relates to a process for the production of phenylalanine, which comprises
[21695] (a) increasing or generating the activity of a malate dehydrogenase in the cytosol of a cell of a non-human organism or a part thereof, preferably a microorganism, a plant cell, a plant or a part thereof, as compared to a corresponding non-transformed wild type non-human organism or a part thereof; and
[21696] (b) growing the non-human organism or a part thereof under conditions which permit the production of phenylalanine or a composition comprising phenylalanine in said non-human organism or in the culture medium surrounding said non-human organism.

[21697] Accordingly, the present invention relates to a process for the production of alanine, which comprises
[21698] (a) increasing or generating the activity of a geranylgeranyl pyrophosphate synthase in the cytosol of a cell of a non-human organism or a part thereof, preferably a microorganism, a plant cell, a plant or a part thereof, as compared to a corresponding non-transformed wild type non-human organism or a part thereof; and
[21699] (b) growing the non-human organism or a part thereof under conditions which permit the production of alanine or a composition comprising alanine in said non-human organism or in the culture medium surrounding said non-human organism.

[21700] Accordingly, the present invention relates to a process for the production of asparagine, which comprises
[21701] (a) increasing or generating the activity of a geranylgeranyl pyrophosphate synthase in the cytosol of a cell of a non-human organism or a part thereof, preferably a microorganism, a plant cell, a plant or a part thereof, as compared to a corresponding non-transformed wild type non-human organism or a part thereof; and
[21702] (b) growing the non-human organism or a part thereof under conditions which permit the production of asparagine or a composition comprising asparagine in said non-human organism or in the culture medium surrounding said non-human organism.

[21703] Accordingly, the present invention relates to a process for the production of phenylalanine, which comprises
[21704] (a) increasing or generating the activity of a geranylgeranyl pyrophosphate synthase in the cytosol of a cell of a non-human organism or a part thereof, preferably a microorganism, a plant cell, a plant or a part thereof, as compared to a corresponding non-transformed wild type non-human organism or a part thereof; and
[21705] (b) growing the non-human organism or a part thereof under conditions which permit the production of phenylalanine or a composition comprising phenylalanine in said non-human organism or in the culture medium surrounding said non-human organism.

[21706] Accordingly, the present invention relates to a process for the production of serine, which comprises
[21707] (a) increasing or generating the activity of a geranylgeranyl pyrophosphate synthase in the cytosol of a cell of a non-human organism or a part thereof, preferably a microorganism, a plant cell, a plant or a part thereof, as compared to a corresponding non-transformed wild type non-human organism or a part thereof; and
[21708] (b) growing the non-human organism or a part thereof under conditions which permit the production of serine or a composition comprising serine in said non-human organism or in the culture medium surrounding said non-human organism.

[21709] Accordingly, the present invention relates to a process for the production of tyrosine, which comprises
[21710] (a) increasing or generating the activity of a geranylgeranyl pyrophosphate synthase in the cytosol of a cell of a non-human organism or a part thereof, preferably a microorganism, a plant cell, a plant or a part thereof, as compared to a corresponding non-transformed wild type non-human organism or a part thereof; and
[21711] (b) growing the non-human organism or a part thereof under conditions which permit the production of tyrosine or a composition comprising tyrosine in said non-human organism or in the culture medium surrounding said non-human organism.

[21712] Accordingly, the present invention relates to a process for the production of 5-oxoproline, which comprises
[21713] (a) increasing or generating the activity of a geranylgeranyl pyrophosphate synthase in the cytosol of a cell of a non-human organism or a part thereof, preferably a microorganism, a plant cell, a plant or a part thereof, as compared to a corresponding non-transformed wild type non-human organism or a part thereof; and
[21714] (b) growing the non-human organism or a part thereof under conditions which permit the production of 5-oxoproline or a composition comprising 5-oxoproline in said non-human organism or in the culture medium surrounding said non-human organism.

[21715] Accordingly, the present invention relates to a process for the production of phenylalanine, which comprises
[21716] (a) increasing or generating the activity of a amine oxidase in the cytosol of a cell of a non-human organism or a part thereof, preferably a microorganism, a plant cell, a plant or a part thereof, as compared to a corresponding non-transformed wild type non-human organism or a part thereof; and
[21717] (b) growing the non-human organism or a part thereof under conditions which permit the production of phenylalanine or a composition comprising phenylalanine in said non-human organism or in the culture medium surrounding said non-human organism.

[21718] Accordingly, the present invention relates to a process for the production of serine, which comprises
[21719] (a) increasing or generating the activity of a kinase in the cytosol of a cell of a non-human organism or a part thereof, preferably a microorganism, a plant cell, a plant or a part thereof, as compared to a corresponding non-transformed wild type non-human organism or a part thereof; and
[21720] (b) growing the non-human organism or a part thereof under conditions which permit the production of serine or a composition comprising serine in said non-human organism or in the culture medium surrounding said non-human organism.

[21721] Accordingly, the present invention relates to a process for the production of tyrosine, which comprises
[21722] (a) increasing or generating the activity of a tryptophan synthase alpha chain in the cytosol of a cell of a non-human organism or a part thereof, preferably a microorganism, a plant cell, a plant or a part thereof, as compared to a corresponding non-transformed wild type non-human organism or a part thereof; and
[21723] (b) growing the non-human organism or a part thereof under conditions which permit the production of tyrosine or a composition comprising tyrosine in said non-human organism or in the culture medium surrounding said non-human organism.

[21724] Accordingly, the present invention relates to a process for the production of ornithine, which comprises
[21725] (a) increasing or generating the activity of a argininosuccinate lyase in the cytosol of a cell of a non-human organism or a part thereof, preferably a microorganism, a plant cell, a plant or a part thereof, as compared to a corresponding non-transformed wild type non-human organism or a part thereof; and
[21726] (b) growing the non-human organism or a part thereof under conditions which permit the production of ornithine or a composition comprising ornithine in said non-human organism or in the culture medium surrounding said non-human organism.

[21727] Accordingly, the present invention relates to a process for the production of serine, which comprises
[21728] (a) increasing or generating the activity of a argininosuccinate lyase in the cytosol of a cell of a non-human organism or a part thereof, preferably a microorganism, a plant cell, a plant or a part thereof, as compared to a corresponding non-transformed wild type non-human organism or a part thereof; and
[21729] (b) growing the non-human organism or a part thereof under conditions which permit the production of serine or a composition comprising serine in said non-human organism or in the culture medium surrounding said non-human organism.

[21730] Accordingly, the present invention relates to a process for the production of asparagine, which comprises
[21731] (a) increasing or generating the activity of a gamma-glutamyltranspeptidase in the cytosol of a cell of a non-human organism or a part thereof, preferably a microorganism, a plant cell, a plant or a part thereof, as compared to a corresponding non-transformed wild type non-human organism or a part thereof; and
[21732] (b) growing the non-human organism or a part thereof under conditions which permit the production of asparagine or a composition comprising asparagine in said non-human organism or in the culture medium surrounding said non-human organism.

[21733] Accordingly, the present invention relates to a process for the production of aspartate, which comprises
[21734] (a) increasing or generating the activity of a iron(III) dicitrate-binding protein in the cytosol of a cell of a non-human organism or a part thereof, preferably a microorganism, a plant cell, a plant or a part thereof, as compared to a corresponding non-transformed wild type non-human organism or a part thereof; and
[21735] (b) growing the non-human organism or a part thereof under conditions which permit the production of aspartate or a composition comprising aspartate in said non-human organism or in the culture medium surrounding said non-human organism.

[21736] Accordingly, the present invention relates to a process for the production of phenylalanine, which comprises
[21737] (a) increasing or generating the activity of a iron(III) dicitrate-binding protein in the cytosol of a cell of a non-human organism or a part thereof, preferably a microorganism, a plant cell, a plant or a part thereof, as compared to a corresponding non-transformed wild type non-human organism or a part thereof; and
[21738] (b) growing the non-human organism or a part thereof under conditions which permit the production of phenylalanine or a composition comprising phenylalanine in said non-human organism or in the culture medium surrounding said non-human organism.

[21739] Accordingly, the present invention relates to a process for the production of phenylalanine, which comprises
[21740] (a) increasing or generating the activity of a Na+/K+ transporter in the cytosol of a cell of a non-human organism or a part thereof, preferably a microorganism, a plant cell, a plant or a part thereof, as compared to a corresponding non-transformed wild type non-human organism or a part thereof; and
[21741] (b) growing the non-human organism or a part thereof under conditions which permit the production of phenylalanine or a composition comprising phenylalanine in said non-human organism or in the culture medium surrounding said non-human organism.

[21742] Accordingly, the present invention relates to a process for the production of tyrosine, which comprises
[21743] (a) increasing or generating the activity of a Na+/K+ transporter in the cytosol of a cell of a non-human organism or a part thereof, preferably a microorganism, a plant cell, a plant or a part thereof, as compared to a corresponding non-transformed wild type non-human organism or a part thereof; and
[21744] (b) growing the non-human organism or a part thereof under conditions which permit the production of tyrosine or a composition comprising tyrosine in said non-human organism or in the culture medium surrounding said non-human organism.

[21745] Accordingly, the present invention relates to a process for the production of phenylalanine, which comprises
[21746] (a) increasing or generating the activity of a 3-oxoacyl-[acyl-carrier-protein] synthase in the cytosol of a cell of a non-human organism or a part thereof, preferably a microorganism, a plant cell, a plant or a part thereof, as compared to a corresponding non-transformed wild type non-human organism or a part thereof; and
[21747] (b) growing the non-human organism or a part thereof under conditions which permit the production of phenylalanine or a composition comprising phenylalanine in said non-human organism or in the culture medium surrounding said non-human organism.

[21748] Accordingly, the present invention relates to a process for the production of serine, which comprises
[21749] (a) increasing or generating the activity of a 3-oxoacyl-[acyl-carrier-protein] synthase in the cytosol of a cell of a non-human organism or a part thereof, preferably a microorganism, a plant cell, a plant or a part thereof, as compared to a corresponding non-transformed wild type non-human organism or a part thereof; and
[21750] (b) growing the non-human organism or a part thereof under conditions which permit the production of serine or a composition comprising serine in said non-human organism or in the culture medium surrounding said non-human organism.

[21751] Accordingly, the present invention relates to a process for the production of phenylalanine, which comprises
[21752] (a) increasing or generating the activity of a Photosystem I reaction center subunit XI in the cytosol of a cell of a non-human organism or a part thereof, preferably a microorganism, a plant cell, a plant or a part thereof, as compared to a corresponding non-transformed wild type non-human organism or a part thereof; and
[21753] (b) growing the non-human organism or a part thereof under conditions which permit the production of phenylalanine or a composition comprising phenylalanine in said non-human organism or in the culture medium surrounding said non-human organism.

[21754] Accordingly, the present invention relates to a process for the production of serine, which comprises
[21755] (a) increasing or generating the activity of a Photosystem I reaction center subunit XI in the cytosol of a cell of a non-human organism or a part thereof, preferably a microorganism, a plant cell, a plant or a part thereof, as compared to a corresponding non-transformed wild type non-human organism or a part thereof; and
[21756] (b) growing the non-human organism or a part thereof under conditions which permit the production of serine or a composition comprising serine in said non-human organism or in the culture medium surrounding said non-human organism.

[21757] Accordingly, the present invention relates to a process for the production of tyrosine, which comprises
[21758] (a) increasing or generating the activity of a Photosystem I reaction center subunit XI in the cytosol of a cell of a non-human organism or a part thereof, preferably a microorganism, a plant cell, a plant or a part thereof, as compared to a corresponding non-transformed wild type non-human organism or a part thereof; and
[21759] (b) growing the non-human organism or a part thereof under conditions which permit the production of tyrosine or a composition comprising tyrosine in said non-human organism or in the culture medium surrounding said non-human organism.

[21760] Accordingly, the present invention relates to a process for the production of phenylalanine, which comprises
[21761] (a) increasing or generating the activity of a photosystem II protein in the cytosol of a cell of a non-human organism or a part thereof, preferably a microorganism, a plant cell, a plant or a part thereof, as compared to a corresponding non-transformed wild type non-human organism or a part thereof; and
[21762] (b) growing the non-human organism or a part thereof under conditions which permit the production of phenylalanine or a composition comprising phenylalanine in said non-human organism or in the culture medium surrounding said non-human organism.

[21763] Accordingly, the present invention relates to a process for the production of serine, which comprises
[21764] (a) increasing or generating the activity of a photosystem II protein in the cytosol of a cell of a non-human organism or a part thereof, preferably a microorganism, a plant cell, a plant or a part thereof, as compared to a corresponding non-transformed wild type non-human organism or a part thereof; and
[21765] (b) growing the non-human organism or a part thereof under conditions which permit the production of serine or a composition comprising serine in said non-human organism or in the culture medium surrounding said non-human organism.

[21766] Accordingly, the present invention relates to a process for the production of tyrosine, which comprises
[21767] (a) increasing or generating the activity of a photosystem II protein in the cytosol of a cell of a non-human organism or a part thereof, preferably a microorganism, a plant cell, a plant or a part thereof, as compared to a corresponding non-transformed wild type non-human organism or a part thereof; and
[21768] (b) growing the non-human organism or a part thereof under conditions which permit the production of tyrosine or a composition comprising tyrosine in said non-human organism or in the culture medium surrounding said non-human organism.

[21769] Accordingly, the present invention relates to a process for the production of 5-oxoproline, which comprises
[21770] (a) increasing or generating the activity of a photosystem II protein in the cytosol of a cell of a non-human organism or a part thereof, preferably a microorganism, a plant cell, a plant or a part thereof, as compared to a corresponding non-transformed wild type non-human organism or a part thereof; and
[21771] (b) growing the non-human organism or a part thereof under conditions which permit the production of 5-oxoproline or a composition comprising 5-oxoproline in said non-human organism or in the culture medium surrounding said non-human organism.

[21772] Accordingly, the present invention relates to a process for the production of asparagine, which comprises
[21773] (a) increasing or generating the activity of a glutamine amidotransferase in the cytosol of a cell of a non-human organism or a part thereof, preferably a microorganism, a plant cell, a plant or a part thereof, as compared to a corresponding non-transformed wild type non-human organism or a part thereof; and
[21774] (b) growing the non-human organism or a part thereof under conditions which permit the production of asparagine or a composition comprising asparagine in said non-human organism or in the culture medium surrounding said non-human organism.

[21775] Accordingly, the present invention relates to a process for the production of citrulline, which comprises
[21776] (a) increasing or generating the activity of a phosphoadenosine phosphosulfate reductase in the cytosol of a cell of a non-human organism or a part thereof, preferably a microorganism, a plant cell, a plant or a part thereof, as compared to a corresponding non-transformed wild type non-human organism or a part thereof; and
[21777] (b) growing the non-human organism or a part thereof under conditions which permit the production of citrulline or a composition comprising citrulline in said non-human organism or in the culture medium surrounding said non-human organism.

[21778] Accordingly, the present invention relates to a process for the production of asparagine, which comprises
[21779] (a) increasing or generating the activity of a riboflavin biosynthesis protein in the cytosol of a cell of a non-human organism or a part thereof, preferably a microorganism, a plant cell, a plant or a part thereof, as compared to a corresponding non-transformed wild type non-human organism or a part thereof; and
[21780] (b) growing the non-human organism or a part thereof under conditions which permit the production of asparagine or a composition comprising asparagine in said non-human organism or in the culture medium surrounding said non-human organism.

[21781] Accordingly, the present invention relates to a process for the production of homoserine, which comprises
[21782] (a) increasing or generating the activity of a threonine dehydratase in the cytosol of a cell of a non-human organism or a part thereof, preferably a microorganism, a plant cell, a plant or a part thereof, as compared to a corresponding non-transformed wild type non-human organism or a part thereof; and
[21783] (b) growing the non-human organism or a part thereof under conditions which permit the production of homoserine or a composition comprising homoserine in said non-human organism or in the culture medium surrounding said non-human organism.

[21784] Accordingly, the present invention relates to a process for the production of tyrosine, which comprises
[21785] (a) increasing or generating the activity of a threonine dehydratase in the cytosol of a cell of a non-human organism or a part thereof, preferably a microorganism, a plant cell, a plant or a part thereof, as compared to a corresponding non-transformed wild type non-human organism or a part thereof; and
[21786] (b) growing the non-human organism or a part thereof under conditions which permit the production of tyrosine or a composition comprising tyrosine in said non-human organism or in the culture medium surrounding said non-human organism.

[21787] Accordingly, the present invention relates to a process for the production of alanine, which comprises
[21788] (a) increasing or generating the activity of a short-chain alcohol dehydrogenase family in the cytosol of a cell of a non-human organism or a part thereof, preferably a microorganism, a plant cell, a plant or a part thereof, as compared to a corresponding non-transformed wild type non-human organism or a part thereof; and
[21789] (b) growing the non-human organism or a part thereof under conditions which permit the production of alanine or a composition comprising alanine in said non-human organism or in the culture medium surrounding said non-human organism.

[21790] Accordingly, the present invention relates to a process for the production of phenylalanine, which comprises
[21791] (a) increasing or generating the activity of a short-chain alcohol dehydrogenase family in the cytosol of a cell of a non-human organism or a part thereof, preferably a microorganism, a plant cell, a plant or a part thereof, as compared to a corresponding non-transformed wild type non-human organism or a part thereof; and
[21792] (b) growing the non-human organism or a part thereof under conditions which permit the production of phenylalanine or a composition comprising phenylalanine in said non-human organism or in the culture medium surrounding said non-human organism.

[21793] Accordingly, the present invention relates to a process for the production of tyrosine, which comprises
[21794] (a) increasing or generating the activity of a short-chain alcohol dehydrogenase family in the cytosol of a cell of a non-human organism or a part thereof, preferably a microorganism, a plant cell, a plant or a part thereof, as compared to a corresponding non-transformed wild type non-human organism or a part thereof; and
[21795] (b) growing the non-human organism or a part thereof under conditions which permit the production of tyrosine or a composition comprising tyrosine in said non-human organism or in the culture medium surrounding said non-human organism.

[21796] Accordingly, the present invention relates to a process for the production of phenylalanine, which comprises
[21797] (a) increasing or generating the activity of a Sec-independent protein translocase subunit in the cytosol of a cell of a non-human organism or a part thereof, preferably a microorganism, a plant cell, a plant or a part thereof, as compared to a corresponding non-transformed wild type non-human organism or a part thereof; and
[21798] (b) growing the non-human organism or a part thereof under conditions which permit the production of phenylalanine or a composition comprising phenylalanine in said non-human organism or in the culture medium surrounding said non-human organism.

[21799] Accordingly, the present invention relates to a process for the production of tyrosine, which comprises
[21800] (a) increasing or generating the activity of a Sec-independent protein translocase subunit in the cytosol of a cell of a non-human organism or a part thereof, preferably a microorganism, a plant cell, a plant or a part thereof, as compared to a corresponding non-transformed wild type non-human organism or a part thereof; and
[21801] (b) growing the non-human organism or a part thereof under conditions which permit the production of tyrosine or a composition comprising tyrosine in said non-human organism or in the culture medium surrounding said non-human organism.

[21802] Accordingly, the present invention relates to a process for the production of 5-oxoproline, which comprises
[21803] (a) increasing or generating the activity of a Sec-independent protein translocase subunit in the cytosol of a cell of a non-human organism or a part thereof, preferably a microorganism, a plant cell, a plant or a part thereof, as compared to a corresponding non-transformed wild type non-human organism or a part thereof; and
[21804] (b) growing the non-human organism or a part thereof under conditions which permit the production of 5-oxoproline or a composition comprising 5-oxoproline in said non-human organism or in the culture medium surrounding said non-human organism.

[21805] Accordingly, the present invention relates to a process for the production of tyrosine, which comprises
[21806] (a) increasing or generating the activity of a transcriptional regulator in the cytosol of a cell of a non-human organism or a part thereof, preferably a microorganism, a plant cell, a plant or a part thereof, as compared to a corresponding non-transformed wild type non-human organism or a part thereof; and
[21807] (b) growing the non-human organism or a part thereof under conditions which permit the production of tyrosine or a composition comprising tyrosine in said non-human organism or in the culture medium surrounding said non-human organism.

[21808] Accordingly, the present invention relates to a process for the production of asparagine, which comprises
[21809] (a) increasing or generating the activity of a amino acid ABC transporter permease protein in the cytosol of a cell of a non-human organism or a part thereof, preferably a microorganism, a plant cell, a plant or a part thereof, as compared to a corresponding non-transformed wild type non-human organism or a part thereof; and
[21810] (b) growing the non-human organism or a part thereof under conditions which permit the production of asparagine or a composition comprising asparagine in said non-human organism or in the culture medium surrounding said non-human organism.

[21811] Accordingly, the present invention relates to a process for the production of tyrosine, which comprises
[21812] (a) increasing or generating the activity of a TTC0768-protein in the cytosol of a cell of a non-human organism or a part thereof, preferably a microorganism, a plant cell, a plant or a part thereof, as compared to a corresponding non-transformed wild type non-human organism or a part thereof; and
[21813] (b) growing the non-human organism or a part thereof under conditions which permit the production of tyrosine or a composition comprising tyrosine in said non-human organism or in the culture medium surrounding said non-human organism.

[21814] Accordingly, the present invention relates to a process for the production of alanine, which comprises
[21815] (a) increasing or generating the activity of a TTC0881-protein in the cytosol of a cell of a non-human organism or a part thereof, preferably a microorganism, a plant cell, a plant or a part thereof, as compared to a corresponding non-transformed wild type non-human organism or a part thereof; and
[21816] (b) growing the non-human organism or a part thereof under conditions which permit the production of alanine or a composition comprising alanine in said non-human organism or in the culture medium surrounding said non-human organism.

[21817] Accordingly, the present invention relates to a process for the production of serine, which comprises
[21818] (a) increasing or generating the activity of a TTC0881-protein in the cytosol of a cell of a non-human organism or a part thereof, preferably a microorganism, a plant cell, a plant or a part thereof, as compared to a corresponding non-transformed wild type non-human organism or a part thereof; and
[21819] (b) growing the non-human organism or a part thereof under conditions which permit the production of serine or a composition comprising serine in said non-human organism or in the culture medium surrounding said non-human organism.

[21820] Accordingly, the present invention relates to a process for the production of alanine, which comprises
[21821] (a) increasing or generating the activity of a metal-dependent hydrolase in the cytosol of a cell of a non-human organism or a part thereof, preferably a microorganism, a plant cell, a plant or a part thereof, as compared to a corresponding non-transformed wild type non-human organism or a part thereof; and
[21822] (b) growing the non-human organism or a part thereof under conditions which permit the production of alanine or a composition comprising alanine in said non-human organism or in the culture medium surrounding said non-human organism.

[21823] Accordingly, the present invention relates to a process for the production of serine, which comprises
[21824] (a) increasing or generating the activity of a metal-dependent hydrolase in the cytosol of a cell of a non-human organism or a part thereof, preferably a microorganism, a plant cell, a plant or a part thereof, as compared to a corresponding non-transformed wild type non-human organism or a part thereof; and
[21825] (b) growing the non-human organism or a part thereof under conditions which permit the production of serine or a composition comprising serine in said non-human organism or in the culture medium surrounding said non-human organism.

[21826] Accordingly, the present invention relates to a process for the production of phenylalanine, which comprises
[21827] (a) increasing or generating the activity of a multiple antibiotic resistance protein in the cytosol of a cell of a non-human organism or a part thereof, preferably a microorganism, a plant cell, a plant or a part thereof, as compared to a corresponding non-transformed wild type non-human organism or a part thereof; and
[21828] (b) growing the non-human organism or a part thereof under conditions which permit the production of phenylalanine or a composition comprising phenylalanine in said non-human organism or in the culture medium surrounding said non-human organism.

[21829] Accordingly, the present invention relates to a process for the production of tyrosine, which comprises
[21830] (a) increasing or generating the activity of a multiple antibiotic resistance protein in the cytosol of a cell of a non-human organism or a part thereof, preferably a microorganism, a plant cell, a plant or a part thereof, as compared to a corresponding non-transformed wild type non-human organism or a part thereof; and
[21831] (b) growing the non-human organism or a part thereof under conditions which permit the production of tyrosine or a composition comprising tyrosine in said non-human organism or in the culture medium surrounding said non-human organism.

[21832] Accordingly, the present invention relates to a process for the production of alanine, which comprises
[21833] (a) increasing or generating the activity of a TTC1386-protein in the cytosol of a cell of a non-human organism or a part thereof, preferably a microorganism, a plant cell, a plant or a part thereof, as compared to a corresponding non-transformed wild type non-human organism or a part thereof; and
[21834] (b) growing the non-human organism or a part thereof under conditions which permit the production of alanine or a composition comprising alanine in said non-human organism or in the culture medium surrounding said non-human organism.

[21835] Accordingly, the present invention relates to a process for the production of glycine, which comprises
[21836] (a) increasing or generating the activity of a TTC1386-protein in the cytosol of a cell of a non-human organism or a part thereof, preferably a microorganism, a plant cell, a plant or a part thereof, as compared to a corresponding non-transformed wild type non-human organism or a part thereof; and
[21837] (b) growing the non-human organism or a part thereof under conditions which permit the production of glycine or a composition comprising glycine in said non-human organism or in the culture medium surrounding said non-human organism.

[21838] Accordingly, the present invention relates to a process for the production of phenylalanine, which comprises
[21839] (a) increasing or generating the activity of a TTC1386-protein in the cytosol of a cell of a non-human organism or a part thereof, preferably a microorganism, a plant cell, a plant or a part thereof, as compared to a corresponding non-transformed wild type non-human organism or a part thereof; and
[21840] (b) growing the non-human organism or a part thereof under conditions which permit the production of phenylalanine or a composition comprising phenylalanine in said non-human organism or in the culture medium surrounding said non-human organism.

[21841] Accordingly, the present invention relates to a process for the production of serine, which comprises
[21842] (a) increasing or generating the activity of a TTC1386-protein in the cytosol of a cell of a non-human organism or a part thereof, preferably a microorganism, a plant cell, a plant or a part thereof, as compared to a corresponding non-transformed wild type non-human organism or a part thereof; and
[21843] (b) growing the non-human organism or a part thereof under conditions which permit the production of serine or a composition comprising serine in said non-human organism or in the culture medium surrounding said non-human organism.

[21844] Accordingly, the present invention relates to a process for the production of tyrosine, which comprises
[21845] (a) increasing or generating the activity of a TTC1386-protein in the cytosol of a cell of a non-human organism or a part thereof, preferably a microorganism, a plant cell, a plant or a part thereof, as compared to a corresponding non-transformed wild type non-human organism or a part thereof; and
[21846] (b) growing the non-human organism or a part thereof under conditions which permit the production of tyrosine or a composition comprising tyrosine in said non-human organism or in the culture medium surrounding said non-human organism.

[21847] Accordingly, the present invention relates to a process for the production of alanine, which comprises
[21848] (a) increasing or generating the activity of a homocitrate synthase in the cytosol of a cell of a non-human organism or a part thereof, preferably a microorganism, a plant cell, a plant or a part thereof, as compared to a corresponding non-transformed wild type non-human organism or a part thereof; and
[21849] (b) growing the non-human organism or a part thereof under conditions which permit the production of alanine or a composition comprising alanine in said non-human organism or in the culture medium surrounding said non-human organism.

[21850] Accordingly, the present invention relates to a process for the production of phenylalanine, which comprises
[21851] (a) increasing or generating the activity of a homocitrate synthase in the cytosol of a cell of a non-human organism or a part thereof, preferably a microorganism, a plant cell, a plant or a part thereof, as compared to a corresponding non-transformed wild type non-human organism or a part thereof; and
[21852] (b) growing the non-human organism or a part thereof under conditions which permit the production of phenylalanine or a composition comprising phenylalanine in said non-human organism or in the culture medium surrounding said non-human organism.

[21853] Accordingly, the present invention relates to a process for the production of serine, which comprises
[21854] (a) increasing or generating the activity of a homocitrate synthase in the cytosol of a cell of a non-human organism or a part thereof, preferably a microorganism, a plant cell, a plant or a part thereof, as compared to a corresponding non-transformed wild type non-human organism or a part thereof; and
[21855] (b) growing the non-human organism or a part thereof under conditions which permit the production of serine or a composition comprising serine in said non-human organism or in the culture medium surrounding said non-human organism.

[21856] Accordingly, the present invention relates to a process for the production of tyrosine, which comprises
[21857] (a) increasing or generating the activity of a homocitrate synthase in the cytosol of a cell of a non-human organism or a part thereof, preferably a microorganism, a plant cell, a plant or a part thereof, as compared to a corresponding non-transformed wild type non-human organism or a part thereof; and
[21858] (b) growing the non-human organism or a part thereof under conditions which permit the production of tyrosine or a composition comprising tyrosine in said non-human organism or in the culture medium surrounding said non-human organism.

[21859] Accordingly, the present invention relates to a process for the production of 5-oxoproline, which comprises
[21860] (a) increasing or generating the activity of a homocitrate synthase in the cytosol of a cell of a non-human organism or a part thereof, preferably a microorganism, a plant cell, a plant or a part thereof, as compared to a corresponding non-transformed wild type non-human organism or a part thereof; and
[21861] (b) growing the non-human organism or a part thereof under conditions which permit the production of 5-oxoproline or a composition comprising 5-oxoproline in said non-human organism or in the culture medium surrounding said non-human organism.

[21862] Accordingly, the present invention relates to a process for the production of aspartate, which comprises
[21863] (a) increasing or generating the activity of a oxidoreductase subunit in the cytosol of a cell of a non-human organism or a part thereof, preferably a microorganism, a plant cell, a plant or a part thereof, as compared to a corresponding non-transformed wild type non-human organism or a part thereof; and
[21864] (b) growing the non-human organism or a part thereof under conditions which permit the production of aspartate or a composition comprising aspartate in said non-human organism or in the culture medium surrounding said non-human organism.

[21865] Accordingly, the present invention relates to a process for the production of serine, which comprises
[21866] (a) increasing or generating the activity of a oxidoreductase subunit in the cytosol of a cell of a non-human organism or a part thereof, preferably a microorganism, a plant cell, a plant or a part thereof, as compared to a corresponding non-transformed wild type non-human organism or a part thereof; and
[21867] (b) growing the non-human organism or a part thereof under conditions which permit the production of serine or a composition comprising serine in said non-human organism or in the culture medium surrounding said non-human organism.

[21868] Accordingly, the present invention relates to a process for the production of aspartate, which comprises
[21869] (a) increasing or generating the activity of a XM_{—}473199-protein in the cytosol of a cell of a non-human organism or a part thereof, preferably a microorganism, a plant cell, a plant or a part thereof, as compared to a corresponding non-transformed wild type non-human organism or a part thereof; and
[21870] (b) growing the non-human organism or a part thereof under conditions which permit the production of aspartate or a composition comprising aspartate in said non-human organism or in the culture medium surrounding said non-human organism.

[21871] Accordingly, the present invention relates to a process for the production of phenylalanine, which comprises
[21872] (a) increasing or generating the activity of a XM_{—}473199-protein in the cytosol of a cell of a non-human organism or a part thereof, preferably a microorganism, a plant cell, a plant or a part thereof, as compared to a corresponding non-transformed wild type non-human organism or a part thereof; and
[21873] (b) growing the non-human organism or a part thereof under conditions which permit the production of phenylalanine or a composition comprising phenylalanine in said non-human organism or in the culture medium surrounding said non-human organism.

[21874] Accordingly, the present invention relates to a process for the production of tyrosine, which comprises
[21875] (a) increasing or generating the activity of a XM_{—}473199-protein in the cytosol of a cell of a non-human organism or a part thereof, preferably a microorganism, a plant cell, a plant or a part thereof, as compared to a corresponding non-transformed wild type non-human organism or a part thereof; and
[21876] (b) growing the non-human organism or a part thereof under conditions which permit the production of tyrosine or a composition comprising tyrosine in said non-human organism or in the culture medium surrounding said non-human organism.

[21877] Accordingly, the present invention relates to a process for the production of 5-oxoproline, which comprises
[21878] (a) increasing or generating the activity of a XM_{—}473199-protein in the cytosol of a cell of a non-human organism or a part thereof, preferably a microorganism, a plant cell, a plant or a part thereof, as compared to a corresponding non-transformed wild type non-human organism or a part thereof; and
[21879] (b) growing the non-human organism or a part thereof under conditions which permit the production of 5-oxoproline or a composition comprising 5-oxoproline in said non-human organism or in the culture medium surrounding said non-human organism.

[21880] Accordingly, the present invention relates to a process for the production of glycine, which comprises
[21881] (a) increasing or generating the activity of a transcription factor in the cytosol of a cell of a non-human organism or a part thereof, preferably a microorganism, a plant cell, a plant or a part thereof, as compared to a corresponding non-transformed wild type non-human organism or a part thereof; and
[21882] (b) growing the non-human organism or a part thereof under conditions which permit the production of glycine or a composition comprising glycine in said non-human organism or in the culture medium surrounding said non-human organism.

[21883] Accordingly, the present invention relates to a process for the production of phenylalanine, which comprises
[21884] (a) increasing or generating the activity of a transcription factor in the cytosol of a cell of a non-human organism or a part thereof, preferably a microorganism, a plant cell, a plant or a part thereof, as compared to a corresponding non-transformed wild type non-human organism or a part thereof; and
[21885] (b) growing the non-human organism or a part thereof under conditions which permit the production of phenylalanine or a composition comprising phenylalanine in said non-human organism or in the culture medium surrounding said non-human organism.

[21886] Accordingly, the present invention relates to a process for the production of aspartate, which comprises
[21887] (a) increasing or generating the activity of a cell division control protein in the cytosol of a cell of a non-human organism or a part thereof, preferably a microorganism, a plant cell, a plant or a part thereof, as compared to a corresponding non-transformed wild type non-human organism or a part thereof; and
[21888] (b) growing the non-human organism or a part thereof under conditions which permit the production of aspartate or a composition comprising aspartate in said non-human organism or in the culture medium surrounding said non-human organism.

[21889] Accordingly, the present invention relates to a process for the production of tyrosine, which comprises
[21890] (a) increasing or generating the activity of a cell division control protein in the cytosol of a cell of a non-human organism or a part thereof, preferably a microorganism, a plant cell, a plant or a part thereof, as compared to a corresponding non-transformed wild type non-human organism or a part thereof; and
[21891] (b) growing the non-human organism or a part thereof under conditions which permit the production of tyrosine or a composition comprising tyrosine in said non-human organism or in the culture medium surrounding said non-human organism.

[21892] Accordingly, the present invention relates to a process for the production of phenylalanine, which comprises
[21893] (a) increasing or generating the activity of a 3-deoxy-7-phosphoheptulonate synthase in the cytosol of a cell of a non-human organism or a part thereof, preferably a microorganism, a plant cell, a plant or a part thereof, as compared to a corresponding non-transformed wild type non-human organism or a part thereof; and
[21894] (b) growing the non-human organism or a part thereof under conditions which permit the production of phenylalanine or a composition comprising phenylalanine in said non-human organism or in the culture medium surrounding said non-human organism.

[21895] Accordingly, the present invention relates to a process for the production of tyrosine, which comprises
[21896] (a) increasing or generating the activity of a 3-deoxy-7-phosphoheptulonate synthase in the cytosol of a cell of a non-human organism or a part thereof, preferably a microorganism, a plant cell, a plant or a part thereof, as compared to a corresponding non-transformed wild type non-human organism or a part thereof; and
[21897] (b) growing the non-human organism or a part thereof under conditions which permit the production of tyrosine or a composition comprising tyrosine in said non-human organism or in the culture medium surrounding said non-human organism.

[21898] Accordingly, the present invention relates to a process for the production of 5-oxoproline, which comprises
[21899] (a) increasing or generating the activity of a phosphate permease in the cytosol of a cell of a non-human organism or a part thereof, preferably a microorganism, a plant cell, a plant or a part thereof, as compared to a corresponding non-transformed wild type non-human organism or a part thereof; and
[21900] (b) growing the non-human organism or a part thereof under conditions which permit the production of 5-oxoproline or a composition comprising 5-oxoproline in said non-human organism or in the culture medium surrounding said non-human organism.

[21901] Accordingly, the present invention relates to a process for the production of alanine, which comprises
[21902] (a) increasing or generating the activity of a serine/threonine dehydratase in the cytosol of a cell of a non-human organism or a part thereof, preferably a microorganism, a plant cell, a plant or a part thereof, as compared to a corresponding non-transformed wild type non-human organism or a part thereof; and
[21903] (b) growing the non-human organism or a part thereof under conditions which permit the production of alanine or a composition comprising alanine in said non-human organism or in the culture medium surrounding said non-human organism.

[21904] Accordingly, the present invention relates to a process for the production of glycine, which comprises
[21905] (a) increasing or generating the activity of a serine/threonine dehydratase in the cytosol of a cell of a non-human organism or a part thereof, preferably a microorganism, a plant cell, a plant or a part thereof, as compared to a corresponding non-transformed wild type non-human organism or a part thereof; and
[21906] (b) growing the non-human organism or a part thereof under conditions which permit the production of glycine or a composition comprising glycine in said non-human organism or in the culture medium surrounding said non-human organism.

[21907] Accordingly, the present invention relates to a process for the production of aspartate, which comprises
[21908] (a) increasing or generating the activity of a protein kinase in the cytosol of a cell of a non-human organism or a part thereof, preferably a microorganism, a plant cell, a plant or a part thereof, as compared to a corresponding non-transformed wild type non-human organism or a part thereof; and
[21909] (b) growing the non-human organism or a part thereof under conditions which permit the production of aspartate or a composition comprising aspartate in said non-human organism or in the culture medium surrounding said non-human organism.

[21910] Accordingly, the present invention relates to a process for the production of homoserine, which comprises
[21911] (a) increasing or generating the activity of a Serine/threonine-protein phosphatase in the cytosol of a cell of a non-human organism or a part thereof, preferably a microorganism, a plant cell, a plant or a part thereof, as compared to a corresponding non-transformed wild type non-human organism or a part thereof; and
[21912] (b) growing the non-human organism or a part thereof under conditions which permit the production of homoserine or a composition comprising homoserine in said non-human organism or in the culture medium surrounding said non-human organism.

[21913] Accordingly, the present invention relates to a process for the production of phenylalanine, which comprises
[21914] (a) increasing or generating the activity of a Serine/threonine-protein phosphatase in the cytosol of a cell of a non-human organism or a part thereof, preferably a microorganism, a plant cell, a plant or a part thereof, as compared to a corresponding non-transformed wild type non-human organism or a part thereof; and
[21915] (b) growing the non-human organism or a part thereof under conditions which permit the production of phenylalanine or a composition comprising phenylalanine in said non-human organism or in the culture medium surrounding said non-human organism.

[21916] Accordingly, the present invention relates to a process for the production of 5-oxoproline, which comprises
[21917] (a) increasing or generating the activity of a Pre-mRNA-splicing factor in the cytosol of a cell of a non-human organism or a part thereof, preferably a microorganism, a plant cell, a plant or a part thereof, as compared to a corresponding non-transformed wild type non-human organism or a part thereof; and
[21918] (b) growing the non-human organism or a part thereof under conditions which permit the production of 5-oxoproline or a composition comprising 5-oxoproline in said non-human organism or in the culture medium surrounding said non-human organism.

[21919] Accordingly, the present invention relates to a process for the production of phenylalanine, which comprises
[21920] (a) increasing or generating the activity of a N-(5′-phosphoribosyl)anthranilate isomerase in the cytosol of a cell of a non-human organism or a part thereof, preferably a microorganism, a plant cell, a plant or a part thereof, as compared to a corresponding non-transformed wild type non-human organism or a part thereof; and
[21921] (b) growing the non-human organism or a part thereof under conditions which permit the production of phenylalanine or a composition comprising phenylalanine in said non-human organism or in the culture medium surrounding said non-human organism.

[21922] Accordingly, the present invention relates to a process for the production of tyrosine, which comprises
[21923] (a) increasing or generating the activity of a branched-chain amino acid permease in the cytosol of a cell of a non-human organism or a part thereof, preferably a microorganism, a plant cell, a plant or a part thereof, as compared to a corresponding non-transformed wild type non-human organism or a part thereof; and
[21924] (b) growing the non-human organism or a part thereof under conditions which permit the production of tyrosine or a composition comprising tyrosine in said non-human organism or in the culture medium surrounding said non-human organism.

[21925] Accordingly, the present invention relates to a process for the production of serine, which comprises
[21926] (a) increasing or generating the activity of a ydr183w-protein in the cytosol of a cell of a non-human organism or a part thereof, preferably a microorganism, a plant cell, a plant or a part thereof, as compared to a corresponding non-transformed wild type non-human organism or a part thereof; and
[21927] (b) growing the non-human organism or a part thereof under conditions which permit the production of serine or a composition comprising serine in said non-human organism or in the culture medium surrounding said non-human organism.

[21928] Accordingly, the present invention relates to a process for the production of aspartate, which comprises
[21929] (a) increasing or generating the activity of a ydr273w-protein in the cytosol of a cell of a non-human organism or a part thereof, preferably a microorganism, a plant cell, a plant or a part thereof, as compared to a corresponding non-transformed wild type non-human organism or a part thereof; and
[21930] (b) growing the non-human organism or a part thereof under conditions which permit the production of aspartate or a composition comprising aspartate in said non-human organism or in the culture medium surrounding said non-human organism.

[21931] Accordingly, the present invention relates to a process for the production of citrulline, which comprises
[21932] (a) increasing or generating the activity of a ydr273w-protein in the cytosol of a cell of a non-human organism or a part thereof, preferably a microorganism, a plant cell, a plant or a part thereof, as compared to a corresponding non-transformed wild type non-human organism or a part thereof; and
[21933] (b) growing the non-human organism or a part thereof under conditions which permit the production of citrulline or a composition comprising citrulline in said non-human organism or in the culture medium surrounding said non-human organism.

[21934] Accordingly, the present invention relates to a process for the production of aspartate, which comprises
[21935] (a) increasing or generating the activity of a ydr507c-protein in the cytosol of a cell of a non-human organism or a part thereof, preferably a microorganism, a plant cell, a plant or a part thereof, as compared to a corresponding non-transformed wild type non-human organism or a part thereof; and
[21936] (b) growing the non-human organism or a part thereof under conditions which permit the production of aspartate or a composition comprising aspartate in said non-human organism or in the culture medium surrounding said non-human organism.

[21937] Accordingly, the present invention relates to a process for the production of asparagine, which comprises
[21938] (a) increasing or generating the activity of a yer014w-protein in the cytosol of a cell of a non-human organism or a part thereof, preferably a microorganism, a plant cell, a plant or a part thereof, as compared to a corresponding non-transformed wild type non-human organism or a part thereof; and
[21939] (b) growing the non-human organism or a part thereof under conditions which permit the production of asparagine or a composition comprising asparagine in said non-human organism or in the culture medium surrounding said non-human organism.

[21940] Accordingly, the present invention relates to a process for the production of aspartate, which comprises
[21941] (a) increasing or generating the activity of a yer014w-protein in the cytosol of a cell of a non-human organism or a part thereof, preferably a microorganism, a plant cell, a plant or a part thereof, as compared to a corresponding non-transformed wild type non-human organism or a part thereof; and
[21942] (b) growing the non-human organism or a part thereof under conditions which permit the production of aspartate or a composition comprising aspartate in said non-human organism or in the culture medium surrounding said non-human organism.

[21943] Accordingly, the present invention relates to a process for the production of serine, which comprises
[21944] (a) increasing or generating the activity of a yer014w-protein in the cytosol of a cell of a non-human organism or a part thereof, preferably a microorganism, a plant cell, a plant or a part thereof, as compared to a corresponding non-transformed wild type non-human organism or a part thereof; and
[21945] (b) growing the non-human organism or a part thereof under conditions which permit the production of serine or a composition comprising serine in said non-human organism or in the culture medium surrounding said non-human organism.

[21946] Accordingly, the present invention relates to a process for the production of citrulline, which comprises
[21947] (a) increasing or generating the activity of a yer106w-protein in the cytosol of a cell of a non-human organism or a part thereof, preferably a microorganism, a plant cell, a plant or a part thereof, as compared to a corresponding non-transformed wild type non-human organism or a part thereof; and
[21948] (b) growing the non-human organism or a part thereof under conditions which permit the production of citrulline or a composition comprising citrulline in said non-human organism or in the culture medium surrounding said non-human organism.

[21949] Accordingly, the present invention relates to a process for the production of serine, which comprises
[21950] (a) increasing or generating the activity of a molecular chaperone portein in the cytosol of a cell of a non-human organism or a part thereof, preferably a microorganism, a plant cell, a plant or a part thereof, as compared to a corresponding non-transformed wild type non-human organism or a part thereof; and
[21951] (b) growing the non-human organism or a part thereof under conditions which permit the production of serine or a composition comprising serine in said non-human organism or in the culture medium surrounding said non-human organism.

[21952] Accordingly, the present invention relates to a process for the production of tyrosine, which comprises
[21953] (a) increasing or generating the activity of a molecular chaperone portein in the cytosol of a cell of a non-human organism or a part thereof, preferably a microorganism, a plant cell, a plant or a part thereof, as compared to a corresponding non-transformed wild type non-human organism or a part thereof; and
[21954] (b) growing the non-human organism or a part thereof under conditions which permit the production of tyrosine or a composition comprising tyrosine in said non-human organism or in the culture medium surrounding said non-human organism.

[21955] Accordingly, the present invention relates to a process for the production of aspartate, which comprises
[21956] (a) increasing or generating the activity of a YFL019C-protein in the cytosol of a cell of a non-human organism or a part thereof, preferably a microorganism, a plant cell, a plant or a part thereof, as compared to a corresponding non-transformed wild type non-human organism or a part thereof; and
[21957] (b) growing the non-human organism or a part thereof under conditions which permit the production of aspartate or a composition comprising aspartate in said non-human organism or in the culture medium surrounding said non-human organism.

[21958] Accordingly, the present invention relates to a process for the production of phenylalanine, which comprises
[21959] (a) increasing or generating the activity of a YFL019C-protein in the cytosol of a cell of a non-human organism or a part thereof, preferably a microorganism, a plant cell, a plant or a part thereof, as compared to a corresponding non-transformed wild type non-human organism or a part thereof; and
[21960] (b) growing the non-human organism or a part thereof under conditions which permit the production of phenylalanine or a composition comprising phenylalanine in said non-human organism or in the culture medium surrounding said non-human organism.

[21961] Accordingly, the present invention relates to a process for the production of alanine, which comprises
[21962] (a) increasing or generating the activity of a aminotransferase in the cytosol of a cell of a non-human organism or a part thereof, preferably a microorganism, a plant cell, a plant or a part thereof, as compared to a corresponding non-transformed wild type non-human organism or a part thereof; and
[21963] (b) growing the non-human organism or a part thereof under conditions which permit the production of alanine or a composition comprising alanine in said non-human organism or in the culture medium surrounding said non-human organism.

[21964] Accordingly, the present invention relates to a process for the production of glycine, which comprises
[21965] (a) increasing or generating the activity of a aminotransferase in the cytosol of a cell of a non-human organism or a part thereof, preferably a microorganism, a plant cell, a plant or a part thereof, as compared to a corresponding non-transformed wild type non-human organism or a part thereof; and
[21966] (b) growing the non-human organism or a part thereof under conditions which permit the production of glycine or a composition comprising glycine in said non-human organism or in the culture medium surrounding said non-human organism.

[21967] Accordingly, the present invention relates to a process for the production of phenylalanine, which comprises
[21968] (a) increasing or generating the activity of a yfl054c-protein in the cytosol of a cell of a non-human organism or a part thereof, preferably a microorganism, a plant cell, a plant or a part thereof, as compared to a corresponding non-transformed wild type non-human organism or a part thereof; and
[21969] (b) growing the non-human organism or a part thereof under conditions which permit the production of phenylalanine or a composition comprising phenylalanine in said non-human organism or in the culture medium surrounding said non-human organism.

[21970] Accordingly, the present invention relates to a process for the production of serine, which comprises
[21971] (a) increasing or generating the activity of a yfl054c-protein in the cytosol of a cell of a non-human organism or a part thereof, preferably a microorganism, a plant cell, a plant or a part thereof, as compared to a corresponding non-transformed wild type non-human organism or a part thereof; and
[21972] (b) growing the non-human organism or a part thereof under conditions which permit the production of serine or a composition comprising serine in said non-human organism or in the culture medium surrounding said non-human organism.

[21973] Accordingly, the present invention relates to a process for the production of 5-oxoproline, which comprises
[21974] (a) increasing or generating the activity of a ygl096w-protein in the cytosol of a cell of a non-human organism or a part thereof, preferably a microorganism, a plant cell, a plant or a part thereof, as compared to a corresponding non-transformed wild type non-human organism or a part thereof; and
[21975] (b) growing the non-human organism or a part thereof under conditions which permit the production of 5-oxoproline or a composition comprising 5-oxoproline in said non-human organism or in the culture medium surrounding said non-human organism.

[21976] Accordingly, the present invention relates to a process for the production of tyrosine, which comprises
[21977] (a) increasing or generating the activity of a ygl237c-protein in the cytosol of a cell of a non-human organism or a part thereof, preferably a microorganism, a plant cell, a plant or a part thereof, as compared to a corresponding non-transformed wild type non-human organism or a part thereof; and
[21978] (b) growing the non-human organism or a part thereof under conditions which permit the production of tyrosine or a composition comprising tyrosine in said non-human organism or in the culture medium surrounding said non-human organism.

[21979] Accordingly, the present invention relates to a process for the production of aspartate, which comprises
[21980] (a) increasing or generating the activity of a ygr221c-protein in the cytosol of a cell of a non-human organism or a part thereof, preferably a microorganism, a plant cell, a plant or a part thereof, as compared to a corresponding non-transformed wild type non-human organism or a part thereof; and
[21981] (b) growing the non-human organism or a part thereof under conditions which permit the production of aspartate or a composition comprising aspartate in said non-human organism or in the culture medium surrounding said non-human organism.

[21982] Accordingly, the present invention relates to a process for the production of 5-oxoproline, which comprises
[21983] (a) increasing or generating the activity of a ygr221c-protein in the cytosol of a cell of a non-human organism or a part thereof, preferably a microorganism, a plant cell, a plant or a part thereof, as compared to a corresponding non-transformed wild type non-human organism or a part thereof; and
[21984] (b) growing the non-human organism or a part thereof under conditions which permit the production of 5-oxoproline or a composition comprising 5-oxoproline in said non-human organism or in the culture medium surrounding said non-human organism.

[21985] Accordingly, the present invention relates to a process for the production of phenylalanine, which comprises
[21986] (a) increasing or generating the activity of a yhl013c-protein in the cytosol of a cell of a non-human organism or a part thereof, preferably a microorganism, a plant cell, a plant or a part thereof, as compared to a corresponding non-transformed wild type non-human organism or a part thereof; and
[21987] (b) growing the non-human organism or a part thereof under conditions which permit the production of phenylalanine or a composition comprising phenylalanine in said non-human organism or in the culture medium surrounding said non-human organism.

[21988] Accordingly, the present invention relates to a process for the production of phenylalanine, which comprises
[21989] (a) increasing or generating the activity of a yhr006w-protein in the cytosol of a cell of a non-human organism or a part thereof, preferably a microorganism, a plant cell, a plant or a part thereof, as compared to a corresponding non-transformed wild type non-human organism or a part thereof; and
[21990] (b) growing the non-human organism or a part thereof under conditions which permit the production of phenylalanine or a composition comprising phenylalanine in said non-human organism or in the culture medium surrounding said non-human organism.

[21991] Accordingly, the present invention relates to a process for the production of tyrosine, which comprises
[21992] (a) increasing or generating the activity of a yhr006w-protein in the cytosol of a cell of a non-human organism or a part thereof, preferably a microorganism, a plant cell, a plant or a part thereof, as compared to a corresponding non-transformed wild type non-human organism or a part thereof; and
[21993] (b) growing the non-human organism or a part thereof under conditions which permit the production of tyrosine or a composition comprising tyrosine in said non-human organism or in the culture medium surrounding said non-human organism.

[21994] Accordingly, the present invention relates to a process for the production of aspartate, which comprises
[21995] (a) increasing or generating the activity of a yhr207c-protein in the cytosol of a cell of a non-human organism or a part thereof, preferably a microorganism, a plant cell, a plant or a part thereof, as compared to a corresponding non-transformed wild type non-human organism or a part thereof; and
[21996] (b) growing the non-human organism or a part thereof under conditions which permit the production of aspartate or a composition comprising aspartate in said non-human organism or in the culture medium surrounding said non-human organism.

[21997] Accordingly, the present invention relates to a process for the production of citrulline, which comprises
[21998] (a) increasing or generating the activity of a 3-phosphoglycerate dehydrogenase in the cytosol of a cell of a non-human organism or a part thereof, preferably a microorganism, a plant cell, a plant or a part thereof, as compared to a corresponding non-transformed wild type non-human organism or a part thereof; and
[21999] (b) growing the non-human organism or a part thereof under conditions which permit the production of citrulline or a composition comprising citrulline in said non-human organism or in the culture medium surrounding said non-human organism.

[22000] Accordingly, the present invention relates to a process for the production of glycine, which comprises
[22001] (a) increasing or generating the activity of a 3-phosphoglycerate dehydrogenase in the cytosol of a cell of a non-human organism or a part thereof, preferably a microorganism, a plant cell, a plant or a part thereof, as compared to a corresponding non-transformed wild type non-human organism or a part thereof; and
[22002] (b) growing the non-human organism or a part thereof under conditions which permit the production of glycine or a composition comprising glycine in said non-human organism or in the culture medium surrounding said non-human organism.

[22003] Accordingly, the present invention relates to a process for the production of aspartate, which comprises
[22004] (a) increasing or generating the activity of a glutathione S-transferase in the cytosol of a cell of a non-human organism or a part thereof, preferably a microorganism, a plant cell, a plant or a part thereof, as compared to a corresponding non-transformed wild type non-human organism or a part thereof; and
[22005] (b) growing the non-human organism or a part thereof under conditions which permit the production of aspartate or a composition comprising aspartate in said non-human organism or in the culture medium surrounding said non-human organism.

[22006] Accordingly, the present invention relates to a process for the production of citrulline, which comprises
[22007] (a) increasing or generating the activity of a glutathione S-transferase in the cytosol of a cell of a non-human organism or a part thereof, preferably a microorganism, a plant cell, a plant or a part thereof, as compared to a corresponding non-transformed wild type non-human organism or a part thereof; and
[22008] (b) growing the non-human organism or a part thereof under conditions which permit the production of citrulline or a composition comprising citrulline in said non-human organism or in the culture medium surrounding said non-human organism.

[22009] Accordingly, the present invention relates to a process for the production of aspartate, which comprises
[22010] (a) increasing or generating the activity of a DnaJ-like chaperone in the cytosol of a cell of a non-human organism or a part thereof, preferably a microorganism, a plant cell, a plant or a part thereof, as compared to a corresponding non-transformed wild type non-human organism or a part thereof; and
[22011] (b) growing the non-human organism or a part thereof under conditions which permit the production of aspartate or a composition comprising aspartate in said non-human organism or in the culture medium surrounding said non-human organism.

[22012] Accordingly, the present invention relates to a process for the production of phenylalanine, which comprises
[22013] (a) increasing or generating the activity of a cystathionine gamma-synthase in the cytosol of a cell of a non-human organism or a part thereof, preferably a microorganism, a plant cell, a plant or a part thereof, as compared to a corresponding non-transformed wild type non-human organism or a part thereof; and
[22014] (b) growing the non-human organism or a part thereof under conditions which permit the production of phenylalanine or a composition comprising phenylalanine in said non-human organism or in the culture medium surrounding said non-human organism.

[22015] Accordingly, the present invention relates to a process for the production of citrulline, which comprises
[22016] (a) increasing or generating the activity of a branched chain aminotransferase in the cytosol of a cell of a non-human organism or a part thereof, preferably a microorganism, a plant cell, a plant or a part thereof, as compared to a corresponding non-transformed wild type non-human organism or a part thereof; and
[22017] (b) growing the non-human organism or a part thereof under conditions which permit the production of citrulline or a composition comprising citrulline in said non-human organism or in the culture medium surrounding said non-human organism.

[22018] Accordingly, the present invention relates to a process for the production of aspartate, which comprises
[22019] (a) increasing or generating the activity of a polygalacturonase in the cytosol of a cell of a non-human organism or a part thereof, preferably a microorganism, a plant cell, a plant or a part thereof, as compared to a corresponding non-transformed wild type non-human organism or a part thereof; and
[22020] (b) growing the non-human organism or a part thereof under conditions which permit the production of aspartate or a composition comprising aspartate in said non-human organism or in the culture medium surrounding said non-human organism.

[22021] Accordingly, the present invention relates to a process for the production of phenylalanine, which comprises
[22022] (a) increasing or generating the activity of a polygalacturonase in the cytosol of a cell of a non-human organism or a part thereof, preferably a microorganism, a plant cell, a plant or a part thereof, as compared to a corresponding non-transformed wild type non-human organism or a part thereof; and
[22023] (b) growing the non-human organism or a part thereof under conditions which permit the production of phenylalanine or a composition comprising phenylalanine in said non-human organism or in the culture medium surrounding said non-human organism.

[22024] Accordingly, the present invention relates to a process for the production of alanine, which comprises
[22025] (a) increasing or generating the activity of a YKL038W-protein in the cytosol of a cell of a non-human organism or a part thereof, preferably a microorganism, a plant cell, a plant or a part thereof, as compared to a corresponding non-transformed wild type non-human organism or a part thereof; and
[22026] (b) growing the non-human organism or a part thereof under conditions which permit the production of alanine or a composition comprising alanine in said non-human organism or in the culture medium surrounding said non-human organism.

[22027] Accordingly, the present invention relates to a process for the production of aspartate, which comprises
[22028] (a) increasing or generating the activity of a YKL038W-protein in the cytosol of a cell of a non-human organism or a part thereof, preferably a microorganism, a plant cell, a plant or a part thereof, as compared to a corresponding non-transformed wild type non-human organism or a part thereof; and
[22029] (b) growing the non-human organism or a part thereof under conditions which permit the production of aspartate or a composition comprising aspartate in said non-human organism or in the culture medium surrounding said non-human organism.

[22030] Accordingly, the present invention relates to a process for the production of serine, which comprises
[22031] (a) increasing or generating the activity of a YKL038W-protein in the cytosol of a cell of a non-human organism or a part thereof, preferably a microorganism, a plant cell, a plant or a part thereof, as compared to a corresponding non-transformed wild type non-human organism or a part thereof; and
[22032] (b) growing the non-human organism or a part thereof under conditions which permit the production of serine or a composition comprising serine in said non-human organism or in the culture medium surrounding said non-human organism.

[22033] Accordingly, the present invention relates to a process for the production of glycine, which comprises
[22034] (a) increasing or generating the activity of a aspartate aminotransferase in the cytosol of a cell of a non-human organism or a part thereof, preferably a microorganism, a plant cell, a plant or a part thereof, as compared to a corresponding non-transformed wild type non-human organism or a part thereof; and
[22035] (b) growing the non-human organism or a part thereof under conditions which permit the production of glycine or a composition comprising glycine in said non-human organism or in the culture medium surrounding said non-human organism.

[22036] Accordingly, the present invention relates to a process for the production of serine, which comprises
[22037] (a) increasing or generating the activity of a thioredoxin in the cytosol of a cell of a non-human organism or a part thereof, preferably a microorganism, a plant cell, a plant or a part thereof, as compared to a corresponding non-transformed wild type non-human organism or a part thereof; and
[22038] (b) growing the non-human organism or a part thereof under conditions which permit the production of serine or a composition comprising serine in said non-human organism or in the culture medium surrounding said non-human organism.

[22039] Accordingly, the present invention relates to a process for the production of tyrosine, which comprises
[22040] (a) increasing or generating the activity of a thioredoxin in the cytosol of a cell of a non-human organism or a part thereof, preferably a microorganism, a plant cell, a plant or a part thereof, as compared to a corresponding non-transformed wild type non-human organism or a part thereof; and
[22041] (b) growing the non-human organism or a part thereof under conditions which permit the production of tyrosine or a composition comprising tyrosine in said non-human organism or in the culture medium surrounding said non-human organism.

[22042] Accordingly, the present invention relates to a process for the production of alanine, which comprises
[22043] (a) increasing or generating the activity of a sterol 24-C-methyltransferase in the cytosol of a cell of a non-human organism or a part thereof, preferably a microorganism, a plant cell, a plant or a part thereof, as compared to a corresponding non-transformed wild type non-human organism or a part thereof; and
[22044] (b) growing the non-human organism or a part thereof under conditions which permit the production of alanine or a composition comprising alanine in said non-human organism or in the culture medium surrounding said non-human organism.

[22045] Accordingly, the present invention relates to a process for the production of glycine, which comprises
[22046] (a) increasing or generating the activity of a sterol 24-C-methyltransferase in the cytosol of a cell of a non-human organism or a part thereof, preferably a microorganism, a plant cell, a plant or a part thereof, as compared to a corresponding non-transformed wild type non-human organism or a part thereof; and
[22047] (b) growing the non-human organism or a part thereof under conditions which permit the production of glycine or a composition comprising glycine in said non-human organism or in the culture medium surrounding said non-human organism.

[22048] Accordingly, the present invention relates to a process for the production of homoserine, which comprises
[22049] (a) increasing or generating the activity of a sterol 24-C-methyltransferase in the cytosol of a cell of a non-human organism or a part thereof, preferably a microorganism, a plant cell, a plant or a part thereof, as compared to a corresponding non-transformed wild type non-human organism or a part thereof; and
[22050] (b) growing the non-human organism or a part thereof under conditions which permit the production of homoserine or a composition comprising homoserine in said non-human organism or in the culture medium surrounding said non-human organism.

[22051] Accordingly, the present invention relates to a process for the production of 5-oxoproline, which comprises
[22052] (a) increasing or generating the activity of a sterol 24-C-methyltransferase in the cytosol of a cell of a non-human organism or a part thereof, preferably a microorganism, a plant cell, a plant or a part thereof, as compared to a corresponding non-transformed wild type non-human organism or a part thereof; and
[22053] (b) growing the non-human organism or a part thereof under conditions which permit the production of 5-oxoproline or a composition comprising 5-oxoproline in said non-human organism or in the culture medium surrounding said non-human organism.

[22054] Accordingly, the present invention relates to a process for the production of alanine, which comprises
[22055] (a) increasing or generating the activity of a yml083c-protein in the cytosol of a cell of a non-human organism or a part thereof, preferably a microorganism, a plant cell, a plant or a part thereof, as compared to a corresponding non-transformed wild type non-human organism or a part thereof; and
[22056] (b) growing the non-human organism or a part thereof under conditions which permit the production of alanine or a composition comprising alanine in said non-human organism or in the culture medium surrounding said non-human organism.

[22057] Accordingly, the present invention relates to a process for the production of phenylalanine, which comprises
[22058] (a) increasing or generating the activity of a phosphate transporter in the cytosol of a cell of a non-human organism or a part thereof, preferably a microorganism, a plant cell, a plant or a part thereof, as compared to a corresponding non-transformed wild type non-human organism or a part thereof; and
[22059] (b) growing the non-human organism or a part thereof under conditions which permit the production of phenylalanine or a composition comprising phenylalanine in said non-human organism or in the culture medium surrounding said non-human organism.

[22060] Accordingly, the present invention relates to a process for the production of tyrosine, which comprises
[22061] (a) increasing or generating the activity of a phosphate transporter in the cytosol of a cell of a non-human organism or a part thereof, preferably a microorganism, a plant cell, a plant or a part thereof, as compared to a corresponding non-transformed wild type non-human organism or a part thereof; and
[22062] (b) growing the non-human organism or a part thereof under conditions which permit the production of tyrosine or a composition comprising tyrosine in said non-human organism or in the culture medium surrounding said non-human organism.

[22063] Accordingly, the present invention relates to a process for the production of tyrosine, which comprises
[22064] (a) increasing or generating the activity of a ymr013c-protein in the cytosol of a cell of a non-human organism or a part thereof, preferably a microorganism, a plant cell, a plant or a part thereof, as compared to a corresponding non-transformed wild type non-human organism or a part thereof; and
[22065] (b) growing the non-human organism or a part thereof under conditions which permit the production of tyrosine or a composition comprising tyrosine in said non-human organism or in the culture medium surrounding said non-human organism.

[22066] Accordingly, the present invention relates to a process for the production of glycine, which comprises
[22067] (a) increasing or generating the activity of a purine biosynthesis protein in the cytosol of a cell of a non-human organism or a part thereof, preferably a microorganism, a plant cell, a plant or a part thereof, as compared to a corresponding non-transformed wild type non-human organism or a part thereof; and
[22068] (b) growing the non-human organism or a part thereof under conditions which permit the production of glycine or a composition comprising glycine in said non-human organism or in the culture medium surrounding said non-human organism.

[22069] Accordingly, the present invention relates to a process for the production of phenylalanine, which comprises
[22070] (a) increasing or generating the activity of a mitochondrial inner membrane protease subunit in the cytosol of a cell of a non-human organism or a part thereof, preferably a microorganism, a plant cell, a plant or a part thereof, as compared to a corresponding non-transformed wild type non-human organism or a part thereof; and
[22071] (b) growing the non-human organism or a part thereof under conditions which permit the production of phenylalanine or a composition comprising phenylalanine in said non-human organism or in the culture medium surrounding said non-human organism.

[22072] Accordingly, the present invention relates to a process for the production of homoserine, which comprises
[22073] (a) increasing or generating the activity of a YNL086W-protein in the cytosol of a cell of a non-human organism or a part thereof, preferably a microorganism, a plant cell, a plant or a part thereof, as compared to a corresponding non-transformed wild type non-human organism or a part thereof; and
[22074] (b) growing the non-human organism or a part thereof under conditions which permit the production of homoserine or a composition comprising homoserine in said non-human organism or in the culture medium surrounding said non-human organism.

[22075] Accordingly, the present invention relates to a process for the production of tyrosine, which comprises
[22076] (a) increasing or generating the activity of a amino acid transporter in the cytosol of a cell of a non-human organism or a part thereof, preferably a microorganism, a plant cell, a plant or a part thereof, as compared to a corresponding non-transformed wild type non-human organism or a part thereof; and
[22077] (b) growing the non-human organism or a part thereof under conditions which permit the production of tyrosine or a composition comprising tyrosine in said non-human organism or in the culture medium surrounding said non-human organism.

[22078] Accordingly, the present invention relates to a process for the production of homoserine, which comprises
[22079] (a) increasing or generating the activity of a homoserine O-acetyltransferase in the cytosol of a cell of a non-human organism or a part thereof, preferably a microorganism, a plant cell, a plant or a part thereof, as compared to a corresponding non-transformed wild type non-human organism or a part thereof; and
[22080] (b) growing the non-human organism or a part thereof under conditions which permit the production of homoserine or a composition comprising homoserine in said non-human organism or in the culture medium surrounding said non-human organism.

[22081] Accordingly, the present invention relates to a process for the production of alanine, which comprises
[22082] (a) increasing or generating the activity of a metal ion transporter in the cytosol of a cell of a non-human organism or a part thereof, preferably a microorganism, a plant cell, a plant or a part thereof, as compared to a corresponding non-transformed wild type non-human organism or a part thereof; and
[22083] (b) growing the non-human organism or a part thereof under conditions which permit the production of alanine or a composition comprising alanine in said non-human organism or in the culture medium surrounding said non-human organism.

[22084] Accordingly, the present invention relates to a process for the production of aspartate, which comprises
[22085] (a) increasing or generating the activity of a yol160w-protein in the cytosol of a cell of a non-human organism or a part thereof, preferably a microorganism, a plant cell, a plant or a part thereof, as compared to a corresponding non-transformed wild type non-human organism or a part thereof; and
[22086] (b) growing the non-human organism or a part thereof under conditions which permit the production of aspartate or a composition comprising aspartate in said non-human organism or in the culture medium surrounding said non-human organism.

[22087] Accordingly, the present invention relates to a process for the production of citrulline, which comprises
[22088] (a) increasing or generating the activity of a protein kinase in the cytosol of a cell of a non-human organism or a part thereof, preferably a microorganism, a plant cell, a plant or a part thereof, as compared to a corresponding non-transformed wild type non-human organism or a part thereof; and
[22089] (b) growing the non-human organism or a part thereof under conditions which permit the production of citrulline or a composition comprising citrulline in said non-human organism or in the culture medium surrounding said non-human organism.

[22090] Accordingly, the present invention relates to a process for the production of phenylalanine, which comprises
[22091] (a) increasing or generating the activity of a histone acetyltransferase in the cytosol of a cell of a non-human organism or a part thereof, preferably a microorganism, a plant cell, a plant or a part thereof, as compared to a corresponding non-transformed wild type non-human organism or a part thereof; and
[22092] (b) growing the non-human organism or a part thereof under conditions which permit the production of phenylalanine or a composition comprising phenylalanine in said non-human organism or in the culture medium surrounding said non-human organism.

[22093] Accordingly, the present invention relates to a process for the production of tyrosine, which comprises
[22094] (a) increasing or generating the activity of a histone acetyltransferase in the cytosol of a cell of a non-human organism or a part thereof, preferably a microorganism, a plant cell, a plant or a part thereof, as compared to a corresponding non-transformed wild type non-human organism or a part thereof; and
[22095] (b) growing the non-human organism or a part thereof under conditions which permit the production of tyrosine or a composition comprising tyrosine in said non-human organism or in the culture medium surrounding said non-human organism.

[22096] Accordingly, the present invention relates to a process for the production of homoserine, which comprises
[22097] (a) increasing or generating the activity of a diacylglycerol O-acyltransferase in the cytosol of a cell of a non-human organism or a part thereof, preferably a microorganism, a plant cell, a plant or a part thereof, as compared to a corresponding non-transformed wild type non-human organism or a part thereof; and
[22098] (b) growing the non-human organism or a part thereof under conditions which permit the production of homoserine or a composition comprising homoserine in said non-human organism or in the culture medium surrounding said non-human organism.

[22099] Accordingly, the present invention relates to a process for the production of serine, which comprises
[22100] (a) increasing or generating the activity of a diacylglycerol O-acyltransferase in the cytosol of a cell of a non-human organism or a part thereof, preferably a microorganism, a plant cell, a plant or a part thereof, as compared to a corresponding non-transformed wild type non-human organism or a part thereof; and
[22101] (b) growing the non-human organism or a part thereof under conditions which permit the production of serine or a composition comprising serine in said non-human organism or in the culture medium surrounding said non-human organism.

[22102] Accordingly, the present invention relates to a process for the production of 5-oxoproline, which comprises
[22103] (a) increasing or generating the activity of a diacylglycerol O-acyltransferase in the cytosol of a cell of a non-human organism or a part thereof, preferably a microorganism, a plant cell, a plant or a part thereof, as compared to a corresponding non-transformed wild type non-human organism or a part thereof; and
[22104] (b) growing the non-human organism or a part thereof under conditions which permit the production of 5-oxoproline or a composition comprising 5-oxoproline in said non-human organism or in the culture medium surrounding said non-human organism.

[22105] Accordingly, the present invention relates to a process for the production of glycine, which comprises
[22106] (a) increasing or generating the activity of a acetyl-CoA acetyltransferase in the cytosol of a cell of a non-human organism or a part thereof, preferably a microorganism, a plant cell, a plant or a part thereof, as compared to a corresponding non-transformed wild type non-human organism or a part thereof; and
[22107] (b) growing the non-human organism or a part thereof under conditions which permit the production of glycine or a composition comprising glycine in said non-human organism or in the culture medium surrounding said non-human organism.

[22108] Accordingly, the present invention relates to a process for the production of serine, which comprises
[22109] (a) increasing or generating the activity of a citrate synthase in the cytosol of a cell of a non-human organism or a part thereof, preferably a microorganism, a plant cell, a plant or a part thereof, as compared to a corresponding non-transformed wild type non-human organism or a part thereof; and
[22110] (b) growing the non-human organism or a part thereof under conditions which permit the production of serine or a composition comprising serine in said non-human organism or in the culture medium surrounding said non-human organism.

[22111] Accordingly, the present invention relates to a process for the production of aspartate, which comprises
[22112] (a) increasing or generating the activity of a ammonium transporter in the cytosol of a cell of a non-human organism or a part thereof, preferably a microorganism, a plant cell, a plant or a part thereof, as compared to a corresponding non-transformed wild type non-human organism or a part thereof; and
[22113] (b) growing the non-human organism or a part thereof under conditions which permit the production of aspartate or a composition comprising aspartate in said non-human organism or in the culture medium surrounding said non-human organism.

[22114] Accordingly, the present invention relates to a process for the production of phenylalanine, which comprises
[22115] (a) increasing or generating the activity of a Zm_{—}4842_BE510522-protein in the cytosol of a cell of a non-human organism or a part thereof, preferably a microorganism, a plant cell, a plant or a part thereof, as compared to a corresponding non-transformed wild type non-human organism or a part thereof; and
[22116] (b) growing the non-human organism or a part thereof under conditions which permit the production of phenylalanine or a composition comprising phenylalanine in said non-human organism or in the culture medium surrounding said non-human organism.

[22117] Accordingly, the present invention relates to a process for the production of serine, which comprises
[22118] (a) increasing or generating the activity of a Zm_{—}4842_BE510522-protein in the cytosol of a cell of a non-human organism or a part thereof, preferably a microorganism, a plant cell, a plant or a part thereof, as compared to a corresponding non-transformed wild type non-human organism or a part thereof; and
[22119] (b) growing the non-human organism or a part thereof under conditions which permit the production of serine or a composition comprising serine in said non-human organism or in the culture medium surrounding said non-human organism.

[22120] Accordingly, the present invention relates to a process for the production of tyrosine, which comprises
[22121] (a) increasing or generating the activity of a Zm_{—}4842_BE510522-protein in the cytosol of a cell of a non-human organism or a part thereof, preferably a microorganism, a plant cell, a plant or a part thereof, as compared to a corresponding non-transformed wild type non-human organism or a part thereof; and
[22122] (b) growing the non-human organism or a part thereof under conditions which permit the production of tyrosine or a composition comprising tyrosine in said non-human organism or in the culture medium surrounding said non-human organism.

[22123] Accordingly, the present invention relates to a process for the production of 5-oxoproline, which comprises
[22124] (a) increasing or generating the activity of a Zm_{—}4842_BE510522-protein in the cytosol of a cell of a non-human organism or a part thereof, preferably a microorganism, a plant cell, a plant or a part thereof, as compared to a corresponding non-transformed wild type non-human organism or a part thereof; and
[22125] (b) growing the non-human organism or a part thereof under conditions which permit the production of 5-oxoproline or a composition comprising 5-oxoproline in said non-human organism or in the culture medium surrounding said non-human organism.

[22126] Accordingly, the present invention relates to a process for the production of 3,4-dihydroxyphenylalanine (dopa), which comprises
[22127] (a) increasing or generating the activity of a polypeptide comprising a polypeptide as depicted in the respective line in column 5 or 8 of Table II, application no. 3, or a homolog or a fragment thereof, a consensus sequence or at least one polypeptide motif as depicted in the respective line in column 8 of Table IV, application no. 3; or
[22128] increasing or generating the activity of an expression product of one or more nucleic acid molecule(s) comprising a polynucleotide as depicted in the respective line in column 5 or 8 of Table I, application no. 3, preferably the coding region thereof, or a homolog or a fragment thereof;
[22129] in the cytosol of a cell of a non-human organism or a part thereof; preferably a microorganism, a plant cell, a plant or a part thereof, as compared to a corresponding non-transformed wild type non-human organism or a part thereof;
[22130] (wherein in the respective line in the respective Table in column 7 3,4-dihydroxyphenylalanine (dopa) is depicted) and
[22131] (b) growing the non-human organism under conditions which permit the production of 3,4-dihydroxyphenylalanine (dopa), or a composition comprising 3,4-dihydroxyphenylalanine (dopa) in said non-human organism or in the culture medium surrounding said non-human organism.

[22132] Accordingly, the present invention relates to a process for the production of 5-oxoproline, which comprises
[22133] (a) increasing or generating the activity of a polypeptide comprising a polypeptide as depicted in the respective line in column 5 or 8 of Table II, application no. 3, or a homolog or a fragment thereof, a consensus sequence or at least one polypeptide motif as depicted in the respective line in column 8 of Table IV, application no. 3; or
[22134] increasing or generating the activity of an expression product of one or more nucleic acid molecule(s) comprising a polynucleotide as depicted in the respective line in column 5 or 8 of Table I, application no. 3, preferably the coding region thereof, or a homolog or a fragment thereof;
[22135] in the cytosol of a cell of a non-human organism or a part thereof; preferably a microorganism, a plant cell, a plant or a part thereof, as compared to a corresponding non-transformed wild type non-human organism or a part thereof;
[22136] (wherein in the respective line in the respective Table in column 7 5-oxoproline is depicted) and
[22137] (b) growing the non-human organism under conditions which permit the production of 5-oxoproline, or a composition comprising 5-oxoproline in said non-human organism or in the culture medium surrounding said non-human organism.

[22138] Accordingly, the present invention relates to a process for the production of alanine, which comprises
[22139] (a) increasing or generating the activity of a polypeptide comprising a polypeptide as depicted in the respective line in column 5 or 8 of Table II, application no. 3, or a homolog or a fragment thereof, a consensus sequence or at least one polypeptide motif as depicted in the respective line in column 8 of Table IV, application no. 3; or
[22140] increasing or generating the activity of an expression product of one or more nucleic acid molecule(s) comprising a polynucleotide as depicted in the respective line in column 5 or 8 of Table I, application no. 3, preferably the coding region thereof, or a homolog or a fragment thereof;
[22141] in the cytosol of a cell of a non-human organism or a part thereof; preferably a microorganism, a plant cell, a plant or a part thereof, as compared to a corresponding non-transformed wild type non-human organism or a part thereof;
[22142] (wherein in the respective line in the respective Table in column 7 alanine is depicted) and
[22143] (b) growing the non-human organism under conditions which permit the production of alanine, or a composition comprising alanine in said non-human organism or in the culture medium surrounding said non-human organism.

[22144] Accordingly, the present invention relates to a process for the production of asparagine, which comprises
[22145] (a) increasing or generating the activity of a polypeptide comprising a polypeptide as depicted in the respective line in column 5 or 8 of Table II, application no. 3, or a homolog or a fragment thereof, a consensus sequence or at least one polypeptide motif as depicted in the respective line in column 8 of Table IV, application no. 3; or
[22146] increasing or generating the activity of an expression product of one or more nucleic acid molecule(s) comprising a polynucleotide as depicted in the respective line in column 5 or 8 of Table I, application no. 3, preferably the coding region thereof, or a homolog or a fragment thereof;
[22147] in the cytosol of a cell of a non-human organism or a part thereof; preferably a microorganism, a plant cell, a plant or a part thereof, as compared to a corresponding non-transformed wild type non-human organism or a part thereof;
[22148] (wherein in the respective line in the respective Table in column 7 asparagine is depicted) and
[22149] (b) growing the non-human organism under conditions which permit the production of asparagine, or a composition comprising asparagine in said non-human organism or in the culture medium surrounding said non-human organism.

[22150] Accordingly, the present invention relates to a process for the production of aspartate, which comprises
[22151] (a) increasing or generating the activity of a polypeptide comprising a polypeptide as depicted in the respective line in column 5 or 8 of Table II, application no. 3, or a homolog or a fragment thereof, a consensus sequence or at least one polypeptide motif as depicted in the respective line in column 8 of Table IV, application no. 3; or
[22152] increasing or generating the activity of an expression product of one or more nucleic acid molecule(s) comprising a polynucleotide as depicted in the respective line in column 5 or 8 of Table I, application no. 3, preferably the coding region thereof, or a homolog or a fragment thereof;
[22153] in the cytosol of a cell of a non-human organism or a part thereof; preferably a microorganism, a plant cell, a plant or a part thereof, as compared to a corresponding non-transformed wild type non-human organism or a part thereof;
[22154] (wherein in the respective line in the respective Table in column 7 aspartate is depicted) and
[22155] (b) growing the non-human organism under conditions which permit the production of aspartate, or a composition comprising aspartate in said non-human organism or in the culture medium surrounding said non-human organism.

[22156] Accordingly, the present invention relates to a process for the production of citrulline, which comprises
[22157] (a) increasing or generating the activity of a polypeptide comprising a polypeptide as depicted in the respective line in column 5 or 8 of Table II, application no. 3, or a homolog or a fragment thereof, a consensus sequence or at least one polypeptide motif as depicted in the respective line in column 8 of Table IV, application no. 3; or
[22158] increasing or generating the activity of an expression product of one or more nucleic acid molecule(s) comprising a polynucleotide as depicted in the respective line in column 5 or 8 of Table I, application no. 3, preferably the coding region thereof, or a homolog or a fragment thereof;
[22159] in the cytosol of a cell of a non-human organism or a part thereof; preferably a microorganism, a plant cell, a plant or a part thereof, as compared to a corresponding non-transformed wild type non-human organism or a part thereof;
[22160] (wherein in the respective line in the respective Table in column 7 citrulline is depicted) and
[22161] (b) growing the non-human organism under conditions which permit the production of citrulline, or a composition comprising citrulline in said non-human organism or in the culture medium surrounding said non-human organism.

[22162] Accordingly, the present invention relates to a process for the production of glycine, which comprises
[22163] (a) increasing or generating the activity of a polypeptide comprising a polypeptide as depicted in the respective line in column 5 or 8 of Table II, application no. 3, or a homolog or a fragment thereof, a consensus sequence or at least one polypeptide motif as depicted in the respective line in column 8 of Table IV, application no. 3; or
[22164] increasing or generating the activity of an expression product of one or more nucleic acid molecule(s) comprising a polynucleotide as depicted in the respective line in column 5 or 8 of Table I, application no. 3, preferably the coding region thereof, or a homolog or a fragment thereof;
[22165] in the cytosol of a cell of a non-human organism or a part thereof; preferably a microorganism, a plant cell, a plant or a part thereof, as compared to a corresponding non-transformed wild type non-human organism or a part thereof;
[22166] (wherein in the respective line in the respective Table in column 7 glycine is depicted) and
[22167] (b) growing the non-human organism under conditions which permit the production of glycine, or a composition comprising glycine in said non-human organism or in the culture medium surrounding said non-human organism.

[22168] Accordingly, the present invention relates to a process for the production of homoserine, which comprises
[22169] (a) increasing or generating the activity of a polypeptide comprising a polypeptide as depicted in the respective line in column 5 or 8 of Table II, application no. 3, or a homolog or a fragment thereof, a consensus sequence or at least one polypeptide motif as depicted in the respective line in column 8 of Table IV, application no. 3; or
[22170] increasing or generating the activity of an expression product of one or more nucleic acid molecule(s) comprising a polynucleotide as depicted in the respective line in column 5 or 8 of Table I, application no. 3, preferably the coding region thereof, or a homolog or a fragment thereof;
[22171] in the cytosol of a cell of a non-human organism or a part thereof; preferably a microorganism, a plant cell, a plant or a part thereof, as compared to a corresponding non-transformed wild type non-human organism or a part thereof;
[22172] (wherein in the respective line in the respective Table in column 7 homoserine is depicted) and
[22173] (b) growing the non-human organism under conditions which permit the production of homoserine, or a composition comprising homoserine in said non-human organism or in the culture medium surrounding said non-human organism.

[22174] Accordingly, the present invention relates to a process for the production of ornithine, which comprises
[22175] (a) increasing or generating the activity of a polypeptide comprising a polypeptide as depicted in the respective line in column 5 or 8 of Table II, application no. 3, or a homolog or a fragment thereof, a consensus sequence or at least one polypeptide motif as depicted in the respective line in column 8 of Table IV, application no. 3; or
[22176] increasing or generating the activity of an expression product of one or more nucleic acid molecule(s) comprising a polynucleotide as depicted in the respective line in column 5 or 8 of Table I, application no. 3, preferably the coding region thereof, or a homolog or a fragment thereof;
[22177] in the cytosol of a cell of a non-human organism or a part thereof; preferably a microorganism, a plant cell, a plant or a part thereof, as compared to a corresponding non-transformed wild type non-human organism or a part thereof;
[22178] (wherein in the respective line in the respective Table in column 7 ornithine is depicted) and
[22179] (b) growing the non-human organism under conditions which permit the production of ornithine, or a composition comprising ornithine in said non-human organism or in the culture medium surrounding said non-human organism.

[22180] Accordingly, the present invention relates to a process for the production of phenylalanine, which comprises
[22181] (a) increasing or generating the activity of a polypeptide comprising a polypeptide as depicted in the respective line in column 5 or 8 of Table II, application no. 3, or a homolog or a fragment thereof, a consensus sequence or at least one polypeptide motif as depicted in the respective line in column 8 of Table IV, application no. 3; or
[22182] increasing or generating the activity of an expression product of one or more nucleic acid molecule(s) comprising a polynucleotide as depicted in the respective line in column 5 or 8 of Table I, application no. 3, preferably the coding region thereof, or a homolog or a fragment thereof;
[22183] in the cytosol of a cell of a non-human organism or a part thereof; preferably a microorganism, a plant cell, a plant or a part thereof, as compared to a corresponding non-transformed wild type non-human organism or a part thereof;
[22184] (wherein in the respective line in the respective Table in column 7 phenylalanine is depicted) and
[22185] (b) growing the non-human organism under conditions which permit the production of phenylalanine, or a composition comprising phenylalanine in said non-human organism or in the culture medium surrounding said non-human organism.

[22186] Accordingly, the present invention relates to a process for the production of serine, which comprises
[22187] (a) increasing or generating the activity of a polypeptide comprising a polypeptide as depicted in the respective line in column 5 or 8 of Table II, application no. 3, or a homolog or a fragment thereof, a consensus sequence or at least one polypeptide motif as depicted in the respective line in column 8 of Table IV, application no. 3; or
[22188] increasing or generating the activity of an expression product of one or more nucleic acid molecule(s) comprising a polynucleotide as depicted in the respective line in column 5 or 8 of Table I, application no. 3, preferably the coding region thereof, or a homolog or a fragment thereof;
[22189] in the cytosol of a cell of a non-human organism or a part thereof; preferably a microorganism, a plant cell, a plant or a part thereof, as compared to a corresponding non-transformed wild type non-human organism or a part thereof;
[22190] (wherein in the respective line in the respective Table in column 7 serine is depicted) and
[22191] (b) growing the non-human organism under conditions which permit the production of serine, or a composition comprising serine in said non-human organism or in the culture medium surrounding said non-human organism.

[22192] Accordingly, the present invention relates to a process for the production of tyrosine, which comprises
[22193] (a) increasing or generating the activity of a polypeptide comprising a polypeptide as depicted in the respective line in column 5 or 8 of Table II, application no. 3, or a homolog or a fragment thereof, a consensus sequence or at least one polypeptide motif as depicted in the respective line in column 8 of Table IV, application no. 3; or
[22194] increasing or generating the activity of an expression product of one or more nucleic acid molecule(s) comprising a polynucleotide as depicted in the respective line in column 5 or 8 of Table I, application no. 3, preferably the coding region thereof, or a homolog or a fragment thereof;
[22195] in the cytosol of a cell of a non-human organism or a part thereof; preferably a microorganism, a plant cell, a plant or a part thereof, as compared to a corresponding non-transformed wild type non-human organism or a part thereof; (wherein in the respective line in the respective Table in column 7 tyrosine is depicted) and
[22196] (b) growing the non-human organism under conditions which permit the production of tyrosine, or a composition comprising tyrosine in said non-human organism or in the culture medium surrounding said non-human organism.

[22197] In a further embodiment the activity of the polypeptide comprising a polypeptide as depicted in the respective line in column 5 or 8 of Table II, application no. 3, or a homolog or a fragment thereof, a consensus sequence or at least one polypeptide motif as depicted in the respective line in column 8 of Table IV, application no. 3, is increased or generated non-targeted in the above-mentioned process in a microorganism or plant or a part thereof.

[22198] In a further embodiment said polypeptide has the activity of the respective polypeptide represented by a protein comprising a polypeptide as depicted in the respective line in column 5 of Table II, application no. 3.

[22199] In a further embodiment the activity of the expression product of one or more nucleic acid molecule(s) comprising a polynucleotide as depicted in the respective line in column 5 or 8 of Table I, application no. 3, preferably the coding region thereof, or a homolog or a fragment thereof, is increased or generated non-targeted in the above-mentioned process in a microorganism or plant or a part thereof.

[22200] In a further embodiment the activity of the polypeptide comprising a polypeptide as depicted in the respective line in column 5 or 8 of Table II, application no. 3, or a homolog or a fragment thereof, a consensus sequence or at least one polypeptide motif as depicted in the respective line in column 8 of Table IV, application no. 3, is increased or generated in the above-mentioned process in an organelle preferably in plastids or mitochondria, especially in plastids, of a microorganism or plant.

[22201] In a further embodiment said polypeptide has the activity of the respective polypeptide represented by a protein comprising a polypeptide as depicted in the respective line in column 5 of Table II, application no. 3.

[22202] In a further embodiment the activity of the expression product of one or more nucleic acid molecule(s) comprising a polynucleotide as depicted in the respective line in column 5 or 8 of Table I, application no. 3, preferably the coding region thereof, or a homolog or a fragment thereof, is increased or generated in the above-mentioned process in an organelle, preferably in plasids or mitochondria, especially in plastids, of a microorganism or plant.

[22203] In a further embodiment the activity of the polypeptide comprising a polypeptide as depicted in the respective line in column 5 or 8 of Table II, application no. 3, or a homolog or a fragment thereof, a consensus sequence or at least one polypeptide motif as depicted in the respective line in column 8 of Table IV, application no. 3, is increased or generated in the above-mentioned process in the cyctosol of a cell, of a microorganism or plant.

[22204] In a further embodiment said polypeptide has the activity of the respective polypeptide represented by a protein comprising a polypeptide as depicted in the respective line in column 5 of Table II, application no. 3.

[22205] In a further embodiment the activity of the expression product of one or more nucleic acid molecule(s) comprising a polynucleotide as depicted in the respective line in column 5 or 8 of Table I, application no. 3, preferably the coding region thereof, or a homolog or a fragment thereof, is increased or generated in the above-mentioned process in the cytosol of a cell, of a microorganism or plant.

[22206] [0039.1.1.3] to [0066.1.1.3] for the disclosure of these paragraphs see [0039.1.1.1] to [0066.1.1.1] above.

[22207] As mentioned above the nucleic acid sequences coding for the proteins as shown in Table II, application no. 3, column 5 or 8, or homologs or fragments thereof, are joined to a nucleic acid sequence encoding a plastidic transit peptide, e.g, if for the nucleic acid molecule in Table I, column 6 the term “plastidic” is indicated. This nucleic acid sequence encoding a transit peptide ensures transport of the protein to the organelle. The nucleic acid sequence of the gene to be expressed and the nucleic acid sequence encoding the transit peptide are operably linked. Therefore the transit peptide encoding sequence is fused in frame to the nucleic acid sequence coding for proteins as shown in Table II, application no. 3, column 5 or 8, or homologs or fragments thereof, e.g., if for the nucleic acid molecule in Table I, column 6 the term “plastidic” is indicated.

[22208] 0068.1.1.3] to [0072.1.1.3] for the disclosure of these paragraphs see [0068.1.1.1] to [0072.1.1.1] above.

[22209] As mentioned above the nucleic acid sequences coding for the proteins as shown in the respective line in Table II, application no. 3, column 5 or 8, or homologs or fragments thereof, are joined to a nucleic acid sequence encoding a mitochondrial transit peptide, e.g., if for the respective nucleic acid molecule in Table I, column 6 the term “mitochondrial” is indicated. This nucleic acid sequence encoding a transit peptide ensures transport of the protein to the organelle. The nucleic acid sequence of the gene to be expressed and the nucleic acid sequence encoding the transit peptide are operably linked. Therefore the transit peptide encoding sequence is fused in frame to the nucleic acid sequence coding for proteins as shown in the respective line in Table II, application no. 3, column 5 or 8, or homologs or fragments thereof, e.g., if for the nucleic acid molecule in the respective line in Table I, column 6 the term “mitochondrial” is indicated. (For the avoidance of doubt, the term “mitochondric” and “mitochondrial” are interchangeable.)

[22210] [0074.1.1.3] to [0075.1.1.3] for the disclosure of these paragraphs see [0074.1.1.1] to [0075.1.1.1] [0075.1.1.1] above.

[22211] Nucleic acid sequences coding for the transit peptides may be chemically synthesized either in part or wholly according to structure of transit peptide sequences disclosed in the prior art. Said natural or chemically synthesized sequences can be directly linked to the sequences encoding the mature protein or via a linker nucleic acid sequence, which may be typically less than 500 base pairs, preferably less than 450, 400, 350, 300, 250 or 200 base pairs, more preferably less than 150, 100, 90, 80, 70, 60, 50, 40 or 30 base pairs and most preferably less than 25, 20, 15, 12, 9, 6 or 3 base pairs in length and are in frame to the coding sequence. Furthermore favorable nucleic acid sequences encoding transit peptides may comprise sequences derived from more than one biological and/or chemical source and may include a nucleic acid sequence derived from the amino-terminal region of the mature protein, which in its native state is linked to the transit peptide. In a preferred embodiment of the invention said amino-terminal region of the mature protein is typically less than 150 amino acids, preferably less than 140, 130, 120, 110, 100 or 90 amino acids, more preferably less than 80, 70, 60, 50, 40, 35, 30, 25 or 20 amino acids and most preferably less than 19, 18, 17, 16, 15, 14, 13, 12, 11 or 10 amino acids in length. But even shorter or longer stretches are also possible. In addition target sequences, which facilitate the transport of proteins to other cell compartments such as the vacuole, endoplasmic reticulum, golgi complex, glyoxysomes, peroxisomes, mitochondria (in case of a plastidal transit peptide) or plastids, especially chloroplasts (in case of a mitochondric transit peptide) may be also part of the inventive nucleic acid sequence. The proteins translated from said inventive nucleic acid sequences are a kind of fusion proteins that means the nucleic acid sequences encoding the plastidal transit peptide for example the ones shown in Table a, preferably the last one of the Table a are joint to the respective nucleic acid sequences shown in Table I, application no. 3, columns 5 or 8, especially the coding region thereof, or homologs or fragments thereof, in case of nucleic acid sequences being expressed in plastids, and that means the nucleic acid sequences encoding the mitochondric transit peptide for example the ones shown in Table b, preferably the last one of the Table b are joint to the respective nucleic acid sequences shown in Table I, application no. 3, columns 5 or 8, especially the coding region thereof, or homologs or fragments thereof, in case of nucleic acid sequences being expressed in mitochondria. The person skilled in the art is able to join said sequences in a functional manner. Advantageously the transit peptide part is cleaved off from the protein part shown in Table II, application no. 3, columns 5 or 8, or a homolog or fragment thereof, during or after the transport into the organelles, preferably into the plastids or mitochondria, respectively.

[22212] All products of the cleavage of the preferred transit peptide shown in the last line of Table a have preferably the N-terminal amino acid sequences QIA CSS or QIA EFQLTT in front of the start methionine of the respective protein mentioned in Table II, application no. 3, column 5 or 8. or homologs or fragments thereof. Other short amino acid sequences of an range of 1 to 20 amino acids preferable 2 to 15 amino acids, more preferable 3 to 10 amino acids most preferably 4 to 8 amino acids are also possible in front of the start methionine of the protein mentioned in Table II, application no. 3, columns 5 or 8, or homologs or fragments thereof. In case of the amino acid sequence QIA CSS the three amino acids in front of the start methionine are stemming from the LIC (=ligatation independent cloning) cassette. Said short amino acid sequence is preferred in the case of the expression of E. coli genes. In case of the amino acid sequence QIA EFQLTT the six amino acids in front of the start methionine are stemming from the LIC cassette. Said short amino acid sequence is preferred in the case of the expression of S. cerevisiae genes. The skilled worker knowns that other short sequences are also useful in the expression of the respective nucleic acid molecule comprising a polynucleotide as depicted in Table I, application no. 3, column 5 or 8, preferably the coding region thereof, or a homolog or a fragment thereof. Furthermore the skilled worker is aware of the fact that there is not a need for such short sequences in the expression of the genes.

[22213] [0077.1.1.3] to [0078.1.1.3] for the disclosure of these paragraphs see [0077.1.1.1] to [0078.1.1.1] above.

[22214] Alternatively to the targeting of the respective sequences shown in Table II, application no. 3, columns 5 or 8, or homologs or fragments thereof, preferably of sequences in general encoded in the nucleus with the aid of the targeting sequences mentioned for example in Table a alone, Table b alone, or in combination with other targeting sequences preferably into plastids or mitochondria, respectively, the nucleic acids of the invention can directly be introduced into the plastidal or mitochondrial genome. Therefore in a preferred embodiment the respective nucleic acid sequences shown in the respective line in Table I, application no. 3, columns 5 or 8, preferably the coding region thereof, or homologs or fragments thereof, are directly introduced and expressed in plastids e.g., if for the nucleic acid molecule in the respective line in Table I, column 6, the term “plastidic” is indicated, or are directly introduced and expressed in mitochondria e.g., if for the nucleic acid molecule in the respective line in Table I, column 6 the term “mitochondrial” is indicated.

[22215] The term “introduced” in the context of this specification shall mean the insertion of a nucleic acid sequence into the organism by means of a “transfection”, “transduction” or preferably by “transformation”.

[22216] A plastid, such as a chloroplast, or a mitochondrion, has been “transformed” by an exogenous (preferably foreign) nucleic acid sequence if a nucleic acid sequence has been introduced into the plastid or mitochondrion that means that this sequence has crossed the membrane or the membranes of the plastid or of the mitochondrion. The exogenous, preferably foreign, DNA may be integrated (covalently linked) into plastid or mitochondrial DNA making up the genome of the plastid or mitochondrion, or it may remain unintegrated (e.g., by including a chloroplast origin of replication). “Stably” integrated DNA sequences are those, which are inherited through plastid or mitochondrion replication, thereby transferring new plastids or mitochondria, with the features of the integrated DNA sequence to the progeny.

[22217] [0080.1.1.3] to [0083.1.1.3] for the disclosure of these paragraphs see [0080.1.1.1] to [0083.1.1.1] above.

[22218] For the process of the present invention it may be of great advantage that by transforming the plastids the intraspecies specific transgene flow is blocked, because a lot of species such as corn, cotton and rice have a strict maternal inheritance of plastids. By placing the respective genes specified in the respective line in Table I, application no. 3, columns 5 or 8, preferably the coding region, or homologs or fragments thereof, e.g. if for the nucleic acid molecule in the respective line in column 6 of Table I the term “plastidic” is indicated, in the plastids of plants, these genes will not be present in the pollen of said plants.

[22219] A further preferred embodiment of the invention relates to the use of so called “chloroplast localization sequences”, in which a first RNA sequence or molecule is capable of transporting or “chaperoning” a second RNA sequence, such as a RNA sequence transcribed from the sequences depicted in the respective line in Table I, application no. 3, columns 5 or 8, preferably the coding region thereof, or a homolog or a fragment thereof, or a sequence encoding a protein, as depicted in the respective line in Table II, application no. 3, columns 5 and 8, or a homolog or a fragment thereof, from an external environment inside a cell or outside a plastid into a chloroplast. In one embodiment the chloroplast localization signal is substantially similar or complementary to a complete or intact viroid sequence. The chloroplast localization signal may be encoded by a DNA sequence, which is transcribed into the chloroplast localization RNA. The term “viroid” refers to a naturally occurring single stranded RNA molecule (Flores, C. R. Acad. Sci. III. 324 (10), 943 (2001)). Viroids usually contain about 200-500 nucleotides and generally exist as circular molecules. Examples of viroids that contain chloroplast localization signals include but are not limited to ASBVd, PLMVd, CChMVd and ELVd. The viroid sequence or a functional part of it can be fused to the sequences depicted in the respective line in Table I, application no. 3, columns 5 or 8, preferably the coding region thereof, or a homolog or a fragment thereof, or a sequence encoding a protein, as depicted in the respective line in Table II, application no. 3, columns 5 or 8, or a homolog or a fragment thereof, in such a manner that the viroid sequence transports a sequence transcribed from a sequence as depicted in the respective line in Table I, application no. 3 columns 5 or 8, preferably the coding region thereof, or a homolog or a fragment thereof, or a sequence encoding a protein as depicted in the respective line in Table II, application no. 3 columns 5 or 8, or a homolog or a fragment thereof, into the chloroplasts, e.g. if for the nucleic acid molecule in column 6 of Table I the term “plastidic” is indicated. A preferred embodiment uses a modified ASBVd (Navarro et al., Virology. 268 (1), 218 (2000)).

[22220] In a further specific embodiment the protein to be expressed in the plastids such as the proteins depicted in the respective line in Table II, application no. 3, columns 5 or 8, or a homolog or a fragment thereof, e.g. if for the nucleic acid molecule in the respective line in column 6 of Table I the term “plastidic” is indicated, are encoded by different nucleic acids. Such a method is disclosed in WO 2004/040973, which shall be incorporated by reference. WO 2004/040973 teaches a method, which relates to the translocation of an RNA corresponding to a gene or gene fragment into the chloroplast by means of a chloroplast localization sequence. The genes, which should be expressed in the plant or plant cells, are split into nucleic acid fragments, which are introduced into different compartments in the plant e.g. the nucleus, the plastids and/or mitochondria. Additionally plant cells are described in which the chloroplast contains a ribozyme fused at one end to an RNA encoding a fragment of a protein used in the inventive process such that the ribozyme can trans-splice the translocated fusion RNA to the RNA encoding the gene fragment to form and as the case may be reunite the nucleic acid fragments to an intact mRNA encoding a functional protein for example as disclosed in the respective line in Table II, application no. 3, columns 5 or 8, or a homolog or a fragment thereof.

[22221] In a preferred embodiment of the invention the nucleic acid sequences as shown in the respective line in Table I, application no. 3, columns 5 or 8, preferably the coding region thereof, or homologs or fragments thereof, e.g. if for the nucleic acid molecule in the respective line in column 6 of Table I the term “plastidic” is indicated, used in the inventive process are transformed into plastids, which are metabolically active. Those plastids should preferably maintain at a high copy number in the plant or plant tissue of interest, most preferably the chloroplasts found in green plant tissues, such as leaves or cotyledons or in seeds.

[22222] For a good expression in the plastids the nucleic acid sequences as shown in the respective line in Table I, application no. 3, columns 5 or 8, preferably the coding region thereof, or homologs or fragments thereof, e.g. if for the nucleic acid molecule in the respective line in column 6 of Table I the term “plastidic” is indicated, are introduced into an expression cassette using preferably a promoter and terminater, which are active in plastids preferably a chloroplast promoter. Examples of such promoters include the psbA promoter from the gene from spinach or pea, the rbcL promoter, and the atpB promoter from corn.

[22223] [0089.1.1.3] to [0092.1.1.3] for the disclosure of these paragraphs see [0089.1.1.1] to [0092.1.1.1] above.

[22224] Advantageously the process for the production of the fine chemical 3,4-dihydroxyphenylalanine (dopa), 5-oxoproline, alanine, asparagine, aspartate, citrulline, glycine, homoserine, ornithine, phenylalanine, serine, and/or tyrosine leads to an enhanced production of the respective fine chemical. The terms “enhanced” or “increase” mean at least a 10%, 20%, 30%, 40% or 50%, preferably at least 60%, 70%, 80%, 90% or 100%, more preferably 150%, 200%, 300%, 400% or 500% higher production of the respective fine chemical 3,4-dihydroxyphenylalanine (dopa), 5-oxoproline, alanine, asparagine, aspartate, citrulline, glycine, homoserine, ornithine, phenylalanine, serine, and/or tyrosine in comparison to the wild-type as defined above, e.g. that means in comparison to a non-human organism without the aforementioned modification of the activity of a protein as shown in the respective line in Table II, application no. 3, column 5 or 8, or a fragment or a homolog thereof. The modification of the activity of a protein as shown in the respective line in Table II, application no. 3, column 5 or 8, or a homolog or a fragment thereof, or their combination can be achieved by joining the protein to a respective transit peptide, e.g. if for the respective encoding nucleic acid molecule in column 6 of Table I the term “plastidic” or “mitochondrial” is indicated.

[22225] Surprisingly it was found, that the transgenic expression of a protein as shown in the respective line in Table II, application no. 3, column 5, especially from the Saccaromyces cerevisiae, E. coli, Arabidopsis thaliana, Azotobacter vinelandii, Brassica napus, Glycine max, Oryza sativa, Physcomitrella patens, Synechocystis sp., Thermus thermophilus, Zea mays in a non-human organism, like a plant or a part thereof, such as Arabidopsis thaliana for example, or a microorganism, conferred a production of or an increase in 3,4-dihydroxyphenylalanine (dopa), 5-oxoproline, alanine, asparagine, aspartate, citrulline, glycine, homoserine, ornithine, phenylalanine, serine, and/or tyrosine,respectively, to the transgenic non-human organism as compared to a corresponding non-transformed wild type.

[22226] In one embodiment the transgenic expression of a protein as shown in the respective line in Table II, application no. 2, column 5 or 8, or a homolog or a fragment thereof, especially from the Saccaromyces cerevisiae, E. coli, Arabidopsis thaliana, Azotobacter vinelandii, Brassica napus, Glycine max, Oryza sativa, Physcomitrella patens, Synechocystis sp., Thermus thermophilus, Zea mays in a non-human organism, like a plant or a part thereof, such as Arabidopsis thaliana for example, or a microorganism, confers a production of or an increase in 3,4-dihydroxyphenylalanine (dopa), 5-oxoproline, alanine, asparagine, aspartate, citrulline, glycine, homoserine, ornithine, phenylalanine, serine, and/or tyrosine, respectively,to the transgenic non-human organism as compared to a corresponding non-transformed wild type.

[22227] Accordingly, in one embodiment, an increase of aspartate in a non-human organism, as compared to a corresponding non-transformed wild type non-human organism, is conferred in the process of the invention, if the activity of a polypeptide showing the activity of a 47266012-protein, or if the activity of the polypeptide 47266012_SOYBEAN, preferably represented by SEQ ID NO. 15188, or a homolog or fragment thereof, or if the activity of a polypeptide encoded by a nucleic acid molecule comprising the nucleic acid SEQ ID NO. 15187, preferably the coding region thereof, or a homolog or fragment thereof, e.g. derived from Glycine max, is increased or generated. For example the activity of a nucleic acid molecule or a polypeptide comprising the nucleic acid, preferably the coding region thereof, or polypeptide or the consensus sequence or the polypeptide motif, as depicted in Table I, II or IV, application No. 3, column 5 or 8 in the respective same line as the nucleic acid molecule SEQ ID NO. 15187 or polypeptide SEQ ID NO. 15188, respectively, or a homolog or a fragment thereof, is increased or generated, or if the activity 47266012-protein is increased or generated in a non-human organism, like a microorganism or a plant cell, plant or part thereof, especially with non-targeted localization, whereby the respective line discloses in column 7 aspartate. For example, an increase of the aspartate of at least 1 percent, particularly in a range of 48 to 125-percent is conferred as compared to a corresponding non-transformed wild type non-human organism.

[22228] Accordingly, in one embodiment, an increase of tyrosine in a non-human organism, as compared to a corresponding non-transformed wild type non-human organism, is conferred in the process of the invention, if the activity of a polypeptide showing the activity of a 47266012protein, or if the activity of the polypeptide 47266012_SOYBEAN, preferably represented by SEQ ID NO. 15188, or a homolog or fragment thereof, or if the activity of a polypeptide encoded by a nucleic acid molecule comprising the nucleic acid SEQ ID NO. 15187, preferably the coding region thereof, or a homolog or fragment thereof, e.g. derived from Glycine max, is increased or generated. For example the activity of a nucleic acid molecule or a polypeptide comprising the nucleic acid, preferably the coding region thereof, or polypeptide or the consensus sequence or the polypeptide motif, as depicted in Table I, II or IV, application No. 3, column 5 or 8 in the respective same line as the nucleic acid molecule SEQ ID NO. 15187 or polypeptide SEQ ID NO. 15188, respectively, or a homolog or a fragment thereof, is increased or generated, or if the activity 47266012-protein is increased or generated in a non-human organism, like a microorganism or a plant cell, plant or part thereof, especially with non-targeted localization, whereby the respective line discloses in column 7 tyrosine. For example, an increase of the tyrosine of at least 1 percent, particularly in a range of 44 to 122-percent is conferred as compared to a corresponding non-transformed wild type non-human organism.

[22229] Accordingly, in one embodiment, an increase of 5-oxoproline in a non-human organism, as compared to a corresponding non-transformed wild type non-human organism, is conferred in the process of the invention, if the activity of a polypeptide showing the activity of a 47266012protein, or if the activity of the polypeptide 47266012_SOYBEAN, preferably represented by SEQ ID NO. 15188, or a homolog or fragment thereof, or if the activity of a polypeptide encoded by a nucleic acid molecule comprising the nucleic acid SEQ ID NO. 15187, preferably the coding region thereof, or a homolog or fragment thereof, e.g. derived from Glycine max, is increased or generated. For example the activity of a nucleic acid molecule or a polypeptide comprising the nucleic acid, preferably the coding region thereof, or polypeptide or the consensus sequence or the polypeptide motif, as depicted in Table I, II or IV, application No. 3, column 5 or 8 in the respective same line as the nucleic acid molecule SEQ ID NO. 15187 or polypeptide SEQ ID NO. 15188, respectively, or a homolog or a fragment thereof, is increased or generated, or if the activity 47266012-protein is increased or generated in a non-human organism, like a microorganism or a plant cell, plant or part thereof, especially with non-targeted localization, whereby the respective line discloses in column 7 5-oxoproline. For example, an increase of the 5-oxoproline of at least 1 percent, particularly in a range of 52 to 161-percent is conferred as compared to a corresponding non-transformed wild type non-human organism.

[22230] Accordingly, in one embodiment, an increase of aspartate in a non-human organism, as compared to a corresponding non-transformed wild type non-human organism, is conferred in the process of the invention, if the activity of a polypeptide showing the activity of a 49747384_SOYBEAN-protein, or if the activity of the polypeptide 49747384_SOYBEAN, preferably represented by SEQ ID NO. 70, or a homolog or fragment thereof, or if the activity of a polypeptide encoded by a nucleic acid molecule comprising the nucleic acid SEQ ID NO. 69, preferably the coding region thereof, or a homolog or fragment thereof, e.g. derived from Glycine max, is increased or generated. For example the activity of a nucleic acid molecule or a polypeptide comprising the nucleic acid, preferably the coding region thereof, or polypeptide or the consensus sequence or the polypeptide motif, as depicted in Table I, II or IV, application No. 3, column 5 or 8 in the respective same line as the nucleic acid molecule SEQ ID NO. 69 or polypeptide SEQ ID NO. 70, respectively, or a homolog or a fragment thereof, is increased or generated, or if the activity 49747384_SOYBEAN-protein is increased or generated in a non-human organism, like a microorganism or a plant cell, plant or part thereof, especially with non-targeted localization, whereby the respective line discloses in column 7 aspartate. For example, an increase of the aspartate of at least 1 percent, particularly in a range of 55 to 122-percent is conferred as compared to a corresponding non-transformed wild type non-human organism.

[22231] Accordingly, in one embodiment, an increase of tyrosine in a non-human organism, as compared to a corresponding non-transformed wild type non-human organism, is conferred in the process of the invention, if the activity of a polypeptide showing the activity of a 49747384_SOYBEAN-protein, or if the activity of the polypeptide 49747384_SOYBEAN, preferably represented by SEQ ID NO. 70, or a homolog or fragment thereof, or if the activity of a polypeptide encoded by a nucleic acid molecule comprising the nucleic acid SEQ ID NO. 69, preferably the coding region thereof, or a homolog or fragment thereof, e.g. derived from Glycine max, is increased or generated. For example the activity of a nucleic acid molecule or a polypeptide comprising the nucleic acid, preferably the coding region thereof, or polypeptide or the consensus sequence or the polypeptide motif, as depicted in Table I, II or IV, application No. 3, column 5 or 8 in the respective same line as the nucleic acid molecule SEQ ID NO. 69 or polypeptide SEQ ID NO. 70, respectively, or a homolog or a fragment thereof, is increased or generated, or if the activity 49747384_SOYBEAN-protein is increased or generated in a non-human organism, like a microorganism or a plant cell, plant or part thereof, especially with non-targeted localization, whereby the respective line discloses in column 7 tyrosine. For example, an increase of the tyrosine of at least 1 percent, particularly in a range of 35 to 80-percent is conferred as compared to a corresponding non-transformed wild type non-human organism.

[22232] Accordingly, in one embodiment, an increase of 5-oxoproline in a non-human organism, as compared to a corresponding non-transformed wild type non-human organism, is conferred in the process of the invention, if the activity of a polypeptide showing the activity of a 49747384_SOYBEAN-protein, or if the activity of the polypeptide 49747384_SOYBEAN, preferably represented by SEQ ID NO. 70, or a homolog or fragment thereof, or if the activity of a polypeptide encoded by a nucleic acid molecule comprising the nucleic acid SEQ ID NO. 69, preferably the coding region thereof, or a homolog or fragment thereof, e.g. derived from Glycine max, is increased or generated. For example the activity of a nucleic acid molecule or a polypeptide comprising the nucleic acid, preferably the coding region thereof, or polypeptide or the consensus sequence or the polypeptide motif, as depicted in Table I, II or IV, application No. 3, column 5 or 8 in the respective same line as the nucleic acid molecule SEQ ID NO. 69 or polypeptide SEQ ID NO. 70, respectively, or a homolog or a fragment thereof, is increased or generated, or if the activity 49747384_SOYBEAN-protein is increased or generated in a non-human organism, like a microorganism or a plant cell, plant or part thereof, especially with non-targeted localization, whereby the respective line discloses in column 7 5-oxoproline. For example, an increase of the 5-oxoproline of at least 1 percent, particularly in a range of 52 to 101 percent is conferred as compared to a corresponding non-transformed wild type non-human organism.

[22233] Accordingly, in one embodiment, an increase of alanine in a non-human organism, as compared to a corresponding non-transformed wild type non-human organism, is conferred in the process of the invention, if the activity of a polypeptide showing the activity of a pyruvate kinase, or if the activity of the polypeptide 51340801_CANOLA, preferably represented by SEQ ID NO. 15533, or a homolog or fragment thereof, or if the activity of a polypeptide encoded by a nucleic acid molecule comprising the nucleic acid SEQ ID NO. 15532, preferably the coding region thereof, or a homolog or fragment thereof, e.g. derived from Brassica napus, is increased or generated. For example the activity of a nucleic acid molecule or a polypeptide comprising the nucleic acid, preferably the coding region thereof, or polypeptide or the consensus sequence or the polypeptide motif, as depicted in Table I, II or IV, application No. 3, column 5 or 8 in the respective same line as the nucleic acid molecule SEQ ID NO. 15532 or polypeptide SEQ ID NO. 15533, respectively, or a homolog or a fragment thereof, is increased or generated, or if the activity pyruvate kinase is increased or generated in a non-human organism, like a microorganism or a plant cell, plant or part thereof, especially with plastidic localization, whereby the respective line discloses in column 7 alanine. For example, an increase of the alanine of at least 1 percent, particularly in a range of 38 to 153-percent is conferred as compared to a corresponding non-transformed wild type non-human organism.

[22234] Accordingly, in one embodiment, an increase of phenylalanine in a non-human organism, as compared to a corresponding non-transformed wild type non-human organism, is conferred in the process of the invention, if the activity of a polypeptide showing the activity of a pyruvate kinase, or if the activity of the polypeptide 51340801_CANOLA, preferably represented by SEQ ID NO. 15533, or a homolog or fragment thereof, or if the activity of a polypeptide encoded by a nucleic acid molecule comprising the nucleic acid SEQ ID NO. 15532, preferably the coding region thereof, or a homolog or fragment thereof, e.g. derived from Brassica napus, is increased or generated. For example the activity of a nucleic acid molecule or a polypeptide comprising the nucleic acid, preferably the coding region thereof, or polypeptide or the consensus sequence or the polypeptide motif, as depicted in Table I, II or IV, application No. 3, column 5 or 8 in the respective same line as the nucleic acid molecule SEQ ID NO. 15532 or polypeptide SEQ ID NO. 15533, respectively, or a homolog or a fragment thereof, is increased or generated, or if the activity pyruvate kinase is increased or generated in a non-human organism, like a microorganism or a plant cell, plant or part thereof, especially with plastidic localization, whereby the respective line discloses in column 7 phenylalanine. For example, an increase of the phenylalanine of at least 1 percent, particularly in a range of 30 to 263-percent is conferred as compared to a corresponding non-transformed wild type non-human organism.

[22235] Accordingly, in one embodiment, an increase of tyrosine in a non-human organism, as compared to a corresponding non-transformed wild type non-human organism, is conferred in the process of the invention, if the activity of a polypeptide showing the activity of a pyruvate kinase, or if the activity of the polypeptide 51340801_CANOLA, preferably represented by SEQ ID NO. 15533, or a homolog or fragment thereof, or if the activity of a polypeptide encoded by a nucleic acid molecule comprising the nucleic acid SEQ ID NO. 15532, preferably the coding region thereof, or a homolog or fragment thereof, e.g. derived from Brassica napus, is increased or generated. For example the activity of a nucleic acid molecule or a polypeptide comprising the nucleic acid, preferably the coding region thereof, or polypeptide or the consensus sequence or the polypeptide motif, as depicted in Table I, II or IV, application No. 3, column 5 or 8 in the respective same line as the nucleic acid molecule SEQ ID NO. 15532 or polypeptide SEQ ID NO. 15533, respectively, or a homolog or a fragment thereof, is increased or generated, or if the activity pyruvate kinase is increased or generated in a non-human organism, like a microorganism or a plant cell, plant or part thereof, especially with plastidic localization, whereby the respective line discloses in column 7 tyrosine. For example, an increase of the tyrosine of at least 1 percent, particularly in a range of 42 to 123-percent is conferred as compared to a corresponding non-transformed wild type non-human organism.

[22236] Accordingly, in one embodiment, an increase of citrulline in a non-human organism, as compared to a corresponding non-transformed wild type non-human organism, is conferred in the process of the invention, if the activity of a polypeptide showing the activity of a acetyltransferase, or if the activity of the polypeptide 59547452_SOYBEAN, preferably represented by SEQ ID NO. 16156, or a homolog or fragment thereof, or if the activity of a polypeptide encoded by a nucleic acid molecule comprising the nucleic acid SEQ ID NO. 16155, preferably the coding region thereof, or a homolog or fragment thereof, e.g. derived from Glycine max, is increased or generated. For example the activity of a nucleic acid molecule or a polypeptide comprising the nucleic acid, preferably the coding region thereof, or polypeptide or the consensus sequence or the polypeptide motif, as depicted in Table I, II or IV, application No. 3, column 5 or 8 in the respective same line as the nucleic acid molecule SEQ ID NO. 16155 or polypeptide SEQ ID NO. 16156, respectively, or a homolog or a fragment thereof, is increased or generated, or if the activity acetyltransferase is increased or generated in a non-human organism, like a microorganism or a plant cell, plant or part thereof, especially with non-targeted localization, whereby the respective line discloses in column 7 citrulline. For example, an increase of the citrulline of at least 1 percent, particularly in a range of 40 to 104-percent is conferred as compared to a corresponding non-transformed wild type non-human organism.

[22237] Accordingly, in one embodiment, an increase of asparagine in a non-human organism, as compared to a corresponding non-transformed wild type non-human organism, is conferred in the process of the invention, if the activity of a polypeptide showing the activity of a pyruvate kinase, or if the activity of the polypeptide 59554615_SOYBEAN, preferably represented by SEQ ID NO. 16264, or a homolog or fragment thereof, or if the activity of a polypeptide encoded by a nucleic acid molecule comprising the nucleic acid SEQ ID NO. 16263, preferably the coding region thereof, or a homolog or fragment thereof, e.g. derived from Glycine max, is increased or generated. For example the activity of a nucleic acid molecule or a polypeptide comprising the nucleic acid, preferably the coding region thereof, or polypeptide or the consensus sequence or the polypeptide motif, as depicted in Table I, II or IV, application No. 3, column 5 or 8 in the respective same line as the nucleic acid molecule SEQ ID NO. 16263 or polypeptide SEQ ID NO. 16264, respectively, or a homolog or a fragment thereof, is increased or generated, or if the activity pyruvate kinase is increased or generated in a non-human organism, like a microorganism or a plant cell, plant or part thereof, especially with plastidic localization, whereby the respective line discloses in column 7 asparagine. For example, an increase of the asparagine of at least 1 percent, particularly in a range of 54 to 113-percent is conferred as compared to a corresponding non-transformed wild type non-human organism.

[22238] Accordingly, in one embodiment, an increase of serine in a non-human organism, as compared to a corresponding non-transformed wild type non-human organism, is conferred in the process of the invention, if the activity of a polypeptide showing the activity of a pyruvate kinase, or if the activity of the polypeptide 59554615_SOYBEAN, preferably represented by SEQ ID NO. 16264, or a homolog or fragment thereof, or if the activity of a polypeptide encoded by a nucleic acid molecule comprising the nucleic acid SEQ ID NO. 16263, preferably the coding region thereof, or a homolog or fragment thereof, e.g. derived from Glycine max, is increased or generated. For example the activity of a nucleic acid molecule or a polypeptide comprising the nucleic acid, preferably the coding region thereof, or polypeptide or the consensus sequence or the polypeptide motif, as depicted in Table I, II or IV, application No. 3, column 5 or 8 in the respective same line as the nucleic acid molecule SEQ ID NO. 16263 or polypeptide SEQ ID NO. 16264, respectively, or a homolog or a fragment thereof, is increased or generated, or if the activity pyruvate kinase is increased or generated in a non-human organism, like a microorganism or a plant cell, plant or part thereof, especially with plastidic localization, whereby the respective line discloses in column 7 serine. For example, an increase of the serine of at least 1 percent, particularly in a range of 27 to 31-percent is conferred as compared to a corresponding non-transformed wild type non-human organism.

[22239] Accordingly, in one embodiment, an increase of alanine in a non-human organism, as compared to a corresponding non-transformed wild type non-human organism, is conferred in the process of the invention, if the activity of a polypeptide showing the activity of a glucose-6-phosphate 1-dehydrogenase, or if the activity of the polypeptide 59582753_SOYBEAN, preferably represented by SEQ ID NO. 16884, or a homolog or fragment thereof, or if the activity of a polypeptide encoded by a nucleic acid molecule comprising the nucleic acid SEQ ID NO. 16883, preferably the coding region thereof, or a homolog or fragment thereof, e.g. derived from Glycine max, is increased or generated. For example the activity of a nucleic acid molecule or a polypeptide comprising the nucleic acid, preferably the coding region thereof, or polypeptide or the consensus sequence or the polypeptide motif, as depicted in Table I, II or IV, application No.

[22240] 3, column 5 or 8 in the respective same line as the nucleic acid molecule SEQ ID NO. 16883 or polypeptide SEQ ID NO. 16884, respectively, or a homolog or a fragment thereof, is increased or generated, or if the activity glucose-6-phosphate 1-dehydrogenase is increased or generated in a non-human organism, like a microorganism or a plant cell, plant or part thereof, especially with plastidic localization, whereby the respective line discloses in column 7 alanine. For example, an increase of the alanine of at least 1 percent, particularly in a range of 23 to 116-percent is conferred as compared to a corresponding non-transformed wild type non-human organism.

[22241] Accordingly, in one embodiment, an increase of phenylalanine in a non-human organism, as compared to a corresponding non-transformed wild type non-human organism, is conferred in the process of the invention, if the activity of a polypeptide showing the activity of a glucose-6-phosphate 1-dehydrogenase, or if the activity of the polypeptide 59582753_SOYBEAN, preferably represented by SEQ ID NO. 16884, or a homolog or fragment thereof, or if the activity of a polypeptide encoded by a nucleic acid molecule comprising the nucleic acid SEQ ID NO. 16883, preferably the coding region thereof, or a homolog or fragment thereof, e.g. derived from Glycine max, is increased or generated. For example the activity of a nucleic acid molecule or a polypeptide comprising the nucleic acid, preferably the coding region thereof, or polypeptide or the consensus sequence or the polypeptide motif, as depicted in Table I, II or IV, application No. 3, column 5 or 8 in the respective same line as the nucleic acid molecule SEQ ID NO. 16883 or polypeptide SEQ ID NO. 16884, respectively, or a homolog or a fragment thereof, is increased or generated, or if the activity glucose-6-phosphate 1-dehydrogenase is increased or generated in a non-human organism, like a microorganism or a plant cell, plant or part thereof, especially with plastidic localization, whereby the respective line discloses in column 7 phenylalanine. For example, an increase of the phenylalanine of at least 1 percent, particularly in a range of 27 to 61-percent is conferred as compared to a corresponding non-transformed wild type non-human organism.

[22242] Accordingly, in one embodiment, an increase of tyrosine in a non-human organism, as compared to a corresponding non-transformed wild type non-human organism, is conferred in the process of the invention, if the activity of a polypeptide showing the activity of a glucose-6-phosphate 1-dehydrogenase, or if the activity of the polypeptide 59582753_SOYBEAN, preferably represented by SEQ ID NO. 16884, or a homolog or fragment thereof, or if the activity of a polypeptide encoded by a nucleic acid molecule comprising the nucleic acid SEQ ID NO. 16883, preferably the coding region thereof, or a homolog or fragment thereof, e.g. derived from Glycine max, is increased or generated. For example the activity of a nucleic acid molecule or a polypeptide comprising the nucleic acid, preferably the coding region thereof, or polypeptide or the consensus sequence or the polypeptide motif, as depicted in Table I, II or IV, application No.

[22243] 3, column 5 or 8 in the respective same line as the nucleic acid molecule SEQ ID NO. 16883 or polypeptide SEQ ID NO. 16884, respectively, or a homolog or a fragment thereof, is increased or generated, or if the activity glucose-6-phosphate 1-dehydrogenase is increased or generated in a non-human organism, like a microorganism or a plant cell, plant or part thereof, especially with plastidic localization, whereby the respective line discloses in column 7 tyrosine. For example, an increase of the tyrosine of at least 1 percent, particularly in a range of 38 to 93-percent is conferred as compared to a corresponding non-transformed wild type non-human organism.

[22244] Accordingly, in one embodiment, an increase of alanine in a non-human organism, as compared to a corresponding non-transformed wild type non-human organism, is conferred in the process of the invention, if the activity of a polypeptide showing the activity of a amino acid acetyltransferase, or if the activity of the polypeptide AAC43185, preferably represented by SEQ ID NO. 17357, or a homolog or fragment thereof, or if the activity of a polypeptide encoded by a nucleic acid molecule comprising the nucleic acid SEQ ID NO. 17356, preferably the coding region thereof, or a homolog or fragment thereof, e.g. derived from Arabidopsis thaliana, is increased or generated. For example the activity of a nucleic acid molecule or a polypeptide comprising the nucleic acid, preferably the coding region thereof, or polypeptide or the consensus sequence or the polypeptide motif, as depicted in Table I, II or IV, application No. 3, column 5 or 8 in the respective same line as the nucleic acid molecule SEQ ID NO. 17356 or polypeptide SEQ ID NO. 17357, respectively, or a homolog or a fragment thereof, is increased or generated, or if the activity amino acid acetyltransferase is increased or generated in a non-human organism, like a microorganism or a plant cell, plant or part thereof, especially with plastidic localization, whereby the respective line discloses in column 7 alanine. For example, an increase of the alanine of at least 1 percent, particularly in a range of 22 to 31-percent is conferred as compared to a corresponding non-transformed wild type non-human organism.

[22245] Accordingly, in one embodiment, an increase of citrulline in a non-human organism, as compared to a corresponding non-transformed wild type non-human organism, is conferred in the process of the invention, if the activity of a polypeptide showing the activity of a amino acid acetyltransferase, or if the activity of the polypeptide AAC43185, preferably represented by SEQ ID NO. 17357, or a homolog or fragment thereof, or if the activity of a polypeptide encoded by a nucleic acid molecule comprising the nucleic acid SEQ ID NO. 17356, preferably the coding region thereof, or a homolog or fragment thereof, e.g. derived from Arabidopsis thaliana, is increased or generated. For example the activity of a nucleic acid molecule or a polypeptide comprising the nucleic acid, preferably the coding region thereof, or polypeptide or the consensus sequence or the polypeptide motif, as depicted in Table I, II or IV, application No. 3, column 5 or 8 in the respective same line as the nucleic acid molecule SEQ ID NO. 17356 or polypeptide SEQ ID NO. 17357, respectively, or a homolog or a fragment thereof, is increased or generated, or if the activity amino acid acetyltransferase is increased or generated in a non-human organism, like a microorganism or a plant cell, plant or part thereof, especially with plastidic localization, whereby the respective line discloses in column 7 citrulline. For example, an increase of the citrulline of at least 1 percent, particularly in a range of 76 to 618-percent is conferred as compared to a corresponding non-transformed wild type non-human organism.

[22246] Accordingly, in one embodiment, an increase of phenylalanine in a non-human organism, as compared to a corresponding non-transformed wild type non-human organism, is conferred in the process of the invention, if the activity of a polypeptide showing the activity of a amino acid acetyltransferase, or if the activity of the polypeptide AAC43185, preferably represented by SEQ ID NO. 17357, or a homolog or fragment thereof, or if the activity of a polypeptide encoded by a nucleic acid molecule comprising the nucleic acid SEQ ID NO. 17356, preferably the coding region thereof, or a homolog or fragment thereof, e.g. derived from Arabidopsis thaliana, is increased or generated. For example the activity of a nucleic acid molecule or a polypeptide comprising the nucleic acid, preferably the coding region thereof, or polypeptide or the consensus sequence or the polypeptide motif, as depicted in Table I, II or IV, application No. 3, column 5 or 8 in the respective same line as the nucleic acid molecule SEQ ID NO. 17356 or polypeptide SEQ ID NO. 17357, respectively, or a homolog or a fragment thereof, is increased or generated, or if the activity amino acid acetyltransferase is increased or generated in a non-human organism, like a microorganism or a plant cell, plant or part thereof, especially with plastidic localization, whereby the respective line discloses in column 7 phenylalanine. For example, an increase of the phenylalanine of at least 1 percent, particularly in a range of 26 to 55-percent is conferred as compared to a corresponding non-transformed wild type non-human organism.

[22247] Accordingly, in one embodiment, an increase of citrulline in a non-human organism, as compared to a corresponding non-transformed wild type non-human organism, is conferred in the process of the invention, if the activity of a polypeptide showing the activity of a protein phosphatase, or if the activity of the polypeptide At1g07430, preferably represented by SEQ ID NO. 17452, or a homolog or fragment thereof, or if the activity of a polypeptide encoded by a nucleic acid molecule comprising the nucleic acid SEQ ID NO. 17451, preferably the coding region thereof, or a homolog or fragment thereof, e.g. derived from Arabidopsis thaliana, is increased or generated. For example the activity of a nucleic acid molecule or a polypeptide comprising the nucleic acid, preferably the coding region thereof, or polypeptide or the consensus sequence or the polypeptide motif, as depicted in Table I, II or IV, application No. 3, column 5 or 8 in the respective same line as the nucleic acid molecule SEQ ID NO. 17451 or polypeptide SEQ ID NO. 17452, respectively, or a homolog or a fragment thereof, is increased or generated, or if the activity protein phosphatase is increased or generated in a non-human organism, like a microorganism or a plant cell, plant or part thereof, especially with non-targeted localization, whereby the respective line discloses in column 7 citrulline. For example, an increase of the citrulline of at least 1 percent, particularly in a range of 34 to 55-percent is conferred as compared to a corresponding non-transformed wild type non-human organism.

[22248] Accordingly, in one embodiment, an increase of glycine in a non-human organism, as compared to a corresponding non-transformed wild type non-human organism, is conferred in the process of the invention, if the activity of a polypeptide showing the activity of a DNA-binding protein, or if the activity of the polypeptide At1g14490, preferably represented by SEQ ID NO. 386, or a homolog or fragment thereof, or if the activity of a polypeptide encoded by a nucleic acid molecule comprising the nucleic acid SEQ ID NO. 385, preferably the coding region thereof, or a homolog or fragment thereof, e.g. derived from Arabidopsis thaliana, is increased or generated. For example the activity of a nucleic acid molecule or a polypeptide comprising the nucleic acid, preferably the coding region thereof, or polypeptide or the consensus sequence or the polypeptide motif, as depicted in Table I, II or IV, application No. 3, column 5 or 8 in the respective same line as the nucleic acid molecule SEQ ID NO. 385 or polypeptide SEQ ID NO. 386, respectively, or a homolog or a fragment thereof, is increased or generated, or if the activity DNA-binding protein is increased or generated in a non-human organism, like a microorganism or a plant cell, plant or part thereof, especially with non-targeted localization, whereby the respective line discloses in column 7 glycine. For example, an increase of the glycine of at least 1 percent, particularly in a range of 97 to 147-percent is conferred as compared to a corresponding non-transformed wild type non-human organism.

[22249] Accordingly, in one embodiment, an increase of serine in a non-human organism, as compared to a corresponding non-transformed wild type non-human organism, is conferred in the process of the invention, if the activity of a polypeptide showing the activity of a DNA-binding protein, or if the activity of the polypeptide At1g14490, preferably represented by SEQ ID NO. 386, or a homolog or fragment thereof, or if the activity of a polypeptide encoded by a nucleic acid molecule comprising the nucleic acid SEQ ID NO. 385, preferably the coding region thereof, or a homolog or fragment thereof, e.g. derived from Arabidopsis thaliana, is increased or generated. For example the activity of a nucleic acid molecule or a polypeptide comprising the nucleic acid, preferably the coding region thereof, or polypeptide or the consensus sequence or the polypeptide motif, as depicted in Table I, II or IV, application No. 3, column 5 or 8 in the respective same line as the nucleic acid molecule SEQ ID NO. 385 or polypeptide SEQ ID NO. 386, respectively, or a homolog or a fragment thereof, is increased or generated, or if the activity DNA-binding protein is increased or generated in a non-human organism, like a microorganism or a plant cell, plant or part thereof, especially with non-targeted localization, whereby the respective line discloses in column 7 serine. For example, an increase of the serine of at least 1 percent, particularly in a range of 27 to 51-percent is conferred as compared to a corresponding non-transformed wild type non-human organism.

[22250] Accordingly, in one embodiment, an increase of phenylalanine in a non-human organism, as compared to a corresponding non-transformed wild type non-human organism, is conferred in the process of the invention, if the activity of a polypeptide showing the activity of a At1g17440protein, or if the activity of the polypeptide At1g17440, preferably represented by SEQ ID NO. 17602, or a homolog or fragment thereof, or if the activity of a polypeptide encoded by a nucleic acid molecule comprising the nucleic acid SEQ ID NO. 17601, preferably the coding region thereof, or a homolog or fragment thereof, e.g. derived from Arabidopsis thaliana, is increased or generated. For example the activity of a nucleic acid molecule or a polypeptide comprising the nucleic acid, preferably the coding region thereof, or polypeptide or the consensus sequence or the polypeptide motif, as depicted in Table I, II or IV, application No. 3, column 5 or 8 in the respective same line as the nucleic acid molecule SEQ ID NO. 17601 or polypeptide SEQ ID NO. 17602, respectively, or a homolog or a fragment thereof, is increased or generated, or if the activity At1g17440-protein is increased or generated in a non-human organism, like a microorganism or a plant cell, plant or part thereof, especially with non-targeted localization, whereby the respective line discloses in column 7 phenylalanine. For example, an increase of the phenylalanine of at least 1 percent, particularly in a range of 33 to 54-percent is conferred as compared to a corresponding non-transformed wild type non-human organism.

[22251] Accordingly, in one embodiment, an increase of tyrosine in a non-human organism, as compared to a corresponding non-transformed wild type non-human organism, is conferred in the process of the invention, if the activity of a polypeptide showing the activity of a At1g17440protein, or if the activity of the polypeptide At1g17440, preferably represented by SEQ ID NO. 17602, or a homolog or fragment thereof, or if the activity of a polypeptide encoded by a nucleic acid molecule comprising the nucleic acid SEQ ID NO. 17601, preferably the coding region thereof, or a homolog or fragment thereof, e.g. derived from Arabidopsis thaliana, is increased or generated. For example the activity of a nucleic acid molecule or a polypeptide comprising the nucleic acid, preferably the coding region thereof, or polypeptide or the consensus sequence or the polypeptide motif, as depicted in Table I, II or IV, application No. 3, column 5 or 8 in the respective same line as the nucleic acid molecule SEQ ID NO. 17601 or polypeptide SEQ ID NO. 17602, respectively, or a homolog or a fragment thereof, is increased or generated, or if the activity At1g17440-protein is increased or generated in a non-human organism, like a microorganism or a plant cell, plant or part thereof, especially with non-targeted localization, whereby the respective line discloses in column 7 tyrosine. For example, an increase of the tyrosine of at least 1 percent, particularly in a range of 48 to 106-percent is conferred as compared to a corresponding non-transformed wild type non-human organism.

[22252] Accordingly, in one embodiment, an increase of aspartate in a non-human organism, as compared to a corresponding non-transformed wild type non-human organism, is conferred in the process of the invention, if the activity of a polypeptide showing the activity of a At1g19800protein, or if the activity of the polypeptide At1g19800, preferably represented by SEQ ID NO. 17638, or a homolog or fragment thereof, or if the activity of a polypeptide encoded by a nucleic acid molecule comprising the nucleic acid SEQ ID NO. 17637, preferably the coding region thereof, or a homolog or fragment thereof, e.g. derived from Arabidopsis thaliana, is increased or generated. For example the activity of a nucleic acid molecule or a polypeptide comprising the nucleic acid, preferably the coding region thereof, or polypeptide or the consensus sequence or the polypeptide motif, as depicted in Table I, II or IV, application No. 3, column 5 or 8 in the respective same line as the nucleic acid molecule SEQ ID NO. 17637 or polypeptide SEQ ID NO. 17638, respectively, or a homolog or a fragment thereof, is increased or generated, or if the activity At1g19800-protein is increased or generated in a non-human organism, like a microorganism or a plant cell, plant or part thereof, especially with non-targeted localization, whereby the respective line discloses in column 7 aspartate. For example, an increase of the aspartate of at least 1 percent, particularly in a range of 49 to 86-percent is conferred as compared to a corresponding non-transformed wild type non-human organism.

[22253] Accordingly, in one embodiment, an increase of citrulline in a non-human organism, as compared to a corresponding non-transformed wild type non-human organism, is conferred in the process of the invention, if the activity of a polypeptide showing the activity of a At1g19800protein, or if the activity of the polypeptide At1g19800, preferably represented by SEQ ID NO. 17638, or a homolog or fragment thereof, or if the activity of a polypeptide encoded by a nucleic acid molecule comprising the nucleic acid SEQ ID NO. 17637, preferably the coding region thereof, or a homolog or fragment thereof, e.g. derived from Arabidopsis thaliana, is increased or generated. For example the activity of a nucleic acid molecule or a polypeptide comprising the nucleic acid, preferably the coding region thereof, or polypeptide or the consensus sequence or the polypeptide motif, as depicted in Table I, II or IV, application No. 3, column 5 or 8 in the respective same line as the nucleic acid molecule SEQ ID NO. 17637 or polypeptide SEQ ID NO. 17638, respectively, or a homolog or a fragment thereof, is increased or generated, or if the activity At1g19800-protein is increased or generated in a non-human organism, like a microorganism or a plant cell, plant or part thereof, especially with non-targeted localization, whereby the respective line discloses in column 7 citrulline. For example, an increase of the citrulline of at least 1 percent, particularly in a range of 35 to 66-percent is conferred as compared to a corresponding non-transformed wild type non-human organism.

[22254] Accordingly, in one embodiment, an increase of tyrosine in a non-human organism, as compared to a corresponding non-transformed wild type non-human organism, is conferred in the process of the invention, if the activity of a polypeptide showing the activity of a At1g19800 protein, or if the activity of the polypeptide At1g19800, preferably represented by SEQ ID NO. 17638, or a homolog or fragment thereof, or if the activity of a polypeptide encoded by a nucleic acid molecule comprising the nucleic acid SEQ ID NO. 17637, preferably the coding region thereof, or a homolog or fragment thereof, e.g. derived from Arabidopsis thaliana, is increased or generated. For example the activity of a nucleic acid molecule or a polypeptide comprising the nucleic acid, preferably the coding region thereof, or polypeptide or the consensus sequence or the polypeptide motif, as depicted in Table I, II or IV, application No. 3, column 5 or 8 in the respective same line as the nucleic acid molecule SEQ ID NO. 17637 or polypeptide SEQ ID NO. 17638, respectively, or a homolog or a fragment thereof, is increased or generated, or if the activity At1g19800-protein is increased or generated in a non-human organism, like a microorganism or a plant cell, plant or part thereof, especially with non-targeted localization, whereby the respective line discloses in column 7 tyrosine. For example, an increase of the tyrosine of at least 1 percent, particularly in a range of 41 to 398-percent is conferred as compared to a corresponding non-transformed wild type non-human organism.

[22255] Accordingly, in one embodiment, an increase of phenylalanine in a non-human organism, as compared to a corresponding non-transformed wild type non-human organism, is conferred in the process of the invention, if the activity of a polypeptide showing the activity of a cullin, or if the activity of the polypeptide At1g26830, preferably represented by SEQ ID NO. 17702, or a homolog or fragment thereof, or if the activity of a polypeptide encoded by a nucleic acid molecule comprising the nucleic acid SEQ ID NO. 17701, preferably the coding region thereof, or a homolog or fragment thereof, e.g. derived from Arabidopsis thaliana, is increased or generated. For example the activity of a nucleic acid molecule or a polypeptide comprising the nucleic acid, preferably the coding region thereof, or polypeptide or the consensus sequence or the polypeptide motif, as depicted in Table I, II or IV, application No. 3, column 5 or 8 in the respective same line as the nucleic acid molecule SEQ ID NO. 17701 or polypeptide SEQ ID NO. 17702, respectively, or a homolog or a fragment thereof, is increased or generated, or if the activity cullin is increased or generated in a non-human organism, like a microorganism or a plant cell, plant or part thereof, especially with non-targeted localization, whereby the respective line discloses in column 7 phenylalanine. For example, an increase of the phenylalanine of at least 1 percent, particularly in a range of 35 to 134-percent is conferred as compared to a corresponding non-transformed wild type non-human organism.

[22256] Accordingly, in one embodiment, an increase of tyrosine in a non-human organism, as compared to a corresponding non-transformed wild type non-human organism, is conferred in the process of the invention, if the activity of a polypeptide showing the activity of a cullin, or if the activity of the polypeptide At1g26830, preferably represented by SEQ ID NO. 17702, or a homolog or fragment thereof, or if the activity of a polypeptide encoded by a nucleic acid molecule comprising the nucleic acid SEQ ID NO. 17701, preferably the coding region thereof, or a homolog or fragment thereof, e.g. derived from Arabidopsis thaliana, is increased or generated. For example the activity of a nucleic acid molecule or a polypeptide comprising the nucleic acid, preferably the coding region thereof, or polypeptide or the consensus sequence or the polypeptide motif, as depicted in Table I, II or IV, application No. 3, column 5 or 8 in the respective same line as the nucleic acid molecule SEQ ID NO. 17701 or polypeptide SEQ ID NO. 17702, respectively, or a homolog or a fragment thereof, is increased or generated, or if the activity cullin is increased or generated in a non-human organism, like a microorganism or a plant cell, plant or part thereof, especially with non-targeted localization, whereby the respective line discloses in column 7 tyrosine. For example, an increase of the tyrosine of at least 1 percent, particularly in a range of 39 to 89-percent is conferred as compared to a corresponding non-transformed wild type non-human organism.

[22257] Accordingly, in one embodiment, an increase of homoserine in a non-human organism, as compared to a corresponding non-transformed wild type non-human organism, is conferred in the process of the invention, if the activity of a polypeptide showing the activity of a bifunctional aspartokinase/homoserine dehydrogenase, or if the activity of the polypeptide At1 g31230, preferably represented by SEQ ID NO. 628, or a homolog or fragment thereof, or if the activity of a polypeptide encoded by a nucleic acid molecule comprising the nucleic acid SEQ ID NO. 627, preferably the coding region thereof, or a homolog or fragment thereof, e.g. derived from Arabidopsis thaliana, is increased or generated. For example the activity of a nucleic acid molecule or a polypeptide comprising the nucleic acid, preferably the coding region thereof, or polypeptide or the consensus sequence or the polypeptide motif, as depicted in Table I, II or IV, application No. 3, column 5 or 8 in the respective same line as the nucleic acid molecule SEQ ID NO. 627 or polypeptide SEQ ID NO. 628, respectively, or a homolog or a fragment thereof, is increased or generated, or if the activity bifunctional aspartokinase/homoserine dehydrogenase is increased or generated in a non-human organism, like a microorganism or a plant cell, plant or part thereof, especially with non-targeted localization, whereby the respective line discloses in column 7 homoserine. For example, an increase of the homoserine of at least 1 percent, particularly in a range of 84 to 1108-percent is conferred as compared to a corresponding non-transformed wild type non-human organism.

[22258] Accordingly, in one embodiment, an increase of aspartate in a non-human organism, as compared to a corresponding non-transformed wild type non-human organism, is conferred in the process of the invention, if the activity of a polypeptide showing the activity of a eukaryotic translation initiation factor 5, or if the activity of the polypeptide At1 g36730, preferably represented by SEQ ID NO. 17969, or a homolog or fragment thereof, or if the activity of a polypeptide encoded by a nucleic acid molecule comprising the nucleic acid SEQ ID NO. 17968, preferably the coding region thereof, or a homolog or fragment thereof, e.g. derived from Arabidopsis thaliana, is increased or generated. For example the activity of a nucleic acid molecule or a polypeptide comprising the nucleic acid, preferably the coding region thereof, or polypeptide or the consensus sequence or the polypeptide motif, as depicted in Table I, II or IV, application No. 3, column 5 or 8 in the respective same line as the nucleic acid molecule SEQ ID NO. 17968 or polypeptide SEQ ID NO. 17969, respectively, or a homolog or a fragment thereof, is increased or generated, or if the activity eukaryotic translation initiation factor 5 is increased or generated in a non-human organism, like a microorganism or a plant cell, plant or part thereof, especially with non-targeted localization, whereby the respective line discloses in column 7 aspartate. For example, an increase of the aspartate of at least 1 percent, particularly in a range of 51 to 87-percent is conferred as compared to a corresponding non-transformed wild type non-human organism.

[22259] Accordingly, in one embodiment, an increase of phenylalanine in a non-human organism, as compared to a corresponding non-transformed wild type non-human organism, is conferred in the process of the invention, if the activity of a polypeptide showing the activity of a eukaryotic translation initiation factor 5, or if the activity of the polypeptide At1g36730, preferably represented by SEQ ID NO. 17969, or a homolog or fragment thereof, or if the activity of a polypeptide encoded by a nucleic acid molecule comprising the nucleic acid SEQ ID NO. 17968, preferably the coding region thereof, or a homolog or fragment thereof, e.g. derived from Arabidopsis thaliana, is increased or generated. For example the activity of a nucleic acid molecule or a polypeptide comprising the nucleic acid, preferably the coding region thereof, or polypeptide or the consensus sequence or the polypeptide motif, as depicted in Table I, II or IV, application No. 3, column 5 or 8 in the respective same line as the nucleic acid molecule SEQ ID NO. 17968 or polypeptide SEQ ID NO. 17969, respectively, or a homolog or a fragment thereof, is increased or generated, or if the activity eukaryotic translation initiation factor 5 is increased or generated in a non-human organism, like a microorganism or a plant cell, plant or part thereof, especially with non-targeted localization, whereby the respective line discloses in column 7 phenylalanine. For example, an increase of the phenylalanine of at least 1 percent, particularly in a range of 32 to 97-percent is conferred as compared to a corresponding non-transformed wild type non-human organism.

[22260] Accordingly, in one embodiment, an increase of serine in a non-human organism, as compared to a corresponding non-transformed wild type non-human organism, is conferred in the process of the invention, if the activity of a polypeptide showing the activity of a eukaryotic translation initiation factor 5, or if the activity of the polypeptide At1 g36730, preferably represented by SEQ ID NO. 17969, or a homolog or fragment thereof, or if the activity of a polypeptide encoded by a nucleic acid molecule comprising the nucleic acid SEQ ID NO. 17968, preferably the coding region thereof, or a homolog or fragment thereof, e.g. derived from Arabidopsis thaliana, is increased or generated. For example the activity of a nucleic acid molecule or a polypeptide comprising the nucleic acid, preferably the coding region thereof, or polypeptide or the consensus sequence or the polypeptide motif, as depicted in Table I, II or IV, application No. 3, column 5 or 8 in the respective same line as the nucleic acid molecule SEQ ID NO. 17968 or polypeptide SEQ ID NO. 17969, respectively, or a homolog or a fragment thereof, is increased or generated, or if the activity eukaryotic translation initiation factor 5 is increased or generated in a non-human organism, like a microorganism or a plant cell, plant or part thereof, especially with non-targeted localization, whereby the respective line discloses in column 7 serine. For example, an increase of the serine of at least 1 percent, particularly in a range of 25 to 72-percent is conferred as compared to a corresponding non-transformed wild type non-human organism.

[22261] Accordingly, in one embodiment, an increase of tyrosine in a non-human organism, as compared to a corresponding non-transformed wild type non-human organism, is conferred in the process of the invention, if the activity of a polypeptide showing the activity of a eukaryotic translation initiation factor 5, or if the activity of the polypeptide At1 g36730, preferably represented by SEQ ID NO. 17969, or a homolog or fragment thereof, or if the activity of a polypeptide encoded by a nucleic acid molecule comprising the nucleic acid SEQ ID NO. 17968, preferably the coding region thereof, or a homolog or fragment thereof, e.g. derived from Arabidopsis thaliana, is increased or generated. For example the activity of a nucleic acid molecule or a polypeptide comprising the nucleic acid, preferably the coding region thereof, or polypeptide or the consensus sequence or the polypeptide motif, as depicted in Table I, II or IV, application No. 3, column 5 or 8 in the respective same line as the nucleic acid molecule SEQ ID NO. 17968 or polypeptide SEQ ID NO. 17969, respectively, or a homolog or a fragment thereof, is increased or generated, or if the activity eukaryotic translation initiation factor 5 is increased or generated in a non-human organism, like a microorganism or a plant cell, plant or part thereof, especially with non-targeted localization, whereby the respective line discloses in column 7 tyrosine. For example, an increase of the tyrosine of at least 1 percent, particularly in a range of 36 to 86-percent is conferred as compared to a corresponding non-transformed wild type non-human organism.

[22262] Accordingly, in one embodiment, an increase of 5-oxoproline in a non-human organism, as compared to a corresponding non-transformed wild type non-human organism, is conferred in the process of the invention, if the activity of a polypeptide showing the activity of a eukaryotic translation initiation factor 5, or if the activity of the polypeptide At1 g36730, preferably represented by SEQ ID NO. 17969, or a homolog or fragment thereof, or if the activity of a polypeptide encoded by a nucleic acid molecule comprising the nucleic acid SEQ ID NO. 17968, preferably the coding region thereof, or a homolog or fragment thereof, e.g. derived from Arabidopsis thaliana, is increased or generated. For example the activity of a nucleic acid molecule or a polypeptide comprising the nucleic acid, preferably the coding region thereof, or polypeptide or the consensus sequence or the polypeptide motif, as depicted in Table I, II or IV, application No. 3, column 5 or 8 in the respective same line as the nucleic acid molecule SEQ ID NO. 17968 or polypeptide SEQ ID NO. 17969, respectively, or a homolog or a fragment thereof, is increased or generated, or if the activity eukaryotic translation initiation factor 5 is increased or generated in a non-human organism, like a microorganism or a plant cell, plant or part thereof, especially with non-targeted localization, whereby the respective line discloses in column 7 5-oxoproline. For example, an increase of the 5-oxoproline of at least 1 percent, particularly in a range of 39 to 74-percent is conferred as compared to a corresponding non-transformed wild type non-human organism.

[22263] Accordingly, in one embodiment, an increase of phenylalanine in a non-human organism, as compared to a corresponding non-transformed wild type non-human organism, is conferred in the process of the invention, if the activity of a polypeptide showing the activity of a transcriptional regulator, or if the activity of the polypeptide At1g43850, preferably represented by SEQ ID NO. 18071, or a homolog or fragment thereof, or if the activity of a polypeptide encoded by a nucleic acid molecule comprising the nucleic acid SEQ ID NO. 18070, preferably the coding region thereof, or a homolog or fragment thereof, e.g. derived from Arabidopsis thaliana, is increased or generated. For example the activity of a nucleic acid molecule or a polypeptide comprising the nucleic acid, preferably the coding region thereof, or polypeptide or the consensus sequence or the polypeptide motif, as depicted in Table I, II or IV, application No. 3, column 5 or 8 in the respective same line as the nucleic acid molecule SEQ ID NO. 18070 or polypeptide SEQ ID NO. 18071, respectively, or a homolog or a fragment thereof, is increased or generated, or if the activity transcriptional regulator is increased or generated in a non-human organism, like a microorganism or a plant cell, plant or part thereof, especially with non-targeted localization, whereby the respective line discloses in column 7 phenylalanine. For example, an increase of the phenylalanine of at least 1 percent, particularly in a range of 77 to 358-percent is conferred as compared to a corresponding non-transformed wild type non-human organism.

[22264] Accordingly, in one embodiment, an increase of serine in a non-human organism, as compared to a corresponding non-transformed wild type non-human organism, is conferred in the process of the invention, if the activity of a polypeptide showing the activity of a transcriptional regulator, or if the activity of the polypeptide At1g43850, preferably represented by SEQ ID NO. 18071, or a homolog or fragment thereof, or if the activity of a polypeptide encoded by a nucleic acid molecule comprising the nucleic acid SEQ ID NO. 18070, preferably the coding region thereof, or a homolog or fragment thereof, e.g. derived from Arabidopsis thaliana, is increased or generated. For example the activity of a nucleic acid molecule or a polypeptide comprising the nucleic acid, preferably the coding region thereof, or polypeptide or the consensus sequence or the polypeptide motif, as depicted in Table I, II or IV, application No. 3, column 5 or 8 in the respective same line as the nucleic acid molecule SEQ ID NO. 18070 or polypeptide SEQ ID NO. 18071, respectively, or a homolog or a fragment thereof, is increased or generated, or if the activity transcriptional regulator is increased or generated in a non-human organism, like a microorganism or a plant cell, plant or part thereof, especially with non-targeted localization, whereby the respective line discloses in column 7 serine. For example, an increase of the serine of at least 1 percent, particularly in a range of 70 to 205-percent is conferred as compared to a corresponding non-transformed wild type non-human organism.

[22265] Accordingly, in one embodiment, an increase of tyrosine in a non-human organism, as compared to a corresponding non-transformed wild type non-human organism, is conferred in the process of the invention, if the activity of a polypeptide showing the activity of a transcriptional regulator, or if the activity of the polypeptide At1 g43850, preferably represented by SEQ ID NO. 18071, or a homolog or fragment thereof, or if the activity of a polypeptide encoded by a nucleic acid molecule comprising the nucleic acid SEQ ID NO. 18070, preferably the coding region thereof, or a homolog or fragment thereof, e.g. derived from Arabidopsis thaliana, is increased or generated. For example the activity of a nucleic acid molecule or a polypeptide comprising the nucleic acid, preferably the coding region thereof, or polypeptide or the consensus sequence or the polypeptide motif, as depicted in Table I, II or IV, application No. 3, column 5 or 8 in the respective same line as the nucleic acid molecule SEQ ID NO. 18070 or polypeptide SEQ ID NO. 18071, respectively, or a homolog or a fragment thereof, is increased or generated, or if the activity transcriptional regulator is increased or generated in a non-human organism, like a microorganism or a plant cell, plant or part thereof, especially with non-targeted localization, whereby the respective line discloses in column 7 tyrosine. For example, an increase of the tyrosine of at least 1 percent, particularly in a range of 76 to 313-percent is conferred as compared to a corresponding non-transformed wild type non-human organism.

[22266] Accordingly, in one embodiment, an increase of 5-oxoproline in a non-human organism, as compared to a corresponding non-transformed wild type non-human organism, is conferred in the process of the invention, if the activity of a polypeptide showing the activity of a transcriptional regulator, or if the activity of the polypeptide At1 g43850, preferably represented by SEQ ID NO. 18071, or a homolog or fragment thereof, or if the activity of a polypeptide encoded by a nucleic acid molecule comprising the nucleic acid SEQ ID NO. 18070, preferably the coding region thereof, or a homolog or fragment thereof, e.g. derived from Arabidopsis thaliana, is increased or generated. For example the activity of a nucleic acid molecule or a polypeptide comprising the nucleic acid, preferably the coding region thereof, or polypeptide or the consensus sequence or the polypeptide motif, as depicted in Table I, II or IV, application No. 3, column 5 or 8 in the respective same line as the nucleic acid molecule SEQ ID NO. 18070 or polypeptide SEQ ID NO. 18071, respectively, or a homolog or a fragment thereof, is increased or generated, or if the activity transcriptional regulator is increased or generated in a non-human organism, like a microorganism or a plant cell, plant or part thereof, especially with non-targeted localization, whereby the respective line discloses in column 7 5-oxoproline. For example, an increase of the 5-oxoproline of at least 1 percent, particularly in a range of 41 to 210-percent is conferred as compared to a corresponding non-transformed wild type non-human organism.

[22267] Accordingly, in one embodiment, an increase of glycine in a non-human organism, as compared to a corresponding non-transformed wild type non-human organism, is conferred in the process of the invention, if the activity of a polypeptide showing the activity of a protein phosphatase, or if the activity of the polypeptide At1g48040, preferably represented by SEQ ID NO. 813, or a homolog or fragment thereof, or if the activity of a polypeptide encoded by a nucleic acid molecule comprising the nucleic acid SEQ ID NO. 812, preferably the coding region thereof, or a homolog or fragment thereof, e.g. derived from Arabidopsis thaliana, is increased or generated. For example the activity of a nucleic acid molecule or a polypeptide comprising the nucleic acid, preferably the coding region thereof, or polypeptide or the consensus sequence or the polypeptide motif, as depicted in Table I, II or IV, application No. 3, column 5 or 8 in the respective same line as the nucleic acid molecule SEQ ID NO. 812 or polypeptide SEQ ID NO. 813, respectively, or a homolog or a fragment thereof, is increased or generated, or if the activity protein phosphatase is increased or generated in a non-human organism, like a microorganism or a plant cell, plant or part thereof, especially with non-targeted localization, whereby the respective line discloses in column 7 glycine. For example, an increase of the glycine of at least 1 percent, particularly in a range of 36 to 52-percent is conferred as compared to a corresponding non-transformed wild type non-human organism.

[22268] Accordingly, in one embodiment, an increase of phenylalanine in a non-human organism, as compared to a corresponding non-transformed wild type non-human organism, is conferred in the process of the invention, if the activity of a polypeptide showing the activity of a protein kinase, or if the activity of the polypeptide At1g48260, preferably represented by SEQ ID NO. 18236, or a homolog or fragment thereof, or if the activity of a polypeptide encoded by a nucleic acid molecule comprising the nucleic acid SEQ ID NO. 18235, preferably the coding region thereof, or a homolog or fragment thereof, e.g. derived from Arabidopsis thaliana, is increased or generated. For example the activity of a nucleic acid molecule or a polypeptide comprising the nucleic acid, preferably the coding region thereof, or polypeptide or the consensus sequence or the polypeptide motif, as depicted in Table I, II or IV, application No. 3, column 5 or 8 in the respective same line as the nucleic acid molecule SEQ ID NO. 18235 or polypeptide SEQ ID NO. 18236, respectively, or a homolog or a fragment thereof, is increased or generated, or if the activity protein kinase is increased or generated in a non-human organism, like a microorganism or a plant cell, plant or part thereof, especially with non-targeted localization, whereby the respective line discloses in column 7 phenylalanine. For example, an increase of the phenylalanine of at least 1 percent, particularly in a range of 58 to 432-percent is conferred as compared to a corresponding non-transformed wild type non-human organism.

[22269] Accordingly, in one embodiment, an increase of serine in a non-human organism, as compared to a corresponding non-transformed wild type non-human organism, is conferred in the process of the invention, if the activity of a polypeptide showing the activity of a protein kinase, or if the activity of the polypeptide At1g48260, preferably represented by SEQ ID NO. 18236, or a homolog or fragment thereof, or if the activity of a polypeptide encoded by a nucleic acid molecule comprising the nucleic acid SEQ ID NO. 18235, preferably the coding region thereof, or a homolog or fragment thereof, e.g. derived from Arabidopsis thaliana, is increased or generated. For example the activity of a nucleic acid molecule or a polypeptide comprising the nucleic acid, preferably the coding region thereof, or polypeptide or the consensus sequence or the polypeptide motif, as depicted in Table I, II or IV, application No. 3, column 5 or 8 in the respective same line as the nucleic acid molecule SEQ ID NO. 18235 or polypeptide SEQ ID NO. 18236, respectively, or a homolog or a fragment thereof, is increased or generated, or if the activity protein kinase is increased or generated in a non-human organism, like a microorganism or a plant cell, plant or part thereof, especially with non-targeted localization, whereby the respective line discloses in column 7 serine. For example, an increase of the serine of at least 1 percent, particularly in a range of 29 to 154-percent is conferred as compared to a corresponding non-transformed wild type non-human organism.

[22270] Accordingly, in one embodiment, an increase of tyrosine in a non-human organism, as compared to a corresponding non-transformed wild type non-human organism, is conferred in the process of the invention, if the activity of a polypeptide showing the activity of a protein kinase, or if the activity of the polypeptide At1g48260, preferably represented by SEQ ID NO. 18236, or a homolog or fragment thereof, or if the activity of a polypeptide encoded by a nucleic acid molecule comprising the nucleic acid SEQ ID NO. 18235, preferably the coding region thereof, or a homolog or fragment thereof, e.g. derived from Arabidopsis thaliana, is increased or generated. For example the activity of a nucleic acid molecule or a polypeptide comprising the nucleic acid, preferably the coding region thereof, or polypeptide or the consensus sequence or the polypeptide motif, as depicted in Table I, II or IV, application No. 3, column 5 or 8 in the respective same line as the nucleic acid molecule SEQ ID NO. 18235 or polypeptide SEQ ID NO. 18236, respectively, or a homolog or a fragment thereof, is increased or generated, or if the activity protein kinase is increased or generated in a non-human organism, like a microorganism or a plant cell, plant or part thereof, especially with non-targeted localization, whereby the respective line discloses in column 7 tyrosine. For example, an increase of the tyrosine of at least 1 percent, particularly in a range of 48 to 182-percent is conferred as compared to a corresponding non-transformed wild type non-human organism.

[22271] Accordingly, in one embodiment, an increase of aspartate in a non-human organism, as compared to a corresponding non-transformed wild type non-human organism, is conferred in the process of the invention, if the activity of a polypeptide showing the activity of a calcium-dependent protein kinase, or if the activity of the polypeptide At1g61950, preferably represented by SEQ ID NO. 18870, or a homolog or fragment thereof, or if the activity of a polypeptide encoded by a nucleic acid molecule comprising the nucleic acid SEQ ID NO. 18869, preferably the coding region thereof, or a homolog or fragment thereof, e.g. derived from Arabidopsis thaliana, is increased or generated. For example the activity of a nucleic acid molecule or a polypeptide comprising the nucleic acid, preferably the coding region thereof, or polypeptide or the consensus sequence or the polypeptide motif, as depicted in Table I, II or IV, application No. 3, column 5 or 8 in the respective same line as the nucleic acid molecule SEQ ID NO. 18869 or polypeptide SEQ ID NO. 18870, respectively, or a homolog or a fragment thereof, is increased or generated, or if the activity calcium-dependent protein kinase is increased or generated in a non-human organism, like a microorganism or a plant cell, plant or part thereof, especially with non-targeted localization, whereby the respective line discloses in column 7 aspartate. For example, an increase of the aspartate of at least 1 percent, particularly in a range of 60 to 312-percent is conferred as compared to a corresponding non-transformed wild type non-human organism.

[22272] Accordingly, in one embodiment, an increase of phenylalanine in a non-human organism, as compared to a corresponding non-transformed wild type non-human organism, is conferred in the process of the invention, if the activity of a polypeptide showing the activity of a calcium-dependent protein kinase, or if the activity of the polypeptide At1g61950, preferably represented by SEQ ID NO. 18870, or a homolog or fragment thereof, or if the activity of a polypeptide encoded by a nucleic acid molecule comprising the nucleic acid SEQ ID NO. 18869, preferably the coding region thereof, or a homolog or fragment thereof, e.g. derived from Arabidopsis thaliana, is increased or generated. For example the activity of a nucleic acid molecule or a polypeptide comprising the nucleic acid, preferably the coding region thereof, or polypeptide or the consensus sequence or the polypeptide motif, as depicted in Table I, II or IV, application No. 3, column 5 or 8 in the respective same line as the nucleic acid molecule SEQ ID NO. 18869 or polypeptide SEQ ID NO. 18870, respectively, or a homolog or a fragment thereof, is increased or generated, or if the activity calcium-dependent protein kinase is increased or generated in a non-human organism, like a microorganism or a plant cell, plant or part thereof, especially with non-targeted localization, whereby the respective line discloses in column 7 phenylalanine. For example, an increase of the phenylalanine of at least 1 percent, particularly in a range of 65 to 149-percent is conferred as compared to a corresponding non-transformed wild type non-human organism.

[22273] Accordingly, in one embodiment, an increase of alanine in a non-human organism, as compared to a corresponding non-transformed wild type non-human organism, is conferred in the process of the invention, if the activity of a polypeptide showing the activity of a protein phosphatase, or if the activity of the polypeptide At1g72770, preferably represented by SEQ ID NO. 19420, or a homolog or fragment thereof, or if the activity of a polypeptide encoded by a nucleic acid molecule comprising the nucleic acid SEQ ID NO. 19419, preferably the coding region thereof, or a homolog or fragment thereof, e.g. derived from Arabidopsis thaliana, is increased or generated. For example the activity of a nucleic acid molecule or a polypeptide comprising the nucleic acid, preferably the coding region thereof, or polypeptide or the consensus sequence or the polypeptide motif, as depicted in Table I, II or IV, application No. 3, column 5 or 8 in the respective same line as the nucleic acid molecule SEQ ID NO. 19419 or polypeptide SEQ ID NO. 19420, respectively, or a homolog or a fragment thereof, is increased or generated, or if the activity protein phosphatase is increased or generated in a non-human organism, like a microorganism or a plant cell, plant or part thereof, especially with non-targeted localization, whereby the respective line discloses in column 7 alanine. For example, an increase of the alanine of at least 1 percent, particularly in a range of 26 to 121-percent is conferred as compared to a corresponding non-transformed wild type non-human organism.

[22274] Accordingly, in one embodiment, an increase of glycine in a non-human organism, as compared to a corresponding non-transformed wild type non-human organism, is conferred in the process of the invention, if the activity of a polypeptide showing the activity of a protein phosphatase, or if the activity of the polypeptide At1g72770, preferably represented by SEQ ID NO. 19420, or a homolog or fragment thereof, or if the activity of a polypeptide encoded by a nucleic acid molecule comprising the nucleic acid SEQ ID NO. 19419, preferably the coding region thereof, or a homolog or fragment thereof, e.g. derived from Arabidopsis thaliana, is increased or generated. For example the activity of a nucleic acid molecule or a polypeptide comprising the nucleic acid, preferably the coding region thereof, or polypeptide or the consensus sequence or the polypeptide motif, as depicted in Table I, II or IV, application No. 3, column 5 or 8 in the respective same line as the nucleic acid molecule SEQ ID NO. 19419 or polypeptide SEQ ID NO. 19420, respectively, or a homolog or a fragment thereof, is increased or generated, or if the activity protein phosphatase is increased or generated in a non-human organism, like a microorganism or a plant cell, plant or part thereof, especially with non-targeted localization, whereby the respective line discloses in column 7 glycine. For example, an increase of the glycine of at least 1 percent, particularly in a range of 48 to 108-percent is conferred as compared to a corresponding non-transformed wild type non-human organism.

[22275] Accordingly, in one embodiment, an increase of tyrosine in a non-human organism, as compared to a corresponding non-transformed wild type non-human organism, is conferred in the process of the invention, if the activity of a polypeptide showing the activity of a protein phosphatase, or if the activity of the polypeptide At1g72770, preferably represented by SEQ ID NO. 19420, or a homolog or fragment thereof, or if the activity of a polypeptide encoded by a nucleic acid molecule comprising the nucleic acid SEQ ID NO. 19419, preferably the coding region thereof, or a homolog or fragment thereof, e.g. derived from Arabidopsis thaliana, is increased or generated. For example the activity of a nucleic acid molecule or a polypeptide comprising the nucleic acid, preferably the coding region thereof, or polypeptide or the consensus sequence or the polypeptide motif, as depicted in Table I, II or IV, application No. 3, column 5 or 8 in the respective same line as the nucleic acid molecule SEQ ID NO. 19419 or polypeptide SEQ ID NO. 19420, respectively, or a homolog or a fragment thereof, is increased or generated, or if the activity protein phosphatase is increased or generated in a non-human organism, like a microorganism or a plant cell, plant or part thereof, especially with non-targeted localization, whereby the respective line discloses in column 7 tyrosine. For example, an increase of the tyrosine of at least 1 percent, particularly in a range of 35 to 150-percent is conferred as compared to a corresponding non-transformed wild type non-human organism.

[22276] Accordingly, in one embodiment, an increase of 5-oxoproline in a non-human organism, as compared to a corresponding non-transformed wild type non-human organism, is conferred in the process of the invention, if the activity of a polypeptide showing the activity of a protein phosphatase, or if the activity of the polypeptide At1g72770, preferably represented by SEQ ID NO. 19420, or a homolog or fragment thereof, or if the activity of a polypeptide encoded by a nucleic acid molecule comprising the nucleic acid SEQ ID NO. 19419, preferably the coding region thereof, or a homolog or fragment thereof, e.g. derived from Arabidopsis thaliana, is increased or generated. For example the activity of a nucleic acid molecule or a polypeptide comprising the nucleic acid, preferably the coding region thereof, or polypeptide or the consensus sequence or the polypeptide motif, as depicted in Table I, II or IV, application No. 3, column 5 or 8 in the respective same line as the nucleic acid molecule SEQ ID NO. 19419 or polypeptide SEQ ID NO. 19420, respectively, or a homolog or a fragment thereof, is increased or generated, or if the activity protein phosphatase is increased or generated in a non-human organism, like a microorganism or a plant cell, plant or part thereof, especially with non-targeted localization, whereby the respective line discloses in column 7 5-oxoproline. For example, an increase of the 5-oxoproline of at least 1 percent, particularly in a range of 45 to 171-percent is conferred as compared to a corresponding non-transformed wild type non-human organism.

[22277] Accordingly, in one embodiment, an increase of alanine in a non-human organism, as compared to a corresponding non-transformed wild type non-human organism, is conferred in the process of the invention, if the activity of a polypeptide showing the activity of a aminotransferase, or if the activity of the polypeptide At2g13360, preferably represented by SEQ ID NO. 68537, or a homolog or fragment thereof, or if the activity of a polypeptide encoded by a nucleic acid molecule comprising the nucleic acid SEQ ID NO. 68536, preferably the coding region thereof, or a homolog or fragment thereof, e.g. derived from Arabidopsis thaliana, is increased or generated. For example the activity of a nucleic acid molecule or a polypeptide comprising the nucleic acid, preferably the coding region thereof, or polypeptide or the consensus sequence or the polypeptide motif, as depicted in Table I, II or IV, application No. 3, column 5 or 8 in the respective same line as the nucleic acid molecule SEQ ID NO. 68536 or polypeptide SEQ ID NO. 68537, respectively, or a homolog or a fragment thereof, is increased or generated, or if the activity aminotransferase is increased or generated in a non-human organism, like a microorganism or a plant cell, plant or part thereof, especially with non-targeted localization, whereby the respective line discloses in column 7 alanine. For example, an increase of the alanine of at least 1 percent, particularly in a range of 23 to 44-percent is conferred as compared to a corresponding non-transformed wild type non-human organism.

[22278] Accordingly, in one embodiment, an increase of phenylalanine in a non-human organism, as compared to a corresponding non-transformed wild type non-human organism, is conferred in the process of the invention, if the activity of a polypeptide showing the activity of a transcription factor, or if the activity of the polypeptide At2g17560, preferably represented by SEQ ID NO. 19503, or a homolog or fragment thereof, or if the activity of a polypeptide encoded by a nucleic acid molecule comprising the nucleic acid SEQ ID NO. 19502, preferably the coding region thereof, or a homolog or fragment thereof, e.g. derived from Arabidopsis thaliana, is increased or generated. For example the activity of a nucleic acid molecule or a polypeptide comprising the nucleic acid, preferably the coding region thereof, or polypeptide or the consensus sequence or the polypeptide motif, as depicted in Table I, II or IV, application No. 3, column 5 or 8 in the respective same line as the nucleic acid molecule SEQ ID NO. 19502 or polypeptide SEQ ID NO. 19503, respectively, or a homolog or a fragment thereof, is increased or generated, or if the activity transcription factor is increased or generated in a non-human organism, like a microorganism or a plant cell, plant or part thereof, especially with non-targeted localization, whereby the respective line discloses in column 7 phenylalanine. For example, an increase of the phenylalanine of at least 1 percent, particularly in a range of 32 to 315-percent is conferred as compared to a corresponding non-transformed wild type non-human organism.

[22279] Accordingly, in one embodiment, an increase of tyrosine in a non-human organism, as compared to a corresponding non-transformed wild type non-human organism, is conferred in the process of the invention, if the activity of a polypeptide showing the activity of a transcription factor, or if the activity of the polypeptide At2g17560, preferably represented by SEQ ID NO. 19503, or a homolog or fragment thereof, or if the activity of a polypeptide encoded by a nucleic acid molecule comprising the nucleic acid SEQ ID NO. 19502, preferably the coding region thereof, or a homolog or fragment thereof, e.g. derived from Arabidopsis thaliana, is increased or generated. For example the activity of a nucleic acid molecule or a polypeptide comprising the nucleic acid, preferably the coding region thereof, or polypeptide or the consensus sequence or the polypeptide motif, as depicted in Table I, II or IV, application No. 3, column 5 or 8 in the respective same line as the nucleic acid molecule SEQ ID NO. 19502 or polypeptide SEQ ID NO. 19503, respectively, or a homolog or a fragment thereof, is increased or generated, or if the activity transcription factor is increased or generated in a non-human organism, like a microorganism or a plant cell, plant or part thereof, especially with non-targeted localization, whereby the respective line discloses in column 7 tyrosine. For example, an increase of the tyrosine of at least 1 percent, particularly in a range of 37 to 182-percent is conferred as compared to a corresponding non-transformed wild type non-human organism.

[22280] Accordingly, in one embodiment, an increase of aspartate in a non-human organism, as compared to a corresponding non-transformed wild type non-human organism, is conferred in the process of the invention, if the activity of a polypeptide showing the activity of a protein phosphatase, or if the activity of the polypeptide At2g25070, preferably represented by SEQ ID NO. 1299, or a homolog or fragment thereof, or if the activity of a polypeptide encoded by a nucleic acid molecule comprising the nucleic acid SEQ ID NO. 1298, preferably the coding region thereof, or a homolog or fragment thereof, e.g. derived from Arabidopsis thaliana, is increased or generated. For example the activity of a nucleic acid molecule or a polypeptide comprising the nucleic acid, preferably the coding region thereof, or polypeptide or the consensus sequence or the polypeptide motif, as depicted in Table I, II or IV, application No. 3, column 5 or 8 in the respective same line as the nucleic acid molecule SEQ ID NO. 1298 or polypeptide SEQ ID NO. 1299, respectively, or a homolog or a fragment thereof, is increased or generated, or if the activity protein phosphatase is increased or generated in a non-human organism, like a microorganism or a plant cell, plant or part thereof, especially with non-targeted localization, whereby the respective line discloses in column 7 aspartate. For example, an increase of the aspartate of at least 1 percent, particularly in a range of 74 to 147-percent is conferred as compared to a corresponding non-transformed wild type non-human organism.

[22281] Accordingly, in one embodiment, an increase of 5-oxoproline in a non-human organism, as compared to a corresponding non-transformed wild type non-human organism, is conferred in the process of the invention, if the activity of a polypeptide showing the activity of a protein phosphatase, or if the activity of the polypeptide At2g25070, preferably represented by SEQ ID NO. 1299, or a homolog or fragment thereof, or if the activity of a polypeptide encoded by a nucleic acid molecule comprising the nucleic acid SEQ ID NO. 1298, preferably the coding region thereof, or a homolog or fragment thereof, e.g. derived from Arabidopsis thaliana, is increased or generated. For example the activity of a nucleic acid molecule or a polypeptide comprising the nucleic acid, preferably the coding region thereof, or polypeptide or the consensus sequence or the polypeptide motif, as depicted in Table I, II or IV, application No. 3, column 5 or 8 in the respective same line as the nucleic acid molecule SEQ ID NO. 1298 or polypeptide SEQ ID NO. 1299, respectively, or a homolog or a fragment thereof, is increased or generated, or if the activity protein phosphatase is increased or generated in a non-human organism, like a microorganism or a plant cell, plant or part thereof, especially with non-targeted localization, whereby the respective line discloses in column 7 5-oxoproline. For example, an increase of the 5-oxoproline of at least 1 percent, particularly in a range of 38 to 78-percent is conferred as compared to a corresponding non-transformed wild type non-human organism.

[22282] Accordingly, in one embodiment, an increase of asparagine in a non-human organism, as compared to a corresponding non-transformed wild type non-human organism, is conferred in the process of the invention, if the activity of a polypeptide showing the activity of a protein phosphatase, or if the activity of the polypeptide At2g28890, preferably represented by SEQ ID NO. 19875, or a homolog or fragment thereof, or if the activity of a polypeptide encoded by a nucleic acid molecule comprising the nucleic acid SEQ ID NO. 19874, preferably the coding region thereof, or a homolog or fragment thereof, e.g. derived from Arabidopsis thaliana, is increased or generated. For example the activity of a nucleic acid molecule or a polypeptide comprising the nucleic acid, preferably the coding region thereof, or polypeptide or the consensus sequence or the polypeptide motif, as depicted in Table I, II or IV, application No. 3, column 5 or 8 in the respective same line as the nucleic acid molecule SEQ ID NO. 19874 or polypeptide SEQ ID NO. 19875, respectively, or a homolog or a fragment thereof, is increased or generated, or if the activity protein phosphatase is increased or generated in a non-human organism, like a microorganism or a plant cell, plant or part thereof, especially with non-targeted localization, whereby the respective line discloses in column 7 asparagine. For example, an increase of the asparagine of at least 1 percent, particularly in a range of 57 to 929-percent is conferred as compared to a corresponding non-transformed wild type non-human organism.

[22283] Accordingly, in one embodiment, an increase of phenylalanine in a non-human organism, as compared to a corresponding non-transformed wild type non-human organism, is conferred in the process of the invention, if the activity of a polypeptide showing the activity of a protein phosphatase, or if the activity of the polypeptide At2g28890, preferably represented by SEQ ID NO. 19875, or a homolog or fragment thereof, or if the activity of a polypeptide encoded by a nucleic acid molecule comprising the nucleic acid SEQ ID NO. 19874, preferably the coding region thereof, or a homolog or fragment thereof, e.g. derived from Arabidopsis thaliana, is increased or generated. For example the activity of a nucleic acid molecule or a polypeptide comprising the nucleic acid, preferably the coding region thereof, or polypeptide or the consensus sequence or the polypeptide motif, as depicted in Table I, II or IV, application No. 3, column 5 or 8 in the respective same line as the nucleic acid molecule SEQ ID NO. 19874 or polypeptide SEQ ID NO. 19875, respectively, or a homolog or a fragment thereof, is increased or generated, or if the activity protein phosphatase is increased or generated in a non-human organism, like a microorganism or a plant cell, plant or part thereof, especially with non-targeted localization, whereby the respective line discloses in column 7 phenylalanine. For example, an increase of the phenylalanine of at least 1 percent, particularly in a range of 36 to 520-percent is conferred as compared to a corresponding non-transformed wild type non-human organism.

[22284] Accordingly, in one embodiment, an increase of serine in a non-human organism, as compared to a corresponding non-transformed wild type non-human organism, is conferred in the process of the invention, if the activity of a polypeptide showing the activity of a protein phosphatase, or if the activity of the polypeptide At2g28890, preferably represented by SEQ ID NO. 19875, or a homolog or fragment thereof, or if the activity of a polypeptide encoded by a nucleic acid molecule comprising the nucleic acid SEQ ID NO. 19874, preferably the coding region thereof, or a homolog or fragment thereof, e.g. derived from Arabidopsis thaliana, is increased or generated. For example the activity of a nucleic acid molecule or a polypeptide comprising the nucleic acid, preferably the coding region thereof, or polypeptide or the consensus sequence or the polypeptide motif, as depicted in Table I, II or IV, application No. 3, column 5 or 8 in the respective same line as the nucleic acid molecule SEQ ID NO. 19874 or polypeptide SEQ ID NO. 19875, respectively, or a homolog or a fragment thereof, is increased or generated, or if the activity protein phosphatase is increased or generated in a non-human organism, like a microorganism or a plant cell, plant or part thereof, especially with non-targeted localization, whereby the respective line discloses in column 7 serine. For example, an increase of the serine of at least 1 percent, particularly in a range of 29 to 164-percent is conferred as compared to a corresponding non-transformed wild type non-human organism.

[22285] Accordingly, in one embodiment, an increase of tyrosine in a non-human organism, as compared to a corresponding non-transformed wild type non-human organism, is conferred in the process of the invention, if the activity of a polypeptide showing the activity of a protein phosphatase, or if the activity of the polypeptide At2g28890, preferably represented by SEQ ID NO. 19875, or a homolog or fragment thereof, or if the activity of a polypeptide encoded by a nucleic acid molecule comprising the nucleic acid SEQ ID NO. 19874, preferably the coding region thereof, or a homolog or fragment thereof, e.g. derived from Arabidopsis thaliana, is increased or generated. For example the activity of a nucleic acid molecule or a polypeptide comprising the nucleic acid, preferably the coding region thereof, or polypeptide or the consensus sequence or the polypeptide motif, as depicted in Table I, II or IV, application No. 3, column 5 or 8 in the respective same line as the nucleic acid molecule SEQ ID NO. 19874 or polypeptide SEQ ID NO. 19875, respectively, or a homolog or a fragment thereof, is increased or generated, or if the activity protein phosphatase is increased or generated in a non-human organism, like a microorganism or a plant cell, plant or part thereof, especially with non-targeted localization, whereby the respective line discloses in column 7 tyrosine. For example, an increase of the tyrosine of at least 1 percent, particularly in a range of 62 to 555-percent is conferred as compared to a corresponding non-transformed wild type non-human organism.

[22286] Accordingly, in one embodiment, an increase of phenylalanine in a non-human organism, as compared to a corresponding non-transformed wild type non-human organism, is conferred in the process of the invention, if the activity of a polypeptide showing the activity of a CBL-interacting protein kinase, or if the activity of the polypeptide At2g30360, preferably represented by SEQ ID NO. 19920, or a homolog or fragment thereof, or if the activity of a polypeptide encoded by a nucleic acid molecule comprising the nucleic acid SEQ ID NO. 19919, preferably the coding region thereof, or a homolog or fragment thereof, e.g. derived from Arabidopsis thaliana, is increased or generated. For example the activity of a nucleic acid molecule or a polypeptide comprising the nucleic acid, preferably the coding region thereof, or polypeptide or the consensus sequence or the polypeptide motif, as depicted in Table I, II or IV, application No. 3, column 5 or 8 in the respective same line as the nucleic acid molecule SEQ ID NO. 19919 or polypeptide SEQ ID NO. 19920, respectively, or a homolog or a fragment thereof, is increased or generated, or if the activity CBL-interacting protein kinase is increased or generated in a non-human organism, like a microorganism or a plant cell, plant or part thereof, especially with non-targeted localization, whereby the respective line discloses in column 7 phenylalanine. For example, an increase of the phenylalanine of at least 1 percent, particularly in a range of 29 to 548-percent is conferred as compared to a corresponding non-transformed wild type non-human organism.

[22287] Accordingly, in one embodiment, an increase of tyrosine in a non-human organism, as compared to a corresponding non-transformed wild type non-human organism, is conferred in the process of the invention, if the activity of a polypeptide showing the activity of a CBL-interacting protein kinase, or if the activity of the polypeptide At2g30360, preferably represented by SEQ ID NO. 19920, or a homolog or fragment thereof, or if the activity of a polypeptide encoded by a nucleic acid molecule comprising the nucleic acid SEQ ID NO. 19919, preferably the coding region thereof, or a homolog or fragment thereof, e.g. derived from Arabidopsis thaliana, is increased or generated. For example the activity of a nucleic acid molecule or a polypeptide comprising the nucleic acid, preferably the coding region thereof, or polypeptide or the consensus sequence or the polypeptide motif, as depicted in Table I, II or IV, application No. 3, column 5 or 8 in the respective same line as the nucleic acid molecule SEQ ID NO. 19919 or polypeptide SEQ ID NO. 19920, respectively, or a homolog or a fragment thereof, is increased or generated, or if the activity CBL-interacting protein kinase is increased or generated in a non-human organism, like a microorganism or a plant cell, plant or part thereof, especially with non-targeted localization, whereby the respective line discloses in column 7 tyrosine. For example, an increase of the tyrosine of at least 1 percent, particularly in a range of 38 to 323-percent is conferred as compared to a corresponding non-transformed wild type non-human organism.

[22288] Accordingly, in one embodiment, an increase of 5-oxoproline in a non-human organism, as compared to a corresponding non-transformed wild type non-human organism, is conferred in the process of the invention, if the activity of a polypeptide showing the activity of a CBL-interacting protein kinase, or if the activity of the polypeptide At2g30360, preferably represented by SEQ ID NO. 19920, or a homolog or fragment thereof, or if the activity of a polypeptide encoded by a nucleic acid molecule comprising the nucleic acid SEQ ID NO. 19919, preferably the coding region thereof, or a homolog or fragment thereof, e.g. derived from Arabidopsis thaliana, is increased or generated. For example the activity of a nucleic acid molecule or a polypeptide comprising the nucleic acid, preferably the coding region thereof, or polypeptide or the consensus sequence or the polypeptide motif, as depicted in Table I, II or IV, application No. 3, column 5 or 8 in the respective same line as the nucleic acid molecule SEQ ID NO. 19919 or polypeptide SEQ ID NO. 19920, respectively, or a homolog or a fragment thereof, is increased or generated, or if the activity CBL-interacting protein kinase is increased or generated in a non-human organism, like a microorganism or a plant cell, plant or part thereof, especially with non-targeted localization, whereby the respective line discloses in column 7 5-oxoproline. For example, an increase of the 5-oxoproline of at least 1 percent, particularly in a range of 33 to 92-percent is conferred as compared to a corresponding non-transformed wild type non-human organism.

[22289] Accordingly, in one embodiment, an increase of serine in a non-human organism, as compared to a corresponding non-transformed wild type non-human organism, is conferred in the process of the invention, if the activity of a polypeptide showing the activity of a glutaredoxin, or if the activity of the polypeptide At2g30540, preferably represented by SEQ ID NO. 20347, or a homolog or fragment thereof, or if the activity of a polypeptide encoded by a nucleic acid molecule comprising the nucleic acid SEQ ID NO. 20346, preferably the coding region thereof, or a homolog or fragment thereof, e.g. derived from Arabidopsis thaliana, is increased or generated. For example the activity of a nucleic acid molecule or a polypeptide comprising the nucleic acid, preferably the coding region thereof, or polypeptide or the consensus sequence or the polypeptide motif, as depicted in Table I, II or IV, application No. 3, column 5 or 8 in the respective same line as the nucleic acid molecule SEQ ID NO. 20346 or polypeptide SEQ ID NO. 20347, respectively, or a homolog or a fragment thereof, is increased or generated, or if the activity glutaredoxin is increased or generated in a non-human organism, like a microorganism or a plant cell, plant or part thereof, especially with non-targeted localization, whereby the respective line discloses in column 7 serine. For example, an increase of the serine of at least 1 percent, particularly in a range of 24 to 171-percent is conferred as compared to a corresponding non-transformed wild type non-human organism.

[22290] Accordingly, in one embodiment, an increase of tyrosine in a non-human organism, as compared to a corresponding non-transformed wild type non-human organism, is conferred in the process of the invention, if the activity of a polypeptide showing the activity of a glutaredoxin, or if the activity of the polypeptide At2g30540, preferably represented by SEQ ID NO. 20347, or a homolog or fragment thereof, or if the activity of a polypeptide encoded by a nucleic acid molecule comprising the nucleic acid SEQ ID NO. 20346, preferably the coding region thereof, or a homolog or fragment thereof, e.g. derived from Arabidopsis thaliana, is increased or generated. For example the activity of a nucleic acid molecule or a polypeptide comprising the nucleic acid, preferably the coding region thereof, or polypeptide or the consensus sequence or the polypeptide motif, as depicted in Table I, II or IV, application No. 3, column 5 or 8 in the respective same line as the nucleic acid molecule SEQ ID NO. 20346 or polypeptide SEQ ID NO. 20347, respectively, or a homolog or a fragment thereof, is increased or generated, or if the activity glutaredoxin is increased or generated in a non-human organism, like a microorganism or a plant cell, plant or part thereof, especially with non-targeted localization, whereby the respective line discloses in column 7 tyrosine. For example, an increase of the tyrosine of at least 1 percent, particularly in a range of 43 to 106-percent is conferred as compared to a corresponding non-transformed wild type non-human organism.

[22291] Accordingly, in one embodiment, an increase of glycine in a non-human organism, as compared to a corresponding non-transformed wild type non-human organism, is conferred in the process of the invention, if the activity of a polypeptide showing the activity of a CBL-interacting protein kinase, or if the activity of the polypeptide At2g34180, preferably represented by SEQ ID NO. 20579, or a homolog or fragment thereof, or if the activity of a polypeptide encoded by a nucleic acid molecule comprising the nucleic acid SEQ ID NO. 20578, preferably the coding region thereof, or a homolog or fragment thereof, e.g. derived from Arabidopsis thaliana, is increased or generated. For example the activity of a nucleic acid molecule or a polypeptide comprising the nucleic acid, preferably the coding region thereof, or polypeptide or the consensus sequence or the polypeptide motif, as depicted in Table I, II or IV, application No. 3, column 5 or 8 in the respective same line as the nucleic acid molecule SEQ ID NO. 20578 or polypeptide SEQ ID NO. 20579, respectively, or a homolog or a fragment thereof, is increased or generated, or if the activity CBL-interacting protein kinase is increased or generated in a non-human organism, like a microorganism or a plant cell, plant or part thereof, especially with non-targeted localization, whereby the respective line discloses in column 7 glycine. For example, an increase of the glycine of at least 1 percent, particularly in a range of 56 to 191-percent is conferred as compared to a corresponding non-transformed wild type non-human organism.

[22292] Accordingly, in one embodiment, an increase of alanine in a non-human organism, as compared to a corresponding non-transformed wild type non-human organism, is conferred in the process of the invention, if the activity of a polypeptide showing the activity of a delta-1-pyrroline 5-carboxylase synthetase, or if the activity of the polypeptide At2g39800, preferably represented by SEQ ID NO. 21009, or a homolog or fragment thereof, or if the activity of a polypeptide encoded by a nucleic acid molecule comprising the nucleic acid SEQ ID NO. 21008, preferably the coding region thereof, or a homolog or fragment thereof, e.g. derived from Arabidopsis thaliana, is increased or generated. For example the activity of a nucleic acid molecule or a polypeptide comprising the nucleic acid, preferably the coding region thereof, or polypeptide or the consensus sequence or the polypeptide motif, as depicted in Table I, II or IV, application No. 3, column 5 or 8 in the respective same line as the nucleic acid molecule SEQ ID NO. 21008 or polypeptide SEQ ID NO. 21009, respectively, or a homolog or a fragment thereof, is increased or generated, or if the activity delta-1-pyrroline 5-carboxylase synthetase is increased or generated in a non-human organism, like a microorganism or a plant cell, plant or part thereof, especially with non-targeted localization, whereby the respective line discloses in column 7 alanine. For example, an increase of the alanine of at least 1 percent, particularly in a range of 20 to 34 percent is conferred as compared to a corresponding non-transformed wild type non-human organism.

[22293] Accordingly, in one embodiment, an increase of glycine in a non-human organism, as compared to a corresponding non-transformed wild type non-human organism, is conferred in the process of the invention, if the activity of a polypeptide showing the activity of a delta-1-pyrroline 5-carboxylase synthetase, or if the activity of the polypeptide At2g39800, preferably represented by SEQ ID NO. 21009, or a homolog or fragment thereof, or if the activity of a polypeptide encoded by a nucleic acid molecule comprising the nucleic acid SEQ ID NO. 21008, preferably the coding region thereof, or a homolog or fragment thereof, e.g. derived from Arabidopsis thaliana, is increased or generated. For example the activity of a nucleic acid molecule or a polypeptide comprising the nucleic acid, preferably the coding region thereof, or polypeptide or the consensus sequence or the polypeptide motif, as depicted in Table I, II or IV, application No. 3, column 5 or 8 in the respective same line as the nucleic acid molecule SEQ ID NO. 21008 or polypeptide SEQ ID NO. 21009, respectively, or a homolog or a fragment thereof, is increased or generated, or if the activity delta-1-pyrroline 5-carboxylase synthetase is increased or generated in a non-human organism, like a microorganism or a plant cell, plant or part thereof, especially with non-targeted localization, whereby the respective line discloses in column 7 glycine. For example, an increase of the glycine of at least 1 percent, particularly in a range of 34 to 83 percent is conferred as compared to a corresponding non-transformed wild type non-human organism.

[22294] Accordingly, in one embodiment, an increase of phenylalanine in a non-human organism, as compared to a corresponding non-transformed wild type non-human organism, is conferred in the process of the invention, if the activity of a polypeptide showing the activity of a glutaredoxin, or if the activity of the polypeptide At2g47880, preferably represented by SEQ ID NO. 21160, or a homolog or fragment thereof, or if the activity of a polypeptide encoded by a nucleic acid molecule comprising the nucleic acid SEQ ID NO. 21159, preferably the coding region thereof, or a homolog or fragment thereof, e.g. derived from Arabidopsis thaliana, is increased or generated. For example the activity of a nucleic acid molecule or a polypeptide comprising the nucleic acid, preferably the coding region thereof, or polypeptide or the consensus sequence or the polypeptide motif, as depicted in Table I, II or IV, application No. 3, column 5 or 8 in the respective same line as the nucleic acid molecule SEQ ID NO. 21159 or polypeptide SEQ ID NO. 21160, respectively, or a homolog or a fragment thereof, is increased or generated, or if the activity glutaredoxin is increased or generated in a non-human organism, like a microorganism or a plant cell, plant or part thereof, especially with non-targeted localization, whereby the respective line discloses in column 7 phenylalanine. For example, an increase of the phenylalanine of at least 1 percent, particularly in a range of 64 to 241-percent is conferred as compared to a corresponding non-transformed wild type non-human organism.

[22295] Accordingly, in one embodiment, an increase of tyrosine in a non-human organism, as compared to a corresponding non-transformed wild type non-human organism, is conferred in the process of the invention, if the activity of a polypeptide showing the activity of a glutaredoxin, or if the activity of the polypeptide At2g47880, preferably represented by SEQ ID NO. 21160, or a homolog or fragment thereof, or if the activity of a polypeptide encoded by a nucleic acid molecule comprising the nucleic acid SEQ ID NO. 21159, preferably the coding region thereof, or a homolog or fragment thereof, e.g. derived from Arabidopsis thaliana, is increased or generated. For example the activity of a nucleic acid molecule or a polypeptide comprising the nucleic acid, preferably the coding region thereof, or polypeptide or the consensus sequence or the polypeptide motif, as depicted in Table I, II or IV, application No. 3, column 5 or 8 in the respective same line as the nucleic acid molecule SEQ ID NO. 21159 or polypeptide SEQ ID NO. 21160, respectively, or a homolog or a fragment thereof, is increased or generated, or if the activity glutaredoxin is increased or generated in a non-human organism, like a microorganism or a plant cell, plant or part thereof, especially with non-targeted localization, whereby the respective line discloses in column 7 tyrosine. For example, an increase of the tyrosine of at least 1 percent, particularly in a range of 62 to 219-percent is conferred as compared to a corresponding non-transformed wild type non-human organism.

[22296] Accordingly, in one embodiment, an increase of tyrosine in a non-human organism, as compared to a corresponding non-transformed wild type non-human organism, is conferred in the process of the invention, if the activity of a polypeptide showing the activity of a heat shock transcription factor, or if the activity of the polypeptide At3g02990, preferably represented by SEQ ID NO. 68658, or a homolog or fragment thereof, or if the activity of a polypeptide encoded by a nucleic acid molecule comprising the nucleic acid SEQ ID NO. 68657, preferably the coding region thereof, or a homolog or fragment thereof, e.g. derived from Arabidopsis thaliana, is increased or generated. For example the activity of a nucleic acid molecule or a polypeptide comprising the nucleic acid, preferably the coding region thereof, or polypeptide or the consensus sequence or the polypeptide motif, as depicted in Table I, II or IV, application No. 3, column 5 or 8 in the respective same line as the nucleic acid molecule SEQ ID NO. 68657 or polypeptide SEQ ID NO. 68658, respectively, or a homolog or a fragment thereof, is increased or generated, or if the activity heat shock transcription factor is increased or generated in a non-human organism, like a microorganism or a plant cell, plant or part thereof, especially with non-targeted localization, whereby the respective line discloses in column 7 tyrosine. For example, an increase of the tyrosine of at least 1 percent, particularly in a range of 46 to 84-percent is conferred as compared to a corresponding non-transformed wild type non-human organism.

[22297] Accordingly, in one embodiment, an increase of alanine in a non-human organism, as compared to a corresponding non-transformed wild type non-human organism, is conferred in the process of the invention, if the activity of a polypeptide showing the activity of a pyruvate kinase, or if the activity of the polypeptide At3g04050, preferably represented by SEQ ID NO. 21498, or a homolog or fragment thereof, or if the activity of a polypeptide encoded by a nucleic acid molecule comprising the nucleic acid SEQ ID NO. 21497, preferably the coding region thereof, or a homolog or fragment thereof, e.g. derived from Arabidopsis thaliana, is increased or generated. For example the activity of a nucleic acid molecule or a polypeptide comprising the nucleic acid, preferably the coding region thereof, or polypeptide or the consensus sequence or the polypeptide motif, as depicted in Table I, II or IV, application No. 3, column 5 or 8 in the respective same line as the nucleic acid molecule SEQ ID NO. 21497 or polypeptide SEQ ID NO. 21498, respectively, or a homolog or a fragment thereof, is increased or generated, or if the activity pyruvate kinase is increased or generated in a non-human organism, like a microorganism or a plant cell, plant or part thereof, especially with plastidic localization, whereby the respective line discloses in column 7 alanine. For example, an increase of the alanine of at least 1 percent, particularly in a range of 30 to 950-percent is conferred as compared to a corresponding non-transformed wild type non-human organism.

[22298] Accordingly, in one embodiment, an increase of phenylalanine in a non-human organism, as compared to a corresponding non-transformed wild type non-human organism, is conferred in the process of the invention, if the activity of a polypeptide showing the activity of a pyruvate kinase, or if the activity of the polypeptide At3g04050, preferably represented by SEQ ID NO. 21498, or a homolog or fragment thereof, or if the activity of a polypeptide encoded by a nucleic acid molecule comprising the nucleic acid SEQ ID NO. 21497, preferably the coding region thereof, or a homolog or fragment thereof, e.g. derived from Arabidopsis thaliana, is increased or generated. For example the activity of a nucleic acid molecule or a polypeptide comprising the nucleic acid, preferably the coding region thereof, or polypeptide or the consensus sequence or the polypeptide motif, as depicted in Table I, II or IV, application No. 3, column 5 or 8 in the respective same line as the nucleic acid molecule SEQ ID NO. 21497 or polypeptide SEQ ID NO. 21498, respectively, or a homolog or a fragment thereof, is increased or generated, or if the activity pyruvate kinase is increased or generated in a non-human organism, like a microorganism or a plant cell, plant or part thereof, especially with plastidic localization, whereby the respective line discloses in column 7 phenylalanine. For example, an increase of the phenylalanine of at least 1 percent, particularly in a range of 104 to 300-percent is conferred as compared to a corresponding non-transformed wild type non-human organism.

[22299] Accordingly, in one embodiment, an increase of tyrosine in a non-human organism, as compared to a corresponding non-transformed wild type non-human organism, is conferred in the process of the invention, if the activity of a polypeptide showing the activity of a pyruvate kinase, or if the activity of the polypeptide At3g04050, preferably represented by SEQ ID NO. 21498, or a homolog or fragment thereof, or if the activity of a polypeptide encoded by a nucleic acid molecule comprising the nucleic acid SEQ ID NO. 21497, preferably the coding region thereof, or a homolog or fragment thereof, e.g. derived from Arabidopsis thaliana, is increased or generated. For example the activity of a nucleic acid molecule or a polypeptide comprising the nucleic acid, preferably the coding region thereof, or polypeptide or the consensus sequence or the polypeptide motif, as depicted in Table I, II or IV, application No. 3, column 5 or 8 in the respective same line as the nucleic acid molecule SEQ ID NO. 21497 or polypeptide SEQ ID NO. 21498, respectively, or a homolog or a fragment thereof, is increased or generated, or if the activity pyruvate kinase is increased or generated in a non-human organism, like a microorganism or a plant cell, plant or part thereof, especially with plastidic localization, whereby the respective line discloses in column 7 tyrosine. For example, an increase of the tyrosine of at least 1 percent, particularly in a range of 41 to 346-percent is conferred as compared to a corresponding non-transformed wild type non-human organism.

[22300] Accordingly, in one embodiment, an increase of phenylalanine in a non-human organism, as compared to a corresponding non-transformed wild type non-human organism, is conferred in the process of the invention, if the activity of a polypeptide showing the activity of a ankyrin repeat family protein, or if the activity of the polypeptide At3g04710, preferably represented by SEQ ID NO. 21903, or a homolog or fragment thereof, or if the activity of a polypeptide encoded by a nucleic acid molecule comprising the nucleic acid SEQ ID NO. 21902, preferably the coding region thereof, or a homolog or fragment thereof, e.g. derived from Arabidopsis thaliana, is increased or generated. For example the activity of a nucleic acid molecule or a polypeptide comprising the nucleic acid, preferably the coding region thereof, or polypeptide or the consensus sequence or the polypeptide motif, as depicted in Table I, II or IV, application No. 3, column 5 or 8 in the respective same line as the nucleic acid molecule SEQ ID NO. 21902 or polypeptide SEQ ID NO. 21903, respectively, or a homolog or a fragment thereof, is increased or generated, or if the activity ankyrin repeat family protein is increased or generated in a non-human organism, like a microorganism or a plant cell, plant or part thereof, especially with non-targeted localization, whereby the respective line discloses in column 7 phenylalanine. For example, an increase of the phenylalanine of at least 1 percent, particularly in a range of 50 to 58-percent is conferred as compared to a corresponding non-transformed wild type non-human organism.

[22301] Accordingly, in one embodiment, an increase of tyrosine in a non-human organism, as compared to a corresponding non-transformed wild type non-human organism, is conferred in the process of the invention, if the activity of a polypeptide showing the activity of a protein phosphatase, or if the activity of the polypeptide At3g06270, preferably represented by SEQ ID NO. 22016, or a homolog or fragment thereof, or if the activity of a polypeptide encoded by a nucleic acid molecule comprising the nucleic acid SEQ ID NO. 22015, preferably the coding region thereof, or a homolog or fragment thereof, e.g. derived from Arabidopsis thaliana, is increased or generated. For example the activity of a nucleic acid molecule or a polypeptide comprising the nucleic acid, preferably the coding region thereof, or polypeptide or the consensus sequence or the polypeptide motif, as depicted in Table I, II or IV, application No. 3, column 5 or 8 in the respective same line as the nucleic acid molecule SEQ ID NO. 22015 or polypeptide SEQ ID NO. 22016, respectively, or a homolog or a fragment thereof, is increased or generated, or if the activity protein phosphatase is increased or generated in a non-human organism, like a microorganism or a plant cell, plant or part thereof, especially with non-targeted localization, whereby the respective line discloses in column 7 tyrosine. For example, an increase of the tyrosine of at least 1 percent, particularly in a range of 44 to 46-percent is conferred as compared to a corresponding non-transformed wild type non-human organism.

[22302] Accordingly, in one embodiment, an increase of aspartate in a non-human organism, as compared to a corresponding non-transformed wild type non-human organism, is conferred in the process of the invention, if the activity of a polypeptide showing the activity of a thioredoxin family protein, or if the activity of the polypeptide At3g08710, preferably represented by SEQ ID NO. 22250, or a homolog or fragment thereof, or if the activity of a polypeptide encoded by a nucleic acid molecule comprising the nucleic acid SEQ ID NO. 22249, preferably the coding region thereof, or a homolog or fragment thereof, e.g. derived from Arabidopsis thaliana, is increased or generated. For example the activity of a nucleic acid molecule or a polypeptide comprising the nucleic acid, preferably the coding region thereof, or polypeptide or the consensus sequence or the polypeptide motif, as depicted in Table I, II or IV, application No. 3, column 5 or 8 in the respective same line as the nucleic acid molecule SEQ ID NO. 22249 or polypeptide SEQ ID NO. 22250, respectively, or a homolog or a fragment thereof, is increased or generated, or if the activity thioredoxin family protein is increased or generated in a non-human organism, like a microorganism or a plant cell, plant or part thereof, especially with non-targeted localization, whereby the respective line discloses in column 7 aspartate. For example, an increase of the aspartate of at least 1 percent, particularly in a range of 77 to 149-percent is conferred as compared to a corresponding non-transformed wild type non-human organism.

[22303] Accordingly, in one embodiment, an increase of phenylalanine in a non-human organism, as compared to a corresponding non-transformed wild type non-human organism, is conferred in the process of the invention, if the activity of a polypeptide showing the activity of a thioredoxin family protein, or if the activity of the polypeptide At3g08710, preferably represented by SEQ ID NO. 22250, or a homolog or fragment thereof, or if the activity of a polypeptide encoded by a nucleic acid molecule comprising the nucleic acid SEQ ID NO. 22249, preferably the coding region thereof, or a homolog or fragment thereof, e.g. derived from Arabidopsis thaliana, is increased or generated. For example the activity of a nucleic acid molecule or a polypeptide comprising the nucleic acid, preferably the coding region thereof, or polypeptide or the consensus sequence or the polypeptide motif, as depicted in Table I, II or IV, application No. 3, column 5 or 8 in the respective same line as the nucleic acid molecule SEQ ID NO. 22249 or polypeptide SEQ ID NO. 22250, respectively, or a homolog or a fragment thereof, is increased or generated, or if the activity thioredoxin family protein is increased or generated in a non-human organism, like a microorganism or a plant cell, plant or part thereof, especially with non-targeted localization, whereby the respective line discloses in column 7 phenylalanine. For example, an increase of the phenylalanine of at least 1 percent, particularly in a range of 57 to 205-percent is conferred as compared to a corresponding non-transformed wild type non-human organism.

[22304] Accordingly, in one embodiment, an increase of tyrosine in a non-human organism, as compared to a corresponding non-transformed wild type non-human organism, is conferred in the process of the invention, if the activity of a polypeptide showing the activity of a thioredoxin family protein, or if the activity of the polypeptide At3g08710, preferably represented by SEQ ID NO. 22250, or a homolog or fragment thereof, or if the activity of a polypeptide encoded by a nucleic acid molecule comprising the nucleic acid SEQ ID NO. 22249, preferably the coding region thereof, or a homolog or fragment thereof, e.g. derived from Arabidopsis thaliana, is increased or generated. For example the activity of a nucleic acid molecule or a polypeptide comprising the nucleic acid, preferably the coding region thereof, or polypeptide or the consensus sequence or the polypeptide motif, as depicted in Table I, II or IV, application No. 3, column 5 or 8 in the respective same line as the nucleic acid molecule SEQ ID NO. 22249 or polypeptide SEQ ID NO. 22250, respectively, or a homolog or a fragment thereof, is increased or generated, or if the activity thioredoxin family protein is increased or generated in a non-human organism, like a microorganism or a plant cell, plant or part thereof, especially with non-targeted localization, whereby the respective line discloses in column 7 tyrosine. For example, an increase of the tyrosine of at least 1 percent, particularly in a range of 50 to 132-percent is conferred as compared to a corresponding non-transformed wild type non-human organism.

[22305] Accordingly, in one embodiment, an increase of phenylalanine in a non-human organism, as compared to a corresponding non-transformed wild type non-human organism, is conferred in the process of the invention, if the activity of a polypeptide showing the activity of a harpin-induced family protein, or if the activity of the polypeptide At3g11650, preferably represented by SEQ ID NO. 22612, or a homolog or fragment thereof, or if the activity of a polypeptide encoded by a nucleic acid molecule comprising the nucleic acid SEQ ID NO. 22611, preferably the coding region thereof, or a homolog or fragment thereof, e.g. derived from Arabidopsis thaliana, is increased or generated. For example the activity of a nucleic acid molecule or a polypeptide comprising the nucleic acid, preferably the coding region thereof, or polypeptide or the consensus sequence or the polypeptide motif, as depicted in Table I, II or IV, application No. 3, column 5 or 8 in the respective same line as the nucleic acid molecule SEQ ID NO. 22611 or polypeptide SEQ ID NO. 22612, respectively, or a homolog or a fragment thereof, is increased or generated, or if the activity harpin-induced family protein is increased or generated in a non-human organism, like a microorganism or a plant cell, plant or part thereof, especially with non-targeted localization, whereby the respective line discloses in column 7 phenylalanine. For example, an increase of the phenylalanine of at least 1 percent, particularly in a range of 34 to 149-percent is conferred as compared to a corresponding non-transformed wild type non-human organism.

[22306] Accordingly, in one embodiment, an increase of serine in a non-human organism, as compared to a corresponding non-transformed wild type non-human organism, is conferred in the process of the invention, if the activity of a polypeptide showing the activity of a harpin-induced family protein, or if the activity of the polypeptide At3g11650, preferably represented by SEQ ID NO. 22612, or a homolog or fragment thereof, or if the activity of a polypeptide encoded by a nucleic acid molecule comprising the nucleic acid SEQ ID NO. 22611, preferably the coding region thereof, or a homolog or fragment thereof, e.g. derived from Arabidopsis thaliana, is increased or generated. For example the activity of a nucleic acid molecule or a polypeptide comprising the nucleic acid, preferably the coding region thereof, or polypeptide or the consensus sequence or the polypeptide motif, as depicted in Table I, II or IV, application No. 3, column 5 or 8 in the respective same line as the nucleic acid molecule SEQ ID NO. 22611 or polypeptide SEQ ID NO. 22612, respectively, or a homolog or a fragment thereof, is increased or generated, or if the activity harpin-induced family protein is increased or generated in a non-human organism, like a microorganism or a plant cell, plant or part thereof, especially with non-targeted localization, whereby the respective line discloses in column 7 serine. For example, an increase of the serine of at least 1 percent, particularly in a range of 24 to 89-percent is conferred as compared to a corresponding non-transformed wild type non-human organism.

[22307] Accordingly, in one embodiment, an increase of tyrosine in a non-human organism, as compared to a corresponding non-transformed wild type non-human organism, is conferred in the process of the invention, if the activity of a polypeptide showing the activity of a harpin-induced family protein, or if the activity of the polypeptide At3g11650, preferably represented by SEQ ID NO. 22612, or a homolog or fragment thereof, or if the activity of a polypeptide encoded by a nucleic acid molecule comprising the nucleic acid SEQ ID NO. 22611, preferably the coding region thereof, or a homolog or fragment thereof, e.g. derived from Arabidopsis thaliana, is increased or generated. For example the activity of a nucleic acid molecule or a polypeptide comprising the nucleic acid, preferably the coding region thereof, or polypeptide or the consensus sequence or the polypeptide motif, as depicted in Table I, II or IV, application No. 3, column 5 or 8 in the respective same line as the nucleic acid molecule SEQ ID NO. 22611 or polypeptide SEQ ID NO. 22612, respectively, or a homolog or a fragment thereof, is increased or generated, or if the activity harpin-induced family protein is increased or generated in a non-human organism, like a microorganism or a plant cell, plant or part thereof, especially with non-targeted localization, whereby the respective line discloses in column 7 tyrosine. For example, an increase of the tyrosine of at least 1 percent, particularly in a range of 35 to 125-percent is conferred as compared to a corresponding non-transformed wild type non-human organism.

[22308] Accordingly, in one embodiment, an increase of phenylalanine in a non-human organism, as compared to a corresponding non-transformed wild type non-human organism, is conferred in the process of the invention, if the activity of a polypeptide showing the activity of a DNA mismatch repair protein, or if the activity of the polypeptide At3g18524, preferably represented by SEQ ID NO. 22833, or a homolog or fragment thereof, or if the activity of a polypeptide encoded by a nucleic acid molecule comprising the nucleic acid SEQ ID NO. 22832, preferably the coding region thereof, or a homolog or fragment thereof, e.g. derived from Arabidopsis thaliana, is increased or generated. For example the activity of a nucleic acid molecule or a polypeptide comprising the nucleic acid, preferably the coding region thereof, or polypeptide or the consensus sequence or the polypeptide motif, as depicted in Table I, II or IV, application No. 3, column 5 or 8 in the respective same line as the nucleic acid molecule SEQ ID NO. 22832 or polypeptide SEQ ID NO. 22833, respectively, or a homolog or a fragment thereof, is increased or generated, or if the activity DNA mismatch repair protein is increased or generated in a non-human organism, like a microorganism or a plant cell, plant or part thereof, especially with non-targeted localization, whereby the respective line discloses in column 7 phenylalanine. For example, an increase of the phenylalanine of at least 1 percent, particularly in a range of 30 to 48-percent is conferred as compared to a corresponding non-transformed wild type non-human organism.

[22309] Accordingly, in one embodiment, an increase of phenylalanine in a non-human organism, as compared to a corresponding non-transformed wild type non-human organism, is conferred in the process of the invention, if the activity of a polypeptide showing the activity of a protein kinase, or if the activity of the polypeptide At3g23000, preferably represented by SEQ ID NO. 1816, or a homolog or fragment thereof, or if the activity of a polypeptide encoded by a nucleic acid molecule comprising the nucleic acid SEQ ID NO. 1815, preferably the coding region thereof, or a homolog or fragment thereof, e.g. derived from Arabidopsis thaliana, is increased or generated. For example the activity of a nucleic acid molecule or a polypeptide comprising the nucleic acid, preferably the coding region thereof, or polypeptide or the consensus sequence or the polypeptide motif, as depicted in Table I, II or IV, application No. 3, column 5 or 8 in the respective same line as the nucleic acid molecule SEQ ID NO. 1815 or polypeptide SEQ ID NO. 1816, respectively, or a homolog or a fragment thereof, is increased or generated, or if the activity protein kinase is increased or generated in a non-human organism, like a microorganism or a plant cell, plant or part thereof, especially with non-targeted localization, whereby the respective line discloses in column 7 phenylalanine. For example, an increase of the phenylalanine of at least 1 percent, particularly in a range of 75 to 455-percent is conferred as compared to a corresponding non-transformed wild type non-human organism.

[22310] Accordingly, in one embodiment, an increase of serine in a non-human organism, as compared to a corresponding non-transformed wild type non-human organism, is conferred in the process of the invention, if the activity of a polypeptide showing the activity of a protein kinase, or if the activity of the polypeptide At3g23000, preferably represented by SEQ ID NO. 1816, or a homolog or fragment thereof, or if the activity of a polypeptide encoded by a nucleic acid molecule comprising the nucleic acid SEQ ID NO. 1815, preferably the coding region thereof, or a homolog or fragment thereof, e.g. derived from Arabidopsis thaliana, is increased or generated. For example the activity of a nucleic acid molecule or a polypeptide comprising the nucleic acid, preferably the coding region thereof, or polypeptide or the consensus sequence or the polypeptide motif, as depicted in Table I, II or IV, application No. 3, column 5 or 8 in the respective same line as the nucleic acid molecule SEQ ID NO. 1815 or polypeptide SEQ ID NO. 1816, respectively, or a homolog or a fragment thereof, is increased or generated, or if the activity protein kinase is increased or generated in a non-human organism, like a microorganism or a plant cell, plant or part thereof, especially with non-targeted localization, whereby the respective line discloses in column 7 serine. For example, an increase of the serine of at least 1 percent, particularly in a range of 23 to 78-percent is conferred as compared to a corresponding non-transformed wild type non-human organism.

[22311] Accordingly, in one embodiment, an increase of tyrosine in a non-human organism, as compared to a corresponding non-transformed wild type non-human organism, is conferred in the process of the invention, if the activity of a polypeptide showing the activity of a protein kinase, or if the activity of the polypeptide At3g23000, preferably represented by SEQ ID NO. 1816, or a homolog or fragment thereof, or if the activity of a polypeptide encoded by a nucleic acid molecule comprising the nucleic acid SEQ ID NO. 1815, preferably the coding region thereof, or a homolog or fragment thereof, e.g. derived from Arabidopsis thaliana, is increased or generated. For example the activity of a nucleic acid molecule or a polypeptide comprising the nucleic acid, preferably the coding region thereof, or polypeptide or the consensus sequence or the polypeptide motif, as depicted in Table I, II or IV, application No. 3, column 5 or 8 in the respective same line as the nucleic acid molecule SEQ ID NO. 1815 or polypeptide SEQ ID NO. 1816, respectively, or a homolog or a fragment thereof, is increased or generated, or if the activity protein kinase is increased or generated in a non-human organism, like a microorganism or a plant cell, plant or part thereof, especially with non-targeted localization, whereby the respective line discloses in column 7 tyrosine. For example, an increase of the tyrosine of at least 1 percent, particularly in a range of 67 to 183-percent is conferred as compared to a corresponding non-transformed wild type non-human organism.

[22312] Accordingly, in one embodiment, an increase of 5-oxoproline in a non-human organism, as compared to a corresponding non-transformed wild type non-human organism, is conferred in the process of the invention, if the activity of a polypeptide showing the activity of a protein kinase, or if the activity of the polypeptide At3g23000, preferably represented by SEQ ID NO. 1816, or a homolog or fragment thereof, or if the activity of a polypeptide encoded by a nucleic acid molecule comprising the nucleic acid SEQ ID NO. 1815, preferably the coding region thereof, or a homolog or fragment thereof, e.g. derived from Arabidopsis thaliana, is increased or generated. For example the activity of a nucleic acid molecule or a polypeptide comprising the nucleic acid, preferably the coding region thereof, or polypeptide or the consensus sequence or the polypeptide motif, as depicted in Table I, II or IV, application No. 3, column 5 or 8 in the respective same line as the nucleic acid molecule SEQ ID NO. 1815 or polypeptide SEQ ID NO. 1816, respectively, or a homolog or a fragment thereof, is increased or generated, or if the activity protein kinase is increased or generated in a non-human organism, like a microorganism or a plant cell, plant or part thereof, especially with non-targeted localization, whereby the respective line discloses in column 7 5-oxoproline. For example, an increase of the 5-oxoproline of at least 1 percent, particularly in a range of 42 to 110-percent is conferred as compared to a corresponding non-transformed wild type non-human organism.

[22313] Accordingly, in one embodiment, an increase of serine in a non-human organism, as compared to a corresponding non-transformed wild type non-human organism, is conferred in the process of the invention, if the activity of a polypeptide showing the activity of a eukaryotic translation initiation factor, or if the activity of the polypeptide At3g26400, preferably represented by SEQ ID NO. 68728, or a homolog or fragment thereof, or if the activity of a polypeptide encoded by a nucleic acid molecule comprising the nucleic acid SEQ ID NO. 68727, preferably the coding region thereof, or a homolog or fragment thereof, e.g. derived from Arabidopsis thaliana, is increased or generated. For example the activity of a nucleic acid molecule or a polypeptide comprising the nucleic acid, preferably the coding region thereof, or polypeptide or the consensus sequence or the polypeptide motif, as depicted in Table I, II or IV, application No. 3, column 5 or 8 in the respective same line as the nucleic acid molecule SEQ ID NO. 68727 or polypeptide SEQ ID NO. 68728, respectively, or a homolog or a fragment thereof, is increased or generated, or if the activity eukaryotic translation initiation factor is increased or generated in a non-human organism, like a microorganism or a plant cell, plant or part thereof, especially with non-targeted localization, whereby the respective line discloses in column 7 serine. For example, an increase of the serine of at least 1 percent, particularly in a range of 23 to 62-percent is conferred as compared to a corresponding non-transformed wild type non-human organism.

[22314] Accordingly, in one embodiment, an increase of tyrosine in a non-human organism, as compared to a corresponding non-transformed wild type non-human organism, is conferred in the process of the invention, if the activity of a polypeptide showing the activity of a glucose-6-phosphate 1-dehydrogenase, or if the activity of the polypeptide At3g27300, preferably represented by SEQ ID NO. 23003, or a homolog or fragment thereof, or if the activity of a polypeptide encoded by a nucleic acid molecule comprising the nucleic acid SEQ ID NO. 23002, preferably the coding region thereof, or a homolog or fragment thereof, e.g. derived from Arabidopsis thaliana, is increased or generated. For example the activity of a nucleic acid molecule or a polypeptide comprising the nucleic acid, preferably the coding region thereof, or polypeptide or the consensus sequence or the polypeptide motif, as depicted in Table I, II or IV, application No. 3, column 5 or 8 in the respective same line as the nucleic acid molecule SEQ ID NO. 23002 or polypeptide SEQ ID NO. 23003, respectively, or a homolog or a fragment thereof, is increased or generated, or if the activity glucose-6-phosphate 1-dehydrogenase is increased or generated in a non-human organism, like a microorganism or a plant cell, plant or part thereof, especially with non-targeted localization, whereby the respective line discloses in column 7 tyrosine. For example, an increase of the tyrosine of at least 1 percent, particularly in a range of 37 to 87-percent is conferred as compared to a corresponding non-transformed wild type non-human organism.

[22315] Accordingly, in one embodiment, an increase of phenylalanine in a non-human organism, as compared to a corresponding non-transformed wild type non-human organism, is conferred in the process of the invention, if the activity of a polypeptide showing the activity of a glycosyl transferase, or if the activity of the polypeptide At3g27540, preferably represented by SEQ ID NO. 68778, or a homolog or fragment thereof, or if the activity of a polypeptide encoded by a nucleic acid molecule comprising the nucleic acid SEQ ID NO. 68777, preferably the coding region thereof, or a homolog or fragment thereof, e.g. derived from Arabidopsis thaliana, is increased or generated. For example the activity of a nucleic acid molecule or a polypeptide comprising the nucleic acid, preferably the coding region thereof, or polypeptide or the consensus sequence or the polypeptide motif, as depicted in Table I, II or IV, application No. 3, column 5 or 8 in the respective same line as the nucleic acid molecule SEQ ID NO. 68777 or polypeptide SEQ ID NO. 68778, respectively, or a homolog or a fragment thereof, is increased or generated, or if the activity glycosyl transferase is increased or generated in a non-human organism, like a microorganism or a plant cell, plant or part thereof, especially with non-targeted localization, whereby the respective line discloses in column 7 phenylalanine. For example, an increase of the phenylalanine of at least 1 percent, particularly in a range of 36 to 179-percent is conferred as compared to a corresponding non-transformed wild type non-human organism.

[22316] Accordingly, in one embodiment, an increase of tyrosine in a non-human organism, as compared to a corresponding non-transformed wild type non-human organism, is conferred in the process of the invention, if the activity of a polypeptide showing the activity of a glycosyl transferase, or if the activity of the polypeptide At3g27540, preferably represented by SEQ ID NO. 68778, or a homolog or fragment thereof, or if the activity of a polypeptide encoded by a nucleic acid molecule comprising the nucleic acid SEQ ID NO. 68777, preferably the coding region thereof, or a homolog or fragment thereof, e.g. derived from Arabidopsis thaliana, is increased or generated. For example the activity of a nucleic acid molecule or a polypeptide comprising the nucleic acid, preferably the coding region thereof, or polypeptide or the consensus sequence or the polypeptide motif, as depicted in Table I, II or IV, application No. 3, column 5 or 8 in the respective same line as the nucleic acid molecule SEQ ID NO. 68777 or polypeptide SEQ ID NO. 68778, respectively, or a homolog or a fragment thereof, is increased or generated, or if the activity glycosyl transferase is increased or generated in a non-human organism, like a microorganism or a plant cell, plant or part thereof, especially with non-targeted localization, whereby the respective line discloses in column 7 tyrosine. For example, an increase of the tyrosine of at least 1 percent, particularly in a range of 42 to 324-percent is conferred as compared to a corresponding non-transformed wild type non-human organism.

[22317] Accordingly, in one embodiment, an increase of phenylalanine in a non-human organism, as compared to a corresponding non-transformed wild type non-human organism, is conferred in the process of the invention, if the activity of a polypeptide showing the activity of a auxin response factor, or if the activity of the polypeptide At3g61830, preferably represented by SEQ ID NO. 2368, or a homolog or fragment thereof, or if the activity of a polypeptide encoded by a nucleic acid molecule comprising the nucleic acid SEQ ID NO. 2367, preferably the coding region thereof, or a homolog or fragment thereof, e.g. derived from Arabidopsis thaliana, is increased or generated. For example the activity of a nucleic acid molecule or a polypeptide comprising the nucleic acid, preferably the coding region thereof, or polypeptide or the consensus sequence or the polypeptide motif, as depicted in Table I, II or IV, application No. 3, column 5 or 8 in the respective same line as the nucleic acid molecule SEQ ID NO. 2367 or polypeptide SEQ ID NO. 2368, respectively, or a homolog or a fragment thereof, is increased or generated, or if the activity auxin response factor is increased or generated in a non-human organism, like a microorganism or a plant cell, plant or part thereof, especially with non-targeted localization, whereby the respective line discloses in column 7 phenylalanine. For example, an increase of the phenylalanine of at least 1 percent, particularly in a range of 58 to 540-percent is conferred as compared to a corresponding non-transformed wild type non-human organism.

[22318] Accordingly, in one embodiment, an increase of tyrosine in a non-human organism, as compared to a corresponding non-transformed wild type non-human organism, is conferred in the process of the invention, if the activity of a polypeptide showing the activity of a auxin response factor, or if the activity of the polypeptide At3g61830, preferably represented by SEQ ID NO. 2368, or a homolog or fragment thereof, or if the activity of a polypeptide encoded by a nucleic acid molecule comprising the nucleic acid SEQ ID NO. 2367, preferably the coding region thereof, or a homolog or fragment thereof, e.g. derived from Arabidopsis thaliana, is increased or generated. For example the activity of a nucleic acid molecule or a polypeptide comprising the nucleic acid, preferably the coding region thereof, or polypeptide or the consensus sequence or the polypeptide motif, as depicted in Table I, II or IV, application No. 3, column 5 or 8 in the respective same line as the nucleic acid molecule SEQ ID NO. 2367 or polypeptide SEQ ID NO. 2368, respectively, or a homolog or a fragment thereof, is increased or generated, or if the activity auxin response factor is increased or generated in a non-human organism, like a microorganism or a plant cell, plant or part thereof, especially with non-targeted localization, whereby the respective line discloses in column 7 tyrosine. For example, an increase of the tyrosine of at least 1 percent, particularly in a range of 36 to 784-percent is conferred as compared to a corresponding non-transformed wild type non-human organism.

[22319] Accordingly, in one embodiment, an increase of aspartate in a non-human organism, as compared to a corresponding non-transformed wild type non-human organism, is conferred in the process of the invention, if the activity of a polypeptide showing the activity of a monthiol glutaredoxin, or if the activity of the polypeptide At3g62930, preferably represented by SEQ ID NO. 2574, or a homolog or fragment thereof, or if the activity of a polypeptide encoded by a nucleic acid molecule comprising the nucleic acid SEQ ID NO. 2573, preferably the coding region thereof, or a homolog or fragment thereof, e.g. derived from Arabidopsis thaliana, is increased or generated. For example the activity of a nucleic acid molecule or a polypeptide comprising the nucleic acid, preferably the coding region thereof, or polypeptide or the consensus sequence or the polypeptide motif, as depicted in Table I, II or IV, application No. 3, column 5 or 8 in the respective same line as the nucleic acid molecule SEQ ID NO. 2573 or polypeptide SEQ ID NO. 2574, respectively, or a homolog or a fragment thereof, is increased or generated, or if the activity monthiol glutaredoxin is increased or generated in a non-human organism, like a microorganism or a plant cell, plant or part thereof, especially with non-targeted localization, whereby the respective line discloses in column 7 aspartate. For example, an increase of the aspartate of at least 1 percent, particularly in a range of 48 to 117-percent is conferred as compared to a corresponding non-transformed wild type non-human organism.

[22320] Accordingly, in one embodiment, an increase of phenylalanine in a non-human organism, as compared to a corresponding non-transformed wild type non-human organism, is conferred in the process of the invention, if the activity of a polypeptide showing the activity of a monthiol glutaredoxin, or if the activity of the polypeptide At3g62930, preferably represented by SEQ ID NO. 2574, or a homolog or fragment thereof, or if the activity of a polypeptide encoded by a nucleic acid molecule comprising the nucleic acid SEQ ID NO. 2573, preferably the coding region thereof, or a homolog or fragment thereof, e.g. derived from Arabidopsis thaliana, is increased or generated. For example the activity of a nucleic acid molecule or a polypeptide comprising the nucleic acid, preferably the coding region thereof, or polypeptide or the consensus sequence or the polypeptide motif, as depicted in Table I, II or IV, application No. 3, column 5 or 8 in the respective same line as the nucleic acid molecule SEQ ID NO. 2573 or polypeptide SEQ ID NO. 2574, respectively, or a homolog or a fragment thereof, is increased or generated, or if the activity monthiol glutaredoxin is increased or generated in a non-human organism, like a microorganism or a plant cell, plant or part thereof, especially with non-targeted localization, whereby the respective line discloses in column 7 phenylalanine. For example, an increase of the phenylalanine of at least 1 percent, particularly in a range of 26 to 274-percent is conferred as compared to a corresponding non-transformed wild type non-human organism.

[22321] Accordingly, in one embodiment, an increase of phenylalanine in a non-human organism, as compared to a corresponding non-transformed wild type non-human organism, is conferred in the process of the invention, if the activity of a polypeptide showing the activity of a glutaredoxin, or if the activity of the polypeptide At3g62950, preferably represented by SEQ ID NO. 2936, or a homolog or fragment thereof, or if the activity of a polypeptide encoded by a nucleic acid molecule comprising the nucleic acid SEQ ID NO. 2935, preferably the coding region thereof, or a homolog or fragment thereof, e.g. derived from Arabidopsis thaliana, is increased or generated. For example the activity of a nucleic acid molecule or a polypeptide comprising the nucleic acid, preferably the coding region thereof, or polypeptide or the consensus sequence or the polypeptide motif, as depicted in Table I, II or IV, application No. 3, column 5 or 8 in the respective same line as the nucleic acid molecule SEQ ID NO. 2935 or polypeptide SEQ ID NO. 2936, respectively, or a homolog or a fragment thereof, is increased or generated, or if the activity glutaredoxin is increased or generated in a non-human organism, like a microorganism or a plant cell, plant or part thereof, especially with non-targeted localization, whereby the respective line discloses in column 7 phenylalanine. For example, an increase of the phenylalanine of at least 1 percent, particularly in a range of 105 to 324-percent is conferred as compared to a corresponding non-transformed wild type non-human organism.

[22322] Accordingly, in one embodiment, an increase of tyrosine in a non-human organism, as compared to a corresponding non-transformed wild type non-human organism, is conferred in the process of the invention, if the activity of a polypeptide showing the activity of a glutaredoxin, or if the activity of the polypeptide At3g62950, preferably represented by SEQ ID NO. 2936, or a homolog or fragment thereof, or if the activity of a polypeptide encoded by a nucleic acid molecule comprising the nucleic acid SEQ ID NO. 2935, preferably the coding region thereof, or a homolog or fragment thereof, e.g. derived from Arabidopsis thaliana, is increased or generated. For example the activity of a nucleic acid molecule or a polypeptide comprising the nucleic acid, preferably the coding region thereof, or polypeptide or the consensus sequence or the polypeptide motif, as depicted in Table I, II or IV, application No. 3, column 5 or 8 in the respective same line as the nucleic acid molecule SEQ ID NO. 2935 or polypeptide SEQ ID NO. 2936, respectively, or a homolog or a fragment thereof, is increased or generated, or if the activity glutaredoxin is increased or generated in a non-human organism, like a microorganism or a plant cell, plant or part thereof, especially with non-targeted localization, whereby the respective line discloses in column 7 tyrosine. For example, an increase of the tyrosine of at least 1 percent, particularly in a range of 55 to 249-percent is conferred as compared to a corresponding non-transformed wild type non-human organism.

[22323] Accordingly, in one embodiment, an increase of 5-oxoproline in a non-human organism, as compared to a corresponding non-transformed wild type non-human organism, is conferred in the process of the invention, if the activity of a polypeptide showing the activity of a glutare doxin, or if the activity of the polypeptide At3g62950, preferably represented by SEQ ID NO. 2936, or a homolog or fragment thereof, or if the activity of a polypeptide encoded by a nucleic acid molecule comprising the nucleic acid SEQ ID NO. 2935, preferably the coding region thereof, or a homolog or fragment thereof, e.g. derived from Arabidopsis thaliana, is increased or generated. For example the activity of a nucleic acid molecule or a polypeptide comprising the nucleic acid, preferably the coding region thereof, or polypeptide or the consensus sequence or the polypeptide motif, as depicted in Table I, II or IV, application No. 3, column 5 or 8 in the respective same line as the nucleic acid molecule SEQ ID NO. 2935 or polypeptide SEQ ID NO. 2936, respectively, or a homolog or a fragment thereof, is increased or generated, or if the activity glutaredoxin is increased or generated in a non-human organism, like a microorganism or a plant cell, plant or part thereof, especially with non-targeted localization, whereby the respective line discloses in column 7 5-oxoproline. For example, an increase of the 5-oxoproline of at least 1 percent, particularly in a range of 37 to 235-percent is conferred as compared to a corresponding non-transformed wild type non-human organism.

[22324] Accordingly, in one embodiment, an increase of phenylalanine in a non-human organism, as compared to a corresponding non-transformed wild type non-human organism, is conferred in the process of the invention, if the activity of a polypeptide showing the activity of a monothiol glutaredoxin, or if the activity of the polypeptide At4g15660, preferably represented by SEQ ID NO. 23483, or a homolog or fragment thereof, or if the activity of a polypeptide encoded by a nucleic acid molecule comprising the nucleic acid SEQ ID NO. 23482, preferably the coding region thereof, or a homolog or fragment thereof, e.g. derived from Arabidopsis thaliana, is increased or generated. For example the activity of a nucleic acid molecule or a polypeptide comprising the nucleic acid, preferably the coding region thereof, or polypeptide or the consensus sequence or the polypeptide motif, as depicted in Table I, II or IV, application No. 3, column 5 or 8 in the respective same line as the nucleic acid molecule SEQ ID NO. 23482 or polypeptide SEQ ID NO. 23483, respectively, or a homolog or a fragment thereof, is increased or generated, or if the activity monothiol glutaredoxin is increased or generated in a non-human organism, like a microorganism or a plant cell, plant or part thereof, especially with non-targeted localization, whereby the respective line discloses in column 7 phenylalanine. For example, an increase of the phenylalanine of at least 1 percent, particularly in a range of 33 to 139-percent is conferred as compared to a corresponding non-transformed wild type non-human organism.

[22325] Accordingly, in one embodiment, an increase of tyrosine in a non-human organism, as compared to a corresponding non-transformed wild type non-human organism, is conferred in the process of the invention, if the activity of a polypeptide showing the activity of a monothiol glutaredoxin, or if the activity of the polypeptide At4g15660, preferably represented by SEQ ID NO. 23483, or a homolog or fragment thereof, or if the activity of a polypeptide encoded by a nucleic acid molecule comprising the nucleic acid SEQ ID NO. 23482, preferably the coding region thereof, or a homolog or fragment thereof, e.g. derived from Arabidopsis thaliana, is increased or generated. For example the activity of a nucleic acid molecule or a polypeptide comprising the nucleic acid, preferably the coding region thereof, or polypeptide or the consensus sequence or the polypeptide motif, as depicted in Table I, II or IV, application No. 3, column 5 or 8 in the respective same line as the nucleic acid molecule SEQ ID NO. 23482 or polypeptide SEQ ID NO. 23483, respectively, or a homolog or a fragment thereof, is increased or generated, or if the activity monothiol glutaredoxin is increased or generated in a non-human organism, like a microorganism or a plant cell, plant or part thereof, especially with non-targeted localization, whereby the respective line discloses in column 7 tyrosine. For example, an increase of the tyrosine of at least 1 percent, particularly in a range of 36 to 211-percent is conferred as compared to a corresponding non-transformed wild type non-human organism.

[22326] Accordingly, in one embodiment, an increase of tyrosine in a non-human organism, as compared to a corresponding non-transformed wild type non-human organism, is conferred in the process of the invention, if the activity of a polypeptide showing the activity of a monothiol glutaredoxin, or if the activity of the polypeptide At4g15670, preferably represented by SEQ ID NO. 3280, or a homolog or fragment thereof, or if the activity of a polypeptide encoded by a nucleic acid molecule comprising the nucleic acid SEQ ID NO. 3279, preferably the coding region thereof, or a homolog or fragment thereof, e.g. derived from Arabidopsis thaliana, is increased or generated. For example the activity of a nucleic acid molecule or a polypeptide comprising the nucleic acid, preferably the coding region thereof, or polypeptide or the consensus sequence or the polypeptide motif, as depicted in Table I, II or IV, application No. 3, column 5 or 8 in the respective same line as the nucleic acid molecule SEQ ID NO. 3279 or polypeptide SEQ ID NO. 3280, respectively, or a homolog or a fragment thereof, is increased or generated, or if the activity monothiol glutaredoxin is increased or generated in a non-human organism, like a microorganism or a plant cell, plant or part thereof, especially with non-targeted localization, whereby the respective line discloses in column 7 tyrosine. For example, an increase of the tyrosine of at least 1 percent, particularly in a range of 58 to 140-percent is conferred as compared to a corresponding non-transformed wild type non-human organism.

[22327] Accordingly, in one embodiment, an increase of aspartate in a non-human organism, as compared to a corresponding non-transformed wild type non-human organism, is conferred in the process of the invention, if the activity of a polypeptide showing the activity of a monothiol glutaredoxin, or if the activity of the polypeptide At4g15690, preferably represented by SEQ ID NO. 23845, or a homolog or fragment thereof, or if the activity of a polypeptide encoded by a nucleic acid molecule comprising the nucleic acid SEQ ID NO. 23844, preferably the coding region thereof, or a homolog or fragment thereof, e.g. derived from Arabidopsis thaliana, is increased or generated. For example the activity of a nucleic acid molecule or a polypeptide comprising the nucleic acid, preferably the coding region thereof, or polypeptide or the consensus sequence or the polypeptide motif, as depicted in Table I, II or IV, application No. 3, column 5 or 8 in the respective same line as the nucleic acid molecule SEQ ID NO. 23844 or polypeptide SEQ ID NO. 23845, respectively, or a homolog or a fragment thereof, is increased or generated, or if the activity monothiol glutaredoxin is increased or generated in a non-human organism, like a microorganism or a plant cell, plant or part thereof, especially with non-targeted localization, whereby the respective line discloses in column 7 aspartate. For example, an increase of the aspartate of at least 1 percent, particularly in a range of 75 to 169-percent is conferred as compared to a corresponding non-transformed wild type non-human organism.

[22328] Accordingly, in one embodiment, an increase of phenylalanine in a non-human organism, as compared to a corresponding non-transformed wild type non-human organism, is conferred in the process of the invention, if the activity of a polypeptide showing the activity of a monothiol glutaredoxin, or if the activity of the polypeptide At4g15690, preferably represented by SEQ ID NO. 23845, or a homolog or fragment thereof, or if the activity of a polypeptide encoded by a nucleic acid molecule comprising the nucleic acid SEQ ID NO. 23844, preferably the coding region thereof, or a homolog or fragment thereof, e.g. derived from Arabidopsis thaliana, is increased or generated. For example the activity of a nucleic acid molecule or a polypeptide comprising the nucleic acid, preferably the coding region thereof, or polypeptide or the consensus sequence or the polypeptide motif, as depicted in Table I, II or IV, application No. 3, column 5 or 8 in the respective same line as the nucleic acid molecule SEQ ID NO. 23844 or polypeptide SEQ ID NO. 23845, respectively, or a homolog or a fragment thereof, is increased or generated, or if the activity monothiol glutaredoxin is increased or generated in a non-human organism, like a microorganism or a plant cell, plant or part thereof, especially with non-targeted localization, whereby the respective line discloses in column 7 phenylalanine. For example, an increase of the phenylalanine of at least 1 percent, particularly in a range of 29 to 90-percent is conferred as compared to a corresponding non-transformed wild type non-human organism.

[22329] Accordingly, in one embodiment, an increase of tyrosine in a non-human organism, as compared to a corresponding non-transformed wild type non-human organism, is conferred in the process of the invention, if the activity of a polypeptide showing the activity of a monothiol glutaredoxin, or if the activity of the polypeptide At4g15690, preferably represented by SEQ ID NO. 23845, or a homolog or fragment thereof, or if the activity of a polypeptide encoded by a nucleic acid molecule comprising the nucleic acid SEQ ID NO. 23844, preferably the coding region thereof, or a homolog or fragment thereof, e.g. derived from Arabidopsis thaliana, is increased or generated. For example the activity of a nucleic acid molecule or a polypeptide comprising the nucleic acid, preferably the coding region thereof, or polypeptide or the consensus sequence or the polypeptide motif, as depicted in Table I, II or IV, application No. 3, column 5 or 8 in the respective same line as the nucleic acid molecule SEQ ID NO. 23844 or polypeptide SEQ ID NO. 23845, respectively, or a homolog or a fragment thereof, is increased or generated, or if the activity monothiol glutaredoxin is increased or generated in a non-human organism, like a microorganism or a plant cell, plant or part thereof, especially with non-targeted localization, whereby the respective line discloses in column 7 tyrosine. For example, an increase of the tyrosine of at least 1 percent, particularly in a range of 41 to 150-percent is conferred as compared to a corresponding non-transformed wild type non-human organism.

[22330] Accordingly, in one embodiment, an increase of 5-oxoproline in a non-human organism, as compared to a corresponding non-transformed wild type non-human organism, is conferred in the process of the invention, if the activity of a polypeptide showing the activity of a monothiol glutaredoxin, or if the activity of the polypeptide At4g15690, preferably represented by SEQ ID NO. 23845, or a homolog or fragment thereof, or if the activity of a polypeptide encoded by a nucleic acid molecule comprising the nucleic acid SEQ ID NO. 23844, preferably the coding region thereof, or a homolog or fragment thereof, e.g. derived from Arabidopsis thaliana, is increased or generated. For example the activity of a nucleic acid molecule or a polypeptide comprising the nucleic acid, preferably the coding region thereof, or polypeptide or the consensus sequence or the polypeptide motif, as depicted in Table I, II or IV, application No. 3, column 5 or 8 in the respective same line as the nucleic acid molecule SEQ ID NO. 23844 or polypeptide SEQ ID NO. 23845, respectively, or a homolog or a fragment thereof, is increased or generated, or if the activity monothiol glutaredoxin is increased or generated in a non-human organism, like a microorganism or a plant cell, plant or part thereof, especially with non-targeted localization, whereby the respective line discloses in column 7 5-oxoproline. For example, an increase of the 5-oxoproline of at least 1 percent, particularly in a range of 36 to 106-percent is conferred as compared to a corresponding non-transformed wild type non-human organism.

[22331] Accordingly, in one embodiment, an increase of tyrosine in a non-human organism, as compared to a corresponding non-transformed wild type non-human organism, is conferred in the process of the invention, if the activity of a polypeptide showing the activity of a monothiol glutaredoxin, or if the activity of the polypeptide At4g15700, preferably represented by SEQ ID NO. 3655, or a homolog or fragment thereof, or if the activity of a polypeptide encoded by a nucleic acid molecule comprising the nucleic acid SEQ ID NO. 3654, preferably the coding region thereof, or a homolog or fragment thereof, e.g. derived from Arabidopsis thaliana, is increased or generated. For example the activity of a nucleic acid molecule or a polypeptide comprising the nucleic acid, preferably the coding region thereof, or polypeptide or the consensus sequence or the polypeptide motif, as depicted in Table I, II or IV, application No. 3, column 5 or 8 in the respective same line as the nucleic acid molecule SEQ ID NO. 3654 or polypeptide SEQ ID NO. 3655, respectively, or a homolog or a fragment thereof, is increased or generated, or if the activity monothiol glutaredoxin is increased or generated in a non-human organism, like a microorganism or a plant cell, plant or part thereof, especially with non-targeted localization, whereby the respective line discloses in column 7 tyrosine. For example, an increase of the tyrosine of at least 1 percent, particularly in a range of 52 to 121-percent is conferred as compared to a corresponding non-transformed wild type non-human organism.

[22332] Accordingly, in one embodiment, an increase of serine in a non-human organism, as compared to a corresponding non-transformed wild type non-human organism, is conferred in the process of the invention, if the activity of a polypeptide showing the activity of a heat shock transcription factor, or if the activity of the polypeptide At4g18880, preferably represented by SEQ ID NO. 24233, or a homolog or fragment thereof, or if the activity of a polypeptide encoded by a nucleic acid molecule comprising the nucleic acid SEQ ID NO. 24232, preferably the coding region thereof, or a homolog or fragment thereof, e.g. derived from Arabidopsis thaliana, is increased or generated. For example the activity of a nucleic acid molecule or a polypeptide comprising the nucleic acid, preferably the coding region thereof, or polypeptide or the consensus sequence or the polypeptide motif, as depicted in Table I, II or IV, application No. 3, column 5 or 8 in the respective same line as the nucleic acid molecule SEQ ID NO. 24232 or polypeptide SEQ ID NO. 24233, respectively, or a homolog or a fragment thereof, is increased or generated, or if the activity heat shock transcription factor is increased or generated in a non-human organism, like a microorganism or a plant cell, plant or part thereof, especially with non-targeted localization, whereby the respective line discloses in column 7 serine. For example, an increase of the serine of at least 1 percent, particularly in a range of 23 to 140-percent is conferred as compared to a corresponding non-transformed wild type non-human organism.

[22333] Accordingly, in one embodiment, an increase of alanine in a non-human organism, as compared to a corresponding non-transformed wild type non-human organism, is conferred in the process of the invention, if the activity of a polypeptide showing the activity of a protein phosphatase, or if the activity of the polypeptide At4g26080, preferably represented by SEQ ID NO. 68850, or a homolog or fragment thereof, or if the activity of a polypeptide encoded by a nucleic acid molecule comprising the nucleic acid SEQ ID NO. 68849, preferably the coding region thereof, or a homolog or fragment thereof, e.g. derived from Arabidopsis thaliana, is increased or generated. For example the activity of a nucleic acid molecule or a polypeptide comprising the nucleic acid, preferably the coding region thereof, or polypeptide or the consensus sequence or the polypeptide motif, as depicted in Table I, II or IV, application No. 3, column 5 or 8 in the respective same line as the nucleic acid molecule SEQ ID NO. 68849 or polypeptide SEQ ID NO. 68850, respectively, or a homolog or a fragment thereof, is increased or generated, or if the activity protein phosphatase is increased or generated in a non-human organism, like a microorganism or a plant cell, plant or part thereof, especially with non-targeted localization, whereby the respective line discloses in column 7 alanine. For example, an increase of the alanine of at least 1 percent, particularly in a range of 24 to 81-percent is conferred as compared to a corresponding non-transformed wild type non-human organism.

[22334] Accordingly, in one embodiment, an increase of aspartate in a non-human organism, as compared to a corresponding non-transformed wild type non-human organism, is conferred in the process of the invention, if the activity of a polypeptide showing the activity of a protein phosphatase, or if the activity of the polypeptide At4g26080, preferably represented by SEQ ID NO. 68850, or a homolog or fragment thereof, or if the activity of a polypeptide encoded by a nucleic acid molecule comprising the nucleic acid SEQ ID NO. 68849, preferably the coding region thereof, or a homolog or fragment thereof, e.g. derived from Arabidopsis thaliana, is increased or generated. For example the activity of a nucleic acid molecule or a polypeptide comprising the nucleic acid, preferably the coding region thereof, or polypeptide or the consensus sequence or the polypeptide motif, as depicted in Table I, II or IV, application No. 3, column 5 or 8 in the respective same line as the nucleic acid molecule SEQ ID NO. 68849 or polypeptide SEQ ID NO. 68850, respectively, or a homolog or a fragment thereof, is increased or generated, or if the activity protein phosphatase is increased or generated in a non-human organism, like a microorganism or a plant cell, plant or part thereof, especially with non-targeted localization, whereby the respective line discloses in column 7 aspartate. For example, an increase of the aspartate of at least 1 percent, particularly in a range of 54 to 123-percent is conferred as compared to a corresponding non-transformed wild type non-human organism.

[22335] Accordingly, in one embodiment, an increase of citrulline in a non-human organism, as compared to a corresponding non-transformed wild type non-human organism, is conferred in the process of the invention, if the activity of a polypeptide showing the activity of a protein phosphatase, or if the activity of the polypeptide At4g26080, preferably represented by SEQ ID NO. 68850, or a homolog or fragment thereof, or if the activity of a polypeptide encoded by a nucleic acid molecule comprising the nucleic acid SEQ ID NO. 68849, preferably the coding region thereof, or a homolog or fragment thereof, e.g. derived from Arabidopsis thaliana, is increased or generated. For example the activity of a nucleic acid molecule or a polypeptide comprising the nucleic acid, preferably the coding region thereof, or polypeptide or the consensus sequence or the polypeptide motif, as depicted in Table I, II or IV, application No. 3, column 5 or 8 in the respective same line as the nucleic acid molecule SEQ ID NO. 68849 or polypeptide SEQ ID NO. 68850, respectively, or a homolog or a fragment thereof, is increased or generated, or if the activity protein phosphatase is increased or generated in a non-human organism, like a microorganism or a plant cell, plant or part thereof, especially with non-targeted localization, whereby the respective line discloses in column 7 citrulline. For example, an increase of the citrulline of at least 1 percent, particularly in a range of 42 to 59-percent is conferred as compared to a corresponding non-transformed wild type non-human organism.

[22336] Accordingly, in one embodiment, an increase of alanine in a non-human organism, as compared to a corresponding non-transformed wild type non-human organism, is conferred in the process of the invention, if the activity of a polypeptide showing the activity of a At4g32480-protein, or if the activity of the polypeptide At4g32480, preferably represented by SEQ ID NO. 4041, or a homolog or fragment thereof, or if the activity of a polypeptide encoded by a nucleic acid molecule comprising the nucleic acid SEQ ID NO. 4040, preferably the coding region thereof, or a homolog or fragment thereof, e.g. derived from Arabidopsis thaliana, is increased or generated. For example the activity of a nucleic acid molecule or a polypeptide comprising the nucleic acid, preferably the coding region thereof, or polypeptide or the consensus sequence or the polypeptide motif, as depicted in Table I, II or IV, application No. 3, column 5 or 8 in the respective same line as the nucleic acid molecule SEQ ID NO. 4040 or polypeptide SEQ ID NO. 4041, respectively, or a homolog or a fragment thereof, is increased or generated, or if the activity At4g32480-protein is increased or generated in a non-human organism, like a microorganism or a plant cell, plant or part thereof, especially with non-targeted localization, whereby the respective line discloses in column 7 alanine. For example, an increase of the alanine of at least 1 percent, particularly in a range of 48 to 318-percent is conferred as compared to a corresponding non-transformed wild type non-human organism.

[22337] Accordingly, in one embodiment, an increase of asparagine in a non-human organism, as compared to a corresponding non-transformed wild type non-human organism, is conferred in the process of the invention, if the activity of a polypeptide showing the activity of a At4g32480protein, or if the activity of the polypeptide At4g32480, preferably represented by SEQ ID NO. 4041, or a homolog or fragment thereof, or if the activity of a polypeptide encoded by a nucleic acid molecule comprising the nucleic acid SEQ ID NO. 4040, preferably the coding region thereof, or a homolog or fragment thereof, e.g. derived from Arabidopsis thaliana, is increased or generated. For example the activity of a nucleic acid molecule or a polypeptide comprising the nucleic acid, preferably the coding region thereof, or polypeptide or the consensus sequence or the polypeptide motif, as depicted in Table I, II or IV, application No. 3, column 5 or 8 in the respective same line as the nucleic acid molecule SEQ ID NO. 4040 or polypeptide SEQ ID NO. 4041, respectively, or a homolog or a fragment thereof, is increased or generated, or if the activity At4g32480-protein is increased or generated in a non-human organism, like a microorganism or a plant cell, plant or part thereof, especially with non-targeted localization, whereby the respective line discloses in column 7 asparagine. For example, an increase of the asparagine of at least 1 percent, particularly in a range of 86 to 1206-percent is conferred as compared to a corresponding non-transformed wild type non-human organism.

[22338] Accordingly, in one embodiment, an increase of glycine in a non-human organism, as compared to a corresponding non-transformed wild type non-human organism, is conferred in the process of the invention, if the activity of a polypeptide showing the activity of a At4g32480-protein, or if the activity of the polypeptide At4g32480, preferably represented by SEQ ID NO. 4041, or a homolog or fragment thereof, or if the activity of a polypeptide encoded by a nucleic acid molecule comprising the nucleic acid SEQ ID NO. 4040, preferably the coding region thereof, or a homolog or fragment thereof, e.g. derived from Arabidopsis thaliana, is increased or generated. For example the activity of a nucleic acid molecule or a polypeptide comprising the nucleic acid, preferably the coding region thereof, or polypeptide or the consensus sequence or the polypeptide motif, as depicted in Table I, II or IV, application No. 3, column 5 or 8 in the respective same line as the nucleic acid molecule SEQ ID NO. 4040 or polypeptide SEQ ID NO. 4041, respectively, or a homolog or a fragment thereof, is increased or generated, or if the activity At4g32480-protein is increased or generated in a non-human organism, like a microorganism or a plant cell, plant or part thereof, especially with non-targeted localization, whereby the respective line discloses in column 7 glycine. For example, an increase of the glycine of at least 1 percent, particularly in a range of 38 to 686-percent is conferred as compared to a corresponding non-transformed wild type non-human organism.

[22339] Accordingly, in one embodiment, an increase of phenylalanine in a non-human organism, as compared to a corresponding non-transformed wild type non-human organism, is conferred in the process of the invention, if the activity of a polypeptide showing the activity of a At4g32480protein, or if the activity of the polypeptide At4g32480, preferably represented by SEQ ID NO. 4041, or a homolog or fragment thereof, or if the activity of a polypeptide encoded by a nucleic acid molecule comprising the nucleic acid SEQ ID NO. 4040, preferably the coding region thereof, or a homolog or fragment thereof, e.g. derived from Arabidopsis thaliana, is increased or generated. For example the activity of a nucleic acid molecule or a polypeptide comprising the nucleic acid, preferably the coding region thereof, or polypeptide or the consensus sequence or the polypeptide motif, as depicted in Table I, II or IV, application No. 3, column 5 or 8 in the respective same line as the nucleic acid molecule SEQ ID NO. 4040 or polypeptide SEQ ID NO. 4041, respectively, or a homolog or a fragment thereof, is increased or generated, or if the activity At4g32480-protein is increased or generated in a non-human organism, like a microorganism or a plant cell, plant or part thereof, especially with non-targeted localization, whereby the respective line discloses in column 7 phenylalanine. For example, an increase of the phenylalanine of at least 1 percent, particularly in a range of 31 to 410-percent is conferred as compared to a corresponding non-transformed wild type non-human organism.

[22340] Accordingly, in one embodiment, an increase of serine in a non-human organism, as compared to a corresponding non-transformed wild type non-human organism, is conferred in the process of the invention, if the activity of a polypeptide showing the activity of a At4g32480-protein, or if the activity of the polypeptide At4g32480, preferably represented by SEQ ID NO. 4041, or a homolog or fragment thereof, or if the activity of a polypeptide encoded by a nucleic acid molecule comprising the nucleic acid SEQ ID NO. 4040, preferably the coding region thereof, or a homolog or fragment thereof, e.g. derived from Arabidopsis thaliana, is increased or generated. For example the activity of a nucleic acid molecule or a polypeptide comprising the nucleic acid, preferably the coding region thereof, or polypeptide or the consensus sequence or the polypeptide motif, as depicted in Table I, II or IV, application No. 3, column 5 or 8 in the respective same line as the nucleic acid molecule SEQ ID NO. 4040 or polypeptide SEQ ID NO. 4041, respectively, or a homolog or a fragment thereof, is increased or generated, or if the activity At4g32480-protein is increased or generated in a non-human organism, like a microorganism or a plant cell, plant or part thereof, especially with non-targeted localization, whereby the respective line discloses in column 7 serine. For example, an increase of the serine of at least 1 percent, particularly in a range of 40 to 98-percent is conferred as compared to a corresponding non-transformed wild type non-human organism.

[22341] Accordingly, in one embodiment, an increase of tyrosine in a non-human organism, as compared to a corresponding non-transformed wild type non-human organism, is conferred in the process of the invention, if the activity of a polypeptide showing the activity of a At4g32480-protein, or if the activity of the polypeptide At4g32480, preferably represented by SEQ ID NO. 4041, or a homolog or fragment thereof, or if the activity of a polypeptide encoded by a nucleic acid molecule comprising the nucleic acid SEQ ID NO. 4040, preferably the coding region thereof, or a homolog or fragment thereof, e.g. derived from Arabidopsis thaliana, is increased or generated. For example the activity of a nucleic acid molecule or a polypeptide comprising the nucleic acid, preferably the coding region thereof, or polypeptide or the consensus sequence or the polypeptide motif, as depicted in Table I, II or IV, application No. 3, column 5 or 8 in the respective same line as the nucleic acid molecule SEQ ID NO. 4040 or polypeptide SEQ ID NO. 4041, respectively, or a homolog or a fragment thereof, is increased or generated, or if the activity At4g32480-protein is increased or generated in a non-human organism, like a microorganism or a plant cell, plant or part thereof, especially with non-targeted localization, whereby the respective line discloses in column 7 tyrosine. For example, an increase of the tyrosine of at least 1 percent, particularly in a range of 54 to 437-percent is conferred as compared to a corresponding non-transformed wild type non-human organism.

[22342] Accordingly, in one embodiment, an increase of aspartate in a non-human organism, as compared to a corresponding non-transformed wild type non-human organism, is conferred in the process of the invention, if the activity of a polypeptide showing the activity of a glutaredoxin, or if the activity of the polypeptide At4g33040, preferably represented by SEQ ID NO. 4103, or a homolog or fragment thereof, or if the activity of a polypeptide encoded by a nucleic acid molecule comprising the nucleic acid SEQ ID NO. 4102, preferably the coding region thereof, or a homolog or fragment thereof, e.g. derived from Arabidopsis thaliana, is increased or generated. For example the activity of a nucleic acid molecule or a polypeptide comprising the nucleic acid, preferably the coding region thereof, or polypeptide or the consensus sequence or the polypeptide motif, as depicted in Table I, II or IV, application No. 3, column 5 or 8 in the respective same line as the nucleic acid molecule SEQ ID NO. 4102 or polypeptide SEQ ID NO. 4103, respectively, or a homolog or a fragment thereof, is increased or generated, or if the activity glutaredoxin is increased or generated in a non-human organism, like a microorganism or a plant cell, plant or part thereof, especially with non-targeted localization, whereby the respective line discloses in column 7 aspartate. For example, an increase of the aspartate of at least 1 percent, particularly in a range of 48 to 194-percent is conferred as compared to a corresponding non-transformed wild type non-human organism.

[22343] Accordingly, in one embodiment, an increase of citrulline in a non-human organism, as compared to a corresponding non-transformed wild type non-human organism, is conferred in the process of the invention, if the activity of a polypeptide showing the activity of a glutaredoxin, or if the activity of the polypeptide At4g33040, preferably represented by SEQ ID NO. 4103, or a homolog or fragment thereof, or if the activity of a polypeptide encoded by a nucleic acid molecule comprising the nucleic acid SEQ ID NO. 4102, preferably the coding region thereof, or a homolog or fragment thereof, e.g. derived from Arabidopsis thaliana, is increased or generated. For example the activity of a nucleic acid molecule or a polypeptide comprising the nucleic acid, preferably the coding region thereof, or polypeptide or the consensus sequence or the polypeptide motif, as depicted in Table I, II or IV, application No. 3, column 5 or 8 in the respective same line as the nucleic acid molecule SEQ ID NO. 4102 or polypeptide SEQ ID NO. 4103, respectively, or a homolog or a fragment thereof, is increased or generated, or if the activity glutaredoxin is increased or generated in a non-human organism, like a microorganism or a plant cell, plant or part thereof, especially with non-targeted localization, whereby the respective line discloses in column 7 citrulline. For example, an increase of the citrulline of at least 1 percent, particularly in a range of 30 to 52-percent is conferred as compared to a corresponding non-transformed wild type non-human organism.

[22344] Accordingly, in one embodiment, an increase of phenylalanine in a non-human organism, as compared to a corresponding non-transformed wild type non-human organism, is conferred in the process of the invention, if the activity of a polypeptide showing the activity of a cyclin D , or if the activity of the polypeptide At4g34160, preferably represented by SEQ ID NO. 24312, or a homolog or fragment thereof, or if the activity of a polypeptide encoded by a nucleic acid molecule comprising the nucleic acid SEQ ID NO. 24311, preferably the coding region thereof, or a homolog or fragment thereof, e.g. derived from Arabidopsis thaliana, is increased or generated. For example the activity of a nucleic acid molecule or a polypeptide comprising the nucleic acid, preferably the coding region thereof, or polypeptide or the consensus sequence or the polypeptide motif, as depicted in Table I, II or IV, application No. 3, column 5 or 8 in the respective same line as the nucleic acid molecule SEQ ID NO. 24311 or polypeptide SEQ ID NO. 24312, respectively, or a homolog or a fragment thereof, is increased or generated, or if the activity cyclin D is increased or generated in a non-human organism, like a microorganism or a plant cell, plant or part thereof, especially with non-targeted localization, whereby the respective line discloses in column 7 phenylalanine. For example, an increase of the phenylalanine of at least 1 percent, particularly in a range of 29 to 152-percent is conferred as compared to a corresponding non-transformed wild type non-human organism.

[22345] Accordingly, in one embodiment, an increase of asparagine in a non-human organism, as compared to a corresponding non-transformed wild type non-human organism, is conferred in the process of the invention, if the activity of a polypeptide showing the activity of a calcium-dependent protein kinase, or if the activity of the polypeptide At4g35310, preferably represented by SEQ ID NO. 4349, or a homolog or fragment thereof, or if the activity of a polypeptide encoded by a nucleic acid molecule comprising the nucleic acid SEQ ID NO. 4348, preferably the coding region thereof, or a homolog or fragment thereof, e.g. derived from Arabidopsis thaliana, is increased or generated. For example the activity of a nucleic acid molecule or a polypeptide comprising the nucleic acid, preferably the coding region thereof, or polypeptide or the consensus sequence or the polypeptide motif, as depicted in Table I, II or IV, application No. 3, column 5 or 8 in the respective same line as the nucleic acid molecule SEQ ID NO. 4348 or polypeptide SEQ ID NO. 4349, respectively, or a homolog or a fragment thereof, is increased or generated, or if the activity calcium-dependent protein kinase is increased or generated in a non-human organism, like a microorganism or a plant cell, plant or part thereof, especially with non-targeted localization, whereby the respective line discloses in column 7 asparagine. For example, an increase of the asparagine of at least 1 percent, particularly in a range of 52 to 443-percent is conferred as compared to a corresponding non-transformed wild type non-human organism.

[22346] Accordingly, in one embodiment, an increase of phenylalanine in a non-human organism, as compared to a corresponding non-transformed wild type non-human organism, is conferred in the process of the invention, if the activity of a polypeptide showing the activity of a calcium-dependent protein kinase, or if the activity of the polypeptide At4g35310, preferably represented by SEQ ID NO. 4349, or a homolog or fragment thereof, or if the activity of a polypeptide encoded by a nucleic acid molecule comprising the nucleic acid SEQ ID NO. 4348, preferably the coding region thereof, or a homolog or fragment thereof, e.g. derived from Arabidopsis thaliana, is increased or generated. For example the activity of a nucleic acid molecule or a polypeptide comprising the nucleic acid, preferably the coding region thereof, or polypeptide or the consensus sequence or the polypeptide motif, as depicted in Table I, II or IV, application No. 3, column 5 or 8 in the respective same line as the nucleic acid molecule SEQ ID NO. 4348 or polypeptide SEQ ID NO. 4349, respectively, or a homolog or a fragment thereof, is increased or generated, or if the activity calcium-dependent protein kinase is increased or generated in a non-human organism, like a microorganism or a plant cell, plant or part thereof, especially with non-targeted localization, whereby the respective line discloses in column 7 phenylalanine. For example, an increase of the phenylalanine of at least 1 percent, particularly in a range of 191 to 534-percent is conferred as compared to a corresponding non-transformed wild type non-human organism.

[22347] Accordingly, in one embodiment, an increase of serine in a non-human organism, as compared to a corresponding non-transformed wild type non-human organism, is conferred in the process of the invention, if the activity of a polypeptide showing the activity of a calcium-dependent protein kinase, or if the activity of the polypeptide At4g35310, preferably represented by SEQ ID NO. 4349, or a homolog or fragment thereof, or if the activity of a polypeptide encoded by a nucleic acid molecule comprising the nucleic acid SEQ ID NO. 4348, preferably the coding region thereof, or a homolog or fragment thereof, e.g. derived from Arabidopsis thaliana, is increased or generated. For example the activity of a nucleic acid molecule or a polypeptide comprising the nucleic acid, preferably the coding region thereof, or polypeptide or the consensus sequence or the polypeptide motif, as depicted in Table I, II or IV, application No. 3, column 5 or 8 in the respective same line as the nucleic acid molecule SEQ ID NO. 4348 or polypeptide SEQ ID NO. 4349, respectively, or a homolog or a fragment thereof, is increased or generated, or if the activity calcium-dependent protein kinase is increased or generated in a non-human organism, like a microorganism or a plant cell, plant or part thereof, especially with non-targeted localization, whereby the respective line discloses in column 7 serine. For example, an increase of the serine of at least 1 percent, particularly in a range of 67 to 140-percent is conferred as compared to a corresponding non-transformed wild type non-human organism.

[22348] Accordingly, in one embodiment, an increase of tyrosine in a non-human organism, as compared to a corresponding non-transformed wild type non-human organism, is conferred in the process of the invention, if the activity of a polypeptide showing the activity of a calcium-dependent protein kinase, or if the activity of the polypeptide At4g35310, preferably represented by SEQ ID NO. 4349, or a homolog or fragment thereof, or if the activity of a polypeptide encoded by a nucleic acid molecule comprising the nucleic acid SEQ ID NO. 4348, preferably the coding region thereof, or a homolog or fragment thereof, e.g. derived from Arabidopsis thaliana, is increased or generated. For example the activity of a nucleic acid molecule or a polypeptide comprising the nucleic acid, preferably the coding region thereof, or polypeptide or the consensus sequence or the polypeptide motif, as depicted in Table I, II or IV, application No. 3, column 5 or 8 in the respective same line as the nucleic acid molecule SEQ ID NO. 4348 or polypeptide SEQ ID NO. 4349, respectively, or a homolog or a fragment thereof, is increased or generated, or if the activity calcium-dependent protein kinase is increased or generated in a non-human organism, like a microorganism or a plant cell, plant or part thereof, especially with non-targeted localization, whereby the respective line discloses in column 7 tyrosine. For example, an increase of the tyrosine of at least 1 percent, particularly in a range of 149 to 427-percent is conferred as compared to a corresponding non-transformed wild type non-human organism.

[22349] Accordingly, in one embodiment, an increase of 5-oxoproline in a non-human organism, as compared to a corresponding non-transformed wild type non-human organism, is conferred in the process of the invention, if the activity of a polypeptide showing the activity of a calcium-dependent protein kinase, or if the activity of the polypeptide At4g35310, preferably represented by SEQ ID NO. 4349, or a homolog or fragment thereof, or if the activity of a polypeptide encoded by a nucleic acid molecule comprising the nucleic acid SEQ ID NO. 4348, preferably the coding region thereof, or a homolog or fragment thereof, e.g. derived from Arabidopsis thaliana, is increased or generated. For example the activity of a nucleic acid molecule or a polypeptide comprising the nucleic acid, preferably the coding region thereof, or polypeptide or the consensus sequence or the polypeptide motif, as depicted in Table I, II or IV, application No. 3, column 5 or 8 in the respective same line as the nucleic acid molecule SEQ ID NO. 4348 or polypeptide SEQ ID NO. 4349, respectively, or a homolog or a fragment thereof, is increased or generated, or if the activity calcium-dependent protein kinase is increased or generated in a non-human organism, like a microorganism or a plant cell, plant or part thereof, especially with non-targeted localization, whereby the respective line discloses in column 7 5-oxoproline. For example, an increase of the 5-oxoproline of at least 1 percent, particularly in a range of 99 to 175-percent is conferred as compared to a corresponding non-transformed wild type non-human organism.

[22350] Accordingly, in one embodiment, an increase of tyrosine in a non-human organism, as compared to a corresponding non-transformed wild type non-human organism, is conferred in the process of the invention, if the activity of a polypeptide showing the activity of a protein phosphatase, or if the activity of the polypeptide At5g02760, preferably represented by SEQ ID NO. 68988, or a homolog or fragment thereof, or if the activity of a polypeptide encoded by a nucleic acid molecule comprising the nucleic acid SEQ ID NO. 68987, preferably the coding region thereof, or a homolog or fragment thereof, e.g. derived from Arabidopsis thaliana, is increased or generated. For example the activity of a nucleic acid molecule or a polypeptide comprising the nucleic acid, preferably the coding region thereof, or polypeptide or the consensus sequence or the polypeptide motif, as depicted in Table I, II or IV, application No. 3, column 5 or 8 in the respective same line as the nucleic acid molecule SEQ ID NO. 68987 or polypeptide SEQ ID NO. 68988, respectively, or a homolog or a fragment thereof, is increased or generated, or if the activity protein phosphatase is increased or generated in a non-human organism, like a microorganism or a plant cell, plant or part thereof, especially with non-targeted localization, whereby the respective line discloses in column 7 tyrosine. For example, an increase of the tyrosine of at least 1 percent, particularly in a range of 54 to 95-percent is conferred as compared to a corresponding non-transformed wild type non-human organism.

[22351] Accordingly, in one embodiment, an increase of aspartate in a non-human organism, as compared to a corresponding non-transformed wild type non-human organism, is conferred in the process of the invention, if the activity of a polypeptide showing the activity of a heat shock transcription factor, or if the activity of the polypeptide At5g03720, preferably represented by SEQ ID NO. 24439, or a homolog or fragment thereof, or if the activity of a polypeptide encoded by a nucleic acid molecule comprising the nucleic acid SEQ ID NO. 24438, preferably the coding region thereof, or a homolog or fragment thereof, e.g. derived from Arabidopsis thaliana, is increased or generated. For example the activity of a nucleic acid molecule or a polypeptide comprising the nucleic acid, preferably the coding region thereof, or polypeptide or the consensus sequence or the polypeptide motif, as depicted in Table I, II or IV, application No. 3, column 5 or 8 in the respective same line as the nucleic acid molecule SEQ ID NO. 24438 or polypeptide SEQ ID NO. 24439, respectively, or a homolog or a fragment thereof, is increased or generated, or if the activity heat shock transcription factor is increased or generated in a non-human organism, like a microorganism or a plant cell, plant or part thereof, especially with non-targeted localization, whereby the respective line discloses in column 7 aspartate. For example, an increase of the aspartate of at least 1 percent, particularly in a range of 56 to 212-percent is conferred as compared to a corresponding non-transformed wild type non-human organism.

[22352] Accordingly, in one embodiment, an increase of 3,4-dihydroxyphenylalanine (dopa) in a non-human organism, as compared to a corresponding non-transformed wild type non-human organism, is conferred in the process of the invention, if the activity of a polypeptide showing the activity of a heat shock transcription factor, or if the activity of the polypeptide At5g03720, preferably represented by SEQ ID NO. 24439, or a homolog or fragment thereof, or if the activity of a polypeptide encoded by a nucleic acid molecule comprising the nucleic acid SEQ ID NO. 24438, preferably the coding region thereof, or a homolog or fragment thereof, e.g. derived from Arabidopsis thaliana, is increased or generated. For example the activity of a nucleic acid molecule or a polypeptide comprising the nucleic acid, preferably the coding region thereof, or polypeptide or the consensus sequence or the polypeptide motif, as depicted in Table I, II or IV, application No. 3, column 5 or 8 in the respective same line as the nucleic acid molecule SEQ ID NO. 24438 or polypeptide SEQ ID NO. 24439, respectively, or a homolog or a fragment thereof, is increased or generated, or if the activity heat shock transcription factor is increased or generated in a non-human organism, like a microorganism or a plant cell, plant or part thereof, especially with non-targeted localization, whereby the respective line discloses in column 7 3,4-dihydroxyphenylalanine (dopa). For example, an increase of the 3,4-dihydroxyphenylalanine (dopa) of at least 1 percent, particularly in a range of 48 to 124-percent is conferred as compared to a corresponding non-transformed wild type non-human organism.

[22353] Accordingly, in one embodiment, an increase of phenylalanine in a non-human organism, as compared to a corresponding non-transformed wild type non-human organism, is conferred in the process of the invention, if the activity of a polypeptide showing the activity of a gibberellin 20-oxidase, or if the activity of the polypeptide At5g07200, preferably represented by SEQ ID NO. 24493, or a homolog or fragment thereof, or if the activity of a polypeptide encoded by a nucleic acid molecule comprising the nucleic acid SEQ ID NO. 24492, preferably the coding region thereof, or a homolog or fragment thereof, e.g. derived from Arabidopsis thaliana, is increased or generated. For example the activity of a nucleic acid molecule or a polypeptide comprising the nucleic acid, preferably the coding region thereof, or polypeptide or the consensus sequence or the polypeptide motif, as depicted in Table I, II or IV, application No. 3, column 5 or 8 in the respective same line as the nucleic acid molecule SEQ ID NO. 24492 or polypeptide SEQ ID NO. 24493, respectively, or a homolog or a fragment thereof, is increased or generated, or if the activity gibberellin 20-oxidase is increased or generated in a non-human organism, like a microorganism or a plant cell, plant or part thereof, especially with non-targeted localization, whereby the respective line discloses in column 7 phenylalanine. For example, an increase of the phenylalanine of at least 1 percent, particularly in a range of 30 to 100-percent is conferred as compared to a corresponding non-transformed wild type non-human organism.

[22354] Accordingly, in one embodiment, an increase of serine in a non-human organism, as compared to a corresponding non-transformed wild type non-human organism, is conferred in the process of the invention, if the activity of a polypeptide showing the activity of a gibberellin 20-oxidase, or if the activity of the polypeptide At5g07200, preferably represented by SEQ ID NO. 24493, or a homolog or fragment thereof, or if the activity of a polypeptide encoded by a nucleic acid molecule comprising the nucleic acid SEQ ID NO. 24492, preferably the coding region thereof, or a homolog or fragment thereof, e.g. derived from Arabidopsis thaliana, is increased or generated. For example the activity of a nucleic acid molecule or a polypeptide comprising the nucleic acid, preferably the coding region thereof, or polypeptide or the consensus sequence or the polypeptide motif, as depicted in Table I, II or IV, application No. 3, column 5 or 8 in the respective same line as the nucleic acid molecule SEQ ID NO. 24492 or polypeptide SEQ ID NO. 24493, respectively, or a homolog or a fragment thereof, is increased or generated, or if the activity gibberellin 20-oxidase is increased or generated in a non-human organism, like a microorganism or a plant cell, plant or part thereof, especially with non-targeted localization, whereby the respective line discloses in column 7 serine. For example, an increase of the serine of at least 1 percent, particularly in a range of 24 to 98-percent is conferred as compared to a corresponding non-transformed wild type non-human organism.

[22355] Accordingly, in one embodiment, an increase of serine in a non-human organism, as compared to a corresponding non-transformed wild type non-human organism, is conferred in the process of the invention, if the activity of a polypeptide showing the activity of a integral membrane transporter family protein, or if the activity of the polypeptide At5g10820, preferably represented by SEQ ID NO. 25223, or a homolog or fragment thereof, or if the activity of a polypeptide encoded by a nucleic acid molecule comprising the nucleic acid SEQ ID NO. 25222, preferably the coding region thereof, or a homolog or fragment thereof, e.g. derived from Arabidopsis thaliana, is increased or generated. For example the activity of a nucleic acid molecule or a polypeptide comprising the nucleic acid, preferably the coding region thereof, or polypeptide or the consensus sequence or the polypeptide motif, as depicted in Table I, II or IV, application No. 3, column 5 or 8 in the respective same line as the nucleic acid molecule SEQ ID NO. 25222 or polypeptide SEQ ID NO. 25223, respectively, or a homolog or a fragment thereof, is increased or generated, or if the activity integral membrane transporter family protein is increased or generated in a non-human organism, like a microorganism or a plant cell, plant or part thereof, especially with non-targeted localization, whereby the respective line discloses in column 7 serine. For example, an increase of the serine of at least 1 percent, particularly in a range of 26 to 72-percent is conferred as compared to a corresponding non-transformed wild type non-human organism.

[22356] Accordingly, in one embodiment, an increase of phenylalanine in a non-human organism, as compared to a corresponding non-transformed wild type non-human organism, is conferred in the process of the invention, if the activity of a polypeptide showing the activity of a glutaredoxin, or if the activity of the polypeptide At5g14070, preferably represented by SEQ ID NO. 69276, or a homolog or fragment thereof, or if the activity of a polypeptide encoded by a nucleic acid molecule comprising the nucleic acid SEQ ID NO. 69275, preferably the coding region thereof, or a homolog or fragment thereof, e.g. derived from Arabidopsis thaliana, is increased or generated. For example the activity of a nucleic acid molecule or a polypeptide comprising the nucleic acid, preferably the coding region thereof, or polypeptide or the consensus sequence or the polypeptide motif, as depicted in Table I, II or IV, application No. 3, column 5 or 8 in the respective same line as the nucleic acid molecule SEQ ID NO. 69275 or polypeptide SEQ ID NO. 69276, respectively, or a homolog or a fragment thereof, is increased or generated, or if the activity glutaredoxin is increased or generated in a non-human organism, like a microorganism or a plant cell, plant or part thereof, especially with non-targeted localization, whereby the respective line discloses in column 7 phenylalanine. For example, an increase of the phenylalanine of at least 1 percent, particularly in a range of 27 to 127-percent is conferred as compared to a corresponding non-transformed wild type non-human organism.

[22357] Accordingly, in one embodiment, an increase of asparagine in a non-human organism, as compared to a corresponding non-transformed wild type non-human organism, is conferred in the process of the invention, if the activity of a polypeptide showing the activity of a At5g16650-protein, or if the activity of the polypeptide At5g16650, preferably represented by SEQ ID NO. 25284, or a homolog or fragment thereof, or if the activity of a polypeptide encoded by a nucleic acid molecule comprising the nucleic acid SEQ ID NO. 25283, preferably the coding region thereof, or a homolog or fragment thereof, e.g. derived from Arabidopsis thaliana, is increased or generated. For example the activity of a nucleic acid molecule or a polypeptide comprising the nucleic acid, preferably the coding region thereof, or polypeptide or the consensus sequence or the polypeptide motif, as depicted in Table I, II or IV, application No. 3, column 5 or 8 in the respective same line as the nucleic acid molecule SEQ ID NO. 25283 or polypeptide SEQ ID NO. 25284, respectively, or a homolog or a fragment thereof, is increased or generated, or if the activity At5g16650-protein is increased or generated in a non-human organism, like a microorganism or a plant cell, plant or part thereof, especially with non-targeted localization, whereby the respective line discloses in column 7 asparagine. For example, an increase of the asparagine of at least 1 percent, particularly in a range of 48 to 386-percent is conferred as compared to a corresponding non-transformed wild type non-human organism.

[22358] Accordingly, in one embodiment, an increase of aspartate in a non-human organism, as compared to a corresponding non-transformed wild type non-human organism, is conferred in the process of the invention, if the activity of a polypeptide showing the activity of a At5g16650-protein, or if the activity of the polypeptide At5g16650, preferably represented by SEQ ID NO. 25284, or a homolog or fragment thereof, or if the activity of a polypeptide encoded by a nucleic acid molecule comprising the nucleic acid SEQ ID NO. 25283, preferably the coding region thereof, or a homolog or fragment thereof, e.g. derived from Arabidopsis thaliana, is increased or generated. For example the activity of a nucleic acid molecule or a polypeptide comprising the nucleic acid, preferably the coding region thereof, or polypeptide or the consensus sequence or the polypeptide motif, as depicted in Table I, II or IV, application No. 3, column 5 or 8 in the respective same line as the nucleic acid molecule SEQ ID NO. 25283 or polypeptide SEQ ID NO. 25284, respectively, or a homolog or a fragment thereof, is increased or generated, or if the activity At5g16650-protein is increased or generated in a non-human organism, like a microorganism or a plant cell, plant or part thereof, especially with non-targeted localization, whereby the respective line discloses in column 7 aspartate. For example, an increase of the aspartate of at least 1 percent, particularly in a range of 48 to 224-percent is conferred as compared to a corresponding non-transformed wild type non-human organism.

[22359] Accordingly, in one embodiment, an increase of serine in a non-human organism, as compared to a corresponding non-transformed wild type non-human organism, is conferred in the process of the invention, if the activity of a polypeptide showing the activity of a At5g16650-protein, or if the activity of the polypeptide At5g16650, preferably represented by SEQ ID NO. 25284, or a homolog or fragment thereof, or if the activity of a polypeptide encoded by a nucleic acid molecule comprising the nucleic acid SEQ ID NO. 25283, preferably the coding region thereof, or a homolog or fragment thereof, e.g. derived from Arabidopsis thaliana, is increased or generated. For example the activity of a nucleic acid molecule or a polypeptide comprising the nucleic acid, preferably the coding region thereof, or polypeptide or the consensus sequence or the polypeptide motif, as depicted in Table I, II or IV, application No. 3, column 5 or 8 in the respective same line as the nucleic acid molecule SEQ ID NO. 25283 or polypeptide SEQ ID NO. 25284, respectively, or a homolog or a fragment thereof, is increased or generated, or if the activity At5g16650-protein is increased or generated in a non-human organism, like a microorganism or a plant cell, plant or part thereof, especially with non-targeted localization, whereby the respective line discloses in column 7 serine. For example, an increase of the serine of at least 1 percent, particularly in a range of 35 to 139-percent is conferred as compared to a corresponding non-transformed wild type non-human organism.

[22360] Accordingly, in one embodiment, an increase of 5-oxoproline in a non-human organism, as compared to a corresponding non-transformed wild type non-human organism, is conferred in the process of the invention, if the activity of a polypeptide showing the activity of a At5g16650-protein, or if the activity of the polypeptide At5g16650, preferably represented by SEQ ID NO. 25284, or a homolog or fragment thereof, or if the activity of a polypeptide encoded by a nucleic acid molecule comprising the nucleic acid SEQ ID NO. 25283, preferably the coding region thereof, or a homolog or fragment thereof, e.g. derived from Arabidopsis thaliana, is increased or generated. For example the activity of a nucleic acid molecule or a polypeptide comprising the nucleic acid, preferably the coding region thereof, or polypeptide or the consensus sequence or the polypeptide motif, as depicted in Table I, II or IV, application No. 3, column 5 or 8 in the respective same line as the nucleic acid molecule SEQ ID NO. 25283 or polypeptide SEQ ID NO. 25284, respectively, or a homolog or a fragment thereof, is increased or generated, or if the activity At5g16650-protein is increased or generated in a non-human organism, like a microorganism or a plant cell, plant or part thereof, especially with non-targeted localization, whereby the respective line discloses in column 7 5-oxoproline. For example, an increase of the 5-oxoproline of at least 1 percent, particularly in a range of 45 to 158-percent is conferred as compared to a corresponding non-transformed wild type non-human organism.

[22361] Accordingly, in one embodiment, an increase of phenylalanine in a non-human organism, as compared to a corresponding non-transformed wild type non-human organism, is conferred in the process of the invention, if the activity of a polypeptide showing the activity of a monothiol glutaredoxin, or if the activity of the polypeptide At5g18600, preferably represented by SEQ ID NO. 4905, or a homolog or fragment thereof, or if the activity of a polypeptide encoded by a nucleic acid molecule comprising the nucleic acid SEQ ID NO. 4904, preferably the coding region thereof, or a homolog or fragment thereof, e.g. derived from Arabidopsis thaliana, is increased or generated. For example the activity of a nucleic acid molecule or a polypeptide comprising the nucleic acid, preferably the coding region thereof, or polypeptide or the consensus sequence or the polypeptide motif, as depicted in Table I, II or IV, application No. 3, column 5 or 8 in the respective same line as the nucleic acid molecule SEQ ID NO. 4904 or polypeptide SEQ ID NO. 4905, respectively, or a homolog or a fragment thereof, is increased or generated, or if the activity monothiol glutaredoxin is increased or generated in a non-human organism, like a microorganism or a plant cell, plant or part thereof, especially with non-targeted localization, whereby the respective line discloses in column 7 phenylalanine. For example, an increase of the phenylalanine of at least 1 percent, particularly in a range of 43 to 184-percent is conferred as compared to a corresponding non-transformed wild type non-human organism.

[22362] Accordingly, in one embodiment, an increase of tyrosine in a non-human organism, as compared to a corresponding non-transformed wild type non-human organism, is conferred in the process of the invention, if the activity of a polypeptide showing the activity of a monothiol glutaredoxin, or if the activity of the polypeptide At5g18600, preferably represented by SEQ ID NO. 4905, or a homolog or fragment thereof, or if the activity of a polypeptide encoded by a nucleic acid molecule comprising the nucleic acid SEQ ID NO. 4904, preferably the coding region thereof, or a homolog or fragment thereof, e.g. derived from Arabidopsis thaliana, is increased or generated. For example the activity of a nucleic acid molecule or a polypeptide comprising the nucleic acid, preferably the coding region thereof, or polypeptide or the consensus sequence or the polypeptide motif, as depicted in Table I, II or IV, application No. 3, column 5 or 8 in the respective same line as the nucleic acid molecule SEQ ID NO. 4904 or polypeptide SEQ ID NO. 4905, respectively, or a homolog or a fragment thereof, is increased or generated, or if the activity monothiol glutaredoxin is increased or generated in a non-human organism, like a microorganism or a plant cell, plant or part thereof, especially with non-targeted localization, whereby the respective line discloses in column 7 tyrosine. For example, an increase of the tyrosine of at least 1 percent, particularly in a range of 66 to 212-percent is conferred as compared to a corresponding non-transformed wild type non-human organism.

[22363] Accordingly, in one embodiment, an increase of phenylalanine in a non-human organism, as compared to a corresponding non-transformed wild type non-human organism, is conferred in the process of the invention, if the activity of a polypeptide showing the activity of a at5g21910protein, or if the activity of the polypeptide At5g21910, preferably represented by SEQ ID NO. 69554, or a homolog or fragment thereof, or if the activity of a polypeptide encoded by a nucleic acid molecule comprising the nucleic acid SEQ ID NO. 69553, preferably the coding region thereof, or a homolog or fragment thereof, e.g. derived from Arabidopsis thaliana, is increased or generated. For example the activity of a nucleic acid molecule or a polypeptide comprising the nucleic acid, preferably the coding region thereof, or polypeptide or the consensus sequence or the polypeptide motif, as depicted in Table I, II or IV, application No. 3, column 5 or 8 in the respective same line as the nucleic acid molecule SEQ ID NO. 69553 or polypeptide SEQ ID NO. 69554, respectively, or a homolog or a fragment thereof, is increased or generated, or if the activity at5g21910-protein is increased or generated in a non-human organism, like a microorganism or a plant cell, plant or part thereof, especially with non-targeted localization, whereby the respective line discloses in column 7 phenylalanine. For example, an increase of the phenylalanine of at least 1 percent, particularly in a range of 29 to 67-percent is conferred as compared to a corresponding non-transformed wild type non-human organism.

[22364] Accordingly, in one embodiment, an increase of tyrosine in a non-human organism, as compared to a corresponding non-transformed wild type non-human organism, is conferred in the process of the invention, if the activity of a polypeptide showing the activity of a transcription factor, or if the activity of the polypeptide At5g39760, preferably represented by SEQ ID NO. 25429, or a homolog or fragment thereof, or if the activity of a polypeptide encoded by a nucleic acid molecule comprising the nucleic acid SEQ ID NO. 25428, preferably the coding region thereof, or a homolog or fragment thereof, e.g. derived from Arabidopsis thaliana, is increased or generated. For example the activity of a nucleic acid molecule or a polypeptide comprising the nucleic acid, preferably the coding region thereof, or polypeptide or the consensus sequence or the polypeptide motif, as depicted in Table I, II or IV, application No. 3, column 5 or 8 in the respective same line as the nucleic acid molecule SEQ ID NO. 25428 or polypeptide SEQ ID NO. 25429, respectively, or a homolog or a fragment thereof, is increased or generated, or if the activity transcription factor is increased or generated in a non-human organism, like a microorganism or a plant cell, plant or part thereof, especially with non-targeted localization, whereby the respective line discloses in column 7 tyrosine. For example, an increase of the tyrosine of at least 1 percent, particularly in a range of 53 to 87-percent is conferred as compared to a corresponding non-transformed wild type non-human organism.

[22365] Accordingly, in one embodiment, an increase of serine in a non-human organism, as compared to a corresponding non-transformed wild type non-human organism, is conferred in the process of the invention, if the activity of a polypeptide showing the activity of a thioredoxin, or if the activity of the polypeptide At5g39950, preferably represented by SEQ ID NO. 69575, or a homolog or fragment thereof, or if the activity of a polypeptide encoded by a nucleic acid molecule comprising the nucleic acid SEQ ID NO. 69574, preferably the coding region thereof, or a homolog or fragment thereof, e.g. derived from Arabidopsis thaliana, is increased or generated. For example the activity of a nucleic acid molecule or a polypeptide comprising the nucleic acid, preferably the coding region thereof, or polypeptide or the consensus sequence or the polypeptide motif, as depicted in Table I, II or IV, application No. 3, column 5 or 8 in the respective same line as the nucleic acid molecule SEQ ID NO. 69574 or polypeptide SEQ ID NO. 69575, respectively, or a homolog or a fragment thereof, is increased or generated, or if the activity thioredoxin is increased or generated in a non-human organism, like a microorganism or a plant cell, plant or part thereof, especially with non-targeted localization, whereby the respective line discloses in column 7 serine. For example, an increase of the serine of at least 1 percent, particularly in a range of 25 to 57-percent is conferred as compared to a corresponding non-transformed wild type non-human organism.

[22366] Accordingly, in one embodiment, an increase of alanine in a non-human organism, as compared to a corresponding non-transformed wild type non-human organism, is conferred in the process of the invention, if the activity of a polypeptide showing the activity of a protein phosphatase, or if the activity of the polypeptide At5g57050, preferably represented by SEQ ID NO. 5319, or a homolog or fragment thereof, or if the activity of a polypeptide encoded by a nucleic acid molecule comprising the nucleic acid SEQ ID NO. 5318, preferably the coding region thereof, or a homolog or fragment thereof, e.g. derived from Arabidopsis thaliana, is increased or generated. For example the activity of a nucleic acid molecule or a polypeptide comprising the nucleic acid, preferably the coding region thereof, or polypeptide or the consensus sequence or the polypeptide motif, as depicted in Table I, II or IV, application No. 3, column 5 or 8 in the respective same line as the nucleic acid molecule SEQ ID NO. 5318 or polypeptide SEQ ID NO. 5319, respectively, or a homolog or a fragment thereof, is increased or generated, or if the activity protein phosphatase is increased or generated in a non-human organism, like a microorganism or a plant cell, plant or part thereof, especially with non-targeted localization, whereby the respective line discloses in column 7 alanine. For example, an increase of the alanine of at least 1 percent, particularly in a range of 31 to 116-percent is conferred as compared to a corresponding non-transformed wild type non-human organism.

[22367] Accordingly, in one embodiment, an increase of citrulline in a non-human organism, as compared to a corresponding non-transformed wild type non-human organism, is conferred in the process of the invention, if the activity of a polypeptide showing the activity of a protein phosphatase, or if the activity of the polypeptide At5g57050, preferably represented by SEQ ID NO. 5319, or a homolog or fragment thereof, or if the activity of a polypeptide encoded by a nucleic acid molecule comprising the nucleic acid SEQ ID NO. 5318, preferably the coding region thereof, or a homolog or fragment thereof, e.g. derived from Arabidopsis thaliana, is increased or generated. For example the activity of a nucleic acid molecule or a polypeptide comprising the nucleic acid, preferably the coding region thereof, or polypeptide or the consensus sequence or the polypeptide motif, as depicted in Table I, II or IV, application No. 3, column 5 or 8 in the respective same line as the nucleic acid molecule SEQ ID NO. 5318 or polypeptide SEQ ID NO. 5319, respectively, or a homolog or a fragment thereof, is increased or generated, or if the activity protein phosphatase is increased or generated in a non-human organism, like a microorganism or a plant cell, plant or part thereof, especially with non-targeted localization, whereby the respective line discloses in column 7 citrulline. For example, an increase of the citrulline of at least 1 percent, particularly in a range of 42 to 54-percent is conferred as compared to a corresponding non-transformed wild type non-human organism.

[22368] Accordingly, in one embodiment, an increase of citrulline in a non-human organism, as compared to a corresponding non-transformed wild type non-human organism, is conferred in the process of the invention, if the activity of a polypeptide showing the activity of a protein phosphatase, or if the activity of the polypeptide At5g59220, preferably represented by SEQ ID NO. 25499, or a homolog or fragment thereof, or if the activity of a polypeptide encoded by a nucleic acid molecule comprising the nucleic acid SEQ ID NO. 25498, preferably the coding region thereof, or a homolog or fragment thereof, e.g. derived from Arabidopsis thaliana, is increased or generated. For example the activity of a nucleic acid molecule or a polypeptide comprising the nucleic acid, preferably the coding region thereof, or polypeptide or the consensus sequence or the polypeptide motif, as depicted in Table I, II or IV, application No. 3, column 5 or 8 in the respective same line as the nucleic acid molecule SEQ ID NO. 25498 or polypeptide SEQ ID NO. 25499, respectively, or a homolog or a fragment thereof, is increased or generated, or if the activity protein phosphatase is increased or generated in a non-human organism, like a microorganism or a plant cell, plant or part thereof, especially with non-targeted localization, whereby the respective line discloses in column 7 citrulline. For example, an increase of the citrulline of at least 1 percent, particularly in a range of 41 to 122-percent is conferred as compared to a corresponding non-transformed wild type non-human organism.

[22369] Accordingly, in one embodiment, an increase of phenylalanine in a non-human organism, as compared to a corresponding non-transformed wild type non-human organism, is conferred in the process of the invention, if the activity of a polypeptide showing the activity of a RNA-binding protein, or if the activity of the polypeptide At5g60110, preferably represented by SEQ ID NO. 70007, or a homolog or fragment thereof, or if the activity of a polypeptide encoded by a nucleic acid molecule comprising the nucleic acid SEQ ID NO. 70006, preferably the coding region thereof, or a homolog or fragment thereof, e.g. derived from Arabidopsis thaliana, is increased or generated. For example the activity of a nucleic acid molecule or a polypeptide comprising the nucleic acid, preferably the coding region thereof, or polypeptide or the consensus sequence or the polypeptide motif, as depicted in Table I, II or IV, application No. 3, column 5 or 8 in the respective same line as the nucleic acid molecule SEQ ID NO. 70006 or polypeptide SEQ ID NO. 70007, respectively, or a homolog or a fragment thereof, is increased or generated, or if the activity RNA-binding protein is increased or generated in a non-human organism, like a microorganism or a plant cell, plant or part thereof, especially with non-targeted localization, whereby the respective line discloses in column 7 phenylalanine. For example, an increase of the phenylalanine of at least 1 percent, particularly in a range of 34 to 70-percent is conferred as compared to a corresponding non-transformed wild type non-human organism.

[22370] Accordingly, in one embodiment, an increase of tyrosine in a non-human organism, as compared to a corresponding non-transformed wild type non-human organism, is conferred in the process of the invention, if the activity of a polypeptide showing the activity of a RNA-binding protein, or if the activity of the polypeptide At5g60110, preferably represented by SEQ ID NO. 70007, or a homolog or fragment thereof, or if the activity of a polypeptide encoded by a nucleic acid molecule comprising the nucleic acid SEQ ID NO. 70006, preferably the coding region thereof, or a homolog or fragment thereof, e.g. derived from Arabidopsis thaliana, is increased or generated. For example the activity of a nucleic acid molecule or a polypeptide comprising the nucleic acid, preferably the coding region thereof, or polypeptide or the consensus sequence or the polypeptide motif, as depicted in Table I, II or IV, application No. 3, column 5 or 8 in the respective same line as the nucleic acid molecule SEQ ID NO. 70006 or polypeptide SEQ ID NO. 70007, respectively, or a homolog or a fragment thereof, is increased or generated, or if the activity RNA-binding protein is increased or generated in a non-human organism, like a microorganism or a plant cell, plant or part thereof, especially with non-targeted localization, whereby the respective line discloses in column 7 tyrosine. For example, an increase of the tyrosine of at least 1 percent, particularly in a range of 47 to 170-percent is conferred as compared to a corresponding non-transformed wild type non-human organism.

[22371] Accordingly, in one embodiment, an increase of alanine in a non-human organism, as compared to a corresponding non-transformed wild type non-human organism, is conferred in the process of the invention, if the activity of a polypeptide showing the activity of a pyruvate kinase, or if the activity of the polypeptide At5g63680, preferably represented by SEQ ID NO. 70039, or a homolog or fragment thereof, or if the activity of a polypeptide encoded by a nucleic acid molecule comprising the nucleic acid SEQ ID NO. 70038, preferably the coding region thereof, or a homolog or fragment thereof, e.g. derived from Arabidopsis thaliana, is increased or generated. For example the activity of a nucleic acid molecule or a polypeptide comprising the nucleic acid, preferably the coding region thereof, or polypeptide or the consensus sequence or the polypeptide motif, as depicted in Table I, II or IV, application No. 3, column 5 or 8 in the respective same line as the nucleic acid molecule SEQ ID NO. 70038 or polypeptide SEQ ID NO. 70039, respectively, or a homolog or a fragment thereof, is increased or generated, or if the activity pyruvate kinase is increased or generated in a non-human organism, like a microorganism or a plant cell, plant or part thereof, especially with plastidic localization, whereby the respective line discloses in column 7 alanine. For example, an increase of the alanine of at least 1 percent, particularly in a range of 42 to 264-percent is conferred as compared to a corresponding non-transformed wild type non-human organism.

[22372] Accordingly, in one embodiment, an increase of alanine in a non-human organism, as compared to a corresponding non-transformed wild type non-human organism, is conferred in the process of the invention, if the activity of a polypeptide showing the activity of a zinc finger protein, or if the activity of the polypeptide At5g64920, preferably represented by SEQ ID NO. 5494, or a homolog or fragment thereof, or if the activity of a polypeptide encoded by a nucleic acid molecule comprising the nucleic acid SEQ ID NO. 5493, preferably the coding region thereof, or a homolog or fragment thereof, e.g. derived from Arabidopsis thaliana, is increased or generated. For example the activity of a nucleic acid molecule or a polypeptide comprising the nucleic acid, preferably the coding region thereof, or polypeptide or the consensus sequence or the polypeptide motif, as depicted in Table I, II or IV, application No. 3, column 5 or 8 in the respective same line as the nucleic acid molecule SEQ ID NO. 5493 or polypeptide SEQ ID NO. 5494, respectively, or a homolog or a fragment thereof, is increased or generated, or if the activity zinc finger protein is increased or generated in a non-human organism, like a microorganism or a plant cell, plant or part thereof, especially with non-targeted localization, whereby the respective line discloses in column 7 alanine. For example, an increase of the alanine of at least 1 percent, particularly in a range of 22 to 41-percent is conferred as compared to a corresponding non-transformed wild type non-human organism.

[22373] Accordingly, in one embodiment, an increase of phenylalanine in a non-human organism, as compared to a corresponding non-transformed wild type non-human organism, is conferred in the process of the invention, if the activity of a polypeptide showing the activity of a zinc finger protein, or if the activity of the polypeptide At5g64920, preferably represented by SEQ ID NO. 5494, or a homolog or fragment thereof, or if the activity of a polypeptide encoded by a nucleic acid molecule comprising the nucleic acid SEQ ID NO. 5493, preferably the coding region thereof, or a homolog or fragment thereof, e.g. derived from Arabidopsis thaliana, is increased or generated. For example the activity of a nucleic acid molecule or a polypeptide comprising the nucleic acid, preferably the coding region thereof, or polypeptide or the consensus sequence or the polypeptide motif, as depicted in Table I, II or IV, application No. 3, column 5 or 8 in the respective same line as the nucleic acid molecule SEQ ID NO. 5493 or polypeptide SEQ ID NO. 5494, respectively, or a homolog or a fragment thereof, is increased or generated, or if the activity zinc finger protein is increased or generated in a non-human organism, like a microorganism or a plant cell, plant or part thereof, especially with non-targeted localization, whereby the respective line discloses in column 7 phenylalanine. For example, an increase of the phenylalanine of at least 1 percent, particularly in a range of 27 to 106-percent is conferred as compared to a corresponding non-transformed wild type non-human organism.

[22374] Accordingly, in one embodiment, an increase of serine in a non-human organism, as compared to a corresponding non-transformed wild type non-human organism, is conferred in the process of the invention, if the activity of a polypeptide showing the activity of a zinc finger protein, or if the activity of the polypeptide At5g64920, preferably represented by SEQ ID NO. 5494, or a homolog or fragment thereof, or if the activity of a polypeptide encoded by a nucleic acid molecule comprising the nucleic acid SEQ ID NO. 5493, preferably the coding region thereof, or a homolog or fragment thereof, e.g. derived from Arabidopsis thaliana, is increased or generated. For example the activity of a nucleic acid molecule or a polypeptide comprising the nucleic acid, preferably the coding region thereof, or polypeptide or the consensus sequence or the polypeptide motif, as depicted in Table I, II or IV, application No. 3, column 5 or 8 in the respective same line as the nucleic acid molecule SEQ ID NO. 5493 or polypeptide SEQ ID NO. 5494, respectively, or a homolog or a fragment thereof, is increased or generated, or if the activity zinc finger protein is increased or generated in a non-human organism, like a microorganism or a plant cell, plant or part thereof, especially with non-targeted localization, whereby the respective line discloses in column 7 serine. For example, an increase of the serine of at least 1 percent, particularly in a range of 29 to 82-percent is conferred as compared to a corresponding non-transformed wild type non-human organism.

[22375] Accordingly, in one embodiment, an increase of 5-oxoproline in a non-human organism, as compared to a corresponding non-transformed wild type non-human organism, is conferred in the process of the invention, if the activity of a polypeptide showing the activity of a zinc finger protein, or if the activity of the polypeptide At5g64920, preferably represented by SEQ ID NO. 5494, or a homolog or fragment thereof, or if the activity of a polypeptide encoded by a nucleic acid molecule comprising the nucleic acid SEQ ID NO. 5493, preferably the coding region thereof, or a homolog or fragment thereof, e.g. derived from Arabidopsis thaliana, is increased or generated. For example the activity of a nucleic acid molecule or a polypeptide comprising the nucleic acid, preferably the coding region thereof, or polypeptide or the consensus sequence or the polypeptide motif, as depicted in Table I, II or IV, application No. 3, column 5 or 8 in the respective same line as the nucleic acid molecule SEQ ID NO. 5493 or polypeptide SEQ ID NO. 5494, respectively, or a homolog or a fragment thereof, is increased or generated, or if the activity zinc finger protein is increased or generated in a non-human organism, like a microorganism or a plant cell, plant or part thereof, especially with non-targeted localization, whereby the respective line discloses in column 7 5-oxoproline. For example, an increase of the 5-oxoproline of at least 1 percent, particularly in a range of 44 to 151-percent is conferred as compared to a corresponding non-transformed wild type non-human organism.

[22376] Accordingly, in one embodiment, an increase of aspartate in a non-human organism, as compared to a corresponding non-transformed wild type non-human organism, is conferred in the process of the invention, if the activity of a polypeptide showing the activity of a CDP-diacylglycerol-serine O-phosphatidyltransferase, or if the activity of the polypeptide AvinDRAFT_{—}0035, preferably represented by SEQ ID NO. 70584, or a homolog or fragment thereof, or if the activity of a polypeptide encoded by a nucleic acid molecule comprising the nucleic acid SEQ ID NO. 70583, preferably the coding region thereof, or a homolog or fragment thereof, e.g. derived from Azotobacter vinelandii, is increased or generated. For example the activity of a nucleic acid molecule or a polypeptide comprising the nucleic acid, preferably the coding region thereof, or polypeptide or the consensus sequence or the polypeptide motif, as depicted in Table I, II or IV, application No. 3, column 5 or 8 in the respective same line as the nucleic acid molecule SEQ ID NO. 70583 or polypeptide SEQ ID NO. 70584, respectively, or a homolog or a fragment thereof, is increased or generated, or if the activity CDP-diacylglycerol-serine O-phosphatidyltransferase is increased or generated in a non-human organism, like a microorganism or a plant cell, plant or part thereof, especially with non-targeted localization, whereby the respective line discloses in column 7 aspartate. For example, an increase of the aspartate of at least 1 percent, particularly in a range of 53 to 163-percent is conferred as compared to a corresponding non-transformed wild type non-human organism.

[22377] Accordingly, in one embodiment, an increase of 5-oxoproline in a non-human organism, as compared to a corresponding non-transformed wild type non-human organism, is conferred in the process of the invention, if the activity of a polypeptide showing the activity of a CDP-diacylglycerol-serine O-phosphatidyltransferase, or if the activity of the polypeptide AvinDRAFT_{—}0035, preferably represented by SEQ ID NO. 70584, or a homolog or fragment thereof, or if the activity of a polypeptide encoded by a nucleic acid molecule comprising the nucleic acid SEQ ID NO. 70583, preferably the coding region thereof, or a homolog or fragment thereof, e.g. derived from Azotobacter vinelandii, is increased or generated. For example the activity of a nucleic acid molecule or a polypeptide comprising the nucleic acid, preferably the coding region thereof, or polypeptide or the consensus sequence or the polypeptide motif, as depicted in Table I, II or IV, application No. 3, column 5 or 8 in the respective same line as the nucleic acid molecule SEQ ID NO. 70583 or polypeptide SEQ ID NO. 70584, respectively, or a homolog or a fragment thereof, is increased or generated, or if the activity CDP-diacylglycerol-serine O-phosphatidyltransferase is increased or generated in a non-human organism, like a microorganism or a plant cell, plant or part thereof, especially with non-targeted localization, whereby the respective line discloses in column 7 5-oxoproline. For example, an increase of the 5-oxoproline of at least 1 percent, particularly in a range of 48 to 123-percent is conferred as compared to a corresponding non-transformed wild type non-human organism.

[22378] Accordingly, in one embodiment, an increase of serine in a non-human organism, as compared to a corresponding non-transformed wild type non-human organism, is conferred in the process of the invention, if the activity of a polypeptide showing the activity of a Glycine cleavage system T aminomethyltransferase, or if the activity of the polypeptide AVINDRAFT_{—}0539, preferably represented by SEQ ID NO. 70716, or a homolog or fragment thereof, or if the activity of a polypeptide encoded by a nucleic acid molecule comprising the nucleic acid SEQ ID NO. 70715, preferably the coding region thereof, or a homolog or fragment thereof, e.g. derived from AZOTOBACTER VINELANDII, is increased or generated. For example the activity of a nucleic acid molecule or a polypeptide comprising the nucleic acid, preferably the coding region thereof, or polypeptide or the consensus sequence or the polypeptide motif, as depicted in Table I, II or IV, application No. 3, column 5 or 8 in the respective same line as the nucleic acid molecule SEQ ID NO. 70715 or polypeptide SEQ ID NO. 70716, respectively, or a homolog or a fragment thereof, is increased or generated, or if the activity Glycine cleavage system T aminomethyltransferase is increased or generated in a non-human organism, like a microorganism or a plant cell, plant or part thereof, especially with non-targeted localization, whereby the respective line discloses in column 7 serine. For example, an increase of the serine of at least 1 percent, particularly in a range of 30 to 52-percent is conferred as compared to a corresponding non-transformed wild type non-human organism.

[22379] Accordingly, in one embodiment, an increase of serine in a non-human organism, as compared to a corresponding non-transformed wild type non-human organism, is conferred in the process of the invention, if the activity of a polypeptide showing the activity of a transcriptional regulator, or if the activity of the polypeptide AvinDRAFT_{—}1045, preferably represented by SEQ ID NO. 25677, or a homolog or fragment thereof, or if the activity of a polypeptide encoded by a nucleic acid molecule comprising the nucleic acid SEQ ID NO. 25676, preferably the coding region thereof, or a homolog or fragment thereof, e.g. derived from Azotobacter vinelandii, is increased or generated. For example the activity of a nucleic acid molecule or a polypeptide comprising the nucleic acid, preferably the coding region thereof, or polypeptide or the consensus sequence or the polypeptide motif, as depicted in Table I, II or IV, application No. 3, column 5 or 8 in the respective same line as the nucleic acid molecule SEQ ID NO. 25676 or polypeptide SEQ ID NO. 25677, respectively, or a homolog or a fragment thereof, is increased or generated, or if the activity transcriptional regulator is increased or generated in a non-human organism, like a microorganism or a plant cell, plant or part thereof, especially with non-targeted localization, whereby the respective line discloses in column 7 serine. For example, an increase of the serine of at least 1 percent, particularly in a range of 26 to 49-percent is conferred as compared to a corresponding non-transformed wild type non-human organism.

[22380] Accordingly, in one embodiment, an increase of aspartate in a non-human organism, as compared to a corresponding non-transformed wild type non-human organism, is conferred in the process of the invention, if the activity of a polypeptide showing the activity of a adenylylsulfate kinase, or if the activity of the polypeptide AvinDRAFT_{—}1398, preferably represented by SEQ ID NO. 25781, or a homolog or fragment thereof, or if the activity of a polypeptide encoded by a nucleic acid molecule comprising the nucleic acid SEQ ID NO. 25780, preferably the coding region thereof, or a homolog or fragment thereof, e.g. derived from Azotobacter vinelandii, is increased or generated. For example the activity of a nucleic acid molecule or a polypeptide comprising the nucleic acid, preferably the coding region thereof, or polypeptide or the consensus sequence or the polypeptide motif, as depicted in Table I, II or IV, application No. 3, column 5 or 8 in the respective same line as the nucleic acid molecule SEQ ID NO. 25780 or polypeptide SEQ ID NO. 25781, respectively, or a homolog or a fragment thereof, is increased or generated, or if the activity adenylylsulfate kinase is increased or generated in a non-human organism, like a microorganism or a plant cell, plant or part thereof, especially with non-targeted localization, whereby the respective line discloses in column 7 aspartate. For example, an increase of the aspartate of at least 1 percent, particularly in a range of 49 to 101-percent is conferred as compared to a corresponding non-transformed wild type non-human organism.

[22381] Accordingly, in one embodiment, an increase of alanine in a non-human organism, as compared to a corresponding non-transformed wild type non-human organism, is conferred in the process of the invention, if the activity of a polypeptide showing the activity of a malic enzyme, or if the activity of the polypeptide AvinDRAFT_{—}1495, preferably represented by SEQ ID NO. 5558, or a homolog or fragment thereof, or if the activity of a polypeptide encoded by a nucleic acid molecule comprising the nucleic acid SEQ ID NO. 5557, preferably the coding region thereof, or a homolog or fragment thereof, e.g. derived from Azotobacter vinelandii, is increased or generated. For example the activity of a nucleic acid molecule or a polypeptide comprising the nucleic acid, preferably the coding region thereof, or polypeptide or the consensus sequence or the polypeptide motif, as depicted in Table I, II or IV, application No. 3, column 5 or 8 in the respective same line as the nucleic acid molecule SEQ ID NO. 5557 or polypeptide SEQ ID NO. 5558, respectively, or a homolog or a fragment thereof, is increased or generated, or if the activity malic enzyme is increased or generated in a non-human organism, like a microorganism or a plant cell, plant or part thereof, especially with non-targeted localization, whereby the respective line discloses in column 7 alanine. For example, an increase of the alanine of at least 1 percent, particularly in a range of 24 to 45-percent is conferred as compared to a corresponding non-transformed wild type non-human organism.

[22382] Accordingly, in one embodiment, an increase of phenylalanine in a non-human organism, as compared to a corresponding non-transformed wild type non-human organism, is conferred in the process of the invention, if the activity of a polypeptide showing the activity of a malic enzyme, or if the activity of the polypeptide AvinDRAFT_{—}1495, preferably represented by SEQ ID NO. 5558, or a homolog or fragment thereof, or if the activity of a polypeptide encoded by a nucleic acid molecule comprising the nucleic acid SEQ ID NO. 5557, preferably the coding region thereof, or a homolog or fragment thereof, e.g. derived from Azotobacter vinelandii, is increased or generated. For example the activity of a nucleic acid molecule or a polypeptide comprising the nucleic acid, preferably the coding region thereof, or polypeptide or the consensus sequence or the polypeptide motif, as depicted in Table I, II or IV, application No. 3, column 5 or 8 in the respective same line as the nucleic acid molecule SEQ ID NO. 5557 or polypeptide SEQ ID NO. 5558, respectively, or a homolog or a fragment thereof, is increased or generated, or if the activity malic enzyme is increased or generated in a non-human organism, like a microorganism or a plant cell, plant or part thereof, especially with non-targeted localization, whereby the respective line discloses in column 7 phenylalanine. For example, an increase of the phenylalanine of at least 1 percent, particularly in a range of 25 to 197-percent is conferred as compared to a corresponding non-transformed wild type non-human organism.

[22383] Accordingly, in one embodiment, an increase of serine in a non-human organism, as compared to a corresponding non-transformed wild type non-human organism, is conferred in the process of the invention, if the activity of a polypeptide showing the activity of a malic enzyme, or if the activity of the polypeptide AvinDRAFT_{—}1495, preferably represented by SEQ ID NO. 5558, or a homolog or fragment thereof, or if the activity of a polypeptide encoded by a nucleic acid molecule comprising the nucleic acid SEQ ID NO. 5557, preferably the coding region thereof, or a homolog or fragment thereof, e.g. derived from Azotobacter vinelandii, is increased or generated. For example the activity of a nucleic acid molecule or a polypeptide comprising the nucleic acid, preferably the coding region thereof, or polypeptide or the consensus sequence or the polypeptide motif, as depicted in Table I, II or IV, application No. 3, column 5 or 8 in the respective same line as the nucleic acid molecule SEQ ID NO. 5557 or polypeptide SEQ ID NO. 5558, respectively, or a homolog or a fragment thereof, is increased or generated, or if the activity malic enzyme is increased or generated in a non-human organism, like a microorganism or a plant cell, plant or part thereof, especially with non-targeted localization, whereby the respective line discloses in column 7 serine. For example, an increase of the serine of at least 1 percent, particularly in a range of 35 to 357-percent is conferred as compared to a corresponding non-transformed wild type non-human organism.

[22384] Accordingly, in one embodiment, an increase of alanine in a non-human organism, as compared to a corresponding non-transformed wild type non-human organism, is conferred in the process of the invention, if the activity of a polypeptide showing the activity of a sec-independent protein translocase, or if the activity of the polypeptide AvinDRAFT_{—}1624, preferably represented by SEQ ID NO. 26197, or a homolog or fragment thereof, or if the activity of a polypeptide encoded by a nucleic acid molecule comprising the nucleic acid SEQ ID NO. 26196, preferably the coding region thereof, or a homolog or fragment thereof, e.g. derived from Azotobacter vinelandii, is increased or generated. For example the activity of a nucleic acid molecule or a polypeptide comprising the nucleic acid, preferably the coding region thereof, or polypeptide or the consensus sequence or the polypeptide motif, as depicted in Table I, II or IV, application No. 3, column 5 or 8 in the respective same line as the nucleic acid molecule SEQ ID NO. 26196 or polypeptide SEQ ID NO. 26197, respectively, or a homolog or a fragment thereof, is increased or generated, or if the activity sec-independent protein translocase is increased or generated in a non-human organism, like a microorganism or a plant cell, plant or part thereof, especially with non-targeted localization, whereby the respective line discloses in column 7 alanine. For example, an increase of the alanine of at least 1 percent, particularly in a range of 20 to 30-percent is conferred as compared to a corresponding non-transformed wild type non-human organism.

[22385] Accordingly, in one embodiment, an increase of alanine in a non-human organism, as compared to a corresponding non-transformed wild type non-human organism, is conferred in the process of the invention, if the activity of a polypeptide showing the activity of a pyruvate kinase, or if the activity of the polypeptide AvinDRAFT_{—}1806, preferably represented by SEQ ID NO. 26435, or a homolog or fragment thereof, or if the activity of a polypeptide encoded by a nucleic acid molecule comprising the nucleic acid SEQ ID NO. 26434, preferably the coding region thereof, or a homolog or fragment thereof, e.g. derived from Azotobacter vinelandii, is increased or generated. For example the activity of a nucleic acid molecule or a polypeptide comprising the nucleic acid, preferably the coding region thereof, or polypeptide or the consensus sequence or the polypeptide motif, as depicted in Table I, II or IV, application No. 3, column 5 or 8 in the respective same line as the nucleic acid molecule SEQ ID NO. 26434 or polypeptide SEQ ID NO. 26435, respectively, or a homolog or a fragment thereof, is increased or generated, or if the activity pyruvate kinase is increased or generated in a non-human organism, like a microorganism or a plant cell, plant or part thereof, especially with non-targeted localization, whereby the respective line discloses in column 7 alanine. For example, an increase of the alanine of at least 1 percent, particularly in a range of 50 to 127-percent is conferred as compared to a corresponding non-transformed wild type non-human organism.

[22386] Accordingly, in one embodiment, an increase of alanine in a non-human organism, as compared to a corresponding non-transformed wild type non-human organism, is conferred in the process of the invention, if the activity of a polypeptide showing the activity of a betahydroxylase, or if the activity of the polypeptide AvinDRAFT_{—}2091, preferably represented by SEQ ID NO. 6041, or a homolog or fragment thereof, or if the activity of a polypeptide encoded by a nucleic acid molecule comprising the nucleic acid SEQ ID NO. 6040, preferably the coding region thereof, or a homolog or fragment thereof, e.g. derived from Azotobacter vinelandii, is increased or generated. For example the activity of a nucleic acid molecule or a polypeptide comprising the nucleic acid, preferably the coding region thereof, or polypeptide or the consensus sequence or the polypeptide motif, as depicted in Table I, II or IV, application No. 3, column 5 or 8 in the respective same line as the nucleic acid molecule SEQ ID NO. 6040 or polypeptide SEQ ID NO. 6041, respectively, or a homolog or a fragment thereof, is increased or generated, or if the activity beta-hydroxylase is increased or generated in a non-human organism, like a microorganism or a plant cell, plant or part thereof, especially with non-targeted localization, whereby the respective line discloses in column 7 alanine. For example, an increase of the alanine of at least 1 percent, particularly in a range of 24 to 36-percent is conferred as compared to a corresponding non-transformed wild type non-human organism.

[22387] Accordingly, in one embodiment, an increase of aspartate in a non-human organism, as compared to a corresponding non-transformed wild type non-human organism, is conferred in the process of the invention, if the activity of a polypeptide showing the activity of a betahydroxylase, or if the activity of the polypeptide AvinDRAFT_{—}2091, preferably represented by SEQ ID NO. 6041, or a homolog or fragment thereof, or if the activity of a polypeptide encoded by a nucleic acid molecule comprising the nucleic acid SEQ ID NO. 6040, preferably the coding region thereof, or a homolog or fragment thereof, e.g. derived from Azotobacter vinelandii, is increased or generated. For example the activity of a nucleic acid molecule or a polypeptide comprising the nucleic acid, preferably the coding region thereof, or polypeptide or the consensus sequence or the polypeptide motif, as depicted in Table I, II or IV, application No. 3, column 5 or 8 in the respective same line as the nucleic acid molecule SEQ ID NO. 6040 or polypeptide SEQ ID NO. 6041, respectively, or a homolog or a fragment thereof, is increased or generated, or if the activity beta-hydroxylase is increased or generated in a non-human organism, like a microorganism or a plant cell, plant or part thereof, especially with non-targeted localization, whereby the respective line discloses in column 7 aspartate. For example, an increase of the aspartate of at least 1 percent, particularly in a range of 89 to 237-percent is conferred as compared to a corresponding non-transformed wild type non-human organism.

[22388] Accordingly, in one embodiment, an increase of serine in a non-human organism, as compared to a corresponding non-transformed wild type non-human organism, is conferred in the process of the invention, if the activity of a polypeptide showing the activity of a beta-hydroxylase, or if the activity of the polypeptide AvinDRAFT_{—}2091, preferably represented by SEQ ID NO. 6041, or a homolog or fragment thereof, or if the activity of a polypeptide encoded by a nucleic acid molecule comprising the nucleic acid SEQ ID NO. 6040, preferably the coding region thereof, or a homolog or fragment thereof, e.g. derived from Azotobacter vinelandii, is increased or generated. For example the activity of a nucleic acid molecule or a polypeptide comprising the nucleic acid, preferably the coding region thereof, or polypeptide or the consensus sequence or the polypeptide motif, as depicted in Table I, II or IV, application No. 3, column 5 or 8 in the respective same line as the nucleic acid molecule SEQ ID NO. 6040 or polypeptide SEQ ID NO. 6041, respectively, or a homolog or a fragment thereof, is increased or generated, or if the activity beta-hydroxylase is increased or generated in a non-human organism, like a microorganism or a plant cell, plant or part thereof, especially with non-targeted localization, whereby the respective line discloses in column 7 serine. For example, an increase of the serine of at least 1 percent, particularly in a range of 47 to 75-percent is conferred as compared to a corresponding non-transformed wild type non-human organism.

[22389] Accordingly, in one embodiment, an increase of aspartate in a non-human organism, as compared to a corresponding non-transformed wild type non-human organism, is conferred in the process of the invention, if the activity of a polypeptide showing the activity of a elongation factor Tu, or if the activity of the polypeptide AvinDRAFT_{—}2344, preferably represented by SEQ ID NO. 27022, or a homolog or fragment thereof, or if the activity of a polypeptide encoded by a nucleic acid molecule comprising the nucleic acid SEQ ID NO. 27021, preferably the coding region thereof, or a homolog or fragment thereof, e.g. derived from Azotobacter vinelandii, is increased or generated. For example the activity of a nucleic acid molecule or a polypeptide comprising the nucleic acid, preferably the coding region thereof, or polypeptide or the consensus sequence or the polypeptide motif, as depicted in Table I, II or IV, application No. 3, column 5 or 8 in the respective same line as the nucleic acid molecule SEQ ID NO. 27021 or polypeptide SEQ ID NO. 27022, respectively, or a homolog or a fragment thereof, is increased or generated, or if the activity elongation factor Tu is increased or generated in a non-human organism, like a microorganism or a plant cell, plant or part thereof, especially with non-targeted localization, whereby the respective line discloses in column 7 aspartate. For example, an increase of the aspartate of at least 1 percent, particularly in a range of 83 to 94-percent is conferred as compared to a corresponding non-transformed wild type non-human organism.

[22390] Accordingly, in one embodiment, an increase of phenylalanine in a non-human organism, as compared to a corresponding non-transformed wild type non-human organism, is conferred in the process of the invention, if the activity of a polypeptide showing the activity of a elongation factor Tu, or if the activity of the polypeptide AvinDRAFT_{—}2344, preferably represented by SEQ ID NO. 27022, or a homolog or fragment thereof, or if the activity of a polypeptide encoded by a nucleic acid molecule comprising the nucleic acid SEQ ID NO. 27021, preferably the coding region thereof, or a homolog or fragment thereof, e.g. derived from Azotobacter vinelandii, is increased or generated. For example the activity of a nucleic acid molecule or a polypeptide comprising the nucleic acid, preferably the coding region thereof, or polypeptide or the consensus sequence or the polypeptide motif, as depicted in Table I, II or IV, application No. 3, column 5 or 8 in the respective same line as the nucleic acid molecule SEQ ID NO. 27021 or polypeptide SEQ ID NO. 27022, respectively, or a homolog or a fragment thereof, is increased or generated, or if the activity elongation factor Tu is increased or generated in a non-human organism, like a microorganism or a plant cell, plant or part thereof, especially with non-targeted localization, whereby the respective line discloses in column 7 phenylalanine. For example, an increase of the phenylalanine of at least 1 percent, particularly in a range of 57 to 254-percent is conferred as compared to a corresponding non-transformed wild type non-human organism.

[22391] Accordingly, in one embodiment, an increase of serine in a non-human organism, as compared to a corresponding non-transformed wild type non-human organism, is conferred in the process of the invention, if the activity of a polypeptide showing the activity of a elongation factor Tu, or if the activity of the polypeptide AvinDRAFT_{—}2344, preferably represented by SEQ ID NO. 27022, or a homolog or fragment thereof, or if the activity of a polypeptide encoded by a nucleic acid molecule comprising the nucleic acid SEQ ID NO. 27021, preferably the coding region thereof, or a homolog or fragment thereof, e.g. derived from Azotobacter vinelandii, is increased or generated. For example the activity of a nucleic acid molecule or a polypeptide comprising the nucleic acid, preferably the coding region thereof, or polypeptide or the consensus sequence or the polypeptide motif, as depicted in Table I, II or IV, application No. 3, column 5 or 8 in the respective same line as the nucleic acid molecule SEQ ID NO. 27021 or polypeptide SEQ ID NO. 27022, respectively, or a homolog or a fragment thereof, is increased or generated, or if the activity elongation factor Tu is increased or generated in a non-human organism, like a microorganism or a plant cell, plant or part thereof, especially with non-targeted localization, whereby the respective line discloses in column 7 serine. For example, an increase of the serine of at least 1 percent, particularly in a range of 32 to 198-percent is conferred as compared to a corresponding non-transformed wild type non-human organism.

[22392] Accordingly, in one embodiment, an increase of tyrosine in a non-human organism, as compared to a corresponding non-transformed wild type non-human organism, is conferred in the process of the invention, if the activity of a polypeptide showing the activity of a elongation facfor Tu, or if the activity of the polypeptide AvinDRAFT_{—}2344, preferably represented by SEQ ID NO. 27022, or a homolog or fragment thereof, or if the activity of a polypeptide encoded by a nucleic acid molecule comprising the nucleic acid SEQ ID NO. 27021, preferably the coding region thereof, or a homolog or fragment thereof, e.g. derived from Azotobacter vinelandii, is increased or generated. For example the activity of a nucleic acid molecule or a polypeptide comprising the nucleic acid, preferably the coding region thereof, or polypeptide or the consensus sequence or the polypeptide motif, as depicted in Table I, II or IV, application No. 3, column 5 or 8 in the respective same line as the nucleic acid molecule SEQ ID NO. 27021 or polypeptide SEQ ID NO. 27022, respectively, or a homolog or a fragment thereof, is increased or generated, or if the activity elongation factor Tu is increased or generated in a non-human organism, like a microorganism or a plant cell, plant or part thereof, especially with non-targeted localization, whereby the respective line discloses in column 7 tyrosine. For example, an increase of the tyrosine of at least 1 percent, particularly in a range of 42 to 298-percent is conferred as compared to a corresponding non-transformed wild type non-human organism.

[22393] Accordingly, in one embodiment, an increase of 5-oxoproline in a non-human organism, as compared to a corresponding non-transformed wild type non-human organism, is conferred in the process of the invention, if the activity of a polypeptide showing the activity of a elongation factor Tu, or if the activity of the polypeptide AvinDRAFT_{—}2344, preferably represented by SEQ ID NO. 27022, or a homolog or fragment thereof, or if the activity of a polypeptide encoded by a nucleic acid molecule comprising the nucleic acid SEQ ID NO. 27021, preferably the coding region thereof, or a homolog or fragment thereof, e.g. derived from Azotobacter vinelandii, is increased or generated. For example the activity of a nucleic acid molecule or a polypeptide comprising the nucleic acid, preferably the coding region thereof, or polypeptide or the consensus sequence or the polypeptide motif, as depicted in Table I, II or IV, application No. 3, column 5 or 8 in the respective same line as the nucleic acid molecule SEQ ID NO. 27021 or polypeptide SEQ ID NO. 27022, respectively, or a homolog or a fragment thereof, is increased or generated, or if the activity elongation factor Tu is increased or generated in a non-human organism, like a microorganism or a plant cell, plant or part thereof, especially with non-targeted localization, whereby the respective line discloses in column 7 5-oxoproline. For example, an increase of the 5-oxoproline of at least 1 percent, particularly in a range of 50 to 194-percent is conferred as compared to a corresponding non-transformed wild type non-human organism.

[22394] Accordingly, in one embodiment, an increase of tyrosine in a non-human organism, as compared to a corresponding non-transformed wild type non-human organism, is conferred in the process of the invention, if the activity of a polypeptide showing the activity of a 30S ribosomal protein S3, or if the activity of the polypeptide AvinDRAFT_{—}2365, preferably represented by SEQ ID NO. 71326, or a homolog or fragment thereof, or if the activity of a polypeptide encoded by a nucleic acid molecule comprising the nucleic acid SEQ ID NO. 71325, preferably the coding region thereof, or a homolog or fragment thereof, e.g. derived from Azotobacter vinelandii, is increased or generated. For example the activity of a nucleic acid molecule or a polypeptide comprising the nucleic acid, preferably the coding region thereof, or polypeptide or the consensus sequence or the polypeptide motif, as depicted in Table I, II or IV, application No. 3, column 5 or 8 in the respective same line as the nucleic acid molecule SEQ ID NO. 71325 or polypeptide SEQ ID NO. 71326, respectively, or a homolog or a fragment thereof, is increased or generated, or if the activity 30S ribosomal protein S3 is increased or generated in a non-human organism, like a microorganism or a plant cell, plant or part thereof, especially with non-targeted localization, whereby the respective line discloses in column 7 tyrosine. For example, an increase of the tyrosine of at least 1 percent, particularly in a range of 36 to 65-percent is conferred as compared to a corresponding non-transformed wild type non-human organism.

[22395] Accordingly, in one embodiment, an increase of asparagine in a non-human organism, as compared to a corresponding non-transformed wild type non-human organism, is conferred in the process of the invention, if the activity of a polypeptide showing the activity of a 50S ribosomal protein L14, or if the activity of the polypeptide AvinDRAFT_{—}2369, preferably represented by SEQ ID NO. 71764, or a homolog or fragment thereof, or if the activity of a polypeptide encoded by a nucleic acid molecule comprising the nucleic acid SEQ ID NO. 71763, preferably the coding region thereof, or a homolog or fragment thereof, e.g. derived from Azotobacter vinelandii, is increased or generated. For example the activity of a nucleic acid molecule or a polypeptide comprising the nucleic acid, preferably the coding region thereof, or polypeptide or the consensus sequence or the polypeptide motif, as depicted in Table I, II or IV, application No. 3, column 5 or 8 in the respective same line as the nucleic acid molecule SEQ ID NO. 71763 or polypeptide SEQ ID NO. 71764, respectively, or a homolog or a fragment thereof, is increased or generated, or if the activity 50S ribosomal protein L14 is increased or generated in a non-human organism, like a microorganism or a plant cell, plant or part thereof, especially with non-targeted localization, whereby the respective line discloses in column 7 asparagine. For example, an increase of the asparagine of at least 1 percent, particularly in a range of 62 to 91-percent is conferred as compared to a corresponding non-transformed wild type non-human organism.

[22396] Accordingly, in one embodiment, an increase of tyrosine in a non-human organism, as compared to a corresponding non-transformed wild type non-human organism, is conferred in the process of the invention, if the activity of a polypeptide showing the activity of a ABC transporter permease protein, or if the activity of the polypeptide AvinDRAFT_{—}2521, preferably represented by SEQ ID NO. 27883, or a homolog or fragment thereof, or if the activity of a polypeptide encoded by a nucleic acid molecule comprising the nucleic acid SEQ ID NO. 27882, preferably the coding region thereof, or a homolog or fragment thereof, e.g. derived from Azotobacter vinelandii, is increased or generated. For example the activity of a nucleic acid molecule or a polypeptide comprising the nucleic acid, preferably the coding region thereof, or polypeptide or the consensus sequence or the polypeptide motif, as depicted in Table I, II or IV, application No. 3, column 5 or 8 in the respective same line as the nucleic acid molecule SEQ ID NO. 27882 or polypeptide SEQ ID NO. 27883, respectively, or a homolog or a fragment thereof, is increased or generated, or if the activity ABC transporter permease protein is increased or generated in a non-human organism, like a microorganism or a plant cell, plant or part thereof, especially with non-targeted localization, whereby the respective line discloses in column 7 tyrosine. For example, an increase of the tyrosine of at least 1 percent, particularly in a range of 59 to 193-percent is conferred as compared to a corresponding non-transformed wild type non-human organism.

[22397] Accordingly, in one embodiment, an increase of aspartate in a non-human organism, as compared to a corresponding non-transformed wild type non-human organism, is conferred in the process of the invention, if the activity of a polypeptide showing the activity of a acyl-CoA synthase, or if the activity of the polypeptide AvinDRAFT_{—}2754, preferably represented by SEQ ID NO. 28041, or a homolog or fragment thereof, or if the activity of a polypeptide encoded by a nucleic acid molecule comprising the nucleic acid SEQ ID NO. 28040, preferably the coding region thereof, or a homolog or fragment thereof, e.g. derived from Azotobacter vinelandii, is increased or generated. For example the activity of a nucleic acid molecule or a polypeptide comprising the nucleic acid, preferably the coding region thereof, or polypeptide or the consensus sequence or the polypeptide motif, as depicted in Table I, II or IV, application No. 3, column 5 or 8 in the respective same line as the nucleic acid molecule SEQ ID NO. 28040 or polypeptide SEQ ID NO. 28041, respectively, or a homolog or a fragment thereof, is increased or generated, or if the activity acyl-CoA synthase is increased or generated in a non-human organism, like a microorganism or a plant cell, plant or part thereof, especially with non-targeted localization, whereby the respective line discloses in column 7 aspartate. For example, an increase of the aspartate of at least 1 percent, particularly in a range of 96 to 314-percent is conferred as compared to a corresponding non-transformed wild type non-human organism.

[22398] Accordingly, in one embodiment, an increase of tyrosine in a non-human organism, as compared to a corresponding non-transformed wild type non-human organism, is conferred in the process of the invention, if the activity of a polypeptide showing the activity of a acyl-CoA synthase, or if the activity of the polypeptide AvinDRAFT_{—}2754, preferably represented by SEQ ID NO. 28041, or a homolog or fragment thereof, or if the activity of a polypeptide encoded by a nucleic acid molecule comprising the nucleic acid SEQ ID NO. 28040, preferably the coding region thereof, or a homolog or fragment thereof, e.g. derived from Azotobacter vinelandii, is increased or generated. For example the activity of a nucleic acid molecule or a polypeptide comprising the nucleic acid, preferably the coding region thereof, or polypeptide or the consensus sequence or the polypeptide motif, as depicted in Table I, II or IV, application No. 3, column 5 or 8 in the respective same line as the nucleic acid molecule SEQ ID NO. 28040 or polypeptide SEQ ID NO. 28041, respectively, or a homolog or a fragment thereof, is increased or generated, or if the activity acyl-CoA synthase is increased or generated in a non-human organism, like a microorganism or a plant cell, plant or part thereof, especially with non-targeted localization, whereby the respective line discloses in column 7 tyrosine. For example, an increase of the tyrosine of at least 1 percent, particularly in a range of 48 to 95-percent is conferred as compared to a corresponding non-transformed wild type non-human organism.

[22399] Accordingly, in one embodiment, an increase of 5-oxoproline in a non-human organism, as compared to a corresponding non-transformed wild type non-human organism, is conferred in the process of the invention, if the activity of a polypeptide showing the activity of a acyl-CoA synthase, or if the activity of the polypeptide AvinDRAFT_{—}2754, preferably represented by SEQ ID NO. 28041, or a homolog or fragment thereof, or if the activity of a polypeptide encoded by a nucleic acid molecule comprising the nucleic acid SEQ ID NO. 28040, preferably the coding region thereof, or a homolog or fragment thereof, e.g. derived from Azotobacter vinelandii, is increased or generated. For example the activity of a nucleic acid molecule or a polypeptide comprising the nucleic acid, preferably the coding region thereof, or polypeptide or the consensus sequence or the polypeptide motif, as depicted in Table I, II or IV, application No. 3, column 5 or 8 in the respective same line as the nucleic acid molecule SEQ ID NO. 28040 or polypeptide SEQ ID NO. 28041, respectively, or a homolog or a fragment thereof, is increased or generated, or if the activity acyl-CoA synthase is increased or generated in a non-human organism, like a microorganism or a plant cell, plant or part thereof, especially with non-targeted localization, whereby the respective line discloses in column 7 5-oxoproline. For example, an increase of the 5-oxoproline of at least 1 percent, particularly in a range of 34 to 112-percent is conferred as compared to a corresponding non-transformed wild type non-human organism.

[22400] Accordingly, in one embodiment, an increase of aspartate in a non-human organism, as compared to a corresponding non-transformed wild type non-human organism, is conferred in the process of the invention, if the activity of a polypeptide showing the activity of a 2-oxoglutarate dehydrogenase E1 subunit, or if the activity of the polypeptide AvinDRAFT_{—}3028, preferably represented by SEQ ID NO. 6076, or a homolog or fragment thereof, or if the activity of a polypeptide encoded by a nucleic acid molecule comprising the nucleic acid SEQ ID NO. 6075, preferably the coding region thereof, or a homolog or fragment thereof, e.g. derived from Azotobacter vinelandii, is increased or generated. For example the activity of a nucleic acid molecule or a polypeptide comprising the nucleic acid, preferably the coding region thereof, or polypeptide or the consensus sequence or the polypeptide motif, as depicted in Table I, II or IV, application No. 3, column 5 or 8 in the respective same line as the nucleic acid molecule SEQ ID NO. 6075 or polypeptide SEQ ID NO. 6076, respectively, or a homolog or a fragment thereof, is increased or generated, or if the activity 2-oxoglutarate dehydrogenase E1 subunit is increased or generated in a non-human organism, like a microorganism or a plant cell, plant or part thereof, especially with non-targeted localization, whereby the respective line discloses in column 7 aspartate. For example, an increase of the aspartate of at least 1 percent, particularly in a range of 52 to 251-percent is conferred as compared to a corresponding non-transformed wild type non-human organism.

[22401] Accordingly, in one embodiment, an increase of 5-oxoproline in a non-human organism, as compared to a corresponding non-transformed wild type non-human organism, is conferred in the process of the invention, if the activity of a polypeptide showing the activity of a 2-oxoglutarate dehydrogenase E1 subunit, or if the activity of the polypeptide AvinDRAFT_{—}3028, preferably represented by SEQ ID NO. 6076, or a homolog or fragment thereof, or if the activity of a polypeptide encoded by a nucleic acid molecule comprising the nucleic acid SEQ ID NO. 6075, preferably the coding region thereof, or a homolog or fragment thereof, e.g. derived from Azotobacter vinelandii, is increased or generated. For example the activity of a nucleic acid molecule or a polypeptide comprising the nucleic acid, preferably the coding region thereof, or polypeptide or the consensus sequence or the polypeptide motif, as depicted in Table I, II or IV, application No. 3, column 5 or 8 in the respective same line as the nucleic acid molecule SEQ ID NO. 6075 or polypeptide SEQ ID NO. 6076, respectively, or a homolog or a fragment thereof, is increased or generated, or if the activity 2-oxoglutarate dehydrogenase E1 subunit is increased or generated in a non-human organism, like a microorganism or a plant cell, plant or part thereof, especially with non-targeted localization, whereby the respective line discloses in column 7 5-oxoproline. For example, an increase of the 5-oxoproline of at least 1 percent, particularly in a range of 41 to 110-percent is conferred as compared to a corresponding non-transformed wild type non-human organism.

[22402] Accordingly, in one embodiment, an increase of serine in a non-human organism, as compared to a corresponding non-transformed wild type non-human organism, is conferred in the process of the invention, if the activity of a polypeptide showing the activity of a GDP-mannose dehydrogenase, or if the activity of the polypeptide AvinDRAFT_{—}3135, preferably represented by SEQ ID NO. 72347, or a homolog or fragment thereof, or if the activity of a polypeptide encoded by a nucleic acid molecule comprising the nucleic acid SEQ ID NO. 72346, preferably the coding region thereof, or a homolog or fragment thereof, e.g. derived from Azotobacter vinelandii, is increased or generated. For example the activity of a nucleic acid molecule or a polypeptide comprising the nucleic acid, preferably the coding region thereof, or polypeptide or the consensus sequence or the polypeptide motif, as depicted in Table I, II or IV, application No. 3, column 5 or 8 in the respective same line as the nucleic acid molecule SEQ ID NO. 72346 or polypeptide SEQ ID NO. 72347, respectively, or a homolog or a fragment thereof, is increased or generated, or if the activity GDP-mannose dehydrogenase is increased or generated in a non-human organism, like a microorganism or a plant cell, plant or part thereof, especially with non-targeted localization, whereby the respective line discloses in column 7 serine. For example, an increase of the serine of at least 1 percent, particularly in a range of 28 to 60-percent is conferred as compared to a corresponding non-transformed wild type non-human organism.

[22403] Accordingly, in one embodiment, an increase of serine in a non-human organism, as compared to a corresponding non-transformed wild type non-human organism, is conferred in the process of the invention, if the activity of a polypeptide showing the activity of a transcriptional regulator, or if the activity of the polypeptide AvinDRAFT_{—}3186, preferably represented by SEQ ID NO. 29247, or a homolog or fragment thereof, or if the activity of a polypeptide encoded by a nucleic acid molecule comprising the nucleic acid SEQ ID NO. 29246, preferably the coding region thereof, or a homolog or fragment thereof, e.g. derived from Azotobacter vinelandii, is increased or generated. For example the activity of a nucleic acid molecule or a polypeptide comprising the nucleic acid, preferably the coding region thereof, or polypeptide or the consensus sequence or the polypeptide motif, as depicted in Table I, II or IV, application No. 3, column 5 or 8 in the respective same line as the nucleic acid molecule SEQ ID NO. 29246 or polypeptide SEQ ID NO. 29247, respectively, or a homolog or a fragment thereof, is increased or generated, or if the activity transcriptional regulator is increased or generated in a non-human organism, like a microorganism or a plant cell, plant or part thereof, especially with non-targeted localization, whereby the respective line discloses in column 7 serine. For example, an increase of the serine of at least 1 percent, particularly in a range of 34 to 44-percent is conferred as compared to a corresponding non-transformed wild type non-human organism.

[22404] Accordingly, in one embodiment, an increase of phenylalanine in a non-human organism, as compared to a corresponding non-transformed wild type non-human organism, is conferred in the process of the invention, if the activity of a polypeptide showing the activity of a transcriptional regulator, or if the activity of the polypeptide AvinDRAFT_{—}3209, preferably represented by SEQ ID NO. 29287, or a homolog or fragment thereof, or if the activity of a polypeptide encoded by a nucleic acid molecule comprising the nucleic acid SEQ ID NO. 29286, preferably the coding region thereof, or a homolog or fragment thereof, e.g. derived from Azotobacter vinelandii, is increased or generated. For example the activity of a nucleic acid molecule or a polypeptide comprising the nucleic acid, preferably the coding region thereof, or polypeptide or the consensus sequence or the polypeptide motif, as depicted in Table I, II or IV, application No. 3, column 5 or 8 in the respective same line as the nucleic acid molecule SEQ ID NO. 29286 or polypeptide SEQ ID NO. 29287, respectively, or a homolog or a fragment thereof, is increased or generated, or if the activity transcriptional regulator is increased or generated in a non-human organism, like a microorganism or a plant cell, plant or part thereof, especially with non-targeted localization, whereby the respective line discloses in column 7 phenylalanine. For example, an increase of the phenylalanine of at least 1 percent, particularly in a range of 45 to 115-percent is conferred as compared to a corresponding non-transformed wild type non-human organism.

[22405] Accordingly, in one embodiment, an increase of aspartate in a non-human organism, as compared to a corresponding non-transformed wild type non-human organism, is conferred in the process of the invention, if the activity of a polypeptide showing the activity of a oxidoreductase, or if the activity of the polypeptide AvinDRAFT_{—}3253, preferably represented by SEQ ID NO. 29501, or a homolog or fragment thereof, or if the activity of a polypeptide encoded by a nucleic acid molecule comprising the nucleic acid SEQ ID NO. 29500, preferably the coding region thereof, or a homolog or fragment thereof, e.g. derived from Azotobacter vinelandii, is increased or generated. For example the activity of a nucleic acid molecule or a polypeptide comprising the nucleic acid, preferably the coding region thereof, or polypeptide or the consensus sequence or the polypeptide motif, as depicted in Table I, II or IV, application No. 3, column 5 or 8 in the respective same line as the nucleic acid molecule SEQ ID NO. 29500 or polypeptide SEQ ID NO. 29501, respectively, or a homolog or a fragment thereof, is increased or generated, or if the activity oxidoreductase is increased or generated in a non-human organism, like a microorganism or a plant cell, plant or part thereof, especially with non-targeted localization, whereby the respective line discloses in column 7 aspartate. For example, an increase of the aspartate of at least 1 percent, particularly in a range of 60 to 110-percent is conferred as compared to a corresponding non-transformed wild type non-human organism.

[22406] Accordingly, in one embodiment, an increase of tyrosine in a non-human organism, as compared to a corresponding non-transformed wild type non-human organism, is conferred in the process of the invention, if the activity of a polypeptide showing the activity of a oxidoreductase, or if the activity of the polypeptide AvinDRAFT_{—}3253, preferably represented by SEQ ID NO. 29501, or a homolog or fragment thereof, or if the activity of a polypeptide encoded by a nucleic acid molecule comprising the nucleic acid SEQ ID NO. 29500, preferably the coding region thereof, or a homolog or fragment thereof, e.g. derived from Azotobacter vinelandii, is increased or generated. For example the activity of a nucleic acid molecule or a polypeptide comprising the nucleic acid, preferably the coding region thereof, or polypeptide or the consensus sequence or the polypeptide motif, as depicted in Table I, II or IV, application No. 3, column 5 or 8 in the respective same line as the nucleic acid molecule SEQ ID NO. 29500 or polypeptide SEQ ID NO. 29501, respectively, or a homolog or a fragment thereof, is increased or generated, or if the activity oxidoreductase is increased or generated in a non-human organism, like a microorganism or a plant cell, plant or part thereof, especially with non-targeted localization, whereby the respective line discloses in column 7 tyrosine. For example, an increase of the tyrosine of at least 1 percent, particularly in a range of 39 to 99-percent is conferred as compared to a corresponding non-transformed wild type non-human organism.

[22407] Accordingly, in one embodiment, an increase of citrulline in a non-human organism, as compared to a corresponding non-transformed wild type non-human organism, is conferred in the process of the invention, if the activity of a polypeptide showing the activity of a lysyl-tRNA synthetase, or if the activity of the polypeptide AvinDRAFT_{—}3556, preferably represented by SEQ ID NO. 30040, or a homolog or fragment thereof, or if the activity of a polypeptide encoded by a nucleic acid molecule comprising the nucleic acid SEQ ID NO. 30039, preferably the coding region thereof, or a homolog or fragment thereof, e.g. derived from Azotobacter vinelandii, is increased or generated. For example the activity of a nucleic acid molecule or a polypeptide comprising the nucleic acid, preferably the coding region thereof, or polypeptide or the consensus sequence or the polypeptide motif, as depicted in Table I, II or IV, application No. 3, column 5 or 8 in the respective same line as the nucleic acid molecule SEQ ID NO. 30039 or polypeptide SEQ ID NO. 30040, respectively, or a homolog or a fragment thereof, is increased or generated, or if the activity lysyl-tRNA synthetase is increased or generated in a non-human organism, like a microorganism or a plant cell, plant or part thereof, especially with non-targeted localization, whereby the respective line discloses in column 7 citrulline. For example, an increase of the citrulline of at least 1 percent, particularly in a range of 30 to 54-percent is conferred as compared to a corresponding non-transformed wild type non-human organism.

[22408] Accordingly, in one embodiment, an increase of asparagine in a non-human organism, as compared to a corresponding non-transformed wild type non-human organism, is conferred in the process of the invention, if the activity of a polypeptide showing the activity of a ABC transporter component, or if the activity of the polypeptide AVINDRAFT_{—}4128, preferably represented by SEQ ID NO. 72521, or a homolog or fragment thereof, or if the activity of a polypeptide encoded by a nucleic acid molecule comprising the nucleic acid SEQ ID NO. 72520, preferably the coding region thereof, or a homolog or fragment thereof, e.g. derived from AZOTOBACTER VINELANDII, is increased or generated. For example the activity of a nucleic acid molecule or a polypeptide comprising the nucleic acid, preferably the coding region thereof, or polypeptide or the consensus sequence or the polypeptide motif, as depicted in Table I, II or IV, application No. 3, column 5 or 8 in the respective same line as the nucleic acid molecule SEQ ID NO. 72520 or polypeptide SEQ ID NO. 72521, respectively, or a homolog or a fragment thereof, is increased or generated, or if the activity ABC transporter component is increased or generated in a non-human organism, like a microorganism or a plant cell, plant or part thereof, especially with non-targeted localization, whereby the respective line discloses in column 7 asparagine. For example, an increase of the asparagine of at least 1 percent, particularly in a range of 49 to 246-percent is conferred as compared to a corresponding non-transformed wild type non-human organism.

[22409] Accordingly, in one embodiment, an increase of aspartate in a non-human organism, as compared to a corresponding non-transformed wild type non-human organism, is conferred in the process of the invention, if the activity of a polypeptide showing the activity of a glucose-1-phosphate cytidylyltransferase, or if the activity of the polypeptide AvinDRAFT_{—}4384, preferably represented by SEQ ID NO. 31718, or a homolog or fragment thereof, or if the activity of a polypeptide encoded by a nucleic acid molecule comprising the nucleic acid SEQ ID NO. 31717, preferably the coding region thereof, or a homolog or fragment thereof, e.g. derived from Azotobacter vinelandii, is increased or generated. For example the activity of a nucleic acid molecule or a polypeptide comprising the nucleic acid, preferably the coding region thereof, or polypeptide or the consensus sequence or the polypeptide motif, as depicted in Table I, II or IV, application No. 3, column 5 or 8 in the respective same line as the nucleic acid molecule SEQ ID NO. 31717 or polypeptide SEQ ID NO. 31718, respectively, or a homolog or a fragment thereof, is increased or generated, or if the activity glucose-1-phosphate cytidylyltransferase is increased or generated in a non-human organism, like a microorganism or a plant cell, plant or part thereof, especially with non-targeted localization, whereby the respective line discloses in column 7 aspartate. For example, an increase of the aspartate of at least 1 percent, particularly in a range of 75 to 152-percent is conferred as compared to a corresponding non-transformed wild type non-human organism.

[22410] Accordingly, in one embodiment, an increase of glycine in a non-human organism, as compared to a corresponding non-transformed wild type non-human organism, is conferred in the process of the invention, if the activity of a polypeptide showing the activity of a CDP-glucose-4,6-dehydratase, or if the activity of the polypeptide AvinDRAFT_{—}4385, preferably represented by SEQ ID NO. 72936, or a homolog or fragment thereof, or if the activity of a polypeptide encoded by a nucleic acid molecule comprising the nucleic acid SEQ ID NO. 72935, preferably the coding region thereof, or a homolog or fragment thereof, e.g. derived from Azotobacter vinelandii, is increased or generated. For example the activity of a nucleic acid molecule or a polypeptide comprising the nucleic acid, preferably the coding region thereof, or polypeptide or the consensus sequence or the polypeptide motif, as depicted in Table I, II or IV, application No. 3, column 5 or 8 in the respective same line as the nucleic acid molecule SEQ ID NO. 72935 or polypeptide SEQ ID NO. 72936, respectively, or a homolog or a fragment thereof, is increased or generated, or if the activity CDP-glucose-4,6-dehydratase is increased or generated in a non-human organism, like a microorganism or a plant cell, plant or part thereof, especially with non-targeted localization, whereby the respective line discloses in column 7 glycine. For example, an increase of the glycine of at least 1 percent, particularly in a range of 68 to 241-percent is conferred as compared to a corresponding non-transformed wild type non-human organism.

[22411] Accordingly, in one embodiment, an increase of phenylalanine in a non-human organism, as compared to a corresponding non-transformed wild type non-human organism, is conferred in the process of the invention, if the activity of a polypeptide showing the activity of a enoyl-CoA hydratase, or if the activity of the polypeptide AvinDRAFT_{—}4420, preferably represented by SEQ ID NO. 73039, or a homolog or fragment thereof, or if the activity of a polypeptide encoded by a nucleic acid molecule comprising the nucleic acid SEQ ID NO. 73038, preferably the coding region thereof, or a homolog or fragment thereof, e.g. derived from Azotobacter vinelandii, is increased or generated. For example the activity of a nucleic acid molecule or a polypeptide comprising the nucleic acid, preferably the coding region thereof, or polypeptide or the consensus sequence or the polypeptide motif, as depicted in Table I, II or IV, application No. 3, column 5 or 8 in the respective same line as the nucleic acid molecule SEQ ID NO. 73038 or polypeptide SEQ ID NO. 73039, respectively, or a homolog or a fragment thereof, is increased or generated, or if the activity enoyl-CoA hydratase is increased or generated in a non-human organism, like a microorganism or a plant cell, plant or part thereof, especially with non-targeted localization, whereby the respective line discloses in column 7 phenylalanine. For example, an increase of the phenylalanine of at least 1 percent, particularly in a range of 27 to 111-percent is conferred as compared to a corresponding non-transformed wild type non-human organism.

[22412] Accordingly, in one embodiment, an increase of alanine in a non-human organism, as compared to a corresponding non-transformed wild type non-human organism, is conferred in the process of the invention, if the activity of a polypeptide showing the activity of a glutathione peroxidase, or if the activity of the polypeptide AvinDRAFT_{—}4446, preferably represented by SEQ ID NO. 73285, or a homolog or fragment thereof, or if the activity of a polypeptide encoded by a nucleic acid molecule comprising the nucleic acid SEQ ID NO. 73284, preferably the coding region thereof, or a homolog or fragment thereof, e.g. derived from Azotobacter vinelandii, is increased or generated. For example the activity of a nucleic acid molecule or a polypeptide comprising the nucleic acid, preferably the coding region thereof, or polypeptide or the consensus sequence or the polypeptide motif, as depicted in Table I, II or IV, application No. 3, column 5 or 8 in the respective same line as the nucleic acid molecule SEQ ID NO. 73284 or polypeptide SEQ ID NO. 73285, respectively, or a homolog or a fragment thereof, is increased or generated, or if the activity glutathione peroxidase is increased or generated in a non-human organism, like a microorganism or a plant cell, plant or part thereof, especially with non-targeted localization, whereby the respective line discloses in column 7 alanine. For example, an increase of the alanine of at least 1 percent, particularly in a range of 19 to 35-percent is conferred as compared to a corresponding non-transformed wild type non-human organism.

[22413] Accordingly, in one embodiment, an increase of asparagine in a non-human organism, as compared to a corresponding non-transformed wild type non-human organism, is conferred in the process of the invention, if the activity of a polypeptide showing the activity of a aminotransferase, or if the activity of the polypeptide AvinDRAFT_{—}4562, preferably represented by SEQ ID NO. 31927, or a homolog or fragment thereof, or if the activity of a polypeptide encoded by a nucleic acid molecule comprising the nucleic acid SEQ ID NO. 31926, preferably the coding region thereof, or a homolog or fragment thereof, e.g. derived from Azotobacter vinelandii, is increased or generated. For example the activity of a nucleic acid molecule or a polypeptide comprising the nucleic acid, preferably the coding region thereof, or polypeptide or the consensus sequence or the polypeptide motif, as depicted in Table I, II or IV, application No. 3, column 5 or 8 in the respective same line as the nucleic acid molecule SEQ ID NO. 31926 or polypeptide SEQ ID NO. 31927, respectively, or a homolog or a fragment thereof, is increased or generated, or if the activity aminotransferase is increased or generated in a non-human organism, like a microorganism or a plant cell, plant or part thereof, especially with non-targeted localization, whereby the respective line discloses in column 7 asparagine. For example, an increase of the asparagine of at least 1 percent, particularly in a range of 41 to 243-percent is conferred as compared to a corresponding non-transformed wild type non-human organism.

[22414] Accordingly, in one embodiment, an increase of phenylalanine in a non-human organism, as compared to a corresponding non-transformed wild type non-human organism, is conferred in the process of the invention, if the activity of a polypeptide showing the activity of a aminotransferase, or if the activity of the polypeptide AvinDRAFT_{—}4562, preferably represented by SEQ ID NO. 31927, or a homolog or fragment thereof, or if the activity of a polypeptide encoded by a nucleic acid molecule comprising the nucleic acid SEQ ID NO. 31926, preferably the coding region thereof, or a homolog or fragment thereof, e.g. derived from Azotobacter vinelandii, is increased or generated. For example the activity of a nucleic acid molecule or a polypeptide comprising the nucleic acid, preferably the coding region thereof, or polypeptide or the consensus sequence or the polypeptide motif, as depicted in Table I, II or IV, application No. 3, column 5 or 8 in the respective same line as the nucleic acid molecule SEQ ID NO. 31926 or polypeptide SEQ ID NO. 31927, respectively, or a homolog or a fragment thereof, is increased or generated, or if the activity aminotransferase is increased or generated in a non-human organism, like a microorganism or a plant cell, plant or part thereof, especially with non-targeted localization, whereby the respective line discloses in column 7 phenylalanine. For example, an increase of the phenylalanine of at least 1 percent, particularly in a range of 34 to 69-percent is conferred as compared to a corresponding non-transformed wild type non-human organism.

[22415] Accordingly, in one embodiment, an increase of tyrosine in a non-human organism, as compared to a corresponding non-transformed wild type non-human organism, is conferred in the process of the invention, if the activity of a polypeptide showing the activity of a NADH-quinone oxidoreductase subunit, or if the activity of the polypeptide AvinDRAFT_{—}4606, preferably represented by SEQ ID NO. 73720, or a homolog or fragment thereof, or if the activity of a polypeptide encoded by a nucleic acid molecule comprising the nucleic acid SEQ ID NO. 73719, preferably the coding region thereof, or a homolog or fragment thereof, e.g. derived from Azotobacter vinelandii, is increased or generated. For example the activity of a nucleic acid molecule or a polypeptide comprising the nucleic acid, preferably the coding region thereof, or polypeptide or the consensus sequence or the polypeptide motif, as depicted in Table I, II or IV, application No. 3, column 5 or 8 in the respective same line as the nucleic acid molecule SEQ ID NO. 73719 or polypeptide SEQ ID NO. 73720, respectively, or a homolog or a fragment thereof, is increased or generated, or if the activity NADH-quinone oxidoreductase subunit is increased or generated in a non-human organism, like a microorganism or a plant cell, plant or part thereof, especially with non-targeted localization, whereby the respective line discloses in column 7 tyrosine. For example, an increase of the tyrosine of at least 1 percent, particularly in a range of 36 to 126 percent is conferred as compared to a corresponding non-transformed wild type non-human organism.

[22416] Accordingly, in one embodiment, an increase of phenylalanine in a non-human organism, as compared to a corresponding non-transformed wild type non-human organism, is conferred in the process of the invention, if the activity of a polypeptide showing the activity of a glutamate-ammonia-ligase, or if the activity of the polypeptide AvinDRAFT_{—}4836, preferably represented by SEQ ID NO. 74164, or a homolog or fragment thereof, or if the activity of a polypeptide encoded by a nucleic acid molecule comprising the nucleic acid SEQ ID NO. 74163, preferably the coding region thereof, or a homolog or fragment thereof, e.g. derived from Azotobacter vinelandii, is increased or generated. For example the activity of a nucleic acid molecule or a polypeptide comprising the nucleic acid, preferably the coding region thereof, or polypeptide or the consensus sequence or the polypeptide motif, as depicted in Table I, II or IV, application No. 3, column 5 or 8 in the respective same line as the nucleic acid molecule SEQ ID NO. 74163 or polypeptide SEQ ID NO. 74164, respectively, or a homolog or a fragment thereof, is increased or generated, or if the activity glutamate-ammonia-ligase is increased or generated in a non-human organism, like a microorganism or a plant cell, plant or part thereof, especially with non-targeted localization, whereby the respective line discloses in column 7 phenylalanine. For example, an increase of the phenylalanine of at least 1 percent, particularly in a range of 78 to 218-percent is conferred as compared to a corresponding non-transformed wild type non-human organism.

[22417] Accordingly, in one embodiment, an increase of tyrosine in a non-human organism, as compared to a corresponding non-transformed wild type non-human organism, is conferred in the process of the invention, if the activity of a polypeptide showing the activity of a glutamate-ammonia-ligase, or if the activity of the polypeptide AvinDRAFT_{—}4836, preferably represented by SEQ ID NO. 74164, or a homolog or fragment thereof, or if the activity of a polypeptide encoded by a nucleic acid molecule comprising the nucleic acid SEQ ID NO. 74163, preferably the coding region thereof, or a homolog or fragment thereof, e.g. derived from Azotobacter vinelandii, is increased or generated. For example the activity of a nucleic acid molecule or a polypeptide comprising the nucleic acid, preferably the coding region thereof, or polypeptide or the consensus sequence or the polypeptide motif, as depicted in Table I, II or IV, application No. 3, column 5 or 8 in the respective same line as the nucleic acid molecule SEQ ID NO. 74163 or polypeptide SEQ ID NO. 74164, respectively, or a homolog or a fragment thereof, is increased or generated, or if the activity glutamate-ammonia-ligase is increased or generated in a non-human organism, like a microorganism or a plant cell, plant or part thereof, especially with non-targeted localization, whereby the respective line discloses in column 7 tyrosine. For example, an increase of the tyrosine of at least 1 percent, particularly in a range of 42 to 162-percent is conferred as compared to a corresponding non-transformed wild type non-human organism.

[22418] Accordingly, in one embodiment, an increase of 5-oxoproline in a non-human organism, as compared to a corresponding non-transformed wild type non-human organism, is conferred in the process of the invention, if the activity of a polypeptide showing the activity of a RNA polymerase sigma factor, or if the activity of the polypeptide AvinDRAFT_{—}4989, preferably represented by SEQ ID NO. 74453, or a homolog or fragment thereof, or if the activity of a polypeptide encoded by a nucleic acid molecule comprising the nucleic acid SEQ ID NO. 74452, preferably the coding region thereof, or a homolog or fragment thereof, e.g. derived from Azotobacter vinelandii, is increased or generated. For example the activity of a nucleic acid molecule or a polypeptide comprising the nucleic acid, preferably the coding region thereof, or polypeptide or the consensus sequence or the polypeptide motif, as depicted in Table I, II or IV, application No. 3, column 5 or 8 in the respective same line as the nucleic acid molecule SEQ ID NO. 74452 or polypeptide SEQ ID NO. 74453, respectively, or a homolog or a fragment thereof, is increased or generated, or if the activity RNA polymerase sigma factor is increased or generated in a non-human organism, like a microorganism or a plant cell, plant or part thereof, especially with non-targeted localization, whereby the respective line discloses in column 7 5-oxoproline. For example, an increase of the 5-oxoproline of at least 1 percent, particularly in a range of 32 to 62-percent is conferred as compared to a corresponding non-transformed wild type non-human organism.

[22419] Accordingly, in one embodiment, an increase of phenylalanine in a non-human organism, as compared to a corresponding non-transformed wild type non-human organism, is conferred in the process of the invention, if the activity of a polypeptide showing the activity of a hydrolase, or if the activity of the polypeptide AvinDRAFT_{—}5103, preferably represented by SEQ ID NO. 6511, or a homolog or fragment thereof, or if the activity of a polypeptide encoded by a nucleic acid molecule comprising the nucleic acid SEQ ID NO. 6510, preferably the coding region thereof, or a homolog or fragment thereof, e.g. derived from Azotobacter vinelandii, is increased or generated. For example the activity of a nucleic acid molecule or a polypeptide comprising the nucleic acid, preferably the coding region thereof, or polypeptide or the consensus sequence or the polypeptide motif, as depicted in Table I, II or IV, application No. 3, column 5 or 8 in the respective same line as the nucleic acid molecule SEQ ID NO. 6510 or polypeptide SEQ ID NO. 6511, respectively, or a homolog or a fragment thereof, is increased or generated, or if the activity hydrolase is increased or generated in a non-human organism, like a microorganism or a plant cell, plant or part thereof, especially with non-targeted localization, whereby the respective line discloses in column 7 phenylalanine. For example, an increase of the phenylalanine of at least 1 percent, particularly in a range of 26 to 3660-percent is conferred as compared to a corresponding non-transformed wild type non-human organism.

[22420] Accordingly, in one embodiment, an increase of tyrosine in a non-human organism, as compared to a corresponding non-transformed wild type non-human organism, is conferred in the process of the invention, if the activity of a polypeptide showing the activity of a hydrolase, or if the activity of the polypeptide AvinDRAFT_{—}5103, preferably represented by SEQ ID NO. 6511, or a homolog or fragment thereof, or if the activity of a polypeptide encoded by a nucleic acid molecule comprising the nucleic acid SEQ ID NO. 6510, preferably the coding region thereof, or a homolog or fragment thereof, e.g. derived from Azotobacter vinelandii, is increased or generated. For example the activity of a nucleic acid molecule or a polypeptide comprising the nucleic acid, preferably the coding region thereof, or polypeptide or the consensus sequence or the polypeptide motif, as depicted in Table I, II or IV, application No. 3, column 5 or 8 in the respective same line as the nucleic acid molecule SEQ ID NO. 6510 or polypeptide SEQ ID NO. 6511, respectively, or a homolog or a fragment thereof, is increased or generated, or if the activity hydrolase is increased or generated in a non-human organism, like a microorganism or a plant cell, plant or part thereof, especially with non-targeted localization, whereby the respective line discloses in column 7 tyrosine. For example, an increase of the tyrosine of at least 1 percent, particularly in a range of 51 to 3096-percent is conferred as compared to a corresponding non-transformed wild type non-human organism.

[22421] Accordingly, in one embodiment, an increase of 5-oxoproline in a non-human organism, as compared to a corresponding non-transformed wild type non-human organism, is conferred in the process of the invention, if the activity of a polypeptide showing the activity of a hydrolase, or if the activity of the polypeptide AvinDRAFT_{—}5103, preferably represented by SEQ ID NO. 6511, or a homolog or fragment thereof, or if the activity of a polypeptide encoded by a nucleic acid molecule comprising the nucleic acid SEQ ID NO. 6510, preferably the coding region thereof, or a homolog or fragment thereof, e.g. derived from Azotobacter vinelandii, is increased or generated. For example the activity of a nucleic acid molecule or a polypeptide comprising the nucleic acid, preferably the coding region thereof, or polypeptide or the consensus sequence or the polypeptide motif, as depicted in Table I, II or IV, application No. 3, column 5 or 8 in the respective same line as the nucleic acid molecule SEQ ID NO. 6510 or polypeptide SEQ ID NO. 6511, respectively, or a homolog or a fragment thereof, is increased or generated, or if the activity hydrolase is increased or generated in a non-human organism, like a microorganism or a plant cell, plant or part thereof, especially with non-targeted localization, whereby the respective line discloses in column 7 5-oxoproline. For example, an increase of the 5-oxoproline of at least 1 percent, particularly in a range of 34 to 205-percent is conferred as compared to a corresponding non-transformed wild type non-human organism.

[22422] Accordingly, in one embodiment, an increase of aspartate in a non-human organism, as compared to a corresponding non-transformed wild type non-human organism, is conferred in the process of the invention, if the activity of a polypeptide showing the activity of a glutamate-ammonia-ligase, or if the activity of the polypeptide AvinDRAFT_{—}5246, preferably represented by SEQ ID NO. 32038, or a homolog or fragment thereof, or if the activity of a polypeptide encoded by a nucleic acid molecule comprising the nucleic acid SEQ ID NO. 32037, preferably the coding region thereof, or a homolog or fragment thereof, e.g. derived from Azotobacter vinelandii, is increased or generated. For example the activity of a nucleic acid molecule or a polypeptide comprising the nucleic acid, preferably the coding region thereof, or polypeptide or the consensus sequence or the polypeptide motif, as depicted in Table I, II or IV, application No. 3, column 5 or 8 in the respective same line as the nucleic acid molecule SEQ ID NO. 32037 or polypeptide SEQ ID NO. 32038, respectively, or a homolog or a fragment thereof, is increased or generated, or if the activity glutamate-ammonia-ligase is increased or generated in a non-human organism, like a microorganism or a plant cell, plant or part thereof, especially with non-targeted localization, whereby the respective line discloses in column 7 aspartate. For example, an increase of the aspartate of at least 1 percent, particularly in a range of 106 to 126-percent is conferred as compared to a corresponding non-transformed wild type non-human organism.

[22423] Accordingly, in one embodiment, an increase of serine in a non-human organism, as compared to a corresponding non-transformed wild type non-human organism, is conferred in the process of the invention, if the activity of a polypeptide showing the activity of a glutamate-ammonia-ligase, or if the activity of the polypeptide AvinDRAFT_{—}5246, preferably represented by SEQ ID NO. 32038, or a homolog or fragment thereof, or if the activity of a polypeptide encoded by a nucleic acid molecule comprising the nucleic acid SEQ ID NO. 32037, preferably the coding region thereof, or a homolog or fragment thereof, e.g. derived from Azotobacter vinelandii, is increased or generated. For example the activity of a nucleic acid molecule or a polypeptide comprising the nucleic acid, preferably the coding region thereof, or polypeptide or the consensus sequence or the polypeptide motif, as depicted in Table I, II or IV, application No. 3, column 5 or 8 in the respective same line as the nucleic acid molecule SEQ ID NO. 32037 or polypeptide SEQ ID NO. 32038, respectively, or a homolog or a fragment thereof, is increased or generated, or if the activity glutamate-ammonia-ligase is increased or generated in a non-human organism, like a microorganism or a plant cell, plant or part thereof, especially with non-targeted localization, whereby the respective line discloses in column 7 serine. For example, an increase of the serine of at least 1 percent, particularly in a range of 35 to 147-percent is conferred as compared to a corresponding non-transformed wild type non-human organism.

[22424] Accordingly, in one embodiment, an increase of tyrosine in a non-human organism, as compared to a corresponding non-transformed wild type non-human organism, is conferred in the process of the invention, if the activity of a polypeptide showing the activity of a glutamate-ammonia-ligase, or if the activity of the polypeptide AvinDRAFT_{—}5246, preferably represented by SEQ ID NO. 32038, or a homolog or fragment thereof, or if the activity of a polypeptide encoded by a nucleic acid molecule comprising the nucleic acid SEQ ID NO. 32037, preferably the coding region thereof, or a homolog or fragment thereof, e.g. derived from Azotobacter vinelandii, is increased or generated. For example the activity of a nucleic acid molecule or a polypeptide comprising the nucleic acid, preferably the coding region thereof, or polypeptide or the consensus sequence or the polypeptide motif, as depicted in Table I, II or IV, application No. 3, column 5 or 8 in the respective same line as the nucleic acid molecule SEQ ID NO. 32037 or polypeptide SEQ ID NO. 32038, respectively, or a homolog or a fragment thereof, is increased or generated, or if the activity glutamate-ammonia-ligase is increased or generated in a non-human organism, like a microorganism or a plant cell, plant or part thereof, especially with non-targeted localization, whereby the respective line discloses in column 7 tyrosine. For example, an increase of the tyrosine of at least 1 percent, particularly in a range of 41 to 131-percent is conferred as compared to a corresponding non-transformed wild type non-human organism.

[22425] Accordingly, in one embodiment, an increase of phenylalanine in a non-human organism, as compared to a corresponding non-transformed wild type non-human organism, is conferred in the process of the invention, if the activity of a polypeptide showing the activity of a fumarylacetoacetate hydrolase, or if the activity of the polypeptide AvinDRAFT_{—}5292, preferably represented by SEQ ID NO. 32309, or a homolog or fragment thereof, or if the activity of a polypeptide encoded by a nucleic acid molecule comprising the nucleic acid SEQ ID NO. 32308, preferably the coding region thereof, or a homolog or fragment thereof, e.g. derived from Azotobacter vinelandii, is increased or generated. For example the activity of a nucleic acid molecule or a polypeptide comprising the nucleic acid, preferably the coding region thereof, or polypeptide or the consensus sequence or the polypeptide motif, as depicted in Table I, II or IV, application No. 3, column 5 or 8 in the respective same line as the nucleic acid molecule SEQ ID NO. 32308 or polypeptide SEQ ID NO. 32309, respectively, or a homolog or a fragment thereof, is increased or generated, or if the activity fumarylacetoacetate hydrolase is increased or generated in a non-human organism, like a microorganism or a plant cell, plant or part thereof, especially with non-targeted localization, whereby the respective line discloses in column 7 phenylalanine. For example, an increase of the phenylalanine of at least 1 percent, particularly in a range of 36 to 246-percent is conferred as compared to a corresponding non-transformed wild type non-human organism.

[22426] Accordingly, in one embodiment, an increase of tyrosine in a non-human organism, as compared to a corresponding non-transformed wild type non-human organism, is conferred in the process of the invention, if the activity of a polypeptide showing the activity of a fumarylacetoacetate hydrolase, or if the activity of the polypeptide AvinDRAFT_{—}5292, preferably represented by SEQ ID NO. 32309, or a homolog or fragment thereof, or if the activity of a polypeptide encoded by a nucleic acid molecule comprising the nucleic acid SEQ ID NO. 32308, preferably the coding region thereof, or a homolog or fragment thereof, e.g. derived from Azotobacter vinelandii, is increased or generated. For example the activity of a nucleic acid molecule or a polypeptide comprising the nucleic acid, preferably the coding region thereof, or polypeptide or the consensus sequence or the polypeptide motif, as depicted in Table I, II or IV, application No. 3, column 5 or 8 in the respective same line as the nucleic acid molecule SEQ ID NO. 32308 or polypeptide SEQ ID NO. 32309, respectively, or a homolog or a fragment thereof, is increased or generated, or if the activity fumarylacetoacetate hydrolase is increased or generated in a non-human organism, like a microorganism or a plant cell, plant or part thereof, especially with non-targeted localization, whereby the respective line discloses in column 7 tyrosine. For example, an increase of the tyrosine of at least 1 percent, particularly in a range of 35 to 324-percent is conferred as compared to a corresponding non-transformed wild type non-human organism.

[22427] Accordingly, in one embodiment, an increase of serine in a non-human organism, as compared to a corresponding non-transformed wild type non-human organism, is conferred in the process of the invention, if the activity of a polypeptide showing the activity of a HesB/YadR/YfhF family protein, or if the activity of the polypeptide AvinDRAFT_{—}5467, preferably represented by SEQ ID NO. 32649, or a homolog or fragment thereof, or if the activity of a polypeptide encoded by a nucleic acid molecule comprising the nucleic acid SEQ ID NO. 32648, preferably the coding region thereof, or a homolog or fragment thereof, e.g. derived from Azotobacter vinelandii, is increased or generated. For example the activity of a nucleic acid molecule or a polypeptide comprising the nucleic acid, preferably the coding region thereof, or polypeptide or the consensus sequence or the polypeptide motif, as depicted in Table I, II or IV, application No. 3, column 5 or 8 in the respective same line as the nucleic acid molecule SEQ ID NO. 32648 or polypeptide SEQ ID NO. 32649, respectively, or a homolog or a fragment thereof, is increased or generated, or if the activity HesB/YadR/YfhF family protein is increased or generated in a non-human organism, like a microorganism or a plant cell, plant or part thereof, especially with non-targeted localization, whereby the respective line discloses in column 7 serine. For example, an increase of the serine of at least 1 percent, particularly in a range of 47 to 78-percent is conferred as compared to a corresponding non-transformed wild type non-human organism.

[22428] Accordingly, in one embodiment, an increase of aspartate in a non-human organism, as compared to a corresponding non-transformed wild type non-human organism, is conferred in the process of the invention, if the activity of a polypeptide showing the activity of a peptidase, or if the activity of the polypeptide AvinDRAFT_{—}5579, preferably represented by SEQ ID NO. 74663, or a homolog or fragment thereof, or if the activity of a polypeptide encoded by a nucleic acid molecule comprising the nucleic acid SEQ ID NO. 74662, preferably the coding region thereof, or a homolog or fragment thereof, e.g. derived from Azotobacter vinelandii, is increased or generated. For example the activity of a nucleic acid molecule or a polypeptide comprising the nucleic acid, preferably the coding region thereof, or polypeptide or the consensus sequence or the polypeptide motif, as depicted in Table I, II or IV, application No. 3, column 5 or 8 in the respective same line as the nucleic acid molecule SEQ ID NO. 74662 or polypeptide SEQ ID NO. 74663, respectively, or a homolog or a fragment thereof, is increased or generated, or if the activity peptidase is increased or generated in a non-human organism, like a microorganism or a plant cell, plant or part thereof, especially with non-targeted localization, whereby the respective line discloses in column 7 aspartate. For example, an increase of the aspartate of at least 1 percent, particularly in a range of 56 to 110-percent is conferred as compared to a corresponding non-transformed wild type non-human organism.

[22429] Accordingly, in one embodiment, an increase of aspartate in a non-human organism, as compared to a corresponding non-transformed wild type non-human organism, is conferred in the process of the invention, if the activity of a polypeptide showing the activity of a L-aspartate oxidase, or if the activity of the polypeptide AvinDRAFT_{—}5644, preferably represented by SEQ ID NO. 33086, or a homolog or fragment thereof, or if the activity of a polypeptide encoded by a nucleic acid molecule comprising the nucleic acid SEQ ID NO. 33085, preferably the coding region thereof, or a homolog or fragment thereof, e.g. derived from Azotobacter vinelandii, is increased or generated. For example the activity of a nucleic acid molecule or a polypeptide comprising the nucleic acid, preferably the coding region thereof, or polypeptide or the consensus sequence or the polypeptide motif, as depicted in Table I, II or IV, application No. 3, column 5 or 8 in the respective same line as the nucleic acid molecule SEQ ID NO. 33085 or polypeptide SEQ ID NO. 33086, respectively, or a homolog or a fragment thereof, is increased or generated, or if the activity L-aspartate oxidase is increased or generated in a non-human organism, like a microorganism or a plant cell, plant or part thereof, especially with non-targeted localization, whereby the respective line discloses in column 7 aspartate. For example, an increase of the aspartate of at least 1 percent, particularly in a range of 52 to 122-percent is conferred as compared to a corresponding non-transformed wild type non-human organism.

[22430] Accordingly, in one embodiment, an increase of phenylalanine in a non-human organism, as compared to a corresponding non-transformed wild type non-human organism, is conferred in the process of the invention, if the activity of a polypeptide showing the activity of a Chaperone protein CIpB, or if the activity of the polypeptide AvinDRAFT_{—}6093, preferably represented by SEQ ID NO. 33597, or a homolog or fragment thereof, or if the activity of a polypeptide encoded by a nucleic acid molecule comprising the nucleic acid SEQ ID NO. 33596, preferably the coding region thereof, or a homolog or fragment thereof, e.g. derived from Azotobacter vinelandii, is increased or generated. For example the activity of a nucleic acid molecule or a polypeptide comprising the nucleic acid, preferably the coding region thereof, or polypeptide or the consensus sequence or the polypeptide motif, as depicted in Table I, II or IV, application No. 3, column 5 or 8 in the respective same line as the nucleic acid molecule SEQ ID NO. 33596 or polypeptide SEQ ID NO. 33597, respectively, or a homolog or a fragment thereof, is increased or generated, or if the activity Chaperone protein CIpB is increased or generated in a non-human organism, like a microorganism or a plant cell, plant or part thereof, especially with non-targeted localization, whereby the respective line discloses in column 7 phenylalanine. For example, an increase of the phenylalanine of at least 1 percent, particularly in a range of 39 to 90-percent is conferred as compared to a corresponding non-transformed wild type non-human organism.

[22431] Accordingly, in one embodiment, an increase of phenylalanine in a non-human organism, as compared to a corresponding non-transformed wild type non-human organism, is conferred in the process of the invention, if the activity of a polypeptide showing the activity of a electron transfer flavoprotein subunit beta, or if the activity of the polypeptide AvinDRAFT_{—}6679, preferably represented by SEQ ID NO. 74730, or a homolog or fragment thereof, or if the activity of a polypeptide encoded by a nucleic acid molecule comprising the nucleic acid SEQ ID NO. 74729, preferably the coding region thereof, or a homolog or fragment thereof, e.g. derived from Azotobacter vinelandii, is increased or generated. For example the activity of a nucleic acid molecule or a polypeptide comprising the nucleic acid, preferably the coding region thereof, or polypeptide or the consensus sequence or the polypeptide motif, as depicted in Table I, II or IV, application No. 3, column 5 or 8 in the respective same line as the nucleic acid molecule SEQ ID NO. 74729 or polypeptide SEQ ID NO. 74730, respectively, or a homolog or a fragment thereof, is increased or generated, or if the activity electron transfer flavoprotein subunit beta is increased or generated in a non-human organism, like a microorganism or a plant cell, plant or part thereof, especially with non-targeted localization, whereby the respective line discloses in column 7 phenylalanine. For example, an increase of the phenylalanine of at least 1 percent, particularly in a range of 46 to 143-percent is conferred as compared to a corresponding non-transformed wild type non-human organism.

[22432] Accordingly, in one embodiment, an increase of tyrosine in a non-human organism, as compared to a corresponding non-transformed wild type non-human organism, is conferred in the process of the invention, if the activity of a polypeptide showing the activity of a electron transfer flavoprotein subunit beta, or if the activity of the polypeptide AvinDRAFT_{—}6679, preferably represented by SEQ ID NO. 74730, or a homolog or fragment thereof, or if the activity of a polypeptide encoded by a nucleic acid molecule comprising the nucleic acid SEQ ID NO. 74729, preferably the coding region thereof, or a homolog or fragment thereof, e.g. derived from Azotobacter vinelandii, is increased or generated. For example the activity of a nucleic acid molecule or a polypeptide comprising the nucleic acid, preferably the coding region thereof, or polypeptide or the consensus sequence or the polypeptide motif, as depicted in Table I, II or IV, application No. 3, column 5 or 8 in the respective same line as the nucleic acid molecule SEQ ID NO. 74729 or polypeptide SEQ ID NO. 74730, respectively, or a homolog or a fragment thereof, is increased or generated, or if the activity electron transfer flavoprotein subunit beta is increased or generated in a non-human organism, like a microorganism or a plant cell, plant or part thereof, especially with non-targeted localization, whereby the respective line discloses in column 7 tyrosine. For example, an increase of the tyrosine of at least 1 percent, particularly in a range of 50 to 143-percent is conferred as compared to a corresponding non-transformed wild type non-human organism.

[22433] Accordingly, in one embodiment, an increase of citrulline in a non-human organism, as compared to a corresponding non-transformed wild type non-human organism, is conferred in the process of the invention, if the activity of a polypeptide showing the activity of a AX653549-protein, or if the activity of the polypeptide AX653549, preferably represented by SEQ ID NO. 34302, or a homolog or fragment thereof, or if the activity of a polypeptide encoded by a nucleic acid molecule comprising the nucleic acid SEQ ID NO. 34301, preferably the coding region thereof, or a homolog or fragment thereof, e.g. derived from Oryza sativa, is increased or generated. For example the activity of a nucleic acid molecule or a polypeptide comprising the nucleic acid, preferably the coding region thereof, or polypeptide or the consensus sequence or the polypeptide motif, as depicted in Table I, II or IV, application No. 3, column 5 or 8 in the respective same line as the nucleic acid molecule SEQ ID NO. 34301 or polypeptide SEQ ID NO. 34302, respectively, or a homolog or a fragment thereof, is increased or generated, or if the activity AX653549-protein is increased or generated in a non-human organism, like a microorganism or a plant cell, plant or part thereof, especially with non-targeted localization, whereby the respective line discloses in column 7 citrulline. For example, an increase of the citrulline of at least 1 percent, particularly in a range of 39 to 48-percent is conferred as compared to a corresponding non-transformed wild type non-human organism.

[22434] Accordingly, in one embodiment, an increase of 5-oxoproline in a non-human organism, as compared to a corresponding non-transformed wild type non-human organism, is conferred in the process of the invention, if the activity of a polypeptide showing the activity of a AX653549-protein, or if the activity of the polypeptide AX653549, preferably represented by SEQ ID NO. 34302, or a homolog or fragment thereof, or if the activity of a polypeptide encoded by a nucleic acid molecule comprising the nucleic acid SEQ ID NO. 34301, preferably the coding region thereof, or a homolog or fragment thereof, e.g. derived from Oryza sativa, is increased or generated. For example the activity of a nucleic acid molecule or a polypeptide comprising the nucleic acid, preferably the coding region thereof, or polypeptide or the consensus sequence or the polypeptide motif, as depicted in Table I, II or IV, application No. 3, column 5 or 8 in the respective same line as the nucleic acid molecule SEQ ID NO. 34301 or polypeptide SEQ ID NO. 34302, respectively, or a homolog or a fragment thereof, is increased or generated, or if the activity AX653549-protein is increased or generated in a non-human organism, like a microorganism or a plant cell, plant or part thereof, especially with non-targeted localization, whereby the respective line discloses in column 7 5-oxoproline. For example, an increase of the 5-oxoproline of at least 1 percent, particularly in a range of 43 to 93-percent is conferred as compared to a corresponding non-transformed wild type non-human organism.

[22435] Accordingly, in one embodiment, an increase of aspartate in a non-human organism, as compared to a corresponding non-transformed wild type non-human organism, is conferred in the process of the invention, if the activity of a polypeptide showing the activity of a AY087308-protein, or if the activity of the polypeptide AY087308, preferably represented by SEQ ID NO. 34603, or a homolog or fragment thereof, or if the activity of a polypeptide encoded by a nucleic acid molecule comprising the nucleic acid SEQ ID NO. 34602, preferably the coding region thereof, or a homolog or fragment thereof, e.g. derived from Arabidopsis thaliana, is increased or generated. For example the activity of a nucleic acid molecule or a polypeptide comprising the nucleic acid, preferably the coding region thereof, or polypeptide or the consensus sequence or the polypeptide motif, as depicted in Table I, II or IV, application No. 3, column 5 or 8 in the respective same line as the nucleic acid molecule SEQ ID NO. 34602 or polypeptide SEQ ID NO. 34603, respectively, or a homolog or a fragment thereof, is increased or generated, or if the activity AY087308-protein is increased or generated in a non-human organism, like a microorganism or a plant cell, plant or part thereof, especially with non-targeted localization, whereby the respective line discloses in column 7 aspartate. For example, an increase of the aspartate of at least 1 percent, particularly in a range of 57 to 119-percent is conferred as compared to a corresponding non-transformed wild type non-human organism.

[22436] Accordingly, in one embodiment, an increase of 5-oxoproline in a non-human organism, as compared to a corresponding non-transformed wild type non-human organism, is conferred in the process of the invention, if the activity of a polypeptide showing the activity of a AY087308-protein, or if the activity of the polypeptide AY087308, preferably represented by SEQ ID NO. 34603, or a homolog or fragment thereof, or if the activity of a polypeptide encoded by a nucleic acid molecule comprising the nucleic acid SEQ ID NO. 34602, preferably the coding region thereof, or a homolog or fragment thereof, e.g. derived from Arabidopsis thaliana, is increased or generated. For example the activity of a nucleic acid molecule or a polypeptide comprising the nucleic acid, preferably the coding region thereof, or polypeptide or the consensus sequence or the polypeptide motif, as depicted in Table I, II or IV, application No. 3, column 5 or 8 in the respective same line as the nucleic acid molecule SEQ ID NO. 34602 or polypeptide SEQ ID NO. 34603, respectively, or a homolog or a fragment thereof, is increased or generated, or if the activity AY087308-protein is increased or generated in a non-human organism, like a microorganism or a plant cell, plant or part thereof, especially with non-targeted localization, whereby the respective line discloses in column 7 5-oxoproline. For example, an increase of the 5-oxoproline of at least 1 percent, particularly in a range of 36 to 71-percent is conferred as compared to a corresponding non-transformed wild type non-human organism.

[22437] Accordingly, in one embodiment, an increase of alanine in a non-human organism, as compared to a corresponding non-transformed wild type non-human organism, is conferred in the process of the invention, if the activity of a polypeptide showing the activity of a threonine synthase, or if the activity of the polypeptide B0004, preferably represented by SEQ ID NO. 34890, or a homolog or fragment thereof, or if the activity of a polypeptide encoded by a nucleic acid molecule comprising the nucleic acid SEQ ID NO. 34889, preferably the coding region thereof, or a homolog or fragment thereof, e.g. derived from Escherichia coli, is increased or generated. For example the activity of a nucleic acid molecule or a polypeptide comprising the nucleic acid, preferably the coding region thereof, or polypeptide or the consensus sequence or the polypeptide motif, as depicted in Table I, II or IV, application No. 3, column 5 or 8 in the respective same line as the nucleic acid molecule SEQ ID NO. 34889 or polypeptide SEQ ID NO. 34890, respectively, or a homolog or a fragment thereof, is increased or generated, or if the activity threonine synthase is increased or generated in a non-human organism, like a microorganism or a plant cell, plant or part thereof, especially with plastidic localization, whereby the respective line discloses in column 7 alanine. For example, an increase of the alanine of at least 1 percent, particularly in a range of 29 to 147-percent is conferred as compared to a corresponding non-transformed wild type non-human organism.

[22438] Accordingly, in one embodiment, an increase of phenylalanine in a non-human organism, as compared to a corresponding non-transformed wild type non-human organism, is conferred in the process of the invention, if the activity of a polypeptide showing the activity of a threonine synthase, or if the activity of the polypeptide B0004, preferably represented by SEQ ID NO. 34890, or a homolog or fragment thereof, or if the activity of a polypeptide encoded by a nucleic acid molecule comprising the nucleic acid SEQ ID NO. 34889, preferably the coding region thereof, or a homolog or fragment thereof, e.g. derived from Escherichia coli, is increased or generated. For example the activity of a nucleic acid molecule or a polypeptide comprising the nucleic acid, preferably the coding region thereof, or polypeptide or the consensus sequence or the polypeptide motif, as depicted in Table I, II or IV, application No. 3, column 5 or 8 in the respective same line as the nucleic acid molecule SEQ ID NO. 34889 or polypeptide SEQ ID NO. 34890, respectively, or a homolog or a fragment thereof, is increased or generated, or if the activity threonine synthase is increased or generated in a non-human organism, like a microorganism or a plant cell, plant or part thereof, especially with plastidic localization, whereby the respective line discloses in column 7 phenylalanine. For example, an increase of the phenylalanine of at least 1 percent, particularly in a range of 30 to 200-percent is conferred as compared to a corresponding non-transformed wild type non-human organism.

[22439] Accordingly, in one embodiment, an increase of serine in a non-human organism, as compared to a corresponding non-transformed wild type non-human organism, is conferred in the process of the invention, if the activity of a polypeptide showing the activity of a threonine synthase, or if the activity of the polypeptide B0004, preferably represented by SEQ ID NO. 34890, or a homolog or fragment thereof, or if the activity of a polypeptide encoded by a nucleic acid molecule comprising the nucleic acid SEQ ID NO. 34889, preferably the coding region thereof, or a homolog or fragment thereof, e.g. derived from Escherichia coli, is increased or generated. For example the activity of a nucleic acid molecule or a polypeptide comprising the nucleic acid, preferably the coding region thereof, or polypeptide or the consensus sequence or the polypeptide motif, as depicted in Table I, II or IV, application No. 3, column 5 or 8 in the respective same line as the nucleic acid molecule SEQ ID NO. 34889 or polypeptide SEQ ID NO. 34890, respectively, or a homolog or a fragment thereof, is increased or generated, or if the activity threonine synthase is increased or generated in a non-human organism, like a microorganism or a plant cell, plant or part thereof, especially with plastidic localization, whereby the respective line discloses in column 7 serine. For example, an increase of the serine of at least 1 percent, particularly in a range of 23 to 195-percent is conferred as compared to a corresponding non-transformed wild type non-human organism.

[22440] Accordingly, in one embodiment, an increase of tyrosine in a non-human organism, as compared to a corresponding non-transformed wild type non-human organism, is conferred in the process of the invention, if the activity of a polypeptide showing the activity of a threonine synthase, or if the activity of the polypeptide B0004, preferably represented by SEQ ID NO. 34890, or a homolog or fragment thereof, or if the activity of a polypeptide encoded by a nucleic acid molecule comprising the nucleic acid SEQ ID NO. 34889, preferably the coding region thereof, or a homolog or fragment thereof, e.g. derived from Escherichia coli, is increased or generated. For example the activity of a nucleic acid molecule or a polypeptide comprising the nucleic acid, preferably the coding region thereof, or polypeptide or the consensus sequence or the polypeptide motif, as depicted in Table I, II or IV, application No. 3, column 5 or 8 in the respective same line as the nucleic acid molecule SEQ ID NO. 34889 or polypeptide SEQ ID NO. 34890, respectively, or a homolog or a fragment thereof, is increased or generated, or if the activity threonine synthase is increased or generated in a non-human organism, like a microorganism or a plant cell, plant or part thereof, especially with plastidic localization, whereby the respective line discloses in column 7 tyrosine. For example, an increase of the tyrosine of at least 1 percent, particularly in a range of 37 to 458-percent is conferred as compared to a corresponding non-transformed wild type non-human organism.

[22441] Accordingly, in one embodiment, an increase of 5-oxoproline in a non-human organism, as compared to a corresponding non-transformed wild type non-human organism, is conferred in the process of the invention, if the activity of a polypeptide showing the activity of a threonine synthase, or if the activity of the polypeptide B0004, preferably represented by SEQ ID NO. 34890, or a homolog or fragment thereof, or if the activity of a polypeptide encoded by a nucleic acid molecule comprising the nucleic acid SEQ ID NO. 34889, preferably the coding region thereof, or a homolog or fragment thereof, e.g. derived from Escherichia coli, is increased or generated. For example the activity of a nucleic acid molecule or a polypeptide comprising the nucleic acid, preferably the coding region thereof, or polypeptide or the consensus sequence or the polypeptide motif, as depicted in Table I, II or IV, application No. 3, column 5 or 8 in the respective same line as the nucleic acid molecule SEQ ID NO. 34889 or polypeptide SEQ ID NO. 34890, respectively, or a homolog or a fragment thereof, is increased or generated, or if the activity threonine synthase is increased or generated in a non-human organism, like a microorganism or a plant cell, plant or part thereof, especially with plastidic localization, whereby the respective line discloses in column 7 5-oxoproline. For example, an increase of the 5-oxoproline of at least 1 percent, particularly in a range of 44 to 1268-percent is conferred as compared to a corresponding non-transformed wild type non-human organism.

[22442] Accordingly, in one embodiment, an increase of phenylalanine in a non-human organism, as compared to a corresponding non-transformed wild type non-human organism, is conferred in the process of the invention, if the activity of a polypeptide showing the activity of a acetolactate synthase small subunit, or if the activity of the polypeptide B0078, preferably represented by SEQ ID NO. 6819, or a homolog or fragment thereof, or if the activity of a polypeptide encoded by a nucleic acid molecule comprising the nucleic acid SEQ ID NO. 6818, preferably the coding region thereof, or a homolog or fragment thereof, e.g. derived from Escherichia coli, is increased or generated. For example the activity of a nucleic acid molecule or a polypeptide comprising the nucleic acid, preferably the coding region thereof, or polypeptide or the consensus sequence or the polypeptide motif, as depicted in Table I, II or IV, application No. 3, column 5 or 8 in the respective same line as the nucleic acid molecule SEQ ID NO. 6818 or polypeptide SEQ ID NO. 6819, respectively, or a homolog or a fragment thereof, is increased or generated, or if the activity acetolactate synthase small subunit is increased or generated in a non-human organism, like a microorganism or a plant cell, plant or part thereof, especially with non-targeted localization, whereby the respective line discloses in column 7 phenylalanine. For example, an increase of the phenylalanine of at least 1 percent, particularly in a range of 32 to 59-percent is conferred as compared to a corresponding non-transformed wild type non-human organism.

[22443] Accordingly, in one embodiment, an increase of glycine in a non-human organism, as compared to a corresponding non-transformed wild type non-human organism, is conferred in the process of the invention, if the activity of a polypeptide showing the activity of a glucose dehydrogenase, or if the activity of the polypeptide B0124, preferably represented by SEQ ID NO. 35483, or a homolog or fragment thereof, or if the activity of a polypeptide encoded by a nucleic acid molecule comprising the nucleic acid SEQ ID NO. 35482, preferably the coding region thereof, or a homolog or fragment thereof, e.g. derived from Escherichia coli, is increased or generated. For example the activity of a nucleic acid molecule or a polypeptide comprising the nucleic acid, preferably the coding region thereof, or polypeptide or the consensus sequence or the polypeptide motif, as depicted in Table I, II or IV, application No. 3, column 5 or 8 in the respective same line as the nucleic acid molecule SEQ ID NO. 35482 or polypeptide SEQ ID NO. 35483, respectively, or a homolog or a fragment thereof, is increased or generated, or if the activity glucose dehydrogenase is increased or generated in a non-human organism, like a microorganism or a plant cell, plant or part thereof, especially with non-targeted localization, whereby the respective line discloses in column 7 glycine. For example, an increase of the glycine of at least 1 percent, particularly in a range of 31 to 179-percent is conferred as compared to a corresponding non-transformed wild type non-human organism.

[22444] Accordingly, in one embodiment, an increase of phenylalanine in a non-human organism, as compared to a corresponding non-transformed wild type non-human organism, is conferred in the process of the invention, if the activity of a polypeptide showing the activity of a glucose dehydrogenase, or if the activity of the polypeptide B0124, preferably represented by SEQ ID NO. 35483, or a homolog or fragment thereof, or if the activity of a polypeptide encoded by a nucleic acid molecule comprising the nucleic acid SEQ ID NO. 35482, preferably the coding region thereof, or a homolog or fragment thereof, e.g. derived from Escherichia coli, is increased or generated. For example the activity of a nucleic acid molecule or a polypeptide comprising the nucleic acid, preferably the coding region thereof, or polypeptide or the consensus sequence or the polypeptide motif, as depicted in Table I, II or IV, application No. 3, column 5 or 8 in the respective same line as the nucleic acid molecule SEQ ID NO. 35482 or polypeptide SEQ ID NO. 35483, respectively, or a homolog or a fragment thereof, is increased or generated, or if the activity glucose dehydrogenase is increased or generated in a non-human organism, like a microorganism or a plant cell, plant or part thereof, especially with non-targeted localization, whereby the respective line discloses in column 7 phenylalanine. For example, an increase of the phenylalanine of at least 1 percent, particularly in a range of 36 to 557-percent is conferred as compared to a corresponding non-transformed wild type non-human organism.

[22445] Accordingly, in one embodiment, an increase of serine in a non-human organism, as compared to a corresponding non-transformed wild type non-human organism, is conferred in the process of the invention, if the activity of a polypeptide showing the activity of a glucose dehydrogenase, or if the activity of the polypeptide B0124, preferably represented by SEQ ID NO. 35483, or a homolog or fragment thereof, or if the activity of a polypeptide encoded by a nucleic acid molecule comprising the nucleic acid SEQ ID NO. 35482, preferably the coding region thereof, or a homolog or fragment thereof, e.g. derived from Escherichia coli, is increased or generated. For example the activity of a nucleic acid molecule or a polypeptide comprising the nucleic acid, preferably the coding region thereof, or polypeptide or the consensus sequence or the polypeptide motif, as depicted in Table I, II or IV, application No. 3, column 5 or 8 in the respective same line as the nucleic acid molecule SEQ ID NO. 35482 or polypeptide SEQ ID NO. 35483, respectively, or a homolog or a fragment thereof, is increased or generated, or if the activity glucose dehydrogenase is increased or generated in a non-human organism, like a microorganism or a plant cell, plant or part thereof, especially with non-targeted localization, whereby the respective line discloses in column 7 serine. For example, an increase of the serine of at least 1 percent, particularly in a range of 55 to 171-percent is conferred as compared to a corresponding non-transformed wild type non-human organism.

[22446] Accordingly, in one embodiment, an increase of tyrosine in a non-human organism, as compared to a corresponding non-transformed wild type non-human organism, is conferred in the process of the invention, if the activity of a polypeptide showing the activity of a glucose dehydrogenase, or if the activity of the polypeptide B0124, preferably represented by SEQ ID NO. 35483, or a homolog or fragment thereof, or if the activity of a polypeptide encoded by a nucleic acid molecule comprising the nucleic acid SEQ ID NO. 35482, preferably the coding region thereof, or a homolog or fragment thereof, e.g. derived from Escherichia coli, is increased or generated. For example the activity of a nucleic acid molecule or a polypeptide comprising the nucleic acid, preferably the coding region thereof, or polypeptide or the consensus sequence or the polypeptide motif, as depicted in Table I, II or IV, application No. 3, column 5 or 8 in the respective same line as the nucleic acid molecule SEQ ID NO. 35482 or polypeptide SEQ ID NO. 35483, respectively, or a homolog or a fragment thereof, is increased or generated, or if the activity glucose dehydrogenase is increased or generated in a non-human organism, like a microorganism or a plant cell, plant or part thereof, especially with non-targeted localization, whereby the respective line discloses in column 7 tyrosine. For example, an increase of the tyrosine of at least 1 percent, particularly in a range of 36 to 265-percent is conferred as compared to a corresponding non-transformed wild type non-human organism.

[22447] Accordingly, in one embodiment, an increase of asparagine in a non-human organism, as compared to a corresponding non-transformed wild type non-human organism, is conferred in the process of the invention, if the activity of a polypeptide showing the activity of a aspartate 1-decarboxylase, or if the activity of the polypeptide B0131, preferably represented by SEQ ID NO. 74987, or a homolog or fragment thereof, or if the activity of a polypeptide encoded by a nucleic acid molecule comprising the nucleic acid SEQ ID NO. 74986, preferably the coding region thereof, or a homolog or fragment thereof, e.g. derived from Escherichia coli, is increased or generated. For example the activity of a nucleic acid molecule or a polypeptide comprising the nucleic acid, preferably the coding region thereof, or polypeptide or the consensus sequence or the polypeptide motif, as depicted in Table I, II or IV, application No. 3, column 5 or 8 in the respective same line as the nucleic acid molecule SEQ ID NO. 74986 or polypeptide SEQ ID NO. 74987, respectively, or a homolog or a fragment thereof, is increased or generated, or if the activity aspartate 1-decarboxylase is increased or generated in a non-human organism, like a microorganism or a plant cell, plant or part thereof, especially with non-targeted localization, whereby the respective line discloses in column 7 asparagine. For example, an increase of the asparagine of at least 1 percent, particularly in a range of 49 to 85-percent is conferred as compared to a corresponding non-transformed wild type non-human organism.

[22448] Accordingly, in one embodiment, an increase of serine in a non-human organism, as compared to a corresponding non-transformed wild type non-human organism, is conferred in the process of the invention, if the activity of a polypeptide showing the activity of a aspartate 1-decarboxylase, or if the activity of the polypeptide B0131, preferably represented by SEQ ID NO. 74987, or a homolog or fragment thereof, or if the activity of a polypeptide encoded by a nucleic acid molecule comprising the nucleic acid SEQ ID NO. 74986, preferably the coding region thereof, or a homolog or fragment thereof, e.g. derived from Escherichia coli, is increased or generated. For example the activity of a nucleic acid molecule or a polypeptide comprising the nucleic acid, preferably the coding region thereof, or polypeptide or the consensus sequence or the polypeptide motif, as depicted in Table I, II or IV, application No. 3, column 5 or 8 in the respective same line as the nucleic acid molecule SEQ ID NO. 74986 or polypeptide SEQ ID NO. 74987, respectively, or a homolog or a fragment thereof, is increased or generated, or if the activity aspartate 1-decarboxylase is increased or generated in a non-human organism, like a microorganism or a plant cell, plant or part thereof, especially with non-targeted localization, whereby the respective line discloses in column 7 serine. For example, an increase of the serine of at least 1 percent, particularly in a range of 23 to 55-percent is conferred as compared to a corresponding non-transformed wild type non-human organism.

[22449] Accordingly, in one embodiment, an increase of alanine in a non-human organism, as compared to a corresponding non-transformed wild type non-human organism, is conferred in the process of the invention, if the activity of a polypeptide showing the activity of a serine protease, or if the activity of the polypeptide B0161, preferably represented by SEQ ID NO. 7082, or a homolog or fragment thereof, or if the activity of a polypeptide encoded by a nucleic acid molecule comprising the nucleic acid SEQ ID NO. 7081, preferably the coding region thereof, or a homolog or fragment thereof, e.g. derived from Escherichia coli, is increased or generated. For example the activity of a nucleic acid molecule or a polypeptide comprising the nucleic acid, preferably the coding region thereof, or polypeptide or the consensus sequence or the polypeptide motif, as depicted in Table I, II or IV, application No. 3, column 5 or 8 in the respective same line as the nucleic acid molecule SEQ ID NO. 7081 or polypeptide SEQ ID NO. 7082, respectively, or a homolog or a fragment thereof, is increased or generated, or if the activity serine protease is increased or generated in a non-human organism, like a microorganism or a plant cell, plant or part thereof, especially with non-targeted localization, whereby the respective line discloses in column 7 alanine. For example, an increase of the alanine of at least 1 percent, particularly in a range of 19 to 58-percent is conferred as compared to a corresponding non-transformed wild type non-human organism.

[22450] Accordingly, in one embodiment, an increase of serine in a non-human organism, as compared to a corresponding non-transformed wild type non-human organism, is conferred in the process of the invention, if the activity of a polypeptide showing the activity of a serine protease, or if the activity of the polypeptide B0161, preferably represented by SEQ ID NO. 7082, or a homolog or fragment thereof, or if the activity of a polypeptide encoded by a nucleic acid molecule comprising the nucleic acid SEQ ID NO. 7081, preferably the coding region thereof, or a homolog or fragment thereof, e.g. derived from Escherichia coli, is increased or generated. For example the activity of a nucleic acid molecule or a polypeptide comprising the nucleic acid, preferably the coding region thereof, or polypeptide or the consensus sequence or the polypeptide motif, as depicted in Table I, II or IV, application No. 3, column 5 or 8 in the respective same line as the nucleic acid molecule SEQ ID NO. 7081 or polypeptide SEQ ID NO. 7082, respectively, or a homolog or a fragment thereof, is increased or generated, or if the activity serine protease is increased or generated in a non-human organism, like a microorganism or a plant cell, plant or part thereof, especially with non-targeted localization, whereby the respective line discloses in column 7 serine. For example, an increase of the serine of at least 1 percent, particularly in a range of 42 to 103-percent is conferred as compared to a corresponding non-transformed wild type non-human organism.

[22451] Accordingly, in one embodiment, an increase of tyrosine in a non-human organism, as compared to a corresponding non-transformed wild type non-human organism, is conferred in the process of the invention, if the activity of a polypeptide showing the activity of a serine protease, or if the activity of the polypeptide B0161, preferably represented by SEQ ID NO. 7082, or a homolog or fragment thereof, or if the activity of a polypeptide encoded by a nucleic acid molecule comprising the nucleic acid SEQ ID NO. 7081, preferably the coding region thereof, or a homolog or fragment thereof, e.g. derived from Escherichia coli, is increased or generated. For example the activity of a nucleic acid molecule or a polypeptide comprising the nucleic acid, preferably the coding region thereof, or polypeptide or the consensus sequence or the polypeptide motif, as depicted in Table I, II or IV, application No. 3, column 5 or 8 in the respective same line as the nucleic acid molecule SEQ ID NO. 7081 or polypeptide SEQ ID NO. 7082, respectively, or a homolog or a fragment thereof, is increased or generated, or if the activity serine protease is increased or generated in a non-human organism, like a microorganism or a plant cell, plant or part thereof, especially with non-targeted localization, whereby the respective line discloses in column 7 tyrosine. For example, an increase of the tyrosine of at least 1 percent, particularly in a range of 277 to 1628-percent is conferred as compared to a corresponding non-transformed wild type non-human organism.

[22452] Accordingly, in one embodiment, an increase of serine in a non-human organism, as compared to a corresponding non-transformed wild type non-human organism, is conferred in the process of the invention, if the activity of a polypeptide showing the activity of a acyl-CoA dehydrogenase, or if the activity of the polypeptide B0221, preferably represented by SEQ ID NO. 35591, or a homolog or fragment thereof, or if the activity of a polypeptide encoded by a nucleic acid molecule comprising the nucleic acid SEQ ID NO. 35590, preferably the coding region thereof, or a homolog or fragment thereof, e.g. derived from Escherichia coli, is increased or generated. For example the activity of a nucleic acid molecule or a polypeptide comprising the nucleic acid, preferably the coding region thereof, or polypeptide or the consensus sequence or the polypeptide motif, as depicted in Table I, II or IV, application No. 3, column 5 or 8 in the respective same line as the nucleic acid molecule SEQ ID NO. 35590 or polypeptide SEQ ID NO. 35591, respectively, or a homolog or a fragment thereof, is increased or generated, or if the activity acyl-CoA dehydrogenase is increased or generated in a non-human organism, like a microorganism or a plant cell, plant or part thereof, especially with non-targeted localization, whereby the respective line discloses in column 7 serine. For example, an increase of the serine of at least 1 percent, particularly in a range of 25 to 63-percent is conferred as compared to a corresponding non-transformed wild type non-human organism.

[22453] Accordingly, in one embodiment, an increase of tyrosine in a non-human organism, as compared to a corresponding non-transformed wild type non-human organism, is conferred in the process of the invention, if the activity of a polypeptide showing the activity of a acyl-CoA dehydrogenase, or if the activity of the polypeptide B0221, preferably represented by SEQ ID NO. 35591, or a homolog or fragment thereof, or if the activity of a polypeptide encoded by a nucleic acid molecule comprising the nucleic acid SEQ ID NO. 35590, preferably the coding region thereof, or a homolog or fragment thereof, e.g. derived from Escherichia coli, is increased or generated. For example the activity of a nucleic acid molecule or a polypeptide comprising the nucleic acid, preferably the coding region thereof, or polypeptide or the consensus sequence or the polypeptide motif, as depicted in Table I, II or IV, application No. 3, column 5 or 8 in the respective same line as the nucleic acid molecule SEQ ID NO. 35590 or polypeptide SEQ ID NO. 35591, respectively, or a homolog or a fragment thereof, is increased or generated, or if the activity acyl-CoA dehydrogenase is increased or generated in a non-human organism, like a microorganism or a plant cell, plant or part thereof, especially with non-targeted localization, whereby the respective line discloses in column 7 tyrosine. For example, an increase of the tyrosine of at least 1 percent, particularly in a range of 39 to 107-percent is conferred as compared to a corresponding non-transformed wild type non-human organism.

[22454] Accordingly, in one embodiment, an increase of tyrosine in a non-human organism, as compared to a corresponding non-transformed wild type non-human organism, is conferred in the process of the invention, if the activity of a polypeptide showing the activity of a beta-galactosidase, or if the activity of the polypeptide B0344, preferably represented by SEQ ID NO. 35734, or a homolog or fragment thereof, or if the activity of a polypeptide encoded by a nucleic acid molecule comprising the nucleic acid SEQ ID NO. 35733, preferably the coding region thereof, or a homolog or fragment thereof, e.g. derived from Escherichia coli, is increased or generated. For example the activity of a nucleic acid molecule or a polypeptide comprising the nucleic acid, preferably the coding region thereof, or polypeptide or the consensus sequence or the polypeptide motif, as depicted in Table I, II or IV, application No. 3, column 5 or 8 in the respective same line as the nucleic acid molecule SEQ ID NO. 35733 or polypeptide SEQ ID NO. 35734, respectively, or a homolog or a fragment thereof, is increased or generated, or if the activity beta-galactosidase is increased or generated in a non-human organism, like a microorganism or a plant cell, plant or part thereof, especially with plastidic localization, whereby the respective line discloses in column 7 tyrosine. For example, an increase of the tyrosine of at least 1 percent, particularly in a range of 34 to 103-percent is conferred as compared to a corresponding non-transformed wild type non-human organism.

[22455] Accordingly, in one embodiment, an increase of 5-oxoproline in a non-human organism, as compared to a corresponding non-transformed wild type non-human organism, is conferred in the process of the invention, if the activity of a polypeptide showing the activity of a beta-galactosidase, or if the activity of the polypeptide B0344, preferably represented by SEQ ID NO. 35734, or a homolog or fragment thereof, or if the activity of a polypeptide encoded by a nucleic acid molecule comprising the nucleic acid SEQ ID NO. 35733, preferably the coding region thereof, or a homolog or fragment thereof, e.g. derived from Escherichia coli, is increased or generated. For example the activity of a nucleic acid molecule or a polypeptide comprising the nucleic acid, preferably the coding region thereof, or polypeptide or the consensus sequence or the polypeptide motif, as depicted in Table I, II or IV, application No. 3, column 5 or 8 in the respective same line as the nucleic acid molecule SEQ ID NO. 35733 or polypeptide SEQ ID NO. 35734, respectively, or a homolog or a fragment thereof, is increased or generated, or if the activity beta-galactosidase is increased or generated in a non-human organism, like a microorganism or a plant cell, plant or part thereof, especially with plastidic localization, whereby the respective line discloses in column 7 5-oxoproline. For example, an increase of the 5-oxoproline of at least 1 percent, particularly in a range of 31 to 40-percent is conferred as compared to a corresponding non-transformed wild type non-human organism.

[22456] Accordingly, in one embodiment, an increase of glycine in a non-human organism, as compared to a corresponding non-transformed wild type non-human organism, is conferred in the process of the invention, if the activity of a polypeptide showing the activity of a 2,3-dihydroxyphenylpropionate 1,2-dioxygenase, or if the activity of the polypeptide B0348, preferably represented by SEQ ID NO. 7270, or a homolog or fragment thereof, or if the activity of a polypeptide encoded by a nucleic acid molecule comprising the nucleic acid SEQ ID NO. 7269, preferably the coding region thereof, or a homolog or fragment thereof, e.g. derived from Escherichia coli, is increased or generated. For example the activity of a nucleic acid molecule or a polypeptide comprising the nucleic acid, preferably the coding region thereof, or polypeptide or the consensus sequence or the polypeptide motif, as depicted in Table I, II or IV, application No. 3, column 5 or 8 in the respective same line as the nucleic acid molecule SEQ ID NO. 7269 or polypeptide SEQ ID NO. 7270, respectively, or a homolog or a fragment thereof, is increased or generated, or if the activity 2,3-dihydroxyphenylpropionate 1,2-dioxygenase is increased or generated in a non-human organism, like a microorganism or a plant cell, plant or part thereof, especially with plastidic localization, whereby the respective line discloses in column 7 glycine. For example, an increase of the glycine of at least 1 percent, particularly in a range of 96 to 301-percent is conferred as compared to a corresponding non-transformed wild type non-human organism.

[22457] Accordingly, in one embodiment, an increase of phenylalanine in a non-human organism, as compared to a corresponding non-transformed wild type non-human organism, is conferred in the process of the invention, if the activity of a polypeptide showing the activity of a 2,3-dihydroxyphenylpropionate 1,2-dioxygenase, or if the activity of the polypeptide B0348, preferably represented by SEQ ID NO. 7270, or a homolog or fragment thereof, or if the activity of a polypeptide encoded by a nucleic acid molecule comprising the nucleic acid SEQ ID NO. 7269, preferably the coding region thereof, or a homolog or fragment thereof, e.g. derived from Escherichia coli, is increased or generated. For example the activity of a nucleic acid molecule or a polypeptide comprising the nucleic acid, preferably the coding region thereof, or polypeptide or the consensus sequence or the polypeptide motif, as depicted in Table I, II or IV, application No. 3, column 5 or 8 in the respective same line as the nucleic acid molecule SEQ ID NO. 7269 or polypeptide SEQ ID NO. 7270, respectively, or a homolog or a fragment thereof, is increased or generated, or if the activity 2,3-dihydroxyphenylpropionate 1,2-dioxygenase is increased or generated in a non-human organism, like a microorganism or a plant cell, plant or part thereof, especially with plastidic localization, whereby the respective line discloses in column 7 phenylalanine. For example, an increase of the phenylalanine of at least 1 percent, particularly in a range of 72 to 197-percent is conferred as compared to a corresponding non-transformed wild type non-human organism.

[22458] Accordingly, in one embodiment, an increase of serine in a non-human organism, as compared to a corresponding non-transformed wild type non-human organism, is conferred in the process of the invention, if the activity of a polypeptide showing the activity of a 2,3-dihydroxyphenylpropionate 1,2-dioxygenase, or if the activity of the polypeptide B0348, preferably represented by SEQ ID NO. 7270, or a homolog or fragment thereof, or if the activity of a polypeptide encoded by a nucleic acid molecule comprising the nucleic acid SEQ ID NO. 7269, preferably the coding region thereof, or a homolog or fragment thereof, e.g. derived from Escherichia coli, is increased or generated. For example the activity of a nucleic acid molecule or a polypeptide comprising the nucleic acid, preferably the coding region thereof, or polypeptide or the consensus sequence or the polypeptide motif, as depicted in Table I, II or IV, application No. 3, column 5 or 8 in the respective same line as the nucleic acid molecule SEQ ID NO. 7269 or polypeptide SEQ ID NO. 7270, respectively, or a homolog or a fragment thereof, is increased or generated, or if the activity 2,3-dihydroxyphenylpropionate 1,2-dioxygenase is increased or generated in a non-human organism, like a microorganism or a plant cell, plant or part thereof, especially with plastidic localization, whereby the respective line discloses in column 7 serine. For example, an increase of the serine of at least 1 percent, particularly in a range of 38 to 320-percent is conferred as compared to a corresponding non-transformed wild type non-human organism.

[22459] Accordingly, in one embodiment, an increase of tyrosine in a non-human organism, as compared to a corresponding non-transformed wild type non-human organism, is conferred in the process of the invention, if the activity of a polypeptide showing the activity of a 2,3-dihydroxyphenylpropionate 1,2-dioxygenase, or if the activity of the polypeptide B0348, preferably represented by SEQ ID NO. 7270, or a homolog or fragment thereof, or if the activity of a polypeptide encoded by a nucleic acid molecule comprising the nucleic acid SEQ ID NO. 7269, preferably the coding region thereof, or a homolog or fragment thereof, e.g. derived from Escherichia coli, is increased or generated. For example the activity of a nucleic acid molecule or a polypeptide comprising the nucleic acid, preferably the coding region thereof, or polypeptide or the consensus sequence or the polypeptide motif, as depicted in Table I, II or IV, application No. 3, column 5 or 8 in the respective same line as the nucleic acid molecule SEQ ID NO. 7269 or polypeptide SEQ ID NO. 7270, respectively, or a homolog or a fragment thereof, is increased or generated, or if the activity 2,3-dihydroxyphenylpropionate 1,2-dioxygenase is increased or generated in a non-human organism, like a microorganism or a plant cell, plant or part thereof, especially with plastidic localization, whereby the respective line discloses in column 7 tyrosine. For example, an increase of the tyrosine of at least 1 percent, particularly in a range of 67 to 83-percent is conferred as compared to a corresponding non-transformed wild type non-human organism.

[22460] Accordingly, in one embodiment, an increase of aspartate in a non-human organism, as compared to a corresponding non-transformed wild type non-human organism, is conferred in the process of the invention, if the activity of a polypeptide showing the activity of a b0391-protein, or if the activity of the polypeptide B0391, preferably represented by SEQ ID NO. 75196, or a homolog or fragment thereof, or if the activity of a polypeptide encoded by a nucleic acid molecule comprising the nucleic acid SEQ ID NO. 75195, preferably the coding region thereof, or a homolog or fragment thereof, e.g. derived from Escherichia coli, is increased or generated. For example the activity of a nucleic acid molecule or a polypeptide comprising the nucleic acid, preferably the coding region thereof, or polypeptide or the consensus sequence or the polypeptide motif, as depicted in Table I, II or IV, application No. 3, column 5 or 8 in the respective same line as the nucleic acid molecule SEQ ID NO. 75195 or polypeptide SEQ ID NO. 75196, respectively, or a homolog or a fragment thereof, is increased or generated, or if the activity b0391-protein is increased or generated in a non-human organism, like a microorganism or a plant cell, plant or part thereof, especially with plastidic localization, whereby the respective line discloses in column 7 aspartate. For example, an increase of the aspartate of at least 1 percent, particularly in a range of 56 to 93-percent is conferred as compared to a corresponding non-transformed wild type non-human organism.

[22461] Accordingly, in one embodiment, an increase of asparagine in a non-human organism, as compared to a corresponding non-transformed wild type non-human organism, is conferred in the process of the invention, if the activity of a polypeptide showing the activity of a ATP-binding component of a transport system, or if the activity of the polypeptide B0449, preferably represented by SEQ ID NO. 7334, or a homolog or fragment thereof, or if the activity of a polypeptide encoded by a nucleic acid molecule comprising the nucleic acid SEQ ID NO. 7333, preferably the coding region thereof, or a homolog or fragment thereof, e.g. derived from Escherichia coli, is increased or generated. For example the activity of a nucleic acid molecule or a polypeptide comprising the nucleic acid, preferably the coding region thereof, or polypeptide or the consensus sequence or the polypeptide motif, as depicted in Table I, II or IV, application No. 3, column 5 or 8 in the respective same line as the nucleic acid molecule SEQ ID NO. 7333 or polypeptide SEQ ID NO. 7334, respectively, or a homolog or a fragment thereof, is increased or generated, or if the activity ATP-binding component of a transport system is increased or generated in a non-human organism, like a microorganism or a plant cell, plant or part thereof, especially with non-targeted localization, whereby the respective line discloses in column 7 asparagine. For example, an increase of the asparagine of at least 1 percent, particularly in a range of 51 to 684-percent is conferred as compared to a corresponding non-transformed wild type non-human organism.

[22462] Accordingly, in one embodiment, an increase of aspartate in a non-human organism, as compared to a corresponding non-transformed wild type non-human organism, is conferred in the process of the invention, if the activity of a polypeptide showing the activity of a ATP-binding component of a transport system, or if the activity of the polypeptide B0449, preferably represented by SEQ ID NO. 7334, or a homolog or fragment thereof, or if the activity of a polypeptide encoded by a nucleic acid molecule comprising the nucleic acid SEQ ID NO. 7333, preferably the coding region thereof, or a homolog or fragment thereof, e.g. derived from Escherichia coli, is increased or generated. For example the activity of a nucleic acid molecule or a polypeptide comprising the nucleic acid, preferably the coding region thereof, or polypeptide or the consensus sequence or the polypeptide motif, as depicted in Table I, II or IV, application No. 3, column 5 or 8 in the respective same line as the nucleic acid molecule SEQ ID NO. 7333 or polypeptide SEQ ID NO. 7334, respectively, or a homolog or a fragment thereof, is increased or generated, or if the activity ATP-binding component of a transport system is increased or generated in a non-human organism, like a microorganism or a plant cell, plant or part thereof, especially with non-targeted localization, whereby the respective line discloses in column 7 aspartate. For example, an increase of the aspartate of at least 1 percent, particularly in a range of 88 to 201-percent is conferred as compared to a corresponding non-transformed wild type non-human organism.

[22463] Accordingly, in one embodiment, an increase of phenylalanine in a non-human organism, as compared to a corresponding non-transformed wild type non-human organism, is conferred in the process of the invention, if the activity of a polypeptide showing the activity of a ATP-binding component of a transport system, or if the activity of the polypeptide B0449, preferably represented by SEQ ID NO. 7334, or a homolog or fragment thereof, or if the activity of a polypeptide encoded by a nucleic acid molecule comprising the nucleic acid SEQ ID NO. 7333, preferably the coding region thereof, or a homolog or fragment thereof, e.g. derived from Escherichia coli, is increased or generated. For example the activity of a nucleic acid molecule or a polypeptide comprising the nucleic acid, preferably the coding region thereof, or polypeptide or the consensus sequence or the polypeptide motif, as depicted in Table I, II or IV, application No. 3, column 5 or 8 in the respective same line as the nucleic acid molecule SEQ ID NO. 7333 or polypeptide SEQ ID NO. 7334, respectively, or a homolog or a fragment thereof, is increased or generated, or if the activity ATP-binding component of a transport system is increased or generated in a non-human organism, like a microorganism or a plant cell, plant or part thereof, especially with non-targeted localization, whereby the respective line discloses in column 7 phenylalanine. For example, an increase of the phenylalanine of at least 1 percent, particularly in a range of 40 to 1462-percent is conferred as compared to a corresponding non-transformed wild type non-human organism.

[22464] Accordingly, in one embodiment, an increase of serine in a non-human organism, as compared to a corresponding non-transformed wild type non-human organism, is conferred in the process of the invention, if the activity of a polypeptide showing the activity of a ATP-binding component of a transport system, or if the activity of the polypeptide B0449, preferably represented by SEQ ID NO. 7334, or a homolog or fragment thereof, or if the activity of a polypeptide encoded by a nucleic acid molecule comprising the nucleic acid SEQ ID NO. 7333, preferably the coding region thereof, or a homolog or fragment thereof, e.g. derived from Escherichia coli, is increased or generated. For example the activity of a nucleic acid molecule or a polypeptide comprising the nucleic acid, preferably the coding region thereof, or polypeptide or the consensus sequence or the polypeptide motif, as depicted in Table I, II or IV, application No. 3, column 5 or 8 in the respective same line as the nucleic acid molecule SEQ ID NO. 7333 or polypeptide SEQ ID NO. 7334, respectively, or a homolog or a fragment thereof, is increased or generated, or if the activity ATP-binding component of a transport system is increased or generated in a non-human organism, like a microorganism or a plant cell, plant or part thereof, especially with non-targeted localization, whereby the respective line discloses in column 7 serine. For example, an increase of the serine of at least 1 percent, particularly in a range of 29 to 113-percent is conferred as compared to a corresponding non-transformed wild type non-human organism.

[22465] Accordingly, in one embodiment, an increase of tyrosine in a non-human organism, as compared to a corresponding non-transformed wild type non-human organism, is conferred in the process of the invention, if the activity of a polypeptide showing the activity of a ATP-binding component of a transport system, or if the activity of the polypeptide B0449, preferably represented by SEQ ID NO. 7334, or a homolog or fragment thereof, or if the activity of a polypeptide encoded by a nucleic acid molecule comprising the nucleic acid SEQ ID NO. 7333, preferably the coding region thereof, or a homolog or fragment thereof, e.g. derived from Escherichia coli, is increased or generated. For example the activity of a nucleic acid molecule or a polypeptide comprising the nucleic acid, preferably the coding region thereof, or polypeptide or the consensus sequence or the polypeptide motif, as depicted in Table I, II or IV, application No. 3, column 5 or 8 in the respective same line as the nucleic acid molecule SEQ ID NO. 7333 or polypeptide SEQ ID NO. 7334, respectively, or a homolog or a fragment thereof, is increased or generated, or if the activity ATP-binding component of a transport system is increased or generated in a non-human organism, like a microorganism or a plant cell, plant or part thereof, especially with non-targeted localization, whereby the respective line discloses in column 7 tyrosine. For example, an increase of the tyrosine of at least 1 percent, particularly in a range of 46 to 1202-percent is conferred as compared to a corresponding non-transformed wild type non-human organism.

[22466] Accordingly, in one embodiment, an increase of alanine in a non-human organism, as compared to a corresponding non-transformed wild type non-human organism, is conferred in the process of the invention, if the activity of a polypeptide showing the activity of a b0456-protein, or if the activity of the polypeptide B0456, preferably represented by SEQ ID NO. 35876, or a homolog or fragment thereof, or if the activity of a polypeptide encoded by a nucleic acid molecule comprising the nucleic acid SEQ ID NO. 35875, preferably the coding region thereof, or a homolog or fragment thereof, e.g. derived from Escherichia coli, is increased or generated. For example the activity of a nucleic acid molecule or a polypeptide comprising the nucleic acid, preferably the coding region thereof, or polypeptide or the consensus sequence or the polypeptide motif, as depicted in Table I, II or IV, application No. 3, column 5 or 8 in the respective same line as the nucleic acid molecule SEQ ID NO. 35875 or polypeptide SEQ ID NO. 35876, respectively, or a homolog or a fragment thereof, is increased or generated, or if the activity b0456-protein is increased or generated in a non-human organism, like a microorganism or a plant cell, plant or part thereof, especially with non-targeted localization, whereby the respective line discloses in column 7 alanine. For example, an increase of the alanine of at least 1 percent, particularly in a range of 20 to 53-percent is conferred as compared to a corresponding non-transformed wild type non-human organism.

[22467] Accordingly, in one embodiment, an increase of aspartate in a non-human organism, as compared to a corresponding non-transformed wild type non-human organism, is conferred in the process of the invention, if the activity of a polypeptide showing the activity of a membrane transport protein, or if the activity of the polypeptide B0486, preferably represented by SEQ ID NO. 7687, or a homolog or fragment thereof, or if the activity of a polypeptide encoded by a nucleic acid molecule comprising the nucleic acid SEQ ID NO. 7686, preferably the coding region thereof, or a homolog or fragment thereof, e.g. derived from Escherichia coli, is increased or generated. For example the activity of a nucleic acid molecule or a polypeptide comprising the nucleic acid, preferably the coding region thereof, or polypeptide or the consensus sequence or the polypeptide motif, as depicted in Table I, II or IV, application No. 3, column 5 or 8 in the respective same line as the nucleic acid molecule SEQ ID NO. 7686 or polypeptide SEQ ID NO. 7687, respectively, or a homolog or a fragment thereof, is increased or generated, or if the activity membrane transport protein is increased or generated in a non-human organism, like a microorganism or a plant cell, plant or part thereof, especially with non-targeted localization, whereby the respective line discloses in column 7 aspartate. For example, an increase of the aspartate of at least 1 percent, particularly in a range of 75 to 129-percent is conferred as compared to a corresponding non-transformed wild type non-human organism.

[22468] Accordingly, in one embodiment, an increase of phenylalanine in a non-human organism, as compared to a corresponding non-transformed wild type non-human organism, is conferred in the process of the invention, if the activity of a polypeptide showing the activity of a membrane transport protein, or if the activity of the polypeptide B0486, preferably represented by SEQ ID NO. 7687, or a homolog or fragment thereof, or if the activity of a polypeptide encoded by a nucleic acid molecule comprising the nucleic acid SEQ ID NO. 7686, preferably the coding region thereof, or a homolog or fragment thereof, e.g. derived from Escherichia coli, is increased or generated. For example the activity of a nucleic acid molecule or a polypeptide comprising the nucleic acid, preferably the coding region thereof, or polypeptide or the consensus sequence or the polypeptide motif, as depicted in Table I, II or IV, application No. 3, column 5 or 8 in the respective same line as the nucleic acid molecule SEQ ID NO. 7686 or polypeptide SEQ ID NO. 7687, respectively, or a homolog or a fragment thereof, is increased or generated, or if the activity membrane transport protein is increased or generated in a non-human organism, like a microorganism or a plant cell, plant or part thereof, especially with non-targeted localization, whereby the respective line discloses in column 7 phenylalanine. For example, an increase of the phenylalanine of at least 1 percent, particularly in a range of 35 to 156-percent is conferred as compared to a corresponding non-transformed wild type non-human organism.

[22469] Accordingly, in one embodiment, an increase of tyrosine in a non-human organism, as compared to a corresponding non-transformed wild type non-human organism, is conferred in the process of the invention, if the activity of a polypeptide showing the activity of a membrane transport protein, or if the activity of the polypeptide B0486, preferably represented by SEQ ID NO. 7687, or a homolog or fragment thereof, or if the activity of a polypeptide encoded by a nucleic acid molecule comprising the nucleic acid SEQ ID NO. 7686, preferably the coding region thereof, or a homolog or fragment thereof, e.g. derived from Escherichia coli, is increased or generated. For example the activity of a nucleic acid molecule or a polypeptide comprising the nucleic acid, preferably the coding region thereof, or polypeptide or the consensus sequence or the polypeptide motif, as depicted in Table I, II or IV, application No. 3, column 5 or 8 in the respective same line as the nucleic acid molecule SEQ ID NO. 7686 or polypeptide SEQ ID NO. 7687, respectively, or a homolog or a fragment thereof, is increased or generated, or if the activity membrane transport protein is increased or generated in a non-human organism, like a microorganism or a plant cell, plant or part thereof, especially with non-targeted localization, whereby the respective line discloses in column 7 tyrosine. For example, an increase of the tyrosine of at least 1 percent, particularly in a range of 57 to 227-percent is conferred as compared to a corresponding non-transformed wild type non-human organism.

[22470] Accordingly, in one embodiment, an increase of homoserine in a non-human organism, as compared to a corresponding non-transformed wild type non-human organism, is conferred in the process of the invention, if the activity of a polypeptide showing the activity of a b0518-protein, or if the activity of the polypeptide B0518, preferably represented by SEQ ID NO. 35937, or a homolog or fragment thereof, or if the activity of a polypeptide encoded by a nucleic acid molecule comprising the nucleic acid SEQ ID NO. 35936, preferably the coding region thereof, or a homolog or fragment thereof, e.g. derived from Escherichia coli, is increased or generated. For example the activity of a nucleic acid molecule or a polypeptide comprising the nucleic acid, preferably the coding region thereof, or polypeptide or the consensus sequence or the polypeptide motif, as depicted in Table I, II or IV, application No. 3, column 5 or 8 in the respective same line as the nucleic acid molecule SEQ ID NO. 35936 or polypeptide SEQ ID NO. 35937, respectively, or a homolog or a fragment thereof, is increased or generated, or if the activity b0518-protein is increased or generated in a non-human organism, like a microorganism or a plant cell, plant or part thereof, especially with non-targeted localization, whereby the respective line discloses in column 7 homoserine. For example, an increase of the homoserine of at least 1 percent, particularly in a range of 24 to 72-percent is conferred as compared to a corresponding non-transformed wild type non-human organism.

[22471] Accordingly, in one embodiment, an increase of aspartate in a non-human organism, as compared to a corresponding non-transformed wild type non-human organism, is conferred in the process of the invention, if the activity of a polypeptide showing the activity of a isochorismate synthase, or if the activity of the polypeptide B0593, preferably represented by SEQ ID NO. 35968, or a homolog or fragment thereof, or if the activity of a polypeptide encoded by a nucleic acid molecule comprising the nucleic acid SEQ ID NO. 35967, preferably the coding region thereof, or a homolog or fragment thereof, e.g. derived from Escherichia coli, is increased or generated. For example the activity of a nucleic acid molecule or a polypeptide comprising the nucleic acid, preferably the coding region thereof, or polypeptide or the consensus sequence or the polypeptide motif, as depicted in Table I, II or IV, application No. 3, column 5 or 8 in the respective same line as the nucleic acid molecule SEQ ID NO. 35967 or polypeptide SEQ ID NO. 35968, respectively, or a homolog or a fragment thereof, is increased or generated, or if the activity isochorismate synthase is increased or generated in a non-human organism, like a microorganism or a plant cell, plant or part thereof, especially with plastidic localization, whereby the respective line discloses in column 7 aspartate. For example, an increase of the aspartate of at least 1 percent, particularly in a range of 84 to 319-percent is conferred as compared to a corresponding non-transformed wild type non-human organism.

[22472] Accordingly, in one embodiment, an increase of phenylalanine in a non-human organism, as compared to a corresponding non-transformed wild type non-human organism, is conferred in the process of the invention, if the activity of a polypeptide showing the activity of a isochorismate synthase, or if the activity of the polypeptide B0593, preferably represented by SEQ ID NO. 35968, or a homolog or fragment thereof, or if the activity of a polypeptide encoded by a nucleic acid molecule comprising the nucleic acid SEQ ID NO. 35967, preferably the coding region thereof, or a homolog or fragment thereof, e.g. derived from Escherichia coli, is increased or generated. For example the activity of a nucleic acid molecule or a polypeptide comprising the nucleic acid, preferably the coding region thereof, or polypeptide or the consensus sequence or the polypeptide motif, as depicted in Table I, II or IV, application No. 3, column 5 or 8 in the respective same line as the nucleic acid molecule SEQ ID NO. 35967 or polypeptide SEQ ID NO. 35968, respectively, or a homolog or a fragment thereof, is increased or generated, or if the activity isochorismate synthase is increased or generated in a non-human organism, like a microorganism or a plant cell, plant or part thereof, especially with plastidic localization, whereby the respective line discloses in column 7 phenylalanine. For example, an increase of the phenylalanine of at least 1 percent, particularly in a range of 37 to 256-percent is conferred as compared to a corresponding non-transformed wild type non-human organism.

[22473] Accordingly, in one embodiment, an increase of serine in a non-human organism, as compared to a corresponding non-transformed wild type non-human organism, is conferred in the process of the invention, if the activity of a polypeptide showing the activity of a isochorismate synthase, or if the activity of the polypeptide B0593, preferably represented by SEQ ID NO. 35968, or a homolog or fragment thereof, or if the activity of a polypeptide encoded by a nucleic acid molecule comprising the nucleic acid SEQ ID NO. 35967, preferably the coding region thereof, or a homolog or fragment thereof, e.g. derived from Escherichia coli, is increased or generated. For example the activity of a nucleic acid molecule or a polypeptide comprising the nucleic acid, preferably the coding region thereof, or polypeptide or the consensus sequence or the polypeptide motif, as depicted in Table I, II or IV, application No. 3, column 5 or 8 in the respective same line as the nucleic acid molecule SEQ ID NO. 35967 or polypeptide SEQ ID NO. 35968, respectively, or a homolog or a fragment thereof, is increased or generated, or if the activity isochorismate synthase is increased or generated in a non-human organism, like a microorganism or a plant cell, plant or part thereof, especially with plastidic localization, whereby the respective line discloses in column 7 serine. For example, an increase of the serine of at least 1 percent, particularly in a range of 153 to 359-percent is conferred as compared to a corresponding non-transformed wild type non-human organism.

[22474] Accordingly, in one embodiment, an increase of tyrosine in a non-human organism, as compared to a corresponding non-transformed wild type non-human organism, is conferred in the process of the invention, if the activity of a polypeptide showing the activity of a isochorismate synthase, or if the activity of the polypeptide B0593, preferably represented by SEQ ID NO. 35968, or a homolog or fragment thereof, or if the activity of a polypeptide encoded by a nucleic acid molecule comprising the nucleic acid SEQ ID NO. 35967, preferably the coding region thereof, or a homolog or fragment thereof, e.g. derived from Escherichia coli, is increased or generated. For example the activity of a nucleic acid molecule or a polypeptide comprising the nucleic acid, preferably the coding region thereof, or polypeptide or the consensus sequence or the polypeptide motif, as depicted in Table I, II or IV, application No. 3, column 5 or 8 in the respective same line as the nucleic acid molecule SEQ ID NO. 35967 or polypeptide SEQ ID NO. 35968, respectively, or a homolog or a fragment thereof, is increased or generated, or if the activity isochorismate synthase is increased or generated in a non-human organism, like a microorganism or a plant cell, plant or part thereof, especially with plastidic localization, whereby the respective line discloses in column 7 tyrosine. For example, an increase of the tyrosine of at least 1 percent, particularly in a range of 49 to 202-percent is conferred as compared to a corresponding non-transformed wild type non-human organism.

[22475] Accordingly, in one embodiment, an increase of 3,4-dihydroxyphenylalanine (dopa) in a non-human organism, as compared to a corresponding non-transformed wild type non-human organism, is conferred in the process of the invention, if the activity of a polypeptide showing the activity of a isochorismate synthase, or if the activity of the polypeptide B0593, preferably represented by SEQ ID NO. 35968, or a homolog or fragment thereof, or if the activity of a polypeptide encoded by a nucleic acid molecule comprising the nucleic acid SEQ ID NO. 35967, preferably the coding region thereof, or a homolog or fragment thereof, e.g. derived from Escherichia coli, is increased or generated. For example the activity of a nucleic acid molecule or a polypeptide comprising the nucleic acid, preferably the coding region thereof, or polypeptide or the consensus sequence or the polypeptide motif, as depicted in Table I, II or IV, application No. 3, column 5 or 8 in the respective same line as the nucleic acid molecule SEQ ID NO. 35967 or polypeptide SEQ ID NO. 35968, respectively, or a homolog or a fragment thereof, is increased or generated, or if the activity isochorismate synthase is increased or generated in a non-human organism, like a microorganism or a plant cell, plant or part thereof, especially with plastidic localization, whereby the respective line discloses in column 7 3,4-dihydroxyphenylalanine (dopa). For example, an increase of the 3,4-dihydroxyphenylalanine (dopa) of at least 1 percent, particularly in a range of 625 to 4899-percent is conferred as compared to a corresponding non-transformed wild type non-human organism.

[22476] Accordingly, in one embodiment, an increase of 5-oxoproline in a non-human organism, as compared to a corresponding non-transformed wild type non-human organism, is conferred in the process of the invention, if the activity of a polypeptide showing the activity of a isochorismate synthase, or if the activity of the polypeptide B0593, preferably represented by SEQ ID NO. 35968, or a homolog or fragment thereof, or if the activity of a polypeptide encoded by a nucleic acid molecule comprising the nucleic acid SEQ ID NO. 35967, preferably the coding region thereof, or a homolog or fragment thereof, e.g. derived from Escherichia coli, is increased or generated. For example the activity of a nucleic acid molecule or a polypeptide comprising the nucleic acid, preferably the coding region thereof, or polypeptide or the consensus sequence or the polypeptide motif, as depicted in Table I, II or IV, application No. 3, column 5 or 8 in the respective same line as the nucleic acid molecule SEQ ID NO. 35967 or polypeptide SEQ ID NO. 35968, respectively, or a homolog or a fragment thereof, is increased or generated, or if the activity isochorismate synthase is increased or generated in a non-human organism, like a microorganism or a plant cell, plant or part thereof, especially with plastidic localization, whereby the respective line discloses in column 7 5-oxoproline. For example, an increase of the 5-oxoproline of at least 1 percent, particularly in a range of 100 to 636-percent is conferred as compared to a corresponding non-transformed wild type non-human organism.

[22477] Accordingly, in one embodiment, an increase of tyrosine in a non-human organism, as compared to a corresponding non-transformed wild type non-human organism, is conferred in the process of the invention, if the activity of a polypeptide showing the activity of a zinc transporter, or if the activity of the polypeptide B0752, preferably represented by SEQ ID NO. 36115, or a homolog or fragment thereof, or if the activity of a polypeptide encoded by a nucleic acid molecule comprising the nucleic acid SEQ ID NO. 36114, preferably the coding region thereof, or a homolog or fragment thereof, e.g. derived from Escherichia coli, is increased or generated. For example the activity of a nucleic acid molecule or a polypeptide comprising the nucleic acid, preferably the coding region thereof, or polypeptide or the consensus sequence or the polypeptide motif, as depicted in Table I, II or IV, application No. 3, column 5 or 8 in the respective same line as the nucleic acid molecule SEQ ID NO. 36114 or polypeptide SEQ ID NO. 36115, respectively, or a homolog or a fragment thereof, is increased or generated, or if the activity zinc transporter is increased or generated in a non-human organism, like a microorganism or a plant cell, plant or part thereof, especially with non-targeted localization, whereby the respective line discloses in column 7 tyrosine. For example, an increase of the tyrosine of at least 1 percent, particularly in a range of 38 to 112-percent is conferred as compared to a corresponding non-transformed wild type non-human organism.

[22478] Accordingly, in one embodiment, an increase of tyrosine in a non-human organism, as compared to a corresponding non-transformed wild type non-human organism, is conferred in the process of the invention, if the activity of a polypeptide showing the activity of a 3-deoxy-D-arabinoheptulosonate-7-phosphatesynthase, or if the activity of the polypeptide B0754, preferably represented by SEQ ID NO. 75287, or a homolog or fragment thereof, or if the activity of a polypeptide encoded by a nucleic acid molecule comprising the nucleic acid SEQ ID NO. 75286, preferably the coding region thereof, or a homolog or fragment thereof, e.g. derived from Escherichia coli, is increased or generated. For example the activity of a nucleic acid molecule or a polypeptide comprising the nucleic acid, preferably the coding region thereof, or polypeptide or the consensus sequence or the polypeptide motif, as depicted in Table I, II or IV, application No. 3, column 5 or 8 in the respective same line as the nucleic acid molecule SEQ ID NO. 75286 or polypeptide SEQ ID NO. 75287, respectively, or a homolog or a fragment thereof, is increased or generated, or if the activity 3-deoxy-D-arabinoheptulosonate-7-phosphatesynthase is increased or generated in a non-human organism, like a microorganism or a plant cell, plant or part thereof, especially with plastidic localization, whereby the respective line discloses in column 7 tyrosine. For example, an increase of the tyrosine of at least 1 percent, particularly in a range of 55 to 197-percent is conferred as compared to a corresponding non-transformed wild type non-human organism.

[22479] Accordingly, in one embodiment, an increase of tyrosine in a non-human organism, as compared to a corresponding non-transformed wild type non-human organism, is conferred in the process of the invention, if the activity of a polypeptide showing the activity of a b0801-protein, or if the activity of the polypeptide B0801, preferably represented by SEQ ID NO. 75808, or a homolog or fragment thereof, or if the activity of a polypeptide encoded by a nucleic acid molecule comprising the nucleic acid SEQ ID NO. 75807, preferably the coding region thereof, or a homolog or fragment thereof, e.g. derived from Escherichia coli, is increased or generated. For example the activity of a nucleic acid molecule or a polypeptide comprising the nucleic acid, preferably the coding region thereof, or polypeptide or the consensus sequence or the polypeptide motif, as depicted in Table I, II or IV, application No. 3, column 5 or 8 in the respective same line as the nucleic acid molecule SEQ ID NO. 75807 or polypeptide SEQ ID NO. 75808, respectively, or a homolog or a fragment thereof, is increased or generated, or if the activity b0801-protein is increased or generated in a non-human organism, like a microorganism or a plant cell, plant or part thereof, especially with non-targeted localization, whereby the respective line discloses in column 7 tyrosine. For example, an increase of the tyrosine of at least 1 percent, particularly in a range of 38 to 67-percent is conferred as compared to a corresponding non-transformed wild type non-human organism.

[22480] Accordingly, in one embodiment, an increase of alanine in a non-human organism, as compared to a corresponding non-transformed wild type non-human organism, is conferred in the process of the invention, if the activity of a polypeptide showing the activity of a asparaginase, or if the activity of the polypeptide B0828, preferably represented by SEQ ID NO. 36300, or a homolog or fragment thereof, or if the activity of a polypeptide encoded by a nucleic acid molecule comprising the nucleic acid SEQ ID NO. 36299, preferably the coding region thereof, or a homolog or fragment thereof, e.g. derived from Escherichia coli, is increased or generated. For example the activity of a nucleic acid molecule or a polypeptide comprising the nucleic acid, preferably the coding region thereof, or polypeptide or the consensus sequence or the polypeptide motif, as depicted in Table I, II or IV, application No. 3, column 5 or 8 in the respective same line as the nucleic acid molecule SEQ ID NO. 36299 or polypeptide SEQ ID NO. 36300, respectively, or a homolog or a fragment thereof, is increased or generated, or if the activity asparaginase is increased or generated in a non-human organism, like a microorganism or a plant cell, plant or part thereof, especially with non-targeted localization, whereby the respective line discloses in column 7 alanine. For example, an increase of the alanine of at least 1 percent, particularly in a range of 24 to 37-percent is conferred as compared to a corresponding non-transformed wild type non-human organism.

[22481] Accordingly, in one embodiment, an increase of glycine in a non-human organism, as compared to a corresponding non-transformed wild type non-human organism, is conferred in the process of the invention, if the activity of a polypeptide showing the activity of a b0841-protein, or if the activity of the polypeptide B0841, preferably represented by SEQ ID NO. 75874, or a homolog or fragment thereof, or if the activity of a polypeptide encoded by a nucleic acid molecule comprising the nucleic acid SEQ ID NO. 75873, preferably the coding region thereof, or a homolog or fragment thereof, e.g. derived from Escherichia coli, is increased or generated. For example the activity of a nucleic acid molecule or a polypeptide comprising the nucleic acid, preferably the coding region thereof, or polypeptide or the consensus sequence or the polypeptide motif, as depicted in Table I, II or IV, application No. 3, column 5 or 8 in the respective same line as the nucleic acid molecule SEQ ID NO. 75873 or polypeptide SEQ ID NO. 75874, respectively, or a homolog or a fragment thereof, is increased or generated, or if the activity b0841-protein is increased or generated in a non-human organism, like a microorganism or a plant cell, plant or part thereof, especially with non-targeted localization, whereby the respective line discloses in column 7 glycine. For example, an increase of the glycine of at least 1 percent, particularly in a range of 40 to 72-percent is conferred as compared to a corresponding non-transformed wild type non-human organism.

[22482] Accordingly, in one embodiment, an increase of homoserine in a non-human organism, as compared to a corresponding non-transformed wild type non-human organism, is conferred in the process of the invention, if the activity of a polypeptide showing the activity of a b0841-protein, or if the activity of the polypeptide B0841, preferably represented by SEQ ID NO. 75874, or a homolog or fragment thereof, or if the activity of a polypeptide encoded by a nucleic acid molecule comprising the nucleic acid SEQ ID NO. 75873, preferably the coding region thereof, or a homolog or fragment thereof, e.g. derived from Escherichia coli, is increased or generated. For example the activity of a nucleic acid molecule or a polypeptide comprising the nucleic acid, preferably the coding region thereof, or polypeptide or the consensus sequence or the polypeptide motif, as depicted in Table I, II or IV, application No. 3, column 5 or 8 in the respective same line as the nucleic acid molecule SEQ ID NO. 75873 or polypeptide SEQ ID NO. 75874, respectively, or a homolog or a fragment thereof, is increased or generated, or if the activity b0841-protein is increased or generated in a non-human organism, like a microorganism or a plant cell, plant or part thereof, especially with non-targeted localization, whereby the respective line discloses in column 7 homoserine. For example, an increase of the homoserine of at least 1 percent, particularly in a range of 25 to 59-percent is conferred as compared to a corresponding non-transformed wild type non-human organism.

[22483] Accordingly, in one embodiment, an increase of phenylalanine in a non-human organism, as compared to a corresponding non-transformed wild type non-human organism, is conferred in the process of the invention, if the activity of a polypeptide showing the activity of a major facilitator superfamily transporter protein, or if the activity of the polypeptide B0898, preferably represented by SEQ ID NO. 7918, or a homolog or fragment thereof, or if the activity of a polypeptide encoded by a nucleic acid molecule comprising the nucleic acid SEQ ID NO. 7917, preferably the coding region thereof, or a homolog or fragment thereof, e.g. derived from Escherichia coli, is increased or generated. For example the activity of a nucleic acid molecule or a polypeptide comprising the nucleic acid, preferably the coding region thereof, or polypeptide or the consensus sequence or the polypeptide motif, as depicted in Table I, II or IV, application No. 3, column 5 or 8 in the respective same line as the nucleic acid molecule SEQ ID NO. 7917 or polypeptide SEQ ID NO. 7918, respectively, or a homolog or a fragment thereof, is increased or generated, or if the activity major facilitator superfamily transporter protein is increased or generated in a non-human organism, like a microorganism or a plant cell, plant or part thereof, especially with non-targeted localization, whereby the respective line discloses in column 7 phenylalanine. For example, an increase of the phenylalanine of at least 1 percent, particularly in a range of 29 to 2908-percent is conferred as compared to a corresponding non-transformed wild type non-human organism.

[22484] Accordingly, in one embodiment, an increase of serine in a non-human organism, as compared to a corresponding non-transformed wild type non-human organism, is conferred in the process of the invention, if the activity of a polypeptide showing the activity of a major facilitator superfamily transporter protein, or if the activity of the polypeptide B0898, preferably represented by SEQ ID NO. 7918, or a homolog or fragment thereof, or if the activity of a polypeptide encoded by a nucleic acid molecule comprising the nucleic acid SEQ ID NO. 7917, preferably the coding region thereof, or a homolog or fragment thereof, e.g. derived from Escherichia coli, is increased or generated. For example the activity of a nucleic acid molecule or a polypeptide comprising the nucleic acid, preferably the coding region thereof, or polypeptide or the consensus sequence or the polypeptide motif, as depicted in Table I, II or IV, application No. 3, column 5 or 8 in the respective same line as the nucleic acid molecule SEQ ID NO. 7917 or polypeptide SEQ ID NO. 7918, respectively, or a homolog or a fragment thereof, is increased or generated, or if the activity major facilitator superfamily transporter protein is increased or generated in a non-human organism, like a microorganism or a plant cell, plant or part thereof, especially with non-targeted localization, whereby the respective line discloses in column 7 serine. For example, an increase of the serine of at least 1 percent, particularly in a range of 34 to 290-percent is conferred as compared to a corresponding non-transformed wild type non-human organism.

[22485] Accordingly, in one embodiment, an increase of tyrosine in a non-human organism, as compared to a corresponding non-transformed wild type non-human organism, is conferred in the process of the invention, if the activity of a polypeptide showing the activity of a major facilitator superfamily transporter protein, or if the activity of the polypeptide B0898, preferably represented by SEQ ID NO. 7918, or a homolog or fragment thereof, or if the activity of a polypeptide encoded by a nucleic acid molecule comprising the nucleic acid SEQ ID NO. 7917, preferably the coding region thereof, or a homolog or fragment thereof, e.g. derived from Escherichia coli, is increased or generated. For example the activity of a nucleic acid molecule or a polypeptide comprising the nucleic acid, preferably the coding region thereof, or polypeptide or the consensus sequence or the polypeptide motif, as depicted in Table I, II or IV, application No. 3, column 5 or 8 in the respective same line as the nucleic acid molecule SEQ ID NO. 7917 or polypeptide SEQ ID NO. 7918, respectively, or a homolog or a fragment thereof, is increased or generated, or if the activity major facilitator superfamily transporter protein is increased or generated in a non-human organism, like a microorganism or a plant cell, plant or part thereof, especially with non-targeted localization, whereby the respective line discloses in column 7 tyrosine. For example, an increase of the tyrosine of at least 1 percent, particularly in a range of 41 to 2243-percent is conferred as compared to a corresponding non-transformed wild type non-human organism.

[22486] Accordingly, in one embodiment, an increase of 5-oxoproline in a non-human organism, as compared to a corresponding non-transformed wild type non-human organism, is conferred in the process of the invention, if the activity of a polypeptide showing the activity of a major facilitator superfamily transporter protein, or if the activity of the polypeptide B0898, preferably represented by SEQ ID NO. 7918, or a homolog or fragment thereof, or if the activity of a polypeptide encoded by a nucleic acid molecule comprising the nucleic acid SEQ ID NO. 7917, preferably the coding region thereof, or a homolog or fragment thereof, e.g. derived from Escherichia coli, is increased or generated. For example the activity of a nucleic acid molecule or a polypeptide comprising the nucleic acid, preferably the coding region thereof, or polypeptide or the consensus sequence or the polypeptide motif, as depicted in Table I, II or IV, application No. 3, column 5 or 8 in the respective same line as the nucleic acid molecule SEQ ID NO. 7917 or polypeptide SEQ ID NO. 7918, respectively, or a homolog or a fragment thereof, is increased or generated, or if the activity major facilitator superfamily transporter protein is increased or generated in a non-human organism, like a microorganism or a plant cell, plant or part thereof, especially with non-targeted localization, whereby the respective line discloses in column 7 5-oxoproline. For example, an increase of the 5-oxoproline of at least 1 percent, particularly in a range of 99 to 411-percent is conferred as compared to a corresponding non-transformed wild type non-human organism.

[22487] Accordingly, in one embodiment, an increase of citrulline in a non-human organism, as compared to a corresponding non-transformed wild type non-human organism, is conferred in the process of the invention, if the activity of a polypeptide showing the activity of a b0917-protein, or if the activity of the polypeptide B0917, preferably represented by SEQ ID NO. 75916, or a homolog or fragment thereof, or if the activity of a polypeptide encoded by a nucleic acid molecule comprising the nucleic acid SEQ ID NO. 75915, preferably the coding region thereof, or a homolog or fragment thereof, e.g. derived from Escherichia coli, is increased or generated. For example the activity of a nucleic acid molecule or a polypeptide comprising the nucleic acid, preferably the coding region thereof, or polypeptide or the consensus sequence or the polypeptide motif, as depicted in Table I, II or IV, application No. 3, column 5 or 8 in the respective same line as the nucleic acid molecule SEQ ID NO. 75915 or polypeptide SEQ ID NO. 75916, respectively, or a homolog or a fragment thereof, is increased or generated, or if the activity b0917-protein is increased or generated in a non-human organism, like a microorganism or a plant cell, plant or part thereof, especially with non-targeted localization, whereby the respective line discloses in column 7 citrulline. For example, an increase of the citrulline of at least 1 percent, particularly in a range of 32 to 58-percent is conferred as compared to a corresponding non-transformed wild type non-human organism.

[22488] Accordingly, in one embodiment, an increase of glycine in a non-human organism, as compared to a corresponding non-transformed wild type non-human organism, is conferred in the process of the invention, if the activity of a polypeptide showing the activity of a b0917-protein, or if the activity of the polypeptide B0917, preferably represented by SEQ ID NO. 75916, or a homolog or fragment thereof, or if the activity of a polypeptide encoded by a nucleic acid molecule comprising the nucleic acid SEQ ID NO. 75915, preferably the coding region thereof, or a homolog or fragment thereof, e.g. derived from Escherichia coli, is increased or generated. For example the activity of a nucleic acid molecule or a polypeptide comprising the nucleic acid, preferably the coding region thereof, or polypeptide or the consensus sequence or the polypeptide motif, as depicted in Table I, II or IV, application No. 3, column 5 or 8 in the respective same line as the nucleic acid molecule SEQ ID NO. 75915 or polypeptide SEQ ID NO. 75916, respectively, or a homolog or a fragment thereof, is increased or generated, or if the activity b0917-protein is increased or generated in a non-human organism, like a microorganism or a plant cell, plant or part thereof, especially with non-targeted localization, whereby the respective line discloses in column 7 glycine. For example, an increase of the glycine of at least 1 percent, particularly in a range of 60 to 65-percent is conferred as compared to a corresponding non-transformed wild type non-human organism.

[22489] Accordingly, in one embodiment, an increase of phenylalanine in a non-human organism, as compared to a corresponding non-transformed wild type non-human organism, is conferred in the process of the invention, if the activity of a polypeptide showing the activity of a b0917-protein, or if the activity of the polypeptide B0917, preferably represented by SEQ ID NO. 75916, or a homolog or fragment thereof, or if the activity of a polypeptide encoded by a nucleic acid molecule comprising the nucleic acid SEQ ID NO. 75915, preferably the coding region thereof, or a homolog or fragment thereof, e.g. derived from Escherichia coli, is increased or generated. For example the activity of a nucleic acid molecule or a polypeptide comprising the nucleic acid, preferably the coding region thereof, or polypeptide or the consensus sequence or the polypeptide motif, as depicted in Table I, II or IV, application No. 3, column 5 or 8 in the respective same line as the nucleic acid molecule SEQ ID NO. 75915 or polypeptide SEQ ID NO. 75916, respectively, or a homolog or a fragment thereof, is increased or generated, or if the activity b0917-protein is increased or generated in a non-human organism, like a microorganism or a plant cell, plant or part thereof, especially with non-targeted localization, whereby the respective line discloses in column 7 phenylalanine. For example, an increase of the phenylalanine of at least 1 percent, particularly in a range of 32 to 68-percent is conferred as compared to a corresponding non-transformed wild type non-human organism.

[22490] Accordingly, in one embodiment, an increase of 5-oxoproline in a non-human organism, as compared to a corresponding non-transformed wild type non-human organism, is conferred in the process of the invention, if the activity of a polypeptide showing the activity of a b0917-protein, or if the activity of the polypeptide B0917, preferably represented by SEQ ID NO. 75916, or a homolog or fragment thereof, or if the activity of a polypeptide encoded by a nucleic acid molecule comprising the nucleic acid SEQ ID NO. 75915, preferably the coding region thereof, or a homolog or fragment thereof, e.g. derived from Escherichia coli, is increased or generated. For example the activity of a nucleic acid molecule or a polypeptide comprising the nucleic acid, preferably the coding region thereof, or polypeptide or the consensus sequence or the polypeptide motif, as depicted in Table I, II or IV, application No. 3, column 5 or 8 in the respective same line as the nucleic acid molecule SEQ ID NO. 75915 or polypeptide SEQ ID NO. 75916, respectively, or a homolog or a fragment thereof, is increased or generated, or if the activity b0917-protein is increased or generated in a non-human organism, like a microorganism or a plant cell, plant or part thereof, especially with non-targeted localization, whereby the respective line discloses in column 7 5-oxoproline. For example, an increase of the 5-oxoproline of at least 1 percent, particularly in a range of 41 to 96-percent is conferred as compared to a corresponding non-transformed wild type non-human organism.

[22491] Accordingly, in one embodiment, an increase of alanine in a non-human organism, as compared to a corresponding non-transformed wild type non-human organism, is conferred in the process of the invention, if the activity of a polypeptide showing the activity of a methylglyoxal synthase, or if the activity of the polypeptide B0963, preferably represented by SEQ ID NO. 36671, or a homolog or fragment thereof, or if the activity of a polypeptide encoded by a nucleic acid molecule comprising the nucleic acid SEQ ID NO. 36670, preferably the coding region thereof, or a homolog or fragment thereof, e.g. derived from Escherichia coli, is increased or generated. For example the activity of a nucleic acid molecule or a polypeptide comprising the nucleic acid, preferably the coding region thereof, or polypeptide or the consensus sequence or the polypeptide motif, as depicted in Table I, II or IV, application No. 3, column 5 or 8 in the respective same line as the nucleic acid molecule SEQ ID NO. 36670 or polypeptide SEQ ID NO. 36671, respectively, or a homolog or a fragment thereof, is increased or generated, or if the activity methylglyoxal synthase is increased or generated in a non-human organism, like a microorganism or a plant cell, plant or part thereof, especially with non-targeted localization, whereby the respective line discloses in column 7 alanine. For example, an increase of the alanine of at least 1 percent, particularly in a range of 20 to 51-percent is conferred as compared to a corresponding non-transformed wild type non-human organism.

[22492] Accordingly, in one embodiment, an increase of phenylalanine in a non-human organism, as compared to a corresponding non-transformed wild type non-human organism, is conferred in the process of the invention, if the activity of a polypeptide showing the activity of a methylglyoxal synthase, or if the activity of the polypeptide B0963, preferably represented by SEQ ID NO. 36671, or a homolog or fragment thereof, or if the activity of a polypeptide encoded by a nucleic acid molecule comprising the nucleic acid SEQ ID NO. 36670, preferably the coding region thereof, or a homolog or fragment thereof, e.g. derived from Escherichia coli, is increased or generated. For example the activity of a nucleic acid molecule or a polypeptide comprising the nucleic acid, preferably the coding region thereof, or polypeptide or the consensus sequence or the polypeptide motif, as depicted in Table I, II or IV, application No. 3, column 5 or 8 in the respective same line as the nucleic acid molecule SEQ ID NO. 36670 or polypeptide SEQ ID NO. 36671, respectively, or a homolog or a fragment thereof, is increased or generated, or if the activity methylglyoxal synthase is increased or generated in a non-human organism, like a microorganism or a plant cell, plant or part thereof, especially with non-targeted localization, whereby the respective line discloses in column 7 phenylalanine. For example, an increase of the phenylalanine of at least 1 percent, particularly in a range of 58 to 241-percent is conferred as compared to a corresponding non-transformed wild type non-human organism.

[22493] Accordingly, in one embodiment, an increase of tyrosine in a non-human organism, as compared to a corresponding non-transformed wild type non-human organism, is conferred in the process of the invention, if the activity of a polypeptide showing the activity of a methylglyoxal synthase, or if the activity of the polypeptide B0963, preferably represented by SEQ ID NO. 36671, or a homolog or fragment thereof, or if the activity of a polypeptide encoded by a nucleic acid molecule comprising the nucleic acid SEQ ID NO. 36670, preferably the coding region thereof, or a homolog or fragment thereof, e.g. derived from Escherichia coli, is increased or generated. For example the activity of a nucleic acid molecule or a polypeptide comprising the nucleic acid, preferably the coding region thereof, or polypeptide or the consensus sequence or the polypeptide motif, as depicted in Table I, II or IV, application No. 3, column 5 or 8 in the respective same line as the nucleic acid molecule SEQ ID NO. 36670 or polypeptide SEQ ID NO. 36671, respectively, or a homolog or a fragment thereof, is increased or generated, or if the activity methylglyoxal synthase is increased or generated in a non-human organism, like a microorganism or a plant cell, plant or part thereof, especially with non-targeted localization, whereby the respective line discloses in column 7 tyrosine. For example, an increase of the tyrosine of at least 1 percent, particularly in a range of 46 to 453-percent is conferred as compared to a corresponding non-transformed wild type non-human organism.

[22494] Accordingly, in one embodiment, an increase of phenylalanine in a non-human organism, as compared to a corresponding non-transformed wild type non-human organism, is conferred in the process of the invention, if the activity of a polypeptide showing the activity of a phosphoanhydride phosphorylase, or if the activity of the polypeptide B0980, preferably represented by SEQ ID NO. 36810, or a homolog or fragment thereof, or if the activity of a polypeptide encoded by a nucleic acid molecule comprising the nucleic acid SEQ ID NO. 36809, preferably the coding region thereof, or a homolog or fragment thereof, e.g. derived from Escherichia coli, is increased or generated. For example the activity of a nucleic acid molecule or a polypeptide comprising the nucleic acid, preferably the coding region thereof, or polypeptide or the consensus sequence or the polypeptide motif, as depicted in Table I, II or IV, application No. 3, column 5 or 8 in the respective same line as the nucleic acid molecule SEQ ID NO. 36809 or polypeptide SEQ ID NO. 36810, respectively, or a homolog or a fragment thereof, is increased or generated, or if the activity phosphoanhydride phosphorylase is increased or generated in a non-human organism, like a microorganism or a plant cell, plant or part thereof, especially with non-targeted localization, whereby the respective line discloses in column 7 phenylalanine. For example, an increase of the phenylalanine of at least 1 percent, particularly in a range of 32 to 89-percent is conferred as compared to a corresponding non-transformed wild type non-human organism.

[22495] Accordingly, in one embodiment, an increase of alanine in a non-human organism, as compared to a corresponding non-transformed wild type non-human organism, is conferred in the process of the invention, if the activity of a polypeptide showing the activity of a b1003-protein, or if the activity of the polypeptide B1003, preferably represented by SEQ ID NO. 7942, or a homolog or fragment thereof, or if the activity of a polypeptide encoded by a nucleic acid molecule comprising the nucleic acid SEQ ID NO. 7941, preferably the coding region thereof, or a homolog or fragment thereof, e.g. derived from Escherichia coli, is increased or generated. For example the activity of a nucleic acid molecule or a polypeptide comprising the nucleic acid, preferably the coding region thereof, or polypeptide or the consensus sequence or the polypeptide motif, as depicted in Table I, II or IV, application No. 3, column 5 or 8 in the respective same line as the nucleic acid molecule SEQ ID NO. 7941 or polypeptide SEQ ID NO. 7942, respectively, or a homolog or a fragment thereof, is increased or generated, or if the activity b1003-protein is increased or generated in a non-human organism, like a microorganism or a plant cell, plant or part thereof, especially with non-targeted localization, whereby the respective line discloses in column 7 alanine. For example, an increase of the alanine of at least 1 percent, particularly in a range of 51 to 123-percent is conferred as compared to a corresponding non-transformed wild type non-human organism.

[22496] Accordingly, in one embodiment, an increase of aspartate in a non-human organism, as compared to a corresponding non-transformed wild type non-human organism, is conferred in the process of the invention, if the activity of a polypeptide showing the activity of a b1003-protein, or if the activity of the polypeptide B1003, preferably represented by SEQ ID NO. 7942, or a homolog or fragment thereof, or if the activity of a polypeptide encoded by a nucleic acid molecule comprising the nucleic acid SEQ ID NO. 7941, preferably the coding region thereof, or a homolog or fragment thereof, e.g. derived from Escherichia coli, is increased or generated. For example the activity of a nucleic acid molecule or a polypeptide comprising the nucleic acid, preferably the coding region thereof, or polypeptide or the consensus sequence or the polypeptide motif, as depicted in Table I, II or IV, application No. 3, column 5 or 8 in the respective same line as the nucleic acid molecule SEQ ID NO. 7941 or polypeptide SEQ ID NO. 7942, respectively, or a homolog or a fragment thereof, is increased or generated, or if the activity b1003-protein is increased or generated in a non-human organism, like a microorganism or a plant cell, plant or part thereof, especially with non-targeted localization, whereby the respective line discloses in column 7 aspartate. For example, an increase of the aspartate of at least 1 percent, particularly in a range of 60 to 317-percent is conferred as compared to a corresponding non-transformed wild type non-human organism.

[22497] Accordingly, in one embodiment, an increase of phenylalanine in a non-human organism, as compared to a corresponding non-transformed wild type non-human organism, is conferred in the process of the invention, if the activity of a polypeptide showing the activity of a b1003-protein, or if the activity of the polypeptide B1003, preferably represented by SEQ ID NO. 7942, or a homolog or fragment thereof, or if the activity of a polypeptide encoded by a nucleic acid molecule comprising the nucleic acid SEQ ID NO. 7941, preferably the coding region thereof, or a homolog or fragment thereof, e.g. derived from Escherichia coli, is increased or generated. For example the activity of a nucleic acid molecule or a polypeptide comprising the nucleic acid, preferably the coding region thereof, or polypeptide or the consensus sequence or the polypeptide motif, as depicted in Table I, II or IV, application No. 3, column 5 or 8 in the respective same line as the nucleic acid molecule SEQ ID NO. 7941 or polypeptide SEQ ID NO. 7942, respectively, or a homolog or a fragment thereof, is increased or generated, or if the activity b1003-protein is increased or generated in a non-human organism, like a microorganism or a plant cell, plant or part thereof, especially with non-targeted localization, whereby the respective line discloses in column 7 phenylalanine. For example, an increase of the phenylalanine of at least 1 percent, particularly in a range of 72 to 728-percent is conferred as compared to a corresponding non-transformed wild type non-human organism.

[22498] Accordingly, in one embodiment, an increase of serine in a non-human organism, as compared to a corresponding non-transformed wild type non-human organism, is conferred in the process of the invention, if the activity of a polypeptide showing the activity of a b1003-protein, or if the activity of the polypeptide B1003, preferably represented by SEQ ID NO. 7942, or a homolog or fragment thereof, or if the activity of a polypeptide encoded by a nucleic acid molecule comprising the nucleic acid SEQ ID NO. 7941, preferably the coding region thereof, or a homolog or fragment thereof, e.g. derived from Escherichia coli, is increased or generated. For example the activity of a nucleic acid molecule or a polypeptide comprising the nucleic acid, preferably the coding region thereof, or polypeptide or the consensus sequence or the polypeptide motif, as depicted in Table I, II or IV, application No. 3, column 5 or 8 in the respective same line as the nucleic acid molecule SEQ ID NO. 7941 or polypeptide SEQ ID NO. 7942, respectively, or a homolog or a fragment thereof, is increased or generated, or if the activity b1003-protein is increased or generated in a non-human organism, like a microorganism or a plant cell, plant or part thereof, especially with non-targeted localization, whereby the respective line discloses in column 7 serine. For example, an increase of the serine of at least 1 percent, particularly in a range of 33 to 327-percent is conferred as compared to a corresponding non-transformed wild type non-human organism.

[22499] Accordingly, in one embodiment, an increase of tyrosine in a non-human organism, as compared to a corresponding non-transformed wild type non-human organism, is conferred in the process of the invention, if the activity of a polypeptide showing the activity of a b1003-protein, or if the activity of the polypeptide B1003, preferably represented by SEQ ID NO. 7942, or a homolog or fragment thereof, or if the activity of a polypeptide encoded by a nucleic acid molecule comprising the nucleic acid SEQ ID NO. 7941, preferably the coding region thereof, or a homolog or fragment thereof, e.g. derived from Escherichia coli, is increased or generated. For example the activity of a nucleic acid molecule or a polypeptide comprising the nucleic acid, preferably the coding region thereof, or polypeptide or the consensus sequence or the polypeptide motif, as depicted in Table I, II or IV, application No. 3, column 5 or 8 in the respective same line as the nucleic acid molecule SEQ ID NO. 7941 or polypeptide SEQ ID NO. 7942, respectively, or a homolog or a fragment thereof, is increased or generated, or if the activity b1003-protein is increased or generated in a non-human organism, like a microorganism or a plant cell, plant or part thereof, especially with non-targeted localization, whereby the respective line discloses in column 7 tyrosine. For example, an increase of the tyrosine of at least 1 percent, particularly in a range of 119 to 664-percent is conferred as compared to a corresponding non-transformed wild type non-human organism.

[22500] Accordingly, in one embodiment, an increase of 3,4-dihydroxyphenylalanine (dopa) in a non-human organism, as compared to a corresponding non-transformed wild type non-human organism, is conferred in the process of the invention, if the activity of a polypeptide showing the activity of a b1003-protein, or if the activity of the polypeptide B1003, preferably represented by SEQ ID NO. 7942, or a homolog or fragment thereof, or if the activity of a polypeptide encoded by a nucleic acid molecule comprising the nucleic acid SEQ ID NO. 7941, preferably the coding region thereof, or a homolog or fragment thereof, e.g. derived from Escherichia coli, is increased or generated. For example the activity of a nucleic acid molecule or a polypeptide comprising the nucleic acid, preferably the coding region thereof, or polypeptide or the consensus sequence or the polypeptide motif, as depicted in Table I, II or IV, application No. 3, column 5 or 8 in the respective same line as the nucleic acid molecule SEQ ID NO. 7941 or polypeptide SEQ ID NO. 7942, respectively, or a homolog or a fragment thereof, is increased or generated, or if the activity b1003-protein is increased or generated in a non-human organism, like a microorganism or a plant cell, plant or part thereof, especially with non-targeted localization, whereby the respective line discloses in column 7 3,4-dihydroxyphenylalanine (dopa). For example, an increase of the 3,4-dihydroxyphenylalanine (dopa) of at least 1 percent, particularly in a range of 36 to 327-percent is conferred as compared to a corresponding non-transformed wild type non-human organism.

[22501] Accordingly, in one embodiment, an increase of 5-oxoproline in a non-human organism, as compared to a corresponding non-transformed wild type non-human organism, is conferred in the process of the invention, if the activity of a polypeptide showing the activity of a b1003-protein, or if the activity of the polypeptide B1003, preferably represented by SEQ ID NO. 7942, or a homolog or fragment thereof, or if the activity of a polypeptide encoded by a nucleic acid molecule comprising the nucleic acid SEQ ID NO. 7941, preferably the coding region thereof, or a homolog or fragment thereof, e.g. derived from Escherichia coli, is increased or generated. For example the activity of a nucleic acid molecule or a polypeptide comprising the nucleic acid, preferably the coding region thereof, or polypeptide or the consensus sequence or the polypeptide motif, as depicted in Table I, II or IV, application No. 3, column 5 or 8 in the respective same line as the nucleic acid molecule SEQ ID NO. 7941 or polypeptide SEQ ID NO. 7942, respectively, or a homolog or a fragment thereof, is increased or generated, or if the activity b1003-protein is increased or generated in a non-human organism, like a microorganism or a plant cell, plant or part thereof, especially with non-targeted localization, whereby the respective line discloses in column 7 5-oxoproline. For example, an increase of the 5-oxoproline of at least 1 percent, particularly in a range of 34 to 935-percent is conferred as compared to a corresponding non-transformed wild type non-human organism.

[22502] Accordingly, in one embodiment, an increase of citrulline in a non-human organism, as compared to a corresponding non-transformed wild type non-human organism, is conferred in the process of the invention, if the activity of a polypeptide showing the activity of a lipoprotein precursor, or if the activity of the polypeptide B1023, preferably represented by SEQ ID NO. 36881, or a homolog or fragment thereof, or if the activity of a polypeptide encoded by a nucleic acid molecule comprising the nucleic acid SEQ ID NO. 36880, preferably the coding region thereof, or a homolog or fragment thereof, e.g. derived from Escherichia coli, is increased or generated. For example the activity of a nucleic acid molecule or a polypeptide comprising the nucleic acid, preferably the coding region thereof, or polypeptide or the consensus sequence or the polypeptide motif, as depicted in Table I, II or IV, application No. 3, column 5 or 8 in the respective same line as the nucleic acid molecule SEQ ID NO. 36880 or polypeptide SEQ ID NO. 36881, respectively, or a homolog or a fragment thereof, is increased or generated, or if the activity lipoprotein precursor is increased or generated in a non-human organism, like a microorganism or a plant cell, plant or part thereof, especially with non-targeted localization, whereby the respective line discloses in column 7 citrulline. For example, an increase of the citrulline of at least 1 percent, particularly in a range of 44 to 123-percent is conferred as compared to a corresponding non-transformed wild type non-human organism.

[22503] Accordingly, in one embodiment, an increase of 5-oxoproline in a non-human organism, as compared to a corresponding non-transformed wild type non-human organism, is conferred in the process of the invention, if the activity of a polypeptide showing the activity of a lipoprotein precursor, or if the activity of the polypeptide B1023, preferably represented by SEQ ID NO. 36881, or a homolog or fragment thereof, or if the activity of a polypeptide encoded by a nucleic acid molecule comprising the nucleic acid SEQ ID NO. 36880, preferably the coding region thereof, or a homolog or fragment thereof, e.g. derived from Escherichia coli, is increased or generated. For example the activity of a nucleic acid molecule or a polypeptide comprising the nucleic acid, preferably the coding region thereof, or polypeptide or the consensus sequence or the polypeptide motif, as depicted in Table I, II or IV, application No. 3, column 5 or 8 in the respective same line as the nucleic acid molecule SEQ ID NO. 36880 or polypeptide SEQ ID NO. 36881, respectively, or a homolog or a fragment thereof, is increased or generated, or if the activity lipoprotein precursor is increased or generated in a non-human organism, like a microorganism or a plant cell, plant or part thereof, especially with non-targeted localization, whereby the respective line discloses in column 7 5-oxoproline. For example, an increase of the 5-oxoproline of at least 1 percent, particularly in a range of 38 to 138-percent is conferred as compared to a corresponding non-transformed wild type non-human organism.

[22504] Accordingly, in one embodiment, an increase of aspartate in a non-human organism, as compared to a corresponding non-transformed wild type non-human organism, is conferred in the process of the invention, if the activity of a polypeptide showing the activity of a b1024-protein, or if the activity of the polypeptide B1024, preferably represented by SEQ ID NO. 36908, or a homolog or fragment thereof, or if the activity of a polypeptide encoded by a nucleic acid molecule comprising the nucleic acid SEQ ID NO. 36907, preferably the coding region thereof, or a homolog or fragment thereof, e.g. derived from Escherichia coli, is increased or generated. For example the activity of a nucleic acid molecule or a polypeptide comprising the nucleic acid, preferably the coding region thereof, or polypeptide or the consensus sequence or the polypeptide motif, as depicted in Table I, II or IV, application No. 3, column 5 or 8 in the respective same line as the nucleic acid molecule SEQ ID NO. 36907 or polypeptide SEQ ID NO. 36908, respectively, or a homolog or a fragment thereof, is increased or generated, or if the activity b1024-protein is increased or generated in a non-human organism, like a microorganism or a plant cell, plant or part thereof, especially with non-targeted localization, whereby the respective line discloses in column 7 aspartate. For example, an increase of the aspartate of at least 1 percent, particularly in a range of 63 to 105-percent is conferred as compared to a corresponding non-transformed wild type non-human organism.

[22505] Accordingly, in one embodiment, an increase of aspartate in a non-human organism, as compared to a corresponding non-transformed wild type non-human organism, is conferred in the process of the invention, if the activity of a polypeptide showing the activity of a multidrug resistance protein, or if the activity of the polypeptide B1065, preferably represented by SEQ ID NO. 76033, or a homolog or fragment thereof, or if the activity of a polypeptide encoded by a nucleic acid molecule comprising the nucleic acid SEQ ID NO. 76032, preferably the coding region thereof, or a homolog or fragment thereof, e.g. derived from Escherichia coli, is increased or generated. For example the activity of a nucleic acid molecule or a polypeptide comprising the nucleic acid, preferably the coding region thereof, or polypeptide or the consensus sequence or the polypeptide motif, as depicted in Table I, II or IV, application No. 3, column 5 or 8 in the respective same line as the nucleic acid molecule SEQ ID NO. 76032 or polypeptide SEQ ID NO. 76033, respectively, or a homolog or a fragment thereof, is increased or generated, or if the activity multidrug resistance protein is increased or generated in a non-human organism, like a microorganism or a plant cell, plant or part thereof, especially with plastidic localization, whereby the respective line discloses in column 7 aspartate. For example, an increase of the aspartate of at least 1 percent, particularly in a range of 53 to 132-percent is conferred as compared to a corresponding non-transformed wild type non-human organism.

[22506] Accordingly, in one embodiment, an increase of tyrosine in a non-human organism, as compared to a corresponding non-transformed wild type non-human organism, is conferred in the process of the invention, if the activity of a polypeptide showing the activity of a multidrug resistance protein, or if the activity of the polypeptide B1065, preferably represented by SEQ ID NO. 76033, or a homolog or fragment thereof, or if the activity of a polypeptide encoded by a nucleic acid molecule comprising the nucleic acid SEQ ID NO. 76032, preferably the coding region thereof, or a homolog or fragment thereof, e.g. derived from Escherichia coli, is increased or generated. For example the activity of a nucleic acid molecule or a polypeptide comprising the nucleic acid, preferably the coding region thereof, or polypeptide or the consensus sequence or the polypeptide motif, as depicted in Table I, II or IV, application No. 3, column 5 or 8 in the respective same line as the nucleic acid molecule SEQ ID NO. 76032 or polypeptide SEQ ID NO. 76033, respectively, or a homolog or a fragment thereof, is increased or generated, or if the activity multidrug resistance protein is increased or generated in a non-human organism, like a microorganism or a plant cell, plant or part thereof, especially with plastidic localization, whereby the respective line discloses in column 7 tyrosine. For example, an increase of the tyrosine of at least 1 percent, particularly in a range of 34 to 45-percent is conferred as compared to a corresponding non-transformed wild type non-human organism.

[22507] Accordingly, in one embodiment, an increase of serine in a non-human organism, as compared to a corresponding non-transformed wild type non-human organism, is conferred in the process of the invention, if the activity of a polypeptide showing the activity of a b1137-protein, or if the activity of the polypeptide B1137, preferably represented by SEQ ID NO. 37391, or a homolog or fragment thereof, or if the activity of a polypeptide encoded by a nucleic acid molecule comprising the nucleic acid SEQ ID NO. 37390, preferably the coding region thereof, or a homolog or fragment thereof, e.g. derived from Escherichia coli, is increased or generated. For example the activity of a nucleic acid molecule or a polypeptide comprising the nucleic acid, preferably the coding region thereof, or polypeptide or the consensus sequence or the polypeptide motif, as depicted in Table I, II or IV, application No. 3, column 5 or 8 in the respective same line as the nucleic acid molecule SEQ ID NO. 37390 or polypeptide SEQ ID NO. 37391, respectively, or a homolog or a fragment thereof, is increased or generated, or if the activity b1137-protein is increased or generated in a non-human organism, like a microorganism or a plant cell, plant or part thereof, especially with non-targeted localization, whereby the respective line discloses in column 7 serine. For example, an increase of the serine of at least 1 percent, particularly in a range of 27 to 91-percent is conferred as compared to a corresponding non-transformed wild type non-human organism.

[22508] Accordingly, in one embodiment, an increase of phenylalanine in a non-human organism, as compared to a corresponding non-transformed wild type non-human organism, is conferred in the process of the invention, if the activity of a polypeptide showing the activity of a b1155-protein, or if the activity of the polypeptide B1155, preferably represented by SEQ ID NO. 76069, or a homolog or fragment thereof, or if the activity of a polypeptide encoded by a nucleic acid molecule comprising the nucleic acid SEQ ID NO. 76068, preferably the coding region thereof, or a homolog or fragment thereof, e.g. derived from Escherichia coli, is increased or generated. For example the activity of a nucleic acid molecule or a polypeptide comprising the nucleic acid, preferably the coding region thereof, or polypeptide or the consensus sequence or the polypeptide motif, as depicted in Table I, II or IV, application No. 3, column 5 or 8 in the respective same line as the nucleic acid molecule SEQ ID NO. 76068 or polypeptide SEQ ID NO. 76069, respectively, or a homolog or a fragment thereof, is increased or generated, or if the activity b1155-protein is increased or generated in a non-human organism, like a microorganism or a plant cell, plant or part thereof, especially with non-targeted localization, whereby the respective line discloses in column 7 phenylalanine. For example, an increase of the phenylalanine of at least 1 percent, particularly in a range of 34 to 71-percent is conferred as compared to a corresponding non-transformed wild type non-human organism.

[22509] Accordingly, in one embodiment, an increase of phenylalanine in a non-human organism, as compared to a corresponding non-transformed wild type non-human organism, is conferred in the process of the invention, if the activity of a polypeptide showing the activity of a b1163-protein, or if the activity of the polypeptide B1163, preferably represented by SEQ ID NO. 37395, or a homolog or fragment thereof, or if the activity of a polypeptide encoded by a nucleic acid molecule comprising the nucleic acid SEQ ID NO. 37394, preferably the coding region thereof, or a homolog or fragment thereof, e.g. derived from Escherichia coli, is increased or generated. For example the activity of a nucleic acid molecule or a polypeptide comprising the nucleic acid, preferably the coding region thereof, or polypeptide or the consensus sequence or the polypeptide motif, as depicted in Table I, II or IV, application No. 3, column 5 or 8 in the respective same line as the nucleic acid molecule SEQ ID NO. 37394 or polypeptide SEQ ID NO. 37395, respectively, or a homolog or a fragment thereof, is increased or generated, or if the activity b1163-protein is increased or generated in a non-human organism, like a microorganism or a plant cell, plant or part thereof, especially with non-targeted localization, whereby the respective line discloses in column 7 phenylalanine. For example, an increase of the phenylalanine of at least 1 percent, particularly in a range of 30 to 38-percent is conferred as compared to a corresponding non-transformed wild type non-human organism.

[22510] Accordingly, in one embodiment, an increase of tyrosine in a non-human organism, as compared to a corresponding non-transformed wild type non-human organism, is conferred in the process of the invention, if the activity of a polypeptide showing the activity of a b1163-protein, or if the activity of the polypeptide B1163, preferably represented by SEQ ID NO. 37395, or a homolog or fragment thereof, or if the activity of a polypeptide encoded by a nucleic acid molecule comprising the nucleic acid SEQ ID NO. 37394, preferably the coding region thereof, or a homolog or fragment thereof, e.g. derived from Escherichia coli, is increased or generated. For example the activity of a nucleic acid molecule or a polypeptide comprising the nucleic acid, preferably the coding region thereof, or polypeptide or the consensus sequence or the polypeptide motif, as depicted in Table I, II or IV, application No. 3, column 5 or 8 in the respective same line as the nucleic acid molecule SEQ ID NO. 37394 or polypeptide SEQ ID NO. 37395, respectively, or a homolog or a fragment thereof, is increased or generated, or if the activity b1163-protein is increased or generated in a non-human organism, like a microorganism or a plant cell, plant or part thereof, especially with non-targeted localization, whereby the respective line discloses in column 7 tyrosine. For example, an increase of the tyrosine of at least 1 percent, particularly in a range of 39 to 45-percent is conferred as compared to a corresponding non-transformed wild type non-human organism.

[22511] Accordingly, in one embodiment, an increase of citrulline in a non-human organism, as compared to a corresponding non-transformed wild type non-human organism, is conferred in the process of the invention, if the activity of a polypeptide showing the activity of a b1179-protein, or if the activity of the polypeptide B1179, preferably represented by SEQ ID NO. 76088, or a homolog or fragment thereof, or if the activity of a polypeptide encoded by a nucleic acid molecule comprising the nucleic acid SEQ ID NO. 76087, preferably the coding region thereof, or a homolog or fragment thereof, e.g. derived from Escherichia coli, is increased or generated. For example the activity of a nucleic acid molecule or a polypeptide comprising the nucleic acid, preferably the coding region thereof, or polypeptide or the consensus sequence or the polypeptide motif, as depicted in Table I, II or IV, application No. 3, column 5 or 8 in the respective same line as the nucleic acid molecule SEQ ID NO. 76087 or polypeptide SEQ ID NO. 76088, respectively, or a homolog or a fragment thereof, is increased or generated, or if the activity b1179-protein is increased or generated in a non-human organism, like a microorganism or a plant cell, plant or part thereof, especially with plastidic localization, whereby the respective line discloses in column 7 citrulline. For example, an increase of the citrulline of at least 1 percent, particularly in a range of 35 to 47-percent is conferred as compared to a corresponding non-transformed wild type non-human organism.

[22512] Accordingly, in one embodiment, an increase of alanine in a non-human organism, as compared to a corresponding non-transformed wild type non-human organism, is conferred in the process of the invention, if the activity of a polypeptide showing the activity of a sodium/proton antiporter, or if the activity of the polypeptide B1186, preferably represented by SEQ ID NO. 37401, or a homolog or fragment thereof, or if the activity of a polypeptide encoded by a nucleic acid molecule comprising the nucleic acid SEQ ID NO. 37400, preferably the coding region thereof, or a homolog or fragment thereof, e.g. derived from Escherichia coli K12, is increased or generated. For example the activity of a nucleic acid molecule or a polypeptide comprising the nucleic acid, preferably the coding region thereof, or polypeptide or the consensus sequence or the polypeptide motif, as depicted in Table I, II or IV, application No. 3, column 5 or 8 in the respective same line as the nucleic acid molecule SEQ ID NO. 37400 or polypeptide SEQ ID NO. 37401, respectively, or a homolog or a fragment thereof, is increased or generated, or if the activity sodium/proton antiporter is increased or generated in a non-human organism, like a microorganism or a plant cell, plant or part thereof, especially with non-targeted localization, whereby the respective line discloses in column 7 alanine. For example, an increase of the alanine of at least 1 percent, particularly in a range of 28 to 76-percent is conferred as compared to a corresponding non-transformed wild type non-human organism.

[22513] Accordingly, in one embodiment, an increase of serine in a non-human organism, as compared to a corresponding non-transformed wild type non-human organism, is conferred in the process of the invention, if the activity of a polypeptide showing the activity of a sodium/proton antiporter, or if the activity of the polypeptide B1186, preferably represented by SEQ ID NO. 37401, or a homolog or fragment thereof, or if the activity of a polypeptide encoded by a nucleic acid molecule comprising the nucleic acid SEQ ID NO. 37400, preferably the coding region thereof, or a homolog or fragment thereof, e.g. derived from Escherichia coli K12, is increased or generated. For example the activity of a nucleic acid molecule or a polypeptide comprising the nucleic acid, preferably the coding region thereof, or polypeptide or the consensus sequence or the polypeptide motif, as depicted in Table I, II or IV, application No. 3, column 5 or 8 in the respective same line as the nucleic acid molecule SEQ ID NO. 37400 or polypeptide SEQ ID NO. 37401, respectively, or a homolog or a fragment thereof, is increased or generated, or if the activity sodium/proton antiporter is increased or generated in a non-human organism, like a microorganism or a plant cell, plant or part thereof, especially with non-targeted localization, whereby the respective line discloses in column 7 serine. For example, an increase of the serine of at least 1 percent, particularly in a range of 46 to 113-percent is conferred as compared to a corresponding non-transformed wild type non-human organism.

[22514] Accordingly, in one embodiment, an increase of citrulline in a non-human organism, as compared to a corresponding non-transformed wild type non-human organism, is conferred in the process of the invention, if the activity of a polypeptide showing the activity of a b1205-protein, or if the activity of the polypeptide B1205, preferably represented by SEQ ID NO. 76139, or a homolog or fragment thereof, or if the activity of a polypeptide encoded by a nucleic acid molecule comprising the nucleic acid SEQ ID NO. 76138, preferably the coding region thereof, or a homolog or fragment thereof, e.g. derived from Escherichia coli, is increased or generated. For example the activity of a nucleic acid molecule or a polypeptide comprising the nucleic acid, preferably the coding region thereof, or polypeptide or the consensus sequence or the polypeptide motif, as depicted in Table I, II or IV, application No. 3, column 5 or 8 in the respective same line as the nucleic acid molecule SEQ ID NO. 76138 or polypeptide SEQ ID NO. 76139, respectively, or a homolog or a fragment thereof, is increased or generated, or if the activity b1205-protein is increased or generated in a non-human organism, like a microorganism or a plant cell, plant or part thereof, especially with non-targeted localization, whereby the respective line discloses in column 7 citrulline. For example, an increase of the citrulline of at least 1 percent, particularly in a range of 35 to 77-percent is conferred as compared to a corresponding non-transformed wild type non-human organism.

[22515] Accordingly, in one embodiment, an increase of phenylalanine in a non-human organism, as compared to a corresponding non-transformed wild type non-human organism, is conferred in the process of the invention, if the activity of a polypeptide showing the activity of a b1229protein, or if the activity of the polypeptide B1229, preferably represented by SEQ ID NO. 76152, or a homolog or fragment thereof, or if the activity of a polypeptide encoded by a nucleic acid molecule comprising the nucleic acid SEQ ID NO. 76151, preferably the coding region thereof, or a homolog or fragment thereof, e.g. derived from Escherichia coli, is increased or generated. For example the activity of a nucleic acid molecule or a polypeptide comprising the nucleic acid, preferably the coding region thereof, or polypeptide or the consensus sequence or the polypeptide motif, as depicted in Table I, II or IV, application No. 3, column 5 or 8 in the respective same line as the nucleic acid molecule SEQ ID NO. 76151 or polypeptide SEQ ID NO. 76152, respectively, or a homolog or a fragment thereof, is increased or generated, or if the activity b1229-protein is increased or generated in a non-human organism, like a microorganism or a plant cell, plant or part thereof, especially with non-targeted localization, whereby the respective line discloses in column 7 phenylalanine. For example, an increase of the phenylalanine of at least 1 percent, particularly in a range of 35 to 44-percent is conferred as compared to a corresponding non-transformed wild type non-human organism.

[22516] Accordingly, in one embodiment, an increase of tyrosine in a non-human organism, as compared to a corresponding non-transformed wild type non-human organism, is conferred in the process of the invention, if the activity of a polypeptide showing the activity of a membrane protein, or if the activity of the polypeptide B1255, preferably represented by SEQ ID NO. 37484, or a homolog or fragment thereof, or if the activity of a polypeptide encoded by a nucleic acid molecule comprising the nucleic acid SEQ ID NO. 37483, preferably the coding region thereof, or a homolog or fragment thereof, e.g. derived from Escherichia coli, is increased or generated. For example the activity of a nucleic acid molecule or a polypeptide comprising the nucleic acid, preferably the coding region thereof, or polypeptide or the consensus sequence or the polypeptide motif, as depicted in Table I, II or IV, application No. 3, column 5 or 8 in the respective same line as the nucleic acid molecule SEQ ID NO. 37483 or polypeptide SEQ ID NO. 37484, respectively, or a homolog or a fragment thereof, is increased or generated, or if the activity membrane protein is increased or generated in a non-human organism, like a microorganism or a plant cell, plant or part thereof, especially with non-targeted localization, whereby the respective line discloses in column 7 tyrosine. For example, an increase of the tyrosine of at least 1 percent, particularly in a range of 52 to 124-percent is conferred as compared to a corresponding non-transformed wild type non-human organism.

[22517] Accordingly, in one embodiment, an increase of citrulline in a non-human organism, as compared to a corresponding non-transformed wild type non-human organism, is conferred in the process of the invention, if the activity of a polypeptide showing the activity of a b1259-protein, or if the activity of the polypeptide B1259, preferably represented by SEQ ID NO. 37504, or a homolog or fragment thereof, or if the activity of a polypeptide encoded by a nucleic acid molecule comprising the nucleic acid SEQ ID NO. 37503, preferably the coding region thereof, or a homolog or fragment thereof, e.g. derived from Escherichia coli, is increased or generated. For example the activity of a nucleic acid molecule or a polypeptide comprising the nucleic acid, preferably the coding region thereof, or polypeptide or the consensus sequence or the polypeptide motif, as depicted in Table I, II or IV, application No. 3, column 5 or 8 in the respective same line as the nucleic acid molecule SEQ ID NO. 37503 or polypeptide SEQ ID NO. 37504, respectively, or a homolog or a fragment thereof, is increased or generated, or if the activity b1259-protein is increased or generated in a non-human organism, like a microorganism or a plant cell, plant or part thereof, especially with non-targeted localization, whereby the respective line discloses in column 7 citrulline. For example, an increase of the citrulline of at least 1 percent, particularly in a range of 32 to 142-percent is conferred as compared to a corresponding non-transformed wild type non-human organism.

[22518] Accordingly, in one embodiment, an increase of 5-oxoproline in a non-human organism, as compared to a corresponding non-transformed wild type non-human organism, is conferred in the process of the invention, if the activity of a polypeptide showing the activity of a b1259-protein, or if the activity of the polypeptide B1259, preferably represented by SEQ ID NO. 37504, or a homolog or fragment thereof, or if the activity of a polypeptide encoded by a nucleic acid molecule comprising the nucleic acid SEQ ID NO. 37503, preferably the coding region thereof, or a homolog or fragment thereof, e.g. derived from Escherichia coli, is increased or generated. For example the activity of a nucleic acid molecule or a polypeptide comprising the nucleic acid, preferably the coding region thereof, or polypeptide or the consensus sequence or the polypeptide motif, as depicted in Table I, II or IV, application No. 3, column 5 or 8 in the respective same line as the nucleic acid molecule SEQ ID NO. 37503 or polypeptide SEQ ID NO. 37504, respectively, or a homolog or a fragment thereof, is increased or generated, or if the activity b1259-protein is increased or generated in a non-human organism, like a microorganism or a plant cell, plant or part thereof, especially with non-targeted localization, whereby the respective line discloses in column 7 5-oxoproline. For example, an increase of the 5-oxoproline of at least 1 percent, particularly in a range of 38 to 91-percent is conferred as compared to a corresponding non-transformed wild type non-human organism.

[22519] Accordingly, in one embodiment, an increase of tyrosine in a non-human organism, as compared to a corresponding non-transformed wild type non-human organism, is conferred in the process of the invention, if the activity of a polypeptide showing the activity of a tryptophan biosynthesis protein, or if the activity of the polypeptide B1262, preferably represented by SEQ ID NO. 76158, or a homolog or fragment thereof, or if the activity of a polypeptide encoded by a nucleic acid molecule comprising the nucleic acid SEQ ID NO. 76157, preferably the coding region thereof, or a homolog or fragment thereof, e.g. derived from Escherichia coli, is increased or generated. For example the activity of a nucleic acid molecule or a polypeptide comprising the nucleic acid, preferably the coding region thereof, or polypeptide or the consensus sequence or the polypeptide motif, as depicted in Table I, II or IV, application No. 3, column 5 or 8 in the respective same line as the nucleic acid molecule SEQ ID NO. 76157 or polypeptide SEQ ID NO. 76158, respectively, or a homolog or a fragment thereof, is increased or generated, or if the activity tryptophan biosynthesis protein is increased or generated in a non-human organism, like a microorganism or a plant cell, plant or part thereof, especially with plastidic localization, whereby the respective line discloses in column 7 tyrosine. For example, an increase of the tyrosine of at least 1 percent, particularly in a range of 27 to 79-percent is conferred as compared to a corresponding non-transformed wild type non-human organism.

[22520] Accordingly, in one embodiment, an increase of phenylalanine in a non-human organism, as compared to a corresponding non-transformed wild type non-human organism, is conferred in the process of the invention, if the activity of a polypeptide showing the activity of a anthranilate synthase component I, or if the activity of the polypeptide B1264, preferably represented by SEQ ID NO. 76241, or a homolog or fragment thereof, or if the activity of a polypeptide encoded by a nucleic acid molecule comprising the nucleic acid SEQ ID NO. 76240, preferably the coding region thereof, or a homolog or fragment thereof, e.g. derived from Escherichia coli, is increased or generated. For example the activity of a nucleic acid molecule or a polypeptide comprising the nucleic acid, preferably the coding region thereof, or polypeptide or the consensus sequence or the polypeptide motif, as depicted in Table I, II or IV, application No. 3, column 5 or 8 in the respective same line as the nucleic acid molecule SEQ ID NO. 76240 or polypeptide SEQ ID NO. 76241, respectively, or a homolog or a fragment thereof, is increased or generated, or if the activity anthranilate synthase component I is increased or generated in a non-human organism, like a microorganism or a plant cell, plant or part thereof, especially with plastidic localization, whereby the respective line discloses in column 7 phenylalanine. For example, an increase of the phenylalanine of at least 1 percent, particularly in a range of 33 to 47-percent is conferred as compared to a corresponding non-transformed wild type non-human organism.

[22521] Accordingly, in one embodiment, an increase of glycine in a non-human organism, as compared to a corresponding non-transformed wild type non-human organism, is conferred in the process of the invention, if the activity of a polypeptide showing the activity of a b1280-protein, or if the activity of the polypeptide B1280, preferably represented by SEQ ID NO. 37574, or a homolog or fragment thereof, or if the activity of a polypeptide encoded by a nucleic acid molecule comprising the nucleic acid SEQ ID NO. 37573, preferably the coding region thereof, or a homolog or fragment thereof, e.g. derived from Escherichia coli, is increased or generated. For example the activity of a nucleic acid molecule or a polypeptide comprising the nucleic acid, preferably the coding region thereof, or polypeptide or the consensus sequence or the polypeptide motif, as depicted in Table I, II or IV, application No. 3, column 5 or 8 in the respective same line as the nucleic acid molecule SEQ ID NO. 37573 or polypeptide SEQ ID NO. 37574, respectively, or a homolog or a fragment thereof, is increased or generated, or if the activity b1280-protein is increased or generated in a non-human organism, like a microorganism or a plant cell, plant or part thereof, especially with non-targeted localization, whereby the respective line discloses in column 7 glycine. For example, an increase of the glycine of at least 1 percent, particularly in a range of 38 to 169-percent is conferred as compared to a corresponding non-transformed wild type non-human organism.

[22522] Accordingly, in one embodiment, an increase of serine in a non-human organism, as compared to a corresponding non-transformed wild type non-human organism, is conferred in the process of the invention, if the activity of a polypeptide showing the activity of a b1280-protein, or if the activity of the polypeptide B1280, preferably represented by SEQ ID NO. 37574, or a homolog or fragment thereof, or if the activity of a polypeptide encoded by a nucleic acid molecule comprising the nucleic acid SEQ ID NO. 37573, preferably the coding region thereof, or a homolog or fragment thereof, e.g. derived from Escherichia coli, is increased or generated. For example the activity of a nucleic acid molecule or a polypeptide comprising the nucleic acid, preferably the coding region thereof, or polypeptide or the consensus sequence or the polypeptide motif, as depicted in Table I, II or IV, application No. 3, column 5 or 8 in the respective same line as the nucleic acid molecule SEQ ID NO. 37573 or polypeptide SEQ ID NO. 37574, respectively, or a homolog or a fragment thereof, is increased or generated, or if the activity b1280-protein is increased or generated in a non-human organism, like a microorganism or a plant cell, plant or part thereof, especially with non-targeted localization, whereby the respective line discloses in column 7 serine. For example, an increase of the serine of at least 1 percent, particularly in a range of 37 to 48-percent is conferred as compared to a corresponding non-transformed wild type non-human organism.

[22523] Accordingly, in one embodiment, an increase of 5-oxoproline in a non-human organism, as compared to a corresponding non-transformed wild type non-human organism, is conferred in the process of the invention, if the activity of a polypeptide showing the activity of a b1280-protein, or if the activity of the polypeptide B1280, preferably represented by SEQ ID NO. 37574, or a homolog or fragment thereof, or if the activity of a polypeptide encoded by a nucleic acid molecule comprising the nucleic acid SEQ ID NO. 37573, preferably the coding region thereof, or a homolog or fragment thereof, e.g. derived from Escherichia coli, is increased or generated. For example the activity of a nucleic acid molecule or a polypeptide comprising the nucleic acid, preferably the coding region thereof, or polypeptide or the consensus sequence or the polypeptide motif, as depicted in Table I, II or IV, application No. 3, column 5 or 8 in the respective same line as the nucleic acid molecule SEQ ID NO. 37573 or polypeptide SEQ ID NO. 37574, respectively, or a homolog or a fragment thereof, is increased or generated, or if the activity b1280-protein is increased or generated in a non-human organism, like a microorganism or a plant cell, plant or part thereof, especially with non-targeted localization, whereby the respective line discloses in column 7 5-oxoproline. For example, an increase of the 5-oxoproline of at least 1 percent, particularly in a range of 38 to 86-percent is conferred as compared to a corresponding non-transformed wild type non-human organism.

[22524] Accordingly, in one embodiment, an increase of alanine in a non-human organism, as compared to a corresponding non-transformed wild type non-human organism, is conferred in the process of the invention, if the activity of a polypeptide showing the activity of a glutamine synthetase, or if the activity of the polypeptide B1297, preferably represented by SEQ ID NO. 37659, or a homolog or fragment thereof, or if the activity of a polypeptide encoded by a nucleic acid molecule comprising the nucleic acid SEQ ID NO. 37658, preferably the coding region thereof, or a homolog or fragment thereof, e.g. derived from Escherichia coli, is increased or generated. For example the activity of a nucleic acid molecule or a polypeptide comprising the nucleic acid, preferably the coding region thereof, or polypeptide or the consensus sequence or the polypeptide motif, as depicted in Table I, II or IV, application No. 3, column 5 or 8 in the respective same line as the nucleic acid molecule SEQ ID NO. 37658 or polypeptide SEQ ID NO. 37659, respectively, or a homolog or a fragment thereof, is increased or generated, or if the activity glutamine synthetase is increased or generated in a non-human organism, like a microorganism or a plant cell, plant or part thereof, especially with plastidic localization, whereby the respective line discloses in column 7 alanine. For example, an increase of the alanine of at least 1 percent, particularly in a range of 62 to 345-percent is conferred as compared to a corresponding non-transformed wild type non-human organism.

[22525] Accordingly, in one embodiment, an increase of glycine in a non-human organism, as compared to a corresponding non-transformed wild type non-human organism, is conferred in the process of the invention, if the activity of a polypeptide showing the activity of a glutamine synthetase, or if the activity of the polypeptide B1297, preferably represented by SEQ ID NO. 37659, or a homolog or fragment thereof, or if the activity of a polypeptide encoded by a nucleic acid molecule comprising the nucleic acid SEQ ID NO. 37658, preferably the coding region thereof, or a homolog or fragment thereof, e.g. derived from Escherichia coli, is increased or generated. For example the activity of a nucleic acid molecule or a polypeptide comprising the nucleic acid, preferably the coding region thereof, or polypeptide or the consensus sequence or the polypeptide motif, as depicted in Table I, II or IV, application No. 3, column 5 or 8 in the respective same line as the nucleic acid molecule SEQ ID NO. 37658 or polypeptide SEQ ID NO. 37659, respectively, or a homolog or a fragment thereof, is increased or generated, or if the activity glutamine synthetase is increased or generated in a non-human organism, like a microorganism or a plant cell, plant or part thereof, especially with plastidic localization, whereby the respective line discloses in column 7 glycine. For example, an increase of the glycine of at least 1 percent, particularly in a range of 26 to 507-percent is conferred as compared to a corresponding non-transformed wild type non-human organism.

[22526] Accordingly, in one embodiment, an increase of phenylalanine in a non-human organism, as compared to a corresponding non-transformed wild type non-human organism, is conferred in the process of the invention, if the activity of a polypeptide showing the activity of a aldehyde dehydrogenase, or if the activity of the polypeptide B1300, preferably represented by SEQ ID NO. 37808, or a homolog or fragment thereof, or if the activity of a polypeptide encoded by a nucleic acid molecule comprising the nucleic acid SEQ ID NO. 37807, preferably the coding region thereof, or a homolog or fragment thereof, e.g. derived from Escherichia coli, is increased or generated. For example the activity of a nucleic acid molecule or a polypeptide comprising the nucleic acid, preferably the coding region thereof, or polypeptide or the consensus sequence or the polypeptide motif, as depicted in Table I, II or IV, application No. 3, column 5 or 8 in the respective same line as the nucleic acid molecule SEQ ID NO. 37807 or polypeptide SEQ ID NO. 37808, respectively, or a homolog or a fragment thereof, is increased or generated, or if the activity aldehyde dehydrogenase is increased or generated in a non-human organism, like a microorganism or a plant cell, plant or part thereof, especially with non-targeted localization, whereby the respective line discloses in column 7 phenylalanine. For example, an increase of the phenylalanine of at least 1 percent, particularly in a range of 52 to 109-percent is conferred as compared to a corresponding non-transformed wild type non-human organism.

[22527] Accordingly, in one embodiment, an increase of tyrosine in a non-human organism, as compared to a corresponding non-transformed wild type non-human organism, is conferred in the process of the invention, if the activity of a polypeptide showing the activity of a aldehyde dehydrogenase, or if the activity of the polypeptide B1300, preferably represented by SEQ ID NO. 37808, or a homolog or fragment thereof, or if the activity of a polypeptide encoded by a nucleic acid molecule comprising the nucleic acid SEQ ID NO. 37807, preferably the coding region thereof, or a homolog or fragment thereof, e.g. derived from Escherichia coli, is increased or generated. For example the activity of a nucleic acid molecule or a polypeptide comprising the nucleic acid, preferably the coding region thereof, or polypeptide or the consensus sequence or the polypeptide motif, as depicted in Table I, II or IV, application No. 3, column 5 or 8 in the respective same line as the nucleic acid molecule SEQ ID NO. 37807 or polypeptide SEQ ID NO. 37808, respectively, or a homolog or a fragment thereof, is increased or generated, or if the activity aldehyde dehydrogenase is increased or generated in a non-human organism, like a microorganism or a plant cell, plant or part thereof, especially with non-targeted localization, whereby the respective line discloses in column 7 tyrosine. For example, an increase of the tyrosine of at least 1 percent, particularly in a range of 59 to 115-percent is conferred as compared to a corresponding non-transformed wild type non-human organism.

[22528] Accordingly, in one embodiment, an increase of citrulline in a non-human organism, as compared to a corresponding non-transformed wild type non-human organism, is conferred in the process of the invention, if the activity of a polypeptide showing the activity of a ABC transporter substrate-binding protein, or if the activity of the polypeptide B1310, preferably represented by SEQ ID NO. 76868, or a homolog or fragment thereof, or if the activity of a polypeptide encoded by a nucleic acid molecule comprising the nucleic acid SEQ ID NO. 76867, preferably the coding region thereof, or a homolog or fragment thereof, e.g. derived from Escherichia coli, is increased or generated. For example the activity of a nucleic acid molecule or a polypeptide comprising the nucleic acid, preferably the coding region thereof, or polypeptide or the consensus sequence or the polypeptide motif, as depicted in Table I, II or IV, application No. 3, column 5 or 8 in the respective same line as the nucleic acid molecule SEQ ID NO. 76867 or polypeptide SEQ ID NO. 76868, respectively, or a homolog or a fragment thereof, is increased or generated, or if the activity ABC transporter substrate-binding protein is increased or generated in a non-human organism, like a microorganism or a plant cell, plant or part thereof, especially with non-targeted localization, whereby the respective line discloses in column 7 citrulline. For example, an increase of the citrulline of at least 1 percent, particularly in a range of 33 to 51-percent is conferred as compared to a corresponding non-transformed wild type non-human organism.

[22529] Accordingly, in one embodiment, an increase of citrulline in a non-human organism, as compared to a corresponding non-transformed wild type non-human organism, is conferred in the process of the invention, if the activity of a polypeptide showing the activity of a b1330-protein, or if the activity of the polypeptide B1330, preferably represented by SEQ ID NO. 38227, or a homolog or fragment thereof, or if the activity of a polypeptide encoded by a nucleic acid molecule comprising the nucleic acid SEQ ID NO. 38226, preferably the coding region thereof, or a homolog or fragment thereof, e.g. derived from Escherichia coli, is increased or generated. For example the activity of a nucleic acid molecule or a polypeptide comprising the nucleic acid, preferably the coding region thereof, or polypeptide or the consensus sequence or the polypeptide motif, as depicted in Table I, II or IV, application No. 3, column 5 or 8 in the respective same line as the nucleic acid molecule SEQ ID NO. 38226 or polypeptide SEQ ID NO. 38227, respectively, or a homolog or a fragment thereof, is increased or generated, or if the activity b1330-protein is increased or generated in a non-human organism, like a microorganism or a plant cell, plant or part thereof, especially with non-targeted localization, whereby the respective line discloses in column 7 citrulline. For example, an increase of the citrulline of at least 1 percent, particularly in a range of 33 to 162-percent is conferred as compared to a corresponding non-transformed wild type non-human organism.

[22530] Accordingly, in one embodiment, an increase of phenylalanine in a non-human organism, as compared to a corresponding non-transformed wild type non-human organism, is conferred in the process of the invention, if the activity of a polypeptide showing the activity of a ATP-dependent RNA helicase, or if the activity of the polypeptide B1343, preferably represented by SEQ ID NO. 76891, or a homolog or fragment thereof, or if the activity of a polypeptide encoded by a nucleic acid molecule comprising the nucleic acid SEQ ID NO. 76890, preferably the coding region thereof, or a homolog or fragment thereof, e.g. derived from Escherichia coli, is increased or generated. For example the activity of a nucleic acid molecule or a polypeptide comprising the nucleic acid, preferably the coding region thereof, or polypeptide or the consensus sequence or the polypeptide motif, as depicted in Table I, II or IV, application No. 3, column 5 or 8 in the respective same line as the nucleic acid molecule SEQ ID NO. 76890 or polypeptide SEQ ID NO. 76891, respectively, or a homolog or a fragment thereof, is increased or generated, or if the activity ATP-dependent RNA helicase is increased or generated in a non-human organism, like a microorganism or a plant cell, plant or part thereof, especially with non-targeted localization, whereby the respective line discloses in column 7 phenylalanine. For example, an increase of the phenylalanine of at least 1 percent, particularly in a range of 27 to 100-percent is conferred as compared to a corresponding non-transformed wild type non-human organism.

[22531] Accordingly, in one embodiment, an increase of alanine in a non-human organism, as compared to a corresponding non-transformed wild type non-human organism, is conferred in the process of the invention, if the activity of a polypeptide showing the activity of a restriction alleviation protein, or if the activity of the polypeptide B1348, preferably represented by SEQ ID NO. 77769, or a homolog or fragment thereof, or if the activity of a polypeptide encoded by a nucleic acid molecule comprising the nucleic acid SEQ ID NO. 77768, preferably the coding region thereof, or a homolog or fragment thereof, e.g. derived from Escherichia coli, is increased or generated. For example the activity of a nucleic acid molecule or a polypeptide comprising the nucleic acid, preferably the coding region thereof, or polypeptide or the consensus sequence or the polypeptide motif, as depicted in Table I, II or IV, application No. 3, column 5 or 8 in the respective same line as the nucleic acid molecule SEQ ID NO. 77768 or polypeptide SEQ ID NO. 77769, respectively, or a homolog or a fragment thereof, is increased or generated, or if the activity restriction alleviation protein is increased or generated in a non-human organism, like a microorganism or a plant cell, plant or part thereof, especially with non-targeted localization, whereby the respective line discloses in column 7 alanine. For example, an increase of the alanine of at least 1 percent, particularly in a range of 23 to 36-percent is conferred as compared to a corresponding non-transformed wild type non-human organism.

[22532] Accordingly, in one embodiment, an increase of glycine in a non-human organism, as compared to a corresponding non-transformed wild type non-human organism, is conferred in the process of the invention, if the activity of a polypeptide showing the activity of a restriction alleviation protein, or if the activity of the polypeptide B1348, preferably represented by SEQ ID NO. 77769, or a homolog or fragment thereof, or if the activity of a polypeptide encoded by a nucleic acid molecule comprising the nucleic acid SEQ ID NO. 77768, preferably the coding region thereof, or a homolog or fragment thereof, e.g. derived from Escherichia coli, is increased or generated. For example the activity of a nucleic acid molecule or a polypeptide comprising the nucleic acid, preferably the coding region thereof, or polypeptide or the consensus sequence or the polypeptide motif, as depicted in Table I, II or IV, application No. 3, column 5 or 8 in the respective same line as the nucleic acid molecule SEQ ID NO. 77768 or polypeptide SEQ ID NO. 77769, respectively, or a homolog or a fragment thereof, is increased or generated, or if the activity restriction alleviation protein is increased or generated in a non-human organism, like a microorganism or a plant cell, plant or part thereof, especially with non-targeted localization, whereby the respective line discloses in column 7 glycine. For example, an increase of the glycine of at least 1 percent, particularly in a range of 47 to 134-percent is conferred as compared to a corresponding non-transformed wild type non-human organism.

[22533] Accordingly, in one embodiment, an increase of 5-oxoproline in a non-human organism, as compared to a corresponding non-transformed wild type non-human organism, is conferred in the process of the invention, if the activity of a polypeptide showing the activity of a lipoprotein precursor, or if the activity of the polypeptide B1431, preferably represented by SEQ ID NO. 38267, or a homolog or fragment thereof, or if the activity of a polypeptide encoded by a nucleic acid molecule comprising the nucleic acid SEQ ID NO. 38266, preferably the coding region thereof, or a homolog or fragment thereof, e.g. derived from Escherichia coli, is increased or generated. For example the activity of a nucleic acid molecule or a polypeptide comprising the nucleic acid, preferably the coding region thereof, or polypeptide or the consensus sequence or the polypeptide motif, as depicted in Table I, II or IV, application No. 3, column 5 or 8 in the respective same line as the nucleic acid molecule SEQ ID NO. 38266 or polypeptide SEQ ID NO. 38267, respectively, or a homolog or a fragment thereof, is increased or generated, or if the activity lipoprotein precursor is increased or generated in a non-human organism, like a microorganism or a plant cell, plant or part thereof, especially with plastidic localization, whereby the respective line discloses in column 7 5-oxoproline. For example, an increase of the 5-oxoproline of at least 1 percent, particularly in a range of 37 to 46-percent is conferred as compared to a corresponding non-transformed wild type non-human organism.

[22534] Accordingly, in one embodiment, an increase of alanine in a non-human organism, as compared to a corresponding non-transformed wild type non-human organism, is conferred in the process of the invention, if the activity of a polypeptide showing the activity of a b1445-protein, or if the activity of the polypeptide B1445, preferably represented by SEQ ID NO. 38290, or a homolog or fragment thereof, or if the activity of a polypeptide encoded by a nucleic acid molecule comprising the nucleic acid SEQ ID NO. 38289, preferably the coding region thereof, or a homolog or fragment thereof, e.g. derived from Escherichia coli, is increased or generated. For example the activity of a nucleic acid molecule or a polypeptide comprising the nucleic acid, preferably the coding region thereof, or polypeptide or the consensus sequence or the polypeptide motif, as depicted in Table I, II or IV, application No. 3, column 5 or 8 in the respective same line as the nucleic acid molecule SEQ ID NO. 38289 or polypeptide SEQ ID NO. 38290, respectively, or a homolog or a fragment thereof, is increased or generated, or if the activity b1445-protein is increased or generated in a non-human organism, like a microorganism or a plant cell, plant or part thereof, especially with non-targeted localization, whereby the respective line discloses in column 7 alanine. For example, an increase of the alanine of at least 1 percent, particularly in a range of 19 to 46-percent is conferred as compared to a corresponding non-transformed wild type non-human organism.

[22535] Accordingly, in one embodiment, an increase of citrulline in a non-human organism, as compared to a corresponding non-transformed wild type non-human organism, is conferred in the process of the invention, if the activity of a polypeptide showing the activity of a b1445-protein, or if the activity of the polypeptide B1445, preferably represented by SEQ ID NO. 38290, or a homolog or fragment thereof, or if the activity of a polypeptide encoded by a nucleic acid molecule comprising the nucleic acid SEQ ID NO. 38289, preferably the coding region thereof, or a homolog or fragment thereof, e.g. derived from Escherichia coli, is increased or generated. For example the activity of a nucleic acid molecule or a polypeptide comprising the nucleic acid, preferably the coding region thereof, or polypeptide or the consensus sequence or the polypeptide motif, as depicted in Table I, II or IV, application No. 3, column 5 or 8 in the respective same line as the nucleic acid molecule SEQ ID NO. 38289 or polypeptide SEQ ID NO. 38290, respectively, or a homolog or a fragment thereof, is increased or generated, or if the activity b1445-protein is increased or generated in a non-human organism, like a microorganism or a plant cell, plant or part thereof, especially with non-targeted localization, whereby the respective line discloses in column 7 citrulline. For example, an increase of the citrulline of at least 1 percent, particularly in a range of 32 to 96-percent is conferred as compared to a corresponding non-transformed wild type non-human organism.

[22536] Accordingly, in one embodiment, an increase of glycine in a non-human organism, as compared to a corresponding non-transformed wild type non-human organism, is conferred in the process of the invention, if the activity of a polypeptide showing the activity of a b1445-protein, or if the activity of the polypeptide B1445, preferably represented by SEQ ID NO. 38290, or a homolog or fragment thereof, or if the activity of a polypeptide encoded by a nucleic acid molecule comprising the nucleic acid SEQ ID NO. 38289, preferably the coding region thereof, or a homolog or fragment thereof, e.g. derived from Escherichia coli, is increased or generated. For example the activity of a nucleic acid molecule or a polypeptide comprising the nucleic acid, preferably the coding region thereof, or polypeptide or the consensus sequence or the polypeptide motif, as depicted in Table I, II or IV, application No. 3, column 5 or 8 in the respective same line as the nucleic acid molecule SEQ ID NO. 38289 or polypeptide SEQ ID NO. 38290, respectively, or a homolog or a fragment thereof, is increased or generated, or if the activity b1445-protein is increased or generated in a non-human organism, like a microorganism or a plant cell, plant or part thereof, especially with non-targeted localization, whereby the respective line discloses in column 7 glycine. For example, an increase of the glycine of at least 1 percent, particularly in a range of 37 to 82-percent is conferred as compared to a corresponding non-transformed wild type non-human organism.

[22537] Accordingly, in one embodiment, an increase of phenylalanine in a non-human organism, as compared to a corresponding non-transformed wild type non-human organism, is conferred in the process of the invention, if the activity of a polypeptide showing the activity of a b1445-protein, or if the activity of the polypeptide B1445, preferably represented by SEQ ID NO. 38290, or a homolog or fragment thereof, or if the activity of a polypeptide encoded by a nucleic acid molecule comprising the nucleic acid SEQ ID NO. 38289, preferably the coding region thereof, or a homolog or fragment thereof, e.g. derived from Escherichia coli, is increased or generated. For example the activity of a nucleic acid molecule or a polypeptide comprising the nucleic acid, preferably the coding region thereof, or polypeptide or the consensus sequence or the polypeptide motif, as depicted in Table I, II or IV, application No. 3, column 5 or 8 in the respective same line as the nucleic acid molecule SEQ ID NO. 38289 or polypeptide SEQ ID NO. 38290, respectively, or a homolog or a fragment thereof, is increased or generated, or if the activity b1445-protein is increased or generated in a non-human organism, like a microorganism or a plant cell, plant or part thereof, especially with non-targeted localization, whereby the respective line discloses in column 7 phenylalanine. For example, an increase of the phenylalanine of at least 1 percent, particularly in a range of 34 to 58-percent is conferred as compared to a corresponding non-transformed wild type non-human organism.

[22538] Accordingly, in one embodiment, an increase of serine in a non-human organism, as compared to a corresponding non-transformed wild type non-human organism, is conferred in the process of the invention, if the activity of a polypeptide showing the activity of a b1445-protein, or if the activity of the polypeptide B1445, preferably represented by SEQ ID NO. 38290, or a homolog or fragment thereof, or if the activity of a polypeptide encoded by a nucleic acid molecule comprising the nucleic acid SEQ ID NO. 38289, preferably the coding region thereof, or a homolog or fragment thereof, e.g. derived from Escherichia coli, is increased or generated. For example the activity of a nucleic acid molecule or a polypeptide comprising the nucleic acid, preferably the coding region thereof, or polypeptide or the consensus sequence or the polypeptide motif, as depicted in Table I, II or IV, application No. 3, column 5 or 8 in the respective same line as the nucleic acid molecule SEQ ID NO. 38289 or polypeptide SEQ ID NO. 38290, respectively, or a homolog or a fragment thereof, is increased or generated, or if the activity b1445-protein is increased or generated in a non-human organism, like a microorganism or a plant cell, plant or part thereof, especially with non-targeted localization, whereby the respective line discloses in column 7 serine. For example, an increase of the serine of at least 1 percent, particularly in a range of 37 to 78-percent is conferred as compared to a corresponding non-transformed wild type non-human organism.

[22539] Accordingly, in one embodiment, an increase of alanine in a non-human organism, as compared to a corresponding non-transformed wild type non-human organism, is conferred in the process of the invention, if the activity of a polypeptide showing the activity of a NADP-dependent malic enzyme, or if the activity of the polypeptide B1479, preferably represented by SEQ ID NO. 77775, or a homolog or fragment thereof, or if the activity of a polypeptide encoded by a nucleic acid molecule comprising the nucleic acid SEQ ID NO. 77774, preferably the coding region thereof, or a homolog or fragment thereof, e.g. derived from Escherichia coli, is increased or generated. For example the activity of a nucleic acid molecule or a polypeptide comprising the nucleic acid, preferably the coding region thereof, or polypeptide or the consensus sequence or the polypeptide motif, as depicted in Table I, II or IV, application No. 3, column 5 or 8 in the respective same line as the nucleic acid molecule SEQ ID NO. 77774 or polypeptide SEQ ID NO. 77775, respectively, or a homolog or a fragment thereof, is increased or generated, or if the activity NADP-dependent malic enzyme is increased or generated in a non-human organism, like a microorganism or a plant cell, plant or part thereof, especially with non-targeted localization, whereby the respective line discloses in column 7 alanine. For example, an increase of the alanine of at least 1 percent, particularly in a range of 27 to 184-percent is conferred as compared to a corresponding non-transformed wild type non-human organism.

[22540] Accordingly, in one embodiment, an increase of glycine in a non-human organism, as compared to a corresponding non-transformed wild type non-human organism, is conferred in the process of the invention, if the activity of a polypeptide showing the activity of a NADP-dependent malic enzyme, or if the activity of the polypeptide B1479, preferably represented by SEQ ID NO. 77775, or a homolog or fragment thereof, or if the activity of a polypeptide encoded by a nucleic acid molecule comprising the nucleic acid SEQ ID NO. 77774, preferably the coding region thereof, or a homolog or fragment thereof, e.g. derived from Escherichia coli, is increased or generated. For example the activity of a nucleic acid molecule or a polypeptide comprising the nucleic acid, preferably the coding region thereof, or polypeptide or the consensus sequence or the polypeptide motif, as depicted in Table I, II or IV, application No. 3, column 5 or 8 in the respective same line as the nucleic acid molecule SEQ ID NO. 77774 or polypeptide SEQ ID NO. 77775, respectively, or a homolog or a fragment thereof, is increased or generated, or if the activity NADP-dependent malic enzyme is increased or generated in a non-human organism, like a microorganism or a plant cell, plant or part thereof, especially with non-targeted localization, whereby the respective line discloses in column 7 glycine. For example, an increase of the glycine of at least 1 percent, particularly in a range of 45 to 211-percent is conferred as compared to a corresponding non-transformed wild type non-human organism.

[22541] Accordingly, in one embodiment, an increase of phenylalanine in a non-human organism, as compared to a corresponding non-transformed wild type non-human organism, is conferred in the process of the invention, if the activity of a polypeptide showing the activity of a NADP-dependent malic enzyme, or if the activity of the polypeptide B1479, preferably represented by SEQ ID NO. 77775, or a homolog or fragment thereof, or if the activity of a polypeptide encoded by a nucleic acid molecule comprising the nucleic acid SEQ ID NO. 77774, preferably the coding region thereof, or a homolog or fragment thereof, e.g. derived from Escherichia coli, is increased or generated. For example the activity of a nucleic acid molecule or a polypeptide comprising the nucleic acid, preferably the coding region thereof, or polypeptide or the consensus sequence or the polypeptide motif, as depicted in Table I, II or IV, application No. 3, column 5 or 8 in the respective same line as the nucleic acid molecule SEQ ID NO. 77774 or polypeptide SEQ ID NO. 77775, respectively, or a homolog or a fragment thereof, is increased or generated, or if the activity NADP-dependent malic enzyme is increased or generated in a non-human organism, like a microorganism or a plant cell, plant or part thereof, especially with non-targeted localization, whereby the respective line discloses in column 7 phenylalanine. For example, an increase of the phenylalanine of at least 1 percent, particularly in a range of 35 to 155-percent is conferred as compared to a corresponding non-transformed wild type non-human organism.

[22542] Accordingly, in one embodiment, an increase of serine in a non-human organism, as compared to a corresponding non-transformed wild type non-human organism, is conferred in the process of the invention, if the activity of a polypeptide showing the activity of a NADP-dependent malic enzyme, or if the activity of the polypeptide B1479, preferably represented by SEQ ID NO. 77775, or a homolog or fragment thereof, or if the activity of a polypeptide encoded by a nucleic acid molecule comprising the nucleic acid SEQ ID NO. 77774, preferably the coding region thereof, or a homolog or fragment thereof, e.g. derived from Escherichia coli, is increased or generated. For example the activity of a nucleic acid molecule or a polypeptide comprising the nucleic acid, preferably the coding region thereof, or polypeptide or the consensus sequence or the polypeptide motif, as depicted in Table I, II or IV, application No. 3, column 5 or 8 in the respective same line as the nucleic acid molecule SEQ ID NO. 77774 or polypeptide SEQ ID NO. 77775, respectively, or a homolog or a fragment thereof, is increased or generated, or if the activity NADP-dependent malic enzyme is increased or generated in a non-human organism, like a microorganism or a plant cell, plant or part thereof, especially with non-targeted localization, whereby the respective line discloses in column 7 serine. For example, an increase of the serine of at least 1 percent, particularly in a range of 29 to 287-percent is conferred as compared to a corresponding non-transformed wild type non-human organism.

[22543] Accordingly, in one embodiment, an increase of tyrosine in a non-human organism, as compared to a corresponding non-transformed wild type non-human organism, is conferred in the process of the invention, if the activity of a polypeptide showing the activity of a NADP-dependent malic enzyme, or if the activity of the polypeptide B1479, preferably represented by SEQ ID NO. 77775, or a homolog or fragment thereof, or if the activity of a polypeptide encoded by a nucleic acid molecule comprising the nucleic acid SEQ ID NO. 77774, preferably the coding region thereof, or a homolog or fragment thereof, e.g. derived from Escherichia coli, is increased or generated. For example the activity of a nucleic acid molecule or a polypeptide comprising the nucleic acid, preferably the coding region thereof, or polypeptide or the consensus sequence or the polypeptide motif, as depicted in Table I, II or IV, application No. 3, column 5 or 8 in the respective same line as the nucleic acid molecule SEQ ID NO. 77774 or polypeptide SEQ ID NO. 77775, respectively, or a homolog or a fragment thereof, is increased or generated, or if the activity NADP-dependent malic enzyme is increased or generated in a non-human organism, like a microorganism or a plant cell, plant or part thereof, especially with non-targeted localization, whereby the respective line discloses in column 7 tyrosine. For example, an increase of the tyrosine of at least 1 percent, particularly in a range of 32 to 107-percent is conferred as compared to a corresponding non-transformed wild type non-human organism.

[22544] Accordingly, in one embodiment, an increase of asparagine in a non-human organism, as compared to a corresponding non-transformed wild type non-human organism, is conferred in the process of the invention, if the activity of a polypeptide showing the activity of a b1522-protein, or if the activity of the polypeptide B1522, preferably represented by SEQ ID NO. 7948, or a homolog or fragment thereof, or if the activity of a polypeptide encoded by a nucleic acid molecule comprising the nucleic acid SEQ ID NO. 7947, preferably the coding region thereof, or a homolog or fragment thereof, e.g. derived from Escherichia coli, is increased or generated. For example the activity of a nucleic acid molecule or a polypeptide comprising the nucleic acid, preferably the coding region thereof, or polypeptide or the consensus sequence or the polypeptide motif, as depicted in Table I, II or IV, application No. 3, column 5 or 8 in the respective same line as the nucleic acid molecule SEQ ID NO. 7947 or polypeptide SEQ ID NO. 7948, respectively, or a homolog or a fragment thereof, is increased or generated, or if the activity b1522-protein is increased or generated in a non-human organism, like a microorganism or a plant cell, plant or part thereof, especially with non-targeted localization, whereby the respective line discloses in column 7 asparagine. For example, an increase of the asparagine of at least 1 percent, particularly in a range of 42 to 1317-percent is conferred as compared to a corresponding non-transformed wild type non-human organism.

[22545] Accordingly, in one embodiment, an increase of aspartate in a non-human organism, as compared to a corresponding non-transformed wild type non-human organism, is conferred in the process of the invention, if the activity of a polypeptide showing the activity of a b1522-protein, or if the activity of the polypeptide B1522, preferably represented by SEQ ID NO. 7948, or a homolog or fragment thereof, or if the activity of a polypeptide encoded by a nucleic acid molecule comprising the nucleic acid SEQ ID NO. 7947, preferably the coding region thereof, or a homolog or fragment thereof, e.g. derived from Escherichia coli, is increased or generated. For example the activity of a nucleic acid molecule or a polypeptide comprising the nucleic acid, preferably the coding region thereof, or polypeptide or the consensus sequence or the polypeptide motif, as depicted in Table I, II or IV, application No. 3, column 5 or 8 in the respective same line as the nucleic acid molecule SEQ ID NO. 7947 or polypeptide SEQ ID NO. 7948, respectively, or a homolog or a fragment thereof, is increased or generated, or if the activity b1522-protein is increased or generated in a non-human organism, like a microorganism or a plant cell, plant or part thereof, especially with non-targeted localization, whereby the respective line discloses in column 7 aspartate. For example, an increase of the aspartate of at least 1 percent, particularly in a range of 66 to 168-percent is conferred as compared to a corresponding non-transformed wild type non-human organism.

[22546] Accordingly, in one embodiment, an increase of phenylalanine in a non-human organism, as compared to a corresponding non-transformed wild type non-human organism, is conferred in the process of the invention, if the activity of a polypeptide showing the activity of a b1522-protein, or if the activity of the polypeptide B1522, preferably represented by SEQ ID NO. 7948, or a homolog or fragment thereof, or if the activity of a polypeptide encoded by a nucleic acid molecule comprising the nucleic acid SEQ ID NO. 7947, preferably the coding region thereof, or a homolog or fragment thereof, e.g. derived from Escherichia coli, is increased or generated. For example the activity of a nucleic acid molecule or a polypeptide comprising the nucleic acid, preferably the coding region thereof, or polypeptide or the consensus sequence or the polypeptide motif, as depicted in Table I, II or IV, application No. 3, column 5 or 8 in the respective same line as the nucleic acid molecule SEQ ID NO. 7947 or polypeptide SEQ ID NO. 7948, respectively, or a homolog or a fragment thereof, is increased or generated, or if the activity b1522-protein is increased or generated in a non-human organism, like a microorganism or a plant cell, plant or part thereof, especially with non-targeted localization, whereby the respective line discloses in column 7 phenylalanine. For example, an increase of the phenylalanine of at least 1 percent, particularly in a range of 34 to 1168-percent is conferred as compared to a corresponding non-transformed wild type non-human organism.

[22547] Accordingly, in one embodiment, an increase of serine in a non-human organism, as compared to a corresponding non-transformed wild type non-human organism, is conferred in the process of the invention, if the activity of a polypeptide showing the activity of a b1522-protein, or if the activity of the polypeptide B1522, preferably represented by SEQ ID NO. 7948, or a homolog or fragment thereof, or if the activity of a polypeptide encoded by a nucleic acid molecule comprising the nucleic acid SEQ ID NO. 7947, preferably the coding region thereof, or a homolog or fragment thereof, e.g. derived from Escherichia coli, is increased or generated. For example the activity of a nucleic acid molecule or a polypeptide comprising the nucleic acid, preferably the coding region thereof, or polypeptide or the consensus sequence or the polypeptide motif, as depicted in Table I, II or IV, application No. 3, column 5 or 8 in the respective same line as the nucleic acid molecule SEQ ID NO. 7947 or polypeptide SEQ ID NO. 7948, respectively, or a homolog or a fragment thereof, is increased or generated, or if the activity b1522-protein is increased or generated in a non-human organism, like a microorganism or a plant cell, plant or part thereof, especially with non-targeted localization, whereby the respective line discloses in column 7 serine. For example, an increase of the serine of at least 1 percent, particularly in a range of 23 to 109-percent is conferred as compared to a corresponding non-transformed wild type non-human organism.

[22548] Accordingly, in one embodiment, an increase of tyrosine in a non-human organism, as compared to a corresponding non-transformed wild type non-human organism, is conferred in the process of the invention, if the activity of a polypeptide showing the activity of a b1522-protein, or if the activity of the polypeptide B1522, preferably represented by SEQ ID NO. 7948, or a homolog or fragment thereof, or if the activity of a polypeptide encoded by a nucleic acid molecule comprising the nucleic acid SEQ ID NO. 7947, preferably the coding region thereof, or a homolog or fragment thereof, e.g. derived from Escherichia coli, is increased or generated. For example the activity of a nucleic acid molecule or a polypeptide comprising the nucleic acid, preferably the coding region thereof, or polypeptide or the consensus sequence or the polypeptide motif, as depicted in Table I, II or IV, application No. 3, column 5 or 8 in the respective same line as the nucleic acid molecule SEQ ID NO. 7947 or polypeptide SEQ ID NO. 7948, respectively, or a homolog or a fragment thereof, is increased or generated, or if the activity b1522-protein is increased or generated in a non-human organism, like a microorganism or a plant cell, plant or part thereof, especially with non-targeted localization, whereby the respective line discloses in column 7 tyrosine. For example, an increase of the tyrosine of at least 1 percent, particularly in a range of 38 to 627-percent is conferred as compared to a corresponding non-transformed wild type non-human organism.

[22549] Accordingly, in one embodiment, an increase of 5-oxoproline in a non-human organism, as compared to a corresponding non-transformed wild type non-human organism, is conferred in the process of the invention, if the activity of a polypeptide showing the activity of a b1522-protein, or if the activity of the polypeptide B1522, preferably represented by SEQ ID NO. 7948, or a homolog or fragment thereof, or if the activity of a polypeptide encoded by a nucleic acid molecule comprising the nucleic acid SEQ ID NO. 7947, preferably the coding region thereof, or a homolog or fragment thereof, e.g. derived from Escherichia coli, is increased or generated. For example the activity of a nucleic acid molecule or a polypeptide comprising the nucleic acid, preferably the coding region thereof, or polypeptide or the consensus sequence or the polypeptide motif, as depicted in Table I, II or IV, application No. 3, column 5 or 8 in the respective same line as the nucleic acid molecule SEQ ID NO. 7947 or polypeptide SEQ ID NO. 7948, respectively, or a homolog or a fragment thereof, is increased or generated, or if the activity b1522-protein is increased or generated in a non-human organism, like a microorganism or a plant cell, plant or part thereof, especially with non-targeted localization, whereby the respective line discloses in column 7 5-oxoproline. For example, an increase of the 5-oxoproline of at least 1 percent, particularly in a range of 47 to 133-percent is conferred as compared to a corresponding non-transformed wild type non-human organism.

[22550] Accordingly, in one embodiment, an increase of tyrosine in a non-human organism, as compared to a corresponding non-transformed wild type non-human organism, is conferred in the process of the invention, if the activity of a polypeptide showing the activity of a b1583-protein, or if the activity of the polypeptide B1583, preferably represented by SEQ ID NO. 78139, or a homolog or fragment thereof, or if the activity of a polypeptide encoded by a nucleic acid molecule comprising the nucleic acid SEQ ID NO. 78138, preferably the coding region thereof, or a homolog or fragment thereof, e.g. derived from Escherichia coli, is increased or generated. For example the activity of a nucleic acid molecule or a polypeptide comprising the nucleic acid, preferably the coding region thereof, or polypeptide or the consensus sequence or the polypeptide motif, as depicted in Table I, II or IV, application No. 3, column 5 or 8 in the respective same line as the nucleic acid molecule SEQ ID NO. 78138 or polypeptide SEQ ID NO. 78139, respectively, or a homolog or a fragment thereof, is increased or generated, or if the activity b1583-protein is increased or generated in a non-human organism, like a microorganism or a plant cell, plant or part thereof, especially with non-targeted localization, whereby the respective line discloses in column 7 tyrosine. For example, an increase of the tyrosine of at least 1 percent, particularly in a range of 51 to 184-percent is conferred as compared to a corresponding non-transformed wild type non-human organism.

[22551] Accordingly, in one embodiment, an increase of aspartate in a non-human organism, as compared to a corresponding non-transformed wild type non-human organism, is conferred in the process of the invention, if the activity of a polypeptide showing the activity of a Fe—S subunit of oxidoreductase, or if the activity of the polypeptide B1589, preferably represented by SEQ ID NO. 78155, or a homolog or fragment thereof, or if the activity of a polypeptide encoded by a nucleic acid molecule comprising the nucleic acid SEQ ID NO. 78154, preferably the coding region thereof, or a homolog or fragment thereof, e.g. derived from Escherichia coli, is increased or generated. For example the activity of a nucleic acid molecule or a polypeptide comprising the nucleic acid, preferably the coding region thereof, or polypeptide or the consensus sequence or the polypeptide motif, as depicted in Table I, II or IV, application No. 3, column 5 or 8 in the respective same line as the nucleic acid molecule SEQ ID NO. 78154 or polypeptide SEQ ID NO. 78155, respectively, or a homolog or a fragment thereof, is increased or generated, or if the activity Fe—S subunit of oxidoreductase is increased or generated in a non-human organism, like a microorganism or a plant cell, plant or part thereof, especially with non-targeted localization, whereby the respective line discloses in column 7 aspartate. For example, an increase of the aspartate of at least 1 percent, particularly in a range of 52 to 74-percent is conferred as compared to a corresponding non-transformed wild type non-human organism.

[22552] Accordingly, in one embodiment, an increase of phenylalanine in a non-human organism, as compared to a corresponding non-transformed wild type non-human organism, is conferred in the process of the invention, if the activity of a polypeptide showing the activity of a acid shock protein, or if the activity of the polypeptide B1597, preferably represented by SEQ ID NO. 38301, or a homolog or fragment thereof, or if the activity of a polypeptide encoded by a nucleic acid molecule comprising the nucleic acid SEQ ID NO. 38300, preferably the coding region thereof, or a homolog or fragment thereof, e.g. derived from Escherichia coli, is increased or generated. For example the activity of a nucleic acid molecule or a polypeptide comprising the nucleic acid, preferably the coding region thereof, or polypeptide or the consensus sequence or the polypeptide motif, as depicted in Table I, II or IV, application No. 3, column 5 or 8 in the respective same line as the nucleic acid molecule SEQ ID NO. 38300 or polypeptide SEQ ID NO. 38301, respectively, or a homolog or a fragment thereof, is increased or generated, or if the activity acid shock protein is increased or generated in a non-human organism, like a microorganism or a plant cell, plant or part thereof, especially with non-targeted localization, whereby the respective line discloses in column 7 phenylalanine. For example, an increase of the phenylalanine of at least 1 percent, particularly in a range of 65 to 190-percent is conferred as compared to a corresponding non-transformed wild type non-human organism.

[22553] Accordingly, in one embodiment, an increase of tyrosine in a non-human organism, as compared to a corresponding non-transformed wild type non-human organism, is conferred in the process of the invention, if the activity of a polypeptide showing the activity of a acid shock protein, or if the activity of the polypeptide B1597, preferably represented by SEQ ID NO. 38301, or a homolog or fragment thereof, or if the activity of a polypeptide encoded by a nucleic acid molecule comprising the nucleic acid SEQ ID NO. 38300, preferably the coding region thereof, or a homolog or fragment thereof, e.g. derived from Escherichia coli, is increased or generated. For example the activity of a nucleic acid molecule or a polypeptide comprising the nucleic acid, preferably the coding region thereof, or polypeptide or the consensus sequence or the polypeptide motif, as depicted in Table I, II or IV, application No. 3, column 5 or 8 in the respective same line as the nucleic acid molecule SEQ ID NO. 38300 or polypeptide SEQ ID NO. 38301, respectively, or a homolog or a fragment thereof, is increased or generated, or if the activity acid shock protein is increased or generated in a non-human organism, like a microorganism or a plant cell, plant or part thereof, especially with non-targeted localization, whereby the respective line discloses in column 7 tyrosine. For example, an increase of the tyrosine of at least 1 percent, particularly in a range of 64 to 143-percent is conferred as compared to a corresponding non-transformed wild type non-human organism.

[22554] Accordingly, in one embodiment, an increase of alanine in a non-human organism, as compared to a corresponding non-transformed wild type non-human organism, is conferred in the process of the invention, if the activity of a polypeptide showing the activity of a methylglyoxalase, or if the activity of the polypeptide B1651, preferably represented by SEQ ID NO. 78266, or a homolog or fragment thereof, or if the activity of a polypeptide encoded by a nucleic acid molecule comprising the nucleic acid SEQ ID NO. 78265, preferably the coding region thereof, or a homolog or fragment thereof, e.g. derived from Escherichia coli, is increased or generated. For example the activity of a nucleic acid molecule or a polypeptide comprising the nucleic acid, preferably the coding region thereof, or polypeptide or the consensus sequence or the polypeptide motif, as depicted in Table I, II or IV, application No. 3, column 5 or 8 in the respective same line as the nucleic acid molecule SEQ ID NO. 78265 or polypeptide SEQ ID NO. 78266, respectively, or a homolog or a fragment thereof, is increased or generated, or if the activity methylglyoxalase is increased or generated in a non-human organism, like a microorganism or a plant cell, plant or part thereof, especially with non-targeted localization, whereby the respective line discloses in column 7 alanine. For example, an increase of the alanine of at least 1 percent, particularly in a range of 19 to 39-percent is conferred as compared to a corresponding non-transformed wild type non-human organism.

[22555] Accordingly, in one embodiment, an increase of aspartate in a non-human organism, as compared to a corresponding non-transformed wild type non-human organism, is conferred in the process of the invention, if the activity of a polypeptide showing the activity of a b1670-protein, or if the activity of the polypeptide B1670, preferably represented by SEQ ID NO. 78754, or a homolog or fragment thereof, or if the activity of a polypeptide encoded by a nucleic acid molecule comprising the nucleic acid SEQ ID NO. 78753, preferably the coding region thereof, or a homolog or fragment thereof, e.g. derived from Escherichia coli, is increased or generated. For example the activity of a nucleic acid molecule or a polypeptide comprising the nucleic acid, preferably the coding region thereof, or polypeptide or the consensus sequence or the polypeptide motif, as depicted in Table I, II or IV, application No. 3, column 5 or 8 in the respective same line as the nucleic acid molecule SEQ ID NO. 78753 or polypeptide SEQ ID NO. 78754, respectively, or a homolog or a fragment thereof, is increased or generated, or if the activity b1670-protein is increased or generated in a non-human organism, like a microorganism or a plant cell, plant or part thereof, especially with non-targeted localization, whereby the respective line discloses in column 7 aspartate. For example, an increase of the aspartate of at least 1 percent, particularly in a range of 58 to 193-percent is conferred as compared to a corresponding non-transformed wild type non-human organism.

[22556] Accordingly, in one embodiment, an increase of aspartate in a non-human organism, as compared to a corresponding non-transformed wild type non-human organism, is conferred in the process of the invention, if the activity of a polypeptide showing the activity of a b1672-protein, or if the activity of the polypeptide B1672, preferably represented by SEQ ID NO. 78772, or a homolog or fragment thereof, or if the activity of a polypeptide encoded by a nucleic acid molecule comprising the nucleic acid SEQ ID NO. 78771, preferably the coding region thereof, or a homolog or fragment thereof, e.g. derived from Escherichia coli, is increased or generated. For example the activity of a nucleic acid molecule or a polypeptide comprising the nucleic acid, preferably the coding region thereof, or polypeptide or the consensus sequence or the polypeptide motif, as depicted in Table I, II or IV, application No. 3, column 5 or 8 in the respective same line as the nucleic acid molecule SEQ ID NO. 78771 or polypeptide SEQ ID NO. 78772, respectively, or a homolog or a fragment thereof, is increased or generated, or if the activity b1672-protein is increased or generated in a non-human organism, like a microorganism or a plant cell, plant or part thereof, especially with non-targeted localization, whereby the respective line discloses in column 7 aspartate. For example, an increase of the aspartate of at least 1 percent, particularly in a range of 59 to 111-percent is conferred as compared to a corresponding non-transformed wild type non-human organism.

[22557] Accordingly, in one embodiment, an increase of alanine in a non-human organism, as compared to a corresponding non-transformed wild type non-human organism, is conferred in the process of the invention, if the activity of a polypeptide showing the activity of a arginine N-succinyltransferase, or if the activity of the polypeptide B1747, preferably represented by SEQ ID NO. 78780, or a homolog or fragment thereof, or if the activity of a polypeptide encoded by a nucleic acid molecule comprising the nucleic acid SEQ ID NO. 78779, preferably the coding region thereof, or a homolog or fragment thereof, e.g. derived from Escherichia coli, is increased or generated. For example the activity of a nucleic acid molecule or a polypeptide comprising the nucleic acid, preferably the coding region thereof, or polypeptide or the consensus sequence or the polypeptide motif, as depicted in Table I, II or IV, application No. 3, column 5 or 8 in the respective same line as the nucleic acid molecule SEQ ID NO. 78779 or polypeptide SEQ ID NO. 78780, respectively, or a homolog or a fragment thereof, is increased or generated, or if the activity arginine N-succinyltransferase is increased or generated in a non-human organism, like a microorganism or a plant cell, plant or part thereof, especially with plastidic localization, whereby the respective line discloses in column 7 alanine. For example, an increase of the alanine of at least 1 percent, particularly in a range of 70 to 193-percent is conferred as compared to a corresponding non-transformed wild type non-human organism.

[22558] Accordingly, in one embodiment, an increase of aspartate in a non-human organism, as compared to a corresponding non-transformed wild type non-human organism, is conferred in the process of the invention, if the activity of a polypeptide showing the activity of a ABC transporter permease protein, or if the activity of the polypeptide B1755, preferably represented by SEQ ID NO. 78853, or a homolog or fragment thereof, or if the activity of a polypeptide encoded by a nucleic acid molecule comprising the nucleic acid SEQ ID NO. 78852, preferably the coding region thereof, or a homolog or fragment thereof, e.g. derived from Escherichia coli, is increased or generated. For example the activity of a nucleic acid molecule or a polypeptide comprising the nucleic acid, preferably the coding region thereof, or polypeptide or the consensus sequence or the polypeptide motif, as depicted in Table I, II or IV, application No. 3, column 5 or 8 in the respective same line as the nucleic acid molecule SEQ ID NO. 78852 or polypeptide SEQ ID NO. 78853, respectively, or a homolog or a fragment thereof, is increased or generated, or if the activity ABC transporter permease protein is increased or generated in a non-human organism, like a microorganism or a plant cell, plant or part thereof, especially with non-targeted localization, whereby the respective line discloses in column 7 aspartate. For example, an increase of the aspartate of at least 1 percent, particularly in a range of 52 to 103-percent is conferred as compared to a corresponding non-transformed wild type non-human organism.

[22559] Accordingly, in one embodiment, an increase of tyrosine in a non-human organism, as compared to a corresponding non-transformed wild type non-human organism, is conferred in the process of the invention, if the activity of a polypeptide showing the activity of a ABC transporter permease protein, or if the activity of the polypeptide B1755, preferably represented by SEQ ID NO. 78853, or a homolog or fragment thereof, or if the activity of a polypeptide encoded by a nucleic acid molecule comprising the nucleic acid SEQ ID NO. 78852, preferably the coding region thereof, or a homolog or fragment thereof, e.g. derived from Escherichia coli, is increased or generated. For example the activity of a nucleic acid molecule or a polypeptide comprising the nucleic acid, preferably the coding region thereof, or polypeptide or the consensus sequence or the polypeptide motif, as depicted in Table I, II or IV, application No. 3, column 5 or 8 in the respective same line as the nucleic acid molecule SEQ ID NO. 78852 or polypeptide SEQ ID NO. 78853, respectively, or a homolog or a fragment thereof, is increased or generated, or if the activity ABC transporter permease protein is increased or generated in a non-human organism, like a microorganism or a plant cell, plant or part thereof, especially with non-targeted localization, whereby the respective line discloses in column 7 tyrosine. For example, an increase of the tyrosine of at least 1 percent, particularly in a range of 51 to 120-percent is conferred as compared to a corresponding non-transformed wild type non-human organism.

[22560] Accordingly, in one embodiment, an increase of aspartate in a non-human organism, as compared to a corresponding non-transformed wild type non-human organism, is conferred in the process of the invention, if the activity of a polypeptide showing the activity of a transport protein, or if the activity of the polypeptide B1791, preferably represented by SEQ ID NO. 78884, or a homolog or fragment thereof, or if the activity of a polypeptide encoded by a nucleic acid molecule comprising the nucleic acid SEQ ID NO. 78883, preferably the coding region thereof, or a homolog or fragment thereof, e.g. derived from Escherichia coli, is increased or generated. For example the activity of a nucleic acid molecule or a polypeptide comprising the nucleic acid, preferably the coding region thereof, or polypeptide or the consensus sequence or the polypeptide motif, as depicted in Table I, II or IV, application No. 3, column 5 or 8 in the respective same line as the nucleic acid molecule SEQ ID NO. 78883 or polypeptide SEQ ID NO. 78884, respectively, or a homolog or a fragment thereof, is increased or generated, or if the activity transport protein is increased or generated in a non-human organism, like a microorganism or a plant cell, plant or part thereof, especially with non-targeted localization, whereby the respective line discloses in column 7 aspartate. For example, an increase of the aspartate of at least 1 percent, particularly in a range of 54 to 114-percent is conferred as compared to a corresponding non-transformed wild type non-human organism.

[22561] Accordingly, in one embodiment, an increase of aspartate in a non-human organism, as compared to a corresponding non-transformed wild type non-human organism, is conferred in the process of the invention, if the activity of a polypeptide showing the activity of a b1837-protein, or if the activity of the polypeptide B1837, preferably represented by SEQ ID NO. 78954, or a homolog or fragment thereof, or if the activity of a polypeptide encoded by a nucleic acid molecule comprising the nucleic acid SEQ ID NO. 78953, preferably the coding region thereof, or a homolog or fragment thereof, e.g. derived from Escherichia coli, is increased or generated. For example the activity of a nucleic acid molecule or a polypeptide comprising the nucleic acid, preferably the coding region thereof, or polypeptide or the consensus sequence or the polypeptide motif, as depicted in Table I, II or IV, application No. 3, column 5 or 8 in the respective same line as the nucleic acid molecule SEQ ID NO. 78953 or polypeptide SEQ ID NO. 78954, respectively, or a homolog or a fragment thereof, is increased or generated, or if the activity b1837-protein is increased or generated in a non-human organism, like a microorganism or a plant cell, plant or part thereof, especially with non-targeted localization, whereby the respective line discloses in column 7 aspartate. For example, an increase of the aspartate of at least 1 percent, particularly in a range of 51 to 69-percent is conferred as compared to a corresponding non-transformed wild type non-human organism.

[22562] Accordingly, in one embodiment, an increase of aspartate in a non-human organism, as compared to a corresponding non-transformed wild type non-human organism, is conferred in the process of the invention, if the activity of a polypeptide showing the activity of a serine/threonine-protein phosphatase, or if the activity of the polypeptide B1838, preferably represented by SEQ ID NO. 8317, or a homolog or fragment thereof, or if the activity of a polypeptide encoded by a nucleic acid molecule comprising the nucleic acid SEQ ID NO. 8316, preferably the coding region thereof, or a homolog or fragment thereof, e.g. derived from Escherichia coli, is increased or generated. For example the activity of a nucleic acid molecule or a polypeptide comprising the nucleic acid, preferably the coding region thereof, or polypeptide or the consensus sequence or the polypeptide motif, as depicted in Table I, II or IV, application No. 3, column 5 or 8 in the respective same line as the nucleic acid molecule SEQ ID NO. 8316 or polypeptide SEQ ID NO. 8317, respectively, or a homolog or a fragment thereof, is increased or generated, or if the activity serine/threonine-protein phosphatase is increased or generated in a non-human organism, like a microorganism or a plant cell, plant or part thereof, especially with non-targeted localization, whereby the respective line discloses in column 7 aspartate. For example, an increase of the aspartate of at least 1 percent, particularly in a range of 70 to 104-percent is conferred as compared to a corresponding non-transformed wild type non-human organism.

[22563] Accordingly, in one embodiment, an increase of aspartate in a non-human organism, as compared to a corresponding non-transformed wild type non-human organism, is conferred in the process of the invention, if the activity of a polypeptide showing the activity of a protease, or if the activity of the polypeptide B1845, preferably represented by SEQ ID NO. 38574, or a homolog or fragment thereof, or if the activity of a polypeptide encoded by a nucleic acid molecule comprising the nucleic acid SEQ ID NO. 38573, preferably the coding region thereof, or a homolog or fragment thereof, e.g. derived from Escherichia coli, is increased or generated. For example the activity of a nucleic acid molecule or a polypeptide comprising the nucleic acid, preferably the coding region thereof, or polypeptide or the consensus sequence or the polypeptide motif, as depicted in Table I, II or IV, application No. 3, column 5 or 8 in the respective same line as the nucleic acid molecule SEQ ID NO. 38573 or polypeptide SEQ ID NO. 38574, respectively, or a homolog or a fragment thereof, is increased or generated, or if the activity protease is increased or generated in a non-human organism, like a microorganism or a plant cell, plant or part thereof, especially with non-targeted localization, whereby the respective line discloses in column 7 aspartate. For example, an increase of the aspartate of at least 1 percent, particularly in a range of 57 to 199-percent is conferred as compared to a corresponding non-transformed wild type non-human organism.

[22564] Accordingly, in one embodiment, an increase of serine in a non-human organism, as compared to a corresponding non-transformed wild type non-human organism, is conferred in the process of the invention, if the activity of a polypeptide showing the activity of a protease, or if the activity of the polypeptide B1845, preferably represented by SEQ ID NO. 38574, or a homolog or fragment thereof, or if the activity of a polypeptide encoded by a nucleic acid molecule comprising the nucleic acid SEQ ID NO. 38573, preferably the coding region thereof, or a homolog or fragment thereof, e.g. derived from Escherichia coli, is increased or generated. For example the activity of a nucleic acid molecule or a polypeptide comprising the nucleic acid, preferably the coding region thereof, or polypeptide or the consensus sequence or the polypeptide motif, as depicted in Table I, II or IV, application No. 3, column 5 or 8 in the respective same line as the nucleic acid molecule SEQ ID NO. 38573 or polypeptide SEQ ID NO. 38574, respectively, or a homolog or a fragment thereof, is increased or generated, or if the activity protease is increased or generated in a non-human organism, like a microorganism or a plant cell, plant or part thereof, especially with non-targeted localization, whereby the respective line discloses in column 7 serine. For example, an increase of the serine of at least 1 percent, particularly in a range of 49 to 125-percent is conferred as compared to a corresponding non-transformed wild type non-human organism.

[22565] Accordingly, in one embodiment, an increase of asparagine in a non-human organism, as compared to a corresponding non-transformed wild type non-human organism, is conferred in the process of the invention, if the activity of a polypeptide showing the activity of a pyruvate kinase, or if the activity of the polypeptide B1854, preferably represented by SEQ ID NO. 8364, or a homolog or fragment thereof, or if the activity of a polypeptide encoded by a nucleic acid molecule comprising the nucleic acid SEQ ID NO. 8363, preferably the coding region thereof, or a homolog or fragment thereof, e.g. derived from Escherichia coli, is increased or generated. For example the activity of a nucleic acid molecule or a polypeptide comprising the nucleic acid, preferably the coding region thereof, or polypeptide or the consensus sequence or the polypeptide motif, as depicted in Table I, II or IV, application No. 3, column 5 or 8 in the respective same line as the nucleic acid molecule SEQ ID NO. 8363 or polypeptide SEQ ID NO. 8364, respectively, or a homolog or a fragment thereof, is increased or generated, or if the activity pyruvate kinase is increased or generated in a non-human organism, like a microorganism or a plant cell, plant or part thereof, especially with plastidic localization, whereby the respective line discloses in column 7 asparagine. For example, an increase of the asparagine of at least 1 percent, particularly in a range of 32 to 157-percent is conferred as compared to a corresponding non-transformed wild type non-human organism.

[22566] Accordingly, in one embodiment, an increase of tyrosine in a non-human organism, as compared to a corresponding non-transformed wild type non-human organism, is conferred in the process of the invention, if the activity of a polypeptide showing the activity of a cytochrome ctype protein, or if the activity of the polypeptide B1873, preferably represented by SEQ ID NO. 78971, or a homolog or fragment thereof, or if the activity of a polypeptide encoded by a nucleic acid molecule comprising the nucleic acid SEQ ID NO. 78970, preferably the coding region thereof, or a homolog or fragment thereof, e.g. derived from Escherichia coli, is increased or generated. For example the activity of a nucleic acid molecule or a polypeptide comprising the nucleic acid, preferably the coding region thereof, or polypeptide or the consensus sequence or the polypeptide motif, as depicted in Table I, II or IV, application No. 3, column 5 or 8 in the respective same line as the nucleic acid molecule SEQ ID NO. 78970 or polypeptide SEQ ID NO. 78971, respectively, or a homolog or a fragment thereof, is increased or generated, or if the activity cytochrome c-type protein is increased or generated in a non-human organism, like a microorganism or a plant cell, plant or part thereof, especially with non-targeted localization, whereby the respective line discloses in column 7 tyrosine. For example, an increase of the tyrosine of at least 1 percent, particularly in a range of 58 to 217-percent is conferred as compared to a corresponding non-transformed wild type non-human organism.

[22567] Accordingly, in one embodiment, an increase of phenylalanine in a non-human organism, as compared to a corresponding non-transformed wild type non-human organism, is conferred in the process of the invention, if the activity of a polypeptide showing the activity of a trehalosephosphatase, or if the activity of the polypeptide B1897, preferably represented by SEQ ID NO. 79057, or a homolog or fragment thereof, or if the activity of a polypeptide encoded by a nucleic acid molecule comprising the nucleic acid SEQ ID NO. 79056, preferably the coding region thereof, or a homolog or fragment thereof, e.g. derived from Escherichia coli, is increased or generated. For example the activity of a nucleic acid molecule or a polypeptide comprising the nucleic acid, preferably the coding region thereof, or polypeptide or the consensus sequence or the polypeptide motif, as depicted in Table I, II or IV, application No. 3, column 5 or 8 in the respective same line as the nucleic acid molecule SEQ ID NO. 79056 or polypeptide SEQ ID NO. 79057, respectively, or a homolog or a fragment thereof, is increased or generated, or if the activity trehalose-phosphatase is increased or generated in a non-human organism, like a microorganism or a plant cell, plant or part thereof, especially with non-targeted localization, whereby the respective line discloses in column 7 phenylalanine. For example, an increase of the phenylalanine of at least 1 percent, particularly in a range of 28 to 196-percent is conferred as compared to a corresponding non-transformed wild type non-human organism.

[22568] Accordingly, in one embodiment, an increase of tyrosine in a non-human organism, as compared to a corresponding non-transformed wild type non-human organism, is conferred in the process of the invention, if the activity of a polypeptide showing the activity of a trehalosephosphatase, or if the activity of the polypeptide B1897, preferably represented by SEQ ID NO. 79057, or a homolog or fragment thereof, or if the activity of a polypeptide encoded by a nucleic acid molecule comprising the nucleic acid SEQ ID NO. 79056, preferably the coding region thereof, or a homolog or fragment thereof, e.g. derived from Escherichia coli, is increased or generated. For example the activity of a nucleic acid molecule or a polypeptide comprising the nucleic acid, preferably the coding region thereof, or polypeptide or the consensus sequence or the polypeptide motif, as depicted in Table I, II or IV, application No. 3, column 5 or 8 in the respective same line as the nucleic acid molecule SEQ ID NO. 79056 or polypeptide SEQ ID NO. 79057, respectively, or a homolog or a fragment thereof, is increased or generated, or if the activity trehalose-phosphatase is increased or generated in a non-human organism, like a microorganism or a plant cell, plant or part thereof, especially with non-targeted localization, whereby the respective line discloses in column 7 tyrosine. For example, an increase of the tyrosine of at least 1 percent, particularly in a range of 36 to 211-percent is conferred as compared to a corresponding non-transformed wild type non-human organism.

[22569] Accordingly, in one embodiment, an increase of serine in a non-human organism, as compared to a corresponding non-transformed wild type non-human organism, is conferred in the process of the invention, if the activity of a polypeptide showing the activity of a b1898-protein, or if the activity of the polypeptide B1898, preferably represented by SEQ ID NO. 38768, or a homolog or fragment thereof, or if the activity of a polypeptide encoded by a nucleic acid molecule comprising the nucleic acid SEQ ID NO. 38767, preferably the coding region thereof, or a homolog or fragment thereof, e.g. derived from Escherichia coli, is increased or generated. For example the activity of a nucleic acid molecule or a polypeptide comprising the nucleic acid, preferably the coding region thereof, or polypeptide or the consensus sequence or the polypeptide motif, as depicted in Table I, II or IV, application No. 3, column 5 or 8 in the respective same line as the nucleic acid molecule SEQ ID NO. 38767 or polypeptide SEQ ID NO. 38768, respectively, or a homolog or a fragment thereof, is increased or generated, or if the activity b1898-protein is increased or generated in a non-human organism, like a microorganism or a plant cell, plant or part thereof, especially with non-targeted localization, whereby the respective line discloses in column 7 serine. For example, an increase of the serine of at least 1 percent, particularly in a range of 28 to 106-percent is conferred as compared to a corresponding non-transformed wild type non-human organism.

[22570] Accordingly, in one embodiment, an increase of serine in a non-human organism, as compared to a corresponding non-transformed wild type non-human organism, is conferred in the process of the invention, if the activity of a polypeptide showing the activity of a b1930-protein, or if the activity of the polypeptide B1930, preferably represented by SEQ ID NO. 79182, or a homolog or fragment thereof, or if the activity of a polypeptide encoded by a nucleic acid molecule comprising the nucleic acid SEQ ID NO. 79181, preferably the coding region thereof, or a homolog or fragment thereof, e.g. derived from Escherichia coli, is increased or generated. For example the activity of a nucleic acid molecule or a polypeptide comprising the nucleic acid, preferably the coding region thereof, or polypeptide or the consensus sequence or the polypeptide motif, as depicted in Table I, II or IV, application No. 3, column 5 or 8 in the respective same line as the nucleic acid molecule SEQ ID NO. 79181 or polypeptide SEQ ID NO. 79182, respectively, or a homolog or a fragment thereof, is increased or generated, or if the activity b1930-protein is increased or generated in a non-human organism, like a microorganism or a plant cell, plant or part thereof, especially with non-targeted localization, whereby the respective line discloses in column 7 serine. For example, an increase of the serine of at least 1 percent, particularly in a range of 42 to 113-percent is conferred as compared to a corresponding non-transformed wild type non-human organism.

[22571] Accordingly, in one embodiment, an increase of aspartate in a non-human organism, as compared to a corresponding non-transformed wild type non-human organism, is conferred in the process of the invention, if the activity of a polypeptide showing the activity of a transport protein, or if the activity of the polypeptide B1981, preferably represented by SEQ ID NO. 38900, or a homolog or fragment thereof, or if the activity of a polypeptide encoded by a nucleic acid molecule comprising the nucleic acid SEQ ID NO. 38899, preferably the coding region thereof, or a homolog or fragment thereof, e.g. derived from Escherichia coli, is increased or generated. For example the activity of a nucleic acid molecule or a polypeptide comprising the nucleic acid, preferably the coding region thereof, or polypeptide or the consensus sequence or the polypeptide motif, as depicted in Table I, II or IV, application No. 3, column 5 or 8 in the respective same line as the nucleic acid molecule SEQ ID NO. 38899 or polypeptide SEQ ID NO. 38900, respectively, or a homolog or a fragment thereof, is increased or generated, or if the activity transport protein is increased or generated in a non-human organism, like a microorganism or a plant cell, plant or part thereof, especially with non-targeted localization, whereby the respective line discloses in column 7 aspartate. For example, an increase of the aspartate of at least 1 percent, particularly in a range of 66 to 90-percent is conferred as compared to a corresponding non-transformed wild type non-human organism.

[22572] Accordingly, in one embodiment, an increase of tyrosine in a non-human organism, as compared to a corresponding non-transformed wild type non-human organism, is conferred in the process of the invention, if the activity of a polypeptide showing the activity of a O-antigen chain length determinant, or if the activity of the polypeptide B2027, preferably represented by SEQ ID NO. 79218, or a homolog or fragment thereof, or if the activity of a polypeptide encoded by a nucleic acid molecule comprising the nucleic acid SEQ ID NO. 79217, preferably the coding region thereof, or a homolog or fragment thereof, e.g. derived from Escherichia coli, is increased or generated. For example the activity of a nucleic acid molecule or a polypeptide comprising the nucleic acid, preferably the coding region thereof, or polypeptide or the consensus sequence or the polypeptide motif, as depicted in Table I, II or IV, application No. 3, column 5 or 8 in the respective same line as the nucleic acid molecule SEQ ID NO. 79217 or polypeptide SEQ ID NO. 79218, respectively, or a homolog or a fragment thereof, is increased or generated, or if the activity O-antigen chain length determinant is increased or generated in a non-human organism, like a microorganism or a plant cell, plant or part thereof, especially with non-targeted localization, whereby the respective line discloses in column 7 tyrosine. For example, an increase of the tyrosine of at least 1 percent, particularly in a range of 56 to 437-percent is conferred as compared to a corresponding non-transformed wild type non-human organism.

[22573] Accordingly, in one embodiment, an increase of aspartate in a non-human organism, as compared to a corresponding non-transformed wild type non-human organism, is conferred in the process of the invention, if the activity of a polypeptide showing the activity of a b2032-protein, or if the activity of the polypeptide B2032, preferably represented by SEQ ID NO. 8921, or a homolog or fragment thereof, or if the activity of a polypeptide encoded by a nucleic acid molecule comprising the nucleic acid SEQ ID NO. 8920, preferably the coding region thereof, or a homolog or fragment thereof, e.g. derived from Escherichia coli, is increased or generated. For example the activity of a nucleic acid molecule or a polypeptide comprising the nucleic acid, preferably the coding region thereof, or polypeptide or the consensus sequence or the polypeptide motif, as depicted in Table I, II or IV, application No. 3, column 5 or 8 in the respective same line as the nucleic acid molecule SEQ ID NO. 8920 or polypeptide SEQ ID NO. 8921, respectively, or a homolog or a fragment thereof, is increased or generated, or if the activity b2032-protein is increased or generated in a non-human organism, like a microorganism or a plant cell, plant or part thereof, especially with non-targeted localization, whereby the respective line discloses in column 7 aspartate. For example, an increase of the aspartate of at least 1 percent, particularly in a range of 64 to 210-percent is conferred as compared to a corresponding non-transformed wild type non-human organism.

[22574] Accordingly, in one embodiment, an increase of aspartate in a non-human organism, as compared to a corresponding non-transformed wild type non-human organism, is conferred in the process of the invention, if the activity of a polypeptide showing the activity of a transport protein, or if the activity of the polypeptide B2063, preferably represented by SEQ ID NO. 38948, or a homolog or fragment thereof, or if the activity of a polypeptide encoded by a nucleic acid molecule comprising the nucleic acid SEQ ID NO. 38947, preferably the coding region thereof, or a homolog or fragment thereof, e.g. derived from Escherichia coli, is increased or generated. For example the activity of a nucleic acid molecule or a polypeptide comprising the nucleic acid, preferably the coding region thereof, or polypeptide or the consensus sequence or the polypeptide motif, as depicted in Table I, II or IV, application No. 3, column 5 or 8 in the respective same line as the nucleic acid molecule SEQ ID NO. 38947 or polypeptide SEQ ID NO. 38948, respectively, or a homolog or a fragment thereof, is increased or generated, or if the activity transport protein is increased or generated in a non-human organism, like a microorganism or a plant cell, plant or part thereof, especially with non-targeted localization, whereby the respective line discloses in column 7 aspartate. For example, an increase of the aspartate of at least 1 percent, particularly in a range of 56 to 184-percent is conferred as compared to a corresponding non-transformed wild type non-human organism.

[22575] Accordingly, in one embodiment, an increase of phenylalanine in a non-human organism, as compared to a corresponding non-transformed wild type non-human organism, is conferred in the process of the invention, if the activity of a polypeptide showing the activity of a transport protein, or if the activity of the polypeptide B2063, preferably represented by SEQ ID NO. 38948, or a homolog or fragment thereof, or if the activity of a polypeptide encoded by a nucleic acid molecule comprising the nucleic acid SEQ ID NO. 38947, preferably the coding region thereof, or a homolog or fragment thereof, e.g. derived from Escherichia coli, is increased or generated. For example the activity of a nucleic acid molecule or a polypeptide comprising the nucleic acid, preferably the coding region thereof, or polypeptide or the consensus sequence or the polypeptide motif, as depicted in Table I, II or IV, application No. 3, column 5 or 8 in the respective same line as the nucleic acid molecule SEQ ID NO. 38947 or polypeptide SEQ ID NO. 38948, respectively, or a homolog or a fragment thereof, is increased or generated, or if the activity transport protein is increased or generated in a non-human organism, like a microorganism or a plant cell, plant or part thereof, especially with non-targeted localization, whereby the respective line discloses in column 7 phenylalanine. For example, an increase of the phenylalanine of at least 1 percent, particularly in a range of 32 to 1359-percent is conferred as compared to a corresponding non-transformed wild type non-human organism.

[22576] Accordingly, in one embodiment, an increase of serine in a non-human organism, as compared to a corresponding non-transformed wild type non-human organism, is conferred in the process of the invention, if the activity of a polypeptide showing the activity of a transport protein, or if the activity of the polypeptide B2063, preferably represented by SEQ ID NO. 38948, or a homolog or fragment thereof, or if the activity of a polypeptide encoded by a nucleic acid molecule comprising the nucleic acid SEQ ID NO. 38947, preferably the coding region thereof, or a homolog or fragment thereof, e.g. derived from Escherichia coli, is increased or generated. For example the activity of a nucleic acid molecule or a polypeptide comprising the nucleic acid, preferably the coding region thereof, or polypeptide or the consensus sequence or the polypeptide motif, as depicted in Table I, II or IV, application No. 3, column 5 or 8 in the respective same line as the nucleic acid molecule SEQ ID NO. 38947 or polypeptide SEQ ID NO. 38948, respectively, or a homolog or a fragment thereof, is increased or generated, or if the activity transport protein is increased or generated in a non-human organism, like a microorganism or a plant cell, plant or part thereof, especially with non-targeted localization, whereby the respective line discloses in column 7 serine. For example, an increase of the serine of at least 1 percent, particularly in a range of 27 to 129-percent is conferred as compared to a corresponding non-transformed wild type non-human organism.

[22577] Accordingly, in one embodiment, an increase of tyrosine in a non-human organism, as compared to a corresponding non-transformed wild type non-human organism, is conferred in the process of the invention, if the activity of a polypeptide showing the activity of a transport protein, or if the activity of the polypeptide B2063, preferably represented by SEQ ID NO. 38948, or a homolog or fragment thereof, or if the activity of a polypeptide encoded by a nucleic acid molecule comprising the nucleic acid SEQ ID NO. 38947, preferably the coding region thereof, or a homolog or fragment thereof, e.g. derived from Escherichia coli, is increased or generated. For example the activity of a nucleic acid molecule or a polypeptide comprising the nucleic acid, preferably the coding region thereof, or polypeptide or the consensus sequence or the polypeptide motif, as depicted in Table I, II or IV, application No. 3, column 5 or 8 in the respective same line as the nucleic acid molecule SEQ ID NO. 38947 or polypeptide SEQ ID NO. 38948, respectively, or a homolog or a fragment thereof, is increased or generated, or if the activity transport protein is increased or generated in a non-human organism, like a microorganism or a plant cell, plant or part thereof, especially with non-targeted localization, whereby the respective line discloses in column 7 tyrosine. For example, an increase of the tyrosine of at least 1 percent, particularly in a range of 36 to 750-percent is conferred as compared to a corresponding non-transformed wild type non-human organism.

[22578] Accordingly, in one embodiment, an increase of 5-oxoproline in a non-human organism, as compared to a corresponding non-transformed wild type non-human organism, is conferred in the process of the invention, if the activity of a polypeptide showing the activity of a uridine/cytidine kinase, or if the activity of the polypeptide B2066, preferably represented by SEQ ID NO. 8938, or a homolog or fragment thereof, or if the activity of a polypeptide encoded by a nucleic acid molecule comprising the nucleic acid SEQ ID NO. 8937, preferably the coding region thereof, or a homolog or fragment thereof, e.g. derived from Escherichia coli, is increased or generated. For example the activity of a nucleic acid molecule or a polypeptide comprising the nucleic acid, preferably the coding region thereof, or polypeptide or the consensus sequence or the polypeptide motif, as depicted in Table I, II or IV, application No. 3, column 5 or 8 in the respective same line as the nucleic acid molecule SEQ ID NO. 8937 or polypeptide SEQ ID NO. 8938, respectively, or a homolog or a fragment thereof, is increased or generated, or if the activity uridine/cytidine kinase is increased or generated in a non-human organism, like a microorganism or a plant cell, plant or part thereof, especially with mitochondrial localization, whereby the respective line discloses in column 7 5-oxoproline. For example, an increase of the 5-oxoproline of at least 1 percent, particularly in a range of 34 to 113-percent is conferred as compared to a corresponding non-transformed wild type non-human organism.

[22579] Accordingly, in one embodiment, an increase of aspartate in a non-human organism, as compared to a corresponding non-transformed wild type non-human organism, is conferred in the process of the invention, if the activity of a polypeptide showing the activity of a b2107-protein, or if the activity of the polypeptide B2107, preferably represented by SEQ ID NO. 39003, or a homolog or fragment thereof, or if the activity of a polypeptide encoded by a nucleic acid molecule comprising the nucleic acid SEQ ID NO. 39002, preferably the coding region thereof, or a homolog or fragment thereof, e.g. derived from Escherichia coli, is increased or generated. For example the activity of a nucleic acid molecule or a polypeptide comprising the nucleic acid, preferably the coding region thereof, or polypeptide or the consensus sequence or the polypeptide motif, as depicted in Table I, II or IV, application No. 3, column 5 or 8 in the respective same line as the nucleic acid molecule SEQ ID NO. 39002 or polypeptide SEQ ID NO. 39003, respectively, or a homolog or a fragment thereof, is increased or generated, or if the activity b2107-protein is increased or generated in a non-human organism, like a microorganism or a plant cell, plant or part thereof, especially with non-targeted localization, whereby the respective line discloses in column 7 aspartate. For example, an increase of the aspartate of at least 1 percent, particularly in a range of 64 to 278-percent is conferred as compared to a corresponding non-transformed wild type non-human organism.

[22580] Accordingly, in one embodiment, an increase of aspartate in a non-human organism, as compared to a corresponding non-transformed wild type non-human organism, is conferred in the process of the invention, if the activity of a polypeptide showing the activity of a ABC transporter permease protein, or if the activity of the polypeptide B2178, preferably represented by SEQ ID NO. 39041, or a homolog or fragment thereof, or if the activity of a polypeptide encoded by a nucleic acid molecule comprising the nucleic acid SEQ ID NO. 39040, preferably the coding region thereof, or a homolog or fragment thereof, e.g. derived from Escherichia coli, is increased or generated. For example the activity of a nucleic acid molecule or a polypeptide comprising the nucleic acid, preferably the coding region thereof, or polypeptide or the consensus sequence or the polypeptide motif, as depicted in Table I, II or IV, application No. 3, column 5 or 8 in the respective same line as the nucleic acid molecule SEQ ID NO. 39040 or polypeptide SEQ ID NO. 39041, respectively, or a homolog or a fragment thereof, is increased or generated, or if the activity ABC transporter permease protein is increased or generated in a non-human organism, like a microorganism or a plant cell, plant or part thereof, especially with non-targeted localization, whereby the respective line discloses in column 7 aspartate. For example, an increase of the aspartate of at least 1 percent, particularly in a range of 58 to 132-percent is conferred as compared to a corresponding non-transformed wild type non-human organism.

[22581] Accordingly, in one embodiment, an increase of citrulline in a non-human organism, as compared to a corresponding non-transformed wild type non-human organism, is conferred in the process of the invention, if the activity of a polypeptide showing the activity of a ABC transporter permease protein, or if the activity of the polypeptide B2178, preferably represented by SEQ ID NO. 39041, or a homolog or fragment thereof, or if the activity of a polypeptide encoded by a nucleic acid molecule comprising the nucleic acid SEQ ID NO. 39040, preferably the coding region thereof, or a homolog or fragment thereof, e.g. derived from Escherichia coli, is increased or generated. For example the activity of a nucleic acid molecule or a polypeptide comprising the nucleic acid, preferably the coding region thereof, or polypeptide or the consensus sequence or the polypeptide motif, as depicted in Table I, II or IV, application No. 3, column 5 or 8 in the respective same line as the nucleic acid molecule SEQ ID NO. 39040 or polypeptide SEQ ID NO. 39041, respectively, or a homolog or a fragment thereof, is increased or generated, or if the activity ABC transporter permease protein is increased or generated in a non-human organism, like a microorganism or a plant cell, plant or part thereof, especially with non-targeted localization, whereby the respective line discloses in column 7 citrulline. For example, an increase of the citrulline of at least 1 percent, particularly in a range of 43 to 94-percent is conferred as compared to a corresponding non-transformed wild type non-human organism.

[22582] Accordingly, in one embodiment, an increase of phenylalanine in a non-human organism, as compared to a corresponding non-transformed wild type non-human organism, is conferred in the process of the invention, if the activity of a polypeptide showing the activity of a ABC transporter permease protein, or if the activity of the polypeptide B2178, preferably represented by SEQ ID NO. 39041, or a homolog or fragment thereof, or if the activity of a polypeptide encoded by a nucleic acid molecule comprising the nucleic acid SEQ ID NO. 39040, preferably the coding region thereof, or a homolog or fragment thereof, e.g. derived from Escherichia coli, is increased or generated. For example the activity of a nucleic acid molecule or a polypeptide comprising the nucleic acid, preferably the coding region thereof, or polypeptide or the consensus sequence or the polypeptide motif, as depicted in Table I, II or IV, application No. 3, column 5 or 8 in the respective same line as the nucleic acid molecule SEQ ID NO. 39040 or polypeptide SEQ ID NO. 39041, respectively, or a homolog or a fragment thereof, is increased or generated, or if the activity ABC transporter permease protein is increased or generated in a non-human organism, like a microorganism or a plant cell, plant or part thereof, especially with non-targeted localization, whereby the respective line discloses in column 7 phenylalanine. For example, an increase of the phenylalanine of at least 1 percent, particularly in a range of 25 to 44-percent is conferred as compared to a corresponding non-transformed wild type non-human organism.

[22583] Accordingly, in one embodiment, an increase of serine in a non-human organism, as compared to a corresponding non-transformed wild type non-human organism, is conferred in the process of the invention, if the activity of a polypeptide showing the activity of a ABC transporter permease protein, or if the activity of the polypeptide B2178, preferably represented by SEQ ID NO. 39041, or a homolog or fragment thereof, or if the activity of a polypeptide encoded by a nucleic acid molecule comprising the nucleic acid SEQ ID NO. 39040, preferably the coding region thereof, or a homolog or fragment thereof, e.g. derived from Escherichia coli, is increased or generated. For example the activity of a nucleic acid molecule or a polypeptide comprising the nucleic acid, preferably the coding region thereof, or polypeptide or the consensus sequence or the polypeptide motif, as depicted in Table I, II or IV, application No. 3, column 5 or 8 in the respective same line as the nucleic acid molecule SEQ ID NO. 39040 or polypeptide SEQ ID NO. 39041, respectively, or a homolog or a fragment thereof, is increased or generated, or if the activity ABC transporter permease protein is increased or generated in a non-human organism, like a microorganism or a plant cell, plant or part thereof, especially with non-targeted localization, whereby the respective line discloses in column 7 serine. For example, an increase of the serine of at least 1 percent, particularly in a range of 26 to 64-percent is conferred as compared to a corresponding non-transformed wild type non-human organism.

[22584] Accordingly, in one embodiment, an increase of tyrosine in a non-human organism, as compared to a corresponding non-transformed wild type non-human organism, is conferred in the process of the invention, if the activity of a polypeptide showing the activity of a ABC transporter permease protein, or if the activity of the polypeptide B2178, preferably represented by SEQ ID NO. 39041, or a homolog or fragment thereof, or if the activity of a polypeptide encoded by a nucleic acid molecule comprising the nucleic acid SEQ ID NO. 39040, preferably the coding region thereof, or a homolog or fragment thereof, e.g. derived from Escherichia coli, is increased or generated. For example the activity of a nucleic acid molecule or a polypeptide comprising the nucleic acid, preferably the coding region thereof, or polypeptide or the consensus sequence or the polypeptide motif, as depicted in Table I, II or IV, application No. 3, column 5 or 8 in the respective same line as the nucleic acid molecule SEQ ID NO. 39040 or polypeptide SEQ ID NO. 39041, respectively, or a homolog or a fragment thereof, is increased or generated, or if the activity ABC transporter permease protein is increased or generated in a non-human organism, like a microorganism or a plant cell, plant or part thereof, especially with non-targeted localization, whereby the respective line discloses in column 7 tyrosine. For example, an increase of the tyrosine of at least 1 percent, particularly in a range of 38 to 39-percent is conferred as compared to a corresponding non-transformed wild type non-human organism.

[22585] Accordingly, in one embodiment, an increase of glycine in a non-human organism, as compared to a corresponding non-transformed wild type non-human organism, is conferred in the process of the invention, if the activity of a polypeptide showing the activity of a sn-glycerol-3-phosphate dehydrogenase, or if the activity of the polypeptide B2242, preferably represented by SEQ ID NO. 79280, or a homolog or fragment thereof, or if the activity of a polypeptide encoded by a nucleic acid molecule comprising the nucleic acid SEQ ID NO. 79279, preferably the coding region thereof, or a homolog or fragment thereof, e.g. derived from Escherichia coli, is increased or generated. For example the activity of a nucleic acid molecule or a polypeptide comprising the nucleic acid, preferably the coding region thereof, or polypeptide or the consensus sequence or the polypeptide motif, as depicted in Table I, II or IV, application No. 3, column 5 or 8 in the respective same line as the nucleic acid molecule SEQ ID NO. 79279 or polypeptide SEQ ID NO. 79280, respectively, or a homolog or a fragment thereof, is increased or generated, or if the activity sn-glycerol-3-phosphate dehydrogenase is increased or generated in a non-human organism, like a microorganism or a plant cell, plant or part thereof, especially with plastidic localization, whereby the respective line discloses in column 7 glycine. For example, an increase of the glycine of at least 1 percent, particularly in a range of 30 to 52-percent is conferred as compared to a corresponding non-transformed wild type non-human organism.

[22586] Accordingly, in one embodiment, an increase of asparagine in a non-human organism, as compared to a corresponding non-transformed wild type non-human organism, is conferred in the process of the invention, if the activity of a polypeptide showing the activity of a NADH dehydrogenase I chain I, or if the activity of the polypeptide B2281, preferably represented by SEQ ID NO. 39121, or a homolog or fragment thereof, or if the activity of a polypeptide encoded by a nucleic acid molecule comprising the nucleic acid SEQ ID NO. 39120, preferably the coding region thereof, or a homolog or fragment thereof, e.g. derived from Escherichia coli, is increased or generated. For example the activity of a nucleic acid molecule or a polypeptide comprising the nucleic acid, preferably the coding region thereof, or polypeptide or the consensus sequence or the polypeptide motif, as depicted in Table I, II or IV, application No. 3, column 5 or 8 in the respective same line as the nucleic acid molecule SEQ ID NO. 39120 or polypeptide SEQ ID NO. 39121, respectively, or a homolog or a fragment thereof, is increased or generated, or if the activity NADH dehydrogenase I chain I is increased or generated in a non-human organism, like a microorganism or a plant cell, plant or part thereof, especially with non-targeted localization, whereby the respective line discloses in column 7 asparagine. For example, an increase of the asparagine of at least 1 percent, particularly in a range of 34 to 63-percent is conferred as compared to a corresponding non-transformed wild type non-human organism.

[22587] Accordingly, in one embodiment, an increase of aspartate in a non-human organism, as compared to a corresponding non-transformed wild type non-human organism, is conferred in the process of the invention, if the activity of a polypeptide showing the activity of a b2360-protein, or if the activity of the polypeptide B2360, preferably represented by SEQ ID NO. 39220, or a homolog or fragment thereof, or if the activity of a polypeptide encoded by a nucleic acid molecule comprising the nucleic acid SEQ ID NO. 39219, preferably the coding region thereof, or a homolog or fragment thereof, e.g. derived from Escherichia coli, is increased or generated. For example the activity of a nucleic acid molecule or a polypeptide comprising the nucleic acid, preferably the coding region thereof, or polypeptide or the consensus sequence or the polypeptide motif, as depicted in Table I, II or IV, application No. 3, column 5 or 8 in the respective same line as the nucleic acid molecule SEQ ID NO. 39219 or polypeptide SEQ ID NO. 39220, respectively, or a homolog or a fragment thereof, is increased or generated, or if the activity b2360-protein is increased or generated in a non-human organism, like a microorganism or a plant cell, plant or part thereof, especially with non-targeted localization, whereby the respective line discloses in column 7 aspartate. For example, an increase of the aspartate of at least 1 percent, particularly in a range of 68 to 124-percent is conferred as compared to a corresponding non-transformed wild type non-human organism.

[22588] Accordingly, in one embodiment, an increase of serine in a non-human organism, as compared to a corresponding non-transformed wild type non-human organism, is conferred in the process of the invention, if the activity of a polypeptide showing the activity of a D-serine dehydratase, or if the activity of the polypeptide B2366, preferably represented by SEQ ID NO. 79343, or a homolog or fragment thereof, or if the activity of a polypeptide encoded by a nucleic acid molecule comprising the nucleic acid SEQ ID NO. 79342, preferably the coding region thereof, or a homolog or fragment thereof, e.g. derived from Escherichia coli, is increased or generated. For example the activity of a nucleic acid molecule or a polypeptide comprising the nucleic acid, preferably the coding region thereof, or polypeptide or the consensus sequence or the polypeptide motif, as depicted in Table I, II or IV, application No. 3, column 5 or 8 in the respective same line as the nucleic acid molecule SEQ ID NO. 79342 or polypeptide SEQ ID NO. 79343, respectively, or a homolog or a fragment thereof, is increased or generated, or if the activity D-serine dehydratase is increased or generated in a non-human organism, like a microorganism or a plant cell, plant or part thereof, especially with plastidic localization, whereby the respective line discloses in column 7 serine. For example, an increase of the serine of at least 1 percent, particularly in a range of 24 to 67-percent is conferred as compared to a corresponding non-transformed wild type non-human organism.

[22589] Accordingly, in one embodiment, an increase of tyrosine in a non-human organism, as compared to a corresponding non-transformed wild type non-human organism, is conferred in the process of the invention, if the activity of a polypeptide showing the activity of a b2399-protein, or if the activity of the polypeptide B2399, preferably represented by SEQ ID NO. 39238, or a homolog or fragment thereof, or if the activity of a polypeptide encoded by a nucleic acid molecule comprising the nucleic acid SEQ ID NO. 39237, preferably the coding region thereof, or a homolog or fragment thereof, e.g. derived from Escherichia coli, is increased or generated. For example the activity of a nucleic acid molecule or a polypeptide comprising the nucleic acid, preferably the coding region thereof, or polypeptide or the consensus sequence or the polypeptide motif, as depicted in Table I, II or IV, application No. 3, column 5 or 8 in the respective same line as the nucleic acid molecule SEQ ID NO. 39237 or polypeptide SEQ ID NO. 39238, respectively, or a homolog or a fragment thereof, is increased or generated, or if the activity b2399-protein is increased or generated in a non-human organism, like a microorganism or a plant cell, plant or part thereof, especially with non-targeted localization, whereby the respective line discloses in column 7 tyrosine. For example, an increase of the tyrosine of at least 1 percent, particularly in a range of 37 to 156-percent is conferred as compared to a corresponding non-transformed wild type non-human organism.

[22590] Accordingly, in one embodiment, an increase of 3,4-dihydroxyphenylalanine (dopa) in a non-human organism, as compared to a corresponding non-transformed wild type non-human organism, is conferred in the process of the invention, if the activity of a polypeptide showing the activity of a b2399-protein, or if the activity of the polypeptide B2399, preferably represented by SEQ ID NO. 39238, or a homolog or fragment thereof, or if the activity of a polypeptide encoded by a nucleic acid molecule comprising the nucleic acid SEQ ID NO. 39237, preferably the coding region thereof, or a homolog or fragment thereof, e.g. derived from Escherichia coli, is increased or generated. For example the activity of a nucleic acid molecule or a polypeptide comprising the nucleic acid, preferably the coding region thereof, or polypeptide or the consensus sequence or the polypeptide motif, as depicted in Table I, II or IV, application No. 3, column 5 or 8 in the respective same line as the nucleic acid molecule SEQ ID NO. 39237 or polypeptide SEQ ID NO. 39238, respectively, or a homolog or a fragment thereof, is increased or generated, or if the activity b2399-protein is increased or generated in a non-human organism, like a microorganism or a plant cell, plant or part thereof, especially with non-targeted localization, whereby the respective line discloses in column 7 3,4-dihydroxyphenylalanine (dopa). For example, an increase of the 3,4-dihydroxyphenylalanine (dopa) of at least 1 percent, particularly in a range of 44 to 168-percent is conferred as compared to a corresponding non-transformed wild type non-human organism.

[22591] Accordingly, in one embodiment, an increase of 5-oxoproline in a non-human organism, as compared to a corresponding non-transformed wild type non-human organism, is conferred in the process of the invention, if the activity of a polypeptide showing the activity of a b2399-protein, or if the activity of the polypeptide B2399, preferably represented by SEQ ID NO. 39238, or a homolog or fragment thereof, or if the activity of a polypeptide encoded by a nucleic acid molecule comprising the nucleic acid SEQ ID NO. 39237, preferably the coding region thereof, or a homolog or fragment thereof, e.g. derived from Escherichia coli, is increased or generated. For example the activity of a nucleic acid molecule or a polypeptide comprising the nucleic acid, preferably the coding region thereof, or polypeptide or the consensus sequence or the polypeptide motif, as depicted in Table I, II or IV, application No. 3, column 5 or 8 in the respective same line as the nucleic acid molecule SEQ ID NO. 39237 or polypeptide SEQ ID NO. 39238, respectively, or a homolog or a fragment thereof, is increased or generated, or if the activity b2399-protein is increased or generated in a non-human organism, like a microorganism or a plant cell, plant or part thereof, especially with non-targeted localization, whereby the respective line discloses in column 7 5-oxoproline. For example, an increase of the 5-oxoproline of at least 1 percent, particularly in a range of 48 to 144-percent is conferred as compared to a corresponding non-transformed wild type non-human organism.

[22592] Accordingly, in one embodiment, an increase of alanine in a non-human organism, as compared to a corresponding non-transformed wild type non-human organism, is conferred in the process of the invention, if the activity of a polypeptide showing the activity of a transcriptional regulator, or if the activity of the polypeptide B2405, preferably represented by SEQ ID NO. 39256, or a homolog or fragment thereof, or if the activity of a polypeptide encoded by a nucleic acid molecule comprising the nucleic acid SEQ ID NO. 39255, preferably the coding region thereof, or a homolog or fragment thereof, e.g. derived from Escherichia coli, is increased or generated. For example the activity of a nucleic acid molecule or a polypeptide comprising the nucleic acid, preferably the coding region thereof, or polypeptide or the consensus sequence or the polypeptide motif, as depicted in Table I, II or IV, application No. 3, column 5 or 8 in the respective same line as the nucleic acid molecule SEQ ID NO. 39255 or polypeptide SEQ ID NO. 39256, respectively, or a homolog or a fragment thereof, is increased or generated, or if the activity transcriptional regulator is increased or generated in a non-human organism, like a microorganism or a plant cell, plant or part thereof, especially with non-targeted localization, whereby the respective line discloses in column 7 alanine. For example, an increase of the alanine of at least 1 percent, particularly in a range of 28 to 51-percent is conferred as compared to a corresponding non-transformed wild type non-human organism.

[22593] Accordingly, in one embodiment, an increase of aspartate in a non-human organism, as compared to a corresponding non-transformed wild type non-human organism, is conferred in the process of the invention, if the activity of a polypeptide showing the activity of a transcriptional regulator, or if the activity of the polypeptide B2405, preferably represented by SEQ ID NO. 39256, or a homolog or fragment thereof, or if the activity of a polypeptide encoded by a nucleic acid molecule comprising the nucleic acid SEQ ID NO. 39255, preferably the coding region thereof, or a homolog or fragment thereof, e.g. derived from Escherichia coli, is increased or generated. For example the activity of a nucleic acid molecule or a polypeptide comprising the nucleic acid, preferably the coding region thereof, or polypeptide or the consensus sequence or the polypeptide motif, as depicted in Table I, II or IV, application No. 3, column 5 or 8 in the respective same line as the nucleic acid molecule SEQ ID NO. 39255 or polypeptide SEQ ID NO. 39256, respectively, or a homolog or a fragment thereof, is increased or generated, or if the activity transcriptional regulator is increased or generated in a non-human organism, like a microorganism or a plant cell, plant or part thereof, especially with non-targeted localization, whereby the respective line discloses in column 7 aspartate. For example, an increase of the aspartate of at least 1 percent, particularly in a range of 52 to 87-percent is conferred as compared to a corresponding non-transformed wild type non-human organism.

[22594] Accordingly, in one embodiment, an increase of phenylalanine in a non-human organism, as compared to a corresponding non-transformed wild type non-human organism, is conferred in the process of the invention, if the activity of a polypeptide showing the activity of a PTS system N-acetylmuramic acid-specific EIIBC component, or if the activity of the polypeptide B2429, preferably represented by SEQ ID NO. 79399, or a homolog or fragment thereof, or if the activity of a polypeptide encoded by a nucleic acid molecule comprising the nucleic acid SEQ ID NO. 79398, preferably the coding region thereof, or a homolog or fragment thereof, e.g. derived from Escherichia coli, is increased or generated. For example the activity of a nucleic acid molecule or a polypeptide comprising the nucleic acid, preferably the coding region thereof, or polypeptide or the consensus sequence or the polypeptide motif, as depicted in Table I, II or IV, application No. 3, column 5 or 8 in the respective same line as the nucleic acid molecule SEQ ID NO. 79398 or polypeptide SEQ ID NO. 79399, respectively, or a homolog or a fragment thereof, is increased or generated, or if the activity PTS system N-acetylmuramic acid-specific EIIBC component is increased or generated in a non-human organism, like a microorganism or a plant cell, plant or part thereof, especially with non-targeted localization, whereby the respective line discloses in column 7 phenylalanine. For example, an increase of the phenylalanine of at least 1 percent, particularly in a range of 37 to 52-percent is conferred as compared to a corresponding non-transformed wild type non-human organism.

[22595] Accordingly, in one embodiment, an increase of citrulline in a non-human organism, as compared to a corresponding non-transformed wild type non-human organism, is conferred in the process of the invention, if the activity of a polypeptide showing the activity of a b2474-protein, or if the activity of the polypeptide B2474, preferably represented by SEQ ID NO. 40330, or a homolog or fragment thereof, or if the activity of a polypeptide encoded by a nucleic acid molecule comprising the nucleic acid SEQ ID NO. 40329, preferably the coding region thereof, or a homolog or fragment thereof, e.g. derived from Escherichia coli, is increased or generated. For example the activity of a nucleic acid molecule or a polypeptide comprising the nucleic acid, preferably the coding region thereof, or polypeptide or the consensus sequence or the polypeptide motif, as depicted in Table I, II or IV, application No. 3, column 5 or 8 in the respective same line as the nucleic acid molecule SEQ ID NO. 40329 or polypeptide SEQ ID NO. 40330, respectively, or a homolog or a fragment thereof, is increased or generated, or if the activity b2474-protein is increased or generated in a non-human organism, like a microorganism or a plant cell, plant or part thereof, especially with non-targeted localization, whereby the respective line discloses in column 7 citrulline. For example, an increase of the citrulline of at least 1 percent, particularly in a range of 31 to 119-percent is conferred as compared to a corresponding non-transformed wild type non-human organism.

[22596] Accordingly, in one embodiment, an increase of glycine in a non-human organism, as compared to a corresponding non-transformed wild type non-human organism, is conferred in the process of the invention, if the activity of a polypeptide showing the activity of a b2474-protein, or if the activity of the polypeptide B2474, preferably represented by SEQ ID NO. 40330, or a homolog or fragment thereof, or if the activity of a polypeptide encoded by a nucleic acid molecule comprising the nucleic acid SEQ ID NO. 40329, preferably the coding region thereof, or a homolog or fragment thereof, e.g. derived from Escherichia coli, is increased or generated. For example the activity of a nucleic acid molecule or a polypeptide comprising the nucleic acid, preferably the coding region thereof, or polypeptide or the consensus sequence or the polypeptide motif, as depicted in Table I, II or IV, application No. 3, column 5 or 8 in the respective same line as the nucleic acid molecule SEQ ID NO. 40329 or polypeptide SEQ ID NO. 40330, respectively, or a homolog or a fragment thereof, is increased or generated, or if the activity b2474-protein is increased or generated in a non-human organism, like a microorganism or a plant cell, plant or part thereof, especially with non-targeted localization, whereby the respective line discloses in column 7 glycine. For example, an increase of the glycine of at least 1 percent, particularly in a range of 41 to 71-percent is conferred as compared to a corresponding non-transformed wild type non-human organism.

[22597] Accordingly, in one embodiment, an increase of serine in a non-human organism, as compared to a corresponding non-transformed wild type non-human organism, is conferred in the process of the invention, if the activity of a polypeptide showing the activity of a NADH dehydrogenase subunit N, or if the activity of the polypeptide B2482, preferably represented by SEQ ID NO. 79510, or a homolog or fragment thereof, or if the activity of a polypeptide encoded by a nucleic acid molecule comprising the nucleic acid SEQ ID NO. 79509, preferably the coding region thereof, or a homolog or fragment thereof, e.g. derived from Escherichia coli, is increased or generated. For example the activity of a nucleic acid molecule or a polypeptide comprising the nucleic acid, preferably the coding region thereof, or polypeptide or the consensus sequence or the polypeptide motif, as depicted in Table I, II or IV, application No. 3, column 5 or 8 in the respective same line as the nucleic acid molecule SEQ ID NO. 79509 or polypeptide SEQ ID NO. 79510, respectively, or a homolog or a fragment thereof, is increased or generated, or if the activity NADH dehydrogenase subunit N is increased or generated in a non-human organism, like a microorganism or a plant cell, plant or part thereof, especially with non-targeted localization, whereby the respective line discloses in column 7 serine. For example, an increase of the serine of at least 1 percent, particularly in a range of 24 to 62-percent is conferred as compared to a corresponding non-transformed wild type non-human organism.

[22598] Accordingly, in one embodiment, an increase of 5-oxoproline in a non-human organism, as compared to a corresponding non-transformed wild type non-human organism, is conferred in the process of the invention, if the activity of a polypeptide showing the activity of a NADH dehydrogenase subunit N, or if the activity of the polypeptide B2482, preferably represented by SEQ ID NO. 79510, or a homolog or fragment thereof, or if the activity of a polypeptide encoded by a nucleic acid molecule comprising the nucleic acid SEQ ID NO. 79509, preferably the coding region thereof, or a homolog or fragment thereof, e.g. derived from Escherichia coli, is increased or generated. For example the activity of a nucleic acid molecule or a polypeptide comprising the nucleic acid, preferably the coding region thereof, or polypeptide or the consensus sequence or the polypeptide motif, as depicted in Table I, II or IV, application No. 3, column 5 or 8 in the respective same line as the nucleic acid molecule SEQ ID NO. 79509 or polypeptide SEQ ID NO. 79510, respectively, or a homolog or a fragment thereof, is increased or generated, or if the activity NADH dehydrogenase subunit N is increased or generated in a non-human organism, like a microorganism or a plant cell, plant or part thereof, especially with non-targeted localization, whereby the respective line discloses in column 7 5-oxoproline. For example, an increase of the 5-oxoproline of at least 1 percent, particularly in a range of 40 to 97-percent is conferred as compared to a corresponding non-transformed wild type non-human organism.

[22599] Accordingly, in one embodiment, an increase of phenylalanine in a non-human organism, as compared to a corresponding non-transformed wild type non-human organism, is conferred in the process of the invention, if the activity of a polypeptide showing the activity of a b2513-protein, or if the activity of the polypeptide B2513, preferably represented by SEQ ID NO. 9168, or a homolog or fragment thereof, or if the activity of a polypeptide encoded by a nucleic acid molecule comprising the nucleic acid SEQ ID NO. 9167, preferably the coding region thereof, or a homolog or fragment thereof, e.g. derived from Escherichia coli, is increased or generated. For example the activity of a nucleic acid molecule or a polypeptide comprising the nucleic acid, preferably the coding region thereof, or polypeptide or the consensus sequence or the polypeptide motif, as depicted in Table I, II or IV, application No. 3, column 5 or 8 in the respective same line as the nucleic acid molecule SEQ ID NO. 9167 or polypeptide SEQ ID NO. 9168, respectively, or a homolog or a fragment thereof, is increased or generated, or if the activity b2513-protein is increased or generated in a non-human organism, like a microorganism or a plant cell, plant or part thereof, especially with non-targeted localization, whereby the respective line discloses in column 7 phenylalanine. For example, an increase of the phenylalanine of at least 1 percent, particularly in a range of 65 to 206-percent is conferred as compared to a corresponding non-transformed wild type non-human organism.

[22600] Accordingly, in one embodiment, an increase of tyrosine in a non-human organism, as compared to a corresponding non-transformed wild type non-human organism, is conferred in the process of the invention, if the activity of a polypeptide showing the activity of a b2513-protein, or if the activity of the polypeptide B2513, preferably represented by SEQ ID NO. 9168, or a homolog or fragment thereof, or if the activity of a polypeptide encoded by a nucleic acid molecule comprising the nucleic acid SEQ ID NO. 9167, preferably the coding region thereof, or a homolog or fragment thereof, e.g. derived from Escherichia coli, is increased or generated. For example the activity of a nucleic acid molecule or a polypeptide comprising the nucleic acid, preferably the coding region thereof, or polypeptide or the consensus sequence or the polypeptide motif, as depicted in Table I, II or IV, application No. 3, column 5 or 8 in the respective same line as the nucleic acid molecule SEQ ID NO. 9167 or polypeptide SEQ ID NO. 9168, respectively, or a homolog or a fragment thereof, is increased or generated, or if the activity b2513-protein is increased or generated in a non-human organism, like a microorganism or a plant cell, plant or part thereof, especially with non-targeted localization, whereby the respective line discloses in column 7 tyrosine. For example, an increase of the tyrosine of at least 1 percent, particularly in a range of 38 to 456-percent is conferred as compared to a corresponding non-transformed wild type non-human organism.

[22601] Accordingly, in one embodiment, an increase of serine in a non-human organism, as compared to a corresponding non-transformed wild type non-human organism, is conferred in the process of the invention, if the activity of a polypeptide showing the activity of a serine hydroxymethyltransferase, or if the activity of the polypeptide B2551, preferably represented by SEQ ID NO. 79628, or a homolog or fragment thereof, or if the activity of a polypeptide encoded by a nucleic acid molecule comprising the nucleic acid SEQ ID NO. 79627, preferably the coding region thereof, or a homolog or fragment thereof, e.g. derived from Escherichia coli, is increased or generated. For example the activity of a nucleic acid molecule or a polypeptide comprising the nucleic acid, preferably the coding region thereof, or polypeptide or the consensus sequence or the polypeptide motif, as depicted in Table I, II or IV, application No. 3, column 5 or 8 in the respective same line as the nucleic acid molecule SEQ ID NO. 79627 or polypeptide SEQ ID NO. 79628, respectively, or a homolog or a fragment thereof, is increased or generated, or if the activity serine hydroxymethyltransferase is increased or generated in a non-human organism, like a microorganism or a plant cell, plant or part thereof, especially with non-targeted localization, whereby the respective line discloses in column 7 serine. For example, an increase of the serine of at least 1 percent, particularly in a range of 28 to 120-percent is conferred as compared to a corresponding non-transformed wild type non-human organism.

[22602] Accordingly, in one embodiment, an increase of phenylalanine in a non-human organism, as compared to a corresponding non-transformed wild type non-human organism, is conferred in the process of the invention, if the activity of a polypeptide showing the activity of a chorismate mutase-T and prephenate dehydrogenase, or if the activity of the polypeptide B2600, preferably represented by SEQ ID NO. 80522, or a homolog or fragment thereof, or if the activity of a polypeptide encoded by a nucleic acid molecule comprising the nucleic acid SEQ ID NO. 80521, preferably the coding region thereof, or a homolog or fragment thereof, e.g. derived from Escherichia coli, is increased or generated. For example the activity of a nucleic acid molecule or a polypeptide comprising the nucleic acid, preferably the coding region thereof, or polypeptide or the consensus sequence or the polypeptide motif, as depicted in Table I, II or IV, application No. 3, column 5 or 8 in the respective same line as the nucleic acid molecule SEQ ID NO. 80521 or polypeptide SEQ ID NO. 80522, respectively, or a homolog or a fragment thereof, is increased or generated, or if the activity chorismate mutase-T and prephenate dehydrogenase is increased or generated in a non-human organism, like a microorganism or a plant cell, plant or part thereof, especially with plastidic localization, whereby the respective line discloses in column 7 phenylalanine. For example, an increase of the phenylalanine of at least 1 percent, particularly in a range of 40 to 334-percent is conferred as compared to a corresponding non-transformed wild type non-human organism.

[22603] Accordingly, in one embodiment, an increase of alanine in a non-human organism, as compared to a corresponding non-transformed wild type non-human organism, is conferred in the process of the invention, if the activity of a polypeptide showing the activity of a b2613-protein, or if the activity of the polypeptide B2613, preferably represented by SEQ ID NO. 40666, or a homolog or fragment thereof, or if the activity of a polypeptide encoded by a nucleic acid molecule comprising the nucleic acid SEQ ID NO. 40665, preferably the coding region thereof, or a homolog or fragment thereof, e.g. derived from Escherichia coli, is increased or generated. For example the activity of a nucleic acid molecule or a polypeptide comprising the nucleic acid, preferably the coding region thereof, or polypeptide or the consensus sequence or the polypeptide motif, as depicted in Table I, II or IV, application No. 3, column 5 or 8 in the respective same line as the nucleic acid molecule SEQ ID NO. 40665 or polypeptide SEQ ID NO. 40666, respectively, or a homolog or a fragment thereof, is increased or generated, or if the activity b2613-protein is increased or generated in a non-human organism, like a microorganism or a plant cell, plant or part thereof, especially with non-targeted localization, whereby the respective line discloses in column 7 alanine. For example, an increase of the alanine of at least 1 percent, particularly in a range of 27 to 27-percent is conferred as compared to a corresponding non-transformed wild type non-human organism.

[22604] Accordingly, in one embodiment, an increase of phenylalanine in a non-human organism, as compared to a corresponding non-transformed wild type non-human organism, is conferred in the process of the invention, if the activity of a polypeptide showing the activity of a transcriptional regulator, or if the activity of the polypeptide B2634, preferably represented by SEQ ID NO. 40727, or a homolog or fragment thereof, or if the activity of a polypeptide encoded by a nucleic acid molecule comprising the nucleic acid SEQ ID NO. 40726, preferably the coding region thereof, or a homolog or fragment thereof, e.g. derived from Escherichia coli, is increased or generated. For example the activity of a nucleic acid molecule or a polypeptide comprising the nucleic acid, preferably the coding region thereof, or polypeptide or the consensus sequence or the polypeptide motif, as depicted in Table I, II or IV, application No. 3, column 5 or 8 in the respective same line as the nucleic acid molecule SEQ ID NO. 40726 or polypeptide SEQ ID NO. 40727, respectively, or a homolog or a fragment thereof, is increased or generated, or if the activity transcriptional regulator is increased or generated in a non-human organism, like a microorganism or a plant cell, plant or part thereof, especially with non-targeted localization, whereby the respective line discloses in column 7 phenylalanine. For example, an increase of the phenylalanine of at least 1 percent, particularly in a range of 28 to 421-percent is conferred as compared to a corresponding non-transformed wild type non-human organism.

[22605] Accordingly, in one embodiment, an increase of tyrosine in a non-human organism, as compared to a corresponding non-transformed wild type non-human organism, is conferred in the process of the invention, if the activity of a polypeptide showing the activity of a transcriptional regulator, or if the activity of the polypeptide B2634, preferably represented by SEQ ID NO. 40727, or a homolog or fragment thereof, or if the activity of a polypeptide encoded by a nucleic acid molecule comprising the nucleic acid SEQ ID NO. 40726, preferably the coding region thereof, or a homolog or fragment thereof, e.g. derived from Escherichia coli, is increased or generated. For example the activity of a nucleic acid molecule or a polypeptide comprising the nucleic acid, preferably the coding region thereof, or polypeptide or the consensus sequence or the polypeptide motif, as depicted in Table I, II or IV, application No. 3, column 5 or 8 in the respective same line as the nucleic acid molecule SEQ ID NO. 40726 or polypeptide SEQ ID NO. 40727, respectively, or a homolog or a fragment thereof, is increased or generated, or if the activity transcriptional regulator is increased or generated in a non-human organism, like a microorganism or a plant cell, plant or part thereof, especially with non-targeted localization, whereby the respective line discloses in column 7 tyrosine. For example, an increase of the tyrosine of at least 1 percent, particularly in a range of 35 to 1033-percent is conferred as compared to a corresponding non-transformed wild type non-human organism.

[22606] Accordingly, in one embodiment, an increase of phenylalanine in a non-human organism, as compared to a corresponding non-transformed wild type non-human organism, is conferred in the process of the invention, if the activity of a polypeptide showing the activity of a b2673-protein, or if the activity of the polypeptide B2673, preferably represented by SEQ ID NO. 9245, or a homolog or fragment thereof, or if the activity of a polypeptide encoded by a nucleic acid molecule comprising the nucleic acid SEQ ID NO. 9244, preferably the coding region thereof, or a homolog or fragment thereof, e.g. derived from Escherichia coli, is increased or generated. For example the activity of a nucleic acid molecule or a polypeptide comprising the nucleic acid, preferably the coding region thereof, or polypeptide or the consensus sequence or the polypeptide motif, as depicted in Table I, II or IV, application No. 3, column 5 or 8 in the respective same line as the nucleic acid molecule SEQ ID NO. 9244 or polypeptide SEQ ID NO. 9245, respectively, or a homolog or a fragment thereof, is increased or generated, or if the activity b2673-protein is increased or generated in a non-human organism, like a microorganism or a plant cell, plant or part thereof, especially with non-targeted localization, whereby the respective line discloses in column 7 phenylalanine. For example, an increase of the phenylalanine of at least 1 percent, particularly in a range of 25 to 121-percent is conferred as compared to a corresponding non-transformed wild type non-human organism.

[22607] Accordingly, in one embodiment, an increase of tyrosine in a non-human organism, as compared to a corresponding non-transformed wild type non-human organism, is conferred in the process of the invention, if the activity of a polypeptide showing the activity of a b2673-protein, or if the activity of the polypeptide B2673, preferably represented by SEQ ID NO. 9245, or a homolog or fragment thereof, or if the activity of a polypeptide encoded by a nucleic acid molecule comprising the nucleic acid SEQ ID NO. 9244, preferably the coding region thereof, or a homolog or fragment thereof, e.g. derived from Escherichia coli, is increased or generated. For example the activity of a nucleic acid molecule or a polypeptide comprising the nucleic acid, preferably the coding region thereof, or polypeptide or the consensus sequence or the polypeptide motif, as depicted in Table I, II or IV, application No. 3, column 5 or 8 in the respective same line as the nucleic acid molecule SEQ ID NO. 9244 or polypeptide SEQ ID NO. 9245, respectively, or a homolog or a fragment thereof, is increased or generated, or if the activity b2673-protein is increased or generated in a non-human organism, like a microorganism or a plant cell, plant or part thereof, especially with non-targeted localization, whereby the respective line discloses in column 7 tyrosine. For example, an increase of the tyrosine of at least 1 percent, particularly in a range of 46 to 58-percent is conferred as compared to a corresponding non-transformed wild type non-human organism.

[22608] Accordingly, in one embodiment, an increase of aspartate in a non-human organism, as compared to a corresponding non-transformed wild type non-human organism, is conferred in the process of the invention, if the activity of a polypeptide showing the activity of a transport protein, or if the activity of the polypeptide B2680, preferably represented by SEQ ID NO. 80590, or a homolog or fragment thereof, or if the activity of a polypeptide encoded by a nucleic acid molecule comprising the nucleic acid SEQ ID NO. 80589, preferably the coding region thereof, or a homolog or fragment thereof, e.g. derived from Escherichia coli, is increased or generated. For example the activity of a nucleic acid molecule or a polypeptide comprising the nucleic acid, preferably the coding region thereof, or polypeptide or the consensus sequence or the polypeptide motif, as depicted in Table I, II or IV, application No. 3, column 5 or 8 in the respective same line as the nucleic acid molecule SEQ ID NO. 80589 or polypeptide SEQ ID NO. 80590, respectively, or a homolog or a fragment thereof, is increased or generated, or if the activity transport protein is increased or generated in a non-human organism, like a microorganism or a plant cell, plant or part thereof, especially with non-targeted localization, whereby the respective line discloses in column 7 aspartate. For example, an increase of the aspartate of at least 1 percent, particularly in a range of 51 to 124-percent is conferred as compared to a corresponding non-transformed wild type non-human organism.

[22609] Accordingly, in one embodiment, an increase of alanine in a non-human organism, as compared to a corresponding non-transformed wild type non-human organism, is conferred in the process of the invention, if the activity of a polypeptide showing the activity of a murein transglycosylase, or if the activity of the polypeptide B2701, preferably represented by SEQ ID NO. 80757, or a homolog or fragment thereof, or if the activity of a polypeptide encoded by a nucleic acid molecule comprising the nucleic acid SEQ ID NO. 80756, preferably the coding region thereof, or a homolog or fragment thereof, e.g. derived from Escherichia coli, is increased or generated. For example the activity of a nucleic acid molecule or a polypeptide comprising the nucleic acid, preferably the coding region thereof, or polypeptide or the consensus sequence or the polypeptide motif, as depicted in Table I, II or IV, application No. 3, column 5 or 8 in the respective same line as the nucleic acid molecule SEQ ID NO. 80756 or polypeptide SEQ ID NO. 80757, respectively, or a homolog or a fragment thereof, is increased or generated, or if the activity murein transglycosylase is increased or generated in a non-human organism, like a microorganism or a plant cell, plant or part thereof, especially with non-targeted localization, whereby the respective line discloses in column 7 alanine. For example, an increase of the alanine of at least 1 percent, particularly in a range of 19 to 36-percent is conferred as compared to a corresponding non-transformed wild type non-human organism.

[22610] Accordingly, in one embodiment, an increase of phenylalanine in a non-human organism, as compared to a corresponding non-transformed wild type non-human organism, is conferred in the process of the invention, if the activity of a polypeptide showing the activity of a murein transglycosylase, or if the activity of the polypeptide B2701, preferably represented by SEQ ID NO. 80757, or a homolog or fragment thereof, or if the activity of a polypeptide encoded by a nucleic acid molecule comprising the nucleic acid SEQ ID NO. 80756, preferably the coding region thereof, or a homolog or fragment thereof, e.g. derived from Escherichia coli, is increased or generated. For example the activity of a nucleic acid molecule or a polypeptide comprising the nucleic acid, preferably the coding region thereof, or polypeptide or the consensus sequence or the polypeptide motif, as depicted in Table I, II or IV, application No. 3, column 5 or 8 in the respective same line as the nucleic acid molecule SEQ ID NO. 80756 or polypeptide SEQ ID NO. 80757, respectively, or a homolog or a fragment thereof, is increased or generated, or if the activity murein transglycosylase is increased or generated in a non-human organism, like a microorganism or a plant cell, plant or part thereof, especially with non-targeted localization, whereby the respective line discloses in column 7 phenylalanine. For example, an increase of the phenylalanine of at least 1 percent, particularly in a range of 27 to 317-percent is conferred as compared to a corresponding non-transformed wild type non-human organism.

[22611] Accordingly, in one embodiment, an increase of tyrosine in a non-human organism, as compared to a corresponding non-transformed wild type non-human organism, is conferred in the process of the invention, if the activity of a polypeptide showing the activity of a murein transglycosylase, or if the activity of the polypeptide B2701, preferably represented by SEQ ID NO. 80757, or a homolog or fragment thereof, or if the activity of a polypeptide encoded by a nucleic acid molecule comprising the nucleic acid SEQ ID NO. 80756, preferably the coding region thereof, or a homolog or fragment thereof, e.g. derived from Escherichia coli, is increased or generated. For example the activity of a nucleic acid molecule or a polypeptide comprising the nucleic acid, preferably the coding region thereof, or polypeptide or the consensus sequence or the polypeptide motif, as depicted in Table I, II or IV, application No. 3, column 5 or 8 in the respective same line as the nucleic acid molecule SEQ ID NO. 80756 or polypeptide SEQ ID NO. 80757, respectively, or a homolog or a fragment thereof, is increased or generated, or if the activity murein transglycosylase is increased or generated in a non-human organism, like a microorganism or a plant cell, plant or part thereof, especially with non-targeted localization, whereby the respective line discloses in column 7 tyrosine. For example, an increase of the tyrosine of at least 1 percent, particularly in a range of 143 to 237-percent is conferred as compared to a corresponding non-transformed wild type non-human organism.

[22612] Accordingly, in one embodiment, an increase of alanine in a non-human organism, as compared to a corresponding non-transformed wild type non-human organism, is conferred in the process of the invention, if the activity of a polypeptide showing the activity of a transcriptional regulator, or if the activity of the polypeptide B2714, preferably represented by SEQ ID NO. 40742, or a homolog or fragment thereof, or if the activity of a polypeptide encoded by a nucleic acid molecule comprising the nucleic acid SEQ ID NO. 40741, preferably the coding region thereof, or a homolog or fragment thereof, e.g. derived from Escherichia coli, is increased or generated. For example the activity of a nucleic acid molecule or a polypeptide comprising the nucleic acid, preferably the coding region thereof, or polypeptide or the consensus sequence or the polypeptide motif, as depicted in Table I, II or IV, application No. 3, column 5 or 8 in the respective same line as the nucleic acid molecule SEQ ID NO. 40741 or polypeptide SEQ ID NO. 40742, respectively, or a homolog or a fragment thereof, is increased or generated, or if the activity transcriptional regulator is increased or generated in a non-human organism, like a microorganism or a plant cell, plant or part thereof, especially with non-targeted localization, whereby the respective line discloses in column 7 alanine. For example, an increase of the alanine of at least 1 percent, particularly in a range of 26 to 48-percent is conferred as compared to a corresponding non-transformed wild type non-human organism.

[22613] Accordingly, in one embodiment, an increase of alanine in a non-human organism, as compared to a corresponding non-transformed wild type non-human organism, is conferred in the process of the invention, if the activity of a polypeptide showing the activity of a b2739-protein, or if the activity of the polypeptide B2739, preferably represented by SEQ ID NO. 80907, or a homolog or fragment thereof, or if the activity of a polypeptide encoded by a nucleic acid molecule comprising the nucleic acid SEQ ID NO. 80906, preferably the coding region thereof, or a homolog or fragment thereof, e.g. derived from Escherichia coli, is increased or generated. For example the activity of a nucleic acid molecule or a polypeptide comprising the nucleic acid, preferably the coding region thereof, or polypeptide or the consensus sequence or the polypeptide motif, as depicted in Table I, II or IV, application No. 3, column 5 or 8 in the respective same line as the nucleic acid molecule SEQ ID NO. 80906 or polypeptide SEQ ID NO. 80907, respectively, or a homolog or a fragment thereof, is increased or generated, or if the activity b2739-protein is increased or generated in a non-human organism, like a microorganism or a plant cell, plant or part thereof, especially with non-targeted localization, whereby the respective line discloses in column 7 alanine. For example, an increase of the alanine of at least 1 percent, particularly in a range of 21 to 76-percent is conferred as compared to a corresponding non-transformed wild type non-human organism.

[22614] Accordingly, in one embodiment, an increase of phenylalanine in a non-human organism, as compared to a corresponding non-transformed wild type non-human organism, is conferred in the process of the invention, if the activity of a polypeptide showing the activity of a b2739-protein, or if the activity of the polypeptide B2739, preferably represented by SEQ ID NO. 80907, or a homolog or fragment thereof, or if the activity of a polypeptide encoded by a nucleic acid molecule comprising the nucleic acid SEQ ID NO. 80906, preferably the coding region thereof, or a homolog or fragment thereof, e.g. derived from Escherichia coli, is increased or generated. For example the activity of a nucleic acid molecule or a polypeptide comprising the nucleic acid, preferably the coding region thereof, or polypeptide or the consensus sequence or the polypeptide motif, as depicted in Table I, II or IV, application No. 3, column 5 or 8 in the respective same line as the nucleic acid molecule SEQ ID NO. 80906 or polypeptide SEQ ID NO. 80907, respectively, or a homolog or a fragment thereof, is increased or generated, or if the activity b2739-protein is increased or generated in a non-human organism, like a microorganism or a plant cell, plant or part thereof, especially with non-targeted localization, whereby the respective line discloses in column 7 phenylalanine. For example, an increase of the phenylalanine of at least 1 percent, particularly in a range of 25 to 234-percent is conferred as compared to a corresponding non-transformed wild type non-human organism.

[22615] Accordingly, in one embodiment, an increase of tyrosine in a non-human organism, as compared to a corresponding non-transformed wild type non-human organism, is conferred in the process of the invention, if the activity of a polypeptide showing the activity of a b2739-protein, or if the activity of the polypeptide B2739, preferably represented by SEQ ID NO. 80907, or a homolog or fragment thereof, or if the activity of a polypeptide encoded by a nucleic acid molecule comprising the nucleic acid SEQ ID NO. 80906, preferably the coding region thereof, or a homolog or fragment thereof, e.g. derived from Escherichia coli, is increased or generated. For example the activity of a nucleic acid molecule or a polypeptide comprising the nucleic acid, preferably the coding region thereof, or polypeptide or the consensus sequence or the polypeptide motif, as depicted in Table I, II or IV, application No. 3, column 5 or 8 in the respective same line as the nucleic acid molecule SEQ ID NO. 80906 or polypeptide SEQ ID NO. 80907, respectively, or a homolog or a fragment thereof, is increased or generated, or if the activity b2739-protein is increased or generated in a non-human organism, like a microorganism or a plant cell, plant or part thereof, especially with non-targeted localization, whereby the respective line discloses in column 7 tyrosine. For example, an increase of the tyrosine of at least 1 percent, particularly in a range of 40 to 595-percent is conferred as compared to a corresponding non-transformed wild type non-human organism.

[22616] Accordingly, in one embodiment, an increase of tyrosine in a non-human organism, as compared to a corresponding non-transformed wild type non-human organism, is conferred in the process of the invention, if the activity of a polypeptide showing the activity of a 2-C-methyl-D-erythritol 4-phosphate cytidylyltransferase, or if the activity of the polypeptide B2747, preferably represented by SEQ ID NO. 81076, or a homolog or fragment thereof, or if the activity of a polypeptide encoded by a nucleic acid molecule comprising the nucleic acid SEQ ID NO. 81075, preferably the coding region thereof, or a homolog or fragment thereof, e.g. derived from Escherichia coli, is increased or generated. For example the activity of a nucleic acid molecule or a polypeptide comprising the nucleic acid, preferably the coding region thereof, or polypeptide or the consensus sequence or the polypeptide motif, as depicted in Table I, II or IV, application No. 3, column 5 or 8 in the respective same line as the nucleic acid molecule SEQ ID NO. 81075 or polypeptide SEQ ID NO. 81076, respectively, or a homolog or a fragment thereof, is increased or generated, or if the activity 2-C-methyl-D-erythritol 4-phosphate cytidylyltransferase is increased or generated in a non-human organism, like a microorganism or a plant cell, plant or part thereof, especially with non-targeted localization, whereby the respective line discloses in column 7 tyrosine. For example, an increase of the tyrosine of at least 1 percent, particularly in a range of 68 to 92-percent is conferred as compared to a corresponding non-transformed wild type non-human organism.

[22617] Accordingly, in one embodiment, an increase of 5-oxoproline in a non-human organism, as compared to a corresponding non-transformed wild type non-human organism, is conferred in the process of the invention, if the activity of a polypeptide showing the activity of a 2-C-methyl-D-erythritol 4-phosphate cytidylyltransferase, or if the activity of the polypeptide B2747, preferably represented by SEQ ID NO. 81076, or a homolog or fragment thereof, or if the activity of a polypeptide encoded by a nucleic acid molecule comprising the nucleic acid SEQ ID NO. 81075, preferably the coding region thereof, or a homolog or fragment thereof, e.g. derived from Escherichia coli, is increased or generated. For example the activity of a nucleic acid molecule or a polypeptide comprising the nucleic acid, preferably the coding region thereof, or polypeptide or the consensus sequence or the polypeptide motif, as depicted in Table I, II or IV, application No. 3, column 5 or 8 in the respective same line as the nucleic acid molecule SEQ ID NO. 81075 or polypeptide SEQ ID NO. 81076, respectively, or a homolog or a fragment thereof, is increased or generated, or if the activity 2-C-methyl-D-erythritol 4-phosphate cytidylyltransferase is increased or generated in a non-human organism, like a microorganism or a plant cell, plant or part thereof, especially with non-targeted localization, whereby the respective line discloses in column 7 5-oxoproline. For example, an increase of the 5-oxoproline of at least 1 percent, particularly in a range of 43 to 297-percent is conferred as compared to a corresponding non-transformed wild type non-human organism.

[22618] Accordingly, in one embodiment, an increase of phenylalanine in a non-human organism, as compared to a corresponding non-transformed wild type non-human organism, is conferred in the process of the invention, if the activity of a polypeptide showing the activity of a phosphoadenosine phosphosulfate reductase, or if the activity of the polypeptide B2762, preferably represented by SEQ ID NO. 81452, or a homolog or fragment thereof, or if the activity of a polypeptide encoded by a nucleic acid molecule comprising the nucleic acid SEQ ID NO. 81451, preferably the coding region thereof, or a homolog or fragment thereof, e.g. derived from Escherichia coli, is increased or generated. For example the activity of a nucleic acid molecule or a polypeptide comprising the nucleic acid, preferably the coding region thereof, or polypeptide or the consensus sequence or the polypeptide motif, as depicted in Table I, II or IV, application No. 3, column 5 or 8 in the respective same line as the nucleic acid molecule SEQ ID NO. 81451 or polypeptide SEQ ID NO. 81452, respectively, or a homolog or a fragment thereof, is increased or generated, or if the activity phosphoadenosine phosphosulfate reductase is increased or generated in a non-human organism, like a microorganism or a plant cell, plant or part thereof, especially with non-targeted localization, whereby the respective line discloses in column 7 phenylalanine. For example, an increase of the phenylalanine of at least 1 percent, particularly in a range of 25 to 78-percent is conferred as compared to a corresponding non-transformed wild type non-human organism.

[22619] Accordingly, in one embodiment, an increase of phenylalanine in a non-human organism, as compared to a corresponding non-transformed wild type non-human organism, is conferred in the process of the invention, if the activity of a polypeptide showing the activity of a b2812-protein, or if the activity of the polypeptide B2812, preferably represented by SEQ ID NO. 40796, or a homolog or fragment thereof, or if the activity of a polypeptide encoded by a nucleic acid molecule comprising the nucleic acid SEQ ID NO. 40795, preferably the coding region thereof, or a homolog or fragment thereof, e.g. derived from Escherichia coli, is increased or generated. For example the activity of a nucleic acid molecule or a polypeptide comprising the nucleic acid, preferably the coding region thereof, or polypeptide or the consensus sequence or the polypeptide motif, as depicted in Table I, II or IV, application No. 3, column 5 or 8 in the respective same line as the nucleic acid molecule SEQ ID NO. 40795 or polypeptide SEQ ID NO. 40796, respectively, or a homolog or a fragment thereof, is increased or generated, or if the activity b2812-protein is increased or generated in a non-human organism, like a microorganism or a plant cell, plant or part thereof, especially with non-targeted localization, whereby the respective line discloses in column 7 phenylalanine. For example, an increase of the phenylalanine of at least 1 percent, particularly in a range of 44 to 99-percent is conferred as compared to a corresponding non-transformed wild type non-human organism.

[22620] Accordingly, in one embodiment, an increase of serine in a non-human organism, as compared to a corresponding non-transformed wild type non-human organism, is conferred in the process of the invention, if the activity of a polypeptide showing the activity of a b2812-protein, or if the activity of the polypeptide B2812, preferably represented by SEQ ID NO. 40796, or a homolog or fragment thereof, or if the activity of a polypeptide encoded by a nucleic acid molecule comprising the nucleic acid SEQ ID NO. 40795, preferably the coding region thereof, or a homolog or fragment thereof, e.g. derived from Escherichia coli, is increased or generated. For example the activity of a nucleic acid molecule or a polypeptide comprising the nucleic acid, preferably the coding region thereof, or polypeptide or the consensus sequence or the polypeptide motif, as depicted in Table I, II or IV, application No. 3, column 5 or 8 in the respective same line as the nucleic acid molecule SEQ ID NO. 40795 or polypeptide SEQ ID NO. 40796, respectively, or a homolog or a fragment thereof, is increased or generated, or if the activity b2812-protein is increased or generated in a non-human organism, like a microorganism or a plant cell, plant or part thereof, especially with non-targeted localization, whereby the respective line discloses in column 7 serine. For example, an increase of the serine of at least 1 percent, particularly in a range of 26 to 123-percent is conferred as compared to a corresponding non-transformed wild type non-human organism.

[22621] Accordingly, in one embodiment, an increase of tyrosine in a non-human organism, as compared to a corresponding non-transformed wild type non-human organism, is conferred in the process of the invention, if the activity of a polypeptide showing the activity of a b2812-protein, or if the activity of the polypeptide B2812, preferably represented by SEQ ID NO. 40796, or a homolog or fragment thereof, or if the activity of a polypeptide encoded by a nucleic acid molecule comprising the nucleic acid SEQ ID NO. 40795, preferably the coding region thereof, or a homolog or fragment thereof, e.g. derived from Escherichia coli, is increased or generated. For example the activity of a nucleic acid molecule or a polypeptide comprising the nucleic acid, preferably the coding region thereof, or polypeptide or the consensus sequence or the polypeptide motif, as depicted in Table I, II or IV, application No. 3, column 5 or 8 in the respective same line as the nucleic acid molecule SEQ ID NO. 40795 or polypeptide SEQ ID NO. 40796, respectively, or a homolog or a fragment thereof, is increased or generated, or if the activity b2812-protein is increased or generated in a non-human organism, like a microorganism or a plant cell, plant or part thereof, especially with non-targeted localization, whereby the respective line discloses in column 7 tyrosine. For example, an increase of the tyrosine of at least 1 percent, particularly in a range of 38 to 122-percent is conferred as compared to a corresponding non-transformed wild type non-human organism.

[22622] Accordingly, in one embodiment, an increase of phenylalanine in a non-human organism, as compared to a corresponding non-transformed wild type non-human organism, is conferred in the process of the invention, if the activity of a polypeptide showing the activity of a amino-acid acetyltransferase, or if the activity of the polypeptide B2818, preferably represented by SEQ ID NO. 81577, or a homolog or fragment thereof, or if the activity of a polypeptide encoded by a nucleic acid molecule comprising the nucleic acid SEQ ID NO. 81576, preferably the coding region thereof, or a homolog or fragment thereof, e.g. derived from Escherichia coli, is increased or generated. For example the activity of a nucleic acid molecule or a polypeptide comprising the nucleic acid, preferably the coding region thereof, or polypeptide or the consensus sequence or the polypeptide motif, as depicted in Table I, II or IV, application No. 3, column 5 or 8 in the respective same line as the nucleic acid molecule SEQ ID NO. 81576 or polypeptide SEQ ID NO. 81577, respectively, or a homolog or a fragment thereof, is increased or generated, or if the activity amino-acid acetyltransferase is increased or generated in a non-human organism, like a microorganism or a plant cell, plant or part thereof, especially with non-targeted localization, whereby the respective line discloses in column 7 phenylalanine. For example, an increase of the phenylalanine of at least 1 percent, particularly in a range of 27 to 826-percent is conferred as compared to a corresponding non-transformed wild type non-human organism.

[22623] Accordingly, in one embodiment, an increase of tyrosine in a non-human organism, as compared to a corresponding non-transformed wild type non-human organism, is conferred in the process of the invention, if the activity of a polypeptide showing the activity of a amino-acid acetyltransferase, or if the activity of the polypeptide B2818, preferably represented by SEQ ID NO. 81577, or a homolog or fragment thereof, or if the activity of a polypeptide encoded by a nucleic acid molecule comprising the nucleic acid SEQ ID NO. 81576, preferably the coding region thereof, or a homolog or fragment thereof, e.g. derived from Escherichia coli, is increased or generated. For example the activity of a nucleic acid molecule or a polypeptide comprising the nucleic acid, preferably the coding region thereof, or polypeptide or the consensus sequence or the polypeptide motif, as depicted in Table I, II or IV, application No. 3, column 5 or 8 in the respective same line as the nucleic acid molecule SEQ ID NO. 81576 or polypeptide SEQ ID NO. 81577, respectively, or a homolog or a fragment thereof, is increased or generated, or if the activity amino-acid acetyltransferase is increased or generated in a non-human organism, like a microorganism or a plant cell, plant or part thereof, especially with non-targeted localization, whereby the respective line discloses in column 7 tyrosine. For example, an increase of the tyrosine of at least 1 percent, particularly in a range of 41 to 427-percent is conferred as compared to a corresponding non-transformed wild type non-human organism.

[22624] Accordingly, in one embodiment, an increase of 5-oxoproline in a non-human organism, as compared to a corresponding non-transformed wild type non-human organism, is conferred in the process of the invention, if the activity of a polypeptide showing the activity of a amino-acid acetyltransferase, or if the activity of the polypeptide B2818, preferably represented by SEQ ID NO. 81577, or a homolog or fragment thereof, or if the activity of a polypeptide encoded by a nucleic acid molecule comprising the nucleic acid SEQ ID NO. 81576, preferably the coding region thereof, or a homolog or fragment thereof, e.g. derived from Escherichia coli, is increased or generated. For example the activity of a nucleic acid molecule or a polypeptide comprising the nucleic acid, preferably the coding region thereof, or polypeptide or the consensus sequence or the polypeptide motif, as depicted in Table I, II or IV, application No. 3, column 5 or 8 in the respective same line as the nucleic acid molecule SEQ ID NO. 81576 or polypeptide SEQ ID NO. 81577, respectively, or a homolog or a fragment thereof, is increased or generated, or if the activity amino-acid acetyltransferase is increased or generated in a non-human organism, like a microorganism or a plant cell, plant or part thereof, especially with non-targeted localization, whereby the respective line discloses in column 7 5-oxoproline. For example, an increase of the 5-oxoproline of at least 1 percent, particularly in a range of 34 to 266-percent is conferred as compared to a corresponding non-transformed wild type non-human organism.

[22625] Accordingly, in one embodiment, an increase of aspartate in a non-human organism, as compared to a corresponding non-transformed wild type non-human organism, is conferred in the process of the invention, if the activity of a polypeptide showing the activity of a prolipoprotein diacylglyceryl transferase, or if the activity of the polypeptide B2828, preferably represented by SEQ ID NO. 81693, or a homolog or fragment thereof, or if the activity of a polypeptide encoded by a nucleic acid molecule comprising the nucleic acid SEQ ID NO. 81692, preferably the coding region thereof, or a homolog or fragment thereof, e.g. derived from Escherichia coli, is increased or generated. For example the activity of a nucleic acid molecule or a polypeptide comprising the nucleic acid, preferably the coding region thereof, or polypeptide or the consensus sequence or the polypeptide motif, as depicted in Table I, II or IV, application No. 3, column 5 or 8 in the respective same line as the nucleic acid molecule SEQ ID NO. 81692 or polypeptide SEQ ID NO. 81693, respectively, or a homolog or a fragment thereof, is increased or generated, or if the activity prolipoprotein diacylglyceryl transferase is increased or generated in a non-human organism, like a microorganism or a plant cell, plant or part thereof, especially with non-targeted localization, whereby the respective line discloses in column 7 aspartate. For example, an increase of the aspartate of at least 1 percent, particularly in a range of 40 to 154-percent is conferred as compared to a corresponding non-transformed wild type non-human organism.

[22626] Accordingly, in one embodiment, an increase of tyrosine in a non-human organism, as compared to a corresponding non-transformed wild type non-human organism, is conferred in the process of the invention, if the activity of a polypeptide showing the activity of a transcriptional regulator, or if the activity of the polypeptide B2839, preferably represented by SEQ ID NO. 81936, or a homolog or fragment thereof, or if the activity of a polypeptide encoded by a nucleic acid molecule comprising the nucleic acid SEQ ID NO. 81935, preferably the coding region thereof, or a homolog or fragment thereof, e.g. derived from Escherichia coli, is increased or generated. For example the activity of a nucleic acid molecule or a polypeptide comprising the nucleic acid, preferably the coding region thereof, or polypeptide or the consensus sequence or the polypeptide motif, as depicted in Table I, II or IV, application No. 3, column 5 or 8 in the respective same line as the nucleic acid molecule SEQ ID NO. 81935 or polypeptide SEQ ID NO. 81936, respectively, or a homolog or a fragment thereof, is increased or generated, or if the activity transcriptional regulator is increased or generated in a non-human organism, like a microorganism or a plant cell, plant or part thereof, especially with non-targeted localization, whereby the respective line discloses in column 7 tyrosine. For example, an increase of the tyrosine of at least 1 percent, particularly in a range of 42 to 55-percent is conferred as compared to a corresponding non-transformed wild type non-human organism.

[22627] Accordingly, in one embodiment, an increase of phenylalanine in a non-human organism, as compared to a corresponding non-transformed wild type non-human organism, is conferred in the process of the invention, if the activity of a polypeptide showing the activity of a b2849-protein, or if the activity of the polypeptide B2849, preferably represented by SEQ ID NO. 81981, or a homolog or fragment thereof, or if the activity of a polypeptide encoded by a nucleic acid molecule comprising the nucleic acid SEQ ID NO. 81980, preferably the coding region thereof, or a homolog or fragment thereof, e.g. derived from Escherichia coli, is increased or generated. For example the activity of a nucleic acid molecule or a polypeptide comprising the nucleic acid, preferably the coding region thereof, or polypeptide or the consensus sequence or the polypeptide motif, as depicted in Table I, II or IV, application No. 3, column 5 or 8 in the respective same line as the nucleic acid molecule SEQ ID NO. 81980 or polypeptide SEQ ID NO. 81981, respectively, or a homolog or a fragment thereof, is increased or generated, or if the activity b2849-protein is increased or generated in a non-human organism, like a microorganism or a plant cell, plant or part thereof, especially with non-targeted localization, whereby the respective line discloses in column 7 phenylalanine. For example, an increase of the phenylalanine of at least 1 percent, particularly in a range of 26 to 78-percent is conferred as compared to a corresponding non-transformed wild type non-human organism.

[22628] Accordingly, in one embodiment, an increase of glycine in a non-human organism, as compared to a corresponding non-transformed wild type non-human organism, is conferred in the process of the invention, if the activity of a polypeptide showing the activity of a D-3-phosphoglycerate dehydrogenase, or if the activity of the polypeptide B2913, preferably represented by SEQ ID NO. 81989, or a homolog or fragment thereof, or if the activity of a polypeptide encoded by a nucleic acid molecule comprising the nucleic acid SEQ ID NO. 81988, preferably the coding region thereof, or a homolog or fragment thereof, e.g. derived from Escherichia coli, is increased or generated. For example the activity of a nucleic acid molecule or a polypeptide comprising the nucleic acid, preferably the coding region thereof, or polypeptide or the consensus sequence or the polypeptide motif, as depicted in Table I, II or IV, application No. 3, column 5 or 8 in the respective same line as the nucleic acid molecule SEQ ID NO. 81988 or polypeptide SEQ ID NO. 81989, respectively, or a homolog or a fragment thereof, is increased or generated, or if the activity D-3-phosphoglycerate dehydrogenase is increased or generated in a non-human organism, like a microorganism or a plant cell, plant or part thereof, especially with plastidic localization, whereby the respective line discloses in column 7 glycine. For example, an increase of the glycine of at least 1 percent, particularly in a range of 31 to 168-percent is conferred as compared to a corresponding non-transformed wild type non-human organism.

[22629] Accordingly, in one embodiment, an increase of serine in a non-human organism, as compared to a corresponding non-transformed wild type non-human organism, is conferred in the process of the invention, if the activity of a polypeptide showing the activity of a D-3-phosphoglycerate dehydrogenase, or if the activity of the polypeptide B2913, preferably represented by SEQ ID NO. 81989, or a homolog or fragment thereof, or if the activity of a polypeptide encoded by a nucleic acid molecule comprising the nucleic acid SEQ ID NO. 81988, preferably the coding region thereof, or a homolog or fragment thereof, e.g. derived from Escherichia coli, is increased or generated. For example the activity of a nucleic acid molecule or a polypeptide comprising the nucleic acid, preferably the coding region thereof, or polypeptide or the consensus sequence or the polypeptide motif, as depicted in Table I, II or IV, application No. 3, column 5 or 8 in the respective same line as the nucleic acid molecule SEQ ID NO. 81988 or polypeptide SEQ ID NO. 81989, respectively, or a homolog or a fragment thereof, is increased or generated, or if the activity D-3-phosphoglycerate dehydrogenase is increased or generated in a non-human organism, like a microorganism or a plant cell, plant or part thereof, especially with plastidic localization, whereby the respective line discloses in column 7 serine. For example, an increase of the serine of at least 1 percent, particularly in a range of 28 to 215-percent is conferred as compared to a corresponding non-transformed wild type non-human organism.

[22630] Accordingly, in one embodiment, an increase of aspartate in a non-human organism, as compared to a corresponding non-transformed wild type non-human organism, is conferred in the process of the invention, if the activity of a polypeptide showing the activity of a arginine exporter protein, or if the activity of the polypeptide B2923, preferably represented by SEQ ID NO. 9334, or a homolog or fragment thereof, or if the activity of a polypeptide encoded by a nucleic acid molecule comprising the nucleic acid SEQ ID NO. 9333, preferably the coding region thereof, or a homolog or fragment thereof, e.g. derived from Escherichia coli, is increased or generated. For example the activity of a nucleic acid molecule or a polypeptide comprising the nucleic acid, preferably the coding region thereof, or polypeptide or the consensus sequence or the polypeptide motif, as depicted in Table I, II or IV, application No. 3, column 5 or 8 in the respective same line as the nucleic acid molecule SEQ ID NO. 9333 or polypeptide SEQ ID NO. 9334, respectively, or a homolog or a fragment thereof, is increased or generated, or if the activity arginine exporter protein is increased or generated in a non-human organism, like a microorganism or a plant cell, plant or part thereof, especially with non-targeted localization, whereby the respective line discloses in column 7 aspartate. For example, an increase of the aspartate of at least 1 percent, particularly in a range of 64 to 126-percent is conferred as compared to a corresponding non-transformed wild type non-human organism.

[22631] Accordingly, in one embodiment, an increase of asparagine in a non-human organism, as compared to a corresponding non-transformed wild type non-human organism, is conferred in the process of the invention, if the activity of a polypeptide showing the activity of a glycoprotease, or if the activity of the polypeptide B3064, preferably represented by SEQ ID NO. 42047, or a homolog or fragment thereof, or if the activity of a polypeptide encoded by a nucleic acid molecule comprising the nucleic acid SEQ ID NO. 42046, preferably the coding region thereof, or a homolog or fragment thereof, e.g. derived from Escherichia coli, is increased or generated. For example the activity of a nucleic acid molecule or a polypeptide comprising the nucleic acid, preferably the coding region thereof, or polypeptide or the consensus sequence or the polypeptide motif, as depicted in Table I, II or IV, application No. 3, column 5 or 8 in the respective same line as the nucleic acid molecule SEQ ID NO. 42046 or polypeptide SEQ ID NO. 42047, respectively, or a homolog or a fragment thereof, is increased or generated, or if the activity glycoprotease is increased or generated in a non-human organism, like a microorganism or a plant cell, plant or part thereof, especially with non-targeted localization, whereby the respective line discloses in column 7 asparagine. For example, an increase of the asparagine of at least 1 percent, particularly in a range of 30 to 189-percent is conferred as compared to a corresponding non-transformed wild type non-human organism.

[22632] Accordingly, in one embodiment, an increase of phenylalanine in a non-human organism, as compared to a corresponding non-transformed wild type non-human organism, is conferred in the process of the invention, if the activity of a polypeptide showing the activity of a b3083-protein, or if the activity of the polypeptide B3083, preferably represented by SEQ ID NO. 82425, or a homolog or fragment thereof, or if the activity of a polypeptide encoded by a nucleic acid molecule comprising the nucleic acid SEQ ID NO. 82424, preferably the coding region thereof, or a homolog or fragment thereof, e.g. derived from Escherichia coli, is increased or generated. For example the activity of a nucleic acid molecule or a polypeptide comprising the nucleic acid, preferably the coding region thereof, or polypeptide or the consensus sequence or the polypeptide motif, as depicted in Table I, II or IV, application No. 3, column 5 or 8 in the respective same line as the nucleic acid molecule SEQ ID NO. 82424 or polypeptide SEQ ID NO. 82425, respectively, or a homolog or a fragment thereof, is increased or generated, or if the activity b3083-protein is increased or generated in a non-human organism, like a microorganism or a plant cell, plant or part thereof, especially with non-targeted localization, whereby the respective line discloses in column 7 phenylalanine. For example, an increase of the phenylalanine of at least 1 percent, particularly in a range of 28 to 61-percent is conferred as compared to a corresponding non-transformed wild type non-human organism.

[22633] Accordingly, in one embodiment, an increase of serine in a non-human organism, as compared to a corresponding non-transformed wild type non-human organism, is conferred in the process of the invention, if the activity of a polypeptide showing the activity of a b3083-protein, or if the activity of the polypeptide B3083, preferably represented by SEQ ID NO. 82425, or a homolog or fragment thereof, or if the activity of a polypeptide encoded by a nucleic acid molecule comprising the nucleic acid SEQ ID NO. 82424, preferably the coding region thereof, or a homolog or fragment thereof, e.g. derived from Escherichia coli, is increased or generated. For example the activity of a nucleic acid molecule or a polypeptide comprising the nucleic acid, preferably the coding region thereof, or polypeptide or the consensus sequence or the polypeptide motif, as depicted in Table I, II or IV, application No. 3, column 5 or 8 in the respective same line as the nucleic acid molecule SEQ ID NO. 82424 or polypeptide SEQ ID NO. 82425, respectively, or a homolog or a fragment thereof, is increased or generated, or if the activity b3083-protein is increased or generated in a non-human organism, like a microorganism or a plant cell, plant or part thereof, especially with non-targeted localization, whereby the respective line discloses in column 7 serine. For example, an increase of the serine of at least 1 percent, particularly in a range of 23 to 108-percent is conferred as compared to a corresponding non-transformed wild type non-human organism.

[22634] Accordingly, in one embodiment, an increase of tyrosine in a non-human organism, as compared to a corresponding non-transformed wild type non-human organism, is conferred in the process of the invention, if the activity of a polypeptide showing the activity of a b3083-protein, or if the activity of the polypeptide B3083, preferably represented by SEQ ID NO. 82425, or a homolog or fragment thereof, or if the activity of a polypeptide encoded by a nucleic acid molecule comprising the nucleic acid SEQ ID NO. 82424, preferably the coding region thereof, or a homolog or fragment thereof, e.g. derived from Escherichia coli, is increased or generated. For example the activity of a nucleic acid molecule or a polypeptide comprising the nucleic acid, preferably the coding region thereof, or polypeptide or the consensus sequence or the polypeptide motif, as depicted in Table I, II or IV, application No. 3, column 5 or 8 in the respective same line as the nucleic acid molecule SEQ ID NO. 82424 or polypeptide SEQ ID NO. 82425, respectively, or a homolog or a fragment thereof, is increased or generated, or if the activity b3083-protein is increased or generated in a non-human organism, like a microorganism or a plant cell, plant or part thereof, especially with non-targeted localization, whereby the respective line discloses in column 7 tyrosine. For example, an increase of the tyrosine of at least 1 percent, particularly in a range of 35 to 72-percent is conferred as compared to a corresponding non-transformed wild type non-human organism.

[22635] Accordingly, in one embodiment, an increase of alanine in a non-human organism, as compared to a corresponding non-transformed wild type non-human organism, is conferred in the process of the invention, if the activity of a polypeptide showing the activity of a b3098-protein, or if the activity of the polypeptide B3098, preferably represented by SEQ ID NO. 82460, or a homolog or fragment thereof, or if the activity of a polypeptide encoded by a nucleic acid molecule comprising the nucleic acid SEQ ID NO. 82459, preferably the coding region thereof, or a homolog or fragment thereof, e.g. derived from Escherichia coli, is increased or generated. For example the activity of a nucleic acid molecule or a polypeptide comprising the nucleic acid, preferably the coding region thereof, or polypeptide or the consensus sequence or the polypeptide motif, as depicted in Table I, II or IV, application No. 3, column 5 or 8 in the respective same line as the nucleic acid molecule SEQ ID NO. 82459 or polypeptide SEQ ID NO. 82460, respectively, or a homolog or a fragment thereof, is increased or generated, or if the activity b3098-protein is increased or generated in a non-human organism, like a microorganism or a plant cell, plant or part thereof, especially with non-targeted localization, whereby the respective line discloses in column 7 alanine. For example, an increase of the alanine of at least 1 percent, particularly in a range of 31 to 58-percent is conferred as compared to a corresponding non-transformed wild type non-human organism.

[22636] Accordingly, in one embodiment, an increase of glycine in a non-human organism, as compared to a corresponding non-transformed wild type non-human organism, is conferred in the process of the invention, if the activity of a polypeptide showing the activity of a b3098-protein, or if the activity of the polypeptide B3098, preferably represented by SEQ ID NO. 82460, or a homolog or fragment thereof, or if the activity of a polypeptide encoded by a nucleic acid molecule comprising the nucleic acid SEQ ID NO. 82459, preferably the coding region thereof, or a homolog or fragment thereof, e.g. derived from Escherichia coli, is increased or generated. For example the activity of a nucleic acid molecule or a polypeptide comprising the nucleic acid, preferably the coding region thereof, or polypeptide or the consensus sequence or the polypeptide motif, as depicted in Table I, II or IV, application No. 3, column 5 or 8 in the respective same line as the nucleic acid molecule SEQ ID NO. 82459 or polypeptide SEQ ID NO. 82460, respectively, or a homolog or a fragment thereof, is increased or generated, or if the activity b3098-protein is increased or generated in a non-human organism, like a microorganism or a plant cell, plant or part thereof, especially with non-targeted localization, whereby the respective line discloses in column 7 glycine. For example, an increase of the glycine of at least 1 percent, particularly in a range of 38 to 76-percent is conferred as compared to a corresponding non-transformed wild type non-human organism.

[22637] Accordingly, in one embodiment, an increase of tyrosine in a non-human organism, as compared to a corresponding non-transformed wild type non-human organism, is conferred in the process of the invention, if the activity of a polypeptide showing the activity of a b3121-protein, or if the activity of the polypeptide B3121, preferably represented by SEQ ID NO. 42472, or a homolog or fragment thereof, or if the activity of a polypeptide encoded by a nucleic acid molecule comprising the nucleic acid SEQ ID NO. 42471, preferably the coding region thereof, or a homolog or fragment thereof, e.g. derived from Escherichia coli, is increased or generated. For example the activity of a nucleic acid molecule or a polypeptide comprising the nucleic acid, preferably the coding region thereof, or polypeptide or the consensus sequence or the polypeptide motif, as depicted in Table I, II or IV, application No. 3, column 5 or 8 in the respective same line as the nucleic acid molecule SEQ ID NO. 42471 or polypeptide SEQ ID NO. 42472, respectively, or a homolog or a fragment thereof, is increased or generated, or if the activity b3121-protein is increased or generated in a non-human organism, like a microorganism or a plant cell, plant or part thereof, especially with non-targeted localization, whereby the respective line discloses in column 7 tyrosine. For example, an increase of the tyrosine of at least 1 percent, particularly in a range of 39 to 73-percent is conferred as compared to a corresponding non-transformed wild type non-human organism.

[22638] Accordingly, in one embodiment, an increase of tyrosine in a non-human organism, as compared to a corresponding non-transformed wild type non-human organism, is conferred in the process of the invention, if the activity of a polypeptide showing the activity of a b3221-protein, or if the activity of the polypeptide B3221, preferably represented by SEQ ID NO. 82511, or a homolog or fragment thereof, or if the activity of a polypeptide encoded by a nucleic acid molecule comprising the nucleic acid SEQ ID NO. 82510, preferably the coding region thereof, or a homolog or fragment thereof, e.g. derived from Escherichia coli, is increased or generated. For example the activity of a nucleic acid molecule or a polypeptide comprising the nucleic acid, preferably the coding region thereof, or polypeptide or the consensus sequence or the polypeptide motif, as depicted in Table I, II or IV, application No. 3, column 5 or 8 in the respective same line as the nucleic acid molecule SEQ ID NO. 82510 or polypeptide SEQ ID NO. 82511, respectively, or a homolog or a fragment thereof, is increased or generated, or if the activity b3221-protein is increased or generated in a non-human organism, like a microorganism or a plant cell, plant or part thereof, especially with plastidic localization, whereby the respective line discloses in column 7 tyrosine. For example, an increase of the tyrosine of at least 1 percent, particularly in a range of 37 to 55-percent is conferred as compared to a corresponding non-transformed wild type non-human organism.

[22639] Accordingly, in one embodiment, an increase of serine in a non-human organism, as compared to a corresponding non-transformed wild type non-human organism, is conferred in the process of the invention, if the activity of a polypeptide showing the activity of a b3246-protein, or if the activity of the polypeptide B3246, preferably represented by SEQ ID NO. 9471, or a homolog or fragment thereof, or if the activity of a polypeptide encoded by a nucleic acid molecule comprising the nucleic acid SEQ ID NO. 9470, preferably the coding region thereof, or a homolog or fragment thereof, e.g. derived from Escherichia coli, is increased or generated. For example the activity of a nucleic acid molecule or a polypeptide comprising the nucleic acid, preferably the coding region thereof, or polypeptide or the consensus sequence or the polypeptide motif, as depicted in Table I, II or IV, application No. 3, column 5 or 8 in the respective same line as the nucleic acid molecule SEQ ID NO. 9470 or polypeptide SEQ ID NO. 9471, respectively, or a homolog or a fragment thereof, is increased or generated, or if the activity b3246-protein is increased or generated in a non-human organism, like a microorganism or a plant cell, plant or part thereof, especially with non-targeted localization, whereby the respective line discloses in column 7 serine. For example, an increase of the serine of at least 1 percent, particularly in a range of 24 to 101-percent is conferred as compared to a corresponding non-transformed wild type non-human organism.

[22640] Accordingly, in one embodiment, an increase of 5-oxoproline in a non-human organism, as compared to a corresponding non-transformed wild type non-human organism, is conferred in the process of the invention, if the activity of a polypeptide showing the activity of a b3246-protein, or if the activity of the polypeptide B3246, preferably represented by SEQ ID NO. 9471, or a homolog or fragment thereof, or if the activity of a polypeptide encoded by a nucleic acid molecule comprising the nucleic acid SEQ ID NO. 9470, preferably the coding region thereof, or a homolog or fragment thereof, e.g. derived from Escherichia coli, is increased or generated. For example the activity of a nucleic acid molecule or a polypeptide comprising the nucleic acid, preferably the coding region thereof, or polypeptide or the consensus sequence or the polypeptide motif, as depicted in Table I, II or IV, application No. 3, column 5 or 8 in the respective same line as the nucleic acid molecule SEQ ID NO. 9470 or polypeptide SEQ ID NO. 9471, respectively, or a homolog or a fragment thereof, is increased or generated, or if the activity b3246-protein is increased or generated in a non-human organism, like a microorganism or a plant cell, plant or part thereof, especially with non-targeted localization, whereby the respective line discloses in column 7 5-oxoproline. For example, an increase of the 5-oxoproline of at least 1 percent, particularly in a range of 33 to 89-percent is conferred as compared to a corresponding non-transformed wild type non-human organism.

[22641] Accordingly, in one embodiment, an increase of asparagine in a non-human organism, as compared to a corresponding non-transformed wild type non-human organism, is conferred in the process of the invention, if the activity of a polypeptide showing the activity of a acetyl CoA carboxylase, or if the activity of the polypeptide B3256, preferably represented by SEQ ID NO. 9493, or a homolog or fragment thereof, or if the activity of a polypeptide encoded by a nucleic acid molecule comprising the nucleic acid SEQ ID NO. 9492, preferably the coding region thereof, or a homolog or fragment thereof, e.g. derived from Escherichia coli, is increased or generated. For example the activity of a nucleic acid molecule or a polypeptide comprising the nucleic acid, preferably the coding region thereof, or polypeptide or the consensus sequence or the polypeptide motif, as depicted in Table I, II or IV, application No. 3, column 5 or 8 in the respective same line as the nucleic acid molecule SEQ ID NO. 9492 or polypeptide SEQ ID NO. 9493, respectively, or a homolog or a fragment thereof, is increased or generated, or if the activity acetyl CoA carboxylase is increased or generated in a non-human organism, like a microorganism or a plant cell, plant or part thereof, especially with non-targeted localization, whereby the respective line discloses in column 7 asparagine. For example, an increase of the asparagine of at least 1 percent, particularly in a range of 67 to 286-percent is conferred as compared to a corresponding non-transformed wild type non-human organism.

[22642] Accordingly, in one embodiment, an increase of glycine in a non-human organism, as compared to a corresponding non-transformed wild type non-human organism, is conferred in the process of the invention, if the activity of a polypeptide showing the activity of a acetyl CoA carboxylase, or if the activity of the polypeptide B3256, preferably represented by SEQ ID NO. 9493, or a homolog or fragment thereof, or if the activity of a polypeptide encoded by a nucleic acid molecule comprising the nucleic acid SEQ ID NO. 9492, preferably the coding region thereof, or a homolog or fragment thereof, e.g. derived from Escherichia coli, is increased or generated. For example the activity of a nucleic acid molecule or a polypeptide comprising the nucleic acid, preferably the coding region thereof, or polypeptide or the consensus sequence or the polypeptide motif, as depicted in Table I, II or IV, application No. 3, column 5 or 8 in the respective same line as the nucleic acid molecule SEQ ID NO. 9492 or polypeptide SEQ ID NO. 9493, respectively, or a homolog or a fragment thereof, is increased or generated, or if the activity acetyl CoA carboxylase is increased or generated in a non-human organism, like a microorganism or a plant cell, plant or part thereof, especially with non-targeted localization, whereby the respective line discloses in column 7 glycine. For example, an increase of the glycine of at least 1 percent, particularly in a range of 28 to 344-percent is conferred as compared to a corresponding non-transformed wild type non-human organism.

[22643] Accordingly, in one embodiment, an increase of serine in a non-human organism, as compared to a corresponding non-transformed wild type non-human organism, is conferred in the process of the invention, if the activity of a polypeptide showing the activity of a acetyl CoA carboxylase, or if the activity of the polypeptide B3256, preferably represented by SEQ ID NO. 9493, or a homolog or fragment thereof, or if the activity of a polypeptide encoded by a nucleic acid molecule comprising the nucleic acid SEQ ID NO. 9492, preferably the coding region thereof, or a homolog or fragment thereof, e.g. derived from Escherichia coli, is increased or generated. For example the activity of a nucleic acid molecule or a polypeptide comprising the nucleic acid, preferably the coding region thereof, or polypeptide or the consensus sequence or the polypeptide motif, as depicted in Table I, II or IV, application No. 3, column 5 or 8 in the respective same line as the nucleic acid molecule SEQ ID NO. 9492 or polypeptide SEQ ID NO. 9493, respectively, or a homolog or a fragment thereof, is increased or generated, or if the activity acetyl CoA carboxylase is increased or generated in a non-human organism, like a microorganism or a plant cell, plant or part thereof, especially with non-targeted localization, whereby the respective line discloses in column 7 serine. For example, an increase of the serine of at least 1 percent, particularly in a range of 31 to 1323-percent is conferred as compared to a corresponding non-transformed wild type non-human organism.

[22644] Accordingly, in one embodiment, an increase of 5-oxoproline in a non-human organism, as compared to a corresponding non-transformed wild type non-human organism, is conferred in the process of the invention, if the activity of a polypeptide showing the activity of a acetyl CoA carboxylase, or if the activity of the polypeptide B3256, preferably represented by SEQ ID NO. 9493, or a homolog or fragment thereof, or if the activity of a polypeptide encoded by a nucleic acid molecule comprising the nucleic acid SEQ ID NO. 9492, preferably the coding region thereof, or a homolog or fragment thereof, e.g. derived from Escherichia coli, is increased or generated. For example the activity of a nucleic acid molecule or a polypeptide comprising the nucleic acid, preferably the coding region thereof, or polypeptide or the consensus sequence or the polypeptide motif, as depicted in Table I, II or IV, application No. 3, column 5 or 8 in the respective same line as the nucleic acid molecule SEQ ID NO. 9492 or polypeptide SEQ ID NO. 9493, respectively, or a homolog or a fragment thereof, is increased or generated, or if the activity acetyl CoA carboxylase is increased or generated in a non-human organism, like a microorganism or a plant cell, plant or part thereof, especially with non-targeted localization, whereby the respective line discloses in column 7 5-oxoproline. For example, an increase of the 5-oxoproline of at least 1 percent, particularly in a range of 32 to 175-percent is conferred as compared to a corresponding non-transformed wild type non-human organism.

[22645] Accordingly, in one embodiment, an increase of alanine in a non-human organism, as compared to a corresponding non-transformed wild type non-human organism, is conferred in the process of the invention, if the activity of a polypeptide showing the activity of a methyltransferase, or if the activity of the polypeptide B3262, preferably represented by SEQ ID NO. 42503, or a homolog or fragment thereof, or if the activity of a polypeptide encoded by a nucleic acid molecule comprising the nucleic acid SEQ ID NO. 42502, preferably the coding region thereof, or a homolog or fragment thereof, e.g. derived from Escherichia coli, is increased or generated. For example the activity of a nucleic acid molecule or a polypeptide comprising the nucleic acid, preferably the coding region thereof, or polypeptide or the consensus sequence or the polypeptide motif, as depicted in Table I, II or IV, application No. 3, column 5 or 8 in the respective same line as the nucleic acid molecule SEQ ID NO. 42502 or polypeptide SEQ ID NO. 42503, respectively, or a homolog or a fragment thereof, is increased or generated, or if the activity methyltransferase is increased or generated in a non-human organism, like a microorganism or a plant cell, plant or part thereof, especially with non-targeted localization, whereby the respective line discloses in column 7 alanine. For example, an increase of the alanine of at least 1 percent, particularly in a range of 25 to 58-percent is conferred as compared to a corresponding non-transformed wild type non-human organism.

[22646] Accordingly, in one embodiment, an increase of phenylalanine in a non-human organism, as compared to a corresponding non-transformed wild type non-human organism, is conferred in the process of the invention, if the activity of a polypeptide showing the activity of a methyltransferase, or if the activity of the polypeptide B3262, preferably represented by SEQ ID NO. 42503, or a homolog or fragment thereof, or if the activity of a polypeptide encoded by a nucleic acid molecule comprising the nucleic acid SEQ ID NO. 42502, preferably the coding region thereof, or a homolog or fragment thereof, e.g. derived from Escherichia coli, is increased or generated. For example the activity of a nucleic acid molecule or a polypeptide comprising the nucleic acid, preferably the coding region thereof, or polypeptide or the consensus sequence or the polypeptide motif, as depicted in Table I, II or IV, application No. 3, column 5 or 8 in the respective same line as the nucleic acid molecule SEQ ID NO. 42502 or polypeptide SEQ ID NO. 42503, respectively, or a homolog or a fragment thereof, is increased or generated, or if the activity methyltransferase is increased or generated in a non-human organism, like a microorganism or a plant cell, plant or part thereof, especially with non-targeted localization, whereby the respective line discloses in column 7 phenylalanine. For example, an increase of the phenylalanine of at least 1 percent, particularly in a range of 36 to 199-percent is conferred as compared to a corresponding non-transformed wild type non-human organism.

[22647] Accordingly, in one embodiment, an increase of serine in a non-human organism, as compared to a corresponding non-transformed wild type non-human organism, is conferred in the process of the invention, if the activity of a polypeptide showing the activity of a methyltransferase, or if the activity of the polypeptide B3262, preferably represented by SEQ ID NO. 42503, or a homolog or fragment thereof, or if the activity of a polypeptide encoded by a nucleic acid molecule comprising the nucleic acid SEQ ID NO. 42502, preferably the coding region thereof, or a homolog or fragment thereof, e.g. derived from Escherichia coli, is increased or generated. For example the activity of a nucleic acid molecule or a polypeptide comprising the nucleic acid, preferably the coding region thereof, or polypeptide or the consensus sequence or the polypeptide motif, as depicted in Table I, II or IV, application No. 3, column 5 or 8 in the respective same line as the nucleic acid molecule SEQ ID NO. 42502 or polypeptide SEQ ID NO. 42503, respectively, or a homolog or a fragment thereof, is increased or generated, or if the activity methyltransferase is increased or generated in a non-human organism, like a microorganism or a plant cell, plant or part thereof, especially with non-targeted localization, whereby the respective line discloses in column 7 serine. For example, an increase of the serine of at least 1 percent, particularly in a range of 34 to 141-percent is conferred as compared to a corresponding non-transformed wild type non-human organism.

[22648] Accordingly, in one embodiment, an increase of tyrosine in a non-human organism, as compared to a corresponding non-transformed wild type non-human organism, is conferred in the process of the invention, if the activity of a polypeptide showing the activity of a methyltransferase, or if the activity of the polypeptide B3262, preferably represented by SEQ ID NO. 42503, or a homolog or fragment thereof, or if the activity of a polypeptide encoded by a nucleic acid molecule comprising the nucleic acid SEQ ID NO. 42502, preferably the coding region thereof, or a homolog or fragment thereof, e.g. derived from Escherichia coli, is increased or generated. For example the activity of a nucleic acid molecule or a polypeptide comprising the nucleic acid, preferably the coding region thereof, or polypeptide or the consensus sequence or the polypeptide motif, as depicted in Table I, II or IV, application No. 3, column 5 or 8 in the respective same line as the nucleic acid molecule SEQ ID NO. 42502 or polypeptide SEQ ID NO. 42503, respectively, or a homolog or a fragment thereof, is increased or generated, or if the activity methyltransferase is increased or generated in a non-human organism, like a microorganism or a plant cell, plant or part thereof, especially with non-targeted localization, whereby the respective line discloses in column 7 tyrosine. For example, an increase of the tyrosine of at least 1 percent, particularly in a range of 45 to 322-percent is conferred as compared to a corresponding non-transformed wild type non-human organism.

[22649] Accordingly, in one embodiment, an increase of 5-oxoproline in a non-human organism, as compared to a corresponding non-transformed wild type non-human organism, is conferred in the process of the invention, if the activity of a polypeptide showing the activity of a methyltransferase, or if the activity of the polypeptide B3262, preferably represented by SEQ ID NO. 42503, or a homolog or fragment thereof, or if the activity of a polypeptide encoded by a nucleic acid molecule comprising the nucleic acid SEQ ID NO. 42502, preferably the coding region thereof, or a homolog or fragment thereof, e.g. derived from Escherichia coli, is increased or generated. For example the activity of a nucleic acid molecule or a polypeptide comprising the nucleic acid, preferably the coding region thereof, or polypeptide or the consensus sequence or the polypeptide motif, as depicted in Table I, II or IV, application No. 3, column 5 or 8 in the respective same line as the nucleic acid molecule SEQ ID NO. 42502 or polypeptide SEQ ID NO. 42503, respectively, or a homolog or a fragment thereof, is increased or generated, or if the activity methyltransferase is increased or generated in a non-human organism, like a microorganism or a plant cell, plant or part thereof, especially with non-targeted localization, whereby the respective line discloses in column 7 5-oxoproline. For example, an increase of the 5-oxoproline of at least 1 percent, particularly in a range of 72 to 179-percent is conferred as compared to a corresponding non-transformed wild type non-human organism.

[22650] Accordingly, in one embodiment, an increase of alanine in a non-human organism, as compared to a corresponding non-transformed wild type non-human organism, is conferred in the process of the invention, if the activity of a polypeptide showing the activity of a b3346-protein, or if the activity of the polypeptide B3346, preferably represented by SEQ ID NO. 10105, or a homolog or fragment thereof, or if the activity of a polypeptide encoded by a nucleic acid molecule comprising the nucleic acid SEQ ID NO. 10104, preferably the coding region thereof, or a homolog or fragment thereof, e.g. derived from Escherichia coli, is increased or generated. For example the activity of a nucleic acid molecule or a polypeptide comprising the nucleic acid, preferably the coding region thereof, or polypeptide or the consensus sequence or the polypeptide motif, as depicted in Table I, II or IV, application No. 3, column 5 or 8 in the respective same line as the nucleic acid molecule SEQ ID NO. 10104 or polypeptide SEQ ID NO. 10105, respectively, or a homolog or a fragment thereof, is increased or generated, or if the activity b3346-protein is increased or generated in a non-human organism, like a microorganism or a plant cell, plant or part thereof, especially with non-targeted localization, whereby the respective line discloses in column 7 alanine. For example, an increase of the alanine of at least 1 percent, particularly in a range of 20 to 53-percent is conferred as compared to a corresponding non-transformed wild type non-human organism.

[22651] Accordingly, in one embodiment, an increase of alanine in a non-human organism, as compared to a corresponding non-transformed wild type non-human organism, is conferred in the process of the invention, if the activity of a polypeptide showing the activity of a ABC transporter ATP-binding protein, or if the activity of the polypeptide B3352, preferably represented by SEQ ID NO. 82573, or a homolog or fragment thereof, or if the activity of a polypeptide encoded by a nucleic acid molecule comprising the nucleic acid SEQ ID NO. 82572, preferably the coding region thereof, or a homolog or fragment thereof, e.g. derived from Escherichia coli, is increased or generated. For example the activity of a nucleic acid molecule or a polypeptide comprising the nucleic acid, preferably the coding region thereof, or polypeptide or the consensus sequence or the polypeptide motif, as depicted in Table I, II or IV, application No. 3, column 5 or 8 in the respective same line as the nucleic acid molecule SEQ ID NO. 82572 or polypeptide SEQ ID NO. 82573, respectively, or a homolog or a fragment thereof, is increased or generated, or if the activity ABC transporter ATP-binding protein is increased or generated in a non-human organism, like a microorganism or a plant cell, plant or part thereof, especially with non-targeted localization, whereby the respective line discloses in column 7 alanine. For example, an increase of the alanine of at least 1 percent, particularly in a range of 19 to 45-percent is conferred as compared to a corresponding non-transformed wild type non-human organism.

[22652] Accordingly, in one embodiment, an increase of glycine in a non-human organism, as compared to a corresponding non-transformed wild type non-human organism, is conferred in the process of the invention, if the activity of a polypeptide showing the activity of a ABC transporter ATP-binding protein, or if the activity of the polypeptide B3352, preferably represented by SEQ ID NO. 82573, or a homolog or fragment thereof, or if the activity of a polypeptide encoded by a nucleic acid molecule comprising the nucleic acid SEQ ID NO. 82572, preferably the coding region thereof, or a homolog or fragment thereof, e.g. derived from Escherichia coli, is increased or generated. For example the activity of a nucleic acid molecule or a polypeptide comprising the nucleic acid, preferably the coding region thereof, or polypeptide or the consensus sequence or the polypeptide motif, as depicted in Table I, II or IV, application No. 3, column 5 or 8 in the respective same line as the nucleic acid molecule SEQ ID NO. 82572 or polypeptide SEQ ID NO. 82573, respectively, or a homolog or a fragment thereof, is increased or generated, or if the activity ABC transporter ATP-binding protein is increased or generated in a non-human organism, like a microorganism or a plant cell, plant or part thereof, especially with non-targeted localization, whereby the respective line discloses in column 7 glycine. For example, an increase of the glycine of at least 1 percent, particularly in a range of 40 to 80-percent is conferred as compared to a corresponding non-transformed wild type non-human organism.

[22653] Accordingly, in one embodiment, an increase of aspartate in a non-human organism, as compared to a corresponding non-transformed wild type non-human organism, is conferred in the process of the invention, if the activity of a polypeptide showing the activity of a b3392-protein, or if the activity of the polypeptide B3392, preferably represented by SEQ ID NO. 82847, or a homolog or fragment thereof, or if the activity of a polypeptide encoded by a nucleic acid molecule comprising the nucleic acid SEQ ID NO. 82846, preferably the coding region thereof, or a homolog or fragment thereof, e.g. derived from Escherichia coli, is increased or generated. For example the activity of a nucleic acid molecule or a polypeptide comprising the nucleic acid, preferably the coding region thereof, or polypeptide or the consensus sequence or the polypeptide motif, as depicted in Table I, II or IV, application No. 3, column 5 or 8 in the respective same line as the nucleic acid molecule SEQ ID NO. 82846 or polypeptide SEQ ID NO. 82847, respectively, or a homolog or a fragment thereof, is increased or generated, or if the activity b3392-protein is increased or generated in a non-human organism, like a microorganism or a plant cell, plant or part thereof, especially with plastidic localization, whereby the respective line discloses in column 7 aspartate. For example, an increase of the aspartate of at least 1 percent, particularly in a range of 41 to 49-percent is conferred as compared to a corresponding non-transformed wild type non-human organism.

[22654] Accordingly, in one embodiment, an increase of phenylalanine in a non-human organism, as compared to a corresponding non-transformed wild type non-human organism, is conferred in the process of the invention, if the activity of a polypeptide showing the activity of a phosphoenolpyruvate carboxykinase, or if the activity of the polypeptide B3403, preferably represented by SEQ ID NO. 82867, or a homolog or fragment thereof, or if the activity of a polypeptide encoded by a nucleic acid molecule comprising the nucleic acid SEQ ID NO. 82866, preferably the coding region thereof, or a homolog or fragment thereof, e.g. derived from Escherichia coli, is increased or generated. For example the activity of a nucleic acid molecule or a polypeptide comprising the nucleic acid, preferably the coding region thereof, or polypeptide or the consensus sequence or the polypeptide motif, as depicted in Table I, II or IV, application No. 3, column 5 or 8 in the respective same line as the nucleic acid molecule SEQ ID NO. 82866 or polypeptide SEQ ID NO. 82867, respectively, or a homolog or a fragment thereof, is increased or generated, or if the activity phosphoenolpyruvate carboxykinase is increased or generated in a non-human organism, like a microorganism or a plant cell, plant or part thereof, especially with non-targeted localization, whereby the respective line discloses in column 7 phenylalanine. For example, an increase of the phenylalanine of at least 1 percent, particularly in a range of 26 to 63-percent is conferred as compared to a corresponding non-transformed wild type non-human organism.

[22655] Accordingly, in one embodiment, an increase of serine in a non-human organism, as compared to a corresponding non-transformed wild type non-human organism, is conferred in the process of the invention, if the activity of a polypeptide showing the activity of a phosphoenolpyruvate carboxykinase, or if the activity of the polypeptide B3403, preferably represented by SEQ ID NO. 82867, or a homolog or fragment thereof, or if the activity of a polypeptide encoded by a nucleic acid molecule comprising the nucleic acid SEQ ID NO. 82866, preferably the coding region thereof, or a homolog or fragment thereof, e.g. derived from Escherichia coli, is increased or generated. For example the activity of a nucleic acid molecule or a polypeptide comprising the nucleic acid, preferably the coding region thereof, or polypeptide or the consensus sequence or the polypeptide motif, as depicted in Table I, II or IV, application No. 3, column 5 or 8 in the respective same line as the nucleic acid molecule SEQ ID NO. 82866 or polypeptide SEQ ID NO. 82867, respectively, or a homolog or a fragment thereof, is increased or generated, or if the activity phosphoenolpyruvate carboxykinase is increased or generated in a non-human organism, like a microorganism or a plant cell, plant or part thereof, especially with non-targeted localization, whereby the respective line discloses in column 7 serine. For example, an increase of the serine of at least 1 percent, particularly in a range of 31 to 45-percent is conferred as compared to a corresponding non-transformed wild type non-human organism.

[22656] Accordingly, in one embodiment, an increase of alanine in a non-human organism, as compared to a corresponding non-transformed wild type non-human organism, is conferred in the process of the invention, if the activity of a polypeptide showing the activity of a b3410-protein, or if the activity of the polypeptide B3410, preferably represented by SEQ ID NO. 42560, or a homolog or fragment thereof, or if the activity of a polypeptide encoded by a nucleic acid molecule comprising the nucleic acid SEQ ID NO. 42559, preferably the coding region thereof, or a homolog or fragment thereof, e.g. derived from Escherichia coli, is increased or generated. For example the activity of a nucleic acid molecule or a polypeptide comprising the nucleic acid, preferably the coding region thereof, or polypeptide or the consensus sequence or the polypeptide motif, as depicted in Table I, II or IV, application No. 3, column 5 or 8 in the respective same line as the nucleic acid molecule SEQ ID NO. 42559 or polypeptide SEQ ID NO. 42560, respectively, or a homolog or a fragment thereof, is increased or generated, or if the activity b3410-protein is increased or generated in a non-human organism, like a microorganism or a plant cell, plant or part thereof, especially with non-targeted localization, whereby the respective line discloses in column 7 alanine. For example, an increase of the alanine of at least 1 percent, particularly in a range of 23 to 65-percent is conferred as compared to a corresponding non-transformed wild type non-human organism.

[22657] Accordingly, in one embodiment, an increase of serine in a non-human organism, as compared to a corresponding non-transformed wild type non-human organism, is conferred in the process of the invention, if the activity of a polypeptide showing the activity of a b3509-protein, or if the activity of the polypeptide B3509, preferably represented by SEQ ID NO. 42593, or a homolog or fragment thereof, or if the activity of a polypeptide encoded by a nucleic acid molecule comprising the nucleic acid SEQ ID NO. 42592, preferably the coding region thereof, or a homolog or fragment thereof, e.g. derived from Escherichia coli, is increased or generated. For example the activity of a nucleic acid molecule or a polypeptide comprising the nucleic acid, preferably the coding region thereof, or polypeptide or the consensus sequence or the polypeptide motif, as depicted in Table I, II or IV, application No. 3, column 5 or 8 in the respective same line as the nucleic acid molecule SEQ ID NO. 42592 or polypeptide SEQ ID NO. 42593, respectively, or a homolog or a fragment thereof, is increased or generated, or if the activity b3509-protein is increased or generated in a non-human organism, like a microorganism or a plant cell, plant or part thereof, especially with non-targeted localization, whereby the respective line discloses in column 7 serine. For example, an increase of the serine of at least 1 percent, particularly in a range of 26 to 63-percent is conferred as compared to a corresponding non-transformed wild type non-human organism.

[22658] Accordingly, in one embodiment, an increase of aspartate in a non-human organism, as compared to a corresponding non-transformed wild type non-human organism, is conferred in the process of the invention, if the activity of a polypeptide showing the activity of a cellulose synthase catalytic subunit, or if the activity of the polypeptide B3533, preferably represented by SEQ ID NO. 83154, or a homolog or fragment thereof, or if the activity of a polypeptide encoded by a nucleic acid molecule comprising the nucleic acid SEQ ID NO. 83153, preferably the coding region thereof, or a homolog or fragment thereof, e.g. derived from Escherichia coli, is increased or generated. For example the activity of a nucleic acid molecule or a polypeptide comprising the nucleic acid, preferably the coding region thereof, or polypeptide or the consensus sequence or the polypeptide motif, as depicted in Table I, II or IV, application No. 3, column 5 or 8 in the respective same line as the nucleic acid molecule SEQ ID NO. 83153 or polypeptide SEQ ID NO. 83154, respectively, or a homolog or a fragment thereof, is increased or generated, or if the activity cellulose synthase catalytic subunit is increased or generated in a non-human organism, like a microorganism or a plant cell, plant or part thereof, especially with non-targeted localization, whereby the respective line discloses in column 7 aspartate. For example, an increase of the aspartate of at least 1 percent, particularly in a range of 37 to 669-percent is conferred as compared to a corresponding non-transformed wild type non-human organism.

[22659] Accordingly, in one embodiment, an increase of phenylalanine in a non-human organism, as compared to a corresponding non-transformed wild type non-human organism, is conferred in the process of the invention, if the activity of a polypeptide showing the activity of a serine acetyltransferase, or if the activity of the polypeptide B3607, preferably represented by SEQ ID NO. 83214, or a homolog or fragment thereof, or if the activity of a polypeptide encoded by a nucleic acid molecule comprising the nucleic acid SEQ ID NO. 83213, preferably the coding region thereof, or a homolog or fragment thereof, e.g. derived from Escherichia coli, is increased or generated. For example the activity of a nucleic acid molecule or a polypeptide comprising the nucleic acid, preferably the coding region thereof, or polypeptide or the consensus sequence or the polypeptide motif, as depicted in Table I, II or IV, application No. 3, column 5 or 8 in the respective same line as the nucleic acid molecule SEQ ID NO. 83213 or polypeptide SEQ ID NO. 83214, respectively, or a homolog or a fragment thereof, is increased or generated, or if the activity serine acetyltransferase is increased or generated in a non-human organism, like a microorganism or a plant cell, plant or part thereof, especially with plastidic localization, whereby the respective line discloses in column 7 phenylalanine. For example, an increase of the phenylalanine of at least 1 percent, particularly in a range of 46 to 60-percent is conferred as compared to a corresponding non-transformed wild type non-human organism.

[22660] Accordingly, in one embodiment, an increase of tyrosine in a non-human organism, as compared to a corresponding non-transformed wild type non-human organism, is conferred in the process of the invention, if the activity of a polypeptide showing the activity of a serine acetyltransferase, or if the activity of the polypeptide B3607, preferably represented by SEQ ID NO. 83214, or a homolog or fragment thereof, or if the activity of a polypeptide encoded by a nucleic acid molecule comprising the nucleic acid SEQ ID NO. 83213, preferably the coding region thereof, or a homolog or fragment thereof, e.g. derived from Escherichia coli, is increased or generated. For example the activity of a nucleic acid molecule or a polypeptide comprising the nucleic acid, preferably the coding region thereof, or polypeptide or the consensus sequence or the polypeptide motif, as depicted in Table I, II or IV, application No. 3, column 5 or 8 in the respective same line as the nucleic acid molecule SEQ ID NO. 83213 or polypeptide SEQ ID NO. 83214, respectively, or a homolog or a fragment thereof, is increased or generated, or if the activity serine acetyltransferase is increased or generated in a non-human organism, like a microorganism or a plant cell, plant or part thereof, especially with plastidic localization, whereby the respective line discloses in column 7 tyrosine. For example, an increase of the tyrosine of at least 1 percent, particularly in a range of 29 to 82-percent is conferred as compared to a corresponding non-transformed wild type non-human organism.

[22661] Accordingly, in one embodiment, an increase of alanine in a non-human organism, as compared to a corresponding non-transformed wild type non-human organism, is conferred in the process of the invention, if the activity of a polypeptide showing the activity of a phosphopantetheine adenylyltransferase, or if the activity of the polypeptide B3634, preferably represented by SEQ ID NO. 42932, or a homolog or fragment thereof, or if the activity of a polypeptide encoded by a nucleic acid molecule comprising the nucleic acid SEQ ID NO. 42931, preferably the coding region thereof, or a homolog or fragment thereof, e.g. derived from Escherichia coli, is increased or generated. For example the activity of a nucleic acid molecule or a polypeptide comprising the nucleic acid, preferably the coding region thereof, or polypeptide or the consensus sequence or the polypeptide motif, as depicted in Table I, II or IV, application No. 3, column 5 or 8 in the respective same line as the nucleic acid molecule SEQ ID NO. 42931 or polypeptide SEQ ID NO. 42932, respectively, or a homolog or a fragment thereof, is increased or generated, or if the activity phosphopantetheine adenylyltransferase is increased or generated in a non-human organism, like a microorganism or a plant cell, plant or part thereof, especially with non-targeted localization, whereby the respective line discloses in column 7 alanine. For example, an increase of the alanine of at least 1 percent, particularly in a range of 21 to 39 percent is conferred as compared to a corresponding non-transformed wild type non-human organism.

[22662] Accordingly, in one embodiment, an increase of asparagine in a non-human organism, as compared to a corresponding non-transformed wild type non-human organism, is conferred in the process of the invention, if the activity of a polypeptide showing the activity of a phosphopantetheine adenylyltransferase, or if the activity of the polypeptide B3634, preferably represented by SEQ ID NO. 42932, or a homolog or fragment thereof, or if the activity of a polypeptide encoded by a nucleic acid molecule comprising the nucleic acid SEQ ID NO. 42931, preferably the coding region thereof, or a homolog or fragment thereof, e.g. derived from Escherichia coli, is increased or generated. For example the activity of a nucleic acid molecule or a polypeptide comprising the nucleic acid, preferably the coding region thereof, or polypeptide or the consensus sequence or the polypeptide motif, as depicted in Table I, II or IV, application No. 3, column 5 or 8 in the respective same line as the nucleic acid molecule SEQ ID NO. 42931 or polypeptide SEQ ID NO. 42932, respectively, or a homolog or a fragment thereof, is increased or generated, or if the activity phosphopantetheine adenylyltransferase is increased or generated in a non-human organism, like a microorganism or a plant cell, plant or part thereof, especially with non-targeted localization, whereby the respective line discloses in column 7 asparagine. For example, an increase of the asparagine of at least 1 percent, particularly in a range of 44 to 169-percent is conferred as compared to a corresponding non-transformed wild type non-human organism.

[22663] Accordingly, in one embodiment, an increase of phenylalanine in a non-human organism, as compared to a corresponding non-transformed wild type non-human organism, is conferred in the process of the invention, if the activity of a polypeptide showing the activity of a phosphopantetheine adenylyltransferase, or if the activity of the polypeptide B3634, preferably represented by SEQ ID NO. 42932, or a homolog or fragment thereof, or if the activity of a polypeptide encoded by a nucleic acid molecule comprising the nucleic acid SEQ ID NO. 42931, preferably the coding region thereof, or a homolog or fragment thereof, e.g. derived from Escherichia coli, is increased or generated. For example the activity of a nucleic acid molecule or a polypeptide comprising the nucleic acid, preferably the coding region thereof, or polypeptide or the consensus sequence or the polypeptide motif, as depicted in Table I, II or IV, application No. 3, column 5 or 8 in the respective same line as the nucleic acid molecule SEQ ID NO. 42931 or polypeptide SEQ ID NO. 42932, respectively, or a homolog or a fragment thereof, is increased or generated, or if the activity phosphopantetheine adenylyltransferase is increased or generated in a non-human organism, like a microorganism or a plant cell, plant or part thereof, especially with non-targeted localization, whereby the respective line discloses in column 7 phenylalanine. For example, an increase of the phenylalanine of at least 1 percent, particularly in a range of 82 to 92-percent is conferred as compared to a corresponding non-transformed wild type non-human organism.

[22664] Accordingly, in one embodiment, an increase of glycine in a non-human organism, as compared to a corresponding non-transformed wild type non-human organism, is conferred in the process of the invention, if the activity of a polypeptide showing the activity of a b3646-protein, or if the activity of the polypeptide B3646, preferably represented by SEQ ID NO. 83430, or a homolog or fragment thereof, or if the activity of a polypeptide encoded by a nucleic acid molecule comprising the nucleic acid SEQ ID NO. 83429, preferably the coding region thereof, or a homolog or fragment thereof, e.g. derived from Escherichia coli, is increased or generated. For example the activity of a nucleic acid molecule or a polypeptide comprising the nucleic acid, preferably the coding region thereof, or polypeptide or the consensus sequence or the polypeptide motif, as depicted in Table I, II or IV, application No. 3, column 5 or 8 in the respective same line as the nucleic acid molecule SEQ ID NO. 83429 or polypeptide SEQ ID NO. 83430, respectively, or a homolog or a fragment thereof, is increased or generated, or if the activity b3646-protein is increased or generated in a non-human organism, like a microorganism or a plant cell, plant or part thereof, especially with non-targeted localization, whereby the respective line discloses in column 7 glycine. For example, an increase of the glycine of at least 1 percent, particularly in a range of 35 to 1154-percent is conferred as compared to a corresponding non-transformed wild type non-human organism.

[22665] Accordingly, in one embodiment, an increase of tyrosine in a non-human organism, as compared to a corresponding non-transformed wild type non-human organism, is conferred in the process of the invention, if the activity of a polypeptide showing the activity of a acetolactate synthase, or if the activity of the polypeptide B3670, preferably represented by SEQ ID NO. 83630, or a homolog or fragment thereof, or if the activity of a polypeptide encoded by a nucleic acid molecule comprising the nucleic acid SEQ ID NO. 83629, preferably the coding region thereof, or a homolog or fragment thereof, e.g. derived from Escherichia coli, is increased or generated. For example the activity of a nucleic acid molecule or a polypeptide comprising the nucleic acid, preferably the coding region thereof, or polypeptide or the consensus sequence or the polypeptide motif, as depicted in Table I, II or IV, application No. 3, column 5 or 8 in the respective same line as the nucleic acid molecule SEQ ID NO. 83629 or polypeptide SEQ ID NO. 83630, respectively, or a homolog or a fragment thereof, is increased or generated, or if the activity acetolactate synthase is increased or generated in a non-human organism, like a microorganism or a plant cell, plant or part thereof, especially with plastidic localization, whereby the respective line discloses in column 7 tyrosine. For example, an increase of the tyrosine of at least 1 percent, particularly in a range of 60 to 97-percent is conferred as compared to a corresponding non-transformed wild type non-human organism.

[22666] Accordingly, in one embodiment, an increase of asparagine in a non-human organism, as compared to a corresponding non-transformed wild type non-human organism, is conferred in the process of the invention, if the activity of a polypeptide showing the activity of a aspartateammonia ligase, or if the activity of the polypeptide B3744, preferably represented by SEQ ID NO. 83658, or a homolog or fragment thereof, or if the activity of a polypeptide encoded by a nucleic acid molecule comprising the nucleic acid SEQ ID NO. 83657, preferably the coding region thereof, or a homolog or fragment thereof, e.g. derived from Escherichia coli, is increased or generated. For example the activity of a nucleic acid molecule or a polypeptide comprising the nucleic acid, preferably the coding region thereof, or polypeptide or the consensus sequence or the polypeptide motif, as depicted in Table I, II or IV, application No. 3, column 5 or 8 in the respective same line as the nucleic acid molecule SEQ ID NO. 83657 or polypeptide SEQ ID NO. 83658, respectively, or a homolog or a fragment thereof, is increased or generated, or if the activity aspartate-ammonia ligase is increased or generated in a non-human organism, like a microorganism or a plant cell, plant or part thereof, especially with plastidic localization, whereby the respective line discloses in column 7 asparagine. For example, an increase of the asparagine of at least 1 percent, particularly in a range of 36 to 2817-percent is conferred as compared to a corresponding non-transformed wild type non-human organism.

[22667] Accordingly, in one embodiment, an increase of glycine in a non-human organism, as compared to a corresponding non-transformed wild type non-human organism, is conferred in the process of the invention, if the activity of a polypeptide showing the activity of a dihydroxyacid dehydratase, or if the activity of the polypeptide B3771, preferably represented by SEQ ID NO. 10253, or a homolog or fragment thereof, or if the activity of a polypeptide encoded by a nucleic acid molecule comprising the nucleic acid SEQ ID NO. 10252, preferably the coding region thereof, or a homolog or fragment thereof, e.g. derived from Escherichia coli, is increased or generated. For example the activity of a nucleic acid molecule or a polypeptide comprising the nucleic acid, preferably the coding region thereof, or polypeptide or the consensus sequence or the polypeptide motif, as depicted in Table I, II or IV, application No. 3, column 5 or 8 in the respective same line as the nucleic acid molecule SEQ ID NO. 10252 or polypeptide SEQ ID NO. 10253, respectively, or a homolog or a fragment thereof, is increased or generated, or if the activity dihydroxyacid dehydratase is increased or generated in a non-human organism, like a microorganism or a plant cell, plant or part thereof, especially with non-targeted localization, whereby the respective line discloses in column 7 glycine. For example, an increase of the glycine of at least 1 percent, particularly in a range of 39 to 114-percent is conferred as compared to a corresponding non-transformed wild type non-human organism.

[22668] Accordingly, in one embodiment, an increase of phenylalanine in a non-human organism, as compared to a corresponding non-transformed wild type non-human organism, is conferred in the process of the invention, if the activity of a polypeptide showing the activity of a dihydroxyacid dehydratase, or if the activity of the polypeptide B3771, preferably represented by SEQ ID NO. 10253, or a homolog or fragment thereof, or if the activity of a polypeptide encoded by a nucleic acid molecule comprising the nucleic acid SEQ ID NO. 10252, preferably the coding region thereof, or a homolog or fragment thereof, e.g. derived from Escherichia coli, is increased or generated. For example the activity of a nucleic acid molecule or a polypeptide comprising the nucleic acid, preferably the coding region thereof, or polypeptide or the consensus sequence or the polypeptide motif, as depicted in Table I, II or IV, application No. 3, column 5 or 8 in the respective same line as the nucleic acid molecule SEQ ID NO. 10252 or polypeptide SEQ ID NO. 10253, respectively, or a homolog or a fragment thereof, is increased or generated, or if the activity dihydroxyacid dehydratase is increased or generated in a non-human organism, like a microorganism or a plant cell, plant or part thereof, especially with non-targeted localization, whereby the respective line discloses in column 7 phenylalanine. For example, an increase of the phenylalanine of at least 1 percent, particularly in a range of 69 to 81-percent is conferred as compared to a corresponding non-transformed wild type non-human organism.

[22669] Accordingly, in one embodiment, an increase of aspartate in a non-human organism, as compared to a corresponding non-transformed wild type non-human organism, is conferred in the process of the invention, if the activity of a polypeptide showing the activity of a b3791-protein, or if the activity of the polypeptide B3791, preferably represented by SEQ ID NO. 83727, or a homolog or fragment thereof, or if the activity of a polypeptide encoded by a nucleic acid molecule comprising the nucleic acid SEQ ID NO. 83726, preferably the coding region thereof, or a homolog or fragment thereof, e.g. derived from Escherichia coli, is increased or generated. For example the activity of a nucleic acid molecule or a polypeptide comprising the nucleic acid, preferably the coding region thereof, or polypeptide or the consensus sequence or the polypeptide motif, as depicted in Table I, II or IV, application No. 3, column 5 or 8 in the respective same line as the nucleic acid molecule SEQ ID NO. 83726 or polypeptide SEQ ID NO. 83727, respectively, or a homolog or a fragment thereof, is increased or generated, or if the activity b3791-protein is increased or generated in a non-human organism, like a microorganism or a plant cell, plant or part thereof, especially with non-targeted localization, whereby the respective line discloses in column 7 aspartate. For example, an increase of the aspartate of at least 1 percent, particularly in a range of 53 to 158-percent is conferred as compared to a corresponding non-transformed wild type non-human organism.

[22670] Accordingly, in one embodiment, an increase of 5-oxoproline in a non-human organism, as compared to a corresponding non-transformed wild type non-human organism, is conferred in the process of the invention, if the activity of a polypeptide showing the activity of a b3791-protein, or if the activity of the polypeptide B3791, preferably represented by SEQ ID NO. 83727, or a homolog or fragment thereof, or if the activity of a polypeptide encoded by a nucleic acid molecule comprising the nucleic acid SEQ ID NO. 83726, preferably the coding region thereof, or a homolog or fragment thereof, e.g. derived from Escherichia coli, is increased or generated. For example the activity of a nucleic acid molecule or a polypeptide comprising the nucleic acid, preferably the coding region thereof, or polypeptide or the consensus sequence or the polypeptide motif, as depicted in Table I, II or IV, application No. 3, column 5 or 8 in the respective same line as the nucleic acid molecule SEQ ID NO. 83726 or polypeptide SEQ ID NO. 83727, respectively, or a homolog or a fragment thereof, is increased or generated, or if the activity b3791-protein is increased or generated in a non-human organism, like a microorganism or a plant cell, plant or part thereof, especially with non-targeted localization, whereby the respective line discloses in column 7 5-oxoproline. For example, an increase of the 5-oxoproline of at least 1 percent, particularly in a range of 39 to 117-percent is conferred as compared to a corresponding non-transformed wild type non-human organism.

[22671] Accordingly, in one embodiment, an increase of phenylalanine in a non-human organism, as compared to a corresponding non-transformed wild type non-human organism, is conferred in the process of the invention, if the activity of a polypeptide showing the activity of a enterobacterial common antigen polymerase, or if the activity of the polypeptide B3793, preferably represented by SEQ ID NO. 43801, or a homolog or fragment thereof, or if the activity of a polypeptide encoded by a nucleic acid molecule comprising the nucleic acid SEQ ID NO. 43800, preferably the coding region thereof, or a homolog or fragment thereof, e.g. derived from Escherichia coli, is increased or generated. For example the activity of a nucleic acid molecule or a polypeptide comprising the nucleic acid, preferably the coding region thereof, or polypeptide or the consensus sequence or the polypeptide motif, as depicted in Table I, II or IV, application No. 3, column 5 or 8 in the respective same line as the nucleic acid molecule SEQ ID NO. 43800 or polypeptide SEQ ID NO. 43801, respectively, or a homolog or a fragment thereof, is increased or generated, or if the activity enterobacterial common antigen polymerase is increased or generated in a non-human organism, like a microorganism or a plant cell, plant or part thereof, especially with non-targeted localization, whereby the respective line discloses in column 7 phenylalanine. For example, an increase of the phenylalanine of at least 1 percent, particularly in a range of 26 to 438-percent is conferred as compared to a corresponding non-transformed wild type non-human organism.

[22672] Accordingly, in one embodiment, an increase of phenylalanine in a non-human organism, as compared to a corresponding non-transformed wild type non-human organism, is conferred in the process of the invention, if the activity of a polypeptide showing the activity of a DNA helicase II, or if the activity of the polypeptide B3813, preferably represented by SEQ ID NO. 43840, or a homolog or fragment thereof, or if the activity of a polypeptide encoded by a nucleic acid molecule comprising the nucleic acid SEQ ID NO. 43839, preferably the coding region thereof, or a homolog or fragment thereof, e.g. derived from Escherichia coli, is increased or generated. For example the activity of a nucleic acid molecule or a polypeptide comprising the nucleic acid, preferably the coding region thereof, or polypeptide or the consensus sequence or the polypeptide motif, as depicted in Table I, II or IV, application No. 3, column 5 or 8 in the respective same line as the nucleic acid molecule SEQ ID NO. 43839 or polypeptide SEQ ID NO. 43840, respectively, or a homolog or a fragment thereof, is increased or generated, or if the activity DNA helicase II is increased or generated in a non-human organism, like a microorganism or a plant cell, plant or part thereof, especially with non-targeted localization, whereby the respective line discloses in column 7 phenylalanine. For example, an increase of the phenylalanine of at least 1 percent, particularly in a range of 34 to 85-percent is conferred as compared to a corresponding non-transformed wild type non-human organism.

[22673] Accordingly, in one embodiment, an increase of citrulline in a non-human organism, as compared to a corresponding non-transformed wild type non-human organism, is conferred in the process of the invention, if the activity of a polypeptide showing the activity of a b3814-protein, or if the activity of the polypeptide B3814, preferably represented by SEQ ID NO. 44197, or a homolog or fragment thereof, or if the activity of a polypeptide encoded by a nucleic acid molecule comprising the nucleic acid SEQ ID NO. 44196, preferably the coding region thereof, or a homolog or fragment thereof, e.g. derived from Escherichia coli, is increased or generated. For example the activity of a nucleic acid molecule or a polypeptide comprising the nucleic acid, preferably the coding region thereof, or polypeptide or the consensus sequence or the polypeptide motif, as depicted in Table I, II or IV, application No. 3, column 5 or 8 in the respective same line as the nucleic acid molecule SEQ ID NO. 44196 or polypeptide SEQ ID NO. 44197, respectively, or a homolog or a fragment thereof, is increased or generated, or if the activity b3814-protein is increased or generated in a non-human organism, like a microorganism or a plant cell, plant or part thereof, especially with non-targeted localization, whereby the respective line discloses in column 7 citrulline. For example, an increase of the citrulline of at least 1 percent, particularly in a range of 30 to 124-percent is conferred as compared to a corresponding non-transformed wild type non-human organism.

[22674] Accordingly, in one embodiment, an increase of alanine in a non-human organism, as compared to a corresponding non-transformed wild type non-human organism, is conferred in the process of the invention, if the activity of a polypeptide showing the activity of a transcriptional regulator, or if the activity of the polypeptide B3872, preferably represented by SEQ ID NO. 83822, or a homolog or fragment thereof, or if the activity of a polypeptide encoded by a nucleic acid molecule comprising the nucleic acid SEQ ID NO. 83821, preferably the coding region thereof, or a homolog or fragment thereof, e.g. derived from Escherichia coli, is increased or generated. For example the activity of a nucleic acid molecule or a polypeptide comprising the nucleic acid, preferably the coding region thereof, or polypeptide or the consensus sequence or the polypeptide motif, as depicted in Table I, II or IV, application No. 3, column 5 or 8 in the respective same line as the nucleic acid molecule SEQ ID NO. 83821 or polypeptide SEQ ID NO. 83822, respectively, or a homolog or a fragment thereof, is increased or generated, or if the activity transcriptional regulator is increased or generated in a non-human organism, like a microorganism or a plant cell, plant or part thereof, especially with non-targeted localization, whereby the respective line discloses in column 7 alanine. For example, an increase of the alanine of at least 1 percent, particularly in a range of 20 to 44-percent is conferred as compared to a corresponding non-transformed wild type non-human organism.

[22675] Accordingly, in one embodiment, an increase of aspartate in a non-human organism, as compared to a corresponding non-transformed wild type non-human organism, is conferred in the process of the invention, if the activity of a polypeptide showing the activity of a transcriptional regulator, or if the activity of the polypeptide B3872, preferably represented by SEQ ID NO. 83822, or a homolog or fragment thereof, or if the activity of a polypeptide encoded by a nucleic acid molecule comprising the nucleic acid SEQ ID NO. 83821, preferably the coding region thereof, or a homolog or fragment thereof, e.g. derived from Escherichia coli, is increased or generated. For example the activity of a nucleic acid molecule or a polypeptide comprising the nucleic acid, preferably the coding region thereof, or polypeptide or the consensus sequence or the polypeptide motif, as depicted in Table I, II or IV, application No. 3, column 5 or 8 in the respective same line as the nucleic acid molecule SEQ ID NO. 83821 or polypeptide SEQ ID NO. 83822, respectively, or a homolog or a fragment thereof, is increased or generated, or if the activity transcriptional regulator is increased or generated in a non-human organism, like a microorganism or a plant cell, plant or part thereof, especially with plastidic localization, whereby the respective line discloses in column 7 aspartate. For example, an increase of the aspartate of at least 1 percent, particularly in a range of 55 to 96-percent is conferred as compared to a corresponding non-transformed wild type non-human organism.

[22676] Accordingly, in one embodiment, an increase of serine in a non-human organism, as compared to a corresponding non-transformed wild type non-human organism, is conferred in the process of the invention, if the activity of a polypeptide showing the activity of a transcriptional regulator, or if the activity of the polypeptide B3872, preferably represented by SEQ ID NO. 83822, or a homolog or fragment thereof, or if the activity of a polypeptide encoded by a nucleic acid molecule comprising the nucleic acid SEQ ID NO. 83821, preferably the coding region thereof, or a homolog or fragment thereof, e.g. derived from Escherichia coli, is increased or generated. For example the activity of a nucleic acid molecule or a polypeptide comprising the nucleic acid, preferably the coding region thereof, or polypeptide or the consensus sequence or the polypeptide motif, as depicted in Table I, II or IV, application No. 3, column 5 or 8 in the respective same line as the nucleic acid molecule SEQ ID NO. 83821 or polypeptide SEQ ID NO. 83822, respectively, or a homolog or a fragment thereof, is increased or generated, or if the activity transcriptional regulator is increased or generated in a non-human organism, like a microorganism or a plant cell, plant or part thereof, especially with non-targeted localization, whereby the respective line discloses in column 7 serine. For example, an increase of the serine of at least 1 percent, particularly in a range of 36 to 59-percent is conferred as compared to a corresponding non-transformed wild type non-human organism.

[22677] Accordingly, in one embodiment, an increase of tyrosine in a non-human organism, as compared to a corresponding non-transformed wild type non-human organism, is conferred in the process of the invention, if the activity of a polypeptide showing the activity of a transcriptional regulator, or if the activity of the polypeptide B3872, preferably represented by SEQ ID NO. 83822, or a homolog or fragment thereof, or if the activity of a polypeptide encoded by a nucleic acid molecule comprising the nucleic acid SEQ ID NO. 83821, preferably the coding region thereof, or a homolog or fragment thereof, e.g. derived from Escherichia coli, is increased or generated. For example the activity of a nucleic acid molecule or a polypeptide comprising the nucleic acid, preferably the coding region thereof, or polypeptide or the consensus sequence or the polypeptide motif, as depicted in Table I, II or IV, application No. 3, column 5 or 8 in the respective same line as the nucleic acid molecule SEQ ID NO. 83821 or polypeptide SEQ ID NO. 83822, respectively, or a homolog or a fragment thereof, is increased or generated, or if the activity transcriptional regulator is increased or generated in a non-human organism, like a microorganism or a plant cell, plant or part thereof, especially with non-targeted localization, whereby the respective line discloses in column 7 tyrosine. For example, an increase of the tyrosine of at least 1 percent, particularly in a range of 35 to 54-percent is conferred as compared to a corresponding non-transformed wild type non-human organism.

[22678] Accordingly, in one embodiment, an increase of phenylalanine in a non-human organism, as compared to a corresponding non-transformed wild type non-human organism, is conferred in the process of the invention, if the activity of a polypeptide showing the activity of a b3989-protein, or if the activity of the polypeptide B3989, preferably represented by SEQ ID NO. 44373, or a homolog or fragment thereof, or if the activity of a polypeptide encoded by a nucleic acid molecule comprising the nucleic acid SEQ ID NO. 44372, preferably the coding region thereof, or a homolog or fragment thereof, e.g. derived from Escherichia coli, is increased or generated. For example the activity of a nucleic acid molecule or a polypeptide comprising the nucleic acid, preferably the coding region thereof, or polypeptide or the consensus sequence or the polypeptide motif, as depicted in Table I, II or IV, application No. 3, column 5 or 8 in the respective same line as the nucleic acid molecule SEQ ID NO. 44372 or polypeptide SEQ ID NO. 44373, respectively, or a homolog or a fragment thereof, is increased or generated, or if the activity b3989-protein is increased or generated in a non-human organism, like a microorganism or a plant cell, plant or part thereof, especially with non-targeted localization, whereby the respective line discloses in column 7 phenylalanine. For example, an increase of the phenylalanine of at least 1 percent, particularly in a range of 25 to 1035-percent is conferred as compared to a corresponding non-transformed wild type non-human organism.

[22679] Accordingly, in one embodiment, an increase of tyrosine in a non-human organism, as compared to a corresponding non-transformed wild type non-human organism, is conferred in the process of the invention, if the activity of a polypeptide showing the activity of a b3989-protein, or if the activity of the polypeptide B3989, preferably represented by SEQ ID NO. 44373, or a homolog or fragment thereof, or if the activity of a polypeptide encoded by a nucleic acid molecule comprising the nucleic acid SEQ ID NO. 44372, preferably the coding region thereof, or a homolog or fragment thereof, e.g. derived from Escherichia coli, is increased or generated. For example the activity of a nucleic acid molecule or a polypeptide comprising the nucleic acid, preferably the coding region thereof, or polypeptide or the consensus sequence or the polypeptide motif, as depicted in Table I, II or IV, application No. 3, column 5 or 8 in the respective same line as the nucleic acid molecule SEQ ID NO. 44372 or polypeptide SEQ ID NO. 44373, respectively, or a homolog or a fragment thereof, is increased or generated, or if the activity b3989-protein is increased or generated in a non-human organism, like a microorganism or a plant cell, plant or part thereof, especially with non-targeted localization, whereby the respective line discloses in column 7 tyrosine. For example, an increase of the tyrosine of at least 1 percent, particularly in a range of 46 to 762-percent is conferred as compared to a corresponding non-transformed wild type non-human organism.

[22680] Accordingly, in one embodiment, an increase of aspartate in a non-human organism, as compared to a corresponding non-transformed wild type non-human organism, is conferred in the process of the invention, if the activity of a polypeptide showing the activity of a acetyltransferase, or if the activity of the polypeptide B4012, preferably represented by SEQ ID NO. 44379, or a homolog or fragment thereof, or if the activity of a polypeptide encoded by a nucleic acid molecule comprising the nucleic acid SEQ ID NO. 44378, preferably the coding region thereof, or a homolog or fragment thereof, e.g. derived from Escherichia coli, is increased or generated. For example the activity of a nucleic acid molecule or a polypeptide comprising the nucleic acid, preferably the coding region thereof, or polypeptide or the consensus sequence or the polypeptide motif, as depicted in Table I, II or IV, application No. 3, column 5 or 8 in the respective same line as the nucleic acid molecule SEQ ID NO. 44378 or polypeptide SEQ ID NO. 44379, respectively, or a homolog or a fragment thereof, is increased or generated, or if the activity acetyltransferase is increased or generated in a non-human organism, like a microorganism or a plant cell, plant or part thereof, especially with non-targeted localization, whereby the respective line discloses in column 7 aspartate. For example, an increase of the aspartate of at least 1 percent, particularly in a range of 51 to 282-percent is conferred as compared to a corresponding non-transformed wild type non-human organism.

[22681] Accordingly, in one embodiment, an increase of 5-oxoproline in a non-human organism, as compared to a corresponding non-transformed wild type non-human organism, is conferred in the process of the invention, if the activity of a polypeptide showing the activity of a acetyltransferase, or if the activity of the polypeptide B4012, preferably represented by SEQ ID NO. 44379, or a homolog or fragment thereof, or if the activity of a polypeptide encoded by a nucleic acid molecule comprising the nucleic acid SEQ ID NO. 44378, preferably the coding region thereof, or a homolog or fragment thereof, e.g. derived from Escherichia coli, is increased or generated. For example the activity of a nucleic acid molecule or a polypeptide comprising the nucleic acid, preferably the coding region thereof, or polypeptide or the consensus sequence or the polypeptide motif, as depicted in Table I, II or IV, application No. 3, column 5 or 8 in the respective same line as the nucleic acid molecule SEQ ID NO. 44378 or polypeptide SEQ ID NO. 44379, respectively, or a homolog or a fragment thereof, is increased or generated, or if the activity acetyltransferase is increased or generated in a non-human organism, like a microorganism or a plant cell, plant or part thereof, especially with non-targeted localization, whereby the respective line discloses in column 7 5-oxoproline. For example, an increase of the 5-oxoproline of at least 1 percent, particularly in a range of 33 to 47-percent is conferred as compared to a corresponding non-transformed wild type non-human organism.

[22682] Accordingly, in one embodiment, an increase of glycine in a non-human organism, as compared to a corresponding non-transformed wild type non-human organism, is conferred in the process of the invention, if the activity of a polypeptide showing the activity of a aspartate kinase, or if the activity of the polypeptide B4024, preferably represented by SEQ ID NO. 83836, or a homolog or fragment thereof, or if the activity of a polypeptide encoded by a nucleic acid molecule comprising the nucleic acid SEQ ID NO. 83835, preferably the coding region thereof, or a homolog or fragment thereof, e.g. derived from Escherichia coli, is increased or generated. For example the activity of a nucleic acid molecule or a polypeptide comprising the nucleic acid, preferably the coding region thereof, or polypeptide or the consensus sequence or the polypeptide motif, as depicted in Table I, II or IV, application No. 3, column 5 or 8 in the respective same line as the nucleic acid molecule SEQ ID NO. 83835 or polypeptide SEQ ID NO. 83836, respectively, or a homolog or a fragment thereof, is increased or generated, or if the activity aspartate kinase is increased or generated in a non-human organism, like a microorganism or a plant cell, plant or part thereof, especially with plastidic localization, whereby the respective line discloses in column 7 glycine. For example, an increase of the glycine of at least 1 percent, partitularly in a range of 210 to 262-percent is conferred as compared to a corresponding non-transformed wild type non-human organism.

[22683] Accordingly, in one embodiment, an increase of serine in a non-human organism, as compared to a corresponding non-transformed wild type non-human organism, is conferred in the process of the invention, if the activity of a polypeptide showing the activity of a aspartate kinase, or if the activity of the polypeptide B4024, preferably represented by SEQ ID NO. 83836, or a homolog or fragment thereof, or if the activity of a polypeptide encoded by a nucleic acid molecule comprising the nucleic acid SEQ ID NO. 83835, preferably the coding region thereof, or a homolog or fragment thereof, e.g. derived from Escherichia coli, is increased or generated. For example the activity of a nucleic acid molecule or a polypeptide comprising the nucleic acid, preferably the coding region thereof, or polypeptide or the consensus sequence or the polypeptide motif, as depicted in Table I, II or IV, application No. 3, column 5 or 8 in the respective same line as the nucleic acid molecule SEQ ID NO. 83835 or polypeptide SEQ ID NO. 83836, respectively, or a homolog or a fragment thereof, is increased or generated, or if the activity aspartate kinase is increased or generated in a non-human organism, like a microorganism or a plant cell, plant or part thereof, especially with plastidic localization, whereby the respective line discloses in column 7 serine. For example, an increase of the serine of at least 1 percent, particularly in a range of 35 to 399-percent is conferred as compared to a corresponding non-transformed wild type non-human organism.

[22684] Accordingly, in one embodiment, an increase of alanine in a non-human organism, as compared to a corresponding non-transformed wild type non-human organism, is conferred in the process of the invention, if the activity of a polypeptide showing the activity of a b4029-protein, or if the activity of the polypeptide B4029, preferably represented by SEQ ID NO. 10741, or a homolog or fragment thereof, or if the activity of a polypeptide encoded by a nucleic acid molecule comprising the nucleic acid SEQ ID NO. 10740, preferably the coding region thereof, or a homolog or fragment thereof, e.g. derived from Escherichia coli, is increased or generated. For example the activity of a nucleic acid molecule or a polypeptide comprising the nucleic acid, preferably the coding region thereof, or polypeptide or the consensus sequence or the polypeptide motif, as depicted in Table I, II or IV, application No. 3, column 5 or 8 in the respective same line as the nucleic acid molecule SEQ ID NO. 10740 or polypeptide SEQ ID NO. 10741, respectively, or a homolog or a fragment thereof, is increased or generated, or if the activity b4029-protein is increased or generated in a non-human organism, like a microorganism or a plant cell, plant or part thereof, especially with non-targeted localization, whereby the respective line discloses in column 7 alanine. For example, an increase of the alanine of at least 1 percent, particularly in a range of 22 to 775-percent is conferred as compared to a corresponding non-transformed wild type non-human organism.

[22685] Accordingly, in one embodiment, an increase of aspartate in a non-human organism, as compared to a corresponding non-transformed wild type non-human organism, is conferred in the process of the invention, if the activity of a polypeptide showing the activity of a b4029-protein, or if the activity of the polypeptide B4029, preferably represented by SEQ ID NO. 10741, or a homolog or fragment thereof, or if the activity of a polypeptide encoded by a nucleic acid molecule comprising the nucleic acid SEQ ID NO. 10740, preferably the coding region thereof, or a homolog or fragment thereof, e.g. derived from Escherichia coli, is increased or generated. For example the activity of a nucleic acid molecule or a polypeptide comprising the nucleic acid, preferably the coding region thereof, or polypeptide or the consensus sequence or the polypeptide motif, as depicted in Table I, II or IV, application No. 3, column 5 or 8 in the respective same line as the nucleic acid molecule SEQ ID NO. 10740 or polypeptide SEQ ID NO. 10741, respectively, or a homolog or a fragment thereof, is increased or generated, or if the activity b4029-protein is increased or generated in a non-human organism, like a microorganism or a plant cell, plant or part thereof, especially with non-targeted localization, whereby the respective line discloses in column 7 aspartate. For example, an increase of the aspartate of at least 1 percent, particularly in a range of 59 to 231-percent is conferred as compared to a corresponding non-transformed wild type non-human organism.

[22686] Accordingly, in one embodiment, an increase of glycine in a non-human organism, as compared to a corresponding non-transformed wild type non-human organism, is conferred in the process of the invention, if the activity of a polypeptide showing the activity of a b4029-protein, or if the activity of the polypeptide B4029, preferably represented by SEQ ID NO. 10741, or a homolog or fragment thereof, or if the activity of a polypeptide encoded by a nucleic acid molecule comprising the nucleic acid SEQ ID NO. 10740, preferably the coding region thereof, or a homolog or fragment thereof, e.g. derived from Escherichia coli, is increased or generated. For example the activity of a nucleic acid molecule or a polypeptide comprising the nucleic acid, preferably the coding region thereof, or polypeptide or the consensus sequence or the polypeptide motif, as depicted in Table I, II or IV, application No. 3, column 5 or 8 in the respective same line as the nucleic acid molecule SEQ ID NO. 10740 or polypeptide SEQ ID NO. 10741, respectively, or a homolog or a fragment thereof, is increased or generated, or if the activity b4029-protein is increased or generated in a non-human organism, like a microorganism or a plant cell, plant or part thereof, especially with non-targeted localization, whereby the respective line discloses in column 7 glycine. For example, an increase of the glycine of at least 1 percent, particularly in a range of 39 to 590-percent is conferred as compared to a corresponding non-transformed wild type non-human organism.

[22687] Accordingly, in one embodiment, an increase of phenylalanine in a non-human organism, as compared to a corresponding non-transformed wild type non-human organism, is conferred in the process of the invention, if the activity of a polypeptide showing the activity of a b4029-protein, or if the activity of the polypeptide B4029, preferably represented by SEQ ID NO. 10741, or a homolog or fragment thereof, or if the activity of a polypeptide encoded by a nucleic acid molecule comprising the nucleic acid SEQ ID NO. 10740, preferably the coding region thereof, or a homolog or fragment thereof, e.g. derived from Escherichia coli, is increased or generated. For example the activity of a nucleic acid molecule or a polypeptide comprising the nucleic acid, preferably the coding region thereof, or polypeptide or the consensus sequence or the polypeptide motif, as depicted in Table I, II or IV, application No. 3, column 5 or 8 in the respective same line as the nucleic acid molecule SEQ ID NO. 10740 or polypeptide SEQ ID NO. 10741, respectively, or a homolog or a fragment thereof, is increased or generated, or if the activity b4029-protein is increased or generated in a non-human organism, like a microorganism or a plant cell, plant or part thereof, especially with non-targeted localization, whereby the respective line discloses in column 7 phenylalanine. For example, an increase of the phenylalanine of at least 1 percent, particularly in a range of 28 to 2010-percent is conferred as compared to a corresponding non-transformed wild type non-human organism.

[22688] Accordingly, in one embodiment, an increase of serine in a non-human organism, as compared to a corresponding non-transformed wild type non-human organism, is conferred in the process of the invention, if the activity of a polypeptide showing the activity of a b4029-protein, or if the activity of the polypeptide B4029, preferably represented by SEQ ID NO. 10741, or a homolog or fragment thereof, or if the activity of a polypeptide encoded by a nucleic acid molecule comprising the nucleic acid SEQ ID NO. 10740, preferably the coding region thereof, or a homolog or fragment thereof, e.g. derived from Escherichia coli, is increased or generated. For example the activity of a nucleic acid molecule or a polypeptide comprising the nucleic acid, preferably the coding region thereof, or polypeptide or the consensus sequence or the polypeptide motif, as depicted in Table I, II or IV, application No. 3, column 5 or 8 in the respective same line as the nucleic acid molecule SEQ ID NO. 10740 or polypeptide SEQ ID NO. 10741, respectively, or a homolog or a fragment thereof, is increased or generated, or if the activity b4029-protein is increased or generated in a non-human organism, like a microorganism or a plant cell, plant or part thereof, especially with non-targeted localization, whereby the respective line discloses in column 7 serine. For example, an increase of the serine of at least 1 percent, particularly in a range of 28 to 177-percent is conferred as compared to a corresponding non-transformed wild type non-human organism.

[22689] Accordingly, in one embodiment, an increase of tyrosine in a non-human organism, as compared to a corresponding non-transformed wild type non-human organism, is conferred in the process of the invention, if the activity of a polypeptide showing the activity of a b4029-protein, or if the activity of the polypeptide B4029, preferably represented by SEQ ID NO. 10741, or a homolog or fragment thereof, or if the activity of a polypeptide encoded by a nucleic acid molecule comprising the nucleic acid SEQ ID NO. 10740, preferably the coding region thereof, or a homolog or fragment thereof, e.g. derived from Escherichia coli, is increased or generated. For example the activity of a nucleic acid molecule or a polypeptide comprising the nucleic acid, preferably the coding region thereof, or polypeptide or the consensus sequence or the polypeptide motif, as depicted in Table I, II or IV, application No. 3, column 5 or 8 in the respective same line as the nucleic acid molecule SEQ ID NO. 10740 or polypeptide SEQ ID NO. 10741, respectively, or a homolog or a fragment thereof, is increased or generated, or if the activity b4029-protein is increased or generated in a non-human organism, like a microorganism or a plant cell, plant or part thereof, especially with non-targeted localization, whereby the respective line discloses in column 7 tyrosine. For example, an increase of the tyrosine of at least 1 percent, particularly in a range of 36 to 3270-percent is conferred as compared to a corresponding non-transformed wild type non-human organism.

[22690] Accordingly, in one embodiment, an increase of 5-oxoproline in a non-human organism, as compared to a corresponding non-transformed wild type non-human organism, is conferred in the process of the invention, if the activity of a polypeptide showing the activity of a b4029-protein, or if the activity of the polypeptide B4029, preferably represented by SEQ ID NO. 10741, or a homolog or fragment thereof, or if the activity of a polypeptide encoded by a nucleic acid molecule comprising the nucleic acid SEQ ID NO. 10740, preferably the coding region thereof, or a homolog or fragment thereof, e.g. derived from Escherichia coli, is increased or generated. For example the activity of a nucleic acid molecule or a polypeptide comprising the nucleic acid, preferably the coding region thereof, or polypeptide or the consensus sequence or the polypeptide motif, as depicted in Table I, II or IV, application No. 3, column 5 or 8 in the respective same line as the nucleic acid molecule SEQ ID NO. 10740 or polypeptide SEQ ID NO. 10741, respectively, or a homolog or a fragment thereof, is increased or generated, or if the activity b4029-protein is increased or generated in a non-human organism, like a microorganism or a plant cell, plant or part thereof, especially with non-targeted localization, whereby the respective line discloses in column 7 5-oxoproline. For example, an increase of the 5-oxoproline of at least 1 percent, particularly in a range of 44 to 367-percent is conferred as compared to a corresponding non-transformed wild type non-human organism.

[22691] Accordingly, in one embodiment, an increase of serine in a non-human organism, as compared to a corresponding non-transformed wild type non-human organism, is conferred in the process of the invention, if the activity of a polypeptide showing the activity of a b4121-protein, or if the activity of the polypeptide B4121, preferably represented by SEQ ID NO. 44610, or a homolog or fragment thereof, or if the activity of a polypeptide encoded by a nucleic acid molecule comprising the nucleic acid SEQ ID NO. 44609, preferably the coding region thereof, or a homolog or fragment thereof, e.g. derived from Escherichia coli, is increased or generated. For example the activity of a nucleic acid molecule or a polypeptide comprising the nucleic acid, preferably the coding region thereof, or polypeptide or the consensus sequence or the polypeptide motif, as depicted in Table I, II or IV, application No. 3, column 5 or 8 in the respective same line as the nucleic acid molecule SEQ ID NO. 44609 or polypeptide SEQ ID NO. 44610, respectively, or a homolog or a fragment thereof, is increased or generated, or if the activity b4121-protein is increased or generated in a non-human organism, like a microorganism or a plant cell, plant or part thereof, especially with non-targeted localization, whereby the respective line discloses in column 7 serine. For example, an increase of the serine of at least 1 percent, particularly in a range of 23 to 92-percent is conferred as compared to a corresponding non-transformed wild type non-human organism.

[22692] Accordingly, in one embodiment, an increase of aspartate in a non-human organism, as compared to a corresponding non-transformed wild type non-human organism, is conferred in the process of the invention, if the activity of a polypeptide showing the activity of a acetyltransferase, or if the activity of the polypeptide B4256, preferably represented by SEQ ID NO. 45322, or a homolog or fragment thereof, or if the activity of a polypeptide encoded by a nucleic acid molecule comprising the nucleic acid SEQ ID NO. 45321, preferably the coding region thereof, or a homolog or fragment thereof, e.g. derived from Escherichia coli, is increased or generated. For example the activity of a nucleic acid molecule or a polypeptide comprising the nucleic acid, preferably the coding region thereof, or polypeptide or the consensus sequence or the polypeptide motif, as depicted in Table I, II or IV, application No. 3, column 5 or 8 in the respective same line as the nucleic acid molecule SEQ ID NO. 45321 or polypeptide SEQ ID NO. 45322, respectively, or a homolog or a fragment thereof, is increased or generated, or if the activity acetyltransferase is increased or generated in a non-human organism, like a microorganism or a plant cell, plant or part thereof, especially with non-targeted localization, whereby the respective line discloses in column 7 aspartate. For example, an increase of the aspartate of at least 1 percent, particularly in a range of 56 to 155-percent is conferred as compared to a corresponding non-transformed wild type non-human organism.

[22693] Accordingly, in one embodiment, an increase of phenylalanine in a non-human organism, as compared to a corresponding non-transformed wild type non-human organism, is conferred in the process of the invention, if the activity of a polypeptide showing the activity of a acetyltransferase, or if the activity of the polypeptide B4256, preferably represented by SEQ ID NO. 45322, or a homolog or fragment thereof, or if the activity of a polypeptide encoded by a nucleic acid molecule comprising the nucleic acid SEQ ID NO. 45321, preferably the coding region thereof, or a homolog or fragment thereof, e.g. derived from Escherichia coli, is increased or generated. For example the activity of a nucleic acid molecule or a polypeptide comprising the nucleic acid, preferably the coding region thereof, or polypeptide or the consensus sequence or the polypeptide motif, as depicted in Table I, II or IV, application No. 3, column 5 or 8 in the respective same line as the nucleic acid molecule SEQ ID NO. 45321 or polypeptide SEQ ID NO. 45322, respectively, or a homolog or a fragment thereof, is increased or generated, or if the activity acetyltransferase is increased or generated in a non-human organism, like a microorganism or a plant cell, plant or part thereof, especially with non-targeted localization, whereby the respective line discloses in column 7 phenylalanine. For example, an increase of the phenylalanine of at least 1 percent, particularly in a range of 29 to 242-percent is conferred as compared to a corresponding non-transformed wild type non-human organism.

[22694] Accordingly, in one embodiment, an increase of serine in a non-human organism, as compared to a corresponding non-transformed wild type non-human organism, is conferred in the process of the invention, if the activity of a polypeptide showing the activity of a acetyltransferase, or if the activity of the polypeptide B4256, preferably represented by SEQ ID NO. 45322, or a homolog or fragment thereof, or if the activity of a polypeptide encoded by a nucleic acid molecule comprising the nucleic acid SEQ ID NO. 45321, preferably the coding region thereof, or a homolog or fragment thereof, e.g. derived from Escherichia coli, is increased or generated. For example the activity of a nucleic acid molecule or a polypeptide comprising the nucleic acid, preferably the coding region thereof, or polypeptide or the consensus sequence or the polypeptide motif, as depicted in Table I, II or IV, application No. 3, column 5 or 8 in the respective same line as the nucleic acid molecule SEQ ID NO. 45321 or polypeptide SEQ ID NO. 45322, respectively, or a homolog or a fragment thereof, is increased or generated, or if the activity acetyltransferase is increased or generated in a non-human organism, like a microorganism or a plant cell, plant or part thereof, especially with non-targeted localization, whereby the respective line discloses in column 7 serine. For example, an increase of the serine of at least 1 percent, particularly in a range of 31 to 227-percent is conferred as compared to a corresponding non-transformed wild type non-human organism.

[22695] Accordingly, in one embodiment, an increase of tyrosine in a non-human organism, as compared to a corresponding non-transformed wild type non-human organism, is conferred in the process of the invention, if the activity of a polypeptide showing the activity of a acetyltransferase, or if the activity of the polypeptide B4256, preferably represented by SEQ ID NO. 45322, or a homolog or fragment thereof, or if the activity of a polypeptide encoded by a nucleic acid molecule comprising the nucleic acid SEQ ID NO. 45321, preferably the coding region thereof, or a homolog or fragment thereof, e.g. derived from Escherichia coli, is increased or generated. For example the activity of a nucleic acid molecule or a polypeptide comprising the nucleic acid, preferably the coding region thereof, or polypeptide or the consensus sequence or the polypeptide motif, as depicted in Table I, II or IV, application No. 3, column 5 or 8 in the respective same line as the nucleic acid molecule SEQ ID NO. 45321 or polypeptide SEQ ID NO. 45322, respectively, or a homolog or a fragment thereof, is increased or generated, or if the activity acetyltransferase is increased or generated in a non-human organism, like a microorganism or a plant cell, plant or part thereof, especially with non-targeted localization, whereby the respective line discloses in column 7 tyrosine. For example, an increase of the tyrosine of at least 1 percent, particularly in a range of 151 to 280-percent is conferred as compared to a corresponding non-transformed wild type non-human organism.

[22696] Accordingly, in one embodiment, an increase of serine in a non-human organism, as compared to a corresponding non-transformed wild type non-human organism, is conferred in the process of the invention, if the activity of a polypeptide showing the activity of a thioredoxin, or if the activity of the polypeptide C_pp004096192r, preferably represented by SEQ ID NO. 45758, or a homolog or fragment thereof, or if the activity of a polypeptide encoded by a nucleic acid molecule comprising the nucleic acid SEQ ID NO. 45757, preferably the coding region thereof, or a homolog or fragment thereof, e.g. derived from Physcomitrella patens, is increased or generated. For example the activity of a nucleic acid molecule or a polypeptide comprising the nucleic acid, preferably the coding region thereof, or polypeptide or the consensus sequence or the polypeptide motif, as depicted in Table I, II or IV, application No. 3, column 5 or 8 in the respective same line as the nucleic acid molecule SEQ ID NO. 45757 or polypeptide SEQ ID NO. 45758, respectively, or a homolog or a fragment thereof, is increased or generated, or if the activity thioredoxin is increased or generated in a non-human organism, like a microorganism or a plant cell, plant or part thereof, especially with non-targeted localization, whereby the respective line discloses in column 7 serine. For example, an increase of the serine of at least 1 percent, particularly in a range of 32 to 75-percent is conferred as compared to a corresponding non-transformed wild type non-human organism.

[22697] Accordingly, in one embodiment, an increase of alanine in a non-human organism, as compared to a corresponding non-transformed wild type non-human organism, is conferred in the process of the invention, if the activity of a polypeptide showing the activity of a lysine decarboxylase, or if the activity of the polypeptide D90900, preferably represented by SEQ ID NO. 84080, or a homolog or fragment thereof, or if the activity of a polypeptide encoded by a nucleic acid molecule comprising the nucleic acid SEQ ID NO. 84079, preferably the coding region thereof, or a homolog or fragment thereof, e.g. derived from Synechocystis sp., is increased or generated. For example the activity of a nucleic acid molecule or a polypeptide comprising the nucleic acid, preferably the coding region thereof, or polypeptide or the consensus sequence or the polypeptide motif, as depicted in Table I, II or IV, application No. 3, column 5 or 8 in the respective same line as the nucleic acid molecule SEQ ID NO. 84079 or polypeptide SEQ ID NO. 84080, respectively, or a homolog or a fragment thereof, is increased or generated, or if the activity lysine decarboxylase is increased or generated in a non-human organism, like a microorganism or a plant cell, plant or part thereof, especially with plastidic localization, whereby the respective line discloses in column 7 alanine. For example, an increase of the alanine of at least 1 percent, particularly in a range of 20 to 34-percent is conferred as compared to a corresponding non-transformed wild type non-human organism.

[22698] Accordingly, in one embodiment, an increase of asparagine in a non-human organism, as compared to a corresponding non-transformed wild type non-human organism, is conferred in the process of the invention, if the activity of a polypeptide showing the activity of a GM02LC11114-protein, or if the activity of the polypeptide GM02LC11114, preferably represented by SEQ ID NO. 45796, or a homolog or fragment thereof, or if the activity of a polypeptide encoded by a nucleic acid molecule comprising the nucleic acid SEQ ID NO. 45795, preferably the coding region thereof, or a homolog or fragment thereof, e.g. derived from Glycine max, is increased or generated. For example the activity of a nucleic acid molecule or a polypeptide comprising the nucleic acid, preferably the coding region thereof, or polypeptide or the consensus sequence or the polypeptide motif, as depicted in Table I, II or IV, application No. 3, column 5 or 8 in the respective same line as the nucleic acid molecule SEQ ID NO. 45795 or polypeptide SEQ ID NO. 45796, respectively, or a homolog or a fragment thereof, is increased or generated, or if the activity GM02LC11114-protein is increased or generated in a non-human organism, like a microorganism or a plant cell, plant or part thereof, especially with non-targeted localization, whereby the respective line discloses in column 7 asparagine. For example, an increase of the asparagine of at least 1 percent, particularly in a range of 78 to 249-percent is conferred as compared to a corresponding non-transformed wild type non-human organism.

[22699] Accordingly, in one embodiment, an increase of phenylalanine in a non-human organism, as compared to a corresponding non-transformed wild type non-human organism, is conferred in the process of the invention, if the activity of a polypeptide showing the activity of a GM02LC11114-protein, or if the activity of the polypeptide GM02LC11114, preferably represented by SEQ ID NO. 45796, or a homolog or fragment thereof, or if the activity of a polypeptide encoded by a nucleic acid molecule comprising the nucleic acid SEQ ID NO. 45795, preferably the coding region thereof, or a homolog or fragment thereof, e.g. derived from Glycine max, is increased or generated. For example the activity of a nucleic acid molecule or a polypeptide comprising the nucleic acid, preferably the coding region thereof, or polypeptide or the consensus sequence or the polypeptide motif, as depicted in Table I, II or IV, application No. 3, column 5 or 8 in the respective same line as the nucleic acid molecule SEQ ID NO. 45795 or polypeptide SEQ ID NO. 45796, respectively, or a homolog or a fragment thereof, is increased or generated, or if the activity GM02LC11114-protein is increased or generated in a non-human organism, like a microorganism or a plant cell, plant or part thereof, especially with non-targeted localization, whereby the respective line discloses in column 7 phenylalanine. For example, an increase of the phenylalanine of at least 1 percent, particularly in a range of 44 to 76-percent is conferred as compared to a corresponding non-transformed wild type non-human organism.

[22700] Accordingly, in one embodiment, an increase of alanine in a non-human organism, as compared to a corresponding non-transformed wild type non-human organism, is conferred in the process of the invention, if the activity of a polypeptide showing the activity of a glutaredoxin, or if the activity of the polypeptide GM02LC12622, preferably represented by SEQ ID NO. 10812, or a homolog or fragment thereof, or if the activity of a polypeptide encoded by a nucleic acid molecule comprising the nucleic acid SEQ ID NO. 10811, preferably the coding region thereof, or a homolog or fragment thereof, e.g. derived from Glycine max, is increased or generated. For example the activity of a nucleic acid molecule or a polypeptide comprising the nucleic acid, preferably the coding region thereof, or polypeptide or the consensus sequence or the polypeptide motif, as depicted in Table I, II or IV, application No. 3, column 5 or 8 in the respective same line as the nucleic acid molecule SEQ ID NO. 10811 or polypeptide SEQ ID NO. 10812, respectively, or a homolog or a fragment thereof, is increased or generated, or if the activity glutaredoxin is increased or generated in a non-human organism, like a microorganism or a plant cell, plant or part thereof, especially with non-targeted localization, whereby the respective line discloses in column 7 alanine. For example, an increase of the alanine of at least 1 percent, particularly in a range of 21 to 46-percent is conferred as compared to a corresponding non-transformed wild type non-human organism.

[22701] Accordingly, in one embodiment, an increase of phenylalanine in a non-human organism, as compared to a corresponding non-transformed wild type non-human organism, is conferred in the process of the invention, if the activity of a polypeptide showing the activity of a glutaredoxin, or if the activity of the polypeptide GM02LC12622, preferably represented by SEQ ID NO. 10812, or a homolog or fragment thereof, or if the activity of a polypeptide encoded by a nucleic acid molecule comprising the nucleic acid SEQ ID NO. 10811, preferably the coding region thereof, or a homolog or fragment thereof, e.g. derived from Glycine max, is increased or generated. For example the activity of a nucleic acid molecule or a polypeptide comprising the nucleic acid, preferably the coding region thereof, or polypeptide or the consensus sequence or the polypeptide motif, as depicted in Table I, II or IV, application No. 3, column 5 or 8 in the respective same line as the nucleic acid molecule SEQ ID NO. 10811 or polypeptide SEQ ID NO. 10812, respectively, or a homolog or a fragment thereof, is increased or generated, or if the activity glutaredoxin is increased or generated in a non-human organism, like a microorganism or a plant cell, plant or part thereof, especially with non-targeted localization, whereby the respective line discloses in column 7 phenylalanine. For example, an increase of the phenylalanine of at least 1 percent, particularly in a range of 44 to 218-percent is conferred as compared to a corresponding non-transformed wild type non-human organism.

[22702] Accordingly, in one embodiment, an increase of tyrosine in a non-human organism, as compared to a corresponding non-transformed wild type non-human organism, is conferred in the process of the invention, if the activity of a polypeptide showing the activity of a glutaredoxin, or if the activity of the polypeptide GM02LC12622, preferably represented by SEQ ID NO. 10812, or a homolog or fragment thereof, or if the activity of a polypeptide encoded by a nucleic acid molecule comprising the nucleic acid SEQ ID NO. 10811, preferably the coding region thereof, or a homolog or fragment thereof, e.g. derived from Glycine max, is increased or generated. For example the activity of a nucleic acid molecule or a polypeptide comprising the nucleic acid, preferably the coding region thereof, or polypeptide or the consensus sequence or the polypeptide motif, as depicted in Table I, II or IV, application No. 3, column 5 or 8 in the respective same line as the nucleic acid molecule SEQ ID NO. 10811 or polypeptide SEQ ID NO. 10812, respectively, or a homolog or a fragment thereof, is increased or generated, or if the activity glutaredoxin is increased or generated in a non-human organism, like a microorganism or a plant cell, plant or part thereof, especially with non-targeted localization, whereby the respective line discloses in column 7 tyrosine. For example, an increase of the tyrosine of at least 1 percent, particularly in a range of 45 to 525-percent is conferred as compared to a corresponding non-transformed wild type non-human organism.

[22703] Accordingly, in one embodiment, an increase of phenylalanine in a non-human organism, as compared to a corresponding non-transformed wild type non-human organism, is conferred in the process of the invention, if the activity of a polypeptide showing the activity of a histone H2A, or if the activity of the polypeptide GM02LC15313, preferably represented by SEQ ID NO. 45898, or a homolog or fragment thereof, or if the activity of a polypeptide encoded by a nucleic acid molecule comprising the nucleic acid SEQ ID NO. 45897, preferably the coding region thereof, or a homolog or fragment thereof, e.g. derived from Glycine max, is increased or generated. For example the activity of a nucleic acid molecule or a polypeptide comprising the nucleic acid, preferably the coding region thereof, or polypeptide or the consensus sequence or the polypeptide motif, as depicted in Table I, II or IV, application No. 3, column 5 or 8 in the respective same line as the nucleic acid molecule SEQ ID NO. 45897 or polypeptide SEQ ID NO. 45898, respectively, or a homolog or a fragment thereof, is increased or generated, or if the activity histone H2A is increased or generated in a non-human organism, like a microorganism or a plant cell, plant or part thereof, especially with non-targeted localization, whereby the respective line discloses in column 7 phenylalanine. For example, an increase of the phenylalanine of at least 1 percent, particularly in a range of 32 to 137-percent is conferred as compared to a corresponding non-transformed wild type non-human organism.

[22704] Accordingly, in one embodiment, an increase of tyrosine in a non-human organism, as compared to a corresponding non-transformed wild type non-human organism, is conferred in the process of the invention, if the activity of a polypeptide showing the activity of a histone H2A, or if the activity of the polypeptide GM02LC15313, preferably represented by SEQ ID NO. 45898, or a homolog or fragment thereof, or if the activity of a polypeptide encoded by a nucleic acid molecule comprising the nucleic acid SEQ ID NO. 45897, preferably the coding region thereof, or a homolog or fragment thereof, e.g. derived from Glycine max, is increased or generated. For example the activity of a nucleic acid molecule or a polypeptide comprising the nucleic acid, preferably the coding region thereof, or polypeptide or the consensus sequence or the polypeptide motif, as depicted in Table I, II or IV, application No. 3, column 5 or 8 in the respective same line as the nucleic acid molecule SEQ ID NO. 45897 or polypeptide SEQ ID NO. 45898, respectively, or a homolog or a fragment thereof, is increased or generated, or if the activity histone H2A is increased or generated in a non-human organism, like a microorganism or a plant cell, plant or part thereof, especially with non-targeted localization, whereby the respective line discloses in column 7 tyrosine. For example, an increase of the tyrosine of at least 1 percent, particularly in a range of 53 to 84-percent is conferred as compared to a corresponding non-transformed wild type non-human organism.

[22705] Accordingly, in one embodiment, an increase of aspartate in a non-human organism, as compared to a corresponding non-transformed wild type non-human organism, is conferred in the process of the invention, if the activity of a polypeptide showing the activity of a GM02LC17485-protein, or if the activity of the polypeptide GM02LC17485, preferably represented by SEQ ID NO. 46406, or a homolog or fragment thereof, or if the activity of a polypeptide encoded by a nucleic acid molecule comprising the nucleic acid SEQ ID NO. 46405, preferably the coding region thereof, or a homolog or fragment thereof, e.g. derived from Glycine max, is increased or generated. For example the activity of a nucleic acid molecule or a polypeptide comprising the nucleic acid, preferably the coding region thereof, or polypeptide or the consensus sequence or the polypeptide motif, as depicted in Table I, II or IV, application No. 3, column 5 or 8 in the respective same line as the nucleic acid molecule SEQ ID NO. 46405 or polypeptide SEQ ID NO. 46406, respectively, or a homolog or a fragment thereof, is increased or generated, or if the activity GM02LC17485-protein is increased or generated in a non-human organism, like a microorganism or a plant cell, plant or part thereof, especially with non-targeted localization, whereby the respective line discloses in column 7 aspartate. For example, an increase of the aspartate of at least 1 percent, particularly in a range of 57 to 118-percent is conferred as compared to a corresponding non-transformed wild type non-human organism.

[22706] Accordingly, in one embodiment, an increase of phenylalanine in a non-human organism, as compared to a corresponding non-transformed wild type non-human organism, is conferred in the process of the invention, if the activity of a polypeptide showing the activity of a RNA binding protein, or if the activity of the polypeptide GM02LC17556, preferably represented by SEQ ID NO. 46516, or a homolog or fragment thereof, or if the activity of a polypeptide encoded by a nucleic acid molecule comprising the nucleic acid SEQ ID NO. 46515, preferably the coding region thereof, or a homolog or fragment thereof, e.g. derived from Glycine max, is increased or generated. For example the activity of a nucleic acid molecule or a polypeptide comprising the nucleic acid, preferably the coding region thereof, or polypeptide or the consensus sequence or the polypeptide motif, as depicted in Table I, II or IV, application No. 3, column 5 or 8 in the respective same line as the nucleic acid molecule SEQ ID NO. 46515 or polypeptide SEQ ID NO. 46516, respectively, or a homolog or a fragment thereof, is increased or generated, or if the activity RNA binding protein is increased or generated in a non-human organism, like a microorganism or a plant cell, plant or part thereof, especially with non-targeted localization, whereby the respective line discloses in column 7 phenylalanine. For example, an increase of the phenylalanine of at least 1 percent, particularly in a range of 26 to 179-percent is conferred as compared to a corresponding non-transformed wild type non-human organism.

[22707] Accordingly, in one embodiment, an increase of tyrosine in a non-human organism, as compared to a corresponding non-transformed wild type non-human organism, is conferred in the process of the invention, if the activity of a polypeptide showing the activity of a RNA binding protein, or if the activity of the polypeptide GM02LC17556, preferably represented by SEQ ID NO. 46516, or a homolog or fragment thereof, or if the activity of a polypeptide encoded by a nucleic acid molecule comprising the nucleic acid SEQ ID NO. 46515, preferably the coding region thereof, or a homolog or fragment thereof, e.g. derived from Glycine max, is increased or generated. For example the activity of a nucleic acid molecule or a polypeptide comprising the nucleic acid, preferably the coding region thereof, or polypeptide or the consensus sequence or the polypeptide motif, as depicted in Table I, II or IV, application No. 3, column 5 or 8 in the respective same line as the nucleic acid molecule SEQ ID NO. 46515 or polypeptide SEQ ID NO. 46516, respectively, or a homolog or a fragment thereof, is increased or generated, or if the activity RNA binding protein is increased or generated in a non-human organism, like a microorganism or a plant cell, plant or part thereof, especially with non-targeted localization, whereby the respective line discloses in column 7 tyrosine. For example, an increase of the tyrosine of at least 1 percent, particularly in a range of 48 to 179-percent is conferred as compared to a corresponding non-transformed wild type non-human organism.

[22708] Accordingly, in one embodiment, an increase of phenylalanine in a non-human organism, as compared to a corresponding non-transformed wild type non-human organism, is conferred in the process of the invention, if the activity of a polypeptide showing the activity of a transcription factor, or if the activity of the polypeptide GM02LC21368, preferably represented by SEQ ID NO. 84199, or a homolog or fragment thereof, or if the activity of a polypeptide encoded by a nucleic acid molecule comprising the nucleic acid SEQ ID NO. 84198, preferably the coding region thereof, or a homolog or fragment thereof, e.g. derived from Glycine max, is increased or generated. For example the activity of a nucleic acid molecule or a polypeptide comprising the nucleic acid, preferably the coding region thereof, or polypeptide or the consensus sequence or the polypeptide motif, as depicted in Table I, II or IV, application No. 3, column 5 or 8 in the respective same line as the nucleic acid molecule SEQ ID NO. 84198 or polypeptide SEQ ID NO. 84199, respectively, or a homolog or a fragment thereof, is increased or generated, or if the activity transcription factor is increased or generated in a non-human organism, like a microorganism or a plant cell, plant or part thereof, especially with non-targeted localization, whereby the respective line discloses in column 7 phenylalanine. For example, an increase of the phenylalanine of at least 1 percent, particularly in a range of 59 to 383-percent is conferred as compared to a corresponding non-transformed wild type non-human organism.

[22709] Accordingly, in one embodiment, an increase of serine in a non-human organism, as compared to a corresponding non-transformed wild type non-human organism, is conferred in the process of the invention, if the activity of a polypeptide showing the activity of a transcription factor, or if the activity of the polypeptide GM02LC21368, preferably represented by SEQ ID NO. 84199, or a homolog or fragment thereof, or if the activity of a polypeptide encoded by a nucleic acid molecule comprising the nucleic acid SEQ ID NO. 84198, preferably the coding region thereof, or a homolog or fragment thereof, e.g. derived from Glycine max, is increased or generated. For example the activity of a nucleic acid molecule or a polypeptide comprising the nucleic acid, preferably the coding region thereof, or polypeptide or the consensus sequence or the polypeptide motif, as depicted in Table I, II or IV, application No. 3, column 5 or 8 in the respective same line as the nucleic acid molecule SEQ ID NO. 84198 or polypeptide SEQ ID NO. 84199, respectively, or a homolog or a fragment thereof, is increased or generated, or if the activity transcription factor is increased or generated in a non-human organism, like a microorganism or a plant cell, plant or part thereof, especially with non-targeted localization, whereby the respective line discloses in column 7 serine. For example, an increase of the serine of at least 1 percent, particularly in a range of 26 to 82-percent is conferred as compared to a corresponding non-transformed wild type non-human organism.

[22710] Accordingly, in one embodiment, an increase of tyrosine in a non-human organism, as compared to a corresponding non-transformed wild type non-human organism, is conferred in the process of the invention, if the activity of a polypeptide showing the activity of a transcription factor, or if the activity of the polypeptide GM02LC21368, preferably represented by SEQ ID NO. 84199, or a homolog or fragment thereof, or if the activity of a polypeptide encoded by a nucleic acid molecule comprising the nucleic acid SEQ ID NO. 84198, preferably the coding region thereof, or a homolog or fragment thereof, e.g. derived from Glycine max, is increased or generated. For example the activity of a nucleic acid molecule or a polypeptide comprising the nucleic acid, preferably the coding region thereof, or polypeptide or the consensus sequence or the polypeptide motif, as depicted in Table I, II or IV, application No. 3, column 5 or 8 in the respective same line as the nucleic acid molecule SEQ ID NO. 84198 or polypeptide SEQ ID NO. 84199, respectively, or a homolog or a fragment thereof, is increased or generated, or if the activity transcription factor is increased or generated in a non-human organism, like a microorganism or a plant cell, plant or part thereof, especially with non-targeted localization, whereby the respective line discloses in column 7 tyrosine. For example, an increase of the tyrosine of at least 1 percent, particularly in a range of 36 to 903-percent is conferred as compared to a corresponding non-transformed wild type non-human organism.

[22711] Accordingly, in one embodiment, an increase of alanine in a non-human organism, as compared to a corresponding non-transformed wild type non-human organism, is conferred in the process of the invention, if the activity of a polypeptide showing the activity of a cyclin D, or if the activity of the polypeptide GM02LC44512, preferably represented by SEQ ID NO. 46851, or a homolog or fragment thereof, or if the activity of a polypeptide encoded by a nucleic acid molecule comprising the nucleic acid SEQ ID NO. 46850, preferably the coding region thereof, or a homolog or fragment thereof, e.g. derived from Glycine max, is increased or generated. For example the activity of a nucleic acid molecule or a polypeptide comprising the nucleic acid, preferably the coding region thereof, or polypeptide or the consensus sequence or the polypeptide motif, as depicted in Table I, II or IV, application No. 3, column 5 or 8 in the respective same line as the nucleic acid molecule SEQ ID NO. 46850 or polypeptide SEQ ID NO. 46851, respectively, or a homolog or a fragment thereof, is increased or generated, or if the activity cyclin D is increased or generated in a non-human organism, like a microorganism or a plant cell, plant or part thereof, especially with non-targeted localization, whereby the respective line discloses in column 7 alanine. For example, an increase of the alanine of at least 1 percent, particularly in a range of 29 to 66-percent is conferred as compared to a corresponding non-transformed wild type non-human organism.

[22712] Accordingly, in one embodiment, an increase of serine in a non-human organism, as compared to a corresponding non-transformed wild type non-human organism, is conferred in the process of the invention, if the activity of a polypeptide showing the activity of a cyclin D, or if the activity of the polypeptide GM02LC44512, preferably represented by SEQ ID NO. 46851, or a homolog or fragment thereof, or if the activity of a polypeptide encoded by a nucleic acid molecule comprising the nucleic acid SEQ ID NO. 46850, preferably the coding region thereof, or a homolog or fragment thereof, e.g. derived from Glycine max, is increased or generated. For example the activity of a nucleic acid molecule or a polypeptide comprising the nucleic acid, preferably the coding region thereof, or polypeptide or the consensus sequence or the polypeptide motif, as depicted in Table I, II or IV, application No. 3, column 5 or 8 in the respective same line as the nucleic acid molecule SEQ ID NO. 46850 or polypeptide SEQ ID NO. 46851, respectively, or a homolog or a fragment thereof, is increased or generated, or if the activity cyclin D is increased or generated in a non-human organism, like a microorganism or a plant cell, plant or part thereof, especially with non-targeted localization, whereby the respective line discloses in column 7 serine. For example, an increase of the serine of at least 1 percent, particularly in a range of 37 to 67-percent is conferred as compared to a corresponding non-transformed wild type non-human organism.

[22713] Accordingly, in one embodiment, an increase of alanine in a non-human organism, as compared to a corresponding non-transformed wild type non-human organism, is conferred in the process of the invention, if the activity of a polypeptide showing the activity of a glutaredoxin, or if the activity of the polypeptide NZ_AAAU02000016.150, preferably represented by SEQ ID NO. 47160, or a homolog or fragment thereof, or if the activity of a polypeptide encoded by a nucleic acid molecule comprising the nucleic acid SEQ ID NO. 47159, preferably the coding region thereof, or a homolog or fragment thereof, e.g. derived from Azotobacter vinelandii, is increased or generated. For example the activity of a nucleic acid molecule or a polypeptide comprising the nucleic acid, preferably the coding region thereof, or polypeptide or the consensus sequence or the polypeptide motif, as depicted in Table I, II or IV, application No. 3, column 5 or 8 in the respective same line as the nucleic acid molecule SEQ ID NO. 47159 or polypeptide SEQ ID NO. 47160, respectively, or a homolog or a fragment thereof, is increased or generated, or if the activity glutaredoxin is increased or generated in a non-human organism, like a microorganism or a plant cell, plant or part thereof, especially with non-targeted localization, whereby the respective line discloses in column 7 alanine. For example, an increase of the alanine of at least 1 percent, particularly in a range of 21 to 74-percent is conferred as compared to a corresponding non-transformed wild type non-human organism.

[22714] Accordingly, in one embodiment, an increase of glycine in a non-human organism, as compared to a corresponding non-transformed wild type non-human organism, is conferred in the process of the invention, if the activity of a polypeptide showing the activity of a glutaredoxin, or if the activity of the polypeptide NZ_AAAU02000016.150, preferably represented by SEQ ID NO. 47160, or a homolog or fragment thereof, or if the activity of a polypeptide encoded by a nucleic acid molecule comprising the nucleic acid SEQ ID NO. 47159, preferably the coding region thereof, or a homolog or fragment thereof, e.g. derived from Azotobacter vinelandii, is increased or generated. For example the activity of a nucleic acid molecule or a polypeptide comprising the nucleic acid, preferably the coding region thereof, or polypeptide or the consensus sequence or the polypeptide motif, as depicted in Table I, II or IV, application No. 3, column 5 or 8 in the respective same line as the nucleic acid molecule SEQ ID NO. 47159 or polypeptide SEQ ID NO. 47160, respectively, or a homolog or a fragment thereof, is increased or generated, or if the activity glutaredoxin is increased or generated in a non-human organism, like a microorganism or a plant cell, plant or part thereof, especially with non-targeted localization, whereby the respective line discloses in column 7 glycine. For example, an increase of the glycine of at least 1 percent, particularly in a range of 40 to 103-percent is conferred as compared to a corresponding non-transformed wild type non-human organism.

[22715] Accordingly, in one embodiment, an increase of serine in a non-human organism, as compared to a corresponding non-transformed wild type non-human organism, is conferred in the process of the invention, if the activity of a polypeptide showing the activity of a glutaredoxin, or if the activity of the polypeptide NZ_AAAU02000016.150, preferably represented by SEQ ID NO. 47160, or a homolog or fragment thereof, or if the activity of a polypeptide encoded by a nucleic acid molecule comprising the nucleic acid SEQ ID NO. 47159, preferably the coding region thereof, or a homolog or fragment thereof, e.g. derived from Azotobacter vinelandii, is increased or generated. For example the activity of a nucleic acid molecule or a polypeptide comprising the nucleic acid, preferably the coding region thereof, or polypeptide or the consensus sequence or the polypeptide motif, as depicted in Table I, II or IV, application No. 3, column 5 or 8 in the respective same line as the nucleic acid molecule SEQ ID NO. 47159 or polypeptide SEQ ID NO. 47160, respectively, or a homolog or a fragment thereof, is increased or generated, or if the activity glutaredoxin is increased or generated in a non-human organism, like a microorganism or a plant cell, plant or part thereof, especially with non-targeted localization, whereby the respective line discloses in column 7 serine. For example, an increase of the serine of at least 1 percent, particularly in a range of 24 to 65-percent is conferred as compared to a corresponding non-transformed wild type non-human organism.

[22716] Accordingly, in one embodiment, an increase of asparagine in a non-human organism, as compared to a corresponding non-transformed wild type non-human organism, is conferred in the process of the invention, if the activity of a polypeptide showing the activity of a s_pp015018333r-protein, or if the activity of the polypeptide S_pp015018333r, preferably represented by SEQ ID NO. 59852, or a homolog or fragment thereof, or if the activity of a polypeptide encoded by a nucleic acid molecule comprising the nucleic acid SEQ ID NO. 59851, preferably the coding region thereof, or a homolog or fragment thereof, e.g. derived from Physcomitrella patens, is increased or generated. For example the activity of a nucleic acid molecule or a polypeptide comprising the nucleic acid, preferably the coding region thereof, or polypeptide or the consensus sequence or the polypeptide motif, as depicted in Table I, II or IV, application No. 3, column 5 or 8 in the respective same line as the nucleic acid molecule SEQ ID NO. 59851 or polypeptide SEQ ID NO. 59852, respectively, or a homolog or a fragment thereof, is increased or generated, or if the activity s_pp015018333r-protein is increased or generated in a non-human organism, like a microorganism or a plant cell, plant or part thereof, especially with non-targeted localization, whereby the respective line discloses in column 7 asparagine. For example, an increase of the asparagine of at least 1 percent, particularly in a range of 43 to 143-percent is conferred as compared to a corresponding non-transformed wild type non-human organism.

[22717] Accordingly, in one embodiment, an increase of phenylalanine in a non-human organism, as compared to a corresponding non-transformed wild type non-human organism, is conferred in the process of the invention, if the activity of a polypeptide showing the activity of a s_pp015018333r-protein, or if the activity of the polypeptide S_pp015018333r, preferably represented by SEQ ID NO. 59852, or a homolog or fragment thereof, or if the activity of a polypeptide encoded by a nucleic acid molecule comprising the nucleic acid SEQ ID NO. 59851, preferably the coding region thereof, or a homolog or fragment thereof, e.g. derived from Physcomitrella patens, is increased or generated. For example the activity of a nucleic acid molecule or a polypeptide comprising the nucleic acid, preferably the coding region thereof, or polypeptide or the consensus sequence or the polypeptide motif, as depicted in Table I, II or IV, application No. 3, column 5 or 8 in the respective same line as the nucleic acid molecule SEQ ID NO. 59851 or polypeptide SEQ ID NO. 59852, respectively, or a homolog or a fragment thereof, is increased or generated, or if the activity s_pp015018333r-protein is increased or generated in a non-human organism, like a microorganism or a plant cell, plant or part thereof, especially with non-targeted localization, whereby the respective line discloses in column 7 phenylalanine. For example, an increase of the phenylalanine of at least 1 percent, particularly in a range of 37 to 174-percent is conferred as compared to a corresponding non-transformed wild type non-human organism.

[22718] Accordingly, in one embodiment, an increase of tyrosine in a non-human organism, as compared to a corresponding non-transformed wild type non-human organism, is conferred in the process of the invention, if the activity of a polypeptide showing the activity of a s_pp015018333r-protein, or if the activity of the polypeptide S_pp015018333r, preferably represented by SEQ ID NO. 59852, or a homolog or fragment thereof, or if the activity of a polypeptide encoded by a nucleic acid molecule comprising the nucleic acid SEQ ID NO. 59851, preferably the coding region thereof, or a homolog or fragment thereof, e.g. derived from Physcomitrella patens, is increased or generated. For example the activity of a nucleic acid molecule or a polypeptide comprising the nucleic acid, preferably the coding region thereof, or polypeptide or the consensus sequence or the polypeptide motif, as depicted in Table I, II or IV, application No. 3, column 5 or 8 in the respective same line as the nucleic acid molecule SEQ ID NO. 59851 or polypeptide SEQ ID NO. 59852, respectively, or a homolog or a fragment thereof, is increased or generated, or if the activity s_pp015018333r-protein is increased or generated in a non-human organism, like a microorganism or a plant cell, plant or part thereof, especially with non-targeted localization, whereby the respective line discloses in column 7 tyrosine. For example, an increase of the tyrosine of at least 1 percent, particularly in a range of 41 to 102-percent is conferred as compared to a corresponding non-transformed wild type non-human organism.

[22719] Accordingly, in one embodiment, an increase of 5-oxoproline in a non-human organism, as compared to a corresponding non-transformed wild type non-human organism, is conferred in the process of the invention, if the activity of a polypeptide showing the activity of a s_pp015018333r-protein, or if the activity of the polypeptide S_pp015018333r, preferably represented by SEQ ID NO. 59852, or a homolog or fragment thereof, or if the activity of a polypeptide encoded by a nucleic acid molecule comprising the nucleic acid SEQ ID NO. 59851, preferably the coding region thereof, or a homolog or fragment thereof, e.g. derived from Physcomitrella patens, is increased or generated. For example the activity of a nucleic acid molecule or a polypeptide comprising the nucleic acid, preferably the coding region thereof, or polypeptide or the consensus sequence or the polypeptide motif, as depicted in Table I, II or IV, application No. 3, column 5 or 8 in the respective same line as the nucleic acid molecule SEQ ID NO. 59851 or polypeptide SEQ ID NO. 59852, respectively, or a homolog or a fragment thereof, is increased or generated, or if the activity s_pp015018333r-protein is increased or generated in a non-human organism, like a microorganism or a plant cell, plant or part thereof, especially with non-targeted localization, whereby the respective line discloses in column 7 5-oxoproline. For example, an increase of the 5-oxoproline of at least 1 percent, particularly in a range of 45 to 114 percent is conferred as compared to a corresponding non-transformed wild type non-human organism.

[22720] Accordingly, in one embodiment, an increase of citrulline in a non-human organism, as compared to a corresponding non-transformed wild type non-human organism, is conferred in the process of the invention, if the activity of a polypeptide showing the activity of a N-acetyl-gamma-glutamyl-phosphate reductase, or if the activity of the polypeptide Sll0080, preferably represented by SEQ ID NO. 47567, or a homolog or fragment thereof, or if the activity of a polypeptide encoded by a nucleic acid molecule comprising the nucleic acid SEQ ID NO. 47566, preferably the coding region thereof, or a homolog or fragment thereof, e.g. derived from Synechocystis sp., is increased or generated. For example the activity of a nucleic acid molecule or a polypeptide comprising the nucleic acid, preferably the coding region thereof, or polypeptide or the consensus sequence or the polypeptide motif, as depicted in Table I, II or IV, application No. 3, column 5 or 8 in the respective same line as the nucleic acid molecule SEQ ID NO. 47566 or polypeptide SEQ ID NO. 47567, respectively, or a homolog or a fragment thereof, is increased or generated, or if the activity N-acetyl-gamma-glutamyl-phosphate reductase is increased or generated in a non-human organism, like a microorganism or a plant cell, plant or part thereof, especially with plastidic localization, whereby the respective line discloses in column 7 citrulline. For example, an increase of the citrulline of at least 1 percent, particularly in a range of 31 to 60-percent is conferred as compared to a corresponding non-transformed wild type non-human organism.

[22721] Accordingly, in one embodiment, an increase of asparagine in a non-human organism, as compared to a corresponding non-transformed wild type non-human organism, is conferred in the process of the invention, if the activity of a polypeptide showing the activity of a agmatinase, or if the activity of the polypeptide Sll0228, preferably represented by SEQ ID NO. 84266, or a homolog or fragment thereof, or if the activity of a polypeptide encoded by a nucleic acid molecule comprising the nucleic acid SEQ ID NO. 84265, preferably the coding region thereof, or a homolog or fragment thereof, e.g. derived from Synechocystis sp., is increased or generated. For example the activity of a nucleic acid molecule or a polypeptide comprising the nucleic acid, preferably the coding region thereof, or polypeptide or the consensus sequence or the polypeptide motif, as depicted in Table I, II or IV, application No. 3, column 5 or 8 in the respective same line as the nucleic acid molecule SEQ ID NO. 84265 or polypeptide SEQ ID NO. 84266, respectively, or a homolog or a fragment thereof, is increased or generated, or if the activity agmatinase is increased or generated in a non-human organism, like a microorganism or a plant cell, plant or part thereof, especially with plastidic localization, whereby the respective line discloses in column 7 asparagine. For example, an increase of the asparagine of at least 1 percent, particularly in a range of 76 to 319-percent is conferred as compared to a corresponding non-transformed wild type non-human organism.

[22722] Accordingly, in one embodiment, an increase of tyrosine in a non-human organism, as compared to a corresponding non-transformed wild type non-human organism, is conferred in the process of the invention, if the activity of a polypeptide showing the activity of a agmatinase, or if the activity of the polypeptide Sll0228, preferably represented by SEQ ID NO. 84266, or a homolog or fragment thereof, or if the activity of a polypeptide encoded by a nucleic acid molecule comprising the nucleic acid SEQ ID NO. 84265, preferably the coding region thereof, or a homolog or fragment thereof, e.g. derived from Synechocystis sp., is increased or generated. For example the activity of a nucleic acid molecule or a polypeptide comprising the nucleic acid, preferably the coding region thereof, or polypeptide or the consensus sequence or the polypeptide motif, as depicted in Table I, II or IV, application No. 3, column 5 or 8 in the respective same line as the nucleic acid molecule SEQ ID NO. 84265 or polypeptide SEQ ID NO. 84266, respectively, or a homolog or a fragment thereof, is increased or generated, or if the activity agmatinase is increased or generated in a non-human organism, like a microorganism or a plant cell, plant or part thereof, especially with plastidic localization, whereby the respective line discloses in column 7 tyrosine. For example, an increase of the tyrosine of at least 1 percent, particularly in a range of 48 to 58-percent is conferred as compared to a corresponding non-transformed wild type non-human organism.

[22723] Accordingly, in one embodiment, an increase of alanine in a non-human organism, as compared to a corresponding non-transformed wild type non-human organism, is conferred in the process of the invention, if the activity of a polypeptide showing the activity of a ABC transporter ATP binding component, or if the activity of the polypeptide Sll0240, preferably represented by SEQ ID NO. 84442, or a homolog or fragment thereof, or if the activity of a polypeptide encoded by a nucleic acid molecule comprising the nucleic acid SEQ ID NO. 84441, preferably the coding region thereof, or a homolog or fragment thereof, e.g. derived from Synechocystis sp., is increased or generated. For example the activity of a nucleic acid molecule or a polypeptide comprising the nucleic acid, preferably the coding region thereof, or polypeptide or the consensus sequence or the polypeptide motif, as depicted in Table 1,11 or IV, application No. 3, column 5 or 8 in the respective same line as the nucleic acid molecule SEQ ID NO. 84441 or polypeptide SEQ ID NO. 84442, respectively, or a homolog or a fragment thereof, is increased or generated, or if the activity ABC transporter ATP binding component is increased or generated in a non-human organism, like a microorganism or a plant cell, plant or part thereof, especially with plastidic localization, whereby the respective line discloses in column 7 alanine. For example, an increase of the alanine of at least 1 percent, particularly in a range of 30 to 40-percent is conferred as compared to a corresponding non-transformed wild type non-human organism.

[22724] Accordingly, in one embodiment, an increase of phenylalanine in a non-human organism, as compared to a corresponding non-transformed wild type non-human organism, is conferred in the process of the invention, if the activity of a polypeptide showing the activity of a flavodoxin, or if the activity of the polypeptide Sll0248, preferably represented by SEQ ID NO. 49144, or a homolog or fragment thereof, or if the activity of a polypeptide encoded by a nucleic acid molecule comprising the nucleic acid SEQ ID NO. 49143, preferably the coding region thereof, or a homolog or fragment thereof, e.g. derived from Synechocystis sp., is increased or generated. For example the activity of a nucleic acid molecule or a polypeptide comprising the nucleic acid, preferably the coding region thereof, or polypeptide or the consensus sequence or the polypeptide motif, as depicted in Table I, II or IV, application No. 3, column 5 or 8 in the respective same line as the nucleic acid molecule SEQ ID NO. 49143 or polypeptide SEQ ID NO. 49144, respectively, or a homolog or a fragment thereof, is increased or generated, or if the activity flavodoxin is increased or generated in a non-human organism, like a microorganism or a plant cell, plant or part thereof, especially with plastidic localization, whereby the respective line discloses in column 7 phenylalanine. For example, an increase of the phenylalanine of at least 1 percent, particularly in a range of 33 to 128-percent is conferred as compared to a corresponding non-transformed wild type non-human organism.

[22725] Accordingly, in one embodiment, an increase of tyrosine in a non-human organism, as compared to a corresponding non-transformed wild type non-human organism, is conferred in the process of the invention, if the activity of a polypeptide showing the activity of a flavodoxin, or if the activity of the polypeptide Sll0248, preferably represented by SEQ ID NO. 49144, or a homolog or fragment thereof, or if the activity of a polypeptide encoded by a nucleic acid molecule comprising the nucleic acid SEQ ID NO. 49143, preferably the coding region thereof, or a homolog or fragment thereof, e.g. derived from Synechocystis sp., is increased or generated. For example the activity of a nucleic acid molecule or a polypeptide comprising the nucleic acid, preferably the coding region thereof, or polypeptide or the consensus sequence or the polypeptide motif, as depicted in Table I, II or IV, application No. 3, column 5 or 8 in the respective same line as the nucleic acid molecule SEQ ID NO. 49143 or polypeptide SEQ ID NO. 49144, respectively, or a homolog or a fragment thereof, is increased or generated, or if the activity flavodoxin is increased or generated in a non-human organism, like a microorganism or a plant cell, plant or part thereof, especially with plastidic localization, whereby the respective line discloses in column 7 tyrosine. For example, an increase of the tyrosine of at least 1 percent, particularly in a range of 40 to 277-percent is conferred as compared to a corresponding non-transformed wild type non-human organism.

[22726] Accordingly, in one embodiment, an increase of alanine in a non-human organism, as compared to a corresponding non-transformed wild type non-human organism, is conferred in the process of the invention, if the activity of a polypeptide showing the activity of a sll0281-protein, or if the activity of the polypeptide Sll0281, preferably represented by SEQ ID NO. 84866, or a homolog or fragment thereof, or if the activity of a polypeptide encoded by a nucleic acid molecule comprising the nucleic acid SEQ ID NO. 84865, preferably the coding region thereof, or a homolog or fragment thereof, e.g. derived from Synechocystis sp., is increased or generated. For example the activity of a nucleic acid molecule or a polypeptide comprising the nucleic acid, preferably the coding region thereof, or polypeptide or the consensus sequence or the polypeptide motif, as depicted in Table I, II or IV, application No. 3, column 5 or 8 in the respective same line as the nucleic acid molecule SEQ ID NO. 84865 or polypeptide SEQ ID NO. 84866, respectively, or a homolog or a fragment thereof, is increased or generated, or if the activity sll0281-protein is increased or generated in a non-human organism, like a microorganism or a plant cell, plant or part thereof, especially with plastidic localization, whereby the respective line discloses in column 7 alanine. For example, an increase of the alanine of at least 1 percent, particularly in a range of 22 to 34-percent is conferred as compared to a corresponding non-transformed wild type non-human organism.

[22727] Accordingly, in one embodiment, an increase of serine in a non-human organism, as compared to a corresponding non-transformed wild type non-human organism, is conferred in the process of the invention, if the activity of a polypeptide showing the activity of a uroporphyrin-III C-methyltransferase, or if the activity of the polypeptide Sll0378, preferably represented by SEQ ID NO. 84870, or a homolog or fragment thereof, or if the activity of a polypeptide encoded by a nucleic acid molecule comprising the nucleic acid SEQ ID NO. 84869, preferably the coding region thereof, or a homolog or fragment thereof, e.g. derived from Synechocystis sp., is increased or generated. For example the activity of a nucleic acid molecule or a polypeptide comprising the nucleic acid, preferably the coding region thereof, or polypeptide or the consensus sequence or the polypeptide motif, as depicted in Table I, II or IV, application No. 3, column 5 or 8 in the respective same line as the nucleic acid molecule SEQ ID NO. 84869 or polypeptide SEQ ID NO. 84870, respectively, or a homolog or a fragment thereof, is increased or generated, or if the activity uroporphyrin-III C-methyltransferase is increased or generated in a non-human organism, like a microorganism or a plant cell, plant or part thereof, especially with plastidic localization, whereby the respective line discloses in column 7 serine. For example, an increase of the serine of at least 1 percent, particularly in a range of 24 to 126-percent is conferred as compared to a corresponding non-transformed wild type non-human organism.

[22728] Accordingly, in one embodiment, an increase of phenylalanine in a non-human organism, as compared to a corresponding non-transformed wild type non-human organism, is conferred in the process of the invention, if the activity of a polypeptide showing the activity of a urease subunit, or if the activity of the polypeptide Sll0420, preferably represented by SEQ ID NO. 50105, or a homolog or fragment thereof, or if the activity of a polypeptide encoded by a nucleic acid molecule comprising the nucleic acid SEQ ID NO. 50104, preferably the coding region thereof, or a homolog or fragment thereof, e.g. derived from Synechocystis sp., is increased or generated. For example the activity of a nucleic acid molecule or a polypeptide comprising the nucleic acid, preferably the coding region thereof, or polypeptide or the consensus sequence or the polypeptide motif, as depicted in Table I, II or IV, application No. 3, column 5 or 8 in the respective same line as the nucleic acid molecule SEQ ID NO. 50104 or polypeptide SEQ ID NO. 50105, respectively, or a homolog or a fragment thereof, is increased or generated, or if the activity urease subunit is increased or generated in a non-human organism, like a microorganism or a plant cell, plant or part thereof, especially with non-targeted localization, whereby the respective line discloses in column 7 phenylalanine. For example, an increase of the phenylalanine of at least 1 percent, particularly in a range of 31 to 49-percent is conferred as compared to a corresponding non-transformed wild type non-human organism.

[22729] Accordingly, in one embodiment, an increase of tyrosine in a non-human organism, as compared to a corresponding non-transformed wild type non-human organism, is conferred in the process of the invention, if the activity of a polypeptide showing the activity of a urease subunit, or if the activity of the polypeptide Sll0420, preferably represented by SEQ ID NO. 50105, or a homolog or fragment thereof, or if the activity of a polypeptide encoded by a nucleic acid molecule comprising the nucleic acid SEQ ID NO. 50104, preferably the coding region thereof, or a homolog or fragment thereof, e.g. derived from Synechocystis sp., is increased or generated. For example the activity of a nucleic acid molecule or a polypeptide comprising the nucleic acid, preferably the coding region thereof, or polypeptide or the consensus sequence or the polypeptide motif, as depicted in Table I, II or IV, application No. 3, column 5 or 8 in the respective same line as the nucleic acid molecule SEQ ID NO. 50104 or polypeptide SEQ ID NO. 50105, respectively, or a homolog or a fragment thereof, is increased or generated, or if the activity urease subunit is increased or generated in a non-human organism, like a microorganism or a plant cell, plant or part thereof, especially with non-targeted localization, whereby the respective line discloses in column 7 tyrosine. For example, an increase of the tyrosine of at least 1 percent, particularly in a range of 36 to 94-percent is conferred as compared to a corresponding non-transformed wild type non-human organism.

[22730] Accordingly, in one embodiment, an increase of citrulline in a non-human organism, as compared to a corresponding non-transformed wild type non-human organism, is conferred in the process of the invention, if the activity of a polypeptide showing the activity of a glucokinase, or if the activity of the polypeptide Sll0593, preferably represented by SEQ ID NO. 85511, or a homolog or fragment thereof, or if the activity of a polypeptide encoded by a nucleic acid molecule comprising the nucleic acid SEQ ID NO. 85510, preferably the coding region thereof, or a homolog or fragment thereof, e.g. derived from Synechocystis sp., is increased or generated. For example the activity of a nucleic acid molecule or a polypeptide comprising the nucleic acid, preferably the coding region thereof, or polypeptide or the consensus sequence or the polypeptide motif, as depicted in Table I, II or IV, application No. 3, column 5 or 8 in the respective same line as the nucleic acid molecule SEQ ID NO. 85510 or polypeptide SEQ ID NO. 85511, respectively, or a homolog or a fragment thereof, is increased or generated, or if the activity glucokinase is increased or generated in a non-human organism, like a microorganism or a plant cell, plant or part thereof, especially with plastidic localization, whereby the respective line discloses in column 7 citrulline. For example, an increase of the citrulline of at least 1 percent, particularly in a range of 54 to 140-percent is conferred as compared to a corresponding non-transformed wild type non-human organism.

[22731] Accordingly, in one embodiment, an increase of serine in a non-human organism, as compared to a corresponding non-transformed wild type non-human organism, is conferred in the process of the invention, if the activity of a polypeptide showing the activity of a permease protein of phosphate ABC transporter, or if the activity of the polypeptide Sll0682, preferably represented by SEQ ID NO. 50951, or a homolog or fragment thereof, or if the activity of a polypeptide encoded by a nucleic acid molecule comprising the nucleic acid SEQ ID NO. 50950, preferably the coding region thereof, or a homolog or fragment thereof, e.g. derived from Synechocystis sp., is increased or generated. For example the activity of a nucleic acid molecule or a polypeptide comprising the nucleic acid, preferably the coding region thereof, or polypeptide or the consensus sequence or the polypeptide motif, as depicted in Table I, II or IV, application No. 3, column 5 or 8 in the respective same line as the nucleic acid molecule SEQ ID NO. 50950 or polypeptide SEQ ID NO. 50951, respectively, or a homolog or a fragment thereof, is increased or generated, or if the activity permease protein of phosphate ABC transporter is increased or generated in a non-human organism, like a microorganism or a plant cell, plant or part thereof, especially with non-targeted localization, whereby the respective line discloses in column 7 serine. For example, an increase of the serine of at least 1 percent, particularly in a range of 26 to 90-percent is conferred as compared to a corresponding non-transformed wild type non-human organism.

[22732] Accordingly, in one embodiment, an increase of 5-oxoproline in a non-human organism, as compared to a corresponding non-transformed wild type non-human organism, is conferred in the process of the invention, if the activity of a polypeptide showing the activity of a permease protein of phosphate ABC transporter, or if the activity of the polypeptide Sll0682, preferably represented by SEQ ID NO. 50951, or a homolog or fragment thereof, or if the activity of a polypeptide encoded by a nucleic acid molecule comprising the nucleic acid SEQ ID NO. 50950, preferably the coding region thereof, or a homolog or fragment thereof, e.g. derived from Synechocystis sp., is increased or generated. For example the activity of a nucleic acid molecule or a polypeptide comprising the nucleic acid, preferably the coding region thereof, or polypeptide or the consensus sequence or the polypeptide motif, as depicted in Table I, II or IV, application No. 3, column 5 or 8 in the respective same line as the nucleic acid molecule SEQ ID NO. 50950 or polypeptide SEQ ID NO. 50951, respectively, or a homolog or a fragment thereof, is increased or generated, or if the activity permease protein of phosphate ABC transporter is increased or generated in a non-human organism, like a microorganism or a plant cell, plant or part thereof, especially with non-targeted localization, whereby the respective line discloses in column 7 5-oxoproline. For example, an increase of the 5-oxoproline of at least 1 percent, particularly in a range of 34 to 92-percent is conferred as compared to a corresponding non-transformed wild type non-human organism.

[22733] Accordingly, in one embodiment, an increase of aspartate in a non-human organism, as compared to a corresponding non-transformed wild type non-human organism, is conferred in the process of the invention, if the activity of a polypeptide showing the activity of a oxireductase, or if the activity of the polypeptide Sll0816, preferably represented by SEQ ID NO. 51199, or a homolog or fragment thereof, or if the activity of a polypeptide encoded by a nucleic acid molecule comprising the nucleic acid SEQ ID NO. 51198, preferably the coding region thereof, or a homolog or fragment thereof, e.g. derived from Synechocystis sp., is increased or generated. For example the activity of a nucleic acid molecule or a polypeptide comprising the nucleic acid, preferably the coding region thereof, or polypeptide or the consensus sequence or the polypeptide motif, as depicted in Table I, II or IV, application No. 3, column 5 or 8 in the respective same line as the nucleic acid molecule SEQ ID NO. 51198 or polypeptide SEQ ID NO. 51199, respectively, or a homolog or a fragment thereof, is increased or generated, or if the activity oxireductase is increased or generated in a non-human organism, like a microorganism or a plant cell, plant or part thereof, especially with non-targeted localization, whereby the respective line discloses in column 7 aspartate. For example, an increase of the aspartate of at least 1 percent, particularly in a range of 52 to 318-percent is conferred as compared to a corresponding non-transformed wild type non-human organism.

[22734] Accordingly, in one embodiment, an increase of glycine in a non-human organism, as compared to a corresponding non-transformed wild type non-human organism, is conferred in the process of the invention, if the activity of a polypeptide showing the activity of a oxireductase, or if the activity of the polypeptide Sll0816, preferably represented by SEQ ID NO. 51199, or a homolog or fragment thereof, or if the activity of a polypeptide encoded by a nucleic acid molecule comprising the nucleic acid SEQ ID NO. 51198, preferably the coding region thereof, or a homolog or fragment thereof, e.g. derived from Synechocystis sp., is increased or generated. For example the activity of a nucleic acid molecule or a polypeptide comprising the nucleic acid, preferably the coding region thereof, or polypeptide or the consensus sequence or the polypeptide motif, as depicted in Table I, II or IV, application No. 3, column 5 or 8 in the respective same line as the nucleic acid molecule SEQ ID NO. 51198 or polypeptide SEQ ID NO. 51199, respectively, or a homolog or a fragment thereof, is increased or generated, or if the activity oxireductase is increased or generated in a non-human organism, like a microorganism or a plant cell, plant or part thereof, especially with non-targeted localization, whereby the respective line discloses in column 7 glycine. For example, an increase of the glycine of at least 1 percent, particularly in a range of 37 to 110-percent is conferred as compared to a corresponding non-transformed wild type non-human organism.

[22735] Accordingly, in one embodiment, an increase of serine in a non-human organism, as compared to a corresponding non-transformed wild type non-human organism, is conferred in the process of the invention, if the activity of a polypeptide showing the activity of a oxireductase, or if the activity of the polypeptide Sll0816, preferably represented by SEQ ID NO. 51199, or a homolog or fragment thereof, or if the activity of a polypeptide encoded by a nucleic acid molecule comprising the nucleic acid SEQ ID NO. 51198, preferably the coding region thereof, or a homolog or fragment thereof, e.g. derived from Synechocystis sp., is increased or generated. For example the activity of a nucleic acid molecule or a polypeptide comprising the nucleic acid, preferably the coding region thereof, or polypeptide or the consensus sequence or the polypeptide motif, as depicted in Table I, II or IV, application No. 3, column 5 or 8 in the respective same line as the nucleic acid molecule SEQ ID NO. 51198 or polypeptide SEQ ID NO. 51199, respectively, or a homolog or a fragment thereof, is increased or generated, or if the activity oxireductase is increased or generated in a non-human organism, like a microorganism or a plant cell, plant or part thereof, especially with non-targeted localization, whereby the respective line discloses in column 7 serine. For example, an increase of the serine of at least 1 percent, particularly in a range of 32 to 198-percent is conferred as compared to a corresponding non-transformed wild type non-human organism.

[22736] Accordingly, in one embodiment, an increase of tyrosine in a non-human organism, as compared to a corresponding non-transformed wild type non-human organism, is conferred in the process of the invention, if the activity of a polypeptide showing the activity of a oxireductase, or if the activity of the polypeptide Sll0816, preferably represented by SEQ ID NO. 51199, or a homolog or fragment thereof, or if the activity of a polypeptide encoded by a nucleic acid molecule comprising the nucleic acid SEQ ID NO. 51198, preferably the coding region thereof, or a homolog or fragment thereof, e.g. derived from Synechocystis sp., is increased or generated. For example the activity of a nucleic acid molecule or a polypeptide comprising the nucleic acid, preferably the coding region thereof, or polypeptide or the consensus sequence or the polypeptide motif, as depicted in Table I, II or IV, application No. 3, column 5 or 8 in the respective same line as the nucleic acid molecule SEQ ID NO. 51198 or polypeptide SEQ ID NO. 51199, respectively, or a homolog or a fragment thereof, is increased or generated, or if the activity oxireductase is increased or generated in a non-human organism, like a microorganism or a plant cell, plant or part thereof, especially with non-targeted localization, whereby the respective line discloses in column 7 tyrosine. For example, an increase of the tyrosine of at least 1 percent, particularly in a range of 53 to 88-percent is conferred as compared to a corresponding non-transformed wild type non-human organism.

[22737] Accordingly, in one embodiment, an increase of aspartate in a non-human organism, as compared to a corresponding non-transformed wild type non-human organism, is conferred in the process of the invention, if the activity of a polypeptide showing the activity of a malate dehydrogenase, or if the activity of the polypeptide Sll0891, preferably represented by SEQ ID NO. 51269, or a homolog or fragment thereof, or if the activity of a polypeptide encoded by a nucleic acid molecule comprising the nucleic acid SEQ ID NO. 51268, preferably the coding region thereof, or a homolog or fragment thereof, e.g. derived from Synechocystis sp., is increased or generated. For example the activity of a nucleic acid molecule or a polypeptide comprising the nucleic acid, preferably the coding region thereof, or polypeptide or the consensus sequence or the polypeptide motif, as depicted in Table I, II or IV, application No. 3, column 5 or 8 in the respective same line as the nucleic acid molecule SEQ ID NO. 51268 or polypeptide SEQ ID NO. 51269, respectively, or a homolog or a fragment thereof, is increased or generated, or if the activity malate dehydrogenase is increased or generated in a non-human organism, like a microorganism or a plant cell, plant or part thereof, especially with plastidic localization, whereby the respective line discloses in column 7 aspartate. For example, an increase of the aspartate of at least 1 percent, particularly in a range of 90 to 176-percent is conferred as compared to a corresponding non-transformed wild type non-human organism.

[22738] Accordingly, in one embodiment, an increase of phenylalanine in a non-human organism, as compared to a corresponding non-transformed wild type non-human organism, is conferred in the process of the invention, if the activity of a polypeptide showing the activity of a malate dehydrogenase, or if the activity of the polypeptide Sll0891, preferably represented by SEQ ID NO. 51269, or a homolog or fragment thereof, or if the activity of a polypeptide encoded by a nucleic acid molecule comprising the nucleic acid SEQ ID NO. 51268, preferably the coding region thereof, or a homolog or fragment thereof, e.g. derived from Synechocystis sp., is increased or generated. For example the activity of a nucleic acid molecule or a polypeptide comprising the nucleic acid, preferably the coding region thereof, or polypeptide or the consensus sequence or the polypeptide motif, as depicted in Table I, II or IV, application No. 3, column 5 or 8 in the respective same line as the nucleic acid molecule SEQ ID NO. 51268 or polypeptide SEQ ID NO. 51269, respectively, or a homolog or a fragment thereof, is increased or generated, or if the activity malate dehydrogenase is increased or generated in a non-human organism, like a microorganism or a plant cell, plant or part thereof, especially with plastidic localization, whereby the respective line discloses in column 7 phenylalanine. For example, an increase of the phenylalanine of at least 1 percent, particularly in a range of 37 to 118-percent is conferred as compared to a corresponding non-transformed wild type non-human organism.

[22739] Accordingly, in one embodiment, an increase of serine in a non-human organism, as compared to a corresponding non-transformed wild type non-human organism, is conferred in the process of the invention, if the activity of a polypeptide showing the activity of a malate dehydrogenase, or if the activity of the polypeptide Sll0891, preferably represented by SEQ ID NO. 51269, or a homolog or fragment thereof, or if the activity of a polypeptide encoded by a nucleic acid molecule comprising the nucleic acid SEQ ID NO. 51268, preferably the coding region thereof, or a homolog or fragment thereof, e.g. derived from Synechocystis sp., is increased or generated. For example the activity of a nucleic acid molecule or a polypeptide comprising the nucleic acid, preferably the coding region thereof, or polypeptide or the consensus sequence or the polypeptide motif, as depicted in Table I, II or IV, application No. 3, column 5 or 8 in the respective same line as the nucleic acid molecule SEQ ID NO. 51268 or polypeptide SEQ ID NO. 51269, respectively, or a homolog or a fragment thereof, is increased or generated, or if the activity malate dehydrogenase is increased or generated in a non-human organism, like a microorganism or a plant cell, plant or part thereof, especially with plastidic localization, whereby the respective line discloses in column 7 serine. For example, an increase of the serine of at least 1 percent, particularly in a range of 23 to 95-percent is conferred as compared to a corresponding non-transformed wild type non-human organism.

[22740] Accordingly, in one embodiment, an increase of aspartate in a non-human organism, as compared to a corresponding non-transformed wild type non-human organism, is conferred in the process of the invention, if the activity of a polypeptide showing the activity of a 3-deoxy-7-phosphoheptulonate synthase, or if the activity of the polypeptide Sll0934, preferably represented by SEQ ID NO. 52247, or a homolog or fragment thereof, or if the activity of a polypeptide encoded by a nucleic acid molecule comprising the nucleic acid SEQ ID NO. 52246, preferably the coding region thereof, or a homolog or fragment thereof, e.g. derived from Synechocystis sp., is increased or generated. For example the activity of a nucleic acid molecule or a polypeptide comprising the nucleic acid, preferably the coding region thereof, or polypeptide or the consensus sequence or the polypeptide motif, as depicted in Table I, II or IV, application No. 3, column 5 or 8 in the respective same line as the nucleic acid molecule SEQ ID NO. 52246 or polypeptide SEQ ID NO. 52247, respectively, or a homolog or a fragment thereof, is increased or generated, or if the activity 3-deoxy-7-phosphoheptulonate synthase is increased or generated in a non-human organism, like a microorganism or a plant cell, plant or part thereof, especially with mitochondrial localization, whereby the respective line discloses in column 7 aspartate. For example, an increase of the aspartate of at least 1 percent, particularly in a range of 61 to 94-percent is conferred as compared to a corresponding non-transformed wild type non-human organism.

[22741] Accordingly, in one embodiment, an increase of serine in a non-human organism, as compared to a corresponding non-transformed wild type non-human organism, is conferred in the process of the invention, if the activity of a polypeptide showing the activity of a glycogen synthase, or if the activity of the polypeptide Sll0945, preferably represented by SEQ ID NO. 52365, or a homolog or fragment thereof, or if the activity of a polypeptide encoded by a nucleic acid molecule comprising the nucleic acid SEQ ID NO. 52364, preferably the coding region thereof, or a homolog or fragment thereof, e.g. derived from Synechocystis sp., is increased or generated. For example the activity of a nucleic acid molecule or a polypeptide comprising the nucleic acid, preferably the coding region thereof, or polypeptide or the consensus sequence or the polypeptide motif, as depicted in Table I, II or IV, application No. 3, column 5 or 8 in the respective same line as the nucleic acid molecule SEQ ID NO. 52364 or polypeptide SEQ ID NO. 52365, respectively, or a homolog or a fragment thereof, is increased or generated, or if the activity glycogen synthase is increased or generated in a non-human organism, like a microorganism or a plant cell, plant or part thereof, especially with non-targeted localization, whereby the respective line discloses in column 7 serine. For example, an increase of the serine of at least 1 percent, particularly in a range of 28 to 86-percent is conferred as compared to a corresponding non-transformed wild type non-human organism.

[22742] Accordingly, in one embodiment, an increase of aspartate in a non-human organism, as compared to a corresponding non-transformed wild type non-human organism, is conferred in the process of the invention, if the activity of a polypeptide showing the activity of a carbon dioxide concentrating mechanism protein, or if the activity of the polypeptide Sll1031, preferably represented by SEQ ID NO. 52635, or a homolog or fragment thereof, or if the activity of a polypeptide encoded by a nucleic acid molecule comprising the nucleic acid SEQ ID NO. 52634, preferably the coding region thereof, or a homolog or fragment thereof, e.g. derived from Synechocystis sp., is increased or generated. For example the activity of a nucleic acid molecule or a polypeptide comprising the nucleic acid, preferably the coding region thereof, or polypeptide or the consensus sequence or the polypeptide motif, as depicted in Table I, II or IV, application No. 3, column 5 or 8 in the respective same line as the nucleic acid molecule SEQ ID NO. 52634 or polypeptide SEQ ID NO. 52635, respectively, or a homolog or a fragment thereof, is increased or generated, or if the activity carbon dioxide concentrating mechanism protein is increased or generated in a non-human organism, like a microorganism or a plant cell, plant or part thereof, especially with mitochondrial localization, whereby the respective line discloses in column 7 aspartate. For example, an increase of the aspartate of at least 1 percent, particularly in a range of 61 to 317-percent is conferred as compared to a corresponding non-transformed wild type non-human organism.

[22743] Accordingly, in one embodiment, an increase of phenylalanine in a non-human organism, as compared to a corresponding non-transformed wild type non-human organism, is conferred in the process of the invention, if the activity of a polypeptide showing the activity of a carbon dioxide concentrating mechanism protein, or if the activity of the polypeptide Sll1031, preferably represented by SEQ ID NO. 52635, or a homolog or fragment thereof, or if the activity of a polypeptide encoded by a nucleic acid molecule comprising the nucleic acid SEQ ID NO. 52634, preferably the coding region thereof, or a homolog or fragment thereof, e.g. derived from Synechocystis sp., is increased or generated. For example the activity of a nucleic acid molecule or a polypeptide comprising the nucleic acid, preferably the coding region thereof, or polypeptide or the consensus sequence or the polypeptide motif, as depicted in Table I, II or IV, application No. 3, column 5 or 8 in the respective same line as the nucleic acid molecule SEQ ID NO. 52634 or polypeptide SEQ ID NO. 52635, respectively, or a homolog or a fragment thereof, is increased or generated, or if the activity carbon dioxide concentrating mechanism protein is increased or generated in a non-human organism, like a microorganism or a plant cell, plant or part thereof, especially with mitochondrial localization, whereby the respective line discloses in column 7 phenylalanine. For example, an increase of the phenylalanine of at least 1 percent, particularly in a range of 33 to 128-percent is conferred as compared to a corresponding non-transformed wild type non-human organism.

[22744] Accordingly, in one embodiment, an increase of serine in a non-human organism, as compared to a corresponding non-transformed wild type non-human organism, is conferred in the process of the invention, if the activity of a polypeptide showing the activity of a carbon dioxide concentrating mechanism protein, or if the activity of the polypeptide Sll1031, preferably represented by SEQ ID NO. 52635, or a homolog or fragment thereof, or if the activity of a polypeptide encoded by a nucleic acid molecule comprising the nucleic acid SEQ ID NO. 52634, preferably the coding region thereof, or a homolog or fragment thereof, e.g. derived from Synechocystis sp., is increased or generated. For example the activity of a nucleic acid molecule or a polypeptide comprising the nucleic acid, preferably the coding region thereof, or polypeptide or the consensus sequence or the polypeptide motif, as depicted in Table I, II or IV, application No. 3, column 5 or 8 in the respective same line as the nucleic acid molecule SEQ ID NO. 52634 or polypeptide SEQ ID NO. 52635, respectively, or a homolog or a fragment thereof, is increased or generated, or if the activity carbon dioxide concentrating mechanism protein is increased or generated in a non-human organism, like a microorganism or a plant cell, plant or part thereof, especially with mitochondrial localization, whereby the respective line discloses in column 7 serine. For example, an increase of the serine of at least 1 percent, particularly in a range of 24 to 67 percent is conferred as compared to a corresponding non-transformed wild type non-human organism.

[22745] Accordingly, in one embodiment, an increase of aspartate in a non-human organism, as compared to a corresponding non-transformed wild type non-human organism, is conferred in the process of the invention, if the activity of a polypeptide showing the activity of a sll1032-protein, or if the activity of the polypeptide Sll1032, preferably represented by SEQ ID NO. 85724, or a homolog or fragment thereof, or if the activity of a polypeptide encoded by a nucleic acid molecule comprising the nucleic acid SEQ ID NO. 85723, preferably the coding region thereof, or a homolog or fragment thereof, e.g. derived from Synechocystis sp., is increased or generated. For example the activity of a nucleic acid molecule or a polypeptide comprising the nucleic acid, preferably the coding region thereof, or polypeptide or the consensus sequence or the polypeptide motif, as depicted in Table I, II or IV, application No. 3, column 5 or 8 in the respective same line as the nucleic acid molecule SEQ ID NO. 85723 or polypeptide SEQ ID NO. 85724, respectively, or a homolog or a fragment thereof, is increased or generated, or if the activity sll1032-protein is increased or generated in a non-human organism, like a microorganism or a plant cell, plant or part thereof, especially with mitochondrial localization, whereby the respective line discloses in column 7 aspartate. For example, an increase of the aspartate of at least 1 percent, particularly in a range of 45 to 106-percent is conferred as compared to a corresponding non-transformed wild type non-human organism.

[22746] Accordingly, in one embodiment, an increase of serine in a non-human organism, as compared to a corresponding non-transformed wild type non-human organism, is conferred in the process of the invention, if the activity of a polypeptide showing the activity of a phosphoribosylformyl glycinamidine synthase subunit, or if the activity of the polypeptide Sll1056, preferably represented by SEQ ID NO. 52661, or a homolog or fragment thereof, or if the activity of a polypeptide encoded by a nucleic acid molecule comprising the nucleic acid SEQ ID NO. 52660, preferably the coding region thereof, or a homolog or fragment thereof, e.g. derived from Synechocystis sp., is increased or generated. For example the activity of a nucleic acid molecule or a polypeptide comprising the nucleic acid, preferably the coding region thereof, or polypeptide or the consensus sequence or the polypeptide motif, as depicted in Table I, II or IV, application No. 3, column 5 or 8 in the respective same line as the nucleic acid molecule SEQ ID NO. 52660 or polypeptide SEQ ID NO. 52661, respectively, or a homolog or a fragment thereof, is increased or generated, or if the activity phosphoribosylformyl glycinamidine synthase subunit is increased or generated in a non-human organism, like a microorganism or a plant cell, plant or part thereof, especially with plastidic localization, whereby the respective line discloses in column 7 serine. For example, an increase of the serine of at least 1 percent, particularly in a range of 24 to 75-percent is conferred as compared to a corresponding non-transformed wild type non-human organism.

[22747] Accordingly, in one embodiment, an increase of aspartate in a non-human organism, as compared to a corresponding non-transformed wild type non-human organism, is conferred in the process of the invention, if the activity of a polypeptide showing the activity of a 5′-nucleotidase, or if the activity of the polypeptide Sll1108, preferably represented by SEQ ID NO. 11212, or a homolog or fragment thereof, or if the activity of a polypeptide encoded by a nucleic acid molecule comprising the nucleic acid SEQ ID NO. 11211, preferably the coding region thereof, or a homolog or fragment thereof, e.g. derived from Synechocystis sp., is increased or generated. For example the activity of a nucleic acid molecule or a polypeptide comprising the nucleic acid, preferably the coding region thereof, or polypeptide or the consensus sequence or the polypeptide motif, as depicted in Table I, II or IV, application No. 3, column 5 or 8 in the respective same line as the nucleic acid molecule SEQ ID NO. 11211 or polypeptide SEQ ID NO. 11212, respectively, or a homolog or a fragment thereof, is increased or generated, or if the activity 5′-nucleotidase is increased or generated in a non-human organism, like a microorganism or a plant cell, plant or part thereof, especially with mitochondrial localization, whereby the respective line discloses in column 7 aspartate. For example, an increase of the aspartate of at least 1 percent, particularly in a range of 55 to 137-percent is conferred as compared to a corresponding non-transformed wild type non-human organism.

[22748] Accordingly, in one embodiment, an increase of 5-oxoproline in a non-human organism, as compared to a corresponding non-transformed wild type non-human organism, is conferred in the process of the invention, if the activity of a polypeptide showing the activity of a 5′-nucleotidase, or if the activity of the polypeptide Sll1108, preferably represented by SEQ ID NO. 11212, or a homolog or fragment thereof, or if the activity of a polypeptide encoded by a nucleic acid molecule comprising the nucleic acid SEQ ID NO. 11211, preferably the coding region thereof, or a homolog or fragment thereof, e.g. derived from Synechocystis sp., is increased or generated. For example the activity of a nucleic acid molecule or a polypeptide comprising the nucleic acid, preferably the coding region thereof, or polypeptide or the consensus sequence or the polypeptide motif, as depicted in Table I, II or IV, application No. 3, column 5 or 8 in the respective same line as the nucleic acid molecule SEQ ID NO. 11211 or polypeptide SEQ ID NO. 11212, respectively, or a homolog or a fragment thereof, is increased or generated, or if the activity 5′-nucleotidase is increased or generated in a non-human organism, like a microorganism or a plant cell, plant or part thereof, especially with mitochondrial localization, whereby the respective line discloses in column 7 5-oxoproline. For example, an increase of the 5-oxoproline of at least 1 percent, particularly in a range of 39 to 103-percent is conferred as compared to a corresponding non-transformed wild type non-human organism.

[22749] Accordingly, in one embodiment, an increase of asparagine in a non-human organism, as compared to a corresponding non-transformed wild type non-human organism, is conferred in the process of the invention, if the activity of a polypeptide showing the activity of a glycogen (starch) synthase, or if the activity of the polypeptide Sll1393, preferably represented by SEQ ID NO. 53457, or a homolog or fragment thereof, or if the activity of a polypeptide encoded by a nucleic acid molecule comprising the nucleic acid SEQ ID NO. 53456, preferably the coding region thereof, or a homolog or fragment thereof, e.g. derived from Synechocystis sp., is increased or generated. For example the activity of a nucleic acid molecule or a polypeptide comprising the nucleic acid, preferably the coding region thereof, or polypeptide or the consensus sequence or the polypeptide motif, as depicted in Table I, II or IV, application No. 3, column 5 or 8 in the respective same line as the nucleic acid molecule SEQ ID NO. 53456 or polypeptide SEQ ID NO. 53457, respectively, or a homolog or a fragment thereof, is increased or generated, or if the activity glycogen (starch) synthase is increased or generated in a non-human organism, like a microorganism or a plant cell, plant or part thereof, especially with non-targeted localization, whereby the respective line discloses in column 7 asparagine. For example, an increase of the asparagine of at least 1 percent, particularly in a range of 55 to 264-percent is conferred as compared to a corresponding non-transformed wild type non-human organism.

[22750] Accordingly, in one embodiment, an increase of tyrosine in a non-human organism, as compared to a corresponding non-transformed wild type non-human organism, is conferred in the process of the invention, if the activity of a polypeptide showing the activity of a glycogen (starch) synthase, or if the activity of the polypeptide Sll1393, preferably represented by SEQ ID NO. 53457, or a homolog or fragment thereof, or if the activity of a polypeptide encoded by a nucleic acid molecule comprising the nucleic acid SEQ ID NO. 53456, preferably the coding region thereof, or a homolog or fragment thereof, e.g. derived from Synechocystis sp., is increased or generated. For example the activity of a nucleic acid molecule or a polypeptide comprising the nucleic acid, preferably the coding region thereof, or polypeptide or the consensus sequence or the polypeptide motif, as depicted in Table I, II or IV, application No. 3, column 5 or 8 in the respective same line as the nucleic acid molecule SEQ ID NO. 53456 or polypeptide SEQ ID NO. 53457, respectively, or a homolog or a fragment thereof, is increased or generated, or if the activity glycogen (starch) synthase is increased or generated in a non-human organism, like a microorganism or a plant cell, plant or part thereof, especially with non-targeted localization, whereby the respective line discloses in column 7 tyrosine. For example, an increase of the tyrosine of at least 1 percent, particularly in a range of 82 to 129-percent is conferred as compared to a corresponding non-transformed wild type non-human organism.

[22751] Accordingly, in one embodiment, an increase of aspartate in a non-human organism, as compared to a corresponding non-transformed wild type non-human organism, is conferred in the process of the invention, if the activity of a polypeptide showing the activity of a CTP synthetase, or if the activity of the polypeptide Sll1443, preferably represented by SEQ ID NO. 53879, or a homolog or fragment thereof, or if the activity of a polypeptide encoded by a nucleic acid molecule comprising the nucleic acid SEQ ID NO. 53878, preferably the coding region thereof, or a homolog or fragment thereof, e.g. derived from Synechocystis sp., is increased or generated. For example the activity of a nucleic acid molecule or a polypeptide comprising the nucleic acid, preferably the coding region thereof, or polypeptide or the consensus sequence or the polypeptide motif, as depicted in Table I, II or IV, application No. 3, column 5 or 8 in the respective same line as the nucleic acid molecule SEQ ID NO. 53878 or polypeptide SEQ ID NO. 53879, respectively, or a homolog or a fragment thereof, is increased or generated, or if the activity CTP synthetase is increased or generated in a non-human organism, like a microorganism or a plant cell, plant or part thereof, especially with mitochondrial localization, whereby the respective line discloses in column 7 aspartate. For example, an increase of the aspartate of at least 1 percent, particularly in a range of 58 to 119-percent is conferred as compared to a corresponding non-transformed wild type non-human organism.

[22752] Accordingly, in one embodiment, an increase of glycine in a non-human organism, as compared to a corresponding non-transformed wild type non-human organism, is conferred in the process of the invention, if the activity of a polypeptide showing the activity of a nitrate/nitrite transport protein, or if the activity of the polypeptide Sll1450, preferably represented by SEQ ID NO. 54338, or a homolog or fragment thereof, or if the activity of a polypeptide encoded by a nucleic acid molecule comprising the nucleic acid SEQ ID NO. 54337, preferably the coding region thereof, or a homolog or fragment thereof, e.g. derived from Synechocystis sp., is increased or generated. For example the activity of a nucleic acid molecule or a polypeptide comprising the nucleic acid, preferably the coding region thereof, or polypeptide or the consensus sequence or the polypeptide motif, as depicted in Table I, II or IV, application No. 3, column 5 or 8 in the respective same line as the nucleic acid molecule SEQ ID NO. 54337 or polypeptide SEQ ID NO. 54338, respectively, or a homolog or a fragment thereof, is increased or generated, or if the activity nitrate/nitrite transport protein is increased or generated in a non-human organism, like a microorganism or a plant cell, plant or part thereof, especially with mitochondrial localization, whereby the respective line discloses in column 7 glycine. For example, an increase of the glycine of at least 1 percent, particularly in a range of 36 to 102-percent is conferred as compared to a corresponding non-transformed wild type non-human organism.

[22753] Accordingly, in one embodiment, an increase of phenylalanine in a non-human organism, as compared to a corresponding non-transformed wild type non-human organism, is conferred in the process of the invention, if the activity of a polypeptide showing the activity of a nitrate/nitrite transport protein, or if the activity of the polypeptide Sll1450, preferably represented by SEQ ID NO. 54338, or a homolog or fragment thereof, or if the activity of a polypeptide encoded by a nucleic acid molecule comprising the nucleic acid SEQ ID NO. 54337, preferably the coding region thereof, or a homolog or fragment thereof, e.g. derived from Synechocystis sp., is increased or generated. For example the activity of a nucleic acid molecule or a polypeptide comprising the nucleic acid, preferably the coding region thereof, or polypeptide or the consensus sequence or the polypeptide motif, as depicted in Table I, II or IV, application No. 3, column 5 or 8 in the respective same line as the nucleic acid molecule SEQ ID NO. 54337 or polypeptide SEQ ID NO. 54338, respectively, or a homolog or a fragment thereof, is increased or generated, or if the activity nitrate/nitrite transport protein is increased or generated in a non-human organism, like a microorganism or a plant cell, plant or part thereof, especially with mitochondrial localization, whereby the respective line discloses in column 7 phenylalanine. For example, an increase of the phenylalanine of at least 1 percent, particularly in a range of 32 to 42-percent is conferred as compared to a corresponding non-transformed wild type non-human organism.

[22754] Accordingly, in one embodiment, an increase of serine in a non-human organism, as compared to a corresponding non-transformed wild type non-human organism, is conferred in the process of the invention, if the activity of a polypeptide showing the activity of a nitrate/nitrite transport protein, or if the activity of the polypeptide Sll1450, preferably represented by SEQ ID NO. 54338, or a homolog or fragment thereof, or if the activity of a polypeptide encoded by a nucleic acid molecule comprising the nucleic acid SEQ ID NO. 54337, preferably the coding region thereof, or a homolog or fragment thereof, e.g. derived from Synechocystis sp., is increased or generated. For example the activity of a nucleic acid molecule or a polypeptide comprising the nucleic acid, preferably the coding region thereof, or polypeptide or the consensus sequence or the polypeptide motif, as depicted in Table I, II or IV, application No. 3, column 5 or 8 in the respective same line as the nucleic acid molecule SEQ ID NO. 54337 or polypeptide SEQ ID NO. 54338, respectively, or a homolog or a fragment thereof, is increased or generated, or if the activity nitrate/nitrite transport protein is increased or generated in a non-human organism, like a microorganism or a plant cell, plant or part thereof, especially with mitochondrial localization, whereby the respective line discloses in column 7 serine. For example, an increase of the serine of at least 1 percent, particularly in a range of 24 to 83-percent is conferred as compared to a corresponding non-transformed wild type non-human organism.

[22755] Accordingly, in one embodiment, an increase of tyrosine in a non-human organism, as compared to a corresponding non-transformed wild type non-human organism, is conferred in the process of the invention, if the activity of a polypeptide showing the activity of a nitrate/nitrite transport protein, or if the activity of the polypeptide Sll1450, preferably represented by SEQ ID NO. 54338, or a homolog or fragment thereof, or if the activity of a polypeptide encoded by a nucleic acid molecule comprising the nucleic acid SEQ ID NO. 54337, preferably the coding region thereof, or a homolog or fragment thereof, e.g. derived from Synechocystis sp., is increased or generated. For example the activity of a nucleic acid molecule or a polypeptide comprising the nucleic acid, preferably the coding region thereof, or polypeptide or the consensus sequence or the polypeptide motif, as depicted in Table I, II or IV, application No. 3, column 5 or 8 in the respective same line as the nucleic acid molecule SEQ ID NO. 54337 or polypeptide SEQ ID NO. 54338, respectively, or a homolog or a fragment thereof, is increased or generated, or if the activity nitrate/nitrite transport protein is increased or generated in a non-human organism, like a microorganism or a plant cell, plant or part thereof, especially with mitochondrial localization, whereby the respective line discloses in column 7 tyrosine. For example, an increase of the tyrosine of at least 1 percent, particularly in a range of 37 to 92-percent is conferred as compared to a corresponding non-transformed wild type non-human organism.

[22756] Accordingly, in one embodiment, an increase of aspartate in a non-human organism, as compared to a corresponding non-transformed wild type non-human organism, is conferred in the process of the invention, if the activity of a polypeptide showing the activity of a CDP-diacylglycerol-glycerol-3-phosphate 3-phosphatidyltransferase, or if the activity of the polypeptide Sll1522, preferably represented by SEQ ID NO. 54453, or a homolog or fragment thereof, or if the activity of a polypeptide encoded by a nucleic acid molecule comprising the nucleic acid SEQ ID NO. 54452, preferably the coding region thereof, or a homolog or fragment thereof, e.g. derived from Synechocystis sp., is increased or generated. For example the activity of a nucleic acid molecule or a polypeptide comprising the nucleic acid, preferably the coding region thereof, or polypeptide or the consensus sequence or the polypeptide motif, as depicted in Table I, II or IV, application No. 3, column 5 or 8 in the respective same line as the nucleic acid molecule SEQ ID NO. 54452 or polypeptide SEQ ID NO. 54453, respectively, or a homolog or a fragment thereof, is increased or generated, or if the activity CDP-diacylglycerol-glycerol-3-phosphate 3-phosphatidyltransferase is increased or generated in a non-human organism, like a microorganism or a plant cell, plant or part thereof, especially with plastidic localization, whereby the respective line discloses in column 7 aspartate. For example, an increase of the aspartate of at least 1 percent, particularly in a range of 50 to 230-percent is conferred as compared to a corresponding non-transformed wild type non-human organism.

[22757] Accordingly, in one embodiment, an increase of 5-oxoproline in a non-human organism, as compared to a corresponding non-transformed wild type non-human organism, is conferred in the process of the invention, if the activity of a polypeptide showing the activity of a CDP-diacylglycerol-glycerol-3-phosphate 3-phosphatidyltransferase, or if the activity of the polypeptide Sll1522, preferably represented by SEQ ID NO. 54453, or a homolog or fragment thereof, or if the activity of a polypeptide encoded by a nucleic acid molecule comprising the nucleic acid SEQ ID NO. 54452, preferably the coding region thereof, or a homolog or fragment thereof, e.g. derived from Synechocystis sp., is increased or generated. For example the activity of a nucleic acid molecule or a polypeptide comprising the nucleic acid, preferably the coding region thereof, or polypeptide or the consensus sequence or the polypeptide motif, as depicted in Table I, II or IV, application No. 3, column 5 or 8 in the respective same line as the nucleic acid molecule SEQ ID NO. 54452 or polypeptide SEQ ID NO. 54453, respectively, or a homolog or a fragment thereof, is increased or generated, or if the activity CDP-diacylglycerol-glycerol-3-phosphate 3-phosphatidyltransferase is increased or generated in a non-human organism, like a microorganism or a plant cell, plant or part thereof, especially with plastidic localization, whereby the respective line discloses in column 7 5-oxoproline. For example, an increase of the 5-oxoproline of at least 1 percent, particularly in a range of 33 to 103-percent is conferred as compared to a corresponding non-transformed wild type non-human organism.

[22758] Accordingly, in one embodiment, an increase of serine in a non-human organism, as compared to a corresponding non-transformed wild type non-human organism, is conferred in the process of the invention, if the activity of a polypeptide showing the activity of a glutathione S-transferase, or if the activity of the polypeptide Sll1545, preferably represented by SEQ ID NO. 11424, or a homolog or fragment thereof, or if the activity of a polypeptide encoded by a nucleic acid molecule comprising the nucleic acid SEQ ID NO. 11423, preferably the coding region thereof, or a homolog or fragment thereof, e.g. derived from Synechocystis sp., is increased or generated. For example the activity of a nucleic acid molecule or a polypeptide comprising the nucleic acid, preferably the coding region thereof, or polypeptide or the consensus sequence or the polypeptide motif, as depicted in Table I, II or IV, application No. 3, column 5 or 8 in the respective same line as the nucleic acid molecule SEQ ID NO. 11423 or polypeptide SEQ ID NO. 11424, respectively, or a homolog or a fragment thereof, is increased or generated, or if the activity glutathione S-transferase is increased or generated in a non-human organism, like a microorganism or a plant cell, plant or part thereof, especially with mitochondrial localization, whereby the respective line discloses in column 7 serine. For example, an increase of the serine of at least 1 percent, particularly in a range of 26 to 50-percent is conferred as compared to a corresponding non-transformed wild type non-human organism.

[22759] Accordingly, in one embodiment, an increase of aspartate in a non-human organism, as compared to a corresponding non-transformed wild type non-human organism, is conferred in the process of the invention, if the activity of a polypeptide showing the activity of a exopolyphosphatase, or if the activity of the polypeptide Sll1546, preferably represented by SEQ ID NO. 54805, or a homolog or fragment thereof, or if the activity of a polypeptide encoded by a nucleic acid molecule comprising the nucleic acid SEQ ID NO. 54804, preferably the coding region thereof, or a homolog or fragment thereof, e.g. derived from Synechocystis sp., is increased or generated. For example the activity of a nucleic acid molecule or a polypeptide comprising the nucleic acid, preferably the coding region thereof, or polypeptide or the consensus sequence or the polypeptide motif, as depicted in Table I, II or IV, application No. 3, column 5 or 8 in the respective same line as the nucleic acid molecule SEQ ID NO. 54804 or polypeptide SEQ ID NO. 54805, respectively, or a homolog or a fragment thereof, is increased or generated, or if the activity exopolyphosphatase is increased or generated in a non-human organism, like a microorganism or a plant cell, plant or part thereof, especially with non-targeted localization, whereby the respective line discloses in column 7 aspartate. For example, an increase of the aspartate of at least 1 percent, particularly in a range of 51 to 102-percent is conferred as compared to a corresponding non-transformed wild type non-human organism.

[22760] Accordingly, in one embodiment, an increase of phenylalanine in a non-human organism, as compared to a corresponding non-transformed wild type non-human organism, is conferred in the process of the invention, if the activity of a polypeptide showing the activity of a exopolyphosphatase, or if the activity of the polypeptide Sll1546, preferably represented by SEQ ID NO. 54805, or a homolog or fragment thereof, or if the activity of a polypeptide encoded by a nucleic acid molecule comprising the nucleic acid SEQ ID NO. 54804, preferably the coding region thereof, or a homolog or fragment thereof, e.g. derived from Synechocystis sp., is increased or generated. For example the activity of a nucleic acid molecule or a polypeptide comprising the nucleic acid, preferably the coding region thereof, or polypeptide or the consensus sequence or the polypeptide motif, as depicted in Table I, II or IV, application No. 3, column 5 or 8 in the respective same line as the nucleic acid molecule SEQ ID NO. 54804 or polypeptide SEQ ID NO. 54805, respectively, or a homolog or a fragment thereof, is increased or generated, or if the activity exopolyphosphatase is increased or generated in a non-human organism, like a microorganism or a plant cell, plant or part thereof, especially with non-targeted localization, whereby the respective line discloses in column 7 phenylalanine. For example, an increase of the phenylalanine of at least 1 percent, particularly in a range of 27 to 53-percent is conferred as compared to a corresponding non-transformed wild type non-human organism.

[22761] Accordingly, in one embodiment, an increase of serine in a non-human organism, as compared to a corresponding non-transformed wild type non-human organism, is conferred in the process of the invention, if the activity of a polypeptide showing the activity of a exopolyphosphatase, or if the activity of the polypeptide Sll1546, preferably represented by SEQ ID NO. 54805, or a homolog or fragment thereof, or if the activity of a polypeptide encoded by a nucleic acid molecule comprising the nucleic acid SEQ ID NO. 54804, preferably the coding region thereof, or a homolog or fragment thereof, e.g. derived from Synechocystis sp., is increased or generated. For example the activity of a nucleic acid molecule or a polypeptide comprising the nucleic acid, preferably the coding region thereof, or polypeptide or the consensus sequence or the polypeptide motif, as depicted in Table I, II or IV, application No. 3, column 5 or 8 in the respective same line as the nucleic acid molecule SEQ ID NO. 54804 or polypeptide SEQ ID NO. 54805, respectively, or a homolog or a fragment thereof, is increased or generated, or if the activity exopolyphosphatase is increased or generated in a non-human organism, like a microorganism or a plant cell, plant or part thereof, especially with non-targeted localization, whereby the respective line discloses in column 7 serine. For example, an increase of the serine of at least 1 percent, particularly in a range of 25 to 45-percent is conferred as compared to a corresponding non-transformed wild type non-human organism.

[22762] Accordingly, in one embodiment, an increase of aspartate in a non-human organism, as compared to a corresponding non-transformed wild type non-human organism, is conferred in the process of the invention, if the activity of a polypeptide showing the activity of a ABC metal ion transporter substrate-binding protein, or if the activity of the polypeptide Sll1598, preferably represented by SEQ ID NO. 85744, or a homolog or fragment thereof, or if the activity of a polypeptide encoded by a nucleic acid molecule comprising the nucleic acid SEQ ID NO. 85743, preferably the coding region thereof, or a homolog or fragment thereof, e.g. derived from Synechocystis sp., is increased or generated. For example the activity of a nucleic acid molecule or a polypeptide comprising the nucleic acid, preferably the coding region thereof, or polypeptide or the consensus sequence or the polypeptide motif, as depicted in Table I, II or IV, application No. 3, column 5 or 8 in the respective same line as the nucleic acid molecule SEQ ID NO. 85743 or polypeptide SEQ ID NO. 85744, respectively, or a homolog or a fragment thereof, is increased or generated, or if the activity ABC metal ion transporter substrate-binding protein is increased or generated in a non-human organism, like a microorganism or a plant cell, plant or part thereof, especially with mitochondrial localization, whereby the respective line discloses in column 7 aspartate. For example, an increase of the aspartate of at least 1 percent, particularly in a range of 55 to 138-percent is conferred as compared to a corresponding non-transformed wild type non-human organism.

[22763] Accordingly, in one embodiment, an increase of phenylalanine in a non-human organism, as compared to a corresponding non-transformed wild type non-human organism, is conferred in the process of the invention, if the activity of a polypeptide showing the activity of a ABC metal ion transporter substrate-binding protein, or if the activity of the polypeptide Sll1598, preferably represented by SEQ ID NO. 85744, or a homolog or fragment thereof, or if the activity of a polypeptide encoded by a nucleic acid molecule comprising the nucleic acid SEQ ID NO. 85743, preferably the coding region thereof, or a homolog or fragment thereof, e.g. derived from Synechocystis sp., is increased or generated. For example the activity of a nucleic acid molecule or a polypeptide comprising the nucleic acid, preferably the coding region thereof, or polypeptide or the consensus sequence or the polypeptide motif, as depicted in Table I, II or IV, application No. 3, column 5 or 8 in the respective same line as the nucleic acid molecule SEQ ID NO. 85743 or polypeptide SEQ ID NO. 85744, respectively, or a homolog or a fragment thereof, is increased or generated, or if the activity ABC metal ion transporter substrate-binding protein is increased or generated in a non-human organism, like a microorganism or a plant cell, plant or part thereof, especially with mitochondrial localization, whereby the respective line discloses in column 7 phenylalanine. For example, an increase of the phenylalanine of at least 1 percent, particularly in a range of 26 to 113-percent is conferred as compared to a corresponding non-transformed wild type non-human organism.

[22764] Accordingly, in one embodiment, an increase of serine in a non-human organism, as compared to a corresponding non-transformed wild type non-human organism, is conferred in the process of the invention, if the activity of a polypeptide showing the activity of a sll1761-protein, or if the activity of the polypeptide Sll1761, preferably represented by SEQ ID NO. 55380, or a homolog or fragment thereof, or if the activity of a polypeptide encoded by a nucleic acid molecule comprising the nucleic acid SEQ ID NO. 55379, preferably the coding region thereof, or a homolog or fragment thereof, e.g. derived from Synechocystis sp., is increased or generated. For example the activity of a nucleic acid molecule or a polypeptide comprising the nucleic acid, preferably the coding region thereof, or polypeptide or the consensus sequence or the polypeptide motif, as depicted in Table I, II or IV, application No. 3, column 5 or 8 in the respective same line as the nucleic acid molecule SEQ ID NO. 55379 or polypeptide SEQ ID NO. 55380, respectively, or a homolog or a fragment thereof, is increased or generated, or if the activity sll1761-protein is increased or generated in a non-human organism, like a microorganism or a plant cell, plant or part thereof, especially with non-targeted localization, whereby the respective line discloses in column 7 serine. For example, an increase of the serine of at least 1 percent, particularly in a range of 23 to 63-percent is conferred as compared to a corresponding non-transformed wild type non-human organism.

[22765] Accordingly, in one embodiment, an increase of tyrosine in a non-human organism, as compared to a corresponding non-transformed wild type non-human organism, is conferred in the process of the invention, if the activity of a polypeptide showing the activity of a sll1761-protein, or if the activity of the polypeptide Sll1761, preferably represented by SEQ ID NO. 55380, or a homolog or fragment thereof, or if the activity of a polypeptide encoded by a nucleic acid molecule comprising the nucleic acid SEQ ID NO. 55379, preferably the coding region thereof, or a homolog or fragment thereof, e.g. derived from Synechocystis sp., is increased or generated. For example the activity of a nucleic acid molecule or a polypeptide comprising the nucleic acid, preferably the coding region thereof, or polypeptide or the consensus sequence or the polypeptide motif, as depicted in Table I, II or IV, application No. 3, column 5 or 8 in the respective same line as the nucleic acid molecule SEQ ID NO. 55379 or polypeptide SEQ ID NO. 55380, respectively, or a homolog or a fragment thereof, is increased or generated, or if the activity sll1761-protein is increased or generated in a non-human organism, like a microorganism or a plant cell, plant or part thereof, especially with non-targeted localization, whereby the respective line discloses in column 7 tyrosine. For example, an increase of the tyrosine of at least 1 percent, particularly in a range of 39 to 141-percent is conferred as compared to a corresponding non-transformed wild type non-human organism.

[22766] Accordingly, in one embodiment, an increase of alanine in a non-human organism, as compared to a corresponding non-transformed wild type non-human organism, is conferred in the process of the invention, if the activity of a polypeptide showing the activity of a adenylate kinase, or if the activity of the polypeptide Sll1815, preferably represented by SEQ ID NO. 85809, or a homolog or fragment thereof, or if the activity of a polypeptide encoded by a nucleic acid molecule comprising the nucleic acid SEQ ID NO. 85808, preferably the coding region thereof, or a homolog or fragment thereof, e.g. derived from Synechocystis sp., is increased or generated. For example the activity of a nucleic acid molecule or a polypeptide comprising the nucleic acid, preferably the coding region thereof, or polypeptide or the consensus sequence or the polypeptide motif, as depicted in Table I, II or IV, application No. 3, column 5 or 8 in the respective same line as the nucleic acid molecule SEQ ID NO. 85808 or polypeptide SEQ ID NO. 85809, respectively, or a homolog or a fragment thereof, is increased or generated, or if the activity adenylate kinase is increased or generated in a non-human organism, like a microorganism or a plant cell, plant or part thereof, especially with mitochondrial localization, whereby the respective line discloses in column 7 alanine. For example, an increase of the alanine of at least 1 percent, particularly in a range of 31 to 483-percent is conferred as compared to a corresponding non-transformed wild type non-human organism.

[22767] Accordingly, in one embodiment, an increase of citrulline in a non-human organism, as compared to a corresponding non-transformed wild type non-human organism, is conferred in the process of the invention, if the activity of a polypeptide showing the activity of a adenylate kinase, or if the activity of the polypeptide Sll1815, preferably represented by SEQ ID NO. 85809, or a homolog or fragment thereof, or if the activity of a polypeptide encoded by a nucleic acid molecule comprising the nucleic acid SEQ ID NO. 85808, preferably the coding region thereof, or a homolog or fragment thereof, e.g. derived from Synechocystis sp., is increased or generated. For example the activity of a nucleic acid molecule or a polypeptide comprising the nucleic acid, preferably the coding region thereof, or polypeptide or the consensus sequence or the polypeptide motif, as depicted in Table I, II or IV, application No. 3, column 5 or 8 in the respective same line as the nucleic acid molecule SEQ ID NO. 85808 or polypeptide SEQ ID NO. 85809, respectively, or a homolog or a fragment thereof, is increased or generated, or if the activity adenylate kinase is increased or generated in a non-human organism, like a microorganism or a plant cell, plant or part thereof, especially with mitochondrial localization, whereby the respective line discloses in column 7 citrulline. For example, an increase of the citrulline of at least 1 percent, particularly in a range of 39 to 122-percent is conferred as compared to a corresponding non-transformed wild type non-human organism.

[22768] Accordingly, in one embodiment, an increase of glycine in a non-human organism, as compared to a corresponding non-transformed wild type non-human organism, is conferred in the process of the invention, if the activity of a polypeptide showing the activity of a adenylate kinase, or if the activity of the polypeptide Sll1815, preferably represented by SEQ ID NO. 85809, or a homolog or fragment thereof, or if the activity of a polypeptide encoded by a nucleic acid molecule comprising the nucleic acid SEQ ID NO. 85808, preferably the coding region thereof, or a homolog or fragment thereof, e.g. derived from Synechocystis sp., is increased or generated. For example the activity of a nucleic acid molecule or a polypeptide comprising the nucleic acid, preferably the coding region thereof, or polypeptide or the consensus sequence or the polypeptide motif, as depicted in Table I, II or IV, application No. 3, column 5 or 8 in the respective same line as the nucleic acid molecule SEQ ID NO. 85808 or polypeptide SEQ ID NO. 85809, respectively, or a homolog or a fragment thereof, is increased or generated, or if the activity adenylate kinase is increased or generated in a non-human organism, like a microorganism or a plant cell, plant or part thereof, especially with mitochondrial localization, whereby the respective line discloses in column 7 glycine. For example, an increase of the glycine of at least 1 percent, particularly in a range of 118 to 238-percent is conferred as compared to a corresponding non-transformed wild type non-human organism.

[22769] Accordingly, in one embodiment, an increase of serine in a non-human organism, as compared to a corresponding non-transformed wild type non-human organism, is conferred in the process of the invention, if the activity of a polypeptide showing the activity of a adenylate kinase, or if the activity of the polypeptide Sll1815, preferably represented by SEQ ID NO. 85809, or a homolog or fragment thereof, or if the activity of a polypeptide encoded by a nucleic acid molecule comprising the nucleic acid SEQ ID NO. 85808, preferably the coding region thereof, or a homolog or fragment thereof, e.g. derived from Synechocystis sp., is increased or generated. For example the activity of a nucleic acid molecule or a polypeptide comprising the nucleic acid, preferably the coding region thereof, or polypeptide or the consensus sequence or the polypeptide motif, as depicted in Table I, II or IV, application No. 3, column 5 or 8 in the respective same line as the nucleic acid molecule SEQ ID NO. 85808 or polypeptide SEQ ID NO. 85809, respectively, or a homolog or a fragment thereof, is increased or generated, or if the activity adenylate kinase is increased or generated in a non-human organism, like a microorganism or a plant cell, plant or part thereof, especially with mitochondrial localization, whereby the respective line discloses in column 7 serine. For example, an increase of the serine of at least 1 percent, particularly in a range of 55 to 83-percent is conferred as compared to a corresponding non-transformed wild type non-human organism.

[22770] Accordingly, in one embodiment, an increase of tyrosine in a non-human organism, as compared to a corresponding non-transformed wild type non-human organism, is conferred in the process of the invention, if the activity of a polypeptide showing the activity of a adenylate kinase, or if the activity of the polypeptide Sll1815, preferably represented by SEQ ID NO. 85809, or a homolog or fragment thereof, or if the activity of a polypeptide encoded by a nucleic acid molecule comprising the nucleic acid SEQ ID NO. 85808, preferably the coding region thereof, or a homolog or fragment thereof, e.g. derived from Synechocystis sp., is increased or generated. For example the activity of a nucleic acid molecule or a polypeptide comprising the nucleic acid, preferably the coding region thereof, or polypeptide or the consensus sequence or the polypeptide motif, as depicted in Table I, II or IV, application No. 3, column 5 or 8 in the respective same line as the nucleic acid molecule SEQ ID NO. 85808 or polypeptide SEQ ID NO. 85809, respectively, or a homolog or a fragment thereof, is increased or generated, or if the activity adenylate kinase is increased or generated in a non-human organism, like a microorganism or a plant cell, plant or part thereof, especially with mitochondrial localization, whereby the respective line discloses in column 7 tyrosine. For example, an increase of the tyrosine of at least 1 percent, particularly in a range of 39 to 88-percent is conferred as compared to a corresponding non-transformed wild type non-human organism.

[22771] Accordingly, in one embodiment, an increase of glycine in a non-human organism, as compared to a corresponding non-transformed wild type non-human organism, is conferred in the process of the invention, if the activity of a polypeptide showing the activity of a acyl transferase, or if the activity of the polypeptide Sll1848, preferably represented by SEQ ID NO. 86448, or a homolog or fragment thereof, or if the activity of a polypeptide encoded by a nucleic acid molecule comprising the nucleic acid SEQ ID NO. 86447, preferably the coding region thereof, or a homolog or fragment thereof, e.g. derived from Synechocystis sp., is increased or generated. For example the activity of a nucleic acid molecule or a polypeptide comprising the nucleic acid, preferably the coding region thereof, or polypeptide or the consensus sequence or the polypeptide motif, as depicted in Table I, II or IV, application No. 3, column 5 or 8 in the respective same line as the nucleic acid molecule SEQ ID NO. 86447 or polypeptide SEQ ID NO. 86448, respectively, or a homolog or a fragment thereof, is increased or generated, or if the activity acyl transferase is increased or generated in a non-human organism, like a microorganism or a plant cell, plant or part thereof, especially with plastidic localization, whereby the respective line discloses in column 7 glycine. For example, an increase of the glycine of at least 1 percent, particularly in a range of 48 to 205-percent is conferred as compared to a corresponding non-transformed wild type non-human organism.

[22772] Accordingly, in one embodiment, an increase of phenylalanine in a non-human organism, as compared to a corresponding non-transformed wild type non-human organism, is conferred in the process of the invention, if the activity of a polypeptide showing the activity of a acyl transferase, or if the activity of the polypeptide Sll1848, preferably represented by SEQ ID NO. 86448, or a homolog or fragment thereof, or if the activity of a polypeptide encoded by a nucleic acid molecule comprising the nucleic acid SEQ ID NO. 86447, preferably the coding region thereof, or a homolog or fragment thereof, e.g. derived from Synechocystis sp., is increased or generated. For example the activity of a nucleic acid molecule or a polypeptide comprising the nucleic acid, preferably the coding region thereof, or polypeptide or the consensus sequence or the polypeptide motif, as depicted in Table I, II or IV, application No. 3, column 5 or 8 in the respective same line as the nucleic acid molecule SEQ ID NO. 86447 or polypeptide SEQ ID NO. 86448, respectively, or a homolog or a fragment thereof, is increased or generated, or if the activity acyl transferase is increased or generated in a non-human organism, like a microorganism or a plant cell, plant or part thereof, especially with plastidic localization, whereby the respective line discloses in column 7 phenylalanine. For example, an increase of the phenylalanine of at least 1 percent, particularly in a range of 26 to 318-percent is conferred as compared to a corresponding non-transformed wild type non-human organism.

[22773] Accordingly, in one embodiment, an increase of serine in a non-human organism, as compared to a corresponding non-transformed wild type non-human organism, is conferred in the process of the invention, if the activity of a polypeptide showing the activity of a acyl transferase, or if the activity of the polypeptide Sll1848, preferably represented by SEQ ID NO. 86448, or a homolog or fragment thereof, or if the activity of a polypeptide encoded by a nucleic acid molecule comprising the nucleic acid SEQ ID NO. 86447, preferably the coding region thereof, or a homolog or fragment thereof, e.g. derived from Synechocystis sp., is increased or generated. For example the activity of a nucleic acid molecule or a polypeptide comprising the nucleic acid, preferably the coding region thereof, or polypeptide or the consensus sequence or the polypeptide motif, as depicted in Table I, II or IV, application No. 3, column 5 or 8 in the respective same line as the nucleic acid molecule SEQ ID NO. 86447 or polypeptide SEQ ID NO. 86448, respectively, or a homolog or a fragment thereof, is increased or generated, or if the activity acyl transferase is increased or generated in a non-human organism, like a microorganism or a plant cell, plant or part thereof, especially with plastidic localization, whereby the respective line discloses in column 7 serine. For example, an increase of the serine of at least 1 percent, particularly in a range of 28 to 319-percent is conferred as compared to a corresponding non-transformed wild type non-human organism.

[22774] Accordingly, in one embodiment, an increase of aspartate in a non-human organism, as compared to a corresponding non-transformed wild type non-human organism, is conferred in the process of the invention, if the activity of a polypeptide showing the activity of a coproporphyrinogen III oxidase, or if the activity of the polypeptide Sll1917, preferably represented by SEQ ID NO. 11472, or a homolog or fragment thereof, or if the activity of a polypeptide encoded by a nucleic acid molecule comprising the nucleic acid SEQ ID NO. 11471, preferably the coding region thereof, or a homolog or fragment thereof, e.g. derived from Synechocystis sp., is increased or generated. For example the activity of a nucleic acid molecule or a polypeptide comprising the nucleic acid, preferably the coding region thereof, or polypeptide or the consensus sequence or the polypeptide motif, as depicted in Table I, II or IV, application No. 3, column 5 or 8 in the respective same line as the nucleic acid molecule SEQ ID NO. 11471 or polypeptide SEQ ID NO. 11472, respectively, or a homolog or a fragment thereof, is increased or generated, or if the activity coproporphyrinogen III oxidase is increased or generated in a non-human organism, like a microorganism or a plant cell, plant or part thereof, especially with mitochondrial localization, whereby the respective line discloses in column 7 aspartate. For example, an increase of the aspartate of at least 1 percent, particularly in a range of 64 to 265-percent is conferred as compared to a corresponding non-transformed wild type non-human organism.

[22775] Accordingly, in one embodiment, an increase of citrulline in a non-human organism, as compared to a corresponding non-transformed wild type non-human organism, is conferred in the process of the invention, if the activity of a polypeptide showing the activity of a coproporphyrinogen III oxidase, or if the activity of the polypeptide Sll1917, preferably represented by SEQ ID NO. 11472, or a homolog or fragment thereof, or if the activity of a polypeptide encoded by a nucleic acid molecule comprising the nucleic acid SEQ ID NO. 11471, preferably the coding region thereof, or a homolog or fragment thereof, e.g. derived from Synechocystis sp., is increased or generated. For example the activity of a nucleic acid molecule or a polypeptide comprising the nucleic acid, preferably the coding region thereof, or polypeptide or the consensus sequence or the polypeptide motif, as depicted in Table I, II or IV, application No. 3, column 5 or 8 in the respective same line as the nucleic acid molecule SEQ ID NO. 11471 or polypeptide SEQ ID NO. 11472, respectively, or a homolog or a fragment thereof, is increased or generated, or if the activity coproporphyrinogen III oxidase is increased or generated in a non-human organism, like a microorganism or a plant cell, plant or part thereof, especially with mitochondrial localization, whereby the respective line discloses in column 7 citrulline. For example, an increase of the citrulline of at least 1 percent, particularly in a range of 41 to 71-percent is conferred as compared to a corresponding non-transformed wild type non-human organism.

[22776] Accordingly, in one embodiment, an increase of phenylalanine in a non-human organism, as compared to a corresponding non-transformed wild type non-human organism, is conferred in the process of the invention, if the activity of a polypeptide showing the activity of a coproporphyrinogen III oxidase, or if the activity of the polypeptide Sll1917, preferably represented by SEQ ID NO. 11472, or a homolog or fragment thereof, or if the activity of a polypeptide encoded by a nucleic acid molecule comprising the nucleic acid SEQ ID NO. 11471, preferably the coding region thereof, or a homolog or fragment thereof, e.g. derived from Synechocystis sp., is increased or generated. For example the activity of a nucleic acid molecule or a polypeptide comprising the nucleic acid, preferably the coding region thereof, or polypeptide or the consensus sequence or the polypeptide motif, as depicted in Table I, II or IV, application No. 3, column 5 or 8 in the respective same line as the nucleic acid molecule SEQ ID NO. 11471 or polypeptide SEQ ID NO. 11472, respectively, or a homolog or a fragment thereof, is increased or generated, or if the activity coproporphyrinogen Ill oxidase is increased or generated in a non-human organism, like a microorganism or a plant cell, plant or part thereof, especially with mitochondrial localization, whereby the respective line discloses in column 7 phenylalanine. For example, an increase of the phenylalanine of at least 1 percent, particularly in a range of 32 to 56 percent is conferred as compared to a corresponding non-transformed wild type non-human organism.

[22777] Accordingly, in one embodiment, an increase of serine in a non-human organism, as compared to a corresponding non-transformed wild type non-human organism, is conferred in the process of the invention, if the activity of a polypeptide showing the activity of a coproporphyrinogen III oxidase, or if the activity of the polypeptide Sll1917, preferably represented by SEQ ID NO. 11472, or a homolog or fragment thereof, or if the activity of a polypeptide encoded by a nucleic acid molecule comprising the nucleic acid SEQ ID NO. 11471, preferably the coding region thereof, or a homolog or fragment thereof, e.g. derived from Synechocystis sp., is increased or generated. For example the activity of a nucleic acid molecule or a polypeptide comprising the nucleic acid, preferably the coding region thereof, or polypeptide or the consensus sequence or the polypeptide motif, as depicted in Table I, II or IV, application No. 3, column 5 or 8 in the respective same line as the nucleic acid molecule SEQ ID NO. 11471 or polypeptide SEQ ID NO. 11472, respectively, or a homolog or a fragment thereof, is increased or generated, or if the activity coproporphyrinogen III oxidase is increased or generated in a non-human organism, like a microorganism or a plant cell, plant or part thereof, especially with mitochondrial localization, whereby the respective line discloses in column 7 serine. For example, an increase of the serine of at least 1 percent, particularly in a range of 28 to 69-percent is conferred as compared to a corresponding non-transformed wild type non-human organism.

[22778] Accordingly, in one embodiment, an increase of tyrosine in a non-human organism, as compared to a corresponding non-transformed wild type non-human organism, is conferred in the process of the invention, if the activity of a polypeptide showing the activity of a coproporphyrinogen III oxidase, or if the activity of the polypeptide Sll1917, preferably represented by SEQ ID NO. 11472, or a homolog or fragment thereof, or if the activity of a polypeptide encoded by a nucleic acid molecule comprising the nucleic acid SEQ ID NO. 11471, preferably the coding region thereof, or a homolog or fragment thereof, e.g. derived from Synechocystis sp., is increased or generated. For example the activity of a nucleic acid molecule or a polypeptide comprising the nucleic acid, preferably the coding region thereof, or polypeptide or the consensus sequence or the polypeptide motif, as depicted in Table I, II or IV, application No. 3, column 5 or 8 in the respective same line as the nucleic acid molecule SEQ ID NO. 11471 or polypeptide SEQ ID NO. 11472, respectively, or a homolog or a fragment thereof, is increased or generated, or if the activity coproporphyrinogen III oxidase is increased or generated in a non-human organism, like a microorganism or a plant cell, plant or part thereof, especially with mitochondrial localization, whereby the respective line discloses in column 7 tyrosine. For example, an increase of the tyrosine of at least 1 percent, particularly in a range of 35 to 60-percent is conferred as compared to a corresponding non-transformed wild type non-human organism.

[22779] Accordingly, in one embodiment, an increase of aspartate in a non-human organism, as compared to a corresponding non-transformed wild type non-human organism, is conferred in the process of the invention, if the activity of a polypeptide showing the activity of a cation-transporting ATPase, or if the activity of the polypeptide Sll1920, preferably represented by SEQ ID NO. 55386, or a homolog or fragment thereof, or if the activity of a polypeptide encoded by a nucleic acid molecule comprising the nucleic acid SEQ ID NO. 55385, preferably the coding region thereof, or a homolog or fragment thereof, e.g. derived from Synechocystis sp., is increased or generated. For example the activity of a nucleic acid molecule or a polypeptide comprising the nucleic acid, preferably the coding region thereof, or polypeptide or the consensus sequence or the polypeptide motif, as depicted in Table I, II or IV, application No. 3, column 5 or 8 in the respective same line as the nucleic acid molecule SEQ ID NO. 55385 or polypeptide SEQ ID NO. 55386, respectively, or a homolog or a fragment thereof, is increased or generated, or if the activity cation-transporting ATPase is increased or generated in a non-human organism, like a microorganism or a plant cell, plant or part thereof, especially with non-targeted localization, whereby the respective line discloses in column 7 aspartate. For example, an increase of the aspartate of at least 1 percent, particularly in a range of 52 to 204-percent is conferred as compared to a corresponding non-transformed wild type non-human organism.

[22780] Accordingly, in one embodiment, an increase of aspartate in a non-human organism, as compared to a corresponding non-transformed wild type non-human organism, is conferred in the process of the invention, if the activity of a polypeptide showing the activity of a cation-transporting ATPase, or if the activity of the polypeptide Sll1920, preferably represented by SEQ ID NO. 55386, or a homolog or fragment thereof, or if the activity of a polypeptide encoded by a nucleic acid molecule comprising the nucleic acid SEQ ID NO. 55385, preferably the coding region thereof, or a homolog or fragment thereof, e.g. derived from Synechocystis sp., is increased or generated. For example the activity of a nucleic acid molecule or a polypeptide comprising the nucleic acid, preferably the coding region thereof, or polypeptide or the consensus sequence or the polypeptide motif, as depicted in Table I, II or IV, application No. 3, column 5 or 8 in the respective same line as the nucleic acid molecule SEQ ID NO. 55385 or polypeptide SEQ ID NO. 55386, respectively, or a homolog or a fragment thereof, is increased or generated, or if the activity cation-transporting ATPase is increased or generated in a non-human organism, like a microorganism or a plant cell, plant or part thereof, especially with mitochondrial localization, whereby the respective line discloses in column 7 aspartate. For example, an increase of the aspartate of at least 1 percent, particularly in a range of 65 to 142-percent is conferred as compared to a corresponding non-transformed wild type non-human organism.

[22781] Accordingly, in one embodiment, an increase of glycine in a non-human organism, as compared to a corresponding non-transformed wild type non-human organism, is conferred in the process of the invention, if the activity of a polypeptide showing the activity of a glycosyl transferase, or if the activity of the polypeptide Sll2003, preferably represented by SEQ ID NO. 86509, or a homolog or fragment thereof, or if the activity of a polypeptide encoded by a nucleic acid molecule comprising the nucleic acid SEQ ID NO. 86508, preferably the coding region thereof, or a homolog or fragment thereof, e.g. derived from Synechocystis sp., is increased or generated. For example the activity of a nucleic acid molecule or a polypeptide comprising the nucleic acid, preferably the coding region thereof, or polypeptide or the consensus sequence or the polypeptide motif, as depicted in Table I, II or IV, application No. 3, column 5 or 8 in the respective same line as the nucleic acid molecule SEQ ID NO. 86508 or polypeptide SEQ ID NO. 86509, respectively, or a homolog or a fragment thereof, is increased or generated, or if the activity glycosyl transferase is increased or generated in a non-human organism, like a microorganism or a plant cell, plant or part thereof, especially with plastidic localization, whereby the respective line discloses in column 7 glycine. For example, an increase of the glycine of at least 1 percent, particularly in a range of 47 to 67-percent is conferred as compared to a corresponding non-transformed wild type non-human organism.

[22782] Accordingly, in one embodiment, an increase of phenylalanine in a non-human organism, as compared to a corresponding non-transformed wild type non-human organism, is conferred in the process of the invention, if the activity of a polypeptide showing the activity of a precorrin methylase, or if the activity of the polypeptide Slr0239, preferably represented by SEQ ID NO. 86541, or a homolog or fragment thereof, or if the activity of a polypeptide encoded by a nucleic acid molecule comprising the nucleic acid SEQ ID NO. 86540, preferably the coding region thereof, or a homolog or fragment thereof, e.g. derived from Synechocystis sp., is increased or generated. For example the activity of a nucleic acid molecule or a polypeptide comprising the nucleic acid, preferably the coding region thereof, or polypeptide or the consensus sequence or the polypeptide motif, as depicted in Table I, II or IV, application No. 3, column 5 or 8 in the respective same line as the nucleic acid molecule SEQ ID NO. 86540 or polypeptide SEQ ID NO. 86541, respectively, or a homolog or a fragment thereof, is increased or generated, or if the activity precorrin methylase is increased or generated in a non-human organism, like a microorganism or a plant cell, plant or part thereof, especially with mitochondrial localization, whereby the respective line discloses in column 7 phenylalanine. For example, an increase of the phenylalanine of at least 1 percent, particularly in a range of 41 to 279-percent is conferred as compared to a corresponding non-transformed wild type non-human organism.

[22783] Accordingly, in one embodiment, an increase of tyrosine in a non-human organism, as compared to a corresponding non-transformed wild type non-human organism, is conferred in the process of the invention, if the activity of a polypeptide showing the activity of a precorrin methylase, or if the activity of the polypeptide Slr0239, preferably represented by SEQ ID NO. 86541, or a homolog or fragment thereof, or if the activity of a polypeptide encoded by a nucleic acid molecule comprising the nucleic acid SEQ ID NO. 86540, preferably the coding region thereof, or a homolog or fragment thereof, e.g. derived from Synechocystis sp., is increased or generated. For example the activity of a nucleic acid molecule or a polypeptide comprising the nucleic acid, preferably the coding region thereof, or polypeptide or the consensus sequence or the polypeptide motif, as depicted in Table I, II or IV, application No. 3, column 5 or 8 in the respective same line as the nucleic acid molecule SEQ ID NO. 86540 or polypeptide SEQ ID NO. 86541, respectively, or a homolog or a fragment thereof, is increased or generated, or if the activity precorrin methylase is increased or generated in a non-human organism, like a microorganism or a plant cell, plant or part thereof, especially with mitochondrial localization, whereby the respective line discloses in column 7 tyrosine. For example, an increase of the tyrosine of at least 1 percent, particularly in a range of 54 to 214-percent is conferred as compared to a corresponding non-transformed wild type non-human organism.

[22784] Accordingly, in one embodiment, an increase of citrulline in a non-human organism, as compared to a corresponding non-transformed wild type non-human organism, is conferred in the process of the invention, if the activity of a polypeptide showing the activity of a aldehyde dehydrogenase, or if the activity of the polypeptide Slr0370, preferably represented by SEQ ID NO. 86821, or a homolog or fragment thereof, or if the activity of a polypeptide encoded by a nucleic acid molecule comprising the nucleic acid SEQ ID NO. 86820, preferably the coding region thereof, or a homolog or fragment thereof, e.g. derived from Synechocystis sp., is increased or generated. For example the activity of a nucleic acid molecule or a polypeptide comprising the nucleic acid, preferably the coding region thereof, or polypeptide or the consensus sequence or the polypeptide motif, as depicted in Table I, II or IV, application No. 3, column 5 or 8 in the respective same line as the nucleic acid molecule SEQ ID NO. 86820 or polypeptide SEQ ID NO. 86821, respectively, or a homolog or a fragment thereof, is increased or generated, or if the activity aldehyde dehydrogenase is increased or generated in a non-human organism, like a microorganism or a plant cell, plant or part thereof, especially with plastidic localization, whereby the respective line discloses in column 7 citrulline. For example, an increase of the citrulline of at least 1 percent, particularly in a range of 38 to 90-percent is conferred as compared to a corresponding non-transformed wild type non-human organism.

[22785] Accordingly, in one embodiment, an increase of alanine in a non-human organism, as compared to a corresponding non-transformed wild type non-human organism, is conferred in the process of the invention, if the activity of a polypeptide showing the activity of a bifunctional purine biosynthesis protein, or if the activity of the polypeptide Slr0597, preferably represented by SEQ ID NO. 56154, or a homolog or fragment thereof, or if the activity of a polypeptide encoded by a nucleic acid molecule comprising the nucleic acid SEQ ID NO. 56153, preferably the coding region thereof, or a homolog or fragment thereof, e.g. derived from Synechocystis sp., is increased or generated. For example the activity of a nucleic acid molecule or a polypeptide comprising the nucleic acid, preferably the coding region thereof, or polypeptide or the consensus sequence or the polypeptide motif, as depicted in Table I, II or IV, application No. 3, column 5 or 8 in the respective same line as the nucleic acid molecule SEQ ID NO. 56153 or polypeptide SEQ ID NO. 56154, respectively, or a homolog or a fragment thereof, is increased or generated, or if the activity bifunctional purine biosynthesis protein is increased or generated in a non-human organism, like a microorganism or a plant cell, plant or part thereof, especially with plastidic localization, whereby the respective line discloses in column 7 alanine. For example, an increase of the alanine of at least 1 percent, particularly in a range of 28 to 38-percent is conferred as compared to a corresponding non-transformed wild type non-human organism.

[22786] Accordingly, in one embodiment, an increase of serine in a non-human organism, as compared to a corresponding non-transformed wild type non-human organism, is conferred in the process of the invention, if the activity of a polypeptide showing the activity of a bifunctional purine biosynthesis protein, or if the activity of the polypeptide Slr0597, preferably represented by SEQ ID NO. 56154, or a homolog or fragment thereof, or if the activity of a polypeptide encoded by a nucleic acid molecule comprising the nucleic acid SEQ ID NO. 56153, preferably the coding region thereof, or a homolog or fragment thereof, e.g. derived from Synechocystis sp., is increased or generated. For example the activity of a nucleic acid molecule or a polypeptide comprising the nucleic acid, preferably the coding region thereof, or polypeptide or the consensus sequence or the polypeptide motif, as depicted in Table I, II or IV, application No. 3, column 5 or 8 in the respective same line as the nucleic acid molecule SEQ ID NO. 56153 or polypeptide SEQ ID NO. 56154, respectively, or a homolog or a fragment thereof, is increased or generated, or if the activity bifunctional purine biosynthesis protein is increased or generated in a non-human organism, like a microorganism or a plant cell, plant or part thereof, especially with plastidic localization, whereby the respective line discloses in column 7 serine. For example, an increase of the serine of at least 1 percent, particularly in a range of 27 to 104-percent is conferred as compared to a corresponding non-transformed wild type non-human organism.

[22787] Accordingly, in one embodiment, an increase of 5-oxoproline in a non-human organism, as compared to a corresponding non-transformed wild type non-human organism, is conferred in the process of the invention, if the activity of a polypeptide showing the activity of a bifunctional purine biosynthesis protein, or if the activity of the polypeptide Slr0597, preferably represented by SEQ ID NO. 56154, or a homolog or fragment thereof, or if the activity of a polypeptide encoded by a nucleic acid molecule comprising the nucleic acid SEQ ID NO. 56153, preferably the coding region thereof, or a homolog or fragment thereof, e.g. derived from Synechocystis sp., is increased or generated. For example the activity of a nucleic acid molecule or a polypeptide comprising the nucleic acid, preferably the coding region thereof, or polypeptide or the consensus sequence or the polypeptide motif, as depicted in Table I, II or IV, application No. 3, column 5 or 8 in the respective same line as the nucleic acid molecule SEQ ID NO. 56153 or polypeptide SEQ ID NO. 56154, respectively, or a homolog or a fragment thereof, is increased or generated, or if the activity bifunctional purine biosynthesis protein is increased or generated in a non-human organism, like a microorganism or a plant cell, plant or part thereof, especially with plastidic localization, whereby the respective line discloses in column 7 5-oxoproline. For example, an increase of the 5-oxoproline of at least 1 percent, particularly in a range of 40 to 96 percent is conferred as compared to a corresponding non-transformed wild type non-human organism.

[22788] Accordingly, in one embodiment, an increase of asparagine in a non-human organism, as compared to a corresponding non-transformed wild type non-human organism, is conferred in the process of the invention, if the activity of a polypeptide showing the activity of a Glu/Leu/Phe/Val dehydrogenase , or if the activity of the polypeptide Slr0710, preferably represented by SEQ ID NO. 56895, or a homolog or fragment thereof, or if the activity of a polypeptide encoded by a nucleic acid molecule comprising the nucleic acid SEQ ID NO. 56894, preferably the coding region thereof, or a homolog or fragment thereof, e.g. derived from Synechocystis sp., is increased or generated. For example the activity of a nucleic acid molecule or a polypeptide comprising the nucleic acid, preferably the coding region thereof, or polypeptide or the consensus sequence or the polypeptide motif, as depicted in Table I, II or IV, application No. 3, column 5 or 8 in the respective same line as the nucleic acid molecule SEQ ID NO. 56894 or polypeptide SEQ ID NO. 56895, respectively, or a homolog or a fragment thereof, is increased or generated, or if the activity Glu/Leu/Phe/Val dehydrogenase is increased or generated in a non-human organism, like a microorganism or a plant cell, plant or part thereof, especially with mitochondrial localization, whereby the respective line discloses in column 7 asparagine. For example, an increase of the asparagine of at least 1 percent, particularly in a range of 49 to 215-percent is conferred as compared to a corresponding non-transformed wild type non-human organism.

[22789] Accordingly, in one embodiment, an increase of phenylalanine in a non-human organism, as compared to a corresponding non-transformed wild type non-human organism, is conferred in the process of the invention, if the activity of a polypeptide showing the activity of a Glu/Leu/Phe/Val dehydrogenase , or if the activity of the polypeptide Slr0710, preferably represented by SEQ ID NO. 56895, or a homolog or fragment thereof, or if the activity of a polypeptide encoded by a nucleic acid molecule comprising the nucleic acid SEQ ID NO. 56894, preferably the coding region thereof, or a homolog or fragment thereof, e.g. derived from Synechocystis sp., is increased or generated. For example the activity of a nucleic acid molecule or a polypeptide comprising the nucleic acid, preferably the coding region thereof, or polypeptide or the consensus sequence or the polypeptide motif, as depicted in Table I, II or IV, application No. 3, column 5 or 8 in the respective same line as the nucleic acid molecule SEQ ID NO. 56894 or polypeptide SEQ ID NO. 56895, respectively, or a homolog or a fragment thereof, is increased or generated, or if the activity Glu/Leu/Phe/Val dehydrogenase is increased or generated in a non-human organism, like a microorganism or a plant cell, plant or part thereof, especially with mitochondrial localization, whereby the respective line discloses in column 7 phenylalanine. For example, an increase of the phenylalanine of at least 1 percent, particularly in a range of 26 to 99-percent is conferred as compared to a corresponding non-transformed wild type non-human organism.

[22790] Accordingly, in one embodiment, an increase of tyrosine in a non-human organism, as compared to a corresponding non-transformed wild type non-human organism, is conferred in the process of the invention, if the activity of a polypeptide showing the activity of a Glu/Leu/Phe/Val dehydrogenase , or if the activity of the polypeptide Slr0710, preferably represented by SEQ ID NO. 56895, or a homolog or fragment thereof, or if the activity of a polypeptide encoded by a nucleic acid molecule comprising the nucleic acid SEQ ID NO. 56894, preferably the coding region thereof, or a homolog or fragment thereof, e.g. derived from Synechocystis sp., is increased or generated. For example the activity of a nucleic acid molecule or a polypeptide comprising the nucleic acid, preferably the coding region thereof, or polypeptide or the consensus sequence or the polypeptide motif, as depicted in Table I, II or IV, application No. 3, column 5 or 8 in the respective same line as the nucleic acid molecule SEQ ID NO. 56894 or polypeptide SEQ ID NO. 56895, respectively, or a homolog or a fragment thereof, is increased or generated, or if the activity Glu/Leu/Phe/Val dehydrogenase is increased or generated in a non-human organism, like a microorganism or a plant cell, plant or part thereof, especially with mitochondrial localization, whereby the respective line discloses in column 7 tyrosine. For example, an increase of the tyrosine of at least 1 percent, particularly in a range of 37 to 80-percent is conferred as compared to a corresponding non-transformed wild type non-human organism.

[22791] Accordingly, in one embodiment, an increase of phenylalanine in a non-human organism, as compared to a corresponding non-transformed wild type non-human organism, is conferred in the process of the invention, if the activity of a polypeptide showing the activity of a malate dehydrogenase, or if the activity of the polypeptide Slr0721, preferably represented by SEQ ID NO. 87398, or a homolog or fragment thereof, or if the activity of a polypeptide encoded by a nucleic acid molecule comprising the nucleic acid SEQ ID NO. 87397, preferably the coding region thereof, or a homolog or fragment thereof, e.g. derived from Synechocystis sp., is increased or generated. For example the activity of a nucleic acid molecule or a polypeptide comprising the nucleic acid, preferably the coding region thereof, or polypeptide or the consensus sequence or the polypeptide motif, as depicted in Table I, II or IV, application No. 3, column 5 or 8 in the respective same line as the nucleic acid molecule SEQ ID NO. 87397 or polypeptide SEQ ID NO. 87398, respectively, or a homolog or a fragment thereof, is increased or generated, or if the activity malate dehydrogenase is increased or generated in a non-human organism, like a microorganism or a plant cell, plant or part thereof, especially with plastidic localization, whereby the respective line discloses in column 7 phenylalanine. For example, an increase of the phenylalanine of at least 1 percent, particularly in a range of 30 to 107-percent is conferred as compared to a corresponding non-transformed wild type non-human organism.

[22792] Accordingly, in one embodiment, an increase of alanine in a non-human organism, as compared to a corresponding non-transformed wild type non-human organism, is conferred in the process of the invention, if the activity of a polypeptide showing the activity of a geranylgeranyl pyrophosphate synthase, or if the activity of the polypeptide Slr0739, preferably represented by SEQ ID NO. 57236, or a homolog or fragment thereof, or if the activity of a polypeptide encoded by a nucleic acid molecule comprising the nucleic acid SEQ ID NO. 57235, preferably the coding region thereof, or a homolog or fragment thereof, e.g. derived from Synechocystis sp., is increased or generated. For example the activity of a nucleic acid molecule or a polypeptide comprising the nucleic acid, preferably the coding region thereof, or polypeptide or the consensus sequence or the polypeptide motif, as depicted in Table I, II or IV, application No. 3, column 5 or 8 in the respective same line as the nucleic acid molecule SEQ ID NO. 57235 or polypeptide SEQ ID NO. 57236, respectively, or a homolog or a fragment thereof, is increased or generated, or if the activity geranylgeranyl pyrophosphate synthase is increased or generated in a non-human organism, like a microorganism or a plant cell, plant or part thereof, especially with plastidic localization, whereby the respective line discloses in column 7 alanine. For example, an increase of the alanine of at least 1 percent, particularly in a range of 19 to 56-percent is conferred as compared to a corresponding non-transformed wild type non-human organism.

[22793] Accordingly, in one embodiment, an increase of asparagine in a non-human organism, as compared to a corresponding non-transformed wild type non-human organism, is conferred in the process of the invention, if the activity of a polypeptide showing the activity of a geranylgeranyl pyrophosphate synthase, or if the activity of the polypeptide Slr0739, preferably represented by SEQ ID NO. 57236, or a homolog or fragment thereof, or if the activity of a polypeptide encoded by a nucleic acid molecule comprising the nucleic acid SEQ ID NO. 57235, preferably the coding region thereof, or a homolog or fragment thereof, e.g. derived from Synechocystis sp., is increased or generated. For example the activity of a nucleic acid molecule or a polypeptide comprising the nucleic acid, preferably the coding region thereof, or polypeptide or the consensus sequence or the polypeptide motif, as depicted in Table I, II or IV, application No. 3, column 5 or 8 in the respective same line as the nucleic acid molecule SEQ ID NO. 57235 or polypeptide SEQ ID NO. 57236, respectively, or a homolog or a fragment thereof, is increased or generated, or if the activity geranylgeranyl pyrophosphate synthase is increased or generated in a non-human organism, like a microorganism or a plant cell, plant or part thereof, especially with plastidic localization, whereby the respective line discloses in column 7 asparagine. For example, an increase of the asparagine of at least 1 percent, particularly in a range of 155 to 1305-percent is conferred as compared to a corresponding non-transformed wild type non-human organism.

[22794] Accordingly, in one embodiment, an increase of phenylalanine in a non-human organism, as compared to a corresponding non-transformed wild type non-human organism, is conferred in the process of the invention, if the activity of a polypeptide showing the activity of a geranylgeranyl pyrophosphate synthase, or if the activity of the polypeptide Slr0739, preferably represented by SEQ ID NO. 57236, or a homolog or fragment thereof, or if the activity of a polypeptide encoded by a nucleic acid molecule comprising the nucleic acid SEQ ID NO. 57235, preferably the coding region thereof, or a homolog or fragment thereof, e.g. derived from Synechocystis sp., is increased or generated. For example the activity of a nucleic acid molecule or a polypeptide comprising the nucleic acid, preferably the coding region thereof, or polypeptide or the consensus sequence or the polypeptide motif, as depicted in Table I, II or IV, application No. 3, column 5 or 8 in the respective same line as the nucleic acid molecule SEQ ID NO. 57235 or polypeptide SEQ ID NO. 57236, respectively, or a homolog or a fragment thereof, is increased or generated, or if the activity geranylgeranyl pyrophosphate synthase is increased or generated in a non-human organism, like a microorganism or a plant cell, plant or part thereof, especially with plastidic localization, whereby the respective line discloses in column 7 phenylalanine. For example, an increase of the phenylalanine of at least 1 percent, particularly in a range of 44 to 71-percent is conferred as compared to a corresponding non-transformed wild type non-human organism.

[22795] Accordingly, in one embodiment, an increase of serine in a non-human organism, as compared to a corresponding non-transformed wild type non-human organism, is conferred in the process of the invention, if the activity of a polypeptide showing the activity of a geranylgeranyl pyrophosphate synthase, or if the activity of the polypeptide Slr0739, preferably represented by SEQ ID NO. 57236, or a homolog or fragment thereof, or if the activity of a polypeptide encoded by a nucleic acid molecule comprising the nucleic acid SEQ ID NO. 57235, preferably the coding region thereof, or a homolog or fragment thereof, e.g. derived from Synechocystis sp., is increased or generated. For example the activity of a nucleic acid molecule or a polypeptide comprising the nucleic acid, preferably the coding region thereof, or polypeptide or the consensus sequence or the polypeptide motif, as depicted in Table I, II or IV, application No. 3, column 5 or 8 in the respective same line as the nucleic acid molecule SEQ ID NO. 57235 or polypeptide SEQ ID NO. 57236, respectively, or a homolog or a fragment thereof, is increased or generated, or if the activity geranylgeranyl pyrophosphate synthase is increased or generated in a non-human organism, like a microorganism or a plant cell, plant or part thereof, especially with plastidic localization, whereby the respective line discloses in column 7 serine. For example, an increase of the serine of at least 1 percent, particularly in a range of 52 to 166-percent is conferred as compared to a corresponding non-transformed wild type non-human organism.

[22796] Accordingly, in one embodiment, an increase of tyrosine in a non-human organism, as compared to a corresponding non-transformed wild type non-human organism, is conferred in the process of the invention, if the activity of a polypeptide showing the activity of a geranylgeranyl pyrophosphate synthase, or if the activity of the polypeptide Slr0739, preferably represented by SEQ ID NO. 57236, or a homolog or fragment thereof, or if the activity of a polypeptide encoded by a nucleic acid molecule comprising the nucleic acid SEQ ID NO. 57235, preferably the coding region thereof, or a homolog or fragment thereof, e.g. derived from Synechocystis sp., is increased or generated. For example the activity of a nucleic acid molecule or a polypeptide comprising the nucleic acid, preferably the coding region thereof, or polypeptide or the consensus sequence or the polypeptide motif, as depicted in Table I, II or IV, application No. 3, column 5 or 8 in the respective same line as the nucleic acid molecule SEQ ID NO. 57235 or polypeptide SEQ ID NO. 57236, respectively, or a homolog or a fragment thereof, is increased or generated, or if the activity geranylgeranyl pyrophosphate synthase is increased or generated in a non-human organism, like a microorganism or a plant cell, plant or part thereof, especially with plastidic localization, whereby the respective line discloses in column 7 tyrosine. For example, an increase of the tyrosine of at least 1 percent, particularly in a range of 66 to 82-percent is conferred as compared to a corresponding non-transformed wild type non-human organism.

[22797] Accordingly, in one embodiment, an increase of 5-oxoproline in a non-human organism, as compared to a corresponding non-transformed wild type non-human organism, is conferred in the process of the invention, if the activity of a polypeptide showing the activity of a geranylgeranyl pyrophosphate synthase, or if the activity of the polypeptide Slr0739, preferably represented by SEQ ID NO. 57236, or a homolog or fragment thereof, or if the activity of a polypeptide encoded by a nucleic acid molecule comprising the nucleic acid SEQ ID NO. 57235, preferably the coding region thereof, or a homolog or fragment thereof, e.g. derived from Synechocystis sp., is increased or generated. For example the activity of a nucleic acid molecule or a polypeptide comprising the nucleic acid, preferably the coding region thereof, or polypeptide or the consensus sequence or the polypeptide motif, as depicted in Table I, II or IV, application No. 3, column 5 or 8 in the respective same line as the nucleic acid molecule SEQ ID NO. 57235 or polypeptide SEQ ID NO. 57236, respectively, or a homolog or a fragment thereof, is increased or generated, or if the activity geranylgeranyl pyrophosphate synthase is increased or generated in a non-human organism, like a microorganism or a plant cell, plant or part thereof, especially with plastidic localization, whereby the respective line discloses in column 7 5-oxoproline. For example, an increase of the 5-oxoproline of at least 1 percent, particularly in a range of 33 to 130-percent is conferred as compared to a corresponding non-transformed wild type non-human organism.

[22798] Accordingly, in one embodiment, an increase of phenylalanine in a non-human organism, as compared to a corresponding non-transformed wild type non-human organism, is conferred in the process of the invention, if the activity of a polypeptide showing the activity of a amine oxidase, or if the activity of the polypeptide Slr0782, preferably represented by SEQ ID NO. 57680, or a homolog or fragment thereof, or if the activity of a polypeptide encoded by a nucleic acid molecule comprising the nucleic acid SEQ ID NO. 57679, preferably the coding region thereof, or a homolog or fragment thereof, e.g. derived from Synechocystis sp., is increased or generated. For example the activity of a nucleic acid molecule or a polypeptide comprising the nucleic acid, preferably the coding region thereof, or polypeptide or the consensus sequence or the polypeptide motif, as depicted in Table I, II or IV, application No. 3, column 5 or 8 in the respective same line as the nucleic acid molecule SEQ ID NO. 57679 or polypeptide SEQ ID NO. 57680, respectively, or a homolog or a fragment thereof, is increased or generated, or if the activity amine oxidase is increased or generated in a non-human organism, like a microorganism or a plant cell, plant or part thereof, especially with mitochondrial localization, whereby the respective line discloses in column 7 phenylalanine. For example, an increase of the phenylalanine of at least 1 percent, particularly in a range of 34 to 38-percent is conferred as compared to a corresponding non-transformed wild type non-human organism.

[22799] Accordingly, in one embodiment, an increase of serine in a non-human organism, as compared to a corresponding non-transformed wild type non-human organism, is conferred in the process of the invention, if the activity of a polypeptide showing the activity of a kinase, or if the activity of the polypeptide Slr0862, preferably represented by SEQ ID NO. 87611, or a homolog or fragment thereof, or if the activity of a polypeptide encoded by a nucleic acid molecule comprising the nucleic acid SEQ ID NO. 87610, preferably the coding region thereof, or a homolog or fragment thereof, e.g. derived from Synechocystis sp., is increased or generated. For example the activity of a nucleic acid molecule or a polypeptide comprising the nucleic acid, preferably the coding region thereof, or polypeptide or the consensus sequence or the polypeptide motif, as depicted in Table I, II or IV, application No. 3, column 5 or 8 in the respective same line as the nucleic acid molecule SEQ ID NO. 87610 or polypeptide SEQ ID NO. 87611, respectively, or a homolog or a fragment thereof, is increased or generated, or if the activity kinase is increased or generated in a non-human organism, like a microorganism or a plant cell, plant or part thereof, especially with mitochondrial localization, whereby the respective line discloses in column 7 serine. For example, an increase of the serine of at least 1 percent, particularly in a range of 23 to 45-percent is conferred as compared to a corresponding non-transformed wild type non-human organism.

[22800] Accordingly, in one embodiment, an increase of tyrosine in a non-human organism, as compared to a corresponding non-transformed wild type non-human organism, is conferred in the process of the invention, if the activity of a polypeptide showing the activity of a tryptophan synthase alpha chain, or if the activity of the polypeptide Slr0966, preferably represented by SEQ ID NO. 87656, or a homolog or fragment thereof, or if the activity of a polypeptide encoded by a nucleic acid molecule comprising the nucleic acid SEQ ID NO. 87655, preferably the coding region thereof, or a homolog or fragment thereof, e.g. derived from Synechocystis sp., is increased or generated. For example the activity of a nucleic acid molecule or a polypeptide comprising the nucleic acid, preferably the coding region thereof, or polypeptide or the consensus sequence or the polypeptide motif, as depicted in Table I, II or IV, application No. 3, column 5 or 8 in the respective same line as the nucleic acid molecule SEQ ID NO. 87655 or polypeptide SEQ ID NO. 87656, respectively, or a homolog or a fragment thereof, is increased or generated, or if the activity tryptophan synthase alpha chain is increased or generated in a non-human organism, like a microorganism or a plant cell, plant or part thereof, especially with plastidic localization, whereby the respective line discloses in column 7 tyrosine. For example, an increase of the tyrosine of at least 1 percent, particularly in a range of 43 to 77-percent is conferred as compared to a corresponding non-transformed wild type non-human organism.

[22801] Accordingly, in one embodiment, an increase of ornithine in a non-human organism, as compared to a corresponding non-transformed wild type non-human organism, is conferred in the process of the invention, if the activity of a polypeptide showing the activity of a argininosuccinate lyase, or if the activity of the polypeptide Slr1133, preferably represented by SEQ ID NO. 87854, or a homolog or fragment thereof, or if the activity of a polypeptide encoded by a nucleic acid molecule comprising the nucleic acid SEQ ID NO. 87853, preferably the coding region thereof, or a homolog or fragment thereof, e.g. derived from Synechocystis sp., is increased or generated. For example the activity of a nucleic acid molecule or a polypeptide comprising the nucleic acid, preferably the coding region thereof, or polypeptide or the consensus sequence or the polypeptide motif, as depicted in Table I, II or IV, application No. 3, column 5 or 8 in the respective same line as the nucleic acid molecule SEQ ID NO. 87853 or polypeptide SEQ ID NO. 87854, respectively, or a homolog or a fragment thereof, is increased or generated, or if the activity argininosuccinate lyase is increased or generated in a non-human organism, like a microorganism or a plant cell, plant or part thereof, especially with mitochondrial localization, whereby the respective line discloses in column 7 ornithine. For example, an increase of the ornithine of at least 1 percent, particularly in a range of 69 to 390-percent is conferred as compared to a corresponding non-transformed wild type non-human organism.

[22802] Accordingly, in one embodiment, an increase of serine in a non-human organism, as compared to a corresponding non-transformed wild type non-human organism, is conferred in the process of the invention, if the activity of a polypeptide showing the activity of a argininosuccinate lyase, or if the activity of the polypeptide Slr1133, preferably represented by SEQ ID NO. 87854, or a homolog or fragment thereof, or if the activity of a polypeptide encoded by a nucleic acid molecule comprising the nucleic acid SEQ ID NO. 87853, preferably the coding region thereof, or a homolog or fragment thereof, e.g. derived from Synechocystis sp., is increased or generated. For example the activity of a nucleic acid molecule or a polypeptide comprising the nucleic acid, preferably the coding region thereof, or polypeptide or the consensus sequence or the polypeptide motif, as depicted in Table I, II or IV, application No. 3, column 5 or 8 in the respective same line as the nucleic acid molecule SEQ ID NO. 87853 or polypeptide SEQ ID NO. 87854, respectively, or a homolog or a fragment thereof, is increased or generated, or if the activity argininosuccinate lyase is increased or generated in a non-human organism, like a microorganism or a plant cell, plant or part thereof, especially with mitochondrial localization, whereby the respective line discloses in column 7 serine. For example, an increase of the serine of at least 1 percent, particularly in a range of 26 to 69-percent is conferred as compared to a corresponding non-transformed wild type non-human organism.

[22803] Accordingly, in one embodiment, an increase of asparagine in a non-human organism, as compared to a corresponding non-transformed wild type non-human organism, is conferred in the process of the invention, if the activity of a polypeptide showing the activity of a gammaglutamyltranspeptidase, or if the activity of the polypeptide Slr1269, preferably represented by SEQ ID NO. 58059, or a homolog or fragment thereof, or if the activity of a polypeptide encoded by a nucleic acid molecule comprising the nucleic acid SEQ ID NO. 58058, preferably the coding region thereof, or a homolog or fragment thereof, e.g. derived from Synechocystis sp., is increased or generated. For example the activity of a nucleic acid molecule or a polypeptide comprising the nucleic acid, preferably the coding region thereof, or polypeptide or the consensus sequence or the polypeptide motif, as depicted in Table I, II or IV, application No. 3, column 5 or 8 in the respective same line as the nucleic acid molecule SEQ ID NO. 58058 or polypeptide SEQ ID NO. 58059, respectively, or a homolog or a fragment thereof, is increased or generated, or if the activity gamma-glutamyltranspeptidase is increased or generated in a non-human organism, like a microorganism or a plant cell, plant or part thereof, especially with non-targeted localization, whereby the respective line discloses in column 7 asparagine. For example, an increase of the asparagine of at least 1 percent, particularly in a range of 45 to 93-percent is conferred as compared to a corresponding non-transformed wild type non-human organism.

[22804] Accordingly, in one embodiment, an increase of aspartate in a non-human organism, as compared to a corresponding non-transformed wild type non-human organism, is conferred in the process of the invention, if the activity of a polypeptide showing the activity of a iron(III) dicitrate-binding protein, or if the activity of the polypeptide Slr1492, preferably represented by SEQ ID NO. 58669, or a homolog or fragment thereof, or if the activity of a polypeptide encoded by a nucleic acid molecule comprising the nucleic acid SEQ ID NO. 58668, preferably the coding region thereof, or a homolog or fragment thereof, e.g. derived from Synechocystis sp., is increased or generated. For example the activity of a nucleic acid molecule or a polypeptide comprising the nucleic acid, preferably the coding region thereof, or polypeptide or the consensus sequence or the polypeptide motif, as depicted in Table I, II or IV, application No. 3, column 5 or 8 in the respective same line as the nucleic acid molecule SEQ ID NO. 58668 or polypeptide SEQ ID NO. 58669, respectively, or a homolog or a fragment thereof, is increased or generated, or if the activity iron(III) dicitrate-binding protein is increased or generated in a non-human organism, like a microorganism or a plant cell, plant or part thereof, especially with mitochondrial localization, whereby the respective line discloses in column 7 aspartate. For example, an increase of the aspartate of at least 1 percent, particularly in a range of 48 to 139-percent is conferred as compared to a corresponding non-transformed wild type non-human organism.

[22805] Accordingly, in one embodiment, an increase of phenylalanine in a non-human organism, as compared to a corresponding non-transformed wild type non-human organism, is conferred in the process of the invention, if the activity of a polypeptide showing the activity of a iron(III) dicitrate-binding protein, or if the activity of the polypeptide Slr1492, preferably represented by SEQ ID NO. 58669, or a homolog or fragment thereof, or if the activity of a polypeptide encoded by a nucleic acid molecule comprising the nucleic acid SEQ ID NO. 58668, preferably the coding region thereof, or a homolog or fragment thereof, e.g. derived from Synechocystis sp., is increased or generated. For example the activity of a nucleic acid molecule or a polypeptide comprising the nucleic acid, preferably the coding region thereof, or polypeptide or the consensus sequence or the polypeptide motif, as depicted in Table I, II or IV, application No. 3, column 5 or 8 in the respective same line as the nucleic acid molecule SEQ ID NO. 58668 or polypeptide SEQ ID NO. 58669, respectively, or a homolog or a fragment thereof, is increased or generated, or if the activity iron(III) dicitrate-binding protein is increased or generated in a non-human organism, like a microorganism or a plant cell, plant or part thereof, especially with mitochondrial localization, whereby the respective line discloses in column 7 phenylalanine. For example, an increase of the phenylalanine of at least 1 percent, particularly in a range of 31 to 35-percent is conferred as compared to a corresponding non-transformed wild type non-human organism.

[22806] Accordingly, in one embodiment, an increase of phenylalanine in a non-human organism, as compared to a corresponding non-transformed wild type non-human organism, is conferred in the process of the invention, if the activity of a polypeptide showing the activity of a Na+/K+ transporter, or if the activity of the polypeptide Slr1509, preferably represented by SEQ ID NO. 88159, or a homolog or fragment thereof, or if the activity of a polypeptide encoded by a nucleic acid molecule comprising the nucleic acid SEQ ID NO. 88158, preferably the coding region thereof, or a homolog or fragment thereof, e.g. derived from Synechocystis sp., is increased or generated. For example the activity of a nucleic acid molecule or a polypeptide comprising the nucleic acid, preferably the coding region thereof, or polypeptide or the consensus sequence or the polypeptide motif, as depicted in Table I, II or IV, application No. 3, column 5 or 8 in the respective same line as the nucleic acid molecule SEQ ID NO. 88158 or polypeptide SEQ ID NO. 88159, respectively, or a homolog or a fragment thereof, is increased or generated, or if the activity Na+/K+ transporter is increased or generated in a non-human organism, like a microorganism or a plant cell, plant or part thereof, especially with mitochondrial localization, whereby the respective line discloses in column 7 phenylalanine. For example, an increase of the phenylalanine of at least 1 percent, particularly in a range of 43 to 94-percent is conferred as compared to a corresponding non-transformed wild type non-human organism.

[22807] Accordingly, in one embodiment, an increase of tyrosine in a non-human organism, as compared to a corresponding non-transformed wild type non-human organism, is conferred in the process of the invention, if the activity of a polypeptide showing the activity of a Na+/K+ transporter, or if the activity of the polypeptide Slr1509, preferably represented by SEQ ID NO. 88159, or a homolog or fragment thereof, or if the activity of a polypeptide encoded by a nucleic acid molecule comprising the nucleic acid SEQ ID NO. 88158, preferably the coding region thereof, or a homolog or fragment thereof, e.g. derived from Synechocystis sp., is increased or generated. For example the activity of a nucleic acid molecule or a polypeptide comprising the nucleic acid, preferably the coding region thereof, or polypeptide or the consensus sequence or the polypeptide motif, as depicted in Table I, II or IV, application No. 3, column 5 or 8 in the respective same line as the nucleic acid molecule SEQ ID NO. 88158 or polypeptide SEQ ID NO. 88159, respectively, or a homolog or a fragment thereof, is increased or generated, or if the activity Na+/K+ transporter is increased or generated in a non-human organism, like a microorganism or a plant cell, plant or part thereof, especially with mitochondrial localization, whereby the respective line discloses in column 7 tyrosine. For example, an increase of the tyrosine of at least 1 percent, particularly in a range of 67 to 86-percent is conferred as compared to a corresponding non-transformed wild type non-human organism.

[22808] Accordingly, in one embodiment, an increase of phenylalanine in a non-human organism, as compared to a corresponding non-transformed wild type non-human organism, is conferred in the process of the invention, if the activity of a polypeptide showing the activity of a 3-oxoacyl-[acyl-carrier-protein] synthase, or if the activity of the polypeptide Slr1511, preferably represented by SEQ ID NO. 88272, or a homolog or fragment thereof, or if the activity of a polypeptide encoded by a nucleic acid molecule comprising the nucleic acid SEQ ID NO. 88271, preferably the coding region thereof, or a homolog or fragment thereof, e.g. derived from Synechocystis sp., is increased or generated. For example the activity of a nucleic acid molecule or a polypeptide comprising the nucleic acid, preferably the coding region thereof, or polypeptide or the consensus sequence or the polypeptide motif, as depicted in Table I, II or IV, application No. 3, column 5 or 8 in the respective same line as the nucleic acid molecule SEQ ID NO. 88271 or polypeptide SEQ ID NO. 88272, respectively, or a homolog or a fragment thereof, is increased or generated, or if the activity 3-oxoacyl-[acyl-carrier-protein] synthase is increased or generated in a non-human organism, like a microorganism or a plant cell, plant or part thereof, especially with non-targeted localization, whereby the respective line discloses in column 7 phenylalanine. For example, an increase of the phenylalanine of at least 1 percent, particularly in a range of 30 to 31-percent is conferred as compared to a corresponding non-transformed wild type non-human organism.

[22809] Accordingly, in one embodiment, an increase of serine in a non-human organism, as compared to a corresponding non-transformed wild type non-human organism, is conferred in the process of the invention, if the activity of a polypeptide showing the activity of a 3-oxoacyl-[acyl-carrier-protein] synthase, or if the activity of the polypeptide Slr1511, preferably represented by SEQ ID NO. 88272, or a homolog or fragment thereof, or if the activity of a polypeptide encoded by a nucleic acid molecule comprising the nucleic acid SEQ ID NO. 88271, preferably the coding region thereof, or a homolog or fragment thereof, e.g. derived from Synechocystis sp., is increased or generated. For example the activity of a nucleic acid molecule or a polypeptide comprising the nucleic acid, preferably the coding region thereof, or polypeptide or the consensus sequence or the polypeptide motif, as depicted in Table I, II or IV, application No. 3, column 5 or 8 in the respective same line as the nucleic acid molecule SEQ ID NO. 88271 or polypeptide SEQ ID NO. 88272, respectively, or a homolog or a fragment thereof, is increased or generated, or if the activity 3-oxoacyl-[acyl-carrier-protein] synthase is increased or generated in a non-human organism, like a microorganism or a plant cell, plant or part thereof, especially with non-targeted localization, whereby the respective line discloses in column 7 serine. For example, an increase of the serine of at least 1 percent, particularly in a range of 30 to 71-percent is conferred as compared to a corresponding non-transformed wild type non-human organism.

[22810] Accordingly, in one embodiment, an increase of phenylalanine in a non-human organism, as compared to a corresponding non-transformed wild type non-human organism, is conferred in the process of the invention, if the activity of a polypeptide showing the activity of a Photosystem I reaction center subunit XI, or if the activity of the polypeptide Slr1655, preferably represented by SEQ ID NO. 12071, or a homolog or fragment thereof, or if the activity of a polypeptide encoded by a nucleic acid molecule comprising the nucleic acid SEQ ID NO. 12070, preferably the coding region thereof, or a homolog or fragment thereof, e.g. derived from Synechocystis sp., is increased or generated. For example the activity of a nucleic acid molecule or a polypeptide comprising the nucleic acid, preferably the coding region thereof, or polypeptide or the consensus sequence or the polypeptide motif, as depicted in Table I, II or IV, application No. 3, column 5 or 8 in the respective same line as the nucleic acid molecule SEQ ID NO. 12070 or polypeptide SEQ ID NO. 12071, respectively, or a homolog or a fragment thereof, is increased or generated, or if the activity Photosystem I reaction center subunit XI is increased or generated in a non-human organism, like a microorganism or a plant cell, plant or part thereof, especially with mitochondrial localization, whereby the respective line discloses in column 7 phenylalanine. For example, an increase of the phenylalanine of at least 1 percent, particularly in a range of 28 to 60-percent is conferred as compared to a corresponding non-transformed wild type non-human organism.

[22811] Accordingly, in one embodiment, an increase of serine in a non-human organism, as compared to a corresponding non-transformed wild type non-human organism, is conferred in the process of the invention, if the activity of a polypeptide showing the activity of a Photosystem I reaction center subunit XI, or if the activity of the polypeptide Slr1655, preferably represented by SEQ ID NO. 12071, or a homolog or fragment thereof, or if the activity of a polypeptide encoded by a nucleic acid molecule comprising the nucleic acid SEQ ID NO. 12070, preferably the coding region thereof, or a homolog or fragment thereof, e.g. derived from Synechocystis sp., is increased or generated. For example the activity of a nucleic acid molecule or a polypeptide comprising the nucleic acid, preferably the coding region thereof, or polypeptide or the consensus sequence or the polypeptide motif, as depicted in Table I, II or IV, application No. 3, column 5 or 8 in the respective same line as the nucleic acid molecule SEQ ID NO. 12070 or polypeptide SEQ ID NO. 12071, respectively, or a homolog or a fragment thereof, is increased or generated, or if the activity Photosystem I reaction center subunit XI is increased or generated in a non-human organism, like a microorganism or a plant cell, plant or part thereof, especially with mitochondrial localization, whereby the respective line discloses in column 7 serine. For example, an increase of the serine of at least 1 percent, particularly in a range of 33 to 83-percent is conferred as compared to a corresponding non-transformed wild type non-human organism.

[22812] Accordingly, in one embodiment, an increase of tyrosine in a non-human organism, as compared to a corresponding non-transformed wild type non-human organism, is conferred in the process of the invention, if the activity of a polypeptide showing the activity of a Photosystem I reaction center subunit XI, or if the activity of the polypeptide Slr1655, preferably represented by SEQ ID NO. 12071, or a homolog or fragment thereof, or if the activity of a polypeptide encoded by a nucleic acid molecule comprising the nucleic acid SEQ ID NO. 12070, preferably the coding region thereof, or a homolog or fragment thereof, e.g. derived from Synechocystis sp., is increased or generated. For example the activity of a nucleic acid molecule or a polypeptide comprising the nucleic acid, preferably the coding region thereof, or polypeptide or the consensus sequence or the polypeptide motif, as depicted in Table I, II or IV, application No. 3, column 5 or 8 in the respective same line as the nucleic acid molecule SEQ ID NO. 12070 or polypeptide SEQ ID NO. 12071, respectively, or a homolog or a fragment thereof, is increased or generated, or if the activity Photosystem I reaction center subunit XI is increased or generated in a non-human organism, like a microorganism or a plant cell, plant or part thereof, especially with mitochondrial localization, whereby the respective line discloses in column 7 tyrosine. For example, an increase of the tyrosine of at least 1 percent, particularly in a range of 35 to 104-percent is conferred as compared to a corresponding non-transformed wild type non-human organism.

[22813] Accordingly, in one embodiment, an increase of phenylalanine in a non-human organism, as compared to a corresponding non-transformed wild type non-human organism, is conferred in the process of the invention, if the activity of a polypeptide showing the activity of a photosystem II protein, or if the activity of the polypeptide Slr1739, preferably represented by SEQ ID NO. 58732, or a homolog or fragment thereof, or if the activity of a polypeptide encoded by a nucleic acid molecule comprising the nucleic acid SEQ ID NO. 58731, preferably the coding region thereof, or a homolog or fragment thereof, e.g. derived from Synechocystis sp., is increased or generated. For example the activity of a nucleic acid molecule or a polypeptide comprising the nucleic acid, preferably the coding region thereof, or polypeptide or the consensus sequence or the polypeptide motif, as depicted in Table I, II or IV, application No. 3, column 5 or 8 in the respective same line as the nucleic acid molecule SEQ ID NO. 58731 or polypeptide SEQ ID NO. 58732, respectively, or a homolog or a fragment thereof, is increased or generated, or if the activity photosystem II protein is increased or generated in a non-human organism, like a microorganism or a plant cell, plant or part thereof, especially with plastidic localization, whereby the respective line discloses in column 7 phenylalanine. For example, an increase of the phenylalanine of at least 1 percent, particularly in a range of 47 to 192-percent is conferred as compared to a corresponding non-transformed wild type non-human organism.

[22814] Accordingly, in one embodiment, an increase of serine in a non-human organism, as compared to a corresponding non-transformed wild type non-human organism, is conferred in the process of the invention, if the activity of a polypeptide showing the activity of a photosystem II protein, or if the activity of the polypeptide Slr1739, preferably represented by SEQ ID NO. 58732, or a homolog or fragment thereof, or if the activity of a polypeptide encoded by a nucleic acid molecule comprising the nucleic acid SEQ ID NO. 58731, preferably the coding region thereof, or a homolog or fragment thereof, e.g. derived from Synechocystis sp., is increased or generated. For example the activity of a nucleic acid molecule or a polypeptide comprising the nucleic acid, preferably the coding region thereof, or polypeptide or the consensus sequence or the polypeptide motif, as depicted in Table I, II or IV, application No. 3, column 5 or 8 in the respective same line as the nucleic acid molecule SEQ ID NO. 58731 or polypeptide SEQ ID NO. 58732, respectively, or a homolog or a fragment thereof, is increased or generated, or if the activity photosystem II protein is increased or generated in a non-human organism, like a microorganism or a plant cell, plant or part thereof, especially with plastidic localization, whereby the respective line discloses in column 7 serine. For example, an increase of the serine of at least 1 percent, particularly in a range of 59 to 99-percent is conferred as compared to a corresponding non-transformed wild type non-human organism.

[22815] Accordingly, in one embodiment, an increase of tyrosine in a non-human organism, as compared to a corresponding non-transformed wild type non-human organism, is conferred in the process of the invention, if the activity of a polypeptide showing the activity of a photosystem II protein, or if the activity of the polypeptide Slr1739, preferably represented by SEQ ID NO. 58732, or a homolog or fragment thereof, or if the activity of a polypeptide encoded by a nucleic acid molecule comprising the nucleic acid SEQ ID NO. 58731, preferably the coding region thereof, or a homolog or fragment thereof, e.g. derived from Synechocystis sp., is increased or generated. For example the activity of a nucleic acid molecule or a polypeptide comprising the nucleic acid, preferably the coding region thereof, or polypeptide or the consensus sequence or the polypeptide motif, as depicted in Table I, II or IV, application No. 3, column 5 or 8 in the respective same line as the nucleic acid molecule SEQ ID NO. 58731 or polypeptide SEQ ID NO. 58732, respectively, or a homolog or a fragment thereof, is increased or generated, or if the activity photosystem II protein is increased or generated in a non-human organism, like a microorganism or a plant cell, plant or part thereof, especially with plastidic localization, whereby the respective line discloses in column 7 tyrosine. For example, an increase of the tyrosine of at least 1 percent, particularly in a range of 73 to 163-percent is conferred as compared to a corresponding non-transformed wild type non-human organism.

[22816] Accordingly, in one embodiment, an increase of 5-oxoproline in a non-human organism, as compared to a corresponding non-transformed wild type non-human organism, is conferred in the process of the invention, if the activity of a polypeptide showing the activity of a photosystem II protein, or if the activity of the polypeptide Slr1739, preferably represented by SEQ ID NO. 58732, or a homolog or fragment thereof, or if the activity of a polypeptide encoded by a nucleic acid molecule comprising the nucleic acid SEQ ID NO. 58731, preferably the coding region thereof, or a homolog or fragment thereof, e.g. derived from Synechocystis sp., is increased or generated. For example the activity of a nucleic acid molecule or a polypeptide comprising the nucleic acid, preferably the coding region thereof, or polypeptide or the consensus sequence or the polypeptide motif, as depicted in Table I, II or IV, application No. 3, column 5 or 8 in the respective same line as the nucleic acid molecule SEQ ID NO. 58731 or polypeptide SEQ ID NO. 58732, respectively, or a homolog or a fragment thereof, is increased or generated, or if the activity photosystem II protein is increased or generated in a non-human organism, like a microorganism or a plant cell, plant or part thereof, especially with plastidic localization, whereby the respective line discloses in column 7 5-oxoproline. For example, an increase of the 5-oxoproline of at least 1 percent, particularly in a range of 46 to 128-percent is conferred as compared to a corresponding non-transformed wild type non-human organism.

[22817] Accordingly, in one embodiment, an increase of asparagine in a non-human organism, as compared to a corresponding non-transformed wild type non-human organism, is conferred in the process of the invention, if the activity of a polypeptide showing the activity of a glutamine amidotransferase, or if the activity of the polypeptide Slr1742, preferably represented by SEQ ID NO. 58752, or a homolog or fragment thereof, or if the activity of a polypeptide encoded by a nucleic acid molecule comprising the nucleic acid SEQ ID NO. 58751, preferably the coding region thereof, or a homolog or fragment thereof, e.g. derived from Synechocystis sp., is increased or generated. For example the activity of a nucleic acid molecule or a polypeptide comprising the nucleic acid, preferably the coding region thereof, or polypeptide or the consensus sequence or the polypeptide motif, as depicted in Table I, II or IV, application No. 3, column 5 or 8 in the respective same line as the nucleic acid molecule SEQ ID NO. 58751 or polypeptide SEQ ID NO. 58752, respectively, or a homolog or a fragment thereof, is increased or generated, or if the activity glutamine amidotransferase is increased or generated in a non-human organism, like a microorganism or a plant cell, plant or part thereof, especially with mitochondrial localization, whereby the respective line discloses in column 7 asparagine. For example, an increase of the asparagine of at least 1 percent, particularly in a range of 45 to 188-percent is conferred as compared to a corresponding non-transformed wild type non-human organism.

[22818] Accordingly, in one embodiment, an increase of citrulline in a non-human organism, as compared to a corresponding non-transformed wild type non-human organism, is conferred in the process of the invention, if the activity of a polypeptide showing the activity of a phosphoadenosine phosphosulfate reductase , or if the activity of the polypeptide Slr1791, preferably represented by SEQ ID NO. 12141, or a homolog or fragment thereof, or if the activity of a polypeptide encoded by a nucleic acid molecule comprising the nucleic acid SEQ ID NO. 12140, preferably the coding region thereof, or a homolog or fragment thereof, e.g. derived from Synechocystis sp., is increased or generated. For example the activity of a nucleic acid molecule or a polypeptide comprising the nucleic acid, preferably the coding region thereof, or polypeptide or the consensus sequence or the polypeptide motif, as depicted in Table I, II or IV, application No. 3, column 5 or 8 in the respective same line as the nucleic acid molecule SEQ ID NO. 12140 or polypeptide SEQ ID NO. 12141, respectively, or a homolog or a fragment thereof, is increased or generated, or if the activity phosphoadenosine phosphosulfate reductase is increased or generated in a non-human organism, like a microorganism or a plant cell, plant or part thereof, especially with mitochondrial localization, whereby the respective line discloses in column 7 citrulline. For example, an increase of the citrulline of at least 1 percent, particularly in a range of 32 to 95-percent is conferred as compared to a corresponding non-transformed wild type non-human organism.

[22819] Accordingly, in one embodiment, an increase of asparagine in a non-human organism, as compared to a corresponding non-transformed wild type non-human organism, is conferred in the process of the invention, if the activity of a polypeptide showing the activity of a riboflavin biosynthesis protein, or if the activity of the polypeptide Slr1882, preferably represented by SEQ ID NO. 59042, or a homolog or fragment thereof, or if the activity of a polypeptide encoded by a nucleic acid molecule comprising the nucleic acid SEQ ID NO. 59041, preferably the coding region thereof, or a homolog or fragment thereof, e.g. derived from Synechocystis sp., is increased or generated. For example the activity of a nucleic acid molecule or a polypeptide comprising the nucleic acid, preferably the coding region thereof, or polypeptide or the consensus sequence or the polypeptide motif, as depicted in Table I, II or IV, application No. 3, column 5 or 8 in the respective same line as the nucleic acid molecule SEQ ID NO. 59041 or polypeptide SEQ ID NO. 59042, respectively, or a homolog or a fragment thereof, is increased or generated, or if the activity riboflavin biosynthesis protein is increased or generated in a non-human organism, like a microorganism or a plant cell, plant or part thereof, especially with non-targeted localization, whereby the respective line discloses in column 7 asparagine. For example, an increase of the asparagine of at least 1 percent, particularly in a range of 65 to 112-percent is conferred as compared to a corresponding non-transformed wild type non-human organism.

[22820] Accordingly, in one embodiment, an increase of homoserine in a non-human organism, as compared to a corresponding non-transformed wild type non-human organism, is conferred in the process of the invention, if the activity of a polypeptide showing the activity of a threonine dehydratase, or if the activity of the polypeptide Slr2072, preferably represented by SEQ ID NO. 12342, or a homolog or fragment thereof, or if the activity of a polypeptide encoded by a nucleic acid molecule comprising the nucleic acid SEQ ID NO. 12341, preferably the coding region thereof, or a homolog or fragment thereof, e.g. derived from Synechocystis sp., is increased or generated. For example the activity of a nucleic acid molecule or a polypeptide comprising the nucleic acid, preferably the coding region thereof, or polypeptide or the consensus sequence or the polypeptide motif, as depicted in Table I, II or IV, application No. 3, column 5 or 8 in the respective same line as the nucleic acid molecule SEQ ID NO. 12341 or polypeptide SEQ ID NO. 12342, respectively, or a homolog or a fragment thereof, is increased or generated, or if the activity threonine dehydratase is increased or generated in a non-human organism, like a microorganism or a plant cell, plant or part thereof, especially with plastidic localization, whereby the respective line discloses in column 7 homoserine. For example, an increase of the homoserine of at least 1 percent, particularly in a range of 40 to 86-percent is conferred as compared to a corresponding non-transformed wild type non-human organism.

[22821] Accordingly, in one embodiment, an increase of tyrosine in a non-human organism, as compared to a corresponding non-transformed wild type non-human organism, is conferred in the process of the invention, if the activity of a polypeptide showing the activity of a threonine dehydratase, or if the activity of the polypeptide Slr2072, preferably represented by SEQ ID NO. 12342, or a homolog or fragment thereof, or if the activity of a polypeptide encoded by a nucleic acid molecule comprising the nucleic acid SEQ ID NO. 12341, preferably the coding region thereof, or a homolog or fragment thereof, e.g. derived from Synechocystis sp., is increased or generated. For example the activity of a nucleic acid molecule or a polypeptide comprising the nucleic acid, preferably the coding region thereof, or polypeptide or the consensus sequence or the polypeptide motif, as depicted in Table I, II or IV, application No. 3, column 5 or 8 in the respective same line as the nucleic acid molecule SEQ ID NO. 12341 or polypeptide SEQ ID NO. 12342, respectively, or a homolog or a fragment thereof, is increased or generated, or if the activity threonine dehydratase is increased or generated in a non-human organism, like a microorganism or a plant cell, plant or part thereof, especially with mitochondrial localization, whereby the respective line discloses in column 7 tyrosine. For example, an increase of the tyrosine of at least 1 percent, particularly in a range of 30 to 65-percent is conferred as compared to a corresponding non-transformed wild type non-human organism.

[22822] Accordingly, in one embodiment, an increase of alanine in a non-human organism, as compared to a corresponding non-transformed wild type non-human organism, is conferred in the process of the invention, if the activity of a polypeptide showing the activity of a short-chain alcohol dehydrogenase family, or if the activity of the polypeptide Slr2124, preferably represented by SEQ ID NO. 59371, or a homolog or fragment thereof, or if the activity of a polypeptide encoded by a nucleic acid molecule comprising the nucleic acid SEQ ID NO. 59370, preferably the coding region thereof, or a homolog or fragment thereof, e.g. derived from Synechocystis sp., is increased or generated. For example the activity of a nucleic acid molecule or a polypeptide comprising the nucleic acid, preferably the coding region thereof, or polypeptide or the consensus sequence or the polypeptide motif, as depicted in Table I, II or IV, application No. 3, column 5 or 8 in the respective same line as the nucleic acid molecule SEQ ID NO. 59370 or polypeptide SEQ ID NO. 59371, respectively, or a homolog or a fragment thereof, is increased or generated, or if the activity short-chain alcohol dehydrogenase family is increased or generated in a non-human organism, like a microorganism or a plant cell, plant or part thereof, especially with plastidic localization, whereby the respective line discloses in column 7 alanine. For example, an increase of the alanine of at least 1 percent, particularly in a range of 19 to 44-percent is conferred as compared to a corresponding non-transformed wild type non-human organism.

[22823] Accordingly, in one embodiment, an increase of phenylalanine in a non-human organism, as compared to a corresponding non-transformed wild type non-human organism, is conferred in the process of the invention, if the activity of a polypeptide showing the activity of a short-chain alcohol dehydrogenase family, or if the activity of the polypeptide Slr2124, preferably represented by SEQ ID NO. 59371, or a homolog or fragment thereof, or if the activity of a polypeptide encoded by a nucleic acid molecule comprising the nucleic acid SEQ ID NO. 59370, preferably the coding region thereof, or a homolog or fragment thereof, e.g. derived from Synechocystis sp., is increased or generated. For example the activity of a nucleic acid molecule or a polypeptide comprising the nucleic acid, preferably the coding region thereof, or polypeptide or the consensus sequence or the polypeptide motif, as depicted in Table I, II or IV, application No. 3, column 5 or 8 in the respective same line as the nucleic acid molecule SEQ ID NO. 59370 or polypeptide SEQ ID NO. 59371, respectively, or a homolog or a fragment thereof, is increased or generated, or if the activity short-chain alcohol dehydrogenase family is increased or generated in a non-human organism, like a microorganism or a plant cell, plant or part thereof, especially with plastidic localization, whereby the respective line discloses in column 7 phenylalanine. For example, an increase of the phenylalanine of at least 1 percent, particularly in a range of 36 to 69-percent is conferred as compared to a corresponding non-transformed wild type non-human organism.

[22824] Accordingly, in one embodiment, an increase of tyrosine in a non-human organism, as compared to a corresponding non-transformed wild type non-human organism, is conferred in the process of the invention, if the activity of a polypeptide showing the activity of a short-chain alcohol dehydrogenase family, or if the activity of the polypeptide Slr2124, preferably represented by SEQ ID NO. 59371, or a homolog or fragment thereof, or if the activity of a polypeptide encoded by a nucleic acid molecule comprising the nucleic acid SEQ ID NO. 59370, preferably the coding region thereof, or a homolog or fragment thereof, e.g. derived from Synechocystis sp., is increased or generated. For example the activity of a nucleic acid molecule or a polypeptide comprising the nucleic acid, preferably the coding region thereof, or polypeptide or the consensus sequence or the polypeptide motif, as depicted in Table I, II or IV, application No. 3, column 5 or 8 in the respective same line as the nucleic acid molecule SEQ ID NO. 59370 or polypeptide SEQ ID NO. 59371, respectively, or a homolog or a fragment thereof, is increased or generated, or if the activity short-chain alcohol dehydrogenase family is increased or generated in a non-human organism, like a microorganism or a plant cell, plant or part thereof, especially with plastidic localization, whereby the respective line discloses in column 7 tyrosine. For example, an increase of the tyrosine of at least 1 percent, particularly in a range of 36 to 87-percent is conferred as compared to a corresponding non-transformed wild type non-human organism.

[22825] Accordingly, in one embodiment, an increase of phenylalanine in a non-human organism, as compared to a corresponding non-transformed wild type non-human organism, is conferred in the process of the invention, if the activity of a polypeptide showing the activity of a Sec-independent protein translocase subunit, or if the activity of the polypeptide TTC0019, preferably represented by SEQ ID NO. 12699, or a homolog or fragment thereof, or if the activity of a polypeptide encoded by a nucleic acid molecule comprising the nucleic acid SEQ ID NO. 12698, preferably the coding region thereof, or a homolog or fragment thereof, e.g. derived from Thermus thermophilus, is increased or generated. For example the activity of a nucleic acid molecule or a polypeptide comprising the nucleic acid, preferably the coding region thereof, or polypeptide or the consensus sequence or the polypeptide motif, as depicted in Table I, II or IV, application No. 3, column 5 or 8 in the respective same line as the nucleic acid molecule SEQ ID NO. 12698 or polypeptide SEQ ID NO. 12699, respectively, or a homolog or a fragment thereof, is increased or generated, or if the activity Sec-independent protein translocase subunit is increased or generated in a non-human organism, like a microorganism or a plant cell, plant or part thereof, especially with non-targeted localization, whereby the respective line discloses in column 7 phenylalanine. For example, an increase of the phenylalanine of at least 1 percent, particularly in a range of 31 to 624-percent is conferred as compared to a corresponding non-transformed wild type non-human organism.

[22826] Accordingly, in one embodiment, an increase of tyrosine in a non-human organism, as compared to a corresponding non-transformed wild type non-human organism, is conferred in the process of the invention, if the activity of a polypeptide showing the activity of a Sec-independent protein translocase subunit, or if the activity of the polypeptide TTC0019, preferably represented by SEQ ID NO. 12699, or a homolog or fragment thereof, or if the activity of a polypeptide encoded by a nucleic acid molecule comprising the nucleic acid SEQ ID NO. 12698, preferably the coding region thereof, or a homolog or fragment thereof, e.g. derived from Thermus thermophilus, is increased or generated. For example the activity of a nucleic acid molecule or a polypeptide comprising the nucleic acid, preferably the coding region thereof, or polypeptide or the consensus sequence or the polypeptide motif, as depicted in Table I, II or IV, application No. 3, column 5 or 8 in the respective same line as the nucleic acid molecule SEQ ID NO. 12698 or polypeptide SEQ ID NO. 12699, respectively, or a homolog or a fragment thereof, is increased or generated, or if the activity Sec-independent protein translocase subunit is increased or generated in a non-human organism, like a microorganism or a plant cell, plant or part thereof, especially with non-targeted localization, whereby the respective line discloses in column 7 tyrosine. For example, an increase of the tyrosine of at least 1 percent, particularly in a range of 157 to 378-percent is conferred as compared to a corresponding non-transformed wild type non-human organism.

[22827] Accordingly, in one embodiment, an increase of 5-oxoproline in a non-human organism, as compared to a corresponding non-transformed wild type non-human organism, is conferred in the process of the invention, if the activity of a polypeptide showing the activity of a Sec-independent protein translocase subunit, or if the activity of the polypeptide TTC0019, preferably represented by SEQ ID NO. 12699, or a homolog or fragment thereof, or if the activity of a polypeptide encoded by a nucleic acid molecule comprising the nucleic acid SEQ ID NO. 12698, preferably the coding region thereof, or a homolog or fragment thereof, e.g. derived from Thermus thermophilus, is increased or generated. For example the activity of a nucleic acid molecule or a polypeptide comprising the nucleic acid, preferably the coding region thereof, or polypeptide or the consensus sequence or the polypeptide motif, as depicted in Table I, II or IV, application No. 3, column 5 or 8 in the respective same line as the nucleic acid molecule SEQ ID NO. 12698 or polypeptide SEQ ID NO. 12699, respectively, or a homolog or a fragment thereof, is increased or generated, or if the activity Sec-independent protein translocase subunit is increased or generated in a non-human organism, like a microorganism or a plant cell, plant or part thereof, especially with non-targeted localization, whereby the respective line discloses in column 7 5-oxoproline. For example, an increase of the 5-oxoproline of at least 1 percent, particularly in a range of 36 to 277-percent is conferred as compared to a corresponding non-transformed wild type non-human organism.

[22828] Accordingly, in one embodiment, an increase of tyrosine in a non-human organism, as compared to a corresponding non-transformed wild type non-human organism, is conferred in the process of the invention, if the activity of a polypeptide showing the activity of a transcriptional regulator, or if the activity of the polypeptide TTC0239, preferably represented by SEQ ID NO. 88527, or a homolog or fragment thereof, or if the activity of a polypeptide encoded by a nucleic acid molecule comprising the nucleic acid SEQ ID NO. 88526, preferably the coding region thereof, or a homolog or fragment thereof, e.g. derived from Thermus thermophilus, is increased or generated. For example the activity of a nucleic acid molecule or a polypeptide comprising the nucleic acid, preferably the coding region thereof, or polypeptide or the consensus sequence or the polypeptide motif, as depicted in Table I, II or IV, application No. 3, column 5 or 8 in the respective same line as the nucleic acid molecule SEQ ID NO. 88526 or polypeptide SEQ ID NO. 88527, respectively, or a homolog or a fragment thereof, is increased or generated, or if the activity transcriptional regulator is increased or generated in a non-human organism, like a microorganism or a plant cell, plant or part thereof, especially with non-targeted localization, whereby the respective line discloses in column 7 tyrosine. For example, an increase of the tyrosine of at least 1 percent, particularly in a range of 35 to 136-percent is conferred as compared to a corresponding non-transformed wild type non-human organism.

[22829] Accordingly, in one embodiment, an increase of asparagine in a non-human organism, as compared to a corresponding non-transformed wild type non-human organism, is conferred in the process of the invention, if the activity of a polypeptide showing the activity of a amino acid ABC transporter permease protein, or if the activity of the polypeptide TTC0337, preferably represented by SEQ ID NO. 61071, or a homolog or fragment thereof, or if the activity of a polypeptide encoded by a nucleic acid molecule comprising the nucleic acid SEQ ID NO. 61070, preferably the coding region thereof, or a homolog or fragment thereof, e.g. derived from Thermus thermophilus, is increased or generated. For example the activity of a nucleic acid molecule or a polypeptide comprising the nucleic acid, preferably the coding region thereof, or polypeptide or the consensus sequence or the polypeptide motif, as depicted in Table I, II or IV, application No. 3, column 5 or 8 in the respective same line as the nucleic acid molecule SEQ ID NO. 61070 or polypeptide SEQ ID NO. 61071, respectively, or a homolog or a fragment thereof, is increased or generated, or if the activity amino acid ABC transporter permease protein is increased or generated in a non-human organism, like a microorganism or a plant cell, plant or part thereof, especially with non-targeted localization, whereby the respective line discloses in column 7 asparagine. For example, an increase of the asparagine of at least 1 percent, particularly in a range of 44 to 216-percent is conferred as compared to a corresponding non-transformed wild type non-human organism.

[22830] Accordingly, in one embodiment, an increase of tyrosine in a non-human organism, as compared to a corresponding non-transformed wild type non-human organism, is conferred in the process of the invention, if the activity of a polypeptide showing the activity of a TTC0768-protein, or if the activity of the polypeptide TTC0768, preferably represented by SEQ ID NO. 61533, or a homolog or fragment thereof, or if the activity of a polypeptide encoded by a nucleic acid molecule comprising the nucleic acid SEQ ID NO. 61532, preferably the coding region thereof, or a homolog or fragment thereof, e.g. derived from Thermus thermophilus, is increased or generated. For example the activity of a nucleic acid molecule or a polypeptide comprising the nucleic acid, preferably the coding region thereof, or polypeptide or the consensus sequence or the polypeptide motif, as depicted in Table I, II or IV, application No. 3, column 5 or 8 in the respective same line as the nucleic acid molecule SEQ ID NO. 61532 or polypeptide SEQ ID NO. 61533, respectively, or a homolog or a fragment thereof, is increased or generated, or if the activity TTC0768-protein is increased or generated in a non-human organism, like a microorganism or a plant cell, plant or part thereof, especially with non-targeted localization, whereby the respective line discloses in column 7 tyrosine. For example, an increase of the tyrosine of at least 1 percent, particularly in a range of 51 to 97-percent is conferred as compared to a corresponding non-transformed wild type non-human organism.

[22831] Accordingly, in one embodiment, an increase of alanine in a non-human organism, as compared to a corresponding non-transformed wild type non-human organism, is conferred in the process of the invention, if the activity of a polypeptide showing the activity of a TTC0881-protein, or if the activity of the polypeptide TTC0881, preferably represented by SEQ ID NO. 88876, or a homolog or fragment thereof, or if the activity of a polypeptide encoded by a nucleic acid molecule comprising the nucleic acid SEQ ID NO. 88875, preferably the coding region thereof, or a homolog or fragment thereof, e.g. derived from Thermus thermophilus, is increased or generated. For example the activity of a nucleic acid molecule or a polypeptide comprising the nucleic acid, preferably the coding region thereof, or polypeptide or the consensus sequence or the polypeptide motif, as depicted in Table I, II or IV, application No. 3, column 5 or 8 in the respective same line as the nucleic acid molecule SEQ ID NO. 88875 or polypeptide SEQ ID NO. 88876, respectively, or a homolog or a fragment thereof, is increased or generated, or if the activity TTC0881-protein is increased or generated in a non-human organism, like a microorganism or a plant cell, plant or part thereof, especially with non-targeted localization, whereby the respective line discloses in column 7 alanine. For example, an increase of the alanine of at least 1 percent, particularly in a range of 25 to 40-percent is conferred as compared to a corresponding non-transformed wild type non-human organism.

[22832] Accordingly, in one embodiment, an increase of serine in a non-human organism, as compared to a corresponding non-transformed wild type non-human organism, is conferred in the process of the invention, if the activity of a polypeptide showing the activity of a TTC0881-protein, or if the activity of the polypeptide TTC0881, preferably represented by SEQ ID NO. 88876, or a homolog or fragment thereof, or if the activity of a polypeptide encoded by a nucleic acid molecule comprising the nucleic acid SEQ ID NO. 88875, preferably the coding region thereof, or a homolog or fragment thereof, e.g. derived from Thermus thermophilus, is increased or generated. For example the activity of a nucleic acid molecule or a polypeptide comprising the nucleic acid, preferably the coding region thereof, or polypeptide or the consensus sequence or the polypeptide motif, as depicted in Table I, II or IV, application No. 3, column 5 or 8 in the respective same line as the nucleic acid molecule SEQ ID NO. 88875 or polypeptide SEQ ID NO. 88876, respectively, or a homolog or a fragment thereof, is increased or generated, or if the activity TTC0881-protein is increased or generated in a non-human organism, like a microorganism or a plant cell, plant or part thereof, especially with non-targeted localization, whereby the respective line discloses in column 7 serine. For example, an increase of the serine of at least 1 percent, particularly in a range of 27 to 84-percent is conferred as compared to a corresponding non-transformed wild type non-human organism.

[22833] Accordingly, in one embodiment, an increase of alanine in a non-human organism, as compared to a corresponding non-transformed wild type non-human organism, is conferred in the process of the invention, if the activity of a polypeptide showing the activity of a metal-dependent hydrolase, or if the activity of the polypeptide TTC0917, preferably represented by SEQ ID NO. 61554, or a homolog or fragment thereof, or if the activity of a polypeptide encoded by a nucleic acid molecule comprising the nucleic acid SEQ ID NO. 61553, preferably the coding region thereof, or a homolog or fragment thereof, e.g. derived from Thermus thermophilus, is increased or generated. For example the activity of a nucleic acid molecule or a polypeptide comprising the nucleic acid, preferably the coding region thereof, or polypeptide or the consensus sequence or the polypeptide motif, as depicted in Table I, II or IV, application No. 3, column 5 or 8 in the respective same line as the nucleic acid molecule SEQ ID NO. 61553 or polypeptide SEQ ID NO. 61554, respectively, or a homolog or a fragment thereof, is increased or generated, or if the activity metal-dependent hydrolase is increased or generated in a non-human organism, like a microorganism or a plant cell, plant or part thereof, especially with non-targeted localization, whereby the respective line discloses in column 7 alanine. For example, an increase of the alanine of at least 1 percent, particularly in a range of 20 to 37-percent is conferred as compared to a corresponding non-transformed wild type non-human organism.

[22834] Accordingly, in one embodiment, an increase of serine in a non-human organism, as compared to a corresponding non-transformed wild type non-human organism, is conferred in the process of the invention, if the activity of a polypeptide showing the activity of a metal-dependent hydrolase, or if the activity of the polypeptide TTC0917, preferably represented by SEQ ID NO. 61554, or a homolog or fragment thereof, or if the activity of a polypeptide encoded by a nucleic acid molecule comprising the nucleic acid SEQ ID NO. 61553, preferably the coding region thereof, or a homolog or fragment thereof, e.g. derived from Thermus thermophilus, is increased or generated. For example the activity of a nucleic acid molecule or a polypeptide comprising the nucleic acid, preferably the coding region thereof, or polypeptide or the consensus sequence or the polypeptide motif, as depicted in Table I, II or IV, application No. 3, column 5 or 8 in the respective same line as the nucleic acid molecule SEQ ID NO. 61553 or polypeptide SEQ ID NO. 61554, respectively, or a homolog or a fragment thereof, is increased or generated, or if the activity metal-dependent hydrolase is increased or generated in a non-human organism, like a microorganism or a plant cell, plant or part thereof, especially with non-targeted localization, whereby the respective line discloses in column 7 serine. For example, an increase of the serine of at least 1 percent, particularly in a range of 23 to 35-percent is conferred as compared to a corresponding non-transformed wild type non-human organism.

[22835] Accordingly, in one embodiment, an increase of phenylalanine in a non-human organism, as compared to a corresponding non-transformed wild type non-human organism, is conferred in the process of the invention, if the activity of a polypeptide showing the activity of a multiple antibiotic resistance protein, or if the activity of the polypeptide TTC1193, preferably represented by SEQ ID NO. 61724, or a homolog or fragment thereof, or if the activity of a polypeptide encoded by a nucleic acid molecule comprising the nucleic acid SEQ ID NO. 61723, preferably the coding region thereof, or a homolog or fragment thereof, e.g. derived from Thermus thermophilus, is increased or generated. For example the activity of a nucleic acid molecule or a polypeptide comprising the nucleic acid, preferably the coding region thereof, or polypeptide or the consensus sequence or the polypeptide motif, as depicted in Table I, II or IV, application No. 3, column 5 or 8 in the respective same line as the nucleic acid molecule SEQ ID NO. 61723 or polypeptide SEQ ID NO. 61724, respectively, or a homolog or a fragment thereof, is increased or generated, or if the activity multiple antibiotic resistance protein is increased or generated in a non-human organism, like a microorganism or a plant cell, plant or part thereof, especially with non-targeted localization, whereby the respective line discloses in column 7 phenylalanine. For example, an increase of the phenylalanine of at least 1 percent, particularly in a range of 33 to 133-percent is conferred as compared to a corresponding non-transformed wild type non-human organism.

[22836] Accordingly, in one embodiment, an increase of tyrosine in a non-human organism, as compared to a corresponding non-transformed wild type non-human organism, is conferred in the process of the invention, if the activity of a polypeptide showing the activity of a multiple antibiotic resistance protein, or if the activity of the polypeptide TTC1193, preferably represented by SEQ ID NO. 61724, or a homolog or fragment thereof, or if the activity of a polypeptide encoded by a nucleic acid molecule comprising the nucleic acid SEQ ID NO. 61723, preferably the coding region thereof, or a homolog or fragment thereof, e.g. derived from Thermus thermophilus, is increased or generated. For example the activity of a nucleic acid molecule or a polypeptide comprising the nucleic acid, preferably the coding region thereof, or polypeptide or the consensus sequence or the polypeptide motif, as depicted in Table I, II or IV, application No. 3, column 5 or 8 in the respective same line as the nucleic acid molecule SEQ ID NO. 61723 or polypeptide SEQ ID NO. 61724, respectively, or a homolog or a fragment thereof, is increased or generated, or if the activity multiple antibiotic resistance protein is increased or generated in a non-human organism, like a microorganism or a plant cell, plant or part thereof, especially with non-targeted localization, whereby the respective line discloses in column 7 tyrosine. For example, an increase of the tyrosine of at least 1 percent, particularly in a range of 53 to 103-percent is conferred as compared to a corresponding non-transformed wild type non-human organism.

[22837] Accordingly, in one embodiment, an increase of alanine in a non-human organism, as compared to a corresponding non-transformed wild type non-human organism, is conferred in the process of the invention, if the activity of a polypeptide showing the activity of a TTC1386-protein, or if the activity of the polypeptide TTC1386, preferably represented by SEQ ID NO. 62080, or a homolog or fragment thereof, or if the activity of a polypeptide encoded by a nucleic acid molecule comprising the nucleic acid SEQ ID NO. 62079, preferably the coding region thereof, or a homolog or fragment thereof, e.g. derived from Thermus thermophilus, is increased or generated. For example the activity of a nucleic acid molecule or a polypeptide comprising the nucleic acid, preferably the coding region thereof, or polypeptide or the consensus sequence or the polypeptide motif, as depicted in Table I, II or IV, application No. 3, column 5 or 8 in the respective same line as the nucleic acid molecule SEQ ID NO. 62079 or polypeptide SEQ ID NO. 62080, respectively, or a homolog or a fragment thereof, is increased or generated, or if the activity TTC1386-protein is increased or generated in a non-human organism, like a microorganism or a plant cell, plant or part thereof, especially with non-targeted localization, whereby the respective line discloses in column 7 alanine. For example, an increase of the alanine of at least 1 percent, particularly in a range of 54 to 91-percent is conferred as compared to a corresponding non-transformed wild type non-human organism.

[22838] Accordingly, in one embodiment, an increase of glycine in a non-human organism, as compared to a corresponding non-transformed wild type non-human organism, is conferred in the process of the invention, if the activity of a polypeptide showing the activity of a TTC1386-protein, or if the activity of the polypeptide TTC1386, preferably represented by SEQ ID NO. 62080, or a homolog or fragment thereof, or if the activity of a polypeptide encoded by a nucleic acid molecule comprising the nucleic acid SEQ ID NO. 62079, preferably the coding region thereof, or a homolog or fragment thereof, e.g. derived from Thermus thermophilus, is increased or generated. For example the activity of a nucleic acid molecule or a polypeptide comprising the nucleic acid, preferably the coding region thereof, or polypeptide or the consensus sequence or the polypeptide motif, as depicted in Table I, II or IV, application No. 3, column 5 or 8 in the respective same line as the nucleic acid molecule SEQ ID NO. 62079 or polypeptide SEQ ID NO. 62080, respectively, or a homolog or a fragment thereof, is increased or generated, or if the activity TTC1386-protein is increased or generated in a non-human organism, like a microorganism or a plant cell, plant or part thereof, especially with non-targeted localization, whereby the respective line discloses in column 7 glycine. For example, an increase of the glycine of at least 1 percent, particularly in a range of 230 to 978-percent is conferred as compared to a corresponding non-transformed wild type non-human organism.

[22839] Accordingly, in one embodiment, an increase of phenylalanine in a non-human organism, as compared to a corresponding non-transformed wild type non-human organism, is conferred in the process of the invention, if the activity of a polypeptide showing the activity of a TTC1386-protein, or if the activity of the polypeptide TTC1386, preferably represented by SEQ ID NO. 62080, or a homolog or fragment thereof, or if the activity of a polypeptide encoded by a nucleic acid molecule comprising the nucleic acid SEQ ID NO. 62079, preferably the coding region thereof, or a homolog or fragment thereof, e.g. derived from Thermus thermophilus, is increased or generated. For example the activity of a nucleic acid molecule or a polypeptide comprising the nucleic acid, preferably the coding region thereof, or polypeptide or the consensus sequence or the polypeptide motif, as depicted in Table I, II or IV, application No. 3, column 5 or 8 in the respective same line as the nucleic acid molecule SEQ ID NO. 62079 or polypeptide SEQ ID NO. 62080, respectively, or a homolog or a fragment thereof, is increased or generated, or if the activity TTC1386-protein is increased or generated in a non-human organism, like a microorganism or a plant cell, plant or part thereof, especially with non-targeted localization, whereby the respective line discloses in column 7 phenylalanine. For example, an increase of the phenylalanine of at least 1 percent, particularly in a range of 45 to 528-percent is conferred as compared to a corresponding non-transformed wild type non-human organism.

[22840] Accordingly, in one embodiment, an increase of serine in a non-human organism, as compared to a corresponding non-transformed wild type non-human organism, is conferred in the process of the invention, if the activity of a polypeptide showing the activity of a TTC1386-protein, or if the activity of the polypeptide TTC1386, preferably represented by SEQ ID NO. 62080, or a homolog or fragment thereof, or if the activity of a polypeptide encoded by a nucleic acid molecule comprising the nucleic acid SEQ ID NO. 62079, preferably the coding region thereof, or a homolog or fragment thereof, e.g. derived from Thermus thermophilus, is increased or generated. For example the activity of a nucleic acid molecule or a polypeptide comprising the nucleic acid, preferably the coding region thereof, or polypeptide or the consensus sequence or the polypeptide motif, as depicted in Table I, II or IV, application No. 3, column 5 or 8 in the respective same line as the nucleic acid molecule SEQ ID NO. 62079 or polypeptide SEQ ID NO. 62080, respectively, or a homolog or a fragment thereof, is increased or generated, or if the activity TTC1386-protein is increased or generated in a non-human organism, like a microorganism or a plant cell, plant or part thereof, especially with non-targeted localization, whereby the respective line discloses in column 7 serine. For example, an increase of the serine of at least 1 percent, particularly in a range of 23 to 117-percent is conferred as compared to a corresponding non-transformed wild type non-human organism.

[22841] Accordingly, in one embodiment, an increase of tyrosine in a non-human organism, as compared to a corresponding non-transformed wild type non-human organism, is conferred in the process of the invention, if the activity of a polypeptide showing the activity of a TTC1386-protein, or if the activity of the polypeptide TTC1386, preferably represented by SEQ ID NO. 62080, or a homolog or fragment thereof, or if the activity of a polypeptide encoded by a nucleic acid molecule comprising the nucleic acid SEQ ID NO. 62079, preferably the coding region thereof, or a homolog or fragment thereof, e.g. derived from Thermus thermophilus, is increased or generated. For example the activity of a nucleic acid molecule or a polypeptide comprising the nucleic acid, preferably the coding region thereof, or polypeptide or the consensus sequence or the polypeptide motif, as depicted in Table I, II or IV, application No. 3, column 5 or 8 in the respective same line as the nucleic acid molecule SEQ ID NO. 62079 or polypeptide SEQ ID NO. 62080, respectively, or a homolog or a fragment thereof, is increased or generated, or if the activity TTC1386-protein is increased or generated in a non-human organism, like a microorganism or a plant cell, plant or part thereof, especially with non-targeted localization, whereby the respective line discloses in column 7 tyrosine. For example, an increase of the tyrosine of at least 1 percent, particularly in a range of 39 to 829-percent is conferred as compared to a corresponding non-transformed wild type non-human organism.

[22842] Accordingly, in one embodiment, an increase of alanine in a non-human organism, as compared to a corresponding non-transformed wild type non-human organism, is conferred in the process of the invention, if the activity of a polypeptide showing the activity of a homocitrate synthase, or if the activity of the polypeptide TTC1550, preferably represented by SEQ ID NO. 12975, or a homolog or fragment thereof, or if the activity of a polypeptide encoded by a nucleic acid molecule comprising the nucleic acid SEQ ID NO. 12974, preferably the coding region thereof, or a homolog or fragment thereof, e.g. derived from Thermus thermophilus, is increased or generated. For example the activity of a nucleic acid molecule or a polypeptide comprising the nucleic acid, preferably the coding region thereof, or polypeptide or the consensus sequence or the polypeptide motif, as depicted in Table I, II or IV, application No. 3, column 5 or 8 in the respective same line as the nucleic acid molecule SEQ ID NO. 12974 or polypeptide SEQ ID NO. 12975, respectively, or a homolog or a fragment thereof, is increased or generated, or if the activity homocitrate synthase is increased or generated in a non-human organism, like a microorganism or a plant cell, plant or part thereof, especially with non-targeted localization, whereby the respective line discloses in column 7 alanine. For example, an increase of the alanine of at least 1 percent, particularly in a range of 45 to 86-percent is conferred as compared to a corresponding non-transformed wild type non-human organism.

[22843] Accordingly, in one embodiment, an increase of phenylalanine in a non-human organism, as compared to a corresponding non-transformed wild type non-human organism, is conferred in the process of the invention, if the activity of a polypeptide showing the activity of a homocitrate synthase, or if the activity of the polypeptide TTC1550, preferably represented by SEQ ID NO. 12975, or a homolog or fragment thereof, or if the activity of a polypeptide encoded by a nucleic acid molecule comprising the nucleic acid SEQ ID NO. 12974, preferably the coding region thereof, or a homolog or fragment thereof, e.g. derived from Thermus thermophilus, is increased or generated. For example the activity of a nucleic acid molecule or a polypeptide comprising the nucleic acid, preferably the coding region thereof, or polypeptide or the consensus sequence or the polypeptide motif, as depicted in Table I, II or IV, application No. 3, column 5 or 8 in the respective same line as the nucleic acid molecule SEQ ID NO. 12974 or polypeptide SEQ ID NO. 12975, respectively, or a homolog or a fragment thereof, is increased or generated, or if the activity homocitrate synthase is increased or generated in a non-human organism, like a microorganism or a plant cell, plant or part thereof, especially with non-targeted localization, whereby the respective line discloses in column 7 phenylalanine. For example, an increase of the phenylalanine of at least 1 percent, particularly in a range of 54 to 266-percent is conferred as compared to a corresponding non-transformed wild type non-human organism.

[22844] Accordingly, in one embodiment, an increase of serine in a non-human organism, as compared to a corresponding non-transformed wild type non-human organism, is conferred in the process of the invention, if the activity of a polypeptide showing the activity of a homocitrate synthase, or if the activity of the polypeptide TTC1550, preferably represented by SEQ ID NO. 12975, or a homolog or fragment thereof, or if the activity of a polypeptide encoded by a nucleic acid molecule comprising the nucleic acid SEQ ID NO. 12974, preferably the coding region thereof, or a homolog or fragment thereof, e.g. derived from Thermus thermophilus, is increased or generated. For example the activity of a nucleic acid molecule or a polypeptide comprising the nucleic acid, preferably the coding region thereof, or polypeptide or the consensus sequence or the polypeptide motif, as depicted in Table I, II or IV, application No. 3, column 5 or 8 in the respective same line as the nucleic acid molecule SEQ ID NO. 12974 or polypeptide SEQ ID NO. 12975, respectively, or a homolog or a fragment thereof, is increased or generated, or if the activity homocitrate synthase is increased or generated in a non-human organism, like a microorganism or a plant cell, plant or part thereof, especially with non-targeted localization, whereby the respective line discloses in column 7 serine. For example, an increase of the serine of at least 1 percent, particularly in a range of 23 to 104-percent is conferred as compared to a corresponding non-transformed wild type non-human organism.

[22845] Accordingly, in one embodiment, an increase of tyrosine in a non-human organism, as compared to a corresponding non-transformed wild type non-human organism, is conferred in the process of the invention, if the activity of a polypeptide showing the activity of a homocitrate synthase, or if the activity of the polypeptide TTC1550, preferably represented by SEQ ID NO. 12975, or a homolog or fragment thereof, or if the activity of a polypeptide encoded by a nucleic acid molecule comprising the nucleic acid SEQ ID NO. 12974, preferably the coding region thereof, or a homolog or fragment thereof, e.g. derived from Thermus thermophilus, is increased or generated. For example the activity of a nucleic acid molecule or a polypeptide comprising the nucleic acid, preferably the coding region thereof, or polypeptide or the consensus sequence or the polypeptide motif, as depicted in Table I, II or IV, application No. 3, column 5 or 8 in the respective same line as the nucleic acid molecule SEQ ID NO. 12974 or polypeptide SEQ ID NO. 12975, respectively, or a homolog or a fragment thereof, is increased or generated, or if the activity homocitrate synthase is increased or generated in a non-human organism, like a microorganism or a plant cell, plant or part thereof, especially with non-targeted localization, whereby the respective line discloses in column 7 tyrosine. For example, an increase of the tyrosine of at least 1 percent, particularly in a range of 35 to 213-percent is conferred as compared to a corresponding non-transformed wild type non-human organism.

[22846] Accordingly, in one embodiment, an increase of 5-oxoproline in a non-human organism, as compared to a corresponding non-transformed wild type non-human organism, is conferred in the process of the invention, if the activity of a polypeptide showing the activity of a homocitrate synthase, or if the activity of the polypeptide TTC1550, preferably represented by SEQ ID NO. 12975, or a homolog or fragment thereof, or if the activity of a polypeptide encoded by a nucleic acid molecule comprising the nucleic acid SEQ ID NO. 12974, preferably the coding region thereof, or a homolog or fragment thereof, e.g. derived from Thermus thermophilus, is increased or generated. For example the activity of a nucleic acid molecule or a polypeptide comprising the nucleic acid, preferably the coding region thereof, or polypeptide or the consensus sequence or the polypeptide motif, as depicted in Table I, II or IV, application No. 3, column 5 or 8 in the respective same line as the nucleic acid molecule SEQ ID NO. 12974 or polypeptide SEQ ID NO. 12975, respectively, or a homolog or a fragment thereof, is increased or generated, or if the activity homocitrate synthase is increased or generated in a non-human organism, like a microorganism or a plant cell, plant or part thereof, especially with non-targeted localization, whereby the respective line discloses in column 7 5-oxoproline. For example, an increase of the 5-oxoproline of at least 1 percent, particularly in a range of 47 to 171-percent is conferred as compared to a corresponding non-transformed wild type non-human organism.

[22847] Accordingly, in one embodiment, an increase of aspartate in a non-human organism, as compared to a corresponding non-transformed wild type non-human organism, is conferred in the process of the invention, if the activity of a polypeptide showing the activity of a oxidoreductase subunit, or if the activity of the polypeptide TTC1918, preferably represented by SEQ ID NO. 62161, or a homolog or fragment thereof, or if the activity of a polypeptide encoded by a nucleic acid molecule comprising the nucleic acid SEQ ID NO. 62160, preferably the coding region thereof, or a homolog or fragment thereof, e.g. derived from Thermus thermophilus, is increased or generated. For example the activity of a nucleic acid molecule or a polypeptide comprising the nucleic acid, preferably the coding region thereof, or polypeptide or the consensus sequence or the polypeptide motif, as depicted in Table I, II or IV, application No. 3, column 5 or 8 in the respective same line as the nucleic acid molecule SEQ ID NO. 62160 or polypeptide SEQ ID NO. 62161, respectively, or a homolog or a fragment thereof, is increased or generated, or if the activity oxidoreductase subunit is increased or generated in a non-human organism, like a microorganism or a plant cell, plant or part thereof, especially with non-targeted localization, whereby the respective line discloses in column 7 aspartate. For example, an increase of the aspartate of at least 1 percent, particularly in a range of 50 to 141-percent is conferred as compared to a corresponding non-transformed wild type non-human organism.

[22848] Accordingly, in one embodiment, an increase of serine in a non-human organism, as compared to a corresponding non-transformed wild type non-human organism, is conferred in the process of the invention, if the activity of a polypeptide showing the activity of a oxidoreductase subunit, or if the activity of the polypeptide TTC1918, preferably represented by SEQ ID NO. 62161, or a homolog or fragment thereof, or if the activity of a polypeptide encoded by a nucleic acid molecule comprising the nucleic acid SEQ ID NO. 62160, preferably the coding region thereof, or a homolog or fragment thereof, e.g. derived from Thermus thermophilus, is increased or generated. For example the activity of a nucleic acid molecule or a polypeptide comprising the nucleic acid, preferably the coding region thereof, or polypeptide or the consensus sequence or the polypeptide motif, as depicted in Table I, II or IV, application No. 3, column 5 or 8 in the respective same line as the nucleic acid molecule SEQ ID NO. 62160 or polypeptide SEQ ID NO. 62161, respectively, or a homolog or a fragment thereof, is increased or generated, or if the activity oxidoreductase subunit is increased or generated in a non-human organism, like a microorganism or a plant cell, plant or part thereof, especially with non-targeted localization, whereby the respective line discloses in column 7 serine. For example, an increase of the serine of at least 1 percent, particularly in a range of 24 to 44-percent is conferred as compared to a corresponding non-transformed wild type non-human organism.

[22849] Accordingly, in one embodiment, an increase of aspartate in a non-human organism, as compared to a corresponding non-transformed wild type non-human organism, is conferred in the process of the invention, if the activity of a polypeptide showing the activity of a XM_{—}473199-protein, or if the activity of the polypeptide XM_{—}473199, preferably represented by SEQ ID NO. 62245, or a homolog or fragment thereof, or if the activity of a polypeptide encoded by a nucleic acid molecule comprising the nucleic acid SEQ ID NO. 62244, preferably the coding region thereof, or a homolog or fragment thereof, e.g. derived from Oryza sativa, is increased or generated. For example the activity of a nucleic acid molecule or a polypeptide comprising the nucleic acid, preferably the coding region thereof, or polypeptide or the consensus sequence or the polypeptide motif, as depicted in Table I, II or IV, application No. 3, column 5 or 8 in the respective same line as the nucleic acid molecule SEQ ID NO. 62244 or polypeptide SEQ ID NO. 62245, respectively, or a homolog or a fragment thereof, is increased or generated, or if the activity XM_{—}473199-protein is increased or generated in a non-human organism, like a microorganism or a plant cell, plant or part thereof, especially with non-targeted localization, whereby the respective line discloses in column 7 aspartate. For example, an increase of the aspartate of at least 1 percent, particularly in a range of 53 to 91-percent is conferred as compared to a corresponding non-transformed wild type non-human organism.

[22850] Accordingly, in one embodiment, an increase of phenylalanine in a non-human organism, as compared to a corresponding non-transformed wild type non-human organism, is conferred in the process of the invention, if the activity of a polypeptide showing the activity of a XM_{—}473199-protein, or if the activity of the polypeptide XM_{—}473199, preferably represented by SEQ ID NO. 62245, or a homolog or fragment thereof, or if the activity of a polypeptide encoded by a nucleic acid molecule comprising the nucleic acid SEQ ID NO. 62244, preferably the coding region thereof, or a homolog or fragment thereof, e.g. derived from Oryza sativa, is increased or generated. For example the activity of a nucleic acid molecule or a polypeptide comprising the nucleic acid, preferably the coding region thereof, or polypeptide or the consensus sequence or the polypeptide motif, as depicted in Table I, II or IV, application No. 3, column 5 or 8 in the respective same line as the nucleic acid molecule SEQ ID NO. 62244 or polypeptide SEQ ID NO. 62245, respectively, or a homolog or a fragment thereof, is increased or generated, or if the activity XM_{—}473199-protein is increased or generated in a non-human organism, like a microorganism or a plant cell, plant or part thereof, especially with non-targeted localization, whereby the respective line discloses in column 7 phenylalanine. For example, an increase of the phenylalanine of at least 1 percent, particularly in a range of 31 to 44-percent is conferred as compared to a corresponding non-transformed wild type non-human organism.

[22851] Accordingly, in one embodiment, an increase of tyrosine in a non-human organism, as compared to a corresponding non-transformed wild type non-human organism, is conferred in the process of the invention, if the activity of a polypeptide showing the activity of a XM_{—}473199-protein, or if the activity of the polypeptide XM_{—}473199, preferably represented by SEQ ID NO. 62245, or a homolog or fragment thereof, or if the activity of a polypeptide encoded by a nucleic acid molecule comprising the nucleic acid SEQ ID NO. 62244, preferably the coding region thereof, or a homolog or fragment thereof, e.g. derived from Oryza sativa, is increased or generated. For example the activity of a nucleic acid molecule or a polypeptide comprising the nucleic acid, preferably the coding region thereof, or polypeptide or the consensus sequence or the polypeptide motif, as depicted in Table I, II or IV, application No. 3, column 5 or 8 in the respective same line as the nucleic acid molecule SEQ ID NO. 62244 or polypeptide SEQ ID NO. 62245, respectively, or a homolog or a fragment thereof, is increased or generated, or if the activity XM_{—}473199-protein is increased or generated in a non-human organism, like a microorganism or a plant cell, plant or part thereof, especially with non-targeted localization, whereby the respective line discloses in column 7 tyrosine. For example, an increase of the tyrosine of at least 1 percent, particularly in a range of 35 to 47-percent is conferred as compared to a corresponding non-transformed wild type non-human organism.

[22852] Accordingly, in one embodiment, an increase of 5-oxoproline in a non-human organism, as compared to a corresponding non-transformed wild type non-human organism, is conferred in the process of the invention, if the activity of a polypeptide showing the activity of a XM_{—}473199-protein, or if the activity of the polypeptide XM_{—}473199, preferably represented by SEQ ID NO. 62245, or a homolog or fragment thereof, or if the activity of a polypeptide encoded by a nucleic acid molecule comprising the nucleic acid SEQ ID NO. 62244, preferably the coding region thereof, or a homolog or fragment thereof, e.g. derived from Oryza sativa, is increased or generated. For example the activity of a nucleic acid molecule or a polypeptide comprising the nucleic acid, preferably the coding region thereof, or polypeptide or the consensus sequence or the polypeptide motif, as depicted in Table I, II or IV, application No. 3, column 5 or 8 in the respective same line as the nucleic acid molecule SEQ ID NO. 62244 or polypeptide SEQ ID NO. 62245, respectively, or a homolog or a fragment thereof, is increased or generated, or if the activity XM_{—}473199-protein is increased or generated in a non-human organism, like a microorganism or a plant cell, plant or part thereof, especially with non-targeted localization, whereby the respective line discloses in column 7 5-oxoproline. For example, an increase of the 5-oxoproline of at least 1 percent, particularly in a range of 32 to 86-percent is conferred as compared to a corresponding non-transformed wild type non-human organism.

[22853] Accordingly, in one embodiment, an increase of glycine in a non-human organism, as compared to a corresponding non-transformed wild type non-human organism, is conferred in the process of the invention, if the activity of a polypeptide showing the activity of a transcription factor, or if the activity of the polypeptide Ybl021 c, preferably represented by SEQ ID NO. 62525, or a homolog or fragment thereof, or if the activity of a polypeptide encoded by a nucleic acid molecule comprising the nucleic acid SEQ ID NO. 62524, preferably the coding region thereof, or a homolog or fragment thereof, e.g. derived from Saccharomyces cerevisiae, is increased or generated. For example the activity of a nucleic acid molecule or a polypeptide comprising the nucleic acid, preferably the coding region thereof, or polypeptide or the consensus sequence or the polypeptide motif, as depicted in Table I, II or IV, application No. 3, column 5 or 8 in the respective same line as the nucleic acid molecule SEQ ID NO. 62524 or polypeptide SEQ ID NO. 62525, respectively, or a homolog or a fragment thereof, is increased or generated, or if the activity transcription factor is increased or generated in a non-human organism, like a microorganism or a plant cell, plant or part thereof, especially with non-targeted localization, whereby the respective line discloses in column 7 glycine. For example, an increase of the glycine of at least 1 percent, particularly in a range of 42 to 325-percent is conferred as compared to a corresponding non-transformed wild type non-human organism.

[22854] Accordingly, in one embodiment, an increase of phenylalanine in a non-human organism, as compared to a corresponding non-transformed wild type non-human organism, is conferred in the process of the invention, if the activity of a polypeptide showing the activity of a transcription factor, or if the activity of the polypeptide Ybl021 c, preferably represented by SEQ ID NO. 62525, or a homolog or fragment thereof, or if the activity of a polypeptide encoded by a nucleic acid molecule comprising the nucleic acid SEQ ID NO. 62524, preferably the coding region thereof, or a homolog or fragment thereof, e.g. derived from Saccharomyces cerevisiae, is increased or generated. For example the activity of a nucleic acid molecule or a polypeptide comprising the nucleic acid, preferably the coding region thereof, or polypeptide or the consensus sequence or the polypeptide motif, as depicted in Table I, II or IV, application No. 3, column 5 or 8 in the respective same line as the nucleic acid molecule SEQ ID NO. 62524 or polypeptide SEQ ID NO. 62525, respectively, or a homolog or a fragment thereof, is increased or generated, or if the activity transcription factor is increased or generated in a non-human organism, like a microorganism or a plant cell, plant or part thereof, especially with non-targeted localization, whereby the respective line discloses in column 7 phenylalanine. For example, an increase of the phenylalanine of at least 1 percent, particularly in a range of 31 to 40-percent is conferred as compared to a corresponding non-transformed wild type non-human organism.

[22855] Accordingly, in one embodiment, an increase of aspartate in a non-human organism, as compared to a corresponding non-transformed wild type non-human organism, is conferred in the process of the invention, if the activity of a polypeptide showing the activity of a cell division control protein, or if the activity of the polypeptide Ybr160w, preferably represented by SEQ ID NO. 62718, or a homolog or fragment thereof, or if the activity of a polypeptide encoded by a nucleic acid molecule comprising the nucleic acid SEQ ID NO. 62717, preferably the coding region thereof, or a homolog or fragment thereof, e.g. derived from Saccharomyces cerevisiae, is increased or generated. For example the activity of a nucleic acid molecule or a polypeptide comprising the nucleic acid, preferably the coding region thereof, or polypeptide or the consensus sequence or the polypeptide motif, as depicted in Table I, II or IV, application No. 3, column 5 or 8 in the respective same line as the nucleic acid molecule SEQ ID NO. 62717 or polypeptide SEQ ID NO. 62718, respectively, or a homolog or a fragment thereof, is increased or generated, or if the activity cell division control protein is increased or generated in a non-human organism, like a microorganism or a plant cell, plant or part thereof, especially with non-targeted localization, whereby the respective line discloses in column 7 aspartate. For example, an increase of the aspartate of at least 1 percent, particularly in a range of 53 to 86-percent is conferred as compared to a corresponding non-transformed wild type non-human organism.

[22856] Accordingly, in one embodiment, an increase of tyrosine in a non-human organism, as compared to a corresponding non-transformed wild type non-human organism, is conferred in the process of the invention, if the activity of a polypeptide showing the activity of a cell division control protein, or if the activity of the polypeptide Ybr160w, preferably represented by SEQ ID NO. 62718, or a homolog or fragment thereof, or if the activity of a polypeptide encoded by a nucleic acid molecule comprising the nucleic acid SEQ ID NO. 62717, preferably the coding region thereof, or a homolog or fragment thereof, e.g. derived from Saccharomyces cerevisiae, is increased or generated. For example the activity of a nucleic acid molecule or a polypeptide comprising the nucleic acid, preferably the coding region thereof, or polypeptide or the consensus sequence or the polypeptide motif, as depicted in Table I, II or IV, application No. 3, column 5 or 8 in the respective same line as the nucleic acid molecule SEQ ID NO. 62717 or polypeptide SEQ ID NO. 62718, respectively, or a homolog or a fragment thereof, is increased or generated, or if the activity cell division control protein is increased or generated in a non-human organism, like a microorganism or a plant cell, plant or part thereof, especially with non-targeted localization, whereby the respective line discloses in column 7 tyrosine. For example, an increase of the tyrosine of at least 1 percent, particularly in a range of 64 to 100-percent is conferred as compared to a corresponding non-transformed wild type non-human organism.

[22857] Accordingly, in one embodiment, an increase of phenylalanine in a non-human organism, as compared to a corresponding non-transformed wild type non-human organism, is conferred in the process of the invention, if the activity of a polypeptide showing the activity of a 3-deoxy-7-phosphoheptulonate synthase, or if the activity of the polypeptide Ybr249c, preferably represented by SEQ ID NO. 88880, or a homolog or fragment thereof, or if the activity of a polypeptide encoded by a nucleic acid molecule comprising the nucleic acid SEQ ID NO. 88879, preferably the coding region thereof, or a homolog or fragment thereof, e.g. derived from Saccharomyces cerevisiae, is increased or generated. For example the activity of a nucleic acid molecule or a polypeptide comprising the nucleic acid, preferably the coding region thereof, or polypeptide or the consensus sequence or the polypeptide motif, as depicted in Table I, II or IV, application No. 3, column 5 or 8 in the respective same line as the nucleic acid molecule SEQ ID NO. 88879 or polypeptide SEQ ID NO. 88880, respectively, or a homolog or a fragment thereof, is increased or generated, or if the activity 3-deoxy-7-phosphoheptulonate synthase is increased or generated in a non-human organism, like a microorganism or a plant cell, plant or part thereof, especially with plastidic localization, whereby the respective line discloses in column 7 phenylalanine. For example, an increase of the phenylalanine of at least 1 percent, particularly in a range of 210 to 5005-percent is conferred as compared to a corresponding non-transformed wild type non-human organism.

[22858] Accordingly, in one embodiment, an increase of tyrosine in a non-human organism, as compared to a corresponding non-transformed wild type non-human organism, is conferred in the process of the invention, if the activity of a polypeptide showing the activity of a 3-deoxy-7-phosphoheptulonate synthase, or if the activity of the polypeptide Ybr249c, preferably represented by SEQ ID NO. 88880, or a homolog or fragment thereof, or if the activity of a polypeptide encoded by a nucleic acid molecule comprising the nucleic acid SEQ ID NO. 88879, preferably the coding region thereof, or a homolog or fragment thereof, e.g. derived from Saccharomyces cerevisiae, is increased or generated. For example the activity of a nucleic acid molecule or a polypeptide comprising the nucleic acid, preferably the coding region thereof, or polypeptide or the consensus sequence or the polypeptide motif, as depicted in Table I, II or IV, application No. 3, column 5 or 8 in the respective same line as the nucleic acid molecule SEQ ID NO. 88879 or polypeptide SEQ ID NO. 88880, respectively, or a homolog or a fragment thereof, is increased or generated, or if the activity 3-deoxy-7-phosphoheptulonate synthase is increased or generated in a non-human organism, like a microorganism or a plant cell, plant or part thereof, especially with plastidic localization, whereby the respective line discloses in column 7 tyrosine. For example, an increase of the tyrosine of at least 1 percent, particularly in a range of 159 to 2254-percent is conferred as compared to a corresponding non-transformed wild type non-human organism.

[22859] Accordingly, in one embodiment, an increase of 5-oxoproline in a non-human organism, as compared to a corresponding non-transformed wild type non-human organism, is conferred in the process of the invention, if the activity of a polypeptide showing the activity of a phosphate permease, or if the activity of the polypeptide Ybr296c, preferably represented by SEQ ID NO. 89318, or a homolog or fragment thereof, or if the activity of a polypeptide encoded by a nucleic acid molecule comprising the nucleic acid SEQ ID NO. 89317, preferably the coding region thereof, or a homolog or fragment thereof, e.g. derived from Saccharomyces cerevisiae, is increased or generated. For example the activity of a nucleic acid molecule or a polypeptide comprising the nucleic acid, preferably the coding region thereof, or polypeptide or the consensus sequence or the polypeptide motif, as depicted in Table I, II or IV, application No. 3, column 5 or 8 in the respective same line as the nucleic acid molecule SEQ ID NO. 89317 or polypeptide SEQ ID NO. 89318, respectively, or a homolog or a fragment thereof, is increased or generated, or if the activity phosphate permease is increased or generated in a non-human organism, like a microorganism or a plant cell, plant or part thereof, especially with non-targeted localization, whereby the respective line discloses in column 7 5-oxoproline. For example, an increase of the 5-oxoproline of at least 1 percent, particularly in a range of 33 to 51-percent is conferred as compared to a corresponding non-transformed wild type non-human organism.

[22860] Accordingly, in one embodiment, an increase of alanine in a non-human organism, as compared to a corresponding non-transformed wild type non-human organism, is conferred in the process of the invention, if the activity of a polypeptide showing the activity of a serine/threonine dehydratase, or if the activity of the polypeptide Ycl064c, preferably represented by SEQ ID NO. 89396, or a homolog or fragment thereof, or if the activity of a polypeptide encoded by a nucleic acid molecule comprising the nucleic acid SEQ ID NO. 89395, preferably the coding region thereof, or a homolog or fragment thereof, e.g. derived from Saccharomyces cerevisiae, is increased or generated. For example the activity of a nucleic acid molecule or a polypeptide comprising the nucleic acid, preferably the coding region thereof, or polypeptide or the consensus sequence or the polypeptide motif, as depicted in Table I, II or IV, application No. 3, column 5 or 8 in the respective same line as the nucleic acid molecule SEQ ID NO. 89395 or polypeptide SEQ ID NO. 89396, respectively, or a homolog or a fragment thereof, is increased or generated, or if the activity serine/threonine dehydratase is increased or generated in a non-human organism, like a microorganism or a plant cell, plant or part thereof, especially with plastidic localization, whereby the respective line discloses in column 7 alanine. For example, an increase of the alanine of at least 1 percent, particularly in a range of 23 to 51-percent is conferred as compared to a corresponding non-transformed wild type non-human organism.

[22861] Accordingly, in one embodiment, an increase of glycine in a non-human organism, as compared to a corresponding non-transformed wild type non-human organism, is conferred in the process of the invention, if the activity of a polypeptide showing the activity of a serine/threonine dehydratase, or if the activity of the polypeptide Yc1064c, preferably represented by SEQ ID NO. 89396, or a homolog or fragment thereof, or if the activity of a polypeptide encoded by a nucleic acid molecule comprising the nucleic acid SEQ ID NO. 89395, preferably the coding region thereof, or a homolog or fragment thereof, e.g. derived from Saccharomyces cerevisiae, is increased or generated. For example the activity of a nucleic acid molecule or a polypeptide comprising the nucleic acid, preferably the coding region thereof, or polypeptide or the consensus sequence or the polypeptide motif, as depicted in Table I, II or IV, application No. 3, column 5 or 8 in the respective same line as the nucleic acid molecule SEQ ID NO. 89395 or polypeptide SEQ ID NO. 89396, respectively, or a homolog or a fragment thereof, is increased or generated, or if the activity serine/threonine dehydratase is increased or generated in a non-human organism, like a microorganism or a plant cell, plant or part thereof, especially with plastidic localization, whereby the respective line discloses in column 7 glycine. For example, an increase of the glycine of at least 1 percent, particularly in a range of 36 to 106-percent is conferred as compared to a corresponding non-transformed wild type non-human organism.

[22862] Accordingly, in one embodiment, an increase of aspartate in a non-human organism, as compared to a corresponding non-transformed wild type non-human organism, is conferred in the process of the invention, if the activity of a polypeptide showing the activity of a protein kinase, or if the activity of the polypeptide Ydl159w, preferably represented by SEQ ID NO. 14276, or a homolog or fragment thereof, or if the activity of a polypeptide encoded by a nucleic acid molecule comprising the nucleic acid SEQ ID NO. 14275, preferably the coding region thereof, or a homolog or fragment thereof, e.g. derived from Saccharomyces cerevisiae, is increased or generated. For example the activity of a nucleic acid molecule or a polypeptide comprising the nucleic acid, preferably the coding region thereof, or polypeptide or the consensus sequence or the polypeptide motif, as depicted in Table I, II or IV, application No. 3, column 5 or 8 in the respective same line as the nucleic acid molecule SEQ ID NO. 14275 or polypeptide SEQ ID NO. 14276, respectively, or a homolog or a fragment thereof, is increased or generated, or if the activity protein kinase is increased or generated in a non-human organism, like a microorganism or a plant cell, plant or part thereof, especially with plastidic localization, whereby the respective line discloses in column 7 aspartate. For example, an increase of the aspartate of at least 1 percent, particularly in a range of 70 to 87-percent is conferred as compared to a corresponding non-transformed wild type non-human organism.

[22863] Accordingly, in one embodiment, an increase of homoserine in a non-human organism, as compared to a corresponding non-transformed wild type non-human organism, is conferred in the process of the invention, if the activity of a polypeptide showing the activity of a Serine/threonine-protein phosphatase, or if the activity of the polypeptide Ydl188c, preferably represented by SEQ ID NO. 89484, or a homolog or fragment thereof, or if the activity of a polypeptide encoded by a nucleic acid molecule comprising the nucleic acid SEQ ID NO. 89483, preferably the coding region thereof, or a homolog or fragment thereof, e.g. derived from Saccharomyces cerevisiae, is increased or generated. For example the activity of a nucleic acid molecule or a polypeptide comprising the nucleic acid, preferably the coding region thereof, or polypeptide or the consensus sequence or the polypeptide motif, as depicted in Table I, II or IV, application No. 3, column 5 or 8 in the respective same line as the nucleic acid molecule SEQ ID NO. 89483 or polypeptide SEQ ID NO. 89484, respectively, or a homolog or a fragment thereof, is increased or generated, or if the activity Serine/threonine-protein phosphatase is increased or generated in a non-human organism, like a microorganism or a plant cell, plant or part thereof, especially with plastidic localization, whereby the respective line discloses in column 7 homoserine. For example, an increase of the homoserine of at least 1 percent, particularly in a range of 36 to 75-percent is conferred as compared to a corresponding non-transformed wild type non-human organism.

[22864] Accordingly, in one embodiment, an increase of phenylalanine in a non-human organism, as compared to a corresponding non-transformed wild type non-human organism, is conferred in the process of the invention, if the activity of a polypeptide showing the activity of a Serine/threonine-protein phosphatase, or if the activity of the polypeptide Ydl188c, preferably represented by SEQ ID NO. 89484, or a homolog or fragment thereof, or if the activity of a polypeptide encoded by a nucleic acid molecule comprising the nucleic acid SEQ ID NO. 89483, preferably the coding region thereof, or a homolog or fragment thereof, e.g. derived from Saccharomyces cerevisiae, is increased or generated. For example the activity of a nucleic acid molecule or a polypeptide comprising the nucleic acid, preferably the coding region thereof, or polypeptide or the consensus sequence or the polypeptide motif, as depicted in Table I, II or IV, application No. 3, column 5 or 8 in the respective same line as the nucleic acid molecule SEQ ID NO. 89483 or polypeptide SEQ ID NO. 89484, respectively, or a homolog or a fragment thereof, is increased or generated, or if the activity Serine/threonine-protein phosphatase is increased or generated in a non-human organism, like a microorganism or a plant cell, plant or part thereof, especially with plastidic localization, whereby the respective line discloses in column 7 phenylalanine. For example, an increase of the phenylalanine of at least 1 percent, particularly in a range of 28 to 41-percent is conferred as compared to a corresponding non-transformed wild type non-human organism.

[22865] Accordingly, in one embodiment, an increase of 5-oxoproline in a non-human organism, as compared to a corresponding non-transformed wild type non-human organism, is conferred in the process of the invention, if the activity of a polypeptide showing the activity of a Pre-mRNA-splicing factor, or if the activity of the polypeptide Ydl209c, preferably represented by SEQ ID NO. 89937, or a homolog or fragment thereof, or if the activity of a polypeptide encoded by a nucleic acid molecule comprising the nucleic acid SEQ ID NO. 89936, preferably the coding region thereof, or a homolog or fragment thereof, e.g. derived from Saccharomyces cerevisiae, is increased or generated. For example the activity of a nucleic acid molecule or a polypeptide comprising the nucleic acid, preferably the coding region thereof, or polypeptide or the consensus sequence or the polypeptide motif, as depicted in Table I, II or IV, application No. 3, column 5 or 8 in the respective same line as the nucleic acid molecule SEQ ID NO. 89936 or polypeptide SEQ ID NO. 89937, respectively, or a homolog or a fragment thereof, is increased or generated, or if the activity Pre-mRNA-splicing factor is increased or generated in a non-human organism, like a microorganism or a plant cell, plant or part thereof, especially with plastidic localization, whereby the respective line discloses in column 7 5-oxoproline. For example, an increase of the 5-oxoproline of at least 1 percent, particularly in a range of 46 to 97-percent is conferred as compared to a corresponding non-transformed wild type non-human organism.

[22866] Accordingly, in one embodiment, an increase of phenylalanine in a non-human organism, as compared to a corresponding non-transformed wild type non-human organism, is conferred in the process of the invention, if the activity of a polypeptide showing the activity of a N-(5′-phosphoribosyl)anthranilate isomerase, or if the activity of the polypeptide Ydr007w, preferably represented by SEQ ID NO. 89974, or a homolog or fragment thereof, or if the activity of a polypeptide encoded by a nucleic acid molecule comprising the nucleic acid SEQ ID NO. 89973, preferably the coding region thereof, or a homolog or fragment thereof, e.g. derived from Saccharomyces cerevisiae, is increased or generated. For example the activity of a nucleic acid molecule or a polypeptide comprising the nucleic acid, preferably the coding region thereof, or polypeptide or the consensus sequence or the polypeptide motif, as depicted in Table I, II or IV, application No. 3, column 5 or 8 in the respective same line as the nucleic acid molecule SEQ ID NO. 89973 or polypeptide SEQ ID NO. 89974, respectively, or a homolog or a fragment thereof, is increased or generated, or if the activity N-(5′-phosphoribosyl)anthranilate isomerase is increased or generated in a non-human organism, like a microorganism or a plant cell, plant or part thereof, especially with plastidic localization, whereby the respective line discloses in column 7 phenylalanine. For example, an increase of the phenylalanine of at least 1 percent, particularly in a range of 31 to 50-percent is conferred as compared to a corresponding non-transformed wild type non-human organism.

[22867] Accordingly, in one embodiment, an increase of tyrosine in a non-human organism, as compared to a corresponding non-transformed wild type non-human organism, is conferred in the process of the invention, if the activity of a polypeptide showing the activity of a branched-chain amino acid permease, or if the activity of the polypeptide Ydr046c, preferably represented by SEQ ID NO. 63545, or a homolog or fragment thereof, or if the activity of a polypeptide encoded by a nucleic acid molecule comprising the nucleic acid SEQ ID NO. 63544, preferably the coding region thereof, or a homolog or fragment thereof, e.g. derived from Saccharomyces cerevisiae, is increased or generated. For example the activity of a nucleic acid molecule or a polypeptide comprising the nucleic acid, preferably the coding region thereof, or polypeptide or the consensus sequence or the polypeptide motif, as depicted in Table I, II or IV, application No. 3, column 5 or 8 in the respective same line as the nucleic acid molecule SEQ ID NO. 63544 or polypeptide SEQ ID NO. 63545, respectively, or a homolog or a fragment thereof, is increased or generated, or if the activity branched-chain amino acid permease is increased or generated in a non-human organism, like a microorganism or a plant cell, plant or part thereof, especially with plastidic localization, whereby the respective line discloses in column 7 tyrosine. For example, an increase of the tyrosine of at least 1 percent, particularly in a range of 39 to 95-percent is conferred as compared to a corresponding non-transformed wild type non-human organism.

[22868] Accordingly, in one embodiment, an increase of serine in a non-human organism, as compared to a corresponding non-transformed wild type non-human organism, is conferred in the process of the invention, if the activity of a polypeptide showing the activity of a ydr183w-protein, or if the activity of the polypeptide Ydr183w, preferably represented by SEQ ID NO. 90104, or a homolog or fragment thereof, or if the activity of a polypeptide encoded by a nucleic acid molecule comprising the nucleic acid SEQ ID NO. 90103, preferably the coding region thereof, or a homolog or fragment thereof, e.g. derived from Saccharomyces cerevisiae, is increased or generated. For example the activity of a nucleic acid molecule or a polypeptide comprising the nucleic acid, preferably the coding region thereof, or polypeptide or the consensus sequence or the polypeptide motif, as depicted in Table I, II or IV, application No. 3, column 5 or 8 in the respective same line as the nucleic acid molecule SEQ ID NO. 90103 or polypeptide SEQ ID NO. 90104, respectively, or a homolog or a fragment thereof, is increased or generated, or if the activity ydr183w-protein is increased or generated in a non-human organism, like a microorganism or a plant cell, plant or part thereof, especially with plastidic localization, whereby the respective line discloses in column 7 serine. For example, an increase of the serine of at least 1 percent, particularly in a range of 25 to 80-percent is conferred as compared to a corresponding non-transformed wild type non-human organism.

[22869] Accordingly, in one embodiment, an increase of aspartate in a non-human organism, as compared to a corresponding non-transformed wild type non-human organism, is conferred in the process of the invention, if the activity of a polypeptide showing the activity of a ydr273w-protein, or if the activity of the polypeptide Ydr273w, preferably represented by SEQ ID NO. 90160, or a homolog or fragment thereof, or if the activity of a polypeptide encoded by a nucleic acid molecule comprising the nucleic acid SEQ ID NO. 90159, preferably the coding region thereof, or a homolog or fragment thereof, e.g. derived from Saccharomyces cerevisiae, is increased or generated. For example the activity of a nucleic acid molecule or a polypeptide comprising the nucleic acid, preferably the coding region thereof, or polypeptide or the consensus sequence or the polypeptide motif, as depicted in Table I, II or IV, application No. 3, column 5 or 8 in the respective same line as the nucleic acid molecule SEQ ID NO. 90159 or polypeptide SEQ ID NO. 90160, respectively, or a homolog or a fragment thereof, is increased or generated, or if the activity ydr273w-protein is increased or generated in a non-human organism, like a microorganism or a plant cell, plant or part thereof, especially with plastidic localization, whereby the respective line discloses in column 7 aspartate. For example, an increase of the aspartate of at least 1 percent, particularly in a range of 23 to 52-percent is conferred as compared to a corresponding non-transformed wild type non-human organism.

[22870] Accordingly, in one embodiment, an increase of citrulline in a non-human organism, as compared to a corresponding non-transformed wild type non-human organism, is conferred in the process of the invention, if the activity of a polypeptide showing the activity of a ydr273w-protein, or if the activity of the polypeptide Ydr273w, preferably represented by SEQ ID NO. 90160, or a homolog or fragment thereof, or if the activity of a polypeptide encoded by a nucleic acid molecule comprising the nucleic acid SEQ ID NO. 90159, preferably the coding region thereof, or a homolog or fragment thereof, e.g. derived from Saccharomyces cerevisiae, is increased or generated. For example the activity of a nucleic acid molecule or a polypeptide comprising the nucleic acid, preferably the coding region thereof, or polypeptide or the consensus sequence or the polypeptide motif, as depicted in Table I, II or IV, application No. 3, column 5 or 8 in the respective same line as the nucleic acid molecule SEQ ID NO. 90159 or polypeptide SEQ ID NO. 90160, respectively, or a homolog or a fragment thereof, is increased or generated, or if the activity ydr273w-protein is increased or generated in a non-human organism, like a microorganism or a plant cell, plant or part thereof, especially with plastidic localization, whereby the respective line discloses in column 7 citrulline. For example, an increase of the citrulline of at least 1 percent, particularly in a range of 34 to 36-percent is conferred as compared to a corresponding non-transformed wild type non-human organism.

[22871] Accordingly, in one embodiment, an increase of aspartate in a non-human organism, as compared to a corresponding non-transformed wild type non-human organism, is conferred in the process of the invention, if the activity of a polypeptide showing the activity of a ydr507c-protein, or if the activity of the polypeptide Ydr507c, preferably represented by SEQ ID NO. 90166, or a homolog or fragment thereof, or if the activity of a polypeptide encoded by a nucleic acid molecule comprising the nucleic acid SEQ ID NO. 90165, preferably the coding region thereof, or a homolog or fragment thereof, e.g. derived from Saccharomyces cerevisiae, is increased or generated. For example the activity of a nucleic acid molecule or a polypeptide comprising the nucleic acid, preferably the coding region thereof, or polypeptide or the consensus sequence or the polypeptide motif, as depicted in Table I, II or IV, application No. 3, column 5 or 8 in the respective same line as the nucleic acid molecule SEQ ID NO. 90165 or polypeptide SEQ ID NO. 90166, respectively, or a homolog or a fragment thereof, is increased or generated, or if the activity ydr507c-protein is increased or generated in a non-human organism, like a microorganism or a plant cell, plant or part thereof, especially with non-targeted localization, whereby the respective line discloses in column 7 aspartate. For example, an increase of the aspartate of at least 1 percent, particularly in a range of 64 to 78-percent is conferred as compared to a corresponding non-transformed wild type non-human organism.

[22872] Accordingly, in one embodiment, an increase of asparagine in a non-human organism, as compared to a corresponding non-transformed wild type non-human organism, is conferred in the process of the invention, if the activity of a polypeptide showing the activity of a yer014w-protein, or if the activity of the polypeptide Yer014w, preferably represented by SEQ ID NO. 63746, or a homolog or fragment thereof, or if the activity of a polypeptide encoded by a nucleic acid molecule comprising the nucleic acid SEQ ID NO. 63745, preferably the coding region thereof, or a homolog or fragment thereof, e.g. derived from Saccharomyces cerevisiae, is increased or generated. For example the activity of a nucleic acid molecule or a polypeptide comprising the nucleic acid, preferably the coding region thereof, or polypeptide or the consensus sequence or the polypeptide motif, as depicted in Table I, II or IV, application No. 3, column 5 or 8 in the respective same line as the nucleic acid molecule SEQ ID NO. 63745 or polypeptide SEQ ID NO. 63746, respectively, or a homolog or a fragment thereof, is increased or generated, or if the activity yer014w-protein is increased or generated in a non-human organism, like a microorganism or a plant cell, plant or part thereof, especially with plastidic localization, whereby the respective line discloses in column 7 asparagine. For example, an increase of the asparagine of at least 1 percent, particularly in a range of 46 to 159-percent is conferred as compared to a corresponding non-transformed wild type non-human organism.

[22873] Accordingly, in one embodiment, an increase of aspartate in a non-human organism, as compared to a corresponding non-transformed wild type non-human organism, is conferred in the process of the invention, if the activity of a polypeptide showing the activity of a yer014w-protein, or if the activity of the polypeptide Yer014w, preferably represented by SEQ ID NO. 63746, or a homolog or fragment thereof, or if the activity of a polypeptide encoded by a nucleic acid molecule comprising the nucleic acid SEQ ID NO. 63745, preferably the coding region thereof, or a homolog or fragment thereof, e.g. derived from Saccharomyces cerevisiae, is increased or generated. For example the activity of a nucleic acid molecule or a polypeptide comprising the nucleic acid, preferably the coding region thereof, or polypeptide or the consensus sequence or the polypeptide motif, as depicted in Table I, II or IV, application No. 3, column 5 or 8 in the respective same line as the nucleic acid molecule SEQ ID NO. 63745 or polypeptide SEQ ID NO. 63746, respectively, or a homolog or a fragment thereof, is increased or generated, or if the activity yer014w-protein is increased or generated in a non-human organism, like a microorganism or a plant cell, plant or part thereof, especially with plastidic localization, whereby the respective line discloses in column 7 aspartate. For example, an increase of the aspartate of at least 1 percent, particularly in a range of 48 to 84-percent is conferred as compared to a corresponding non-transformed wild type non-human organism.

[22874] Accordingly, in one embodiment, an increase of serine in a non-human organism, as compared to a corresponding non-transformed wild type non-human organism, is conferred in the process of the invention, if the activity of a polypeptide showing the activity of a yer014w-protein, or if the activity of the polypeptide Yer014w, preferably represented by SEQ ID NO. 63746, or a homolog or fragment thereof, or if the activity of a polypeptide encoded by a nucleic acid molecule comprising the nucleic acid SEQ ID NO. 63745, preferably the coding region thereof, or a homolog or fragment thereof, e.g. derived from Saccharomyces cerevisiae, is increased or generated. For example the activity of a nucleic acid molecule or a polypeptide comprising the nucleic acid, preferably the coding region thereof, or polypeptide or the consensus sequence or the polypeptide motif, as depicted in Table I, II or IV, application No. 3, column 5 or 8 in the respective same line as the nucleic acid molecule SEQ ID NO. 63745 or polypeptide SEQ ID NO. 63746, respectively, or a homolog or a fragment thereof, is increased or generated, or if the activity yer014w-protein is increased or generated in a non-human organism, like a microorganism or a plant cell, plant or part thereof, especially with plastidic localization, whereby the respective line discloses in column 7 serine. For example, an increase of the serine of at least 1 percent, particularly in a range of 25 to 82-percent is conferred as compared to a corresponding non-transformed wild type non-human organism.

[22875] Accordingly, in one embodiment, an increase of citrulline in a non-human organism, as compared to a corresponding non-transformed wild type non-human organism, is conferred in the process of the invention, if the activity of a polypeptide showing the activity of a yer106w-protein, or if the activity of the polypeptide Yer106w, preferably represented by SEQ ID NO. 63804, or a homolog or fragment thereof, or if the activity of a polypeptide encoded by a nucleic acid molecule comprising the nucleic acid SEQ ID NO. 63803, preferably the coding region thereof, or a homolog or fragment thereof, e.g. derived from Saccharomyces cerevisiae, is increased or generated. For example the activity of a nucleic acid molecule or a polypeptide comprising the nucleic acid, preferably the coding region thereof, or polypeptide or the consensus sequence or the polypeptide motif, as depicted in Table I, II or IV, application No. 3, column 5 or 8 in the respective same line as the nucleic acid molecule SEQ ID NO. 63803 or polypeptide SEQ ID NO. 63804, respectively, or a homolog or a fragment thereof, is increased or generated, or if the activity yer106w-protein is increased or generated in a non-human organism, like a microorganism or a plant cell, plant or part thereof, especially with plastidic localization, whereby the respective line discloses in column 7 citrulline. For example, an increase of the citrulline of at least 1 percent, particularly in a range of 34 to 85-percent is conferred as compared to a corresponding non-transformed wild type non-human organism.

[22876] Accordingly, in one embodiment, an increase of serine in a non-human organism, as compared to a corresponding non-transformed wild type non-human organism, is conferred in the process of the invention, if the activity of a polypeptide showing the activity of a molecular chaperone portein, or if the activity of the polypeptide Yfl016c, preferably represented by SEQ ID NO. 63808, or a homolog or fragment thereof, or if the activity of a polypeptide encoded by a nucleic acid molecule comprising the nucleic acid SEQ ID NO. 63807, preferably the coding region thereof, or a homolog or fragment thereof, e.g. derived from Saccharomyces cerevisiae, is increased or generated. For example the activity of a nucleic acid molecule or a polypeptide comprising the nucleic acid, preferably the coding region thereof, or polypeptide or the consensus sequence or the polypeptide motif, as depicted in Table I, II or IV, application No. 3, column 5 or 8 in the respective same line as the nucleic acid molecule SEQ ID NO. 63807 or polypeptide SEQ ID NO. 63808, respectively, or a homolog or a fragment thereof, is increased or generated, or if the activity molecular chaperone portein is increased or generated in a non-human organism, like a microorganism or a plant cell, plant or part thereof, especially with non-targeted localization, whereby the respective line discloses in column 7 serine. For example, an increase of the serine of at least 1 percent, particularly in a range of 23 to 57-percent is conferred as compared to a corresponding non-transformed wild type non-human organism.

[22877] Accordingly, in one embodiment, an increase of tyrosine in a non-human organism, as compared to a corresponding non-transformed wild type non-human organism, is conferred in the process of the invention, if the activity of a polypeptide showing the activity of a molecular chaperone portein, or if the activity of the polypeptide Yfl016c, preferably represented by SEQ ID NO. 63808, or a homolog or fragment thereof, or if the activity of a polypeptide encoded by a nucleic acid molecule comprising the nucleic acid SEQ ID NO. 63807, preferably the coding region thereof, or a homolog or fragment thereof, e.g. derived from Saccharomyces cerevisiae, is increased or generated. For example the activity of a nucleic acid molecule or a polypeptide comprising the nucleic acid, preferably the coding region thereof, or polypeptide or the consensus sequence or the polypeptide motif, as depicted in Table I, II or IV, application No. 3, column 5 or 8 in the respective same line as the nucleic acid molecule SEQ ID NO. 63807 or polypeptide SEQ ID NO. 63808, respectively, or a homolog or a fragment thereof, is increased or generated, or if the activity molecular chaperone portein is increased or generated in a non-human organism, like a microorganism or a plant cell, plant or part thereof, especially with non-targeted localization, whereby the respective line discloses in column 7 tyrosine. For example, an increase of the tyrosine of at least 1 percent, particularly in a range of 44 to 182-percent is conferred as compared to a corresponding non-transformed wild type non-human organism.

[22878] Accordingly, in one embodiment, an increase of aspartate in a non-human organism, as compared to a corresponding non-transformed wild type non-human organism, is conferred in the process of the invention, if the activity of a polypeptide showing the activity of a YFL019C-protein, or if the activity of the polypeptide Yfl019c, preferably represented by SEQ ID NO. 64145, or a homolog or fragment thereof, or if the activity of a polypeptide encoded by a nucleic acid molecule comprising the nucleic acid SEQ ID NO. 64144, preferably the coding region thereof, or a homolog or fragment thereof, e.g. derived from Saccharomyces cerevisiae, is increased or generated. For example the activity of a nucleic acid molecule or a polypeptide comprising the nucleic acid, preferably the coding region thereof, or polypeptide or the consensus sequence or the polypeptide motif, as depicted in Table I, II or IV, application No. 3, column 5 or 8 in the respective same line as the nucleic acid molecule SEQ ID NO. 64144 or polypeptide SEQ ID NO. 64145, respectively, or a homolog or a fragment thereof, is increased or generated, or if the activity YFL019C-protein is increased or generated in a non-human organism, like a microorganism or a plant cell, plant or part thereof, especially with non-targeted localization, whereby the respective line discloses in column 7 aspartate. For example, an increase of the aspartate of at least 1 percent, particularly in a range of 103 to 305-percent is conferred as compared to a corresponding non-transformed wild type non-human organism.

[22879] Accordingly, in one embodiment, an increase of phenylalanine in a non-human organism, as compared to a corresponding non-transformed wild type non-human organism, is conferred in the process of the invention, if the activity of a polypeptide showing the activity of a YFL019C-protein, or if the activity of the polypeptide Yfl019c, preferably represented by SEQ ID NO. 64145, or a homolog or fragment thereof, or if the activity of a polypeptide encoded by a nucleic acid molecule comprising the nucleic acid SEQ ID NO. 64144, preferably the coding region thereof, or a homolog or fragment thereof, e.g. derived from Saccharomyces cerevisiae, is increased or generated. For example the activity of a nucleic acid molecule or a polypeptide comprising the nucleic acid, preferably the coding region thereof, or polypeptide or the consensus sequence or the polypeptide motif, as depicted in Table I, II or IV, application No. 3, column 5 or 8 in the respective same line as the nucleic acid molecule SEQ ID NO. 64144 or polypeptide SEQ ID NO. 64145, respectively, or a homolog or a fragment thereof, is increased or generated, or if the activity YFL019C-protein is increased or generated in a non-human organism, like a microorganism or a plant cell, plant or part thereof, especially with non-targeted localization, whereby the respective line discloses in column 7 phenylalanine. For example, an increase of the phenylalanine of at least 1 percent, particularly in a range of 34 to 185-percent is conferred as compared to a corresponding non-transformed wild type non-human organism.

[22880] Accordingly, in one embodiment, an increase of alanine in a non-human organism, as compared to a corresponding non-transformed wild type non-human organism, is conferred in the process of the invention, if the activity of a polypeptide showing the activity of a aminotransferase, or if the activity of the polypeptide Yfl030w, preferably represented by SEQ ID NO. 90190, or a homolog or fragment thereof, or if the activity of a polypeptide encoded by a nucleic acid molecule comprising the nucleic acid SEQ ID NO. 90189, preferably the coding region thereof, or a homolog or fragment thereof, e.g. derived from Saccharomyces cerevisiae, is increased or generated. For example the activity of a nucleic acid molecule or a polypeptide comprising the nucleic acid, preferably the coding region thereof, or polypeptide or the consensus sequence or the polypeptide motif, as depicted in Table I, II or IV, application No. 3, column 5 or 8 in the respective same line as the nucleic acid molecule SEQ ID NO. 90189 or polypeptide SEQ ID NO. 90190, respectively, or a homolog or a fragment thereof, is increased or generated, or if the activity aminotransferase is increased or generated in a non-human organism, like a microorganism or a plant cell, plant or part thereof, especially with plastidic localization, whereby the respective line discloses in column 7 alanine. For example, an increase of the alanine of at least 1 percent, particularly in a range of 29 to 33-percent is conferred as compared to a corresponding non-transformed wild type non-human organism.

[22881] Accordingly, in one embodiment, an increase of glycine in a non-human organism, as compared to a corresponding non-transformed wild type non-human organism, is conferred in the process of the invention, if the activity of a polypeptide showing the activity of a aminotransferase, or if the activity of the polypeptide Yfl030w, preferably represented by SEQ ID NO. 90190, or a homolog or fragment thereof, or if the activity of a polypeptide encoded by a nucleic acid molecule comprising the nucleic acid SEQ ID NO. 90189, preferably the coding region thereof, or a homolog or fragment thereof, e.g. derived from Saccharomyces cerevisiae, is increased or generated. For example the activity of a nucleic acid molecule or a polypeptide comprising the nucleic acid, preferably the coding region thereof, or polypeptide or the consensus sequence or the polypeptide motif, as depicted in Table I, II or IV, application No. 3, column 5 or 8 in the respective same line as the nucleic acid molecule SEQ ID NO. 90189 or polypeptide SEQ ID NO. 90190, respectively, or a homolog or a fragment thereof, is increased or generated, or if the activity aminotransferase is increased or generated in a non-human organism, like a microorganism or a plant cell, plant or part thereof, especially with plastidic localization, whereby the respective line discloses in column 7 glycine. For example, an increase of the glycine of at least 1 percent, particularly in a range of 34 to 99-percent is conferred as compared to a corresponding non-transformed wild type non-human organism.

[22882] Accordingly, in one embodiment, an increase of phenylalanine in a non-human organism, as compared to a corresponding non-transformed wild type non-human organism, is conferred in the process of the invention, if the activity of a polypeptide showing the activity of a yfl054c-protein, or if the activity of the polypeptide Yfl054c, preferably represented by SEQ ID NO. 64149, or a homolog or fragment thereof, or if the activity of a polypeptide encoded by a nucleic acid molecule comprising the nucleic acid SEQ ID NO. 64148, preferably the coding region thereof, or a homolog or fragment thereof, e.g. derived from Saccharomyces cerevisiae, is increased or generated. For example the activity of a nucleic acid molecule or a polypeptide comprising the nucleic acid, preferably the coding region thereof, or polypeptide or the consensus sequence or the polypeptide motif, as depicted in Table I, II or IV, application No. 3, column 5 or 8 in the respective same line as the nucleic acid molecule SEQ ID NO. 64148 or polypeptide SEQ ID NO. 64149, respectively, or a homolog or a fragment thereof, is increased or generated, or if the activity yfl054c-protein is increased or generated in a non-human organism, like a microorganism or a plant cell, plant or part thereof, especially with plastidic localization, whereby the respective line discloses in column 7 phenylalanine. For example, an increase of the phenylalanine of at least 1 percent, particularly in a range of 36 to 39-percent is conferred as compared to a corresponding non-transformed wild type non-human organism.

[22883] Accordingly, in one embodiment, an increase of serine in a non-human organism, as compared to a corresponding non-transformed wild type non-human organism, is conferred in the process of the invention, if the activity of a polypeptide showing the activity of a yfl054c-protein, or if the activity of the polypeptide Yfl054c, preferably represented by SEQ ID NO. 64149, or a homolog or fragment thereof, or if the activity of a polypeptide encoded by a nucleic acid molecule comprising the nucleic acid SEQ ID NO. 64148, preferably the coding region thereof, or a homolog or fragment thereof, e.g. derived from Saccharomyces cerevisiae, is increased or generated. For example the activity of a nucleic acid molecule or a polypeptide comprising the nucleic acid, preferably the coding region thereof, or polypeptide or the consensus sequence or the polypeptide motif, as depicted in Table I, II or IV, application No. 3, column 5 or 8 in the respective same line as the nucleic acid molecule SEQ ID NO. 64148 or polypeptide SEQ ID NO. 64149, respectively, or a homolog or a fragment thereof, is increased or generated, or if the activity yfl054c-protein is increased or generated in a non-human organism, like a microorganism or a plant cell, plant or part thereof, especially with plastidic localization, whereby the respective line discloses in column 7 serine. For example, an increase of the serine of at least 1 percent, particularly in a range of 23 to 51-percent is conferred as compared to a corresponding non-transformed wild type non-human organism.

[22884] Accordingly, in one embodiment, an increase of 5-oxoproline in a non-human organism, as compared to a corresponding non-transformed wild type non-human organism, is conferred in the process of the invention, if the activity of a polypeptide showing the activity of a ygl096w-protein, or if the activity of the polypeptide Ygl096w, preferably represented by SEQ ID NO. 90279, or a homolog or fragment thereof, or if the activity of a polypeptide encoded by a nucleic acid molecule comprising the nucleic acid SEQ ID NO. 90278, preferably the coding region thereof, or a homolog or fragment thereof, e.g. derived from Saccharomyces cerevisiae, is increased or generated. For example the activity of a nucleic acid molecule or a polypeptide comprising the nucleic acid, preferably the coding region thereof, or polypeptide or the consensus sequence or the polypeptide motif, as depicted in Table I, II or IV, application No. 3, column 5 or 8 in the respective same line as the nucleic acid molecule SEQ ID NO. 90278 or polypeptide SEQ ID NO. 90279, respectively, or a homolog or a fragment thereof, is increased or generated, or if the activity ygl096w-protein is increased or generated in a non-human organism, like a microorganism or a plant cell, plant or part thereof, especially with plastidic localization, whereby the respective line discloses in column 7 5-oxoproline. For example, an increase of the 5-oxoproline of at least 1 percent, particularly in a range of 34 to 133-percent is conferred as compared to a corresponding non-transformed wild type non-human organism.

[22885] Accordingly, in one embodiment, an increase of tyrosine in a non-human organism, as compared to a corresponding non-transformed wild type non-human organism, is conferred in the process of the invention, if the activity of a polypeptide showing the activity of a ygl237c-protein, or if the activity of the polypeptide Ygl237c, preferably represented by SEQ ID NO. 64178, or a homolog or fragment thereof, or if the activity of a polypeptide encoded by a nucleic acid molecule comprising the nucleic acid SEQ ID NO. 64177, preferably the coding region thereof, or a homolog or fragment thereof, e.g. derived from Saccharomyces cerevisiae, is increased or generated. For example the activity of a nucleic acid molecule or a polypeptide comprising the nucleic acid, preferably the coding region thereof, or polypeptide or the consensus sequence or the polypeptide motif, as depicted in Table I, II or IV, application No. 3, column 5 or 8 in the respective same line as the nucleic acid molecule SEQ ID NO. 64177 or polypeptide SEQ ID NO. 64178, respectively, or a homolog or a fragment thereof, is increased or generated, or if the activity ygl237c-protein is increased or generated in a non-human organism, like a microorganism or a plant cell, plant or part thereof, especially with non-targeted localization, whereby the respective line discloses in column 7 tyrosine. For example, an increase of the tyrosine of at least 1 percent, particularly in a range of 45 to 166-percent is conferred as compared to a corresponding non-transformed wild type non-human organism.

[22886] Accordingly, in one embodiment, an increase of aspartate in a non-human organism, as compared to a corresponding non-transformed wild type non-human organism, is conferred in the process of the invention, if the activity of a polypeptide showing the activity of a ygr221c-protein, or if the activity of the polypeptide Ygr221c, preferably represented by SEQ ID NO. 64316, or a homolog or fragment thereof, or if the activity of a polypeptide encoded by a nucleic acid molecule comprising the nucleic acid SEQ ID NO. 64315, preferably the coding region thereof, or a homolog or fragment thereof, e.g. derived from Saccharomyces cerevisiae, is increased or generated. For example the activity of a nucleic acid molecule or a polypeptide comprising the nucleic acid, preferably the coding region thereof, or polypeptide or the consensus sequence or the polypeptide motif, as depicted in Table I, II or IV, application No. 3, column 5 or 8 in the respective same line as the nucleic acid molecule SEQ ID NO. 64315 or polypeptide SEQ ID NO. 64316, respectively, or a homolog or a fragment thereof, is increased or generated, or if the activity ygr221c-protein is increased or generated in a non-human organism, like a microorganism or a plant cell, plant or part thereof, especially with plastidic localization, whereby the respective line discloses in column 7 aspartate. For example, an increase of the aspartate of at least 1 percent, particularly in a range of 50 to 98-percent is conferred as compared to a corresponding non-transformed wild type non-human organism.

[22887] Accordingly, in one embodiment, an increase of 5-oxoproline in a non-human organism, as compared to a corresponding non-transformed wild type non-human organism, is conferred in the process of the invention, if the activity of a polypeptide showing the activity of a ygr221c-protein, or if the activity of the polypeptide Ygr221c, preferably represented by SEQ ID NO. 64316, or a homolog or fragment thereof, or if the activity of a polypeptide encoded by a nucleic acid molecule comprising the nucleic acid SEQ ID NO. 64315, preferably the coding region thereof, or a homolog or fragment thereof, e.g. derived from Saccharomyces cerevisiae, is increased or generated. For example the activity of a nucleic acid molecule or a polypeptide comprising the nucleic acid, preferably the coding region thereof, or polypeptide or the consensus sequence or the polypeptide motif, as depicted in Table I, II or IV, application No. 3, column 5 or 8 in the respective same line as the nucleic acid molecule SEQ ID NO. 64315 or polypeptide SEQ ID NO. 64316, respectively, or a homolog or a fragment thereof, is increased or generated, or if the activity ygr221c-protein is increased or generated in a non-human organism, like a microorganism or a plant cell, plant or part thereof, especially with plastidic localization, whereby the respective line discloses in column 7 5-oxoproline. For example, an increase of the 5-oxoproline of at least 1 percent, particularly in a range of 40 to 44-percent is conferred as compared to a corresponding non-transformed wild type non-human organism.

[22888] Accordingly, in one embodiment, an increase of phenylalanine in a non-human organism, as compared to a corresponding non-transformed wild type non-human organism, is conferred in the process of the invention, if the activity of a polypeptide showing the activity of a yhl013c-protein, or if the activity of the polypeptide YhI013c, preferably represented by SEQ ID NO. 14716, or a homolog or fragment thereof, or if the activity of a polypeptide encoded by a nucleic acid molecule comprising the nucleic acid SEQ ID NO. 14715, preferably the coding region thereof, or a homolog or fragment thereof, e.g. derived from Saccharomyces cerevisiae, is increased or generated. For example the activity of a nucleic acid molecule or a polypeptide comprising the nucleic acid, preferably the coding region thereof, or polypeptide or the consensus sequence or the polypeptide motif, as depicted in Table I, II or IV, application No. 3, column 5 or 8 in the respective same line as the nucleic acid molecule SEQ ID NO. 14715 or polypeptide SEQ ID NO. 14716, respectively, or a homolog or a fragment thereof, is increased or generated, or if the activity yhl013c-protein is increased or generated in a non-human organism, like a microorganism or a plant cell, plant or part thereof, especially with plastidic localization, whereby the respective line discloses in column 7 phenylalanine. For example, an increase of the phenylalanine of at least 1 percent, particularly in a range of 35 to 410-percent is conferred as compared to a corresponding non-transformed wild type non-human organism.

[22889] Accordingly, in one embodiment, an increase of phenylalanine in a non-human organism, as compared to a corresponding non-transformed wild type non-human organism, is conferred in the process of the invention, if the activity of a polypeptide showing the activity of a yhr006w-protein, or if the activity of the polypeptide Yhr006w, preferably represented by SEQ ID NO. 90285, or a homolog or fragment thereof, or if the activity of a polypeptide encoded by a nucleic acid molecule comprising the nucleic acid SEQ ID NO. 90284, preferably the coding region thereof, or a homolog or fragment thereof, e.g. derived from Saccharomyces cerevisiae, is increased or generated. For example the activity of a nucleic acid molecule or a polypeptide comprising the nucleic acid, preferably the coding region thereof, or polypeptide or the consensus sequence or the polypeptide motif, as depicted in Table I, II or IV, application No. 3, column 5 or 8 in the respective same line as the nucleic acid molecule SEQ ID NO. 90284 or polypeptide SEQ ID NO. 90285, respectively, or a homolog or a fragment thereof, is increased or generated, or if the activity yhr006w-protein is increased or generated in a non-human organism, like a microorganism or a plant cell, plant or part thereof, especially with non-targeted localization, whereby the respective line discloses in column 7 phenylalanine. For example, an increase of the phenylalanine of at least 1 percent, particularly in a range of 32 to 67-percent is conferred as compared to a corresponding non-transformed wild type non-human organism.

[22890] Accordingly, in one embodiment, an increase of tyrosine in a non-human organism, as compared to a corresponding non-transformed wild type non-human organism, is conferred in the process of the invention, if the activity of a polypeptide showing the activity of a yhr006w-protein, or if the activity of the polypeptide Yhr006w, preferably represented by SEQ ID NO. 90285, or a homolog or fragment thereof, or if the activity of a polypeptide encoded by a nucleic acid molecule comprising the nucleic acid SEQ ID NO. 90284, preferably the coding region thereof, or a homolog or fragment thereof, e.g. derived from Saccharomyces cerevisiae, is increased or generated. For example the activity of a nucleic acid molecule or a polypeptide comprising the nucleic acid, preferably the coding region thereof, or polypeptide or the consensus sequence or the polypeptide motif, as depicted in Table I, II or IV, application No. 3, column 5 or 8 in the respective same line as the nucleic acid molecule SEQ ID NO. 90284 or polypeptide SEQ ID NO. 90285, respectively, or a homolog or a fragment thereof, is increased or generated, or if the activity yhr006w-protein is increased or generated in a non-human organism, like a microorganism or a plant cell, plant or part thereof, especially with non-targeted localization, whereby the respective line discloses in column 7 tyrosine. For example, an increase of the tyrosine of at least 1 percent, particularly in a range of 39 to 129-percent is conferred as compared to a corresponding non-transformed wild type non-human organism.

[22891] Accordingly, in one embodiment, an increase of aspartate in a non-human organism, as compared to a corresponding non-transformed wild type non-human organism, is conferred in the process of the invention, if the activity of a polypeptide showing the activity of a yhr207c-protein, or if the activity of the polypeptide Yhr207c, preferably represented by SEQ ID NO. 64547, or a homolog or fragment thereof, or if the activity of a polypeptide encoded by a nucleic acid molecule comprising the nucleic acid SEQ ID NO. 64546, preferably the coding region thereof, or a homolog or fragment thereof, e.g. derived from Saccharomyces cerevisiae, is increased or generated. For example the activity of a nucleic acid molecule or a polypeptide comprising the nucleic acid, preferably the coding region thereof, or polypeptide or the consensus sequence or the polypeptide motif, as depicted in Table I, II or IV, application No. 3, column 5 or 8 in the respective same line as the nucleic acid molecule SEQ ID NO. 64546 or polypeptide SEQ ID NO. 64547, respectively, or a homolog or a fragment thereof, is increased or generated, or if the activity yhr207c-protein is increased or generated in a non-human organism, like a microorganism or a plant cell, plant or part thereof, especially with plastidic localization, whereby the respective line discloses in column 7 aspartate. For example, an increase of the aspartate of at least 1 percent, particularly in a range of 52 to 81-percent is conferred as compared to a corresponding non-transformed wild type non-human organism.

[22892] Accordingly, in one embodiment, an increase of citrulline in a non-human organism, as compared to a corresponding non-transformed wild type non-human organism, is conferred in the process of the invention, if the activity of a polypeptide showing the activity of a 3-phosphoglycerate dehydrogenase, or if the activity of the polypeptide Yil074c, preferably represented by SEQ ID NO. 64564, or a homolog or fragment thereof, or if the activity of a polypeptide encoded by a nucleic acid molecule comprising the nucleic acid SEQ ID NO. 64563, preferably the coding region thereof, or a homolog or fragment thereof, e.g. derived from Saccharomyces cerevisiae, is increased or generated. For example the activity of a nucleic acid molecule or a polypeptide comprising the nucleic acid, preferably the coding region thereof, or polypeptide or the consensus sequence or the polypeptide motif, as depicted in Table I, II or IV, application No. 3, column 5 or 8 in the respective same line as the nucleic acid molecule SEQ ID NO. 64563 or polypeptide SEQ ID NO. 64564, respectively, or a homolog or a fragment thereof, is increased or generated, or if the activity 3-phosphoglycerate dehydrogenase is increased or generated in a non-human organism, like a microorganism or a plant cell, plant or part thereof, especially with plastidic localization, whereby the respective line discloses in column 7 citrulline. For example, an increase of the citrulline of at least 1 percent, particularly in a range of 37 to 81-percent is conferred as compared to a corresponding non-transformed wild type non-human organism.

[22893] Accordingly, in one embodiment, an increase of glycine in a non-human organism, as compared to a corresponding non-transformed wild type non-human organism, is conferred in the process of the invention, if the activity of a polypeptide showing the activity of a 3-phosphoglycerate dehydrogenase, or if the activity of the polypeptide Yil074c, preferably represented by SEQ ID NO. 64564, or a homolog or fragment thereof, or if the activity of a polypeptide encoded by a nucleic acid molecule comprising the nucleic acid SEQ ID NO. 64563, preferably the coding region thereof, or a homolog or fragment thereof, e.g. derived from Saccharomyces cerevisiae, is increased or generated. For example the activity of a nucleic acid molecule or a polypeptide comprising the nucleic acid, preferably the coding region thereof, or polypeptide or the consensus sequence or the polypeptide motif, as depicted in Table I, II or IV, application No. 3, column 5 or 8 in the respective same line as the nucleic acid molecule SEQ ID NO. 64563 or polypeptide SEQ ID NO. 64564, respectively, or a homolog or a fragment thereof, is increased or generated, or if the activity 3-phosphoglycerate dehydrogenase is increased or generated in a non-human organism, like a microorganism or a plant cell, plant or part thereof, especially with plastidic localization, whereby the respective line discloses in column 7 glycine. For example, an increase of the glycine of at least 1 percent, particularly in a range of 57 to 94-percent is conferred as compared to a corresponding non-transformed wild type non-human organism.

[22894] Accordingly, in one embodiment, an increase of aspartate in a non-human organism, as compared to a corresponding non-transformed wild type non-human organism, is conferred in the process of the invention, if the activity of a polypeptide showing the activity of a glutathione S-transferase, or if the activity of the polypeptide Yir038c, preferably represented by SEQ ID NO. 90307, or a homolog or fragment thereof, or if the activity of a polypeptide encoded by a nucleic acid molecule comprising the nucleic acid SEQ ID NO. 90306, preferably the coding region thereof, or a homolog or fragment thereof, e.g. derived from Saccharomyces cerevisiae, is increased or generated. For example the activity of a nucleic acid molecule or a polypeptide comprising the nucleic acid, preferably the coding region thereof, or polypeptide or the consensus sequence or the polypeptide motif, as depicted in Table I, II or IV, application No. 3, column 5 or 8 in the respective same line as the nucleic acid molecule SEQ ID NO. 90306 or polypeptide SEQ ID NO. 90307, respectively, or a homolog or a fragment thereof, is increased or generated, or if the activity glutathione S-transferase is increased or generated in a non-human organism, like a microorganism or a plant cell, plant or part thereof, especially with plastidic localization, whereby the respective line discloses in column 7 aspartate. For example, an increase of the aspartate of at least 1 percent, particularly in a range of 49 to 72-percent is conferred as compared to a corresponding non-transformed wild type non-human organism.

[22895] Accordingly, in one embodiment, an increase of citrulline in a non-human organism, as compared to a corresponding non-transformed wild type non-human organism, is conferred in the process of the invention, if the activity of a polypeptide showing the activity of a glutathione S-transferase, or if the activity of the polypeptide Yir038c, preferably represented by SEQ ID NO. 90307, or a homolog or fragment thereof, or if the activity of a polypeptide encoded by a nucleic acid molecule comprising the nucleic acid SEQ ID NO. 90306, preferably the coding region thereof, or a homolog or fragment thereof, e.g. derived from Saccharomyces cerevisiae, is increased or generated. For example the activity of a nucleic acid molecule or a polypeptide comprising the nucleic acid, preferably the coding region thereof, or polypeptide or the consensus sequence or the polypeptide motif, as depicted in Table I, II or IV, application No. 3, column 5 or 8 in the respective same line as the nucleic acid molecule SEQ ID NO. 90306 or polypeptide SEQ ID NO. 90307, respectively, or a homolog or a fragment thereof, is increased or generated, or if the activity glutathione S-transferase is increased or generated in a non-human organism, like a microorganism or a plant cell, plant or part thereof, especially with plastidic localization, whereby the respective line discloses in column 7 citrulline. For example, an increase of the citrulline of at least 1 percent, particularly in a range of 35 to 43-percent is conferred as compared to a corresponding non-transformed wild type non-human organism.

[22896] Accordingly, in one embodiment, an increase of aspartate in a non-human organism, as compared to a corresponding non-transformed wild type non-human organism, is conferred in the process of the invention, if the activity of a polypeptide showing the activity of a DnaJ-like chaperone, or if the activity of the polypeptide Yjl073w, preferably represented by SEQ ID NO. 64965, or a homolog or fragment thereof, or if the activity of a polypeptide encoded by a nucleic acid molecule comprising the nucleic acid SEQ ID NO. 64964, preferably the coding region thereof, or a homolog or fragment thereof, e.g. derived from Saccharomyces cerevisiae, is increased or generated. For example the activity of a nucleic acid molecule or a polypeptide comprising the nucleic acid, preferably the coding region thereof, or polypeptide or the consensus sequence or the polypeptide motif, as depicted in Table I, II or IV, application No. 3, column 5 or 8 in the respective same line as the nucleic acid molecule SEQ ID NO. 64964 or polypeptide SEQ ID NO. 64965, respectively, or a homolog or a fragment thereof, is increased or generated, or if the activity DnaJ-like chaperone is increased or generated in a non-human organism, like a microorganism or a plant cell, plant or part thereof, especially with plastidic localization, whereby the respective line discloses in column 7 aspartate. For example, an increase of the aspartate of at least 1 percent, particularly in a range of 52 to 62-percent is conferred as compared to a corresponding non-transformed wild type non-human organism.

[22897] Accordingly, in one embodiment, an increase of phenylalanine in a non-human organism, as compared to a corresponding non-transformed wild type non-human organism, is conferred in the process of the invention, if the activity of a polypeptide showing the activity of a cystathionine gamma-synthase, or if the activity of the polypeptide Yjr130c, preferably represented by SEQ ID NO. 14844, or a homolog or fragment thereof, or if the activity of a polypeptide encoded by a nucleic acid molecule comprising the nucleic acid SEQ ID NO. 14843, preferably the coding region thereof, or a homolog or fragment thereof, e.g. derived from Saccharomyces cerevisiae, is increased or generated. For example the activity of a nucleic acid molecule or a polypeptide comprising the nucleic acid, preferably the coding region thereof, or polypeptide or the consensus sequence or the polypeptide motif, as depicted in Table I, II or IV, application No. 3, column 5 or 8 in the respective same line as the nucleic acid molecule SEQ ID NO. 14843 or polypeptide SEQ ID NO. 14844, respectively, or a homolog or a fragment thereof, is increased or generated, or if the activity cystathionine gamma-synthase is increased or generated in a non-human organism, like a microorganism or a plant cell, plant or part thereof, especially with non-targeted localization, whereby the respective line discloses in column 7 phenylalanine. For example, an increase of the phenylalanine of at least 1 percent, particularly in a range of 26 to 48-percent is conferred as compared to a corresponding non-transformed wild type non-human organism.

[22898] Accordingly, in one embodiment, an increase of citrulline in a non-human organism, as compared to a corresponding non-transformed wild type non-human organism, is conferred in the process of the invention, if the activity of a polypeptide showing the activity of a branched chain aminotransferase, or if the activity of the polypeptide Yjr148w, preferably represented by SEQ ID NO. 90410, or a homolog or fragment thereof, or if the activity of a polypeptide encoded by a nucleic acid molecule comprising the nucleic acid SEQ ID NO. 90409, preferably the coding region thereof, or a homolog or fragment thereof, e.g. derived from Saccharomyces cerevisiae, is increased or generated. For example the activity of a nucleic acid molecule or a polypeptide comprising the nucleic acid, preferably the coding region thereof, or polypeptide or the consensus sequence or the polypeptide motif, as depicted in Table I, II or IV, application No. 3, column 5 or 8 in the respective same line as the nucleic acid molecule SEQ ID NO. 90409 or polypeptide SEQ ID NO. 90410, respectively, or a homolog or a fragment thereof, is increased or generated, or if the activity branched chain aminotransferase is increased or generated in a non-human organism, like a microorganism or a plant cell, plant or part thereof, especially with plastidic localization, whereby the respective line discloses in column 7 citrulline. For example, an increase of the citrulline of at least 1 percent, particularly in a range of 31 to 67-percent is conferred as compared to a corresponding non-transformed wild type non-human organism.

[22899] Accordingly, in one embodiment, an increase of aspartate in a non-human organism, as compared to a corresponding non-transformed wild type non-human organism, is conferred in the process of the invention, if the activity of a polypeptide showing the activity of a polygalacturonase, or if the activity of the polypeptide Yjr153w, preferably represented by SEQ ID NO. 66275, or a homolog or fragment thereof, or if the activity of a polypeptide encoded by a nucleic acid molecule comprising the nucleic acid SEQ ID NO. 66274, preferably the coding region thereof, or a homolog or fragment thereof, e.g. derived from Saccharomyces cerevisiae, is increased or generated. For example the activity of a nucleic acid molecule or a polypeptide comprising the nucleic acid, preferably the coding region thereof, or polypeptide or the consensus sequence or the polypeptide motif, as depicted in Table I, II or IV, application No. 3, column 5 or 8 in the respective same line as the nucleic acid molecule SEQ ID NO. 66274 or polypeptide SEQ ID NO. 66275, respectively, or a homolog or a fragment thereof, is increased or generated, or if the activity polygalacturonase is increased or generated in a non-human organism, like a microorganism or a plant cell, plant or part thereof, especially with non-targeted localization, whereby the respective line discloses in column 7 aspartate. For example, an increase of the aspartate of at least 1 percent, particularly in a range of 59 to 149-percent is conferred as compared to a corresponding non-transformed wild type non-human organism.

[22900] Accordingly, in one embodiment, an increase of phenylalanine in a non-human organism, as compared to a corresponding non-transformed wild type non-human organism, is conferred in the process of the invention, if the activity of a polypeptide showing the activity of a polygalacturonase, or if the activity of the polypeptide Yjr153w, preferably represented by SEQ ID NO. 66275, or a homolog or fragment thereof, or if the activity of a polypeptide encoded by a nucleic acid molecule comprising the nucleic acid SEQ ID NO. 66274, preferably the coding region thereof, or a homolog or fragment thereof, e.g. derived from Saccharomyces cerevisiae, is increased or generated. For example the activity of a nucleic acid molecule or a polypeptide comprising the nucleic acid, preferably the coding region thereof, or polypeptide or the consensus sequence or the polypeptide motif, as depicted in Table I, II or IV, application No. 3, column 5 or 8 in the respective same line as the nucleic acid molecule SEQ ID NO. 66274 or polypeptide SEQ ID NO. 66275, respectively, or a homolog or a fragment thereof, is increased or generated, or if the activity polygalacturonase is increased or generated in a non-human organism, like a microorganism or a plant cell, plant or part thereof, especially with non-targeted localization, whereby the respective line discloses in column 7 phenylalanine. For example, an increase of the phenylalanine of at least 1 percent, particularly in a range of 34 to 51-percent is conferred as compared to a corresponding non-transformed wild type non-human organism.

[22901] Accordingly, in one embodiment, an increase of alanine in a non-human organism, as compared to a corresponding non-transformed wild type non-human organism, is conferred in the process of the invention, if the activity of a polypeptide showing the activity of a YKL038W-protein, or if the activity of the polypeptide YKL038W, preferably represented by SEQ ID NO. 90603, or a homolog or fragment thereof, or if the activity of a polypeptide encoded by a nucleic acid molecule comprising the nucleic acid SEQ ID NO. 90602, preferably the coding region thereof, or a homolog or fragment thereof, e.g. derived from SACCHAROMYCES CEREVISIAE, is increased or generated. For example the activity of a nucleic acid molecule or a polypeptide comprising the nucleic acid, preferably the coding region thereof, or polypeptide or the consensus sequence or the polypeptide motif, as depicted in Table I, II or IV, application No. 3, column 5 or 8 in the respective same line as the nucleic acid molecule SEQ ID NO. 90602 or polypeptide SEQ ID NO. 90603, respectively, or a homolog or a fragment thereof, is increased or generated, or if the activity YKL038W-protein is increased or generated in a non-human organism, like a microorganism or a plant cell, plant or part thereof, especially with plastidic localization, whereby the respective line discloses in column 7 alanine. For example, an increase of the alanine of at least 1 percent, particularly in a range of 20 to 45-percent is conferred as compared to a corresponding non-transformed wild type non-human organism.

[22902] Accordingly, in one embodiment, an increase of aspartate in a non-human organism, as compared to a corresponding non-transformed wild type non-human organism, is conferred in the process of the invention, if the activity of a polypeptide showing the activity of a YKL038W-protein, or if the activity of the polypeptide YKL038W, preferably represented by SEQ ID NO. 90603, or a homolog or fragment thereof, or if the activity of a polypeptide encoded by a nucleic acid molecule comprising the nucleic acid SEQ ID NO. 90602, preferably the coding region thereof, or a homolog or fragment thereof, e.g. derived from SACCHAROMYCES CEREVISIAE, is increased or generated. For example the activity of a nucleic acid molecule or a polypeptide comprising the nucleic acid, preferably the coding region thereof, or polypeptide or the consensus sequence or the polypeptide motif, as depicted in Table I, II or IV, application No. 3, column 5 or 8 in the respective same line as the nucleic acid molecule SEQ ID NO. 90602 or polypeptide SEQ ID NO. 90603, respectively, or a homolog or a fragment thereof, is increased or generated, or if the activity YKL038W-protein is increased or generated in a non-human organism, like a microorganism or a plant cell, plant or part thereof, especially with plastidic localization, whereby the respective line discloses in column 7 aspartate. For example, an increase of the aspartate of at least 1 percent, particularly in a range of 59 to 125-percent is conferred as compared to a corresponding non-transformed wild type non-human organism.

[22903] Accordingly, in one embodiment, an increase of serine in a non-human organism, as compared to a corresponding non-transformed wild type non-human organism, is conferred in the process of the invention, if the activity of a polypeptide showing the activity of a YKL038W-protein, or if the activity of the polypeptide YKL038W, preferably represented by SEQ ID NO. 90603, or a homolog or fragment thereof, or if the activity of a polypeptide encoded by a nucleic acid molecule comprising the nucleic acid SEQ ID NO. 90602, preferably the coding region thereof, or a homolog or fragment thereof, e.g. derived from SACCHAROMYCES CEREVISIAE, is increased or generated. For example the activity of a nucleic acid molecule or a polypeptide comprising the nucleic acid, preferably the coding region thereof, or polypeptide or the consensus sequence or the polypeptide motif, as depicted in Table I, II or IV, application No. 3, column 5 or 8 in the respective same line as the nucleic acid molecule SEQ ID NO. 90602 or polypeptide SEQ ID NO. 90603, respectively, or a homolog or a fragment thereof, is increased or generated, or if the activity YKL038W-protein is increased or generated in a non-human organism, like a microorganism or a plant cell, plant or part thereof, especially with plastidic localization, whereby the respective line discloses in column 7 serine. For example, an increase of the serine of at least 1 percent, particularly in a range of 27 to 57-percent is conferred as compared to a corresponding non-transformed wild type non-human organism.

[22904] Accordingly, in one embodiment, an increase of glycine in a non-human organism, as compared to a corresponding non-transformed wild type non-human organism, is conferred in the process of the invention, if the activity of a polypeptide showing the activity of a aspartate aminotransferase, or if the activity of the polypeptide Ylr027c, preferably represented by SEQ ID NO. 90616, or a homolog or fragment thereof, or if the activity of a polypeptide encoded by a nucleic acid molecule comprising the nucleic acid SEQ ID NO. 90615, preferably the coding region thereof, or a homolog or fragment thereof, e.g. derived from Saccharomyces cerevisiae, is increased or generated. For example the activity of a nucleic acid molecule or a polypeptide comprising the nucleic acid, preferably the coding region thereof, or polypeptide or the consensus sequence or the polypeptide motif, as depicted in Table I, II or IV, application No. 3, column 5 or 8 in the respective same line as the nucleic acid molecule SEQ ID NO. 90615 or polypeptide SEQ ID NO. 90616, respectively, or a homolog or a fragment thereof, is increased or generated, or if the activity aspartate aminotransferase is increased or generated in a non-human organism, like a microorganism or a plant cell, plant or part thereof, especially with non-targeted localization, whereby the respective line discloses in column 7 glycine. For example, an increase of the glycine of at least 1 percent, particularly in a range of 41 to 69-percent is conferred as compared to a corresponding non-transformed wild type non-human organism.

[22905] Accordingly, in one embodiment, an increase of serine in a non-human organism, as compared to a corresponding non-transformed wild type non-human organism, is conferred in the process of the invention, if the activity of a polypeptide showing the activity of a thioredoxin, or if the activity of the polypeptide Ylr043c, preferably represented by SEQ ID NO. 91046, or a homolog or fragment thereof, or if the activity of a polypeptide encoded by a nucleic acid molecule comprising the nucleic acid SEQ ID NO. 91045, preferably the coding region thereof, or a homolog or fragment thereof, e.g. derived from Saccharomyces cerevisiae, is increased or generated. For example the activity of a nucleic acid molecule or a polypeptide comprising the nucleic acid, preferably the coding region thereof, or polypeptide or the consensus sequence or the polypeptide motif, as depicted in Table I, II or IV, application No. 3, column 5 or 8 in the respective same line as the nucleic acid molecule SEQ ID NO. 91045 or polypeptide SEQ ID NO. 91046, respectively, or a homolog or a fragment thereof, is increased or generated, or if the activity thioredoxin is increased or generated in a non-human organism, like a microorganism or a plant cell, plant or part thereof, especially with plastidic localization, whereby the respective line discloses in column 7 serine. For example, an increase of the serine of at least 1 percent, particularly in a range of 29 to 110-percent is conferred as compared to a corresponding non-transformed wild type non-human organism.

[22906] Accordingly, in one embodiment, an increase of tyrosine in a non-human organism, as compared to a corresponding non-transformed wild type non-human organism, is conferred in the process of the invention, if the activity of a polypeptide showing the activity of a thioredoxin, or if the activity of the polypeptide Ylr043c, preferably represented by SEQ ID NO. 91046, or a homolog or fragment thereof, or if the activity of a polypeptide encoded by a nucleic acid molecule comprising the nucleic acid SEQ ID NO. 91045, preferably the coding region thereof, or a homolog or fragment thereof, e.g. derived from Saccharomyces cerevisiae, is increased or generated. For example the activity of a nucleic acid molecule or a polypeptide comprising the nucleic acid, preferably the coding region thereof, or polypeptide or the consensus sequence or the polypeptide motif, as depicted in Table I, II or IV, application No. 3, column 5 or 8 in the respective same line as the nucleic acid molecule SEQ ID NO. 91045 or polypeptide SEQ ID NO. 91046, respectively, or a homolog or a fragment thereof, is increased or generated, or if the activity thioredoxin is increased or generated in a non-human organism, like a microorganism or a plant cell, plant or part thereof, especially with plastidic localization, whereby the respective line discloses in column 7 tyrosine. For example, an increase of the tyrosine of at least 1 percent, particularly in a range of 40 to 94-percent is conferred as compared to a corresponding non-transformed wild type non-human organism.

[22907] Accordingly, in one embodiment, an increase of alanine in a non-human organism, as compared to a corresponding non-transformed wild type non-human organism, is conferred in the process of the invention, if the activity of a polypeptide showing the activity of a sterol 24-C-methyltransferase, or if the activity of the polypeptide Yml008c, preferably represented by SEQ ID NO. 91660, or a homolog or fragment thereof, or if the activity of a polypeptide encoded by a nucleic acid molecule comprising the nucleic acid SEQ ID NO. 91659, preferably the coding region thereof, or a homolog or fragment thereof, e.g. derived from Saccharomyces cerevisiae, is increased or generated. For example the activity of a nucleic acid molecule or a polypeptide comprising the nucleic acid, preferably the coding region thereof, or polypeptide or the consensus sequence or the polypeptide motif, as depicted in Table I, II or IV, application No. 3, column 5 or 8 in the respective same line as the nucleic acid molecule SEQ ID NO. 91659 or polypeptide SEQ ID NO. 91660, respectively, or a homolog or a fragment thereof, is increased or generated, or if the activity sterol 24-C-methyltransferase is increased or generated in a non-human organism, like a microorganism or a plant cell, plant or part thereof, especially with plastidic localization, whereby the respective line discloses in column 7 alanine. For example, an increase of the alanine of at least 1 percent, particularly in a range of 21 to 52-percent is conferred as compared to a corresponding non-transformed wild type non-human organism.

[22908] Accordingly, in one embodiment, an increase of glycine in a non-human organism, as compared to a corresponding non-transformed wild type non-human organism, is conferred in the process of the invention, if the activity of a polypeptide showing the activity of a sterol 24-C-methyltransferase, or if the activity of the polypeptide Yml008c, preferably represented by SEQ ID NO. 91660, or a homolog or fragment thereof, or if the activity of a polypeptide encoded by a nucleic acid molecule comprising the nucleic acid SEQ ID NO. 91659, preferably the coding region thereof, or a homolog or fragment thereof, e.g. derived from Saccharomyces cerevisiae, is increased or generated. For example the activity of a nucleic acid molecule or a polypeptide comprising the nucleic acid, preferably the coding region thereof, or polypeptide or the consensus sequence or the polypeptide motif, as depicted in Table I, II or IV, application No. 3, column 5 or 8 in the respective same line as the nucleic acid molecule SEQ ID NO. 91659 or polypeptide SEQ ID NO. 91660, respectively, or a homolog or a fragment thereof, is increased or generated, or if the activity sterol 24-C-methyltransferase is increased or generated in a non-human organism, like a microorganism or a plant cell, plant or part thereof, especially with plastidic localization, whereby the respective line discloses in column 7 glycine. For example, an increase of the glycine of at least 1 percent, particularly in a range of 40 to 96-percent is conferred as compared to a corresponding non-transformed wild type non-human organism.

[22909] Accordingly, in one embodiment, an increase of homoserine in a non-human organism, as compared to a corresponding non-transformed wild type non-human organism, is conferred in the process of the invention, if the activity of a polypeptide showing the activity of a sterol 24-C-methyltransferase, or if the activity of the polypeptide Yml008c, preferably represented by SEQ ID NO. 91660, or a homolog or fragment thereof, or if the activity of a polypeptide encoded by a nucleic acid molecule comprising the nucleic acid SEQ ID NO. 91659, preferably the coding region thereof, or a homolog or fragment thereof, e.g. derived from Saccharomyces cerevisiae, is increased or generated. For example the activity of a nucleic acid molecule or a polypeptide comprising the nucleic acid, preferably the coding region thereof, or polypeptide or the consensus sequence or the polypeptide motif, as depicted in Table I, II or IV, application No. 3, column 5 or 8 in the respective same line as the nucleic acid molecule SEQ ID NO. 91659 or polypeptide SEQ ID NO. 91660, respectively, or a homolog or a fragment thereof, is increased or generated, or if the activity sterol 24-C-methyltransferase is increased or generated in a non-human organism, like a microorganism or a plant cell, plant or part thereof, especially with plastidic localization, whereby the respective line discloses in column 7 homoserine. For example, an increase of the homoserine of at least 1 percent, particularly in a range of 30 to 46-percent is conferred as compared to a corresponding non-transformed wild type non-human organism.

[22910] Accordingly, in one embodiment, an increase of 5-oxoproline in a non-human organism, as compared to a corresponding non-transformed wild type non-human organism, is conferred in the process of the invention, if the activity of a polypeptide showing the activity of a sterol 24-C-methyltransferase, or if the activity of the polypeptide Yml008c, preferably represented by SEQ ID NO. 91660, or a homolog or fragment thereof, or if the activity of a polypeptide encoded by a nucleic acid molecule comprising the nucleic acid SEQ ID NO. 91659, preferably the coding region thereof, or a homolog or fragment thereof, e.g. derived from Saccharomyces cerevisiae, is increased or generated. For example the activity of a nucleic acid molecule or a polypeptide comprising the nucleic acid, preferably the coding region thereof, or polypeptide or the consensus sequence or the polypeptide motif, as depicted in Table I, II or IV, application No. 3, column 5 or 8 in the respective same line as the nucleic acid molecule SEQ ID NO. 91659 or polypeptide SEQ ID NO. 91660, respectively, or a homolog or a fragment thereof, is increased or generated, or if the activity sterol 24-C-methyltransferase is increased or generated in a non-human organism, like a microorganism or a plant cell, plant or part thereof, especially with plastidic localization, whereby the respective line discloses in column 7 5-oxoproline. For example, an increase of the 5-oxoproline of at least 1 percent, particularly in a range of 32 to 56-percent is conferred as compared to a corresponding non-transformed wild type non-human organism.

[22911] Accordingly, in one embodiment, an increase of alanine in a non-human organism, as compared to a corresponding non-transformed wild type non-human organism, is conferred in the process of the invention, if the activity of a polypeptide showing the activity of a yml083c-protein, or if the activity of the polypeptide Yml083c, preferably represented by SEQ ID NO. 91782, or a homolog or fragment thereof, or if the activity of a polypeptide encoded by a nucleic acid molecule comprising the nucleic acid SEQ ID NO. 91781, preferably the coding region thereof, or a homolog or fragment thereof, e.g. derived from Saccharomyces cerevisiae, is increased or generated. For example the activity of a nucleic acid molecule or a polypeptide comprising the nucleic acid, preferably the coding region thereof, or polypeptide or the consensus sequence or the polypeptide motif, as depicted in Table I, II or IV, application No. 3, column 5 or 8 in the respective same line as the nucleic acid molecule SEQ ID NO. 91781 or polypeptide SEQ ID NO. 91782, respectively, or a homolog or a fragment thereof, is increased or generated, or if the activity yml083c-protein is increased or generated in a non-human organism, like a microorganism or a plant cell, plant or part thereof, especially with plastidic localization, whereby the respective line discloses in column 7 alanine. For example, an increase of the alanine of at least 1 percent, particularly in a range of 22 to 31-percent is conferred as compared to a corresponding non-transformed wild type non-human organism.

[22912] Accordingly, in one embodiment, an increase of phenylalanine in a non-human organism, as compared to a corresponding non-transformed wild type non-human organism, is conferred in the process of the invention, if the activity of a polypeptide showing the activity of a phosphate transporter, or if the activity of the polypeptide Yml123c, preferably represented by SEQ ID NO. 91786, or a homolog or fragment thereof, or if the activity of a polypeptide encoded by a nucleic acid molecule comprising the nucleic acid SEQ ID NO. 91785, preferably the coding region thereof, or a homolog or fragment thereof, e.g. derived from Saccharomyces cerevisiae, is increased or generated. For example the activity of a nucleic acid molecule or a polypeptide comprising the nucleic acid, preferably the coding region thereof, or polypeptide or the consensus sequence or the polypeptide motif, as depicted in Table I, II or IV, application No. 3, column 5 or 8 in the respective same line as the nucleic acid molecule SEQ ID NO. 91785 or polypeptide SEQ ID NO. 91786, respectively, or a homolog or a fragment thereof, is increased or generated, or if the activity phosphate transporter is increased or generated in a non-human organism, like a microorganism or a plant cell, plant or part thereof, especially with plastidic localization, whereby the respective line discloses in column 7 phenylalanine. For example, an increase of the phenylalanine of at least 1 percent, particularly in a range of 32 to 57-percent is conferred as compared to a corresponding non-transformed wild type non-human organism.

[22913] Accordingly, in one embodiment, an increase of tyrosine in a non-human organism, as compared to a corresponding non-transformed wild type non-human organism, is conferred in the process of the invention, if the activity of a polypeptide showing the activity of a phosphate transporter, or if the activity of the polypeptide Yml123c, preferably represented by SEQ ID NO. 91786, or a homolog or fragment thereof, or if the activity of a polypeptide encoded by a nucleic acid molecule comprising the nucleic acid SEQ ID NO. 91785, preferably the coding region thereof, or a homolog or fragment thereof, e.g. derived from Saccharomyces cerevisiae, is increased or generated. For example the activity of a nucleic acid molecule or a polypeptide comprising the nucleic acid, preferably the coding region thereof, or polypeptide or the consensus sequence or the polypeptide motif, as depicted in Table I, II or IV, application No. 3, column 5 or 8 in the respective same line as the nucleic acid molecule SEQ ID NO. 91785 or polypeptide SEQ ID NO. 91786, respectively, or a homolog or a fragment thereof, is increased or generated, or if the activity phosphate transporter is increased or generated in a non-human organism, like a microorganism or a plant cell, plant or part thereof, especially with plastidic localization, whereby the respective line discloses in column 7 tyrosine. For example, an increase of the tyrosine of at least 1 percent, particularly in a range of 44 to 66-percent is conferred as compared to a corresponding non-transformed wild type non-human organism.

[22914] Accordingly, in one embodiment, an increase of tyrosine in a non-human organism, as compared to a corresponding non-transformed wild type non-human organism, is conferred in the process of the invention, if the activity of a polypeptide showing the activity of a ymr013c-protein, or if the activity of the polypeptide Ymr013c, preferably represented by SEQ ID NO. 91959, or a homolog or fragment thereof, or if the activity of a polypeptide encoded by a nucleic acid molecule comprising the nucleic acid SEQ ID NO. 91958, preferably the coding region thereof, or a homolog or fragment thereof, e.g. derived from Saccharomyces cerevisiae, is increased or generated. For example the activity of a nucleic acid molecule or a polypeptide comprising the nucleic acid, preferably the coding region thereof, or polypeptide or the consensus sequence or the polypeptide motif, as depicted in Table I, II or IV, application No. 3, column 5 or 8 in the respective same line as the nucleic acid molecule SEQ ID NO. 91958 or polypeptide SEQ ID NO. 91959, respectively, or a homolog or a fragment thereof, is increased or generated, or if the activity ymr013c-protein is increased or generated in a non-human organism, like a microorganism or a plant cell, plant or part thereof, especially with plastidic localization, whereby the respective line discloses in column 7 tyrosine. For example, an increase of the tyrosine of at least 1 percent, particularly in a range of 41 to 93-percent is conferred as compared to a corresponding non-transformed wild type non-human organism.

[22915] Accordingly, in one embodiment, an increase of glycine in a non-human organism, as compared to a corresponding non-transformed wild type non-human organism, is conferred in the process of the invention, if the activity of a polypeptide showing the activity of a purine biosynthesis protein, or if the activity of the polypeptide Ymr120c, preferably represented by SEQ ID NO. 91974, or a homolog or fragment thereof, or if the activity of a polypeptide encoded by a nucleic acid molecule comprising the nucleic acid SEQ ID NO. 91973, preferably the coding region thereof, or a homolog or fragment thereof, e.g. derived from Saccharomyces cerevisiae, is increased or generated. For example the activity of a nucleic acid molecule or a polypeptide comprising the nucleic acid, preferably the coding region thereof, or polypeptide or the consensus sequence or the polypeptide motif, as depicted in Table I, II or IV, application No. 3, column 5 or 8 in the respective same line as the nucleic acid molecule SEQ ID NO. 91973 or polypeptide SEQ ID NO. 91974, respectively, or a homolog or a fragment thereof, is increased or generated, or if the activity purine biosynthesis protein is increased or generated in a non-human organism, like a microorganism or a plant cell, plant or part thereof, especially with plastidic localization, whereby the respective line discloses in column 7 glycine. For example, an increase of the glycine of at least 1 percent, particularly in a range of 37 to 39-percent is conferred as compared to a corresponding non-transformed wild type non-human organism.

[22916] Accordingly, in one embodiment, an increase of phenylalanine in a non-human organism, as compared to a corresponding non-transformed wild type non-human organism, is conferred in the process of the invention, if the activity of a polypeptide showing the activity of a mitochondrial inner membrane protease subunit, or if the activity of the polypeptide Ymr150c, preferably represented by SEQ ID NO. 92275, or a homolog or fragment thereof, or if the activity of a polypeptide encoded by a nucleic acid molecule comprising the nucleic acid SEQ ID NO. 92274, preferably the coding region thereof, or a homolog or fragment thereof, e.g. derived from Saccharomyces cerevisiae, is increased or generated. For example the activity of a nucleic acid molecule or a polypeptide comprising the nucleic acid, preferably the coding region thereof, or polypeptide or the consensus sequence or the polypeptide motif, as depicted in Table I, II or IV, application No. 3, column 5 or 8 in the respective same line as the nucleic acid molecule SEQ ID NO. 92274 or polypeptide SEQ ID NO. 92275, respectively, or a homolog or a fragment thereof, is increased or generated, or if the activity mitochondrial inner membrane protease subunit is increased or generated in a non-human organism, like a microorganism or a plant cell, plant or part thereof, especially with plastidic localization, whereby the respective line discloses in column 7 phenylalanine. For example, an increase of the phenylalanine of at least 1 percent, particularly in a range of 25 to 52-percent is conferred as compared to a corresponding non-transformed wild type non-human organism.

[22917] Accordingly, in one embodiment, an increase of homoserine in a non-human organism, as compared to a corresponding non-transformed wild type non-human organism, is conferred in the process of the invention, if the activity of a polypeptide showing the activity of a YNL086W-protein, or if the activity of the polypeptide Yn1086w, preferably represented by SEQ ID NO. 92326, or a homolog or fragment thereof, or if the activity of a polypeptide encoded by a nucleic acid molecule comprising the nucleic acid SEQ ID NO. 92325, preferably the coding region thereof, or a homolog or fragment thereof, e.g. derived from Saccharomyces cerevisiae, is increased or generated. For example the activity of a nucleic acid molecule or a polypeptide comprising the nucleic acid, preferably the coding region thereof, or polypeptide or the consensus sequence or the polypeptide motif, as depicted in Table I, II or IV, application No. 3, column 5 or 8 in the respective same line as the nucleic acid molecule SEQ ID NO. 92325 or polypeptide SEQ ID NO. 92326, respectively, or a homolog or a fragment thereof, is increased or generated, or if the activity YNL086W-protein is increased or generated in a non-human organism, like a microorganism or a plant cell, plant or part thereof, especially with plastidic localization, whereby the respective line discloses in column 7 homoserine. For example, an increase of the homoserine of at least 1 percent, particularly in a range of 24 to 37-percent is conferred as compared to a corresponding non-transformed wild type non-human organism.

[22918] Accordingly, in one embodiment, an increase of tyrosine in a non-human organism, as compared to a corresponding non-transformed wild type non-human organism, is conferred in the process of the invention, if the activity of a polypeptide showing the activity of a amino acid transporter, or if the activity of the polypeptide Ynl101w, preferably represented by SEQ ID NO. 92340, or a homolog or fragment thereof, or if the activity of a polypeptide encoded by a nucleic acid molecule comprising the nucleic acid SEQ ID NO. 92339, preferably the coding region thereof, or a homolog or fragment thereof, e.g. derived from Saccharomyces cerevisiae, is increased or generated. For example the activity of a nucleic acid molecule or a polypeptide comprising the nucleic acid, preferably the coding region thereof, or polypeptide or the consensus sequence or the polypeptide motif, as depicted in Table I, II or IV, application No. 3, column 5 or 8 in the respective same line as the nucleic acid molecule SEQ ID NO. 92339 or polypeptide SEQ ID NO. 92340, respectively, or a homolog or a fragment thereof, is increased or generated, or if the activity amino acid transporter is increased or generated in a non-human organism, like a microorganism or a plant cell, plant or part thereof, especially with plastidic localization, whereby the respective line discloses in column 7 tyrosine. For example, an increase of the tyrosine of at least 1 percent, particularly in a range of 33 to 43-percent is conferred as compared to a corresponding non-transformed wild type non-human organism.

[22919] Accordingly, in one embodiment, an increase of homoserine in a non-human organism, as compared to a corresponding non-transformed wild type non-human organism, is conferred in the process of the invention, if the activity of a polypeptide showing the activity of a homoserine O-acetyltransferase, or if the activity of the polypeptide Ynl277w, preferably represented by SEQ ID NO. 92392, or a homolog or fragment thereof, or if the activity of a polypeptide encoded by a nucleic acid molecule comprising the nucleic acid SEQ ID NO. 92391, preferably the coding region thereof, or a homolog or fragment thereof, e.g. derived from Saccharomyces cerevisiae, is increased or generated. For example the activity of a nucleic acid molecule or a polypeptide comprising the nucleic acid, preferably the coding region thereof, or polypeptide or the consensus sequence or the polypeptide motif, as depicted in Table I, II or IV, application No. 3, column 5 or 8 in the respective same line as the nucleic acid molecule SEQ ID NO. 92391 or polypeptide SEQ ID NO. 92392, respectively, or a homolog or a fragment thereof, is increased or generated, or if the activity homoserine O-acetyltransferase is increased or generated in a non-human organism, like a microorganism or a plant cell, plant or part thereof, especially with plastidic localization, whereby the respective line discloses in column 7 homoserine. For example, an increase of the homoserine of at least 1 percent, particularly in a range of 214 to 1243-percent is conferred as compared to a corresponding non-transformed wild type non-human organism.

[22920] Accordingly, in one embodiment, an increase of alanine in a non-human organism, as compared to a corresponding non-transformed wild type non-human organism, is conferred in the process of the invention, if the activity of a polypeptide showing the activity of a metal ion transporter, or if the activity of the polypeptide Yol130w, preferably represented by SEQ ID NO. 92511, or a homolog or fragment thereof, or if the activity of a polypeptide encoded by a nucleic acid molecule comprising the nucleic acid SEQ ID NO. 92510, preferably the coding region thereof, or a homolog or fragment thereof, e.g. derived from Saccharomyces cerevisiae, is increased or generated. For example the activity of a nucleic acid molecule or a polypeptide comprising the nucleic acid, preferably the coding region thereof, or polypeptide or the consensus sequence or the polypeptide motif, as depicted in Table I, II or IV, application No. 3, column 5 or 8 in the respective same line as the nucleic acid molecule SEQ ID NO. 92510 or polypeptide SEQ ID NO. 92511, respectively, or a homolog or a fragment thereof, is increased or generated, or if the activity metal ion transporter is increased or generated in a non-human organism, like a microorganism or a plant cell, plant or part thereof, especially with plastidic localization, whereby the respective line discloses in column 7 alanine. For example, an increase of the alanine of at least 1 percent, particularly in a range of 21 to 33-percent is conferred as compared to a corresponding non-transformed wild type non-human organism.

[22921] Accordingly, in one embodiment, an increase of aspartate in a non-human organism, as compared to a corresponding non-transformed wild type non-human organism, is conferred in the process of the invention, if the activity of a polypeptide showing the activity of a yol160w-protein, or if the activity of the polypeptide Yol160w, preferably represented by SEQ ID NO. 15180, or a homolog or fragment thereof, or if the activity of a polypeptide encoded by a nucleic acid molecule comprising the nucleic acid SEQ ID NO. 15179, preferably the coding region thereof, or a homolog or fragment thereof, e.g. derived from Saccharomyces cerevisiae, is increased or generated. For example the activity of a nucleic acid molecule or a polypeptide comprising the nucleic acid, preferably the coding region thereof, or polypeptide or the consensus sequence or the polypeptide motif, as depicted in Table I, II or IV, application No. 3, column 5 or 8 in the respective same line as the nucleic acid molecule SEQ ID NO. 15179 or polypeptide SEQ ID NO. 15180, respectively, or a homolog or a fragment thereof, is increased or generated, or if the activity yol160w-protein is increased or generated in a non-human organism, like a microorganism or a plant cell, plant or part thereof, especially with plastidic localization, whereby the respective line discloses in column 7 aspartate. For example, an increase of the aspartate of at least 1 percent, particularly in a range of 57 to 62-percent is conferred as compared to a corresponding non-transformed wild type non-human organism.

[22922] Accordingly, in one embodiment, an increase of citrulline in a non-human organism, as compared to a corresponding non-transformed wild type non-human organism, is conferred in the process of the invention, if the activity of a polypeptide showing the activity of a protein kinase, or if the activity of the polypeptide Yor233w, preferably represented by SEQ ID NO. 67969, or a homolog or fragment thereof, or if the activity of a polypeptide encoded by a nucleic acid molecule comprising the nucleic acid SEQ ID NO. 67968, preferably the coding region thereof, or a homolog or fragment thereof, e.g. derived from Saccharomyces cerevisiae, is increased or generated. For example the activity of a nucleic acid molecule or a polypeptide comprising the nucleic acid, preferably the coding region thereof, or polypeptide or the consensus sequence or the polypeptide motif, as depicted in Table I, II or IV, application No. 3, column 5 or 8 in the respective same line as the nucleic acid molecule SEQ ID NO. 67968 or polypeptide SEQ ID NO. 67969, respectively, or a homolog or a fragment thereof, is increased or generated, or if the activity protein kinase is increased or generated in a non-human organism, like a microorganism or a plant cell, plant or part thereof, especially with non-targeted localization, whereby the respective line discloses in column 7 citrulline. For example, an increase of the citrulline of at least 1 percent, particularly in a range of 36 to 92-percent is conferred as compared to a corresponding non-transformed wild type non-human organism.

[22923] Accordingly, in one embodiment, an increase of phenylalanine in a non-human organism, as compared to a corresponding non-transformed wild type non-human organism, is conferred in the process of the invention, if the activity of a polypeptide showing the activity of a histone acetyltransferase, or if the activity of the polypeptide Yor244w, preferably represented by SEQ ID NO. 92541, or a homolog or fragment thereof, or if the activity of a polypeptide encoded by a nucleic acid molecule comprising the nucleic acid SEQ ID NO. 92540, preferably the coding region thereof, or a homolog or fragment thereof, e.g. derived from Saccharomyces cerevisiae, is increased or generated. For example the activity of a nucleic acid molecule or a polypeptide comprising the nucleic acid, preferably the coding region thereof, or polypeptide or the consensus sequence or the polypeptide motif, as depicted in Table I, II or IV, application No. 3, column 5 or 8 in the respective same line as the nucleic acid molecule SEQ ID NO. 92540 or polypeptide SEQ ID NO. 92541, respectively, or a homolog or a fragment thereof, is increased or generated, or if the activity histone acetyltransferase is increased or generated in a non-human organism, like a microorganism or a plant cell, plant or part thereof, especially with plastidic localization, whereby the respective line discloses in column 7 phenylalanine. For example, an increase of the phenylalanine of at least 1 percent, particularly in a range of 44 to 423-percent is conferred as compared to a corresponding non-transformed wild type non-human organism.

[22924] Accordingly, in one embodiment, an increase of tyrosine in a non-human organism, as compared to a corresponding non-transformed wild type non-human organism, is conferred in the process of the invention, if the activity of a polypeptide showing the activity of a histone acetyltransferase, or if the activity of the polypeptide Yor244w, preferably represented by SEQ ID NO. 92541, or a homolog or fragment thereof, or if the activity of a polypeptide encoded by a nucleic acid molecule comprising the nucleic acid SEQ ID NO. 92540, preferably the coding region thereof, or a homolog or fragment thereof, e.g. derived from Saccharomyces cerevisiae, is increased or generated. For example the activity of a nucleic acid molecule or a polypeptide comprising the nucleic acid, preferably the coding region thereof, or polypeptide or the consensus sequence or the polypeptide motif, as depicted in Table I, II or IV, application No. 3, column 5 or 8 in the respective same line as the nucleic acid molecule SEQ ID NO. 92540 or polypeptide SEQ ID NO. 92541, respectively, or a homolog or a fragment thereof, is increased or generated, or if the activity histone acetyltransferase is increased or generated in a non-human organism, like a microorganism or a plant cell, plant or part thereof, especially with plastidic localization, whereby the respective line discloses in column 7 tyrosine. For example, an increase of the tyrosine of at least 1 percent, particularly in a range of 53 to 85-percent is conferred as compared to a corresponding non-transformed wild type non-human organism.

[22925] Accordingly, in one embodiment, an increase of homoserine in a non-human organism, as compared to a corresponding non-transformed wild type non-human organism, is conferred in the process of the invention, if the activity of a polypeptide showing the activity of a diacylglycerol O-acyltransferase, or if the activity of the polypeptide Yor245c, preferably represented by SEQ ID NO. 92617, or a homolog or fragment thereof, or if the activity of a polypeptide encoded by a nucleic acid molecule comprising the nucleic acid SEQ ID NO. 92616, preferably the coding region thereof, or a homolog or fragment thereof, e.g. derived from Saccharomyces cerevisiae, is increased or generated. For example the activity of a nucleic acid molecule or a polypeptide comprising the nucleic acid, preferably the coding region thereof, or polypeptide or the consensus sequence or the polypeptide motif, as depicted in Table I, II or IV, application No. 3, column 5 or 8 in the respective same line as the nucleic acid molecule SEQ ID NO. 92616 or polypeptide SEQ ID NO. 92617, respectively, or a homolog or a fragment thereof, is increased or generated, or if the activity diacylglycerol O-acyltransferase is increased or generated in a non-human organism, like a microorganism or a plant cell, plant or part thereof, especially with non-targeted localization, whereby the respective line discloses in column 7 homoserine. For example, an increase of the homoserine of at least 1 percent, particularly in a range of 29 to 61-percent is conferred as compared to a corresponding non-transformed wild type non-human organism.

[22926] Accordingly, in one embodiment, an increase of serine in a non-human organism, as compared to a corresponding non-transformed wild type non-human organism, is conferred in the process of the invention, if the activity of a polypeptide showing the activity of a diacylglycerol O-acyltransferase, or if the activity of the polypeptide Yor245c, preferably represented by SEQ ID NO. 92617, or a homolog or fragment thereof, or if the activity of a polypeptide encoded by a nucleic acid molecule comprising the nucleic acid SEQ ID NO. 92616, preferably the coding region thereof, or a homolog or fragment thereof, e.g. derived from Saccharomyces cerevisiae, is increased or generated. For example the activity of a nucleic acid molecule or a polypeptide comprising the nucleic acid, preferably the coding region thereof, or polypeptide or the consensus sequence or the polypeptide motif, as depicted in Table I, II or IV, application No. 3, column 5 or 8 in the respective same line as the nucleic acid molecule SEQ ID NO. 92616 or polypeptide SEQ ID NO. 92617, respectively, or a homolog or a fragment thereof, is increased or generated, or if the activity diacylglycerol O-acyltransferase is increased or generated in a non-human organism, like a microorganism or a plant cell, plant or part thereof, especially with non-targeted localization, whereby the respective line discloses in column 7 serine. For example, an increase of the serine of at least 1 percent, particularly in a range of 24 to 82-percent is conferred as compared to a corresponding non-transformed wild type non-human organism.

[22927] Accordingly, in one embodiment, an increase of 5-oxoproline in a non-human organism, as compared to a corresponding non-transformed wild type non-human organism, is conferred in the process of the invention, if the activity of a polypeptide showing the activity of a diacylglycerol O-acyltransferase, or if the activity of the polypeptide Yor245c, preferably represented by SEQ ID NO. 92617, or a homolog or fragment thereof, or if the activity of a polypeptide encoded by a nucleic acid molecule comprising the nucleic acid SEQ ID NO. 92616, preferably the coding region thereof, or a homolog or fragment thereof, e.g. derived from Saccharomyces cerevisiae, is increased or generated. For example the activity of a nucleic acid molecule or a polypeptide comprising the nucleic acid, preferably the coding region thereof, or polypeptide or the consensus sequence or the polypeptide motif, as depicted in Table I, II or IV, application No. 3, column 5 or 8 in the respective same line as the nucleic acid molecule SEQ ID NO. 92616 or polypeptide SEQ ID NO. 92617, respectively, or a homolog or a fragment thereof, is increased or generated, or if the activity diacylglycerol O-acyltransferase is increased or generated in a non-human organism, like a microorganism or a plant cell, plant or part thereof, especially with non-targeted localization, whereby the respective line discloses in column 7 5-oxoproline. For example, an increase of the 5-oxoproline of at least 1 percent, particularly in a range of 35 to 145-percent is conferred as compared to a corresponding non-transformed wild type non-human organism.

[22928] Accordingly, in one embodiment, an increase of glycine in a non-human organism, as compared to a corresponding non-transformed wild type non-human organism, is conferred in the process of the invention, if the activity of a polypeptide showing the activity of a acetyl-CoA acetyltransferase, or if the activity of the polypeptide Ypl028w, preferably represented by SEQ ID NO. 92669, or a homolog or fragment thereof, or if the activity of a polypeptide encoded by a nucleic acid molecule comprising the nucleic acid SEQ ID NO. 92668, preferably the coding region thereof, or a homolog or fragment thereof, e.g. derived from Saccharomyces cerevisiae, is increased or generated. For example the activity of a nucleic acid molecule or a polypeptide comprising the nucleic acid, preferably the coding region thereof, or polypeptide or the consensus sequence or the polypeptide motif, as depicted in Table I, II or IV, application No. 3, column 5 or 8 in the respective same line as the nucleic acid molecule SEQ ID NO. 92668 or polypeptide SEQ ID NO. 92669, respectively, or a homolog or a fragment thereof, is increased or generated, or if the activity acetyl-CoA acetyltransferase is increased or generated in a non-human organism, like a microorganism or a plant cell, plant or part thereof, especially with non-targeted localization, whereby the respective line discloses in column 7 glycine. For example, an increase of the glycine of at least 1 percent, particularly in a range of 43 to 82-percent is conferred as compared to a corresponding non-transformed wild type non-human organism.

[22929] Accordingly, in one embodiment, an increase of serine in a non-human organism, as compared to a corresponding non-transformed wild type non-human organism, is conferred in the process of the invention, if the activity of a polypeptide showing the activity of a citrate synthase, or if the activity of the polypeptide Ypr001w, preferably represented by SEQ ID NO. 93092, or a homolog or fragment thereof, or if the activity of a polypeptide encoded by a nucleic acid molecule comprising the nucleic acid SEQ ID NO. 93091, preferably the coding region thereof, or a homolog or fragment thereof, e.g. derived from Saccharomyces cerevisiae, is increased or generated. For example the activity of a nucleic acid molecule or a polypeptide comprising the nucleic acid, preferably the coding region thereof, or polypeptide or the consensus sequence or the polypeptide motif, as depicted in Table I, II or IV, application No. 3, column 5 or 8 in the respective same line as the nucleic acid molecule SEQ ID NO. 93091 or polypeptide SEQ ID NO. 93092, respectively, or a homolog or a fragment thereof, is increased or generated, or if the activity citrate synthase is increased or generated in a non-human organism, like a microorganism or a plant cell, plant or part thereof, especially with non-targeted localization, whereby the respective line discloses in column 7 serine. For example, an increase of the serine of at least 1 percent, particularly in a range of 23 to 31-percent is conferred as compared to a corresponding non-transformed wild type non-human organism.

[22930] Accordingly, in one embodiment, an increase of aspartate in a non-human organism, as compared to a corresponding non-transformed wild type non-human organism, is conferred in the process of the invention, if the activity of a polypeptide showing the activity of a ammonium transporter, or if the activity of the polypeptide Ypr138c, preferably represented by SEQ ID NO. 93219, or a homolog or fragment thereof, or if the activity of a polypeptide encoded by a nucleic acid molecule comprising the nucleic acid SEQ ID NO. 93218, preferably the coding region thereof, or a homolog or fragment thereof, e.g. derived from Saccharomyces cerevisiae, is increased or generated. For example the activity of a nucleic acid molecule or a polypeptide comprising the nucleic acid, preferably the coding region thereof, or polypeptide or the consensus sequence or the polypeptide motif, as depicted in Table I, II or IV, application No. 3, column 5 or 8 in the respective same line as the nucleic acid molecule SEQ ID NO. 93218 or polypeptide SEQ ID NO. 93219, respectively, or a homolog or a fragment thereof, is increased or generated, or if the activity ammonium transporter is increased or generated in a non-human organism, like a microorganism or a plant cell, plant or part thereof, especially with non-targeted localization, whereby the respective line discloses in column 7 aspartate. For example, an increase of the aspartate of at least 1 percent, particularly in a range of 42 to 217-percent is conferred as compared to a corresponding non-transformed wild type non-human organism.

[22931] Accordingly, in one embodiment, an increase of phenylalanine in a non-human organism, as compared to a corresponding non-transformed wild type non-human organism, is conferred in the process of the invention, if the activity of a polypeptide showing the activity of a Zm_{—}4842_BE510522-protein, or if the activity of the polypeptide Zm_{—}4842_BE510522, preferably represented by SEQ ID NO. 68414, or a homolog or fragment thereof, or if the activity of a polypeptide encoded by a nucleic acid molecule comprising the nucleic acid SEQ ID NO. 68413, preferably the coding region thereof, or a homolog or fragment thereof, e.g. derived from Zea mays, is increased or generated. For example the activity of a nucleic acid molecule or a polypeptide comprising the nucleic acid, preferably the coding region thereof, or polypeptide or the consensus sequence or the polypeptide motif, as depicted in Table I, II or IV, application No. 3, column 5 or 8 in the respective same line as the nucleic acid molecule SEQ ID NO. 68413 or polypeptide SEQ ID NO. 68414, respectively, or a homolog or a fragment thereof, is increased or generated, or if the activity Zm_{—}4842_BE510522-protein is increased or generated in a non-human organism, like a microorganism or a plant cell, plant or part thereof, especially with non-targeted localization, whereby the respective line discloses in column 7 phenylalanine. For example, an increase of the phenylalanine of at least 1 percent, particularly in a range of 29 to 242-percent is conferred as compared to a corresponding non-transformed wild type non-human organism.

[22932] Accordingly, in one embodiment, an increase of serine in a non-human organism, as compared to a corresponding non-transformed wild type non-human organism, is conferred in the process of the invention, if the activity of a polypeptide showing the activity of a Zm_{—}4842_BE510522protein, or if the activity of the polypeptide Zm_{—}4842_BE510522, preferably represented by SEQ ID NO. 68414, or a homolog or fragment thereof, or if the activity of a polypeptide encoded by a nucleic acid molecule comprising the nucleic acid SEQ ID NO. 68413, preferably the coding region thereof, or a homolog or fragment thereof, e.g. derived from Zea mays, is increased or generated. For example the activity of a nucleic acid molecule or a polypeptide comprising the nucleic acid, preferably the coding region thereof, or polypeptide or the consensus sequence or the polypeptide motif, as depicted in Table I, II or IV, application No. 3, column 5 or 8 in the respective same line as the nucleic acid molecule SEQ ID NO. 68413 or polypeptide SEQ ID NO. 68414, respectively, or a homolog or a fragment thereof, is increased or generated, or if the activity Zm_{—}4842_BE510522-protein is increased or generated in a non-human organism, like a microorganism or a plant cell, plant or part thereof, especially with non-targeted localization, whereby the respective line discloses in column 7 serine. For example, an increase of the serine of at least 1 percent, particularly in a range of 28 to 95-percent is conferred as compared to a corresponding non-transformed wild type non-human organism.

[22933] Accordingly, in one embodiment, an increase of tyrosine in a non-human organism, as compared to a corresponding non-transformed wild type non-human organism, is conferred in the process of the invention, if the activity of a polypeptide showing the activity of a Zm_{—}4842_BE510522-protein, or if the activity of the polypeptide Zm_{—}4842_BE510522, preferably represented by SEQ ID NO. 68414, or a homolog or fragment thereof, or if the activity of a polypeptide encoded by a nucleic acid molecule comprising the nucleic acid SEQ ID NO. 68413, preferably the coding region thereof, or a homolog or fragment thereof, e.g. derived from Zea mays, is increased or generated. For example the activity of a nucleic acid molecule or a polypeptide comprising the nucleic acid, preferably the coding region thereof, or polypeptide or the consensus sequence or the polypeptide motif, as depicted in Table I, II or IV, application No. 3, column 5 or 8 in the respective same line as the nucleic acid molecule SEQ ID NO. 68413 or polypeptide SEQ ID NO. 68414, respectively, or a homolog or a fragment thereof, is increased or generated, or if the activity Zm_{—}4842_BE510522-protein is increased or generated in a non-human organism, like a microorganism or a plant cell, plant or part thereof, especially with non-targeted localization, whereby the respective line discloses in column 7 tyrosine. For example, an increase of the tyrosine of at least 1 percent, particularly in a range of 67 to 154-percent is conferred as compared to a corresponding non-transformed wild type non-human organism.

[22934] Accordingly, in one embodiment, an increase of 5-oxoproline in a non-human organism, as compared to a corresponding non-transformed wild type non-human organism, is conferred in the process of the invention, if the activity of a polypeptide showing the activity of a Zm_{—}4842_BE510522-protein, or if the activity of the polypeptide Zm_{—}4842_BE510522, preferably represented by SEQ ID NO. 68414, or a homolog or fragment thereof, or if the activity of a polypeptide encoded by a nucleic acid molecule comprising the nucleic acid SEQ ID NO. 68413, preferably the coding region thereof, or a homolog or fragment thereof, e.g. derived from Zea mays, is increased or generated. For example the activity of a nucleic acid molecule or a polypeptide comprising the nucleic acid, preferably the coding region thereof, or polypeptide or the consensus sequence or the polypeptide motif, as depicted in Table I, II or IV, application No. 3, column 5 or 8 in the respective same line as the nucleic acid molecule SEQ ID NO. 68413 or polypeptide SEQ ID NO. 68414, respectively, or a homolog or a fragment thereof, is increased or generated, or if the activity Zm_{—}4842_BE510522-protein is increased or generated in a non-human organism, like a microorganism or a plant cell, plant or part thereof, especially with non-targeted localization, whereby the respective line discloses in column 7 5-oxoproline. For example, an increase of the 5-oxoproline of at least 1 percent, particularly in a range of 33 to 173-percent is conferred as compared to a corresponding non-transformed wild type non-human organism.

[22935] [0096.1.1.3] to [0103.1.1.3] for the disclosure of these paragraphs see [0096.1.1.1] to [0103.1.1.1] above.

[22936] In this paragraph “A” means “Goffeau et al., Science 274 (5287), 546 (1996)”, “B” means “Blattner et al., Science 277 (5331), 1453 (1997)”, “C” means “Nakamura et al., Nucleic Acids Res. 28(1), 72 (2000)”, “D” means “deposition of the sequences to the EMBL/GenBank/DDBJ databases under “Sequencing of the draft genome assembly of Azotobacter vinelandii AvOP”. in June 2005 by Copeland et al.”, “E” means “Henne et al., Nat. Biotechnol. 22 (5), 547 (2004)”, “F” means “Kaul et al., Nature 408 (6814), 796 (2000)”, and “G” means “Matsumoto et al., Nature 436 (7052), 793 (2005)”.

[22937] The nucleic acid sequence of 47266012_SOYBEAN from Glycine max, e.g. as shown in the respective line in column 5 of Table I, application no. 3, is unpublished. And the activity of the gene product thereof is the activity of 47266012-protein.

[22938] Accordingly, in one embodiment, the process of the present invention for producing aspartate in a non-human organism, like a microorganism or a plant or a part thereof, comprises increasing or generating the activity of a gene product with the activity of a gene product conferring the activity of “47266012-protein”, especially from Glycine max or its functional equivalent or its homolog, e.g. the increase of
[22939] (a) a gene product of a gene comprising the nucleic acid molecule as shown in the respective line in column 5 of Table I, application no. 3, preferably the coding region thereof, or a homolog or a fragment thereof, and being depicted in the same respective line as said 47266012_SOYBEAN, or a functional equivalent or a homolog thereof as shown in column 8 of Table I, application no. 3, preferably the coding region thereof, particularly a homolog or functional equivalent as shown in column 8 of Table I B, application no. 3, and being depicted in the same respective line as said 47266012_SOYBEAN, and preferably the activity is increased non-targeted, or
[22940] (b) a polypeptide comprising a polypeptide, a consensus sequence or at least a polypeptide motif as shown in the respective line in column 5 of Table II or in column 8 of Table IV, application no. 3, respectively, and being depicted in the same respective line as said 47266012_SOYBEAN, or a functional equivalent or a homolog thereof as depicted in column 8 of Table II, application no. 3, preferably a homolog or functional equivalent as depicted in column 8 of Table II B, application no. 3, and being depicted in the same respective line as said 47266012_SOYBEAN, and preferably the activity is increased non-targeted

[22941] Accordingly, in one embodiment, the molecule which activity is to be increased in the process of the invention is the gene product with an activity as a “47266012-protein”, preferably it is the molecule of section (a) or (b) of this paragraph.

[22942] In particular, it was observed that in plants, especially in Arabidopsis thaliana, increasing or generating the activity of a gene product non-targeted with the activity of a “47266012-protein”, preferably being encoded by a gene comprising the nucleic acid sequence SEQ ID NO. 15187, preferably the coding region thereof, conferred the production of or the increase in aspartate compared with the wild type control.

[22943] The nucleic acid sequence of 47266012_SOYBEAN from Glycine max, e.g. as shown in the respective line in column 5 of Table I, application no. 3, is unpublished. And the activity of the gene product thereof is the activity of 47266012-protein.

[22944] Accordingly, in one embodiment, the process of the present invention for producing tyrosine in a non-human organism, like a microorganism or a plant or a part thereof, comprises increasing or generating the activity of a gene product with the activity of a gene product conferring the activity of “47266012-protein”, especially from Glycine max or its functional equivalent or its homolog, e.g. the increase of
[22945] (a) a gene product of a gene comprising the nucleic acid molecule as shown in the respective line in column 5 of Table I, application no. 3, preferably the coding region thereof, or a homolog or a fragment thereof, and being depicted in the same respective line as said 47266012_SOYBEAN, or a functional equivalent or a homolog thereof as shown in column 8 of Table I, application no. 3, preferably the coding region thereof, particularly a homolog or functional equivalent as shown in column 8 of Table I B, application no. 3, and being depicted in the same respective line as said 47266012_SOYBEAN, and preferably the activity is increased non-targeted, or
[22946] (b) a polypeptide comprising a polypeptide, a consensus sequence or at least a polypeptide motif as shown in the respective line in column 5 of Table II or in column 8 of Table IV, application no. 3, respectively, and being depicted in the same respective line as said 47266012_SOYBEAN, or a functional equivalent or a homolog thereof as depicted in column 8 of Table II, application no. 3, preferably a homolog or functional equivalent as depicted in column 8 of Table II B, application no. 3, and being depicted in the same respective line as said 47266012_SOYBEAN, and preferably the activity is increased non-targeted.

[22947] Accordingly, in one embodiment, the molecule which activity is to be increased in the process of the invention is the gene product with an activity as a “47266012-protein”, preferably it is the molecule of section (a) or (b) of this paragraph.

[22948] In particular, it was observed that in plants, especially in Arabidopsis thaliana, increasing or generating the activity of a gene product non-targeted with the activity of a “47266012-protein”, preferably being encoded by a gene comprising the nucleic acid sequence SEQ ID NO. 15187, preferably the coding region thereof, conferred the production of or the increase in tyrosine compared with the wild type control.

[22949] The nucleic acid sequence of 47266012_SOYBEAN from Glycine max, e.g. as shown in the respective line in column 5 of Table I, application no. 3, is unpublished. And the activity of the gene product thereof is the activity of 47266012-protein.

[22950] Accordingly, in one embodiment, the process of the present invention for producing 5-oxoproline in a non-human organism, like a microorganism or a plant or a part thereof, comprises increasing or generating the activity of a gene product with the activity of a gene product conferring the activity of “47266012-protein”, especially from Glycine max or its functional equivalent or its homolog, e.g. the increase of
[22951] (a) a gene product of a gene comprising the nucleic acid molecule as shown in the respective line in column 5 of Table I, application no. 3, preferably the coding region thereof, or a homolog or a fragment thereof, and being depicted in the same respective line as said 47266012_SOYBEAN, or a functional equivalent or a homolog thereof as shown in column 8 of Table I, application no. 3, preferably the coding region thereof, particularly a homolog or functional equivalent as shown in column 8 of Table I B, application no. 3, and being depicted in the same respective line as said 47266012_SOYBEAN, and preferably the activity is increased non-targeted, or
[22952] (b) a polypeptide comprising a polypeptide, a consensus sequence or at least a polypeptide motif as shown in the respective line in column 5 of Table II or in column 8 of Table IV, application no. 3, respectively, and being depicted in the same respective line as said 47266012_SOYBEAN, or a functional equivalent or a homolog thereof as depicted in column 8 of Table II, application no. 3, preferably a homolog or functional equivalent as depicted in column 8 of Table II B, application no. 3, and being depicted in the same respective line as said 47266012_SOYBEAN, and preferably the activity is increased non-targeted.

[22953] Accordingly, in one embodiment, the molecule which activity is to be increased in the process of the invention is the gene product with an activity as a “47266012-protein”, preferably it is the molecule of section (a) or (b) of this paragraph.

[22954] In particular, it was observed that in plants, especially in Arabidopsis thaliana, increasing or generating the activity of a gene product non-targeted with the activity of a “47266012-protein”, preferably being encoded by a gene comprising the nucleic acid sequence SEQ ID NO. 15187, preferably the coding region thereof, conferred the production of or the increase in 5-oxoproline compared with the wild type control.

[22955] The nucleic acid sequence of 49747384_SOYBEAN from Glycine max, e.g. as shown in the respective line in column 5 of Table I, application no. 3, is unpublished. And the activity of the gene product thereof is the activity of 49747384_SOYBEAN-protein.

[22956] Accordingly, in one embodiment, the process of the present invention for producing aspartate in a non-human organism, like a microorganism or a plant or a part thereof, comprises increasing or generating the activity of a gene product with the activity of a gene product conferring the activity of “49747384_SOYBEAN-protein”, especially from Glycine max or its functional equivalent or its homolog, e.g. the increase of
[22957] (a) a gene product of a gene comprising the nucleic acid molecule as shown in the respective line in column 5 of Table I, application no. 3, preferably the coding region thereof, or a homolog or a fragment thereof, and being depicted in the same respective line as said 49747384_SOYBEAN, or a functional equivalent or a homolog thereof as shown in column 8 of Table I, application no. 3, preferably the coding region thereof, particularly a homolog or functional equivalent as shown in column 8 of Table I B, application no. 3, and being depicted in the same respective line as said 49747384_SOYBEAN, and preferably the activity is increased non-targeted, or
[22958] (b) a polypeptide comprising a polypeptide, a consensus sequence or at least a polypeptide motif as shown in the respective line in column 5 of Table II or in column 8 of Table IV, application no. 3, respectively, and being depicted in the same respective line as said 49747384_SOYBEAN, or a functional equivalent or a homolog thereof as depicted in col 1 0 umn 8 of Table II, application no. 3, preferably a homolog or functional equivalent as depicted in column 8 of Table II B, application no. 3, and being depicted in the same respective line as said 49747384_SOYBEAN, and preferably the activity is increased non-targeted.

[22959] Accordingly, in one embodiment, the molecule which activity is to be increased in the process of the invention is the gene product with an activity as a “49747384_SOYBEAN-protein”, preferably it is the molecule of section (a) or (b) of this paragraph.

[22960] In particular, it was observed that in plants, especially in Arabidopsis thaliana, increasing or generating the activity of a gene product non-targeted with the activity of a “49747384_SOYBEAN-protein”, preferably being encoded by a gene comprising the nucleic acid sequence SEQ ID NO. 69, preferably the coding region thereof, conferred the production of or the increase in aspartate compared with the wild type control.

[22961] The nucleic acid sequence of 49747384_SOYBEAN from Glycine max, e.g. as shown in the respective line in column 5 of Table I, application no. 3, is unpublished. And the activity of the gene product thereof is the activity of 49747384_SOYBEAN-protein.

[22962] Accordingly, in one embodiment, the process of the present invention for producing tyrosine in a non-human organism, like a microorganism or a plant or a part thereof, comprises increasing or generating the activity of a gene product with the activity of a gene product conferring the activity of “49747384_SOYBEAN-protein”, especially from Glycine max or its functional equivalent or its homolog, e.g. the increase of
[22963] (a) a gene product of a gene comprising the nucleic acid molecule as shown in the respective line in column 5 of Table I, application no. 3, preferably the coding region thereof, or a homolog or a fragment thereof, and being depicted in the same respective line as said 49747384_SOYBEAN, or a functional equivalent or a homolog thereof as shown in column 8 of Table I, application no. 3, preferably the coding region thereof, particularly a homolog or functional equivalent as shown in column 8 of Table I B, application no. 3, and being depicted in the same respective line as said 49747384_SOYBEAN, and preferably the activity is increased non-targeted, or
[22964] (b) a polypeptide comprising a polypeptide, a consensus sequence or at least a polypeptide motif as shown in the respective line in column 5 of Table II or in column 8 of Table IV, application no. 3, respectively, and being depicted in the same respective line as said 49747384_SOYBEAN, or a functional equivalent or a homolog thereof as depicted in column 8 of Table II, application no. 3, preferably a homolog or functional equivalent as depicted in column 8 of Table II B, application no. 3, and being depicted in the same respective line as said 49747384_SOYBEAN, and preferably the activity is increased non-targeted

[22965] Accordingly, in one embodiment, the molecule which activity is to be increased in the process of the invention is the gene product with an activity as a “49747384_SOYBEAN-protein”, preferably it is the molecule of section (a) or (b) of this paragraph.

[22966] In particular, it was observed that in plants, especially in Arabidopsis thaliana, increasing or generating the activity of a gene product non-targeted with the activity of a “49747384_SOYBEAN-protein”, preferably being encoded by a gene comprising the nucleic acid sequence SEQ ID NO. 69, preferably the coding region thereof, conferred the production of or the increase in tyrosine compared with the wild type control.

[22967] The nucleic acid sequence of 49747384_SOYBEAN from Glycine max, e.g. as shown in the respective line in column 5 of Table I, application no. 3, is unpublished. And the activity of the gene product thereof is the activity of 49747384_SOYBEAN-protein.

[22968] Accordingly, in one embodiment, the process of the present invention for producing 5-oxoproline in a non-human organism, like a microorganism or a plant or a part thereof, comprises increasing or generating the activity of a gene product with the activity of a gene product conferring the activity of “49747384_SOYBEAN-protein”, especially from Glycine max or its functional equivalent or its homolog, e.g. the increase of
[22969] (a) a gene product of a gene comprising the nucleic acid molecule as shown in the respective line in column 5 of Table I, application no. 3, preferably the coding region thereof, or a homolog or a fragment thereof, and being depicted in the same respective line as said 49747384_SOYBEAN, or a functional equivalent or a homolog thereof as shown in column 8 of Table I, application no. 3, preferably the coding region thereof, particularly a homolog or functional equivalent as shown in column 8 of Table I B, application no. 3, and being depicted in the same respective line as said 49747384_SOYBEAN, and preferably the activity is increased non-targeted, or
[22970] (b) a polypeptide comprising a polypeptide, a consensus sequence or at least a polypeptide motif as shown in the respective line in column 5 of Table II or in column 8 of Table IV, application no. 3, respectively, and being depicted in the same respective line as said 49747384_SOYBEAN, or a functional equivalent or a homolog thereof as depicted in column 8 of Table II, application no. 3, preferably a homolog or functional equivalent as depicted in column 8 of Table II B, application no. 3, and being depicted in the same respective line as said 49747384_SOYBEAN, and preferably the activity is increased non-targeted.

[22971] Accordingly, in one embodiment, the molecule which activity is to be increased in the process of the invention is the gene product with an activity as a “49747384_SOYBEAN-protein”, preferably it is the molecule of section (a) or (b) of this paragraph.

[22972] In particular, it was observed that in plants, especially in Arabidopsis thaliana, increasing or generating the activity of a gene product non-targeted with the activity of a “49747384_SOYBEAN-protein”, preferably being encoded by a gene comprising the nucleic acid sequence SEQ ID NO. 69, preferably the coding region thereof, conferred the production of or the increase in 5-oxoproline compared with the wild type control.

[22973] The nucleic acid sequence of 51340801_CANOLA from Brassica napus, e.g. as shown in the respective line in column 5 of Table I, application no. 3, is unpublished. And the activity of the gene product thereof is the activity of pyruvate kinase.

[22974] Accordingly, in one embodiment, the process of the present invention for producing alanine in a non-human organism, like a microorganism or a plant or a part thereof, comprises increasing or generating the activity of a gene product with the activity of a gene product conferring the activity of “pyruvate kinase”, especially from Brassica napus or its functional equivalent or its homolog, e.g. the increase of
[22975] (a) a gene product of a gene comprising the nucleic acid molecule as shown in the respective line in column 5 of Table I, application no. 3, preferably the coding region thereof, or a homolog or a fragment thereof, and being depicted in the same respective line as said 51340801_CANOLA, or a functional equivalent or a homolog thereof as shown in column 8 of Table I, application no. 3, preferably the coding region thereof, particularly a homolog or functional equivalent as shown in column 8 of Table I B, application no. 3, and being depicted in the same respective line as said 51340801_CANOLA, and preferably the activity is increased plastidic, or
[22976] (b) a polypeptide comprising a polypeptide, a consensus sequence or at least a polypeptide motif as shown in the respective line in column 5 of Table II or in column 8 of Table IV, application no. 3, respectively, and being depicted in the same respective line as said 51340801_CANOLA, or a functional equivalent or a homolog thereof as depicted in column 8 of Table II, application no. 3, preferably a homolog or functional equivalent as depicted in column 8 of Table II B, application no. 3, and being depicted in the same respective line as said 51340801_CANOLA, and preferably the activity is increased plastidic.

[22977] Accordingly, in one embodiment, the molecule which activity is to be increased in the process of the invention is the gene product with an activity as a “pyruvate kinase”, preferably it is the molecule of section (a) or (b) of this paragraph.

[22978] In particular, it was observed that in plants, especially in Arabidopsis thaliana, increasing or generating the activity of a gene product plastidic with the activity of a “pyruvate kinase”, preferably being encoded by a gene comprising the nucleic acid sequence SEQ ID NO. 15532, preferably the coding region thereof, conferred the production of or the increase in alanine compared with the wild type control.

[22979] The nucleic acid sequence of 51340801_CANOLA from Brassica napus, e.g. as shown in the respective line in column 5 of Table I, application no. 3, is unpublished. And the activity of the gene product thereof is the activity of pyruvate kinase.

[22980] Accordingly, in one embodiment, the process of the present invention for producing phenylalanine in a non-human organism, like a microorganism or a plant or a part thereof, comprises increasing or generating the activity of a gene product with the activity of a gene product conferring the activity of “pyruvate kinase”, especially from Brassica napus or its functional equivalent or its homolog, e.g. the increase of
[22981] (a) a gene product of a gene comprising the nucleic acid molecule as shown in the respective line in column 5 of Table I, application no. 3, preferably the coding region thereof, or a homolog or a fragment thereof, and being depicted in the same respective line as said 51340801_CANOLA, or a functional equivalent or a homolog thereof as shown in column 8 of Table I, application no. 3, preferably the coding region thereof, particularly a homolog or functional equivalent as shown in column 8 of Table I B, application no. 3, and being depicted in the same respective line as said 51340801_CANOLA, and preferably the activity is increased plastidic, or
[22982] (b) a polypeptide comprising a polypeptide, a consensus sequence or at least a polypeptide motif as shown in the respective line in column 5 of Table II or in column 8 of Table IV, application no. 3, respectively, and being depicted in the same respective line as said 51340801_CANOLA, or a functional equivalent or a homolog thereof as depicted in column 8 of Table II, application no. 3, preferably a homolog or functional equivalent as depicted in column 8 of Table II B, application no. 3, and being depicted in the same respective line as said 51340801_CANOLA, and preferably the activity is increased plastidic.

[22983] Accordingly, in one embodiment, the molecule which activity is to be increased in the process of the invention is the gene product with an activity as a “pyruvate kinase”, preferably it is the molecule of section (a) or (b) of this paragraph.

[22984] In particular, it was observed that in plants, especially in Arabidopsis thaliana, increasing or generating the activity of a gene product plastidic with the activity of a “pyruvate kinase”, preferably being encoded by a gene comprising the nucleic acid sequence SEQ ID NO. 15532, preferably the coding region thereof, conferred the production of or the increase in phenylalanine compared with the wild type control.

[22985] The nucleic acid sequence of 51340801_CANOLA from Brassica napus, e.g. as shown in the respective line in column 5 of Table I, application no. 3, is unpublished. And the activity of the gene product thereof is the activity of pyruvate kinase.

[22986] Accordingly, in one embodiment, the process of the present invention for producing tyrosine in a non-human organism, like a microorganism or a plant or a part thereof, comprises increasing or generating the activity of a gene product with the activity of a gene product conferring the activity of “pyruvate kinase”, especially from Brassica napus or its functional equivalent or its homolog, e.g. the increase of
[22987] (a) a gene product of a gene comprising the nucleic acid molecule as shown in the respective line in column 5 of Table I, application no. 3, preferably the coding region thereof, or a homolog or a fragment thereof, and being depicted in the same respective line as said 51340801_CANOLA, or a functional equivalent or a homolog thereof as shown in column 8 of Table I, application no. 3, preferably the coding region thereof, particularly a homolog or functional equivalent as shown in column 8 of Table I B, application no. 3, and being depicted in the same respective line as said 51340801_CANOLA, and preferably the activity is increased plastidic, or
[22988] (b) a polypeptide comprising a polypeptide, a consensus sequence or at least a polypeptide motif as shown in the respective line in column 5 of Table II or in column 8 of Table IV, application no. 3, respectively, and being depicted in the same respective line as said 51340801_CANOLA, or a functional equivalent or a homolog thereof as depicted in column 8 of Table II, application no. 3, preferably a homolog or functional equivalent as depicted in column 8 of Table II B, application no. 3, and being depicted in the same respective line as said 51340801_CANOLA, and preferably the activity is increased plastidic.

[22989] Accordingly, in one embodiment, the molecule which activity is to be increased in the process of the invention is the gene product with an activity as a “pyruvate kinase”, preferably it is the molecule of section (a) or (b) of this paragraph.

[22990] In particular, it was observed that in plants, especially in Arabidopsis thaliana, increasing or generating the activity of a gene product plastidic with the activity of a “pyruvate kinase”, preferably being encoded by a gene comprising the nucleic acid sequence SEQ ID NO. 15532, preferably the coding region thereof, conferred the production of or the increase in tyrosine compared with the wild type control.

[22991] The nucleic acid sequence of 59547452_SOYBEAN from Glycine max, e.g. as shown in the respective line in column 5 of Table I, application no. 3, is unpublished. And the activity of the gene product thereof is the activity of acetyltransferase.

[22992] Accordingly, in one embodiment, the process of the present invention for producing citrulline in a non-human organism, like a microorganism or a plant or a part thereof, comprises increasing or generating the activity of a gene product with the activity of a gene product conferring the activity of “acetyltransferase”, especially from Glycine max or its functional equivalent or its homolog, e.g. the increase of
[22993] (a) a gene product of a gene comprising the nucleic acid molecule as shown in the respective line in column 5 of Table I, application no. 3, preferably the coding region thereof, or a homolog or a fragment thereof, and being depicted in the same respective line as said 59547452_SOYBEAN, or a functional equivalent or a homolog thereof as shown in column 8 of Table I, application no. 3, preferably the coding region thereof, particularly a homolog or functional equivalent as shown in column 8 of Table I B, application no. 3, and being depicted in the same respective line as said 59547452_SOYBEAN, and preferably the activity is increased non-targeted, or
[22994] (b) a polypeptide comprising a polypeptide, a consensus sequence or at least a polypeptide motif as shown in the respective line in column 5 of Table II or in column 8 of Table IV, application no. 3, respectively, and being depicted in the same respective line as said 59547452_SOYBEAN, or a functional equivalent or a homolog thereof as depicted in column 8 of Table II, application no. 3, preferably a homolog or functional equivalent as depicted in column 8 of Table II B, application no. 3, and being depicted in the same respective line as said 59547452_SOYBEAN, and preferably the activity is increased non-targeted.

[22995] Accordingly, in one embodiment, the molecule which activity is to be increased in the process of the invention is the gene product with an activity as a “acetyltransferase”, preferably it is the molecule of section (a) or (b) of this paragraph.

[22996] In particular, it was observed that in plants, especially in Arabidopsis thaliana, increasing or generating the activity of a gene product non-targeted with the activity of a “acetyltransferase”, preferably being encoded by a gene comprising the nucleic acid sequence SEQ ID NO. 16155, preferably the coding region thereof, conferred the production of or the increase in citrulline compared with the wild type control.

[22997] The nucleic acid sequence of 59554615_SOYBEAN from Glycine max, e.g. as shown in the respective line in column 5 of Table I, application no. 3, is unpublished. And the activity of the gene product thereof is the activity of pyruvate kinase.

[22998] Accordingly, in one embodiment, the process of the present invention for producing asparagine in a non-human organism, like a microorganism or a plant or a part thereof, comprises increasing or generating the activity of a gene product with the activity of a gene product conferring the activity of “pyruvate kinase”, especially from Glycine max or its functional equivalent or its homolog, e.g. the increase of
[22999] (a) a gene product of a gene comprising the nucleic acid molecule as shown in the respective line in column 5 of Table I, application no. 3, preferably the coding region thereof, or a homolog or a fragment thereof, and being depicted in the same respective line as said 59554615_SOYBEAN, or a functional equivalent or a homolog thereof as shown in column 8 of Table I, application no. 3, preferably the coding region thereof, particularly a homolog or functional equivalent as shown in column 8 of Table I B, application no. 3, and being depicted in the same respective line as said 59554615_SOYBEAN, and preferably the activity is increased plastidic, or
[23000] (b) a polypeptide comprising a polypeptide, a consensus sequence or at least a polypeptide motif as shown in the respective line in column 5 of Table II or in column 8 of Table IV, application no. 3, respectively, and being depicted in the same respective line as said 59554615_SOYBEAN, or a functional equivalent or a homolog thereof as depicted in column 8 of Table II, application no. 3, preferably a homolog or functional equivalent as depicted in column 8 of Table II B, application no. 3, and being depicted in the same respective line as said 59554615_SOYBEAN, and preferably the activity is increased plastidic.

[23001] Accordingly, in one embodiment, the molecule which activity is to be increased in the process of the invention is the gene product with an activity as a “pyruvate kinase”, preferably it is the molecule of section (a) or (b) of this paragraph.

[23002] In particular, it was observed that in plants, especially in Arabidopsis thaliana, increasing or generating the activity of a gene product plastidic with the activity of a “pyruvate kinase”, preferably being encoded by a gene comprising the nucleic acid sequence SEQ ID NO. 16263, preferably the coding region thereof, conferred the production of or the increase in asparagine compared with the wild type control.

[23003] The nucleic acid sequence of 59554615_SOYBEAN from Glycine max, e.g. as shown in the respective line in column 5 of Table I, application no. 3, is unpublished. And the activity of the gene product thereof is the activity of pyruvate kinase.

[23004] Accordingly, in one embodiment, the process of the present invention for producing serine in a non-human organism, like a microorganism or a plant or a part thereof, comprises increasing or generating the activity of a gene product with the activity of a gene product conferring the activity of “pyruvate kinase”, especially from Glycine max or its functional equivalent or its homolog, e.g. the increase of
[23005] (a) a gene product of a gene comprising the nucleic acid molecule as shown in the respective line in column 5 of Table I, application no. 3, preferably the coding region thereof, or a homolog or a fragment thereof, and being depicted in the same respective line as said 59554615_SOYBEAN, or a functional equivalent or a homolog thereof as shown in column 8 of Table I, application no. 3, preferably the coding region thereof, particularly a homolog or functional equivalent as shown in column 8 of Table I B, application no. 3, and being depicted in the same respective line as said 59554615_SOYBEAN, and preferably the activity is increased plastidic, or
[23006] (b) a polypeptide comprising a polypeptide, a consensus sequence or at least a polypeptide motif as shown in the respective line in column 5 of Table II or in column 8 of Table IV, application no. 3, respectively, and being depicted in the same respective line as said 59554615_SOYBEAN, or a functional equivalent or a homolog thereof as depicted in column 8 of Table II, application no. 3, preferably a homolog or functional equivalent as depicted in column 8 of Table II B, application no. 3, and being depicted in the same respective line as said 59554615_SOYBEAN, and preferably the activity is increased plastidic.

[23007] Accordingly, in one embodiment, the molecule which activity is to be increased in the process of the invention is the gene product with an activity as a “pyruvate kinase”, preferably it is the molecule of section (a) or (b) of this paragraph.

[23008] In particular, it was observed that in plants, especially in Arabidopsis thaliana, increasing or generating the activity of a gene product plastidic with the activity of a “pyruvate kinase”, preferably being encoded by a gene comprising the nucleic acid sequence SEQ ID NO. 16263, preferably the coding region thereof, conferred the production of or the increase in serine compared with the wild type control.

[23009] The nucleic acid sequence of 59582753_SOYBEAN from Glycine max, e.g. as shown in the respective line in column 5 of Table I, application no. 3, is unpublished. And the activity of the gene product thereof is the activity of glucose-6-phosphate 1-dehydrogenase.

[23010] Accordingly, in one embodiment, the process of the present invention for producing alanine in a non-human organism, like a microorganism or a plant or a part thereof, comprises increasing or generating the activity of a gene product with the activity of a gene product conferring the activity of “glucose-6-phosphate 1-dehydrogenase”, especially from Glycine max or its functional equivalent or its homolog, e.g. the increase of
[23011] (a) a gene product of a gene comprising the nucleic acid molecule as shown in the respective line in column 5 of Table I, application no. 3, preferably the coding region thereof, or a homolog or a fragment thereof, and being depicted in the same respective line as said 59582753_SOYBEAN, or a functional equivalent or a homolog thereof as shown in column 8 of Table I, application no. 3, preferably the coding region thereof, particularly a homolog or functional equivalent as shown in column 8 of Table I B, application no. 3, and being depicted in the same respective line as said 59582753_SOYBEAN, and preferably the activity is increased plastidic, or
[23012] (b) a polypeptide comprising a polypeptide, a consensus sequence or at least a polypeptide motif as shown in the respective line in column 5 of Table II or in column 8 of Table IV, application no. 3, respectively, and being depicted in the same respective line as said 59582753_SOYBEAN, or a functional equivalent or a homolog thereof as depicted in column 8 of Table II, application no. 3, preferably a homolog or functional equivalent as depicted in column 8 of Table II B, application no. 3, and being depicted in the same respective line as said 59582753_SOYBEAN, and preferably the activity is increased plastidic.

[23013] Accordingly, in one embodiment, the molecule which activity is to be increased in the process of the invention is the gene product with an activity as a “glucose-6-phosphate 1-dehydrogenase”, preferably it is the molecule of section (a) or (b) of this paragraph.

[23014] In particular, it was observed that in plants, especially in Arabidopsis thaliana, increasing or generating the activity of a gene product plastidic with the activity of a “glucose-6-phosphate 1-dehydrogenase”, preferably being encoded by a gene comprising the nucleic acid sequence SEQ ID NO. 16883, preferably the coding region thereof, conferred the production of or the increase in alanine compared with the wild type control.

[23015] The nucleic acid sequence of 59582753_SOYBEAN from Glycine max, e.g. as shown in the respective line in column 5 of Table I, application no. 3, is unpublished. And the activity of the gene product thereof is the activity of glucose-6-phosphate 1-dehydrogenase.

[23016] Accordingly, in one embodiment, the process of the present invention for producing phenylalanine in a non-human organism, like a microorganism or a plant or a part thereof, comprises increasing or generating the activity of a gene product with the activity of a gene product conferring the activity of “glucose-6-phosphate 1-dehydrogenase”, especially from Glycine max or its functional equivalent or its homolog, e.g. the increase of
[23017] (a) a gene product of a gene comprising the nucleic acid molecule as shown in the respective line in column 5 of Table I, application no. 3, preferably the coding region thereof, or a homolog or a fragment thereof, and being depicted in the same respective line as said 59582753_SOYBEAN, or a functional equivalent or a homolog thereof as shown in column 8 of Table I, application no. 3, preferably the coding region thereof, particularly a homolog or functional equivalent as shown in column 8 of Table I B, application no. 3, and being depicted in the same respective line as said 59582753_SOYBEAN, and preferably the activity is increased plastidic, or
[23018] (b) a polypeptide comprising a polypeptide, a consensus sequence or at least a polypeptide motif as shown in the respective line in column 5 of Table II or in column 8 of Table IV, application no. 3, respectively, and being depicted in the same respective line as said 59582753_SOYBEAN, or a functional equivalent or a homolog thereof as depicted in column 8 of Table II, application no. 3, preferably a homolog or functional equivalent as depicted in column 8 of Table II B, application no. 3, and being depicted in the same respective line as said 59582753_SOYBEAN, and preferably the activity is increased plastidic.

[23019] Accordingly, in one embodiment, the molecule which activity is to be increased in the process of the invention is the gene product with an activity as a “glucose-6-phosphate 1-dehydrogenase”, preferably it is the molecule of section (a) or (b) of this paragraph.

[23020] In particular, it was observed that in plants, especially in Arabidopsis thaliana, increasing or generating the activity of a gene product plastidic with the activity of a “glucose-6-phosphate 1-dehydrogenase”, preferably being encoded by a gene comprising the nucleic acid sequence SEQ ID NO. 16883, preferably the coding region thereof, conferred the production of or the increase in phenylalanine compared with the wild type control.

[23021] The nucleic acid sequence of 59582753_SOYBEAN from Glycine max, e.g. as shown in the respective line in column 5 of Table I, application no. 3, is unpublished. And the activity of the gene product thereof is the activity of glucose-6-phosphate 1-dehydrogenase.

[23022] Accordingly, in one embodiment, the process of the present invention for producing tyrosine in a non-human organism, like a microorganism or a plant or a part thereof, comprises increasing or generating the activity of a gene product with the activity of a gene product conferring the activity of “glucose-6-phosphate 1-dehydrogenase”, especially from Glycine max or its functional equivalent or its homolog, e.g. the increase of
[23023] (a) a gene product of a gene comprising the nucleic acid molecule as shown in the respective line in column 5 of Table I, application no. 3, preferably the coding region thereof, or a homolog or a fragment thereof, and being depicted in the same respective line as said 59582753_SOYBEAN, or a functional equivalent or a homolog thereof as shown in column 8 of Table I, application no. 3, preferably the coding region thereof, particularly a homolog or functional equivalent as shown in column 8 of Table I B, application no. 3, and being depicted in the same respective line as said 59582753_SOYBEAN, and preferably the activity is increased plastidic, or
[23024] (b) a polypeptide comprising a polypeptide, a consensus sequence or at least a polypeptide motif as shown in the respective line in column 5 of Table II or in column 8 of Table IV, application no. 3, respectively, and being depicted in the same respective line as said 59582753_SOYBEAN, or a functional equivalent or a homolog thereof as depicted in column 8 of Table II, application no. 3, preferably a homolog or functional equivalent as depicted in column 8 of Table II B, application no. 3, and being depicted in the same respective line as said 59582753_SOYBEAN, and preferably the activity is increased plastidic.

[23025] Accordingly, in one embodiment, the molecule which activity is to be increased in the process of the invention is the gene product with an activity as a “glucose-6-phosphate 1-dehydrogenase”, preferably it is the molecule of section (a) or (b) of this paragraph.

[23026] In particular, it was observed that in plants, especially in Arabidopsis thaliana, increasing or generating the activity of a gene product plastidic with the activity of a “glucose-6-phosphate 1-dehydrogenase”, preferably being encoded by a gene comprising the nucleic acid sequence SEQ ID NO. 16883, preferably the coding region thereof, conferred the production of or the increase in tyrosine compared with the wild type control.

[23027] The nucleic acid sequence of AAC43185 from Arabidopsis thaliana, e.g. as shown in the respective line in column 5 of Table I, application no. 3, has been published in F. And the activity of the gene product thereof is the activity of amino acid acetyltransferase.

[23028] Accordingly, in one embodiment, the process of the present invention for producing alanine in a non-human organism, like a microorganism or a plant or a part thereof, comprises increasing or generating the activity of a gene product with the activity of a gene product conferring the activity of “amino acid acetyltransferase”, especially from Arabidopsis thaliana or its functional equivalent or its homolog, e.g. the increase of
[23029] (a) a gene product of a gene comprising the nucleic acid molecule as shown in the respective line in column 5 of Table I, application no. 3, preferably the coding region thereof, or a homolog or a fragment thereof, and being depicted in the same respective line as said AAC43185, or a functional equivalent or a homolog thereof as shown in column 8 of Table I, application no. 3, preferably the coding region thereof, particularly a homolog or functional equivalent as shown in column 8 of Table I B, application no. 3, and being depicted in the same respective line as said AAC43185, and preferably the activity is increased plastidic, or
[23030] (b) a polypeptide comprising a polypeptide, a consensus sequence or at least a polypeptide motif as shown in the respective line in column 5 of Table II or in column 8 of Table IV, application no. 3, respectively, and being depicted in the same respective line as said AAC43185, or a functional equivalent or a homolog thereof as depicted in column 8 of Table II, application no. 3, preferably a homolog or functional equivalent as depicted in column 8 of Table II B, application no. 3, and being depicted in the same respective line as said AAC43185, and preferably the activity is increased plastidic.

[23031] Accordingly, in one embodiment, the molecule which activity is to be increased in the process of the invention is the gene product with an activity as a “amino acid acetyltransferase”, preferably it is the molecule of section (a) or (b) of this paragraph.

[23032] In particular, it was observed that in plants, especially in Arabidopsis thaliana, increasing or generating the activity of a gene product plastidic with the activity of a “amino acid acetyltransferase”, preferably being encoded by a gene comprising the nucleic acid sequence SEQ ID NO. 17356, preferably the coding region thereof, conferred the production of or the increase in alanine compared with the wild type control.

[23033] The nucleic acid sequence of AAC43185 from Arabidopsis thaliana, e.g. as shown in the respective line in column 5 of Table I, application no. 3, has been published in F. And the activity of the gene product thereof is the activity of amino acid acetyltransferase.

[23034] Accordingly, in one embodiment, the process of the present invention for producing citrulline in a non-human organism, like a microorganism or a plant or a part thereof, comprises increasing or generating the activity of a gene product with the activity of a gene product conferring the activity of “amino acid acetyltransferase”, especially from Arabidopsis thaliana or its functional equivalent or its homolog, e.g. the increase of
[23035] (a) a gene product of a gene comprising the nucleic acid molecule as shown in the respective line in column 5 of Table I, application no. 3, preferably the coding region thereof, or a homolog or a fragment thereof, and being depicted in the same respective line as said AAC43185, or a functional equivalent or a homolog thereof as shown in column 8 of Table I, application no. 3, preferably the coding region thereof, particularly a homolog or functional equivalent as shown in column 8 of Table I B, application no. 3, and being depicted in the same respective line as said AAC43185, and preferably the activity is increased plastidic, or
[23036] (b) a polypeptide comprising a polypeptide, a consensus sequence or at least a polypeptide motif as shown in the respective line in column 5 of Table II or in column 8 of Table IV, application no. 3, respectively, and being depicted in the same respective line as said AAC43185, or a functional equivalent or a homolog thereof as depicted in column 8 of Table II, application no. 3, preferably a homolog or functional equivalent as depicted in column 8 of Table II B, application no. 3, and being depicted in the same respective line as said AAC43185, and preferably the activity is increased plastidic.

[23037] Accordingly, in one embodiment, the molecule which activity is to be increased in the process of the invention is the gene product with an activity as a “amino acid acetyltransferase”, preferably it is the molecule of section (a) or (b) of this paragraph.

[23038] In particular, it was observed that in plants, especially in Arabidopsis thaliana, increasing or generating the activity of a gene product plastidic with the activity of a “amino acid acetyltransferase”, preferably being encoded by a gene comprising the nucleic acid sequence SEQ ID NO. 17356, preferably the coding region thereof, conferred the production of or the increase in citrulline compared with the wild type control.

[23039] The nucleic acid sequence of AAC43185 from Arabidopsis thaliana, e.g. as shown in the respective line in column 5 of Table I, application no. 3, has been published in F. And the activity of the gene product thereof is the activity of amino acid acetyltransferase.

[23040] Accordingly, in one embodiment, the process of the present invention for producing phenylalanine in a non-human organism, like a microorganism or a plant or a part thereof, comprises increasing or generating the activity of a gene product with the activity of a gene product conferring the activity of “amino acid acetyltransferase”, especially from Arabidopsis thaliana or its functional equivalent or its homolog, e.g. the increase of
[23041] (a) a gene product of a gene comprising the nucleic acid molecule as shown in the respective line in column 5 of Table I, application no. 3, preferably the coding region thereof, or a homolog or a fragment thereof, and being depicted in the same respective line as said AAC43185, or a functional equivalent or a homolog thereof as shown in column 8 of Table I, application no. 3, preferably the coding region thereof, particularly a homolog or functional equivalent as shown in column 8 of Table I B, application no. 3, and being depicted in the same respective line as said AAC43185, and preferably the activity is increased plastidic, or
[23042] (b) a polypeptide comprising a polypeptide, a consensus sequence or at least a polypeptide motif as shown in the respective line in column 5 of Table II or in column 8 of Table IV, application no. 3, respectively, and being depicted in the same respective line as said AAC43185, or a functional equivalent or a homolog thereof as depicted in column 8 of Table II, application no. 3, preferably a homolog or functional equivalent as depicted in column 8 of Table II B, application no. 3, and being depicted in the same respective line as said AAC43185, and preferably the activity is increased plastidic.

[23043] Accordingly, in one embodiment, the molecule which activity is to be increased in the process of the invention is the gene product with an activity as a “amino acid acetyltransferase”, preferably it is the molecule of section (a) or (b) of this paragraph.

[23044] In particular, it was observed that in plants, especially in Arabidopsis thaliana, increasing or generating the activity of a gene product plastidic with the activity of a “amino acid acetyltransferase”, preferably being encoded by a gene comprising the nucleic acid sequence SEQ ID NO. 17356, preferably the coding region thereof, conferred the production of or the increase in phenylalanine compared with the wild type control.

[23045] The nucleic acid sequence of At1g07430 from Arabidopsis thaliana, e.g. as shown in the respective line in column 5 of Table I, application no. 3, has been published in F. And the activity of the gene product thereof is the activity of protein phosphatase.

[23046] Accordingly, in one embodiment, the process of the present invention for producing citrulline in a non-human organism, like a microorganism or a plant or a part thereof, comprises increasing or generating the activity of a gene product with the activity of a gene product conferring the activity of “protein phosphatase”, especially from Arabidopsis thaliana or its functional equivalent or its homolog, e.g. the increase of
[23047] (a) a gene product of a gene comprising the nucleic acid molecule as shown in the respective line in column 5 of Table I, application no. 3, preferably the coding region thereof, or a homolog or a fragment thereof, and being depicted in the same respective line as said At1g07430, or a functional equivalent or a homolog thereof as shown in column 8 of Table I, application no. 3, preferably the coding region thereof, particularly a homolog or functional equivalent as shown in column 8 of Table I B, application no. 3, and being depicted in the same respective line as said At1g07430, and preferably the activity is increased non-targeted, or
[23048] (b) a polypeptide comprising a polypeptide, a consensus sequence or at least a polypeptide motif as shown in the respective line in column 5 of Table II or in column 8 of Table IV, application no. 3, respectively, and being depicted in the same respective line as said At1g07430, or a functional equivalent or a homolog thereof as depicted in column 8 of Table II, application no. 3, preferably a homolog or functional equivalent as depicted in column 8 of Table II B, application no. 3, and being depicted in the same respective line as said At1g07430, and preferably the activity is increased non-targeted.

[23049] Accordingly, in one embodiment, the molecule which activity is to be increased in the process of the invention is the gene product with an activity as a “protein phosphatase”, preferably it is the molecule of section (a) or (b) of this paragraph.

[23050] In particular, it was observed that in plants, especially in Arabidopsis thaliana, increasing or generating the activity of a gene product non-targeted with the activity of a “protein phosphatase”, preferably being encoded by a gene comprising the nucleic acid sequence SEQ ID NO. 17451, preferably the coding region thereof, conferred the production of or the increase in citrulline compared with the wild type control.

[23051] The nucleic acid sequence of At1g14490 from Arabidopsis thaliana, e.g. as shown in the respective line in column 5 of Table I, application no. 3, has been published in F. And the activity of the gene product thereof is the activity of DNA-binding protein.

[23052] Accordingly, in one embodiment, the process of the present invention for producing glycine in a non-human organism, like a microorganism or a plant or a part thereof, comprises increasing or generating the activity of a gene product with the activity of a gene product conferring the activity of “DNA-binding protein”, especially from Arabidopsis thaliana or its functional equivalent or its homolog, e.g. the increase of
[23053] (a) a gene product of a gene comprising the nucleic acid molecule as shown in the respective line in column 5 of Table I, application no. 3, preferably the coding region thereof, or a homolog or a fragment thereof, and being depicted in the same respective line as said At1g14490, or a functional equivalent or a homolog thereof as shown in column 8 of Table I, application no. 3, preferably the coding region thereof, particularly a homolog or functional equivalent as shown in column 8 of Table I B, application no. 3, and being depicted in the same respective line as said At1g14490, and preferably the activity is increased non-targeted, or
[23054] (b) a polypeptide comprising a polypeptide, a consensus sequence or at least a polypeptide motif as shown in the respective line in column 5 of Table II or in column 8 of Table IV, application no. 3, respectively, and being depicted in the same respective line as said At1g14490, or a functional equivalent or a homolog thereof as depicted in column 8 of Table II, application no. 3, preferably a homolog or functional equivalent as depicted in column 8 of Table II B, application no. 3, and being depicted in the same respective line as said At1g14490, and preferably the activity is increased non-targeted.

[23055] Accordingly, in one embodiment, the molecule which activity is to be increased in the process of the invention is the gene product with an activity as a “DNA-binding protein”, preferably it is the molecule of section (a) or (b) of this paragraph.

[23056] In particular, it was observed that in plants, especially in Arabidopsis thaliana, increasing or generating the activity of a gene product non-targeted with the activity of a “DNA-binding protein”, preferably being encoded by a gene comprising the nucleic acid sequence SEQ ID NO. 385, preferably the coding region thereof, conferred the production of or the increase in glycine compared with the wild type control.

[23057] The nucleic acid sequence of At1g14490 from Arabidopsis thaliana, e.g. as shown in the respective line in column 5 of Table I, application no. 3, has been published in F. And the activity of the gene product thereof is the activity of DNA-binding protein.

[23058] Accordingly, in one embodiment, the process of the present invention for producing serine in a non-human organism, like a microorganism or a plant or a part thereof, comprises increasing or generating the activity of a gene product with the activity of a gene product conferring the activity of “DNA-binding protein”, especially from Arabidopsis thaliana or its functional equivalent or its homolog, e.g. the increase of
[23059] (a) a gene product of a gene comprising the nucleic acid molecule as shown in the respective line in column 5 of Table I, application no. 3, preferably the coding region thereof, or a homolog or a fragment thereof, and being depicted in the same respective line as said At1g14490, or a functional equivalent or a homolog thereof as shown in column 8 of Table I, application no. 3, preferably the coding region thereof, particularly a homolog or functional equivalent as shown in column 8 of Table I B, application no. 3, and being depicted in the same respective line as said At1g14490, and preferably the activity is increased non-targeted, or
[23060] (b) a polypeptide comprising a polypeptide, a consensus sequence or at least a polypeptide motif as shown in the respective line in column 5 of Table II or in column 8 of Table IV, application no. 3, respectively, and being depicted in the same respective line as said At1g14490, or a functional equivalent or a homolog thereof as depicted in column 8 of Table II, application no. 3, preferably a homolog or functional equivalent as depicted in column 8 of Table II B, application no. 3, and being depicted in the same respective line as said At1g14490, and preferably the activity is increased non-targeted.

[23061] Accordingly, in one embodiment, the molecule which activity is to be increased in the process of the invention is the gene product with an activity as a “DNA-binding protein”, preferably it is the molecule of section (a) or (b) of this paragraph.

[23062] In particular, it was observed that in plants, especially in Arabidopsis thaliana, increasing or generating the activity of a gene product non-targeted with the activity of a “DNA-binding protein”, preferably being encoded by a gene comprising the nucleic acid sequence SEQ ID NO. 385, preferably the coding region thereof, conferred the production of or the increase in serine compared with the wild type control.

[23063] The nucleic acid sequence of At1g17440 from Arabidopsis thaliana, e.g. as shown in the respective line in column 5 of Table I, application no. 3, has been published in F. And the activity of the gene product thereof is the activity of At1g17440-protein.

[23064] Accordingly, in one embodiment, the process of the present invention for producing phenylalanine in a non-human organism, like a microorganism or a plant or a part thereof, comprises increasing or generating the activity of a gene product with the activity of a gene product conferring the activity of “At1g17440-protein”, especially from Arabidopsis thaliana or its functional equivalent or its homolog, e.g. the increase of
[23065] (a) a gene product of a gene comprising the nucleic acid molecule as shown in the respective line in column 5 of Table I, application no. 3, preferably the coding region thereof, or a homolog or a fragment thereof, and being depicted in the same respective line as said At1g17440, or a functional equivalent or a homolog thereof as shown in column 8 of Table I, application no. 3, preferably the coding region thereof, particularly a homolog or functional equivalent as shown in column 8 of Table I B, application no. 3, and being depicted in the same respective line as said At1g17440, and preferably the activity is increased non-targeted, or
[23066] (b) a polypeptide comprising a polypeptide, a consensus sequence or at least a polypeptide motif as shown in the respective line in column 5 of Table II or in column 8 of Table IV, application no. 3, respectively, and being depicted in the same respective line as said At1g17440, or a functional equivalent or a homolog thereof as depicted in column 8 of Table II, application no. 3, preferably a homolog or functional equivalent as depicted in column 8 of Table II B, application no. 3, and being depicted in the same respective line as said At1g17440, and preferably the activity is increased non-targeted.

[23067] Accordingly, in one embodiment, the molecule which activity is to be increased in the process of the invention is the gene product with an activity as a “At1g17440-protein”, preferably it is the molecule of section (a) or (b) of this paragraph.

[23068] In particular, it was observed that in plants, especially in Arabidopsis thaliana, increasing or generating the activity of a gene product non-targeted with the activity of a “At1g17440-protein”, preferably being encoded by a gene comprising the nucleic acid sequence SEQ ID NO. 17601, preferably the coding region thereof, conferred the production of or the increase in phenylalanine compared with the wild type control.

[23069] The nucleic acid sequence of At1g17440 from Arabidopsis thaliana, e.g. as shown in the respective line in column 5 of Table I, application no. 3, has been published in F. And the activity of the gene product thereof is the activity of At1g17440-protein.

[23070] Accordingly, in one embodiment, the process of the present invention for producing tyrosine in a non-human organism, like a microorganism or a plant or a part thereof, comprises increasing or generating the activity of a gene product with the activity of a gene product conferring the activity of “At1g17440-protein”, especially from Arabidopsis thaliana or its functional equivalent or its homolog, e.g. the increase of
[23071] (a) a gene product of a gene comprising the nucleic acid molecule as shown in the respective line in column 5 of Table I, application no. 3, preferably the coding region thereof, or a homolog or a fragment thereof, and being depicted in the same respective line as said At1g17440, or a functional equivalent or a homolog thereof as shown in column 8 of Table I, application no. 3, preferably the coding region thereof, particularly a homolog or functional equivalent as shown in column 8 of Table I B, application no. 3, and being depicted in the same respective line as said At1g17440, and preferably the activity is increased non-targeted, or
[23072] (b) a polypeptide comprising a polypeptide, a consensus sequence or at least a polypeptide motif as shown in the respective line in column 5 of Table II or in column 8 of Table IV, application no. 3, respectively, and being depicted in the same respective line as said At1g17440, or a functional equivalent or a homolog thereof as depicted in column 8 of Table II, application no. 3, preferably a homolog or functional equivalent as depicted in column 8 of Table II B, application no. 3, and being depicted in the same respective line as said At1g17440, and preferably the activity is increased non-targeted.

[23073] Accordingly, in one embodiment, the molecule which activity is to be increased in the process of the invention is the gene product with an activity as a “At1g17440-protein”, preferably it is the molecule of section (a) or (b) of this paragraph.

[23074] In particular, it was observed that in plants, especially in Arabidopsis thaliana, increasing or generating the activity of a gene product non-targeted with the activity of a “At1g17440-protein”, preferably being encoded by a gene comprising the nucleic acid sequence SEQ ID NO. 17601, preferably the coding region thereof, conferred the production of or the increase in tyrosine compared with the wild type control.

[23075] The nucleic acid sequence of At1g19800 from Arabidopsis thaliana, e.g. as shown in the respective line in column 5 of Table I, application no. 3, has been published in F. And the activity of the gene product thereof is the activity of At1g19800-protein.

[23076] Accordingly, in one embodiment, the process of the present invention for producing aspartate in a non-human organism, like a microorganism or a plant or a part thereof, comprises increasing or generating the activity of a gene product with the activity of a gene product conferring the activity of “At1g19800-protein”, especially from Arabidopsis thaliana or its functional equivalent or its homolog, e.g. the increase of
[23077] (a) a gene product of a gene comprising the nucleic acid molecule as shown in the respective line in column 5 of Table I, application no. 3, preferably the coding region thereof, or a homolog or a fragment thereof, and being depicted in the same respective line as said At1g19800, or a functional equivalent or a homolog thereof as shown in column 8 of Table I, application no. 3, preferably the coding region thereof, particularly a homolog or functional equivalent as shown in column 8 of Table I B, application no. 3, and being depicted in the same respective line as said At1g19800, and preferably the activity is increased non-targeted, or
[23078] (b) a polypeptide comprising a polypeptide, a consensus sequence or at least a polypeptide motif as shown in the respective line in column 5 of Table II or in column 8 of Table IV, application no. 3, respectively, and being depicted in the same respective line as said At1g19800, or a functional equivalent or a homolog thereof as depicted in column 8 of Table II, application no. 3, preferably a homolog or functional equivalent as depicted in column 8 of Table II B, application no. 3, and being depicted in the same respective line as said At1g19800, and preferably the activity is increased non-targeted.

[23079] Accordingly, in one embodiment, the molecule which activity is to be increased in the process of the invention is the gene product with an activity as a “At1g19800-protein”, preferably it is the molecule of section (a) or (b) of this paragraph.

[23080] In particular, it was observed that in plants, especially in Arabidopsis thaliana, increasing or generating the activity of a gene product non-targeted with the activity of a “At1g19800-protein”, preferably being encoded by a gene comprising the nucleic acid sequence SEQ ID NO. 17637, preferably the coding region thereof, conferred the production of or the increase in aspartate compared with the wild type control.

[23081] The nucleic acid sequence of At1g19800 from Arabidopsis thaliana, e.g. as shown in the respective line in column 5 of Table I, application no. 3, has been published in F. And the activity of the gene product thereof is the activity of At1g19800-protein.

[23082] Accordingly, in one embodiment, the process of the present invention for producing citrulline in a non-human organism, like a microorganism or a plant or a part thereof, comprises increasing or generating the activity of a gene product with the activity of a gene product conferring the activity of “At1g19800-protein”, especially from Arabidopsis thaliana or its functional equivalent or its homolog, e.g. the increase of
[23083] (a) a gene product of a gene comprising the nucleic acid molecule as shown in the respective line in column 5 of Table I, application no. 3, preferably the coding region thereof, or a homolog or a fragment thereof, and being depicted in the same respective line as said At1g19800, or a functional equivalent or a homolog thereof as shown in column 8 of Table I, application no. 3, preferably the coding region thereof, particularly a homolog or functional equivalent as shown in column 8 of Table I B, application no. 3, and being depicted in the same respective line as said At1g19800, and preferably the activity is increased non-targeted, or
[23084] (b) a polypeptide comprising a polypeptide, a consensus sequence or at least a polypeptide motif as shown in the respective line in column 5 of Table II or in column 8 of Table IV, application no. 3, respectively, and being depicted in the same respective line as said At1g19800, or a functional equivalent or a homolog thereof as depicted in column 8 of Table II, application no. 3, preferably a homolog or functional equivalent as depicted in column 8 of Table II B, application no. 3, and being depicted in the same respective line as said At1g19800, and preferably the activity is increased non-targeted.

[23085] Accordingly, in one embodiment, the molecule which activity is to be increased in the process of the invention is the gene product with an activity as a “At1g19800-protein”, preferably it is the molecule of section (a) or (b) of this paragraph.

[23086] In particular, it was observed that in plants, especially in Arabidopsis thaliana, increasing or generating the activity of a gene product non-targeted with the activity of a “At1g19800-protein”, preferably being encoded by a gene comprising the nucleic acid sequence SEQ ID NO. 17637, preferably the coding region thereof, conferred the production of or the increase in citrulline compared with the wild type control.

[23087] The nucleic acid sequence of At1g19800 from Arabidopsis thaliana, e.g. as shown in the respective line in column 5 of Table I, application no. 3, has been published in F. And the activity of the gene product thereof is the activity of At1g19800-protein.

[23088] Accordingly, in one embodiment, the process of the present invention for producing tyrosine in a non-human organism, like a microorganism or a plant or a part thereof, comprises increasing or generating the activity of a gene product with the activity of a gene product conferring the activity of “At1g19800-protein”, especially from Arabidopsis thaliana or its functional equivalent or its homolog, e.g. the increase of
[23089] (a) a gene product of a gene comprising the nucleic acid molecule as shown in the respective line in column 5 of Table I, application no. 3, preferably the coding region thereof, or a homolog or a fragment thereof, and being depicted in the same respective line as said At1g19800, or a functional equivalent or a homolog thereof as shown in column 8 of Table I, application no. 3, preferably the coding region thereof, particularly a homolog or functional equivalent as shown in column 8 of Table I B, application no. 3, and being depicted in the same respective line as said At1g19800, and preferably the activity is increased non-targeted, or
[23090] (b) a polypeptide comprising a polypeptide, a consensus sequence or at least a polypeptide motif as shown in the respective line in column 5 of Table II or in column 8 of Table IV, application no. 3, respectively, and being depicted in the same respective line as said At1g19800, or a functional equivalent or a homolog thereof as depicted in column 8 of Table II, application no. 3, preferably a homolog or functional equivalent as depicted in column 8 of Table II B, application no. 3, and being depicted in the same respective line as said At1g19800, and preferably the activity is increased non-targeted.

[23091] Accordingly, in one embodiment, the molecule which activity is to be increased in the process of the invention is the gene product with an activity as a “At1g19800-protein”, preferably it is the molecule of section (a) or (b) of this paragraph.

[23092] In particular, it was observed that in plants, especially in Arabidopsis thaliana, increasing or generating the activity of a gene product non-targeted with the activity of a “At1g19800-protein”, preferably being encoded by a gene comprising the nucleic acid sequence SEQ ID NO. 17637, preferably the coding region thereof, conferred the production of or the increase in tyrosine compared with the wild type control.

[23093] The nucleic acid sequence of At1g26830 from Arabidopsis thaliana, e.g. as shown in the respective line in column 5 of Table I, application no. 3, has been published in F. And the activity of the gene product thereof is the activity of cullin.

[23094] Accordingly, in one embodiment, the process of the present invention for producing phenylalanine in a non-human organism, like a microorganism or a plant or a part thereof, comprises increasing or generating the activity of a gene product with the activity of a gene product conferring the activity of “cullin”, especially from Arabidopsis thaliana or its functional equivalent or its homolog, e.g. the increase of
[23095] (a) a gene product of a gene comprising the nucleic acid molecule as shown in the respective line in column 5 of Table I, application no. 3, preferably the coding region thereof, or a homolog or a fragment thereof, and being depicted in the same respective line as said At1g26830, or a functional equivalent or a homolog thereof as shown in column 8 of Table I, application no. 3, preferably the coding region thereof, particularly a homolog or functional equivalent as shown in column 8 of Table I B, application no. 3, and being depicted in the same respective line as said At1g26830, and preferably the activity is increased non-targeted, or
[23096] (b) a polypeptide comprising a polypeptide, a consensus sequence or at least a polypeptide motif as shown in the respective line in column 5 of Table II or in column 8 of Table IV, application no. 3, respectively, and being depicted in the same respective line as said At1g26830, or a functional equivalent or a homolog thereof as depicted in column 8 of Table II, application no. 3, preferably a homolog or functional equivalent as depicted in column 8 of Table II B, application no. 3, and being depicted in the same respective line as said At1g26830, and preferably the activity is increased non-targeted.

[23097] Accordingly, in one embodiment, the molecule which activity is to be increased in the process of the invention is the gene product with an activity as a “cullin”, preferably it is the molecule of section (a) or (b) of this paragraph.

[23098] In particular, it was observed that in plants, especially in Arabidopsis thaliana, increasing or generating the activity of a gene product non-targeted with the activity of a “cullin”, preferably being encoded by a gene comprising the nucleic acid sequence SEQ ID NO. 17701, preferably the coding region thereof, conferred the production of or the increase in phenylalanine compared with the wild type control.

[23099] The nucleic acid sequence of At1g26830 from Arabidopsis thaliana, e.g. as shown in the respective line in column 5 of Table I, application no. 3, has been published in F. And the activity of the gene product thereof is the activity of cullin.

[23100] Accordingly, in one embodiment, the process of the present invention for producing tyrosine in a non-human organism, like a microorganism or a plant or a part thereof, comprises increasing or generating the activity of a gene product with the activity of a gene product conferring the activity of “cullin”, especially from Arabidopsis thaliana or its functional equivalent or its homolog, e.g. the increase of
[23101] (a) a gene product of a gene comprising the nucleic acid molecule as shown in the respective line in column 5 of Table I, application no. 3, preferably the coding region thereof, or a homolog or a fragment thereof, and being depicted in the same respective line as said At1g26830, or a functional equivalent or a homolog thereof as shown in column 8 of Table I, application no. 3, preferably the coding region thereof, particularly a homolog or functional equivalent as shown in column 8 of Table I B, application no. 3, and being depicted in the same respective line as said At1g26830, and preferably the activity is increased non-targeted, or
[23102] (b) a polypeptide comprising a polypeptide, a consensus sequence or at least a polypeptide motif as shown in the respective line in column 5 of Table II or in column 8 of Table IV, application no. 3, respectively, and being depicted in the same respective line as said At1g26830, or a functional equivalent or a homolog thereof as depicted in column 8 of Table II, application no. 3, preferably a homolog or functional equivalent as depicted in column 8 of Table II B, application no. 3, and being depicted in the same respective line as said At1g26830, and preferably the activity is increased non-targeted.

[23103] Accordingly, in one embodiment, the molecule which activity is to be increased in the process of the invention is the gene product with an activity as a “cullin”, preferably it is the molecule of section (a) or (b) of this paragraph.

[23104] In particular, it was observed that in plants, especially in Arabidopsis thaliana, increasing or generating the activity of a gene product non-targeted with the activity of a “cullin”, preferably being encoded by a gene comprising the nucleic acid sequence SEQ ID NO. 17701, preferably the coding region thereof, conferred the production of or the increase in tyrosine compared with the wild type control.

[23105] The nucleic acid sequence of At1g31230 from Arabidopsis thaliana, e.g. as shown in the respective line in column 5 of Table I, application no. 3, has been published in F. And the activity of the gene product thereof is the activity of bifunctional aspartokinase/homoserine dehydrogenase.

[23106] Accordingly, in one embodiment, the process of the present invention for producing homoserine in a non-human organism, like a microorganism or a plant or a part thereof, comprises increasing or generating the activity of a gene product with the activity of a gene product conferring the activity of “bifunctional aspartokinase/homoserine dehydrogenase”, especially from Arabidopsis thaliana or its functional equivalent or its homolog, e.g. the increase of
[23107] (a) a gene product of a gene comprising the nucleic acid molecule as shown in the respective line in column 5 of Table I, application no. 3, preferably the coding region thereof, or a homolog or a fragment thereof, and being depicted in the same respective line as said At1g31230, or a functional equivalent or a homolog thereof as shown in column 8 of Table I, application no. 3, preferably the coding region thereof, particularly a homolog or functional equivalent as shown in column 8 of Table I B, application no. 3, and being depicted in the same respective line as said At1g31230, and preferably the activity is increased non-targeted, or
[23108] (b) a polypeptide comprising a polypeptide, a consensus sequence or at least a polypeptide motif as shown in the respective line in column 5 of Table II or in column 8 of Table IV, application no. 3, respectively, and being depicted in the same respective line as said At1g31230, or a functional equivalent or a homolog thereof as depicted in column 8 of Table II, application no. 3, preferably a homolog or functional equivalent as depicted in column 8 of Table II B, application no. 3, and being depicted in the same respective line as said At1g31230, and preferably the activity is increased non-targeted.

[23109] Accordingly, in one embodiment, the molecule which activity is to be increased in the process of the invention is the gene product with an activity as a “bifunctional aspartokinase/homoserine dehydrogenase”, preferably it is the molecule of section (a) or (b) of this paragraph.

[23110] In particular, it was observed that in plants, especially in Arabidopsis thaliana, increasing or generating the activity of a gene product non-targeted with the activity of a “bifunctional aspartokinase/homoserine dehydrogenase”, preferably being encoded by a gene comprising the nucleic acid sequence SEQ ID NO. 627, preferably the coding region thereof, conferred the production of or the increase in homoserine compared with the wild type control.

[23111] The nucleic acid sequence of At1g36730 from Arabidopsis thaliana, e.g. as shown in the respective line in column 5 of Table I, application no. 3, has been published in F. And the activity of the gene product thereof is the activity of eukaryotic translation initiation factor 5.

[23112] Accordingly, in one embodiment, the process of the present invention for producing aspartate in a non-human organism, like a microorganism or a plant or a part thereof, comprises increasing or generating the activity of a gene product with the activity of a gene product conferring the activity of “eukaryotic translation initiation factor 5”, especially from Arabidopsis thaliana or its functional equivalent or its homolog, e.g. the increase of
[23113] (a) a gene product of a gene comprising the nucleic acid molecule as shown in the respective line in column 5 of Table I, application no. 3, preferably the coding region thereof, or a homolog or a fragment thereof, and being depicted in the same respective line as said At1g36730, or a functional equivalent or a homolog thereof as shown in column 8 of Table I, application no. 3, preferably the coding region thereof, particularly a homolog or functional equivalent as shown in column 8 of Table I B, application no. 3, and being depicted in the same respective line as said At1g36730, and preferably the activity is increased non-targeted, or
[23114] (b) a polypeptide comprising a polypeptide, a consensus sequence or at least a polypeptide motif as shown in the respective line in column 5 of Table II or in column 8 of Table IV, application no. 3, respectively, and being depicted in the same respective line as said At1g36730, or a functional equivalent or a homolog thereof as depicted in column 8 of Table II, application no. 3, preferably a homolog or functional equivalent as depicted in column 8 of Table II B, application no. 3, and being depicted in the same respective line as said At1g36730, and preferably the activity is increased non-targeted.

[23115] Accordingly, in one embodiment, the molecule which activity is to be increased in the process of the invention is the gene product with an activity as a “eukaryotic translation initiation factor 5”, preferably it is the molecule of section (a) or (b) of this paragraph.

[23116] In particular, it was observed that in plants, especially in Arabidopsis thaliana, increasing or generating the activity of a gene product non-targeted with the activity of a “eukaryotic translation initiation factor 5”, preferably being encoded by a gene comprising the nucleic acid sequence SEQ ID NO. 17968, preferably the coding region thereof, conferred the production of or the increase in aspartate compared with the wild type control.

[23117] The nucleic acid sequence of At1g36730 from Arabidopsis thaliana, e.g. as shown in the respective line in column 5 of Table I, application no. 3, has been published in F. And the activity of the gene product thereof is the activity of eukaryotic translation initiation factor 5.

[23118] Accordingly, in one embodiment, the process of the present invention for producing phenylalanine in a non-human organism, like a microorganism or a plant or a part thereof, comprises increasing or generating the activity of a gene product with the activity of a gene product conferring the activity of “eukaryotic translation initiation factor 5”, especially from Arabidopsis thaliana or its functional equivalent or its homolog, e.g. the increase of
[23119] (a) a gene product of a gene comprising the nucleic acid molecule as shown in the respective line in column 5 of Table I, application no. 3, preferably the coding region thereof, or a homolog or a fragment thereof, and being depicted in the same respective line as said At1g36730, or a functional equivalent or a homolog thereof as shown in column 8 of Table I, application no. 3, preferably the coding region thereof, particularly a homolog or functional equivalent as shown in column 8 of Table I B, application no. 3, and being depicted in the same respective line as said At1g36730, and preferably the activity is increased non-targeted, or
[23120] (b) a polypeptide comprising a polypeptide, a consensus sequence or at least a polypeptide motif as shown in the respective line in column 5 of Table II or in column 8 of Table IV, application no. 3, respectively, and being depicted in the same respective line as said At1g36730, or a functional equivalent or a homolog thereof as depicted in column 8 of Table II, application no. 3, preferably a homolog or functional equivalent as depicted in column 8 of Table II B, application no. 3, and being depicted in the same respective line as said At1g36730, and preferably the activity is increased non-targeted.

[23121] Accordingly, in one embodiment, the molecule which activity is to be increased in the process of the invention is the gene product with an activity as a “eukaryotic translation initiation factor 5”, preferably it is the molecule of section (a) or (b) of this paragraph.

[23122] In particular, it was observed that in plants, especially in Arabidopsis thaliana, increasing or generating the activity of a gene product non-targeted with the activity of a “eukaryotic translation initiation factor 5”, preferably being encoded by a gene comprising the nucleic acid sequence SEQ ID NO. 17968, preferably the coding region thereof, conferred the production of or the increase in phenylalanine compared with the wild type control.

[23123] The nucleic acid sequence of At1g36730 from Arabidopsis thaliana, e.g. as shown in the respective line in column 5 of Table I, application no. 3, has been published in F. And the activity of the gene product thereof is the activity of eukaryotic translation initiation factor 5.

[23124] Accordingly, in one embodiment, the process of the present invention for producing serine in a non-human organism, like a microorganism or a plant or a part thereof, comprises increasing or generating the activity of a gene product with the activity of a gene product conferring the activity of “eukaryotic translation initiation factor 5”, especially from Arabidopsis thaliana or its functional equivalent or its homolog, e.g. the increase of
[23125] (a) a gene product of a gene comprising the nucleic acid molecule as shown in the respective line in column 5 of Table I, application no. 3, preferably the coding region thereof, or a homolog or a fragment thereof, and being depicted in the same respective line as said At1g36730, or a functional equivalent or a homolog thereof as shown in column 8 of Table I, application no. 3, preferably the coding region thereof, particularly a homolog or functional equivalent as shown in column 8 of Table I B, application no. 3, and being depicted in the same respective line as said At1g36730, and preferably the activity is increased non-targeted, or
[23126] (b) a polypeptide comprising a polypeptide, a consensus sequence or at least a polypeptide motif as shown in the respective line in column 5 of Table II or in column 8 of Table IV, application no. 3, respectively, and being depicted in the same respective line as said At1g36730, or a functional equivalent or a homolog thereof as depicted in column 8 of Table II, application no. 3, preferably a homolog or functional equivalent as depicted in column 8 of Table II B, application no. 3, and being depicted in the same respective line as said At1g36730, and preferably the activity is increased non-targeted.

[23127] Accordingly, in one embodiment, the molecule which activity is to be increased in the process of the invention is the gene product with an activity as a “eukaryotic translation initiation factor 5”, preferably it is the molecule of section (a) or (b) of this paragraph.

[23128] In particular, it was observed that in plants, especially in Arabidopsis thaliana, increasing or generating the activity of a gene product non-targeted with the activity of a “eukaryotic translation initiation factor 5”, preferably being encoded by a gene comprising the nucleic acid sequence SEQ ID NO. 17968, preferably the coding region thereof, conferred the production of or the increase in serine compared with the wild type control.

[23129] The nucleic acid sequence of At1g36730 from Arabidopsis thaliana, e.g. as shown in the respective line in column 5 of Table I, application no. 3, has been published in F. And the activity of the gene product thereof is the activity of eukaryotic translation initiation factor 5.

[23130] Accordingly, in one embodiment, the process of the present invention for producing tyrosine in a non-human organism, like a microorganism or a plant or a part thereof, comprises increasing or generating the activity of a gene product with the activity of a gene product conferring the activity of “eukaryotic translation initiation factor 5”, especially from Arabidopsis thaliana or its functional equivalent or its homolog, e.g. the increase of
[23131] (a) a gene product of a gene comprising the nucleic acid molecule as shown in the respective line in column 5 of Table I, application no. 3, preferably the coding region thereof, or a homolog or a fragment thereof, and being depicted in the same respective line as said At1g36730, or a functional equivalent or a homolog thereof as shown in column 8 of Table I, application no. 3, preferably the coding region thereof, particularly a homolog or functional equivalent as shown in column 8 of Table I B, application no. 3, and being depicted in the same respective line as said At1g36730, and preferably the activity is increased non-targeted, or
[23132] (b) a polypeptide comprising a polypeptide, a consensus sequence or at least a polypeptide motif as shown in the respective line in column 5 of Table II or in column 8 of Table IV, application no. 3, respectively, and being depicted in the same respective line as said At1g36730, or a functional equivalent or a homolog thereof as depicted in column 8 of Table II, application no. 3, preferably a homolog or functional equivalent as depicted in column 8 of Table II B, application no. 3, and being depicted in the same respective line as said At1g36730, and preferably the activity is increased non-targeted.

[23133] Accordingly, in one embodiment, the molecule which activity is to be increased in the process of the invention is the gene product with an activity as a “eukaryotic translation initiation factor 5”, preferably it is the molecule of section (a) or (b) of this paragraph.

[23134] In particular, it was observed that in plants, especially in Arabidopsis thaliana, increasing or generating the activity of a gene product non-targeted with the activity of a “eukaryotic translation initiation factor 5”, preferably being encoded by a gene comprising the nucleic acid sequence SEQ ID NO. 17968, preferably the coding region thereof, conferred the production of or the increase in tyrosine compared with the wild type control.

[23135] The nucleic acid sequence of At1g36730 from Arabidopsis thaliana, e.g. as shown in the respective line in column 5 of Table I, application no. 3, has been published in F. And the activity of the gene product thereof is the activity of eukaryotic translation initiation factor 5.

[23136] Accordingly, in one embodiment, the process of the present invention for producing 5-oxoproline in a non-human organism, like a microorganism or a plant or a part thereof, comprises increasing or generating the activity of a gene product with the activity of a gene product conferring the activity of “eukaryotic translation initiation factor 5”, especially from Arabidopsis thaliana or its functional equivalent or its homolog, e.g. the increase of
[23137] (a) a gene product of a gene comprising the nucleic acid molecule as shown in the respective line in column 5 of Table I, application no. 3, preferably the coding region thereof, or a homolog or a fragment thereof, and being depicted in the same respective line as said At1g36730, or a functional equivalent or a homolog thereof as shown in column 8 of Table I, application no. 3, preferably the coding region thereof, particularly a homolog or functional equivalent as shown in column 8 of Table I B, application no. 3, and being depicted in the same respective line as said At1g36730, and preferably the activity is increased non-targeted, or
[23138] (b) a polypeptide comprising a polypeptide, a consensus sequence or at least a polypeptide motif as shown in the respective line in column 5 of Table II or in column 8 of Table IV, application no. 3, respectively, and being depicted in the same respective line as said At1g36730, or a functional equivalent or a homolog thereof as depicted in column 8 of Table II, application no. 3, preferably a homolog or functional equivalent as depicted in column 8 of Table II B, application no. 3, and being depicted in the same respective line as said At1g36730, and preferably the activity is increased non-targeted.

[23139] Accordingly, in one embodiment, the molecule which activity is to be increased in the process of the invention is the gene product with an activity as a “eukaryotic translation initiation factor 5”, preferably it is the molecule of section (a) or (b) of this paragraph.

[23140] In particular, it was observed that in plants, especially in Arabidopsis thaliana, increasing or generating the activity of a gene product non-targeted with the activity of a “eukaryotic translation initiation factor 5”, preferably being encoded by a gene comprising the nucleic acid sequence SEQ ID NO. 17968, preferably the coding region thereof, conferred the production of or the increase in 5-oxoproline compared with the wild type control.

[23141] The nucleic acid sequence of At1g43850 from Arabidopsis thaliana, e.g. as shown in the respective line in column 5 of Table I, application no. 3, has been published in F. And the activity of the gene product thereof is the activity of transcriptional regulator.

[23142] Accordingly, in one embodiment, the process of the present invention for producing phenylalanine in a non-human organism, like a microorganism or a plant or a part thereof, comprises increasing or generating the activity of a gene product with the activity of a gene product conferring the activity of “transcriptional regulator”, especially from Arabidopsis thaliana or its functional equivalent or its homolog, e.g. the increase of
[23143] (a) a gene product of a gene comprising the nucleic acid molecule as shown in the respective line in column 5 of Table I, application no. 3, preferably the coding region thereof, or a homolog or a fragment thereof, and being depicted in the same respective line as said At1g43850, or a functional equivalent or a homolog thereof as shown in column 8 of Table I, application no. 3, preferably the coding region thereof, particularly a homolog or functional equivalent as shown in column 8 of Table I B, application no. 3, and being depicted in the same respective line as said At1g43850, and preferably the activity is increased non-targeted, or
[23144] (b) a polypeptide comprising a polypeptide, a consensus sequence or at least a polypeptide motif as shown in the respective line in column 5 of Table II or in column 8 of Table IV, application no. 3, respectively, and being depicted in the same respective line as said At1g43850, or a functional equivalent or a homolog thereof as depicted in column 8 of Table II, application no. 3, preferably a homolog or functional equivalent as depicted in column 8 of Table II B, application no. 3, and being depicted in the same respective line as said At1g43850, and preferably the activity is increased non-targeted.

[23145] Accordingly, in one embodiment, the molecule which activity is to be increased in the process of the invention is the gene product with an activity as a “transcriptional regulator”, preferably it is the molecule of section (a) or (b) of this paragraph.

[23146] In particular, it was observed that in plants, especially in Arabidopsis thaliana, increasing or generating the activity of a gene product non-targeted with the activity of a “transcriptional regulator”, preferably being encoded by a gene comprising the nucleic acid sequence SEQ ID NO. 18070, preferably the coding region thereof, conferred the production of or the increase in phenylalanine compared with the wild type control.

[23147] The nucleic acid sequence of At1g43850 from Arabidopsis thaliana, e.g. as shown in the respective line in column 5 of Table I, application no. 3, has been published in F. And the activity of the gene product thereof is the activity of transcriptional regulator.

[23148] Accordingly, in one embodiment, the process of the present invention for producing serine in a non-human organism, like a microorganism or a plant or a part thereof, comprises increasing or generating the activity of a gene product with the activity of a gene product conferring the activity of “transcriptional regulator”, especially from Arabidopsis thaliana or its functional equivalent or its homolog, e.g. the increase of
[23149] (a) a gene product of a gene comprising the nucleic acid molecule as shown in the respective line in column 5 of Table I, application no. 3, preferably the coding region thereof, or a homolog or a fragment thereof, and being depicted in the same respective line as said At1g43850, or a functional equivalent or a homolog thereof as shown in column 8 of Table I, application no. 3, preferably the coding region thereof, particularly a homolog or functional equivalent as shown in column 8 of Table I B, application no. 3, and being depicted in the same respective line as said At1g43850, and preferably the activity is increased non-targeted, or
[23150] (b) a polypeptide comprising a polypeptide, a consensus sequence or at least a polypeptide motif as shown in the respective line in column 5 of Table II or in column 8 of Table IV, application no. 3, respectively, and being depicted in the same respective line as said At1g43850, or a functional equivalent or a homolog thereof as depicted in column 8 of Table II, application no. 3, preferably a homolog or functional equivalent as depicted in column 8 of Table II B, application no. 3, and being depicted in the same respective line as said At1g43850, and preferably the activity is increased non-targeted.

[23151] Accordingly, in one embodiment, the molecule which activity is to be increased in the process of the invention is the gene product with an activity as a “transcriptional regulator”, preferably it is the molecule of section (a) or (b) of this paragraph.

[23152] In particular, it was observed that in plants, especially in Arabidopsis thaliana, increasing or generating the activity of a gene product non-targeted with the activity of a “transcriptional regulator”, preferably being encoded by a gene comprising the nucleic acid sequence SEQ ID NO. 18070, preferably the coding region thereof, conferred the production of or the increase in serine compared with the wild type control.

[23153] The nucleic acid sequence of At1g43850 from Arabidopsis thaliana, e.g. as shown in the respective line in column 5 of Table I, application no. 3, has been published in F. And the activity of the gene product thereof is the activity of transcriptional regulator.

[23154] Accordingly, in one embodiment, the process of the present invention for producing tyrosine in a non-human organism, like a microorganism or a plant or a part thereof, comprises increasing or generating the activity of a gene product with the activity of a gene product conferring the activity of “transcriptional regulator”, especially from Arabidopsis thaliana or its functional equivalent or its homolog, e.g. the increase of
[23155] (a) a gene product of a gene comprising the nucleic acid molecule as shown in the respective line in column 5 of Table I, application no. 3, preferably the coding region thereof, or a homolog or a fragment thereof, and being depicted in the same respective line as said At1g43850, or a functional equivalent or a homolog thereof as shown in column 8 of Table I, application no. 3, preferably the coding region thereof, particularly a homolog or functional equivalent as shown in column 8 of Table I B, application no. 3, and being depicted in the same respective line as said At1g43850, and preferably the activity is increased non-targeted, or
[23156] (b) a polypeptide comprising a polypeptide, a consensus sequence or at least a polypeptide motif as shown in the respective line in column 5 of Table II or in column 8 of Table IV, application no. 3, respectively, and being depicted in the same respective line as said At1g43850, or a functional equivalent or a homolog thereof as depicted in column 8 of Table II, application no. 3, preferably a homolog or functional equivalent as depicted in column 8 of Table II B, application no. 3, and being depicted in the same respective line as said At1g43850, and preferably the activity is increased non-targeted.

[23157] Accordingly, in one embodiment, the molecule which activity is to be increased in the process of the invention is the gene product with an activity as a “transcriptional regulator”, preferably it is the molecule of section (a) or (b) of this paragraph.

[23158] In particular, it was observed that in plants, especially in Arabidopsis thaliana, increasing or generating the activity of a gene product non-targeted with the activity of a “transcriptional regulator”, preferably being encoded by a gene comprising the nucleic acid sequence SEQ ID NO. 18070, preferably the coding region thereof, conferred the production of or the increase in tyrosine compared with the wild type control.

[23159] The nucleic acid sequence of At1g43850 from Arabidopsis thaliana, e.g. as shown in the respective line in column 5 of Table I, application no. 3, has been published in F. And the activity of the gene product thereof is the activity of transcriptional regulator.

[23160] Accordingly, in one embodiment, the process of the present invention for producing 5-oxoproline in a non-human organism, like a microorganism or a plant or a part thereof, comprises increasing or generating the activity of a gene product with the activity of a gene product conferring the activity of “transcriptional regulator”, especially from Arabidopsis thaliana or its functional equivalent or its homolog, e.g. the increase of
[23161] (a) a gene product of a gene comprising the nucleic acid molecule as shown in the respective line in column 5 of Table I, application no. 3, preferably the coding region thereof, or a homolog or a fragment thereof, and being depicted in the same respective line as said At1g43850, or a functional equivalent or a homolog thereof as shown in column 8 of Table I, application no. 3, preferably the coding region thereof, particularly a homolog or functional equivalent as shown in column 8 of Table I B, application no. 3, and being depicted in the same respective line as said At1g43850, and preferably the activity is increased non-targeted, or
[23162] (b) a polypeptide comprising a polypeptide, a consensus sequence or at least a polypeptide motif as shown in the respective line in column 5 of Table II or in column 8 of Table IV, application no. 3, respectively, and being depicted in the same respective line as said At1g43850, or a functional equivalent or a homolog thereof as depicted in column 8 of Table II, application no. 3, preferably a homolog or functional equivalent as depicted in column 8 of Table II B, application no. 3, and being depicted in the same respective line as said At1g43850, and preferably the activity is increased non-targeted.

[23163] Accordingly, in one embodiment, the molecule which activity is to be increased in the process of the invention is the gene product with an activity as a “transcriptional regulator”, preferably it is the molecule of section (a) or (b) of this paragraph.

[23164] In particular, it was observed that in plants, especially in Arabidopsis thaliana, increasing or generating the activity of a gene product non-targeted with the activity of a “transcriptional regulator”, preferably being encoded by a gene comprising the nucleic acid sequence SEQ ID NO. 18070, preferably the coding region thereof, conferred the production of or the increase in 5-oxoproline compared with the wild type control.

[23165] The nucleic acid sequence of At1g48040 from Arabidopsis thaliana, e.g. as shown in the respective line in column 5 of Table I, application no. 3, has been published in F. And the activity of the gene product thereof is the activity of protein phosphatase.

[23166] Accordingly, in one embodiment, the process of the present invention for producing glycine in a non-human organism, like a microorganism or a plant or a part thereof, comprises increasing or generating the activity of a gene product with the activity of a gene product conferring the activity of “protein phosphatase”, especially from Arabidopsis thaliana or its functional equivalent or its homolog, e.g. the increase of
[23167] (a) a gene product of a gene comprising the nucleic acid molecule as shown in the respective line in column 5 of Table I, application no. 3, preferably the coding region thereof, or a homolog or a fragment thereof, and being depicted in the same respective line as said At1g48040, or a functional equivalent or a homolog thereof as shown in column 8 of Table I, application no. 3, preferably the coding region thereof, particularly a homolog or functional equivalent as shown in column 8 of Table I B, application no. 3, and being depicted in the same respective line as said At1g48040, and preferably the activity is increased non-targeted, or
[23168] (b) a polypeptide comprising a polypeptide, a consensus sequence or at least a polypeptide motif as shown in the respective line in column 5 of Table II or in column 8 of Table IV, application no. 3, respectively, and being depicted in the same respective line as said At1g48040, or a functional equivalent or a homolog thereof as depicted in column 8 of Table II, application no. 3, preferably a homolog or functional equivalent as depicted in column 8 of Table II B, application no. 3, and being depicted in the same respective line as said At1g48040, and preferably the activity is increased non-targeted.

[23169] Accordingly, in one embodiment, the molecule which activity is to be increased in the process of the invention is the gene product with an activity as a “protein phosphatase”, preferably it is the molecule of section (a) or (b) of this paragraph.

[23170] In particular, it was observed that in plants, especially in Arabidopsis thaliana, increasing or generating the activity of a gene product non-targeted with the activity of a “protein phosphatase”, preferably being encoded by a gene comprising the nucleic acid sequence SEQ ID NO. 812, preferably the coding region thereof, conferred the production of or the increase in glycine compared with the wild type control.

[23171] The nucleic acid sequence of At1g48260 from Arabidopsis thaliana, e.g. as shown in the respective line in column 5 of Table I, application no. 3, has been published in F. And the activity of the gene product thereof is the activity of protein kinase.

[23172] Accordingly, in one embodiment, the process of the present invention for producing phenylalanine in a non-human organism, like a microorganism or a plant or a part thereof, comprises increasing or generating the activity of a gene product with the activity of a gene product conferring the activity of “protein kinase”, especially from Arabidopsis thaliana or its functional equivalent or its homolog, e.g. the increase of
[23173] (a) a gene product of a gene comprising the nucleic acid molecule as shown in the respective line in column 5 of Table I, application no. 3, preferably the coding region thereof, or a homolog or a fragment thereof, and being depicted in the same respective line as said At1g48260, or a functional equivalent or a homolog thereof as shown in column 8 of Table I, application no. 3, preferably the coding region thereof, particularly a homolog or functional equivalent as shown in column 8 of Table I B, application no. 3, and being depicted in the same respective line as said At1g48260, and preferably the activity is increased non-targeted, or
[23174] (b) a polypeptide comprising a polypeptide, a consensus sequence or at least a polypeptide motif as shown in the respective line in column 5 of Table II or in column 8 of Table IV, application no. 3, respectively, and being depicted in the same respective line as said At1g48260, or a functional equivalent or a homolog thereof as depicted in column 8 of Table II, application no. 3, preferably a homolog or functional equivalent as depicted in column 8 of Table II B, application no. 3, and being depicted in the same respective line as said At1g48260, and preferably the activity is increased non-targeted.

[23175] Accordingly, in one embodiment, the molecule which activity is to be increased in the process of the invention is the gene product with an activity as a “protein kinase”, preferably it is the molecule of section (a) or (b) of this paragraph.

[23176] In particular, it was observed that in plants, especially in Arabidopsis thaliana, increasing or generating the activity of a gene product non-targeted with the activity of a “protein kinase”, preferably being encoded by a gene comprising the nucleic acid sequence SEQ ID NO. 18235, preferably the coding region thereof, conferred the production of or the increase in phenylalanine compared with the wild type control.

[23177] The nucleic acid sequence of At1g48260 from Arabidopsis thaliana, e.g. as shown in the respective line in column 5 of Table I, application no. 3, has been published in F. And the activity of the gene product thereof is the activity of protein kinase.

[23178] Accordingly, in one embodiment, the process of the present invention for producing serine in a non-human organism, like a microorganism or a plant or a part thereof, comprises increasing or generating the activity of a gene product with the activity of a gene product conferring the activity of “protein kinase”, especially from Arabidopsis thaliana or its functional equivalent or its homolog, e.g. the increase of
[23179] (a) a gene product of a gene comprising the nucleic acid molecule as shown in the respective line in column 5 of Table I, application no. 3, preferably the coding region thereof, or a homolog or a fragment thereof, and being depicted in the same respective line as said At1g48260, or a functional equivalent or a homolog thereof as shown in column 8 of Table I, application no. 3, preferably the coding region thereof, particularly a homolog or functional equivalent as shown in column 8 of Table I B, application no. 3, and being depicted in the same respective line as said At1g48260, and preferably the activity is increased non-targeted, or
[23180] (b) a polypeptide comprising a polypeptide, a consensus sequence or at least a polypeptide motif as shown in the respective line in column 5 of Table II or in column 8 of Table IV, application no. 3, respectively, and being depicted in the same respective line as said At1g48260, or a functional equivalent or a homolog thereof as depicted in column 8 of Table II, application no. 3, preferably a homolog or functional equivalent as depicted in column 8 of Table II B, application no. 3, and being depicted in the same respective line as said At1g48260, and preferably the activity is increased non-targeted.

[23181] Accordingly, in one embodiment, the molecule which activity is to be increased in the process of the invention is the gene product with an activity as a “protein kinase”, preferably it is the molecule of section (a) or (b) of this paragraph.

[23182] In particular, it was observed that in plants, especially in Arabidopsis thaliana, increasing or generating the activity of a gene product non-targeted with the activity of a “protein kinase”, preferably being encoded by a gene comprising the nucleic acid sequence SEQ ID NO. 18235, preferably the coding region thereof, conferred the production of or the increase in serine compared with the wild type control.

[23183] The nucleic acid sequence of At1g48260 from Arabidopsis thaliana, e.g. as shown in the respective line in column 5 of Table I, application no. 3, has been published in F. And the activity of the gene product thereof is the activity of protein kinase.

[23184] Accordingly, in one embodiment, the process of the present invention for producing tyrosine in a non-human organism, like a microorganism or a plant or a part thereof, comprises increasing or generating the activity of a gene product with the activity of a gene product conferring the activity of “protein kinase”, especially from Arabidopsis thaliana or its functional equivalent or its homolog, e.g. the increase of
[23185] (a) a gene product of a gene comprising the nucleic acid molecule as shown in the respective line in column 5 of Table I, application no. 3, preferably the coding region thereof, or a homolog or a fragment thereof, and being depicted in the same respective line as said At1g48260, or a functional equivalent or a homolog thereof as shown in column 8 of Table I, application no. 3, preferably the coding region thereof, particularly a homolog or functional equivalent as shown in column 8 of Table I B, application no. 3, and being depicted in the same respective line as said At1g48260, and preferably the activity is increased non-targeted, or
[23186] (b) a polypeptide comprising a polypeptide, a consensus sequence or at least a polypeptide motif as shown in the respective line in column 5 of Table II or in column 8 of Table IV, application no. 3, respectively, and being depicted in the same respective line as said At1g48260, or a functional equivalent or a homolog thereof as depicted in column 8 of Table II, application no. 3, preferably a homolog or functional equivalent as depicted in column 8 of Table II B, application no. 3, and being depicted in the same respective line as said At1g48260, and preferably the activity is increased non-targeted.

[23187] Accordingly, in one embodiment, the molecule which activity is to be increased in the process of the invention is the gene product with an activity as a “protein kinase”, preferably it is the molecule of section (a) or (b) of this paragraph.

[23188] In particular, it was observed that in plants, especially in Arabidopsis thaliana, increasing or generating the activity of a gene product non-targeted with the activity of a “protein kinase”, preferably being encoded by a gene comprising the nucleic acid sequence SEQ ID NO. 18235, preferably the coding region thereof, conferred the production of or the increase in tyrosine compared with the wild type control.

[23189] The nucleic acid sequence of At1g61950 from Arabidopsis thaliana, e.g. as shown in the respective line in column 5 of Table I, application no. 3, has been published in F. And the activity of the gene product thereof is the activity of calcium-dependent protein kinase.

[23190] Accordingly, in one embodiment, the process of the present invention for producing aspartate in a non-human organism, like a microorganism or a plant or a part thereof, comprises increasing or generating the activity of a gene product with the activity of a gene product conferring the activity of “calcium-dependent protein kinase”, especially from Arabidopsis thaliana or its functional equivalent or its homolog, e.g. the increase of
[23191] (a) a gene product of a gene comprising the nucleic acid molecule as shown in the respective line in column 5 of Table I, application no. 3, preferably the coding region thereof, or a homolog or a fragment thereof, and being depicted in the same respective line as said At1g61950, or a functional equivalent or a homolog thereof as shown in column 8 of Table I, application no. 3, preferably the coding region thereof, particularly a homolog or functional equivalent as shown in column 8 of Table I B, application no. 3, and being depicted in the same respective line as said At1g61950, and preferably the activity is increased non-targeted, or
[23192] (b) a polypeptide comprising a polypeptide, a consensus sequence or at least a polypeptide motif as shown in the respective line in column 5 of Table II or in column 8 of Table IV, application no. 3, respectively, and being depicted in the same respective line as said At1g61950, or a functional equivalent or a homolog thereof as depicted in column 8 of Table II, application no. 3, preferably a homolog or functional equivalent as depicted in column 8 of Table II B, application no. 3, and being depicted in the same respective line as said At1g61950, and preferably the activity is increased non-targeted.

[23193] Accordingly, in one embodiment, the molecule which activity is to be increased in the process of the invention is the gene product with an activity as a “calcium-dependent protein kinase”, preferably it is the molecule of section (a) or (b) of this paragraph.

[23194] In particular, it was observed that in plants, especially in Arabidopsis thaliana, increasing or generating the activity of a gene product non-targeted with the activity of a “calcium-dependent protein kinase”, preferably being encoded by a gene comprising the nucleic acid sequence SEQ ID NO. 18869, preferably the coding region thereof, conferred the production of or the increase in aspartate compared with the wild type control.

[23195] The nucleic acid sequence of At1g61950 from Arabidopsis thaliana, e.g. as shown in the respective line in column 5 of Table I, application no. 3, has been published in F. And the activity of the gene product thereof is the activity of calcium-dependent protein kinase.

[23196] Accordingly, in one embodiment, the process of the present invention for producing phenylalanine in a non-human organism, like a microorganism or a plant or a part thereof, comprises increasing or generating the activity of a gene product with the activity of a gene product conferring the activity of “calcium-dependent protein kinase”, especially from Arabidopsis thaliana or its functional equivalent or its homolog, e.g. the increase of
[23197] (a) a gene product of a gene comprising the nucleic acid molecule as shown in the respective line in column 5 of Table I, application no. 3, preferably the coding region thereof, or a homolog or a fragment thereof, and being depicted in the same respective line as said At1g61950, or a functional equivalent or a homolog thereof as shown in column 8 of Table I, application no. 3, preferably the coding region thereof, particularly a homolog or functional equivalent as shown in column 8 of Table I B, application no. 3, and being depicted in the same respective line as said At1g61950, and preferably the activity is increased non-targeted, or
[23198] (b) a polypeptide comprising a polypeptide, a consensus sequence or at least a polypeptide motif as shown in the respective line in column 5 of Table II or in column 8 of Table IV, application no. 3, respectively, and being depicted in the same respective line as said At1g61950, or a functional equivalent or a homolog thereof as depicted in column 8 of Table II, application no. 3, preferably a homolog or functional equivalent as depicted in column 8 of Table II B, application no. 3, and being depicted in the same respective line as said At1g61950, and preferably the activity is increased non-targeted.

[23199] Accordingly, in one embodiment, the molecule which activity is to be increased in the process of the invention is the gene product with an activity as a “calcium-dependent protein kinase”, preferably it is the molecule of section (a) or (b) of this paragraph.

[23200] In particular, it was observed that in plants, especially in Arabidopsis thaliana, increasing or generating the activity of a gene product non-targeted with the activity of a “calcium-dependent protein kinase”, preferably being encoded by a gene comprising the nucleic acid sequence SEQ ID NO. 18869, preferably the coding region thereof, conferred the production of or the increase in phenylalanine compared with the wild type control.

[23201] The nucleic acid sequence of At1g72770 from Arabidopsis thaliana, e.g. as shown in the respective line in column 5 of Table I, application no. 3, has been published in F. And the activity of the gene product thereof is the activity of protein phosphatase.

[23202] Accordingly, in one embodiment, the process of the present invention for producing alanine in a non-human organism, like a microorganism or a plant or a part thereof, comprises increasing or generating the activity of a gene product with the activity of a gene product conferring the activity of “protein phosphatase”, especially from Arabidopsis thaliana or its functional equivalent or its homolog, e.g. the increase of
[23203] (a) a gene product of a gene comprising the nucleic acid molecule as shown in the respective line in column 5 of Table I, application no. 3, preferably the coding region thereof, or a homolog or a fragment thereof, and being depicted in the same respective line as said At1g72770, or a functional equivalent or a homolog thereof as shown in column 8 of Table I, application no. 3, preferably the coding region thereof, particularly a homolog or functional equivalent as shown in column 8 of Table I B, application no. 3, and being depicted in the same respective line as said At1g72770, and preferably the activity is increased non-targeted, or
[23204] (b) a polypeptide comprising a polypeptide, a consensus sequence or at least a polypeptide motif as shown in the respective line in column 5 of Table II or in column 8 of Table IV, application no. 3, respectively, and being depicted in the same respective line as said At1g72770, or a functional equivalent or a homolog thereof as depicted in column 8 of Table II, application no. 3, preferably a homolog or functional equivalent as depicted in column 8 of Table II B, application no. 3, and being depicted in the same respective line as said At1g72770, and preferably the activity is increased non-targeted.

[23205] Accordingly, in one embodiment, the molecule which activity is to be increased in the process of the invention is the gene product with an activity as a “protein phosphatase”, preferably it is the molecule of section (a) or (b) of this paragraph.

[23206] In particular, it was observed that in plants, especially in Arabidopsis thaliana, increasing or generating the activity of a gene product non-targeted with the activity of a “protein phosphatase”, preferably being encoded by a gene comprising the nucleic acid sequence SEQ ID NO. 19419, preferably the coding region thereof, conferred the production of or the increase in alanine compared with the wild type control.

[23207] The nucleic acid sequence of At1g72770 from Arabidopsis thaliana, e.g. as shown in the respective line in column 5 of Table I, application no. 3, has been published in F. And the activity of the gene product thereof is the activity of protein phosphatase.

[23208] Accordingly, in one embodiment, the process of the present invention for producing glycine in a non-human organism, like a microorganism or a plant or a part thereof, comprises increasing or generating the activity of a gene product with the activity of a gene product conferring the activity of “protein phosphatase”, especially from Arabidopsis thaliana or its functional equivalent or its homolog, e.g. the increase of
[23209] (a) a gene product of a gene comprising the nucleic acid molecule as shown in the respective line in column 5 of Table I, application no. 3, preferably the coding region thereof, or a homolog or a fragment thereof, and being depicted in the same respective line as said At1g72770, or a functional equivalent or a homolog thereof as shown in column 8 of Table I, application no. 3, preferably the coding region thereof, particularly a homolog or functional equivalent as shown in column 8 of Table I B, application no. 3, and being depicted in the same respective line as said At1g72770, and preferably the activity is increased non-targeted, or
[23210] (b) a polypeptide comprising a polypeptide, a consensus sequence or at least a polypeptide motif as shown in the respective line in column 5 of Table II or in column 8 of Table IV, application no. 3, respectively, and being depicted in the same respective line as said At1g72770, or a functional equivalent or a homolog thereof as depicted in column 8 of Table II, application no. 3, preferably a homolog or functional equivalent as depicted in column 8 of Table II B, application no. 3, and being depicted in the same respective line as said At1g72770, and preferably the activity is increased non-targeted.

[23211] Accordingly, in one embodiment, the molecule which activity is to be increased in the process of the invention is the gene product with an activity as a “protein phosphatase”, preferably it is the molecule of section (a) or (b) of this paragraph.

[23212] In particular, it was observed that in plants, especially in Arabidopsis thaliana, increasing or generating the activity of a gene product non-targeted with the activity of a “protein phosphatase”, preferably being encoded by a gene comprising the nucleic acid sequence SEQ ID NO. 19419, preferably the coding region thereof, conferred the production of or the increase in glycine compared with the wild type control.

[23213] The nucleic acid sequence of At1g72770 from Arabidopsis thaliana, e.g. as shown in the respective line in column 5 of Table I, application no. 3, has been published in F. And the activity of the gene product thereof is the activity of protein phosphatase.

[23214] Accordingly, in one embodiment, the process of the present invention for producing tyrosine in a non-human organism, like a microorganism or a plant or a part thereof, comprises increasing or generating the activity of a gene product with the activity of a gene product conferring the activity of “protein phosphatase”, especially from Arabidopsis thaliana or its functional equivalent or its homolog, e.g. the increase of
[23215] (a) a gene product of a gene comprising the nucleic acid molecule as shown in the respective line in column 5 of Table I, application no. 3, preferably the coding region thereof, or a homolog or a fragment thereof, and being depicted in the same respective line as said At1g72770, or a functional equivalent or a homolog thereof as shown in column 8 of Table I, application no. 3, preferably the coding region thereof, particularly a homolog or functional equivalent as shown in column 8 of Table I B, application no. 3, and being depicted in the same respective line as said At1g72770, and preferably the activity is increased non-targeted, or
[23216] (b) a polypeptide comprising a polypeptide, a consensus sequence or at least a polypeptide motif as shown in the respective line in column 5 of Table II or in column 8 of Table IV, application no. 3, respectively, and being depicted in the same respective line as said At1g72770, or a functional equivalent or a homolog thereof as depicted in column 8 of Table II, application no. 3, preferably a homolog or functional equivalent as depicted in column 8 of Table II B, application no. 3, and being depicted in the same respective line as said At1g72770, and preferably the activity is increased non-targeted.

[23217] Accordingly, in one embodiment, the molecule which activity is to be increased in the process of the invention is the gene product with an activity as a “protein phosphatase”, preferably it is the molecule of section (a) or (b) of this paragraph.

[23218] In particular, it was observed that in plants, especially in Arabidopsis thaliana, increasing or generating the activity of a gene product non-targeted with the activity of a “protein phosphatase”, preferably being encoded by a gene comprising the nucleic acid sequence SEQ ID NO. 19419, preferably the coding region thereof, conferred the production of or the increase in tyrosine compared with the wild type control.

[23219] The nucleic acid sequence of At1g72770 from Arabidopsis thaliana, e.g. as shown in the respective line in column 5 of Table I, application no. 3, has been published in F. And the activity of the gene product thereof is the activity of protein phosphatase.

[23220] Accordingly, in one embodiment, the process of the present invention for producing 5-oxoproline in a non-human organism, like a microorganism or a plant or a part thereof, comprises increasing or generating the activity of a gene product with the activity of a gene product conferring the activity of “protein phosphatase”, especially from Arabidopsis thaliana or its functional equivalent or its homolog, e.g. the increase of
[23221] (a) a gene product of a gene comprising the nucleic acid molecule as shown in the respective line in column 5 of Table I, application no. 3, preferably the coding region thereof, or a homolog or a fragment thereof, and being depicted in the same respective line as said At1g72770, or a functional equivalent or a homolog thereof as shown in column 8 of Table I, application no. 3, preferably the coding region thereof, particularly a homolog or functional equivalent as shown in column 8 of Table I B, application no. 3, and being depicted in the same respective line as said At1g72770, and preferably the activity is increased non-targeted, or
[23222] (b) a polypeptide comprising a polypeptide, a consensus sequence or at least a polypeptide motif as shown in the respective line in column 5 of Table II or in column 8 of Table IV, application no. 3, respectively, and being depicted in the same respective line as said At1g72770, or a functional equivalent or a homolog thereof as depicted in column 8 of Table II, application no. 3, preferably a homolog or functional equivalent as depicted in column 8 of Table II B, application no. 3, and being depicted in the same respective line as said At1g72770, and preferably the activity is increased non-targeted.

[23223] Accordingly, in one embodiment, the molecule which activity is to be increased in the process of the invention is the gene product with an activity as a “protein phosphatase”, preferably it is the molecule of section (a) or (b) of this paragraph.

[23224] In particular, it was observed that in plants, especially in Arabidopsis thaliana, increasing or generating the activity of a gene product non-targeted with the activity of a “protein phosphatase”, preferably being encoded by a gene comprising the nucleic acid sequence SEQ ID NO. 19419, preferably the coding region thereof, conferred the production of or the increase in 5-oxoproline compared with the wild type control.

[23225] The nucleic acid sequence of At2g13360 from Arabidopsis thaliana, e.g. as shown in the respective line in column 5 of Table I, application no. 3, has been published in F. And the activity of the gene product thereof is the activity of aminotransferase.

[23226] Accordingly, in one embodiment, the process of the present invention for producing alanine in a non-human organism, like a microorganism or a plant or a part thereof, comprises increasing or generating the activity of a gene product with the activity of a gene product conferring the activity of “aminotransferase”, especially from Arabidopsis thaliana or its functional equivalent or its homolog, e.g. the increase of
[23227] (a) a gene product of a gene comprising the nucleic acid molecule as shown in the respective line in column 5 of Table I, application no. 3, preferably the coding region thereof, or a homolog or a fragment thereof, and being depicted in the same respective line as said At2g13360, or a functional equivalent or a homolog thereof as shown in column 8 of Table I, application no. 3, preferably the coding region thereof, particularly a homolog or functional equivalent as shown in column 8 of Table I B, application no. 3, and being depicted in the same respective line as said At2g13360, and preferably the activity is increased non-targeted, or
[23228] (b) a polypeptide comprising a polypeptide, a consensus sequence or at least a polypeptide motif as shown in the respective line in column 5 of Table II or in column 8 of Table IV, application no. 3, respectively, and being depicted in the same respective line as said At2g13360, or a functional equivalent or a homolog thereof as depicted in column 8 of Table II, application no. 3, preferably a homolog or functional equivalent as depicted in column 8 of Table II B, application no. 3, and being depicted in the same respective line as said At2g13360, and preferably the activity is increased non-targeted.

[23229] Accordingly, in one embodiment, the molecule which activity is to be increased in the process of the invention is the gene product with an activity as a “aminotransferase”, preferably it is the molecule of section (a) or (b) of this paragraph.

[23230] In particular, it was observed that in plants, especially in Arabidopsis thaliana, increasing or generating the activity of a gene product non-targeted with the activity of a “aminotransferase”, preferably being encoded by a gene comprising the nucleic acid sequence SEQ ID NO. 68536, preferably the coding region thereof, conferred the production of or the increase in alanine compared with the wild type control.

[23231] The nucleic acid sequence of At2g17560 from Arabidopsis thaliana, e.g. as shown in the respective line in column 5 of Table I, application no. 3, has been published in F. And the activity of the gene product thereof is the activity of transcription factor.

[23232] Accordingly, in one embodiment, the process of the present invention for producing phenylalanine in a non-human organism, like a microorganism or a plant or a part thereof, comprises increasing or generating the activity of a gene product with the activity of a gene product conferring the activity of “transcription factor”, especially from Arabidopsis thaliana or its functional equivalent or its homolog, e.g. the increase of
[23233] (a) a gene product of a gene comprising the nucleic acid molecule as shown in the respective line in column 5 of Table I, application no. 3, preferably the coding region thereof, or a homolog or a fragment thereof, and being depicted in the same respective line as said At2g17560, or a functional equivalent or a homolog thereof as shown in column 8 of Table I, application no. 3, preferably the coding region thereof, particularly a homolog or functional equivalent as shown in column 8 of Table I B, application no. 3, and being depicted in the same respective line as said At2g17560, and preferably the activity is increased non-targeted, or
[23234] (b) a polypeptide comprising a polypeptide, a consensus sequence or at least a polypeptide motif as shown in the respective line in column 5 of Table II or in column 8 of Table IV, application no. 3, respectively, and being depicted in the same respective line as said At2g17560, or a functional equivalent or a homolog thereof as depicted in column 8 of Table II, application no. 3, preferably a homolog or functional equivalent as depicted in column 8 of Table II B, application no. 3, and being depicted in the same respective line as said At2g17560, and preferably the activity is increased non-targeted.

[23235] Accordingly, in one embodiment, the molecule which activity is to be increased in the process of the invention is the gene product with an activity as a “transcription factor”, preferably it is the molecule of section (a) or (b) of this paragraph.

[23236] In particular, it was observed that in plants, especially in Arabidopsis thaliana, increasing or generating the activity of a gene product non-targeted with the activity of a “transcription factor”, preferably being encoded by a gene comprising the nucleic acid sequence SEQ ID NO. 19502, preferably the coding region thereof, conferred the production of or the increase in phenylalanine compared with the wild type control.

[23237] The nucleic acid sequence of At2g17560 from Arabidopsis thaliana, e.g. as shown in the respective line in column 5 of Table I, application no. 3, has been published in F. And the activity of the gene product thereof is the activity of transcription factor.

[23238] Accordingly, in one embodiment, the process of the present invention for producing tyrosine in a non-human organism, like a microorganism or a plant or a part thereof, comprises increasing or generating the activity of a gene product with the activity of a gene product conferring the activity of “transcription factor”, especially from Arabidopsis thaliana or its functional equivalent or its homolog, e.g. the increase of
[23239] (a) a gene product of a gene comprising the nucleic acid molecule as shown in the respective line in column 5 of Table I, application no. 3, preferably the coding region thereof, or a homolog or a fragment thereof, and being depicted in the same respective line as said At2g17560, or a functional equivalent or a homolog thereof as shown in column 8 of Table I, application no. 3, preferably the coding region thereof, particularly a homolog or functional equivalent as shown in column 8 of Table I B, application no. 3, and being depicted in the same respective line as said At2g17560, and preferably the activity is increased non-targeted, or
[23240] (b) a polypeptide comprising a polypeptide, a consensus sequence or at least a polypeptide motif as shown in the respective line in column 5 of Table II or in column 8 of Table IV, application no. 3, respectively, and being depicted in the same respective line as said At2g17560, or a functional equivalent or a homolog thereof as depicted in column 8 of Table II, application no. 3, preferably a homolog or functional equivalent as depicted in column 8 of Table II B, application no. 3, and being depicted in the same respective line as said At2g17560, and preferably the activity is increased non-targeted.

[23241] Accordingly, in one embodiment, the molecule which activity is to be increased in the process of the invention is the gene product with an activity as a “transcription factor”, preferably it is the molecule of section (a) or (b) of this paragraph.

[23242] In particular, it was observed that in plants, especially in Arabidopsis thaliana, increasing or generating the activity of a gene product non-targeted with the activity of a “transcription factor”, preferably being encoded by a gene comprising the nucleic acid sequence SEQ ID NO. 19502, preferably the coding region thereof, conferred the production of or the increase in tyrosine compared with the wild type control.

[23243] The nucleic acid sequence of At2g25070 from Arabidopsis thaliana, e.g. as shown in the respective line in column 5 of Table I, application no. 3, has been published in F. And the activity of the gene product thereof is the activity of protein phosphatase.

[23244] Accordingly, in one embodiment, the process of the present invention for producing aspartate in a non-human organism, like a microorganism or a plant or a part thereof, comprises increasing or generating the activity of a gene product with the activity of a gene product conferring the activity of “protein phosphatase”, especially from Arabidopsis thaliana or its functional equivalent or its homolog, e.g. the increase of
[23245] (a) a gene product of a gene comprising the nucleic acid molecule as shown in the respective line in column 5 of Table I, application no. 3, preferably the coding region thereof, or a homolog or a fragment thereof, and being depicted in the same respective line as said At2g25070, or a functional equivalent or a homolog thereof as shown in column 8 of Table I, application no. 3, preferably the coding region thereof, particularly a homolog or functional equivalent as shown in column 8 of Table I B, application no. 3, and being depicted in the same respective line as said At2g25070, and preferably the activity is increased non-targeted, or
[23246] (b) a polypeptide comprising a polypeptide, a consensus sequence or at least a polypeptide motif as shown in the respective line in column 5 of Table II or in column 8 of Table IV, application no. 3, respectively, and being depicted in the same respective line as said At2g25070, or a functional equivalent or a homolog thereof as depicted in column 8 of Table II, application no. 3, preferably a homolog or functional equivalent as depicted in column 8 of Table II B, application no. 3, and being depicted in the same respective line as said At2g25070, and preferably the activity is increased non-targeted.

[23247] Accordingly, in one embodiment, the molecule which activity is to be increased in the process of the invention is the gene product with an activity as a “protein phosphatase”, preferably it is the molecule of section (a) or (b) of this paragraph.

[23248] In particular, it was observed that in plants, especially in Arabidopsis thaliana, increasing or generating the activity of a gene product non-targeted with the activity of a “protein phosphatase”, preferably being encoded by a gene comprising the nucleic acid sequence SEQ ID NO. 1298, preferably the coding region thereof, conferred the production of or the increase in aspartate compared with the wild type control.

[23249] The nucleic acid sequence of At2g25070 from Arabidopsis thaliana, e.g. as shown in the respective line in column 5 of Table I, application no. 3, has been published in F. And the activity of the gene product thereof is the activity of protein phosphatase.

[23250] Accordingly, in one embodiment, the process of the present invention for producing 5-oxoproline in a non-human organism, like a microorganism or a plant or a part thereof, comprises increasing or generating the activity of a gene product with the activity of a gene product conferring the activity of “protein phosphatase”, especially from Arabidopsis thaliana or its functional equivalent or its homolog, e.g. the increase of
[23251] (a) a gene product of a gene comprising the nucleic acid molecule as shown in the respective line in column 5 of Table I, application no. 3, preferably the coding region thereof, or a homolog or a fragment thereof, and being depicted in the same respective line as said At2g25070, or a functional equivalent or a homolog thereof as shown in column 8 of Table I, application no. 3, preferably the coding region thereof, particularly a homolog or functional equivalent as shown in column 8 of Table I B, application no. 3, and being depicted in the same respective line as said At2g25070, and preferably the activity is increased non-targeted, or
[23252] (b) a polypeptide comprising a polypeptide, a consensus sequence or at least a polypeptide motif as shown in the respective line in column 5 of Table II or in column 8 of Table IV, application no. 3, respectively, and being depicted in the same respective line as said At2g25070, or a functional equivalent or a homolog thereof as depicted in column 8 of Table II, application no. 3, preferably a homolog or functional equivalent as depicted in column 8 of Table II B, application no. 3, and being depicted in the same respective line as said At2g25070, and preferably the activity is increased non-targeted.

[23253] Accordingly, in one embodiment, the molecule which activity is to be increased in the process of the invention is the gene product with an activity as a “protein phosphatase”, preferably it is the molecule of section (a) or (b) of this paragraph.

[23254] In particular, it was observed that in plants, especially in Arabidopsis thaliana, increasing or generating the activity of a gene product non-targeted with the activity of a “protein phosphatase”, preferably being encoded by a gene comprising the nucleic acid sequence SEQ ID NO. 1298, preferably the coding region thereof, conferred the production of or the increase in 5-oxoproline compared with the wild type control.

[23255] The nucleic acid sequence of At2g28890 from Arabidopsis thaliana, e.g. as shown in the respective line in column 5 of Table I, application no. 3, has been published in F. And the activity of the gene product thereof is the activity of protein phosphatase.

[23256] Accordingly, in one embodiment, the process of the present invention for producing asparagine in a non-human organism, like a microorganism or a plant or a part thereof, comprises increasing or generating the activity of a gene product with the activity of a gene product conferring the activity of “protein phosphatase”, especially from Arabidopsis thaliana or its functional equivalent or its homolog, e.g. the increase of
[23257] (a) a gene product of a gene comprising the nucleic acid molecule as shown in the respective line in column 5 of Table I, application no. 3, preferably the coding region thereof, or a homolog or a fragment thereof, and being depicted in the same respective line as said At2g28890, or a functional equivalent or a homolog thereof as shown in column 8 of Table I, application no. 3, preferably the coding region thereof, particularly a homolog or functional equivalent as shown in column 8 of Table I B, application no. 3, and being depicted in the same respective line as said At2g28890, and preferably the activity is increased non-targeted, or
[23258] (b) a polypeptide comprising a polypeptide, a consensus sequence or at least a polypeptide motif as shown in the respective line in column 5 of Table II or in column 8 of Table IV, application no. 3, respectively, and being depicted in the same respective line as said At2g28890, or a functional equivalent or a homolog thereof as depicted in column 8 of Table II, application no. 3, preferably a homolog or functional equivalent as depicted in column 8 of Table II B, application no. 3, and being depicted in the same respective line as said At2g28890, and preferably the activity is increased non-targeted.

[23259] Accordingly, in one embodiment, the molecule which activity is to be increased in the process of the invention is the gene product with an activity as a “protein phosphatase”, preferably it is the molecule of section (a) or (b) of this paragraph.

[23260] In particular, it was observed that in plants, especially in Arabidopsis thaliana, increasing or generating the activity of a gene product non-targeted with the activity of a “protein phosphatase”, preferably being encoded by a gene comprising the nucleic acid sequence SEQ ID NO. 19874, preferably the coding region thereof, conferred the production of or the increase in asparagine compared with the wild type control.

[23261] The nucleic acid sequence of At2g28890 from Arabidopsis thaliana, e.g. as shown in the respective line in column 5 of Table I, application no. 3, has been published in F. And the activity of the gene product thereof is the activity of protein phosphatase.

[23262] Accordingly, in one embodiment, the process of the present invention for producing phenylalanine in a non-human organism, like a microorganism or a plant or a part thereof, comprises increasing or generating the activity of a gene product with the activity of a gene product conferring the activity of “protein phosphatase”, especially from Arabidopsis thaliana or its functional equivalent or its homolog, e.g. the increase of
[23263] (a) a gene product of a gene comprising the nucleic acid molecule as shown in the respective line in column 5 of Table I, application no. 3, preferably the coding region thereof, or a homolog or a fragment thereof, and being depicted in the same respective line as said At2g28890, or a functional equivalent or a homolog thereof as shown in column 8 of Table I, application no. 3, preferably the coding region thereof, particularly a homolog or functional equivalent as shown in column 8 of Table I B, application no. 3, and being depicted in the same respective line as said At2g28890, and preferably the activity is increased non-targeted, or
[23264] (b) a polypeptide comprising a polypeptide, a consensus sequence or at least a polypeptide motif as shown in the respective line in column 5 of Table II or in column 8 of Table IV, application no. 3, respectively, and being depicted in the same respective line as said At2g28890, or a functional equivalent or a homolog thereof as depicted in column 8 of Table II, application no. 3, preferably a homolog or functional equivalent as depicted in column 8 of Table II B, application no. 3, and being depicted in the same respective line as said At2g28890, and preferably the activity is increased non-targeted.

[23265] Accordingly, in one embodiment, the molecule which activity is to be increased in the process of the invention is the gene product with an activity as a “protein phosphatase”, preferably it is the molecule of section (a) or (b) of this paragraph.

[23266] In particular, it was observed that in plants, especially in Arabidopsis thaliana, increasing or generating the activity of a gene product non-targeted with the activity of a “protein phosphatase”, preferably being encoded by a gene comprising the nucleic acid sequence SEQ ID NO. 19874, preferably the coding region thereof, conferred the production of or the increase in phenylalanine compared with the wild type control.

[23267] The nucleic acid sequence of At2g28890 from Arabidopsis thaliana, e.g. as shown in the respective line in column 5 of Table I, application no. 3, has been published in F. And the activity of the gene product thereof is the activity of protein phosphatase.

[23268] Accordingly, in one embodiment, the process of the present invention for producing serine in a non-human organism, like a microorganism or a plant or a part thereof, comprises increasing or generating the activity of a gene product with the activity of a gene product conferring the activity of “protein phosphatase”, especially from Arabidopsis thaliana or its functional equivalent or its homolog, e.g. the increase of
[23269] (a) a gene product of a gene comprising the nucleic acid molecule as shown in the respective line in column 5 of Table I, application no. 3, preferably the coding region thereof, or a homolog or a fragment thereof, and being depicted in the same respective line as said At2g28890, or a functional equivalent or a homolog thereof as shown in column 8 of Table I, application no. 3, preferably the coding region thereof, particularly a homolog or functional equivalent as shown in column 8 of Table I B, application no. 3, and being depicted in the same respective line as said At2g28890, and preferably the activity is increased non-targeted, or
[23270] (b) a polypeptide comprising a polypeptide, a consensus sequence or at least a polypeptide motif as shown in the respective line in column 5 of Table II or in column 8 of Table IV, application no. 3, respectively, and being depicted in the same respective line as said At2g28890, or a functional equivalent or a homolog thereof as depicted in column 8 of Table II, application no. 3, preferably a homolog or functional equivalent as depicted in column 8 of Table II B, application no. 3, and being depicted in the same respective line as said At2g28890, and preferably the activity is increased non-targeted.

[23271] Accordingly, in one embodiment, the molecule which activity is to be increased in the process of the invention is the gene product with an activity as a “protein phosphatase”, preferably it is the molecule of section (a) or (b) of this paragraph.

[23272] In particular, it was observed that in plants, especially in Arabidopsis thaliana, increasing or generating the activity of a gene product non-targeted with the activity of a “protein phosphatase”, preferably being encoded by a gene comprising the nucleic acid sequence SEQ ID NO. 19874, preferably the coding region thereof, conferred the production of or the increase in serine compared with the wild type control.

[23273] The nucleic acid sequence of At2g28890 from Arabidopsis thaliana, e.g. as shown in the respective line in column 5 of Table I, application no. 3, has been published in F. And the activity of the gene product thereof is the activity of protein phosphatase.

[23274] Accordingly, in one embodiment, the process of the present invention for producing tyrosine in a non-human organism, like a microorganism or a plant or a part thereof, comprises increasing or generating the activity of a gene product with the activity of a gene product conferring the activity of “protein phosphatase”, especially from Arabidopsis thaliana or its functional equivalent or its homolog, e.g. the increase of
[23275] (a) a gene product of a gene comprising the nucleic acid molecule as shown in the respective line in column 5 of Table I, application no. 3, preferably the coding region thereof, or a homolog or a fragment thereof, and being depicted in the same respective line as said At2g28890, or a functional equivalent or a homolog thereof as shown in column 8 of Table I, application no. 3, preferably the coding region thereof, particularly a homolog or functional equivalent as shown in column 8 of Table I B, application no. 3, and being depicted in the same respective line as said At2g28890, and preferably the activity is increased non-targeted, or
[23276] (b) a polypeptide comprising a polypeptide, a consensus sequence or at least a polypeptide motif as shown in the respective line in column 5 of Table II or in column 8 of Table IV, application no. 3, respectively, and being depicted in the same respective line as said At2g28890, or a functional equivalent or a homolog thereof as depicted in column 8 of Table II, application no. 3, preferably a homolog or functional equivalent as depicted in column 8 of Table II B, application no. 3, and being depicted in the same respective line as said At2g28890, and preferably the activity is increased non-targeted.

[23277] Accordingly, in one embodiment, the molecule which activity is to be increased in the process of the invention is the gene product with an activity as a “protein phosphatase”, preferably it is the molecule of section (a) or (b) of this paragraph.

[23278] In particular, it was observed that in plants, especially in Arabidopsis thaliana, increasing or generating the activity of a gene product non-targeted with the activity of a “protein phosphatase”, preferably being encoded by a gene comprising the nucleic acid sequence SEQ ID NO. 19874, preferably the coding region thereof, conferred the production of or the increase in tyrosine compared with the wild type control.

[23279] The nucleic acid sequence of At2g30360 from Arabidopsis thaliana, e.g. as shown in the respective line in column 5 of Table I, application no. 3, has been published in F. And the activity of the gene product thereof is the activity of CBL-interacting protein kinase.

[23280] Accordingly, in one embodiment, the process of the present invention for producing phenylalanine in a non-human organism, like a microorganism or a plant or a part thereof, comprises increasing or generating the activity of a gene product with the activity of a gene product conferring the activity of “CBL-interacting protein kinase”, especially from Arabidopsis thaliana or its functional equivalent or its homolog, e.g. the increase of
[23281] (a) a gene product of a gene comprising the nucleic acid molecule as shown in the respective line in column 5 of Table I, application no. 3, preferably the coding region thereof, or a homolog or a fragment thereof, and being depicted in the same respective line as said At2g30360, or a functional equivalent or a homolog thereof as shown in column 8 of Table I, application no. 3, preferably the coding region thereof, particularly a homolog or functional equivalent as shown in column 8 of Table I B, application no. 3, and being depicted in the same respective line as said At2g30360, and preferably the activity is increased non-targeted, or
[23282] (b) a polypeptide comprising a polypeptide, a consensus sequence or at least a polypeptide motif as shown in the respective line in column 5 of Table II or in column 8 of Table IV, application no. 3, respectively, and being depicted in the same respective line as said At2g30360, or a functional equivalent or a homolog thereof as depicted in column 8 of Table II, application no. 3, preferably a homolog or functional equivalent as depicted in column 8 of Table II B, application no. 3, and being depicted in the same respective line as said At2g30360, and preferably the activity is increased non-targeted.

[23283] Accordingly, in one embodiment, the molecule which activity is to be increased in the process of the invention is the gene product with an activity as a “CBL-interacting protein kinase”, preferably it is the molecule of section (a) or (b) of this paragraph.

[23284] In particular, it was observed that in plants, especially in Arabidopsis thaliana, increasing or generating the activity of a gene product non-targeted with the activity of a “CBL-interacting protein kinase”, preferably being encoded by a gene comprising the nucleic acid sequence SEQ ID NO. 19919, preferably the coding region thereof, conferred the production of or the increase in phenylalanine compared with the wild type control.

[23285] The nucleic acid sequence of At2g30360 from Arabidopsis thaliana, e.g. as shown in the respective line in column 5 of Table I, application no. 3, has been published in F. And the activity of the gene product thereof is the activity of CBL-interacting protein kinase.

[23286] Accordingly, in one embodiment, the process of the present invention for producing tyrosine in a non-human organism, like a microorganism or a plant or a part thereof, comprises increasing or generating the activity of a gene product with the activity of a gene product conferring the activity of “CBL-interacting protein kinase”, especially from Arabidopsis thaliana or its functional equivalent or its homolog, e.g. the increase of
[23287] (a) a gene product of a gene comprising the nucleic acid molecule as shown in the respective line in column 5 of Table I, application no. 3, preferably the coding region thereof, or a homolog or a fragment thereof, and being depicted in the same respective line as said At2g30360, or a functional equivalent or a homolog thereof as shown in column 8 of Table I, application no. 3, preferably the coding region thereof, particularly a homolog or functional equivalent as shown in column 8 of Table I B, application no. 3, and being depicted in the same respective line as said At2g30360, and preferably the activity is increased non-targeted, or
[23288] (b) a polypeptide comprising a polypeptide, a consensus sequence or at least a polypeptide motif as shown in the respective line in column 5 of Table II or in column 8 of Table IV, application no. 3, respectively, and being depicted in the same respective line as said At2g30360, or a functional equivalent or a homolog thereof as depicted in column 8 of Table II, application no. 3, preferably a homolog or functional equivalent as depicted in column 8 of Table II B, application no. 3, and being depicted in the same respective line as said At2g30360, and preferably the activity is increased non-targeted.

[23289] Accordingly, in one embodiment, the molecule which activity is to be increased in the process of the invention is the gene product with an activity as a “CBL-interacting protein kinase”, preferably it is the molecule of section (a) or (b) of this paragraph.

[23290] In particular, it was observed that in plants, especially in Arabidopsis thaliana, increasing or generating the activity of a gene product non-targeted with the activity of a “CBL-interacting protein kinase”, preferably being encoded by a gene comprising the nucleic acid sequence SEQ ID NO. 19919, preferably the coding region thereof, conferred the production of or the increase in tyrosine compared with the wild type control.

[23291] The nucleic acid sequence of At2g30360 from Arabidopsis thaliana, e.g. as shown in the respective line in column 5 of Table I, application no. 3, has been published in F. And the activity of the gene product thereof is the activity of CBL-interacting protein kinase.

[23292] Accordingly, in one embodiment, the process of the present invention for producing 5-oxoproline in a non-human organism, like a microorganism or a plant or a part thereof, comprises increasing or generating the activity of a gene product with the activity of a gene product conferring the activity of “CBL-interacting protein kinase”, especially from Arabidopsis thaliana or its functional equivalent or its homolog, e.g. the increase of
[23293] (a) a gene product of a gene comprising the nucleic acid molecule as shown in the respective line in column 5 of Table I, application no. 3, preferably the coding region thereof, or a homolog or a fragment thereof, and being depicted in the same respective line as said At2g30360, or a functional equivalent or a homolog thereof as shown in column 8 of Table I, application no. 3, preferably the coding region thereof, particularly a homolog or functional equivalent as shown in column 8 of Table I B, application no. 3, and being depicted in the same respective line as said At2g30360, and preferably the activity is increased non-targeted, or
[23294] (b) a polypeptide comprising a polypeptide, a consensus sequence or at least a polypeptide motif as shown in the respective line in column 5 of Table II or in column 8 of Table IV, application no. 3, respectively, and being depicted in the same respective line as said At2g30360, or a functional equivalent or a homolog thereof as depicted in column 8 of Table II, application no. 3, preferably a homolog or functional equivalent as depicted in column 8 of Table II B, application no. 3, and being depicted in the same respective line as said At2g30360, and preferably the activity is increased non-targeted.

[23295] Accordingly, in one embodiment, the molecule which activity is to be increased in the process of the invention is the gene product with an activity as a “CBL-interacting protein kinase”, preferably it is the molecule of section (a) or (b) of this paragraph.

[23296] In particular, it was observed that in plants, especially in Arabidopsis thaliana, increasing or generating the activity of a gene product non-targeted with the activity of a “CBL-interacting protein kinase”, preferably being encoded by a gene comprising the nucleic acid sequence SEQ ID NO. 19919, preferably the coding region thereof, conferred the production of or the increase in 5-oxoproline compared with the wild type control.

[23297] The nucleic acid sequence of At2g30540 from Arabidopsis thaliana, e.g. as shown in the respective line in column 5 of Table I, application no. 3, has been published in F. And the activity of the gene product thereof is the activity of glutaredoxin.

[23298] Accordingly, in one embodiment, the process of the present invention for producing serine in a non-human organism, like a microorganism or a plant or a part thereof, comprises increasing or generating the activity of a gene product with the activity of a gene product conferring the activity of “glutaredoxin”, especially from Arabidopsis thaliana or its functional equivalent or its homolog, e.g. the increase of
[23299] (a) a gene product of a gene comprising the nucleic acid molecule as shown in the respective line in column 5 of Table I, application no. 3, preferably the coding region thereof, or a homolog or a fragment thereof, and being depicted in the same respective line as said At2g30540, or a functional equivalent or a homolog thereof as shown in column 8 of Table I, application no. 3, preferably the coding region thereof, particularly a homolog or functional equivalent as shown in column 8 of Table I B, application no. 3, and being depicted in the same respective line as said At2g30540, and preferably the activity is increased non-targeted, or
[23300] (b) a polypeptide comprising a polypeptide, a consensus sequence or at least a polypeptide motif as shown in the respective line in column 5 of Table II or in column 8 of Table IV, application no. 3, respectively, and being depicted in the same respective line as said At2g30540, or a functional equivalent or a homolog thereof as depicted in column 8 of Table II, application no. 3, preferably a homolog or functional equivalent as depicted in column 8 of Table II B, application no. 3, and being depicted in the same respective line as said At2g30540, and preferably the activity is increased non-targeted.

[23301] Accordingly, in one embodiment, the molecule which activity is to be increased in the process of the invention is the gene product with an activity as a “glutaredoxin”, preferably it is the molecule of section (a) or (b) of this paragraph.

[23302] In particular, it was observed that in plants, especially in Arabidopsis thaliana, increasing or generating the activity of a gene product non-targeted with the activity of a “glutaredoxin”, preferably being encoded by a gene comprising the nucleic acid sequence SEQ ID NO. 20346, preferably the coding region thereof, conferred the production of or the increase in serine compared with the wild type control.

[23303] The nucleic acid sequence of At2g30540 from Arabidopsis thaliana, e.g. as shown in the respective line in column 5 of Table I, application no. 3, has been published in F. And the activity of the gene product thereof is the activity of glutaredoxin.

[23304] Accordingly, in one embodiment, the process of the present invention for producing tyrosine in a non-human organism, like a microorganism or a plant or a part thereof, comprises increasing or generating the activity of a gene product with the activity of a gene product conferring the activity of “glutaredoxin”, especially from Arabidopsis thaliana or its functional equivalent or its homolog, e.g. the increase of
[23305] (a) a gene product of a gene comprising the nucleic acid molecule as shown in the respective line in column 5 of Table I, application no. 3, preferably the coding region thereof, or a homolog or a fragment thereof, and being depicted in the same respective line as said At2g30540, or a functional equivalent or a homolog thereof as shown in column 8 of Table I, application no. 3, preferably the coding region thereof, particularly a homolog or functional equivalent as shown in column 8 of Table I B, application no. 3, and being depicted in the same respective line as said At2g30540, and preferably the activity is increased non-targeted, or
[23306] (b) a polypeptide comprising a polypeptide, a consensus sequence or at least a polypeptide motif as shown in the respective line in column 5 of Table II or in column 8 of Table IV, application no. 3, respectively, and being depicted in the same respective line as said At2g30540, or a functional equivalent or a homolog thereof as depicted in column 8 of Table II, application no. 3, preferably a homolog or functional equivalent as depicted in column 8 of Table II B, application no. 3, and being depicted in the same respective line as said At2g30540, and preferably the activity is increased non-targeted.

[23307] Accordingly, in one embodiment, the molecule which activity is to be increased in the process of the invention is the gene product with an activity as a “glutaredoxin”, preferably it is the molecule of section (a) or (b) of this paragraph.

[23308] In particular, it was observed that in plants, especially in Arabidopsis thaliana, increasing or generating the activity of a gene product non-targeted with the activity of a “glutaredoxin”, preferably being encoded by a gene comprising the nucleic acid sequence SEQ ID NO. 20346, preferably the coding region thereof, conferred the production of or the increase in tyrosine compared with the wild type control.

[23309] The nucleic acid sequence of At2g34180 from Arabidopsis thaliana, e.g. as shown in the respective line in column 5 of Table I, application no. 3, has been published in F. And the activity of the gene product thereof is the activity of CBL-interacting protein kinase.

[23310] Accordingly, in one embodiment, the process of the present invention for producing glycine in a non-human organism, like a microorganism or a plant or a part thereof, comprises increasing or generating the activity of a gene product with the activity of a gene product conferring the activity of “CBL-interacting protein kinase”, especially from Arabidopsis thaliana or its functional equivalent or its homolog, e.g. the increase of
[23311] (a) a gene product of a gene comprising the nucleic acid molecule as shown in the respective line in column 5 of Table I, application no. 3, preferably the coding region thereof, or a homolog or a fragment thereof, and being depicted in the same respective line as said At2g34180, or a functional equivalent or a homolog thereof as shown in column 8 of Table I, application no. 3, preferably the coding region thereof, particularly a homolog or functional equivalent as shown in column 8 of Table I B, application no. 3, and being depicted in the same respective line as said At2g34180, and preferably the activity is increased non-targeted, or
[23312] (b) a polypeptide comprising a polypeptide, a consensus sequence or at least a polypeptide motif as shown in the respective line in column 5 of Table II or in column 8 of Table IV, application no. 3, respectively, and being depicted in the same respective line as said At2g34180, or a functional equivalent or a homolog thereof as depicted in column 8 of Table II, application no. 3, preferably a homolog or functional equivalent as depicted in column 8 of Table II B, application no. 3, and being depicted in the same respective line as said At2g34180, and preferably the activity is increased non-targeted.

[23313] Accordingly, in one embodiment, the molecule which activity is to be increased in the process of the invention is the gene product with an activity as a “CBL-interacting protein kinase”, preferably it is the molecule of section (a) or (b) of this paragraph.

[23314] In particular, it was observed that in plants, especially in Arabidopsis thaliana, increasing or generating the activity of a gene product non-targeted with the activity of a “CBL-interacting protein kinase”, preferably being encoded by a gene comprising the nucleic acid sequence SEQ ID NO. 20578, preferably the coding region thereof, conferred the production of or the increase in glycine compared with the wild type control.

[23315] The nucleic acid sequence of At2g39800 from Arabidopsis thaliana, e.g. as shown in the respective line in column 5 of Table I, application no. 3, has been published in F. And the activity of the gene product thereof is the activity of delta-1-pyrroline 5-carboxylase synthetase.

[23316] Accordingly, in one embodiment, the process of the present invention for producing alanine in a non-human organism, like a microorganism or a plant or a part thereof, comprises increasing or generating the activity of a gene product with the activity of a gene product conferring the activity of “delta-1-pyrroline 5-carboxylase synthetase”, especially from Arabidopsis thaliana or its functional equivalent or its homolog, e.g. the increase of
[23317] (a) a gene product of a gene comprising the nucleic acid molecule as shown in the respective line in column 5 of Table I, application no. 3, preferably the coding region thereof, or a homolog or a fragment thereof, and being depicted in the same respective line as said At2g39800, or a functional equivalent or a homolog thereof as shown in column 8 of Table I, application no. 3, preferably the coding region thereof, particularly a homolog or functional equivalent as shown in column 8 of Table I B, application no. 3, and being depicted in the same respective line as said At2g39800, and preferably the activity is increased non-targeted, or
[23318] (b) a polypeptide comprising a polypeptide, a consensus sequence or at least a polypeptide motif as shown in the respective line in column 5 of Table II or in column 8 of Table IV, application no. 3, respectively, and being depicted in the same respective line as said At2g39800, or a functional equivalent or a homolog thereof as depicted in column 8 of Table II, application no. 3, preferably a homolog or functional equivalent as depicted in column 8 of Table II B, application no. 3, and being depicted in the same respective line as said At2g39800, and preferably the activity is increased non-targeted.

[23319] Accordingly, in one embodiment, the molecule which activity is to be increased in the process of the invention is the gene product with an activity as a “delta-1-pyrroline 5-carboxylase synthetase”, preferably it is the molecule of section (a) or (b) of this paragraph.

[23320] In particular, it was observed that in plants, especially in Arabidopsis thaliana, increasing or generating the activity of a gene product non-targeted with the activity of a “delta-1-pyrroline 5-carboxylase synthetase”, preferably being encoded by a gene comprising the nucleic acid sequence SEQ ID NO. 21008, preferably the coding region thereof, conferred the production of or the increase in alanine compared with the wild type control.

[23321] The nucleic acid sequence of At2g39800 from Arabidopsis thaliana, e.g. as shown in the respective line in column 5 of Table I, application no. 3, has been published in F. And the activity of the gene product thereof is the activity of delta-1-pyrroline 5-carboxylase synthetase.

[23322] Accordingly, in one embodiment, the process of the present invention for producing glycine in a non-human organism, like a microorganism or a plant or a part thereof, comprises increasing or generating the activity of a gene product with the activity of a gene product conferring the activity of “delta-1-pyrroline 5-carboxylase synthetase”, especially from Arabidopsis thaliana or its functional equivalent or its homolog, e.g. the increase of
[23323] (a) a gene product of a gene comprising the nucleic acid molecule as shown in the respective line in column 5 of Table I, application no. 3, preferably the coding region thereof, or a homolog or a fragment thereof, and being depicted in the same respective line as said At2g39800, or a functional equivalent or a homolog thereof as shown in column 8 of Table I, application no. 3, preferably the coding region thereof, particularly a homolog or functional equivalent as shown in column 8 of Table I B, application no. 3, and being depicted in the same respective line as said At2g39800, and preferably the activity is increased non-targeted, or
[23324] (b) a polypeptide comprising a polypeptide, a consensus sequence or at least a polypeptide motif as shown in the respective line in column 5 of Table II or in column 8 of Table IV, application no. 3, respectively, and being depicted in the same respective line as said At2g39800, or a functional equivalent or a homolog thereof as depicted in column 8 of Table II, application no. 3, preferably a homolog or functional equivalent as depicted in column 8 of Table II B, application no. 3, and being depicted in the same respective line as said At2g39800, and preferably the activity is increased non-targeted.

[23325] Accordingly, in one embodiment, the molecule which activity is to be increased in the process of the invention is the gene product with an activity as a “delta-1-pyrroline 5-carboxylase synthetase”, preferably it is the molecule of section (a) or (b) of this paragraph.

[23326] In particular, it was observed that in plants, especially in Arabidopsis thaliana, increasing or generating the activity of a gene product non-targeted with the activity of a “delta-1-pyrroline 5carboxylase synthetase”, preferably being encoded by a gene comprising the nucleic acid sequence SEQ ID NO. 21008, preferably the coding region thereof, conferred the production of or the increase in glycine compared with the wild type control.

[23327] The nucleic acid sequence of At2g47880 from Arabidopsis thaliana, e.g. as shown in the respective line in column 5 of Table I, application no. 3, has been published in F. And the activity of the gene product thereof is the activity of glutaredoxin.

[23328] Accordingly, in one embodiment, the process of the present invention for producing phenylalanine in a non-human organism, like a microorganism or a plant or a part thereof, comprises increasing or generating the activity of a gene product with the activity of a gene product conferring the activity of “glutaredoxin”, especially from Arabidopsis thaliana or its functional equivalent or its homolog, e.g. the increase of
[23329] (a) a gene product of a gene comprising the nucleic acid molecule as shown in the respective line in column 5 of Table I, application no. 3, preferably the coding region thereof, or a homolog or a fragment thereof, and being depicted in the same respective line as said At2g47880, or a functional equivalent or a homolog thereof as shown in column 8 of Table I, application no. 3, preferably the coding region thereof, particularly a homolog or functional equivalent as shown in column 8 of Table I B, application no. 3, and being depicted in the same respective line as said At2g47880, and preferably the activity is increased non-targeted, or
[23330] (b) a polypeptide comprising a polypeptide, a consensus sequence or at least a polypeptide motif as shown in the respective line in column 5 of Table II or in column 8 of Table IV, application no. 3, respectively, and being depicted in the same respective line as said At2g47880, or a functional equivalent or a homolog thereof as depicted in column 8 of Table II, application no. 3, preferably a homolog or functional equivalent as depicted in column 8 of Table II B, application no. 3, and being depicted in the same respective line as said At2g47880, and preferably the activity is increased non-targeted.

[23331] Accordingly, in one embodiment, the molecule which activity is to be increased in the process of the invention is the gene product with an activity as a “glutaredoxin”, preferably it is the molecule of section (a) or (b) of this paragraph.

[23332] In particular, it was observed that in plants, especially in Arabidopsis thaliana, increasing or generating the activity of a gene product non-targeted with the activity of a “glutaredoxin”, preferably being encoded by a gene comprising the nucleic acid sequence SEQ ID NO. 21159, preferably the coding region thereof, conferred the production of or the increase in phenylalanine compared with the wild type control.

[23333] The nucleic acid sequence of At2g47880 from Arabidopsis thaliana, e.g. as shown in the respective line in column 5 of Table I, application no. 3, has been published in F. And the activity of the gene product thereof is the activity of glutaredoxin.

[23334] Accordingly, in one embodiment, the process of the present invention for producing tyrosine in a non-human organism, like a microorganism or a plant or a part thereof, comprises increasing or generating the activity of a gene product with the activity of a gene product conferring the activity of “glutaredoxin”, especially from Arabidopsis thaliana or its functional equivalent or its homolog, e.g. the increase of
[23335] (a) a gene product of a gene comprising the nucleic acid molecule as shown in the respective line in column 5 of Table I, application no. 3, preferably the coding region thereof, or a homolog or a fragment thereof, and being depicted in the same respective line as said At2g47880, or a functional equivalent or a homolog thereof as shown in column 8 of Table I, application no. 3, preferably the coding region thereof, particularly a homolog or functional equivalent as shown in column 8 of Table I B, application no. 3, and being depicted in the same respective line as said At2g47880, and preferably the activity is increased non-targeted, or
[23336] (b) a polypeptide comprising a polypeptide, a consensus sequence or at least a polypeptide motif as shown in the respective line in column 5 of Table II or in column 8 of Table IV, application no. 3, respectively, and being depicted in the same respective line as said At2g47880, or a functional equivalent or a homolog thereof as depicted in column 8 of Table II, application no. 3, preferably a homolog or functional equivalent as depicted in column 8 of Table II B, application no. 3, and being depicted in the same respective line as said At2g47880, and preferably the activity is increased non-targeted.

[23337] Accordingly, in one embodiment, the molecule which activity is to be increased in the process of the invention is the gene product with an activity as a “glutaredoxin”, preferably it is the molecule of section (a) or (b) of this paragraph.

[23338] In particular, it was observed that in plants, especially in Arabidopsis thaliana, increasing or generating the activity of a gene product non-targeted with the activity of a “glutaredoxin”, preferably being encoded by a gene comprising the nucleic acid sequence SEQ ID NO. 21159, preferably the coding region thereof, conferred the production of or the increase in tyrosine compared with the wild type control.

[23339] The nucleic acid sequence of At3g02990 from Arabidopsis thaliana, e.g. as shown in the respective line in column 5 of Table I, application no. 3, has been published in F. And the activity of the gene product thereof is the activity of heat shock transcription factor.

[23340] Accordingly, in one embodiment, the process of the present invention for producing tyrosine in a non-human organism, like a microorganism or a plant or a part thereof, comprises increasing or generating the activity of a gene product with the activity of a gene product conferring the activity of “heat shock transcription factor”, especially from Arabidopsis thaliana or its functional equivalent or its homolog, e.g. the increase of
[23341] (a) a gene product of a gene comprising the nucleic acid molecule as shown in the respective line in column 5 of Table I, application no. 3, preferably the coding region thereof, or a homolog or a fragment thereof, and being depicted in the same respective line as said At3g02990, or a functional equivalent or a homolog thereof as shown in column 8 of Table I, application no. 3, preferably the coding region thereof, particularly a homolog or functional equivalent as shown in column 8 of Table I B, application no. 3, and being depicted in the same respective line as said At3g02990, and preferably the activity is increased non-targeted, or
[23342] (b) a polypeptide comprising a polypeptide, a consensus sequence or at least a polypeptide motif as shown in the respective line in column 5 of Table II or in column 8 of Table IV, application no. 3, respectively, and being depicted in the same respective line as said At3g02990, or a functional equivalent or a homolog thereof as depicted in column 8 of Table II, application no. 3, preferably a homolog or functional equivalent as depicted in column 8 of Table II B, application no. 3, and being depicted in the same respective line as said At3g02990, and preferably the activity is increased non-targeted.

[23343] Accordingly, in one embodiment, the molecule which activity is to be increased in the process of the invention is the gene product with an activity as a “heat shock transcription factor”, preferably it is the molecule of section (a) or (b) of this paragraph.

[23344] In particular, it was observed that in plants, especially in Arabidopsis thaliana, increasing or generating the activity of a gene product non-targeted with the activity of a “heat shock transcription factor”, preferably being encoded by a gene comprising the nucleic acid sequence SEQ ID NO. 68657, preferably the coding region thereof, conferred the production of or the increase in tyrosine compared with the wild type control.

[23345] The nucleic acid sequence of At3g04050 from Arabidopsis thaliana, e.g. as shown in the respective line in column 5 of Table I, application no. 3, has been published in F. And the activity of the gene product thereof is the activity of pyruvate kinase.

[23346] Accordingly, in one embodiment, the process of the present invention for producing alanine in a non-human organism, like a microorganism or a plant or a part thereof, comprises increasing or generating the activity of a gene product with the activity of a gene product conferring the activity of “pyruvate kinase”, especially from Arabidopsis thaliana or its functional equivalent or its homolog, e.g. the increase of
[23347] (a) a gene product of a gene comprising the nucleic acid molecule as shown in the respective line in column 5 of Table I, application no. 3, preferably the coding region thereof, or a homolog or a fragment thereof, and being depicted in the same respective line as said At3g04050, or a functional equivalent or a homolog thereof as shown in column 8 of Table I, application no. 3, preferably the coding region thereof, particularly a homolog or functional equivalent as shown in column 8 of Table I B, application no. 3, and being depicted in the same respective line as said At3g04050, and preferably the activity is increased plastidic, or
[23348] (b) a polypeptide comprising a polypeptide, a consensus sequence or at least a polypeptide motif as shown in the respective line in column 5 of Table II or in column 8 of Table IV, application no. 3, respectively, and being depicted in the same respective line as said At3g04050, or a functional equivalent or a homolog thereof as depicted in column 8 of Table II, application no. 3, preferably a homolog or functional equivalent as depicted in column 8 of Table II B, application no. 3, and being depicted in the same respective line as said At3g04050, and preferably the activity is increased plastidic.

[23349] Accordingly, in one embodiment, the molecule which activity is to be increased in the process of the invention is the gene product with an activity as a “pyruvate kinase”, preferably it is the molecule of section (a) or (b) of this paragraph.

[23350] In particular, it was observed that in plants, especially in Arabidopsis thaliana, increasing or generating the activity of a gene product plastidic with the activity of a “pyruvate kinase”, preferably being encoded by a gene comprising the nucleic acid sequence SEQ ID NO. 21497, preferably the coding region thereof, conferred the production of or the increase in alanine compared with the wild type control.

[23351] The nucleic acid sequence of At3g04050 from Arabidopsis thaliana, e.g. as shown in the respective line in column 5 of Table I, application no. 3, has been published in F. And the activity of the gene product thereof is the activity of pyruvate kinase.

[23352] Accordingly, in one embodiment, the process of the present invention for producing phenylalanine in a non-human organism, like a microorganism or a plant or a part thereof, comprises increasing or generating the activity of a gene product with the activity of a gene product conferring the activity of “pyruvate kinase”, especially from Arabidopsis thaliana or its functional equivalent or its homolog, e.g. the increase of
[23353] (a) a gene product of a gene comprising the nucleic acid molecule as shown in the respective line in column 5 of Table I, application no. 3, preferably the coding region thereof, or a homolog or a fragment thereof, and being depicted in the same respective line as said At3g04050, or a functional equivalent or a homolog thereof as shown in column 8 of Table I, application no. 3, preferably the coding region thereof, particularly a homolog or functional equivalent as shown in column 8 of Table I B, application no. 3, and being depicted in the same respective line as said At3g04050, and preferably the activity is increased plastidic, or
[23354] (b) a polypeptide comprising a polypeptide, a consensus sequence or at least a polypeptide motif as shown in the respective line in column 5 of Table II or in column 8 of Table IV, application no. 3, respectively, and being depicted in the same respective line as said At3g04050, or a functional equivalent or a homolog thereof as depicted in column 8 of Table II, application no. 3, preferably a homolog or functional equivalent as depicted in column 8 of Table II B, application no. 3, and being depicted in the same respective line as said At3g04050, and preferably the activity is increased plastidic.

[23355] Accordingly, in one embodiment, the molecule which activity is to be increased in the process of the invention is the gene product with an activity as a “pyruvate kinase”, preferably it is the molecule of section (a) or (b) of this paragraph.

[23356] In particular, it was observed that in plants, especially in Arabidopsis thaliana, increasing or generating the activity of a gene product plastidic with the activity of a “pyruvate kinase”, preferably being encoded by a gene comprising the nucleic acid sequence SEQ ID NO. 21497, preferably the coding region thereof, conferred the production of or the increase in phenylalanine compared with the wild type control.

[23357] The nucleic acid sequence of At3g04050 from Arabidopsis thaliana, e.g. as shown in the respective line in column 5 of Table I, application no. 3, has been published in F. And the activity of the gene product thereof is the activity of pyruvate kinase.

[23358] Accordingly, in one embodiment, the process of the present invention for producing tyrosine in a non-human organism, like a microorganism or a plant or a part thereof, comprises increasing or generating the activity of a gene product with the activity of a gene product conferring the activity of “pyruvate kinase”, especially from Arabidopsis thaliana or its functional equivalent or its homolog, e.g. the increase of
[23359] (a) a gene product of a gene comprising the nucleic acid molecule as shown in the respective line in column 5 of Table I, application no. 3, preferably the coding region thereof, or a homolog or a fragment thereof, and being depicted in the same respective line as said At3g04050, or a functional equivalent or a homolog thereof as shown in column 8 of Table I, application no. 3, preferably the coding region thereof, particularly a homolog or functional equivalent as shown in column 8 of Table I B, application no. 3, and being depicted in the same respective line as said At3g04050, and preferably the activity is increased plastidic, or
[23360] (b) a polypeptide comprising a polypeptide, a consensus sequence or at least a polypeptide motif as shown in the respective line in column 5 of Table II or in column 8 of Table IV, application no. 3, respectively, and being depicted in the same respective line as said At3g04050, or a functional equivalent or a homolog thereof as depicted in column 8 of Table II, application no. 3, preferably a homolog or functional equivalent as depicted in column 8 of Table II B, application no. 3, and being depicted in the same respective line as said At3g04050, and preferably the activity is increased plastidic.

[23361] Accordingly, in one embodiment, the molecule which activity is to be increased in the process of the invention is the gene product with an activity as a “pyruvate kinase”, preferably it is the molecule of section (a) or (b) of this paragraph.

[23362] In particular, it was observed that in plants, especially in Arabidopsis thaliana, increasing or generating the activity of a gene product plastidic with the activity of a “pyruvate kinase”, preferably being encoded by a gene comprising the nucleic acid sequence SEQ ID NO. 21497, preferably the coding region thereof, conferred the production of or the increase in tyrosine compared with the wild type control.

[23363] The nucleic acid sequence of At3g04710 from Arabidopsis thaliana, e.g. as shown in the respective line in column 5 of Table I, application no. 3, has been published in F. And the activity of the gene product thereof is the activity of ankyrin repeat family protein.

[23364] Accordingly, in one embodiment, the process of the present invention for producing phenylalanine in a non-human organism, like a microorganism or a plant or a part thereof, comprises increasing or generating the activity of a gene product with the activity of a gene product conferring the activity of “ankyrin repeat family protein”, especially from Arabidopsis thaliana or its functional equivalent or its homolog, e.g. the increase of
[23365] (a) a gene product of a gene comprising the nucleic acid molecule as shown in the respective line in column 5 of Table I, application no. 3, preferably the coding region thereof, or a homolog or a fragment thereof, and being depicted in the same respective line as said At3g04710, or a functional equivalent or a homolog thereof as shown in column 8 of Table I, application no. 3, preferably the coding region thereof, particularly a homolog or functional equivalent as shown in column 8 of Table I B, application no. 3, and being depicted in the same respective line as said At3g04710, and preferably the activity is increased non-targeted, or
[23366] (b) a polypeptide comprising a polypeptide, a consensus sequence or at least a polypeptide motif as shown in the respective line in column 5 of Table II or in column 8 of Table IV, application no. 3, respectively, and being depicted in the same respective line as said At3g04710, or a functional equivalent or a homolog thereof as depicted in column 8 of Table II, application no. 3, preferably a homolog or functional equivalent as depicted in column 8 of Table II B, application no. 3, and being depicted in the same respective line as said At3g04710, and preferably the activity is increased non-targeted.

[23367] Accordingly, in one embodiment, the molecule which activity is to be increased in the process of the invention is the gene product with an activity as a “ankyrin repeat family protein”, preferably it is the molecule of section (a) or (b) of this paragraph.

[23368] In particular, it was observed that in plants, especially in Arabidopsis thaliana, increasing or generating the activity of a gene product non-targeted with the activity of a “ankyrin repeat family protein”, preferably being encoded by a gene comprising the nucleic acid sequence SEQ ID NO. 21902, preferably the coding region thereof, conferred the production of or the increase in phenylalanine compared with the wild type control.

[23369] The nucleic acid sequence of At3g06270 from Arabidopsis thaliana, e.g. as shown in the respective line in column 5 of Table I, application no. 3, has been published in F. And the activity of the gene product thereof is the activity of protein phosphatase.

[23370] Accordingly, in one embodiment, the process of the present invention for producing tyrosine in a non-human organism, like a microorganism or a plant or a part thereof, comprises increasing or generating the activity of a gene product with the activity of a gene product conferring the activity of “protein phosphatase”, especially from Arabidopsis thaliana or its functional equivalent or its homolog, e.g. the increase of
[23371] (a) a gene product of a gene comprising the nucleic acid molecule as shown in the respective line in column 5 of Table I, application no. 3, preferably the coding region thereof, or a homolog or a fragment thereof, and being depicted in the same respective line as said At3g06270, or a functional equivalent or a homolog thereof as shown in column 8 of Table I, application no. 3, preferably the coding region thereof, particularly a homolog or functional equivalent as shown in column 8 of Table I B, application no. 3, and being depicted in the same respective line as said At3g06270, and preferably the activity is increased non-targeted, or
[23372] (b) a polypeptide comprising a polypeptide, a consensus sequence or at least a polypeptide motif as shown in the respective line in column 5 of Table II or in column 8 of Table IV, application no. 3, respectively, and being depicted in the same respective line as said At3g06270, or a functional equivalent or a homolog thereof as depicted in column 8 of Table II, application no. 3, preferably a homolog or functional equivalent as depicted in column 8 of Table II B, application no. 3, and being depicted in the same respective line as said At3g06270, and preferably the activity is increased non-targeted.

[23373] Accordingly, in one embodiment, the molecule which activity is to be increased in the process of the invention is the gene product with an activity as a “protein phosphatase”, preferably it is the molecule of section (a) or (b) of this paragraph.

[23374] In particular, it was observed that in plants, especially in Arabidopsis thaliana, increasing or generating the activity of a gene product non-targeted with the activity of a “protein phosphatase”, preferably being encoded by a gene comprising the nucleic acid sequence SEQ ID NO. 22015, preferably the coding region thereof, conferred the production of or the increase in tyrosine compared with the wild type control.

[23375] The nucleic acid sequence of At3g08710 from Arabidopsis thaliana, e.g. as shown in the respective line in column 5 of Table I, application no. 3, has been published in F. And the activity of the gene product thereof is the activity of thioredoxin family protein.

[23376] Accordingly, in one embodiment, the process of the present invention for producing aspartate in a non-human organism, like a microorganism or a plant or a part thereof, comprises increasing or generating the activity of a gene product with the activity of a gene product conferring the activity of “thioredoxin family protein”, especially from Arabidopsis thaliana or its functional equivalent or its homolog, e.g. the increase of
[23377] (a) a gene product of a gene comprising the nucleic acid molecule as shown in the respective line in column 5 of Table I, application no. 3, preferably the coding region thereof, or a homolog or a fragment thereof, and being depicted in the same respective line as said At3g08710, or a functional equivalent or a homolog thereof as shown in column 8 of Table I, application no. 3, preferably the coding region thereof, particularly a homolog or functional equivalent as shown in column 8 of Table I B, application no. 3, and being depicted in the same respective line as said At3g08710, and preferably the activity is increased non-targeted, or
[23378] (b) a polypeptide comprising a polypeptide, a consensus sequence or at least a polypeptide motif as shown in the respective line in column 5 of Table II or in column 8 of Table IV, application no. 3, respectively, and being depicted in the same respective line as said At3g08710, or a functional equivalent or a homolog thereof as depicted in column 8 of Table II, application no. 3, preferably a homolog or functional equivalent as depicted in column 8 of Table II B, application no. 3, and being depicted in the same respective line as said At3g08710, and preferably the activity is increased non-targeted.

[23379] Accordingly, in one embodiment, the molecule which activity is to be increased in the process of the invention is the gene product with an activity as a “thioredoxin family protein”, preferably it is the molecule of section (a) or (b) of this paragraph.

[23380] In particular, it was observed that in plants, especially in Arabidopsis thaliana, increasing or generating the activity of a gene product non-targeted with the activity of a “thioredoxin family protein”, preferably being encoded by a gene comprising the nucleic acid sequence SEQ ID NO. 22249, preferably the coding region thereof, conferred the production of or the increase in aspartate compared with the wild type control.

[23381] The nucleic acid sequence of At3g08710 from Arabidopsis thaliana, e.g. as shown in the respective line in column 5 of Table I, application no. 3, has been published in F. And the activity of the gene product thereof is the activity of thioredoxin family protein.

[23382] Accordingly, in one embodiment, the process of the present invention for producing phenylalanine in a non-human organism, like a microorganism or a plant or a part thereof, comprises increasing or generating the activity of a gene product with the activity of a gene product conferring the activity of “thioredoxin family protein”, especially from Arabidopsis thaliana or its functional equivalent or its homolog, e.g. the increase of
[23383] (a) a gene product of a gene comprising the nucleic acid molecule as shown in the respective line in column 5 of Table I, application no. 3, preferably the coding region thereof, or a homolog or a fragment thereof, and being depicted in the same respective line as said At3g08710, or a functional equivalent or a homolog thereof as shown in column 8 of Table I, application no. 3, preferably the coding region thereof, particularly a homolog or functional equivalent as shown in column 8 of Table I B, application no. 3, and being depicted in the same respective line as said At3g08710, and preferably the activity is increased non-targeted, or
[23384] (b) a polypeptide comprising a polypeptide, a consensus sequence or at least a polypeptide motif as shown in the respective line in column 5 of Table II or in column 8 of Table IV, application no. 3, respectively, and being depicted in the same respective line as said At3g08710, or a functional equivalent or a homolog thereof as depicted in column 8 of Table II, application no. 3, preferably a homolog or functional equivalent as depicted in column 8 of Table II B, application no. 3, and being depicted in the same respective line as said At3g08710, and preferably the activity is increased non-targeted.

[23385] Accordingly, in one embodiment, the molecule which activity is to be increased in the process of the invention is the gene product with an activity as a “thioredoxin family protein”, preferably it is the molecule of section (a) or (b) of this paragraph.

[23386] In particular, it was observed that in plants, especially in Arabidopsis thaliana, increasing or generating the activity of a gene product non-targeted with the activity of a “thioredoxin family protein”, preferably being encoded by a gene comprising the nucleic acid sequence SEQ ID NO. 22249, preferably the coding region thereof, conferred the production of or the increase in phenylalanine compared with the wild type control.

[23387] The nucleic acid sequence of At3g08710 from Arabidopsis thaliana, e.g. as shown in the respective line in column 5 of Table I, application no. 3, has been published in F. And the activity of the gene product thereof is the activity of thioredoxin family protein.

[23388] Accordingly, in one embodiment, the process of the present invention for producing tyrosine in a non-human organism, like a microorganism or a plant or a part thereof, comprises increasing or generating the activity of a gene product with the activity of a gene product conferring the activity of “thioredoxin family protein”, especially from Arabidopsis thaliana or its functional equivalent or its homolog, e.g. the increase of
[23389] (a) a gene product of a gene comprising the nucleic acid molecule as shown in the respective line in column 5 of Table I, application no. 3, preferably the coding region thereof, or a homolog or a fragment thereof, and being depicted in the same respective line as said At3g08710, or a functional equivalent or a homolog thereof as shown in column 8 of Table I, application no. 3, preferably the coding region thereof, particularly a homolog or functional equivalent as shown in column 8 of Table I B, application no. 3, and being depicted in the same respective line as said At3g08710, and preferably the activity is increased non-targeted, or
[23390] (b) a polypeptide comprising a polypeptide, a consensus sequence or at least a polypeptide motif as shown in the respective line in column 5 of Table II or in column 8 of Table IV, application no. 3, respectively, and being depicted in the same respective line as said At3g08710, or a functional equivalent or a homolog thereof as depicted in column 8 of Table II, application no. 3, preferably a homolog or functional equivalent as depicted in column 8 of Table II B, application no. 3, and being depicted in the same respective line as said At3g08710, and preferably the activity is increased non-targeted.

[23391] Accordingly, in one embodiment, the molecule which activity is to be increased in the process of the invention is the gene product with an activity as a “thioredoxin family protein”, preferably it is the molecule of section (a) or (b) of this paragraph.

[23392] In particular, it was observed that in plants, especially in Arabidopsis thaliana, increasing or generating the activity of a gene product non-targeted with the activity of a “thioredoxin family protein”, preferably being encoded by a gene comprising the nucleic acid sequence SEQ ID NO. 22249, preferably the coding region thereof, conferred the production of or the increase in tyrosine compared with the wild type control.

[23393] The nucleic acid sequence of At3g11650 from Arabidopsis thaliana, e.g. as shown in the respective line in column 5 of Table I, application no. 3, has been published in F. And the activity of the gene product thereof is the activity of harpin-induced family protein.

[23394] Accordingly, in one embodiment, the process of the present invention for producing phenylalanine in a non-human organism, like a microorganism or a plant or a part thereof, comprises increasing or generating the activity of a gene product with the activity of a gene product conferring the activity of “harpin-induced family protein”, especially from Arabidopsis thaliana or its functional equivalent or its homolog, e.g. the increase of
[23395] (a) a gene product of a gene comprising the nucleic acid molecule as shown in the respective line in column 5 of Table I, application no. 3, preferably the coding region thereof, or a homolog or a fragment thereof, and being depicted in the same respective line as said At3g11650, or a functional equivalent or a homolog thereof as shown in column 8 of Table I, application no. 3, preferably the coding region thereof, particularly a homolog or functional equivalent as shown in column 8 of Table I B, application no. 3, and being depicted in the same respective line as said At3g11650, and preferably the activity is increased non-targeted, or
[23396] (b) a polypeptide comprising a polypeptide, a consensus sequence or at least a polypeptide motif as shown in the respective line in column 5 of Table II or in column 8 of Table IV, application no. 3, respectively, and being depicted in the same respective line as said At3g11650, or a functional equivalent or a homolog thereof as depicted in column 8 of Table II, application no. 3, preferably a homolog or functional equivalent as depicted in column 8 of Table II B, application no. 3, and being depicted in the same respective line as said At3g11650, and preferably the activity is increased non-targeted.

[23397] Accordingly, in one embodiment, the molecule which activity is to be increased in the process of the invention is the gene product with an activity as a “harpin-induced family protein”, preferably it is the molecule of section (a) or (b) of this paragraph.

[23398] In particular, it was observed that in plants, especially in Arabidopsis thaliana, increasing or generating the activity of a gene product non-targeted with the activity of a “harpin-induced family protein”, preferably being encoded by a gene comprising the nucleic acid sequence SEQ ID NO. 22611, preferably the coding region thereof, conferred the production of or the increase in phenylalanine compared with the wild type control.

[23399] The nucleic acid sequence of At3g11650 from Arabidopsis thaliana, e.g. as shown in the respective line in column 5 of Table I, application no. 3, has been published in F. And the activity of the gene product thereof is the activity of harpin-induced family protein.

[23400] Accordingly, in one embodiment, the process of the present invention for producing serine in a non-human organism, like a microorganism or a plant or a part thereof, comprises increasing or generating the activity of a gene product with the activity of a gene product conferring the activity of “harpin-induced family protein”, especially from Arabidopsis thaliana or its functional equivalent or its homolog, e.g. the increase of
[23401] (a) a gene product of a gene comprising the nucleic acid molecule as shown in the respective line in column 5 of Table I, application no. 3, preferably the coding region thereof, or a homolog or a fragment thereof, and being depicted in the same respective line as said At3g11650, or a functional equivalent or a homolog thereof as shown in column 8 of Table I, application no. 3, preferably the coding region thereof, particularly a homolog or functional equivalent as shown in column 8 of Table I B, application no. 3, and being depicted in the same respective line as said At3g11650, and preferably the activity is increased non-targeted, or
[23402] (b) a polypeptide comprising a polypeptide, a consensus sequence or at least a polypeptide motif as shown in the respective line in column 5 of Table II or in column 8 of Table IV, application no. 3, respectively, and being depicted in the same respective line as said At3g11650, or a functional equivalent or a homolog thereof as depicted in column 8 of Table II, application no. 3, preferably a homolog or functional equivalent as depicted in column 8 of Table II B, application no. 3, and being depicted in the same respective line as said At3g11650, and preferably the activity is increased non-targeted.

[23403] Accordingly, in one embodiment, the molecule which activity is to be increased in the process of the invention is the gene product with an activity as a “harpin-induced family protein”, preferably it is the molecule of section (a) or (b) of this paragraph.

[23404] In particular, it was observed that in plants, especially in Arabidopsis thaliana, increasing or generating the activity of a gene product non-targeted with the activity of a “harpin-induced family protein”, preferably being encoded by a gene comprising the nucleic acid sequence SEQ ID NO. 22611, preferably the coding region thereof, conferred the production of or the increase in serine compared with the wild type control.

[23405] The nucleic acid sequence of At3g11650 from Arabidopsis thaliana, e.g. as shown in the respective line in column 5 of Table I, application no. 3, has been published in F. And the activity of the gene product thereof is the activity of harpin-induced family protein.

[23406] Accordingly, in one embodiment, the process of the present invention for producing tyrosine in a non-human organism, like a microorganism or a plant or a part thereof, comprises increasing or generating the activity of a gene product with the activity of a gene product conferring the activity of “harpin-induced family protein”, especially from Arabidopsis thaliana or its functional equivalent or its homolog, e.g. the increase of
[23407] (a) a gene product of a gene comprising the nucleic acid molecule as shown in the respective line in column 5 of Table I, application no. 3, preferably the coding region thereof, or a homolog or a fragment thereof, and being depicted in the same respective line as said At3g11650, or a functional equivalent or a homolog thereof as shown in column 8 of Table I, application no. 3, preferably the coding region thereof, particularly a homolog or functional equivalent as shown in column 8 of Table I B, application no. 3, and being depicted in the same respective line as said At3g11650, and preferably the activity is increased non-targeted, or
[23408] (b) a polypeptide comprising a polypeptide, a consensus sequence or at least a polypeptide motif as shown in the respective line in column 5 of Table II or in column 8 of Table IV, application no. 3, respectively, and being depicted in the same respective line as said At3g11650, or a functional equivalent or a homolog thereof as depicted in column 8 of Table II, application no. 3, preferably a homolog or functional equivalent as depicted in column 8 of Table II B, application no. 3, and being depicted in the same respective line as said At3g11650, and preferably the activity is increased non-targeted.

[23409] Accordingly, in one embodiment, the molecule which activity is to be increased in the process of the invention is the gene product with an activity as a “harpin-induced family protein”, preferably it is the molecule of section (a) or (b) of this paragraph.

[23410] In particular, it was observed that in plants, especially in Arabidopsis thaliana, increasing or generating the activity of a gene product non-targeted with the activity of a “harpin-induced family protein”, preferably being encoded by a gene comprising the nucleic acid sequence SEQ ID NO. 22611, preferably the coding region thereof, conferred the production of or the increase in tyrosine compared with the wild type control.

[23411] The nucleic acid sequence of At3g18524 from Arabidopsis thaliana, e.g. as shown in the respective line in column 5 of Table I, application no. 3, has been published in F. And the activity of the gene product thereof is the activity of DNA mismatch repair protein.

[23412] Accordingly, in one embodiment, the process of the present invention for producing phenylalanine in a non-human organism, like a microorganism or a plant or a part thereof, comprises increasing or generating the activity of a gene product with the activity of a gene product conferring the activity of “DNA mismatch repair protein”, especially from Arabidopsis thaliana or its functional equivalent or its homolog, e.g. the increase of
[23413] (a) a gene product of a gene comprising the nucleic acid molecule as shown in the respective line in column 5 of Table I, application no. 3, preferably the coding region thereof, or a homolog or a fragment thereof, and being depicted in the same respective line as said At3g18524, or a functional equivalent or a homolog thereof as shown in column 8 of Table I, application no. 3, preferably the coding region thereof, particularly a homolog or functional equivalent as shown in column 8 of Table I B, application no. 3, and being depicted in the same respective line as said At3g18524, and preferably the activity is increased non-targeted, or
[23414] (b) a polypeptide comprising a polypeptide, a consensus sequence or at least a polypeptide motif as shown in the respective line in column 5 of Table II or in column 8 of Table IV, application no. 3, respectively, and being depicted in the same respective line as said At3g18524, or a functional equivalent or a homolog thereof as depicted in column 8 of Table II, application no. 3, preferably a homolog or functional equivalent as depicted in column 8 of Table II B, application no. 3, and being depicted in the same respective line as said At3g18524, and preferably the activity is increased non-targeted.

[23415] Accordingly, in one embodiment, the molecule which activity is to be increased in the process of the invention is the gene product with an activity as a “DNA mismatch repair protein”, preferably it is the molecule of section (a) or (b) of this paragraph.

[23416] In particular, it was observed that in plants, especially in Arabidopsis thaliana, increasing or generating the activity of a gene product non-targeted with the activity of a “DNA mismatch repair protein”, preferably being encoded by a gene comprising the nucleic acid sequence SEQ ID NO. 22832, preferably the coding region thereof, conferred the production of or the increase in phenylalanine compared with the wild type control.

[23417] The nucleic acid sequence of At3g23000 from Arabidopsis thaliana, e.g. as shown in the respective line in column 5 of Table I, application no. 3, has been published in F. And the activity of the gene product thereof is the activity of protein kinase.

[23418] Accordingly, in one embodiment, the process of the present invention for producing phenylalanine in a non-human organism, like a microorganism or a plant or a part thereof, comprises increasing or generating the activity of a gene product with the activity of a gene product conferring the activity of “protein kinase”, especially from Arabidopsis thaliana or its functional equivalent or its homolog, e.g. the increase of
[23419] (a) a gene product of a gene comprising the nucleic acid molecule as shown in the respective line in column 5 of Table I, application no. 3, preferably the coding region thereof, or a homolog or a fragment thereof, and being depicted in the same respective line as said At3g23000, or a functional equivalent or a homolog thereof as shown in column 8 of Table I, application no. 3, preferably the coding region thereof, particularly a homolog or functional equivalent as shown in column 8 of Table I B, application no. 3, and being depicted in the same respective line as said At3g23000, and preferably the activity is increased non-targeted, or
[23420] (b) a polypeptide comprising a polypeptide, a consensus sequence or at least a polypeptide motif as shown in the respective line in column 5 of Table II or in column 8 of Table IV, application no. 3, respectively, and being depicted in the same respective line as said At3g23000, or a functional equivalent or a homolog thereof as depicted in column 8 of Table II, application no. 3, preferably a homolog or functional equivalent as depicted in column 8 of Table II B, application no. 3, and being depicted in the same respective line as said At3g23000, and preferably the activity is increased non-targeted.

[23421] Accordingly, in one embodiment, the molecule which activity is to be increased in the process of the invention is the gene product with an activity as a “protein kinase”, preferably it is the molecule of section (a) or (b) of this paragraph.

[23422] In particular, it was observed that in plants, especially in Arabidopsis thaliana, increasing or generating the activity of a gene product non-targeted with the activity of a “protein kinase”, preferably being encoded by a gene comprising the nucleic acid sequence SEQ ID NO. 1815, preferably the coding region thereof, conferred the production of or the increase in phenylalanine compared with the wild type control.

[23423] The nucleic acid sequence of At3g23000 from Arabidopsis thaliana, e.g. as shown in the respective line in column 5 of Table I, application no. 3, has been published in F. And the activity of the gene product thereof is the activity of protein kinase.

[23424] Accordingly, in one embodiment, the process of the present invention for producing serine in a non-human organism, like a microorganism or a plant or a part thereof, comprises increasing or generating the activity of a gene product with the activity of a gene product conferring the activity of “protein kinase”, especially from Arabidopsis thaliana or its functional equivalent or its homolog, e.g. the increase of
[23425] (a) a gene product of a gene comprising the nucleic acid molecule as shown in the respective line in column 5 of Table I, application no. 3, preferably the coding region thereof, or a homolog or a fragment thereof, and being depicted in the same respective line as said At3g23000, or a functional equivalent or a homolog thereof as shown in column 8 of Table I, application no. 3, preferably the coding region thereof, particularly a homolog or functional equivalent as shown in column 8 of Table I B, application no. 3, and being depicted in the same respective line as said At3g23000, and preferably the activity is increased non-targeted, or
[23426] (b) a polypeptide comprising a polypeptide, a consensus sequence or at least a polypeptide motif as shown in the respective line in column 5 of Table II or in column 8 of Table IV, application no. 3, respectively, and being depicted in the same respective line as said At3g23000, or a functional equivalent or a homolog thereof as depicted in column 8 of Table II, application no. 3, preferably a homolog or functional equivalent as depicted in column 8 of Table II B, application no. 3, and being depicted in the same respective line as said At3g23000, and preferably the activity is increased non-targeted.

[23427] Accordingly, in one embodiment, the molecule which activity is to be increased in the process of the invention is the gene product with an activity as a “protein kinase”, preferably it is the molecule of section (a) or (b) of this paragraph.

[23428] In particular, it was observed that in plants, especially in Arabidopsis thaliana, increasing or generating the activity of a gene product non-targeted with the activity of a “protein kinase”, preferably being encoded by a gene comprising the nucleic acid sequence SEQ ID NO. 1815, preferably the coding region thereof, conferred the production of or the increase in serine compared with the wild type control.

[23429] The nucleic acid sequence of At3g23000 from Arabidopsis thaliana, e.g. as shown in the respective line in column 5 of Table I, application no. 3, has been published in F. And the activity of the gene product thereof is the activity of protein kinase.

[23430] Accordingly, in one embodiment, the process of the present invention for producing tyrosine in a non-human organism, like a microorganism or a plant or a part thereof, comprises increasing or generating the activity of a gene product with the activity of a gene product conferring the activity of “protein kinase”, especially from Arabidopsis thaliana or its functional equivalent or its homolog, e.g. the increase of
[23431] (a) a gene product of a gene comprising the nucleic acid molecule as shown in the respective line in column 5 of Table I, application no. 3, preferably the coding region thereof, or a homolog or a fragment thereof, and being depicted in the same respective line as said At3g23000, or a functional equivalent or a homolog thereof as shown in column 8 of Table I, application no. 3, preferably the coding region thereof, particularly a homolog or functional equivalent as shown in column 8 of Table I B, application no. 3, and being depicted in the same respective line as said At3g23000, and preferably the activity is increased non-targeted, or
[23432] (b) a polypeptide comprising a polypeptide, a consensus sequence or at least a polypeptide motif as shown in the respective line in column 5 of Table II or in column 8 of Table IV, application no. 3, respectively, and being depicted in the same respective line as said At3g23000, or a functional equivalent or a homolog thereof as depicted in column 8 of Table II, application no. 3, preferably a homolog or functional equivalent as depicted in column 8 of Table II B, application no. 3, and being depicted in the same respective line as said At3g23000, and preferably the activity is increased non-targeted.

[23433] Accordingly, in one embodiment, the molecule which activity is to be increased in the process of the invention is the gene product with an activity as a “protein kinase”, preferably it is the molecule of section (a) or (b) of this paragraph.

[23434] In particular, it was observed that in plants, especially in Arabidopsis thaliana, increasing or generating the activity of a gene product non-targeted with the activity of a “protein kinase”, preferably being encoded by a gene comprising the nucleic acid sequence SEQ ID NO. 1815, preferably the coding region thereof, conferred the production of or the increase in tyrosine compared with the wild type control.

[23435] The nucleic acid sequence of At3g23000 from Arabidopsis thaliana, e.g. as shown in the respective line in column 5 of Table I, application no. 3, has been published in F. And the activity of the gene product thereof is the activity of protein kinase.

[23436] Accordingly, in one embodiment, the process of the present invention for producing 5-oxoproline in a non-human organism, like a microorganism or a plant or a part thereof, comprises increasing or generating the activity of a gene product with the activity of a gene product conferring the activity of “protein kinase”, especially from Arabidopsis thaliana or its functional equivalent or its homolog, e.g. the increase of
[23437] (a) a gene product of a gene comprising the nucleic acid molecule as shown in the respective line in column 5 of Table I, application no. 3, preferably the coding region thereof, or a homolog or a fragment thereof, and being depicted in the same respective line as said At3g23000, or a functional equivalent or a homolog thereof as shown in column 8 of Table I, application no. 3, preferably the coding region thereof, particularly a homolog or functional equivalent as shown in column 8 of Table I B, application no. 3, and being depicted in the same respective line as said At3g23000, and preferably the activity is increased non-targeted, or
[23438] (b) a polypeptide comprising a polypeptide, a consensus sequence or at least a polypeptide motif as shown in the respective line in column 5 of Table II or in column 8 of Table IV, application no. 3, respectively, and being depicted in the same respective line as said At3g23000, or a functional equivalent or a homolog thereof as depicted in column 8 of Table II, application no. 3, preferably a homolog or functional equivalent as depicted in column 8 of Table II B, application no. 3, and being depicted in the same respective line as said At3g23000, and preferably the activity is increased non-targeted.

[23439] Accordingly, in one embodiment, the molecule which activity is to be increased in the process of the invention is the gene product with an activity as a “protein kinase”, preferably it is the molecule of section (a) or (b) of this paragraph.

[23440] In particular, it was observed that in plants, especially in Arabidopsis thaliana, increasing or generating the activity of a gene product non-targeted with the activity of a “protein kinase”, preferably being encoded by a gene comprising the nucleic acid sequence SEQ ID NO. 1815, preferably the coding region thereof, conferred the production of or the increase in 5-oxoproline compared with the wild type control.

[23441] The nucleic acid sequence of At3g26400 from Arabidopsis thaliana, e.g. as shown in the respective line in column 5 of Table I, application no. 3, has been published in F. And the activity of the gene product thereof is the activity of eukaryotic translation initiation factor.

[23442] Accordingly, in one embodiment, the process of the present invention for producing serine in a non-human organism, like a microorganism or a plant or a part thereof, comprises increasing or generating the activity of a gene product with the activity of a gene product conferring the activity of “eukaryotic translation initiation factor”, especially from Arabidopsis thaliana or its functional equivalent or its homolog, e.g. the increase of
[23443] (a) a gene product of a gene comprising the nucleic acid molecule as shown in the respective line in column 5 of Table I, application no. 3, preferably the coding region thereof, or a homolog or a fragment thereof, and being depicted in the same respective line as said At3g26400, or a functional equivalent or a homolog thereof as shown in column 8 of Table I, application no. 3, preferably the coding region thereof, particularly a homolog or functional equivalent as shown in column 8 of Table I B, application no. 3, and being depicted in the same respective line as said At3g26400, and preferably the activity is increased non-targeted, or
[23444] (b) a polypeptide comprising a polypeptide, a consensus sequence or at least a polypeptide motif as shown in the respective line in column 5 of Table II or in column 8 of Table IV, application no. 3, respectively, and being depicted in the same respective line as said At3g26400, or a functional equivalent or a homolog thereof as depicted in column 8 of Table II, application no. 3, preferably a homolog or functional equivalent as depicted in column 8 of Table II B, application no. 3, and being depicted in the same respective line as said At3g26400, and preferably the activity is increased non-targeted.

[23445] Accordingly, in one embodiment, the molecule which activity is to be increased in the process of the invention is the gene product with an activity as a “eukaryotic translation initiation factor”, preferably it is the molecule of section (a) or (b) of this paragraph.

[23446] In particular, it was observed that in plants, especially in Arabidopsis thaliana, increasing or generating the activity of a gene product non-targeted with the activity of a “eukaryotic translation initiation factor”, preferably being encoded by a gene comprising the nucleic acid sequence SEQ ID NO. 68727, preferably the coding region thereof, conferred the production of or the increase in serine compared with the wild type control.

[23447] The nucleic acid sequence of At3g27300 from Arabidopsis thaliana, e.g. as shown in the respective line in column 5 of Table I, application no. 3, has been published in F. And the activity of the gene product thereof is the activity of glucose-6-phosphate 1-dehydrogenase.

[23448] Accordingly, in one embodiment, the process of the present invention for producing tyrosine in a non-human organism, like a microorganism or a plant or a part thereof, comprises increasing or generating the activity of a gene product with the activity of a gene product conferring the activity of “glucose-6-phosphate 1-dehydrogenase”, especially from Arabidopsis thaliana or its functional equivalent or its homolog, e.g. the increase of
[23449] (a) a gene product of a gene comprising the nucleic acid molecule as shown in the respective line in column 5 of Table I, application no. 3, preferably the coding region thereof, or a homolog or a fragment thereof, and being depicted in the same respective line as said At3g27300, or a functional equivalent or a homolog thereof as shown in column 8 of Table I, application no. 3, preferably the coding region thereof, particularly a homolog or functional equivalent as shown in column 8 of Table I B, application no. 3, and being depicted in the same respective line as said At3g27300, and preferably the activity is increased non-targeted, or
[23450] (b) a polypeptide comprising a polypeptide, a consensus sequence or at least a polypeptide motif as shown in the respective line in column 5 of Table II or in column 8 of Table IV, application no. 3, respectively, and being depicted in the same respective line as said At3g27300, or a functional equivalent or a homolog thereof as depicted in column 8 of Table II, application no. 3, preferably a homolog or functional equivalent as depicted in column 8 of Table II B, application no. 3, and being depicted in the same respective line as said At3g27300, and preferably the activity is increased non-targeted.

[23451] Accordingly, in one embodiment, the molecule which activity is to be increased in the process of the invention is the gene product with an activity as a “glucose-6-phosphate 1-dehydrogenase”, preferably it is the molecule of section (a) or (b) of this paragraph.

[23452] In particular, it was observed that in plants, especially in Arabidopsis thaliana, increasing or generating the activity of a gene product non-targeted with the activity of a “glucose-6-phosphate 1-dehydrogenase”, preferably being encoded by a gene comprising the nucleic acid sequence SEQ ID NO. 23002, preferably the coding region thereof, conferred the production of or the increase in tyrosine compared with the wild type control.

[23453] The nucleic acid sequence of At3g27540 from Arabidopsis thaliana, e.g. as shown in the respective line in column 5 of Table I, application no. 3, has been published in F. And the activity of the gene product thereof is the activity of glycosyl transferase.

[23454] Accordingly, in one embodiment, the process of the present invention for producing phenylalanine in a non-human organism, like a microorganism or a plant or a part thereof, comprises increasing or generating the activity of a gene product with the activity of a gene product conferring the activity of “glycosyl transferase”, especially from Arabidopsis thaliana or its functional equivalent or its homolog, e.g. the increase of
[23455] (a) a gene product of a gene comprising the nucleic acid molecule as shown in the respective line in column 5 of Table I, application no. 3, preferably the coding region thereof, or a homolog or a fragment thereof, and being depicted in the same respective line as said At3g27540, or a functional equivalent or a homolog thereof as shown in column 8 of Table I, application no. 3, preferably the coding region thereof, particularly a homolog or functional equivalent as shown in column 8 of Table I B, application no. 3, and being depicted in the same respective line as said At3g27540, and preferably the activity is increased non-targeted, or
[23456] (b) a polypeptide comprising a polypeptide, a consensus sequence or at least a polypeptide motif as shown in the respective line in column 5 of Table II or in column 8 of Table IV, application no. 3, respectively, and being depicted in the same respective line as said At3g27540, or a functional equivalent or a homolog thereof as depicted in column 8 of Table II, application no. 3, preferably a homolog or functional equivalent as depicted in column 8 of Table II B, application no. 3, and being depicted in the same respective line as said At3g27540, and preferably the activity is increased non-targeted.

[23457] Accordingly, in one embodiment, the molecule which activity is to be increased in the process of the invention is the gene product with an activity as a “glycosyl transferase”, preferably it is the molecule of section (a) or (b) of this paragraph.

[23458] In particular, it was observed that in plants, especially in Arabidopsis thaliana, increasing or generating the activity of a gene product non-targeted with the activity of a “glycosyl transferase”, preferably being encoded by a gene comprising the nucleic acid sequence SEQ ID NO. 68777, preferably the coding region thereof, conferred the production of or the increase in phenylalanine compared with the wild type control.

[23459] The nucleic acid sequence of At3g27540 from Arabidopsis thaliana, e.g. as shown in the respective line in column 5 of Table I, application no. 3, has been published in F. And the activity of the gene product thereof is the activity of glycosyl transferase.

[23460] Accordingly, in one embodiment, the process of the present invention for producing tyrosine in a non-human organism, like a microorganism or a plant or a part thereof, comprises increasing or generating the activity of a gene product with the activity of a gene product conferring the activity of “glycosyl transferase”, especially from Arabidopsis thaliana or its functional equivalent or its homolog, e.g. the increase of
[23461] (a) a gene product of a gene comprising the nucleic acid molecule as shown in the respective line in column 5 of Table I, application no. 3, preferably the coding region thereof, or a homolog or a fragment thereof, and being depicted in the same respective line as said At3g27540, or a functional equivalent or a homolog thereof as shown in column 8 of Table I, application no. 3, preferably the coding region thereof, particularly a homolog or functional equivalent as shown in column 8 of Table I B, application no. 3, and being depicted in the same respective line as said At3g27540, and preferably the activity is increased non-targeted, or
[23462] (b) a polypeptide comprising a polypeptide, a consensus sequence or at least a polypeptide motif as shown in the respective line in column 5 of Table II or in column 8 of Table IV, application no. 3, respectively, and being depicted in the same respective line as said At3g27540, or a functional equivalent or a homolog thereof as depicted in column 8 of Table II, application no. 3, preferably a homolog or functional equivalent as depicted in column 8 of Table II B, application no. 3, and being depicted in the same respective line as said At3g27540, and preferably the activity is increased non-targeted.

[23463] Accordingly, in one embodiment, the molecule which activity is to be increased in the process of the invention is the gene product with an activity as a “glycosyl transferase”, preferably it is the molecule of section (a) or (b) of this paragraph.

[23464] In particular, it was observed that in plants, especially in Arabidopsis thaliana, increasing or generating the activity of a gene product non-targeted with the activity of a “glycosyl transferase”, preferably being encoded by a gene comprising the nucleic acid sequence SEQ ID NO. 68777, preferably the coding region thereof, conferred the production of or the increase in tyrosine compared with the wild type control.

[23465] The nucleic acid sequence of At3g61830 from Arabidopsis thaliana, e.g. as shown in the respective line in column 5 of Table I, application no. 3, has been published in F. And the activity of the gene product thereof is the activity of auxin response factor.

[23466] Accordingly, in one embodiment, the process of the present invention for producing phenylalanine in a non-human organism, like a microorganism or a plant or a part thereof, comprises increasing or generating the activity of a gene product with the activity of a gene product conferring the activity of “auxin response factor”, especially from Arabidopsis thaliana or its functional equivalent or its homolog, e.g. the increase of
[23467] (a) a gene product of a gene comprising the nucleic acid molecule as shown in the respective line in column 5 of Table I, application no. 3, preferably the coding region thereof, or a homolog or a fragment thereof, and being depicted in the same respective line as said At3g61830, or a functional equivalent or a homolog thereof as shown in column 8 of Table I, application no. 3, preferably the coding region thereof, particularly a homolog or functional equivalent as shown in column 8 of Table I B, application no. 3, and being depicted in the same respective line as said At3g61830, and preferably the activity is increased non-targeted, or
[23468] (b) a polypeptide comprising a polypeptide, a consensus sequence or at least a polypeptide motif as shown in the respective line in column 5 of Table II or in column 8 of Table IV, application no. 3, respectively, and being depicted in the same respective line as said At3g61830, or a functional equivalent or a homolog thereof as depicted in column 8 of Table II, application no. 3, preferably a homolog or functional equivalent as depicted in column 8 of Table II B, application no. 3, and being depicted in the same respective line as said At3g61830, and preferably the activity is increased non-targeted.

[23469] Accordingly, in one embodiment, the molecule which activity is to be increased in the process of the invention is the gene product with an activity as a “auxin response factor”, preferably it is the molecule of section (a) or (b) of this paragraph.

[23470] In particular, it was observed that in plants, especially in Arabidopsis thaliana, increasing or generating the activity of a gene product non-targeted with the activity of a “auxin response factor”, preferably being encoded by a gene comprising the nucleic acid sequence SEQ ID NO. 2367, preferably the coding region thereof, conferred the production of or the increase in phenylalanine compared with the wild type control.

[23471] The nucleic acid sequence of At3g61830 from Arabidopsis thaliana, e.g. as shown in the respective line in column 5 of Table I, application no. 3, has been published in F. And the activity of the gene product thereof is the activity of auxin response factor.

[23472] Accordingly, in one embodiment, the process of the present invention for producing tyrosine in a non-human organism, like a microorganism or a plant or a part thereof, comprises increasing or generating the activity of a gene product with the activity of a gene product conferring the activity of “auxin response factor”, especially from Arabidopsis thaliana or its functional equivalent or its homolog, e.g. the increase of
[23473] (a) a gene product of a gene comprising the nucleic acid molecule as shown in the respective line in column 5 of Table I, application no. 3, preferably the coding region thereof, or a homolog or a fragment thereof, and being depicted in the same respective line as said At3g61830, or a functional equivalent or a homolog thereof as shown in column 8 of Table I, application no. 3, preferably the coding region thereof, particularly a homolog or functional equivalent as shown in column 8 of Table I B, application no. 3, and being depicted in the same respective line as said At3g61830, and preferably the activity is increased non-targeted, or
[23474] (b) a polypeptide comprising a polypeptide, a consensus sequence or at least a polypeptide motif as shown in the respective line in column 5 of Table II or in column 8 of Table IV, application no. 3, respectively, and being depicted in the same respective line as said At3g61830, or a functional equivalent or a homolog thereof as depicted in column 8 of Table II, application no. 3, preferably a homolog or functional equivalent as depicted in column 8 of Table II B, application no. 3, and being depicted in the same respective line as said At3g61830, and preferably the activity is increased non-targeted.

[23475] Accordingly, in one embodiment, the molecule which activity is to be increased in the process of the invention is the gene product with an activity as a “auxin response factor”, preferably it is the molecule of section (a) or (b) of this paragraph.

[23476] In particular, it was observed that in plants, especially in Arabidopsis thaliana, increasing or generating the activity of a gene product non-targeted with the activity of a “auxin response factor”, preferably being encoded by a gene comprising the nucleic acid sequence SEQ ID NO. 2367, preferably the coding region thereof, conferred the production of or the increase in tyrosine compared with the wild type control.

[23477] The nucleic acid sequence of At3g62930 from Arabidopsis thaliana, e.g. as shown in the respective line in column 5 of Table I, application no. 3, has been published in F. And the activity of the gene product thereof is the activity of monthiol glutaredoxin.

[23478] Accordingly, in one embodiment, the process of the present invention for producing aspartate in a non-human organism, like a microorganism or a plant or a part thereof, comprises increasing or generating the activity of a gene product with the activity of a gene product conferring the activity of “monthiol glutaredoxin”, especially from Arabidopsis thaliana or its functional equivalent or its homolog, e.g. the increase of
[23479] (a) a gene product of a gene comprising the nucleic acid molecule as shown in the respective line in column 5 of Table I, application no. 3, preferably the coding region thereof, or a homolog or a fragment thereof, and being depicted in the same respective line as said At3g62930, or a functional equivalent or a homolog thereof as shown in column 8 of Table I, application no. 3, preferably the coding region thereof, particularly a homolog or functional equivalent as shown in column 8 of Table I B, application no. 3, and being depicted in the same respective line as said At3g62930, and preferably the activity is increased non-targeted, or
[23480] (b) a polypeptide comprising a polypeptide, a consensus sequence or at least a polypeptide motif as shown in the respective line in column 5 of Table II or in column 8 of Table IV, application no. 3, respectively, and being depicted in the same respective line as said At3g62930, or a functional equivalent or a homolog thereof as depicted in column 8 of Table II, application no. 3, preferably a homolog or functional equivalent as depicted in column 8 of Table II B, application no. 3, and being depicted in the same respective line as said At3g62930, and preferably the activity is increased non-targeted.

[23481] Accordingly, in one embodiment, the molecule which activity is to be increased in the process of the invention is the gene product with an activity as a “monthiol glutaredoxin”, preferably it is the molecule of section (a) or (b) of this paragraph.

[23482] In particular, it was observed that in plants, especially in Arabidopsis thaliana, increasing or generating the activity of a gene product non-targeted with the activity of a “monthiol glutaredoxin”, preferably being encoded by a gene comprising the nucleic acid sequence SEQ ID NO. 2573, preferably the coding region thereof, conferred the production of or the increase in aspartate compared with the wild type control.

[23483] The nucleic acid sequence of At3g62930 from Arabidopsis thaliana, e.g. as shown in the respective line in column 5 of Table I, application no. 3, has been published in F. And the activity of the gene product thereof is the activity of monthiol glutaredoxin.

[23484] Accordingly, in one embodiment, the process of the present invention for producing phenylalanine in a non-human organism, like a microorganism or a plant or a part thereof, comprises increasing or generating the activity of a gene product with the activity of a gene product conferring the activity of “monthiol glutaredoxin”, especially from Arabidopsis thaliana or its functional equivalent or its homolog, e.g. the increase of
[23485] (a) a gene product of a gene comprising the nucleic acid molecule as shown in the respective line in column 5 of Table I, application no. 3, preferably the coding region thereof, or a homolog or a fragment thereof, and being depicted in the same respective line as said At3g62930, or a functional equivalent or a homolog thereof as shown in column 8 of Table I, application no. 3, preferably the coding region thereof, particularly a homolog or functional equivalent as shown in column 8 of Table I B, application no. 3, and being depicted in the same respective line as said At3g62930, and preferably the activity is increased non-targeted, or
[23486] (b) a polypeptide comprising a polypeptide, a consensus sequence or at least a polypeptide motif as shown in the respective line in column 5 of Table II or in column 8 of Table IV, application no. 3, respectively, and being depicted in the same respective line as said At3g62930, or a functional equivalent or a homolog thereof as depicted in column 8 of Table II, application no. 3, preferably a homolog or functional equivalent as depicted in column 8 of Table II B, application no. 3, and being depicted in the same respective line as said At3g62930, and preferably the activity is increased non-targeted.

[23487] Accordingly, in one embodiment, the molecule which activity is to be increased in the process of the invention is the gene product with an activity as a “monthiol glutaredoxin”, preferably it is the molecule of section (a) or (b) of this paragraph.

[23488] In particular, it was observed that in plants, especially in Arabidopsis thaliana, increasing or generating the activity of a gene product non-targeted with the activity of a “monthiol glutaredoxin”, preferably being encoded by a gene comprising the nucleic acid sequence SEQ ID NO. 2573, preferably the coding region thereof, conferred the production of or the increase in phenylalanine compared with the wild type control.

[23489] The nucleic acid sequence of At3g62950 from Arabidopsis thaliana, e.g. as shown in the respective line in column 5 of Table I, application no. 3, has been published in F. And the activity of the gene product thereof is the activity of glutaredoxin.

[23490] Accordingly, in one embodiment, the process of the present invention for producing phenylalanine in a non-human organism, like a microorganism or a plant or a part thereof, comprises increasing or generating the activity of a gene product with the activity of a gene product conferring the activity of “glutaredoxin”, especially from Arabidopsis thaliana or its functional equivalent or its homolog, e.g. the increase of
[23491] (a) a gene product of a gene comprising the nucleic acid molecule as shown in the respective line in column 5 of Table I, application no. 3, preferably the coding region thereof, or a homolog or a fragment thereof, and being depicted in the same respective line as said At3g62950, or a functional equivalent or a homolog thereof as shown in column 8 of Table I, application no. 3, preferably the coding region thereof, particularly a homolog or functional equivalent as shown in column 8 of Table I B, application no. 3, and being depicted in the same respective line as said At3g62950, and preferably the activity is increased non-targeted, or
[23492] (b) a polypeptide comprising a polypeptide, a consensus sequence or at least a polypeptide motif as shown in the respective line in column 5 of Table II or in column 8 of Table IV, application no. 3, respectively, and being depicted in the same respective line as said At3g62950, or a functional equivalent or a homolog thereof as depicted in column 8 of Table II, application no. 3, preferably a homolog or functional equivalent as depicted in column 8 of Table II B, application no. 3, and being depicted in the same respective line as said At3g62950, and preferably the activity is increased non-targeted.

[23493] Accordingly, in one embodiment, the molecule which activity is to be increased in the process of the invention is the gene product with an activity as a “glutaredoxin”, preferably it is the molecule of section (a) or (b) of this paragraph.

[23494] In particular, it was observed that in plants, especially in Arabidopsis thaliana, increasing or generating the activity of a gene product non-targeted with the activity of a “glutaredoxin”, preferably being encoded by a gene comprising the nucleic acid sequence SEQ ID NO. 2935, preferably the coding region thereof, conferred the production of or the increase in phenylalanine compared with the wild type control.

[23495] The nucleic acid sequence of At3g62950 from Arabidopsis thaliana, e.g. as shown in the respective line in column 5 of Table I, application no. 3, has been published in F. And the activity of the gene product thereof is the activity of glutaredoxin.

[23496] Accordingly, in one embodiment, the process of the present invention for producing tyrosine in a non-human organism, like a microorganism or a plant or a part thereof, comprises increasing or generating the activity of a gene product with the activity of a gene product conferring the activity of “glutaredoxin”, especially from Arabidopsis thaliana or its functional equivalent or its homolog, e.g. the increase of
[23497] (a) a gene product of a gene comprising the nucleic acid molecule as shown in the respective line in column 5 of Table I, application no. 3, preferably the coding region thereof, or a homolog or a fragment thereof, and being depicted in the same respective line as said At3g62950, or a functional equivalent or a homolog thereof as shown in column 8 of Table I, application no. 3, preferably the coding region thereof, particularly a homolog or functional equivalent as shown in column 8 of Table I B, application no. 3, and being depicted in the same respective line as said At3g62950, and preferably the activity is increased non-targeted, or
[23498] (b) a polypeptide comprising a polypeptide, a consensus sequence or at least a polypeptide motif as shown in the respective line in column 5 of Table II or in column 8 of Table IV, application no. 3, respectively, and being depicted in the same respective line as said At3g62950, or a functional equivalent or a homolog thereof as depicted in column 8 of Table II, application no. 3, preferably a homolog or functional equivalent as depicted in column 8 of Table II B, application no. 3, and being depicted in the same respective line as said At3g62950, and preferably the activity is increased non-targeted.

[23499] Accordingly, in one embodiment, the molecule which activity is to be increased in the process of the invention is the gene product with an activity as a “glutaredoxin”, preferably it is the molecule of section (a) or (b) of this paragraph.

[23500] In particular, it was observed that in plants, especially in Arabidopsis thaliana, increasing or generating the activity of a gene product non-targeted with the activity of a “glutaredoxin”, preferably being encoded by a gene comprising the nucleic acid sequence SEQ ID NO. 2935, preferably the coding region thereof, conferred the production of or the increase in tyrosine compared with the wild type control.

[23501] The nucleic acid sequence of At3g62950 from Arabidopsis thaliana, e.g. as shown in the respective line in column 5 of Table I, application no. 3, has been published in F. And the activity of the gene product thereof is the activity of glutaredoxin.

[23502] Accordingly, in one embodiment, the process of the present invention for producing 5-oxoproline in a non-human organism, like a microorganism or a plant or a part thereof, comprises increasing or generating the activity of a gene product with the activity of a gene product conferring the activity of “glutaredoxin”, especially from Arabidopsis thaliana or its functional equivalent or its homolog, e.g. the increase of
[23503] (a) a gene product of a gene comprising the nucleic acid molecule as shown in the respective line in column 5 of Table I, application no. 3, preferably the coding region thereof, or a homolog or a fragment thereof, and being depicted in the same respective line as said At3g62950, or a functional equivalent or a homolog thereof as shown in column 8 of Table I, application no. 3, preferably the coding region thereof, particularly a homolog or functional equivalent as shown in column 8 of Table I B, application no. 3, and being depicted in the same respective line as said At3g62950, and preferably the activity is increased non-targeted, or
[23504] (b) a polypeptide comprising a polypeptide, a consensus sequence or at least a polypeptide motif as shown in the respective line in column 5 of Table II or in column 8 of Table IV, application no. 3, respectively, and being depicted in the same respective line as said At3g62950, or a functional equivalent or a homolog thereof as depicted in column 8 of Table II, application no. 3, preferably a homolog or functional equivalent as depicted in column 8 of Table II B, application no. 3, and being depicted in the same respective line as said At3g62950, and preferably the activity is increased non-targeted.

[23505] Accordingly, in one embodiment, the molecule which activity is to be increased in the process of the invention is the gene product with an activity as a “glutaredoxin”, preferably it is the molecule of section (a) or (b) of this paragraph.

[23506] In particular, it was observed that in plants, especially in Arabidopsis thaliana, increasing or generating the activity of a gene product non-targeted with the activity of a “glutaredoxin”, preferably being encoded by a gene comprising the nucleic acid sequence SEQ ID NO. 2935, preferably the coding region thereof, conferred the production of or the increase in 5-oxoproline compared with the wild type control.

[23507] The nucleic acid sequence of At4g15660 from Arabidopsis thaliana, e.g. as shown in the respective line in column 5 of Table I, application no. 3, has been published in F. And the activity of the gene product thereof is the activity of monothiol glutaredoxin.

[23508] Accordingly, in one embodiment, the process of the present invention for producing phenylalanine in a non-human organism, like a microorganism or a plant or a part thereof, comprises increasing or generating the activity of a gene product with the activity of a gene product conferring the activity of “monothiol glutaredoxin”, especially from Arabidopsis thaliana or its functional equivalent or its homolog, e.g. the increase of
[23509] (a) a gene product of a gene comprising the nucleic acid molecule as shown in the respective line in column 5 of Table I, application no. 3, preferably the coding region thereof, or a homolog or a fragment thereof, and being depicted in the same respective line as said At4g15660, or a functional equivalent or a homolog thereof as shown in column 8 of Table I, application no. 3, preferably the coding region thereof, particularly a homolog or functional equivalent as shown in column 8 of Table I B, application no. 3, and being depicted in the same respective line as said At4g15660, and preferably the activity is increased non-targeted, or
[23510] (b) a polypeptide comprising a polypeptide, a consensus sequence or at least a polypeptide motif as shown in the respective line in column 5 of Table II or in column 8 of Table IV, application no. 3, respectively, and being depicted in the same respective line as said At4g15660, or a functional equivalent or a homolog thereof as depicted in column 8 of Table II, application no. 3, preferably a homolog or functional equivalent as depicted in column 8 of Table II B, application no. 3, and being depicted in the same respective line as said At4g15660, and preferably the activity is increased non-targeted.

[23511] Accordingly, in one embodiment, the molecule which activity is to be increased in the process of the invention is the gene product with an activity as a “monothiol glutaredoxin”, preferably it is the molecule of section (a) or (b) of this paragraph.

[23512] In particular, it was observed that in plants, especially in Arabidopsis thaliana, increasing or generating the activity of a gene product non-targeted with the activity of a “monothiol glutaredoxin”, preferably being encoded by a gene comprising the nucleic acid sequence SEQ ID NO. 23482, preferably the coding region thereof, conferred the production of or the increase in phenylalanine compared with the wild type control.

[23513] The nucleic acid sequence of At4g15660 from Arabidopsis thaliana, e.g. as shown in the respective line in column 5 of Table I, application no. 3, has been published in F. And the activity of the gene product thereof is the activity of monothiol glutaredoxin.

[23514] Accordingly, in one embodiment, the process of the present invention for producing tyrosine in a non-human organism, like a microorganism or a plant or a part thereof, comprises increasing or generating the activity of a gene product with the activity of a gene product conferring the activity of “monothiol glutaredoxin”, especially from Arabidopsis thaliana or its functional equivalent or its homolog, e.g. the increase of
[23515] (a) a gene product of a gene comprising the nucleic acid molecule as shown in the respective line in column 5 of Table I, application no. 3, preferably the coding region thereof, or a homolog or a fragment thereof, and being depicted in the same respective line as said At4g15660, or a functional equivalent or a homolog thereof as shown in column 8 of Table I, application no. 3, preferably the coding region thereof, particularly a homolog or functional equivalent as shown in column 8 of Table I B, application no. 3, and being depicted in the same respective line as said At4g15660, and preferably the activity is increased non-targeted, or
[23516] (b) a polypeptide comprising a polypeptide, a consensus sequence or at least a polypeptide motif as shown in the respective line in column 5 of Table II or in column 8 of Table IV, application no. 3, respectively, and being depicted in the same respective line as said At4g15660, or a functional equivalent or a homolog thereof as depicted in column 8 of Table II, application no. 3, preferably a homolog or functional equivalent as depicted in column 8 of Table II B, application no. 3, and being depicted in the same respective line as said At4g15660, and preferably the activity is increased non-targeted.

[23517] Accordingly, in one embodiment, the molecule which activity is to be increased in the process of the invention is the gene product with an activity as a “monothiol glutaredoxin”, preferably it is the molecule of section (a) or (b) of this paragraph.

[23518] In particular, it was observed that in plants, especially in Arabidopsis thaliana, increasing or generating the activity of a gene product non-targeted with the activity of a “monothiol glutaredoxin”, preferably being encoded by a gene comprising the nucleic acid sequence SEQ ID NO. 23482, preferably the coding region thereof, conferred the production of or the increase in tyrosine compared with the wild type control.

[23519] The nucleic acid sequence of At4g15670 from Arabidopsis thaliana, e.g. as shown in the respective line in column 5 of Table I, application no. 3, has been published in F. And the activity of the gene product thereof is the activity of monothiol glutaredoxin.

[23520] Accordingly, in one embodiment, the process of the present invention for producing tyrosine in a non-human organism, like a microorganism or a plant or a part thereof, comprises increasing or generating the activity of a gene product with the activity of a gene product conferring the activity of “monothiol glutaredoxin”, especially from Arabidopsis thaliana or its functional equivalent or its homolog, e.g. the increase of
[23521] (a) a gene product of a gene comprising the nucleic acid molecule as shown in the respective line in column 5 of Table I, application no. 3, preferably the coding region thereof, or a homolog or a fragment thereof, and being depicted in the same respective line as said At4g15670, or a functional equivalent or a homolog thereof as shown in column 8 of Table I, application no. 3, preferably the coding region thereof, particularly a homolog or functional equivalent as shown in column 8 of Table I B, application no. 3, and being depicted in the same respective line as said At4g15670, and preferably the activity is increased non-targeted, or
[23522] (b) a polypeptide comprising a polypeptide, a consensus sequence or at least a polypeptide motif as shown in the respective line in column 5 of Table II or in column 8 of Table IV, application no. 3, respectively, and being depicted in the same respective line as said At4g15670, or a functional equivalent or a homolog thereof as depicted in column 8 of Table II, application no. 3, preferably a homolog or functional equivalent as depicted in column 8 of Table II B, application no. 3, and being depicted in the same respective line as said At4g15670, and preferably the activity is increased non-targeted.

[23523] Accordingly, in one embodiment, the molecule which activity is to be increased in the process of the invention is the gene product with an activity as a “monothiol glutaredoxin”, preferably it is the molecule of section (a) or (b) of this paragraph.

[23524] In particular, it was observed that in plants, especially in Arabidopsis thaliana, increasing or generating the activity of a gene product non-targeted with the activity of a “monothiol glutaredoxin”, preferably being encoded by a gene comprising the nucleic acid sequence SEQ ID NO. 3279, preferably the coding region thereof, conferred the production of or the increase in tyrosine compared with the wild type control.

[23525] The nucleic acid sequence of At4g15690 from Arabidopsis thaliana, e.g. as shown in the respective line in column 5 of Table I, application no. 3, has been published in F. And the activity of the gene product thereof is the activity of monothiol glutaredoxin.

[23526] Accordingly, in one embodiment, the process of the present invention for producing aspartate in a non-human organism, like a microorganism or a plant or a part thereof, comprises increasing or generating the activity of a gene product with the activity of a gene product conferring the activity of “monothiol glutaredoxin”, especially from Arabidopsis thaliana or its functional equivalent or its homolog, e.g. the increase of
[23527] (a) a gene product of a gene comprising the nucleic acid molecule as shown in the respective line in column 5 of Table I, application no. 3, preferably the coding region thereof, or a homolog or a fragment thereof, and being depicted in the same respective line as said At4g15690, or a functional equivalent or a homolog thereof as shown in column 8 of Table I, application no. 3, preferably the coding region thereof, particularly a homolog or functional equivalent as shown in column 8 of Table I B, application no. 3, and being depicted in the same respective line as said At4g15690, and preferably the activity is increased non-targeted, or
[23528] (b) a polypeptide comprising a polypeptide, a consensus sequence or at least a polypeptide motif as shown in the respective line in column 5 of Table II or in column 8 of Table IV, application no. 3, respectively, and being depicted in the same respective line as said At4g15690, or a functional equivalent or a homolog thereof as depicted in column 8 of Table II, application no. 3, preferably a homolog or functional equivalent as depicted in column 8 of Table II B, application no. 3, and being depicted in the same respective line as said At4g15690, and preferably the activity is increased non-targeted.

[23529] Accordingly, in one embodiment, the molecule which activity is to be increased in the process of the invention is the gene product with an activity as a “monothiol glutaredoxin”, preferably it is the molecule of section (a) or (b) of this paragraph.

[23530] In particular, it was observed that in plants, especially in Arabidopsis thaliana, increasing or generating the activity of a gene product non-targeted with the activity of a “monothiol glutaredoxin”, preferably being encoded by a gene comprising the nucleic acid sequence SEQ ID NO. 23844, preferably the coding region thereof, conferred the production of or the increase in aspartate compared with the wild type control.

[23531] The nucleic acid sequence of At4g15690 from Arabidopsis thaliana, e.g. as shown in the respective line in column 5 of Table I, application no. 3, has been published in F. And the activity of the gene product thereof is the activity of monothiol glutaredoxin.

[23532] Accordingly, in one embodiment, the process of the present invention for producing phenylalanine in a non-human organism, like a microorganism or a plant or a part thereof, comprises increasing or generating the activity of a gene product with the activity of a gene product conferring the activity of “monothiol glutaredoxin”, especially from Arabidopsis thaliana or its functional equivalent or its homolog, e.g. the increase of
[23533] (a) a gene product of a gene comprising the nucleic acid molecule as shown in the respective line in column 5 of Table I, application no. 3, preferably the coding region thereof, or a homolog or a fragment thereof, and being depicted in the same respective line as said At4g15690, or a functional equivalent or a homolog thereof as shown in column 8 of Table I, application no. 3, preferably the coding region thereof, particularly a homolog or functional equivalent as shown in column 8 of Table I B, application no. 3, and being depicted in the same respective line as said At4g15690, and preferably the activity is increased non-targeted, or
[23534] (b) a polypeptide comprising a polypeptide, a consensus sequence or at least a polypeptide motif as shown in the respective line in column 5 of Table II or in column 8 of Table IV, application no. 3, respectively, and being depicted in the same respective line as said At4g15690, or a functional equivalent or a homolog thereof as depicted in column 8 of Table II, application no. 3, preferably a homolog or functional equivalent as depicted in column 8 of Table II B, application no. 3, and being depicted in the same respective line as said At4g15690, and preferably the activity is increased non-targeted.

[23535] Accordingly, in one embodiment, the molecule which activity is to be increased in the process of the invention is the gene product with an activity as a “monothiol glutaredoxin”, preferably it is the molecule of section (a) or (b) of this paragraph.

[23536] In particular, it was observed that in plants, especially in Arabidopsis thaliana, increasing or generating the activity of a gene product non-targeted with the activity of a “monothiol glutaredoxin”, preferably being encoded by a gene comprising the nucleic acid sequence SEQ ID NO. 23844, preferably the coding region thereof, conferred the production of or the increase in phenylalanine compared with the wild type control.

[23537] The nucleic acid sequence of At4g15690 from Arabidopsis thaliana, e.g. as shown in the respective line in column 5 of Table I, application no. 3, has been published in F. And the activity of the gene product thereof is the activity of monothiol glutaredoxin.

[23538] Accordingly, in one embodiment, the process of the present invention for producing tyrosine in a non-human organism, like a microorganism or a plant or a part thereof, comprises increasing or generating the activity of a gene product with the activity of a gene product conferring the activity of “monothiol glutaredoxin”, especially from Arabidopsis thaliana or its functional equivalent or its homolog, e.g. the increase of
[23539] (a) a gene product of a gene comprising the nucleic acid molecule as shown in the respective line in column 5 of Table I, application no. 3, preferably the coding region thereof, or a homolog or a fragment thereof, and being depicted in the same respective line as said At4g15690, or a functional equivalent or a homolog thereof as shown in column 8 of Table I, application no. 3, preferably the coding region thereof, particularly a homolog or functional equivalent as shown in column 8 of Table I B, application no. 3, and being depicted in the same respective line as said At4g15690, and preferably the activity is increased non-targeted, or
[23540] (b) a polypeptide comprising a polypeptide, a consensus sequence or at least a polypeptide motif as shown in the respective line in column 5 of Table II or in column 8 of Table IV, application no. 3, respectively, and being depicted in the same respective line as said At4g15690, or a functional equivalent or a homolog thereof as depicted in column 8 of Table II, application no. 3, preferably a homolog or functional equivalent as depicted in column 8 of Table II B, application no. 3, and being depicted in the same respective line as said At4g15690, and preferably the activity is increased non-targeted.

[23541] Accordingly, in one embodiment, the molecule which activity is to be increased in the process of the invention is the gene product with an activity as a “monothiol glutaredoxin”, preferably it is the molecule of section (a) or (b) of this paragraph.

[23542] In particular, it was observed that in plants, especially in Arabidopsis thaliana, increasing or generating the activity of a gene product non-targeted with the activity of a “monothiol glutaredoxin”, preferably being encoded by a gene comprising the nucleic acid sequence SEQ ID NO. 23844, preferably the coding region thereof, conferred the production of or the increase in tyrosine compared with the wild type control.

[23543] The nucleic acid sequence of At4g15690 from Arabidopsis thaliana, e.g. as shown in the respective line in column 5 of Table I, application no. 3, has been published in F. And the activity of the gene product thereof is the activity of monothiol glutaredoxin.

[23544] Accordingly, in one embodiment, the process of the present invention for producing 5-oxoproline in a non-human organism, like a microorganism or a plant or a part thereof, comprises increasing or generating the activity of a gene product with the activity of a gene product conferring the activity of “monothiol glutaredoxin”, especially from Arabidopsis thaliana or its functional equivalent or its homolog, e.g. the increase of
[23545] (a) a gene product of a gene comprising the nucleic acid molecule as shown in the respective line in column 5 of Table I, application no. 3, preferably the coding region thereof, or a homolog or a fragment thereof, and being depicted in the same respective line as said At4g15690, or a functional equivalent or a homolog thereof as shown in column 8 of Table I, application no. 3, preferably the coding region thereof, particularly a homolog or functional equivalent as shown in column 8 of Table I B, application no. 3, and being depicted in the same respective line as said At4g15690, and preferably the activity is increased non-targeted, or
[23546] (b) a polypeptide comprising a polypeptide, a consensus sequence or at least a polypeptide motif as shown in the respective line in column 5 of Table II or in column 8 of Table IV, application no. 3, respectively, and being depicted in the same respective line as said At4g15690, or a functional equivalent or a homolog thereof as depicted in column 8 of Table II, application no. 3, preferably a homolog or functional equivalent as depicted in column 8 of Table II B, application no. 3, and being depicted in the same respective line as said At4g15690, and preferably the activity is increased non-targeted.

[23547] Accordingly, in one embodiment, the molecule which activity is to be increased in the process of the invention is the gene product with an activity as a “monothiol glutaredoxin”, preferably it is the molecule of section (a) or (b) of this paragraph.

[23548] In particular, it was observed that in plants, especially in Arabidopsis thaliana, increasing or generating the activity of a gene product non-targeted with the activity of a “monothiol glutaredoxin”, preferably being encoded by a gene comprising the nucleic acid sequence SEQ ID NO. 23844, preferably the coding region thereof, conferred the production of or the increase in 5-oxoproline compared with the wild type control.

[23549] The nucleic acid sequence of At4g15700 from Arabidopsis thaliana, e.g. as shown in the respective line in column 5 of Table I, application no. 3, has been published in F. And the activity of the gene product thereof is the activity of monothiol glutaredoxin.

[23550] Accordingly, in one embodiment, the process of the present invention for producing tyrosine in a non-human organism, like a microorganism or a plant or a part thereof, comprises increasing or generating the activity of a gene product with the activity of a gene product conferring the activity of “monothiol glutaredoxin”, especially from Arabidopsis thaliana or its functional equivalent or its homolog, e.g. the increase of
[23551] (a) a gene product of a gene comprising the nucleic acid molecule as shown in the respective line in column 5 of Table I, application no. 3, preferably the coding region thereof, or a homolog or a fragment thereof, and being depicted in the same respective line as said At4g15700, or a functional equivalent or a homolog thereof as shown in column 8 of Table I, application no. 3, preferably the coding region thereof, particularly a homolog or functional equivalent as shown in column 8 of Table I B, application no. 3, and being depicted in the same respective line as said At4g15700, and preferably the activity is increased non-targeted, or
[23552] (b) a polypeptide comprising a polypeptide, a consensus sequence or at least a polypeptide motif as shown in the respective line in column 5 of Table II or in column 8 of Table IV, application no. 3, respectively, and being depicted in the same respective line as said At4g15700, or a functional equivalent or a homolog thereof as depicted in column 8 of Table II, application no. 3, preferably a homolog or functional equivalent as depicted in column 8 of Table II B, application no. 3, and being depicted in the same respective line as said At4g15700, and preferably the activity is increased non-targeted.

[23553] Accordingly, in one embodiment, the molecule which activity is to be increased in the process of the invention is the gene product with an activity as a “monothiol glutaredoxin”, preferably it is the molecule of section (a) or (b) of this paragraph.

[23554] In particular, it was observed that in plants, especially in Arabidopsis thaliana, increasing or generating the activity of a gene product non-targeted with the activity of a “monothiol glutaredoxin”, preferably being encoded by a gene comprising the nucleic acid sequence SEQ ID NO. 3654, preferably the coding region thereof, conferred the production of or the increase in tyrosine compared with the wild type control.

[23555] The nucleic acid sequence of At4g18880 from Arabidopsis thaliana, e.g. as shown in the respective line in column 5 of Table I, application no. 3, has been published in F. And the activity of the gene product thereof is the activity of heat shock transcription factor.

[23556] Accordingly, in one embodiment, the process of the present invention for producing serine in a non-human organism, like a microorganism or a plant or a part thereof, comprises increasing or generating the activity of a gene product with the activity of a gene product conferring the activity of “heat shock transcription factor”, especially from Arabidopsis thaliana or its functional equivalent or its homolog, e.g. the increase of
[23557] (a) a gene product of a gene comprising the nucleic acid molecule as shown in the respective line in column 5 of Table I, application no. 3, preferably the coding region thereof, or a homolog or a fragment thereof, and being depicted in the same respective line as said At4g18880, or a functional equivalent or a homolog thereof as shown in column 8 of Table I, application no. 3, preferably the coding region thereof, particularly a homolog or functional equivalent as shown in column 8 of Table I B, application no. 3, and being depicted in the same respective line as said At4g18880, and preferably the activity is increased non-targeted, or
[23558] (b) a polypeptide comprising a polypeptide, a consensus sequence or at least a polypeptide motif as shown in the respective line in column 5 of Table II or in column 8 of Table IV, application no. 3, respectively, and being depicted in the same respective line as said At4g18880, or a functional equivalent or a homolog thereof as depicted in column 8 of Table II, application no. 3, preferably a homolog or functional equivalent as depicted in column 8 of Table II B, application no. 3, and being depicted in the same respective line as said At4g18880, and preferably the activity is increased non-targeted.

[23559] Accordingly, in one embodiment, the molecule which activity is to be increased in the process of the invention is the gene product with an activity as a “heat shock transcription factor”, preferably it is the molecule of section (a) or (b) of this paragraph.

[23560] In particular, it was observed that in plants, especially in Arabidopsis thaliana, increasing or generating the activity of a gene product non-targeted with the activity of a “heat shock transcription factor”, preferably being encoded by a gene comprising the nucleic acid sequence SEQ ID NO. 24232, preferably the coding region thereof, conferred the production of or the increase in serine compared with the wild type control.

[23561] The nucleic acid sequence of At4g26080 from Arabidopsis thaliana, e.g. as shown in the respective line in column 5 of Table I, application no. 3, has been published in F. And the activity of the gene product thereof is the activity of protein phosphatase.

[23562] Accordingly, in one embodiment, the process of the present invention for producing alanine in a non-human organism, like a microorganism or a plant or a part thereof, comprises increasing or generating the activity of a gene product with the activity of a gene product conferring the activity of “protein phosphatase”, especially from Arabidopsis thaliana or its functional equivalent or its homolog, e.g. the increase of
[23563] (a) a gene product of a gene comprising the nucleic acid molecule as shown in the respective line in column 5 of Table I, application no. 3, preferably the coding region thereof, or a homolog or a fragment thereof, and being depicted in the same respective line as said At4g26080, or a functional equivalent or a homolog thereof as shown in column 8 of Table I, application no. 3, preferably the coding region thereof, particularly a homolog or functional equivalent as shown in column 8 of Table I B, application no. 3, and being depicted in the same respective line as said At4g26080, and preferably the activity is increased non-targeted, or
[23564] (b) a polypeptide comprising a polypeptide, a consensus sequence or at least a polypeptide motif as shown in the respective line in column 5 of Table II or in column 8 of Table IV, application no. 3, respectively, and being depicted in the same respective line as said At4g26080, or a functional equivalent or a homolog thereof as depicted in column 8 of Table II, application no. 3, preferably a homolog or functional equivalent as depicted in column 8 of Table II B, application no. 3, and being depicted in the same respective line as said At4g26080, and preferably the activity is increased non-targeted.

[23565] Accordingly, in one embodiment, the molecule which activity is to be increased in the process of the invention is the gene product with an activity as a “protein phosphatase”, preferably it is the molecule of section (a) or (b) of this paragraph.

[23566] In particular, it was observed that in plants, especially in Arabidopsis thaliana, increasing or generating the activity of a gene product non-targeted with the activity of a “protein phosphatase”, preferably being encoded by a gene comprising the nucleic acid sequence SEQ ID NO. 68849, preferably the coding region thereof, conferred the production of or the increase in alanine compared with the wild type control.

[23567] The nucleic acid sequence of At4g26080 from Arabidopsis thaliana, e.g. as shown in the respective line in column 5 of Table I, application no. 3, has been published in F. And the activity of the gene product thereof is the activity of protein phosphatase.

[23568] Accordingly, in one embodiment, the process of the present invention for producing aspartate in a non-human organism, like a microorganism or a plant or a part thereof, comprises increasing or generating the activity of a gene product with the activity of a gene product conferring the activity of “protein phosphatase”, especially from Arabidopsis thaliana or its functional equivalent or its homolog, e.g. the increase of
[23569] (a) a gene product of a gene comprising the nucleic acid molecule as shown in the respective line in column 5 of Table I, application no. 3, preferably the coding region thereof, or a homolog or a fragment thereof, and being depicted in the same respective line as said At4g26080, or a functional equivalent or a homolog thereof as shown in column 8 of Table I, application no. 3, preferably the coding region thereof, particularly a homolog or functional equivalent as shown in column 8 of Table I B, application no. 3, and being depicted in the same respective line as said At4g26080, and preferably the activity is increased non-targeted, or
[23570] (b) a polypeptide comprising a polypeptide, a consensus sequence or at least a polypeptide motif as shown in the respective line in column 5 of Table II or in column 8 of Table IV, application no. 3, respectively, and being depicted in the same respective line as said At4g26080, or a functional equivalent or a homolog thereof as depicted in column 8 of Table II, application no. 3, preferably a homolog or functional equivalent as depicted in column 8 of Table II B, application no. 3, and being depicted in the same respective line as said At4g26080, and preferably the activity is increased non-targeted.

[23571] Accordingly, in one embodiment, the molecule which activity is to be increased in the process of the invention is the gene product with an activity as a “protein phosphatase”, preferably it is the molecule of section (a) or (b) of this paragraph.

[23572] In particular, it was observed that in plants, especially in Arabidopsis thaliana, increasing or generating the activity of a gene product non-targeted with the activity of a “protein phosphatase”, preferably being encoded by a gene comprising the nucleic acid sequence SEQ ID NO. 68849, preferably the coding region thereof, conferred the production of or the increase in aspartate compared with the wild type control.

[23573] The nucleic acid sequence of At4g26080 from Arabidopsis thaliana, e.g. as shown in the respective line in column 5 of Table I, application no. 3, has been published in F. And the activity of the gene product thereof is the activity of protein phosphatase.

[23574] Accordingly, in one embodiment, the process of the present invention for producing citrulline in a non-human organism, like a microorganism or a plant or a part thereof, comprises increasing or generating the activity of a gene product with the activity of a gene product conferring the activity of “protein phosphatase”, especially from Arabidopsis thaliana or its functional equivalent or its homolog, e.g. the increase of
[23575] (a) a gene product of a gene comprising the nucleic acid molecule as shown in the respective line in column 5 of Table I, application no. 3, preferably the coding region thereof, or a homolog or a fragment thereof, and being depicted in the same respective line as said At4g26080, or a functional equivalent or a homolog thereof as shown in column 8 of Table I, application no. 3, preferably the coding region thereof, particularly a homolog or functional equivalent as shown in column 8 of Table I B, application no. 3, and being depicted in the same respective line as said At4g26080, and preferably the activity is increased non-targeted, or
[23576] (b) a polypeptide comprising a polypeptide, a consensus sequence or at least a polypeptide motif as shown in the respective line in column 5 of Table II or in column 8 of Table IV, application no. 3, respectively, and being depicted in the same respective line as said At4g26080, or a functional equivalent or a homolog thereof as depicted in column 8 of Table II, application no. 3, preferably a homolog or functional equivalent as depicted in column 8 of Table II B, application no. 3, and being depicted in the same respective line as said At4g26080, and preferably the activity is increased non-targeted.

[23577] Accordingly, in one embodiment, the molecule which activity is to be increased in the process of the invention is the gene product with an activity as a “protein phosphatase”, preferably it is the molecule of section (a) or (b) of this paragraph.

[23578] In particular, it was observed that in plants, especially in Arabidopsis thaliana, increasing or generating the activity of a gene product non-targeted with the activity of a “protein phosphatase”, preferably being encoded by a gene comprising the nucleic acid sequence SEQ ID NO. 68849, preferably the coding region thereof, conferred the production of or the increase in citrulline compared with the wild type control.

[23579] The nucleic acid sequence of At4g32480 from Arabidopsis thaliana, e.g. as shown in the respective line in column 5 of Table I, application no. 3, has been published in F. And the activity of the gene product thereof is the activity of At4g32480-protein.

[23580] Accordingly, in one embodiment, the process of the present invention for producing alanine in a non-human organism, like a microorganism or a plant or a part thereof, comprises increasing or generating the activity of a gene product with the activity of a gene product conferring the activity of “At4g32480-protein”, especially from Arabidopsis thaliana or its functional equivalent or its homolog, e.g. the increase of
[23581] (a) a gene product of a gene comprising the nucleic acid molecule as shown in the respective line in column 5 of Table I, application no. 3, preferably the coding region thereof, or a homolog or a fragment thereof, and being depicted in the same respective line as said At4g32480, or a functional equivalent or a homolog thereof as shown in column 8 of Table I, application no. 3, preferably the coding region thereof, particularly a homolog or functional equivalent as shown in column 8 of Table I B, application no. 3, and being depicted in the same respective line as said At4g32480, and preferably the activity is increased non-targeted, or
[23582] (b) a polypeptide comprising a polypeptide, a consensus sequence or at least a polypeptide motif as shown in the respective line in column 5 of Table II or in column 8 of Table IV, application no. 3, respectively, and being depicted in the same respective line as said At4g32480, or a functional equivalent or a homolog thereof as depicted in column 8 of Table II, application no. 3, preferably a homolog or functional equivalent as depicted in column 8 of Table II B, application no. 3, and being depicted in the same respective line as said At4g32480, and preferably the activity is increased non-targeted.

[23583] Accordingly, in one embodiment, the molecule which activity is to be increased in the process of the invention is the gene product with an activity as a “At4g32480-protein”, preferably it is the molecule of section (a) or (b) of this paragraph.

[23584] In particular, it was observed that in plants, especially in Arabidopsis thaliana, increasing or generating the activity of a gene product non-targeted with the activity of a “At4g32480-protein”, preferably being encoded by a gene comprising the nucleic acid sequence SEQ ID NO. 4040, preferably the coding region thereof, conferred the production of or the increase in alanine compared with the wild type control.

[23585] The nucleic acid sequence of At4g32480 from Arabidopsis thaliana, e.g. as shown in the respective line in column 5 of Table I, application no. 3, has been published in F. And the activity of the gene product thereof is the activity of At4g32480-protein.

[23586] Accordingly, in one embodiment, the process of the present invention for producing asparagine in a non-human organism, like a microorganism or a plant or a part thereof, comprises increasing or generating the activity of a gene product with the activity of a gene product conferring the activity of “At4g32480-protein”, especially from Arabidopsis thaliana or its functional equivalent or its homolog, e.g. the increase of
[23587] (a) a gene product of a gene comprising the nucleic acid molecule as shown in the respective line in column 5 of Table I, application no. 3, preferably the coding region thereof, or a homolog or a fragment thereof, and being depicted in the same respective line as said At4g32480, or a functional equivalent or a homolog thereof as shown in column 8 of Table I, application no. 3, preferably the coding region thereof, particularly a homolog or functional equivalent as shown in column 8 of Table I B, application no. 3, and being depicted in the same respective line as said At4g32480, and preferably the activity is increased non-targeted, or
[23588] (b) a polypeptide comprising a polypeptide, a consensus sequence or at least a polypeptide motif as shown in the respective line in column 5 of Table II or in column 8 of Table IV, application no. 3, respectively, and being depicted in the same respective line as said At4g32480, or a functional equivalent or a homolog thereof as depicted in column 8 of Table II, application no. 3, preferably a homolog or functional equivalent as depicted in column 8 of Table II B, application no. 3, and being depicted in the same respective line as said At4g32480, and preferably the activity is increased non-targeted.

[23589] Accordingly, in one embodiment, the molecule which activity is to be increased in the process of the invention is the gene product with an activity as a “At4g32480-protein”, preferably it is the molecule of section (a) or (b) of this paragraph.

[23590] In particular, it was observed that in plants, especially in Arabidopsis thaliana, increasing or generating the activity of a gene product non-targeted with the activity of a “At4g32480-protein”, preferably being encoded by a gene comprising the nucleic acid sequence SEQ ID NO. 4040, preferably the coding region thereof, conferred the production of or the increase in asparagine compared with the wild type control.

[23591] The nucleic acid sequence of At4g32480 from Arabidopsis thaliana, e.g. as shown in the respective line in column 5 of Table I, application no. 3, has been published in F. And the activity of the gene product thereof is the activity of At4g32480-protein.

[23592] Accordingly, in one embodiment, the process of the present invention for producing glycine in a non-human organism, like a microorganism or a plant or a part thereof, comprises increasing or generating the activity of a gene product with the activity of a gene product conferring the activity of “At4g32480-protein”, especially from Arabidopsis thaliana or its functional equivalent or its homolog, e.g. the increase of
[23593] (a) a gene product of a gene comprising the nucleic acid molecule as shown in the respective line in column 5 of Table I, application no. 3, preferably the coding region thereof, or a homolog or a fragment thereof, and being depicted in the same respective line as said At4g32480, or a functional equivalent or a homolog thereof as shown in column 8 of Table I, application no. 3, preferably the coding region thereof, particularly a homolog or functional equivalent as shown in column 8 of Table I B, application no. 3, and being depicted in the same respective line as said At4g32480, and preferably the activity is increased non-targeted, or
[23594] (b) a polypeptide comprising a polypeptide, a consensus sequence or at least a polypeptide motif as shown in the respective line in column 5 of Table II or in column 8 of Table IV, application no. 3, respectively, and being depicted in the same respective line as said At4g32480, or a functional equivalent or a homolog thereof as depicted in column 8 of Table II, application no. 3, preferably a homolog or functional equivalent as depicted in column 8 of Table II B, application no. 3, and being depicted in the same respective line as said At4g32480, and preferably the activity is increased non-targeted.

[23595] Accordingly, in one embodiment, the molecule which activity is to be increased in the process of the invention is the gene product with an activity as a “At4g32480-protein”, preferably it is the molecule of section (a) or (b) of this paragraph.

[23596] In particular, it was observed that in plants, especially in Arabidopsis thaliana, increasing or generating the activity of a gene product non-targeted with the activity of a “At4g32480-protein”, preferably being encoded by a gene comprising the nucleic acid sequence SEQ ID NO. 4040, preferably the coding region thereof, conferred the production of or the increase in glycine compared with the wild type control.

[23597] The nucleic acid sequence of At4g32480 from Arabidopsis thaliana, e.g. as shown in the respective line in column 5 of Table I, application no. 3, has been published in F. And the activity of the gene product thereof is the activity of At4g32480-protein.

[23598] Accordingly, in one embodiment, the process of the present invention for producing phenylalanine in a non-human organism, like a microorganism or a plant or a part thereof, comprises increasing or generating the activity of a gene product with the activity of a gene product conferring the activity of “At4g32480-protein”, especially from Arabidopsis thaliana or its functional equivalent or its homolog, e.g. the increase of
[23599] (a) a gene product of a gene comprising the nucleic acid molecule as shown in the respective line in column 5 of Table I, application no. 3, preferably the coding region thereof, or a homolog or a fragment thereof, and being depicted in the same respective line as said At4g32480, or a functional equivalent or a homolog thereof as shown in column 8 of Table I, application no. 3, preferably the coding region thereof, particularly a homolog or functional equivalent as shown in column 8 of Table I B, application no. 3, and being depicted in the same respective line as said At4g32480, and preferably the activity is increased non-targeted, or
[23600] (b) a polypeptide comprising a polypeptide, a consensus sequence or at least a polypeptide motif as shown in the respective line in column 5 of Table II or in column 8 of Table IV, application no. 3, respectively, and being depicted in the same respective line as said At4g32480, or a functional equivalent or a homolog thereof as depicted in column 8 of Table II, application no. 3, preferably a homolog or functional equivalent as depicted in column 8 of Table II B, application no. 3, and being depicted in the same respective line as said At4g32480, and preferably the activity is increased non-targeted.

[23601] Accordingly, in one embodiment, the molecule which activity is to be increased in the process of the invention is the gene product with an activity as a “At4g32480-protein”, preferably it is the molecule of section (a) or (b) of this paragraph.

[23602] In particular, it was observed that in plants, especially in Arabidopsis thaliana, increasing or generating the activity of a gene product non-targeted with the activity of a “At4g32480-protein”, preferably being encoded by a gene comprising the nucleic acid sequence SEQ ID NO. 4040, preferably the coding region thereof, conferred the production of or the increase in phenylalanine compared with the wild type control.

[23603] The nucleic acid sequence of At4g32480 from Arabidopsis thaliana, e.g. as shown in the respective line in column 5 of Table I, application no. 3, has been published in F. And the activity of the gene product thereof is the activity of At4g32480-protein.

[23604] Accordingly, in one embodiment, the process of the present invention for producing serine in a non-human organism, like a microorganism or a plant or a part thereof, comprises increasing or generating the activity of a gene product with the activity of a gene product conferring the activity of “At4g32480-protein”, especially from Arabidopsis thaliana or its functional equivalent or its homolog, e.g. the increase of
[23605] (a) a gene product of a gene comprising the nucleic acid molecule as shown in the respective line in column 5 of Table I, application no. 3, preferably the coding region thereof, or a homolog or a fragment thereof, and being depicted in the same respective line as said At4g32480, or a functional equivalent or a homolog thereof as shown in column 8 of Table I, application no. 3, preferably the coding region thereof, particularly a homolog or functional equivalent as shown in column 8 of Table I B, application no. 3, and being depicted in the same respective line as said At4g32480, and preferably the activity is increased non-targeted, or
[23606] (b) a polypeptide comprising a polypeptide, a consensus sequence or at least a polypeptide motif as shown in the respective line in column 5 of Table II or in column 8 of Table IV, application no. 3, respectively, and being depicted in the same respective line as said At4g32480, or a functional equivalent or a homolog thereof as depicted in column 8 of Table II, application no. 3, preferably a homolog or functional equivalent as depicted in column 8 of Table II B, application no. 3, and being depicted in the same respective line as said At4g32480, and preferably the activity is increased non-targeted.

[23607] Accordingly, in one embodiment, the molecule which activity is to be increased in the process of the invention is the gene product with an activity as a “At4g32480-protein”, preferably it is the molecule of section (a) or (b) of this paragraph.

[23608] In particular, it was observed that in plants, especially in Arabidopsis thaliana, increasing or generating the activity of a gene product non-targeted with the activity of a “At4g32480-protein”, preferably being encoded by a gene comprising the nucleic acid sequence SEQ ID NO. 4040, preferably the coding region thereof, conferred the production of or the increase in serine compared with the wild type control.

[23609] The nucleic acid sequence of At4g32480 from Arabidopsis thaliana, e.g. as shown in the respective line in column 5 of Table I, application no. 3, has been published in F. And the activity of the gene product thereof is the activity of At4g32480-protein.

[23610] Accordingly, in one embodiment, the process of the present invention for producing tyrosine in a non-human organism, like a microorganism or a plant or a part thereof, comprises increasing or generating the activity of a gene product with the activity of a gene product conferring the activity of “At4g32480-protein”, especially from Arabidopsis thaliana or its functional equivalent or its homolog, e.g. the increase of
[23611] (a) a gene product of a gene comprising the nucleic acid molecule as shown in the respective line in column 5 of Table I, application no. 3, preferably the coding region thereof, or a homolog or a fragment thereof, and being depicted in the same respective line as said At4g32480, or a functional equivalent or a homolog thereof as shown in column 8 of Table I, application no. 3, preferably the coding region thereof, particularly a homolog or functional equivalent as shown in column 8 of Table I B, application no. 3, and being depicted in the same respective line as said At4g32480, and preferably the activity is increased non-targeted, or
[23612] (b) a polypeptide comprising a polypeptide, a consensus sequence or at least a polypeptide motif as shown in the respective line in column 5 of Table II or in column 8 of Table IV, application no. 3, respectively, and being depicted in the same respective line as said At4g32480, or a functional equivalent or a homolog thereof as depicted in column 8 of Table II, application no. 3, preferably a homolog or functional equivalent as depicted in column 8 of Table II B, application no. 3, and being depicted in the same respective line as said At4g32480, and preferably the activity is increased non-targeted.

[23613] Accordingly, in one embodiment, the molecule which activity is to be increased in the process of the invention is the gene product with an activity as a “At4g32480-protein”, preferably it is the molecule of section (a) or (b) of this paragraph.

[23614] In particular, it was observed that in plants, especially in Arabidopsis thaliana, increasing or generating the activity of a gene product non-targeted with the activity of a “At4g32480-protein”, preferably being encoded by a gene comprising the nucleic acid sequence SEQ ID NO. 4040, preferably the coding region thereof, conferred the production of or the increase in tyrosine compared with the wild type control.

[23615] The nucleic acid sequence of At4g33040 from Arabidopsis thaliana, e.g. as shown in the respective line in column 5 of Table I, application no. 3, has been published in F. And the activity of the gene product thereof is the activity of glutaredoxin.

[23616] Accordingly, in one embodiment, the process of the present invention for producing aspartate in a non-human organism, like a microorganism or a plant or a part thereof, comprises increasing or generating the activity of a gene product with the activity of a gene product conferring the activity of “glutaredoxin”, especially from Arabidopsis thaliana or its functional equivalent or its homolog, e.g. the increase of
[23617] (a) a gene product of a gene comprising the nucleic acid molecule as shown in the respective line in column 5 of Table I, application no. 3, preferably the coding region thereof, or a homolog or a fragment thereof, and being depicted in the same respective line as said At4g33040, or a functional equivalent or a homolog thereof as shown in column 8 of Table I, application no. 3, preferably the coding region thereof, particularly a homolog or functional equivalent as shown in column 8 of Table I B, application no. 3, and being depicted in the same respective line as said At4g33040, and preferably the activity is increased non-targeted, or
[23618] (b) a polypeptide comprising a polypeptide, a consensus sequence or at least a polypeptide motif as shown in the respective line in column 5 of Table II or in column 8 of Table IV, application no. 3, respectively, and being depicted in the same respective line as said At4g33040, or a functional equivalent or a homolog thereof as depicted in column 8 of Table II, application no. 3, preferably a homolog or functional equivalent as depicted in column 8 of Table II B, application no. 3, and being depicted in the same respective line as said At4g33040, and preferably the activity is increased non-targeted.

[23619] Accordingly, in one embodiment, the molecule which activity is to be increased in the process of the invention is the gene product with an activity as a “glutaredoxin”, preferably it is the molecule of section (a) or (b) of this paragraph.

[23620] In particular, it was observed that in plants, especially in Arabidopsis thaliana, increasing or generating the activity of a gene product non-targeted with the activity of a “glutaredoxin”, preferably being encoded by a gene comprising the nucleic acid sequence SEQ ID NO. 4102, preferably the coding region thereof, conferred the production of or the increase in aspartate compared with the wild type control.

[23621] The nucleic acid sequence of At4g33040 from Arabidopsis thaliana, e.g. as shown in the respective line in column 5 of Table I, application no. 3, has been published in F. And the activity of the gene product thereof is the activity of glutaredoxin.

[23622] Accordingly, in one embodiment, the process of the present invention for producing citrulline in a non-human organism, like a microorganism or a plant or a part thereof, comprises increasing or generating the activity of a gene product with the activity of a gene product conferring the activity of “glutaredoxin”, especially from Arabidopsis thaliana or its functional equivalent or its homolog, e.g. the increase of
[23623] (a) a gene product of a gene comprising the nucleic acid molecule as shown in the respective line in column 5 of Table I, application no. 3, preferably the coding region thereof, or a homolog or a fragment thereof, and being depicted in the same respective line as said At4g33040, or a functional equivalent or a homolog thereof as shown in column 8 of Table I, application no. 3, preferably the coding region thereof, particularly a homolog or functional equivalent as shown in column 8 of Table I B, application no. 3, and being depicted in the same respective line as said At4g33040, and preferably the activity is increased non-targeted, or
[23624] (b) a polypeptide comprising a polypeptide, a consensus sequence or at least a polypeptide motif as shown in the respective line in column 5 of Table II or in column 8 of Table IV, application no. 3, respectively, and being depicted in the same respective line as said At4g33040, or a functional equivalent or a homolog thereof as depicted in column 8 of Table II, application no. 3, preferably a homolog or functional equivalent as depicted in column 8 of Table II B, application no. 3, and being depicted in the same respective line as said At4g33040, and preferably the activity is increased non-targeted.

[23625] Accordingly, in one embodiment, the molecule which activity is to be increased in the process of the invention is the gene product with an activity as a “glutaredoxin”, preferably it is the molecule of section (a) or (b) of this paragraph.

[23626] In particular, it was observed that in plants, especially in Arabidopsis thaliana, increasing or generating the activity of a gene product non-targeted with the activity of a “glutaredoxin”, preferably being encoded by a gene comprising the nucleic acid sequence SEQ ID NO. 4102, preferably the coding region thereof, conferred the production of or the increase in citrulline compared with the wild type control.

[23627] The nucleic acid sequence of At4g34160 from Arabidopsis thaliana, e.g. as shown in the respective line in column 5 of Table I, application no. 3, has been published in F. And the activity of the gene product thereof is the activity of cyclin D .

[23628] Accordingly, in one embodiment, the process of the present invention for producing phenylalanine in a non-human organism, like a microorganism or a plant or a part thereof, comprises increasing or generating the activity of a gene product with the activity of a gene product conferring the activity of “cyclin D”, especially from Arabidopsis thaliana or its functional equivalent or its homolog, e.g. the increase of
[23629] (a) a gene product of a gene comprising the nucleic acid molecule as shown in the respective line in column 5 of Table I, application no. 3, preferably the coding region thereof, or a homolog or a fragment thereof, and being depicted in the same respective line as said At4g34160, or a functional equivalent or a homolog thereof as shown in column 8 of Table I, application no. 3, preferably the coding region thereof, particularly a homolog or functional equivalent as shown in column 8 of Table I B, application no. 3, and being depicted in the same respective line as said At4g34160, and preferably the activity is increased non-targeted, or
[23630] (b) a polypeptide comprising a polypeptide, a consensus sequence or at least a polypeptide motif as shown in the respective line in column 5 of Table II or in column 8 of Table IV, application no. 3, respectively, and being depicted in the same respective line as said At4g34160, or a functional equivalent or a homolog thereof as depicted in column 8 of Table II, application no. 3, preferably a homolog or functional equivalent as depicted in column 8 of Table II B, application no. 3, and being depicted in the same respective line as said At4g34160, and preferably the activity is increased non-targeted.

[23631] Accordingly, in one embodiment, the molecule which activity is to be increased in the process of the invention is the gene product with an activity as a “cyclin D”, preferably it is the molecule of section (a) or (b) of this paragraph.

[23632] In particular, it was observed that in plants, especially in Arabidopsis thaliana, increasing or generating the activity of a gene product non-targeted with the activity of a “cyclin D”, preferably being encoded by a gene comprising the nucleic acid sequence SEQ ID NO. 24311, preferably the coding region thereof, conferred the production of or the increase in phenylalanine compared with the wild type control.

[23633] The nucleic acid sequence of At4g35310 from Arabidopsis thaliana, e.g. as shown in the respective line in column 5 of Table I, application no. 3, has been published in F. And the activity of the gene product thereof is the activity of calcium-dependent protein kinase.

[23634] Accordingly, in one embodiment, the process of the present invention for producing asparagine in a non-human organism, like a microorganism or a plant or a part thereof, comprises increasing or generating the activity of a gene product with the activity of a gene product conferring the activity of “calcium-dependent protein kinase”, especially from Arabidopsis thaliana or its functional equivalent or its homolog, e.g. the increase of
[23635] (a) a gene product of a gene comprising the nucleic acid molecule as shown in the respective line in column 5 of Table I, application no. 3, preferably the coding region thereof, or a homolog or a fragment thereof, and being depicted in the same respective line as said At4g35310, or a functional equivalent or a homolog thereof as shown in column 8 of Table I, application no. 3, preferably the coding region thereof, particularly a homolog or functional equivalent as shown in column 8 of Table I B, application no. 3, and being depicted in the same respective line as said At4g35310, and preferably the activity is increased non-targeted, or
[23636] (b) a polypeptide comprising a polypeptide, a consensus sequence or at least a polypeptide motif as shown in the respective line in column 5 of Table II or in column 8 of Table IV, application no. 3, respectively, and being depicted in the same respective line as said At4g35310, or a functional equivalent or a homolog thereof as depicted in column 8 of Table II, application no. 3, preferably a homolog or functional equivalent as depicted in column 8 of Table II B, application no. 3, and being depicted in the same respective line as said At4g35310, and preferably the activity is increased non-targeted.

[23637] Accordingly, in one embodiment, the molecule which activity is to be increased in the process of the invention is the gene product with an activity as a “calcium-dependent protein kinase”, preferably it is the molecule of section (a) or (b) of this paragraph.

[23638] In particular, it was observed that in plants, especially in Arabidopsis thaliana, increasing or generating the activity of a gene product non-targeted with the activity of a “calcium-dependent protein kinase”, preferably being encoded by a gene comprising the nucleic acid sequence SEQ ID NO. 4348, preferably the coding region thereof, conferred the production of or the increase in asparagine compared with the wild type control.

[23639] The nucleic acid sequence of At4g35310 from Arabidopsis thaliana, e.g. as shown in the respective line in column 5 of Table I, application no. 3, has been published in F. And the activity of the gene product thereof is the activity of calcium-dependent protein kinase.

[23640] Accordingly, in one embodiment, the process of the present invention for producing phenylalanine in a non-human organism, like a microorganism or a plant or a part thereof, comprises increasing or generating the activity of a gene product with the activity of a gene product conferring the activity of “calcium-dependent protein kinase”, especially from Arabidopsis thaliana or its functional equivalent or its homolog, e.g. the increase of
[23641] (a) a gene product of a gene comprising the nucleic acid molecule as shown in the respective line in column 5 of Table I, application no. 3, preferably the coding region thereof, or a homolog or a fragment thereof, and being depicted in the same respective line as said At4g35310, or a functional equivalent or a homolog thereof as shown in column 8 of Table I, application no. 3, preferably the coding region thereof, particularly a homolog or functional equivalent as shown in column 8 of Table I B, application no. 3, and being depicted in the same respective line as said At4g35310, and preferably the activity is increased non-targeted, or
[23642] (b) a polypeptide comprising a polypeptide, a consensus sequence or at least a polypeptide motif as shown in the respective line in column 5 of Table II or in column 8 of Table IV, application no. 3, respectively, and being depicted in the same respective line as said At4g35310, or a functional equivalent or a homolog thereof as depicted in column 8 of Table II, application no. 3, preferably a homolog or functional equivalent as depicted in column 8 of Table II B, application no. 3, and being depicted in the same respective line as said At4g35310, and preferably the activity is increased non-targeted.

[23643] Accordingly, in one embodiment, the molecule which activity is to be increased in the process of the invention is the gene product with an activity as a “calcium-dependent protein kinase”, preferably it is the molecule of section (a) or (b) of this paragraph.

[23644] In particular, it was observed that in plants, especially in Arabidopsis thaliana, increasing or generating the activity of a gene product non-targeted with the activity of a “calcium-dependent protein kinase”, preferably being encoded by a gene comprising the nucleic acid sequence SEQ ID NO. 4348, preferably the coding region thereof, conferred the production of or the increase in phenylalanine compared with the wild type control.

[23645] The nucleic acid sequence of At4g35310 from Arabidopsis thaliana, e.g. as shown in the respective line in column 5 of Table I, application no. 3, has been published in F. And the activity of the gene product thereof is the activity of calcium-dependent protein kinase.

[23646] Accordingly, in one embodiment, the process of the present invention for producing serine in a non-human organism, like a microorganism or a plant or a part thereof, comprises increasing or generating the activity of a gene product with the activity of a gene product conferring the activity of “calcium-dependent protein kinase”, especially from Arabidopsis thaliana or its functional equivalent or its homolog, e.g. the increase of
[23647] (a) a gene product of a gene comprising the nucleic acid molecule as shown in the respective line in column 5 of Table I, application no. 3, preferably the coding region thereof, or a homolog or a fragment thereof, and being depicted in the same respective line as said At4g35310, or a functional equivalent or a homolog thereof as shown in column 8 of Table I, application no. 3, preferably the coding region thereof, particularly a homolog or functional equivalent as shown in column 8 of Table I B, application no. 3, and being depicted in the same respective line as said At4g35310, and preferably the activity is increased non-targeted, or
[23648] (b) a polypeptide comprising a polypeptide, a consensus sequence or at least a polypeptide motif as shown in the respective line in column 5 of Table II or in column 8 of Table IV, application no. 3, respectively, and being depicted in the same respective line as said At4g35310, or a functional equivalent or a homolog thereof as depicted in column 8 of Table II, application no. 3, preferably a homolog or functional equivalent as depicted in column 8 of Table II B, application no. 3, and being depicted in the same respective line as said At4g35310, and preferably the activity is increased non-targeted.

[23649] Accordingly, in one embodiment, the molecule which activity is to be increased in the process of the invention is the gene product with an activity as a “calcium-dependent protein kinase”, preferably it is the molecule of section (a) or (b) of this paragraph.

[23650] In particular, it was observed that in plants, especially in Arabidopsis thaliana, increasing or generating the activity of a gene product non-targeted with the activity of a “calcium-dependent protein kinase”, preferably being encoded by a gene comprising the nucleic acid sequence SEQ ID NO. 4348, preferably the coding region thereof, conferred the production of or the increase in serine compared with the wild type control.

[23651] The nucleic acid sequence of At4g35310 from Arabidopsis thaliana, e.g. as shown in the respective line in column 5 of Table I, application no. 3, has been published in F. And the activity of the gene product thereof is the activity of calcium-dependent protein kinase.

[23652] Accordingly, in one embodiment, the process of the present invention for producing tyrosine in a non-human organism, like a microorganism or a plant or a part thereof, comprises increasing or generating the activity of a gene product with the activity of a gene product conferring the activity of “calcium-dependent protein kinase”, especially from Arabidopsis thaliana or its functional equivalent or its homolog, e.g. the increase of
[23653] (a) a gene product of a gene comprising the nucleic acid molecule as shown in the respective line in column 5 of Table I, application no. 3, preferably the coding region thereof, or a homolog or a fragment thereof, and being depicted in the same respective line as said At4g35310, or a functional equivalent or a homolog thereof as shown in column 8 of Table I, application no. 3, preferably the coding region thereof, particularly a homolog or functional equivalent as shown in column 8 of Table I B, application no. 3, and being depicted in the same respective line as said At4g35310, and preferably the activity is increased non-targeted, or
[23654] (b) a polypeptide comprising a polypeptide, a consensus sequence or at least a polypeptide motif as shown in the respective line in column 5 of Table II or in column 8 of Table IV, application no. 3, respectively, and being depicted in the same respective line as said At4g35310, or a functional equivalent or a homolog thereof as depicted in column 8 of Table II, application no. 3, preferably a homolog or functional equivalent as depicted in column 8 of Table II B, application no. 3, and being depicted in the same respective line as said At4g35310, and preferably the activity is increased non-targeted.

[23655] Accordingly, in one embodiment, the molecule which activity is to be increased in the process of the invention is the gene product with an activity as a “calcium-dependent protein kinase”, preferably it is the molecule of section (a) or (b) of this paragraph.

[23656] In particular, it was observed that in plants, especially in Arabidopsis thaliana, increasing or generating the activity of a gene product non-targeted with the activity of a “calcium-dependent protein kinase”, preferably being encoded by a gene comprising the nucleic acid sequence SEQ ID NO. 4348, preferably the coding region thereof, conferred the production of or the increase in tyrosine compared with the wild type control.

[23657] The nucleic acid sequence of At4g35310 from Arabidopsis thaliana, e.g. as shown in the respective line in column 5 of Table I, application no. 3, has been published in F. And the activity of the gene product thereof is the activity of calcium-dependent protein kinase.

[23658] Accordingly, in one embodiment, the process of the present invention for producing 5-oxoproline in a non-human organism, like a microorganism or a plant or a part thereof, comprises increasing or generating the activity of a gene product with the activity of a gene product conferring the activity of “calcium-dependent protein kinase”, especially from Arabidopsis thaliana or its functional equivalent or its homolog, e.g. the increase of
[23659] (a) a gene product of a gene comprising the nucleic acid molecule as shown in the respective line in column 5 of Table I, application no. 3, preferably the coding region thereof, or a homolog or a fragment thereof, and being depicted in the same respective line as said At4g35310, or a functional equivalent or a homolog thereof as shown in column 8 of Table I, application no. 3, preferably the coding region thereof, particularly a homolog or functional equivalent as shown in column 8 of Table I B, application no. 3, and being depicted in the same respective line as said At4g35310, and preferably the activity is increased non-targeted, or
[23660] (b) a polypeptide comprising a polypeptide, a consensus sequence or at least a polypeptide motif as shown in the respective line in column 5 of Table II or in column 8 of Table IV, application no. 3, respectively, and being depicted in the same respective line as said At4g35310, or a functional equivalent or a homolog thereof as depicted in column 8 of Table II, application no. 3, preferably a homolog or functional equivalent as depicted in column 8 of Table II B, application no. 3, and being depicted in the same respective line as said At4g35310, and preferably the activity is increased non-targeted.

[23661] Accordingly, in one embodiment, the molecule which activity is to be increased in the process of the invention is the gene product with an activity as a “calcium-dependent protein kinase”, preferably it is the molecule of section (a) or (b) of this paragraph.

[23662] In particular, it was observed that in plants, especially in Arabidopsis thaliana, increasing or generating the activity of a gene product non-targeted with the activity of a “calcium-dependent protein kinase”, preferably being encoded by a gene comprising the nucleic acid sequence SEQ ID NO. 4348, preferably the coding region thereof, conferred the production of or the increase in 5-oxoproline compared with the wild type control.

[23663] The nucleic acid sequence of At5g02760 from Arabidopsis thaliana, e.g. as shown in the respective line in column 5 of Table I, application no. 3, has been published in F. And the activity of the gene product thereof is the activity of protein phosphatase.

[23664] Accordingly, in one embodiment, the process of the present invention for producing tyrosine in a non-human organism, like a microorganism or a plant or a part thereof, comprises increasing or generating the activity of a gene product with the activity of a gene product conferring the activity of “protein phosphatase”, especially from Arabidopsis thaliana or its functional equivalent or its homolog, e.g. the increase of
[23665] (a) a gene product of a gene comprising the nucleic acid molecule as shown in the respective line in column 5 of Table I, application no. 3, preferably the coding region thereof, or a homolog or a fragment thereof, and being depicted in the same respective line as said At5g02760, or a functional equivalent or a homolog thereof as shown in column 8 of Table I, application no. 3, preferably the coding region thereof, particularly a homolog or functional equivalent as shown in column 8 of Table I B, application no. 3, and being depicted in the same respective line as said At5g02760, and preferably the activity is increased non-targeted, or
[23666] (b) a polypeptide comprising a polypeptide, a consensus sequence or at least a polypeptide motif as shown in the respective line in column 5 of Table II or in column 8 of Table IV, application no. 3, respectively, and being depicted in the same respective line as said At5g02760, or a functional equivalent or a homolog thereof as depicted in column 8 of Table II, application no. 3, preferably a homolog or functional equivalent as depicted in column 8 of Table II B, application no. 3, and being depicted in the same respective line as said At5g02760, and preferably the activity is increased non-targeted.

[23667] Accordingly, in one embodiment, the molecule which activity is to be increased in the process of the invention is the gene product with an activity as a “protein phosphatase”, preferably it is the molecule of section (a) or (b) of this paragraph.

[23668] In particular, it was observed that in plants, especially in Arabidopsis thaliana, increasing or generating the activity of a gene product non-targeted with the activity of a “protein phosphatase”, preferably being encoded by a gene comprising the nucleic acid sequence SEQ ID NO. 68987, preferably the coding region thereof, conferred the production of or the increase in tyrosine compared with the wild type control.

[23669] The nucleic acid sequence of At5g03720 from Arabidopsis thaliana, e.g. as shown in the respective line in column 5 of Table I, application no. 3, has been published in F. And the activity of the gene product thereof is the activity of heat shock transcription factor.

[23670] Accordingly, in one embodiment, the process of the present invention for producing aspartate in a non-human organism, like a microorganism or a plant or a part thereof, comprises increasing or generating the activity of a gene product with the activity of a gene product conferring the activity of “heat shock transcription factor”, especially from Arabidopsis thaliana or its functional equivalent or its homolog, e.g. the increase of
[23671] (a) a gene product of a gene comprising the nucleic acid molecule as shown in the respective line in column 5 of Table I, application no. 3, preferably the coding region thereof, or a homolog or a fragment thereof, and being depicted in the same respective line as said At5g03720, or a functional equivalent or a homolog thereof as shown in column 8 of Table I, application no. 3, preferably the coding region thereof, particularly a homolog or functional equivalent as shown in column 8 of Table I B, application no. 3, and being depicted in the same respective line as said At5g03720, and preferably the activity is increased non-targeted, or
[23672] (b) a polypeptide comprising a polypeptide, a consensus sequence or at least a polypeptide motif as shown in the respective line in column 5 of Table II or in column 8 of Table IV, application no. 3, respectively, and being depicted in the same respective line as said At5g03720, or a functional equivalent or a homolog thereof as depicted in column 8 of Table II, application no. 3, preferably a homolog or functional equivalent as depicted in column 8 of Table II B, application no. 3, and being depicted in the same respective line as said At5g03720, and preferably the activity is increased non-targeted.

[23673] Accordingly, in one embodiment, the molecule which activity is to be increased in the process of the invention is the gene product with an activity as a “heat shock transcription factor”, preferably it is the molecule of section (a) or (b) of this paragraph.

[23674] In particular, it was observed that in plants, especially in Arabidopsis thaliana, increasing or generating the activity of a gene product non-targeted with the activity of a “heat shock transcription factor”, preferably being encoded by a gene comprising the nucleic acid sequence SEQ ID NO. 24438, preferably the coding region thereof, conferred the production of or the increase in aspartate compared with the wild type control.

[23675] The nucleic acid sequence of At5g03720 from Arabidopsis thaliana, e.g. as shown in the respective line in column 5 of Table I, application no. 3, has been published in F. And the activity of the gene product thereof is the activity of heat shock transcription factor.

[23676] Accordingly, in one embodiment, the process of the present invention for producing 3,4-dihydroxyphenylalanine (dopa) in a non-human organism, like a microorganism or a plant or a part thereof, comprises increasing or generating the activity of a gene product with the activity of a gene product conferring the activity of “heat shock transcription factor”, especially from Arabidopsis thaliana or its functional equivalent or its homolog, e.g. the increase of
[23677] (a) a gene product of a gene comprising the nucleic acid molecule as shown in the respective line in column 5 of Table I, application no. 3, preferably the coding region thereof, or a homolog or a fragment thereof, and being depicted in the same respective line as said At5g03720, or a functional equivalent or a homolog thereof as shown in column 8 of Table I, application no. 3, preferably the coding region thereof, particularly a homolog or functional equivalent as shown in column 8 of Table I B, application no. 3, and being depicted in the same respective line as said At5g03720, and preferably the activity is increased non-targeted, or
[23678] (b) a polypeptide comprising a polypeptide, a consensus sequence or at least a polypeptide motif as shown in the respective line in column 5 of Table II or in column 8 of Table IV, application no. 3, respectively, and being depicted in the same respective line as said At5g03720, or a functional equivalent or a homolog thereof as depicted in column 8 of Table II, application no. 3, preferably a homolog or functional equivalent as depicted in column 8 of Table II B, application no. 3, and being depicted in the same respective line as said At5g03720, and preferably the activity is increased non-targeted.

[23679] Accordingly, in one embodiment, the molecule which activity is to be increased in the process of the invention is the gene product with an activity as a “heat shock transcription factor”, preferably it is the molecule of section (a) or (b) of this paragraph.

[23680] In particular, it was observed that in plants, especially in Arabidopsis thaliana, increasing or generating the activity of a gene product non-targeted with the activity of a “heat shock transcription factor”, preferably being encoded by a gene comprising the nucleic acid sequence SEQ ID NO. 24438, preferably the coding region thereof, conferred the production of or the increase in 3,4-dihydroxyphenylalanine (dopa) compared with the wild type control.

[23681] The nucleic acid sequence of At5g07200 from Arabidopsis thaliana, e.g. as shown in the respective line in column 5 of Table I, application no. 3, has been published in F. And the activity of the gene product thereof is the activity of gibberellin 20-oxidase.

[23682] Accordingly, in one embodiment, the process of the present invention for producing phenylalanine in a non-human organism, like a microorganism or a plant or a part thereof, comprises increasing or generating the activity of a gene product with the activity of a gene product conferring the activity of “gibberellin 20-oxidase”, especially from Arabidopsis thaliana or its functional equivalent or its homolog, e.g. the increase of
[23683] (a) a gene product of a gene comprising the nucleic acid molecule as shown in the respective line in column 5 of Table I, application no. 3, preferably the coding region thereof, or a homolog or a fragment thereof, and being depicted in the same respective line as said At5g07200, or a functional equivalent or a homolog thereof as shown in column 8 of Table I, application no. 3, preferably the coding region thereof, particularly a homolog or functional equivalent as shown in column 8 of Table I B, application no. 3, and being depicted in the same respective line as said At5g07200, and preferably the activity is increased non-targeted, or
[23684] (b) a polypeptide comprising a polypeptide, a consensus sequence or at least a polypeptide motif as shown in the respective line in column 5 of Table II or in column 8 of Table IV, application no. 3, respectively, and being depicted in the same respective line as said At5g07200, or a functional equivalent or a homolog thereof as depicted in column 8 of Table II, application no. 3, preferably a homolog or functional equivalent as depicted in column 8 of Table II B, application no. 3, and being depicted in the same respective line as said At5g07200, and preferably the activity is increased non-targeted.

[23685] Accordingly, in one embodiment, the molecule which activity is to be increased in the process of the invention is the gene product with an activity as a “gibberellin 20-oxidase”, preferably it is the molecule of section (a) or (b) of this paragraph.

[23686] In particular, it was observed that in plants, especially in Arabidopsis thaliana, increasing or generating the activity of a gene product non-targeted with the activity of a “gibberellin 20-oxidase”, preferably being encoded by a gene comprising the nucleic acid sequence SEQ ID NO. 24492, preferably the coding region thereof, conferred the production of or the increase in phenylalanine compared with the wild type control.

[23687] The nucleic acid sequence of At5g07200 from Arabidopsis thaliana, e.g. as shown in the respective line in column 5 of Table I, application no. 3, has been published in F. And the activity of the gene product thereof is the activity of gibberellin 20-oxidase.

[23688] Accordingly, in one embodiment, the process of the present invention for producing serine in a non-human organism, like a microorganism or a plant or a part thereof, comprises increasing or generating the activity of a gene product with the activity of a gene product conferring the activity of “gibberellin 20-oxidase”, especially from Arabidopsis thaliana or its functional equivalent or its homolog, e.g. the increase of
[23689] (a) a gene product of a gene comprising the nucleic acid molecule as shown in the respective line in column 5 of Table I, application no. 3, preferably the coding region thereof, or a homolog or a fragment thereof, and being depicted in the same respective line as said At5g07200, or a functional equivalent or a homolog thereof as shown in column 8 of Table I, application no. 3, preferably the coding region thereof, particularly a homolog or functional equivalent as shown in column 8 of Table I B, application no. 3, and being depicted in the same respective line as said At5g07200, and preferably the activity is increased non-targeted, or
[23690] (b) a polypeptide comprising a polypeptide, a consensus sequence or at least a polypeptide motif as shown in the respective line in column 5 of Table II or in column 8 of Table IV, application no. 3, respectively, and being depicted in the same respective line as said At5g07200, or a functional equivalent or a homolog thereof as depicted in column 8 of Table II, application no. 3, preferably a homolog or functional equivalent as depicted in column 8 of Table II B, application no. 3, and being depicted in the same respective line as said At5g07200, and preferably the activity is increased non-targeted.

[23691] Accordingly, in one embodiment, the molecule which activity is to be increased in the process of the invention is the gene product with an activity as a “gibberellin 20-oxidase”, preferably it is the molecule of section (a) or (b) of this paragraph.

[23692] In particular, it was observed that in plants, especially in Arabidopsis thaliana, increasing or generating the activity of a gene product non-targeted with the activity of a “gibberellin 20-oxidase”, preferably being encoded by a gene comprising the nucleic acid sequence SEQ ID NO. 24492, preferably the coding region thereof, conferred the production of or the increase in serine compared with the wild type control.

[23693] The nucleic acid sequence of At5g10820 from Arabidopsis thaliana, e.g. as shown in the respective line in column 5 of Table I, application no. 3, has been published in F. And the activity of the gene product thereof is the activity of integral membrane transporter family protein.

[23694] Accordingly, in one embodiment, the process of the present invention for producing serine in a non-human organism, like a microorganism or a plant or a part thereof, comprises increasing or generating the activity of a gene product with the activity of a gene product conferring the activity of “integral membrane transporter family protein”, especially from Arabidopsis thaliana or its functional equivalent or its homolog, e.g. the increase of
[23695] (a) a gene product of a gene comprising the nucleic acid molecule as shown in the respective line in column 5 of Table I, application no. 3, preferably the coding region thereof, or a homolog or a fragment thereof, and being depicted in the same respective line as said At5g10820, or a functional equivalent or a homolog thereof as shown in column 8 of Table I, application no. 3, preferably the coding region thereof, particularly a homolog or functional equivalent as shown in column 8 of Table I B, application no. 3, and being depicted in the same respective line as said At5g10820, and preferably the activity is increased non-targeted, or
[23696] (b) a polypeptide comprising a polypeptide, a consensus sequence or at least a polypeptide motif as shown in the respective line in column 5 of Table II or in column 8 of Table IV, application no. 3, respectively, and being depicted in the same respective line as said At5g10820, or a functional equivalent or a homolog thereof as depicted in column 8 of Table II, application no. 3, preferably a homolog or functional equivalent as depicted in column 8 of Table II B, application no. 3, and being depicted in the same respective line as said At5g10820, and preferably the activity is increased non-targeted.

[23697] Accordingly, in one embodiment, the molecule which activity is to be increased in the process of the invention is the gene product with an activity as a “integral membrane transporter family protein”, preferably it is the molecule of section (a) or (b) of this paragraph.

[23698] In particular, it was observed that in plants, especially in Arabidopsis thaliana, increasing or generating the activity of a gene product non-targeted with the activity of a “integral membrane transporter family protein”, preferably being encoded by a gene comprising the nucleic acid sequence SEQ ID NO. 25222, preferably the coding region thereof, conferred the production of or the increase in serine compared with the wild type control.

[23699] The nucleic acid sequence of At5g14070 from Arabidopsis thaliana, e.g. as shown in the respective line in column 5 of Table I, application no. 3, has been published in F. And the activity of the gene product thereof is the activity of glutaredoxin.

[23700] Accordingly, in one embodiment, the process of the present invention for producing phenylalanine in a non-human organism, like a microorganism or a plant or a part thereof, comprises increasing or generating the activity of a gene product with the activity of a gene product conferring the activity of “glutaredoxin”, especially from Arabidopsis thaliana or its functional equivalent or its homolog, e.g. the increase of
[23701] (a) a gene product of a gene comprising the nucleic acid molecule as shown in the respective line in column 5 of Table I, application no. 3, preferably the coding region thereof, or a homolog or a fragment thereof, and being depicted in the same respective line as said At5g14070, or a functional equivalent or a homolog thereof as shown in column 8 of Table I, application no. 3, preferably the coding region thereof, particularly a homolog or functional equivalent as shown in column 8 of Table I B, application no. 3, and being depicted in the same respective line as said At5g14070, and preferably the activity is increased non-targeted, or
[23702] (b) a polypeptide comprising a polypeptide, a consensus sequence or at least a polypeptide motif as shown in the respective line in column 5 of Table II or in column 8 of Table IV, application no. 3, respectively, and being depicted in the same respective line as said At5g14070, or a functional equivalent or a homolog thereof as depicted in column 8 of Table II, application no. 3, preferably a homolog or functional equivalent as depicted in column 8 of Table II B, application no. 3, and being depicted in the same respective line as said At5g14070, and preferably the activity is increased non-targeted.

[23703] Accordingly, in one embodiment, the molecule which activity is to be increased in the process of the invention is the gene product with an activity as a “glutaredoxin”, preferably it is the molecule of section (a) or (b) of this paragraph.

[23704] In particular, it was observed that in plants, especially in Arabidopsis thaliana, increasing or generating the activity of a gene product non-targeted with the activity of a “glutaredoxin”, preferably being encoded by a gene comprising the nucleic acid sequence SEQ ID NO. 69275, preferably the coding region thereof, conferred the production of or the increase in phenylalanine compared with the wild type control.

[23705] The nucleic acid sequence of At5g16650 from Arabidopsis thaliana, e.g. as shown in the respective line in column 5 of Table I, application no. 3, has been published in F. And the activity of the gene product thereof is the activity of At5g16650-protein.

[23706] Accordingly, in one embodiment, the process of the present invention for producing asparagine in a non-human organism, like a microorganism or a plant or a part thereof, comprises increasing or generating the activity of a gene product with the activity of a gene product conferring the activity of “At5g16650-protein”, especially from Arabidopsis thaliana or its functional equivalent or its homolog, e.g. the increase of
[23707] (a) a gene product of a gene comprising the nucleic acid molecule as shown in the respective line in column 5 of Table I, application no. 3, preferably the coding region thereof, or a homolog or a fragment thereof, and being depicted in the same respective line as said At5g16650, or a functional equivalent or a homolog thereof as shown in column 8 of Table I, application no. 3, preferably the coding region thereof, particularly a homolog or functional equivalent as shown in column 8 of Table I B, application no. 3, and being depicted in the same respective line as said At5g16650, and preferably the activity is increased non-targeted, or
[23708] (b) a polypeptide comprising a polypeptide, a consensus sequence or at least a polypeptide motif as shown in the respective line in column 5 of Table II or in column 8 of Table IV, application no. 3, respectively, and being depicted in the same respective line as said At5g16650, or a functional equivalent or a homolog thereof as depicted in column 8 of Table II, application no. 3, preferably a homolog or functional equivalent as depicted in column 8 of Table II B, application no. 3, and being depicted in the same respective line as said At5g16650, and preferably the activity is increased non-targeted.

[23709] Accordingly, in one embodiment, the molecule which activity is to be increased in the process of the invention is the gene product with an activity as a “At5g16650-protein”, preferably it is the molecule of section (a) or (b) of this paragraph.

[23710] In particular, it was observed that in plants, especially in Arabidopsis thaliana, increasing or generating the activity of a gene product non-targeted with the activity of a “At5g16650-protein”, preferably being encoded by a gene comprising the nucleic acid sequence SEQ ID NO. 25283, preferably the coding region thereof, conferred the production of or the increase in asparagine compared with the wild type control.

[23711] The nucleic acid sequence of At5g16650 from Arabidopsis thaliana, e.g. as shown in the respective line in column 5 of Table I, application no. 3, has been published in F. And the activity of the gene product thereof is the activity of At5g16650-protein.

[23712] Accordingly, in one embodiment, the process of the present invention for producing aspartate in a non-human organism, like a microorganism or a plant or a part thereof, comprises increasing or generating the activity of a gene product with the activity of a gene product conferring the activity of “At5g16650-protein”, especially from Arabidopsis thaliana or its functional equivalent or its homolog, e.g. the increase of
[23713] (a) a gene product of a gene comprising the nucleic acid molecule as shown in the respective line in column 5 of Table I, application no. 3, preferably the coding region thereof, or a homolog or a fragment thereof, and being depicted in the same respective line as said At5g16650, or a functional equivalent or a homolog thereof as shown in column 8 of Table I, application no. 3, preferably the coding region thereof, particularly a homolog or functional equivalent as shown in column 8 of Table I B, application no. 3, and being depicted in the same respective line as said At5g16650, and preferably the activity is increased non-targeted, or
[23714] (b) a polypeptide comprising a polypeptide, a consensus sequence or at least a polypeptide motif as shown in the respective line in column 5 of Table II or in column 8 of Table IV, application no. 3, respectively, and being depicted in the same respective line as said At5g16650, or a functional equivalent or a homolog thereof as depicted in column 8 of Table II, application no. 3, preferably a homolog or functional equivalent as depicted in column 8 of Table II B, application no. 3, and being depicted in the same respective line as said At5g16650, and preferably the activity is increased non-targeted.

[23715] Accordingly, in one embodiment, the molecule which activity is to be increased in the process of the invention is the gene product with an activity as a “At5g16650-protein”, preferably it is the molecule of section (a) or (b) of this paragraph.

[23716] In particular, it was observed that in plants, especially in Arabidopsis thaliana, increasing or generating the activity of a gene product non-targeted with the activity of a “At5g16650-protein”, preferably being encoded by a gene comprising the nucleic acid sequence SEQ ID NO. 25283, preferably the coding region thereof, conferred the production of or the increase in aspartate compared with the wild type control.

[23717] The nucleic acid sequence of At5g16650 from Arabidopsis thaliana, e.g. as shown in the respective line in column 5 of Table I, application no. 3, has been published in F. And the activity of the gene product thereof is the activity of At5g16650-protein.

[23718] Accordingly, in one embodiment, the process of the present invention for producing serine in a non-human organism, like a microorganism or a plant or a part thereof, comprises increasing or generating the activity of a gene product with the activity of a gene product conferring the activity of “At5g16650-protein”, especially from Arabidopsis thaliana or its functional equivalent or its homolog, e.g. the increase of
[23719] (a) a gene product of a gene comprising the nucleic acid molecule as shown in the respective line in column 5 of Table I, application no. 3, preferably the coding region thereof, or a homolog or a fragment thereof, and being depicted in the same respective line as said At5g16650, or a functional equivalent or a homolog thereof as shown in column 8 of Table I, application no. 3, preferably the coding region thereof, particularly a homolog or functional equivalent as shown in column 8 of Table I B, application no. 3, and being depicted in the same respective line as said At5g16650, and preferably the activity is increased non-targeted, or
[23720] (b) a polypeptide comprising a polypeptide, a consensus sequence or at least a polypeptide motif as shown in the respective line in column 5 of Table II or in column 8 of Table IV, application no. 3, respectively, and being depicted in the same respective line as said At5g16650, or a functional equivalent or a homolog thereof as depicted in column 8 of Table II, application no. 3, preferably a homolog or functional equivalent as depicted in column 8 of Table II B, application no. 3, and being depicted in the same respective line as said At5g16650, and preferably the activity is increased non-targeted.

[23721] Accordingly, in one embodiment, the molecule which activity is to be increased in the process of the invention is the gene product with an activity as a “At5g16650-protein”, preferably it is the molecule of section (a) or (b) of this paragraph.

[23722] In particular, it was observed that in plants, especially in Arabidopsis thaliana, increasing or generating the activity of a gene product non-targeted with the activity of a “At5g16650-protein”, preferably being encoded by a gene comprising the nucleic acid sequence SEQ ID NO. 25283, preferably the coding region thereof, conferred the production of or the increase in serine compared with the wild type control.

[23723] The nucleic acid sequence of At5g16650 from Arabidopsis thaliana, e.g. as shown in the respective line in column 5 of Table I, application no. 3, has been published in F. And the activity of the gene product thereof is the activity of At5g16650-protein.

[23724] Accordingly, in one embodiment, the process of the present invention for producing 5-oxoproline in a non-human organism, like a microorganism or a plant or a part thereof, comprises increasing or generating the activity of a gene product with the activity of a gene product conferring the activity of “At5g16650-protein”, especially from Arabidopsis thaliana or its functional equivalent or its homolog, e.g. the increase of
[23725] (a) a gene product of a gene comprising the nucleic acid molecule as shown in the respective line in column 5 of Table I, application no. 3, preferably the coding region thereof, or a homolog or a fragment thereof, and being depicted in the same respective line as said At5g16650, or a functional equivalent or a homolog thereof as shown in column 8 of Table I, application no. 3, preferably the coding region thereof, particularly a homolog or functional equivalent as shown in column 8 of Table I B, application no. 3, and being depicted in the same respective line as said At5g16650, and preferably the activity is increased non-targeted, or
[23726] (b) a polypeptide comprising a polypeptide, a consensus sequence or at least a polypeptide motif as shown in the respective line in column 5 of Table II or in column 8 of Table IV, application no. 3, respectively, and being depicted in the same respective line as said At5g16650, or a functional equivalent or a homolog thereof as depicted in column 8 of Table II, application no. 3, preferably a homolog or functional equivalent as depicted in column 8 of Table II B, application no. 3, and being depicted in the same respective line as said At5g16650, and preferably the activity is increased non-targeted.

[23727] Accordingly, in one embodiment, the molecule which activity is to be increased in the process of the invention is the gene product with an activity as a “At5g16650-protein”, preferably it is the molecule of section (a) or (b) of this paragraph.

[23728] In particular, it was observed that in plants, especially in Arabidopsis thaliana, increasing or generating the activity of a gene product non-targeted with the activity of a “At5g16650-protein”, preferably being encoded by a gene comprising the nucleic acid sequence SEQ ID NO. 25283, preferably the coding region thereof, conferred the production of or the increase in 5-oxoproline compared with the wild type control.

[23729] The nucleic acid sequence of At5g18600 from Arabidopsis thaliana, e.g. as shown in the respective line in column 5 of Table I, application no. 3, has been published in F. And the activity of the gene product thereof is the activity of monothiol glutaredoxin.

[23730] Accordingly, in one embodiment, the process of the present invention for producing phenylalanine in a non-human organism, like a microorganism or a plant or a part thereof, comprises increasing or generating the activity of a gene product with the activity of a gene product conferring the activity of “monothiol glutaredoxin”, especially from Arabidopsis thaliana or its functional equivalent or its homolog, e.g. the increase of
[23731] (a) a gene product of a gene comprising the nucleic acid molecule as shown in the respective line in column 5 of Table I, application no. 3, preferably the coding region thereof, or a homolog or a fragment thereof, and being depicted in the same respective line as said At5g18600, or a functional equivalent or a homolog thereof as shown in column 8 of Table I, application no. 3, preferably the coding region thereof, particularly a homolog or functional equivalent as shown in column 8 of Table I B, application no. 3, and being depicted in the same respective line as said At5g18600, and preferably the activity is increased non-targeted, or
[23732] (b) a polypeptide comprising a polypeptide, a consensus sequence or at least a polypeptide motif as shown in the respective line in column 5 of Table II or in column 8 of Table IV, application no. 3, respectively, and being depicted in the same respective line as said At5g18600, or a functional equivalent or a homolog thereof as depicted in column 8 of Table II, application no. 3, preferably a homolog or functional equivalent as depicted in column 8 of Table II B, application no. 3, and being depicted in the same respective line as said At5g18600, and preferably the activity is increased non-targeted.

[23733] Accordingly, in one embodiment, the molecule which activity is to be increased in the process of the invention is the gene product with an activity as a “monothiol glutaredoxin”, preferably it is the molecule of section (a) or (b) of this paragraph.

[23734] In particular, it was observed that in plants, especially in Arabidopsis thaliana, increasing or generating the activity of a gene product non-targeted with the activity of a “monothiol glutaredoxin”, preferably being encoded by a gene comprising the nucleic acid sequence SEQ ID NO. 4904, preferably the coding region thereof, conferred the production of or the increase in phenylalanine compared with the wild type control.

[23735] The nucleic acid sequence of At5g18600 from Arabidopsis thaliana, e.g. as shown in the respective line in column 5 of Table I, application no. 3, has been published in F. And the activity of the gene product thereof is the activity of monothiol glutaredoxin.

[23736] Accordingly, in one embodiment, the process of the present invention for producing tyrosine in a non-human organism, like a microorganism or a plant or a part thereof, comprises increasing or generating the activity of a gene product with the activity of a gene product conferring the activity of “monothiol glutaredoxin”, especially from Arabidopsis thaliana or its functional equivalent or its homolog, e.g. the increase of
[23737] (a) a gene product of a gene comprising the nucleic acid molecule as shown in the respective line in column 5 of Table I, application no. 3, preferably the coding region thereof, or a homolog or a fragment thereof, and being depicted in the same respective line as said At5g18600, or a functional equivalent or a homolog thereof as shown in column 8 of Table I, application no. 3, preferably the coding region thereof, particularly a homolog or functional equivalent as shown in column 8 of Table I B, application no. 3, and being depicted in the same respective line as said At5g18600, and preferably the activity is increased non-targeted, or
[23738] (b) a polypeptide comprising a polypeptide, a consensus sequence or at least a polypeptide motif as shown in the respective line in column 5 of Table II or in column 8 of Table IV, application no. 3, respectively, and being depicted in the same respective line as said At5g18600, or a functional equivalent or a homolog thereof as depicted in column 8 of Table II, application no. 3, preferably a homolog or functional equivalent as depicted in column 8 of Table II B, application no. 3, and being depicted in the same respective line as said At5g18600, and preferably the activity is increased non-targeted.

[23739] Accordingly, in one embodiment, the molecule which activity is to be increased in the process of the invention is the gene product with an activity as a “monothiol glutaredoxin”, preferably it is the molecule of section (a) or (b) of this paragraph.

[23740] In particular, it was observed that in plants, especially in Arabidopsis thaliana, increasing or generating the activity of a gene product non-targeted with the activity of a “monothiol glutaredoxin”, preferably being encoded by a gene comprising the nucleic acid sequence SEQ ID NO. 4904, preferably the coding region thereof, conferred the production of or the increase in tyrosine compared with the wild type control.

[23741] The nucleic acid sequence of At5g21910 from Arabidopsis thaliana, e.g. as shown in the respective line in column 5 of Table I, application no. 3, has been published in F. And the activity of the gene product thereof is the activity of at5g21910-protein.

[23742] Accordingly, in one embodiment, the process of the present invention for producing phenylalanine in a non-human organism, like a microorganism or a plant or a part thereof, comprises increasing or generating the activity of a gene product with the activity of a gene product conferring the activity of “at5g21910-protein”, especially from Arabidopsis thaliana or its functional equivalent or its homolog, e.g. the increase of
[23743] (a) a gene product of a gene comprising the nucleic acid molecule as shown in the respective line in column 5 of Table I, application no. 3, preferably the coding region thereof, or a homolog or a fragment thereof, and being depicted in the same respective line as said At5g21910, or a functional equivalent or a homolog thereof as shown in column 8 of Table I, application no. 3, preferably the coding region thereof, particularly a homolog or functional equivalent as shown in column 8 of Table I B, application no. 3, and being depicted in the same respective line as said At5g21910, and preferably the activity is increased non-targeted, or
[23744] (b) a polypeptide comprising a polypeptide, a consensus sequence or at least a polypeptide motif as shown in the respective line in column 5 of Table II or in column 8 of Table IV, application no. 3, respectively, and being depicted in the same respective line as said At5g21910, or a functional equivalent or a homolog thereof as depicted in column 8 of Table II, application no. 3, preferably a homolog or functional equivalent as depicted in column 8 of Table II B, application no. 3, and being depicted in the same respective line as said At5g21910, and preferably the activity is increased non-targeted.

[23745] Accordingly, in one embodiment, the molecule which activity is to be increased in the process of the invention is the gene product with an activity as a “at5g21910-protein”, preferably it is the molecule of section (a) or (b) of this paragraph.

[23746] In particular, it was observed that in plants, especially in Arabidopsis thaliana, increasing or generating the activity of a gene product non-targeted with the activity of a “at5g21910-protein”, preferably being encoded by a gene comprising the nucleic acid sequence SEQ ID NO. 69553, preferably the coding region thereof, conferred the production of or the increase in phenylalanine compared with the wild type control.

[23747] The nucleic acid sequence of At5g39760 from Arabidopsis thaliana, e.g. as shown in the respective line in column 5 of Table I, application no. 3, has been published in F. And the activity of the gene product thereof is the activity of transcription factor.

[23748] Accordingly, in one embodiment, the process of the present invention for producing tyrosine in a non-human organism, like a microorganism or a plant or a part thereof, comprises increasing or generating the activity of a gene product with the activity of a gene product conferring the activity of “transcription factor”, especially from Arabidopsis thaliana or its functional equivalent or its homolog, e.g. the increase of
[23749] (a) a gene product of a gene comprising the nucleic acid molecule as shown in the respective line in column 5 of Table I, application no. 3, preferably the coding region thereof, or a homolog or a fragment thereof, and being depicted in the same respective line as said At5g39760, or a functional equivalent or a homolog thereof as shown in column 8 of Table I, application no. 3, preferably the coding region thereof, particularly a homolog or functional equivalent as shown in column 8 of Table I B, application no. 3, and being depicted in the same respective line as said At5g39760, and preferably the activity is increased non-targeted, or
[23750] (b) a polypeptide comprising a polypeptide, a consensus sequence or at least a polypeptide motif as shown in the respective line in column 5 of Table II or in column 8 of Table IV, application no. 3, respectively, and being depicted in the same respective line as said At5g39760, or a functional equivalent or a homolog thereof as depicted in column 8 of Table II, application no. 3, preferably a homolog or functional equivalent as depicted in column 8 of Table II B, application no. 3, and being depicted in the same respective line as said At5g39760, and preferably the activity is increased non-targeted.

[23751] Accordingly, in one embodiment, the molecule which activity is to be increased in the process of the invention is the gene product with an activity as a “transcription factor”, preferably it is the molecule of section (a) or (b) of this paragraph.

[23752] In particular, it was observed that in plants, especially in Arabidopsis thaliana, increasing or generating the activity of a gene product non-targeted with the activity of a “transcription factor”, preferably being encoded by a gene comprising the nucleic acid sequence SEQ ID NO. 25428, preferably the coding region thereof, conferred the production of or the increase in tyrosine compared with the wild type control.

[23753] The nucleic acid sequence of At5g39950 from Arabidopsis thaliana, e.g. as shown in the respective line in column 5 of Table I, application no. 3, has been published in F. And the activity of the gene product thereof is the activity of thioredoxin.

[23754] Accordingly, in one embodiment, the process of the present invention for producing serine in a non-human organism, like a microorganism or a plant or a part thereof, comprises increasing or generating the activity of a gene product with the activity of a gene product conferring the activity of “thioredoxin”, especially from Arabidopsis thaliana or its functional equivalent or its homolog, e.g. the increase of
[23755] (a) a gene product of a gene comprising the nucleic acid molecule as shown in the respective line in column 5 of Table I, application no. 3, preferably the coding region thereof, or a homolog or a fragment thereof, and being depicted in the same respective line as said At5g39950, or a functional equivalent or a homolog thereof as shown in column 8 of Table I, application no. 3, preferably the coding region thereof, particularly a homolog or functional equivalent as shown in column 8 of Table I B, application no. 3, and being depicted in the same respective line as said At5g39950, and preferably the activity is increased non-targeted, or
[23756] (b) a polypeptide comprising a polypeptide, a consensus sequence or at least a polypeptide motif as shown in the respective line in column 5 of Table II or in column 8 of Table IV, application no. 3, respectively, and being depicted in the same respective line as said At5g39950, or a functional equivalent or a homolog thereof as depicted in column 8 of Table II, application no. 3, preferably a homolog or functional equivalent as depicted in column 8 of Table II B, application no. 3, and being depicted in the same respective line as said At5g39950, and preferably the activity is increased non-targeted.

[23757] Accordingly, in one embodiment, the molecule which activity is to be increased in the process of the invention is the gene product with an activity as a “thioredoxin”, preferably it is the molecule of section (a) or (b) of this paragraph.

[23758] In particular, it was observed that in plants, especially in Arabidopsis thaliana, increasing or generating the activity of a gene product non-targeted with the activity of a “thioredoxin”, preferably being encoded by a gene comprising the nucleic acid sequence SEQ ID NO. 69574, preferably the coding region thereof, conferred the production of or the increase in serine compared with the wild type control.

[23759] The nucleic acid sequence of At5g57050 from Arabidopsis thaliana, e.g. as shown in the respective line in column 5 of Table I, application no. 3, has been published in F. And the activity of the gene product thereof is the activity of protein phosphatase.

[23760] Accordingly, in one embodiment, the process of the present invention for producing alanine in a non-human organism, like a microorganism or a plant or a part thereof, comprises increasing or generating the activity of a gene product with the activity of a gene product conferring the activity of “protein phosphatase”, especially from Arabidopsis thaliana or its functional equivalent or its homolog, e.g. the increase of
[23761] (a) a gene product of a gene comprising the nucleic acid molecule as shown in the respective line in column 5 of Table I, application no. 3, preferably the coding region thereof, or a homolog or a fragment thereof, and being depicted in the same respective line as said At5g57050, or a functional equivalent or a homolog thereof as shown in column 8 of Table I, application no. 3, preferably the coding region thereof, particularly a homolog or functional equivalent as shown in column 8 of Table I B, application no. 3, and being depicted in the same respective line as said At5g57050, and preferably the activity is increased non-targeted, or
[23762] (b) a polypeptide comprising a polypeptide, a consensus sequence or at least a polypeptide motif as shown in the respective line in column 5 of Table II or in column 8 of Table IV, application no. 3, respectively, and being depicted in the same respective line as said At5g57050, or a functional equivalent or a homolog thereof as depicted in column 8 of Table II, application no. 3, preferably a homolog or functional equivalent as depicted in column 8 of Table II B, application no. 3, and being depicted in the same respective line as said At5g57050, and preferably the activity is increased non-targeted.

[23763] Accordingly, in one embodiment, the molecule which activity is to be increased in the process of the invention is the gene product with an activity as a “protein phosphatase”, preferably it is the molecule of section (a) or (b) of this paragraph.

[23764] In particular, it was observed that in plants, especially in Arabidopsis thaliana, increasing or generating the activity of a gene product non-targeted with the activity of a “protein phosphatase”, preferably being encoded by a gene comprising the nucleic acid sequence SEQ ID NO. 5318, preferably the coding region thereof, conferred the production of or the increase in alanine compared with the wild type control.

[23765] The nucleic acid sequence of At5g57050 from Arabidopsis thaliana, e.g. as shown in the respective line in column 5 of Table I, application no. 3, has been published in F. And the activity of the gene product thereof is the activity of protein phosphatase.

[23766] Accordingly, in one embodiment, the process of the present invention for producing citrulline in a non-human organism, like a microorganism or a plant or a part thereof, comprises increasing or generating the activity of a gene product with the activity of a gene product conferring the activity of “protein phosphatase”, especially from Arabidopsis thaliana or its functional equivalent or its homolog, e.g. the increase of
[23767] (a) a gene product of a gene comprising the nucleic acid molecule as shown in the respective line in column 5 of Table I, application no. 3, preferably the coding region thereof, or a homolog or a fragment thereof, and being depicted in the same respective line as said At5g57050, or a functional equivalent or a homolog thereof as shown in column 8 of Table I, application no. 3, preferably the coding region thereof, particularly a homolog or functional equivalent as shown in column 8 of Table I B, application no. 3, and being depicted in the same respective line as said At5g57050, and preferably the activity is increased non-targeted, or
[23768] (b) a polypeptide comprising a polypeptide, a consensus sequence or at least a polypeptide motif as shown in the respective line in column 5 of Table II or in column 8 of Table IV, application no. 3, respectively, and being depicted in the same respective line as said At5g57050, or a functional equivalent or a homolog thereof as depicted in column 8 of Table II, application no. 3, preferably a homolog or functional equivalent as depicted in column 8 of Table II B, application no. 3, and being depicted in the same respective line as said At5g57050, and preferably the activity is increased non-targeted.

[23769] Accordingly, in one embodiment, the molecule which activity is to be increased in the process of the invention is the gene product with an activity as a “protein phosphatase”, preferably it is the molecule of section (a) or (b) of this paragraph.

[23770] In particular, it was observed that in plants, especially in Arabidopsis thaliana, increasing or generating the activity of a gene product non-targeted with the activity of a “protein phosphatase”, preferably being encoded by a gene comprising the nucleic acid sequence SEQ ID NO. 5318, preferably the coding region thereof, conferred the production of or the increase in citrulline compared with the wild type control.

[23771] The nucleic acid sequence of At5g59220 from Arabidopsis thaliana, e.g. as shown in the respective line in column 5 of Table I, application no. 3, has been published in F. And the activity of the gene product thereof is the activity of protein phosphatase.

[23772] Accordingly, in one embodiment, the process of the present invention for producing citrulline in a non-human organism, like a microorganism or a plant or a part thereof, comprises increasing or generating the activity of a gene product with the activity of a gene product conferring the activity of “protein phosphatase”, especially from Arabidopsis thaliana or its functional equivalent or its homolog, e.g. the increase of
[23773] (a) a gene product of a gene comprising the nucleic acid molecule as shown in the respective line in column 5 of Table I, application no. 3, preferably the coding region thereof, or a homolog or a fragment thereof, and being depicted in the same respective line as said At5g59220, or a functional equivalent or a homolog thereof as shown in column 8 of Table I, application no. 3, preferably the coding region thereof, particularly a homolog or functional equivalent as shown in column 8 of Table I B, application no. 3, and being depicted in the same respective line as said At5g59220, and preferably the activity is increased non-targeted, or
[23774] (b) a polypeptide comprising a polypeptide, a consensus sequence or at least a polypeptide motif as shown in the respective line in column 5 of Table II or in column 8 of Table IV, application no. 3, respectively, and being depicted in the same respective line as said At5g59220, or a functional equivalent or a homolog thereof as depicted in column 8 of Table II, application no. 3, preferably a homolog or functional equivalent as depicted in column 8 of Table II B, application no. 3, and being depicted in the same respective line as said At5g59220, and preferably the activity is increased non-targeted.

[23775] Accordingly, in one embodiment, the molecule which activity is to be increased in the process of the invention is the gene product with an activity as a “protein phosphatase”, preferably it is the molecule of section (a) or (b) of this paragraph.

[23776] In particular, it was observed that in plants, especially in Arabidopsis thaliana, increasing or generating the activity of a gene product non-targeted with the activity of a “protein phosphatase”, preferably being encoded by a gene comprising the nucleic acid sequence SEQ ID NO. 25498, preferably the coding region thereof, conferred the production of or the increase in citrulline compared with the wild type control.

[23777] The nucleic acid sequence of At5g60110 from Arabidopsis thaliana, e.g. as shown in the respective line in column 5 of Table I, application no. 3, has been published in F. And the activity of the gene product thereof is the activity of RNA-binding protein.

[23778] Accordingly, in one embodiment, the process of the present invention for producing phenylalanine in a non-human organism, like a microorganism or a plant or a part thereof, comprises increasing or generating the activity of a gene product with the activity of a gene product conferring the activity of “RNA-binding protein”, especially from Arabidopsis thaliana or its functional equivalent or its homolog, e.g. the increase of
[23779] (a) a gene product of a gene comprising the nucleic acid molecule as shown in the respective line in column 5 of Table I, application no. 3, preferably the coding region thereof, or a homolog or a fragment thereof, and being depicted in the same respective line as said At5g60110, or a functional equivalent or a homolog thereof as shown in column 8 of Table I, application no. 3, preferably the coding region thereof, particularly a homolog or functional equivalent as shown in column 8 of Table I B, application no. 3, and being depicted in the same respective line as said At5g60110, and preferably the activity is increased non-targeted, or
[23780] (b) a polypeptide comprising a polypeptide, a consensus sequence or at least a polypeptide motif as shown in the respective line in column 5 of Table II or in column 8 of Table IV, application no. 3, respectively, and being depicted in the same respective line as said At5g60110, or a functional equivalent or a homolog thereof as depicted in column 8 of Table II, application no. 3, preferably a homolog or functional equivalent as depicted in column 8 of Table II B, application no. 3, and being depicted in the same respective line as said At5g60110, and preferably the activity is increased non-targeted.

[23781] Accordingly, in one embodiment, the molecule which activity is to be increased in the process of the invention is the gene product with an activity as a “RNA-binding protein”, preferably it is the molecule of section (a) or (b) of this paragraph.

[23782] In particular, it was observed that in plants, especially in Arabidopsis thaliana, increasing or generating the activity of a gene product non-targeted with the activity of a “RNA-binding protein”, preferably being encoded by a gene comprising the nucleic acid sequence SEQ ID NO. 70006, preferably the coding region thereof, conferred the production of or the increase in phenylalanine compared with the wild type control.

[23783] The nucleic acid sequence of At5g60110 from Arabidopsis thaliana, e.g. as shown in the respective line in column 5 of Table I, application no. 3, has been published in F. And the activity of the gene product thereof is the activity of RNA-binding protein.

[23784] Accordingly, in one embodiment, the process of the present invention for producing tyrosine in a non-human organism, like a microorganism or a plant or a part thereof, comprises increasing or generating the activity of a gene product with the activity of a gene product conferring the activity of “RNA-binding protein”, especially from Arabidopsis thaliana or its functional equivalent or its homolog, e.g. the increase of
[23785] (a) a gene product of a gene comprising the nucleic acid molecule as shown in the respective line in column 5 of Table I, application no. 3, preferably the coding region thereof, or a homolog or a fragment thereof, and being depicted in the same respective line as said At5g60110, or a functional equivalent or a homolog thereof as shown in column 8 of Table I, application no. 3, preferably the coding region thereof, particularly a homolog or functional equivalent as shown in column 8 of Table I B, application no. 3, and being depicted in the same respective line as said At5g60110, and preferably the activity is increased non-targeted, or
[23786] (b) a polypeptide comprising a polypeptide, a consensus sequence or at least a polypeptide motif as shown in the respective line in column 5 of Table II or in column 8 of Table IV, application no. 3, respectively, and being depicted in the same respective line as said At5g60110, or a functional equivalent or a homolog thereof as depicted in column 8 of Table II, application no. 3, preferably a homolog or functional equivalent as depicted in column 8 of Table II B, application no. 3, and being depicted in the same respective line as said At5g60110, and preferably the activity is increased non-targeted.

[23787] Accordingly, in one embodiment, the molecule which activity is to be increased in the process of the invention is the gene product with an activity as a “RNA-binding protein”, preferably it is the molecule of section (a) or (b) of this paragraph.

[23788] In particular, it was observed that in plants, especially in Arabidopsis thaliana, increasing or generating the activity of a gene product non-targeted with the activity of a “RNA-binding protein”, preferably being encoded by a gene comprising the nucleic acid sequence SEQ ID NO. 70006, preferably the coding region thereof, conferred the production of or the increase in tyrosine compared with the wild type control.

[23789] The nucleic acid sequence of At5g63680 from Arabidopsis thaliana, e.g. as shown in the respective line in column 5 of Table I, application no. 3, has been published in F. And the activity of the gene product thereof is the activity of pyruvate kinase.

[23790] Accordingly, in one embodiment, the process of the present invention for producing alanine in a non-human organism, like a microorganism or a plant or a part thereof, comprises increasing or generating the activity of a gene product with the activity of a gene product conferring the activity of “pyruvate kinase”, especially from Arabidopsis thaliana or its functional equivalent or its homolog, e.g. the increase of
[23791] (a) a gene product of a gene comprising the nucleic acid molecule as shown in the respective line in column 5 of Table I, application no. 3, preferably the coding region thereof, or a homolog or a fragment thereof, and being depicted in the same respective line as said At5g63680, or a functional equivalent or a homolog thereof as shown in column 8 of Table I, application no. 3, preferably the coding region thereof, particularly a homolog or functional equivalent as shown in column 8 of Table I B, application no. 3, and being depicted in the same respective line as said At5g63680, and preferably the activity is increased plastidic, or
[23792] (b) a polypeptide comprising a polypeptide, a consensus sequence or at least a polypeptide motif as shown in the respective line in column 5 of Table II or in column 8 of Table IV, application no. 3, respectively, and being depicted in the same respective line as said At5g63680, or a functional equivalent or a homolog thereof as depicted in column 8 of Table II, application no. 3, preferably a homolog or functional equivalent as depicted in column 8 of Table II B, application no. 3, and being depicted in the same respective line as said At5g63680, and preferably the activity is increased plastidic.

[23793] Accordingly, in one embodiment, the molecule which activity is to be increased in the process of the invention is the gene product with an activity as a “pyruvate kinase”, preferably it is the molecule of section (a) or (b) of this paragraph.

[23794] In particular, it was observed that in plants, especially in Arabidopsis thaliana, increasing or generating the activity of a gene product plastidic with the activity of a “pyruvate kinase”, preferably being encoded by a gene comprising the nucleic acid sequence SEQ ID NO. 70038, preferably the coding region thereof, conferred the production of or the increase in alanine compared with the wild type control.

[23795] The nucleic acid sequence of At5g64920 from Arabidopsis thaliana, e.g. as shown in the respective line in column 5 of Table I, application no. 3, has been published in F. And the activity of the gene product thereof is the activity of zinc finger protein.

[23796] Accordingly, in one embodiment, the process of the present invention for producing alanine in a non-human organism, like a microorganism or a plant or a part thereof, comprises increasing or generating the activity of a gene product with the activity of a gene product conferring the activity of “zinc finger protein”, especially from Arabidopsis thaliana or its functional equivalent or its homolog, e.g. the increase of
[23797] (a) a gene product of a gene comprising the nucleic acid molecule as shown in the respective line in column 5 of Table I, application no. 3, preferably the coding region thereof, or a homolog or a fragment thereof, and being depicted in the same respective line as said At5g64920, or a functional equivalent or a homolog thereof as shown in column 8 of Table I, application no. 3, preferably the coding region thereof, particularly a homolog or functional equivalent as shown in column 8 of Table I B, application no. 3, and being depicted in the same respective line as said At5g64920, and preferably the activity is increased non-targeted, or
[23798] (b) a polypeptide comprising a polypeptide, a consensus sequence or at least a polypeptide motif as shown in the respective line in column 5 of Table II or in column 8 of Table IV, application no. 3, respectively, and being depicted in the same respective line as said At5g64920, or a functional equivalent or a homolog thereof as depicted in column 8 of Table II, application no. 3, preferably a homolog or functional equivalent as depicted in column 8 of Table II B, application no. 3, and being depicted in the same respective line as said At5g64920, and preferably the activity is increased non-targeted.

[23799] Accordingly, in one embodiment, the molecule which activity is to be increased in the process of the invention is the gene product with an activity as a “zinc finger protein”, preferably it is the molecule of section (a) or (b) of this paragraph.

[23800] In particular, it was observed that in plants, especially in Arabidopsis thaliana, increasing or generating the activity of a gene product non-targeted with the activity of a “zinc finger protein”, preferably being encoded by a gene comprising the nucleic acid sequence SEQ ID NO. 5493, preferably the coding region thereof, conferred the production of or the increase in alanine compared with the wild type control.

[23801] The nucleic acid sequence of At5g64920 from Arabidopsis thaliana, e.g. as shown in the respective line in column 5 of Table I, application no. 3, has been published in F. And the activity of the gene product thereof is the activity of zinc finger protein.

[23802] Accordingly, in one embodiment, the process of the present invention for producing phenylalanine in a non-human organism, like a microorganism or a plant or a part thereof, comprises increasing or generating the activity of a gene product with the activity of a gene product conferring the activity of “zinc finger protein”, especially from Arabidopsis thaliana or its functional equivalent or its homolog, e.g. the increase of
[23803] (a) a gene product of a gene comprising the nucleic acid molecule as shown in the respective line in column 5 of Table I, application no. 3, preferably the coding region thereof, or a homolog or a fragment thereof, and being depicted in the same respective line as said At5g64920, or a functional equivalent or a homolog thereof as shown in column 8 of Table I, application no. 3, preferably the coding region thereof, particularly a homolog or functional equivalent as shown in column 8 of Table I B, application no. 3, and being depicted in the same respective line as said At5g64920, and preferably the activity is increased non-targeted, or
[23804] (b) a polypeptide comprising a polypeptide, a consensus sequence or at least a polypeptide motif as shown in the respective line in column 5 of Table II or in column 8 of Table IV, application no. 3, respectively, and being depicted in the same respective line as said At5g64920, or a functional equivalent or a homolog thereof as depicted in column 8 of Table II, application no. 3, preferably a homolog or functional equivalent as depicted in column 8 of Table II B, application no. 3, and being depicted in the same respective line as said At5g64920, and preferably the activity is increased non-targeted.

[23805] Accordingly, in one embodiment, the molecule which activity is to be increased in the process of the invention is the gene product with an activity as a “zinc finger protein”, preferably it is the molecule of section (a) or (b) of this paragraph.

[23806] In particular, it was observed that in plants, especially in Arabidopsis thaliana, increasing or generating the activity of a gene product non-targeted with the activity of a “zinc finger protein”, preferably being encoded by a gene comprising the nucleic acid sequence SEQ ID NO. 5493, preferably the coding region thereof, conferred the production of or the increase in phenylalanine compared with the wild type control.

[23807] The nucleic acid sequence of At5g64920 from Arabidopsis thaliana, e.g. as shown in the respective line in column 5 of Table I, application no. 3, has been published in F. And the activity of the gene product thereof is the activity of zinc finger protein.

[23808] Accordingly, in one embodiment, the process of the present invention for producing serine in a non-human organism, like a microorganism or a plant or a part thereof, comprises increasing or generating the activity of a gene product with the activity of a gene product conferring the activity of “zinc finger protein”, especially from Arabidopsis thaliana or its functional equivalent or its homolog, e.g. the increase of
[23809] (a) a gene product of a gene comprising the nucleic acid molecule as shown in the respective line in column 5 of Table I, application no. 3, preferably the coding region thereof, or a homolog or a fragment thereof, and being depicted in the same respective line as said At5g64920, or a functional equivalent or a homolog thereof as shown in column 8 of Table I, application no. 3, preferably the coding region thereof, particularly a homolog or functional equivalent as shown in column 8 of Table I B, application no. 3, and being depicted in the same respective line as said At5g64920, and preferably the activity is increased non-targeted, or
[23810] (b) a polypeptide comprising a polypeptide, a consensus sequence or at least a polypeptide motif as shown in the respective line in column 5 of Table II or in column 8 of Table IV, application no. 3, respectively, and being depicted in the same respective line as said At5g64920, or a functional equivalent or a homolog thereof as depicted in column 8 of Table II, application no. 3, preferably a homolog or functional equivalent as depicted in column 8 of Table II B, application no. 3, and being depicted in the same respective line as said At5g64920, and preferably the activity is increased non-targeted.

[23811] Accordingly, in one embodiment, the molecule which activity is to be increased in the process of the invention is the gene product with an activity as a “zinc finger protein”, preferably it is the molecule of section (a) or (b) of this paragraph.

[23812] In particular, it was observed that in plants, especially in Arabidopsis thaliana, increasing or generating the activity of a gene product non-targeted with the activity of a “zinc finger protein”, preferably being encoded by a gene comprising the nucleic acid sequence SEQ ID NO. 5493, preferably the coding region thereof, conferred the production of or the increase in serine compared with the wild type control.

[23813] The nucleic acid sequence of At5g64920 from Arabidopsis thaliana, e.g. as shown in the respective line in column 5 of Table I, application no. 3, has been published in F. And the activity of the gene product thereof is the activity of zinc finger protein.

[23814] Accordingly, in one embodiment, the process of the present invention for producing 5-oxoproline in a non-human organism, like a microorganism or a plant or a part thereof, comprises increasing or generating the activity of a gene product with the activity of a gene product conferring the activity of “zinc finger protein”, especially from Arabidopsis thaliana or its functional equivalent or its homolog, e.g. the increase of
[23815] (a) a gene product of a gene comprising the nucleic acid molecule as shown in the respective line in column 5 of Table I, application no. 3, preferably the coding region thereof, or a homolog or a fragment thereof, and being depicted in the same respective line as said At5g64920, or a functional equivalent or a homolog thereof as shown in column 8 of Table I, application no. 3, preferably the coding region thereof, particularly a homolog or functional equivalent as shown in column 8 of Table I B, application no. 3, and being depicted in the same respective line as said At5g64920, and preferably the activity is increased non-targeted, or
[23816] (b) a polypeptide comprising a polypeptide, a consensus sequence or at least a polypeptide motif as shown in the respective line in column 5 of Table II or in column 8 of Table IV, application no. 3, respectively, and being depicted in the same respective line as said At5g64920, or a functional equivalent or a homolog thereof as depicted in column 8 of Table II, application no. 3, preferably a homolog or functional equivalent as depicted in column 8 of Table II B, application no. 3, and being depicted in the same respective line as said At5g64920, and preferably the activity is increased non-targeted.

[23817] Accordingly, in one embodiment, the molecule which activity is to be increased in the process of the invention is the gene product with an activity as a “zinc finger protein”, preferably it is the molecule of section (a) or (b) of this paragraph.

[23818] In particular, it was observed that in plants, especially in Arabidopsis thaliana, increasing or generating the activity of a gene product non-targeted with the activity of a “zinc finger protein”, preferably being encoded by a gene comprising the nucleic acid sequence SEQ ID NO. 5493, preferably the coding region thereof, conferred the production of or the increase in 5-oxoproline compared with the wild type control.

[23819] The nucleic acid sequence of AvinDRAFT_{—}0035 from Azotobacter vinelandii, e.g. as shown in the respective line in column 5 of Table I, application no. 3, has been published in D. And the activity of the gene product thereof is the activity of CDP-diacylglycerol-serine O-phosphatidyltransferase.

[23820] Accordingly, in one embodiment, the process of the present invention for producing aspartate in a non-human organism, like a microorganism or a plant or a part thereof, comprises increasing or generating the activity of a gene product with the activity of a gene product conferring the activity of “CDP-diacylglycerol-serine O-phosphatidyltransferase”, especially from Azotobacter vinelandii or its functional equivalent or its homolog, e.g. the increase of
[23821] (a) a gene product of a gene comprising the nucleic acid molecule as shown in the respective line in column 5 of Table I, application no. 3, preferably the coding region thereof, or a homolog or a fragment thereof, and being depicted in the same respective line as said AvinDRAFT_{—}0035, or a functional equivalent or a homolog thereof as shown in column 8 of Table I, application no. 3, preferably the coding region thereof, particularly a homolog or functional equivalent as shown in column 8 of Table I B, application no. 3, and being depicted in the same respective line as said AvinDRAFT_{—}0035, and preferably the activity is increased non-targeted, or
[23822] (b) a polypeptide comprising a polypeptide, a consensus sequence or at least a polypeptide motif as shown in the respective line in column 5 of Table II or in column 8 of Table IV, application no. 3, respectively, and being depicted in the same respective line as said AvinDRAFT_{—}0035, or a functional equivalent or a homolog thereof as depicted in column 8 of Table II, application no. 3, preferably a homolog or functional equivalent as depicted in column 8 of Table II B, application no. 3, and being depicted in the same respective line as said AvinDRAFT_{—}0035, and preferably the activity is increased non-targeted.

[23823] Accordingly, in one embodiment, the molecule which activity is to be increased in the process of the invention is the gene product with an activity as a “CDP-diacylglycerol-serine O-phosphatidyltransferase”, preferably it is the molecule of section (a) or (b) of this paragraph.

[23824] In particular, it was observed that in plants, especially in Arabidopsis thaliana, increasing or generating the activity of a gene product non-targeted with the activity of a “CDP-diacylglycerolserine O-phosphatidyltransferase”, preferably being encoded by a gene comprising the nucleic acid sequence SEQ ID NO. 70583, preferably the coding region thereof, conferred the production of or the increase in aspartate compared with the wild type control.

[23825] The nucleic acid sequence of AvinDRAFT_{—}0035 from Azotobacter vinelandii, e.g. as shown in the respective line in column 5 of Table I, application no. 3, has been published in D. And the activity of the gene product thereof is the activity of CDP-diacylglycerol-serine O-phosphatidyltransferase.

[23826] Accordingly, in one embodiment, the process of the present invention for producing 5-oxoproline in a non-human organism, like a microorganism or a plant or a part thereof, comprises increasing or generating the activity of a gene product with the activity of a gene product conferring the activity of “CDP-diacylglycerol-serine O-phosphatidyltransferase”, especially from Azotobacter vinelandii or its functional equivalent or its homolog, e.g. the increase of
[23827] (a) a gene product of a gene comprising the nucleic acid molecule as shown in the respective line in column 5 of Table I, application no. 3, preferably the coding region thereof, or a homolog or a fragment thereof, and being depicted in the same respective line as said AvinDRAFT_{—}0035, or a functional equivalent or a homolog thereof as shown in column 8 of Table I, application no. 3, preferably the coding region thereof, particularly a homolog or functional equivalent as shown in column 8 of Table I B, application no. 3, and being depicted in the same respective line as said AvinDRAFT_{—}0035, and preferably the activity is increased non-targeted, or
[23828] (b) a polypeptide comprising a polypeptide, a consensus sequence or at least a polypeptide motif as shown in the respective line in column 5 of Table II or in column 8 of Table IV, application no. 3, respectively, and being depicted in the same respective line as said AvinDRAFT_{—}0035, or a functional equivalent or a homolog thereof as depicted in column 8 of Table II, application no. 3, preferably a homolog or functional equivalent as depicted in column 8 of Table II B, application no. 3, and being depicted in the same respective line as said AvinDRAFT_{—}0035, and preferably the activity is increased non-targeted.

[23829] Accordingly, in one embodiment, the molecule which activity is to be increased in the process of the invention is the gene product with an activity as a “CDP-diacylglycerol-serine O-phosphatidyltransferase”, preferably it is the molecule of section (a) or (b) of this paragraph.

[23830] In particular, it was observed that in plants, especially in Arabidopsis thaliana, increasing or generating the activity of a gene product non-targeted with the activity of a “CDP-diacylglycerolserine O-phosphatidyltransferase”, preferably being encoded by a gene comprising the nucleic acid sequence SEQ ID NO. 70583, preferably the coding region thereof, conferred the production of or the increase in 5-oxoproline compared with the wild type control.

[23831] The nucleic acid sequence of AVINDRAFT_{—}0539 from AZOTOBACTER VINELANDII, e.g. as shown in the respective line in column 5 of Table I, application no. 3, has been published in D. And the activity of the gene product thereof is the activity of Glycine cleavage system T aminomethyltransferase.

[23832] Accordingly, in one embodiment, the process of the present invention for producing serine in a non-human organism, like a microorganism or a plant or a part thereof, comprises increasing or generating the activity of a gene product with the activity of a gene product conferring the activity of “Glycine cleavage system T aminomethyltransferase”, especially from AZOTOBACTER VINELANDII or its functional equivalent or its homolog, e.g. the increase of
[23833] (a) a gene product of a gene comprising the nucleic acid molecule as shown in the respective line in column 5 of Table I, application no. 3, preferably the coding region thereof, or a homolog or a fragment thereof, and being depicted in the same respective line as said AVINDRAFT_{—}0539, or a functional equivalent or a homolog thereof as shown in column 8 of Table I, application no. 3, preferably the coding region thereof, particularly a homolog or functional equivalent as shown in column 8 of Table I B, application no. 3, and being depicted in the same respective line as said AVINDRAFT_{—}0539, and preferably the activity is increased non-targeted, or
[23834] (b) a polypeptide comprising a polypeptide, a consensus sequence or at least a polypeptide motif as shown in the respective line in column 5 of Table II or in column 8 of Table IV, application no. 3, respectively, and being depicted in the same respective line as said AVINDRAFT_{—}0539, or a functional equivalent or a homolog thereof as depicted in column 8 of Table II, application no. 3, preferably a homolog or functional equivalent as depicted in column 8 of Table II B, application no. 3, and being depicted in the same respective line as said AVINDRAFT_{—}0539, and preferably the activity is increased non-targeted.

[23835] Accordingly, in one embodiment, the molecule which activity is to be increased in the process of the invention is the gene product with an activity as a “Glycine cleavage system T aminomethyltransferase”, preferably it is the molecule of section (a) or (b) of this paragraph.

[23836] In particular, it was observed that in plants, especially in Arabidopsis thaliana, increasing or generating the activity of a gene product non-targeted with the activity of a “Glycine cleavage system T aminomethyltransferase”, preferably being encoded by a gene comprising the nucleic acid sequence SEQ ID NO. 70715, preferably the coding region thereof, conferred the production of or the increase in serine compared with the wild type control.

[23837] The nucleic acid sequence of AvinDRAFT_{—}1045 from Azotobacter vinelandii, e.g. as shown in the respective line in column 5 of Table I, application no. 3, has been published in D. And the activity of the gene product thereof is the activity of transcriptional regulator.

[23838] Accordingly, in one embodiment, the process of the present invention for producing serine in a non-human organism, like a microorganism or a plant or a part thereof, comprises increasing or generating the activity of a gene product with the activity of a gene product conferring the activity of “transcriptional regulator”, especially from Azotobacter vinelandii or its functional equivalent or its homolog, e.g. the increase of
[23839] (a) a gene product of a gene comprising the nucleic acid molecule as shown in the respective line in column 5 of Table I, application no. 3, preferably the coding region thereof, or a homolog or a fragment thereof, and being depicted in the same respective line as said AvinDRAFT_{—}1045, or a functional equivalent or a homolog thereof as shown in column 8 of Table I, application no. 3, preferably the coding region thereof, particularly a homolog or functional equivalent as shown in column 8 of Table I B, application no. 3, and being depicted in the same respective line as said AvinDRAFT_{—}1045, and preferably the activity is increased non-targeted, or
[23840] (b) a polypeptide comprising a polypeptide, a consensus sequence or at least a polypeptide motif as shown in the respective line in column 5 of Table II or in column 8 of Table IV, application no. 3, respectively, and being depicted in the same respective line as said AvinDRAFT_{—}1045, or a functional equivalent or a homolog thereof as depicted in column 8 of Table II, application no. 3, preferably a homolog or functional equivalent as depicted in column 8 of Table II B, application no. 3, and being depicted in the same respective line as said AvinDRAFT_{—}1045, and preferably the activity is increased non-targeted.

[23841] Accordingly, in one embodiment, the molecule which activity is to be increased in the process of the invention is the gene product with an activity as a “transcriptional regulator”, preferably it is the molecule of section (a) or (b) of this paragraph.

[23842] In particular, it was observed that in plants, especially in Arabidopsis thaliana, increasing or generating the activity of a gene product non-targeted with the activity of a “transcriptional regulator”, preferably being encoded by a gene comprising the nucleic acid sequence SEQ ID NO. 25676, preferably the coding region thereof, conferred the production of or the increase in serine compared with the wild type control.

[23843] The nucleic acid sequence of AvinDRAFT_{—}1398 from Azotobacter vinelandii, e.g. as shown in the respective line in column 5 of Table I, application no. 3, has been published in D. And the activity of the gene product thereof is the activity of adenylylsulfate kinase.

[23844] Accordingly, in one embodiment, the process of the present invention for producing aspartate in a non-human organism, like a microorganism or a plant or a part thereof, comprises increasing or generating the activity of a gene product with the activity of a gene product conferring the activity of “adenylylsulfate kinase”, especially from Azotobacter vinelandii or its functional equivalent or its homolog, e.g. the increase of
[23845] (a) a gene product of a gene comprising the nucleic acid molecule as shown in the respective line in column 5 of Table I, application no. 3, preferably the coding region thereof, or a homolog or a fragment thereof, and being depicted in the same respective line as said AvinDRAFT_{—}1398, or a functional equivalent or a homolog thereof as shown in column 8 of Table I, application no. 3, preferably the coding region thereof, particularly a homolog or functional equivalent as shown in column 8 of Table I B, application no. 3, and being depicted in the same respective line as said AvinDRAFT_{—}1398, and preferably the activity is increased non-targeted, or
[23846] (b) a polypeptide comprising a polypeptide, a consensus sequence or at least a polypeptide motif as shown in the respective line in column 5 of Table II or in column 8 of Table IV, application no. 3, respectively, and being depicted in the same respective line as said AvinDRAFT_{—}1398, or a functional equivalent or a homolog thereof as depicted in column 8 of Table II, application no. 3, preferably a homolog or functional equivalent as depicted in column 8 of Table II B, application no. 3, and being depicted in the same respective line as said AvinDRAFT_{—}1398, and preferably the activity is increased non-targeted.

[23847] Accordingly, in one embodiment, the molecule which activity is to be increased in the process of the invention is the gene product with an activity as a “adenylylsulfate kinase”, preferably it is the molecule of section (a) or (b) of this paragraph.

[23848] In particular, it was observed that in plants, especially in Arabidopsis thaliana, increasing or generating the activity of a gene product non-targeted with the activity of a “adenylylsulfate kinase”, preferably being encoded by a gene comprising the nucleic acid sequence SEQ ID NO. 25780, preferably the coding region thereof, conferred the production of or the increase in aspartate compared with the wild type control.

[23849] The nucleic acid sequence of AvinDRAFT_{—}1495 from Azotobacter vinelandii, e.g. as shown in the respective line in column 5 of Table I, application no. 3, has been published in D. And the activity of the gene product thereof is the activity of malic enzyme.

[23850] Accordingly, in one embodiment, the process of the present invention for producing alanine in a non-human organism, like a microorganism or a plant or a part thereof, comprises increasing or generating the activity of a gene product with the activity of a gene product conferring the activity of “malic enzyme”, especially from Azotobacter vinelandii or its functional equivalent or its homolog, e.g. the increase of
[23851] (a) a gene product of a gene comprising the nucleic acid molecule as shown in the respective line in column 5 of Table I, application no. 3, preferably the coding region thereof, or a homolog or a fragment thereof, and being depicted in the same respective line as said AvinDRAFT_{—}1495, or a functional equivalent or a homolog thereof as shown in column 8 of Table I, application no. 3, preferably the coding region thereof, particularly a homolog or functional equivalent as shown in column 8 of Table I B, application no. 3, and being depicted in the same respective line as said AvinDRAFT_{—}1495, and preferably the activity is increased non-targeted, or
[23852] (b) a polypeptide comprising a polypeptide, a consensus sequence or at least a polypeptide motif as shown in the respective line in column 5 of Table II or in column 8 of Table IV, application no. 3, respectively, and being depicted in the same respective line as said AvinDRAFT_{—}1495, or a functional equivalent or a homolog thereof as depicted in column 8 of Table II, application no. 3, preferably a homolog or functional equivalent as depicted in column 8 of Table II B, application no. 3, and being depicted in the same respective line as said AvinDRAFT_{—}1495, and preferably the activity is increased non-targeted.

[23853] Accordingly, in one embodiment, the molecule which activity is to be increased in the process of the invention is the gene product with an activity as a “malic enzyme”, preferably it is the molecule of section (a) or (b) of this paragraph.

[23854] In particular, it was observed that in plants, especially in Arabidopsis thaliana, increasing or generating the activity of a gene product non-targeted with the activity of a “malic enzyme”, preferably being encoded by a gene comprising the nucleic acid sequence SEQ ID NO. 5557, preferably the coding region thereof, conferred the production of or the increase in alanine compared with the wild type control.

[23855] The nucleic acid sequence of AvinDRAFT_{—}1495 from Azotobacter vinelandii, e.g. as shown in the respective line in column 5 of Table I, application no. 3, has been published in D. And the activity of the gene product thereof is the activity of malic enzyme.

[23856] Accordingly, in one embodiment, the process of the present invention for producing phenylalanine in a non-human organism, like a microorganism or a plant or a part thereof, comprises increasing or generating the activity of a gene product with the activity of a gene product conferring the activity of “malic enzyme”, especially from Azotobacter vinelandii or its functional equivalent or its homolog, e.g. the increase of
[23857] (a) a gene product of a gene comprising the nucleic acid molecule as shown in the respective line in column 5 of Table I, application no. 3, preferably the coding region thereof, or a homolog or a fragment thereof, and being depicted in the same respective line as said AvinDRAFT_{—}1495, or a functional equivalent or a homolog thereof as shown in column 8 of Table I, application no. 3, preferably the coding region thereof, particularly a homolog or functional equivalent as shown in column 8 of Table I B, application no. 3, and being depicted in the same respective line as said AvinDRAFT_{—}1495, and preferably the activity is increased non-targeted, or
[23858] (b) a polypeptide comprising a polypeptide, a consensus sequence or at least a polypeptide motif as shown in the respective line in column 5 of Table II or in column 8 of Table IV, application no. 3, respectively, and being depicted in the same respective line as said AvinDRAFT_{—}1495, or a functional equivalent or a homolog thereof as depicted in column 8 of Table II, application no. 3, preferably a homolog or functional equivalent as depicted in column 8 of Table II B, application no. 3, and being depicted in the same respective line as said AvinDRAFT_{—}1495, and preferably the activity is increased non-targeted.

[23859] Accordingly, in one embodiment, the molecule which activity is to be increased in the process of the invention is the gene product with an activity as a “malic enzyme”, preferably it is the molecule of section (a) or (b) of this paragraph.

[23860] In particular, it was observed that in plants, especially in Arabidopsis thaliana, increasing or generating the activity of a gene product non-targeted with the activity of a “malic enzyme”, preferably being encoded by a gene comprising the nucleic acid sequence SEQ ID NO. 5557, preferably the coding region thereof, conferred the production of or the increase in phenylalanine compared with the wild type control.

[23861] The nucleic acid sequence of AvinDRAFT_{—}1495 from Azotobacter vinelandii, e.g. as shown in the respective line in column 5 of Table I, application no. 3, has been published in D. And the activity of the gene product thereof is the activity of malic enzyme.

[23862] Accordingly, in one embodiment, the process of the present invention for producing serine in a non-human organism, like a microorganism or a plant or a part thereof, comprises increasing or generating the activity of a gene product with the activity of a gene product conferring the activity of “malic enzyme”, especially from Azotobacter vinelandii or its functional equivalent or its homolog, e.g. the increase of
[23863] (a) a gene product of a gene comprising the nucleic acid molecule as shown in the respective line in column 5 of Table I, application no. 3, preferably the coding region thereof, or a homolog or a fragment thereof, and being depicted in the same respective line as said AvinDRAFT_{—}1495, or a functional equivalent or a homolog thereof as shown in column 8 of Table I, application no. 3, preferably the coding region thereof, particularly a homolog or functional equivalent as shown in column 8 of Table I B, application no. 3, and being depicted in the same respective line as said AvinDRAFT_{—}1495, and preferably the activity is increased non-targeted, or
[23864] (b) a polypeptide comprising a polypeptide, a consensus sequence or at least a polypeptide motif as shown in the respective line in column 5 of Table II or in column 8 of Table IV, application no. 3, respectively, and being depicted in the same respective line as said AvinDRAFT_{—}1495, or a functional equivalent or a homolog thereof as depicted in column 8 of Table II, application no. 3, preferably a homolog or functional equivalent as depicted in column 8 of Table II B, application no. 3, and being depicted in the same respective line as said AvinDRAFT_{—}1495, and preferably the activity is increased non-targeted.

[23865] Accordingly, in one embodiment, the molecule which activity is to be increased in the process of the invention is the gene product with an activity as a “malic enzyme”, preferably it is the molecule of section (a) or (b) of this paragraph.

[23866] In particular, it was observed that in plants, especially in Arabidopsis thaliana, increasing or generating the activity of a gene product non-targeted with the activity of a “malic enzyme”, preferably being encoded by a gene comprising the nucleic acid sequence SEQ ID NO. 5557, preferably the coding region thereof, conferred the production of or the increase in serine compared with the wild type control.

[23867] The nucleic acid sequence of AvinDRAFT_{—}1624 from Azotobacter vinelandii, e.g. as shown in the respective line in column 5 of Table I, application no. 3, has been published in D. And the activity of the gene product thereof is the activity of sec-independent protein translocase.

[23868] Accordingly, in one embodiment, the process of the present invention for producing alanine in a non-human organism, like a microorganism or a plant or a part thereof, comprises increasing or generating the activity of a gene product with the activity of a gene product conferring the activity of “sec-independent protein translocase”, especially from Azotobacter vinelandii or its functional equivalent or its homolog, e.g. the increase of
[23869] (a) a gene product of a gene comprising the nucleic acid molecule as shown in the respective line in column 5 of Table I, application no. 3, preferably the coding region thereof, or a homolog or a fragment thereof, and being depicted in the same respective line as said AvinDRAFT_{—}1624, or a functional equivalent or a homolog thereof as shown in column 8 of Table I, application no. 3, preferably the coding region thereof, particularly a homolog or functional equivalent as shown in column 8 of Table I B, application no. 3, and being depicted in the same respective line as said AvinDRAFT_{—}1624, and preferably the activity is increased non-targeted, or
[23870] (b) a polypeptide comprising a polypeptide, a consensus sequence or at least a polypeptide motif as shown in the respective line in column 5 of Table II or in column 8 of Table IV, application no. 3, respectively, and being depicted in the same respective line as said AvinDRAFT_{—}1624, or a functional equivalent or a homolog thereof as depicted in column 8 of Table II, application no. 3, preferably a homolog or functional equivalent as depicted in column 8 of Table II B, application no. 3, and being depicted in the same respective line as said AvinDRAFT_{—}1624, and preferably the activity is increased non-targeted.

[23871] Accordingly, in one embodiment, the molecule which activity is to be increased in the process of the invention is the gene product with an activity as a “sec-independent protein translocase”, preferably it is the molecule of section (a) or (b) of this paragraph.

[23872] In particular, it was observed that in plants, especially in Arabidopsis thaliana, increasing or generating the activity of a gene product non-targeted with the activity of a “sec-independent protein translocase”, preferably being encoded by a gene comprising the nucleic acid sequence SEQ ID NO. 26196, preferably the coding region thereof, conferred the production of or the increase in alanine compared with the wild type control.

[23873] The nucleic acid sequence of AvinDRAFT_{—}1806 from Azotobacter vinelandii, e.g. as shown in the respective line in column 5 of Table I, application no. 3, has been published in D. And the activity of the gene product thereof is the activity of pyruvate kinase.

[23874] Accordingly, in one embodiment, the process of the present invention for producing alanine in a non-human organism, like a microorganism or a plant or a part thereof, comprises increasing or generating the activity of a gene product with the activity of a gene product conferring the activity of “pyruvate kinase”, especially from Azotobacter vinelandii or its functional equivalent or its homolog, e.g. the increase of
[23875] (a) a gene product of a gene comprising the nucleic acid molecule as shown in the respective line in column 5 of Table I, application no. 3, preferably the coding region thereof, or a homolog or a fragment thereof, and being depicted in the same respective line as said AvinDRAFT_{—}1806, or a functional equivalent or a homolog thereof as shown in column 8 of Table I, application no. 3, preferably the coding region thereof, particularly a homolog or functional equivalent as shown in column 8 of Table I B, application no. 3, and being depicted in the same respective line as said AvinDRAFT_{—}1806, and preferably the activity is increased non-targeted, or
[23876] (b) a polypeptide comprising a polypeptide, a consensus sequence or at least a polypeptide motif as shown in the respective line in column 5 of Table II or in column 8 of Table IV, application no. 3, respectively, and being depicted in the same respective line as said AvinDRAFT_{—}1806, or a functional equivalent or a homolog thereof as depicted in column 8 of Table II, application no. 3, preferably a homolog or functional equivalent as depicted in column 8 of Table II B, application no. 3, and being depicted in the same respective line as said AvinDRAFT_{—}1806, and preferably the activity is increased non-targeted.

[23877] Accordingly, in one embodiment, the molecule which activity is to be increased in the process of the invention is the gene product with an activity as a “pyruvate kinase”, preferably it is the molecule of section (a) or (b) of this paragraph.

[23878] In particular, it was observed that in plants, especially in Arabidopsis thaliana, increasing or generating the activity of a gene product non-targeted with the activity of a “pyruvate kinase”, preferably being encoded by a gene comprising the nucleic acid sequence SEQ ID NO. 26434, preferably the coding region thereof, conferred the production of or the increase in alanine compared with the wild type control.

[23879] The nucleic acid sequence of AvinDRAFT_{—}2091 from Azotobacter vinelandii, e.g. as shown in the respective line in column 5 of Table I, application no. 3, has been published in D. And the activity of the gene product thereof is the activity of beta-hydroxylase.

[23880] Accordingly, in one embodiment, the process of the present invention for producing alanine in a non-human organism, like a microorganism or a plant or a part thereof, comprises increasing or generating the activity of a gene product with the activity of a gene product conferring the activity of “beta-hydroxylase”, especially from Azotobacter vinelandii or its functional equivalent or its homolog, e.g. the increase of
[23881] (a) a gene product of a gene comprising the nucleic acid molecule as shown in the respective line in column 5 of Table I, application no. 3, preferably the coding region thereof, or a homolog or a fragment thereof, and being depicted in the same respective line as said AvinDRAFT_{—}2091, or a functional equivalent or a homolog thereof as shown in column 8 of Table I, application no. 3, preferably the coding region thereof, particularly a homolog or functional equivalent as shown in column 8 of Table I B, application no. 3, and being depicted in the same respective line as said AvinDRAFT_{—}2091, and preferably the activity is increased non-targeted, or
[23882] (b) a polypeptide comprising a polypeptide, a consensus sequence or at least a polypeptide motif as shown in the respective line in column 5 of Table II or in column 8 of Table IV, application no. 3, respectively, and being depicted in the same respective line as said AvinDRAFT_{—}2091, or a functional equivalent or a homolog thereof as depicted in column 8 of Table II, application no. 3, preferably a homolog or functional equivalent as depicted in column 8 of Table II B, application no. 3, and being depicted in the same respective line as said AvinDRAFT_{—}2091, and preferably the activity is increased non-targeted.

[23883] Accordingly, in one embodiment, the molecule which activity is to be increased in the process of the invention is the gene product with an activity as a “beta-hydroxylase”, preferably it is the molecule of section (a) or (b) of this paragraph.

[23884] In particular, it was observed that in plants, especially in Arabidopsis thaliana, increasing or generating the activity of a gene product non-targeted with the activity of a “beta-hydroxylase”, preferably being encoded by a gene comprising the nucleic acid sequence SEQ ID NO. 6040, preferably the coding region thereof, conferred the production of or the increase in alanine compared with the wild type control.

[23885] The nucleic acid sequence of AvinDRAFT_{—}2091 from Azotobacter vinelandii, e.g. as shown in the respective line in column 5 of Table I, application no. 3, has been published in D. And the activity of the gene product thereof is the activity of beta-hydroxylase.

[23886] Accordingly, in one embodiment, the process of the present invention for producing aspartate in a non-human organism, like a microorganism or a plant or a part thereof, comprises increasing or generating the activity of a gene product with the activity of a gene product conferring the activity of “beta-hydroxylase”, especially from Azotobacter vinelandii or its functional equivalent or its homolog, e.g. the increase of
[23887] (a) a gene product of a gene comprising the nucleic acid molecule as shown in the respective line in column 5 of Table I, application no. 3, preferably the coding region thereof, or a homolog or a fragment thereof, and being depicted in the same respective line as said AvinDRAFT_{—}2091, or a functional equivalent or a homolog thereof as shown in column 8 of Table I, application no. 3, preferably the coding region thereof, particularly a homolog or functional equivalent as shown in column 8 of Table I B, application no. 3, and being depicted in the same respective line as said AvinDRAFT_{—}2091, and preferably the activity is increased non-targeted, or
[23888] (b) a polypeptide comprising a polypeptide, a consensus sequence or at least a polypeptide motif as shown in the respective line in column 5 of Table II or in column 8 of Table IV, application no. 3, respectively, and being depicted in the same respective line as said AvinDRAFT_{—}2091, or a functional equivalent or a homolog thereof as depicted in column 8 of Table II, application no. 3, preferably a homolog or functional equivalent as depicted in column 8 of Table II B, application no. 3, and being depicted in the same respective line as said AvinDRAFT_{—}2091, and preferably the activity is increased non-targeted.

[23889] Accordingly, in one embodiment, the molecule which activity is to be increased in the process of the invention is the gene product with an activity as a “beta-hydroxylase”, preferably it is the molecule of section (a) or (b) of this paragraph.

[23890] In particular, it was observed that in plants, especially in Arabidopsis thaliana, increasing or generating the activity of a gene product non-targeted with the activity of a “beta-hydroxylase”, preferably being encoded by a gene comprising the nucleic acid sequence SEQ ID NO. 6040, preferably the coding region thereof, conferred the production of or the increase in aspartate compared with the wild type control.

[23891] The nucleic acid sequence of AvinDRAFT_{—}2091 from Azotobacter vinelandii, e.g. as shown in the respective line in column 5 of Table I, application no. 3, has been published in D. And the activity of the gene product thereof is the activity of beta-hydroxylase.

[23892] Accordingly, in one embodiment, the process of the present invention for producing serine in a non-human organism, like a microorganism or a plant or a part thereof, comprises increasing or generating the activity of a gene product with the activity of a gene product conferring the activity of “beta-hydroxylase”, especially from Azotobacter vinelandii or its functional equivalent or its homolog, e.g. the increase of
[23893] (a) a gene product of a gene comprising the nucleic acid molecule as shown in the respective line in column 5 of Table I, application no. 3, preferably the coding region thereof, or a homolog or a fragment thereof, and being depicted in the same respective line as said AvinDRAFT_{—}2091, or a functional equivalent or a homolog thereof as shown in column 8 of Table I, application no. 3, preferably the coding region thereof, particularly a homolog or functional equivalent as shown in column 8 of Table I B, application no. 3, and being depicted in the same respective line as said AvinDRAFT_{—}2091, and preferably the activity is increased non-targeted, or
[23894] (b) a polypeptide comprising a polypeptide, a consensus sequence or at least a polypeptide motif as shown in the respective line in column 5 of Table II or in column 8 of Table IV, application no. 3, respectively, and being depicted in the same respective line as said AvinDRAFT_{—}2091, or a functional equivalent or a homolog thereof as depicted in column 8 of Table II, application no. 3, preferably a homolog or functional equivalent as depicted in column 8 of Table II B, application no. 3, and being depicted in the same respective line as said AvinDRAFT_{—}2091, and preferably the activity is increased non-targeted.

[23895] Accordingly, in one embodiment, the molecule which activity is to be increased in the process of the invention is the gene product with an activity as a “beta-hydroxylase”, preferably it is the molecule of section (a) or (b) of this paragraph.

[23896] In particular, it was observed that in plants, especially in Arabidopsis thaliana, increasing or generating the activity of a gene product non-targeted with the activity of a “beta-hydroxylase”, preferably being encoded by a gene comprising the nucleic acid sequence SEQ ID NO. 6040, preferably the coding region thereof, conferred the production of or the increase in serine compared with the wild type control.

[23897] The nucleic acid sequence of AvinDRAFT_{—}2344 from Azotobacter vinelandii, e.g. as shown in the respective line in column 5 of Table I, application no. 3, has been published in D. And the activity of the gene product thereof is the activity of elongation factor Tu.

[23898] Accordingly, in one embodiment, the process of the present invention for producing aspartate in a non-human organism, like a microorganism or a plant or a part thereof, comprises increasing or generating the activity of a gene product with the activity of a gene product conferring the activity of “elongation factor Tu”, especially from Azotobacter vinelandii or its functional equivalent or its homolog, e.g. the increase of
[23899] (a) a gene product of a gene comprising the nucleic acid molecule as shown in the respective line in column 5 of Table I, application no. 3, preferably the coding region thereof, or a homolog or a fragment thereof, and being depicted in the same respective line as said AvinDRAFT_{—}2344, or a functional equivalent or a homolog thereof as shown in column 8 of Table I, application no. 3, preferably the coding region thereof, particularly a homolog or functional equivalent as shown in column 8 of Table I B, application no. 3, and being depicted in the same respective line as said AvinDRAFT_{—}2344, and preferably the activity is increased non-targeted, or
[23900] (b) a polypeptide comprising a polypeptide, a consensus sequence or at least a polypeptide motif as shown in the respective line in column 5 of Table II or in column 8 of Table IV, application no. 3, respectively, and being depicted in the same respective line as said AvinDRAFT_{—}2344, or a functional equivalent or a homolog thereof as depicted in column 8 of Table II, application no. 3, preferably a homolog or functional equivalent as depicted in column 8 of Table II B, application no. 3, and being depicted in the same respective line as said AvinDRAFT_{—}2344, and preferably the activity is increased non-targeted.

[23901] Accordingly, in one embodiment, the molecule which activity is to be increased in the process of the invention is the gene product with an activity as a “elongation factor Tu”, preferably it is the molecule of section (a) or (b) of this paragraph.

[23902] In particular, it was observed that in plants, especially in Arabidopsis thaliana, increasing or generating the activity of a gene product non-targeted with the activity of a “elongation factor Tu”, preferably being encoded by a gene comprising the nucleic acid sequence SEQ ID NO. 27021, preferably the coding region thereof, conferred the production of or the increase in aspartate compared with the wild type control.

[23903] The nucleic acid sequence of AvinDRAFT_{—}2344 from Azotobacter vinelandii, e.g. as shown in the respective line in column 5 of Table I, application no. 3, has been published in D. And the activity of the gene product thereof is the activity of elongation factor Tu.

[23904] Accordingly, in one embodiment, the process of the present invention for producing phenylalanine in a non-human organism, like a microorganism or a plant or a part thereof, comprises increasing or generating the activity of a gene product with the activity of a gene product conferring the activity of “elongation factor Tu”, especially from Azotobacter vinelandii or its functional equivalent or its homolog, e.g. the increase of
[23905] (a) a gene product of a gene comprising the nucleic acid molecule as shown in the respective line in column 5 of Table I, application no. 3, preferably the coding region thereof, or a homolog or a fragment thereof, and being depicted in the same respective line as said AvinDRAFT_{—}2344, or a functional equivalent or a homolog thereof as shown in column 8 of Table I, application no. 3, preferably the coding region thereof, particularly a homolog or functional equivalent as shown in column 8 of Table I B, application no. 3, and being depicted in the same respective line as said AvinDRAFT_{—}2344, and preferably the activity is increased non-targeted, or
[23906] (b) a polypeptide comprising a polypeptide, a consensus sequence or at least a polypeptide motif as shown in the respective line in column 5 of Table II or in column 8 of Table IV, application no. 3, respectively, and being depicted in the same respective line as said AvinDRAFT_{—}2344, or a functional equivalent or a homolog thereof as depicted in column 8 of Table II, application no. 3, preferably a homolog or functional equivalent as depicted in column 8 of Table II B, application no. 3, and being depicted in the same respective line as said AvinDRAFT_{—}2344, and preferably the activity is increased non-targeted.

[23907] Accordingly, in one embodiment, the molecule which activity is to be increased in the process of the invention is the gene product with an activity as a “elongation factor Tu”, preferably it is the molecule of section (a) or (b) of this paragraph.

[23908] In particular, it was observed that in plants, especially in Arabidopsis thaliana, increasing or generating the activity of a gene product non-targeted with the activity of a “elongation factor Tu”, preferably being encoded by a gene comprising the nucleic acid sequence SEQ ID NO. 27021, preferably the coding region thereof, conferred the production of or the increase in phenylalanine compared with the wild type control.

[23909] The nucleic acid sequence of AvinDRAFT_{—}2344 from Azotobacter vinelandii, e.g. as shown in the respective line in column 5 of Table I, application no. 3, has been published in D. And the activity of the gene product thereof is the activity of elongation factor Tu.

[23910] Accordingly, in one embodiment, the process of the present invention for producing serine in a non-human organism, like a microorganism or a plant or a part thereof, comprises increasing or generating the activity of a gene product with the activity of a gene product conferring the activity of “elongation factor Tu”, especially from Azotobacter vinelandii or its functional equivalent or its homolog, e.g. the increase of
[23911] (a) a gene product of a gene comprising the nucleic acid molecule as shown in the respective line in column 5 of Table I, application no. 3, preferably the coding region thereof, or a homolog or a fragment thereof, and being depicted in the same respective line as said AvinDRAFT_{—}2344, or a functional equivalent or a homolog thereof as shown in column 8 of Table I, application no. 3, preferably the coding region thereof, particularly a homolog or functional equivalent as shown in column 8 of Table I B, application no. 3, and being depicted in the same respective line as said AvinDRAFT_{—}2344, and preferably the activity is increased non-targeted, or
[23912] (b) a polypeptide comprising a polypeptide, a consensus sequence or at least a polypeptide motif as shown in the respective line in column 5 of Table II or in column 8 of Table IV, application no. 3, respectively, and being depicted in the same respective line as said AvinDRAFT_{—}2344, or a functional equivalent or a homolog thereof as depicted in column 8 of Table II, application no. 3, preferably a homolog or functional equivalent as depicted in column 8 of Table II B, application no. 3, and being depicted in the same respective line as said AvinDRAFT_{—}2344, and preferably the activity is increased non-targeted.

[23913] Accordingly, in one embodiment, the molecule which activity is to be increased in the process of the invention is the gene product with an activity as a “elongation factor Tu”, preferably it is the molecule of section (a) or (b) of this paragraph.

[23914] In particular, it was observed that in plants, especially in Arabidopsis thaliana, increasing or generating the activity of a gene product non-targeted with the activity of a “elongation factor Tu”, preferably being encoded by a gene comprising the nucleic acid sequence SEQ ID NO. 27021, preferably the coding region thereof, conferred the production of or the increase in serine compared with the wild type control.

[23915] The nucleic acid sequence of AvinDRAFT_{—}2344 from Azotobacter vinelandii, e.g. as shown in the respective line in column 5 of Table I, application no. 3, has been published in D. And the activity of the gene product thereof is the activity of elongation factor Tu.

[23916] Accordingly, in one embodiment, the process of the present invention for producing tyrosine in a non-human organism, like a microorganism or a plant or a part thereof, comprises increasing or generating the activity of a gene product with the activity of a gene product conferring the activity of “elongation factor Tu”, especially from Azotobacter vinelandii or its functional equivalent or its homolog, e.g. the increase of
[23917] (a) a gene product of a gene comprising the nucleic acid molecule as shown in the respective line in column 5 of Table I, application no. 3, preferably the coding region thereof, or a homolog or a fragment thereof, and being depicted in the same respective line as said AvinDRAFT_{—}2344, or a functional equivalent or a homolog thereof as shown in column 8 of Table I, application no. 3, preferably the coding region thereof, particularly a homolog or functional equivalent as shown in column 8 of Table I B, application no. 3, and being depicted in the same respective line as said AvinDRAFT_{—}2344, and preferably the activity is increased non-targeted, or
[23918] (b) a polypeptide comprising a polypeptide, a consensus sequence or at least a polypeptide motif as shown in the respective line in column 5 of Table II or in column 8 of Table IV, application no. 3, respectively, and being depicted in the same respective line as said AvinDRAFT_{—}2344, or a functional equivalent or a homolog thereof as depicted in column 8 of Table II, application no. 3, preferably a homolog or functional equivalent as depicted in column 8 of Table II B, application no. 3, and being depicted in the same respective line as said AvinDRAFT_{—}2344, and preferably the activity is increased non-targeted.

[23919] Accordingly, in one embodiment, the molecule which activity is to be increased in the process of the invention is the gene product with an activity as a “elongation factor Tu”, preferably it is the molecule of section (a) or (b) of this paragraph.

[23920] In particular, it was observed that in plants, especially in Arabidopsis thaliana, increasing or generating the activity of a gene product non-targeted with the activity of a “elongation factor Tu”, preferably being encoded by a gene comprising the nucleic acid sequence SEQ ID NO. 27021, preferably the coding region thereof, conferred the production of or the increase in tyrosine compared with the wild type control.

[23921] The nucleic acid sequence of AvinDRAFT_{—}2344 from Azotobacter vinelandii, e.g. as shown in the respective line in column 5 of Table I, application no. 3, has been published in D. And the activity of the gene product thereof is the activity of elongation factor Tu.

[23922] Accordingly, in one embodiment, the process of the present invention for producing 5-oxoproline in a non-human organism, like a microorganism or a plant or a part thereof, comprises increasing or generating the activity of a gene product with the activity of a gene product conferring the activity of “elongation factor Tu”, especially from Azotobacter vinelandii or its functional equivalent or its homolog, e.g. the increase of
[23923] (a) a gene product of a gene comprising the nucleic acid molecule as shown in the respective line in column 5 of Table I, application no. 3, preferably the coding region thereof, or a homolog or a fragment thereof, and being depicted in the same respective line as said AvinDRAFT_{—}2344, or a functional equivalent or a homolog thereof as shown in column 8 of Table I, application no. 3, preferably the coding region thereof, particularly a homolog or functional equivalent as shown in column 8 of Table I B, application no. 3, and being depicted in the same respective line as said AvinDRAFT_{—}2344, and preferably the activity is increased non-targeted, or
[23924] (b) a polypeptide comprising a polypeptide, a consensus sequence or at least a polypeptide motif as shown in the respective line in column 5 of Table II or in column 8 of Table IV, application no. 3, respectively, and being depicted in the same respective line as said AvinDRAFT_{—}2344, or a functional equivalent or a homolog thereof as depicted in column 8 of Table II, application no. 3, preferably a homolog or functional equivalent as depicted in column 8 of Table II B, application no. 3, and being depicted in the same respective line as said AvinDRAFT_{—}2344, and preferably the activity is increased non-targeted.

[23925] Accordingly, in one embodiment, the molecule which activity is to be increased in the process of the invention is the gene product with an activity as a “elongation factor Tu”, preferably it is the molecule of section (a) or (b) of this paragraph.

[23926] In particular, it was observed that in plants, especially in Arabidopsis thaliana, increasing or generating the activity of a gene product non-targeted with the activity of a “elongation factor Tu”, preferably being encoded by a gene comprising the nucleic acid sequence SEQ ID NO. 27021, preferably the coding region thereof, conferred the production of or the increase in 5-oxoproline compared with the wild type control.

[23927] The nucleic acid sequence of AvinDRAFT_{—}2365 from Azotobacter vinelandii, e.g. as shown in the respective line in column 5 of Table I, application no. 3, has been published in D. And the activity of the gene product thereof is the activity of 30S ribosomal protein S3.

[23928] Accordingly, in one embodiment, the process of the present invention for producing tyrosine in a non-human organism, like a microorganism or a plant or a part thereof, comprises increasing or generating the activity of a gene product with the activity of a gene product conferring the activity of “30S ribosomal protein S3”, especially from Azotobacter vinelandii or its functional equivalent or its homolog, e.g. the increase of
[23929] (a) a gene product of a gene comprising the nucleic acid molecule as shown in the respective line in column 5 of Table I, application no. 3, preferably the coding region thereof, or a homolog or a fragment thereof, and being depicted in the same respective line as said AvinDRAFT_{—}2365, or a functional equivalent or a homolog thereof as shown in column 8 of Table I, application no. 3, preferably the coding region thereof, particularly a homolog or functional equivalent as shown in column 8 of Table I B, application no. 3, and being depicted in the same respective line as said AvinDRAFT_{—}2365, and preferably the activity is increased non-targeted, or
[23930] (b) a polypeptide comprising a polypeptide, a consensus sequence or at least a polypeptide motif as shown in the respective line in column 5 of Table II or in column 8 of Table IV, application no. 3, respectively, and being depicted in the same respective line as said AvinDRAFT_{—}2365, or a functional equivalent or a homolog thereof as depicted in column 8 of Table II, application no. 3, preferably a homolog or functional equivalent as depicted in column 8 of Table II B, application no. 3, and being depicted in the same respective line as said AvinDRAFT_{—}2365, and preferably the activity is increased non-targeted.

[23931] Accordingly, in one embodiment, the molecule which activity is to be increased in the process of the invention is the gene product with an activity as a “305 ribosomal protein S3”, preferably it is the molecule of section (a) or (b) of this paragraph.

[23932] In particular, it was observed that in plants, especially in Arabidopsis thaliana, increasing or generating the activity of a gene product non-targeted with the activity of a “305 ribosomal protein S3”, preferably being encoded by a gene comprising the nucleic acid sequence SEQ ID NO. 71325, preferably the coding region thereof, conferred the production of or the increase in tyrosine compared with the wild type control.

[23933] The nucleic acid sequence of AvinDRAFT_{—}2369 from Azotobacter vinelandii, e.g. as shown in the respective line in column 5 of Table I, application no. 3, has been published in D. And the activity of the gene product thereof is the activity of 50S ribosomal protein L14.

[23934] Accordingly, in one embodiment, the process of the present invention for producing asparagine in a non-human organism, like a microorganism or a plant or a part thereof, comprises increasing or generating the activity of a gene product with the activity of a gene product conferring the activity of “505 ribosomal protein L14”, especially from Azotobacter vinelandii or its functional equivalent or its homolog, e.g. the increase of
[23935] (a) a gene product of a gene comprising the nucleic acid molecule as shown in the respective line in column 5 of Table I, application no. 3, preferably the coding region thereof, or a homolog or a fragment thereof, and being depicted in the same respective line as said AvinDRAFT_{—}2369, or a functional equivalent or a homolog thereof as shown in column 8 of Table I, application no. 3, preferably the coding region thereof, particularly a homolog or functional equivalent as shown in column 8 of Table I B, application no. 3, and being depicted in the same respective line as said AvinDRAFT_{—}2369, and preferably the activity is increased non-targeted, or
[23936] (b) a polypeptide comprising a polypeptide, a consensus sequence or at least a polypeptide motif as shown in the respective line in column 5 of Table II or in column 8 of Table IV, application no. 3, respectively, and being depicted in the same respective line as said AvinDRAFT_{—}2369, or a functional equivalent or a homolog thereof as depicted in column 8 of Table II, application no. 3, preferably a homolog or functional equivalent as depicted in column 8 of Table II B, application no. 3, and being depicted in the same respective line as said AvinDRAFT_{—}2369, and preferably the activity is increased non-targeted.

[23937] Accordingly, in one embodiment, the molecule which activity is to be increased in the process of the invention is the gene product with an activity as a “505 ribosomal protein L14”, preferably it is the molecule of section (a) or (b) of this paragraph.

[23938] In particular, it was observed that in plants, especially in Arabidopsis thaliana, increasing or generating the activity of a gene product non-targeted with the activity of a “505 ribosomal protein L14”, preferably being encoded by a gene comprising the nucleic acid sequence SEQ ID NO. 71763, preferably the coding region thereof, conferred the production of or the increase in asparagine compared with the wild type control.

[23939] The nucleic acid sequence of AvinDRAFT_{—}2521 from Azotobacter vinelandii, e.g. as shown in the respective line in column 5 of Table I, application no. 3, has been published in D. And the activity of the gene product thereof is the activity of ABC transporter permease protein.

[23940] Accordingly, in one embodiment, the process of the present invention for producing tyrosine in a non-human organism, like a microorganism or a plant or a part thereof, comprises increasing or generating the activity of a gene product with the activity of a gene product conferring the activity of “ABC transporter permease protein”, especially from Azotobacter vinelandii or its functional equivalent or its homolog, e.g. the increase of
[23941] (a) a gene product of a gene comprising the nucleic acid molecule as shown in the respective line in column 5 of Table I, application no. 3, preferably the coding region thereof, or a homolog or a fragment thereof, and being depicted in the same respective line as said AvinDRAFT_{—}2521, or a functional equivalent or a homolog thereof as shown in column 8 of Table I, application no. 3, preferably the coding region thereof, particularly a homolog or functional equivalent as shown in column 8 of Table I B, application no. 3, and being depicted in the same respective line as said AvinDRAFT_{—}2521, and preferably the activity is increased non-targeted, or
[23942] (b) a polypeptide comprising a polypeptide, a consensus sequence or at least a polypeptide motif as shown in the respective line in column 5 of Table II or in column 8 of Table IV, application no. 3, respectively, and being depicted in the same respective line as said AvinDRAFT_{—}2521, or a functional equivalent or a homolog thereof as depicted in column 8 of Table II, application no. 3, preferably a homolog or functional equivalent as depicted in column 8 of Table II B, application no. 3, and being depicted in the same respective line as said AvinDRAFT_{—}2521, and preferably the activity is increased non-targeted.

[23943] Accordingly, in one embodiment, the molecule which activity is to be increased in the process of the invention is the gene product with an activity as a “ABC transporter permease protein”, preferably it is the molecule of section (a) or (b) of this paragraph.

[23944] In particular, it was observed that in plants, especially in Arabidopsis thaliana, increasing or generating the activity of a gene product non-targeted with the activity of a “ABC transporter permease protein”, preferably being encoded by a gene comprising the nucleic acid sequence SEQ ID NO. 27882, preferably the coding region thereof, conferred the production of or the increase in tyrosine compared with the wild type control.

[23945] The nucleic acid sequence of AvinDRAFT_{—}2754 from Azotobacter vinelandii, e.g. as shown in the respective line in column 5 of Table I, application no. 3, has been published in D. And the activity of the gene product thereof is the activity of acyl-CoA synthase.

[23946] Accordingly, in one embodiment, the process of the present invention for producing aspartate in a non-human organism, like a microorganism or a plant or a part thereof, comprises increasing or generating the activity of a gene product with the activity of a gene product conferring the activity of “acyl-CoA synthase”, especially from Azotobacter vinelandii or its functional equivalent or its homolog, e.g. the increase of
[23947] (a) a gene product of a gene comprising the nucleic acid molecule as shown in the respective line in column 5 of Table I, application no. 3, preferably the coding region thereof, or a homolog or a fragment thereof, and being depicted in the same respective line as said AvinDRAFT_{—}2754, or a functional equivalent or a homolog thereof as shown in column 8 of Table I, application no. 3, preferably the coding region thereof, particularly a homolog or functional equivalent as shown in column 8 of Table I B, application no. 3, and being depicted in the same respective line as said AvinDRAFT_{—}2754, and preferably the activity is increased non-targeted, or
[23948] (b) a polypeptide comprising a polypeptide, a consensus sequence or at least a polypeptide motif as shown in the respective line in column 5 of Table II or in column 8 of Table IV, application no. 3, respectively, and being depicted in the same respective line as said AvinDRAFT_{—}2754, or a functional equivalent or a homolog thereof as depicted in column 8 of Table II, application no. 3, preferably a homolog or functional equivalent as depicted in column 8 of Table II B, application no. 3, and being depicted in the same respective line as said AvinDRAFT_{—}2754, and preferably the activity is increased non-targeted.

[23949] Accordingly, in one embodiment, the molecule which activity is to be increased in the process of the invention is the gene product with an activity as a “acyl-CoA synthase”, preferably it is the molecule of section (a) or (b) of this paragraph.

[23950] In particular, it was observed that in plants, especially in Arabidopsis thaliana, increasing or generating the activity of a gene product non-targeted with the activity of a “acyl-CoA synthase”, preferably being encoded by a gene comprising the nucleic acid sequence SEQ ID NO. 28040, preferably the coding region thereof, conferred the production of or the increase in aspartate compared with the wild type control.

[23951] The nucleic acid sequence of AvinDRAFT_{—}2754 from Azotobacter vinelandii, e.g. as shown in the respective line in column 5 of Table I, application no. 3, has been published in D. And the activity of the gene product thereof is the activity of acyl-CoA synthase.

[23952] Accordingly, in one embodiment, the process of the present invention for producing tyrosine in a non-human organism, like a microorganism or a plant or a part thereof, comprises increasing or generating the activity of a gene product with the activity of a gene product conferring the activity of “acyl-CoA synthase”, especially from Azotobacter vinelandii or its functional equivalent or its homolog, e.g. the increase of
[23953] (a) a gene product of a gene comprising the nucleic acid molecule as shown in the respective line in column 5 of Table I, application no. 3, preferably the coding region thereof, or a homolog or a fragment thereof, and being depicted in the same respective line as said AvinDRAFT_{—}2754, or a functional equivalent or a homolog thereof as shown in column 8 of Table I, application no. 3, preferably the coding region thereof, particularly a homolog or functional equivalent as shown in column 8 of Table I B, application no. 3, and being depicted in the same respective line as said AvinDRAFT_{—}2754, and preferably the activity is increased non-targeted, or
[23954] (b) a polypeptide comprising a polypeptide, a consensus sequence or at least a polypeptide motif as shown in the respective line in column 5 of Table II or in column 8 of Table IV, application no. 3, respectively, and being depicted in the same respective line as said AvinDRAFT_{—}2754, or a functional equivalent or a homolog thereof as depicted in column 8 of Table II, application no. 3, preferably a homolog or functional equivalent as depicted in column 8 of Table II B, application no. 3, and being depicted in the same respective line as said AvinDRAFT_{—}2754, and preferably the activity is increased non-targeted.

[23955] Accordingly, in one embodiment, the molecule which activity is to be increased in the process of the invention is the gene product with an activity as a “acyl-CoA synthase”, preferably it is the molecule of section (a) or (b) of this paragraph.

[23956] In particular, it was observed that in plants, especially in Arabidopsis thaliana, increasing or generating the activity of a gene product non-targeted with the activity of a “acyl-CoA synthase”, preferably being encoded by a gene comprising the nucleic acid sequence SEQ ID NO. 28040, preferably the coding region thereof, conferred the production of or the increase in tyrosine compared with the wild type control.

[23957] The nucleic acid sequence of AvinDRAFT_{—}2754 from Azotobacter vinelandii, e.g. as shown in the respective line in column 5 of Table I, application no. 3, has been published in D. And the activity of the gene product thereof is the activity of acyl-CoA synthase.

[23958] Accordingly, in one embodiment, the process of the present invention for producing 5-oxoproline in a non-human organism, like a microorganism or a plant or a part thereof, comprises increasing or generating the activity of a gene product with the activity of a gene product conferring the activity of “acyl-CoA synthase”, especially from Azotobacter vinelandii or its functional equivalent or its homolog, e.g. the increase of
[23959] (a) a gene product of a gene comprising the nucleic acid molecule as shown in the respective line in column 5 of Table I, application no. 3, preferably the coding region thereof, or a homolog or a fragment thereof, and being depicted in the same respective line as said AvinDRAFT_{—}2754, or a functional equivalent or a homolog thereof as shown in column 8 of Table I, application no. 3, preferably the coding region thereof, particularly a homolog or functional equivalent as shown in column 8 of Table I B, application no. 3, and being depicted in the same respective line as said AvinDRAFT_{—}2754, and preferably the activity is increased non-targeted, or
[23960] (b) a polypeptide comprising a polypeptide, a consensus sequence or at least a polypeptide motif as shown in the respective line in column 5 of Table II or in column 8 of Table IV, application no. 3, respectively, and being depicted in the same respective line as said AvinDRAFT_{—}2754, or a functional equivalent or a homolog thereof as depicted in column 8 of Table II, application no. 3, preferably a homolog or functional equivalent as depicted in column 8 of Table II B, application no. 3, and being depicted in the same respective line as said AvinDRAFT_{—}2754, and preferably the activity is increased non-targeted.

[23961] Accordingly, in one embodiment, the molecule which activity is to be increased in the process of the invention is the gene product with an activity as a “acyl-CoA synthase”, preferably it is the molecule of section (a) or (b) of this paragraph.

[23962] In particular, it was observed that in plants, especially in Arabidopsis thaliana, increasing or generating the activity of a gene product non-targeted with the activity of a “acyl-CoA synthase”, preferably being encoded by a gene comprising the nucleic acid sequence SEQ ID NO. 28040, preferably the coding region thereof, conferred the production of or the increase in 5-oxoproline compared with the wild type control.

[23963] The nucleic acid sequence of AvinDRAFT_{—}3028 from Azotobacter vinelandii, e.g. as shown in the respective line in column 5 of Table I, application no. 3, has been published in D. And the activity of the gene product thereof is the activity of 2-oxoglutarate dehydrogenase E1 subunit.

[23964] Accordingly, in one embodiment, the process of the present invention for producing aspartate in a non-human organism, like a microorganism or a plant or a part thereof, comprises increasing or generating the activity of a gene product with the activity of a gene product conferring the activity of “2-oxoglutarate dehydrogenase E1 subunit”, especially from Azotobacter vinelandii or its functional equivalent or its homolog, e.g. the increase of
[23965] (a) a gene product of a gene comprising the nucleic acid molecule as shown in the respective line in column 5 of Table I, application no. 3, preferably the coding region thereof, or a homolog or a fragment thereof, and being depicted in the same respective line as said AvinDRAFT_{—}3028, or a functional equivalent or a homolog thereof as shown in column 8 of Table I, application no. 3, preferably the coding region thereof, particularly a homolog or functional equivalent as shown in column 8 of Table I B, application no. 3, and being depicted in the same respective line as said AvinDRAFT_{—}3028, and preferably the activity is increased non-targeted, or
[23966] (b) a polypeptide comprising a polypeptide, a consensus sequence or at least a polypeptide motif as shown in the respective line in column 5 of Table II or in column 8 of Table IV, application no. 3, respectively, and being depicted in the same respective line as said AvinDRAFT_{—}3028, or a functional equivalent or a homolog thereof as depicted in column 8 of Table II, application no. 3, preferably a homolog or functional equivalent as depicted in column 8 of Table II B, application no. 3, and being depicted in the same respective line as said AvinDRAFT_{—}3028, and preferably the activity is increased non-targeted.

[23967] Accordingly, in one embodiment, the molecule which activity is to be increased in the process of the invention is the gene product with an activity as a “2-oxoglutarate dehydrogenase E1 subunit”, preferably it is the molecule of section (a) or (b) of this paragraph.

[23968] In particular, it was observed that in plants, especially in Arabidopsis thaliana, increasing or generating the activity of a gene product non-targeted with the activity of a “2-oxoglutarate dehydrogenase E1 subunit”, preferably being encoded by a gene comprising the nucleic acid sequence SEQ ID NO. 6075, preferably the coding region thereof, conferred the production of or the increase in aspartate compared with the wild type control.

[23969] The nucleic acid sequence of AvinDRAFT_{—}3028 from Azotobacter vinelandii, e.g. as shown in the respective line in column 5 of Table I, application no. 3, has been published in D. And the activity of the gene product thereof is the activity of 2-oxoglutarate dehydrogenase E1 subunit.

[23970] Accordingly, in one embodiment, the process of the present invention for producing 5-oxoproline in a non-human organism, like a microorganism or a plant or a part thereof, comprises increasing or generating the activity of a gene product with the activity of a gene product conferring the activity of “2-oxoglutarate dehydrogenase E1 subunit”, especially from Azotobacter vinelandii or its functional equivalent or its homolog, e.g. the increase of
[23971] (a) a gene product of a gene comprising the nucleic acid molecule as shown in the respective line in column 5 of Table I, application no. 3, preferably the coding region thereof, or a homolog or a fragment thereof, and being depicted in the same respective line as said AvinDRAFT_{—}3028, or a functional equivalent or a homolog thereof as shown in column 8 of Table I, application no. 3, preferably the coding region thereof, particularly a homolog or functional equivalent as shown in column 8 of Table I B, application no. 3, and being depicted in the same respective line as said AvinDRAFT_{—}3028, and preferably the activity is increased non-targeted, or
[23972] (b) a polypeptide comprising a polypeptide, a consensus sequence or at least a polypeptide motif as shown in the respective line in column 5 of Table II or in column 8 of Table IV, application no. 3, respectively, and being depicted in the same respective line as said AvinDRAFT_{—}3028, or a functional equivalent or a homolog thereof as depicted in column 8 of Table II, application no. 3, preferably a homolog or functional equivalent as depicted in column 8 of Table II B, application no. 3, and being depicted in the same respective line as said AvinDRAFT_{—}3028, and preferably the activity is increased non-targeted.

[23973] Accordingly, in one embodiment, the molecule which activity is to be increased in the process of the invention is the gene product with an activity as a “2-oxoglutarate dehydrogenase E1 subunit”, preferably it is the molecule of section (a) or (b) of this paragraph.

[23974] In particular, it was observed that in plants, especially in Arabidopsis thaliana, increasing or generating the activity of a gene product non-targeted with the activity of a “2-oxoglutarate dehydrogenase E1 subunit”, preferably being encoded by a gene comprising the nucleic acid sequence SEQ ID NO. 6075, preferably the coding region thereof, conferred the production of or the increase in 5-oxoproline compared with the wild type control.

[23975] The nucleic acid sequence of AvinDRAFT_{—}3135 from Azotobacter vinelandii, e.g. as shown in the respective line in column 5 of Table I, application no. 3, has been published in D. And the activity of the gene product thereof is the activity of GDP-mannose dehydrogenase.

[23976] Accordingly, in one embodiment, the process of the present invention for producing serine in a non-human organism, like a microorganism or a plant or a part thereof, comprises increasing or generating the activity of a gene product with the activity of a gene product conferring the activity of “GDP-mannose dehydrogenase”, especially from Azotobacter vinelandii or its functional equivalent or its homolog, e.g. the increase of
[23977] (a) a gene product of a gene comprising the nucleic acid molecule as shown in the respective line in column 5 of Table I, application no. 3, preferably the coding region thereof, or a homolog or a fragment thereof, and being depicted in the same respective line as said AvinDRAFT_{—}3135, or a functional equivalent or a homolog thereof as shown in column 8 of Table I, application no. 3, preferably the coding region thereof, particularly a homolog or functional equivalent as shown in column 8 of Table I B, application no. 3, and being depicted in the same respective line as said AvinDRAFT_{—}3135, and preferably the activity is increased non-targeted, or
[23978] (b) a polypeptide comprising a polypeptide, a consensus sequence or at least a polypeptide motif as shown in the respective line in column 5 of Table II or in column 8 of Table IV, application no. 3, respectively, and being depicted in the same respective line as said AvinDRAFT_{—}3135, or a functional equivalent or a homolog thereof as depicted in column 8 of Table II, application no. 3, preferably a homolog or functional equivalent as depicted in column 8 of Table II B, application no. 3, and being depicted in the same respective line as said AvinDRAFT_{—}3135, and preferably the activity is increased non-targeted.

[23979] Accordingly, in one embodiment, the molecule which activity is to be increased in the process of the invention is the gene product with an activity as a “GDP-mannose dehydrogenase”, preferably it is the molecule of section (a) or (b) of this paragraph.

[23980] In particular, it was observed that in plants, especially in Arabidopsis thaliana, increasing or generating the activity of a gene product non-targeted with the activity of a “GDP-mannose dehydrogenase”, preferably being encoded by a gene comprising the nucleic acid sequence SEQ ID NO. 72346, preferably the coding region thereof, conferred the production of or the increase in serine compared with the wild type control.

[23981] The nucleic acid sequence of AvinDRAFT_{—}3186 from Azotobacter vinelandii, e.g. as shown in the respective line in column 5 of Table I, application no. 3, has been published in D. And the activity of the gene product thereof is the activity of transcriptional regulator.

[23982] Accordingly, in one embodiment, the process of the present invention for producing serine in a non-human organism, like a microorganism or a plant or a part thereof, comprises increasing or generating the activity of a gene product with the activity of a gene product conferring the activity of “transcriptional regulator”, especially from Azotobacter vinelandii or its functional equivalent or its homolog, e.g. the increase of
[23983] (a) a gene product of a gene comprising the nucleic acid molecule as shown in the respective line in column 5 of Table I, application no. 3, preferably the coding region thereof, or a homolog or a fragment thereof, and being depicted in the same respective line as said AvinDRAFT_{—}3186, or a functional equivalent or a homolog thereof as shown in column 8 of Table I, application no. 3, preferably the coding region thereof, particularly a homolog or functional equivalent as shown in column 8 of Table I B, application no. 3, and being depicted in the same respective line as said AvinDRAFT_{—}3186, and preferably the activity is increased non-targeted, or
[23984] (b) a polypeptide comprising a polypeptide, a consensus sequence or at least a polypeptide motif as shown in the respective line in column 5 of Table II or in column 8 of Table IV, application no. 3, respectively, and being depicted in the same respective line as said AvinDRAFT_{—}3186, or a functional equivalent or a homolog thereof as depicted in column 8 of Table II, application no. 3, preferably a homolog or functional equivalent as depicted in column 8 of Table II B, application no. 3, and being depicted in the same respective line as said AvinDRAFT_{—}3186, and preferably the activity is increased non-targeted.

[23985] Accordingly, in one embodiment, the molecule which activity is to be increased in the process of the invention is the gene product with an activity as a “transcriptional regulator”, preferably it is the molecule of section (a) or (b) of this paragraph.

[23986] In particular, it was observed that in plants, especially in Arabidopsis thaliana, increasing or generating the activity of a gene product non-targeted with the activity of a “transcriptional regulator”, preferably being encoded by a gene comprising the nucleic acid sequence SEQ ID NO. 29246, preferably the coding region thereof, conferred the production of or the increase in serine compared with the wild type control.

[23987] The nucleic acid sequence of AvinDRAFT_{—}3209 from Azotobacter vinelandii, e.g. as shown in the respective line in column 5 of Table I, application no. 3, has been published in D. And the activity of the gene product thereof is the activity of transcriptional regulator.

[23988] Accordingly, in one embodiment, the process of the present invention for producing phenylalanine in a non-human organism, like a microorganism or a plant or a part thereof, comprises increasing or generating the activity of a gene product with the activity of a gene product conferring the activity of “transcriptional regulator”, especially from Azotobacter vinelandii or its functional equivalent or its homolog, e.g. the increase of
[23989] (a) a gene product of a gene comprising the nucleic acid molecule as shown in the respective line in column 5 of Table I, application no. 3, preferably the coding region thereof, or a homolog or a fragment thereof, and being depicted in the same respective line as said AvinDRAFT_{—}3209, or a functional equivalent or a homolog thereof as shown in column 8 of Table I, application no. 3, preferably the coding region thereof, particularly a homolog or functional equivalent as shown in column 8 of Table I B, application no. 3, and being depicted in the same respective line as said AvinDRAFT_{—}3209, and preferably the activity is increased non-targeted, or
[23990] (b) a polypeptide comprising a polypeptide, a consensus sequence or at least a polypeptide motif as shown in the respective line in column 5 of Table II or in column 8 of Table IV, application no. 3, respectively, and being depicted in the same respective line as said AvinDRAFT_{—}3209, or a functional equivalent or a homolog thereof as depicted in column 8 of Table II, application no. 3, preferably a homolog or functional equivalent as depicted in column 8 of Table II B, application no. 3, and being depicted in the same respective line as said AvinDRAFT_{—}3209, and preferably the activity is increased non-targeted.

[23991] Accordingly, in one embodiment, the molecule which activity is to be increased in the process of the invention is the gene product with an activity as a “transcriptional regulator”, preferably it is the molecule of section (a) or (b) of this paragraph.

[23992] In particular, it was observed that in plants, especially in Arabidopsis thaliana, increasing or generating the activity of a gene product non-targeted with the activity of a “transcriptional regulator”, preferably being encoded by a gene comprising the nucleic acid sequence SEQ ID NO. 29286, preferably the coding region thereof, conferred the production of or the increase in phenylalanine compared with the wild type control.

[23993] The nucleic acid sequence of AvinDRAFT_{—}3253 from Azotobacter vinelandii, e.g. as shown in the respective line in column 5 of Table I, application no. 3, has been published in D. And the activity of the gene product thereof is the activity of oxidoreductase.

[23994] Accordingly, in one embodiment, the process of the present invention for producing aspartate in a non-human organism, like a microorganism or a plant or a part thereof, comprises increasing or generating the activity of a gene product with the activity of a gene product conferring the activity of “oxidoreductase”, especially from Azotobacter vinelandii or its functional equivalent or its homolog, e.g. the increase of
[23995] (a) a gene product of a gene comprising the nucleic acid molecule as shown in the respective line in column 5 of Table I, application no. 3, preferably the coding region thereof, or a homolog or a fragment thereof, and being depicted in the same respective line as said AvinDRAFT_{—}3253, or a functional equivalent or a homolog thereof as shown in column 8 of Table I, application no. 3, preferably the coding region thereof, particularly a homolog or functional equivalent as shown in column 8 of Table I B, application no. 3, and being depicted in the same respective line as said AvinDRAFT_{—}3253, and preferably the activity is increased non-targeted, or
[23996] (b) a polypeptide comprising a polypeptide, a consensus sequence or at least a polypeptide motif as shown in the respective line in column 5 of Table II or in column 8 of Table IV, application no. 3, respectively, and being depicted in the same respective line as said AvinDRAFT_{—}3253, or a functional equivalent or a homolog thereof as depicted in column 8 of Table II, application no. 3, preferably a homolog or functional equivalent as depicted in column 8 of Table II B, application no. 3, and being depicted in the same respective line as said AvinDRAFT_{—}3253, and preferably the activity is increased non-targeted.

[23997] Accordingly, in one embodiment, the molecule which activity is to be increased in the process of the invention is the gene product with an activity as a “oxidoreductase”, preferably it is the molecule of section (a) or (b) of this paragraph.

[23998] In particular, it was observed that in plants, especially in Arabidopsis thaliana, increasing or generating the activity of a gene product non-targeted with the activity of a “oxidoreductase”, preferably being encoded by a gene comprising the nucleic acid sequence SEQ ID NO. 29500, preferably the coding region thereof, conferred the production of or the increase in aspartate compared with the wild type control.

[23999] The nucleic acid sequence of AvinDRAFT_{—}3253 from Azotobacter vinelandii, e.g. as shown in the respective line in column 5 of Table I, application no. 3, has been published in D. And the activity of the gene product thereof is the activity of oxidoreductase.

[24000] Accordingly, in one embodiment, the process of the present invention for producing tyrosine in a non-human organism, like a microorganism or a plant or a part thereof, comprises increasing or generating the activity of a gene product with the activity of a gene product conferring the activity of “oxidoreductase”, especially from Azotobacter vinelandii or its functional equivalent or its homolog, e.g. the increase of
[24001] (a) a gene product of a gene comprising the nucleic acid molecule as shown in the respective line in column 5 of Table I, application no. 3, preferably the coding region thereof, or a homolog or a fragment thereof, and being depicted in the same respective line as said AvinDRAFT_{—}3253, or a functional equivalent or a homolog thereof as shown in column 8 of Table I, application no. 3, preferably the coding region thereof, particularly a homolog or functional equivalent as shown in column 8 of Table I B, application no. 3, and being depicted in the same respective line as said AvinDRAFT_{—}3253, and preferably the activity is increased non-targeted, or
[24002] (b) a polypeptide comprising a polypeptide, a consensus sequence or at least a polypeptide motif as shown in the respective line in column 5 of Table II or in column 8 of Table IV, application no. 3, respectively, and being depicted in the same respective line as said AvinDRAFT_{—}3253, or a functional equivalent or a homolog thereof as depicted in column 8 of Table II, application no. 3, preferably a homolog or functional equivalent as depicted in column 8 of Table II B, application no. 3, and being depicted in the same respective line as said AvinDRAFT_{—}3253, and preferably the activity is increased non-targeted.

[24003] Accordingly, in one embodiment, the molecule which activity is to be increased in the process of the invention is the gene product with an activity as a “oxidoreductase”, preferably it is the molecule of section (a) or (b) of this paragraph.

[24004] In particular, it was observed that in plants, especially in Arabidopsis thaliana, increasing or generating the activity of a gene product non-targeted with the activity of a “oxidoreductase”, preferably being encoded by a gene comprising the nucleic acid sequence SEQ ID NO. 29500, preferably the coding region thereof, conferred the production of or the increase in tyrosine compared with the wild type control.

[24005] The nucleic acid sequence of AvinDRAFT_{—}3556 from Azotobacter vinelandii, e.g. as shown in the respective line in column 5 of Table I, application no. 3, has been published in D. And the activity of the gene product thereof is the activity of lysyl-tRNA synthetase.

[24006] Accordingly, in one embodiment, the process of the present invention for producing citrulline in a non-human organism, like a microorganism or a plant or a part thereof, comprises increasing or generating the activity of a gene product with the activity of a gene product conferring the activity of “lysyl-tRNA synthetase”, especially from Azotobacter vinelandii or its functional equivalent or its homolog, e.g. the increase of
[24007] (a) a gene product of a gene comprising the nucleic acid molecule as shown in the respective line in column 5 of Table I, application no. 3, preferably the coding region thereof, or a homolog or a fragment thereof, and being depicted in the same respective line as said AvinDRAFT_{—}3556, or a functional equivalent or a homolog thereof as shown in column 8 of Table I, application no. 3, preferably the coding region thereof, particularly a homolog or functional equivalent as shown in column 8 of Table I B, application no. 3, and being depicted in the same respective line as said AvinDRAFT_{—}3556, and preferably the activity is increased non-targeted, or
[24008] (b) a polypeptide comprising a polypeptide, a consensus sequence or at least a polypeptide motif as shown in the respective line in column 5 of Table II or in column 8 of Table IV, application no. 3, respectively, and being depicted in the same respective line as said AvinDRAFT_{—}3556, or a functional equivalent or a homolog thereof as depicted in column 8 of Table II, application no. 3, preferably a homolog or functional equivalent as depicted in column 8 of Table II B, application no. 3, and being depicted in the same respective line as said AvinDRAFT_{—}3556, and preferably the activity is increased non-targeted.

[24009] Accordingly, in one embodiment, the molecule which activity is to be increased in the process of the invention is the gene product with an activity as a “lysyl-tRNA synthetase”, preferably it is the molecule of section (a) or (b) of this paragraph.

[24010] In particular, it was observed that in plants, especially in Arabidopsis thaliana, increasing or generating the activity of a gene product non-targeted with the activity of a “lysyl-tRNA synthetase”, preferably being encoded by a gene comprising the nucleic acid sequence SEQ ID NO. 30039, preferably the coding region thereof, conferred the production of or the increase in citrulline compared with the wild type control.

[24011] The nucleic acid sequence of AVINDRAFT_{—}4128 from AZOTOBACTER VINELANDII, e.g. as shown in the respective line in column 5 of Table I, application no. 3, has been published in D. And the activity of the gene product thereof is the activity of ABC transporter component.

[24012] Accordingly, in one embodiment, the process of the present invention for producing asparagine in a non-human organism, like a microorganism or a plant or a part thereof, comprises increasing or generating the activity of a gene product with the activity of a gene product conferring the activity of “ABC transporter component”, especially from AZOTOBACTER VINELANDII or its functional equivalent or its homolog, e.g. the increase of
[24013] (a) a gene product of a gene comprising the nucleic acid molecule as shown in the respective line in column 5 of Table I, application no. 3, preferably the coding region thereof, or a homolog or a fragment thereof, and being depicted in the same respective line as said AVINDRAFT_{—}4128, or a functional equivalent or a homolog thereof as shown in column 8 of Table I, application no. 3, preferably the coding region thereof, particularly a homolog or functional equivalent as shown in column 8 of Table I B, application no. 3, and being depicted in the same respective line as said AVINDRAFT_{—}4128, and preferably the activity is increased non-targeted, or
[24014] (b) a polypeptide comprising a polypeptide, a consensus sequence or at least a polypeptide motif as shown in the respective line in column 5 of Table II or in column 8 of Table IV, application no. 3, respectively, and being depicted in the same respective line as said AVINDRAFT_{—}4128, or a functional equivalent or a homolog thereof as depicted in column 8 of Table II, application no. 3, preferably a homolog or functional equivalent as depicted in column 8 of Table II B, application no. 3, and being depicted in the same respective line as said AVINDRAFT_{—}4128, and preferably the activity is increased non-targeted.

[24015] Accordingly, in one embodiment, the molecule which activity is to be increased in the process of the invention is the gene product with an activity as a “ABC transporter component”, preferably it is the molecule of section (a) or (b) of this paragraph.

[24016] In particular, it was observed that in plants, especially in Arabidopsis thaliana, increasing or generating the activity of a gene product non-targeted with the activity of a “ABC transporter component”, preferably being encoded by a gene comprising the nucleic acid sequence SEQ ID NO. 72520, preferably the coding region thereof, conferred the production of or the increase in asparagine compared with the wild type control.

[24017] The nucleic acid sequence of AvinDRAFT_{—}4384 from Azotobacter vinelandii, e.g. as shown in the respective line in column 5 of Table I, application no. 3, has been published in D. And the activity of the gene product thereof is the activity of glucose-1-phosphate cytidylyltransferase.

[24018] Accordingly, in one embodiment, the process of the present invention for producing aspartate in a non-human organism, like a microorganism or a plant or a part thereof, comprises increasing or generating the activity of a gene product with the activity of a gene product conferring the activity of “glucose-1-phosphate cytidylyltransferase”, especially from Azotobacter vinelandii or its functional equivalent or its homolog, e.g. the increase of
[24019] (a) a gene product of a gene comprising the nucleic acid molecule as shown in the respective line in column 5 of Table I, application no. 3, preferably the coding region thereof, or a homolog or a fragment thereof, and being depicted in the same respective line as said AvinDRAFT_{—}4384, or a functional equivalent or a homolog thereof as shown in column 8 of Table I, application no. 3, preferably the coding region thereof, particularly a homolog or functional equivalent as shown in column 8 of Table I B, application no. 3, and being depicted in the same respective line as said AvinDRAFT_{—}4384, and preferably the activity is increased non-targeted, or
[24020] (b) a polypeptide comprising a polypeptide, a consensus sequence or at least a polypeptide motif as shown in the respective line in column 5 of Table II or in column 8 of Table IV, application no. 3, respectively, and being depicted in the same respective line as said AvinDRAFT_{—}4384, or a functional equivalent or a homolog thereof as depicted in column 8 of Table II, application no. 3, preferably a homolog or functional equivalent as depicted in column 8 of Table II B, application no. 3, and being depicted in the same respective line as said AvinDRAFT_{—}4384, and preferably the activity is increased non-targeted.

[24021] Accordingly, in one embodiment, the molecule which activity is to be increased in the process of the invention is the gene product with an activity as a “glucose-1-phosphate cytidylyltransferase”, preferably it is the molecule of section (a) or (b) of this paragraph.

[24022] In particular, it was observed that in plants, especially in Arabidopsis thaliana, increasing or generating the activity of a gene product non-targeted with the activity of a “glucose-1-phosphate cytidylyltransferase”, preferably being encoded by a gene comprising the nucleic acid sequence SEQ ID NO. 31717, preferably the coding region thereof, conferred the production of or the increase in aspartate compared with the wild type control.

[24023] The nucleic acid sequence of AvinDRAFT_{—}4385 from Azotobacter vinelandii, e.g. as shown in the respective line in column 5 of Table I, application no. 3, has been published in D. And the activity of the gene product thereof is the activity of CDP-glucose-4,6-dehydratase.

[24024] Accordingly, in one embodiment, the process of the present invention for producing glycine in a non-human organism, like a microorganism or a plant or a part thereof, comprises increasing or generating the activity of a gene product with the activity of a gene product conferring the activity of “CDP-glucose-4,6-dehydratase”, especially from Azotobacter vinelandii or its functional equivalent or its homolog, e.g. the increase of
[24025] (a) a gene product of a gene comprising the nucleic acid molecule as shown in the respective line in column 5 of Table I, application no. 3, preferably the coding region thereof, or a homolog or a fragment thereof, and being depicted in the same respective line as said AvinDRAFT_{—}4385, or a functional equivalent or a homolog thereof as shown in column 8 of Table I, application no. 3, preferably the coding region thereof, particularly a homolog or functional equivalent as shown in column 8 of Table I B, application no. 3, and being depicted in the same respective line as said AvinDRAFT_{—}4385, and preferably the activity is increased non-targeted, or
[24026] (b) a polypeptide comprising a polypeptide, a consensus sequence or at least a polypeptide motif as shown in the respective line in column 5 of Table II or in column 8 of Table IV, application no. 3, respectively, and being depicted in the same respective line as said AvinDRAFT_{—}4385, or a functional equivalent or a homolog thereof as depicted in column 8 of Table II, application no. 3, preferably a homolog or functional equivalent as depicted in column 8 of Table II B, application no. 3, and being depicted in the same respective line as said AvinDRAFT_{—}4385, and preferably the activity is increased non-targeted.

[24027] Accordingly, in one embodiment, the molecule which activity is to be increased in the process of the invention is the gene product with an activity as a “CDP-glucose-4,6-dehydratase”, preferably it is the molecule of section (a) or (b) of this paragraph.

[24028] In particular, it was observed that in plants, especially in Arabidopsis thaliana, increasing or generating the activity of a gene product non-targeted with the activity of a “CDP-glucose-4,6-dehydratase”, preferably being encoded by a gene comprising the nucleic acid sequence SEQ ID NO. 72935, preferably the coding region thereof, conferred the production of or the increase in glycine compared with the wild type control.

[24029] The nucleic acid sequence of AvinDRAFT_{—}4420 from Azotobacter vinelandii, e.g. as shown in the respective line in column 5 of Table I, application no. 3, has been published in D. And the activity of the gene product thereof is the activity of enoyl-CoA hydratase.

[24030] Accordingly, in one embodiment, the process of the present invention for producing phenylalanine in a non-human organism, like a microorganism or a plant or a part thereof, comprises increasing or generating the activity of a gene product with the activity of a gene product conferring the activity of “enoyl-CoA hydratase”, especially from Azotobacter vinelandii or its functional equivalent or its homolog, e.g. the increase of
[24031] (a) a gene product of a gene comprising the nucleic acid molecule as shown in the respective line in column 5 of Table I, application no. 3, preferably the coding region thereof, or a homolog or a fragment thereof, and being depicted in the same respective line as said AvinDRAFT_{—}4420, or a functional equivalent or a homolog thereof as shown in column 8 of Table I, application no. 3, preferably the coding region thereof, particularly a homolog or functional equivalent as shown in column 8 of Table I B, application no. 3, and being depicted in the same respective line as said AvinDRAFT_{—}4420, and preferably the activity is increased non-targeted, or
[24032] (b) a polypeptide comprising a polypeptide, a consensus sequence or at least a polypeptide motif as shown in the respective line in column 5 of Table II or in column 8 of Table IV, application no. 3, respectively, and being depicted in the same respective line as said AvinDRAFT_{—}4420, or a functional equivalent or a homolog thereof as depicted in column 8 of Table II, application no. 3, preferably a homolog or functional equivalent as depicted in column 8 of Table II B, application no. 3, and being depicted in the same respective line as said AvinDRAFT_{—}4420, and preferably the activity is increased non-targeted.

[24033] Accordingly, in one embodiment, the molecule which activity is to be increased in the process of the invention is the gene product with an activity as a “enoyl-CoA hydratase”, preferably it is the molecule of section (a) or (b) of this paragraph.

[24034] In particular, it was observed that in plants, especially in Arabidopsis thaliana, increasing or generating the activity of a gene product non-targeted with the activity of a “enoyl-CoA hydratase”, preferably being encoded by a gene comprising the nucleic acid sequence SEQ ID NO. 73038, preferably the coding region thereof, conferred the production of or the increase in phenylalanine compared with the wild type control.

[24035] The nucleic acid sequence of AvinDRAFT_{—}4446 from Azotobacter vinelandii, e.g. as shown in the respective line in column 5 of Table I, application no. 3, has been published in D. And the activity of the gene product thereof is the activity of glutathione peroxidase.

[24036] Accordingly, in one embodiment, the process of the present invention for producing alanine in a non-human organism, like a microorganism or a plant or a part thereof, comprises increasing or generating the activity of a gene product with the activity of a gene product conferring the activity of “glutathione peroxidase”, especially from Azotobacter vinelandii or its functional equivalent or its homolog, e.g. the increase of
[24037] (a) a gene product of a gene comprising the nucleic acid molecule as shown in the respective line in column 5 of Table I, application no. 3, preferably the coding region thereof, or a homolog or a fragment thereof, and being depicted in the same respective line as said AvinDRAFT_{—}4446, or a functional equivalent or a homolog thereof as shown in column 8 of Table I, application no. 3, preferably the coding region thereof, particularly a homolog or functional equivalent as shown in column 8 of Table I B, application no. 3, and being depicted in the same respective line as said AvinDRAFT_{—}4446, and preferably the activity is increased non-targeted, or
[24038] (b) a polypeptide comprising a polypeptide, a consensus sequence or at least a polypeptide motif as shown in the respective line in column 5 of Table II or in column 8 of Table IV, application no. 3, respectively, and being depicted in the same respective line as said AvinDRAFT_{—}4446, or a functional equivalent or a homolog thereof as depicted in column 8 of Table II, application no. 3, preferably a homolog or functional equivalent as depicted in column 8 of Table II B, application no. 3, and being depicted in the same respective line as said AvinDRAFT_{—}4446, and preferably the activity is increased non-targeted.

[24039] Accordingly, in one embodiment, the molecule which activity is to be increased in the process of the invention is the gene product with an activity as a “glutathione peroxidase”, preferably it is the molecule of section (a) or (b) of this paragraph.

[24040] In particular, it was observed that in plants, especially in Arabidopsis thaliana, increasing or generating the activity of a gene product non-targeted with the activity of a “glutathione peroxidase”, preferably being encoded by a gene comprising the nucleic acid sequence SEQ ID NO. 73284, preferably the coding region thereof, conferred the production of or the increase in alanine compared with the wild type control.

[24041] The nucleic acid sequence of AvinDRAFT_{—}4562 from Azotobacter vinelandii, e.g. as shown in the respective line in column 5 of Table I, application no. 3, has been published in D. And the activity of the gene product thereof is the activity of aminotransferase.

[24042] Accordingly, in one embodiment, the process of the present invention for producing asparagine in a non-human organism, like a microorganism or a plant or a part thereof, comprises increasing or generating the activity of a gene product with the activity of a gene product conferring the activity of “aminotransferase”, especially from Azotobacter vinelandii or its functional equivalent or its homolog, e.g. the increase of
[24043] (a) a gene product of a gene comprising the nucleic acid molecule as shown in the respective line in column 5 of Table I, application no. 3, preferably the coding region thereof, or a homolog or a fragment thereof, and being depicted in the same respective line as said AvinDRAFT_{—}4562, or a functional equivalent or a homolog thereof as shown in column 8 of Table I, application no. 3, preferably the coding region thereof, particularly a homolog or functional equivalent as shown in column 8 of Table I B, application no. 3, and being depicted in the same respective line as said AvinDRAFT_{—}4562, and preferably the activity is increased non-targeted, or
[24044] (b) a polypeptide comprising a polypeptide, a consensus sequence or at least a polypeptide motif as shown in the respective line in column 5 of Table II or in column 8 of Table IV, application no. 3, respectively, and being depicted in the same respective line as said AvinDRAFT_{—}4562, or a functional equivalent or a homolog thereof as depicted in column 8 of Table II, application no. 3, preferably a homolog or functional equivalent as depicted in column 8 of Table II B, application no. 3, and being depicted in the same respective line as said AvinDRAFT_{—}4562, and preferably the activity is increased non-targeted.

[24045] Accordingly, in one embodiment, the molecule which activity is to be increased in the process of the invention is the gene product with an activity as a “aminotransferase”, preferably it is the molecule of section (a) or (b) of this paragraph.

[24046] In particular, it was observed that in plants, especially in Arabidopsis thaliana, increasing or generating the activity of a gene product non-targeted with the activity of a “aminotransferase”, preferably being encoded by a gene comprising the nucleic acid sequence SEQ ID NO. 31926, preferably the coding region thereof, conferred the production of or the increase in asparagine compared with the wild type control.

[24047] The nucleic acid sequence of AvinDRAFT_{—}4562 from Azotobacter vinelandii, e.g. as shown in the respective line in column 5 of Table I, application no. 3, has been published in D. And the activity of the gene product thereof is the activity of aminotransferase.

[24048] Accordingly, in one embodiment, the process of the present invention for producing phenylalanine in a non-human organism, like a microorganism or a plant or a part thereof, comprises increasing or generating the activity of a gene product with the activity of a gene product conferring the activity of “aminotransferase”, especially from Azotobacter vinelandii or its functional equivalent or its homolog, e.g. the increase of
[24049] (a) a gene product of a gene comprising the nucleic acid molecule as shown in the respective line in column 5 of Table I, application no. 3, preferably the coding region thereof, or a homolog or a fragment thereof, and being depicted in the same respective line as said AvinDRAFT_{—}4562, or a functional equivalent or a homolog thereof as shown in column 8 of Table I, application no. 3, preferably the coding region thereof, particularly a homolog or functional equivalent as shown in column 8 of Table I B, application no. 3, and being depicted in the same respective line as said AvinDRAFT_{—}4562, and preferably the activity is increased non-targeted, or
[24050] (b) a polypeptide comprising a polypeptide, a consensus sequence or at least a polypeptide motif as shown in the respective line in column 5 of Table II or in column 8 of Table IV, application no. 3, respectively, and being depicted in the same respective line as said AvinDRAFT_{—}4562, or a functional equivalent or a homolog thereof as depicted in column 8 of Table II, application no. 3, preferably a homolog or functional equivalent as depicted in column 8 of Table II B, application no. 3, and being depicted in the same respective line as said AvinDRAFT_{—}4562, and preferably the activity is increased non-targeted.

[24051] Accordingly, in one embodiment, the molecule which activity is to be increased in the process of the invention is the gene product with an activity as a “aminotransferase”, preferably it is the molecule of section (a) or (b) of this paragraph.

[24052] In particular, it was observed that in plants, especially in Arabidopsis thaliana, increasing or generating the activity of a gene product non-targeted with the activity of a “aminotransferase”, preferably being encoded by a gene comprising the nucleic acid sequence SEQ ID NO. 31926, preferably the coding region thereof, conferred the production of or the increase in phenylalanine compared with the wild type control.

[24053] The nucleic acid sequence of AvinDRAFT_{—}4606 from Azotobacter vinelandii, e.g. as shown in the respective line in column 5 of Table I, application no. 3, has been published in D. And the activity of the gene product thereof is the activity of NADH-quinone oxidoreductase subunit.

[24054] Accordingly, in one embodiment, the process of the present invention for producing tyrosine in a non-human organism, like a microorganism or a plant or a part thereof, comprises increasing or generating the activity of a gene product with the activity of a gene product conferring the activity of “NADH-quinone oxidoreductase subunit”, especially from Azotobacter vinelandii or its functional equivalent or its homolog, e.g. the increase of
[24055] (a) a gene product of a gene comprising the nucleic acid molecule as shown in the respective line in column 5 of Table I, application no. 3, preferably the coding region thereof, or a homolog or a fragment thereof, and being depicted in the same respective line as said AvinDRAFT_{—}4606, or a functional equivalent or a homolog thereof as shown in column 8 of Table I, application no. 3, preferably the coding region thereof, particularly a homolog or functional equivalent as shown in column 8 of Table I B, application no. 3, and being depicted in the same respective line as said AvinDRAFT_{—}4606, and preferably the activity is increased non-targeted, or
[24056] (b) a polypeptide comprising a polypeptide, a consensus sequence or at least a polypeptide motif as shown in the respective line in column 5 of Table II or in column 8 of Table IV, application no. 3, respectively, and being depicted in the same respective line as said AvinDRAFT_{—}4606, or a functional equivalent or a homolog thereof as depicted in column 8 of Table II, application no. 3, preferably a homolog or functional equivalent as depicted in column 8 of Table II B, application no. 3, and being depicted in the same respective line as said AvinDRAFT_{—}4606, and preferably the activity is increased non-targeted.

[24057] Accordingly, in one embodiment, the molecule which activity is to be increased in the process of the invention is the gene product with an activity as a “NADH-quinone oxidoreductase subunit”, preferably it is the molecule of section (a) or (b) of this paragraph.

[24058] In particular, it was observed that in plants, especially in Arabidopsis thaliana, increasing or generating the activity of a gene product non-targeted with the activity of a “NADH-quinone oxidoreductase subunit”, preferably being encoded by a gene comprising the nucleic acid sequence SEQ ID NO. 73719, preferably the coding region thereof, conferred the production of or the increase in tyrosine compared with the wild type control.

[24059] The nucleic acid sequence of AvinDRAFT_{—}4836 from Azotobacter vinelandii, e.g. as shown in the respective line in column 5 of Table I, application no. 3, has been published in D. And the activity of the gene product thereof is the activity of glutamate-ammonia-ligase.

[24060] Accordingly, in one embodiment, the process of the present invention for producing phenylalanine in a non-human organism, like a microorganism or a plant or a part thereof, comprises increasing or generating the activity of a gene product with the activity of a gene product conferring the activity of “glutamate-ammonia-ligase”, especially from Azotobacter vinelandii or its functional equivalent or its homolog, e.g. the increase of
[24061] (a) a gene product of a gene comprising the nucleic acid molecule as shown in the respective line in column 5 of Table I, application no. 3, preferably the coding region thereof, or a homolog or a fragment thereof, and being depicted in the same respective line as said AvinDRAFT_{—}4836, or a functional equivalent or a homolog thereof as shown in column 8 of Table I, application no. 3, preferably the coding region thereof, particularly a homolog or functional equivalent as shown in column 8 of Table I B, application no. 3, and being depicted in the same respective line as said AvinDRAFT_{—}4836, and preferably the activity is increased non-targeted, or
[24062] (b) a polypeptide comprising a polypeptide, a consensus sequence or at least a polypeptide motif as shown in the respective line in column 5 of Table II or in column 8 of Table IV, application no. 3, respectively, and being depicted in the same respective line as said AvinDRAFT_{—}4836, or a functional equivalent or a homolog thereof as depicted in column 8 of Table II, application no. 3, preferably a homolog or functional equivalent as depicted in column 8 of Table II B, application no. 3, and being depicted in the same respective line as said AvinDRAFT_{—}4836, and preferably the activity is increased non-targeted.

[24063] Accordingly, in one embodiment, the molecule which activity is to be increased in the process of the invention is the gene product with an activity as a “glutamate-ammonia-ligase”, preferably it is the molecule of section (a) or (b) of this paragraph.

[24064] In particular, it was observed that in plants, especially in Arabidopsis thaliana, increasing or generating the activity of a gene product non-targeted with the activity of a “glutamate-ammonia-ligase”, preferably being encoded by a gene comprising the nucleic acid sequence SEQ ID NO. 74163, preferably the coding region thereof, conferred the production of or the increase in phenylalanine compared with the wild type control.

[24065] The nucleic acid sequence of AvinDRAFT_{—}4836 from Azotobacter vinelandii, e.g. as shown in the respective line in column 5 of Table I, application no. 3, has been published in D. And the activity of the gene product thereof is the activity of glutamate-ammonia-ligase.

[24066] Accordingly, in one embodiment, the process of the present invention for producing tyrosine in a non-human organism, like a microorganism or a plant or a part thereof, comprises increasing or generating the activity of a gene product with the activity of a gene product conferring the activity of “glutamate-ammonia-ligase”, especially from Azotobacter vinelandii or its functional equivalent or its homolog, e.g. the increase of
[24067] (a) a gene product of a gene comprising the nucleic acid molecule as shown in the respective line in column 5 of Table I, application no. 3, preferably the coding region thereof, or a homolog or a fragment thereof, and being depicted in the same respective line as said AvinDRAFT_{—}4836, or a functional equivalent or a homolog thereof as shown in column 8 of Table I, application no. 3, preferably the coding region thereof, particularly a homolog or functional equivalent as shown in column 8 of Table I B, application no. 3, and being depicted in the same respective line as said AvinDRAFT_{—}4836, and preferably the activity is increased non-targeted, or
[24068] (b) a polypeptide comprising a polypeptide, a consensus sequence or at least a polypeptide motif as shown in the respective line in column 5 of Table II or in column 8 of Table IV, application no. 3, respectively, and being depicted in the same respective line as said AvinDRAFT_{—}4836, or a functional equivalent or a homolog thereof as depicted in column 8 of Table II, application no. 3, preferably a homolog or functional equivalent as depicted in column 8 of Table II B, application no. 3, and being depicted in the same respective line as said AvinDRAFT_{—}4836, and preferably the activity is increased non-targeted.

[24069] Accordingly, in one embodiment, the molecule which activity is to be increased in the process of the invention is the gene product with an activity as a “glutamate-ammonia-ligase”, preferably it is the molecule of section (a) or (b) of this paragraph.

[24070] In particular, it was observed that in plants, especially in Arabidopsis thaliana, increasing or generating the activity of a gene product non-targeted with the activity of a “glutamate-ammonia-ligase”, preferably being encoded by a gene comprising the nucleic acid sequence SEQ ID NO. 74163, preferably the coding region thereof, conferred the production of or the increase in tyrosine compared with the wild type control.

[24071] The nucleic acid sequence of AvinDRAFT_{—}4989 from Azotobacter vinelandii, e.g. as shown in the respective line in column 5 of Table I, application no. 3, has been published in D. And the activity of the gene product thereof is the activity of RNA polymerase sigma factor.

[24072] Accordingly, in one embodiment, the process of the present invention for producing 5-oxoproline in a non-human organism, like a microorganism or a plant or a part thereof, comprises increasing or generating the activity of a gene product with the activity of a gene product conferring the activity of “RNA polymerase sigma factor”, especially from Azotobacter vinelandii or its functional equivalent or its homolog, e.g. the increase of
[24073] (a) a gene product of a gene comprising the nucleic acid molecule as shown in the respective line in column 5 of Table I, application no. 3, preferably the coding region thereof, or a homolog or a fragment thereof, and being depicted in the same respective line as said AvinDRAFT_{—}4989, or a functional equivalent or a homolog thereof as shown in column 8 of Table I, application no. 3, preferably the coding region thereof, particularly a homolog or functional equivalent as shown in column 8 of Table I B, application no. 3, and being depicted in the same respective line as said AvinDRAFT_{—}4989, and preferably the activity is increased non-targeted, or
[24074] (b) a polypeptide comprising a polypeptide, a consensus sequence or at least a polypeptide motif as shown in the respective line in column 5 of Table II or in column 8 of Table IV, application no. 3, respectively, and being depicted in the same respective line as said AvinDRAFT_{—}4989, or a functional equivalent or a homolog thereof as depicted in column 8 of Table II, application no. 3, preferably a homolog or functional equivalent as depicted in column 8 of Table II B, application no. 3, and being depicted in the same respective line as said AvinDRAFT_{—}4989, and preferably the activity is increased non-targeted.

[24075] Accordingly, in one embodiment, the molecule which activity is to be increased in the process of the invention is the gene product with an activity as a “RNA polymerase sigma factor”, preferably it is the molecule of section (a) or (b) of this paragraph.

[24076] In particular, it was observed that in plants, especially in Arabidopsis thaliana, increasing or generating the activity of a gene product non-targeted with the activity of a “RNA polymerase sigma factor”, preferably being encoded by a gene comprising the nucleic acid sequence SEQ ID NO. 74452, preferably the coding region thereof, conferred the production of or the increase in 5-oxoproline compared with the wild type control.

[24077] The nucleic acid sequence of AvinDRAFT_{—}5103 from Azotobacter vinelandii, e.g. as shown in the respective line in column 5 of Table I, application no. 3, has been published in D. And the activity of the gene product thereof is the activity of hydrolase.

[24078] Accordingly, in one embodiment, the process of the present invention for producing phenylalanine in a non-human organism, like a microorganism or a plant or a part thereof, comprises increasing or generating the activity of a gene product with the activity of a gene product conferring the activity of “hydrolase”, especially from Azotobacter vinelandii or its functional equivalent or its homolog, e.g. the increase of
[24079] (a) a gene product of a gene comprising the nucleic acid molecule as shown in the respective line in column 5 of Table I, application no. 3, preferably the coding region thereof, or a homolog or a fragment thereof, and being depicted in the same respective line as said AvinDRAFT_{—}5103, or a functional equivalent or a homolog thereof as shown in column 8 of Table I, application no. 3, preferably the coding region thereof, particularly a homolog or functional equivalent as shown in column 8 of Table I B, application no. 3, and being depicted in the same respective line as said AvinDRAFT_{—}5103, and preferably the activity is increased non-targeted, or
[24080] (b) a polypeptide comprising a polypeptide, a consensus sequence or at least a polypeptide motif as shown in the respective line in column 5 of Table II or in column 8 of Table IV, application no. 3, respectively, and being depicted in the same respective line as said AvinDRAFT_{—}5103, or a functional equivalent or a homolog thereof as depicted in column 8 of Table II, application no. 3, preferably a homolog or functional equivalent as depicted in column 8 of Table II B, application no. 3, and being depicted in the same respective line as said AvinDRAFT_{—}5103, and preferably the activity is increased non-targeted.

[24081] Accordingly, in one embodiment, the molecule which activity is to be increased in the process of the invention is the gene product with an activity as a “hydrolase”, preferably it is the molecule of section (a) or (b) of this paragraph.

[24082] In particular, it was observed that in plants, especially in Arabidopsis thaliana, increasing or generating the activity of a gene product non-targeted with the activity of a “hydrolase”, preferably being encoded by a gene comprising the nucleic acid sequence SEQ ID NO. 6510, preferably the coding region thereof, conferred the production of or the increase in phenylalanine compared with the wild type control.

[24083] The nucleic acid sequence of AvinDRAFT_{—}5103 from Azotobacter vinelandii, e.g. as shown in the respective line in column 5 of Table I, application no. 3, has been published in D. And the activity of the gene product thereof is the activity of hydrolase.

[24084] Accordingly, in one embodiment, the process of the present invention for producing tyrosine in a non-human organism, like a microorganism or a plant or a part thereof, comprises increasing or generating the activity of a gene product with the activity of a gene product conferring the activity of “hydrolase”, especially from Azotobacter vinelandii or its functional equivalent or its homolog, e.g. the increase of
[24085] (a) a gene product of a gene comprising the nucleic acid molecule as shown in the respective line in column 5 of Table I, application no. 3, preferably the coding region thereof, or a homolog or a fragment thereof, and being depicted in the same respective line as said AvinDRAFT_{—}5103, or a functional equivalent or a homolog thereof as shown in column 8 of Table I, application no. 3, preferably the coding region thereof, particularly a homolog or functional equivalent as shown in column 8 of Table I B, application no. 3, and being depicted in the same respective line as said AvinDRAFT_{—}5103, and preferably the activity is increased non-targeted, or
[24086] (b) a polypeptide comprising a polypeptide, a consensus sequence or at least a polypeptide motif as shown in the respective line in column 5 of Table II or in column 8 of Table IV, application no. 3, respectively, and being depicted in the same respective line as said AvinDRAFT_{—}5103, or a functional equivalent or a homolog thereof as depicted in column 8 of Table II, application no. 3, preferably a homolog or functional equivalent as depicted in column 8 of Table II B, application no. 3, and being depicted in the same respective line as said AvinDRAFT_{—}5103, and preferably the activity is increased non-targeted.

[24087] Accordingly, in one embodiment, the molecule which activity is to be increased in the process of the invention is the gene product with an activity as a “hydrolase”, preferably it is the molecule of section (a) or (b) of this paragraph.

[24088] In particular, it was observed that in plants, especially in Arabidopsis thaliana, increasing or generating the activity of a gene product non-targeted with the activity of a “hydrolase”, preferably being encoded by a gene comprising the nucleic acid sequence SEQ ID NO. 6510, preferably the coding region thereof, conferred the production of or the increase in tyrosine compared with the wild type control.

[24089] The nucleic acid sequence of AvinDRAFT_{—}5103 from Azotobacter vinelandii, e.g. as shown in the respective line in column 5 of Table I, application no. 3, has been published in D. And the activity of the gene product thereof is the activity of hydrolase.

[24090] Accordingly, in one embodiment, the process of the present invention for producing 5-oxoproline in a non-human organism, like a microorganism or a plant or a part thereof, comprises increasing or generating the activity of a gene product with the activity of a gene product conferring the activity of “hydrolase”, especially from Azotobacter vinelandii or its functional equivalent or its homolog, e.g. the increase of
[24091] (a) a gene product of a gene comprising the nucleic acid molecule as shown in the respective line in column 5 of Table I, application no. 3, preferably the coding region thereof, or a homolog or a fragment thereof, and being depicted in the same respective line as said AvinDRAFT_{—}5103, or a functional equivalent or a homolog thereof as shown in column 8 of Table I, application no. 3, preferably the coding region thereof, particularly a homolog or functional equivalent as shown in column 8 of Table I B, application no. 3, and being depicted in the same respective line as said AvinDRAFT_{—}5103, and preferably the activity is increased non-targeted, or
[24092] (b) a polypeptide comprising a polypeptide, a consensus sequence or at least a polypeptide motif as shown in the respective line in column 5 of Table II or in column 8 of Table IV, application no. 3, respectively, and being depicted in the same respective line as said AvinDRAFT_{—}5103, or a functional equivalent or a homolog thereof as depicted in column 8 of Table II, application no. 3, preferably a homolog or functional equivalent as depicted in column 8 of Table II B, application no. 3, and being depicted in the same respective line as said AvinDRAFT_{—}5103, and preferably the activity is increased non-targeted.

[24093] Accordingly, in one embodiment, the molecule which activity is to be increased in the process of the invention is the gene product with an activity as a “hydrolase”, preferably it is the molecule of section (a) or (b) of this paragraph.

[24094] In particular, it was observed that in plants, especially in Arabidopsis thaliana, increasing or generating the activity of a gene product non-targeted with the activity of a “hydrolase”, preferably being encoded by a gene comprising the nucleic acid sequence SEQ ID NO. 6510, preferably the coding region thereof, conferred the production of or the increase in 5-oxoproline compared with the wild type control.

[24095] The nucleic acid sequence of AvinDRAFT_{—}5246 from Azotobacter vinelandii, e.g. as shown in the respective line in column 5 of Table I, application no. 3, has been published in D. And the activity of the gene product thereof is the activity of glutamate-ammonia-ligase.

[24096] Accordingly, in one embodiment, the process of the present invention for producing aspartate in a non-human organism, like a microorganism or a plant or a part thereof, comprises increasing or generating the activity of a gene product with the activity of a gene product conferring the activity of “glutamate-ammonia-ligase”, especially from Azotobacter vinelandii or its functional equivalent or its homolog, e.g. the increase of
[24097] (a) a gene product of a gene comprising the nucleic acid molecule as shown in the respective line in column 5 of Table I, application no. 3, preferably the coding region thereof, or a homolog or a fragment thereof, and being depicted in the same respective line as said AvinDRAFT_{—}5246, or a functional equivalent or a homolog thereof as shown in column 8 of Table I, application no. 3, preferably the coding region thereof, particularly a homolog or functional equivalent as shown in column 8 of Table I B, application no. 3, and being depicted in the same respective line as said AvinDRAFT_{—}5246, and preferably the activity is increased non-targeted, or
[24098] (b) a polypeptide comprising a polypeptide, a consensus sequence or at least a polypeptide motif as shown in the respective line in column 5 of Table II or in column 8 of Table IV, application no. 3, respectively, and being depicted in the same respective line as said AvinDRAFT_{—}5246, or a functional equivalent or a homolog thereof as depicted in column 8 of Table II, application no. 3, preferably a homolog or functional equivalent as depicted in column 8 of Table II B, application no. 3, and being depicted in the same respective line as said AvinDRAFT_{—}5246, and preferably the activity is increased non-targeted.

[24099] Accordingly, in one embodiment, the molecule which activity is to be increased in the process of the invention is the gene product with an activity as a “glutamate-ammonia-ligase”, preferably it is the molecule of section (a) or (b) of this paragraph.

[24100] In particular, it was observed that in plants, especially in Arabidopsis thaliana, increasing or generating the activity of a gene product non-targeted with the activity of a “glutamate-ammonia-ligase”, preferably being encoded by a gene comprising the nucleic acid sequence SEQ ID NO. 32037, preferably the coding region thereof, conferred the production of or the increase in aspartate compared with the wild type control.

[24101] The nucleic acid sequence of AvinDRAFT_{—}5246 from Azotobacter vinelandii, e.g. as shown in the respective line in column 5 of Table I, application no. 3, has been published in D. And the activity of the gene product thereof is the activity of glutamate-ammonia-ligase.

[24102] Accordingly, in one embodiment, the process of the present invention for producing serine in a non-human organism, like a microorganism or a plant or a part thereof, comprises increasing or generating the activity of a gene product with the activity of a gene product conferring the activity of “glutamate-ammonia-ligase”, especially from Azotobacter vinelandii or its functional equivalent or its homolog, e.g. the increase of
[24103] (a) a gene product of a gene comprising the nucleic acid molecule as shown in the respective line in column 5 of Table I, application no. 3, preferably the coding region thereof, or a homolog or a fragment thereof, and being depicted in the same respective line as said AvinDRAFT_{—}5246, or a functional equivalent or a homolog thereof as shown in column 8 of Table I, application no. 3, preferably the coding region thereof, particularly a homolog or functional equivalent as shown in column 8 of Table I B, application no. 3, and being depicted in the same respective line as said AvinDRAFT_{—}5246, and preferably the activity is increased non-targeted, or
[24104] (b) a polypeptide comprising a polypeptide, a consensus sequence or at least a polypeptide motif as shown in the respective line in column 5 of Table II or in column 8 of Table IV, application no. 3, respectively, and being depicted in the same respective line as said AvinDRAFT_{—}5246, or a functional equivalent or a homolog thereof as depicted in column 8 of Table II, application no. 3, preferably a homolog or functional equivalent as depicted in column 8 of Table II B, application no. 3, and being depicted in the same respective line as said AvinDRAFT_{—}5246, and preferably the activity is increased non-targeted.

[24105] Accordingly, in one embodiment, the molecule which activity is to be increased in the process of the invention is the gene product with an activity as a “glutamate-ammonia-ligase”, preferably it is the molecule of section (a) or (b) of this paragraph.

[24106] In particular, it was observed that in plants, especially in Arabidopsis thaliana, increasing or generating the activity of a gene product non-targeted with the activity of a “glutamate-ammonia-ligase”, preferably being encoded by a gene comprising the nucleic acid sequence SEQ ID NO. 32037, preferably the coding region thereof, conferred the production of or the increase in serine compared with the wild type control.

[24107] The nucleic acid sequence of AvinDRAFT_{—}5246 from Azotobacter vinelandii, e.g. as shown in the respective line in column 5 of Table I, application no. 3, has been published in D. And the activity of the gene product thereof is the activity of glutamate-ammonia-ligase.

[24108] Accordingly, in one embodiment, the process of the present invention for producing tyrosine in a non-human organism, like a microorganism or a plant or a part thereof, comprises increasing or generating the activity of a gene product with the activity of a gene product conferring the activity of “glutamate-ammonia-ligase”, especially from Azotobacter vinelandii or its functional equivalent or its homolog, e.g. the increase of
[24109] (a) a gene product of a gene comprising the nucleic acid molecule as shown in the respective line in column 5 of Table I, application no. 3, preferably the coding region thereof, or a homolog or a fragment thereof, and being depicted in the same respective line as said AvinDRAFT_{—}5246, or a functional equivalent or a homolog thereof as shown in column 8 of Table I, application no. 3, preferably the coding region thereof, particularly a homolog or functional equivalent as shown in column 8 of Table I B, application no. 3, and being depicted in the same respective line as said AvinDRAFT_{—}5246, and preferably the activity is increased non-targeted, or
[24110] (b) a polypeptide comprising a polypeptide, a consensus sequence or at least a polypeptide motif as shown in the respective line in column 5 of Table II or in column 8 of Table IV, application no. 3, respectively, and being depicted in the same respective line as said AvinDRAFT_{—}5246, or a functional equivalent or a homolog thereof as depicted in column 8 of Table II, application no. 3, preferably a homolog or functional equivalent as depicted in column 8 of Table II B, application no. 3, and being depicted in the same respective line as said AvinDRAFT_{—}5246, and preferably the activity is increased non-targeted.

[24111] Accordingly, in one embodiment, the molecule which activity is to be increased in the process of the invention is the gene product with an activity as a “glutamate-ammonia-ligase”, preferably it is the molecule of section (a) or (b) of this paragraph.

[24112] In particular, it was observed that in plants, especially in Arabidopsis thaliana, increasing or generating the activity of a gene product non-targeted with the activity of a “glutamate-ammonia-ligase”, preferably being encoded by a gene comprising the nucleic acid sequence SEQ ID NO. 32037, preferably the coding region thereof, conferred the production of or the increase in tyrosine compared with the wild type control.

[24113] The nucleic acid sequence of AvinDRAFT_{—}5292 from Azotobacter vinelandii, e.g. as shown in the respective line in column 5 of Table I, application no. 3, has been published in D. And the activity of the gene product thereof is the activity of fumarylacetoacetate hydrolase.

[24114] Accordingly, in one embodiment, the process of the present invention for producing phenylalanine in a non-human organism, like a microorganism or a plant or a part thereof, comprises increasing or generating the activity of a gene product with the activity of a gene product conferring the activity of “fumarylacetoacetate hydrolase”, especially from Azotobacter vinelandii or its functional equivalent or its homolog, e.g. the increase of
[24115] (a) a gene product of a gene comprising the nucleic acid molecule as shown in the respective line in column 5 of Table I, application no. 3, preferably the coding region thereof, or a homolog or a fragment thereof, and being depicted in the same respective line as said AvinDRAFT_{—}5292, or a functional equivalent or a homolog thereof as shown in column 8 of Table I, application no. 3, preferably the coding region thereof, particularly a homolog or functional equivalent as shown in column 8 of Table I B, application no. 3, and being depicted in the same respective line as said AvinDRAFT_{—}5292, and preferably the activity is increased non-targeted, or
[24116] (b) a polypeptide comprising a polypeptide, a consensus sequence or at least a polypeptide motif as shown in the respective line in column 5 of Table II or in column 8 of Table IV, application no. 3, respectively, and being depicted in the same respective line as said AvinDRAFT_{—}5292, or a functional equivalent or a homolog thereof as depicted in column 8 of Table II, application no. 3, preferably a homolog or functional equivalent as depicted in column 8 of Table II B, application no. 3, and being depicted in the same respective line as said AvinDRAFT_{—}5292, and preferably the activity is increased non-targeted.

[24117] Accordingly, in one embodiment, the molecule which activity is to be increased in the process of the invention is the gene product with an activity as a “fumarylacetoacetate hydrolase”, preferably it is the molecule of section (a) or (b) of this paragraph.

[24118] In particular, it was observed that in plants, especially in Arabidopsis thaliana, increasing or generating the activity of a gene product non-targeted with the activity of a “fumarylacetoacetate hydrolase”, preferably being encoded by a gene comprising the nucleic acid sequence SEQ ID NO. 32308, preferably the coding region thereof, conferred the production of or the increase in phenylalanine compared with the wild type control.

[24119] The nucleic acid sequence of AvinDRAFT_{—}5292 from Azotobacter vinelandii, e.g. as shown in the respective line in column 5 of Table I, application no. 3, has been published in D. And the activity of the gene product thereof is the activity of fumarylacetoacetate hydrolase.

[24120] Accordingly, in one embodiment, the process of the present invention for producing tyrosine in a non-human organism, like a microorganism or a plant or a part thereof, comprises increasing or generating the activity of a gene product with the activity of a gene product conferring the activity of “fumarylacetoacetate hydrolase”, especially from Azotobacter vinelandii or its functional equivalent or its homolog, e.g. the increase of
[24121] (a) a gene product of a gene comprising the nucleic acid molecule as shown in the respective line in column 5 of Table I, application no. 3, preferably the coding region thereof, or a homolog or a fragment thereof, and being depicted in the same respective line as said AvinDRAFT_{—}5292, or a functional equivalent or a homolog thereof as shown in column 8 of Table I, application no. 3, preferably the coding region thereof, particularly a homolog or functional equivalent as shown in column 8 of Table I B, application no. 3, and being depicted in the same respective line as said AvinDRAFT_{—}5292, and preferably the activity is increased non-targeted, or
[24122] (b) a polypeptide comprising a polypeptide, a consensus sequence or at least a polypeptide motif as shown in the respective line in column 5 of Table II or in column 8 of Table IV, application no. 3, respectively, and being depicted in the same respective line as said AvinDRAFT_{—}5292, or a functional equivalent or a homolog thereof as depicted in column 8 of Table II, application no. 3, preferably a homolog or functional equivalent as depicted in column 8 of Table II B, application no. 3, and being depicted in the same respective line as said AvinDRAFT_{—}5292, and preferably the activity is increased non-targeted.

[24123] Accordingly, in one embodiment, the molecule which activity is to be increased in the process of the invention is the gene product with an activity as a “fumarylacetoacetate hydrolase”, preferably it is the molecule of section (a) or (b) of this paragraph.

[24124] In particular, it was observed that in plants, especially in Arabidopsis thaliana, increasing or generating the activity of a gene product non-targeted with the activity of a “fumarylacetoacetate hydrolase”, preferably being encoded by a gene comprising the nucleic acid sequence SEQ ID NO. 32308, preferably the coding region thereof, conferred the production of or the increase in tyrosine compared with the wild type control.

[24125] The nucleic acid sequence of AvinDRAFT_{—}5467 from Azotobacter vinelandii, e.g. as shown in the respective line in column 5 of Table I, application no. 3, has been published in D. And the activity of the gene product thereof is the activity of HesB/YadR/YfhF family protein.

[24126] Accordingly, in one embodiment, the process of the present invention for producing serine in a non-human organism, like a microorganism or a plant or a part thereof, comprises increasing or generating the activity of a gene product with the activity of a gene product conferring the activity of “HesB/YadR/YfhF family protein”, especially from Azotobacter vinelandii or its functional equivalent or its homolog, e.g. the increase of
[24127] (a) a gene product of a gene comprising the nucleic acid molecule as shown in the respective line in column 5 of Table I, application no. 3, preferably the coding region thereof, or a homolog or a fragment thereof, and being depicted in the same respective line as said AvinDRAFT_{—}5467, or a functional equivalent or a homolog thereof as shown in column 8 of Table I, application no. 3, preferably the coding region thereof, particularly a homolog or functional equivalent as shown in column 8 of Table I B, application no. 3, and being depicted in the same respective line as said AvinDRAFT_{—}5467, and preferably the activity is increased non-targeted, or
[24128] (b) a polypeptide comprising a polypeptide, a consensus sequence or at least a polypeptide motif as shown in the respective line in column 5 of Table II or in column 8 of Table IV, application no. 3, respectively, and being depicted in the same respective line as said AvinDRAFT_{—}5467, or a functional equivalent or a homolog thereof as depicted in column 8 of Table II, application no. 3, preferably a homolog or functional equivalent as depicted in column 8 of Table II B, application no. 3, and being depicted in the same respective line as said AvinDRAFT_{—}5467, and preferably the activity is increased non-targeted.

[24129] Accordingly, in one embodiment, the molecule which activity is to be increased in the process of the invention is the gene product with an activity as a “HesB/YadR/YfhF family protein”, preferably it is the molecule of section (a) or (b) of this paragraph.

[24130] In particular, it was observed that in plants, especially in Arabidopsis thaliana, increasing or generating the activity of a gene product non-targeted with the activity of a “HesB/YadR/YfhF family protein”, preferably being encoded by a gene comprising the nucleic acid sequence SEQ ID NO. 32648, preferably the coding region thereof, conferred the production of or the increase in serine compared with the wild type control.

[24131] The nucleic acid sequence of AvinDRAFT_{—}5579 from Azotobacter vinelandii, e.g. as shown in the respective line in column 5 of Table I, application no. 3, has been published in D. And the activity of the gene product thereof is the activity of peptidase.

[24132] Accordingly, in one embodiment, the process of the present invention for producing aspartate in a non-human organism, like a microorganism or a plant or a part thereof, comprises increasing or generating the activity of a gene product with the activity of a gene product conferring the activity of “peptidase”, especially from Azotobacter vinelandii or its functional equivalent or its homolog, e.g. the increase of
[24133] (a) a gene product of a gene comprising the nucleic acid molecule as shown in the respective line in column 5 of Table I, application no. 3, preferably the coding region thereof, or a homolog or a fragment thereof, and being depicted in the same respective line as said AvinDRAFT_{—}5579, or a functional equivalent or a homolog thereof as shown in column 8 of Table I, application no. 3, preferably the coding region thereof, particularly a homolog or functional equivalent as shown in column 8 of Table I B, application no. 3, and being depicted in the same respective line as said AvinDRAFT_{—}5579, and preferably the activity is increased non-targeted, or
[24134] (b) a polypeptide comprising a polypeptide, a consensus sequence or at least a polypeptide motif as shown in the respective line in column 5 of Table II or in column 8 of Table IV, application no. 3, respectively, and being depicted in the same respective line as said AvinDRAFT_{—}5579, or a functional equivalent or a homolog thereof as depicted in column 8 of Table II, application no. 3, preferably a homolog or functional equivalent as depicted in column 8 of Table II B, application no. 3, and being depicted in the same respective line as said AvinDRAFT_{—}5579, and preferably the activity is increased non-targeted.

[24135] Accordingly, in one embodiment, the molecule which activity is to be increased in the process of the invention is the gene product with an activity as a “peptidase”, preferably it is the molecule of section (a) or (b) of this paragraph.

[24136] In particular, it was observed that in plants, especially in Arabidopsis thaliana, increasing or generating the activity of a gene product non-targeted with the activity of a “peptidase”, preferably being encoded by a gene comprising the nucleic acid sequence SEQ ID NO. 74662, preferably the coding region thereof, conferred the production of or the increase in aspartate compared with the wild type control.

[24137] The nucleic acid sequence of AvinDRAFT_{—}5644 from Azotobacter vinelandii, e.g. as shown in the respective line in column 5 of Table I, application no. 3, has been published in D. And the activity of the gene product thereof is the activity of L-aspartate oxidase.

[24138] Accordingly, in one embodiment, the process of the present invention for producing aspartate in a non-human organism, like a microorganism or a plant or a part thereof, comprises increasing or generating the activity of a gene product with the activity of a gene product conferring the activity of “L-aspartate oxidase”, especially from Azotobacter vinelandii or its functional equivalent or its homolog, e.g. the increase of
[24139] (a) a gene product of a gene comprising the nucleic acid molecule as shown in the respective line in column 5 of Table I, application no. 3, preferably the coding region thereof, or a homolog or a fragment thereof, and being depicted in the same respective line as said AvinDRAFT_{—}5644, or a functional equivalent or a homolog thereof as shown in column 8 of Table I, application no. 3, preferably the coding region thereof, particularly a homolog or functional equivalent as shown in column 8 of Table I B, application no. 3, and being depicted in the same respective line as said AvinDRAFT_{—}5644, and preferably the activity is increased non-targeted, or
[24140] (b) a polypeptide comprising a polypeptide, a consensus sequence or at least a polypeptide motif as shown in the respective line in column 5 of Table II or in column 8 of Table IV, application no. 3, respectively, and being depicted in the same respective line as said AvinDRAFT_{—}5644, or a functional equivalent or a homolog thereof as depicted in column 8 of Table II, application no. 3, preferably a homolog or functional equivalent as depicted in column 8 of Table II B, application no. 3, and being depicted in the same respective line as said AvinDRAFT_{—}5644, and preferably the activity is increased non-targeted.

[24141] Accordingly, in one embodiment, the molecule which activity is to be increased in the process of the invention is the gene product with an activity as a “L-aspartate oxidase”, preferably it is the molecule of section (a) or (b) of this paragraph.

[24142] In particular, it was observed that in plants, especially in Arabidopsis thaliana, increasing or generating the activity of a gene product non-targeted with the activity of a “L-aspartate oxidase”, preferably being encoded by a gene comprising the nucleic acid sequence SEQ ID NO. 33085, preferably the coding region thereof, conferred the production of or the increase in aspartate compared with the wild type control.

[24143] The nucleic acid sequence of AvinDRAFT_{—}6093 from Azotobacter vinelandii, e.g. as shown in the respective line in column 5 of Table I, application no. 3, has been published in D. And the activity of the gene product thereof is the activity of Chaperone protein CIpB.

[24144] Accordingly, in one embodiment, the process of the present invention for producing phenylalanine in a non-human organism, like a microorganism or a plant or a part thereof, comprises increasing or generating the activity of a gene product with the activity of a gene product conferring the activity of “Chaperone protein CIpB”, especially from Azotobacter vinelandii or its functional equivalent or its homolog, e.g. the increase of
[24145] (a) a gene product of a gene comprising the nucleic acid molecule as shown in the respective line in column 5 of Table I, application no. 3, preferably the coding region thereof, or a homolog or a fragment thereof, and being depicted in the same respective line as said AvinDRAFT_{—}6093, or a functional equivalent or a homolog thereof as shown in column 8 of Table I, application no. 3, preferably the coding region thereof, particularly a homolog or functional equivalent as shown in column 8 of Table I B, application no. 3, and being depicted in the same respective line as said AvinDRAFT_{—}6093, and preferably the activity is increased non-targeted, or
[24146] (b) a polypeptide comprising a polypeptide, a consensus sequence or at least a polypeptide motif as shown in the respective line in column 5 of Table II or in column 8 of Table IV, application no. 3, respectively, and being depicted in the same respective line as said AvinDRAFT_{—}6093, or a functional equivalent or a homolog thereof as depicted in column 8 of Table II, application no. 3, preferably a homolog or functional equivalent as depicted in column 8 of Table II B, application no. 3, and being depicted in the same respective line as said AvinDRAFT_{—}6093, and preferably the activity is increased non-targeted.

[24147] Accordingly, in one embodiment, the molecule which activity is to be increased in the process of the invention is the gene product with an activity as a “Chaperone protein CIpB”, preferably it is the molecule of section (a) or (b) of this paragraph.

[24148] In particular, it was observed that in plants, especially in Arabidopsis thaliana, increasing or generating the activity of a gene product non-targeted with the activity of a “Chaperone protein CIpB”, preferably being encoded by a gene comprising the nucleic acid sequence SEQ ID NO. 33596, preferably the coding region thereof, conferred the production of or the increase in phenylalanine compared with the wild type control.

[24149] The nucleic acid sequence of AvinDRAFT_{—}6679 from Azotobacter vinelandii, e.g. as shown in the respective line in column 5 of Table I, application no. 3, has been published in D. And the activity of the gene product thereof is the activity of electron transfer flavoprotein subunit beta.

[24150] Accordingly, in one embodiment, the process of the present invention for producing phenylalanine in a non-human organism, like a microorganism or a plant or a part thereof, comprises increasing or generating the activity of a gene product with the activity of a gene product conferring the activity of “electron transfer flavoprotein subunit beta”, especially from Azotobacter vinelandii or its functional equivalent or its homolog, e.g. the increase of
[24151] (a) a gene product of a gene comprising the nucleic acid molecule as shown in the respective line in column 5 of Table I, application no. 3, preferably the coding region thereof, or a homolog or a fragment thereof, and being depicted in the same respective line as said AvinDRAFT_{—}6679, or a functional equivalent or a homolog thereof as shown in column 8 of Table I, application no. 3, preferably the coding region thereof, particularly a homolog or functional equivalent as shown in column 8 of Table I B, application no. 3, and being depicted in the same respective line as said AvinDRAFT_{—}6679, and preferably the activity is increased non-targeted, or
[24152] (b) a polypeptide comprising a polypeptide, a consensus sequence or at least a polypeptide motif as shown in the respective line in column 5 of Table II or in column 8 of Table IV, application no. 3, respectively, and being depicted in the same respective line as said AvinDRAFT_{—}6679, or a functional equivalent or a homolog thereof as depicted in column 8 of Table II, application no. 3, preferably a homolog or functional equivalent as depicted in column 8 of Table II B, application no. 3, and being depicted in the same respective line as said AvinDRAFT_{—}6679, and preferably the activity is increased non-targeted.

[24153] Accordingly, in one embodiment, the molecule which activity is to be increased in the process of the invention is the gene product with an activity as a “electron transfer flavoprotein subunit beta”, preferably it is the molecule of section (a) or (b) of this paragraph.

[24154] In particular, it was observed that in plants, especially in Arabidopsis thaliana, increasing or generating the activity of a gene product non-targeted with the activity of a “electron transfer flavoprotein subunit beta”, preferably being encoded by a gene comprising the nucleic acid sequence SEQ ID NO. 74729, preferably the coding region thereof, conferred the production of or the increase in phenylalanine compared with the wild type control.

[24155] The nucleic acid sequence of AvinDRAFT_{—}6679 from Azotobacter vinelandii, e.g. as shown in the respective line in column 5 of Table I, application no. 3, has been published in D. And the activity of the gene product thereof is the activity of electron transfer flavoprotein subunit beta.

[24156] Accordingly, in one embodiment, the process of the present invention for producing tyrosine in a non-human organism, like a microorganism or a plant or a part thereof, comprises increasing or generating the activity of a gene product with the activity of a gene product conferring the activity of “electron transfer flavoprotein subunit beta”, especially from Azotobacter vinelandii or its functional equivalent or its homolog, e.g. the increase of
[24157] (a) a gene product of a gene comprising the nucleic acid molecule as shown in the respective line in column 5 of Table I, application no. 3, preferably the coding region thereof, or a homolog or a fragment thereof, and being depicted in the same respective line as said AvinDRAFT_{—}6679, or a functional equivalent or a homolog thereof as shown in column 8 of Table I, application no. 3, preferably the coding region thereof, particularly a homolog or functional equivalent as shown in column 8 of Table I B, application no. 3, and being depicted in the same respective line as said AvinDRAFT_{—}6679, and preferably the activity is increased non-targeted, or
[24158] (b) a polypeptide comprising a polypeptide, a consensus sequence or at least a polypeptide motif as shown in the respective line in column 5 of Table II or in column 8 of Table IV, application no. 3, respectively, and being depicted in the same respective line as said AvinDRAFT_{—}6679, or a functional equivalent or a homolog thereof as depicted in column 8 of Table II, application no. 3, preferably a homolog or functional equivalent as depicted in column 8 of Table II B, application no. 3, and being depicted in the same respective line as said AvinDRAFT_{—}6679, and preferably the activity is increased non-targeted.

[24159] Accordingly, in one embodiment, the molecule which activity is to be increased in the process of the invention is the gene product with an activity as a “electron transfer flavoprotein subunit beta”, preferably it is the molecule of section (a) or (b) of this paragraph.

[24160] In particular, it was observed that in plants, especially in Arabidopsis thaliana, increasing or generating the activity of a gene product non-targeted with the activity of a “electron transfer flavoprotein subunit beta”, preferably being encoded by a gene comprising the nucleic acid sequence SEQ ID NO. 74729, preferably the coding region thereof, conferred the production of or the increase in tyrosine compared with the wild type control.

[24161] The nucleic acid sequence of AX653549 from Oryza sativa, e.g. as shown in the respective line in column 5 of Table I, application no. 3, has been published in G. And the activity of the gene product thereof is the activity of AX653549-protein.

[24162] Accordingly, in one embodiment, the process of the present invention for producing citrulline in a non-human organism, like a microorganism or a plant or a part thereof, comprises increasing or generating the activity of a gene product with the activity of a gene product conferring the activity of “AX653549-protein”, especially from Oryza sativa or its functional equivalent or its homolog, e.g. the increase of
[24163] (a) a gene product of a gene comprising the nucleic acid molecule as shown in the respective line in column 5 of Table I, application no. 3, preferably the coding region thereof, or a homolog or a fragment thereof, and being depicted in the same respective line as said AX653549, or a functional equivalent or a homolog thereof as shown in column 8 of Table I, application no. 3, preferably the coding region thereof, particularly a homolog or functional equivalent as shown in column 8 of Table I B, application no. 3, and being depicted in the same respective line as said AX653549, and preferably the activity is increased non-targeted, or
[24164] (b) a polypeptide comprising a polypeptide, a consensus sequence or at least a polypeptide motif as shown in the respective line in column 5 of Table II or in column 8 of Table IV, application no. 3, respectively, and being depicted in the same respective line as said AX653549, or a functional equivalent or a homolog thereof as depicted in column 8 of Table II, application no. 3, preferably a homolog or functional equivalent as depicted in column 8 of Table II B, application no. 3, and being depicted in the same respective line as said AX653549, and preferably the activity is increased non-targeted.

[24165] Accordingly, in one embodiment, the molecule which activity is to be increased in the process of the invention is the gene product with an activity as a “AX653549-protein”, preferably it is the molecule of section (a) or (b) of this paragraph.

[24166] In particular, it was observed that in plants, especially in Arabidopsis thaliana, increasing or generating the activity of a gene product non-targeted with the activity of a “AX653549-protein”, preferably being encoded by a gene comprising the nucleic acid sequence SEQ ID NO. 34301, preferably the coding region thereof, conferred the production of or the increase in citrulline compared with the wild type control.

[24167] The nucleic acid sequence of AX653549 from Oryza sativa, e.g. as shown in the respective line in column 5 of Table I, application no. 3, has been published in G. And the activity of the gene product thereof is the activity of AX653549-protein.

[24168] Accordingly, in one embodiment, the process of the present invention for producing 5-oxoproline in a non-human organism, like a microorganism or a plant or a part thereof, comprises increasing or generating the activity of a gene product with the activity of a gene product conferring the activity of “AX653549-protein”, especially from Oryza sativa or its functional equivalent or its homolog, e.g. the increase of
[24169] (a) a gene product of a gene comprising the nucleic acid molecule as shown in the respective line in column 5 of Table I, application no. 3, preferably the coding region thereof, or a homolog or a fragment thereof, and being depicted in the same respective line as said AX653549, or a functional equivalent or a homolog thereof as shown in column 8 of Table I, application no. 3, preferably the coding region thereof, particularly a homolog or functional equivalent as shown in column 8 of Table I B, application no. 3, and being depicted in the same respective line as said AX653549, and preferably the activity is increased non-targeted, or
[24170] (b) a polypeptide comprising a polypeptide, a consensus sequence or at least a polypeptide motif as shown in the respective line in column 5 of Table II or in column 8 of Table IV, application no. 3, respectively, and being depicted in the same respective line as said AX653549, or a functional equivalent or a homolog thereof as depicted in column 8 of Table II, application no. 3, preferably a homolog or functional equivalent as depicted in column 8 of Table II B, application no. 3, and being depicted in the same respective line as said AX653549, and preferably the activity is increased non-targeted.

[24171] Accordingly, in one embodiment, the molecule which activity is to be increased in the process of the invention is the gene product with an activity as a “AX653549-protein”, preferably it is the molecule of section (a) or (b) of this paragraph.

[24172] In particular, it was observed that in plants, especially in Arabidopsis thaliana, increasing or generating the activity of a gene product non-targeted with the activity of a “AX653549-protein”, preferably being encoded by a gene comprising the nucleic acid sequence SEQ ID NO. 34301, preferably the coding region thereof, conferred the production of or the increase in 5-oxoproline compared with the wild type control.

[24173] The nucleic acid sequence of AY087308 from Arabidopsis thaliana, e.g. as shown in the respective line in column 5 of Table I, application no. 3, has been published in F. And the activity of the gene product thereof is the activity of AY087308-protein.

[24174] Accordingly, in one embodiment, the process of the present invention for producing aspartate in a non-human organism, like a microorganism or a plant or a part thereof, comprises increasing or generating the activity of a gene product with the activity of a gene product conferring the activity of “AY087308-protein”, especially from Arabidopsis thaliana or its functional equivalent or its homolog, e.g. the increase of
[24175] (a) a gene product of a gene comprising the nucleic acid molecule as shown in the respective line in column 5 of Table I, application no. 3, preferably the coding region thereof, or a homolog or a fragment thereof, and being depicted in the same respective line as said AY087308, or a functional equivalent or a homolog thereof as shown in column 8 of Table I, application no. 3, preferably the coding region thereof, particularly a homolog or functional equivalent as shown in column 8 of Table I B, application no. 3, and being depicted in the same respective line as said AY087308, and preferably the activity is increased non-targeted, or
[24176] (b) a polypeptide comprising a polypeptide, a consensus sequence or at least a polypeptide motif as shown in the respective line in column 5 of Table II or in column 8 of Table IV, application no. 3, respectively, and being depicted in the same respective line as said AY087308, or a functional equivalent or a homolog thereof as depicted in column 8 of Table II, application no. 3, preferably a homolog or functional equivalent as depicted in column 8 of Table II B, application no. 3, and being depicted in the same respective line as said AY087308, and preferably the activity is increased non-targeted.

[24177] Accordingly, in one embodiment, the molecule which activity is to be increased in the process of the invention is the gene product with an activity as a “AY087308-protein”, preferably it is the molecule of section (a) or (b) of this paragraph.

[24178] In particular, it was observed that in plants, especially in Arabidopsis thaliana, increasing or generating the activity of a gene product non-targeted with the activity of a “AY087308-protein”, preferably being encoded by a gene comprising the nucleic acid sequence SEQ ID NO. 34602, preferably the coding region thereof, conferred the production of or the increase in aspartate compared with the wild type control.

[24179] The nucleic acid sequence of AY087308 from Arabidopsis thaliana, e.g. as shown in the respective line in column 5 of Table I, application no. 3, has been published in F. And the activity of the gene product thereof is the activity of AY087308-protein.

[24180] Accordingly, in one embodiment, the process of the present invention for producing 5-oxoproline in a non-human organism, like a microorganism or a plant or a part thereof, comprises increasing or generating the activity of a gene product with the activity of a gene product conferring the activity of “AY087308-protein”, especially from Arabidopsis thaliana or its functional equivalent or its homolog, e.g. the increase of
[24181] (a) a gene product of a gene comprising the nucleic acid molecule as shown in the respective line in column 5 of Table I, application no. 3, preferably the coding region thereof, or a homolog or a fragment thereof, and being depicted in the same respective line as said AY087308, or a functional equivalent or a homolog thereof as shown in column 8 of Table I, application no. 3, preferably the coding region thereof, particularly a homolog or functional equivalent as shown in column 8 of Table I B, application no. 3, and being depicted in the same respective line as said AY087308, and preferably the activity is increased non-targeted, or
[24182] (b) a polypeptide comprising a polypeptide, a consensus sequence or at least a polypeptide motif as shown in the respective line in column 5 of Table II or in column 8 of Table IV, application no. 3, respectively, and being depicted in the same respective line as said AY087308, or a functional equivalent or a homolog thereof as depicted in column 8 of Table II, application no. 3, preferably a homolog or functional equivalent as depicted in column 8 of Table II B, application no. 3, and being depicted in the same respective line as said AY087308, and preferably the activity is increased non-targeted.

[24183] Accordingly, in one embodiment, the molecule which activity is to be increased in the process of the invention is the gene product with an activity as a “AY087308-protein”, preferably it is the molecule of section (a) or (b) of this paragraph.

[24184] In particular, it was observed that in plants, especially in Arabidopsis thaliana, increasing or generating the activity of a gene product non-targeted with the activity of a “AY087308-protein”, preferably being encoded by a gene comprising the nucleic acid sequence SEQ ID NO. 34602, preferably the coding region thereof, conferred the production of or the increase in 5-oxoproline compared with the wild type control.

[24185] The nucleic acid sequence of B0004 from Escherichia coli, e.g. as shown in the respective line in column 5 of Table I, application no. 3, has been published in B. And the activity of the gene product thereof is the activity of threonine synthase.

[24186] Accordingly, in one embodiment, the process of the present invention for producing alanine in a non-human organism, like a microorganism or a plant or a part thereof, comprises increasing or generating the activity of a gene product with the activity of a gene product conferring the activity of “threonine synthase”, especially from Escherichia coli or its functional equivalent or its homolog, e.g. the increase of
[24187] (a) a gene product of a gene comprising the nucleic acid molecule as shown in the respective line in column 5 of Table I, application no. 3, preferably the coding region thereof, or a homolog or a fragment thereof, and being depicted in the same respective line as said B0004, or a functional equivalent or a homolog thereof as shown in column 8 of Table I, application no. 3, preferably the coding region thereof, particularly a homolog or functional equivalent as shown in column 8 of Table I B, application no. 3, and being depicted in the same respective line as said B0004, and preferably the activity is increased plastidic, or
[24188] (b) a polypeptide comprising a polypeptide, a consensus sequence or at least a polypeptide motif as shown in the respective line in column 5 of Table II or in column 8 of Table IV, application no. 3, respectively, and being depicted in the same respective line as said B0004, or a functional equivalent or a homolog thereof as depicted in column 8 of Table II, application no. 3, preferably a homolog or functional equivalent as depicted in column 8 of Table II B, application no. 3, and being depicted in the same respective line as said B0004, and preferably the activity is increased plastidic.

[24189] Accordingly, in one embodiment, the molecule which activity is to be increased in the process of the invention is the gene product with an activity as a “threonine synthase”, preferably it is the molecule of section (a) or (b) of this paragraph.

[24190] In particular, it was observed that in plants, especially in Arabidopsis thaliana, increasing or generating the activity of a gene product plastidic with the activity of a “threonine synthase”, preferably being encoded by a gene comprising the nucleic acid sequence SEQ ID NO. 34889, preferably the coding region thereof, conferred the production of or the increase in alanine compared with the wild type control.

[24191] The nucleic acid sequence of B0004 from Escherichia coli, e.g. as shown in the respective line in column 5 of Table I, application no. 3, has been published in B. And the activity of the gene product thereof is the activity of threonine synthase.

[24192] Accordingly, in one embodiment, the process of the present invention for producing phenylalanine in a non-human organism, like a microorganism or a plant or a part thereof, comprises increasing or generating the activity of a gene product with the activity of a gene product conferring the activity of “threonine synthase”, especially from Escherichia coli or its functional equivalent or its homolog, e.g. the increase of
[24193] (a) a gene product of a gene comprising the nucleic acid molecule as shown in the respective line in column 5 of Table I, application no. 3, preferably the coding region thereof, or a homolog or a fragment thereof, and being depicted in the same respective line as said B0004, or a functional equivalent or a homolog thereof as shown in column 8 of Table I, application no. 3, preferably the coding region thereof, particularly a homolog or functional equivalent as shown in column 8 of Table I B, application no. 3, and being depicted in the same respective line as said B0004, and preferably the activity is increased plastidic, or
[24194] (b) a polypeptide comprising a polypeptide, a consensus sequence or at least a polypeptide motif as shown in the respective line in column 5 of Table II or in column 8 of Table IV, application no. 3, respectively, and being depicted in the same respective line as said B0004, or a functional equivalent or a homolog thereof as depicted in column 8 of Table II, application no. 3, preferably a homolog or functional equivalent as depicted in column 8 of Table II B, application no. 3, and being depicted in the same respective line as said B0004, and preferably the activity is increased plastidic.

[24195] Accordingly, in one embodiment, the molecule which activity is to be increased in the process of the invention is the gene product with an activity as a “threonine synthase”, preferably it is the molecule of section (a) or (b) of this paragraph.

[24196] In particular, it was observed that in plants, especially in Arabidopsis thaliana, increasing or generating the activity of a gene product plastidic with the activity of a “threonine synthase”, preferably being encoded by a gene comprising the nucleic acid sequence SEQ ID NO. 34889, preferably the coding region thereof, conferred the production of or the increase in phenylalanine compared with the wild type control.

[24197] The nucleic acid sequence of B0004 from Escherichia coli, e.g. as shown in the respective line in column 5 of Table I, application no. 3, has been published in B. And the activity of the gene product thereof is the activity of threonine synthase.

[24198] Accordingly, in one embodiment, the process of the present invention for producing serine in a non-human organism, like a microorganism or a plant or a part thereof, comprises increasing or generating the activity of a gene product with the activity of a gene product conferring the activity of “threonine synthase”, especially from Escherichia coli or its functional equivalent or its homolog, e.g. the increase of
[24199] (a) a gene product of a gene comprising the nucleic acid molecule as shown in the respective line in column 5 of Table I, application no. 3, preferably the coding region thereof, or a homolog or a fragment thereof, and being depicted in the same respective line as said B0004, or a functional equivalent or a homolog thereof as shown in column 8 of Table I, application no. 3, preferably the coding region thereof, particularly a homolog or functional equivalent as shown in column 8 of Table I B, application no. 3, and being depicted in the same respective line as said B0004, and preferably the activity is increased plastidic, or
[24200] (b) a polypeptide comprising a polypeptide, a consensus sequence or at least a polypeptide motif as shown in the respective line in column 5 of Table II or in column 8 of Table IV, application no. 3, respectively, and being depicted in the same respective line as said B0004, or a functional equivalent or a homolog thereof as depicted in column 8 of Table II, application no. 3, preferably a homolog or functional equivalent as depicted in column 8 of Table II B, application no. 3, and being depicted in the same respective line as said B0004, and preferably the activity is increased plastidic.

[24201] Accordingly, in one embodiment, the molecule which activity is to be increased in the process of the invention is the gene product with an activity as a “threonine synthase”, preferably it is the molecule of section (a) or (b) of this paragraph.

[24202] In particular, it was observed that in plants, especially in Arabidopsis thaliana, increasing or generating the activity of a gene product plastidic with the activity of a “threonine synthase”, preferably being encoded by a gene comprising the nucleic acid sequence SEQ ID NO. 34889, preferably the coding region thereof, conferred the production of or the increase in serine compared with the wild type control.

[24203] The nucleic acid sequence of B0004 from Escherichia coli, e.g. as shown in the respective line in column 5 of Table I, application no. 3, has been published in B. And the activity of the gene product thereof is the activity of threonine synthase.

[24204] Accordingly, in one embodiment, the process of the present invention for producing tyrosine in a non-human organism, like a microorganism or a plant or a part thereof, comprises increasing or generating the activity of a gene product with the activity of a gene product conferring the activity of “threonine synthase”, especially from Escherichia coli or its functional equivalent or its homolog, e.g. the increase of
[24205] (a) a gene product of a gene comprising the nucleic acid molecule as shown in the respective line in column 5 of Table I, application no. 3, preferably the coding region thereof, or a homolog or a fragment thereof, and being depicted in the same respective line as said B0004, or a functional equivalent or a homolog thereof as shown in column 8 of Table I, application no. 3, preferably the coding region thereof, particularly a homolog or functional equivalent as shown in column 8 of Table I B, application no. 3, and being depicted in the same respective line as said B0004, and preferably the activity is increased plastidic, or
[24206] (b) a polypeptide comprising a polypeptide, a consensus sequence or at least a polypeptide motif as shown in the respective line in column 5 of Table II or in column 8 of Table IV, application no. 3, respectively, and being depicted in the same respective line as said B0004, or a functional equivalent or a homolog thereof as depicted in column 8 of Table II, application no. 3, preferably a homolog or functional equivalent as depicted in column 8 of Table II B, application no. 3, and being depicted in the same respective line as said B0004, and preferably the activity is increased plastidic.

[24207] Accordingly, in one embodiment, the molecule which activity is to be increased in the process of the invention is the gene product with an activity as a “threonine synthase”, preferably it is the molecule of section (a) or (b) of this paragraph.

[24208] In particular, it was observed that in plants, especially in Arabidopsis thaliana, increasing or generating the activity of a gene product plastidic with the activity of a “threonine synthase”, preferably being encoded by a gene comprising the nucleic acid sequence SEQ ID NO. 34889, preferably the coding region thereof, conferred the production of or the increase in tyrosine compared with the wild type control.

[24209] The nucleic acid sequence of B0004 from Escherichia coli, e.g. as shown in the respective line in column 5 of Table I, application no. 3, has been published in B. And the activity of the gene product thereof is the activity of threonine synthase.

[24210] Accordingly, in one embodiment, the process of the present invention for producing 5-oxoproline in a non-human organism, like a microorganism or a plant or a part thereof, comprises increasing or generating the activity of a gene product with the activity of a gene product conferring the activity of “threonine synthase”, especially from Escherichia coli or its functional equivalent or its homolog, e.g. the increase of
[24211] (a) a gene product of a gene comprising the nucleic acid molecule as shown in the respective line in column 5 of Table I, application no. 3, preferably the coding region thereof, or a homolog or a fragment thereof, and being depicted in the same respective line as said B0004, or a functional equivalent or a homolog thereof as shown in column 8 of Table I, application no. 3, preferably the coding region thereof, particularly a homolog or functional equivalent as shown in column 8 of Table I B, application no. 3, and being depicted in the same respective line as said B0004, and preferably the activity is increased plastidic, or
[24212] (b) a polypeptide comprising a polypeptide, a consensus sequence or at least a polypeptide motif as shown in the respective line in column 5 of Table II or in column 8 of Table IV, application no. 3, respectively, and being depicted in the same respective line as said B0004, or a functional equivalent or a homolog thereof as depicted in column 8 of Table II, application no. 3, preferably a homolog or functional equivalent as depicted in column 8 of Table II B, application no. 3, and being depicted in the same respective line as said B0004, and preferably the activity is increased plastidic.

[24213] Accordingly, in one embodiment, the molecule which activity is to be increased in the process of the invention is the gene product with an activity as a “threonine synthase”, preferably it is the molecule of section (a) or (b) of this paragraph.

[24214] In particular, it was observed that in plants, especially in Arabidopsis thaliana, increasing or generating the activity of a gene product plastidic with the activity of a “threonine synthase”, preferably being encoded by a gene comprising the nucleic acid sequence SEQ ID NO. 34889, preferably the coding region thereof, conferred the production of or the increase in 5-oxoproline compared with the wild type control.

[24215] The nucleic acid sequence of B0078 from Escherichia coli, e.g. as shown in the respective line in column 5 of Table I, application no. 3, has been published in B. And the activity of the gene product thereof is the activity of acetolactate synthase small subunit.

[24216] Accordingly, in one embodiment, the process of the present invention for producing phenylalanine in a non-human organism, like a microorganism or a plant or a part thereof, comprises increasing or generating the activity of a gene product with the activity of a gene product conferring the activity of “acetolactate synthase small subunit”, especially from Escherichia coli or its functional equivalent or its homolog, e.g. the increase of
[24217] (a) a gene product of a gene comprising the nucleic acid molecule as shown in the respective line in column 5 of Table I, application no. 3, preferably the coding region thereof, or a homolog or a fragment thereof, and being depicted in the same respective line as said B0078, or a functional equivalent or a homolog thereof as shown in column 8 of Table I, application no. 3, preferably the coding region thereof, particularly a homolog or functional equivalent as shown in column 8 of Table I B, application no. 3, and being depicted in the same respective line as said B0078, and preferably the activity is increased non-targeted, or
[24218] (b) a polypeptide comprising a polypeptide, a consensus sequence or at least a polypeptide motif as shown in the respective line in column 5 of Table II or in column 8 of Table IV, application no. 3, respectively, and being depicted in the same respective line as said B0078, or a functional equivalent or a homolog thereof as depicted in column 8 of Table II, application no. 3, preferably a homolog or functional equivalent as depicted in column 8 of Table II B, application no. 3, and being depicted in the same respective line as said B0078, and preferably the activity is increased non-targeted.

[24219] Accordingly, in one embodiment, the molecule which activity is to be increased in the process of the invention is the gene product with an activity as a “acetolactate synthase small subunit”, preferably it is the molecule of section (a) or (b) of this paragraph.

[24220] In particular, it was observed that in plants, especially in Arabidopsis thaliana, increasing or generating the activity of a gene product non-targeted with the activity of a “acetolactate synthase small subunit”, preferably being encoded by a gene comprising the nucleic acid sequence SEQ ID NO. 6818, preferably the coding region thereof, conferred the production of or the increase in phenylalanine compared with the wild type control.

[24221] The nucleic acid sequence of B0124 from Escherichia coli, e.g. as shown in the respective line in column 5 of Table I, application no. 3, has been published in B. And the activity of the gene product thereof is the activity of glucose dehydrogenase.

[24222] Accordingly, in one embodiment, the process of the present invention for producing glycine in a non-human organism, like a microorganism or a plant or a part thereof, comprises increasing or generating the activity of a gene product with the activity of a gene product conferring the activity of “glucose dehydrogenase”, especially from Escherichia coli or its functional equivalent or its homolog, e.g. the increase of
[24223] (a) a gene product of a gene comprising the nucleic acid molecule as shown in the respective line in column 5 of Table I, application no. 3, preferably the coding region thereof, or a homolog or a fragment thereof, and being depicted in the same respective line as said B0124, or a functional equivalent or a homolog thereof as shown in column 8 of Table I, application no. 3, preferably the coding region thereof, particularly a homolog or functional equivalent as shown in column 8 of Table I B, application no. 3, and being depicted in the same respective line as said B0124, and preferably the activity is increased non-targeted, or
[24224] (b) a polypeptide comprising a polypeptide, a consensus sequence or at least a polypeptide motif as shown in the respective line in column 5 of Table II or in column 8 of Table IV, application no. 3, respectively, and being depicted in the same respective line as said B0124, or a functional equivalent or a homolog thereof as depicted in column 8 of Table II, application no. 3, preferably a homolog or functional equivalent as depicted in column 8 of Table II B, application no. 3, and being depicted in the same respective line as said B0124, and preferably the activity is increased non-targeted.

[24225] Accordingly, in one embodiment, the molecule which activity is to be increased in the process of the invention is the gene product with an activity as a “glucose dehydrogenase”, preferably it is the molecule of section (a) or (b) of this paragraph.

[24226] In particular, it was observed that in plants, especially in Arabidopsis thaliana, increasing or generating the activity of a gene product non-targeted with the activity of a “glucose dehydrogenase”, preferably being encoded by a gene comprising the nucleic acid sequence SEQ ID NO. 35482, preferably the coding region thereof, conferred the production of or the increase in glycine compared with the wild type control.

[24227] The nucleic acid sequence of B0124 from Escherichia coli, e.g. as shown in the respective line in column 5 of Table I, application no. 3, has been published in B. And the activity of the gene product thereof is the activity of glucose dehydrogenase.

[24228] Accordingly, in one embodiment, the process of the present invention for producing phenylalanine in a non-human organism, like a microorganism or a plant or a part thereof, comprises increasing or generating the activity of a gene product with the activity of a gene product conferring the activity of “glucose dehydrogenase”, especially from Escherichia coli or its functional equivalent or its homolog, e.g. the increase of
[24229] (a) a gene product of a gene comprising the nucleic acid molecule as shown in the respective line in column 5 of Table I, application no. 3, preferably the coding region thereof, or a homolog or a fragment thereof, and being depicted in the same respective line as said B0124, or a functional equivalent or a homolog thereof as shown in column 8 of Table I, application no. 3, preferably the coding region thereof, particularly a homolog or functional equivalent as shown in column 8 of Table I B, application no. 3, and being depicted in the same respective line as said B0124, and preferably the activity is increased non-targeted, or
[24230] (b) a polypeptide comprising a polypeptide, a consensus sequence or at least a polypeptide motif as shown in the respective line in column 5 of Table II or in column 8 of Table IV, application no. 3, respectively, and being depicted in the same respective line as said B0124, or a functional equivalent or a homolog thereof as depicted in column 8 of Table II, application no. 3, preferably a homolog or functional equivalent as depicted in column 8 of Table II B, application no. 3, and being depicted in the same respective line as said B0124, and preferably the activity is increased non-targeted.

[24231] Accordingly, in one embodiment, the molecule which activity is to be increased in the process of the invention is the gene product with an activity as a “glucose dehydrogenase”, preferably it is the molecule of section (a) or (b) of this paragraph.

[24232] In particular, it was observed that in plants, especially in Arabidopsis thaliana, increasing or generating the activity of a gene product non-targeted with the activity of a “glucose dehydrogenase”, preferably being encoded by a gene comprising the nucleic acid sequence SEQ ID NO. 35482, preferably the coding region thereof, conferred the production of or the increase in phenylalanine compared with the wild type control.

[24233] The nucleic acid sequence of B0124 from Escherichia coli, e.g. as shown in the respective line in column 5 of Table I, application no. 3, has been published in B. And the activity of the gene product thereof is the activity of glucose dehydrogenase.

[24234] Accordingly, in one embodiment, the process of the present invention for producing serine in a non-human organism, like a microorganism or a plant or a part thereof, comprises increasing or generating the activity of a gene product with the activity of a gene product conferring the activity of “glucose dehydrogenase”, especially from Escherichia coli or its functional equivalent or its homolog, e.g. the increase of
[24235] (a) a gene product of a gene comprising the nucleic acid molecule as shown in the respective line in column 5 of Table I, application no. 3, preferably the coding region thereof, or a homolog or a fragment thereof, and being depicted in the same respective line as said B0124, or a functional equivalent or a homolog thereof as shown in column 8 of Table I, application no. 3, preferably the coding region thereof, particularly a homolog or functional equivalent as shown in column 8 of Table I B, application no. 3, and being depicted in the same respective line as said B0124, and preferably the activity is increased non-targeted, or
[24236] (b) a polypeptide comprising a polypeptide, a consensus sequence or at least a polypeptide motif as shown in the respective line in column 5 of Table II or in column 8 of Table IV, application no. 3, respectively, and being depicted in the same respective line as said B0124, or a functional equivalent or a homolog thereof as depicted in column 8 of Table II, application no. 3, preferably a homolog or functional equivalent as depicted in column 8 of Table II B, application no. 3, and being depicted in the same respective line as said B0124, and preferably the activity is increased non-targeted.

[24237] Accordingly, in one embodiment, the molecule which activity is to be increased in the process of the invention is the gene product with an activity as a “glucose dehydrogenase”, preferably it is the molecule of section (a) or (b) of this paragraph.

[24238] In particular, it was observed that in plants, especially in Arabidopsis thaliana, increasing or generating the activity of a gene product non-targeted with the activity of a “glucose dehydrogenase”, preferably being encoded by a gene comprising the nucleic acid sequence SEQ ID NO. 35482, preferably the coding region thereof, conferred the production of or the increase in serine compared with the wild type control.

[24239] The nucleic acid sequence of B0124 from Escherichia coli, e.g. as shown in the respective line in column 5 of Table I, application no. 3, has been published in B. And the activity of the gene product thereof is the activity of glucose dehydrogenase.

[24240] Accordingly, in one embodiment, the process of the present invention for producing tyrosine in a non-human organism, like a microorganism or a plant or a part thereof, comprises increasing or generating the activity of a gene product with the activity of a gene product conferring the activity of “glucose dehydrogenase”, especially from Escherichia coli or its functional equivalent or its homolog, e.g. the increase of
[24241] (a) a gene product of a gene comprising the nucleic acid molecule as shown in the respective line in column 5 of Table I, application no. 3, preferably the coding region thereof, or a homolog or a fragment thereof, and being depicted in the same respective line as said B0124, or a functional equivalent or a homolog thereof as shown in column 8 of Table I, application no. 3, preferably the coding region thereof, particularly a homolog or functional equivalent as shown in column 8 of Table I B, application no. 3, and being depicted in the same respective line as said B0124, and preferably the activity is increased non-targeted, or
[24242] (b) a polypeptide comprising a polypeptide, a consensus sequence or at least a polypeptide motif as shown in the respective line in column 5 of Table II or in column 8 of Table IV, application no. 3, respectively, and being depicted in the same respective line as said B0124, or a functional equivalent or a homolog thereof as depicted in column 8 of Table II, application no. 3, preferably a homolog or functional equivalent as depicted in column 8 of Table II B, application no. 3, and being depicted in the same respective line as said B0124, and preferably the activity is increased non-targeted.

[24243] Accordingly, in one embodiment, the molecule which activity is to be increased in the process of the invention is the gene product with an activity as a “glucose dehydrogenase”, preferably it is the molecule of section (a) or (b) of this paragraph.

[24244] In particular, it was observed that in plants, especially in Arabidopsis thaliana, increasing or generating the activity of a gene product non-targeted with the activity of a “glucose dehydrogenase”, preferably being encoded by a gene comprising the nucleic acid sequence SEQ ID NO. 35482, preferably the coding region thereof, conferred the production of or the increase in tyrosine compared with the wild type control.

[24245] The nucleic acid sequence of B0131 from Escherichia coli, e.g. as shown in the respective line in column 5 of Table I, application no. 3, has been published in B. And the activity of the gene product thereof is the activity of aspartate 1-decarboxylase.

[24246] Accordingly, in one embodiment, the process of the present invention for producing asparagine in a non-human organism, like a microorganism or a plant or a part thereof, comprises increasing or generating the activity of a gene product with the activity of a gene product conferring the activity of “aspartate 1-decarboxylase”, especially from Escherichia coli or its functional equivalent or its homolog, e.g. the increase of
[24247] (a) a gene product of a gene comprising the nucleic acid molecule as shown in the respective line in column 5 of Table I, application no. 3, preferably the coding region thereof, or a homolog or a fragment thereof, and being depicted in the same respective line as said B0131, or a functional equivalent or a homolog thereof as shown in column 8 of Table I, application no. 3, preferably the coding region thereof, particularly a homolog or functional equivalent as shown in column 8 of Table I B, application no. 3, and being depicted in the same respective line as said B0131, and preferably the activity is increased non-targeted, or
[24248] (b) a polypeptide comprising a polypeptide, a consensus sequence or at least a polypeptide motif as shown in the respective line in column 5 of Table II or in column 8 of Table IV, application no. 3, respectively, and being depicted in the same respective line as said B0131, or a functional equivalent or a homolog thereof as depicted in column 8 of Table II, application no. 3, preferably a homolog or functional equivalent as depicted in column 8 of Table II B, application no. 3, and being depicted in the same respective line as said B0131, and preferably the activity is increased non-targeted.

[24249] Accordingly, in one embodiment, the molecule which activity is to be increased in the process of the invention is the gene product with an activity as a “aspartate 1-decarboxylase”, preferably it is the molecule of section (a) or (b) of this paragraph.

[24250] In particular, it was observed that in plants, especially in Arabidopsis thaliana, increasing or generating the activity of a gene product non-targeted with the activity of a “aspartate 1-decarboxylase”, preferably being encoded by a gene comprising the nucleic acid sequence SEQ ID NO. 74986, preferably the coding region thereof, conferred the production of or the increase in asparagine compared with the wild type control.

[24251] The nucleic acid sequence of B0131 from Escherichia coli, e.g. as shown in the respective line in column 5 of Table I, application no. 3, has been published in B. And the activity of the gene product thereof is the activity of aspartate 1-decarboxylase.

[24252] Accordingly, in one embodiment, the process of the present invention for producing serine in a non-human organism, like a microorganism or a plant or a part thereof, comprises increasing or generating the activity of a gene product with the activity of a gene product conferring the activity of “aspartate 1-decarboxylase”, especially from Escherichia coli or its functional equivalent or its homolog, e.g. the increase of
[24253] (a) a gene product of a gene comprising the nucleic acid molecule as shown in the respective line in column 5 of Table I, application no. 3, preferably the coding region thereof, or a homolog or a fragment thereof, and being depicted in the same respective line as said B0131, or a functional equivalent or a homolog thereof as shown in column 8 of Table I, application no. 3, preferably the coding region thereof, particularly a homolog or functional equivalent as shown in column 8 of Table I B, application no. 3, and being depicted in the same respective line as said B0131, and preferably the activity is increased non-targeted, or
[24254] (b) a polypeptide comprising a polypeptide, a consensus sequence or at least a polypeptide motif as shown in the respective line in column 5 of Table II or in column 8 of Table IV, application no. 3, respectively, and being depicted in the same respective line as said B0131, or a functional equivalent or a homolog thereof as depicted in column 8 of Table II, application no. 3, preferably a homolog or functional equivalent as depicted in column 8 of Table II B, application no. 3, and being depicted in the same respective line as said B0131, and preferably the activity is increased non-targeted.

[24255] Accordingly, in one embodiment, the molecule which activity is to be increased in the process of the invention is the gene product with an activity as a “aspartate 1-decarboxylase”, preferably it is the molecule of section (a) or (b) of this paragraph.

[24256] In particular, it was observed that in plants, especially in Arabidopsis thaliana, increasing or generating the activity of a gene product non-targeted with the activity of a “aspartate 1-decarboxylase”, preferably being encoded by a gene comprising the nucleic acid sequence SEQ ID NO. 74986, preferably the coding region thereof, conferred the production of or the increase in serine compared with the wild type control.

[24257] The nucleic acid sequence of B0161 from Escherichia coli, e.g. as shown in the respective line in column 5 of Table I, application no. 3, has been published in B. And the activity of the gene product thereof is the activity of serine protease.

[24258] Accordingly, in one embodiment, the process of the present invention for producing alanine in a non-human organism, like a microorganism or a plant or a part thereof, comprises increasing or generating the activity of a gene product with the activity of a gene product conferring the activity of “serine protease”, especially from Escherichia coli or its functional equivalent or its homolog, e.g. the increase of
[24259] (a) a gene product of a gene comprising the nucleic acid molecule as shown in the respective line in column 5 of Table I, application no. 3, preferably the coding region thereof, or a homolog or a fragment thereof, and being depicted in the same respective line as said B0161, or a functional equivalent or a homolog thereof as shown in column 8 of Table I, application no. 3, preferably the coding region thereof, particularly a homolog or functional equivalent as shown in column 8 of Table I B, application no. 3, and being depicted in the same respective line as said B0161, and preferably the activity is increased non-targeted, or
[24260] (b) a polypeptide comprising a polypeptide, a consensus sequence or at least a polypeptide motif as shown in the respective line in column 5 of Table II or in column 8 of Table IV, application no. 3, respectively, and being depicted in the same respective line as said B0161, or a functional equivalent or a homolog thereof as depicted in column 8 of Table II, application no. 3, preferably a homolog or functional equivalent as depicted in column 8 of Table II B, application no. 3, and being depicted in the same respective line as said B0161, and preferably the activity is increased non-targeted.

[24261] Accordingly, in one embodiment, the molecule which activity is to be increased in the process of the invention is the gene product with an activity as a “serine protease”, preferably it is the molecule of section (a) or (b) of this paragraph.

[24262] In particular, it was observed that in plants, especially in Arabidopsis thaliana, increasing or generating the activity of a gene product non-targeted with the activity of a “serine protease”, preferably being encoded by a gene comprising the nucleic acid sequence SEQ ID NO. 7081, preferably the coding region thereof, conferred the production of or the increase in alanine compared with the wild type control.

[24263] The nucleic acid sequence of B0161 from Escherichia coli, e.g. as shown in the respective line in column 5 of Table I, application no. 3, has been published in B. And the activity of the gene product thereof is the activity of serine protease.

[24264] Accordingly, in one embodiment, the process of the present invention for producing serine in a non-human organism, like a microorganism or a plant or a part thereof, comprises increasing or generating the activity of a gene product with the activity of a gene product conferring the activity of “serine protease”, especially from Escherichia coli or its functional equivalent or its homolog, e.g. the increase of
[24265] (a) a gene product of a gene comprising the nucleic acid molecule as shown in the respective line in column 5 of Table I, application no. 3, preferably the coding region thereof, or a homolog or a fragment thereof, and being depicted in the same respective line as said B0161, or a functional equivalent or a homolog thereof as shown in column 8 of Table I, application no. 3, preferably the coding region thereof, particularly a homolog or functional equivalent as shown in column 8 of Table I B, application no. 3, and being depicted in the same respective line as said B0161, and preferably the activity is increased non-targeted, or
[24266] (b) a polypeptide comprising a polypeptide, a consensus sequence or at least a polypeptide motif as shown in the respective line in column 5 of Table II or in column 8 of Table IV, application no. 3, respectively, and being depicted in the same respective line as said B0161, or a functional equivalent or a homolog thereof as depicted in column 8 of Table II, application no. 3, preferably a homolog or functional equivalent as depicted in column 8 of Table II B, application no. 3, and being depicted in the same respective line as said B0161, and preferably the activity is increased non-targeted.

[24267] Accordingly, in one embodiment, the molecule which activity is to be increased in the process of the invention is the gene product with an activity as a “serine protease”, preferably it is the molecule of section (a) or (b) of this paragraph.

[24268] In particular, it was observed that in plants, especially in Arabidopsis thaliana, increasing or generating the activity of a gene product non-targeted with the activity of a “serine protease”, preferably being encoded by a gene comprising the nucleic acid sequence SEQ ID NO. 7081, preferably the coding region thereof, conferred the production of or the increase in serine compared with the wild type control.

[24269] The nucleic acid sequence of B0161 from Escherichia coli, e.g. as shown in the respective line in column 5 of Table I, application no. 3, has been published in B. And the activity of the gene product thereof is the activity of serine protease.

[24270] Accordingly, in one embodiment, the process of the present invention for producing tyrosine in a non-human organism, like a microorganism or a plant or a part thereof, comprises increasing or generating the activity of a gene product with the activity of a gene product conferring the activity of “serine protease”, especially from Escherichia coli or its functional equivalent or its homolog, e.g. the increase of
[24271] (a) a gene product of a gene comprising the nucleic acid molecule as shown in the respective line in column 5 of Table I, application no. 3, preferably the coding region thereof, or a homolog or a fragment thereof, and being depicted in the same respective line as said B0161, or a functional equivalent or a homolog thereof as shown in column 8 of Table I, application no. 3, preferably the coding region thereof, particularly a homolog or functional equivalent as shown in column 8 of Table I B, application no. 3, and being depicted in the same respective line as said B0161, and preferably the activity is increased non-targeted, or
[24272] (b) a polypeptide comprising a polypeptide, a consensus sequence or at least a polypeptide motif as shown in the respective line in column 5 of Table II or in column 8 of Table IV, application no. 3, respectively, and being depicted in the same respective line as said B0161, or a functional equivalent or a homolog thereof as depicted in column 8 of Table II, application no. 3, preferably a homolog or functional equivalent as depicted in column 8 of Table II B, application no. 3, and being depicted in the same respective line as said B0161, and preferably the activity is increased non-targeted.

[24273] Accordingly, in one embodiment, the molecule which activity is to be increased in the process of the invention is the gene product with an activity as a “serine protease”, preferably it is the molecule of section (a) or (b) of this paragraph.

[24274] In particular, it was observed that in plants, especially in Arabidopsis thaliana, increasing or generating the activity of a gene product non-targeted with the activity of a “serine protease”, preferably being encoded by a gene comprising the nucleic acid sequence SEQ ID NO. 7081, preferably the coding region thereof, conferred the production of or the increase in tyrosine compared with the wild type control.

[24275] The nucleic acid sequence of B0221 from Escherichia coli, e.g. as shown in the respective line in column 5 of Table I, application no. 3, has been published in B. And the activity of the gene product thereof is the activity of acyl-CoA dehydrogenase.

[24276] Accordingly, in one embodiment, the process of the present invention for producing serine in a non-human organism, like a microorganism or a plant or a part thereof, comprises increasing or generating the activity of a gene product with the activity of a gene product conferring the activity of “acyl-CoA dehydrogenase”, especially from Escherichia coli or its functional equivalent or its homolog, e.g. the increase of
[24277] (a) a gene product of a gene comprising the nucleic acid molecule as shown in the respective line in column 5 of Table I, application no. 3, preferably the coding region thereof, or a homolog or a fragment thereof, and being depicted in the same respective line as said B0221, or a functional equivalent or a homolog thereof as shown in column 8 of Table I, application no. 3, preferably the coding region thereof, particularly a homolog or functional equivalent as shown in column 8 of Table I B, application no. 3, and being depicted in the same respective line as said B0221, and preferably the activity is increased non-targeted, or
[24278] (b) a polypeptide comprising a polypeptide, a consensus sequence or at least a polypeptide motif as shown in the respective line in column 5 of Table II or in column 8 of Table IV, application no. 3, respectively, and being depicted in the same respective line as said B0221, or a functional equivalent or a homolog thereof as depicted in column 8 of Table II, application no. 3, preferably a homolog or functional equivalent as depicted in column 8 of Table II B, application no. 3, and being depicted in the same respective line as said B0221, and preferably the activity is increased non-targeted.

[24279] Accordingly, in one embodiment, the molecule which activity is to be increased in the process of the invention is the gene product with an activity as a “acyl-CoA dehydrogenase”, preferably it is the molecule of section (a) or (b) of this paragraph.

[24280] In particular, it was observed that in plants, especially in Arabidopsis thaliana, increasing or generating the activity of a gene product non-targeted with the activity of a “acyl-CoA dehydrogenase”, preferably being encoded by a gene comprising the nucleic acid sequence SEQ ID NO. 35590, preferably the coding region thereof, conferred the production of or the increase in serine compared with the wild type control.

[24281] The nucleic acid sequence of B0221 from Escherichia coli, e.g. as shown in the respective line in column 5 of Table I, application no. 3, has been published in B. And the activity of the gene product thereof is the activity of acyl-CoA dehydrogenase.

[24282] Accordingly, in one embodiment, the process of the present invention for producing tyrosine in a non-human organism, like a microorganism or a plant or a part thereof, comprises increasing or generating the activity of a gene product with the activity of a gene product conferring the activity of “acyl-CoA dehydrogenase”, especially from Escherichia coli or its functional equivalent or its homolog, e.g. the increase of
[24283] (a) a gene product of a gene comprising the nucleic acid molecule as shown in the respective line in column 5 of Table I, application no. 3, preferably the coding region thereof, or a homolog or a fragment thereof, and being depicted in the same respective line as said B0221, or a functional equivalent or a homolog thereof as shown in column 8 of Table I, application no. 3, preferably the coding region thereof, particularly a homolog or functional equivalent as shown in column 8 of Table I B, application no. 3, and being depicted in the same respective line as said B0221, and preferably the activity is increased non-targeted, or
[24284] (b) a polypeptide comprising a polypeptide, a consensus sequence or at least a polypeptide motif as shown in the respective line in column 5 of Table II or in column 8 of Table IV, application no. 3, respectively, and being depicted in the same respective line as said B0221, or a functional equivalent or a homolog thereof as depicted in column 8 of Table II, application no. 3, preferably a homolog or functional equivalent as depicted in column 8 of Table II B, application no. 3, and being depicted in the same respective line as said B0221, and preferably the activity is increased non-targeted.

[24285] Accordingly, in one embodiment, the molecule which activity is to be increased in the process of the invention is the gene product with an activity as a “acyl-CoA dehydrogenase”, preferably it is the molecule of section (a) or (b) of this paragraph.

[24286] In particular, it was observed that in plants, especially in Arabidopsis thaliana, increasing or generating the activity of a gene product non-targeted with the activity of a “acyl-CoA dehydrogenase”, preferably being encoded by a gene comprising the nucleic acid sequence SEQ ID NO. 35590, preferably the coding region thereof, conferred the production of or the increase in tyrosine compared with the wild type control.

[24287] The nucleic acid sequence of B0344 from Escherichia coli, e.g. as shown in the respective line in column 5 of Table I, application no. 3, has been published in B. And the activity of the gene product thereof is the activity of beta-galactosidase.

[24288] Accordingly, in one embodiment, the process of the present invention for producing tyrosine in a non-human organism, like a microorganism or a plant or a part thereof, comprises increasing or generating the activity of a gene product with the activity of a gene product conferring the activity of “beta-galactosidase”, especially from Escherichia coli or its functional equivalent or its homolog, e.g. the increase of
[24289] (a) a gene product of a gene comprising the nucleic acid molecule as shown in the respective line in column 5 of Table I, application no. 3, preferably the coding region thereof, or a homolog or a fragment thereof, and being depicted in the same respective line as said B0344, or a functional equivalent or a homolog thereof as shown in column 8 of Table I, application no. 3, preferably the coding region thereof, particularly a homolog or functional equivalent as shown in column 8 of Table I B, application no. 3, and being depicted in the same respective line as said B0344, and preferably the activity is increased plastidic, or
[24290] (b) a polypeptide comprising a polypeptide, a consensus sequence or at least a polypeptide motif as shown in the respective line in column 5 of Table II or in column 8 of Table IV, application no. 3, respectively, and being depicted in the same respective line as said B0344, or a functional equivalent or a homolog thereof as depicted in column 8 of Table II, application no. 3, preferably a homolog or functional equivalent as depicted in column 8 of Table II B, application no. 3, and being depicted in the same respective line as said B0344, and preferably the activity is increased plastidic.

[24291] Accordingly, in one embodiment, the molecule which activity is to be increased in the process of the invention is the gene product with an activity as a “beta-galactosidase”, preferably it is the molecule of section (a) or (b) of this paragraph.

[24292] In particular, it was observed that in plants, especially in Arabidopsis thaliana, increasing or generating the activity of a gene product plastidic with the activity of a “beta-galactosidase”, preferably being encoded by a gene comprising the nucleic acid sequence SEQ ID NO. 35733, preferably the coding region thereof, conferred the production of or the increase in tyrosine compared with the wild type control.

[24293] The nucleic acid sequence of B0344 from Escherichia coli, e.g. as shown in the respective line in column 5 of Table I, application no. 3, has been published in B. And the activity of the gene product thereof is the activity of beta-galactosidase.

[24294] Accordingly, in one embodiment, the process of the present invention for producing 5-oxoproline in a non-human organism, like a microorganism or a plant or a part thereof, comprises increasing or generating the activity of a gene product with the activity of a gene product conferring the activity of “beta-galactosidase”, especially from Escherichia coli or its functional equivalent or its homolog, e.g. the increase of
[24295] (a) a gene product of a gene comprising the nucleic acid molecule as shown in the respective line in column 5 of Table I, application no. 3, preferably the coding region thereof, or a homolog or a fragment thereof, and being depicted in the same respective line as said B0344, or a functional equivalent or a homolog thereof as shown in column 8 of Table I, application no. 3, preferably the coding region thereof, particularly a homolog or functional equivalent as shown in column 8 of Table I B, application no. 3, and being depicted in the same respective line as said B0344, and preferably the activity is increased plastidic, or
[24296] (b) a polypeptide comprising a polypeptide, a consensus sequence or at least a polypeptide motif as shown in the respective line in column 5 of Table II or in column 8 of Table IV, application no. 3, respectively, and being depicted in the same respective line as said B0344, or a functional equivalent or a homolog thereof as depicted in column 8 of Table II, application no. 3, preferably a homolog or functional equivalent as depicted in column 8 of Table II B, application no. 3, and being depicted in the same respective line as said B0344, and preferably the activity is increased plastidic.

[24297] Accordingly, in one embodiment, the molecule which activity is to be increased in the process of the invention is the gene product with an activity as a “beta-galactosidase”, preferably it is the molecule of section (a) or (b) of this paragraph.

[24298] In particular, it was observed that in plants, especially in Arabidopsis thaliana, increasing or generating the activity of a gene product plastidic with the activity of a “beta-galactosidase”, preferably being encoded by a gene comprising the nucleic acid sequence SEQ ID NO. 35733, preferably the coding region thereof, conferred the production of or the increase in 5-oxoproline compared with the wild type control.

[24299] The nucleic acid sequence of B0348 from Escherichia coli, e.g. as shown in the respective line in column 5 of Table I, application no. 3, has been published in B. And the activity of the gene product thereof is the activity of 2,3-dihydroxyphenylpropionate 1,2-dioxygenase.

[24300] Accordingly, in one embodiment, the process of the present invention for producing glycine in a non-human organism, like a microorganism or a plant or a part thereof, comprises increasing or generating the activity of a gene product with the activity of a gene product conferring the activity of “2,3-dihydroxyphenylpropionate 1,2-dioxygenase”, especially from Escherichia coli or its functional equivalent or its homolog, e.g. the increase of
[24301] (a) a gene product of a gene comprising the nucleic acid molecule as shown in the respective line in column 5 of Table I, application no. 3, preferably the coding region thereof, or a homolog or a fragment thereof, and being depicted in the same respective line as said B0348, or a functional equivalent or a homolog thereof as shown in column 8 of Table I, application no. 3, preferably the coding region thereof, particularly a homolog or functional equivalent as shown in column 8 of Table I B, application no. 3, and being depicted in the same respective line as said B0348, and preferably the activity is increased plastidic, or
[24302] (b) a polypeptide comprising a polypeptide, a consensus sequence or at least a polypeptide motif as shown in the respective line in column 5 of Table II or in column 8 of Table IV, application no. 3, respectively, and being depicted in the same respective line as said B0348, or a functional equivalent or a homolog thereof as depicted in column 8 of Table II, application no. 3, preferably a homolog or functional equivalent as depicted in column 8 of Table II B, application no. 3, and being depicted in the same respective line as said B0348, and preferably the activity is increased plastidic.

[24303] Accordingly, in one embodiment, the molecule which activity is to be increased in the process of the invention is the gene product with an activity as a “2,3-dihydroxyphenylpropionate 1,2-dioxygenase”, preferably it is the molecule of section (a) or (b) of this paragraph.

[24304] In particular, it was observed that in plants, especially in Arabidopsis thaliana, increasing or generating the activity of a gene product plastidic with the activity of a “2,3-dihydroxyphenylpropionate 1,2-dioxygenase”, preferably being encoded by a gene comprising the nucleic acid sequence SEQ ID NO. 7269, preferably the coding region thereof, conferred the production of or the increase in glycine compared with the wild type control.

[24305] The nucleic acid sequence of B0348 from Escherichia coli, e.g. as shown in the respective line in column 5 of Table I, application no. 3, has been published in B. And the activity of the gene product thereof is the activity of 2,3-dihydroxyphenylpropionate 1,2-dioxygenase.

[24306] Accordingly, in one embodiment, the process of the present invention for producing phenylalanine in a non-human organism, like a microorganism or a plant or a part thereof, comprises increasing or generating the activity of a gene product with the activity of a gene product conferring the activity of “2,3-dihydroxyphenylpropionate 1,2-dioxygenase”, especially from Escherichia coli or its functional equivalent or its homolog, e.g. the increase of
[24307] (a) a gene product of a gene comprising the nucleic acid molecule as shown in the respective line in column 5 of Table I, application no. 3, preferably the coding region thereof, or a homolog or a fragment thereof, and being depicted in the same respective line as said B0348, or a functional equivalent or a homolog thereof as shown in column 8 of Table I, application no. 3, preferably the coding region thereof, particularly a homolog or functional equivalent as shown in column 8 of Table I B, application no. 3, and being depicted in the same respective line as said B0348, and preferably the activity is increased plastidic, or
[24308] (b) a polypeptide comprising a polypeptide, a consensus sequence or at least a polypeptide motif as shown in the respective line in column 5 of Table II or in column 8 of Table IV, application no. 3, respectively, and being depicted in the same respective line as said B0348, or a functional equivalent or a homolog thereof as depicted in column 8 of Table II, application no. 3, preferably a homolog or functional equivalent as depicted in column 8 of Table II B, application no. 3, and being depicted in the same respective line as said B0348, and preferably the activity is increased plastidic.

[24309] Accordingly, in one embodiment, the molecule which activity is to be increased in the process of the invention is the gene product with an activity as a “2,3-dihydroxyphenylpropionate 1,2-dioxygenase”, preferably it is the molecule of section (a) or (b) of this paragraph.

[24310] In particular, it was observed that in plants, especially in Arabidopsis thaliana, increasing or generating the activity of a gene product plastidic with the activity of a “2,3-dihydroxyphenylpropionate 1,2-dioxygenase”, preferably being encoded by a gene comprising the nucleic acid sequence SEQ ID NO. 7269, preferably the coding region thereof, conferred the production of or the increase in phenylalanine compared with the wild type control.

[24311] The nucleic acid sequence of B0348 from Escherichia coli, e.g. as shown in the respective line in column 5 of Table I, application no. 3, has been published in B. And the activity of the gene product thereof is the activity of 2,3-dihydroxyphenylpropionate 1,2-dioxygenase.

[24312] Accordingly, in one embodiment, the process of the present invention for producing serine in a non-human organism, like a microorganism or a plant or a part thereof, comprises increasing or generating the activity of a gene product with the activity of a gene product conferring the activity of “2,3-dihydroxyphenylpropionate 1,2-dioxygenase”, especially from Escherichia coli or its functional equivalent or its homolog, e.g. the increase of
[24313] (a) a gene product of a gene comprising the nucleic acid molecule as shown in the respective line in column 5 of Table I, application no. 3, preferably the coding region thereof, or a homolog or a fragment thereof, and being depicted in the same respective line as said B0348, or a functional equivalent or a homolog thereof as shown in column 8 of Table I, application no. 3, preferably the coding region thereof, particularly a homolog or functional equivalent as shown in column 8 of Table I B, application no. 3, and being depicted in the same respective line as said B0348, and preferably the activity is increased plastidic, or
[24314] (b) a polypeptide comprising a polypeptide, a consensus sequence or at least a polypeptide motif as shown in the respective line in column 5 of Table II or in column 8 of Table IV, application no. 3, respectively, and being depicted in the same respective line as said B0348, or a functional equivalent or a homolog thereof as depicted in column 8 of Table II, application no. 3, preferably a homolog or functional equivalent as depicted in column 8 of Table II B, application no. 3, and being depicted in the same respective line as said B0348, and preferably the activity is increased plastidic.

[24315] Accordingly, in one embodiment, the molecule which activity is to be increased in the process of the invention is the gene product with an activity as a “2,3-dihydroxyphenylpropionate 1,2-dioxygenase”, preferably it is the molecule of section (a) or (b) of this paragraph.

[24316] In particular, it was observed that in plants, especially in Arabidopsis thaliana, increasing or generating the activity of a gene product plastidic with the activity of a “2,3-dihydroxyphenylpropionate 1,2-dioxygenase”, preferably being encoded by a gene comprising the nucleic acid sequence SEQ ID NO. 7269, preferably the coding region thereof, conferred the production of or the increase in serine compared with the wild type control.

[24317] The nucleic acid sequence of B0348 from Escherichia coli, e.g. as shown in the respective line in column 5 of Table I, application no. 3, has been published in B. And the activity of the gene product thereof is the activity of 2,3-dihydroxyphenylpropionate 1,2-dioxygenase.

[24318] Accordingly, in one embodiment, the process of the present invention for producing tyrosine in a non-human organism, like a microorganism or a plant or a part thereof, comprises increasing or generating the activity of a gene product with the activity of a gene product conferring the activity of “2,3-dihydroxyphenylpropionate 1,2-dioxygenase”, especially from Escherichia coli or its functional equivalent or its homolog, e.g. the increase of
[24319] (a) a gene product of a gene comprising the nucleic acid molecule as shown in the respective line in column 5 of Table I, application no. 3, preferably the coding region thereof, or a homolog or a fragment thereof, and being depicted in the same respective line as said B0348, or a functional equivalent or a homolog thereof as shown in column 8 of Table I, application no. 3, preferably the coding region thereof, particularly a homolog or functional equivalent as shown in column 8 of Table I B, application no. 3, and being depicted in the same respective line as said B0348, and preferably the activity is increased plastidic, or
[24320] (b) a polypeptide comprising a polypeptide, a consensus sequence or at least a polypeptide motif as shown in the respective line in column 5 of Table II or in column 8 of Table IV, application no. 3, respectively, and being depicted in the same respective line as said B0348, or a functional equivalent or a homolog thereof as depicted in column 8 of Table II, application no. 3, preferably a homolog or functional equivalent as depicted in column 8 of Table II B, application no. 3, and being depicted in the same respective line as said B0348, and preferably the activity is increased plastidic.

[24321] Accordingly, in one embodiment, the molecule which activity is to be increased in the process of the invention is the gene product with an activity as a “2,3-dihydroxyphenylpropionate 1,2-dioxygenase”, preferably it is the molecule of section (a) or (b) of this paragraph.

[24322] In particular, it was observed that in plants, especially in Arabidopsis thaliana, increasing or generating the activity of a gene product plastidic with the activity of a “2,3-dihydroxyphenylpropionate 1,2-dioxygenase”, preferably being encoded by a gene comprising the nucleic acid sequence SEQ ID NO. 7269, preferably the coding region thereof, conferred the production of or the increase in tyrosine compared with the wild type control.

[24323] The nucleic acid sequence of B0391 from Escherichia coli, e.g. as shown in the respective line in column 5 of Table I, application no. 3, has been published in B. And the activity of the gene product thereof is the activity of b0391-protein.

[24324] Accordingly, in one embodiment, the process of the present invention for producing aspartate in a non-human organism, like a microorganism or a plant or a part thereof, comprises increasing or generating the activity of a gene product with the activity of a gene product conferring the activity of “b0391-protein”, especially from Escherichia coli or its functional equivalent or its homolog, e.g. the increase of
[24325] (a) a gene product of a gene comprising the nucleic acid molecule as shown in the respective line in column 5 of Table I, application no. 3, preferably the coding region thereof, or a homolog or a fragment thereof, and being depicted in the same respective line as said B0391, or a functional equivalent or a homolog thereof as shown in column 8 of Table I, application no. 3, preferably the coding region thereof, particularly a homolog or functional equivalent as shown in column 8 of Table I B, application no. 3, and being depicted in the same respective line as said B0391, and preferably the activity is increased plastidic, or
[24326] (b) a polypeptide comprising a polypeptide, a consensus sequence or at least a polypeptide motif as shown in the respective line in column 5 of Table II or in column 8 of Table IV, application no. 3, respectively, and being depicted in the same respective line as said B0391, or a functional equivalent or a homolog thereof as depicted in column 8 of Table II, application no. 3, preferably a homolog or functional equivalent as depicted in column 8 of Table II B, application no. 3, and being depicted in the same respective line as said B0391, and preferably the activity is increased plastidic.

[24327] Accordingly, in one embodiment, the molecule which activity is to be increased in the process of the invention is the gene product with an activity as a “b0391-protein”, preferably it is the molecule of section (a) or (b) of this paragraph.

[24328] In particular, it was observed that in plants, especially in Arabidopsis thaliana, increasing or generating the activity of a gene product plastidic with the activity of a “b0391-protein”, preferably being encoded by a gene comprising the nucleic acid sequence SEQ ID NO. 75195, preferably the coding region thereof, conferred the production of or the increase in aspartate compared with the wild type control.

[24329] The nucleic acid sequence of B0449 from Escherichia coli, e.g. as shown in the respective line in column 5 of Table I, application no. 3, has been published in B. And the activity of the gene product thereof is the activity of ATP-binding component of a transport system.

[24330] Accordingly, in one embodiment, the process of the present invention for producing asparagine in a non-human organism, like a microorganism or a plant or a part thereof, comprises increasing or generating the activity of a gene product with the activity of a gene product conferring the activity of “ATP-binding component of a transport system”, especially from Escherichia coli or its functional equivalent or its homolog, e.g. the increase of
[24331] (a) a gene product of a gene comprising the nucleic acid molecule as shown in the respective line in column 5 of Table I, application no. 3, preferably the coding region thereof, or a homolog or a fragment thereof, and being depicted in the same respective line as said B0449, or a functional equivalent or a homolog thereof as shown in column 8 of Table I, application no. 3, preferably the coding region thereof, particularly a homolog or functional equivalent as shown in column 8 of Table I B, application no. 3, and being depicted in the same respective line as said B0449, and preferably the activity is increased non-targeted, or
[24332] (b) a polypeptide comprising a polypeptide, a consensus sequence or at least a polypeptide motif as shown in the respective line in column 5 of Table II or in column 8 of Table IV, application no. 3, respectively, and being depicted in the same respective line as said B0449, or a functional equivalent or a homolog thereof as depicted in column 8 of Table II, application no. 3, preferably a homolog or functional equivalent as depicted in column 8 of Table II B, application no. 3, and being depicted in the same respective line as said B0449, and preferably the activity is increased non-targeted.

[24333] Accordingly, in one embodiment, the molecule which activity is to be increased in the process of the invention is the gene product with an activity as a “ATP-binding component of a transport system”, preferably it is the molecule of section (a) or (b) of this paragraph.

[24334] In particular, it was observed that in plants, especially in Arabidopsis thaliana, increasing or generating the activity of a gene product non-targeted with the activity of a “ATP-binding component of a transport system”, preferably being encoded by a gene comprising the nucleic acid sequence SEQ ID NO. 7333, preferably the coding region thereof, conferred the production of or the increase in asparagine compared with the wild type control.

[24335] The nucleic acid sequence of B0449 from Escherichia coli, e.g. as shown in the respective line in column 5 of Table I, application no. 3, has been published in B. And the activity of the gene product thereof is the activity of ATP-binding component of a transport system.

[24336] Accordingly, in one embodiment, the process of the present invention for producing aspartate in a non-human organism, like a microorganism or a plant or a part thereof, comprises increasing or generating the activity of a gene product with the activity of a gene product conferring the activity of “ATP-binding component of a transport system”, especially from Escherichia coli or its functional equivalent or its homolog, e.g. the increase of
[24337] (a) a gene product of a gene comprising the nucleic acid molecule as shown in the respective line in column 5 of Table I, application no. 3, preferably the coding region thereof, or a homolog or a fragment thereof, and being depicted in the same respective line as said B0449, or a functional equivalent or a homolog thereof as shown in column 8 of Table I, application no. 3, preferably the coding region thereof, particularly a homolog or functional equivalent as shown in column 8 of Table I B, application no. 3, and being depicted in the same respective line as said B0449, and preferably the activity is increased non-targeted, or
[24338] (b) a polypeptide comprising a polypeptide, a consensus sequence or at least a polypeptide motif as shown in the respective line in column 5 of Table II or in column 8 of Table IV, application no. 3, respectively, and being depicted in the same respective line as said B0449, or a functional equivalent or a homolog thereof as depicted in column 8 of Table II, application no. 3, preferably a homolog or functional equivalent as depicted in column 8 of Table II B, application no. 3, and being depicted in the same respective line as said B0449, and preferably the activity is increased non-targeted.

[24339] Accordingly, in one embodiment, the molecule which activity is to be increased in the process of the invention is the gene product with an activity as a “ATP-binding component of a transport system”, preferably it is the molecule of section (a) or (b) of this paragraph.

[24340] In particular, it was observed that in plants, especially in Arabidopsis thaliana, increasing or generating the activity of a gene product non-targeted with the activity of a “ATP-binding component of a transport system”, preferably being encoded by a gene comprising the nucleic acid sequence SEQ ID NO. 7333, preferably the coding region thereof, conferred the production of or the increase in aspartate compared with the wild type control.

[24341] The nucleic acid sequence of B0449 from Escherichia coli, e.g. as shown in the respective line in column 5 of Table I, application no. 3, has been published in B. And the activity of the gene product thereof is the activity of ATP-binding component of a transport system.

[24342] Accordingly, in one embodiment, the process of the present invention for producing phenylalanine in a non-human organism, like a microorganism or a plant or a part thereof, comprises increasing or generating the activity of a gene product with the activity of a gene product conferring the activity of “ATP-binding component of a transport system”, especially from Escherichia coli or its functional equivalent or its homolog, e.g. the increase of
[24343] (a) a gene product of a gene comprising the nucleic acid molecule as shown in the respective line in column 5 of Table I, application no. 3, preferably the coding region thereof, or a homolog or a fragment thereof, and being depicted in the same respective line as said B0449, or a functional equivalent or a homolog thereof as shown in column 8 of Table I, application no. 3, preferably the coding region thereof, particularly a homolog or functional equivalent as shown in column 8 of Table I B, application no. 3, and being depicted in the same respective line as said B0449, and preferably the activity is increased non-targeted, or
[24344] (b) a polypeptide comprising a polypeptide, a consensus sequence or at least a polypeptide motif as shown in the respective line in column 5 of Table II or in column 8 of Table IV, application no. 3, respectively, and being depicted in the same respective line as said B0449, or a functional equivalent or a homolog thereof as depicted in column 8 of Table II, application no. 3, preferably a homolog or functional equivalent as depicted in column 8 of Table II B, application no. 3, and being depicted in the same respective line as said B0449, and preferably the activity is increased non-targeted.

[24345] Accordingly, in one embodiment, the molecule which activity is to be increased in the process of the invention is the gene product with an activity as a “ATP-binding component of a transport system”, preferably it is the molecule of section (a) or (b) of this paragraph.

[24346] In particular, it was observed that in plants, especially in Arabidopsis thaliana, increasing or generating the activity of a gene product non-targeted with the activity of a “ATP-binding component of a transport system”, preferably being encoded by a gene comprising the nucleic acid sequence SEQ ID NO. 7333, preferably the coding region thereof, conferred the production of or the increase in phenylalanine compared with the wild type control.

[24347] The nucleic acid sequence of B0449 from Escherichia coli, e.g. as shown in the respective line in column 5 of Table I, application no. 3, has been published in B. And the activity of the gene product thereof is the activity of ATP-binding component of a transport system.

[24348] Accordingly, in one embodiment, the process of the present invention for producing serine in a non-human organism, like a microorganism or a plant or a part thereof, comprises increasing or generating the activity of a gene product with the activity of a gene product conferring the activity of “ATP-binding component of a transport system”, especially from Escherichia coli or its functional equivalent or its homolog, e.g. the increase of
[24349] (a) a gene product of a gene comprising the nucleic acid molecule as shown in the respective line in column 5 of Table I, application no. 3, preferably the coding region thereof, or a homolog or a fragment thereof, and being depicted in the same respective line as said B0449, or a functional equivalent or a homolog thereof as shown in column 8 of Table I, application no. 3, preferably the coding region thereof, particularly a homolog or functional equivalent as shown in column 8 of Table I B, application no. 3, and being depicted in the same respective line as said B0449, and preferably the activity is increased non-targeted, or
[24350] (b) a polypeptide comprising a polypeptide, a consensus sequence or at least a polypeptide motif as shown in the respective line in column 5 of Table II or in column 8 of Table IV, application no. 3, respectively, and being depicted in the same respective line as said B0449, or a functional equivalent or a homolog thereof as depicted in column 8 of Table II, application no. 3, preferably a homolog or functional equivalent as depicted in column 8 of Table II B, application no. 3, and being depicted in the same respective line as said B0449, and preferably the activity is increased non-targeted.

[24351] Accordingly, in one embodiment, the molecule which activity is to be increased in the process of the invention is the gene product with an activity as a “ATP-binding component of a transport system”, preferably it is the molecule of section (a) or (b) of this paragraph.

[24352] In particular, it was observed that in plants, especially in Arabidopsis thaliana, increasing or generating the activity of a gene product non-targeted with the activity of a “ATP-binding component of a transport system”, preferably being encoded by a gene comprising the nucleic acid sequence SEQ ID NO. 7333, preferably the coding region thereof, conferred the production of or the increase in serine compared with the wild type control.

[24353] The nucleic acid sequence of B0449 from Escherichia coli, e.g. as shown in the respective line in column 5 of Table I, application no. 3, has been published in B. And the activity of the gene product thereof is the activity of ATP-binding component of a transport system.

[24354] Accordingly, in one embodiment, the process of the present invention for producing tyrosine in a non-human organism, like a microorganism or a plant or a part thereof, comprises increasing or generating the activity of a gene product with the activity of a gene product conferring the activity of “ATP-binding component of a transport system”, especially from Escherichia coli or its functional equivalent or its homolog, e.g. the increase of
[24355] (a) a gene product of a gene comprising the nucleic acid molecule as shown in the respective line in column 5 of Table I, application no. 3, preferably the coding region thereof, or a homolog or a fragment thereof, and being depicted in the same respective line as said B0449, or a functional equivalent or a homolog thereof as shown in column 8 of Table I, application no. 3, preferably the coding region thereof, particularly a homolog or functional equivalent as shown in column 8 of Table I B, application no. 3, and being depicted in the same respective line as said B0449, and preferably the activity is increased non-targeted, or
[24356] (b) a polypeptide comprising a polypeptide, a consensus sequence or at least a polypeptide motif as shown in the respective line in column 5 of Table II or in column 8 of Table IV, application no. 3, respectively, and being depicted in the same respective line as said B0449, or a functional equivalent or a homolog thereof as depicted in column 8 of Table II, application no. 3, preferably a homolog or functional equivalent as depicted in column 8 of Table II B, application no. 3, and being depicted in the same respective line as said B0449, and preferably the activity is increased non-targeted.

[24357] Accordingly, in one embodiment, the molecule which activity is to be increased in the process of the invention is the gene product with an activity as a “ATP-binding component of a transport system”, preferably it is the molecule of section (a) or (b) of this paragraph.

[24358] In particular, it was observed that in plants, especially in Arabidopsis thaliana, increasing or generating the activity of a gene product non-targeted with the activity of a “ATP-binding component of a transport system”, preferably being encoded by a gene comprising the nucleic acid sequence SEQ ID NO. 7333, preferably the coding region thereof, conferred the production of or the increase in tyrosine compared with the wild type control.

[24359] The nucleic acid sequence of B0456 from Escherichia coli, e.g. as shown in the respective line in column 5 of Table I, application no. 3, has been published in B. And the activity of the gene product thereof is the activity of b0456-protein.

[24360] Accordingly, in one embodiment, the process of the present invention for producing alanine in a non-human organism, like a microorganism or a plant or a part thereof, comprises increasing or generating the activity of a gene product with the activity of a gene product conferring the activity of “b0456-protein”, especially from Escherichia coli or its functional equivalent or its homolog, e.g. the increase of
[24361] (a) a gene product of a gene comprising the nucleic acid molecule as shown in the respective line in column 5 of Table I, application no. 3, preferably the coding region thereof, or a homolog or a fragment thereof, and being depicted in the same respective line as said B0456, or a functional equivalent or a homolog thereof as shown in column 8 of Table I, application no. 3, preferably the coding region thereof, particularly a homolog or functional equivalent as shown in column 8 of Table I B, application no. 3, and being depicted in the same respective line as said B0456, and preferably the activity is increased non-targeted, or
[24362] (b) a polypeptide comprising a polypeptide, a consensus sequence or at least a polypeptide motif as shown in the respective line in column 5 of Table II or in column 8 of Table IV, application no. 3, respectively, and being depicted in the same respective line as said B0456, or a functional equivalent or a homolog thereof as depicted in column 8 of Table II, application no. 3, preferably a homolog or functional equivalent as depicted in column 8 of Table II B, application no. 3, and being depicted in the same respective line as said B0456, and preferably the activity is increased non-targeted.

[24363] Accordingly, in one embodiment, the molecule which activity is to be increased in the process of the invention is the gene product with an activity as a “b0456-protein”, preferably it is the molecule of section (a) or (b) of this paragraph.

[24364] In particular, it was observed that in plants, especially in Arabidopsis thaliana, increasing or generating the activity of a gene product non-targeted with the activity of a “b0456-protein”, preferably being encoded by a gene comprising the nucleic acid sequence SEQ ID NO. 35875, preferably the coding region thereof, conferred the production of or the increase in alanine compared with the wild type control.

[24365] The nucleic acid sequence of B0486 from Escherichia coli, e.g. as shown in the respective line in column 5 of Table I, application no. 3, has been published in B. And the activity of the gene product thereof is the activity of membrane transport protein.

[24366] Accordingly, in one embodiment, the process of the present invention for producing aspartate in a non-human organism, like a microorganism or a plant or a part thereof, comprises increasing or generating the activity of a gene product with the activity of a gene product conferring the activity of “membrane transport protein”, especially from Escherichia coli or its functional equivalent or its homolog, e.g. the increase of
[24367] (a) a gene product of a gene comprising the nucleic acid molecule as shown in the respective line in column 5 of Table I, application no. 3, preferably the coding region thereof, or a homolog or a fragment thereof, and being depicted in the same respective line as said B0486, or a functional equivalent or a homolog thereof as shown in column 8 of Table I, application no. 3, preferably the coding region thereof, particularly a homolog or functional equivalent as shown in column 8 of Table I B, application no. 3, and being depicted in the same respective line as said B0486, and preferably the activity is increased non-targeted, or
[24368] (b) a polypeptide comprising a polypeptide, a consensus sequence or at least a polypeptide motif as shown in the respective line in column 5 of Table II or in column 8 of Table IV, application no. 3, respectively, and being depicted in the same respective line as said B0486, or a functional equivalent or a homolog thereof as depicted in column 8 of Table II, application no. 3, preferably a homolog or functional equivalent as depicted in column 8 of Table II B, application no. 3, and being depicted in the same respective line as said B0486, and preferably the activity is increased non-targeted.

[24369] Accordingly, in one embodiment, the molecule which activity is to be increased in the process of the invention is the gene product with an activity as a “membrane transport protein”, preferably it is the molecule of section (a) or (b) of this paragraph.

[24370] In particular, it was observed that in plants, especially in Arabidopsis thaliana, increasing or generating the activity of a gene product non-targeted with the activity of a “membrane transport protein”, preferably being encoded by a gene comprising the nucleic acid sequence SEQ ID NO. 7686, preferably the coding region thereof, conferred the production of or the increase in aspartate compared with the wild type control.

[24371] The nucleic acid sequence of B0486 from Escherichia coli, e.g. as shown in the respective line in column 5 of Table I, application no. 3, has been published in B. And the activity of the gene product thereof is the activity of membrane transport protein.

[24372] Accordingly, in one embodiment, the process of the present invention for producing phenylalanine in a non-human organism, like a microorganism or a plant or a part thereof, comprises increasing or generating the activity of a gene product with the activity of a gene product conferring the activity of “membrane transport protein”, especially from Escherichia coli or its functional equivalent or its homolog, e.g. the increase of
[24373] (a) a gene product of a gene comprising the nucleic acid molecule as shown in the respective line in column 5 of Table I, application no. 3, preferably the coding region thereof, or a homolog or a fragment thereof, and being depicted in the same respective line as said B0486, or a functional equivalent or a homolog thereof as shown in column 8 of Table I, application no. 3, preferably the coding region thereof, particularly a homolog or functional equivalent as shown in column 8 of Table I B, application no. 3, and being depicted in the same respective line as said B0486, and preferably the activity is increased non-targeted, or
[24374] (b) a polypeptide comprising a polypeptide, a consensus sequence or at least a polypeptide motif as shown in the respective line in column 5 of Table II or in column 8 of Table IV, application no. 3, respectively, and being depicted in the same respective line as said B0486, or a functional equivalent or a homolog thereof as depicted in column 8 of Table II, application no. 3, preferably a homolog or functional equivalent as depicted in column 8 of Table II B, application no. 3, and being depicted in the same respective line as said B0486, and preferably the activity is increased non-targeted.

[24375] Accordingly, in one embodiment, the molecule which activity is to be increased in the process of the invention is the gene product with an activity as a “membrane transport protein”, preferably it is the molecule of section (a) or (b) of this paragraph.

[24376] In particular, it was observed that in plants, especially in Arabidopsis thaliana, increasing or generating the activity of a gene product non-targeted with the activity of a “membrane transport protein”, preferably being encoded by a gene comprising the nucleic acid sequence SEQ ID NO. 7686, preferably the coding region thereof, conferred the production of or the increase in phenylalanine compared with the wild type control.

[24377] The nucleic acid sequence of B0486 from Escherichia coli, e.g. as shown in the respective line in column 5 of Table I, application no. 3, has been published in B. And the activity of the gene product thereof is the activity of membrane transport protein.

[24378] Accordingly, in one embodiment, the process of the present invention for producing tyrosine in a non-human organism, like a microorganism or a plant or a part thereof, comprises increasing or generating the activity of a gene product with the activity of a gene product conferring the activity of “membrane transport protein”, especially from Escherichia coli or its functional equivalent or its homolog, e.g. the increase of
[24379] (a) a gene product of a gene comprising the nucleic acid molecule as shown in the respective line in column 5 of Table I, application no. 3, preferably the coding region thereof, or a homolog or a fragment thereof, and being depicted in the same respective line as said B0486, or a functional equivalent or a homolog thereof as shown in column 8 of Table I, application no. 3, preferably the coding region thereof, particularly a homolog or functional equivalent as shown in column 8 of Table I B, application no. 3, and being depicted in the same respective line as said B0486, and preferably the activity is increased non-targeted, or
[24380] (b) a polypeptide comprising a polypeptide, a consensus sequence or at least a polypeptide motif as shown in the respective line in column 5 of Table II or in column 8 of Table IV, application no. 3, respectively, and being depicted in the same respective line as said B0486, or a functional equivalent or a homolog thereof as depicted in column 8 of Table II, application no. 3, preferably a homolog or functional equivalent as depicted in column 8 of Table II B, application no. 3, and being depicted in the same respective line as said B0486, and preferably the activity is increased non-targeted.

[24381] Accordingly, in one embodiment, the molecule which activity is to be increased in the process of the invention is the gene product with an activity as a “membrane transport protein”, preferably it is the molecule of section (a) or (b) of this paragraph.

[24382] In particular, it was observed that in plants, especially in Arabidopsis thaliana, increasing or generating the activity of a gene product non-targeted with the activity of a “membrane transport protein”, preferably being encoded by a gene comprising the nucleic acid sequence SEQ ID NO. 7686, preferably the coding region thereof, conferred the production of or the increase in tyrosine compared with the wild type control.

[24383] The nucleic acid sequence of B0518 from Escherichia coli, e.g. as shown in the respective line in column 5 of Table I, application no. 3, has been published in B. And the activity of the gene product thereof is the activity of b0518-protein.

[24384] Accordingly, in one embodiment, the process of the present invention for producing homoserine in a non-human organism, like a microorganism or a plant or a part thereof, comprises increasing or generating the activity of a gene product with the activity of a gene product conferring the activity of “b0518-protein”, especially from Escherichia coli or its functional equivalent or its homolog, e.g. the increase of
[24385] (a) a gene product of a gene comprising the nucleic acid molecule as shown in the respective line in column 5 of Table I, application no. 3, preferably the coding region thereof, or a homolog or a fragment thereof, and being depicted in the same respective line as said B0518, or a functional equivalent or a homolog thereof as shown in column 8 of Table I, application no. 3, preferably the coding region thereof, particularly a homolog or functional equivalent as shown in column 8 of Table I B, application no. 3, and being depicted in the same respective line as said B0518, and preferably the activity is increased non-targeted, or
[24386] (b) a polypeptide comprising a polypeptide, a consensus sequence or at least a polypeptide motif as shown in the respective line in column 5 of Table II or in column 8 of Table IV, application no. 3, respectively, and being depicted in the same respective line as said B0518, or a functional equivalent or a homolog thereof as depicted in column 8 of Table II, application no. 3, preferably a homolog or functional equivalent as depicted in column 8 of Table II B, application no. 3, and being depicted in the same respective line as said B0518, and preferably the activity is increased non-targeted.

[24387] Accordingly, in one embodiment, the molecule which activity is to be increased in the process of the invention is the gene product with an activity as a “b0518-protein”, preferably it is the molecule of section (a) or (b) of this paragraph.

[24388] In particular, it was observed that in plants, especially in Arabidopsis thaliana, increasing or generating the activity of a gene product non-targeted with the activity of a “b0518-protein”, preferably being encoded by a gene comprising the nucleic acid sequence SEQ ID NO. 35936, preferably the coding region thereof, conferred the production of or the increase in homoserine compared with the wild type control.

[24389] The nucleic acid sequence of B0593 from Escherichia coli, e.g. as shown in the respective line in column 5 of Table I, application no. 3, has been published in B. And the activity of the gene product thereof is the activity of isochorismate synthase.

[24390] Accordingly, in one embodiment, the process of the present invention for producing aspartate in a non-human organism, like a microorganism or a plant or a part thereof, comprises increasing or generating the activity of a gene product with the activity of a gene product conferring the activity of “isochorismate synthase”, especially from Escherichia coli or its functional equivalent or its homolog, e.g. the increase of
[24391] (a) a gene product of a gene comprising the nucleic acid molecule as shown in the respective line in column 5 of Table I, application no. 3, preferably the coding region thereof, or a homolog or a fragment thereof, and being depicted in the same respective line as said B0593, or a functional equivalent or a homolog thereof as shown in column 8 of Table I, application no. 3, preferably the coding region thereof, particularly a homolog or functional equivalent as shown in column 8 of Table I B, application no. 3, and being depicted in the same respective line as said B0593, and preferably the activity is increased plastidic, or
[24392] (b) a polypeptide comprising a polypeptide, a consensus sequence or at least a polypeptide motif as shown in the respective line in column 5 of Table II or in column 8 of Table IV, application no. 3, respectively, and being depicted in the same respective line as said B0593, or a functional equivalent or a homolog thereof as depicted in column 8 of Table II, application no. 3, preferably a homolog or functional equivalent as depicted in column 8 of Table II B, application no. 3, and being depicted in the same respective line as said B0593, and preferably the activity is increased plastidic.

[24393] Accordingly, in one embodiment, the molecule which activity is to be increased in the process of the invention is the gene product with an activity as a “isochorismate synthase”, preferably it is the molecule of section (a) or (b) of this paragraph.

[24394] In particular, it was observed that in plants, especially in Arabidopsis thaliana, increasing or generating the activity of a gene product plastidic with the activity of a “isochorismate synthase”, preferably being encoded by a gene comprising the nucleic acid sequence SEQ ID NO. 35967, preferably the coding region thereof, conferred the production of or the increase in aspartate compared with the wild type control.

[24395] The nucleic acid sequence of B0593 from Escherichia coli, e.g. as shown in the respective line in column 5 of Table I, application no. 3, has been published in B. And the activity of the gene product thereof is the activity of isochorismate synthase.

[24396] Accordingly, in one embodiment, the process of the present invention for producing phenylalanine in a non-human organism, like a microorganism or a plant or a part thereof, comprises increasing or generating the activity of a gene product with the activity of a gene product conferring the activity of “isochorismate synthase”, especially from Escherichia coli or its functional equivalent or its homolog, e.g. the increase of
[24397] (a) a gene product of a gene comprising the nucleic acid molecule as shown in the respective line in column 5 of Table I, application no. 3, preferably the coding region thereof, or a homolog or a fragment thereof, and being depicted in the same respective line as said B0593, or a functional equivalent or a homolog thereof as shown in column 8 of Table I, application no. 3, preferably the coding region thereof, particularly a homolog or functional equivalent as shown in column 8 of Table I B, application no. 3, and being depicted in the same respective line as said B0593, and preferably the activity is increased plastidic, or
[24398] (b) a polypeptide comprising a polypeptide, a consensus sequence or at least a polypeptide motif as shown in the respective line in column 5 of Table II or in column 8 of Table IV, application no. 3, respectively, and being depicted in the same respective line as said B0593, or a functional equivalent or a homolog thereof as depicted in column 8 of Table II, application no. 3, preferably a homolog or functional equivalent as depicted in column 8 of Table II B, application no. 3, and being depicted in the same respective line as said B0593, and preferably the activity is increased plastidic.

[24399] Accordingly, in one embodiment, the molecule which activity is to be increased in the process of the invention is the gene product with an activity as a “isochorismate synthase”, preferably it is the molecule of section (a) or (b) of this paragraph.

[24400] In particular, it was observed that in plants, especially in Arabidopsis thaliana, increasing or generating the activity of a gene product plastidic with the activity of a “isochorismate synthase”, preferably being encoded by a gene comprising the nucleic acid sequence SEQ ID NO. 35967, preferably the coding region thereof, conferred the production of or the increase in phenylalanine compared with the wild type control.

[24401] The nucleic acid sequence of B0593 from Escherichia coli, e.g. as shown in the respective line in column 5 of Table I, application no. 3, has been published in B. And the activity of the gene product thereof is the activity of isochorismate synthase.

[24402] Accordingly, in one embodiment, the process of the present invention for producing serine in a non-human organism, like a microorganism or a plant or a part thereof, comprises increasing or generating the activity of a gene product with the activity of a gene product conferring the activity of “isochorismate synthase”, especially from Escherichia coli or its functional equivalent or its homolog, e.g. the increase of
[24403] (a) a gene product of a gene comprising the nucleic acid molecule as shown in the respective line in column 5 of Table I, application no. 3, preferably the coding region thereof, or a homolog or a fragment thereof, and being depicted in the same respective line as said B0593, or a functional equivalent or a homolog thereof as shown in column 8 of Table I, application no. 3, preferably the coding region thereof, particularly a homolog or functional equivalent as shown in column 8 of Table I B, application no. 3, and being depicted in the same respective line as said B0593, and preferably the activity is increased plastidic, or
[24404] (b) a polypeptide comprising a polypeptide, a consensus sequence or at least a polypeptide motif as shown in the respective line in column 5 of Table II or in column 8 of Table IV, application no. 3, respectively, and being depicted in the same respective line as said B0593, or a functional equivalent or a homolog thereof as depicted in column 8 of Table II, application no. 3, preferably a homolog or functional equivalent as depicted in column 8 of Table II B, application no. 3, and being depicted in the same respective line as said B0593, and preferably the activity is increased plastidic.

[24405] Accordingly, in one embodiment, the molecule which activity is to be increased in the process of the invention is the gene product with an activity as a “isochorismate synthase”, preferably it is the molecule of section (a) or (b) of this paragraph.

[24406] In particular, it was observed that in plants, especially in Arabidopsis thaliana, increasing or generating the activity of a gene product plastidic with the activity of a “isochorismate synthase”, preferably being encoded by a gene comprising the nucleic acid sequence SEQ ID NO. 35967, preferably the coding region thereof, conferred the production of or the increase in serine compared with the wild type control.

[24407] The nucleic acid sequence of B0593 from Escherichia coli, e.g. as shown in the respective line in column 5 of Table I, application no. 3, has been published in B. And the activity of the gene product thereof is the activity of isochorismate synthase.

[24408] Accordingly, in one embodiment, the process of the present invention for producing tyrosine in a non-human organism, like a microorganism or a plant or a part thereof, comprises increasing or generating the activity of a gene product with the activity of a gene product conferring the activity of “isochorismate synthase”, especially from Escherichia coli or its functional equivalent or its homolog, e.g. the increase of
[24409] (a) a gene product of a gene comprising the nucleic acid molecule as shown in the respective line in column 5 of Table I, application no. 3, preferably the coding region thereof, or a homolog or a fragment thereof, and being depicted in the same respective line as said B0593, or a functional equivalent or a homolog thereof as shown in column 8 of Table I, application no. 3, preferably the coding region thereof, particularly a homolog or functional equivalent as shown in column 8 of Table I B, application no. 3, and being depicted in the same respective line as said B0593, and preferably the activity is increased plastidic, or
[24410] (b) a polypeptide comprising a polypeptide, a consensus sequence or at least a polypeptide motif as shown in the respective line in column 5 of Table II or in column 8 of Table IV, application no. 3, respectively, and being depicted in the same respective line as said B0593, or a functional equivalent or a homolog thereof as depicted in column 8 of Table II, application no. 3, preferably a homolog or functional equivalent as depicted in column 8 of Table II B, application no. 3, and being depicted in the same respective line as said B0593, and preferably the activity is increased plastidic.

[24411] Accordingly, in one embodiment, the molecule which activity is to be increased in the process of the invention is the gene product with an activity as a “isochorismate synthase”, preferably it is the molecule of section (a) or (b) of this paragraph.

[24412] In particular, it was observed that in plants, especially in Arabidopsis thaliana, increasing or generating the activity of a gene product plastidic with the activity of a “isochorismate synthase”, preferably being encoded by a gene comprising the nucleic acid sequence SEQ ID NO. 35967, preferably the coding region thereof, conferred the production of or the increase in tyrosine compared with the wild type control.

[24413] The nucleic acid sequence of B0593 from Escherichia coli, e.g. as shown in the respective line in column 5 of Table I, application no. 3, has been published in B. And the activity of the gene product thereof is the activity of isochorismate synthase.

[24414] Accordingly, in one embodiment, the process of the present invention for producing 3,4-dihydroxyphenylalanine (dopa) in a non-human organism, like a microorganism or a plant or a part thereof, comprises increasing or generating the activity of a gene product with the activity of a gene product conferring the activity of “isochorismate synthase”, especially from Escherichia coli or its functional equivalent or its homolog, e.g. the increase of
[24415] (a) a gene product of a gene comprising the nucleic acid molecule as shown in the respective line in column 5 of Table I, application no. 3, preferably the coding region thereof, or a homolog or a fragment thereof, and being depicted in the same respective line as said B0593, or a functional equivalent or a homolog thereof as shown in column 8 of Table I, application no. 3, preferably the coding region thereof, particularly a homolog or functional equivalent as shown in column 8 of Table I B, application no. 3, and being depicted in the same respective line as said B0593, and preferably the activity is increased plastidic, or
[24416] (b) a polypeptide comprising a polypeptide, a consensus sequence or at least a polypeptide motif as shown in the respective line in column 5 of Table II or in column 8 of Table IV, application no. 3, respectively, and being depicted in the same respective line as said B0593, or a functional equivalent or a homolog thereof as depicted in column 8 of Table II, application no. 3, preferably a homolog or functional equivalent as depicted in column 8 of Table II B, application no. 3, and being depicted in the same respective line as said B0593, and preferably the activity is increased plastidic.

[24417] Accordingly, in one embodiment, the molecule which activity is to be increased in the process of the invention is the gene product with an activity as a “isochorismate synthase”, preferably it is the molecule of section (a) or (b) of this paragraph.

[24418] In particular, it was observed that in plants, especially in Arabidopsis thaliana, increasing or generating the activity of a gene product plastidic with the activity of a “isochorismate synthase”, preferably being encoded by a gene comprising the nucleic acid sequence SEQ ID NO. 35967, preferably the coding region thereof, conferred the production of or the increase in 3,4-dihydroxyphenylalanine (dopa) compared with the wild type control.

[24419] The nucleic acid sequence of B0593 from Escherichia coli, e.g. as shown in the respective line in column 5 of Table I, application no. 3, has been published in B. And the activity of the gene product thereof is the activity of isochorismate synthase.

[24420] Accordingly, in one embodiment, the process of the present invention for producing 5-oxoproline in a non-human organism, like a microorganism or a plant or a part thereof, comprises increasing or generating the activity of a gene product with the activity of a gene product conferring the activity of “isochorismate synthase”, especially from Escherichia coli or its functional equivalent or its homolog, e.g. the increase of
[24421] (a) a gene product of a gene comprising the nucleic acid molecule as shown in the respective line in column 5 of Table I, application no. 3, preferably the coding region thereof, or a homolog or a fragment thereof, and being depicted in the same respective line as said B0593, or a functional equivalent or a homolog thereof as shown in column 8 of Table I, application no. 3, preferably the coding region thereof, particularly a homolog or functional equivalent as shown in column 8 of Table I B, application no. 3, and being depicted in the same respective line as said B0593, and preferably the activity is increased plastidic, or
[24422] (b) a polypeptide comprising a polypeptide, a consensus sequence or at least a polypeptide motif as shown in the respective line in column 5 of Table II or in column 8 of Table IV, application no. 3, respectively, and being depicted in the same respective line as said B0593, or a functional equivalent or a homolog thereof as depicted in column 8 of Table II, application no. 3, preferably a homolog or functional equivalent as depicted in column 8 of Table II B, application no. 3, and being depicted in the same respective line as said B0593, and preferably the activity is increased plastidic.

[24423] Accordingly, in one embodiment, the molecule which activity is to be increased in the process of the invention is the gene product with an activity as a “isochorismate synthase”, preferably it is the molecule of section (a) or (b) of this paragraph.

[24424] In particular, it was observed that in plants, especially in Arabidopsis thaliana, increasing or generating the activity of a gene product plastidic with the activity of a “isochorismate synthase”, preferably being encoded by a gene comprising the nucleic acid sequence SEQ ID NO. 35967, preferably the coding region thereof, conferred the production of or the increase in 5-oxoproline compared with the wild type control.

[24425] The nucleic acid sequence of B0752 from Escherichia coli, e.g. as shown in the respective line in column 5 of Table I, application no. 3, has been published in B. And the activity of the gene product thereof is the activity of zinc transporter.

[24426] Accordingly, in one embodiment, the process of the present invention for producing tyrosine in a non-human organism, like a microorganism or a plant or a part thereof, comprises increasing or generating the activity of a gene product with the activity of a gene product conferring the activity of “zinc transporter”, especially from Escherichia coli or its functional equivalent or its homolog, e.g. the increase of
[24427] (a) a gene product of a gene comprising the nucleic acid molecule as shown in the respective line in column 5 of Table I, application no. 3, preferably the coding region thereof, or a homolog or a fragment thereof, and being depicted in the same respective line as said B0752, or a functional equivalent or a homolog thereof as shown in column 8 of Table I, application no. 3, preferably the coding region thereof, particularly a homolog or functional equivalent as shown in column 8 of Table I B, application no. 3, and being depicted in the same respective line as said B0752, and preferably the activity is increased non-targeted, or
[24428] (b) a polypeptide comprising a polypeptide, a consensus sequence or at least a polypeptide motif as shown in the respective line in column 5 of Table II or in column 8 of Table IV, application no. 3, respectively, and being depicted in the same respective line as said B0752, or a functional equivalent or a homolog thereof as depicted in column 8 of Table II, application no. 3, preferably a homolog or functional equivalent as depicted in column 8 of Table II B, application no. 3, and being depicted in the same respective line as said B0752, and preferably the activity is increased non-targeted.

[24429] Accordingly, in one embodiment, the molecule which activity is to be increased in the process of the invention is the gene product with an activity as a “zinc transporter”, preferably it is the molecule of section (a) or (b) of this paragraph.

[24430] In particular, it was observed that in plants, especially in Arabidopsis thaliana, increasing or generating the activity of a gene product non-targeted with the activity of a “zinc transporter”, preferably being encoded by a gene comprising the nucleic acid sequence SEQ ID NO. 36114, preferably the coding region thereof, conferred the production of or the increase in tyrosine compared with the wild type control.

[24431] The nucleic acid sequence of B0754 from Escherichia coli, e.g. as shown in the respective line in column 5 of Table I, application no. 3, has been published in B. And the activity of the gene product thereof is the activity of 3-deoxy-D-arabinoheptulosonate-7-phosphatesynthase.

[24432] Accordingly, in one embodiment, the process of the present invention for producing tyrosine in a non-human organism, like a microorganism or a plant or a part thereof, comprises increasing or generating the activity of a gene product with the activity of a gene product conferring the activity of “3-deoxy-D-arabinoheptulosonate-7-phosphatesynthase”, especially from Escherichia coli or its functional equivalent or its homolog, e.g. the increase of
[24433] (a) a gene product of a gene comprising the nucleic acid molecule as shown in the respective line in column 5 of Table I, application no. 3, preferably the coding region thereof, or a homolog or a fragment thereof, and being depicted in the same respective line as said B0754, or a functional equivalent or a homolog thereof as shown in column 8 of Table I, application no. 3, preferably the coding region thereof, particularly a homolog or functional equivalent as shown in column 8 of Table I B, application no. 3, and being depicted in the same respective line as said B0754, and preferably the activity is increased plastidic, or
[24434] (b) a polypeptide comprising a polypeptide, a consensus sequence or at least a polypeptide motif as shown in the respective line in column 5 of Table II or in column 8 of Table IV, application no. 3, respectively, and being depicted in the same respective line as said B0754, or a functional equivalent or a homolog thereof as depicted in column 8 of Table II, application no. 3, preferably a homolog or functional equivalent as depicted in column 8 of Table II B, application no. 3, and being depicted in the same respective line as said B0754, and preferably the activity is increased plastidic.

[24435] Accordingly, in one embodiment, the molecule which activity is to be increased in the process of the invention is the gene product with an activity as a “3-deoxy-D-arabinoheptulosonate-7-phosphatesynthase”, preferably it is the molecule of section (a) or (b) of this paragraph.

[24436] In particular, it was observed that in plants, especially in Arabidopsis thaliana, increasing or generating the activity of a gene product plastidic with the activity of a “3-deoxy-D-arabinoheptulosonate-7-phosphatesynthase”, preferably being encoded by a gene comprising the nucleic acid sequence SEQ ID NO. 75286, preferably the coding region thereof, conferred the production of or the increase in tyrosine compared with the wild type control.

[24437] The nucleic acid sequence of B0801 from Escherichia coli, e.g. as shown in the respective line in column 5 of Table I, application no. 3, has been published in B. And the activity of the gene product thereof is the activity of b0801-protein.

[24438] Accordingly, in one embodiment, the process of the present invention for producing tyrosine in a non-human organism, like a microorganism or a plant or a part thereof, comprises increasing or generating the activity of a gene product with the activity of a gene product conferring the activity of “b0801-protein”, especially from Escherichia coli or its functional equivalent or its homolog, e.g. the increase of
[24439] (a) a gene product of a gene comprising the nucleic acid molecule as shown in the respective line in column 5 of Table I, application no. 3, preferably the coding region thereof, or a homolog or a fragment thereof, and being depicted in the same respective line as said B0801, or a functional equivalent or a homolog thereof as shown in column 8 of Table I, application no. 3, preferably the coding region thereof, particularly a homolog or functional equivalent as shown in column 8 of Table I B, application no. 3, and being depicted in the same respective line as said B0801, and preferably the activity is increased non-targeted, or
[24440] (b) a polypeptide comprising a polypeptide, a consensus sequence or at least a polypeptide motif as shown in the respective line in column 5 of Table II or in column 8 of Table IV, application no. 3, respectively, and being depicted in the same respective line as said B0801, or a functional equivalent or a homolog thereof as depicted in column 8 of Table II, application no. 3, preferably a homolog or functional equivalent as depicted in column 8 of Table II B, application no. 3, and being depicted in the same respective line as said B0801, and preferably the activity is increased non-targeted.

[24441] Accordingly, in one embodiment, the molecule which activity is to be increased in the process of the invention is the gene product with an activity as a “b0801-protein”, preferably it is the molecule of section (a) or (b) of this paragraph.

[24442] In particular, it was observed that in plants, especially in Arabidopsis thaliana, increasing or generating the activity of a gene product non-targeted with the activity of a “b0801-protein”, preferably being encoded by a gene comprising the nucleic acid sequence SEQ ID NO. 75807, preferably the coding region thereof, conferred the production of or the increase in tyrosine compared with the wild type control.

[24443] The nucleic acid sequence of B0828 from Escherichia coli, e.g. as shown in the respective line in column 5 of Table I, application no. 3, has been published in B. And the activity of the gene product thereof is the activity of asparaginase.

[24444] Accordingly, in one embodiment, the process of the present invention for producing alanine in a non-human organism, like a microorganism or a plant or a part thereof, comprises increasing or generating the activity of a gene product with the activity of a gene product conferring the activity of “asparaginase”, especially from Escherichia coli or its functional equivalent or its homolog, e.g. the increase of
[24445] (a) a gene product of a gene comprising the nucleic acid molecule as shown in the respective line in column 5 of Table I, application no. 3, preferably the coding region thereof, or a homolog or a fragment thereof, and being depicted in the same respective line as said B0828, or a functional equivalent or a homolog thereof as shown in column 8 of Table I, application no. 3, preferably the coding region thereof, particularly a homolog or functional equivalent as shown in column 8 of Table I B, application no. 3, and being depicted in the same respective line as said B0828, and preferably the activity is increased non-targeted, or
[24446] (b) a polypeptide comprising a polypeptide, a consensus sequence or at least a polypeptide motif as shown in the respective line in column 5 of Table II or in column 8 of Table IV, application no. 3, respectively, and being depicted in the same respective line as said B0828, or a functional equivalent or a homolog thereof as depicted in column 8 of Table II, application no. 3, preferably a homolog or functional equivalent as depicted in column 8 of Table II B, application no. 3, and being depicted in the same respective line as said B0828, and preferably the activity is increased non-targeted.

[24447] Accordingly, in one embodiment, the molecule which activity is to be increased in the process of the invention is the gene product with an activity as a “asparaginase”, preferably it is the molecule of section (a) or (b) of this paragraph.

[24448] In particular, it was observed that in plants, especially in Arabidopsis thaliana, increasing or generating the activity of a gene product non-targeted with the activity of a “asparaginase”, preferably being encoded by a gene comprising the nucleic acid sequence SEQ ID NO. 36299, preferably the coding region thereof, conferred the production of or the increase in alanine compared with the wild type control.

[24449] The nucleic acid sequence of B0841 from Escherichia coli, e.g. as shown in the respective line in column 5 of Table I, application no. 3, has been published in B. And the activity of the gene product thereof is the activity of b0841-protein.

[24450] Accordingly, in one embodiment, the process of the present invention for producing glycine in a non-human organism, like a microorganism or a plant or a part thereof, comprises increasing or generating the activity of a gene product with the activity of a gene product conferring the activity of “b0841-protein”, especially from Escherichia coli or its functional equivalent or its homolog, e.g. the increase of
[24451] (a) a gene product of a gene comprising the nucleic acid molecule as shown in the respective line in column 5 of Table I, application no. 3, preferably the coding region thereof, or a homolog or a fragment thereof, and being depicted in the same respective line as said B0841, or a functional equivalent or a homolog thereof as shown in column 8 of Table I, application no. 3, preferably the coding region thereof, particularly a homolog or functional equivalent as shown in column 8 of Table I B, application no. 3, and being depicted in the same respective line as said B0841, and preferably the activity is increased non-targeted, or
[24452] (b) a polypeptide comprising a polypeptide, a consensus sequence or at least a polypeptide motif as shown in the respective line in column 5 of Table II or in column 8 of Table IV, application no. 3, respectively, and being depicted in the same respective line as said B0841, or a functional equivalent or a homolog thereof as depicted in column 8 of Table II, application no. 3, preferably a homolog or functional equivalent as depicted in column 8 of Table II B, application no. 3, and being depicted in the same respective line as said B0841, and preferably the activity is increased non-targeted.

[24453] Accordingly, in one embodiment, the molecule which activity is to be increased in the process of the invention is the gene product with an activity as a “b0841-protein”, preferably it is the molecule of section (a) or (b) of this paragraph.

[24454] In particular, it was observed that in plants, especially in Arabidopsis thaliana, increasing or generating the activity of a gene product non-targeted with the activity of a “b0841-protein”, preferably being encoded by a gene comprising the nucleic acid sequence SEQ ID NO. 75873, preferably the coding region thereof, conferred the production of or the increase in glycine compared with the wild type control.

[24455] The nucleic acid sequence of B0841 from Escherichia coli, e.g. as shown in the respective line in column 5 of Table I, application no. 3, has been published in B. And the activity of the gene product thereof is the activity of b0841-protein.

[24456] Accordingly, in one embodiment, the process of the present invention for producing homoserine in a non-human organism, like a microorganism or a plant or a part thereof, comprises increasing or generating the activity of a gene product with the activity of a gene product conferring the activity of “b0841-protein”, especially from Escherichia coli or its functional equivalent or its homolog, e.g. the increase of
[24457] (a) a gene product of a gene comprising the nucleic acid molecule as shown in the respective line in column 5 of Table I, application no. 3, preferably the coding region thereof, or a homolog or a fragment thereof, and being depicted in the same respective line as said B0841, or a functional equivalent or a homolog thereof as shown in column 8 of Table I, application no. 3, preferably the coding region thereof, particularly a homolog or functional equivalent as shown in column 8 of Table I B, application no. 3, and being depicted in the same respective line as said B0841, and preferably the activity is increased non-targeted, or
[24458] (b) a polypeptide comprising a polypeptide, a consensus sequence or at least a polypeptide motif as shown in the respective line in column 5 of Table II or in column 8 of Table IV, application no. 3, respectively, and being depicted in the same respective line as said B0841, or a functional equivalent or a homolog thereof as depicted in column 8 of Table II, application no. 3, preferably a homolog or functional equivalent as depicted in column 8 of Table II B, application no. 3, and being depicted in the same respective line as said B0841, and preferably the activity is increased non-targeted.

[24459] Accordingly, in one embodiment, the molecule which activity is to be increased in the process of the invention is the gene product with an activity as a “b0841-protein”, preferably it is the molecule of section (a) or (b) of this paragraph.

[24460] In particular, it was observed that in plants, especially in Arabidopsis thaliana, increasing or generating the activity of a gene product non-targeted with the activity of a “b0841-protein”, preferably being encoded by a gene comprising the nucleic acid sequence SEQ ID NO. 75873, preferably the coding region thereof, conferred the production of or the increase in homoserine compared with the wild type control.

[24461] The nucleic acid sequence of B0898 from Escherichia coli, e.g. as shown in the respective line in column 5 of Table I, application no. 3, has been published in B. And the activity of the gene product thereof is the activity of major facilitator superfamily transporter protein.

[24462] Accordingly, in one embodiment, the process of the present invention for producing phenylalanine in a non-human organism, like a microorganism or a plant or a part thereof, comprises increasing or generating the activity of a gene product with the activity of a gene product conferring the activity of “major facilitator superfamily transporter protein”, especially from Escherichia coli or its functional equivalent or its homolog, e.g. the increase of
[24463] (a) a gene product of a gene comprising the nucleic acid molecule as shown in the respective line in column 5 of Table I, application no. 3, preferably the coding region thereof, or a homolog or a fragment thereof, and being depicted in the same respective line as said B0898, or a functional equivalent or a homolog thereof as shown in column 8 of Table I, application no. 3, preferably the coding region thereof, particularly a homolog or functional equivalent as shown in column 8 of Table I B, application no. 3, and being depicted in the same respective line as said B0898, and preferably the activity is increased non-targeted, or
[24464] (b) a polypeptide comprising a polypeptide, a consensus sequence or at least a polypeptide motif as shown in the respective line in column 5 of Table II or in column 8 of Table IV, application no. 3, respectively, and being depicted in the same respective line as said B0898, or a functional equivalent or a homolog thereof as depicted in column 8 of Table II, application no. 3, preferably a homolog or functional equivalent as depicted in column 8 of Table II B, application no. 3, and being depicted in the same respective line as said B0898, and preferably the activity is increased non-targeted.

[24465] Accordingly, in one embodiment, the molecule which activity is to be increased in the process of the invention is the gene product with an activity as a “major facilitator superfamily transporter protein”, preferably it is the molecule of section (a) or (b) of this paragraph.

[24466] In particular, it was observed that in plants, especially in Arabidopsis thaliana, increasing or generating the activity of a gene product non-targeted with the activity of a “major facilitator superfamily transporter protein”, preferably being encoded by a gene comprising the nucleic acid sequence SEQ ID NO. 7917, preferably the coding region thereof, conferred the production of or the increase in phenylalanine compared with the wild type control.

[24467] The nucleic acid sequence of B0898 from Escherichia coli, e.g. as shown in the respective line in column 5 of Table I, application no. 3, has been published in B. And the activity of the gene product thereof is the activity of major facilitator superfamily transporter protein.

[24468] Accordingly, in one embodiment, the process of the present invention for producing serine in a non-human organism, like a microorganism or a plant or a part thereof, comprises increasing or generating the activity of a gene product with the activity of a gene product conferring the activity of “major facilitator superfamily transporter protein”, especially from Escherichia coli or its functional equivalent or its homolog, e.g. the increase of
[24469] (a) a gene product of a gene comprising the nucleic acid molecule as shown in the respective line in column 5 of Table I, application no. 3, preferably the coding region thereof, or a homolog or a fragment thereof, and being depicted in the same respective line as said B0898, or a functional equivalent or a homolog thereof as shown in column 8 of Table I, application no. 3, preferably the coding region thereof, particularly a homolog or functional equivalent as shown in column 8 of Table I B, application no. 3, and being depicted in the same respective line as said B0898, and preferably the activity is increased non-targeted, or
[24470] (b) a polypeptide comprising a polypeptide, a consensus sequence or at least a polypeptide motif as shown in the respective line in column 5 of Table II or in column 8 of Table IV, application no. 3, respectively, and being depicted in the same respective line as said B0898, or a functional equivalent or a homolog thereof as depicted in column 8 of Table II, application no. 3, preferably a homolog or functional equivalent as depicted in column 8 of Table II B, application no. 3, and being depicted in the same respective line as said B0898, and preferably the activity is increased non-targeted.

[24471] Accordingly, in one embodiment, the molecule which activity is to be increased in the process of the invention is the gene product with an activity as a “major facilitator superfamily transporter protein”, preferably it is the molecule of section (a) or (b) of this paragraph.

[24472] In particular, it was observed that in plants, especially in Arabidopsis thaliana, increasing or generating the activity of a gene product non-targeted with the activity of a “major facilitator superfamily transporter protein”, preferably being encoded by a gene comprising the nucleic acid sequence SEQ ID NO. 7917, preferably the coding region thereof, conferred the production of or the increase in serine compared with the wild type control.

[24473] The nucleic acid sequence of B0898 from Escherichia coli, e.g. as shown in the respective line in column 5 of Table I, application no. 3, has been published in B. And the activity of the gene product thereof is the activity of major facilitator superfamily transporter protein.

[24474] Accordingly, in one embodiment, the process of the present invention for producing tyrosine in a non-human organism, like a microorganism or a plant or a part thereof, comprises increasing or generating the activity of a gene product with the activity of a gene product conferring the activity of “major facilitator superfamily transporter protein”, especially from Escherichia coli or its functional equivalent or its homolog, e.g. the increase of
[24475] (a) a gene product of a gene comprising the nucleic acid molecule as shown in the respective line in column 5 of Table I, application no. 3, preferably the coding region thereof, or a homolog or a fragment thereof, and being depicted in the same respective line as said B0898, or a functional equivalent or a homolog thereof as shown in column 8 of Table I, application no. 3, preferably the coding region thereof, particularly a homolog or functional equivalent as shown in column 8 of Table I B, application no. 3, and being depicted in the same respective line as said B0898, and preferably the activity is increased non-targeted, or
[24476] (b) a polypeptide comprising a polypeptide, a consensus sequence or at least a polypeptide motif as shown in the respective line in column 5 of Table II or in column 8 of Table IV, application no. 3, respectively, and being depicted in the same respective line as said B0898, or a functional equivalent or a homolog thereof as depicted in column 8 of Table II, application no. 3, preferably a homolog or functional equivalent as depicted in column 8 of Table II B, application no. 3, and being depicted in the same respective line as said B0898, and preferably the activity is increased non-targeted.

[24477] Accordingly, in one embodiment, the molecule which activity is to be increased in the process of the invention is the gene product with an activity as a “major facilitator superfamily transporter protein”, preferably it is the molecule of section (a) or (b) of this paragraph.

[24478] In particular, it was observed that in plants, especially in Arabidopsis thaliana, increasing or generating the activity of a gene product non-targeted with the activity of a “major facilitator superfamily transporter protein”, preferably being encoded by a gene comprising the nucleic acid sequence SEQ ID NO. 7917, preferably the coding region thereof, conferred the production of or the increase in tyrosine compared with the wild type control.

[24479] The nucleic acid sequence of B0898 from Escherichia coli, e.g. as shown in the respective line in column 5 of Table I, application no. 3, has been published in B. And the activity of the gene product thereof is the activity of major facilitator superfamily transporter protein.

[24480] Accordingly, in one embodiment, the process of the present invention for producing 5-oxoproline in a non-human organism, like a microorganism or a plant or a part thereof, comprises increasing or generating the activity of a gene product with the activity of a gene product conferring the activity of “major facilitator superfamily transporter protein”, especially from Escherichia coli or its functional equivalent or its homolog, e.g. the increase of
[24481] (a) a gene product of a gene comprising the nucleic acid molecule as shown in the respective line in column 5 of Table I, application no. 3, preferably the coding region thereof, or a homolog or a fragment thereof, and being depicted in the same respective line as said B0898, or a functional equivalent or a homolog thereof as shown in column 8 of Table I, application no. 3, preferably the coding region thereof, particularly a homolog or functional equivalent as shown in column 8 of Table I B, application no. 3, and being depicted in the same respective line as said B0898, and preferably the activity is increased non-targeted, or
[24482] (b) a polypeptide comprising a polypeptide, a consensus sequence or at least a polypeptide motif as shown in the respective line in column 5 of Table II or in column 8 of Table IV, application no. 3, respectively, and being depicted in the same respective line as said B0898, or a functional equivalent or a homolog thereof as depicted in column 8 of Table II, application no. 3, preferably a homolog or functional equivalent as depicted in column 8 of Table II B, application no. 3, and being depicted in the same respective line as said B0898, and preferably the activity is increased non-targeted.

[24483] Accordingly, in one embodiment, the molecule which activity is to be increased in the process of the invention is the gene product with an activity as a “major facilitator superfamily transporter protein”, preferably it is the molecule of section (a) or (b) of this paragraph.

[24484] In particular, it was observed that in plants, especially in Arabidopsis thaliana, increasing or generating the activity of a gene product non-targeted with the activity of a “major facilitator superfamily transporter protein”, preferably being encoded by a gene comprising the nucleic acid sequence SEQ ID NO. 7917, preferably the coding region thereof, conferred the production of or the increase in 5-oxoproline compared with the wild type control.

[24485] The nucleic acid sequence of B0917 from Escherichia coli, e.g. as shown in the respective line in column 5 of Table I, application no. 3, has been published in B. And the activity of the gene product thereof is the activity of b0917-protein.

[24486] Accordingly, in one embodiment, the process of the present invention for producing citrulline in a non-human organism, like a microorganism or a plant or a part thereof, comprises increasing or generating the activity of a gene product with the activity of a gene product conferring the activity of “b0917-protein”, especially from Escherichia coli or its functional equivalent or its homolog, e.g. the increase of
[24487] (a) a gene product of a gene comprising the nucleic acid molecule as shown in the respective line in column 5 of Table I, application no. 3, preferably the coding region thereof, or a homolog or a fragment thereof, and being depicted in the same respective line as said B0917, or a functional equivalent or a homolog thereof as shown in column 8 of Table I, application no. 3, preferably the coding region thereof, particularly a homolog or functional equivalent as shown in column 8 of Table I B, application no. 3, and being depicted in the same respective line as said B0917, and preferably the activity is increased non-targeted, or
[24488] (b) a polypeptide comprising a polypeptide, a consensus sequence or at least a polypeptide motif as shown in the respective line in column 5 of Table II or in column 8 of Table IV, application no. 3, respectively, and being depicted in the same respective line as said B0917, or a functional equivalent or a homolog thereof as depicted in column 8 of Table II, application no. 3, preferably a homolog or functional equivalent as depicted in column 8 of Table II B, application no. 3, and being depicted in the same respective line as said B0917, and preferably the activity is increased non-targeted.

[24489] Accordingly, in one embodiment, the molecule which activity is to be increased in the process of the invention is the gene product with an activity as a “b0917-protein”, preferably it is the molecule of section (a) or (b) of this paragraph.

[24490] In particular, it was observed that in plants, especially in Arabidopsis thaliana, increasing or generating the activity of a gene product non-targeted with the activity of a “b0917-protein”, preferably being encoded by a gene comprising the nucleic acid sequence SEQ ID NO. 75915, preferably the coding region thereof, conferred the production of or the increase in citrulline compared with the wild type control.

[24491] The nucleic acid sequence of B0917 from Escherichia coli, e.g. as shown in the respective line in column 5 of Table I, application no. 3, has been published in B. And the activity of the gene product thereof is the activity of b0917-protein.

[24492] Accordingly, in one embodiment, the process of the present invention for producing glycine in a non-human organism, like a microorganism or a plant or a part thereof, comprises increasing or generating the activity of a gene product with the activity of a gene product conferring the activity of “b0917-protein”, especially from Escherichia coli or its functional equivalent or its homolog, e.g. the increase of
[24493] (a) a gene product of a gene comprising the nucleic acid molecule as shown in the respective line in column 5 of Table I, application no. 3, preferably the coding region thereof, or a homolog or a fragment thereof, and being depicted in the same respective line as said B0917, or a functional equivalent or a homolog thereof as shown in column 8 of Table I, application no. 3, preferably the coding region thereof, particularly a homolog or functional equivalent as shown in column 8 of Table I B, application no. 3, and being depicted in the same respective line as said B0917, and preferably the activity is increased non-targeted, or
[24494] (b) a polypeptide comprising a polypeptide, a consensus sequence or at least a polypeptide motif as shown in the respective line in column 5 of Table II or in column 8 of Table IV, application no. 3, respectively, and being depicted in the same respective line as said B0917, or a functional equivalent or a homolog thereof as depicted in column 8 of Table II, application no. 3, preferably a homolog or functional equivalent as depicted in column 8 of Table II B, application no. 3, and being depicted in the same respective line as said B0917, and preferably the activity is increased non-targeted.

[24495] Accordingly, in one embodiment, the molecule which activity is to be increased in the process of the invention is the gene product with an activity as a “b0917-protein”, preferably it is the molecule of section (a) or (b) of this paragraph.

[24496] In particular, it was observed that in plants, especially in Arabidopsis thaliana, increasing or generating the activity of a gene product non-targeted with the activity of a “b0917-protein”, preferably being encoded by a gene comprising the nucleic acid sequence SEQ ID NO. 75915, preferably the coding region thereof, conferred the production of or the increase in glycine compared with the wild type control.

[24497] The nucleic acid sequence of B0917 from Escherichia coli, e.g. as shown in the respective line in column 5 of Table I, application no. 3, has been published in B. And the activity of the gene product thereof is the activity of b0917-protein.

[24498] Accordingly, in one embodiment, the process of the present invention for producing phenylalanine in a non-human organism, like a microorganism or a plant or a part thereof, comprises increasing or generating the activity of a gene product with the activity of a gene product conferring the activity of “b0917-protein”, especially from Escherichia coli or its functional equivalent or its homolog, e.g. the increase of
[24499] (a) a gene product of a gene comprising the nucleic acid molecule as shown in the respective line in column 5 of Table I, application no. 3, preferably the coding region thereof, or a homolog or a fragment thereof, and being depicted in the same respective line as said B0917, or a functional equivalent or a homolog thereof as shown in column 8 of Table I, application no. 3, preferably the coding region thereof, particularly a homolog or functional equivalent as shown in column 8 of Table I B, application no. 3, and being depicted in the same respective line as said B0917, and preferably the activity is increased non-targeted, or
[24500] (b) a polypeptide comprising a polypeptide, a consensus sequence or at least a polypeptide motif as shown in the respective line in column 5 of Table II or in column 8 of Table IV, application no. 3, respectively, and being depicted in the same respective line as said B0917, or a functional equivalent or a homolog thereof as depicted in column 8 of Table II, application no. 3, preferably a homolog or functional equivalent as depicted in column 8 of Table II B, application no. 3, and being depicted in the same respective line as said B0917, and preferably the activity is increased non-targeted.

[24501] Accordingly, in one embodiment, the molecule which activity is to be increased in the process of the invention is the gene product with an activity as a “b0917-protein”, preferably it is the molecule of section (a) or (b) of this paragraph.

[24502] In particular, it was observed that in plants, especially in Arabidopsis thaliana, increasing or generating the activity of a gene product non-targeted with the activity of a “b0917-protein”, preferably being encoded by a gene comprising the nucleic acid sequence SEQ ID NO. 75915, preferably the coding region thereof, conferred the production of or the increase in phenylalanine compared with the wild type control.

[24503] The nucleic acid sequence of B0917 from Escherichia coli, e.g. as shown in the respective line in column 5 of Table I, application no. 3, has been published in B. And the activity of the gene product thereof is the activity of b0917-protein.

[24504] Accordingly, in one embodiment, the process of the present invention for producing 5-oxoproline in a non-human organism, like a microorganism or a plant or a part thereof, comprises increasing or generating the activity of a gene product with the activity of a gene product conferring the activity of “b0917-protein”, especially from Escherichia coli or its functional equivalent or its homolog, e.g. the increase of
[24505] (a) a gene product of a gene comprising the nucleic acid molecule as shown in the respective line in column 5 of Table I, application no. 3, preferably the coding region thereof, or a homolog or a fragment thereof, and being depicted in the same respective line as said B0917, or a functional equivalent or a homolog thereof as shown in column 8 of Table I, application no. 3, preferably the coding region thereof, particularly a homolog or functional equivalent as shown in column 8 of Table I B, application no. 3, and being depicted in the same respective line as said B0917, and preferably the activity is increased non-targeted, or
[24506] (b) a polypeptide comprising a polypeptide, a consensus sequence or at least a polypeptide motif as shown in the respective line in column 5 of Table II or in column 8 of Table IV, application no. 3, respectively, and being depicted in the same respective line as said B0917, or a functional equivalent or a homolog thereof as depicted in column 8 of Table II, application no. 3, preferably a homolog or functional equivalent as depicted in column 8 of Table II B, application no. 3, and being depicted in the same respective line as said B0917, and preferably the activity is increased non-targeted.

[24507] Accordingly, in one embodiment, the molecule which activity is to be increased in the process of the invention is the gene product with an activity as a “b0917-protein”, preferably it is the molecule of section (a) or (b) of this paragraph.

[24508] In particular, it was observed that in plants, especially in Arabidopsis thaliana, increasing or generating the activity of a gene product non-targeted with the activity of a “b0917-protein”, preferably being encoded by a gene comprising the nucleic acid sequence SEQ ID NO. 75915, preferably the coding region thereof, conferred the production of or the increase in 5-oxoproline compared with the wild type control.

[24509] The nucleic acid sequence of B0963 from Escherichia coli, e.g. as shown in the respective line in column 5 of Table I, application no. 3, has been published in B. And the activity of the gene product thereof is the activity of methylglyoxal synthase.

[24510] Accordingly, in one embodiment, the process of the present invention for producing alanine in a non-human organism, like a microorganism or a plant or a part thereof, comprises increasing or generating the activity of a gene product with the activity of a gene product conferring the activity of “methylglyoxal synthase”, especially from Escherichia coli or its functional equivalent or its homolog, e.g. the increase of
[24511] (a) a gene product of a gene comprising the nucleic acid molecule as shown in the respective line in column 5 of Table I, application no. 3, preferably the coding region thereof, or a homolog or a fragment thereof, and being depicted in the same respective line as said B0963, or a functional equivalent or a homolog thereof as shown in column 8 of Table I, application no. 3, preferably the coding region thereof, particularly a homolog or functional equivalent as shown in column 8 of Table I B, application no. 3, and being depicted in the same respective line as said B0963, and preferably the activity is increased non-targeted, or
[24512] (b) a polypeptide comprising a polypeptide, a consensus sequence or at least a polypeptide motif as shown in the respective line in column 5 of Table II or in column 8 of Table IV, application no. 3, respectively, and being depicted in the same respective line as said B0963, or a functional equivalent or a homolog thereof as depicted in column 8 of Table II, application no. 3, preferably a homolog or functional equivalent as depicted in column 8 of Table II B, application no. 3, and being depicted in the same respective line as said B0963, and preferably the activity is increased non-targeted.

[24513] Accordingly, in one embodiment, the molecule which activity is to be increased in the process of the invention is the gene product with an activity as a “methylglyoxal synthase”, preferably it is the molecule of section (a) or (b) of this paragraph.

[24514] In particular, it was observed that in plants, especially in Arabidopsis thaliana, increasing or generating the activity of a gene product non-targeted with the activity of a “methylglyoxal synthase”, preferably being encoded by a gene comprising the nucleic acid sequence SEQ ID NO. 36670, preferably the coding region thereof, conferred the production of or the increase in alanine compared with the wild type control.

[24515] The nucleic acid sequence of B0963 from Escherichia coli, e.g. as shown in the respective line in column 5 of Table I, application no. 3, has been published in B. And the activity of the gene product thereof is the activity of methylglyoxal synthase.

[24516] Accordingly, in one embodiment, the process of the present invention for producing phenylalanine in a non-human organism, like a microorganism or a plant or a part thereof, comprises increasing or generating the activity of a gene product with the activity of a gene product conferring the activity of “methylglyoxal synthase”, especially from Escherichia coli or its functional equivalent or its homolog, e.g. the increase of
[24517] (a) a gene product of a gene comprising the nucleic acid molecule as shown in the respective line in column 5 of Table I, application no. 3, preferably the coding region thereof, or a homolog or a fragment thereof, and being depicted in the same respective line as said B0963, or a functional equivalent or a homolog thereof as shown in column 8 of Table I, application no. 3, preferably the coding region thereof, particularly a homolog or functional equivalent as shown in column 8 of Table I B, application no. 3, and being depicted in the same respective line as said B0963, and preferably the activity is increased non-targeted, or
[24518] (b) a polypeptide comprising a polypeptide, a consensus sequence or at least a polypeptide motif as shown in the respective line in column 5 of Table II or in column 8 of Table IV, application no. 3, respectively, and being depicted in the same respective line as said B0963, or a functional equivalent or a homolog thereof as depicted in column 8 of Table II, application no. 3, preferably a homolog or functional equivalent as depicted in column 8 of Table II B, application no. 3, and being depicted in the same respective line as said B0963, and preferably the activity is increased non-targeted.

[24519] Accordingly, in one embodiment, the molecule which activity is to be increased in the process of the invention is the gene product with an activity as a “methylglyoxal synthase”, preferably it is the molecule of section (a) or (b) of this paragraph.

[24520] In particular, it was observed that in plants, especially in Arabidopsis thaliana, increasing or generating the activity of a gene product non-targeted with the activity of a “methylglyoxal synthase”, preferably being encoded by a gene comprising the nucleic acid sequence SEQ ID NO. 36670, preferably the coding region thereof, conferred the production of or the increase in phenylalanine compared with the wild type control.

[24521] The nucleic acid sequence of B0963 from Escherichia coli, e.g. as shown in the respective line in column 5 of Table I, application no. 3, has been published in B. And the activity of the gene product thereof is the activity of methylglyoxal synthase.

[24522] Accordingly, in one embodiment, the process of the present invention for producing tyrosine in a non-human organism, like a microorganism or a plant or a part thereof, comprises increasing or generating the activity of a gene product with the activity of a gene product conferring the activity of “methylglyoxal synthase”, especially from Escherichia coli or its functional equivalent or its homolog, e.g. the increase of
[24523] (a) a gene product of a gene comprising the nucleic acid molecule as shown in the respective line in column 5 of Table I, application no. 3, preferably the coding region thereof, or a homolog or a fragment thereof, and being depicted in the same respective line as said B0963, or a functional equivalent or a homolog thereof as shown in column 8 of Table I, application no. 3, preferably the coding region thereof, particularly a homolog or functional equivalent as shown in column 8 of Table I B, application no. 3, and being depicted in the same respective line as said B0963, and preferably the activity is increased non-targeted, or
[24524] (b) a polypeptide comprising a polypeptide, a consensus sequence or at least a polypeptide motif as shown in the respective line in column 5 of Table II or in column 8 of Table IV, application no. 3, respectively, and being depicted in the same respective line as said B0963, or a functional equivalent or a homolog thereof as depicted in column 8 of Table II, application no. 3, preferably a homolog or functional equivalent as depicted in column 8 of Table II B, application no. 3, and being depicted in the same respective line as said B0963, and preferably the activity is increased non-targeted.

[24525] Accordingly, in one embodiment, the molecule which activity is to be increased in the process of the invention is the gene product with an activity as a “methylglyoxal synthase”, preferably it is the molecule of section (a) or (b) of this paragraph.

[24526] In particular, it was observed that in plants, especially in Arabidopsis thaliana, increasing or generating the activity of a gene product non-targeted with the activity of a “methylglyoxal synthase”, preferably being encoded by a gene comprising the nucleic acid sequence SEQ ID NO. 36670, preferably the coding region thereof, conferred the production of or the increase in tyrosine compared with the wild type control.

[24527] The nucleic acid sequence of B0980 from Escherichia coli, e.g. as shown in the respective line in column 5 of Table I, application no. 3, has been published in B. And the activity of the gene product thereof is the activity of phosphoanhydride phosphorylase.

[24528] Accordingly, in one embodiment, the process of the present invention for producing phenylalanine in a non-human organism, like a microorganism or a plant or a part thereof, comprises increasing or generating the activity of a gene product with the activity of a gene product conferring the activity of “phosphoanhydride phosphorylase”, especially from Escherichia coli or its functional equivalent or its homolog, e.g. the increase of
[24529] (a) a gene product of a gene comprising the nucleic acid molecule as shown in the respective line in column 5 of Table I, application no. 3, preferably the coding region thereof, or a homolog or a fragment thereof, and being depicted in the same respective line as said B0980, or a functional equivalent or a homolog thereof as shown in column 8 of Table I, application no. 3, preferably the coding region thereof, particularly a homolog or functional equivalent as shown in column 8 of Table I B, application no. 3, and being depicted in the same respective line as said B0980, and preferably the activity is increased non-targeted, or
[24530] (b) a polypeptide comprising a polypeptide, a consensus sequence or at least a polypeptide motif as shown in the respective line in column 5 of Table II or in column 8 of Table IV, application no. 3, respectively, and being depicted in the same respective line as said B0980, or a functional equivalent or a homolog thereof as depicted in column 8 of Table II, application no. 3, preferably a homolog or functional equivalent as depicted in column 8 of Table II B, application no. 3, and being depicted in the same respective line as said B0980, and preferably the activity is increased non-targeted.

[24531] Accordingly, in one embodiment, the molecule which activity is to be increased in the process of the invention is the gene product with an activity as a “phosphoanhydride phosphorylase”, preferably it is the molecule of section (a) or (b) of this paragraph.

[24532] In particular, it was observed that in plants, especially in Arabidopsis thaliana, increasing or generating the activity of a gene product non-targeted with the activity of a “phosphoanhydride phosphorylase”, preferably being encoded by a gene comprising the nucleic acid sequence SEQ ID NO. 36809, preferably the coding region thereof, conferred the production of or the increase in phenylalanine compared with the wild type control.

[24533] The nucleic acid sequence of B1003 from Escherichia coli, e.g. as shown in the respective line in column 5 of Table I, application no. 3, has been published in B. And the activity of the gene product thereof is the activity of b1003-protein.

[24534] Accordingly, in one embodiment, the process of the present invention for producing alanine in a non-human organism, like a microorganism or a plant or a part thereof, comprises increasing or generating the activity of a gene product with the activity of a gene product conferring the activity of “b1003-protein”, especially from Escherichia coli or its functional equivalent or its homolog, e.g. the increase of
[24535] (a) a gene product of a gene comprising the nucleic acid molecule as shown in the respective line in column 5 of Table I, application no. 3, preferably the coding region thereof, or a homolog or a fragment thereof, and being depicted in the same respective line as said B1003, or a functional equivalent or a homolog thereof as shown in column 8 of Table I, application no. 3, preferably the coding region thereof, particularly a homolog or functional equivalent as shown in column 8 of Table I B, application no. 3, and being depicted in the same respective line as said B1003, and preferably the activity is increased non-targeted, or
[24536] (b) a polypeptide comprising a polypeptide, a consensus sequence or at least a polypeptide motif as shown in the respective line in column 5 of Table II or in column 8 of Table IV, application no. 3, respectively, and being depicted in the same respective line as said B1003, or a functional equivalent or a homolog thereof as depicted in column 8 of Table II, application no. 3, preferably a homolog or functional equivalent as depicted in column 8 of Table II B, application no. 3, and being depicted in the same respective line as said B1003, and preferably the activity is increased non-targeted.

[24537] Accordingly, in one embodiment, the molecule which activity is to be increased in the process of the invention is the gene product with an activity as a “b1003-protein”, preferably it is the molecule of section (a) or (b) of this paragraph.

[24538] In particular, it was observed that in plants, especially in Arabidopsis thaliana, increasing or generating the activity of a gene product non-targeted with the activity of a “b1003-protein”, preferably being encoded by a gene comprising the nucleic acid sequence SEQ ID NO. 7941, preferably the coding region thereof, conferred the production of or the increase in alanine compared with the wild type control.

[24539] The nucleic acid sequence of B1003 from Escherichia coli, e.g. as shown in the respective line in column 5 of Table I, application no. 3, has been published in B. And the activity of the gene product thereof is the activity of b1003-protein.

[24540] Accordingly, in one embodiment, the process of the present invention for producing aspartate in a non-human organism, like a microorganism or a plant or a part thereof, comprises increasing or generating the activity of a gene product with the activity of a gene product conferring the activity of “b1003-protein”, especially from Escherichia coli or its functional equivalent or its homolog, e.g. the increase of
[24541] (a) a gene product of a gene comprising the nucleic acid molecule as shown in the respective line in column 5 of Table I, application no. 3, preferably the coding region thereof, or a homolog or a fragment thereof, and being depicted in the same respective line as said B1003, or a functional equivalent or a homolog thereof as shown in column 8 of Table I, application no. 3, preferably the coding region thereof, particularly a homolog or functional equivalent as shown in column 8 of Table I B, application no. 3, and being depicted in the same respective line as said B1003, and preferably the activity is increased non-targeted, or
[24542] (b) a polypeptide comprising a polypeptide, a consensus sequence or at least a polypeptide motif as shown in the respective line in column 5 of Table II or in column 8 of Table IV, application no. 3, respectively, and being depicted in the same respective line as said B1003, or a functional equivalent or a homolog thereof as depicted in column 8 of Table II, application no. 3, preferably a homolog or functional equivalent as depicted in column 8 of Table II B, application no. 3, and being depicted in the same respective line as said B1003, and preferably the activity is increased non-targeted.

[24543] Accordingly, in one embodiment, the molecule which activity is to be increased in the process of the invention is the gene product with an activity as a “b1003-protein”, preferably it is the molecule of section (a) or (b) of this paragraph.

[24544] In particular, it was observed that in plants, especially in Arabidopsis thaliana, increasing or generating the activity of a gene product non-targeted with the activity of a “b1003-protein”, preferably being encoded by a gene comprising the nucleic acid sequence SEQ ID NO. 7941, preferably the coding region thereof, conferred the production of or the increase in aspartate compared with the wild type control.

[24545] The nucleic acid sequence of B1003 from Escherichia coli, e.g. as shown in the respective line in column 5 of Table I, application no. 3, has been published in B. And the activity of the gene product thereof is the activity of b1003-protein.

[24546] Accordingly, in one embodiment, the process of the present invention for producing phenylalanine in a non-human organism, like a microorganism or a plant or a part thereof, comprises increasing or generating the activity of a gene product with the activity of a gene product conferring the activity of “b1003-protein”, especially from Escherichia coli or its functional equivalent or its homolog, e.g. the increase of
[24547] (a) a gene product of a gene comprising the nucleic acid molecule as shown in the respective line in column 5 of Table I, application no. 3, preferably the coding region thereof, or a homolog or a fragment thereof, and being depicted in the same respective line as said B1003, or a functional equivalent or a homolog thereof as shown in column 8 of Table I, application no. 3, preferably the coding region thereof, particularly a homolog or functional equivalent as shown in column 8 of Table I B, application no. 3, and being depicted in the same respective line as said B1003, and preferably the activity is increased non-targeted, or
[24548] (b) a polypeptide comprising a polypeptide, a consensus sequence or at least a polypeptide motif as shown in the respective line in column 5 of Table II or in column 8 of Table IV, application no. 3, respectively, and being depicted in the same respective line as said B1003, or a functional equivalent or a homolog thereof as depicted in column 8 of Table II, application no. 3, preferably a homolog or functional equivalent as depicted in column 8 of Table II B, application no. 3, and being depicted in the same respective line as said B1003, and preferably the activity is increased non-targeted.

[24549] Accordingly, in one embodiment, the molecule which activity is to be increased in the process of the invention is the gene product with an activity as a “b1003-protein”, preferably it is the molecule of section (a) or (b) of this paragraph.

[24550] In particular, it was observed that in plants, especially in Arabidopsis thaliana, increasing or generating the activity of a gene product non-targeted with the activity of a “b1003-protein”, preferably being encoded by a gene comprising the nucleic acid sequence SEQ ID NO. 7941, preferably the coding region thereof, conferred the production of or the increase in phenylalanine compared with the wild type control.

[24551] The nucleic acid sequence of B1003 from Escherichia coli, e.g. as shown in the respective line in column 5 of Table I, application no. 3, has been published in B. And the activity of the gene product thereof is the activity of b1003-protein.

[24552] Accordingly, in one embodiment, the process of the present invention for producing serine in a non-human organism, like a microorganism or a plant or a part thereof, comprises increasing or generating the activity of a gene product with the activity of a gene product conferring the activity of “b1003-protein”, especially from Escherichia coli or its functional equivalent or its homolog, e.g. the increase of
[24553] (a) a gene product of a gene comprising the nucleic acid molecule as shown in the respective line in column 5 of Table I, application no. 3, preferably the coding region thereof, or a homolog or a fragment thereof, and being depicted in the same respective line as said B1003, or a functional equivalent or a homolog thereof as shown in column 8 of Table I, application no. 3, preferably the coding region thereof, particularly a homolog or functional equivalent as shown in column 8 of Table I B, application no. 3, and being depicted in the same respective line as said B1003, and preferably the activity is increased non-targeted, or
[24554] (b) a polypeptide comprising a polypeptide, a consensus sequence or at least a polypeptide motif as shown in the respective line in column 5 of Table II or in column 8 of Table IV, application no. 3, respectively, and being depicted in the same respective line as said B1003, or a functional equivalent or a homolog thereof as depicted in column 8 of Table II, application no. 3, preferably a homolog or functional equivalent as depicted in column 8 of Table II B, application no. 3, and being depicted in the same respective line as said B1003, and preferably the activity is increased non-targeted.

[24555] Accordingly, in one embodiment, the molecule which activity is to be increased in the process of the invention is the gene product with an activity as a “b1003-protein”, preferably it is the molecule of section (a) or (b) of this paragraph.

[24556] In particular, it was observed that in plants, especially in Arabidopsis thaliana, increasing or generating the activity of a gene product non-targeted with the activity of a “b1003-protein”, preferably being encoded by a gene comprising the nucleic acid sequence SEQ ID NO. 7941, preferably the coding region thereof, conferred the production of or the increase in serine compared with the wild type control.

[24557] The nucleic acid sequence of B1003 from Escherichia coli, e.g. as shown in the respective line in column 5 of Table I, application no. 3, has been published in B. And the activity of the gene product thereof is the activity of b1003-protein.

[24558] Accordingly, in one embodiment, the process of the present invention for producing tyrosine in a non-human organism, like a microorganism or a plant or a part thereof, comprises increasing or generating the activity of a gene product with the activity of a gene product conferring the activity of “b1003-protein”, especially from Escherichia coli or its functional equivalent or its homolog, e.g. the increase of
[24559] (a) a gene product of a gene comprising the nucleic acid molecule as shown in the respective line in column 5 of Table I, application no. 3, preferably the coding region thereof, or a homolog or a fragment thereof, and being depicted in the same respective line as said B1003, or a functional equivalent or a homolog thereof as shown in column 8 of Table I, application no. 3, preferably the coding region thereof, particularly a homolog or functional equivalent as shown in column 8 of Table I B, application no. 3, and being depicted in the same respective line as said B1003, and preferably the activity is increased non-targeted, or
[24560] (b) a polypeptide comprising a polypeptide, a consensus sequence or at least a polypeptide motif as shown in the respective line in column 5 of Table II or in column 8 of Table IV, application no. 3, respectively, and being depicted in the same respective line as said B1003, or a functional equivalent or a homolog thereof as depicted in column 8 of Table II, application no. 3, preferably a homolog or functional equivalent as depicted in column 8 of Table II B, application no. 3, and being depicted in the same respective line as said B1003, and preferably the activity is increased non-targeted.

[24561] Accordingly, in one embodiment, the molecule which activity is to be increased in the process of the invention is the gene product with an activity as a “b1003-protein”, preferably it is the molecule of section (a) or (b) of this paragraph.

[24562] In particular, it was observed that in plants, especially in Arabidopsis thaliana, increasing or generating the activity of a gene product non-targeted with the activity of a “b1003-protein”, preferably being encoded by a gene comprising the nucleic acid sequence SEQ ID NO. 7941, preferably the coding region thereof, conferred the production of or the increase in tyrosine compared with the wild type control.

[24563] The nucleic acid sequence of B1003 from Escherichia coli, e.g. as shown in the respective line in column 5 of Table I, application no. 3, has been published in B. And the activity of the gene product thereof is the activity of b1003-protein.

[24564] Accordingly, in one embodiment, the process of the present invention for producing 3,4-dihydroxyphenylalanine (dopa) in a non-human organism, like a microorganism or a plant or a part thereof, comprises increasing or generating the activity of a gene product with the activity of a gene product conferring the activity of “b1003-protein”, especially from Escherichia coli or its functional equivalent or its homolog, e.g. the increase of
[24565] (a) a gene product of a gene comprising the nucleic acid molecule as shown in the respective line in column 5 of Table I, application no. 3, preferably the coding region thereof, or a homolog or a fragment thereof, and being depicted in the same respective line as said B1003, or a functional equivalent or a homolog thereof as shown in column 8 of Table I, application no. 3, preferably the coding region thereof, particularly a homolog or functional equivalent as shown in column 8 of Table I B, application no. 3, and being depicted in the same respective line as said B1003, and preferably the activity is increased non-targeted, or
[24566] (b) a polypeptide comprising a polypeptide, a consensus sequence or at least a polypeptide motif as shown in the respective line in column 5 of Table II or in column 8 of Table IV, application no. 3, respectively, and being depicted in the same respective line as said B1003, or a functional equivalent or a homolog thereof as depicted in column 8 of Table II, application no. 3, preferably a homolog or functional equivalent as depicted in column 8 of Table II B, application no. 3, and being depicted in the same respective line as said B1003, and preferably the activity is increased non-targeted.

[24567] Accordingly, in one embodiment, the molecule which activity is to be increased in the process of the invention is the gene product with an activity as a “b1003-protein”, preferably it is the molecule of section (a) or (b) of this paragraph.

[24568] In particular, it was observed that in plants, especially in Arabidopsis thaliana, increasing or generating the activity of a gene product non-targeted with the activity of a “b1003-protein”, preferably being encoded by a gene comprising the nucleic acid sequence SEQ ID NO. 7941, preferably the coding region thereof, conferred the production of or the increase in 3,4-dihydroxyphenylalanine (dopa) compared with the wild type control.

[24569] The nucleic acid sequence of B1003 from Escherichia coli, e.g. as shown in the respective line in column 5 of Table I, application no. 3, has been published in B. And the activity of the gene product thereof is the activity of b1003-protein.

[24570] Accordingly, in one embodiment, the process of the present invention for producing 5-oxoproline in a non-human organism, like a microorganism or a plant or a part thereof, comprises increasing or generating the activity of a gene product with the activity of a gene product conferring the activity of “b1003-protein”, especially from Escherichia coli or its functional equivalent or its homolog, e.g. the increase of
[24571] (a) a gene product of a gene comprising the nucleic acid molecule as shown in the respective line in column 5 of Table I, application no. 3, preferably the coding region thereof, or a homolog or a fragment thereof, and being depicted in the same respective line as said B1003, or a functional equivalent or a homolog thereof as shown in column 8 of Table I, application no. 3, preferably the coding region thereof, particularly a homolog or functional equivalent as shown in column 8 of Table I B, application no. 3, and being depicted in the same respective line as said B1003, and preferably the activity is increased non-targeted, or
[24572] (b) a polypeptide comprising a polypeptide, a consensus sequence or at least a polypeptide motif as shown in the respective line in column 5 of Table II or in column 8 of Table IV, application no. 3, respectively, and being depicted in the same respective line as said B1003, or a functional equivalent or a homolog thereof as depicted in column 8 of Table II, application no. 3, preferably a homolog or functional equivalent as depicted in column 8 of Table II B, application no. 3, and being depicted in the same respective line as said B1003, and preferably the activity is increased non-targeted.

[24573] Accordingly, in one embodiment, the molecule which activity is to be increased in the process of the invention is the gene product with an activity as a “b1003-protein”, preferably it is the molecule of section (a) or (b) of this paragraph.

[24574] In particular, it was observed that in plants, especially in Arabidopsis thaliana, increasing or generating the activity of a gene product non-targeted with the activity of a “b1003-protein”, preferably being encoded by a gene comprising the nucleic acid sequence SEQ ID NO. 7941, preferably the coding region thereof, conferred the production of or the increase in 5-oxoproline compared with the wild type control.

[24575] The nucleic acid sequence of B1023 from Escherichia coli, e.g. as shown in the respective line in column 5 of Table I, application no. 3, has been published in B. And the activity of the gene product thereof is the activity of lipoprotein precursor.

[24576] Accordingly, in one embodiment, the process of the present invention for producing citrulline in a non-human organism, like a microorganism or a plant or a part thereof, comprises increasing or generating the activity of a gene product with the activity of a gene product conferring the activity of “lipoprotein precursor”, especially from Escherichia coli or its functional equivalent or its homolog, e.g. the increase of
[24577] (a) a gene product of a gene comprising the nucleic acid molecule as shown in the respective line in column 5 of Table I, application no. 3, preferably the coding region thereof, or a homolog or a fragment thereof, and being depicted in the same respective line as said B1023, or a functional equivalent or a homolog thereof as shown in column 8 of Table I, application no. 3, preferably the coding region thereof, particularly a homolog or functional equivalent as shown in column 8 of Table I B, application no. 3, and being depicted in the same respective line as said B1023, and preferably the activity is increased non-targeted, or
[24578] (b) a polypeptide comprising a polypeptide, a consensus sequence or at least a polypeptide motif as shown in the respective line in column 5 of Table II or in column 8 of Table IV, application no. 3, respectively, and being depicted in the same respective line as said B1023, or a functional equivalent or a homolog thereof as depicted in column 8 of Table II, application no. 3, preferably a homolog or functional equivalent as depicted in column 8 of Table II B, application no. 3, and being depicted in the same respective line as said B1023, and preferably the activity is increased non-targeted.

[24579] Accordingly, in one embodiment, the molecule which activity is to be increased in the process of the invention is the gene product with an activity as a “lipoprotein precursor”, preferably it is the molecule of section (a) or (b) of this paragraph.

[24580] In particular, it was observed that in plants, especially in Arabidopsis thaliana, increasing or generating the activity of a gene product non-targeted with the activity of a “lipoprotein precursor”, preferably being encoded by a gene comprising the nucleic acid sequence SEQ ID NO. 36880, preferably the coding region thereof, conferred the production of or the increase in citrulline compared with the wild type control.

[24581] The nucleic acid sequence of B1023 from Escherichia coli, e.g. as shown in the respective line in column 5 of Table I, application no. 3, has been published in B. And the activity of the gene product thereof is the activity of lipoprotein precursor.

[24582] Accordingly, in one embodiment, the process of the present invention for producing 5-oxoproline in a non-human organism, like a microorganism or a plant or a part thereof, comprises increasing or generating the activity of a gene product with the activity of a gene product conferring the activity of “lipoprotein precursor”, especially from Escherichia coli or its functional equivalent or its homolog, e.g. the increase of
[24583] (a) a gene product of a gene comprising the nucleic acid molecule as shown in the respective line in column 5 of Table I, application no. 3, preferably the coding region thereof, or a homolog or a fragment thereof, and being depicted in the same respective line as said B1023, or a functional equivalent or a homolog thereof as shown in column 8 of Table I, application no. 3, preferably the coding region thereof, particularly a homolog or functional equivalent as shown in column 8 of Table I B, application no. 3, and being depicted in the same respective line as said B1023, and preferably the activity is increased non-targeted, or
[24584] (b) a polypeptide comprising a polypeptide, a consensus sequence or at least a polypeptide motif as shown in the respective line in column 5 of Table II or in column 8 of Table IV, application no. 3, respectively, and being depicted in the same respective line as said B1023, or a functional equivalent or a homolog thereof as depicted in column 8 of Table II, application no. 3, preferably a homolog or functional equivalent as depicted in column 8 of Table II B, application no. 3, and being depicted in the same respective line as said B1023, and preferably the activity is increased non-targeted.

[24585] Accordingly, in one embodiment, the molecule which activity is to be increased in the process of the invention is the gene product with an activity as a “lipoprotein precursor”, preferably it is the molecule of section (a) or (b) of this paragraph.

[24586] In particular, it was observed that in plants, especially in Arabidopsis thaliana, increasing or generating the activity of a gene product non-targeted with the activity of a “lipoprotein precursor”, preferably being encoded by a gene comprising the nucleic acid sequence SEQ ID NO. 36880, preferably the coding region thereof, conferred the production of or the increase in 5-oxoproline compared with the wild type control.

[24587] The nucleic acid sequence of B1024 from Escherichia coli, e.g. as shown in the respective line in column 5 of Table I, application no. 3, has been published in B. And the activity of the gene product thereof is the activity of b1024-protein.

[24588] Accordingly, in one embodiment, the process of the present invention for producing aspartate in a non-human organism, like a microorganism or a plant or a part thereof, comprises increasing or generating the activity of a gene product with the activity of a gene product conferring the activity of “b1024-protein”, especially from Escherichia coli or its functional equivalent or its homolog, e.g. the increase of
[24589] (a) a gene product of a gene comprising the nucleic acid molecule as shown in the respective line in column 5 of Table I, application no. 3, preferably the coding region thereof, or a homolog or a fragment thereof, and being depicted in the same respective line as said B1024, or a functional equivalent or a homolog thereof as shown in column 8 of Table I, application no. 3, preferably the coding region thereof, particularly a homolog or functional equivalent as shown in column 8 of Table I B, application no. 3, and being depicted in the same respective line as said B1024, and preferably the activity is increased non-targeted, or
[24590] (b) a polypeptide comprising a polypeptide, a consensus sequence or at least a polypeptide motif as shown in the respective line in column 5 of Table II or in column 8 of Table IV, application no. 3, respectively, and being depicted in the same respective line as said B1024, or a functional equivalent or a homolog thereof as depicted in column 8 of Table II, application no. 3, preferably a homolog or functional equivalent as depicted in column 8 of Table II B, application no. 3, and being depicted in the same respective line as said B1024, and preferably the activity is increased non-targeted.

[24591] Accordingly, in one embodiment, the molecule which activity is to be increased in the process of the invention is the gene product with an activity as a “b1024-protein”, preferably it is the molecule of section (a) or (b) of this paragraph.

[24592] In particular, it was observed that in plants, especially in Arabidopsis thaliana, increasing or generating the activity of a gene product non-targeted with the activity of a “b1024-protein”, preferably being encoded by a gene comprising the nucleic acid sequence SEQ ID NO. 36907, preferably the coding region thereof, conferred the production of or the increase in aspartate compared with the wild type control.

[24593] The nucleic acid sequence of B1065 from Escherichia coli, e.g. as shown in the respective line in column 5 of Table I, application no. 3, has been published in B. And the activity of the gene product thereof is the activity of multidrug resistance protein.

[24594] Accordingly, in one embodiment, the process of the present invention for producing aspartate in a non-human organism, like a microorganism or a plant or a part thereof, comprises increasing or generating the activity of a gene product with the activity of a gene product conferring the activity of “multidrug resistance protein”, especially from Escherichia coli or its functional equivalent or its homolog, e.g. the increase of
[24595] (a) a gene product of a gene comprising the nucleic acid molecule as shown in the respective line in column 5 of Table I, application no. 3, preferably the coding region thereof, or a homolog or a fragment thereof, and being depicted in the same respective line as said B1065, or a functional equivalent or a homolog thereof as shown in column 8 of Table I, application no. 3, preferably the coding region thereof, particularly a homolog or functional equivalent as shown in column 8 of Table I B, application no. 3, and being depicted in the same respective line as said B1065, and preferably the activity is increased plastidic, or
[24596] (b) a polypeptide comprising a polypeptide, a consensus sequence or at least a polypeptide motif as shown in the respective line in column 5 of Table II or in column 8 of Table IV, application no. 3, respectively, and being depicted in the same respective line as said B1065, or a functional equivalent or a homolog thereof as depicted in column 8 of Table II, application no. 3, preferably a homolog or functional equivalent as depicted in column 8 of Table II B, application no. 3, and being depicted in the same respective line as said B1065, and preferably the activity is increased plastidic.

[24597] Accordingly, in one embodiment, the molecule which activity is to be increased in the process of the invention is the gene product with an activity as a “multidrug resistance protein”, preferably it is the molecule of section (a) or (b) of this paragraph.

[24598] In particular, it was observed that in plants, especially in Arabidopsis thaliana, increasing or generating the activity of a gene product plastidic with the activity of a “multidrug resistance protein”, preferably being encoded by a gene comprising the nucleic acid sequence SEQ ID NO. 76032, preferably the coding region thereof, conferred the production of or the increase in aspartate compared with the wild type control.

[24599] The nucleic acid sequence of B1065 from Escherichia coli, e.g. as shown in the respective line in column 5 of Table I, application no. 3, has been published in B. And the activity of the gene product thereof is the activity of multidrug resistance protein.

[24600] Accordingly, in one embodiment, the process of the present invention for producing tyrosine in a non-human organism, like a microorganism or a plant or a part thereof, comprises increasing or generating the activity of a gene product with the activity of a gene product conferring the activity of “multidrug resistance protein”, especially from Escherichia coli or its functional equivalent or its homolog, e.g. the increase of
[24601] (a) a gene product of a gene comprising the nucleic acid molecule as shown in the respective line in column 5 of Table I, application no. 3, preferably the coding region thereof, or a homolog or a fragment thereof, and being depicted in the same respective line as said B1065, or a functional equivalent or a homolog thereof as shown in column 8 of Table I, application no. 3, preferably the coding region thereof, particularly a homolog or functional equivalent as shown in column 8 of Table I B, application no. 3, and being depicted in the same respective line as said B1065, and preferably the activity is increased plastidic, or
[24602] (b) a polypeptide comprising a polypeptide, a consensus sequence or at least a polypeptide motif as shown in the respective line in column 5 of Table II or in column 8 of Table IV, application no. 3, respectively, and being depicted in the same respective line as said B1065, or a functional equivalent or a homolog thereof as depicted in column 8 of Table II, application no. 3, preferably a homolog or functional equivalent as depicted in column 8 of Table II B, application no. 3, and being depicted in the same respective line as said B1065, and preferably the activity is increased plastidic.

[24603] Accordingly, in one embodiment, the molecule which activity is to be increased in the process of the invention is the gene product with an activity as a “multidrug resistance protein”, preferably it is the molecule of section (a) or (b) of this paragraph.

[24604] In particular, it was observed that in plants, especially in Arabidopsis thaliana, increasing or generating the activity of a gene product plastidic with the activity of a “multidrug resistance protein”, preferably being encoded by a gene comprising the nucleic acid sequence SEQ ID NO. 76032, preferably the coding region thereof, conferred the production of or the increase in tyrosine compared with the wild type control.

[24605] The nucleic acid sequence of B1137 from Escherichia coli, e.g. as shown in the respective line in column 5 of Table I, application no. 3, has been published in B. And the activity of the gene product thereof is the activity of b1137-protein.

[24606] Accordingly, in one embodiment, the process of the present invention for producing serine in a non-human organism, like a microorganism or a plant or a part thereof, comprises increasing or generating the activity of a gene product with the activity of a gene product conferring the activity of “b1137-protein”, especially from Escherichia coli or its functional equivalent or its homolog, e.g. the increase of
[24607] (a) a gene product of a gene comprising the nucleic acid molecule as shown in the respective line in column 5 of Table I, application no. 3, preferably the coding region thereof, or a homolog or a fragment thereof, and being depicted in the same respective line as said B1137, or a functional equivalent or a homolog thereof as shown in column 8 of Table I, application no. 3, preferably the coding region thereof, particularly a homolog or functional equivalent as shown in column 8 of Table I B, application no. 3, and being depicted in the same respective line as said B1137, and preferably the activity is increased non-targeted, or
[24608] (b) a polypeptide comprising a polypeptide, a consensus sequence or at least a polypeptide motif as shown in the respective line in column 5 of Table II or in column 8 of Table IV, application no. 3, respectively, and being depicted in the same respective line as said B1137, or a functional equivalent or a homolog thereof as depicted in column 8 of Table II, application no. 3, preferably a homolog or functional equivalent as depicted in column 8 of Table II B, application no. 3, and being depicted in the same respective line as said B1137, and preferably the activity is increased non-targeted.

[24609] Accordingly, in one embodiment, the molecule which activity is to be increased in the process of the invention is the gene product with an activity as a “b1137-protein”, preferably it is the molecule of section (a) or (b) of this paragraph.

[24610] In particular, it was observed that in plants, especially in Arabidopsis thaliana, increasing or generating the activity of a gene product non-targeted with the activity of a “b1137-protein”, preferably being encoded by a gene comprising the nucleic acid sequence SEQ ID NO. 37390, preferably the coding region thereof, conferred the production of or the increase in serine compared with the wild type control.

[24611] The nucleic acid sequence of B1155 from Escherichia coli, e.g. as shown in the respective line in column 5 of Table I, application no. 3, has been published in B. And the activity of the gene product thereof is the activity of b1155-protein.

[24612] Accordingly, in one embodiment, the process of the present invention for producing phenylalanine in a non-human organism, like a microorganism or a plant or a part thereof, comprises increasing or generating the activity of a gene product with the activity of a gene product conferring the activity of “b1155-protein”, especially from Escherichia coli or its functional equivalent or its homolog, e.g. the increase of
[24613] (a) a gene product of a gene comprising the nucleic acid molecule as shown in the respective line in column 5 of Table I, application no. 3, preferably the coding region thereof, or a homolog or a fragment thereof, and being depicted in the same respective line as said B1155, or a functional equivalent or a homolog thereof as shown in column 8 of Table I, application no. 3, preferably the coding region thereof, particularly a homolog or functional equivalent as shown in column 8 of Table I B, application no. 3, and being depicted in the same respective line as said B1155, and preferably the activity is increased non-targeted, or
[24614] (b) a polypeptide comprising a polypeptide, a consensus sequence or at least a polypeptide motif as shown in the respective line in column 5 of Table II or in column 8 of Table IV, application no. 3, respectively, and being depicted in the same respective line as said B1155, or a functional equivalent or a homolog thereof as depicted in column 8 of Table II, application no. 3, preferably a homolog or functional equivalent as depicted in column 8 of Table II B, application no. 3, and being depicted in the same respective line as said B1155, and preferably the activity is increased non-targeted.

[24615] Accordingly, in one embodiment, the molecule which activity is to be increased in the process of the invention is the gene product with an activity as a “b1155-protein”, preferably it is the molecule of section (a) or (b) of this paragraph.

[24616] In particular, it was observed that in plants, especially in Arabidopsis thaliana, increasing or generating the activity of a gene product non-targeted with the activity of a “b1155-protein”, preferably being encoded by a gene comprising the nucleic acid sequence SEQ ID NO. 76068, preferably the coding region thereof, conferred the production of or the increase in phenylalanine compared with the wild type control.

[24617] The nucleic acid sequence of B1163 from Escherichia coli, e.g. as shown in the respective line in column 5 of Table I, application no. 3, has been published in B. And the activity of the gene product thereof is the activity of b1163-protein.

[24618] Accordingly, in one embodiment, the process of the present invention for producing phenylalanine in a non-human organism, like a microorganism or a plant or a part thereof, comprises increasing or generating the activity of a gene product with the activity of a gene product conferring the activity of “b1163-protein”, especially from Escherichia coli or its functional equivalent or its homolog, e.g. the increase of
[24619] (a) a gene product of a gene comprising the nucleic acid molecule as shown in the respective line in column 5 of Table I, application no. 3, preferably the coding region thereof, or a homolog or a fragment thereof, and being depicted in the same respective line as said B1163, or a functional equivalent or a homolog thereof as shown in column 8 of Table I, application no. 3, preferably the coding region thereof, particularly a homolog or functional equivalent as shown in column 8 of Table I B, application no. 3, and being depicted in the same respective line as said B1163, and preferably the activity is increased non-targeted, or
[24620] (b) a polypeptide comprising a polypeptide, a consensus sequence or at least a polypeptide motif as shown in the respective line in column 5 of Table II or in column 8 of Table IV, application no. 3, respectively, and being depicted in the same respective line as said B1163, or a functional equivalent or a homolog thereof as depicted in column 8 of Table II, application no. 3, preferably a homolog or functional equivalent as depicted in column 8 of Table II B, application no. 3, and being depicted in the same respective line as said B1163, and preferably the activity is increased non-targeted.

[24621] Accordingly, in one embodiment, the molecule which activity is to be increased in the process of the invention is the gene product with an activity as a “b1163-protein”, preferably it is the molecule of section (a) or (b) of this paragraph.

[24622] In particular, it was observed that in plants, especially in Arabidopsis thaliana, increasing or generating the activity of a gene product non-targeted with the activity of a “b1163-protein”, preferably being encoded by a gene comprising the nucleic acid sequence SEQ ID NO. 37394, preferably the coding region thereof, conferred the production of or the increase in phenylalanine compared with the wild type control.

[24623] The nucleic acid sequence of B1163 from Escherichia coli, e.g. as shown in the respective line in column 5 of Table I, application no. 3, has been published in B. And the activity of the gene product thereof is the activity of b1163-protein.

[24624] Accordingly, in one embodiment, the process of the present invention for producing tyrosine in a non-human organism, like a microorganism or a plant or a part thereof, comprises increasing or generating the activity of a gene product with the activity of a gene product conferring the activity of “b1163-protein”, especially from Escherichia coli or its functional equivalent or its homolog, e.g. the increase of
[24625] (a) a gene product of a gene comprising the nucleic acid molecule as shown in the respective line in column 5 of Table I, application no. 3, preferably the coding region thereof, or a homolog or a fragment thereof, and being depicted in the same respective line as said B1163, or a functional equivalent or a homolog thereof as shown in column 8 of Table I, application no. 3, preferably the coding region thereof, particularly a homolog or functional equivalent as shown in column 8 of Table I B, application no. 3, and being depicted in the same respective line as said B1163, and preferably the activity is increased non-targeted, or
[24626] (b) a polypeptide comprising a polypeptide, a consensus sequence or at least a polypeptide motif as shown in the respective line in column 5 of Table II or in column 8 of Table IV, application no. 3, respectively, and being depicted in the same respective line as said B1163, or a functional equivalent or a homolog thereof as depicted in column 8 of Table II, application no. 3, preferably a homolog or functional equivalent as depicted in column 8 of Table II B, application no. 3, and being depicted in the same respective line as said B1163, and preferably the activity is increased non-targeted.

[24627] Accordingly, in one embodiment, the molecule which activity is to be increased in the process of the invention is the gene product with an activity as a “b1163-protein”, preferably it is the molecule of section (a) or (b) of this paragraph.

[24628] In particular, it was observed that in plants, especially in Arabidopsis thaliana, increasing or generating the activity of a gene product non-targeted with the activity of a “b1163-protein”, preferably being encoded by a gene comprising the nucleic acid sequence SEQ ID NO. 37394, preferably the coding region thereof, conferred the production of or the increase in tyrosine compared with the wild type control.

[24629] The nucleic acid sequence of B1179 from Escherichia coli, e.g. as shown in the respective line in column 5 of Table I, application no. 3, has been published in B. And the activity of the gene product thereof is the activity of b1179-protein.

[24630] Accordingly, in one embodiment, the process of the present invention for producing citrulline in a non-human organism, like a microorganism or a plant or a part thereof, comprises increasing or generating the activity of a gene product with the activity of a gene product conferring the activity of “b1179-protein”, especially from Escherichia coli or its functional equivalent or its homolog, e.g. the increase of
[24631] (a) a gene product of a gene comprising the nucleic acid molecule as shown in the respective line in column 5 of Table I, application no. 3, preferably the coding region thereof, or a homolog or a fragment thereof, and being depicted in the same respective line as said B1179, or a functional equivalent or a homolog thereof as shown in column 8 of Table I, application no. 3, preferably the coding region thereof, particularly a homolog or functional equivalent as shown in column 8 of Table I B, application no. 3, and being depicted in the same respective line as said B1179, and preferably the activity is increased plastidic, or
[24632] (b) a polypeptide comprising a polypeptide, a consensus sequence or at least a polypeptide motif as shown in the respective line in column 5 of Table II or in column 8 of Table IV, application no. 3, respectively, and being depicted in the same respective line as said B1179, or a functional equivalent or a homolog thereof as depicted in column 8 of Table II, application no. 3, preferably a homolog or functional equivalent as depicted in column 8 of Table II B, application no. 3, and being depicted in the same respective line as said B1179, and preferably the activity is increased plastidic.

[24633] Accordingly, in one embodiment, the molecule which activity is to be increased in the process of the invention is the gene product with an activity as a “b1179-protein”, preferably it is the molecule of section (a) or (b) of this paragraph.

[24634] In particular, it was observed that in plants, especially in Arabidopsis thaliana, increasing or generating the activity of a gene product plastidic with the activity of a “b1179-protein”, preferably being encoded by a gene comprising the nucleic acid sequence SEQ ID NO. 76087, preferably the coding region thereof, conferred the production of or the increase in citrulline compared with the wild type control.

[24635] The nucleic acid sequence of B1186 from Escherichia coli K12, e.g. as shown in the respective line in column 5 of Table I, application no. 3, has been published in B. And the activity of the gene product thereof is the activity of sodium/proton antiporter.

[24636] Accordingly, in one embodiment, the process of the present invention for producing alanine in a non-human organism, like a microorganism or a plant or a part thereof, comprises increasing or generating the activity of a gene product with the activity of a gene product conferring the activity of “sodium/proton antiporter”, especially from Escherichia coli K12 or its functional equivalent or its homolog, e.g. the increase of
[24637] (a) a gene product of a gene comprising the nucleic acid molecule as shown in the respective line in column 5 of Table I, application no. 3, preferably the coding region thereof, or a homolog or a fragment thereof, and being depicted in the same respective line as said B1186, or a functional equivalent or a homolog thereof as shown in column 8 of Table I, application no. 3, preferably the coding region thereof, particularly a homolog or functional equivalent as shown in column 8 of Table I B, application no. 3, and being depicted in the same respective line as said B1186, and preferably the activity is increased non-targeted, or
[24638] (b) a polypeptide comprising a polypeptide, a consensus sequence or at least a polypeptide motif as shown in the respective line in column 5 of Table II or in column 8 of Table IV, application no. 3, respectively, and being depicted in the same respective line as said B1186, or a functional equivalent or a homolog thereof as depicted in column 8 of Table II, application no. 3, preferably a homolog or functional equivalent as depicted in column 8 of Table II B, application no. 3, and being depicted in the same respective line as said B1186, and preferably the activity is increased non-targeted.

[24639] Accordingly, in one embodiment, the molecule which activity is to be increased in the process of the invention is the gene product with an activity as a “sodium/proton antiporter”, preferably it is the molecule of section (a) or (b) of this paragraph.

[24640] In particular, it was observed that in plants, especially in Arabidopsis thaliana, increasing or generating the activity of a gene product non-targeted with the activity of a “sodium/proton antiporter”, preferably being encoded by a gene comprising the nucleic acid sequence SEQ ID NO. 37400, preferably the coding region thereof, conferred the production of or the increase in alanine compared with the wild type control.

[24641] The nucleic acid sequence of B1186 from Escherichia coli K12, e.g. as shown in the respective line in column 5 of Table I, application no. 3, has been published in B. And the activity of the gene product thereof is the activity of sodium/proton antiporter.

[24642] Accordingly, in one embodiment, the process of the present invention for producing serine in a non-human organism, like a microorganism or a plant or a part thereof, comprises increasing or generating the activity of a gene product with the activity of a gene product conferring the activity of “sodium/proton antiporter”, especially from Escherichia coli K12 or its functional equivalent or its homolog, e.g. the increase of
[24643] (a) a gene product of a gene comprising the nucleic acid molecule as shown in the respective line in column 5 of Table I, application no. 3, preferably the coding region thereof, or a homolog or a fragment thereof, and being depicted in the same respective line as said B1186, or a functional equivalent or a homolog thereof as shown in column 8 of Table I, application no. 3, preferably the coding region thereof, particularly a homolog or functional equivalent as shown in column 8 of Table I B, application no. 3, and being depicted in the same respective line as said B1186, and preferably the activity is increased non-targeted, or
[24644] (b) a polypeptide comprising a polypeptide, a consensus sequence or at least a polypeptide motif as shown in the respective line in column 5 of Table II or in column 8 of Table IV, application no. 3, respectively, and being depicted in the same respective line as said B1186, or a functional equivalent or a homolog thereof as depicted in column 8 of Table II, application no. 3, preferably a homolog or functional equivalent as depicted in column 8 of Table II B, application no. 3, and being depicted in the same respective line as said B1186, and preferably the activity is increased non-targeted.

[24645] Accordingly, in one embodiment, the molecule which activity is to be increased in the process of the invention is the gene product with an activity as a “sodium/proton antiporter”, preferably it is the molecule of section (a) or (b) of this paragraph.

[24646] In particular, it was observed that in plants, especially in Arabidopsis thaliana, increasing or generating the activity of a gene product non-targeted with the activity of a “sodium/proton antiporter”, preferably being encoded by a gene comprising the nucleic acid sequence SEQ ID NO. 37400, preferably the coding region thereof, conferred the production of or the increase in serine compared with the wild type control.

[24647] The nucleic acid sequence of B1205 from Escherichia coli, e.g. as shown in the respective line in column 5 of Table I, application no. 3, has been published in B. And the activity of the gene product thereof is the activity of b1205-protein.

[24648] Accordingly, in one embodiment, the process of the present invention for producing citrulline in a non-human organism, like a microorganism or a plant or a part thereof, comprises increasing or generating the activity of a gene product with the activity of a gene product conferring the activity of “b1205-protein”, especially from Escherichia coli or its functional equivalent or its homolog, e.g. the increase of
[24649] (a) a gene product of a gene comprising the nucleic acid molecule as shown in the respective line in column 5 of Table I, application no. 3, preferably the coding region thereof, or a homolog or a fragment thereof, and being depicted in the same respective line as said B1205, or a functional equivalent or a homolog thereof as shown in column 8 of Table I, application no. 3, preferably the coding region thereof, particularly a homolog or functional equivalent as shown in column 8 of Table I B, application no. 3, and being depicted in the same respective line as said B1205, and preferably the activity is increased non-targeted, or
[24650] (b) a polypeptide comprising a polypeptide, a consensus sequence or at least a polypeptide motif as shown in the respective line in column 5 of Table II or in column 8 of Table IV, application no. 3, respectively, and being depicted in the same respective line as said B1205, or a functional equivalent or a homolog thereof as depicted in column 8 of Table II, application no. 3, preferably a homolog or functional equivalent as depicted in column 8 of Table II B, application no. 3, and being depicted in the same respective line as said B1205, and preferably the activity is increased non-targeted.

[24651] Accordingly, in one embodiment, the molecule which activity is to be increased in the process of the invention is the gene product with an activity as a “b1205-protein”, preferably it is the molecule of section (a) or (b) of this paragraph.

[24652] In particular, it was observed that in plants, especially in Arabidopsis thaliana, increasing or generating the activity of a gene product non-targeted with the activity of a “b1205-protein”, preferably being encoded by a gene comprising the nucleic acid sequence SEQ ID NO. 76138, preferably the coding region thereof, conferred the production of or the increase in citrulline compared with the wild type control.

[24653] The nucleic acid sequence of B1229 from Escherichia coli, e.g. as shown in the respective line in column 5 of Table I, application no. 3, has been published in B. And the activity of the gene product thereof is the activity of b1229-protein.

[24654] Accordingly, in one embodiment, the process of the present invention for producing phenylalanine in a non-human organism, like a microorganism or a plant or a part thereof, comprises increasing or generating the activity of a gene product with the activity of a gene product conferring the activity of “b1229-protein”, especially from Escherichia coli or its functional equivalent or its homolog, e.g. the increase of
[24655] (a) a gene product of a gene comprising the nucleic acid molecule as shown in the respective line in column 5 of Table I, application no. 3, preferably the coding region thereof, or a homolog or a fragment thereof, and being depicted in the same respective line as said B1229, or a functional equivalent or a homolog thereof as shown in column 8 of Table I, application no. 3, preferably the coding region thereof, particularly a homolog or functional equivalent as shown in column 8 of Table I B, application no. 3, and being depicted in the same respective line as said B1229, and preferably the activity is increased non-targeted, or
[24656] (b) a polypeptide comprising a polypeptide, a consensus sequence or at least a polypeptide motif as shown in the respective line in column 5 of Table II or in column 8 of Table IV, application no. 3, respectively, and being depicted in the same respective line as said B1229, or a functional equivalent or a homolog thereof as depicted in column 8 of Table II, application no. 3, preferably a homolog or functional equivalent as depicted in column 8 of Table II B, application no. 3, and being depicted in the same respective line as said B1229, and preferably the activity is increased non-targeted.

[24657] Accordingly, in one embodiment, the molecule which activity is to be increased in the process of the invention is the gene product with an activity as a “b1229-protein”, preferably it is the molecule of section (a) or (b) of this paragraph.

[24658] In particular, it was observed that in plants, especially in Arabidopsis thaliana, increasing or generating the activity of a gene product non-targeted with the activity of a “b1229-protein”, preferably being encoded by a gene comprising the nucleic acid sequence SEQ ID NO. 76151, preferably the coding region thereof, conferred the production of or the increase in phenylalanine compared with the wild type control.

[24659] The nucleic acid sequence of B1255 from Escherichia coli, e.g. as shown in the respective line in column 5 of Table I, application no. 3, has been published in B. And the activity of the gene product thereof is the activity of membrane protein.

[24660] Accordingly, in one embodiment, the process of the present invention for producing tyrosine in a non-human organism, like a microorganism or a plant or a part thereof, comprises increasing or generating the activity of a gene product with the activity of a gene product conferring the activity of “membrane protein”, especially from Escherichia coli or its functional equivalent or its homolog, e.g. the increase of
[24661] (a) a gene product of a gene comprising the nucleic acid molecule as shown in the respective line in column 5 of Table I, application no. 3, preferably the coding region thereof, or a homolog or a fragment thereof, and being depicted in the same respective line as said B1255, or a functional equivalent or a homolog thereof as shown in column 8 of Table I, application no. 3, preferably the coding region thereof, particularly a homolog or functional equivalent as shown in column 8 of Table I B, application no. 3, and being depicted in the same respective line as said B1255, and preferably the activity is increased non-targeted, or
[24662] (b) a polypeptide comprising a polypeptide, a consensus sequence or at least a polypeptide motif as shown in the respective line in column 5 of Table II or in column 8 of Table IV, application no. 3, respectively, and being depicted in the same respective line as said B1255, or a functional equivalent or a homolog thereof as depicted in column 8 of Table II, application no. 3, preferably a homolog or functional equivalent as depicted in column 8 of Table II B, application no. 3, and being depicted in the same respective line as said B1255, and preferably the activity is increased non-targeted.

[24663] Accordingly, in one embodiment, the molecule which activity is to be increased in the process of the invention is the gene product with an activity as a “membrane protein”, preferably it is the molecule of section (a) or (b) of this paragraph.

[24664] In particular, it was observed that in plants, especially in Arabidopsis thaliana, increasing or generating the activity of a gene product non-targeted with the activity of a “membrane protein”, preferably being encoded by a gene comprising the nucleic acid sequence SEQ ID NO. 37483, preferably the coding region thereof, conferred the production of or the increase in tyrosine compared with the wild type control.

[24665] The nucleic acid sequence of B1259 from Escherichia coli, e.g. as shown in the respective line in column 5 of Table I, application no. 3, has been published in B. And the activity of the gene product thereof is the activity of b1259-protein.

[24666] Accordingly, in one embodiment, the process of the present invention for producing citrulline in a non-human organism, like a microorganism or a plant or a part thereof, comprises increasing or generating the activity of a gene product with the activity of a gene product conferring the activity of “b1259-protein”, especially from Escherichia coli or its functional equivalent or its homolog, e.g. the increase of
[24667] (a) a gene product of a gene comprising the nucleic acid molecule as shown in the respective line in column 5 of Table I, application no. 3, preferably the coding region thereof, or a homolog or a fragment thereof, and being depicted in the same respective line as said B1259, or a functional equivalent or a homolog thereof as shown in column 8 of Table I, application no. 3, preferably the coding region thereof, particularly a homolog or functional equivalent as shown in column 8 of Table I B, application no. 3, and being depicted in the same respective line as said B1259, and preferably the activity is increased non-targeted, or
[24668] (b) a polypeptide comprising a polypeptide, a consensus sequence or at least a polypeptide motif as shown in the respective line in column 5 of Table II or in column 8 of Table IV, application no. 3, respectively, and being depicted in the same respective line as said B1259, or a functional equivalent or a homolog thereof as depicted in column 8 of Table II, application no. 3, preferably a homolog or functional equivalent as depicted in column 8 of Table II B, application no. 3, and being depicted in the same respective line as said B1259, and preferably the activity is increased non-targeted.

[24669] Accordingly, in one embodiment, the molecule which activity is to be increased in the process of the invention is the gene product with an activity as a “b1259-protein”, preferably it is the molecule of section (a) or (b) of this paragraph.

[24670] In particular, it was observed that in plants, especially in Arabidopsis thaliana, increasing or generating the activity of a gene product non-targeted with the activity of a “b1259-protein”, preferably being encoded by a gene comprising the nucleic acid sequence SEQ ID NO. 37503, preferably the coding region thereof, conferred the production of or the increase in citrulline compared with the wild type control.

[24671] The nucleic acid sequence of B1259 from Escherichia coli, e.g. as shown in the respective line in column 5 of Table I, application no. 3, has been published in B. And the activity of the gene product thereof is the activity of b1259-protein.

[24672] Accordingly, in one embodiment, the process of the present invention for producing 5-oxoproline in a non-human organism, like a microorganism or a plant or a part thereof, comprises increasing or generating the activity of a gene product with the activity of a gene product conferring the activity of “b1259-protein”, especially from Escherichia coli or its functional equivalent or its homolog, e.g. the increase of
[24673] (a) a gene product of a gene comprising the nucleic acid molecule as shown in the respective line in column 5 of Table I, application no. 3, preferably the coding region thereof, or a homolog or a fragment thereof, and being depicted in the same respective line as said B1259, or a functional equivalent or a homolog thereof as shown in column 8 of Table I, application no. 3, preferably the coding region thereof, particularly a homolog or functional equivalent as shown in column 8 of Table I B, application no. 3, and being depicted in the same respective line as said B1259, and preferably the activity is increased non-targeted, or
[24674] (b) a polypeptide comprising a polypeptide, a consensus sequence or at least a polypeptide motif as shown in the respective line in column 5 of Table II or in column 8 of Table IV, application no. 3, respectively, and being depicted in the same respective line as said B1259, or a functional equivalent or a homolog thereof as depicted in column 8 of Table II, application no. 3, preferably a homolog or functional equivalent as depicted in column 8 of Table II B, application no. 3, and being depicted in the same respective line as said B1259, and preferably the activity is increased non-targeted.

[24675] Accordingly, in one embodiment, the molecule which activity is to be increased in the process of the invention is the gene product with an activity as a “b1259-protein”, preferably it is the molecule of section (a) or (b) of this paragraph.

[24676] In particular, it was observed that in plants, especially in Arabidopsis thaliana, increasing or generating the activity of a gene product non-targeted with the activity of a “b1259-protein”, preferably being encoded by a gene comprising the nucleic acid sequence SEQ ID NO. 37503, preferably the coding region thereof, conferred the production of or the increase in 5-oxoproline compared with the wild type control.

[24677] The nucleic acid sequence of B1262 from Escherichia coli, e.g. as shown in the respective line in column 5 of Table I, application no. 3, has been published in B. And the activity of the gene product thereof is the activity of tryptophan biosynthesis protein.

[24678] Accordingly, in one embodiment, the process of the present invention for producing tyrosine in a non-human organism, like a microorganism or a plant or a part thereof, comprises increasing or generating the activity of a gene product with the activity of a gene product conferring the activity of “tryptophan biosynthesis protein”, especially from Escherichia coli or its functional equivalent or its homolog, e.g. the increase of
[24679] (a) a gene product of a gene comprising the nucleic acid molecule as shown in the respective line in column 5 of Table I, application no. 3, preferably the coding region thereof, or a homolog or a fragment thereof, and being depicted in the same respective line as said B1262, or a functional equivalent or a homolog thereof as shown in column 8 of Table I, application no. 3, preferably the coding region thereof, particularly a homolog or functional equivalent as shown in column 8 of Table I B, application no. 3, and being depicted in the same respective line as said B1262, and preferably the activity is increased plastidic, or
[24680] (b) a polypeptide comprising a polypeptide, a consensus sequence or at least a polypeptide motif as shown in the respective line in column 5 of Table II or in column 8 of Table IV, application no. 3, respectively, and being depicted in the same respective line as said B1262, or a functional equivalent or a homolog thereof as depicted in column 8 of Table II, application no. 3, preferably a homolog or functional equivalent as depicted in column 8 of Table II B, application no. 3, and being depicted in the same respective line as said B1262, and preferably the activity is increased plastidic.

[24681] Accordingly, in one embodiment, the molecule which activity is to be increased in the process of the invention is the gene product with an activity as a “tryptophan biosynthesis protein”, preferably it is the molecule of section (a) or (b) of this paragraph.

[24682] In particular, it was observed that in plants, especially in Arabidopsis thaliana, increasing or generating the activity of a gene product plastidic with the activity of a “tryptophan biosynthesis protein”, preferably being encoded by a gene comprising the nucleic acid sequence SEQ ID NO. 76157, preferably the coding region thereof, conferred the production of or the increase in tyrosine compared with the wild type control.

[24683] The nucleic acid sequence of B1264 from Escherichia coli, e.g. as shown in the respective line in column 5 of Table I, application no. 3, has been published in B. And the activity of the gene product thereof is the activity of anthranilate synthase component I.

[24684] Accordingly, in one embodiment, the process of the present invention for producing phenylalanine in a non-human organism, like a microorganism or a plant or a part thereof, comprises increasing or generating the activity of a gene product with the activity of a gene product conferring the activity of “anthranilate synthase component I”, especially from Escherichia coli or its functional equivalent or its homolog, e.g. the increase of
[24685] (a) a gene product of a gene comprising the nucleic acid molecule as shown in the respective line in column 5 of Table I, application no. 3, preferably the coding region thereof, or a homolog or a fragment thereof, and being depicted in the same respective line as said B1264, or a functional equivalent or a homolog thereof as shown in column 8 of Table I, application no. 3, preferably the coding region thereof, particularly a homolog or functional equivalent as shown in column 8 of Table I B, application no. 3, and being depicted in the same respective line as said B1264, and preferably the activity is increased plastidic, or
[24686] (b) a polypeptide comprising a polypeptide, a consensus sequence or at least a polypeptide motif as shown in the respective line in column 5 of Table II or in column 8 of Table IV, application no. 3, respectively, and being depicted in the same respective line as said B1264, or a functional equivalent or a homolog thereof as depicted in column 8 of Table II, application no. 3, preferably a homolog or functional equivalent as depicted in column 8 of Table II B, application no. 3, and being depicted in the same respective line as said B1264, and preferably the activity is increased plastidic.

[24687] Accordingly, in one embodiment, the molecule which activity is to be increased in the process of the invention is the gene product with an activity as a “anthranilate synthase component I”, preferably it is the molecule of section (a) or (b) of this paragraph.

[24688] In particular, it was observed that in plants, especially in Arabidopsis thaliana, increasing or generating the activity of a gene product plastidic with the activity of a “anthranilate synthase component I”, preferably being encoded by a gene comprising the nucleic acid sequence SEQ ID NO. 76240, preferably the coding region thereof, conferred the production of or the increase in phenylalanine compared with the wild type control.

[24689] The nucleic acid sequence of B1280 from Escherichia coli, e.g. as shown in the respective line in column 5 of Table I, application no. 3, has been published in B. And the activity of the gene product thereof is the activity of b1280-protein.

[24690] Accordingly, in one embodiment, the process of the present invention for producing glycine in a non-human organism, like a microorganism or a plant or a part thereof, comprises increasing or generating the activity of a gene product with the activity of a gene product conferring the activity of “b1280-protein”, especially from Escherichia coli or its functional equivalent or its homolog, e.g. the increase of
[24691] (a) a gene product of a gene comprising the nucleic acid molecule as shown in the respective line in column 5 of Table I, application no. 3, preferably the coding region thereof, or a homolog or a fragment thereof, and being depicted in the same respective line as said B1280, or a functional equivalent or a homolog thereof as shown in column 8 of Table I, application no. 3, preferably the coding region thereof, particularly a homolog or functional equivalent as shown in column 8 of Table I B, application no. 3, and being depicted in the same respective line as said B1280, and preferably the activity is increased non-targeted, or
[24692] (b) a polypeptide comprising a polypeptide, a consensus sequence or at least a polypeptide motif as shown in the respective line in column 5 of Table II or in column 8 of Table IV, application no. 3, respectively, and being depicted in the same respective line as said B1280, or a functional equivalent or a homolog thereof as depicted in column 8 of Table II, application no. 3, preferably a homolog or functional equivalent as depicted in column 8 of Table II B, application no. 3, and being depicted in the same respective line as said B1280, and preferably the activity is increased non-targeted.

[24693] Accordingly, in one embodiment, the molecule which activity is to be increased in the process of the invention is the gene product with an activity as a “b1280-protein”, preferably it is the molecule of section (a) or (b) of this paragraph.

[24694] In particular, it was observed that in plants, especially in Arabidopsis thaliana, increasing or generating the activity of a gene product non-targeted with the activity of a “b1280-protein”, preferably being encoded by a gene comprising the nucleic acid sequence SEQ ID NO. 37573, preferably the coding region thereof, conferred the production of or the increase in glycine compared with the wild type control.

[24695] The nucleic acid sequence of B1280 from Escherichia coli, e.g. as shown in the respective line in column 5 of Table I, application no. 3, has been published in B. And the activity of the gene product thereof is the activity of b1280-protein.

[24696] Accordingly, in one embodiment, the process of the present invention for producing serine in a non-human organism, like a microorganism or a plant or a part thereof, comprises increasing or generating the activity of a gene product with the activity of a gene product conferring the activity of “b1280-protein”, especially from Escherichia coli or its functional equivalent or its homolog, e.g. the increase of
[24697] (a) a gene product of a gene comprising the nucleic acid molecule as shown in the respective line in column 5 of Table I, application no. 3, preferably the coding region thereof, or a homolog or a fragment thereof, and being depicted in the same respective line as said B1280, or a functional equivalent or a homolog thereof as shown in column 8 of Table I, application no. 3, preferably the coding region thereof, particularly a homolog or functional equivalent as shown in column 8 of Table I B, application no. 3, and being depicted in the same respective line as said B1280, and preferably the activity is increased non-targeted, or
[24698] (b) a polypeptide comprising a polypeptide, a consensus sequence or at least a polypeptide motif as shown in the respective line in column 5 of Table II or in column 8 of Table IV, application no. 3, respectively, and being depicted in the same respective line as said B1280, or a functional equivalent or a homolog thereof as depicted in column 8 of Table II, application no. 3, preferably a homolog or functional equivalent as depicted in column 8 of Table II B, application no. 3, and being depicted in the same respective line as said B1280, and preferably the activity is increased non-targeted.

[24699] Accordingly, in one embodiment, the molecule which activity is to be increased in the process of the invention is the gene product with an activity as a “b1280-protein”, preferably it is the molecule of section (a) or (b) of this paragraph.

[24700] In particular, it was observed that in plants, especially in Arabidopsis thaliana, increasing or generating the activity of a gene product non-targeted with the activity of a “b1280-protein”, preferably being encoded by a gene comprising the nucleic acid sequence SEQ ID NO. 37573, preferably the coding region thereof, conferred the production of or the increase in serine compared with the wild type control.

[24701] The nucleic acid sequence of B1280 from Escherichia coli, e.g. as shown in the respective line in column 5 of Table I, application no. 3, has been published in B. And the activity of the gene product thereof is the activity of b1280-protein.

[24702] Accordingly, in one embodiment, the process of the present invention for producing 5-oxoproline in a non-human organism, like a microorganism or a plant or a part thereof, comprises increasing or generating the activity of a gene product with the activity of a gene product conferring the activity of “b1280-protein”, especially from Escherichia coli or its functional equivalent or its homolog, e.g. the increase of
[24703] (a) a gene product of a gene comprising the nucleic acid molecule as shown in the respective line in column 5 of Table I, application no. 3, preferably the coding region thereof, or a homolog or a fragment thereof, and being depicted in the same respective line as said B1280, or a functional equivalent or a homolog thereof as shown in column 8 of Table I, application no. 3, preferably the coding region thereof, particularly a homolog or functional equivalent as shown in column 8 of Table I B, application no. 3, and being depicted in the same respective line as said B1280, and preferably the activity is increased non-targeted, or
[24704] (b) a polypeptide comprising a polypeptide, a consensus sequence or at least a polypeptide motif as shown in the respective line in column 5 of Table II or in column 8 of Table IV, application no. 3, respectively, and being depicted in the same respective line as said B1280, or a functional equivalent or a homolog thereof as depicted in column 8 of Table II, application no. 3, preferably a homolog or functional equivalent as depicted in column 8 of Table II B, application no. 3, and being depicted in the same respective line as said B1280, and preferably the activity is increased non-targeted.

[24705] Accordingly, in one embodiment, the molecule which activity is to be increased in the process of the invention is the gene product with an activity as a “b1280-protein”, preferably it is the molecule of section (a) or (b) of this paragraph.

[24706] In particular, it was observed that in plants, especially in Arabidopsis thaliana, increasing or generating the activity of a gene product non-targeted with the activity of a “b1280-protein”, preferably being encoded by a gene comprising the nucleic acid sequence SEQ ID NO. 37573, preferably the coding region thereof, conferred the production of or the increase in 5-oxoproline compared with the wild type control.

[24707] The nucleic acid sequence of B1297 from Escherichia coli, e.g. as shown in the respective line in column 5 of Table I, application no. 3, has been published in B. And the activity of the gene product thereof is the activity of glutamine synthetase.

[24708] Accordingly, in one embodiment, the process of the present invention for producing alanine in a non-human organism, like a microorganism or a plant or a part thereof, comprises increasing or generating the activity of a gene product with the activity of a gene product conferring the activity of “glutamine synthetase”, especially from Escherichia coli or its functional equivalent or its homolog, e.g. the increase of
[24709] (a) a gene product of a gene comprising the nucleic acid molecule as shown in the respective line in column 5 of Table I, application no. 3, preferably the coding region thereof, or a homolog or a fragment thereof, and being depicted in the same respective line as said B1297, or a functional equivalent or a homolog thereof as shown in column 8 of Table I, application no. 3, preferably the coding region thereof, particularly a homolog or functional equivalent as shown in column 8 of Table I B, application no. 3, and being depicted in the same respective line as said B1297, and preferably the activity is increased plastidic, or
[24710] (b) a polypeptide comprising a polypeptide, a consensus sequence or at least a polypeptide motif as shown in the respective line in column 5 of Table II or in column 8 of Table IV, application no. 3, respectively, and being depicted in the same respective line as said B1297, or a functional equivalent or a homolog thereof as depicted in column 8 of Table II, application no. 3, preferably a homolog or functional equivalent as depicted in column 8 of Table II B, application no. 3, and being depicted in the same respective line as said B1297, and preferably the activity is increased plastidic.

[24711] Accordingly, in one embodiment, the molecule which activity is to be increased in the process of the invention is the gene product with an activity as a “glutamine synthetase”, preferably it is the molecule of section (a) or (b) of this paragraph.

[24712] In particular, it was observed that in plants, especially in Arabidopsis thaliana, increasing or generating the activity of a gene product plastidic with the activity of a “glutamine synthetase”, preferably being encoded by a gene comprising the nucleic acid sequence SEQ ID NO. 37658, preferably the coding region thereof, conferred the production of or the increase in alanine compared with the wild type control.

[24713] The nucleic acid sequence of B1297 from Escherichia coli, e.g. as shown in the respective line in column 5 of Table I, application no. 3, has been published in B. And the activity of the gene product thereof is the activity of glutamine synthetase.

[24714] Accordingly, in one embodiment, the process of the present invention for producing glycine in a non-human organism, like a microorganism or a plant or a part thereof, comprises increasing or generating the activity of a gene product with the activity of a gene product conferring the activity of “glutamine synthetase”, especially from Escherichia coli or its functional equivalent or its homolog, e.g. the increase of
[24715] (a) a gene product of a gene comprising the nucleic acid molecule as shown in the respective line in column 5 of Table I, application no. 3, preferably the coding region thereof, or a homolog or a fragment thereof, and being depicted in the same respective line as said B1297, or a functional equivalent or a homolog thereof as shown in column 8 of Table I, application no. 3, preferably the coding region thereof, particularly a homolog or functional equivalent as shown in column 8 of Table I B, application no. 3, and being depicted in the same respective line as said B1297, and preferably the activity is increased plastidic, or
[24716] (b) a polypeptide comprising a polypeptide, a consensus sequence or at least a polypeptide motif as shown in the respective line in column 5 of Table II or in column 8 of Table IV, application no. 3, respectively, and being depicted in the same respective line as said B1297, or a functional equivalent or a homolog thereof as depicted in column 8 of Table II, application no. 3, preferably a homolog or functional equivalent as depicted in column 8 of Table II B, application no. 3, and being depicted in the same respective line as said B1297, and preferably the activity is increased plastidic.

[24717] Accordingly, in one embodiment, the molecule which activity is to be increased in the process of the invention is the gene product with an activity as a “glutamine synthetase”, preferably it is the molecule of section (a) or (b) of this paragraph.

[24718] In particular, it was observed that in plants, especially in Arabidopsis thaliana, increasing or generating the activity of a gene product plastidic with the activity of a “glutamine synthetase”, preferably being encoded by a gene comprising the nucleic acid sequence SEQ ID NO. 37658, preferably the coding region thereof, conferred the production of or the increase in glycine compared with the wild type control.

[24719] The nucleic acid sequence of B1300 from Escherichia coli, e.g. as shown in the respective line in column 5 of Table I, application no. 3, has been published in B. And the activity of the gene product thereof is the activity of aldehyde dehydrogenase.

[24720] Accordingly, in one embodiment, the process of the present invention for producing phenylalanine in a non-human organism, like a microorganism or a plant or a part thereof, comprises increasing or generating the activity of a gene product with the activity of a gene product conferring the activity of “aldehyde dehydrogenase”, especially from Escherichia coli or its functional equivalent or its homolog, e.g. the increase of
[24721] (a) a gene product of a gene comprising the nucleic acid molecule as shown in the respective line in column 5 of Table I, application no. 3, preferably the coding region thereof, or a homolog or a fragment thereof, and being depicted in the same respective line as said B1300, or a functional equivalent or a homolog thereof as shown in column 8 of Table I, application no. 3, preferably the coding region thereof, particularly a homolog or functional equivalent as shown in column 8 of Table I B, application no. 3, and being depicted in the same respective line as said B1300, and preferably the activity is increased non-targeted, or
[24722] (b) a polypeptide comprising a polypeptide, a consensus sequence or at least a polypeptide motif as shown in the respective line in column 5 of Table II or in column 8 of Table IV, application no. 3, respectively, and being depicted in the same respective line as said B1300, or a functional equivalent or a homolog thereof as depicted in column 8 of Table II, application no. 3, preferably a homolog or functional equivalent as depicted in column 8 of Table II B, application no. 3, and being depicted in the same respective line as said B1300, and preferably the activity is increased non-targeted.

[24723] Accordingly, in one embodiment, the molecule which activity is to be increased in the process of the invention is the gene product with an activity as a “aldehyde dehydrogenase”, preferably it is the molecule of section (a) or (b) of this paragraph.

[24724] In particular, it was observed that in plants, especially in Arabidopsis thaliana, increasing or generating the activity of a gene product non-targeted with the activity of a “aldehyde dehydrogenase”, preferably being encoded by a gene comprising the nucleic acid sequence SEQ ID NO. 37807, preferably the coding region thereof, conferred the production of or the increase in phenylalanine compared with the wild type control.

[24725] The nucleic acid sequence of B1300 from Escherichia coli, e.g. as shown in the respective line in column 5 of Table I, application no. 3, has been published in B. And the activity of the gene product thereof is the activity of aldehyde dehydrogenase.

[24726] Accordingly, in one embodiment, the process of the present invention for producing tyrosine in a non-human organism, like a microorganism or a plant or a part thereof, comprises increasing or generating the activity of a gene product with the activity of a gene product conferring the activity of “aldehyde dehydrogenase”, especially from Escherichia coli or its functional equivalent or its homolog, e.g. the increase of
[24727] (a) a gene product of a gene comprising the nucleic acid molecule as shown in the respective line in column 5 of Table I, application no. 3, preferably the coding region thereof, or a homolog or a fragment thereof, and being depicted in the same respective line as said B1300, or a functional equivalent or a homolog thereof as shown in column 8 of Table I, application no. 3, preferably the coding region thereof, particularly a homolog or functional equivalent as shown in column 8 of Table I B, application no. 3, and being depicted in the same respective line as said B1300, and preferably the activity is increased non-targeted, or
[24728] (b) a polypeptide comprising a polypeptide, a consensus sequence or at least a polypeptide motif as shown in the respective line in column 5 of Table II or in column 8 of Table IV, application no. 3, respectively, and being depicted in the same respective line as said B1300, or a functional equivalent or a homolog thereof as depicted in column 8 of Table II, application no. 3, preferably a homolog or functional equivalent as depicted in column 8 of Table II B, application no. 3, and being depicted in the same respective line as said B1300, and preferably the activity is increased non-targeted.

[24729] Accordingly, in one embodiment, the molecule which activity is to be increased in the process of the invention is the gene product with an activity as a “aldehyde dehydrogenase”, preferably it is the molecule of section (a) or (b) of this paragraph.

[24730] In particular, it was observed that in plants, especially in Arabidopsis thaliana, increasing or generating the activity of a gene product non-targeted with the activity of a “aldehyde dehydrogenase”, preferably being encoded by a gene comprising the nucleic acid sequence SEQ ID NO. 37807, preferably the coding region thereof, conferred the production of or the increase in tyrosine compared with the wild type control.

[24731] The nucleic acid sequence of B1310 from Escherichia coli, e.g. as shown in the respective line in column 5 of Table I, application no. 3, has been published in B. And the activity of the gene product thereof is the activity of ABC transporter substrate-binding protein.

[24732] Accordingly, in one embodiment, the process of the present invention for producing citrulline in a non-human organism, like a microorganism or a plant or a part thereof, comprises increasing or generating the activity of a gene product with the activity of a gene product conferring the activity of “ABC transporter substrate-binding protein”, especially from Escherichia coli or its functional equivalent or its homolog, e.g. the increase of
[24733] (a) a gene product of a gene comprising the nucleic acid molecule as shown in the respective line in column 5 of Table I, application no. 3, preferably the coding region thereof, or a homolog or a fragment thereof, and being depicted in the same respective line as said B1310, or a functional equivalent or a homolog thereof as shown in column 8 of Table I, application no. 3, preferably the coding region thereof, particularly a homolog or functional equivalent as shown in column 8 of Table I B, application no. 3, and being depicted in the same respective line as said B1310, and preferably the activity is increased non-targeted, or
[24734] (b) a polypeptide comprising a polypeptide, a consensus sequence or at least a polypeptide motif as shown in the respective line in column 5 of Table II or in column 8 of Table IV, application no. 3, respectively, and being depicted in the same respective line as said B1310, or a functional equivalent or a homolog thereof as depicted in column 8 of Table II, application no. 3, preferably a homolog or functional equivalent as depicted in column 8 of Table II B, application no. 3, and being depicted in the same respective line as said B1310, and preferably the activity is increased non-targeted.

[24735] Accordingly, in one embodiment, the molecule which activity is to be increased in the process of the invention is the gene product with an activity as a “ABC transporter substrate-binding protein”, preferably it is the molecule of section (a) or (b) of this paragraph.

[24736] In particular, it was observed that in plants, especially in Arabidopsis thaliana, increasing or generating the activity of a gene product non-targeted with the activity of a “ABC transporter substrate-binding protein”, preferably being encoded by a gene comprising the nucleic acid sequence SEQ ID NO. 76867, preferably the coding region thereof, conferred the production of or the increase in citrulline compared with the wild type control.

[24737] The nucleic acid sequence of B1330 from Escherichia coli, e.g. as shown in the respective line in column 5 of Table I, application no. 3, has been published in B. And the activity of the gene product thereof is the activity of b1330-protein.

[24738] Accordingly, in one embodiment, the process of the present invention for producing citrulline in a non-human organism, like a microorganism or a plant or a part thereof, comprises increasing or generating the activity of a gene product with the activity of a gene product conferring the activity of “b1330-protein”, especially from Escherichia coli or its functional equivalent or its homolog, e.g. the increase of
[24739] (a) a gene product of a gene comprising the nucleic acid molecule as shown in the respective line in column 5 of Table I, application no. 3, preferably the coding region thereof, or a homolog or a fragment thereof, and being depicted in the same respective line as said B1330, or a functional equivalent or a homolog thereof as shown in column 8 of Table I, application no. 3, preferably the coding region thereof, particularly a homolog or functional equivalent as shown in column 8 of Table I B, application no. 3, and being depicted in the same respective line as said B1330, and preferably the activity is increased non-targeted, or
[24740] (b) a polypeptide comprising a polypeptide, a consensus sequence or at least a polypeptide motif as shown in the respective line in column 5 of Table II or in column 8 of Table IV, application no. 3, respectively, and being depicted in the same respective line as said B1330, or a functional equivalent or a homolog thereof as depicted in column 8 of Table II, application no. 3, preferably a homolog or functional equivalent as depicted in column 8 of Table II B, application no. 3, and being depicted in the same respective line as said B1330, and preferably the activity is increased non-targeted.

[24741] Accordingly, in one embodiment, the molecule which activity is to be increased in the process of the invention is the gene product with an activity as a “b1330-protein”, preferably it is the molecule of section (a) or (b) of this paragraph.

[24742] In particular, it was observed that in plants, especially in Arabidopsis thaliana, increasing or generating the activity of a gene product non-targeted with the activity of a “b1330-protein”, preferably being encoded by a gene comprising the nucleic acid sequence SEQ ID NO. 38226, preferably the coding region thereof, conferred the production of or the increase in citrulline compared with the wild type control.

[24743] The nucleic acid sequence of B1343 from Escherichia coli, e.g. as shown in the respective line in column 5 of Table I, application no. 3, has been published in B. And the activity of the gene product thereof is the activity of ATP-dependent RNA helicase.

[24744] Accordingly, in one embodiment, the process of the present invention for producing phenylalanine in a non-human organism, like a microorganism or a plant or a part thereof, comprises increasing or generating the activity of a gene product with the activity of a gene product conferring the activity of “ATP-dependent RNA helicase”, especially from Escherichia coli or its functional equivalent or its homolog, e.g. the increase of
[24745] (a) a gene product of a gene comprising the nucleic acid molecule as shown in the respective line in column 5 of Table I, application no. 3, preferably the coding region thereof, or a homolog or a fragment thereof, and being depicted in the same respective line as said B1343, or a functional equivalent or a homolog thereof as shown in column 8 of Table I, application no. 3, preferably the coding region thereof, particularly a homolog or functional equivalent as shown in column 8 of Table I B, application no. 3, and being depicted in the same respective line as said B1343, and preferably the activity is increased non-targeted, or
[24746] (b) a polypeptide comprising a polypeptide, a consensus sequence or at least a polypeptide motif as shown in the respective line in column 5 of Table II or in column 8 of Table IV, application no. 3, respectively, and being depicted in the same respective line as said B1343, or a functional equivalent or a homolog thereof as depicted in column 8 of Table II, application no. 3, preferably a homolog or functional equivalent as depicted in column 8 of Table II B, application no. 3, and being depicted in the same respective line as said B1343, and preferably the activity is increased non-targeted.

[24747] Accordingly, in one embodiment, the molecule which activity is to be increased in the process of the invention is the gene product with an activity as a “ATP-dependent RNA helicase”, preferably it is the molecule of section (a) or (b) of this paragraph.

[24748] In particular, it was observed that in plants, especially in Arabidopsis thaliana, increasing or generating the activity of a gene product non-targeted with the activity of a “ATP-dependent RNA helicase”, preferably being encoded by a gene comprising the nucleic acid sequence SEQ ID NO. 76890, preferably the coding region thereof, conferred the production of or the increase in phenylalanine compared with the wild type control.

[24749] The nucleic acid sequence of B1348 from Escherichia coli, e.g. as shown in the respective line in column 5 of Table I, application no. 3, has been published in B. And the activity of the gene product thereof is the activity of restriction alleviation protein.

[24750] Accordingly, in one embodiment, the process of the present invention for producing alanine in a non-human organism, like a microorganism or a plant or a part thereof, comprises increasing or generating the activity of a gene product with the activity of a gene product conferring the activity of “restriction alleviation protein”, especially from Escherichia coli or its functional equivalent or its homolog, e.g. the increase of
[24751] (a) a gene product of a gene comprising the nucleic acid molecule as shown in the respective line in column 5 of Table I, application no. 3, preferably the coding region thereof, or a homolog or a fragment thereof, and being depicted in the same respective line as said B1348, or a functional equivalent or a homolog thereof as shown in column 8 of Table I, application no. 3, preferably the coding region thereof, particularly a homolog or functional equivalent as shown in column 8 of Table I B, application no. 3, and being depicted in the same respective line as said B1348, and preferably the activity is increased non-targeted, or
[24752] (b) a polypeptide comprising a polypeptide, a consensus sequence or at least a polypeptide motif as shown in the respective line in column 5 of Table II or in column 8 of Table IV, application no. 3, respectively, and being depicted in the same respective line as said B1348, or a functional equivalent or a homolog thereof as depicted in column 8 of Table II, application no. 3, preferably a homolog or functional equivalent as depicted in column 8 of Table II B, application no. 3, and being depicted in the same respective line as said B1348, and preferably the activity is increased non-targeted.

[24753] Accordingly, in one embodiment, the molecule which activity is to be increased in the process of the invention is the gene product with an activity as a “restriction alleviation protein”, preferably it is the molecule of section (a) or (b) of this paragraph.

[24754] In particular, it was observed that in plants, especially in Arabidopsis thaliana, increasing or generating the activity of a gene product non-targeted with the activity of a “restriction alleviation protein”, preferably being encoded by a gene comprising the nucleic acid sequence SEQ ID NO. 77768, preferably the coding region thereof, conferred the production of or the increase in alanine compared with the wild type control.

[24755] The nucleic acid sequence of B1348 from Escherichia coli, e.g. as shown in the respective line in column 5 of Table I, application no. 3, has been published in B. And the activity of the gene product thereof is the activity of restriction alleviation protein.

[24756] Accordingly, in one embodiment, the process of the present invention for producing glycine in a non-human organism, like a microorganism or a plant or a part thereof, comprises increasing or generating the activity of a gene product with the activity of a gene product conferring the activity of “restriction alleviation protein”, especially from Escherichia coli or its functional equivalent or its homolog, e.g. the increase of
[24757] (a) a gene product of a gene comprising the nucleic acid molecule as shown in the respective line in column 5 of Table I, application no. 3, preferably the coding region thereof, or a homolog or a fragment thereof, and being depicted in the same respective line as said B1348, or a functional equivalent or a homolog thereof as shown in column 8 of Table I, application no. 3, preferably the coding region thereof, particularly a homolog or functional equivalent as shown in column 8 of Table I B, application no. 3, and being depicted in the same respective line as said B1348, and preferably the activity is increased non-targeted, or
[24758] (b) a polypeptide comprising a polypeptide, a consensus sequence or at least a polypeptide motif as shown in the respective line in column 5 of Table II or in column 8 of Table IV, application no. 3, respectively, and being depicted in the same respective line as said B1348, or a functional equivalent or a homolog thereof as depicted in column 8 of Table II, application no. 3, preferably a homolog or functional equivalent as depicted in column 8 of Table II B, application no. 3, and being depicted in the same respective line as said B1348, and preferably the activity is increased non-targeted.

[24759] Accordingly, in one embodiment, the molecule which activity is to be increased in the process of the invention is the gene product with an activity as a “restriction alleviation protein”, preferably it is the molecule of section (a) or (b) of this paragraph.

[24760] In particular, it was observed that in plants, especially in Arabidopsis thaliana, increasing or generating the activity of a gene product non-targeted with the activity of a “restriction alleviation protein”, preferably being encoded by a gene comprising the nucleic acid sequence SEQ ID NO. 77768, preferably the coding region thereof, conferred the production of or the increase in glycine compared with the wild type control.

[24761] The nucleic acid sequence of B1431 from Escherichia coli, e.g. as shown in the respective line in column 5 of Table I, application no. 3, has been published in B. And the activity of the gene product thereof is the activity of lipoprotein precursor.

[24762] Accordingly, in one embodiment, the process of the present invention for producing 5-oxoproline in a non-human organism, like a microorganism or a plant or a part thereof, comprises increasing or generating the activity of a gene product with the activity of a gene product conferring the activity of “lipoprotein precursor”, especially from Escherichia coli or its functional equivalent or its homolog, e.g. the increase of
[24763] (a) a gene product of a gene comprising the nucleic acid molecule as shown in the respective line in column 5 of Table I, application no. 3, preferably the coding region thereof, or a homolog or a fragment thereof, and being depicted in the same respective line as said B1431, or a functional equivalent or a homolog thereof as shown in column 8 of Table I, application no. 3, preferably the coding region thereof, particularly a homolog or functional equivalent as shown in column 8 of Table I B, application no. 3, and being depicted in the same respective line as said B1431, and preferably the activity is increased plastidic, or
[24764] (b) a polypeptide comprising a polypeptide, a consensus sequence or at least a polypeptide motif as shown in the respective line in column 5 of Table II or in column 8 of Table IV, application no. 3, respectively, and being depicted in the same respective line as said B1431, or a functional equivalent or a homolog thereof as depicted in column 8 of Table II, application no. 3, preferably a homolog or functional equivalent as depicted in column 8 of Table II B, application no. 3, and being depicted in the same respective line as said B1431, and preferably the activity is increased plastidic.

[24765] Accordingly, in one embodiment, the molecule which activity is to be increased in the process of the invention is the gene product with an activity as a “lipoprotein precursor”, preferably it is the molecule of section (a) or (b) of this paragraph.

[24766] In particular, it was observed that in plants, especially in Arabidopsis thaliana, increasing or generating the activity of a gene product plastidic with the activity of a “lipoprotein precursor”, preferably being encoded by a gene comprising the nucleic acid sequence SEQ ID NO. 38266, preferably the coding region thereof, conferred the production of or the increase in 5-oxoproline compared with the wild type control.

[24767] The nucleic acid sequence of B1445 from Escherichia coli, e.g. as shown in the respective line in column 5 of Table I, application no. 3, has been published in B. And the activity of the gene product thereof is the activity of b1445-protein.

[24768] Accordingly, in one embodiment, the process of the present invention for producing alanine in a non-human organism, like a microorganism or a plant or a part thereof, comprises increasing or generating the activity of a gene product with the activity of a gene product conferring the activity of “b1445-protein”, especially from Escherichia coli or its functional equivalent or its homolog, e.g. the increase of
[24769] (a) a gene product of a gene comprising the nucleic acid molecule as shown in the respective line in column 5 of Table I, application no. 3, preferably the coding region thereof, or a homolog or a fragment thereof, and being depicted in the same respective line as said B1445, or a functional equivalent or a homolog thereof as shown in column 8 of Table I, application no. 3, preferably the coding region thereof, particularly a homolog or functional equivalent as shown in column 8 of Table I B, application no. 3, and being depicted in the same respective line as said B1445, and preferably the activity is increased non-targeted, or
[24770] (b) a polypeptide comprising a polypeptide, a consensus sequence or at least a polypeptide motif as shown in the respective line in column 5 of Table II or in column 8 of Table IV, application no. 3, respectively, and being depicted in the same respective line as said B1445, or a functional equivalent or a homolog thereof as depicted in column 8 of Table II, application no. 3, preferably a homolog or functional equivalent as depicted in column 8 of Table II B, application no. 3, and being depicted in the same respective line as said B1445, and preferably the activity is increased non-targeted.

[24771] Accordingly, in one embodiment, the molecule which activity is to be increased in the process of the invention is the gene product with an activity as a “b1445-protein”, preferably it is the molecule of section (a) or (b) of this paragraph.

[24772] In particular, it was observed that in plants, especially in Arabidopsis thaliana, increasing or generating the activity of a gene product non-targeted with the activity of a “b1445-protein”, preferably being encoded by a gene comprising the nucleic acid sequence SEQ ID NO. 38289, preferably the coding region thereof, conferred the production of or the increase in alanine compared with the wild type control.

[24773] The nucleic acid sequence of B1445 from Escherichia coli, e.g. as shown in the respective line in column 5 of Table I, application no. 3, has been published in B. And the activity of the gene product thereof is the activity of b1445-protein.

[24774] Accordingly, in one embodiment, the process of the present invention for producing citrulline in a non-human organism, like a microorganism or a plant or a part thereof, comprises increasing or generating the activity of a gene product with the activity of a gene product conferring the activity of “b1445-protein”, especially from Escherichia coli or its functional equivalent or its homolog, e.g. the increase of
[24775] (a) a gene product of a gene comprising the nucleic acid molecule as shown in the respective line in column 5 of Table I, application no. 3, preferably the coding region thereof, or a homolog or a fragment thereof, and being depicted in the same respective line as said B1445, or a functional equivalent or a homolog thereof as shown in column 8 of Table I, application no. 3, preferably the coding region thereof, particularly a homolog or functional equivalent as shown in column 8 of Table I B, application no. 3, and being depicted in the same respective line as said B1445, and preferably the activity is increased non-targeted, or
[24776] (b) a polypeptide comprising a polypeptide, a consensus sequence or at least a polypeptide motif as shown in the respective line in column 5 of Table II or in column 8 of Table IV, application no. 3, respectively, and being depicted in the same respective line as said B1445, or a functional equivalent or a homolog thereof as depicted in column 8 of Table II, application no. 3, preferably a homolog or functional equivalent as depicted in column 8 of Table II B, application no. 3, and being depicted in the same respective line as said B1445, and preferably the activity is increased non-targeted.

[24777] Accordingly, in one embodiment, the molecule which activity is to be increased in the process of the invention is the gene product with an activity as a “b1445-protein”, preferably it is the molecule of section (a) or (b) of this paragraph.

[24778] In particular, it was observed that in plants, especially in Arabidopsis thaliana, increasing or generating the activity of a gene product non-targeted with the activity of a “b1445-protein”, preferably being encoded by a gene comprising the nucleic acid sequence SEQ ID NO. 38289, preferably the coding region thereof, conferred the production of or the increase in citrulline compared with the wild type control.

[24779] The nucleic acid sequence of B1445 from Escherichia coli, e.g. as shown in the respective line in column 5 of Table I, application no. 3, has been published in B. And the activity of the gene product thereof is the activity of b1445-protein.

[24780] Accordingly, in one embodiment, the process of the present invention for producing glycine in a non-human organism, like a microorganism or a plant or a part thereof, comprises increasing or generating the activity of a gene product with the activity of a gene product conferring the activity of “b1445-protein”, especially from Escherichia coli or its functional equivalent or its homolog, e.g. the increase of
[24781] (a) a gene product of a gene comprising the nucleic acid molecule as shown in the respective line in column 5 of Table I, application no. 3, preferably the coding region thereof, or a homolog or a fragment thereof, and being depicted in the same respective line as said B1445, or a functional equivalent or a homolog thereof as shown in column 8 of Table I, application no. 3, preferably the coding region thereof, particularly a homolog or functional equivalent as shown in column 8 of Table I B, application no. 3, and being depicted in the same respective line as said B1445, and preferably the activity is increased non-targeted, or
[24782] (b) a polypeptide comprising a polypeptide, a consensus sequence or at least a polypeptide motif as shown in the respective line in column 5 of Table II or in column 8 of Table IV, application no. 3, respectively, and being depicted in the same respective line as said B1445, or a functional equivalent or a homolog thereof as depicted in column 8 of Table II, application no. 3, preferably a homolog or functional equivalent as depicted in column 8 of Table II B, application no. 3, and being depicted in the same respective line as said B1445, and preferably the activity is increased non-targeted.

[24783] Accordingly, in one embodiment, the molecule which activity is to be increased in the process of the invention is the gene product with an activity as a “b1445-protein”, preferably it is the molecule of section (a) or (b) of this paragraph.

[24784] In particular, it was observed that in plants, especially in Arabidopsis thaliana, increasing or generating the activity of a gene product non-targeted with the activity of a “b1445-protein”, preferably being encoded by a gene comprising the nucleic acid sequence SEQ ID NO. 38289, preferably the coding region thereof, conferred the production of or the increase in glycine compared with the wild type control.

[24785] The nucleic acid sequence of B1445 from Escherichia coli, e.g. as shown in the respective line in column 5 of Table I, application no. 3, has been published in B. And the activity of the gene product thereof is the activity of b1445-protein.

[24786] Accordingly, in one embodiment, the process of the present invention for producing phenylalanine in a non-human organism, like a microorganism or a plant or a part thereof, comprises increasing or generating the activity of a gene product with the activity of a gene product conferring the activity of “b1445-protein”, especially from Escherichia coli or its functional equivalent or its homolog, e.g. the increase of
[24787] (a) a gene product of a gene comprising the nucleic acid molecule as shown in the respective line in column 5 of Table I, application no. 3, preferably the coding region thereof, or a homolog or a fragment thereof, and being depicted in the same respective line as said B1445, or a functional equivalent or a homolog thereof as shown in column 8 of Table I, application no. 3, preferably the coding region thereof, particularly a homolog or functional equivalent as shown in column 8 of Table I B, application no. 3, and being depicted in the same respective line as said B1445, and preferably the activity is increased non-targeted, or
[24788] (b) a polypeptide comprising a polypeptide, a consensus sequence or at least a polypeptide motif as shown in the respective line in column 5 of Table II or in column 8 of Table IV, application no. 3, respectively, and being depicted in the same respective line as said B1445, or a functional equivalent or a homolog thereof as depicted in column 8 of Table II, application no. 3, preferably a homolog or functional equivalent as depicted in column 8 of Table II B, application no. 3, and being depicted in the same respective line as said B1445, and preferably the activity is increased non-targeted.

[24789] Accordingly, in one embodiment, the molecule which activity is to be increased in the process of the invention is the gene product with an activity as a “b1445-protein”, preferably it is the molecule of section (a) or (b) of this paragraph.

[24790] In particular, it was observed that in plants, especially in Arabidopsis thaliana, increasing or generating the activity of a gene product non-targeted with the activity of a “b1445-protein”, preferably being encoded by a gene comprising the nucleic acid sequence SEQ ID NO. 38289, preferably the coding region thereof, conferred the production of or the increase in phenylalanine compared with the wild type control.

[24791] The nucleic acid sequence of B1445 from Escherichia coli, e.g. as shown in the respective line in column 5 of Table I, application no. 3, has been published in B. And the activity of the gene product thereof is the activity of b1445-protein.

[24792] Accordingly, in one embodiment, the process of the present invention for producing serine in a non-human organism, like a microorganism or a plant or a part thereof, comprises increasing or generating the activity of a gene product with the activity of a gene product conferring the activity of “b1445-protein”, especially from Escherichia coli or its functional equivalent or its homolog, e.g. the increase of
[24793] (a) a gene product of a gene comprising the nucleic acid molecule as shown in the respective line in column 5 of Table I, application no. 3, preferably the coding region thereof, or a homolog or a fragment thereof, and being depicted in the same respective line as said B1445, or a functional equivalent or a homolog thereof as shown in column 8 of Table I, application no. 3, preferably the coding region thereof, particularly a homolog or functional equivalent as shown in column 8 of Table I B, application no. 3, and being depicted in the same respective line as said B1445, and preferably the activity is increased non-targeted, or
[24794] (b) a polypeptide comprising a polypeptide, a consensus sequence or at least a polypeptide motif as shown in the respective line in column 5 of Table II or in column 8 of Table IV, application no. 3, respectively, and being depicted in the same respective line as said B1445, or a functional equivalent or a homolog thereof as depicted in column 8 of Table II, application no. 3, preferably a homolog or functional equivalent as depicted in column 8 of Table II B, application no. 3, and being depicted in the same respective line as said B1445, and preferably the activity is increased non-targeted.

[24795] Accordingly, in one embodiment, the molecule which activity is to be increased in the process of the invention is the gene product with an activity as a “b1445-protein”, preferably it is the molecule of section (a) or (b) of this paragraph.

[24796] In particular, it was observed that in plants, especially in Arabidopsis thaliana, increasing or generating the activity of a gene product non-targeted with the activity of a “b1445-protein”, preferably being encoded by a gene comprising the nucleic acid sequence SEQ ID NO. 38289, preferably the coding region thereof, conferred the production of or the increase in serine compared with the wild type control.

[24797] The nucleic acid sequence of B1479 from Escherichia coli, e.g. as shown in the respective line in column 5 of Table I, application no. 3, has been published in B. And the activity of the gene product thereof is the activity of NADP-dependent malic enzyme.

[24798] Accordingly, in one embodiment, the process of the present invention for producing alanine in a non-human organism, like a microorganism or a plant or a part thereof, comprises increasing or generating the activity of a gene product with the activity of a gene product conferring the activity of “NADP-dependent malic enzyme”, especially from Escherichia coli or its functional equivalent or its homolog, e.g. the increase of
[24799] (a) a gene product of a gene comprising the nucleic acid molecule as shown in the respective line in column 5 of Table I, application no. 3, preferably the coding region thereof, or a homolog or a fragment thereof, and being depicted in the same respective line as said B1479, or a functional equivalent or a homolog thereof as shown in column 8 of Table I, application no. 3, preferably the coding region thereof, particularly a homolog or functional equivalent as shown in column 8 of Table I B, application no. 3, and being depicted in the same respective line as said B1479, and preferably the activity is increased non-targeted, or
[24800] (b) a polypeptide comprising a polypeptide, a consensus sequence or at least a polypeptide motif as shown in the respective line in column 5 of Table II or in column 8 of Table IV, application no. 3, respectively, and being depicted in the same respective line as said B1479, or a functional equivalent or a homolog thereof as depicted in column 8 of Table II, application no. 3, preferably a homolog or functional equivalent as depicted in column 8 of Table II B, application no. 3, and being depicted in the same respective line as said B1479, and preferably the activity is increased non-targeted.

[24801] Accordingly, in one embodiment, the molecule which activity is to be increased in the process of the invention is the gene product with an activity as a “NADP-dependent malic enzyme”, preferably it is the molecule of section (a) or (b) of this paragraph.

[24802] In particular, it was observed that in plants, especially in Arabidopsis thaliana, increasing or generating the activity of a gene product non-targeted with the activity of a “NADP-dependent malic enzyme”, preferably being encoded by a gene comprising the nucleic acid sequence SEQ ID NO. 77774, preferably the coding region thereof, conferred the production of or the increase in alanine compared with the wild type control.

[24803] The nucleic acid sequence of B1479 from Escherichia coli, e.g. as shown in the respective line in column 5 of Table I, application no. 3, has been published in B. And the activity of the gene product thereof is the activity of NADP-dependent malic enzyme.

[24804] Accordingly, in one embodiment, the process of the present invention for producing glycine in a non-human organism, like a microorganism or a plant or a part thereof, comprises increasing or generating the activity of a gene product with the activity of a gene product conferring the activity of “NADP-dependent malic enzyme”, especially from Escherichia coli or its functional equivalent or its homolog, e.g. the increase of
[24805] (a) a gene product of a gene comprising the nucleic acid molecule as shown in the respective line in column 5 of Table I, application no. 3, preferably the coding region thereof, or a homolog or a fragment thereof, and being depicted in the same respective line as said B1479, or a functional equivalent or a homolog thereof as shown in column 8 of Table I, application no. 3, preferably the coding region thereof, particularly a homolog or functional equivalent as shown in column 8 of Table I B, application no. 3, and being depicted in the same respective line as said B1479, and preferably the activity is increased non-targeted, or
[24806] (b) a polypeptide comprising a polypeptide, a consensus sequence or at least a polypeptide motif as shown in the respective line in column 5 of Table II or in column 8 of Table IV, application no. 3, respectively, and being depicted in the same respective line as said B1479, or a functional equivalent or a homolog thereof as depicted in column 8 of Table II, application no. 3, preferably a homolog or functional equivalent as depicted in column 8 of Table II B, application no. 3, and being depicted in the same respective line as said B1479, and preferably the activity is increased non-targeted.

[24807] Accordingly, in one embodiment, the molecule which activity is to be increased in the process of the invention is the gene product with an activity as a “NADP-dependent malic enzyme”, preferably it is the molecule of section (a) or (b) of this paragraph.

[24808] In particular, it was observed that in plants, especially in Arabidopsis thaliana, increasing or generating the activity of a gene product non-targeted with the activity of a “NADP-dependent malic enzyme”, preferably being encoded by a gene comprising the nucleic acid sequence SEQ ID NO. 77774, preferably the coding region thereof, conferred the production of or the increase in glycine compared with the wild type control.

[24809] The nucleic acid sequence of B1479 from Escherichia coli, e.g. as shown in the respective line in column 5 of Table I, application no. 3, has been published in B. And the activity of the gene product thereof is the activity of NADP-dependent malic enzyme.

[24810] Accordingly, in one embodiment, the process of the present invention for producing phenylalanine in a non-human organism, like a microorganism or a plant or a part thereof, comprises increasing or generating the activity of a gene product with the activity of a gene product conferring the activity of “NADP-dependent malic enzyme”, especially from Escherichia coli or its functional equivalent or its homolog, e.g. the increase of
[24811] (a) a gene product of a gene comprising the nucleic acid molecule as shown in the respective line in column 5 of Table I, application no. 3, preferably the coding region thereof, or a homolog or a fragment thereof, and being depicted in the same respective line as said B1479, or a functional equivalent or a homolog thereof as shown in column 8 of Table I, application no. 3, preferably the coding region thereof, particularly a homolog or functional equivalent as shown in column 8 of Table I B, application no. 3, and being depicted in the same respective line as said B1479, and preferably the activity is increased non-targeted, or
[24812] (b) a polypeptide comprising a polypeptide, a consensus sequence or at least a polypeptide motif as shown in the respective line in column 5 of Table II or in column 8 of Table IV, application no. 3, respectively, and being depicted in the same respective line as said B1479, or a functional equivalent or a homolog thereof as depicted in column 8 of Table II, application no. 3, preferably a homolog or functional equivalent as depicted in column 8 of Table II B, application no. 3, and being depicted in the same respective line as said B1479, and preferably the activity is increased non-targeted.

[24813] Accordingly, in one embodiment, the molecule which activity is to be increased in the process of the invention is the gene product with an activity as a “NADP-dependent malic enzyme”, preferably it is the molecule of section (a) or (b) of this paragraph.

[24814] In particular, it was observed that in plants, especially in Arabidopsis thaliana, increasing or generating the activity of a gene product non-targeted with the activity of a “NADP-dependent malic enzyme”, preferably being encoded by a gene comprising the nucleic acid sequence SEQ ID NO. 77774, preferably the coding region thereof, conferred the production of or the increase in phenylalanine compared with the wild type control.

[24815] The nucleic acid sequence of B1479 from Escherichia coli, e.g. as shown in the respective line in column 5 of Table I, application no. 3, has been published in B. And the activity of the gene product thereof is the activity of NADP-dependent malic enzyme.

[24816] Accordingly, in one embodiment, the process of the present invention for producing serine in a non-human organism, like a microorganism or a plant or a part thereof, comprises increasing or generating the activity of a gene product with the activity of a gene product conferring the activity of “NADP-dependent malic enzyme”, especially from Escherichia coli or its functional equivalent or its homolog, e.g. the increase of
[24817] (a) a gene product of a gene comprising the nucleic acid molecule as shown in the respective line in column 5 of Table I, application no. 3, preferably the coding region thereof, or a homolog or a fragment thereof, and being depicted in the same respective line as said B1479, or a functional equivalent or a homolog thereof as shown in column 8 of Table I, application no. 3, preferably the coding region thereof, particularly a homolog or functional equivalent as shown in column 8 of Table I B, application no. 3, and being depicted in the same respective line as said B1479, and preferably the activity is increased non-targeted, or
[24818] (b) a polypeptide comprising a polypeptide, a consensus sequence or at least a polypeptide motif as shown in the respective line in column 5 of Table II or in column 8 of Table IV, application no. 3, respectively, and being depicted in the same respective line as said B1479, or a functional equivalent or a homolog thereof as depicted in column 8 of Table II, application no. 3, preferably a homolog or functional equivalent as depicted in column 8 of Table II B, application no. 3, and being depicted in the same respective line as said B1479, and preferably the activity is increased non-targeted.

[24819] Accordingly, in one embodiment, the molecule which activity is to be increased in the process of the invention is the gene product with an activity as a “NADP-dependent malic enzyme”, preferably it is the molecule of section (a) or (b) of this paragraph.

[24820] In particular, it was observed that in plants, especially in Arabidopsis thaliana, increasing or generating the activity of a gene product non-targeted with the activity of a “NADP-dependent malic enzyme”, preferably being encoded by a gene comprising the nucleic acid sequence SEQ ID NO. 77774, preferably the coding region thereof, conferred the production of or the increase in serine compared with the wild type control.

[24821] The nucleic acid sequence of B1479 from Escherichia coli, e.g. as shown in the respective line in column 5 of Table I, application no. 3, has been published in B. And the activity of the gene product thereof is the activity of NADP-dependent malic enzyme.

[24822] Accordingly, in one embodiment, the process of the present invention for producing tyrosine in a non-human organism, like a microorganism or a plant or a part thereof, comprises increasing or generating the activity of a gene product with the activity of a gene product conferring the activity of “NADP-dependent malic enzyme”, especially from Escherichia coli or its functional equivalent or its homolog, e.g. the increase of
[24823] (a) a gene product of a gene comprising the nucleic acid molecule as shown in the respective line in column 5 of Table I, application no. 3, preferably the coding region thereof, or a homolog or a fragment thereof, and being depicted in the same respective line as said B1479, or a functional equivalent or a homolog thereof as shown in column 8 of Table I, application no. 3, preferably the coding region thereof, particularly a homolog or functional equivalent as shown in column 8 of Table I B, application no. 3, and being depicted in the same respective line as said B1479, and preferably the activity is increased non-targeted, or
[24824] (b) a polypeptide comprising a polypeptide, a consensus sequence or at least a polypeptide motif as shown in the respective line in column 5 of Table II or in column 8 of Table IV, application no. 3, respectively, and being depicted in the same respective line as said B1479, or a functional equivalent or a homolog thereof as depicted in column 8 of Table II, application no. 3, preferably a homolog or functional equivalent as depicted in column 8 of Table II B, application no. 3, and being depicted in the same respective line as said B1479, and preferably the activity is increased non-targeted.

[24825] Accordingly, in one embodiment, the molecule which activity is to be increased in the process of the invention is the gene product with an activity as a “NADP-dependent malic enzyme”, preferably it is the molecule of section (a) or (b) of this paragraph.

[24826] In particular, it was observed that in plants, especially in Arabidopsis thaliana, increasing or generating the activity of a gene product non-targeted with the activity of a “NADP-dependent malic enzyme”, preferably being encoded by a gene comprising the nucleic acid sequence SEQ ID NO. 77774, preferably the coding region thereof, conferred the production of or the increase in tyrosine compared with the wild type control.

[24827] The nucleic acid sequence of B1522 from Escherichia coli, e.g. as shown in the respective line in column 5 of Table I, application no. 3, has been published in B. And the activity of the gene product thereof is the activity of b1522-protein.

[24828] Accordingly, in one embodiment, the process of the present invention for producing asparagine in a non-human organism, like a microorganism or a plant or a part thereof, comprises increasing or generating the activity of a gene product with the activity of a gene product conferring the activity of “b1522-protein”, especially from Escherichia coli or its functional equivalent or its homolog, e.g. the increase of
[24829] (a) a gene product of a gene comprising the nucleic acid molecule as shown in the respective line in column 5 of Table I, application no. 3, preferably the coding region thereof, or a homolog or a fragment thereof, and being depicted in the same respective line as said B1522, or a functional equivalent or a homolog thereof as shown in column 8 of Table I, application no. 3, preferably the coding region thereof, particularly a homolog or functional equivalent as shown in column 8 of Table I B, application no. 3, and being depicted in the same respective line as said B1522, and preferably the activity is increased non-targeted, or
[24830] (b) a polypeptide comprising a polypeptide, a consensus sequence or at least a polypeptide motif as shown in the respective line in column 5 of Table II or in column 8 of Table IV, application no. 3, respectively, and being depicted in the same respective line as said B1522, or a functional equivalent or a homolog thereof as depicted in column 8 of Table II, application no. 3, preferably a homolog or functional equivalent as depicted in column 8 of Table II B, application no. 3, and being depicted in the same respective line as said B1522, and preferably the activity is increased non-targeted.

[24831] Accordingly, in one embodiment, the molecule which activity is to be increased in the process of the invention is the gene product with an activity as a “b1522-protein”, preferably it is the molecule of section (a) or (b) of this paragraph.

[24832] In particular, it was observed that in plants, especially in Arabidopsis thaliana, increasing or generating the activity of a gene product non-targeted with the activity of a “b1522-protein”, preferably being encoded by a gene comprising the nucleic acid sequence SEQ ID NO. 7947, preferably the coding region thereof, conferred the production of or the increase in asparagine compared with the wild type control.

[24833] The nucleic acid sequence of B1522 from Escherichia coli, e.g. as shown in the respective line in column 5 of Table I, application no. 3, has been published in B. And the activity of the gene product thereof is the activity of b1522-protein.

[24834] Accordingly, in one embodiment, the process of the present invention for producing aspartate in a non-human organism, like a microorganism or a plant or a part thereof, comprises increasing or generating the activity of a gene product with the activity of a gene product conferring the activity of “b1522-protein”, especially from Escherichia coli or its functional equivalent or its homolog, e.g. the increase of
[24835] (a) a gene product of a gene comprising the nucleic acid molecule as shown in the respective line in column 5 of Table I, application no. 3, preferably the coding region thereof, or a homolog or a fragment thereof, and being depicted in the same respective line as said B1522, or a functional equivalent or a homolog thereof as shown in column 8 of Table I, application no. 3, preferably the coding region thereof, particularly a homolog or functional equivalent as shown in column 8 of Table I B, application no. 3, and being depicted in the same respective line as said B1522, and preferably the activity is increased non-targeted, or
[24836] (b) a polypeptide comprising a polypeptide, a consensus sequence or at least a polypeptide motif as shown in the respective line in column 5 of Table II or in column 8 of Table IV, application no. 3, respectively, and being depicted in the same respective line as said B1522, or a functional equivalent or a homolog thereof as depicted in column 8 of Table II, application no. 3, preferably a homolog or functional equivalent as depicted in column 8 of Table II B, application no. 3, and being depicted in the same respective line as said B1522, and preferably the activity is increased non-targeted.

[24837] Accordingly, in one embodiment, the molecule which activity is to be increased in the process of the invention is the gene product with an activity as a “b1522-protein”, preferably it is the molecule of section (a) or (b) of this paragraph.

[24838] In particular, it was observed that in plants, especially in Arabidopsis thaliana, increasing or generating the activity of a gene product non-targeted with the activity of a “b1522-protein”, preferably being encoded by a gene comprising the nucleic acid sequence SEQ ID NO. 7947, preferably the coding region thereof, conferred the production of or the increase in aspartate compared with the wild type control.

[24839] The nucleic acid sequence of B1522 from Escherichia coli, e.g. as shown in the respective line in column 5 of Table I, application no. 3, has been published in B. And the activity of the gene product thereof is the activity of b1522-protein.

[24840] Accordingly, in one embodiment, the process of the present invention for producing phenylalanine in a non-human organism, like a microorganism or a plant or a part thereof, comprises increasing or generating the activity of a gene product with the activity of a gene product conferring the activity of “b1522-protein”, especially from Escherichia coli or its functional equivalent or its homolog, e.g. the increase of
[24841] (a) a gene product of a gene comprising the nucleic acid molecule as shown in the respective line in column 5 of Table I, application no. 3, preferably the coding region thereof, or a homolog or a fragment thereof, and being depicted in the same respective line as said B1522, or a functional equivalent or a homolog thereof as shown in column 8 of Table I, application no. 3, preferably the coding region thereof, particularly a homolog or functional equivalent as shown in column 8 of Table I B, application no. 3, and being depicted in the same respective line as said B1522, and preferably the activity is increased non-targeted, or
[24842] (b) a polypeptide comprising a polypeptide, a consensus sequence or at least a polypeptide motif as shown in the respective line in column 5 of Table II or in column 8 of Table IV, application no. 3, respectively, and being depicted in the same respective line as said B1522, or a functional equivalent or a homolog thereof as depicted in column 8 of Table II, application no. 3, preferably a homolog or functional equivalent as depicted in column 8 of Table II B, application no. 3, and being depicted in the same respective line as said B1522, and preferably the activity is increased non-targeted.

[24843] Accordingly, in one embodiment, the molecule which activity is to be increased in the process of the invention is the gene product with an activity as a “b1522-protein”, preferably it is the molecule of section (a) or (b) of this paragraph.

[24844] In particular, it was observed that in plants, especially in Arabidopsis thaliana, increasing or generating the activity of a gene product non-targeted with the activity of a “b1522-protein”, preferably being encoded by a gene comprising the nucleic acid sequence SEQ ID NO. 7947, preferably the coding region thereof, conferred the production of or the increase in phenylalanine compared with the wild type control.

[24845] The nucleic acid sequence of B1522 from Escherichia coli, e.g. as shown in the respective line in column 5 of Table I, application no. 3, has been published in B. And the activity of the gene product thereof is the activity of b1522-protein.

[24846] Accordingly, in one embodiment, the process of the present invention for producing serine in a non-human organism, like a microorganism or a plant or a part thereof, comprises increasing or generating the activity of a gene product with the activity of a gene product conferring the activity of “b1522-protein”, especially from Escherichia coli or its functional equivalent or its homolog, e.g. the increase of
[24847] (a) a gene product of a gene comprising the nucleic acid molecule as shown in the respective line in column 5 of Table I, application no. 3, preferably the coding region thereof, or a homolog or a fragment thereof, and being depicted in the same respective line as said B1522, or a functional equivalent or a homolog thereof as shown in column 8 of Table I, application no. 3, preferably the coding region thereof, particularly a homolog or functional equivalent as shown in column 8 of Table I B, application no. 3, and being depicted in the same respective line as said B1522, and preferably the activity is increased non-targeted, or
[24848] (b) a polypeptide comprising a polypeptide, a consensus sequence or at least a polypeptide motif as shown in the respective line in column 5 of Table II or in column 8 of Table IV, application no. 3, respectively, and being depicted in the same respective line as said B1522, or a functional equivalent or a homolog thereof as depicted in column 8 of Table II, application no. 3, preferably a homolog or functional equivalent as depicted in column 8 of Table II B, application no. 3, and being depicted in the same respective line as said B1522, and preferably the activity is increased non-targeted.

[24849] Accordingly, in one embodiment, the molecule which activity is to be increased in the process of the invention is the gene product with an activity as a “b1522-protein”, preferably it is the molecule of section (a) or (b) of this paragraph.

[24850] In particular, it was observed that in plants, especially in Arabidopsis thaliana, increasing or generating the activity of a gene product non-targeted with the activity of a “b1522-protein”, preferably being encoded by a gene comprising the nucleic acid sequence SEQ ID NO. 7947, preferably the coding region thereof, conferred the production of or the increase in serine compared with the wild type control.

[24851] The nucleic acid sequence of B1522 from Escherichia coli, e.g. as shown in the respective line in column 5 of Table I, application no. 3, has been published in B. And the activity of the gene product thereof is the activity of b1522-protein.

[24852] Accordingly, in one embodiment, the process of the present invention for producing tyrosine in a non-human organism, like a microorganism or a plant or a part thereof, comprises increasing or generating the activity of a gene product with the activity of a gene product conferring the activity of “b1522-protein”, especially from Escherichia coli or its functional equivalent or its homolog, e.g. the increase of
[24853] (a) a gene product of a gene comprising the nucleic acid molecule as shown in the respective line in column 5 of Table I, application no. 3, preferably the coding region thereof, or a homolog or a fragment thereof, and being depicted in the same respective line as said B1522, or a functional equivalent or a homolog thereof as shown in column 8 of Table I, application no. 3, preferably the coding region thereof, particularly a homolog or functional equivalent as shown in column 8 of Table I B, application no. 3, and being depicted in the same respective line as said B1522, and preferably the activity is increased non-targeted, or
[24854] (b) a polypeptide comprising a polypeptide, a consensus sequence or at least a polypeptide motif as shown in the respective line in column 5 of Table II or in column 8 of Table IV, application no. 3, respectively, and being depicted in the same respective line as said B1522, or a functional equivalent or a homolog thereof as depicted in column 8 of Table II, application no. 3, preferably a homolog or functional equivalent as depicted in column 8 of Table II B, application no. 3, and being depicted in the same respective line as said B1522, and preferably the activity is increased non-targeted.

[24855] Accordingly, in one embodiment, the molecule which activity is to be increased in the process of the invention is the gene product with an activity as a “b1522-protein”, preferably it is the molecule of section (a) or (b) of this paragraph.

[24856] In particular, it was observed that in plants, especially in Arabidopsis thaliana, increasing or generating the activity of a gene product non-targeted with the activity of a “b1522-protein”, preferably being encoded by a gene comprising the nucleic acid sequence SEQ ID NO. 7947, preferably the coding region thereof, conferred the production of or the increase in tyrosine compared with the wild type control.

[24857] The nucleic acid sequence of B1522 from Escherichia coli, e.g. as shown in the respective line in column 5 of Table I, application no. 3, has been published in B. And the activity of the gene product thereof is the activity of b1522-protein.

[24858] Accordingly, in one embodiment, the process of the present invention for producing 5-oxoproline in a non-human organism, like a microorganism or a plant or a part thereof, comprises increasing or generating the activity of a gene product with the activity of a gene product conferring the activity of “b1522-protein”, especially from Escherichia coli or its functional equivalent or its homolog, e.g. the increase of
[24859] (a) a gene product of a gene comprising the nucleic acid molecule as shown in the respective line in column 5 of Table I, application no. 3, preferably the coding region thereof, or a homolog or a fragment thereof, and being depicted in the same respective line as said B1522, or a functional equivalent or a homolog thereof as shown in column 8 of Table I, application no. 3, preferably the coding region thereof, particularly a homolog or functional equivalent as shown in column 8 of Table I B, application no. 3, and being depicted in the same respective line as said B1522, and preferably the activity is increased non-targeted, or
[24860] (b) a polypeptide comprising a polypeptide, a consensus sequence or at least a polypeptide motif as shown in the respective line in column 5 of Table II or in column 8 of Table IV, application no. 3, respectively, and being depicted in the same respective line as said B1522, or a functional equivalent or a homolog thereof as depicted in column 8 of Table II, application no. 3, preferably a homolog or functional equivalent as depicted in column 8 of Table II B, application no. 3, and being depicted in the same respective line as said B1522, and preferably the activity is increased non-targeted.

[24861] Accordingly, in one embodiment, the molecule which activity is to be increased in the process of the invention is the gene product with an activity as a “b1522-protein”, preferably it is the molecule of section (a) or (b) of this paragraph.

[24862] In particular, it was observed that in plants, especially in Arabidopsis thaliana, increasing or generating the activity of a gene product non-targeted with the activity of a “b1522-protein”, preferably being encoded by a gene comprising the nucleic acid sequence SEQ ID NO. 7947, preferably the coding region thereof, conferred the production of or the increase in 5-oxoproline compared with the wild type control.

[24863] The nucleic acid sequence of B1583 from Escherichia coli, e.g. as shown in the respective line in column 5 of Table I, application no. 3, has been published in B. And the activity of the gene product thereof is the activity of b1583-protein.

[24864] Accordingly, in one embodiment, the process of the present invention for producing tyrosine in a non-human organism, like a microorganism or a plant or a part thereof, comprises increasing or generating the activity of a gene product with the activity of a gene product conferring the activity of “b1583-protein”, especially from Escherichia coli or its functional equivalent or its homolog, e.g. the increase of
[24865] (a) a gene product of a gene comprising the nucleic acid molecule as shown in the respective line in column 5 of Table I, application no. 3, preferably the coding region thereof, or a homolog or a fragment thereof, and being depicted in the same respective line as said B1583, or a functional equivalent or a homolog thereof as shown in column 8 of Table I, application no. 3, preferably the coding region thereof, particularly a homolog or functional equivalent as shown in column 8 of Table I B, application no. 3, and being depicted in the same respective line as said B1583, and preferably the activity is increased non-targeted, or
[24866] (b) a polypeptide comprising a polypeptide, a consensus sequence or at least a polypeptide motif as shown in the respective line in column 5 of Table II or in column 8 of Table IV, application no. 3, respectively, and being depicted in the same respective line as said B1583, or a functional equivalent or a homolog thereof as depicted in column 8 of Table II, application no. 3, preferably a homolog or functional equivalent as depicted in column 8 of Table II B, application no. 3, and being depicted in the same respective line as said B1583, and preferably the activity is increased non-targeted.

[24867] Accordingly, in one embodiment, the molecule which activity is to be increased in the process of the invention is the gene product with an activity as a “b1583-protein”, preferably it is the molecule of section (a) or (b) of this paragraph.

[24868] In particular, it was observed that in plants, especially in Arabidopsis thaliana, increasing or generating the activity of a gene product non-targeted with the activity of a “b1583-protein”, preferably being encoded by a gene comprising the nucleic acid sequence SEQ ID NO. 78138, preferably the coding region thereof, conferred the production of or the increase in tyrosine compared with the wild type control.

[24869] The nucleic acid sequence of B1589 from Escherichia coli, e.g. as shown in the respective line in column 5 of Table I, application no. 3, has been published in B. And the activity of the gene product thereof is the activity of Fe—S subunit of oxidoreductase.

[24870] Accordingly, in one embodiment, the process of the present invention for producing aspartate in a non-human organism, like a microorganism or a plant or a part thereof, comprises increasing or generating the activity of a gene product with the activity of a gene product conferring the activity of “Fe—S subunit of oxidoreductase”, especially from Escherichia coli or its functional equivalent or its homolog, e.g. the increase of
[24871] (a) a gene product of a gene comprising the nucleic acid molecule as shown in the respective line in column 5 of Table I, application no. 3, preferably the coding region thereof, or a homolog or a fragment thereof, and being depicted in the same respective line as said B1589, or a functional equivalent or a homolog thereof as shown in column 8 of Table I, application no. 3, preferably the coding region thereof, particularly a homolog or functional equivalent as shown in column 8 of Table I B, application no. 3, and being depicted in the same respective line as said B1589, and preferably the activity is increased non-targeted, or
[24872] (b) a polypeptide comprising a polypeptide, a consensus sequence or at least a polypeptide motif as shown in the respective line in column 5 of Table II or in column 8 of Table IV, application no. 3, respectively, and being depicted in the same respective line as said B1589, or a functional equivalent or a homolog thereof as depicted in column 8 of Table II, application no. 3, preferably a homolog or functional equivalent as depicted in column 8 of Table II B, application no. 3, and being depicted in the same respective line as said B1589, and preferably the activity is increased non-targeted.

[24873] Accordingly, in one embodiment, the molecule which activity is to be increased in the process of the invention is the gene product with an activity as a “Fe—S subunit of oxidoreductase”, preferably it is the molecule of section (a) or (b) of this paragraph.

[24874] In particular, it was observed that in plants, especially in Arabidopsis thaliana, increasing or generating the activity of a gene product non-targeted with the activity of a “Fe—S subunit of oxidoreductase”, preferably being encoded by a gene comprising the nucleic acid sequence SEQ ID NO. 78154, preferably the coding region thereof, conferred the production of or the increase in aspartate compared with the wild type control.

[24875] The nucleic acid sequence of B1597 from Escherichia coli, e.g. as shown in the respective line in column 5 of Table I, application no. 3, has been published in B. And the activity of the gene product thereof is the activity of acid shock protein.

[24876] Accordingly, in one embodiment, the process of the present invention for producing phenylalanine in a non-human organism, like a microorganism or a plant or a part thereof, comprises increasing or generating the activity of a gene product with the activity of a gene product conferring the activity of “acid shock protein”, especially from Escherichia coli or its functional equivalent or its homolog, e.g. the increase of
[24877] (a) a gene product of a gene comprising the nucleic acid molecule as shown in the respective line in column 5 of Table I, application no. 3, preferably the coding region thereof, or a homolog or a fragment thereof, and being depicted in the same respective line as said B1597, or a functional equivalent or a homolog thereof as shown in column 8 of Table I, application no. 3, preferably the coding region thereof, particularly a homolog or functional equivalent as shown in column 8 of Table I B, application no. 3, and being depicted in the same respective line as said B1597, and preferably the activity is increased non-targeted, or
[24878] (b) a polypeptide comprising a polypeptide, a consensus sequence or at least a polypeptide motif as shown in the respective line in column 5 of Table II or in column 8 of Table IV, application no. 3, respectively, and being depicted in the same respective line as said B1597, or a functional equivalent or a homolog thereof as depicted in column 8 of Table II, application no. 3, preferably a homolog or functional equivalent as depicted in column 8 of Table II B, application no. 3, and being depicted in the same respective line as said B1597, and preferably the activity is increased non-targeted.

[24879] Accordingly, in one embodiment, the molecule which activity is to be increased in the process of the invention is the gene product with an activity as a “acid shock protein”, preferably it is the molecule of section (a) or (b) of this paragraph.

[24880] In particular, it was observed that in plants, especially in Arabidopsis thaliana, increasing or generating the activity of a gene product non-targeted with the activity of a “acid shock protein”, preferably being encoded by a gene comprising the nucleic acid sequence SEQ ID NO. 38300, preferably the coding region thereof, conferred the production of or the increase in phenylalanine compared with the wild type control.

[24881] The nucleic acid sequence of B1597 from Escherichia coli, e.g. as shown in the respective line in column 5 of Table I, application no. 3, has been published in B. And the activity of the gene product thereof is the activity of acid shock protein.

[24882] Accordingly, in one embodiment, the process of the present invention for producing tyrosine in a non-human organism, like a microorganism or a plant or a part thereof, comprises increasing or generating the activity of a gene product with the activity of a gene product conferring the activity of “acid shock protein”, especially from Escherichia coli or its functional equivalent or its homolog, e.g. the increase of
[24883] (a) a gene product of a gene comprising the nucleic acid molecule as shown in the respective line in column 5 of Table I, application no. 3, preferably the coding region thereof, or a homolog or a fragment thereof, and being depicted in the same respective line as said B1597, or a functional equivalent or a homolog thereof as shown in column 8 of Table I, application no. 3, preferably the coding region thereof, particularly a homolog or functional equivalent as shown in column 8 of Table I B, application no. 3, and being depicted in the same respective line as said B1597, and preferably the activity is increased non-targeted, or
[24884] (b) a polypeptide comprising a polypeptide, a consensus sequence or at least a polypeptide motif as shown in the respective line in column 5 of Table II or in column 8 of Table IV, application no. 3, respectively, and being depicted in the same respective line as said B1597, or a functional equivalent or a homolog thereof as depicted in column 8 of Table II, application no. 3, preferably a homolog or functional equivalent as depicted in column 8 of Table II B, application no. 3, and being depicted in the same respective line as said B1597, and preferably the activity is increased non-targeted.

[24885] Accordingly, in one embodiment, the molecule which activity is to be increased in the process of the invention is the gene product with an activity as a “acid shock protein”, preferably it is the molecule of section (a) or (b) of this paragraph.

[24886] In particular, it was observed that in plants, especially in Arabidopsis thaliana, increasing or generating the activity of a gene product non-targeted with the activity of a “acid shock protein”, preferably being encoded by a gene comprising the nucleic acid sequence SEQ ID NO. 38300, preferably the coding region thereof, conferred the production of or the increase in tyrosine compared with the wild type control.

[24887] The nucleic acid sequence of B1651 from Escherichia coli, e.g. as shown in the respective line in column 5 of Table I, application no. 3, has been published in B. And the activity of the gene product thereof is the activity of methylglyoxalase.

[24888] Accordingly, in one embodiment, the process of the present invention for producing alanine in a non-human organism, like a microorganism or a plant or a part thereof, comprises increasing or generating the activity of a gene product with the activity of a gene product conferring the activity of “methylglyoxalase”, especially from Escherichia coli or its functional equivalent or its homolog, e.g. the increase of
[24889] (a) a gene product of a gene comprising the nucleic acid molecule as shown in the respective line in column 5 of Table I, application no. 3, preferably the coding region thereof, or a homolog or a fragment thereof, and being depicted in the same respective line as said B1651, or a functional equivalent or a homolog thereof as shown in column 8 of Table I, application no. 3, preferably the coding region thereof, particularly a homolog or functional equivalent as shown in column 8 of Table I B, application no. 3, and being depicted in the same respective line as said B1651, and preferably the activity is increased non-targeted, or
[24890] (b) a polypeptide comprising a polypeptide, a consensus sequence or at least a polypeptide motif as shown in the respective line in column 5 of Table II or in column 8 of Table IV, application no. 3, respectively, and being depicted in the same respective line as said B1651, or a functional equivalent or a homolog thereof as depicted in column 8 of Table II, application no. 3, preferably a homolog or functional equivalent as depicted in column 8 of Table II B, application no. 3, and being depicted in the same respective line as said B1651, and preferably the activity is increased non-targeted.

[24891] Accordingly, in one embodiment, the molecule which activity is to be increased in the process of the invention is the gene product with an activity as a “methylglyoxalase”, preferably it is the molecule of section (a) or (b) of this paragraph.

[24892] In particular, it was observed that in plants, especially in Arabidopsis thaliana, increasing or generating the activity of a gene product non-targeted with the activity of a “methylglyoxalase”, preferably being encoded by a gene comprising the nucleic acid sequence SEQ ID NO. 78265, preferably the coding region thereof, conferred the production of or the increase in alanine compared with the wild type control.

[24893] The nucleic acid sequence of B1670 from Escherichia coli, e.g. as shown in the respective line in column 5 of Table I, application no. 3, has been published in B. And the activity of the gene product thereof is the activity of b1670-protein.

[24894] Accordingly, in one embodiment, the process of the present invention for producing aspartate in a non-human organism, like a microorganism or a plant or a part thereof, comprises increasing or generating the activity of a gene product with the activity of a gene product conferring the activity of “b1670-protein”, especially from Escherichia coli or its functional equivalent or its homolog, e.g. the increase of
[24895] (a) a gene product of a gene comprising the nucleic acid molecule as shown in the respective line in column 5 of Table I, application no. 3, preferably the coding region thereof, or a homolog or a fragment thereof, and being depicted in the same respective line as said B1670, or a functional equivalent or a homolog thereof as shown in column 8 of Table I, application no. 3, preferably the coding region thereof, particularly a homolog or functional equivalent as shown in column 8 of Table I B, application no. 3, and being depicted in the same respective line as said B1670, and preferably the activity is increased non-targeted, or
[24896] (b) a polypeptide comprising a polypeptide, a consensus sequence or at least a polypeptide motif as shown in the respective line in column 5 of Table II or in column 8 of Table IV, application no. 3, respectively, and being depicted in the same respective line as said B1670, or a functional equivalent or a homolog thereof as depicted in column 8 of Table II, application no. 3, preferably a homolog or functional equivalent as depicted in column 8 of Table II B, application no. 3, and being depicted in the same respective line as said B1670, and preferably the activity is increased non-targeted.

[24897] Accordingly, in one embodiment, the molecule which activity is to be increased in the process of the invention is the gene product with an activity as a “b1670-protein”, preferably it is the molecule of section (a) or (b) of this paragraph.

[24898] In particular, it was observed that in plants, especially in Arabidopsis thaliana, increasing or generating the activity of a gene product non-targeted with the activity of a “b1670-protein”, preferably being encoded by a gene comprising the nucleic acid sequence SEQ ID NO. 78753, preferably the coding region thereof, conferred the production of or the increase in aspartate compared with the wild type control.

[24899] The nucleic acid sequence of B1672 from Escherichia coli, e.g. as shown in the respective line in column 5 of Table I, application no. 3, has been published in B. And the activity of the gene product thereof is the activity of b1672-protein.

[24900] Accordingly, in one embodiment, the process of the present invention for producing aspartate in a non-human organism, like a microorganism or a plant or a part thereof, comprises increasing or generating the activity of a gene product with the activity of a gene product conferring the activity of “b1672-protein”, especially from Escherichia coli or its functional equivalent or its homolog, e.g. the increase of
[24901] (a) a gene product of a gene comprising the nucleic acid molecule as shown in the respective line in column 5 of Table I, application no. 3, preferably the coding region thereof, or a homolog or a fragment thereof, and being depicted in the same respective line as said B1672, or a functional equivalent or a homolog thereof as shown in column 8 of Table I, application no. 3, preferably the coding region thereof, particularly a homolog or functional equivalent as shown in column 8 of Table I B, application no. 3, and being depicted in the same respective line as said B1672, and preferably the activity is increased non-targeted, or
[24902] (b) a polypeptide comprising a polypeptide, a consensus sequence or at least a polypeptide motif as shown in the respective line in column 5 of Table II or in column 8 of Table IV, application no. 3, respectively, and being depicted in the same respective line as said B1672, or a functional equivalent or a homolog thereof as depicted in column 8 of Table II, application no. 3, preferably a homolog or functional equivalent as depicted in column 8 of Table II B, application no. 3, and being depicted in the same respective line as said B1672, and preferably the activity is increased non-targeted.

[24903] Accordingly, in one embodiment, the molecule which activity is to be increased in the process of the invention is the gene product with an activity as a “b1672-protein”, preferably it is the molecule of section (a) or (b) of this paragraph.

[24904] In particular, it was observed that in plants, especially in Arabidopsis thaliana, increasing or generating the activity of a gene product non-targeted with the activity of a “b1672-protein”, preferably being encoded by a gene comprising the nucleic acid sequence SEQ ID NO. 78771, preferably the coding region thereof, conferred the production of or the increase in aspartate compared with the wild type control.

[24905] The nucleic acid sequence of B1747 from Escherichia coli, e.g. as shown in the respective line in column 5 of Table I, application no. 3, has been published in B. And the activity of the gene product thereof is the activity of arginine N-succinyltransferase.

[24906] Accordingly, in one embodiment, the process of the present invention for producing alanine in a non-human organism, like a microorganism or a plant or a part thereof, comprises increasing or generating the activity of a gene product with the activity of a gene product conferring the activity of “arginine N-succinyltransferase”, especially from Escherichia coli or its functional equivalent or its homolog, e.g. the increase of
[24907] (a) a gene product of a gene comprising the nucleic acid molecule as shown in the respective line in column 5 of Table I, application no. 3, preferably the coding region thereof, or a homolog or a fragment thereof, and being depicted in the same respective line as said B1747, or a functional equivalent or a homolog thereof as shown in column 8 of Table I, application no. 3, preferably the coding region thereof, particularly a homolog or functional equivalent as shown in column 8 of Table I B, application no. 3, and being depicted in the same respective line as said B1747, and preferably the activity is increased plastidic, or
[24908] (b) a polypeptide comprising a polypeptide, a consensus sequence or at least a polypeptide motif as shown in the respective line in column 5 of Table II or in column 8 of Table IV, application no. 3, respectively, and being depicted in the same respective line as said B1747, or a functional equivalent or a homolog thereof as depicted in column 8 of Table II, application no. 3, preferably a homolog or functional equivalent as depicted in column 8 of Table II B, application no. 3, and being depicted in the same respective line as said B1747, and preferably the activity is increased plastidic.

[24909] Accordingly, in one embodiment, the molecule which activity is to be increased in the process of the invention is the gene product with an activity as a “arginine N-succinyltransferase”, preferably it is the molecule of section (a) or (b) of this paragraph.

[24910] In particular, it was observed that in plants, especially in Arabidopsis thaliana, increasing or generating the activity of a gene product plastidic with the activity of a “arginine N-succinyltransferase”, preferably being encoded by a gene comprising the nucleic acid sequence SEQ ID NO. 78779, preferably the coding region thereof, conferred the production of or the increase in alanine compared with the wild type control.

[24911] The nucleic acid sequence of B1755 from Escherichia coli, e.g. as shown in the respective line in column 5 of Table I, application no. 3, has been published in B. And the activity of the gene product thereof is the activity of ABC transporter permease protein.

[24912] Accordingly, in one embodiment, the process of the present invention for producing aspartate in a non-human organism, like a microorganism or a plant or a part thereof, comprises increasing or generating the activity of a gene product with the activity of a gene product conferring the activity of “ABC transporter permease protein”, especially from Escherichia coli or its functional equivalent or its homolog, e.g. the increase of
[24913] (a) a gene product of a gene comprising the nucleic acid molecule as shown in the respective line in column 5 of Table I, application no. 3, preferably the coding region thereof, or a homolog or a fragment thereof, and being depicted in the same respective line as said B1755, or a functional equivalent or a homolog thereof as shown in column 8 of Table I, application no. 3, preferably the coding region thereof, particularly a homolog or functional equivalent as shown in column 8 of Table I B, application no. 3, and being depicted in the same respective line as said B1755, and preferably the activity is increased non-targeted, or
[24914] (b) a polypeptide comprising a polypeptide, a consensus sequence or at least a polypeptide motif as shown in the respective line in column 5 of Table II or in column 8 of Table IV, application no. 3, respectively, and being depicted in the same respective line as said B1755, or a functional equivalent or a homolog thereof as depicted in column 8 of Table II, application no. 3, preferably a homolog or functional equivalent as depicted in column 8 of Table II B, application no. 3, and being depicted in the same respective line as said B1755, and preferably the activity is increased non-targeted.

[24915] Accordingly, in one embodiment, the molecule which activity is to be increased in the process of the invention is the gene product with an activity as a “ABC transporter permease protein”, preferably it is the molecule of section (a) or (b) of this paragraph.

[24916] In particular, it was observed that in plants, especially in Arabidopsis thaliana, increasing or generating the activity of a gene product non-targeted with the activity of a “ABC transporter permease protein”, preferably being encoded by a gene comprising the nucleic acid sequence SEQ ID NO. 78852, preferably the coding region thereof, conferred the production of or the increase in aspartate compared with the wild type control.

[24917] The nucleic acid sequence of B1755 from Escherichia coli, e.g. as shown in the respective line in column 5 of Table I, application no. 3, has been published in B. And the activity of the gene product thereof is the activity of ABC transporter permease protein.

[24918] Accordingly, in one embodiment, the process of the present invention for producing tyrosine in a non-human organism, like a microorganism or a plant or a part thereof, comprises increasing or generating the activity of a gene product with the activity of a gene product conferring the activity of “ABC transporter permease protein”, especially from Escherichia coli or its functional equivalent or its homolog, e.g. the increase of
[24919] (a) a gene product of a gene comprising the nucleic acid molecule as shown in the respective line in column 5 of Table I, application no. 3, preferably the coding region thereof, or a homolog or a fragment thereof, and being depicted in the same respective line as said B1755, or a functional equivalent or a homolog thereof as shown in column 8 of Table I, application no. 3, preferably the coding region thereof, particularly a homolog or functional equivalent as shown in column 8 of Table I B, application no. 3, and being depicted in the same respective line as said B1755, and preferably the activity is increased non-targeted, or
[24920] (b) a polypeptide comprising a polypeptide, a consensus sequence or at least a polypeptide motif as shown in the respective line in column 5 of Table II or in column 8 of Table IV, application no. 3, respectively, and being depicted in the same respective line as said B1755, or a functional equivalent or a homolog thereof as depicted in column 8 of Table II, application no. 3, preferably a homolog or functional equivalent as depicted in column 8 of Table II B, application no. 3, and being depicted in the same respective line as said B1755, and preferably the activity is increased non-targeted.

[24921] Accordingly, in one embodiment, the molecule which activity is to be increased in the process of the invention is the gene product with an activity as a “ABC transporter permease protein”, preferably it is the molecule of section (a) or (b) of this paragraph.

[24922] In particular, it was observed that in plants, especially in Arabidopsis thaliana, increasing or generating the activity of a gene product non-targeted with the activity of a “ABC transporter permease protein”, preferably being encoded by a gene comprising the nucleic acid sequence SEQ ID NO. 78852, preferably the coding region thereof, conferred the production of or the increase in tyrosine compared with the wild type control.

[24923] The nucleic acid sequence of B1791 from Escherichia coli, e.g. as shown in the respective line in column 5 of Table I, application no. 3, has been published in B. And the activity of the gene product thereof is the activity of transport protein.

[24924] Accordingly, in one embodiment, the process of the present invention for producing aspartate in a non-human organism, like a microorganism or a plant or a part thereof, comprises increasing or generating the activity of a gene product with the activity of a gene product conferring the activity of “transport protein”, especially from Escherichia coli or its functional equivalent or its homolog, e.g. the increase of
[24925] (a) a gene product of a gene comprising the nucleic acid molecule as shown in the respective line in column 5 of Table I, application no. 3, preferably the coding region thereof, or a homolog or a fragment thereof, and being depicted in the same respective line as said B1791, or a functional equivalent or a homolog thereof as shown in column 8 of Table I, application no. 3, preferably the coding region thereof, particularly a homolog or functional equivalent as shown in column 8 of Table I B, application no. 3, and being depicted in the same respective line as said B1791, and preferably the activity is increased non-targeted, or
[24926] (b) a polypeptide comprising a polypeptide, a consensus sequence or at least a polypeptide motif as shown in the respective line in column 5 of Table II or in column 8 of Table IV, application no. 3, respectively, and being depicted in the same respective line as said B1791, or a functional equivalent or a homolog thereof as depicted in column 8 of Table II, application no. 3, preferably a homolog or functional equivalent as depicted in column 8 of Table II B, application no. 3, and being depicted in the same respective line as said B1791, and preferably the activity is increased non-targeted.

[24927] Accordingly, in one embodiment, the molecule which activity is to be increased in the process of the invention is the gene product with an activity as a “transport protein”, preferably it is the molecule of section (a) or (b) of this paragraph.

[24928] In particular, it was observed that in plants, especially in Arabidopsis thaliana, increasing or generating the activity of a gene product non-targeted with the activity of a “transport protein”, preferably being encoded by a gene comprising the nucleic acid sequence SEQ ID NO. 78883, preferably the coding region thereof, conferred the production of or the increase in aspartate compared with the wild type control.

[24929] The nucleic acid sequence of B1837 from Escherichia coli, e.g. as shown in the respective line in column 5 of Table I, application no. 3, has been published in B. And the activity of the gene product thereof is the activity of b1837-protein.

[24930] Accordingly, in one embodiment, the process of the present invention for producing aspartate in a non-human organism, like a microorganism or a plant or a part thereof, comprises increasing or generating the activity of a gene product with the activity of a gene product conferring the activity of “b1837-protein”, especially from Escherichia coli or its functional equivalent or its homolog, e.g. the increase of
[24931] (a) a gene product of a gene comprising the nucleic acid molecule as shown in the respective line in column 5 of Table I, application no. 3, preferably the coding region thereof, or a homolog or a fragment thereof, and being depicted in the same respective line as said B1837, or a functional equivalent or a homolog thereof as shown in column 8 of Table I, application no. 3, preferably the coding region thereof, particularly a homolog or functional equivalent as shown in column 8 of Table I B, application no. 3, and being depicted in the same respective line as said B1837, and preferably the activity is increased non-targeted, or
[24932] (b) a polypeptide comprising a polypeptide, a consensus sequence or at least a polypeptide motif as shown in the respective line in column 5 of Table II or in column 8 of Table IV, application no. 3, respectively, and being depicted in the same respective line as said B1837, or a functional equivalent or a homolog thereof as depicted in column 8 of Table II, application no. 3, preferably a homolog or functional equivalent as depicted in column 8 of Table II B, application no. 3, and being depicted in the same respective line as said B1837, and preferably the activity is increased non-targeted.

[24933] Accordingly, in one embodiment, the molecule which activity is to be increased in the process of the invention is the gene product with an activity as a “b1837-protein”, preferably it is the molecule of section (a) or (b) of this paragraph.

[24934] In particular, it was observed that in plants, especially in Arabidopsis thaliana, increasing or generating the activity of a gene product non-targeted with the activity of a “b1837-protein”, preferably being encoded by a gene comprising the nucleic acid sequence SEQ ID NO. 78953, preferably the coding region thereof, conferred the production of or the increase in aspartate compared with the wild type control.

[24935] The nucleic acid sequence of B1838 from Escherichia coli, e.g. as shown in the respective line in column 5 of Table I, application no. 3, has been published in B. And the activity of the gene product thereof is the activity of serine/threonine-protein phosphatase.

[24936] Accordingly, in one embodiment, the process of the present invention for producing aspartate in a non-human organism, like a microorganism or a plant or a part thereof, comprises increasing or generating the activity of a gene product with the activity of a gene product conferring the activity of “serine/threonine-protein phosphatase”, especially from Escherichia coli or its functional equivalent or its homolog, e.g. the increase of
[24937] (a) a gene product of a gene comprising the nucleic acid molecule as shown in the respective line in column 5 of Table I, application no. 3, preferably the coding region thereof, or a homolog or a fragment thereof, and being depicted in the same respective line as said B1838, or a functional equivalent or a homolog thereof as shown in column 8 of Table I, application no. 3, preferably the coding region thereof, particularly a homolog or functional equivalent as shown in column 8 of Table I B, application no. 3, and being depicted in the same respective line as said B1838, and preferably the activity is increased non-targeted, or
[24938] (b) a polypeptide comprising a polypeptide, a consensus sequence or at least a polypeptide motif as shown in the respective line in column 5 of Table II or in column 8 of Table IV, application no. 3, respectively, and being depicted in the same respective line as said B1838, or a functional equivalent or a homolog thereof as depicted in column 8 of Table II, application no. 3, preferably a homolog or functional equivalent as depicted in column 8 of Table II B, application no. 3, and being depicted in the same respective line as said B1838, and preferably the activity is increased non-targeted.

[24939] Accordingly, in one embodiment, the molecule which activity is to be increased in the process of the invention is the gene product with an activity as a “serine/threonine-protein phosphatase”, preferably it is the molecule of section (a) or (b) of this paragraph.

[24940] In particular, it was observed that in plants, especially in Arabidopsis thaliana, increasing or generating the activity of a gene product non-targeted with the activity of a “serine/threonineprotein phosphatase”, preferably being encoded by a gene comprising the nucleic acid sequence SEQ ID NO. 8316, preferably the coding region thereof, conferred the production of or the increase in aspartate compared with the wild type control.

[24941] The nucleic acid sequence of B1845 from Escherichia coli, e.g. as shown in the respective line in column 5 of Table I, application no. 3, has been published in B. And the activity of the gene product thereof is the activity of protease.

[24942] Accordingly, in one embodiment, the process of the present invention for producing aspartate in a non-human organism, like a microorganism or a plant or a part thereof, comprises increasing or generating the activity of a gene product with the activity of a gene product conferring the activity of “protease”, especially from Escherichia coli or its functional equivalent or its homolog, e.g. the increase of
[24943] (a) a gene product of a gene comprising the nucleic acid molecule as shown in the respective line in column 5 of Table I, application no. 3, preferably the coding region thereof, or a homolog or a fragment thereof, and being depicted in the same respective line as said B1845, or a functional equivalent or a homolog thereof as shown in column 8 of Table I, application no. 3, preferably the coding region thereof, particularly a homolog or functional equivalent as shown in column 8 of Table I B, application no. 3, and being depicted in the same respective line as said B1845, and preferably the activity is increased non-targeted, or
[24944] (b) a polypeptide comprising a polypeptide, a consensus sequence or at least a polypeptide motif as shown in the respective line in column 5 of Table II or in column 8 of Table IV, application no. 3, respectively, and being depicted in the same respective line as said B1845, or a functional equivalent or a homolog thereof as depicted in column 8 of Table II, application no. 3, preferably a homolog or functional equivalent as depicted in column 8 of Table II B, application no. 3, and being depicted in the same respective line as said B1845, and preferably the activity is increased non-targeted.

[24945] Accordingly, in one embodiment, the molecule which activity is to be increased in the process of the invention is the gene product with an activity as a “protease”, preferably it is the molecule of section (a) or (b) of this paragraph.

[24946] In particular, it was observed that in plants, especially in Arabidopsis thaliana, increasing or generating the activity of a gene product non-targeted with the activity of a “protease”, preferably being encoded by a gene comprising the nucleic acid sequence SEQ ID NO. 38573, preferably the coding region thereof, conferred the production of or the increase in aspartate compared with the wild type control.

[24947] The nucleic acid sequence of B1845 from Escherichia coli, e.g. as shown in the respective line in column 5 of Table I, application no. 3, has been published in B. And the activity of the gene product thereof is the activity of protease.

[24948] Accordingly, in one embodiment, the process of the present invention for producing serine in a non-human organism, like a microorganism or a plant or a part thereof, comprises increasing or generating the activity of a gene product with the activity of a gene product conferring the activity of “protease”, especially from Escherichia coli or its functional equivalent or its homolog, e.g. the increase of
[24949] (a) a gene product of a gene comprising the nucleic acid molecule as shown in the respective line in column 5 of Table I, application no. 3, preferably the coding region thereof, or a homolog or a fragment thereof, and being depicted in the same respective line as said B1845, or a functional equivalent or a homolog thereof as shown in column 8 of Table I, application no. 3, preferably the coding region thereof, particularly a homolog or functional equivalent as shown in column 8 of Table I B, application no. 3, and being depicted in the same respective line as said B1845, and preferably the activity is increased non-targeted, or
[24950] (b) a polypeptide comprising a polypeptide, a consensus sequence or at least a polypeptide motif as shown in the respective line in column 5 of Table II or in column 8 of Table IV, application no. 3, respectively, and being depicted in the same respective line as said B1845, or a functional equivalent or a homolog thereof as depicted in column 8 of Table II, application no. 3, preferably a homolog or functional equivalent as depicted in column 8 of Table II B, application no. 3, and being depicted in the same respective line as said B1845, and preferably the activity is increased non-targeted.

[24951] Accordingly, in one embodiment, the molecule which activity is to be increased in the process of the invention is the gene product with an activity as a “protease”, preferably it is the molecule of section (a) or (b) of this paragraph.

[24952] In particular, it was observed that in plants, especially in Arabidopsis thaliana, increasing or generating the activity of a gene product non-targeted with the activity of a “protease”, preferably being encoded by a gene comprising the nucleic acid sequence SEQ ID NO. 38573, preferably the coding region thereof, conferred the production of or the increase in serine compared with the wild type control.

[24953] The nucleic acid sequence of B1854 from Escherichia coli, e.g. as shown in the respective line in column 5 of Table I, application no. 3, has been published in B. And the activity of the gene product thereof is the activity of pyruvate kinase.

[24954] Accordingly, in one embodiment, the process of the present invention for producing asparagine in a non-human organism, like a microorganism or a plant or a part thereof, comprises increasing or generating the activity of a gene product with the activity of a gene product conferring the activity of “pyruvate kinase”, especially from Escherichia coli or its functional equivalent or its homolog, e.g. the increase of
[24955] (a) a gene product of a gene comprising the nucleic acid molecule as shown in the respective line in column 5 of Table I, application no. 3, preferably the coding region thereof, or a homolog or a fragment thereof, and being depicted in the same respective line as said B1854, or a functional equivalent or a homolog thereof as shown in column 8 of Table I, application no. 3, preferably the coding region thereof, particularly a homolog or functional equivalent as shown in column 8 of Table I B, application no. 3, and being depicted in the same respective line as said B1854, and preferably the activity is increased plastidic, or
[24956] (b) a polypeptide comprising a polypeptide, a consensus sequence or at least a polypeptide motif as shown in the respective line in column 5 of Table II or in column 8 of Table IV, application no. 3, respectively, and being depicted in the same respective line as said B1854, or a functional equivalent or a homolog thereof as depicted in column 8 of Table II, application no. 3, preferably a homolog or functional equivalent as depicted in column 8 of Table II B, application no. 3, and being depicted in the same respective line as said B1854, and preferably the activity is increased plastidic.

[24957] Accordingly, in one embodiment, the molecule which activity is to be increased in the process of the invention is the gene product with an activity as a “pyruvate kinase”, preferably it is the molecule of section (a) or (b) of this paragraph.

[24958] In particular, it was observed that in plants, especially in Arabidopsis thaliana, increasing or generating the activity of a gene product plastidic with the activity of a “pyruvate kinase”, preferably being encoded by a gene comprising the nucleic acid sequence SEQ ID NO. 8363, preferably the coding region thereof, conferred the production of or the increase in asparagine compared with the wild type control.

[24959] The nucleic acid sequence of B1873 from Escherichia coli, e.g. as shown in the respective line in column 5 of Table I, application no. 3, has been published in B. And the activity of the gene product thereof is the activity of cytochrome c-type protein.

[24960] Accordingly, in one embodiment, the process of the present invention for producing tyrosine in a non-human organism, like a microorganism or a plant or a part thereof, comprises increasing or generating the activity of a gene product with the activity of a gene product conferring the activity of “cytochrome c-type protein”, especially from Escherichia coli or its functional equivalent or its homolog, e.g. the increase of
[24961] (a) a gene product of a gene comprising the nucleic acid molecule as shown in the respective line in column 5 of Table I, application no. 3, preferably the coding region thereof, or a homolog or a fragment thereof, and being depicted in the same respective line as said B1873, or a functional equivalent or a homolog thereof as shown in column 8 of Table I, application no. 3, preferably the coding region thereof, particularly a homolog or functional equivalent as shown in column 8 of Table I B, application no. 3, and being depicted in the same respective line as said B1873, and preferably the activity is increased non-targeted, or
[24962] (b) a polypeptide comprising a polypeptide, a consensus sequence or at least a polypeptide motif as shown in the respective line in column 5 of Table II or in column 8 of Table IV, application no. 3, respectively, and being depicted in the same respective line as said B1873, or a functional equivalent or a homolog thereof as depicted in column 8 of Table II, application no. 3, preferably a homolog or functional equivalent as depicted in column 8 of Table II B, application no. 3, and being depicted in the same respective line as said B1873, and preferably the activity is increased non-targeted.

[24963] Accordingly, in one embodiment, the molecule which activity is to be increased in the process of the invention is the gene product with an activity as a “cytochrome c-type protein”, preferably it is the molecule of section (a) or (b) of this paragraph.

[24964] In particular, it was observed that in plants, especially in Arabidopsis thaliana, increasing or generating the activity of a gene product non-targeted with the activity of a “cytochrome c-type protein”, preferably being encoded by a gene comprising the nucleic acid sequence SEQ ID NO. 78970, preferably the coding region thereof, conferred the production of or the increase in tyrosine compared with the wild type control.

[24965] The nucleic acid sequence of B1897 from Escherichia coli, e.g. as shown in the respective line in column 5 of Table I, application no. 3, has been published in B. And the activity of the gene product thereof is the activity of trehalose-phosphatase.

[24966] Accordingly, in one embodiment, the process of the present invention for producing phenylalanine in a non-human organism, like a microorganism or a plant or a part thereof, comprises increasing or generating the activity of a gene product with the activity of a gene product conferring the activity of “trehalose-phosphatase”, especially from Escherichia coli or its functional equivalent or its homolog, e.g. the increase of
[24967] (a) a gene product of a gene comprising the nucleic acid molecule as shown in the respective line in column 5 of Table I, application no. 3, preferably the coding region thereof, or a homolog or a fragment thereof, and being depicted in the same respective line as said B1897, or a functional equivalent or a homolog thereof as shown in column 8 of Table I, application no. 3, preferably the coding region thereof, particularly a homolog or functional equivalent as shown in column 8 of Table I B, application no. 3, and being depicted in the same respective line as said B1897, and preferably the activity is increased non-targeted, or
[24968] (b) a polypeptide comprising a polypeptide, a consensus sequence or at least a polypeptide motif as shown in the respective line in column 5 of Table II or in column 8 of Table IV, application no. 3, respectively, and being depicted in the same respective line as said B1897, or a functional equivalent or a homolog thereof as depicted in column 8 of Table II, application no. 3, preferably a homolog or functional equivalent as depicted in column 8 of Table II B, application no. 3, and being depicted in the same respective line as said B1897, and preferably the activity is increased non-targeted.

[24969] Accordingly, in one embodiment, the molecule which activity is to be increased in the process of the invention is the gene product with an activity as a “trehalose-phosphatase”, preferably it is the molecule of section (a) or (b) of this paragraph.

[24970] In particular, it was observed that in plants, especially in Arabidopsis thaliana, increasing or generating the activity of a gene product non-targeted with the activity of a “trehalose-phosphatase”, preferably being encoded by a gene comprising the nucleic acid sequence SEQ ID NO. 79056, preferably the coding region thereof, conferred the production of or the increase in phenylalanine compared with the wild type control.

[24971] The nucleic acid sequence of B1897 from Escherichia coli, e.g. as shown in the respective line in column 5 of Table I, application no. 3, has been published in B. And the activity of the gene product thereof is the activity of trehalose-phosphatase.

[24972] Accordingly, in one embodiment, the process of the present invention for producing tyrosine in a non-human organism, like a microorganism or a plant or a part thereof, comprises increasing or generating the activity of a gene product with the activity of a gene product conferring the activity of “trehalose-phosphatase”, especially from Escherichia coli or its functional equivalent or its homolog, e.g. the increase of
[24973] (a) a gene product of a gene comprising the nucleic acid molecule as shown in the respective line in column 5 of Table I, application no. 3, preferably the coding region thereof, or a homolog or a fragment thereof, and being depicted in the same respective line as said B1897, or a functional equivalent or a homolog thereof as shown in column 8 of Table I, application no. 3, preferably the coding region thereof, particularly a homolog or functional equivalent as shown in column 8 of Table I B, application no. 3, and being depicted in the same respective line as said B1897, and preferably the activity is increased non-targeted, or
[24974] (b) a polypeptide comprising a polypeptide, a consensus sequence or at least a polypeptide motif as shown in the respective line in column 5 of Table II or in column 8 of Table IV, application no. 3, respectively, and being depicted in the same respective line as said B1897, or a functional equivalent or a homolog thereof as depicted in column 8 of Table II, application no. 3, preferably a homolog or functional equivalent as depicted in column 8 of Table II B, application no. 3, and being depicted in the same respective line as said B1897, and preferably the activity is increased non-targeted.

[24975] Accordingly, in one embodiment, the molecule which activity is to be increased in the process of the invention is the gene product with an activity as a “trehalose-phosphatase”, preferably it is the molecule of section (a) or (b) of this paragraph.

[24976] In particular, it was observed that in plants, especially in Arabidopsis thaliana, increasing or generating the activity of a gene product non-targeted with the activity of a “trehalosephosphatase”, preferably being encoded by a gene comprising the nucleic acid sequence SEQ ID NO. 79056, preferably the coding region thereof, conferred the production of or the increase in tyrosine compared with the wild type control.

[24977] The nucleic acid sequence of B1898 from Escherichia coli, e.g. as shown in the respective line in column 5 of Table I, application no. 3, has been published in B. And the activity of the gene product thereof is the activity of b1898-protein.

[24978] Accordingly, in one embodiment, the process of the present invention for producing serine in a non-human organism, like a microorganism or a plant or a part thereof, comprises increasing or generating the activity of a gene product with the activity of a gene product conferring the activity of “b1898-protein”, especially from Escherichia coli or its functional equivalent or its homolog, e.g. the increase of
[24979] (a) a gene product of a gene comprising the nucleic acid molecule as shown in the respective line in column 5 of Table I, application no. 3, preferably the coding region thereof, or a homolog or a fragment thereof, and being depicted in the same respective line as said B1898, or a functional equivalent or a homolog thereof as shown in column 8 of Table I, application no. 3, preferably the coding region thereof, particularly a homolog or functional equivalent as shown in column 8 of Table I B, application no. 3, and being depicted in the same respective line as said B1898, and preferably the activity is increased non-targeted, or
[24980] (b) a polypeptide comprising a polypeptide, a consensus sequence or at least a polypeptide motif as shown in the respective line in column 5 of Table II or in column 8 of Table IV, application no. 3, respectively, and being depicted in the same respective line as said B1898, or a functional equivalent or a homolog thereof as depicted in column 8 of Table II, application no. 3, preferably a homolog or functional equivalent as depicted in column 8 of Table II B, application no. 3, and being depicted in the same respective line as said B1898, and preferably the activity is increased non-targeted.

[24981] Accordingly, in one embodiment, the molecule which activity is to be increased in the process of the invention is the gene product with an activity as a “b1898-protein”, preferably it is the molecule of section (a) or (b) of this paragraph.

[24982] In particular, it was observed that in plants, especially in Arabidopsis thaliana, increasing or generating the activity of a gene product non-targeted with the activity of a “b1898-protein”, preferably being encoded by a gene comprising the nucleic acid sequence SEQ ID NO. 38767, preferably the coding region thereof, conferred the production of or the increase in serine compared with the wild type control.

[24983] The nucleic acid sequence of B1930 from Escherichia coli, e.g. as shown in the respective line in column 5 of Table I, application no. 3, has been published in B. And the activity of the gene product thereof is the activity of b1930-protein.

[24984] Accordingly, in one embodiment, the process of the present invention for producing serine in a non-human organism, like a microorganism or a plant or a part thereof, comprises increasing or generating the activity of a gene product with the activity of a gene product conferring the activity of “b1930-protein”, especially from Escherichia coli or its functional equivalent or its homolog, e.g. the increase of
[24985] (a) a gene product of a gene comprising the nucleic acid molecule as shown in the respective line in column 5 of Table I, application no. 3, preferably the coding region thereof, or a homolog or a fragment thereof, and being depicted in the same respective line as said B1930, or a functional equivalent or a homolog thereof as shown in column 8 of Table I, application no. 3, preferably the coding region thereof, particularly a homolog or functional equivalent as shown in column 8 of Table I B, application no. 3, and being depicted in the same respective line as said B1930, and preferably the activity is increased non-targeted, or
[24986] (b) a polypeptide comprising a polypeptide, a consensus sequence or at least a polypeptide motif as shown in the respective line in column 5 of Table II or in column 8 of Table IV, application no. 3, respectively, and being depicted in the same respective line as said B1930, or a functional equivalent or a homolog thereof as depicted in column 8 of Table II, application no. 3, preferably a homolog or functional equivalent as depicted in column 8 of Table II B, application no. 3, and being depicted in the same respective line as said B1930, and preferably the activity is increased non-targeted.

[24987] Accordingly, in one embodiment, the molecule which activity is to be increased in the process of the invention is the gene product with an activity as a “b1930-protein”, preferably it is the molecule of section (a) or (b) of this paragraph.

[24988] In particular, it was observed that in plants, especially in Arabidopsis thaliana, increasing or generating the activity of a gene product non-targeted with the activity of a “b1930-protein”, preferably being encoded by a gene comprising the nucleic acid sequence SEQ ID NO. 79181, preferably the coding region thereof, conferred the production of or the increase in serine compared with the wild type control.

[24989] The nucleic acid sequence of B1981 from Escherichia coli, e.g. as shown in the respective line in column 5 of Table I, application no. 3, has been published in B. And the activity of the gene product thereof is the activity of transport protein.

[24990] Accordingly, in one embodiment, the process of the present invention for producing aspartate in a non-human organism, like a microorganism or a plant or a part thereof, comprises increasing or generating the activity of a gene product with the activity of a gene product conferring the activity of “transport protein”, especially from Escherichia coli or its functional equivalent or its homolog, e.g. the increase of
[24991] (a) a gene product of a gene comprising the nucleic acid molecule as shown in the respective line in column 5 of Table I, application no. 3, preferably the coding region thereof, or a homolog or a fragment thereof, and being depicted in the same respective line as said B1981, or a functional equivalent or a homolog thereof as shown in column 8 of Table I, application no. 3, preferably the coding region thereof, particularly a homolog or functional equivalent as shown in column 8 of Table I B, application no. 3, and being depicted in the same respective line as said B1981, and preferably the activity is increased non-targeted, or
[24992] (b) a polypeptide comprising a polypeptide, a consensus sequence or at least a polypeptide motif as shown in the respective line in column 5 of Table II or in column 8 of Table IV, application no. 3, respectively, and being depicted in the same respective line as said B1981, or a functional equivalent or a homolog thereof as depicted in column 8 of Table II, application no. 3, preferably a homolog or functional equivalent as depicted in column 8 of Table II B, application no. 3, and being depicted in the same respective line as said B1981, and preferably the activity is increased non-targeted.

[24993] Accordingly, in one embodiment, the molecule which activity is to be increased in the process of the invention is the gene product with an activity as a “transport protein”, preferably it is the molecule of section (a) or (b) of this paragraph.

[24994] In particular, it was observed that in plants, especially in Arabidopsis thaliana, increasing or generating the activity of a gene product non-targeted with the activity of a “transport protein”, preferably being encoded by a gene comprising the nucleic acid sequence SEQ ID NO. 38899, preferably the coding region thereof, conferred the production of or the increase in aspartate compared with the wild type control.

[24995] The nucleic acid sequence of B2027 from Escherichia coli, e.g. as shown in the respective line in column 5 of Table I, application no. 3, has been published in B. And the activity of the gene product thereof is the activity of O-antigen chain length determinant.

[24996] Accordingly, in one embodiment, the process of the present invention for producing tyrosine in a non-human organism, like a microorganism or a plant or a part thereof, comprises increasing or generating the activity of a gene product with the activity of a gene product conferring the activity of “O-antigen chain length determinant”, especially from Escherichia coli or its functional equivalent or its homolog, e.g. the increase of
[24997] (a) a gene product of a gene comprising the nucleic acid molecule as shown in the respective line in column 5 of Table I, application no. 3, preferably the coding region thereof, or a homolog or a fragment thereof, and being depicted in the same respective line as said B2027, or a functional equivalent or a homolog thereof as shown in column 8 of Table I, application no. 3, preferably the coding region thereof, particularly a homolog or functional equivalent as shown in column 8 of Table I B, application no. 3, and being depicted in the same respective line as said B2027, and preferably the activity is increased non-targeted, or
[24998] (b) a polypeptide comprising a polypeptide, a consensus sequence or at least a polypeptide motif as shown in the respective line in column 5 of Table II or in column 8 of Table IV, application no. 3, respectively, and being depicted in the same respective line as said B2027, or a functional equivalent or a homolog thereof as depicted in column 8 of Table II, application no. 3, preferably a homolog or functional equivalent as depicted in column 8 of Table II B, application no. 3, and being depicted in the same respective line as said B2027, and preferably the activity is increased non-targeted.

[24999] Accordingly, in one embodiment, the molecule which activity is to be increased in the process of the invention is the gene product with an activity as a “O-antigen chain length determinant”, preferably it is the molecule of section (a) or (b) of this paragraph.

[25000] In particular, it was observed that in plants, especially in Arabidopsis thaliana, increasing or generating the activity of a gene product non-targeted with the activity of a “O-antigen chain length determinant”, preferably being encoded by a gene comprising the nucleic acid sequence SEQ ID NO. 79217, preferably the coding region thereof, conferred the production of or the increase in tyrosine compared with the wild type control.

[25001] The nucleic acid sequence of B2032 from Escherichia coli, e.g. as shown in the respective line in column 5 of Table I, application no. 3, has been published in B. And the activity of the gene product thereof is the activity of b2032-protein.

[25002] Accordingly, in one embodiment, the process of the present invention for producing aspartate in a non-human organism, like a microorganism or a plant or a part thereof, comprises increasing or generating the activity of a gene product with the activity of a gene product conferring the activity of “b2032-protein”, especially from Escherichia coli or its functional equivalent or its homolog, e.g. the increase of
[25003] (a) a gene product of a gene comprising the nucleic acid molecule as shown in the respective line in column 5 of Table I, application no. 3, preferably the coding region thereof, or a homolog or a fragment thereof, and being depicted in the same respective line as said B2032, or a functional equivalent or a homolog thereof as shown in column 8 of Table I, application no. 3, preferably the coding region thereof, particularly a homolog or functional equivalent as shown in column 8 of Table I B, application no. 3, and being depicted in the same respective line as said B2032, and preferably the activity is increased non-targeted, or
[25004] (b) a polypeptide comprising a polypeptide, a consensus sequence or at least a polypeptide motif as shown in the respective line in column 5 of Table II or in column 8 of Table IV, application no. 3, respectively, and being depicted in the same respective line as said B2032, or a functional equivalent or a homolog thereof as depicted in column 8 of Table II, application no. 3, preferably a homolog or functional equivalent as depicted in column 8 of Table II B, application no. 3, and being depicted in the same respective line as said B2032, and preferably the activity is increased non-targeted.

[25005] Accordingly, in one embodiment, the molecule which activity is to be increased in the process of the invention is the gene product with an activity as a “b2032-protein”, preferably it is the molecule of section (a) or (b) of this paragraph.

[25006] In particular, it was observed that in plants, especially in Arabidopsis thaliana, increasing or generating the activity of a gene product non-targeted with the activity of a “b2032-protein”, preferably being encoded by a gene comprising the nucleic acid sequence SEQ ID NO. 8920, preferably the coding region thereof, conferred the production of or the increase in aspartate compared with the wild type control.

[25007] The nucleic acid sequence of B2063 from Escherichia coli, e.g. as shown in the respective line in column 5 of Table I, application no. 3, has been published in B. And the activity of the gene product thereof is the activity of transport protein.

[25008] Accordingly, in one embodiment, the process of the present invention for producing aspartate in a non-human organism, like a microorganism or a plant or a part thereof, comprises increasing or generating the activity of a gene product with the activity of a gene product conferring the activity of “transport protein”, especially from Escherichia coli or its functional equivalent or its homolog, e.g. the increase of
[25009] (a) a gene product of a gene comprising the nucleic acid molecule as shown in the respective line in column 5 of Table I, application no. 3, preferably the coding region thereof, or a homolog or a fragment thereof, and being depicted in the same respective line as said B2063, or a functional equivalent or a homolog thereof as shown in column 8 of Table I, application no. 3, preferably the coding region thereof, particularly a homolog or functional equivalent as shown in column 8 of Table I B, application no. 3, and being depicted in the same respective line as said B2063, and preferably the activity is increased non-targeted, or
[25010] (b) a polypeptide comprising a polypeptide, a consensus sequence or at least a polypeptide motif as shown in the respective line in column 5 of Table II or in column 8 of Table IV, application no. 3, respectively, and being depicted in the same respective line as said B2063, or a functional equivalent or a homolog thereof as depicted in column 8 of Table II, application no. 3, preferably a homolog or functional equivalent as depicted in column 8 of Table II B, application no. 3, and being depicted in the same respective line as said B2063, and preferably the activity is increased non-targeted.

[25011] Accordingly, in one embodiment, the molecule which activity is to be increased in the process of the invention is the gene product with an activity as a “transport protein”, preferably it is the molecule of section (a) or (b) of this paragraph.

[25012] In particular, it was observed that in plants, especially in Arabidopsis thaliana, increasing or generating the activity of a gene product non-targeted with the activity of a “transport protein”, preferably being encoded by a gene comprising the nucleic acid sequence SEQ ID NO. 38947, preferably the coding region thereof, conferred the production of or the increase in aspartate compared with the wild type control.

[25013] The nucleic acid sequence of B2063 from Escherichia coli, e.g. as shown in the respective line in column 5 of Table I, application no. 3, has been published in B. And the activity of the gene product thereof is the activity of transport protein.

[25014] Accordingly, in one embodiment, the process of the present invention for producing phenylalanine in a non-human organism, like a microorganism or a plant or a part thereof, comprises increasing or generating the activity of a gene product with the activity of a gene product conferring the activity of “transport protein”, especially from Escherichia coli or its functional equivalent or its homolog, e.g. the increase of
[25015] (a) a gene product of a gene comprising the nucleic acid molecule as shown in the respective line in column 5 of Table I, application no. 3, preferably the coding region thereof, or a homolog or a fragment thereof, and being depicted in the same respective line as said B2063, or a functional equivalent or a homolog thereof as shown in column 8 of Table I, application no. 3, preferably the coding region thereof, particularly a homolog or functional equivalent as shown in column 8 of Table I B, application no. 3, and being depicted in the same respective line as said B2063, and preferably the activity is increased non-targeted, or
[25016] (b) a polypeptide comprising a polypeptide, a consensus sequence or at least a polypeptide motif as shown in the respective line in column 5 of Table II or in column 8 of Table IV, application no. 3, respectively, and being depicted in the same respective line as said B2063, or a functional equivalent or a homolog thereof as depicted in column 8 of Table II, application no. 3, preferably a homolog or functional equivalent as depicted in column 8 of Table II B, application no. 3, and being depicted in the same respective line as said B2063, and preferably the activity is increased non-targeted.

[25017] Accordingly, in one embodiment, the molecule which activity is to be increased in the process of the invention is the gene product with an activity as a “transport protein”, preferably it is the molecule of section (a) or (b) of this paragraph.

[25018] In particular, it was observed that in plants, especially in Arabidopsis thaliana, increasing or generating the activity of a gene product non-targeted with the activity of a “transport protein”, preferably being encoded by a gene comprising the nucleic acid sequence SEQ ID NO. 38947, preferably the coding region thereof, conferred the production of or the increase in phenylalanine compared with the wild type control.

[25019] The nucleic acid sequence of B2063 from Escherichia coli, e.g. as shown in the respective line in column 5 of Table I, application no. 3, has been published in B. And the activity of the gene product thereof is the activity of transport protein.

[25020] Accordingly, in one embodiment, the process of the present invention for producing serine in a non-human organism, like a microorganism or a plant or a part thereof, comprises increasing or generating the activity of a gene product with the activity of a gene product conferring the activity of “transport protein”, especially from Escherichia coli or its functional equivalent or its homolog, e.g. the increase of
[25021] (a) a gene product of a gene comprising the nucleic acid molecule as shown in the respective line in column 5 of Table I, application no. 3, preferably the coding region thereof, or a homolog or a fragment thereof, and being depicted in the same respective line as said B2063, or a functional equivalent or a homolog thereof as shown in column 8 of Table I, application no. 3, preferably the coding region thereof, particularly a homolog or functional equivalent as shown in column 8 of Table I B, application no. 3, and being depicted in the same respective line as said B2063, and preferably the activity is increased non-targeted, or
[25022] (b) a polypeptide comprising a polypeptide, a consensus sequence or at least a polypeptide motif as shown in the respective line in column 5 of Table II or in column 8 of Table IV, application no. 3, respectively, and being depicted in the same respective line as said B2063, or a functional equivalent or a homolog thereof as depicted in column 8 of Table II, application no. 3, preferably a homolog or functional equivalent as depicted in column 8 of Table II B, application no. 3, and being depicted in the same respective line as said B2063, and preferably the activity is increased non-targeted.

[25023] Accordingly, in one embodiment, the molecule which activity is to be increased in the process of the invention is the gene product with an activity as a “transport protein”, preferably it is the molecule of section (a) or (b) of this paragraph.

[25024] In particular, it was observed that in plants, especially in Arabidopsis thaliana, increasing or generating the activity of a gene product non-targeted with the activity of a “transport protein”, preferably being encoded by a gene comprising the nucleic acid sequence SEQ ID NO. 38947, preferably the coding region thereof, conferred the production of or the increase in serine compared with the wild type control.

[25025] The nucleic acid sequence of B2063 from Escherichia coli, e.g. as shown in the respective line in column 5 of Table I, application no. 3, has been published in B. And the activity of the gene product thereof is the activity of transport protein.

[25026] Accordingly, in one embodiment, the process of the present invention for producing tyrosine in a non-human organism, like a microorganism or a plant or a part thereof, comprises increasing or generating the activity of a gene product with the activity of a gene product conferring the activity of “transport protein”, especially from Escherichia coli or its functional equivalent or its homolog, e.g. the increase of
[25027] (a) a gene product of a gene comprising the nucleic acid molecule as shown in the respective line in column 5 of Table I, application no. 3, preferably the coding region thereof, or a homolog or a fragment thereof, and being depicted in the same respective line as said B2063, or a functional equivalent or a homolog thereof as shown in column 8 of Table I, application no. 3, preferably the coding region thereof, particularly a homolog or functional equivalent as shown in column 8 of Table I B, application no. 3, and being depicted in the same respective line as said B2063, and preferably the activity is increased non-targeted, or
[25028] (b) a polypeptide comprising a polypeptide, a consensus sequence or at least a polypeptide motif as shown in the respective line in column 5 of Table II or in column 8 of Table IV, application no. 3, respectively, and being depicted in the same respective line as said B2063, or a functional equivalent or a homolog thereof as depicted in column 8 of Table II, application no. 3, preferably a homolog or functional equivalent as depicted in column 8 of Table II B, application no. 3, and being depicted in the same respective line as said B2063, and preferably the activity is increased non-targeted.

[25029] Accordingly, in one embodiment, the molecule which activity is to be increased in the process of the invention is the gene product with an activity as a “transport protein”, preferably it is the molecule of section (a) or (b) of this paragraph.

[25030] In particular, it was observed that in plants, especially in Arabidopsis thaliana, increasing or generating the activity of a gene product non-targeted with the activity of a “transport protein”, preferably being encoded by a gene comprising the nucleic acid sequence SEQ ID NO. 38947, preferably the coding region thereof, conferred the production of or the increase in tyrosine compared with the wild type control.

[25031] The nucleic acid sequence of B2066 from Escherichia coli, e.g. as shown in the respective line in column 5 of Table I, application no. 3, has been published in B. And the activity of the gene product thereof is the activity of uridine/cytidine kinase.

[25032] Accordingly, in one embodiment, the process of the present invention for producing 5-oxoproline in a non-human organism, like a microorganism or a plant or a part thereof, comprises increasing or generating the activity of a gene product with the activity of a gene product conferring the activity of “uridine/cytidine kinase”, especially from Escherichia coli or its functional equivalent or its homolog, e.g. the increase of
[25033] (a) a gene product of a gene comprising the nucleic acid molecule as shown in the respective line in column 5 of Table I, application no. 3, preferably the coding region thereof, or a homolog or a fragment thereof, and being depicted in the same respective line as said B2066, or a functional equivalent or a homolog thereof as shown in column 8 of Table I, application no. 3, preferably the coding region thereof, particularly a homolog or functional equivalent as shown in column 8 of Table I B, application no. 3, and being depicted in the same respective line as said B2066, and preferably the activity is increased mitochondrial, or
[25034] (b) a polypeptide comprising a polypeptide, a consensus sequence or at least a polypeptide motif as shown in the respective line in column 5 of Table II or in column 8 of Table IV, application no. 3, respectively, and being depicted in the same respective line as said B2066, or a functional equivalent or a homolog thereof as depicted in column 8 of Table II, application no. 3, preferably a homolog or functional equivalent as depicted in column 8 of Table II B, application no. 3, and being depicted in the same respective line as said B2066, and preferably the activity is increased mitochondrial.

[25035] Accordingly, in one embodiment, the molecule which activity is to be increased in the process of the invention is the gene product with an activity as a “uridine/cytidine kinase”, preferably it is the molecule of section (a) or (b) of this paragraph.

[25036] In particular, it was observed that in plants, especially in Arabidopsis thaliana, increasing or generating the activity of a gene product mitochondrial with the activity of a “uridine/cytidine kinase”, preferably being encoded by a gene comprising the nucleic acid sequence SEQ ID NO. 8937, preferably the coding region thereof, conferred the production of or the increase in 5-oxoproline compared with the wild type control.

[25037] The nucleic acid sequence of B2107 from Escherichia coli, e.g. as shown in the respective line in column 5 of Table I, application no. 3, has been published in B. And the activity of the gene product thereof is the activity of b2107-protein.

[25038] Accordingly, in one embodiment, the process of the present invention for producing aspartate in a non-human organism, like a microorganism or a plant or a part thereof, comprises increasing or generating the activity of a gene product with the activity of a gene product conferring the activity of “b2107-protein”, especially from Escherichia coli or its functional equivalent or its homolog, e.g. the increase of
[25039] (a) a gene product of a gene comprising the nucleic acid molecule as shown in the respective line in column 5 of Table I, application no. 3, preferably the coding region thereof, or a homolog or a fragment thereof, and being depicted in the same respective line as said B2107, or a functional equivalent or a homolog thereof as shown in column 8 of Table I, application no. 3, preferably the coding region thereof, particularly a homolog or functional equivalent as shown in column 8 of Table I B, application no. 3, and being depicted in the same respective line as said B2107, and preferably the activity is increased non-targeted, or
[25040] (b) a polypeptide comprising a polypeptide, a consensus sequence or at least a polypeptide motif as shown in the respective line in column 5 of Table II or in column 8 of Table IV, application no. 3, respectively, and being depicted in the same respective line as said B2107, or a functional equivalent or a homolog thereof as depicted in column 8 of Table II, application no. 3, preferably a homolog or functional equivalent as depicted in column 8 of Table II B, application no. 3, and being depicted in the same respective line as said B2107, and preferably the activity is increased non-targeted.

[25041] Accordingly, in one embodiment, the molecule which activity is to be increased in the process of the invention is the gene product with an activity as a “b2107-protein”, preferably it is the molecule of section (a) or (b) of this paragraph.

[25042] In particular, it was observed that in plants, especially in Arabidopsis thaliana, increasing or generating the activity of a gene product non-targeted with the activity of a “b2107-protein”, preferably being encoded by a gene comprising the nucleic acid sequence SEQ ID NO. 39002, preferably the coding region thereof, conferred the production of or the increase in aspartate compared with the wild type control.

[25043] The nucleic acid sequence of B2178 from Escherichia coli, e.g. as shown in the respective line in column 5 of Table I, application no. 3, has been published in B. And the activity of the gene product thereof is the activity of ABC transporter permease protein.

[25044] Accordingly, in one embodiment, the process of the present invention for producing aspartate in a non-human organism, like a microorganism or a plant or a part thereof, comprises increasing or generating the activity of a gene product with the activity of a gene product conferring the activity of “ABC transporter permease protein”, especially from Escherichia coli or its functional equivalent or its homolog, e.g. the increase of
[25045] (a) a gene product of a gene comprising the nucleic acid molecule as shown in the respective line in column 5 of Table I, application no. 3, preferably the coding region thereof, or a homolog or a fragment thereof, and being depicted in the same respective line as said B2178, or a functional equivalent or a homolog thereof as shown in column 8 of Table I, application no. 3, preferably the coding region thereof, particularly a homolog or functional equivalent as shown in column 8 of Table I B, application no. 3, and being depicted in the same respective line as said B2178, and preferably the activity is increased non-targeted, or
[25046] (b) a polypeptide comprising a polypeptide, a consensus sequence or at least a polypeptide motif as shown in the respective line in column 5 of Table II or in column 8 of Table IV, application no. 3, respectively, and being depicted in the same respective line as said B2178, or a functional equivalent or a homolog thereof as depicted in column 8 of Table II, application no. 3, preferably a homolog or functional equivalent as depicted in column 8 of Table II B, application no. 3, and being depicted in the same respective line as said B2178, and preferably the activity is increased non-targeted.

[25047] Accordingly, in one embodiment, the molecule which activity is to be increased in the process of the invention is the gene product with an activity as a “ABC transporter permease protein”, preferably it is the molecule of section (a) or (b) of this paragraph.

[25048] In particular, it was observed that in plants, especially in Arabidopsis thaliana, increasing or generating the activity of a gene product non-targeted with the activity of a “ABC transporter permease protein”, preferably being encoded by a gene comprising the nucleic acid sequence SEQ ID NO. 39040, preferably the coding region thereof, conferred the production of or the increase in aspartate compared with the wild type control.

[25049] The nucleic acid sequence of B2178 from Escherichia coli, e.g. as shown in the respective line in column 5 of Table I, application no. 3, has been published in B. And the activity of the gene product thereof is the activity of ABC transporter permease protein.

[25050] Accordingly, in one embodiment, the process of the present invention for producing citrulline in a non-human organism, like a microorganism or a plant or a part thereof, comprises increasing or generating the activity of a gene product with the activity of a gene product conferring the activity of “ABC transporter permease protein”, especially from Escherichia coli or its functional equivalent or its homolog, e.g. the increase of
[25051] (a) a gene product of a gene comprising the nucleic acid molecule as shown in the respective line in column 5 of Table I, application no. 3, preferably the coding region thereof, or a homolog or a fragment thereof, and being depicted in the same respective line as said B2178, or a functional equivalent or a homolog thereof as shown in column 8 of Table I, application no. 3, preferably the coding region thereof, particularly a homolog or functional equivalent as shown in column 8 of Table I B, application no. 3, and being depicted in the same respective line as said B2178, and preferably the activity is increased non-targeted, or
[25052] (b) a polypeptide comprising a polypeptide, a consensus sequence or at least a polypeptide motif as shown in the respective line in column 5 of Table II or in column 8 of Table IV, application no. 3, respectively, and being depicted in the same respective line as said B2178, or a functional equivalent or a homolog thereof as depicted in column 8 of Table II, application no. 3, preferably a homolog or functional equivalent as depicted in column 8 of Table II B, application no. 3, and being depicted in the same respective line as said B2178, and preferably the activity is increased non-targeted.

[25053] Accordingly, in one embodiment, the molecule which activity is to be increased in the process of the invention is the gene product with an activity as a “ABC transporter permease protein”, preferably it is the molecule of section (a) or (b) of this paragraph.

[25054] In particular, it was observed that in plants, especially in Arabidopsis thaliana, increasing or generating the activity of a gene product non-targeted with the activity of a “ABC transporter permease protein”, preferably being encoded by a gene comprising the nucleic acid sequence SEQ ID NO. 39040, preferably the coding region thereof, conferred the production of or the increase in citrulline compared with the wild type control.

[25055] The nucleic acid sequence of B2178 from Escherichia coli, e.g. as shown in the respective line in column 5 of Table I, application no. 3, has been published in B. And the activity of the gene product thereof is the activity of ABC transporter permease protein.

[25056] Accordingly, in one embodiment, the process of the present invention for producing phenylalanine in a non-human organism, like a microorganism or a plant or a part thereof, comprises increasing or generating the activity of a gene product with the activity of a gene product conferring the activity of “ABC transporter permease protein”, especially from Escherichia coli or its functional equivalent or its homolog, e.g. the increase of
[25057] (a) a gene product of a gene comprising the nucleic acid molecule as shown in the respective line in column 5 of Table I, application no. 3, preferably the coding region thereof, or a homolog or a fragment thereof, and being depicted in the same respective line as said B2178, or a functional equivalent or a homolog thereof as shown in column 8 of Table I, application no. 3, preferably the coding region thereof, particularly a homolog or functional equivalent as shown in column 8 of Table I B, application no. 3, and being depicted in the same respective line as said B2178, and preferably the activity is increased non-targeted, or
[25058] (b) a polypeptide comprising a polypeptide, a consensus sequence or at least a polypeptide motif as shown in the respective line in column 5 of Table II or in column 8 of Table IV, application no. 3, respectively, and being depicted in the same respective line as said B2178, or a functional equivalent or a homolog thereof as depicted in column 8 of Table II, application no. 3, preferably a homolog or functional equivalent as depicted in column 8 of Table II B, application no. 3, and being depicted in the same respective line as said B2178, and preferably the activity is increased non-targeted.

[25059] Accordingly, in one embodiment, the molecule which activity is to be increased in the process of the invention is the gene product with an activity as a “ABC transporter permease protein”, preferably it is the molecule of section (a) or (b) of this paragraph.

[25060] In particular, it was observed that in plants, especially in Arabidopsis thaliana, increasing or generating the activity of a gene product non-targeted with the activity of a “ABC transporter permease protein”, preferably being encoded by a gene comprising the nucleic acid sequence SEQ ID NO. 39040, preferably the coding region thereof, conferred the production of or the increase in phenylalanine compared with the wild type control.

[25061] The nucleic acid sequence of B2178 from Escherichia coli, e.g. as shown in the respective line in column 5 of Table I, application no. 3, has been published in B. And the activity of the gene product thereof is the activity of ABC transporter permease protein.

[25062] Accordingly, in one embodiment, the process of the present invention for producing serine in a non-human organism, like a microorganism or a plant or a part thereof, comprises increasing or generating the activity of a gene product with the activity of a gene product conferring the activity of “ABC transporter permease protein”, especially from Escherichia coli or its functional equivalent or its homolog, e.g. the increase of
[25063] (a) a gene product of a gene comprising the nucleic acid molecule as shown in the respective line in column 5 of Table I, application no. 3, preferably the coding region thereof, or a homolog or a fragment thereof, and being depicted in the same respective line as said B2178, or a functional equivalent or a homolog thereof as shown in column 8 of Table I, application no. 3, preferably the coding region thereof, particularly a homolog or functional equivalent as shown in column 8 of Table I B, application no. 3, and being depicted in the same respective line as said B2178, and preferably the activity is increased non-targeted, or
[25064] (b) a polypeptide comprising a polypeptide, a consensus sequence or at least a polypeptide motif as shown in the respective line in column 5 of Table II or in column 8 of Table IV, application no. 3, respectively, and being depicted in the same respective line as said B2178, or a functional equivalent or a homolog thereof as depicted in column 8 of Table II, application no. 3, preferably a homolog or functional equivalent as depicted in column 8 of Table II B, application no. 3, and being depicted in the same respective line as said B2178, and preferably the activity is increased non-targeted.

[25065] Accordingly, in one embodiment, the molecule which activity is to be increased in the process of the invention is the gene product with an activity as a “ABC transporter permease protein”, preferably it is the molecule of section (a) or (b) of this paragraph.

[25066] In particular, it was observed that in plants, especially in Arabidopsis thaliana, increasing or generating the activity of a gene product non-targeted with the activity of a “ABC transporter permease protein”, preferably being encoded by a gene comprising the nucleic acid sequence SEQ ID NO. 39040, preferably the coding region thereof, conferred the production of or the increase in serine compared with the wild type control.

[25067] The nucleic acid sequence of B2178 from Escherichia coli, e.g. as shown in the respective line in column 5 of Table I, application no. 3, has been published in B. And the activity of the gene product thereof is the activity of ABC transporter permease protein.

[25068] Accordingly, in one embodiment, the process of the present invention for producing tyrosine in a non-human organism, like a microorganism or a plant or a part thereof, comprises increasing or generating the activity of a gene product with the activity of a gene product conferring the activity of “ABC transporter permease protein”, especially from Escherichia coli or its functional equivalent or its homolog, e.g. the increase of
[25069] (a) a gene product of a gene comprising the nucleic acid molecule as shown in the respective line in column 5 of Table I, application no. 3, preferably the coding region thereof, or a homolog or a fragment thereof, and being depicted in the same respective line as said B2178, or a functional equivalent or a homolog thereof as shown in column 8 of Table I, application no. 3, preferably the coding region thereof, particularly a homolog or functional equivalent as shown in column 8 of Table I B, application no. 3, and being depicted in the same respective line as said B2178, and preferably the activity is increased non-targeted, or
[25070] (b) a polypeptide comprising a polypeptide, a consensus sequence or at least a polypeptide motif as shown in the respective line in column 5 of Table II or in column 8 of Table IV, application no. 3, respectively, and being depicted in the same respective line as said B2178, or a functional equivalent or a homolog thereof as depicted in column 8 of Table II, application no. 3, preferably a homolog or functional equivalent as depicted in column 8 of Table II B, application no. 3, and being depicted in the same respective line as said B2178, and preferably the activity is increased non-targeted.

[25071] Accordingly, in one embodiment, the molecule which activity is to be increased in the process of the invention is the gene product with an activity as a “ABC transporter permease protein”, preferably it is the molecule of section (a) or (b) of this paragraph.

[25072] In particular, it was observed that in plants, especially in Arabidopsis thaliana, increasing or generating the activity of a gene product non-targeted with the activity of a “ABC transporter permease protein”, preferably being encoded by a gene comprising the nucleic acid sequence SEQ ID NO. 39040, preferably the coding region thereof, conferred the production of or the increase in tyrosine compared with the wild type control.

[25073] The nucleic acid sequence of B2242 from Escherichia coli, e.g. as shown in the respective line in column 5 of Table I, application no. 3, has been published in B. And the activity of the gene product thereof is the activity of sn-glycerol-3-phosphate dehydrogenase.

[25074] Accordingly, in one embodiment, the process of the present invention for producing glycine in a non-human organism, like a microorganism or a plant or a part thereof, comprises increasing or generating the activity of a gene product with the activity of a gene product conferring the activity of “sn-glycerol-3-phosphate dehydrogenase”, especially from Escherichia coli or its functional equivalent or its homolog, e.g. the increase of
[25075] (a) a gene product of a gene comprising the nucleic acid molecule as shown in the respective line in column 5 of Table I, application no. 3, preferably the coding region thereof, or a homolog or a fragment thereof, and being depicted in the same respective line as said B2242, or a functional equivalent or a homolog thereof as shown in column 8 of Table I, application no. 3, preferably the coding region thereof, particularly a homolog or functional equivalent as shown in column 8 of Table I B, application no. 3, and being depicted in the same respective line as said B2242, and preferably the activity is increased plastidic, or
[25076] (b) a polypeptide comprising a polypeptide, a consensus sequence or at least a polypeptide motif as shown in the respective line in column 5 of Table II or in column 8 of Table IV, application no. 3, respectively, and being depicted in the same respective line as said B2242, or a functional equivalent or a homolog thereof as depicted in column 8 of Table II, application no. 3, preferably a homolog or functional equivalent as depicted in column 8 of Table II B, application no. 3, and being depicted in the same respective line as said B2242, and preferably the activity is increased plastidic.

[25077] Accordingly, in one embodiment, the molecule which activity is to be increased in the process of the invention is the gene product with an activity as a “sn-glycerol-3-phosphate dehydrogenase”, preferably it is the molecule of section (a) or (b) of this paragraph.

[25078] In particular, it was observed that in plants, especially in Arabidopsis thaliana, increasing or generating the activity of a gene product plastidic with the activity of a “sn-glycerol-3-phosphate dehydrogenase”, preferably being encoded by a gene comprising the nucleic acid sequence SEQ ID NO. 79279, preferably the coding region thereof, conferred the production of or the increase in glycine compared with the wild type control.

[25079] The nucleic acid sequence of B2281 from Escherichia coli, e.g. as shown in the respective line in column 5 of Table I, application no. 3, has been published in B. And the activity of the gene product thereof is the activity of NADH dehydrogenase I chain I.

[25080] Accordingly, in one embodiment, the process of the present invention for producing asparagine in a non-human organism, like a microorganism or a plant or a part thereof, comprises increasing or generating the activity of a gene product with the activity of a gene product conferring the activity of “NADH dehydrogenase I chain I”, especially from Escherichia coli or its functional equivalent or its homolog, e.g. the increase of
[25081] (a) a gene product of a gene comprising the nucleic acid molecule as shown in the respective line in column 5 of Table I, application no. 3, preferably the coding region thereof, or a homolog or a fragment thereof, and being depicted in the same respective line as said B2281, or a functional equivalent or a homolog thereof as shown in column 8 of Table I, application no. 3, preferably the coding region thereof, particularly a homolog or functional equivalent as shown in column 8 of Table I B, application no. 3, and being depicted in the same respective line as said B2281, and preferably the activity is increased non-targeted, or
[25082] (b) a polypeptide comprising a polypeptide, a consensus sequence or at least a polypeptide motif as shown in the respective line in column 5 of Table II or in column 8 of Table IV, application no. 3, respectively, and being depicted in the same respective line as said B2281, or a functional equivalent or a homolog thereof as depicted in column 8 of Table II, application no. 3, preferably a homolog or functional equivalent as depicted in column 8 of Table II B, application no. 3, and being depicted in the same respective line as said B2281, and preferably the activity is increased non-targeted.

[25083] Accordingly, in one embodiment, the molecule which activity is to be increased in the process of the invention is the gene product with an activity as a “NADH dehydrogenase I chain I”, preferably it is the molecule of section (a) or (b) of this paragraph.

[25084] In particular, it was observed that in plants, especially in Arabidopsis thaliana, increasing or generating the activity of a gene product non-targeted with the activity of a “NADH dehydrogenase I chain I”, preferably being encoded by a gene comprising the nucleic acid sequence SEQ ID NO. 39120, preferably the coding region thereof, conferred the production of or the increase in asparagine compared with the wild type control.

[25085] The nucleic acid sequence of B2360 from Escherichia coli, e.g. as shown in the respective line in column 5 of Table I, application no. 3, has been published in B. And the activity of the gene product thereof is the activity of b2360-protein.

[25086] Accordingly, in one embodiment, the process of the present invention for producing aspartate in a non-human organism, like a microorganism or a plant or a part thereof, comprises increasing or generating the activity of a gene product with the activity of a gene product conferring the activity of “b2360-protein”, especially from Escherichia coli or its functional equivalent or its homolog, e.g. the increase of
[25087] (a) a gene product of a gene comprising the nucleic acid molecule as shown in the respective line in column 5 of Table I, application no. 3, preferably the coding region thereof, or a homolog or a fragment thereof, and being depicted in the same respective line as said B2360, or a functional equivalent or a homolog thereof as shown in column 8 of Table I, application no. 3, preferably the coding region thereof, particularly a homolog or functional equivalent as shown in column 8 of Table I B, application no. 3, and being depicted in the same respective line as said B2360, and preferably the activity is increased non-targeted, or
[25088] (b) a polypeptide comprising a polypeptide, a consensus sequence or at least a polypeptide motif as shown in the respective line in column 5 of Table II or in column 8 of Table IV, application no. 3, respectively, and being depicted in the same respective line as said B2360, or a functional equivalent or a homolog thereof as depicted in column 8 of Table II, application no. 3, preferably a homolog or functional equivalent as depicted in column 8 of Table II B, application no. 3, and being depicted in the same respective line as said B2360, and preferably the activity is increased non-targeted.

[25089] Accordingly, in one embodiment, the molecule which activity is to be increased in the process of the invention is the gene product with an activity as a “b2360-protein”, preferably it is the molecule of section (a) or (b) of this paragraph.

[25090] In particular, it was observed that in plants, especially in Arabidopsis thaliana, increasing or generating the activity of a gene product non-targeted with the activity of a “b2360-protein”, preferably being encoded by a gene comprising the nucleic acid sequence SEQ ID NO. 39219, preferably the coding region thereof, conferred the production of or the increase in aspartate compared with the wild type control.

[25091] The nucleic acid sequence of B2366 from Escherichia coli, e.g. as shown in the respective line in column 5 of Table I, application no. 3, has been published in B. And the activity of the gene product thereof is the activity of D-serine dehydratase.

[25092] Accordingly, in one embodiment, the process of the present invention for producing serine in a non-human organism, like a microorganism or a plant or a part thereof, comprises increasing or generating the activity of a gene product with the activity of a gene product conferring the activity of “D-serine dehydratase”, especially from Escherichia coli or its functional equivalent or its homolog, e.g. the increase of
[25093] (a) a gene product of a gene comprising the nucleic acid molecule as shown in the respective line in column 5 of Table I, application no. 3, preferably the coding region thereof, or a homolog or a fragment thereof, and being depicted in the same respective line as said B2366, or a functional equivalent or a homolog thereof as shown in column 8 of Table I, application no. 3, preferably the coding region thereof, particularly a homolog or functional equivalent as shown in column 8 of Table I B, application no. 3, and being depicted in the same respective line as said B2366, and preferably the activity is increased plastidic, or
[25094] (b) a polypeptide comprising a polypeptide, a consensus sequence or at least a polypeptide motif as shown in the respective line in column 5 of Table II or in column 8 of Table IV, application no. 3, respectively, and being depicted in the same respective line as said B2366, or a functional equivalent or a homolog thereof as depicted in column 8 of Table II, application no. 3, preferably a homolog or functional equivalent as depicted in column 8 of Table II B, application no. 3, and being depicted in the same respective line as said B2366, and preferably the activity is increased plastidic.

[25095] Accordingly, in one embodiment, the molecule which activity is to be increased in the process of the invention is the gene product with an activity as a “D-serine dehydratase”, preferably it is the molecule of section (a) or (b) of this paragraph.

[25096] In particular, it was observed that in plants, especially in Arabidopsis thaliana, increasing or generating the activity of a gene product plastidic with the activity of a “D-serine dehydratase”, preferably being encoded by a gene comprising the nucleic acid sequence SEQ ID NO. 79342, preferably the coding region thereof, conferred the production of or the increase in serine compared with the wild type control.

[25097] The nucleic acid sequence of B2399 from Escherichia coli, e.g. as shown in the respective line in column 5 of Table I, application no. 3, has been published in B. And the activity of the gene product thereof is the activity of b2399-protein.

[25098] Accordingly, in one embodiment, the process of the present invention for producing tyrosine in a non-human organism, like a microorganism or a plant or a part thereof, comprises increasing or generating the activity of a gene product with the activity of a gene product conferring the activity of “b2399-protein”, especially from Escherichia coli or its functional equivalent or its homolog, e.g. the increase of
[25099] (a) a gene product of a gene comprising the nucleic acid molecule as shown in the respective line in column 5 of Table I, application no. 3, preferably the coding region thereof, or a homolog or a fragment thereof, and being depicted in the same respective line as said B2399, or a functional equivalent or a homolog thereof as shown in column 8 of Table I, application no. 3, preferably the coding region thereof, particularly a homolog or functional equivalent as shown in column 8 of Table I B, application no. 3, and being depicted in the same respective line as said B2399, and preferably the activity is increased non-targeted, or
[25100] (b) a polypeptide comprising a polypeptide, a consensus sequence or at least a polypeptide motif as shown in the respective line in column 5 of Table II or in column 8 of Table IV, application no. 3, respectively, and being depicted in the same respective line as said B2399, or a functional equivalent or a homolog thereof as depicted in column 8 of Table II, application no. 3, preferably a homolog or functional equivalent as depicted in column 8 of Table II B, application no. 3, and being depicted in the same respective line as said B2399, and preferably the activity is increased non-targeted.

[25101] Accordingly, in one embodiment, the molecule which activity is to be increased in the process of the invention is the gene product with an activity as a “b2399-protein”, preferably it is the molecule of section (a) or (b) of this paragraph.

[25102] In particular, it was observed that in plants, especially in Arabidopsis thaliana, increasing or generating the activity of a gene product non-targeted with the activity of a “b2399-protein”, preferably being encoded by a gene comprising the nucleic acid sequence SEQ ID NO. 39237, preferably the coding region thereof, conferred the production of or the increase in tyrosine compared with the wild type control.

[25103] The nucleic acid sequence of B2399 from Escherichia coli, e.g. as shown in the respective line in column 5 of Table I, application no. 3, has been published in B. And the activity of the gene product thereof is the activity of b2399-protein.

[25104] Accordingly, in one embodiment, the process of the present invention for producing 3,4-dihydroxyphenylalanine (dopa) in a non-human organism, like a microorganism or a plant or a part thereof, comprises increasing or generating the activity of a gene product with the activity of a gene product conferring the activity of “b2399-protein”, especially from Escherichia coli or its functional equivalent or its homolog, e.g. the increase of
[25105] (a) a gene product of a gene comprising the nucleic acid molecule as shown in the respective line in column 5 of Table I, application no. 3, preferably the coding region thereof, or a homolog or a fragment thereof, and being depicted in the same respective line as said B2399, or a functional equivalent or a homolog thereof as shown in column 8 of Table I, application no. 3, preferably the coding region thereof, particularly a homolog or functional equivalent as shown in column 8 of Table I B, application no. 3, and being depicted in the same respective line as said B2399, and preferably the activity is increased non-targeted, or
[25106] (b) a polypeptide comprising a polypeptide, a consensus sequence or at least a polypeptide motif as shown in the respective line in column 5 of Table II or in column 8 of Table IV, application no. 3, respectively, and being depicted in the same respective line as said B2399, or a functional equivalent or a homolog thereof as depicted in column 8 of Table II, application no. 3, preferably a homolog or functional equivalent as depicted in column 8 of Table II B, application no. 3, and being depicted in the same respective line as said B2399, and preferably the activity is increased non-targeted.

[25107] Accordingly, in one embodiment, the molecule which activity is to be increased in the process of the invention is the gene product with an activity as a “b2399-protein”, preferably it is the molecule of section (a) or (b) of this paragraph.

[25108] In particular, it was observed that in plants, especially in Arabidopsis thaliana, increasing or generating the activity of a gene product non-targeted with the activity of a “b2399-protein”, preferably being encoded by a gene comprising the nucleic acid sequence SEQ ID NO. 39237, preferably the coding region thereof, conferred the production of or the increase in 3,4-dihydroxyphenylalanine (dopa) compared with the wild type control.

[25109] The nucleic acid sequence of B2399 from Escherichia coli, e.g. as shown in the respective line in column 5 of Table I, application no. 3, has been published in B. And the activity of the gene product thereof is the activity of b2399-protein.

[25110] Accordingly, in one embodiment, the process of the present invention for producing 5-oxoproline in a non-human organism, like a microorganism or a plant or a part thereof, comprises increasing or generating the activity of a gene product with the activity of a gene product conferring the activity of “b2399-protein”, especially from Escherichia coli or its functional equivalent or its homolog, e.g. the increase of
[25111] (a) a gene product of a gene comprising the nucleic acid molecule as shown in the respective line in column 5 of Table I, application no. 3, preferably the coding region thereof, or a homolog or a fragment thereof, and being depicted in the same respective line as said B2399, or a functional equivalent or a homolog thereof as shown in column 8 of Table I, application no. 3, preferably the coding region thereof, particularly a homolog or functional equivalent as shown in column 8 of Table I B, application no. 3, and being depicted in the same respective line as said B2399, and preferably the activity is increased non-targeted, or
[25112] (b) a polypeptide comprising a polypeptide, a consensus sequence or at least a polypeptide motif as shown in the respective line in column 5 of Table II or in column 8 of Table IV, application no. 3, respectively, and being depicted in the same respective line as said B2399, or a functional equivalent or a homolog thereof as depicted in column 8 of Table II, application no. 3, preferably a homolog or functional equivalent as depicted in column 8 of Table II B, application no. 3, and being depicted in the same respective line as said B2399, and preferably the activity is increased non-targeted.

[25113] Accordingly, in one embodiment, the molecule which activity is to be increased in the process of the invention is the gene product with an activity as a “b2399-protein”, preferably it is the molecule of section (a) or (b) of this paragraph.

[25114] In particular, it was observed that in plants, especially in Arabidopsis thaliana, increasing or generating the activity of a gene product non-targeted with the activity of a “b2399-protein”, preferably being encoded by a gene comprising the nucleic acid sequence SEQ ID NO. 39237, preferably the coding region thereof, conferred the production of or the increase in 5-oxoproline compared with the wild type control.

[25115] The nucleic acid sequence of B2405 from Escherichia coli, e.g. as shown in the respective line in column 5 of Table I, application no. 3, has been published in B. And the activity of the gene product thereof is the activity of transcriptional regulator.

[25116] Accordingly, in one embodiment, the process of the present invention for producing alanine in a non-human organism, like a microorganism or a plant or a part thereof, comprises increasing or generating the activity of a gene product with the activity of a gene product conferring the activity of “transcriptional regulator”, especially from Escherichia coli or its functional equivalent or its homolog, e.g. the increase of
[25117] (a) a gene product of a gene comprising the nucleic acid molecule as shown in the respective line in column 5 of Table I, application no. 3, preferably the coding region thereof, or a homolog or a fragment thereof, and being depicted in the same respective line as said B2405, or a functional equivalent or a homolog thereof as shown in column 8 of Table I, application no. 3, preferably the coding region thereof, particularly a homolog or functional equivalent as shown in column 8 of Table I B, application no. 3, and being depicted in the same respective line as said B2405, and preferably the activity is increased non-targeted, or
[25118] (b) a polypeptide comprising a polypeptide, a consensus sequence or at least a polypeptide motif as shown in the respective line in column 5 of Table II or in column 8 of Table IV, application no. 3, respectively, and being depicted in the same respective line as said B2405, or a functional equivalent or a homolog thereof as depicted in column 8 of Table II, application no. 3, preferably a homolog or functional equivalent as depicted in column 8 of Table II B, application no. 3, and being depicted in the same respective line as said B2405, and preferably the activity is increased non-targeted.

[25119] Accordingly, in one embodiment, the molecule which activity is to be increased in the process of the invention is the gene product with an activity as a “transcriptional regulator”, preferably it is the molecule of section (a) or (b) of this paragraph.

[25120] In particular, it was observed that in plants, especially in Arabidopsis thaliana, increasing or generating the activity of a gene product non-targeted with the activity of a “transcriptional regulator”, preferably being encoded by a gene comprising the nucleic acid sequence SEQ ID NO. 39255, preferably the coding region thereof, conferred the production of or the increase in alanine compared with the wild type control.

[25121] The nucleic acid sequence of B2405 from Escherichia coli, e.g. as shown in the respective line in column 5 of Table I, application no. 3, has been published in B. And the activity of the gene product thereof is the activity of transcriptional regulator.

[25122] Accordingly, in one embodiment, the process of the present invention for producing aspartate in a non-human organism, like a microorganism or a plant or a part thereof, comprises increasing or generating the activity of a gene product with the activity of a gene product conferring the activity of “transcriptional regulator”, especially from Escherichia coli or its functional equivalent or its homolog, e.g. the increase of
[25123] (a) a gene product of a gene comprising the nucleic acid molecule as shown in the respective line in column 5 of Table I, application no. 3, preferably the coding region thereof, or a homolog or a fragment thereof, and being depicted in the same respective line as said B2405, or a functional equivalent or a homolog thereof as shown in column 8 of Table I, application no. 3, preferably the coding region thereof, particularly a homolog or functional equivalent as shown in column 8 of Table I B, application no. 3, and being depicted in the same respective line as said B2405, and preferably the activity is increased non-targeted, or
[25124] (b) a polypeptide comprising a polypeptide, a consensus sequence or at least a polypeptide motif as shown in the respective line in column 5 of Table II or in column 8 of Table IV, application no. 3, respectively, and being depicted in the same respective line as said B2405, or a functional equivalent or a homolog thereof as depicted in column 8 of Table II, application no. 3, preferably a homolog or functional equivalent as depicted in column 8 of Table II B, application no. 3, and being depicted in the same respective line as said B2405, and preferably the activity is increased non-targeted.

[25125] Accordingly, in one embodiment, the molecule which activity is to be increased in the process of the invention is the gene product with an activity as a “transcriptional regulator”, preferably it is the molecule of section (a) or (b) of this paragraph.

[25126] In particular, it was observed that in plants, especially in Arabidopsis thaliana, increasing or generating the activity of a gene product non-targeted with the activity of a “transcriptional regulator”, preferably being encoded by a gene comprising the nucleic acid sequence SEQ ID NO. 39255, preferably the coding region thereof, conferred the production of or the increase in aspartate compared with the wild type control.

[25127] The nucleic acid sequence of B2429 from Escherichia coli, e.g. as shown in the respective line in column 5 of Table I, application no. 3, has been published in B. And the activity of the gene product thereof is the activity of PTS system N-acetylmuramic acid-specific EIIBC component.

[25128] Accordingly, in one embodiment, the process of the present invention for producing phenylalanine in a non-human organism, like a microorganism or a plant or a part thereof, comprises increasing or generating the activity of a gene product with the activity of a gene product conferring the activity of “PTS system N-acetylmuramic acid-specific EIIBC component”, especially from Escherichia coli or its functional equivalent or its homolog, e.g. the increase of
[25129] (a) a gene product of a gene comprising the nucleic acid molecule as shown in the respective line in column 5 of Table I, application no. 3, preferably the coding region thereof, or a homolog or a fragment thereof, and being depicted in the same respective line as said B2429, or a functional equivalent or a homolog thereof as shown in column 8 of Table I, application no. 3, preferably the coding region thereof, particularly a homolog or functional equivalent as shown in column 8 of Table I B, application no. 3, and being depicted in the same respective line as said B2429, and preferably the activity is increased non-targeted, or
[25130] (b) a polypeptide comprising a polypeptide, a consensus sequence or at least a polypeptide motif as shown in the respective line in column 5 of Table II or in column 8 of Table IV, application no. 3, respectively, and being depicted in the same respective line as said B2429, or a functional equivalent or a homolog thereof as depicted in column 8 of Table II, application no. 3, preferably a homolog or functional equivalent as depicted in column 8 of Table II B, application no. 3, and being depicted in the same respective line as said B2429, and preferably the activity is increased non-targeted.

[25131] Accordingly, in one embodiment, the molecule which activity is to be increased in the process of the invention is the gene product with an activity as a “PTS system N-acetylmuramic acidspecific EIIBC component”, preferably it is the molecule of section (a) or (b) of this paragraph.

[25132] In particular, it was observed that in plants, especially in Arabidopsis thaliana, increasing or generating the activity of a gene product non-targeted with the activity of a “PTS system Nacetylmuramic acid-specific EIIBC component”, preferably being encoded by a gene comprising the nucleic acid sequence SEQ ID NO. 79398, preferably the coding region thereof, conferred the production of or the increase in phenylalanine compared with the wild type control.

[25133] The nucleic acid sequence of B2474 from Escherichia coli, e.g. as shown in the respective line in column 5 of Table I, application no. 3, has been published in B. And the activity of the gene product thereof is the activity of b2474-protein.

[25134] Accordingly, in one embodiment, the process of the present invention for producing citrulline in a non-human organism, like a microorganism or a plant or a part thereof, comprises increasing or generating the activity of a gene product with the activity of a gene product conferring the activity of “b2474-protein”, especially from Escherichia coli or its functional equivalent or its homolog, e.g. the increase of
[25135] (a) a gene product of a gene comprising the nucleic acid molecule as shown in the respective line in column 5 of Table I, application no. 3, preferably the coding region thereof, or a homolog or a fragment thereof, and being depicted in the same respective line as said B2474, or a functional equivalent or a homolog thereof as shown in column 8 of Table I, application no. 3, preferably the coding region thereof, particularly a homolog or functional equivalent as shown in column 8 of Table I B, application no. 3, and being depicted in the same respective line as said B2474, and preferably the activity is increased non-targeted, or
[25136] (b) a polypeptide comprising a polypeptide, a consensus sequence or at least a polypeptide motif as shown in the respective line in column 5 of Table II or in column 8 of Table IV, application no. 3, respectively, and being depicted in the same respective line as said B2474, or a functional equivalent or a homolog thereof as depicted in column 8 of Table II, application no. 3, preferably a homolog or functional equivalent as depicted in column 8 of Table II B, application no. 3, and being depicted in the same respective line as said B2474, and preferably the activity is increased non-targeted.

[25137] Accordingly, in one embodiment, the molecule which activity is to be increased in the process of the invention is the gene product with an activity as a “b2474-protein”, preferably it is the molecule of section (a) or (b) of this paragraph.

[25138] In particular, it was observed that in plants, especially in Arabidopsis thaliana, increasing or generating the activity of a gene product non-targeted with the activity of a “b2474-protein”, preferably being encoded by a gene comprising the nucleic acid sequence SEQ ID NO. 40329, preferably the coding region thereof, conferred the production of or the increase in citrulline compared with the wild type control.

[25139] The nucleic acid sequence of B2474 from Escherichia coli, e.g. as shown in the respective line in column 5 of Table I, application no. 3, has been published in B. And the activity of the gene product thereof is the activity of b2474-protein.

[25140] Accordingly, in one embodiment, the process of the present invention for producing glycine in a non-human organism, like a microorganism or a plant or a part thereof, comprises increasing or generating the activity of a gene product with the activity of a gene product conferring the activity of “b2474-protein”, especially from Escherichia coli or its functional equivalent or its homolog, e.g. the increase of
[25141] (a) a gene product of a gene comprising the nucleic acid molecule as shown in the respective line in column 5 of Table I, application no. 3, preferably the coding region thereof, or a homolog or a fragment thereof, and being depicted in the same respective line as said B2474, or a functional equivalent or a homolog thereof as shown in column 8 of Table I, application no. 3, preferably the coding region thereof, particularly a homolog or functional equivalent as shown in column 8 of Table I B, application no. 3, and being depicted in the same respective line as said B2474, and preferably the activity is increased non-targeted, or
[25142] (b) a polypeptide comprising a polypeptide, a consensus sequence or at least a polypeptide motif as shown in the respective line in column 5 of Table II or in column 8 of Table IV, application no. 3, respectively, and being depicted in the same respective line as said B2474, or a functional equivalent or a homolog thereof as depicted in column 8 of Table II, application no. 3, preferably a homolog or functional equivalent as depicted in column 8 of Table II B, application no. 3, and being depicted in the same respective line as said B2474, and preferably the activity is increased non-targeted.

[25143] Accordingly, in one embodiment, the molecule which activity is to be increased in the process of the invention is the gene product with an activity as a “b2474-protein”, preferably it is the molecule of section (a) or (b) of this paragraph.

[25144] In particular, it was observed that in plants, especially in Arabidopsis thaliana, increasing or generating the activity of a gene product non-targeted with the activity of a “b2474-protein”, preferably being encoded by a gene comprising the nucleic acid sequence SEQ ID NO. 40329, preferably the coding region thereof, conferred the production of or the increase in glycine compared with the wild type control.

[25145] The nucleic acid sequence of B2482 from Escherichia coli, e.g. as shown in the respective line in column 5 of Table I, application no. 3, has been published in B. And the activity of the gene product thereof is the activity of NADH dehydrogenase subunit N.

[25146] Accordingly, in one embodiment, the process of the present invention for producing serine in a non-human organism, like a microorganism or a plant or a part thereof, comprises increasing or generating the activity of a gene product with the activity of a gene product conferring the activity of “NADH dehydrogenase subunit N”, especially from Escherichia coli or its functional equivalent or its homolog, e.g. the increase of
[25147] (a) a gene product of a gene comprising the nucleic acid molecule as shown in the respective line in column 5 of Table I, application no. 3, preferably the coding region thereof, or a homolog or a fragment thereof, and being depicted in the same respective line as said B2482, or a functional equivalent or a homolog thereof as shown in column 8 of Table I, application no. 3, preferably the coding region thereof, particularly a homolog or functional equivalent as shown in column 8 of Table I B, application no. 3, and being depicted in the same respective line as said B2482, and preferably the activity is increased non-targeted, or
[25148] (b) a polypeptide comprising a polypeptide, a consensus sequence or at least a polypeptide motif as shown in the respective line in column 5 of Table II or in column 8 of Table IV, application no. 3, respectively, and being depicted in the same respective line as said B2482, or a functional equivalent or a homolog thereof as depicted in column 8 of Table II, application no. 3, preferably a homolog or functional equivalent as depicted in column 8 of Table II B, application no. 3, and being depicted in the same respective line as said B2482, and preferably the activity is increased non-targeted.

[25149] Accordingly, in one embodiment, the molecule which activity is to be increased in the process of the invention is the gene product with an activity as a “NADH dehydrogenase subunit N”, preferably it is the molecule of section (a) or (b) of this paragraph.

[25150] In particular, it was observed that in plants, especially in Arabidopsis thaliana, increasing or generating the activity of a gene product non-targeted with the activity of a “NADH dehydrogenase subunit N”, preferably being encoded by a gene comprising the nucleic acid sequence SEQ ID NO. 79509, preferably the coding region thereof, conferred the production of or the increase in serine compared with the wild type control.

[25151] The nucleic acid sequence of B2482 from Escherichia coli, e.g. as shown in the respective line in column 5 of Table I, application no. 3, has been published in B. And the activity of the gene product thereof is the activity of NADH dehydrogenase subunit N.

[25152] Accordingly, in one embodiment, the process of the present invention for producing 5-oxoproline in a non-human organism, like a microorganism or a plant or a part thereof, comprises increasing or generating the activity of a gene product with the activity of a gene product conferring the activity of “NADH dehydrogenase subunit N”, especially from Escherichia coli or its functional equivalent or its homolog, e.g. the increase of
[25153] (a) a gene product of a gene comprising the nucleic acid molecule as shown in the respective line in column 5 of Table I, application no. 3, preferably the coding region thereof, or a homolog or a fragment thereof, and being depicted in the same respective line as said B2482, or a functional equivalent or a homolog thereof as shown in column 8 of Table I, application no. 3, preferably the coding region thereof, particularly a homolog or functional equivalent as shown in column 8 of Table I B, application no. 3, and being depicted in the same respective line as said B2482, and preferably the activity is increased non-targeted, or
[25154] (b) a polypeptide comprising a polypeptide, a consensus sequence or at least a polypeptide motif as shown in the respective line in column 5 of Table II or in column 8 of Table IV, application no. 3, respectively, and being depicted in the same respective line as said B2482, or a functional equivalent or a homolog thereof as depicted in column 8 of Table II, application no. 3, preferably a homolog or functional equivalent as depicted in column 8 of Table II B, application no. 3, and being depicted in the same respective line as said B2482, and preferably the activity is increased non-targeted.

[25155] Accordingly, in one embodiment, the molecule which activity is to be increased in the process of the invention is the gene product with an activity as a “NADH dehydrogenase subunit N”, preferably it is the molecule of section (a) or (b) of this paragraph.

[25156] In particular, it was observed that in plants, especially in Arabidopsis thaliana, increasing or generating the activity of a gene product non-targeted with the activity of a “NADH dehydrogenase subunit N”, preferably being encoded by a gene comprising the nucleic acid sequence SEQ ID NO. 79509, preferably the coding region thereof, conferred the production of or the increase in 5-oxoproline compared with the wild type control.

[25157] The nucleic acid sequence of B2513 from Escherichia coli, e.g. as shown in the respective line in column 5 of Table I, application no. 3, has been published in B. And the activity of the gene product thereof is the activity of b2513-protein.

[25158] Accordingly, in one embodiment, the process of the present invention for producing phenylalanine in a non-human organism, like a microorganism or a plant or a part thereof, comprises increasing or generating the activity of a gene product with the activity of a gene product conferring the activity of “b2513-protein”, especially from Escherichia coli or its functional equivalent or its homolog, e.g. the increase of
[25159] (a) a gene product of a gene comprising the nucleic acid molecule as shown in the respective line in column 5 of Table I, application no. 3, preferably the coding region thereof, or a homolog or a fragment thereof, and being depicted in the same respective line as said B2513, or a functional equivalent or a homolog thereof as shown in column 8 of Table I, application no. 3, preferably the coding region thereof, particularly a homolog or functional equivalent as shown in column 8 of Table I B, application no. 3, and being depicted in the same respective line as said B2513, and preferably the activity is increased non-targeted, or
[25160] (b) a polypeptide comprising a polypeptide, a consensus sequence or at least a polypeptide motif as shown in the respective line in column 5 of Table II or in column 8 of Table IV, application no. 3, respectively, and being depicted in the same respective line as said B2513, or a functional equivalent or a homolog thereof as depicted in column 8 of Table II, application no. 3, preferably a homolog or functional equivalent as depicted in column 8 of Table II B, application no. 3, and being depicted in the same respective line as said B2513, and preferably the activity is increased non-targeted.

[25161] Accordingly, in one embodiment, the molecule which activity is to be increased in the process of the invention is the gene product with an activity as a “b2513-protein”, preferably it is the molecule of section (a) or (b) of this paragraph.

[25162] In particular, it was observed that in plants, especially in Arabidopsis thaliana, increasing or generating the activity of a gene product non-targeted with the activity of a “b2513-protein”, preferably being encoded by a gene comprising the nucleic acid sequence SEQ ID NO. 9167, preferably the coding region thereof, conferred the production of or the increase in phenylalanine compared with the wild type control.

[25163] The nucleic acid sequence of B2513 from Escherichia coli, e.g. as shown in the respective line in column 5 of Table I, application no. 3, has been published in B. And the activity of the gene product thereof is the activity of b2513-protein.

[25164] Accordingly, in one embodiment, the process of the present invention for producing tyrosine in a non-human organism, like a microorganism or a plant or a part thereof, comprises increasing or generating the activity of a gene product with the activity of a gene product conferring the activity of “b2513-protein”, especially from Escherichia coli or its functional equivalent or its homolog, e.g. the increase of
[25165] (a) a gene product of a gene comprising the nucleic acid molecule as shown in the respective line in column 5 of Table I, application no. 3, preferably the coding region thereof, or a homolog or a fragment thereof, and being depicted in the same respective line as said B2513, or a functional equivalent or a homolog thereof as shown in column 8 of Table I, application no. 3, preferably the coding region thereof, particularly a homolog or functional equivalent as shown in column 8 of Table I B, application no. 3, and being depicted in the same respective line as said B2513, and preferably the activity is increased non-targeted, or
[25166] (b) a polypeptide comprising a polypeptide, a consensus sequence or at least a polypeptide motif as shown in the respective line in column 5 of Table II or in column 8 of Table IV, application no. 3, respectively, and being depicted in the same respective line as said B2513, or a functional equivalent or a homolog thereof as depicted in column 8 of Table II, application no. 3, preferably a homolog or functional equivalent as depicted in column 8 of Table II B, application no. 3, and being depicted in the same respective line as said B2513, and preferably the activity is increased non-targeted.

[25167] Accordingly, in one embodiment, the molecule which activity is to be increased in the process of the invention is the gene product with an activity as a “b2513-protein”, preferably it is the molecule of section (a) or (b) of this paragraph.

[25168] In particular, it was observed that in plants, especially in Arabidopsis thaliana, increasing or generating the activity of a gene product non-targeted with the activity of a “b2513-protein”, preferably being encoded by a gene comprising the nucleic acid sequence SEQ ID NO. 9167, preferably the coding region thereof, conferred the production of or the increase in tyrosine compared with the wild type control.

[25169] The nucleic acid sequence of B2551 from Escherichia coli, e.g. as shown in the respective line in column 5 of Table I, application no. 3, has been published in B. And the activity of the gene product thereof is the activity of serine hydroxymethyltransferase.

[25170] Accordingly, in one embodiment, the process of the present invention for producing serine in a non-human organism, like a microorganism or a plant or a part thereof, comprises increasing or generating the activity of a gene product with the activity of a gene product conferring the activity of “serine hydroxymethyltransferase”, especially from Escherichia coli or its functional equivalent or its homolog, e.g. the increase of
[25171] (a) a gene product of a gene comprising the nucleic acid molecule as shown in the respective line in column 5 of Table I, application no. 3, preferably the coding region thereof, or a homolog or a fragment thereof, and being depicted in the same respective line as said B2551, or a functional equivalent or a homolog thereof as shown in column 8 of Table I, application no. 3, preferably the coding region thereof, particularly a homolog or functional equivalent as shown in column 8 of Table I B, application no. 3, and being depicted in the same respective line as said B2551, and preferably the activity is increased non-targeted, or
[25172] (b) a polypeptide comprising a polypeptide, a consensus sequence or at least a polypeptide motif as shown in the respective line in column 5 of Table II or in column 8 of Table IV, application no. 3, respectively, and being depicted in the same respective line as said B2551, or a functional equivalent or a homolog thereof as depicted in column 8 of Table II, application no. 3, preferably a homolog or functional equivalent as depicted in column 8 of Table II B, application no. 3, and being depicted in the same respective line as said B2551, and preferably the activity is increased non-targeted.

[25173] Accordingly, in one embodiment, the molecule which activity is to be increased in the process of the invention is the gene product with an activity as a “serine hydroxymethyltransferase”, preferably it is the molecule of section (a) or (b) of this paragraph.

[25174] In particular, it was observed that in plants, especially in Arabidopsis thaliana, increasing or generating the activity of a gene product non-targeted with the activity of a “serine hydroxymethyltransferase”, preferably being encoded by a gene comprising the nucleic acid sequence SEQ ID NO. 79627, preferably the coding region thereof, conferred the production of or the increase in serine compared with the wild type control.

[25175] The nucleic acid sequence of B2600 from Escherichia coli, e.g. as shown in the respective line in column 5 of Table I, application no. 3, has been published in B. And the activity of the gene product thereof is the activity of chorismate mutase-T and prephenate dehydrogenase.

[25176] Accordingly, in one embodiment, the process of the present invention for producing phenylalanine in a non-human organism, like a microorganism or a plant or a part thereof, comprises increasing or generating the activity of a gene product with the activity of a gene product conferring the activity of “chorismate mutase-T and prephenate dehydrogenase”, especially from Escherichia coli or its functional equivalent or its homolog, e.g. the increase of
[25177] (a) a gene product of a gene comprising the nucleic acid molecule as shown in the respective line in column 5 of Table I, application no. 3, preferably the coding region thereof, or a homolog or a fragment thereof, and being depicted in the same respective line as said B2600, or a functional equivalent or a homolog thereof as shown in column 8 of Table I, application no. 3, preferably the coding region thereof, particularly a homolog or functional equivalent as shown in column 8 of Table I B, application no. 3, and being depicted in the same respective line as said B2600, and preferably the activity is increased plastidic, or
[25178] (b) a polypeptide comprising a polypeptide, a consensus sequence or at least a polypeptide motif as shown in the respective line in column 5 of Table II or in column 8 of Table IV, application no. 3, respectively, and being depicted in the same respective line as said B2600, or a functional equivalent or a homolog thereof as depicted in column 8 of Table II, application no. 3, preferably a homolog or functional equivalent as depicted in column 8 of Table II B, application no. 3, and being depicted in the same respective line as said B2600, and preferably the activity is increased plastidic.

[25179] Accordingly, in one embodiment, the molecule which activity is to be increased in the process of the invention is the gene product with an activity as a “chorismate mutase-T and prephenate dehydrogenase”, preferably it is the molecule of section (a) or (b) of this paragraph.

[25180] In particular, it was observed that in plants, especially in Arabidopsis thaliana, increasing or generating the activity of a gene product plastidic with the activity of a “chorismate mutase-T and prephenate dehydrogenase”, preferably being encoded by a gene comprising the nucleic acid sequence SEQ ID NO. 80521, preferably the coding region thereof, conferred the production of or the increase in phenylalanine compared with the wild type control.

[25181] The nucleic acid sequence of B2613 from Escherichia coli, e.g. as shown in the respective line in column 5 of Table I, application no. 3, has been published in B. And the activity of the gene product thereof is the activity of b2613-protein.

[25182] Accordingly, in one embodiment, the process of the present invention for producing alanine in a non-human organism, like a microorganism or a plant or a part thereof, comprises increasing or generating the activity of a gene product with the activity of a gene product conferring the activity of “b2613-protein”, especially from Escherichia coli or its functional equivalent or its homolog, e.g. the increase of
[25183] (a) a gene product of a gene comprising the nucleic acid molecule as shown in the respective line in column 5 of Table I, application no. 3, preferably the coding region thereof, or a homolog or a fragment thereof, and being depicted in the same respective line as said B2613, or a functional equivalent or a homolog thereof as shown in column 8 of Table I, application no. 3, preferably the coding region thereof, particularly a homolog or functional equivalent as shown in column 8 of Table I B, application no. 3, and being depicted in the same respective line as said B2613, and preferably the activity is increased non-targeted, or
[25184] (b) a polypeptide comprising a polypeptide, a consensus sequence or at least a polypeptide motif as shown in the respective line in column 5 of Table II or in column 8 of Table IV, application no. 3, respectively, and being depicted in the same respective line as said B2613, or a functional equivalent or a homolog thereof as depicted in column 8 of Table II, application no. 3, preferably a homolog or functional equivalent as depicted in column 8 of Table II B, application no. 3, and being depicted in the same respective line as said B2613, and preferably the activity is increased non-targeted.

[25185] Accordingly, in one embodiment, the molecule which activity is to be increased in the process of the invention is the gene product with an activity as a “b2613-protein”, preferably it is the molecule of section (a) or (b) of this paragraph.

[25186] In particular, it was observed that in plants, especially in Arabidopsis thaliana, increasing or generating the activity of a gene product non-targeted with the activity of a “b2613-protein”, preferably being encoded by a gene comprising the nucleic acid sequence SEQ ID NO. 40665, preferably the coding region thereof, conferred the production of or the increase in alanine compared with the wild type control.

[25187] The nucleic acid sequence of B2634 from Escherichia coli, e.g. as shown in the respective line in column 5 of Table I, application no. 3, has been published in B. And the activity of the gene product thereof is the activity of transcriptional regulator.

[25188] Accordingly, in one embodiment, the process of the present invention for producing phenylalanine in a non-human organism, like a microorganism or a plant or a part thereof, comprises increasing or generating the activity of a gene product with the activity of a gene product conferring the activity of “transcriptional regulator”, especially from Escherichia coli or its functional equivalent or its homolog, e.g. the increase of
[25189] (a) a gene product of a gene comprising the nucleic acid molecule as shown in the respective line in column 5 of Table I, application no. 3, preferably the coding region thereof, or a homolog or a fragment thereof, and being depicted in the same respective line as said B2634, or a functional equivalent or a homolog thereof as shown in column 8 of Table I, application no. 3, preferably the coding region thereof, particularly a homolog or functional equivalent as shown in column 8 of Table I B, application no. 3, and being depicted in the same respective line as said B2634, and preferably the activity is increased non-targeted, or
[25190] (b) a polypeptide comprising a polypeptide, a consensus sequence or at least a polypeptide motif as shown in the respective line in column 5 of Table II or in column 8 of Table IV, application no. 3, respectively, and being depicted in the same respective line as said B2634, or a functional equivalent or a homolog thereof as depicted in column 8 of Table II, application no. 3, preferably a homolog or functional equivalent as depicted in column 8 of Table II B, application no. 3, and being depicted in the same respective line as said B2634, and preferably the activity is increased non-targeted.

[25191] Accordingly, in one embodiment, the molecule which activity is to be increased in the process of the invention is the gene product with an activity as a “transcriptional regulator”, preferably it is the molecule of section (a) or (b) of this paragraph.

[25192] In particular, it was observed that in plants, especially in Arabidopsis thaliana, increasing or generating the activity of a gene product non-targeted with the activity of a “transcriptional regulator”, preferably being encoded by a gene comprising the nucleic acid sequence SEQ ID NO. 40726, preferably the coding region thereof, conferred the production of or the increase in phenylalanine compared with the wild type control.

[25193] The nucleic acid sequence of B2634 from Escherichia coli, e.g. as shown in the respective line in column 5 of Table I, application no. 3, has been published in B. And the activity of the gene product thereof is the activity of transcriptional regulator.

[25194] Accordingly, in one embodiment, the process of the present invention for producing tyrosine in a non-human organism, like a microorganism or a plant or a part thereof, comprises increasing or generating the activity of a gene product with the activity of a gene product conferring the activity of “transcriptional regulator”, especially from Escherichia coli or its functional equivalent or its homolog, e.g. the increase of
[25195] (a) a gene product of a gene comprising the nucleic acid molecule as shown in the respective line in column 5 of Table I, application no. 3, preferably the coding region thereof, or a homolog or a fragment thereof, and being depicted in the same respective line as said B2634, or a functional equivalent or a homolog thereof as shown in column 8 of Table I, application no. 3, preferably the coding region thereof, particularly a homolog or functional equivalent as shown in column 8 of Table I B, application no. 3, and being depicted in the same respective line as said B2634, and preferably the activity is increased non-targeted, or
[25196] (b) a polypeptide comprising a polypeptide, a consensus sequence or at least a polypeptide motif as shown in the respective line in column 5 of Table II or in column 8 of Table IV, application no. 3, respectively, and being depicted in the same respective line as said B2634, or a functional equivalent or a homolog thereof as depicted in column 8 of Table II, application no. 3, preferably a homolog or functional equivalent as depicted in column 8 of Table II B, application no. 3, and being depicted in the same respective line as said B2634, and preferably the activity is increased non-targeted.

[25197] Accordingly, in one embodiment, the molecule which activity is to be increased in the process of the invention is the gene product with an activity as a “transcriptional regulator”, preferably it is the molecule of section (a) or (b) of this paragraph.

[25198] In particular, it was observed that in plants, especially in Arabidopsis thaliana, increasing or generating the activity of a gene product non-targeted with the activity of a “transcriptional regulator”, preferably being encoded by a gene comprising the nucleic acid sequence SEQ ID NO. 40726, preferably the coding region thereof, conferred the production of or the increase in tyrosine compared with the wild type control.

[25199] The nucleic acid sequence of B2673 from Escherichia coli, e.g. as shown in the respective line in column 5 of Table I, application no. 3, has been published in B. And the activity of the gene product thereof is the activity of b2673-protein.

[25200] Accordingly, in one embodiment, the process of the present invention for producing phenylalanine in a non-human organism, like a microorganism or a plant or a part thereof, comprises increasing or generating the activity of a gene product with the activity of a gene product conferring the activity of “b2673-protein”, especially from Escherichia coli or its functional equivalent or its homolog, e.g. the increase of
[25201] (a) a gene product of a gene comprising the nucleic acid molecule as shown in the respective line in column 5 of Table I, application no. 3, preferably the coding region thereof, or a homolog or a fragment thereof, and being depicted in the same respective line as said B2673, or a functional equivalent or a homolog thereof as shown in column 8 of Table I, application no. 3, preferably the coding region thereof, particularly a homolog or functional equivalent as shown in column 8 of Table I B, application no. 3, and being depicted in the same respective line as said B2673, and preferably the activity is increased non-targeted, or
[25202] (b) a polypeptide comprising a polypeptide, a consensus sequence or at least a polypeptide motif as shown in the respective line in column 5 of Table II or in column 8 of Table IV, application no. 3, respectively, and being depicted in the same respective line as said B2673, or a functional equivalent or a homolog thereof as depicted in column 8 of Table II, application no. 3, preferably a homolog or functional equivalent as depicted in column 8 of Table II B, application no. 3, and being depicted in the same respective line as said B2673, and preferably the activity is increased non-targeted.

[25203] Accordingly, in one embodiment, the molecule which activity is to be increased in the process of the invention is the gene product with an activity as a “b2673-protein”, preferably it is the molecule of section (a) or (b) of this paragraph.

[25204] In particular, it was observed that in plants, especially in Arabidopsis thaliana, increasing or generating the activity of a gene product non-targeted with the activity of a “b2673-protein”, preferably being encoded by a gene comprising the nucleic acid sequence SEQ ID NO. 9244, preferably the coding region thereof, conferred the production of or the increase in phenylalanine compared with the wild type control.

[25205] The nucleic acid sequence of B2673 from Escherichia coli, e.g. as shown in the respective line in column 5 of Table I, application no. 3, has been published in B. And the activity of the gene product thereof is the activity of b2673-protein.

[25206] Accordingly, in one embodiment, the process of the present invention for producing tyrosine in a non-human organism, like a microorganism or a plant or a part thereof, comprises increasing or generating the activity of a gene product with the activity of a gene product conferring the activity of “b2673-protein”, especially from Escherichia coli or its functional equivalent or its homolog, e.g. the increase of
[25207] (a) a gene product of a gene comprising the nucleic acid molecule as shown in the respective line in column 5 of Table I, application no. 3, preferably the coding region thereof, or a homolog or a fragment thereof, and being depicted in the same respective line as said B2673, or a functional equivalent or a homolog thereof as shown in column 8 of Table I, application no. 3, preferably the coding region thereof, particularly a homolog or functional equivalent as shown in column 8 of Table I B, application no. 3, and being depicted in the same respective line as said B2673, and preferably the activity is increased non-targeted, or
[25208] (b) a polypeptide comprising a polypeptide, a consensus sequence or at least a polypeptide motif as shown in the respective line in column 5 of Table II or in column 8 of Table IV, application no. 3, respectively, and being depicted in the same respective line as said B2673, or a functional equivalent or a homolog thereof as depicted in column 8 of Table II, application no. 3, preferably a homolog or functional equivalent as depicted in column 8 of Table II B, application no. 3, and being depicted in the same respective line as said B2673, and preferably the activity is increased non-targeted.

[25209] Accordingly, in one embodiment, the molecule which activity is to be increased in the process of the invention is the gene product with an activity as a “b2673-protein”, preferably it is the molecule of section (a) or (b) of this paragraph.

[25210] In particular, it was observed that in plants, especially in Arabidopsis thaliana, increasing or generating the activity of a gene product non-targeted with the activity of a “b2673-protein”, preferably being encoded by a gene comprising the nucleic acid sequence SEQ ID NO. 9244, preferably the coding region thereof, conferred the production of or the increase in tyrosine compared with the wild type control.

[25211] The nucleic acid sequence of B2680 from Escherichia coli, e.g. as shown in the respective line in column 5 of Table I, application no. 3, has been published in B. And the activity of the gene product thereof is the activity of transport protein.

[25212] Accordingly, in one embodiment, the process of the present invention for producing aspartate in a non-human organism, like a microorganism or a plant or a part thereof, comprises increasing or generating the activity of a gene product with the activity of a gene product conferring the activity of “transport protein”, especially from Escherichia coli or its functional equivalent or its homolog, e.g. the increase of
[25213] (a) a gene product of a gene comprising the nucleic acid molecule as shown in the respective line in column 5 of Table I, application no. 3, preferably the coding region thereof, or a homolog or a fragment thereof, and being depicted in the same respective line as said B2680, or a functional equivalent or a homolog thereof as shown in column 8 of Table I, application no. 3, preferably the coding region thereof, particularly a homolog or functional equivalent as shown in column 8 of Table I B, application no. 3, and being depicted in the same respective line as said B2680, and preferably the activity is increased non-targeted, or
[25214] (b) a polypeptide comprising a polypeptide, a consensus sequence or at least a polypeptide motif as shown in the respective line in column 5 of Table II or in column 8 of Table IV, application no. 3, respectively, and being depicted in the same respective line as said B2680, or a functional equivalent or a homolog thereof as depicted in column 8 of Table II, application no. 3, preferably a homolog or functional equivalent as depicted in column 8 of Table II B, application no. 3, and being depicted in the same respective line as said B2680, and preferably the activity is increased non-targeted.

[25215] Accordingly, in one embodiment, the molecule which activity is to be increased in the process of the invention is the gene product with an activity as a “transport protein”, preferably it is the molecule of section (a) or (b) of this paragraph.

[25216] In particular, it was observed that in plants, especially in Arabidopsis thaliana, increasing or generating the activity of a gene product non-targeted with the activity of a “transport protein”, preferably being encoded by a gene comprising the nucleic acid sequence SEQ ID NO. 80589, preferably the coding region thereof, conferred the production of or the increase in aspartate compared with the wild type control.

[25217] The nucleic acid sequence of B2701 from Escherichia coli, e.g. as shown in the respective line in column 5 of Table I, application no. 3, has been published in B. And the activity of the gene product thereof is the activity of murein transglycosylase.

[25218] Accordingly, in one embodiment, the process of the present invention for producing alanine in a non-human organism, like a microorganism or a plant or a part thereof, comprises increasing or generating the activity of a gene product with the activity of a gene product conferring the activity of “murein transglycosylase”, especially from Escherichia coli or its functional equivalent or its homolog, e.g. the increase of
[25219] (a) a gene product of a gene comprising the nucleic acid molecule as shown in the respective line in column 5 of Table I, application no. 3, preferably the coding region thereof, or a homolog or a fragment thereof, and being depicted in the same respective line as said B2701, or a functional equivalent or a homolog thereof as shown in column 8 of Table I, application no. 3, preferably the coding region thereof, particularly a homolog or functional equivalent as shown in column 8 of Table I B, application no. 3, and being depicted in the same respective line as said B2701, and preferably the activity is increased non-targeted, or
[25220] (b) a polypeptide comprising a polypeptide, a consensus sequence or at least a polypeptide motif as shown in the respective line in column 5 of Table II or in column 8 of Table IV, application no. 3, respectively, and being depicted in the same respective line as said B2701, or a functional equivalent or a homolog thereof as depicted in column 8 of Table II, application no. 3, preferably a homolog or functional equivalent as depicted in column 8 of Table II B, application no. 3, and being depicted in the same respective line as said B2701, and preferably the activity is increased non-targeted.

[25221] Accordingly, in one embodiment, the molecule which activity is to be increased in the process of the invention is the gene product with an activity as a “murein transglycosylase”, preferably it is the molecule of section (a) or (b) of this paragraph.

[25222] In particular, it was observed that in plants, especially in Arabidopsis thaliana, increasing or generating the activity of a gene product non-targeted with the activity of a “murein transglycosylase”, preferably being encoded by a gene comprising the nucleic acid sequence SEQ ID NO. 80756, preferably the coding region thereof, conferred the production of or the increase in alanine compared with the wild type control.

[25223] The nucleic acid sequence of B2701 from Escherichia coli, e.g. as shown in the respective line in column 5 of Table I, application no. 3, has been published in B. And the activity of the gene product thereof is the activity of murein transglycosylase.

[25224] Accordingly, in one embodiment, the process of the present invention for producing phenylalanine in a non-human organism, like a microorganism or a plant or a part thereof, comprises increasing or generating the activity of a gene product with the activity of a gene product conferring the activity of “murein transglycosylase”, especially from Escherichia coli or its functional equivalent or its homolog, e.g. the increase of
[25225] (a) a gene product of a gene comprising the nucleic acid molecule as shown in the respective line in column 5 of Table I, application no. 3, preferably the coding region thereof, or a homolog or a fragment thereof, and being depicted in the same respective line as said B2701, or a functional equivalent or a homolog thereof as shown in column 8 of Table I, application no. 3, preferably the coding region thereof, particularly a homolog or functional equivalent as shown in column 8 of Table I B, application no. 3, and being depicted in the same respective line as said B2701, and preferably the activity is increased non-targeted, or
[25226] (b) a polypeptide comprising a polypeptide, a consensus sequence or at least a polypeptide motif as shown in the respective line in column 5 of Table II or in column 8 of Table IV, application no. 3, respectively, and being depicted in the same respective line as said B2701, or a functional equivalent or a homolog thereof as depicted in column 8 of Table II, application no. 3, preferably a homolog or functional equivalent as depicted in column 8 of Table II B, application no. 3, and being depicted in the same respective line as said B2701, and preferably the activity is increased non-targeted.

[25227] Accordingly, in one embodiment, the molecule which activity is to be increased in the process of the invention is the gene product with an activity as a “murein transglycosylase”, preferably it is the molecule of section (a) or (b) of this paragraph.

[25228] In particular, it was observed that in plants, especially in Arabidopsis thaliana, increasing or generating the activity of a gene product non-targeted with the activity of a “murein transglycosylase”, preferably being encoded by a gene comprising the nucleic acid sequence SEQ ID NO. 80756, preferably the coding region thereof, conferred the production of or the increase in phenylalanine compared with the wild type control.

[25229] The nucleic acid sequence of B2701 from Escherichia coli, e.g. as shown in the respective line in column 5 of Table I, application no. 3, has been published in B. And the activity of the gene product thereof is the activity of murein transglycosylase.

[25230] Accordingly, in one embodiment, the process of the present invention for producing tyrosine in a non-human organism, like a microorganism or a plant or a part thereof, comprises increasing or generating the activity of a gene product with the activity of a gene product conferring the activity of “murein transglycosylase”, especially from Escherichia coli or its functional equivalent or its homolog, e.g. the increase of
[25231] (a) a gene product of a gene comprising the nucleic acid molecule as shown in the respective line in column 5 of Table I, application no. 3, preferably the coding region thereof, or a homolog or a fragment thereof, and being depicted in the same respective line as said B2701, or a functional equivalent or a homolog thereof as shown in column 8 of Table I, application no. 3, preferably the coding region thereof, particularly a homolog or functional equivalent as shown in column 8 of Table I B, application no. 3, and being depicted in the same respective line as said B2701, and preferably the activity is increased non-targeted, or
[25232] (b) a polypeptide comprising a polypeptide, a consensus sequence or at least a polypeptide motif as shown in the respective line in column 5 of Table II or in column 8 of Table IV, application no. 3, respectively, and being depicted in the same respective line as said B2701, or a functional equivalent or a homolog thereof as depicted in column 8 of Table II, application no. 3, preferably a homolog or functional equivalent as depicted in column 8 of Table II B, application no. 3, and being depicted in the same respective line as said B2701, and preferably the activity is increased non-targeted.

[25233] Accordingly, in one embodiment, the molecule which activity is to be increased in the process of the invention is the gene product with an activity as a “murein transglycosylase”, preferably it is the molecule of section (a) or (b) of this paragraph.

[25234] In particular, it was observed that in plants, especially in Arabidopsis thaliana, increasing or generating the activity of a gene product non-targeted with the activity of a “murein transglycosylase”, preferably being encoded by a gene comprising the nucleic acid sequence SEQ ID NO. 80756, preferably the coding region thereof, conferred the production of or the increase in tyrosine compared with the wild type control.

[25235] The nucleic acid sequence of B2714 from Escherichia coli, e.g. as shown in the respective line in column 5 of Table I, application no. 3, has been published in B. And the activity of the gene product thereof is the activity of transcriptional regulator.

[25236] Accordingly, in one embodiment, the process of the present invention for producing alanine in a non-human organism, like a microorganism or a plant or a part thereof, comprises increasing or generating the activity of a gene product with the activity of a gene product conferring the activity of “transcriptional regulator”, especially from Escherichia coli or its functional equivalent or its homolog, e.g. the increase of
[25237] (a) a gene product of a gene comprising the nucleic acid molecule as shown in the respective line in column 5 of Table I, application no. 3, preferably the coding region thereof, or a homolog or a fragment thereof, and being depicted in the same respective line as said B2714, or a functional equivalent or a homolog thereof as shown in column 8 of Table I, application no. 3, preferably the coding region thereof, particularly a homolog or functional equivalent as shown in column 8 of Table I B, application no. 3, and being depicted in the same respective line as said B2714, and preferably the activity is increased non-targeted, or
[25238] (b) a polypeptide comprising a polypeptide, a consensus sequence or at least a polypeptide motif as shown in the respective line in column 5 of Table II or in column 8 of Table IV, application no. 3, respectively, and being depicted in the same respective line as said B2714, or a functional equivalent or a homolog thereof as depicted in column 8 of Table II, application no. 3, preferably a homolog or functional equivalent as depicted in column 8 of Table II B, application no. 3, and being depicted in the same respective line as said B2714, and preferably the activity is increased non-targeted.

[25239] Accordingly, in one embodiment, the molecule which activity is to be increased in the process of the invention is the gene product with an activity as a “transcriptional regulator”, preferably it is the molecule of section (a) or (b) of this paragraph.

[25240] In particular, it was observed that in plants, especially in Arabidopsis thaliana, increasing or generating the activity of a gene product non-targeted with the activity of a “transcriptional regulator”, preferably being encoded by a gene comprising the nucleic acid sequence SEQ ID NO. 40741, preferably the coding region thereof, conferred the production of or the increase in alanine compared with the wild type control.

[25241] The nucleic acid sequence of B2739 from Escherichia coli, e.g. as shown in the respective line in column 5 of Table I, application no. 3, has been published in B. And the activity of the gene product thereof is the activity of b2739-protein.

[25242] Accordingly, in one embodiment, the process of the present invention for producing alanine in a non-human organism, like a microorganism or a plant or a part thereof, comprises increasing or generating the activity of a gene product with the activity of a gene product conferring the activity of “b2739-protein”, especially from Escherichia coli or its functional equivalent or its homolog, e.g. the increase of
[25243] (a) a gene product of a gene comprising the nucleic acid molecule as shown in the respective line in column 5 of Table I, application no. 3, preferably the coding region thereof, or a homolog or a fragment thereof, and being depicted in the same respective line as said B2739, or a functional equivalent or a homolog thereof as shown in column 8 of Table I, application no. 3, preferably the coding region thereof, particularly a homolog or functional equivalent as shown in column 8 of Table I B, application no. 3, and being depicted in the same respective line as said B2739, and preferably the activity is increased non-targeted, or
[25244] (b) a polypeptide comprising a polypeptide, a consensus sequence or at least a polypeptide motif as shown in the respective line in column 5 of Table II or in column 8 of Table IV, application no. 3, respectively, and being depicted in the same respective line as said B2739, or a functional equivalent or a homolog thereof as depicted in column 8 of Table II, application no. 3, preferably a homolog or functional equivalent as depicted in column 8 of Table II B, application no. 3, and being depicted in the same respective line as said B2739, and preferably the activity is increased non-targeted.

[25245] Accordingly, in one embodiment, the molecule which activity is to be increased in the process of the invention is the gene product with an activity as a “b2739-protein”, preferably it is the molecule of section (a) or (b) of this paragraph.

[25246] In particular, it was observed that in plants, especially in Arabidopsis thaliana, increasing or generating the activity of a gene product non-targeted with the activity of a “b2739-protein”, preferably being encoded by a gene comprising the nucleic acid sequence SEQ ID NO. 80906, preferably the coding region thereof, conferred the production of or the increase in alanine compared with the wild type control.

[25247] The nucleic acid sequence of B2739 from Escherichia coli, e.g. as shown in the respective line in column 5 of Table I, application no. 3, has been published in B. And the activity of the gene product thereof is the activity of b2739-protein.

[25248] Accordingly, in one embodiment, the process of the present invention for producing phenylalanine in a non-human organism, like a microorganism or a plant or a part thereof, comprises increasing or generating the activity of a gene product with the activity of a gene product conferring the activity of “b2739-protein”, especially from Escherichia coli or its functional equivalent or its homolog, e.g. the increase of
[25249] (a) a gene product of a gene comprising the nucleic acid molecule as shown in the respective line in column 5 of Table I, application no. 3, preferably the coding region thereof, or a homolog or a fragment thereof, and being depicted in the same respective line as said B2739, or a functional equivalent or a homolog thereof as shown in column 8 of Table I, application no. 3, preferably the coding region thereof, particularly a homolog or functional equivalent as shown in column 8 of Table I B, application no. 3, and being depicted in the same respective line as said B2739, and preferably the activity is increased non-targeted, or
[25250] (b) a polypeptide comprising a polypeptide, a consensus sequence or at least a polypeptide motif as shown in the respective line in column 5 of Table II or in column 8 of Table IV, application no. 3, respectively, and being depicted in the same respective line as said B2739, or a functional equivalent or a homolog thereof as depicted in column 8 of Table II, application no. 3, preferably a homolog or functional equivalent as depicted in column 8 of Table II B, application no. 3, and being depicted in the same respective line as said B2739, and preferably the activity is increased non-targeted.

[25251] Accordingly, in one embodiment, the molecule which activity is to be increased in the process of the invention is the gene product with an activity as a “b2739-protein”, preferably it is the molecule of section (a) or (b) of this paragraph.

[25252] In particular, it was observed that in plants, especially in Arabidopsis thaliana, increasing or generating the activity of a gene product non-targeted with the activity of a “b2739-protein”, preferably being encoded by a gene comprising the nucleic acid sequence SEQ ID NO. 80906, preferably the coding region thereof, conferred the production of or the increase in phenylalanine compared with the wild type control.

[25253] The nucleic acid sequence of B2739 from Escherichia coli, e.g. as shown in the respective line in column 5 of Table I, application no. 3, has been published in B. And the activity of the gene product thereof is the activity of b2739-protein.

[25254] Accordingly, in one embodiment, the process of the present invention for producing tyrosine in a non-human organism, like a microorganism or a plant or a part thereof, comprises increasing or generating the activity of a gene product with the activity of a gene product conferring the activity of “b2739-protein”, especially from Escherichia coli or its functional equivalent or its homolog, e.g. the increase of
[25255] (a) a gene product of a gene comprising the nucleic acid molecule as shown in the respective line in column 5 of Table I, application no. 3, preferably the coding region thereof, or a homolog or a fragment thereof, and being depicted in the same respective line as said B2739, or a functional equivalent or a homolog thereof as shown in column 8 of Table I, application no. 3, preferably the coding region thereof, particularly a homolog or functional equivalent as shown in column 8 of Table I B, application no. 3, and being depicted in the same respective line as said B2739, and preferably the activity is increased non-targeted, or
[25256] (b) a polypeptide comprising a polypeptide, a consensus sequence or at least a polypeptide motif as shown in the respective line in column 5 of Table II or in column 8 of Table IV, application no. 3, respectively, and being depicted in the same respective line as said B2739, or a functional equivalent or a homolog thereof as depicted in column 8 of Table II, application no. 3, preferably a homolog or functional equivalent as depicted in column 8 of Table II B, application no. 3, and being depicted in the same respective line as said B2739, and preferably the activity is increased non-targeted.

[25257] Accordingly, in one embodiment, the molecule which activity is to be increased in the process of the invention is the gene product with an activity as a “b2739-protein”, preferably it is the molecule of section (a) or (b) of this paragraph.

[25258] In particular, it was observed that in plants, especially in Arabidopsis thaliana, increasing or generating the activity of a gene product non-targeted with the activity of a “b2739-protein”, preferably being encoded by a gene comprising the nucleic acid sequence SEQ ID NO. 80906, preferably the coding region thereof, conferred the production of or the increase in tyrosine compared with the wild type control.

[25259] The nucleic acid sequence of B2747 from Escherichia coli, e.g. as shown in the respective line in column 5 of Table I, application no. 3, has been published in B. And the activity of the gene product thereof is the activity of 2-C-methyl-D-erythritol 4-phosphate cytidylyltransferase.

[25260] Accordingly, in one embodiment, the process of the present invention for producing tyrosine in a non-human organism, like a microorganism or a plant or a part thereof, comprises increasing or generating the activity of a gene product with the activity of a gene product conferring the activity of “2-C-methyl-D-erythritol 4-phosphate cytidylyltransferase”, especially from Escherichia coli or its functional equivalent or its homolog, e.g. the increase of
[25261] (a) a gene product of a gene comprising the nucleic acid molecule as shown in the respective line in column 5 of Table I, application no. 3, preferably the coding region thereof, or a homolog or a fragment thereof, and being depicted in the same respective line as said B2747, or a functional equivalent or a homolog thereof as shown in column 8 of Table I, application no. 3, preferably the coding region thereof, particularly a homolog or functional equivalent as shown in column 8 of Table I B, application no. 3, and being depicted in the same respective line as said B2747, and preferably the activity is increased non-targeted, or
[25262] (b) a polypeptide comprising a polypeptide, a consensus sequence or at least a polypeptide motif as shown in the respective line in column 5 of Table II or in column 8 of Table IV, application no. 3, respectively, and being depicted in the same respective line as said B2747, or a functional equivalent or a homolog thereof as depicted in column 8 of Table II, application no. 3, preferably a homolog or functional equivalent as depicted in column 8 of Table II B, application no. 3, and being depicted in the same respective line as said B2747, and preferably the activity is increased non-targeted.

[25263] Accordingly, in one embodiment, the molecule which activity is to be increased in the process of the invention is the gene product with an activity as a “2-C-methyl-D-erythritol 4-phosphate cytidylyltransferase”, preferably it is the molecule of section (a) or (b) of this paragraph.

[25264] In particular, it was observed that in plants, especially in Arabidopsis thaliana, increasing or generating the activity of a gene product non-targeted with the activity of a “2-C-methyl-D-erythritol 4-phosphate cytidylyltransferase”, preferably being encoded by a gene comprising the nucleic acid sequence SEQ ID NO. 81075, preferably the coding region thereof, conferred the production of or the increase in tyrosine compared with the wild type control.

[25265] The nucleic acid sequence of B2747 from Escherichia coli, e.g. as shown in the respective line in column 5 of Table I, application no. 3, has been published in B. And the activity of the gene product thereof is the activity of 2-C-methyl-D-erythritol 4-phosphate cytidylyltransferase.

[25266] Accordingly, in one embodiment, the process of the present invention for producing 5-oxoproline in a non-human organism, like a microorganism or a plant or a part thereof, comprises increasing or generating the activity of a gene product with the activity of a gene product conferring the activity of “2-C-methyl-D-erythritol 4-phosphate cytidylyltransferase”, especially from Escherichia coli or its functional equivalent or its homolog, e.g. the increase of
[25267] (a) a gene product of a gene comprising the nucleic acid molecule as shown in the respective line in column 5 of Table I, application no. 3, preferably the coding region thereof, or a homolog or a fragment thereof, and being depicted in the same respective line as said B2747, or a functional equivalent or a homolog thereof as shown in column 8 of Table I, application no. 3, preferably the coding region thereof, particularly a homolog or functional equivalent as shown in column 8 of Table I B, application no. 3, and being depicted in the same respective line as said B2747, and preferably the activity is increased non-targeted, or
[25268] (b) a polypeptide comprising a polypeptide, a consensus sequence or at least a polypeptide motif as shown in the respective line in column 5 of Table II or in column 8 of Table IV, application no. 3, respectively, and being depicted in the same respective line as said B2747, or a functional equivalent or a homolog thereof as depicted in column 8 of Table II, application no. 3, preferably a homolog or functional equivalent as depicted in column 8 of Table II B, application no. 3, and being depicted in the same respective line as said B2747, and preferably the activity is increased non-targeted.

[25269] Accordingly, in one embodiment, the molecule which activity is to be increased in the process of the invention is the gene product with an activity as a “2-C-methyl-D-erythritol 4-phosphate cytidylyltransferase”, preferably it is the molecule of section (a) or (b) of this paragraph.

[25270] In particular, it was observed that in plants, especially in Arabidopsis thaliana, increasing or generating the activity of a gene product non-targeted with the activity of a “2-C-methyl-Derythritol 4-phosphate cytidylyltransferase”, preferably being encoded by a gene comprising the nucleic acid sequence SEQ ID NO. 81075, preferably the coding region thereof, conferred the production of or the increase in 5-oxoproline compared with the wild type control.

[25271] The nucleic acid sequence of B2762 from Escherichia coli, e.g. as shown in the respective line in column 5 of Table I, application no. 3, has been published in B. And the activity of the gene product thereof is the activity of phosphoadenosine phosphosulfate reductase.

[25272] Accordingly, in one embodiment, the process of the present invention for producing phenylalanine in a non-human organism, like a microorganism or a plant or a part thereof, comprises increasing or generating the activity of a gene product with the activity of a gene product conferring the activity of “phosphoadenosine phosphosulfate reductase”, especially from Escherichia coli or its functional equivalent or its homolog, e.g. the increase of
[25273] (a) a gene product of a gene comprising the nucleic acid molecule as shown in the respective line in column 5 of Table I, application no. 3, preferably the coding region thereof, or a homolog or a fragment thereof, and being depicted in the same respective line as said B2762, or a functional equivalent or a homolog thereof as shown in column 8 of Table I, application no. 3, preferably the coding region thereof, particularly a homolog or functional equivalent as shown in column 8 of Table I B, application no. 3, and being depicted in the same respective line as said B2762, and preferably the activity is increased non-targeted, or
[25274] (b) a polypeptide comprising a polypeptide, a consensus sequence or at least a polypeptide motif as shown in the respective line in column 5 of Table II or in column 8 of Table IV, application no. 3, respectively, and being depicted in the same respective line as said B2762, or a functional equivalent or a homolog thereof as depicted in column 8 of Table II, application no. 3, preferably a homolog or functional equivalent as depicted in column 8 of Table II B, application no. 3, and being depicted in the same respective line as said B2762, and preferably the activity is increased non-targeted.

[25275] Accordingly, in one embodiment, the molecule which activity is to be increased in the process of the invention is the gene product with an activity as a “phosphoadenosine phosphosulfate reductase”, preferably it is the molecule of section (a) or (b) of this paragraph.

[25276] In particular, it was observed that in plants, especially in Arabidopsis thaliana, increasing or generating the activity of a gene product non-targeted with the activity of a “phosphoadenosine phosphosulfate reductase”, preferably being encoded by a gene comprising the nucleic acid sequence SEQ ID NO. 81451, preferably the coding region thereof, conferred the production of or the increase in phenylalanine compared with the wild type control.

[25277] The nucleic acid sequence of B2812 from Escherichia coli, e.g. as shown in the respective line in column 5 of Table I, application no. 3, has been published in B. And the activity of the gene product thereof is the activity of b2812-protein.

[25278] Accordingly, in one embodiment, the process of the present invention for producing phenylalanine in a non-human organism, like a microorganism or a plant or a part thereof, comprises increasing or generating the activity of a gene product with the activity of a gene product conferring the activity of “b2812-protein”, especially from Escherichia coli or its functional equivalent or its homolog, e.g. the increase of
[25279] (a) a gene product of a gene comprising the nucleic acid molecule as shown in the respective line in column 5 of Table I, application no. 3, preferably the coding region thereof, or a homolog or a fragment thereof, and being depicted in the same respective line as said B2812, or a functional equivalent or a homolog thereof as shown in column 8 of Table I, application no. 3, preferably the coding region thereof, particularly a homolog or functional equivalent as shown in column 8 of Table I B, application no. 3, and being depicted in the same respective line as said B2812, and preferably the activity is increased non-targeted, or
[25280] (b) a polypeptide comprising a polypeptide, a consensus sequence or at least a polypeptide motif as shown in the respective line in column 5 of Table II or in column 8 of Table IV, application no. 3, respectively, and being depicted in the same respective line as said B2812, or a functional equivalent or a homolog thereof as depicted in column 8 of Table II, application no. 3, preferably a homolog or functional equivalent as depicted in column 8 of Table II B, application no. 3, and being depicted in the same respective line as said B2812, and preferably the activity is increased non-targeted.

[25281] Accordingly, in one embodiment, the molecule which activity is to be increased in the process of the invention is the gene product with an activity as a “b2812-protein”, preferably it is the molecule of section (a) or (b) of this paragraph.

[25282] In particular, it was observed that in plants, especially in Arabidopsis thaliana, increasing or generating the activity of a gene product non-targeted with the activity of a “b2812-protein”, preferably being encoded by a gene comprising the nucleic acid sequence SEQ ID NO. 40795, preferably the coding region thereof, conferred the production of or the increase in phenylalanine compared with the wild type control.

[25283] The nucleic acid sequence of B2812 from Escherichia coli, e.g. as shown in the respective line in column 5 of Table I, application no. 3, has been published in B. And the activity of the gene product thereof is the activity of b2812-protein.

[25284] Accordingly, in one embodiment, the process of the present invention for producing serine in a non-human organism, like a microorganism or a plant or a part thereof, comprises increasing or generating the activity of a gene product with the activity of a gene product conferring the activity of “b2812-protein”, especially from Escherichia coli or its functional equivalent or its homolog, e.g. the increase of
[25285] (a) a gene product of a gene comprising the nucleic acid molecule as shown in the respective line in column 5 of Table I, application no. 3, preferably the coding region thereof, or a homolog or a fragment thereof, and being depicted in the same respective line as said B2812, or a functional equivalent or a homolog thereof as shown in column 8 of Table I, application no. 3, preferably the coding region thereof, particularly a homolog or functional equivalent as shown in column 8 of Table I B, application no. 3, and being depicted in the same respective line as said B2812, and preferably the activity is increased non-targeted, or
[25286] (b) a polypeptide comprising a polypeptide, a consensus sequence or at least a polypeptide motif as shown in the respective line in column 5 of Table II or in column 8 of Table IV, application no. 3, respectively, and being depicted in the same respective line as said B2812, or a functional equivalent or a homolog thereof as depicted in column 8 of Table II, application no. 3, preferably a homolog or functional equivalent as depicted in column 8 of Table II B, application no. 3, and being depicted in the same respective line as said B2812, and preferably the activity is increased non-targeted.

[25287] Accordingly, in one embodiment, the molecule which activity is to be increased in the process of the invention is the gene product with an activity as a “b2812-protein”, preferably it is the molecule of section (a) or (b) of this paragraph.

[25288] In particular, it was observed that in plants, especially in Arabidopsis thaliana, increasing or generating the activity of a gene product non-targeted with the activity of a “b2812-protein”, preferably being encoded by a gene comprising the nucleic acid sequence SEQ ID NO. 40795, preferably the coding region thereof, conferred the production of or the increase in serine compared with the wild type control.

[25289] The nucleic acid sequence of B2812 from Escherichia coli, e.g. as shown in the respective line in column 5 of Table I, application no. 3, has been published in B. And the activity of the gene product thereof is the activity of b2812-protein.

[25290] Accordingly, in one embodiment, the process of the present invention for producing tyrosine in a non-human organism, like a microorganism or a plant or a part thereof, comprises increasing or generating the activity of a gene product with the activity of a gene product conferring the activity of “b2812-protein”, especially from Escherichia coli or its functional equivalent or its homolog, e.g. the increase of
[25291] (a) a gene product of a gene comprising the nucleic acid molecule as shown in the respective line in column 5 of Table I, application no. 3, preferably the coding region thereof, or a homolog or a fragment thereof, and being depicted in the same respective line as said B2812, or a functional equivalent or a homolog thereof as shown in column 8 of Table I, application no. 3, preferably the coding region thereof, particularly a homolog or functional equivalent as shown in column 8 of Table I B, application no. 3, and being depicted in the same respective line as said B2812, and preferably the activity is increased non-targeted, or
[25292] (b) a polypeptide comprising a polypeptide, a consensus sequence or at least a polypeptide motif as shown in the respective line in column 5 of Table II or in column 8 of Table IV, application no. 3, respectively, and being depicted in the same respective line as said B2812, or a functional equivalent or a homolog thereof as depicted in column 8 of Table II, application no. 3, preferably a homolog or functional equivalent as depicted in column 8 of Table II B, application no. 3, and being depicted in the same respective line as said B2812, and preferably the activity is increased non-targeted.

[25293] Accordingly, in one embodiment, the molecule which activity is to be increased in the process of the invention is the gene product with an activity as a “b2812-protein”, preferably it is the molecule of section (a) or (b) of this paragraph.

[25294] In particular, it was observed that in plants, especially in Arabidopsis thaliana, increasing or generating the activity of a gene product non-targeted with the activity of a “b2812-protein”, preferably being encoded by a gene comprising the nucleic acid sequence SEQ ID NO. 40795, preferably the coding region thereof, conferred the production of or the increase in tyrosine compared with the wild type control.

[25295] The nucleic acid sequence of B2818 from Escherichia coli, e.g. as shown in the respective line in column 5 of Table I, application no. 3, has been published in B. And the activity of the gene product thereof is the activity of amino-acid acetyltransferase.

[25296] Accordingly, in one embodiment, the process of the present invention for producing phenylalanine in a non-human organism, like a microorganism or a plant or a part thereof, comprises increasing or generating the activity of a gene product with the activity of a gene product conferring the activity of “amino-acid acetyltransferase”, especially from Escherichia coli or its functional equivalent or its homolog, e.g. the increase of
[25297] (a) a gene product of a gene comprising the nucleic acid molecule as shown in the respective line in column 5 of Table I, application no. 3, preferably the coding region thereof, or a homolog or a fragment thereof, and being depicted in the same respective line as said B2818, or a functional equivalent or a homolog thereof as shown in column 8 of Table I, application no. 3, preferably the coding region thereof, particularly a homolog or functional equivalent as shown in column 8 of Table I B, application no. 3, and being depicted in the same respective line as said B2818, and preferably the activity is increased non-targeted, or
[25298] (b) a polypeptide comprising a polypeptide, a consensus sequence or at least a polypeptide motif as shown in the respective line in column 5 of Table II or in column 8 of Table IV, application no. 3, respectively, and being depicted in the same respective line as said B2818, or a functional equivalent or a homolog thereof as depicted in column 8 of Table II, application no. 3, preferably a homolog or functional equivalent as depicted in column 8 of Table II B, application no. 3, and being depicted in the same respective line as said B2818, and preferably the activity is increased non-targeted.

[25299] Accordingly, in one embodiment, the molecule which activity is to be increased in the process of the invention is the gene product with an activity as a “amino-acid acetyltransferase”, preferably it is the molecule of section (a) or (b) of this paragraph.

[25300] In particular, it was observed that in plants, especially in Arabidopsis thaliana, increasing or generating the activity of a gene product non-targeted with the activity of a “amino-acid acetyltransferase”, preferably being encoded by a gene comprising the nucleic acid sequence SEQ ID NO. 81576, preferably the coding region thereof, conferred the production of or the increase in phenylalanine compared with the wild type control.

[25301] The nucleic acid sequence of B2818 from Escherichia coli, e.g. as shown in the respective line in column 5 of Table I, application no. 3, has been published in B. And the activity of the gene product thereof is the activity of amino-acid acetyltransferase.

[25302] Accordingly, in one embodiment, the process of the present invention for producing tyrosine in a non-human organism, like a microorganism or a plant or a part thereof, comprises increasing or generating the activity of a gene product with the activity of a gene product conferring the activity of “amino-acid acetyltransferase”, especially from Escherichia coli or its functional equivalent or its homolog, e.g. the increase of
[25303] (a) a gene product of a gene comprising the nucleic acid molecule as shown in the respective line in column 5 of Table I, application no. 3, preferably the coding region thereof, or a homolog or a fragment thereof, and being depicted in the same respective line as said B2818, or a functional equivalent or a homolog thereof as shown in column 8 of Table I, application no. 3, preferably the coding region thereof, particularly a homolog or functional equivalent as shown in column 8 of Table I B, application no. 3, and being depicted in the same respective line as said B2818, and preferably the activity is increased non-targeted, or
[25304] (b) a polypeptide comprising a polypeptide, a consensus sequence or at least a polypeptide motif as shown in the respective line in column 5 of Table II or in column 8 of Table IV, application no. 3, respectively, and being depicted in the same respective line as said B2818, or a functional equivalent or a homolog thereof as depicted in column 8 of Table II, application no. 3, preferably a homolog or functional equivalent as depicted in column 8 of Table II B, application no. 3, and being depicted in the same respective line as said B2818, and preferably the activity is increased non-targeted.

[25305] Accordingly, in one embodiment, the molecule which activity is to be increased in the process of the invention is the gene product with an activity as a “amino-acid acetyltransferase”, preferably it is the molecule of section (a) or (b) of this paragraph.

[25306] In particular, it was observed that in plants, especially in Arabidopsis thaliana, increasing or generating the activity of a gene product non-targeted with the activity of a “amino-acid acetyltransferase”, preferably being encoded by a gene comprising the nucleic acid sequence SEQ ID NO. 81576, preferably the coding region thereof, conferred the production of or the increase in tyrosine compared with the wild type control.

[25307] The nucleic acid sequence of B2818 from Escherichia coli, e.g. as shown in the respective line in column 5 of Table I, application no. 3, has been published in B. And the activity of the gene product thereof is the activity of amino-acid acetyltransferase.

[25308] Accordingly, in one embodiment, the process of the present invention for producing 5-oxoproline in a non-human organism, like a microorganism or a plant or a part thereof, comprises increasing or generating the activity of a gene product with the activity of a gene product conferring the activity of “amino-acid acetyltransferase”, especially from Escherichia coli or its functional equivalent or its homolog, e.g. the increase of
[25309] (a) a gene product of a gene comprising the nucleic acid molecule as shown in the respective line in column 5 of Table I, application no. 3, preferably the coding region thereof, or a homolog or a fragment thereof, and being depicted in the same respective line as said B2818, or a functional equivalent or a homolog thereof as shown in column 8 of Table I, application no. 3, preferably the coding region thereof, particularly a homolog or functional equivalent as shown in column 8 of Table I B, application no. 3, and being depicted in the same respective line as said B2818, and preferably the activity is increased non-targeted, or
[25310] (b) a polypeptide comprising a polypeptide, a consensus sequence or at least a polypeptide motif as shown in the respective line in column 5 of Table II or in column 8 of Table IV, application no. 3, respectively, and being depicted in the same respective line as said B2818, or a functional equivalent or a homolog thereof as depicted in column 8 of Table II, application no. 3, preferably a homolog or functional equivalent as depicted in column 8 of Table II B, application no. 3, and being depicted in the same respective line as said B2818, and preferably the activity is increased non-targeted.

[25311] Accordingly, in one embodiment, the molecule which activity is to be increased in the process of the invention is the gene product with an activity as a “amino-acid acetyltransferase”, preferably it is the molecule of section (a) or (b) of this paragraph.

[25312] In particular, it was observed that in plants, especially in Arabidopsis thaliana, increasing or generating the activity of a gene product non-targeted with the activity of a “amino-acid acetyltransferase”, preferably being encoded by a gene comprising the nucleic acid sequence SEQ ID NO. 81576, preferably the coding region thereof, conferred the production of or the increase in 5-oxoproline compared with the wild type control.

[25313] The nucleic acid sequence of B2828 from Escherichia coli, e.g. as shown in the respective line in column 5 of Table I, application no. 3, has been published in B. And the activity of the gene product thereof is the activity of prolipoprotein diacylglyceryl transferase.

[25314] Accordingly, in one embodiment, the process of the present invention for producing aspartate in a non-human organism, like a microorganism or a plant or a part thereof, comprises increasing or generating the activity of a gene product with the activity of a gene product conferring the activity of “prolipoprotein diacylglyceryl transferase”, especially from Escherichia coli or its functional equivalent or its homolog, e.g. the increase of
[25315] (a) a gene product of a gene comprising the nucleic acid molecule as shown in the respective line in column 5 of Table I, application no. 3, preferably the coding region thereof, or a homolog or a fragment thereof, and being depicted in the same respective line as said B2828, or a functional equivalent or a homolog thereof as shown in column 8 of Table I, application no. 3, preferably the coding region thereof, particularly a homolog or functional equivalent as shown in column 8 of Table I B, application no. 3, and being depicted in the same respective line as said B2828, and preferably the activity is increased non-targeted, or
[25316] (b) a polypeptide comprising a polypeptide, a consensus sequence or at least a polypeptide motif as shown in the respective line in column 5 of Table II or in column 8 of Table IV, application no. 3, respectively, and being depicted in the same respective line as said B2828, or a functional equivalent or a homolog thereof as depicted in column 8 of Table II, application no. 3, preferably a homolog or functional equivalent as depicted in column 8 of Table II B, application no. 3, and being depicted in the same respective line as said B2828, and preferably the activity is increased non-targeted.

[25317] Accordingly, in one embodiment, the molecule which activity is to be increased in the process of the invention is the gene product with an activity as a “prolipoprotein diacylglyceryl transferase”, preferably it is the molecule of section (a) or (b) of this paragraph.

[25318] In particular, it was observed that in plants, especially in Arabidopsis thaliana, increasing or generating the activity of a gene product non-targeted with the activity of a “prolipoprotein diacylglyceryl transferase”, preferably being encoded by a gene comprising the nucleic acid sequence SEQ ID NO. 81692, preferably the coding region thereof, conferred the production of or the increase in aspartate compared with the wild type control.

[25319] The nucleic acid sequence of B2839 from Escherichia coli, e.g. as shown in the respective line in column 5 of Table I, application no. 3, has been published in B. And the activity of the gene product thereof is the activity of transcriptional regulator.

[25320] Accordingly, in one embodiment, the process of the present invention for producing tyrosine in a non-human organism, like a microorganism or a plant or a part thereof, comprises increasing or generating the activity of a gene product with the activity of a gene product conferring the activity of “transcriptional regulator”, especially from Escherichia coli or its functional equivalent or its homolog, e.g. the increase of
[25321] (a) a gene product of a gene comprising the nucleic acid molecule as shown in the respective line in column 5 of Table I, application no. 3, preferably the coding region thereof, or a homolog or a fragment thereof, and being depicted in the same respective line as said B2839, or a functional equivalent or a homolog thereof as shown in column 8 of Table I, application no. 3, preferably the coding region thereof, particularly a homolog or functional equivalent as shown in column 8 of Table I B, application no. 3, and being depicted in the same respective line as said B2839, and preferably the activity is increased non-targeted, or
[25322] (b) a polypeptide comprising a polypeptide, a consensus sequence or at least a polypeptide motif as shown in the respective line in column 5 of Table II or in column 8 of Table IV, application no. 3, respectively, and being depicted in the same respective line as said B2839, or a functional equivalent or a homolog thereof as depicted in column 8 of Table II, application no. 3, preferably a homolog or functional equivalent as depicted in column 8 of Table II B, application no. 3, and being depicted in the same respective line as said B2839, and preferably the activity is increased non-targeted.

[25323] Accordingly, in one embodiment, the molecule which activity is to be increased in the process of the invention is the gene product with an activity as a “transcriptional regulator”, preferably it is the molecule of section (a) or (b) of this paragraph.

[25324] In particular, it was observed that in plants, especially in Arabidopsis thaliana, increasing or generating the activity of a gene product non-targeted with the activity of a “transcriptional regulator”, preferably being encoded by a gene comprising the nucleic acid sequence SEQ ID NO. 81935, preferably the coding region thereof, conferred the production of or the increase in tyrosine compared with the wild type control.

[25325] The nucleic acid sequence of B2849 from Escherichia coli, e.g. as shown in the respective line in column 5 of Table I, application no. 3, has been published in B. And the activity of the gene product thereof is the activity of b2849-protein.

[25326] Accordingly, in one embodiment, the process of the present invention for producing phenylalanine in a non-human organism, like a microorganism or a plant or a part thereof, comprises increasing or generating the activity of a gene product with the activity of a gene product conferring the activity of “b2849-protein”, especially from Escherichia coli or its functional equivalent or its homolog, e.g. the increase of
[25327] (a) a gene product of a gene comprising the nucleic acid molecule as shown in the respective line in column 5 of Table I, application no. 3, preferably the coding region thereof, or a homolog or a fragment thereof, and being depicted in the same respective line as said B2849, or a functional equivalent or a homolog thereof as shown in column 8 of Table I, application no. 3, preferably the coding region thereof, particularly a homolog or functional equivalent as shown in column 8 of Table I B, application no. 3, and being depicted in the same respective line as said B2849, and preferably the activity is increased non-targeted, or
[25328] (b) a polypeptide comprising a polypeptide, a consensus sequence or at least a polypeptide motif as shown in the respective line in column 5 of Table II or in column 8 of Table IV, application no. 3, respectively, and being depicted in the same respective line as said B2849, or a functional equivalent or a homolog thereof as depicted in column 8 of Table II, application no. 3, preferably a homolog or functional equivalent as depicted in column 8 of Table II B, application no. 3, and being depicted in the same respective line as said B2849, and preferably the activity is increased non-targeted.

[25329] Accordingly, in one embodiment, the molecule which activity is to be increased in the process of the invention is the gene product with an activity as a “b2849-protein”, preferably it is the molecule of section (a) or (b) of this paragraph.

[25330] In particular, it was observed that in plants, especially in Arabidopsis thaliana, increasing or generating the activity of a gene product non-targeted with the activity of a “b2849-protein”, preferably being encoded by a gene comprising the nucleic acid sequence SEQ ID NO. 81980, preferably the coding region thereof, conferred the production of or the increase in phenylalanine compared with the wild type control.

[25331] The nucleic acid sequence of B2913 from Escherichia coli, e.g. as shown in the respective line in column 5 of Table I, application no. 3, has been published in B. And the activity of the gene product thereof is the activity of D-3-phosphoglycerate dehydrogenase.

[25332] Accordingly, in one embodiment, the process of the present invention for producing glycine in a non-human organism, like a microorganism or a plant or a part thereof, comprises increasing or generating the activity of a gene product with the activity of a gene product conferring the activity of “D-3-phosphoglycerate dehydrogenase”, especially from Escherichia coli or its functional equivalent or its homolog, e.g. the increase of
[25333] (a) a gene product of a gene comprising the nucleic acid molecule as shown in the respective line in column 5 of Table I, application no. 3, preferably the coding region thereof, or a homolog or a fragment thereof, and being depicted in the same respective line as said B2913, or a functional equivalent or a homolog thereof as shown in column 8 of Table I, application no. 3, preferably the coding region thereof, particularly a homolog or functional equivalent as shown in column 8 of Table I B, application no. 3, and being depicted in the same respective line as said B2913, and preferably the activity is increased plastidic, or
[25334] (b) a polypeptide comprising a polypeptide, a consensus sequence or at least a polypeptide motif as shown in the respective line in column 5 of Table II or in column 8 of Table IV, application no. 3, respectively, and being depicted in the same respective line as said B2913, or a functional equivalent or a homolog thereof as depicted in column 8 of Table II, application no. 3, preferably a homolog or functional equivalent as depicted in column 8 of Table II B, application no. 3, and being depicted in the same respective line as said B2913, and preferably the activity is increased plastidic.

[25335] Accordingly, in one embodiment, the molecule which activity is to be increased in the process of the invention is the gene product with an activity as a “D-3-phosphoglycerate dehydrogenase”, preferably it is the molecule of section (a) or (b) of this paragraph.

[25336] In particular, it was observed that in plants, especially in Arabidopsis thaliana, increasing or generating the activity of a gene product plastidic with the activity of a “D-3-phosphoglycerate dehydrogenase”, preferably being encoded by a gene comprising the nucleic acid sequence SEQ ID NO. 81988, preferably the coding region thereof, conferred the production of or the increase in glycine compared with the wild type control.

[25337] The nucleic acid sequence of B2913 from Escherichia coli, e.g. as shown in the respective line in column 5 of Table I, application no. 3, has been published in B. And the activity of the gene product thereof is the activity of D-3-phosphoglycerate dehydrogenase.

[25338] Accordingly, in one embodiment, the process of the present invention for producing serine in a non-human organism, like a microorganism or a plant or a part thereof, comprises increasing or generating the activity of a gene product with the activity of a gene product conferring the activity of “D-3-phosphoglycerate dehydrogenase”, especially from Escherichia coli or its functional equivalent or its homolog, e.g. the increase of
[25339] (a) a gene product of a gene comprising the nucleic acid molecule as shown in the respective line in column 5 of Table I, application no. 3, preferably the coding region thereof, or a homolog or a fragment thereof, and being depicted in the same respective line as said B2913, or a functional equivalent or a homolog thereof as shown in column 8 of Table I, application no. 3, preferably the coding region thereof, particularly a homolog or functional equivalent as shown in column 8 of Table I B, application no. 3, and being depicted in the same respective line as said B2913, and preferably the activity is increased plastidic, or
[25340] (b) a polypeptide comprising a polypeptide, a consensus sequence or at least a polypeptide motif as shown in the respective line in column 5 of Table II or in column 8 of Table IV, application no. 3, respectively, and being depicted in the same respective line as said B2913, or a functional equivalent or a homolog thereof as depicted in column 8 of Table II, application no. 3, preferably a homolog or functional equivalent as depicted in column 8 of Table II B, application no. 3, and being depicted in the same respective line as said B2913, and preferably the activity is increased plastidic.

[25341] Accordingly, in one embodiment, the molecule which activity is to be increased in the process of the invention is the gene product with an activity as a “D-3-phosphoglycerate dehydrogenase”, preferably it is the molecule of section (a) or (b) of this paragraph.

[25342] In particular, it was observed that in plants, especially in Arabidopsis thaliana, increasing or generating the activity of a gene product plastidic with the activity of a “D-3-phosphoglycerate dehydrogenase”, preferably being encoded by a gene comprising the nucleic acid sequence SEQ ID NO. 81988, preferably the coding region thereof, conferred the production of or the increase in serine compared with the wild type control.

[25343] The nucleic acid sequence of B2923 from Escherichia coli, e.g. as shown in the respective line in column 5 of Table I, application no. 3, has been published in B. And the activity of the gene product thereof is the activity of arginine exporter protein.

[25344] Accordingly, in one embodiment, the process of the present invention for producing aspartate in a non-human organism, like a microorganism or a plant or a part thereof, comprises increasing or generating the activity of a gene product with the activity of a gene product conferring the activity of “arginine exporter protein”, especially from Escherichia coli or its functional equivalent or its homolog, e.g. the increase of
[25345] (a) a gene product of a gene comprising the nucleic acid molecule as shown in the respective line in column 5 of Table I, application no. 3, preferably the coding region thereof, or a homolog or a fragment thereof, and being depicted in the same respective line as said B2923, or a functional equivalent or a homolog thereof as shown in column 8 of Table I, application no. 3, preferably the coding region thereof, particularly a homolog or functional equivalent as shown in column 8 of Table I B, application no. 3, and being depicted in the same respective line as said B2923, and preferably the activity is increased non-targeted, or
[25346] (b) a polypeptide comprising a polypeptide, a consensus sequence or at least a polypeptide motif as shown in the respective line in column 5 of Table II or in column 8 of Table IV, application no. 3, respectively, and being depicted in the same respective line as said B2923, or a functional equivalent or a homolog thereof as depicted in column 8 of Table II, application no. 3, preferably a homolog or functional equivalent as depicted in column 8 of Table II B, application no. 3, and being depicted in the same respective line as said B2923, and preferably the activity is increased non-targeted.

[25347] Accordingly, in one embodiment, the molecule which activity is to be increased in the process of the invention is the gene product with an activity as a “arginine exporter protein”, preferably it is the molecule of section (a) or (b) of this paragraph.

[25348] In particular, it was observed that in plants, especially in Arabidopsis thaliana, increasing or generating the activity of a gene product non-targeted with the activity of a “arginine exporter protein”, preferably being encoded by a gene comprising the nucleic acid sequence SEQ ID NO. 9333, preferably the coding region thereof, conferred the production of or the increase in aspartate compared with the wild type control.

[25349] The nucleic acid sequence of B3064 from Escherichia coli, e.g. as shown in the respective line in column 5 of Table I, application no. 3, has been published in B. And the activity of the gene product thereof is the activity of glycoprotease.

[25350] Accordingly, in one embodiment, the process of the present invention for producing asparagine in a non-human organism, like a microorganism or a plant or a part thereof, comprises increasing or generating the activity of a gene product with the activity of a gene product conferring the activity of “glycoprotease”, especially from Escherichia coli or its functional equivalent or its homolog, e.g. the increase of
[25351] (a) a gene product of a gene comprising the nucleic acid molecule as shown in the respective line in column 5 of Table I, application no. 3, preferably the coding region thereof, or a homolog or a fragment thereof, and being depicted in the same respective line as said B3064, or a functional equivalent or a homolog thereof as shown in column 8 of Table I, application no. 3, preferably the coding region thereof, particularly a homolog or functional equivalent as shown in column 8 of Table I B, application no. 3, and being depicted in the same respective line as said B3064, and preferably the activity is increased non-targeted, or
[25352] (b) a polypeptide comprising a polypeptide, a consensus sequence or at least a polypeptide motif as shown in the respective line in column 5 of Table II or in column 8 of Table IV, application no. 3, respectively, and being depicted in the same respective line as said B3064, or a functional equivalent or a homolog thereof as depicted in column 8 of Table II, application no. 3, preferably a homolog or functional equivalent as depicted in column 8 of Table II B, application no. 3, and being depicted in the same respective line as said B3064, and preferably the activity is increased non-targeted.

[25353] Accordingly, in one embodiment, the molecule which activity is to be increased in the process of the invention is the gene product with an activity as a “glycoprotease”, preferably it is the molecule of section (a) or (b) of this paragraph.

[25354] In particular, it was observed that in plants, especially in Arabidopsis thaliana, increasing or generating the activity of a gene product non-targeted with the activity of a “glycoprotease”, preferably being encoded by a gene comprising the nucleic acid sequence SEQ ID NO. 42046, preferably the coding region thereof, conferred the production of or the increase in asparagine compared with the wild type control.

[25355] The nucleic acid sequence of B3083 from Escherichia coli, e.g. as shown in the respective line in column 5 of Table I, application no. 3, has been published in B. And the activity of the gene product thereof is the activity of b3083-protein.

[25356] Accordingly, in one embodiment, the process of the present invention for producing phenylalanine in a non-human organism, like a microorganism or a plant or a part thereof, comprises increasing or generating the activity of a gene product with the activity of a gene product conferring the activity of “b3083-protein”, especially from Escherichia coli or its functional equivalent or its homolog, e.g. the increase of
[25357] (a) a gene product of a gene comprising the nucleic acid molecule as shown in the respective line in column 5 of Table I, application no. 3, preferably the coding region thereof, or a homolog or a fragment thereof, and being depicted in the same respective line as said B3083, or a functional equivalent or a homolog thereof as shown in column 8 of Table I, application no. 3, preferably the coding region thereof, particularly a homolog or functional equivalent as shown in column 8 of Table I B, application no. 3, and being depicted in the same respective line as said B3083, and preferably the activity is increased non-targeted, or
[25358] (b) a polypeptide comprising a polypeptide, a consensus sequence or at least a polypeptide motif as shown in the respective line in column 5 of Table II or in column 8 of Table IV, application no. 3, respectively, and being depicted in the same respective line as said B3083, or a functional equivalent or a homolog thereof as depicted in column 8 of Table II, application no. 3, preferably a homolog or functional equivalent as depicted in column 8 of Table II B, application no. 3, and being depicted in the same respective line as said B3083, and preferably the activity is increased non-targeted.

[25359] Accordingly, in one embodiment, the molecule which activity is to be increased in the process of the invention is the gene product with an activity as a “b3083-protein”, preferably it is the molecule of section (a) or (b) of this paragraph.

[25360] In particular, it was observed that in plants, especially in Arabidopsis thaliana, increasing or generating the activity of a gene product non-targeted with the activity of a “b3083-protein”, preferably being encoded by a gene comprising the nucleic acid sequence SEQ ID NO. 82424, preferably the coding region thereof, conferred the production of or the increase in phenylalanine compared with the wild type control.

[25361] The nucleic acid sequence of B3083 from Escherichia coli, e.g. as shown in the respective line in column 5 of Table I, application no. 3, has been published in B. And the activity of the gene product thereof is the activity of b3083-protein.

[25362] Accordingly, in one embodiment, the process of the present invention for producing serine in a non-human organism, like a microorganism or a plant or a part thereof, comprises increasing or generating the activity of a gene product with the activity of a gene product conferring the activity of “b3083-protein”, especially from Escherichia coli or its functional equivalent or its homolog, e.g. the increase of
[25363] (a) a gene product of a gene comprising the nucleic acid molecule as shown in the respective line in column 5 of Table I, application no. 3, preferably the coding region thereof, or a homolog or a fragment thereof, and being depicted in the same respective line as said B3083, or a functional equivalent or a homolog thereof as shown in column 8 of Table I, application no. 3, preferably the coding region thereof, particularly a homolog or functional equivalent as shown in column 8 of Table I B, application no. 3, and being depicted in the same respective line as said B3083, and preferably the activity is increased non-targeted, or
[25364] (b) a polypeptide comprising a polypeptide, a consensus sequence or at least a polypeptide motif as shown in the respective line in column 5 of Table II or in column 8 of Table IV, application no. 3, respectively, and being depicted in the same respective line as said B3083, or a functional equivalent or a homolog thereof as depicted in column 8 of Table II, application no. 3, preferably a homolog or functional equivalent as depicted in column 8 of Table II B, application no. 3, and being depicted in the same respective line as said B3083, and preferably the activity is increased non-targeted.

[25365] Accordingly, in one embodiment, the molecule which activity is to be increased in the process of the invention is the gene product with an activity as a “b3083-protein”, preferably it is the molecule of section (a) or (b) of this paragraph.

[25366] In particular, it was observed that in plants, especially in Arabidopsis thaliana, increasing or generating the activity of a gene product non-targeted with the activity of a “b3083-protein”, preferably being encoded by a gene comprising the nucleic acid sequence SEQ ID NO. 82424, preferably the coding region thereof, conferred the production of or the increase in serine compared with the wild type control.

[25367] The nucleic acid sequence of B3083 from Escherichia coli, e.g. as shown in the respective line in column 5 of Table I, application no. 3, has been published in B. And the activity of the gene product thereof is the activity of b3083-protein.

[25368] Accordingly, in one embodiment, the process of the present invention for producing tyrosine in a non-human organism, like a microorganism or a plant or a part thereof, comprises increasing or generating the activity of a gene product with the activity of a gene product conferring the activity of “b3083-protein”, especially from Escherichia coli or its functional equivalent or its homolog, e.g. the increase of
[25369] (a) a gene product of a gene comprising the nucleic acid molecule as shown in the respective line in column 5 of Table I, application no. 3, preferably the coding region thereof, or a homolog or a fragment thereof, and being depicted in the same respective line as said B3083, or a functional equivalent or a homolog thereof as shown in column 8 of Table I, application no. 3, preferably the coding region thereof, particularly a homolog or functional equivalent as shown in column 8 of Table I B, application no. 3, and being depicted in the same respective line as said B3083, and preferably the activity is increased non-targeted, or
[25370] (b) a polypeptide comprising a polypeptide, a consensus sequence or at least a polypeptide motif as shown in the respective line in column 5 of Table II or in column 8 of Table IV, application no. 3, respectively, and being depicted in the same respective line as said B3083, or a functional equivalent or a homolog thereof as depicted in column 8 of Table II, application no. 3, preferably a homolog or functional equivalent as depicted in column 8 of Table II B, application no. 3, and being depicted in the same respective line as said B3083, and preferably the activity is increased non-targeted.

[25371] Accordingly, in one embodiment, the molecule which activity is to be increased in the process of the invention is the gene product with an activity as a “b3083-protein”, preferably it is the molecule of section (a) or (b) of this paragraph.

[25372] In particular, it was observed that in plants, especially in Arabidopsis thaliana, increasing or generating the activity of a gene product non-targeted with the activity of a “b3083-protein”, preferably being encoded by a gene comprising the nucleic acid sequence SEQ ID NO. 82424, preferably the coding region thereof, conferred the production of or the increase in tyrosine compared with the wild type control.

[25373] The nucleic acid sequence of B3098 from Escherichia coli, e.g. as shown in the respective line in column 5 of Table I, application no. 3, has been published in B. And the activity of the gene product thereof is the activity of b3098-protein.

[25374] Accordingly, in one embodiment, the process of the present invention for producing alanine in a non-human organism, like a microorganism or a plant or a part thereof, comprises increasing or generating the activity of a gene product with the activity of a gene product conferring the activity of “b3098-protein”, especially from Escherichia coli or its functional equivalent or its homolog, e.g. the increase of
[25375] (a) a gene product of a gene comprising the nucleic acid molecule as shown in the respective line in column 5 of Table I, application no. 3, preferably the coding region thereof, or a homolog or a fragment thereof, and being depicted in the same respective line as said B3098, or a functional equivalent or a homolog thereof as shown in column 8 of Table I, application no. 3, preferably the coding region thereof, particularly a homolog or functional equivalent as shown in column 8 of Table I B, application no. 3, and being depicted in the same respective line as said B3098, and preferably the activity is increased non-targeted, or
[25376] (b) a polypeptide comprising a polypeptide, a consensus sequence or at least a polypeptide motif as shown in the respective line in column 5 of Table II or in column 8 of Table IV, application no. 3, respectively, and being depicted in the same respective line as said B3098, or a functional equivalent or a homolog thereof as depicted in column 8 of Table II, application no. 3, preferably a homolog or functional equivalent as depicted in column 8 of Table II B, application no. 3, and being depicted in the same respective line as said B3098, and preferably the activity is increased non-targeted.

[25377] Accordingly, in one embodiment, the molecule which activity is to be increased in the process of the invention is the gene product with an activity as a “b3098-protein”, preferably it is the molecule of section (a) or (b) of this paragraph.

[25378] In particular, it was observed that in plants, especially in Arabidopsis thaliana, increasing or generating the activity of a gene product non-targeted with the activity of a “b3098-protein”, preferably being encoded by a gene comprising the nucleic acid sequence SEQ ID NO. 82459, preferably the coding region thereof, conferred the production of or the increase in alanine compared with the wild type control.

[25379] The nucleic acid sequence of B3098 from Escherichia coli, e.g. as shown in the respective line in column 5 of Table I, application no. 3, has been published in B. And the activity of the gene product thereof is the activity of b3098-protein.

[25380] Accordingly, in one embodiment, the process of the present invention for producing glycine in a non-human organism, like a microorganism or a plant or a part thereof, comprises increasing or generating the activity of a gene product with the activity of a gene product conferring the activity of “b3098-protein”, especially from Escherichia coli or its functional equivalent or its homolog, e.g. the increase of
[25381] (a) a gene product of a gene comprising the nucleic acid molecule as shown in the respective line in column 5 of Table I, application no. 3, preferably the coding region thereof, or a homolog or a fragment thereof, and being depicted in the same respective line as said B3098, or a functional equivalent or a homolog thereof as shown in column 8 of Table I, application no. 3, preferably the coding region thereof, particularly a homolog or functional equivalent as shown in column 8 of Table I B, application no. 3, and being depicted in the same respective line as said B3098, and preferably the activity is increased non-targeted, or
[25382] (b) a polypeptide comprising a polypeptide, a consensus sequence or at least a polypeptide motif as shown in the respective line in column 5 of Table II or in column 8 of Table IV, application no. 3, respectively, and being depicted in the same respective line as said B3098, or a functional equivalent or a homolog thereof as depicted in column 8 of Table II, application no. 3, preferably a homolog or functional equivalent as depicted in column 8 of Table II B, application no. 3, and being depicted in the same respective line as said B3098, and preferably the activity is increased non-targeted.

[25383] Accordingly, in one embodiment, the molecule which activity is to be increased in the process of the invention is the gene product with an activity as a “b3098-protein”, preferably it is the molecule of section (a) or (b) of this paragraph.

[25384] In particular, it was observed that in plants, especially in Arabidopsis thaliana, increasing or generating the activity of a gene product non-targeted with the activity of a “b3098-protein”, preferably being encoded by a gene comprising the nucleic acid sequence SEQ ID NO. 82459, preferably the coding region thereof, conferred the production of or the increase in glycine compared with the wild type control.

[25385] The nucleic acid sequence of B3121 from Escherichia coli, e.g. as shown in the respective line in column 5 of Table I, application no. 3, has been published in B. And the activity of the gene product thereof is the activity of b3121-protein.

[25386] Accordingly, in one embodiment, the process of the present invention for producing tyrosine in a non-human organism, like a microorganism or a plant or a part thereof, comprises increasing or generating the activity of a gene product with the activity of a gene product conferring the activity of “b3121-protein”, especially from Escherichia coli or its functional equivalent or its homolog, e.g. the increase of
[25387] (a) a gene product of a gene comprising the nucleic acid molecule as shown in the respective line in column 5 of Table I, application no. 3, preferably the coding region thereof, or a homolog or a fragment thereof, and being depicted in the same respective line as said B3121, or a functional equivalent or a homolog thereof as shown in column 8 of Table I, application no. 3, preferably the coding region thereof, particularly a homolog or functional equivalent as shown in column 8 of Table I B, application no. 3, and being depicted in the same respective line as said B3121, and preferably the activity is increased non-targeted, or
[25388] (b) a polypeptide comprising a polypeptide, a consensus sequence or at least a polypeptide motif as shown in the respective line in column 5 of Table II or in column 8 of Table IV, application no. 3, respectively, and being depicted in the same respective line as said B3121, or a functional equivalent or a homolog thereof as depicted in column 8 of Table II, application no. 3, preferably a homolog or functional equivalent as depicted in column 8 of Table II B, application no. 3, and being depicted in the same respective line as said B3121, and preferably the activity is increased non-targeted.

[25389] Accordingly, in one embodiment, the molecule which activity is to be increased in the process of the invention is the gene product with an activity as a “b3121-protein”, preferably it is the molecule of section (a) or (b) of this paragraph.

[25390] In particular, it was observed that in plants, especially in Arabidopsis thaliana, increasing or generating the activity of a gene product non-targeted with the activity of a “b3121-protein”, preferably being encoded by a gene comprising the nucleic acid sequence SEQ ID NO. 42471, preferably the coding region thereof, conferred the production of or the increase in tyrosine compared with the wild type control.

[25391] The nucleic acid sequence of B3221 from Escherichia coli, e.g. as shown in the respective line in column 5 of Table I, application no. 3, has been published in B. And the activity of the gene product thereof is the activity of b3221-protein.

[25392] Accordingly, in one embodiment, the process of the present invention for producing tyrosine in a non-human organism, like a microorganism or a plant or a part thereof, comprises increasing or generating the activity of a gene product with the activity of a gene product conferring the activity of “b3221-protein”, especially from Escherichia coli or its functional equivalent or its homolog, e.g. the increase of
[25393] (a) a gene product of a gene comprising the nucleic acid molecule as shown in the respective line in column 5 of Table I, application no. 3, preferably the coding region thereof, or a homolog or a fragment thereof, and being depicted in the same respective line as said B3221, or a functional equivalent or a homolog thereof as shown in column 8 of Table I, application no. 3, preferably the coding region thereof, particularly a homolog or functional equivalent as shown in column 8 of Table I B, application no. 3, and being depicted in the same respective line as said B3221, and preferably the activity is increased plastidic, or
[25394] (b) a polypeptide comprising a polypeptide, a consensus sequence or at least a polypeptide motif as shown in the respective line in column 5 of Table II or in column 8 of Table IV, application no. 3, respectively, and being depicted in the same respective line as said B3221, or a functional equivalent or a homolog thereof as depicted in column 8 of Table II, application no. 3, preferably a homolog or functional equivalent as depicted in column 8 of Table II B, application no. 3, and being depicted in the same respective line as said B3221, and preferably the activity is increased plastidic.

[25395] Accordingly, in one embodiment, the molecule which activity is to be increased in the process of the invention is the gene product with an activity as a “b3221-protein”, preferably it is the molecule of section (a) or (b) of this paragraph.

[25396] In particular, it was observed that in plants, especially in Arabidopsis thaliana, increasing or generating the activity of a gene product plastidic with the activity of a “b3221-protein”, preferably being encoded by a gene comprising the nucleic acid sequence SEQ ID NO. 82510, preferably the coding region thereof, conferred the production of or the increase in tyrosine compared with the wild type control.

[25397] The nucleic acid sequence of B3246 from Escherichia coli, e.g. as shown in the respective line in column 5 of Table I, application no. 3, has been published in B. And the activity of the gene product thereof is the activity of b3246-protein.

[25398] Accordingly, in one embodiment, the process of the present invention for producing serine in a non-human organism, like a microorganism or a plant or a part thereof, comprises increasing or generating the activity of a gene product with the activity of a gene product conferring the activity of “b3246-protein”, especially from Escherichia coli or its functional equivalent or its homolog, e.g. the increase of
[25399] (a) a gene product of a gene comprising the nucleic acid molecule as shown in the respective line in column 5 of Table I, application no. 3, preferably the coding region thereof, or a homolog or a fragment thereof, and being depicted in the same respective line as said B3246, or a functional equivalent or a homolog thereof as shown in column 8 of Table I, application no. 3, preferably the coding region thereof, particularly a homolog or functional equivalent as shown in column 8 of Table I B, application no. 3, and being depicted in the same respective line as said B3246, and preferably the activity is increased non-targeted, or
[25400] (b) a polypeptide comprising a polypeptide, a consensus sequence or at least a polypeptide motif as shown in the respective line in column 5 of Table II or in column 8 of Table IV, application no. 3, respectively, and being depicted in the same respective line as said B3246, or a functional equivalent or a homolog thereof as depicted in column 8 of Table II, application no. 3, preferably a homolog or functional equivalent as depicted in column 8 of Table II B, application no. 3, and being depicted in the same respective line as said B3246, and preferably the activity is increased non-targeted.

[25401] Accordingly, in one embodiment, the molecule which activity is to be increased in the process of the invention is the gene product with an activity as a “b3246-protein”, preferably it is the molecule of section (a) or (b) of this paragraph.

[25402] In particular, it was observed that in plants, especially in Arabidopsis thaliana, increasing or generating the activity of a gene product non-targeted with the activity of a “b3246-protein”, preferably being encoded by a gene comprising the nucleic acid sequence SEQ ID NO. 9470, preferably the coding region thereof, conferred the production of or the increase in serine compared with the wild type control.

[25403] The nucleic acid sequence of B3246 from Escherichia coli, e.g. as shown in the respective line in column 5 of Table I, application no. 3, has been published in B. And the activity of the gene product thereof is the activity of b3246-protein.

[25404] Accordingly, in one embodiment, the process of the present invention for producing 5-oxoproline in a non-human organism, like a microorganism or a plant or a part thereof, comprises increasing or generating the activity of a gene product with the activity of a gene product conferring the activity of “b3246-protein”, especially from Escherichia coli or its functional equivalent or its homolog, e.g. the increase of
[25405] (a) a gene product of a gene comprising the nucleic acid molecule as shown in the respective line in column 5 of Table I, application no. 3, preferably the coding region thereof, or a homolog or a fragment thereof, and being depicted in the same respective line as said B3246, or a functional equivalent or a homolog thereof as shown in column 8 of Table I, application no. 3, preferably the coding region thereof, particularly a homolog or functional equivalent as shown in column 8 of Table I B, application no. 3, and being depicted in the same respective line as said B3246, and preferably the activity is increased non-targeted, or
[25406] (b) a polypeptide comprising a polypeptide, a consensus sequence or at least a polypeptide motif as shown in the respective line in column 5 of Table II or in column 8 of Table IV, application no. 3, respectively, and being depicted in the same respective line as said B3246, or a functional equivalent or a homolog thereof as depicted in column 8 of Table II, application no. 3, preferably a homolog or functional equivalent as depicted in column 8 of Table II B, application no. 3, and being depicted in the same respective line as said B3246, and preferably the activity is increased non-targeted.

[25407] Accordingly, in one embodiment, the molecule which activity is to be increased in the process of the invention is the gene product with an activity as a “b3246-protein”, preferably it is the molecule of section (a) or (b) of this paragraph.

[25408] In particular, it was observed that in plants, especially in Arabidopsis thaliana, increasing or generating the activity of a gene product non-targeted with the activity of a “b3246-protein”, preferably being encoded by a gene comprising the nucleic acid sequence SEQ ID NO. 9470, preferably the coding region thereof, conferred the production of or the increase in 5-oxoproline compared with the wild type control.

[25409] The nucleic acid sequence of B3256 from Escherichia coli, e.g. as shown in the respective line in column 5 of Table I, application no. 3, has been published in B. And the activity of the gene product thereof is the activity of acetyl CoA carboxylase.

[25410] Accordingly, in one embodiment, the process of the present invention for producing asparagine in a non-human organism, like a microorganism or a plant or a part thereof, comprises increasing or generating the activity of a gene product with the activity of a gene product conferring the activity of “acetyl CoA carboxylase”, especially from Escherichia coli or its functional equivalent or its homolog, e.g. the increase of
[25411] (a) a gene product of a gene comprising the nucleic acid molecule as shown in the respective line in column 5 of Table I, application no. 3, preferably the coding region thereof, or a homolog or a fragment thereof, and being depicted in the same respective line as said B3256, or a functional equivalent or a homolog thereof as shown in column 8 of Table I, application no. 3, preferably the coding region thereof, particularly a homolog or functional equivalent as shown in column 8 of Table I B, application no. 3, and being depicted in the same respective line as said B3256, and preferably the activity is increased non-targeted, or
[25412] (b) a polypeptide comprising a polypeptide, a consensus sequence or at least a polypeptide motif as shown in the respective line in column 5 of Table II or in column 8 of Table IV, application no. 3, respectively, and being depicted in the same respective line as said B3256, or a functional equivalent or a homolog thereof as depicted in column 8 of Table II, application no. 3, preferably a homolog or functional equivalent as depicted in column 8 of Table II B, application no. 3, and being depicted in the same respective line as said B3256, and preferably the activity is increased non-targeted.

[25413] Accordingly, in one embodiment, the molecule which activity is to be increased in the process of the invention is the gene product with an activity as a “acetyl CoA carboxylase”, preferably it is the molecule of section (a) or (b) of this paragraph.

[25414] In particular, it was observed that in plants, especially in Arabidopsis thaliana, increasing or generating the activity of a gene product non-targeted with the activity of a “acetyl CoA carboxylase”, preferably being encoded by a gene comprising the nucleic acid sequence SEQ ID NO. 9492, preferably the coding region thereof, conferred the production of or the increase in asparagine compared with the wild type control.

[25415] The nucleic acid sequence of B3256 from Escherichia coli, e.g. as shown in the respective line in column 5 of Table I, application no. 3, has been published in B. And the activity of the gene product thereof is the activity of acetyl CoA carboxylase.

[25416] Accordingly, in one embodiment, the process of the present invention for producing glycine in a non-human organism, like a microorganism or a plant or a part thereof, comprises increasing or generating the activity of a gene product with the activity of a gene product conferring the activity of “acetyl CoA carboxylase”, especially from Escherichia coli or its functional equivalent or its homolog, e.g. the increase of
[25417] (a) a gene product of a gene comprising the nucleic acid molecule as shown in the respective line in column 5 of Table I, application no. 3, preferably the coding region thereof, or a homolog or a fragment thereof, and being depicted in the same respective line as said B3256, or a functional equivalent or a homolog thereof as shown in column 8 of Table I, application no. 3, preferably the coding region thereof, particularly a homolog or functional equivalent as shown in column 8 of Table I B, application no. 3, and being depicted in the same respective line as said B3256, and preferably the activity is increased non-targeted, or
[25418] (b) a polypeptide comprising a polypeptide, a consensus sequence or at least a polypeptide motif as shown in the respective line in column 5 of Table II or in column 8 of Table IV, application no. 3, respectively, and being depicted in the same respective line as said B3256, or a functional equivalent or a homolog thereof as depicted in column 8 of Table II, application no. 3, preferably a homolog or functional equivalent as depicted in column 8 of Table II B, application no. 3, and being depicted in the same respective line as said B3256, and preferably the activity is increased non-targeted.

[25419] Accordingly, in one embodiment, the molecule which activity is to be increased in the process of the invention is the gene product with an activity as a “acetyl CoA carboxylase”, preferably it is the molecule of section (a) or (b) of this paragraph.

[25420] In particular, it was observed that in plants, especially in Arabidopsis thaliana, increasing or generating the activity of a gene product non-targeted with the activity of a “acetyl CoA carboxylase”, preferably being encoded by a gene comprising the nucleic acid sequence SEQ ID NO. 9492, preferably the coding region thereof, conferred the production of or the increase in glycine compared with the wild type control.

[25421] The nucleic acid sequence of B3256 from Escherichia coli, e.g. as shown in the respective line in column 5 of Table I, application no. 3, has been published in B. And the activity of the gene product thereof is the activity of acetyl CoA carboxylase.

[25422] Accordingly, in one embodiment, the process of the present invention for producing serine in a non-human organism, like a microorganism or a plant or a part thereof, comprises increasing or generating the activity of a gene product with the activity of a gene product conferring the activity of “acetyl CoA carboxylase”, especially from Escherichia coli or its functional equivalent or its homolog, e.g. the increase of
[25423] (a) a gene product of a gene comprising the nucleic acid molecule as shown in the respective line in column 5 of Table I, application no. 3, preferably the coding region thereof, or a homolog or a fragment thereof, and being depicted in the same respective line as said B3256, or a functional equivalent or a homolog thereof as shown in column 8 of Table I, application no. 3, preferably the coding region thereof, particularly a homolog or functional equivalent as shown in column 8 of Table I B, application no. 3, and being depicted in the same respective line as said B3256, and preferably the activity is increased non-targeted, or
[25424] (b) a polypeptide comprising a polypeptide, a consensus sequence or at least a polypeptide motif as shown in the respective line in column 5 of Table II or in column 8 of Table IV, application no. 3, respectively, and being depicted in the same respective line as said B3256, or a functional equivalent or a homolog thereof as depicted in column 8 of Table II, application no. 3, preferably a homolog or functional equivalent as depicted in column 8 of Table II B, application no. 3, and being depicted in the same respective line as said B3256, and preferably the activity is increased non-targeted.

[25425] Accordingly, in one embodiment, the molecule which activity is to be increased in the process of the invention is the gene product with an activity as a “acetyl CoA carboxylase”, preferably it is the molecule of section (a) or (b) of this paragraph.

[25426] In particular, it was observed that in plants, especially in Arabidopsis thaliana, increasing or generating the activity of a gene product non-targeted with the activity of a “acetyl CoA carboxylase”, preferably being encoded by a gene comprising the nucleic acid sequence SEQ ID NO. 9492, preferably the coding region thereof, conferred the production of or the increase in serine compared with the wild type control.

[25427] The nucleic acid sequence of B3256 from Escherichia coli, e.g. as shown in the respective line in column 5 of Table I, application no. 3, has been published in B. And the activity of the gene product thereof is the activity of acetyl CoA carboxylase.

[25428] Accordingly, in one embodiment, the process of the present invention for producing 5-oxoproline in a non-human organism, like a microorganism or a plant or a part thereof, comprises increasing or generating the activity of a gene product with the activity of a gene product conferring the activity of “acetyl CoA carboxylase”, especially from Escherichia coli or its functional equivalent or its homolog, e.g. the increase of
[25429] (a) a gene product of a gene comprising the nucleic acid molecule as shown in the respective line in column 5 of Table I, application no. 3, preferably the coding region thereof, or a homolog or a fragment thereof, and being depicted in the same respective line as said B3256, or a functional equivalent or a homolog thereof as shown in column 8 of Table I, application no. 3, preferably the coding region thereof, particularly a homolog or functional equivalent as shown in column 8 of Table I B, application no. 3, and being depicted in the same respective line as said B3256, and preferably the activity is increased non-targeted, or
[25430] (b) a polypeptide comprising a polypeptide, a consensus sequence or at least a polypeptide motif as shown in the respective line in column 5 of Table II or in column 8 of Table IV, application no. 3, respectively, and being depicted in the same respective line as said B3256, or a functional equivalent or a homolog thereof as depicted in column 8 of Table II, application no. 3, preferably a homolog or functional equivalent as depicted in column 8 of Table II B, application no. 3, and being depicted in the same respective line as said B3256, and preferably the activity is increased non-targeted.

[25431] Accordingly, in one embodiment, the molecule which activity is to be increased in the process of the invention is the gene product with an activity as a “acetyl CoA carboxylase”, preferably it is the molecule of section (a) or (b) of this paragraph.

[25432] In particular, it was observed that in plants, especially in Arabidopsis thaliana, increasing or generating the activity of a gene product non-targeted with the activity of a “acetyl CoA carboxylase”, preferably being encoded by a gene comprising the nucleic acid sequence SEQ ID NO. 9492, preferably the coding region thereof, conferred the production of or the increase in 5-oxoproline compared with the wild type control.

[25433] The nucleic acid sequence of B3262 from Escherichia coli, e.g. as shown in the respective line in column 5 of Table I, application no. 3, has been published in B. And the activity of the gene product thereof is the activity of methyltransferase.

[25434] Accordingly, in one embodiment, the process of the present invention for producing alanine in a non-human organism, like a microorganism or a plant or a part thereof, comprises increasing or generating the activity of a gene product with the activity of a gene product conferring the activity of “methyltransferase”, especially from Escherichia coli or its functional equivalent or its homolog, e.g. the increase of
[25435] (a) a gene product of a gene comprising the nucleic acid molecule as shown in the respective line in column 5 of Table I, application no. 3, preferably the coding region thereof, or a homolog or a fragment thereof, and being depicted in the same respective line as said B3262, or a functional equivalent or a homolog thereof as shown in column 8 of Table I, application no. 3, preferably the coding region thereof, particularly a homolog or functional equivalent as shown in column 8 of Table I B, application no. 3, and being depicted in the same respective line as said B3262, and preferably the activity is increased non-targeted, or
[25436] (b) a polypeptide comprising a polypeptide, a consensus sequence or at least a polypeptide motif as shown in the respective line in column 5 of Table II or in column 8 of Table IV, application no. 3, respectively, and being depicted in the same respective line as said B3262, or a functional equivalent or a homolog thereof as depicted in column 8 of Table II, application no. 3, preferably a homolog or functional equivalent as depicted in column 8 of Table II B, application no. 3, and being depicted in the same respective line as said B3262, and preferably the activity is increased non-targeted.

[25437] Accordingly, in one embodiment, the molecule which activity is to be increased in the process of the invention is the gene product with an activity as a “methyltransferase”, preferably it is the molecule of section (a) or (b) of this paragraph.

[25438] In particular, it was observed that in plants, especially in Arabidopsis thaliana, increasing or generating the activity of a gene product non-targeted with the activity of a “methyltransferase”, preferably being encoded by a gene comprising the nucleic acid sequence SEQ ID NO. 42502, preferably the coding region thereof, conferred the production of or the increase in alanine compared with the wild type control.

[25439] The nucleic acid sequence of B3262 from Escherichia coli, e.g. as shown in the respective line in column 5 of Table I, application no. 3, has been published in B. And the activity of the gene product thereof is the activity of methyltransferase.

[25440] Accordingly, in one embodiment, the process of the present invention for producing phenylalanine in a non-human organism, like a microorganism or a plant or a part thereof, comprises increasing or generating the activity of a gene product with the activity of a gene product conferring the activity of “methyltransferase”, especially from Escherichia coli or its functional equivalent or its homolog, e.g. the increase of
[25441] (a) a gene product of a gene comprising the nucleic acid molecule as shown in the respective line in column 5 of Table I, application no. 3, preferably the coding region thereof, or a homolog or a fragment thereof, and being depicted in the same respective line as said B3262, or a functional equivalent or a homolog thereof as shown in column 8 of Table I, application no. 3, preferably the coding region thereof, particularly a homolog or functional equivalent as shown in column 8 of Table I B, application no. 3, and being depicted in the same respective line as said B3262, and preferably the activity is increased non-targeted, or
[25442] (b) a polypeptide comprising a polypeptide, a consensus sequence or at least a polypeptide motif as shown in the respective line in column 5 of Table II or in column 8 of Table IV, application no. 3, respectively, and being depicted in the same respective line as said B3262, or a functional equivalent or a homolog thereof as depicted in column 8 of Table II, application no. 3, preferably a homolog or functional equivalent as depicted in column 8 of Table II B, application no. 3, and being depicted in the same respective line as said B3262, and preferably the activity is increased non-targeted.

[25443] Accordingly, in one embodiment, the molecule which activity is to be increased in the process of the invention is the gene product with an activity as a “methyltransferase”, preferably it is the molecule of section (a) or (b) of this paragraph.

[25444] In particular, it was observed that in plants, especially in Arabidopsis thaliana, increasing or generating the activity of a gene product non-targeted with the activity of a “methyltransferase”, preferably being encoded by a gene comprising the nucleic acid sequence SEQ ID NO. 42502, preferably the coding region thereof, conferred the production of or the increase in phenylalanine compared with the wild type control.

[25445] The nucleic acid sequence of B3262 from Escherichia coli, e.g. as shown in the respective line in column 5 of Table I, application no. 3, has been published in B. And the activity of the gene product thereof is the activity of methyltransferase.

[25446] Accordingly, in one embodiment, the process of the present invention for producing serine in a non-human organism, like a microorganism or a plant or a part thereof, comprises increasing or generating the activity of a gene product with the activity of a gene product conferring the activity of “methyltransferase”, especially from Escherichia coli or its functional equivalent or its homolog, e.g. the increase of
[25447] (a) a gene product of a gene comprising the nucleic acid molecule as shown in the respective line in column 5 of Table I, application no. 3, preferably the coding region thereof, or a homolog or a fragment thereof, and being depicted in the same respective line as said B3262, or a functional equivalent or a homolog thereof as shown in column 8 of Table I, application no. 3, preferably the coding region thereof, particularly a homolog or functional equivalent as shown in column 8 of Table I B, application no. 3, and being depicted in the same respective line as said B3262, and preferably the activity is increased non-targeted, or
[25448] (b) a polypeptide comprising a polypeptide, a consensus sequence or at least a polypeptide motif as shown in the respective line in column 5 of Table II or in column 8 of Table IV, application no. 3, respectively, and being depicted in the same respective line as said B3262, or a functional equivalent or a homolog thereof as depicted in column 8 of Table II, application no. 3, preferably a homolog or functional equivalent as depicted in column 8 of Table II B, application no. 3, and being depicted in the same respective line as said B3262, and preferably the activity is increased non-targeted.

[25449] Accordingly, in one embodiment, the molecule which activity is to be increased in the process of the invention is the gene product with an activity as a “methyltransferase”, preferably it is the molecule of section (a) or (b) of this paragraph.

[25450] In particular, it was observed that in plants, especially in Arabidopsis thaliana, increasing or generating the activity of a gene product non-targeted with the activity of a “methyltransferase”, preferably being encoded by a gene comprising the nucleic acid sequence SEQ ID NO. 42502, preferably the coding region thereof, conferred the production of or the increase in serine compared with the wild type control.

[25451] The nucleic acid sequence of B3262 from Escherichia coli, e.g. as shown in the respective line in column 5 of Table I, application no. 3, has been published in B. And the activity of the gene product thereof is the activity of methyltransferase.

[25452] Accordingly, in one embodiment, the process of the present invention for producing tyrosine in a non-human organism, like a microorganism or a plant or a part thereof, comprises increasing or generating the activity of a gene product with the activity of a gene product conferring the activity of “methyltransferase”, especially from Escherichia coli or its functional equivalent or its homolog, e.g. the increase of
[25453] (a) a gene product of a gene comprising the nucleic acid molecule as shown in the respective line in column 5 of Table I, application no. 3, preferably the coding region thereof, or a homolog or a fragment thereof, and being depicted in the same respective line as said B3262, or a functional equivalent or a homolog thereof as shown in column 8 of Table I, application no. 3, preferably the coding region thereof, particularly a homolog or functional equivalent as shown in column 8 of Table I B, application no. 3, and being depicted in the same respective line as said B3262, and preferably the activity is increased non-targeted, or
[25454] (b) a polypeptide comprising a polypeptide, a consensus sequence or at least a polypeptide motif as shown in the respective line in column 5 of Table II or in column 8 of Table IV, application no. 3, respectively, and being depicted in the same respective line as said B3262, or a functional equivalent or a homolog thereof as depicted in column 8 of Table II, application no. 3, preferably a homolog or functional equivalent as depicted in column 8 of Table II B, application no. 3, and being depicted in the same respective line as said B3262, and preferably the activity is increased non-targeted.

[25455] Accordingly, in one embodiment, the molecule which activity is to be increased in the process of the invention is the gene product with an activity as a “methyltransferase”, preferably it is the molecule of section (a) or (b) of this paragraph.

[25456] In particular, it was observed that in plants, especially in Arabidopsis thaliana, increasing or generating the activity of a gene product non-targeted with the activity of a “methyltransferase”, preferably being encoded by a gene comprising the nucleic acid sequence SEQ ID NO. 42502, preferably the coding region thereof, conferred the production of or the increase in tyrosine compared with the wild type control.

[25457] The nucleic acid sequence of B3262 from Escherichia coli, e.g. as shown in the respective line in column 5 of Table I, application no. 3, has been published in B. And the activity of the gene product thereof is the activity of methyltransferase.

[25458] Accordingly, in one embodiment, the process of the present invention for producing 5-oxoproline in a non-human organism, like a microorganism or a plant or a part thereof, comprises increasing or generating the activity of a gene product with the activity of a gene product conferring the activity of “methyltransferase”, especially from Escherichia coli or its functional equivalent or its homolog, e.g. the increase of
[25459] (a) a gene product of a gene comprising the nucleic acid molecule as shown in the respective line in column 5 of Table I, application no. 3, preferably the coding region thereof, or a homolog or a fragment thereof, and being depicted in the same respective line as said B3262, or a functional equivalent or a homolog thereof as shown in column 8 of Table I, application no. 3, preferably the coding region thereof, particularly a homolog or functional equivalent as shown in column 8 of Table I B, application no. 3, and being depicted in the same respective line as said B3262, and preferably the activity is increased non-targeted, or
[25460] (b) a polypeptide comprising a polypeptide, a consensus sequence or at least a polypeptide motif as shown in the respective line in column 5 of Table II or in column 8 of Table IV, application no. 3, respectively, and being depicted in the same respective line as said B3262, or a functional equivalent or a homolog thereof as depicted in column 8 of Table II, application no. 3, preferably a homolog or functional equivalent as depicted in column 8 of Table II B, application no. 3, and being depicted in the same respective line as said B3262, and preferably the activity is increased non-targeted.

[25461] Accordingly, in one embodiment, the molecule which activity is to be increased in the process of the invention is the gene product with an activity as a “methyltransferase”, preferably it is the molecule of section (a) or (b) of this paragraph.

[25462] In particular, it was observed that in plants, especially in Arabidopsis thaliana, increasing or generating the activity of a gene product non-targeted with the activity of a “methyltransferase”, preferably being encoded by a gene comprising the nucleic acid sequence SEQ ID NO. 42502, preferably the coding region thereof, conferred the production of or the increase in 5-oxoproline compared with the wild type control.

[25463] The nucleic acid sequence of B3346 from Escherichia coli, e.g. as shown in the respective line in column 5 of Table I, application no. 3, has been published in B. And the activity of the gene product thereof is the activity of b3346-protein.

[25464] Accordingly, in one embodiment, the process of the present invention for producing alanine in a non-human organism, like a microorganism or a plant or a part thereof, comprises increasing or generating the activity of a gene product with the activity of a gene product conferring the activity of “b3346-protein”, especially from Escherichia coli or its functional equivalent or its homolog, e.g. the increase of
[25465] (a) a gene product of a gene comprising the nucleic acid molecule as shown in the respective line in column 5 of Table I, application no. 3, preferably the coding region thereof, or a homolog or a fragment thereof, and being depicted in the same respective line as said B3346, or a functional equivalent or a homolog thereof as shown in column 8 of Table I, application no. 3, preferably the coding region thereof, particularly a homolog or functional equivalent as shown in column 8 of Table I B, application no. 3, and being depicted in the same respective line as said B3346, and preferably the activity is increased non-targeted, or
[25466] (b) a polypeptide comprising a polypeptide, a consensus sequence or at least a polypeptide motif as shown in the respective line in column 5 of Table II or in column 8 of Table IV, application no. 3, respectively, and being depicted in the same respective line as said B3346, or a functional equivalent or a homolog thereof as depicted in column 8 of Table II, application no. 3, preferably a homolog or functional equivalent as depicted in column 8 of Table II B, application no. 3, and being depicted in the same respective line as said B3346, and preferably the activity is increased non-targeted.

[25467] Accordingly, in one embodiment, the molecule which activity is to be increased in the process of the invention is the gene product with an activity as a “b3346-protein”, preferably it is the molecule of section (a) or (b) of this paragraph.

[25468] In particular, it was observed that in plants, especially in Arabidopsis thaliana, increasing or generating the activity of a gene product non-targeted with the activity of a “b3346-protein”, preferably being encoded by a gene comprising the nucleic acid sequence SEQ ID NO. 10104, preferably the coding region thereof, conferred the production of or the increase in alanine compared with the wild type control.

[25469] The nucleic acid sequence of B3352 from Escherichia coli, e.g. as shown in the respective line in column 5 of Table I, application no. 3, has been published in B. And the activity of the gene product thereof is the activity of ABC transporter ATP-binding protein.

[25470] Accordingly, in one embodiment, the process of the present invention for producing alanine in a non-human organism, like a microorganism or a plant or a part thereof, comprises increasing or generating the activity of a gene product with the activity of a gene product conferring the activity of “ABC transporter ATP-binding protein”, especially from Escherichia coli or its functional equivalent or its homolog, e.g. the increase of
[25471] (a) a gene product of a gene comprising the nucleic acid molecule as shown in the respective line in column 5 of Table I, application no. 3, preferably the coding region thereof, or a homolog or a fragment thereof, and being depicted in the same respective line as said B3352, or a functional equivalent or a homolog thereof as shown in column 8 of Table I, application no. 3, preferably the coding region thereof, particularly a homolog or functional equivalent as shown in column 8 of Table I B, application no. 3, and being depicted in the same respective line as said B3352, and preferably the activity is increased non-targeted, or
[25472] (b) a polypeptide comprising a polypeptide, a consensus sequence or at least a polypeptide motif as shown in the respective line in column 5 of Table II or in column 8 of Table IV, application no. 3, respectively, and being depicted in the same respective line as said B3352, or a functional equivalent or a homolog thereof as depicted in column 8 of Table II, application no. 3, preferably a homolog or functional equivalent as depicted in column 8 of Table II B, application no. 3, and being depicted in the same respective line as said B3352, and preferably the activity is increased non-targeted.

[25473] Accordingly, in one embodiment, the molecule which activity is to be increased in the process of the invention is the gene product with an activity as a “ABC transporter ATP-binding protein”, preferably it is the molecule of section (a) or (b) of this paragraph.

[25474] In particular, it was observed that in plants, especially in Arabidopsis thaliana, increasing or generating the activity of a gene product non-targeted with the activity of a “ABC transporter ATP-binding protein”, preferably being encoded by a gene comprising the nucleic acid sequence SEQ ID NO. 82572, preferably the coding region thereof, conferred the production of or the increase in alanine compared with the wild type control.

[25475] The nucleic acid sequence of B3352 from Escherichia coli, e.g. as shown in the respective line in column 5 of Table I, application no. 3, has been published in B. And the activity of the gene product thereof is the activity of ABC transporter ATP-binding protein.

[25476] Accordingly, in one embodiment, the process of the present invention for producing glycine in a non-human organism, like a microorganism or a plant or a part thereof, comprises increasing or generating the activity of a gene product with the activity of a gene product conferring the activity of “ABC transporter ATP-binding protein”, especially from Escherichia coli or its functional equivalent or its homolog, e.g. the increase of
[25477] (a) a gene product of a gene comprising the nucleic acid molecule as shown in the respective line in column 5 of Table I, application no. 3, preferably the coding region thereof, or a homolog or a fragment thereof, and being depicted in the same respective line as said B3352, or a functional equivalent or a homolog thereof as shown in column 8 of Table I, application no. 3, preferably the coding region thereof, particularly a homolog or functional equivalent as shown in column 8 of Table I B, application no. 3, and being depicted in the same respective line as said B3352, and preferably the activity is increased non-targeted, or
[25478] (b) a polypeptide comprising a polypeptide, a consensus sequence or at least a polypeptide motif as shown in the respective line in column 5 of Table II or in column 8 of Table IV, application no. 3, respectively, and being depicted in the same respective line as said B3352, or a functional equivalent or a homolog thereof as depicted in column 8 of Table II, application no. 3, preferably a homolog or functional equivalent as depicted in column 8 of Table II B, application no. 3, and being depicted in the same respective line as said B3352, and preferably the activity is increased non-targeted.

[25479] Accordingly, in one embodiment, the molecule which activity is to be increased in the process of the invention is the gene product with an activity as a “ABC transporter ATP-binding protein”, preferably it is the molecule of section (a) or (b) of this paragraph.

[25480] In particular, it was observed that in plants, especially in Arabidopsis thaliana, increasing or generating the activity of a gene product non-targeted with the activity of a “ABC transporter ATP-binding protein”, preferably being encoded by a gene comprising the nucleic acid sequence SEQ ID NO. 82572, preferably the coding region thereof, conferred the production of or the increase in glycine compared with the wild type control.

[25481] The nucleic acid sequence of B3392 from Escherichia coli, e.g. as shown in the respective line in column 5 of Table I, application no. 3, has been published in B. And the activity of the gene product thereof is the activity of b3392-protein.

[25482] Accordingly, in one embodiment, the process of the present invention for producing aspartate in a non-human organism, like a microorganism or a plant or a part thereof, comprises increasing or generating the activity of a gene product with the activity of a gene product conferring the activity of “b3392-protein”, especially from Escherichia coli or its functional equivalent or its homolog, e.g. the increase of
[25483] (a) a gene product of a gene comprising the nucleic acid molecule as shown in the respective line in column 5 of Table I, application no. 3, preferably the coding region thereof, or a homolog or a fragment thereof, and being depicted in the same respective line as said B3392, or a functional equivalent or a homolog thereof as shown in column 8 of Table I, application no. 3, preferably the coding region thereof, particularly a homolog or functional equivalent as shown in column 8 of Table I B, application no. 3, and being depicted in the same respective line as said B3392, and preferably the activity is increased plastidic, or
[25484] (b) a polypeptide comprising a polypeptide, a consensus sequence or at least a polypeptide motif as shown in the respective line in column 5 of Table II or in column 8 of Table IV, application no. 3, respectively, and being depicted in the same respective line as said B3392, or a functional equivalent or a homolog thereof as depicted in column 8 of Table II, application no. 3, preferably a homolog or functional equivalent as depicted in column 8 of Table II B, application no. 3, and being depicted in the same respective line as said B3392, and preferably the activity is increased plastidic.

[25485] Accordingly, in one embodiment, the molecule which activity is to be increased in the process of the invention is the gene product with an activity as a “b3392-protein”, preferably it is the molecule of section (a) or (b) of this paragraph.

[25486] In particular, it was observed that in plants, especially in Arabidopsis thaliana, increasing or generating the activity of a gene product plastidic with the activity of a “b3392-protein”, preferably being encoded by a gene comprising the nucleic acid sequence SEQ ID NO. 82846, preferably the coding region thereof, conferred the production of or the increase in aspartate compared with the wild type control.

[25487] The nucleic acid sequence of B3403 from Escherichia coli, e.g. as shown in the respective line in column 5 of Table I, application no. 3, has been published in B. And the activity of the gene product thereof is the activity of phosphoenolpyruvate carboxykinase.

[25488] Accordingly, in one embodiment, the process of the present invention for producing phenylalanine in a non-human organism, like a microorganism or a plant or a part thereof, comprises increasing or generating the activity of a gene product with the activity of a gene product conferring the activity of “phosphoenolpyruvate carboxykinase”, especially from Escherichia coli or its functional equivalent or its homolog, e.g. the increase of
[25489] (a) a gene product of a gene comprising the nucleic acid molecule as shown in the respective line in column 5 of Table I, application no. 3, preferably the coding region thereof, or a homolog or a fragment thereof, and being depicted in the same respective line as said B3403, or a functional equivalent or a homolog thereof as shown in column 8 of Table I, application no. 3, preferably the coding region thereof, particularly a homolog or functional equivalent as shown in column 8 of Table I B, application no. 3, and being depicted in the same respective line as said B3403, and preferably the activity is increased non-targeted, or
[25490] (b) a polypeptide comprising a polypeptide, a consensus sequence or at least a polypeptide motif as shown in the respective line in column 5 of Table II or in column 8 of Table IV, application no. 3, respectively, and being depicted in the same respective line as said B3403, or a functional equivalent or a homolog thereof as depicted in column 8 of Table II, application no. 3, preferably a homolog or functional equivalent as depicted in column 8 of Table II B, application no. 3, and being depicted in the same respective line as said B3403, and preferably the activity is increased non-targeted.

[25491] Accordingly, in one embodiment, the molecule which activity is to be increased in the process of the invention is the gene product with an activity as a “phosphoenolpyruvate carboxykinase”, preferably it is the molecule of section (a) or (b) of this paragraph.

[25492] In particular, it was observed that in plants, especially in Arabidopsis thaliana, increasing or generating the activity of a gene product non-targeted with the activity of a “phosphoenolpyruvate carboxykinase”, preferably being encoded by a gene comprising the nucleic acid sequence SEQ ID NO. 82866, preferably the coding region thereof, conferred the production of or the increase in phenylalanine compared with the wild type control.

[25493] The nucleic acid sequence of B3403 from Escherichia coli, e.g. as shown in the respective line in column 5 of Table I, application no. 3, has been published in B. And the activity of the gene product thereof is the activity of phosphoenolpyruvate carboxykinase.

[25494] Accordingly, in one embodiment, the process of the present invention for producing serine in a non-human organism, like a microorganism or a plant or a part thereof, comprises increasing or generating the activity of a gene product with the activity of a gene product conferring the activity of “phosphoenolpyruvate carboxykinase”, especially from Escherichia coli or its functional equivalent or its homolog, e.g. the increase of
[25495] (a) a gene product of a gene comprising the nucleic acid molecule as shown in the respective line in column 5 of Table I, application no. 3, preferably the coding region thereof, or a homolog or a fragment thereof, and being depicted in the same respective line as said B3403, or a functional equivalent or a homolog thereof as shown in column 8 of Table I, application no. 3, preferably the coding region thereof, particularly a homolog or functional equivalent as shown in column 8 of Table I B, application no. 3, and being depicted in the same respective line as said B3403, and preferably the activity is increased non-targeted, or
[25496] (b) a polypeptide comprising a polypeptide, a consensus sequence or at least a polypeptide motif as shown in the respective line in column 5 of Table II or in column 8 of Table IV, application no. 3, respectively, and being depicted in the same respective line as said B3403, or a functional equivalent or a homolog thereof as depicted in column 8 of Table II, application no. 3, preferably a homolog or functional equivalent as depicted in column 8 of Table II B, application no. 3, and being depicted in the same respective line as said B3403, and preferably the activity is increased non-targeted.

[25497] Accordingly, in one embodiment, the molecule which activity is to be increased in the process of the invention is the gene product with an activity as a “phosphoenolpyruvate carboxykinase”, preferably it is the molecule of section (a) or (b) of this paragraph.

[25498] In particular, it was observed that in plants, especially in Arabidopsis thaliana, increasing or generating the activity of a gene product non-targeted with the activity of a “phosphoenolpyruvate carboxykinase”, preferably being encoded by a gene comprising the nucleic acid sequence SEQ ID NO. 82866, preferably the coding region thereof, conferred the production of or the increase in serine compared with the wild type control.

[25499] The nucleic acid sequence of B3410 from Escherichia coli, e.g. as shown in the respective line in column 5 of Table I, application no. 3, has been published in B. And the activity of the gene product thereof is the activity of b3410-protein.

[25500] Accordingly, in one embodiment, the process of the present invention for producing alanine in a non-human organism, like a microorganism or a plant or a part thereof, comprises increasing or generating the activity of a gene product with the activity of a gene product conferring the activity of “b3410-protein”, especially from Escherichia coli or its functional equivalent or its homolog, e.g. the increase of
[25501] (a) a gene product of a gene comprising the nucleic acid molecule as shown in the respective line in column 5 of Table I, application no. 3, preferably the coding region thereof, or a homolog or a fragment thereof, and being depicted in the same respective line as said B3410, or a functional equivalent or a homolog thereof as shown in column 8 of Table I, application no. 3, preferably the coding region thereof, particularly a homolog or functional equivalent as shown in column 8 of Table I B, application no. 3, and being depicted in the same respective line as said B3410, and preferably the activity is increased non-targeted, or
[25502] (b) a polypeptide comprising a polypeptide, a consensus sequence or at least a polypeptide motif as shown in the respective line in column 5 of Table II or in column 8 of Table IV, application no. 3, respectively, and being depicted in the same respective line as said B3410, or a functional equivalent or a homolog thereof as depicted in column 8 of Table II, application no. 3, preferably a homolog or functional equivalent as depicted in column 8 of Table II B, application no. 3, and being depicted in the same respective line as said B3410, and preferably the activity is increased non-targeted.

[25503] Accordingly, in one embodiment, the molecule which activity is to be increased in the process of the invention is the gene product with an activity as a “b3410-protein”, preferably it is the molecule of section (a) or (b) of this paragraph.

[25504] In particular, it was observed that in plants, especially in Arabidopsis thaliana, increasing or generating the activity of a gene product non-targeted with the activity of a “b3410-protein”, preferably being encoded by a gene comprising the nucleic acid sequence SEQ ID NO. 42559, preferably the coding region thereof, conferred the production of or the increase in alanine compared with the wild type control.

[25505] The nucleic acid sequence of B3509 from Escherichia coli, e.g. as shown in the respective line in column 5 of Table I, application no. 3, has been published in B. And the activity of the gene product thereof is the activity of b3509-protein.

[25506] Accordingly, in one embodiment, the process of the present invention for producing serine in a non-human organism, like a microorganism or a plant or a part thereof, comprises increasing or generating the activity of a gene product with the activity of a gene product conferring the activity of “b3509-protein”, especially from Escherichia coli or its functional equivalent or its homolog, e.g. the increase of
[25507] (a) a gene product of a gene comprising the nucleic acid molecule as shown in the respective line in column 5 of Table I, application no. 3, preferably the coding region thereof, or a homolog or a fragment thereof, and being depicted in the same respective line as said B3509, or a functional equivalent or a homolog thereof as shown in column 8 of Table I, application no. 3, preferably the coding region thereof, particularly a homolog or functional equivalent as shown in column 8 of Table I B, application no. 3, and being depicted in the same respective line as said B3509, and preferably the activity is increased non-targeted, or
[25508] (b) a polypeptide comprising a polypeptide, a consensus sequence or at least a polypeptide motif as shown in the respective line in column 5 of Table II or in column 8 of Table IV, application no. 3, respectively, and being depicted in the same respective line as said B3509, or a functional equivalent or a homolog thereof as depicted in column 8 of Table II, application no. 3, preferably a homolog or functional equivalent as depicted in column 8 of Table II B, application no. 3, and being depicted in the same respective line as said B3509, and preferably the activity is increased non-targeted.

[25509] Accordingly, in one embodiment, the molecule which activity is to be increased in the process of the invention is the gene product with an activity as a “b3509-protein”, preferably it is the molecule of section (a) or (b) of this paragraph.

[25510] In particular, it was observed that in plants, especially in Arabidopsis thaliana, increasing or generating the activity of a gene product non-targeted with the activity of a “b3509-protein”, preferably being encoded by a gene comprising the nucleic acid sequence SEQ ID NO. 42592, preferably the coding region thereof, conferred the production of or the increase in serine compared with the wild type control.

[25511] The nucleic acid sequence of B3533 from Escherichia coli, e.g. as shown in the respective line in column 5 of Table I, application no. 3, has been published in B. And the activity of the gene product thereof is the activity of cellulose synthase catalytic subunit.

[25512] Accordingly, in one embodiment, the process of the present invention for producing aspartate in a non-human organism, like a microorganism or a plant or a part thereof, comprises increasing or generating the activity of a gene product with the activity of a gene product conferring the activity of “cellulose synthase catalytic subunit”, especially from Escherichia coli or its functional equivalent or its homolog, e.g. the increase of
[25513] (a) a gene product of a gene comprising the nucleic acid molecule as shown in the respective line in column 5 of Table I, application no. 3, preferably the coding region thereof, or a homolog or a fragment thereof, and being depicted in the same respective line as said B3533, or a functional equivalent or a homolog thereof as shown in column 8 of Table I, application no. 3, preferably the coding region thereof, particularly a homolog or functional equivalent as shown in column 8 of Table I B, application no. 3, and being depicted in the same respective line as said B3533, and preferably the activity is increased non-targeted, or
[25514] (b) a polypeptide comprising a polypeptide, a consensus sequence or at least a polypeptide motif as shown in the respective line in column 5 of Table II or in column 8 of Table IV, application no. 3, respectively, and being depicted in the same respective line as said B3533, or a functional equivalent or a homolog thereof as depicted in column 8 of Table II, application no. 3, preferably a homolog or functional equivalent as depicted in column 8 of Table II B, application no. 3, and being depicted in the same respective line as said B3533, and preferably the activity is increased non-targeted.

[25515] Accordingly, in one embodiment, the molecule which activity is to be increased in the process of the invention is the gene product with an activity as a “cellulose synthase catalytic subunit”, preferably it is the molecule of section (a) or (b) of this paragraph.

[25516] In particular, it was observed that in plants, especially in Arabidopsis thaliana, increasing or generating the activity of a gene product non-targeted with the activity of a “cellulose synthase catalytic subunit”, preferably being encoded by a gene comprising the nucleic acid sequence SEQ ID NO. 83153, preferably the coding region thereof, conferred the production of or the increase in aspartate compared with the wild type control.

[25517] The nucleic acid sequence of B3607 from Escherichia coli, e.g. as shown in the respective line in column 5 of Table I, application no. 3, has been published in B. And the activity of the gene product thereof is the activity of serine acetyltransferase.

[25518] Accordingly, in one embodiment, the process of the present invention for producing phenylalanine in a non-human organism, like a microorganism or a plant or a part thereof, comprises increasing or generating the activity of a gene product with the activity of a gene product conferring the activity of “serine acetyltransferase”, especially from Escherichia coli or its functional equivalent or its homolog, e.g. the increase of
[25519] (a) a gene product of a gene comprising the nucleic acid molecule as shown in the respective line in column 5 of Table I, application no. 3, preferably the coding region thereof, or a homolog or a fragment thereof, and being depicted in the same respective line as said B3607, or a functional equivalent or a homolog thereof as shown in column 8 of Table I, application no. 3, preferably the coding region thereof, particularly a homolog or functional equivalent as shown in column 8 of Table I B, application no. 3, and being depicted in the same respective line as said B3607, and preferably the activity is increased plastidic, or
[25520] (b) a polypeptide comprising a polypeptide, a consensus sequence or at least a polypeptide motif as shown in the respective line in column 5 of Table II or in column 8 of Table IV, application no. 3, respectively, and being depicted in the same respective line as said B3607, or a functional equivalent or a homolog thereof as depicted in column 8 of Table II, application no. 3, preferably a homolog or functional equivalent as depicted in column 8 of Table II B, application no. 3, and being depicted in the same respective line as said B3607, and preferably the activity is increased plastidic.

[25521] Accordingly, in one embodiment, the molecule which activity is to be increased in the process of the invention is the gene product with an activity as a “serine acetyltransferase”, preferably it is the molecule of section (a) or (b) of this paragraph.

[25522] In particular, it was observed that in plants, especially in Arabidopsis thaliana, increasing or generating the activity of a gene product plastidic with the activity of a “serine acetyltransferase”, preferably being encoded by a gene comprising the nucleic acid sequence SEQ ID NO. 83213, preferably the coding region thereof, conferred the production of or the increase in phenylalanine compared with the wild type control.

[25523] The nucleic acid sequence of B3607 from Escherichia coli, e.g. as shown in the respective line in column 5 of Table I, application no. 3, has been published in B. And the activity of the gene product thereof is the activity of serine acetyltransferase.

[25524] Accordingly, in one embodiment, the process of the present invention for producing tyrosine in a non-human organism, like a microorganism or a plant or a part thereof, comprises increasing or generating the activity of a gene product with the activity of a gene product conferring the activity of “serine acetyltransferase”, especially from Escherichia coli or its functional equivalent or its homolog, e.g. the increase of
[25525] (a) a gene product of a gene comprising the nucleic acid molecule as shown in the respective line in column 5 of Table I, application no. 3, preferably the coding region thereof, or a homolog or a fragment thereof, and being depicted in the same respective line as said B3607, or a functional equivalent or a homolog thereof as shown in column 8 of Table I, application no. 3, preferably the coding region thereof, particularly a homolog or functional equivalent as shown in column 8 of Table I B, application no. 3, and being depicted in the same respective line as said B3607, and preferably the activity is increased plastidic, or
[25526] (b) a polypeptide comprising a polypeptide, a consensus sequence or at least a polypeptide motif as shown in the respective line in column 5 of Table II or in column 8 of Table IV, application no. 3, respectively, and being depicted in the same respective line as said B3607, or a functional equivalent or a homolog thereof as depicted in column 8 of Table II, application no. 3, preferably a homolog or functional equivalent as depicted in column 8 of Table II B, application no. 3, and being depicted in the same respective line as said B3607, and preferably the activity is increased plastidic.

[25527] Accordingly, in one embodiment, the molecule which activity is to be increased in the process of the invention is the gene product with an activity as a “serine acetyltransferase”, preferably it is the molecule of section (a) or (b) of this paragraph.

[25528] In particular, it was observed that in plants, especially in Arabidopsis thaliana, increasing or generating the activity of a gene product plastidic with the activity of a “serine acetyltransferase”, preferably being encoded by a gene comprising the nucleic acid sequence SEQ ID NO. 83213, preferably the coding region thereof, conferred the production of or the increase in tyrosine compared with the wild type control.

[25529] The nucleic acid sequence of B3634 from Escherichia coli, e.g. as shown in the respective line in column 5 of Table I, application no. 3, has been published in B. And the activity of the gene product thereof is the activity of phosphopantetheine adenylyltransferase.

[25530] Accordingly, in one embodiment, the process of the present invention for producing alanine in a non-human organism, like a microorganism or a plant or a part thereof, comprises increasing or generating the activity of a gene product with the activity of a gene product conferring the activity of “phosphopantetheine adenylyltransferase”, especially from Escherichia coli or its functional equivalent or its homolog, e.g. the increase of
[25531] (a) a gene product of a gene comprising the nucleic acid molecule as shown in the respective line in column 5 of Table I, application no. 3, preferably the coding region thereof, or a homolog or a fragment thereof, and being depicted in the same respective line as said B3634, or a functional equivalent or a homolog thereof as shown in column 8 of Table I, application no. 3, preferably the coding region thereof, particularly a homolog or functional equivalent as shown in column 8 of Table I B, application no. 3, and being depicted in the same respective line as said B3634, and preferably the activity is increased non-targeted, or
[25532] (b) a polypeptide comprising a polypeptide, a consensus sequence or at least a polypeptide motif as shown in the respective line in column 5 of Table II or in column 8 of Table IV, application no. 3, respectively, and being depicted in the same respective line as said B3634, or a functional equivalent or a homolog thereof as depicted in column 8 of Table II, application no. 3, preferably a homolog or functional equivalent as depicted in column 8 of Table II B, application no. 3, and being depicted in the same respective line as said B3634, and preferably the activity is increased non-targeted.

[25533] Accordingly, in one embodiment, the molecule which activity is to be increased in the process of the invention is the gene product with an activity as a “phosphopantetheine adenylyltransferase”, preferably it is the molecule of section (a) or (b) of this paragraph.

[25534] In particular, it was observed that in plants, especially in Arabidopsis thaliana, increasing or generating the activity of a gene product non-targeted with the activity of a “phosphopantetheine adenylyltransferase”, preferably being encoded by a gene comprising the nucleic acid sequence SEQ ID NO. 42931, preferably the coding region thereof, conferred the production of or the increase in alanine compared with the wild type control.

[25535] The nucleic acid sequence of B3634 from Escherichia coli, e.g. as shown in the respective line in column 5 of Table I, application no. 3, has been published in B. And the activity of the gene product thereof is the activity of phosphopantetheine adenylyltransferase.

[25536] Accordingly, in one embodiment, the process of the present invention for producing asparagine in a non-human organism, like a microorganism or a plant or a part thereof, comprises increasing or generating the activity of a gene product with the activity of a gene product conferring the activity of “phosphopantetheine adenylyltransferase”, especially from Escherichia coli or its functional equivalent or its homolog, e.g. the increase of
[25537] (a) a gene product of a gene comprising the nucleic acid molecule as shown in the respective line in column 5 of Table I, application no. 3, preferably the coding region thereof, or a homolog or a fragment thereof, and being depicted in the same respective line as said B3634, or a functional equivalent or a homolog thereof as shown in column 8 of Table I, application no. 3, preferably the coding region thereof, particularly a homolog or functional equivalent as shown in column 8 of Table I B, application no. 3, and being depicted in the same respective line as said B3634, and preferably the activity is increased non-targeted, or
[25538] (b) a polypeptide comprising a polypeptide, a consensus sequence or at least a polypeptide motif as shown in the respective line in column 5 of Table II or in column 8 of Table IV, application no. 3, respectively, and being depicted in the same respective line as said B3634, or a functional equivalent or a homolog thereof as depicted in column 8 of Table II, application no. 3, preferably a homolog or functional equivalent as depicted in column 8 of Table II B, application no. 3, and being depicted in the same respective line as said B3634, and preferably the activity is increased non-targeted.

[25539] Accordingly, in one embodiment, the molecule which activity is to be increased in the process of the invention is the gene product with an activity as a “phosphopantetheine adenylyltransferase”, preferably it is the molecule of section (a) or (b) of this paragraph.

[25540] In particular, it was observed that in plants, especially in Arabidopsis thaliana, increasing or generating the activity of a gene product non-targeted with the activity of a “phosphopantetheine adenylyltransferase”, preferably being encoded by a gene comprising the nucleic acid sequence SEQ ID NO. 42931, preferably the coding region thereof, conferred the production of or the increase in asparagine compared with the wild type control.

[25541] The nucleic acid sequence of B3634 from Escherichia coli, e.g. as shown in the respective line in column 5 of Table I, application no. 3, has been published in B. And the activity of the gene product thereof is the activity of phosphopantetheine adenylyltransferase.

[25542] Accordingly, in one embodiment, the process of the present invention for producing phenylalanine in a non-human organism, like a microorganism or a plant or a part thereof, comprises increasing or generating the activity of a gene product with the activity of a gene product conferring the activity of “phosphopantetheine adenylyltransferase”, especially from Escherichia coli or its functional equivalent or its homolog, e.g. the increase of
[25543] (a) a gene product of a gene comprising the nucleic acid molecule as shown in the respective line in column 5 of Table I, application no. 3, preferably the coding region thereof, or a homolog or a fragment thereof, and being depicted in the same respective line as said B3634, or a functional equivalent or a homolog thereof as shown in column 8 of Table I, application no. 3, preferably the coding region thereof, particularly a homolog or functional equivalent as shown in column 8 of Table I B, application no. 3, and being depicted in the same respective line as said B3634, and preferably the activity is increased non-targeted, or
[25544] (b) a polypeptide comprising a polypeptide, a consensus sequence or at least a polypeptide motif as shown in the respective line in column 5 of Table II or in column 8 of Table IV, application no. 3, respectively, and being depicted in the same respective line as said B3634, or a functional equivalent or a homolog thereof as depicted in column 8 of Table II, application no. 3, preferably a homolog or functional equivalent as depicted in column 8 of Table II B, application no. 3, and being depicted in the same respective line as said B3634, and preferably the activity is increased non-targeted.

[25545] Accordingly, in one embodiment, the molecule which activity is to be increased in the process of the invention is the gene product with an activity as a “phosphopantetheine adenylyltransferase”, preferably it is the molecule of section (a) or (b) of this paragraph.

[25546] In particular, it was observed that in plants, especially in Arabidopsis thaliana, increasing or generating the activity of a gene product non-targeted with the activity of a “phosphopantetheine adenylyltransferase”, preferably being encoded by a gene comprising the nucleic acid sequence SEQ ID NO. 42931, preferably the coding region thereof, conferred the production of or the increase in phenylalanine compared with the wild type control.

[25547] The nucleic acid sequence of B3646 from Escherichia coli, e.g. as shown in the respective line in column 5 of Table I, application no. 3, has been published in B. And the activity of the gene product thereof is the activity of b3646-protein.

[25548] Accordingly, in one embodiment, the process of the present invention for producing glycine in a non-human organism, like a microorganism or a plant or a part thereof, comprises increasing or generating the activity of a gene product with the activity of a gene product conferring the activity of “b3646-protein”, especially from Escherichia coli or its functional equivalent or its homolog, e.g. the increase of
[25549] (a) a gene product of a gene comprising the nucleic acid molecule as shown in the respective line in column 5 of Table I, application no. 3, preferably the coding region thereof, or a homolog or a fragment thereof, and being depicted in the same respective line as said B3646, or a functional equivalent or a homolog thereof as shown in column 8 of Table I, application no. 3, preferably the coding region thereof, particularly a homolog or functional equivalent as shown in column 8 of Table I B, application no. 3, and being depicted in the same respective line as said B3646, and preferably the activity is increased non-targeted, or
[25550] (b) a polypeptide comprising a polypeptide, a consensus sequence or at least a polypeptide motif as shown in the respective line in column 5 of Table II or in column 8 of Table IV, application no. 3, respectively, and being depicted in the same respective line as said B3646, or a functional equivalent or a homolog thereof as depicted in column 8 of Table II, application no. 3, preferably a homolog or functional equivalent as depicted in column 8 of Table II B, application no. 3, and being depicted in the same respective line as said B3646, and preferably the activity is increased non-targeted.

[25551] Accordingly, in one embodiment, the molecule which activity is to be increased in the process of the invention is the gene product with an activity as a “b3646-protein”, preferably it is the molecule of section (a) or (b) of this paragraph.

[25552] In particular, it was observed that in plants, especially in Arabidopsis thaliana, increasing or generating the activity of a gene product non-targeted with the activity of a “b3646-protein”, preferably being encoded by a gene comprising the nucleic acid sequence SEQ ID NO. 83429, preferably the coding region thereof, conferred the production of or the increase in glycine compared with the wild type control.

[25553] The nucleic acid sequence of B3670 from Escherichia coli, e.g. as shown in the respective line in column 5 of Table I, application no. 3, has been published in B. And the activity of the gene product thereof is the activity of acetolactate synthase.

[25554] Accordingly, in one embodiment, the process of the present invention for producing tyrosine in a non-human organism, like a microorganism or a plant or a part thereof, comprises increasing or generating the activity of a gene product with the activity of a gene product conferring the activity of “acetolactate synthase”, especially from Escherichia coli or its functional equivalent or its homolog, e.g. the increase of
[25555] (a) a gene product of a gene comprising the nucleic acid molecule as shown in the respective line in column 5 of Table I, application no. 3, preferably the coding region thereof, or a homolog or a fragment thereof, and being depicted in the same respective line as said B3670, or a functional equivalent or a homolog thereof as shown in column 8 of Table I, application no. 3, preferably the coding region thereof, particularly a homolog or functional equivalent as shown in column 8 of Table I B, application no. 3, and being depicted in the same respective line as said B3670, and preferably the activity is increased plastidic, or
[25556] (b) a polypeptide comprising a polypeptide, a consensus sequence or at least a polypeptide motif as shown in the respective line in column 5 of Table II or in column 8 of Table IV, application no. 3, respectively, and being depicted in the same respective line as said B3670, or a functional equivalent or a homolog thereof as depicted in column 8 of Table II, application no. 3, preferably a homolog or functional equivalent as depicted in column 8 of Table II B, application no. 3, and being depicted in the same respective line as said B3670, and preferably the activity is increased plastidic.

[25557] Accordingly, in one embodiment, the molecule which activity is to be increased in the process of the invention is the gene product with an activity as a “acetolactate synthase”, preferably it is the molecule of section (a) or (b) of this paragraph.

[25558] In particular, it was observed that in plants, especially in Arabidopsis thaliana, increasing or generating the activity of a gene product plastidic with the activity of a “acetolactate synthase”, preferably being encoded by a gene comprising the nucleic acid sequence SEQ ID NO. 83629, preferably the coding region thereof, conferred the production of or the increase in tyrosine compared with the wild type control.

[25559] The nucleic acid sequence of B3744 from Escherichia coli, e.g. as shown in the respective line in column 5 of Table I, application no. 3, has been published in B. And the activity of the gene product thereof is the activity of aspartate-ammonia ligase.

[25560] Accordingly, in one embodiment, the process of the present invention for producing asparagine in a non-human organism, like a microorganism or a plant or a part thereof, comprises increasing or generating the activity of a gene product with the activity of a gene product conferring the activity of “aspartate-ammonia ligase”, especially from Escherichia coli or its functional equivalent or its homolog, e.g. the increase of
[25561] (a) a gene product of a gene comprising the nucleic acid molecule as shown in the respective line in column 5 of Table I, application no. 3, preferably the coding region thereof, or a homolog or a fragment thereof, and being depicted in the same respective line as said B3744, or a functional equivalent or a homolog thereof as shown in column 8 of Table I, application no. 3, preferably the coding region thereof, particularly a homolog or functional equivalent as shown in column 8 of Table I B, application no. 3, and being depicted in the same respective line as said B3744, and preferably the activity is increased plastidic, or
[25562] (b) a polypeptide comprising a polypeptide, a consensus sequence or at least a polypeptide motif as shown in the respective line in column 5 of Table II or in column 8 of Table IV, application no. 3, respectively, and being depicted in the same respective line as said B3744, or a functional equivalent or a homolog thereof as depicted in column 8 of Table II, application no. 3, preferably a homolog or functional equivalent as depicted in column 8 of Table II B, application no. 3, and being depicted in the same respective line as said B3744, and preferably the activity is increased plastidic.

[25563] Accordingly, in one embodiment, the molecule which activity is to be increased in the process of the invention is the gene product with an activity as a “aspartate-ammonia ligase”, preferably it is the molecule of section (a) or (b) of this paragraph.

[25564] In particular, it was observed that in plants, especially in Arabidopsis thaliana, increasing or generating the activity of a gene product plastidic with the activity of a “aspartate-ammonia ligase”, preferably being encoded by a gene comprising the nucleic acid sequence SEQ ID NO. 83657, preferably the coding region thereof, conferred the production of or the increase in asparagine compared with the wild type control.

[25565] The nucleic acid sequence of B3771 from Escherichia coli, e.g. as shown in the respective line in column 5 of Table I, application no. 3, has been published in B. And the activity of the gene product thereof is the activity of dihydroxyacid dehydratase.

[25566] Accordingly, in one embodiment, the process of the present invention for producing glycine in a non-human organism, like a microorganism or a plant or a part thereof, comprises increasing or generating the activity of a gene product with the activity of a gene product conferring the activity of “dihydroxyacid dehydratase”, especially from Escherichia coli or its functional equivalent or its homolog, e.g. the increase of
[25567] (a) a gene product of a gene comprising the nucleic acid molecule as shown in the respective line in column 5 of Table I, application no. 3, preferably the coding region thereof, or a homolog or a fragment thereof, and being depicted in the same respective line as said B3771, or a functional equivalent or a homolog thereof as shown in column 8 of Table I, application no. 3, preferably the coding region thereof, particularly a homolog or functional equivalent as shown in column 8 of Table I B, application no. 3, and being depicted in the same respective line as said B3771, and preferably the activity is increased non-targeted, or
[25568] (b) a polypeptide comprising a polypeptide, a consensus sequence or at least a polypeptide motif as shown in the respective line in column 5 of Table II or in column 8 of Table IV, application no. 3, respectively, and being depicted in the same respective line as said B3771, or a functional equivalent or a homolog thereof as depicted in column 8 of Table II, application no. 3, preferably a homolog or functional equivalent as depicted in column 8 of Table II B, application no. 3, and being depicted in the same respective line as said B3771, and preferably the activity is increased non-targeted.

[25569] Accordingly, in one embodiment, the molecule which activity is to be increased in the process of the invention is the gene product with an activity as a “dihydroxyacid dehydratase”, preferably it is the molecule of section (a) or (b) of this paragraph.

[25570] In particular, it was observed that in plants, especially in Arabidopsis thaliana, increasing or generating the activity of a gene product non-targeted with the activity of a “dihydroxyacid dehydratase”, preferably being encoded by a gene comprising the nucleic acid sequence SEQ ID NO. 10252, preferably the coding region thereof, conferred the production of or the increase in glycine compared with the wild type control.

[25571] The nucleic acid sequence of B3771 from Escherichia coli, e.g. as shown in the respective line in column 5 of Table I, application no. 3, has been published in B. And the activity of the gene product thereof is the activity of dihydroxyacid dehydratase.

[25572] Accordingly, in one embodiment, the process of the present invention for producing phenylalanine in a non-human organism, like a microorganism or a plant or a part thereof, comprises increasing or generating the activity of a gene product with the activity of a gene product conferring the activity of “dihydroxyacid dehydratase”, especially from Escherichia coli or its functional equivalent or its homolog, e.g. the increase of
[25573] (a) a gene product of a gene comprising the nucleic acid molecule as shown in the respective line in column 5 of Table I, application no. 3, preferably the coding region thereof, or a homolog or a fragment thereof, and being depicted in the same respective line as said B3771, or a functional equivalent or a homolog thereof as shown in column 8 of Table I, application no. 3, preferably the coding region thereof, particularly a homolog or functional equivalent as shown in column 8 of Table I B, application no. 3, and being depicted in the same respective line as said B3771, and preferably the activity is increased non-targeted, or
[25574] (b) a polypeptide comprising a polypeptide, a consensus sequence or at least a polypeptide motif as shown in the respective line in column 5 of Table II or in column 8 of Table IV, application no. 3, respectively, and being depicted in the same respective line as said B3771, or a functional equivalent or a homolog thereof as depicted in column 8 of Table II, application no. 3, preferably a homolog or functional equivalent as depicted in column 8 of Table II B, application no. 3, and being depicted in the same respective line as said B3771, and preferably the activity is increased non-targeted.

[25575] Accordingly, in one embodiment, the molecule which activity is to be increased in the process of the invention is the gene product with an activity as a “dihydroxyacid dehydratase”, preferably it is the molecule of section (a) or (b) of this paragraph.

[25576] In particular, it was observed that in plants, especially in Arabidopsis thaliana, increasing or generating the activity of a gene product non-targeted with the activity of a “dihydroxyacid dehydratase”, preferably being encoded by a gene comprising the nucleic acid sequence SEQ ID NO. 10252, preferably the coding region thereof, conferred the production of or the increase in phenylalanine compared with the wild type control.

[25577] The nucleic acid sequence of B3791 from Escherichia coli, e.g. as shown in the respective line in column 5 of Table I, application no. 3, has been published in B. And the activity of the gene product thereof is the activity of b3791-protein.

[25578] Accordingly, in one embodiment, the process of the present invention for producing aspartate in a non-human organism, like a microorganism or a plant or a part thereof, comprises increasing or generating the activity of a gene product with the activity of a gene product conferring the activity of “b3791-protein”, especially from Escherichia coli or its functional equivalent or its homolog, e.g. the increase of
[25579] (a) a gene product of a gene comprising the nucleic acid molecule as shown in the respective line in column 5 of Table I, application no. 3, preferably the coding region thereof, or a homolog or a fragment thereof, and being depicted in the same respective line as said B3791, or a functional equivalent or a homolog thereof as shown in column 8 of Table I, application no. 3, preferably the coding region thereof, particularly a homolog or functional equivalent as shown in column 8 of Table I B, application no. 3, and being depicted in the same respective line as said B3791, and preferably the activity is increased non-targeted, or
[25580] (b) a polypeptide comprising a polypeptide, a consensus sequence or at least a polypeptide motif as shown in the respective line in column 5 of Table II or in column 8 of Table IV, application no. 3, respectively, and being depicted in the same respective line as said B3791, or a functional equivalent or a homolog thereof as depicted in column 8 of Table II, application no. 3, preferably a homolog or functional equivalent as depicted in column 8 of Table II B, application no. 3, and being depicted in the same respective line as said B3791, and preferably the activity is increased non-targeted.

[25581] Accordingly, in one embodiment, the molecule which activity is to be increased in the process of the invention is the gene product with an activity as a “b3791-protein”, preferably it is the molecule of section (a) or (b) of this paragraph.

[25582] In particular, it was observed that in plants, especially in Arabidopsis thaliana, increasing or generating the activity of a gene product non-targeted with the activity of a “b3791-protein”, preferably being encoded by a gene comprising the nucleic acid sequence SEQ ID NO. 83726, preferably the coding region thereof, conferred the production of or the increase in aspartate compared with the wild type control.

[25583] The nucleic acid sequence of B3791 from Escherichia coli, e.g. as shown in the respective line in column 5 of Table I, application no. 3, has been published in B. And the activity of the gene product thereof is the activity of b3791-protein.

[25584] Accordingly, in one embodiment, the process of the present invention for producing 5-oxoproline in a non-human organism, like a microorganism or a plant or a part thereof, comprises increasing or generating the activity of a gene product with the activity of a gene product conferring the activity of “b3791-protein”, especially from Escherichia coli or its functional equivalent or its homolog, e.g. the increase of
[25585] (a) a gene product of a gene comprising the nucleic acid molecule as shown in the respective line in column 5 of Table I, application no. 3, preferably the coding region thereof, or a homolog or a fragment thereof, and being depicted in the same respective line as said B3791, or a functional equivalent or a homolog thereof as shown in column 8 of Table I, application no. 3, preferably the coding region thereof, particularly a homolog or functional equivalent as shown in column 8 of Table I B, application no. 3, and being depicted in the same respective line as said B3791, and preferably the activity is increased non-targeted, or
[25586] (b) a polypeptide comprising a polypeptide, a consensus sequence or at least a polypeptide motif as shown in the respective line in column 5 of Table II or in column 8 of Table IV, application no. 3, respectively, and being depicted in the same respective line as said B3791, or a functional equivalent or a homolog thereof as depicted in column 8 of Table II, application no. 3, preferably a homolog or functional equivalent as depicted in column 8 of Table II B, application no. 3, and being depicted in the same respective line as said B3791, and preferably the activity is increased non-targeted.

[25587] Accordingly, in one embodiment, the molecule which activity is to be increased in the process of the invention is the gene product with an activity as a “b3791-protein”, preferably it is the molecule of section (a) or (b) of this paragraph.

[25588] In particular, it was observed that in plants, especially in Arabidopsis thaliana, increasing or generating the activity of a gene product non-targeted with the activity of a “b3791-protein”, preferably being encoded by a gene comprising the nucleic acid sequence SEQ ID NO. 83726, preferably the coding region thereof, conferred the production of or the increase in 5-oxoproline compared with the wild type control.

[25589] The nucleic acid sequence of B3793 from Escherichia coli, e.g. as shown in the respective line in column 5 of Table I, application no. 3, has been published in B. And the activity of the gene product thereof is the activity of enterobacterial common antigen polymerase.

[25590] Accordingly, in one embodiment, the process of the present invention for producing phenylalanine in a non-human organism, like a microorganism or a plant or a part thereof, comprises increasing or generating the activity of a gene product with the activity of a gene product conferring the activity of “enterobacterial common antigen polymerase”, especially from Escherichia coli or its functional equivalent or its homolog, e.g. the increase of
[25591] (a) a gene product of a gene comprising the nucleic acid molecule as shown in the respective line in column 5 of Table I, application no. 3, preferably the coding region thereof, or a homolog or a fragment thereof, and being depicted in the same respective line as said B3793, or a functional equivalent or a homolog thereof as shown in column 8 of Table I, application no. 3, preferably the coding region thereof, particularly a homolog or functional equivalent as shown in column 8 of Table I B, application no. 3, and being depicted in the same respective line as said B3793, and preferably the activity is increased non-targeted, or
[25592] (b) a polypeptide comprising a polypeptide, a consensus sequence or at least a polypeptide motif as shown in the respective line in column 5 of Table II or in column 8 of Table IV, application no. 3, respectively, and being depicted in the same respective line as said B3793, or a functional equivalent or a homolog thereof as depicted in column 8 of Table II, application no. 3, preferably a homolog or functional equivalent as depicted in column 8 of Table II B, application no. 3, and being depicted in the same respective line as said B3793, and preferably the activity is increased non-targeted.

[25593] Accordingly, in one embodiment, the molecule which activity is to be increased in the process of the invention is the gene product with an activity as a “enterobacterial common antigen polymerase”, preferably it is the molecule of section (a) or (b) of this paragraph.

[25594] In particular, it was observed that in plants, especially in Arabidopsis thaliana, increasing or generating the activity of a gene product non-targeted with the activity of a “enterobacterial common antigen polymerase”, preferably being encoded by a gene comprising the nucleic acid sequence SEQ ID NO. 43800, preferably the coding region thereof, conferred the production of or the increase in phenylalanine compared with the wild type control.

[25595] The nucleic acid sequence of B3813 from Escherichia coli, e.g. as shown in the respective line in column 5 of Table I, application no. 3, has been published in B. And the activity of the gene product thereof is the activity of DNA helicase II.

[25596] Accordingly, in one embodiment, the process of the present invention for producing phenylalanine in a non-human organism, like a microorganism or a plant or a part thereof, comprises increasing or generating the activity of a gene product with the activity of a gene product conferring the activity of “DNA helicase II”, especially from Escherichia coli or its functional equivalent or its homolog, e.g. the increase of
[25597] (a) a gene product of a gene comprising the nucleic acid molecule as shown in the respective line in column 5 of Table I, application no. 3, preferably the coding region thereof, or a homolog or a fragment thereof, and being depicted in the same respective line as said B3813, or a functional equivalent or a homolog thereof as shown in column 8 of Table I, application no. 3, preferably the coding region thereof, particularly a homolog or functional equivalent as shown in column 8 of Table I B, application no. 3, and being depicted in the same respective line as said B3813, and preferably the activity is increased non-targeted, or
[25598] (b) a polypeptide comprising a polypeptide, a consensus sequence or at least a polypeptide motif as shown in the respective line in column 5 of Table II or in column 8 of Table IV, application no. 3, respectively, and being depicted in the same respective line as said B3813, or a functional equivalent or a homolog thereof as depicted in column 8 of Table II, application no. 3, preferably a homolog or functional equivalent as depicted in column 8 of Table II B, application no. 3, and being depicted in the same respective line as said B3813, and preferably the activity is increased non-targeted.

[25599] Accordingly, in one embodiment, the molecule which activity is to be increased in the process of the invention is the gene product with an activity as a “DNA helicase II”, preferably it is the molecule of section (a) or (b) of this paragraph.

[25600] In particular, it was observed that in plants, especially in Arabidopsis thaliana, increasing or generating the activity of a gene product non-targeted with the activity of a “DNA helicase II”, preferably being encoded by a gene comprising the nucleic acid sequence SEQ ID NO. 43839, preferably the coding region thereof, conferred the production of or the increase in phenylalanine compared with the wild type control.

[25601] The nucleic acid sequence of B3814 from Escherichia coli, e.g. as shown in the respective line in column 5 of Table I, application no. 3, has been published in B. And the activity of the gene product thereof is the activity of b3814-protein.

[25602] Accordingly, in one embodiment, the process of the present invention for producing citrulline in a non-human organism, like a microorganism or a plant or a part thereof, comprises increasing or generating the activity of a gene product with the activity of a gene product conferring the activity of “b3814-protein”, especially from Escherichia coli or its functional equivalent or its homolog, e.g. the increase of
[25603] (a) a gene product of a gene comprising the nucleic acid molecule as shown in the respective line in column 5 of Table I, application no. 3, preferably the coding region thereof, or a homolog or a fragment thereof, and being depicted in the same respective line as said B3814, or a functional equivalent or a homolog thereof as shown in column 8 of Table I, application no. 3, preferably the coding region thereof, particularly a homolog or functional equivalent as shown in column 8 of Table I B, application no. 3, and being depicted in the same respective line as said B3814, and preferably the activity is increased non-targeted, or
[25604] (b) a polypeptide comprising a polypeptide, a consensus sequence or at least a polypeptide motif as shown in the respective line in column 5 of Table II or in column 8 of Table IV, application no. 3, respectively, and being depicted in the same respective line as said B3814, or a functional equivalent or a homolog thereof as depicted in column 8 of Table II, application no. 3, preferably a homolog or functional equivalent as depicted in column 8 of Table II B, application no. 3, and being depicted in the same respective line as said B3814, and preferably the activity is increased non-targeted.

[25605] Accordingly, in one embodiment, the molecule which activity is to be increased in the process of the invention is the gene product with an activity as a “b3814-protein”, preferably it is the molecule of section (a) or (b) of this paragraph.

[25606] In particular, it was observed that in plants, especially in Arabidopsis thaliana, increasing or generating the activity of a gene product non-targeted with the activity of a “b3814-protein”, preferably being encoded by a gene comprising the nucleic acid sequence SEQ ID NO. 44196, preferably the coding region thereof, conferred the production of or the increase in citrulline compared with the wild type control.

[25607] The nucleic acid sequence of B3872 from Escherichia coli, e.g. as shown in the respective line in column 5 of Table I, application no. 3, has been published in B. And the activity of the gene product thereof is the activity of transcriptional regulator.

[25608] Accordingly, in one embodiment, the process of the present invention for producing alanine in a non-human organism, like a microorganism or a plant or a part thereof, comprises increasing or generating the activity of a gene product with the activity of a gene product conferring the activity of “transcriptional regulator”, especially from Escherichia coli or its functional equivalent or its homolog, e.g. the increase of
[25609] (a) a gene product of a gene comprising the nucleic acid molecule as shown in the respective line in column 5 of Table I, application no. 3, preferably the coding region thereof, or a homolog or a fragment thereof, and being depicted in the same respective line as said B3872, or a functional equivalent or a homolog thereof as shown in column 8 of Table I, application no. 3, preferably the coding region thereof, particularly a homolog or functional equivalent as shown in column 8 of Table I B, application no. 3, and being depicted in the same respective line as said B3872, and preferably the activity is increased non-targeted, or
[25610] (b) a polypeptide comprising a polypeptide, a consensus sequence or at least a polypeptide motif as shown in the respective line in column 5 of Table II or in column 8 of Table IV, application no. 3, respectively, and being depicted in the same respective line as said B3872, or a functional equivalent or a homolog thereof as depicted in column 8 of Table II, application no. 3, preferably a homolog or functional equivalent as depicted in column 8 of Table II B, application no. 3, and being depicted in the same respective line as said B3872, and preferably the activity is increased non-targeted.

[25611] Accordingly, in one embodiment, the molecule which activity is to be increased in the process of the invention is the gene product with an activity as a “transcriptional regulator”, preferably it is the molecule of section (a) or (b) of this paragraph.

[25612] In particular, it was observed that in plants, especially in Arabidopsis thaliana, increasing or generating the activity of a gene product non-targeted with the activity of a “transcriptional regulator”, preferably being encoded by a gene comprising the nucleic acid sequence SEQ ID NO. 83821, preferably the coding region thereof, conferred the production of or the increase in alanine compared with the wild type control.

[25613] The nucleic acid sequence of B3872 from Escherichia coli, e.g. as shown in the respective line in column 5 of Table I, application no. 3, has been published in B. And the activity of the gene product thereof is the activity of transcriptional regulator.

[25614] Accordingly, in one embodiment, the process of the present invention for producing aspartate in a non-human organism, like a microorganism or a plant or a part thereof, comprises increasing or generating the activity of a gene product with the activity of a gene product conferring the activity of “transcriptional regulator”, especially from Escherichia coli or its functional equivalent or its homolog, e.g. the increase of
[25615] (a) a gene product of a gene comprising the nucleic acid molecule as shown in the respective line in column 5 of Table I, application no. 3, preferably the coding region thereof, or a homolog or a fragment thereof, and being depicted in the same respective line as said B3872, or a functional equivalent or a homolog thereof as shown in column 8 of Table I, application no. 3, preferably the coding region thereof, particularly a homolog or functional equivalent as shown in column 8 of Table I B, application no. 3, and being depicted in the same respective line as said B3872, and preferably the activity is increased plastidic, or
[25616] (b) a polypeptide comprising a polypeptide, a consensus sequence or at least a polypeptide motif as shown in the respective line in column 5 of Table II or in column 8 of Table IV, application no. 3, respectively, and being depicted in the same respective line as said B3872, or a functional equivalent or a homolog thereof as depicted in column 8 of Table II, application no. 3, preferably a homolog or functional equivalent as depicted in column 8 of Table II B, application no. 3, and being depicted in the same respective line as said B3872, and preferably the activity is increased plastidic.

[25617] Accordingly, in one embodiment, the molecule which activity is to be increased in the process of the invention is the gene product with an activity as a “transcriptional regulator”, preferably it is the molecule of section (a) or (b) of this paragraph.

[25618] In particular, it was observed that in plants, especially in Arabidopsis thaliana, increasing or generating the activity of a gene product plastidic with the activity of a “transcriptional regulator”, preferably being encoded by a gene comprising the nucleic acid sequence SEQ ID NO. 83821, preferably the coding region thereof, conferred the production of or the increase in aspartate compared with the wild type control.

[25619] The nucleic acid sequence of B3872 from Escherichia coli, e.g. as shown in the respective line in column 5 of Table I, application no. 3, has been published in B. And the activity of the gene product thereof is the activity of transcriptional regulator.

[25620] Accordingly, in one embodiment, the process of the present invention for producing serine in a non-human organism, like a microorganism or a plant or a part thereof, comprises increasing or generating the activity of a gene product with the activity of a gene product conferring the activity of “transcriptional regulator”, especially from Escherichia coli or its functional equivalent or its homolog, e.g. the increase of
[25621] (a) a gene product of a gene comprising the nucleic acid molecule as shown in the respective line in column 5 of Table I, application no. 3, preferably the coding region thereof, or a homolog or a fragment thereof, and being depicted in the same respective line as said B3872, or a functional equivalent or a homolog thereof as shown in column 8 of Table I, application no. 3, preferably the coding region thereof, particularly a homolog or functional equivalent as shown in column 8 of Table I B, application no. 3, and being depicted in the same respective line as said B3872, and preferably the activity is increased non-targeted, or
[25622] (b) a polypeptide comprising a polypeptide, a consensus sequence or at least a polypeptide motif as shown in the respective line in column 5 of Table II or in column 8 of Table IV, application no. 3, respectively, and being depicted in the same respective line as said B3872, or a functional equivalent or a homolog thereof as depicted in column 8 of Table II, application no. 3, preferably a homolog or functional equivalent as depicted in column 8 of Table II B, application no. 3, and being depicted in the same respective line as said B3872, and preferably the activity is increased non-targeted.

[25623] Accordingly, in one embodiment, the molecule which activity is to be increased in the process of the invention is the gene product with an activity as a “transcriptional regulator”, preferably it is the molecule of section (a) or (b) of this paragraph.

[25624] In particular, it was observed that in plants, especially in Arabidopsis thaliana, increasing or generating the activity of a gene product non-targeted with the activity of a “transcriptional regulator”, preferably being encoded by a gene comprising the nucleic acid sequence SEQ ID NO. 83821, preferably the coding region thereof, conferred the production of or the increase in serine compared with the wild type control.

[25625] The nucleic acid sequence of B3872 from Escherichia coli, e.g. as shown in the respective line in column 5 of Table I, application no. 3, has been published in B. And the activity of the gene product thereof is the activity of transcriptional regulator.

[25626] Accordingly, in one embodiment, the process of the present invention for producing tyrosine in a non-human organism, like a microorganism or a plant or a part thereof, comprises increasing or generating the activity of a gene product with the activity of a gene product conferring the activity of “transcriptional regulator”, especially from Escherichia coli or its functional equivalent or its homolog, e.g. the increase of
[25627] (a) a gene product of a gene comprising the nucleic acid molecule as shown in the respective line in column 5 of Table I, application no. 3, preferably the coding region thereof, or a homolog or a fragment thereof, and being depicted in the same respective line as said B3872, or a functional equivalent or a homolog thereof as shown in column 8 of Table I, application no. 3, preferably the coding region thereof, particularly a homolog or functional equivalent as shown in column 8 of Table I B, application no. 3, and being depicted in the same respective line as said B3872, and preferably the activity is increased non-targeted, or
[25628] (b) a polypeptide comprising a polypeptide, a consensus sequence or at least a polypeptide motif as shown in the respective line in column 5 of Table II or in column 8 of Table IV, application no. 3, respectively, and being depicted in the same respective line as said B3872, or a functional equivalent or a homolog thereof as depicted in column 8 of Table II, application no. 3, preferably a homolog or functional equivalent as depicted in column 8 of Table II B, application no. 3, and being depicted in the same respective line as said B3872, and preferably the activity is increased non-targeted.

[25629] Accordingly, in one embodiment, the molecule which activity is to be increased in the process of the invention is the gene product with an activity as a “transcriptional regulator”, preferably it is the molecule of section (a) or (b) of this paragraph.

[25630] In particular, it was observed that in plants, especially in Arabidopsis thaliana, increasing or generating the activity of a gene product non-targeted with the activity of a “transcriptional regulator”, preferably being encoded by a gene comprising the nucleic acid sequence SEQ ID NO. 83821, preferably the coding region thereof, conferred the production of or the increase in tyrosine compared with the wild type control.

[25631] The nucleic acid sequence of B3989 from Escherichia coli, e.g. as shown in the respective line in column 5 of Table I, application no. 3, has been published in B. And the activity of the gene product thereof is the activity of b3989-protein.

[25632] Accordingly, in one embodiment, the process of the present invention for producing phenylalanine in a non-human organism, like a microorganism or a plant or a part thereof, comprises increasing or generating the activity of a gene product with the activity of a gene product conferring the activity of “b3989-protein”, especially from Escherichia coli or its functional equivalent or its homolog, e.g. the increase of
[25633] (a) a gene product of a gene comprising the nucleic acid molecule as shown in the respective line in column 5 of Table I, application no. 3, preferably the coding region thereof, or a homolog or a fragment thereof, and being depicted in the same respective line as said B3989, or a functional equivalent or a homolog thereof as shown in column 8 of Table I, application no. 3, preferably the coding region thereof, particularly a homolog or functional equivalent as shown in column 8 of Table I B, application no. 3, and being depicted in the same respective line as said B3989, and preferably the activity is increased non-targeted, or
[25634] (b) a polypeptide comprising a polypeptide, a consensus sequence or at least a polypeptide motif as shown in the respective line in column 5 of Table II or in column 8 of Table IV, application no. 3, respectively, and being depicted in the same respective line as said B3989, or a functional equivalent or a homolog thereof as depicted in column 8 of Table II, application no. 3, preferably a homolog or functional equivalent as depicted in column 8 of Table II B, application no. 3, and being depicted in the same respective line as said B3989, and preferably the activity is increased non-targeted.

[25635] Accordingly, in one embodiment, the molecule which activity is to be increased in the process of the invention is the gene product with an activity as a “b3989-protein”, preferably it is the molecule of section (a) or (b) of this paragraph.

[25636] In particular, it was observed that in plants, especially in Arabidopsis thaliana, increasing or generating the activity of a gene product non-targeted with the activity of a “b3989-protein”, preferably being encoded by a gene comprising the nucleic acid sequence SEQ ID NO. 44372, preferably the coding region thereof, conferred the production of or the increase in phenylalanine compared with the wild type control.

[25637] The nucleic acid sequence of B3989 from Escherichia coli, e.g. as shown in the respective line in column 5 of Table I, application no. 3, has been published in B. And the activity of the gene product thereof is the activity of b3989-protein.

[25638] Accordingly, in one embodiment, the process of the present invention for producing tyrosine in a non-human organism, like a microorganism or a plant or a part thereof, comprises increasing or generating the activity of a gene product with the activity of a gene product conferring the activity of “b3989-protein”, especially from Escherichia coli or its functional equivalent or its homolog, e.g. the increase of
[25639] (a) a gene product of a gene comprising the nucleic acid molecule as shown in the respective line in column 5 of Table I, application no. 3, preferably the coding region thereof, or a homolog or a fragment thereof, and being depicted in the same respective line as said B3989, or a functional equivalent or a homolog thereof as shown in column 8 of Table I, application no. 3, preferably the coding region thereof, particularly a homolog or functional equivalent as shown in column 8 of Table I B, application no. 3, and being depicted in the same respective line as said B3989, and preferably the activity is increased non-targeted, or
[25640] (b) a polypeptide comprising a polypeptide, a consensus sequence or at least a polypeptide motif as shown in the respective line in column 5 of Table II or in column 8 of Table IV, application no. 3, respectively, and being depicted in the same respective line as said B3989, or a functional equivalent or a homolog thereof as depicted in column 8 of Table II, application no. 3, preferably a homolog or functional equivalent as depicted in column 8 of Table II B, application no. 3, and being depicted in the same respective line as said B3989, and preferably the activity is increased non-targeted.

[25641] Accordingly, in one embodiment, the molecule which activity is to be increased in the process of the invention is the gene product with an activity as a “b3989-protein”, preferably it is the molecule of section (a) or (b) of this paragraph.

[25642] In particular, it was observed that in plants, especially in Arabidopsis thaliana, increasing or generating the activity of a gene product non-targeted with the activity of a “b3989-protein”, preferably being encoded by a gene comprising the nucleic acid sequence SEQ ID NO. 44372, preferably the coding region thereof, conferred the production of or the increase in tyrosine compared with the wild type control.

[25643] The nucleic acid sequence of B4012 from Escherichia coli, e.g. as shown in the respective line in column 5 of Table I, application no. 3, has been published in B. And the activity of the gene product thereof is the activity of acetyltransferase.

[25644] Accordingly, in one embodiment, the process of the present invention for producing aspartate in a non-human organism, like a microorganism or a plant or a part thereof, comprises increasing or generating the activity of a gene product with the activity of a gene product conferring the activity of “acetyltransferase”, especially from Escherichia coli or its functional equivalent or its homolog, e.g. the increase of
[25645] (a) a gene product of a gene comprising the nucleic acid molecule as shown in the respective line in column 5 of Table I, application no. 3, preferably the coding region thereof, or a homolog or a fragment thereof, and being depicted in the same respective line as said B4012, or a functional equivalent or a homolog thereof as shown in column 8 of Table I, application no. 3, preferably the coding region thereof, particularly a homolog or functional equivalent as shown in column 8 of Table I B, application no. 3, and being depicted in the same respective line as said B4012, and preferably the activity is increased non-targeted, or
[25646] (b) a polypeptide comprising a polypeptide, a consensus sequence or at least a polypeptide motif as shown in the respective line in column 5 of Table II or in column 8 of Table IV, application no. 3, respectively, and being depicted in the same respective line as said B4012, or a functional equivalent or a homolog thereof as depicted in column 8 of Table II, application no. 3, preferably a homolog or functional equivalent as depicted in column 8 of Table II B, application no. 3, and being depicted in the same respective line as said B4012, and preferably the activity is increased non-targeted.

[25647] Accordingly, in one embodiment, the molecule which activity is to be increased in the process of the invention is the gene product with an activity as a “acetyltransferase”, preferably it is the molecule of section (a) or (b) of this paragraph.

[25648] In particular, it was observed that in plants, especially in Arabidopsis thaliana, increasing or generating the activity of a gene product non-targeted with the activity of a “acetyltransferase”, preferably being encoded by a gene comprising the nucleic acid sequence SEQ ID NO. 44378, preferably the coding region thereof, conferred the production of or the increase in aspartate compared with the wild type control.

[25649] The nucleic acid sequence of B4012 from Escherichia coli, e.g. as shown in the respective line in column 5 of Table I, application no. 3, has been published in B. And the activity of the gene product thereof is the activity of acetyltransferase.

[25650] Accordingly, in one embodiment, the process of the present invention for producing 5-oxoproline in a non-human organism, like a microorganism or a plant or a part thereof, comprises increasing or generating the activity of a gene product with the activity of a gene product conferring the activity of “acetyltransferase”, especially from Escherichia coli or its functional equivalent or its homolog, e.g. the increase of
[25651] (a) a gene product of a gene comprising the nucleic acid molecule as shown in the respective line in column 5 of Table I, application no. 3, preferably the coding region thereof, or a homolog or a fragment thereof, and being depicted in the same respective line as said B4012, or a functional equivalent or a homolog thereof as shown in column 8 of Table I, application no. 3, preferably the coding region thereof, particularly a homolog or functional equivalent as shown in column 8 of Table I B, application no. 3, and being depicted in the same respective line as said B4012, and preferably the activity is increased non-targeted, or
[25652] (b) a polypeptide comprising a polypeptide, a consensus sequence or at least a polypeptide motif as shown in the respective line in column 5 of Table II or in column 8 of Table IV, application no. 3, respectively, and being depicted in the same respective line as said B4012, or a functional equivalent or a homolog thereof as depicted in column 8 of Table II, application no. 3, preferably a homolog or functional equivalent as depicted in column 8 of Table II B, application no. 3, and being depicted in the same respective line as said B4012, and preferably the activity is increased non-targeted.

[25653] Accordingly, in one embodiment, the molecule which activity is to be increased in the process of the invention is the gene product with an activity as a “acetyltransferase”, preferably it is the molecule of section (a) or (b) of this paragraph.

[25654] In particular, it was observed that in plants, especially in Arabidopsis thaliana, increasing or generating the activity of a gene product non-targeted with the activity of a “acetyltransferase”, preferably being encoded by a gene comprising the nucleic acid sequence SEQ ID NO. 44378, preferably the coding region thereof, conferred the production of or the increase in 5-oxoproline compared with the wild type control.

[25655] The nucleic acid sequence of B4024 from Escherichia coli, e.g. as shown in the respective line in column 5 of Table I, application no. 3, has been published in B. And the activity of the gene product thereof is the activity of aspartate kinase.

[25656] Accordingly, in one embodiment, the process of the present invention for producing glycine in a non-human organism, like a microorganism or a plant or a part thereof, comprises increasing or generating the activity of a gene product with the activity of a gene product conferring the activity of “aspartate kinase”, especially from Escherichia coli or its functional equivalent or its homolog, e.g. the increase of
[25657] (a) a gene product of a gene comprising the nucleic acid molecule as shown in the respective line in column 5 of Table I, application no. 3, preferably the coding region thereof, or a homolog or a fragment thereof, and being depicted in the same respective line as said B4024, or a functional equivalent or a homolog thereof as shown in column 8 of Table I, application no. 3, preferably the coding region thereof, particularly a homolog or functional equivalent as shown in column 8 of Table I B, application no. 3, and being depicted in the same respective line as said B4024, and preferably the activity is increased plastidic, or
[25658] (b) a polypeptide comprising a polypeptide, a consensus sequence or at least a polypeptide motif as shown in the respective line in column 5 of Table II or in column 8 of Table IV, application no. 3, respectively, and being depicted in the same respective line as said B4024, or a functional equivalent or a homolog thereof as depicted in column 8 of Table II, application no. 3, preferably a homolog or functional equivalent as depicted in column 8 of Table II B, application no. 3, and being depicted in the same respective line as said B4024, and preferably the activity is increased plastidic.

[25659] Accordingly, in one embodiment, the molecule which activity is to be increased in the process of the invention is the gene product with an activity as a “aspartate kinase”, preferably it is the molecule of section (a) or (b) of this paragraph.

[25660] In particular, it was observed that in plants, especially in Arabidopsis thaliana, increasing or generating the activity of a gene product plastidic with the activity of a “aspartate kinase”, preferably being encoded by a gene comprising the nucleic acid sequence SEQ ID NO. 83835, preferably the coding region thereof, conferred the production of or the increase in glycine compared with the wild type control.

[25661] The nucleic acid sequence of B4024 from Escherichia coli, e.g. as shown in the respective line in column 5 of Table I, application no. 3, has been published in B. And the activity of the gene product thereof is the activity of aspartate kinase.

[25662] Accordingly, in one embodiment, the process of the present invention for producing serine in a non-human organism, like a microorganism or a plant or a part thereof, comprises increasing or generating the activity of a gene product with the activity of a gene product conferring the activity of “aspartate kinase”, especially from Escherichia coli or its functional equivalent or its homolog, e.g. the increase of
[25663] (a) a gene product of a gene comprising the nucleic acid molecule as shown in the respective line in column 5 of Table I, application no. 3, preferably the coding region thereof, or a homolog or a fragment thereof, and being depicted in the same respective line as said B4024, or a functional equivalent or a homolog thereof as shown in column 8 of Table I, application no. 3, preferably the coding region thereof, particularly a homolog or functional equivalent as shown in column 8 of Table I B, application no. 3, and being depicted in the same respective line as said B4024, and preferably the activity is increased plastidic, or
[25664] (b) a polypeptide comprising a polypeptide, a consensus sequence or at least a polypeptide motif as shown in the respective line in column 5 of Table II or in column 8 of Table IV, application no. 3, respectively, and being depicted in the same respective line as said B4024, or a functional equivalent or a homolog thereof as depicted in column 8 of Table II, application no. 3, preferably a homolog or functional equivalent as depicted in column 8 of Table II B, application no. 3, and being depicted in the same respective line as said B4024, and preferably the activity is increased plastidic.

[25665] Accordingly, in one embodiment, the molecule which activity is to be increased in the process of the invention is the gene product with an activity as a “aspartate kinase”, preferably it is the molecule of section (a) or (b) of this paragraph.

[25666] In particular, it was observed that in plants, especially in Arabidopsis thaliana, increasing or generating the activity of a gene product plastidic with the activity of a “aspartate kinase”, preferably being encoded by a gene comprising the nucleic acid sequence SEQ ID NO. 83835, preferably the coding region thereof, conferred the production of or the increase in serine compared with the wild type control.

[25667] The nucleic acid sequence of B4029 from Escherichia coli, e.g. as shown in the respective line in column 5 of Table I, application no. 3, has been published in B. And the activity of the gene product thereof is the activity of b4029-protein.

[25668] Accordingly, in one embodiment, the process of the present invention for producing alanine in a non-human organism, like a microorganism or a plant or a part thereof, comprises increasing or generating the activity of a gene product with the activity of a gene product conferring the activity of “b4029-protein”, especially from Escherichia coli or its functional equivalent or its homolog, e.g. the increase of
[25669] (a) a gene product of a gene comprising the nucleic acid molecule as shown in the respective line in column 5 of Table I, application no. 3, preferably the coding region thereof, or a homolog or a fragment thereof, and being depicted in the same respective line as said B4029, or a functional equivalent or a homolog thereof as shown in column 8 of Table I, application no. 3, preferably the coding region thereof, particularly a homolog or functional equivalent as shown in column 8 of Table I B, application no. 3, and being depicted in the same respective line as said B4029, and preferably the activity is increased non-targeted, or
[25670] (b) a polypeptide comprising a polypeptide, a consensus sequence or at least a polypeptide motif as shown in the respective line in column 5 of Table II or in column 8 of Table IV, application no. 3, respectively, and being depicted in the same respective line as said B4029, or a functional equivalent or a homolog thereof as depicted in column 8 of Table II, application no. 3, preferably a homolog or functional equivalent as depicted in column 8 of Table II B, application no. 3, and being depicted in the same respective line as said B4029, and preferably the activity is increased non-targeted.

[25671] Accordingly, in one embodiment, the molecule which activity is to be increased in the process of the invention is the gene product with an activity as a “b4029-protein”, preferably it is the molecule of section (a) or (b) of this paragraph.

[25672] In particular, it was observed that in plants, especially in Arabidopsis thaliana, increasing or generating the activity of a gene product non-targeted with the activity of a “b4029-protein”, preferably being encoded by a gene comprising the nucleic acid sequence SEQ ID NO. 10740, preferably the coding region thereof, conferred the production of or the increase in alanine compared with the wild type control.

[25673] The nucleic acid sequence of B4029 from Escherichia coli, e.g. as shown in the respective line in column 5 of Table I, application no. 3, has been published in B. And the activity of the gene product thereof is the activity of b4029-protein.

[25674] Accordingly, in one embodiment, the process of the present invention for producing aspartate in a non-human organism, like a microorganism or a plant or a part thereof, comprises increasing or generating the activity of a gene product with the activity of a gene product conferring the activity of “b4029-protein”, especially from Escherichia coli or its functional equivalent or its homolog, e.g. the increase of
[25675] (a) a gene product of a gene comprising the nucleic acid molecule as shown in the respective line in column 5 of Table I, application no. 3, preferably the coding region thereof, or a homolog or a fragment thereof, and being depicted in the same respective line as said B4029, or a functional equivalent or a homolog thereof as shown in column 8 of Table I, application no. 3, preferably the coding region thereof, particularly a homolog or functional equivalent as shown in column 8 of Table I B, application no. 3, and being depicted in the same respective line as said B4029, and preferably the activity is increased non-targeted, or
[25676] (b) a polypeptide comprising a polypeptide, a consensus sequence or at least a polypeptide motif as shown in the respective line in column 5 of Table II or in column 8 of Table IV, application no. 3, respectively, and being depicted in the same respective line as said B4029, or a functional equivalent or a homolog thereof as depicted in column 8 of Table II, application no. 3, preferably a homolog or functional equivalent as depicted in column 8 of Table II B, application no. 3, and being depicted in the same respective line as said B4029, and preferably the activity is increased non-targeted.

[25677] Accordingly, in one embodiment, the molecule which activity is to be increased in the process of the invention is the gene product with an activity as a “b4029-protein”, preferably it is the molecule of section (a) or (b) of this paragraph.

[25678] In particular, it was observed that in plants, especially in Arabidopsis thaliana, increasing or generating the activity of a gene product non-targeted with the activity of a “b4029-protein”, preferably being encoded by a gene comprising the nucleic acid sequence SEQ ID NO. 10740, preferably the coding region thereof, conferred the production of or the increase in aspartate compared with the wild type control.

[25679] The nucleic acid sequence of B4029 from Escherichia coli, e.g. as shown in the respective line in column 5 of Table I, application no. 3, has been published in B. And the activity of the gene product thereof is the activity of b4029-protein.

[25680] Accordingly, in one embodiment, the process of the present invention for producing glycine in a non-human organism, like a microorganism or a plant or a part thereof, comprises increasing or generating the activity of a gene product with the activity of a gene product conferring the activity of “b4029-protein”, especially from Escherichia coli or its functional equivalent or its homolog, e.g. the increase of
[25681] (a) a gene product of a gene comprising the nucleic acid molecule as shown in the respective line in column 5 of Table I, application no. 3, preferably the coding region thereof, or a homolog or a fragment thereof, and being depicted in the same respective line as said B4029, or a functional equivalent or a homolog thereof as shown in column 8 of Table I, application no. 3, preferably the coding region thereof, particularly a homolog or functional equivalent as shown in column 8 of Table I B, application no. 3, and being depicted in the same respective line as said B4029, and preferably the activity is increased non-targeted, or
[25682] (b) a polypeptide comprising a polypeptide, a consensus sequence or at least a polypeptide motif as shown in the respective line in column 5 of Table II or in column 8 of Table IV, application no. 3, respectively, and being depicted in the same respective line as said B4029, or a functional equivalent or a homolog thereof as depicted in column 8 of Table II, application no. 3, preferably a homolog or functional equivalent as depicted in column 8 of Table II B, application no. 3, and being depicted in the same respective line as said B4029, and preferably the activity is increased non-targeted.

[25683] Accordingly, in one embodiment, the molecule which activity is to be increased in the process of the invention is the gene product with an activity as a “b4029-protein”, preferably it is the molecule of section (a) or (b) of this paragraph.

[25684] In particular, it was observed that in plants, especially in Arabidopsis thaliana, increasing or generating the activity of a gene product non-targeted with the activity of a “b4029-protein”, preferably being encoded by a gene comprising the nucleic acid sequence SEQ ID NO. 10740, preferably the coding region thereof, conferred the production of or the increase in glycine compared with the wild type control.

[25685] The nucleic acid sequence of B4029 from Escherichia coli, e.g. as shown in the respective line in column 5 of Table I, application no. 3, has been published in B. And the activity of the gene product thereof is the activity of b4029-protein.

[25686] Accordingly, in one embodiment, the process of the present invention for producing phenylalanine in a non-human organism, like a microorganism or a plant or a part thereof, comprises increasing or generating the activity of a gene product with the activity of a gene product conferring the activity of “b4029-protein”, especially from Escherichia coli or its functional equivalent or its homolog, e.g. the increase of
[25687] (a) a gene product of a gene comprising the nucleic acid molecule as shown in the respective line in column 5 of Table I, application no. 3, preferably the coding region thereof, or a homolog or a fragment thereof, and being depicted in the same respective line as said B4029, or a functional equivalent or a homolog thereof as shown in column 8 of Table I, application no. 3, preferably the coding region thereof, particularly a homolog or functional equivalent as shown in column 8 of Table I B, application no. 3, and being depicted in the same respective line as said B4029, and preferably the activity is increased non-targeted, or
[25688] (b) a polypeptide comprising a polypeptide, a consensus sequence or at least a polypeptide motif as shown in the respective line in column 5 of Table II or in column 8 of Table IV, application no. 3, respectively, and being depicted in the same respective line as said B4029, or a functional equivalent or a homolog thereof as depicted in column 8 of Table II, application no. 3, preferably a homolog or functional equivalent as depicted in column 8 of Table II B, application no. 3, and being depicted in the same respective line as said B4029, and preferably the activity is increased non-targeted.

[25689] Accordingly, in one embodiment, the molecule which activity is to be increased in the process of the invention is the gene product with an activity as a “b4029-protein”, preferably it is the molecule of section (a) or (b) of this paragraph.

[25690] In particular, it was observed that in plants, especially in Arabidopsis thaliana, increasing or generating the activity of a gene product non-targeted with the activity of a “b4029-protein”, preferably being encoded by a gene comprising the nucleic acid sequence SEQ ID NO. 10740, preferably the coding region thereof, conferred the production of or the increase in phenylalanine compared with the wild type control.

[25691] The nucleic acid sequence of B4029 from Escherichia coli, e.g. as shown in the respective line in column 5 of Table I, application no. 3, has been published in B. And the activity of the gene product thereof is the activity of b4029-protein.

[25692] Accordingly, in one embodiment, the process of the present invention for producing serine in a non-human organism, like a microorganism or a plant or a part thereof, comprises increasing or generating the activity of a gene product with the activity of a gene product conferring the activity of “b4029-protein”, especially from Escherichia coli or its functional equivalent or its homolog, e.g. the increase of
[25693] (a) a gene product of a gene comprising the nucleic acid molecule as shown in the respective line in column 5 of Table I, application no. 3, preferably the coding region thereof, or a homolog or a fragment thereof, and being depicted in the same respective line as said B4029, or a functional equivalent or a homolog thereof as shown in column 8 of Table I, application no. 3, preferably the coding region thereof, particularly a homolog or functional equivalent as shown in column 8 of Table I B, application no. 3, and being depicted in the same respective line as said B4029, and preferably the activity is increased non-targeted, or
[25694] (b) a polypeptide comprising a polypeptide, a consensus sequence or at least a polypeptide motif as shown in the respective line in column 5 of Table II or in column 8 of Table IV, application no. 3, respectively, and being depicted in the same respective line as said B4029, or a functional equivalent or a homolog thereof as depicted in column 8 of Table II, application no. 3, preferably a homolog or functional equivalent as depicted in column 8 of Table II B, application no. 3, and being depicted in the same respective line as said B4029, and preferably the activity is increased non-targeted.

[25695] Accordingly, in one embodiment, the molecule which activity is to be increased in the process of the invention is the gene product with an activity as a “b4029-protein”, preferably it is the molecule of section (a) or (b) of this paragraph.

[25696] In particular, it was observed that in plants, especially in Arabidopsis thaliana, increasing or generating the activity of a gene product non-targeted with the activity of a “b4029-protein”, preferably being encoded by a gene comprising the nucleic acid sequence SEQ ID NO. 10740, preferably the coding region thereof, conferred the production of or the increase in serine compared with the wild type control.

[25697] The nucleic acid sequence of B4029 from Escherichia coli, e.g. as shown in the respective line in column 5 of Table I, application no. 3, has been published in B. And the activity of the gene product thereof is the activity of b4029-protein.

[25698] Accordingly, in one embodiment, the process of the present invention for producing tyrosine in a non-human organism, like a microorganism or a plant or a part thereof, comprises increasing or generating the activity of a gene product with the activity of a gene product conferring the activity of “b4029-protein”, especially from Escherichia coli or its functional equivalent or its homolog, e.g. the increase of
[25699] (a) a gene product of a gene comprising the nucleic acid molecule as shown in the respective line in column 5 of Table I, application no. 3, preferably the coding region thereof, or a homolog or a fragment thereof, and being depicted in the same respective line as said B4029, or a functional equivalent or a homolog thereof as shown in column 8 of Table I, application no. 3, preferably the coding region thereof, particularly a homolog or functional equivalent as shown in column 8 of Table I B, application no. 3, and being depicted in the same respective line as said B4029, and preferably the activity is increased non-targeted, or
[25700] (b) a polypeptide comprising a polypeptide, a consensus sequence or at least a polypeptide motif as shown in the respective line in column 5 of Table II or in column 8 of Table IV, application no. 3, respectively, and being depicted in the same respective line as said B4029, or a functional equivalent or a homolog thereof as depicted in column 8 of Table II, application no. 3, preferably a homolog or functional equivalent as depicted in column 8 of Table II B, application no. 3, and being depicted in the same respective line as said B4029, and preferably the activity is increased non-targeted.

[25701] Accordingly, in one embodiment, the molecule which activity is to be increased in the process of the invention is the gene product with an activity as a “b4029-protein”, preferably it is the molecule of section (a) or (b) of this paragraph.

[25702] In particular, it was observed that in plants, especially in Arabidopsis thaliana, increasing or generating the activity of a gene product non-targeted with the activity of a “b4029-protein”, preferably being encoded by a gene comprising the nucleic acid sequence SEQ ID NO. 10740, preferably the coding region thereof, conferred the production of or the increase in tyrosine compared with the wild type control.

[25703] The nucleic acid sequence of B4029 from Escherichia coli, e.g. as shown in the respective line in column 5 of Table I, application no. 3, has been published in B. And the activity of the gene product thereof is the activity of b4029-protein.

[25704] Accordingly, in one embodiment, the process of the present invention for producing 5-oxoproline in a non-human organism, like a microorganism or a plant or a part thereof, comprises increasing or generating the activity of a gene product with the activity of a gene product conferring the activity of “b4029-protein”, especially from Escherichia coli or its functional equivalent or its homolog, e.g. the increase of
[25705] (a) a gene product of a gene comprising the nucleic acid molecule as shown in the respective line in column 5 of Table I, application no. 3, preferably the coding region thereof, or a homolog or a fragment thereof, and being depicted in the same respective line as said B4029, or a functional equivalent or a homolog thereof as shown in column 8 of Table I, application no. 3, preferably the coding region thereof, particularly a homolog or functional equivalent as shown in column 8 of Table I B, application no. 3, and being depicted in the same respective line as said B4029, and preferably the activity is increased non-targeted, or
[25706] (b) a polypeptide comprising a polypeptide, a consensus sequence or at least a polypeptide motif as shown in the respective line in column 5 of Table II or in column 8 of Table IV, application no. 3, respectively, and being depicted in the same respective line as said B4029, or a functional equivalent or a homolog thereof as depicted in column 8 of Table II, application no. 3, preferably a homolog or functional equivalent as depicted in column 8 of Table II B, application no. 3, and being depicted in the same respective line as said B4029, and preferably the activity is increased non-targeted.

[25707] Accordingly, in one embodiment, the molecule which activity is to be increased in the process of the invention is the gene product with an activity as a “b4029-protein”, preferably it is the molecule of section (a) or (b) of this paragraph.

[25708] In particular, it was observed that in plants, especially in Arabidopsis thaliana, increasing or generating the activity of a gene product non-targeted with the activity of a “b4029-protein”, preferably being encoded by a gene comprising the nucleic acid sequence SEQ ID NO. 10740, preferably the coding region thereof, conferred the production of or the increase in 5-oxoproline compared with the wild type control.

[25709] The nucleic acid sequence of B4121 from Escherichia coli, e.g. as shown in the respective line in column 5 of Table I, application no. 3, has been published in B. And the activity of the gene product thereof is the activity of b4121-protein.

[25710] Accordingly, in one embodiment, the process of the present invention for producing serine in a non-human organism, like a microorganism or a plant or a part thereof, comprises increasing or generating the activity of a gene product with the activity of a gene product conferring the activity of “b4121-protein”, especially from Escherichia coli or its functional equivalent or its homolog, e.g. the increase of
[25711] (a) a gene product of a gene comprising the nucleic acid molecule as shown in the respective line in column 5 of Table I, application no. 3, preferably the coding region thereof, or a homolog or a fragment thereof, and being depicted in the same respective line as said B4121, or a functional equivalent or a homolog thereof as shown in column 8 of Table I, application no. 3, preferably the coding region thereof, particularly a homolog or functional equivalent as shown in column 8 of Table I B, application no. 3, and being depicted in the same respective line as said B4121, and preferably the activity is increased non-targeted, or
[25712] (b) a polypeptide comprising a polypeptide, a consensus sequence or at least a polypeptide motif as shown in the respective line in column 5 of Table II or in column 8 of Table IV, application no. 3, respectively, and being depicted in the same respective line as said B4121, or a functional equivalent or a homolog thereof as depicted in column 8 of Table II, application no. 3, preferably a homolog or functional equivalent as depicted in column 8 of Table II B, application no. 3, and being depicted in the same respective line as said B4121, and preferably the activity is increased non-targeted.

[25713] Accordingly, in one embodiment, the molecule which activity is to be increased in the process of the invention is the gene product with an activity as a “b4121-protein”, preferably it is the molecule of section (a) or (b) of this paragraph.

[25714] In particular, it was observed that in plants, especially in Arabidopsis thaliana, increasing or generating the activity of a gene product non-targeted with the activity of a “b4121-protein”, preferably being encoded by a gene comprising the nucleic acid sequence SEQ ID NO. 44609, preferably the coding region thereof, conferred the production of or the increase in serine compared with the wild type control.

[25715] The nucleic acid sequence of B4256 from Escherichia coli, e.g. as shown in the respective line in column 5 of Table I, application no. 3, has been published in B. And the activity of the gene product thereof is the activity of acetyltransferase.

[25716] Accordingly, in one embodiment, the process of the present invention for producing aspartate in a non-human organism, like a microorganism or a plant or a part thereof, comprises increasing or generating the activity of a gene product with the activity of a gene product conferring the activity of “acetyltransferase”, especially from Escherichia coli or its functional equivalent or its homolog, e.g. the increase of
[25717] (a) a gene product of a gene comprising the nucleic acid molecule as shown in the respective line in column 5 of Table I, application no. 3, preferably the coding region thereof, or a homolog or a fragment thereof, and being depicted in the same respective line as said B4256, or a functional equivalent or a homolog thereof as shown in column 8 of Table I, application no. 3, preferably the coding region thereof, particularly a homolog or functional equivalent as shown in column 8 of Table I B, application no. 3, and being depicted in the same respective line as said B4256, and preferably the activity is increased non-targeted, or
[25718] (b) a polypeptide comprising a polypeptide, a consensus sequence or at least a polypeptide motif as shown in the respective line in column 5 of Table II or in column 8 of Table IV, application no. 3, respectively, and being depicted in the same respective line as said B4256, or a functional equivalent or a homolog thereof as depicted in column 8 of Table II, application no. 3, preferably a homolog or functional equivalent as depicted in column 8 of Table II B, application no. 3, and being depicted in the same respective line as said B4256, and preferably the activity is increased non-targeted.

[25719] Accordingly, in one embodiment, the molecule which activity is to be increased in the process of the invention is the gene product with an activity as a “acetyltransferase”, preferably it is the molecule of section (a) or (b) of this paragraph.

[25720] In particular, it was observed that in plants, especially in Arabidopsis thaliana, increasing or generating the activity of a gene product non-targeted with the activity of a “acetyltransferase”, preferably being encoded by a gene comprising the nucleic acid sequence SEQ ID NO. 45321, preferably the coding region thereof, conferred the production of or the increase in aspartate compared with the wild type control.

[25721] The nucleic acid sequence of B4256 from Escherichia coli, e.g. as shown in the respective line in column 5 of Table I, application no. 3, has been published in B. And the activity of the gene product thereof is the activity of acetyltransferase.

[25722] Accordingly, in one embodiment, the process of the present invention for producing phenylalanine in a non-human organism, like a microorganism or a plant or a part thereof, comprises increasing or generating the activity of a gene product with the activity of a gene product conferring the activity of “acetyltransferase”, especially from Escherichia coli or its functional equivalent or its homolog, e.g. the increase of
[25723] (a) a gene product of a gene comprising the nucleic acid molecule as shown in the respective line in column 5 of Table I, application no. 3, preferably the coding region thereof, or a homolog or a fragment thereof, and being depicted in the same respective line as said B4256, or a functional equivalent or a homolog thereof as shown in column 8 of Table I, application no. 3, preferably the coding region thereof, particularly a homolog or functional equivalent as shown in column 8 of Table I B, application no. 3, and being depicted in the same respective line as said B4256, and preferably the activity is increased non-targeted, or
[25724] (b) a polypeptide comprising a polypeptide, a consensus sequence or at least a polypeptide motif as shown in the respective line in column 5 of Table II or in column 8 of Table IV, application no. 3, respectively, and being depicted in the same respective line as said B4256, or a functional equivalent or a homolog thereof as depicted in column 8 of Table II, application no. 3, preferably a homolog or functional equivalent as depicted in column 8 of Table II B, application no. 3, and being depicted in the same respective line as said B4256, and preferably the activity is increased non-targeted.

[25725] Accordingly, in one embodiment, the molecule which activity is to be increased in the process of the invention is the gene product with an activity as a “acetyltransferase”, preferably it is the molecule of section (a) or (b) of this paragraph.

[25726] In particular, it was observed that in plants, especially in Arabidopsis thaliana, increasing or generating the activity of a gene product non-targeted with the activity of a “acetyltransferase”, preferably being encoded by a gene comprising the nucleic acid sequence SEQ ID NO. 45321, preferably the coding region thereof, conferred the production of or the increase in phenylalanine compared with the wild type control.

[25727] The nucleic acid sequence of B4256 from Escherichia coli, e.g. as shown in the respective line in column 5 of Table I, application no. 3, has been published in B. And the activity of the gene product thereof is the activity of acetyltransferase.

[25728] Accordingly, in one embodiment, the process of the present invention for producing serine in a non-human organism, like a microorganism or a plant or a part thereof, comprises increasing or generating the activity of a gene product with the activity of a gene product conferring the activity of “acetyltransferase”, especially from Escherichia coli or its functional equivalent or its homolog, e.g. the increase of
[25729] (a) a gene product of a gene comprising the nucleic acid molecule as shown in the respective line in column 5 of Table I, application no. 3, preferably the coding region thereof, or a homolog or a fragment thereof, and being depicted in the same respective line as said B4256, or a functional equivalent or a homolog thereof as shown in column 8 of Table I, application no. 3, preferably the coding region thereof, particularly a homolog or functional equivalent as shown in column 8 of Table I B, application no. 3, and being depicted in the same respective line as said B4256, and preferably the activity is increased non-targeted, or
[25730] (b) a polypeptide comprising a polypeptide, a consensus sequence or at least a polypeptide motif as shown in the respective line in column 5 of Table II or in column 8 of Table IV, application no. 3, respectively, and being depicted in the same respective line as said B4256, or a functional equivalent or a homolog thereof as depicted in column 8 of Table II, application no. 3, preferably a homolog or functional equivalent as depicted in column 8 of Table II B, application no. 3, and being depicted in the same respective line as said B4256, and preferably the activity is increased non-targeted.

[25731] Accordingly, in one embodiment, the molecule which activity is to be increased in the process of the invention is the gene product with an activity as a “acetyltransferase”, preferably it is the molecule of section (a) or (b) of this paragraph.

[25732] In particular, it was observed that in plants, especially in Arabidopsis thaliana, increasing or generating the activity of a gene product non-targeted with the activity of a “acetyltransferase”, preferably being encoded by a gene comprising the nucleic acid sequence SEQ ID NO. 45321, preferably the coding region thereof, conferred the production of or the increase in serine compared with the wild type control.

[25733] The nucleic acid sequence of B4256 from Escherichia coli, e.g. as shown in the respective line in column 5 of Table I, application no. 3, has been published in B. And the activity of the gene product thereof is the activity of acetyltransferase.

[25734] Accordingly, in one embodiment, the process of the present invention for producing tyrosine in a non-human organism, like a microorganism or a plant or a part thereof, comprises increasing or generating the activity of a gene product with the activity of a gene product conferring the activity of “acetyltransferase”, especially from Escherichia coli or its functional equivalent or its homolog, e.g. the increase of
[25735] (a) a gene product of a gene comprising the nucleic acid molecule as shown in the respective line in column 5 of Table I, application no. 3, preferably the coding region thereof, or a homolog or a fragment thereof, and being depicted in the same respective line as said B4256, or a functional equivalent or a homolog thereof as shown in column 8 of Table I, application no. 3, preferably the coding region thereof, particularly a homolog or functional equivalent as shown in column 8 of Table I B, application no. 3, and being depicted in the same respective line as said B4256, and preferably the activity is increased non-targeted, or
[25736] (b) a polypeptide comprising a polypeptide, a consensus sequence or at least a polypeptide motif as shown in the respective line in column 5 of Table II or in column 8 of Table IV, application no. 3, respectively, and being depicted in the same respective line as said B4256, or a functional equivalent or a homolog thereof as depicted in column 8 of Table II, application no. 3, preferably a homolog or functional equivalent as depicted in column 8 of Table II B, application no. 3, and being depicted in the same respective line as said B4256, and preferably the activity is increased non-targeted.

[25737] Accordingly, in one embodiment, the molecule which activity is to be increased in the process of the invention is the gene product with an activity as a “acetyltransferase”, preferably it is the molecule of section (a) or (b) of this paragraph.

[25738] In particular, it was observed that in plants, especially in Arabidopsis thaliana, increasing or generating the activity of a gene product non-targeted with the activity of a “acetyltransferase”, preferably being encoded by a gene comprising the nucleic acid sequence SEQ ID NO. 45321, preferably the coding region thereof, conferred the production of or the increase in tyrosine compared with the wild type control.

[25739] The nucleic acid sequence of C_pp004096192r from Physcomitrella patens, e.g. as shown in the respective line in column 5 of Table I, application no. 3, is unpublished. And the activity of the gene product thereof is the activity of thioredoxin.

[25740] Accordingly, in one embodiment, the process of the present invention for producing serine in a non-human organism, like a microorganism or a plant or a part thereof, comprises increasing or generating the activity of a gene product with the activity of a gene product conferring the activity of “thioredoxin”, especially from Physcomitrella patens or its functional equivalent or its homolog, e.g. the increase of
[25741] (a) a gene product of a gene comprising the nucleic acid molecule as shown in the respective line in column 5 of Table I, application no. 3, preferably the coding region thereof, or a homolog or a fragment thereof, and being depicted in the same respective line as said C_pp004096192r, or a functional equivalent or a homolog thereof as shown in column 8 of Table I, application no. 3, preferably the coding region thereof, particularly a homolog or functional equivalent as shown in column 8 of Table I B, application no. 3, and being depicted in the same respective line as said C_pp004096192r, and preferably the activity is increased non-targeted, or
[25742] (b) a polypeptide comprising a polypeptide, a consensus sequence or at least a polypeptide motif as shown in the respective line in column 5 of Table II or in column 8 of Table IV, application no. 3, respectively, and being depicted in the same respective line as said C_pp004096192r, or a functional equivalent or a homolog thereof as depicted in column 8 of Table II, application no. 3, preferably a homolog or functional equivalent as depicted in column 8 of Table II B, application no. 3, and being depicted in the same respective line as said C_pp004096192r, and preferably the activity is increased non-targeted.

[25743] Accordingly, in one embodiment, the molecule which activity is to be increased in the process of the invention is the gene product with an activity as a “thioredoxin”, preferably it is the molecule of section (a) or (b) of this paragraph.

[25744] In particular, it was observed that in plants, especially in Arabidopsis thaliana, increasing or generating the activity of a gene product non-targeted with the activity of a “thioredoxin”, preferably being encoded by a gene comprising the nucleic acid sequence SEQ ID NO. 45757, preferably the coding region thereof, conferred the production of or the increase in serine compared with the wild type control.

[25745] The nucleic acid sequence of D90900 from Synechocystis sp., e.g. as shown in the respective line in column 5 of Table I, application no. 3, has been published in C. And the activity of the gene product thereof is the activity of lysine decarboxylase.

[25746] Accordingly, in one embodiment, the process of the present invention for producing alanine in a non-human organism, like a microorganism or a plant or a part thereof, comprises increasing or generating the activity of a gene product with the activity of a gene product conferring the activity of “lysine decarboxylase”, especially from Synechocystis sp. or its functional equivalent or its homolog, e.g. the increase of
[25747] (a) a gene product of a gene comprising the nucleic acid molecule as shown in the respective line in column 5 of Table I, application no. 3, preferably the coding region thereof, or a homolog or a fragment thereof, and being depicted in the same respective line as said D90900, or a functional equivalent or a homolog thereof as shown in column 8 of Table I, application no. 3, preferably the coding region thereof, particularly a homolog or functional equivalent as shown in column 8 of Table I B, application no. 3, and being depicted in the same respective line as said D90900, and preferably the activity is increased plastidic, or
[25748] (b) a polypeptide comprising a polypeptide, a consensus sequence or at least a polypeptide motif as shown in the respective line in column 5 of Table II or in column 8 of Table IV, application no. 3, respectively, and being depicted in the same respective line as said D90900, or a functional equivalent or a homolog thereof as depicted in column 8 of Table II, application no. 3, preferably a homolog or functional equivalent as depicted in column 8 of Table II B, application no. 3, and being depicted in the same respective line as said D90900, and preferably the activity is increased plastidic.

[25749] Accordingly, in one embodiment, the molecule which activity is to be increased in the process of the invention is the gene product with an activity as a “lysine decarboxylase”, preferably it is the molecule of section (a) or (b) of this paragraph.

[25750] In particular, it was observed that in plants, especially in Arabidopsis thaliana, increasing or generating the activity of a gene product plastidic with the activity of a “lysine decarboxylase”, preferably being encoded by a gene comprising the nucleic acid sequence SEQ ID NO. 84079, preferably the coding region thereof, conferred the production of or the increase in alanine compared with the wild type control.

[25751] The nucleic acid sequence of GM02LC11114 from Glycine max, e.g. as shown in the respective line in column 5 of Table I, application no. 3, is unpublished. And the activity of the gene product thereof is the activity of GM02LC11114-protein.

[25752] Accordingly, in one embodiment, the process of the present invention for producing asparagine in a non-human organism, like a microorganism or a plant or a part thereof, comprises increasing or generating the activity of a gene product with the activity of a gene product conferring the activity of “GM02LC11114-protein”, especially from Glycine max or its functional equivalent or its homolog, e.g. the increase of
[25753] (a) a gene product of a gene comprising the nucleic acid molecule as shown in the respective line in column 5 of Table I, application no. 3, preferably the coding region thereof, or a homolog or a fragment thereof, and being depicted in the same respective line as said GM02LC11114, or a functional equivalent or a homolog thereof as shown in column 8 of Table I, application no. 3, preferably the coding region thereof, particularly a homolog or functional equivalent as shown in column 8 of Table I B, application no. 3, and being depicted in the same respective line as said GM02LC11114, and preferably the activity is increased non-targeted, or
[25754] (b) a polypeptide comprising a polypeptide, a consensus sequence or at least a polypeptide motif as shown in the respective line in column 5 of Table II or in column 8 of Table IV, application no. 3, respectively, and being depicted in the same respective line as said GM02LC11114, or a functional equivalent or a homolog thereof as depicted in column 8 of Table II, application no. 3, preferably a homolog or functional equivalent as depicted in column 8 of Table II B, application no. 3, and being depicted in the same respective line as said GM02LC11114, and preferably the activity is increased non-targeted.

[25755] Accordingly, in one embodiment, the molecule which activity is to be increased in the process of the invention is the gene product with an activity as a “GM02LC11114-protein”, preferably it is the molecule of section (a) or (b) of this paragraph.

[25756] In particular, it was observed that in plants, especially in Arabidopsis thaliana, increasing or generating the activity of a gene product non-targeted with the activity of a “GM02LC11114-protein”, preferably being encoded by a gene comprising the nucleic acid sequence SEQ ID NO. 45795, preferably the coding region thereof, conferred the production of or the increase in asparagine compared with the wild type control.

[25757] The nucleic acid sequence of GM02LC11114 from Glycine max, e.g. as shown in the respective line in column 5 of Table I, application no. 3, is unpublished. And the activity of the gene product thereof is the activity of GM02LC11114-protein.

[25758] Accordingly, in one embodiment, the process of the present invention for producing phenylalanine in a non-human organism, like a microorganism or a plant or a part thereof, comprises increasing or generating the activity of a gene product with the activity of a gene product conferring the activity of “GM02LC11114-protein”, especially from Glycine max or its functional equivalent or its homolog, e.g. the increase of
[25759] (a) a gene product of a gene comprising the nucleic acid molecule as shown in the respective line in column 5 of Table I, application no. 3, preferably the coding region thereof, or a homolog or a fragment thereof, and being depicted in the same respective line as said GM02LC11114, or a functional equivalent or a homolog thereof as shown in column 8 of Table I, application no. 3, preferably the coding region thereof, particularly a homolog or functional equivalent as shown in column 8 of Table I B, application no. 3, and being depicted in the same respective line as said GM02LC11114, and preferably the activity is increased non-targeted, or
[25760] (b) a polypeptide comprising a polypeptide, a consensus sequence or at least a polypeptide motif as shown in the respective line in column 5 of Table II or in column 8 of Table IV, application no. 3, respectively, and being depicted in the same respective line as said GM02LC11114, or a functional equivalent or a homolog thereof as depicted in column 8 of Table II, application no. 3, preferably a homolog or functional equivalent as depicted in column 8 of Table II B, application no. 3, and being depicted in the same respective line as said GM02LC11114, and preferably the activity is increased non-targeted.

[25761] Accordingly, in one embodiment, the molecule which activity is to be increased in the process of the invention is the gene product with an activity as a “GM02LC11114-protein”, preferably it is the molecule of section (a) or (b) of this paragraph.

[25762] In particular, it was observed that in plants, especially in Arabidopsis thaliana, increasing or generating the activity of a gene product non-targeted with the activity of a “GM02LC11114-protein”, preferably being encoded by a gene comprising the nucleic acid sequence SEQ ID NO. 45795, preferably the coding region thereof, conferred the production of or the increase in phenylalanine compared with the wild type control.

[25763] The nucleic acid sequence of GM02LC12622 from Glycine max, e.g. as shown in the respective line in column 5 of Table I, application no. 3, is unpublished. And the activity of the gene product thereof is the activity of glutaredoxin.

[25764] Accordingly, in one embodiment, the process of the present invention for producing alanine in a non-human organism, like a microorganism or a plant or a part thereof, comprises increasing or generating the activity of a gene product with the activity of a gene product conferring the activity of “glutaredoxin”, especially from Glycine max or its functional equivalent or its homolog, e.g. the increase of
[25765] (a) a gene product of a gene comprising the nucleic acid molecule as shown in the respective line in column 5 of Table I, application no. 3, preferably the coding region thereof, or a homolog or a fragment thereof, and being depicted in the same respective line as said GM02LC12622, or a functional equivalent or a homolog thereof as shown in column 8 of Table I, application no. 3, preferably the coding region thereof, particularly a homolog or functional equivalent as shown in column 8 of Table I B, application no. 3, and being depicted in the same respective line as said GM02LC12622, and preferably the activity is increased non-targeted, or
[25766] (b) a polypeptide comprising a polypeptide, a consensus sequence or at least a polypeptide motif as shown in the respective line in column 5 of Table II or in column 8 of Table IV, application no. 3, respectively, and being depicted in the same respective line as said GM02LC12622, or a functional equivalent or a homolog thereof as depicted in column 8 of Table II, application no. 3, preferably a homolog or functional equivalent as depicted in column 8 of Table II B, application no. 3, and being depicted in the same respective line as said GM02LC12622, and preferably the activity is increased non-targeted.

[25767] Accordingly, in one embodiment, the molecule which activity is to be increased in the process of the invention is the gene product with an activity as a “glutaredoxin”, preferably it is the molecule of section (a) or (b) of this paragraph.

[25768] In particular, it was observed that in plants, especially in Arabidopsis thaliana, increasing or generating the activity of a gene product non-targeted with the activity of a “glutaredoxin”, preferably being encoded by a gene comprising the nucleic acid sequence SEQ ID NO. 10811, preferably the coding region thereof, conferred the production of or the increase in alanine compared with the wild type control.

[25769] The nucleic acid sequence of GM02LC12622 from Glycine max, e.g. as shown in the respective line in column 5 of Table I, application no. 3, is unpublished. And the activity of the gene product thereof is the activity of glutaredoxin.

[25770] Accordingly, in one embodiment, the process of the present invention for producing phenylalanine in a non-human organism, like a microorganism or a plant or a part thereof, comprises increasing or generating the activity of a gene product with the activity of a gene product conferring the activity of “glutaredoxin”, especially from Glycine max or its functional equivalent or its homolog, e.g. the increase of
[25771] (a) a gene product of a gene comprising the nucleic acid molecule as shown in the respective line in column 5 of Table I, application no. 3, preferably the coding region thereof, or a homolog or a fragment thereof, and being depicted in the same respective line as said GM02LC12622, or a functional equivalent or a homolog thereof as shown in column 8 of Table I, application no. 3, preferably the coding region thereof, particularly a homolog or functional equivalent as shown in column 8 of Table I B, application no. 3, and being depicted in the same respective line as said GM02LC12622, and preferably the activity is increased non-targeted, or
[25772] (b) a polypeptide comprising a polypeptide, a consensus sequence or at least a polypeptide motif as shown in the respective line in column 5 of Table II or in column 8 of Table IV, application no. 3, respectively, and being depicted in the same respective line as said GM02LC12622, or a functional equivalent or a homolog thereof as depicted in column 8 of Table II, application no. 3, preferably a homolog or functional equivalent as depicted in column 8 of Table II B, application no. 3, and being depicted in the same respective line as said GM02LC12622, and preferably the activity is increased non-targeted.

[25773] Accordingly, in one embodiment, the molecule which activity is to be increased in the process of the invention is the gene product with an activity as a “glutaredoxin”, preferably it is the molecule of section (a) or (b) of this paragraph.

[25774] In particular, it was observed that in plants, especially in Arabidopsis thaliana, increasing or generating the activity of a gene product non-targeted with the activity of a “glutaredoxin”, preferably being encoded by a gene comprising the nucleic acid sequence SEQ ID NO. 10811, preferably the coding region thereof, conferred the production of or the increase in phenylalanine compared with the wild type control.

[25775] The nucleic acid sequence of GM02LC12622 from Glycine max, e.g. as shown in the respective line in column 5 of Table I, application no. 3, is unpublished. And the activity of the gene product thereof is the activity of glutaredoxin.

[25776] Accordingly, in one embodiment, the process of the present invention for producing tyrosine in a non-human organism, like a microorganism or a plant or a part thereof, comprises increasing or generating the activity of a gene product with the activity of a gene product conferring the activity of “glutaredoxin”, especially from Glycine max or its functional equivalent or its homolog, e.g. the increase of
[25777] (a) a gene product of a gene comprising the nucleic acid molecule as shown in the respective line in column 5 of Table I, application no. 3, preferably the coding region thereof, or a homolog or a fragment thereof, and being depicted in the same respective line as said GM02LC12622, or a functional equivalent or a homolog thereof as shown in column 8 of Table I, application no. 3, preferably the coding region thereof, particularly a homolog or functional equivalent as shown in column 8 of Table I B, application no. 3, and being depicted in the same respective line as said GM02LC12622, and preferably the activity is increased non-targeted, or
[25778] (b) a polypeptide comprising a polypeptide, a consensus sequence or at least a polypeptide motif as shown in the respective line in column 5 of Table II or in column 8 of Table IV, application no. 3, respectively, and being depicted in the same respective line as said GM02LC12622, or a functional equivalent or a homolog thereof as depicted in column 8 of Table II, application no. 3, preferably a homolog or functional equivalent as depicted in column 8 of Table II B, application no. 3, and being depicted in the same respective line as said GM02LC12622, and preferably the activity is increased non-targeted.

[25779] Accordingly, in one embodiment, the molecule which activity is to be increased in the process of the invention is the gene product with an activity as a “glutaredoxin”, preferably it is the molecule of section (a) or (b) of this paragraph.

[25780] In particular, it was observed that in plants, especially in Arabidopsis thaliana, increasing or generating the activity of a gene product non-targeted with the activity of a “glutaredoxin”, preferably being encoded by a gene comprising the nucleic acid sequence SEQ ID NO. 10811, preferably the coding region thereof, conferred the production of or the increase in tyrosine compared with the wild type control.

[25781] The nucleic acid sequence of GM02LC15313 from Glycine max, e.g. as shown in the respective line in column 5 of Table I, application no. 3, is unpublished. And the activity of the gene product thereof is the activity of histone H2A.

[25782] Accordingly, in one embodiment, the process of the present invention for producing phenylalanine in a non-human organism, like a microorganism or a plant or a part thereof, comprises increasing or generating the activity of a gene product with the activity of a gene product conferring the activity of “histone H2A”, especially from Glycine max or its functional equivalent or its homolog, e.g. the increase of
[25783] (a) a gene product of a gene comprising the nucleic acid molecule as shown in the respective line in column 5 of Table I, application no. 3, preferably the coding region thereof, or a homolog or a fragment thereof, and being depicted in the same respective line as said GM02LC15313, or a functional equivalent or a homolog thereof as shown in column 8 of Table I, application no. 3, preferably the coding region thereof, particularly a homolog or functional equivalent as shown in column 8 of Table I B, application no. 3, and being depicted in the same respective line as said GM02LC15313, and preferably the activity is increased non-targeted, or
[25784] (b) a polypeptide comprising a polypeptide, a consensus sequence or at least a polypeptide motif as shown in the respective line in column 5 of Table II or in column 8 of Table IV, application no. 3, respectively, and being depicted in the same respective line as said GM02LC15313, or a functional equivalent or a homolog thereof as depicted in column 8 of Table II, application no. 3, preferably a homolog or functional equivalent as depicted in column 8 of Table II B, application no. 3, and being depicted in the same respective line as said GM02LC15313, and preferably the activity is increased non-targeted.

[25785] Accordingly, in one embodiment, the molecule which activity is to be increased in the process of the invention is the gene product with an activity as a “histone H2A”, preferably it is the molecule of section (a) or (b) of this paragraph.

[25786] In particular, it was observed that in plants, especially in Arabidopsis thaliana, increasing or generating the activity of a gene product non-targeted with the activity of a “histone H2A”, preferably being encoded by a gene comprising the nucleic acid sequence SEQ ID NO. 45897, preferably the coding region thereof, conferred the production of or the increase in phenylalanine compared with the wild type control.

[25787] The nucleic acid sequence of GM02LC15313 from Glycine max, e.g. as shown in the respective line in column 5 of Table I, application no. 3, is unpublished. And the activity of the gene product thereof is the activity of histone H2A.

[25788] Accordingly, in one embodiment, the process of the present invention for producing tyrosine in a non-human organism, like a microorganism or a plant or a part thereof, comprises increasing or generating the activity of a gene product with the activity of a gene product conferring the activity of “histone H2A”, especially from Glycine max or its functional equivalent or its homolog, e.g. the increase of
[25789] (a) a gene product of a gene comprising the nucleic acid molecule as shown in the respective line in column 5 of Table I, application no. 3, preferably the coding region thereof, or a homolog or a fragment thereof, and being depicted in the same respective line as said GM02LC15313, or a functional equivalent or a homolog thereof as shown in column 8 of Table I, application no. 3, preferably the coding region thereof, particularly a homolog or functional equivalent as shown in column 8 of Table I B, application no. 3, and being depicted in the same respective line as said GM02LC15313, and preferably the activity is increased non-targeted, or
[25790] (b) a polypeptide comprising a polypeptide, a consensus sequence or at least a polypeptide motif as shown in the respective line in column 5 of Table II or in column 8 of Table IV, application no. 3, respectively, and being depicted in the same respective line as said GM02LC15313, or a functional equivalent or a homolog thereof as depicted in column 8 of Table II, application no. 3, preferably a homolog or functional equivalent as depicted in column 8 of Table II B, application no. 3, and being depicted in the same respective line as said GM02LC15313, and preferably the activity is increased non-targeted.

[25791] Accordingly, in one embodiment, the molecule which activity is to be increased in the process of the invention is the gene product with an activity as a “histone H2A”, preferably it is the molecule of section (a) or (b) of this paragraph.

[25792] In particular, it was observed that in plants, especially in Arabidopsis thaliana, increasing or generating the activity of a gene product non-targeted with the activity of a “histone H2A”, preferably being encoded by a gene comprising the nucleic acid sequence SEQ ID NO. 45897, preferably the coding region thereof, conferred the production of or the increase in tyrosine compared with the wild type control.

[25793] The nucleic acid sequence of GM02LC17485 from Glycine max, e.g. as shown in the respective line in column 5 of Table I, application no. 3, is unpublished. And the activity of the gene product thereof is the activity of GM02LC17485-protein.

[25794] Accordingly, in one embodiment, the process of the present invention for producing aspartate in a non-human organism, like a microorganism or a plant or a part thereof, comprises increasing or generating the activity of a gene product with the activity of a gene product conferring the activity of “GM02LC17485-protein”, especially from Glycine max or its functional equivalent or its homolog, e.g. the increase of
[25795] (a) a gene product of a gene comprising the nucleic acid molecule as shown in the respective line in column 5 of Table I, application no. 3, preferably the coding region thereof, or a homolog or a fragment thereof, and being depicted in the same respective line as said GM02LC17485, or a functional equivalent or a homolog thereof as shown in column 8 of Table I, application no. 3, preferably the coding region thereof, particularly a homolog or functional equivalent as shown in column 8 of Table I B, application no. 3, and being depicted in the same respective line as said GM02LC17485, and preferably the activity is increased non-targeted, or
[25796] (b) a polypeptide comprising a polypeptide, a consensus sequence or at least a polypeptide motif as shown in the respective line in column 5 of Table II or in column 8 of Table IV, application no. 3, respectively, and being depicted in the same respective line as said GM02LC17485, or a functional equivalent or a homolog thereof as depicted in column 8 of Table II, application no. 3, preferably a homolog or functional equivalent as depicted in column 8 of Table II B, application no. 3, and being depicted in the same respective line as said GM02LC17485, and preferably the activity is increased non-targeted.

[25797] Accordingly, in one embodiment, the molecule which activity is to be increased in the process of the invention is the gene product with an activity as a “GM02LC17485-protein”, preferably it is the molecule of section (a) or (b) of this paragraph.

[25798] In particular, it was observed that in plants, especially in Arabidopsis thaliana, increasing or generating the activity of a gene product non-targeted with the activity of a “GM02LC17485-protein”, preferably being encoded by a gene comprising the nucleic acid sequence SEQ ID NO. 46405, preferably the coding region thereof, conferred the production of or the increase in aspartate compared with the wild type control.

[25799] The nucleic acid sequence of GM02LC17556 from Glycine max, e.g. as shown in the respective line in column 5 of Table I, application no. 3, is unpublished. And the activity of the gene product thereof is the activity of RNA binding protein.

[25800] Accordingly, in one embodiment, the process of the present invention for producing phenylalanine in a non-human organism, like a microorganism or a plant or a part thereof, comprises increasing or generating the activity of a gene product with the activity of a gene product conferring the activity of “RNA binding protein”, especially from Glycine max or its functional equivalent or its homolog, e.g. the increase of
[25801] (a) a gene product of a gene comprising the nucleic acid molecule as shown in the respective line in column 5 of Table I, application no. 3, preferably the coding region thereof, or a homolog or a fragment thereof, and being depicted in the same respective line as said GM02LC17556, or a functional equivalent or a homolog thereof as shown in column 8 of Table I, application no. 3, preferably the coding region thereof, particularly a homolog or functional equivalent as shown in column 8 of Table I B, application no. 3, and being depicted in the same respective line as said GM02LC17556, and preferably the activity is increased non-targeted, or
[25802] (b) a polypeptide comprising a polypeptide, a consensus sequence or at least a polypeptide motif as shown in the respective line in column 5 of Table II or in column 8 of Table IV, application no. 3, respectively, and being depicted in the same respective line as said GM02LC17556, or a functional equivalent or a homolog thereof as depicted in column 8 of Table II, application no. 3, preferably a homolog or functional equivalent as depicted in column 8 of Table II B, application no. 3, and being depicted in the same respective line as said GM02LC17556, and preferably the activity is increased non-targeted.

[25803] Accordingly, in one embodiment, the molecule which activity is to be increased in the process of the invention is the gene product with an activity as a “RNA binding protein”, preferably it is the molecule of section (a) or (b) of this paragraph.

[25804] In particular, it was observed that in plants, especially in Arabidopsis thaliana, increasing or generating the activity of a gene product non-targeted with the activity of a “RNA binding protein”, preferably being encoded by a gene comprising the nucleic acid sequence SEQ ID NO. 46515, preferably the coding region thereof, conferred the production of or the increase in phenylalanine compared with the wild type control.

[25805] The nucleic acid sequence of GM02LC17556 from Glycine max, e.g. as shown in the respective line in column 5 of Table I, application no. 3, is unpublished. And the activity of the gene product thereof is the activity of RNA binding protein.

[25806] Accordingly, in one embodiment, the process of the present invention for producing tyrosine in a non-human organism, like a microorganism or a plant or a part thereof, comprises increasing or generating the activity of a gene product with the activity of a gene product conferring the activity of “RNA binding protein”, especially from Glycine max or its functional equivalent or its homolog, e.g. the increase of
[25807] (a) a gene product of a gene comprising the nucleic acid molecule as shown in the respective line in column 5 of Table I, application no. 3, preferably the coding region thereof, or a homolog or a fragment thereof, and being depicted in the same respective line as said GM02LC17556, or a functional equivalent or a homolog thereof as shown in column 8 of Table I, application no. 3, preferably the coding region thereof, particularly a homolog or functional equivalent as shown in column 8 of Table I B, application no. 3, and being depicted in the same respective line as said GM02LC17556, and preferably the activity is increased non-targeted, or
[25808] (b) a polypeptide comprising a polypeptide, a consensus sequence or at least a polypeptide motif as shown in the respective line in column 5 of Table II or in column 8 of Table IV, application no. 3, respectively, and being depicted in the same respective line as said GM02LC17556, or a functional equivalent or a homolog thereof as depicted in column 8 of Table II, application no. 3, preferably a homolog or functional equivalent as depicted in column 8 of Table II B, application no. 3, and being depicted in the same respective line as said GM02LC17556, and preferably the activity is increased non-targeted.

[25809] Accordingly, in one embodiment, the molecule which activity is to be increased in the process of the invention is the gene product with an activity as a “RNA binding protein”, preferably it is the molecule of section (a) or (b) of this paragraph.

[25810] In particular, it was observed that in plants, especially in Arabidopsis thaliana, increasing or generating the activity of a gene product non-targeted with the activity of a “RNA binding protein”, preferably being encoded by a gene comprising the nucleic acid sequence SEQ ID NO. 46515, preferably the coding region thereof, conferred the production of or the increase in tyrosine compared with the wild type control.

[25811] The nucleic acid sequence of GM02LC21368 from Glycine max, e.g. as shown in the respective line in column 5 of Table I, application no. 3, is unpublished. And the activity of the gene product thereof is the activity of transcription factor.

[25812] Accordingly, in one embodiment, the process of the present invention for producing phenylalanine in a non-human organism, like a microorganism or a plant or a part thereof, comprises increasing or generating the activity of a gene product with the activity of a gene product conferring the activity of “transcription factor”, especially from Glycine max or its functional equivalent or its homolog, e.g. the increase of
[25813] (a) a gene product of a gene comprising the nucleic acid molecule as shown in the respective line in column 5 of Table I, application no. 3, preferably the coding region thereof, or a homolog or a fragment thereof, and being depicted in the same respective line as said GM02LC21368, or a functional equivalent or a homolog thereof as shown in column 8 of Table I, application no. 3, preferably the coding region thereof, particularly a homolog or functional equivalent as shown in column 8 of Table I B, application no. 3, and being depicted in the same respective line as said GM02LC21368, and preferably the activity is increased non-targeted, or
[25814] (b) a polypeptide comprising a polypeptide, a consensus sequence or at least a polypeptide motif as shown in the respective line in column 5 of Table II or in column 8 of Table IV, application no. 3, respectively, and being depicted in the same respective line as said GM02LC21368, or a functional equivalent or a homolog thereof as depicted in column 8 of Table II, application no. 3, preferably a homolog or functional equivalent as depicted in column 8 of Table II B, application no. 3, and being depicted in the same respective line as said GM02LC21368, and preferably the activity is increased non-targeted.

[25815] Accordingly, in one embodiment, the molecule which activity is to be increased in the process of the invention is the gene product with an activity as a “transcription factor”, preferably it is the molecule of section (a) or (b) of this paragraph.

[25816] In particular, it was observed that in plants, especially in Arabidopsis thaliana, increasing or generating the activity of a gene product non-targeted with the activity of a “transcription factor”, preferably being encoded by a gene comprising the nucleic acid sequence SEQ ID NO. 84198, preferably the coding region thereof, conferred the production of or the increase in phenylalanine compared with the wild type control.

[25817] The nucleic acid sequence of GM02LC21368 from Glycine max, e.g. as shown in the respective line in column 5 of Table I, application no. 3, is unpublished. And the activity of the gene product thereof is the activity of transcription factor.

[25818] Accordingly, in one embodiment, the process of the present invention for producing serine in a non-human organism, like a microorganism or a plant or a part thereof, comprises increasing or generating the activity of a gene product with the activity of a gene product conferring the activity of “transcription factor”, especially from Glycine max or its functional equivalent or its homolog, e.g. the increase of
[25819] (a) a gene product of a gene comprising the nucleic acid molecule as shown in the respective line in column 5 of Table I, application no. 3, preferably the coding region thereof, or a homolog or a fragment thereof, and being depicted in the same respective line as said GM02LC21368, or a functional equivalent or a homolog thereof as shown in column 8 of Table I, application no. 3, preferably the coding region thereof, particularly a homolog or functional equivalent as shown in column 8 of Table I B, application no. 3, and being depicted in the same respective line as said GM02LC21368, and preferably the activity is increased non-targeted, or
[25820] (b) a polypeptide comprising a polypeptide, a consensus sequence or at least a polypeptide motif as shown in the respective line in column 5 of Table II or in column 8 of Table IV, application no. 3, respectively, and being depicted in the same respective line as said GM02LC21368, or a functional equivalent or a homolog thereof as depicted in column 8 of Table II, application no. 3, preferably a homolog or functional equivalent as depicted in column 8 of Table II B, application no. 3, and being depicted in the same respective line as said GM02LC21368, and preferably the activity is increased non-targeted.

[25821] Accordingly, in one embodiment, the molecule which activity is to be increased in the process of the invention is the gene product with an activity as a “transcription factor”, preferably it is the molecule of section (a) or (b) of this paragraph.

[25822] In particular, it was observed that in plants, especially in Arabidopsis thaliana, increasing or generating the activity of a gene product non-targeted with the activity of a “transcription factor”, preferably being encoded by a gene comprising the nucleic acid sequence SEQ ID NO. 84198, preferably the coding region thereof, conferred the production of or the increase in serine compared with the wild type control.

[25823] The nucleic acid sequence of GM02LC21368 from Glycine max, e.g. as shown in the respective line in column 5 of Table I, application no. 3, is unpublished. And the activity of the gene product thereof is the activity of transcription factor.

[25824] Accordingly, in one embodiment, the process of the present invention for producing tyrosine in a non-human organism, like a microorganism or a plant or a part thereof, comprises increasing or generating the activity of a gene product with the activity of a gene product conferring the activity of “transcription factor”, especially from Glycine max or its functional equivalent or its homolog, e.g. the increase of
[25825] (a) a gene product of a gene comprising the nucleic acid molecule as shown in the respective line in column 5 of Table I, application no. 3, preferably the coding region thereof, or a homolog or a fragment thereof, and being depicted in the same respective line as said GM02LC21368, or a functional equivalent or a homolog thereof as shown in column 8 of Table I, application no. 3, preferably the coding region thereof, particularly a homolog or functional equivalent as shown in column 8 of Table I B, application no. 3, and being depicted in the same respective line as said GM02LC21368, and preferably the activity is increased non-targeted, or
[25826] (b) a polypeptide comprising a polypeptide, a consensus sequence or at least a polypeptide motif as shown in the respective line in column 5 of Table II or in column 8 of Table IV, application no. 3, respectively, and being depicted in the same respective line as said GM02LC21368, or a functional equivalent or a homolog thereof as depicted in column 8 of Table II, application no. 3, preferably a homolog or functional equivalent as depicted in column 8 of Table II B, application no. 3, and being depicted in the same respective line as said GM02LC21368, and preferably the activity is increased non-targeted.

[25827] Accordingly, in one embodiment, the molecule which activity is to be increased in the process of the invention is the gene product with an activity as a “transcription factor”, preferably it is the molecule of section (a) or (b) of this paragraph.

[25828] In particular, it was observed that in plants, especially in Arabidopsis thaliana, increasing or generating the activity of a gene product non-targeted with the activity of a “transcription factor”, preferably being encoded by a gene comprising the nucleic acid sequence SEQ ID NO. 84198, preferably the coding region thereof, conferred the production of or the increase in tyrosine compared with the wild type control.

[25829] The nucleic acid sequence of GM02LC44512 from Glycine max, e.g. as shown in the respective line in column 5 of Table I, application no. 3, is unpublished. And the activity of the gene product thereof is the activity of cyclin D.

[25830] Accordingly, in one embodiment, the process of the present invention for producing alanine in a non-human organism, like a microorganism or a plant or a part thereof, comprises increasing or generating the activity of a gene product with the activity of a gene product conferring the activity of “cyclin D”, especially from Glycine max or its functional equivalent or its homolog, e.g. the increase of
[25831] (a) a gene product of a gene comprising the nucleic acid molecule as shown in the respective line in column 5 of Table I, application no. 3, preferably the coding region thereof, or a homolog or a fragment thereof, and being depicted in the same respective line as said GM02LC44512, or a functional equivalent or a homolog thereof as shown in column 8 of Table I, application no. 3, preferably the coding region thereof, particularly a homolog or functional equivalent as shown in column 8 of Table I B, application no. 3, and being depicted in the same respective line as said GM02LC44512, and preferably the activity is increased non-targeted, or
[25832] (b) a polypeptide comprising a polypeptide, a consensus sequence or at least a polypeptide motif as shown in the respective line in column 5 of Table II or in column 8 of Table IV, application no. 3, respectively, and being depicted in the same respective line as said GM02LC44512, or a functional equivalent or a homolog thereof as depicted in column 8 of Table II, application no. 3, preferably a homolog or functional equivalent as depicted in column 8 of Table II B, application no. 3, and being depicted in the same respective line as said GM02LC44512, and preferably the activity is increased non-targeted.

[25833] Accordingly, in one embodiment, the molecule which activity is to be increased in the process of the invention is the gene product with an activity as a “cyclin D”, preferably it is the molecule of section (a) or (b) of this paragraph.

[25834] In particular, it was observed that in plants, especially in Arabidopsis thaliana, increasing or generating the activity of a gene product non-targeted with the activity of a “cyclin D”, preferably being encoded by a gene comprising the nucleic acid sequence SEQ ID NO. 46850, preferably the coding region thereof, conferred the production of or the increase in alanine compared with the wild type control.

[25835] The nucleic acid sequence of GM02LC44512 from Glycine max, e.g. as shown in the respective line in column 5 of Table I, application no. 3, is unpublished. And the activity of the gene product thereof is the activity of cyclin D.

[25836] Accordingly, in one embodiment, the process of the present invention for producing serine in a non-human organism, like a microorganism or a plant or a part thereof, comprises increasing or generating the activity of a gene product with the activity of a gene product conferring the activity of “cyclin D”, especially from Glycine max or its functional equivalent or its homolog, e.g. the increase of
[25837] (a) a gene product of a gene comprising the nucleic acid molecule as shown in the respective line in column 5 of Table I, application no. 3, preferably the coding region thereof, or a homolog or a fragment thereof, and being depicted in the same respective line as said GM02LC44512, or a functional equivalent or a homolog thereof as shown in column 8 of Table I, application no. 3, preferably the coding region thereof, particularly a homolog or functional equivalent as shown in column 8 of Table I B, application no. 3, and being depicted in the same respective line as said GM02LC44512, and preferably the activity is increased non-targeted, or
[25838] (b) a polypeptide comprising a polypeptide, a consensus sequence or at least a polypeptide motif as shown in the respective line in column 5 of Table II or in column 8 of Table IV, application no. 3, respectively, and being depicted in the same respective line as said GM02LC44512, or a functional equivalent or a homolog thereof as depicted in column 8 of Table II, application no. 3, preferably a homolog or functional equivalent as depicted in column 8 of Table II B, application no. 3, and being depicted in the same respective line as said GM02LC44512, and preferably the activity is increased non-targeted.

[25839] Accordingly, in one embodiment, the molecule which activity is to be increased in the process of the invention is the gene product with an activity as a “cyclin D”, preferably it is the molecule of section (a) or (b) of this paragraph.

[25840] In particular, it was observed that in plants, especially in Arabidopsis thaliana, increasing or generating the activity of a gene product non-targeted with the activity of a “cyclin D”, preferably being encoded by a gene comprising the nucleic acid sequence SEQ ID NO. 46850, preferably the coding region thereof, conferred the production of or the increase in serine compared with the wild type control.

[25841] The nucleic acid sequence of NZ_AAAU02000016.150 from Azotobacter vinelandii, e.g. as shown in the respective line in column 5 of Table I, application no. 3, has been published in D. And the activity of the gene product thereof is the activity of glutaredoxin.

[25842] Accordingly, in one embodiment, the process of the present invention for producing alanine in a non-human organism, like a microorganism or a plant or a part thereof, comprises increasing or generating the activity of a gene product with the activity of a gene product conferring the activity of “glutaredoxin”, especially from Azotobacter vinelandii or its functional equivalent or its homolog, e.g. the increase of
[25843] (a) a gene product of a gene comprising the nucleic acid molecule as shown in the respective line in column 5 of Table I, application no. 3, preferably the coding region thereof, or a homolog or a fragment thereof, and being depicted in the same respective line as said NZ_AAAU02000016.150, or a functional equivalent or a homolog thereof as shown in column 8 of Table I, application no. 3, preferably the coding region thereof, particularly a homolog or functional equivalent as shown in column 8 of Table I B, application no. 3, and being depicted in the same respective line as said NZ_AAAU02000016.150, and preferably the activity is increased non-targeted, or
[25844] (b) a polypeptide comprising a polypeptide, a consensus sequence or at least a polypeptide motif as shown in the respective line in column 5 of Table II or in column 8 of Table IV, application no. 3, respectively, and being depicted in the same respective line as said NZ_AAAU02000016.150, or a functional equivalent or a homolog thereof as depicted in column 8 of Table II, application no. 3, preferably a homolog or functional equivalent as depicted in column 8 of Table II B, application no. 3, and being depicted in the same respective line as said NZ_AAAU02000016.150, and preferably the activity is increased non-targeted.

[25845] Accordingly, in one embodiment, the molecule which activity is to be increased in the process of the invention is the gene product with an activity as a “glutaredoxin”, preferably it is the molecule of section (a) or (b) of this paragraph.

[25846] In particular, it was observed that in plants, especially in Arabidopsis thaliana, increasing or generating the activity of a gene product non-targeted with the activity of a “glutaredoxin”, preferably being encoded by a gene comprising the nucleic acid sequence SEQ ID NO. 47159, preferably the coding region thereof, conferred the production of or the increase in alanine compared with the wild type control.

[25847] The nucleic acid sequence of NZ_AAAU02000016.150 from Azotobacter vinelandii, e.g. as shown in the respective line in column 5 of Table I, application no. 3, has been published in D. And the activity of the gene product thereof is the activity of glutaredoxin.

[25848] Accordingly, in one embodiment, the process of the present invention for producing glycine in a non-human organism, like a microorganism or a plant or a part thereof, comprises increasing or generating the activity of a gene product with the activity of a gene product conferring the activity of “glutaredoxin”, especially from Azotobacter vinelandii or its functional equivalent or its homolog, e.g. the increase of
[25849] (a) a gene product of a gene comprising the nucleic acid molecule as shown in the respective line in column 5 of Table I, application no. 3, preferably the coding region thereof, or a homolog or a fragment thereof, and being depicted in the same respective line as said NZ_AAAU02000016.150, or a functional equivalent or a homolog thereof as shown in column 8 of Table I, application no. 3, preferably the coding region thereof, particularly a homolog or functional equivalent as shown in column 8 of Table I B, application no. 3, and being depicted in the same respective line as said NZ_AAAU02000016.150, and preferably the activity is increased non-targeted, or
[25850] (b) a polypeptide comprising a polypeptide, a consensus sequence or at least a polypeptide motif as shown in the respective line in column 5 of Table II or in column 8 of Table IV, application no. 3, respectively, and being depicted in the same respective line as said NZ_AAAU02000016.150, or a functional equivalent or a homolog thereof as depicted in column 8 of Table II, application no. 3, preferably a homolog or functional equivalent as depicted in column 8 of Table II B, application no. 3, and being depicted in the same respective line as said NZ_AAAU02000016.150, and preferably the activity is increased non-targeted.

[25851] Accordingly, in one embodiment, the molecule which activity is to be increased in the process of the invention is the gene product with an activity as a “glutaredoxin”, preferably it is the molecule of section (a) or (b) of this paragraph.

[25852] In particular, it was observed that in plants, especially in Arabidopsis thaliana, increasing or generating the activity of a gene product non-targeted with the activity of a “glutaredoxin”, preferably being encoded by a gene comprising the nucleic acid sequence SEQ ID NO. 47159, preferably the coding region thereof, conferred the production of or the increase in glycine compared with the wild type control.

[25853] The nucleic acid sequence of NZ_AAAU02000016.150 from Azotobacter vinelandii, e.g. as shown in the respective line in column 5 of Table I, application no. 3, has been published in D. And the activity of the gene product thereof is the activity of glutaredoxin.

[25854] Accordingly, in one embodiment, the process of the present invention for producing serine in a non-human organism, like a microorganism or a plant or a part thereof, comprises increasing or generating the activity of a gene product with the activity of a gene product conferring the activity of “glutaredoxin”, especially from Azotobacter vinelandii or its functional equivalent or its homolog, e.g. the increase of
[25855] (a) a gene product of a gene comprising the nucleic acid molecule as shown in the respective line in column 5 of Table I, application no. 3, preferably the coding region thereof, or a homolog or a fragment thereof, and being depicted in the same respective line as said NZ_AAAU02000016.150, or a functional equivalent or a homolog thereof as shown in column 8 of Table I, application no. 3, preferably the coding region thereof, particularly a homolog or functional equivalent as shown in column 8 of Table I B, application no. 3, and being depicted in the same respective line as said NZ_AAAU02000016.150, and preferably the activity is increased non-targeted, or
[25856] (b) a polypeptide comprising a polypeptide, a consensus sequence or at least a polypeptide motif as shown in the respective line in column 5 of Table II or in column 8 of Table IV, application no. 3, respectively, and being depicted in the same respective line as said NZ_AAAU02000016.150, or a functional equivalent or a homolog thereof as depicted in column 8 of Table II, application no. 3, preferably a homolog or functional equivalent as depicted in column 8 of Table II B, application no. 3, and being depicted in the same respective line as said NZ_AAAU02000016.150, and preferably the activity is increased non-targeted.

[25857] Accordingly, in one embodiment, the molecule which activity is to be increased in the process of the invention is the gene product with an activity as a “glutaredoxin”, preferably it is the molecule of section (a) or (b) of this paragraph.

[25858] In particular, it was observed that in plants, especially in Arabidopsis thaliana, increasing or generating the activity of a gene product non-targeted with the activity of a “glutaredoxin”, preferably being encoded by a gene comprising the nucleic acid sequence SEQ ID NO. 47159, preferably the coding region thereof, conferred the production of or the increase in serine compared with the wild type control.

[25859] The nucleic acid sequence of S_pp015018333r from Physcomitrella patens, e.g. as shown in the respective line in column 5 of Table I, application no. 3, is unpublished. And the activity of the gene product thereof is the activity of s_pp015018333r-protein.

[25860] Accordingly, in one embodiment, the process of the present invention for producing asparagine in a non-human organism, like a microorganism or a plant or a part thereof, comprises increasing or generating the activity of a gene product with the activity of a gene product conferring the activity of “s_pp015018333r-protein”, especially from Physcomitrella patens or its functional equivalent or its homolog, e.g. the increase of
[25861] (a) a gene product of a gene comprising the nucleic acid molecule as shown in the respective line in column 5 of Table I, application no. 3, preferably the coding region thereof, or a homolog or a fragment thereof, and being depicted in the same respective line as said S_pp015018333r, or a functional equivalent or a homolog thereof as shown in column 8 of Table I, application no. 3, preferably the coding region thereof, particularly a homolog or functional equivalent as shown in column 8 of Table I B, application no. 3, and being depicted in the same respective line as said S_pp015018333r, and preferably the activity is increased non-targeted, or
[25862] (b) a polypeptide comprising a polypeptide, a consensus sequence or at least a polypeptide motif as shown in the respective line in column 5 of Table II or in column 8 of Table IV, application no. 3, respectively, and being depicted in the same respective line as said S_pp015018333r, or a functional equivalent or a homolog thereof as depicted in column 8 of Table II, application no. 3, preferably a homolog or functional equivalent as depicted in column 8 of Table II B, application no. 3, and being depicted in the same respective line as said S_pp015018333r, and preferably the activity is increased non-targeted.

[25863] Accordingly, in one embodiment, the molecule which activity is to be increased in the process of the invention is the gene product with an activity as a “s_pp015018333r-protein”, preferably it is the molecule of section (a) or (b) of this paragraph.

[25864] In particular, it was observed that in plants, especially in Arabidopsis thaliana, increasing or generating the activity of a gene product non-targeted with the activity of a “s_pp015018333r-protein”, preferably being encoded by a gene comprising the nucleic acid sequence SEQ ID NO. 59851, preferably the coding region thereof, conferred the production of or the increase in asparagine compared with the wild type control.

[25865] The nucleic acid sequence of S_pp015018333r from Physcomitrella patens, e.g. as shown in the respective line in column 5 of Table I, application no. 3, is unpublished. And the activity of the gene product thereof is the activity of s_pp015018333r-protein.

[25866] Accordingly, in one embodiment, the process of the present invention for producing phenylalanine in a non-human organism, like a microorganism or a plant or a part thereof, comprises increasing or generating the activity of a gene product with the activity of a gene product conferring the activity of “s_pp015018333r-protein”, especially from Physcomitrella patens or its functional equivalent or its homolog, e.g. the increase of
[25867] (a) a gene product of a gene comprising the nucleic acid molecule as shown in the respective line in column 5 of Table I, application no. 3, preferably the coding region thereof, or a homolog or a fragment thereof, and being depicted in the same respective line as said S_pp015018333r, or a functional equivalent or a homolog thereof as shown in column 8 of Table I, application no. 3, preferably the coding region thereof, particularly a homolog or functional equivalent as shown in column 8 of Table I B, application no. 3, and being depicted in the same respective line as said S_pp015018333r, and preferably the activity is increased non-targeted, or
[25868] (b) a polypeptide comprising a polypeptide, a consensus sequence or at least a polypeptide motif as shown in the respective line in column 5 of Table II or in column 8 of Table IV, application no. 3, respectively, and being depicted in the same respective line as said S_pp015018333r, or a functional equivalent or a homolog thereof as depicted in column 8 of Table II, application no. 3, preferably a homolog or functional equivalent as depicted in column 8 of Table II B, application no. 3, and being depicted in the same respective line as said S_pp015018333r, and preferably the activity is increased non-targeted.

[25869] Accordingly, in one embodiment, the molecule which activity is to be increased in the process of the invention is the gene product with an activity as a “s_pp015018333r-protein”, preferably it is the molecule of section (a) or (b) of this paragraph.

[25870] In particular, it was observed that in plants, especially in Arabidopsis thaliana, increasing or generating the activity of a gene product non-targeted with the activity of a “s_pp015018333r-protein”, preferably being encoded by a gene comprising the nucleic acid sequence SEQ ID NO. 59851, preferably the coding region thereof, conferred the production of or the increase in phenylalanine compared with the wild type control.

[25871] The nucleic acid sequence of S_pp015018333r from Physcomitrella patens, e.g. as shown in the respective line in column 5 of Table I, application no. 3, is unpublished. And the activity of the gene product thereof is the activity of s_pp015018333r-protein.

[25872] Accordingly, in one embodiment, the process of the present invention for producing tyrosine in a non-human organism, like a microorganism or a plant or a part thereof, comprises increasing or generating the activity of a gene product with the activity of a gene product conferring the activity of “s_pp015018333r-protein”, especially from Physcomitrella patens or its functional equivalent or its homolog, e.g. the increase of
[25873] (a) a gene product of a gene comprising the nucleic acid molecule as shown in the respective line in column 5 of Table I, application no. 3, preferably the coding region thereof, or a homolog or a fragment thereof, and being depicted in the same respective line as said S_pp015018333r, or a functional equivalent or a homolog thereof as shown in column 8 of Table I, application no. 3, preferably the coding region thereof, particularly a homolog or functional equivalent as shown in column 8 of Table I B, application no. 3, and being depicted in the same respective line as said S_pp015018333r, and preferably the activity is increased non-targeted, or
[25874] (b) a polypeptide comprising a polypeptide, a consensus sequence or at least a polypeptide motif as shown in the respective line in column 5 of Table II or in column 8 of Table IV, application no. 3, respectively, and being depicted in the same respective line as said S_pp015018333r, or a functional equivalent or a homolog thereof as depicted in column 8 of Table II, application no. 3, preferably a homolog or functional equivalent as depicted in column 8 of Table II B, application no. 3, and being depicted in the same respective line as said S_pp015018333r, and preferably the activity is increased non-targeted.

[25875] Accordingly, in one embodiment, the molecule which activity is to be increased in the process of the invention is the gene product with an activity as a “s_pp015018333r-protein”, preferably it is the molecule of section (a) or (b) of this paragraph.

[25876] In particular, it was observed that in plants, especially in Arabidopsis thaliana, increasing or generating the activity of a gene product non-targeted with the activity of a “s_pp015018333r-protein”, preferably being encoded by a gene comprising the nucleic acid sequence SEQ ID NO. 59851, preferably the coding region thereof, conferred the production of or the increase in tyrosine compared with the wild type control.

[25877] The nucleic acid sequence of S_pp015018333r from Physcomitrella patens, e.g. as shown in the respective line in column 5 of Table I, application no. 3, is unpublished. And the activity of the gene product thereof is the activity of s_pp015018333r-protein.

[25878] Accordingly, in one embodiment, the process of the present invention for producing 5-oxoproline in a non-human organism, like a microorganism or a plant or a part thereof, comprises increasing or generating the activity of a gene product with the activity of a gene product conferring the activity of “s_pp015018333r-protein”, especially from Physcomitrella patens or its functional equivalent or its homolog, e.g. the increase of
[25879] (a) a gene product of a gene comprising the nucleic acid molecule as shown in the respective line in column 5 of Table I, application no. 3, preferably the coding region thereof, or a homolog or a fragment thereof, and being depicted in the same respective line as said S_pp015018333r, or a functional equivalent or a homolog thereof as shown in column 8 of Table I, application no. 3, preferably the coding region thereof, particularly a homolog or functional equivalent as shown in column 8 of Table I B, application no. 3, and being depicted in the same respective line as said S_pp015018333r, and preferably the activity is increased non-targeted, or
[25880] (b) a polypeptide comprising a polypeptide, a consensus sequence or at least a polypeptide motif as shown in the respective line in column 5 of Table II or in column 8 of Table IV, application no. 3, respectively, and being depicted in the same respective line as said S_pp015018333r, or a functional equivalent or a homolog thereof as depicted in column 8 of Table II, application no. 3, preferably a homolog or functional equivalent as depicted in column 8 of Table II B, application no. 3, and being depicted in the same respective line as said S_pp015018333r, and preferably the activity is increased non-targeted.

[25881] Accordingly, in one embodiment, the molecule which activity is to be increased in the process of the invention is the gene product with an activity as a “s_pp015018333r-protein”, preferably it is the molecule of section (a) or (b) of this paragraph.

[25882] In particular, it was observed that in plants, especially in Arabidopsis thaliana, increasing or generating the activity of a gene product non-targeted with the activity of a “s_pp015018333r-protein”, preferably being encoded by a gene comprising the nucleic acid sequence SEQ ID NO. 59851, preferably the coding region thereof, conferred the production of or the increase in 5-oxoproline compared with the wild type control.

[25883] The nucleic acid sequence of Sll0080 from Synechocystis sp., e.g. as shown in the respective line in column 5 of Table I, application no. 3, has been published in C. And the activity of the gene product thereof is the activity of N-acetyl-gamma-glutamyl-phosphate reductase.

[25884] Accordingly, in one embodiment, the process of the present invention for producing citrulline in a non-human organism, like a microorganism or a plant or a part thereof, comprises increasing or generating the activity of a gene product with the activity of a gene product conferring the activity of “N-acetyl-gamma-glutamyl-phosphate reductase”, especially from Synechocystis sp. or its functional equivalent or its homolog, e.g. the increase of
[25885] (a) a gene product of a gene comprising the nucleic acid molecule as shown in the respective line in column 5 of Table I, application no. 3, preferably the coding region thereof, or a homolog or a fragment thereof, and being depicted in the same respective line as said Sll0080, or a functional equivalent or a homolog thereof as shown in column 8 of Table I, application no. 3, preferably the coding region thereof, particularly a homolog or functional equivalent as shown in column 8 of Table I B, application no. 3, and being depicted in the same respective line as said Sll0080, and preferably the activity is increased plastidic, or
[25886] (b) a polypeptide comprising a polypeptide, a consensus sequence or at least a polypeptide motif as shown in the respective line in column 5 of Table II or in column 8 of Table IV, application no. 3, respectively, and being depicted in the same respective line as said Sll0080, or a functional equivalent or a homolog thereof as depicted in column 8 of Table II, application no. 3, preferably a homolog or functional equivalent as depicted in column 8 of Table II B, application no. 3, and being depicted in the same respective line as said Sll0080, and preferably the activity is increased plastidic.

[25887] Accordingly, in one embodiment, the molecule which activity is to be increased in the process of the invention is the gene product with an activity as a “N-acetyl-gamma-glutamyl-phosphate reductase”, preferably it is the molecule of section (a) or (b) of this paragraph.

[25888] In particular, it was observed that in plants, especially in Arabidopsis thaliana, increasing or generating the activity of a gene product plastidic with the activity of a “N-acetyl-gamma-glutamyl-phosphate reductase”, preferably being encoded by a gene comprising the nucleic acid sequence SEQ ID NO. 47566, preferably the coding region thereof, conferred the production of or the increase in citrulline compared with the wild type control.

[25889] The nucleic acid sequence of Sll0228 from Synechocystis sp., e.g. as shown in the respective line in column 5 of Table I, application no. 3, has been published in C. And the activity of the gene product thereof is the activity of agmatinase.

[25890] Accordingly, in one embodiment, the process of the present invention for producing asparagine in a non-human organism, like a microorganism or a plant or a part thereof, comprises increasing or generating the activity of a gene product with the activity of a gene product conferring the activity of “agmatinase”, especially from Synechocystis sp. or its functional equivalent or its homolog, e.g. the increase of
[25891] (a) a gene product of a gene comprising the nucleic acid molecule as shown in the respective line in column 5 of Table I, application no. 3, preferably the coding region thereof, or a homolog or a fragment thereof, and being depicted in the same respective line as said Sll0228, or a functional equivalent or a homolog thereof as shown in column 8 of Table I, application no. 3, preferably the coding region thereof, particularly a homolog or functional equivalent as shown in column 8 of Table I B, application no. 3, and being depicted in the same respective line as said Sll0228, and preferably the activity is increased plastidic, or
[25892] (b) a polypeptide comprising a polypeptide, a consensus sequence or at least a polypeptide motif as shown in the respective line in column 5 of Table II or in column 8 of Table IV, application no. 3, respectively, and being depicted in the same respective line as said Sll0228, or a functional equivalent or a homolog thereof as depicted in column 8 of Table II, application no. 3, preferably a homolog or functional equivalent as depicted in column 8 of Table II B, application no. 3, and being depicted in the same respective line as said Sll0228, and preferably the activity is increased plastidic.

[25893] Accordingly, in one embodiment, the molecule which activity is to be increased in the process of the invention is the gene product with an activity as a “agmatinase”, preferably it is the molecule of section (a) or (b) of this paragraph.

[25894] In particular, it was observed that in plants, especially in Arabidopsis thaliana, increasing or generating the activity of a gene product plastidic with the activity of a “agmatinase”, preferably being encoded by a gene comprising the nucleic acid sequence SEQ ID NO. 84265, preferably the coding region thereof, conferred the production of or the increase in asparagine compared with the wild type control.

[25895] The nucleic acid sequence of Sll0228 from Synechocystis sp., e.g. as shown in the respective line in column 5 of Table I, application no. 3, has been published in C. And the activity of the gene product thereof is the activity of agmatinase.

[25896] Accordingly, in one embodiment, the process of the present invention for producing tyrosine in a non-human organism, like a microorganism or a plant or a part thereof, comprises increasing or generating the activity of a gene product with the activity of a gene product conferring the activity of “agmatinase”, especially from Synechocystis sp. or its functional equivalent or its homolog, e.g. the increase of
[25897] (a) a gene product of a gene comprising the nucleic acid molecule as shown in the respective line in column 5 of Table I, application no. 3, preferably the coding region thereof, or a homolog or a fragment thereof, and being depicted in the same respective line as said Sll0228, or a functional equivalent or a homolog thereof as shown in column 8 of Table I, application no. 3, preferably the coding region thereof, particularly a homolog or functional equivalent as shown in column 8 of Table I B, application no. 3, and being depicted in the same respective line as said Sll0228, and preferably the activity is increased plastidic, or
[25898] (b) a polypeptide comprising a polypeptide, a consensus sequence or at least a polypeptide motif as shown in the respective line in column 5 of Table II or in column 8 of Table IV, application no. 3, respectively, and being depicted in the same respective line as said Sll0228, or a functional equivalent or a homolog thereof as depicted in column 8 of Table II, application no. 3, preferably a homolog or functional equivalent as depicted in column 8 of Table II B, application no. 3, and being depicted in the same respective line as said Sll0228, and preferably the activity is increased plastidic.

[25899] Accordingly, in one embodiment, the molecule which activity is to be increased in the process of the invention is the gene product with an activity as a “agmatinase”, preferably it is the molecule of section (a) or (b) of this paragraph.

[25900] In particular, it was observed that in plants, especially in Arabidopsis thaliana, increasing or generating the activity of a gene product plastidic with the activity of a “agmatinase”, preferably being encoded by a gene comprising the nucleic acid sequence SEQ ID NO. 84265, preferably the coding region thereof, conferred the production of or the increase in tyrosine compared with the wild type control.

[25901] The nucleic acid sequence of Sll0240 from Synechocystis sp., e.g. as shown in the respective line in column 5 of Table I, application no. 3, has been published in C. And the activity of the gene product thereof is the activity of ABC transporter ATP binding component.

[25902] Accordingly, in one embodiment, the process of the present invention for producing alanine in a non-human organism, like a microorganism or a plant or a part thereof, comprises increasing or generating the activity of a gene product with the activity of a gene product conferring the activity of “ABC transporter ATP binding component”, especially from Synechocystis sp. or its functional equivalent or its homolog, e.g. the increase of
[25903] (a) a gene product of a gene comprising the nucleic acid molecule as shown in the respective line in column 5 of Table I, application no. 3, preferably the coding region thereof, or a homolog or a fragment thereof, and being depicted in the same respective line as said Sll0240, or a functional equivalent or a homolog thereof as shown in column 8 of Table I, application no. 3, preferably the coding region thereof, particularly a homolog or functional equivalent as shown in column 8 of Table I B, application no. 3, and being depicted in the same respective line as said Sll0240, and preferably the activity is increased plastidic, or
[25904] (b) a polypeptide comprising a polypeptide, a consensus sequence or at least a polypeptide motif as shown in the respective line in column 5 of Table II or in column 8 of Table IV, application no. 3, respectively, and being depicted in the same respective line as said Sll0240, or a functional equivalent or a homolog thereof as depicted in column 8 of Table II, application no. 3, preferably a homolog or functional equivalent as depicted in column 8 of Table II B, application no. 3, and being depicted in the same respective line as said Sll0240, and preferably the activity is increased plastidic.

[25905] Accordingly, in one embodiment, the molecule which activity is to be increased in the process of the invention is the gene product with an activity as a “ABC transporter ATP binding component”, preferably it is the molecule of section (a) or (b) of this paragraph.

[25906] In particular, it was observed that in plants, especially in Arabidopsis thaliana, increasing or generating the activity of a gene product plastidic with the activity of a “ABC transporter ATP binding component”, preferably being encoded by a gene comprising the nucleic acid sequence SEQ ID NO. 84441, preferably the coding region thereof, conferred the production of or the increase in alanine compared with the wild type control.

[25907] The nucleic acid sequence of Sll0248 from Synechocystis sp., e.g. as shown in the respective line in column 5 of Table I, application no. 3, has been published in C. And the activity of the gene product thereof is the activity of flavodoxin.

[25908] Accordingly, in one embodiment, the process of the present invention for producing phenylalanine in a non-human organism, like a microorganism or a plant or a part thereof, comprises increasing or generating the activity of a gene product with the activity of a gene product conferring the activity of “flavodoxin”, especially from Synechocystis sp. or its functional equivalent or its homolog, e.g. the increase of
[25909] (a) a gene product of a gene comprising the nucleic acid molecule as shown in the respective line in column 5 of Table I, application no. 3, preferably the coding region thereof, or a homolog or a fragment thereof, and being depicted in the same respective line as said Sll0248, or a functional equivalent or a homolog thereof as shown in column 8 of Table I, application no. 3, preferably the coding region thereof, particularly a homolog or functional equivalent as shown in column 8 of Table I B, application no. 3, and being depicted in the same respective line as said Sll0248, and preferably the activity is increased plastidic, or
[25910] (b) a polypeptide comprising a polypeptide, a consensus sequence or at least a polypeptide motif as shown in the respective line in column 5 of Table II or in column 8 of Table IV, application no. 3, respectively, and being depicted in the same respective line as said Sll0248, or a functional equivalent or a homolog thereof as depicted in column 8 of Table II, application no. 3, preferably a homolog or functional equivalent as depicted in column 8 of Table II B, application no. 3, and being depicted in the same respective line as said Sll0248, and preferably the activity is increased plastidic.

[25911] Accordingly, in one embodiment, the molecule which activity is to be increased in the process of the invention is the gene product with an activity as a “flavodoxin”, preferably it is the molecule of section (a) or (b) of this paragraph.

[25912] In particular, it was observed that in plants, especially in Arabidopsis thaliana, increasing or generating the activity of a gene product plastidic with the activity of a “flavodoxin”, preferably being encoded by a gene comprising the nucleic acid sequence SEQ ID NO. 49143, preferably the coding region thereof, conferred the production of or the increase in phenylalanine compared with the wild type control.

[25913] The nucleic acid sequence of Sll0248 from Synechocystis sp., e.g. as shown in the respective line in column 5 of Table I, application no. 3, has been published in C. And the activity of the gene product thereof is the activity of flavodoxin.

[25914] Accordingly, in one embodiment, the process of the present invention for producing tyrosine in a non-human organism, like a microorganism or a plant or a part thereof, comprises increasing or generating the activity of a gene product with the activity of a gene product conferring the activity of “flavodoxin”, especially from Synechocystis sp. or its functional equivalent or its homolog, e.g. the increase of
[25915] (a) a gene product of a gene comprising the nucleic acid molecule as shown in the respective line in column 5 of Table I, application no. 3, preferably the coding region thereof, or a homolog or a fragment thereof, and being depicted in the same respective line as said Sll0248, or a functional equivalent or a homolog thereof as shown in column 8 of Table I, application no. 3, preferably the coding region thereof, particularly a homolog or functional equivalent as shown in column 8 of Table I B, application no. 3, and being depicted in the same respective line as said Sll0248, and preferably the activity is increased plastidic, or
[25916] (b) a polypeptide comprising a polypeptide, a consensus sequence or at least a polypeptide motif as shown in the respective line in column 5 of Table II or in column 8 of Table IV, application no. 3, respectively, and being depicted in the same respective line as said Sll0248, or a functional equivalent or a homolog thereof as depicted in column 8 of Table II, application no. 3, preferably a homolog or functional equivalent as depicted in column 8 of Table II B, application no. 3, and being depicted in the same respective line as said Sll0248, and preferably the activity is increased plastidic.

[25917] Accordingly, in one embodiment, the molecule which activity is to be increased in the process of the invention is the gene product with an activity as a “flavodoxin”, preferably it is the molecule of section (a) or (b) of this paragraph.

[25918] In particular, it was observed that in plants, especially in Arabidopsis thaliana, increasing or generating the activity of a gene product plastidic with the activity of a “flavodoxin”, preferably being encoded by a gene comprising the nucleic acid sequence SEQ ID NO. 49143, preferably the coding region thereof, conferred the production of or the increase in tyrosine compared with the wild type control.

[25919] The nucleic acid sequence of Sll0281 from Synechocystis sp., e.g. as shown in the respective line in column 5 of Table I, application no. 3, has been published in C. And the activity of the gene product thereof is the activity of sll0281-protein.

[25920] Accordingly, in one embodiment, the process of the present invention for producing alanine in a non-human organism, like a microorganism or a plant or a part thereof, comprises increasing or generating the activity of a gene product with the activity of a gene product conferring the activity of “sll0281-protein”, especially from Synechocystis sp. or its functional equivalent or its homolog, e.g. the increase of
[25921] (a) a gene product of a gene comprising the nucleic acid molecule as shown in the respective line in column 5 of Table I, application no. 3, preferably the coding region thereof, or a homolog or a fragment thereof, and being depicted in the same respective line as said Sll0281, or a functional equivalent or a homolog thereof as shown in column 8 of Table I, application no. 3, preferably the coding region thereof, particularly a homolog or functional equivalent as shown in column 8 of Table I B, application no. 3, and being depicted in the same respective line as said Sll0281, and preferably the activity is increased plastidic, or
[25922] (b) a polypeptide comprising a polypeptide, a consensus sequence or at least a polypeptide motif as shown in the respective line in column 5 of Table II or in column 8 of Table IV, application no. 3, respectively, and being depicted in the same respective line as said Sll0281, or a functional equivalent or a homolog thereof as depicted in column 8 of Table II, application no. 3, preferably a homolog or functional equivalent as depicted in column 8 of Table II B, application no. 3, and being depicted in the same respective line as said Sll0281, and preferably the activity is increased plastidic.

[25923] Accordingly, in one embodiment, the molecule which activity is to be increased in the process of the invention is the gene product with an activity as a “sll0281-protein”, preferably it is the molecule of section (a) or (b) of this paragraph.

[25924] In particular, it was observed that in plants, especially in Arabidopsis thaliana, increasing or generating the activity of a gene product plastidic with the activity of a “sll0281-protein”, preferably being encoded by a gene comprising the nucleic acid sequence SEQ ID NO. 84865, preferably the coding region thereof, conferred the production of or the increase in alanine compared with the wild type control.

[25925] The nucleic acid sequence of Sll0378 from Synechocystis sp., e.g. as shown in the respective line in column 5 of Table I, application no. 3, has been published in C. And the activity of the gene product thereof is the activity of uroporphyrin-111C-methyltransferase.

[25926] Accordingly, in one embodiment, the process of the present invention for producing serine in a non-human organism, like a microorganism or a plant or a part thereof, comprises increasing or generating the activity of a gene product with the activity of a gene product conferring the activity of “uroporphyrin-111C-methyltransferase”, especially from Synechocystis sp. or its functional equivalent or its homolog, e.g. the increase of
[25927] (a) a gene product of a gene comprising the nucleic acid molecule as shown in the respective line in column 5 of Table I, application no. 3, preferably the coding region thereof, or a homolog or a fragment thereof, and being depicted in the same respective line as said Sll0378, or a functional equivalent or a homolog thereof as shown in column 8 of Table I, application no. 3, preferably the coding region thereof, particularly a homolog or functional equivalent as shown in column 8 of Table I B, application no. 3, and being depicted in the same respective line as said Sll0378, and preferably the activity is increased plastidic, or
[25928] (b) a polypeptide comprising a polypeptide, a consensus sequence or at least a polypeptide motif as shown in the respective line in column 5 of Table II or in column 8 of Table IV, application no. 3, respectively, and being depicted in the same respective line as said Sll0378, or a functional equivalent or a homolog thereof as depicted in column 8 of Table II, application no. 3, preferably a homolog or functional equivalent as depicted in column 8 of Table II B, application no. 3, and being depicted in the same respective line as said Sll0378, and preferably the activity is increased plastidic.

[25929] Accordingly, in one embodiment, the molecule which activity is to be increased in the process of the invention is the gene product with an activity as a “uroporphyrin-III C-methyltransferase”, preferably it is the molecule of section (a) or (b) of this paragraph.

[25930] In particular, it was observed that in plants, especially in Arabidopsis thaliana, increasing or generating the activity of a gene product plastidic with the activity of a “uroporphyrin-III C-methyltransferase”, preferably being encoded by a gene comprising the nucleic acid sequence SEQ ID NO. 84869, preferably the coding region thereof, conferred the production of or the increase in serine compared with the wild type control.

[25931] The nucleic acid sequence of Sll0420 from Synechocystis sp., e.g. as shown in the respective line in column 5 of Table I, application no. 3, has been published in C. And the activity of the gene product thereof is the activity of urease subunit.

[25932] Accordingly, in one embodiment, the process of the present invention for producing phenylalanine in a non-human organism, like a microorganism or a plant or a part thereof, comprises increasing or generating the activity of a gene product with the activity of a gene product conferring the activity of “urease subunit”, especially from Synechocystis sp. or its functional equivalent or its homolog, e.g. the increase of
[25933] (a) a gene product of a gene comprising the nucleic acid molecule as shown in the respective line in column 5 of Table I, application no. 3, preferably the coding region thereof, or a homolog or a fragment thereof, and being depicted in the same respective line as said Sll0420, or a functional equivalent or a homolog thereof as shown in column 8 of Table I, application no. 3, preferably the coding region thereof, particularly a homolog or functional equivalent as shown in column 8 of Table I B, application no. 3, and being depicted in the same respective line as said Sll0420, and preferably the activity is increased non-targeted, or
[25934] (b) a polypeptide comprising a polypeptide, a consensus sequence or at least a polypeptide motif as shown in the respective line in column 5 of Table II or in column 8 of Table IV, application no. 3, respectively, and being depicted in the same respective line as said Sll0420, or a functional equivalent or a homolog thereof as depicted in column 8 of Table II, application no. 3, preferably a homolog or functional equivalent as depicted in column 8 of Table II B, application no. 3, and being depicted in the same respective line as said Sll0420, and preferably the activity is increased non-targeted.

[25935] Accordingly, in one embodiment, the molecule which activity is to be increased in the process of the invention is the gene product with an activity as a “urease subunit”, preferably it is the molecule of section (a) or (b) of this paragraph.

[25936] In particular, it was observed that in plants, especially in Arabidopsis thaliana, increasing or generating the activity of a gene product non-targeted with the activity of a “urease subunit”, preferably being encoded by a gene comprising the nucleic acid sequence SEQ ID NO. 50104, preferably the coding region thereof, conferred the production of or the increase in phenylalanine compared with the wild type control.

[25937] The nucleic acid sequence of Sll0420 from Synechocystis sp., e.g. as shown in the respective line in column 5 of Table I, application no. 3, has been published in C. And the activity of the gene product thereof is the activity of urease subunit.

[25938] Accordingly, in one embodiment, the process of the present invention for producing tyrosine in a non-human organism, like a microorganism or a plant or a part thereof, comprises increasing or generating the activity of a gene product with the activity of a gene product conferring the activity of “urease subunit”, especially from Synechocystis sp. or its functional equivalent or its homolog, e.g. the increase of
[25939] (a) a gene product of a gene comprising the nucleic acid molecule as shown in the respective line in column 5 of Table I, application no. 3, preferably the coding region thereof, or a homolog or a fragment thereof, and being depicted in the same respective line as said Sll0420, or a functional equivalent or a homolog thereof as shown in column 8 of Table I, application no. 3, preferably the coding region thereof, particularly a homolog or functional equivalent as shown in column 8 of Table I B, application no. 3, and being depicted in the same respective line as said Sll0420, and preferably the activity is increased non-targeted, or
[25940] (b) a polypeptide comprising a polypeptide, a consensus sequence or at least a polypeptide motif as shown in the respective line in column 5 of Table II or in column 8 of Table IV, application no. 3, respectively, and being depicted in the same respective line as said Sll0420, or a functional equivalent or a homolog thereof as depicted in column 8 of Table II, application no. 3, preferably a homolog or functional equivalent as depicted in column 8 of Table II B, application no. 3, and being depicted in the same respective line as said Sll0420, and preferably the activity is increased non-targeted.

[25941] Accordingly, in one embodiment, the molecule which activity is to be increased in the process of the invention is the gene product with an activity as a “urease subunit”, preferably it is the molecule of section (a) or (b) of this paragraph.

[25942] In particular, it was observed that in plants, especially in Arabidopsis thaliana, increasing or generating the activity of a gene product non-targeted with the activity of a “urease subunit”, preferably being encoded by a gene comprising the nucleic acid sequence SEQ ID NO. 50104, preferably the coding region thereof, conferred the production of or the increase in tyrosine compared with the wild type control.

[25943] The nucleic acid sequence of Sll0593 from Synechocystis sp., e.g. as shown in the respective line in column 5 of Table I, application no. 3, has been published in C. And the activity of the gene product thereof is the activity of glucokinase.

[25944] Accordingly, in one embodiment, the process of the present invention for producing citrulline in a non-human organism, like a microorganism or a plant or a part thereof, comprises increasing or generating the activity of a gene product with the activity of a gene product conferring the activity of “glucokinase”, especially from Synechocystis sp. or its functional equivalent or its homolog, e.g. the increase of
[25945] (a) a gene product of a gene comprising the nucleic acid molecule as shown in the respective line in column 5 of Table I, application no. 3, preferably the coding region thereof, or a homolog or a fragment thereof, and being depicted in the same respective line as said Sll0593, or a functional equivalent or a homolog thereof as shown in column 8 of Table I, application no. 3, preferably the coding region thereof, particularly a homolog or functional equivalent as shown in column 8 of Table I B, application no. 3, and being depicted in the same respective line as said Sll0593, and preferably the activity is increased plastidic, or
[25946] (b) a polypeptide comprising a polypeptide, a consensus sequence or at least a polypeptide motif as shown in the respective line in column 5 of Table II or in column 8 of Table IV, application no. 3, respectively, and being depicted in the same respective line as said Sll0593, or a functional equivalent or a homolog thereof as depicted in column 8 of Table II, application no. 3, preferably a homolog or functional equivalent as depicted in column 8 of Table II B, application no. 3, and being depicted in the same respective line as said Sll0593, and preferably the activity is increased plastidic.

[25947] Accordingly, in one embodiment, the molecule which activity is to be increased in the process of the invention is the gene product with an activity as a “glucokinase”, preferably it is the molecule of section (a) or (b) of this paragraph.

[25948] In particular, it was observed that in plants, especially in Arabidopsis thaliana, increasing or generating the activity of a gene product plastidic with the activity of a “glucokinase”, preferably being encoded by a gene comprising the nucleic acid sequence SEQ ID NO. 85510, preferably the coding region thereof, conferred the production of or the increase in citrulline compared with the wild type control.

[25949] The nucleic acid sequence of Sll0682 from Synechocystis sp., e.g. as shown in the respective line in column 5 of Table I, application no. 3, has been published in C. And the activity of the gene product thereof is the activity of permease protein of phosphate ABC transporter.

[25950] Accordingly, in one embodiment, the process of the present invention for producing serine in a non-human organism, like a microorganism or a plant or a part thereof, comprises increasing or generating the activity of a gene product with the activity of a gene product conferring the activity of “permease protein of phosphate ABC transporter”, especially from Synechocystis sp. or its functional equivalent or its homolog, e.g. the increase of
[25951] (a) a gene product of a gene comprising the nucleic acid molecule as shown in the respective line in column 5 of Table I, application no. 3, preferably the coding region thereof, or a homolog or a fragment thereof, and being depicted in the same respective line as said Sll0682, or a functional equivalent or a homolog thereof as shown in column 8 of Table I, application no. 3, preferably the coding region thereof, particularly a homolog or functional equivalent as shown in column 8 of Table I B, application no. 3, and being depicted in the same respective line as said Sll0682, and preferably the activity is increased non-targeted, or
[25952] (b) a polypeptide comprising a polypeptide, a consensus sequence or at least a polypeptide motif as shown in the respective line in column 5 of Table II or in column 8 of Table IV, application no. 3, respectively, and being depicted in the same respective line as said Sll0682, or a functional equivalent or a homolog thereof as depicted in column 8 of Table II, application no. 3, preferably a homolog or functional equivalent as depicted in column 8 of Table II B, application no. 3, and being depicted in the same respective line as said Sll0682, and preferably the activity is increased non-targeted.

[25953] Accordingly, in one embodiment, the molecule which activity is to be increased in the process of the invention is the gene product with an activity as a “permease protein of phosphate ABC transporter”, preferably it is the molecule of section (a) or (b) of this paragraph.

[25954] In particular, it was observed that in plants, especially in Arabidopsis thaliana, increasing or generating the activity of a gene product non-targeted with the activity of a “permease protein of phosphate ABC transporter”, preferably being encoded by a gene comprising the nucleic acid sequence SEQ ID NO. 50950, preferably the coding region thereof, conferred the production of or the increase in serine compared with the wild type control.

[25955] The nucleic acid sequence of Sll0682 from Synechocystis sp., e.g. as shown in the respective line in column 5 of Table I, application no. 3, has been published in C. And the activity of the gene product thereof is the activity of permease protein of phosphate ABC transporter.

[25956] Accordingly, in one embodiment, the process of the present invention for producing 5-oxoproline in a non-human organism, like a microorganism or a plant or a part thereof, comprises increasing or generating the activity of a gene product with the activity of a gene product conferring the activity of “permease protein of phosphate ABC transporter”, especially from Synechocystis sp. or its functional equivalent or its homolog, e.g. the increase of
[25957] (a) a gene product of a gene comprising the nucleic acid molecule as shown in the respective line in column 5 of Table I, application no. 3, preferably the coding region thereof, or a homolog or a fragment thereof, and being depicted in the same respective line as said Sll0682, or a functional equivalent or a homolog thereof as shown in column 8 of Table I, application no. 3, preferably the coding region thereof, particularly a homolog or functional equivalent as shown in column 8 of Table I B, application no. 3, and being depicted in the same respective line as said Sll0682, and preferably the activity is increased non-targeted, or
[25958] (b) a polypeptide comprising a polypeptide, a consensus sequence or at least a polypeptide motif as shown in the respective line in column 5 of Table II or in column 8 of Table IV, application no. 3, respectively, and being depicted in the same respective line as said Sll0682, or a functional equivalent or a homolog thereof as depicted in column 8 of Table II, application no. 3, preferably a homolog or functional equivalent as depicted in column 8 of Table II B, application no. 3, and being depicted in the same respective line as said Sll0682, and preferably the activity is increased non-targeted.

[25959] Accordingly, in one embodiment, the molecule which activity is to be increased in the process of the invention is the gene product with an activity as a “permease protein of phosphate ABC transporter”, preferably it is the molecule of section (a) or (b) of this paragraph.

[25960] In particular, it was observed that in plants, especially in Arabidopsis thaliana, increasing or generating the activity of a gene product non-targeted with the activity of a “permease protein of phosphate ABC transporter”, preferably being encoded by a gene comprising the nucleic acid sequence SEQ ID NO. 50950, preferably the coding region thereof, conferred the production of or the increase in 5-oxoproline compared with the wild type control.

[25961] The nucleic acid sequence of Sll0816 from Synechocystis sp., e.g. as shown in the respective line in column 5 of Table I, application no. 3, has been published in C. And the activity of the gene product thereof is the activity of oxireductase.

[25962] Accordingly, in one embodiment, the process of the present invention for producing aspartate in a non-human organism, like a microorganism or a plant or a part thereof, comprises increasing or generating the activity of a gene product with the activity of a gene product conferring the activity of “oxireductase”, especially from Synechocystis sp. or its functional equivalent or its homolog, e.g. the increase of
[25963] (a) a gene product of a gene comprising the nucleic acid molecule as shown in the respective line in column 5 of Table I, application no. 3, preferably the coding region thereof, or a homolog or a fragment thereof, and being depicted in the same respective line as said Sll0816, or a functional equivalent or a homolog thereof as shown in column 8 of Table I, application no. 3, preferably the coding region thereof, particularly a homolog or functional equivalent as shown in column 8 of Table I B, application no. 3, and being depicted in the same respective line as said Sll0816, and preferably the activity is increased non-targeted, or
[25964] (b) a polypeptide comprising a polypeptide, a consensus sequence or at least a polypeptide motif as shown in the respective line in column 5 of Table II or in column 8 of Table IV, application no. 3, respectively, and being depicted in the same respective line as said Sll0816, or a functional equivalent or a homolog thereof as depicted in column 8 of Table II, application no. 3, preferably a homolog or functional equivalent as depicted in column 8 of Table II B, application no. 3, and being depicted in the same respective line as said Sll0816, and preferably the activity is increased non-targeted.

[25965] Accordingly, in one embodiment, the molecule which activity is to be increased in the process of the invention is the gene product with an activity as a “oxireductase”, preferably it is the molecule of section (a) or (b) of this paragraph.

[25966] In particular, it was observed that in plants, especially in Arabidopsis thaliana, increasing or generating the activity of a gene product non-targeted with the activity of a “oxireductase”, preferably being encoded by a gene comprising the nucleic acid sequence SEQ ID NO. 51198, preferably the coding region thereof, conferred the production of or the increase in aspartate compared with the wild type control.

[25967] The nucleic acid sequence of Sll0816 from Synechocystis sp., e.g. as shown in the respective line in column 5 of Table I, application no. 3, has been published in C. And the activity of the gene product thereof is the activity of oxireductase.

[25968] Accordingly, in one embodiment, the process of the present invention for producing glycine in a non-human organism, like a microorganism or a plant or a part thereof, comprises increasing or generating the activity of a gene product with the activity of a gene product conferring the activity of “oxireductase”, especially from Synechocystis sp. or its functional equivalent or its homolog, e.g. the increase of
[25969] (a) a gene product of a gene comprising the nucleic acid molecule as shown in the respective line in column 5 of Table I, application no. 3, preferably the coding region thereof, or a homolog or a fragment thereof, and being depicted in the same respective line as said Sll0816, or a functional equivalent or a homolog thereof as shown in column 8 of Table I, application no. 3, preferably the coding region thereof, particularly a homolog or functional equivalent as shown in column 8 of Table I B, application no. 3, and being depicted in the same respective line as said Sll0816, and preferably the activity is increased non-targeted, or
[25970] (b) a polypeptide comprising a polypeptide, a consensus sequence or at least a polypeptide motif as shown in the respective line in column 5 of Table II or in column 8 of Table IV, application no. 3, respectively, and being depicted in the same respective line as said Sll0816, or a functional equivalent or a homolog thereof as depicted in column 8 of Table II, application no. 3, preferably a homolog or functional equivalent as depicted in column 8 of Table II B, application no. 3, and being depicted in the same respective line as said Sll0816, and preferably the activity is increased non-targeted.

[25971] Accordingly, in one embodiment, the molecule which activity is to be increased in the process of the invention is the gene product with an activity as a “oxireductase”, preferably it is the molecule of section (a) or (b) of this paragraph.

[25972] In particular, it was observed that in plants, especially in Arabidopsis thaliana, increasing or generating the activity of a gene product non-targeted with the activity of a “oxireductase”, preferably being encoded by a gene comprising the nucleic acid sequence SEQ ID NO. 51198, preferably the coding region thereof, conferred the production of or the increase in glycine compared with the wild type control.

[25973] The nucleic acid sequence of Sll0816 from Synechocystis sp., e.g. as shown in the respective line in column 5 of Table I, application no. 3, has been published in C. And the activity of the gene product thereof is the activity of oxireductase.

[25974] Accordingly, in one embodiment, the process of the present invention for producing serine in a non-human organism, like a microorganism or a plant or a part thereof, comprises increasing or generating the activity of a gene product with the activity of a gene product conferring the activity of “oxireductase”, especially from Synechocystis sp. or its functional equivalent or its homolog, e.g. the increase of
[25975] (a) a gene product of a gene comprising the nucleic acid molecule as shown in the respective line in column 5 of Table I, application no. 3, preferably the coding region thereof, or a homolog or a fragment thereof, and being depicted in the same respective line as said Sll0816, or a functional equivalent or a homolog thereof as shown in column 8 of Table I, application no. 3, preferably the coding region thereof, particularly a homolog or functional equivalent as shown in column 8 of Table I B, application no. 3, and being depicted in the same respective line as said Sll0816, and preferably the activity is increased non-targeted, or
[25976] (b) a polypeptide comprising a polypeptide, a consensus sequence or at least a polypeptide motif as shown in the respective line in column 5 of Table II or in column 8 of Table IV, application no. 3, respectively, and being depicted in the same respective line as said Sll0816, or a functional equivalent or a homolog thereof as depicted in column 8 of Table II, application no. 3, preferably a homolog or functional equivalent as depicted in column 8 of Table II B, application no. 3, and being depicted in the same respective line as said Sll0816, and preferably the activity is increased non-targeted.

[25977] Accordingly, in one embodiment, the molecule which activity is to be increased in the process of the invention is the gene product with an activity as a “oxireductase”, preferably it is the molecule of section (a) or (b) of this paragraph.

[25978] In particular, it was observed that in plants, especially in Arabidopsis thaliana, increasing or generating the activity of a gene product non-targeted with the activity of a “oxireductase”, preferably being encoded by a gene comprising the nucleic acid sequence SEQ ID NO. 51198, preferably the coding region thereof, conferred the production of or the increase in serine compared with the wild type control.

[25979] The nucleic acid sequence of Sll0816 from Synechocystis sp., e.g. as shown in the respective line in column 5 of Table I, application no. 3, has been published in C. And the activity of the gene product thereof is the activity of oxireductase.

[25980] Accordingly, in one embodiment, the process of the present invention for producing tyrosine in a non-human organism, like a microorganism or a plant or a part thereof, comprises increasing or generating the activity of a gene product with the activity of a gene product conferring the activity of “oxireductase”, especially from Synechocystis sp. or its functional equivalent or its homolog, e.g. the increase of
[25981] (a) a gene product of a gene comprising the nucleic acid molecule as shown in the respective line in column 5 of Table I, application no. 3, preferably the coding region thereof, or a homolog or a fragment thereof, and being depicted in the same respective line as said Sll0816, or a functional equivalent or a homolog thereof as shown in column 8 of Table I, application no. 3, preferably the coding region thereof, particularly a homolog or functional equivalent as shown in column 8 of Table I B, application no. 3, and being depicted in the same respective line as said Sll0816, and preferably the activity is increased non-targeted, or
[25982] (b) a polypeptide comprising a polypeptide, a consensus sequence or at least a polypeptide motif as shown in the respective line in column 5 of Table II or in column 8 of Table IV, application no. 3, respectively, and being depicted in the same respective line as said Sll0816, or a functional equivalent or a homolog thereof as depicted in column 8 of Table II, application no. 3, preferably a homolog or functional equivalent as depicted in column 8 of Table II B, application no. 3, and being depicted in the same respective line as said Sll0816, and preferably the activity is increased non-targeted.

[25983] Accordingly, in one embodiment, the molecule which activity is to be increased in the process of the invention is the gene product with an activity as a “oxireductase”, preferably it is the molecule of section (a) or (b) of this paragraph.

[25984] In particular, it was observed that in plants, especially in Arabidopsis thaliana, increasing or generating the activity of a gene product non-targeted with the activity of a “oxireductase”, preferably being encoded by a gene comprising the nucleic acid sequence SEQ ID NO. 51198, preferably the coding region thereof, conferred the production of or the increase in tyrosine compared with the wild type control.

[25985] The nucleic acid sequence of Sll0891 from Synechocystis sp., e.g. as shown in the respective line in column 5 of Table I, application no. 3, has been published in C. And the activity of the gene product thereof is the activity of malate dehydrogenase.

[25986] Accordingly, in one embodiment, the process of the present invention for producing aspartate in a non-human organism, like a microorganism or a plant or a part thereof, comprises increasing or generating the activity of a gene product with the activity of a gene product conferring the activity of “malate dehydrogenase”, especially from Synechocystis sp. or its functional equivalent or its homolog, e.g. the increase of
[25987] (a) a gene product of a gene comprising the nucleic acid molecule as shown in the respective line in column 5 of Table I, application no. 3, preferably the coding region thereof, or a homolog or a fragment thereof, and being depicted in the same respective line as said Sll0891, or a functional equivalent or a homolog thereof as shown in column 8 of Table I, application no. 3, preferably the coding region thereof, particularly a homolog or functional equivalent as shown in column 8 of Table I B, application no. 3, and being depicted in the same respective line as said Sll0891, and preferably the activity is increased plastidic, or
[25988] (b) a polypeptide comprising a polypeptide, a consensus sequence or at least a polypeptide motif as shown in the respective line in column 5 of Table II or in column 8 of Table IV, application no. 3, respectively, and being depicted in the same respective line as said Sll0891, or a functional equivalent or a homolog thereof as depicted in column 8 of Table II, application no. 3, preferably a homolog or functional equivalent as depicted in column 8 of Table II B, application no. 3, and being depicted in the same respective line as said Sll0891, and preferably the activity is increased plastidic.

[25989] Accordingly, in one embodiment, the molecule which activity is to be increased in the process of the invention is the gene product with an activity as a “malate dehydrogenase”, preferably it is the molecule of section (a) or (b) of this paragraph.

[25990] In particular, it was observed that in plants, especially in Arabidopsis thaliana, increasing or generating the activity of a gene product plastidic with the activity of a “malate dehydrogenase”, preferably being encoded by a gene comprising the nucleic acid sequence SEQ ID NO. 51268, preferably the coding region thereof, conferred the production of or the increase in aspartate compared with the wild type control.

[25991] The nucleic acid sequence of Sll0891 from Synechocystis sp., e.g. as shown in the respective line in column 5 of Table I, application no. 3, has been published in C. And the activity of the gene product thereof is the activity of malate dehydrogenase.

[25992] Accordingly, in one embodiment, the process of the present invention for producing phenylalanine in a non-human organism, like a microorganism or a plant or a part thereof, comprises increasing or generating the activity of a gene product with the activity of a gene product conferring the activity of “malate dehydrogenase”, especially from Synechocystis sp. or its functional equivalent or its homolog, e.g. the increase of
[25993] (a) a gene product of a gene comprising the nucleic acid molecule as shown in the respective line in column 5 of Table I, application no. 3, preferably the coding region thereof, or a homolog or a fragment thereof, and being depicted in the same respective line as said Sll0891, or a functional equivalent or a homolog thereof as shown in column 8 of Table I, application no. 3, preferably the coding region thereof, particularly a homolog or functional equivalent as shown in column 8 of Table I B, application no. 3, and being depicted in the same respective line as said Sll0891, and preferably the activity is increased plastidic, or
[25994] (b) a polypeptide comprising a polypeptide, a consensus sequence or at least a polypeptide motif as shown in the respective line in column 5 of Table II or in column 8 of Table IV, application no. 3, respectively, and being depicted in the same respective line as said Sll0891, or a functional equivalent or a homolog thereof as depicted in column 8 of Table II, application no. 3, preferably a homolog or functional equivalent as depicted in column 8 of Table II B, application no. 3, and being depicted in the same respective line as said Sll0891, and preferably the activity is increased plastidic.

[25995] Accordingly, in one embodiment, the molecule which activity is to be increased in the process of the invention is the gene product with an activity as a “malate dehydrogenase”, preferably it is the molecule of section (a) or (b) of this paragraph.

[25996] In particular, it was observed that in plants, especially in Arabidopsis thaliana, increasing or generating the activity of a gene product plastidic with the activity of a “malate dehydrogenase”, preferably being encoded by a gene comprising the nucleic acid sequence SEQ ID NO. 51268, preferably the coding region thereof, conferred the production of or the increase in phenylalanine compared with the wild type control.

[25997] The nucleic acid sequence of Sll0891 from Synechocystis sp., e.g. as shown in the respective line in column 5 of Table I, application no. 3, has been published in C. And the activity of the gene product thereof is the activity of malate dehydrogenase.

[25998] Accordingly, in one embodiment, the process of the present invention for producing serine in a non-human organism, like a microorganism or a plant or a part thereof, comprises increasing or generating the activity of a gene product with the activity of a gene product conferring the activity of “malate dehydrogenase”, especially from Synechocystis sp. or its functional equivalent or its homolog, e.g. the increase of
[25999] (a) a gene product of a gene comprising the nucleic acid molecule as shown in the respective line in column 5 of Table I, application no. 3, preferably the coding region thereof, or a homolog or a fragment thereof, and being depicted in the same respective line as said Sll0891, or a functional equivalent or a homolog thereof as shown in column 8 of Table I, application no. 3, preferably the coding region thereof, particularly a homolog or functional equivalent as shown in column 8 of Table I B, application no. 3, and being depicted in the same respective line as said Sll0891, and preferably the activity is increased plastidic, or
[26000] (b) a polypeptide comprising a polypeptide, a consensus sequence or at least a polypeptide motif as shown in the respective line in column 5 of Table II or in column 8 of Table IV, application no. 3, respectively, and being depicted in the same respective line as said Sll0891, or a functional equivalent or a homolog thereof as depicted in column 8 of Table II, application no. 3, preferably a homolog or functional equivalent as depicted in column 8 of Table II B, application no. 3, and being depicted in the same respective line as said Sll0891, and preferably the activity is increased plastidic.

[26001] Accordingly, in one embodiment, the molecule which activity is to be increased in the process of the invention is the gene product with an activity as a “malate dehydrogenase”, preferably it is the molecule of section (a) or (b) of this paragraph.

[26002] In particular, it was observed that in plants, especially in Arabidopsis thaliana, increasing or generating the activity of a gene product plastidic with the activity of a “malate dehydrogenase”, preferably being encoded by a gene comprising the nucleic acid sequence SEQ ID NO. 51268, preferably the coding region thereof, conferred the production of or the increase in serine compared with the wild type control.

[26003] The nucleic acid sequence of Sll0934 from Synechocystis sp., e.g. as shown in the respective line in column 5 of Table I, application no. 3, has been published in C. And the activity of the gene product thereof is the activity of 3-deoxy-7-phosphoheptulonate synthase.

[26004] Accordingly, in one embodiment, the process of the present invention for producing aspartate in a non-human organism, like a microorganism or a plant or a part thereof, comprises increasing or generating the activity of a gene product with the activity of a gene product conferring the activity of “3-deoxy-7-phosphoheptulonate synthase”, especially from Synechocystis sp. or its functional equivalent or its homolog, e.g. the increase of
[26005] (a) a gene product of a gene comprising the nucleic acid molecule as shown in the respective line in column 5 of Table I, application no. 3, preferably the coding region thereof, or a homolog or a fragment thereof, and being depicted in the same respective line as said Sll0934, or a functional equivalent or a homolog thereof as shown in column 8 of Table I, application no. 3, preferably the coding region thereof, particularly a homolog or functional equivalent as shown in column 8 of Table I B, application no. 3, and being depicted in the same respective line as said Sll0934, and preferably the activity is increased mitochondrial, or
[26006] (b) a polypeptide comprising a polypeptide, a consensus sequence or at least a polypeptide motif as shown in the respective line in column 5 of Table II or in column 8 of Table IV, application no. 3, respectively, and being depicted in the same respective line as said Sll0934, or a functional equivalent or a homolog thereof as depicted in column 8 of Table II, application no. 3, preferably a homolog or functional equivalent as depicted in column 8 of Table II B, application no. 3, and being depicted in the same respective line as said Sll0934, and preferably the activity is increased mitochondrial.

[26007] Accordingly, in one embodiment, the molecule which activity is to be increased in the process of the invention is the gene product with an activity as a “3-deoxy-7-phosphoheptulonate synthase”, preferably it is the molecule of section (a) or (b) of this paragraph.

[26008] In particular, it was observed that in plants, especially in Arabidopsis thaliana, increasing or generating the activity of a gene product mitochondrial with the activity of a “3-deoxy-7-phosphoheptulonate synthase”, preferably being encoded by a gene comprising the nucleic acid sequence SEQ ID NO. 52246, preferably the coding region thereof, conferred the production of or the increase in aspartate compared with the wild type control.

[26009] The nucleic acid sequence of Sll0945 from Synechocystis sp., e.g. as shown in the respective line in column 5 of Table I, application no. 3, has been published in C. And the activity of the gene product thereof is the activity of glycogen synthase.

[26010] Accordingly, in one embodiment, the process of the present invention for producing serine in a non-human organism, like a microorganism or a plant or a part thereof, comprises increasing or generating the activity of a gene product with the activity of a gene product conferring the activity of “glycogen synthase”, especially from Synechocystis sp. or its functional equivalent or its homolog, e.g. the increase of
[26011] (a) a gene product of a gene comprising the nucleic acid molecule as shown in the respective line in column 5 of Table I, application no. 3, preferably the coding region thereof, or a homolog or a fragment thereof, and being depicted in the same respective line as said Sll0945, or a functional equivalent or a homolog thereof as shown in column 8 of Table I, application no. 3, preferably the coding region thereof, particularly a homolog or functional equivalent as shown in column 8 of Table I B, application no. 3, and being depicted in the same respective line as said Sll0945, and preferably the activity is increased non-targeted, or
[26012] (b) a polypeptide comprising a polypeptide, a consensus sequence or at least a polypeptide motif as shown in the respective line in column 5 of Table II or in column 8 of Table IV, application no. 3, respectively, and being depicted in the same respective line as said Sll0945, or a functional equivalent or a homolog thereof as depicted in column 8 of Table II, application no. 3, preferably a homolog or functional equivalent as depicted in column 8 of Table II B, application no. 3, and being depicted in the same respective line as said Sll0945, and preferably the activity is increased non-targeted.

[26013] Accordingly, in one embodiment, the molecule which activity is to be increased in the process of the invention is the gene product with an activity as a “glycogen synthase”, preferably it is the molecule of section (a) or (b) of this paragraph.

[26014] In particular, it was observed that in plants, especially in Arabidopsis thaliana, increasing or generating the activity of a gene product non-targeted with the activity of a “glycogen synthase”, preferably being encoded by a gene comprising the nucleic acid sequence SEQ ID NO. 52364, preferably the coding region thereof, conferred the production of or the increase in serine compared with the wild type control.

[26015] The nucleic acid sequence of Sll1031 from Synechocystis sp., e.g. as shown in the respective line in column 5 of Table I, application no. 3, has been published in C. And the activity of the gene product thereof is the activity of carbon dioxide concentrating mechanism protein.

[26016] Accordingly, in one embodiment, the process of the present invention for producing aspartate in a non-human organism, like a microorganism or a plant or a part thereof, comprises increasing or generating the activity of a gene product with the activity of a gene product conferring the activity of “carbon dioxide concentrating mechanism protein”, especially from Synechocystis sp. or its functional equivalent or its homolog, e.g. the increase of
[26017] (a) a gene product of a gene comprising the nucleic acid molecule as shown in the respective line in column 5 of Table I, application no. 3, preferably the coding region thereof, or a homolog or a fragment thereof, and being depicted in the same respective line as said Sll1031, or a functional equivalent or a homolog thereof as shown in column 8 of Table I, application no. 3, preferably the coding region thereof, particularly a homolog or functional equivalent as shown in column 8 of Table I B, application no. 3, and being depicted in the same respective line as said Sll1031, and preferably the activity is increased mitochondrial, or
[26018] (b) a polypeptide comprising a polypeptide, a consensus sequence or at least a polypeptide motif as shown in the respective line in column 5 of Table II or in column 8 of Table IV, application no. 3, respectively, and being depicted in the same respective line as said Sll1031, or a functional equivalent or a homolog thereof as depicted in column 8 of Table II, application no. 3, preferably a homolog or functional equivalent as depicted in column 8 of Table II B, application no. 3, and being depicted in the same respective line as said Sll1031, and preferably the activity is increased mitochondrial.

[26019] Accordingly, in one embodiment, the molecule which activity is to be increased in the process of the invention is the gene product with an activity as a “carbon dioxide concentrating mechanism protein”, preferably it is the molecule of section (a) or (b) of this paragraph.

[26020] In particular, it was observed that in plants, especially in Arabidopsis thaliana, increasing or generating the activity of a gene product mitochondrial with the activity of a “carbon dioxide concentrating mechanism protein”, preferably being encoded by a gene comprising the nucleic acid sequence SEQ ID NO. 52634, preferably the coding region thereof, conferred the production of or the increase in aspartate compared with the wild type control.

[26021] The nucleic acid sequence of Sll1031 from Synechocystis sp., e.g. as shown in the respective line in column 5 of Table I, application no. 3, has been published in C. And the activity of the gene product thereof is the activity of carbon dioxide concentrating mechanism protein.

[26022] Accordingly, in one embodiment, the process of the present invention for producing phenylalanine in a non-human organism, like a microorganism or a plant or a part thereof, comprises increasing or generating the activity of a gene product with the activity of a gene product conferring the activity of “carbon dioxide concentrating mechanism protein”, especially from Synechocystis sp. or its functional equivalent or its homolog, e.g. the increase of
[26023] (a) a gene product of a gene comprising the nucleic acid molecule as shown in the respective line in column 5 of Table I, application no. 3, preferably the coding region thereof, or a homolog or a fragment thereof, and being depicted in the same respective line as said Sll1031, or a functional equivalent or a homolog thereof as shown in column 8 of Table I, application no. 3, preferably the coding region thereof, particularly a homolog or functional equivalent as shown in column 8 of Table I B, application no. 3, and being depicted in the same respective line as said Sll1031, and preferably the activity is increased mitochondrial, or
[26024] (b) a polypeptide comprising a polypeptide, a consensus sequence or at least a polypeptide motif as shown in the respective line in column 5 of Table II or in column 8 of Table IV, application no. 3, respectively, and being depicted in the same respective line as said Sll1031, or a functional equivalent or a homolog thereof as depicted in column 8 of Table II, application no. 3, preferably a homolog or functional equivalent as depicted in column 8 of Table II B, application no. 3, and being depicted in the same respective line as said Sll1031, and preferably the activity is increased mitochondrial.

[26025] Accordingly, in one embodiment, the molecule which activity is to be increased in the process of the invention is the gene product with an activity as a “carbon dioxide concentrating mechanism protein”, preferably it is the molecule of section (a) or (b) of this paragraph.

[26026] In particular, it was observed that in plants, especially in Arabidopsis thaliana, increasing or generating the activity of a gene product mitochondrial with the activity of a “carbon dioxide concentrating mechanism protein”, preferably being encoded by a gene comprising the nucleic acid sequence SEQ ID NO. 52634, preferably the coding region thereof, conferred the production of or the increase in phenylalanine compared with the wild type control.

[26027] The nucleic acid sequence of Sll1031 from Synechocystis sp., e.g. as shown in the respective line in column 5 of Table I, application no. 3, has been published in C. And the activity of the gene product thereof is the activity of carbon dioxide concentrating mechanism protein.

[26028] Accordingly, in one embodiment, the process of the present invention for producing serine in a non-human organism, like a microorganism or a plant or a part thereof, comprises increasing or generating the activity of a gene product with the activity of a gene product conferring the activity of “carbon dioxide concentrating mechanism protein”, especially from Synechocystis sp. or its functional equivalent or its homolog, e.g. the increase of
[26029] (a) a gene product of a gene comprising the nucleic acid molecule as shown in the respective line in column 5 of Table I, application no. 3, preferably the coding region thereof, or a homolog or a fragment thereof, and being depicted in the same respective line as said Sll1031, or a functional equivalent or a homolog thereof as shown in column 8 of Table I, application no. 3, preferably the coding region thereof, particularly a homolog or functional equivalent as shown in column 8 of Table I B, application no. 3, and being depicted in the same respective line as said Sll1031, and preferably the activity is increased mitochondrial, or
[26030] (b) a polypeptide comprising a polypeptide, a consensus sequence or at least a polypeptide motif as shown in the respective line in column 5 of Table II or in column 8 of Table IV, application no. 3, respectively, and being depicted in the same respective line as said Sll1031, or a functional equivalent or a homolog thereof as depicted in column 8 of Table II, application no. 3, preferably a homolog or functional equivalent as depicted in column 8 of Table II B, application no. 3, and being depicted in the same respective line as said Sll1031, and preferably the activity is increased mitochondrial.

[26031] Accordingly, in one embodiment, the molecule which activity is to be increased in the process of the invention is the gene product with an activity as a “carbon dioxide concentrating mechanism protein”, preferably it is the molecule of section (a) or (b) of this paragraph.

[26032] In particular, it was observed that in plants, especially in Arabidopsis thaliana, increasing or generating the activity of a gene product mitochondrial with the activity of a “carbon dioxide concentrating mechanism protein”, preferably being encoded by a gene comprising the nucleic acid sequence SEQ ID NO. 52634, preferably the coding region thereof, conferred the production of or the increase in serine compared with the wild type control.

[26033] The nucleic acid sequence of Sll1032 from Synechocystis sp., e.g. as shown in the respective line in column 5 of Table I, application no. 3, has been published in C. And the activity of the gene product thereof is the activity of sll1032-protein.

[26034] Accordingly, in one embodiment, the process of the present invention for producing aspartate in a non-human organism, like a microorganism or a plant or a part thereof, comprises increasing or generating the activity of a gene product with the activity of a gene product conferring the activity of “sll1032-protein”, especially from Synechocystis sp. or its functional equivalent or its homolog, e.g. the increase of
[26035] (a) a gene product of a gene comprising the nucleic acid molecule as shown in the respective line in column 5 of Table I, application no. 3, preferably the coding region thereof, or a homolog or a fragment thereof, and being depicted in the same respective line as said Sll1032, or a functional equivalent or a homolog thereof as shown in column 8 of Table I, application no. 3, preferably the coding region thereof, particularly a homolog or functional equivalent as shown in column 8 of Table I B, application no. 3, and being depicted in the same respective line as said Sll1032, and preferably the activity is increased mitochondrial, or
[26036] (b) a polypeptide comprising a polypeptide, a consensus sequence or at least a polypeptide motif as shown in the respective line in column 5 of Table II or in column 8 of Table IV, application no. 3, respectively, and being depicted in the same respective line as said Sll1032, or a functional equivalent or a homolog thereof as depicted in column 8 of Table II, application no. 3, preferably a homolog or functional equivalent as depicted in column 8 of Table II B, application no. 3, and being depicted in the same respective line as said Sll1032, and preferably the activity is increased mitochondrial.

[26037] Accordingly, in one embodiment, the molecule which activity is to be increased in the process of the invention is the gene product with an activity as a “sll1032-protein”, preferably it is the molecule of section (a) or (b) of this paragraph.

[26038] In particular, it was observed that in plants, especially in Arabidopsis thaliana, increasing or generating the activity of a gene product mitochondrial with the activity of a “sll1032-protein”, preferably being encoded by a gene comprising the nucleic acid sequence SEQ ID NO. 85723, preferably the coding region thereof, conferred the production of or the increase in aspartate compared with the wild type control.

[26039] The nucleic acid sequence of Sll1056 from Synechocystis sp., e.g. as shown in the respective line in column 5 of Table I, application no. 3, has been published in C. And the activity of the gene product thereof is the activity of phosphoribosylformyl glycinamidine synthase subunit.

[26040] Accordingly, in one embodiment, the process of the present invention for producing serine in a non-human organism, like a microorganism or a plant or a part thereof, comprises increasing or generating the activity of a gene product with the activity of a gene product conferring the activity of “phosphoribosylformyl glycinamidine synthase subunit”, especially from Synechocystis sp. or its functional equivalent or its homolog, e.g. the increase of
[26041] (a) a gene product of a gene comprising the nucleic acid molecule as shown in the respective line in column 5 of Table I, application no. 3, preferably the coding region thereof, or a homolog or a fragment thereof, and being depicted in the same respective line as said Sll1056, or a functional equivalent or a homolog thereof as shown in column 8 of Table I, application no. 3, preferably the coding region thereof, particularly a homolog or functional equivalent as shown in column 8 of Table I B, application no. 3, and being depicted in the same respective line as said Sll1056, and preferably the activity is increased plastidic, or
[26042] (b) a polypeptide comprising a polypeptide, a consensus sequence or at least a polypeptide motif as shown in the respective line in column 5 of Table II or in column 8 of Table IV, application no. 3, respectively, and being depicted in the same respective line as said Sll1056, or a functional equivalent or a homolog thereof as depicted in column 8 of Table II, application no. 3, preferably a homolog or functional equivalent as depicted in column 8 of Table II B, application no. 3, and being depicted in the same respective line as said Sll1056, and preferably the activity is increased plastidic.

[26043] Accordingly, in one embodiment, the molecule which activity is to be increased in the process of the invention is the gene product with an activity as a “phosphoribosylformyl glycinamidine synthase subunit”, preferably it is the molecule of section (a) or (b) of this paragraph.

[26044] In particular, it was observed that in plants, especially in Arabidopsis thaliana, increasing or generating the activity of a gene product plastidic with the activity of a “phosphoribosylformyl glycinamidine synthase subunit”, preferably being encoded by a gene comprising the nucleic acid sequence SEQ ID NO. 52660, preferably the coding region thereof, conferred the production of or the increase in serine compared with the wild type control.

[26045] The nucleic acid sequence of Sll1108 from Synechocystis sp., e.g. as shown in the respective line in column 5 of Table I, application no. 3, has been published in C. And the activity of the gene product thereof is the activity of 5′-nucleotidase.

[26046] Accordingly, in one embodiment, the process of the present invention for producing aspartate in a non-human organism, like a microorganism or a plant or a part thereof, comprises increasing or generating the activity of a gene product with the activity of a gene product conferring the activity of “5′-nucleotidase”, especially from Synechocystis sp. or its functional equivalent or its homolog, e.g. the increase of
[26047] (a) a gene product of a gene comprising the nucleic acid molecule as shown in the respective line in column 5 of Table I, application no. 3, preferably the coding region thereof, or a homolog or a fragment thereof, and being depicted in the same respective line as said Sll1108, or a functional equivalent or a homolog thereof as shown in column 8 of Table I, application no. 3, preferably the coding region thereof, particularly a homolog or functional equivalent as shown in column 8 of Table I B, application no. 3, and being depicted in the same respective line as said Sll1108, and preferably the activity is increased mitochondrial, or
[26048] (b) a polypeptide comprising a polypeptide, a consensus sequence or at least a polypeptide motif as shown in the respective line in column 5 of Table II or in column 8 of Table IV, application no. 3, respectively, and being depicted in the same respective line as said Sll1108, or a functional equivalent or a homolog thereof as depicted in column 8 of Table II, application no. 3, preferably a homolog or functional equivalent as depicted in column 8 of Table II B, application no. 3, and being depicted in the same respective line as said Sll1108, and preferably the activity is increased mitochondrial.

[26049] Accordingly, in one embodiment, the molecule which activity is to be increased in the process of the invention is the gene product with an activity as a “5′-nucleotidase”, preferably it is the molecule of section (a) or (b) of this paragraph.

[26050] In particular, it was observed that in plants, especially in Arabidopsis thaliana, increasing or generating the activity of a gene product mitochondrial with the activity of a “5′-nucleotidase”, preferably being encoded by a gene comprising the nucleic acid sequence SEQ ID NO. 11211, preferably the coding region thereof, conferred the production of or the increase in aspartate compared with the wild type control.

[26051] The nucleic acid sequence of Sll1108 from Synechocystis sp., e.g. as shown in the respective line in column 5 of Table I, application no. 3, has been published in C. And the activity of the gene product thereof is the activity of 5′-nucleotidase.

[26052] Accordingly, in one embodiment, the process of the present invention for producing 5-oxoproline in a non-human organism, like a microorganism or a plant or a part thereof, comprises increasing or generating the activity of a gene product with the activity of a gene product conferring the activity of “5′-nucleotidase”, especially from Synechocystis sp. or its functional equivalent or its homolog, e.g. the increase of
[26053] (a) a gene product of a gene comprising the nucleic acid molecule as shown in the respective line in column 5 of Table I, application no. 3, preferably the coding region thereof, or a homolog or a fragment thereof, and being depicted in the same respective line as said Sll1108, or a functional equivalent or a homolog thereof as shown in column 8 of Table I, application no. 3, preferably the coding region thereof, particularly a homolog or functional equivalent as shown in column 8 of Table I B, application no. 3, and being depicted in the same respective line as said Sll1108, and preferably the activity is increased mitochondrial, or
[26054] (b) a polypeptide comprising a polypeptide, a consensus sequence or at least a polypeptide motif as shown in the respective line in column 5 of Table II or in column 8 of Table IV, application no. 3, respectively, and being depicted in the same respective line as said Sll1108, or a functional equivalent or a homolog thereof as depicted in column 8 of Table II, application no. 3, preferably a homolog or functional equivalent as depicted in column 8 of Table II B, application no. 3, and being depicted in the same respective line as said Sll1108, and preferably the activity is increased mitochondrial.

[26055] Accordingly, in one embodiment, the molecule which activity is to be increased in the process of the invention is the gene product with an activity as a “5′-nucleotidase”, preferably it is the molecule of section (a) or (b) of this paragraph.

[26056] In particular, it was observed that in plants, especially in Arabidopsis thaliana, increasing or generating the activity of a gene product mitochondrial with the activity of a “5′-nucleotidase”, preferably being encoded by a gene comprising the nucleic acid sequence SEQ ID NO. 11211, preferably the coding region thereof, conferred the production of or the increase in 5-oxoproline compared with the wild type control.

[26057] The nucleic acid sequence of Sll1393 from Synechocystis sp., e.g. as shown in the respective line in column 5 of Table I, application no. 3, has been published in C. And the activity of the gene product thereof is the activity of glycogen (starch) synthase.

[26058] Accordingly, in one embodiment, the process of the present invention for producing asparagine in a non-human organism, like a microorganism or a plant or a part thereof, comprises increasing or generating the activity of a gene product with the activity of a gene product conferring the activity of “glycogen (starch) synthase”, especially from Synechocystis sp. or its functional equivalent or its homolog, e.g. the increase of
[26059] (a) a gene product of a gene comprising the nucleic acid molecule as shown in the respective line in column 5 of Table I, application no. 3, preferably the coding region thereof, or a homolog or a fragment thereof, and being depicted in the same respective line as said Sll1393, or a functional equivalent or a homolog thereof as shown in column 8 of Table I, application no. 3, preferably the coding region thereof, particularly a homolog or functional equivalent as shown in column 8 of Table I B, application no. 3, and being depicted in the same respective line as said Sll1393, and preferably the activity is increased non-targeted, or
[26060] (b) a polypeptide comprising a polypeptide, a consensus sequence or at least a polypeptide motif as shown in the respective line in column 5 of Table II or in column 8 of Table IV, application no. 3, respectively, and being depicted in the same respective line as said Sll1393, or a functional equivalent or a homolog thereof as depicted in column 8 of Table II, application no. 3, preferably a homolog or functional equivalent as depicted in column 8 of Table II B, application no. 3, and being depicted in the same respective line as said Sll1393, and preferably the activity is increased non-targeted.

[26061] Accordingly, in one embodiment, the molecule which activity is to be increased in the process of the invention is the gene product with an activity as a “glycogen (starch) synthase”, preferably it is the molecule of section (a) or (b) of this paragraph.

[26062] In particular, it was observed that in plants, especially in Arabidopsis thaliana, increasing or generating the activity of a gene product non-targeted with the activity of a “glycogen (starch) synthase”, preferably being encoded by a gene comprising the nucleic acid sequence SEQ ID NO. 53456, preferably the coding region thereof, conferred the production of or the increase in asparagine compared with the wild type control.

[26063] The nucleic acid sequence of Sll1393 from Synechocystis sp., e.g. as shown in the respective line in column 5 of Table I, application no. 3, has been published in C. And the activity of the gene product thereof is the activity of glycogen (starch) synthase.

[26064] Accordingly, in one embodiment, the process of the present invention for producing tyrosine in a non-human organism, like a microorganism or a plant or a part thereof, comprises increasing or generating the activity of a gene product with the activity of a gene product conferring the activity of “glycogen (starch) synthase”, especially from Synechocystis sp. or its functional equivalent or its homolog, e.g. the increase of
[26065] (a) a gene product of a gene comprising the nucleic acid molecule as shown in the respective line in column 5 of Table I, application no. 3, preferably the coding region thereof, or a homolog or a fragment thereof, and being depicted in the same respective line as said Sll1393, or a functional equivalent or a homolog thereof as shown in column 8 of Table I, application no. 3, preferably the coding region thereof, particularly a homolog or functional equivalent as shown in column 8 of Table I B, application no. 3, and being depicted in the same respective line as said Sll1393, and preferably the activity is increased non-targeted, or
[26066] (b) a polypeptide comprising a polypeptide, a consensus sequence or at least a polypeptide motif as shown in the respective line in column 5 of Table II or in column 8 of Table IV, application no. 3, respectively, and being depicted in the same respective line as said Sll1393, or a functional equivalent or a homolog thereof as depicted in column 8 of Table II, application no. 3, preferably a homolog or functional equivalent as depicted in column 8 of Table II B, application no. 3, and being depicted in the same respective line as said Sll1393, and preferably the activity is increased non-targeted.

[26067] Accordingly, in one embodiment, the molecule which activity is to be increased in the process of the invention is the gene product with an activity as a “glycogen (starch) synthase”, preferably it is the molecule of section (a) or (b) of this paragraph.

[26068] In particular, it was observed that in plants, especially in Arabidopsis thaliana, increasing or generating the activity of a gene product non-targeted with the activity of a “glycogen (starch) synthase”, preferably being encoded by a gene comprising the nucleic acid sequence SEQ ID NO. 53456, preferably the coding region thereof, conferred the production of or the increase in tyrosine compared with the wild type control.

[26069] The nucleic acid sequence of Sll1443 from Synechocystis sp., e.g. as shown in the respective line in column 5 of Table I, application no. 3, has been published in C. And the activity of the gene product thereof is the activity of CTP synthetase.

[26070] Accordingly, in one embodiment, the process of the present invention for producing aspartate in a non-human organism, like a microorganism or a plant or a part thereof, comprises increasing or generating the activity of a gene product with the activity of a gene product conferring the activity of “CTP synthetase”, especially from Synechocystis sp. or its functional equivalent or its homolog, e.g. the increase of
[26071] (a) a gene product of a gene comprising the nucleic acid molecule as shown in the respective line in column 5 of Table I, application no. 3, preferably the coding region thereof, or a homolog or a fragment thereof, and being depicted in the same respective line as said Sll1443, or a functional equivalent or a homolog thereof as shown in column 8 of Table I, application no. 3, preferably the coding region thereof, particularly a homolog or functional equivalent as shown in column 8 of Table I B, application no. 3, and being depicted in the same respective line as said Sll1443, and preferably the activity is increased mitochondrial, or
[26072] (b) a polypeptide comprising a polypeptide, a consensus sequence or at least a polypeptide motif as shown in the respective line in column 5 of Table II or in column 8 of Table IV, application no. 3, respectively, and being depicted in the same respective line as said Sll1443, or a functional equivalent or a homolog thereof as depicted in column 8 of Table II, application no. 3, preferably a homolog or functional equivalent as depicted in column 8 of Table II B, application no. 3, and being depicted in the same respective line as said Sll1443, and preferably the activity is increased mitochondrial.

[26073] Accordingly, in one embodiment, the molecule which activity is to be increased in the process of the invention is the gene product with an activity as a “CTP synthetase”, preferably it is the molecule of section (a) or (b) of this paragraph.

[26074] In particular, it was observed that in plants, especially in Arabidopsis thaliana, increasing or generating the activity of a gene product mitochondrial with the activity of a “CTP synthetase”, preferably being encoded by a gene comprising the nucleic acid sequence SEQ ID NO. 53878, preferably the coding region thereof, conferred the production of or the increase in aspartate compared with the wild type control.

[26075] The nucleic acid sequence of Sll1450 from Synechocystis sp., e.g. as shown in the respective line in column 5 of Table I, application no. 3, has been published in C. And the activity of the gene product thereof is the activity of nitrate/nitrite transport protein.

[26076] Accordingly, in one embodiment, the process of the present invention for producing glycine in a non-human organism, like a microorganism or a plant or a part thereof, comprises increasing or generating the activity of a gene product with the activity of a gene product conferring the activity of “nitrate/nitrite transport protein”, especially from Synechocystis sp. or its functional equivalent or its homolog, e.g. the increase of
[26077] (a) a gene product of a gene comprising the nucleic acid molecule as shown in the respective line in column 5 of Table I, application no. 3, preferably the coding region thereof, or a homolog or a fragment thereof, and being depicted in the same respective line as said Sll1450, or a functional equivalent or a homolog thereof as shown in column 8 of Table I, application no. 3, preferably the coding region thereof, particularly a homolog or functional equivalent as shown in column 8 of Table I B, application no. 3, and being depicted in the same respective line as said Sll1450, and preferably the activity is increased mitochondrial, or
[26078] (b) a polypeptide comprising a polypeptide, a consensus sequence or at least a polypeptide motif as shown in the respective line in column 5 of Table II or in column 8 of Table IV, application no. 3, respectively, and being depicted in the same respective line as said Sll1450, or a functional equivalent or a homolog thereof as depicted in column 8 of Table II, application no. 3, preferably a homolog or functional equivalent as depicted in column 8 of Table II B, application no. 3, and being depicted in the same respective line as said Sll1450, and preferably the activity is increased mitochondrial.

[26079] Accordingly, in one embodiment, the molecule which activity is to be increased in the process of the invention is the gene product with an activity as a “nitrate/nitrite transport protein”, preferably it is the molecule of section (a) or (b) of this paragraph.

[26080] In particular, it was observed that in plants, especially in Arabidopsis thaliana, increasing or generating the activity of a gene product mitochondrial with the activity of a “nitrate/nitrite transport protein”, preferably being encoded by a gene comprising the nucleic acid sequence SEQ ID NO. 54337, preferably the coding region thereof, conferred the production of or the increase in glycine compared with the wild type control.

[26081] The nucleic acid sequence of Sll1450 from Synechocystis sp., e.g. as shown in the respective line in column 5 of Table I, application no. 3, has been published in C. And the activity of the gene product thereof is the activity of nitrate/nitrite transport protein.

[26082] Accordingly, in one embodiment, the process of the present invention for producing phenylalanine in a non-human organism, like a microorganism or a plant or a part thereof, comprises increasing or generating the activity of a gene product with the activity of a gene product conferring the activity of “nitrate/nitrite transport protein”, especially from Synechocystis sp. or its functional equivalent or its homolog, e.g. the increase of
[26083] (a) a gene product of a gene comprising the nucleic acid molecule as shown in the respective line in column 5 of Table I, application no. 3, preferably the coding region thereof, or a homolog or a fragment thereof, and being depicted in the same respective line as said Sll1450, or a functional equivalent or a homolog thereof as shown in column 8 of Table I, application no. 3, preferably the coding region thereof, particularly a homolog or functional equivalent as shown in column 8 of Table I B, application no. 3, and being depicted in the same respective line as said Sll1450, and preferably the activity is increased mitochondrial, or
[26084] (b) a polypeptide comprising a polypeptide, a consensus sequence or at least a polypeptide motif as shown in the respective line in column 5 of Table II or in column 8 of Table IV, application no. 3, respectively, and being depicted in the same respective line as said Sll1450, or a functional equivalent or a homolog thereof as depicted in column 8 of Table II, application no. 3, preferably a homolog or functional equivalent as depicted in column 8 of Table II B, application no. 3, and being depicted in the same respective line as said Sll1450, and preferably the activity is increased mitochondrial.

[26085] Accordingly, in one embodiment, the molecule which activity is to be increased in the process of the invention is the gene product with an activity as a “nitrate/nitrite transport protein”, preferably it is the molecule of section (a) or (b) of this paragraph.

[26086] In particular, it was observed that in plants, especially in Arabidopsis thaliana, increasing or generating the activity of a gene product mitochondrial with the activity of a “nitrate/nitrite transport protein”, preferably being encoded by a gene comprising the nucleic acid sequence SEQ ID NO. 54337, preferably the coding region thereof, conferred the production of or the increase in phenylalanine compared with the wild type control.

[26087] The nucleic acid sequence of Sll1450 from Synechocystis sp., e.g. as shown in the respective line in column 5 of Table I, application no. 3, has been published in C. And the activity of the gene product thereof is the activity of nitrate/nitrite transport protein.

[26088] Accordingly, in one embodiment, the process of the present invention for producing serine in a non-human organism, like a microorganism or a plant or a part thereof, comprises increasing or generating the activity of a gene product with the activity of a gene product conferring the activity of “nitrate/nitrite transport protein”, especially from Synechocystis sp. or its functional equivalent or its homolog, e.g. the increase of
[26089] (a) a gene product of a gene comprising the nucleic acid molecule as shown in the respective line in column 5 of Table I, application no. 3, preferably the coding region thereof, or a homolog or a fragment thereof, and being depicted in the same respective line as said Sll1450, or a functional equivalent or a homolog thereof as shown in column 8 of Table I, application no. 3, preferably the coding region thereof, particularly a homolog or functional equivalent as shown in column 8 of Table I B, application no. 3, and being depicted in the same respective line as said Sll1450, and preferably the activity is increased mitochondrial, or
[26090] (b) a polypeptide comprising a polypeptide, a consensus sequence or at least a polypeptide motif as shown in the respective line in column 5 of Table II or in column 8 of Table IV, application no. 3, respectively, and being depicted in the same respective line as said Sll1450, or a functional equivalent or a homolog thereof as depicted in column 8 of Table II, application no. 3, preferably a homolog or functional equivalent as depicted in column 8 of Table II B, application no. 3, and being depicted in the same respective line as said Sll1450, and preferably the activity is increased mitochondrial.

[26091] Accordingly, in one embodiment, the molecule which activity is to be increased in the process of the invention is the gene product with an activity as a “nitrate/nitrite transport protein”, preferably it is the molecule of section (a) or (b) of this paragraph.

[26092] In particular, it was observed that in plants, especially in Arabidopsis thaliana, increasing or generating the activity of a gene product mitochondrial with the activity of a “nitrate/nitrite transport protein”, preferably being encoded by a gene comprising the nucleic acid sequence SEQ ID NO. 54337, preferably the coding region thereof, conferred the production of or the increase in serine compared with the wild type control.

[26093] The nucleic acid sequence of Sll1450 from Synechocystis sp., e.g. as shown in the respective line in column 5 of Table I, application no. 3, has been published in C. And the activity of the gene product thereof is the activity of nitrate/nitrite transport protein.

[26094] Accordingly, in one embodiment, the process of the present invention for producing tyrosine in a non-human organism, like a microorganism or a plant or a part thereof, comprises increasing or generating the activity of a gene product with the activity of a gene product conferring the activity of “nitrate/nitrite transport protein”, especially from Synechocystis sp. or its functional equivalent or its homolog, e.g. the increase of
[26095] (a) a gene product of a gene comprising the nucleic acid molecule as shown in the respective line in column 5 of Table I, application no. 3, preferably the coding region thereof, or a homolog or a fragment thereof, and being depicted in the same respective line as said Sll1450, or a functional equivalent or a homolog thereof as shown in column 8 of Table I, application no. 3, preferably the coding region thereof, particularly a homolog or functional equivalent as shown in column 8 of Table I B, application no. 3, and being depicted in the same respective line as said Sll1450, and preferably the activity is increased mitochondrial, or
[26096] (b) a polypeptide comprising a polypeptide, a consensus sequence or at least a polypeptide motif as shown in the respective line in column 5 of Table II or in column 8 of Table IV, application no. 3, respectively, and being depicted in the same respective line as said Sll1450, or a functional equivalent or a homolog thereof as depicted in column 8 of Table II, application no. 3, preferably a homolog or functional equivalent as depicted in column 8 of Table II B, application no. 3, and being depicted in the same respective line as said Sll1450, and preferably the activity is increased mitochondrial.

[26097] Accordingly, in one embodiment, the molecule which activity is to be increased in the process of the invention is the gene product with an activity as a “nitrate/nitrite transport protein”, preferably it is the molecule of section (a) or (b) of this paragraph.

[26098] In particular, it was observed that in plants, especially in Arabidopsis thaliana, increasing or generating the activity of a gene product mitochondrial with the activity of a “nitrate/nitrite transport protein”, preferably being encoded by a gene comprising the nucleic acid sequence SEQ ID NO. 54337, preferably the coding region thereof, conferred the production of or the increase in tyrosine compared with the wild type control.

[26099] The nucleic acid sequence of Sll1522 from Synechocystis sp., e.g. as shown in the respective line in column 5 of Table I, application no. 3, has been published in C. And the activity of the gene product thereof is the activity of CDP-diacylglycerol-glycerol-3-phosphate 3-phosphatidyltransferase.

[26100] Accordingly, in one embodiment, the process of the present invention for producing aspartate in a non-human organism, like a microorganism or a plant or a part thereof, comprises increasing or generating the activity of a gene product with the activity of a gene product conferring the activity of “CDP-diacylglycerol-glycerol-3-phosphate 3-phosphatidyltransferase”, especially from Synechocystis sp. or its functional equivalent or its homolog, e.g. the increase of
[26101] (a) a gene product of a gene comprising the nucleic acid molecule as shown in the respective line in column 5 of Table I, application no. 3, preferably the coding region thereof, or a homolog or a fragment thereof, and being depicted in the same respective line as said Sll1522, or a functional equivalent or a homolog thereof as shown in column 8 of Table I, application no. 3, preferably the coding region thereof, particularly a homolog or functional equivalent as shown in column 8 of Table I B, application no. 3, and being depicted in the same respective line as said Sll1522, and preferably the activity is increased plastidic, or
[26102] (b) a polypeptide comprising a polypeptide, a consensus sequence or at least a polypeptide motif as shown in the respective line in column 5 of Table II or in column 8 of Table IV, application no. 3, respectively, and being depicted in the same respective line as said Sll1522, or a functional equivalent or a homolog thereof as depicted in column 8 of Table II, application no. 3, preferably a homolog or functional equivalent as depicted in column 8 of Table II B, application no. 3, and being depicted in the same respective line as said Sll1522, and preferably the activity is increased plastidic.

[26103] Accordingly, in one embodiment, the molecule which activity is to be increased in the process of the invention is the gene product with an activity as a “CDP-diacylglycerol-glycerol-3-phosphate 3-phosphatidyltransferase”, preferably it is the molecule of section (a) or (b) of this paragraph.

[26104] In particular, it was observed that in plants, especially in Arabidopsis thaliana, increasing or generating the activity of a gene product plastidic with the activity of a “CDP-diacylglycerol-glycerol-3-phosphate 3-phosphatidyltransferase”, preferably being encoded by a gene comprising the nucleic acid sequence SEQ ID NO. 54452, preferably the coding region thereof, conferred the production of or the increase in aspartate compared with the wild type control.

[26105] The nucleic acid sequence of Sll1522 from Synechocystis sp., e.g. as shown in the respective line in column 5 of Table I, application no. 3, has been published in C. And the activity of the gene product thereof is the activity of CDP-diacylglycerol-glycerol-3-phosphate 3-phosphatidyltransferase.

[26106] Accordingly, in one embodiment, the process of the present invention for producing 5-oxoproline in a non-human organism, like a microorganism or a plant or a part thereof, comprises increasing or generating the activity of a gene product with the activity of a gene product conferring the activity of “CDP-diacylglycerol-glycerol-3-phosphate 3-phosphatidyltransferase”, especially from Synechocystis sp. or its functional equivalent or its homolog, e.g. the increase of
[26107] (a) a gene product of a gene comprising the nucleic acid molecule as shown in the respective line in column 5 of Table I, application no. 3, preferably the coding region thereof, or a homolog or a fragment thereof, and being depicted in the same respective line as said Sll1522, or a functional equivalent or a homolog thereof as shown in column 8 of Table I, application no. 3, preferably the coding region thereof, particularly a homolog or functional equivalent as shown in column 8 of Table I B, application no. 3, and being depicted in the same respective line as said Sll1522, and preferably the activity is increased plastidic, or
[26108] (b) a polypeptide comprising a polypeptide, a consensus sequence or at least a polypeptide motif as shown in the respective line in column 5 of Table II or in column 8 of Table IV, application no. 3, respectively, and being depicted in the same respective line as said Sll1522, or a functional equivalent or a homolog thereof as depicted in column 8 of Table II, application no. 3, preferably a homolog or functional equivalent as depicted in column 8 of Table II B, application no. 3, and being depicted in the same respective line as said Sll1522, and preferably the activity is increased plastidic.

[26109] Accordingly, in one embodiment, the molecule which activity is to be increased in the process of the invention is the gene product with an activity as a “CDP-diacylglycerol-glycerol-3-phosphate 3-phosphatidyltransferase”, preferably it is the molecule of section (a) or (b) of this paragraph.

[26110] In particular, it was observed that in plants, especially in Arabidopsis thaliana, increasing or generating the activity of a gene product plastidic with the activity of a “CDP-diacylglycerol-glycerol-3-phosphate 3-phosphatidyltransferase”, preferably being encoded by a gene comprising the nucleic acid sequence SEQ ID NO. 54452, preferably the coding region thereof, conferred the production of or the increase in 5-oxoproline compared with the wild type control.

[26111] The nucleic acid sequence of Sll1545 from Synechocystis sp., e.g. as shown in the respective line in column 5 of Table I, application no. 3, has been published in C. And the activity of the gene product thereof is the activity of glutathione S-transferase.

[26112] Accordingly, in one embodiment, the process of the present invention for producing serine in a non-human organism, like a microorganism or a plant or a part thereof, comprises increasing or generating the activity of a gene product with the activity of a gene product conferring the activity of “glutathione S-transferase”, especially from Synechocystis sp. or its functional equivalent or its homolog, e.g. the increase of
[26113] (a) a gene product of a gene comprising the nucleic acid molecule as shown in the respective line in column 5 of Table I, application no. 3, preferably the coding region thereof, or a homolog or a fragment thereof, and being depicted in the same respective line as said Sll1545, or a functional equivalent or a homolog thereof as shown in column 8 of Table I, application no. 3, preferably the coding region thereof, particularly a homolog or functional equivalent as shown in column 8 of Table I B, application no. 3, and being depicted in the same respective line as said Sll1545, and preferably the activity is increased mitochondrial, or
[26114] (b) a polypeptide comprising a polypeptide, a consensus sequence or at least a polypeptide motif as shown in the respective line in column 5 of Table II or in column 8 of Table IV, application no. 3, respectively, and being depicted in the same respective line as said Sll1545, or a functional equivalent or a homolog thereof as depicted in column 8 of Table II, application no. 3, preferably a homolog or functional equivalent as depicted in column 8 of Table II B, application no. 3, and being depicted in the same respective line as said Sll1545, and preferably the activity is increased mitochondrial.

[26115] Accordingly, in one embodiment, the molecule which activity is to be increased in the process of the invention is the gene product with an activity as a “glutathione S-transferase”, preferably it is the molecule of section (a) or (b) of this paragraph.

[26116] In particular, it was observed that in plants, especially in Arabidopsis thaliana, increasing or generating the activity of a gene product mitochondrial with the activity of a “glutathione S-transferase”, preferably being encoded by a gene comprising the nucleic acid sequence SEQ ID NO. 11423, preferably the coding region thereof, conferred the production of or the increase in serine compared with the wild type control.

[26117] The nucleic acid sequence of Sll1546 from Synechocystis sp., e.g. as shown in the respective line in column 5 of Table I, application no. 3, has been published in C. And the activity of the gene product thereof is the activity of exopolyphosphatase.

[26118] Accordingly, in one embodiment, the process of the present invention for producing aspartate in a non-human organism, like a microorganism or a plant or a part thereof, comprises increasing or generating the activity of a gene product with the activity of a gene product conferring the activity of “exopolyphosphatase”, especially from Synechocystis sp. or its functional equivalent or its homolog, e.g. the increase of
[26119] (a) a gene product of a gene comprising the nucleic acid molecule as shown in the respective line in column 5 of Table I, application no. 3, preferably the coding region thereof, or a homolog or a fragment thereof, and being depicted in the same respective line as said Sll1546, or a functional equivalent or a homolog thereof as shown in column 8 of Table I, application no. 3, preferably the coding region thereof, particularly a homolog or functional equivalent as shown in column 8 of Table I B, application no. 3, and being depicted in the same respective line as said Sll1546, and preferably the activity is increased non-targeted, or
[26120] (b) a polypeptide comprising a polypeptide, a consensus sequence or at least a polypeptide motif as shown in the respective line in column 5 of Table II or in column 8 of Table IV, application no. 3, respectively, and being depicted in the same respective line as said Sll1546, or a functional equivalent or a homolog thereof as depicted in column 8 of Table II, application no. 3, preferably a homolog or functional equivalent as depicted in column 8 of Table II B, application no. 3, and being depicted in the same respective line as said Sll1546, and preferably the activity is increased non-targeted.

[26121] Accordingly, in one embodiment, the molecule which activity is to be increased in the process of the invention is the gene product with an activity as a “exopolyphosphatase”, preferably it is the molecule of section (a) or (b) of this paragraph.

[26122] In particular, it was observed that in plants, especially in Arabidopsis thaliana, increasing or generating the activity of a gene product non-targeted with the activity of a “exopolyphosphatase”, preferably being encoded by a gene comprising the nucleic acid sequence SEQ ID NO. 54804, preferably the coding region thereof, conferred the production of or the increase in aspartate compared with the wild type control.

[26123] The nucleic acid sequence of Sll1546 from Synechocystis sp., e.g. as shown in the respective line in column 5 of Table I, application no. 3, has been published in C. And the activity of the gene product thereof is the activity of exopolyphosphatase.

[26124] Accordingly, in one embodiment, the process of the present invention for producing phenylalanine in a non-human organism, like a microorganism or a plant or a part thereof, comprises increasing or generating the activity of a gene product with the activity of a gene product conferring the activity of “exopolyphosphatase”, especially from Synechocystis sp. or its functional equivalent or its homolog, e.g. the increase of
[26125] (a) a gene product of a gene comprising the nucleic acid molecule as shown in the respective line in column 5 of Table I, application no. 3, preferably the coding region thereof, or a homolog or a fragment thereof, and being depicted in the same respective line as said Sll1546, or a functional equivalent or a homolog thereof as shown in column 8 of Table I, application no. 3, preferably the coding region thereof, particularly a homolog or functional equivalent as shown in column 8 of Table I B, application no. 3, and being depicted in the same respective line as said Sll1546, and preferably the activity is increased non-targeted, or
[26126] (b) a polypeptide comprising a polypeptide, a consensus sequence or at least a polypeptide motif as shown in the respective line in column 5 of Table II or in column 8 of Table IV, application no. 3, respectively, and being depicted in the same respective line as said Sll1546, or a functional equivalent or a homolog thereof as depicted in column 8 of Table II, application no. 3, preferably a homolog or functional equivalent as depicted in column 8 of Table II B, application no. 3, and being depicted in the same respective line as said Sll1546, and preferably the activity is increased non-targeted.

[26127] Accordingly, in one embodiment, the molecule which activity is to be increased in the process of the invention is the gene product with an activity as a “exopolyphosphatase”, preferably it is the molecule of section (a) or (b) of this paragraph.

[26128] In particular, it was observed that in plants, especially in Arabidopsis thaliana, increasing or generating the activity of a gene product non-targeted with the activity of a “exopolyphosphatase”, preferably being encoded by a gene comprising the nucleic acid sequence SEQ ID NO. 54804, preferably the coding region thereof, conferred the production of or the increase in phenylalanine compared with the wild type control.

[26129] The nucleic acid sequence of Sll1546 from Synechocystis sp., e.g. as shown in the respective line in column 5 of Table I, application no. 3, has been published in C. And the activity of the gene product thereof is the activity of exopolyphosphatase.

[26130] Accordingly, in one embodiment, the process of the present invention for producing serine in a non-human organism, like a microorganism or a plant or a part thereof, comprises increasing or generating the activity of a gene product with the activity of a gene product conferring the activity of “exopolyphosphatase”, especially from Synechocystis sp. or its functional equivalent or its homolog, e.g. the increase of
[26131] (a) a gene product of a gene comprising the nucleic acid molecule as shown in the respective line in column 5 of Table I, application no. 3, preferably the coding region thereof, or a homolog or a fragment thereof, and being depicted in the same respective line as said Sll1546, or a functional equivalent or a homolog thereof as shown in column 8 of Table I, application no. 3, preferably the coding region thereof, particularly a homolog or functional equivalent as shown in column 8 of Table I B, application no. 3, and being depicted in the same respective line as said Sll1546, and preferably the activity is increased non-targeted, or
[26132] (b) a polypeptide comprising a polypeptide, a consensus sequence or at least a polypeptide motif as shown in the respective line in column 5 of Table II or in column 8 of Table IV, application no. 3, respectively, and being depicted in the same respective line as said Sll1546, or a functional equivalent or a homolog thereof as depicted in column 8 of Table II, application no. 3, preferably a homolog or functional equivalent as depicted in column 8 of Table II B, application no. 3, and being depicted in the same respective line as said Sll1546, and preferably the activity is increased non-targeted.

[26133] Accordingly, in one embodiment, the molecule which activity is to be increased in the process of the invention is the gene product with an activity as a “exopolyphosphatase”, preferably it is the molecule of section (a) or (b) of this paragraph.

[26134] In particular, it was observed that in plants, especially in Arabidopsis thaliana, increasing or generating the activity of a gene product non-targeted with the activity of a “exopolyphosphatase”, preferably being encoded by a gene comprising the nucleic acid sequence SEQ ID NO. 54804, preferably the coding region thereof, conferred the production of or the increase in serine compared with the wild type control.

[26135] The nucleic acid sequence of Sll1598 from Synechocystis sp., e.g. as shown in the respective line in column 5 of Table I, application no. 3, has been published in C. And the activity of the gene product thereof is the activity of ABC metal ion transporter substrate-binding protein.

[26136] Accordingly, in one embodiment, the process of the present invention for producing aspartate in a non-human organism, like a microorganism or a plant or a part thereof, comprises increasing or generating the activity of a gene product with the activity of a gene product conferring the activity of “ABC metal ion transporter substrate-binding protein”, especially from Synechocystis sp. or its functional equivalent or its homolog, e.g. the increase of
[26137] (a) a gene product of a gene comprising the nucleic acid molecule as shown in the respective line in column 5 of Table I, application no. 3, preferably the coding region thereof, or a homolog or a fragment thereof, and being depicted in the same respective line as said Sll1598, or a functional equivalent or a homolog thereof as shown in column 8 of Table I, application no. 3, preferably the coding region thereof, particularly a homolog or functional equivalent as shown in column 8 of Table I B, application no. 3, and being depicted in the same respective line as said Sll1598, and preferably the activity is increased mitochondrial, or
[26138] (b) a polypeptide comprising a polypeptide, a consensus sequence or at least a polypeptide motif as shown in the respective line in column 5 of Table II or in column 8 of Table IV, application no. 3, respectively, and being depicted in the same respective line as said Sll1598, or a functional equivalent or a homolog thereof as depicted in column 8 of Table II, application no. 3, preferably a homolog or functional equivalent as depicted in column 8 of Table II B, application no. 3, and being depicted in the same respective line as said Sll1598, and preferably the activity is increased mitochondrial.

[26139] Accordingly, in one embodiment, the molecule which activity is to be increased in the process of the invention is the gene product with an activity as a “ABC metal ion transporter substratebinding protein”, preferably it is the molecule of section (a) or (b) of this paragraph.

[26140] In particular, it was observed that in plants, especially in Arabidopsis thaliana, increasing or generating the activity of a gene product mitochondrial with the activity of a “ABC metal ion transporter substrate-binding protein”, preferably being encoded by a gene comprising the nucleic acid sequence SEQ ID NO. 85743, preferably the coding region thereof, conferred the production of or the increase in aspartate compared with the wild type control.

[26141] The nucleic acid sequence of Sll1598 from Synechocystis sp., e.g. as shown in the respective line in column 5 of Table I, application no. 3, has been published in C. And the activity of the gene product thereof is the activity of ABC metal ion transporter substrate-binding protein.

[26142] Accordingly, in one embodiment, the process of the present invention for producing phenylalanine in a non-human organism, like a microorganism or a plant or a part thereof, comprises increasing or generating the activity of a gene product with the activity of a gene product conferring the activity of “ABC metal ion transporter substrate-binding protein”, especially from Synechocystis sp. or its functional equivalent or its homolog, e.g. the increase of
[26143] (a) a gene product of a gene comprising the nucleic acid molecule as shown in the respective line in column 5 of Table I, application no. 3, preferably the coding region thereof, or a homolog or a fragment thereof, and being depicted in the same respective line as said Sll1598, or a functional equivalent or a homolog thereof as shown in column 8 of Table I, application no. 3, preferably the coding region thereof, particularly a homolog or functional equivalent as shown in column 8 of Table I B, application no. 3, and being depicted in the same respective line as said Sll1598, and preferably the activity is increased mitochondrial, or
[26144] (b) a polypeptide comprising a polypeptide, a consensus sequence or at least a polypeptide motif as shown in the respective line in column 5 of Table II or in column 8 of Table IV, application no. 3, respectively, and being depicted in the same respective line as said Sll1598, or a functional equivalent or a homolog thereof as depicted in column 8 of Table II, application no. 3, preferably a homolog or functional equivalent as depicted in column 8 of Table II B, application no. 3, and being depicted in the same respective line as said Sll1598, and preferably the activity is increased mitochondrial.

[26145] Accordingly, in one embodiment, the molecule which activity is to be increased in the process of the invention is the gene product with an activity as a “ABC metal ion transporter substratebinding protein”, preferably it is the molecule of section (a) or (b) of this paragraph.

[26146] In particular, it was observed that in plants, especially in Arabidopsis thaliana, increasing or generating the activity of a gene product mitochondrial with the activity of a “ABC metal ion transporter substrate-binding protein”, preferably being encoded by a gene comprising the nucleic acid sequence SEQ ID NO. 85743, preferably the coding region thereof, conferred the production of or the increase in phenylalanine compared with the wild type control.

[26147] The nucleic acid sequence of Sll1761 from Synechocystis sp., e.g. as shown in the respective line in column 5 of Table I, application no. 3, has been published in C. And the activity of the gene product thereof is the activity of sll1761-protein.

[26148] Accordingly, in one embodiment, the process of the present invention for producing serine in a non-human organism, like a microorganism or a plant or a part thereof, comprises increasing or generating the activity of a gene product with the activity of a gene product conferring the activity of “sll1761-protein”, especially from Synechocystis sp. or its functional equivalent or its homolog, e.g. the increase of
[26149] (a) a gene product of a gene comprising the nucleic acid molecule as shown in the respective line in column 5 of Table I, application no. 3, preferably the coding region thereof, or a homolog or a fragment thereof, and being depicted in the same respective line as said Sll1761, or a functional equivalent or a homolog thereof as shown in column 8 of Table I, application no. 3, preferably the coding region thereof, particularly a homolog or functional equivalent as shown in column 8 of Table I B, application no. 3, and being depicted in the same respective line as said Sll1761, and preferably the activity is increased non-targeted, or
[26150] (b) a polypeptide comprising a polypeptide, a consensus sequence or at least a polypeptide motif as shown in the respective line in column 5 of Table II or in column 8 of Table IV, application no. 3, respectively, and being depicted in the same respective line as said Sll1761, or a functional equivalent or a homolog thereof as depicted in column 8 of Table II, application no. 3, preferably a homolog or functional equivalent as depicted in column 8 of Table II B, application no. 3, and being depicted in the same respective line as said Sll1761, and preferably the activity is increased non-targeted.

[26151] Accordingly, in one embodiment, the molecule which activity is to be increased in the process of the invention is the gene product with an activity as a “sll1761-protein”, preferably it is the molecule of section (a) or (b) of this paragraph.

[26152] In particular, it was observed that in plants, especially in Arabidopsis thaliana, increasing or generating the activity of a gene product non-targeted with the activity of a “sll1761-protein”, preferably being encoded by a gene comprising the nucleic acid sequence SEQ ID NO. 55379, preferably the coding region thereof, conferred the production of or the increase in serine compared with the wild type control.

[26153] The nucleic acid sequence of Sll1761 from Synechocystis sp., e.g. as shown in the respective line in column 5 of Table I, application no. 3, has been published in C. And the activity of the gene product thereof is the activity of sll1761-protein.

[26154] Accordingly, in one embodiment, the process of the present invention for producing tyrosine in a non-human organism, like a microorganism or a plant or a part thereof, comprises increasing or generating the activity of a gene product with the activity of a gene product conferring the activity of “sll1761-protein”, especially from Synechocystis sp. or its functional equivalent or its homolog, e.g. the increase of
[26155] (a) a gene product of a gene comprising the nucleic acid molecule as shown in the respective line in column 5 of Table I, application no. 3, preferably the coding region thereof, or a homolog or a fragment thereof, and being depicted in the same respective line as said Sll1761, or a functional equivalent or a homolog thereof as shown in column 8 of Table I, application no. 3, preferably the coding region thereof, particularly a homolog or functional equivalent as shown in column 8 of Table I B, application no. 3, and being depicted in the same respective line as said Sll1761, and preferably the activity is increased non-targeted, or
[26156] (b) a polypeptide comprising a polypeptide, a consensus sequence or at least a polypeptide motif as shown in the respective line in column 5 of Table II or in column 8 of Table IV, application no. 3, respectively, and being depicted in the same respective line as said Sll1761, or a functional equivalent or a homolog thereof as depicted in column 8 of Table II, application no. 3, preferably a homolog or functional equivalent as depicted in column 8 of Table II B, application no. 3, and being depicted in the same respective line as said Sll1761, and preferably the activity is increased non-targeted.

[26157] Accordingly, in one embodiment, the molecule which activity is to be increased in the process of the invention is the gene product with an activity as a “sll1761-protein”, preferably it is the molecule of section (a) or (b) of this paragraph.

[26158] In particular, it was observed that in plants, especially in Arabidopsis thaliana, increasing or generating the activity of a gene product non-targeted with the activity of a “sll1761-protein”, preferably being encoded by a gene comprising the nucleic acid sequence SEQ ID NO. 55379, preferably the coding region thereof, conferred the production of or the increase in tyrosine compared with the wild type control.

[26159] The nucleic acid sequence of Sll1815 from Synechocystis sp., e.g. as shown in the respective line in column 5 of Table I, application no. 3, has been published in C. And the activity of the gene product thereof is the activity of adenylate kinase.

[26160] Accordingly, in one embodiment, the process of the present invention for producing alanine in a non-human organism, like a microorganism or a plant or a part thereof, comprises increasing or generating the activity of a gene product with the activity of a gene product conferring the activity of “adenylate kinase”, especially from Synechocystis sp. or its functional equivalent or its homolog, e.g. the increase of
[26161] (a) a gene product of a gene comprising the nucleic acid molecule as shown in the respective line in column 5 of Table I, application no. 3, preferably the coding region thereof, or a homolog or a fragment thereof, and being depicted in the same respective line as said Sll1815, or a functional equivalent or a homolog thereof as shown in column 8 of Table I, application no. 3, preferably the coding region thereof, particularly a homolog or functional equivalent as shown in column 8 of Table I B, application no. 3, and being depicted in the same respective line as said Sll1815, and preferably the activity is increased mitochondrial, or
[26162] (b) a polypeptide comprising a polypeptide, a consensus sequence or at least a polypeptide motif as shown in the respective line in column 5 of Table II or in column 8 of Table IV, application no. 3, respectively, and being depicted in the same respective line as said Sll1815, or a functional equivalent or a homolog thereof as depicted in column 8 of Table II, application no. 3, preferably a homolog or functional equivalent as depicted in column 8 of Table II B, application no. 3, and being depicted in the same respective line as said Sll1815, and preferably the activity is increased mitochondrial.

[26163] Accordingly, in one embodiment, the molecule which activity is to be increased in the process of the invention is the gene product with an activity as a “adenylate kinase”, preferably it is the molecule of section (a) or (b) of this paragraph.

[26164] In particular, it was observed that in plants, especially in Arabidopsis thaliana, increasing or generating the activity of a gene product mitochondrial with the activity of a “adenylate kinase”, preferably being encoded by a gene comprising the nucleic acid sequence SEQ ID NO. 85808, preferably the coding region thereof, conferred the production of or the increase in alanine compared with the wild type control.

[26165] The nucleic acid sequence of Sll1815 from Synechocystis sp., e.g. as shown in the respective line in column 5 of Table I, application no. 3, has been published in C. And the activity of the gene product thereof is the activity of adenylate kinase.

[26166] Accordingly, in one embodiment, the process of the present invention for producing citrulline in a non-human organism, like a microorganism or a plant or a part thereof, comprises increasing or generating the activity of a gene product with the activity of a gene product conferring the activity of “adenylate kinase”, especially from Synechocystis sp. or its functional equivalent or its homolog, e.g. the increase of
[26167] (a) a gene product of a gene comprising the nucleic acid molecule as shown in the respective line in column 5 of Table I, application no. 3, preferably the coding region thereof, or a homolog or a fragment thereof, and being depicted in the same respective line as said Sll1815, or a functional equivalent or a homolog thereof as shown in column 8 of Table I, application no. 3, preferably the coding region thereof, particularly a homolog or functional equivalent as shown in column 8 of Table I B, application no. 3, and being depicted in the same respective line as said Sll1815, and preferably the activity is increased mitochondrial, or
[26168] (b) a polypeptide comprising a polypeptide, a consensus sequence or at least a polypeptide motif as shown in the respective line in column 5 of Table II or in column 8 of Table IV, application no. 3, respectively, and being depicted in the same respective line as said Sll1815, or a functional equivalent or a homolog thereof as depicted in column 8 of Table II, application no. 3, preferably a homolog or functional equivalent as depicted in column 8 of Table II B, application no. 3, and being depicted in the same respective line as said Sll1815, and preferably the activity is increased mitochondrial.

[26169] Accordingly, in one embodiment, the molecule which activity is to be increased in the process of the invention is the gene product with an activity as a “adenylate kinase”, preferably it is the molecule of section (a) or (b) of this paragraph.

[26170] In particular, it was observed that in plants, especially in Arabidopsis thaliana, increasing or generating the activity of a gene product mitochondrial with the activity of a “adenylate kinase”, preferably being encoded by a gene comprising the nucleic acid sequence SEQ ID NO. 85808, preferably the coding region thereof, conferred the production of or the increase in citrulline compared with the wild type control.

[26171] The nucleic acid sequence of Sll1815 from Synechocystis sp., e.g. as shown in the respective line in column 5 of Table I, application no. 3, has been published in C. And the activity of the gene product thereof is the activity of adenylate kinase.

[26172] Accordingly, in one embodiment, the process of the present invention for producing glycine in a non-human organism, like a microorganism or a plant or a part thereof, comprises increasing or generating the activity of a gene product with the activity of a gene product conferring the activity of “adenylate kinase”, especially from Synechocystis sp. or its functional equivalent or its homolog, e.g. the increase of
[26173] (a) a gene product of a gene comprising the nucleic acid molecule as shown in the respective line in column 5 of Table I, application no. 3, preferably the coding region thereof, or a homolog or a fragment thereof, and being depicted in the same respective line as said Sll1815, or a functional equivalent or a homolog thereof as shown in column 8 of Table I, application no. 3, preferably the coding region thereof, particularly a homolog or functional equivalent as shown in column 8 of Table I B, application no. 3, and being depicted in the same respective line as said Sll1815, and preferably the activity is increased mitochondrial, or
[26174] (b) a polypeptide comprising a polypeptide, a consensus sequence or at least a polypeptide motif as shown in the respective line in column 5 of Table II or in column 8 of Table IV, application no. 3, respectively, and being depicted in the same respective line as said Sll1815, or a functional equivalent or a homolog thereof as depicted in column 8 of Table II, application no. 3, preferably a homolog or functional equivalent as depicted in column 8 of Table II B, application no. 3, and being depicted in the same respective line as said Sll1815, and preferably the activity is increased mitochondrial.

[26175] Accordingly, in one embodiment, the molecule which activity is to be increased in the process of the invention is the gene product with an activity as a “adenylate kinase”, preferably it is the molecule of section (a) or (b) of this paragraph.

[26176] In particular, it was observed that in plants, especially in Arabidopsis thaliana, increasing or generating the activity of a gene product mitochondrial with the activity of a “adenylate kinase”, preferably being encoded by a gene comprising the nucleic acid sequence SEQ ID NO. 85808, preferably the coding region thereof, conferred the production of or the increase in glycine compared with the wild type control.

[26177] The nucleic acid sequence of Sll1815 from Synechocystis sp., e.g. as shown in the respective line in column 5 of Table I, application no. 3, has been published in C. And the activity of the gene product thereof is the activity of adenylate kinase.

[26178] Accordingly, in one embodiment, the process of the present invention for producing serine in a non-human organism, like a microorganism or a plant or a part thereof, comprises increasing or generating the activity of a gene product with the activity of a gene product conferring the activity of “adenylate kinase”, especially from Synechocystis sp. or its functional equivalent or its homolog, e.g. the increase of
[26179] (a) a gene product of a gene comprising the nucleic acid molecule as shown in the respective line in column 5 of Table I, application no. 3, preferably the coding region thereof, or a homolog or a fragment thereof, and being depicted in the same respective line as said Sll1815, or a functional equivalent or a homolog thereof as shown in column 8 of Table I, application no. 3, preferably the coding region thereof, particularly a homolog or functional equivalent as shown in column 8 of Table I B, application no. 3, and being depicted in the same respective line as said Sll1815, and preferably the activity is increased mitochondrial, or
[26180] (b) a polypeptide comprising a polypeptide, a consensus sequence or at least a polypeptide motif as shown in the respective line in column 5 of Table II or in column 8 of Table IV, application no. 3, respectively, and being depicted in the same respective line as said Sll1815, or a functional equivalent or a homolog thereof as depicted in column 8 of Table II, application no. 3, preferably a homolog or functional equivalent as depicted in column 8 of Table II B, application no. 3, and being depicted in the same respective line as said Sll1815, and preferably the activity is increased mitochondrial.

[26181] Accordingly, in one embodiment, the molecule which activity is to be increased in the process of the invention is the gene product with an activity as a “adenylate kinase”, preferably it is the molecule of section (a) or (b) of this paragraph.

[26182] In particular, it was observed that in plants, especially in Arabidopsis thaliana, increasing or generating the activity of a gene product mitochondrial with the activity of a “adenylate kinase”, preferably being encoded by a gene comprising the nucleic acid sequence SEQ ID NO. 85808,preferably the coding region thereof, conferred the production of or the increase in serine compared with the wild type control.

[26183] The nucleic acid sequence of Sll1815 from Synechocystis sp., e.g. as shown in the respective line in column 5 of Table I, application no. 3, has been published in C. And the activity of the gene product thereof is the activity of adenylate kinase.

[26184] Accordingly, in one embodiment, the process of the present invention for producing tyrosine in a non-human organism, like a microorganism or a plant or a part thereof, comprises increasing or generating the activity of a gene product with the activity of a gene product conferring the activity of “adenylate kinase”, especially from Synechocystis sp. or its functional equivalent or its homolog, e.g. the increase of
[26185] (a) a gene product of a gene comprising the nucleic acid molecule as shown in the respective line in column 5 of Table I, application no. 3, preferably the coding region thereof, or a homolog or a fragment thereof, and being depicted in the same respective line as said Sll1815, or a functional equivalent or a homolog thereof as shown in column 8 of Table I, application no. 3, preferably the coding region thereof, particularly a homolog or functional equivalent as shown in column 8 of Table I B, application no. 3, and being depicted in the same respective line as said Sll1815, and preferably the activity is increased mitochondrial, or
[26186] (b) a polypeptide comprising a polypeptide, a consensus sequence or at least a polypeptide motif as shown in the respective line in column 5 of Table II or in column 8 of Table IV, application no. 3, respectively, and being depicted in the same respective line as said Sll1815, or a functional equivalent or a homolog thereof as depicted in column 8 of Table II, application no. 3, preferably a homolog or functional equivalent as depicted in column 8 of Table II B, application no. 3, and being depicted in the same respective line as said Sll1815, and preferably the activity is increased mitochondrial.

[26187] Accordingly, in one embodiment, the molecule which activity is to be increased in the process of the invention is the gene product with an activity as a “adenylate kinase”, preferably it is the molecule of section (a) or (b) of this paragraph.

[26188] In particular, it was observed that in plants, especially in Arabidopsis thaliana, increasing or generating the activity of a gene product mitochondrial with the activity of a “adenylate kinase”, preferably being encoded by a gene comprising the nucleic acid sequence SEQ ID NO. 85808, preferably the coding region thereof, conferred the production of or the increase in tyrosine compared with the wild type control.

[26189] The nucleic acid sequence of Sll1848 from Synechocystis sp., e.g. as shown in the respective line in column 5 of Table I, application no. 3, has been published in C. And the activity of the gene product thereof is the activity of acyl transferase.

[26190] Accordingly, in one embodiment, the process of the present invention for producing glycine in a non-human organism, like a microorganism or a plant or a part thereof, comprises increasing or generating the activity of a gene product with the activity of a gene product conferring the activity of “acyl transferase”, especially from Synechocystis sp. or its functional equivalent or its homolog, e.g. the increase of
[26191] (a) a gene product of a gene comprising the nucleic acid molecule as shown in the respective line in column 5 of Table I, application no. 3, preferably the coding region thereof, or a homolog or a fragment thereof, and being depicted in the same respective line as said Sll1848, or a functional equivalent or a homolog thereof as shown in column 8 of Table I, application no. 3, preferably the coding region thereof, particularly a homolog or functional equivalent as shown in column 8 of Table I B, application no. 3, and being depicted in the same respective line as said Sll1848, and preferably the activity is increased plastidic, or
[26192] (b) a polypeptide comprising a polypeptide, a consensus sequence or at least a polypeptide motif as shown in the respective line in column 5 of Table II or in column 8 of Table IV, application no. 3, respectively, and being depicted in the same respective line as said Sll1848, or a functional equivalent or a homolog thereof as depicted in column 8 of Table II, application no. 3, preferably a homolog or functional equivalent as depicted in column 8 of Table II B, application no. 3, and being depicted in the same respective line as said Sll1848, and preferably the activity is increased plastidic.

[26193] Accordingly, in one embodiment, the molecule which activity is to be increased in the process of the invention is the gene product with an activity as a “acyl transferase”, preferably it is the molecule of section (a) or (b) of this paragraph.

[26194] In particular, it was observed that in plants, especially in Arabidopsis thaliana, increasing or generating the activity of a gene product plastidic with the activity of a “acyl transferase”, preferably being encoded by a gene comprising the nucleic acid sequence SEQ ID NO. 86447, preferably the coding region thereof, conferred the production of or the increase in glycine compared with the wild type control.

[26195] The nucleic acid sequence of Sll1848 from Synechocystis sp., e.g. as shown in the respective line in column 5 of Table I, application no. 3, has been published in C. And the activity of the gene product thereof is the activity of acyl transferase.

[26196] Accordingly, in one embodiment, the process of the present invention for producing phenylalanine in a non-human organism, like a microorganism or a plant or a part thereof, comprises increasing or generating the activity of a gene product with the activity of a gene product conferring the activity of “acyl transferase”, especially from Synechocystis sp. or its functional equivalent or its homolog, e.g. the increase of
[26197] (a) a gene product of a gene comprising the nucleic acid molecule as shown in the respective line in column 5 of Table I, application no. 3, preferably the coding region thereof, or a homolog or a fragment thereof, and being depicted in the same respective line as said Sll1848, or a functional equivalent or a homolog thereof as shown in column 8 of Table I, application no. 3, preferably the coding region thereof, particularly a homolog or functional equivalent as shown in column 8 of Table I B, application no. 3, and being depicted in the same respective line as said Sll1848, and preferably the activity is increased plastidic, or
[26198] (b) a polypeptide comprising a polypeptide, a consensus sequence or at least a polypeptide motif as shown in the respective line in column 5 of Table II or in column 8 of Table IV, application no. 3, respectively, and being depicted in the same respective line as said Sll1848, or a functional equivalent or a homolog thereof as depicted in column 8 of Table II, application no. 3, preferably a homolog or functional equivalent as depicted in column 8 of Table II B, application no. 3, and being depicted in the same respective line as said Sll1848, and preferably the activity is increased plastidic.

[26199] Accordingly, in one embodiment, the molecule which activity is to be increased in the process of the invention is the gene product with an activity as a “acyl transferase”, preferably it is the molecule of section (a) or (b) of this paragraph.

[26200] In particular, it was observed that in plants, especially in Arabidopsis thaliana, increasing or generating the activity of a gene product plastidic with the activity of a “acyl transferase”, preferably being encoded by a gene comprising the nucleic acid sequence SEQ ID NO. 86447, preferably the coding region thereof, conferred the production of or the increase in phenylalanine compared with the wild type control.

[26201] The nucleic acid sequence of Sll1848 from Synechocystis sp., e.g. as shown in the respective line in column 5 of Table I, application no. 3, has been published in C. And the activity of the gene product thereof is the activity of acyl transferase.

[26202] Accordingly, in one embodiment, the process of the present invention for producing serine in a non-human organism, like a microorganism or a plant or a part thereof, comprises increasing or generating the activity of a gene product with the activity of a gene product conferring the activity of “acyl transferase”, especially from Synechocystis sp. or its functional equivalent or its homolog, e.g. the increase of
[26203] (a) a gene product of a gene comprising the nucleic acid molecule as shown in the respective line in column 5 of Table I, application no. 3, preferably the coding region thereof, or a homolog or a fragment thereof, and being depicted in the same respective line as said Sll1848, or a functional equivalent or a homolog thereof as shown in column 8 of Table I, application no. 3, preferably the coding region thereof, particularly a homolog or functional equivalent as shown in column 8 of Table I B, application no. 3, and being depicted in the same respective line as said Sll1848, and preferably the activity is increased plastidic, or
[26204] (b) a polypeptide comprising a polypeptide, a consensus sequence or at least a polypeptide motif as shown in the respective line in column 5 of Table II or in column 8 of Table IV, application no. 3, respectively, and being depicted in the same respective line as said Sll1848, or a functional equivalent or a homolog thereof as depicted in column 8 of Table II, application no. 3, preferably a homolog or functional equivalent as depicted in column 8 of Table II B, application no. 3, and being depicted in the same respective line as said Sll1848, and preferably the activity is increased plastidic.

[26205] Accordingly, in one embodiment, the molecule which activity is to be increased in the process of the invention is the gene product with an activity as a “acyl transferase”, preferably it is the molecule of section (a) or (b) of this paragraph.

[26206] In particular, it was observed that in plants, especially in Arabidopsis thaliana, increasing or generating the activity of a gene product plastidic with the activity of a “acyl transferase”, preferably being encoded by a gene comprising the nucleic acid sequence SEQ ID NO. 86447, preferably the coding region thereof, conferred the production of or the increase in serine compared with the wild type control.

[26207] The nucleic acid sequence of Sll1917 from Synechocystis sp., e.g. as shown in the respective line in column 5 of Table I, application no. 3, has been published in C. And the activity of the gene product thereof is the activity of coproporphyrinogen III oxidase.

[26208] Accordingly, in one embodiment, the process of the present invention for producing aspartate in a non-human organism, like a microorganism or a plant or a part thereof, comprises increasing or generating the activity of a gene product with the activity of a gene product conferring the activity of “coproporphyrinogen III oxidase”, especially from Synechocystis sp. or its functional equivalent or its homolog, e.g. the increase of
[26209] (a) a gene product of a gene comprising the nucleic acid molecule as shown in the respective line in column 5 of Table I, application no. 3, preferably the coding region thereof, or a homolog or a fragment thereof, and being depicted in the same respective line as said Sll1917, or a functional equivalent or a homolog thereof as shown in column 8 of Table I, application no. 3, preferably the coding region thereof, particularly a homolog or functional equivalent as shown in column 8 of Table I B, application no. 3, and being depicted in the same respective line as said Sll1917, and preferably the activity is increased mitochondrial, or
[26210] (b) a polypeptide comprising a polypeptide, a consensus sequence or at least a polypeptide motif as shown in the respective line in column 5 of Table II or in column 8 of Table IV, application no. 3, respectively, and being depicted in the same respective line as said Sll1917, or a functional equivalent or a homolog thereof as depicted in column 8 of Table II, application no. 3, preferably a homolog or functional equivalent as depicted in column 8 of Table II B, application no. 3, and being depicted in the same respective line as said Sll1917, and preferably the activity is increased mitochondrial.

[26211] Accordingly, in one embodiment, the molecule which activity is to be increased in the process of the invention is the gene product with an activity as a “coproporphyrinogen III oxidase”, preferably it is the molecule of section (a) or (b) of this paragraph.

[26212] In particular, it was observed that in plants, especially in Arabidopsis thaliana, increasing or generating the activity of a gene product mitochondrial with the activity of a “coproporphyrinogen III oxidase”, preferably being encoded by a gene comprising the nucleic acid sequence SEQ ID NO. 11471, preferably the coding region thereof, conferred the production of or the increase in aspartate compared with the wild type control.

[26213] The nucleic acid sequence of Sll1917 from Synechocystis sp., e.g. as shown in the respective line in column 5 of Table I, application no. 3, has been published in C. And the activity of the gene product thereof is the activity of coproporphyrinogen III oxidase.

[26214] Accordingly, in one embodiment, the process of the present invention for producing citrulline in a non-human organism, like a microorganism or a plant or a part thereof, comprises increasing or generating the activity of a gene product with the activity of a gene product conferring the activity of “coproporphyrinogen III oxidase”, especially from Synechocystis sp. or its functional equivalent or its homolog, e.g. the increase of
[26215] (a) a gene product of a gene comprising the nucleic acid molecule as shown in the respective line in column 5 of Table I, application no. 3, preferably the coding region thereof, or a homolog or a fragment thereof, and being depicted in the same respective line as said Sll1917, or a functional equivalent or a homolog thereof as shown in column 8 of Table I, application no. 3, preferably the coding region thereof, particularly a homolog or functional equivalent as shown in column 8 of Table I B, application no. 3, and being depicted in the same respective line as said Sll1917, and preferably the activity is increased mitochondrial, or
[26216] (b) a polypeptide comprising a polypeptide, a consensus sequence or at least a polypeptide motif as shown in the respective line in column 5 of Table II or in column 8 of Table IV, application no. 3, respectively, and being depicted in the same respective line as said Sll1917, or a functional equivalent or a homolog thereof as depicted in column 8 of Table II, application no. 3, preferably a homolog or functional equivalent as depicted in column 8 of Table II B, application no. 3, and being depicted in the same respective line as said Sll1917, and preferably the activity is increased mitochondrial.

[26217] Accordingly, in one embodiment, the molecule which activity is to be increased in the process of the invention is the gene product with an activity as a “coproporphyrinogen III oxidase”, preferably it is the molecule of section (a) or (b) of this paragraph.

[26218] In particular, it was observed that in plants, especially in Arabidopsis thaliana, increasing or generating the activity of a gene product mitochondrial with the activity of a “coproporphyrinogen III oxidase”, preferably being encoded by a gene comprising the nucleic acid sequence SEQ ID NO. 11471, preferably the coding region thereof, conferred the production of or the increase in citrulline compared with the wild type control.

[26219] The nucleic acid sequence of Sll1917 from Synechocystis sp., e.g. as shown in the respective line in column 5 of Table I, application no. 3, has been published in C. And the activity of the gene product thereof is the activity of coproporphyrinogen III oxidase.

[26220] Accordingly, in one embodiment, the process of the present invention for producing phenylalanine in a non-human organism, like a microorganism or a plant or a part thereof, comprises increasing or generating the activity of a gene product with the activity of a gene product conferring the activity of “coproporphyrinogen III oxidase”, especially from Synechocystis sp. or its functional equivalent or its homolog, e.g. the increase of
[26221] (a) a gene product of a gene comprising the nucleic acid molecule as shown in the respective line in column 5 of Table I, application no. 3, preferably the coding region thereof, or a homolog or a fragment thereof, and being depicted in the same respective line as said Sll1917, or a functional equivalent or a homolog thereof as shown in column 8 of Table I, application no. 3, preferably the coding region thereof, particularly a homolog or functional equivalent as shown in column 8 of Table I B, application no. 3, and being depicted in the same respective line as said Sll1917, and preferably the activity is increased mitochondrial, or
[26222] (b) a polypeptide comprising a polypeptide, a consensus sequence or at least a polypeptide motif as shown in the respective line in column 5 of Table II or in column 8 of Table IV, application no. 3, respectively, and being depicted in the same respective line as said Sll1917, or a functional equivalent or a homolog thereof as depicted in column 8 of Table II, application no. 3, preferably a homolog or functional equivalent as depicted in column 8 of Table II B, application no. 3, and being depicted in the same respective line as said Sll1917, and preferably the activity is increased mitochondrial.

[26223] Accordingly, in one embodiment, the molecule which activity is to be increased in the process of the invention is the gene product with an activity as a “coproporphyrinogen III oxidase”, preferably it is the molecule of section (a) or (b) of this paragraph.

[26224] In particular, it was observed that in plants, especially in Arabidopsis thaliana, increasing or generating the activity of a gene product mitochondrial with the activity of a “coproporphyrinogen III oxidase”, preferably being encoded by a gene comprising the nucleic acid sequence SEQ ID NO. 11471, preferably the coding region thereof, conferred the production of or the increase in phenylalanine compared with the wild type control.

[26225] The nucleic acid sequence of Sll1917 from Synechocystis sp., e.g. as shown in the respective line in column 5 of Table I, application no. 3, has been published in C. And the activity of the gene product thereof is the activity of coproporphyrinogen III oxidase.

[26226] Accordingly, in one embodiment, the process of the present invention for producing serine in a non-human organism, like a microorganism or a plant or a part thereof, comprises increasing or generating the activity of a gene product with the activity of a gene product conferring the activity of “coproporphyrinogen Ill oxidase”, especially from Synechocystis sp. or its functional equivalent or its homolog, e.g. the increase of
[26227] (a) a gene product of a gene comprising the nucleic acid molecule as shown in the respective line in column 5 of Table I, application no. 3, preferably the coding region thereof, or a homolog or a fragment thereof, and being depicted in the same respective line as said Sll1917, or a functional equivalent or a homolog thereof as shown in column 8 of Table I, application no. 3, preferably the coding region thereof, particularly a homolog or functional equivalent as shown in column 8 of Table I B, application no. 3, and being depicted in the same respective line as said Sll1917, and preferably the activity is increased mitochondrial, or
[26228] (b) a polypeptide comprising a polypeptide, a consensus sequence or at least a polypeptide motif as shown in the respective line in column 5 of Table II or in column 8 of Table IV, application no. 3, respectively, and being depicted in the same respective line as said Sll1917, or a functional equivalent or a homolog thereof as depicted in column 8 of Table II, application no. 3, preferably a homolog or functional equivalent as depicted in column 8 of Table II B, application no. 3, and being depicted in the same respective line as said Sll1917, and preferably the activity is increased mitochondrial.

[26229] Accordingly, in one embodiment, the molecule which activity is to be increased in the process of the invention is the gene product with an activity as a “coproporphyrinogen III oxidase”, preferably it is the molecule of section (a) or (b) of this paragraph.

[26230] In particular, it was observed that in plants, especially in Arabidopsis thaliana, increasing or generating the activity of a gene product mitochondrial with the activity of a “coproporphyrinogen III oxidase”, preferably being encoded by a gene comprising the nucleic acid sequence SEQ ID NO. 11471, preferably the coding region thereof, conferred the production of or the increase in serine compared with the wild type control.

[26231] The nucleic acid sequence of Sll1917 from Synechocystis sp., e.g. as shown in the respective line in column 5 of Table I, application no. 3, has been published in C. And the activity of the gene product thereof is the activity of coproporphyrinogen III oxidase.

[26232] Accordingly, in one embodiment, the process of the present invention for producing tyrosine in a non-human organism, like a microorganism or a plant or a part thereof, comprises increasing or generating the activity of a gene product with the activity of a gene product conferring the activity of “coproporphyrinogen III oxidase”, especially from Synechocystis sp. or its functional equivalent or its homolog, e.g. the increase of
[26233] (a) a gene product of a gene comprising the nucleic acid molecule as shown in the respective line in column 5 of Table I, application no. 3, preferably the coding region thereof, or a homolog or a fragment thereof, and being depicted in the same respective line as said Sll1917, or a functional equivalent or a homolog thereof as shown in column 8 of Table I, application no. 3, preferably the coding region thereof, particularly a homolog or functional equivalent as shown in column 8 of Table I B, application no. 3, and being depicted in the same respective line as said Sll1917, and preferably the activity is increased mitochondrial, or
[26234] (b) a polypeptide comprising a polypeptide, a consensus sequence or at least a polypeptide motif as shown in the respective line in column 5 of Table II or in column 8 of Table IV, application no. 3, respectively, and being depicted in the same respective line as said Sll1917, or a functional equivalent or a homolog thereof as depicted in column 8 of Table II, application no. 3, preferably a homolog or functional equivalent as depicted in column 8 of Table II B, application no. 3, and being depicted in the same respective line as said Sll1917, and preferably the activity is increased mitochondrial.

[26235] Accordingly, in one embodiment, the molecule which activity is to be increased in the process of the invention is the gene product with an activity as a “coproporphyrinogen III oxidase”, preferably it is the molecule of section (a) or (b) of this paragraph.

[26236] In particular, it was observed that in plants, especially in Arabidopsis thaliana, increasing or generating the activity of a gene product mitochondrial with the activity of a “coproporphyrinogen III oxidase”, preferably being encoded by a gene comprising the nucleic acid sequence SEQ ID NO. 11471, preferably the coding region thereof, conferred the production of or the increase in tyrosine compared with the wild type control.

[26237] The nucleic acid sequence of Sll1920 from Synechocystis sp., e.g. as shown in the respective line in column 5 of Table I, application no. 3, has been published in C. And the activity of the gene product thereof is the activity of cation-transporting ATPase.

[26238] Accordingly, in one embodiment, the process of the present invention for producing aspartate in a non-human organism, like a microorganism or a plant or a part thereof, comprises increasing or generating the activity of a gene product with the activity of a gene product conferring the activity of “cation-transporting ATPase”, especially from Synechocystis sp. or its functional equivalent or its homolog, e.g. the increase of
[26239] (a) a gene product of a gene comprising the nucleic acid molecule as shown in the respective line in column 5 of Table I, application no. 3, preferably the coding region thereof, or a homolog or a fragment thereof, and being depicted in the same respective line as said Sll1920, or a functional equivalent or a homolog thereof as shown in column 8 of Table I, application no. 3, preferably the coding region thereof, particularly a homolog or functional equivalent as shown in column 8 of Table I B, application no. 3, and being depicted in the same respective line as said Sll1920, and preferably the activity is increased non-targeted, or
[26240] (b) a polypeptide comprising a polypeptide, a consensus sequence or at least a polypeptide motif as shown in the respective line in column 5 of Table II or in column 8 of Table IV, application no. 3, respectively, and being depicted in the same respective line as said Sll1920, or a functional equivalent or a homolog thereof as depicted in column 8 of Table II, application no. 3, preferably a homolog or functional equivalent as depicted in column 8 of Table II B, application no. 3, and being depicted in the same respective line as said Sll1920, and preferably the activity is increased non-targeted.

[26241] Accordingly, in one embodiment, the molecule which activity is to be increased in the process of the invention is the gene product with an activity as a “cation-transporting ATPase”, preferably it is the molecule of section (a) or (b) of this paragraph.

[26242] In particular, it was observed that in plants, especially in Arabidopsis thaliana, increasing or generating the activity of a gene product non-targeted with the activity of a “cation-transporting ATPase”, preferably being encoded by a gene comprising the nucleic acid sequence SEQ ID NO. 55385, preferably the coding region thereof, conferred the production of or the increase in aspartate compared with the wild type control.

[26243] The nucleic acid sequence of Sll1920 from Synechocystis sp., e.g. as shown in the respective line in column 5 of Table I, application no. 3, has been published in C. And the activity of the gene product thereof is the activity of cation-transporting ATPase.

[26244] Accordingly, in one embodiment, the process of the present invention for producing aspartate in a non-human organism, like a microorganism or a plant or a part thereof, comprises increasing or generating the activity of a gene product with the activity of a gene product conferring the activity of “cation-transporting ATPase”, especially from Synechocystis sp. or its functional equivalent or its homolog, e.g. the increase of
[26245] (a) a gene product of a gene comprising the nucleic acid molecule as shown in the respective line in column 5 of Table I, application no. 3, preferably the coding region thereof, or a homolog or a fragment thereof, and being depicted in the same respective line as said Sll1920, or a functional equivalent or a homolog thereof as shown in column 8 of Table I, application no. 3, preferably the coding region thereof, particularly a homolog or functional equivalent as shown in column 8 of Table I B, application no. 3, and being depicted in the same respective line as said Sll1920, and preferably the activity is increased mitochondrial, or
[26246] (b) a polypeptide comprising a polypeptide, a consensus sequence or at least a polypeptide motif as shown in the respective line in column 5 of Table II or in column 8 of Table IV, application no. 3, respectively, and being depicted in the same respective line as said Sll1920, or a functional equivalent or a homolog thereof as depicted in column 8 of Table II, application no. 3, preferably a homolog or functional equivalent as depicted in column 8 of Table II B, application no. 3, and being depicted in the same respective line as said Sll1920, and preferably the activity is increased mitochondrial.

[26247] Accordingly, in one embodiment, the molecule which activity is to be increased in the process of the invention is the gene product with an activity as a “cation-transporting ATPase”, preferably it is the molecule of section (a) or (b) of this paragraph.

[26248] In particular, it was observed that in plants, especially in Arabidopsis thaliana, increasing or generating the activity of a gene product mitochondrial with the activity of a “cation-transporting ATPase”, preferably being encoded by a gene comprising the nucleic acid sequence SEQ ID NO. 55385, preferably the coding region thereof, conferred the production of or the increase in aspartate compared with the wild type control.

[26249] The nucleic acid sequence of Sll2003 from Synechocystis sp., e.g. as shown in the respective line in column 5 of Table I, application no. 3, has been published in C. And the activity of the gene product thereof is the activity of glycosyl transferase.

[26250] Accordingly, in one embodiment, the process of the present invention for producing glycine in a non-human organism, like a microorganism or a plant or a part thereof, comprises increasing or generating the activity of a gene product with the activity of a gene product conferring the activity of “glycosyl transferase”, especially from Synechocystis sp. or its functional equivalent or its homolog, e.g. the increase of
[26251] (a) a gene product of a gene comprising the nucleic acid molecule as shown in the respective line in column 5 of Table I, application no. 3, preferably the coding region thereof, or a homolog or a fragment thereof, and being depicted in the same respective line as said Sll2003, or a functional equivalent or a homolog thereof as shown in column 8 of Table I, application no. 3, preferably the coding region thereof, particularly a homolog or functional equivalent as shown in column 8 of Table I B, application no. 3, and being depicted in the same respective line as said Sll2003, and preferably the activity is increased plastidic, or
[26252] (b) a polypeptide comprising a polypeptide, a consensus sequence or at least a polypeptide motif as shown in the respective line in column 5 of Table II or in column 8 of Table IV, application no. 3, respectively, and being depicted in the same respective line as said Sll2003, or a functional equivalent or a homolog thereof as depicted in column 8 of Table II, application no. 3, preferably a homolog or functional equivalent as depicted in column 8 of Table II B, application no. 3, and being depicted in the same respective line as said Sll2003, and preferably the activity is increased plastidic.

[26253] Accordingly, in one embodiment, the molecule which activity is to be increased in the process of the invention is the gene product with an activity as a “glycosyl transferase”, preferably it is the molecule of section (a) or (b) of this paragraph.

[26254] In particular, it was observed that in plants, especially in Arabidopsis thaliana, increasing or generating the activity of a gene product plastidic with the activity of a “glycosyl transferase”, preferably being encoded by a gene comprising the nucleic acid sequence SEQ ID NO. 86508, preferably the coding region thereof, conferred the production of or the increase in glycine compared with the wild type control.

[26255] The nucleic acid sequence of Slr0239 from Synechocystis sp., e.g. as shown in the respective line in column 5 of Table I, application no. 3, has been published in C. And the activity of the gene product thereof is the activity of precorrin methylase.

[26256] Accordingly, in one embodiment, the process of the present invention for producing phenylalanine in a non-human organism, like a microorganism or a plant or a part thereof, comprises increasing or generating the activity of a gene product with the activity of a gene product conferring the activity of “precorrin methylase”, especially from Synechocystis sp. or its functional equivalent or its homolog, e.g. the increase of
[26257] (a) a gene product of a gene comprising the nucleic acid molecule as shown in the respective line in column 5 of Table I, application no. 3, preferably the coding region thereof, or a homolog or a fragment thereof, and being depicted in the same respective line as said Slr0239, or a functional equivalent or a homolog thereof as shown in column 8 of Table I, application no. 3, preferably the coding region thereof, particularly a homolog or functional equivalent as shown in column 8 of Table I B, application no. 3, and being depicted in the same respective line as said Slr0239, and preferably the activity is increased mitochondrial, or
[26258] (b) a polypeptide comprising a polypeptide, a consensus sequence or at least a polypeptide motif as shown in the respective line in column 5 of Table II or in column 8 of Table IV, application no. 3, respectively, and being depicted in the same respective line as said Slr0239, or a functional equivalent or a homolog thereof as depicted in column 8 of Table II, application no. 3, preferably a homolog or functional equivalent as depicted in column 8 of Table II B, application no. 3, and being depicted in the same respective line as said Slr0239, and preferably the activity is increased mitochondrial.

[26259] Accordingly, in one embodiment, the molecule which activity is to be increased in the process of the invention is the gene product with an activity as a “precorrin methylase”, preferably it is the molecule of section (a) or (b) of this paragraph.

[26260] In particular, it was observed that in plants, especially in Arabidopsis thaliana, increasing or generating the activity of a gene product mitochondrial with the activity of a “precorrin methylase”, preferably being encoded by a gene comprising the nucleic acid sequence SEQ ID NO. 86540, preferably the coding region thereof, conferred the production of or the increase in phenylalanine compared with the wild type control.

[26261] The nucleic acid sequence of Slr0239 from Synechocystis sp., e.g. as shown in the respective line in column 5 of Table I, application no. 3, has been published in C. And the activity of the gene product thereof is the activity of precorrin methylase.

[26262] Accordingly, in one embodiment, the process of the present invention for producing tyrosine in a non-human organism, like a microorganism or a plant or a part thereof, comprises increasing or generating the activity of a gene product with the activity of a gene product conferring the activity of “precorrin methylase”, especially from Synechocystis sp. or its functional equivalent or its homolog, e.g. the increase of
[26263] (a) a gene product of a gene comprising the nucleic acid molecule as shown in the respective line in column 5 of Table I, application no. 3, preferably the coding region thereof, or a homolog or a fragment thereof, and being depicted in the same respective line as said Slr0239, or a functional equivalent or a homolog thereof as shown in column 8 of Table I, application no. 3, preferably the coding region thereof, particularly a homolog or functional equivalent as shown in column 8 of Table I B, application no. 3, and being depicted in the same respective line as said Slr0239, and preferably the activity is increased mitochondrial, or
[26264] (b) a polypeptide comprising a polypeptide, a consensus sequence or at least a polypeptide motif as shown in the respective line in column 5 of Table II or in column 8 of Table IV, application no. 3, respectively, and being depicted in the same respective line as said Slr0239, or a functional equivalent or a homolog thereof as depicted in column 8 of Table II, application no. 3, preferably a homolog or functional equivalent as depicted in column 8 of Table II B, application no. 3, and being depicted in the same respective line as said Slr0239, and preferably the activity is increased mitochondrial.

[26265] Accordingly, in one embodiment, the molecule which activity is to be increased in the process of the invention is the gene product with an activity as a “precorrin methylase”, preferably it is the molecule of section (a) or (b) of this paragraph.

[26266] In particular, it was observed that in plants, especially in Arabidopsis thaliana, increasing or generating the activity of a gene product mitochondrial with the activity of a “precorrin methylase”, preferably being encoded by a gene comprising the nucleic acid sequence SEQ ID NO. 86540, preferably the coding region thereof, conferred the production of or the increase in tyrosine compared with the wild type control.

[26267] The nucleic acid sequence of Slr0370 from Synechocystis sp., e.g. as shown in the respective line in column 5 of Table I, application no. 3, has been published in C. And the activity of the gene product thereof is the activity of aldehyde dehydrogenase.

[26268] Accordingly, in one embodiment, the process of the present invention for producing citrulline in a non-human organism, like a microorganism or a plant or a part thereof, comprises increasing or generating the activity of a gene product with the activity of a gene product conferring the activity of “aldehyde dehydrogenase”, especially from Synechocystis sp. or its functional equivalent or its homolog, e.g. the increase of
[26269] (a) a gene product of a gene comprising the nucleic acid molecule as shown in the respective line in column 5 of Table I, application no. 3, preferably the coding region thereof, or a homolog or a fragment thereof, and being depicted in the same respective line as said Slr0370, or a functional equivalent or a homolog thereof as shown in column 8 of Table I, application no. 3, preferably the coding region thereof, particularly a homolog or functional equivalent as shown in column 8 of Table I B, application no. 3, and being depicted in the same respective line as said Slr0370, and preferably the activity is increased plastidic, or
[26270] (b) a polypeptide comprising a polypeptide, a consensus sequence or at least a polypeptide motif as shown in the respective line in column 5 of Table II or in column 8 of Table IV, application no. 3, respectively, and being depicted in the same respective line as said Slr0370, or a functional equivalent or a homolog thereof as depicted in column 8 of Table II, application no. 3, preferably a homolog or functional equivalent as depicted in column 8 of Table II B, application no. 3, and being depicted in the same respective line as said Slr0370, and preferably the activity is increased plastidic.

[26271] Accordingly, in one embodiment, the molecule which activity is to be increased in the process of the invention is the gene product with an activity as a “aldehyde dehydrogenase”, preferably it is the molecule of section (a) or (b) of this paragraph.

[26272] In particular, it was observed that in plants, especially in Arabidopsis thaliana, increasing or generating the activity of a gene product plastidic with the activity of a “aldehyde dehydrogenase”, preferably being encoded by a gene comprising the nucleic acid sequence SEQ ID NO. 86820, preferably the coding region thereof, conferred the production of or the increase in citrulline compared with the wild type control.

[26273] The nucleic acid sequence of Slr0597 from Synechocystis sp., e.g. as shown in the respective line in column 5 of Table I, application no. 3, has been published in C. And the activity of the gene product thereof is the activity of bifunctional purine biosynthesis protein.

[26274] Accordingly, in one embodiment, the process of the present invention for producing alanine in a non-human organism, like a microorganism or a plant or a part thereof, comprises increasing or generating the activity of a gene product with the activity of a gene product conferring the activity of “bifunctional purine biosynthesis protein”, especially from Synechocystis sp. or its functional equivalent or its homolog, e.g. the increase of
[26275] (a) a gene product of a gene comprising the nucleic acid molecule as shown in the respective line in column 5 of Table I, application no. 3, preferably the coding region thereof, or a homolog or a fragment thereof, and being depicted in the same respective line as said Slr0597, or a functional equivalent or a homolog thereof as shown in column 8 of Table I, application no. 3, preferably the coding region thereof, particularly a homolog or functional equivalent as shown in column 8 of Table I B, application no. 3, and being depicted in the same respective line as said Slr0597, and preferably the activity is increased plastidic, or
[26276] (b) a polypeptide comprising a polypeptide, a consensus sequence or at least a polypeptide motif as shown in the respective line in column 5 of Table II or in column 8 of Table IV, application no. 3, respectively, and being depicted in the same respective line as said Slr0597, or a functional equivalent or a homolog thereof as depicted in column 8 of Table

[26277] II, application no. 3, preferably a homolog or functional equivalent as depicted in column 8 of Table II B, application no. 3, and being depicted in the same respective line as said Slr0597, and preferably the activity is increased plastidic.

[26278] Accordingly, in one embodiment, the molecule which activity is to be increased in the process of the invention is the gene product with an activity as a “bifunctional purine biosynthesis protein”, preferably it is the molecule of section (a) or (b) of this paragraph.

[26279] In particular, it was observed that in plants, especially in Arabidopsis thaliana, increasing or generating the activity of a gene product plastidic with the activity of a “bifunctional purine biosynthesis protein”, preferably being encoded by a gene comprising the nucleic acid sequence SEQ ID NO. 56153, preferably the coding region thereof, conferred the production of or the increase in alanine compared with the wild type control.

[26280] The nucleic acid sequence of Slr0597 from Synechocystis sp., e.g. as shown in the respective line in column 5 of Table I, application no. 3, has been published in C. And the activity of the gene product thereof is the activity of bifunctional purine biosynthesis protein.

[26281] Accordingly, in one embodiment, the process of the present invention for producing serine in a non-human organism, like a microorganism or a plant or a part thereof, comprises increasing or generating the activity of a gene product with the activity of a gene product conferring the activity of “bifunctional purine biosynthesis protein”, especially from Synechocystis sp. or its functional equivalent or its homolog, e.g. the increase of
[26282] (a) a gene product of a gene comprising the nucleic acid molecule as shown in the respective line in column 5 of Table I, application no. 3, preferably the coding region thereof, or a homolog or a fragment thereof, and being depicted in the same respective line as said Slr0597, or a functional equivalent or a homolog thereof as shown in column 8 of Table I, application no. 3, preferably the coding region thereof, particularly a homolog or functional equivalent as shown in column 8 of Table I B, application no. 3, and being depicted in the same respective line as said Slr0597, and preferably the activity is increased plastidic, or
[26283] (b) a polypeptide comprising a polypeptide, a consensus sequence or at least a polypeptide motif as shown in the respective line in column 5 of Table II or in column 8 of Table IV, application no. 3, respectively, and being depicted in the same respective line as said Slr0597, or a functional equivalent or a homolog thereof as depicted in column 8 of Table II, application no. 3, preferably a homolog or functional equivalent as depicted in column 8 of Table II B, application no. 3, and being depicted in the same respective line as said Slr0597, and preferably the activity is increased plastidic.

[26284] Accordingly, in one embodiment, the molecule which activity is to be increased in the process of the invention is the gene product with an activity as a “bifunctional purine biosynthesis protein”, preferably it is the molecule of section (a) or (b) of this paragraph.

[26285] In particular, it was observed that in plants, especially in Arabidopsis thaliana, increasing or generating the activity of a gene product plastidic with the activity of a “bifunctional purine biosynthesis protein”, preferably being encoded by a gene comprising the nucleic acid sequence SEQ ID NO. 56153, preferably the coding region thereof, conferred the production of or the increase in serine compared with the wild type control.

[26286] The nucleic acid sequence of Slr0597 from Synechocystis sp., e.g. as shown in the respective line in column 5 of Table I, application no. 3, has been published in C. And the activity of the gene product thereof is the activity of bifunctional purine biosynthesis protein.

[26287] Accordingly, in one embodiment, the process of the present invention for producing 5-oxoproline in a non-human organism, like a microorganism or a plant or a part thereof, comprises increasing or generating the activity of a gene product with the activity of a gene product conferring the activity of “bifunctional purine biosynthesis protein”, especially from Synechocystis sp. or its functional equivalent or its homolog, e.g. the increase of
[26288] (a) a gene product of a gene comprising the nucleic acid molecule as shown in the respective line in column 5 of Table I, application no. 3, preferably the coding region thereof, or a homolog or a fragment thereof, and being depicted in the same respective line as said Slr0597, or a functional equivalent or a homolog thereof as shown in column 8 of Table I, application no. 3, preferably the coding region thereof, particularly a homolog or functional equivalent as shown in column 8 of Table I B, application no. 3, and being depicted in the same respective line as said Slr0597, and preferably the activity is increased plastidic, or
[26289] (b) a polypeptide comprising a polypeptide, a consensus sequence or at least a polypeptide motif as shown in the respective line in column 5 of Table II or in column 8 of Table IV, application no. 3, respectively, and being depicted in the same respective line as said Slr0597, or a functional equivalent or a homolog thereof as depicted in column 8 of Table II, application no. 3, preferably a homolog or functional equivalent as depicted in column 8 of Table II B, application no. 3, and being depicted in the same respective line as said Slr0597, and preferably the activity is increased plastidic.

[26290] Accordingly, in one embodiment, the molecule which activity is to be increased in the process of the invention is the gene product with an activity as a “bifunctional purine biosynthesis protein”, preferably it is the molecule of section (a) or (b) of this paragraph.

[26291] In particular, it was observed that in plants, especially in Arabidopsis thaliana, increasing or generating the activity of a gene product plastidic with the activity of a “bifunctional purine biosynthesis protein”, preferably being encoded by a gene comprising the nucleic acid sequence SEQ ID NO. 56153, preferably the coding region thereof, conferred the production of or the increase in 5-oxoproline compared with the wild type control.

[26292] The nucleic acid sequence of Slr0710 from Synechocystis sp., e.g. as shown in the respective line in column 5 of Table I, application no. 3, has been published in C. And the activity of the gene product thereof is the activity of Glu/Leu/Phe/Val dehydrogenase.

[26293] Accordingly, in one embodiment, the process of the present invention for producing asparagine in a non-human organism, like a microorganism or a plant or a part thereof, comprises increasing or generating the activity of a gene product with the activity of a gene product conferring the activity of “Glu/Leu/Phe/Val dehydrogenase”, especially from Synechocystis sp. or its functional equivalent or its homolog, e.g. the increase of
[26294] (a) a gene product of a gene comprising the nucleic acid molecule as shown in the respective line in column 5 of Table I, application no. 3, preferably the coding region thereof, or a homolog or a fragment thereof, and being depicted in the same respective line as said Slr0710, or a functional equivalent or a homolog thereof as shown in column 8 of Table I, application no. 3, preferably the coding region thereof, particularly a homolog or functional equivalent as shown in column 8 of Table I B, application no. 3, and being depicted in the same respective line as said Slr0710, and preferably the activity is increased mitochondrial, or
[26295] (b) a polypeptide comprising a polypeptide, a consensus sequence or at least a polypeptide motif as shown in the respective line in column 5 of Table II or in column 8 of Table IV, application no. 3, respectively, and being depicted in the same respective line as said Slr0710, or a functional equivalent or a homolog thereof as depicted in column 8 of Table II, application no. 3, preferably a homolog or functional equivalent as depicted in column 8 of Table II B, application no. 3, and being depicted in the same respective line as said Slr0710, and preferably the activity is increased mitochondrial.

[26296] Accordingly, in one embodiment, the molecule which activity is to be increased in the process of the invention is the gene product with an activity as a “Glu/Leu/Phe/Val dehydrogenase”, preferably it is the molecule of section (a) or (b) of this paragraph.

[26297] In particular, it was observed that in plants, especially in Arabidopsis thaliana, increasing or generating the activity of a gene product mitochondrial with the activity of a “Glu/Leu/Phe/Val dehydrogenase”, preferably being encoded by a gene comprising the nucleic acid sequence SEQ ID NO. 56894, preferably the coding region thereof, conferred the production of or the increase in asparagine compared with the wild type control.

[26298] The nucleic acid sequence of Slr0710 from Synechocystis sp., e.g. as shown in the respective line in column 5 of Table I, application no. 3, has been published in C. And the activity of the gene product thereof is the activity of Glu/Leu/Phe/Val dehydrogenase.

[26299] Accordingly, in one embodiment, the process of the present invention for producing phenylalanine in a non-human organism, like a microorganism or a plant or a part thereof, comprises increasing or generating the activity of a gene product with the activity of a gene product conferring the activity of “Glu/Leu/Phe/Val dehydrogenase”, especially from Synechocystis sp. or its functional equivalent or its homolog, e.g. the increase of
[26300] (a) a gene product of a gene comprising the nucleic acid molecule as shown in the respective line in column 5 of Table I, application no. 3, preferably the coding region thereof, or a homolog or a fragment thereof, and being depicted in the same respective line as said Slr0710, or a functional equivalent or a homolog thereof as shown in column 8 of Table I, application no. 3, preferably the coding region thereof, particularly a homolog or functional equivalent as shown in column 8 of Table I B, application no. 3, and being depicted in the same respective line as said Slr0710, and preferably the activity is increased mitochondrial, or
[26301] (b) a polypeptide comprising a polypeptide, a consensus sequence or at least a polypeptide motif as shown in the respective line in column 5 of Table II or in column 8 of Table IV, application no. 3, respectively, and being depicted in the same respective line as said Slr0710, or a functional equivalent or a homolog thereof as depicted in column 8 of Table II, application no. 3, preferably a homolog or functional equivalent as depicted in column 8 of Table II B, application no. 3, and being depicted in the same respective line as said Slr0710, and preferably the activity is increased mitochondrial.

[26302] Accordingly, in one embodiment, the molecule which activity is to be increased in the process of the invention is the gene product with an activity as a “Glu/Leu/Phe/Val dehydrogenase”, preferably it is the molecule of section (a) or (b) of this paragraph.

[26303] In particular, it was observed that in plants, especially in Arabidopsis thaliana, increasing or generating the activity of a gene product mitochondrial with the activity of a “Glu/Leu/Phe/Val dehydrogenase”, preferably being encoded by a gene comprising the nucleic acid sequence SEQ ID NO. 56894, preferably the coding region thereof, conferred the production of or the increase in phenylalanine compared with the wild type control.

[26304] The nucleic acid sequence of Slr0710 from Synechocystis sp., e.g. as shown in the respective line in column 5 of Table I, application no. 3, has been published in C. And the activity of the gene product thereof is the activity of Glu/Leu/Phe/Val dehydrogenase .

[26305] Accordingly, in one embodiment, the process of the present invention for producing tyrosine in a non-human organism, like a microorganism or a plant or a part thereof, comprises increasing or generating the activity of a gene product with the activity of a gene product conferring the activity of “Glu/Leu/PheNal dehydrogenase”, especially from Synechocystis sp. or its functional equivalent or its homolog, e.g. the increase of
[26306] (a) a gene product of a gene comprising the nucleic acid molecule as shown in the respective line in column 5 of Table I, application no. 3, preferably the coding region thereof, or a homolog or a fragment thereof, and being depicted in the same respective line as said Slr0710, or a functional equivalent or a homolog thereof as shown in column 8 of Table I, application no. 3, preferably the coding region thereof, particularly a homolog or functional equivalent as shown in column 8 of Table I B, application no. 3, and being depicted in the same respective line as said Slr0710, and preferably the activity is increased mitochondrial, or
[26307] (b) a polypeptide comprising a polypeptide, a consensus sequence or at least a polypeptide motif as shown in the respective line in column 5 of Table II or in column 8 of Table IV, application no. 3, respectively, and being depicted in the same respective line as said Slr0710, or a functional equivalent or a homolog thereof as depicted in column 8 of Table II, application no. 3, preferably a homolog or functional equivalent as depicted in column 8 of Table II B, application no. 3, and being depicted in the same respective line as said Slr0710, and preferably the activity is increased mitochondrial.

[26308] Accordingly, in one embodiment, the molecule which activity is to be increased in the process of the invention is the gene product with an activity as a “Glu/Leu/Phe/Val dehydrogenase”, preferably it is the molecule of section (a) or (b) of this paragraph.

[26309] In particular, it was observed that in plants, especially in Arabidopsis thaliana, increasing or generating the activity of a gene product mitochondrial with the activity of a “Glu/Leu/PheNal dehydrogenase”, preferably being encoded by a gene comprising the nucleic acid sequence SEQ ID NO. 56894, preferably the coding region thereof, conferred the production of or the increase in tyrosine compared with the wild type control.

[26310] The nucleic acid sequence of Slr0721 from Synechocystis sp., e.g. as shown in the respective line in column 5 of Table I, application no. 3, has been published in C. And the activity of the gene product thereof is the activity of malate dehydrogenase.

[26311] Accordingly, in one embodiment, the process of the present invention for producing phenylalanine in a non-human organism, like a microorganism or a plant or a part thereof, comprises increasing or generating the activity of a gene product with the activity of a gene product conferring the activity of “malate dehydrogenase”, especially from Synechocystis sp. or its functional equivalent or its homolog, e.g. the increase of
[26312] (a) a gene product of a gene comprising the nucleic acid molecule as shown in the respective line in column 5 of Table I, application no. 3, preferably the coding region thereof, or a homolog or a fragment thereof, and being depicted in the same respective line as said Slr0721, or a functional equivalent or a homolog thereof as shown in column 8 of Table I, application no. 3, preferably the coding region thereof, particularly a homolog or functional equivalent as shown in column 8 of Table I B, application no. 3, and being depicted in the same respective line as said Slr0721, and preferably the activity is increased plastidic, or
[26313] (b) a polypeptide comprising a polypeptide, a consensus sequence or at least a polypeptide motif as shown in the respective line in column 5 of Table II or in column 8 of Table IV, application no. 3, respectively, and being depicted in the same respective line as said Slr0721, or a functional equivalent or a homolog thereof as depicted in column 8 of Table II, application no. 3, preferably a homolog or functional equivalent as depicted in column 8 of Table II B, application no. 3, and being depicted in the same respective line as said Slr0721, and preferably the activity is increased plastidic.

[26314] Accordingly, in one embodiment, the molecule which activity is to be increased in the process of the invention is the gene product with an activity as a “malate dehydrogenase”, preferably it is the molecule of section (a) or (b) of this paragraph.

[26315] In particular, it was observed that in plants, especially in Arabidopsis thaliana, increasing or generating the activity of a gene product plastidic with the activity of a “malate dehydrogenase”, preferably being encoded by a gene comprising the nucleic acid sequence SEQ ID NO. 87397, preferably the coding region thereof, conferred the production of or the increase in phenylalanine compared with the wild type control.

[26316] The nucleic acid sequence of Slr0739 from Synechocystis sp., e.g. as shown in the respective line in column 5 of Table I, application no. 3, has been published in C. And the activity of the gene product thereof is the activity of geranylgeranyl pyrophosphate synthase.

[26317] Accordingly, in one embodiment, the process of the present invention for producing alanine in a non-human organism, like a microorganism or a plant or a part thereof, comprises increasing or generating the activity of a gene product with the activity of a gene product conferring the activity of “geranylgeranyl pyrophosphate synthase”, especially from Synechocystis sp. or its functional equivalent or its homolog, e.g. the increase of
[26318] (a) a gene product of a gene comprising the nucleic acid molecule as shown in the respective line in column 5 of Table I, application no. 3, preferably the coding region thereof, or a homolog or a fragment thereof, and being depicted in the same respective line as said Slr0739, or a functional equivalent or a homolog thereof as shown in column 8 of Table I, application no. 3, preferably the coding region thereof, particularly a homolog or functional equivalent as shown in column 8 of Table I B, application no. 3, and being depicted in the same respective line as said Slr0739, and preferably the activity is increased plastidic, or
[26319] (b) a polypeptide comprising a polypeptide, a consensus sequence or at least a polypeptide motif as shown in the respective line in column 5 of Table II or in column 8 of Table IV, application no. 3, respectively, and being depicted in the same respective line as said Slr0739, or a functional equivalent or a homolog thereof as depicted in column 8 of Table II, application no. 3, preferably a homolog or functional equivalent as depicted in column 8 of Table II B, application no. 3, and being depicted in the same respective line as said Slr0739, and preferably the activity is increased plastidic.

[26320] Accordingly, in one embodiment, the molecule which activity is to be increased in the process of the invention is the gene product with an activity as a “geranylgeranyl pyrophosphate synthase”, preferably it is the molecule of section (a) or (b) of this paragraph.

[26321] In particular, it was observed that in plants, especially in Arabidopsis thaliana, increasing or generating the activity of a gene product plastidic with the activity of a “geranylgeranyl pyrophosphate synthase”, preferably being encoded by a gene comprising the nucleic acid sequence SEQ ID NO. 57235, preferably the coding region thereof, conferred the production of or the increase in alanine compared with the wild type control.

[26322] The nucleic acid sequence of Slr0739 from Synechocystis sp., e.g. as shown in the respective line in column 5 of Table I, application no. 3, has been published in C. And the activity of the gene product thereof is the activity of geranylgeranyl pyrophosphate synthase.

[26323] Accordingly, in one embodiment, the process of the present invention for producing asparagine in a non-human organism, like a microorganism or a plant or a part thereof, comprises increasing or generating the activity of a gene product with the activity of a gene product conferring the activity of “geranylgeranyl pyrophosphate synthase”, especially from Synechocystis sp. or its functional equivalent or its homolog, e.g. the increase of
[26324] (a) a gene product of a gene comprising the nucleic acid molecule as shown in the respective line in column 5 of Table I, application no. 3, preferably the coding region thereof, or a homolog or a fragment thereof, and being depicted in the same respective line as said Slr0739, or a functional equivalent or a homolog thereof as shown in column 8 of Table I, application no. 3, preferably the coding region thereof, particularly a homolog or functional equivalent as shown in column 8 of Table I B, application no. 3, and being depicted in the same respective line as said Slr0739, and preferably the activity is increased plastidic, or
[26325] (b) a polypeptide comprising a polypeptide, a consensus sequence or at least a polypeptide motif as shown in the respective line in column 5 of Table II or in column 8 of Table IV, application no. 3, respectively, and being depicted in the same respective line as said Slr0739, or a functional equivalent or a homolog thereof as depicted in column 8 of Table II, application no. 3, preferably a homolog or functional equivalent as depicted in column 8 of Table II B, application no. 3, and being depicted in the same respective line as said Slr0739, and preferably the activity is increased plastidic.

[26326] Accordingly, in one embodiment, the molecule which activity is to be increased in the process of the invention is the gene product with an activity as a “geranylgeranyl pyrophosphate synthase”, preferably it is the molecule of section (a) or (b) of this paragraph.

[26327] In particular, it was observed that in plants, especially in Arabidopsis thaliana, increasing or generating the activity of a gene product plastidic with the activity of a “geranylgeranyl pyrophosphate synthase”, preferably being encoded by a gene comprising the nucleic acid sequence SEQ ID NO. 57235, preferably the coding region thereof, conferred the production of or the increase in asparagine compared with the wild type control.

[26328] The nucleic acid sequence of Slr0739 from Synechocystis sp., e.g. as shown in the respective line in column 5 of Table I, application no. 3, has been published in C. And the activity of the gene product thereof is the activity of geranylgeranyl pyrophosphate synthase.

[26329] Accordingly, in one embodiment, the process of the present invention for producing phenylalanine in a non-human organism, like a microorganism or a plant or a part thereof, comprises increasing or generating the activity of a gene product with the activity of a gene product conferring the activity of “geranylgeranyl pyrophosphate synthase”, especially from Synechocystis sp. or its functional equivalent or its homolog, e.g. the increase of
[26330] (a) a gene product of a gene comprising the nucleic acid molecule as shown in the respective line in column 5 of Table I, application no. 3, preferably the coding region thereof, or a homolog or a fragment thereof, and being depicted in the same respective line as said Slr0739, or a functional equivalent or a homolog thereof as shown in column 8 of Table I, application no. 3, preferably the coding region thereof, particularly a homolog or functional equivalent as shown in column 8 of Table I B, application no. 3, and being depicted in the same respective line as said Slr0739, and preferably the activity is increased plastidic, or
[26331] (b) a polypeptide comprising a polypeptide, a consensus sequence or at least a polypeptide motif as shown in the respective line in column 5 of Table II or in column 8 of Table IV, application no. 3, respectively, and being depicted in the same respective line as said Slr0739, or a functional equivalent or a homolog thereof as depicted in column 8 of Table II, application no. 3, preferably a homolog or functional equivalent as depicted in column 8 of Table II B, application no. 3, and being depicted in the same respective line as said Slr0739, and preferably the activity is increased plastidic.

[26332] Accordingly, in one embodiment, the molecule which activity is to be increased in the process of the invention is the gene product with an activity as a “geranylgeranyl pyrophosphate synthase”, preferably it is the molecule of section (a) or (b) of this paragraph.

[26333] In particular, it was observed that in plants, especially in Arabidopsis thaliana, increasing or generating the activity of a gene product plastidic with the activity of a “geranylgeranyl pyrophosphate synthase”, preferably being encoded by a gene comprising the nucleic acid sequence SEQ ID NO. 57235, preferably the coding region thereof, conferred the production of or the increase in phenylalanine compared with the wild type control.

[26334] The nucleic acid sequence of Slr0739 from Synechocystis sp., e.g. as shown in the respective line in column 5 of Table I, application no. 3, has been published in C. And the activity of the gene product thereof is the activity of geranylgeranyl pyrophosphate synthase.

[26335] Accordingly, in one embodiment, the process of the present invention for producing serine in a non-human organism, like a microorganism or a plant or a part thereof, comprises increasing or generating the activity of a gene product with the activity of a gene product conferring the activity of “geranylgeranyl pyrophosphate synthase”, especially from Synechocystis sp. or its functional equivalent or its homolog, e.g. the increase of
[26336] (a) a gene product of a gene comprising the nucleic acid molecule as shown in the respective line in column 5 of Table I, application no. 3, preferably the coding region thereof, or a homolog or a fragment thereof, and being depicted in the same respective line as said Slr0739, or a functional equivalent or a homolog thereof as shown in column 8 of Table I, application no. 3, preferably the coding region thereof, particularly a homolog or functional equivalent as shown in column 8 of Table I B, application no. 3, and being depicted in the same respective line as said Slr0739, and preferably the activity is increased plastidic, or
[26337] (b) a polypeptide comprising a polypeptide, a consensus sequence or at least a polypeptide motif as shown in the respective line in column 5 of Table II or in column 8 of Table IV, application no. 3, respectively, and being depicted in the same respective line as said Slr0739, or a functional equivalent or a homolog thereof as depicted in column 8 of Table II, application no. 3, preferably a homolog or functional equivalent as depicted in column 8 of Table II B, application no. 3, and being depicted in the same respective line as said Slr0739, and preferably the activity is increased plastidic.

[26338] Accordingly, in one embodiment, the molecule which activity is to be increased in the process of the invention is the gene product with an activity as a “geranylgeranyl pyrophosphate synthase”, preferably it is the molecule of section (a) or (b) of this paragraph.

[26339] In particular, it was observed that in plants, especially in Arabidopsis thaliana, increasing or generating the activity of a gene product plastidic with the activity of a “geranylgeranyl pyrophosphate synthase”, preferably being encoded by a gene comprising the nucleic acid sequence SEQ ID NO. 57235, preferably the coding region thereof, conferred the production of or the increase in serine compared with the wild type control.

[26340] The nucleic acid sequence of Slr0739 from Synechocystis sp., e.g. as shown in the respective line in column 5 of Table I, application no. 3, has been published in C. And the activity of the gene product thereof is the activity of geranylgeranyl pyrophosphate synthase.

[26341] Accordingly, in one embodiment, the process of the present invention for producing tyrosine in a non-human organism, like a microorganism or a plant or a part thereof, comprises increasing or generating the activity of a gene product with the activity of a gene product conferring the activity of “geranylgeranyl pyrophosphate synthase”, especially from Synechocystis sp. or its functional equivalent or its homolog, e.g. the increase of
[26342] (a) a gene product of a gene comprising the nucleic acid molecule as shown in the respective line in column 5 of Table I, application no. 3, preferably the coding region thereof, or a homolog or a fragment thereof, and being depicted in the same respective line as said Slr0739, or a functional equivalent or a homolog thereof as shown in column 8 of Table I, application no. 3, preferably the coding region thereof, particularly a homolog or functional equivalent as shown in column 8 of Table I B, application no. 3, and being depicted in the same respective line as said Slr0739, and preferably the activity is increased plastidic, or
[26343] (b) a polypeptide comprising a polypeptide, a consensus sequence or at least a polypeptide motif as shown in the respective line in column 5 of Table II or in column 8 of Table IV, application no. 3, respectively, and being depicted in the same respective line as said Slr0739, or a functional equivalent or a homolog thereof as depicted in column 8 of Table II, application no. 3, preferably a homolog or functional equivalent as depicted in column 8 of Table II B, application no. 3, and being depicted in the same respective line as said Slr0739, and preferably the activity is increased plastidic.

[26344] Accordingly, in one embodiment, the molecule which activity is to be increased in the process of the invention is the gene product with an activity as a “geranylgeranyl pyrophosphate synthase”, preferably it is the molecule of section (a) or (b) of this paragraph.

[26345] In particular, it was observed that in plants, especially in Arabidopsis thaliana, increasing or generating the activity of a gene product plastidic with the activity of a “geranylgeranyl pyrophosphate synthase”, preferably being encoded by a gene comprising the nucleic acid sequence SEQ ID NO. 57235, preferably the coding region thereof, conferred the production of or the increase in tyrosine compared with the wild type control.

[26346] The nucleic acid sequence of Slr0739 from Synechocystis sp., e.g. as shown in the respective line in column 5 of Table I, application no. 3, has been published in C. And the activity of the gene product thereof is the activity of geranylgeranyl pyrophosphate synthase.

[26347] Accordingly, in one embodiment, the process of the present invention for producing 5oxoproline in a non-human organism, like a microorganism or a plant or a part thereof, comprises increasing or generating the activity of a gene product with the activity of a gene product conferring the activity of “geranylgeranyl pyrophosphate synthase”, especially from Synechocystis sp. or its functional equivalent or its homolog, e.g. the increase of
[26348] (a) a gene product of a gene comprising the nucleic acid molecule as shown in the respective line in column 5 of Table I, application no. 3, preferably the coding region thereof, or a homolog or a fragment thereof, and being depicted in the same respective line as said Slr0739, or a functional equivalent or a homolog thereof as shown in column 8 of Table I, application no. 3, preferably the coding region thereof, particularly a homolog or functional equivalent as shown in column 8 of Table I B, application no. 3, and being depicted in the same respective line as said Slr0739, and preferably the activity is increased plastidic, or
[26349] (b) a polypeptide comprising a polypeptide, a consensus sequence or at least a polypeptide motif as shown in the respective line in column 5 of Table II or in column 8 of Table IV, application no. 3, respectively, and being depicted in the same respective line as said Slr0739, or a functional equivalent or a homolog thereof as depicted in column 8 of Table II, application no. 3, preferably a homolog or functional equivalent as depicted in column 8 of Table II B, application no. 3, and being depicted in the same respective line as said Slr0739, and preferably the activity is increased plastidic.

[26350] Accordingly, in one embodiment, the molecule which activity is to be increased in the process of the invention is the gene product with an activity as a “geranylgeranyl pyrophosphate synthase”, preferably it is the molecule of section (a) or (b) of this paragraph.

[26351] In particular, it was observed that in plants, especially in Arabidopsis thaliana, increasing or generating the activity of a gene product plastidic with the activity of a “geranylgeranyl pyrophosphate synthase”, preferably being encoded by a gene comprising the nucleic acid sequence SEQ ID NO. 57235, preferably the coding region thereof, conferred the production of or the increase in 5-oxoproline compared with the wild type control.

[26352] The nucleic acid sequence of Slr0782 from Synechocystis sp., e.g. as shown in the respective line in column 5 of Table I, application no. 3, has been published in C. And the activity of the gene product thereof is the activity of amine oxidase.

[26353] Accordingly, in one embodiment, the process of the present invention for producing phenylalanine in a non-human organism, like a microorganism or a plant or a part thereof, comprises increasing or generating the activity of a gene product with the activity of a gene product conferring the activity of “amine oxidase”, especially from Synechocystis sp. or its functional equivalent or its homolog, e.g. the increase of
[26354] (a) a gene product of a gene comprising the nucleic acid molecule as shown in the respective line in column 5 of Table I, application no. 3, preferably the coding region thereof, or a homolog or a fragment thereof, and being depicted in the same respective line as said Slr0782, or a functional equivalent or a homolog thereof as shown in column 8 of Table I, application no. 3, preferably the coding region thereof, particularly a homolog or functional equivalent as shown in column 8 of Table I B, application no. 3, and being depicted in the same respective line as said Slr0782, and preferably the activity is increased mitochondrial, or
[26355] (b) a polypeptide comprising a polypeptide, a consensus sequence or at least a polypeptide motif as shown in the respective line in column 5 of Table II or in column 8 of Table IV, application no. 3, respectively, and being depicted in the same respective line as said Slr0782, or a functional equivalent or a homolog thereof as depicted in column 8 of Table II, application no. 3, preferably a homolog or functional equivalent as depicted in column 8 of Table II B, application no. 3, and being depicted in the same respective line as said Slr0782, and preferably the activity is increased mitochondrial.

[26356] Accordingly, in one embodiment, the molecule which activity is to be increased in the process of the invention is the gene product with an activity as a “amine oxidase”, preferably it is the molecule of section (a) or (b) of this paragraph.

[26357] In particular, it was observed that in plants, especially in Arabidopsis thaliana, increasing or generating the activity of a gene product mitochondrial with the activity of a “amine oxidase”, preferably being encoded by a gene comprising the nucleic acid sequence SEQ ID NO. 57679, preferably the coding region thereof, conferred the production of or the increase in phenylalanine compared with the wild type control.

[26358] The nucleic acid sequence of Slr0862 from Synechocystis sp., e.g. as shown in the respective line in column 5 of Table I, application no. 3, has been published in C. And the activity of the gene product thereof is the activity of kinase.

[26359] Accordingly, in one embodiment, the process of the present invention for producing serine in a non-human organism, like a microorganism or a plant or a part thereof, comprises increasing or generating the activity of a gene product with the activity of a gene product conferring the activity of “kinase”, especially from Synechocystis sp. or its functional equivalent or its homolog, e.g. the increase of
[26360] (a) a gene product of a gene comprising the nucleic acid molecule as shown in the respective line in column 5 of Table I, application no. 3, preferably the coding region thereof, or a homolog or a fragment thereof, and being depicted in the same respective line as said Slr0862, or a functional equivalent or a homolog thereof as shown in column 8 of Table I, application no. 3, preferably the coding region thereof, particularly a homolog or functional equivalent as shown in column 8 of Table I B, application no. 3, and being depicted in the same respective line as said Slr0862, and preferably the activity is increased mitochondrial, or
[26361] (b) a polypeptide comprising a polypeptide, a consensus sequence or at least a polypeptide motif as shown in the respective line in column 5 of Table II or in column 8 of Table IV, application no. 3, respectively, and being depicted in the same respective line as said Slr0862, or a functional equivalent or a homolog thereof as depicted in column 8 of Table II, application no. 3, preferably a homolog or functional equivalent as depicted in column 8 of Table II B, application no. 3, and being depicted in the same respective line as said Slr0862, and preferably the activity is increased mitochondrial.

[26362] Accordingly, in one embodiment, the molecule which activity is to be increased in the process of the invention is the gene product with an activity as a “kinase”, preferably it is the molecule of section (a) or (b) of this paragraph.

[26363] In particular, it was observed that in plants, especially in Arabidopsis thaliana, increasing or generating the activity of a gene product mitochondrial with the activity of a “kinase”, preferably being encoded by a gene comprising the nucleic acid sequence SEQ ID NO. 87610, preferably the coding region thereof, conferred the production of or the increase in serine compared with the wild type control.

[26364] The nucleic acid sequence of Slr0966 from Synechocystis sp., e.g. as shown in the respective line in column 5 of Table I, application no. 3, has been published in C. And the activity of the gene product thereof is the activity of tryptophan synthase alpha chain.

[26365] Accordingly, in one embodiment, the process of the present invention for producing tyrosine in a non-human organism, like a microorganism or a plant or a part thereof, comprises increasing or generating the activity of a gene product with the activity of a gene product conferring the activity of “tryptophan synthase alpha chain”, especially from Synechocystis sp. or its functional equivalent or its homolog, e.g. the increase of
[26366] (a) a gene product of a gene comprising the nucleic acid molecule as shown in the respective line in column 5 of Table I, application no. 3, preferably the coding region thereof, or a homolog or a fragment thereof, and being depicted in the same respective line as said Slr0966, or a functional equivalent or a homolog thereof as shown in column 8 of Table I, application no. 3, preferably the coding region thereof, particularly a homolog or functional equivalent as shown in column 8 of Table I B, application no. 3, and being depicted in the same respective line as said Slr0966, and preferably the activity is increased plastidic, or
[26367] (b) a polypeptide comprising a polypeptide, a consensus sequence or at least a polypeptide motif as shown in the respective line in column 5 of Table II or in column 8 of Table IV, application no. 3, respectively, and being depicted in the same respective line as said Slr0966, or a functional equivalent or a homolog thereof as depicted in column 8 of Table II, application no. 3, preferably a homolog or functional equivalent as depicted in column 8 of Table II B, application no. 3, and being depicted in the same respective line as said Slr0966, and preferably the activity is increased plastidic.

[26368] Accordingly, in one embodiment, the molecule which activity is to be increased in the process of the invention is the gene product with an activity as a “tryptophan synthase alpha chain”, preferably it is the molecule of section (a) or (b) of this paragraph.

[26369] In particular, it was observed that in plants, especially in Arabidopsis thaliana, increasing or generating the activity of a gene product plastidic with the activity of a “tryptophan synthase alpha chain”, preferably being encoded by a gene comprising the nucleic acid sequence SEQ ID NO. 87655, preferably the coding region thereof, conferred the production of or the increase in tyrosine compared with the wild type control.

[26370] The nucleic acid sequence of Slr1133 from Synechocystis sp., e.g. as shown in the respective line in column 5 of Table I, application no. 3, has been published in C. And the activity of the gene product thereof is the activity of argininosuccinate lyase.

[26371] Accordingly, in one embodiment, the process of the present invention for producing ornithine in a non-human organism, like a microorganism or a plant or a part thereof, comprises increasing or generating the activity of a gene product with the activity of a gene product conferring the activity of “argininosuccinate lyase”, especially from Synechocystis sp. or its functional equivalent or its homolog, e.g. the increase of
[26372] (a) a gene product of a gene comprising the nucleic acid molecule as shown in the respective line in column 5 of Table I, application no. 3, preferably the coding region thereof, or a homolog or a fragment thereof, and being depicted in the same respective line as said Slr1133, or a functional equivalent or a homolog thereof as shown in column 8 of Table I, application no. 3, preferably the coding region thereof, particularly a homolog or functional equivalent as shown in column 8 of Table I B, application no. 3, and being depicted in the same respective line as said Slr1133, and preferably the activity is increased mitochondrial, or
[26373] (b) a polypeptide comprising a polypeptide, a consensus sequence or at least a polypeptide motif as shown in the respective line in column 5 of Table II or in column 8 of Table IV, application no. 3, respectively, and being depicted in the same respective line as said Slr1133, or a functional equivalent or a homolog thereof as depicted in column 8 of Table II, application no. 3, preferably a homolog or functional equivalent as depicted in column 8 of Table II B, application no. 3, and being depicted in the same respective line as said Slr1133, and preferably the activity is increased mitochondrial.

[26374] Accordingly, in one embodiment, the molecule which activity is to be increased in the process of the invention is the gene product with an activity as a “argininosuccinate lyase”, preferably it is the molecule of section (a) or (b) of this paragraph.

[26375] In particular, it was observed that in plants, especially in Arabidopsis thaliana, increasing or generating the activity of a gene product mitochondrial with the activity of a “argininosuccinate lyase”, preferably being encoded by a gene comprising the nucleic acid sequence SEQ ID NO. 87853, preferably the coding region thereof, conferred the production of or the increase in ornithine compared with the wild type control.

[26376] The nucleic acid sequence of Slr1133 from Synechocystis sp., e.g. as shown in the respective line in column 5 of Table I, application no. 3, has been published in C. And the activity of the gene product thereof is the activity of argininosuccinate lyase.

[26377] Accordingly, in one embodiment, the process of the present invention for producing serine in a non-human organism, like a microorganism or a plant or a part thereof, comprises increasing or generating the activity of a gene product with the activity of a gene product conferring the activity of “argininosuccinate lyase”, especially from Synechocystis sp. or its functional equivalent or its homolog, e.g. the increase of
[26378] (a) a gene product of a gene comprising the nucleic acid molecule as shown in the respective line in column 5 of Table I, application no. 3, preferably the coding region thereof, or a homolog or a fragment thereof, and being depicted in the same respective line as said Slr1133, or a functional equivalent or a homolog thereof as shown in column 8 of Table I, application no. 3, preferably the coding region thereof, particularly a homolog or functional equivalent as shown in column 8 of Table I B, application no. 3, and being depicted in the same respective line as said Slr1133, and preferably the activity is increased mitochondrial, or
[26379] (b) a polypeptide comprising a polypeptide, a consensus sequence or at least a polypeptide motif as shown in the respective line in column 5 of Table II or in column 8 of Table IV, application no. 3, respectively, and being depicted in the same respective line as said Slr1133, or a functional equivalent or a homolog thereof as depicted in column 8 of Table II, application no. 3, preferably a homolog or functional equivalent as depicted in column 8 of Table II B, application no. 3, and being depicted in the same respective line as said Slr1133, and preferably the activity is increased mitochondrial.

[26380] Accordingly, in one embodiment, the molecule which activity is to be increased in the process of the invention is the gene product with an activity as a “argininosuccinate lyase”, preferably it is the molecule of section (a) or (b) of this paragraph.

[26381] In particular, it was observed that in plants, especially in Arabidopsis thaliana, increasing or generating the activity of a gene product mitochondrial with the activity of a “argininosuccinate lyase”, preferably being encoded by a gene comprising the nucleic acid sequence SEQ ID NO. 87853, preferably the coding region thereof, conferred the production of or the increase in serine compared with the wild type control.

[26382] The nucleic acid sequence of Slr1269 from Synechocystis sp., e.g. as shown in the respective line in column 5 of Table I, application no. 3, has been published in C. And the activity of the gene product thereof is the activity of gamma-glutamyltranspeptidase.

[26383] Accordingly, in one embodiment, the process of the present invention for producing asparagine in a non-human organism, like a microorganism or a plant or a part thereof, comprises increasing or generating the activity of a gene product with the activity of a gene product conferring the activity of “gamma-glutamyltranspeptidase”, especially from Synechocystis sp. or its functional equivalent or its homolog, e.g. the increase of
[26384] (a) a gene product of a gene comprising the nucleic acid molecule as shown in the respective line in column 5 of Table I, application no. 3, preferably the coding region thereof, or a homolog or a fragment thereof, and being depicted in the same respective line as said Slr1269, or a functional equivalent or a homolog thereof as shown in column 8 of Table I, application no. 3, preferably the coding region thereof, particularly a homolog or functional equivalent as shown in column 8 of Table I B, application no. 3, and being depicted in the same respective line as said Slr1269, and preferably the activity is increased non-targeted, or
[26385] (b) a polypeptide comprising a polypeptide, a consensus sequence or at least a polypeptide motif as shown in the respective line in column 5 of Table II or in column 8 of Table IV, application no. 3, respectively, and being depicted in the same respective line as said Slr1269, or a functional equivalent or a homolog thereof as depicted in column 8 of Table II, application no. 3, preferably a homolog or functional equivalent as depicted in column 8 of Table II B, application no. 3, and being depicted in the same respective line as said Slr1269, and preferably the activity is increased non-targeted.

[26386] Accordingly, in one embodiment, the molecule which activity is to be increased in the process of the invention is the gene product with an activity as a “gamma-glutamyltranspeptidase”, preferably it is the molecule of section (a) or (b) of this paragraph.

[26387] In particular, it was observed that in plants, especially in Arabidopsis thaliana, increasing or generating the activity of a gene product non-targeted with the activity of a “gamma-glutamyltranspeptidase”, preferably being encoded by a gene comprising the nucleic acid sequence SEQ ID NO. 58058, preferably the coding region thereof, conferred the production of or the increase in asparagine compared with the wild type control.

[26388] The nucleic acid sequence of Slr1492 from Synechocystis sp., e.g. as shown in the respective line in column 5 of Table I, application no. 3, has been published in C. And the activity of the gene product thereof is the activity of iron(III) dicitrate-binding protein.

[26389] Accordingly, in one embodiment, the process of the present invention for producing aspartate in a non-human organism, like a microorganism or a plant or a part thereof, comprises increasing or generating the activity of a gene product with the activity of a gene product conferring the activity of “iron(III) dicitrate-binding protein”, especially from Synechocystis sp. or its functional equivalent or its homolog, e.g. the increase of
[26390] (a) a gene product of a gene comprising the nucleic acid molecule as shown in the respective line in column 5 of Table I, application no. 3, preferably the coding region thereof, or a homolog or a fragment thereof, and being depicted in the same respective line as said Slr1492, or a functional equivalent or a homolog thereof as shown in column 8 of Table I, application no. 3, preferably the coding region thereof, particularly a homolog or functional equivalent as shown in column 8 of Table I B, application no. 3, and being depicted in the same respective line as said Slr1492, and preferably the activity is increased mitochondrial, or
[26391] (b) a polypeptide comprising a polypeptide, a consensus sequence or at least a polypeptide motif as shown in the respective line in column 5 of Table II or in column 8 of Table IV, application no. 3, respectively, and being depicted in the same respective line as said Slr1492, or a functional equivalent or a homolog thereof as depicted in column 8 of Table II, application no. 3, preferably a homolog or functional equivalent as depicted in column 8 of Table II B, application no. 3, and being depicted in the same respective line as said Slr1492, and preferably the activity is increased mitochondrial.

[26392] Accordingly, in one embodiment, the molecule which activity is to be increased in the process of the invention is the gene product with an activity as a “iron(III) dicitrate-binding protein”, preferably it is the molecule of section (a) or (b) of this paragraph.

[26393] In particular, it was observed that in plants, especially in Arabidopsis thaliana, increasing or generating the activity of a gene product mitochondrial with the activity of a “iron(III) dicitrate-binding protein”, preferably being encoded by a gene comprising the nucleic acid sequence SEQ ID NO. 58668, preferably the coding region thereof, conferred the production of or the increase in aspartate compared with the wild type control.

[26394] The nucleic acid sequence of Slr1492 from Synechocystis sp., e.g. as shown in the respective line in column 5 of Table I, application no. 3, has been published in C. And the activity of the gene product thereof is the activity of iron(III) dicitrate-binding protein.

[26395] Accordingly, in one embodiment, the process of the present invention for producing phenylalanine in a non-human organism, like a microorganism or a plant or a part thereof, comprises increasing or generating the activity of a gene product with the activity of a gene product conferring the activity of “iron(III) dicitrate-binding protein”, especially from Synechocystis sp. or its functional equivalent or its homolog, e.g. the increase of
[26396] (a) a gene product of a gene comprising the nucleic acid molecule as shown in the respective line in column 5 of Table I, application no. 3, preferably the coding region thereof, or a homolog or a fragment thereof, and being depicted in the same respective line as said Slr1492, or a functional equivalent or a homolog thereof as shown in column 8 of Table I, application no. 3, preferably the coding region thereof, particularly a homolog or functional equivalent as shown in column 8 of Table I B, application no. 3, and being depicted in the same respective line as said Slr1492, and preferably the activity is increased mitochondrial, or
[26397] (b) a polypeptide comprising a polypeptide, a consensus sequence or at least a polypeptide motif as shown in the respective line in column 5 of Table II or in column 8 of Table IV, application no. 3, respectively, and being depicted in the same respective line as said Slr1492, or a functional equivalent or a homolog thereof as depicted in column 8 of Table II, application no. 3, preferably a homolog or functional equivalent as depicted in column 8 of Table II B, application no. 3, and being depicted in the same respective line as said Slr1492, and preferably the activity is increased mitochondrial.

[26398] Accordingly, in one embodiment, the molecule which activity is to be increased in the process of the invention is the gene product with an activity as a “iron(III) dicitrate-binding protein”, preferably it is the molecule of section (a) or (b) of this paragraph.

[26399] In particular, it was observed that in plants, especially in Arabidopsis thaliana, increasing or generating the activity of a gene product mitochondrial with the activity of a “iron(III) dicitratebinding protein”, preferably being encoded by a gene comprising the nucleic acid sequence SEQ ID NO. 58668, preferably the coding region thereof, conferred the production of or the increase in phenylalanine compared with the wild type control.

[26400] The nucleic acid sequence of Slr1509 from Synechocystis sp., e.g. as shown in the respective line in column 5 of Table I, application no. 3, has been published in C. And the activity of the gene product thereof is the activity of Na+/K+ transporter.

[26401] Accordingly, in one embodiment, the process of the present invention for producing phenylalanine in a non-human organism, like a microorganism or a plant or a part thereof, comprises increasing or generating the activity of a gene product with the activity of a gene product conferring the activity of “Na+/K+ transporter”, especially from Synechocystis sp. or its functional equivalent or its homolog, e.g. the increase of
[26402] (a) a gene product of a gene comprising the nucleic acid molecule as shown in the respective line in column 5 of Table I, application no. 3, preferably the coding region thereof, or a homolog or a fragment thereof, and being depicted in the same respective line as said Slr1509, or a functional equivalent or a homolog thereof as shown in column 8 of Table I, application no. 3, preferably the coding region thereof, particularly a homolog or functional equivalent as shown in column 8 of Table I B, application no. 3, and being depicted in the same respective line as said Slr1509, and preferably the activity is increased mitochondrial, or
[26403] (b) a polypeptide comprising a polypeptide, a consensus sequence or at least a polypeptide motif as shown in the respective line in column 5 of Table II or in column 8 of Table IV, application no. 3, respectively, and being depicted in the same respective line as said Slr1509, or a functional equivalent or a homolog thereof as depicted in column 8 of Table II, application no. 3, preferably a homolog or functional equivalent as depicted in column 8 of Table II B, application no. 3, and being depicted in the same respective line as said Slr1509, and preferably the activity is increased mitochondrial.

[26404] Accordingly, in one embodiment, the molecule which activity is to be increased in the process of the invention is the gene product with an activity as a “Na+/K+ transporter”, preferably it is the molecule of section (a) or (b) of this paragraph.

[26405] In particular, it was observed that in plants, especially in Arabidopsis thaliana, increasing or generating the activity of a gene product mitochondrial with the activity of a “Na+/K+ transporter”, preferably being encoded by a gene comprising the nucleic acid sequence SEQ ID NO. 88158, preferably the coding region thereof, conferred the production of or the increase in phenylalanine compared with the wild type control.

[26406] The nucleic acid sequence of Slr1509 from Synechocystis sp., e.g. as shown in the respective line in column 5 of Table I, application no. 3, has been published in C. And the activity of the gene product thereof is the activity of Na+/K+ transporter.

[26407] Accordingly, in one embodiment, the process of the present invention for producing tyrosine in a non-human organism, like a microorganism or a plant or a part thereof, comprises increasing or generating the activity of a gene product with the activity of a gene product conferring the activity of “Na+/K+ transporter”, especially from Synechocystis sp. or its functional equivalent or its homolog, e.g. the increase of
[26408] (a) a gene product of a gene comprising the nucleic acid molecule as shown in the respective line in column 5 of Table I, application no. 3, preferably the coding region thereof, or a homolog or a fragment thereof, and being depicted in the same respective line as said Slr1509, or a functional equivalent or a homolog thereof as shown in column 8 of Table I, application no. 3, preferably the coding region thereof, particularly a homolog or functional equivalent as shown in column 8 of Table I B, application no. 3, and being depicted in the same respective line as said Slr1509, and preferably the activity is increased mitochondrial, or
[26409] (b) a polypeptide comprising a polypeptide, a consensus sequence or at least a polypeptide motif as shown in the respective line in column 5 of Table II or in column 8 of Table IV, application no. 3, respectively, and being depicted in the same respective line as said Slr1509, or a functional equivalent or a homolog thereof as depicted in column 8 of Table II, application no. 3, preferably a homolog or functional equivalent as depicted in column 8 of Table II B, application no. 3, and being depicted in the same respective line as said Slr1509, and preferably the activity is increased mitochondrial.

[26410] Accordingly, in one embodiment, the molecule which activity is to be increased in the process of the invention is the gene product with an activity as a “Na+/K+ transporter”, preferably it is the molecule of section (a) or (b) of this paragraph.

[26411] In particular, it was observed that in plants, especially in Arabidopsis thaliana, increasing or generating the activity of a gene product mitochondrial with the activity of a “Na+/K+ transporter”, preferably being encoded by a gene comprising the nucleic acid sequence SEQ ID NO. 88158, preferably the coding region thereof, conferred the production of or the increase in tyrosine compared with the wild type control.

[26412] The nucleic acid sequence of Slr1511 from Synechocystis sp., e.g. as shown in the respective line in column 5 of Table I, application no. 3, has been published in C. And the activity of the gene product thereof is the activity of 3-oxoacyl-[acyl-carrier-protein] synthase.

[26413] Accordingly, in one embodiment, the process of the present invention for producing phenylalanine in a non-human organism, like a microorganism or a plant or a part thereof, comprises increasing or generating the activity of a gene product with the activity of a gene product conferring the activity of “3-oxoacyl-[acyl-carrier-protein] synthase”, especially from Synechocystis sp. or its functional equivalent or its homolog, e.g. the increase of
[26414] (a) a gene product of a gene comprising the nucleic acid molecule as shown in the respective line in column 5 of Table I, application no. 3, preferably the coding region thereof, or a homolog or a fragment thereof, and being depicted in the same respective line as said Slr1511, or a functional equivalent or a homolog thereof as shown in column 8 of Table I, application no. 3, preferably the coding region thereof, particularly a homolog or functional equivalent as shown in column 8 of Table I B, application no. 3, and being depicted in the same respective line as said Slr1511, and preferably the activity is increased non-targeted, or
[26415] (b) a polypeptide comprising a polypeptide, a consensus sequence or at least a polypeptide motif as shown in the respective line in column 5 of Table II or in column 8 of Table IV, application no. 3, respectively, and being depicted in the same respective line as said Slr1511, or a functional equivalent or a homolog thereof as depicted in column 8 of Table II, application no. 3, preferably a homolog or functional equivalent as depicted in column 8 of Table II B, application no. 3, and being depicted in the same respective line as said Slr1511, and preferably the activity is increased non-targeted.

[26416] Accordingly, in one embodiment, the molecule which activity is to be increased in the process of the invention is the gene product with an activity as a “3-oxoacyl-[acyl-carrier-protein] synthase”, preferably it is the molecule of section (a) or (b) of this paragraph.

[26417] In particular, it was observed that in plants, especially in Arabidopsis thaliana, increasing or generating the activity of a gene product non-targeted with the activity of a “3-oxoacyl-[acyl-carrier-protein] synthase”, preferably being encoded by a gene comprising the nucleic acid sequence SEQ ID NO. 88271, preferably the coding region thereof, conferred the production of or the increase in phenylalanine compared with the wild type control.

[26418] The nucleic acid sequence of Slr1511 from Synechocystis sp., e.g. as shown in the respective line in column 5 of Table I, application no. 3, has been published in C. And the activity of the gene product thereof is the activity of 3-oxoacyl-[acyl-carrier-protein] synthase.

[26419] Accordingly, in one embodiment, the process of the present invention for producing serine in a non-human organism, like a microorganism or a plant or a part thereof, comprises increasing or generating the activity of a gene product with the activity of a gene product conferring the activity of “3-oxoacyl-[acyl-carrier-protein] synthase”, especially from Synechocystis sp. or its functional equivalent or its homolog, e.g. the increase of
[26420] (a) a gene product of a gene comprising the nucleic acid molecule as shown in the respective line in column 5 of Table I, application no. 3, preferably the coding region thereof, or a homolog or a fragment thereof, and being depicted in the same respective line as said Slr1511, or a functional equivalent or a homolog thereof as shown in column 8 of Table I, application no. 3, preferably the coding region thereof, particularly a homolog or functional equivalent as shown in column 8 of Table I B, application no. 3, and being depicted in the same respective line as said Slr1511, and preferably the activity is increased non-targeted, or
[26421] (b) a polypeptide comprising a polypeptide, a consensus sequence or at least a polypeptide motif as shown in the respective line in column 5 of Table II or in column 8 of Table IV, application no. 3, respectively, and being depicted in the same respective line as said Slr1511, or a functional equivalent or a homolog thereof as depicted in column 8 of Table II, application no. 3, preferably a homolog or functional equivalent as depicted in column 8 of Table II B, application no. 3, and being depicted in the same respective line as said Slr1511, and preferably the activity is increased non-targeted.

[26422] Accordingly, in one embodiment, the molecule which activity is to be increased in the process of the invention is the gene product with an activity as a “3-oxoacyl-[acyl-carrier-protein] synthase”, preferably it is the molecule of section (a) or (b) of this paragraph.

[26423] In particular, it was observed that in plants, especially in Arabidopsis thaliana, increasing or generating the activity of a gene product non-targeted with the activity of a “3-oxoacyl-[acyl-carrier-protein] synthase”, preferably being encoded by a gene comprising the nucleic acid sequence SEQ ID NO. 88271, preferably the coding region thereof, conferred the production of or the increase in serine compared with the wild type control.

[26424] The nucleic acid sequence of Slr1655 from Synechocystis sp., e.g. as shown in the respective line in column 5 of Table I, application no. 3, has been published in C. And the activity of the gene product thereof is the activity of Photosystem I reaction center subunit XI.

[26425] Accordingly, in one embodiment, the process of the present invention for producing phenylalanine in a non-human organism, like a microorganism or a plant or a part thereof, comprises increasing or generating the activity of a gene product with the activity of a gene product conferring the activity of “Photosystem I reaction center subunit XI”, especially from Synechocystis sp.

[26426] or its functional equivalent or its homolog, e.g. the increase of
[26427] (a) a gene product of a gene comprising the nucleic acid molecule as shown in the respective line in column 5 of Table I, application no. 3, preferably the coding region thereof, or a homolog or a fragment thereof, and being depicted in the same respective line as said Slr1655, or a functional equivalent or a homolog thereof as shown in column 8 of Table I, application no. 3, preferably the coding region thereof, particularly a homolog or functional equivalent as shown in column 8 of Table I B, application no. 3, and being depicted in the same respective line as said Slr1655, and preferably the activity is increased mitochondrial, or
[26428] (b) a polypeptide comprising a polypeptide, a consensus sequence or at least a polypeptide motif as shown in the respective line in column 5 of Table II or in column 8 of Table IV, application no. 3, respectively, and being depicted in the same respective line as said Slr1655, or a functional equivalent or a homolog thereof as depicted in column 8 of Table II, application no. 3, preferably a homolog or functional equivalent as depicted in column 8 of Table II B, application no. 3, and being depicted in the same respective line as said Slr1655, and preferably the activity is increased mitochondrial.

[26429] Accordingly, in one embodiment, the molecule which activity is to be increased in the process of the invention is the gene product with an activity as a “Photosystem I reaction center subunit XI”, preferably it is the molecule of section (a) or (b) of this paragraph.

[26430] In particular, it was observed that in plants, especially in Arabidopsis thaliana, increasing or generating the activity of a gene product mitochondrial with the activity of a “Photosystem I reaction center subunit XI”, preferably being encoded by a gene comprising the nucleic acid sequence SEQ ID NO. 12070, preferably the coding region thereof, conferred the production of or the increase in phenylalanine compared with the wild type control.

[26431] The nucleic acid sequence of Slr1655 from Synechocystis sp., e.g. as shown in the respective line in column 5 of Table I, application no. 3, has been published in C. And the activity of the gene product thereof is the activity of Photosystem I reaction center subunit XI.

[26432] Accordingly, in one embodiment, the process of the present invention for producing serine in a non-human organism, like a microorganism or a plant or a part thereof, comprises increasing or generating the activity of a gene product with the activity of a gene product conferring the activity of “Photosystem I reaction center subunit XI”, especially from Synechocystis sp. or its functional equivalent or its homolog, e.g. the increase of
[26433] (a) a gene product of a gene comprising the nucleic acid molecule as shown in the respective line in column 5 of Table I, application no. 3, preferably the coding region thereof, or a homolog or a fragment thereof, and being depicted in the same respective line as said Slr1655, or a functional equivalent or a homolog thereof as shown in column 8 of Table I, application no. 3, preferably the coding region thereof, particularly a homolog or functional equivalent as shown in column 8 of Table I B, application no. 3, and being depicted in the same respective line as said Slr1655, and preferably the activity is increased mitochondrial, or
[26434] (b) a polypeptide comprising a polypeptide, a consensus sequence or at least a polypeptide motif as shown in the respective line in column 5 of Table II or in column 8 of Table IV, application no. 3, respectively, and being depicted in the same respective line as said Slr1655, or a functional equivalent or a homolog thereof as depicted in column 8 of Table II, application no. 3, preferably a homolog or functional equivalent as depicted in column 8 of Table II B, application no. 3, and being depicted in the same respective line as said Slr1655, and preferably the activity is increased mitochondrial.

[26435] Accordingly, in one embodiment, the molecule which activity is to be increased in the process of the invention is the gene product with an activity as a “Photosystem I reaction center subunit XI”, preferably it is the molecule of section (a) or (b) of this paragraph.

[26436] In particular, it was observed that in plants, especially in Arabidopsis thaliana, increasing or generating the activity of a gene product mitochondrial with the activity of a “Photosystem I reaction center subunit XI”, preferably being encoded by a gene comprising the nucleic acid sequence SEQ ID NO. 12070, preferably the coding region thereof, conferred the production of or the increase in serine compared with the wild type control.

[26437] The nucleic acid sequence of Slr1655 from Synechocystis sp., e.g. as shown in the respective line in column 5 of Table I, application no. 3, has been published in C. And the activity of the gene product thereof is the activity of Photosystem I reaction center subunit XI.

[26438] Accordingly, in one embodiment, the process of the present invention for producing tyrosine in a non-human organism, like a microorganism or a plant or a part thereof, comprises increasing or generating the activity of a gene product with the activity of a gene product conferring the activity of “Photosystem I reaction center subunit XI”, especially from Synechocystis sp. or its functional equivalent or its homolog, e.g. the increase of
[26439] (a) a gene product of a gene comprising the nucleic acid molecule as shown in the respective line in column 5 of Table I, application no. 3, preferably the coding region thereof, or a homolog or a fragment thereof, and being depicted in the same respective line as said Slr1655, or a functional equivalent or a homolog thereof as shown in column 8 of Table I, application no. 3, preferably the coding region thereof, particularly a homolog or functional equivalent as shown in column 8 of Table I B, application no. 3, and being depicted in the same respective line as said Slr1655, and preferably the activity is increased mitochondrial, or
[26440] (b) a polypeptide comprising a polypeptide, a consensus sequence or at least a polypeptide motif as shown in the respective line in column 5 of Table II or in column 8 of Table IV, application no. 3, respectively, and being depicted in the same respective line as said Slr1655, or a functional equivalent or a homolog thereof as depicted in column 8 of Table II, application no. 3, preferably a homolog or functional equivalent as depicted in column 8 of Table II B, application no. 3, and being depicted in the same respective line as said Slr1655, and preferably the activity is increased mitochondrial.

[26441] Accordingly, in one embodiment, the molecule which activity is to be increased in the process of the invention is the gene product with an activity as a “Photosystem I reaction center subunit

[26442] XI”, preferably it is the molecule of section (a) or (b) of this paragraph.

[26443] In particular, it was observed that in plants, especially in Arabidopsis thaliana, increasing or generating the activity of a gene product mitochondrial with the activity of a “Photosystem I reaction center subunit XI”, preferably being encoded by a gene comprising the nucleic acid sequence SEQ ID NO. 12070, preferably the coding region thereof, conferred the production of or the increase in tyrosine compared with the wild type control.

[26444] The nucleic acid sequence of Slr1739 from Synechocystis sp., e.g. as shown in the respective line in column 5 of Table I, application no. 3, has been published in C. And the activity of the gene product thereof is the activity of photosystem II protein.

[26445] Accordingly, in one embodiment, the process of the present invention for producing phenylalanine in a non-human organism, like a microorganism or a plant or a part thereof, comprises increasing or generating the activity of a gene product with the activity of a gene product conferring the activity of “photosystem II protein”, especially from Synechocystis sp. or its functional equivalent or its homolog, e.g. the increase of
[26446] (a) a gene product of a gene comprising the nucleic acid molecule as shown in the respective line in column 5 of Table I, application no. 3, preferably the coding region thereof, or a homolog or a fragment thereof, and being depicted in the same respective line as said Slr1739, or a functional equivalent or a homolog thereof as shown in column 8 of Table I, application no. 3, preferably the coding region thereof, particularly a homolog or functional equivalent as shown in column 8 of Table I B, application no. 3, and being depicted in the same respective line as said Slr1739, and preferably the activity is increased plastidic, or
[26447] (b) a polypeptide comprising a polypeptide, a consensus sequence or at least a polypeptide motif as shown in the respective line in column 5 of Table II or in column 8 of Table IV, application no. 3, respectively, and being depicted in the same respective line as said Slr1739, or a functional equivalent or a homolog thereof as depicted in column 8 of Table II, application no. 3, preferably a homolog or functional equivalent as depicted in column 8 of Table II B, application no. 3, and being depicted in the same respective line as said Slr1739, and preferably the activity is increased plastidic.

[26448] Accordingly, in one embodiment, the molecule which activity is to be increased in the process of the invention is the gene product with an activity as a “photosystem II protein”, preferably it is the molecule of section (a) or (b) of this paragraph.

[26449] In particular, it was observed that in plants, especially in Arabidopsis thaliana, increasing or generating the activity of a gene product plastidic with the activity of a “photosystem II protein”, preferably being encoded by a gene comprising the nucleic acid sequence SEQ ID NO. 58731, preferably the coding region thereof, conferred the production of or the increase in phenylalanine compared with the wild type control.

[26450] The nucleic acid sequence of Slr1739 from Synechocystis sp., e.g. as shown in the respective line in column 5 of Table I, application no. 3, has been published in C. And the activity of the gene product thereof is the activity of photosystem II protein.

[26451] Accordingly, in one embodiment, the process of the present invention for producing serine in a non-human organism, like a microorganism or a plant or a part thereof, comprises increasing or generating the activity of a gene product with the activity of a gene product conferring the activity of “photosystem II protein”, especially from Synechocystis sp. or its functional equivalent or its homolog, e.g. the increase of
[26452] (a) a gene product of a gene comprising the nucleic acid molecule as shown in the respective line in column 5 of Table I, application no. 3, preferably the coding region thereof, or a homolog or a fragment thereof, and being depicted in the same respective line as said Slr1739, or a functional equivalent or a homolog thereof as shown in column 8 of Table I, application no. 3, preferably the coding region thereof, particularly a homolog or functional equivalent as shown in column 8 of Table I B, application no. 3, and being depicted in the same respective line as said Slr1739, and preferably the activity is increased plastidic, or
[26453] (b) a polypeptide comprising a polypeptide, a consensus sequence or at least a polypeptide motif as shown in the respective line in column 5 of Table II or in column 8 of Table IV, application no. 3, respectively, and being depicted in the same respective line as said Slr1739, or a functional equivalent or a homolog thereof as depicted in column 8 of Table II, application no. 3, preferably a homolog or functional equivalent as depicted in column 8 of Table II B, application no. 3, and being depicted in the same respective line as said Slr1739, and preferably the activity is increased plastidic.

[26454] Accordingly, in one embodiment, the molecule which activity is to be increased in the process of the invention is the gene product with an activity as a “photosystem II protein”, preferably it is the molecule of section (a) or (b) of this paragraph.

[26455] In particular, it was observed that in plants, especially in Arabidopsis thaliana, increasing or generating the activity of a gene product plastidic with the activity of a “photosystem II protein”, preferably being encoded by a gene comprising the nucleic acid sequence SEQ ID NO. 58731, preferably the coding region thereof, conferred the production of or the increase in serine compared with the wild type control.

[26456] The nucleic acid sequence of Slr1739 from Synechocystis sp., e.g. as shown in the respective line in column 5 of Table I, application no. 3, has been published in C. And the activity of the gene product thereof is the activity of photosystem II protein.

[26457] Accordingly, in one embodiment, the process of the present invention for producing tyrosine in a non-human organism, like a microorganism or a plant or a part thereof, comprises increasing or generating the activity of a gene product with the activity of a gene product conferring the activity of “photosystem II protein”, especially from Synechocystis sp. or its functional equivalent or its homolog, e.g. the increase of
[26458] (a) a gene product of a gene comprising the nucleic acid molecule as shown in the respective line in column 5 of Table I, application no. 3, preferably the coding region thereof, or a homolog or a fragment thereof, and being depicted in the same respective line as said Slr1739, or a functional equivalent or a homolog thereof as shown in column 8 of Table I, application no. 3, preferably the coding region thereof, particularly a homolog or functional equivalent as shown in column 8 of Table I B, application no. 3, and being depicted in the same respective line as said Slr1739, and preferably the activity is increased plastidic, or
[26459] (b) a polypeptide comprising a polypeptide, a consensus sequence or at least a polypeptide motif as shown in the respective line in column 5 of Table II or in column 8 of Table IV, application no. 3, respectively, and being depicted in the same respective line as said Slr1739, or a functional equivalent or a homolog thereof as depicted in column 8 of Table II, application no. 3, preferably a homolog or functional equivalent as depicted in column 8 of Table II B, application no. 3, and being depicted in the same respective line as said Slr1739, and preferably the activity is increased plastidic.

[26460] Accordingly, in one embodiment, the molecule which activity is to be increased in the process of the invention is the gene product with an activity as a “photosystem II protein”, preferably it is the molecule of section (a) or (b) of this paragraph.

[26461] In particular, it was observed that in plants, especially in Arabidopsis thaliana, increasing or generating the activity of a gene product plastidic with the activity of a “photosystem II protein”, preferably being encoded by a gene comprising the nucleic acid sequence SEQ ID NO. 58731, preferably the coding region thereof, conferred the production of or the increase in tyrosine compared with the wild type control.

[26462] The nucleic acid sequence of Slr1739 from Synechocystis sp., e.g. as shown in the respective line in column 5 of Table I, application no. 3, has been published in C. And the activity of the gene product thereof is the activity of photosystem II protein.

[26463] Accordingly, in one embodiment, the process of the present invention for producing 5oxoproline in a non-human organism, like a microorganism or a plant or a part thereof, comprises increasing or generating the activity of a gene product with the activity of a gene product conferring the activity of “photosystem II protein”, especially from Synechocystis sp. or its functional equivalent or its homolog, e.g. the increase of
[26464] (a) a gene product of a gene comprising the nucleic acid molecule as shown in the respective line in column 5 of Table I, application no. 3, preferably the coding region thereof, or a homolog or a fragment thereof, and being depicted in the same respective line as said Slr1739, or a functional equivalent or a homolog thereof as shown in column 8 of Table I, application no. 3, preferably the coding region thereof, particularly a homolog or functional equivalent as shown in column 8 of Table I B, application no. 3, and being depicted in the same respective line as said Slr1739, and preferably the activity is increased plastidic, or
[26465] (b) a polypeptide comprising a polypeptide, a consensus sequence or at least a polypeptide motif as shown in the respective line in column 5 of Table II or in column 8 of Table IV, application no. 3, respectively, and being depicted in the same respective line as said Slr1739, or a functional equivalent or a homolog thereof as depicted in column 8 of Table II, application no. 3, preferably a homolog or functional equivalent as depicted in column 8 of Table II B, application no. 3, and being depicted in the same respective line as said Slr1739, and preferably the activity is increased plastidic.

[26466] Accordingly, in one embodiment, the molecule which activity is to be increased in the process of the invention is the gene product with an activity as a “photosystem II protein”, preferably it is the molecule of section (a) or (b) of this paragraph.

[26467] In particular, it was observed that in plants, especially in Arabidopsis thaliana, increasing or generating the activity of a gene product plastidic with the activity of a “photosystem II protein”, preferably being encoded by a gene comprising the nucleic acid sequence SEQ ID NO. 58731, preferably the coding region thereof, conferred the production of or the increase in 5-oxoproline compared with the wild type control.

[26468] The nucleic acid sequence of Slr1742 from Synechocystis sp., e.g. as shown in the respective line in column 5 of Table I, application no. 3, has been published in C. And the activity of the gene product thereof is the activity of glutamine amidotransferase.

[26469] Accordingly, in one embodiment, the process of the present invention for producing asparagine in a non-human organism, like a microorganism or a plant or a part thereof, comprises increasing or generating the activity of a gene product with the activity of a gene product conferring the activity of “glutamine amidotransferase”, especially from Synechocystis sp. or its functional equivalent or its homolog, e.g. the increase of
[26470] (a) a gene product of a gene comprising the nucleic acid molecule as shown in the respective line in column 5 of Table I, application no. 3, preferably the coding region thereof, or a homolog or a fragment thereof, and being depicted in the same respective line as said Slr1742, or a functional equivalent or a homolog thereof as shown in column 8 of Table I, application no. 3, preferably the coding region thereof, particularly a homolog or functional equivalent as shown in column 8 of Table I B, application no. 3, and being depicted in the same respective line as said Slr1742, and preferably the activity is increased mitochondrial, or
[26471] (b) a polypeptide comprising a polypeptide, a consensus sequence or at least a polypeptide motif as shown in the respective line in column 5 of Table II or in column 8 of Table IV, application no. 3, respectively, and being depicted in the same respective line as said Slr1742, or a functional equivalent or a homolog thereof as depicted in column 8 of Table II, application no. 3, preferably a homolog or functional equivalent as depicted in column 8 of Table II B, application no. 3, and being depicted in the same respective line as said Slr1742, and preferably the activity is increased mitochondrial.

[26472] Accordingly, in one embodiment, the molecule which activity is to be increased in the process of the invention is the gene product with an activity as a “glutamine amidotransferase”, preferably it is the molecule of section (a) or (b) of this paragraph.

[26473] In particular, it was observed that in plants, especially in Arabidopsis thaliana, increasing or generating the activity of a gene product mitochondrial with the activity of a “glutamine amidotransferase”, preferably being encoded by a gene comprising the nucleic acid sequence SEQ ID NO. 58751, preferably the coding region thereof, conferred the production of or the increase in asparagine compared with the wild type control.

[26474] The nucleic acid sequence of Slr1791 from Synechocystis sp., e.g. as shown in the respective line in column 5 of Table I, application no. 3, has been published in C. And the activity of the gene product thereof is the activity of phosphoadenosine phosphosulfate reductase .

[26475] Accordingly, in one embodiment, the process of the present invention for producing citrulline in a non-human organism, like a microorganism or a plant or a part thereof, comprises increasing or generating the activity of a gene product with the activity of a gene product conferring the activity of “phosphoadenosine phosphosulfate reductase”, especially from Synechocystis sp. or its functional equivalent or its homolog, e.g. the increase of
[26476] (a) a gene product of a gene comprising the nucleic acid molecule as shown in the respective line in column 5 of Table I, application no. 3, preferably the coding region thereof, or a homolog or a fragment thereof, and being depicted in the same respective line as said Slr1791, or a functional equivalent or a homolog thereof as shown in column 8 of Table I, application no. 3, preferably the coding region thereof, particularly a homolog or functional equivalent as shown in column 8 of Table I B, application no. 3, and being depicted in the same respective line as said Slr1791, and preferably the activity is increased mitochondrial, or
[26477] (b) a polypeptide comprising a polypeptide, a consensus sequence or at least a polypeptide motif as shown in the respective line in column 5 of Table II or in column 8 of Table IV, application no. 3, respectively, and being depicted in the same respective line as said Slr1791, or a functional equivalent or a homolog thereof as depicted in column 8 of Table II, application no. 3, preferably a homolog or functional equivalent as depicted in column 8 of Table II B, application no. 3, and being depicted in the same respective line as said Slr1791, and preferably the activity is increased mitochondrial.

[26478] Accordingly, in one embodiment, the molecule which activity is to be increased in the process of the invention is the gene product with an activity as a “phosphoadenosine phosphosulfate reductase”, preferably it is the molecule of section (a) or (b) of this paragraph.

[26479] In particular, it was observed that in plants, especially in Arabidopsis thaliana, increasing or generating the activity of a gene product mitochondrial with the activity of a “phosphoadenosine phosphosulfate reductase”, preferably being encoded by a gene comprising the nucleic acid sequence SEQ ID NO. 12140, preferably the coding region thereof, conferred the production of or the increase in citrulline compared with the wild type control.

[26480] The nucleic acid sequence of Slr1882 from Synechocystis sp., e.g. as shown in the respective line in column 5 of Table I, application no. 3, has been published in C. And the activity of the gene product thereof is the activity of riboflavin biosynthesis protein.

[26481] Accordingly, in one embodiment, the process of the present invention for producing asparagine in a non-human organism, like a microorganism or a plant or a part thereof, comprises increasing or generating the activity of a gene product with the activity of a gene product conferring the activity of “riboflavin biosynthesis protein”, especially from Synechocystis sp. or its functional equivalent or its homolog, e.g. the increase of
[26482] (a) a gene product of a gene comprising the nucleic acid molecule as shown in the respective line in column 5 of Table I, application no. 3, preferably the coding region thereof, or a homolog or a fragment thereof, and being depicted in the same respective line as said Slr1882, or a functional equivalent or a homolog thereof as shown in column 8 of Table I, application no. 3, preferably the coding region thereof, particularly a homolog or functional equivalent as shown in column 8 of Table I B, application no. 3, and being depicted in the same respective line as said Slr1882, and preferably the activity is increased non-targeted, or
[26483] (b) a polypeptide comprising a polypeptide, a consensus sequence or at least a polypeptide motif as shown in the respective line in column 5 of Table II or in column 8 of Table IV, application no. 3, respectively, and being depicted in the same respective line as said Slr1882, or a functional equivalent or a homolog thereof as depicted in column 8 of Table II, application no. 3, preferably a homolog or functional equivalent as depicted in column 8 of Table II B, application no. 3, and being depicted in the same respective line as said Slr1882, and preferably the activity is increased non-targeted.

[26484] Accordingly, in one embodiment, the molecule which activity is to be increased in the process of the invention is the gene product with an activity as a “riboflavin biosynthesis protein”, preferably it is the molecule of section (a) or (b) of this paragraph.

[26485] In particular, it was observed that in plants, especially in Arabidopsis thaliana, increasing or generating the activity of a gene product non-targeted with the activity of a “riboflavin biosynthesis protein”, preferably being encoded by a gene comprising the nucleic acid sequence SEQ ID NO. 59041, preferably the coding region thereof, conferred the production of or the increase in asparagine compared with the wild type control.

[26486] The nucleic acid sequence of Slr2072 from Synechocystis sp., e.g. as shown in the respective line in column 5 of Table I, application no. 3, has been published in C. And the activity of the gene product thereof is the activity of threonine dehydratase.

[26487] Accordingly, in one embodiment, the process of the present invention for producing homoserine in a non-human organism, like a microorganism or a plant or a part thereof, comprises increasing or generating the activity of a gene product with the activity of a gene product conferring the activity of “threonine dehydratase”, especially from Synechocystis sp. or its functional equivalent or its homolog, e.g. the increase of
[26488] (a) a gene product of a gene comprising the nucleic acid molecule as shown in the respective line in column 5 of Table I, application no. 3, preferably the coding region thereof, or a homolog or a fragment thereof, and being depicted in the same respective line as said Slr2072, or a functional equivalent or a homolog thereof as shown in column 8 of Table I, application no. 3, preferably the coding region thereof, particularly a homolog or functional equivalent as shown in column 8 of Table I B, application no. 3, and being depicted in the same respective line as said Slr2072, and preferably the activity is increased plastidic, or
[26489] (b) a polypeptide comprising a polypeptide, a consensus sequence or at least a polypeptide motif as shown in the respective line in column 5 of Table II or in column 8 of Table IV, application no. 3, respectively, and being depicted in the same respective line as said Slr2072, or a functional equivalent or a homolog thereof as depicted in column 8 of Table II, application no. 3, preferably a homolog or functional equivalent as depicted in column 8 of Table II B, application no. 3, and being depicted in the same respective line as said Slr2072, and preferably the activity is increased plastidic.

[26490] Accordingly, in one embodiment, the molecule which activity is to be increased in the process of the invention is the gene product with an activity as a “threonine dehydratase”, preferably it is the molecule of section (a) or (b) of this paragraph.

[26491] In particular, it was observed that in plants, especially in Arabidopsis thaliana, increasing or generating the activity of a gene product plastidic with the activity of a “threonine dehydratase”, preferably being encoded by a gene comprising the nucleic acid sequence SEQ ID NO. 12341, preferably the coding region thereof, conferred the production of or the increase in homoserine compared with the wild type control.

[26492] The nucleic acid sequence of Slr2072 from Synechocystis sp., e.g. as shown in the respective line in column 5 of Table I, application no. 3, has been published in C. And the activity of the gene product thereof is the activity of threonine dehydratase.

[26493] Accordingly, in one embodiment, the process of the present invention for producing tyrosine in a non-human organism, like a microorganism or a plant or a part thereof, comprises increasing or generating the activity of a gene product with the activity of a gene product conferring the activity of “threonine dehydratase”, especially from Synechocystis sp. or its functional equivalent or its homolog, e.g. the increase of
[26494] (a) a gene product of a gene comprising the nucleic acid molecule as shown in the respective line in column 5 of Table I, application no. 3, preferably the coding region thereof, or a homolog or a fragment thereof, and being depicted in the same respective line as said Slr2072, or a functional equivalent or a homolog thereof as shown in column 8 of Table I, application no. 3, preferably the coding region thereof, particularly a homolog or functional equivalent as shown in column 8 of Table I B, application no. 3, and being depicted in the same respective line as said Slr2072, and preferably the activity is increased mitochondrial, or
[26495] (b) a polypeptide comprising a polypeptide, a consensus sequence or at least a polypeptide motif as shown in the respective line in column 5 of Table II or in column 8 of Table IV, application no. 3, respectively, and being depicted in the same respective line as said Slr2072, or a functional equivalent or a homolog thereof as depicted in column 8 of Table II, application no. 3, preferably a homolog or functional equivalent as depicted in column 8 of Table II B, application no. 3, and being depicted in the same respective line as said Slr2072, and preferably the activity is increased mitochondrial.

[26496] Accordingly, in one embodiment, the molecule which activity is to be increased in the process of the invention is the gene product with an activity as a “threonine dehydratase”, preferably it is the molecule of section (a) or (b) of this paragraph.

[26497] In particular, it was observed that in plants, especially in Arabidopsis thaliana, increasing or generating the activity of a gene product mitochondrial with the activity of a “threonine dehydratase”, preferably being encoded by a gene comprising the nucleic acid sequence SEQ ID NO. 12341, preferably the coding region thereof, conferred the production of or the increase in tyrosine compared with the wild type control.

[26498] The nucleic acid sequence of Slr2124 from Synechocystis sp., e.g. as shown in the respective line in column 5 of Table I, application no. 3, has been published in C. And the activity of the gene product thereof is the activity of short-chain alcohol dehydrogenase family.

[26499] Accordingly, in one embodiment, the process of the present invention for producing alanine in a non-human organism, like a microorganism or a plant or a part thereof, comprises increasing or generating the activity of a gene product with the activity of a gene product conferring the activity of “short-chain alcohol dehydrogenase family”, especially from Synechocystis sp. or its functional equivalent or its homolog, e.g. the increase of
[26500] (a) a gene product of a gene comprising the nucleic acid molecule as shown in the respective line in column 5 of Table I, application no. 3, preferably the coding region thereof, or a homolog or a fragment thereof, and being depicted in the same respective line as said Slr2124, or a functional equivalent or a homolog thereof as shown in column 8 of Table I, application no. 3, preferably the coding region thereof, particularly a homolog or functional equivalent as shown in column 8 of Table I B, application no. 3, and being depicted in the same respective line as said Slr2124, and preferably the activity is increased plastidic, or
[26501] (b) a polypeptide comprising a polypeptide, a consensus sequence or at least a polypeptide motif as shown in the respective line in column 5 of Table II or in column 8 of Table IV, application no. 3, respectively, and being depicted in the same respective line as said Slr2124, or a functional equivalent or a homolog thereof as depicted in column 8 of Table II, application no. 3, preferably a homolog or functional equivalent as depicted in column 8 of Table II B, application no. 3, and being depicted in the same respective line as said Slr2124, and preferably the activity is increased plastidic.

[26502] Accordingly, in one embodiment, the molecule which activity is to be increased in the process of the invention is the gene product with an activity as a “short-chain alcohol dehydrogenase family”, preferably it is the molecule of section (a) or (b) of this paragraph.

[26503] In particular, it was observed that in plants, especially in Arabidopsis thaliana, increasing or generating the activity of a gene product plastidic with the activity of a “short-chain alcohol dehydrogenase family”, preferably being encoded by a gene comprising the nucleic acid sequence SEQ ID NO. 59370, preferably the coding region thereof, conferred the production of or the increase in alanine compared with the wild type control.

[26504] The nucleic acid sequence of Slr2124 from Synechocystis sp., e.g. as shown in the respective line in column 5 of Table I, application no. 3, has been published in C. And the activity of the gene product thereof is the activity of short-chain alcohol dehydrogenase family.

[26505] Accordingly, in one embodiment, the process of the present invention for producing phenylalanine in a non-human organism, like a microorganism or a plant or a part thereof, comprises increasing or generating the activity of a gene product with the activity of a gene product conferring the activity of “short-chain alcohol dehydrogenase family”, especially from Synechocystis sp. or its functional equivalent or its homolog, e.g. the increase of
[26506] (a) a gene product of a gene comprising the nucleic acid molecule as shown in the respective line in column 5 of Table I, application no. 3, preferably the coding region thereof, or a homolog or a fragment thereof, and being depicted in the same respective line as said Slr2124, or a functional equivalent or a homolog thereof as shown in column 8 of Table I, application no. 3, preferably the coding region thereof, particularly a homolog or functional equivalent as shown in column 8 of Table I B, application no. 3, and being depicted in the same respective line as said Slr2124, and preferably the activity is increased plastidic, or
[26507] (b) a polypeptide comprising a polypeptide, a consensus sequence or at least a polypeptide motif as shown in the respective line in column 5 of Table II or in column 8 of Table IV, application no. 3, respectively, and being depicted in the same respective line as said Slr2124, or a functional equivalent or a homolog thereof as depicted in column 8 of Table II, application no. 3, preferably a homolog or functional equivalent as depicted in column 8 of Table II B, application no. 3, and being depicted in the same respective line as said Slr2124, and preferably the activity is increased plastidic.

[26508] Accordingly, in one embodiment, the molecule which activity is to be increased in the process of the invention is the gene product with an activity as a “short-chain alcohol dehydrogenase family”, preferably it is the molecule of section (a) or (b) of this paragraph.

[26509] In particular, it was observed that in plants, especially in Arabidopsis thaliana, increasing or generating the activity of a gene product plastidic with the activity of a “short-chain alcohol dehydrogenase family”, preferably being encoded by a gene comprising the nucleic acid sequence SEQ ID NO. 59370, preferably the coding region thereof, conferred the production of or the increase in phenylalanine compared with the wild type control.

[26510] The nucleic acid sequence of Slr2124 from Synechocystis sp., e.g. as shown in the respective line in column 5 of Table I, application no. 3, has been published in C. And the activity of the gene product thereof is the activity of short-chain alcohol dehydrogenase family.

[26511] Accordingly, in one embodiment, the process of the present invention for producing tyrosine in a non-human organism, like a microorganism or a plant or a part thereof, comprises increasing or generating the activity of a gene product with the activity of a gene product conferring the activity of “short-chain alcohol dehydrogenase family”, especially from Synechocystis sp. or its functional equivalent or its homolog, e.g. the increase of
[26512] (a) a gene product of a gene comprising the nucleic acid molecule as shown in the respective line in column 5 of Table I, application no. 3, preferably the coding region thereof, or a homolog or a fragment thereof, and being depicted in the same respective line as said Slr2124, or a functional equivalent or a homolog thereof as shown in column 8 of Table I, application no. 3, preferably the coding region thereof, particularly a homolog or functional equivalent as shown in column 8 of Table I B, application no. 3, and being depicted in the same respective line as said Slr2124, and preferably the activity is increased plastidic, or
[26513] (b) a polypeptide comprising a polypeptide, a consensus sequence or at least a polypeptide motif as shown in the respective line in column 5 of Table II or in column 8 of Table IV, application no. 3, respectively, and being depicted in the same respective line as said Slr2124, or a functional equivalent or a homolog thereof as depicted in column 8 of Table II, application no. 3, preferably a homolog or functional equivalent as depicted in column 8 of Table II B, application no. 3, and being depicted in the same respective line as said Slr2124, and preferably the activity is increased plastidic.

[26514] Accordingly, in one embodiment, the molecule which activity is to be increased in the process of the invention is the gene product with an activity as a “short-chain alcohol dehydrogenase family”, preferably it is the molecule of section (a) or (b) of this paragraph.

[26515] In particular, it was observed that in plants, especially in Arabidopsis thaliana, increasing or generating the activity of a gene product plastidic with the activity of a “short-chain alcohol dehydrogenase family”, preferably being encoded by a gene comprising the nucleic acid sequence SEQ ID NO. 59370, preferably the coding region thereof, conferred the production of or the increase in tyrosine compared with the wild type control.

[26516] The nucleic acid sequence of TTC0019 from Thermus thermophilus, e.g. as shown in the respective line in column 5 of Table I, application no. 3, has been published in E. And the activity of the gene product thereof is the activity of Sec-independent protein translocase subunit.

[26517] Accordingly, in one embodiment, the process of the present invention for producing phenylalanine in a non-human organism, like a microorganism or a plant or a part thereof, comprises increasing or generating the activity of a gene product with the activity of a gene product conferring the activity of “Sec-independent protein translocase subunit”, especially from Thermus thermophilus or its functional equivalent or its homolog, e.g. the increase of
[26518] (a) a gene product of a gene comprising the nucleic acid molecule as shown in the respective line in column 5 of Table I, application no. 3, preferably the coding region thereof, or a homolog or a fragment thereof, and being depicted in the same respective line as said TTC0019, or a functional equivalent or a homolog thereof as shown in column 8 of Table I, application no. 3, preferably the coding region thereof, particularly a homolog or functional equivalent as shown in column 8 of Table I B, application no. 3, and being depicted in the same respective line as said TTC0019, and preferably the activity is increased non-targeted, or
[26519] (b) a polypeptide comprising a polypeptide, a consensus sequence or at least a polypeptide motif as shown in the respective line in column 5 of Table II or in column 8 of Table IV, application no. 3, respectively, and being depicted in the same respective line as said TTC0019, or a functional equivalent or a homolog thereof as depicted in column 8 of Table II, application no. 3, preferably a homolog or functional equivalent as depicted in column 8 of Table II B, application no. 3, and being depicted in the same respective line as said TTC0019, and preferably the activity is increased non-targeted.

[26520] Accordingly, in one embodiment, the molecule which activity is to be increased in the process of the invention is the gene product with an activity as a “Sec-independent protein translocase subunit”, preferably it is the molecule of section (a) or (b) of this paragraph.

[26521] In particular, it was observed that in plants, especially in Arabidopsis thaliana, increasing or generating the activity of a gene product non-targeted with the activity of a “Sec-independent protein translocase subunit”, preferably being encoded by a gene comprising the nucleic acid sequence SEQ ID NO. 12698, preferably the coding region thereof, conferred the production of or the increase in phenylalanine compared with the wild type control.

[26522] The nucleic acid sequence of TTC0019 from Thermus thermophilus, e.g. as shown in the respective line in column 5 of Table I, application no. 3, has been published in E. And the activity of the gene product thereof is the activity of Sec-independent protein translocase subunit.

[26523] Accordingly, in one embodiment, the process of the present invention for producing tyrosine in a non-human organism, like a microorganism or a plant or a part thereof, comprises increasing or generating the activity of a gene product with the activity of a gene product conferring the activity of “Sec-independent protein translocase subunit”, especially from Thermus thermophilus or its functional equivalent or its homolog, e.g. the increase of
[26524] (a) a gene product of a gene comprising the nucleic acid molecule as shown in the respective line in column 5 of Table I, application no. 3, preferably the coding region thereof, or a homolog or a fragment thereof, and being depicted in the same respective line as said TTC0019, or a functional equivalent or a homolog thereof as shown in column 8 of Table I, application no. 3, preferably the coding region thereof, particularly a homolog or functional equivalent as shown in column 8 of Table I B, application no. 3, and being depicted in the same respective line as said TTC0019, and preferably the activity is increased non-targeted, or
[26525] (b) a polypeptide comprising a polypeptide, a consensus sequence or at least a polypeptide motif as shown in the respective line in column 5 of Table II or in column 8 of Table IV, application no. 3, respectively, and being depicted in the same respective line as said TTC0019, or a functional equivalent or a homolog thereof as depicted in column 8 of Table II, application no. 3, preferably a homolog or functional equivalent as depicted in column 8 of Table II B, application no. 3, and being depicted in the same respective line as said TTC0019, and preferably the activity is increased non-targeted.

[26526] Accordingly, in one embodiment, the molecule which activity is to be increased in the process of the invention is the gene product with an activity as a “Sec-independent protein translocase subunit”, preferably it is the molecule of section (a) or (b) of this paragraph.

[26527] In particular, it was observed that in plants, especially in Arabidopsis thaliana, increasing or generating the activity of a gene product non-targeted with the activity of a “Sec-independent protein translocase subunit”, preferably being encoded by a gene comprising the nucleic acid sequence SEQ ID NO. 12698, preferably the coding region thereof, conferred the production of or the increase in tyrosine compared with the wild type control.

[26528] The nucleic acid sequence of TTC0019 from Thermus thermophilus, e.g. as shown in the respective line in column 5 of Table I, application no. 3, has been published in E. And the activity of the gene product thereof is the activity of Sec-independent protein translocase subunit.

[26529] Accordingly, in one embodiment, the process of the present invention for producing 5-oxoproline in a non-human organism, like a microorganism or a plant or a part thereof, comprises increasing or generating the activity of a gene product with the activity of a gene product conferring the activity of “Sec-independent protein translocase subunit”, especially from Thermus thermophilus or its functional equivalent or its homolog, e.g. the increase of
[26530] (a) a gene product of a gene comprising the nucleic acid molecule as shown in the respective line in column 5 of Table I, application no. 3, preferably the coding region thereof, or a homolog or a fragment thereof, and being depicted in the same respective line as said TTC0019, or a functional equivalent or a homolog thereof as shown in column 8 of Table I, application no. 3, preferably the coding region thereof, particularly a homolog or functional equivalent as shown in column 8 of Table I B, application no. 3, and being depicted in the same respective line as said TTC0019, and preferably the activity is increased non-targeted, or
[26531] (b) a polypeptide comprising a polypeptide, a consensus sequence or at least a polypeptide motif as shown in the respective line in column 5 of Table II or in column 8 of Table IV, application no. 3, respectively, and being depicted in the same respective line as said TTC0019, or a functional equivalent or a homolog thereof as depicted in column 8 of Table II, application no. 3, preferably a homolog or functional equivalent as depicted in column 8 of Table II B, application no. 3, and being depicted in the same respective line as said TTC0019, and preferably the activity is increased non-targeted.

[26532] Accordingly, in one embodiment, the molecule which activity is to be increased in the process of the invention is the gene product with an activity as a “Sec-independent protein translocase subunit”, preferably it is the molecule of section (a) or (b) of this paragraph.

[26533] In particular, it was observed that in plants, especially in Arabidopsis thaliana, increasing or generating the activity of a gene product non-targeted with the activity of a “Sec-independent protein translocase subunit”, preferably being encoded by a gene comprising the nucleic acid sequence SEQ ID NO. 12698, preferably the coding region thereof, conferred the production of or the increase in 5-oxoproline compared with the wild type control.

[26534] The nucleic acid sequence of TTC0239 from Thermus thermophilus, e.g. as shown in the respective line in column 5 of Table I, application no. 3, has been published in E. And the activity of the gene product thereof is the activity of transcriptional regulator.

[26535] Accordingly, in one embodiment, the process of the present invention for producing tyrosine in a non-human organism, like a microorganism or a plant or a part thereof, comprises increasing or generating the activity of a gene product with the activity of a gene product conferring the activity of “transcriptional regulator”, especially from Thermus thermophilus or its functional equivalent or its homolog, e.g. the increase of
[26536] (a) a gene product of a gene comprising the nucleic acid molecule as shown in the respective line in column 5 of Table I, application no. 3, preferably the coding region thereof, or a homolog or a fragment thereof, and being depicted in the same respective line as said TTC0239, or a functional equivalent or a homolog thereof as shown in column 8 of Table I, application no. 3, preferably the coding region thereof, particularly a homolog or functional equivalent as shown in column 8 of Table I B, application no. 3, and being depicted in the same respective line as said TTC0239, and preferably the activity is increased non-targeted, or
[26537] (b) a polypeptide comprising a polypeptide, a consensus sequence or at least a polypeptide motif as shown in the respective line in column 5 of Table II or in column 8 of Table IV, application no. 3, respectively, and being depicted in the same respective line as said TTC0239, or a functional equivalent or a homolog thereof as depicted in column 8 of Table II, application no. 3, preferably a homolog or functional equivalent as depicted in column 8 of Table II B, application no. 3, and being depicted in the same respective line as said TTC0239, and preferably the activity is increased non-targeted.

[26538] Accordingly, in one embodiment, the molecule which activity is to be increased in the process of the invention is the gene product with an activity as a “transcriptional regulator”, preferably it is the molecule of section (a) or (b) of this paragraph.

[26539] In particular, it was observed that in plants, especially in Arabidopsis thaliana, increasing or generating the activity of a gene product non-targeted with the activity of a “transcriptional regulator”, preferably being encoded by a gene comprising the nucleic acid sequence SEQ ID NO. 88526, preferably the coding region thereof, conferred the production of or the increase in tyrosine compared with the wild type control.

[26540] The nucleic acid sequence of TTC0337 from Thermus thermophilus, e.g. as shown in the respective line in column 5 of Table I, application no. 3, has been published in E. And the activity of the gene product thereof is the activity of amino acid ABC transporter permease protein.

[26541] Accordingly, in one embodiment, the process of the present invention for producing asparagine in a non-human organism, like a microorganism or a plant or a part thereof, comprises increasing or generating the activity of a gene product with the activity of a gene product conferring the activity of “amino acid ABC transporter permease protein”, especially from Thermus thermophilus or its functional equivalent or its homolog, e.g. the increase of
[26542] (a) a gene product of a gene comprising the nucleic acid molecule as shown in the respective line in column 5 of Table I, application no. 3, preferably the coding region thereof, or a homolog or a fragment thereof, and being depicted in the same respective line as said TTC0337, or a functional equivalent or a homolog thereof as shown in column 8 of Table I, application no. 3, preferably the coding region thereof, particularly a homolog or functional equivalent as shown in column 8 of Table I B, application no. 3, and being depicted in the same respective line as said TTC0337, and preferably the activity is increased non-targeted, or
[26543] (b) a polypeptide comprising a polypeptide, a consensus sequence or at least a polypeptide motif as shown in the respective line in column 5 of Table II or in column 8 of Table IV, application no. 3, respectively, and being depicted in the same respective line as said TTC0337, or a functional equivalent or a homolog thereof as depicted in column 8 of Table II, application no. 3, preferably a homolog or functional equivalent as depicted in column 8 of Table II B, application no. 3, and being depicted in the same respective line as said TTC0337, and preferably the activity is increased non-targeted.

[26544] Accordingly, in one embodiment, the molecule which activity is to be increased in the process of the invention is the gene product with an activity as a “amino acid ABC transporter permease protein”, preferably it is the molecule of section (a) or (b) of this paragraph.

[26545] In particular, it was observed that in plants, especially in Arabidopsis thaliana, increasing or generating the activity of a gene product non-targeted with the activity of a “amino acid ABC transporter permease protein”, preferably being encoded by a gene comprising the nucleic acid sequence SEQ ID NO. 61070, preferably the coding region thereof, conferred the production of or the increase in asparagine compared with the wild type control.

[26546] The nucleic acid sequence of TTC0768 from Thermus thermophilus, e.g. as shown in the respective line in column 5 of Table I, application no. 3, has been published in E. And the activity of the gene product thereof is the activity of TTC0768-protein.

[26547] Accordingly, in one embodiment, the process of the present invention for producing tyrosine in a non-human organism, like a microorganism or a plant or a part thereof, comprises increasing or generating the activity of a gene product with the activity of a gene product conferring the activity of “TTC0768-protein”, especially from Thermus thermophilus or its functional equivalent or its homolog, e.g. the increase of
[26548] (a) a gene product of a gene comprising the nucleic acid molecule as shown in the respective line in column 5 of Table I, application no. 3, preferably the coding region thereof, or a homolog or a fragment thereof, and being depicted in the same respective line as said TTC0768, or a functional equivalent or a homolog thereof as shown in column 8 of Table I, application no. 3, preferably the coding region thereof, particularly a homolog or functional equivalent as shown in column 8 of Table I B, application no. 3, and being depicted in the same respective line as said TTC0768, and preferably the activity is increased non-targeted, or
[26549] (b) a polypeptide comprising a polypeptide, a consensus sequence or at least a polypeptide motif as shown in the respective line in column 5 of Table II or in column 8 of Table IV, application no. 3, respectively, and being depicted in the same respective line as said TTC0768, or a functional equivalent or a homolog thereof as depicted in column 8 of Table II, application no. 3, preferably a homolog or functional equivalent as depicted in column 8 of Table II B, application no. 3, and being depicted in the same respective line as said TTC0768, and preferably the activity is increased non-targeted.

[26550] Accordingly, in one embodiment, the molecule which activity is to be increased in the process of the invention is the gene product with an activity as a “TTC0768-protein”, preferably it is the molecule of section (a) or (b) of this paragraph.

[26551] In particular, it was observed that in plants, especially in Arabidopsis thaliana, increasing or generating the activity of a gene product non-targeted with the activity of a “TTC0768-protein”, preferably being encoded by a gene comprising the nucleic acid sequence SEQ ID NO. 61532, preferably the coding region thereof, conferred the production of or the increase in tyrosine compared with the wild type control.

[26552] The nucleic acid sequence of TTC0881 from Thermus thermophilus, e.g. as shown in the respective line in column 5 of Table I, application no. 3, has been published in E. And the activity of the gene product thereof is the activity of TTC0881-protein.

[26553] Accordingly, in one embodiment, the process of the present invention for producing alanine in a non-human organism, like a microorganism or a plant or a part thereof, comprises increasing or generating the activity of a gene product with the activity of a gene product conferring the activity of “TTC0881-protein”, especially from Thermus thermophilus or its functional equivalent or its homolog, e.g. the increase of
[26554] (a) a gene product of a gene comprising the nucleic acid molecule as shown in the respective line in column 5 of Table I, application no. 3, preferably the coding region thereof, or a homolog or a fragment thereof, and being depicted in the same respective line as said TTC0881, or a functional equivalent or a homolog thereof as shown in column 8 of Table I, application no. 3, preferably the coding region thereof, particularly a homolog or functional equivalent as shown in column 8 of Table I B, application no. 3, and being depicted in the same respective line as said TTC0881, and preferably the activity is increased non-targeted, or
[26555] (b) a polypeptide comprising a polypeptide, a consensus sequence or at least a polypeptide motif as shown in the respective line in column 5 of Table II or in column 8 of Table IV, application no. 3, respectively, and being depicted in the same respective line as said TTC0881, or a functional equivalent or a homolog thereof as depicted in column 8 of Table II, application no. 3, preferably a homolog or functional equivalent as depicted in column 8 of Table II B, application no. 3, and being depicted in the same respective line as said TTC0881, and preferably the activity is increased non-targeted.

[26556] Accordingly, in one embodiment, the molecule which activity is to be increased in the process of the invention is the gene product with an activity as a “TTC0881-protein”, preferably it is the molecule of section (a) or (b) of this paragraph.

[26557] In particular, it was observed that in plants, especially in Arabidopsis thaliana, increasing or generating the activity of a gene product non-targeted with the activity of a “TTC0881-protein”, preferably being encoded by a gene comprising the nucleic acid sequence SEQ ID NO. 88875, preferably the coding region thereof, conferred the production of or the increase in alanine compared with the wild type control.

[26558] The nucleic acid sequence of TTC0881 from Thermus thermophilus, e.g. as shown in the respective line in column 5 of Table I, application no. 3, has been published in E. And the activity of the gene product thereof is the activity of TTC0881-protein.

[26559] Accordingly, in one embodiment, the process of the present invention for producing serine in a non-human organism, like a microorganism or a plant or a part thereof, comprises increasing or generating the activity of a gene product with the activity of a gene product conferring the activity of “TTC0881-protein”, especially from Thermus thermophilus or its functional equivalent or its homolog, e.g. the increase of
[26560] (a) a gene product of a gene comprising the nucleic acid molecule as shown in the respective line in column 5 of Table I, application no. 3, preferably the coding region thereof, or a homolog or a fragment thereof, and being depicted in the same respective line as said TTC0881, or a functional equivalent or a homolog thereof as shown in column 8 of Table I, application no. 3, preferably the coding region thereof, particularly a homolog or functional equivalent as shown in column 8 of Table I B, application no. 3, and being depicted in the same respective line as said TTC0881, and preferably the activity is increased non-targeted, or
[26561] (b) a polypeptide comprising a polypeptide, a consensus sequence or at least a polypeptide motif as shown in the respective line in column 5 of Table II or in column 8 of Table IV, application no. 3, respectively, and being depicted in the same respective line as said TTC0881, or a functional equivalent or a homolog thereof as depicted in column 8 of Table II, application no. 3, preferably a homolog or functional equivalent as depicted in column 8 of Table II B, application no. 3, and being depicted in the same respective line as said TTC0881, and preferably the activity is increased non-targeted.

[26562] Accordingly, in one embodiment, the molecule which activity is to be increased in the process of the invention is the gene product with an activity as a “TTC0881-protein”, preferably it is the molecule of section (a) or (b) of this paragraph.

[26563] In particular, it was observed that in plants, especially in Arabidopsis thaliana, increasing or generating the activity of a gene product non-targeted with the activity of a “TTC0881-protein”, preferably being encoded by a gene comprising the nucleic acid sequence SEQ ID NO. 88875, preferably the coding region thereof, conferred the production of or the increase in serine compared with the wild type control.

[26564] The nucleic acid sequence of TTC0917 from Thermus thermophilus, e.g. as shown in the respective line in column 5 of Table I, application no. 3, has been published in E. And the activity of the gene product thereof is the activity of metal-dependent hydrolase.

[26565] Accordingly, in one embodiment, the process of the present invention for producing alanine in a non-human organism, like a microorganism or a plant or a part thereof, comprises increasing or generating the activity of a gene product with the activity of a gene product conferring the activity of “metal-dependent hydrolase”, especially from Thermus thermophilus or its functional equivalent or its homolog, e.g. the increase of
[26566] (a) a gene product of a gene comprising the nucleic acid molecule as shown in the respective line in column 5 of Table I, application no. 3, preferably the coding region thereof, or a homolog or a fragment thereof, and being depicted in the same respective line as said TTC0917, or a functional equivalent or a homolog thereof as shown in column 8 of Table I, application no. 3, preferably the coding region thereof, particularly a homolog or functional equivalent as shown in column 8 of Table I B, application no. 3, and being depicted in the same respective line as said TTC0917, and preferably the activity is increased non-targeted, or
[26567] (b) a polypeptide comprising a polypeptide, a consensus sequence or at least a polypeptide motif as shown in the respective line in column 5 of Table II or in column 8 of Table IV, application no. 3, respectively, and being depicted in the same respective line as said TTC0917, or a functional equivalent or a homolog thereof as depicted in column 8 of Table II, application no. 3, preferably a homolog or functional equivalent as depicted in column 8 of Table II B, application no. 3, and being depicted in the same respective line as said TTC0917, and preferably the activity is increased non-targeted.

[26568] Accordingly, in one embodiment, the molecule which activity is to be increased in the process of the invention is the gene product with an activity as a “metal-dependent hydrolase”, preferably it is the molecule of section (a) or (b) of this paragraph.

[26569] In particular, it was observed that in plants, especially in Arabidopsis thaliana, increasing or generating the activity of a gene product non-targeted with the activity of a “metal-dependent hydrolase”, preferably being encoded by a gene comprising the nucleic acid sequence SEQ ID NO. 61553, preferably the coding region thereof, conferred the production of or the increase in alanine compared with the wild type control.

[26570] The nucleic acid sequence of TTC0917 from Thermus thermophilus, e.g. as shown in the respective line in column 5 of Table I, application no. 3, has been published in E. And the activity of the gene product thereof is the activity of metal-dependent hydrolase.

[26571] Accordingly, in one embodiment, the process of the present invention for producing serine in a non-human organism, like a microorganism or a plant or a part thereof, comprises increasing or generating the activity of a gene product with the activity of a gene product conferring the activity of “metal-dependent hydrolase”, especially from Thermus thermophilus or its functional equivalent or its homolog, e.g. the increase of
[26572] (a) a gene product of a gene comprising the nucleic acid molecule as shown in the respective line in column 5 of Table I, application no. 3, preferably the coding region thereof, or a homolog or a fragment thereof, and being depicted in the same respective line as said TTC0917, or a functional equivalent or a homolog thereof as shown in column 8 of Table I, application no. 3, preferably the coding region thereof, particularly a homolog or functional equivalent as shown in column 8 of Table I B, application no. 3, and being depicted in the same respective line as said TTC0917, and preferably the activity is increased non-targeted, or
[26573] (b) a polypeptide comprising a polypeptide, a consensus sequence or at least a polypeptide motif as shown in the respective line in column 5 of Table II or in column 8 of Table IV, application no. 3, respectively, and being depicted in the same respective line as said TTC0917, or a functional equivalent or a homolog thereof as depicted in column 8 of Table II, application no. 3, preferably a homolog or functional equivalent as depicted in column 8 of Table II B, application no. 3, and being depicted in the same respective line as said TTC0917, and preferably the activity is increased non-targeted.

[26574] Accordingly, in one embodiment, the molecule which activity is to be increased in the process of the invention is the gene product with an activity as a “metal-dependent hydrolase”, preferably it is the molecule of section (a) or (b) of this paragraph.

[26575] In particular, it was observed that in plants, especially in Arabidopsis thaliana, increasing or generating the activity of a gene product non-targeted with the activity of a “metal-dependent hydrolase”, preferably being encoded by a gene comprising the nucleic acid sequence SEQ ID NO. 61553, preferably the coding region thereof, conferred the production of or the increase in serine compared with the wild type control.

[26576] The nucleic acid sequence of TTC1193 from Thermus thermophilus, e.g. as shown in the respective line in column 5 of Table I, application no. 3, has been published in E. And the activity of the gene product thereof is the activity of multiple antibiotic resistance protein.

[26577] Accordingly, in one embodiment, the process of the present invention for producing phenylalanine in a non-human organism, like a microorganism or a plant or a part thereof, comprises increasing or generating the activity of a gene product with the activity of a gene product conferring the activity of “multiple antibiotic resistance protein”, especially from Thermus thermophilus or its functional equivalent or its homolog, e.g. the increase of
[26578] (a) a gene product of a gene comprising the nucleic acid molecule as shown in the respective line in column 5 of Table I, application no. 3, preferably the coding region thereof, or a homolog or a fragment thereof, and being depicted in the same respective line as said TTC1193, or a functional equivalent or a homolog thereof as shown in column 8 of Table I, application no. 3, preferably the coding region thereof, particularly a homolog or functional equivalent as shown in column 8 of Table I B, application no. 3, and being depicted in the same respective line as said TTC1193, and preferably the activity is increased non-targeted, or
[26579] (b) a polypeptide comprising a polypeptide, a consensus sequence or at least a polypeptide motif as shown in the respective line in column 5 of Table II or in column 8 of Table IV, application no. 3, respectively, and being depicted in the same respective line as said TTC1193, or a functional equivalent or a homolog thereof as depicted in column 8 of Table II, application no. 3, preferably a homolog or functional equivalent as depicted in column 8 of Table II B, application no. 3, and being depicted in the same respective line as said TTC1193, and preferably the activity is increased non-targeted.

[26580] Accordingly, in one embodiment, the molecule which activity is to be increased in the process of the invention is the gene product with an activity as a “multiple antibiotic resistance protein”, preferably it is the molecule of section (a) or (b) of this paragraph.

[26581] In particular, it was observed that in plants, especially in Arabidopsis thaliana, increasing or generating the activity of a gene product non-targeted with the activity of a “multiple antibiotic resistance protein”, preferably being encoded by a gene comprising the nucleic acid sequence SEQ ID NO. 61723, preferably the coding region thereof, conferred the production of or the increase in phenylalanine compared with the wild type control.

[26582] The nucleic acid sequence of TTC1193 from Thermus thermophilus, e.g. as shown in the respective line in column 5 of Table I, application no. 3, has been published in E. And the activity of the gene product thereof is the activity of multiple antibiotic resistance protein.

[26583] Accordingly, in one embodiment, the process of the present invention for producing tyrosine in a non-human organism, like a microorganism or a plant or a part thereof, comprises increasing or generating the activity of a gene product with the activity of a gene product conferring the activity of “multiple antibiotic resistance protein”, especially from Thermus thermophilus or its functional equivalent or its homolog, e.g. the increase of
[26584] (a) a gene product of a gene comprising the nucleic acid molecule as shown in the respective line in column 5 of Table I, application no. 3, preferably the coding region thereof, or a homolog or a fragment thereof, and being depicted in the same respective line as said TTC1193, or a functional equivalent or a homolog thereof as shown in column 8 of Table I, application no. 3, preferably the coding region thereof, particularly a homolog or functional equivalent as shown in column 8 of Table I B, application no. 3, and being depicted in the same respective line as said TTC1193, and preferably the activity is increased non-targeted, or
[26585] (b) a polypeptide comprising a polypeptide, a consensus sequence or at least a polypeptide motif as shown in the respective line in column 5 of Table II or in column 8 of Table IV, application no. 3, respectively, and being depicted in the same respective line as said TTC1193, or a functional equivalent or a homolog thereof as depicted in column 8 of Table II, application no. 3, preferably a homolog or functional equivalent as depicted in column 8 of Table II B, application no. 3, and being depicted in the same respective line as said TTC1193, and preferably the activity is increased non-targeted.

[26586] Accordingly, in one embodiment, the molecule which activity is to be increased in the process of the invention is the gene product with an activity as a “multiple antibiotic resistance protein”, preferably it is the molecule of section (a) or (b) of this paragraph.

[26587] In particular, it was observed that in plants, especially in Arabidopsis thaliana, increasing or generating the activity of a gene product non-targeted with the activity of a “multiple antibiotic resistance protein”, preferably being encoded by a gene comprising the nucleic acid sequence SEQ ID NO. 61723, preferably the coding region thereof, conferred the production of or the increase in tyrosine compared with the wild type control.

[26588] The nucleic acid sequence of TTC1386 from Thermus thermophilus, e.g. as shown in the respective line in column 5 of Table I, application no. 3, has been published in E. And the activity of the gene product thereof is the activity of TTC1386-protein.

[26589] Accordingly, in one embodiment, the process of the present invention for producing alanine in a non-human organism, like a microorganism or a plant or a part thereof, comprises increasing or generating the activity of a gene product with the activity of a gene product conferring the activity of “TTC1386-protein”, especially from Thermus thermophilus or its functional equivalent or its homolog, e.g. the increase of
[26590] (a) a gene product of a gene comprising the nucleic acid molecule as shown in the respective line in column 5 of Table I, application no. 3, preferably the coding region thereof, or a homolog or a fragment thereof, and being depicted in the same respective line as said TTC1386, or a functional equivalent or a homolog thereof as shown in column 8 of Table I, application no. 3, preferably the coding region thereof, particularly a homolog or functional equivalent as shown in column 8 of Table I B, application no. 3, and being depicted in the same respective line as said TTC1386, and preferably the activity is increased non-targeted, or
[26591] (b) a polypeptide comprising a polypeptide, a consensus sequence or at least a polypeptide motif as shown in the respective line in column 5 of Table II or in column 8 of Table IV, application no. 3, respectively, and being depicted in the same respective line as said TTC1386, or a functional equivalent or a homolog thereof as depicted in column 8 of Table II, application no. 3, preferably a homolog or functional equivalent as depicted in column 8 of Table II B, application no. 3, and being depicted in the same respective line as said TTC1386, and preferably the activity is increased non-targeted.

[26592] Accordingly, in one embodiment, the molecule which activity is to be increased in the process of the invention is the gene product with an activity as a “TTC1386-protein”, preferably it is the molecule of section (a) or (b) of this paragraph.

[26593] In particular, it was observed that in plants, especially in Arabidopsis thaliana, increasing or generating the activity of a gene product non-targeted with the activity of a “TTC1386-protein”, preferably being encoded by a gene comprising the nucleic acid sequence SEQ ID NO. 62079, preferably the coding region thereof, conferred the production of or the increase in alanine compared with the wild type control.

[26594] The nucleic acid sequence of TTC1386 from Thermus thermophilus, e.g. as shown in the respective line in column 5 of Table I, application no. 3, has been published in E. And the activity of the gene product thereof is the activity of TTC1386-protein.

[26595] Accordingly, in one embodiment, the process of the present invention for producing glycine in a non-human organism, like a microorganism or a plant or a part thereof, comprises increasing or generating the activity of a gene product with the activity of a gene product conferring the activity of “TTC1386-protein”, especially from Thermus thermophilus or its functional equivalent or its homolog, e.g. the increase of
[26596] (a) a gene product of a gene comprising the nucleic acid molecule as shown in the respective line in column 5 of Table I, application no. 3, preferably the coding region thereof, or a homolog or a fragment thereof, and being depicted in the same respective line as said TTC1386, or a functional equivalent or a homolog thereof as shown in column 8 of Table I, application no. 3, preferably the coding region thereof, particularly a homolog or functional equivalent as shown in column 8 of Table I B, application no. 3, and being depicted in the same respective line as said TTC1386, and preferably the activity is increased non-targeted, or
[26597] (b) a polypeptide comprising a polypeptide, a consensus sequence or at least a polypeptide motif as shown in the respective line in column 5 of Table II or in column 8 of Table IV, application no. 3, respectively, and being depicted in the same respective line as said TTC1386, or a functional equivalent or a homolog thereof as depicted in column 8 of Table II, application no. 3, preferably a homolog or functional equivalent as depicted in column 8 of Table II B, application no. 3, and being depicted in the same respective line as said TTC1386, and preferably the activity is increased non-targeted.

[26598] Accordingly, in one embodiment, the molecule which activity is to be increased in the process of the invention is the gene product with an activity as a “TTC1386-protein”, preferably it is the molecule of section (a) or (b) of this paragraph.

[26599] In particular, it was observed that in plants, especially in Arabidopsis thaliana, increasing or generating the activity of a gene product non-targeted with the activity of a “TTC1386-protein”, preferably being encoded by a gene comprising the nucleic acid sequence SEQ ID NO. 62079, preferably the coding region thereof, conferred the production of or the increase in glycine compared with the wild type control.

[26600] The nucleic acid sequence of TTC1386 from Thermus thermophilus, e.g. as shown in the respective line in column 5 of Table I, application no. 3, has been published in E. And the activity of the gene product thereof is the activity of TTC1386-protein.

[26601] Accordingly, in one embodiment, the process of the present invention for producing phenylalanine in a non-human organism, like a microorganism or a plant or a part thereof, comprises increasing or generating the activity of a gene product with the activity of a gene product conferring the activity of “TTC1386-protein”, especially from Thermus thermophilus or its functional equivalent or its homolog, e.g. the increase of
[26602] (a) a gene product of a gene comprising the nucleic acid molecule as shown in the respective line in column 5 of Table I, application no. 3, preferably the coding region thereof, or a homolog or a fragment thereof, and being depicted in the same respective line as said TTC1386, or a functional equivalent or a homolog thereof as shown in column 8 of Table I, application no. 3, preferably the coding region thereof, particularly a homolog or functional equivalent as shown in column 8 of Table I B, application no. 3, and being depicted in the same respective line as said TTC1386, and preferably the activity is increased non-targeted, or
[26603] (b) a polypeptide comprising a polypeptide, a consensus sequence or at least a polypeptide motif as shown in the respective line in column 5 of Table II or in column 8 of Table IV, application no. 3, respectively, and being depicted in the same respective line as said TTC1386, or a functional equivalent or a homolog thereof as depicted in column 8 of Table II, application no. 3, preferably a homolog or functional equivalent as depicted in column 8 of Table II B, application no. 3, and being depicted in the same respective line as said TTC1386, and preferably the activity is increased non-targeted.

[26604] Accordingly, in one embodiment, the molecule which activity is to be increased in the process of the invention is the gene product with an activity as a “TTC1386-protein”, preferably it is the molecule of section (a) or (b) of this paragraph.

[26605] In particular, it was observed that in plants, especially in Arabidopsis thaliana, increasing or generating the activity of a gene product non-targeted with the activity of a “TTC1386-protein”, preferably being encoded by a gene comprising the nucleic acid sequence SEQ ID NO. 62079, preferably the coding region thereof, conferred the production of or the increase in phenylalanine compared with the wild type control.

[26606] The nucleic acid sequence of TTC1386 from Thermus thermophilus, e.g. as shown in the respective line in column 5 of Table I, application no. 3, has been published in E. And the activity of the gene product thereof is the activity of TTC1386-protein.

[26607] Accordingly, in one embodiment, the process of the present invention for producing serine in a non-human organism, like a microorganism or a plant or a part thereof, comprises increasing or generating the activity of a gene product with the activity of a gene product conferring the activity of “TTC1386-protein”, especially from Thermus thermophilus or its functional equivalent or its homolog, e.g. the increase of
[26608] (a) a gene product of a gene comprising the nucleic acid molecule as shown in the respective line in column 5 of Table I, application no. 3, preferably the coding region thereof, or a homolog or a fragment thereof, and being depicted in the same respective line as said TTC1386, or a functional equivalent or a homolog thereof as shown in column 8 of Table I, application no. 3, preferably the coding region thereof, particularly a homolog or functional equivalent as shown in column 8 of Table I B, application no. 3, and being depicted in the same respective line as said TTC1386, and preferably the activity is increased non-targeted, or
[26609] (b) a polypeptide comprising a polypeptide, a consensus sequence or at least a polypeptide motif as shown in the respective line in column 5 of Table II or in column 8 of Table IV, application no. 3, respectively, and being depicted in the same respective line as said TTC1386, or a functional equivalent or a homolog thereof as depicted in column 8 of Table II, application no. 3, preferably a homolog or functional equivalent as depicted in column 8 of Table II B, application no. 3, and being depicted in the same respective line as said TTC1386, and preferably the activity is increased non-targeted.

[26610] Accordingly, in one embodiment, the molecule which activity is to be increased in the process of the invention is the gene product with an activity as a “TTC1386-protein”, preferably it is the molecule of section (a) or (b) of this paragraph.

[26611] In particular, it was observed that in plants, especially in Arabidopsis thaliana, increasing or generating the activity of a gene product non-targeted with the activity of a “TTC1386-protein”, preferably being encoded by a gene comprising the nucleic acid sequence SEQ ID NO. 62079, preferably the coding region thereof, conferred the production of or the increase in serine compared with the wild type control.

[26612] The nucleic acid sequence of TTC1386 from Thermus thermophilus, e.g. as shown in the respective line in column 5 of Table I, application no. 3, has been published in E. And the activity of the gene product thereof is the activity of TTC1386-protein.

[26613] Accordingly, in one embodiment, the process of the present invention for producing tyrosine in a non-human organism, like a microorganism or a plant or a part thereof, comprises increasing or generating the activity of a gene product with the activity of a gene product conferring the activity of “TTC1386-protein”, especially from Thermus thermophilus or its functional equivalent or its homolog, e.g. the increase of
[26614] (a) a gene product of a gene comprising the nucleic acid molecule as shown in the respective line in column 5 of Table I, application no. 3, preferably the coding region thereof, or a homolog or a fragment thereof, and being depicted in the same respective line as said TTC1386, or a functional equivalent or a homolog thereof as shown in column 8 of Table I, application no. 3, preferably the coding region thereof, particularly a homolog or functional equivalent as shown in column 8 of Table I B, application no. 3, and being depicted in the same respective line as said TTC1386, and preferably the activity is increased non-targeted, or
[26615] (b) a polypeptide comprising a polypeptide, a consensus sequence or at least a polypeptide motif as shown in the respective line in column 5 of Table II or in column 8 of Table IV, application no. 3, respectively, and being depicted in the same respective line as said TTC1386, or a functional equivalent or a homolog thereof as depicted in column 8 of Table II, application no. 3, preferably a homolog or functional equivalent as depicted in column 8 of Table II B, application no. 3, and being depicted in the same respective line as said TTC1386, and preferably the activity is increased non-targeted.

[26616] Accordingly, in one embodiment, the molecule which activity is to be increased in the process of the invention is the gene product with an activity as a “TTC1386-protein”, preferably it is the molecule of section (a) or (b) of this paragraph.

[26617] In particular, it was observed that in plants, especially in Arabidopsis thaliana, increasing or generating the activity of a gene product non-targeted with the activity of a “TTC1386-protein”, preferably being encoded by a gene comprising the nucleic acid sequence SEQ ID NO. 62079, preferably the coding region thereof, conferred the production of or the increase in tyrosine compared with the wild type control.

[26618] The nucleic acid sequence of TTC1550 from Thermus thermophilus, e.g. as shown in the respective line in column 5 of Table I, application no. 3, has been published in E. And the activity of the gene product thereof is the activity of homocitrate synthase.

[26619] Accordingly, in one embodiment, the process of the present invention for producing alanine in a non-human organism, like a microorganism or a plant or a part thereof, comprises increasing or generating the activity of a gene product with the activity of a gene product conferring the activity of “homocitrate synthase”, especially from Thermus thermophilus or its functional equivalent or its homolog, e.g. the increase of
[26620] (a) a gene product of a gene comprising the nucleic acid molecule as shown in the respective line in column 5 of Table I, application no. 3, preferably the coding region thereof, or a homolog or a fragment thereof, and being depicted in the same respective line as said TTC1550, or a functional equivalent or a homolog thereof as shown in column 8 of Table

[26621] I, application no. 3, preferably the coding region thereof, particularly a homolog or functional equivalent as shown in column 8 of Table I B, application no. 3, and being depicted in the same respective line as said TTC1550, and preferably the activity is increased non-targeted, or
[26622] (b) a polypeptide comprising a polypeptide, a consensus sequence or at least a polypeptide motif as shown in the respective line in column 5 of Table II or in column 8 of Table IV, application no. 3, respectively, and being depicted in the same respective line as said TTC1550, or a functional equivalent or a homolog thereof as depicted in column 8 of Table II, application no. 3, preferably a homolog or functional equivalent as depicted in column 8 of Table II B, application no. 3, and being depicted in the same respective line as said TTC1550, and preferably the activity is increased non-targeted.

[26623] Accordingly, in one embodiment, the molecule which activity is to be increased in the process of the invention is the gene product with an activity as a “homocitrate synthase”, preferably it is the molecule of section (a) or (b) of this paragraph.

[26624] In particular, it was observed that in plants, especially in Arabidopsis thaliana, increasing or generating the activity of a gene product non-targeted with the activity of a “homocitrate synthase”, preferably being encoded by a gene comprising the nucleic acid sequence SEQ ID NO. 12974, preferably the coding region thereof, conferred the production of or the increase in alanine compared with the wild type control.

[26625] The nucleic acid sequence of TTC1550 from Thermus thermophilus, e.g. as shown in the respective line in column 5 of Table I, application no. 3, has been published in E. And the activity of the gene product thereof is the activity of homocitrate synthase.

[26626] Accordingly, in one embodiment, the process of the present invention for producing phenylalanine in a non-human organism, like a microorganism or a plant or a part thereof, comprises increasing or generating the activity of a gene product with the activity of a gene product conferring the activity of “homocitrate synthase”, especially from Thermus thermophilus or its functional equivalent or its homolog, e.g. the increase of
[26627] (a) a gene product of a gene comprising the nucleic acid molecule as shown in the respective line in column 5 of Table I, application no. 3, preferably the coding region thereof, or a homolog or a fragment thereof, and being depicted in the same respective line as said TTC1550, or a functional equivalent or a homolog thereof as shown in column 8 of Table I, application no. 3, preferably the coding region thereof, particularly a homolog or functional equivalent as shown in column 8 of Table I B, application no. 3, and being depicted in the same respective line as said TTC1550, and preferably the activity is increased non-targeted, or
[26628] (b) a polypeptide comprising a polypeptide, a consensus sequence or at least a polypeptide motif as shown in the respective line in column 5 of Table II or in column 8 of Table IV, application no. 3, respectively, and being depicted in the same respective line as said TTC1550, or a functional equivalent or a homolog thereof as depicted in column 8 of Table II, application no. 3, preferably a homolog or functional equivalent as depicted in column 8 of Table II B, application no. 3, and being depicted in the same respective line as said TTC1550, and preferably the activity is increased non-targeted.

[26629] Accordingly, in one embodiment, the molecule which activity is to be increased in the process of the invention is the gene product with an activity as a “homocitrate synthase”, preferably it is the molecule of section (a) or (b) of this paragraph.

[26630] In particular, it was observed that in plants, especially in Arabidopsis thaliana, increasing or generating the activity of a gene product non-targeted with the activity of a “homocitrate synthase”, preferably being encoded by a gene comprising the nucleic acid sequence SEQ ID NO. 12974, preferably the coding region thereof, conferred the production of or the increase in phenylalanine compared with the wild type control.

[26631] The nucleic acid sequence of TTC1550 from Thermus thermophilus, e.g. as shown in the respective line in column 5 of Table I, application no. 3, has been published in E. And the activity of the gene product thereof is the activity of homocitrate synthase.

[26632] Accordingly, in one embodiment, the process of the present invention for producing serine in a non-human organism, like a microorganism or a plant or a part thereof, comprises increasing or generating the activity of a gene product with the activity of a gene product conferring the activity of “homocitrate synthase”, especially from Thermus thermophilus or its functional equivalent or its homolog, e.g. the increase of
[26633] (a) a gene product of a gene comprising the nucleic acid molecule as shown in the respective line in column 5 of Table I, application no. 3, preferably the coding region thereof, or a homolog or a fragment thereof, and being depicted in the same respective line as said TTC1550, or a functional equivalent or a homolog thereof as shown in column 8 of Table I, application no. 3, preferably the coding region thereof, particularly a homolog or functional equivalent as shown in column 8 of Table I B, application no. 3, and being depicted in the same respective line as said TTC1550, and preferably the activity is increased non-targeted, or
[26634] (b) a polypeptide comprising a polypeptide, a consensus sequence or at least a polypeptide motif as shown in the respective line in column 5 of Table II or in column 8 of Table IV, application no. 3, respectively, and being depicted in the same respective line as said TTC1550, or a functional equivalent or a homolog thereof as depicted in column 8 of Table II, application no. 3, preferably a homolog or functional equivalent as depicted in column 8 of Table II B, application no. 3, and being depicted in the same respective line as said TTC1550, and preferably the activity is increased non-targeted.

[26635] Accordingly, in one embodiment, the molecule which activity is to be increased in the process of the invention is the gene product with an activity as a “homocitrate synthase”, preferably it is the molecule of section (a) or (b) of this paragraph.

[26636] In particular, it was observed that in plants, especially in Arabidopsis thaliana, increasing or generating the activity of a gene product non-targeted with the activity of a “homocitrate synthase”, preferably being encoded by a gene comprising the nucleic acid sequence SEQ ID NO. 12974, preferably the coding region thereof, conferred the production of or the increase in serine compared with the wild type control.

[26637] The nucleic acid sequence of TTC1550 from Thermus thermophilus, e.g. as shown in the respective line in column 5 of Table I, application no. 3, has been published in E. And the activity of the gene product thereof is the activity of homocitrate synthase.

[26638] Accordingly, in one embodiment, the process of the present invention for producing tyrosine in a non-human organism, like a microorganism or a plant or a part thereof, comprises increasing or generating the activity of a gene product with the activity of a gene product conferring the activity of “homocitrate synthase”, especially from Thermus thermophilus or its functional equivalent or its homolog, e.g. the increase of
[26639] (a) a gene product of a gene comprising the nucleic acid molecule as shown in the respective line in column 5 of Table I, application no. 3, preferably the coding region thereof, or a homolog or a fragment thereof, and being depicted in the same respective line as said TTC1550, or a functional equivalent or a homolog thereof as shown in column 8 of Table I, application no. 3, preferably the coding region thereof, particularly a homolog or functional equivalent as shown in column 8 of Table I B, application no. 3, and being depicted in the same respective line as said TTC1550, and preferably the activity is increased non-targeted, or
[26640] (b) a polypeptide comprising a polypeptide, a consensus sequence or at least a polypeptide motif as shown in the respective line in column 5 of Table II or in column 8 of Table IV, application no. 3, respectively, and being depicted in the same respective line as said TTC1550, or a functional equivalent or a homolog thereof as depicted in column 8 of Table II, application no. 3, preferably a homolog or functional equivalent as depicted in column 8 of Table II B, application no. 3, and being depicted in the same respective line as said TTC1550, and preferably the activity is increased non-targeted.

[26641] Accordingly, in one embodiment, the molecule which activity is to be increased in the process of the invention is the gene product with an activity as a “homocitrate synthase”, preferably it is the molecule of section (a) or (b) of this paragraph.

[26642] In particular, it was observed that in plants, especially in Arabidopsis thaliana, increasing or generating the activity of a gene product non-targeted with the activity of a “homocitrate synthase”, preferably being encoded by a gene comprising the nucleic acid sequence SEQ ID NO. 12974, preferably the coding region thereof, conferred the production of or the increase in tyrosine compared with the wild type control.

[26643] The nucleic acid sequence of TTC1550 from Thermus thermophilus, e.g. as shown in the respective line in column 5 of Table I, application no. 3, has been published in E. And the activity of the gene product thereof is the activity of homocitrate synthase.

[26644] Accordingly, in one embodiment, the process of the present invention for producing 5-oxoproline in a non-human organism, like a microorganism or a plant or a part thereof, comprises increasing or generating the activity of a gene product with the activity of a gene product conferring the activity of “homocitrate synthase”, especially from Thermus thermophilus or its functional equivalent or its homolog, e.g. the increase of
[26645] (a) a gene product of a gene comprising the nucleic acid molecule as shown in the respective line in column 5 of Table I, application no. 3, preferably the coding region thereof, or a homolog or a fragment thereof, and being depicted in the same respective line as said TTC1550, or a functional equivalent or a homolog thereof as shown in column 8 of Table I, application no. 3, preferably the coding region thereof, particularly a homolog or functional equivalent as shown in column 8 of Table I B, application no. 3, and being depicted in the same respective line as said TTC1550, and preferably the activity is increased non-targeted, or
[26646] (b) a polypeptide comprising a polypeptide, a consensus sequence or at least a polypeptide motif as shown in the respective line in column 5 of Table II or in column 8 of Table IV, application no. 3, respectively, and being depicted in the same respective line as said TTC1550, or a functional equivalent or a homolog thereof as depicted in column 8 of Table II, application no. 3, preferably a homolog or functional equivalent as depicted in column 8 of Table II B, application no. 3, and being depicted in the same respective line as said TTC1550, and preferably the activity is increased non-targeted.

[26647] Accordingly, in one embodiment, the molecule which activity is to be increased in the process of the invention is the gene product with an activity as a “homocitrate synthase”, preferably it is the molecule of section (a) or (b) of this paragraph.

[26648] In particular, it was observed that in plants, especially in Arabidopsis thaliana, increasing or generating the activity of a gene product non-targeted with the activity of a “homocitrate synthase”, preferably being encoded by a gene comprising the nucleic acid sequence SEQ ID NO. 12974, preferably the coding region thereof, conferred the production of or the increase in 5-oxoproline compared with the wild type control.

[26649] The nucleic acid sequence of TTC1918 from Thermus thermophilus, e.g. as shown in the respective line in column 5 of Table I, application no. 3, has been published in E. And the activity of the gene product thereof is the activity of oxidoreductase subunit.

[26650] Accordingly, in one embodiment, the process of the present invention for producing aspartate in a non-human organism, like a microorganism or a plant or a part thereof, comprises increasing or generating the activity of a gene product with the activity of a gene product conferring the activity of “oxidoreductase subunit”, especially from Thermus thermophilus or its functional equivalent or its homolog, e.g. the increase of
[26651] (a) a gene product of a gene comprising the nucleic acid molecule as shown in the respective line in column 5 of Table I, application no. 3, preferably the coding region thereof, or a homolog or a fragment thereof, and being depicted in the same respective line as said TTC1918, or a functional equivalent or a homolog thereof as shown in column 8 of Table I, application no. 3, preferably the coding region thereof, particularly a homolog or functional equivalent as shown in column 8 of Table I B, application no. 3, and being depicted in the same respective line as said TTC1918, and preferably the activity is increased non-targeted, or
[26652] (b) a polypeptide comprising a polypeptide, a consensus sequence or at least a polypeptide motif as shown in the respective line in column 5 of Table II or in column 8 of Table IV, application no. 3, respectively, and being depicted in the same respective line as said TTC1918, or a functional equivalent or a homolog thereof as depicted in column 8 of Table II, application no. 3, preferably a homolog or functional equivalent as depicted in column 8 of Table II B, application no. 3, and being depicted in the same respective line as said TTC1918, and preferably the activity is increased non-targeted.

[26653] Accordingly, in one embodiment, the molecule which activity is to be increased in the process of the invention is the gene product with an activity as a “oxidoreductase subunit”, preferably it is the molecule of section (a) or (b) of this paragraph.

[26654] In particular, it was observed that in plants, especially in Arabidopsis thaliana, increasing or generating the activity of a gene product non-targeted with the activity of a “oxidoreductase subunit”, preferably being encoded by a gene comprising the nucleic acid sequence SEQ ID NO. 62160, preferably the coding region thereof, conferred the production of or the increase in aspartate compared with the wild type control.

[26655] The nucleic acid sequence of TTC1918 from Thermus thermophilus, e.g. as shown in the respective line in column 5 of Table I, application no. 3, has been published in E. And the activity of the gene product thereof is the activity of oxidoreductase subunit.

[26656] Accordingly, in one embodiment, the process of the present invention for producing serine in a non-human organism, like a microorganism or a plant or a part thereof, comprises increasing or generating the activity of a gene product with the activity of a gene product conferring the activity of “oxidoreductase subunit”, especially from Thermus thermophilus or its functional equivalent or its homolog, e.g. the increase of
[26657] (a) a gene product of a gene comprising the nucleic acid molecule as shown in the respective line in column 5 of Table I, application no. 3, preferably the coding region thereof, or a homolog or a fragment thereof, and being depicted in the same respective line as said TTC1918, or a functional equivalent or a homolog thereof as shown in column 8 of Table I, application no. 3, preferably the coding region thereof, particularly a homolog or functional equivalent as shown in column 8 of Table I B, application no. 3, and being depicted in the same respective line as said TTC1918, and preferably the activity is increased non-targeted, or
[26658] (b) a polypeptide comprising a polypeptide, a consensus sequence or at least a polypeptide motif as shown in the respective line in column 5 of Table II or in column 8 of Table IV, application no. 3, respectively, and being depicted in the same respective line as said TTC1918, or a functional equivalent or a homolog thereof as depicted in column 8 of Table II, application no. 3, preferably a homolog or functional equivalent as depicted in column 8 of Table II B, application no. 3, and being depicted in the same respective line as said TTC1918, and preferably the activity is increased non-targeted.

[26659] Accordingly, in one embodiment, the molecule which activity is to be increased in the process of the invention is the gene product with an activity as a “oxidoreductase subunit”, preferably it is the molecule of section (a) or (b) of this paragraph.

[26660] In particular, it was observed that in plants, especially in Arabidopsis thaliana, increasing or generating the activity of a gene product non-targeted with the activity of a “oxidoreductase subunit”, preferably being encoded by a gene comprising the nucleic acid sequence SEQ ID NO. 62160, preferably the coding region thereof, conferred the production of or the increase in serine compared with the wild type control.

[26661] The nucleic acid sequence of XM_{—}473199 from Oryza sativa, e.g. as shown in the respective line in column 5 of Table I, application no. 3, has been published in G. And the activity of the gene product thereof is the activity of XM_{—}473199-protein.

[26662] Accordingly, in one embodiment, the process of the present invention for producing aspartate in a non-human organism, like a microorganism or a plant or a part thereof, comprises increasing or generating the activity of a gene product with the activity of a gene product conferring the activity of “XM_{—}473199-protein”, especially from Oryza sativa or its functional equivalent or its homolog, e.g. the increase of
[26663] (a) a gene product of a gene comprising the nucleic acid molecule as shown in the respective line in column 5 of Table I, application no. 3, preferably the coding region thereof, or a homolog or a fragment thereof, and being depicted in the same respective line as said XM_{—}473199, or a functional equivalent or a homolog thereof as shown in column 8 of Table I, application no. 3, preferably the coding region thereof, particularly a homolog or functional equivalent as shown in column 8 of Table I B, application no. 3, and being depicted in the same respective line as said XM_{—}473199, and preferably the activity is increased non-targeted, or
[26664] (b) a polypeptide comprising a polypeptide, a consensus sequence or at least a polypeptide motif as shown in the respective line in column 5 of Table II or in column 8 of Table IV, application no. 3, respectively, and being depicted in the same respective line as said XM_{—}473199, or a functional equivalent or a homolog thereof as depicted in column 8 of Table II, application no. 3, preferably a homolog or functional equivalent as depicted in column 8 of Table II B, application no. 3, and being depicted in the same respective line as said XM_{—}473199, and preferably the activity is increased non-targeted.

[26665] Accordingly, in one embodiment, the molecule which activity is to be increased in the process of the invention is the gene product with an activity as a “XM_{—}473199-protein”, preferably it is the molecule of section (a) or (b) of this paragraph.

[26666] In particular, it was observed that in plants, especially in Arabidopsis thaliana, increasing or generating the activity of a gene product non-targeted with the activity of a “XM_{—}473199-protein”, preferably being encoded by a gene comprising the nucleic acid sequence SEQ ID NO. 62244, preferably the coding region thereof, conferred the production of or the increase in aspartate compared with the wild type control.

[26667] The nucleic acid sequence of XM_{—}473199 from Oryza sativa, e.g. as shown in the respective line in column 5 of Table I, application no. 3, has been published in G. And the activity of the gene product thereof is the activity of XM_{—}473199-protein.

[26668] Accordingly, in one embodiment, the process of the present invention for producing phenylalanine in a non-human organism, like a microorganism or a plant or a part thereof, comprises increasing or generating the activity of a gene product with the activity of a gene product conferring the activity of “XM_{—}473199-protein”, especially from Oryza sativa or its functional equivalent or its homolog, e.g. the increase of
[26669] (a) a gene product of a gene comprising the nucleic acid molecule as shown in the respective line in column 5 of Table I, application no. 3, preferably the coding region thereof, or a homolog or a fragment thereof, and being depicted in the same respective line as said XM_{—}473199, or a functional equivalent or a homolog thereof as shown in column 8 of Table I, application no. 3, preferably the coding region thereof, particularly a homolog or functional equivalent as shown in column 8 of Table I B, application no. 3, and being depicted in the same respective line as said XM_{—}473199, and preferably the activity is increased non-targeted, or
[26670] (b) a polypeptide comprising a polypeptide, a consensus sequence or at least a polypeptide motif as shown in the respective line in column 5 of Table II or in column 8 of Table IV, application no. 3, respectively, and being depicted in the same respective line as said XM_{—}473199, or a functional equivalent or a homolog thereof as depicted in column 8 of Table II, application no. 3, preferably a homolog or functional equivalent as depicted in column 8 of Table II B, application no. 3, and being depicted in the same respective line as said XM_{—}473199, and preferably the activity is increased non-targeted.

[26671] Accordingly, in one embodiment, the molecule which activity is to be increased in the process of the invention is the gene product with an activity as a “XM_{—}473199-protein”, preferably it is the molecule of section (a) or (b) of this paragraph.

[26672] In particular, it was observed that in plants, especially in Arabidopsis thaliana, increasing or generating the activity of a gene product non-targeted with the activity of a “XM_{—}473199-protein”, preferably being encoded by a gene comprising the nucleic acid sequence SEQ ID NO. 62244, preferably the coding region thereof, conferred the production of or the increase in phenylalanine compared with the wild type control.

[26673] The nucleic acid sequence of XM_{—}473199 from Oryza sativa, e.g. as shown in the respective line in column 5 of Table I, application no. 3, has been published in G. And the activity of the gene product thereof is the activity of XM_{—}473199-protein.

[26674] Accordingly, in one embodiment, the process of the present invention for producing tyrosine in a non-human organism, like a microorganism or a plant or a part thereof, comprises increasing or generating the activity of a gene product with the activity of a gene product conferring the activity of “XM_{—}473199-protein”, especially from Oryza sativa or its functional equivalent or its homolog, e.g. the increase of
[26675] (a) a gene product of a gene comprising the nucleic acid molecule as shown in the respective line in column 5 of Table I, application no. 3, preferably the coding region thereof, or a homolog or a fragment thereof, and being depicted in the same respective line as said XM_{—}473199, or a functional equivalent or a homolog thereof as shown in column 8 of Table I, application no. 3, preferably the coding region thereof, particularly a homolog or functional equivalent as shown in column 8 of Table I B, application no. 3, and being depicted in the same respective line as said XM_{—}473199, and preferably the activity is increased non-targeted, or
[26676] (b) a polypeptide comprising a polypeptide, a consensus sequence or at least a polypeptide motif as shown in the respective line in column 5 of Table II or in column 8 of Table IV, application no. 3, respectively, and being depicted in the same respective line as said XM_{—}473199, or a functional equivalent or a homolog thereof as depicted in column 8 of Table II, application no. 3, preferably a homolog or functional equivalent as depicted in column 8 of Table II B, application no. 3, and being depicted in the same respective line as said XM_{—}473199, and preferably the activity is increased non-targeted.

[26677] Accordingly, in one embodiment, the molecule which activity is to be increased in the process of the invention is the gene product with an activity as a “XM_{—}473199-protein”, preferably it is the molecule of section (a) or (b) of this paragraph.

[26678] In particular, it was observed that in plants, especially in Arabidopsis thaliana, increasing or generating the activity of a gene product non-targeted with the activity of a “XM_{—}473199-protein”, preferably being encoded by a gene comprising the nucleic acid sequence SEQ ID NO. 62244, preferably the coding region thereof, conferred the production of or the increase in tyrosine compared with the wild type control.

[26679] The nucleic acid sequence of XM_{—}473199 from Oryza sativa, e.g. as shown in the respective line in column 5 of Table I, application no. 3, has been published in G. And the activity of the gene product thereof is the activity of XM_{—}473199-protein.

[26680] Accordingly, in one embodiment, the process of the present invention for producing 5-oxoproline in a non-human organism, like a microorganism or a plant or a part thereof, comprises increasing or generating the activity of a gene product with the activity of a gene product conferring the activity of “XM_{—}473199-protein”, especially from Oryza sativa or its functional equivalent or its homolog, e.g. the increase of
[26681] (a) a gene product of a gene comprising the nucleic acid molecule as shown in the respective line in column 5 of Table I, application no. 3, preferably the coding region thereof, or a homolog or a fragment thereof, and being depicted in the same respective line as said XM_{—}473199, or a functional equivalent or a homolog thereof as shown in column 8 of Table I, application no. 3, preferably the coding region thereof, particularly a homolog or functional equivalent as shown in column 8 of Table I B, application no. 3, and being depicted in the same respective line as said XM_{—}473199, and preferably the activity is increased non-targeted, or
[26682] (b) a polypeptide comprising a polypeptide, a consensus sequence or at least a polypeptide motif as shown in the respective line in column 5 of Table II or in column 8 of Table IV, application no. 3, respectively, and being depicted in the same respective line as said XM_{—}473199, or a functional equivalent or a homolog thereof as depicted in column 8 of Table II, application no. 3, preferably a homolog or functional equivalent as depicted in column 8 of Table II B, application no. 3, and being depicted in the same respective line as said XM_{—}473199, and preferably the activity is increased non-targeted.

[26683] Accordingly, in one embodiment, the molecule which activity is to be increased in the process of the invention is the gene product with an activity as a “XM_{—}473199-protein”, preferably it is the molecule of section (a) or (b) of this paragraph.

[26684] In particular, it was observed that in plants, especially in Arabidopsis thaliana, increasing or generating the activity of a gene product non-targeted with the activity of a “XM_{—}473199-protein”, preferably being encoded by a gene comprising the nucleic acid sequence SEQ ID NO. 62244, preferably the coding region thereof, conferred the production of or the increase in 5-oxoproline compared with the wild type control.

[26685] The nucleic acid sequence of Ybl021c from Saccharomyces cerevisiae, e.g. as shown in the respective line in column 5 of Table I, application no. 3, has been published in A. And the activity of the gene product thereof is the activity of transcription factor.

[26686] Accordingly, in one embodiment, the process of the present invention for producing glycine in a non-human organism, like a microorganism or a plant or a part thereof, comprises increasing or generating the activity of a gene product with the activity of a gene product conferring the activity of “transcription factor”, especially from Saccharomyces cerevisiae or its functional equivalent or its homolog, e.g. the increase of
[26687] (a) a gene product of a gene comprising the nucleic acid molecule as shown in the respective line in column 5 of Table I, application no. 3, preferably the coding region thereof, or a homolog or a fragment thereof, and being depicted in the same respective line as said Ybl021c, or a functional equivalent or a homolog thereof as shown in column 8 of Table I, application no. 3, preferably the coding region thereof, particularly a homolog or functional equivalent as shown in column 8 of Table I B, application no. 3, and being depicted in the same respective line as said Ybl021c, and preferably the activity is increased non-targeted, or
[26688] (b) a polypeptide comprising a polypeptide, a consensus sequence or at least a polypeptide motif as shown in the respective line in column 5 of Table II or in column 8 of Table IV, application no. 3, respectively, and being depicted in the same respective line as said Ybl021c, or a functional equivalent or a homolog thereof as depicted in column 8 of Table II, application no. 3, preferably a homolog or functional equivalent as depicted in column 8 of Table II B, application no. 3, and being depicted in the same respective line as said Ybl021c, and preferably the activity is increased non-targeted.

[26689] Accordingly, in one embodiment, the molecule which activity is to be increased in the process of the invention is the gene product with an activity as a “transcription factor”, preferably it is the molecule of section (a) or (b) of this paragraph.

[26690] In particular, it was observed that in plants, especially in Arabidopsis thaliana, increasing or generating the activity of a gene product non-targeted with the activity of a “transcription factor”, preferably being encoded by a gene comprising the nucleic acid sequence SEQ ID NO. 62524, preferably the coding region thereof, conferred the production of or the increase in glycine compared with the wild type control.

[26691] The nucleic acid sequence of Ybl021 c from Saccharomyces cerevisiae, e.g. as shown in the respective line in column 5 of Table I, application no. 3, has been published in A. And the activity of the gene product thereof is the activity of transcription factor.

[26692] Accordingly, in one embodiment, the process of the present invention for producing phenylalanine in a non-human organism, like a microorganism or a plant or a part thereof, comprises increasing or generating the activity of a gene product with the activity of a gene product conferring the activity of “transcription factor”, especially from Saccharomyces cerevisiae or its functional equivalent or its homolog, e.g. the increase of
[26693] (a) a gene product of a gene comprising the nucleic acid molecule as shown in the respective line in column 5 of Table I, application no. 3, preferably the coding region thereof, or a homolog or a fragment thereof, and being depicted in the same respective line as said Ybl021c, or a functional equivalent or a homolog thereof as shown in column 8 of Table I, application no. 3, preferably the coding region thereof, particularly a homolog or functional equivalent as shown in column 8 of Table I B, application no. 3, and being depicted in the same respective line as said Ybl021c, and preferably the activity is increased non-targeted, or
[26694] (b) a polypeptide comprising a polypeptide, a consensus sequence or at least a polypeptide motif as shown in the respective line in column 5 of Table II or in column 8 of Table IV, application no. 3, respectively, and being depicted in the same respective line as said Ybl021c, or a functional equivalent or a homolog thereof as depicted in column 8 of Table II, application no. 3, preferably a homolog or functional equivalent as depicted in column 8 of Table II B, application no. 3, and being depicted in the same respective line as said Ybl021c, and preferably the activity is increased non-targeted.

[26695] Accordingly, in one embodiment, the molecule which activity is to be increased in the process of the invention is the gene product with an activity as a “transcription factor”, preferably it is the molecule of section (a) or (b) of this paragraph.

[26696] In particular, it was observed that in plants, especially in Arabidopsis thaliana, increasing or generating the activity of a gene product non-targeted with the activity of a “transcription factor”, preferably being encoded by a gene comprising the nucleic acid sequence SEQ ID NO. 62524, preferably the coding region thereof, conferred the production of or the increase in phenylalanine compared with the wild type control.

[26697] The nucleic acid sequence of Ybr160w from Saccharomyces cerevisiae, e.g. as shown in the respective line in column 5 of Table I, application no. 3, has been published in A. And the activity of the gene product thereof is the activity of cell division control protein.

[26698] Accordingly, in one embodiment, the process of the present invention for producing aspartate in a non-human organism, like a microorganism or a plant or a part thereof, comprises increasing or generating the activity of a gene product with the activity of a gene product conferring the activity of “cell division control protein”, especially from Saccharomyces cerevisiae or its functional equivalent or its homolog, e.g. the increase of
[26699] (a) a gene product of a gene comprising the nucleic acid molecule as shown in the respective line in column 5 of Table I, application no. 3, preferably the coding region thereof, or a homolog or a fragment thereof, and being depicted in the same respective line as said Ybr160w, or a functional equivalent or a homolog thereof as shown in column 8 of Table I, application no. 3, preferably the coding region thereof, particularly a homolog or functional equivalent as shown in column 8 of Table I B, application no. 3, and being depicted in the same respective line as said Ybr160w, and preferably the activity is increased non-targeted, or
[26700] (b) a polypeptide comprising a polypeptide, a consensus sequence or at least a polypeptide motif as shown in the respective line in column 5 of Table II or in column 8 of Table IV, application no. 3, respectively, and being depicted in the same respective line as said Ybr160w, or a functional equivalent or a homolog thereof as depicted in column 8 of Table II, application no. 3, preferably a homolog or functional equivalent as depicted in column 8 of Table II B, application no. 3, and being depicted in the same respective line as said Ybr160w, and preferably the activity is increased non-targeted.

[26701] Accordingly, in one embodiment, the molecule which activity is to be increased in the process of the invention is the gene product with an activity as a “cell division control protein”, preferably it is the molecule of section (a) or (b) of this paragraph.

[26702] In particular, it was observed that in plants, especially in Arabidopsis thaliana, increasing or generating the activity of a gene product non-targeted with the activity of a “cell division control protein”, preferably being encoded by a gene comprising the nucleic acid sequence SEQ ID NO. 62717, preferably the coding region thereof, conferred the production of or the increase in aspartate compared with the wild type control.

[26703] The nucleic acid sequence of Ybr160w from Saccharomyces cerevisiae, e.g. as shown in the respective line in column 5 of Table I, application no. 3, has been published in A. And the activity of the gene product thereof is the activity of cell division control protein.

[26704] Accordingly, in one embodiment, the process of the present invention for producing tyrosine in a non-human organism, like a microorganism or a plant or a part thereof, comprises increasing or generating the activity of a gene product with the activity of a gene product conferring the activity of “cell division control protein”, especially from Saccharomyces cerevisiae or its functional equivalent or its homolog, e.g. the increase of
[26705] (a) a gene product of a gene comprising the nucleic acid molecule as shown in the respective line in column 5 of Table I, application no. 3, preferably the coding region thereof, or a homolog or a fragment thereof, and being depicted in the same respective line as said Ybr160w, or a functional equivalent or a homolog thereof as shown in column 8 of Table I, application no. 3, preferably the coding region thereof, particularly a homolog or functional equivalent as shown in column 8 of Table I B, application no. 3, and being depicted in the same respective line as said Ybr160w, and preferably the activity is increased non-targeted, or
[26706] (b) a polypeptide comprising a polypeptide, a consensus sequence or at least a polypeptide motif as shown in the respective line in column 5 of Table II or in column 8 of Table IV, application no. 3, respectively, and being depicted in the same respective line as said Ybr160w, or a functional equivalent or a homolog thereof as depicted in column 8 of Table II, application no. 3, preferably a homolog or functional equivalent as depicted in column 8 of Table II B, application no. 3, and being depicted in the same respective line as said Ybr160w, and preferably the activity is increased non-targeted.

[26707] Accordingly, in one embodiment, the molecule which activity is to be increased in the process of the invention is the gene product with an activity as a “cell division control protein”, preferably it is the molecule of section (a) or (b) of this paragraph.

[26708] In particular, it was observed that in plants, especially in Arabidopsis thaliana, increasing or generating the activity of a gene product non-targeted with the activity of a “cell division control protein”, preferably being encoded by a gene comprising the nucleic acid sequence SEQ ID NO. 62717, preferably the coding region thereof, conferred the production of or the increase in tyrosine compared with the wild type control.

[26709] The nucleic acid sequence of Ybr249c from Saccharomyces cerevisiae, e.g. as shown in the respective line in column 5 of Table I, application no. 3, has been published in A. And the activity of the gene product thereof is the activity of 3-deoxy-7-phosphoheptulonate synthase.

[26710] Accordingly, in one embodiment, the process of the present invention for producing phenylalanine in a non-human organism, like a microorganism or a plant or a part thereof, comprises increasing or generating the activity of a gene product with the activity of a gene product conferring the activity of “3-deoxy-7-phosphoheptulonate synthase”, especially from Saccharomyces cerevisiae or its functional equivalent or its homolog, e.g. the increase of
[26711] (a) a gene product of a gene comprising the nucleic acid molecule as shown in the respective line in column 5 of Table I, application no. 3, preferably the coding region thereof, or a homolog or a fragment thereof, and being depicted in the same respective line as said Ybr249c, or a functional equivalent or a homolog thereof as shown in column 8 of Table I, application no. 3, preferably the coding region thereof, particularly a homolog or functional equivalent as shown in column 8 of Table I B, application no. 3, and being depicted in the same respective line as said Ybr249c, and preferably the activity is increased plastidic, or
[26712] (b) a polypeptide comprising a polypeptide, a consensus sequence or at least a polypeptide motif as shown in the respective line in column 5 of Table II or in column 8 of Table IV, application no. 3, respectively, and being depicted in the same respective line as said Ybr249c, or a functional equivalent or a homolog thereof as depicted in column 8 of Table II, application no. 3, preferably a homolog or functional equivalent as depicted in column 8 of Table II B, application no. 3, and being depicted in the same respective line as said Ybr249c, and preferably the activity is increased plastidic.

[26713] Accordingly, in one embodiment, the molecule which activity is to be increased in the process of the invention is the gene product with an activity as a “3-deoxy-7-phosphoheptulonate synthase”, preferably it is the molecule of section (a) or (b) of this paragraph.

[26714] In particular, it was observed that in plants, especially in Arabidopsis thaliana, increasing or generating the activity of a gene product plastidic with the activity of a “3-deoxy-7-phosphoheptulonate synthase”, preferably being encoded by a gene comprising the nucleic acid sequence SEQ ID NO. 88879, preferably the coding region thereof, conferred the production of or the increase in phenylalanine compared with the wild type control.

[26715] The nucleic acid sequence of Ybr249c from Saccharomyces cerevisiae, e.g. as shown in the respective line in column 5 of Table I, application no. 3, has been published in A. And the activity of the gene product thereof is the activity of 3-deoxy-7-phosphoheptulonate synthase.

[26716] Accordingly, in one embodiment, the process of the present invention for producing tyrosine in a non-human organism, like a microorganism or a plant or a part thereof, comprises increasing or generating the activity of a gene product with the activity of a gene product conferring the activity of “3-deoxy-7-phosphoheptulonate synthase”, especially from Saccharomyces cerevisiae or its functional equivalent or its homolog, e.g. the increase of
[26717] (a) a gene product of a gene comprising the nucleic acid molecule as shown in the respective line in column 5 of Table I, application no. 3, preferably the coding region thereof, or a homolog or a fragment thereof, and being depicted in the same respective line as said Ybr249c, or a functional equivalent or a homolog thereof as shown in column 8 of Table I, application no. 3, preferably the coding region thereof, particularly a homolog or functional equivalent as shown in column 8 of Table I B, application no. 3, and being depicted in the same respective line as said Ybr249c, and preferably the activity is increased plastidic, or
[26718] (b) a polypeptide comprising a polypeptide, a consensus sequence or at least a polypeptide motif as shown in the respective line in column 5 of Table II or in column 8 of Table IV, application no. 3, respectively, and being depicted in the same respective line as said Ybr249c, or a functional equivalent or a homolog thereof as depicted in column 8 of Table II, application no. 3, preferably a homolog or functional equivalent as depicted in column 8 of Table II B, application no. 3, and being depicted in the same respective line as said Ybr249c, and preferably the activity is increased plastidic.

[26719] Accordingly, in one embodiment, the molecule which activity is to be increased in the process of the invention is the gene product with an activity as a “3-deoxy-7-phosphoheptulonate synthase”, preferably it is the molecule of section (a) or (b) of this paragraph.

[26720] In particular, it was observed that in plants, especially in Arabidopsis thaliana, increasing or generating the activity of a gene product plastidic with the activity of a “3-deoxy-7-phosphoheptulonate synthase”, preferably being encoded by a gene comprising the nucleic acid sequence SEQ ID NO. 88879, preferably the coding region thereof, conferred the production of or the increase in tyrosine compared with the wild type control.

[26721] The nucleic acid sequence of Ybr296c from Saccharomyces cerevisiae, e.g. as shown in the respective line in column 5 of Table I, application no. 3, has been published in A. And the activity of the gene product thereof is the activity of phosphate permease.

[26722] Accordingly, in one embodiment, the process of the present invention for producing 5-oxoproline in a non-human organism, like a microorganism or a plant or a part thereof, comprises increasing or generating the activity of a gene product with the activity of a gene product conferring the activity of “phosphate permease”, especially from Saccharomyces cerevisiae or its functional equivalent or its homolog, e.g. the increase of
[26723] (a) a gene product of a gene comprising the nucleic acid molecule as shown in the respective line in column 5 of Table I, application no. 3, preferably the coding region thereof, or a homolog or a fragment thereof, and being depicted in the same respective line as said Ybr296c, or a functional equivalent or a homolog thereof as shown in column 8 of Table I, application no. 3, preferably the coding region thereof, particularly a homolog or functional equivalent as shown in column 8 of Table I B, application no. 3, and being depicted in the same respective line as said Ybr296c, and preferably the activity is increased non-targeted, or
[26724] (b) a polypeptide comprising a polypeptide, a consensus sequence or at least a polypeptide motif as shown in the respective line in column 5 of Table II or in column 8 of Table IV, application no. 3, respectively, and being depicted in the same respective line as said Ybr296c, or a functional equivalent or a homolog thereof as depicted in column 8 of Table II, application no. 3, preferably a homolog or functional equivalent as depicted in column 8 of Table II B, application no. 3, and being depicted in the same respective line as said Ybr296c, and preferably the activity is increased non-targeted.

[26725] Accordingly, in one embodiment, the molecule which activity is to be increased in the process of the invention is the gene product with an activity as a “phosphate permease”, preferably it is the molecule of section (a) or (b) of this paragraph.

[26726] In particular, it was observed that in plants, especially in Arabidopsis thaliana, increasing or generating the activity of a gene product non-targeted with the activity of a “phosphate permease”, preferably being encoded by a gene comprising the nucleic acid sequence SEQ ID NO. 89317, preferably the coding region thereof, conferred the production of or the increase in 5-oxoproline compared with the wild type control.

[26727] The nucleic acid sequence of Ycl064c from Saccharomyces cerevisiae, e.g. as shown in the respective line in column 5 of Table I, application no. 3, has been published in A. And the activity of the gene product thereof is the activity of serine/threonine dehydratase.

[26728] Accordingly, in one embodiment, the process of the present invention for producing alanine in a non-human organism, like a microorganism or a plant or a part thereof, comprises increasing or generating the activity of a gene product with the activity of a gene product conferring the activity of “serine/threonine dehydratase”, especially from Saccharomyces cerevisiae or its functional equivalent or its homolog, e.g. the increase of
[26729] (a) a gene product of a gene comprising the nucleic acid molecule as shown in the respective line in column 5 of Table I, application no. 3, preferably the coding region thereof, or a homolog or a fragment thereof, and being depicted in the same respective line as said Ycl064c, or a functional equivalent or a homolog thereof as shown in column 8 of Table I, application no. 3, preferably the coding region thereof, particularly a homolog or functional equivalent as shown in column 8 of Table I B, application no. 3, and being depicted in the same respective line as said Ycl064c, and preferably the activity is increased plastidic, or
[26730] (b) a polypeptide comprising a polypeptide, a consensus sequence or at least a polypeptide motif as shown in the respective line in column 5 of Table II or in column 8 of Table IV, application no. 3, respectively, and being depicted in the same respective line as said Ycl064c, or a functional equivalent or a homolog thereof as depicted in column 8 of Table II, application no. 3, preferably a homolog or functional equivalent as depicted in column 8 of Table II B, application no. 3, and being depicted in the same respective line as said Ycl064c, and preferably the activity is increased plastidic.

[26731] Accordingly, in one embodiment, the molecule which activity is to be increased in the process of the invention is the gene product with an activity as a “serine/threonine dehydratase”, preferably it is the molecule of section (a) or (b) of this paragraph.

[26732] In particular, it was observed that in plants, especially in Arabidopsis thaliana, increasing or generating the activity of a gene product plastidic with the activity of a “serine/threonine dehydratase”, preferably being encoded by a gene comprising the nucleic acid sequence SEQ ID NO. 89395, preferably the coding region thereof, conferred the production of or the increase in alanine compared with the wild type control.

[26733] The nucleic acid sequence of Ycl064c from Saccharomyces cerevisiae, e.g. as shown in the respective line in column 5 of Table I, application no. 3, has been published in A. And the activity of the gene product thereof is the activity of serine/threonine dehydratase.

[26734] Accordingly, in one embodiment, the process of the present invention for producing glycine in a non-human organism, like a microorganism or a plant or a part thereof, comprises increasing or generating the activity of a gene product with the activity of a gene product conferring the activity of “serine/threonine dehydratase”, especially from Saccharomyces cerevisiae or its functional equivalent or its homolog, e.g. the increase of
[26735] (a) a gene product of a gene comprising the nucleic acid molecule as shown in the respective line in column 5 of Table I, application no. 3, preferably the coding region thereof, or a homolog or a fragment thereof, and being depicted in the same respective line as said Ycl064c, or a functional equivalent or a homolog thereof as shown in column 8 of Table I, application no. 3, preferably the coding region thereof, particularly a homolog or functional equivalent as shown in column 8 of Table I B, application no. 3, and being depicted in the same respective line as said Ycl064c, and preferably the activity is increased plastidic, or
[26736] (b) a polypeptide comprising a polypeptide, a consensus sequence or at least a polypeptide motif as shown in the respective line in column 5 of Table II or in column 8 of Table IV, application no. 3, respectively, and being depicted in the same respective line as said Ycl064c, or a functional equivalent or a homolog thereof as depicted in column 8 of Table II, application no. 3, preferably a homolog or functional equivalent as depicted in column 8 of Table II B, application no. 3, and being depicted in the same respective line as said Ycl064c, and preferably the activity is increased plastidic.

[26737] Accordingly, in one embodiment, the molecule which activity is to be increased in the process of the invention is the gene product with an activity as a “serine/threonine dehydratase”, preferably it is the molecule of section (a) or (b) of this paragraph.

[26738] In particular, it was observed that in plants, especially in Arabidopsis thaliana, increasing or generating the activity of a gene product plastidic with the activity of a “serine/threonine dehydratase”, preferably being encoded by a gene comprising the nucleic acid sequence SEQ ID NO. 89395, preferably the coding region thereof, conferred the production of or the increase in glycine compared with the wild type control.

[26739] The nucleic acid sequence of Ydl159w from Saccharomyces cerevisiae, e.g. as shown in the respective line in column 5 of Table I, application no. 3, has been published in A. And the activity of the gene product thereof is the activity of protein kinase.

[26740] Accordingly, in one embodiment, the process of the present invention for producing aspartate in a non-human organism, like a microorganism or a plant or a part thereof, comprises increasing or generating the activity of a gene product with the activity of a gene product conferring the activity of “protein kinase”, especially from Saccharomyces cerevisiae or its functional equivalent or its homolog, e.g. the increase of
[26741] (a) a gene product of a gene comprising the nucleic acid molecule as shown in the respective line in column 5 of Table I, application no. 3, preferably the coding region thereof, or a homolog or a fragment thereof, and being depicted in the same respective line as said Ydl159w, or a functional equivalent or a homolog thereof as shown in column 8 of Table I, application no. 3, preferably the coding region thereof, particularly a homolog or functional equivalent as shown in column 8 of Table I B, application no. 3, and being depicted in the same respective line as said Ydl159w, and preferably the activity is increased plastidic, or
[26742] (b) a polypeptide comprising a polypeptide, a consensus sequence or at least a polypeptide motif as shown in the respective line in column 5 of Table II or in column 8 of Table IV, application no. 3, respectively, and being depicted in the same respective line as said Ydl159w, or a functional equivalent or a homolog thereof as depicted in column 8 of Table II, application no. 3, preferably a homolog or functional equivalent as depicted in column 8 of Table II B, application no. 3, and being depicted in the same respective line as said Ydl159w, and preferably the activity is increased plastidic.

[26743] Accordingly, in one embodiment, the molecule which activity is to be increased in the process of the invention is the gene product with an activity as a “protein kinase”, preferably it is the molecule of section (a) or (b) of this paragraph.

[26744] In particular, it was observed that in plants, especially in Arabidopsis thaliana, increasing or generating the activity of a gene product plastidic with the activity of a “protein kinase”, preferably being encoded by a gene comprising the nucleic acid sequence SEQ ID NO. 14275, preferably the coding region thereof, conferred the production of or the increase in aspartate compared with the wild type control.

[26745] The nucleic acid sequence of Ydl188c from Saccharomyces cerevisiae, e.g. as shown in the respective line in column 5 of Table I, application no. 3, has been published in A. And the activity of the gene product thereof is the activity of Serine/threonine-protein phosphatase.

[26746] Accordingly, in one embodiment, the process of the present invention for producing homoserine in a non-human organism, like a microorganism or a plant or a part thereof, comprises increasing or generating the activity of a gene product with the activity of a gene product conferring the activity of “Serine/threonine-protein phosphatase”, especially from Saccharomyces cerevisiae or its functional equivalent or its homolog, e.g. the increase of
[26747] (a) a gene product of a gene comprising the nucleic acid molecule as shown in the respective line in column 5 of Table I, application no. 3, preferably the coding region thereof, or a homolog or a fragment thereof, and being depicted in the same respective line as said Ydl188c, or a functional equivalent or a homolog thereof as shown in column 8 of Table I, application no. 3, preferably the coding region thereof, particularly a homolog or functional equivalent as shown in column 8 of Table I B, application no. 3, and being depicted in the same respective line as said Ydl188c, and preferably the activity is increased plastidic, or
[26748] (b) a polypeptide comprising a polypeptide, a consensus sequence or at least a polypeptide motif as shown in the respective line in column 5 of Table II or in column 8 of Table IV, application no. 3, respectively, and being depicted in the same respective line as said Ydl188c, or a functional equivalent or a homolog thereof as depicted in column 8 of Table II, application no. 3, preferably a homolog or functional equivalent as depicted in column 8 of Table II B, application no. 3, and being depicted in the same respective line as said Ydl188c, and preferably the activity is increased plastidic.

[26749] Accordingly, in one embodiment, the molecule which activity is to be increased in the process of the invention is the gene product with an activity as a “Serine/threonine-protein phosphatase”, preferably it is the molecule of section (a) or (b) of this paragraph.

[26750] In particular, it was observed that in plants, especially in Arabidopsis thaliana, increasing or generating the activity of a gene product plastidic with the activity of a “Serine/threonine-protein phosphatase”, preferably being encoded by a gene comprising the nucleic acid sequence SEQ ID NO. 89483, preferably the coding region thereof, conferred the production of or the increase in homoserine compared with the wild type control.

[26751] The nucleic acid sequence of Ydl188c from Saccharomyces cerevisiae, e.g. as shown in the respective line in column 5 of Table I, application no. 3, has been published in A. And the activity of the gene product thereof is the activity of Serine/threonine-protein phosphatase.

[26752] Accordingly, in one embodiment, the process of the present invention for producing phenylalanine in a non-human organism, like a microorganism or a plant or a part thereof, comprises increasing or generating the activity of a gene product with the activity of a gene product conferring the activity of “Serine/threonine-protein phosphatase”, especially from Saccharomyces cerevisiae or its functional equivalent or its homolog, e.g. the increase of
[26753] (a) a gene product of a gene comprising the nucleic acid molecule as shown in the respective line in column 5 of Table I, application no. 3, preferably the coding region thereof, or a homolog or a fragment thereof, and being depicted in the same respective line as said Ydl188c, or a functional equivalent or a homolog thereof as shown in column 8 of Table I, application no. 3, preferably the coding region thereof, particularly a homolog or functional equivalent as shown in column 8 of Table I B, application no. 3, and being depicted in the same respective line as said Ydl188c, and preferably the activity is increased plastidic, or
[26754] (b) a polypeptide comprising a polypeptide, a consensus sequence or at least a polypeptide motif as shown in the respective line in column 5 of Table II or in column 8 of Table IV, application no. 3, respectively, and being depicted in the same respective line as said Ydl188c, or a functional equivalent or a homolog thereof as depicted in column 8 of Table II, application no. 3, preferably a homolog or functional equivalent as depicted in column 8 of Table II B, application no. 3, and being depicted in the same respective line as said Ydl188c, and preferably the activity is increased plastidic.

[26755] Accordingly, in one embodiment, the molecule which activity is to be increased in the process of the invention is the gene product with an activity as a “Serine/threonine-protein phosphatase”, preferably it is the molecule of section (a) or (b) of this paragraph.

[26756] In particular, it was observed that in plants, especially in Arabidopsis thaliana, increasing or generating the activity of a gene product plastidic with the activity of a “Serine/threonine-protein phosphatase”, preferably being encoded by a gene comprising the nucleic acid sequence SEQ ID NO. 89483, preferably the coding region thereof, conferred the production of or the increase in phenylalanine compared with the wild type control.

[26757] The nucleic acid sequence of Ydl209c from Saccharomyces cerevisiae, e.g. as shown in the respective line in column 5 of Table I, application no. 3, has been published in A. And the activity of the gene product thereof is the activity of Pre-mRNA-splicing factor.

[26758] Accordingly, in one embodiment, the process of the present invention for producing 5-oxoproline in a non-human organism, like a microorganism or a plant or a part thereof, comprises increasing or generating the activity of a gene product with the activity of a gene product conferring the activity of “Pre-mRNA-splicing factor”, especially from Saccharomyces cerevisiae or its functional equivalent or its homolog, e.g. the increase of
[26759] (a) a gene product of a gene comprising the nucleic acid molecule as shown in the respective line in column 5 of Table I, application no. 3, preferably the coding region thereof, or a homolog or a fragment thereof, and being depicted in the same respective line as said Ydl209c, or a functional equivalent or a homolog thereof as shown in column 8 of Table I, application no. 3, preferably the coding region thereof, particularly a homolog or functional equivalent as shown in column 8 of Table I B, application no. 3, and being depicted in the same respective line as said Ydl209c, and preferably the activity is increased plastidic, or
[26760] (b) a polypeptide comprising a polypeptide, a consensus sequence or at least a polypeptide motif as shown in the respective line in column 5 of Table II or in column 8 of Table IV, application no. 3, respectively, and being depicted in the same respective line as said Ydl209c, or a functional equivalent or a homolog thereof as depicted in column 8 of Table II, application no. 3, preferably a homolog or functional equivalent as depicted in column 8 of Table II B, application no. 3, and being depicted in the same respective line as said Ydl209c, and preferably the activity is increased plastidic.

[26761] Accordingly, in one embodiment, the molecule which activity is to be increased in the process of the invention is the gene product with an activity as a “Pre-mRNA-splicing factor”, preferably it is the molecule of section (a) or (b) of this paragraph.

[26762] In particular, it was observed that in plants, especially in Arabidopsis thaliana, increasing or generating the activity of a gene product plastidic with the activity of a “Pre-mRNA-splicing factor”, preferably being encoded by a gene comprising the nucleic acid sequence SEQ ID NO. 89936, preferably the coding region thereof, conferred the production of or the increase in 5-oxoproline compared with the wild type control.

[26763] The nucleic acid sequence of Ydr007w from Saccharomyces cerevisiae, e.g. as shown in the respective line in column 5 of Table I, application no. 3, has been published in A. And the activity of the gene product thereof is the activity of N-(5′-phosphoribosyl)anthranilate isomerase.

[26764] Accordingly, in one embodiment, the process of the present invention for producing phenylalanine in a non-human organism, like a microorganism or a plant or a part thereof, comprises increasing or generating the activity of a gene product with the activity of a gene product conferring the activity of “N-(5′-phosphoribosyl)anthranilate isomerase”, especially from Saccharomyces cerevisiae or its functional equivalent or its homolog, e.g. the increase of
[26765] (a) a gene product of a gene comprising the nucleic acid molecule as shown in the respective line in column 5 of Table I, application no. 3, preferably the coding region thereof, or a homolog or a fragment thereof, and being depicted in the same respective line as said Ydr007w, or a functional equivalent or a homolog thereof as shown in column 8 of Table I, application no. 3, preferably the coding region thereof, particularly a homolog or functional equivalent as shown in column 8 of Table I B, application no. 3, and being depicted in the same respective line as said Ydr007w, and preferably the activity is increased plastidic, or
[26766] (b) a polypeptide comprising a polypeptide, a consensus sequence or at least a polypeptide motif as shown in the respective line in column 5 of Table II or in column 8 of Table IV, application no. 3, respectively, and being depicted in the same respective line as said Ydr007w, or a functional equivalent or a homolog thereof as depicted in column 8 of Table II, application no. 3, preferably a homolog or functional equivalent as depicted in column 8 of Table II B, application no. 3, and being depicted in the same respective line as said Ydr007w, and preferably the activity is increased plastidic.

[26767] Accordingly, in one embodiment, the molecule which activity is to be increased in the process of the invention is the gene product with an activity as a “N-(5′-phosphoribosyl)anthranilate isomerase”, preferably it is the molecule of section (a) or (b) of this paragraph.

[26768] In particular, it was observed that in plants, especially in Arabidopsis thaliana, increasing or generating the activity of a gene product plastidic with the activity of a “N-(5′-phosphoribosyl)anthranilate isomerase”, preferably being encoded by a gene comprising the nucleic acid sequence SEQ ID NO. 89973, preferably the coding region thereof, conferred the production of or the increase in phenylalanine compared with the wild type control.

[26769] The nucleic acid sequence of Ydr046c from Saccharomyces cerevisiae, e.g. as shown in the respective line in column 5 of Table I, application no. 3, has been published in A. And the activity of the gene product thereof is the activity of branched-chain amino acid permease.

[26770] Accordingly, in one embodiment, the process of the present invention for producing tyrosine in a non-human organism, like a microorganism or a plant or a part thereof, comprises increasing or generating the activity of a gene product with the activity of a gene product conferring the activity of “branched-chain amino acid permease”, especially from Saccharomyces cerevisiae or its functional equivalent or its homolog, e.g. the increase of
[26771] (a) a gene product of a gene comprising the nucleic acid molecule as shown in the respective line in column 5 of Table I, application no. 3, preferably the coding region thereof, or a homolog or a fragment thereof, and being depicted in the same respective line as said Ydr046c, or a functional equivalent or a homolog thereof as shown in column 8 of Table I, application no. 3, preferably the coding region thereof, particularly a homolog or functional equivalent as shown in column 8 of Table I B, application no. 3, and being depicted in the same respective line as said Ydr046c, and preferably the activity is increased plastidic, or
[26772] (b) a polypeptide comprising a polypeptide, a consensus sequence or at least a polypeptide motif as shown in the respective line in column 5 of Table II or in column 8 of Table IV, application no. 3, respectively, and being depicted in the same respective line as said Ydr046c, or a functional equivalent or a homolog thereof as depicted in column 8 of Table II, application no. 3, preferably a homolog or functional equivalent as depicted in column 8 of Table II B, application no. 3, and being depicted in the same respective line as said Ydr046c, and preferably the activity is increased plastidic.

[26773] Accordingly, in one embodiment, the molecule which activity is to be increased in the process of the invention is the gene product with an activity as a “branched-chain amino acid permease”, preferably it is the molecule of section (a) or (b) of this paragraph.

[26774] In particular, it was observed that in plants, especially in Arabidopsis thaliana, increasing or generating the activity of a gene product plastidic with the activity of a “branched-chain amino acid permease”, preferably being encoded by a gene comprising the nucleic acid sequence SEQ ID NO. 63544, preferably the coding region thereof, conferred the production of or the increase in tyrosine compared with the wild type control.

[26775] The nucleic acid sequence of Ydr183w from Saccharomyces cerevisiae, e.g. as shown in the respective line in column 5 of Table I, application no. 3, has been published in A. And the activity of the gene product thereof is the activity of ydr183w-protein.

[26776] Accordingly, in one embodiment, the process of the present invention for producing serine in a non-human organism, like a microorganism or a plant or a part thereof, comprises increasing or generating the activity of a gene product with the activity of a gene product conferring the activity of “ydr183w-protein”, especially from Saccharomyces cerevisiae or its functional equivalent or its homolog, e.g. the increase of
[26777] (a) a gene product of a gene comprising the nucleic acid molecule as shown in the respective line in column 5 of Table I, application no. 3, preferably the coding region thereof, or a homolog or a fragment thereof, and being depicted in the same respective line as said Ydr183w, or a functional equivalent or a homolog thereof as shown in column 8 of Table I, application no. 3, preferably the coding region thereof, particularly a homolog or functional equivalent as shown in column 8 of Table I B, application no. 3, and being depicted in the same respective line as said Ydr183w, and preferably the activity is increased plastidic, or
[26778] (b) a polypeptide comprising a polypeptide, a consensus sequence or at least a polypeptide motif as shown in the respective line in column 5 of Table II or in column 8 of Table IV, application no. 3, respectively, and being depicted in the same respective line as said Ydr183w, or a functional equivalent or a homolog thereof as depicted in column 8 of Table II, application no. 3, preferably a homolog or functional equivalent as depicted in column 8 of Table II B, application no. 3, and being depicted in the same respective line as said Ydr183w, and preferably the activity is increased plastidic.

[26779] Accordingly, in one embodiment, the molecule which activity is to be increased in the process of the invention is the gene product with an activity as a “ydr183w-protein”, preferably it is the molecule of section (a) or (b) of this paragraph.

[26780] In particular, it was observed that in plants, especially in Arabidopsis thaliana, increasing or generating the activity of a gene product plastidic with the activity of a “ydr183w-protein”, preferably being encoded by a gene comprising the nucleic acid sequence SEQ ID NO. 90103, preferably the coding region thereof, conferred the production of or the increase in serine compared with the wild type control.

[26781] The nucleic acid sequence of Ydr273w from Saccharomyces cerevisiae, e.g. as shown in the respective line in column 5 of Table I, application no. 3, has been published in A. And the activity of the gene product thereof is the activity of ydr273w-protein.

[26782] Accordingly, in one embodiment, the process of the present invention for producing aspartate in a non-human organism, like a microorganism or a plant or a part thereof, comprises increasing or generating the activity of a gene product with the activity of a gene product conferring the activity of “ydr273w-protein”, especially from Saccharomyces cerevisiae or its functional equivalent or its homolog, e.g. the increase of
[26783] (a) a gene product of a gene comprising the nucleic acid molecule as shown in the respective line in column 5 of Table I, application no. 3, preferably the coding region thereof, or a homolog or a fragment thereof, and being depicted in the same respective line as said Ydr273w, or a functional equivalent or a homolog thereof as shown in column 8 of Table I, application no. 3, preferably the coding region thereof, particularly a homolog or functional equivalent as shown in column 8 of Table I B, application no. 3, and being depicted in the same respective line as said Ydr273w, and preferably the activity is increased plastidic, or
[26784] (b) a polypeptide comprising a polypeptide, a consensus sequence or at least a polypeptide motif as shown in the respective line in column 5 of Table II or in column 8 of Table IV, application no. 3, respectively, and being depicted in the same respective line as said Ydr273w, or a functional equivalent or a homolog thereof as depicted in column 8 of Table II, application no. 3, preferably a homolog or functional equivalent as depicted in column 8 of Table II B, application no. 3, and being depicted in the same respective line as said Ydr273w, and preferably the activity is increased plastidic.

[26785] Accordingly, in one embodiment, the molecule which activity is to be increased in the process of the invention is the gene product with an activity as a “ydr273w-protein”, preferably it is the molecule of section (a) or (b) of this paragraph.

[26786] In particular, it was observed that in plants, especially in Arabidopsis thaliana, increasing or generating the activity of a gene product plastidic with the activity of a “ydr273w-protein”, preferably being encoded by a gene comprising the nucleic acid sequence SEQ ID NO. 90159, preferably the coding region thereof, conferred the production of or the increase in aspartate compared with the wild type control.

[26787] The nucleic acid sequence of Ydr273w from Saccharomyces cerevisiae, e.g. as shown in the respective line in column 5 of Table I, application no. 3, has been published in A. And the activity of the gene product thereof is the activity of ydr273w-protein.

[26788] Accordingly, in one embodiment, the process of the present invention for producing citrulline in a non-human organism, like a microorganism or a plant or a part thereof, comprises increasing or generating the activity of a gene product with the activity of a gene product conferring the activity of “ydr273w-protein”, especially from Saccharomyces cerevisiae or its functional equivalent or its homolog, e.g. the increase of
[26789] (a) a gene product of a gene comprising the nucleic acid molecule as shown in the respective line in column 5 of Table I, application no. 3, preferably the coding region thereof, or a homolog or a fragment thereof, and being depicted in the same respective line as said Ydr273w, or a functional equivalent or a homolog thereof as shown in column 8 of Table I, application no. 3, preferably the coding region thereof, particularly a homolog or functional equivalent as shown in column 8 of Table I B, application no. 3, and being depicted in the same respective line as said Ydr273w, and preferably the activity is increased plastidic, or
[26790] (b) a polypeptide comprising a polypeptide, a consensus sequence or at least a polypeptide motif as shown in the respective line in column 5 of Table II or in column 8 of Table IV, application no. 3, respectively, and being depicted in the same respective line as said Ydr273w, or a functional equivalent or a homolog thereof as depicted in column 8 of Table II, application no. 3, preferably a homolog or functional equivalent as depicted in column 8 of Table II B, application no. 3, and being depicted in the same respective line as said Ydr273w, and preferably the activity is increased plastidic.

[26791] Accordingly, in one embodiment, the molecule which activity is to be increased in the process of the invention is the gene product with an activity as a “ydr273w-protein”, preferably it is the molecule of section (a) or (b) of this paragraph.

[26792] In particular, it was observed that in plants, especially in Arabidopsis thaliana, increasing or generating the activity of a gene product plastidic with the activity of a “ydr273w-protein”, preferably being encoded by a gene comprising the nucleic acid sequence SEQ ID NO. 90159, preferably the coding region thereof, conferred the production of or the increase in citrulline compared with the wild type control.

[26793] The nucleic acid sequence of Ydr507c from Saccharomyces cerevisiae, e.g. as shown in the respective line in column 5 of Table I, application no. 3, has been published in A. And the activity of the gene product thereof is the activity of ydr507c-protein.

[26794] Accordingly, in one embodiment, the process of the present invention for producing aspartate in a non-human organism, like a microorganism or a plant or a part thereof, comprises increasing or generating the activity of a gene product with the activity of a gene product conferring the activity of “ydr507c-protein”, especially from Saccharomyces cerevisiae or its functional equivalent or its homolog, e.g. the increase of
[26795] (a) a gene product of a gene comprising the nucleic acid molecule as shown in the respective line in column 5 of Table I, application no. 3, preferably the coding region thereof, or a homolog or a fragment thereof, and being depicted in the same respective line as said Ydr507c, or a functional equivalent or a homolog thereof as shown in column 8 of Table I, application no. 3, preferably the coding region thereof, particularly a homolog or functional equivalent as shown in column 8 of Table I B, application no. 3, and being depicted in the same respective line as said Ydr507c, and preferably the activity is increased non-targeted, or
[26796] (b) a polypeptide comprising a polypeptide, a consensus sequence or at least a polypeptide motif as shown in the respective line in column 5 of Table II or in column 8 of Table IV, application no. 3, respectively, and being depicted in the same respective line as said Ydr507c, or a functional equivalent or a homolog thereof as depicted in column 8 of Table II, application no. 3, preferably a homolog or functional equivalent as depicted in column 8 of Table II B, application no. 3, and being depicted in the same respective line as said Ydr507c, and preferably the activity is increased non-targeted.

[26797] Accordingly, in one embodiment, the molecule which activity is to be increased in the process of the invention is the gene product with an activity as a “ydr507c-protein”, preferably it is the molecule of section (a) or (b) of this paragraph.

[26798] In particular, it was observed that in plants, especially in Arabidopsis thaliana, increasing or generating the activity of a gene product non-targeted with the activity of a “ydr507c-protein”, preferably being encoded by a gene comprising the nucleic acid sequence SEQ ID NO. 90165, preferably the coding region thereof, conferred the production of or the increase in aspartate compared with the wild type control.

[26799] The nucleic acid sequence of Yer014w from Saccharomyces cerevisiae, e.g. as shown in the respective line in column 5 of Table I, application no. 3, has been published in A. And the activity of the gene product thereof is the activity of yer014w-protein.

[26800] Accordingly, in one embodiment, the process of the present invention for producing asparagine in a non-human organism, like a microorganism or a plant or a part thereof, comprises increasing or generating the activity of a gene product with the activity of a gene product conferring the activity of “yer014w-protein”, especially from Saccharomyces cerevisiae or its functional equivalent or its homolog, e.g. the increase of
[26801] (a) a gene product of a gene comprising the nucleic acid molecule as shown in the respective line in column 5 of Table I, application no. 3, preferably the coding region thereof, or a homolog or a fragment thereof, and being depicted in the same respective line as said Yer014w, or a functional equivalent or a homolog thereof as shown in column 8 of Table I, application no. 3, preferably the coding region thereof, particularly a homolog or functional equivalent as shown in column 8 of Table I B, application no. 3, and being depicted in the same respective line as said Yer014w, and preferably the activity is increased plastidic, or
[26802] (b) a polypeptide comprising a polypeptide, a consensus sequence or at least a polypeptide motif as shown in the respective line in column 5 of Table II or in column 8 of Table IV, application no. 3, respectively, and being depicted in the same respective line as said Yer014w, or a functional equivalent or a homolog thereof as depicted in column 8 of Table II, application no. 3, preferably a homolog or functional equivalent as depicted in column 8 of Table II B, application no. 3, and being depicted in the same respective line as said Yer014w, and preferably the activity is increased plastidic.

[26803] Accordingly, in one embodiment, the molecule which activity is to be increased in the process of the invention is the gene product with an activity as a “yer014w-protein”, preferably it is the molecule of section (a) or (b) of this paragraph.

[26804] In particular, it was observed that in plants, especially in Arabidopsis thaliana, increasing or generating the activity of a gene product plastidic with the activity of a “yer014w-protein”, preferably being encoded by a gene comprising the nucleic acid sequence SEQ ID NO. 63745, preferably the coding region thereof, conferred the production of or the increase in asparagine compared with the wild type control.

[26805] The nucleic acid sequence of Yer014w from Saccharomyces cerevisiae, e.g. as shown in the respective line in column 5 of Table I, application no. 3, has been published in A. And the activity of the gene product thereof is the activity of yer014w-protein.

[26806] Accordingly, in one embodiment, the process of the present invention for producing aspartate in a non-human organism, like a microorganism or a plant or a part thereof, comprises increasing or generating the activity of a gene product with the activity of a gene product conferring the activity of “yer014w-protein”, especially from Saccharomyces cerevisiae or its functional equivalent or its homolog, e.g. the increase of
[26807] (a) a gene product of a gene comprising the nucleic acid molecule as shown in the respective line in column 5 of Table I, application no. 3, preferably the coding region thereof, or a homolog or a fragment thereof, and being depicted in the same respective line as said Yer014w, or a functional equivalent or a homolog thereof as shown in column 8 of Table I, application no. 3, preferably the coding region thereof, particularly a homolog or functional equivalent as shown in column 8 of Table I B, application no. 3, and being depicted in the same respective line as said Yer014w, and preferably the activity is increased plastidic, or
[26808] (b) a polypeptide comprising a polypeptide, a consensus sequence or at least a polypeptide motif as shown in the respective line in column 5 of Table II or in column 8 of Table IV, application no. 3, respectively, and being depicted in the same respective line as said Yer014w, or a functional equivalent or a homolog thereof as depicted in column 8 of Table II, application no. 3, preferably a homolog or functional equivalent as depicted in column 8 of Table II B, application no. 3, and being depicted in the same respective line as said Yer014w, and preferably the activity is increased plastidic.

[26809] Accordingly, in one embodiment, the molecule which activity is to be increased in the process of the invention is the gene product with an activity as a “yer014w-protein”, preferably it is the molecule of section (a) or (b) of this paragraph.

[26810] In particular, it was observed that in plants, especially in Arabidopsis thaliana, increasing or generating the activity of a gene product plastidic with the activity of a “yer014w-protein”, preferably being encoded by a gene comprising the nucleic acid sequence SEQ ID NO. 63745, preferably the coding region thereof, conferred the production of or the increase in aspartate compared with the wild type control.

[26811] The nucleic acid sequence of Yer014w from Saccharomyces cerevisiae, e.g. as shown in the respective line in column 5 of Table I, application no. 3, has been published in A. And the activity of the gene product thereof is the activity of yer014w-protein.

[26812] Accordingly, in one embodiment, the process of the present invention for producing serine in a non-human organism, like a microorganism or a plant or a part thereof, comprises increasing or generating the activity of a gene product with the activity of a gene product conferring the activity of “yer014w-protein”, especially from Saccharomyces cerevisiae or its functional equivalent or its homolog, e.g. the increase of
[26813] (a) a gene product of a gene comprising the nucleic acid molecule as shown in the respective line in column 5 of Table I, application no. 3, preferably the coding region thereof, or a homolog or a fragment thereof, and being depicted in the same respective line as said Yer014w, or a functional equivalent or a homolog thereof as shown in column 8 of Table I, application no. 3, preferably the coding region thereof, particularly a homolog or functional equivalent as shown in column 8 of Table I B, application no. 3, and being depicted in the same respective line as said Yer014w, and preferably the activity is increased plastidic, or
[26814] (b) a polypeptide comprising a polypeptide, a consensus sequence or at least a polypeptide motif as shown in the respective line in column 5 of Table II or in column 8 of Table IV, application no. 3, respectively, and being depicted in the same respective line as said Yer014w, or a functional equivalent or a homolog thereof as depicted in column 8 of Table II, application no. 3, preferably a homolog or functional equivalent as depicted in column 8 of Table II B, application no. 3, and being depicted in the same respective line as said Yer014w, and preferably the activity is increased plastidic.

[26815] Accordingly, in one embodiment, the molecule which activity is to be increased in the process of the invention is the gene product with an activity as a “yer014w-protein”, preferably it is the molecule of section (a) or (b) of this paragraph.

[26816] In particular, it was observed that in plants, especially in Arabidopsis thaliana, increasing or generating the activity of a gene product plastidic with the activity of a “yer014w-protein”, preferably being encoded by a gene comprising the nucleic acid sequence SEQ ID NO. 63745, preferably the coding region thereof, conferred the production of or the increase in serine compared with the wild type control.

[26817] The nucleic acid sequence of Yer106w from Saccharomyces cerevisiae, e.g. as shown in the respective line in column 5 of Table I, application no. 3, has been published in A. And the activity of the gene product thereof is the activity of yer106w-protein.

[26818] Accordingly, in one embodiment, the process of the present invention for producing citrulline in a non-human organism, like a microorganism or a plant or a part thereof, comprises increasing or generating the activity of a gene product with the activity of a gene product conferring the activity of “yer106w-protein”, especially from Saccharomyces cerevisiae or its functional equivalent or its homolog, e.g. the increase of
[26819] (a) a gene product of a gene comprising the nucleic acid molecule as shown in the respective line in column 5 of Table I, application no. 3, preferably the coding region thereof, or a homolog or a fragment thereof, and being depicted in the same respective line as said Yer106w, or a functional equivalent or a homolog thereof as shown in column 8 of Table I, application no. 3, preferably the coding region thereof, particularly a homolog or functional equivalent as shown in column 8 of Table I B, application no. 3, and being depicted in the same respective line as said Yer106w, and preferably the activity is increased plastidic, or
[26820] (b) a polypeptide comprising a polypeptide, a consensus sequence or at least a polypeptide motif as shown in the respective line in column 5 of Table II or in column 8 of Table IV, application no. 3, respectively, and being depicted in the same respective line as said Yer106w, or a functional equivalent or a homolog thereof as depicted in column 8 of Table II, application no. 3, preferably a homolog or functional equivalent as depicted in column 8 of Table II B, application no. 3, and being depicted in the same respective line as said Yer106w, and preferably the activity is increased plastidic.

[26821] Accordingly, in one embodiment, the molecule which activity is to be increased in the process of the invention is the gene product with an activity as a “yer106w-protein”, preferably it is the molecule of section (a) or (b) of this paragraph.

[26822] In particular, it was observed that in plants, especially in Arabidopsis thaliana, increasing or generating the activity of a gene product plastidic with the activity of a “yer106w-protein”, preferably being encoded by a gene comprising the nucleic acid sequence SEQ ID NO. 63803, preferably the coding region thereof, conferred the production of or the increase in citrulline compared with the wild type control.

[26823] The nucleic acid sequence of Yfl016c from Saccharomyces cerevisiae, e.g. as shown in the respective line in column 5 of Table I, application no. 3, has been published in A. And the activity of the gene product thereof is the activity of molecular chaperone portein.

[26824] Accordingly, in one embodiment, the process of the present invention for producing serine in a non-human organism, like a microorganism or a plant or a part thereof, comprises increasing or generating the activity of a gene product with the activity of a gene product conferring the activity of “molecular chaperone portein”, especially from Saccharomyces cerevisiae or its functional equivalent or its homolog, e.g. the increase of
[26825] (a) a gene product of a gene comprising the nucleic acid molecule as shown in the respective line in column 5 of Table I, application no. 3, preferably the coding region thereof, or a homolog or a fragment thereof, and being depicted in the same respective line as said Yfl016c, or a functional equivalent or a homolog thereof as shown in column 8 of Table I, application no. 3, preferably the coding region thereof, particularly a homolog or functional equivalent as shown in column 8 of Table I B, application no. 3, and being depicted in the same respective line as said Yfl016c, and preferably the activity is increased non-targeted, or
[26826] (b) a polypeptide comprising a polypeptide, a consensus sequence or at least a polypeptide motif as shown in the respective line in column 5 of Table II or in column 8 of Table IV, application no. 3, respectively, and being depicted in the same respective line as said Yfl016c, or a functional equivalent or a homolog thereof as depicted in column 8 of Table II, application no. 3, preferably a homolog or functional equivalent as depicted in column 8 of Table II B, application no. 3, and being depicted in the same respective line as said Yfl016c, and preferably the activity is increased non-targeted.

[26827] Accordingly, in one embodiment, the molecule which activity is to be increased in the process of the invention is the gene product with an activity as a “molecular chaperone portein”, preferably it is the molecule of section (a) or (b) of this paragraph.

[26828] In particular, it was observed that in plants, especially in Arabidopsis thaliana, increasing or generating the activity of a gene product non-targeted with the activity of a “molecular chaperone portein”, preferably being encoded by a gene comprising the nucleic acid sequence SEQ ID NO. 63807, preferably the coding region thereof, conferred the production of or the increase in serine compared with the wild type control.

[26829] The nucleic acid sequence of Yfl016c from Saccharomyces cerevisiae, e.g. as shown in the respective line in column 5 of Table I, application no. 3, has been published in A. And the activity of the gene product thereof is the activity of molecular chaperone portein.

[26830] Accordingly, in one embodiment, the process of the present invention for producing tyrosine in a non-human organism, like a microorganism or a plant or a part thereof, comprises increasing or generating the activity of a gene product with the activity of a gene product conferring the activity of “molecular chaperone portein”, especially from Saccharomyces cerevisiae or its functional equivalent or its homolog, e.g. the increase of
[26831] (a) a gene product of a gene comprising the nucleic acid molecule as shown in the respective line in column 5 of Table I, application no. 3, preferably the coding region thereof, or a homolog or a fragment thereof, and being depicted in the same respective line as said Yfl016c, or a functional equivalent or a homolog thereof as shown in column 8 of Table I, application no. 3, preferably the coding region thereof, particularly a homolog or functional equivalent as shown in column 8 of Table I B, application no. 3, and being depicted in the same respective line as said Yfl016c, and preferably the activity is increased non-targeted, or
[26832] (b) a polypeptide comprising a polypeptide, a consensus sequence or at least a polypeptide motif as shown in the respective line in column 5 of Table II or in column 8 of Table IV, application no. 3, respectively, and being depicted in the same respective line as said Yfl016c, or a functional equivalent or a homolog thereof as depicted in column 8 of Table II, application no. 3, preferably a homolog or functional equivalent as depicted in column 8 of Table II B, application no. 3, and being depicted in the same respective line as said Yfl016c, and preferably the activity is increased non-targeted.

[26833] Accordingly, in one embodiment, the molecule which activity is to be increased in the process of the invention is the gene product with an activity as a “molecular chaperone portein”, preferably it is the molecule of section (a) or (b) of this paragraph.

[26834] In particular, it was observed that in plants, especially in Arabidopsis thaliana, increasing or generating the activity of a gene product non-targeted with the activity of a “molecular chaperone portein”, preferably being encoded by a gene comprising the nucleic acid sequence SEQ ID NO. 63807, preferably the coding region thereof, conferred the production of or the increase in tyrosine compared with the wild type control.

[26835] The nucleic acid sequence of Yfl019c from Saccharomyces cerevisiae, e.g. as shown in the respective line in column 5 of Table I, application no. 3, has been published in A. And the activity of the gene product thereof is the activity of YFL019C-protein.

[26836] Accordingly, in one embodiment, the process of the present invention for producing aspartate in a non-human organism, like a microorganism or a plant or a part thereof, comprises increasing or generating the activity of a gene product with the activity of a gene product conferring the activity of “YFL019C-protein”, especially from Saccharomyces cerevisiae or its functional equivalent or its homolog, e.g. the increase of
[26837] (a) a gene product of a gene comprising the nucleic acid molecule as shown in the respective line in column 5 of Table I, application no. 3, preferably the coding region thereof, or a homolog or a fragment thereof, and being depicted in the same respective line as said Yfl019c, or a functional equivalent or a homolog thereof as shown in column 8 of Table I, application no. 3, preferably the coding region thereof, particularly a homolog or functional equivalent as shown in column 8 of Table I B, application no. 3, and being depicted in the same respective line as said Yfl019c, and preferably the activity is increased non-targeted, or
[26838] (b) a polypeptide comprising a polypeptide, a consensus sequence or at least a polypeptide motif as shown in the respective line in column 5 of Table II or in column 8 of Table IV, application no. 3, respectively, and being depicted in the same respective line as said Yfl019c, or a functional equivalent or a homolog thereof as depicted in column 8 of Table II, application no. 3, preferably a homolog or functional equivalent as depicted in column 8 of Table II B, application no. 3, and being depicted in the same respective line as said Yfl019c, and preferably the activity is increased non-targeted.

[26839] Accordingly, in one embodiment, the molecule which activity is to be increased in the process of the invention is the gene product with an activity as a “YFL019C-protein”, preferably it is the molecule of section (a) or (b) of this paragraph.

[26840] In particular, it was observed that in plants, especially in Arabidopsis thaliana, increasing or generating the activity of a gene product non-targeted with the activity of a “YFL019C-protein”, preferably being encoded by a gene comprising the nucleic acid sequence SEQ ID NO. 64144, preferably the coding region thereof, conferred the production of or the increase in aspartate compared with the wild type control.

[26841] The nucleic acid sequence of Yfl019c from Saccharomyces cerevisiae, e.g. as shown in the respective line in column 5 of Table I, application no. 3, has been published in A. And the activity of the gene product thereof is the activity of YFL019C-protein.

[26842] Accordingly, in one embodiment, the process of the present invention for producing phenylalanine in a non-human organism, like a microorganism or a plant or a part thereof, comprises increasing or generating the activity of a gene product with the activity of a gene product conferring the activity of “YFL019C-protein”, especially from Saccharomyces cerevisiae or its functional equivalent or its homolog, e.g. the increase of
[26843] (a) a gene product of a gene comprising the nucleic acid molecule as shown in the respective line in column 5 of Table I, application no. 3, preferably the coding region thereof, or a homolog or a fragment thereof, and being depicted in the same respective line as said Yfl019c, or a functional equivalent or a homolog thereof as shown in column 8 of Table I, application no. 3, preferably the coding region thereof, particularly a homolog or functional equivalent as shown in column 8 of Table I B, application no. 3, and being depicted in the same respective line as said Yfl019c, and preferably the activity is increased non-targeted, or
[26844] (b) a polypeptide comprising a polypeptide, a consensus sequence or at least a polypeptide motif as shown in the respective line in column 5 of Table II or in column 8 of Table IV, application no. 3, respectively, and being depicted in the same respective line as said Yfl019c, or a functional equivalent or a homolog thereof as depicted in column 8 of Table II, application no. 3, preferably a homolog or functional equivalent as depicted in column 8 of Table II B, application no. 3, and being depicted in the same respective line as said Yfl019c, and preferably the activity is increased non-targeted.

[26845] Accordingly, in one embodiment, the molecule which activity is to be increased in the process of the invention is the gene product with an activity as a “YFL019C-protein”, preferably it is the molecule of section (a) or (b) of this paragraph.

[26846] In particular, it was observed that in plants, especially in Arabidopsis thaliana, increasing or generating the activity of a gene product non-targeted with the activity of a “YFL019C-protein”, preferably being encoded by a gene comprising the nucleic acid sequence SEQ ID NO. 64144, preferably the coding region thereof, conferred the production of or the increase in phenylalanine compared with the wild type control.

[26847] The nucleic acid sequence of Yfl030w from Saccharomyces cerevisiae, e.g. as shown in the respective line in column 5 of Table I, application no. 3, has been published in A. And the activity of the gene product thereof is the activity of aminotransferase.

[26848] Accordingly, in one embodiment, the process of the present invention for producing alanine in a non-human organism, like a microorganism or a plant or a part thereof, comprises increasing or generating the activity of a gene product with the activity of a gene product conferring the activity of “aminotransferase”, especially from Saccharomyces cerevisiae or its functional equivalent or its homolog, e.g. the increase of
[26849] (a) a gene product of a gene comprising the nucleic acid molecule as shown in the respective line in column 5 of Table I, application no. 3, preferably the coding region thereof, or a homolog or a fragment thereof, and being depicted in the same respective line as said Yfl030w, or a functional equivalent or a homolog thereof as shown in column 8 of Table I, application no. 3, preferably the coding region thereof, particularly a homolog or functional equivalent as shown in column 8 of Table I B, application no. 3, and being depicted in the same respective line as said Yfl030w, and preferably the activity is increased plastidic, or
[26850] (b) a polypeptide comprising a polypeptide, a consensus sequence or at least a polypeptide motif as shown in the respective line in column 5 of Table II or in column 8 of Table IV, application no. 3, respectively, and being depicted in the same respective line as said Yfl030w, or a functional equivalent or a homolog thereof as depicted in column 8 of Table II, application no. 3, preferably a homolog or functional equivalent as depicted in column 8 of Table II B, application no. 3, and being depicted in the same respective line as said Yfl030w, and preferably the activity is increased plastidic.

[26851] Accordingly, in one embodiment, the molecule which activity is to be increased in the process of the invention is the gene product with an activity as a “aminotransferase”, preferably it is the molecule of section (a) or (b) of this paragraph.

[26852] In particular, it was observed that in plants, especially in Arabidopsis thaliana, increasing or generating the activity of a gene product plastidic with the activity of a “aminotransferase”, preferably being encoded by a gene comprising the nucleic acid sequence SEQ ID NO. 90189, preferably the coding region thereof, conferred the production of or the increase in alanine compared with the wild type control.

[26853] The nucleic acid sequence of Yfl030w from Saccharomyces cerevisiae, e.g. as shown in the respective line in column 5 of Table I, application no. 3, has been published in A. And the activity of the gene product thereof is the activity of aminotransferase.

[26854] Accordingly, in one embodiment, the process of the present invention for producing glycine in a non-human organism, like a microorganism or a plant or a part thereof, comprises increasing or generating the activity of a gene product with the activity of a gene product conferring the activity of “aminotransferase”, especially from Saccharomyces cerevisiae or its functional equivalent or its homolog, e.g. the increase of
[26855] (a) a gene product of a gene comprising the nucleic acid molecule as shown in the respective line in column 5 of Table I, application no. 3, preferably the coding region thereof, or a homolog or a fragment thereof, and being depicted in the same respective line as said Yfl030w, or a functional equivalent or a homolog thereof as shown in column 8 of Table I, application no. 3, preferably the coding region thereof, particularly a homolog or functional equivalent as shown in column 8 of Table I B, application no. 3, and being depicted in the same respective line as said Yfl030w, and preferably the activity is increased plastidic, or
[26856] (b) a polypeptide comprising a polypeptide, a consensus sequence or at least a polypeptide motif as shown in the respective line in column 5 of Table II or in column 8 of Table IV, application no. 3, respectively, and being depicted in the same respective line as said Yfl030w, or a functional equivalent or a homolog thereof as depicted in column 8 of Table II, application no. 3, preferably a homolog or functional equivalent as depicted in column 8 of Table II B, application no. 3, and being depicted in the same respective line as said Yfl030w, and preferably the activity is increased plastidic.

[26857] Accordingly, in one embodiment, the molecule which activity is to be increased in the process of the invention is the gene product with an activity as a “aminotransferase”, preferably it is the molecule of section (a) or (b) of this paragraph.

[26858] In particular, it was observed that in plants, especially in Arabidopsis thaliana, increasing or generating the activity of a gene product plastidic with the activity of a “aminotransferase”, preferably being encoded by a gene comprising the nucleic acid sequence SEQ ID NO. 90189, preferably the coding region thereof, conferred the production of or the increase in glycine compared with the wild type control.

[26859] The nucleic acid sequence of Yfl054c from Saccharomyces cerevisiae, e.g. as shown in the respective line in column 5 of Table I, application no. 3, has been published in A. And the activity of the gene product thereof is the activity of yfl054c-protein.

[26860] Accordingly, in one embodiment, the process of the present invention for producing phenylalanine in a non-human organism, like a microorganism or a plant or a part thereof, comprises increasing or generating the activity of a gene product with the activity of a gene product conferring the activity of “yfl054c-protein”, especially from Saccharomyces cerevisiae or its functional equivalent or its homolog, e.g. the increase of
[26861] (a) a gene product of a gene comprising the nucleic acid molecule as shown in the respective line in column 5 of Table I, application no. 3, preferably the coding region thereof, or a homolog or a fragment thereof, and being depicted in the same respective line as said Yfl054c, or a functional equivalent or a homolog thereof as shown in column 8 of Table I, application no. 3, preferably the coding region thereof, particularly a homolog or functional equivalent as shown in column 8 of Table I B, application no. 3, and being depicted in the same respective line as said Yfl054c, and preferably the activity is increased plastidic, or
[26862] (b) a polypeptide comprising a polypeptide, a consensus sequence or at least a polypeptide motif as shown in the respective line in column 5 of Table II or in column 8 of Table IV, application no. 3, respectively, and being depicted in the same respective line as said Yfl054c, or a functional equivalent or a homolog thereof as depicted in column 8 of Table II, application no. 3, preferably a homolog or functional equivalent as depicted in column 8 of Table II B, application no. 3, and being depicted in the same respective line as said Yfl054c, and preferably the activity is increased plastidic.

[26863] Accordingly, in one embodiment, the molecule which activity is to be increased in the process of the invention is the gene product with an activity as a “yfl054c-protein”, preferably it is the molecule of section (a) or (b) of this paragraph.

[26864] In particular, it was observed that in plants, especially in Arabidopsis thaliana, increasing or generating the activity of a gene product plastidic with the activity of a “yfl054c-protein”, preferably being encoded by a gene comprising the nucleic acid sequence SEQ ID NO. 64148, preferably the coding region thereof, conferred the production of or the increase in phenylalanine compared with the wild type control.

[26865] The nucleic acid sequence of Yfl054c from Saccharomyces cerevisiae, e.g. as shown in the respective line in column 5 of Table I, application no. 3, has been published in A. And the activity of the gene product thereof is the activity of yfl054c-protein.

[26866] Accordingly, in one embodiment, the process of the present invention for producing serine in a non-human organism, like a microorganism or a plant or a part thereof, comprises increasing or generating the activity of a gene product with the activity of a gene product conferring the activity of “yfl054c-protein”, especially from Saccharomyces cerevisiae or its functional equivalent or its homolog, e.g. the increase of
[26867] (a) a gene product of a gene comprising the nucleic acid molecule as shown in the respective line in column 5 of Table I, application no. 3, preferably the coding region thereof, or a homolog or a fragment thereof, and being depicted in the same respective line as said Yfl054c, or a functional equivalent or a homolog thereof as shown in column 8 of Table I, application no. 3, preferably the coding region thereof, particularly a homolog or functional equivalent as shown in column 8 of Table I B, application no. 3, and being depicted in the same respective line as said Yfl054c, and preferably the activity is increased plastidic, or
[26868] (b) a polypeptide comprising a polypeptide, a consensus sequence or at least a polypeptide motif as shown in the respective line in column 5 of Table II or in column 8 of Table IV, application no. 3, respectively, and being depicted in the same respective line as said Yfl054c, or a functional equivalent or a homolog thereof as depicted in column 8 of Table II, application no. 3, preferably a homolog or functional equivalent as depicted in column 8 of Table II B, application no. 3, and being depicted in the same respective line as said Yfl054c, and preferably the activity is increased plastidic.

[26869] Accordingly, in one embodiment, the molecule which activity is to be increased in the process of the invention is the gene product with an activity as a “yfl054c-protein”, preferably it is the molecule of section (a) or (b) of this paragraph.

[26870] In particular, it was observed that in plants, especially in Arabidopsis thaliana, increasing or generating the activity of a gene product plastidic with the activity of a “yfl054c-protein”, preferably being encoded by a gene comprising the nucleic acid sequence SEQ ID NO. 64148, preferably the coding region thereof, conferred the production of or the increase in serine compared with the wild type control.

[26871] The nucleic acid sequence of Ygl096w from Saccharomyces cerevisiae, e.g. as shown in the respective line in column 5 of Table I, application no. 3, has been published in A. And the activity of the gene product thereof is the activity of ygl096w-protein.

[26872] Accordingly, in one embodiment, the process of the present invention for producing 5-oxoproline in a non-human organism, like a microorganism or a plant or a part thereof, comprises increasing or generating the activity of a gene product with the activity of a gene product conferring the activity of “ygl096w-protein”, especially from Saccharomyces cerevisiae or its functional equivalent or its homolog, e.g. the increase of
[26873] (a) a gene product of a gene comprising the nucleic acid molecule as shown in the respective line in column 5 of Table I, application no. 3, preferably the coding region thereof, or a homolog or a fragment thereof, and being depicted in the same respective line as said Ygl096w, or a functional equivalent or a homolog thereof as shown in column 8 of Table I, application no. 3, preferably the coding region thereof, particularly a homolog or functional equivalent as shown in column 8 of Table I B, application no. 3, and being depicted in the same respective line as said Ygl096w, and preferably the activity is increased plastidic, or
[26874] (b) a polypeptide comprising a polypeptide, a consensus sequence or at least a polypeptide motif as shown in the respective line in column 5 of Table II or in column 8 of Table IV, application no. 3, respectively, and being depicted in the same respective line as said Ygl096w, or a functional equivalent or a homolog thereof as depicted in column 8 of Table II, application no. 3, preferably a homolog or functional equivalent as depicted in column 8 of Table II B, application no. 3, and being depicted in the same respective line as said Ygl096w, and preferably the activity is increased plastidic.

[26875] Accordingly, in one embodiment, the molecule which activity is to be increased in the process of the invention is the gene product with an activity as a “ygl096w-protein”, preferably it is the molecule of section (a) or (b) of this paragraph.

[26876] In particular, it was observed that in plants, especially in Arabidopsis thaliana, increasing or generating the activity of a gene product plastidic with the activity of a “ygl096w-protein”, preferably being encoded by a gene comprising the nucleic acid sequence SEQ ID NO. 90278, preferably the coding region thereof, conferred the production of or the increase in 5-oxoproline compared with the wild type control.

[26877] The nucleic acid sequence of Ygl237c from Saccharomyces cerevisiae, e.g. as shown in the respective line in column 5 of Table I, application no. 3, has been published in A. And the activity of the gene product thereof is the activity of ygl237c-protein.

[26878] Accordingly, in one embodiment, the process of the present invention for producing tyrosine in a non-human organism, like a microorganism or a plant or a part thereof, comprises increasing or generating the activity of a gene product with the activity of a gene product conferring the activity of “ygl237c-protein”, especially from Saccharomyces cerevisiae or its functional equivalent or its homolog, e.g. the increase of
[26879] (a) a gene product of a gene comprising the nucleic acid molecule as shown in the respective line in column 5 of Table I, application no. 3, preferably the coding region thereof, or a homolog or a fragment thereof, and being depicted in the same respective line as said Ygl237c, or a functional equivalent or a homolog thereof as shown in column 8 of Table I, application no. 3, preferably the coding region thereof, particularly a homolog or functional equivalent as shown in column 8 of Table I B, application no. 3, and being depicted in the same respective line as said Ygl237c, and preferably the activity is increased non-targeted, or
[26880] (b) a polypeptide comprising a polypeptide, a consensus sequence or at least a polypeptide motif as shown in the respective line in column 5 of Table II or in column 8 of Table IV, application no. 3, respectively, and being depicted in the same respective line as said Ygl237c, or a functional equivalent or a homolog thereof as depicted in column 8 of Table II, application no. 3, preferably a homolog or functional equivalent as depicted in column 8 of Table II B, application no. 3, and being depicted in the same respective line as said Ygl237c, and preferably the activity is increased non-targeted.

[26881] Accordingly, in one embodiment, the molecule which activity is to be increased in the process of the invention is the gene product with an activity as a “ygl237c-protein”, preferably it is the molecule of section (a) or (b) of this paragraph.

[26882] In particular, it was observed that in plants, especially in Arabidopsis thaliana, increasing or generating the activity of a gene product non-targeted with the activity of a “ygl237c-protein”, preferably being encoded by a gene comprising the nucleic acid sequence SEQ ID NO. 64177, preferably the coding region thereof, conferred the production of or the increase in tyrosine compared with the wild type control.

[26883] The nucleic acid sequence of Ygr221c from Saccharomyces cerevisiae, e.g. as shown in the respective line in column 5 of Table I, application no. 3, has been published in A. And the activity of the gene product thereof is the activity of ygr221 c-protein.

[26884] Accordingly, in one embodiment, the process of the present invention for producing aspartate in a non-human organism, like a microorganism or a plant or a part thereof, comprises increasing or generating the activity of a gene product with the activity of a gene product conferring the activity of “ygr221 c-protein”, especially from Saccharomyces cerevisiae or its functional equivalent or its homolog, e.g. the increase of
[26885] (a) a gene product of a gene comprising the nucleic acid molecule as shown in the respective line in column 5 of Table I, application no. 3, preferably the coding region thereof, or a homolog or a fragment thereof, and being depicted in the same respective line as said Ygr221c, or a functional equivalent or a homolog thereof as shown in column 8 of Table I, application no. 3, preferably the coding region thereof, particularly a homolog or functional equivalent as shown in column 8 of Table I B, application no. 3, and being depicted in the same respective line as said Ygr221 c, and preferably the activity is increased plastidic, or
[26886] (b) a polypeptide comprising a polypeptide, a consensus sequence or at least a polypeptide motif as shown in the respective line in column 5 of Table II or in column 8 of Table IV, application no. 3, respectively, and being depicted in the same respective line as said Ygr221c, or a functional equivalent or a homolog thereof as depicted in column 8 of Table II, application no. 3, preferably a homolog or functional equivalent as depicted in column 8 of Table II B, application no. 3, and being depicted in the same respective line as said Ygr221 c, and preferably the activity is increased plastidic.

[26887] Accordingly, in one embodiment, the molecule which activity is to be increased in the process of the invention is the gene product with an activity as a “ygr221c-protein”, preferably it is the molecule of section (a) or (b) of this paragraph.

[26888] In particular, it was observed that in plants, especially in Arabidopsis thaliana, increasing or generating the activity of a gene product plastidic with the activity of a “ygr221 c-protein”, preferably being encoded by a gene comprising the nucleic acid sequence SEQ ID NO. 64315, preferably the coding region thereof, conferred the production of or the increase in aspartate compared with the wild type control.

[26889] The nucleic acid sequence of Ygr221c from Saccharomyces cerevisiae, e.g. as shown in the respective line in column 5 of Table I, application no. 3, has been published in A. And the activity of the gene product thereof is the activity of ygr221 c-protein.

[26890] Accordingly, in one embodiment, the process of the present invention for producing 5-oxoproline in a non-human organism, like a microorganism or a plant or a part thereof, comprises increasing or generating the activity of a gene product with the activity of a gene product conferring the activity of “ygr221 c-protein”, especially from Saccharomyces cerevisiae or its functional equivalent or its homolog, e.g. the increase of
[26891] (a) a gene product of a gene comprising the nucleic acid molecule as shown in the respective line in column 5 of Table I, application no. 3, preferably the coding region thereof, or a homolog or a fragment thereof, and being depicted in the same respective line as said Ygr221c, or a functional equivalent or a homolog thereof as shown in column 8 of Table I, application no. 3, preferably the coding region thereof, particularly a homolog or functional equivalent as shown in column 8 of Table I B, application no. 3, and being depicted in the same respective line as said Ygr221 c, and preferably the activity is increased plastidic, or
[26892] (b) a polypeptide comprising a polypeptide, a consensus sequence or at least a polypeptide motif as shown in the respective line in column 5 of Table II or in column 8 of Table IV, application no. 3, respectively, and being depicted in the same respective line as said Ygr221c, or a functional equivalent or a homolog thereof as depicted in column 8 of Table II, application no. 3, preferably a homolog or functional equivalent as depicted in column 8 of Table II B, application no. 3, and being depicted in the same respective line as said Ygr221 c, and preferably the activity is increased plastidic.

[26893] Accordingly, in one embodiment, the molecule which activity is to be increased in the process of the invention is the gene product with an activity as a “ygr221c-protein”, preferably it is the molecule of section (a) or (b) of this paragraph.

[26894] In particular, it was observed that in plants, especially in Arabidopsis thaliana, increasing or generating the activity of a gene product plastidic with the activity of a “ygr221 c-protein”, preferably being encoded by a gene comprising the nucleic acid sequence SEQ ID NO. 64315, preferably the coding region thereof, conferred the production of or the increase in 5-oxoproline compared with the wild type control.

[26895] The nucleic acid sequence of Yhl013c from Saccharomyces cerevisiae, e.g. as shown in the respective line in column 5 of Table I, application no. 3, has been published in A. And the activity of the gene product thereof is the activity of yhl013c-protein.

[26896] Accordingly, in one embodiment, the process of the present invention for producing phenylalanine in a non-human organism, like a microorganism or a plant or a part thereof, comprises increasing or generating the activity of a gene product with the activity of a gene product conferring the activity of “yhl013c-protein”, especially from Saccharomyces cerevisiae or its functional equivalent or its homolog, e.g. the increase of
[26897] (a) a gene product of a gene comprising the nucleic acid molecule as shown in the respective line in column 5 of Table I, application no. 3, preferably the coding region thereof, or a homolog or a fragment thereof, and being depicted in the same respective line as said Yhl013c, or a functional equivalent or a homolog thereof as shown in column 8 of Table I, application no. 3, preferably the coding region thereof, particularly a homolog or functional equivalent as shown in column 8 of Table I B, application no. 3, and being depicted in the same respective line as said Yhl013c, and preferably the activity is increased plastidic, or
[26898] (b) a polypeptide comprising a polypeptide, a consensus sequence or at least a polypeptide motif as shown in the respective line in column 5 of Table II or in column 8 of Table IV, application no. 3, respectively, and being depicted in the same respective line as said Yhl013c, or a functional equivalent or a homolog thereof as depicted in column 8 of Table II, application no. 3, preferably a homolog or functional equivalent as depicted in column 8 of Table II B, application no. 3, and being depicted in the same respective line as said Yhl013c, and preferably the activity is increased plastidic.

[26899] Accordingly, in one embodiment, the molecule which activity is to be increased in the process of the invention is the gene product with an activity as a “yhl013c-protein”, preferably it is the molecule of section (a) or (b) of this paragraph.

[26900] In particular, it was observed that in plants, especially in Arabidopsis thaliana, increasing or generating the activity of a gene product plastidic with the activity of a “yhl013c-protein”, preferably being encoded by a gene comprising the nucleic acid sequence SEQ ID NO. 14715, preferably the coding region thereof, conferred the production of or the increase in phenylalanine compared with the wild type control.

[26901] The nucleic acid sequence of Yhr006w from Saccharomyces cerevisiae, e.g. as shown in the respective line in column 5 of Table I, application no. 3, has been published in A. And the activity of the gene product thereof is the activity of yhr006w-protein.

[26902] Accordingly, in one embodiment, the process of the present invention for producing phenylalanine in a non-human organism, like a microorganism or a plant or a part thereof, comprises increasing or generating the activity of a gene product with the activity of a gene product conferring the activity of “yhr006w-protein”, especially from Saccharomyces cerevisiae or its functional equivalent or its homolog, e.g. the increase of
[26903] (a) a gene product of a gene comprising the nucleic acid molecule as shown in the respective line in column 5 of Table I, application no. 3, preferably the coding region thereof, or a homolog or a fragment thereof, and being depicted in the same respective line as said Yhr006w, or a functional equivalent or a homolog thereof as shown in column 8 of Table I, application no. 3, preferably the coding region thereof, particularly a homolog or functional equivalent as shown in column 8 of Table I B, application no. 3, and being depicted in the same respective line as said Yhr006w, and preferably the activity is increased non-targeted, or
[26904] (b) a polypeptide comprising a polypeptide, a consensus sequence or at least a polypeptide motif as shown in the respective line in column 5 of Table II or in column 8 of Table IV, application no. 3, respectively, and being depicted in the same respective line as said Yhr006w, or a functional equivalent or a homolog thereof as depicted in column 8 of Table II, application no. 3, preferably a homolog or functional equivalent as depicted in column 8 of Table II B, application no. 3, and being depicted in the same respective line as said Yhr006w, and preferably the activity is increased non-targeted.

[26905] Accordingly, in one embodiment, the molecule which activity is to be increased in the process of the invention is the gene product with an activity as a “yhr006w-protein”, preferably it is the molecule of section (a) or (b) of this paragraph.

[26906] In particular, it was observed that in plants, especially in Arabidopsis thaliana, increasing or generating the activity of a gene product non-targeted with the activity of a “yhr006w-protein”, preferably being encoded by a gene comprising the nucleic acid sequence SEQ ID NO. 90284, preferably the coding region thereof, conferred the production of or the increase in phenylalanine compared with the wild type control.

[26907] The nucleic acid sequence of Yhr006w from Saccharomyces cerevisiae, e.g. as shown in the respective line in column 5 of Table I, application no. 3, has been published in A. And the activity of the gene product thereof is the activity of yhr006w-protein.

[26908] Accordingly, in one embodiment, the process of the present invention for producing tyrosine in a non-human organism, like a microorganism or a plant or a part thereof, comprises increasing or generating the activity of a gene product with the activity of a gene product conferring the activity of “yhr006w-protein”, especially from Saccharomyces cerevisiae or its functional equivalent or its homolog, e.g. the increase of
[26909] (a) a gene product of a gene comprising the nucleic acid molecule as shown in the respective line in column 5 of Table I, application no. 3, preferably the coding region thereof, or a homolog or a fragment thereof, and being depicted in the same respective line as said Yhr006w, or a functional equivalent or a homolog thereof as shown in column 8 of Table I, application no. 3, preferably the coding region thereof, particularly a homolog or functional equivalent as shown in column 8 of Table I B, application no. 3, and being depicted in the same respective line as said Yhr006w, and preferably the activity is increased non-targeted, or
[26910] (b) a polypeptide comprising a polypeptide, a consensus sequence or at least a polypeptide motif as shown in the respective line in column 5 of Table II or in column 8 of Table IV, application no. 3, respectively, and being depicted in the same respective line as said Yhr006w, or a functional equivalent or a homolog thereof as depicted in column 8 of Table II, application no. 3, preferably a homolog or functional equivalent as depicted in column 8 of Table II B, application no. 3, and being depicted in the same respective line as said Yhr006w, and preferably the activity is increased non-targeted.

[26911] Accordingly, in one embodiment, the molecule which activity is to be increased in the process of the invention is the gene product with an activity as a “yhr006w-protein”, preferably it is the molecule of section (a) or (b) of this paragraph.

[26912] In particular, it was observed that in plants, especially in Arabidopsis thaliana, increasing or generating the activity of a gene product non-targeted with the activity of a “yhr006w-protein”, preferably being encoded by a gene comprising the nucleic acid sequence SEQ ID NO. 90284, preferably the coding region thereof, conferred the production of or the increase in tyrosine compared with the wild type control.

[26913] The nucleic acid sequence of Yhr207c from Saccharomyces cerevisiae, e.g. as shown in the respective line in column 5 of Table I, application no. 3, has been published in A. And the activity of the gene product thereof is the activity of yhr207c-protein.

[26914] Accordingly, in one embodiment, the process of the present invention for producing aspartate in a non-human organism, like a microorganism or a plant or a part thereof, comprises increasing or generating the activity of a gene product with the activity of a gene product conferring the activity of “yhr207c-protein”, especially from Saccharomyces cerevisiae or its functional equivalent or its homolog, e.g. the increase of
[26915] (a) a gene product of a gene comprising the nucleic acid molecule as shown in the respective line in column 5 of Table I, application no. 3, preferably the coding region thereof, or a homolog or a fragment thereof, and being depicted in the same respective line as said Yhr207c, or a functional equivalent or a homolog thereof as shown in column 8 of Table I, application no. 3, preferably the coding region thereof, particularly a homolog or functional equivalent as shown in column 8 of Table I B, application no. 3, and being depicted in the same respective line as said Yhr207c, and preferably the activity is increased plastidic, or
[26916] (b) a polypeptide comprising a polypeptide, a consensus sequence or at least a polypeptide motif as shown in the respective line in column 5 of Table II or in column 8 of Table IV, application no. 3, respectively, and being depicted in the same respective line as said Yhr207c, or a functional equivalent or a homolog thereof as depicted in column 8 of Table II, application no. 3, preferably a homolog or functional equivalent as depicted in column 8 of Table II B, application no. 3, and being depicted in the same respective line as said Yhr207c, and preferably the activity is increased plastidic.

[26917] Accordingly, in one embodiment, the molecule which activity is to be increased in the process of the invention is the gene product with an activity as a “yhr207c-protein”, preferably it is the molecule of section (a) or (b) of this paragraph.

[26918] In particular, it was observed that in plants, especially in Arabidopsis thaliana, increasing or generating the activity of a gene product plastidic with the activity of a “yhr207c-protein”, preferably being encoded by a gene comprising the nucleic acid sequence SEQ ID NO. 64546, preferably the coding region thereof, conferred the production of or the increase in aspartate compared with the wild type control.

[26919] The nucleic acid sequence of Yil074c from Saccharomyces cerevisiae, e.g. as shown in the respective line in column 5 of Table I, application no. 3, has been published in A. And the activity of the gene product thereof is the activity of 3-phosphoglycerate dehydrogenase.

[26920] Accordingly, in one embodiment, the process of the present invention for producing citrulline in a non-human organism, like a microorganism or a plant or a part thereof, comprises increasing or generating the activity of a gene product with the activity of a gene product conferring the activity of “3-phosphoglycerate dehydrogenase”, especially from Saccharomyces cerevisiae or its functional equivalent or its homolog, e.g. the increase of
[26921] (a) a gene product of a gene comprising the nucleic acid molecule as shown in the respective line in column 5 of Table I, application no. 3, preferably the coding region thereof, or a homolog or a fragment thereof, and being depicted in the same respective line as said Yil074c, or a functional equivalent or a homolog thereof as shown in column 8 of Table I, application no. 3, preferably the coding region thereof, particularly a homolog or functional equivalent as shown in column 8 of Table I B, application no. 3, and being depicted in the same respective line as said Yil074c, and preferably the activity is increased plastidic, or
[26922] (b) a polypeptide comprising a polypeptide, a consensus sequence or at least a polypeptide motif as shown in the respective line in column 5 of Table II or in column 8 of Table IV, application no. 3, respectively, and being depicted in the same respective line as said Yil074c, or a functional equivalent or a homolog thereof as depicted in column 8 of Table II, application no. 3, preferably a homolog or functional equivalent as depicted in column 8 of Table II B, application no. 3, and being depicted in the same respective line as said Yil074c, and preferably the activity is increased plastidic.

[26923] Accordingly, in one embodiment, the molecule which activity is to be increased in the process of the invention is the gene product with an activity as a “3-phosphoglycerate dehydrogenase”, preferably it is the molecule of section (a) or (b) of this paragraph.

[26924] In particular, it was observed that in plants, especially in Arabidopsis thaliana, increasing or generating the activity of a gene product plastidic with the activity of a “3-phosphoglycerate dehydrogenase”, preferably being encoded by a gene comprising the nucleic acid sequence SEQ ID NO. 64563, preferably the coding region thereof, conferred the production of or the increase in citrulline compared with the wild type control.

[26925] The nucleic acid sequence of Yil074c from Saccharomyces cerevisiae, e.g. as shown in the respective line in column 5 of Table I, application no. 3, has been published in A. And the activity of the gene product thereof is the activity of 3-phosphoglycerate dehydrogenase.

[26926] Accordingly, in one embodiment, the process of the present invention for producing glycine in a non-human organism, like a microorganism or a plant or a part thereof, comprises increasing or generating the activity of a gene product with the activity of a gene product conferring the activity of “3-phosphoglycerate dehydrogenase”, especially from Saccharomyces cerevisiae or its functional equivalent or its homolog, e.g. the increase of
[26927] (a) a gene product of a gene comprising the nucleic acid molecule as shown in the respective line in column 5 of Table I, application no. 3, preferably the coding region thereof, or a homolog or a fragment thereof, and being depicted in the same respective line as said Yil074c, or a functional equivalent or a homolog thereof as shown in column 8 of Table I, application no. 3, preferably the coding region thereof, particularly a homolog or functional equivalent as shown in column 8 of Table I B, application no. 3, and being depicted in the same respective line as said Yil074c, and preferably the activity is increased plastidic, or
[26928] (b) a polypeptide comprising a polypeptide, a consensus sequence or at least a polypeptide motif as shown in the respective line in column 5 of Table II or in column 8 of Table IV, application no. 3, respectively, and being depicted in the same respective line as said Yil074c, or a functional equivalent or a homolog thereof as depicted in column 8 of Table II, application no. 3, preferably a homolog or functional equivalent as depicted in column 8 of Table II B, application no. 3, and being depicted in the same respective line as said Yil074c, and preferably the activity is increased plastidic.

[26929] Accordingly, in one embodiment, the molecule which activity is to be increased in the process of the invention is the gene product with an activity as a “3-phosphoglycerate dehydrogenase”, preferably it is the molecule of section (a) or (b) of this paragraph.

[26930] In particular, it was observed that in plants, especially in Arabidopsis thaliana, increasing or generating the activity of a gene product plastidic with the activity of a “3-phosphoglycerate dehydrogenase”, preferably being encoded by a gene comprising the nucleic acid sequence SEQ ID NO. 64563, preferably the coding region thereof, conferred the production of or the increase in glycine compared with the wild type control.

[26931] The nucleic acid sequence of Yir038c from Saccharomyces cerevisiae, e.g. as shown in the respective line in column 5 of Table I, application no. 3, has been published in A. And the activity of the gene product thereof is the activity of glutathione S-transferase.

[26932] Accordingly, in one embodiment, the process of the present invention for producing aspartate in a non-human organism, like a microorganism or a plant or a part thereof, comprises increasing or generating the activity of a gene product with the activity of a gene product conferring the activity of “glutathione S-transferase”, especially from Saccharomyces cerevisiae or its functional equivalent or its homolog, e.g. the increase of
[26933] (a) a gene product of a gene comprising the nucleic acid molecule as shown in the respective line in column 5 of Table I, application no. 3, preferably the coding region thereof, or a homolog or a fragment thereof, and being depicted in the same respective line as said Yir038c, or a functional equivalent or a homolog thereof as shown in column 8 of Table I, application no. 3, preferably the coding region thereof, particularly a homolog or functional equivalent as shown in column 8 of Table I B, application no. 3, and being depicted in the same respective line as said Yir038c, and preferably the activity is increased plastidic, or
[26934] (b) a polypeptide comprising a polypeptide, a consensus sequence or at least a polypeptide motif as shown in the respective line in column 5 of Table II or in column 8 of Table IV, application no. 3, respectively, and being depicted in the same respective line as said Yir038c, or a functional equivalent or a homolog thereof as depicted in column 8 of Table II, application no. 3, preferably a homolog or functional equivalent as depicted in column 8 of Table II B, application no. 3, and being depicted in the same respective line as said Yir038c, and preferably the activity is increased plastidic.

[26935] Accordingly, in one embodiment, the molecule which activity is to be increased in the process of the invention is the gene product with an activity as a “glutathione S-transferase”, preferably it is the molecule of section (a) or (b) of this paragraph.

[26936] In particular, it was observed that in plants, especially in Arabidopsis thaliana, increasing or generating the activity of a gene product plastidic with the activity of a “glutathione S-transferase”, preferably being encoded by a gene comprising the nucleic acid sequence SEQ ID NO. 90306, preferably the coding region thereof, conferred the production of or the increase in aspartate compared with the wild type control.

[26937] The nucleic acid sequence of Yir038c from Saccharomyces cerevisiae, e.g. as shown in the respective line in column 5 of Table I, application no. 3, has been published in A. And the activity of the gene product thereof is the activity of glutathione S-transferase.

[26938] Accordingly, in one embodiment, the process of the present invention for producing citrulline in a non-human organism, like a microorganism or a plant or a part thereof, comprises increasing or generating the activity of a gene product with the activity of a gene product conferring the activity of “glutathione S-transferase”, especially from Saccharomyces cerevisiae or its functional equivalent or its homolog, e.g. the increase of
[26939] (a) a gene product of a gene comprising the nucleic acid molecule as shown in the respective line in column 5 of Table I, application no. 3, preferably the coding region thereof, or a homolog or a fragment thereof, and being depicted in the same respective line as said Yir038c, or a functional equivalent or a homolog thereof as shown in column 8 of Table I, application no. 3, preferably the coding region thereof, particularly a homolog or functional equivalent as shown in column 8 of Table I B, application no. 3, and being depicted in the same respective line as said Yir038c, and preferably the activity is increased plastidic, or
[26940] (b) a polypeptide comprising a polypeptide, a consensus sequence or at least a polypeptide motif as shown in the respective line in column 5 of Table II or in column 8 of Table IV, application no. 3, respectively, and being depicted in the same respective line as said Yir038c, or a functional equivalent or a homolog thereof as depicted in column 8 of Table II, application no. 3, preferably a homolog or functional equivalent as depicted in column 8 of Table II B, application no. 3, and being depicted in the same respective line as said Yir038c, and preferably the activity is increased plastidic.

[26941] Accordingly, in one embodiment, the molecule which activity is to be increased in the process of the invention is the gene product with an activity as a “glutathione S-transferase”, preferably it is the molecule of section (a) or (b) of this paragraph.

[26942] In particular, it was observed that in plants, especially in Arabidopsis thaliana, increasing or generating the activity of a gene product plastidic with the activity of a “glutathione S-transferase”, preferably being encoded by a gene comprising the nucleic acid sequence SEQ ID NO. 90306, preferably the coding region thereof, conferred the production of or the increase in citrulline compared with the wild type control.

[26943] The nucleic acid sequence of Yjl073w from Saccharomyces cerevisiae, e.g. as shown in the respective line in column 5 of Table I, application no. 3, has been published in A. And the activity of the gene product thereof is the activity of DnaJ-like chaperone.

[26944] Accordingly, in one embodiment, the process of the present invention for producing aspartate in a non-human organism, like a microorganism or a plant or a part thereof, comprises increasing or generating the activity of a gene product with the activity of a gene product conferring the activity of “DnaJ-like chaperone”, especially from Saccharomyces cerevisiae or its functional equivalent or its homolog, e.g. the increase of
[26945] (a) a gene product of a gene comprising the nucleic acid molecule as shown in the respective line in column 5 of Table I, application no. 3, preferably the coding region thereof, or a homolog or a fragment thereof, and being depicted in the same respective line as said Yjl073w, or a functional equivalent or a homolog thereof as shown in column 8 of Table I, application no. 3, preferably the coding region thereof, particularly a homolog or functional equivalent as shown in column 8 of Table I B, application no. 3, and being depicted in the same respective line as said Yjl073w, and preferably the activity is increased plastidic, or
[26946] (b) a polypeptide comprising a polypeptide, a consensus sequence or at least a polypeptide motif as shown in the respective line in column 5 of Table II or in column 8 of Table IV, application no. 3, respectively, and being depicted in the same respective line as said Yj1073w, or a functional equivalent or a homolog thereof as depicted in column 8 of Table II, application no. 3, preferably a homolog or functional equivalent as depicted in column 8 of Table II B, application no. 3, and being depicted in the same respective line as said Yj1073w, and preferably the activity is increased plastidic.

[26947] Accordingly, in one embodiment, the molecule which activity is to be increased in the process of the invention is the gene product with an activity as a “DnaJ-like chaperone”, preferably it is the molecule of section (a) or (b) of this paragraph.

[26948] In particular, it was observed that in plants, especially in Arabidopsis thaliana, increasing or generating the activity of a gene product plastidic with the activity of a “DnaJ-like chaperone”, preferably being encoded by a gene comprising the nucleic acid sequence SEQ ID NO. 64964, preferably the coding region thereof, conferred the production of or the increase in aspartate compared with the wild type control.

[26949] The nucleic acid sequence of Yjr130c from Saccharomyces cerevisiae, e.g. as shown in the respective line in column 5 of Table I, application no. 3, has been published in A. And the activity of the gene product thereof is the activity of cystathionine gamma-synthase.

[26950] Accordingly, in one embodiment, the process of the present invention for producing phenylalanine in a non-human organism, like a microorganism or a plant or a part thereof, comprises increasing or generating the activity of a gene product with the activity of a gene product conferring the activity of “cystathionine gamma-synthase”, especially from Saccharomyces cerevisiae or its functional equivalent or its homolog, e.g. the increase of
[26951] (a) a gene product of a gene comprising the nucleic acid molecule as shown in the respective line in column 5 of Table I, application no. 3, preferably the coding region thereof, or a homolog or a fragment thereof, and being depicted in the same respective line as said Yjr130c, or a functional equivalent or a homolog thereof as shown in column 8 of Table I, application no. 3, preferably the coding region thereof, particularly a homolog or functional equivalent as shown in column 8 of Table I B, application no. 3, and being depicted in the same respective line as said Yjr130c, and preferably the activity is increased non-targeted, or
[26952] (b) a polypeptide comprising a polypeptide, a consensus sequence or at least a polypeptide motif as shown in the respective line in column 5 of Table II or in column 8 of Table IV, application no. 3, respectively, and being depicted in the same respective line as said Yjr130c, or a functional equivalent or a homolog thereof as depicted in column 8 of Table II, application no. 3, preferably a homolog or functional equivalent as depicted in column 8 of Table II B, application no. 3, and being depicted in the same respective line as said Yjr130c, and preferably the activity is increased non-targeted.

[26953] Accordingly, in one embodiment, the molecule which activity is to be increased in the process of the invention is the gene product with an activity as a “cystathionine gamma-synthase”, preferably it is the molecule of section (a) or (b) of this paragraph.

[26954] In particular, it was observed that in plants, especially in Arabidopsis thaliana, increasing or generating the activity of a gene product non-targeted with the activity of a “cystathionine gamma-synthase”, preferably being encoded by a gene comprising the nucleic acid sequence SEQ ID NO. 14843, preferably the coding region thereof, conferred the production of or the increase in phenylalanine compared with the wild type control.

[26955] The nucleic acid sequence of Yjr148w from Saccharomyces cerevisiae, e.g. as shown in the respective line in column 5 of Table I, application no. 3, has been published in A. And the activity of the gene product thereof is the activity of branched chain aminotransferase.

[26956] Accordingly, in one embodiment, the process of the present invention for producing citrulline in a non-human organism, like a microorganism or a plant or a part thereof, comprises increasing or generating the activity of a gene product with the activity of a gene product conferring the activity of “branched chain aminotransferase”, especially from Saccharomyces cerevisiae or its functional equivalent or its homolog, e.g. the increase of
[26957] (a) a gene product of a gene comprising the nucleic acid molecule as shown in the respective line in column 5 of Table I, application no. 3, preferably the coding region thereof, or a homolog or a fragment thereof, and being depicted in the same respective line as said Yjr148w, or a functional equivalent or a homolog thereof as shown in column 8 of Table I, application no. 3, preferably the coding region thereof, particularly a homolog or functional equivalent as shown in column 8 of Table I B, application no. 3, and being depicted in the same respective line as said Yjr148w, and preferably the activity is increased plastidic, or
[26958] (b) a polypeptide comprising a polypeptide, a consensus sequence or at least a polypeptide motif as shown in the respective line in column 5 of Table II or in column 8 of Table IV, application no. 3, respectively, and being depicted in the same respective line as said Yjr148w, or a functional equivalent or a homolog thereof as depicted in column 8 of Table II, application no. 3, preferably a homolog or functional equivalent as depicted in column 8 of Table II B, application no. 3, and being depicted in the same respective line as said Yjr148w, and preferably the activity is increased plastidic.

[26959] Accordingly, in one embodiment, the molecule which activity is to be increased in the process of the invention is the gene product with an activity as a “branched chain aminotransferase”, preferably it is the molecule of section (a) or (b) of this paragraph.

[26960] In particular, it was observed that in plants, especially in Arabidopsis thaliana, increasing or generating the activity of a gene product plastidic with the activity of a “branched chain aminotransferase”, preferably being encoded by a gene comprising the nucleic acid sequence SEQ ID NO. 90409, preferably the coding region thereof, conferred the production of or the increase in citrulline compared with the wild type control.

[26961] The nucleic acid sequence of Yjr153w from Saccharomyces cerevisiae, e.g. as shown in the respective line in column 5 of Table I, application no. 3, has been published in A. And the activity of the gene product thereof is the activity of polygalacturonase.

[26962] Accordingly, in one embodiment, the process of the present invention for producing aspartate in a non-human organism, like a microorganism or a plant or a part thereof, comprises increasing or generating the activity of a gene product with the activity of a gene product conferring the activity of “polygalacturonase”, especially from Saccharomyces cerevisiae or its functional equivalent or its homolog, e.g. the increase of
[26963] (a) a gene product of a gene comprising the nucleic acid molecule as shown in the respective line in column 5 of Table I, application no. 3, preferably the coding region thereof, or a homolog or a fragment thereof, and being depicted in the same respective line as said Yjr153w, or a functional equivalent or a homolog thereof as shown in column 8 of Table I, application no. 3, preferably the coding region thereof, particularly a homolog or functional equivalent as shown in column 8 of Table I B, application no. 3, and being depicted in the same respective line as said Yjr153w, and preferably the activity is increased non-targeted, or
[26964] (b) a polypeptide comprising a polypeptide, a consensus sequence or at least a polypeptide motif as shown in the respective line in column 5 of Table II or in column 8 of Table IV, application no. 3, respectively, and being depicted in the same respective line as said Yjr153w, or a functional equivalent or a homolog thereof as depicted in column 8 of Table II, application no. 3, preferably a homolog or functional equivalent as depicted in column 8 of Table II B, application no. 3, and being depicted in the same respective line as said Yjr153w, and preferably the activity is increased non-targeted.

[26965] Accordingly, in one embodiment, the molecule which activity is to be increased in the process of the invention is the gene product with an activity as a “polygalacturonase”, preferably it is the molecule of section (a) or (b) of this paragraph.

[26966] In particular, it was observed that in plants, especially in Arabidopsis thaliana, increasing or generating the activity of a gene product non-targeted with the activity of a “polygalacturonase”, preferably being encoded by a gene comprising the nucleic acid sequence SEQ ID NO. 66274, preferably the coding region thereof, conferred the production of or the increase in aspartate compared with the wild type control.

[26967] The nucleic acid sequence of Yjr153w from Saccharomyces cerevisiae, e.g. as shown in the respective line in column 5 of Table I, application no. 3, has been published in A. And the activity of the gene product thereof is the activity of polygalacturonase.

[26968] Accordingly, in one embodiment, the process of the present invention for producing phenylalanine in a non-human organism, like a microorganism or a plant or a part thereof, comprises increasing or generating the activity of a gene product with the activity of a gene product conferring the activity of “polygalacturonase”, especially from Saccharomyces cerevisiae or its functional equivalent or its homolog, e.g. the increase of
[26969] (a) a gene product of a gene comprising the nucleic acid molecule as shown in the respective line in column 5 of Table I, application no. 3, preferably the coding region thereof, or a homolog or a fragment thereof, and being depicted in the same respective line as said Yjr153w, or a functional equivalent or a homolog thereof as shown in column 8 of Table I, application no. 3, preferably the coding region thereof, particularly a homolog or functional equivalent as shown in column 8 of Table I B, application no. 3, and being depicted in the same respective line as said Yjr153w, and preferably the activity is increased non-targeted, or
[26970] (b) a polypeptide comprising a polypeptide, a consensus sequence or at least a polypeptide motif as shown in the respective line in column 5 of Table II or in column 8 of Table IV, application no. 3, respectively, and being depicted in the same respective line as said Yjr153w, or a functional equivalent or a homolog thereof as depicted in column 8 of Table II, application no. 3, preferably a homolog or functional equivalent as depicted in column 8 of Table II B, application no. 3, and being depicted in the same respective line as said Yjr153w, and preferably the activity is increased non-targeted.

[26971] Accordingly, in one embodiment, the molecule which activity is to be increased in the process of the invention is the gene product with an activity as a “polygalacturonase”, preferably it is the molecule of section (a) or (b) of this paragraph.

[26972] In particular, it was observed that in plants, especially in Arabidopsis thaliana, increasing or generating the activity of a gene product non-targeted with the activity of a “polygalacturonase”, preferably being encoded by a gene comprising the nucleic acid sequence SEQ ID NO. 66274, preferably the coding region thereof, conferred the production of or the increase in phenylalanine compared with the wild type control.

[26973] The nucleic acid sequence of YKL038W from SACCHAROMYCES CEREVISIAE, e.g. as shown in the respective line in column 5 of Table I, application no. 3, has been published in A. And the activity of the gene product thereof is the activity of YKL038W-protein.

[26974] Accordingly, in one embodiment, the process of the present invention for producing alanine in a non-human organism, like a microorganism or a plant or a part thereof, comprises increasing or generating the activity of a gene product with the activity of a gene product conferring the activity of “YKL038W-protein”, especially from SACCHAROMYCES CEREVISIAE or its functional equivalent or its homolog, e.g. the increase of
[26975] (a) a gene product of a gene comprising the nucleic acid molecule as shown in the respective line in column 5 of Table I, application no. 3, preferably the coding region thereof, or a homolog or a fragment thereof, and being depicted in the same respective line as said YKL038W, or a functional equivalent or a homolog thereof as shown in column 8 of Table I, application no. 3, preferably the coding region thereof, particularly a homolog or functional equivalent as shown in column 8 of Table I B, application no. 3, and being depicted in the same respective line as said YKL038W, and preferably the activity is increased plastidic, or
[26976] (b) a polypeptide comprising a polypeptide, a consensus sequence or at least a polypeptide motif as shown in the respective line in column 5 of Table II or in column 8 of Table IV, application no. 3, respectively, and being depicted in the same respective line as said YKL038W, or a functional equivalent or a homolog thereof as depicted in column 8 of Table II, application no. 3, preferably a homolog or functional equivalent as depicted in column 8 of Table II B, application no. 3, and being depicted in the same respective line as said YKL038W, and preferably the activity is increased plastidic.

[26977] Accordingly, in one embodiment, the molecule which activity is to be increased in the process of the invention is the gene product with an activity as a “YKL038W-protein”, preferably it is the molecule of section (a) or (b) of this paragraph.

[26978] In particular, it was observed that in plants, especially in Arabidopsis thaliana, increasing or generating the activity of a gene product plastidic with the activity of a “YKL038W-protein”, preferably being encoded by a gene comprising the nucleic acid sequence SEQ ID NO. 90602, preferably the coding region thereof, conferred the production of or the increase in alanine compared with the wild type control.

[26979] The nucleic acid sequence of YKL038W from SACCHAROMYCES CEREVISIAE, e.g. as shown in the respective line in column 5 of Table I, application no. 3, has been published in A. And the activity of the gene product thereof is the activity of YKL038W-protein.

[26980] Accordingly, in one embodiment, the process of the present invention for producing aspartate in a non-human organism, like a microorganism or a plant or a part thereof, comprises increasing or generating the activity of a gene product with the activity of a gene product conferring the activity of “YKL038W-protein”, especially from SACCHAROMYCES CEREVISIAE or its functional equivalent or its homolog, e.g. the increase of
[26981] (a) a gene product of a gene comprising the nucleic acid molecule as shown in the respective line in column 5 of Table I, application no. 3, preferably the coding region thereof, or a homolog or a fragment thereof, and being depicted in the same respective line as said YKL038W, or a functional equivalent or a homolog thereof as shown in column 8 of Table I, application no. 3, preferably the coding region thereof, particularly a homolog or functional equivalent as shown in column 8 of Table I B, application no. 3, and being depicted in the same respective line as said YKL038W, and preferably the activity is increased plastidic, or
[26982] (b) a polypeptide comprising a polypeptide, a consensus sequence or at least a polypeptide motif as shown in the respective line in column 5 of Table II or in column 8 of Table IV, application no. 3, respectively, and being depicted in the same respective line as said YKL038W, or a functional equivalent or a homolog thereof as depicted in column 8 of Table II, application no. 3, preferably a homolog or functional equivalent as depicted in column 8 of Table II B, application no. 3, and being depicted in the same respective line as said YKL038W, and preferably the activity is increased plastidic.

[26983] Accordingly, in one embodiment, the molecule which activity is to be increased in the process of the invention is the gene product with an activity as a “YKL038W-protein”, preferably it is the molecule of section (a) or (b) of this paragraph.

[26984] In particular, it was observed that in plants, especially in Arabidopsis thaliana, increasing or generating the activity of a gene product plastidic with the activity of a “YKL038W-protein”, preferably being encoded by a gene comprising the nucleic acid sequence SEQ ID NO. 90602, preferably the coding region thereof, conferred the production of or the increase in aspartate compared with the wild type control.

[26985] The nucleic acid sequence of YKL038W from SACCHAROMYCES CEREVISIAE, e.g. as shown in the respective line in column 5 of Table I, application no. 3, has been published in A. And the activity of the gene product thereof is the activity of YKL038W-protein.

[26986] Accordingly, in one embodiment, the process of the present invention for producing serine in a non-human organism, like a microorganism or a plant or a part thereof, comprises increasing or generating the activity of a gene product with the activity of a gene product conferring the activity of “YKL038W-protein”, especially from SACCHAROMYCES CEREVISIAE or its functional equivalent or its homolog, e.g. the increase of
[26987] (a) a gene product of a gene comprising the nucleic acid molecule as shown in the respective line in column 5 of Table I, application no. 3, preferably the coding region thereof, or a homolog or a fragment thereof, and being depicted in the same respective line as said YKL038W, or a functional equivalent or a homolog thereof as shown in column 8 of Table I, application no. 3, preferably the coding region thereof, particularly a homolog or functional equivalent as shown in column 8 of Table I B, application no. 3, and being depicted in the same respective line as said YKL038W, and preferably the activity is increased plastidic, or
[26988] (b) a polypeptide comprising a polypeptide, a consensus sequence or at least a polypeptide motif as shown in the respective line in column 5 of Table II or in column 8 of Table IV, application no. 3, respectively, and being depicted in the same respective line as said YKL038W, or a functional equivalent or a homolog thereof as depicted in column 8 of Table II, application no. 3, preferably a homolog or functional equivalent as depicted in column 8 of Table II B, application no. 3, and being depicted in the same respective line as said YKL038W, and preferably the activity is increased plastidic.

[26989] Accordingly, in one embodiment, the molecule which activity is to be increased in the process of the invention is the gene product with an activity as a “YKL038W-protein”, preferably it is the molecule of section (a) or (b) of this paragraph.

[26990] In particular, it was observed that in plants, especially in Arabidopsis thaliana, increasing or generating the activity of a gene product plastidic with the activity of a “YKL038W-protein”, preferably being encoded by a gene comprising the nucleic acid sequence SEQ ID NO. 90602, preferably the coding region thereof, conferred the production of or the increase in serine compared with the wild type control.

[26991] The nucleic acid sequence of Ylr027c from Saccharomyces cerevisiae, e.g. as shown in the respective line in column 5 of Table I, application no. 3, has been published in A. And the activity of the gene product thereof is the activity of aspartate aminotransferase.

[26992] Accordingly, in one embodiment, the process of the present invention for producing glycine in a non-human organism, like a microorganism or a plant or a part thereof, comprises increasing or generating the activity of a gene product with the activity of a gene product conferring the activity of “aspartate aminotransferase”, especially from Saccharomyces cerevisiae or its functional equivalent or its homolog, e.g. the increase of
[26993] (a) a gene product of a gene comprising the nucleic acid molecule as shown in the respective line in column 5 of Table I, application no. 3, preferably the coding region thereof, or a homolog or a fragment thereof, and being depicted in the same respective line as said Ylr027c, or a functional equivalent or a homolog thereof as shown in column 8 of Table I, application no. 3, preferably the coding region thereof, particularly a homolog or functional equivalent as shown in column 8 of Table I B, application no. 3, and being depicted in the same respective line as said Ylr027c, and preferably the activity is increased non-targeted, or
[26994] (b) a polypeptide comprising a polypeptide, a consensus sequence or at least a polypeptide motif as shown in the respective line in column 5 of Table II or in column 8 of Table IV, application no. 3, respectively, and being depicted in the same respective line as said Ylr027c, or a functional equivalent or a homolog thereof as depicted in column 8 of Table II, application no. 3, preferably a homolog or functional equivalent as depicted in column 8 of Table II B, application no. 3, and being depicted in the same respective line as said Ylr027c, and preferably the activity is increased non-targeted.

[26995] Accordingly, in one embodiment, the molecule which activity is to be increased in the process of the invention is the gene product with an activity as a “aspartate aminotransferase”, preferably it is the molecule of section (a) or (b) of this paragraph.

[26996] In particular, it was observed that in plants, especially in Arabidopsis thaliana, increasing or generating the activity of a gene product non-targeted with the activity of a “aspartate aminotransferase”, preferably being encoded by a gene comprising the nucleic acid sequence SEQ ID NO. 90615, preferably the coding region thereof, conferred the production of or the increase in glycine compared with the wild type control.

[26997] The nucleic acid sequence of Ylr043c from Saccharomyces cerevisiae, e.g. as shown in the respective line in column 5 of Table I, application no. 3, has been published in A. And the activity of the gene product thereof is the activity of thioredoxin.

[26998] Accordingly, in one embodiment, the process of the present invention for producing serine in a non-human organism, like a microorganism or a plant or a part thereof, comprises increasing or generating the activity of a gene product with the activity of a gene product conferring the activity of “thioredoxin”, especially from Saccharomyces cerevisiae or its functional equivalent or its homolog, e.g. the increase of
[26999] (a) a gene product of a gene comprising the nucleic acid molecule as shown in the respective line in column 5 of Table I, application no. 3, preferably the coding region thereof, or a homolog or a fragment thereof, and being depicted in the same respective line as said Ylr043c, or a functional equivalent or a homolog thereof as shown in column 8 of Table I, application no. 3, preferably the coding region thereof, particularly a homolog or functional equivalent as shown in column 8 of Table I B, application no. 3, and being depicted in the same respective line as said Ylr043c, and preferably the activity is increased plastidic, or
[27000] (b) a polypeptide comprising a polypeptide, a consensus sequence or at least a polypeptide motif as shown in the respective line in column 5 of Table II or in column 8 of Table IV, application no. 3, respectively, and being depicted in the same respective line as said Ylr043c, or a functional equivalent or a homolog thereof as depicted in column 8 of Table II, application no. 3, preferably a homolog or functional equivalent as depicted in column 8 of Table II B, application no. 3, and being depicted in the same respective line as said Ylr043c, and preferably the activity is increased plastidic.

[27001] Accordingly, in one embodiment, the molecule which activity is to be increased in the process of the invention is the gene product with an activity as a “thioredoxin”, preferably it is the molecule of section (a) or (b) of this paragraph.

[27002] In particular, it was observed that in plants, especially in Arabidopsis thaliana, increasing or generating the activity of a gene product plastidic with the activity of a “thioredoxin”, preferably being encoded by a gene comprising the nucleic acid sequence SEQ ID NO. 91045, preferably the coding region thereof, conferred the production of or the increase in serine compared with the wild type control.

[27003] The nucleic acid sequence of Ylr043c from Saccharomyces cerevisiae, e.g. as shown in the respective line in column 5 of Table I, application no. 3, has been published in A. And the activity of the gene product thereof is the activity of thioredoxin.

[27004] Accordingly, in one embodiment, the process of the present invention for producing tyrosine in a non-human organism, like a microorganism or a plant or a part thereof, comprises increasing or generating the activity of a gene product with the activity of a gene product conferring the activity of “thioredoxin”, especially from Saccharomyces cerevisiae or its functional equivalent or its homolog, e.g. the increase of
[27005] (a) a gene product of a gene comprising the nucleic acid molecule as shown in the respective line in column 5 of Table I, application no. 3, preferably the coding region thereof, or a homolog or a fragment thereof, and being depicted in the same respective line as said Ylr043c, or a functional equivalent or a homolog thereof as shown in column 8 of Table I, application no. 3, preferably the coding region thereof, particularly a homolog or functional equivalent as shown in column 8 of Table I B, application no. 3, and being depicted in the same respective line as said Ylr043c, and preferably the activity is increased plastidic, or
[27006] (b) a polypeptide comprising a polypeptide, a consensus sequence or at least a polypeptide motif as shown in the respective line in column 5 of Table II or in column 8 of Table IV, application no. 3, respectively, and being depicted in the same respective line as said Ylr043c, or a functional equivalent or a homolog thereof as depicted in column 8 of Table II, application no. 3, preferably a homolog or functional equivalent as depicted in column 8 of Table II B, application no. 3, and being depicted in the same respective line as said Ylr043c, and preferably the activity is increased plastidic.

[27007] Accordingly, in one embodiment, the molecule which activity is to be increased in the process of the invention is the gene product with an activity as a “thioredoxin”, preferably it is the molecule of section (a) or (b) of this paragraph.

[27008] In particular, it was observed that in plants, especially in Arabidopsis thaliana, increasing or generating the activity of a gene product plastidic with the activity of a “thioredoxin”, preferably being encoded by a gene comprising the nucleic acid sequence SEQ ID NO. 91045, preferably the coding region thereof, conferred the production of or the increase in tyrosine compared with the wild type control.

[27009] The nucleic acid sequence of Yml008c from Saccharomyces cerevisiae, e.g. as shown in the respective line in column 5 of Table I, application no. 3, has been published in A. And the activity of the gene product thereof is the activity of sterol 24-C-methyltransferase.

[27010] Accordingly, in one embodiment, the process of the present invention for producing alanine in a non-human organism, like a microorganism or a plant or a part thereof, comprises increasing or generating the activity of a gene product with the activity of a gene product conferring the activity of “sterol 24-C-methyltransferase”, especially from Saccharomyces cerevisiae or its functional equivalent or its homolog, e.g. the increase of
[27011] (a) a gene product of a gene comprising the nucleic acid molecule as shown in the respective line in column 5 of Table I, application no. 3, preferably the coding region thereof, or a homolog or a fragment thereof, and being depicted in the same respective line as said Yml008c, or a functional equivalent or a homolog thereof as shown in column 8 of Table I, application no. 3, preferably the coding region thereof, particularly a homolog or functional equivalent as shown in column 8 of Table I B, application no. 3, and being depicted in the same respective line as said Yml008c, and preferably the activity is increased plastidic, or
[27012] (b) a polypeptide comprising a polypeptide, a consensus sequence or at least a polypeptide motif as shown in the respective line in column 5 of Table II or in column 8 of Table IV, application no. 3, respectively, and being depicted in the same respective line as said Yml008c, or a functional equivalent or a homolog thereof as depicted in column 8 of Table II, application no. 3, preferably a homolog or functional equivalent as depicted in column 8 of Table II B, application no. 3, and being depicted in the same respective line as said Yml008c, and preferably the activity is increased plastidic.

[27013] Accordingly, in one embodiment, the molecule which activity is to be increased in the process of the invention is the gene product with an activity as a “sterol 24-C-methyltransferase”, preferably it is the molecule of section (a) or (b) of this paragraph.

[27014] In particular, it was observed that in plants, especially in Arabidopsis thaliana, increasing or generating the activity of a gene product plastidic with the activity of a “sterol 24-C-methyltransferase”, preferably being encoded by a gene comprising the nucleic acid sequence SEQ ID NO. 91659, preferably the coding region thereof, conferred the production of or the increase in alanine compared with the wild type control.

[27015] The nucleic acid sequence of Yml008c from Saccharomyces cerevisiae, e.g. as shown in the respective line in column 5 of Table I, application no. 3, has been published in A. And the activity of the gene product thereof is the activity of sterol 24-C-methyltransferase.

[27016] Accordingly, in one embodiment, the process of the present invention for producing glycine in a non-human organism, like a microorganism or a plant or a part thereof, comprises increasing or generating the activity of a gene product with the activity of a gene product conferring the activity of “sterol 24-C-methyltransferase”, especially from Saccharomyces cerevisiae or its functional equivalent or its homolog, e.g. the increase of
[27017] (a) a gene product of a gene comprising the nucleic acid molecule as shown in the respective line in column 5 of Table I, application no. 3, preferably the coding region thereof, or a homolog or a fragment thereof, and being depicted in the same respective line as said Yml008c, or a functional equivalent or a homolog thereof as shown in column 8 of Table I, application no. 3, preferably the coding region thereof, particularly a homolog or functional equivalent as shown in column 8 of Table I B, application no. 3, and being depicted in the same respective line as said Yml008c, and preferably the activity is increased plastidic, or
[27018] (b) a polypeptide comprising a polypeptide, a consensus sequence or at least a polypeptide motif as shown in the respective line in column 5 of Table II or in column 8 of Table IV, application no. 3, respectively, and being depicted in the same respective line as said Yml008c, or a functional equivalent or a homolog thereof as depicted in column 8 of Table II, application no. 3, preferably a homolog or functional equivalent as depicted in column 8 of Table II B, application no. 3, and being depicted in the same respective line as said Yml008c, and preferably the activity is increased plastidic.

[27019] Accordingly, in one embodiment, the molecule which activity is to be increased in the process of the invention is the gene product with an activity as a “sterol 24-C-methyltransferase”, preferably it is the molecule of section (a) or (b) of this paragraph.

[27020] In particular, it was observed that in plants, especially in Arabidopsis thaliana, increasing or generating the activity of a gene product plastidic with the activity of a “sterol 24-C-methyltransferase”, preferably being encoded by a gene comprising the nucleic acid sequence SEQ ID NO. 91659, preferably the coding region thereof, conferred the production of or the increase in glycine compared with the wild type control.

[27021] The nucleic acid sequence of Yml008c from Saccharomyces cerevisiae, e.g. as shown in the respective line in column 5 of Table I, application no. 3, has been published in A. And the activity of the gene product thereof is the activity of sterol 24-C-methyltransferase.

[27022] Accordingly, in one embodiment, the process of the present invention for producing homoserine in a non-human organism, like a microorganism or a plant or a part thereof, comprises increasing or generating the activity of a gene product with the activity of a gene product conferring the activity of “sterol 24-C-methyltransferase”, especially from Saccharomyces cerevisiae or its functional equivalent or its homolog, e.g. the increase of
[27023] (a) a gene product of a gene comprising the nucleic acid molecule as shown in the respective line in column 5 of Table I, application no. 3, preferably the coding region thereof, or a homolog or a fragment thereof, and being depicted in the same respective line as said Yml008c, or a functional equivalent or a homolog thereof as shown in column 8 of Table I, application no. 3, preferably the coding region thereof, particularly a homolog or functional equivalent as shown in column 8 of Table I B, application no. 3, and being depicted in the same respective line as said Yml008c, and preferably the activity is increased plastidic, or
[27024] (b) a polypeptide comprising a polypeptide, a consensus sequence or at least a polypeptide motif as shown in the respective line in column 5 of Table II or in column 8 of Table IV, application no. 3, respectively, and being depicted in the same respective line as said Yml008c, or a functional equivalent or a homolog thereof as depicted in column 8 of Table II, application no. 3, preferably a homolog or functional equivalent as depicted in column 8 of Table II B, application no. 3, and being depicted in the same respective line as said Yml008c, and preferably the activity is increased plastidic.

[27025] Accordingly, in one embodiment, the molecule which activity is to be increased in the process of the invention is the gene product with an activity as a “sterol 24-C-methyltransferase”, preferably it is the molecule of section (a) or (b) of this paragraph.

[27026] In particular, it was observed that in plants, especially in Arabidopsis thaliana, increasing or generating the activity of a gene product plastidic with the activity of a “sterol 24-C-methyltransferase”, preferably being encoded by a gene comprising the nucleic acid sequence SEQ ID NO. 91659, preferably the coding region thereof, conferred the production of or the increase in homoserine compared with the wild type control.

[27027] The nucleic acid sequence of Yml008c from Saccharomyces cerevisiae, e.g. as shown in the respective line in column 5 of Table I, application no. 3, has been published in A. And the activity of the gene product thereof is the activity of sterol 24-C-methyltransferase.

[27028] Accordingly, in one embodiment, the process of the present invention for producing 5-oxoproline in a non-human organism, like a microorganism or a plant or a part thereof, comprises increasing or generating the activity of a gene product with the activity of a gene product conferring the activity of “sterol 24-C-methyltransferase”, especially from Saccharomyces cerevisiae or its functional equivalent or its homolog, e.g. the increase of
[27029] (a) a gene product of a gene comprising the nucleic acid molecule as shown in the respective line in column 5 of Table I, application no. 3, preferably the coding region thereof, or a homolog or a fragment thereof, and being depicted in the same respective line as said Yml008c, or a functional equivalent or a homolog thereof as shown in column 8 of Table I, application no. 3, preferably the coding region thereof, particularly a homolog or functional equivalent as shown in column 8 of Table I B, application no. 3, and being depicted in the same respective line as said Yml008c, and preferably the activity is increased plastidic, or
[27030] (b) a polypeptide comprising a polypeptide, a consensus sequence or at least a polypeptide motif as shown in the respective line in column 5 of Table II or in column 8 of Table IV, application no. 3, respectively, and being depicted in the same respective line as said Yml008c, or a functional equivalent or a homolog thereof as depicted in column 8 of Table II, application no. 3, preferably a homolog or functional equivalent as depicted in column 8 of Table II B, application no. 3, and being depicted in the same respective line as said Yml008c, and preferably the activity is increased plastidic.

[27031] Accordingly, in one embodiment, the molecule which activity is to be increased in the process of the invention is the gene product with an activity as a “sterol 24-C-methyltransferase”, preferably it is the molecule of section (a) or (b) of this paragraph.

[27032] In particular, it was observed that in plants, especially in Arabidopsis thaliana, increasing or generating the activity of a gene product plastidic with the activity of a “sterol 24-C-methyltransferase”, preferably being encoded by a gene comprising the nucleic acid sequence SEQ ID NO. 91659, preferably the coding region thereof, conferred the production of or the increase in 5-oxoproline compared with the wild type control.

[27033] The nucleic acid sequence of Yml083c from Saccharomyces cerevisiae, e.g. as shown in the respective line in column 5 of Table I, application no. 3, has been published in A. And the activity of the gene product thereof is the activity of yml083c-protein.

[27034] Accordingly, in one embodiment, the process of the present invention for producing alanine in a non-human organism, like a microorganism or a plant or a part thereof, comprises increasing or generating the activity of a gene product with the activity of a gene product conferring the activity of “yml083c-protein”, especially from Saccharomyces cerevisiae or its functional equivalent or its homolog, e.g. the increase of
[27035] (a) a gene product of a gene comprising the nucleic acid molecule as shown in the respective line in column 5 of Table I, application no. 3, preferably the coding region thereof, or a homolog or a fragment thereof, and being depicted in the same respective line as said Yml083c, or a functional equivalent or a homolog thereof as shown in column 8 of Table I, application no. 3, preferably the coding region thereof, particularly a homolog or functional equivalent as shown in column 8 of Table I B, application no. 3, and being depicted in the same respective line as said Yml083c, and preferably the activity is increased plastidic, or
[27036] (b) a polypeptide comprising a polypeptide, a consensus sequence or at least a polypeptide motif as shown in the respective line in column 5 of Table II or in column 8 of Table IV, application no. 3, respectively, and being depicted in the same respective line as said Yml083c, or a functional equivalent or a homolog thereof as depicted in column 8 of Table II, application no. 3, preferably a homolog or functional equivalent as depicted in column 8 of Table II B, application no. 3, and being depicted in the same respective line as said Yml083c, and preferably the activity is increased plastidic.

[27037] Accordingly, in one embodiment, the molecule which activity is to be increased in the process of the invention is the gene product with an activity as a “yml083c-protein”, preferably it is the molecule of section (a) or (b) of this paragraph.

[27038] In particular, it was observed that in plants, especially in Arabidopsis thaliana, increasing or generating the activity of a gene product plastidic with the activity of a “yml083c-protein”, preferably being encoded by a gene comprising the nucleic acid sequence SEQ ID NO. 91781, preferably the coding region thereof, conferred the production of or the increase in alanine compared with the wild type control.

[27039] The nucleic acid sequence of Yml123c from Saccharomyces cerevisiae, e.g. as shown in the respective line in column 5 of Table I, application no. 3, has been published in A. And the activity of the gene product thereof is the activity of phosphate transporter.

[27040] Accordingly, in one embodiment, the process of the present invention for producing phenylalanine in a non-human organism, like a microorganism or a plant or a part thereof, comprises increasing or generating the activity of a gene product with the activity of a gene product conferring the activity of “phosphate transporter”, especially from Saccharomyces cerevisiae or its functional equivalent or its homolog, e.g. the increase of
[27041] (a) a gene product of a gene comprising the nucleic acid molecule as shown in the respective line in column 5 of Table I, application no. 3, preferably the coding region thereof, or a homolog or a fragment thereof, and being depicted in the same respective line as said Yml123c, or a functional equivalent or a homolog thereof as shown in column 8 of Table I, application no. 3, preferably the coding region thereof, particularly a homolog or functional equivalent as shown in column 8 of Table I B, application no. 3, and being depicted in the same respective line as said Yml123c, and preferably the activity is increased plastidic, or
[27042] (b) a polypeptide comprising a polypeptide, a consensus sequence or at least a polypeptide motif as shown in the respective line in column 5 of Table II or in column 8 of Table IV, application no. 3, respectively, and being depicted in the same respective line as said Yml123c, or a functional equivalent or a homolog thereof as depicted in column 8 of Table II, application no. 3, preferably a homolog or functional equivalent as depicted in column 8 of Table II B, application no. 3, and being depicted in the same respective line as said Yml123c, and preferably the activity is increased plastidic.

[27043] Accordingly, in one embodiment, the molecule which activity is to be increased in the process of the invention is the gene product with an activity as a “phosphate transporter”, preferably it is the molecule of section (a) or (b) of this paragraph.

[27044] In particular, it was observed that in plants, especially in Arabidopsis thaliana, increasing or generating the activity of a gene product plastidic with the activity of a “phosphate transporter”, preferably being encoded by a gene comprising the nucleic acid sequence SEQ ID NO. 91785, preferably the coding region thereof, conferred the production of or the increase in phenylalanine compared with the wild type control.

[27045] The nucleic acid sequence of Yml123c from Saccharomyces cerevisiae, e.g. as shown in the respective line in column 5 of Table I, application no. 3, has been published in A. And the activity of the gene product thereof is the activity of phosphate transporter.

[27046] Accordingly, in one embodiment, the process of the present invention for producing tyrosine in a non-human organism, like a microorganism or a plant or a part thereof, comprises increasing or generating the activity of a gene product with the activity of a gene product conferring the activity of “phosphate transporter”, especially from Saccharomyces cerevisiae or its functional equivalent or its homolog, e.g. the increase of
[27047] (a) a gene product of a gene comprising the nucleic acid molecule as shown in the respective line in column 5 of Table I, application no. 3, preferably the coding region thereof, or a homolog or a fragment thereof, and being depicted in the same respective line as said Yml123c, or a functional equivalent or a homolog thereof as shown in column 8 of Table I, application no. 3, preferably the coding region thereof, particularly a homolog or functional equivalent as shown in column 8 of Table I B, application no. 3, and being depicted in the same respective line as said Yml123c, and preferably the activity is increased plastidic, or
[27048] (b) a polypeptide comprising a polypeptide, a consensus sequence or at least a polypeptide motif as shown in the respective line in column 5 of Table II or in column 8 of Table IV, application no. 3, respectively, and being depicted in the same respective line as said Yml123c, or a functional equivalent or a homolog thereof as depicted in column 8 of Table II, application no. 3, preferably a homolog or functional equivalent as depicted in column 8 of Table II B, application no. 3, and being depicted in the same respective line as said Yml123c, and preferably the activity is increased plastidic.

[27049] Accordingly, in one embodiment, the molecule which activity is to be increased in the process of the invention is the gene product with an activity as a “phosphate transporter”, preferably it is the molecule of section (a) or (b) of this paragraph.

[27050] In particular, it was observed that in plants, especially in Arabidopsis thaliana, increasing or generating the activity of a gene product plastidic with the activity of a “phosphate transporter”, preferably being encoded by a gene comprising the nucleic acid sequence SEQ ID NO. 91785, preferably the coding region thereof, conferred the production of or the increase in tyrosine compared with the wild type control.

[27051] The nucleic acid sequence of Ymr013c from Saccharomyces cerevisiae, e.g. as shown in the respective line in column 5 of Table I, application no. 3, has been published in A. And the activity of the gene product thereof is the activity of ymr013c-protein.

[27052] Accordingly, in one embodiment, the process of the present invention for producing tyrosine in a non-human organism, like a microorganism or a plant or a part thereof, comprises increasing or generating the activity of a gene product with the activity of a gene product conferring the activity of “ymr013c-protein”, especially from Saccharomyces cerevisiae or its functional equivalent or its homolog, e.g. the increase of
[27053] (a) a gene product of a gene comprising the nucleic acid molecule as shown in the respective line in column 5 of Table I, application no. 3, preferably the coding region thereof, or a homolog or a fragment thereof, and being depicted in the same respective line as said Ymr013c, or a functional equivalent or a homolog thereof as shown in column 8 of Table I, application no. 3, preferably the coding region thereof, particularly a homolog or functional equivalent as shown in column 8 of Table I B, application no. 3, and being depicted in the same respective line as said Ymr013c, and preferably the activity is increased plastidic, or
[27054] (b) a polypeptide comprising a polypeptide, a consensus sequence or at least a polypeptide motif as shown in the respective line in column 5 of Table II or in column 8 of Table IV, application no. 3, respectively, and being depicted in the same respective line as said Ymr013c, or a functional equivalent or a homolog thereof as depicted in column 8 of Table II, application no. 3, preferably a homolog or functional equivalent as depicted in column 8 of Table II B, application no. 3, and being depicted in the same respective line as said Ymr013c, and preferably the activity is increased plastidic.

[27055] Accordingly, in one embodiment, the molecule which activity is to be increased in the process of the invention is the gene product with an activity as a “ymr013c-protein”, preferably it is the molecule of section (a) or (b) of this paragraph.

[27056] In particular, it was observed that in plants, especially in Arabidopsis thaliana, increasing or generating the activity of a gene product plastidic with the activity of a “ymr013c-protein”, preferably being encoded by a gene comprising the nucleic acid sequence SEQ ID NO. 91958, preferably the coding region thereof, conferred the production of or the increase in tyrosine compared with the wild type control.

[27057] The nucleic acid sequence of Ymr120c from Saccharomyces cerevisiae, e.g. as shown in the respective line in column 5 of Table I, application no. 3, has been published in A. And the activity of the gene product thereof is the activity of purine biosynthesis protein.

[27058] Accordingly, in one embodiment, the process of the present invention for producing glycine in a non-human organism, like a microorganism or a plant or a part thereof, comprises increasing or generating the activity of a gene product with the activity of a gene product conferring the activity of “purine biosynthesis protein”, especially from Saccharomyces cerevisiae or its functional equivalent or its homolog, e.g. the increase of
[27059] (a) a gene product of a gene comprising the nucleic acid molecule as shown in the respective line in column 5 of Table I, application no. 3, preferably the coding region thereof, or a homolog or a fragment thereof, and being depicted in the same respective line as said Ymr120c, or a functional equivalent or a homolog thereof as shown in column 8 of Table I, application no. 3, preferably the coding region thereof, particularly a homolog or functional equivalent as shown in column 8 of Table I B, application no. 3, and being depicted in the same respective line as said Ymr120c, and preferably the activity is increased plastidic, or
[27060] (b) a polypeptide comprising a polypeptide, a consensus sequence or at least a polypeptide motif as shown in the respective line in column 5 of Table II or in column 8 of Table IV, application no. 3, respectively, and being depicted in the same respective line as said Ymr120c, or a functional equivalent or a homolog thereof as depicted in column 8 of Table II, application no. 3, preferably a homolog or functional equivalent as depicted in column 8 of Table II B, application no. 3, and being depicted in the same respective line as said Ymr120c, and preferably the activity is increased plastidic.

[27061] Accordingly, in one embodiment, the molecule which activity is to be increased in the process of the invention is the gene product with an activity as a “purine biosynthesis protein”, preferably it is the molecule of section (a) or (b) of this paragraph.

[27062] In particular, it was observed that in plants, especially in Arabidopsis thaliana, increasing or generating the activity of a gene product plastidic with the activity of a “purine biosynthesis protein”, preferably being encoded by a gene comprising the nucleic acid sequence SEQ ID NO. 91973, preferably the coding region thereof, conferred the production of or the increase in glycine compared with the wild type control.

[27063] The nucleic acid sequence of Ymr150c from Saccharomyces cerevisiae, e.g. as shown in the respective line in column 5 of Table I, application no. 3, has been published in A. And the activity of the gene product thereof is the activity of mitochondrial inner membrane protease subunit.

[27064] Accordingly, in one embodiment, the process of the present invention for producing phenylalanine in a non-human organism, like a microorganism or a plant or a part thereof, comprises increasing or generating the activity of a gene product with the activity of a gene product conferring the activity of “mitochondrial inner membrane protease subunit”, especially from Saccharomyces cerevisiae or its functional equivalent or its homolog, e.g. the increase of
[27065] (a) a gene product of a gene comprising the nucleic acid molecule as shown in the respective line in column 5 of Table I, application no. 3, preferably the coding region thereof, or a homolog or a fragment thereof, and being depicted in the same respective line as said Ymr150c, or a functional equivalent or a homolog thereof as shown in column 8 of Table I, application no. 3, preferably the coding region thereof, particularly a homolog or functional equivalent as shown in column 8 of Table I B, application no. 3, and being depicted in the same respective line as said Ymr150c, and preferably the activity is increased plastidic, or
[27066] (b) a polypeptide comprising a polypeptide, a consensus sequence or at least a polypeptide motif as shown in the respective line in column 5 of Table II or in column 8 of Table IV, application no. 3, respectively, and being depicted in the same respective line as said Ymr150c, or a functional equivalent or a homolog thereof as depicted in column 8 of Table II, application no. 3, preferably a homolog or functional equivalent as depicted in column 8 of Table II B, application no. 3, and being depicted in the same respective line as said Ymr150c, and preferably the activity is increased plastidic.

[27067] Accordingly, in one embodiment, the molecule which activity is to be increased in the process of the invention is the gene product with an activity as a “mitochondrial inner membrane protease subunit”, preferably it is the molecule of section (a) or (b) of this paragraph.

[27068] In particular, it was observed that in plants, especially in Arabidopsis thaliana, increasing or generating the activity of a gene product plastidic with the activity of a “mitochondrial inner membrane protease subunit”, preferably being encoded by a gene comprising the nucleic acid sequence SEQ ID NO. 92274, preferably the coding region thereof, conferred the production of or the increase in phenylalanine compared with the wild type control.

[27069] The nucleic acid sequence of Ynl086w from Saccharomyces cerevisiae, e.g. as shown in the respective line in column 5 of Table I, application no. 3, has been published in A. And the activity of the gene product thereof is the activity of YNL086W-protein.

[27070] Accordingly, in one embodiment, the process of the present invention for producing homoserine in a non-human organism, like a microorganism or a plant or a part thereof, comprises increasing or generating the activity of a gene product with the activity of a gene product conferring the activity of “YNL086W-protein”, especially from Saccharomyces cerevisiae or its functional equivalent or its homolog, e.g. the increase of
[27071] (a) a gene product of a gene comprising the nucleic acid molecule as shown in the respective line in column 5 of Table I, application no. 3, preferably the coding region thereof, or a homolog or a fragment thereof, and being depicted in the same respective line as said Ynl086w, or a functional equivalent or a homolog thereof as shown in column 8 of Table I, application no. 3, preferably the coding region thereof, particularly a homolog or functional equivalent as shown in column 8 of Table I B, application no. 3, and being depicted in the same respective line as said Ynl086w, and preferably the activity is increased plastidic, or
[27072] (b) a polypeptide comprising a polypeptide, a consensus sequence or at least a polypeptide motif as shown in the respective line in column 5 of Table II or in column 8 of Table IV, application no. 3, respectively, and being depicted in the same respective line as said Ynl086w, or a functional equivalent or a homolog thereof as depicted in column 8 of Table II, application no. 3, preferably a homolog or functional equivalent as depicted in column 8 of Table II B, application no. 3, and being depicted in the same respective line as said Ynl086w, and preferably the activity is increased plastidic.

[27073] Accordingly, in one embodiment, the molecule which activity is to be increased in the process of the invention is the gene product with an activity as a “YNL086W-protein”, preferably it is the molecule of section (a) or (b) of this paragraph.

[27074] In particular, it was observed that in plants, especially in Arabidopsis thaliana, increasing or generating the activity of a gene product plastidic with the activity of a “YNL086W-protein”, preferably being encoded by a gene comprising the nucleic acid sequence SEQ ID NO. 92325, preferably the coding region thereof, conferred the production of or the increase in homoserine compared with the wild type control.

[27075] The nucleic acid sequence of Ynl101w from Saccharomyces cerevisiae, e.g. as shown in the respective line in column 5 of Table I, application no. 3, has been published in A. And the activity of the gene product thereof is the activity of amino acid transporter.

[27076] Accordingly, in one embodiment, the process of the present invention for producing tyrosine in a non-human organism, like a microorganism or a plant or a part thereof, comprises increasing or generating the activity of a gene product with the activity of a gene product conferring the activity of “amino acid transporter”, especially from Saccharomyces cerevisiae or its functional equivalent or its homolog, e.g. the increase of
[27077] (a) a gene product of a gene comprising the nucleic acid molecule as shown in the respective line in column 5 of Table I, application no. 3, preferably the coding region thereof, or a homolog or a fragment thereof, and being depicted in the same respective line as said Ynl101w, or a functional equivalent or a homolog thereof as shown in column 8 of Table I, application no. 3, preferably the coding region thereof, particularly a homolog or functional equivalent as shown in column 8 of Table I B, application no. 3, and being depicted in the same respective line as said Ynl101w, and preferably the activity is increased plastidic, or
[27078] (b) a polypeptide comprising a polypeptide, a consensus sequence or at least a polypeptide motif as shown in the respective line in column 5 of Table II or in column 8 of Table IV, application no. 3, respectively, and being depicted in the same respective line as said Ynl101w, or a functional equivalent or a homolog thereof as depicted in column 8 of Table II, application no. 3, preferably a homolog or functional equivalent as depicted in column 8 of Table II B, application no. 3, and being depicted in the same respective line as said Ynl101w, and preferably the activity is increased plastidic.

[27079] Accordingly, in one embodiment, the molecule which activity is to be increased in the process of the invention is the gene product with an activity as a “amino acid transporter”, preferably it is the molecule of section (a) or (b) of this paragraph.

[27080] In particular, it was observed that in plants, especially in Arabidopsis thaliana, increasing or generating the activity of a gene product plastidic with the activity of a “amino acid transporter”, preferably being encoded by a gene comprising the nucleic acid sequence SEQ ID NO. 92339, preferably the coding region thereof, conferred the production of or the increase in tyrosine compared with the wild type control.

[27081] The nucleic acid sequence of Ynl277w from Saccharomyces cerevisiae, e.g. as shown in the respective line in column 5 of Table I, application no. 3, has been published in A. And the activity of the gene product thereof is the activity of homoserine O-acetyltransferase.

[27082] Accordingly, in one embodiment, the process of the present invention for producing homoserine in a non-human organism, like a microorganism or a plant or a part thereof, comprises increasing or generating the activity of a gene product with the activity of a gene product conferring the activity of “homoserine 0-acetyltransferase”, especially from Saccharomyces cerevisiae or its functional equivalent or its homolog, e.g. the increase of
[27083] (a) a gene product of a gene comprising the nucleic acid molecule as shown in the respective line in column 5 of Table I, application no. 3, preferably the coding region thereof, or a homolog or a fragment thereof, and being depicted in the same respective line as said Ynl277w, or a functional equivalent or a homolog thereof as shown in column 8 of Table I, application no. 3, preferably the coding region thereof, particularly a homolog or functional equivalent as shown in column 8 of Table I B, application no. 3, and being depicted in the same respective line as said Ynl277w, and preferably the activity is increased plastidic, or
[27084] (b) a polypeptide comprising a polypeptide, a consensus sequence or at least a polypeptide motif as shown in the respective line in column 5 of Table II or in column 8 of Table IV, application no. 3, respectively, and being depicted in the same respective line as said Ynl277w, or a functional equivalent or a homolog thereof as depicted in column 8 of Table II, application no. 3, preferably a homolog or functional equivalent as depicted in column 8 of Table II B, application no. 3, and being depicted in the same respective line as said Ynl277w, and preferably the activity is increased plastidic.

[27085] Accordingly, in one embodiment, the molecule which activity is to be increased in the process of the invention is the gene product with an activity as a “homoserine O-acetyltransferase”, preferably it is the molecule of section (a) or (b) of this paragraph.

[27086] In particular, it was observed that in plants, especially in Arabidopsis thaliana, increasing or generating the activity of a gene product plastidic with the activity of a “homoserine O-acetyltransferase”, preferably being encoded by a gene comprising the nucleic acid sequence SEQ ID NO. 92391, preferably the coding region thereof, conferred the production of or the increase in homoserine compared with the wild type control.

[27087] The nucleic acid sequence of Yol130w from Saccharomyces cerevisiae, e.g. as shown in the respective line in column 5 of Table I, application no. 3, has been published in A. And the activity of the gene product thereof is the activity of metal ion transporter.

[27088] Accordingly, in one embodiment, the process of the present invention for producing alanine in a non-human organism, like a microorganism or a plant or a part thereof, comprises increasing or generating the activity of a gene product with the activity of a gene product conferring the activity of “metal ion transporter”, especially from Saccharomyces cerevisiae or its functional equivalent or its homolog, e.g. the increase of
[27089] (a) a gene product of a gene comprising the nucleic acid molecule as shown in the respective line in column 5 of Table I, application no. 3, preferably the coding region thereof, or a homolog or a fragment thereof, and being depicted in the same respective line as said Yol130w, or a functional equivalent or a homolog thereof as shown in column 8 of Table I, application no. 3, preferably the coding region thereof, particularly a homolog or functional equivalent as shown in column 8 of Table I B, application no. 3, and being depicted in the same respective line as said Yol130w, and preferably the activity is increased plastidic, or
[27090] (b) a polypeptide comprising a polypeptide, a consensus sequence or at least a polypeptide motif as shown in the respective line in column 5 of Table II or in column 8 of Table IV, application no. 3, respectively, and being depicted in the same respective line as said Yol130w, or a functional equivalent or a homolog thereof as depicted in column 8 of Table II, application no. 3, preferably a homolog or functional equivalent as depicted in column 8 of Table II B, application no. 3, and being depicted in the same respective line as said Yol130w, and preferably the activity is increased plastidic.

[27091] Accordingly, in one embodiment, the molecule which activity is to be increased in the process of the invention is the gene product with an activity as a “metal ion transporter”, preferably it is the molecule of section (a) or (b) of this paragraph.

[27092] In particular, it was observed that in plants, especially in Arabidopsis thaliana, increasing or generating the activity of a gene product plastidic with the activity of a “metal ion transporter”, preferably being encoded by a gene comprising the nucleic acid sequence SEQ ID NO. 92510, preferably the coding region thereof, conferred the production of or the increase in alanine compared with the wild type control.

[27093] The nucleic acid sequence of Yol160w from Saccharomyces cerevisiae, e.g. as shown in the respective line in column 5 of Table I, application no. 3, has been published in A. And the activity of the gene product thereof is the activity of yol160w-protein.

[27094] Accordingly, in one embodiment, the process of the present invention for producing aspartate in a non-human organism, like a microorganism or a plant or a part thereof, comprises increasing or generating the activity of a gene product with the activity of a gene product conferring the activity of “yol160w-protein”, especially from Saccharomyces cerevisiae or its functional equivalent or its homolog, e.g. the increase of
[27095] (a) a gene product of a gene comprising the nucleic acid molecule as shown in the respective line in column 5 of Table I, application no. 3, preferably the coding region thereof, or a homolog or a fragment thereof, and being depicted in the same respective line as said Yol160w, or a functional equivalent or a homolog thereof as shown in column 8 of Table I, application no. 3, preferably the coding region thereof, particularly a homolog or functional equivalent as shown in column 8 of Table I B, application no. 3, and being depicted in the same respective line as said Yol160w, and preferably the activity is increased plastidic, or
[27096] (b) a polypeptide comprising a polypeptide, a consensus sequence or at least a polypeptide motif as shown in the respective line in column 5 of Table II or in column 8 of Table IV, application no. 3, respectively, and being depicted in the same respective line as said Yol160w, or a functional equivalent or a homolog thereof as depicted in column 8 of Table II, application no. 3, preferably a homolog or functional equivalent as depicted in column 8 of Table II B, application no. 3, and being depicted in the same respective line as said Yol160w, and preferably the activity is increased plastidic.

[27097] Accordingly, in one embodiment, the molecule which activity is to be increased in the process of the invention is the gene product with an activity as a “yol160w-protein”, preferably it is the molecule of section (a) or (b) of this paragraph.

[27098] In particular, it was observed that in plants, especially in Arabidopsis thaliana, increasing or generating the activity of a gene product plastidic with the activity of a “yol160w-protein”, preferably being encoded by a gene comprising the nucleic acid sequence SEQ ID NO. 15179, preferably the coding region thereof, conferred the production of or the increase in aspartate compared with the wild type control.

[27099] The nucleic acid sequence of Yor233w from Saccharomyces cerevisiae, e.g. as shown in the respective line in column 5 of Table I, application no. 3, has been published in A. And the activity of the gene product thereof is the activity of protein kinase.

[27100] Accordingly, in one embodiment, the process of the present invention for producing citrulline in a non-human organism, like a microorganism or a plant or a part thereof, comprises increasing or generating the activity of a gene product with the activity of a gene product conferring the activity of “protein kinase”, especially from Saccharomyces cerevisiae or its functional equivalent or its homolog, e.g. the increase of
[27101] (a) a gene product of a gene comprising the nucleic acid molecule as shown in the respective line in column 5 of Table I, application no. 3, preferably the coding region thereof, or a homolog or a fragment thereof, and being depicted in the same respective line as said Yor233w, or a functional equivalent or a homolog thereof as shown in column 8 of Table I, application no. 3, preferably the coding region thereof, particularly a homolog or functional equivalent as shown in column 8 of Table I B, application no. 3, and being depicted in the same respective line as said Yor233w, and preferably the activity is increased non-targeted, or
[27102] (b) a polypeptide comprising a polypeptide, a consensus sequence or at least a polypeptide motif as shown in the respective line in column 5 of Table II or in column 8 of Table IV, application no. 3, respectively, and being depicted in the same respective line as said Yor233w, or a functional equivalent or a homolog thereof as depicted in column 8 of Table II, application no. 3, preferably a homolog or functional equivalent as depicted in column 8 of Table II B, application no. 3, and being depicted in the same respective line as said Yor233w, and preferably the activity is increased non-targeted.

[27103] Accordingly, in one embodiment, the molecule which activity is to be increased in the process of the invention is the gene product with an activity as a “protein kinase”, preferably it is the molecule of section (a) or (b) of this paragraph.

[27104] In particular, it was observed that in plants, especially in Arabidopsis thaliana, increasing or generating the activity of a gene product non-targeted with the activity of a “protein kinase”, preferably being encoded by a gene comprising the nucleic acid sequence SEQ ID NO. 67968, preferably the coding region thereof, conferred the production of or the increase in citrulline compared with the wild type control.

[27105] The nucleic acid sequence of Yor244w from Saccharomyces cerevisiae, e.g. as shown in the respective line in column 5 of Table I, application no. 3, has been published in A. And the activity of the gene product thereof is the activity of histone acetyltransferase.

[27106] Accordingly, in one embodiment, the process of the present invention for producing phenylalanine in a non-human organism, like a microorganism or a plant or a part thereof, comprises increasing or generating the activity of a gene product with the activity of a gene product conferring the activity of “histone acetyltransferase”, especially from Saccharomyces cerevisiae or its functional equivalent or its homolog, e.g. the increase of
[27107] (a) a gene product of a gene comprising the nucleic acid molecule as shown in the respective line in column 5 of Table I, application no. 3, preferably the coding region thereof, or a homolog or a fragment thereof, and being depicted in the same respective line as said Yor244w, or a functional equivalent or a homolog thereof as shown in column 8 of Table I, application no. 3, preferably the coding region thereof, particularly a homolog or functional equivalent as shown in column 8 of Table I B, application no. 3, and being depicted in the same respective line as said Yor244w, and preferably the activity is increased plastidic, or
[27108] (b) a polypeptide comprising a polypeptide, a consensus sequence or at least a polypeptide motif as shown in the respective line in column 5 of Table II or in column 8 of Table IV, application no. 3, respectively, and being depicted in the same respective line as said Yor244w, or a functional equivalent or a homolog thereof as depicted in column 8 of Table II, application no. 3, preferably a homolog or functional equivalent as depicted in column 8 of Table II B, application no. 3, and being depicted in the same respective line as said Yor244w, and preferably the activity is increased plastidic.

[27109] Accordingly, in one embodiment, the molecule which activity is to be increased in the process of the invention is the gene product with an activity as a “histone acetyltransferase”, preferably it is the molecule of section (a) or (b) of this paragraph.

[27110] In particular, it was observed that in plants, especially in Arabidopsis thaliana, increasing or generating the activity of a gene product plastidic with the activity of a “histone acetyltransferase”, preferably being encoded by a gene comprising the nucleic acid sequence SEQ ID NO. 92540, preferably the coding region thereof, conferred the production of or the increase in phenylalanine compared with the wild type control.

[27111] The nucleic acid sequence of Yor244w from Saccharomyces cerevisiae, e.g. as shown in the respective line in column 5 of Table I, application no. 3, has been published in A. And the activity of the gene product thereof is the activity of histone acetyltransferase.

[27112] Accordingly, in one embodiment, the process of the present invention for producing tyrosine in a non-human organism, like a microorganism or a plant or a part thereof, comprises increasing or generating the activity of a gene product with the activity of a gene product conferring the activity of “histone acetyltransferase”, especially from Saccharomyces cerevisiae or its functional equivalent or its homolog, e.g. the increase of
[27113] (a) a gene product of a gene comprising the nucleic acid molecule as shown in the respective line in column 5 of Table I, application no. 3, preferably the coding region thereof, or a homolog or a fragment thereof, and being depicted in the same respective line as said Yor244w, or a functional equivalent or a homolog thereof as shown in column 8 of Table I, application no. 3, preferably the coding region thereof, particularly a homolog or functional equivalent as shown in column 8 of Table I B, application no. 3, and being depicted in the same respective line as said Yor244w, and preferably the activity is increased plastidic, or
[27114] (b) a polypeptide comprising a polypeptide, a consensus sequence or at least a polypeptide motif as shown in the respective line in column 5 of Table II or in column 8 of Table IV, application no. 3, respectively, and being depicted in the same respective line as said Yor244w, or a functional equivalent or a homolog thereof as depicted in column 8 of Table II, application no. 3, preferably a homolog or functional equivalent as depicted in column 8 of Table II B, application no. 3, and being depicted in the same respective line as said Yor244w, and preferably the activity is increased plastidic.

[27115] Accordingly, in one embodiment, the molecule which activity is to be increased in the process of the invention is the gene product with an activity as a “histone acetyltransferase”, preferably it is the molecule of section (a) or (b) of this paragraph.

[27116] In particular, it was observed that in plants, especially in Arabidopsis thaliana, increasing or generating the activity of a gene product plastidic with the activity of a “histone acetyltransferase”, preferably being encoded by a gene comprising the nucleic acid sequence SEQ ID NO. 92540, preferably the coding region thereof, conferred the production of or the increase in tyrosine compared with the wild type control.

[27117] The nucleic acid sequence of Yor245c from Saccharomyces cerevisiae, e.g. as shown in the respective line in column 5 of Table I, application no. 3, has been published in A. And the activity of the gene product thereof is the activity of diacylglycerol O-acyltransferase.

[27118] Accordingly, in one embodiment, the process of the present invention for producing homoserine in a non-human organism, like a microorganism or a plant or a part thereof, comprises increasing or generating the activity of a gene product with the activity of a gene product conferring the activity of “diacylglycerol O-acyltransferase”, especially from Saccharomyces cerevisiae or its functional equivalent or its homolog, e.g. the increase of
[27119] (a) a gene product of a gene comprising the nucleic acid molecule as shown in the respective line in column 5 of Table I, application no. 3, preferably the coding region thereof, or a homolog or a fragment thereof, and being depicted in the same respective line as said Yor245c, or a functional equivalent or a homolog thereof as shown in column 8 of Table I, application no. 3, preferably the coding region thereof, particularly a homolog or functional equivalent as shown in column 8 of Table I B, application no. 3, and being depicted in the same respective line as said Yor245c, and preferably the activity is increased non-targeted, or
[27120] (b) a polypeptide comprising a polypeptide, a consensus sequence or at least a polypeptide motif as shown in the respective line in column 5 of Table II or in column 8 of Table IV, application no. 3, respectively, and being depicted in the same respective line as said Yor245c, or a functional equivalent or a homolog thereof as depicted in column 8 of Table II, application no. 3, preferably a homolog or functional equivalent as depicted in column 8 of Table II B, application no. 3, and being depicted in the same respective line as said Yor245c, and preferably the activity is increased non-targeted.

[27121] Accordingly, in one embodiment, the molecule which activity is to be increased in the process of the invention is the gene product with an activity as a “diacylglycerol O-acyltransferase”, preferably it is the molecule of section (a) or (b) of this paragraph.

[27122] In particular, it was observed that in plants, especially in Arabidopsis thaliana, increasing or generating the activity of a gene product non-targeted with the activity of a “diacylglycerol O-acyltransferase”, preferably being encoded by a gene comprising the nucleic acid sequence SEQ ID NO. 92616, preferably the coding region thereof, conferred the production of or the increase in homoserine compared with the wild type control.

[27123] The nucleic acid sequence of Yor245c from Saccharomyces cerevisiae, e.g. as shown in the respective line in column 5 of Table I, application no. 3, has been published in A. And the activity of the gene product thereof is the activity of diacylglycerol O-acyltransferase.

[27124] Accordingly, in one embodiment, the process of the present invention for producing serine in a non-human organism, like a microorganism or a plant or a part thereof, comprises increasing or generating the activity of a gene product with the activity of a gene product conferring the activity of “diacylglycerol O-acyltransferase”, especially from Saccharomyces cerevisiae or its functional equivalent or its homolog, e.g. the increase of
[27125] (a) a gene product of a gene comprising the nucleic acid molecule as shown in the respective line in column 5 of Table I, application no. 3, preferably the coding region thereof, or a homolog or a fragment thereof, and being depicted in the same respective line as said Yor245c, or a functional equivalent or a homolog thereof as shown in column 8 of Table I, application no. 3, preferably the coding region thereof, particularly a homolog or functional equivalent as shown in column 8 of Table I B, application no. 3, and being depicted in the same respective line as said Yor245c, and preferably the activity is increased non-targeted, or
[27126] (b) a polypeptide comprising a polypeptide, a consensus sequence or at least a polypeptide motif as shown in the respective line in column 5 of Table II or in column 8 of Table IV, application no. 3, respectively, and being depicted in the same respective line as said Yor245c, or a functional equivalent or a homolog thereof as depicted in column 8 of Table II, application no. 3, preferably a homolog or functional equivalent as depicted in column 8 of Table II B, application no. 3, and being depicted in the same respective line as said Yor245c, and preferably the activity is increased non-targeted.

[27127] Accordingly, in one embodiment, the molecule which activity is to be increased in the process of the invention is the gene product with an activity as a “diacylglycerol O-acyltransferase”, preferably it is the molecule of section (a) or (b) of this paragraph.

[27128] In particular, it was observed that in plants, especially in Arabidopsis thaliana, increasing or generating the activity of a gene product non-targeted with the activity of a “diacylglycerol O-acyltransferase”, preferably being encoded by a gene comprising the nucleic acid sequence SEQ ID NO. 92616, preferably the coding region thereof, conferred the production of or the increase in serine compared with the wild type control.

[27129] The nucleic acid sequence of Yor245c from Saccharomyces cerevisiae, e.g. as shown in the respective line in column 5 of Table I, application no. 3, has been published in A. And the activity of the gene product thereof is the activity of diacylglycerol O-acyltransferase.

[27130] Accordingly, in one embodiment, the process of the present invention for producing 5-oxoproline in a non-human organism, like a microorganism or a plant or a part thereof, comprises increasing or generating the activity of a gene product with the activity of a gene product conferring the activity of “diacylglycerol O-acyltransferase”, especially from Saccharomyces cerevisiae or its functional equivalent or its homolog, e.g. the increase of
[27131] (a) a gene product of a gene comprising the nucleic acid molecule as shown in the respective line in column 5 of Table I, application no. 3, preferably the coding region thereof, or a homolog or a fragment thereof, and being depicted in the same respective line as said Yor245c, or a functional equivalent or a homolog thereof as shown in column 8 of Table I, application no. 3, preferably the coding region thereof, particularly a homolog or functional equivalent as shown in column 8 of Table I B, application no. 3, and being depicted in the same respective line as said Yor245c, and preferably the activity is increased non-targeted, or
[27132] (b) a polypeptide comprising a polypeptide, a consensus sequence or at least a polypeptide motif as shown in the respective line in column 5 of Table II or in column 8 of Table IV, application no. 3, respectively, and being depicted in the same respective line as said Yor245c, or a functional equivalent or a homolog thereof as depicted in column 8 of Table II, application no. 3, preferably a homolog or functional equivalent as depicted in column 8 of Table II B, application no. 3, and being depicted in the same respective line as said Yor245c, and preferably the activity is increased non-targeted.

[27133] Accordingly, in one embodiment, the molecule which activity is to be increased in the process of the invention is the gene product with an activity as a “diacylglycerol O-acyltransferase”, preferably it is the molecule of section (a) or (b) of this paragraph.

[27134] In particular, it was observed that in plants, especially in Arabidopsis thaliana, increasing or generating the activity of a gene product non-targeted with the activity of a “diacylglycerol O-acyltransferase”, preferably being encoded by a gene comprising the nucleic acid sequence SEQ ID NO. 92616, preferably the coding region thereof, conferred the production of or the increase in 5-oxoproline compared with the wild type control.

[27135] The nucleic acid sequence of Ypl028w from Saccharomyces cerevisiae, e.g. as shown in the respective line in column 5 of Table I, application no. 3, has been published in A. And the activity of the gene product thereof is the activity of acetyl-CoA acetyltransferase.

[27136] Accordingly, in one embodiment, the process of the present invention for producing glycine in a non-human organism, like a microorganism or a plant or a part thereof, comprises increasing or generating the activity of a gene product with the activity of a gene product conferring the activity of “acetyl-CoA acetyltransferase”, especially from Saccharomyces cerevisiae or its functional equivalent or its homolog, e.g. the increase of
[27137] (a) a gene product of a gene comprising the nucleic acid molecule as shown in the respective line in column 5 of Table I, application no. 3, preferably the coding region thereof, or a homolog or a fragment thereof, and being depicted in the same respective line as said Ypl028w, or a functional equivalent or a homolog thereof as shown in column 8 of Table I, application no. 3, preferably the coding region thereof, particularly a homolog or functional equivalent as shown in column 8 of Table I B, application no. 3, and being depicted in the same respective line as said Ypl028w, and preferably the activity is increased non-targeted, or
[27138] (b) a polypeptide comprising a polypeptide, a consensus sequence or at least a polypeptide motif as shown in the respective line in column 5 of Table II or in column 8 of Table IV, application no. 3, respectively, and being depicted in the same respective line as said Ypl028w, or a functional equivalent or a homolog thereof as depicted in column 8 of Table II, application no. 3, preferably a homolog or functional equivalent as depicted in column 8 of Table II B, application no. 3, and being depicted in the same respective line as said Ypl028w, and preferably the activity is increased non-targeted.

[27139] Accordingly, in one embodiment, the molecule which activity is to be increased in the process of the invention is the gene product with an activity as a “acetyl-CoA acetyltransferase”, preferably it is the molecule of section (a) or (b) of this paragraph.

[27140] In particular, it was observed that in plants, especially in Arabidopsis thaliana, increasing or generating the activity of a gene product non-targeted with the activity of a “acetyl-CoA acetyltransferase”, preferably being encoded by a gene comprising the nucleic acid sequence SEQ ID NO. 92668, preferably the coding region thereof, conferred the production of or the increase in glycine compared with the wild type control.

[27141] The nucleic acid sequence of Ypr001w from Saccharomyces cerevisiae, e.g. as shown in the respective line in column 5 of Table I, application no. 3, has been published in A. And the activity of the gene product thereof is the activity of citrate synthase.

[27142] Accordingly, in one embodiment, the process of the present invention for producing serine in a non-human organism, like a microorganism or a plant or a part thereof, comprises increasing or generating the activity of a gene product with the activity of a gene product conferring the activity of “citrate synthase”, especially from Saccharomyces cerevisiae or its functional equivalent or its homolog, e.g. the increase of
[27143] (a) a gene product of a gene comprising the nucleic acid molecule as shown in the respective line in column 5 of Table I, application no. 3, preferably the coding region thereof, or a homolog or a fragment thereof, and being depicted in the same respective line as said Ypr001w, or a functional equivalent or a homolog thereof as shown in column 8 of Table I, application no. 3, preferably the coding region thereof, particularly a homolog or functional equivalent as shown in column 8 of Table I B, application no. 3, and being depicted in the same respective line as said Ypr001w, and preferably the activity is increased non-targeted, or
[27144] (b) a polypeptide comprising a polypeptide, a consensus sequence or at least a polypeptide motif as shown in the respective line in column 5 of Table II or in column 8 of Table IV, application no. 3, respectively, and being depicted in the same respective line as said Ypr001w, or a functional equivalent or a homolog thereof as depicted in column 8 of Table II, application no. 3, preferably a homolog or functional equivalent as depicted in column 8 of Table II B, application no. 3, and being depicted in the same respective line as said Ypr001w, and preferably the activity is increased non-targeted.

[27145] Accordingly, in one embodiment, the molecule which activity is to be increased in the process of the invention is the gene product with an activity as a “citrate synthase”, preferably it is the molecule of section (a) or (b) of this paragraph.

[27146] In particular, it was observed that in plants, especially in Arabidopsis thaliana, increasing or generating the activity of a gene product non-targeted with the activity of a “citrate synthase”, preferably being encoded by a gene comprising the nucleic acid sequence SEQ ID NO. 93091, preferably the coding region thereof, conferred the production of or the increase in serine compared with the wild type control.

[27147] The nucleic acid sequence of Ypr138c from Saccharomyces cerevisiae, e.g. as shown in the respective line in column 5 of Table I, application no. 3, has been published in A. And the activity of the gene product thereof is the activity of ammonium transporter.

[27148] Accordingly, in one embodiment, the process of the present invention for producing aspartate in a non-human organism, like a microorganism or a plant or a part thereof, comprises increasing or generating the activity of a gene product with the activity of a gene product conferring the activity of “ammonium transporter”, especially from Saccharomyces cerevisiae or its functional equivalent or its homolog, e.g. the increase of
[27149] (a) a gene product of a gene comprising the nucleic acid molecule as shown in the respective line in column 5 of Table I, application no. 3, preferably the coding region thereof, or a homolog or a fragment thereof, and being depicted in the same respective line as said Ypr138c, or a functional equivalent or a homolog thereof as shown in column 8 of Table I, application no. 3, preferably the coding region thereof, particularly a homolog or functional equivalent as shown in column 8 of Table I B, application no. 3, and being depicted in the same respective line as said Ypr138c, and preferably the activity is increased non-targeted, or
[27150] (b) a polypeptide comprising a polypeptide, a consensus sequence or at least a polypeptide motif as shown in the respective line in column 5 of Table II or in column 8 of Table IV, application no. 3, respectively, and being depicted in the same respective line as said Ypr138c, or a functional equivalent or a homolog thereof as depicted in column 8 of Table II, application no. 3, preferably a homolog or functional equivalent as depicted in column 8 of Table II B, application no. 3, and being depicted in the same respective line as said Ypr138c, and preferably the activity is increased non-targeted.

[27151] Accordingly, in one embodiment, the molecule which activity is to be increased in the process of the invention is the gene product with an activity as a “ammonium transporter”, preferably it is the molecule of section (a) or (b) of this paragraph.

[27152] In particular, it was observed that in plants, especially in Arabidopsis thaliana, increasing or generating the activity of a gene product non-targeted with the activity of a “ammonium transporter”, preferably being encoded by a gene comprising the nucleic acid sequence SEQ ID NO. 93218, preferably the coding region thereof, conferred the production of or the increase in aspartate compared with the wild type control.

[27153] The nucleic acid sequence of Zm_{—}4842_BE510522 from Zea mays, e.g. as shown in the respective line in column 5 of Table I, application no. 3, is unpublished. And the activity of the gene product thereof is the activity of Zm_{—}4842_BE510522-protein.

[27154] Accordingly, in one embodiment, the process of the present invention for producing phenylalanine in a non-human organism, like a microorganism or a plant or a part thereof, comprises increasing or generating the activity of a gene product with the activity of a gene product conferring the activity of “Zm_{—}4842_BE510522-protein”, especially from Zea mays or its functional equivalent or its homolog, e.g. the increase of
[27155] (a) a gene product of a gene comprising the nucleic acid molecule as shown in the respective line in column 5 of Table I, application no. 3, preferably the coding region thereof, or a homolog or a fragment thereof, and being depicted in the same respective line as said Zm_{—}4842_BE510522, or a functional equivalent or a homolog thereof as shown in column 8 of Table I, application no. 3, preferably the coding region thereof, particularly a homolog or functional equivalent as shown in column 8 of Table I B, application no. 3, and being depicted in the same respective line as said Zm_{—}4842_BE510522, and preferably the activity is increased non-targeted, or
[27156] (b) a polypeptide comprising a polypeptide, a consensus sequence or at least a polypeptide motif as shown in the respective line in column 5 of Table II or in column 8 of Table IV, application no. 3, respectively, and being depicted in the same respective line as said Zm_{—}4842_BE510522, or a functional equivalent or a homolog thereof as depicted in column 8 of Table II, application no. 3, preferably a homolog or functional equivalent as depicted in column 8 of Table II B, application no. 3, and being depicted in the same respective line as said Zm_{—}4842_BE510522, and preferably the activity is increased non-targeted.

[27157] Accordingly, in one embodiment, the molecule which activity is to be increased in the process of the invention is the gene product with an activity as a “Zm_{—}4842_BE510522-protein”, preferably it is the molecule of section (a) or (b) of this paragraph.

[27158] In particular, it was observed that in plants, especially in Arabidopsis thaliana, increasing or generating the activity of a gene product non-targeted with the activity of a “Zm_{—}4842_BE510522-protein”, preferably being encoded by a gene comprising the nucleic acid sequence SEQ ID NO. 68413, preferably the coding region thereof, conferred the production of or the increase in phenylalanine compared with the wild type control.

[27159] The nucleic acid sequence of Zm_{—}4842_BE510522 from Zea mays, e.g. as shown in the respective line in column 5 of Table I, application no. 3, is unpublished. And the activity of the gene product thereof is the activity of Zm_{—}4842_BE510522-protein.

[27160] Accordingly, in one embodiment, the process of the present invention for producing serine in a non-human organism, like a microorganism or a plant or a part thereof, comprises increasing or generating the activity of a gene product with the activity of a gene product conferring the activity of “Zm_{—}4842_BE510522-protein”, especially from Zea mays or its functional equivalent or its homolog, e.g. the increase of
[27161] (a) a gene product of a gene comprising the nucleic acid molecule as shown in the respective line in column 5 of Table I, application no. 3, preferably the coding region thereof, or a homolog or a fragment thereof, and being depicted in the same respective line as said Zm_{—}4842_BE510522, or a functional equivalent or a homolog thereof as shown in column 8 of Table I, application no. 3, preferably the coding region thereof, particularly a homolog or functional equivalent as shown in column 8 of Table I B, application no. 3, and being depicted in the same respective line as said Zm_{—}4842_BE510522, and preferably the activity is increased non-targeted, or
[27162] (b) a polypeptide comprising a polypeptide, a consensus sequence or at least a polypeptide motif as shown in the respective line in column 5 of Table II or in column 8 of Table IV, application no. 3, respectively, and being depicted in the same respective line as said Zm_{—}4842_BE510522, or a functional equivalent or a homolog thereof as depicted in column 8 of Table II, application no. 3, preferably a homolog or functional equivalent as depicted in column 8 of Table II B, application no. 3, and being depicted in the same respective line as said Zm_{—}4842_BE510522, and preferably the activity is increased non-targeted.

[27163] Accordingly, in one embodiment, the molecule which activity is to be increased in the process of the invention is the gene product with an activity as a “Zm_{—}4842_BE510522-protein”, preferably it is the molecule of section (a) or (b) of this paragraph.

[27164] In particular, it was observed that in plants, especially in Arabidopsis thaliana, increasing or generating the activity of a gene product non-targeted with the activity of a “Zm_{—}4842_BE510522-protein”, preferably being encoded by a gene comprising the nucleic acid sequence SEQ ID NO. 68413, preferably the coding region thereof, conferred the production of or the increase in serine compared with the wild type control.

[27165] The nucleic acid sequence of Zm_{—}4842_BE510522 from Zea mays, e.g. as shown in the respective line in column 5 of Table I, application no. 3, is unpublished. And the activity of the gene product thereof is the activity of Zm_{—}4842_BE510522-protein.

[27166] Accordingly, in one embodiment, the process of the present invention for producing tyrosine in a non-human organism, like a microorganism or a plant or a part thereof, comprises increasing or generating the activity of a gene product with the activity of a gene product conferring the activity of “Zm_{—}4842_BE510522-protein”, especially from Zea mays or its functional equivalent or its homolog, e.g. the increase of
[27167] (a) a gene product of a gene comprising the nucleic acid molecule as shown in the respective line in column 5 of Table I, application no. 3, preferably the coding region thereof, or a homolog or a fragment thereof, and being depicted in the same respective line as said Zm_{—}4842_BE510522, or a functional equivalent or a homolog thereof as shown in column 8 of Table I, application no. 3, preferably the coding region thereof, particularly a homolog or functional equivalent as shown in column 8 of Table I B, application no. 3, and being depicted in the same respective line as said Zm_{—}4842_BE510522, and preferably the activity is increased non-targeted, or
[27168] (b) a polypeptide comprising a polypeptide, a consensus sequence or at least a polypeptide motif as shown in the respective line in column 5 of Table II or in column 8 of Table IV, application no. 3, respectively, and being depicted in the same respective line as said Zm_{—}4842_BE510522, or a functional equivalent or a homolog thereof as depicted in column 8 of Table II, application no. 3, preferably a homolog or functional equivalent as depicted in column 8 of Table II B, application no. 3, and being depicted in the same respective line as said Zm_{—}4842_BE510522, and preferably the activity is increased non-targeted.

[27169] Accordingly, in one embodiment, the molecule which activity is to be increased in the process of the invention is the gene product with an activity as a “Zm_{—}4842_BE510522-protein”, preferably it is the molecule of section (a) or (b) of this paragraph.

[27170] In particular, it was observed that in plants, especially in Arabidopsis thaliana, increasing or generating the activity of a gene product non-targeted with the activity of a “Zm_{—}4842_BE510522-protein”, preferably being encoded by a gene comprising the nucleic acid sequence SEQ ID NO. 68413, preferably the coding region thereof, conferred the production of or the increase in tyrosine compared with the wild type control.

[27171] The nucleic acid sequence of Zm_{—}4842_BE510522 from Zea mays, e.g. as shown in the respective line in column 5 of Table I, application no. 3, is unpublished. And the activity of the gene product thereof is the activity of Zm_{—}4842_BE510522-protein.

[27172] Accordingly, in one embodiment, the process of the present invention for producing 5-oxoproline in a non-human organism, like a microorganism or a plant or a part thereof, comprises increasing or generating the activity of a gene product with the activity of a gene product conferring the activity of “Zm_{—}4842_BE510522-protein”, especially from Zea mays or its functional equivalent or its homolog, e.g. the increase of
[27173] (a) a gene product of a gene comprising the nucleic acid molecule as shown in the respective line in column 5 of Table I, application no. 3, preferably the coding region thereof, or a homolog or a fragment thereof, and being depicted in the same respective line as said Zm_{—}4842_BE510522, or a functional equivalent or a homolog thereof as shown in column 8 of Table I, application no. 3, preferably the coding region thereof, particularly a homolog or functional equivalent as shown in column 8 of Table I B, application no. 3, and being depicted in the same respective line as said Zm_{—}4842_BE510522, and preferably the activity is increased non-targeted, or
[27174] (b) a polypeptide comprising a polypeptide, a consensus sequence or at least a polypeptide motif as shown in the respective line in column 5 of Table II or in column 8 of Table IV, application no. 3, respectively, and being depicted in the same respective line as said Zm_{—}4842_BE510522, or a functional equivalent or a homolog thereof as depicted in column 8 of Table II, application no. 3, preferably a homolog or functional equivalent as depicted in column 8 of Table II B, application no. 3, and being depicted in the same respective line as said Zm_{—}4842_BE510522, and preferably the activity is increased non-targeted.

[27175] Accordingly, in one embodiment, the molecule which activity is to be increased in the process of the invention is the gene product with an activity as a “Zm_{—}4842_BE510522-protein”, preferably it is the molecule of section (a) or (b) of this paragraph.

[27176] In particular, it was observed that in plants, especially in Arabidopsis thaliana, increasing or generating the activity of a gene product non-targeted with the activity of a “Zm_{—}4842_BE510522-protein”, preferably being encoded by a gene comprising the nucleic acid sequence SEQ ID NO. 68413, preferably the coding region thereof, conferred the production of or the increase in 5-oxoproline compared with the wild type control.

[27177] [0105.1.1.3] to [0107.1.1.3] for the disclosure of these paragraphs see [0105.1.1.1] to [0107.1.1.1] above.

[27178] A protein having an activity conferring an increase in the amount or level of the fine chemical 3,4-dihydroxyphenylalanine (dopa), 5-oxoproline, alanine, asparagine, aspartate, citrulline, glycine, homoserine, ornithine, phenylalanine, serine, or tyrosine, upon targeting to the plastids or mitochondria or upon non-targeting, preferably has the structure of the respective polypeptide described herein, in particular of the polypeptides comprising the consensus sequence or at least one polypeptide motifs as shown in the respective line in Table IV, application no. 3, column 8 or of the polypeptide comprising an amino acid sequence as disclosed in the respective line in Table II, application no. 3, columns 5 or 8, or homologs or fragments thereof as described herein, or is encoded by the nucleic acid molecule characterized herein or the nucleic acid molecule according to the invention, for example by the nucleic acid molecule as shown in the respective line in Table I, application no. 3, columns 5 or 8, preferably the coding region thereof, or homologs or fragments thereof and has the herein mentioned activity.

[27179] [0109.1.1.3] to [0110.1.1.3] for the disclosure of these paragraphs see [0109.1.1.1] to [0110.1.1.1] above.

[27180] In one embodiment, the process of the present invention comprises one or more of the following steps
[27181] (a) stabilizing a protein conferring the generation or increased expression of a protein encoded by the nucleic acid molecule of the invention or of the polypeptide of the invention, e.g. of a polypeptide having the activity selected from the group consisting of 2,3-dihydroxyphenylpropionate 1,2-dioxygenase, 2-C-methyl-D-erythritol 4-phosphate cytidylyltransferase, 2-oxoglutarate dehydrogenase E1 subunit, 30S ribosomal protein S3, 3deoxy-7-phosphoheptulonate synthase, 3-deoxy-D-arabinoheptulosonate-7-phosphatesynthase, 3-oxoacyl-[acyl-carrier-protein] synthase, 3-phosphoglycerate dehydrogenase, 47266012-protein, 49747384_SOYBEAN-protein, 50S ribosomal protein L14, 5′-nucleotidase, ABC metal ion transporter substrate-binding protein, ABC transporter ATP binding component, ABC transporter ATP-binding protein, ABC transporter component, ABC transporter permease protein, ABC transporter substrate-binding protein, acetolactate synthase, acetolactate synthase small subunit, acetyl CoA carboxylase, acetylCoA acetyltransferase, acetyltransferase, acid shock protein, acyl transferase, acyl-CoA dehydrogenase, acyl-CoA synthase, adenylate kinase, adenylylsulfate kinase, agmatinase, aldehyde dehydrogenase, amine oxidase, amino acid ABC transporter permease protein, amino acid acetyltransferase, amino acid transporter, amino-acid acetyltransferase, aminotransferase, ammonium transporter, ankyrin repeat family protein, anthranilate synthase component I, arginine exporter protein, arginine N-succinyltransferase, argininosuccinate lyase, asparaginase, aspartate 1-decarboxylase, aspartate aminotransferase, aspartate kinase, aspartate-ammonia ligase, At1g17440-protein, At1g19800-protein, At4g32480-protein, At5g16650-protein, at5g21910-protein, ATP-binding component of a transport system, ATP-dependent RNA helicase, auxin response factor, AX653549-protein, AY087308-protein, b0391-protein, b0456-protein, b0518-protein, b0801-protein, b0841-protein, b0917-protein, b1003-protein, b1024-protein, b1137-protein, b1155-protein, b1163-protein, b1179-protein, b1205-protein, b1229-protein, b1259-protein, b1280-protein, b1330-protein, b1445-protein, b1522-protein, b1583-protein, b1670-protein, b1672-protein, b1837-protein, b1898-protein, b1930-protein, b2032-protein, b2107-protein, b2360-protein, b2399-protein, b2474-protein, b2513-protein, b2613-protein, b2673-protein, b2739-protein, b2812-protein, b2849-protein, b3083-protein, b3098-protein, b3121-protein, b3221-protein, b3246-protein, b3346-protein, b3392-protein, b3410-protein, b3509-protein, b3646-protein, b3791-protein, b3814-protein, b3989-protein, b4029-protein, b4121-protein, beta-galactosidase, beta-hydroxylase, bifunctional aspartokinase/homoserine dehydrogenase, bifunctional purine biosynthesis protein, branched chain aminotransferase, branched-chain amino acid permease, calcium-dependent protein kinase, carbon dioxide concentrating mechanism protein, cation-transporting ATPase, CBL-interacting protein kinase, CDP-diacylglycerol-glycerol-3-phosphate 3-phosphatidyltransferase, CDP-diacylglycerol-serine O-phosphatidyltransferase, CDP-glucose-4,6-dehydratase, cell division control protein, cellulose synthase catalytic subunit, Chaperone protein CIpB, chorismate mutase-T and prephenate dehydrogenase, citrate synthase, coproporphyrinogen III oxidase, CTP synthetase, cullin, cyclin D, cystathionine gamma-synthase, cytochrome c-type protein, D-3-phosphoglycerate dehydrogenase, delta-1-pyrroline 5-carboxylase synthetase, diacylglycerol O-acyltransferase, dihydroxyacid dehydratase, DNA helicase II, DNA mismatch repair protein, DNA-binding protein, DnaJ-like chaperone, D-serine dehydratase, electron transfer flavoprotein subunit beta, elongation factor Tu, enoyl-CoA hydratase, enterobacterial common antigen polymerase, eukaryotic translation initiation factor, eukaryotic translation initiation factor 5, exopolyphosphatase, Fe—S subunit of oxidoreductase, flavodoxin, fumarylacetoacetate hydrolase, gamma-glutamyltranspeptidase, GDP-mannose dehydrogenase, geranylgeranyl pyrophosphate synthase, gibberellin 20-oxidase, Glu/Leu/Phe/Val dehydrogenase , glucokinase, glucose dehydrogenase, glucose-1-phosphate cytidylyltransferase, glucose-6-phosphate 1-dehydrogenase, glutamate-ammonia-ligase, glutamine amidotransferase, glutamine synthetase, glutaredoxin, glutathione peroxidase, glutathione S-transferase, Glycine cleavage system T aminomethyltransferase, glycogen (starch) synthase, glycogen synthase, glycoprotease, glycosyl transferase, GM02LC11114-protein, GM02LC17485-protein, harpin-induced family protein, heat shock transcription factor, HesB/YadR/YfhF family protein, histone acetyltransferase, histone H2A, homocitrate synthase, homoserine O-acetyltransferase, hydrolase, integral membrane transporter family protein, iron(III) dicitrate-binding protein, isochorismate synthase, kinase, L-aspartate oxidase, lipoprotein precursor, lysine decarboxylase, lysyl-tRNA synthetase, major facilitator superfamily transporter protein, malate dehydrogenase, malic enzyme, membrane protein, membrane transport protein, metal ion transporter, metal-dependent hydrolase, methylglyoxal synthase, methylglyoxalase, methyltransferase, mitochondrial inner membrane protease subunit, molecular chaperone portein, monothiol glutaredoxin, monthiol glutaredoxin, multidrug resistance protein, multiple antibiotic resistance protein, murein transglycosylase, N-(5′-phosphoribosyl) anthranilate isomerase, Na+/K+ transporter, N-acetyl-gamma-glutamyl-phosphate reductase, NADH dehydrogenase I chain I, NADH dehydrogenase subunit N, NADH-quinone oxidoreductase subunit, NADP-dependent malic enzyme, nitrate/nitrite transport protein, O-antigen chain length determinant, oxidoreductase, oxidoreductase subunit, oxireductase, peptidase, permease protein of phosphate ABC transporter, phosphate permease, phosphate transporter, phosphoadenosine phosphosulfate reductase , phosphoanhydride phosphorylase, phosphoenolpyruvate carboxykinase, phosphopantetheine adenylyltransferase, phosphoribosylformyl glycinamidine synthase subunit, Photosystem I reaction center subunit XI, photosystem II protein, polygalacturonase, precorrin methylase, Pre-mRNA-splicing factor, prolipoprotein diacylglyceryl transferase, protease, protein kinase, protein phosphatase, PTS system N-acetylmuramic acid-specific EIIBC component, purine biosynthesis protein, pyruvate kinase, restriction alleviation protein, riboflavin biosynthesis protein, RNA binding protein, RNA polymerase sigma factor, RNA-binding protein, s_pp015018333r-protein, sec-independent protein translocase, Sec-independent protein translocase subunit, serine acetyltransferase, serine hydroxymethyltransferase, serine protease, serine/threonine dehydratase, Serine/threonine-protein phosphatase, short-chain alcohol dehydrogenase family, sll0281-protein, sll1032-protein, sll1761-protein, sn-glycerol-3-phosphate dehydrogenase, sodium/proton antiporter, sterol 24-C-methyltransferase, thioredoxin, thioredoxin family protein, threonine dehydratase, threonine synthase, transcription factor, transcriptional regulator, transport protein, trehalose-phosphatase, tryptophan biosynthesis protein, tryptophan synthase alpha chain, TTC0768-protein, TTC0881-protein, TTC1386-protein, urease subunit, uridine/cytidine kinase, uroporphyrin-111 C-methyltransferase, XM_{—}473199-protein, ydr183w-protein, ydr273w-protein, ydr507c-protein, yer014w-protein, yer106w-protein, YFL019C-protein, yfl054c-protein, ygl096w-protein, ygl237c-protein, ygr221 c-protein, yhl013c-protein, yhr006w-protein, yhr207c-protein, YKL038W-protein, yml083c-protein, ymr013c-protein, YNL086W-protein, yol160w-protein, zinc finger protein, zinc transporter, and Zm_{—}4842_BE510522-protein, or of a polypeptide as indicated in the respective line in Table II, application no. 3, columns 5 or 8, or its homologs or fragments, and conferring the production of or an increase in 3,4-dihydroxyphenylalanine (dopa), 5-oxoproline, alanine, asparagine, aspartate, citrulline, glycine, homoserine, ornithine, phenylalanine, serine, or tyrosine, respectively; and/or
[27182] (b) stabilizing a mRNA conferring the generation or increased expression of a FCRP, e.g. protein encoded by the nucleic acid molecule of the invention or its homologs or fragments, or of a mRNA encoding the polypeptide of the present invention having the hereinmentioned activity selected from the group consisting of said activities mentioned in (a) and conferring the production of or an increase in 3,4-dihydroxyphenylalanine (dopa), 5-oxoproline, alanine, asparagine, aspartate, citrulline, glycine, homoserine, ornithine, phenylalanine, serine, or tyrosine, respectively; and/or
[27183] (c) increasing the specific activity of a protein conferring the increased expression of a FCRP, e.g. a protein encoded by the nucleic acid molecule of the invention or of the polypeptide of the present invention having herein-mentioned 3,4-dihydroxyphenylalanine (dopa), 5-oxoproline, alanine, asparagine, aspartate, citrulline, glycine, homoserine, ornithine, phenylalanine, serine, or tyrosine generating or increasing activity, respectively, e.g. of a polypeptide having the activity of a protein as indicated in the respective line in Table II, application no. 3, columns 5 or 8, or its homologs or fragments, or decreasing the inhibitory regulation of the polypeptide of the invention; and/or
[27184] (d) generating or increasing the expression of an endogenous or artificial transcription factor mediating the expression of a protein conferring the generation or increased expression of a FCRP, e.g. a protein encoded by the nucleic acid molecule of the invention or of the polypeptide of the invention having herein-mentioned activity selected from the group consisting of said activities mentioned in (a) and conferring a 3,4-dihydroxyphenylalanine (dopa), 5-oxoproline, alanine, asparagine, aspartate, citrulline, glycine, homoserine, ornithine, phenylalanine, serine, or tyrosine increasing activity, respectively, e.g. of a polypeptide having the activity of a protein as indicated in the respective line in Table II, application no. 3, columns 5 or 8 or its homologs; and/or
[27185] (e) stimulating activity of a protein conferring the increased expression of a FCRP, e.g. a protein encoded by the nucleic acid molecule of the present invention or a polypeptide of the present invention having herein-mentioned activity selected from the group consisting of said activities mentioned in (a) and conferring a 3,4-dihydroxyphenylalanine (dopa), 5-oxoproline, alanine, asparagine, aspartate, citrulline, glycine, homoserine, ornithine, phenylalanine, serine, or tyrosine increasing activity, respectively, e.g. of a polypeptide having the activity of a protein as indicated in the respective line in Table II, application no. 3, columns 5 or 8, or its homologs or fragments, by adding one or more exogenous inducing factors to the non-human organism or parts thereof; and/or
[27186] (f) expressing a transgenic gene encoding a protein conferring the increased expression of a FCRP, e.g. a polypeptide encoded by the nucleic acid molecule of the present invention or a polypeptide of the present invention, having herein-mentioned activity selected from the group consisting of said activities mentioned in (a) and conferring a 3,4-dihydroxyphenylalanine (dopa), 5-oxoproline, alanine, asparagine, aspartate, citrulline, glycine, homoserine, ornithine, phenylalanine, serine, or tyrosine increasing activity, respectively, e.g. of a polypeptide having the activity of a protein as indicated in the respective line in Table II, application no. 3, columns 5 or 8, or its homologs or fragments, and/or
[27187] (g) increasing the copy number of a gene conferring the increased expression of a nucleic acid molecule encoding a FCRP, e.g. a polypeptide encoded by the nucleic acid molecule of the invention or the polypeptide of the invention having herein-mentioned activity selected from the group consisting of said activities mentioned in (a) and conferring a 3,4-dihydroxyphenylalanine (dopa), 5-oxoproline, alanine, asparagine, aspartate, citrulline, glycine, homoserine, ornithine, phenylalanine, serine, or tyrosine increasing activity, respectively, e.g. of a polypeptide having the activity of a protein as indicated in the respective line in Table II, application no. 3, columns 5 or 8, or its homologs or fragments; and/or
[27188] (h) increasing the expression of the endogenous gene encoding the FCRP, polypeptide of the invention, e.g. a polypeptide encoded by the nucleic acid molecule of the invention or the polypeptide of the invention having herein-mentioned activity selected from the group consisting of said activities mentioned in (a) and conferring a 3,4-dihydroxyphenylalanine (dopa), 5-oxoproline, alanine, asparagine, aspartate, citrulline, glycine, homoserine, ornithine, phenylalanine, serine, or tyrosine; increasing activity, respectively, e.g. of a polypeptide having the activity of a protein as indicated in the respective line in Table II, application no. 3, columns 5 or 8, or its homologs or fragments, by adding positive expression or removing negative expression elements, e.g. homologous recombination can be used to either introduce positive regulatory elements like for plants the 35S enhancer into the promoter or to remove repressor elements form regulatory regions. Further gene conversion methods can be used to disrupt repressor elements or to enhance to activity of positive elements. Positive elements can be randomly introduced in plants by T-DNA or transposon mutagenesis and lines can be identified in which the positive elements have be integrated near to a gene of the invention, the expression of which is thereby enhanced; and/or
[27189] (i) modulating growth conditions of the non-human organism in such a manner, that the expression or activity of the gene encoding the FCRP, e.g. a protein of the invention or the protein itself is enhanced, for example microorganisms or plants can be grown for example under a higher temperature regime leading to an enhanced expression of heat shock proteins, which can lead to an enhanced 3,4-dihydroxyphenylalanine (dopa), 5-oxoproline, alanine, asparagine, aspartate, citrulline, glycine, homoserine, ornithine, phenylalanine, serine, or tyrosine production, respectively; and/or
[27190] (j) selecting of non-human organisms with especially high activity of the proteins of the invention from natural or from mutagenized resources and breeding them into the target organisms, e.g. the elite crops; and/or
[27191] (k) directing a protein encoded by the nucleic acid molecule of the invention or of the polypeptide of the present invention having herein-mentioned activity selected from the group consisting of said activities mentioned in (a) and conferring a 3,4-dihydroxyphenylalanine (dopa), 5-oxoproline, alanine, asparagine, aspartate, citrulline, glycine, homoserine, ornithine, phenylalanine, serine, or tyrosine increasing activity, respectively, e.g. of a polypeptide having the activity of a protein as indicated in the respective line in Table II, application no. 3, columns 5 or 8, or its homologs or fragments, if for the corresponding nucleic acid molecule in the respective line in column 6 of Table I the term “plastidic” is indicated, to the plastids by the addition of a plastidial targeting sequence or if for the corresponding nucleic acid molecule in the respective line in column 6 of Table I the term “mitochondria!” is indicated, to the mitochondria by the addition of a mitochondrial targeting sequence; and/or
[27192] (l) generating the expression of a protein encoded by the nucleic acid molecule of the invention or of the polypeptide of the present invention having herein-mentioned activity selected from the group consisting of said activities mentioned in (a) and conferring a 3,4-dihydroxyphenylalanine (dopa), 5-oxoproline, alanine, asparagine, aspartate, citrulline, glycine, homoserine, ornithine, phenylalanine, serine, or tyrosine increasing activity, respectively, e.g. of a polypeptide having the activity of a protein as indicated in the respective line in Table II, application no. 3, columns 5 or 8, or its homologs or fragments, if for the corresponding nucleic acid molecule in the respective line in column 6 of Table I the term “plastidic” or “mitochondrial” is indicated, in these organelles by the stable or transient transformation, advantageously stable transformation, of organelles, preferably plastids or mitochondria, with an inventive nucleic acid sequence preferably in form of an expression cassette containing said sequence leading to the expression of the nucleic acids or polypeptides of the invention in the respective organelle; and/or
[27193] (m) generating the expression of a protein encoded by the nucleic acid molecule of the invention or of the polypeptide of the present invention having herein-mentioned activity selected from the group consisting of said activities mentioned in (a) and conferring a 3,4-dihydroxyphenylalanine (dopa), 5-oxoproline, alanine, asparagine, aspartate, citrulline, glycine, homoserine, ornithine, phenylalanine, serine, and/or tyrosine increasing activity, respectively, e.g. of a polypeptide having the activity of a protein as indicated in the respective line in Table II, application no. 3, columns 5 or 8, or its homologs or fragments, if for the corresponding nucleic acid molecule in the respective line in column 6 of Table I the term “plastidic” or “mitochondrial” is indicated, in these organelles by integration of a nucleic acid of the invention into the genome of the respective organelle under control of preferable a promoter selective for the respective organelle.

[27194] Preferably, said mRNA is the coding region of the nucleic acid molecule of the present invention and/or the protein conferring the increased expression of a protein encoded by the coding region of the nucleic acid molecule of the present invention alone or linked to a transit nucleic acid sequence or transit peptide encoding nucleic acid sequence or the polypeptide having the herein mentioned activity, e.g. conferring the generation of or increase of 3,4-dihydroxyphenylalanine (dopa), 5-oxoproline, alanine, asparagine, aspartate, citrulline, glycine, homoserine, ornithine, phenylalanine, serine, or tyrosine, respectively, after increasing the expression or activity of the encoded polypeptide, non-targeted or in organelles such as plastids and/or mitochondria, preferably plastids, or having the activity of a polypeptide having an activity as the protein as shown in the respective line in Table II, application no. 3, column 3, or its homologs. Preferably the increase of 3,4-dihydroxyphenylalanine (dopa), 5-oxoproline, alanine, asparagine, aspartate, citrulline, glycine, homoserine, ornithine, phenylalanine, serine, or tyrosine, respectively, takes place non-targeted or in plastids and/or mitochondria, preferably non-targeted or in plastids.

[27195] [0113.1.1.3] to [0122.1.1.3] for the disclosure of these paragraphs see [0113.1.1.1] to [0122.1.1.1] above.

[27196] The activation of an endogenous polypeptide having above-mentioned activity, e.g. having the activity of a protein as shown in the respective line in Table II, application no. 3, column 3 or of the polypeptide of the invention, e.g. conferring the increase of the fine chemical 3,4-dihydroxyphenylalanine (dopa), 5-oxoproline, alanine, asparagine, aspartate, citrulline, glycine, homoserine, ornithine, phenylalanine, serine, or tyrosine, respectively, by increase of expression or activity in the cytoplasm, and/or in the cytosol, and/or in an organelle, such as plastids or mitochondria, can also be increased by introducing a synthetic transcription factor, which binds close to the coding region of the gene encoding the protein as shown in the respective line in Table II, application no. 3, column 5 or 8, or homologs or fragments thereof, and activates its transcription. A chimeric zinc finger protein can be constructed, which comprises a specific DNA-binding domain and an activation domain as e.g. the VP16 domain of Herpes Simplex virus. The specific binding domain can bind to the regulatory region of the gene encoding the protein as shown in the respective line in Table II, application no. 3, column 5 or 8, or homologs or fragments thereof. The expression of the chimeric transcription factor in a non-human organism, in particular in a plant, leads to a specific expression of the protein as shown in the respective line in Table II, application no. 3, column 5 or 8, or homologs or fragments thereof, see e.g. in WO01/52620, Oriz, Proc. Natl. Acad. Sci. USA 99, 13290 (2002), or Guan, Proc. Natl. Acad. Sci. USA 99, 13296 (2002).

[27197] [0124.1.1.3] to [0127.1.1.3] for the disclosure of these paragraphs see [0124.1.1.1] to [0127.1.1.1] above.

[27198] Owing to the introduction of a gene or a plurality of genes conferring the expression of the nucleic acid molecule of the invention or the polypeptide of the invention, for example the nucleic acid construct mentioned below, or encoding the protein as shown in the respective line in Table II, application no. 3, column 5 or 8, or homologs or fragments thereof, into a non-human organism alone or in combination with other genes, it is possible not only to increase the biosynthetic flux towards the end product, but also to increase, modify or create de novo an advantageous, preferably novel metabolites composition in the non-human organism, e.g. an advantageous composition comprising a higher content of (from a viewpoint of nutritional physiology limited) 3,4-dihydroxyphenylalanine (dopa), 5-oxoproline, alanine, asparagine, aspartate, citrulline, glycine, homoserine, ornithine, phenylalanine, serine, or tyrosine and if desired other amino acids, and/or other metabolites, in free or bound form.

[27199] for the disclosure of this paragraph see [0129.1.1.1] above.

[27200] Accordingly, in one embodiment, the process according to the invention relates to a process, which comprises:
[27201] (a) providing a non-human organism, preferably a microorganism, a plant cell, a plant tissue, a plant or a part thereof, more preferably a microorganism, a plant tissue, a plant or a part thereof;
[27202] (b) increasing the activity of a protein as shown in the respective line in Table II, application no. 3, column 3 or of a polypeptide being encoded by the respective nucleic acid molecule of the present invention and described below, e.g. conferring an increase of the fine chemical 3,4-dihydroxyphenylalanine (dopa), 5-oxoproline, alanine, asparagine, aspartate, citrulline, glycine, homoserine, ornithine, phenylalanine, serine, or tyrosine, respectively, in the non-human organism, preferably in the microorganism, the plant cell, the plant tissue, the plant or a part thereof, more preferably a microorganism, a plant tissue, a plant or a part thereof, especially cytoplasmic or in an organelle, like plastids or mitochondria,
[27203] (c) growing the non-human organism, preferably the microorganism, the plant cell, the plant tissue, the plant or a part thereof, under conditions which permit the production of said chemical in the non-human organism, preferably the microorganism, the plant cell, the plant tissue, the plant or a part thereof; and
[27204] (d) if desired, recovering, optionally isolating, said fine chemical, in free and/or bound form, and, optionally further free and/or bound amino acids, and/or other metabolites synthesized by the non-human organism, the microorganism, the plant cell, the plant tissue, the plant or a part thereof.

[27205] [0131.1.1.3] to [0140.1.3.3] for the disclosure of these paragraphs see [0131.1.1.1] to [0139.1.1.1] above.

[27206] In another embodiment, the invention relates to a (isolated) nucleic acid molecule, which comprises a nucleic acid molecule selected from the group consisting of:
[27207] (a) a nucleic acid molecule encoding a polypeptide shown in Table II, application no. 3, column 5 or 8, preferably shown in Table II B, application no. 3, column 8, or a homolog or a fragment thereof;
[27208] (b) a nucleic acid molecule shown in Table I, application no. 3, column 5 or 8, preferably shown in Table I B, application no. 3, column 8, preferably the coding region thereof, or a homolog or a fragment thereof;
[27209] (c) a nucleic acid molecule, which, as a result of the degeneracy of the genetic code, can be derived from a polypeptide sequence depicted in column 5 or 8 of Table II, application no. 3, preferably in column 8 of Table II B, application no. 3;
[27210] (d) a nucleic acid molecule having at least 30% identity, preferably at least 40%, 50%, 60%, 70%, 75%, 80%, 85%, 90%, 95%, 96%, 97%, 98%, 99%, 99.5%, with the nucleic acid molecule sequence of a polynucleotide comprising the nucleic acid molecule shown in column 5 or 8 of Table I, application no. 3, preferably shown in column 8 of Table I B, application no. 3, preferably the coding region thereof;
[27211] (e) a nucleic acid molecule encoding a polypeptide having at least 30% identity, preferably at least 40%, 50% 60%, 70%, 75%, 80%, 85%, 90%, 95%, 96%, 97%, 98%, 99%, 99.5%, identity with the amino acid sequence of the polypeptide encoded by the nucleic acid molecule of (a), (b), (c) or (d);
[27212] (f) a nucleic acid molecule which hybridizes with a nucleic acid molecule of (a), (b), (c), (d) or (e) under stringent hybridization conditions;
[27213] (g) a nucleic acid molecule encoding a polypeptide which can be isolated with the aid of monoclonal or polyclonal antibodies made against a polypeptide encoded by one of the nucleic acid molecules of (a), (b), (c), (d), (e) or (f);
[27214] (h) a nucleic acid molecule encoding a polypeptide comprising the consensus sequence or one or more polypeptide motifs as shown in column 8 of Table IV, application no. 3;
[27215] (i) a nucleic acid molecule encoding a polypeptide having the activity represented by a respective protein as depicted in column 5 of Table II, application no. 3;
[27216] (j) a nucleic acid molecule comprising a polynucleotide which is obtained by amplifying a cDNA library or a genomic library using the primers in Table III, application no. 3, column 8;
[27217] and
[27218] (k) nucleic acid molecule which is obtainable by screening a suitable nucleic acid library, especially a cDNA library and/or a genomic library, under stringent hybridization conditions with a probe comprising one of the sequences of the nucleic acid molecule of (a), (b), (c), (d), (e), (f), (g), (h), (i) or (j) or with a fragment of at least 15 nt, preferably 20 nt, 30 nt, 50 nt, 100 nt, 200 nt,500 nt, 1000 nt, 1500 nt, 2000 nt or 3000 nt of the nucleic acid molecule characterized in (a), (b), (c), (d), (e), (f), (g), (h), (i) or (j); or a nucleic acid molecule comprising a sequence which is complementary thereto.
   (All the references to Tables I to IV are references to the corresponding lines of Tables I to IV.)

[27219] In a preferred embodiment thereof said nucleic acid molecule according to (a), (b), (c), (d), (e), (f), (g), (h), (i), (j) or (k) encodes a polypeptide which has the activity of the respective polypeptide represented by a protein comprising a polypeptide as depicted in the respective line in column 5 of Table II, application no. 3.

[27220] In another preferred embodiment thereof said nucleic acid molecule according to (a), (b), (c), (d), (e), (f), (g), (h), (i), (j) or (k) confers a generation or an increase of the respective fine chemical in a non-human organism or a part thereof as compared to a corresponding wild-type non-human organism or part thereof.

[27221] In another preferred embodiment thereof said nucleic acid molecule according to (a), (b), (c), (d), (e), (f), (g), (h), (i), (j) or (k) encodes a polypeptide which has the activity of the respective polypeptide represented by a protein as depicted in the respective line in column 5 of Table II application no. 3 and confers a generation or an increase of the respective fine chemical in a non-human organism or a part thereof as compared to a corresponding wild-type non-human organism or part thereof.

[27222] In another embodiment, the invention relates to a (isolated) nucleic acid molecule, which comprises a nucleic acid molecule selected from the group consisting of:
[27223] (a) a nucleic acid molecule encoding a polypeptide shown in Table II, column 5 or 8, application no. 3, preferably shown in Table II A, application no. 3, in column 5 or in Table II A, application no. 3, column 8 or in Table II B, application no. 3, column 8, or a homolog or a fragment thereof;
[27224] (b) a nucleic acid molecule shown in Table I, application no. 3, column 5 or 8, preferably shown in Table I A, application no. 3, in column 5 or in Table I A, application no. 3, column 8 or in Table I B, application no. 3, column 8, preferably the coding region thereof, or a homolog or a fragment thereof;
[27225] (c) a nucleic acid molecule, which, as a result of the degeneracy of the genetic code, can be derived from a polypeptide sequence depicted in column 5 or 8 of Table II, application no. 3, preferably shown in Table II A, application no. 3, in column 5 or in Table II A, application no. 3, column 8 or in Table II B, application no. 3, column 8;
[27226] (d) a nucleic acid molecule having at least 30% identity, preferably at least 40%, 50%, 60%, 70%, 75%, 80%, 85%, 90%, 95%, 96%, 97%, 98%, 99%, 99.5%, with the nucleic acid molecule sequence of a polynucleotide comprising the nucleic acid molecule shown in column 5 or 8 of Table I, application no. 3, preferably shown in Table I A, application no. 3, in column 5 or in Table I A, application no. 3, column 8 or in Table I B column 8, preferably the coding region thereof;
[27227] (e) a nucleic acid molecule encoding a polypeptide having at least 30% identity, preferably at least 40%, 50% 60%, 70%, 75%, 80%, 85%, 90%, 95%, 96%, 97%, 98%, 99%, 99.5%, identity with the amino acid sequence of the polypeptide encoded by the nucleic acid molecule of (a), (b), (c) or (d);
[27228] (f) a nucleic acid molecule which hybridizes with a nucleic acid molecule of (a), (b), (c), (d) or (e) under stringent hybridization conditions;
[27229] (g) a nucleic acid molecule encoding a polypeptide which can be isolated with the aid of monoclonal or polyclonal antibodies made against a polypeptide encoded by one of the nucleic acid molecules of (a), (b), (c), (d), (e) or (f);
[27230] (h) a nucleic acid molecule encoding a polypeptide comprising the consensus sequence or one or more polypeptide motifs as shown in column 8 of Table IV, application no. 3;
[27231] (i) a nucleic acid molecule encoding a polypeptide having the activity represented by a respective protein as depicted in column 5 of Table II, application no. 3;
[27232] (j) a nucleic acid molecule comprising a polynucleotide which is obtained by amplifying a cDNA library or a genomic library using the primers in Table III, application no. 3, column 8;
[27233] and
[27234] (k) nucleic acid molecule which is obtainable by screening a suitable nucleic acid library, especially a cDNA library and/or a genomic library, under stringent hybridization conditions with a probe comprising one of the sequences of the nucleic acid molecule of (a), (b), (c), (d), (e), (f), (g), (h), (i) or (j) or with a fragment thereof having at least 15 nt, preferably 20 nt, 30 nt, 50 nt, 100 nt, 200 nt,500 nt, 1000 nt, 1500 nt, 2000 nt or 3000 nt of the nucleic acid molecule complementary to a nucleic acid sequence characterized in (a), (b), (c), (d), (e), (f), (g), (h), (i) or (j);
   or a nucleic acid molecule comprising a sequence which is complementary thereto;
   whereby, preferably, the nucleic acid molecule according to (a), (b), (c), (d), (e), (f), (g), (h), (i), (j) or (k) distinguishes over the sequence depicted in Table I A and/or I B, application no. 3, column 5 or 8, or the coding regions thereof, by one or more nucleotides (especially but not exceeding 5%, preferably 4%, 3%, 2%, 1%, 0.5%, 0.2% or 0.1%). In an embodiment, the nucleic acid molecule of the invention does not consist of the sequence shown in Table I A and/or I B, application no. 3, column 5 or 8, or the coding region thereof. In another embodiment, the nucleic acid molecule of the present invention, preferably the coding region thereof, is at least 30%, 40%, 50%, 60%, 70%, 80%, 90%, 95% identical but less than 100%, 99.999%, 99.99%, 99.9%, 99%, 98%, 97%, 96% or 95% identical to the sequence shown in Table I A and/or I B, application no. 3, column 5 or 8, or the coding region thereof, respectively. In a further embodiment the nucleic acid molecule does not encode the polypeptide sequence shown in Table II A and/or II B, application no. 3, column 5 or 8 but homologs thereof. Accordingly, in one embodiment, the nucleic acid molecule of the present invention encodes in one embodiment a polypeptide which differs at least in one or more amino acids (especially but not exceeding 5%, preferably 4%, 3%, 2%, 1%, 0.5%, 0.2% or 0.1%) from the polypeptide shown in Table II, application no. 3, column 5 or 8 and does not encode a protein of the sequence shown in Table II A and/or II B, application no. 3, column 5 or 8. Accordingly, in one embodiment, the protein encoded by a sequence of a nucleic acid according to (a), (b), (c), (d), (e), (f), (g), (h), (i), (j) or (k) does not consist of the sequence shown in Table I A and/or I B, application no. 3, column 5 or 8, or the coding region thereof. In a further embodiment, the protein of the present invention is at least 30%, 40%, 50%, 60%, 70%, 80%, 90%, 95% identical to protein sequence depicted in Table II A and/or II B, application no. 3, column 5 or 8 but less than 100%, preferably less than 99.999%, 99.99%, 99.9%, 99%, 98%, 97%, 96% or 95% identical to the sequence shown in Table II A and/or II B, application no. 3, column 5 or 8.
   (All the references to Tables I to IV are references to the corresponding lines of Tables I to IV.)

[27235] In a preferred embodiment thereof said nucleic acid molecule according to (a), (b), (c), (d), (e), (f), (g), (h), (i), (j) or (k) encodes a polypeptide which has the activity of the respective polypeptide represented by a protein comprising a polypeptide as depicted in the respective line in column 5 of Table II, application no. 3.

[27236] In another preferred embodiment thereof said nucleic acid molecule according to (a), (b), (c), (d), (e), (f), (g), (h), (i), (j) or (k) confers a generation or an increase of the respective fine chemical in a non-human organism or a part thereof as compared to a corresponding wild-type non-human organism or part thereof.

[27237] In another preferred embodiment thereof said nucleic acid molecule according to (a), (b), (c), (d), (e), (f), (g), (h), (i), (j) or (k) encodes a polypeptide which has the activity of the respective polypeptide represented by a protein as depicted in the respective line in column 5 of Table II, application no. 3, and confers a generation or an increase of the respective fine chemical in a non-human organism or a part thereof as compared to a corresponding wild-type non-human organism or part thereof.

[27238] [0144.1.1.3] to [0155.1.1.3] for the disclosure of these paragraphs see [0144.1.1.1] to [0155.1.1.1] above.

[27239] In a preferred embodiment a nucleic acid construct, for example an expression cassette, comprises upstream, i.e. at the 5′ end of the encoding sequence, a promoter and downstream, i.e. at the 3′ end, a polyadenylation signal and optionally other regulatory elements which are operably linked to the intervening encoding sequence with one of the nucleic acids as depicted in the respective line in Table I, application no. 3, column 5 or 8, preferably the coding region thereof, or a homolog or a fragment thereof. By an operable linkage is meant the sequential arrangement of promoter, encoding sequence, terminator, optionally other regulatory elements and optionally targeting sequences in such a way that each of the regulatory elements/targeting sequence can fulfill its function in the expression of the encoding sequence in due manner. In one embodiment the sequences preferred for operable linkage are targeting sequences for ensuring subcellular localization in organelles, like plastids or mitochondria. However, targeting sequences for ensuring subcellular localization in the endoplasmic reticulum (=ER), in the nucleus, in oil corpuscles or other compartments may also be employed as well as translation promoters such as the 5′ lead sequence in tobacco mosaic virus (Gallie et al., Nucl. Acids Res. 15, 8693 (1987)).

[27240] for the disclosure of this paragraph see [0157.1.1.1] above.

[27241] In an embodiment, the invention relates to an expression cassette, comprising
[27242] 1) a promoter, preferably a promoter selected from the group consisting of Big35S, PCUbi, Super and USP;
[27243] 2) a nucleic acid molecule selected from the group consisting of
   [27244] (a) a nucleic acid molecule encoding a polypeptide shown in Table II, application no. 3, column 5 or 8, preferably shown in Table II A, application no. 3, column 5, or in Table II A, application no. 3, column 8, or in Table II B, application no. 3, column 8, or a homolog or a fragment thereof;
   [27245] (b) a nucleic acid molecule shown in Table I, application no. 3, column 5 or 8, preferably shown in Table I A, application no. 3, column 5, or in Table I A, application no. 3, column 8, or in Table I B, application no. 3, column 8, preferably the coding region thereof, or a homolog or a fragment thereof;
   [27246] (c) a nucleic acid molecule, which, as a result of the degeneracy of the genetic code, can be derived from a polypeptide sequence depicted in column 5 or 8 of Table II, application no. 3, preferably shown in Table II A, application no. 3, column 5, or in Table II A, application no. 3, column 8, or in Table II B, application no. 3, column 8;
   [27247] (d) a nucleic acid molecule having at least 30% identity, preferably at least 40%, 50%, 60%, 70%, 75%, 80%, 85%, 90%, 95%, 96%, 97%, 98%, 99%, 99.5%, with the nucleic acid molecule sequence of a polynucleotide comprising the nucleic acid molecule shown in column 5 or 8 of Table I, application no. 3, preferably shown in Table I A, application no. 3, column 5, or in Table I A, application no. 3, column 8, or in Table I B, application no. 3, column 8, preferably the coding region thereof;
   [27248] (e) a nucleic acid molecule encoding a polypeptide having at least 30% identity, preferably at least 40%, 50% 60%, 70%, 75%, 80%, 85%, 90%, 95%, 96%, 97%, 98%, 99%, 99.5%, identity with the amino acid sequence of the polypeptide encoded by the nucleic acid molecule of (a), (b), (c) or (d);
   [27249] (f) a nucleic acid molecule which hybridizes with a nucleic acid molecule of (a), (b), (c), (d) or (e) under stringent hybridization conditions;
   [27250] (g) a nucleic acid molecule encoding a polypeptide which can be isolated with the aid of monoclonal or polyclonal antibodies made against a polypeptide encoded by one of the nucleic acid molecules of (a), (b), (c), (d), (e) or (f);
   [27251] (h) a nucleic acid molecule encoding a polypeptide comprising the consensus sequence or one or more polypeptide motifs as shown in column 8 of Table IV, application no. 3;
   [27252] (i) a nucleic acid molecule encoding a polypeptide having the activity represented by a respective protein as depicted in column 5 of Table II, application no. 3;
   [27253] (j) a nucleic acid molecule comprising a polynucleotide which is obtained by amplifying a cDNA library or a genomic library using the primers in Table III, application no. 3, column 8;
   [27254] and
   [27255] (k) nucleic acid molecule which is obtainable by screening a suitable nucleic acid library, especially a cDNA library and/or a genomic library, under stringent hybridization conditions with a probe comprising one of the sequences of the nucleic acid molecule of (a), (b), (c), (d), (e), (f), (g), (h), (i) or (j) or with a fragment of at least 15 nt, preferably 20 nt, 30 nt, 50 nt, 100 nt, 200 nt,500 nt, 1000 nt, 1500 nt, 2000 nt or 3000 nt of the nucleic acid molecule characterized in (a), (b), (c), (d), (e), (f), (g), (h), (i) or (j);
   [27256] or a nucleic acid molecule comprising a sequence which is complementary thereto.
      and, optionally
[27257] 3) nucleic acid molecule encoding a transit peptide, preferably encoding a plastidal transit peptide or a mitochondrial transit peptide; which are operable linked.
   (All the references to Tables I to IV are references to the corresponding lines of Tables I to IV.)

[27258] In a preferred embodiment thereof said nucleic acid molecule according to 2 (a), (b), (c), (d), (e), (f), (g), (h), (i), (j) or (k) encodes a polypeptide which has the activity of the respective polypeptide represented by a protein comprising a polypeptide as depicted in the respective line in column 5 of Table II, application no. 3.

[27259] In another preferred embodiment thereof said nucleic acid molecule according to 2 (a), (b), (c), (d), (e), (f), (g), (h), (i), (j) or (k) confers a generation or an increase of the respective fine chemical in a non-human organism or a part thereof as compared to a corresponding wild-type non-human organism or part thereof.

[27260] In another preferred embodiment thereof said nucleic acid molecule according to 2 (a), (b), (c), (d), (e), (f), (g), (h), (i), (j) or (k) encodes a polypeptide which has the activity of the respective polypeptide represented by a protein as depicted in the respective line in column 5 of Table II application no. 3 and confers a generation or an increase of the respective fine chemical in a non-human organism or a part thereof as compared to a corresponding wild-type non-human organism or part thereof.

[27261] In another embodiment thereof the expression cassette comprises 3) a nucleic acid molecule encoding a transit peptide, preferably encoding a plastidal transit peptide, especially in case in column 6 of Table I, application no. 3, in the same line as of the respective nucleic acid molecule according to 2) “plastidic” is depicted, or encoding a mitochondrial transit peptide, especially in case in column 6 of Table I, application no. 3, in the same line as of the respective nucleic acid molecule according to 2) “mitochondrial” is depicted.

[27262] In another embodiment thereof the expression cassette does not comprise 3) a nucleic acid molecule encoding a transit peptide, especially in case in column 6 of Table I, application no. 3, in the same line as of the respective nucleic acid molecule according to 2) “non-targeted” is depicted.

[27263] In a further embodiment, the invention relates to an expression cassette, comprising
[27264] 1) a promoter, preferably a promoter selected from the group consisting of Big35S, PCUbi, Super and USP;
[27265] 2) a nucleic acid molecule selected from the group consisting of
   [27266] (a) a nucleic acid molecule encoding a polypeptide shown in Table II, application no. 3, column 5 or 8, preferably shown in Table II A, application no. 3, column 5, or in Table II A, application no. 3, column 8, or in Table II B, application no. 3, column 8, or a homolog or a fragment thereof;
   [27267] (b) a nucleic acid molecule shown in Table I, application no. 3, column 5 or 8, preferably shown in Table I A, application no. 3, column 5, or in Table I A, application no. 3, column 8, or in Table I B, application no. 3, column 8, preferably the coding region thereof, or a homolog or a fragment thereof;
   [27268] (c) a nucleic acid molecule, which, as a result of the degeneracy of the genetic code, can be derived from a polypeptide sequence depicted in column 5 or 8 of Table II, application no. 3, preferably shown in Table II A, application no. 3, column 5, or in Table II A, application no. 3, column 8, or in Table II B, application no. 3, column 8;
   [27269] (d) a nucleic acid molecule having at least 30% identity, preferably at least 40%, 50%, 60%, 70%, 75%, 80%, 85%, 90%, 95%, 96%, 97%, 98%, 99%, 99.5%, with the nucleic acid molecule sequence of a polynucleotide comprising the nucleic acid molecule shown in column 5 or 8 of Table I, application no. 3, preferably shown in Table I A, application no. 3, column 5, or in Table I A, application no. 3, column 8,or in Table I B, application no. 3, column 8, preferably the coding region thereof;
   [27270] (e) a nucleic acid molecule encoding a polypeptide having at least 30% identity, preferably at least 40%, 50% 60%, 70%, 75%, 80%, 85%, 90%, 95%, 96%, 97%, 98%, 99%, 99.5%, identity with the amino acid sequence of the polypeptide encoded by the nucleic acid molecule of (a), (b), (c) or (d);
   [27271] (f) a nucleic acid molecule which hybridizes with a nucleic acid molecule of (a), (b), (c), (d) or (e) under stringent hybridization conditions;
   [27272] (g) a nucleic acid molecule encoding a polypeptide which can be isolated with the aid of monoclonal or polyclonal antibodies made against a polypeptide encoded by one of the nucleic acid molecules of (a), (b), (c), (d), (e) or (f);
   [27273] (h) a nucleic acid molecule encoding a polypeptide comprising the consensus sequence or one or more polypeptide motifs as shown in column 8 of Table IV, application no. 3;
   [27274] (i) a nucleic acid molecule encoding a polypeptide having the activity represented by a respective protein as depicted in column 5 of Table II, application no. 3;
   [27275] (j) a nucleic acid molecule comprising a polynucleotide which is obtained by amplifying a cDNA library or a genomic library using the primers in Table III, application no. 3, column 8;
   [27276] and
   [27277] (k) nucleic acid molecule which is obtainable by screening a suitable nucleic acid library, especially a cDNA library and/or a genomic library, under stringent hybridization conditions with a probe comprising one of the sequences of the nucleic acid molecule of (a), (b), (c), (d), (e), (f), (g), (h), (i) or (j) or with a fragment of at least 15 nt, preferably 20 nt, 30 nt, 50 nt, 100 nt, 200 nt,500 nt, 1000 nt, 1500 nt, 2000 nt or 3000 nt of the nucleic acid molecule characterized in (a), (b), (c), (d), (e), (f), (g), (h), (i) or (j);
   [27278] or a nucleic acid molecule comprising a sequence which is complementary thereto; and, optionally
[27279] 3) nucleic acid molecule encoding a transit peptide, preferably encoding a plastidal transit peptide or a mitochondrial transit peptide;
   which are operable linked and
   whereby, preferably, the nucleic acid molecule according to 2 (a), (b), (c), (d), (e), (f), (g), (h), (i), (j) or (k) distinguishes over the sequence depicted in Table I A and/or I B, application no. 3, column 5 or 8, or the coding region thereof, by one or more nucleotides (especially but not exceeding 5%, preferably 4%, 3%, 2%, 1%, 0.5%, 0.2% or 0.1%). In an embodiment, the nucleic acid molecule of the invention according to 2) does not consist of the sequence shown in Table I A and/or I B, application no. 3, column 5 or 8, or the coding region thereof. In another embodiment, the nucleic acid molecule of the present invention, preferably the coding region thereof, is at least 30%, 40%, 50%, 60%, 70%, 80%, 90%, 95% identical but less than 100%, 99.999%, 99.99%, 99.9%, 99%, 98%, 97%, 96% or 95% identical to the sequence shown in Table I A and/or I B, application no. 3, column 5 or 8, or the coding region thereof, respectively. In a further embodiment the nucleic acid molecule does not encode the polypeptide sequence shown in Table II A and/or II B, application no. 3, column 5 or 8 but homologs thereof. Accordingly, in one embodiment, the nucleic acid molecule of the present invention encodes in one embodiment a polypeptide which differs at least in one or more amino acids (especially but not exceeding 5%, preferably 4%, 3%, 2%, 1%, 0.5%, 0.2% or 0.1%) from the polypeptide shown in Table II, application no. 3, column 5 or 8 and does not encode a protein of the sequence shown in Table II A and/or II B, application no. 3, column 5 or 8. Accordingly, in one embodiment, the protein encoded by a sequence of a nucleic acid according to 2(a), (b), (c), (d), (e), (f), (g), (h), (i), (j) or (k) does not consist of the sequence shown in Table I A and/or I B, application no. 3, column 5 or 8, or the coding region thereof. In a further embodiment, the protein of the present invention is at least 30%, 40%, 50%, 60%, 70%, 80%, 90%, 95% identical to protein sequence depicted in Table II A and/or II B, application no. 3, column 5 or 8 but less than 100%, 99.999%, 99.99%, 99.9%, 99%, 98%, 97%, 96% or 95% identical to the sequence shown in Table II A and/or II B, application no. 3, column 5 or 8.
   (All the references to Tables I to IV are references to the corresponding lines of Tables I to IV.)

[27280] In a preferred embodiment thereof said nucleic acid molecule according to 2 (a), (b), (c), (d), (e), (f), (g), (h), (i), (j) or (k) encodes a polypeptide which has the activity of the respective polypeptide represented by a protein comprising a polypeptide as depicted in the respective line in column 5 of Table II, application no. 3.

[27281] In another preferred embodiment thereof said nucleic acid molecule according to 2 (a), (b), (c), (d), (e), (f), (g), (h), (i), (j) or (k) confers a generation or an increase of the respective fine chemical in a non-human organism or a part thereof as compared to a corresponding wild-type non-human organism or part thereof.

[27282] In another preferred embodiment thereof said nucleic acid molecule according to 2 (a), (b), (c), (d), (e), (f), (g), (h), (i), (j) or (k) encodes a polypeptide which has the activity of the respective polypeptide represented by a protein as depicted in the respective line in column 5 of Table II application no. 3 and confers a generation or an increase of the respective fine chemical in a non-human organism or a part thereof as compared to a corresponding wild-type non-human organism or part thereof.

[27283] In another embodiment thereof the expression cassette comprises 3) a nucleic acid molecule encoding a transit peptide, preferably encoding a plastidal transit peptide, especially in case in column 6 of Table I, application no. 3, in the same line as of the respective nucleic acid molecule according to 2) “plastidic” is depicted, or encoding a mitochondrial transit peptide, especially in case in column 6 of Table I, application no. 3, in the same line as of the respective nucleic acid molecule according to 2) “mitochondrial” is depicted.

[27284] In another embodiment thereof the expression cassette does not comprise 3) a nucleic acid molecule encoding a transit peptide, especially in case in column 6 of Table I, application no. 3, in the same line as of the respective nucleic acid molecule according to 2) “non-targeted” is depicted.

[27285] In an embodiment the present invention relates to an expresssion cassette comprising a) a promoter, preferably a promoter selected from the group consisting of Big35S, PCUbi, Super and USP, in particular p-PcUBI; and b) the nucleic acid SEQ ID NO. 15187, or a homolog or fragment thereof, or a homolog thereof being depicted in Table I, application no. 3, column 8, in the same line as SEQ ID NO. 15187, preferably the coding region thereof, a homolog or a fragment thereof; which are operable linked.

[27286] In an embodiment thereof the expression cassette comprises in addition c) a nucleic acid molecule encoding a transit peptide, especially a plastidal transit petide in case in Table I, application no. 3, in column 6 in the same line as SEQ ID NO. 15187 is depicted, plastidic is mentioned, or a mitochondrial transit peptide in case in Table I, application no. 3, in column 6 in the same line as SEQ ID NO. 15187 is depicted, mitochondrial is mentioned; which is operable linked, too.

[27287] In another embodiment thereof the expression cassette does not comprise an additional transit peptide in case in Table I, application no. 3, in column 6 in the same line as SEQ ID NO. 15187 is depicted, non-targeted is mentioned.

[27288] In an embodiment the present invention relates to an expresssion cassette comprising a) a promoter, preferably a promoter selected from the group consisting of Big35S, PCUbi, Super and USP, in particular p-PcUBI; and b) the nucleic acid SEQ ID NO. 69, or a homolog or fragment thereof, or a homolog thereof being depicted in Table I, application no. 3, column 8, in the same line as SEQ ID NO. 69, preferably the coding region thereof, a homolog or a fragment thereof; which are operable linked.

[27289] In an embodiment thereof the expression cassette comprises in addition c) a nucleic acid molecule encoding a transit peptide, especially a plastidal transit petide in case in Table I, application no. 3, in column 6 in the same line as SEQ ID NO. 69 is depicted, plastidic is mentioned, or a mitochondrial transit peptide in case in Table I, application no. 3, in column 6 in the same line as SEQ ID NO. 69 is depicted, mitochondrial is mentioned; which is operable linked, too.

[27290] In another embodiment thereof the expression cassette does not comprise an additional transit peptide in case in Table I, application no. 3, in column 6 in the same line as SEQ ID NO. 69 is depicted, non-targeted is mentioned.

[27291] In an embodiment the present invention relates to an expresssion cassette comprising a) a promoter, preferably a promoter selected from the group consisting of Big35S, PCUbi, Super and USP, in particular p-PcUBI; and b) the nucleic acid SEQ ID NO. 15532, or a homolog or fragment thereof, or a homolog thereof being depicted in Table I, application no. 3, column 8, in the same line as SEQ ID NO. 15532, preferably the coding region thereof, a homolog or a fragment thereof; which are operable linked.

[27292] In an embodiment thereof the expression cassette comprises in addition c) a nucleic acid molecule encoding a transit peptide, especially a plastidal transit petide in case in Table I, application no. 3, in column 6 in the same line as SEQ ID NO. 15532 is depicted, plastidic is mentioned, or a mitochondrial transit peptide in case in Table I, application no. 3, in column 6 in the same line as SEQ ID NO. 15532 is depicted, mitochondrial is mentioned; which is operable linked, too.

[27293] In another embodiment thereof the expression cassette does not comprise an additional transit peptide in case in Table I, application no. 3, in column 6 in the same line as SEQ ID NO. 15532 is depicted, non-targeted is mentioned.

[27294] In an embodiment the present invention relates to an expresssion cassette comprising a) a promoter, preferably a promoter selected from the group consisting of Big35S, PCUbi, Super and USP, in particular p-PcUBI; and b) the nucleic acid SEQ ID NO. 16155, or a homolog or fragment thereof, or a homolog thereof being depicted in Table I, application no. 3, column 8, in the same line as SEQ ID NO. 16155, preferably the coding region thereof, a homolog or a fragment thereof; which are operable linked.

[27295] In an embodiment thereof the expression cassette comprises in addition c) a nucleic acid molecule encoding a transit peptide, especially a plastidal transit petide in case in Table I, application no. 3, in column 6 in the same line as SEQ ID NO. 16155 is depicted, plastidic is mentioned, or a mitochondrial transit peptide in case in Table I, application no. 3, in column 6 in the same line as SEQ ID NO. 16155 is depicted, mitochondrial is mentioned; which is operable linked, too.

[27296] In another embodiment thereof the expression cassette does not comprise an additional transit peptide in case in Table I, application no. 3, in column 6 in the same line as SEQ ID NO. 16155 is depicted, non-targeted is mentioned.

[27297] In an embodiment the present invention relates to an expresssion cassette comprising a) a promoter, preferably a promoter selected from the group consisting of Big35S, PCUbi, Super and USP, in particular p-PcUBI; and b) the nucleic acid SEQ ID NO. 16263, or a homolog or fragment thereof, or a homolog thereof being depicted in Table I, application no. 3, column 8, in the same line as SEQ ID NO. 16263, preferably the coding region thereof, a homolog or a fragment thereof; which are operable linked.

[27298] In an embodiment thereof the expression cassette comprises in addition c) a nucleic acid molecule encoding a transit peptide, especially a plastidal transit petide in case in Table I, application no. 3, in column 6 in the same line as SEQ ID NO. 16263 is depicted, plastidic is mentioned, or a mitochondrial transit peptide in case in Table I, application no. 3, in column 6 in the same line as SEQ ID NO. 16263 is depicted, mitochondrial is mentioned; which is operable linked, too.

[27299] In another embodiment thereof the expression cassette does not comprise an additional transit peptide in case in Table I, application no. 3, in column 6 in the same line as SEQ ID NO. 16263 is depicted, non-targeted is mentioned.

[27300] In an embodiment the present invention relates to an expresssion cassette comprising a) a promoter, preferably a promoter selected from the group consisting of Big35S, PCUbi, Super and USP, in particular p-PcUBI; and b) the nucleic acid SEQ ID NO. 16883, or a homolog or fragment thereof, or a homolog thereof being depicted in Table I, application no. 3, column 8, in the same line as SEQ ID NO. 16883, preferably the coding region thereof, a homolog or a fragment thereof; which are operable linked.

[27301] In an embodiment thereof the expression cassette comprises in addition c) a nucleic acid molecule encoding a transit peptide, especially a plastidal transit petide in case in Table I, application no. 3, in column 6 in the same line as SEQ ID NO. 16883 is depicted, plastidic is mentioned, or a mitochondrial transit peptide in case in Table I, application no. 3, in column 6 in the same line as SEQ ID NO. 16883 is depicted, mitochondrial is mentioned; which is operable linked, too.

[27302] In another embodiment thereof the expression cassette does not comprise an additional transit peptide in case in Table I, application no. 3, in column 6 in the same line as SEQ ID NO. 16883 is depicted, non-targeted is mentioned.

[27303] In an embodiment the present invention relates to an expresssion cassette comprising a) a promoter, preferably a promoter selected from the group consisting of Big35S, PCUbi, Super and USP, in particular p-PcUBI; and b) the nucleic acid SEQ ID NO. 17356, or a homolog or fragment thereof, or a homolog thereof being depicted in Table I, application no. 3, column 8, in the same line as SEQ ID NO. 17356, preferably the coding region thereof, a homolog or a fragment thereof; which are operable linked.

[27304] In an embodiment thereof the expression cassette comprises in addition c) a nucleic acid molecule encoding a transit peptide, especially a plastidal transit petide in case in Table I, application no. 3, in column 6 in the same line as SEQ ID NO. 17356 is depicted, plastidic is mentioned, or a mitochondrial transit peptide in case in Table I, application no. 3, in column 6 in the same line as SEQ ID NO. 17356 is depicted, mitochondrial is mentioned; which is operable linked, too.

[27305] In another embodiment thereof the expression cassette does not comprise an additional transit peptide in case in Table I, application no. 3, in column 6 in the same line as SEQ ID NO. 17356 is depicted, non-targeted is mentioned.

[27306] In an embodiment the present invention relates to an expresssion cassette comprising a) a promoter, preferably a promoter selected from the group consisting of Big35S, PCUbi, Super and USP, in particular p-PcUBI; and b) the nucleic acid SEQ ID NO. 17451, or a homolog or fragment thereof, or a homolog thereof being depicted in Table I, application no. 3, column 8, in the same line as SEQ ID NO. 17451, preferably the coding region thereof, a homolog or a fragment thereof; which are operable linked.

[27307] In an embodiment thereof the expression cassette comprises in addition c) a nucleic acid molecule encoding a transit peptide, especially a plastidal transit petide in case in Table I, application no. 3, in column 6 in the same line as SEQ ID NO. 17451 is depicted, plastidic is mentioned, or a mitochondrial transit peptide in case in Table I, application no. 3, in column 6 in the same line as SEQ ID NO. 17451 is depicted, mitochondrial is mentioned; which is operable linked, too.

[27308] In another embodiment thereof the expression cassette does not comprise an additional transit peptide in case in Table I, application no. 3, in column 6 in the same line as SEQ ID NO. 17451 is depicted, non-targeted is mentioned.

[27309] In an embodiment the present invention relates to an expresssion cassette comprising a) a promoter, preferably a promoter selected from the group consisting of Big35S, PCUbi, Super and USP, in particular p-PcUBI; and b) the nucleic acid SEQ ID NO. 385, or a homolog or fragment thereof, or a homolog thereof being depicted in Table I, application no. 3, column 8, in the same line as SEQ ID NO. 385, preferably the coding region thereof, a homolog or a fragment thereof; which are operable linked.

[27310] In an embodiment thereof the expression cassette comprises in addition c) a nucleic acid molecule encoding a transit peptide, especially a plastidal transit petide in case in Table I, application no. 3, in column 6 in the same line as SEQ ID NO. 385 is depicted, plastidic is mentioned, or a mitochondrial transit peptide in case in Table I, application no. 3, in column 6 in the same line as SEQ ID NO. 385 is depicted, mitochondrial is mentioned; which is operable linked, too.

[27311] In another embodiment thereof the expression cassette does not comprise an additional transit peptide in case in Table I, application no. 3, in column 6 in the same line as SEQ ID NO. 385 is depicted, non-targeted is mentioned.

[27312] In an embodiment the present invention relates to an expresssion cassette comprising a) a promoter, preferably a promoter selected from the group consisting of Big35S, PCUbi, Super and USP, in particular p-PcUBI; and b) the nucleic acid SEQ ID NO. 17601, or a homolog or fragment thereof, or a homolog thereof being depicted in Table I, application no. 3, column 8, in the same line as SEQ ID NO. 17601, preferably the coding region thereof, a homolog or a fragment thereof; which are operable linked.

[27313] In an embodiment thereof the expression cassette comprises in addition c) a nucleic acid molecule encoding a transit peptide, especially a plastidal transit petide in case in Table I, application no. 3, in column 6 in the same line as SEQ ID NO. 17601 is depicted, plastidic is mentioned, or a mitochondrial transit peptide in case in Table I, application no. 3, in column 6 in the same line as SEQ ID NO. 17601 is depicted, mitochondrial is mentioned; which is operable linked, too.

[27314] In another embodiment thereof the expression cassette does not comprise an additional transit peptide in case in Table I, application no. 3, in column 6 in the same line as SEQ ID NO. 17601 is depicted, non-targeted is mentioned.

[27315] In an embodiment the present invention relates to an expresssion cassette comprising a) a promoter, preferably a promoter selected from the group consisting of Big35S, PCUbi, Super and USP, in particular p-PcUBI; and b) the nucleic acid SEQ ID NO. 17637, or a homolog or fragment thereof, or a homolog thereof being depicted in Table I, application no. 3, column 8, in the same line as SEQ ID NO. 17637, preferably the coding region thereof, a homolog or a fragment thereof; which are operable linked.

[27316] In an embodiment thereof the expression cassette comprises in addition c) a nucleic acid molecule encoding a transit peptide, especially a plastidal transit petide in case in Table I, application no. 3, in column 6 in the same line as SEQ ID NO. 17637 is depicted, plastidic is mentioned, or a mitochondrial transit peptide in case in Table I, application no. 3, in column 6 in the same line as SEQ ID NO. 17637 is depicted, mitochondrial is mentioned; which is operable linked, too.

[27317] In another embodiment thereof the expression cassette does not comprise an additional transit peptide in case in Table I, application no. 3, in column 6 in the same line as SEQ ID NO. 17637 is depicted, non-targeted is mentioned.

[27318] In an embodiment the present invention relates to an expresssion cassette comprising a) a promoter, preferably a promoter selected from the group consisting of Big35S, PCUbi, Super and USP, in particular p-PcUBI; and b) the nucleic acid SEQ ID NO. 17701, or a homolog or fragment thereof, or a homolog thereof being depicted in Table I, application no. 3, column 8, in the same line as SEQ ID NO. 17701, preferably the coding region thereof, a homolog or a fragment thereof; which are operable linked.

[27319] In an embodiment thereof the expression cassette comprises in addition c) a nucleic acid molecule encoding a transit peptide, especially a plastidal transit petide in case in Table I, application no. 3, in column 6 in the same line as SEQ ID NO. 17701 is depicted, plastidic is mentioned, or a mitochondrial transit peptide in case in Table I, application no. 3, in column 6 in the same line as SEQ ID NO. 17701 is depicted, mitochondrial is mentioned; which is operable linked, too.

[27320] In another embodiment thereof the expression cassette does not comprise an additional transit peptide in case in Table I, application no. 3, in column 6 in the same line as SEQ ID NO. 17701 is depicted, non-targeted is mentioned.

[27321] In an embodiment the present invention relates to an expresssion cassette comprising a) a promoter, preferably a promoter selected from the group consisting of Big35S, PCUbi, Super and USP, in particular Big35S; and b) the nucleic acid SEQ ID NO. 627, or a homolog or fragment thereof, or a homolog thereof being depicted in Table I, application no. 3, column 8, in the same line as SEQ ID NO. 627, preferably the coding region thereof, a homolog or a fragment thereof; which are operable linked.

[27322] In an embodiment thereof the expression cassette comprises in addition c) a nucleic acid molecule encoding a transit peptide, especially a plastidal transit petide in case in Table I, application no. 3, in column 6 in the same line as SEQ ID NO. 627 is depicted, plastidic is mentioned, or a mitochondrial transit peptide in case in Table I, application no. 3, in column 6 in the same line as SEQ ID NO. 627 is depicted, mitochondrial is mentioned; which is operable linked, too.

[27323] In another embodiment thereof the expression cassette does not comprise an additional transit peptide in case in Table I, application no. 3, in column 6 in the same line as SEQ ID NO. 627 is depicted, non-targeted is mentioned.

[27324] In an embodiment the present invention relates to an expresssion cassette comprising a) a promoter, preferably a promoter selected from the group consisting of Big35S, PCUbi, Super and USP, in particular p-PcUBI; and b) the nucleic acid SEQ ID NO. 17968, or a homolog or fragment thereof, or a homolog thereof being depicted in Table I, application no. 3, column 8, in the same line as SEQ ID NO. 17968, preferably the coding region thereof, a homolog or a fragment thereof; which are operable linked.

[27325] In an embodiment thereof the expression cassette comprises in addition c) a nucleic acid molecule encoding a transit peptide, especially a plastidal transit petide in case in Table I, application no. 3, in column 6 in the same line as SEQ ID NO. 17968 is depicted, plastidic is mentioned, or a mitochondrial transit peptide in case in Table I, application no. 3, in column 6 in the same line as SEQ ID NO. 17968 is depicted, mitochondrial is mentioned; which is operable linked, too.

[27326] In another embodiment thereof the expression cassette does not comprise an additional transit peptide in case in Table I, application no. 3, in column 6 in the same line as SEQ ID NO. 17968 is depicted, non-targeted is mentioned.

[27327] In an embodiment the present invention relates to an expresssion cassette comprising a) a promoter, preferably a promoter selected from the group consisting of Big35S, PCUbi, Super and USP, in particular p-PcUBI; and b) the nucleic acid SEQ ID NO. 18070, or a homolog or fragment thereof, or a homolog thereof being depicted in Table I, application no. 3, column 8, in the same line as SEQ ID NO. 18070, preferably the coding region thereof, a homolog or a fragment thereof; which are operable linked.

[27328] In an embodiment thereof the expression cassette comprises in addition c) a nucleic acid molecule encoding a transit peptide, especially a plastidal transit petide in case in Table I, application no. 3, in column 6 in the same line as SEQ ID NO. 18070 is depicted, plastidic is mentioned, or a mitochondrial transit peptide in case in Table I, application no. 3, in column 6 in the same line as SEQ ID NO. 18070 is depicted, mitochondrial is mentioned; which is operable linked, too.

[27329] In another embodiment thereof the expression cassette does not comprise an additional transit peptide in case in Table I, application no. 3, in column 6 in the same line as SEQ ID NO. 18070 is depicted, non-targeted is mentioned.

[27330] In an embodiment the present invention relates to an expresssion cassette comprising a) a promoter, preferably a promoter selected from the group consisting of Big35S, PCUbi, Super and USP, in particular p-PcUBI; and b) the nucleic acid SEQ ID NO. 812, or a homolog or fragment thereof, or a homolog thereof being depicted in Table I, application no. 3, column 8, in the same line as SEQ ID NO. 812, preferably the coding region thereof, a homolog or a fragment thereof; which are operable linked.

[27331] In an embodiment thereof the expression cassette comprises in addition c) a nucleic acid molecule encoding a transit peptide, especially a plastidal transit petide in case in Table I, application no. 3, in column 6 in the same line as SEQ ID NO. 812 is depicted, plastidic is mentioned, or a mitochondrial transit peptide in case in Table I, application no. 3, in column 6 in the same line as SEQ ID NO. 812 is depicted, mitochondrial is mentioned; which is operable linked, too.

[27332] In another embodiment thereof the expression cassette does not comprise an additional transit peptide in case in Table I, application no. 3, in column 6 in the same line as SEQ ID NO. 812 is depicted, non-targeted is mentioned.

[27333] In an embodiment the present invention relates to an expresssion cassette comprising a) a promoter, preferably a promoter selected from the group consisting of Big35S, PCUbi, Super and USP, in particular p-PcUBI; and b) the nucleic acid SEQ ID NO. 18235, or a homolog or fragment thereof, or a homolog thereof being depicted in Table I, application no. 3, column 8, in the same line as SEQ ID NO. 18235, preferably the coding region thereof, a homolog or a fragment thereof; which are operable linked.

[27334] In an embodiment thereof the expression cassette comprises in addition c) a nucleic acid molecule encoding a transit peptide, especially a plastidal transit petide in case in Table I, application no. 3, in column 6 in the same line as SEQ ID NO. 18235 is depicted, plastidic is mentioned, or a mitochondrial transit peptide in case in Table I, application no. 3, in column 6 in the same line as SEQ ID NO. 18235 is depicted, mitochondrial is mentioned; which is operable linked, too.

[27335] In another embodiment thereof the expression cassette does not comprise an additional transit peptide in case in Table I, application no. 3, in column 6 in the same line as SEQ ID NO. 18235 is depicted, non-targeted is mentioned.

[27336] In an embodiment the present invention relates to an expresssion cassette comprising a) a promoter, preferably a promoter selected from the group consisting of Big35S, PCUbi, Super and USP, in particular p-PcUBI; and b) the nucleic acid SEQ ID NO. 18869, or a homolog or fragment thereof, or a homolog thereof being depicted in Table I, application no. 3, column 8, in the same line as SEQ ID NO. 18869, preferably the coding region thereof, a homolog or a fragment thereof; which are operable linked.

[27337] In an embodiment thereof the expression cassette comprises in addition c) a nucleic acid molecule encoding a transit peptide, especially a plastidal transit petide in case in Table I, application no. 3, in column 6 in the same line as SEQ ID NO. 18869 is depicted, plastidic is mentioned, or a mitochondrial transit peptide in case in Table I, application no. 3, in column 6 in the same line as SEQ ID NO. 18869 is depicted, mitochondrial is mentioned; which is operable linked, too.

[27338] In another embodiment thereof the expression cassette does not comprise an additional transit peptide in case in Table I, application no. 3, in column 6 in the same line as SEQ ID NO. 18869 is depicted, non-targeted is mentioned.

[27339] In an embodiment the present invention relates to an expresssion cassette comprising a) a promoter, preferably a promoter selected from the group consisting of Big35S, PCUbi, Super and USP, in particular p-PcUBI; and b) the nucleic acid SEQ ID NO. 19419, or a homolog or fragment thereof, or a homolog thereof being depicted in Table I, application no. 3, column 8, in the same line as SEQ ID NO. 19419, preferably the coding region thereof, a homolog or a fragment thereof; which are operable linked.

[27340] In an embodiment thereof the expression cassette comprises in addition c) a nucleic acid molecule encoding a transit peptide, especially a plastidal transit petide in case in Table I, application no. 3, in column 6 in the same line as SEQ ID NO. 19419 is depicted, plastidic is mentioned, or a mitochondrial transit peptide in case in Table I, application no. 3, in column 6 in the same line as SEQ ID NO. 19419 is depicted, mitochondrial is mentioned; which is operable linked, too.

[27341] In another embodiment thereof the expression cassette does not comprise an additional transit peptide in case in Table I, application no. 3, in column 6 in the same line as SEQ ID NO. 19419 is depicted, non-targeted is mentioned.

[27342] In an embodiment the present invention relates to an expresssion cassette comprising a) a promoter, preferably a promoter selected from the group consisting of Big35S, PCUbi, Super and USP, in particular p-PcUBI; and b) the nucleic acid SEQ ID NO. 68536, or a homolog or fragment thereof, or a homolog thereof being depicted in Table I, application no. 3, column 8, in the same line as SEQ ID NO. 68536, preferably the coding region thereof, a homolog or a fragment thereof; which are operable linked.

[27343] In an embodiment thereof the expression cassette comprises in addition c) a nucleic acid molecule encoding a transit peptide, especially a plastidal transit petide in case in Table I, application no. 3, in column 6 in the same line as SEQ ID NO. 68536 is depicted, plastidic is mentioned, or a mitochondrial transit peptide in case in Table I, application no. 3, in column 6 in the same line as SEQ ID NO. 68536 is depicted, mitochondrial is mentioned; which is operable linked, too.

[27344] In another embodiment thereof the expression cassette does not comprise an additional transit peptide in case in Table I, application no. 3, in column 6 in the same line as SEQ ID NO. 68536 is depicted, non-targeted is mentioned.

[27345] In an embodiment the present invention relates to an expresssion cassette comprising a) a promoter, preferably a promoter selected from the group consisting of Big35S, PCUbi, Super and USP, in particular p-PcUBI; and b) the nucleic acid SEQ ID NO. 19502, or a homolog or fragment thereof, or a homolog thereof being depicted in Table I, application no. 3, column 8, in the same line as SEQ ID NO. 19502, preferably the coding region thereof, a homolog or a fragment thereof; which are operable linked.

[27346] In an embodiment thereof the expression cassette comprises in addition c) a nucleic acid molecule encoding a transit peptide, especially a plastidal transit petide in case in Table I, application no. 3, in column 6 in the same line as SEQ ID NO. 19502 is depicted, plastidic is mentioned, or a mitochondrial transit peptide in case in Table I, application no. 3, in column 6 in the same line as SEQ ID NO. 19502 is depicted, mitochondrial is mentioned; which is operable linked, too.

[27347] In another embodiment thereof the expression cassette does not comprise an additional transit peptide in case in Table I, application no. 3, in column 6 in the same line as SEQ ID NO. 19502 is depicted, non-targeted is mentioned.

[27348] In an embodiment the present invention relates to an expresssion cassette comprising a) a promoter, preferably a promoter selected from the group consisting of Big35S, PCUbi, Super and USP, in particular p-PcUBI; and b) the nucleic acid SEQ ID NO. 1298, or a homolog or fragment thereof, or a homolog thereof being depicted in Table I, application no. 3, column 8, in the same line as SEQ ID NO. 1298, preferably the coding region thereof, a homolog or a fragment thereof; which are operable linked.

[27349] In an embodiment thereof the expression cassette comprises in addition c) a nucleic acid molecule encoding a transit peptide, especially a plastidal transit petide in case in Table I, application no. 3, in column 6 in the same line as SEQ ID NO. 1298 is depicted, plastidic is mentioned, or a mitochondrial transit peptide in case in Table I, application no. 3, in column 6 in the same line as SEQ ID NO. 1298 is depicted, mitochondrial is mentioned; which is operable linked, too.

[27350] In another embodiment thereof the expression cassette does not comprise an additional transit peptide in case in Table I, application no. 3, in column 6 in the same line as SEQ ID NO. 1298 is depicted, non-targeted is mentioned.

[27351] In an embodiment the present invention relates to an expresssion cassette comprising a) a promoter, preferably a promoter selected from the group consisting of Big35S, PCUbi, Super and USP, in particular p-PcUBI; and b) the nucleic acid SEQ ID NO. 19874, or a homolog or fragment thereof, or a homolog thereof being depicted in Table I, application no. 3, column 8, in the same line as SEQ ID NO. 19874, preferably the coding region thereof, a homolog or a fragment thereof; which are operable linked.

[27352] In an embodiment thereof the expression cassette comprises in addition c) a nucleic acid molecule encoding a transit peptide, especially a plastidal transit petide in case in Table I, application no. 3, in column 6 in the same line as SEQ ID NO. 19874 is depicted, plastidic is mentioned, or a mitochondrial transit peptide in case in Table I, application no. 3, in column 6 in the same line as SEQ ID NO. 19874 is depicted, mitochondrial is mentioned; which is operable linked, too.

[27353] In another embodiment thereof the expression cassette does not comprise an additional transit peptide in case in Table I, application no. 3, in column 6 in the same line as SEQ ID NO. 19874 is depicted, non-targeted is mentioned.

[27354] In an embodiment the present invention relates to an expresssion cassette comprising a) a promoter, preferably a promoter selected from the group consisting of Big35S, PCUbi, Super and USP, in particular p-PcUBI; and b) the nucleic acid SEQ ID NO. 19919, or a homolog or fragment thereof, or a homolog thereof being depicted in Table I, application no. 3, column 8, in the same line as SEQ ID NO. 19919, preferably the coding region thereof, a homolog or a fragment thereof; which are operable linked.

[27355] In an embodiment thereof the expression cassette comprises in addition c) a nucleic acid molecule encoding a transit peptide, especially a plastidal transit petide in case in Table I, application no. 3, in column 6 in the same line as SEQ ID NO. 19919 is depicted, plastidic is mentioned, or a mitochondrial transit peptide in case in Table I, application no. 3, in column 6 in the same line as SEQ ID NO. 19919 is depicted, mitochondrial is mentioned; which is operable linked, too.

[27356] In another embodiment thereof the expression cassette does not comprise an additional transit peptide in case in Table I, application no. 3, in column 6 in the same line as SEQ ID NO. 19919 is depicted, non-targeted is mentioned.

[27357] In an embodiment the present invention relates to an expresssion cassette comprising a) a promoter, preferably a promoter selected from the group consisting of Big35S, PCUbi, Super and USP, in particular p-PcUBI; and b) the nucleic acid SEQ ID NO. 20346, or a homolog or fragment thereof, or a homolog thereof being depicted in Table I, application no. 3, column 8, in the same line as SEQ ID NO. 20346, preferably the coding region thereof, a homolog or a fragment thereof; which are operable linked.

[27358] In an embodiment thereof the expression cassette comprises in addition c) a nucleic acid molecule encoding a transit peptide, especially a plastidal transit petide in case in Table I, application no. 3, in column 6 in the same line as SEQ ID NO. 20346 is depicted, plastidic is mentioned, or a mitochondrial transit peptide in case in Table I, application no. 3, in column 6 in the same line as SEQ ID NO. 20346 is depicted, mitochondrial is mentioned; which is operable linked, too.

[27359] In another embodiment thereof the expression cassette does not comprise an additional transit peptide in case in Table I, application no. 3, in column 6 in the same line as SEQ ID NO. 20346 is depicted, non-targeted is mentioned.

[27360] In an embodiment the present invention relates to an expresssion cassette comprising a) a promoter, preferably a promoter selected from the group consisting of Big35S, PCUbi, Super and USP, in particular p-PcUBI; and b) the nucleic acid SEQ ID NO. 20578, or a homolog or fragment thereof, or a homolog thereof being depicted in Table I, application no. 3, column 8, in the same line as SEQ ID NO. 20578, preferably the coding region thereof, a homolog or a fragment thereof; which are operable linked.

[27361] In an embodiment thereof the expression cassette comprises in addition c) a nucleic acid molecule encoding a transit peptide, especially a plastidal transit petide in case in Table I, application no. 3, in column 6 in the same line as SEQ ID NO. 20578 is depicted, plastidic is mentioned, or a mitochondrial transit peptide in case in Table I, application no. 3, in column 6 in the same line as SEQ ID NO. 20578 is depicted, mitochondrial is mentioned; which is operable linked, too.

[27362] In another embodiment thereof the expression cassette does not comprise an additional transit peptide in case in Table I, application no. 3, in column 6 in the same line as SEQ ID NO. 20578 is depicted, non-targeted is mentioned.

[27363] In an embodiment the present invention relates to an expresssion cassette comprising a) a promoter, preferably a promoter selected from the group consisting of Big35S, PCUbi, Super and USP, in particular p-PcUBI; and b) the nucleic acid SEQ ID NO. 21008, or a homolog or fragment thereof, or a homolog thereof being depicted in Table I, application no. 3, column 8, in the same line as SEQ ID NO. 21008, preferably the coding region thereof, a homolog or a fragment thereof; which are operable linked.

[27364] In an embodiment thereof the expression cassette comprises in addition c) a nucleic acid molecule encoding a transit peptide, especially a plastidal transit petide in case in Table I, application no. 3, in column 6 in the same line as SEQ ID NO. 21008 is depicted, plastidic is mentioned, or a mitochondrial transit peptide in case in Table I, application no. 3, in column 6 in the same line as SEQ ID NO. 21008 is depicted, mitochondrial is mentioned; which is operable linked, too.

[27365] In another embodiment thereof the expression cassette does not comprise an additional transit peptide in case in Table I, application no. 3, in column 6 in the same line as SEQ ID NO. 21008 is depicted, non-targeted is mentioned.

[27366] In an embodiment the present invention relates to an expresssion cassette comprising a) a promoter, preferably a promoter selected from the group consisting of Big35S, PCUbi, Super and USP, in particular p-PcUBI; and b) the nucleic acid SEQ ID NO. 21159, or a homolog or fragment thereof, or a homolog thereof being depicted in Table I, application no. 3, column 8, in the same line as SEQ ID NO. 21159, preferably the coding region thereof, a homolog or a fragment thereof; which are operable linked.

[27367] In an embodiment thereof the expression cassette comprises in addition c) a nucleic acid molecule encoding a transit peptide, especially a plastidal transit petide in case in Table I, application no. 3, in column 6 in the same line as SEQ ID NO. 21159 is depicted, plastidic is mentioned, or a mitochondrial transit peptide in case in Table I, application no. 3, in column 6 in the same line as SEQ ID NO. 21159 is depicted, mitochondrial is mentioned; which is operable linked, too.

[27368] In another embodiment thereof the expression cassette does not comprise an additional transit peptide in case in Table I, application no. 3, in column 6 in the same line as SEQ ID NO. 21159 is depicted, non-targeted is mentioned.

[27369] In an embodiment the present invention relates to an expresssion cassette comprising a) a promoter, preferably a promoter selected from the group consisting of Big35S, PCUbi, Super and USP, in particular p-PcUBI; and b) the nucleic acid SEQ ID NO. 68657, or a homolog or fragment thereof, or a homolog thereof being depicted in Table I, application no. 3, column 8, in the same line as SEQ ID NO. 68657, preferably the coding region thereof, a homolog or a fragment thereof; which are operable linked.

[27370] In an embodiment thereof the expression cassette comprises in addition c) a nucleic acid molecule encoding a transit peptide, especially a plastidal transit petide in case in Table I, application no. 3, in column 6 in the same line as SEQ ID NO. 68657 is depicted, plastidic is mentioned, or a mitochondrial transit peptide in case in Table I, application no. 3, in column 6 in the same line as SEQ ID NO. 68657 is depicted, mitochondrial is mentioned; which is operable linked, too.

[27371] In another embodiment thereof the expression cassette does not comprise an additional transit peptide in case in Table I, application no. 3, in column 6 in the same line as SEQ ID NO. 68657 is depicted, non-targeted is mentioned.

[27372] In an embodiment the present invention relates to an expresssion cassette comprising a) a promoter, preferably a promoter selected from the group consisting of Big35S, PCUbi, Super and USP, in particular p-PcUBI; and b) the nucleic acid SEQ ID NO. 21497, or a homolog or fragment thereof, or a homolog thereof being depicted in Table I, application no. 3, column 8, in the same line as SEQ ID NO. 21497, preferably the coding region thereof, a homolog or a fragment thereof; which are operable linked.

[27373] In an embodiment thereof the expression cassette comprises in addition c) a nucleic acid molecule encoding a transit peptide, especially a plastidal transit petide in case in Table I, application no. 3, in column 6 in the same line as SEQ ID NO. 21497 is depicted, plastidic is mentioned, or a mitochondrial transit peptide in case in Table I, application no. 3, in column 6 in the same line as SEQ ID NO. 21497 is depicted, mitochondrial is mentioned; which is operable linked, too.

[27374] In another embodiment thereof the expression cassette does not comprise an additional transit peptide in case in Table I, application no. 3, in column 6 in the same line as SEQ ID NO. 21497 is depicted, non-targeted is mentioned.

[27375] In an embodiment the present invention relates to an expresssion cassette comprising a) a promoter, preferably a promoter selected from the group consisting of Big35S, PCUbi, Super and USP, in particular p-PcUBI; and b) the nucleic acid SEQ ID NO. 21902, or a homolog or fragment thereof, or a homolog thereof being depicted in Table I, application no. 3, column 8, in the same line as SEQ ID NO. 21902, preferably the coding region thereof, a homolog or a fragment thereof; which are operable linked.

[27376] In an embodiment thereof the expression cassette comprises in addition c) a nucleic acid molecule encoding a transit peptide, especially a plastidal transit petide in case in Table I, application no. 3, in column 6 in the same line as SEQ ID NO. 21902 is depicted, plastidic is mentioned, or a mitochondrial transit peptide in case in Table I, application no. 3, in column 6 in the same line as SEQ ID NO. 21902 is depicted, mitochondrial is mentioned; which is operable linked, too.

[27377] In another embodiment thereof the expression cassette does not comprise an additional transit peptide in case in Table I, application no. 3, in column 6 in the same line as SEQ ID NO. 21902 is depicted, non-targeted is mentioned.

[27378] In an embodiment the present invention relates to an expresssion cassette comprising a) a promoter, preferably a promoter selected from the group consisting of Big35S, PCUbi, Super and USP, in particular p-PcUBI; and b) the nucleic acid SEQ ID NO. 22015, or a homolog or fragment thereof, or a homolog thereof being depicted in Table I, application no. 3, column 8, in the same line as SEQ ID NO. 22015, preferably the coding region thereof, a homolog or a fragment thereof; which are operable linked.

[27379] In an embodiment thereof the expression cassette comprises in addition c) a nucleic acid molecule encoding a transit peptide, especially a plastidal transit petide in case in Table I, application no. 3, in column 6 in the same line as SEQ ID NO. 22015 is depicted, plastidic is mentioned, or a mitochondrial transit peptide in case in Table I, application no. 3, in column 6 in the same line as SEQ ID NO. 22015 is depicted, mitochondrial is mentioned; which is operable linked, too.

[27380] In another embodiment thereof the expression cassette does not comprise an additional transit peptide in case in Table I, application no. 3, in column 6 in the same line as SEQ ID NO. 22015 is depicted, non-targeted is mentioned.

[27381] In an embodiment the present invention relates to an expresssion cassette comprising a) a promoter, preferably a promoter selected from the group consisting of Big35S, PCUbi, Super and USP, in particular p-PcUBI; and b) the nucleic acid SEQ ID NO. 22249, or a homolog or fragment thereof, or a homolog thereof being depicted in Table I, application no. 3, column 8, in the same line as SEQ ID NO. 22249, preferably the coding region thereof, a homolog or a fragment thereof; which are operable linked.

[27382] In an embodiment thereof the expression cassette comprises in addition c) a nucleic acid molecule encoding a transit peptide, especially a plastidal transit petide in case in Table I, application no. 3, in column 6 in the same line as SEQ ID NO. 22249 is depicted, plastidic is mentioned, or a mitochondrial transit peptide in case in Table I, application no. 3, in column 6 in the same line as SEQ ID NO. 22249 is depicted, mitochondrial is mentioned; which is operable linked, too.

[27383] In another embodiment thereof the expression cassette does not comprise an additional transit peptide in case in Table I, application no. 3, in column 6 in the same line as SEQ ID NO. 22249 is depicted, non-targeted is mentioned.

[27384] In an embodiment the present invention relates to an expresssion cassette comprising a) a promoter, preferably a promoter selected from the group consisting of Big35S, PCUbi, Super and USP, in particular p-PcUBI; and b) the nucleic acid SEQ ID NO. 22611, or a homolog or fragment thereof, or a homolog thereof being depicted in Table I, application no. 3, column 8, in the same line as SEQ ID NO. 22611, preferably the coding region thereof, a homolog or a fragment thereof; which are operable linked.

[27385] In an embodiment thereof the expression cassette comprises in addition c) a nucleic acid molecule encoding a transit peptide, especially a plastidal transit petide in case in Table I, application no. 3, in column 6 in the same line as SEQ ID NO. 22611 is depicted, plastidic is mentioned, or a mitochondrial transit peptide in case in Table I, application no. 3, in column 6 in the same line as SEQ ID NO. 22611 is depicted, mitochondrial is mentioned; which is operable linked, too.

[27386] In another embodiment thereof the expression cassette does not comprise an additional transit peptide in case in Table I, application no. 3, in column 6 in the same line as SEQ ID NO. 22611 is depicted, non-targeted is mentioned.

[27387] In an embodiment the present invention relates to an expresssion cassette comprising a) a promoter, preferably a promoter selected from the group consisting of Big35S, PCUbi, Super and USP, in particular p-PcUBI; and b) the nucleic acid SEQ ID NO. 22832, or a homolog or fragment thereof, or a homolog thereof being depicted in Table I, application no. 3, column 8, in the same line as SEQ ID NO. 22832, preferably the coding region thereof, a homolog or a fragment thereof; which are operable linked.

[27388] In an embodiment thereof the expression cassette comprises in addition c) a nucleic acid molecule encoding a transit peptide, especially a plastidal transit petide in case in Table I, application no. 3, in column 6 in the same line as SEQ ID NO. 22832 is depicted, plastidic is mentioned, or a mitochondrial transit peptide in case in Table I, application no. 3, in column 6 in the same line as SEQ ID NO. 22832 is depicted, mitochondrial is mentioned; which is operable linked, too.

[27389] In another embodiment thereof the expression cassette does not comprise an additional transit peptide in case in Table I, application no. 3, in column 6 in the same line as SEQ ID NO. 22832 is depicted, non-targeted is mentioned.

[27390] In an embodiment the present invention relates to an expresssion cassette comprising a) a promoter, preferably a promoter selected from the group consisting of Big35S, PCUbi, Super and USP, in particular p-PcUBI; and b) the nucleic acid SEQ ID NO. 1815, or a homolog or fragment thereof, or a homolog thereof being depicted in Table I, application no. 3, column 8, in the same line as SEQ ID NO. 1815, preferably the coding region thereof, a homolog or a fragment thereof; which are operable linked.

[27391] In an embodiment thereof the expression cassette comprises in addition c) a nucleic acid molecule encoding a transit peptide, especially a plastidal transit petide in case in Table I, application no. 3, in column 6 in the same line as SEQ ID NO. 1815 is depicted, plastidic is mentioned, or a mitochondrial transit peptide in case in Table I, application no. 3, in column 6 in the same line as SEQ ID NO. 1815 is depicted, mitochondrial is mentioned; which is operable linked, too.

[27392] In another embodiment thereof the expression cassette does not comprise an additional transit peptide in case in Table I, application no. 3, in column 6 in the same line as SEQ ID NO. 1815 is depicted, non-targeted is mentioned.

[27393] In an embodiment the present invention relates to an expresssion cassette comprising a) a promoter, preferably a promoter selected from the group consisting of Big35S, PCUbi, Super and USP, in particular p-PcUBI; and b) the nucleic acid SEQ ID NO. 68727, or a homolog or fragment thereof, or a homolog thereof being depicted in Table I, application no. 3, column 8, in the same line as SEQ ID NO. 68727, preferably the coding region thereof, a homolog or a fragment thereof; which are operable linked.

[27394] In an embodiment thereof the expression cassette comprises in addition c) a nucleic acid molecule encoding a transit peptide, especially a plastidal transit petide in case in Table I, application no. 3, in column 6 in the same line as SEQ ID NO. 68727 is depicted, plastidic is mentioned, or a mitochondrial transit peptide in case in Table I, application no. 3, in column 6 in the same line as SEQ ID NO. 68727 is depicted, mitochondrial is mentioned; which is operable linked, too.

[27395] In another embodiment thereof the expression cassette does not comprise an additional transit peptide in case in Table I, application no. 3, in column 6 in the same line as SEQ ID NO. 68727 is depicted, non-targeted is mentioned.

[27396] In an embodiment the present invention relates to an expresssion cassette comprising a) a promoter, preferably a promoter selected from the group consisting of Big35S, PCUbi, Super and USP, in particular p-PcUBI; and b) the nucleic acid SEQ ID NO. 23002, or a homolog or fragment thereof, or a homolog thereof being depicted in Table I, application no. 3, column 8, in the same line as SEQ ID NO. 23002, preferably the coding region thereof, a homolog or a fragment thereof; which are operable linked.

[27397] In an embodiment thereof the expression cassette comprises in addition c) a nucleic acid molecule encoding a transit peptide, especially a plastidal transit petide in case in Table I, application no. 3, in column 6 in the same line as SEQ ID NO. 23002 is depicted, plastidic is mentioned, or a mitochondrial transit peptide in case in Table I, application no. 3, in column 6 in the same line as SEQ ID NO. 23002 is depicted, mitochondrial is mentioned; which is operable linked, too.

[27398] In another embodiment thereof the expression cassette does not comprise an additional transit peptide in case in Table I, application no. 3, in column 6 in the same line as SEQ ID NO. 23002 is depicted, non-targeted is mentioned.

[27399] In an embodiment the present invention relates to an expresssion cassette comprising a) a promoter, preferably a promoter selected from the group consisting of Big35S, PCUbi, Super and USP, in particular p-PcUBI; and b) the nucleic acid SEQ ID NO. 68777, or a homolog or fragment thereof, or a homolog thereof being depicted in Table I, application no. 3, column 8, in the same line as SEQ ID NO. 68777, preferably the coding region thereof, a homolog or a fragment thereof; which are operable linked.

[27400] In an embodiment thereof the expression cassette comprises in addition c) a nucleic acid molecule encoding a transit peptide, especially a plastidal transit petide in case in Table I, application no. 3, in column 6 in the same line as SEQ ID NO. 68777 is depicted, plastidic is mentioned, or a mitochondrial transit peptide in case in Table I, application no. 3, in column 6 in the same line as SEQ ID NO. 68777 is depicted, mitochondrial is mentioned; which is operable linked, too.

[27401] In another embodiment thereof the expression cassette does not comprise an additional transit peptide in case in Table I, application no. 3, in column 6 in the same line as SEQ ID NO. 68777 is depicted, non-targeted is mentioned.

[27402] In an embodiment the present invention relates to an expresssion cassette comprising a) a promoter, preferably a promoter selected from the group consisting of Big35S, PCUbi, Super and USP, in particular p-PcUBI; and b) the nucleic acid SEQ ID NO. 2367, or a homolog or fragment thereof, or a homolog thereof being depicted in Table I, application no. 3, column 8, in the same line as SEQ ID NO. 2367, preferably the coding region thereof, a homolog or a fragment thereof; which are operable linked.

[27403] In an embodiment thereof the expression cassette comprises in addition c) a nucleic acid molecule encoding a transit peptide, especially a plastidal transit petide in case in Table I, application no. 3, in column 6 in the same line as SEQ ID NO. 2367 is depicted, plastidic is mentioned, or a mitochondrial transit peptide in case in Table I, application no. 3, in column 6 in the same line as SEQ ID NO. 2367 is depicted, mitochondrial is mentioned; which is operable linked, too.

[27404] In another embodiment thereof the expression cassette does not comprise an additional transit peptide in case in Table I, application no. 3, in column 6 in the same line as SEQ ID NO. 2367 is depicted, non-targeted is mentioned.

[27405] In an embodiment the present invention relates to an expresssion cassette comprising a) a promoter, preferably a promoter selected from the group consisting of Big35S, PCUbi, Super and USP, in particular p-PcUBI; and b) the nucleic acid SEQ ID NO. 2573, or a homolog or fragment thereof, or a homolog thereof being depicted in Table I, application no. 3, column 8, in the same line as SEQ ID NO. 2573, preferably the coding region thereof, a homolog or a fragment thereof; which are operable linked.

[27406] In an embodiment thereof the expression cassette comprises in addition c) a nucleic acid molecule encoding a transit peptide, especially a plastidal transit petide in case in Table I, application no. 3, in column 6 in the same line as SEQ ID NO. 2573 is depicted, plastidic is mentioned, or a mitochondrial transit peptide in case in Table I, application no. 3, in column 6 in the same line as SEQ ID NO. 2573 is depicted, mitochondrial is mentioned; which is operable linked, too.

[27407] In another embodiment thereof the expression cassette does not comprise an additional transit peptide in case in Table I, application no. 3, in column 6 in the same line as SEQ ID NO. 2573 is depicted, non-targeted is mentioned.

[27408] In an embodiment the present invention relates to an expresssion cassette comprising a) a promoter, preferably a promoter selected from the group consisting of Big35S, PCUbi, Super and USP, in particular p-PcUBI; and b) the nucleic acid SEQ ID NO. 2935, or a homolog or fragment thereof, or a homolog thereof being depicted in Table I, application no. 3, column 8, in the same line as SEQ ID NO. 2935, preferably the coding region thereof, a homolog or a fragment thereof; which are operable linked.

[27409] In an embodiment thereof the expression cassette comprises in addition c) a nucleic acid molecule encoding a transit peptide, especially a plastidal transit petide in case in Table I, application no. 3, in column 6 in the same line as SEQ ID NO. 2935 is depicted, plastidic is mentioned, or a mitochondrial transit peptide in case in Table I, application no. 3, in column 6 in the same line as SEQ ID NO. 2935 is depicted, mitochondrial is mentioned; which is operable linked, too.

[27410] In another embodiment thereof the expression cassette does not comprise an additional transit peptide in case in Table I, application no. 3, in column 6 in the same line as SEQ ID NO. 2935 is depicted, non-targeted is mentioned.

[27411] In an embodiment the present invention relates to an expresssion cassette comprising a) a promoter, preferably a promoter selected from the group consisting of Big35S, PCUbi, Super and USP, in particular p-PcUBI; and b) the nucleic acid SEQ ID NO. 23482, or a homolog or fragment thereof, or a homolog thereof being depicted in Table I, application no. 3, column 8, in the same line as SEQ ID NO. 23482, preferably the coding region thereof, a homolog or a fragment thereof; which are operable linked.

[27412] In an embodiment thereof the expression cassette comprises in addition c) a nucleic acid molecule encoding a transit peptide, especially a plastidal transit petide in case in Table I, application no. 3, in column 6 in the same line as SEQ ID NO. 23482 is depicted, plastidic is mentioned, or a mitochondrial transit peptide in case in Table I, application no. 3, in column 6 in the same line as SEQ ID NO. 23482 is depicted, mitochondrial is mentioned; which is operable linked, too.

[27413] In another embodiment thereof the expression cassette does not comprise an additional transit peptide in case in Table I, application no. 3, in column 6 in the same line as SEQ ID NO. 23482 is depicted, non-targeted is mentioned.

[27414] In an embodiment the present invention relates to an expresssion cassette comprising a) a promoter, preferably a promoter selected from the group consisting of Big35S, PCUbi, Super and USP, in particular p-PcUBI; and b) the nucleic acid SEQ ID NO. 3279, or a homolog or fragment thereof, or a homolog thereof being depicted in Table I, application no. 3, column 8, in the same line as SEQ ID NO. 3279, preferably the coding region thereof, a homolog or a fragment thereof; which are operable linked.

[27415] In an embodiment thereof the expression cassette comprises in addition c) a nucleic acid molecule encoding a transit peptide, especially a plastidal transit petide in case in Table I, application no. 3, in column 6 in the same line as SEQ ID NO. 3279 is depicted, plastidic is mentioned, or a mitochondrial transit peptide in case in Table I, application no. 3, in column 6 in the same line as SEQ ID NO. 3279 is depicted, mitochondrial is mentioned; which is operable linked, too.

[27416] In another embodiment thereof the expression cassette does not comprise an additional transit peptide in case in Table I, application no. 3, in column 6 in the same line as SEQ ID NO. 3279 is depicted, non-targeted is mentioned.

[27417] In an embodiment the present invention relates to an expresssion cassette comprising a) a promoter, preferably a promoter selected from the group consisting of Big35S, PCUbi, Super and USP, in particular p-PcUBI; and b) the nucleic acid SEQ ID NO. 23844, or a homolog or fragment thereof, or a homolog thereof being depicted in Table I, application no. 3, column 8, in the same line as SEQ ID NO. 23844, preferably the coding region thereof, a homolog or a fragment thereof; which are operable linked.

[27418] In an embodiment thereof the expression cassette comprises in addition c) a nucleic acid molecule encoding a transit peptide, especially a plastidal transit petide in case in Table I, application no. 3, in column 6 in the same line as SEQ ID NO. 23844 is depicted, plastidic is mentioned, or a mitochondrial transit peptide in case in Table I, application no. 3, in column 6 in the same line as SEQ ID NO. 23844 is depicted, mitochondrial is mentioned; which is operable linked, too.

[27419] In another embodiment thereof the expression cassette does not comprise an additional transit peptide in case in Table I, application no. 3, in column 6 in the same line as SEQ ID NO. 23844 is depicted, non-targeted is mentioned.

[27420] In an embodiment the present invention relates to an expresssion cassette comprising a) a promoter, preferably a promoter selected from the group consisting of Big35S, PCUbi, Super and USP, in particular p-PcUBI; and b) the nucleic acid SEQ ID NO. 3654, or a homolog or fragment thereof, or a homolog thereof being depicted in Table I, application no. 3, column 8, in the same line as SEQ ID NO. 3654, preferably the coding region thereof, a homolog or a fragment thereof; which are operable linked.

[27421] In an embodiment thereof the expression cassette comprises in addition c) a nucleic acid molecule encoding a transit peptide, especially a plastidal transit petide in case in Table I, application no. 3, in column 6 in the same line as SEQ ID NO. 3654 is depicted, plastidic is mentioned, or a mitochondrial transit peptide in case in Table I, application no. 3, in column 6 in the same line as SEQ ID NO. 3654 is depicted, mitochondrial is mentioned; which is operable linked, too.

[27422] In another embodiment thereof the expression cassette does not comprise an additional transit peptide in case in Table I, application no. 3, in column 6 in the same line as SEQ ID NO. 3654 is depicted, non-targeted is mentioned.

[27423] In an embodiment the present invention relates to an expresssion cassette comprising a) a promoter, preferably a promoter selected from the group consisting of Big35S, PCUbi, Super and USP, in particular p-PcUBI; and b) the nucleic acid SEQ ID NO. 24232, or a homolog or fragment thereof, or a homolog thereof being depicted in Table I, application no. 3, column 8, in the same line as SEQ ID NO. 24232, preferably the coding region thereof, a homolog or a fragment thereof; which are operable linked.

[27424] In an embodiment thereof the expression cassette comprises in addition c) a nucleic acid molecule encoding a transit peptide, especially a plastidal transit petide in case in Table I, application no. 3, in column 6 in the same line as SEQ ID NO. 24232 is depicted, plastidic is mentioned, or a mitochondrial transit peptide in case in Table I, application no. 3, in column 6 in the same line as SEQ ID NO. 24232 is depicted, mitochondrial is mentioned; which is operable linked, too.

[27425] In another embodiment thereof the expression cassette does not comprise an additional transit peptide in case in Table I, application no. 3, in column 6 in the same line as SEQ ID NO. 24232 is depicted, non-targeted is mentioned.

[27426] In an embodiment the present invention relates to an expresssion cassette comprising a) a promoter, preferably a promoter selected from the group consisting of Big35S, PCUbi, Super and USP, in particular p-PcUBI; and b) the nucleic acid SEQ ID NO. 68849, or a homolog or fragment thereof, or a homolog thereof being depicted in Table I, application no. 3, column 8, in the same line as SEQ ID NO. 68849, preferably the coding region thereof, a homolog or a fragment thereof; which are operable linked.

[27427] In an embodiment thereof the expression cassette comprises in addition c) a nucleic acid molecule encoding a transit peptide, especially a plastidal transit petide in case in Table I, application no. 3, in column 6 in the same line as SEQ ID NO. 68849 is depicted, plastidic is mentioned, or a mitochondrial transit peptide in case in Table I, application no. 3, in column 6 in the same line as SEQ ID NO. 68849 is depicted, mitochondrial is mentioned; which is operable linked, too.

[27428] In another embodiment thereof the expression cassette does not comprise an additional transit peptide in case in Table I, application no. 3, in column 6 in the same line as SEQ ID NO. 68849 is depicted, non-targeted is mentioned.

[27429] In an embodiment the present invention relates to an expresssion cassette comprising a) a promoter, preferably a promoter selected from the group consisting of Big35S, PCUbi, Super and USP, in particular p-PcUBI; and b) the nucleic acid SEQ ID NO. 4040, or a homolog or fragment thereof, or a homolog thereof being depicted in Table I, application no. 3, column 8, in the same line as SEQ ID NO. 4040, preferably the coding region thereof, a homolog or a fragment thereof; which are operable linked.

[27430] In an embodiment thereof the expression cassette comprises in addition c) a nucleic acid molecule encoding a transit peptide, especially a plastidal transit petide in case in Table I, application no. 3, in column 6 in the same line as SEQ ID NO. 4040 is depicted, plastidic is mentioned, or a mitochondrial transit peptide in case in Table I, application no. 3, in column 6 in the same line as SEQ ID NO. 4040 is depicted, mitochondrial is mentioned; which is operable linked, too.

[27431] In another embodiment thereof the expression cassette does not comprise an additional transit peptide in case in Table I, application no. 3, in column 6 in the same line as SEQ ID NO. 4040 is depicted, non-targeted is mentioned.

[27432] In an embodiment the present invention relates to an expresssion cassette comprising a) a promoter, preferably a promoter selected from the group consisting of Big35S, PCUbi, Super and USP, in particular p-PcUBI; and b) the nucleic acid SEQ ID NO. 4102, or a homolog or fragment thereof, or a homolog thereof being depicted in Table I, application no. 3, column 8, in the same line as SEQ ID NO. 4102, preferably the coding region thereof, a homolog or a fragment thereof; which are operable linked.

[27433] In an embodiment thereof the expression cassette comprises in addition c) a nucleic acid molecule encoding a transit peptide, especially a plastidal transit petide in case in Table I, application no. 3, in column 6 in the same line as SEQ ID NO. 4102 is depicted, plastidic is mentioned, or a mitochondrial transit peptide in case in Table I, application no. 3, in column 6 in the same line as SEQ ID NO. 4102 is depicted, mitochondrial is mentioned; which is operable linked, too.

[27434] In another embodiment thereof the expression cassette does not comprise an additional transit peptide in case in Table I, application no. 3, in column 6 in the same line as SEQ ID NO. 4102 is depicted, non-targeted is mentioned.

[27435] In an embodiment the present invention relates to an expresssion cassette comprising a) a promoter, preferably a promoter selected from the group consisting of Big35S, PCUbi, Super and USP, in particular p-PcUBI; and b) the nucleic acid SEQ ID NO. 24311, or a homolog or fragment thereof, or a homolog thereof being depicted in Table I, application no. 3, column 8, in the same line as SEQ ID NO. 24311, preferably the coding region thereof, a homolog or a fragment thereof; which are operable linked.

[27436] In an embodiment thereof the expression cassette comprises in addition c) a nucleic acid molecule encoding a transit peptide, especially a plastidal transit petide in case in Table I, application no. 3, in column 6 in the same line as SEQ ID NO. 24311 is depicted, plastidic is mentioned, or a mitochondrial transit peptide in case in Table I, application no. 3, in column 6 in the same line as SEQ ID NO. 24311 is depicted, mitochondrial is mentioned; which is operable linked, too.

[27437] In another embodiment thereof the expression cassette does not comprise an additional transit peptide in case in Table I, application no. 3, in column 6 in the same line as SEQ ID NO. 24311 is depicted, non-targeted is mentioned.

[27438] In an embodiment the present invention relates to an expresssion cassette comprising a) a promoter, preferably a promoter selected from the group consisting of Big35S, PCUbi, Super and USP, in particular p-PcUBI; and b) the nucleic acid SEQ ID NO. 4348, or a homolog or fragment thereof, or a homolog thereof being depicted in Table I, application no. 3, column 8, in the same line as SEQ ID NO. 4348, preferably the coding region thereof, a homolog or a fragment thereof; which are operable linked.

[27439] In an embodiment thereof the expression cassette comprises in addition c) a nucleic acid molecule encoding a transit peptide, especially a plastidal transit petide in case in Table I, application no. 3, in column 6 in the same line as SEQ ID NO. 4348 is depicted, plastidic is mentioned, or a mitochondrial transit peptide in case in Table I, application no. 3, in column 6 in the same line as SEQ ID NO. 4348 is depicted, mitochondrial is mentioned; which is operable linked, too.

[27440] In another embodiment thereof the expression cassette does not comprise an additional transit peptide in case in Table I, application no. 3, in column 6 in the same line as SEQ ID NO. 4348 is depicted, non-targeted is mentioned.

[27441] In an embodiment the present invention relates to an expresssion cassette comprising a) a promoter, preferably a promoter selected from the group consisting of Big35S, PCUbi, Super and USP, in particular p-PcUBI; and b) the nucleic acid SEQ ID NO. 68987, or a homolog or fragment thereof, or a homolog thereof being depicted in Table I, application no. 3, column 8, in the same line as SEQ ID NO. 68987, preferably the coding region thereof, a homolog or a fragment thereof; which are operable linked.

[27442] In an embodiment thereof the expression cassette comprises in addition c) a nucleic acid molecule encoding a transit peptide, especially a plastidal transit petide in case in Table I, application no. 3, in column 6 in the same line as SEQ ID NO. 68987 is depicted, plastidic is mentioned, or a mitochondrial transit peptide in case in Table I, application no. 3, in column 6 in the same line as SEQ ID NO. 68987 is depicted, mitochondrial is mentioned; which is operable linked, too.

[27443] In another embodiment thereof the expression cassette does not comprise an additional transit peptide in case in Table I, application no. 3, in column 6 in the same line as SEQ ID NO. 68987 is depicted, non-targeted is mentioned.

[27444] In an embodiment the present invention relates to an expresssion cassette comprising a) a promoter, preferably a promoter selected from the group consisting of Big35S, PCUbi, Super and USP, in particular p-PcUBI; and b) the nucleic acid SEQ ID NO. 24438, or a homolog or fragment thereof, or a homolog thereof being depicted in Table I, application no. 3, column 8, in the same line as SEQ ID NO. 24438, preferably the coding region thereof, a homolog or a fragment thereof; which are operable linked.

[27445] In an embodiment thereof the expression cassette comprises in addition c) a nucleic acid molecule encoding a transit peptide, especially a plastidal transit petide in case in Table I, application no. 3, in column 6 in the same line as SEQ ID NO. 24438 is depicted, plastidic is mentioned, or a mitochondrial transit peptide in case in Table I, application no. 3, in column 6 in the same line as SEQ ID NO. 24438 is depicted, mitochondrial is mentioned; which is operable linked, too.

[27446] In another embodiment thereof the expression cassette does not comprise an additional transit peptide in case in Table I, application no. 3, in column 6 in the same line as SEQ ID NO. 24438 is depicted, non-targeted is mentioned.

[27447] In an embodiment the present invention relates to an expresssion cassette comprising a) a promoter, preferably a promoter selected from the group consisting of Big35S, PCUbi, Super and USP, in particular p-PcUBI; and b) the nucleic acid SEQ ID NO. 24492, or a homolog or fragment thereof, or a homolog thereof being depicted in Table I, application no. 3, column 8, in the same line as SEQ ID NO. 24492, preferably the coding region thereof, a homolog or a fragment thereof; which are operable linked.

[27448] In an embodiment thereof the expression cassette comprises in addition c) a nucleic acid molecule encoding a transit peptide, especially a plastidal transit petide in case in Table I, application no. 3, in column 6 in the same line as SEQ ID NO. 24492 is depicted, plastidic is mentioned, or a mitochondrial transit peptide in case in Table I, application no. 3, in column 6 in the same line as SEQ ID NO. 24492 is depicted, mitochondrial is mentioned; which is operable linked, too.

[27449] In another embodiment thereof the expression cassette does not comprise an additional transit peptide in case in Table I, application no. 3, in column 6 in the same line as SEQ ID NO. 24492 is depicted, non-targeted is mentioned.

[27450] In an embodiment the present invention relates to an expresssion cassette comprising a) a promoter, preferably a promoter selected from the group consisting of Big35S, PCUbi, Super and USP, in particular p-PcUBI; and b) the nucleic acid SEQ ID NO. 25222, or a homolog or fragment thereof, or a homolog thereof being depicted in Table I, application no. 3, column 8, in the same line as SEQ ID NO. 25222, preferably the coding region thereof, a homolog or a fragment thereof; which are operable linked.

[27451] In an embodiment thereof the expression cassette comprises in addition c) a nucleic acid molecule encoding a transit peptide, especially a plastidal transit petide in case in Table I, application no. 3, in column 6 in the same line as SEQ ID NO. 25222 is depicted, plastidic is mentioned, or a mitochondrial transit peptide in case in Table I, application no. 3, in column 6 in the same line as SEQ ID NO. 25222 is depicted, mitochondrial is mentioned; which is operable linked, too.

[27452] In another embodiment thereof the expression cassette does not comprise an additional transit peptide in case in Table I, application no. 3, in column 6 in the same line as SEQ ID NO. 25222 is depicted, non-targeted is mentioned.

[27453] In an embodiment the present invention relates to an expresssion cassette comprising a) a promoter, preferably a promoter selected from the group consisting of Big35S, PCUbi, Super and USP, in particular p-PcUBI; and b) the nucleic acid SEQ ID NO. 69275, or a homolog or fragment thereof, or a homolog thereof being depicted in Table I, application no. 3, column 8, in the same line as SEQ ID NO. 69275, preferably the coding region thereof, a homolog or a fragment thereof; which are operable linked.

[27454] In an embodiment thereof the expression cassette comprises in addition c) a nucleic acid molecule encoding a transit peptide, especially a plastidal transit petide in case in Table I, application no. 3, in column 6 in the same line as SEQ ID NO. 69275 is depicted, plastidic is mentioned, or a mitochondrial transit peptide in case in Table I, application no. 3, in column 6 in the same line as SEQ ID NO. 69275 is depicted, mitochondrial is mentioned; which is operable linked, too.

[27455] In another embodiment thereof the expression cassette does not comprise an additional transit peptide in case in Table I, application no. 3, in column 6 in the same line as SEQ ID NO. 69275 is depicted, non-targeted is mentioned.

[27456] In an embodiment the present invention relates to an expresssion cassette comprising a) a promoter, preferably a promoter selected from the group consisting of Big35S, PCUbi, Super and USP, in particular p-PcUBI; and b) the nucleic acid SEQ ID NO. 25283, or a homolog or fragment thereof, or a homolog thereof being depicted in Table I, application no. 3, column 8, in the same line as SEQ ID NO. 25283, preferably the coding region thereof, a homolog or a fragment thereof; which are operable linked.

[27457] In an embodiment thereof the expression cassette comprises in addition c) a nucleic acid molecule encoding a transit peptide, especially a plastidal transit petide in case in Table I, application no. 3, in column 6 in the same line as SEQ ID NO. 25283 is depicted, plastidic is mentioned, or a mitochondrial transit peptide in case in Table I, application no. 3, in column 6 in the same line as SEQ ID NO. 25283 is depicted, mitochondrial is mentioned; which is operable linked, too.

[27458] In another embodiment thereof the expression cassette does not comprise an additional transit peptide in case in Table I, application no. 3, in column 6 in the same line as SEQ ID NO. 25283 is depicted, non-targeted is mentioned.

[27459] In an embodiment the present invention relates to an expresssion cassette comprising a) a promoter, preferably a promoter selected from the group consisting of Big35S, PCUbi, Super and USP, in particular p-PcUBI; and b) the nucleic acid SEQ ID NO. 4904, or a homolog or fragment thereof, or a homolog thereof being depicted in Table I, application no. 3, column 8, in the same line as SEQ ID NO. 4904, preferably the coding region thereof, a homolog or a fragment thereof; which are operable linked.

[27460] In an embodiment thereof the expression cassette comprises in addition c) a nucleic acid molecule encoding a transit peptide, especially a plastidal transit petide in case in Table I, application no. 3, in column 6 in the same line as SEQ ID NO. 4904 is depicted, plastidic is mentioned, or a mitochondrial transit peptide in case in Table I, application no. 3, in column 6 in the same line as SEQ ID NO. 4904 is depicted, mitochondrial is mentioned; which is operable linked, too.

[27461] In another embodiment thereof the expression cassette does not comprise an additional transit peptide in case in Table I, application no. 3, in column 6 in the same line as SEQ ID NO. 4904 is depicted, non-targeted is mentioned.

[27462] In an embodiment the present invention relates to an expresssion cassette comprising a) a promoter, preferably a promoter selected from the group consisting of Big35S, PCUbi, Super and USP, in particular p-PcUBI; and b) the nucleic acid SEQ ID NO. 69553, or a homolog or fragment thereof, or a homolog thereof being depicted in Table I, application no. 3, column 8, in the same line as SEQ ID NO. 69553, preferably the coding region thereof, a homolog or a fragment thereof; which are operable linked.

[27463] In an embodiment thereof the expression cassette comprises in addition c) a nucleic acid molecule encoding a transit peptide, especially a plastidal transit petide in case in Table I, application no. 3, in column 6 in the same line as SEQ ID NO. 69553 is depicted, plastidic is mentioned, or a mitochondrial transit peptide in case in Table I, application no. 3, in column 6 in the same line as SEQ ID NO. 69553 is depicted, mitochondrial is mentioned; which is operable linked, too.

[27464] In another embodiment thereof the expression cassette does not comprise an additional transit peptide in case in Table I, application no. 3, in column 6 in the same line as SEQ ID NO. 69553 is depicted, non-targeted is mentioned.

[27465] In an embodiment the present invention relates to an expresssion cassette comprising a) a promoter, preferably a promoter selected from the group consisting of Big35S, PCUbi, Super and USP, in particular p-PcUBI; and b) the nucleic acid SEQ ID NO. 25428, or a homolog or fragment thereof, or a homolog thereof being depicted in Table I, application no. 3, column 8, in the same line as SEQ ID NO. 25428, preferably the coding region thereof, a homolog or a fragment thereof; which are operable linked.

[27466] In an embodiment thereof the expression cassette comprises in addition c) a nucleic acid molecule encoding a transit peptide, especially a plastidal transit petide in case in Table I, application no. 3, in column 6 in the same line as SEQ ID NO. 25428 is depicted, plastidic is mentioned, or a mitochondrial transit peptide in case in Table I, application no. 3, in column 6 in the same line as SEQ ID NO. 25428 is depicted, mitochondrial is mentioned; which is operable linked, too.

[27467] In another embodiment thereof the expression cassette does not comprise an additional transit peptide in case in Table I, application no. 3, in column 6 in the same line as SEQ ID NO. 25428 is depicted, non-targeted is mentioned.

[27468] In an embodiment the present invention relates to an expresssion cassette comprising a) a promoter, preferably a promoter selected from the group consisting of Big35S, PCUbi, Super and USP, in particular p-PcUBI; and b) the nucleic acid SEQ ID NO. 69574, or a homolog or fragment thereof, or a homolog thereof being depicted in Table I, application no. 3, column 8, in the same line as SEQ ID NO. 69574, preferably the coding region thereof, a homolog or a fragment thereof; which are operable linked.

[27469] In an embodiment thereof the expression cassette comprises in addition c) a nucleic acid molecule encoding a transit peptide, especially a plastidal transit petide in case in Table I, application no. 3, in column 6 in the same line as SEQ ID NO. 69574 is depicted, plastidic is mentioned, or a mitochondrial transit peptide in case in Table I, application no. 3, in column 6 in the same line as SEQ ID NO. 69574 is depicted, mitochondrial is mentioned; which is operable linked, too.

[27470] In another embodiment thereof the expression cassette does not comprise an additional transit peptide in case in Table I, application no. 3, in column 6 in the same line as SEQ ID NO. 69574 is depicted, non-targeted is mentioned.

[27471] In an embodiment the present invention relates to an expresssion cassette comprising a) a promoter, preferably a promoter selected from the group consisting of Big35S, PCUbi, Super and USP, in particular p-PcUBI; and b) the nucleic acid SEQ ID NO. 5318, or a homolog or fragment thereof, or a homolog thereof being depicted in Table I, application no. 3, column 8, in the same line as SEQ ID NO. 5318, preferably the coding region thereof, a homolog or a fragment thereof; which are operable linked.

[27472] In an embodiment thereof the expression cassette comprises in addition c) a nucleic acid molecule encoding a transit peptide, especially a plastidal transit petide in case in Table I, application no. 3, in column 6 in the same line as SEQ ID NO. 5318 is depicted, plastidic is mentioned, or a mitochondrial transit peptide in case in Table I, application no. 3, in column 6 in the same line as SEQ ID NO. 5318 is depicted, mitochondrial is mentioned; which is operable linked, too.

[27473] In another embodiment thereof the expression cassette does not comprise an additional transit peptide in case in Table I, application no. 3, in column 6 in the same line as SEQ ID NO. 5318 is depicted, non-targeted is mentioned.

[27474] In an embodiment the present invention relates to an expresssion cassette comprising a) a promoter, preferably a promoter selected from the group consisting of Big35S, PCUbi, Super and USP, in particular p-PcUBI; and b) the nucleic acid SEQ ID NO. 25498, or a homolog or fragment thereof, or a homolog thereof being depicted in Table I, application no. 3, column 8, in the same line as SEQ ID NO. 25498, preferably the coding region thereof, a homolog or a fragment thereof; which are operable linked.

[27475] In an embodiment thereof the expression cassette comprises in addition c) a nucleic acid molecule encoding a transit peptide, especially a plastidal transit petide in case in Table I, application no. 3, in column 6 in the same line as SEQ ID NO. 25498 is depicted, plastidic is mentioned, or a mitochondrial transit peptide in case in Table I, application no. 3, in column 6 in the same line as SEQ ID NO. 25498 is depicted, mitochondrial is mentioned; which is operable linked, too.

[27476] In another embodiment thereof the expression cassette does not comprise an additional transit peptide in case in Table I, application no. 3, in column 6 in the same line as SEQ ID NO. 25498 is depicted, non-targeted is mentioned.

[27477] In an embodiment the present invention relates to an expresssion cassette comprising a) a promoter, preferably a promoter selected from the group consisting of Big35S, PCUbi, Super and USP, in particular p-PcUBI; and b) the nucleic acid SEQ ID NO. 70006, or a homolog or fragment thereof, or a homolog thereof being depicted in Table I, application no. 3, column 8, in the same line as SEQ ID NO. 70006, preferably the coding region thereof, a homolog or a fragment thereof; which are operable linked.

[27478] In an embodiment thereof the expression cassette comprises in addition c) a nucleic acid molecule encoding a transit peptide, especially a plastidal transit petide in case in Table I, application no. 3, in column 6 in the same line as SEQ ID NO. 70006 is depicted, plastidic is mentioned, or a mitochondrial transit peptide in case in Table I, application no. 3, in column 6 in the same line as SEQ ID NO. 70006 is depicted, mitochondrial is mentioned; which is operable linked, too.

[27479] In another embodiment thereof the expression cassette does not comprise an additional transit peptide in case in Table I, application no. 3, in column 6 in the same line as SEQ ID NO. 70006 is depicted, non-targeted is mentioned.

[27480] In an embodiment the present invention relates to an expresssion cassette comprising a) a promoter, preferably a promoter selected from the group consisting of Big35S, PCUbi, Super and USP, in particular p-PcUBI; and b) the nucleic acid SEQ ID NO. 70038, or a homolog or fragment thereof, or a homolog thereof being depicted in Table I, application no. 3, column 8, in the same line as SEQ ID NO. 70038, preferably the coding region thereof, a homolog or a fragment thereof; which are operable linked.

[27481] In an embodiment thereof the expression cassette comprises in addition c) a nucleic acid molecule encoding a transit peptide, especially a plastidal transit petide in case in Table I, application no. 3, in column 6 in the same line as SEQ ID NO. 70038 is depicted, plastidic is mentioned, or a mitochondrial transit peptide in case in Table I, application no. 3, in column 6 in the same line as SEQ ID NO. 70038 is depicted, mitochondrial is mentioned; which is operable linked, too.

[27482] In another embodiment thereof the expression cassette does not comprise an additional transit peptide in case in Table I, application no. 3, in column 6 in the same line as SEQ ID NO. 70038 is depicted, non-targeted is mentioned.

[27483] In an embodiment the present invention relates to an expresssion cassette comprising a) a promoter, preferably a promoter selected from the group consisting of Big35S, PCUbi, Super and USP, in particular p-PcUBI; and b) the nucleic acid SEQ ID NO. 5493, or a homolog or fragment thereof, or a homolog thereof being depicted in Table I, application no. 3, column 8, in the same line as SEQ ID NO. 5493, preferably the coding region thereof, a homolog or a fragment thereof; which are operable linked.

[27484] In an embodiment thereof the expression cassette comprises in addition c) a nucleic acid molecule encoding a transit peptide, especially a plastidal transit petide in case in Table I, application no. 3, in column 6 in the same line as SEQ ID NO. 5493 is depicted, plastidic is mentioned, or a mitochondrial transit peptide in case in Table I, application no. 3, in column 6 in the same line as SEQ ID NO. 5493 is depicted, mitochondrial is mentioned; which is operable linked, too.

[27485] In another embodiment thereof the expression cassette does not comprise an additional transit peptide in case in Table I, application no. 3, in column 6 in the same line as SEQ ID NO. 5493 is depicted, non-targeted is mentioned.

[27486] In an embodiment the present invention relates to an expresssion cassette comprising a) a promoter, preferably a promoter selected from the group consisting of Big35S, PCUbi, Super and USP, in particular p-PcUBI; and b) the nucleic acid SEQ ID NO. 70583, or a homolog or fragment thereof, or a homolog thereof being depicted in Table I, application no. 3, column 8, in the same line as SEQ ID NO. 70583, preferably the coding region thereof, a homolog or a fragment thereof; which are operable linked.

[27487] In an embodiment thereof the expression cassette comprises in addition c) a nucleic acid molecule encoding a transit peptide, especially a plastidal transit petide in case in Table I, application no. 3, in column 6 in the same line as SEQ ID NO. 70583 is depicted, plastidic is mentioned, or a mitochondrial transit peptide in case in Table I, application no. 3, in column 6 in the same line as SEQ ID NO. 70583 is depicted, mitochondrial is mentioned; which is operable linked, too.

[27488] In another embodiment thereof the expression cassette does not comprise an additional transit peptide in case in Table I, application no. 3, in column 6 in the same line as SEQ ID NO. 70583 is depicted, non-targeted is mentioned.

[27489] In an embodiment the present invention relates to an expresssion cassette comprising a) a promoter, preferably a promoter selected from the group consisting of Big35S, PCUbi, Super and USP, in particular p-PcUBI; and b) the nucleic acid SEQ ID NO. 70715, or a homolog or fragment thereof, or a homolog thereof being depicted in Table I, application no. 3, column 8, in the same line as SEQ ID NO. 70715, preferably the coding region thereof, a homolog or a fragment thereof; which are operable linked.

[27490] In an embodiment thereof the expression cassette comprises in addition c) a nucleic acid molecule encoding a transit peptide, especially a plastidal transit petide in case in Table I, application no. 3, in column 6 in the same line as SEQ ID NO. 70715 is depicted, plastidic is mentioned, or a mitochondrial transit peptide in case in Table I, application no. 3, in column 6 in the same line as SEQ ID NO. 70715 is depicted, mitochondrial is mentioned; which is operable linked, too.

[27491] In another embodiment thereof the expression cassette does not comprise an additional transit peptide in case in Table I, application no. 3, in column 6 in the same line as SEQ ID NO. 70715 is depicted, non-targeted is mentioned.

[27492] In an embodiment the present invention relates to an expresssion cassette comprising a) a promoter, preferably a promoter selected from the group consisting of Big35S, PCUbi, Super and USP, in particular p-PcUBI; and b) the nucleic acid SEQ ID NO. 25676, or a homolog or fragment thereof, or a homolog thereof being depicted in Table I, application no. 3, column 8, in the same line as SEQ ID NO. 25676, preferably the coding region thereof, a homolog or a fragment thereof; which are operable linked.

[27493] In an embodiment thereof the expression cassette comprises in addition c) a nucleic acid molecule encoding a transit peptide, especially a plastidal transit petide in case in Table I, application no. 3, in column 6 in the same line as SEQ ID NO. 25676 is depicted, plastidic is mentioned, or a mitochondrial transit peptide in case in Table I, application no. 3, in column 6 in the same line as SEQ ID NO. 25676 is depicted, mitochondrial is mentioned; which is operable linked, too.

[27494] In another embodiment thereof the expression cassette does not comprise an additional transit peptide in case in Table I, application no. 3, in column 6 in the same line as SEQ ID NO. 25676 is depicted, non-targeted is mentioned.

[27495] In an embodiment the present invention relates to an expresssion cassette comprising a) a promoter, preferably a promoter selected from the group consisting of Big35S, PCUbi, Super and USP, in particular p-PcUBI; and b) the nucleic acid SEQ ID NO. 25780, or a homolog or fragment thereof, or a homolog thereof being depicted in Table I, application no. 3, column 8, in the same line as SEQ ID NO. 25780, preferably the coding region thereof, a homolog or a fragment thereof; which are operable linked.

[27496] In an embodiment thereof the expression cassette comprises in addition c) a nucleic acid molecule encoding a transit peptide, especially a plastidal transit petide in case in Table I, application no. 3, in column 6 in the same line as SEQ ID NO. 25780 is depicted, plastidic is mentioned, or a mitochondrial transit peptide in case in Table I, application no. 3, in column 6 in the same line as SEQ ID NO. 25780 is depicted, mitochondrial is mentioned; which is operable linked, too.

[27497] In another embodiment thereof the expression cassette does not comprise an additional transit peptide in case in Table I, application no. 3, in column 6 in the same line as SEQ ID NO. 25780 is depicted, non-targeted is mentioned.

[27498] In an embodiment the present invention relates to an expresssion cassette comprising a) a promoter, preferably a promoter selected from the group consisting of Big35S, PCUbi, Super and USP, in particular p-PcUBI; and b) the nucleic acid SEQ ID NO. 5557, or a homolog or fragment thereof, or a homolog thereof being depicted in Table I, application no. 3, column 8, in the same line as SEQ ID NO. 5557, preferably the coding region thereof, a homolog or a fragment thereof; which are operable linked.

[27499] In an embodiment thereof the expression cassette comprises in addition c) a nucleic acid molecule encoding a transit peptide, especially a plastidal transit petide in case in Table I, application no. 3, in column 6 in the same line as SEQ ID NO. 5557 is depicted, plastidic is mentioned, or a mitochondrial transit peptide in case in Table I, application no. 3, in column 6 in the same line as SEQ ID NO. 5557 is depicted, mitochondrial is mentioned; which is operable linked, too.

[27500] In another embodiment thereof the expression cassette does not comprise an additional transit peptide in case in Table I, application no. 3, in column 6 in the same line as SEQ ID NO. 5557 is depicted, non-targeted is mentioned.

[27501] In an embodiment the present invention relates to an expresssion cassette comprising a) a promoter, preferably a promoter selected from the group consisting of Big35S, PCUbi, Super and USP, in particular p-PcUBI; and b) the nucleic acid SEQ ID NO. 26196, or a homolog or fragment thereof, or a homolog thereof being depicted in Table I, application no. 3, column 8, in the same line as SEQ ID NO. 26196, preferably the coding region thereof, a homolog or a fragment thereof; which are operable linked.

[27502] In an embodiment thereof the expression cassette comprises in addition c) a nucleic acid molecule encoding a transit peptide, especially a plastidal transit petide in case in Table I, application no. 3, in column 6 in the same line as SEQ ID NO. 26196 is depicted, plastidic is mentioned, or a mitochondrial transit peptide in case in Table I, application no. 3, in column 6 in the same line as SEQ ID NO. 26196 is depicted, mitochondrial is mentioned; which is operable linked, too.

[27503] In another embodiment thereof the expression cassette does not comprise an additional transit peptide in case in Table I, application no. 3, in column 6 in the same line as SEQ ID NO. 26196 is depicted, non-targeted is mentioned.

[27504] In an embodiment the present invention relates to an expresssion cassette comprising a) a promoter, preferably a promoter selected from the group consisting of Big35S, PCUbi, Super and USP, in particular p-PcUBI; and b) the nucleic acid SEQ ID NO. 26434, or a homolog or fragment thereof, or a homolog thereof being depicted in Table I, application no. 3, column 8, in the same line as SEQ ID NO. 26434, preferably the coding region thereof, a homolog or a fragment thereof; which are operable linked.

[27505] In an embodiment thereof the expression cassette comprises in addition c) a nucleic acid molecule encoding a transit peptide, especially a plastidal transit petide in case in Table I, application no. 3, in column 6 in the same line as SEQ ID NO. 26434 is depicted, plastidic is mentioned, or a mitochondrial transit peptide in case in Table I, application no. 3, in column 6 in the same line as SEQ ID NO. 26434 is depicted, mitochondrial is mentioned; which is operable linked, too.

[27506] In another embodiment thereof the expression cassette does not comprise an additional transit peptide in case in Table I, application no. 3, in column 6 in the same line as SEQ ID NO. 26434 is depicted, non-targeted is mentioned.

[27507] In an embodiment the present invention relates to an expresssion cassette comprising a) a promoter, preferably a promoter selected from the group consisting of Big35S, PCUbi, Super and USP, in particular p-PcUBI; and b) the nucleic acid SEQ ID NO. 6040, or a homolog or fragment thereof, or a homolog thereof being depicted in Table I, application no. 3, column 8, in the same line as SEQ ID NO. 6040, preferably the coding region thereof, a homolog or a fragment thereof; which are operable linked.

[27508] In an embodiment thereof the expression cassette comprises in addition c) a nucleic acid molecule encoding a transit peptide, especially a plastidal transit petide in case in Table I, application no. 3, in column 6 in the same line as SEQ ID NO. 6040 is depicted, plastidic is mentioned, or a mitochondrial transit peptide in case in Table I, application no. 3, in column 6 in the same line as SEQ ID NO. 6040 is depicted, mitochondrial is mentioned; which is operable linked, too.

[27509] In another embodiment thereof the expression cassette does not comprise an additional transit peptide in case in Table I, application no. 3, in column 6 in the same line as SEQ ID NO. 6040 is depicted, non-targeted is mentioned.

[27510] In an embodiment the present invention relates to an expresssion cassette comprising a) a promoter, preferably a promoter selected from the group consisting of Big35S, PCUbi, Super and USP, in particular p-PcUBI; and b) the nucleic acid SEQ ID NO. 27021, or a homolog or fragment thereof, or a homolog thereof being depicted in Table I, application no. 3, column 8, in the same line as SEQ ID NO. 27021, preferably the coding region thereof, a homolog or a fragment thereof; which are operable linked.

[27511] In an embodiment thereof the expression cassette comprises in addition c) a nucleic acid molecule encoding a transit peptide, especially a plastidal transit petide in case in Table I, application no. 3, in column 6 in the same line as SEQ ID NO. 27021 is depicted, plastidic is mentioned, or a mitochondrial transit peptide in case in Table I, application no. 3, in column 6 in the same line as SEQ ID NO. 27021 is depicted, mitochondrial is mentioned; which is operable linked, too.

[27512] In another embodiment thereof the expression cassette does not comprise an additional transit peptide in case in Table I, application no. 3, in column 6 in the same line as SEQ ID NO. 27021 is depicted, non-targeted is mentioned.

[27513] In an embodiment the present invention relates to an expresssion cassette comprising a) a promoter, preferably a promoter selected from the group consisting of Big35S, PCUbi, Super and USP, in particular p-PcUBI; and b) the nucleic acid SEQ ID NO. 71325, or a homolog or fragment thereof, or a homolog thereof being depicted in Table I, application no. 3, column 8, in the same line as SEQ ID NO. 71325, preferably the coding region thereof, a homolog or a fragment thereof; which are operable linked.

[27514] In an embodiment thereof the expression cassette comprises in addition c) a nucleic acid molecule encoding a transit peptide, especially a plastidal transit petide in case in Table I, application no. 3, in column 6 in the same line as SEQ ID NO. 71325 is depicted, plastidic is mentioned, or a mitochondrial transit peptide in case in Table I, application no. 3, in column 6 in the same line as SEQ ID NO. 71325 is depicted, mitochondrial is mentioned; which is operable linked, too.

[27515] In another embodiment thereof the expression cassette does not comprise an additional transit peptide in case in Table I, application no. 3, in column 6 in the same line as SEQ ID NO. 71325 is depicted, non-targeted is mentioned.

[27516] In an embodiment the present invention relates to an expresssion cassette comprising a) a promoter, preferably a promoter selected from the group consisting of Big35S, PCUbi, Super and USP, in particular p-PcUBI; and b) the nucleic acid SEQ ID NO. 71763, or a homolog or fragment thereof, or a homolog thereof being depicted in Table I, application no. 3, column 8, in the same line as SEQ ID NO. 71763, preferably the coding region thereof, a homolog or a fragment thereof; which are operable linked.

[27517] In an embodiment thereof the expression cassette comprises in addition c) a nucleic acid molecule encoding a transit peptide, especially a plastidal transit petide in case in Table I, application no. 3, in column 6 in the same line as SEQ ID NO. 71763 is depicted, plastidic is mentioned, or a mitochondrial transit peptide in case in Table I, application no. 3, in column 6 in the same line as SEQ ID NO. 71763 is depicted, mitochondrial is mentioned; which is operable linked, too.

[27518] In another embodiment thereof the expression cassette does not comprise an additional transit peptide in case in Table I, application no. 3, in column 6 in the same line as SEQ ID NO. 71763 is depicted, non-targeted is mentioned.

[27519] In an embodiment the present invention relates to an expresssion cassette comprising a) a promoter, preferably a promoter selected from the group consisting of Big35S, PCUbi, Super and USP, in particular p-PcUBI; and b) the nucleic acid SEQ ID NO. 27882, or a homolog or fragment thereof, or a homolog thereof being depicted in Table I, application no. 3, column 8, in the same line as SEQ ID NO. 27882, preferably the coding region thereof, a homolog or a fragment thereof; which are operable linked.

[27520] In an embodiment thereof the expression cassette comprises in addition c) a nucleic acid molecule encoding a transit peptide, especially a plastidal transit petide in case in Table I, application no. 3, in column 6 in the same line as SEQ ID NO. 27882 is depicted, plastidic is mentioned, or a mitochondrial transit peptide in case in Table I, application no. 3, in column 6 in the same line as SEQ ID NO. 27882 is depicted, mitochondrial is mentioned; which is operable linked, too.

[27521] In another embodiment thereof the expression cassette does not comprise an additional transit peptide in case in Table I, application no. 3, in column 6 in the same line as SEQ ID NO. 27882 is depicted, non-targeted is mentioned.

[27522] In an embodiment the present invention relates to an expresssion cassette comprising a) a promoter, preferably a promoter selected from the group consisting of Big35S, PCUbi, Super and USP, in particular p-PcUBI; and b) the nucleic acid SEQ ID NO. 28040, or a homolog or fragment thereof, or a homolog thereof being depicted in Table I, application no. 3, column 8, in the same line as SEQ ID NO. 28040, preferably the coding region thereof, a homolog or a fragment thereof; which are operable linked.

[27523] In an embodiment thereof the expression cassette comprises in addition c) a nucleic acid molecule encoding a transit peptide, especially a plastidal transit petide in case in Table I, application no. 3, in column 6 in the same line as SEQ ID NO. 28040 is depicted, plastidic is mentioned, or a mitochondrial transit peptide in case in Table I, application no. 3, in column 6 in the same line as SEQ ID NO. 28040 is depicted, mitochondrial is mentioned; which is operable linked, too.

[27524] In another embodiment thereof the expression cassette does not comprise an additional transit peptide in case in Table I, application no. 3, in column 6 in the same line as SEQ ID NO. 28040 is depicted, non-targeted is mentioned.

[27525] In an embodiment the present invention relates to an expresssion cassette comprising a) a promoter, preferably a promoter selected from the group consisting of Big35S, PCUbi, Super and USP, in particular p-PcUBI; and b) the nucleic acid SEQ ID NO. 6075, or a homolog or fragment thereof, or a homolog thereof being depicted in Table I, application no. 3, column 8, in the same line as SEQ ID NO. 6075, preferably the coding region thereof, a homolog or a fragment thereof; which are operable linked.

[27526] In an embodiment thereof the expression cassette comprises in addition c) a nucleic acid molecule encoding a transit peptide, especially a plastidal transit petide in case in Table I, application no. 3, in column 6 in the same line as SEQ ID NO. 6075 is depicted, plastidic is mentioned, or a mitochondrial transit peptide in case in Table I, application no. 3, in column 6 in the same line as SEQ ID NO. 6075 is depicted, mitochondrial is mentioned; which is operable linked, too.

[27527] In another embodiment thereof the expression cassette does not comprise an additional transit peptide in case in Table I, application no. 3, in column 6 in the same line as SEQ ID NO. 6075 is depicted, non-targeted is mentioned.

[27528] In an embodiment the present invention relates to an expresssion cassette comprising a) a promoter, preferably a promoter selected from the group consisting of Big35S, PCUbi, Super and USP, in particular p-PcUBI; and b) the nucleic acid SEQ ID NO. 72346, or a homolog or fragment thereof, or a homolog thereof being depicted in Table I, application no. 3, column 8, in the same line as SEQ ID NO. 72346, preferably the coding region thereof, a homolog or a fragment thereof; which are operable linked.

[27529] In an embodiment thereof the expression cassette comprises in addition c) a nucleic acid molecule encoding a transit peptide, especially a plastidal transit petide in case in Table I, application no. 3, in column 6 in the same line as SEQ ID NO. 72346 is depicted, plastidic is mentioned, or a mitochondrial transit peptide in case in Table I, application no. 3, in column 6 in the same line as SEQ ID NO. 72346 is depicted, mitochondrial is mentioned; which is operable linked, too.

[27530] In another embodiment thereof the expression cassette does not comprise an additional transit peptide in case in Table I, application no. 3, in column 6 in the same line as SEQ ID NO. 72346 is depicted, non-targeted is mentioned.

[27531] In an embodiment the present invention relates to an expresssion cassette comprising a) a promoter, preferably a promoter selected from the group consisting of Big35S, PCUbi, Super and USP, in particular p-PcUBI; and b) the nucleic acid SEQ ID NO. 29246, or a homolog or fragment thereof, or a homolog thereof being depicted in Table I, application no. 3, column 8, in the same line as SEQ ID NO. 29246, preferably the coding region thereof, a homolog or a fragment thereof; which are operable linked.

[27532] In an embodiment thereof the expression cassette comprises in addition c) a nucleic acid molecule encoding a transit peptide, especially a plastidal transit petide in case in Table I, application no. 3, in column 6 in the same line as SEQ ID NO. 29246 is depicted, plastidic is mentioned, or a mitochondrial transit peptide in case in Table I, application no. 3, in column 6 in the same line as SEQ ID NO. 29246 is depicted, mitochondrial is mentioned; which is operable linked, too.

[27533] In another embodiment thereof the expression cassette does not comprise an additional transit peptide in case in Table I, application no. 3, in column 6 in the same line as SEQ ID NO. 29246 is depicted, non-targeted is mentioned.

[27534] In an embodiment the present invention relates to an expresssion cassette comprising a) a promoter, preferably a promoter selected from the group consisting of Big35S, PCUbi, Super and USP, in particular p-PcUBI; and b) the nucleic acid SEQ ID NO. 29286, or a homolog or fragment thereof, or a homolog thereof being depicted in Table I, application no. 3, column 8, in the same line as SEQ ID NO. 29286, preferably the coding region thereof, a homolog or a fragment thereof; which are operable linked.

[27535] In an embodiment thereof the expression cassette comprises in addition c) a nucleic acid molecule encoding a transit peptide, especially a plastidal transit petide in case in Table I, application no. 3, in column 6 in the same line as SEQ ID NO. 29286 is depicted, plastidic is mentioned, or a mitochondrial transit peptide in case in Table I, application no. 3, in column 6 in the same line as SEQ ID NO. 29286 is depicted, mitochondrial is mentioned; which is operable linked, too.

[27536] In another embodiment thereof the expression cassette does not comprise an additional transit peptide in case in Table I, application no. 3, in column 6 in the same line as SEQ ID NO. 29286 is depicted, non-targeted is mentioned.

[27537] In an embodiment the present invention relates to an expresssion cassette comprising a) a promoter, preferably a promoter selected from the group consisting of Big35S, PCUbi, Super and USP, in particular p-PcUBI; and b) the nucleic acid SEQ ID NO. 29500, or a homolog or fragment thereof, or a homolog thereof being depicted in Table I, application no. 3, column 8, in the same line as SEQ ID NO. 29500, preferably the coding region thereof, a homolog or a fragment thereof; which are operable linked.

[27538] In an embodiment thereof the expression cassette comprises in addition c) a nucleic acid molecule encoding a transit peptide, especially a plastidal transit petide in case in Table I, application no. 3, in column 6 in the same line as SEQ ID NO. 29500 is depicted, plastidic is mentioned, or a mitochondrial transit peptide in case in Table I, application no. 3, in column 6 in the same line as SEQ ID NO. 29500 is depicted, mitochondrial is mentioned; which is operable linked, too.

[27539] In another embodiment thereof the expression cassette does not comprise an additional transit peptide in case in Table I, application no. 3, in column 6 in the same line as SEQ ID NO. 29500 is depicted, non-targeted is mentioned.

[27540] In an embodiment the present invention relates to an expresssion cassette comprising a) a promoter, preferably a promoter selected from the group consisting of Big35S, PCUbi, Super and USP, in particular p-PcUBI; and b) the nucleic acid SEQ ID NO. 30039, or a homolog or fragment thereof, or a homolog thereof being depicted in Table I, application no. 3, column 8, in the same line as SEQ ID NO. 30039, preferably the coding region thereof, a homolog or a fragment thereof; which are operable linked.

[27541] In an embodiment thereof the expression cassette comprises in addition c) a nucleic acid molecule encoding a transit peptide, especially a plastidal transit petide in case in Table I, application no. 3, in column 6 in the same line as SEQ ID NO. 30039 is depicted, plastidic is mentioned, or a mitochondrial transit peptide in case in Table I, application no. 3, in column 6 in the same line as SEQ ID NO. 30039 is depicted, mitochondrial is mentioned; which is operable linked, too.

[27542] In another embodiment thereof the expression cassette does not comprise an additional transit peptide in case in Table I, application no. 3, in column 6 in the same line as SEQ ID NO. 30039 is depicted, non-targeted is mentioned.

[27543] In an embodiment the present invention relates to an expresssion cassette comprising a) a promoter, preferably a promoter selected from the group consisting of Big35S, PCUbi, Super and USP, in particular p-PcUBI; and b) the nucleic acid SEQ ID NO. 72520, or a homolog or fragment thereof, or a homolog thereof being depicted in Table I, application no. 3, column 8, in the same line as SEQ ID NO. 72520, preferably the coding region thereof, a homolog or a fragment thereof; which are operable linked.

[27544] In an embodiment thereof the expression cassette comprises in addition c) a nucleic acid molecule encoding a transit peptide, especially a plastidal transit petide in case in Table I, application no. 3, in column 6 in the same line as SEQ ID NO. 72520 is depicted, plastidic is mentioned, or a mitochondrial transit peptide in case in Table I, application no. 3, in column 6 in the same line as SEQ ID NO. 72520 is depicted, mitochondrial is mentioned; which is operable linked, too.

[27545] In another embodiment thereof the expression cassette does not comprise an additional transit peptide in case in Table I, application no. 3, in column 6 in the same line as SEQ ID NO. 72520 is depicted, non-targeted is mentioned.

[27546] In an embodiment the present invention relates to an expresssion cassette comprising a) a promoter, preferably a promoter selected from the group consisting of Big35S, PCUbi, Super and USP, in particular p-PcUBI; and b) the nucleic acid SEQ ID NO. 31717, or a homolog or fragment thereof, or a homolog thereof being depicted in Table I, application no. 3, column 8, in the same line as SEQ ID NO. 31717, preferably the coding region thereof, a homolog or a fragment thereof; which are operable linked.

[27547] In an embodiment thereof the expression cassette comprises in addition c) a nucleic acid molecule encoding a transit peptide, especially a plastidal transit petide in case in Table I, application no. 3, in column 6 in the same line as SEQ ID NO. 31717 is depicted, plastidic is mentioned, or a mitochondrial transit peptide in case in Table I, application no. 3, in column 6 in the same line as SEQ ID NO. 31717 is depicted, mitochondrial is mentioned; which is operable linked, too.

[27548] In another embodiment thereof the expression cassette does not comprise an additional transit peptide in case in Table I, application no. 3, in column 6 in the same line as SEQ ID NO. 31717 is depicted, non-targeted is mentioned.

[27549] In an embodiment the present invention relates to an expresssion cassette comprising a) a promoter, preferably a promoter selected from the group consisting of Big35S, PCUbi, Super and USP, in particular p-PcUBI; and b) the nucleic acid SEQ ID NO. 72935, or a homolog or fragment thereof, or a homolog thereof being depicted in Table I, application no. 3, column 8, in the same line as SEQ ID NO. 72935, preferably the coding region thereof, a homolog or a fragment thereof; which are operable linked.

[27550] In an embodiment thereof the expression cassette comprises in addition c) a nucleic acid molecule encoding a transit peptide, especially a plastidal transit petide in case in Table I, application no. 3, in column 6 in the same line as SEQ ID NO. 72935 is depicted, plastidic is mentioned, or a mitochondrial transit peptide in case in Table I, application no. 3, in column 6 in the same line as SEQ ID NO. 72935 is depicted, mitochondrial is mentioned; which is operable linked, too.

[27551] In another embodiment thereof the expression cassette does not comprise an additional transit peptide in case in Table I, application no. 3, in column 6 in the same line as SEQ ID NO. 72935 is depicted, non-targeted is mentioned.

[27552] In an embodiment the present invention relates to an expresssion cassette comprising a) a promoter, preferably a promoter selected from the group consisting of Big35S, PCUbi, Super and USP, in particular p-PcUBI; and b) the nucleic acid SEQ ID NO. 73038, or a homolog or fragment thereof, or a homolog thereof being depicted in Table I, application no. 3, column 8, in the same line as SEQ ID NO. 73038, preferably the coding region thereof, a homolog or a fragment thereof; which are operable linked.

[27553] In an embodiment thereof the expression cassette comprises in addition c) a nucleic acid molecule encoding a transit peptide, especially a plastidal transit petide in case in Table I, application no. 3, in column 6 in the same line as SEQ ID NO. 73038 is depicted, plastidic is mentioned, or a mitochondrial transit peptide in case in Table I, application no. 3, in column 6 in the same line as SEQ ID NO. 73038 is depicted, mitochondrial is mentioned; which is operable linked, too.

[27554] In another embodiment thereof the expression cassette does not comprise an additional transit peptide in case in Table I, application no. 3, in column 6 in the same line as SEQ ID NO. 73038 is depicted, non-targeted is mentioned.

[27555] In an embodiment the present invention relates to an expresssion cassette comprising a) a promoter, preferably a promoter selected from the group consisting of Big35S, PCUbi, Super and USP, in particular p-PcUBI; and b) the nucleic acid SEQ ID NO. 73284, or a homolog or fragment thereof, or a homolog thereof being depicted in Table I, application no. 3, column 8, in the same line as SEQ ID NO. 73284, preferably the coding region thereof, a homolog or a fragment thereof; which are operable linked.

[27556] In an embodiment thereof the expression cassette comprises in addition c) a nucleic acid molecule encoding a transit peptide, especially a plastidal transit petide in case in Table I, application no. 3, in column 6 in the same line as SEQ ID NO. 73284 is depicted, plastidic is mentioned, or a mitochondrial transit peptide in case in Table I, application no. 3, in column 6 in the same line as SEQ ID NO. 73284 is depicted, mitochondrial is mentioned; which is operable linked, too.

[27557] In another embodiment thereof the expression cassette does not comprise an additional transit peptide in case in Table I, application no. 3, in column 6 in the same line as SEQ ID NO. 73284 is depicted, non-targeted is mentioned.

[27558] In an embodiment the present invention relates to an expresssion cassette comprising a) a promoter, preferably a promoter selected from the group consisting of Big35S, PCUbi, Super and USP, in particular p-PcUBI; and b) the nucleic acid SEQ ID NO. 31926, or a homolog or fragment thereof, or a homolog thereof being depicted in Table I, application no. 3, column 8, in the same line as SEQ ID NO. 31926, preferably the coding region thereof, a homolog or a fragment thereof; which are operable linked.

[27559] In an embodiment thereof the expression cassette comprises in addition c) a nucleic acid molecule encoding a transit peptide, especially a plastidal transit petide in case in Table I, application no. 3, in column 6 in the same line as SEQ ID NO. 31926 is depicted, plastidic is mentioned, or a mitochondrial transit peptide in case in Table I, application no. 3, in column 6 in the same line as SEQ ID NO. 31926 is depicted, mitochondrial is mentioned; which is operable linked, too.

[27560] In another embodiment thereof the expression cassette does not comprise an additional transit peptide in case in Table I, application no. 3, in column 6 in the same line as SEQ ID NO. 31926 is depicted, non-targeted is mentioned.

[27561] In an embodiment the present invention relates to an expresssion cassette comprising a) a promoter, preferably a promoter selected from the group consisting of Big35S, PCUbi, Super and USP, in particular p-PcUBI; and b) the nucleic acid SEQ ID NO. 73719, or a homolog or fragment thereof, or a homolog thereof being depicted in Table I, application no. 3, column 8, in the same line as SEQ ID NO. 73719, preferably the coding region thereof, a homolog or a fragment thereof; which are operable linked.

[27562] In an embodiment thereof the expression cassette comprises in addition c) a nucleic acid molecule encoding a transit peptide, especially a plastidal transit petide in case in Table I, application no. 3, in column 6 in the same line as SEQ ID NO. 73719 is depicted, plastidic is mentioned, or a mitochondrial transit peptide in case in Table I, application no. 3, in column 6 in the same line as SEQ ID NO. 73719 is depicted, mitochondrial is mentioned; which is operable linked, too.

[27563] In another embodiment thereof the expression cassette does not comprise an additional transit peptide in case in Table I, application no. 3, in column 6 in the same line as SEQ ID NO. 73719 is depicted, non-targeted is mentioned.

[27564] In an embodiment the present invention relates to an expresssion cassette comprising a) a promoter, preferably a promoter selected from the group consisting of Big35S, PCUbi, Super and USP, in particular p-PcUBI; and b) the nucleic acid SEQ ID NO. 74163, or a homolog or fragment thereof, or a homolog thereof being depicted in Table I, application no. 3, column 8, in the same line as SEQ ID NO. 74163, preferably the coding region thereof, a homolog or a fragment thereof; which are operable linked.

[27565] In an embodiment thereof the expression cassette comprises in addition c) a nucleic acid molecule encoding a transit peptide, especially a plastidal transit petide in case in Table I, application no. 3, in column 6 in the same line as SEQ ID NO. 74163 is depicted, plastidic is mentioned, or a mitochondrial transit peptide in case in Table I, application no. 3, in column 6 in the same line as SEQ ID NO. 74163 is depicted, mitochondrial is mentioned; which is operable linked, too.

[27566] In another embodiment thereof the expression cassette does not comprise an additional transit peptide in case in Table I, application no. 3, in column 6 in the same line as SEQ ID NO. 74163 is depicted, non-targeted is mentioned.

[27567] In an embodiment the present invention relates to an expresssion cassette comprising a) a promoter, preferably a promoter selected from the group consisting of Big35S, PCUbi, Super and USP, in particular p-PcUBI; and b) the nucleic acid SEQ ID NO. 74452, or a homolog or fragment thereof, or a homolog thereof being depicted in Table I, application no. 3, column 8, in the same line as SEQ ID NO. 74452, preferably the coding region thereof, a homolog or a fragment thereof; which are operable linked.

[27568] In an embodiment thereof the expression cassette comprises in addition c) a nucleic acid molecule encoding a transit peptide, especially a plastidal transit petide in case in Table I, application no. 3, in column 6 in the same line as SEQ ID NO. 74452 is depicted, plastidic is mentioned, or a mitochondrial transit peptide in case in Table I, application no. 3, in column 6 in the same line as SEQ ID NO. 74452 is depicted, mitochondrial is mentioned; which is operable linked, too.

[27569] In another embodiment thereof the expression cassette does not comprise an additional transit peptide in case in Table I, application no. 3, in column 6 in the same line as SEQ ID NO. 74452 is depicted, non-targeted is mentioned.

[27570] In an embodiment the present invention relates to an expresssion cassette comprising a) a promoter, preferably a promoter selected from the group consisting of Big35S, PCUbi, Super and USP, in particular p-PcUBI; and b) the nucleic acid SEQ ID NO. 6510, or a homolog or fragment thereof, or a homolog thereof being depicted in Table I, application no. 3, column 8, in the same line as SEQ ID NO. 6510, preferably the coding region thereof, a homolog or a fragment thereof; which are operable linked.

[27571] In an embodiment thereof the expression cassette comprises in addition c) a nucleic acid molecule encoding a transit peptide, especially a plastidal transit petide in case in Table I, application no. 3, in column 6 in the same line as SEQ ID NO. 6510 is depicted, plastidic is mentioned, or a mitochondrial transit peptide in case in Table I, application no. 3, in column 6 in the same line as SEQ ID NO. 6510 is depicted, mitochondrial is mentioned; which is operable linked, too.

[27572] In another embodiment thereof the expression cassette does not comprise an additional transit peptide in case in Table I, application no. 3, in column 6 in the same line as SEQ ID NO. 6510 is depicted, non-targeted is mentioned.

[27573] In an embodiment the present invention relates to an expresssion cassette comprising a) a promoter, preferably a promoter selected from the group consisting of Big35S, PCUbi, Super and USP, in particular p-PcUBI; and b) the nucleic acid SEQ ID NO. 32037, or a homolog or fragment thereof, or a homolog thereof being depicted in Table I, application no. 3, column 8, in the same line as SEQ ID NO. 32037, preferably the coding region thereof, a homolog or a fragment thereof; which are operable linked.

[27574] In an embodiment thereof the expression cassette comprises in addition c) a nucleic acid molecule encoding a transit peptide, especially a plastidal transit petide in case in Table I, application no. 3, in column 6 in the same line as SEQ ID NO. 32037 is depicted, plastidic is mentioned, or a mitochondrial transit peptide in case in Table I, application no. 3, in column 6 in the same line as SEQ ID NO. 32037 is depicted, mitochondrial is mentioned; which is operable linked, too.

[27575] In another embodiment thereof the expression cassette does not comprise an additional transit peptide in case in Table I, application no. 3, in column 6 in the same line as SEQ ID NO. 32037 is depicted, non-targeted is mentioned.

[27576] In an embodiment the present invention relates to an expresssion cassette comprising a) a promoter, preferably a promoter selected from the group consisting of Big35S, PCUbi, Super and USP, in particular p-PcUBI; and b) the nucleic acid SEQ ID NO. 32308, or a homolog or fragment thereof, or a homolog thereof being depicted in Table I, application no. 3, column 8, in the same line as SEQ ID NO. 32308, preferably the coding region thereof, a homolog or a fragment thereof; which are operable linked.

[27577] In an embodiment thereof the expression cassette comprises in addition c) a nucleic acid molecule encoding a transit peptide, especially a plastidal transit petide in case in Table I, application no. 3, in column 6 in the same line as SEQ ID NO. 32308 is depicted, plastidic is mentioned, or a mitochondrial transit peptide in case in Table I, application no. 3, in column 6 in the same line as SEQ ID NO. 32308 is depicted, mitochondrial is mentioned; which is operable linked, too.

[27578] In another embodiment thereof the expression cassette does not comprise an additional transit peptide in case in Table I, application no. 3, in column 6 in the same line as SEQ ID NO. 32308 is depicted, non-targeted is mentioned.

[27579] In an embodiment the present invention relates to an expresssion cassette comprising a) a promoter, preferably a promoter selected from the group consisting of Big35S, PCUbi, Super and USP, in particular p-PcUBI; and b) the nucleic acid SEQ ID NO. 32648, or a homolog or fragment thereof, or a homolog thereof being depicted in Table I, application no. 3, column 8, in the same line as SEQ ID NO. 32648, preferably the coding region thereof, a homolog or a fragment thereof; which are operable linked.

[27580] In an embodiment thereof the expression cassette comprises in addition c) a nucleic acid molecule encoding a transit peptide, especially a plastidal transit petide in case in Table I, application no. 3, in column 6 in the same line as SEQ ID NO. 32648 is depicted, plastidic is mentioned, or a mitochondrial transit peptide in case in Table I, application no. 3, in column 6 in the same line as SEQ ID NO. 32648 is depicted, mitochondrial is mentioned; which is operable linked, too.

[27581] In another embodiment thereof the expression cassette does not comprise an additional transit peptide in case in Table I, application no. 3, in column 6 in the same line as SEQ ID NO. 32648 is depicted, non-targeted is mentioned.

[27582] In an embodiment the present invention relates to an expresssion cassette comprising a) a promoter, preferably a promoter selected from the group consisting of Big35S, PCUbi, Super and USP, in particular p-PcUBI; and b) the nucleic acid SEQ ID NO. 74662, or a homolog or fragment thereof, or a homolog thereof being depicted in Table I, application no. 3, column 8, in the same line as SEQ ID NO. 74662, preferably the coding region thereof, a homolog or a fragment thereof; which are operable linked.

[27583] In an embodiment thereof the expression cassette comprises in addition c) a nucleic acid molecule encoding a transit peptide, especially a plastidal transit petide in case in Table I, application no. 3, in column 6 in the same line as SEQ ID NO. 74662 is depicted, plastidic is mentioned, or a mitochondrial transit peptide in case in Table I, application no. 3, in column 6 in the same line as SEQ ID NO. 74662 is depicted, mitochondrial is mentioned; which is operable linked, too.

[27584] In another embodiment thereof the expression cassette does not comprise an additional transit peptide in case in Table I, application no. 3, in column 6 in the same line as SEQ ID NO. 74662 is depicted, non-targeted is mentioned.

[27585] In an embodiment the present invention relates to an expresssion cassette comprising a) a promoter, preferably a promoter selected from the group consisting of Big35S, PCUbi, Super and USP, in particular p-PcUBI; and b) the nucleic acid SEQ ID NO. 33085, or a homolog or fragment thereof, or a homolog thereof being depicted in Table I, application no. 3, column 8, in the same line as SEQ ID NO. 33085, preferably the coding region thereof, a homolog or a fragment thereof; which are operable linked.

[27586] In an embodiment thereof the expression cassette comprises in addition c) a nucleic acid molecule encoding a transit peptide, especially a plastidal transit petide in case in Table I, application no. 3, in column 6 in the same line as SEQ ID NO. 33085 is depicted, plastidic is mentioned, or a mitochondrial transit peptide in case in Table I, application no. 3, in column 6 in the same line as SEQ ID NO. 33085 is depicted, mitochondrial is mentioned; which is operable linked, too.

[27587] In another embodiment thereof the expression cassette does not comprise an additional transit peptide in case in Table I, application no. 3, in column 6 in the same line as SEQ ID NO. 33085 is depicted, non-targeted is mentioned.

[27588] In an embodiment the present invention relates to an expresssion cassette comprising a) a promoter, preferably a promoter selected from the group consisting of Big35S, PCUbi, Super and USP, in particular p-PcUBI; and b) the nucleic acid SEQ ID NO. 33596, or a homolog or fragment thereof, or a homolog thereof being depicted in Table I, application no. 3, column 8, in the same line as SEQ ID NO. 33596, preferably the coding region thereof, a homolog or a fragment thereof; which are operable linked.

[27589] In an embodiment thereof the expression cassette comprises in addition c) a nucleic acid molecule encoding a transit peptide, especially a plastidal transit petide in case in Table I, application no. 3, in column 6 in the same line as SEQ ID NO. 33596 is depicted, plastidic is mentioned, or a mitochondrial transit peptide in case in Table I, application no. 3, in column 6 in the same line as SEQ ID NO. 33596 is depicted, mitochondrial is mentioned; which is operable linked, too.

[27590] In another embodiment thereof the expression cassette does not comprise an additional transit peptide in case in Table I, application no. 3, in column 6 in the same line as SEQ ID NO. 33596 is depicted, non-targeted is mentioned.

[27591] In an embodiment the present invention relates to an expresssion cassette comprising a) a promoter, preferably a promoter selected from the group consisting of Big35S, PCUbi, Super and USP, in particular p-PcUBI; and b) the nucleic acid SEQ ID NO. 74729, or a homolog or fragment thereof, or a homolog thereof being depicted in Table I, application no. 3, column 8, in the same line as SEQ ID NO. 74729, preferably the coding region thereof, a homolog or a fragment thereof; which are operable linked.

[27592] In an embodiment thereof the expression cassette comprises in addition c) a nucleic acid molecule encoding a transit peptide, especially a plastidal transit petide in case in Table I, application no. 3, in column 6 in the same line as SEQ ID NO. 74729 is depicted, plastidic is mentioned, or a mitochondrial transit peptide in case in Table I, application no. 3, in column 6 in the same line as SEQ ID NO. 74729 is depicted, mitochondrial is mentioned; which is operable linked, too.

[27593] In another embodiment thereof the expression cassette does not comprise an additional transit peptide in case in Table I, application no. 3, in column 6 in the same line as SEQ ID NO. 74729 is depicted, non-targeted is mentioned.

[27594] In an embodiment the present invention relates to an expresssion cassette comprising a) a promoter, preferably a promoter selected from the group consisting of Big35S, PCUbi, Super and USP, in particular p-PcUBI; and b) the nucleic acid SEQ ID NO. 34301, or a homolog or fragment thereof, or a homolog thereof being depicted in Table I, application no. 3, column 8, in the same line as SEQ ID NO. 34301, preferably the coding region thereof, a homolog or a fragment thereof; which are operable linked.

[27595] In an embodiment thereof the expression cassette comprises in addition c) a nucleic acid molecule encoding a transit peptide, especially a plastidal transit petide in case in Table I, application no. 3, in column 6 in the same line as SEQ ID NO. 34301 is depicted, plastidic is mentioned, or a mitochondrial transit peptide in case in Table I, application no. 3, in column 6 in the same line as SEQ ID NO. 34301 is depicted, mitochondrial is mentioned; which is operable linked, too.

[27596] In another embodiment thereof the expression cassette does not comprise an additional transit peptide in case in Table I, application no. 3, in column 6 in the same line as SEQ ID NO. 34301 is depicted, non-targeted is mentioned.

[27597] In an embodiment the present invention relates to an expresssion cassette comprising a) a promoter, preferably a promoter selected from the group consisting of Big35S, PCUbi, Super and USP, in particular p-PcUBI; and b) the nucleic acid SEQ ID NO. 34602, or a homolog or fragment thereof, or a homolog thereof being depicted in Table I, application no. 3, column 8, in the same line as SEQ ID NO. 34602, preferably the coding region thereof, a homolog or a fragment thereof; which are operable linked.

[27598] In an embodiment thereof the expression cassette comprises in addition c) a nucleic acid molecule encoding a transit peptide, especially a plastidal transit petide in case in Table I, application no. 3, in column 6 in the same line as SEQ ID NO. 34602 is depicted, plastidic is mentioned, or a mitochondrial transit peptide in case in Table I, application no. 3, in column 6 in the same line as SEQ ID NO. 34602 is depicted, mitochondrial is mentioned; which is operable linked, too.

[27599] In another embodiment thereof the expression cassette does not comprise an additional transit peptide in case in Table I, application no. 3, in column 6 in the same line as SEQ ID NO. 34602 is depicted, non-targeted is mentioned.

[27600] In an embodiment the present invention relates to an expresssion cassette comprising a) a promoter, preferably a promoter selected from the group consisting of Big35S, PCUbi, Super and USP, in particular p-Super; and b) the nucleic acid SEQ ID NO. 34889, or a homolog or fragment thereof, or a homolog thereof being depicted in Table I, application no. 3, column 8, in the same line as SEQ ID NO. 34889, preferably the coding region thereof, a homolog or a fragment thereof; which are operable linked.

[27601] In an embodiment thereof the expression cassette comprises in addition c) a nucleic acid molecule encoding a transit peptide, especially a plastidal transit petide in case in Table I, application no. 3, in column 6 in the same line as SEQ ID NO. 34889 is depicted, plastidic is mentioned, or a mitochondrial transit peptide in case in Table I, application no. 3, in column 6 in the same line as SEQ ID NO. 34889 is depicted, mitochondrial is mentioned; which is operable linked, too.

[27602] In another embodiment thereof the expression cassette does not comprise an additional transit peptide in case in Table I, application no. 3, in column 6 in the same line as SEQ ID NO. 34889 is depicted, non-targeted is mentioned.

[27603] In an embodiment the present invention relates to an expresssion cassette comprising a) a promoter, preferably a promoter selected from the group consisting of Big35S, PCUbi, Super and USP, in particular p-USP; and b) the nucleic acid SEQ ID NO. 6818, or a homolog or fragment thereof, or a homolog thereof being depicted in Table I, application no. 3, column 8, in the same line as SEQ ID NO. 6818, preferably the coding region thereof, a homolog or a fragment thereof; which are operable linked.

[27604] In an embodiment thereof the expression cassette comprises in addition c) a nucleic acid molecule encoding a transit peptide, especially a plastidal transit petide in case in Table I, application no. 3, in column 6 in the same line as SEQ ID NO. 6818 is depicted, plastidic is mentioned, or a mitochondrial transit peptide in case in Table I, application no. 3, in column 6 in the same line as SEQ ID NO. 6818 is depicted, mitochondrial is mentioned; which is operable linked, too.

[27605] In another embodiment thereof the expression cassette does not comprise an additional transit peptide in case in Table I, application no. 3, in column 6 in the same line as SEQ ID NO. 6818 is depicted, non-targeted is mentioned.

[27606] In an embodiment the present invention relates to an expresssion cassette comprising a) a promoter, preferably a promoter selected from the group consisting of Big35S, PCUbi, Super and USP, in particular p-USP; and b) the nucleic acid SEQ ID NO. 35482, or a homolog or fragment thereof, or a homolog thereof being depicted in Table I, application no. 3, column 8, in the same line as SEQ ID NO. 35482, preferably the coding region thereof, a homolog or a fragment thereof; which are operable linked.

[27607] In an embodiment thereof the expression cassette comprises in addition c) a nucleic acid molecule encoding a transit peptide, especially a plastidal transit petide in case in Table I, application no. 3, in column 6 in the same line as SEQ ID NO. 35482 is depicted, plastidic is mentioned, or a mitochondrial transit peptide in case in Table I, application no. 3, in column 6 in the same line as SEQ ID NO. 35482 is depicted, mitochondrial is mentioned; which is operable linked, too.

[27608] In another embodiment thereof the expression cassette does not comprise an additional transit peptide in case in Table I, application no. 3, in column 6 in the same line as SEQ ID NO. 35482 is depicted, non-targeted is mentioned.

[27609] In an embodiment the present invention relates to an expresssion cassette comprising a) a promoter, preferably a promoter selected from the group consisting of Big35S, PCUbi, Super and USP, in particular p-Super; and b) the nucleic acid SEQ ID NO. 35482, or a homolog or fragment thereof, or a homolog thereof being depicted in Table I, application no. 3, column 8, in the same line as SEQ ID NO. 35482, preferably the coding region thereof, a homolog or a fragment thereof; which are operable linked.

[27610] In an embodiment thereof the expression cassette comprises in addition c) a nucleic acid molecule encoding a transit peptide, especially a plastidal transit petide in case in Table I, application no. 3, in column 6 in the same line as SEQ ID NO. 35482 is depicted, plastidic is mentioned, or a mitochondrial transit peptide in case in Table I, application no. 3, in column 6 in the same line as SEQ ID NO. 35482 is depicted, mitochondrial is mentioned; which is operable linked, too.

[27611] In another embodiment thereof the expression cassette does not comprise an additional transit peptide in case in Table I, application no. 3, in column 6 in the same line as SEQ ID NO. 35482 is depicted, non-targeted is mentioned.

[27612] In an embodiment the present invention relates to an expresssion cassette comprising a) a promoter, preferably a promoter selected from the group consisting of Big35S, PCUbi, Super and USP, in particular p-Super; and b) the nucleic acid SEQ ID NO. 74986, or a homolog or fragment thereof, or a homolog thereof being depicted in Table I, application no. 3, column 8, in the same line as SEQ ID NO. 74986, preferably the coding region thereof, a homolog or a fragment thereof; which are operable linked.

[27613] In an embodiment thereof the expression cassette comprises in addition c) a nucleic acid molecule encoding a transit peptide, especially a plastidal transit petide in case in Table I, application no. 3, in column 6 in the same line as SEQ ID NO. 74986 is depicted, plastidic is mentioned, or a mitochondrial transit peptide in case in Table I, application no. 3, in column 6 in the same line as SEQ ID NO. 74986 is depicted, mitochondrial is mentioned; which is operable linked, too.

[27614] In another embodiment thereof the expression cassette does not comprise an additional transit peptide in case in Table I, application no. 3, in column 6 in the same line as SEQ ID NO. 74986 is depicted, non-targeted is mentioned.

[27615] In an embodiment the present invention relates to an expresssion cassette comprising a) a promoter, preferably a promoter selected from the group consisting of Big35S, PCUbi, Super and USP, in particular p-Super; and b) the nucleic acid SEQ ID NO. 7081, or a homolog or fragment thereof, or a homolog thereof being depicted in Table I, application no. 3, column 8, in the same line as SEQ ID NO. 7081, preferably the coding region thereof, a homolog or a fragment thereof; which are operable linked.

[27616] In an embodiment thereof the expression cassette comprises in addition c) a nucleic acid molecule encoding a transit peptide, especially a plastidal transit petide in case in Table I, application no. 3, in column 6 in the same line as SEQ ID NO. 7081 is depicted, plastidic is mentioned, or a mitochondrial transit peptide in case in Table I, application no. 3, in column 6 in the same line as SEQ ID NO. 7081 is depicted, mitochondrial is mentioned; which is operable linked, too.

[27617] In another embodiment thereof the expression cassette does not comprise an additional transit peptide in case in Table I, application no. 3, in column 6 in the same line as SEQ ID NO. 7081 is depicted, non-targeted is mentioned.

[27618] In an embodiment the present invention relates to an expresssion cassette comprising a) a promoter, preferably a promoter selected from the group consisting of Big35S, PCUbi, Super and USP, in particular p-Super; and b) the nucleic acid SEQ ID NO. 35590, or a homolog or fragment thereof, or a homolog thereof being depicted in Table I, application no. 3, column 8, in the same line as SEQ ID NO. 35590, preferably the coding region thereof, a homolog or a fragment thereof; which are operable linked.

[27619] In an embodiment thereof the expression cassette comprises in addition c) a nucleic acid molecule encoding a transit peptide, especially a plastidal transit petide in case in Table I, application no. 3, in column 6 in the same line as SEQ ID NO. 35590 is depicted, plastidic is mentioned, or a mitochondrial transit peptide in case in Table I, application no. 3, in column 6 in the same line as SEQ ID NO. 35590 is depicted, mitochondrial is mentioned; which is operable linked, too.

[27620] In another embodiment thereof the expression cassette does not comprise an additional transit peptide in case in Table I, application no. 3, in column 6 in the same line as SEQ ID NO. 35590 is depicted, non-targeted is mentioned.

[27621] In an embodiment the present invention relates to an expresssion cassette comprising a) a promoter, preferably a promoter selected from the group consisting of Big35S, PCUbi, Super and USP, in particular p-USP; and b) the nucleic acid SEQ ID NO. 35733, or a homolog or fragment thereof, or a homolog thereof being depicted in Table I, application no. 3, column 8, in the same line as SEQ ID NO. 35733, preferably the coding region thereof, a homolog or a fragment thereof; which are operable linked.

[27622] In an embodiment thereof the expression cassette comprises in addition c) a nucleic acid molecule encoding a transit peptide, especially a plastidal transit petide in case in Table I, application no. 3, in column 6 in the same line as SEQ ID NO. 35733 is depicted, plastidic is mentioned, or a mitochondrial transit peptide in case in Table I, application no. 3, in column 6 in the same line as SEQ ID NO. 35733 is depicted, mitochondrial is mentioned; which is operable linked, too.

[27623] In another embodiment thereof the expression cassette does not comprise an additional transit peptide in case in Table I, application no. 3, in column 6 in the same line as SEQ ID NO. 35733 is depicted, non-targeted is mentioned.

[27624] In an embodiment the present invention relates to an expresssion cassette comprising a) a promoter, preferably a promoter selected from the group consisting of Big35S, PCUbi, Super and USP, in particular p-USP; and b) the nucleic acid SEQ ID NO. 7269, or a homolog or fragment thereof, or a homolog thereof being depicted in Table I, application no. 3, column 8, in the same line as SEQ ID NO. 7269, preferably the coding region thereof, a homolog or a fragment thereof; which are operable linked.

[27625] In an embodiment thereof the expression cassette comprises in addition c) a nucleic acid molecule encoding a transit peptide, especially a plastidal transit petide in case in Table I, application no. 3, in column 6 in the same line as SEQ ID NO. 7269 is depicted, plastidic is mentioned, or a mitochondrial transit peptide in case in Table I, application no. 3, in column 6 in the same line as SEQ ID NO. 7269 is depicted, mitochondrial is mentioned; which is operable linked, too.

[27626] In another embodiment thereof the expression cassette does not comprise an additional transit peptide in case in Table I, application no. 3, in column 6 in the same line as SEQ ID NO. 7269 is depicted, non-targeted is mentioned.

[27627] In an embodiment the present invention relates to an expresssion cassette comprising a) a promoter, preferably a promoter selected from the group consisting of Big35S, PCUbi, Super and USP, in particular p-Super; and b) the nucleic acid SEQ ID NO. 75195, or a homolog or fragment thereof, or a homolog thereof being depicted in Table I, application no. 3, column 8, in the same line as SEQ ID NO. 75195, preferably the coding region thereof, a homolog or a fragment thereof; which are operable linked.

[27628] In an embodiment thereof the expression cassette comprises in addition c) a nucleic acid molecule encoding a transit peptide, especially a plastidal transit petide in case in Table I, application no. 3, in column 6 in the same line as SEQ ID NO. 75195 is depicted, plastidic is mentioned, or a mitochondrial transit peptide in case in Table I, application no. 3, in column 6 in the same line as SEQ ID NO. 75195 is depicted, mitochondrial is mentioned; which is operable linked, too.

[27629] In another embodiment thereof the expression cassette does not comprise an additional transit peptide in case in Table I, application no. 3, in column 6 in the same line as SEQ ID NO. 75195 is depicted, non-targeted is mentioned.

[27630] In an embodiment the present invention relates to an expresssion cassette comprising a) a promoter, preferably a promoter selected from the group consisting of Big35S, PCUbi, Super and USP, in particular p-Super; and b) the nucleic acid SEQ ID NO. 7333, or a homolog or fragment thereof, or a homolog thereof being depicted in Table I, application no. 3, column 8, in the same line as SEQ ID NO. 7333, preferably the coding region thereof, a homolog or a fragment thereof; which are operable linked.

[27631] In an embodiment thereof the expression cassette comprises in addition c) a nucleic acid molecule encoding a transit peptide, especially a plastidal transit petide in case in Table I, application no. 3, in column 6 in the same line as SEQ ID NO. 7333 is depicted, plastidic is mentioned, or a mitochondrial transit peptide in case in Table I, application no. 3, in column 6 in the same line as SEQ ID NO. 7333 is depicted, mitochondrial is mentioned; which is operable linked, too.

[27632] In another embodiment thereof the expression cassette does not comprise an additional transit peptide in case in Table I, application no. 3, in column 6 in the same line as SEQ ID NO. 7333 is depicted, non-targeted is mentioned.

[27633] In an embodiment the present invention relates to an expresssion cassette comprising a) a promoter, preferably a promoter selected from the group consisting of Big35S, PCUbi, Super and USP, in particular p-Super; and b) the nucleic acid SEQ ID NO. 35875, or a homolog or fragment thereof, or a homolog thereof being depicted in Table I, application no. 3, column 8, in the same line as SEQ ID NO. 35875, preferably the coding region thereof, a homolog or a fragment thereof; which are operable linked.

[27634] In an embodiment thereof the expression cassette comprises in addition c) a nucleic acid molecule encoding a transit peptide, especially a plastidal transit petide in case in Table I, application no. 3, in column 6 in the same line as SEQ ID NO. 35875 is depicted, plastidic is mentioned, or a mitochondrial transit peptide in case in Table I, application no. 3, in column 6 in the same line as SEQ ID NO. 35875 is depicted, mitochondrial is mentioned; which is operable linked, too.

[27635] In another embodiment thereof the expression cassette does not comprise an additional transit peptide in case in Table I, application no. 3, in column 6 in the same line as SEQ ID NO. 35875 is depicted, non-targeted is mentioned.

[27636] In an embodiment the present invention relates to an expresssion cassette comprising a) a promoter, preferably a promoter selected from the group consisting of Big35S, PCUbi, Super and USP, in particular p-Super; and b) the nucleic acid SEQ ID NO. 7686, or a homolog or fragment thereof, or a homolog thereof being depicted in Table I, application no. 3, column 8, in the same line as SEQ ID NO. 7686, preferably the coding region thereof, a homolog or a fragment thereof; which are operable linked.

[27637] In an embodiment thereof the expression cassette comprises in addition c) a nucleic acid molecule encoding a transit peptide, especially a plastidal transit petide in case in Table I, application no. 3, in column 6 in the same line as SEQ ID NO. 7686 is depicted, plastidic is mentioned, or a mitochondrial transit peptide in case in Table I, application no. 3, in column 6 in the same line as SEQ ID NO. 7686 is depicted, mitochondrial is mentioned; which is operable linked, too.

[27638] In another embodiment thereof the expression cassette does not comprise an additional transit peptide in case in Table I, application no. 3, in column 6 in the same line as SEQ ID NO. 7686 is depicted, non-targeted is mentioned.

[27639] In an embodiment the present invention relates to an expresssion cassette comprising a) a promoter, preferably a promoter selected from the group consisting of Big35S, PCUbi, Super and USP, in particular p-Super; and b) the nucleic acid SEQ ID NO. 35936, or a homolog or fragment thereof, or a homolog thereof being depicted in Table I, application no. 3, column 8, in the same line as SEQ ID NO. 35936, preferably the coding region thereof, a homolog or a fragment thereof; which are operable linked.

[27640] In an embodiment thereof the expression cassette comprises in addition c) a nucleic acid molecule encoding a transit peptide, especially a plastidal transit petide in case in Table I, application no. 3, in column 6 in the same line as SEQ ID NO. 35936 is depicted, plastidic is mentioned, or a mitochondrial transit peptide in case in Table I, application no. 3, in column 6 in the same line as SEQ ID NO. 35936 is depicted, mitochondrial is mentioned; which is operable linked, too.

[27641] In another embodiment thereof the expression cassette does not comprise an additional transit peptide in case in Table I, application no. 3, in column 6 in the same line as SEQ ID NO. 35936 is depicted, non-targeted is mentioned.

[27642] In an embodiment the present invention relates to an expresssion cassette comprising a) a promoter, preferably a promoter selected from the group consisting of Big35S, PCUbi, Super and USP, in particular p-Super; and b) the nucleic acid SEQ ID NO. 35967, or a homolog or fragment thereof, or a homolog thereof being depicted in Table I, application no. 3, column 8, in the same line as SEQ ID NO. 35967, preferably the coding region thereof, a homolog or a fragment thereof; which are operable linked.

[27643] In an embodiment thereof the expression cassette comprises in addition c) a nucleic acid molecule encoding a transit peptide, especially a plastidal transit petide in case in Table I, application no. 3, in column 6 in the same line as SEQ ID NO. 35967 is depicted, plastidic is mentioned, or a mitochondrial transit peptide in case in Table I, application no. 3, in column 6 in the same line as SEQ ID NO. 35967 is depicted, mitochondrial is mentioned; which is operable linked, too.

[27644] In another embodiment thereof the expression cassette does not comprise an additional transit peptide in case in Table I, application no. 3, in column 6 in the same line as SEQ ID NO. 35967 is depicted, non-targeted is mentioned.

[27645] In an embodiment the present invention relates to an expresssion cassette comprising a) a promoter, preferably a promoter selected from the group consisting of Big35S, PCUbi, Super and USP, in particular p-Super; and b) the nucleic acid SEQ ID NO. 36114, or a homolog or fragment thereof, or a homolog thereof being depicted in Table I, application no. 3, column 8, in the same line as SEQ ID NO. 36114, preferably the coding region thereof, a homolog or a fragment thereof; which are operable linked.

[27646] In an embodiment thereof the expression cassette comprises in addition c) a nucleic acid molecule encoding a transit peptide, especially a plastidal transit petide in case in Table I, application no. 3, in column 6 in the same line as SEQ ID NO. 36114 is depicted, plastidic is mentioned, or a mitochondrial transit peptide in case in Table I, application no. 3, in column 6 in the same line as SEQ ID NO. 36114 is depicted, mitochondrial is mentioned; which is operable linked, too.

[27647] In another embodiment thereof the expression cassette does not comprise an additional transit peptide in case in Table I, application no. 3, in column 6 in the same line as SEQ ID NO. 36114 is depicted, non-targeted is mentioned.

[27648] In an embodiment the present invention relates to an expresssion cassette comprising a) a promoter, preferably a promoter selected from the group consisting of Big35S, PCUbi, Super and USP, in particular p-USP; and b) the nucleic acid SEQ ID NO. 75286, or a homolog or fragment thereof, or a homolog thereof being depicted in Table I, application no. 3, column 8, in the same line as SEQ ID NO. 75286, preferably the coding region thereof, a homolog or a fragment thereof; which are operable linked.

[27649] In an embodiment thereof the expression cassette comprises in addition c) a nucleic acid molecule encoding a transit peptide, especially a plastidal transit petide in case in Table I, application no. 3, in column 6 in the same line as SEQ ID NO. 75286 is depicted, plastidic is mentioned, or a mitochondrial transit peptide in case in Table I, application no. 3, in column 6 in the same line as SEQ ID NO. 75286 is depicted, mitochondrial is mentioned; which is operable linked, too.

[27650] In another embodiment thereof the expression cassette does not comprise an additional transit peptide in case in Table I, application no. 3, in column 6 in the same line as SEQ ID NO. 75286 is depicted, non-targeted is mentioned.

[27651] In an embodiment the present invention relates to an expresssion cassette comprising a) a promoter, preferably a promoter selected from the group consisting of Big35S, PCUbi, Super and USP, in particular p-Super; and b) the nucleic acid SEQ ID NO. 75807, or a homolog or fragment thereof, or a homolog thereof being depicted in Table I, application no. 3, column 8, in the same line as SEQ ID NO. 75807, preferably the coding region thereof, a homolog or a fragment thereof; which are operable linked.

[27652] In an embodiment thereof the expression cassette comprises in addition c) a nucleic acid molecule encoding a transit peptide, especially a plastidal transit petide in case in Table I, application no. 3, in column 6 in the same line as SEQ ID NO. 75807 is depicted, plastidic is mentioned, or a mitochondrial transit peptide in case in Table I, application no. 3, in column 6 in the same line as SEQ ID NO. 75807 is depicted, mitochondrial is mentioned; which is operable linked, too.

[27653] In another embodiment thereof the expression cassette does not comprise an additional transit peptide in case in Table I, application no. 3, in column 6 in the same line as SEQ ID NO. 75807 is depicted, non-targeted is mentioned.

[27654] In an embodiment the present invention relates to an expresssion cassette comprising a) a promoter, preferably a promoter selected from the group consisting of Big35S, PCUbi, Super and USP, in particular p-Super; and b) the nucleic acid SEQ ID NO. 36299, or a homolog or fragment thereof, or a homolog thereof being depicted in Table I, application no. 3, column 8, in the same line as SEQ ID NO. 36299, preferably the coding region thereof, a homolog or a fragment thereof; which are operable linked.

[27655] In an embodiment thereof the expression cassette comprises in addition c) a nucleic acid molecule encoding a transit peptide, especially a plastidal transit petide in case in Table I, application no. 3, in column 6 in the same line as SEQ ID NO. 36299 is depicted, plastidic is mentioned, or a mitochondrial transit peptide in case in Table I, application no. 3, in column 6 in the same line as SEQ ID NO. 36299 is depicted, mitochondrial is mentioned; which is operable linked, too.

[27656] In another embodiment thereof the expression cassette does not comprise an additional transit peptide in case in Table I, application no. 3, in column 6 in the same line as SEQ ID NO. 36299 is depicted, non-targeted is mentioned.

[27657] In an embodiment the present invention relates to an expresssion cassette comprising a) a promoter, preferably a promoter selected from the group consisting of Big35S, PCUbi, Super and USP, in particular p-Super; and b) the nucleic acid SEQ ID NO. 75873, or a homolog or fragment thereof, or a homolog thereof being depicted in Table I, application no. 3, column 8, in the same line as SEQ ID NO. 75873, preferably the coding region thereof, a homolog or a fragment thereof; which are operable linked.

[27658] In an embodiment thereof the expression cassette comprises in addition c) a nucleic acid molecule encoding a transit peptide, especially a plastidal transit petide in case in Table I, application no. 3, in column 6 in the same line as SEQ ID NO. 75873 is depicted, plastidic is mentioned, or a mitochondrial transit peptide in case in Table I, application no. 3, in column 6 in the same line as SEQ ID NO. 75873 is depicted, mitochondrial is mentioned; which is operable linked, too.

[27659] In another embodiment thereof the expression cassette does not comprise an additional transit peptide in case in Table I, application no. 3, in column 6 in the same line as SEQ ID NO. 75873 is depicted, non-targeted is mentioned.

[27660] In an embodiment the present invention relates to an expresssion cassette comprising a) a promoter, preferably a promoter selected from the group consisting of Big35S, PCUbi, Super and USP, in particular p-Super; and b) the nucleic acid SEQ ID NO. 7917, or a homolog or fragment thereof, or a homolog thereof being depicted in Table I, application no. 3, column 8, in the same line as SEQ ID NO. 7917, preferably the coding region thereof, a homolog or a fragment thereof; which are operable linked.

[27661] In an embodiment thereof the expression cassette comprises in addition c) a nucleic acid molecule encoding a transit peptide, especially a plastidal transit petide in case in Table I, application no. 3, in column 6 in the same line as SEQ ID NO. 7917 is depicted, plastidic is mentioned, or a mitochondrial transit peptide in case in Table I, application no. 3, in column 6 in the same line as SEQ ID NO. 7917 is depicted, mitochondrial is mentioned; which is operable linked, too.

[27662] In another embodiment thereof the expression cassette does not comprise an additional transit peptide in case in Table I, application no. 3, in column 6 in the same line as SEQ ID NO. 7917 is depicted, non-targeted is mentioned.

[27663] In an embodiment the present invention relates to an expresssion cassette comprising a) a promoter, preferably a promoter selected from the group consisting of Big35S, PCUbi, Super and USP, in particular p-Super; and b) the nucleic acid SEQ ID NO. 75915, or a homolog or fragment thereof, or a homolog thereof being depicted in Table I, application no. 3, column 8, in the same line as SEQ ID NO. 75915, preferably the coding region thereof, a homolog or a fragment thereof; which are operable linked.

[27664] In an embodiment thereof the expression cassette comprises in addition c) a nucleic acid molecule encoding a transit peptide, especially a plastidal transit petide in case in Table I, application no. 3, in column 6 in the same line as SEQ ID NO. 75915 is depicted, plastidic is mentioned, or a mitochondrial transit peptide in case in Table I, application no. 3, in column 6 in the same line as SEQ ID NO. 75915 is depicted, mitochondrial is mentioned; which is operable linked, too.

[27665] In another embodiment thereof the expression cassette does not comprise an additional transit peptide in case in Table I, application no. 3, in column 6 in the same line as SEQ ID NO. 75915 is depicted, non-targeted is mentioned.

[27666] In an embodiment the present invention relates to an expresssion cassette comprising a) a promoter, preferably a promoter selected from the group consisting of Big35S, PCUbi, Super and USP, in particular p-Super; and b) the nucleic acid SEQ ID NO. 36670, or a homolog or fragment thereof, or a homolog thereof being depicted in Table I, application no. 3, column 8, in the same line as SEQ ID NO. 36670, preferably the coding region thereof, a homolog or a fragment thereof; which are operable linked.

[27667] In an embodiment thereof the expression cassette comprises in addition c) a nucleic acid molecule encoding a transit peptide, especially a plastidal transit petide in case in Table I, application no. 3, in column 6 in the same line as SEQ ID NO. 36670 is depicted, plastidic is mentioned, or a mitochondrial transit peptide in case in Table I, application no. 3, in column 6 in the same line as SEQ ID NO. 36670 is depicted, mitochondrial is mentioned; which is operable linked, too.

[27668] In another embodiment thereof the expression cassette does not comprise an additional transit peptide in case in Table I, application no. 3, in column 6 in the same line as SEQ ID NO. 36670 is depicted, non-targeted is mentioned.

[27669] In an embodiment the present invention relates to an expresssion cassette comprising a) a promoter, preferably a promoter selected from the group consisting of Big35S, PCUbi, Super and USP, in particular p-USP; and b) the nucleic acid SEQ ID NO. 36809, or a homolog or fragment thereof, or a homolog thereof being depicted in Table I, application no. 3, column 8, in the same line as SEQ ID NO. 36809, preferably the coding region thereof, a homolog or a fragment thereof; which are operable linked.

[27670] In an embodiment thereof the expression cassette comprises in addition c) a nucleic acid molecule encoding a transit peptide, especially a plastidal transit petide in case in Table I, application no. 3, in column 6 in the same line as SEQ ID NO. 36809 is depicted, plastidic is mentioned, or a mitochondrial transit peptide in case in Table I, application no. 3, in column 6 in the same line as SEQ ID NO. 36809 is depicted, mitochondrial is mentioned; which is operable linked, too.

[27671] In another embodiment thereof the expression cassette does not comprise an additional transit peptide in case in Table I, application no. 3, in column 6 in the same line as SEQ ID NO. 36809 is depicted, non-targeted is mentioned.

[27672] In an embodiment the present invention relates to an expresssion cassette comprising a) a promoter, preferably a promoter selected from the group consisting of Big35S, PCUbi, Super and USP, in particular p-Super; and b) the nucleic acid SEQ ID NO. 7941, or a homolog or fragment thereof, or a homolog thereof being depicted in Table I, application no. 3, column 8, in the same line as SEQ ID NO. 7941, preferably the coding region thereof, a homolog or a fragment thereof; which are operable linked.

[27673] In an embodiment thereof the expression cassette comprises in addition c) a nucleic acid molecule encoding a transit peptide, especially a plastidal transit petide in case in Table I, application no. 3, in column 6 in the same line as SEQ ID NO. 7941 is depicted, plastidic is mentioned, or a mitochondrial transit peptide in case in Table I, application no. 3, in column 6 in the same line as SEQ ID NO. 7941 is depicted, mitochondrial is mentioned; which is operable linked, too.

[27674] In another embodiment thereof the expression cassette does not comprise an additional transit peptide in case in Table I, application no. 3, in column 6 in the same line as SEQ ID NO. 7941 is depicted, non-targeted is mentioned.

[27675] In an embodiment the present invention relates to an expresssion cassette comprising a) a promoter, preferably a promoter selected from the group consisting of Big35S, PCUbi, Super and USP, in particular p-Super; and b) the nucleic acid SEQ ID NO. 36880, or a homolog or fragment thereof, or a homolog thereof being depicted in Table I, application no. 3, column 8, in the same line as SEQ ID NO. 36880, preferably the coding region thereof, a homolog or a fragment thereof; which are operable linked.

[27676] In an embodiment thereof the expression cassette comprises in addition c) a nucleic acid molecule encoding a transit peptide, especially a plastidal transit petide in case in Table I, application no. 3, in column 6 in the same line as SEQ ID NO. 36880 is depicted, plastidic is mentioned, or a mitochondrial transit peptide in case in Table I, application no. 3, in column 6 in the same line as SEQ ID NO. 36880 is depicted, mitochondrial is mentioned; which is operable linked, too.

[27677] In another embodiment thereof the expression cassette does not comprise an additional transit peptide in case in Table I, application no. 3, in column 6 in the same line as SEQ ID NO. 36880 is depicted, non-targeted is mentioned.

[27678] In an embodiment the present invention relates to an expresssion cassette comprising a) a promoter, preferably a promoter selected from the group consisting of Big35S, PCUbi, Super and USP, in particular p-Super; and b) the nucleic acid SEQ ID NO. 36907, or a homolog or fragment thereof, or a homolog thereof being depicted in Table I, application no. 3, column 8, in the same line as SEQ ID NO. 36907, preferably the coding region thereof, a homolog or a fragment thereof; which are operable linked.

[27679] In an embodiment thereof the expression cassette comprises in addition c) a nucleic acid molecule encoding a transit peptide, especially a plastidal transit petide in case in Table I, application no. 3, in column 6 in the same line as SEQ ID NO. 36907 is depicted, plastidic is mentioned, or a mitochondrial transit peptide in case in Table I, application no. 3, in column 6 in the same line as SEQ ID NO. 36907 is depicted, mitochondrial is mentioned; which is operable linked, too.

[27680] In another embodiment thereof the expression cassette does not comprise an additional transit peptide in case in Table I, application no. 3, in column 6 in the same line as SEQ ID NO. 36907 is depicted, non-targeted is mentioned.

[27681] In an embodiment the present invention relates to an expresssion cassette comprising a) a promoter, preferably a promoter selected from the group consisting of Big35S, PCUbi, Super and USP, in particular p-Super; and b) the nucleic acid SEQ ID NO. 76032, or a homolog or fragment thereof, or a homolog thereof being depicted in Table I, application no. 3, column 8, in the same line as SEQ ID NO. 76032, preferably the coding region thereof, a homolog or a fragment thereof; which are operable linked.

[27682] In an embodiment thereof the expression cassette comprises in addition c) a nucleic acid molecule encoding a transit peptide, especially a plastidal transit petide in case in Table I, application no. 3, in column 6 in the same line as SEQ ID NO. 76032 is depicted, plastidic is mentioned, or a mitochondrial transit peptide in case in Table I, application no. 3, in column 6 in the same line as SEQ ID NO. 76032 is depicted, mitochondrial is mentioned; which is operable linked, too.

[27683] In another embodiment thereof the expression cassette does not comprise an additional transit peptide in case in Table I, application no. 3, in column 6 in the same line as SEQ ID NO. 76032 is depicted, non-targeted is mentioned.

[27684] In an embodiment the present invention relates to an expresssion cassette comprising a) a promoter, preferably a promoter selected from the group consisting of Big35S, PCUbi, Super and USP, in particular p-Super; and b) the nucleic acid SEQ ID NO. 37390, or a homolog or fragment thereof, or a homolog thereof being depicted in Table I, application no. 3, column 8, in the same line as SEQ ID NO. 37390, preferably the coding region thereof, a homolog or a fragment thereof; which are operable linked.

[27685] In an embodiment thereof the expression cassette comprises in addition c) a nucleic acid molecule encoding a transit peptide, especially a plastidal transit petide in case in Table I, application no. 3, in column 6 in the same line as SEQ ID NO. 37390 is depicted, plastidic is mentioned, or a mitochondrial transit peptide in case in Table I, application no. 3, in column 6 in the same line as SEQ ID NO. 37390 is depicted, mitochondrial is mentioned; which is operable linked, too.

[27686] In another embodiment thereof the expression cassette does not comprise an additional transit peptide in case in Table I, application no. 3, in column 6 in the same line as SEQ ID NO. 37390 is depicted, non-targeted is mentioned.

[27687] In an embodiment the present invention relates to an expresssion cassette comprising a) a promoter, preferably a promoter selected from the group consisting of Big35S, PCUbi, Super and USP, in particular p-Super; and b) the nucleic acid SEQ ID NO. 76068, or a homolog or fragment thereof, or a homolog thereof being depicted in Table I, application no. 3, column 8, in the same line as SEQ ID NO. 76068, preferably the coding region thereof, a homolog or a fragment thereof; which are operable linked.

[27688] In an embodiment thereof the expression cassette comprises in addition c) a nucleic acid molecule encoding a transit peptide, especially a plastidal transit petide in case in Table I, application no. 3, in column 6 in the same line as SEQ ID NO. 76068 is depicted, plastidic is mentioned, or a mitochondrial transit peptide in case in Table I, application no. 3, in column 6 in the same line as SEQ ID NO. 76068 is depicted, mitochondrial is mentioned; which is operable linked, too.

[27689] In another embodiment thereof the expression cassette does not comprise an additional transit peptide in case in Table I, application no. 3, in column 6 in the same line as SEQ ID NO. 76068 is depicted, non-targeted is mentioned.

[27690] In an embodiment the present invention relates to an expresssion cassette comprising a) a promoter, preferably a promoter selected from the group consisting of Big35S, PCUbi, Super and USP, in particular p-Super; and b) the nucleic acid SEQ ID NO. 37394, or a homolog or fragment thereof, or a homolog thereof being depicted in Table I, application no. 3, column 8, in the same line as SEQ ID NO. 37394, preferably the coding region thereof, a homolog or a fragment thereof; which are operable linked.

[27691] In an embodiment thereof the expression cassette comprises in addition c) a nucleic acid molecule encoding a transit peptide, especially a plastidal transit petide in case in Table I, application no. 3, in column 6 in the same line as SEQ ID NO. 37394 is depicted, plastidic is mentioned, or a mitochondrial transit peptide in case in Table I, application no. 3, in column 6 in the same line as SEQ ID NO. 37394 is depicted, mitochondrial is mentioned; which is operable linked, too.

[27692] In another embodiment thereof the expression cassette does not comprise an additional transit peptide in case in Table I, application no. 3, in column 6 in the same line as SEQ ID NO. 37394 is depicted, non-targeted is mentioned.

[27693] In an embodiment the present invention relates to an expresssion cassette comprising a) a promoter, preferably a promoter selected from the group consisting of Big35S, PCUbi, Super and USP, in particular p-Super; and b) the nucleic acid SEQ ID NO. 76087, or a homolog or fragment thereof, or a homolog thereof being depicted in Table I, application no. 3, column 8, in the same line as SEQ ID NO. 76087, preferably the coding region thereof, a homolog or a fragment thereof; which are operable linked.

[27694] In an embodiment thereof the expression cassette comprises in addition c) a nucleic acid molecule encoding a transit peptide, especially a plastidal transit petide in case in Table I, application no. 3, in column 6 in the same line as SEQ ID NO. 76087 is depicted, plastidic is mentioned, or a mitochondrial transit peptide in case in Table I, application no. 3, in column 6 in the same line as SEQ ID NO. 76087 is depicted, mitochondrial is mentioned; which is operable linked, too.

[27695] In another embodiment thereof the expression cassette does not comprise an additional transit peptide in case in Table I, application no. 3, in column 6 in the same line as SEQ ID NO. 76087 is depicted, non-targeted is mentioned.

[27696] In an embodiment the present invention relates to an expresssion cassette comprising a) a promoter, preferably a promoter selected from the group consisting of Big35S, PCUbi, Super and USP, in particular p-Super; and b) the nucleic acid SEQ ID NO. 37400, or a homolog or fragment thereof, or a homolog thereof being depicted in Table I, application no. 3, column 8, in the same line as SEQ ID NO. 37400, preferably the coding region thereof, a homolog or a fragment thereof; which are operable linked.

[27697] In an embodiment thereof the expression cassette comprises in addition c) a nucleic acid molecule encoding a transit peptide, especially a plastidal transit petide in case in Table I, application no. 3, in column 6 in the same line as SEQ ID NO. 37400 is depicted, plastidic is mentioned, or a mitochondrial transit peptide in case in Table I, application no. 3, in column 6 in the same line as SEQ ID NO. 37400 is depicted, mitochondrial is mentioned; which is operable linked, too.

[27698] In another embodiment thereof the expression cassette does not comprise an additional transit peptide in case in Table I, application no. 3, in column 6 in the same line as SEQ ID NO. 37400 is depicted, non-targeted is mentioned.

[27699] In an embodiment the present invention relates to an expresssion cassette comprising a) a promoter, preferably a promoter selected from the group consisting of Big35S, PCUbi, Super and USP, in particular p-Super; and b) the nucleic acid SEQ ID NO. 76138, or a homolog or fragment thereof, or a homolog thereof being depicted in Table I, application no. 3, column 8, in the same line as SEQ ID NO. 76138, preferably the coding region thereof, a homolog or a fragment thereof; which are operable linked.

[27700] In an embodiment thereof the expression cassette comprises in addition c) a nucleic acid molecule encoding a transit peptide, especially a plastidal transit petide in case in Table I, application no. 3, in column 6 in the same line as SEQ ID NO. 76138 is depicted, plastidic is mentioned, or a mitochondrial transit peptide in case in Table I, application no. 3, in column 6 in the same line as SEQ ID NO. 76138 is depicted, mitochondrial is mentioned; which is operable linked, too.

[27701] In another embodiment thereof the expression cassette does not comprise an additional transit peptide in case in Table I, application no. 3, in column 6 in the same line as SEQ ID NO. 76138 is depicted, non-targeted is mentioned.

[27702] In an embodiment the present invention relates to an expresssion cassette comprising a) a promoter, preferably a promoter selected from the group consisting of Big35S, PCUbi, Super and USP, in particular p-Super; and b) the nucleic acid SEQ ID NO. 76151, or a homolog or fragment thereof, or a homolog thereof being depicted in Table I, application no. 3, column 8, in the same line as SEQ ID NO. 76151, preferably the coding region thereof, a homolog or a fragment thereof; which are operable linked.

[27703] In an embodiment thereof the expression cassette comprises in addition c) a nucleic acid molecule encoding a transit peptide, especially a plastidal transit petide in case in Table I, application no. 3, in column 6 in the same line as SEQ ID NO. 76151 is depicted, plastidic is mentioned, or a mitochondrial transit peptide in case in Table I, application no. 3, in column 6 in the same line as SEQ ID NO. 76151 is depicted, mitochondrial is mentioned; which is operable linked, too.

[27704] In another embodiment thereof the expression cassette does not comprise an additional transit peptide in case in Table I, application no. 3, in column 6 in the same line as SEQ ID NO. 76151 is depicted, non-targeted is mentioned.

[27705] In an embodiment the present invention relates to an expresssion cassette comprising a) a promoter, preferably a promoter selected from the group consisting of Big35S, PCUbi, Super and USP, in particular p-Super; and b) the nucleic acid SEQ ID NO. 37483, or a homolog or fragment thereof, or a homolog thereof being depicted in Table I, application no. 3, column 8, in the same line as SEQ ID NO. 37483, preferably the coding region thereof, a homolog or a fragment thereof; which are operable linked.

[27706] In an embodiment thereof the expression cassette comprises in addition c) a nucleic acid molecule encoding a transit peptide, especially a plastidal transit petide in case in Table I, application no. 3, in column 6 in the same line as SEQ ID NO. 37483 is depicted, plastidic is mentioned, or a mitochondrial transit peptide in case in Table I, application no. 3, in column 6 in the same line as SEQ ID NO. 37483 is depicted, mitochondrial is mentioned; which is operable linked, too.

[27707] In another embodiment thereof the expression cassette does not comprise an additional transit peptide in case in Table I, application no. 3, in column 6 in the same line as SEQ ID NO. 37483 is depicted, non-targeted is mentioned.

[27708] In an embodiment the present invention relates to an expresssion cassette comprising a) a promoter, preferably a promoter selected from the group consisting of Big35S, PCUbi, Super and USP, in particular p-Super; and b) the nucleic acid SEQ ID NO. 37503, or a homolog or fragment thereof, or a homolog thereof being depicted in Table I, application no. 3, column 8, in the same line as SEQ ID NO. 37503, preferably the coding region thereof, a homolog or a fragment thereof; which are operable linked.

[27709] In an embodiment thereof the expression cassette comprises in addition c) a nucleic acid molecule encoding a transit peptide, especially a plastidal transit petide in case in Table I, application no. 3, in column 6 in the same line as SEQ ID NO. 37503 is depicted, plastidic is mentioned, or a mitochondrial transit peptide in case in Table I, application no. 3, in column 6 in the same line as SEQ ID NO. 37503 is depicted, mitochondrial is mentioned; which is operable linked, too.

[27710] In another embodiment thereof the expression cassette does not comprise an additional transit peptide in case in Table I, application no. 3, in column 6 in the same line as SEQ ID NO. 37503 is depicted, non-targeted is mentioned.

[27711] In an embodiment the present invention relates to an expresssion cassette comprising a) a promoter, preferably a promoter selected from the group consisting of Big35S, PCUbi, Super and USP, in particular p-USP; and b) the nucleic acid SEQ ID NO. 76157, or a homolog or fragment thereof, or a homolog thereof being depicted in Table I, application no. 3, column 8, in the same line as SEQ ID NO. 76157, preferably the coding region thereof, a homolog or a fragment thereof; which are operable linked.

[27712] In an embodiment thereof the expression cassette comprises in addition c) a nucleic acid molecule encoding a transit peptide, especially a plastidal transit petide in case in Table I, application no. 3, in column 6 in the same line as SEQ ID NO. 76157 is depicted, plastidic is mentioned, or a mitochondrial transit peptide in case in Table I, application no. 3, in column 6 in the same line as SEQ ID NO. 76157 is depicted, mitochondrial is mentioned; which is operable linked, too.

[27713] In another embodiment thereof the expression cassette does not comprise an additional transit peptide in case in Table I, application no. 3, in column 6 in the same line as SEQ ID NO. 76157 is depicted, non-targeted is mentioned.

[27714] In an embodiment the present invention relates to an expresssion cassette comprising a) a promoter, preferably a promoter selected from the group consisting of Big35S, PCUbi, Super and USP, in particular p-Super; and b) the nucleic acid SEQ ID NO. 76240, or a homolog or fragment thereof, or a homolog thereof being depicted in Table I, application no. 3, column 8, in the same line as SEQ ID NO. 76240, preferably the coding region thereof, a homolog or a fragment thereof; which are operable linked.

[27715] In an embodiment thereof the expression cassette comprises in addition c) a nucleic acid molecule encoding a transit peptide, especially a plastidal transit petide in case in Table I, application no. 3, in column 6 in the same line as SEQ ID NO. 76240 is depicted, plastidic is mentioned, or a mitochondrial transit peptide in case in Table I, application no. 3, in column 6 in the same line as SEQ ID NO. 76240 is depicted, mitochondrial is mentioned; which is operable linked, too.

[27716] In another embodiment thereof the expression cassette does not comprise an additional transit peptide in case in Table I, application no. 3, in column 6 in the same line as SEQ ID NO. 76240 is depicted, non-targeted is mentioned.

[27717] In an embodiment the present invention relates to an expresssion cassette comprising a) a promoter, preferably a promoter selected from the group consisting of Big35S, PCUbi, Super and USP, in particular p-Super; and b) the nucleic acid SEQ ID NO. 37573, or a homolog or fragment thereof, or a homolog thereof being depicted in Table I, application no. 3, column 8, in the same line as SEQ ID NO. 37573, preferably the coding region thereof, a homolog or a fragment thereof; which are operable linked.

[27718] In an embodiment thereof the expression cassette comprises in addition c) a nucleic acid molecule encoding a transit peptide, especially a plastidal transit petide in case in Table I, application no. 3, in column 6 in the same line as SEQ ID NO. 37573 is depicted, plastidic is mentioned, or a mitochondrial transit peptide in case in Table I, application no. 3, in column 6 in the same line as SEQ ID NO. 37573 is depicted, mitochondrial is mentioned; which is operable linked, too.

[27719] In another embodiment thereof the expression cassette does not comprise an additional transit peptide in case in Table I, application no. 3, in column 6 in the same line as SEQ ID NO. 37573 is depicted, non-targeted is mentioned.

[27720] In an embodiment the present invention relates to an expresssion cassette comprising a) a promoter, preferably a promoter selected from the group consisting of Big35S, PCUbi, Super and USP, in particular p-USP; and b) the nucleic acid SEQ ID NO. 37658, or a homolog or fragment thereof, or a homolog thereof being depicted in Table I, application no. 3, column 8, in the same line as SEQ ID NO. 37658, preferably the coding region thereof, a homolog or a fragment thereof; which are operable linked.

[27721] In an embodiment thereof the expression cassette comprises in addition c) a nucleic acid molecule encoding a transit peptide, especially a plastidal transit petide in case in Table I, application no. 3, in column 6 in the same line as SEQ ID NO. 37658 is depicted, plastidic is mentioned, or a mitochondrial transit peptide in case in Table I, application no. 3, in column 6 in the same line as SEQ ID NO. 37658 is depicted, mitochondrial is mentioned; which is operable linked, too.

[27722] In another embodiment thereof the expression cassette does not comprise an additional transit peptide in case in Table I, application no. 3, in column 6 in the same line as SEQ ID NO. 37658 is depicted, non-targeted is mentioned.

[27723] In an embodiment the present invention relates to an expresssion cassette comprising a) a promoter, preferably a promoter selected from the group consisting of Big35S, PCUbi, Super and USP, in particular p-Super; and b) the nucleic acid SEQ ID NO. 37807, or a homolog or fragment thereof, or a homolog thereof being depicted in Table I, application no. 3, column 8, in the same line as SEQ ID NO. 37807, preferably the coding region thereof, a homolog or a fragment thereof; which are operable linked.

[27724] In an embodiment thereof the expression cassette comprises in addition c) a nucleic acid molecule encoding a transit peptide, especially a plastidal transit petide in case in Table I, application no. 3, in column 6 in the same line as SEQ ID NO. 37807 is depicted, plastidic is mentioned, or a mitochondrial transit peptide in case in Table I, application no. 3, in column 6 in the same line as SEQ ID NO. 37807 is depicted, mitochondrial is mentioned; which is operable linked, too.

[27725] In another embodiment thereof the expression cassette does not comprise an additional transit peptide in case in Table I, application no. 3, in column 6 in the same line as SEQ ID NO. 37807 is depicted, non-targeted is mentioned.

[27726] In an embodiment the present invention relates to an expresssion cassette comprising a) a promoter, preferably a promoter selected from the group consisting of Big35S, PCUbi, Super and USP, in particular p-Super; and b) the nucleic acid SEQ ID NO. 76867, or a homolog or fragment thereof, or a homolog thereof being depicted in Table I, application no. 3, column 8, in the same line as SEQ ID NO. 76867, preferably the coding region thereof, a homolog or a fragment thereof; which are operable linked.

[27727] In an embodiment thereof the expression cassette comprises in addition c) a nucleic acid molecule encoding a transit peptide, especially a plastidal transit petide in case in Table I, application no. 3, in column 6 in the same line as SEQ ID NO. 76867 is depicted, plastidic is mentioned, or a mitochondrial transit peptide in case in Table I, application no. 3, in column 6 in the same line as SEQ ID NO. 76867 is depicted, mitochondrial is mentioned; which is operable linked, too.

[27728] In another embodiment thereof the expression cassette does not comprise an additional transit peptide in case in Table I, application no. 3, in column 6 in the same line as SEQ ID NO. 76867 is depicted, non-targeted is mentioned.

[27729] In an embodiment the present invention relates to an expresssion cassette comprising a) a promoter, preferably a promoter selected from the group consisting of Big35S, PCUbi, Super and USP, in particular p-Super; and b) the nucleic acid SEQ ID NO. 38226, or a homolog or fragment thereof, or a homolog thereof being depicted in Table I, application no. 3, column 8, in the same line as SEQ ID NO. 38226, preferably the coding region thereof, a homolog or a fragment thereof; which are operable linked.

[27730] In an embodiment thereof the expression cassette comprises in addition c) a nucleic acid molecule encoding a transit peptide, especially a plastidal transit petide in case in Table I, application no. 3, in column 6 in the same line as SEQ ID NO. 38226 is depicted, plastidic is mentioned, or a mitochondrial transit peptide in case in Table I, application no. 3, in column 6 in the same line as SEQ ID NO. 38226 is depicted, mitochondrial is mentioned; which is operable linked, too.

[27731] In another embodiment thereof the expression cassette does not comprise an additional transit peptide in case in Table I, application no. 3, in column 6 in the same line as SEQ ID NO. 38226 is depicted, non-targeted is mentioned.

[27732] In an embodiment the present invention relates to an expresssion cassette comprising a) a promoter, preferably a promoter selected from the group consisting of Big35S, PCUbi, Super and USP, in particular p-Super; and b) the nucleic acid SEQ ID NO. 76890, or a homolog or fragment thereof, or a homolog thereof being depicted in Table I, application no. 3, column 8, in the same line as SEQ ID NO. 76890, preferably the coding region thereof, a homolog or a fragment thereof; which are operable linked.

[27733] In an embodiment thereof the expression cassette comprises in addition c) a nucleic acid molecule encoding a transit peptide, especially a plastidal transit petide in case in Table I, application no. 3, in column 6 in the same line as SEQ ID NO. 76890 is depicted, plastidic is mentioned, or a mitochondrial transit peptide in case in Table I, application no. 3, in column 6 in the same line as SEQ ID NO. 76890 is depicted, mitochondrial is mentioned; which is operable linked, too.

[27734] In another embodiment thereof the expression cassette does not comprise an additional transit peptide in case in Table I, application no. 3, in column 6 in the same line as SEQ ID NO. 76890 is depicted, non-targeted is mentioned.

[27735] In an embodiment the present invention relates to an expresssion cassette comprising a) a promoter, preferably a promoter selected from the group consisting of Big35S, PCUbi, Super and USP, in particular p-Super; and b) the nucleic acid SEQ ID NO. 77768, or a homolog or fragment thereof, or a homolog thereof being depicted in Table I, application no. 3, column 8, in the same line as SEQ ID NO. 77768, preferably the coding region thereof, a homolog or a fragment thereof; which are operable linked.

[27736] In an embodiment thereof the expression cassette comprises in addition c) a nucleic acid molecule encoding a transit peptide, especially a plastidal transit petide in case in Table I, application no. 3, in column 6 in the same line as SEQ ID NO. 77768 is depicted, plastidic is mentioned, or a mitochondrial transit peptide in case in Table I, application no. 3, in column 6 in the same line as SEQ ID NO. 77768 is depicted, mitochondrial is mentioned; which is operable linked, too.

[27737] In another embodiment thereof the expression cassette does not comprise an additional transit peptide in case in Table I, application no. 3, in column 6 in the same line as SEQ ID NO. 77768 is depicted, non-targeted is mentioned.

[27738] In an embodiment the present invention relates to an expresssion cassette comprising a) a promoter, preferably a promoter selected from the group consisting of Big35S, PCUbi, Super and USP, in particular p-Super; and b) the nucleic acid SEQ ID NO. 38266, or a homolog or fragment thereof, or a homolog thereof being depicted in Table I, application no. 3, column 8, in the same line as SEQ ID NO. 38266, preferably the coding region thereof, a homolog or a fragment thereof; which are operable linked.

[27739] In an embodiment thereof the expression cassette comprises in addition c) a nucleic acid molecule encoding a transit peptide, especially a plastidal transit petide in case in Table I, application no. 3, in column 6 in the same line as SEQ ID NO. 38266 is depicted, plastidic is mentioned, or a mitochondrial transit peptide in case in Table I, application no. 3, in column 6 in the same line as SEQ ID NO. 38266 is depicted, mitochondrial is mentioned; which is operable linked, too.

[27740] In another embodiment thereof the expression cassette does not comprise an additional transit peptide in case in Table I, application no. 3, in column 6 in the same line as SEQ ID NO. 38266 is depicted, non-targeted is mentioned.

[27741] In an embodiment the present invention relates to an expresssion cassette comprising a) a promoter, preferably a promoter selected from the group consisting of Big35S, PCUbi, Super and USP, in particular p-Super; and b) the nucleic acid SEQ ID NO. 38289, or a homolog or fragment thereof, or a homolog thereof being depicted in Table I, application no. 3, column 8, in the same line as SEQ ID NO. 38289, preferably the coding region thereof, a homolog or a fragment thereof; which are operable linked.

[27742] In an embodiment thereof the expression cassette comprises in addition c) a nucleic acid molecule encoding a transit peptide, especially a plastidal transit petide in case in Table I, application no. 3, in column 6 in the same line as SEQ ID NO. 38289 is depicted, plastidic is mentioned, or a mitochondrial transit peptide in case in Table I, application no. 3, in column 6 in the same line as SEQ ID NO. 38289 is depicted, mitochondrial is mentioned; which is operable linked, too.

[27743] In another embodiment thereof the expression cassette does not comprise an additional transit peptide in case in Table I, application no. 3, in column 6 in the same line as SEQ ID NO. 38289 is depicted, non-targeted is mentioned.

[27744] In an embodiment the present invention relates to an expresssion cassette comprising a) a promoter, preferably a promoter selected from the group consisting of Big35S, PCUbi, Super and USP, in particular p-Super; and b) the nucleic acid SEQ ID NO. 77774, or a homolog or fragment thereof, or a homolog thereof being depicted in Table I, application no. 3, column 8, in the same line as SEQ ID NO. 77774, preferably the coding region thereof, a homolog or a fragment thereof; which are operable linked.

[27745] In an embodiment thereof the expression cassette comprises in addition c) a nucleic acid molecule encoding a transit peptide, especially a plastidal transit petide in case in Table I, application no. 3, in column 6 in the same line as SEQ ID NO. 77774 is depicted, plastidic is mentioned, or a mitochondrial transit peptide in case in Table I, application no. 3, in column 6 in the same line as SEQ ID NO. 77774 is depicted, mitochondrial is mentioned; which is operable linked, too.

[27746] In another embodiment thereof the expression cassette does not comprise an additional transit peptide in case in Table I, application no. 3, in column 6 in the same line as SEQ ID NO. 77774 is depicted, non-targeted is mentioned.

[27747] In an embodiment the present invention relates to an expresssion cassette comprising a) a promoter, preferably a promoter selected from the group consisting of Big35S, PCUbi, Super and USP, in particular p-USP; and b) the nucleic acid SEQ ID NO. 77774, or a homolog or fragment thereof, or a homolog thereof being depicted in Table I, application no. 3, column 8, in the same line as SEQ ID NO. 77774, preferably the coding region thereof, a homolog or a fragment thereof; which are operable linked.

[27748] In an embodiment thereof the expression cassette comprises in addition c) a nucleic acid molecule encoding a transit peptide, especially a plastidal transit petide in case in Table I, application no. 3, in column 6 in the same line as SEQ ID NO. 77774 is depicted, plastidic is mentioned, or a mitochondrial transit peptide in case in Table I, application no. 3, in column 6 in the same line as SEQ ID NO. 77774 is depicted, mitochondrial is mentioned; which is operable linked, too.

[27749] In another embodiment thereof the expression cassette does not comprise an additional transit peptide in case in Table I, application no. 3, in column 6 in the same line as SEQ ID NO. 77774 is depicted, non-targeted is mentioned.

[27750] In an embodiment the present invention relates to an expresssion cassette comprising a) a promoter, preferably a promoter selected from the group consisting of Big35S, PCUbi, Super and USP, in particular p-Super; and b) the nucleic acid SEQ ID NO. 7947, or a homolog or fragment thereof, or a homolog thereof being depicted in Table I, application no. 3, column 8, in the same line as SEQ ID NO. 7947, preferably the coding region thereof, a homolog or a fragment thereof; which are operable linked.

[27751] In an embodiment thereof the expression cassette comprises in addition c) a nucleic acid molecule encoding a transit peptide, especially a plastidal transit petide in case in Table I, application no. 3, in column 6 in the same line as SEQ ID NO. 7947 is depicted, plastidic is mentioned, or a mitochondrial transit peptide in case in Table I, application no. 3, in column 6 in the same line as SEQ ID NO. 7947 is depicted, mitochondrial is mentioned; which is operable linked, too.

[27752] In another embodiment thereof the expression cassette does not comprise an additional transit peptide in case in Table I, application no. 3, in column 6 in the same line as SEQ ID NO. 7947 is depicted, non-targeted is mentioned.

[27753] In an embodiment the present invention relates to an expresssion cassette comprising a) a promoter, preferably a promoter selected from the group consisting of Big35S, PCUbi, Super and USP, in particular p-Super; and b) the nucleic acid SEQ ID NO. 78138, or a homolog or fragment thereof, or a homolog thereof being depicted in Table I, application no. 3, column 8, in the same line as SEQ ID NO. 78138, preferably the coding region thereof, a homolog or a fragment thereof; which are operable linked.

[27754] In an embodiment thereof the expression cassette comprises in addition c) a nucleic acid molecule encoding a transit peptide, especially a plastidal transit petide in case in Table I, application no. 3, in column 6 in the same line as SEQ ID NO. 78138 is depicted, plastidic is mentioned, or a mitochondrial transit peptide in case in Table I, application no. 3, in column 6 in the same line as SEQ ID NO. 78138 is depicted, mitochondrial is mentioned; which is operable linked, too.

[27755] In another embodiment thereof the expression cassette does not comprise an additional transit peptide in case in Table I, application no. 3, in column 6 in the same line as SEQ ID NO. 78138 is depicted, non-targeted is mentioned.

[27756] In an embodiment the present invention relates to an expresssion cassette comprising a) a promoter, preferably a promoter selected from the group consisting of Big35S, PCUbi, Super and USP, in particular p-Super; and b) the nucleic acid SEQ ID NO. 78154, or a homolog or fragment thereof, or a homolog thereof being depicted in Table I, application no. 3, column 8, in the same line as SEQ ID NO. 78154, preferably the coding region thereof, a homolog or a fragment thereof; which are operable linked.

[27757] In an embodiment thereof the expression cassette comprises in addition c) a nucleic acid molecule encoding a transit peptide, especially a plastidal transit petide in case in Table I, application no. 3, in column 6 in the same line as SEQ ID NO. 78154 is depicted, plastidic is mentioned, or a mitochondrial transit peptide in case in Table I, application no. 3, in column 6 in the same line as SEQ ID NO. 78154 is depicted, mitochondrial is mentioned; which is operable linked, too.

[27758] In another embodiment thereof the expression cassette does not comprise an additional transit peptide in case in Table I, application no. 3, in column 6 in the same line as SEQ ID NO. 78154 is depicted, non-targeted is mentioned.

[27759] In an embodiment the present invention relates to an expresssion cassette comprising a) a promoter, preferably a promoter selected from the group consisting of Big35S, PCUbi, Super and USP, in particular p-Super; and b) the nucleic acid SEQ ID NO. 38300, or a homolog or fragment thereof, or a homolog thereof being depicted in Table I, application no. 3, column 8, in the same line as SEQ ID NO. 38300, preferably the coding region thereof, a homolog or a fragment thereof; which are operable linked.

[27760] In an embodiment thereof the expression cassette comprises in addition c) a nucleic acid molecule encoding a transit peptide, especially a plastidal transit petide in case in Table I, application no. 3, in column 6 in the same line as SEQ ID NO. 38300 is depicted, plastidic is mentioned, or a mitochondrial transit peptide in case in Table I, application no. 3, in column 6 in the same line as SEQ ID NO. 38300 is depicted, mitochondrial is mentioned; which is operable linked, too.

[27761] In another embodiment thereof the expression cassette does not comprise an additional transit peptide in case in Table I, application no. 3, in column 6 in the same line as SEQ ID NO. 38300 is depicted, non-targeted is mentioned.

[27762] In an embodiment the present invention relates to an expresssion cassette comprising a) a promoter, preferably a promoter selected from the group consisting of Big35S, PCUbi, Super and USP, in particular p-Super; and b) the nucleic acid SEQ ID NO. 78265, or a homolog or fragment thereof, or a homolog thereof being depicted in Table I, application no. 3, column 8, in the same line as SEQ ID NO. 78265, preferably the coding region thereof, a homolog or a fragment thereof; which are operable linked.

[27763] In an embodiment thereof the expression cassette comprises in addition c) a nucleic acid molecule encoding a transit peptide, especially a plastidal transit petide in case in Table I, application no. 3, in column 6 in the same line as SEQ ID NO. 78265 is depicted, plastidic is mentioned, or a mitochondrial transit peptide in case in Table I, application no. 3, in column 6 in the same line as SEQ ID NO. 78265 is depicted, mitochondrial is mentioned; which is operable linked, too.

[27764] In another embodiment thereof the expression cassette does not comprise an additional transit peptide in case in Table I, application no. 3, in column 6 in the same line as SEQ ID NO. 78265 is depicted, non-targeted is mentioned.

[27765] In an embodiment the present invention relates to an expresssion cassette comprising a) a promoter, preferably a promoter selected from the group consisting of Big35S, PCUbi, Super and USP, in particular p-Super; and b) the nucleic acid SEQ ID NO. 78753, or a homolog or fragment thereof, or a homolog thereof being depicted in Table I, application no. 3, column 8, in the same line as SEQ ID NO. 78753, preferably the coding region thereof, a homolog or a fragment thereof; which are operable linked.

[27766] In an embodiment thereof the expression cassette comprises in addition c) a nucleic acid molecule encoding a transit peptide, especially a plastidal transit petide in case in Table I, application no. 3, in column 6 in the same line as SEQ ID NO. 78753 is depicted, plastidic is mentioned, or a mitochondrial transit peptide in case in Table I, application no. 3, in column 6 in the same line as SEQ ID NO. 78753 is depicted, mitochondrial is mentioned; which is operable linked, too.

[27767] In another embodiment thereof the expression cassette does not comprise an additional transit peptide in case in Table I, application no. 3, in column 6 in the same line as SEQ ID NO. 78753 is depicted, non-targeted is mentioned.

[27768] In an embodiment the present invention relates to an expresssion cassette comprising a) a promoter, preferably a promoter selected from the group consisting of Big35S, PCUbi, Super and USP, in particular p-Super; and b) the nucleic acid SEQ ID NO. 78771, or a homolog or fragment thereof, or a homolog thereof being depicted in Table I, application no. 3, column 8, in the same line as SEQ ID NO. 78771, preferably the coding region thereof, a homolog or a fragment thereof; which are operable linked.

[27769] In an embodiment thereof the expression cassette comprises in addition c) a nucleic acid molecule encoding a transit peptide, especially a plastidal transit petide in case in Table I, application no. 3, in column 6 in the same line as SEQ ID NO. 78771 is depicted, plastidic is mentioned, or a mitochondrial transit peptide in case in Table I, application no. 3, in column 6 in the same line as SEQ ID NO. 78771 is depicted, mitochondrial is mentioned; which is operable linked, too.

[27770] In another embodiment thereof the expression cassette does not comprise an additional transit peptide in case in Table I, application no. 3, in column 6 in the same line as SEQ ID NO. 78771 is depicted, non-targeted is mentioned.

[27771] In an embodiment the present invention relates to an expresssion cassette comprising a) a promoter, preferably a promoter selected from the group consisting of Big35S, PCUbi, Super and USP, in particular p-USP; and b) the nucleic acid SEQ ID NO. 78779, or a homolog or fragment thereof, or a homolog thereof being depicted in Table I, application no. 3, column 8, in the same line as SEQ ID NO. 78779, preferably the coding region thereof, a homolog or a fragment thereof; which are operable linked.

[27772] In an embodiment thereof the expression cassette comprises in addition c) a nucleic acid molecule encoding a transit peptide, especially a plastidal transit petide in case in Table I, application no. 3, in column 6 in the same line as SEQ ID NO. 78779 is depicted, plastidic is mentioned, or a mitochondrial transit peptide in case in Table I, application no. 3, in column 6 in the same line as SEQ ID NO. 78779 is depicted, mitochondrial is mentioned; which is operable linked, too.

[27773] In another embodiment thereof the expression cassette does not comprise an additional transit peptide in case in Table I, application no. 3, in column 6 in the same line as SEQ ID NO. 78779 is depicted, non-targeted is mentioned.

[27774] In an embodiment the present invention relates to an expresssion cassette comprising a) a promoter, preferably a promoter selected from the group consisting of Big35S, PCUbi, Super and USP, in particular p-Super; and b) the nucleic acid SEQ ID NO. 78852, or a homolog or fragment thereof, or a homolog thereof being depicted in Table I, application no. 3, column 8, in the same line as SEQ ID NO. 78852, preferably the coding region thereof, a homolog or a fragment thereof; which are operable linked.

[27775] In an embodiment thereof the expression cassette comprises in addition c) a nucleic acid molecule encoding a transit peptide, especially a plastidal transit petide in case in Table I, application no. 3, in column 6 in the same line as SEQ ID NO. 78852 is depicted, plastidic is mentioned, or a mitochondrial transit peptide in case in Table I, application no. 3, in column 6 in the same line as SEQ ID NO. 78852 is depicted, mitochondrial is mentioned; which is operable linked, too.

[27776] In another embodiment thereof the expression cassette does not comprise an additional transit peptide in case in Table I, application no. 3, in column 6 in the same line as SEQ ID NO. 78852 is depicted, non-targeted is mentioned.

[27777] In an embodiment the present invention relates to an expresssion cassette comprising a) a promoter, preferably a promoter selected from the group consisting of Big35S, PCUbi, Super and USP, in particular p-Super; and b) the nucleic acid SEQ ID NO. 78883, or a homolog or fragment thereof, or a homolog thereof being depicted in Table I, application no. 3, column 8, in the same line as SEQ ID NO. 78883, preferably the coding region thereof, a homolog or a fragment thereof; which are operable linked.

[27778] In an embodiment thereof the expression cassette comprises in addition c) a nucleic acid molecule encoding a transit peptide, especially a plastidal transit petide in case in Table I, application no. 3, in column 6 in the same line as SEQ ID NO. 78883 is depicted, plastidic is mentioned, or a mitochondrial transit peptide in case in Table I, application no. 3, in column 6 in the same line as SEQ ID NO. 78883 is depicted, mitochondrial is mentioned; which is operable linked, too.

[27779] In another embodiment thereof the expression cassette does not comprise an additional transit peptide in case in Table I, application no. 3, in column 6 in the same line as SEQ ID NO. 78883 is depicted, non-targeted is mentioned.

[27780] In an embodiment the present invention relates to an expresssion cassette comprising a) a promoter, preferably a promoter selected from the group consisting of Big35S, PCUbi, Super and USP, in particular p-Super; and b) the nucleic acid SEQ ID NO. 78953, or a homolog or fragment thereof, or a homolog thereof being depicted in Table I, application no. 3, column 8, in the same line as SEQ ID NO. 78953, preferably the coding region thereof, a homolog or a fragment thereof; which are operable linked.

[27781] In an embodiment thereof the expression cassette comprises in addition c) a nucleic acid molecule encoding a transit peptide, especially a plastidal transit petide in case in Table I, application no. 3, in column 6 in the same line as SEQ ID NO. 78953 is depicted, plastidic is mentioned, or a mitochondrial transit peptide in case in Table I, application no. 3, in column 6 in the same line as SEQ ID NO. 78953 is depicted, mitochondrial is mentioned; which is operable linked, too.

[27782] In another embodiment thereof the expression cassette does not comprise an additional transit peptide in case in Table I, application no. 3, in column 6 in the same line as SEQ ID NO. 78953 is depicted, non-targeted is mentioned.

[27783] In an embodiment the present invention relates to an expresssion cassette comprising a) a promoter, preferably a promoter selected from the group consisting of Big35S, PCUbi, Super and USP, in particular p-Super; and b) the nucleic acid SEQ ID NO. 8316, or a homolog or fragment thereof, or a homolog thereof being depicted in Table I, application no. 3, column 8, in the same line as SEQ ID NO. 8316, preferably the coding region thereof, a homolog or a fragment thereof; which are operable linked.

[27784] In an embodiment thereof the expression cassette comprises in addition c) a nucleic acid molecule encoding a transit peptide, especially a plastidal transit petide in case in Table I, application no. 3, in column 6 in the same line as SEQ ID NO. 8316 is depicted, plastidic is mentioned, or a mitochondrial transit peptide in case in Table I, application no. 3, in column 6 in the same line as SEQ ID NO. 8316 is depicted, mitochondrial is mentioned; which is operable linked, too.

[27785] In another embodiment thereof the expression cassette does not comprise an additional transit peptide in case in Table I, application no. 3, in column 6 in the same line as SEQ ID NO. 8316 is depicted, non-targeted is mentioned.

[27786] In an embodiment the present invention relates to an expresssion cassette comprising a) a promoter, preferably a promoter selected from the group consisting of Big35S, PCUbi, Super and USP, in particular p-Super; and b) the nucleic acid SEQ ID NO. 38573, or a homolog or fragment thereof, or a homolog thereof being depicted in Table I, application no. 3, column 8, in the same line as SEQ ID NO. 38573, preferably the coding region thereof, a homolog or a fragment thereof; which are operable linked.

[27787] In an embodiment thereof the expression cassette comprises in addition c) a nucleic acid molecule encoding a transit peptide, especially a plastidal transit petide in case in Table I, application no. 3, in column 6 in the same line as SEQ ID NO. 38573 is depicted, plastidic is mentioned, or a mitochondrial transit peptide in case in Table I, application no. 3, in column 6 in the same line as SEQ ID NO. 38573 is depicted, mitochondrial is mentioned; which is operable linked, too.

[27788] In another embodiment thereof the expression cassette does not comprise an additional transit peptide in case in Table I, application no. 3, in column 6 in the same line as SEQ ID NO. 38573 is depicted, non-targeted is mentioned.

[27789] In an embodiment the present invention relates to an expresssion cassette comprising a) a promoter, preferably a promoter selected from the group consisting of Big35S, PCUbi, Super and USP, in particular p-USP; and b) the nucleic acid SEQ ID NO. 8363, or a homolog or fragment thereof, or a homolog thereof being depicted in Table I, application no. 3, column 8, in the same line as SEQ ID NO. 8363, preferably the coding region thereof, a homolog or a fragment thereof; which are operable linked.

[27790] In an embodiment thereof the expression cassette comprises in addition c) a nucleic acid molecule encoding a transit peptide, especially a plastidal transit petide in case in Table I, application no. 3, in column 6 in the same line as SEQ ID NO. 8363 is depicted, plastidic is mentioned, or a mitochondrial transit peptide in case in Table I, application no. 3, in column 6 in the same line as SEQ ID NO. 8363 is depicted, mitochondrial is mentioned; which is operable linked, too.

[27791] In another embodiment thereof the expression cassette does not comprise an additional transit peptide in case in Table I, application no. 3, in column 6 in the same line as SEQ ID NO. 8363 is depicted, non-targeted is mentioned.

[27792] In an embodiment the present invention relates to an expresssion cassette comprising a) a promoter, preferably a promoter selected from the group consisting of Big35S, PCUbi, Super and USP, in particular p-Super; and b) the nucleic acid SEQ ID NO. 78970, or a homolog or fragment thereof, or a homolog thereof being depicted in Table I, application no. 3, column 8, in the same line as SEQ ID NO. 78970, preferably the coding region thereof, a homolog or a fragment thereof; which are operable linked.

[27793] In an embodiment thereof the expression cassette comprises in addition c) a nucleic acid molecule encoding a transit peptide, especially a plastidal transit petide in case in Table I, application no. 3, in column 6 in the same line as SEQ ID NO. 78970 is depicted, plastidic is mentioned, or a mitochondrial transit peptide in case in Table I, application no. 3, in column 6 in the same line as SEQ ID NO. 78970 is depicted, mitochondrial is mentioned; which is operable linked, too.

[27794] In another embodiment thereof the expression cassette does not comprise an additional transit peptide in case in Table I, application no. 3, in column 6 in the same line as SEQ ID NO. 78970 is depicted, non-targeted is mentioned.

[27795] In an embodiment the present invention relates to an expresssion cassette comprising a) a promoter, preferably a promoter selected from the group consisting of Big35S, PCUbi, Super and USP, in particular p-Super; and b) the nucleic acid SEQ ID NO. 79056, or a homolog or fragment thereof, or a homolog thereof being depicted in Table I, application no. 3, column 8, in the same line as SEQ ID NO. 79056, preferably the coding region thereof, a homolog or a fragment thereof; which are operable linked.

[27796] In an embodiment thereof the expression cassette comprises in addition c) a nucleic acid molecule encoding a transit peptide, especially a plastidal transit petide in case in Table I, application no. 3, in column 6 in the same line as SEQ ID NO. 79056 is depicted, plastidic is mentioned, or a mitochondrial transit peptide in case in Table I, application no. 3, in column 6 in the same line as SEQ ID NO. 79056 is depicted, mitochondrial is mentioned; which is operable linked, too.

[27797] In another embodiment thereof the expression cassette does not comprise an additional transit peptide in case in Table I, application no. 3, in column 6 in the same line as SEQ ID NO. 79056 is depicted, non-targeted is mentioned.

[27798] In an embodiment the present invention relates to an expresssion cassette comprising a) a promoter, preferably a promoter selected from the group consisting of Big35S, PCUbi, Super and USP, in particular p-Super; and b) the nucleic acid SEQ ID NO. 38767, or a homolog or fragment thereof, or a homolog thereof being depicted in Table I, application no. 3, column 8, in the same line as SEQ ID NO. 38767, preferably the coding region thereof, a homolog or a fragment thereof; which are operable linked.

[27799] In an embodiment thereof the expression cassette comprises in addition c) a nucleic acid molecule encoding a transit peptide, especially a plastidal transit petide in case in Table I, application no. 3, in column 6 in the same line as SEQ ID NO. 38767 is depicted, plastidic is mentioned, or a mitochondrial transit peptide in case in Table I, application no. 3, in column 6 in the same line as SEQ ID NO. 38767 is depicted, mitochondrial is mentioned; which is operable linked, too.

[27800] In another embodiment thereof the expression cassette does not comprise an additional transit peptide in case in Table I, application no. 3, in column 6 in the same line as SEQ ID NO. 38767 is depicted, non-targeted is mentioned.

[27801] In an embodiment the present invention relates to an expresssion cassette comprising a) a promoter, preferably a promoter selected from the group consisting of Big35S, PCUbi, Super and USP, in particular p-Super; and b) the nucleic acid SEQ ID NO. 79181, or a homolog or fragment thereof, or a homolog thereof being depicted in Table I, application no. 3, column 8, in the same line as SEQ ID NO. 79181, preferably the coding region thereof, a homolog or a fragment thereof; which are operable linked.

[27802] In an embodiment thereof the expression cassette comprises in addition c) a nucleic acid molecule encoding a transit peptide, especially a plastidal transit petide in case in Table I, application no. 3, in column 6 in the same line as SEQ ID NO. 79181 is depicted, plastidic is mentioned, or a mitochondrial transit peptide in case in Table I, application no. 3, in column 6 in the same line as SEQ ID NO. 79181 is depicted, mitochondrial is mentioned; which is operable linked, too.

[27803] In another embodiment thereof the expression cassette does not comprise an additional transit peptide in case in Table I, application no. 3, in column 6 in the same line as SEQ ID NO. 79181 is depicted, non-targeted is mentioned.

[27804] In an embodiment the present invention relates to an expresssion cassette comprising a) a promoter, preferably a promoter selected from the group consisting of Big35S, PCUbi, Super and USP, in particular p-Super; and b) the nucleic acid SEQ ID NO. 38899, or a homolog or fragment thereof, or a homolog thereof being depicted in Table I, application no. 3, column 8, in the same line as SEQ ID NO. 38899, preferably the coding region thereof, a homolog or a fragment thereof; which are operable linked.

[27805] In an embodiment thereof the expression cassette comprises in addition c) a nucleic acid molecule encoding a transit peptide, especially a plastidal transit petide in case in Table I, application no. 3, in column 6 in the same line as SEQ ID NO. 38899 is depicted, plastidic is mentioned, or a mitochondrial transit peptide in case in Table I, application no. 3, in column 6 in the same line as SEQ ID NO. 38899 is depicted, mitochondrial is mentioned; which is operable linked, too.

[27806] In another embodiment thereof the expression cassette does not comprise an additional transit peptide in case in Table I, application no. 3, in column 6 in the same line as SEQ ID NO. 38899 is depicted, non-targeted is mentioned.

[27807] In an embodiment the present invention relates to an expresssion cassette comprising a) a promoter, preferably a promoter selected from the group consisting of Big35S, PCUbi, Super and USP, in particular p-Super; and b) the nucleic acid SEQ ID NO. 79217, or a homolog or fragment thereof, or a homolog thereof being depicted in Table I, application no. 3, column 8, in the same line as SEQ ID NO. 79217, preferably the coding region thereof, a homolog or a fragment thereof; which are operable linked.

[27808] In an embodiment thereof the expression cassette comprises in addition c) a nucleic acid molecule encoding a transit peptide, especially a plastidal transit petide in case in Table I, application no. 3, in column 6 in the same line as SEQ ID NO. 79217 is depicted, plastidic is mentioned, or a mitochondrial transit peptide in case in Table I, application no. 3, in column 6 in the same line as SEQ ID NO. 79217 is depicted, mitochondrial is mentioned; which is operable linked, too.

[27809] In another embodiment thereof the expression cassette does not comprise an additional transit peptide in case in Table I, application no. 3, in column 6 in the same line as SEQ ID NO. 79217 is depicted, non-targeted is mentioned.

[27810] In an embodiment the present invention relates to an expresssion cassette comprising a) a promoter, preferably a promoter selected from the group consisting of Big35S, PCUbi, Super and USP, in particular p-Super; and b) the nucleic acid SEQ ID NO. 8920, or a homolog or fragment thereof, or a homolog thereof being depicted in Table I, application no. 3, column 8, in the same line as SEQ ID NO. 8920, preferably the coding region thereof, a homolog or a fragment thereof; which are operable linked.

[27811] In an embodiment thereof the expression cassette comprises in addition c) a nucleic acid molecule encoding a transit peptide, especially a plastidal transit petide in case in Table I, application no. 3, in column 6 in the same line as SEQ ID NO. 8920 is depicted, plastidic is mentioned, or a mitochondrial transit peptide in case in Table I, application no. 3, in column 6 in the same line as SEQ ID NO. 8920 is depicted, mitochondrial is mentioned; which is operable linked, too.

[27812] In another embodiment thereof the expression cassette does not comprise an additional transit peptide in case in Table I, application no. 3, in column 6 in the same line as SEQ ID NO. 8920 is depicted, non-targeted is mentioned.

[27813] In an embodiment the present invention relates to an expresssion cassette comprising a) a promoter, preferably a promoter selected from the group consisting of Big35S, PCUbi, Super and USP, in particular p-Super; and b) the nucleic acid SEQ ID NO. 38947, or a homolog or fragment thereof, or a homolog thereof being depicted in Table I, application no. 3, column 8, in the same line as SEQ ID NO. 38947, preferably the coding region thereof, a homolog or a fragment thereof; which are operable linked.

[27814] In an embodiment thereof the expression cassette comprises in addition c) a nucleic acid molecule encoding a transit peptide, especially a plastidal transit petide in case in Table I, application no. 3, in column 6 in the same line as SEQ ID NO. 38947 is depicted, plastidic is mentioned, or a mitochondrial transit peptide in case in Table I, application no. 3, in column 6 in the same line as SEQ ID NO. 38947 is depicted, mitochondrial is mentioned; which is operable linked, too.

[27815] In another embodiment thereof the expression cassette does not comprise an additional transit peptide in case in Table I, application no. 3, in column 6 in the same line as SEQ ID NO. 38947 is depicted, non-targeted is mentioned.

[27816] In an embodiment the present invention relates to an expresssion cassette comprising a) a promoter, preferably a promoter selected from the group consisting of Big35S, PCUbi, Super and USP, in particular p-Super; and b) the nucleic acid SEQ ID NO. 8937, or a homolog or fragment thereof, or a homolog thereof being depicted in Table I, application no. 3, column 8, in the same line as SEQ ID NO. 8937, preferably the coding region thereof, a homolog or a fragment thereof; which are operable linked.

[27817] In an embodiment thereof the expression cassette comprises in addition c) a nucleic acid molecule encoding a transit peptide, especially a plastidal transit petide in case in Table I, application no. 3, in column 6 in the same line as SEQ ID NO. 8937 is depicted, plastidic is mentioned, or a mitochondrial transit peptide in case in Table I, application no. 3, in column 6 in the same line as SEQ ID NO. 8937 is depicted, mitochondrial is mentioned; which is operable linked, too.

[27818] In another embodiment thereof the expression cassette does not comprise an additional transit peptide in case in Table I, application no. 3, in column 6 in the same line as SEQ ID NO. 8937 is depicted, non-targeted is mentioned.

[27819] In an embodiment the present invention relates to an expresssion cassette comprising a) a promoter, preferably a promoter selected from the group consisting of Big35S, PCUbi, Super and USP, in particular p-Super; and b) the nucleic acid SEQ ID NO. 39002, or a homolog or fragment thereof, or a homolog thereof being depicted in Table I, application no. 3, column 8, in the same line as SEQ ID NO. 39002, preferably the coding region thereof, a homolog or a fragment thereof; which are operable linked.

[27820] In an embodiment thereof the expression cassette comprises in addition c) a nucleic acid molecule encoding a transit peptide, especially a plastidal transit petide in case in Table I, application no. 3, in column 6 in the same line as SEQ ID NO. 39002 is depicted, plastidic is mentioned, or a mitochondrial transit peptide in case in Table I, application no. 3, in column 6 in the same line as SEQ ID NO. 39002 is depicted, mitochondrial is mentioned; which is operable linked, too.

[27821] In another embodiment thereof the expression cassette does not comprise an additional transit peptide in case in Table I, application no. 3, in column 6 in the same line as SEQ ID NO. 39002 is depicted, non-targeted is mentioned.

[27822] In an embodiment the present invention relates to an expresssion cassette comprising a) a promoter, preferably a promoter selected from the group consisting of Big35S, PCUbi, Super and USP, in particular p-Super; and b) the nucleic acid SEQ ID NO. 39040, or a homolog or fragment thereof, or a homolog thereof being depicted in Table I, application no. 3, column 8, in the same line as SEQ ID NO. 39040, preferably the coding region thereof, a homolog or a fragment thereof; which are operable linked.

[27823] In an embodiment thereof the expression cassette comprises in addition c) a nucleic acid molecule encoding a transit peptide, especially a plastidal transit petide in case in Table I, application no. 3, in column 6 in the same line as SEQ ID NO. 39040 is depicted, plastidic is mentioned, or a mitochondrial transit peptide in case in Table I, application no. 3, in column 6 in the same line as SEQ ID NO. 39040 is depicted, mitochondrial is mentioned; which is operable linked, too.

[27824] In another embodiment thereof the expression cassette does not comprise an additional transit peptide in case in Table I, application no. 3, in column 6 in the same line as SEQ ID NO. 39040 is depicted, non-targeted is mentioned.

[27825] In an embodiment the present invention relates to an expresssion cassette comprising a) a promoter, preferably a promoter selected from the group consisting of Big35S, PCUbi, Super and USP, in particular p-USP; and b) the nucleic acid SEQ ID NO. 79279, or a homolog or fragment thereof, or a homolog thereof being depicted in Table I, application no. 3, column 8, in the same line as SEQ ID NO. 79279, preferably the coding region thereof, a homolog or a fragment thereof; which are operable linked.

[27826] In an embodiment thereof the expression cassette comprises in addition c) a nucleic acid molecule encoding a transit peptide, especially a plastidal transit petide in case in Table I, application no. 3, in column 6 in the same line as SEQ ID NO. 79279 is depicted, plastidic is mentioned, or a mitochondrial transit peptide in case in Table I, application no. 3, in column 6 in the same line as SEQ ID NO. 79279 is depicted, mitochondrial is mentioned; which is operable linked, too.

[27827] In another embodiment thereof the expression cassette does not comprise an additional transit peptide in case in Table I, application no. 3, in column 6 in the same line as SEQ ID NO. 79279 is depicted, non-targeted is mentioned.

[27828] In an embodiment the present invention relates to an expresssion cassette comprising a) a promoter, preferably a promoter selected from the group consisting of Big35S, PCUbi, Super and USP, in particular p-USP; and b) the nucleic acid SEQ ID NO. 39120, or a homolog or fragment thereof, or a homolog thereof being depicted in Table I, application no. 3, column 8, in the same line as SEQ ID NO. 39120, preferably the coding region thereof, a homolog or a fragment thereof; which are operable linked.

[27829] In an embodiment thereof the expression cassette comprises in addition c) a nucleic acid molecule encoding a transit peptide, especially a plastidal transit petide in case in Table I, application no. 3, in column 6 in the same line as SEQ ID NO. 39120 is depicted, plastidic is mentioned, or a mitochondrial transit peptide in case in Table I, application no. 3, in column 6 in the same line as SEQ ID NO. 39120 is depicted, mitochondrial is mentioned; which is operable linked, too.

[27830] In another embodiment thereof the expression cassette does not comprise an additional transit peptide in case in Table I, application no. 3, in column 6 in the same line as SEQ ID NO. 39120 is depicted, non-targeted is mentioned.

[27831] In an embodiment the present invention relates to an expresssion cassette comprising a) a promoter, preferably a promoter selected from the group consisting of Big35S, PCUbi, Super and USP, in particular p-Super; and b) the nucleic acid SEQ ID NO. 39219, or a homolog or fragment thereof, or a homolog thereof being depicted in Table I, application no. 3, column 8, in the same line as SEQ ID NO. 39219, preferably the coding region thereof, a homolog or a fragment thereof; which are operable linked.

[27832] In an embodiment thereof the expression cassette comprises in addition c) a nucleic acid molecule encoding a transit peptide, especially a plastidal transit petide in case in Table I, application no. 3, in column 6 in the same line as SEQ ID NO. 39219 is depicted, plastidic is mentioned, or a mitochondrial transit peptide in case in Table I, application no. 3, in column 6 in the same line as SEQ ID NO. 39219 is depicted, mitochondrial is mentioned; which is operable linked, too.

[27833] In another embodiment thereof the expression cassette does not comprise an additional transit peptide in case in Table I, application no. 3, in column 6 in the same line as SEQ ID NO. 39219 is depicted, non-targeted is mentioned.

[27834] In an embodiment the present invention relates to an expresssion cassette comprising a) a promoter, preferably a promoter selected from the group consisting of Big35S, PCUbi, Super and USP, in particular p-Super; and b) the nucleic acid SEQ ID NO. 79342, or a homolog or fragment thereof, or a homolog thereof being depicted in Table I, application no. 3, column 8, in the same line as SEQ ID NO. 79342, preferably the coding region thereof, a homolog or a fragment thereof; which are operable linked.

[27835] In an embodiment thereof the expression cassette comprises in addition c) a nucleic acid molecule encoding a transit peptide, especially a plastidal transit petide in case in Table I, application no. 3, in column 6 in the same line as SEQ ID NO. 79342 is depicted, plastidic is mentioned, or a mitochondrial transit peptide in case in Table I, application no. 3, in column 6 in the same line as SEQ ID NO. 79342 is depicted, mitochondrial is mentioned; which is operable linked, too.

[27836] In another embodiment thereof the expression cassette does not comprise an additional transit peptide in case in Table I, application no. 3, in column 6 in the same line as SEQ ID NO. 79342 is depicted, non-targeted is mentioned.

[27837] In an embodiment the present invention relates to an expresssion cassette comprising a) a promoter, preferably a promoter selected from the group consisting of Big35S, PCUbi, Super and USP, in particular p-Super; and b) the nucleic acid SEQ ID NO. 39237, or a homolog or fragment thereof, or a homolog thereof being depicted in Table I, application no. 3, column 8, in the same line as SEQ ID NO. 39237, preferably the coding region thereof, a homolog or a fragment thereof; which are operable linked.

[27838] In an embodiment thereof the expression cassette comprises in addition c) a nucleic acid molecule encoding a transit peptide, especially a plastidal transit petide in case in Table I, application no. 3, in column 6 in the same line as SEQ ID NO. 39237 is depicted, plastidic is mentioned, or a mitochondrial transit peptide in case in Table I, application no. 3, in column 6 in the same line as SEQ ID NO. 39237 is depicted, mitochondrial is mentioned; which is operable linked, too.

[27839] In another embodiment thereof the expression cassette does not comprise an additional transit peptide in case in Table I, application no. 3, in column 6 in the same line as SEQ ID NO. 39237 is depicted, non-targeted is mentioned.

[27840] In an embodiment the present invention relates to an expresssion cassette comprising a) a promoter, preferably a promoter selected from the group consisting of Big35S, PCUbi, Super and USP, in particular p-Super; and b) the nucleic acid SEQ ID NO. 39255, or a homolog or fragment thereof, or a homolog thereof being depicted in Table I, application no. 3, column 8, in the same line as SEQ ID NO. 39255, preferably the coding region thereof, a homolog or a fragment thereof; which are operable linked.

[27841] In an embodiment thereof the expression cassette comprises in addition c) a nucleic acid molecule encoding a transit peptide, especially a plastidal transit petide in case in Table I, application no. 3, in column 6 in the same line as SEQ ID NO. 39255 is depicted, plastidic is mentioned, or a mitochondrial transit peptide in case in Table I, application no. 3, in column 6 in the same line as SEQ ID NO. 39255 is depicted, mitochondrial is mentioned; which is operable linked, too.

[27842] In another embodiment thereof the expression cassette does not comprise an additional transit peptide in case in Table I, application no. 3, in column 6 in the same line as SEQ ID NO. 39255 is depicted, non-targeted is mentioned.

[27843] In an embodiment the present invention relates to an expresssion cassette comprising a) a promoter, preferably a promoter selected from the group consisting of Big35S, PCUbi, Super and USP, in particular p-Super; and b) the nucleic acid SEQ ID NO. 79398, or a homolog or fragment thereof, or a homolog thereof being depicted in Table I, application no. 3, column 8, in the same line as SEQ ID NO. 79398, preferably the coding region thereof, a homolog or a fragment thereof; which are operable linked.

[27844] In an embodiment thereof the expression cassette comprises in addition c) a nucleic acid molecule encoding a transit peptide, especially a plastidal transit petide in case in Table I, application no. 3, in column 6 in the same line as SEQ ID NO. 79398 is depicted, plastidic is mentioned, or a mitochondrial transit peptide in case in Table I, application no. 3, in column 6 in the same line as SEQ ID NO. 79398 is depicted, mitochondrial is mentioned; which is operable linked, too.

[27845] In another embodiment thereof the expression cassette does not comprise an additional transit peptide in case in Table I, application no. 3, in column 6 in the same line as SEQ ID NO. 79398 is depicted, non-targeted is mentioned.

[27846] In an embodiment the present invention relates to an expresssion cassette comprising a) a promoter, preferably a promoter selected from the group consisting of Big35S, PCUbi, Super and USP, in particular p-Super; and b) the nucleic acid SEQ ID NO. 40329, or a homolog or fragment thereof, or a homolog thereof being depicted in Table I, application no. 3, column 8, in the same line as SEQ ID NO. 40329, preferably the coding region thereof, a homolog or a fragment thereof; which are operable linked.

[27847] In an embodiment thereof the expression cassette comprises in addition c) a nucleic acid molecule encoding a transit peptide, especially a plastidal transit petide in case in Table I, application no. 3, in column 6 in the same line as SEQ ID NO. 40329 is depicted, plastidic is mentioned, or a mitochondrial transit peptide in case in Table I, application no. 3, in column 6 in the same line as SEQ ID NO. 40329 is depicted, mitochondrial is mentioned; which is operable linked, too.

[27848] In another embodiment thereof the expression cassette does not comprise an additional transit peptide in case in Table I, application no. 3, in column 6 in the same line as SEQ ID NO. 40329 is depicted, non-targeted is mentioned.

[27849] In an embodiment the present invention relates to an expresssion cassette comprising a) a promoter, preferably a promoter selected from the group consisting of Big35S, PCUbi, Super and USP, in particular p-Super; and b) the nucleic acid SEQ ID NO. 79509, or a homolog or fragment thereof, or a homolog thereof being depicted in Table I, application no. 3, column 8, in the same line as SEQ ID NO. 79509, preferably the coding region thereof, a homolog or a fragment thereof; which are operable linked.

[27850] In an embodiment thereof the expression cassette comprises in addition c) a nucleic acid molecule encoding a transit peptide, especially a plastidal transit petide in case in Table I, application no. 3, in column 6 in the same line as SEQ ID NO. 79509 is depicted, plastidic is mentioned, or a mitochondrial transit peptide in case in Table I, application no. 3, in column 6 in the same line as SEQ ID NO. 79509 is depicted, mitochondrial is mentioned; which is operable linked, too.

[27851] In another embodiment thereof the expression cassette does not comprise an additional transit peptide in case in Table I, application no. 3, in column 6 in the same line as SEQ ID NO. 79509 is depicted, non-targeted is mentioned.

[27852] In an embodiment the present invention relates to an expresssion cassette comprising a) a promoter, preferably a promoter selected from the group consisting of Big35S, PCUbi, Super and USP, in particular p-Super; and b) the nucleic acid SEQ ID NO. 9167, or a homolog or fragment thereof, or a homolog thereof being depicted in Table I, application no. 3, column 8, in the same line as SEQ ID NO. 9167, preferably the coding region thereof, a homolog or a fragment thereof; which are operable linked.

[27853] In an embodiment thereof the expression cassette comprises in addition c) a nucleic acid molecule encoding a transit peptide, especially a plastidal transit petide in case in Table I, application no. 3, in column 6 in the same line as SEQ ID NO. 9167 is depicted, plastidic is mentioned, or a mitochondrial transit peptide in case in Table I, application no. 3, in column 6 in the same line as SEQ ID NO. 9167 is depicted, mitochondrial is mentioned; which is operable linked, too.

[27854] In another embodiment thereof the expression cassette does not comprise an additional transit peptide in case in Table I, application no. 3, in column 6 in the same line as SEQ ID NO. 9167 is depicted, non-targeted is mentioned.

[27855] In an embodiment the present invention relates to an expresssion cassette comprising a) a promoter, preferably a promoter selected from the group consisting of Big35S, PCUbi, Super and USP, in particular p-USP; and b) the nucleic acid SEQ ID NO. 79627, or a homolog or fragment thereof, or a homolog thereof being depicted in Table I, application no. 3, column 8, in the same line as SEQ ID NO. 79627, preferably the coding region thereof, a homolog or a fragment thereof; which are operable linked.

[27856] In an embodiment thereof the expression cassette comprises in addition c) a nucleic acid molecule encoding a transit peptide, especially a plastidal transit petide in case in Table I, application no. 3, in column 6 in the same line as SEQ ID NO. 79627 is depicted, plastidic is mentioned, or a mitochondrial transit peptide in case in Table I, application no. 3, in column 6 in the same line as SEQ ID NO. 79627 is depicted, mitochondrial is mentioned; which is operable linked, too.

[27857] In another embodiment thereof the expression cassette does not comprise an additional transit peptide in case in Table I, application no. 3, in column 6 in the same line as SEQ ID NO. 79627 is depicted, non-targeted is mentioned.

[27858] In an embodiment the present invention relates to an expresssion cassette comprising a) a promoter, preferably a promoter selected from the group consisting of Big35S, PCUbi, Super and USP, in particular p-USP; and b) the nucleic acid SEQ ID NO. 80521, or a homolog or fragment thereof, or a homolog thereof being depicted in Table I, application no. 3, column 8, in the same line as SEQ ID NO. 80521, preferably the coding region thereof, a homolog or a fragment thereof; which are operable linked.

[27859] In an embodiment thereof the expression cassette comprises in addition c) a nucleic acid molecule encoding a transit peptide, especially a plastidal transit petide in case in Table I, application no. 3, in column 6 in the same line as SEQ ID NO. 80521 is depicted, plastidic is mentioned, or a mitochondrial transit peptide in case in Table I, application no. 3, in column 6 in the same line as SEQ ID NO. 80521 is depicted, mitochondrial is mentioned; which is operable linked, too.

[27860] In another embodiment thereof the expression cassette does not comprise an additional transit peptide in case in Table I, application no. 3, in column 6 in the same line as SEQ ID NO. 80521 is depicted, non-targeted is mentioned.

[27861] In an embodiment the present invention relates to an expresssion cassette comprising a) a promoter, preferably a promoter selected from the group consisting of Big35S, PCUbi, Super and USP, in particular p-Super; and b) the nucleic acid SEQ ID NO. 40665, or a homolog or fragment thereof, or a homolog thereof being depicted in Table I, application no. 3, column 8, in the same line as SEQ ID NO. 40665, preferably the coding region thereof, a homolog or a fragment thereof; which are operable linked.

[27862] In an embodiment thereof the expression cassette comprises in addition c) a nucleic acid molecule encoding a transit peptide, especially a plastidal transit petide in case in Table I, application no. 3, in column 6 in the same line as SEQ ID NO. 40665 is depicted, plastidic is mentioned, or a mitochondrial transit peptide in case in Table I, application no. 3, in column 6 in the same line as SEQ ID NO. 40665 is depicted, mitochondrial is mentioned; which is operable linked, too.

[27863] In another embodiment thereof the expression cassette does not comprise an additional transit peptide in case in Table I, application no. 3, in column 6 in the same line as SEQ ID NO. 40665 is depicted, non-targeted is mentioned.

[27864] In an embodiment the present invention relates to an expresssion cassette comprising a) a promoter, preferably a promoter selected from the group consisting of Big35S, PCUbi, Super and USP, in particular p-Super; and b) the nucleic acid SEQ ID NO. 40726, or a homolog or fragment thereof, or a homolog thereof being depicted in Table I, application no. 3, column 8, in the same line as SEQ ID NO. 40726, preferably the coding region thereof, a homolog or a fragment thereof; which are operable linked.

[27865] In an embodiment thereof the expression cassette comprises in addition c) a nucleic acid molecule encoding a transit peptide, especially a plastidal transit petide in case in Table I, application no. 3, in column 6 in the same line as SEQ ID NO. 40726 is depicted, plastidic is mentioned, or a mitochondrial transit peptide in case in Table I, application no. 3, in column 6 in the same line as SEQ ID NO. 40726 is depicted, mitochondrial is mentioned; which is operable linked, too.

[27866] In another embodiment thereof the expression cassette does not comprise an additional transit peptide in case in Table I, application no. 3, in column 6 in the same line as SEQ ID NO. 40726 is depicted, non-targeted is mentioned.

[27867] In an embodiment the present invention relates to an expresssion cassette comprising a) a promoter, preferably a promoter selected from the group consisting of Big35S, PCUbi, Super and USP, in particular p-Super; and b) the nucleic acid SEQ ID NO. 9244, or a homolog or fragment thereof, or a homolog thereof being depicted in Table I, application no. 3, column 8, in the same line as SEQ ID NO. 9244, preferably the coding region thereof, a homolog or a fragment thereof; which are operable linked.

[27868] In an embodiment thereof the expression cassette comprises in addition c) a nucleic acid molecule encoding a transit peptide, especially a plastidal transit petide in case in Table I, application no. 3, in column 6 in the same line as SEQ ID NO. 9244 is depicted, plastidic is mentioned, or a mitochondrial transit peptide in case in Table I, application no. 3, in column 6 in the same line as SEQ ID NO. 9244 is depicted, mitochondrial is mentioned; which is operable linked, too.

[27869] In another embodiment thereof the expression cassette does not comprise an additional transit peptide in case in Table I, application no. 3, in column 6 in the same line as SEQ ID NO. 9244 is depicted, non-targeted is mentioned.

[27870] In an embodiment the present invention relates to an expresssion cassette comprising a) a promoter, preferably a promoter selected from the group consisting of Big35S, PCUbi, Super and USP, in particular p-Super; and b) the nucleic acid SEQ ID NO. 80589, or a homolog or fragment thereof, or a homolog thereof being depicted in Table I, application no. 3, column 8, in the same line as SEQ ID NO. 80589, preferably the coding region thereof, a homolog or a fragment thereof; which are operable linked.

[27871] In an embodiment thereof the expression cassette comprises in addition c) a nucleic acid molecule encoding a transit peptide, especially a plastidal transit petide in case in Table I, application no. 3, in column 6 in the same line as SEQ ID NO. 80589 is depicted, plastidic is mentioned, or a mitochondrial transit peptide in case in Table I, application no. 3, in column 6 in the same line as SEQ ID NO. 80589 is depicted, mitochondrial is mentioned; which is operable linked, too.

[27872] In another embodiment thereof the expression cassette does not comprise an additional transit peptide in case in Table I, application no. 3, in column 6 in the same line as SEQ ID NO. 80589 is depicted, non-targeted is mentioned.

[27873] In an embodiment the present invention relates to an expresssion cassette comprising a) a promoter, preferably a promoter selected from the group consisting of Big35S, PCUbi, Super and USP, in particular p-Super; and b) the nucleic acid SEQ ID NO. 80756, or a homolog or fragment thereof, or a homolog thereof being depicted in Table I, application no. 3, column 8, in the same line as SEQ ID NO. 80756, preferably the coding region thereof, a homolog or a fragment thereof; which are operable linked.

[27874] In an embodiment thereof the expression cassette comprises in addition c) a nucleic acid molecule encoding a transit peptide, especially a plastidal transit petide in case in Table I, application no. 3, in column 6 in the same line as SEQ ID NO. 80756 is depicted, plastidic is mentioned, or a mitochondrial transit peptide in case in Table I, application no. 3, in column 6 in the same line as SEQ ID NO. 80756 is depicted, mitochondrial is mentioned; which is operable linked, too.

[27875] In another embodiment thereof the expression cassette does not comprise an additional transit peptide in case in Table I, application no. 3, in column 6 in the same line as SEQ ID NO. 80756 is depicted, non-targeted is mentioned.

[27876] In an embodiment the present invention relates to an expresssion cassette comprising a) a promoter, preferably a promoter selected from the group consisting of Big35S, PCUbi, Super and USP, in particular p-Super; and b) the nucleic acid SEQ ID NO. 40741, or a homolog or fragment thereof, or a homolog thereof being depicted in Table I, application no. 3, column 8, in the same line as SEQ ID NO. 40741, preferably the coding region thereof, a homolog or a fragment thereof; which are operable linked.

[27877] In an embodiment thereof the expression cassette comprises in addition c) a nucleic acid molecule encoding a transit peptide, especially a plastidal transit petide in case in Table I, application no. 3, in column 6 in the same line as SEQ ID NO. 40741 is depicted, plastidic is mentioned, or a mitochondrial transit peptide in case in Table I, application no. 3, in column 6 in the same line as SEQ ID NO. 40741 is depicted, mitochondrial is mentioned; which is operable linked, too.

[27878] In another embodiment thereof the expression cassette does not comprise an additional transit peptide in case in Table I, application no. 3, in column 6 in the same line as SEQ ID NO. 40741 is depicted, non-targeted is mentioned.

[27879] In an embodiment the present invention relates to an expresssion cassette comprising a) a promoter, preferably a promoter selected from the group consisting of Big35S, PCUbi, Super and USP, in particular p-Super; and b) the nucleic acid SEQ ID NO. 80906, or a homolog or fragment thereof, or a homolog thereof being depicted in Table I, application no. 3, column 8, in the same line as SEQ ID NO. 80906, preferably the coding region thereof, a homolog or a fragment thereof; which are operable linked.

[27880] In an embodiment thereof the expression cassette comprises in addition c) a nucleic acid molecule encoding a transit peptide, especially a plastidal transit petide in case in Table I, application no. 3, in column 6 in the same line as SEQ ID NO. 80906 is depicted, plastidic is mentioned, or a mitochondrial transit peptide in case in Table I, application no. 3, in column 6 in the same line as SEQ ID NO. 80906 is depicted, mitochondrial is mentioned; which is operable linked, too.

[27881] In another embodiment thereof the expression cassette does not comprise an additional transit peptide in case in Table I, application no. 3, in column 6 in the same line as SEQ ID NO. 80906 is depicted, non-targeted is mentioned.

[27882] In an embodiment the present invention relates to an expresssion cassette comprising a) a promoter, preferably a promoter selected from the group consisting of Big35S, PCUbi, Super and USP, in particular p-Super; and b) the nucleic acid SEQ ID NO. 81075, or a homolog or fragment thereof, or a homolog thereof being depicted in Table I, application no. 3, column 8, in the same line as SEQ ID NO. 81075, preferably the coding region thereof, a homolog or a fragment thereof; which are operable linked.

[27883] In an embodiment thereof the expression cassette comprises in addition c) a nucleic acid molecule encoding a transit peptide, especially a plastidal transit petide in case in Table I, application no. 3, in column 6 in the same line as SEQ ID NO. 81075 is depicted, plastidic is mentioned, or a mitochondrial transit peptide in case in Table I, application no. 3, in column 6 in the same line as SEQ ID NO. 81075 is depicted, mitochondrial is mentioned; which is operable linked, too.

[27884] In another embodiment thereof the expression cassette does not comprise an additional transit peptide in case in Table I, application no. 3, in column 6 in the same line as SEQ ID NO. 81075 is depicted, non-targeted is mentioned.

[27885] In an embodiment the present invention relates to an expresssion cassette comprising a) a promoter, preferably a promoter selected from the group consisting of Big35S, PCUbi, Super and USP, in particular p-Super; and b) the nucleic acid SEQ ID NO. 81451, or a homolog or fragment thereof, or a homolog thereof being depicted in Table I, application no. 3, column 8, in the same line as SEQ ID NO. 81451, preferably the coding region thereof, a homolog or a fragment thereof; which are operable linked.

[27886] In an embodiment thereof the expression cassette comprises in addition c) a nucleic acid molecule encoding a transit peptide, especially a plastidal transit petide in case in Table I, application no. 3, in column 6 in the same line as SEQ ID NO. 81451 is depicted, plastidic is mentioned, or a mitochondrial transit peptide in case in Table I, application no. 3, in column 6 in the same line as SEQ ID NO. 81451 is depicted, mitochondrial is mentioned; which is operable linked, too.

[27887] In another embodiment thereof the expression cassette does not comprise an additional transit peptide in case in Table I, application no. 3, in column 6 in the same line as SEQ ID NO. 81451 is depicted, non-targeted is mentioned.

[27888] In an embodiment the present invention relates to an expresssion cassette comprising a) a promoter, preferably a promoter selected from the group consisting of Big35S, PCUbi, Super and USP, in particular p-Super; and b) the nucleic acid SEQ ID NO. 40795, or a homolog or fragment thereof, or a homolog thereof being depicted in Table I, application no. 3, column 8, in the same line as SEQ ID NO. 40795, preferably the coding region thereof, a homolog or a fragment thereof; which are operable linked.

[27889] In an embodiment thereof the expression cassette comprises in addition c) a nucleic acid molecule encoding a transit peptide, especially a plastidal transit petide in case in Table I, application no. 3, in column 6 in the same line as SEQ ID NO. 40795 is depicted, plastidic is mentioned, or a mitochondrial transit peptide in case in Table I, application no. 3, in column 6 in the same line as SEQ ID NO. 40795 is depicted, mitochondrial is mentioned; which is operable linked, too.

[27890] In another embodiment thereof the expression cassette does not comprise an additional transit peptide in case in Table I, application no. 3, in column 6 in the same line as SEQ ID NO. 40795 is depicted, non-targeted is mentioned.

[27891] In an embodiment the present invention relates to an expresssion cassette comprising a) a promoter, preferably a promoter selected from the group consisting of Big35S, PCUbi, Super and USP, in particular p-Super; and b) the nucleic acid SEQ ID NO. 81576, or a homolog or fragment thereof, or a homolog thereof being depicted in Table I, application no. 3, column 8, in the same line as SEQ ID NO. 81576, preferably the coding region thereof, a homolog or a fragment thereof; which are operable linked.

[27892] In an embodiment thereof the expression cassette comprises in addition c) a nucleic acid molecule encoding a transit peptide, especially a plastidal transit petide in case in Table I, application no. 3, in column 6 in the same line as SEQ ID NO. 81576 is depicted, plastidic is mentioned, or a mitochondrial transit peptide in case in Table I, application no. 3, in column 6 in the same line as SEQ ID NO. 81576 is depicted, mitochondrial is mentioned; which is operable linked, too.

[27893] In another embodiment thereof the expression cassette does not comprise an additional transit peptide in case in Table I, application no. 3, in column 6 in the same line as SEQ ID NO. 81576 is depicted, non-targeted is mentioned.

[27894] In an embodiment the present invention relates to an expresssion cassette comprising a) a promoter, preferably a promoter selected from the group consisting of Big35S, PCUbi, Super and USP, in particular p-USP; and b) the nucleic acid SEQ ID NO. 81692, or a homolog or fragment thereof, or a homolog thereof being depicted in Table I, application no. 3, column 8, in the same line as SEQ ID NO. 81692, preferably the coding region thereof, a homolog or a fragment thereof; which are operable linked.

[27895] In an embodiment thereof the expression cassette comprises in addition c) a nucleic acid molecule encoding a transit peptide, especially a plastidal transit petide in case in Table I, application no. 3, in column 6 in the same line as SEQ ID NO. 81692 is depicted, plastidic is mentioned, or a mitochondrial transit peptide in case in Table I, application no. 3, in column 6 in the same line as SEQ ID NO. 81692 is depicted, mitochondrial is mentioned; which is operable linked, too.

[27896] In another embodiment thereof the expression cassette does not comprise an additional transit peptide in case in Table I, application no. 3, in column 6 in the same line as SEQ ID NO. 81692 is depicted, non-targeted is mentioned.

[27897] In an embodiment the present invention relates to an expresssion cassette comprising a) a promoter, preferably a promoter selected from the group consisting of Big35S, PCUbi, Super and USP, in particular p-Super; and b) the nucleic acid SEQ ID NO. 81935, or a homolog or fragment thereof, or a homolog thereof being depicted in Table I, application no. 3, column 8, in the same line as SEQ ID NO. 81935, preferably the coding region thereof, a homolog or a fragment thereof; which are operable linked.

[27898] In an embodiment thereof the expression cassette comprises in addition c) a nucleic acid molecule encoding a transit peptide, especially a plastidal transit petide in case in Table I, application no. 3, in column 6 in the same line as SEQ ID NO. 81935 is depicted, plastidic is mentioned, or a mitochondrial transit peptide in case in Table I, application no. 3, in column 6 in the same line as SEQ ID NO. 81935 is depicted, mitochondrial is mentioned; which is operable linked, too.

[27899] In another embodiment thereof the expression cassette does not comprise an additional transit peptide in case in Table I, application no. 3, in column 6 in the same line as SEQ ID NO. 81935 is depicted, non-targeted is mentioned.

[27900] In an embodiment the present invention relates to an expresssion cassette comprising a) a promoter, preferably a promoter selected from the group consisting of Big35S, PCUbi, Super and USP, in particular p-Super; and b) the nucleic acid SEQ ID NO. 81980, or a homolog or fragment thereof, or a homolog thereof being depicted in Table I, application no. 3, column 8, in the same line as SEQ ID NO. 81980, preferably the coding region thereof, a homolog or a fragment thereof; which are operable linked.

[27901] In an embodiment thereof the expression cassette comprises in addition c) a nucleic acid molecule encoding a transit peptide, especially a plastidal transit petide in case in Table I, application no. 3, in column 6 in the same line as SEQ ID NO. 81980 is depicted, plastidic is mentioned, or a mitochondrial transit peptide in case in Table I, application no. 3, in column 6 in the same line as SEQ ID NO. 81980 is depicted, mitochondrial is mentioned; which is operable linked, too.

[27902] In another embodiment thereof the expression cassette does not comprise an additional transit peptide in case in Table I, application no. 3, in column 6 in the same line as SEQ ID NO. 81980 is depicted, non-targeted is mentioned.

[27903] In an embodiment the present invention relates to an expresssion cassette comprising a) a promoter, preferably a promoter selected from the group consisting of Big35S, PCUbi, Super and USP, in particular p-USP; and b) the nucleic acid SEQ ID NO. 81988, or a homolog or fragment thereof, or a homolog thereof being depicted in Table I, application no. 3, column 8, in the same line as SEQ ID NO. 81988, preferably the coding region thereof, a homolog or a fragment thereof; which are operable linked.

[27904] In an embodiment thereof the expression cassette comprises in addition c) a nucleic acid molecule encoding a transit peptide, especially a plastidal transit petide in case in Table I, application no. 3, in column 6 in the same line as SEQ ID NO. 81988 is depicted, plastidic is mentioned, or a mitochondrial transit peptide in case in Table I, application no. 3, in column 6 in the same line as SEQ ID NO. 81988 is depicted, mitochondrial is mentioned; which is operable linked, too.

[27905] In another embodiment thereof the expression cassette does not comprise an additional transit peptide in case in Table I, application no. 3, in column 6 in the same line as SEQ ID NO. 81988 is depicted, non-targeted is mentioned.

[27906] In an embodiment the present invention relates to an expresssion cassette comprising a) a promoter, preferably a promoter selected from the group consisting of Big35S, PCUbi, Super and USP, in particular p-Super; and b) the nucleic acid SEQ ID NO. 9333, or a homolog or fragment thereof, or a homolog thereof being depicted in Table I, application no. 3, column 8, in the same line as SEQ ID NO. 9333, preferably the coding region thereof, a homolog or a fragment thereof; which are operable linked.

[27907] In an embodiment thereof the expression cassette comprises in addition c) a nucleic acid molecule encoding a transit peptide, especially a plastidal transit petide in case in Table I, application no. 3, in column 6 in the same line as SEQ ID NO. 9333 is depicted, plastidic is mentioned, or a mitochondrial transit peptide in case in Table I, application no. 3, in column 6 in the same line as SEQ ID NO. 9333 is depicted, mitochondrial is mentioned; which is operable linked, too.

[27908] In another embodiment thereof the expression cassette does not comprise an additional transit peptide in case in Table I, application no. 3, in column 6 in the same line as SEQ ID NO. 9333 is depicted, non-targeted is mentioned.

[27909] In an embodiment the present invention relates to an expresssion cassette comprising a) a promoter, preferably a promoter selected from the group consisting of Big35S, PCUbi, Super and USP, in particular p-Super; and b) the nucleic acid SEQ ID NO. 42046, or a homolog or fragment thereof, or a homolog thereof being depicted in Table I, application no. 3, column 8, in the same line as SEQ ID NO. 42046, preferably the coding region thereof, a homolog or a fragment thereof; which are operable linked.

[27910] In an embodiment thereof the expression cassette comprises in addition c) a nucleic acid molecule encoding a transit peptide, especially a plastidal transit petide in case in Table I, application no. 3, in column 6 in the same line as SEQ ID NO. 42046 is depicted, plastidic is mentioned, or a mitochondrial transit peptide in case in Table I, application no. 3, in column 6 in the same line as SEQ ID NO. 42046 is depicted, mitochondrial is mentioned; which is operable linked, too.

[27911] In another embodiment thereof the expression cassette does not comprise an additional transit peptide in case in Table I, application no. 3, in column 6 in the same line as SEQ ID NO. 42046 is depicted, non-targeted is mentioned.

[27912] In an embodiment the present invention relates to an expresssion cassette comprising a) a promoter, preferably a promoter selected from the group consisting of Big35S, PCUbi, Super and USP, in particular p-Super; and b) the nucleic acid SEQ ID NO. 82424, or a homolog or fragment thereof, or a homolog thereof being depicted in Table I, application no. 3, column 8, in the same line as SEQ ID NO. 82424, preferably the coding region thereof, a homolog or a fragment thereof; which are operable linked.

[27913] In an embodiment thereof the expression cassette comprises in addition c) a nucleic acid molecule encoding a transit peptide, especially a plastidal transit petide in case in Table I, application no. 3, in column 6 in the same line as SEQ ID NO. 82424 is depicted, plastidic is mentioned, or a mitochondrial transit peptide in case in Table I, application no. 3, in column 6 in the same line as SEQ ID NO. 82424 is depicted, mitochondrial is mentioned; which is operable linked, too.

[27914] In another embodiment thereof the expression cassette does not comprise an additional transit peptide in case in Table I, application no. 3, in column 6 in the same line as SEQ ID NO. 82424 is depicted, non-targeted is mentioned.

[27915] In an embodiment the present invention relates to an expresssion cassette comprising a) a promoter, preferably a promoter selected from the group consisting of Big35S, PCUbi, Super and USP, in particular p-Super; and b) the nucleic acid SEQ ID NO. 82459, or a homolog or fragment thereof, or a homolog thereof being depicted in Table I, application no. 3, column 8, in the same line as SEQ ID NO. 82459, preferably the coding region thereof, a homolog or a fragment thereof; which are operable linked.

[27916] In an embodiment thereof the expression cassette comprises in addition c) a nucleic acid molecule encoding a transit peptide, especially a plastidal transit petide in case in Table I, application no. 3, in column 6 in the same line as SEQ ID NO. 82459 is depicted, plastidic is mentioned, or a mitochondrial transit peptide in case in Table I, application no. 3, in column 6 in the same line as SEQ ID NO. 82459 is depicted, mitochondrial is mentioned; which is operable linked, too.

[27917] In another embodiment thereof the expression cassette does not comprise an additional transit peptide in case in Table I, application no. 3, in column 6 in the same line as SEQ ID NO. 82459 is depicted, non-targeted is mentioned.

[27918] In an embodiment the present invention relates to an expresssion cassette comprising a) a promoter, preferably a promoter selected from the group consisting of Big35S, PCUbi, Super and USP, in particular p-Super; and b) the nucleic acid SEQ ID NO. 42471, or a homolog or fragment thereof, or a homolog thereof being depicted in Table I, application no. 3, column 8, in the same line as SEQ ID NO. 42471, preferably the coding region thereof, a homolog or a fragment thereof; which are operable linked.

[27919] In an embodiment thereof the expression cassette comprises in addition c) a nucleic acid molecule encoding a transit peptide, especially a plastidal transit petide in case in Table I, application no. 3, in column 6 in the same line as SEQ ID NO. 42471 is depicted, plastidic is mentioned, or a mitochondrial transit peptide in case in Table I, application no. 3, in column 6 in the same line as SEQ ID NO. 42471 is depicted, mitochondrial is mentioned; which is operable linked, too.

[27920] In another embodiment thereof the expression cassette does not comprise an additional transit peptide in case in Table I, application no. 3, in column 6 in the same line as SEQ ID NO. 42471 is depicted, non-targeted is mentioned.

[27921] In an embodiment the present invention relates to an expresssion cassette comprising a) a promoter, preferably a promoter selected from the group consisting of Big35S, PCUbi, Super and USP, in particular p-Super; and b) the nucleic acid SEQ ID NO. 82510, or a homolog or fragment thereof, or a homolog thereof being depicted in Table I, application no. 3, column 8, in the same line as SEQ ID NO. 82510, preferably the coding region thereof, a homolog or a fragment thereof; which are operable linked.

[27922] In an embodiment thereof the expression cassette comprises in addition c) a nucleic acid molecule encoding a transit peptide, especially a plastidal transit petide in case in Table I, application no. 3, in column 6 in the same line as SEQ ID NO. 82510 is depicted, plastidic is mentioned, or a mitochondrial transit peptide in case in Table I, application no. 3, in column 6 in the same line as SEQ ID NO. 82510 is depicted, mitochondrial is mentioned; which is operable linked, too.

[27923] In another embodiment thereof the expression cassette does not comprise an additional transit peptide in case in Table I, application no. 3, in column 6 in the same line as SEQ ID NO. 82510 is depicted, non-targeted is mentioned.

[27924] In an embodiment the present invention relates to an expresssion cassette comprising a) a promoter, preferably a promoter selected from the group consisting of Big35S, PCUbi, Super and USP, in particular p-Super; and b) the nucleic acid SEQ ID NO. 9470, or a homolog or fragment thereof, or a homolog thereof being depicted in Table I, application no. 3, column 8, in the same line as SEQ ID NO. 9470, preferably the coding region thereof, a homolog or a fragment thereof; which are operable linked.

[27925] In an embodiment thereof the expression cassette comprises in addition c) a nucleic acid molecule encoding a transit peptide, especially a plastidal transit petide in case in Table I, application no. 3, in column 6 in the same line as SEQ ID NO. 9470 is depicted, plastidic is mentioned, or a mitochondrial transit peptide in case in Table I, application no. 3, in column 6 in the same line as SEQ ID NO. 9470 is depicted, mitochondrial is mentioned; which is operable linked, too.

[27926] In another embodiment thereof the expression cassette does not comprise an additional transit peptide in case in Table I, application no. 3, in column 6 in the same line as SEQ ID NO. 9470 is depicted, non-targeted is mentioned.

[27927] In an embodiment the present invention relates to an expresssion cassette comprising a) a promoter, preferably a promoter selected from the group consisting of Big35S, PCUbi, Super and USP, in particular p-USP; and b) the nucleic acid SEQ ID NO. 9492, or a homolog or fragment thereof, or a homolog thereof being depicted in Table I, application no. 3, column 8, in the same line as SEQ ID NO. 9492, preferably the coding region thereof, a homolog or a fragment thereof; which are operable linked.

[27928] In an embodiment thereof the expression cassette comprises in addition c) a nucleic acid molecule encoding a transit peptide, especially a plastidal transit petide in case in Table I, application no. 3, in column 6 in the same line as SEQ ID NO. 9492 is depicted, plastidic is mentioned, or a mitochondrial transit peptide in case in Table I, application no. 3, in column 6 in the same line as SEQ ID NO. 9492 is depicted, mitochondrial is mentioned; which is operable linked, too.

[27929] In another embodiment thereof the expression cassette does not comprise an additional transit peptide in case in Table I, application no. 3, in column 6 in the same line as SEQ ID NO. 9492 is depicted, non-targeted is mentioned.

[27930] In an embodiment the present invention relates to an expresssion cassette comprising a) a promoter, preferably a promoter selected from the group consisting of Big35S, PCUbi, Super and USP, in particular p-Super; and b) the nucleic acid SEQ ID NO. 42502, or a homolog or fragment thereof, or a homolog thereof being depicted in Table I, application no. 3, column 8, in the same line as SEQ ID NO. 42502, preferably the coding region thereof, a homolog or a fragment thereof; which are operable linked.

[27931] In an embodiment thereof the expression cassette comprises in addition c) a nucleic acid molecule encoding a transit peptide, especially a plastidal transit petide in case in Table I, application no. 3, in column 6 in the same line as SEQ ID NO. 42502 is depicted, plastidic is mentioned, or a mitochondrial transit peptide in case in Table I, application no. 3, in column 6 in the same line as SEQ ID NO. 42502 is depicted, mitochondrial is mentioned; which is operable linked, too.

[27932] In another embodiment thereof the expression cassette does not comprise an additional transit peptide in case in Table I, application no. 3, in column 6 in the same line as SEQ ID NO. 42502 is depicted, non-targeted is mentioned.

[27933] In an embodiment the present invention relates to an expresssion cassette comprising a) a promoter, preferably a promoter selected from the group consisting of Big35S, PCUbi, Super and USP, in particular p-Super; and b) the nucleic acid SEQ ID NO. 10104, or a homolog or fragment thereof, or a homolog thereof being depicted in Table I, application no. 3, column 8, in the same line as SEQ ID NO. 10104, preferably the coding region thereof, a homolog or a fragment thereof; which are operable linked.

[27934] In an embodiment thereof the expression cassette comprises in addition c) a nucleic acid molecule encoding a transit peptide, especially a plastidal transit petide in case in Table I, application no. 3, in column 6 in the same line as SEQ ID NO. 10104 is depicted, plastidic is mentioned, or a mitochondrial transit peptide in case in Table I, application no. 3, in column 6 in the same line as SEQ ID NO. 10104 is depicted, mitochondrial is mentioned; which is operable linked, too.

[27935] In another embodiment thereof the expression cassette does not comprise an additional transit peptide in case in Table I, application no. 3, in column 6 in the same line as SEQ ID NO. 10104 is depicted, non-targeted is mentioned.

[27936] In an embodiment the present invention relates to an expresssion cassette comprising a) a promoter, preferably a promoter selected from the group consisting of Big35S, PCUbi, Super and USP, in particular p-Super; and b) the nucleic acid SEQ ID NO. 82572, or a homolog or fragment thereof, or a homolog thereof being depicted in Table I, application no. 3, column 8, in the same line as SEQ ID NO. 82572, preferably the coding region thereof, a homolog or a fragment thereof; which are operable linked.

[27937] In an embodiment thereof the expression cassette comprises in addition c) a nucleic acid molecule encoding a transit peptide, especially a plastidal transit petide in case in Table I, application no. 3, in column 6 in the same line as SEQ ID NO. 82572 is depicted, plastidic is mentioned, or a mitochondrial transit peptide in case in Table I, application no. 3, in column 6 in the same line as SEQ ID NO. 82572 is depicted, mitochondrial is mentioned; which is operable linked, too.

[27938] In another embodiment thereof the expression cassette does not comprise an additional transit peptide in case in Table I, application no. 3, in column 6 in the same line as SEQ ID NO. 82572 is depicted, non-targeted is mentioned.

[27939] In an embodiment the present invention relates to an expresssion cassette comprising a) a promoter, preferably a promoter selected from the group consisting of Big35S, PCUbi, Super and USP, in particular p-Super; and b) the nucleic acid SEQ ID NO. 82846, or a homolog or fragment thereof, or a homolog thereof being depicted in Table I, application no. 3, column 8, in the same line as SEQ ID NO. 82846, preferably the coding region thereof, a homolog or a fragment thereof; which are operable linked.

[27940] In an embodiment thereof the expression cassette comprises in addition c) a nucleic acid molecule encoding a transit peptide, especially a plastidal transit petide in case in Table I, application no. 3, in column 6 in the same line as SEQ ID NO. 82846 is depicted, plastidic is mentioned, or a mitochondrial transit peptide in case in Table I, application no. 3, in column 6 in the same line as SEQ ID NO. 82846 is depicted, mitochondrial is mentioned; which is operable linked, too.

[27941] In another embodiment thereof the expression cassette does not comprise an additional transit peptide in case in Table I, application no. 3, in column 6 in the same line as SEQ ID NO. 82846 is depicted, non-targeted is mentioned.

[27942] In an embodiment the present invention relates to an expresssion cassette comprising a) a promoter, preferably a promoter selected from the group consisting of Big35S, PCUbi, Super and USP, in particular p-Super; and b) the nucleic acid SEQ ID NO. 82866, or a homolog or fragment thereof, or a homolog thereof being depicted in Table I, application no. 3, column 8, in the same line as SEQ ID NO. 82866, preferably the coding region thereof, a homolog or a fragment thereof; which are operable linked.

[27943] In an embodiment thereof the expression cassette comprises in addition c) a nucleic acid molecule encoding a transit peptide, especially a plastidal transit petide in case in Table I, application no. 3, in column 6 in the same line as SEQ ID NO. 82866 is depicted, plastidic is mentioned, or a mitochondrial transit peptide in case in Table I, application no. 3, in column 6 in the same line as SEQ ID NO. 82866 is depicted, mitochondrial is mentioned; which is operable linked, too.

[27944] In another embodiment thereof the expression cassette does not comprise an additional transit peptide in case in Table I, application no. 3, in column 6 in the same line as SEQ ID NO. 82866 is depicted, non-targeted is mentioned.

[27945] In an embodiment the present invention relates to an expresssion cassette comprising a) a promoter, preferably a promoter selected from the group consisting of Big35S, PCUbi, Super and USP, in particular p-Super; and b) the nucleic acid SEQ ID NO. 42559, or a homolog or fragment thereof, or a homolog thereof being depicted in Table I, application no. 3, column 8, in the same line as SEQ ID NO. 42559, preferably the coding region thereof, a homolog or a fragment thereof; which are operable linked.

[27946] In an embodiment thereof the expression cassette comprises in addition c) a nucleic acid molecule encoding a transit peptide, especially a plastidal transit petide in case in Table I, application no. 3, in column 6 in the same line as SEQ ID NO. 42559 is depicted, plastidic is mentioned, or a mitochondrial transit peptide in case in Table I, application no. 3, in column 6 in the same line as SEQ ID NO. 42559 is depicted, mitochondrial is mentioned; which is operable linked, too.

[27947] In another embodiment thereof the expression cassette does not comprise an additional transit peptide in case in Table I, application no. 3, in column 6 in the same line as SEQ ID NO. 42559 is depicted, non-targeted is mentioned.

[27948] In an embodiment the present invention relates to an expresssion cassette comprising a) a promoter, preferably a promoter selected from the group consisting of Big35S, PCUbi, Super and USP, in particular p-Super; and b) the nucleic acid SEQ ID NO. 42592, or a homolog or fragment thereof, or a homolog thereof being depicted in Table I, application no. 3, column 8, in the same line as SEQ ID NO. 42592, preferably the coding region thereof, a homolog or a fragment thereof; which are operable linked.

[27949] In an embodiment thereof the expression cassette comprises in addition c) a nucleic acid molecule encoding a transit peptide, especially a plastidal transit petide in case in Table I, application no. 3, in column 6 in the same line as SEQ ID NO. 42592 is depicted, plastidic is mentioned, or a mitochondrial transit peptide in case in Table I, application no. 3, in column 6 in the same line as SEQ ID NO. 42592 is depicted, mitochondrial is mentioned; which is operable linked, too.

[27950] In another embodiment thereof the expression cassette does not comprise an additional transit peptide in case in Table I, application no. 3, in column 6 in the same line as SEQ ID NO. 42592 is depicted, non-targeted is mentioned.

[27951] In an embodiment the present invention relates to an expresssion cassette comprising a) a promoter, preferably a promoter selected from the group consisting of Big35S, PCUbi, Super and USP, in particular p-USP; and b) the nucleic acid SEQ ID NO. 83153, or a homolog or fragment thereof, or a homolog thereof being depicted in Table I, application no. 3, column 8, in the same line as SEQ ID NO. 83153, preferably the coding region thereof, a homolog or a fragment thereof; which are operable linked.

[27952] In an embodiment thereof the expression cassette comprises in addition c) a nucleic acid molecule encoding a transit peptide, especially a plastidal transit petide in case in Table I, application no. 3, in column 6 in the same line as SEQ ID NO. 83153 is depicted, plastidic is mentioned, or a mitochondrial transit peptide in case in Table I, application no. 3, in column 6 in the same line as SEQ ID NO. 83153 is depicted, mitochondrial is mentioned; which is operable linked, too.

[27953] In another embodiment thereof the expression cassette does not comprise an additional transit peptide in case in Table I, application no. 3, in column 6 in the same line as SEQ ID NO. 83153 is depicted, non-targeted is mentioned.

[27954] In an embodiment the present invention relates to an expresssion cassette comprising a) a promoter, preferably a promoter selected from the group consisting of Big35S, PCUbi, Super and USP, in particular p-USP; and b) the nucleic acid SEQ ID NO. 83213, or a homolog or fragment thereof, or a homolog thereof being depicted in Table I, application no. 3, column 8, in the same line as SEQ ID NO. 83213, preferably the coding region thereof, a homolog or a fragment thereof; which are operable linked.

[27955] In an embodiment thereof the expression cassette comprises in addition c) a nucleic acid molecule encoding a transit peptide, especially a plastidal transit petide in case in Table I, application no. 3, in column 6 in the same line as SEQ ID NO. 83213 is depicted, plastidic is mentioned, or a mitochondrial transit peptide in case in Table I, application no. 3, in column 6 in the same line as SEQ ID NO. 83213 is depicted, mitochondrial is mentioned; which is operable linked, too.

[27956] In another embodiment thereof the expression cassette does not comprise an additional transit peptide in case in Table I, application no. 3, in column 6 in the same line as SEQ ID NO. 83213 is depicted, non-targeted is mentioned.

[27957] In an embodiment the present invention relates to an expresssion cassette comprising a) a promoter, preferably a promoter selected from the group consisting of Big35S, PCUbi, Super and USP, in particular p-Super; and b) the nucleic acid SEQ ID NO. 42931, or a homolog or fragment thereof, or a homolog thereof being depicted in Table I, application no. 3, column 8, in the same line as SEQ ID NO. 42931, preferably the coding region thereof, a homolog or a fragment thereof; which are operable linked.

[27958] In an embodiment thereof the expression cassette comprises in addition c) a nucleic acid molecule encoding a transit peptide, especially a plastidal transit petide in case in Table I, application no. 3, in column 6 in the same line as SEQ ID NO. 42931 is depicted, plastidic is mentioned, or a mitochondrial transit peptide in case in Table I, application no. 3, in column 6 in the same line as SEQ ID NO. 42931 is depicted, mitochondrial is mentioned; which is operable linked, too.

[27959] In another embodiment thereof the expression cassette does not comprise an additional transit peptide in case in Table I, application no. 3, in column 6 in the same line as SEQ ID NO. 42931 is depicted, non-targeted is mentioned.

[27960] In an embodiment the present invention relates to an expresssion cassette comprising a) a promoter, preferably a promoter selected from the group consisting of Big35S, PCUbi, Super and USP, in particular p-Super; and b) the nucleic acid SEQ ID NO. 83429, or a homolog or fragment thereof, or a homolog thereof being depicted in Table I, application no. 3, column 8, in the same line as SEQ ID NO. 83429, preferably the coding region thereof, a homolog or a fragment thereof; which are operable linked.

[27961] In an embodiment thereof the expression cassette comprises in addition c) a nucleic acid molecule encoding a transit peptide, especially a plastidal transit petide in case in Table I, application no. 3, in column 6 in the same line as SEQ ID NO. 83429 is depicted, plastidic is mentioned, or a mitochondrial transit peptide in case in Table I, application no. 3, in column 6 in the same line as SEQ ID NO. 83429 is depicted, mitochondrial is mentioned; which is operable linked, too.

[27962] In another embodiment thereof the expression cassette does not comprise an additional transit peptide in case in Table I, application no. 3, in column 6 in the same line as SEQ ID NO. 83429 is depicted, non-targeted is mentioned.

[27963] In an embodiment the present invention relates to an expresssion cassette comprising a) a promoter, preferably a promoter selected from the group consisting of Big35S, PCUbi, Super and USP, in particular p-USP; and b) the nucleic acid SEQ ID NO. 83629, or a homolog or fragment thereof, or a homolog thereof being depicted in Table I, application no. 3, column 8, in the same line as SEQ ID NO. 83629, preferably the coding region thereof, a homolog or a fragment thereof; which are operable linked.

[27964] In an embodiment thereof the expression cassette comprises in addition c) a nucleic acid molecule encoding a transit peptide, especially a plastidal transit petide in case in Table I, application no. 3, in column 6 in the same line as SEQ ID NO. 83629 is depicted, plastidic is mentioned, or a mitochondrial transit peptide in case in Table I, application no. 3, in column 6 in the same line as SEQ ID NO. 83629 is depicted, mitochondrial is mentioned; which is operable linked, too.

[27965] In another embodiment thereof the expression cassette does not comprise an additional transit peptide in case in Table I, application no. 3, in column 6 in the same line as SEQ ID NO. 83629 is depicted, non-targeted is mentioned.

[27966] In an embodiment the present invention relates to an expresssion cassette comprising a) a promoter, preferably a promoter selected from the group consisting of Big35S, PCUbi, Super and USP, in particular p-USP; and b) the nucleic acid SEQ ID NO. 83657, or a homolog or fragment thereof, or a homolog thereof being depicted in Table I, application no. 3, column 8, in the same line as SEQ ID NO. 83657, preferably the coding region thereof, a homolog or a fragment thereof; which are operable linked.

[27967] In an embodiment thereof the expression cassette comprises in addition c) a nucleic acid molecule encoding a transit peptide, especially a plastidal transit petide in case in Table I, application no. 3, in column 6 in the same line as SEQ ID NO. 83657 is depicted, plastidic is mentioned, or a mitochondrial transit peptide in case in Table I, application no. 3, in column 6 in the same line as SEQ ID NO. 83657 is depicted, mitochondrial is mentioned; which is operable linked, too.

[27968] In another embodiment thereof the expression cassette does not comprise an additional transit peptide in case in Table I, application no. 3, in column 6 in the same line as SEQ ID NO. 83657 is depicted, non-targeted is mentioned.

[27969] In an embodiment the present invention relates to an expresssion cassette comprising a) a promoter, preferably a promoter selected from the group consisting of Big35S, PCUbi, Super and USP, in particular p-USP; and b) the nucleic acid SEQ ID NO. 10252, or a homolog or fragment thereof, or a homolog thereof being depicted in Table I, application no. 3, column 8, in the same line as SEQ ID NO. 10252, preferably the coding region thereof, a homolog or a fragment thereof; which are operable linked.

[27970] In an embodiment thereof the expression cassette comprises in addition c) a nucleic acid molecule encoding a transit peptide, especially a plastidal transit petide in case in Table I, application no. 3, in column 6 in the same line as SEQ ID NO. 10252 is depicted, plastidic is mentioned, or a mitochondrial transit peptide in case in Table I, application no. 3, in column 6 in the same line as SEQ ID NO. 10252 is depicted, mitochondrial is mentioned; which is operable linked, too.

[27971] In another embodiment thereof the expression cassette does not comprise an additional transit peptide in case in Table I, application no. 3, in column 6 in the same line as SEQ ID NO. 10252 is depicted, non-targeted is mentioned.

[27972] In an embodiment the present invention relates to an expresssion cassette comprising a) a promoter, preferably a promoter selected from the group consisting of Big35S, PCUbi, Super and USP, in particular p-Super; and b) the nucleic acid SEQ ID NO. 83726, or a homolog or fragment thereof, or a homolog thereof being depicted in Table I, application no. 3, column 8, in the same line as SEQ ID NO. 83726, preferably the coding region thereof, a homolog or a fragment thereof; which are operable linked.

[27973] In an embodiment thereof the expression cassette comprises in addition c) a nucleic acid molecule encoding a transit peptide, especially a plastidal transit petide in case in Table I, application no. 3, in column 6 in the same line as SEQ ID NO. 83726 is depicted, plastidic is mentioned, or a mitochondrial transit peptide in case in Table I, application no. 3, in column 6 in the same line as SEQ ID NO. 83726 is depicted, mitochondrial is mentioned; which is operable linked, too.

[27974] In another embodiment thereof the expression cassette does not comprise an additional transit peptide in case in Table I, application no. 3, in column 6 in the same line as SEQ ID NO. 83726 is depicted, non-targeted is mentioned.

[27975] In an embodiment the present invention relates to an expresssion cassette comprising a) a promoter, preferably a promoter selected from the group consisting of Big35S, PCUbi, Super and USP, in particular p-Super; and b) the nucleic acid SEQ ID NO. 43800, or a homolog or fragment thereof, or a homolog thereof being depicted in Table I, application no. 3, column 8, in the same line as SEQ ID NO. 43800, preferably the coding region thereof, a homolog or a fragment thereof; which are operable linked.

[27976] In an embodiment thereof the expression cassette comprises in addition c) a nucleic acid molecule encoding a transit peptide, especially a plastidal transit petide in case in Table I, application no. 3, in column 6 in the same line as SEQ ID NO. 43800 is depicted, plastidic is mentioned, or a mitochondrial transit peptide in case in Table I, application no. 3, in column 6 in the same line as SEQ ID NO. 43800 is depicted, mitochondrial is mentioned; which is operable linked, too.

[27977] In another embodiment thereof the expression cassette does not comprise an additional transit peptide in case in Table I, application no. 3, in column 6 in the same line as SEQ ID NO. 43800 is depicted, non-targeted is mentioned.

[27978] In an embodiment the present invention relates to an expresssion cassette comprising a) a promoter, preferably a promoter selected from the group consisting of Big35S, PCUbi, Super and USP, in particular p-USP; and b) the nucleic acid SEQ ID NO. 43839, or a homolog or fragment thereof, or a homolog thereof being depicted in Table I, application no. 3, column 8, in the same line as SEQ ID NO. 43839, preferably the coding region thereof, a homolog or a fragment thereof; which are operable linked.

[27979] In an embodiment thereof the expression cassette comprises in addition c) a nucleic acid molecule encoding a transit peptide, especially a plastidal transit petide in case in Table I, application no. 3, in column 6 in the same line as SEQ ID NO. 43839 is depicted, plastidic is mentioned, or a mitochondrial transit peptide in case in Table I, application no. 3, in column 6 in the same line as SEQ ID NO. 43839 is depicted, mitochondrial is mentioned; which is operable linked, too.

[27980] In another embodiment thereof the expression cassette does not comprise an additional transit peptide in case in Table I, application no. 3, in column 6 in the same line as SEQ ID NO. 43839 is depicted, non-targeted is mentioned.

[27981] In an embodiment the present invention relates to an expresssion cassette comprising a) a promoter, preferably a promoter selected from the group consisting of Big35S, PCUbi, Super and USP, in particular p-Super; and b) the nucleic acid SEQ ID NO. 44196, or a homolog or fragment thereof, or a homolog thereof being depicted in Table I, application no. 3, column 8, in the same line as SEQ ID NO. 44196, preferably the coding region thereof, a homolog or a fragment thereof; which are operable linked.

[27982] In an embodiment thereof the expression cassette comprises in addition c) a nucleic acid molecule encoding a transit peptide, especially a plastidal transit petide in case in Table I, application no. 3, in column 6 in the same line as SEQ ID NO. 44196 is depicted, plastidic is mentioned, or a mitochondrial transit peptide in case in Table I, application no. 3, in column 6 in the same line as SEQ ID NO. 44196 is depicted, mitochondrial is mentioned; which is operable linked, too.

[27983] In another embodiment thereof the expression cassette does not comprise an additional transit peptide in case in Table I, application no. 3, in column 6 in the same line as SEQ ID NO. 44196 is depicted, non-targeted is mentioned.

[27984] In an embodiment the present invention relates to an expresssion cassette comprising a) a promoter, preferably a promoter selected from the group consisting of Big35S, PCUbi, Super and USP, in particular p-Super; and b) the nucleic acid SEQ ID NO. 83821, or a homolog or fragment thereof, or a homolog thereof being depicted in Table I, application no. 3, column 8, in the same line as SEQ ID NO. 83821, preferably the coding region thereof, a homolog or a fragment thereof; which are operable linked.

[27985] In an embodiment thereof the expression cassette comprises in addition c) a nucleic acid molecule encoding a transit peptide, especially a plastidal transit petide in case in Table I, application no. 3, in column 6 in the same line as SEQ ID NO. 83821 is depicted, plastidic is mentioned, or a mitochondrial transit peptide in case in Table I, application no. 3, in column 6 in the same line as SEQ ID NO. 83821 is depicted, mitochondrial is mentioned; which is operable linked, too.

[27986] In another embodiment thereof the expression cassette does not comprise an additional transit peptide in case in Table I, application no. 3, in column 6 in the same line as SEQ ID NO. 83821 is depicted, non-targeted is mentioned.

[27987] In an embodiment the present invention relates to an expresssion cassette comprising a) a promoter, preferably a promoter selected from the group consisting of Big35S, PCUbi, Super and USP, in particular p-Super; and b) the nucleic acid SEQ ID NO. 44372, or a homolog or fragment thereof, or a homolog thereof being depicted in Table I, application no. 3, column 8, in the same line as SEQ ID NO. 44372, preferably the coding region thereof, a homolog or a fragment thereof; which are operable linked.

[27988] In an embodiment thereof the expression cassette comprises in addition c) a nucleic acid molecule encoding a transit peptide, especially a plastidal transit petide in case in Table I, application no. 3, in column 6 in the same line as SEQ ID NO. 44372 is depicted, plastidic is mentioned, or a mitochondrial transit peptide in case in Table I, application no. 3, in column 6 in the same line as SEQ ID NO. 44372 is depicted, mitochondrial is mentioned; which is operable linked, too.

[27989] In another embodiment thereof the expression cassette does not comprise an additional transit peptide in case in Table I, application no. 3, in column 6 in the same line as SEQ ID NO. 44372 is depicted, non-targeted is mentioned.

[27990] In an embodiment the present invention relates to an expresssion cassette comprising a) a promoter, preferably a promoter selected from the group consisting of Big35S, PCUbi, Super and USP, in particular p-USP; and b) the nucleic acid SEQ ID NO. 44378, or a homolog or fragment thereof, or a homolog thereof being depicted in Table I, application no. 3, column 8, in the same line as SEQ ID NO. 44378, preferably the coding region thereof, a homolog or a fragment thereof; which are operable linked.

[27991] In an embodiment thereof the expression cassette comprises in addition c) a nucleic acid molecule encoding a transit peptide, especially a plastidal transit petide in case in Table I, application no. 3, in column 6 in the same line as SEQ ID NO. 44378 is depicted, plastidic is mentioned, or a mitochondrial transit peptide in case in Table I, application no. 3, in column 6 in the same line as SEQ ID NO. 44378 is depicted, mitochondrial is mentioned; which is operable linked, too.

[27992] In another embodiment thereof the expression cassette does not comprise an additional transit peptide in case in Table I, application no. 3, in column 6 in the same line as SEQ ID NO. 44378 is depicted, non-targeted is mentioned.

[27993] In an embodiment the present invention relates to an expresssion cassette comprising a) a promoter, preferably a promoter selected from the group consisting of Big35S, PCUbi, Super and USP, in particular p-USP; and b) the nucleic acid SEQ ID NO. 83835, or a homolog or fragment thereof, or a homolog thereof being depicted in Table I, application no. 3, column 8, in the same line as SEQ ID NO. 83835, preferably the coding region thereof, a homolog or a fragment thereof; which are operable linked.

[27994] In an embodiment thereof the expression cassette comprises in addition c) a nucleic acid molecule encoding a transit peptide, especially a plastidal transit petide in case in Table I, application no. 3, in column 6 in the same line as SEQ ID NO. 83835 is depicted, plastidic is mentioned, or a mitochondrial transit peptide in case in Table I, application no. 3, in column 6 in the same line as SEQ ID NO. 83835 is depicted, mitochondrial is mentioned; which is operable linked, too.

[27995] In another embodiment thereof the expression cassette does not comprise an additional transit peptide in case in Table I, application no. 3, in column 6 in the same line as SEQ ID NO. 83835 is depicted, non-targeted is mentioned.

[27996] In an embodiment the present invention relates to an expresssion cassette comprising a) a promoter, preferably a promoter selected from the group consisting of Big35S, PCUbi, Super and USP, in particular p-Super; and b) the nucleic acid SEQ ID NO. 10740, or a homolog or fragment thereof, or a homolog thereof being depicted in Table I, application no. 3, column 8, in the same line as SEQ ID NO. 10740, preferably the coding region thereof, a homolog or a fragment thereof; which are operable linked.

[27997] In an embodiment thereof the expression cassette comprises in addition c) a nucleic acid molecule encoding a transit peptide, especially a plastidal transit petide in case in Table I, application no. 3, in column 6 in the same line as SEQ ID NO. 10740 is depicted, plastidic is mentioned, or a mitochondrial transit peptide in case in Table I, application no. 3, in column 6 in the same line as SEQ ID NO. 10740 is depicted, mitochondrial is mentioned; which is operable linked, too.

[27998] In another embodiment thereof the expression cassette does not comprise an additional transit peptide in case in Table I, application no. 3, in column 6 in the same line as SEQ ID NO. 10740 is depicted, non-targeted is mentioned.

[27999] In an embodiment the present invention relates to an expresssion cassette comprising a) a promoter, preferably a promoter selected from the group consisting of Big35S, PCUbi, Super and USP, in particular p-Super; and b) the nucleic acid SEQ ID NO. 44609, or a homolog or fragment thereof, or a homolog thereof being depicted in Table I, application no. 3, column 8, in the same line as SEQ ID NO. 44609, preferably the coding region thereof, a homolog or a fragment thereof; which are operable linked.

[28000] In an embodiment thereof the expression cassette comprises in addition c) a nucleic acid molecule encoding a transit peptide, especially a plastidal transit petide in case in Table I, application no. 3, in column 6 in the same line as SEQ ID NO. 44609 is depicted, plastidic is mentioned, or a mitochondrial transit peptide in case in Table I, application no. 3, in column 6 in the same line as SEQ ID NO. 44609 is depicted, mitochondrial is mentioned; which is operable linked, too.

[28001] In another embodiment thereof the expression cassette does not comprise an additional transit peptide in case in Table I, application no. 3, in column 6 in the same line as SEQ ID NO. 44609 is depicted, non-targeted is mentioned.

[28002] In an embodiment the present invention relates to an expresssion cassette comprising a) a promoter, preferably a promoter selected from the group consisting of Big35S, PCUbi, Super and USP, in particular p-Super; and b) the nucleic acid SEQ ID NO. 45321, or a homolog or fragment thereof, or a homolog thereof being depicted in Table I, application no. 3, column 8, in the same line as SEQ ID NO. 45321, preferably the coding region thereof, a homolog or a fragment thereof; which are operable linked.

[28003] In an embodiment thereof the expression cassette comprises in addition c) a nucleic acid molecule encoding a transit peptide, especially a plastidal transit petide in case in Table I, application no. 3, in column 6 in the same line as SEQ ID NO. 45321 is depicted, plastidic is mentioned, or a mitochondrial transit peptide in case in Table I, application no. 3, in column 6 in the same line as SEQ ID NO. 45321 is depicted, mitochondrial is mentioned; which is operable linked, too.

[28004] In another embodiment thereof the expression cassette does not comprise an additional transit peptide in case in Table I, application no. 3, in column 6 in the same line as SEQ ID NO. 45321 is depicted, non-targeted is mentioned.

[28005] In an embodiment the present invention relates to an expresssion cassette comprising a) a promoter, preferably a promoter selected from the group consisting of Big35S, PCUbi, Super and USP, in particular p-Super; and b) the nucleic acid SEQ ID NO. 45757, or a homolog or fragment thereof, or a homolog thereof being depicted in Table I, application no. 3, column 8, in the same line as SEQ ID NO. 45757, preferably the coding region thereof, a homolog or a fragment thereof; which are operable linked.

[28006] In an embodiment thereof the expression cassette comprises in addition c) a nucleic acid molecule encoding a transit peptide, especially a plastidal transit petide in case in Table I, application no. 3, in column 6 in the same line as SEQ ID NO. 45757 is depicted, plastidic is mentioned, or a mitochondrial transit peptide in case in Table I, application no. 3, in column 6 in the same line as SEQ ID NO. 45757 is depicted, mitochondrial is mentioned; which is operable linked, too.

[28007] In another embodiment thereof the expression cassette does not comprise an additional transit peptide in case in Table I, application no. 3, in column 6 in the same line as SEQ ID NO. 45757 is depicted, non-targeted is mentioned.

[28008] In an embodiment the present invention relates to an expresssion cassette comprising a) a promoter, preferably a promoter selected from the group consisting of Big35S, PCUbi, Super and USP, in particular p-PcUBI; and b) the nucleic acid SEQ ID NO. 84079, or a homolog or fragment thereof, or a homolog thereof being depicted in Table I, application no. 3, column 8, in the same line as SEQ ID NO. 84079, preferably the coding region thereof, a homolog or a fragment thereof; which are operable linked.

[28009] In an embodiment thereof the expression cassette comprises in addition c) a nucleic acid molecule encoding a transit peptide, especially a plastidal transit petide in case in Table I, application no. 3, in column 6 in the same line as SEQ ID NO. 84079 is depicted, plastidic is mentioned, or a mitochondrial transit peptide in case in Table I, application no. 3, in column 6 in the same line as SEQ ID NO. 84079 is depicted, mitochondrial is mentioned; which is operable linked, too.

[28010] In another embodiment thereof the expression cassette does not comprise an additional transit peptide in case in Table I, application no. 3, in column 6 in the same line as SEQ ID NO. 84079 is depicted, non-targeted is mentioned.

[28011] In an embodiment the present invention relates to an expresssion cassette comprising a) a promoter, preferably a promoter selected from the group consisting of Big35S, PCUbi, Super and USP, in particular p-PcUBI; and b) the nucleic acid SEQ ID NO. 45795, or a homolog or fragment thereof, or a homolog thereof being depicted in Table I, application no. 3, column 8, in the same line as SEQ ID NO. 45795, preferably the coding region thereof, a homolog or a fragment thereof; which are operable linked.

[28012] In an embodiment thereof the expression cassette comprises in addition c) a nucleic acid molecule encoding a transit peptide, especially a plastidal transit petide in case in Table I, application no. 3, in column 6 in the same line as SEQ ID NO. 45795 is depicted, plastidic is mentioned, or a mitochondrial transit peptide in case in Table I, application no. 3, in column 6 in the same line as SEQ ID NO. 45795 is depicted, mitochondrial is mentioned; which is operable linked, too.

[28013] In another embodiment thereof the expression cassette does not comprise an additional transit peptide in case in Table I, application no. 3, in column 6 in the same line as SEQ ID NO. 45795 is depicted, non-targeted is mentioned.

[28014] In an embodiment the present invention relates to an expresssion cassette comprising a) a promoter, preferably a promoter selected from the group consisting of Big35S, PCUbi, Super and USP, in particular p-PcUBI; and b) the nucleic acid SEQ ID NO. 10811, or a homolog or fragment thereof, or a homolog thereof being depicted in Table I, application no. 3, column 8, in the same line as SEQ ID NO. 10811, preferably the coding region thereof, a homolog or a fragment thereof; which are operable linked.

[28015] In an embodiment thereof the expression cassette comprises in addition c) a nucleic acid molecule encoding a transit peptide, especially a plastidal transit petide in case in Table I, application no. 3, in column 6 in the same line as SEQ ID NO. 10811 is depicted, plastidic is mentioned, or a mitochondrial transit peptide in case in Table I, application no. 3, in column 6 in the same line as SEQ ID NO. 10811 is depicted, mitochondrial is mentioned; which is operable linked, too.

[28016] In another embodiment thereof the expression cassette does not comprise an additional transit peptide in case in Table I, application no. 3, in column 6 in the same line as SEQ ID NO. 10811 is depicted, non-targeted is mentioned.

[28017] In an embodiment the present invention relates to an expresssion cassette comprising a) a promoter, preferably a promoter selected from the group consisting of Big35S, PCUbi, Super and USP, in particular p-PcUBI; and b) the nucleic acid SEQ ID NO. 45897, or a homolog or fragment thereof, or a homolog thereof being depicted in Table I, application no. 3, column 8, in the same line as SEQ ID NO. 45897, preferably the coding region thereof, a homolog or a fragment thereof; which are operable linked.

[28018] In an embodiment thereof the expression cassette comprises in addition c) a nucleic acid molecule encoding a transit peptide, especially a plastidal transit petide in case in Table I, application no. 3, in column 6 in the same line as SEQ ID NO. 45897 is depicted, plastidic is mentioned, or a mitochondrial transit peptide in case in Table I, application no. 3, in column 6 in the same line as SEQ ID NO. 45897 is depicted, mitochondrial is mentioned; which is operable linked, too.

[28019] In another embodiment thereof the expression cassette does not comprise an additional transit peptide in case in Table I, application no. 3, in column 6 in the same line as SEQ ID NO. 45897 is depicted, non-targeted is mentioned.

[28020] In an embodiment the present invention relates to an expresssion cassette comprising a) a promoter, preferably a promoter selected from the group consisting of Big35S, PCUbi, Super and USP, in particular p-PcUBI; and b) the nucleic acid SEQ ID NO. 46405, or a homolog or fragment thereof, or a homolog thereof being depicted in Table I, application no. 3, column 8, in the same line as SEQ ID NO. 46405, preferably the coding region thereof, a homolog or a fragment thereof; which are operable linked.

[28021] In an embodiment thereof the expression cassette comprises in addition c) a nucleic acid molecule encoding a transit peptide, especially a plastidal transit petide in case in Table I, application no. 3, in column 6 in the same line as SEQ ID NO. 46405 is depicted, plastidic is mentioned, or a mitochondrial transit peptide in case in Table I, application no. 3, in column 6 in the same line as SEQ ID NO. 46405 is depicted, mitochondrial is mentioned; which is operable linked, too.

[28022] In another embodiment thereof the expression cassette does not comprise an additional transit peptide in case in Table I, application no. 3, in column 6 in the same line as SEQ ID NO. 46405 is depicted, non-targeted is mentioned.

[28023] In an embodiment the present invention relates to an expresssion cassette comprising a) a promoter, preferably a promoter selected from the group consisting of Big35S, PCUbi, Super and USP, in particular p-PcUBI; and b) the nucleic acid SEQ ID NO. 46515, or a homolog or fragment thereof, or a homolog thereof being depicted in Table I, application no. 3, column 8, in the same line as SEQ ID NO. 46515, preferably the coding region thereof, a homolog or a fragment thereof; which are operable linked.

[28024] In an embodiment thereof the expression cassette comprises in addition c) a nucleic acid molecule encoding a transit peptide, especially a plastidal transit petide in case in Table I, application no. 3, in column 6 in the same line as SEQ ID NO. 46515 is depicted, plastidic is mentioned, or a mitochondrial transit peptide in case in Table I, application no. 3, in column 6 in the same line as SEQ ID NO. 46515 is depicted, mitochondrial is mentioned; which is operable linked, too.

[28025] In another embodiment thereof the expression cassette does not comprise an additional transit peptide in case in Table I, application no. 3, in column 6 in the same line as SEQ ID NO. 46515 is depicted, non-targeted is mentioned.

[28026] In an embodiment the present invention relates to an expresssion cassette comprising a) a promoter, preferably a promoter selected from the group consisting of Big35S, PCUbi, Super and USP, in particular p-PcUBI; and b) the nucleic acid SEQ ID NO. 84198, or a homolog or fragment thereof, or a homolog thereof being depicted in Table I, application no. 3, column 8, in the same line as SEQ ID NO. 84198, preferably the coding region thereof, a homolog or a fragment thereof; which are operable linked.

[28027] In an embodiment thereof the expression cassette comprises in addition c) a nucleic acid molecule encoding a transit peptide, especially a plastidal transit petide in case in Table I, application no. 3, in column 6 in the same line as SEQ ID NO. 84198 is depicted, plastidic is mentioned, or a mitochondrial transit peptide in case in Table I, application no. 3, in column 6 in the same line as SEQ ID NO. 84198 is depicted, mitochondrial is mentioned; which is operable linked, too.

[28028] In another embodiment thereof the expression cassette does not comprise an additional transit peptide in case in Table I, application no. 3, in column 6 in the same line as SEQ ID NO. 84198 is depicted, non-targeted is mentioned.

[28029] In an embodiment the present invention relates to an expresssion cassette comprising a) a promoter, preferably a promoter selected from the group consisting of Big35S, PCUbi, Super and USP, in particular p-PcUBI; and b) the nucleic acid SEQ ID NO. 46850, or a homolog or fragment thereof, or a homolog thereof being depicted in Table I, application no. 3, column 8, in the same line as SEQ ID NO. 46850, preferably the coding region thereof, a homolog or a fragment thereof; which are operable linked.

[28030] In an embodiment thereof the expression cassette comprises in addition c) a nucleic acid molecule encoding a transit peptide, especially a plastidal transit petide in case in Table I, application no. 3, in column 6 in the same line as SEQ ID NO. 46850 is depicted, plastidic is mentioned, or a mitochondrial transit peptide in case in Table I, application no. 3, in column 6 in the same line as SEQ ID NO. 46850 is depicted, mitochondrial is mentioned; which is operable linked, too.

[28031] In another embodiment thereof the expression cassette does not comprise an additional transit peptide in case in Table I, application no. 3, in column 6 in the same line as SEQ ID NO. 46850 is depicted, non-targeted is mentioned.

[28032] In an embodiment the present invention relates to an expresssion cassette comprising a) a promoter, preferably a promoter selected from the group consisting of Big35S, PCUbi, Super and USP, in particular p-PcUBI; and b) the nucleic acid SEQ ID NO. 47159, or a homolog or fragment thereof, or a homolog thereof being depicted in Table I, application no. 3, column 8, in the same line as SEQ ID NO. 47159, preferably the coding region thereof, a homolog or a fragment thereof; which are operable linked.

[28033] In an embodiment thereof the expression cassette comprises in addition c) a nucleic acid molecule encoding a transit peptide, especially a plastidal transit petide in case in Table I, application no. 3, in column 6 in the same line as SEQ ID NO. 47159 is depicted, plastidic is mentioned, or a mitochondrial transit peptide in case in Table I, application no. 3, in column 6 in the same line as SEQ ID NO. 47159 is depicted, mitochondrial is mentioned; which is operable linked, too.

[28034] In another embodiment thereof the expression cassette does not comprise an additional transit peptide in case in Table I, application no. 3, in column 6 in the same line as SEQ ID NO. 47159 is depicted, non-targeted is mentioned.

[28035] In an embodiment the present invention relates to an expresssion cassette comprising a) a promoter, preferably a promoter selected from the group consisting of Big35S, PCUbi, Super and USP, in particular p-Super; and b) the nucleic acid SEQ ID NO. 59851, or a homolog or fragment thereof, or a homolog thereof being depicted in Table I, application no. 3, column 8, in the same line as SEQ ID NO. 59851, preferably the coding region thereof, a homolog or a fragment thereof; which are operable linked.

[28036] In an embodiment thereof the expression cassette comprises in addition c) a nucleic acid molecule encoding a transit peptide, especially a plastidal transit petide in case in Table I, application no. 3, in column 6 in the same line as SEQ ID NO. 59851 is depicted, plastidic is mentioned, or a mitochondrial transit peptide in case in Table I, application no. 3, in column 6 in the same line as SEQ ID NO. 59851 is depicted, mitochondrial is mentioned; which is operable linked, too.

[28037] In another embodiment thereof the expression cassette does not comprise an additional transit peptide in case in Table I, application no. 3, in column 6 in the same line as SEQ ID NO. 59851 is depicted, non-targeted is mentioned.

[28038] In an embodiment the present invention relates to an expresssion cassette comprising a) a promoter, preferably a promoter selected from the group consisting of Big35S, PCUbi, Super and USP, in particular p-PcUBI; and b) the nucleic acid SEQ ID NO. 47566, or a homolog or fragment thereof, or a homolog thereof being depicted in Table I, application no. 3, column 8, in the same line as SEQ ID NO. 47566, preferably the coding region thereof, a homolog or a fragment thereof; which are operable linked.

[28039] In an embodiment thereof the expression cassette comprises in addition c) a nucleic acid molecule encoding a transit peptide, especially a plastidal transit petide in case in Table I, application no. 3, in column 6 in the same line as SEQ ID NO. 47566 is depicted, plastidic is mentioned, or a mitochondrial transit peptide in case in Table I, application no. 3, in column 6 in the same line as SEQ ID NO. 47566 is depicted, mitochondrial is mentioned; which is operable linked, too.

[28040] In another embodiment thereof the expression cassette does not comprise an additional transit peptide in case in Table I, application no. 3, in column 6 in the same line as SEQ ID NO. 47566 is depicted, non-targeted is mentioned.

[28041] In an embodiment the present invention relates to an expresssion cassette comprising a) a promoter, preferably a promoter selected from the group consisting of Big35S, PCUbi, Super and USP, in particular p-PcUBI; and b) the nucleic acid SEQ ID NO. 84265, or a homolog or fragment thereof, or a homolog thereof being depicted in Table I, application no. 3, column 8, in the same line as SEQ ID NO. 84265, preferably the coding region thereof, a homolog or a fragment thereof; which are operable linked.

[28042] In an embodiment thereof the expression cassette comprises in addition c) a nucleic acid molecule encoding a transit peptide, especially a plastidal transit petide in case in Table I, application no. 3, in column 6 in the same line as SEQ ID NO. 84265 is depicted, plastidic is mentioned, or a mitochondrial transit peptide in case in Table I, application no. 3, in column 6 in the same line as SEQ ID NO. 84265 is depicted, mitochondrial is mentioned; which is operable linked, too.

[28043] In another embodiment thereof the expression cassette does not comprise an additional transit peptide in case in Table I, application no. 3, in column 6 in the same line as SEQ ID NO. 84265 is depicted, non-targeted is mentioned.

[28044] In an embodiment the present invention relates to an expresssion cassette comprising a) a promoter, preferably a promoter selected from the group consisting of Big35S, PCUbi, Super and USP, in particular p-PcUBI; and b) the nucleic acid SEQ ID NO. 84441, or a homolog or fragment thereof, or a homolog thereof being depicted in Table I, application no. 3, column 8, in the same line as SEQ ID NO. 84441, preferably the coding region thereof, a homolog or a fragment thereof; which are operable linked.

[28045] In an embodiment thereof the expression cassette comprises in addition c) a nucleic acid molecule encoding a transit peptide, especially a plastidal transit petide in case in Table I, application no. 3, in column 6 in the same line as SEQ ID NO. 84441 is depicted, plastidic is mentioned, or a mitochondrial transit peptide in case in Table I, application no. 3, in column 6 in the same line as SEQ ID NO. 84441 is depicted, mitochondrial is mentioned; which is operable linked, too.

[28046] In another embodiment thereof the expression cassette does not comprise an additional transit peptide in case in Table I, application no. 3, in column 6 in the same line as SEQ ID NO. 84441 is depicted, non-targeted is mentioned.

[28047] In an embodiment the present invention relates to an expresssion cassette comprising a) a promoter, preferably a promoter selected from the group consisting of Big35S, PCUbi, Super and USP, in particular p-PcUBI; and b) the nucleic acid SEQ ID NO. 49143, or a homolog or fragment thereof, or a homolog thereof being depicted in Table I, application no. 3, column 8, in the same line as SEQ ID NO. 49143, preferably the coding region thereof, a homolog or a fragment thereof; which are operable linked.

[28048] In an embodiment thereof the expression cassette comprises in addition c) a nucleic acid molecule encoding a transit peptide, especially a plastidal transit petide in case in Table I, application no. 3, in column 6 in the same line as SEQ ID NO. 49143 is depicted, plastidic is mentioned, or a mitochondrial transit peptide in case in Table I, application no. 3, in column 6 in the same line as SEQ ID NO. 49143 is depicted, mitochondrial is mentioned; which is operable linked, too.

[28049] In another embodiment thereof the expression cassette does not comprise an additional transit peptide in case in Table I, application no. 3, in column 6 in the same line as SEQ ID NO. 49143 is depicted, non-targeted is mentioned.

[28050] In an embodiment the present invention relates to an expresssion cassette comprising a) a promoter, preferably a promoter selected from the group consisting of Big35S, PCUbi, Super and USP, in particular p-PcUBI; and b) the nucleic acid SEQ ID NO. 84865, or a homolog or fragment thereof, or a homolog thereof being depicted in Table I, application no. 3, column 8, in the same line as SEQ ID NO. 84865, preferably the coding region thereof, a homolog or a fragment thereof; which are operable linked.

[28051] In an embodiment thereof the expression cassette comprises in addition c) a nucleic acid molecule encoding a transit peptide, especially a plastidal transit petide in case in Table I, application no. 3, in column 6 in the same line as SEQ ID NO. 84865 is depicted, plastidic is mentioned, or a mitochondrial transit peptide in case in Table I, application no. 3, in column 6 in the same line as SEQ ID NO. 84865 is depicted, mitochondrial is mentioned; which is operable linked, too.

[28052] In another embodiment thereof the expression cassette does not comprise an additional transit peptide in case in Table I, application no. 3, in column 6 in the same line as SEQ ID NO. 84865 is depicted, non-targeted is mentioned.

[28053] In an embodiment the present invention relates to an expresssion cassette comprising a) a promoter, preferably a promoter selected from the group consisting of Big35S, PCUbi, Super and USP, in particular p-PcUBI; and b) the nucleic acid SEQ ID NO. 84869, or a homolog or fragment thereof, or a homolog thereof being depicted in Table I, application no. 3, column 8, in the same line as SEQ ID NO. 84869, preferably the coding region thereof, a homolog or a fragment thereof; which are operable linked.

[28054] In an embodiment thereof the expression cassette comprises in addition c) a nucleic acid molecule encoding a transit peptide, especially a plastidal transit petide in case in Table I, application no. 3, in column 6 in the same line as SEQ ID NO. 84869 is depicted, plastidic is mentioned, or a mitochondrial transit peptide in case in Table I, application no. 3, in column 6 in the same line as SEQ ID NO. 84869 is depicted, mitochondrial is mentioned; which is operable linked, too.

[28055] In another embodiment thereof the expression cassette does not comprise an additional transit peptide in case in Table I, application no. 3, in column 6 in the same line as SEQ ID NO. 84869 is depicted, non-targeted is mentioned.

[28056] In an embodiment the present invention relates to an expresssion cassette comprising a) a promoter, preferably a promoter selected from the group consisting of Big35S, PCUbi, Super and USP, in particular p-PcUBI; and b) the nucleic acid SEQ ID NO. 50104, or a homolog or fragment thereof, or a homolog thereof being depicted in Table I, application no. 3, column 8, in the same line as SEQ ID NO. 50104, preferably the coding region thereof, a homolog or a fragment thereof; which are operable linked.

[28057] In an embodiment thereof the expression cassette comprises in addition c) a nucleic acid molecule encoding a transit peptide, especially a plastidal transit petide in case in Table I, application no. 3, in column 6 in the same line as SEQ ID NO. 50104 is depicted, plastidic is mentioned, or a mitochondrial transit peptide in case in Table I, application no. 3, in column 6 in the same line as SEQ ID NO. 50104 is depicted, mitochondrial is mentioned; which is operable linked, too.

[28058] In another embodiment thereof the expression cassette does not comprise an additional transit peptide in case in Table I, application no. 3, in column 6 in the same line as SEQ ID NO. 50104 is depicted, non-targeted is mentioned.

[28059] In an embodiment the present invention relates to an expresssion cassette comprising a) a promoter, preferably a promoter selected from the group consisting of Big35S, PCUbi, Super and USP, in particular p-PcUBI; and b) the nucleic acid SEQ ID NO. 85510, or a homolog or fragment thereof, or a homolog thereof being depicted in Table I, application no. 3, column 8, in the same line as SEQ ID NO. 85510, preferably the coding region thereof, a homolog or a fragment thereof; which are operable linked.

[28060] In an embodiment thereof the expression cassette comprises in addition c) a nucleic acid molecule encoding a transit peptide, especially a plastidal transit petide in case in Table I, application no. 3, in column 6 in the same line as SEQ ID NO. 85510 is depicted, plastidic is mentioned, or a mitochondrial transit peptide in case in Table I, application no. 3, in column 6 in the same line as SEQ ID NO. 85510 is depicted, mitochondrial is mentioned; which is operable linked, too.

[28061] In another embodiment thereof the expression cassette does not comprise an additional transit peptide in case in Table I, application no. 3, in column 6 in the same line as SEQ ID NO. 85510 is depicted, non-targeted is mentioned.

[28062] In an embodiment the present invention relates to an expresssion cassette comprising a) a promoter, preferably a promoter selected from the group consisting of Big35S, PCUbi, Super and USP, in particular p-PcUBI; and b) the nucleic acid SEQ ID NO. 50950, or a homolog or fragment thereof, or a homolog thereof being depicted in Table I, application no. 3, column 8, in the same line as SEQ ID NO. 50950, preferably the coding region thereof, a homolog or a fragment thereof; which are operable linked.

[28063] In an embodiment thereof the expression cassette comprises in addition c) a nucleic acid molecule encoding a transit peptide, especially a plastidal transit petide in case in Table I, application no. 3, in column 6 in the same line as SEQ ID NO. 50950 is depicted, plastidic is mentioned, or a mitochondrial transit peptide in case in Table I, application no. 3, in column 6 in the same line as SEQ ID NO. 50950 is depicted, mitochondrial is mentioned; which is operable linked, too.

[28064] In another embodiment thereof the expression cassette does not comprise an additional transit peptide in case in Table I, application no. 3, in column 6 in the same line as SEQ ID NO. 50950 is depicted, non-targeted is mentioned.

[28065] In an embodiment the present invention relates to an expresssion cassette comprising a) a promoter, preferably a promoter selected from the group consisting of Big35S, PCUbi, Super and USP, in particular p-PcUBI; and b) the nucleic acid SEQ ID NO. 51198, or a homolog or fragment thereof, or a homolog thereof being depicted in Table I, application no. 3, column 8, in the same line as SEQ ID NO. 51198, preferably the coding region thereof, a homolog or a fragment thereof; which are operable linked.

[28066] In an embodiment thereof the expression cassette comprises in addition c) a nucleic acid molecule encoding a transit peptide, especially a plastidal transit petide in case in Table I, application no. 3, in column 6 in the same line as SEQ ID NO. 51198 is depicted, plastidic is mentioned, or a mitochondrial transit peptide in case in Table I, application no. 3, in column 6 in the same line as SEQ ID NO. 51198 is depicted, mitochondrial is mentioned; which is operable linked, too.

[28067] In another embodiment thereof the expression cassette does not comprise an additional transit peptide in case in Table I, application no. 3, in column 6 in the same line as SEQ ID NO. 51198 is depicted, non-targeted is mentioned.

[28068] In an embodiment the present invention relates to an expresssion cassette comprising a) a promoter, preferably a promoter selected from the group consisting of Big35S, PCUbi, Super and USP, in particular p-PcUBI; and b) the nucleic acid SEQ ID NO. 51268, or a homolog or fragment thereof, or a homolog thereof being depicted in Table I, application no. 3, column 8, in the same line as SEQ ID NO. 51268, preferably the coding region thereof, a homolog or a fragment thereof; which are operable linked.

[28069] In an embodiment thereof the expression cassette comprises in addition c) a nucleic acid molecule encoding a transit peptide, especially a plastidal transit petide in case in Table I, application no. 3, in column 6 in the same line as SEQ ID NO. 51268 is depicted, plastidic is mentioned, or a mitochondrial transit peptide in case in Table I, application no. 3, in column 6 in the same line as SEQ ID NO. 51268 is depicted, mitochondrial is mentioned; which is operable linked, too.

[28070] In another embodiment thereof the expression cassette does not comprise an additional transit peptide in case in Table I, application no. 3, in column 6 in the same line as SEQ ID NO. 51268 is depicted, non-targeted is mentioned.

[28071] In an embodiment the present invention relates to an expresssion cassette comprising a) a promoter, preferably a promoter selected from the group consisting of Big35S, PCUbi, Super and USP, in particular p-PcUBI; and b) the nucleic acid SEQ ID NO. 52246, or a homolog or fragment thereof, or a homolog thereof being depicted in Table I, application no. 3, column 8, in the same line as SEQ ID NO. 52246, preferably the coding region thereof, a homolog or a fragment thereof; which are operable linked.

[28072] In an embodiment thereof the expression cassette comprises in addition c) a nucleic acid molecule encoding a transit peptide, especially a plastidal transit petide in case in Table I, application no. 3, in column 6 in the same line as SEQ ID NO. 52246 is depicted, plastidic is mentioned, or a mitochondrial transit peptide in case in Table I, application no. 3, in column 6 in the same line as SEQ ID NO. 52246 is depicted, mitochondrial is mentioned; which is operable linked, too.

[28073] In another embodiment thereof the expression cassette does not comprise an additional transit peptide in case in Table I, application no. 3, in column 6 in the same line as SEQ ID NO. 52246 is depicted, non-targeted is mentioned.

[28074] In an embodiment the present invention relates to an expresssion cassette comprising a) a promoter, preferably a promoter selected from the group consisting of Big35S, PCUbi, Super and USP, in particular p-PcUBI; and b) the nucleic acid SEQ ID NO. 52364, or a homolog or fragment thereof, or a homolog thereof being depicted in Table I, application no. 3, column 8, in the same line as SEQ ID NO. 52364, preferably the coding region thereof, a homolog or a fragment thereof; which are operable linked.

[28075] In an embodiment thereof the expression cassette comprises in addition c) a nucleic acid molecule encoding a transit peptide, especially a plastidal transit petide in case in Table I, application no. 3, in column 6 in the same line as SEQ ID NO. 52364 is depicted, plastidic is mentioned, or a mitochondrial transit peptide in case in Table I, application no. 3, in column 6 in the same line as SEQ ID NO. 52364 is depicted, mitochondrial is mentioned; which is operable linked, too.

[28076] In another embodiment thereof the expression cassette does not comprise an additional transit peptide in case in Table I, application no. 3, in column 6 in the same line as SEQ ID NO. 52364 is depicted, non-targeted is mentioned.

[28077] In an embodiment the present invention relates to an expresssion cassette comprising a) a promoter, preferably a promoter selected from the group consisting of Big35S, PCUbi, Super and USP, in particular p-PcUBI; and b) the nucleic acid SEQ ID NO. 52634, or a homolog or fragment thereof, or a homolog thereof being depicted in Table I, application no. 3, column 8, in the same line as SEQ ID NO. 52634, preferably the coding region thereof, a homolog or a fragment thereof; which are operable linked.

[28078] In an embodiment thereof the expression cassette comprises in addition c) a nucleic acid molecule encoding a transit peptide, especially a plastidal transit petide in case in Table I, application no. 3, in column 6 in the same line as SEQ ID NO. 52634 is depicted, plastidic is mentioned, or a mitochondrial transit peptide in case in Table I, application no. 3, in column 6 in the same line as SEQ ID NO. 52634 is depicted, mitochondrial is mentioned; which is operable linked, too.

[28079] In another embodiment thereof the expression cassette does not comprise an additional transit peptide in case in Table I, application no. 3, in column 6 in the same line as SEQ ID NO. 52634 is depicted, non-targeted is mentioned.

[28080] In an embodiment the present invention relates to an expresssion cassette comprising a) a promoter, preferably a promoter selected from the group consisting of Big35S, PCUbi, Super and USP, in particular p-PcUBI; and b) the nucleic acid SEQ ID NO. 85723, or a homolog or fragment thereof, or a homolog thereof being depicted in Table I, application no. 3, column 8, in the same line as SEQ ID NO. 85723, preferably the coding region thereof, a homolog or a fragment thereof; which are operable linked.

[28081] In an embodiment thereof the expression cassette comprises in addition c) a nucleic acid molecule encoding a transit peptide, especially a plastidal transit petide in case in Table I, application no. 3, in column 6 in the same line as SEQ ID NO. 85723 is depicted, plastidic is mentioned, or a mitochondrial transit peptide in case in Table I, application no. 3, in column 6 in the same line as SEQ ID NO. 85723 is depicted, mitochondrial is mentioned; which is operable linked, too.

[28082] In another embodiment thereof the expression cassette does not comprise an additional transit peptide in case in Table I, application no. 3, in column 6 in the same line as SEQ ID NO. 85723 is depicted, non-targeted is mentioned.

[28083] In an embodiment the present invention relates to an expresssion cassette comprising a) a promoter, preferably a promoter selected from the group consisting of Big35S, PCUbi, Super and USP, in particular p-PcUBI; and b) the nucleic acid SEQ ID NO. 52660, or a homolog or fragment thereof, or a homolog thereof being depicted in Table I, application no. 3, column 8, in the same line as SEQ ID NO. 52660, preferably the coding region thereof, a homolog or a fragment thereof; which are operable linked.

[28084] In an embodiment thereof the expression cassette comprises in addition c) a nucleic acid molecule encoding a transit peptide, especially a plastidal transit petide in case in Table I, application no. 3, in column 6 in the same line as SEQ ID NO. 52660 is depicted, plastidic is mentioned, or a mitochondrial transit peptide in case in Table I, application no. 3, in column 6 in the same line as SEQ ID NO. 52660 is depicted, mitochondrial is mentioned; which is operable linked, too.

[28085] In another embodiment thereof the expression cassette does not comprise an additional transit peptide in case in Table I, application no. 3, in column 6 in the same line as SEQ ID NO. 52660 is depicted, non-targeted is mentioned.

[28086] In an embodiment the present invention relates to an expresssion cassette comprising a) a promoter, preferably a promoter selected from the group consisting of Big35S, PCUbi, Super and USP, in particular p-PcUBI; and b) the nucleic acid SEQ ID NO. 11211, or a homolog or fragment thereof, or a homolog thereof being depicted in Table I, application no. 3, column 8, in the same line as SEQ ID NO. 11211, preferably the coding region thereof, a homolog or a fragment thereof; which are operable linked.

[28087] In an embodiment thereof the expression cassette comprises in addition c) a nucleic acid molecule encoding a transit peptide, especially a plastidal transit petide in case in Table I, application no. 3, in column 6 in the same line as SEQ ID NO. 11211 is depicted, plastidic is mentioned, or a mitochondrial transit peptide in case in Table I, application no. 3, in column 6 in the same line as SEQ ID NO. 11211 is depicted, mitochondrial is mentioned; which is operable linked, too.

[28088] In another embodiment thereof the expression cassette does not comprise an additional transit peptide in case in Table I, application no. 3, in column 6 in the same line as SEQ ID NO. 11211 is depicted, non-targeted is mentioned.

[28089] In an embodiment the present invention relates to an expresssion cassette comprising a) a promoter, preferably a promoter selected from the group consisting of Big35S, PCUbi, Super and USP, in particular p-PcUBI; and b) the nucleic acid SEQ ID NO. 53456, or a homolog or fragment thereof, or a homolog thereof being depicted in Table I, application no. 3, column 8, in the same line as SEQ ID NO. 53456, preferably the coding region thereof, a homolog or a fragment thereof; which are operable linked.

[28090] In an embodiment thereof the expression cassette comprises in addition c) a nucleic acid molecule encoding a transit peptide, especially a plastidal transit petide in case in Table I, application no. 3, in column 6 in the same line as SEQ ID NO. 53456 is depicted, plastidic is mentioned, or a mitochondrial transit peptide in case in Table I, application no. 3, in column 6 in the same line as SEQ ID NO. 53456 is depicted, mitochondrial is mentioned; which is operable linked, too.

[28091] In another embodiment thereof the expression cassette does not comprise an additional transit peptide in case in Table I, application no. 3, in column 6 in the same line as SEQ ID NO. 53456 is depicted, non-targeted is mentioned.

[28092] In an embodiment the present invention relates to an expresssion cassette comprising a) a promoter, preferably a promoter selected from the group consisting of Big35S, PCUbi, Super and USP, in particular p-PcUBI; and b) the nucleic acid SEQ ID NO. 53878, or a homolog or fragment thereof, or a homolog thereof being depicted in Table I, application no. 3, column 8, in the same line as SEQ ID NO. 53878, preferably the coding region thereof, a homolog or a fragment thereof; which are operable linked.

[28093] In an embodiment thereof the expression cassette comprises in addition c) a nucleic acid molecule encoding a transit peptide, especially a plastidal transit petide in case in Table I, application no. 3, in column 6 in the same line as SEQ ID NO. 53878 is depicted, plastidic is mentioned, or a mitochondrial transit peptide in case in Table I, application no. 3, in column 6 in the same line as SEQ ID NO. 53878 is depicted, mitochondrial is mentioned; which is operable linked, too.

[28094] In another embodiment thereof the expression cassette does not comprise an additional transit peptide in case in Table I, application no. 3, in column 6 in the same line as SEQ ID NO. 53878 is depicted, non-targeted is mentioned.

[28095] In an embodiment the present invention relates to an expresssion cassette comprising a) a promoter, preferably a promoter selected from the group consisting of Big35S, PCUbi, Super and USP, in particular p-PcUBI; and b) the nucleic acid SEQ ID NO. 54337, or a homolog or fragment thereof, or a homolog thereof being depicted in Table I, application no. 3, column 8, in the same line as SEQ ID NO. 54337, preferably the coding region thereof, a homolog or a fragment thereof; which are operable linked.

[28096] In an embodiment thereof the expression cassette comprises in addition c) a nucleic acid molecule encoding a transit peptide, especially a plastidal transit petide in case in Table I, application no. 3, in column 6 in the same line as SEQ ID NO. 54337 is depicted, plastidic is mentioned, or a mitochondrial transit peptide in case in Table I, application no. 3, in column 6 in the same line as SEQ ID NO. 54337 is depicted, mitochondrial is mentioned; which is operable linked, too.

[28097] In another embodiment thereof the expression cassette does not comprise an additional transit peptide in case in Table I, application no. 3, in column 6 in the same line as SEQ ID NO. 54337 is depicted, non-targeted is mentioned.

[28098] In an embodiment the present invention relates to an expresssion cassette comprising a) a promoter, preferably a promoter selected from the group consisting of Big35S, PCUbi, Super and USP, in particular p-PcUBI; and b) the nucleic acid SEQ ID NO. 54452, or a homolog or fragment thereof, or a homolog thereof being depicted in Table I, application no. 3, column 8, in the same line as SEQ ID NO. 54452, preferably the coding region thereof, a homolog or a fragment thereof; which are operable linked.

[28099] In an embodiment thereof the expression cassette comprises in addition c) a nucleic acid molecule encoding a transit peptide, especially a plastidal transit petide in case in Table I, application no. 3, in column 6 in the same line as SEQ ID NO. 54452 is depicted, plastidic is mentioned, or a mitochondrial transit peptide in case in Table I, application no. 3, in column 6 in the same line as SEQ ID NO. 54452 is depicted, mitochondrial is mentioned; which is operable linked, too.

[28100] In another embodiment thereof the expression cassette does not comprise an additional transit peptide in case in Table I, application no. 3, in column 6 in the same line as SEQ ID NO. 54452 is depicted, non-targeted is mentioned.

[28101] In an embodiment the present invention relates to an expresssion cassette comprising a) a promoter, preferably a promoter selected from the group consisting of Big35S, PCUbi, Super and USP, in particular p-PcUBI; and b) the nucleic acid SEQ ID NO. 11423, or a homolog or fragment thereof, or a homolog thereof being depicted in Table I, application no. 3, column 8, in the same line as SEQ ID NO. 11423, preferably the coding region thereof, a homolog or a fragment thereof; which are operable linked.

[28102] In an embodiment thereof the expression cassette comprises in addition c) a nucleic acid molecule encoding a transit peptide, especially a plastidal transit petide in case in Table I, application no. 3, in column 6 in the same line as SEQ ID NO. 11423 is depicted, plastidic is mentioned, or a mitochondrial transit peptide in case in Table I, application no. 3, in column 6 in the same line as SEQ ID NO. 11423 is depicted, mitochondrial is mentioned; which is operable linked, too.

[28103] In another embodiment thereof the expression cassette does not comprise an additional transit peptide in case in Table I, application no. 3, in column 6 in the same line as SEQ ID NO. 11423 is depicted, non-targeted is mentioned.

[28104] In an embodiment the present invention relates to an expresssion cassette comprising a) a promoter, preferably a promoter selected from the group consisting of Big35S, PCUbi, Super and USP, in particular p-PcUBI; and b) the nucleic acid SEQ ID NO. 54804, or a homolog or fragment thereof, or a homolog thereof being depicted in Table I, application no. 3, column 8, in the same line as SEQ ID NO. 54804, preferably the coding region thereof, a homolog or a fragment thereof; which are operable linked.

[28105] In an embodiment thereof the expression cassette comprises in addition c) a nucleic acid molecule encoding a transit peptide, especially a plastidal transit petide in case in Table I, application no. 3, in column 6 in the same line as SEQ ID NO. 54804 is depicted, plastidic is mentioned, or a mitochondrial transit peptide in case in Table I, application no. 3, in column 6 in the same line as SEQ ID NO. 54804 is depicted, mitochondrial is mentioned; which is operable linked, too.

[28106] In another embodiment thereof the expression cassette does not comprise an additional transit peptide in case in Table I, application no. 3, in column 6 in the same line as SEQ ID NO. 54804 is depicted, non-targeted is mentioned.

[28107] In an embodiment the present invention relates to an expresssion cassette comprising a) a promoter, preferably a promoter selected from the group consisting of Big35S, PCUbi, Super and USP, in particular p-PcUBI; and b) the nucleic acid SEQ ID NO. 85743, or a homolog or fragment thereof, or a homolog thereof being depicted in Table I, application no. 3, column 8, in the same line as SEQ ID NO. 85743, preferably the coding region thereof, a homolog or a fragment thereof; which are operable linked.

[28108] In an embodiment thereof the expression cassette comprises in addition c) a nucleic acid molecule encoding a transit peptide, especially a plastidal transit petide in case in Table I, application no. 3, in column 6 in the same line as SEQ ID NO. 85743 is depicted, plastidic is mentioned, or a mitochondrial transit peptide in case in Table I, application no. 3, in column 6 in the same line as SEQ ID NO. 85743 is depicted, mitochondrial is mentioned; which is operable linked, too.

[28109] In another embodiment thereof the expression cassette does not comprise an additional transit peptide in case in Table I, application no. 3, in column 6 in the same line as SEQ ID NO. 85743 is depicted, non-targeted is mentioned.

[28110] In an embodiment the present invention relates to an expresssion cassette comprising a) a promoter, preferably a promoter selected from the group consisting of Big35S, PCUbi, Super and USP, in particular p-PcUBI; and b) the nucleic acid SEQ ID NO. 55379, or a homolog or fragment thereof, or a homolog thereof being depicted in Table I, application no. 3, column 8, in the same line as SEQ ID NO. 55379, preferably the coding region thereof, a homolog or a fragment thereof; which are operable linked.

[28111] In an embodiment thereof the expression cassette comprises in addition c) a nucleic acid molecule encoding a transit peptide, especially a plastidal transit petide in case in Table I, application no. 3, in column 6 in the same line as SEQ ID NO. 55379 is depicted, plastidic is mentioned, or a mitochondrial transit peptide in case in Table I, application no. 3, in column 6 in the same line as SEQ ID NO. 55379 is depicted, mitochondrial is mentioned; which is operable linked, too.

[28112] In another embodiment thereof the expression cassette does not comprise an additional transit peptide in case in Table I, application no. 3, in column 6 in the same line as SEQ ID NO. 55379 is depicted, non-targeted is mentioned.

[28113] In an embodiment the present invention relates to an expresssion cassette comprising a) a promoter, preferably a promoter selected from the group consisting of Big35S, PCUbi, Super and USP, in particular p-PcUBI; and b) the nucleic acid SEQ ID NO. 85808, or a homolog or fragment thereof, or a homolog thereof being depicted in Table I, application no. 3, column 8, in the same line as SEQ ID NO. 85808, preferably the coding region thereof, a homolog or a fragment thereof; which are operable linked.

[28114] In an embodiment thereof the expression cassette comprises in addition c) a nucleic acid molecule encoding a transit peptide, especially a plastidal transit petide in case in Table I, application no. 3, in column 6 in the same line as SEQ ID NO. 85808 is depicted, plastidic is mentioned, or a mitochondrial transit peptide in case in Table I, application no. 3, in column 6 in the same line as SEQ ID NO. 85808 is depicted, mitochondrial is mentioned; which is operable linked, too.

[28115] In another embodiment thereof the expression cassette does not comprise an additional transit peptide in case in Table I, application no. 3, in column 6 in the same line as SEQ ID NO. 85808 is depicted, non-targeted is mentioned.

[28116] In an embodiment the present invention relates to an expresssion cassette comprising a) a promoter, preferably a promoter selected from the group consisting of Big35S, PCUbi, Super and USP, in particular p-PcUBI; and b) the nucleic acid SEQ ID NO. 86447, or a homolog or fragment thereof, or a homolog thereof being depicted in Table I, application no. 3, column 8, in the same line as SEQ ID NO. 86447, preferably the coding region thereof, a homolog or a fragment thereof; which are operable linked.

[28117] In an embodiment thereof the expression cassette comprises in addition c) a nucleic acid molecule encoding a transit peptide, especially a plastidal transit petide in case in Table I, application no. 3, in column 6 in the same line as SEQ ID NO. 86447 is depicted, plastidic is mentioned, or a mitochondrial transit peptide in case in Table I, application no. 3, in column 6 in the same line as SEQ ID NO. 86447 is depicted, mitochondrial is mentioned; which is operable linked, too.

[28118] In another embodiment thereof the expression cassette does not comprise an additional transit peptide in case in Table I, application no. 3, in column 6 in the same line as SEQ ID NO. 86447 is depicted, non-targeted is mentioned.

[28119] In an embodiment the present invention relates to an expresssion cassette comprising a) a promoter, preferably a promoter selected from the group consisting of Big35S, PCUbi, Super and USP, in particular p-PcUBI; and b) the nucleic acid SEQ ID NO. 11471, or a homolog or fragment thereof, or a homolog thereof being depicted in Table I, application no. 3, column 8, in the same line as SEQ ID NO. 11471, preferably the coding region thereof, a homolog or a fragment thereof; which are operable linked.

[28120] In an embodiment thereof the expression cassette comprises in addition c) a nucleic acid molecule encoding a transit peptide, especially a plastidal transit petide in case in Table I, application no. 3, in column 6 in the same line as SEQ ID NO. 11471 is depicted, plastidic is mentioned, or a mitochondrial transit peptide in case in Table I, application no. 3, in column 6 in the same line as SEQ ID NO. 11471 is depicted, mitochondrial is mentioned; which is operable linked, too.

[28121] In another embodiment thereof the expression cassette does not comprise an additional transit peptide in case in Table I, application no. 3, in column 6 in the same line as SEQ ID NO. 11471 is depicted, non-targeted is mentioned.

[28122] In an embodiment the present invention relates to an expresssion cassette comprising a) a promoter, preferably a promoter selected from the group consisting of Big35S, PCUbi, Super and USP, in particular p-PcUBI; and b) the nucleic acid SEQ ID NO. 55385, or a homolog or fragment thereof, or a homolog thereof being depicted in Table I, application no. 3, column 8, in the same line as SEQ ID NO. 55385, preferably the coding region thereof, a homolog or a fragment thereof; which are operable linked.

[28123] In an embodiment thereof the expression cassette comprises in addition c) a nucleic acid molecule encoding a transit peptide, especially a plastidal transit petide in case in Table I, application no. 3, in column 6 in the same line as SEQ ID NO. 55385 is depicted, plastidic is mentioned, or a mitochondrial transit peptide in case in Table I, application no. 3, in column 6 in the same line as SEQ ID NO. 55385 is depicted, mitochondrial is mentioned; which is operable linked, too.

[28124] In another embodiment thereof the expression cassette does not comprise an additional transit peptide in case in Table I, application no. 3, in column 6 in the same line as SEQ ID NO. 55385 is depicted, non-targeted is mentioned.

[28125] In an embodiment the present invention relates to an expresssion cassette comprising a) a promoter, preferably a promoter selected from the group consisting of Big35S, PCUbi, Super and USP, in particular p-PcUBI; and b) the nucleic acid SEQ ID NO. 86508, or a homolog or fragment thereof, or a homolog thereof being depicted in Table I, application no. 3, column 8, in the same line as SEQ ID NO. 86508, preferably the coding region thereof, a homolog or a fragment thereof; which are operable linked.

[28126] In an embodiment thereof the expression cassette comprises in addition c) a nucleic acid molecule encoding a transit peptide, especially a plastidal transit petide in case in Table I, application no. 3, in column 6 in the same line as SEQ ID NO. 86508 is depicted, plastidic is mentioned, or a mitochondrial transit peptide in case in Table I, application no. 3, in column 6 in the same line as SEQ ID NO. 86508 is depicted, mitochondrial is mentioned; which is operable linked, too.

[28127] In another embodiment thereof the expression cassette does not comprise an additional transit peptide in case in Table I, application no. 3, in column 6 in the same line as SEQ ID NO. 86508 is depicted, non-targeted is mentioned.

[28128] In an embodiment the present invention relates to an expresssion cassette comprising a) a promoter, preferably a promoter selected from the group consisting of Big35S, PCUbi, Super and USP, in particular p-PcUBI; and b) the nucleic acid SEQ ID NO. 86540, or a homolog or fragment thereof, or a homolog thereof being depicted in Table I, application no. 3, column 8, in the same line as SEQ ID NO. 86540, preferably the coding region thereof, a homolog or a fragment thereof; which are operable linked.

[28129] In an embodiment thereof the expression cassette comprises in addition c) a nucleic acid molecule encoding a transit peptide, especially a plastidal transit petide in case in Table I, application no. 3, in column 6 in the same line as SEQ ID NO. 86540 is depicted, plastidic is mentioned, or a mitochondrial transit peptide in case in Table I, application no. 3, in column 6 in the same line as SEQ ID NO. 86540 is depicted, mitochondrial is mentioned; which is operable linked, too.

[28130] In another embodiment thereof the expression cassette does not comprise an additional transit peptide in case in Table I, application no. 3, in column 6 in the same line as SEQ ID NO. 86540 is depicted, non-targeted is mentioned.

[28131] In an embodiment the present invention relates to an expresssion cassette comprising a) a promoter, preferably a promoter selected from the group consisting of Big35S, PCUbi, Super and USP, in particular p-PcUBI; and b) the nucleic acid SEQ ID NO. 86820, or a homolog or fragment thereof, or a homolog thereof being depicted in Table I, application no. 3, column 8, in the same line as SEQ ID NO. 86820, preferably the coding region thereof, a homolog or a fragment thereof; which are operable linked.

[28132] In an embodiment thereof the expression cassette comprises in addition c) a nucleic acid molecule encoding a transit peptide, especially a plastidal transit petide in case in Table I, application no. 3, in column 6 in the same line as SEQ ID NO. 86820 is depicted, plastidic is mentioned, or a mitochondrial transit peptide in case in Table I, application no. 3, in column 6 in the same line as SEQ ID NO. 86820 is depicted, mitochondrial is mentioned; which is operable linked, too.

[28133] In another embodiment thereof the expression cassette does not comprise an additional transit peptide in case in Table I, application no. 3, in column 6 in the same line as SEQ ID NO. 86820 is depicted, non-targeted is mentioned.

[28134] In an embodiment the present invention relates to an expresssion cassette comprising a) a promoter, preferably a promoter selected from the group consisting of Big35S, PCUbi, Super and USP, in particular p-PcUBI; and b) the nucleic acid SEQ ID NO. 56153, or a homolog or fragment thereof, or a homolog thereof being depicted in Table I, application no. 3, column 8, in the same line as SEQ ID NO. 56153, preferably the coding region thereof, a homolog or a fragment thereof; which are operable linked.

[28135] In an embodiment thereof the expression cassette comprises in addition c) a nucleic acid molecule encoding a transit peptide, especially a plastidal transit petide in case in Table I, application no. 3, in column 6 in the same line as SEQ ID NO. 56153 is depicted, plastidic is mentioned, or a mitochondrial transit peptide in case in Table I, application no. 3, in column 6 in the same line as SEQ ID NO. 56153 is depicted, mitochondrial is mentioned; which is operable linked, too.

[28136] In another embodiment thereof the expression cassette does not comprise an additional transit peptide in case in Table I, application no. 3, in column 6 in the same line as SEQ ID NO. 56153 is depicted, non-targeted is mentioned.

[28137] In an embodiment the present invention relates to an expresssion cassette comprising a) a promoter, preferably a promoter selected from the group consisting of Big35S, PCUbi, Super and USP, in particular p-PcUBI; and b) the nucleic acid SEQ ID NO. 56894, or a homolog or fragment thereof, or a homolog thereof being depicted in Table I, application no. 3, column 8, in the same line as SEQ ID NO. 56894, preferably the coding region thereof, a homolog or a fragment thereof; which are operable linked.

[28138] In an embodiment thereof the expression cassette comprises in addition c) a nucleic acid molecule encoding a transit peptide, especially a plastidal transit petide in case in Table I, application no. 3, in column 6 in the same line as SEQ ID NO. 56894 is depicted, plastidic is mentioned, or a mitochondrial transit peptide in case in Table I, application no. 3, in column 6 in the same line as SEQ ID NO. 56894 is depicted, mitochondrial is mentioned; which is operable linked, too.

[28139] In another embodiment thereof the expression cassette does not comprise an additional transit peptide in case in Table I, application no. 3, in column 6 in the same line as SEQ ID NO. 56894 is depicted, non-targeted is mentioned.

[28140] In an embodiment the present invention relates to an expresssion cassette comprising a) a promoter, preferably a promoter selected from the group consisting of Big35S, PCUbi, Super and USP, in particular p-PcUBI; and b) the nucleic acid SEQ ID NO. 87397, or a homolog or fragment thereof, or a homolog thereof being depicted in Table I, application no. 3, column 8, in the same line as SEQ ID NO. 87397, preferably the coding region thereof, a homolog or a fragment thereof; which are operable linked.

[28141] In an embodiment thereof the expression cassette comprises in addition c) a nucleic acid molecule encoding a transit peptide, especially a plastidal transit petide in case in Table I, application no. 3, in column 6 in the same line as SEQ ID NO. 87397 is depicted, plastidic is mentioned, or a mitochondrial transit peptide in case in Table I, application no. 3, in column 6 in the same line as SEQ ID NO. 87397 is depicted, mitochondrial is mentioned; which is operable linked, too.

[28142] In another embodiment thereof the expression cassette does not comprise an additional transit peptide in case in Table I, application no. 3, in column 6 in the same line as SEQ ID NO. 87397 is depicted, non-targeted is mentioned.

[28143] In an embodiment the present invention relates to an expresssion cassette comprising a) a promoter, preferably a promoter selected from the group consisting of Big35S, PCUbi, Super and USP, in particular p-PcUBI; and b) the nucleic acid SEQ ID NO. 57235, or a homolog or fragment thereof, or a homolog thereof being depicted in Table I, application no. 3, column 8, in the same line as SEQ ID NO. 57235, preferably the coding region thereof, a homolog or a fragment thereof; which are operable linked.

[28144] In an embodiment thereof the expression cassette comprises in addition c) a nucleic acid molecule encoding a transit peptide, especially a plastidal transit petide in case in Table I, application no. 3, in column 6 in the same line as SEQ ID NO. 57235 is depicted, plastidic is mentioned, or a mitochondrial transit peptide in case in Table I, application no. 3, in column 6 in the same line as SEQ ID NO. 57235 is depicted, mitochondrial is mentioned; which is operable linked, too.

[28145] In another embodiment thereof the expression cassette does not comprise an additional transit peptide in case in Table I, application no. 3, in column 6 in the same line as SEQ ID NO. 57235 is depicted, non-targeted is mentioned.

[28146] In an embodiment the present invention relates to an expresssion cassette comprising a) a promoter, preferably a promoter selected from the group consisting of Big35S, PCUbi, Super and USP, in particular p-PcUBI; and b) the nucleic acid SEQ ID NO. 57679, or a homolog or fragment thereof, or a homolog thereof being depicted in Table I, application no. 3, column 8, in the same line as SEQ ID NO. 57679, preferably the coding region thereof, a homolog or a fragment thereof; which are operable linked.

[28147] In an embodiment thereof the expression cassette comprises in addition c) a nucleic acid molecule encoding a transit peptide, especially a plastidal transit petide in case in Table I, application no. 3, in column 6 in the same line as SEQ ID NO. 57679 is depicted, plastidic is mentioned, or a mitochondrial transit peptide in case in Table I, application no. 3, in column 6 in the same line as SEQ ID NO. 57679 is depicted, mitochondrial is mentioned; which is operable linked, too.

[28148] In another embodiment thereof the expression cassette does not comprise an additional transit peptide in case in Table I, application no. 3, in column 6 in the same line as SEQ ID NO. 57679 is depicted, non-targeted is mentioned.

[28149] In an embodiment the present invention relates to an expresssion cassette comprising a) a promoter, preferably a promoter selected from the group consisting of Big35S, PCUbi, Super and USP, in particular p-PcUBI; and b) the nucleic acid SEQ ID NO. 87610, or a homolog or fragment thereof, or a homolog thereof being depicted in Table I, application no. 3, column 8, in the same line as SEQ ID NO. 87610, preferably the coding region thereof, a homolog or a fragment thereof; which are operable linked.

[28150] In an embodiment thereof the expression cassette comprises in addition c) a nucleic acid molecule encoding a transit peptide, especially a plastidal transit petide in case in Table I, application no. 3, in column 6 in the same line as SEQ ID NO. 87610 is depicted, plastidic is mentioned, or a mitochondrial transit peptide in case in Table I, application no. 3, in column 6 in the same line as SEQ ID NO. 87610 is depicted, mitochondrial is mentioned; which is operable linked, too.

[28151] In another embodiment thereof the expression cassette does not comprise an additional transit peptide in case in Table I, application no. 3, in column 6 in the same line as SEQ ID NO. 87610 is depicted, non-targeted is mentioned.

[28152] In an embodiment the present invention relates to an expresssion cassette comprising a) a promoter, preferably a promoter selected from the group consisting of Big35S, PCUbi, Super and USP, in particular p-PcUBI; and b) the nucleic acid SEQ ID NO. 87655, or a homolog or fragment thereof, or a homolog thereof being depicted in Table I, application no. 3, column 8, in the same line as SEQ ID NO. 87655, preferably the coding region thereof, a homolog or a fragment thereof; which are operable linked.

[28153] In an embodiment thereof the expression cassette comprises in addition c) a nucleic acid molecule encoding a transit peptide, especially a plastidal transit petide in case in Table I, application no. 3, in column 6 in the same line as SEQ ID NO. 87655 is depicted, plastidic is mentioned, or a mitochondrial transit peptide in case in Table I, application no. 3, in column 6 in the same line as SEQ ID NO. 87655 is depicted, mitochondrial is mentioned; which is operable linked, too.

[28154] In another embodiment thereof the expression cassette does not comprise an additional transit peptide in case in Table I, application no. 3, in column 6 in the same line as SEQ ID NO. 87655 is depicted, non-targeted is mentioned.

[28155] In an embodiment the present invention relates to an expresssion cassette comprising a) a promoter, preferably a promoter selected from the group consisting of Big35S, PCUbi, Super and USP, in particular p-PcUBI; and b) the nucleic acid SEQ ID NO. 87853, or a homolog or fragment thereof, or a homolog thereof being depicted in Table I, application no. 3, column 8, in the same line as SEQ ID NO. 87853, preferably the coding region thereof, a homolog or a fragment thereof; which are operable linked.

[28156] In an embodiment thereof the expression cassette comprises in addition c) a nucleic acid molecule encoding a transit peptide, especially a plastidal transit petide in case in Table I, application no. 3, in column 6 in the same line as SEQ ID NO. 87853 is depicted, plastidic is mentioned, or a mitochondrial transit peptide in case in Table I, application no. 3, in column 6 in the same line as SEQ ID NO. 87853 is depicted, mitochondrial is mentioned; which is operable linked, too.

[28157] In another embodiment thereof the expression cassette does not comprise an additional transit peptide in case in Table I, application no. 3, in column 6 in the same line as SEQ ID NO. 87853 is depicted, non-targeted is mentioned.

[28158] In an embodiment the present invention relates to an expresssion cassette comprising a) a promoter, preferably a promoter selected from the group consisting of Big35S, PCUbi, Super and USP, in particular p-PcUBI; and b) the nucleic acid SEQ ID NO. 58058, or a homolog or fragment thereof, or a homolog thereof being depicted in Table I, application no. 3, column 8, in the same line as SEQ ID NO. 58058, preferably the coding region thereof, a homolog or a fragment thereof; which are operable linked.

[28159] In an embodiment thereof the expression cassette comprises in addition c) a nucleic acid molecule encoding a transit peptide, especially a plastidal transit petide in case in Table I, application no. 3, in column 6 in the same line as SEQ ID NO. 58058 is depicted, plastidic is mentioned, or a mitochondrial transit peptide in case in Table I, application no. 3, in column 6 in the same line as SEQ ID NO. 58058 is depicted, mitochondrial is mentioned; which is operable linked, too.

[28160] In another embodiment thereof the expression cassette does not comprise an additional transit peptide in case in Table I, application no. 3, in column 6 in the same line as SEQ ID NO. 58058 is depicted, non-targeted is mentioned.

[28161] In an embodiment the present invention relates to an expresssion cassette comprising a) a promoter, preferably a promoter selected from the group consisting of Big35S, PCUbi, Super and USP, in particular p-PcUBI; and b) the nucleic acid SEQ ID NO. 58668, or a homolog or fragment thereof, or a homolog thereof being depicted in Table I, application no. 3, column 8, in the same line as SEQ ID NO. 58668, preferably the coding region thereof, a homolog or a fragment thereof; which are operable linked.

[28162] In an embodiment thereof the expression cassette comprises in addition c) a nucleic acid molecule encoding a transit peptide, especially a plastidal transit petide in case in Table I, application no. 3, in column 6 in the same line as SEQ ID NO. 58668 is depicted, plastidic is mentioned, or a mitochondrial transit peptide in case in Table I, application no. 3, in column 6 in the same line as SEQ ID NO. 58668 is depicted, mitochondrial is mentioned; which is operable linked, too.

[28163] In another embodiment thereof the expression cassette does not comprise an additional transit peptide in case in Table I, application no. 3, in column 6 in the same line as SEQ ID NO. 58668 is depicted, non-targeted is mentioned.

[28164] In an embodiment the present invention relates to an expresssion cassette comprising a) a promoter, preferably a promoter selected from the group consisting of Big35S, PCUbi, Super and USP, in particular p-PcUBI; and b) the nucleic acid SEQ ID NO. 88158, or a homolog or fragment thereof, or a homolog thereof being depicted in Table I, application no. 3, column 8, in the same line as SEQ ID NO. 88158, preferably the coding region thereof, a homolog or a fragment thereof; which are operable linked.

[28165] In an embodiment thereof the expression cassette comprises in addition c) a nucleic acid molecule encoding a transit peptide, especially a plastidal transit petide in case in Table I, application no. 3, in column 6 in the same line as SEQ ID NO. 88158 is depicted, plastidic is mentioned, or a mitochondrial transit peptide in case in Table I, application no. 3, in column 6 in the same line as SEQ ID NO. 88158 is depicted, mitochondrial is mentioned; which is operable linked, too.

[28166] In another embodiment thereof the expression cassette does not comprise an additional transit peptide in case in Table I, application no. 3, in column 6 in the same line as SEQ ID NO. 88158 is depicted, non-targeted is mentioned.

[28167] In an embodiment the present invention relates to an expresssion cassette comprising a) a promoter, preferably a promoter selected from the group consisting of Big35S, PCUbi, Super and USP, in particular p-PcUBI; and b) the nucleic acid SEQ ID NO. 88271, or a homolog or fragment thereof, or a homolog thereof being depicted in Table I, application no. 3, column 8, in the same line as SEQ ID NO. 88271, preferably the coding region thereof, a homolog or a fragment thereof; which are operable linked.

[28168] In an embodiment thereof the expression cassette comprises in addition c) a nucleic acid molecule encoding a transit peptide, especially a plastidal transit petide in case in Table I, application no. 3, in column 6 in the same line as SEQ ID NO. 88271 is depicted, plastidic is mentioned, or a mitochondrial transit peptide in case in Table I, application no. 3, in column 6 in the same line as SEQ ID NO. 88271 is depicted, mitochondrial is mentioned; which is operable linked, too.

[28169] In another embodiment thereof the expression cassette does not comprise an additional transit peptide in case in Table I, application no. 3, in column 6 in the same line as SEQ ID NO. 88271 is depicted, non-targeted is mentioned.

[28170] In an embodiment the present invention relates to an expresssion cassette comprising a) a promoter, preferably a promoter selected from the group consisting of Big35S, PCUbi, Super and USP, in particular p-PcUBI; and b) the nucleic acid SEQ ID NO. 12070, or a homolog or fragment thereof, or a homolog thereof being depicted in Table I, application no. 3, column 8, in the same line as SEQ ID NO. 12070, preferably the coding region thereof, a homolog or a fragment thereof; which are operable linked.

[28171] In an embodiment thereof the expression cassette comprises in addition c) a nucleic acid molecule encoding a transit peptide, especially a plastidal transit petide in case in Table I, application no. 3, in column 6 in the same line as SEQ ID NO. 12070 is depicted, plastidic is mentioned, or a mitochondrial transit peptide in case in Table I, application no. 3, in column 6 in the same line as SEQ ID NO. 12070 is depicted, mitochondrial is mentioned; which is operable linked, too.

[28172] In another embodiment thereof the expression cassette does not comprise an additional transit peptide in case in Table I, application no. 3, in column 6 in the same line as SEQ ID NO. 12070 is depicted, non-targeted is mentioned.

[28173] In an embodiment the present invention relates to an expresssion cassette comprising a) a promoter, preferably a promoter selected from the group consisting of Big35S, PCUbi, Super and USP, in particular p-PcUBI; and b) the nucleic acid SEQ ID NO. 58731, or a homolog or fragment thereof, or a homolog thereof being depicted in Table I, application no. 3, column 8, in the same line as SEQ ID NO. 58731, preferably the coding region thereof, a homolog or a fragment thereof; which are operable linked.

[28174] In an embodiment thereof the expression cassette comprises in addition c) a nucleic acid molecule encoding a transit peptide, especially a plastidal transit petide in case in Table I, application no. 3, in column 6 in the same line as SEQ ID NO. 58731 is depicted, plastidic is mentioned, or a mitochondrial transit peptide in case in Table I, application no. 3, in column 6 in the same line as SEQ ID NO. 58731 is depicted, mitochondrial is mentioned; which is operable linked, too.

[28175] In another embodiment thereof the expression cassette does not comprise an additional transit peptide in case in Table I, application no. 3, in column 6 in the same line as SEQ ID NO. 58731 is depicted, non-targeted is mentioned.

[28176] In an embodiment the present invention relates to an expresssion cassette comprising a) a promoter, preferably a promoter selected from the group consisting of Big35S, PCUbi, Super and USP, in particular p-PcUBI; and b) the nucleic acid SEQ ID NO. 58751, or a homolog or fragment thereof, or a homolog thereof being depicted in Table I, application no. 3, column 8, in the same line as SEQ ID NO. 58751, preferably the coding region thereof, a homolog or a fragment thereof; which are operable linked.

[28177] In an embodiment thereof the expression cassette comprises in addition c) a nucleic acid molecule encoding a transit peptide, especially a plastidal transit petide in case in Table I, application no. 3, in column 6 in the same line as SEQ ID NO. 58751 is depicted, plastidic is mentioned, or a mitochondrial transit peptide in case in Table I, application no. 3, in column 6 in the same line as SEQ ID NO. 58751 is depicted, mitochondrial is mentioned; which is operable linked, too.

[28178] In another embodiment thereof the expression cassette does not comprise an additional transit peptide in case in Table I, application no. 3, in column 6 in the same line as SEQ ID NO. 58751 is depicted, non-targeted is mentioned.

[28179] In an embodiment the present invention relates to an expresssion cassette comprising a) a promoter, preferably a promoter selected from the group consisting of Big35S, PCUbi, Super and USP, in particular p-PcUBI; and b) the nucleic acid SEQ ID NO. 12140, or a homolog or fragment thereof, or a homolog thereof being depicted in Table I, application no. 3, column 8, in the same line as SEQ ID NO. 12140, preferably the coding region thereof, a homolog or a fragment thereof; which are operable linked.

[28180] In an embodiment thereof the expression cassette comprises in addition c) a nucleic acid molecule encoding a transit peptide, especially a plastidal transit petide in case in Table I, application no. 3, in column 6 in the same line as SEQ ID NO. 12140 is depicted, plastidic is mentioned, or a mitochondrial transit peptide in case in Table I, application no. 3, in column 6 in the same line as SEQ ID NO. 12140 is depicted, mitochondrial is mentioned; which is operable linked, too.

[28181] In another embodiment thereof the expression cassette does not comprise an additional transit peptide in case in Table I, application no. 3, in column 6 in the same line as SEQ ID NO. 12140 is depicted, non-targeted is mentioned.

[28182] In an embodiment the present invention relates to an expresssion cassette comprising a) a promoter, preferably a promoter selected from the group consisting of Big35S, PCUbi, Super and USP, in particular p-PcUBI; and b) the nucleic acid SEQ ID NO. 59041, or a homolog or fragment thereof, or a homolog thereof being depicted in Table I, application no. 3, column 8, in the same line as SEQ ID NO. 59041, preferably the coding region thereof, a homolog or a fragment thereof; which are operable linked.

[28183] In an embodiment thereof the expression cassette comprises in addition c) a nucleic acid molecule encoding a transit peptide, especially a plastidal transit petide in case in Table I, application no. 3, in column 6 in the same line as SEQ ID NO. 59041 is depicted, plastidic is mentioned, or a mitochondrial transit peptide in case in Table I, application no. 3, in column 6 in the same line as SEQ ID NO. 59041 is depicted, mitochondrial is mentioned; which is operable linked, too.

[28184] In another embodiment thereof the expression cassette does not comprise an additional transit peptide in case in Table I, application no. 3, in column 6 in the same line as SEQ ID NO. 59041 is depicted, non-targeted is mentioned.

[28185] In an embodiment the present invention relates to an expresssion cassette comprising a) a promoter, preferably a promoter selected from the group consisting of Big35S, PCUbi, Super and USP, in particular p-PcUBI; and b) the nucleic acid SEQ ID NO. 12341, or a homolog or fragment thereof, or a homolog thereof being depicted in Table I, application no. 3, column 8, in the same line as SEQ ID NO. 12341, preferably the coding region thereof, a homolog or a fragment thereof; which are operable linked.

[28186] In an embodiment thereof the expression cassette comprises in addition c) a nucleic acid molecule encoding a transit peptide, especially a plastidal transit petide in case in Table I, application no. 3, in column 6 in the same line as SEQ ID NO. 12341 is depicted, plastidic is mentioned, or a mitochondrial transit peptide in case in Table I, application no. 3, in column 6 in the same line as SEQ ID NO. 12341 is depicted, mitochondrial is mentioned; which is operable linked, too.

[28187] In another embodiment thereof the expression cassette does not comprise an additional transit peptide in case in Table I, application no. 3, in column 6 in the same line as SEQ ID NO. 12341 is depicted, non-targeted is mentioned.

[28188] In an embodiment the present invention relates to an expresssion cassette comprising a) a promoter, preferably a promoter selected from the group consisting of Big35S, PCUbi, Super and USP, in particular p-PcUBI; and b) the nucleic acid SEQ ID NO. 59370, or a homolog or fragment thereof, or a homolog thereof being depicted in Table I, application no. 3, column 8, in the same line as SEQ ID NO. 59370, preferably the coding region thereof, a homolog or a fragment thereof; which are operable linked.

[28189] In an embodiment thereof the expression cassette comprises in addition c) a nucleic acid molecule encoding a transit peptide, especially a plastidal transit petide in case in Table I, application no. 3, in column 6 in the same line as SEQ ID NO. 59370 is depicted, plastidic is mentioned, or a mitochondrial transit peptide in case in Table I, application no. 3, in column 6 in the same line as SEQ ID NO. 59370 is depicted, mitochondrial is mentioned; which is operable linked, too.

[28190] In another embodiment thereof the expression cassette does not comprise an additional transit peptide in case in Table I, application no. 3, in column 6 in the same line as SEQ ID NO. 59370 is depicted, non-targeted is mentioned.

[28191] In an embodiment the present invention relates to an expresssion cassette comprising a) a promoter, preferably a promoter selected from the group consisting of Big35S, PCUbi, Super and USP, in particular p-PcUBI; and b) the nucleic acid SEQ ID NO. 12698, or a homolog or fragment thereof, or a homolog thereof being depicted in Table I, application no. 3, column 8, in the same line as SEQ ID NO. 12698, preferably the coding region thereof, a homolog or a fragment thereof; which are operable linked.

[28192] In an embodiment thereof the expression cassette comprises in addition c) a nucleic acid molecule encoding a transit peptide, especially a plastidal transit petide in case in Table I, application no. 3, in column 6 in the same line as SEQ ID NO. 12698 is depicted, plastidic is mentioned, or a mitochondrial transit peptide in case in Table I, application no. 3, in column 6 in the same line as SEQ ID NO. 12698 is depicted, mitochondrial is mentioned; which is operable linked, too.

[28193] In another embodiment thereof the expression cassette does not comprise an additional transit peptide in case in Table I, application no. 3, in column 6 in the same line as SEQ ID NO. 12698 is depicted, non-targeted is mentioned.

[28194] In an embodiment the present invention relates to an expresssion cassette comprising a) a promoter, preferably a promoter selected from the group consisting of Big35S, PCUbi, Super and USP, in particular p-PcUBI; and b) the nucleic acid SEQ ID NO. 88526, or a homolog or fragment thereof, or a homolog thereof being depicted in Table I, application no. 3, column 8, in the same line as SEQ ID NO. 88526, preferably the coding region thereof, a homolog or a fragment thereof; which are operable linked.

[28195] In an embodiment thereof the expression cassette comprises in addition c) a nucleic acid molecule encoding a transit peptide, especially a plastidal transit petide in case in Table I, application no. 3, in column 6 in the same line as SEQ ID NO. 88526 is depicted, plastidic is mentioned, or a mitochondrial transit peptide in case in Table I, application no. 3, in column 6 in the same line as SEQ ID NO. 88526 is depicted, mitochondrial is mentioned; which is operable linked, too.

[28196] In another embodiment thereof the expression cassette does not comprise an additional transit peptide in case in Table I, application no. 3, in column 6 in the same line as SEQ ID NO. 88526 is depicted, non-targeted is mentioned.

[28197] In an embodiment the present invention relates to an expresssion cassette comprising a) a promoter, preferably a promoter selected from the group consisting of Big35S, PCUbi, Super and USP, in particular p-PcUBI; and b) the nucleic acid SEQ ID NO. 61070, or a homolog or fragment thereof, or a homolog thereof being depicted in Table I, application no. 3, column 8, in the same line as SEQ ID NO. 61070, preferably the coding region thereof, a homolog or a fragment thereof; which are operable linked.

[28198] In an embodiment thereof the expression cassette comprises in addition c) a nucleic acid molecule encoding a transit peptide, especially a plastidal transit petide in case in Table I, application no. 3, in column 6 in the same line as SEQ ID NO. 61070 is depicted, plastidic is mentioned, or a mitochondrial transit peptide in case in Table I, application no. 3, in column 6 in the same line as SEQ ID NO. 61070 is depicted, mitochondrial is mentioned; which is operable linked, too.

[28199] In another embodiment thereof the expression cassette does not comprise an additional transit peptide in case in Table I, application no. 3, in column 6 in the same line as SEQ ID NO. 61070 is depicted, non-targeted is mentioned.

[28200] In an embodiment the present invention relates to an expresssion cassette comprising a) a promoter, preferably a promoter selected from the group consisting of Big35S, PCUbi, Super and USP, in particular p-PcUBI; and b) the nucleic acid SEQ ID NO. 61532, or a homolog or fragment thereof, or a homolog thereof being depicted in Table I, application no. 3, column 8, in the same line as SEQ ID NO. 61532, preferably the coding region thereof, a homolog or a fragment thereof; which are operable linked.

[28201] In an embodiment thereof the expression cassette comprises in addition c) a nucleic acid molecule encoding a transit peptide, especially a plastidal transit petide in case in Table I, application no. 3, in column 6 in the same line as SEQ ID NO. 61532 is depicted, plastidic is mentioned, or a mitochondrial transit peptide in case in Table I, application no. 3, in column 6 in the same line as SEQ ID NO. 61532 is depicted, mitochondrial is mentioned; which is operable linked, too.

[28202] In another embodiment thereof the expression cassette does not comprise an additional transit peptide in case in Table I, application no. 3, in column 6 in the same line as SEQ ID NO. 61532 is depicted, non-targeted is mentioned.

[28203] In an embodiment the present invention relates to an expresssion cassette comprising a) a promoter, preferably a promoter selected from the group consisting of Big35S, PCUbi, Super and USP, in particular p-PcUBI; and b) the nucleic acid SEQ ID NO. 88875, or a homolog or fragment thereof, or a homolog thereof being depicted in Table I, application no. 3, column 8, in the same line as SEQ ID NO. 88875, preferably the coding region thereof, a homolog or a fragment thereof; which are operable linked.

[28204] In an embodiment thereof the expression cassette comprises in addition c) a nucleic acid molecule encoding a transit peptide, especially a plastidal transit petide in case in Table I, application no. 3, in column 6 in the same line as SEQ ID NO. 88875 is depicted, plastidic is mentioned, or a mitochondrial transit peptide in case in Table I, application no. 3, in column 6 in the same line as SEQ ID NO. 88875 is depicted, mitochondrial is mentioned; which is operable linked, too.

[28205] In another embodiment thereof the expression cassette does not comprise an additional transit peptide in case in Table I, application no. 3, in column 6 in the same line as SEQ ID NO. 88875 is depicted, non-targeted is mentioned.

[28206] In an embodiment the present invention relates to an expresssion cassette comprising a) a promoter, preferably a promoter selected from the group consisting of Big35S, PCUbi, Super and USP, in particular p-PcUBI; and b) the nucleic acid SEQ ID NO. 61553, or a homolog or fragment thereof, or a homolog thereof being depicted in Table I, application no. 3, column 8, in the same line as SEQ ID NO. 61553, preferably the coding region thereof, a homolog or a fragment thereof; which are operable linked.

[28207] In an embodiment thereof the expression cassette comprises in addition c) a nucleic acid molecule encoding a transit peptide, especially a plastidal transit petide in case in Table I, application no. 3, in column 6 in the same line as SEQ ID NO. 61553 is depicted, plastidic is mentioned, or a mitochondrial transit peptide in case in Table I, application no. 3, in column 6 in the same line as SEQ ID NO. 61553 is depicted, mitochondrial is mentioned; which is operable linked, too.

[28208] In another embodiment thereof the expression cassette does not comprise an additional transit peptide in case in Table I, application no. 3, in column 6 in the same line as SEQ ID NO. 61553 is depicted, non-targeted is mentioned.

[28209] In an embodiment the present invention relates to an expresssion cassette comprising a) a promoter, preferably a promoter selected from the group consisting of Big35S, PCUbi, Super and USP, in particular p-PcUBI; and b) the nucleic acid SEQ ID NO. 61723, or a homolog or fragment thereof, or a homolog thereof being depicted in Table I, application no. 3, column 8, in the same line as SEQ ID NO. 61723, preferably the coding region thereof, a homolog or a fragment thereof; which are operable linked.

[28210] In an embodiment thereof the expression cassette comprises in addition c) a nucleic acid molecule encoding a transit peptide, especially a plastidal transit petide in case in Table I, application no. 3, in column 6 in the same line as SEQ ID NO. 61723 is depicted, plastidic is mentioned, or a mitochondrial transit peptide in case in Table I, application no. 3, in column 6 in the same line as SEQ ID NO. 61723 is depicted, mitochondrial is mentioned; which is operable linked, too.

[28211] In another embodiment thereof the expression cassette does not comprise an additional transit peptide in case in Table I, application no. 3, in column 6 in the same line as SEQ ID NO. 61723 is depicted, non-targeted is mentioned.

[28212] In an embodiment the present invention relates to an expresssion cassette comprising a) a promoter, preferably a promoter selected from the group consisting of Big35S, PCUbi, Super and USP, in particular p-PcUBI; and b) the nucleic acid SEQ ID NO. 62079, or a homolog or fragment thereof, or a homolog thereof being depicted in Table I, application no. 3, column 8, in the same line as SEQ ID NO. 62079, preferably the coding region thereof, a homolog or a fragment thereof; which are operable linked.

[28213] In an embodiment thereof the expression cassette comprises in addition c) a nucleic acid molecule encoding a transit peptide, especially a plastidal transit petide in case in Table I, application no. 3, in column 6 in the same line as SEQ ID NO. 62079 is depicted, plastidic is mentioned, or a mitochondrial transit peptide in case in Table I, application no. 3, in column 6 in the same line as SEQ ID NO. 62079 is depicted, mitochondrial is mentioned; which is operable linked, too.

[28214] In another embodiment thereof the expression cassette does not comprise an additional transit peptide in case in Table I, application no. 3, in column 6 in the same line as SEQ ID NO. 62079 is depicted, non-targeted is mentioned.

[28215] In an embodiment the present invention relates to an expresssion cassette comprising a) a promoter, preferably a promoter selected from the group consisting of Big35S, PCUbi, Super and USP, in particular p-PcUBI; and b) the nucleic acid SEQ ID NO. 12974, or a homolog or fragment thereof, or a homolog thereof being depicted in Table I, application no. 3, column 8, in the same line as SEQ ID NO. 12974, preferably the coding region thereof, a homolog or a fragment thereof; which are operable linked.

[28216] In an embodiment thereof the expression cassette comprises in addition c) a nucleic acid molecule encoding a transit peptide, especially a plastidal transit petide in case in Table I, application no. 3, in column 6 in the same line as SEQ ID NO. 12974 is depicted, plastidic is mentioned, or a mitochondrial transit peptide in case in Table I, application no. 3, in column 6 in the same line as SEQ ID NO. 12974 is depicted, mitochondrial is mentioned; which is operable linked, too.

[28217] In another embodiment thereof the expression cassette does not comprise an additional transit peptide in case in Table I, application no. 3, in column 6 in the same line as SEQ ID NO. 12974 is depicted, non-targeted is mentioned.

[28218] In an embodiment the present invention relates to an expresssion cassette comprising a) a promoter, preferably a promoter selected from the group consisting of Big35S, PCUbi, Super and USP, in particular p-PcUBI; and b) the nucleic acid SEQ ID NO. 62160, or a homolog or fragment thereof, or a homolog thereof being depicted in Table I, application no. 3, column 8, in the same line as SEQ ID NO. 62160, preferably the coding region thereof, a homolog or a fragment thereof; which are operable linked.

[28219] In an embodiment thereof the expression cassette comprises in addition c) a nucleic acid molecule encoding a transit peptide, especially a plastidal transit petide in case in Table I, application no. 3, in column 6 in the same line as SEQ ID NO. 62160 is depicted, plastidic is mentioned, or a mitochondrial transit peptide in case in Table I, application no. 3, in column 6 in the same line as SEQ ID NO. 62160 is depicted, mitochondrial is mentioned; which is operable linked, too.

[28220] In another embodiment thereof the expression cassette does not comprise an additional transit peptide in case in Table I, application no. 3, in column 6 in the same line as SEQ ID NO. 62160 is depicted, non-targeted is mentioned.

[28221] In an embodiment the present invention relates to an expresssion cassette comprising a) a promoter, preferably a promoter selected from the group consisting of Big35S, PCUbi, Super and USP, in particular p-PcUBI; and b) the nucleic acid SEQ ID NO. 62244, or a homolog or fragment thereof, or a homolog thereof being depicted in Table I, application no. 3, column 8, in the same line as SEQ ID NO. 62244, preferably the coding region thereof, a homolog or a fragment thereof; which are operable linked.

[28222] In an embodiment thereof the expression cassette comprises in addition c) a nucleic acid molecule encoding a transit peptide, especially a plastidal transit petide in case in Table I, application no. 3, in column 6 in the same line as SEQ ID NO. 62244 is depicted, plastidic is mentioned, or a mitochondrial transit peptide in case in Table I, application no. 3, in column 6 in the same line as SEQ ID NO. 62244 is depicted, mitochondrial is mentioned; which is operable linked, too.

[28223] In another embodiment thereof the expression cassette does not comprise an additional transit peptide in case in Table I, application no. 3, in column 6 in the same line as SEQ ID NO. 62244 is depicted, non-targeted is mentioned.

[28224] In an embodiment the present invention relates to an expresssion cassette comprising a) a promoter, preferably a promoter selected from the group consisting of Big35S, PCUbi, Super and USP, in particular Big35S; and b) the nucleic acid SEQ ID NO. 62524, or a homolog or fragment thereof, or a homolog thereof being depicted in Table I, application no. 3, column 8, in the same line as SEQ ID NO. 62524, preferably the coding region thereof, a homolog or a fragment thereof; which are operable linked.

[28225] In an embodiment thereof the expression cassette comprises in addition c) a nucleic acid molecule encoding a transit peptide, especially a plastidal transit petide in case in Table I, application no. 3, in column 6 in the same line as SEQ ID NO. 62524 is depicted, plastidic is mentioned, or a mitochondrial transit peptide in case in Table I, application no. 3, in column 6 in the same line as SEQ ID NO. 62524 is depicted, mitochondrial is mentioned; which is operable linked, too.

[28226] In another embodiment thereof the expression cassette does not comprise an additional transit peptide in case in Table I, application no. 3, in column 6 in the same line as SEQ ID NO. 62524 is depicted, non-targeted is mentioned.

[28227] In an embodiment the present invention relates to an expresssion cassette comprising a) a promoter, preferably a promoter selected from the group consisting of Big35S, PCUbi, Super and USP, in particular Big35S; and b) the nucleic acid SEQ ID NO. 62717, or a homolog or fragment thereof, or a homolog thereof being depicted in Table I, application no. 3, column 8, in the same line as SEQ ID NO. 62717, preferably the coding region thereof, a homolog or a fragment thereof; which are operable linked.

[28228] In an embodiment thereof the expression cassette comprises in addition c) a nucleic acid molecule encoding a transit peptide, especially a plastidal transit petide in case in Table I, application no. 3, in column 6 in the same line as SEQ ID NO. 62717 is depicted, plastidic is mentioned, or a mitochondrial transit peptide in case in Table I, application no. 3, in column 6 in the same line as SEQ ID NO. 62717 is depicted, mitochondrial is mentioned; which is operable linked, too.

[28229] In another embodiment thereof the expression cassette does not comprise an additional transit peptide in case in Table I, application no. 3, in column 6 in the same line as SEQ ID NO. 62717 is depicted, non-targeted is mentioned.

[28230] In an embodiment the present invention relates to an expresssion cassette comprising a) a promoter, preferably a promoter selected from the group consisting of Big35S, PCUbi, Super and USP, in particular p-Super; and b) the nucleic acid SEQ ID NO. 88879, or a homolog or fragment thereof, or a homolog thereof being depicted in Table I, application no. 3, column 8, in the same line as SEQ ID NO. 88879, preferably the coding region thereof, a homolog or a fragment thereof; which are operable linked.

[28231] In an embodiment thereof the expression cassette comprises in addition c) a nucleic acid molecule encoding a transit peptide, especially a plastidal transit petide in case in Table I, application no. 3, in column 6 in the same line as SEQ ID NO. 88879 is depicted, plastidic is mentioned, or a mitochondrial transit peptide in case in Table I, application no. 3, in column 6 in the same line as SEQ ID NO. 88879 is depicted, mitochondrial is mentioned; which is operable linked, too.

[28232] In another embodiment thereof the expression cassette does not comprise an additional transit peptide in case in Table I, application no. 3, in column 6 in the same line as SEQ ID NO. 88879 is depicted, non-targeted is mentioned.

[28233] In an embodiment the present invention relates to an expresssion cassette comprising a) a promoter, preferably a promoter selected from the group consisting of Big35S, PCUbi, Super and USP, in particular p-PcUBI; and b) the nucleic acid SEQ ID NO. 89317, or a homolog or fragment thereof, or a homolog thereof being depicted in Table I, application no. 3, column 8, in the same line as SEQ ID NO. 89317, preferably the coding region thereof, a homolog or a fragment thereof; which are operable linked.

[28234] In an embodiment thereof the expression cassette comprises in addition c) a nucleic acid molecule encoding a transit peptide, especially a plastidal transit petide in case in Table I, application no. 3, in column 6 in the same line as SEQ ID NO. 89317 is depicted, plastidic is mentioned, or a mitochondrial transit peptide in case in Table I, application no. 3, in column 6 in the same line as SEQ ID NO. 89317 is depicted, mitochondrial is mentioned; which is operable linked, too.

[28235] In another embodiment thereof the expression cassette does not comprise an additional transit peptide in case in Table I, application no. 3, in column 6 in the same line as SEQ ID NO. 89317 is depicted, non-targeted is mentioned.

[28236] In an embodiment the present invention relates to an expresssion cassette comprising a) a promoter, preferably a promoter selected from the group consisting of Big35S, PCUbi, Super and USP, in particular p-Super; and b) the nucleic acid SEQ ID NO. 89395, or a homolog or fragment thereof, or a homolog thereof being depicted in Table I, application no. 3, column 8, in the same line as SEQ ID NO. 89395, preferably the coding region thereof, a homolog or a fragment thereof; which are operable linked.

[28237] In an embodiment thereof the expression cassette comprises in addition c) a nucleic acid molecule encoding a transit peptide, especially a plastidal transit petide in case in Table I, application no. 3, in column 6 in the same line as SEQ ID NO. 89395 is depicted, plastidic is mentioned, or a mitochondrial transit peptide in case in Table I, application no. 3, in column 6 in the same line as SEQ ID NO. 89395 is depicted, mitochondrial is mentioned; which is operable linked, too.

[28238] In another embodiment thereof the expression cassette does not comprise an additional transit peptide in case in Table I, application no. 3, in column 6 in the same line as SEQ ID NO. 89395 is depicted, non-targeted is mentioned.

[28239] In an embodiment the present invention relates to an expresssion cassette comprising a) a promoter, preferably a promoter selected from the group consisting of Big35S, PCUbi, Super and USP, in particular p-Super; and b) the nucleic acid SEQ ID NO. 14275, or a homolog or fragment thereof, or a homolog thereof being depicted in Table I, application no. 3, column 8, in the same line as SEQ ID NO. 14275, preferably the coding region thereof, a homolog or a fragment thereof; which are operable linked.

[28240] In an embodiment thereof the expression cassette comprises in addition c) a nucleic acid molecule encoding a transit peptide, especially a plastidal transit petide in case in Table I, application no. 3, in column 6 in the same line as SEQ ID NO. 14275 is depicted, plastidic is mentioned, or a mitochondrial transit peptide in case in Table I, application no. 3, in column 6 in the same line as SEQ ID NO. 14275 is depicted, mitochondrial is mentioned; which is operable linked, too.

[28241] In another embodiment thereof the expression cassette does not comprise an additional transit peptide in case in Table I, application no. 3, in column 6 in the same line as SEQ ID NO. 14275 is depicted, non-targeted is mentioned.

[28242] In an embodiment the present invention relates to an expresssion cassette comprising a) a promoter, preferably a promoter selected from the group consisting of Big35S, PCUbi, Super and USP, in particular p-Super; and b) the nucleic acid SEQ ID NO. 89483, or a homolog or fragment thereof, or a homolog thereof being depicted in Table I, application no. 3, column 8, in the same line as SEQ ID NO. 89483, preferably the coding region thereof, a homolog or a fragment thereof; which are operable linked.

[28243] In an embodiment thereof the expression cassette comprises in addition c) a nucleic acid molecule encoding a transit peptide, especially a plastidal transit petide in case in Table I, application no. 3, in column 6 in the same line as SEQ ID NO. 89483 is depicted, plastidic is mentioned, or a mitochondrial transit peptide in case in Table I, application no. 3, in column 6 in the same line as SEQ ID NO. 89483 is depicted, mitochondrial is mentioned; which is operable linked, too.

[28244] In another embodiment thereof the expression cassette does not comprise an additional transit peptide in case in Table I, application no. 3, in column 6 in the same line as SEQ ID NO. 89483 is depicted, non-targeted is mentioned.

[28245] In an embodiment the present invention relates to an expresssion cassette comprising a) a promoter, preferably a promoter selected from the group consisting of Big35S, PCUbi, Super and USP, in particular p-Super; and b) the nucleic acid SEQ ID NO. 89936, or a homolog or fragment thereof, or a homolog thereof being depicted in Table I, application no. 3, column 8, in the same line as SEQ ID NO. 89936, preferably the coding region thereof, a homolog or a fragment thereof; which are operable linked.

[28246] In an embodiment thereof the expression cassette comprises in addition c) a nucleic acid molecule encoding a transit peptide, especially a plastidal transit petide in case in Table I, application no. 3, in column 6 in the same line as SEQ ID NO. 89936 is depicted, plastidic is mentioned, or a mitochondrial transit peptide in case in Table I, application no. 3, in column 6 in the same line as SEQ ID NO. 89936 is depicted, mitochondrial is mentioned; which is operable linked, too.

[28247] In another embodiment thereof the expression cassette does not comprise an additional transit peptide in case in Table I, application no. 3, in column 6 in the same line as SEQ ID NO. 89936 is depicted, non-targeted is mentioned.

[28248] In an embodiment the present invention relates to an expresssion cassette comprising a) a promoter, preferably a promoter selected from the group consisting of Big35S, PCUbi, Super and USP, in particular p-Super; and b) the nucleic acid SEQ ID NO. 89973, or a homolog or fragment thereof, or a homolog thereof being depicted in Table I, application no. 3, column 8, in the same line as SEQ ID NO. 89973, preferably the coding region thereof, a homolog or a fragment thereof; which are operable linked.

[28249] In an embodiment thereof the expression cassette comprises in addition c) a nucleic acid molecule encoding a transit peptide, especially a plastidal transit petide in case in Table I, application no. 3, in column 6 in the same line as SEQ ID NO. 89973 is depicted, plastidic is mentioned, or a mitochondrial transit peptide in case in Table I, application no. 3, in column 6 in the same line as SEQ ID NO. 89973 is depicted, mitochondrial is mentioned; which is operable linked, too.

[28250] In another embodiment thereof the expression cassette does not comprise an additional transit peptide in case in Table I, application no. 3, in column 6 in the same line as SEQ ID NO. 89973 is depicted, non-targeted is mentioned.

[28251] In an embodiment the present invention relates to an expresssion cassette comprising a) a promoter, preferably a promoter selected from the group consisting of Big35S, PCUbi, Super and USP, in particular p-Super; and b) the nucleic acid SEQ ID NO. 63544, or a homolog or fragment thereof, or a homolog thereof being depicted in Table I, application no. 3, column 8, in the same line as SEQ ID NO. 63544, preferably the coding region thereof, a homolog or a fragment thereof; which are operable linked.

[28252] In an embodiment thereof the expression cassette comprises in addition c) a nucleic acid molecule encoding a transit peptide, especially a plastidal transit petide in case in Table I, application no. 3, in column 6 in the same line as SEQ ID NO. 63544 is depicted, plastidic is mentioned, or a mitochondrial transit peptide in case in Table I, application no. 3, in column 6 in the same line as SEQ ID NO. 63544 is depicted, mitochondrial is mentioned; which is operable linked, too.

[28253] In another embodiment thereof the expression cassette does not comprise an additional transit peptide in case in Table I, application no. 3, in column 6 in the same line as SEQ ID NO. 63544 is depicted, non-targeted is mentioned.

[28254] In an embodiment the present invention relates to an expresssion cassette comprising a) a promoter, preferably a promoter selected from the group consisting of Big35S, PCUbi, Super and USP, in particular p-Super; and b) the nucleic acid SEQ ID NO. 90103, or a homolog or fragment thereof, or a homolog thereof being depicted in Table I, application no. 3, column 8, in the same line as SEQ ID NO. 90103, preferably the coding region thereof, a homolog or a fragment thereof; which are operable linked.

[28255] In an embodiment thereof the expression cassette comprises in addition c) a nucleic acid molecule encoding a transit peptide, especially a plastidal transit petide in case in Table I, application no. 3, in column 6 in the same line as SEQ ID NO. 90103 is depicted, plastidic is mentioned, or a mitochondrial transit peptide in case in Table I, application no. 3, in column 6 in the same line as SEQ ID NO. 90103 is depicted, mitochondrial is mentioned; which is operable linked, too.

[28256] In another embodiment thereof the expression cassette does not comprise an additional transit peptide in case in Table I, application no. 3, in column 6 in the same line as SEQ ID NO. 90103 is depicted, non-targeted is mentioned.

[28257] In an embodiment the present invention relates to an expresssion cassette comprising a) a promoter, preferably a promoter selected from the group consisting of Big35S, PCUbi, Super and USP, in particular p-Super; and b) the nucleic acid SEQ ID NO. 90159, or a homolog or fragment thereof, or a homolog thereof being depicted in Table I, application no. 3, column 8, in the same line as SEQ ID NO. 90159, preferably the coding region thereof, a homolog or a fragment thereof; which are operable linked.

[28258] In an embodiment thereof the expression cassette comprises in addition c) a nucleic acid molecule encoding a transit peptide, especially a plastidal transit petide in case in Table I, application no. 3, in column 6 in the same line as SEQ ID NO. 90159 is depicted, plastidic is mentioned, or a mitochondrial transit peptide in case in Table I, application no. 3, in column 6 in the same line as SEQ ID NO. 90159 is depicted, mitochondrial is mentioned; which is operable linked, too.

[28259] In another embodiment thereof the expression cassette does not comprise an additional transit peptide in case in Table I, application no. 3, in column 6 in the same line as SEQ ID NO. 90159 is depicted, non-targeted is mentioned.

[28260] In an embodiment the present invention relates to an expresssion cassette comprising a) a promoter, preferably a promoter selected from the group consisting of Big35S, PCUbi, Super and USP, in particular Big35S; and b) the nucleic acid SEQ ID NO. 90165, or a homolog or fragment thereof, or a homolog thereof being depicted in Table I, application no. 3, column 8, in the same line as SEQ ID NO. 90165, preferably the coding region thereof, a homolog or a fragment thereof; which are operable linked.

[28261] In an embodiment thereof the expression cassette comprises in addition c) a nucleic acid molecule encoding a transit peptide, especially a plastidal transit petide in case in Table I, application no. 3, in column 6 in the same line as SEQ ID NO. 90165 is depicted, plastidic is mentioned, or a mitochondrial transit peptide in case in Table I, application no. 3, in column 6 in the same line as SEQ ID NO. 90165 is depicted, mitochondrial is mentioned; which is operable linked, too.

[28262] In another embodiment thereof the expression cassette does not comprise an additional transit peptide in case in Table I, application no. 3, in column 6 in the same line as SEQ ID NO. 90165 is depicted, non-targeted is mentioned.

[28263] In an embodiment the present invention relates to an expresssion cassette comprising a) a promoter, preferably a promoter selected from the group consisting of Big35S, PCUbi, Super and USP, in particular p-PcUBI; and b) the nucleic acid SEQ ID NO. 63745, or a homolog or fragment thereof, or a homolog thereof being depicted in Table I, application no. 3, column 8, in the same line as SEQ ID NO. 63745, preferably the coding region thereof, a homolog or a fragment thereof; which are operable linked.

[28264] In an embodiment thereof the expression cassette comprises in addition c) a nucleic acid molecule encoding a transit peptide, especially a plastidal transit petide in case in Table I, application no. 3, in column 6 in the same line as SEQ ID NO. 63745 is depicted, plastidic is mentioned, or a mitochondrial transit peptide in case in Table I, application no. 3, in column 6 in the same line as SEQ ID NO. 63745 is depicted, mitochondrial is mentioned; which is operable linked, too.

[28265] In another embodiment thereof the expression cassette does not comprise an additional transit peptide in case in Table I, application no. 3, in column 6 in the same line as SEQ ID NO. 63745 is depicted, non-targeted is mentioned.

[28266] In an embodiment the present invention relates to an expresssion cassette comprising a) a promoter, preferably a promoter selected from the group consisting of Big35S, PCUbi, Super and USP, in particular p-Super; and b) the nucleic acid SEQ ID NO. 63803, or a homolog or fragment thereof, or a homolog thereof being depicted in Table I, application no. 3, column 8, in the same line as SEQ ID NO. 63803, preferably the coding region thereof, a homolog or a fragment thereof; which are operable linked.

[28267] In an embodiment thereof the expression cassette comprises in addition c) a nucleic acid molecule encoding a transit peptide, especially a plastidal transit petide in case in Table I, application no. 3, in column 6 in the same line as SEQ ID NO. 63803 is depicted, plastidic is mentioned, or a mitochondrial transit peptide in case in Table I, application no. 3, in column 6 in the same line as SEQ ID NO. 63803 is depicted, mitochondrial is mentioned; which is operable linked, too.

[28268] In another embodiment thereof the expression cassette does not comprise an additional transit peptide in case in Table I, application no. 3, in column 6 in the same line as SEQ ID NO. 63803 is depicted, non-targeted is mentioned.

[28269] In an embodiment the present invention relates to an expresssion cassette comprising a) a promoter, preferably a promoter selected from the group consisting of Big35S, PCUbi, Super and USP, in particular Big35S; and b) the nucleic acid SEQ ID NO. 63807, or a homolog or fragment thereof, or a homolog thereof being depicted in Table I, application no. 3, column 8, in the same line as SEQ ID NO. 63807, preferably the coding region thereof, a homolog or a fragment thereof; which are operable linked.

[28270] In an embodiment thereof the expression cassette comprises in addition c) a nucleic acid molecule encoding a transit peptide, especially a plastidal transit petide in case in Table I, application no. 3, in column 6 in the same line as SEQ ID NO. 63807 is depicted, plastidic is mentioned, or a mitochondrial transit peptide in case in Table I, application no. 3, in column 6 in the same line as SEQ ID NO. 63807 is depicted, mitochondrial is mentioned; which is operable linked, too.

[28271] In another embodiment thereof the expression cassette does not comprise an additional transit peptide in case in Table I, application no. 3, in column 6 in the same line as SEQ ID NO. 63807 is depicted, non-targeted is mentioned.

[28272] In an embodiment the present invention relates to an expresssion cassette comprising a) a promoter, preferably a promoter selected from the group consisting of Big35S, PCUbi, Super and USP, in particular Big35S; and b) the nucleic acid SEQ ID NO. 64144, or a homolog or fragment thereof, or a homolog thereof being depicted in Table I, application no. 3, column 8, in the same line as SEQ ID NO. 64144, preferably the coding region thereof, a homolog or a fragment thereof; which are operable linked.

[28273] In an embodiment thereof the expression cassette comprises in addition c) a nucleic acid molecule encoding a transit peptide, especially a plastidal transit petide in case in Table I, application no. 3, in column 6 in the same line as SEQ ID NO. 64144 is depicted, plastidic is mentioned, or a mitochondrial transit peptide in case in Table I, application no. 3, in column 6 in the same line as SEQ ID NO. 64144 is depicted, mitochondrial is mentioned; which is operable linked, too.

[28274] In another embodiment thereof the expression cassette does not comprise an additional transit peptide in case in Table I, application no. 3, in column 6 in the same line as SEQ ID NO. 64144 is depicted, non-targeted is mentioned.

[28275] In an embodiment the present invention relates to an expresssion cassette comprising a) a promoter, preferably a promoter selected from the group consisting of Big35S, PCUbi, Super and USP, in particular p-Super; and b) the nucleic acid SEQ ID NO. 90189, or a homolog or fragment thereof, or a homolog thereof being depicted in Table I, application no. 3, column 8, in the same line as SEQ ID NO. 90189, preferably the coding region thereof, a homolog or a fragment thereof; which are operable linked.

[28276] In an embodiment thereof the expression cassette comprises in addition c) a nucleic acid molecule encoding a transit peptide, especially a plastidal transit petide in case in Table I, application no. 3, in column 6 in the same line as SEQ ID NO. 90189 is depicted, plastidic is mentioned, or a mitochondrial transit peptide in case in Table I, application no. 3, in column 6 in the same line as SEQ ID NO. 90189 is depicted, mitochondrial is mentioned; which is operable linked, too.

[28277] In another embodiment thereof the expression cassette does not comprise an additional transit peptide in case in Table I, application no. 3, in column 6 in the same line as SEQ ID NO. 90189 is depicted, non-targeted is mentioned.

[28278] In an embodiment the present invention relates to an expresssion cassette comprising a) a promoter, preferably a promoter selected from the group consisting of Big35S, PCUbi, Super and USP, in particular p-Super; and b) the nucleic acid SEQ ID NO. 64148, or a homolog or fragment thereof, or a homolog thereof being depicted in Table I, application no. 3, column 8, in the same line as SEQ ID NO. 64148, preferably the coding region thereof, a homolog or a fragment thereof; which are operable linked.

[28279] In an embodiment thereof the expression cassette comprises in addition c) a nucleic acid molecule encoding a transit peptide, especially a plastidal transit petide in case in Table I, application no. 3, in column 6 in the same line as SEQ ID NO. 64148 is depicted, plastidic is mentioned, or a mitochondrial transit peptide in case in Table I, application no. 3, in column 6 in the same line as SEQ ID NO. 64148 is depicted, mitochondrial is mentioned; which is operable linked, too.

[28280] In another embodiment thereof the expression cassette does not comprise an additional transit peptide in case in Table I, application no. 3, in column 6 in the same line as SEQ ID NO. 64148 is depicted, non-targeted is mentioned.

[28281] In an embodiment the present invention relates to an expresssion cassette comprising a) a promoter, preferably a promoter selected from the group consisting of Big35S, PCUbi, Super and USP, in particular p-Super; and b) the nucleic acid SEQ ID NO. 90278, or a homolog or fragment thereof, or a homolog thereof being depicted in Table I, application no. 3, column 8, in the same line as SEQ ID NO. 90278, preferably the coding region thereof, a homolog or a fragment thereof; which are operable linked.

[28282] In an embodiment thereof the expression cassette comprises in addition c) a nucleic acid molecule encoding a transit peptide, especially a plastidal transit petide in case in Table I, application no. 3, in column 6 in the same line as SEQ ID NO. 90278 is depicted, plastidic is mentioned, or a mitochondrial transit peptide in case in Table I, application no. 3, in column 6 in the same line as SEQ ID NO. 90278 is depicted, mitochondrial is mentioned; which is operable linked, too.

[28283] In another embodiment thereof the expression cassette does not comprise an additional transit peptide in case in Table I, application no. 3, in column 6 in the same line as SEQ ID NO. 90278 is depicted, non-targeted is mentioned.

[28284] In an embodiment the present invention relates to an expresssion cassette comprising a) a promoter, preferably a promoter selected from the group consisting of Big35S, PCUbi, Super and USP, in particular Big35S; and b) the nucleic acid SEQ ID NO. 64177, or a homolog or fragment thereof, or a homolog thereof being depicted in Table I, application no. 3, column 8, in the same line as SEQ ID NO. 64177, preferably the coding region thereof, a homolog or a fragment thereof; which are operable linked.

[28285] In an embodiment thereof the expression cassette comprises in addition c) a nucleic acid molecule encoding a transit peptide, especially a plastidal transit petide in case in Table I, application no. 3, in column 6 in the same line as SEQ ID NO. 64177 is depicted, plastidic is mentioned, or a mitochondrial transit peptide in case in Table I, application no. 3, in column 6 in the same line as SEQ ID NO. 64177 is depicted, mitochondrial is mentioned; which is operable linked, too.

[28286] In another embodiment thereof the expression cassette does not comprise an additional transit peptide in case in Table I, application no. 3, in column 6 in the same line as SEQ ID NO. 64177 is depicted, non-targeted is mentioned.

[28287] In an embodiment the present invention relates to an expresssion cassette comprising a) a promoter, preferably a promoter selected from the group consisting of Big35S, PCUbi, Super and USP, in particular p-Super; and b) the nucleic acid SEQ ID NO. 64315, or a homolog or fragment thereof, or a homolog thereof being depicted in Table I, application no. 3, column 8, in the same line as SEQ ID NO. 64315, preferably the coding region thereof, a homolog or a fragment thereof; which are operable linked.

[28288] In an embodiment thereof the expression cassette comprises in addition c) a nucleic acid molecule encoding a transit peptide, especially a plastidal transit petide in case in Table I, application no. 3, in column 6 in the same line as SEQ ID NO. 64315 is depicted, plastidic is mentioned, or a mitochondrial transit peptide in case in Table I, application no. 3, in column 6 in the same line as SEQ ID NO. 64315 is depicted, mitochondrial is mentioned; which is operable linked, too.

[28289] In another embodiment thereof the expression cassette does not comprise an additional transit peptide in case in Table I, application no. 3, in column 6 in the same line as SEQ ID NO. 64315 is depicted, non-targeted is mentioned.

[28290] In an embodiment the present invention relates to an expresssion cassette comprising a) a promoter, preferably a promoter selected from the group consisting of Big35S, PCUbi, Super and USP, in particular p-Super; and b) the nucleic acid SEQ ID NO. 14715, or a homolog or fragment thereof, or a homolog thereof being depicted in Table I, application no. 3, column 8, in the same line as SEQ ID NO. 14715, preferably the coding region thereof, a homolog or a fragment thereof; which are operable linked.

[28291] In an embodiment thereof the expression cassette comprises in addition c) a nucleic acid molecule encoding a transit peptide, especially a plastidal transit petide in case in Table I, application no. 3, in column 6 in the same line as SEQ ID NO. 14715 is depicted, plastidic is mentioned, or a mitochondrial transit peptide in case in Table I, application no. 3, in column 6 in the same line as SEQ ID NO. 14715 is depicted, mitochondrial is mentioned; which is operable linked, too.

[28292] In another embodiment thereof the expression cassette does not comprise an additional transit peptide in case in Table I, application no. 3, in column 6 in the same line as SEQ ID NO. 14715 is depicted, non-targeted is mentioned.

[28293] In an embodiment the present invention relates to an expresssion cassette comprising a) a promoter, preferably a promoter selected from the group consisting of Big35S, PCUbi, Super and USP, in particular Big35S; and b) the nucleic acid SEQ ID NO. 90284, or a homolog or fragment thereof, or a homolog thereof being depicted in Table I, application no. 3, column 8, in the same line as SEQ ID NO. 90284, preferably the coding region thereof, a homolog or a fragment thereof; which are operable linked.

[28294] In an embodiment thereof the expression cassette comprises in addition c) a nucleic acid molecule encoding a transit peptide, especially a plastidal transit petide in case in Table I, application no. 3, in column 6 in the same line as SEQ ID NO. 90284 is depicted, plastidic is mentioned, or a mitochondrial transit peptide in case in Table I, application no. 3, in column 6 in the same line as SEQ ID NO. 90284 is depicted, mitochondrial is mentioned; which is operable linked, too.

[28295] In another embodiment thereof the expression cassette does not comprise an additional transit peptide in case in Table I, application no. 3, in column 6 in the same line as SEQ ID NO. 90284 is depicted, non-targeted is mentioned.

[28296] In an embodiment the present invention relates to an expresssion cassette comprising a) a promoter, preferably a promoter selected from the group consisting of Big35S, PCUbi, Super and USP, in particular p-Super; and b) the nucleic acid SEQ ID NO. 64546, or a homolog or fragment thereof, or a homolog thereof being depicted in Table I, application no. 3, column 8, in the same line as SEQ ID NO. 64546, preferably the coding region thereof, a homolog or a fragment thereof; which are operable linked.

[28297] In an embodiment thereof the expression cassette comprises in addition c) a nucleic acid molecule encoding a transit peptide, especially a plastidal transit petide in case in Table I, application no. 3, in column 6 in the same line as SEQ ID NO. 64546 is depicted, plastidic is mentioned, or a mitochondrial transit peptide in case in Table I, application no. 3, in column 6 in the same line as SEQ ID NO. 64546 is depicted, mitochondrial is mentioned; which is operable linked, too.

[28298] In another embodiment thereof the expression cassette does not comprise an additional transit peptide in case in Table I, application no. 3, in column 6 in the same line as SEQ ID NO. 64546 is depicted, non-targeted is mentioned.

[28299] In an embodiment the present invention relates to an expresssion cassette comprising a) a promoter, preferably a promoter selected from the group consisting of Big35S, PCUbi, Super and USP, in particular p-Super; and b) the nucleic acid SEQ ID NO. 64563, or a homolog or fragment thereof, or a homolog thereof being depicted in Table I, application no. 3, column 8, in the same line as SEQ ID NO. 64563, preferably the coding region thereof, a homolog or a fragment thereof; which are operable linked.

[28300] In an embodiment thereof the expression cassette comprises in addition c) a nucleic acid molecule encoding a transit peptide, especially a plastidal transit petide in case in Table I, application no. 3, in column 6 in the same line as SEQ ID NO. 64563 is depicted, plastidic is mentioned, or a mitochondrial transit peptide in case in Table I, application no. 3, in column 6 in the same line as SEQ ID NO. 64563 is depicted, mitochondrial is mentioned; which is operable linked, too.

[28301] In another embodiment thereof the expression cassette does not comprise an additional transit peptide in case in Table I, application no. 3, in column 6 in the same line as SEQ ID NO. 64563 is depicted, non-targeted is mentioned.

[28302] In an embodiment the present invention relates to an expresssion cassette comprising a) a promoter, preferably a promoter selected from the group consisting of Big35S, PCUbi, Super and USP, in particular p-Super; and b) the nucleic acid SEQ ID NO. 90306, or a homolog or fragment thereof, or a homolog thereof being depicted in Table I, application no. 3, column 8, in the same line as SEQ ID NO. 90306, preferably the coding region thereof, a homolog or a fragment thereof; which are operable linked.

[28303] In an embodiment thereof the expression cassette comprises in addition c) a nucleic acid molecule encoding a transit peptide, especially a plastidal transit petide in case in Table I, application no. 3, in column 6 in the same line as SEQ ID NO. 90306 is depicted, plastidic is mentioned, or a mitochondrial transit peptide in case in Table I, application no. 3, in column 6 in the same line as SEQ ID NO. 90306 is depicted, mitochondrial is mentioned; which is operable linked, too.

[28304] In another embodiment thereof the expression cassette does not comprise an additional transit peptide in case in Table I, application no. 3, in column 6 in the same line as SEQ ID NO. 90306 is depicted, non-targeted is mentioned.

[28305] In an embodiment the present invention relates to an expresssion cassette comprising a) a promoter, preferably a promoter selected from the group consisting of Big35S, PCUbi, Super and USP, in particular p-Super; and b) the nucleic acid SEQ ID NO. 64964, or a homolog or fragment thereof, or a homolog thereof being depicted in Table I, application no. 3, column 8, in the same line as SEQ ID NO. 64964, preferably the coding region thereof, a homolog or a fragment thereof; which are operable linked.

[28306] In an embodiment thereof the expression cassette comprises in addition c) a nucleic acid molecule encoding a transit peptide, especially a plastidal transit petide in case in Table I, application no. 3, in column 6 in the same line as SEQ ID NO. 64964 is depicted, plastidic is mentioned, or a mitochondrial transit peptide in case in Table I, application no. 3, in column 6 in the same line as SEQ ID NO. 64964 is depicted, mitochondrial is mentioned; which is operable linked, too.

[28307] In another embodiment thereof the expression cassette does not comprise an additional transit peptide in case in Table I, application no. 3, in column 6 in the same line as SEQ ID NO. 64964 is depicted, non-targeted is mentioned.

[28308] In an embodiment the present invention relates to an expresssion cassette comprising a) a promoter, preferably a promoter selected from the group consisting of Big35S, PCUbi, Super and USP, in particular Big35S; and b) the nucleic acid SEQ ID NO. 14843, or a homolog or fragment thereof, or a homolog thereof being depicted in Table I, application no. 3, column 8, in the same line as SEQ ID NO. 14843, preferably the coding region thereof, a homolog or a fragment thereof; which are operable linked.

[28309] In an embodiment thereof the expression cassette comprises in addition c) a nucleic acid molecule encoding a transit peptide, especially a plastidal transit petide in case in Table I, application no. 3, in column 6 in the same line as SEQ ID NO. 14843 is depicted, plastidic is mentioned, or a mitochondrial transit peptide in case in Table I, application no. 3, in column 6 in the same line as SEQ ID NO. 14843 is depicted, mitochondrial is mentioned; which is operable linked, too.

[28310] In another embodiment thereof the expression cassette does not comprise an additional transit peptide in case in Table I, application no. 3, in column 6 in the same line as SEQ ID NO. 14843 is depicted, non-targeted is mentioned.

[28311] In an embodiment the present invention relates to an expresssion cassette comprising a) a promoter, preferably a promoter selected from the group consisting of Big35S, PCUbi, Super and USP, in particular p-Super; and b) the nucleic acid SEQ ID NO. 90409, or a homolog or fragment thereof, or a homolog thereof being depicted in Table I, application no. 3, column 8, in the same line as SEQ ID NO. 90409, preferably the coding region thereof, a homolog or a fragment thereof; which are operable linked.

[28312] In an embodiment thereof the expression cassette comprises in addition c) a nucleic acid molecule encoding a transit peptide, especially a plastidal transit petide in case in Table I, application no. 3, in column 6 in the same line as SEQ ID NO. 90409 is depicted, plastidic is mentioned, or a mitochondrial transit peptide in case in Table I, application no. 3, in column 6 in the same line as SEQ ID NO. 90409 is depicted, mitochondrial is mentioned; which is operable linked, too.

[28313] In another embodiment thereof the expression cassette does not comprise an additional transit peptide in case in Table I, application no. 3, in column 6 in the same line as SEQ ID NO. 90409 is depicted, non-targeted is mentioned.

[28314] In an embodiment the present invention relates to an expresssion cassette comprising a) a promoter, preferably a promoter selected from the group consisting of Big35S, PCUbi, Super and USP, in particular p-PcUBI; and b) the nucleic acid SEQ ID NO. 66274, or a homolog or fragment thereof, or a homolog thereof being depicted in Table I, application no. 3, column 8, in the same line as SEQ ID NO. 66274, preferably the coding region thereof, a homolog or a fragment thereof; which are operable linked.

[28315] In an embodiment thereof the expression cassette comprises in addition c) a nucleic acid molecule encoding a transit peptide, especially a plastidal transit petide in case in Table I, application no. 3, in column 6 in the same line as SEQ ID NO. 66274 is depicted, plastidic is mentioned, or a mitochondrial transit peptide in case in Table I, application no. 3, in column 6 in the same line as SEQ ID NO. 66274 is depicted, mitochondrial is mentioned; which is operable linked, too.

[28316] In another embodiment thereof the expression cassette does not comprise an additional transit peptide in case in Table I, application no. 3, in column 6 in the same line as SEQ ID NO. 66274 is depicted, non-targeted is mentioned.

[28317] In an embodiment the present invention relates to an expresssion cassette comprising a) a promoter, preferably a promoter selected from the group consisting of Big35S, PCUbi, Super and USP, in particular p-PcUBI; and b) the nucleic acid SEQ ID NO. 90602, or a homolog or fragment thereof, or a homolog thereof being depicted in Table I, application no. 3, column 8, in the same line as SEQ ID NO. 90602, preferably the coding region thereof, a homolog or a fragment thereof; which are operable linked.

[28318] In an embodiment thereof the expression cassette comprises in addition c) a nucleic acid molecule encoding a transit peptide, especially a plastidal transit petide in case in Table I, application no. 3, in column 6 in the same line as SEQ ID NO. 90602 is depicted, plastidic is mentioned, or a mitochondrial transit peptide in case in Table I, application no. 3, in column 6 in the same line as SEQ ID NO. 90602 is depicted, mitochondrial is mentioned; which is operable linked, too.

[28319] In another embodiment thereof the expression cassette does not comprise an additional transit peptide in case in Table I, application no. 3, in column 6 in the same line as SEQ ID NO. 90602 is depicted, non-targeted is mentioned.

[28320] In an embodiment the present invention relates to an expresssion cassette comprising a) a promoter, preferably a promoter selected from the group consisting of Big35S, PCUbi, Super and USP, in particular Big35S; and b) the nucleic acid SEQ ID NO. 90615, or a homolog or fragment thereof, or a homolog thereof being depicted in Table I, application no. 3, column 8, in the same line as SEQ ID NO. 90615, preferably the coding region thereof, a homolog or a fragment thereof; which are operable linked.

[28321] In an embodiment thereof the expression cassette comprises in addition c) a nucleic acid molecule encoding a transit peptide, especially a plastidal transit petide in case in Table I, application no. 3, in column 6 in the same line as SEQ ID NO. 90615 is depicted, plastidic is mentioned, or a mitochondrial transit peptide in case in Table I, application no. 3, in column 6 in the same line as SEQ ID NO. 90615 is depicted, mitochondrial is mentioned; which is operable linked, too.

[28322] In another embodiment thereof the expression cassette does not comprise an additional transit peptide in case in Table I, application no. 3, in column 6 in the same line as SEQ ID NO. 90615 is depicted, non-targeted is mentioned.

[28323] In an embodiment the present invention relates to an expresssion cassette comprising a) a promoter, preferably a promoter selected from the group consisting of Big35S, PCUbi, Super and USP, in particular p-Super; and b) the nucleic acid SEQ ID NO. 91045, or a homolog or fragment thereof, or a homolog thereof being depicted in Table I, application no. 3, column 8, in the same line as SEQ ID NO. 91045, preferably the coding region thereof, a homolog or a fragment thereof; which are operable linked.

[28324] In an embodiment thereof the expression cassette comprises in addition c) a nucleic acid molecule encoding a transit peptide, especially a plastidal transit petide in case in Table I, application no. 3, in column 6 in the same line as SEQ ID NO. 91045 is depicted, plastidic is mentioned, or a mitochondrial transit peptide in case in Table I, application no. 3, in column 6 in the same line as SEQ ID NO. 91045 is depicted, mitochondrial is mentioned; which is operable linked, too.

[28325] In another embodiment thereof the expression cassette does not comprise an additional transit peptide in case in Table I, application no. 3, in column 6 in the same line as SEQ ID NO. 91045 is depicted, non-targeted is mentioned.

[28326] In an embodiment the present invention relates to an expresssion cassette comprising a) a promoter, preferably a promoter selected from the group consisting of Big35S, PCUbi, Super and USP, in particular p-PcUBI; and b) the nucleic acid SEQ ID NO. 91659, or a homolog or fragment thereof, or a homolog thereof being depicted in Table I, application no. 3, column 8, in the same line as SEQ ID NO. 91659, preferably the coding region thereof, a homolog or a fragment thereof; which are operable linked.

[28327] In an embodiment thereof the expression cassette comprises in addition c) a nucleic acid molecule encoding a transit peptide, especially a plastidal transit petide in case in Table I, application no. 3, in column 6 in the same line as SEQ ID NO. 91659 is depicted, plastidic is mentioned, or a mitochondrial transit peptide in case in Table I, application no. 3, in column 6 in the same line as SEQ ID NO. 91659 is depicted, mitochondrial is mentioned; which is operable linked, too.

[28328] In another embodiment thereof the expression cassette does not comprise an additional transit peptide in case in Table I, application no. 3, in column 6 in the same line as SEQ ID NO. 91659 is depicted, non-targeted is mentioned.

[28329] In an embodiment the present invention relates to an expresssion cassette comprising a) a promoter, preferably a promoter selected from the group consisting of Big35S, PCUbi, Super and USP, in particular p-Super; and b) the nucleic acid SEQ ID NO. 91781, or a homolog or fragment thereof, or a homolog thereof being depicted in Table I, application no. 3, column 8, in the same line as SEQ ID NO. 91781, preferably the coding region thereof, a homolog or a fragment thereof; which are operable linked.

[28330] In an embodiment thereof the expression cassette comprises in addition c) a nucleic acid molecule encoding a transit peptide, especially a plastidal transit petide in case in Table I, application no. 3, in column 6 in the same line as SEQ ID NO. 91781 is depicted, plastidic is mentioned, or a mitochondrial transit peptide in case in Table I, application no. 3, in column 6 in the same line as SEQ ID NO. 91781 is depicted, mitochondrial is mentioned; which is operable linked, too.

[28331] In another embodiment thereof the expression cassette does not comprise an additional transit peptide in case in Table I, application no. 3, in column 6 in the same line as SEQ ID NO. 91781 is depicted, non-targeted is mentioned.

[28332] In an embodiment the present invention relates to an expresssion cassette comprising a) a promoter, preferably a promoter selected from the group consisting of Big35S, PCUbi, Super and USP, in particular p-Super; and b) the nucleic acid SEQ ID NO. 91785, or a homolog or fragment thereof, or a homolog thereof being depicted in Table I, application no. 3, column 8, in the same line as SEQ ID NO. 91785, preferably the coding region thereof, a homolog or a fragment thereof; which are operable linked.

[28333] In an embodiment thereof the expression cassette comprises in addition c) a nucleic acid molecule encoding a transit peptide, especially a plastidal transit petide in case in Table I, application no. 3, in column 6 in the same line as SEQ ID NO. 91785 is depicted, plastidic is mentioned, or a mitochondrial transit peptide in case in Table I, application no. 3, in column 6 in the same line as SEQ ID NO. 91785 is depicted, mitochondrial is mentioned; which is operable linked, too.

[28334] In another embodiment thereof the expression cassette does not comprise an additional transit peptide in case in Table I, application no. 3, in column 6 in the same line as SEQ ID NO. 91785 is depicted, non-targeted is mentioned.

[28335] In an embodiment the present invention relates to an expresssion cassette comprising a) a promoter, preferably a promoter selected from the group consisting of Big35S, PCUbi, Super and USP, in particular p-Super; and b) the nucleic acid SEQ ID NO. 91958, or a homolog or fragment thereof, or a homolog thereof being depicted in Table I, application no. 3, column 8, in the same line as SEQ ID NO. 91958, preferably the coding region thereof, a homolog or a fragment thereof; which are operable linked.

[28336] In an embodiment thereof the expression cassette comprises in addition c) a nucleic acid molecule encoding a transit peptide, especially a plastidal transit petide in case in Table I, application no. 3, in column 6 in the same line as SEQ ID NO. 91958 is depicted, plastidic is mentioned, or a mitochondrial transit peptide in case in Table I, application no. 3, in column 6 in the same line as SEQ ID NO. 91958 is depicted, mitochondrial is mentioned; which is operable linked, too.

[28337] In another embodiment thereof the expression cassette does not comprise an additional transit peptide in case in Table I, application no. 3, in column 6 in the same line as SEQ ID NO. 91958 is depicted, non-targeted is mentioned.

[28338] In an embodiment the present invention relates to an expresssion cassette comprising a) a promoter, preferably a promoter selected from the group consisting of Big35S, PCUbi, Super and USP, in particular p-Super; and b) the nucleic acid SEQ ID NO. 91973, or a homolog or fragment thereof, or a homolog thereof being depicted in Table I, application no. 3, column 8, in the same line as SEQ ID NO. 91973, preferably the coding region thereof, a homolog or a fragment thereof; which are operable linked.

[28339] In an embodiment thereof the expression cassette comprises in addition c) a nucleic acid molecule encoding a transit peptide, especially a plastidal transit petide in case in Table I, application no. 3, in column 6 in the same line as SEQ ID NO. 91973 is depicted, plastidic is mentioned, or a mitochondrial transit peptide in case in Table I, application no. 3, in column 6 in the same line as SEQ ID NO. 91973 is depicted, mitochondrial is mentioned; which is operable linked, too.

[28340] In another embodiment thereof the expression cassette does not comprise an additional transit peptide in case in Table I, application no. 3, in column 6 in the same line as SEQ ID NO. 91973 is depicted, non-targeted is mentioned.

[28341] In an embodiment the present invention relates to an expresssion cassette comprising a) a promoter, preferably a promoter selected from the group consisting of Big35S, PCUbi, Super and USP, in particular p-Super; and b) the nucleic acid SEQ ID NO. 92274, or a homolog or fragment thereof, or a homolog thereof being depicted in Table I, application no. 3, column 8, in the same line as SEQ ID NO. 92274, preferably the coding region thereof, a homolog or a fragment thereof; which are operable linked.

[28342] In an embodiment thereof the expression cassette comprises in addition c) a nucleic acid molecule encoding a transit peptide, especially a plastidal transit petide in case in Table I, application no. 3, in column 6 in the same line as SEQ ID NO. 92274 is depicted, plastidic is mentioned, or a mitochondrial transit peptide in case in Table I, application no. 3, in column 6 in the same line as SEQ ID NO. 92274 is depicted, mitochondrial is mentioned; which is operable linked, too.

[28343] In another embodiment thereof the expression cassette does not comprise an additional transit peptide in case in Table I, application no. 3, in column 6 in the same line as SEQ ID NO. 92274 is depicted, non-targeted is mentioned.

[28344] In an embodiment the present invention relates to an expresssion cassette comprising a) a promoter, preferably a promoter selected from the group consisting of Big35S, PCUbi, Super and USP, in particular p-Super; and b) the nucleic acid SEQ ID NO. 92325, or a homolog or fragment thereof, or a homolog thereof being depicted in Table I, application no. 3, column 8, in the same line as SEQ ID NO. 92325, preferably the coding region thereof, a homolog or a fragment thereof; which are operable linked.

[28345] In an embodiment thereof the expression cassette comprises in addition c) a nucleic acid molecule encoding a transit peptide, especially a plastidal transit petide in case in Table I, application no. 3, in column 6 in the same line as SEQ ID NO. 92325 is depicted, plastidic is mentioned, or a mitochondrial transit peptide in case in Table I, application no. 3, in column 6 in the same line as SEQ ID NO. 92325 is depicted, mitochondrial is mentioned; which is operable linked, too.

[28346] In another embodiment thereof the expression cassette does not comprise an additional transit peptide in case in Table I, application no. 3, in column 6 in the same line as SEQ ID NO. 92325 is depicted, non-targeted is mentioned.

[28347] In an embodiment the present invention relates to an expresssion cassette comprising a) a promoter, preferably a promoter selected from the group consisting of Big35S, PCUbi, Super and USP, in particular p-Super; and b) the nucleic acid SEQ ID NO. 92339, or a homolog or fragment thereof, or a homolog thereof being depicted in Table I, application no. 3, column 8, in the same line as SEQ ID NO. 92339, preferably the coding region thereof, a homolog or a fragment thereof; which are operable linked.

[28348] In an embodiment thereof the expression cassette comprises in addition c) a nucleic acid molecule encoding a transit peptide, especially a plastidal transit petide in case in Table I, application no. 3, in column 6 in the same line as SEQ ID NO. 92339 is depicted, plastidic is mentioned, or a mitochondrial transit peptide in case in Table I, application no. 3, in column 6 in the same line as SEQ ID NO. 92339 is depicted, mitochondrial is mentioned; which is operable linked, too.

[28349] In another embodiment thereof the expression cassette does not comprise an additional transit peptide in case in Table I, application no. 3, in column 6 in the same line as SEQ ID NO. 92339 is depicted, non-targeted is mentioned.

[28350] In an embodiment the present invention relates to an expresssion cassette comprising a) a promoter, preferably a promoter selected from the group consisting of Big35S, PCUbi, Super and USP, in particular p-PcUBI; and b) the nucleic acid SEQ ID NO. 92391, or a homolog or fragment thereof, or a homolog thereof being depicted in Table I, application no. 3, column 8, in the same line as SEQ ID NO. 92391, preferably the coding region thereof, a homolog or a fragment thereof; which are operable linked.

[28351] In an embodiment thereof the expression cassette comprises in addition c) a nucleic acid molecule encoding a transit peptide, especially a plastidal transit petide in case in Table I, application no. 3, in column 6 in the same line as SEQ ID NO. 92391 is depicted, plastidic is mentioned, or a mitochondrial transit peptide in case in Table I, application no. 3, in column 6 in the same line as SEQ ID NO. 92391 is depicted, mitochondrial is mentioned; which is operable linked, too.

[28352] In another embodiment thereof the expression cassette does not comprise an additional transit peptide in case in Table I, application no. 3, in column 6 in the same line as SEQ ID NO. 92391 is depicted, non-targeted is mentioned.

[28353] In an embodiment the present invention relates to an expresssion cassette comprising a) a promoter, preferably a promoter selected from the group consisting of Big35S, PCUbi, Super and USP, in particular p-Super; and b) the nucleic acid SEQ ID NO. 92510, or a homolog or fragment thereof, or a homolog thereof being depicted in Table I, application no. 3, column 8, in the same line as SEQ ID NO. 92510, preferably the coding region thereof, a homolog or a fragment thereof; which are operable linked.

[28354] In an embodiment thereof the expression cassette comprises in addition c) a nucleic acid molecule encoding a transit peptide, especially a plastidal transit petide in case in Table I, application no. 3, in column 6 in the same line as SEQ ID NO. 92510 is depicted, plastidic is mentioned, or a mitochondrial transit peptide in case in Table I, application no. 3, in column 6 in the same line as SEQ ID NO. 92510 is depicted, mitochondrial is mentioned; which is operable linked, too.

[28355] In another embodiment thereof the expression cassette does not comprise an additional transit peptide in case in Table I, application no. 3, in column 6 in the same line as SEQ ID NO. 92510 is depicted, non-targeted is mentioned.

[28356] In an embodiment the present invention relates to an expresssion cassette comprising a) a promoter, preferably a promoter selected from the group consisting of Big35S, PCUbi, Super and USP, in particular p-Super; and b) the nucleic acid SEQ ID NO. 15179, or a homolog or fragment thereof, or a homolog thereof being depicted in Table I, application no. 3, column 8, in the same line as SEQ ID NO. 15179, preferably the coding region thereof, a homolog or a fragment thereof; which are operable linked.

[28357] In an embodiment thereof the expression cassette comprises in addition c) a nucleic acid molecule encoding a transit peptide, especially a plastidal transit petide in case in Table I, application no. 3, in column 6 in the same line as SEQ ID NO. 15179 is depicted, plastidic is mentioned, or a mitochondrial transit peptide in case in Table I, application no. 3, in column 6 in the same line as SEQ ID NO. 15179 is depicted, mitochondrial is mentioned; which is operable linked, too.

[28358] In another embodiment thereof the expression cassette does not comprise an additional transit peptide in case in Table I, application no. 3, in column 6 in the same line as SEQ ID NO. 15179 is depicted, non-targeted is mentioned.

[28359] In an embodiment the present invention relates to an expresssion cassette comprising a) a promoter, preferably a promoter selected from the group consisting of Big35S, PCUbi, Super and USP, in particular Big35S; and b) the nucleic acid SEQ ID NO. 67968, or a homolog or fragment thereof, or a homolog thereof being depicted in Table I, application no. 3, column 8, in the same line as SEQ ID NO. 67968, preferably the coding region thereof, a homolog or a fragment thereof; which are operable linked.

[28360] In an embodiment thereof the expression cassette comprises in addition c) a nucleic acid molecule encoding a transit peptide, especially a plastidal transit petide in case in Table I, application no. 3, in column 6 in the same line as SEQ ID NO. 67968 is depicted, plastidic is mentioned, or a mitochondrial transit peptide in case in Table I, application no. 3, in column 6 in the same line as SEQ ID NO. 67968 is depicted, mitochondrial is mentioned; which is operable linked, too.

[28361] In another embodiment thereof the expression cassette does not comprise an additional transit peptide in case in Table I, application no. 3, in column 6 in the same line as SEQ ID NO. 67968 is depicted, non-targeted is mentioned.

[28362] In an embodiment the present invention relates to an expresssion cassette comprising a) a promoter, preferably a promoter selected from the group consisting of Big35S, PCUbi, Super and USP, in particular p-Super; and b) the nucleic acid SEQ ID NO. 92540, or a homolog or fragment thereof, or a homolog thereof being depicted in Table I, application no. 3, column 8, in the same line as SEQ ID NO. 92540, preferably the coding region thereof, a homolog or a fragment thereof; which are operable linked.

[28363] In an embodiment thereof the expression cassette comprises in addition c) a nucleic acid molecule encoding a transit peptide, especially a plastidal transit petide in case in Table I, application no. 3, in column 6 in the same line as SEQ ID NO. 92540 is depicted, plastidic is mentioned, or a mitochondrial transit peptide in case in Table I, application no. 3, in column 6 in the same line as SEQ ID NO. 92540 is depicted, mitochondrial is mentioned; which is operable linked, too.

[28364] In another embodiment thereof the expression cassette does not comprise an additional transit peptide in case in Table I, application no. 3, in column 6 in the same line as SEQ ID NO. 92540 is depicted, non-targeted is mentioned.

[28365] In an embodiment the present invention relates to an expresssion cassette comprising a) a promoter, preferably a promoter selected from the group consisting of Big35S, PCUbi, Super and USP, in particular Big35S; and b) the nucleic acid SEQ ID NO. 92616, or a homolog or fragment thereof, or a homolog thereof being depicted in Table I, application no. 3, column 8, in the same line as SEQ ID NO. 92616, preferably the coding region thereof, a homolog or a fragment thereof; which are operable linked.

[28366] In an embodiment thereof the expression cassette comprises in addition c) a nucleic acid molecule encoding a transit peptide, especially a plastidal transit petide in case in Table I, application no. 3, in column 6 in the same line as SEQ ID NO. 92616 is depicted, plastidic is mentioned, or a mitochondrial transit peptide in case in Table I, application no. 3, in column 6 in the same line as SEQ ID NO. 92616 is depicted, mitochondrial is mentioned; which is operable linked, too.

[28367] In another embodiment thereof the expression cassette does not comprise an additional transit peptide in case in Table I, application no. 3, in column 6 in the same line as SEQ ID NO. 92616 is depicted, non-targeted is mentioned.

[28368] In an embodiment the present invention relates to an expresssion cassette comprising a) a promoter, preferably a promoter selected from the group consisting of Big35S, PCUbi, Super and USP, in particular Big35S; and b) the nucleic acid SEQ ID NO. 92668, or a homolog or fragment thereof, or a homolog thereof being depicted in Table I, application no. 3, column 8, in the same line as SEQ ID NO. 92668, preferably the coding region thereof, a homolog or a fragment thereof; which are operable linked.

[28369] In an embodiment thereof the expression cassette comprises in addition c) a nucleic acid molecule encoding a transit peptide, especially a plastidal transit petide in case in Table I, application no. 3, in column 6 in the same line as SEQ ID NO. 92668 is depicted, plastidic is mentioned, or a mitochondrial transit peptide in case in Table I, application no. 3, in column 6 in the same line as SEQ ID NO. 92668 is depicted, mitochondrial is mentioned; which is operable linked, too.

[28370] In another embodiment thereof the expression cassette does not comprise an additional transit peptide in case in Table I, application no. 3, in column 6 in the same line as SEQ ID NO. 92668 is depicted, non-targeted is mentioned.

[28371] In an embodiment the present invention relates to an expresssion cassette comprising a) a promoter, preferably a promoter selected from the group consisting of Big35S, PCUbi, Super and USP, in particular Big35S; and b) the nucleic acid SEQ ID NO. 93091, or a homolog or fragment thereof, or a homolog thereof being depicted in Table I, application no. 3, column 8, in the same line as SEQ ID NO. 93091, preferably the coding region thereof, a homolog or a fragment thereof; which are operable linked.

[28372] In an embodiment thereof the expression cassette comprises in addition c) a nucleic acid molecule encoding a transit peptide, especially a plastidal transit petide in case in Table I, application no. 3, in column 6 in the same line as SEQ ID NO. 93091 is depicted, plastidic is mentioned, or a mitochondrial transit peptide in case in Table I, application no. 3, in column 6 in the same line as SEQ ID NO. 93091 is depicted, mitochondrial is mentioned; which is operable linked, too.

[28373] In another embodiment thereof the expression cassette does not comprise an additional transit peptide in case in Table I, application no. 3, in column 6 in the same line as SEQ ID NO. 93091 is depicted, non-targeted is mentioned.

[28374] In an embodiment the present invention relates to an expresssion cassette comprising a) a promoter, preferably a promoter selected from the group consisting of Big35S, PCUbi, Super and USP, in particular p-USP; and b) the nucleic acid SEQ ID NO. 93218, or a homolog or fragment thereof, or a homolog thereof being depicted in Table I, application no. 3, column 8, in the same line as SEQ ID NO. 93218, preferably the coding region thereof, a homolog or a fragment thereof; which are operable linked.

[28375] In an embodiment thereof the expression cassette comprises in addition c) a nucleic acid molecule encoding a transit peptide, especially a plastidal transit petide in case in Table I, application no. 3, in column 6 in the same line as SEQ ID NO. 93218 is depicted, plastidic is mentioned, or a mitochondrial transit peptide in case in Table I, application no. 3, in column 6 in the same line as SEQ ID NO. 93218 is depicted, mitochondrial is mentioned; which is operable linked, too.

[28376] In another embodiment thereof the expression cassette does not comprise an additional transit peptide in case in Table I, application no. 3, in column 6 in the same line as SEQ ID NO. 93218 is depicted, non-targeted is mentioned.

[28377] In an embodiment the present invention relates to an expresssion cassette comprising a) a promoter, preferably a promoter selected from the group consisting of Big35S, PCUbi, Super and USP, in particular p-PcUBI; and b) the nucleic acid SEQ ID NO. 68413, or a homolog or fragment thereof, or a homolog thereof being depicted in Table I, application no. 3, column 8, in the same line as SEQ ID NO. 68413, preferably the coding region thereof, a homolog or a fragment thereof; which are operable linked.

[28378] In an embodiment thereof the expression cassette comprises in addition c) a nucleic acid molecule encoding a transit peptide, especially a plastidal transit petide in case in Table I, application no. 3, in column 6 in the same line as SEQ ID NO. 68413 is depicted, plastidic is mentioned, or a mitochondrial transit peptide in case in Table I, application no. 3, in column 6 in the same line as SEQ ID NO. 68413 is depicted, mitochondrial is mentioned; which is operable linked, too.

[28379] In another embodiment thereof the expression cassette does not comprise an additional transit peptide in case in Table I, application no. 3, in column 6 in the same line as SEQ ID NO. 68413 is depicted, non-targeted is mentioned.

[28380] [0165.1.1.3] to [0170.1.1.3] for the disclosure of these paragraphs see [0165.1.1.1] to [0170.1.1.1] above.

[28381] The invention further provides a vector, comprising a nucleic acid molecule comprising 1) a nucleic acid molecule selected from the group consisting of:
[28382] (a) a nucleic acid molecule encoding a polypeptide shown in Table II, column 5 or 8, application no. 3, preferably shown in Table II A, application no. 3, in column 5, or in Table II A, application no. 3, column 8, or in Table II B, application no. 3, column 8, or a homolog or a fragment thereof;
[28383] (b) a nucleic acid molecule shown in Table I, application no. 3, column 5 or 8, preferably shown in Table I A, application no. 3, in column 5, or in Table I A, application no. 3, column 8, or in Table I B, application no. 3, column 8, preferably the coding region thereof, or a homolog or a fragment thereof;
[28384] (c) a nucleic acid molecule, which, as a result of the degeneracy of the genetic code, can be derived from a polypeptide sequence depicted in column 5 or 8 of Table II, application no. 3, preferably shown in Table II A, application no. 3, in column 5, or in Table II A, application no. 3, column 8, or in Table II B, application no. 3, column 8;
[28385] (d) a nucleic acid molecule having at least 30% identity, preferably at least 40%, 50%, 60%, 70%, 75%, 80%, 85%, 90%, 95%, 96%, 97%, 98%, 99%, 99.5%, with the nucleic acid molecule sequence of a polynucleotide comprising the nucleic acid molecule shown in column 5 or 8 of Table I, application no. 3, preferably shown in Table I A, application no. 3, in column 5, or in Table I A, application no. 3, column 8, or in Table I B, application no. 3, column 8, preferably the coding region thereof;
[28386] (e) a nucleic acid molecule encoding a polypeptide having at least 30% identity, preferably at least 40%, 50% 60%, 70%, 75%, 80%, 85%, 90%, 95%, 96%, 97%, 98%, 99%, 99.5%, identity with the amino acid sequence of the polypeptide encoded by the nucleic acid molecule of (a), (b), (c), or (d);
[28387] (f) a nucleic acid molecule which hybridizes with a nucleic acid molecule of (a), (b), (c), (d), or (e) under stringent hybridization conditions;
[28388] (g) a nucleic acid molecule encoding a polypeptide which can be isolated with the aid of monoclonal or polyclonal antibodies made against a polypeptide encoded by one of the nucleic acid molecules of (a), (b), (c), (d), (e) or (f);
[28389] (h) a nucleic acid molecule encoding a polypeptide comprising the consensus sequence or one or more polypeptide motifs as shown in column 8 of Table IV, application no. 3;
[28390] (i) a nucleic acid molecule encoding a polypeptide having the activity represented by a protein as depicted in column 5 of Table II, application no. 3;
[28391] (j) a nucleic acid molecule comprising a polynucleotide which is obtained by amplifying a cDNA library or a genomic library using the primers in Table III, application no. 3, column 8;
[28392] and
[28393] (k) nucleic acid molecule which is obtainable by screening a suitable nucleic acid library, especially a cDNA library and/or a genomic library, under stringent hybridization conditions with a probe comprising one of the sequences of the nucleic acid molecule of (a), (b), (c), (d), (e), (f), (g), (h), (i) or (j) or with a fragment thereof having at least 15 nt, preferably 20 nt, 30 nt, 50 nt, 100 nt, 200 nt, 500 nt, 1000 nt, 1500 nt, 2000 nt or 3000 nt of the nucleic acid molecule complementary to a nucleic acid sequence characterized in (a), (b), (c), (d), (e), (f), (g), (h), (i) or (j);
   or a nucleic acid molecule comprising a sequence which is complementary thereto.
   (All the references to Tables I to IV are references to the corresponding lines of Tables I to IV.)

[28394] In a preferred embodiment of said vector said nucleic acid molecule according to 1 (a), (b), (c), (d), (e), (f), (g), (h), (i), (j) or (k) encodes a polypeptide which has the activity of the respective polypeptide represented by a protein comprising a polypeptide as depicted in the respective line in column 5 of Table II, application no. 3.

[28395] In another preferred embodiment of said vector said nucleic acid molecule according to 1 (a), (b), (c), (d), (e), (f), (g), (h), (i), (j) or (k) confers a generation or an increase of the respective fine chemical in a non-human organism or a part thereof as compared to a corresponding wild-type non-human organism or part thereof.

[28396] In another preferred embodiment of said vector said nucleic acid molecule according to 1 (a), (b), (c), (d), (e), (f), (g), (h), (i), (j) or (k) encodes a polypeptide which has the activity of the respective polypeptide represented by a protein as depicted in the respective line in column 5 of Table II, application no. 3, and confers a generation or an increase of the respective fine chemical in a non-human organism or a part thereof as compared to a corresponding wild-type non-human organism or part thereof.

[28397] In another embodiment thereof said vector comprises beneath said nucleic acid molecule according to 1 (a), (b), (c), (d), (e), (f), (g), (h), (i), (j) or (k), a promoter, preferably a promoter selected from the group consisting of Big35S, PCUbi, Super and USP, which are operable linked.

[28398] In a preferred embodiment thereof said vector comprises beneath said nucleic acid molecule according to 1 (a), (b), (c), (d), (e), (f), (g), (h), (i), (j) or (k), a promoter, preferably a promoter selected from the group consisting of Big35S, PCUbi, Super and USP, which are operable linked; and said nucleic acid molecule according to 1 (a), (b), (c), (d), (e), (f), (g), (h), (i), (j) or (k) encodes a polypeptide which has the activity of the respective polypeptide represented by a protein comprising a polypeptide as depicted in the respective line in column 5 of Table II, application no. 3.

[28399] In another preferred embodiment thereof said vector comprises beneath said nucleic acid molecule according to 1 (a), (b), (c), (d), (e), (f), (g), (h), (i), (j) or (k), a promoter, preferably a promoter selected from the group consisting of Big35S, PCUbi, Super and USP, which are operable linked; and said nucleic acid molecule according to 1 (a), (b), (c), (d), (e), (f), (g), (h), (i), (j) or (k) confers a generation or an increase of the respective fine chemical in a non-human organism or a part thereof as compared to a corresponding wild-type non-human organism or part thereof.

[28400] In another preferred embodiment thereof said vector comprises beneath said nucleic acid molecule according to 1 (a), (b), (c), (d), (e), (f), (g), (h), (i), (j) or (k), a promoter, preferably a promoter selected from the group consisting of Big35S, PCUbi, Super and USP, which are operable linked; and said nucleic acid molecule according to 1 (a), (b), (c), (d), (e), (f), (g), (h), (i), (j) or (k) encodes a polypeptide which has the activity of the respective polypeptide represented by a protein as depicted in the respective line in column 5 of Table II, application no. 3, and confers a generation or an increase of the respective fine chemical in a non-human organism or a part thereof as compared to a corresponding wild-type non-human organism or part thereof.

[28401] In another embodiment thereof said vector comprises beneath said nucleic acid molecule according to 1 (a), (b), (c), (d), (e), (f), (g), (h), (i), (j) or (k), a nucleic acid molecule encoding a transit peptide, preferably encoding a plastidal transit peptide, especially in case in column 6 of Table I, application no. 3, in the same line as of the respective nucleic acid molecule according to 1) “plastidic” is depicted, or encoding a mitochondrial transit peptide, especially in case in column 6 of Table I, application no. 3, in the same line as of the respective nucleic acid molecule according to 1) “mitochondrial” is depicted, which are operable linked.

[28402] In another embodiment thereof said vector does not comprise beneath said nucleic acid molecule according to 1 (a), (b), (c), (d), (e), (f), (g), (h), (i), (j) or (k), a nucleic acid molecule encoding a transit peptide in case in column 6 of Table I, application no. 3, in the same line as of the respective nucleic acid molecule according to 1) “non-targeted” is depicted.

[28403] In another embodiment thereof said vector comprises beneath said nucleic acid molecule according to 1 (a), (b), (c), (d), (e), (f), (g), (h), (i), (j) or (k), and a promoter, preferably a promoter selected from the group consisting of Big35S, PCUbi, Super and USP; a nucleic acid molecule encoding a transit peptide, preferably encoding a plastidal transit peptide, especially in case in column 6 of Table I, application no. 3, in the same line as of the respective nucleic acid molecule according to 1) “plastidic” is depicted, or encoding a mitochondrial transit peptide, especially in case in column 6 of Table I, application no. 3, in the same line as of the respective nucleic acid molecule according to 1) “mitochondrial” is depicted, which are operable linked.

[28404] In another embodiment thereof said vector does not comprise beneath said nucleic acid molecule according to 1 (a), (b), (c), (d), (e), (f), (g), (h), (i), (j) or (k), and a promoter, preferably a promoter selected from the group consisting of Big35S, PCUbi, Super and USP, which are operable linked; a nucleic acid molecule encoding a transit peptide, especially in case in column 6 of Table I, application no. 3, in the same line as of the respective nucleic acid molecule according to 1) “non-targeted” is depicted.

[28405] In another embodiment thereof said vector comprises beneath said nucleic acid molecule according to 1 (a), (b), (c), (d), (e), (f), (g), (h), (i), (j) or (k), and a promoter, preferably a promoter selected from the group consisting of Big35S, PCUbi, Super and USP; a nucleic acid molecule encoding a transit peptide, preferably encoding a plastidal transit peptide, especially in case in column 6 of Table I, application no. 3, in the same line as of the respective nucleic acid molecule according to 1) “plastidic” is depicted, or encoding a mitochondrial transit peptide, especially in case in column 6 of Table I, application no. 3, in the same line as of the respective nucleic acid molecule according to 1) “mitochondrial” is depicted, which are operable linked; and wherein said nucleic acid molecule according to 1 (a), (b), (c), (d), (e), (f), (g), (h), (i), (j) or (k) encodes a polypeptide which has the activity of the respective polypeptide represented by a protein comprising a polypeptide as depicted in column 5 of Table II, application no. 3 (in the same line).

[28406] In another embodiment thereof said vector does not comprise beneath said nucleic acid molecule according to 1 (a), (b), (c), (d), (e), (f), (g), (h), (i), (j) or (k), and a promoter, preferably a promoter selected from the group consisting of Big35S, PCUbi, Super and USP, which are operatively linked; a nucleic acid molecule encoding a transit peptide, especially in case in column 6 of Table I, application no. 3, in the same line as of the respective nucleic acid molecule according to 1) “non-targeted” is depicted; and wherein said nucleic acid molecule according to 1 (a), (b), (c), (d), (e), (f), (g), (h), (i), (j) or (k) encodes a polypeptide which has the activity of the respective polypeptide represented by a protein comprising a polypeptide as depicted in column 5 of Table II, application no. 3.

[28407] In another embodiment thereof said vector comprises beneath said nucleic acid molecule according to 1 (a), (b), (c), (d), (e), (f), (g), (h), (i), (j) or (k), and a promoter, preferably a promoter selected from the group consisting of Big35S, PCUbi, Super and USP; a nucleic acid molecule encoding a transit peptide, preferably encoding a plastidal transit peptide, especially in case in column 6 of Table I, application no. 3, in the same line as of the respective nucleic acid molecule according to 1) “plastidic” is depicted, or encoding a mitochondrial transit peptide, especially in case in column 6 of Table I, application no. 3, in the same line as of the respective nucleic acid molecule according to 1) “mitochondrial” is depicted, which are operable linked; and wherein said nucleic acid molecule according to 1 (a), (b), (c), (d), (e), (f), (g), (h), (i), (j) or (k) confers a generation or an increase of the respective fine chemical in a non-human organism or a part thereof as compared to a corresponding wild-type non-human organism or part thereof.

[28408] In another embodiment thereof said vector does not comprise beneath said nucleic acid molecule according to 1 (a), (b), (c), (d), (e), (f), (g), (h), (i), (j) or (k), and a promoter, preferably a promoter selected from the group consisting of Big35S, PCUbi, Super and USP, which are operatively linked; a nucleic acid molecule encoding a transit peptide, especially in case in column 6 of Table I, application no. 3, in the same line as of the respective nucleic acid molecule according to 1) “non-targeted” is depicted; and wherein said nucleic acid molecule according to 1 (a), (b), (c), (d), (e), (f), (g), (h), (i), (j) or (k) confers a generation or an increase of the respective fine chemical in a non-human organism or a part thereof as compared to a corresponding wild-type non-human organism or part thereof.

[28409] In another embodiment thereof said vector comprises beneath said nucleic acid molecule according to 1 (a), (b), (c), (d), (e), (f), (g), (h), (i), (j) or (k), and a promoter, preferably a promoter selected from the group consisting of Big35S, PCUbi, Super and USP; a nucleic acid molecule encoding a transit peptide, preferably encoding a plastidal transit peptide, especially in case in column 6 of Table I, application no. 3, in the same line as of the respective nucleic acid molecule according to 1) “plastidic” is depicted, or encoding a mitochondrial transit peptide, especially in case in column 6 of Table I, application no. 3, in the same line as of the respective nucleic acid molecule according to 1) “mitochondrial” is depicted, which are operable linked; and wherein said nucleic acid molecule according to 1 (a), (b), (c), (d), (e), (f), (g), (h), (i), (j) or (k) encodes a polypeptide which has the activity of the respective polypeptide represented by a protein as depicted in column 5 of Table II application no. 3 and confers a generation or an increase of the respective fine chemical in a non-human organism or a part thereof as compared to a corresponding wild-type non-human organism or part thereof.

[28410] In another embodiment thereof said vector does not comprise beneath said nucleic acid molecule according to 1 (a), (b), (c), (d), (e), (f), (g), (h), (i), (j) or (k), and a promoter, preferably a promoter selected from the group consisting of Big35S, PCUbi, Super and USP, which are operatively linked; a nucleic acid molecule encoding a transit peptide, especially in case in column 6 of Table I, application no. 3, in the same line as of the respective nucleic acid molecule according to 1) “non-targeted” is depicted; and wherein said nucleic acid molecule according to 1 (a), (b), (c), (d), (e), (f), (g), (h), (i), (j) or (k) encodes a polypeptide which has the activity of the respective polypeptide represented by a protein as depicted in column 5 of Table II application no. 3 (in the same line) and confers a generation or an increase of the respective fine chemical in a non-human organism or a part thereof as compared to a corresponding wild-type non-human organism or part thereof.

[28411] In a preferred embodiment of said vector said nucleic acid molecule according to 1 (a), (b), (c), (d), (e), (f), (g), (h), (i), (j) or (k), said promoter and optionally said nucleic acid molecule encoding a transit peptide are encompassed in an expression cassette. Accordingly in an embodiment the invention provides a vector comprising an expression cassette comprising said nucleic acid molecule according to 1 (a), (b), (c), (d), (e), (f), (g), (h), (i), (j) or (k), said promoter and optionally said a nucleic acid molecule encoding a transit peptide, operable linked. Said expression cassette may encompass a terminator, too.

[28412] The invention further provides a vector comprising a nucleic acid molecule comprising 1) a nucleic acid molecule selected from the group consisting of:
[28413] (a) a nucleic acid molecule encoding a polypeptide shown in Table II, column 5 or 8, application no. 3, preferably shown in Table II A, application no. 3, in column 5, or in Table II A, application no. 3, column 8, or in Table II B, application no. 3, column 8, or a homolog or a fragment thereof;
[28414] (b) a nucleic acid molecule shown in Table I, application no. 3, column 5 or 8, preferably shown in Table I A, application no. 3, in column 5, or in Table I A, application no. 3, column 8, or in Table I B, application no. 3, column 8, preferably the coding region thereof, or a homolog or a fragment thereof;
[28415] (c) a nucleic acid molecule, which, as a result of the degeneracy of the genetic code, can be derived from a polypeptide sequence depicted in column 5 or 8 of Table II, application no. 3, preferably shown in Table II A, application no. 3, in column 5, or in Table II A, application no. 3, column 8, or in Table II B, application no. 3, column 8;
[28416] (d) a nucleic acid molecule having at least 30% identity, preferably at least 40%, 50%, 60%, 70%, 75%, 80%, 85%, 90%, 95%, 96%, 97%, 98%, 99%, 99.5%, with the nucleic acid molecule sequence of a polynucleotide comprising the nucleic acid molecule shown in column 5 or 8 of Table I, application no. 3, preferably shown in Table I A, application no. 3, in column 5, or in Table I A, application no. 3, column 8, or in Table I B, application no. 3, column 8, preferably the coding region thereof;
[28417] (e) a nucleic acid molecule encoding a polypeptide having at least 30% identity, preferably at least 40%, 50% 60%, 70%, 75%, 80%, 85%, 90%, 95%, 96%, 97%, 98%, 99%, 99.5%, identity with the amino acid sequence of the polypeptide encoded by the nucleic acid molecule of (a), (b), (c), or (d);
[28418] (f) a nucleic acid molecule which hybridizes with a nucleic acid molecule of (a), (b), (c), (d), or (e) under stringent hybridization conditions;
[28419] (g) a nucleic acid molecule encoding a polypeptide which can be isolated with the aid of monoclonal or polyclonal antibodies made against a polypeptide encoded by one of the nucleic acid molecules of (a), (b), (c), (d), (e) or (f);
[28420] (h) a nucleic acid molecule encoding a polypeptide comprising the consensus sequence or one or more polypeptide motifs as shown in column 8 of Table IV, application no. 3;
[28421] (i) a nucleic acid molecule encoding a polypeptide having the activity represented by a protein as depicted in column 5 of Table II, application no. 3;
[28422] (j) a nucleic acid molecule comprising a polynucleotide which is obtained by amplifying a cDNA library or a genomic library using the primers in Table III, application no. 3, column 8;
[28423] and
[28424] (k) nucleic acid molecule which is obtainable by screening a suitable nucleic acid library, especially a cDNA library and/or a genomic library, under stringent hybridization conditions with a probe comprising one of the sequences of the nucleic acid molecule of (a), (b), (c), (d), (e), (f), (g), (h), (i) or (j) or with a fragment thereof having at least 15 nt, preferably 20 nt, 30 nt, 50 nt, 100 nt, 200 nt, 500 nt, 1000 nt, 1500 nt, 2000 nt or 3000 nt of the nucleic acid molecule complementary to a nucleic acid sequence characterized in (a), (b), (c), (d), (e), (f), (g), (h), (i) or (j);
   or a nucleic acid molecule comprising a sequence which is complementary thereto;
   whereby, preferably, the nucleic acid molecule according to 1 (a), (b), (c), (d), (e), (f), (g), (h), (i), (j) or (k) distinguishes over the sequence depicted in Table I A and/or I B, application no. 3, column 5 or 8, or the coding region thereof, by one or more nucleotides (especially but not exceeding 5%, preferably 4%, 3%, 2%, 1%, 0.5%, 0.2% or 0.1%). In an embodiment, the nucleic acid molecule of the invention does not consist of the sequence shown in Table I A and/or I B, application no. 3, column 5 or 8, or the coding region thereof, respectively. In another embodiment, the nucleic acid molecule of the present invention, preferably the coding region thereof, is 30%, 40%, 50%, 60%, 70%, 80%, 90%, 95% identical but less than 100%, 99.999%, 99.99%, 99.9%, 99%, 98%, 97%, 96% or 95% identical to the sequence shown in Table I A and/or I B, application no. 3, column 5 or 8, or the coding region thereof, respectively. In a further embodiment the nucleic acid molecule does not encode the polypeptide sequence shown in Table II A and/or II B, application no. 3, column 5 or 8 but homologs thereof. Accordingly, in one embodiment, the nucleic acid molecule of the present invention encodes in one embodiment a polypeptide which differs at least in one or more amino acids (especially but not exceeding 5%, preferably 4%, 3%, 2%, 1%, 0.5%, 0.2% or 0.1%) from the polypeptide shown in Table II, application no. 3, column 5 or 8 and does not encode a protein of the sequence shown in Table II A and/or II B, application no. 3, column 5 or 8. Accordingly, in one embodiment, the protein encoded by a sequence of a nucleic acid according to (a), (b), (c), (d), (e), (f), (g), (h), (i), (j) or (k) does not consist of the sequence shown in Table I A and/or I B, application no. 3, column 5 and 8, or the coding region thereof. In a further embodiment, the protein of the present invention is at least 30%,40%, 50%, 60%, 70%, 80%, 90%, 95% identical to protein sequence depicted in Table II A and/or II B, application no. 3, column 5 or 8 but less than 100%, preferably less than 99.999%, 99.99% or 99.9%, more preferably less than 99%, 985, 97%, 96% or 95% identical to the sequence shown in Table II A and/or II B, application no. 3, column 5 or 8.

[28425] (All the references to Tables I to IV are references to the corresponding lines of Tables I to IV.)

[28426] In a preferred embodiment of said vector said nucleic acid molecule according to 1 (a), (b), (c), (d), (e), (f), (g), (h), (i), (j) or (k) encodes a polypeptide which has the activity of the respective polypeptide represented by a protein comprising a polypeptide as depicted in the respective line in column 5 of Table II, application no. 3.

[28427] In another preferred embodiment of said vector said nucleic acid molecule according to 1 (a), (b), (c), (d), (e), (f), (g), (h), (i), (j) or (k) confers a generation or an increase of the respective fine chemical in a non-human organism or a part thereof as compared to a corresponding wild-type non-human organism or part thereof.

[28428] In another preferred embodiment of said vector said nucleic acid molecule according to 1 (a), (b), (c), (d), (e), (f), (g), (h), (i), (j) or (k) encodes a polypeptide which has the activity of the respective polypeptide represented by a protein as depicted in the respective line in column 5 of Table II, application no. 3, and confers a generation or an increase of the respective fine chemical in a non-human organism or a part thereof as compared to a corresponding wild-type non-human organism or part thereof.

[28429] In another embodiment thereof said vector comprises beneath said nucleic acid molecule according to 1 (a), (b), (c), (d), (e), (f), (g), (h), (i), (j) or (k), a promoter, preferably a promoter selected from the group consisting of Big35S, PCUbi, Super and USP, which are operable linked.

[28430] In a preferred embodiment thereof said vector comprises beneath said nucleic acid molecule according to 1 (a), (b), (c), (d), (e), (f), (g), (h), (i), (j) or (k), a promoter, preferably a promoter selected from the group consisting of Big35S, PCUbi, Super and USP, which are operable linked; and said nucleic acid molecule according to 1 (a), (b), (c), (d), (e), (f), (g), (h), (i), (j) or (k) encodes a polypeptide which has the activity of the respective polypeptide represented by a protein comprising a polypeptide as depicted in the respective line in column 5 of Table II, application no. 3.

[28431] In another preferred embodiment thereof said vector comprises beneath said nucleic acid molecule according to 1 (a), (b), (c), (d), (e), (f), (g), (h), (i), (j) or (k), a promoter, preferably a promoter selected from the group consisting of Big35S, PCUbi, Super and USP, which are operable linked; and said nucleic acid molecule according to 1 (a), (b), (c), (d), (e), (f), (g), (h), (i), (j) or (k) confers a generation or an increase of the respective fine chemical in a non-human organism or a part thereof as compared to a corresponding wild-type non-human organism or part thereof.

[28432] In another preferred embodiment thereof said vector comprises beneath said nucleic acid molecule according to 1 (a), (b), (c), (d), (e), (f), (g), (h), (i), (j) or (k), a promoter, preferably a promoter selected from the group consisting of Big35S, PCUbi, Super and USP, which are operable linked; and said nucleic acid molecule according to 1 (a), (b), (c), (d), (e), (f), (g), (h), (i), (j) or (k) encodes a polypeptide which has the activity of the respective polypeptide represented by a protein as depicted in the respective line in column 5 of Table II, application no. 3, and confers a generation or an increase of the respective fine chemical in a non-human organism or a part thereof as compared to a corresponding wild-type non-human organism or part thereof.

[28433] In another embodiment thereof said vector comprises beneath said nucleic acid molecule according to 1 (a), (b), (c), (d), (e), (f), (g), (h), (i), (j) or (k), a nucleic acid molecule encoding a transit peptide, preferably encoding a plastidal transit peptide, especially in case in column 6 of Table I, application no. 3, in the same line as of the respective nucleic acid molecule according to 1) “plastidic” is depicted, or encoding a mitochondrial transit peptide, especially in case in column 6 of Table I, application no. 3, in the same line as of the respective nucleic acid molecule according to 1) “mitochondrial” is depicted, which are operable linked.

[28434] In another embodiment thereof said vector does not comprise beneath said nucleic acid molecule according to 1 (a), (b), (c), (d), (e), (f), (g), (h), (i), (j) or (k), a nucleic acid molecule encoding a transit peptide in case in column 6 of Table I, application no. 3, in the same line as of the respective nucleic acid molecule according to 1) “non-targeted” is depicted.

[28435] In another embodiment thereof said vector comprises beneath said nucleic acid molecule according to 1 (a), (b), (c), (d), (e), (f), (g), (h), (i), (j) or (k), and a promoter, preferably a promoter selected from the group consisting of Big35S, PCUbi, Super and USP; a nucleic acid molecule encoding a transit peptide, preferably encoding a plastidal transit peptide, especially in case in column 6 of Table I, application no. 3, in the same line as of the respective nucleic acid molecule according to 1) “plastidic” is depicted, or encoding a mitochondrial transit peptide, especially in case in column 6 of Table I, application no. 3, in the same line as of the respective nucleic acid molecule according to 1) “mitochondrial” is depicted, which are operable linked.

[28436] In another embodiment thereof said vector does not comprise beneath said nucleic acid molecule according to 1 (a), (b), (c), (d), (e), (f), (g), (h), (i), (j) or (k), and a promoter, preferably a promoter selected from the group consisting of Big35S, PCUbi, Super and USP, which are operatively linked; a nucleic acid molecule encoding a transit peptide, especially in case in column 6 of Table I, application no. 3, in the same line as of the respective nucleic acid molecule according to 1) “non-targeted” is depicted.

[28437] In another embodiment thereof said vector comprises beneath said nucleic acid molecule according to 1 (a), (b), (c), (d), (e), (f), (g), (h), (i), (j) or (k), and a promoter, preferably a promoter selected from the group consisting of Big35S, PCUbi, Super and USP; a nucleic acid molecule encoding a transit peptide, preferably encoding a plastidal transit peptide, especially in case in column 6 of Table I, application no. 3, in the same line as of the respective nucleic acid molecule according to 1) “plastidic” is depicted, or encoding a mitochondrial transit peptide, especially in case in column 6 of Table I, application no. 3, in the same line as of the respective nucleic acid molecule according to 1) “mitochondrial” is depicted, which are operable linked; and wherein said nucleic acid molecule according to 1 (a), (b), (c), (d), (e), (f), (g), (h), (i), (j) or (k) encodes a polypeptide which has the activity of the respective polypeptide represented by a protein comprising a polypeptide as depicted in column 5 of Table II, application no. 3.

[28438] In another embodiment thereof said vector does not comprise beneath said nucleic acid molecule according to 1 (a), (b), (c), (d), (e), (f), (g), (h), (i), (j) or (k), and a promoter, preferably a promoter selected from the group consisting of Big35S, PCUbi, Super and USP, which are operatively linked; a nucleic acid molecule encoding a transit peptide, especially in case in column 6 of Table I, application no. 3, in the same line as of the respective nucleic acid molecule according to 1) “non-targeted” is depicted; and wherein said nucleic acid molecule according to 1 (a), (b), (c), (d), (e), (f), (g), (h), (i), (j) or (k) encodes a polypeptide which has the activity of the respective polypeptide represented by a protein comprising a polypeptide as depicted in column 5 of Table II, application no. 3.

[28439] In another embodiment thereof said vector comprises beneath said nucleic acid molecule according to 1 (a), (b), (c), (d), (e), (f), (g), (h), (i), (j) or (k), and a promoter, preferably a promoter selected from the group consisting of Big35S, PCUbi, Super and USP; a nucleic acid molecule encoding a transit peptide, preferably encoding a plastidal transit peptide, especially in case in column 6 of Table I, application no. 3, in the same line as of the respective nucleic acid molecule according to 1) “plastidic” is depicted, or encoding a mitochondrial transit peptide, especially in case in column 6 of Table I, application no. 3, in the same line as of the respective nucleic acid molecule according to 1) “mitochondrial” is depicted, which are operable linked; and wherein said nucleic acid molecule according to 1 (a), (b), (c), (d), (e), (f), (g), (h), (i), (j) or (k) confers a generation or an increase of the respective fine chemical in a non-human organism or a part thereof as compared to a corresponding wild-type non-human organism or part thereof.

[28440] In another embodiment thereof said vector does not comprise beneath said nucleic acid molecule according to 1 (a), (b), (c), (d), (e), (f), (g), (h), (i), (j) or (k), and a promoter, preferably a promoter selected from the group consisting of Big35S, PCUbi, Super and USP, which are operatively linked; a nucleic acid molecule encoding a transit peptide, especially in case in column 6 of Table I, application no. 3, in the same line as of the respective nucleic acid molecule according to 1) “non-targeted” is depicted; and wherein said nucleic acid molecule according to 1 (a), (b), (c), (d), (e), (f), (g), (h), (i), (j) or (k) confers a generation or an increase of the respective fine chemical in a non-human organism or a part thereof as compared to a corresponding wild-type non-human organism or part thereof.

[28441] In another embodiment thereof said vector comprises beneath said nucleic acid molecule according to 1 (a), (b), (c), (d), (e), (f), (g), (h), (i), (j) or (k), and a promoter, preferably a promoter selected from the group consisting of Big35S, PCUbi, Super and USP; a nucleic acid molecule encoding a transit peptide, preferably encoding a plastidal transit peptide, especially in case in column 6 of Table I, application no. 3, in the same line as of the respective nucleic acid molecule according to 1) “plastidic” is depicted, or encoding a mitochondrial transit peptide, especially in case in column 6 of Table I, application no. 3, in the same line as of the respective nucleic acid molecule according to 1) “mitochondrial” is depicted, which are operable linked; and wherein said nucleic acid molecule according to 1 (a), (b), (c), (d), (e), (f), (g), (h), (i), (j) or (k) encodes a polypeptide which has the activity of the respective polypeptide represented by a protein as depicted in column 5 of Table II application no. 3 and confers a generation or an increase of the respective fine chemical in a non-human organism or a part thereof as compared to a corresponding wild-type non-human organism or part thereof.

[28442] In another embodiment thereof said vector does not comprise beneath said nucleic acid molecule according to 1 (a), (b), (c), (d), (e), (f), (g), (h), (i), (j) or (k), and a promoter, preferably a promoter selected from the group consisting of Big35S, PCUbi, Super and USP, which are operatively linked; a nucleic acid molecule encoding a transit peptide, especially in case in column 6 of Table I, application no. 3, in the same line as of the respective nucleic acid molecule according to 1) “non-targeted” is depicted; and wherein said nucleic acid molecule according to 1 (a), (b), (c), (d), (e), (f), (g), (h), (i), (j) or (k) encodes a polypeptide which has the activity of the respective polypeptide represented by a protein as depicted in column 5 of Table II application no. 3 and confers a generation or an increase of the respective fine chemical in a non-human organism or a part thereof as compared to a corresponding wild-type non-human organism or part thereof.

[28443] [0181.1.1.3] to [0209.1.1.3] for the disclosure of these paragraphs see [0181.1.1.1] to [0209.1.1.1] above.

[28444] The genes of the invention, coding for an activity selected from the group consisting of 2,3-dihydroxyphenylpropionate 1,2-dioxygenase, 2-C-methyl-D-erythritol 4-phosphate cytidylyltransferase, 2-oxoglutarate dehydrogenase E1 subunit, 30S ribosomal protein S3, 3-deoxy-7-phosphoheptulonate synthase, 3-deoxy-D-arabinoheptulosonate-7-phosphatesynthase, 3-oxoacyl-[acyl-carrier-protein] synthase, 3-phosphoglycerate dehydrogenase, 47266012-protein, 49747384_SOYBEAN-protein, 50S ribosomal protein L14, 5′-nucleotidase, ABC metal ion transporter substrate-binding protein, ABC transporter ATP binding component, ABC transporter ATP-binding protein, ABC transporter component, ABC transporter permease protein, ABC transporter substrate-binding protein, acetolactate synthase, acetolactate synthase small subunit, acetyl CoA carboxylase, acetyl-CoA acetyltransferase, acetyltransferase, acid shock protein, acyl transferase, acyl-CoA dehydrogenase, acyl-CoA synthase, adenylate kinase, adenylylsulfate kinase, agmatinase, aldehyde dehydrogenase, amine oxidase, amino acid ABC transporter permease protein, amino acid acetyltransferase, amino acid transporter, amino-acid acetyltransferase, aminotransferase, ammonium transporter, ankyrin repeat family protein, anthranilate synthase component I, arginine exporter protein, arginine N-succinyltransferase, argininosuccinate lyase, asparaginase, aspartate 1-decarboxylase, aspartate aminotransferase, aspartate kinase, aspartate-ammonia ligase, At1g17440-protein, At1g19800-protein, At4g32480-protein, At5g16650-protein, at5g21910-protein, ATP-binding component of a transport system, ATP-dependent RNA helicase, auxin response factor, AX653549-protein, AY087308-protein, b0391-protein, b0456-protein, b0518-protein, b0801-protein, b0841-protein, b0917-protein, b1003-protein, b1024-protein, b1137-protein, b1155-protein, b1163-protein, b1179-protein, b1205-protein, b1229-protein, b1259-protein, b1280-protein, b1330-protein, b1445-protein, b1522-protein, b1583-protein, b1670-protein, b1672-protein, b1837-protein, b1898-protein, b1930-protein, b2032-protein, b2107-protein, b2360-protein, b2399-protein, b2474-protein, b2513-protein, b2613-protein, b2673-protein, b2739-protein, b2812-protein, b2849-protein, b3083-protein, b3098-protein, b3121-protein, b3221-protein, b3246-protein, b3346-protein, b3392-protein, b3410-protein, b3509-protein, b3646-protein, b3791-protein, b3814-protein, b3989-protein, b4029-protein, b4121-protein, beta-galactosidase, betahydroxylase, bifunctional aspartokinase/homoserine dehydrogenase, bifunctional purine biosynthesis protein, branched chain aminotransferase, branched-chain amino acid permease, calcium-dependent protein kinase, carbon dioxide concentrating mechanism protein, cationtransporting ATPase, CBL-interacting protein kinase, CDP-diacylglycerol-glycerol-3-phosphate 3-phosphatidyltransferase, CDP-diacylglycerol-serine O-phosphatidyltransferase, CDP-glucose-4,6-dehydratase, cell division control protein, cellulose synthase catalytic subunit, Chaperone protein CIpB, chorismate mutase-T and prephenate dehydrogenase, citrate synthase, coproporphyrinogen III oxidase, CTP synthetase, cullin, cyclin D, cystathionine gammasynthase, cytochrome c-type protein, D-3-phosphoglycerate dehydrogenase, delta-1-pyrroline 5-carboxylase synthetase, diacylglycerol O-acyltransferase, dihydroxyacid dehydratase, DNA helicase II, DNA mismatch repair protein, DNA-binding protein, DnaJ-like chaperone, D-serine dehydratase, electron transfer flavoprotein subunit beta, elongation factor Tu, enoyl-CoA hydratase, enterobacterial common antigen polymerase, eukaryotic translation initiation factor, eukaryotic translation initiation factor 5, exopolyphosphatase, Fe—S subunit of oxidoreductase, flavodoxin, fumarylacetoacetate hydrolase, gamma-glutamyltranspeptidase, GDP-mannose dehydrogenase, geranylgeranyl pyrophosphate synthase, gibberellin 20-oxidase, Glu/Leu/Phe/Val dehydrogenase , glucokinase, glucose dehydrogenase, glucose-1-phosphate cytidylyltransferase, glucose-6-phosphate 1-dehydrogenase, glutamate-ammonia-ligase, glutamine amidotransferase, glutamine synthetase, glutaredoxin, glutathione peroxidase, glutathione S-transferase, Glycine cleavage system T aminomethyltransferase, glycogen (starch) synthase, glycogen synthase, glycoprotease, glycosyl transferase, GM02LC11114-protein, GM02LC17485-protein, harpin-induced family protein, heat shock transcription factor, HesB/YadR/YfhF family protein, histone acetyltransferase, histone H2A, homocitrate synthase, homoserine O-acetyltransferase, hydrolase, integral membrane transporter family protein, iron(III) dicitrate-binding protein, isochorismate synthase, kinase, L-aspartate oxidase, lipoprotein precursor, lysine decarboxylase, lysyl-tRNA synthetase, major facilitator superfamily transporter protein, malate dehydrogenase, malic enzyme, membrane protein, membrane transport protein, metal ion transporter, metal-dependent hydrolase, methylglyoxal synthase, methylglyoxalase, methyltransferase, mitochondrial inner membrane protease subunit, molecular chaperone portein, monothiol glutaredoxin, monthiol glutaredoxin, multidrug resistance protein, multiple antibiotic resistance protein, murein transglycosylase, N-(5′-phosphoribosyl)anthranilate isomerase, Na+/K+ transporter, N-acetyl-gamma-glutamyl-phosphate reductase, NADH dehydrogenase I chain I, NADH dehydrogenase subunit N, NADH-quinone oxidoreductase subunit, NADP-dependent malic enzyme, nitrate/nitrite transport protein, O-antigen chain length determinant, oxidoreductase, oxidoreductase subunit, oxireductase, peptidase, permease protein of phosphate ABC transporter, phosphate permease, phosphate transporter, phosphoadenosine phosphosulfate reductase , phosphoanhydride phosphorylase, phosphoenolpyruvate carboxykinase, phosphopantetheine adenylyltransferase, phosphoribosylformyl glycinamidine synthase subunit, Photosystem I reaction center subunit XI, photosystem II protein, polygalacturonase, precorrin methylase, Pre-mRNA-splicing factor, prolipoprotein diacylglyceryl transferase, protease, protein kinase, protein phosphatase, PTS system N-acetylmuramic acid-specific EIIBC component, purine biosynthesis protein, pyruvate kinase, restriction alleviation protein, riboflavin biosynthesis protein, RNA binding protein, RNA polymerase sigma factor, RNA-binding protein, s_pp015018333r-protein, sec-independent protein translocase, Sec-independent protein translocase subunit, serine acetyltransferase, serine hydroxymethyltransferase, serine protease, serine/threonine dehydratase, Serine/threonine-protein phosphatase, short-chain alcohol dehydrogenase family, sll0281-protein, sll1032-protein, sll1761-protein, sn-glycerol-3-phosphate dehydrogenase, sodium/proton antiporter, sterol 24-C-methyltransferase, thioredoxin, thioredoxin family protein, threonine dehydratase, threonine synthase, transcription factor, transcriptional regulator, transport protein, trehalose-phosphatase, tryptophan biosynthesis protein, tryptophan synthase alpha chain, TTC0768-protein, TTC0881-protein, TTC1386-protein, urease subunit, uridine/cytidine kinase, uroporphyrin-III C-methyltransferase, XM_{—}473199-protein, ydr183w-protein, ydr273w-protein, ydr507c-protein, yer014w-protein, yer106w-protein, YFL019C-protein, yfl054c-protein, ygl096w-protein, ygl237c-protein, ygr221c-protein, yhl013c-protein, yhr006w-protein, yhr207c-protein, YKL038W-protein, yml083c-protein, ymr013c-protein, YNL086W-protein, yol160w-protein, zinc finger protein, zinc transporter, and Zm_{—}4842_BE510522-protein are also called “FCRP genes”.

[28445] [0211.1.1.3] to [0225.1.1.3] for the disclosure of these paragraphs see [0211.1.1.1] to [0225.1.1.1] above.

[28446] In addition to the sequence mentioned in Table I, application no. 3, column 5 or 8, preferably the coding region thereof, or its homologs or fragments, it may be advantageous additionally to express and/or mutate further genes in the non-human organisms. Especially advantageously, additionally at least one further gene of the biosynthetic pathway of the fine chemical is expressed in the non-human organisms such as plants or microorganisms. It is also possible that the regulation of the natural genes has been modified advantageously so that the gene and/or its gene product is no longer subject to the regulatory mechanisms which exist in the non-human organisms. This leads to an increased synthesis of the respective amino acid since, for example, feedback regulations no longer exist to the same extent or not at all. In addition it might be advantageously to combine the nucleic acids sequences of the invention containing the sequences shown in the respective line in Table I, application no. 3, column 5 or 8, preferably the coding region thereof, or homologs or fragments thereof, with genes which generally support or enhance the growth or yield of the target non-human organisms, for example genes which lead to faster growth rate of non human organism like microorganisms or plants or genes which produce stress-, pathogen-, or herbicide-resistant plants.

[28447] [0227.1.1.3] to [0239.1.1.3] for the disclosure of these paragraphs see [0227.1.1.1] to [0239.1.1.1] above.

[28448] In an embodiment of the present invention the nucleic acid construct of the present invention comprises a nucleic acid molecule as depicted in the respective line in Table I, application no. 3, column 5 or 8, preferably the coding region thereof, a fragment or a homolog thereof, and a plant promoter, such as the Big 35S promoter, the DC3 promoter, the PC Ubi promoter, the LegB4-promoter, the Super promoter, the USP promoter or the like. In another embodiment the nucleic acid construct of the present invention comprises a nucleic acid molecule as depicted in the respective line in Table I, application no. 3, column 5 or 8, preferably the coding region thereof, a fragment or a homolog thereof, and a plant promoter such as, for example, the USP, the LegB4-, the DC3 promoter or the ubiquitin promoter from parsley or other herein mentioned promoters. In a further embodiment the nucleic acid construct of the present invention comprises a nucleic acid molecule as depicted in the respective line in Table I, application no. 3, column 5 or 8, preferably the coding region thereof, a fragment or a homolog thereof, and a plant promoter, such as the Big 35S promoter, the PC Ubi promoter, the Super promoter, the USP promoter or the like. In addition different terminators may advantageously be used in these nucleic acid constructs; examples for transcriptional termination are polyadenylation signals.

[28449] [241.1.1.3] to [0245.1.1.3] for the disclosure of these paragraphs see [0241.1.1.1] to [0245.1.1.1] above.

[28450] Other preferred sequences for use in operable linkage in gene expression constructs are targeting sequences, which are required for targeting the gene product into specific cell compartments (for a review, see Kermode, Crit. Rev. Plant Sci. 15 (4), 285 (1996) and references cited therein), for example into the vacuole, the nucleus, all types of plastids, such as amyloplasts, chloroplasts, chromoplasts, the extracellular space, the mitochondria, the endoplasmic reticulum, elaioplasts, peroxisomes, glycosomes, and other compartments of cells or extracellular; preferred are sequences, which are involved in targeting to plastids as mentioned above. Sequences, which must be mentioned in this context are, in particular, the signal-peptide- or transit-peptide-encoding sequences which are known per se. For example, plastid-transit-peptide-encoding sequences enable the targeting of the expression product into the plastids of a plant cell. Targeting sequences are also known for eukaryotic and to a lower extent for prokaryotic organisms and can advantageously be operable linked with the nucleic acid molecule of the present invention as shown in Table I, application no. 3, columns 5 and 8, preferably the coding region thereof, or homologs or fragments thereof, and described herein to achieve an expression in one of said compartments or extracellular.

[28451] [0247.1.1.3] to [0266.1.1.3] for the disclosure of these paragraphs see [0247.1.1.1] to [0266.1.1.1] above.

[28452] An embodiment of the invention relates to a vector where the nucleic acid molecule according to the invention is linked operably to regulatory sequences which permit the expression in a prokaryotic or eukaryotic host. A further embodiment of the invention relates to a vector in which a nucleic acid sequence encoding one of the polypeptides shown in the respective line in Table II, application no. 3, columns 5 or 8, or homologs or fragments thereof, is functionally linked to a targeting sequence such as a plastidial or mitochondrial targeting sequence. A further embodiment of the invention relates to a vector in which a nucleic acid sequence encoding one of the polypeptides shown in the respective line in Table II, application no. 3, columns 5 or 8, or homologs or fragments thereof, is functionally linked to (a) regulatory sequence which permit the expression in an organelle, such as plastids or mitochondria, preferably plastids.

[28453] A further embodiment of the invention relates to a vector which comprises a nucleic acid sequence encoding one of the polypeptides shown in the respective line in Table II, application no. 3, columns 5 or 8, or homologs or fragments thereof, but no additional targeting sequence.

[28454] [0268.1.1.3] to [0273.1.1.3] for the disclosure of these paragraphs see [0268.1.1.1] to [0273.1.1.1] above.

[28455] A further object of the invention relates to the use of a nucleic acid construct, e.g. an expression cassette, comprising one or more nucleic acid molecules encoding one or more polypeptides as depicted in the respective line(s) in Table II, application no. 3, columns 5 or 8, or homologs or fragments thereof, or comprising one or more nucleic acid molecules as depicted in the respective line(s) in Table I, application no. 3, columns 5 or 8, preferably the coding region thereof, or homologs or fragments thereof, or comprising a nucleic acid molecule hybridizing therewith for the transformation of a microorganism or a plant cell, plant tissues or a part of a plant

[28456] In doing so, depending on the choice of promoter, the nucleic acid molecules shown in the respective line in Table I, application no. 3, column 5 or 8, preferably the coding region thereof, or homologs or fragments thereof, or the nucleic acid molecules encoding a polypeptide as depicted in the respective line in Table II, application no. 3, column 5 or 8, or homologs or fragments thereof, can be expressed in the whole plant or specifically e.g. in the leaves, in the seeds, the nodules, in roots, in the stem or other parts of the plant. Those transgenic plants overproducing sequences, e.g. as depicted in the respective line in Table I, application no. 3, column 5 or 8, preferably the coding region thereof, or homologs or fragments thereof, the plant cell, plant tissues, plants, the reproductive material thereof, or parts thereof are a further object of the present invention.

[28457] Within the framework of the present invention, the production of the 3,4-dihydroxyphenylalanine (dopa), 5-oxoproline, alanine, asparagine, aspartate, citrulline, glycine, homoserine, ornithine, phenylalanine, serine, or tyrosine is due to the generation or overexpression of one or more polypeptides as depicted in the respective line(s) in Table II, application no. 3, column 5 or 8, or homologs or fragments thereof, or encoded by the corresponding nucleic acid molecules as depicted in the respective line(s) in Table I, application no. 3, column 5 or 8, preferably the coding region thereof, or homologs or fragments thereof, in the non-human organism according to the invention, advantageously in the transgenic microorganism or plant according to the invention, at least for the duration of at least one plant generation.

[28458] A constitutive expression of the polypeptide as depicted in the respective line in Table II, application no. 3, column 5 or 8, or homologs or fragments thereof, or encoded by the respective nucleic acid molecule as depicted in the respective line in Table I, application no. 3, column 5 or 8, preferably the coding region thereof, or homologs or fragments thereof, may be advantageous. On the other hand, an inducible expression may also appear desirable. Expression of the polypeptide sequences of the invention can be either directed to the cytosol or to the organelles, such as plastids or mitochondria, preferably the plastids of the host cells, preferably the plant cells, or non-targeted.

[28459] for the disclosure of this paragraph see [0278.1.1.1] above.

[28460] In a further embodiment the invention relates to a transgenic non-human organisms such as transgenic microorganism or transgenic plant comprising a nucleic acid molecule comprising
[28461] [1) a nucleic acid molecule selected from the group consisting of
   [28462] (a) a nucleic acid molecule encoding a polypeptide shown in Table II, application no. 3, column 5 or 8, preferably shown in Table II A, application no. 3, column 5, or in Table II A, application no. 3, column 8, or in Table II B, application no. 3, column 8, or a homolog or a fragment thereof;
   [28463] (b) a nucleic acid molecule shown in Table I, application no. 3, column 5 or 8, preferably shown in Table I A, application no. 3, column 5, or in Table I A, application no. 3, column 8, or in Table I B, application no. 3, column 8, preferably the coding region thereof, or a homolog or a fragment thereof;
   [28464] (c) a nucleic acid molecule, which, as a result of the degeneracy of the genetic code, can be derived from a polypeptide sequence depicted in column 5 or 8 of Table II, application no. 3, preferably shown in Table II A, application no. 3, column 5, or in Table II A, application no. 3, column 8, or in Table II B, application no. 3, column 8;
   [28465] (d) a nucleic acid molecule having at least 30% identity, preferably at least 40%, 50%, 60%, 70%, 75%, 80%, 85%, 90%, 95%, 96%, 97%, 98%, 99%, 99.5%, with the nucleic acid molecule sequence of a polynucleotide comprising the nucleic acid molecule shown in column 5 or 8 of Table I, application no. 3, preferably shown in Table I A, application no. 3, column 5, or in Table I A, application no. 3, column 8, or in Table I B, application no. 3, column 8, preferably the coding region thereof;
   [28466] (e) a nucleic acid molecule encoding a polypeptide having at least 30% identity, preferably at least 40%, 50% 60%, 70%, 75%, 80%, 85%, 90%, 95%, 96%, 97%, 98%, 99%, 99.5%, identity with the amino acid sequence of the polypeptide encoded by the nucleic acid molecule of (a), (b), (c) or (d);
   [28467] (f) a nucleic acid molecule which hybridizes with a nucleic acid molecule of (a), (b), (c), (d) or (e) under stringent hybridization conditions;
   [28468] (g) a nucleic acid molecule encoding a polypeptide which can be isolated with the aid of monoclonal or polyclonal antibodies made against a polypeptide encoded by one of the nucleic acid molecules of (a), (b), (c), (d), (e) or (f);
   [28469] (h) a nucleic acid molecule encoding a polypeptide comprising the consensus sequence or one or more polypeptide motifs as shown in column 8 of Table IV, application no. 3;
   [28470] (i) a nucleic acid molecule encoding a polypeptide having the activity represented by a respective protein as depicted in column 5 of Table II, application no. 3;
   [28471] (j) a nucleic acid molecule comprising a polynucleotide which is obtained by amplifying a cDNA library or a genomic library using the primers in Table III, application no. 3, column 8;
   [28472] and
   [28473] (k) nucleic acid molecule which is obtainable by screening a suitable nucleic acid library, especially a cDNA library and/or a genomic library, under stringent hybridization conditions with a probe comprising one of the sequences of the nucleic acid molecule of (a), (b), (c), (d), (e), (f), (g), (h), (i) or (j) or with a fragment of at least 15 nt, preferably 20 nt, 30 nt, 50 nt, 100 nt, 200 nt,500 nt, 1000 nt, 1500 nt, 2000 nt or 3000 nt of the nucleic acid molecule characterized in (a), (b), (c), (d), (e), (f), (g), (h), (i) or (j);
      or a nucleic acid molecule comprising a sequence which is complementary thereto; and, if desired
[28474] 2) nucleic acid molecule encoding a transit peptide, preferably encoding a plastidal transit peptide or a mitochondrial transit peptide;
   which are operable linked;]

[28475] or comprising an expression cassette comprising [0) a promoter, preferably a promoter selected from the group consisting of Big35S, PCUbi, Super and USP; and
[28476] 1) a nucleic acid molecule selected from the group consisting of
   [28477] (a) a nucleic acid molecule encoding a polypeptide shown in Table II, application no. 3, column 5 or 8, preferably shown in Table II A, application no. 3, column 5, or in Table II A, application no. 3, column 8, or in Table II B, application no. 3, column 8, or a homolog or a fragment thereof;
   [28478] (b) a nucleic acid molecule shown in Table I, application no. 3, column 5 or 8, preferably shown in Table I A, application no. 3, column 5, or in Table I A, application no. 3, column 8, or in Table I B, application no. 3, column 8, preferably the coding region thereof, or a homolog or a fragment thereof;
   [28479] (c) a nucleic acid molecule, which, as a result of the degeneracy of the genetic code, can be derived from a polypeptide sequence depicted in column 5 or 8 of Table II, application no. 3, preferably shown in Table II A, application no. 3, column 5, or in Table II A, application no. 3, column 8, or in Table II B, application no. 3, column 8;
   [28480] (d) a nucleic acid molecule having at least 30% identity, preferably at least 40%, 50%, 60%, 70%, 75%, 80%, 85%, 90%, 95%, 96%, 97%, 98%, 99%, 99.5%, with the nucleic acid molecule sequence of a polynucleotide comprising the nucleic acid molecule shown in column 5 or 8 of Table I, application no. 3, preferably shown in Table I A, application no. 3, column 5, or in Table I A, application no. 3, column 8, or in Table I B, application no. 3, column 8, preferably the coding region thereof;
   [28481] (e) a nucleic acid molecule encoding a polypeptide having at least 30% identity, preferably at least 40%, 50% 60%, 70%, 75%, 80%, 85%, 90%, 95%, 96%, 97%, 98%, 99%, 99.5%, identity with the amino acid sequence of the polypeptide encoded by the nucleic acid molecule of (a), (b), (c) or (d);
   [28482] (f) a nucleic acid molecule which hybridizes with a nucleic acid molecule of (a), (b), (c), (d) or (e) under stringent hybridization conditions;
   [28483] (g) a nucleic acid molecule encoding a polypeptide which can be isolated with the aid of monoclonal or polyclonal antibodies made against a polypeptide encoded by one of the nucleic acid molecules of (a), (b), (c), (d), (e) or (f);
   [28484] (h) a nucleic acid molecule encoding a polypeptide comprising the consensus sequence or one or more polypeptide motifs as shown in column 8 of Table IV, application no. 3;
   [28485] (i) a nucleic acid molecule encoding a polypeptide having the activity represented by a respective protein as depicted in column 5 of Table II, application no. 3;
   [28486] (j) a nucleic acid molecule comprising a polynucleotide which is obtained by amplifying a cDNA library or a genomic library using the primers in Table III, application no. 3, column 8;
   [28487] and
   [28488] (k) nucleic acid molecule which is obtainable by screening a suitable nucleic acid library, especially a cDNA library and/or a genomic library, under stringent hybridization conditions with a probe comprising one of the sequences of the nucleic acid molecule of (a), (b), (c), (d), (e), (f), (g), (h), (i) or (j) or with a fragment of at least 15 nt, preferably 20 nt, 30 nt, 50 nt, 100 nt, 200 nt,500 nt, 1000 nt, 1500 nt, 2000 nt or 3000 nt of the nucleic acid molecule characterized in (a), (b), (c), (d), (e), (f), (g), (h), (i) or (j);
      or a nucleic acid molecule comprising a sequence which is complementary thereto;
      and, if desired
[28489] 2) nucleic acid molecule encoding a transit peptide, preferably encoding a plastidal transit peptide or a mitochondrial transit peptide; which are operable linked;]
   or comprising or being transformed by a vector comprising
[28490] [1) a nucleic acid molecule selected from the group consisting of
   [28491] (a) a nucleic acid molecule encoding a polypeptide shown in Table II, application no. 3, column 5 or 8, preferably shown in Table II A, application no. 3, column 5, or in Table II A, application no. 3, column 8, or in Table II B, application no. 3, column 8, or a homolog or a fragment thereof;
   [28492] (b) a nucleic acid molecule shown in Table I, application no. 3, column 5 or 8, preferably shown in Table I A, application no. 3, column 5, or in Table I A, application no. 3, column 8, or in Table I B, application no. 3, column 8, preferably the coding region thereof, or a homolog or a fragment thereof;
   [28493] (c) a nucleic acid molecule, which, as a result of the degeneracy of the genetic code, can be derived from a polypeptide sequence depicted in column 5 or 8 of Table II, application no. 3, preferably shown in Table II A, application no. 3, column 5, or in Table II A, application no. 3, column 8, or in Table II B, application no. 3, column 8;
   [28494] (d) a nucleic acid molecule having at least 30% identity, preferably at least 40%, 50%, 60%, 70%, 75%, 80%, 85%, 90%, 95%, 96%, 97%, 98%, 99%, 99.5%, with the nucleic acid molecule sequence of a polynucleotide comprising the nucleic acid molecule shown in column 5 or 8 of Table I, application no. 3, preferably shown in Table I A, application no. 3, column 5, or in Table I A, application no. 3, column 8, or in Table I B, application no. 3, column 8, preferably the coding region thereof;
   [28495] (e) a nucleic acid molecule encoding a polypeptide having at least 30% identity, preferably at least 40%, 50% 60%, 70%, 75%, 80%, 85%, 90%, 95%, 96%, 97%, 98%, 99%, 99.5%, identity with the amino acid sequence of the polypeptide encoded by the nucleic acid molecule of (a), (b), (c) or (d);
   [28496] (f) a nucleic acid molecule which hybridizes with a nucleic acid molecule of (a), (b), (c), (d) or (e) under stringent hybridization conditions;
   [28497] (g) a nucleic acid molecule encoding a polypeptide which can be isolated with the aid of monoclonal or polyclonal antibodies made against a polypeptide encoded by one of the nucleic acid molecules of (a), (b), (c), (d), (e) or (f);
   [28498] (h) a nucleic acid molecule encoding a polypeptide comprising the consensus sequence or one or more polypeptide motifs as shown in column 8 of Table IV, application no. 3;
   [28499] (i) a nucleic acid molecule encoding a polypeptide having the activity represented by a respective protein as depicted in column 5 of Table II, application no. 3;
   [28500] (j) a nucleic acid molecule comprising a polynucleotide which is obtained by amplifying a cDNA library or a genomic library using the primers in Table III, application no. 3, column 8;
   [28501] and
   [28502] (k) nucleic acid molecule which is obtainable by screening a suitable nucleic acid library, especially a cDNA library and/or a genomic library, under stringent hybridization conditions with a probe comprising one of the sequences of the nucleic acid molecule of (a), (b), (c), (d), (e), (f), (g), (h), (i) or (j) or with a fragment of at least 15 nt, preferably 20 nt, 30 nt, 50 nt, 100 nt, 200 nt,500 nt, 1000 nt, 1500 nt, 2000 nt or 3000 nt of the nucleic acid molecule characterized in (a), (b), (c), (d), (e), (f), (g), (h), (i) or (j);
      or a nucleic acid molecule comprising a sequence which is complementary thereto;]
      as well as respective transgenic cells, tissue, parts of such non-human organism, e.g. plant cells, plant tissue, part of plants, like leaves, roots, stems, blossoms, seeds, fruits, pollen and the like.
      (All the references to Tables I to IV are references to the corresponding lines of Tables I to IV.)

[28503] In a preferred embodiment of said transgenic non-human organism said nucleic acid molecule according to 1 (a), (b), (c), (d), (e), (f), (g), (h), (i), (j) or (k) encodes a polypeptide which has the activity of the respective polypeptide represented by a protein comprising a polypeptide as depicted in the respective line in column 5 of Table II, application no. 3.

[28504] In another preferred embodiment of said transgenic non-human organism said nucleic acid molecule according to 1 (a), (b), (c), (d), (e), (f), (g), (h), (i), (j) or (k) confers a generation or an increase of the respective fine chemical in a non-human organism or a part thereof as compared to a corresponding wild-type non-human organism or part thereof.

[28505] In another preferred embodiment of said transgenic non-human organism said nucleic acid molecule according to 1 (a), (b), (c), (d), (e), (f), (g), (h), (i), (j) or (k) encodes a polypeptide which has the activity of the respective polypeptide represented by a protein as depicted in the respective line in column 5 of Table II application no. 3 and confers a generation or an increase of the respective fine chemical in a non-human organism or a part thereof as compared to a corresponding wild-type non-human organism or part thereof.

[28506] In another embodiment of said transgenic non-human organism the expression cassette comprises 2) a nucleic acid molecule encoding a transit peptide, preferably encoding a plastidal transit peptide, especially in case in column 6 of Table I, application no. 3, in the same line as of the respective nucleic acid molecule according to 1) “plastidic” is depicted, or encoding a mitochondrial transit peptide, especially in case in column 6 of Table I, application no. 3, in the same line as of the respective nucleic acid molecule according to 1) “mitochondrial” is depicted.

[28507] In another embodiment of said transgenic non-human organism the expression cassette does not comprise 2) a nucleic acid molecule encoding a transit peptide, especially in case in column 6 of Table I, application no. 3, in the same line as of the respective nucleic acid molecule according to 1) “non-targeted” is depicted.

[28508] In another embodiment of said transgenic non-human organism said vector comprises beneath said nucleic acid molecule according to 1 (a), (b), (c), (d), (e), (f), (g), (h), (i), (j) or (k), a promoter, preferably a promoter selected from the group consisting of Big35S, PCUbi, Super and USP, which are operable linked.

[28509] In a preferred embodiment of said transgenic non-human organism said vector comprises beneath said nucleic acid molecule according to 1 (a), (b), (c), (d), (e), (f), (g), (h), (i), (j) or (k), a promoter, preferably a promoter selected from the group consisting of Big35S, PCUbi, Super and USP, which are operable linked; and said nucleic acid molecule according to 1 (a), (b), (c), (d), (e), (f), (g), (h), (i), (j) or (k) encodes a polypeptide which has the activity of the respective polypeptide represented by a protein comprising a polypeptide as depicted in the respective line in column 5 of Table II, application no. 3.

[28510] In another preferred embodiment of said transgenic non-human organism said vector comprises beneath said nucleic acid molecule according to 1 (a), (b), (c), (d), (e), (f), (g), (h), (i), (j) or (k), a promoter, preferably a promoter selected from the group consisting of Big35S, PCUbi, Super and USP, which are operable linked; and said nucleic acid molecule according to 1 (a), (b), (c), (d), (e), (f), (g), (h), (i), (j) or (k) confers a generation or an increase of the respective fine chemical in a non-human organism or a part thereof as compared to a corresponding wild-type non-human organism or part thereof.

[28511] In another preferred embodiment of said transgenic non-human organism said vector comprises beneath said nucleic acid molecule according to 1 (a), (b), (c), (d), (e), (f), (g), (h), (i), (j) or (k), a promoter, preferably a promoter selected from the group consisting of Big35S, PCUbi, Super and USP, which are operable linked; and said nucleic acid molecule according to 1 (a), (b), (c), (d), (e), (f), (g), (h), (i), (j) or (k) encodes a polypeptide which has the activity of the respective polypeptide represented by a protein as depicted in the respective line in column 5 of Table II, application no. 3, and confers a generation or an increase of the respective fine chemical in a non-human organism or a part thereof as compared to a corresponding wild-type non-human organism or part thereof.

[28512] In another embodiment of said transgenic non-human organism said vector comprises beneath said nucleic acid molecule according to 1 (a), (b), (c), (d), (e), (f), (g), (h), (i), (j) or (k), a nucleic acid molecule encoding a transit peptide, preferably encoding a plastidal transit peptide, especially in case in column 6 of Table I, application no. 3, in the same line as of the respective nucleic acid molecule according to 1) “plastidic” is depicted, or encoding a mitochondrial transit peptide, especially in case in column 6 of Table I, application no. 3, in the same line as of the respective nucleic acid molecule according to 1) “mitochondrial” is depicted, which are operable linked.

[28513] In another embodiment of said transgenic non-human organism said vector does not comprise beneath said nucleic acid molecule according to 1 (a), (b), (c), (d), (e), (f), (g), (h), (i), (j) or (k), a nucleic acid molecule encoding a transit peptide in case in column 6 of Table I, application no. 3, in the same line as of the respective nucleic acid molecule according to 1) “non-targeted” is depicted, which are operable linked.

[28514] In another embodiment of said transgenic non-human organism said vector comprises beneath said nucleic acid molecule according to 1 (a), (b), (c), (d), (e), (f), (g), (h), (i), (j) or (k), and a promoter, preferably a promoter selected from the group consisting of Big35S, PCUbi, Super and USP; a nucleic acid molecule encoding a transit peptide, preferably encoding a plastidal transit peptide, especially in case in column 6 of Table I, application no. 3, in the same line as of the respective nucleic acid molecule according to 1) “plastidic” is depicted, or encoding a mitochondrial transit peptide, especially in case in column 6 of Table I, application no. 3, in the same line as of the respective nucleic acid molecule according to 1) “mitochondrial” is depicted, which are operable linked.

[28515] In another embodiment of said transgenic non-human organism said vector does not comprise beneath said nucleic acid molecule according to 1 (a), (b), (c), (d), (e), (f), (g), (h), (i), (j) or (k), and a promoter, preferably a promoter selected from the group consisting of Big35S, PCUbi, Super and USP; a nucleic acid molecule encoding a transit peptide, especially in case in column 6 of Table I, application no. 3, in the same line as of the respective nucleic acid molecule according to 1) “non-targeted” is depicted, which are operable linked.

[28516] In another embodiment of said transgenic non-human organism said vector comprises beneath said nucleic acid molecule according to 1 (a), (b), (c), (d), (e), (f), (g), (h), (i), (j) or (k), and a promoter, preferably a promoter selected from the group consisting of Big35S, PCUbi, Super and USP; a nucleic acid molecule encoding a transit peptide, preferably encoding a plastidal transit peptide, especially in case in column 6 of Table I, application no. 3, in the same line as of the respective nucleic acid molecule according to 1) “plastidic” is depicted, or encoding a mitochondrial transit peptide, especially in case in column 6 of Table I, application no. 3, in the same line as of the respective nucleic acid molecule according to 1) “mitochondrial” is depicted, which are operable linked; and wherein said nucleic acid molecule according to 1 (a), (b), (c), (d), (e), (f), (g), (h), (i), (j) or (k) encodes a polypeptide which has the activity of the respective polypeptide represented by a protein comprising a polypeptide as depicted in the respective line in column 5 of Table II, application no. 3.

[28517] In another embodiment of said transgenic non-human organism said vector does not comprise beneath said nucleic acid molecule according to 1 (a), (b), (c), (d), (e), (f), (g), (h), (i), (j) or (k), and a promoter, preferably a promoter selected from the group consisting of Big35S, PCUbi, Super and USP; a nucleic acid molecule encoding a transit peptide, especially in case in column 6 of Table I, application no. 3, in the same line as of the respective nucleic acid molecule according to 1) “non-targeted” is depicted, which are operable linked; and wherein said nucleic acid molecule according to 1 (a), (b), (c), (d), (e), (f), (g), (h), (i), (j) or (k) encodes a polypeptide which has the activity of the respective polypeptide represented by a protein comprising a polypeptide as depicted in the respective line in column 5 of Table II, application no. 3.

[28518] In another embodiment of said transgenic non-human organism said vector comprises beneath said nucleic acid molecule according to 1 (a), (b), (c), (d), (e), (f), (g), (h), (i), (j) or (k), and a promoter, preferably a promoter selected from the group consisting of Big35S, PCUbi, Super and USP; a nucleic acid molecule encoding a transit peptide, preferably encoding a plastidal transit peptide, especially in case in column 6 of Table I, application no. 3, in the same line as of the respective nucleic acid molecule according to 1) “plastidic” is depicted, or encoding a mitochondrial transit peptide, especially in case in column 6 of Table I, application no. 3, in the same line as of the respective nucleic acid molecule according to 1) “mitochondrial” is depicted, which are operable linked; and wherein said nucleic acid molecule according to 1 (a), (b), (c), (d), (e), (f), (g), (h), (i), (j) or (k) confers a generation or an increase of the respective fine chemical in a non-human organism or a part thereof as compared to a corresponding wild-type non-human organism or part thereof.

[28519] In another embodiment of said transgenic non-human organism said vector does not comprise beneath said nucleic acid molecule according to 1 (a), (b), (c), (d), (e), (f), (g), (h), (i), (j) or (k), and a promoter, preferably a promoter selected from the group consisting of Big35S, PCUbi, Super and USP; a nucleic acid molecule encoding a transit peptide, especially in case in column 6 of Table I, application no. 3, in the same line as of the respective nucleic acid molecule according to 1) “non-targeted” is depicted, which are operable linked; and wherein said nucleic acid molecule according to 1 (a), (b), (c), (d), (e), (f), (g), (h), (i), (j) or (k) confers a generation or an increase of the respective fine chemical in a non-human organism or a part thereof as compared to a corresponding wild-type non-human organism or part thereof.

[28520] In another embodiment of said transgenic non-human organism said vector comprises beneath said nucleic acid molecule according to 1 (a), (b), (c), (d), (e), (f), (g), (h), (i), (j) or (k), and a promoter, preferably a promoter selected from the group consisting of Big35S, PCUbi, Super and USP; a nucleic acid molecule encoding a transit peptide, preferably encoding a plastidal transit peptide, especially in case in column 6 of Table I, application no. 3, in the same line as of the respective nucleic acid molecule according to 1) “plastidic” is depicted, or encoding a mitochondrial transit peptide, especially in case in column 6 of Table I, application no. 3, in the same line as of the respective nucleic acid molecule according to 1) “mitochondrial” is depicted, which are operable linked; and wherein said nucleic acid molecule according to 1 (a), (b), (c), (d), (e), (f), (g), (h), (i), (j) or (k) encodes a polypeptide which has the activity of the respective polypeptide represented by a protein as depicted in the respective line in column 5 of Table II application no. 3 and confers a generation or an increase of the respective fine chemical in a non-human organism or a part thereof as compared to a corresponding wild-type non-human organism or part thereof.

[28521] In another embodiment of said transgenic non-human organism said vector does not comprise beneath said nucleic acid molecule according to 1 (a), (b), (c), (d), (e), (f), (g), (h), (i), (j) or (k), and a promoter, preferably a promoter selected from the group consisting of Big35S, PCUbi, Super and USP; a nucleic acid molecule encoding a transit peptide, especially in case in column 6 of Table I, application no. 3, in the same line as of the respective nucleic acid molecule according to 1) “non-targeted” is depicted, which are operable linked; and wherein said nucleic acid molecule according to 1 (a), (b), (c), (d), (e), (f), (g), (h), (i), (j) or (k) encodes a polypeptide which has the activity of the respective polypeptide represented by a protein as depicted in the respective line in column 5 of Table II application no. 3 (in the same line) and confers a generation or an increase of the respective fine chemical in a non-human organism or a part thereof as compared to a corresponding wild-type non-human organism or part thereof.

[28522] In a preferred embodiment of said transgenic non-human organism said nucleic acid molecule according to 1 (a), (b), (c), (d), (e), (f), (g), (h), (i), (j) or (k), said promoter and optionally said nucleic acid molecule encoding a transit peptide are encompassed in an expression cassette in said vector. Accordingly an embodiment the invention provides a non-human organism comprising or being transformed by a vector comprising an expression cassette comprising said nucleic acid molecule according to 1 (a), (b), (c), (d), (e), (f), (g), (h), (i), (j) or (k), said promoter and optionally said a nucleic acid molecule encoding a transit peptide, operable linked. Said expression cassette may encompass a terminator, too.

[28523] In a further embodiment the invention relates to a transgenic non-human organisms such as transgenic microorganism or transgenic plant comprising a nucleic acid molecule comprising
[28524] [1) a nucleic acid molecule selected from the group consisting of
   [28525] (a) a nucleic acid molecule encoding a polypeptide shown in Table II, application no. 3, column 5 or 8, preferably shown in Table II A, application no. 3, column 5, or in Table II A, application no. 3, column 8, or in Table II B, application no. 3, column 8, or a homolog or a fragment thereof;
   [28526] (b) a nucleic acid molecule shown in Table I, application no. 3, column 5 or 8, preferably shown in Table I A, application no. 3, column 5, or in Table I A, application no. 3, column 8, or in Table I B, application no. 3, column 8, preferably the coding region thereof, or a homolog or a fragment thereof;
   [28527] (c) a nucleic acid molecule, which, as a result of the degeneracy of the genetic code, can be derived from a polypeptide sequence depicted in column 5 or 8 of Table II, application no. 3, preferably shown in Table II A, application no. 3, column 5, or in Table II A, application no. 3, column 8, or in Table II B, application no. 3, column 8;
   [28528] (d) a nucleic acid molecule having at least 30% identity, preferably at least 40%, 50%, 60%, 70%, 75%, 80%, 85%, 90%, 95%, 96%, 97%, 98%, 99%, 99.5%, with the nucleic acid molecule sequence of a polynucleotide comprising the nucleic acid molecule shown in column 5 or 8 of Table I, application no. 3, preferably shown in Table I A, application no. 3, column 5, or in Table I A, application no. 3, column 8, or in Table I B, application no. 3, column 8, preferably the coding region thereof;
   [28529] (e) a nucleic acid molecule encoding a polypeptide having at least 30% identity, preferably at least 40%, 50% 60%, 70%, 75%, 80%, 85%, 90%, 95%, 96%, 97%, 98%, 99%, 99.5%, identity with the amino acid sequence of the polypeptide encoded by the nucleic acid molecule of (a), (b), (c) or (d);
   [28530] (f) a nucleic acid molecule which hybridizes with a nucleic acid molecule of (a), (b), (c), (d) or (e) under stringent hybridization conditions;
   [28531] (g) a nucleic acid molecule encoding a polypeptide which can be isolated with the aid of monoclonal or polyclonal antibodies made against a polypeptide encoded by one of the nucleic acid molecules of (a), (b), (c), (d), (e) or (f);
   [28532] (h) a nucleic acid molecule encoding a polypeptide comprising the consensus sequence or one or more polypeptide motifs as shown in column 8 of Table IV, application no. 3;
   [28533] (i) a nucleic acid molecule encoding a polypeptide having the activity represented by a respective protein as depicted in column 5 of Table II, application no. 3;
   [28534] (j) a nucleic acid molecule comprising a polynucleotide which is obtained by amplifying a cDNA library or a genomic library using the primers in Table III, application no. 3, column 8;
   [28535] and
   [28536] (k) nucleic acid molecule which is obtainable by screening a suitable nucleic acid library, especially a cDNA library and/or a genomic library, under stringent hybridization conditions with a probe comprising one of the sequences of the nucleic acid molecule of (a), (b), (c), (d), (e), (f), (g), (h), (i) or (j) or with a fragment of at least 15 nt, preferably 20 nt, 30 nt, 50 nt, 100 nt, 200 nt,500 nt, 1000 nt, 1500 nt, 2000 nt or 3000 nt of the nucleic acid molecule characterized in (a), (b), (c), (d), (e), (f), (g), (h), (i) or (j);
      or a nucleic acid molecule comprising a sequence which is complementary thereto;
      and, if desired
[28537] 2) nucleic acid molecule encoding a transit peptide, preferably encoding a plastidal transit peptide or a mitochondrial transit peptide; which are operable linked;]
   or comprising an expression cassette comprising
[28538] [0) a promoter, preferably a promoter selected from the group consisting of Big35S, PCUbi, Super and USP; and
[28539] 1) a nucleic acid molecule selected from the group consisting of
   [28540] (a) a nucleic acid molecule encoding a polypeptide shown in Table II, application no. 3, column 5 or 8, preferably shown in Table II A, application no. 3, column 5, or in Table II A, application no. 3, column 8, or in Table II B, application no. 3, column 8, or a homolog or a fragment thereof;
   [28541] (b) a nucleic acid molecule shown in Table I, application no. 3, column 5 or 8, preferably shown in Table I A, application no. 3, column 5, or in Table I A, application no. 3, column 8, or in Table I B, application no. 3, column 8, preferably the coding region thereof, or a homolog or a fragment thereof;
   [28542] (c) a nucleic acid molecule, which, as a result of the degeneracy of the genetic code, can be derived from a polypeptide sequence depicted in column 5 or 8 of Table II, application no. 3, preferably shown in Table II A, application no. 3, column 5, or in Table II A, application no. 3, column 8, or in Table II B, application no. 3, column 8;
   [28543] (d) a nucleic acid molecule having at least 30% identity, preferably at least 40%, 50%, 60%, 70%, 75%, 80%, 85%, 90%, 95%, 96%, 97%, 98%, 99%, 99.5%, with the nucleic acid molecule sequence of a polynucleotide comprising the nucleic acid molecule shown in column 5 or 8 of Table I, application no. 3, preferably shown in Table I A, application no. 3, column 5, or in Table I A, application no. 3, column 8, or in Table I B, application no. 3, column 8, preferably the coding region thereof;
   [28544] (e) a nucleic acid molecule encoding a polypeptide having at least 30% identity, preferably at least 40%, 50% 60%, 70%, 75%, 80%, 85%, 90%, 95%, 96%, 97%, 98%, 99%, 99.5%, identity with the amino acid sequence of the polypeptide encoded by the nucleic acid molecule of (a), (b), (c) or (d);
   [28545] (f) a nucleic acid molecule which hybridizes with a nucleic acid molecule of (a), (b), (c), (d) or (e) under stringent hybridization conditions;
   [28546] (g) a nucleic acid molecule encoding a polypeptide which can be isolated with the aid of monoclonal or polyclonal antibodies made against a polypeptide encoded by one of the nucleic acid molecules of (a), (b), (c), (d), (e) or (f);
   [28547] (h) a nucleic acid molecule encoding a polypeptide comprising the consensus sequence or one or more polypeptide motifs as shown in column 8 of Table IV, application no. 3;
   [28548] (i) a nucleic acid molecule encoding a polypeptide having the activity represented by a respective protein as depicted in column 5 of Table II, application no. 3;
   [28549] (j) a nucleic acid molecule comprising a polynucleotide which is obtained by amplifying a cDNA library or a genomic library using the primers in Table III, application no. 3, column 8;
   [28550] and
   [28551] (k) nucleic acid molecule which is obtainable by screening a suitable nucleic acid library, especially a cDNA library and/or a genomic library, under stringent hybridization conditions with a probe comprising one of the sequences of the nucleic acid molecule of (a), (b), (c), (d), (e), (f), (g), (h), (i) or (j) or with a fragment of at least 15 nt, preferably 20 nt, 30 nt, 50 nt, 100 nt, 200 nt,500 nt, 1000 nt, 1500 nt, 2000 nt or 3000 nt of the nucleic acid molecule characterized in (a), (b), (c), (d), (e), (f), (g), (h), (i) or (j);
      or a nucleic acid molecule comprising a sequence which is complementary thereto;]
      and, if desired
[28552] 2) nucleic acid molecule encoding a transit peptide, preferably encoding a plastidal transit peptide or a mitochondrial transit peptide;
   which are operable linked;]
   or comprising or being transformed by a vector comprising
[28553] [1) a nucleic acid molecule selected from the group consisting of
   [28554] (a) a nucleic acid molecule encoding a polypeptide shown in Table II, application no. 3, column 5 or 8, preferably shown in Table II A, application no. 3, column 5, or in Table II A, application no. 3, column 8, or in Table II B, application no. 3, column 8, or a homolog or a fragment thereof;
   [28555] (b) a nucleic acid molecule shown in Table I, application no. 3, column 5 or 8, preferably shown in Table I A, application no. 3, column 5, or in Table I A, application no. 3, column 8, or in Table I B, application no. 3, column 8, preferably the coding region thereof, or a homolog or a fragment thereof;
   [28556] (c) a nucleic acid molecule, which, as a result of the degeneracy of the genetic code, can be derived from a polypeptide sequence depicted in column 5 or 8 of Table II, application no. 3, preferably shown in Table II A, application no. 3, column 5, or in Table II A, application no. 3, column 8, or in Table II B, application no. 3, column 8;
   [28557] (d) a nucleic acid molecule having at least 30% identity, preferably at least 40%, 50%, 60%, 70%, 75%, 80%, 85%, 90%, 95%, 96%, 97%, 98%, 99%, 99.5%, with the nucleic acid molecule sequence of a polynucleotide comprising the nucleic acid molecule shown in column 5 or 8 of Table I, application no. 3, preferably shown in Table I A, application no. 3, column 5, or in Table I A, application no. 3, column 8, or in Table I B, application no. 3, column 8, preferably the coding region thereof;
   [28558] (e) a nucleic acid molecule encoding a polypeptide having at least 30% identity, preferably at least 40%, 50% 60%, 70%, 75%, 80%, 85%, 90%, 95%, 96%, 97%, 98%, 99%, 99.5%, identity with the amino acid sequence of the polypeptide encoded by the nucleic acid molecule of (a), (b), (c) or (d);
   [28559] (f) a nucleic acid molecule which hybridizes with a nucleic acid molecule of (a), (b), (c), (d) or (e) under stringent hybridization conditions;
   [28560] (g) a nucleic acid molecule encoding a polypeptide which can be isolated with the aid of monoclonal or polyclonal antibodies made against a polypeptide encoded by one of the nucleic acid molecules of (a), (b), (c), (d), (e) or (f);
   [28561] (h) a nucleic acid molecule encoding a polypeptide comprising the consensus sequence or one or more polypeptide motifs as shown in column 8 of Table IV, application no. 3;
   [28562] (i) a nucleic acid molecule encoding a polypeptide having the activity represented by a respective protein as depicted in column 5 of Table II, application no. 3;
   [28563] (j) a nucleic acid molecule comprising a polynucleotide which is obtained by amplifying a cDNA library or a genomic library using the primers in Table III, application no. 3, column 8;
   [28564] and
   [28565] (k) nucleic acid molecule which is obtainable by screening a suitable nucleic acid library, especially a cDNA library and/or a genomic library, under stringent hybridization conditions with a probe comprising one of the sequences of the nucleic acid molecule of (a), (b), (c), (d), (e), (f), (g), (h), (i) or (j) or with a fragment of at least 15 nt, preferably 20 nt, 30 nt, 50 nt, 100 nt, 200 nt,500 nt, 1000 nt, 1500 nt, 2000 nt or 3000 nt of the nucleic acid molecule characterized in (a), (b), (c), (d), (e), (f), (g), (h), (i) or (j);
      or a nucleic acid molecule comprising a sequence which is complementary thereto;]
      whereby, preferably, the nucleic acid molecule according to 1 (a), (b), (c), (d), (e), (f), (g), (h), (i), (j) or (k) distinguishes over the sequence depicted in Table I A and/or I B, application no. 3, column 5 or 8, or the coding regions thereof, by one or more nucleotides (especially but not exceeding 5%, preferably 4%, 3%, 2%, 1%, 0.5%, 0.2% or 0.1%). In an embodiment, the nucleic acid molecule of the invention does not consist of the sequence shown in Table I A and/or I B, application no. 3, column 5 or 8, or the coding region thereof. In another embodiment, the nucleic acid molecule of the present invention, preferably the coding region thereof, is at least 30%, 40%, 50%, 60%, 70%, 80%, 90%, 95% identical but less than 100%, 99.999%, 99.99%, 99.9%, 99%, 98%, 97%, 96% or 95% identical to the sequence shown in Table I A and/or I B, application no. 3, column 5 or 8, or the coding region thereof, respectively. In a further embodiment the nucleic acid molecule does not encode the polypeptide sequence shown in Table II A and/or II B, application no. 3, column 5 or 8 but homologs thereof. Accordingly, in one embodiment, the nucleic acid molecule of the present invention encodes in one embodiment a polypeptide which differs at least in one or more amino acids (especially but not exceeding 5%, preferably 4%, 3%, 2%, 1%, 0.5%, 0.2% or 0.1%) from the polypeptide shown in Table II, application no. 3, column 5 or 8 and does not encode a protein of the sequence shown in Table II A and/or II B, application no. 3, column 5 or 8. Accordingly, in one embodiment, the protein encoded by a sequence of a nucleic acid according to 1 (a), (b), (c), (d), (e), (f), (g), (h), (i), (j) or (k) does not consist of the sequence shown in Table I A and/or I B, application no. 3, column 5 or 8, or the coding region thereof. In a further embodiment, the protein of the present invention is at least 30%, 40%, 50%, 60%, 70%, 80%, 90%, 95% identical to protein sequence depicted in Table II A and/or II B, application no. 3, column 5 or 8 but less than 100%, preferably less than 99.999%, 99.99%, 99.9%, 99%, 98%, 97%, 96% or 95% identical to the sequence shown in Table II A and/or II B, application no. 3, column 5 or 8;
      as well as respective transgenic cells, tissue, parts of such non-human organism, e.g. plant cells, plant tissue, part of plants, like leaves, roots, stems, blossoms, seeds, fruits, pollen and the like.
      (All the references to Tables I to IV are references to the corresponding lines of Tables I to IV.)

[28566] In a preferred embodiment of said transgenic non-human organism said nucleic acid molecule according to 1 (a), (b), (c), (d), (e), (f), (g), (h), (i), (j) or (k) encodes a polypeptide which has the activity of the respective polypeptide represented by a protein comprising a polypeptide as depicted in the respective line in column 5 of Table II, application no. 3.

[28567] In another preferred embodiment of said transgenic non-human organism said nucleic acid molecule according to 1 (a), (b), (c), (d), (e), (f), (g), (h), (i), (j) or (k) confers a generation or an increase of the respective fine chemical in a non-human organism or a part thereof as compared to a corresponding wild-type non-human organism or part thereof.

[28568] In another preferred embodiment of said transgenic non-human organism said nucleic acid molecule according to 1 (a), (b), (c), (d), (e), (f), (g), (h), (i), (j) or (k) encodes a polypeptide which has the activity of the respective polypeptide represented by a protein as depicted in the respective line in column 5 of Table II application no. 3 and confers a generation or an increase of the respective fine chemical in a non-human organism or a part thereof as compared to a corresponding wild-type non-human organism or part thereof.

[28569] In another embodiment of said transgenic non-human organism the expression cassette comprises 2) a nucleic acid molecule encoding a transit peptide, preferably encoding a plastidal transit peptide, especially in case in column 6 of Table I, application no. 3, in the same line as of the respective nucleic acid molecule according to 1) “plastidic” is depicted, or encoding a mitochondrial transit peptide, especially in case in column 6 of Table I, application no. 3, in the same line as of the respective nucleic acid molecule according to 1) “mitochondrial” is depicted.

[28570] In another embodiment thereof the expression cassette does not comprise 2) a nucleic acid molecule encoding a transit peptide, especially in case in column 6 of Table I, application no. 3, in the same line as of the respective nucleic acid molecule according to 1) “non-targeted” is depicted.

[28571] In another embodiment of said transgenic non-human organism said vector comprises beneath said nucleic acid molecule according to 1 (a), (b), (c), (d), (e), (f), (g), (h), (i), (j) or (k), a promoter, preferably a promoter selected from the group consisting of Big35S, PCUbi, Super and USP, which are operable linked.

[28572] In a preferred embodiment of said transgenic non-human organism said vector comprises beneath said nucleic acid molecule according to 1 (a), (b), (c), (d), (e), (f), (g), (h), (i), (j) or (k), a promoter, preferably a promoter selected from the group consisting of Big35S, PCUbi, Super and USP, which are operable linked; and said nucleic acid molecule according to 1 (a), (b), (c), (d), (e), (f), (g), (h), (i), (j) or (k) encodes a polypeptide which has the activity of the respective polypeptide represented by a protein comprising a polypeptide as depicted in the respective line in column 5 of Table II, application no. 3.

[28573] In another preferred embodiment of said transgenic non-human organism said vector comprises beneath said nucleic acid molecule according to 1 (a), (b), (c), (d), (e), (f), (g), (h), (i), (j) or (k), a promoter, preferably a promoter selected from the group consisting of Big35S, PCUbi, Super and USP, which are operable linked; and said nucleic acid molecule according to 1 (a), (b), (c), (d), (e), (f), (g), (h), (i), (j) or (k) confers a generation or an increase of the respective fine chemical in a non-human organism or a part thereof as compared to a corresponding wild-type non-human organism or part thereof.

[28574] In another preferred embodiment of said transgenic non-human organism said vector comprises beneath said nucleic acid molecule according to 1 (a), (b), (c), (d), (e), (f), (g), (h), (i), (j) or (k), a promoter, preferably a promoter selected from the group consisting of Big35S, PCUbi, Super and USP, which are operable linked; and said nucleic acid molecule according to 1 (a), (b), (c), (d), (e), (f), (g), (h), (i), (j) or (k) encodes a polypeptide which has the activity of the respective polypeptide represented by a protein as depicted in the same line in column 5 of Table II, application no. 3, and confers a generation or an increase of the respective fine chemical in a non-human organism or a part thereof as compared to a corresponding wild-type non-human organism or part thereof.

[28575] In another embodiment of said transgenic non-human organism said vector comprises beneath said nucleic acid molecule according to 1 (a), (b), (c), (d), (e), (f), (g), (h), (i), (j) or (k), a nucleic acid molecule encoding a transit peptide, preferably encoding a plastidal transit peptide, especially in case in column 6 of Table I, application no. 3, in the same line as of the respective nucleic acid molecule according to 1) “plastidic” is depicted, or encoding a mitochondrial transit peptide, especially in case in column 6 of Table I, application no. 3, in the same line as of the respective nucleic acid molecule according to 1) “mitochondrial” is depicted, which are operable linked.

[28576] In another embodiment of said transgenic non-human organism said vector does not comprise beneath said nucleic acid molecule according to 1 (a), (b), (c), (d), (e), (f), (g), (h), (i), (j) or (k), a nucleic acid molecule encoding a transit peptide in case in column 6 of Table I, application no. 3, in the same line as of the respective nucleic acid molecule according to 1) “non-targeted” is depicted, which are operable linked.

[28577] In another embodiment of said transgenic non-human organism said vector comprises beneath said nucleic acid molecule according to 1 (a), (b), (c), (d), (e), (f), (g), (h), (i), (j) or (k), and a promoter, preferably a promoter selected from the group consisting of Big35S, PCUbi, Super and USP; a nucleic acid molecule encoding a transit peptide, preferably encoding a plastidal transit peptide, especially in case in column 6 of Table I, application no. 3, in the same line as of the respective nucleic acid molecule according to 1) “plastidic” is depicted, or encoding a mitochondrial transit peptide, especially in case in column 6 of Table I, application no. 3, in the same line as of the respective nucleic acid molecule according to 1) “mitochondrial” is depicted, which are operable linked.

[28578] In another embodiment of said transgenic non-human organism said vector does not comprise beneath said nucleic acid molecule according to 1 (a), (b), (c), (d), (e), (f), (g), (h), (i), (j) or (k), and a promoter, preferably a promoter selected from the group consisting of Big35S, PCUbi, Super and USP; a nucleic acid molecule encoding a transit peptide, especially in case in column 6 of Table I, application no. 3, in the same line as of the respective nucleic acid molecule according to 1) “non-targeted” is depicted, which are operable linked.

[28579] In another embodiment of said transgenic non-human organism said vector comprises beneath said nucleic acid molecule according to 1 (a), (b), (c), (d), (e), (f), (g), (h), (i), (j) or (k), and a promoter, preferably a promoter selected from the group consisting of Big35S, PCUbi, Super and USP; a nucleic acid molecule encoding a transit peptide, preferably encoding a plastidal transit peptide, especially in case in column 6 of Table I, application no. 3, in the same line as of the respective nucleic acid molecule according to 1) “plastidic” is depicted, or encoding a mitochondrial transit peptide, especially in case in column 6 of Table I, application no. 3, in the same line as of the respective nucleic acid molecule according to 1) “mitochondrial” is depicted, which are operable linked; and wherein said nucleic acid molecule according to 1 (a), (b), (c), (d), (e), (f), (g), (h), (i), (j) or (k) encodes a polypeptide which has the activity of the respective polypeptide represented by a protein comprising a polypeptide as depicted in the respective line in column 5 of Table II, application no. 3.

[28580] In another embodiment of said transgenic non-human organism said vector does not comprise beneath said nucleic acid molecule according to 1 (a), (b), (c), (d), (e), (f), (g), (h), (i), (j) or (k), and a promoter, preferably a promoter selected from the group consisting of Big35S, PCUbi, Super and USP; a nucleic acid molecule encoding a transit peptide, especially in case in column 6 of Table I, application no. 3, in the same line as of the respective nucleic acid molecule according to 1) “non-targeted” is depicted, which are operable linked; and wherein said nucleic acid molecule according to 1 (a), (b), (c), (d), (e), (f), (g), (h), (i), (j) or (k) encodes a polypeptide which has the activity of the respective polypeptide represented by a protein comprising a polypeptide as depicted in the respective line in column 5 of Table II, application no. 3.

[28581] In another embodiment of said transgenic non-human organism said vector comprises beneath said nucleic acid molecule according to 1 (a), (b), (c), (d), (e), (f), (g), (h), (i), (j) or (k), and a promoter, preferably a promoter selected from the group consisting of Big35S, PCUbi, Super and USP; a nucleic acid molecule encoding a transit peptide, preferably encoding a plastidal transit peptide, especially in case in column 6 of Table I, application no. 3, in the same line as of the respective nucleic acid molecule according to 1) “plastidic” is depicted, or encoding a mitochondrial transit peptide, especially in case in column 6 of Table I, application no. 3, in the same line as of the respective nucleic acid molecule according to 1) “mitochondrial” is depicted, which are operable linked; and wherein said nucleic acid molecule according to 1 (a), (b), (c), (d), (e), (f), (g), (h), (i), (j) or (k) confers a generation or an increase of the respective fine chemical in a non-human organism or a part thereof as compared to a corresponding wild-type non-human organism or part thereof.

[28582] In another embodiment of said transgenic non-human organism said vector does not comprise beneath said nucleic acid molecule according to 1 (a), (b), (c), (d), (e), (f), (g), (h), (i), (j) or (k), and a promoter, preferably a promoter selected from the group consisting of Big35S, PCUbi, Super and USP; a nucleic acid molecule encoding a transit peptide, especially in case in column 6 of Table I, application no. 3, in the same line as of the respective nucleic acid molecule according to 1) “non-targeted” is depicted, which are operable linked; and wherein said nucleic acid molecule according to 1 (a), (b), (c), (d), (e), (f), (g), (h), (i), (j) or (k) confers a generation or an increase of the respective fine chemical in a non-human organism or a part thereof as compared to a corresponding wild-type non-human organism or part thereof.

[28583] In another embodiment of said transgenic non-human organism said vector comprises beneath said nucleic acid molecule according to 1 (a), (b), (c), (d), (e), (f), (g), (h), (i), (j) or (k), and a promoter, preferably a promoter selected from the group consisting of Big35S, PCUbi, Super and USP; a nucleic acid molecule encoding a transit peptide, preferably encoding a plastidal transit peptide, especially in case in column 6 of Table I, application no. 3, in the same line as of the respective nucleic acid molecule according to 1) “plastidic” is depicted, or encoding a mitochondrial transit peptide, especially in case in column 6 of Table I, application no. 3, in the same line as of the respective nucleic acid molecule according to 1) “mitochondrial” is depicted, which are operable linked; and wherein said nucleic acid molecule according to 1 (a), (b), (c), (d), (e), (f), (g), (h), (i), (j) or (k) encodes a polypeptide which has the activity of the respective polypeptide represented by a protein as depicted in the respective line in column 5 of Table II application no. 3 and confers a generation or an increase of the respective fine chemical in a non-human organism or a part thereof as compared to a corresponding wild-type non-human organism or part thereof.

[28584] In another embodiment of said transgenic non-human organism said vector does not comprise beneath said nucleic acid molecule according to 1 (a), (b), (c), (d), (e), (f), (g), (h), (i), (j) or (k), and a promoter, preferably a promoter selected from the group consisting of Big35S, PCUbi, Super and USP; a nucleic acid molecule encoding a transit peptide, especially in case in column 6 of Table I, application no. 3, in the same line as of the respective nucleic acid molecule according to 1) “non-targeted” is depicted, which are operable linked; and wherein said nucleic acid molecule according to 1 (a), (b), (c), (d), (e), (f), (g), (h), (i), (j) or (k) encodes a polypeptide which has the activity of the respective polypeptide represented by a protein as depicted in the respective line in column 5 of Table II application no. 3 and confers a generation or an increase of the respective fine chemical in a non-human organism or a part thereof as compared to a corresponding wild-type non-human organism or part thereof.

[28585] In a preferred embodiment of said transgenic non-human organism said nucleic acid molecule according to 1 (a), (b), (c), (d), (e), (f), (g), (h), (i), (j) or (k), said promoter and optionally said nucleic acid molecule encoding a transit peptide are encompassed in an expression cassette in said vector. Accordingly an embodiment the invention provides a non-human organism comprising or being transformed by a vector comprising an expression cassette comprising said nucleic acid molecule according to 1 (a), (b), (c), (d), (e), (f), (g), (h), (i), (j) or (k), said promoter and optionally said a nucleic acid molecule encoding a transit peptide, operable linked. Said expression cassette may encompass a terminator, too.

[28586] [0291.1.1.3] to [0299.1.1.3] for the disclosure of these paragraphs see [0291.1.1.1] to [0299.1.1.1] above.

[28587] The term “biological active portion” or “biological activity” means a polypeptide as depicted in the respective line in Table II, application no. 3, column 3 or a portion of said polypeptide which still has at least 10% or 20%, preferably 30%, 40%, 50% or 60%, especially preferably 70%, 75%, 80%, 90% or 95% of the enzymatic or biological activity of the natural or starting enzyme or protein.

[28588] [0301.1.1.3] to [0304.1.1.3] for the disclosure of these paragraphs see [0301.1.1.1] to [0304.1.1.1 above.

[28589] Synthetic oligonucleotide primers for the amplification, e.g. as shown in the respective line in Table III, application no. 3, column 8, by means of polymerase chain reaction can be generated on the basis of a sequence shown herein, for example the sequence shown in the respective line in Table I, application no. 3, columns 5 or 8, or the sequences derived from Table II, application no. 3, columns 5 or 8, respectively.

[28590] Moreover, it is possible to identify a conserved region of a protein from various organism by carrying out protein sequence alignments with the polypeptide encoded by the nucleic acid molecules of the present invention, in particular with the sequences encoded by the nucleic acid molecule shown in the respective line in column 5 or 8 of Table I, application no. 3, from which conserved regions, and in turn, degenerate primers can be derived. Conserved regions are those, which show a very little variation in the amino acid in one particular position of several homologs from different origin. The consensus sequence and polypeptide motifs shown in the respective line in column 8 of Table IV, application no. 3, are derived from such alignments of homologous proteins.

[28591] In an embodiment of the present invention, in the method of the present invention the activity of a polypeptide comprising or consisting of a consensus sequence or at least one polypeptide motif shown in the respective line in Table IV, application no. 3, column 8, is increased. In another embodiment thereof, the method of the present invention relates to a polypeptide comprising or consisting of a consensus sequence shown in the respective line in Table IV, application no. 3, column 8 or comprising at least one polypeptide motif shown in the respective line in Table IV, application no. 3, column 8, whereby not more than 20, 15, 10, 9, 8, 7, 6, 5 4, 3, 2 or 1, or 0 of the amino acid positions indicated can be replaced by any amino acid. In another embodiment thereof, the method of the present invention relates to a polypeptide comprising or consisting of a consensus sequence shown in the respective line in Table IV, application no. 3, column 8 or comprising at least one polypeptide motif shown in the respective line in Table IV, application no. 3, column 8, whereby not more than 15%, 10%, 5%, 4%, 3%, 2% or 1%, or 0% of the amino acid positions defined as distinct specific amino acids are/is replaced by another amino acid. In another embodiment thereof, the method of the present invention relates to a polypeptide comprising or consisting of a consensus sequence shown in the respective line in Table IV, application no. 3, column 8 or comprising at least one polypeptide motif shown in the respective line in Table IV, application no. 3, column 8, whereby not more than 20, 15, 10, 9, 8, 7, 6, 5, 4, 3, 2 or 1, or 0 amino acids are inserted into a consensus sequence or polypeptide motif.

[28592] In an embodiment of the present invention, in the method of the present invention the activity of a polypeptide comprising or consisting of a consensus sequence or at least one polypeptide motif shown in the respective line in Table IV, application no. 3, column 8, is increased, whereby said polypeptide distinguishes over the sequence depicted in Table II, application no. 3, columns 5 or 8 by one or more amino acids.

[28593] In one embodiment, said polypeptide of the invention distinguishes over the sequence shown in the respective line in Table II, application no. 3, columns 5 and 8 by more than 5, 6, 7, 8 or 9 amino acids, preferably by more than 10, 15, 20, 25 or 30 amino acids, even more preferred are more than 40, 50, or 60 amino acids and, preferably, the sequence of the polypeptide of the invention distinguishes from the sequence shown in the respective line in Table II B, application no. 3, columns 5 and 8 by not more than 80%, 70%, 60%, 50%, 40%, 30%, 20%, 10%, 5%, 4%, 3%, 2%, 1% or 0.5%. In another embodiment, said polypeptide of the invention does not consist of the sequence shown in Table II, application no. 3, columns 5 or 8.

[28594] [0309.1.1.3] to [0321.1.1.3] for the disclosure of these paragraphs see [0309.1.1.1] to [0321.1.1.1] above.

[28595] Polypeptides having above-mentioned activity, i.e. conferring the production or the increased production of the fine chemical 3,4-dihydroxyphenylalanine (dopa), 5-oxoproline, alanine, asparagine, aspartate, citrulline, glycine, homoserine, ornithine, phenylalanine, serine, or tyrosine as compared to a corresponding, e.g. non-transformed, wild type non-human organism, like a microorganism or a plant cell, plant or part thereof, can be encoded by other DNA sequences which hybridize to the sequences shown in the respective line in Table I, application no. 3, columns 5 and 8, preferably the coding region thereof, at least under relaxed hybridization conditions and which encode the expression of polypeptides conferring the production or the increased production of the respective fine chemical 3,4-dihydroxyphenylalanine (dopa), 5-oxoproline, alanine, asparagine, aspartate, citrulline, glycine, homoserine, ornithine, phenylalanine, serine, or tyrosine as compared to a corresponding, e.g. non-transformed, wild type non-human organism, like a microorganism or a plant cell, plant or part thereof.

[28596] [0323.1.1.3] to [0329.1.1.3] for the disclosure of these paragraphs see [0323.1.1.1] to [0329.1.1.1] above.

[28597] Further, the nucleic acid molecule of the invention comprises a nucleic acid molecule, which is a complement of one of the nucleotide sequences of above-mentioned nucleic acid molecules or a portion thereof. A nucleic acid molecule or its sequence which is complementary to one of the nucleotide molecules or sequences shown in the respective line in Table I, application no. 3, columns 5 or 8, preferably the coding region thereof, homologs or fragments thereof, is one which is sufficiently complementary to one of the nucleotide molecules or sequences shown in the respective line in Table I, application no. 3, columns 5 or 8, preferably the coding region thereof, homologs or fragments thereof, such that it can hybridize to one of the nucleotide sequences shown in Table I, application no. 3, columns 5 or 8, preferably the coding region thereof, homologs or fragments thereof, thereby forming a stable duplex. Preferably, the hybridization is performed under stringent hybridization conditions. However, a complement of one of the herein disclosed sequences is preferably a sequence complement thereto according to the base pairing of nucleic acid molecules well known to the skilled person. For example, the bases A and G undergo base pairing with the bases T and U or C, resp. and visa versa. Modifications of the bases can influence the base-pairing partner.

[28598] The nucleic acid molecule of the invention comprises a nucleotide sequence which is at least about 30%, 35%, 40%, 45%, 50%, 55%, 60%, 65%, 70%, 75%, 80%, 90%, 95%, 96%, 97%, 98%, 99%, 99.5% or more homologous to a nucleotide sequence shown in Table I, application no. 3, columns 5 or 8, preferably the coding region thereof, homologs or fragments thereof, and preferably has above-mentioned activity, in particular conferring the production or the increased production of the fine chemical 3,4-dihydroxyphenylalanine (dopa), 5-oxoproline, alanine, asparagine, aspartate, citrulline, glycine, homoserine, ornithine, phenylalanine, serine, or tyrosine, respectively, after increasing the activity or an activity of a gene as shown in the respective line in Table I or of a gene product, e.g. as shown in the respective line in Table II, application no. 3, column 5 or 8, by for example in one embodiment expression either in the cytosol or in an organelle such as a plastid or mitochondria or both, preferably in a plastid, or in another embodiment non-targeted or targeted.

[28599] The nucleic acid molecule of the invention comprises a nucleotide sequence or molecule which hybridizes, preferably hybridizes under stringent conditions as defined herein, to one of the nucleic acid molecule shown in the respective line in Table I, preferably Table IB, application no. 3, columns 5 or 8, preferably the coding region thereof, fragments or homologs thereof, and encodes a protein having above-mentioned activity, e.g. conferring the production or the increased production of the respective fine chemical 3,4-dihydroxyphenylalanine (dopa), 5-oxoproline, alanine, asparagine, aspartate, citrulline, glycine, homoserine, ornithine, phenylalanine, serine, or tyrosine as compared to a corresponding, e.g. non-transformed, wild type non-human organism, like a microorganism or a plant cell, plant or part thereof, by for example in one embodiment expression either in the cytosol or in an organelle such as a plastid or mitochondria or both, preferably in a plastid, or in another embodiment non-targeted or targeted, and optionally, the activity thereof is selected from the group consisting of 2,3-dihydroxyphenylpropionate 1,2-dioxygenase, 2-C-methyl-D-erythritol 4-phosphate cytidylyltransferase, 2-oxoglutarate dehydrogenase E1 subunit, 30S ribosomal protein S3, 3-deoxy-7-phosphoheptulonate synthase, 3-deoxy-D-arabinoheptulosonate-7-phosphatesynthase, 3-oxoacyl-[acyl-carrier-protein] synthase, 3-phosphoglycerate dehydrogenase, 47266012-protein, 49747384_SOYBEAN-protein, 50S ribosomal protein L14, 5′nucleotidase, ABC metal ion transporter substrate-binding protein, ABC transporter ATP binding component, ABC transporter ATP-binding protein, ABC transporter component, ABC transporter permease protein, ABC transporter substrate-binding protein, acetolactate synthase, acetolactate synthase small subunit, acetyl CoA carboxylase, acetyl-CoA acetyltransferase, acetyltransferase, acid shock protein, acyl transferase, acyl-CoA dehydrogenase, acyl-CoA synthase, adenylate kinase, adenylylsulfate kinase, agmatinase, aldehyde dehydrogenase, amine oxidase, amino acid ABC transporter permease protein, amino acid acetyltransferase, amino acid transporter, amino-acid acetyltransferase, aminotransferase, ammonium transporter, ankyrin repeat family protein, anthranilate synthase component I, arginine exporter protein, arginine N-succinyltransferase, argininosuccinate lyase, asparaginase, aspartate 1-decarboxylase, aspartate aminotransferase, aspartate kinase, aspartate-ammonia ligase, At1g17440-protein, At1g19800-protein, At4g32480-protein, At5g16650-protein, at5g21910-protein, ATP-binding component of a transport system, ATP-dependent RNA helicase, auxin response factor, AX653549-protein, AY087308-protein, b0391-protein, b0456-protein, b0518-protein, b0801-protein, b0841-protein, b0917-protein, b1003-protein, b1024-protein, b1137-protein, b1155-protein, b1163-protein, b1179-protein, b1205-protein, b1229-protein, b1259-protein, b1280-protein, b1330-protein, b1445-protein, b1522-protein, b1583-protein, b1670-protein, b1672-protein, b1837-protein, b1898-protein, b1930-protein, b2032-protein, b2107-protein, b2360-protein, b2399-protein, b2474-protein, b2513-protein, b2613-protein, b2673-protein, b2739-protein, b2812-protein, b2849-protein, b3083-protein, b3098-protein, b3121-protein, b3221-protein, b3246-protein, b3346-protein, b3392-protein, b3410-protein, b3509-protein, b3646-protein, b3791-protein, b3814-protein, b3989-protein, b4029-protein, b4121-protein, beta-galactosidase, beta-hydroxylase, bifunctional aspartokinase/homoserine dehydrogenase, bifunctional purine biosynthesis protein, branched chain aminotransferase, branched-chain amino acid permease, calcium-dependent protein kinase, carbon dioxide concentrating mechanism protein, cation-transporting ATPase, CBL-interacting protein kinase, CDP-diacylglycerol-glycerol-3-phosphate 3-phosphatidyltransferase, CDP-diacylglycerol-serine O-phosphatidyltransferase, CDP-glucose-4,6-dehydratase, cell division control protein, cellulose synthase catalytic subunit, Chaperone protein CIpB, chorismate mutase-T and prephenate dehydrogenase, citrate synthase, coproporphyrinogen III oxidase, CTP synthetase, cullin, cyclin D, cystathionine gamma-synthase, cytochrome c-type protein, D-3-phosphoglycerate dehydrogenase, delta-1-pyrroline 5-carboxylase synthetase, diacylglycerol O-acyltransferase, dihydroxyacid dehydratase, DNA helicase II, DNA mismatch repair protein, DNA-binding protein, DnaJ-like chaperone, D-serine dehydratase, electron transfer flavoprotein subunit beta, elongation factor Tu, enoyl-CoA hydratase, enterobacterial common antigen polymerase, eukaryotic translation initiation factor, eukaryotic translation initiation factor 5, exopolyphosphatase, Fe—S subunit of oxidoreductase, flavodoxin, fumarylacetoacetate hydrolase, gamma-glutamyltranspeptidase, GDP-mannose dehydrogenase, geranylgeranyl pyrophosphate synthase, gibberellin 20-oxidase, Glu/Leu/Phe/Val dehydrogenase , glucokinase, glucose dehydrogenase, glucose-1-phosphate cytidylyltransferase, glucose-6-phosphate 1-dehydrogenase, glutamate-ammonia-ligase, glutamine amidotransferase, glutamine synthetase, glutaredoxin, glutathione peroxidase, glutathione S-transferase, Glycine cleavage system T aminomethyltransferase, glycogen (starch) synthase, glycogen synthase, glycoprotease, glycosyl transferase, GM02LC11114protein, GM02LC17485-protein, harpin-induced family protein, heat shock transcription factor, HesB/YadR/YfhF family protein, histone acetyltransferase, histone H2A, homocitrate synthase, homoserine O-acetyltransferase, hydrolase, integral membrane transporter family protein, iron(III) dicitrate-binding protein, isochorismate synthase, kinase, L-aspartate oxidase, lipoprotein precursor, lysine decarboxylase, lysyl-tRNA synthetase, major facilitator superfamily transporter protein, malate dehydrogenase, malic enzyme, membrane protein, membrane transport protein, metal ion transporter, metal-dependent hydrolase, methylglyoxal synthase, methylglyoxalase, methyltransferase, mitochondrial inner membrane protease subunit, molecular chaperone portein, monothiol glutaredoxin, monthiol glutaredoxin, multidrug resistance protein, multiple antibiotic resistance protein, murein transglycosylase, N-(5′-phosphoribosyl)anthranilate isomerase, Na+/K+ transporter, N-acetyl-gamma-glutamyl-phosphate reductase, NADH dehydrogenase I chain I, NADH dehydrogenase subunit N, NADH-quinone oxidoreductase subunit, NADP-dependent malic enzyme, nitrate/nitrite transport protein, O-antigen chain length determinant, oxidoreductase, oxidoreductase subunit, oxireductase, peptidase, permease protein of phosphate ABC transporter, phosphate permease, phosphate transporter, phosphoadenosine phosphosulfate reductase , phosphoanhydride phosphorylase, phosphoenolpyruvate carboxykinase, phosphopantetheine adenylyltransferase, phosphoribosylformyl glycinamidine synthase subunit, Photosystem I reaction center subunit XI, photosystem II protein, polygalacturonase, precorrin methylase, Pre-mRNA-splicing factor, prolipoprotein diacylglyceryl transferase, protease, protein kinase, protein phosphatase, PTS system N-acetylmuramic acid-specific EIIBC component, purine biosynthesis protein, pyruvate kinase, restriction alleviation protein, riboflavin biosynthesis protein, RNA binding protein, RNA polymerase sigma factor, RNA-binding protein, s_pp015018333r-protein, sec-independent protein translocase, Sec-independent protein translocase subunit, serine acetyltransferase, serine hydroxymethyltransferase, serine protease, serine/threonine dehydratase, Serine/threonine-protein phosphatase, short-chain alcohol dehydrogenase family, sll0281-protein, sll1032-protein, sll1761-protein, sn-glycerol-3-phosphate dehydrogenase, sodium/proton antiporter, sterol 24-C-methyltransferase, thioredoxin, thioredoxin family protein, threonine dehydratase, threonine synthase, transcription factor, transcriptional regulator, transport protein, trehalose-phosphatase, tryptophan biosynthesis protein, tryptophan synthase alpha chain, TTC0768-protein, TTC0881-protein, TTC1386protein, urease subunit, uridine/cytidine kinase, uroporphyrin-III C-methyltransferase, XM_{—}473199-protein, ydr183w-protein, ydr273w-protein, ydr507c-protein, yer014w-protein, yer106w-protein, YFL019C-protein, yfl054c-protein, ygl096w-protein, ygl237c-protein, ygr221 c-protein, yhl013c-protein, yhr006w-protein, yhr207c-protein, YKL038W-protein, yml083c-protein, ymr013c-protein, YNL086W-protein, yol160w-protein, zinc finger protein, zinc transporter, and Zm_{—}4842_BE510522-protein, respectively.

[28600] Moreover, the nucleic acid molecule of the invention can comprise only a portion of the coding region of one of the nucleic acid molecules depicted in Table I, application no. 3, columns 5 or 8, for example a fragment which can be used as a probe or primer or a fragment encoding a biologically active portion of the polypeptide of the present invention or of a polypeptide used in the process of the present invention, i.e. having above-mentioned activity, e.g. conferring the production or the increased production of the respective fine chemical 3,4dihydroxyphenylalanine (dopa), 5-oxoproline, alanine, asparagine, aspartate, citrulline, glycine, homoserine, ornithine, phenylalanine, serine, or tyrosine as compared to a corresponding, e.g. non-transformed, wild type non-human organism, like a microorganism or a plant cell, plant or part thereof, by for example in one embodiment expression either in the cytosol or in an organelle such as a plastid or mitochondria or both, preferably in a plastid, or in another embodiment non-targeted or targeted. The nucleotide sequences determined from the cloning of the present protein-according-to-the-invention-encoding gene allows for the generation of probes and primers designed for use in identifying and/or cloning its homologues from other cell types and organisms. The probe/primer typically comprises a substantially purified oligonucleotide. The oligonucleotide typically comprises a region of nucleotide sequence that hybridizes under stringent conditions to at least about 12, 15 preferably about 20 or 25, more preferably about 40, 50 or 75 consecutive nucleotides of a sense strand of one of the sequences set forth, e.g., in the respective line in Table I, application no. 3, column 5 or 8, preferably the coding region thereof, or a homolog or a fragment thereof, an anti-sense sequence of one of the sequences, e.g., set forth in the respective line in Table I, application no. 3, columns 5 or 8, preferably the coding region thereof, or a homolog or a fragment thereof or naturally occurring mutants thereof. Primers based on a nucleic acid molecule of invention can be used in PCR reactions to clone homologs of the polypeptide of the invention or of the polypeptide used in the process of the invention, e.g. as the primers described in the examples of the present invention, e.g. as shown in the examples. A PCR with the primers shown in the respective line in Table Ill, column 8 will result in a fragment of the gene product as shown in Table II, application no. 3, column 5.

[28601] Primer sets are interchangeable. The person skilled in the art knows how to design and combine said primers to result in the desired product, e.g. in a full length clone or a partial sequence. Probes based on the sequences of the nucleic acid molecule of the invention or used in the process of the present invention can be used to detect transcripts or genomic sequences encoding the same or homologous proteins. The probe can further comprise a label group attached thereto, e.g. the label group can be a radioisotope, a fluorescent compound, an enzyme, or an enzyme co-factor. Such probes can be used as a part of a genomic marker test kit for identifying cells which express a polypeptide of the invention or used in the process of the present invention, such as by measuring a level of an encoding nucleic acid molecule in a sample of cells, e.g. detecting mRNA levels or determining, whether a genomic gene comprising the sequence of the polynucleotide of the invention or used in the processes of the present invention has been mutated or deleted.

[28602] As the expression of a respective nucleic acids of the invention is related to the synthesis of the respective fine chemical 3,4-dihydroxyphenylalanine (dopa), 5-oxoproline, alanine, asparagine, aspartate, citrulline, glycine, homoserine, ornithine, phenylalanine, serine, or tyrosine its function as a probe extends to the detection of microorganisms, plant tissues, plants, plant variets, plant ecotypes or plant genera with varying capability or potential for synthesis of the respective fine chemical 3,4-dihydroxyphenylalanine (dopa), 5-oxoproline, alanine, asparagine, aspartate, citrulline, glycine, homoserine, ornithine, phenylalanine, serine, or tyrosine. Therefore in one embodiment the present invention relates to a method for analyzing the capability or potential of a plant tissue, a plant, a plant variety or plant ecotype to produce the fine chemical 3,4-dihydroxyphenylalanine (dopa), 5-oxoproline, alanine, asparagine, aspartate, citrulline, glycine, homoserine, ornithine, phenylalanine, serine, or tyrosine by using the nucleic acid of the invention or parts thereof as a probe to detect the amount of the nucleic acid of the invention in the non-human organism or a part thereof in comparison to another non-human organism.

[28603] The nucleic acid molecule of the invention encodes a polypeptide or portion thereof which includes an amino acid sequence which is sufficiently homologous to the amino acid sequence shown in respective line in Table II, application no. 3, columns 5 or 8 such that the protein or portion thereof maintains the ability to confer the production or the increased production of the respective fine chemical 3,4-dihydroxyphenylalanine (dopa), 5-oxoproline, alanine, asparagine, aspartate, citrulline, glycine, homoserine, ornithine, phenylalanine, serine, or tyrosine as compared to a corresponding, e.g. non-transformed, wild type non-human organism, like a microorganism or a plant cell, plant or part thereof, in particular increasing the activity as mentioned above or as described in the examples in microorganisms or plants.

[28604] As used herein, the language “sufficiently homologous” refers to proteins or portions thereof which have amino acid sequences which include a minimum number of identical or equivalent amino acids (e.g. an amino acid which has a similar side chain as an amino acid in one of the sequences of the polypeptide of the present invention) to an amino acid sequence shown in the respective line in Table II, application no. 3, columns 5 or 8 such that the protein or portion thereof is able to confer the production or the increased production of the respective fine chemical 3,4-dihydroxyphenylalanine (dopa), 5-oxoproline, alanine, asparagine, aspartate, citrulline, glycine, homoserine, ornithine, phenylalanine, serine, or tyrosine as compared to a corresponding, e.g. non-transformed, wild type non-human organism, like a microorganism or a plant cell, plant or part thereof. For example having the activity of a protein as shown in the respective line in Table II, application no. 3, column 3 and as described herein.

[28605] In an embodiment of the present invention, the nucleic acid molecule of the present invention comprises a nucleic acid molecule that encodes a portion of the protein of the present invention. The protein is at least about 30%, 35%, 40%, 45% 50%, 55%, 60%, 65%, 70%, 75%, 80%, 85%, 90%, 91%, 92%, 93%, 94%, 95%, 96%, 97%, 98%, 99%, 99.5% or more homologous to an entire amino acid sequence shown in the respective line of Table II, application no. 3, column 5 or 8 and has the above-mentioned activity, e.g. conferring the production or the increased production of the respective fine chemical 3,4-dihydroxyphenylalanine (dopa), 5-oxoproline, alanine, asparagine, aspartate, citrulline, glycine, homoserine, ornithine, phenylalanine, serine, or tyrosine as compared to a corresponding, e.g. non-transformed, wild type non-human organism, like a microorganism or a plant cell, plant or part thereof by, for example in a embodiment expression either in the cytosol or in an organelle such as a plastid or mitochondria or both, preferably in a plastid, or in another embodiment by targeted or non-targeted expression.

[28606] [0338.1.1.3] to [0339.1.1.3] for the disclosure of these paragraphs see [0338.1.1.1] to [0339.1.1.1] above.

[28607] The invention further relates to nucleic acid molecules or methods using said nucleic acid molecules that differ from one of the nucleotide sequences shown in the respective line in Table I, application no. 3, columns 5 or 8, preferably the coding region thereof, or fragments or homologs thereof, due to degeneracy of the genetic code but encode a polypeptide of the present invention, in particular a polypeptide having the above-mentioned activity, e.g. as those polypeptides depicted in the respective line in Table II, application no. 3, columns 5 or 8, fragments or homologs thereof. Advantageously, the nucleic acid molecule of the invention comprises, or in an other embodiment has, a nucleotide sequence encoding a protein comprising, or in an other embodiment having, an amino acid sequence shown in the respective line in Table II, application no. 3, columns 5 or 8, fragments or homologs thereof. In a further embodiment, the nucleic acid molecule of the invention encodes a full length protein which is substantially homologous to an amino acid sequence shown in the respective line in Table II, application no. 3, columns 5 or 8, or homologs thereof. However, in an embodiment, the nucleic acid molecule of the present invention does not consist of the sequence shown in the respective line in Table I, preferably Table IA, application no. 3, columns 5 or 8, preferably the coding region thereof, but the functional homologs thereof.

[28608] [0341.1.1.3] to [0343.1.1.3] for the disclosure of these paragraphs see [0341.1.1.1] to [0343.1.1.1] above.

[28609] Accordingly, in another embodiment, a nucleic acid molecule of the invention is at least 15, 20, 25 or 30 nucleotides in length. Preferably, it hybridizes under stringent conditions to a nucleic acid molecule comprising a nucleotide sequence of the nucleic acid molecule of the present invention or used in the process of the present invention, e.g. comprising the sequence shown in the respective line in Table I, application no. 3, columns 5 or 8, preferably the coding region thereof. In another embodiment the nucleic acid molecule is preferably at least 20, 30, 50, 100, 250 or more nucleotides in length.

[28610] for the disclosure of this paragraph see [0345.1.1.1] above.

[28611] Preferably, a nucleic acid molecule of the invention that hybridizes under stringent conditions to a sequence shown in the respective line in Table I, application no. 3, columns 5 or 8, preferably the coding region thereof, corresponds to a naturally-occurring nucleic acid molecule of the invention. As used herein, a “naturally-occurring” nucleic acid molecule refers to a RNA or DNA molecule having a nucleotide sequence that occurs in nature (e.g. encodes a natural protein). Preferably, the nucleic acid molecule encodes a natural protein having above-mentioned activity, e.g. conferring the production or the increased production of the respective fine chemical 3,4-dihydroxyphenylalanine (dopa), 5-oxoproline, alanine, asparagine, aspartate, citrulline, glycine, homoserine, ornithine, phenylalanine, serine, or tyrosine as compared to a corresponding, e.g. non-transformed, wild type non-human organism, like a microorganism or a plant cell, plant or part thereof after increasing the expression or activity thereof or the activity of a protein of the invention or used in the process of the invention, in an embodiment for example expression either in the cytosol or in an organelle such as a plastid or mitochondria, preferably in plastids, or, in another embodiment by targeted or non-targeted expression.

[28612] for the disclosure of this paragraph see [0347.1.1.1] above.

[28613] For example, nucleotide substitutions leading to amino acid substitutions at “non-essential” amino acid residues can be made in a sequence of the nucleic acid molecule of the invention or used in the process of the invention, e.g. shown in the respective line in Table I, application no. 3, columns 5 or 8, preferably the coding region thereof, or fragments or homologs thereof.

[28614] [0349.1.1.3] to [0350.1.1.3] for the disclosure of these paragraphs see [0349.1.1.1] to [0350.1.1.1] above.

[28615] Accordingly, the invention relates to nucleic acid molecules encoding a polypeptide having above-mentioned activity, in a non-human organisms or parts thereof by for example expression either in the cytosol or in an organelle such as a plastid or mitochondria or both, preferably in plastids, that contain changes in amino acid residues that are not essential for said activity. Such polypeptides differ in amino acid sequence from a sequence depicted in the respective line in Table II, especially Table IIA, application no. 3, columns 5 or 8, but retain said activity described herein. The nucleic acid molecule can comprise a nucleotide sequence encoding a polypeptide, wherein the polypeptide comprises an amino acid sequence at least about 50% identical to an amino acid sequence shown in the respective line in Table II, application no. 3, columns 5 or 8, and is capable of conferring the production or the increased production of the respective fine chemical 3,4-dihydroxyphenylalanine (dopa), 5-oxoproline, alanine, asparagine, aspartate, citrulline, glycine, homoserine, ornithine, phenylalanine, serine, or tyrosine as compared to a corresponding, e.g. non-transformed, wild type non-human organism, like a microorganism or a plant cell, plant or part thereof, after increasing its activity for example in an embodiment by expression either in the cytosol or in an organelle such as a plastid or mitochondria or both, preferably in plastids, or, in another embodiment by targeted or non-targeted expression. Preferably, the protein encoded by the nucleic acid molecule is at least about 60%, 70%, 80%, 90%, 95%, 96%, 97%, 98%, 99% or 99.5% identical to the sequence shown in the respective line in Table II, application no. 3, columns 5 or 8.

[28616] [0352.1.1.3] to [0357.1.1.3] for the disclosure of these paragraphs see [0352.1.1.1] to [0357.1.1.1] above.

[28617] Functional equivalents of the nucleic acid molecules according to the present invention and/or used in the process according to the present invention represent an embodiment of homologs. Functional equivalents derived from the nucleic acid molecules as shown in the respective line in Table I, application no. 3, columns 5 or 8, preferably the coding region thereof, according to the invention by substitution, insertion or deletion have at least 30%, 35%, 40%, 45%, 50%, 55%, 60%, 65%, 70%, 75%, 80%, 85%, 90%, 91%, 92%, 93%, 94%, 95%, 96%, 97%, 98%, 99% or 99.5% homology with one of the nucleic acid molecules as shown in the respective line in Table I, application no. 3, columns 5 or 8, preferably the coding region thereof, according to the invention and encode polypeptides having essentially the same properties as the polypeptide as shown in the respective line in Table II, application no. 3, columns 5 or 8.

[28618] Functional equivalents derived from one of the polypeptides as shown in the respective line in Table II, application no. 3, columns 5 or 8 according to the invention by substitution, insertion or deletion have at least 30%, 35%, 40%, 45%, 50%, 55%, 60%, 65%, 70%, 75%, 80%, 85%, 90%, 91%, 92%, 93%, 94%, 95%, 96%, 97%, 98%, 99% or 99.5% homology with one of the polypeptides as shown in the respective line in Table II, application no. 3, columns 5 or 8 according to the invention and having essentially the same properties as the polypeptide as shown in the respective line in Table II, application no. 3, columns 5 or 8.

[28619] for the disclosure of this paragraph see [0359.1.1.1] above.

[28620] A nucleic acid molecule encoding a homolog to a polypeptide depicted in the respective line in Table II, application no. 3, columns 5 or 8 can be created by introducing one or more nucleotide substitutions, additions or deletions into the nucleic acid molecule of the present invention, in particular of Table I, application no. 3, columns 5 or 8, in the respective line, such that one or more amino acid substitutions, additions or deletions are introduced into the encoded protein. Mutations can be introduced into the nucleic acid molecules as depicted in the respective line in Table I, application no. 3, columns 5 or 8, preferably the coding region thereof, by standard techniques, such as site-directed mutagenesis, PCR-mediated mutagenesis or other methods known to the person skilled in the art.

[28621] [0361.1.1.3] to [0363.1.1.3] for the disclosure of these paragraphs see [0361.1.1.1] to [0363.1.1.1] above.

[28622] Homologues of the nucleic acid sequences used, with the sequences shown in the respective line in Table I, application no. 3, columns 5 or 8, preferably the coding region thereof, comprise also allelic variants with at least approximately 30%, 35%, 40%, 45%, 50%, 55%, 60%, 65%, 70%, 75%, 80%, 85%, 90%, 91%, 92%, 93%, 94% 95%. 96%, 97%, 98%, 99%, 99.5% or more % homology with one of the nucleotide sequences shown or the above-mentioned derived nucleic acid sequences or their homologues or derivatives or parts of these. Allelic variants encompass in particular functional variants which can be obtained by deletion, insertion or substitution of nucleotides from the sequences shown in the respective line, preferably in Table I, columns 5 or 8, preferably the coding region thereof, or from the derived nucleic acid sequences, the intention being, however, that the enzymatic activity or the biological activity of the resulting proteins synthesized is advantageously retained or increased.

[28623] In one embodiment of the present invention, the nucleic acid molecule of the invention or used in the process of the invention comprises the sequences shown in the respective line in any of the Table I, application no. 3, columns 5 or 8, preferably the coding region thereof, fragments or homologs thereof. It is preferred that the nucleic acid molecule comprises as little as possible other nucleotides not shown in the respective line in any one of Table I, application no. 3, columns 5 or 8, preferably the coding region thereof, fragments or homologs thereof. In one embodiment, the nucleic acid molecule comprises less than 500, 400, 300, 200, 100, 90, 80, 70, 60, 50 or 40 further nucleotides. In a further embodiment, the nucleic acid molecule comprises less than 30, 20 or 10 further nucleotides. In one embodiment, the nucleic acid molecule used in the process of the invention is identical to the sequences shown in the respective line in Table I, application no. 3, columns 5 or 8, preferably the coding region thereof.

[28624] Also preferred is that the nucleic acid molecule used in the process of the invention encodes a polypeptide comprising the sequence shown in the respective line in Table II, application no. 3, columns 5 or 8, fragments or homologs thereof. In one embodiment, the nucleic acid molecule encodes less than 150, 130, 100, 80, 60, 50, 40 or 30 further amino acids. In a further embodiment, the encoded polypeptide comprises less than 20, 15, 10, 9, 8, 7, 6 or 5 further amino acids. In one embodiment used in the inventive process, the encoded polypeptide is identical to the sequences shown in the respective line in Table II, application no. 3, columns 5 or 8.

[28625] In one embodiment, the nucleic acid molecule of the invention or used in the process encodes a polypeptide comprising the sequence shown in the respective line in Table II, application no. 3, columns 5 or 8, or fragments or homologs thereof, and comprises less than 100 further nucleotides. In a further embodiment, said nucleic acid molecule comprises less than 30 further nucleotides. In one embodiment, the nucleic acid molecule used in the process is identical to a coding sequence of the sequences shown in the respective line in Table I, application no. 3, columns 5 or 8.

[28626] Polypeptides (=proteins), which still have the essential biological or enzymatic activity of the polypeptide of the present invention conferring the production or the increased production of the respective fine chemical 3,4-dihydroxyphenylalanine (dopa), 5-oxoproline, alanine, asparagine, aspartate, citrulline, glycine, homoserine, ornithine, phenylalanine, serine, or tyrosine as compared to a corresponding, e.g. non-transformed, wild type non-human organism, like a microorganism or a plant cell, plant or part thereof, i.e. whose activity is essentially not reduced, are polypeptides with at least 10%, 20%, 30%, 40%, 50%, 60%, 70%, 80%, 90%, 95% or more of the wild type biological activity or enzymatic activity, advantageously, the activity is essentially not reduced in comparison with the activity of a polypeptide shown in the respective line in Table II, application no. 3, columns 5 or 8 expressed under identical conditions.

[28627] Homologues of nucleic acid molecules shown in the respective line in Table I, application no. 3, columns 5 or 8, preferably the coding region thereof, or fragments thereof, or of the derived sequences shown in the respective line in Table II, application no. 3, columns 5 or 8, or fragments thereof, also mean truncated sequences, cDNA, single-stranded DNA or RNA of the coding and noncoding DNA sequence. Homologues of said sequences are also understood as meaning derivatives, which comprise noncoding regions such as, for example, UTRs, introns, terminators, enhancers or promoter variants. The promoters upstream of the nucleotide sequences stated can be modified by one or more nucleotide substitution(s), insertion(s) and/or deletion(s) without, however, interfering with the functionality or activity either of the promoters, the open reading frame (=ORF) or with the 3′-regulatory region such as terminators or other 3′-regulatory regions, which are far away from the ORF. It is furthermore possible that the activity of the promoters is increased by modification of their sequence, or that they are replaced completely by more active promoters, even promoters from heterologous organisms.

[28628] Appropriate promoters are known to the person skilled in the art and are mentioned herein below.

[28629] [0370.1.1.3] to [0379.1.1.3] for the disclosure of these paragraphs see [0370.1.1.1] to [0379.1.1.1] above.

[28630] Moreover, a native polypeptide conferring the increase of the respective fine chemical 3,4-dihydroxyphenylalanine (dopa), 5-oxoproline, alanine, asparagine, aspartate, citrulline, glycine, homoserine, ornithine, phenylalanine, serine, or tyrosine in a non-human or ganism or a part thereof can be isolated from cells (e.g., endothelial cells), for example using the antibody of the present invention as described below, in particular, an antibody against proteins having 2,3-dihydroxyphenylpropionate 1,2-dioxygenase, 2-C-methyl-D-erythritol 4-phosphate cytidylyltransferase, 2-oxoglutarate dehydrogenase E1 subunit, 30S ribosomal protein S3, 3-deoxy-7-phosphoheptulonate synthase, 3-deoxy-D-arabinoheptulosonate-7-phosphatesynthase, 3-oxoacyl-[acyl-carrier-protein] synthase, 3-phosphoglycerate dehydrogenase, 47266012-protein, 49747384_SOYBEAN-protein, 50S ribosomal protein L14, 5′-nucleotidase, ABC metal ion transporter substrate-binding protein, ABC transporter ATP binding component, ABC transporter ATP-binding protein, ABC transporter component, ABC transporter permease protein, ABC transporter substrate-binding protein, acetolactate synthase, acetolactate synthase small subunit, acetyl CoA carboxylase, acetyl-CoA acetyltransferase, acetyltransferase, acid shock protein, acyl transferase, acyl-CoA dehydrogenase, acyl-CoA synthase, adenylate kinase, adenylylsulfate kinase, agmatinase, aldehyde dehydrogenase, amine oxidase, amino acid ABC transporter permease protein, amino acid acetyltransferase, amino acid transporter, amino-acid acetyltransferase, aminotransferase, ammonium transporter, ankyrin repeat family protein, anthranilate synthase component I, arginine exporter protein, arginine N-succinyltransferase, argininosuccinate lyase, asparaginase, aspartate 1-decarboxylase, aspartate aminotransferase, aspartate kinase, aspartate-ammonia ligase, At1g17440-protein, At1g19800-protein, At4g32480-protein, At5g16650-protein, at5g21910-protein, ATP-binding component of a transport system, ATP-dependent RNA helicase, auxin response factor, AX653549-protein, AY087308-protein, b0391-protein, b0456-protein, b0518-protein, b0801-protein, b0841-protein, b0917-protein, b1003-protein, b1024-protein, b1137-protein, b1155-protein, b1163-protein, b1179-protein, b1205-protein, b1229-protein, b1259-protein, b1280-protein, b1330-protein, b1445-protein, b1522-protein, b1583-protein, b1670-protein, bl 672-protein, b1837-protein, b1898-protein, b1930-protein, b2032-protein, b2107-protein, b2360-protein, b2399-protein, b2474-protein, b2513-protein, b2613-protein, b2673-protein, b2739-protein, b2812-protein, b2849-protein, b3083-protein, b3098-protein, b3121-protein, b3221-protein, b3246-protein, b3346-protein, b3392-protein, b3410-protein, b3509-protein, b3646-protein, b3791-protein, b3814-protein, b3989-protein, b4029-protein, b4121-protein, beta-galactosidase, beta-hydroxylase, bifunctional aspartokinase/homoserine dehydrogenase, bifunctional purine biosynthesis protein, branched chain aminotransferase, branched-chain amino acid permease, calcium-dependent protein kinase, carbon dioxide concentrating mechanism protein, cation-transporting ATPase, CBL-interacting protein kinase, CDP-diacylglycerol-glycerol-3-phosphate 3-phosphatidyltransferase, CDP-diacylglycerol-serine O-phosphatidyltransferase, CDP-glucose-4,6-dehydratase, cell division control protein, cellulose synthase catalytic subunit, Chaperone protein CIpB, chorismate mutase-T and prephenate dehydrogenase, citrate synthase, coproporphyrinogen III oxidase, CTP synthetase, cullin, cyclin D, cystathionine gamma-synthase, cytochrome c-type protein, D-3-phosphoglycerate dehydrogenase, delta-1-pyrroline 5-carboxylase synthetase, diacylglycerol O-acyltransferase, dihydroxyacid dehydratase, DNA helicase II, DNA mismatch repair protein, DNA-binding protein, DnaJ-like chaperone, D-serine dehydratase, electron transfer flavoprotein subunit beta, elongation factor Tu, enoyl-CoA hydratase, enterobacterial common antigen polymerase, eukaryotic translation initiation factor, eukaryotic translation initiation factor 5, exopolyphosphatase, Fe—S subunit of oxidoreductase, flavodoxin, fumarylacetoacetate hydrolase, gamma-glutamyltranspeptidase, GDP-mannose dehydrogenase, geranylgeranyl pyrophosphate synthase, gibberellin 20-oxidase, Glu/Leu/Phe/Val dehydrogenase , glucokinase, glucose dehydrogenase, glucose-1-phosphate cytidylyltransferase, glucose-6-phosphate 1-dehydrogenase, glutamate-ammonialigase, glutamine amidotransferase, glutamine synthetase, glutaredoxin, glutathione peroxidase, glutathione S-transferase, Glycine cleavage system T aminomethyltransferase, glycogen (starch) synthase, glycogen synthase, glycoprotease, glycosyl transferase, GM02LC11114protein, GM02LC17485-protein, harpin-induced family protein, heat shock transcription factor, HesB/YadR/YfhF family protein, histone acetyltransferase, histone H2A, homocitrate synthase, homoserine O-acetyltransferase, hydrolase, integral membrane transporter family protein, iron(III) dicitrate-binding protein, isochorismate synthase, kinase, L-aspartate oxidase, lipoprotein precursor, lysine decarboxylase, lysyl-tRNA synthetase, major facilitator superfamily transporter protein, malate dehydrogenase, malic enzyme, membrane protein, membrane transport protein, metal ion transporter, metal-dependent hydrolase, methylglyoxal synthase, methylglyoxalase, methyltransferase, mitochondrial inner membrane protease subunit, molecular chaperone portein, monothiol glutaredoxin, monthiol glutaredoxin, multidrug resistance protein, multiple antibiotic resistance protein, murein transglycosylase, N-(5′-phosphoribosyl)anthranilate isomerase, Na+/K+ transporter, N-acetyl-gamma-glutamyl-phosphate reductase, NADH dehydrogenase I chain I, NADH dehydrogenase subunit N, NADH-quinone oxidoreductase subunit, NADP-dependent malic enzyme, nitrate/nitrite transport protein, O-antigen chain length determinant, oxidoreductase, oxidoreductase subunit, oxireductase, peptidase, permease protein of phosphate ABC transporter, phosphate permease, phosphate transporter, phosphoadenosine phosphosulfate reductase , phosphoanhydride phosphorylase, phosphoenolpyruvate carboxykinase, phosphopantetheine adenylyltransferase, phosphoribosylformyl glycinamidine synthase subunit, Photosystem I reaction center subunit XI, photosystem II protein, polygalacturonase, precorrin methylase, Pre-mRNA-splicing factor, prolipoprotein diacylglyceryl transferase, protease, protein kinase, protein phosphatase, PTS system N-acetylmuramic acid-specific EIIBC component, purine biosynthesis protein, pyruvate kinase, restriction alleviation protein, riboflavin biosynthesis protein, RNA binding protein, RNA polymerase sigma factor, RNA-binding protein, s_pp015018333r-protein, sec-independent protein translocase, Sec-independent protein translocase subunit, serine acetyltransferase, serine hydroxymethyltransferase, serine protease, serine/threonine dehydratase, Serine/threonine-protein phosphatase, short-chain alcohol dehydrogenase family, sll0281-protein, sll1032-protein, sll1761-protein, sn-glycerol-3-phosphate dehydrogenase, sodium/proton antiporter, sterol 24-C-methyltransferase, thioredoxin, thioredoxin family protein, threonine dehydratase, threonine synthase, transcription factor, transcriptional regulator, transport protein, trehalose-phosphatase, tryptophan biosynthesis protein, tryptophan synthase alpha chain, TTC0768-protein, TTC0881-protein, TTC1386protein, urease subunit, uridine/cytidine kinase, uroporphyrin-111 C-methyltransferase, XM_{—}473199-protein, ydr183w-protein, ydr273w-protein, ydr507c-protein, yer014w-protein, yer106w-protein, YFL019C-protein, yfl054c-protein, ygl096w-protein, ygl237c-protein, ygr221c-protein, yhl013c-protein, yhr006w-protein, yhr207c-protein, YKL038W-protein, yml083c-protein, ymr013c-protein, YNL086W-protein, yol160w-protein, zinc finger protein, zinc transporter, or Zm_{—}4842_BE510522-protein activity, respectively, or an antibody against polypeptides as shown in the respective line in Table II, application no. 3, columns 5 or 8, or fragments or homologs thereof which can be produced by standard techniques utilizing the polypeptid of the present invention or fragment thereof, i.e., the polypeptide of this invention (FCRP). Preferred are monoclonal antibodies.

[28631] for the disclosure of this paragraph see [0381.1.1.1] above.

[28632] In one embodiment, the present invention relates to a polypeptide as depicted in the respective line in Table II, especially in Table IIA or especially in Table IIB, application no. 3, columns 5 or 8, or fragment or homolog thereof or as coded by the nucleic acid molecule shown in the respective line in Table I, especially Table IA or especially Table IB, application no. 3, columns 5 or 8, preferably the coding region thereof, or fragment or homolog thereof.

[28633] In an embodiment, the present invention relates to a polypeptide comprising or consisting of a consensus sequence shown in the respective line in Table IV, application no. 3, column 8 or at least one polypeptide motif shown in the respective line in Table IV, application no. 3, column 8.

[28634] In an embodiment thereof, the present invention relates to a polypeptide comprising or consisting of a consensus sequence shown in the respective line in Table IV, application no. 3, column 8 or comprising at least one polypeptide motif shown in the respective line in Table IV, application no. 3, column 8, whereby not more than 20, 15, 10, 9, 8, 7, 6, 5, 4, 3, 2, or 1, or 0 of the amino acids can be replaced by any amino acid.

[28635] In another embodiment thereof, the present invention relates to a polypeptide comprising or consisting of a consensus sequence shown in the respective line in Table IV, application no. 3, column 8 or comprising at least one polypeptide motif shown in the respective line in Table IV, application no. 3, column 8, whereby not more than 15%, 10%, 5%, 4%, 3%, 2% or1% or 0% of the amino acids defined as distinct specific amino acids are/is replaced by another amino acid.

[28636] In another embodiment thereof, the present invention relates to a polypeptide comprising or consisting of a consensus sequence shown in the respective line in Table IV, application no. 3, column 8 or comprising at least one polypeptide motif shown in the respective line in Table IV, application no. 3, column 8, whereby not more than 20, 15, 10, 9, 8, 7, 6, 5, 4, 3, 2, or 1, or 0 amino acids are inserted into the consensus sequence or polypeptide motif.

[28637] In an embodiment of the present invention, the polypeptide of the present invention comprises or consists of a consensus sequence or at least one polypeptide motif shown in the respective line in Table IV, application no. 3, column 8, whereby said polypeptide distinguishes over the sequence depicted in the respective line in Table II, application no. 3, columns 5 or 8 by one or more amino acids. In one embodiment, said polypeptide of the invention distinguishes over the sequence shown in the respective line in Table II, application no. 3, columns 5 and 8 by more than 5, 6, 7, 8 or 9 amino acids, preferably by more than 10, 15, 20, 25 or 30 amino acids, even more preferred are more than 40, 50, or 60 amino acids and, preferably, the sequence of the polypeptide of the invention distinguishes from the sequence shown in the respective line in Table II, application no. 3, columns 5 and 8 by not more than 80%, 70%, 60%, 50%, 40%, 30%, 20%, 10%, 5%, 4%, 3%, 2%, 1% or 0.5%. In another embodiment, said polypeptide of the invention does not consist of the sequence shown in the respective line in Table II, application no. 3, columns 5 and 8.

[28638] In an embodiment, the invention relates to a polypeptide conferring an increase in the respective fine chemical 3,4-dihydroxyphenylalanine (dopa), 5-oxoproline, alanine, asparagine, aspartate, citrulline, glycine, homoserine, ornithine, phenylalanine, serine, or tyrosine in a non-human organism, especially a microorganism or a plant, or a part thereof, being encoded by the nucleic acid molecule of the invention or used in the process of the invention and having a sequence which distinguishes over the sequence as shown in the respective line in Table II, application no. 3, columns 5 or 8 by one or more amino acids (but not exceeding 5%, preferably 4%, 3%, 2%, 1%, 0.5%, 0.2% or 0.1%). In an embodiment, said polypeptide of the invention does not comprise or consist of the sequence shown in the respective line in Table II, application no. 3, columns 5 or 8. In an embodiment, said polypeptide of the present invention is less than 100%, 99.999%, 99.99%, 99.9% or 99% identical. In one embodiment, said polypeptide which differs at least in one or more amino acids (but not exceeding 5%, preferably 4%, 3%, 2%, 1%, 0.5%, 0.2% or 0.1%) from the polypeptide shown in the respective line in Table II, application no. 3, columns 5 and 8 does not comprise a protein of the sequence shown in the respective line in Table II A and/or II B, application no. 3, columns 5 or 8.

[28639] In an embodiment, the present invention relates to a polypeptide having the activity of the protein as shown in the respective line in Table II, application no. 3, column 3, which distinguishes over the sequence depicted in the respective line in Table II, application no. 3, columns 5 or 8 by one or more amino acids, preferably by more than 5, 6, 7, 8 or 9 amino acids, preferably by more than 10, 15, 20, 25 or 30 amino acids, even more preferred are more than 40, 50, or 60 amino acids and, preferably, the sequence of the polypeptide of the invention distinguishes from the sequence shown in the respective line in Table II, application no. 3, columns 5 and 8 by not more than 80%, 70%, 60%, 50%, 40%, 30%, 20%, 10%, 5%, 4%, 3%, 2%, 1% or 0.5%.

[28640] In another embodiment the polypeptide of the invention takes the form of a preprotein consisting of a plastidial or mitochondrial transit peptide joint to a polypeptide having the activity of the protein as shown in Table II, column 3, from which the transit peptide is preferably cleaved off upon transport of the preprotein into the organelle for example into the plastid or mitochondrion.

[28641] In another embodiment the polypeptide of the invention takes not the form of a preprotein.

[28642] [0390.1.1.3] to [0391.1.1.3] for the disclosure of these paragraphs see [0390.1.1.1] to [0391.1.1.1] above.

[28643] A polypeptide of the invention can participate in the process of the present invention. The polypeptide or a portion thereof comprises preferably an amino acid sequence, which is sufficiently homologous to an amino acid sequence shown in the respective line in Table II A and/or II B, application no. 3, columns 5 or 8.

[28644] Further, the polypeptide can have an amino acid sequence which is encoded by a nucleotide sequence which hybridizes, preferably hybridizes under stringent conditions as described above, to a nucleotide sequence of the nucleic acid molecule of the present invention. Accordingly, the polypeptide has an amino acid sequence which is encoded by a nucleotide sequence that is at least about 35%, 40%, 45%, 50%, 55%, 60%, 65%, 70%, 75%, 80%, 85%, 90%, 91%, 92%, 93%, 94%, 95%, 96%, 97%, 98%, 99%, 99.5% or more homologous to one of the amino acid sequences as shown in the respective line in Table II A and/or II B, application no. 3, columns 5 or 8, or fragments thereof. The preferred polypeptide of the present invention preferably possesses at least one of the activities according to the invention and described herein. A preferred polypeptide of the present invention includes an amino acid sequence encoded by a nucleotide sequence which hybridizes, preferably hybridizes under stringent conditions, to a nucleotide sequence shown in the respective line in Table I A and/or I B, application no. 3, columns 5 or 8, preferably the coding region thereof, or fragments thereto or which is homologous thereto, as defined above

[28645] The polypeptide of the present invention can vary from the sequences shown in the respective line in Table II A and/or II B, application no. 3, columns 5 or 8 in amino acid sequence due to natural variation or mutagenesis, as described in detail herein. Accordingly, the polypeptide comprise an amino acid sequence which is at least about 35%, 40%, 45%, 50%, 55%, 60%, 65%, 70%, 75%, 80%, 85% or 90, 91%, 92%, 93%, 94%, 95%, 96%, 97%, 98%, 99%, 99.5% or more homologous to an entire amino acid sequence shown in the respective line in Table II A and/or II B, application no. 3, columns 5 or 8.

[28646] Biologically active portions of a polypeptide of the present invention include peptides comprising amino acid sequences derived from the amino acid sequence of the polypeptide of the present invention or used in the process of the present invention, e.g., the amino acid sequence shown in the respective line in Table II, application no. 3, columns 5 or 8 or the amino acid sequence of a protein homologous thereto, which include fewer amino acids than a full length polypeptide of the present invention or used in the process of the present invention or the full length protein which is homologous to a polypeptide of the present invention or used in the process of the present invention depicted herein, and exhibit at least one activity of a polypeptide of the present invention or used in the process of the present invention.

[28647] for the disclosure of this paragraph see [0396.1.1.1] above.

[28648] Manipulation of the nucleic acid molecule of the invention may result in the production of a protein having differences from the protein as shown in the respective line in Table II, application no. 3, column 5 or 8. Differences shall mean at least one amino acid different from the sequences as shown in the respective line in Table II, application no. 3, column 5 or 8, preferably at least 2, 3, 4, 5, 6, 7, 8, 9 or 10 amino acids (especially but not exceeding 0.1%, preferably 0.2%, 0.5%, 1%, 2%, 3% 4% or 5%), more preferably at least 15, 20, 25, 30, 35, 40, 45 or 50 amino acids (especially but not exceeding 0.5%, preferably 1%, 2%, 3% 4%, 5%, 10% or 25%) different from the sequences as shown in the respective line in Table II, application no. 3, column 5 or 8. These proteins may be improved in efficiency or activity, or may be more stable and therefore present in greater numbers in the cell as compared to the wild-type cell.

[28649] Any mutagenesis strategies for the polypeptide of the present invention or the polypeptide used in the process of the present invention to result in increasing said activity are not meant to be limiting; variations on these strategies will be readily apparent to one skilled in the art. Using such strategies, and incorporating the mechanisms disclosed herein, the nucleic acid molecule and polypeptide of the invention may be utilized to generate algae, ciliates, fungi, other microorganisms like C. glutamicum or plants or parts thereof, expressing proteins as shown in the respective line in Table II, application no. 3, column 5 or 8, or mutated proteins thereof. The nucleic acid molecules and polypeptide molecules of the invention are expressed such that the yield, production, and/or efficiency of production of a desired compound is improved.

[28650] [0399.1.1.3] to [0401.1.1.3] for the disclosure of these paragraphs see [0399.1.1.1] to [0401.1.1.1] above.

[28651] In one embodiment, a protein (=polypeptide) as shown in the respective line in Table II, application no. 3, column 5 or 8 refers to a polypeptide having an amino acid sequence corresponding to the polypeptide of the invention, especially to a polypeptide as shown in Table II, application no. 3, columns 5 or 8 or homologs thereof, or used in the process of the invention, whereas a “non- inventive protein or polypeptide” or “other polypeptide” refers to a polypeptide having an amino acid sequence corresponding to a protein which is not substantially homologous to a polypeptide of the invention, preferably which is not substantially homologous to a polypeptide or protein as shown in the respective line in Table II, application no. 3, column 5 or 8 or homologs thereof, e.g., a protein which does not confer the activity described herein and which is derived from the same or a different organism.

[28652] [0403.1.1.3] to [0409.1.1.3] for the disclosure of these paragraphs see [0403.1.1.1] to [0409.1.1.1] above.

[28653] As the nucleic acid molecules of the invention and/or the expression thereof is related to the synthesis of the respective fine chemical 3,4-dihydroxyphenylalanine (dopa), 5-oxoproline, alanine, asparagine, aspartate, citrulline, glycine, homoserine, ornithine, phenylalanine, serine, or tyrosine its function as a probe extends to the detection of microorganisms, plant tissues, plants, plant variets, plant ecotypes or plant genera with varying, advantageously increased, capability or potential for synthesis of the respective fine chemical 3,4-dihydroxyphenylalanine (dopa), 5-oxoproline, alanine, asparagine, aspartate, citrulline, glycine, homoserine, ornithine, phenylalanine, serine, or tyrosine. Therefore in one embodiment the present invention relates to a method for analyzing the capability or potential of a plant tissue, a plant, a plant variety or ecotype to produce the respective fine chemical 3,4-dihydroxyphenylalanine (dopa), 5-oxoproline, alanine, asparagine, aspartate, citrulline, glycine, homoserine, ornithine, phenylalanine, serine, or tyrosine by using the respective antibody of the invention as a probe to detect the amount of the polypeptide encoded by said nucleic acid molecule of the invention in a non-human organism in comparison to another organism.

[28654] Therefore in one embodiment the invention relates to a method to probe a non-human organism for its capability for the production of the respective fine chemical comprising the steps of
[28655] a) analyzing the sequence and/or the expression of the respective nucleic acid molecule of the invention in least two non-human organisms which differ in the capability to produce the respective fine chemical;
[28656] b) associate the different sequence and/or expression level of the nucleic acid molecules of the invention with their different capability to produce the respective fine chemical;
[28657] c) analyze the sequence and/or the expression of the nucleic acid molecule of the invention in at least a third non-human organism;
[28658] d) predict the capability of the at least third organism to produce the respective fine chemical based by comparing the sequence and/or expression of the nucleic acid of the invention to the sequences and/or expression levels of the nucleic acid molecule of the invention of the at least two organisms analyzed in step a.

[28659] [0411.1.1.3] to [0430.1.1.3] for the disclosure of these paragraphs see [0411.1.1.1] to [0430.1.1.1] above.

[28660] Accordingly the present invention relates to any cell transgenic for any nucleic acid characterized as part of the invention, e.g. conferring the increase of the respective fine chemical 3,4-dihydroxyphenylalanine (dopa), 5-oxoproline, alanine, asparagine, aspartate, citrulline, glycine, homoserine, ornithine, phenylalanine, serine, or tyrosine in a cell or a non-human organism or a part thereof, e.g. the nucleic acid molecule of the invention, the nucleic acid construct of the invention, the vector of the invention, the expression cassette according to the invention, or a nucleic acid molecule encoding the polypeptide of the invention, e.g. encoding a polypeptide having an activity as the protein as shown in the respective line in Table II, application no. 3, column 3. Due to the above-mentioned activity the respective fine chemical 3,4-dihydroxyphenylalanine (dopa), 5-oxoproline, alanine, asparagine, aspartate, citrulline, glycine, homoserine, ornithine, phenylalanine, serine, or tyrosine content in a cell or a non-human organism is increased. For example, due to modulation or manipulation, the cellular activity is increased, in a preferred embodiment in organelles such as plastids or mitochondria, e.g. due to an increased expression or specific activity or specific targeting of the subject matters of the invention in a cell or a non-human organism or a part thereof especially in organelles such as plastids or mitochondria, or in another embodiment in the cytosol. Transgenic for a polypeptide having a protein or a protein activity means herein that due to modulation or manipulation of the genome, the activity of protein as shown in the respective line in Table II, application no. 3, column 3 or a protein as shown in the respective line in Table II, application no. 3, column 3-like activity is increased in the cell or non-human organism or part thereof, especially in organelles such as plastids or mitochondria, or especially in the cytosol. Examples are described above in context with the process of the invention.

[28661] for the disclosure of this paragraph see [0432.1.1.1] above.

[28662] A naturally occurring expression cassette—for example the naturally occurring combination of the promoter of the gene encoding a protein as shown in the respective line in Table II, application no. 3, column 5 or 8, preferably the coding region thereof, or fragments or homologs thereof with the corresponding encoding gene—becomes a transgenic expression cassette when it is modified by non-natural, synthetic “artificial” methods such as, for example, mutagenesis. Such methods have been described (U.S. Pat. No. 5,565,350; WO 00/15815; also see above).

[28663] [0434.1.1.3] to [0435.1.1.3] for the disclosure of these paragraph see [0434.1.1.1] to [0435.1.1.1] above.

[28664] Transgenic plants comprising the respective fine chemical(s) synthesized in the process according to the invention can be marketed directly without isolation of the fine chemical synthesized. In the process according to the invention, plants are understood as meaning all plant parts, plant organs such as leaf, stalk, root, tubers or seeds or propagation material or harvested material or the intact plant. In this context, the seed encompasses all parts of the seed such as the seed coats, epidermal cells, seed cells, endosperm or embryonic tissue. The fine chemical produced in the process according to the invention may, however, also be isolated from the plant. In case of 3,4-dihydroxyphenylalanine (dopa), 5-oxoproline, alanine, asparagine, aspartate, citrulline, glycine, homoserine, ornithine, phenylalanine, serine, or tyrosine this can be in free form or bound to proteins. Fine chemical(s) produced by this process can be harvested by harvesting the non-human organisms either from the culture in which they grow or from the field. For example, this can be done via squeezing, grinding and/or extraction, salt precipitation and/or ion-exchange chromatography of the plant parts, preferably the plant seeds, plant fruits, plant tubers and the like.

[28665] [0437.1.1.3] to [0440.1.1.3] for the disclosure of these paragraphs see [0437.1.1.1] to [0440.1.1.1] above.

[28666] [0442.1.1.3] to [0454.1.1.3] for the disclosure of these paragraphs see [0442.1.1.1] to [0454.1.1.1] above.

[28667] In one embodiment, the present invention relates to a method for the identification of a gene product conferring the production of or an increase in the fine chemical production in a non-human cell, comprising the following steps:
[28668] (a) contacting, e.g. hybridizing, a, some or all nucleic acid molecules of a sample, e.g. cells, tissues, plants or microorganisms or a nucleic acid library, which can contain a candidate gene encoding a gene product conferring the production of or an increase in the fine chemical after expression, with the nucleic acid molecule of the present invention as shown in the respective line in column 5 or 8 of Table I A or B of application no. 3, preferably the coding region thereof, or a fragment or homolog thereof;
[28669] (b) identifying the nucleic acid molecules, which hybridize under relaxed stringent conditions with the nucleic acid molecule of the present invention in particular to the nucleic acid molecule sequence shown in the respective line in Table I, application no. 3, columns 5 or 8, preferably the coding region thereof, of a fragment or a homolog thereof, preferably in Table I B, application no. 3, columns 5 or 8, preferably the coding region thereof, of a fragment or a homolog thereof, and, optionally, isolating the full length cDNA clone or complete genomic clone;
[28670] (c) introducing the candidate nucleic acid molecules or a fragment thereof in host cells, preferably in a plant cell or a microorganism, appropriate for producing the fine chemical;
[28671] (d) expressing the identified nucleic acid molecules in the host cells for which the production of or the increased production of the fine chemical is desired;
[28672] (e) assaying the fine chemical level in the non-human host cells; and
[28673] (f) identifying the nucleic acid molecule and/or its gene product which expression confers the production of or an increase in the fine chemical level in the non-human host cell after expression compared to the wild type.

[28674] for the disclosure of this paragraph see [0456.1.1.1] above.

[28675] In another embodiment, the present invention relates to a method for the identification of a gene product conferring the production of or an increase in the fine chemical production in a cell, comprising the following steps:
[28676] (a) identifying a nucleic acid molecule of a non-human organism, which is at least 20%, 25%, 30%, 35%, 40%, 50%, 60%, 70%, 80%, 90%, 95%, 96%, 97%, 98%, 99%, 99.5% or more homolog to the nucleic acid molecule encoding a polypeptide comprising the polypeptide molecule as shown in the respective line in column 5 or 8 of Table II, application no. 3, or comprising a consensus sequence or a polypeptide motif as shown in the respective line in column 8 of Table IV, application no. 3, or being encoded by a nucleic acid molecule comprising a polynucleotide as shown in the respective line in column 5 or 8 of Table I, application no. 3, preferably the coding region thereof, or a homologue thereof as described herein, for example via homology search in a data bank;
[28677] (b) introducing the candidate nucleic acid molecule in non-human host cells, preferably in a plant cell or a microorganism, appropriate for producing the fine chemical;
[28678] (c) expressing the identified nucleic acid molecule in the non-human host cells;
[28679] (d) assaying the fine chemical level in the non-human host cells; and
[28680] (e) identifying the nucleic acid molecule and its gene product which expression confers the production of or an increase in the fine chemical level in the non-human host cell after expression compared to the wild type.

[28681] for the disclosure of this paragraph see [0458.1.1.1] above.

[28682] Further, the nucleic acid molecules disclosed herein, in particular the nucleic acid molecules shown in the respective line in column 5 or 8 of Table I A or B of application no. 3, may be sufficiently homologous to the sequences of related species such that these nucleic acid molecules may serve as markers for the construction of a genomic map in related organism or for association mapping. Furthermore natural variation in the genomic regions corresponding to nucleic acids disclosed herein, in particular the nucleic acid molecule shown in the respective line in column 5 or 8 of Table I A or B, of application no. 3 or homologous thereof, may lead to variation in the activity of the proteins disclosed herein, in particular the proteins comprising polypeptides as shown in the respective lines in column 5 or 8 of Table II A or B, of application no. 3 or their homologous, or comprising the consensus sequence or the polypeptide motif as shown in the respective line in column 8 of Table IV, and in consequence in a natural variation of an increased fine chemical production.

[28683] In consequence natural variation eventually also exists in form of more active allelic variants leading already to a relative increase in the fine chemical. Different variants of the nucleic acid molecules disclosed herein, in particular the nucleic acid molecules comprising the nucleic acid molecules as shown in the respective line in column 5 or 8 of Table I A or B of application no. 3, preferably the coding region thereof, which corresponds to different levels of increase in fine chemical, e.g. different levels of increase in fine chemical, can be indentified and used for marker assisted breeding for an enhanced production of the fine chemical.

[28684] Natural variation may also exist in the regulatory regions, e.g. the promoters of the natural genes comprising the nucleic acid molecules as shown in the respective line column 5 or 8 of Table I A or B of application no. 3, preferably the coding region thereof, which can similarly correspond to different levels of increase in the fine chemical, e.g. different levels of increase in the fine chemical can be identified and used for marker assisted breeding for an enhanced production of the fine chemical.

[28685] Accordingly, the present invention relates to a method for breeding plants for the production of the fine chemical, comprising
[28686] (a) selecting a first plant variety with an increased production of the fine chemical, e.g. based on an increased expression of a nucleic acid molecule of the invention as disclosed herein, in particular of a nucleic acid molecule comprising a nucleic acid molecule as shown in the respective line in column 5 or 8 of Table I A or B of application no. 3, preferably the coding region thereof, or fragments or homologs thereof, or a polypeptide comprising a polypeptide as shown in the respective line in column 5 or 8 of Table II A or B of application no. 3, or fragments or homologs thereof, or comprising a consensus sequence or a polypeptide motif as shown in the respective line in column 8 of Table IV, or a homolog thereof, as described herein;
[28687] (b) associating the level of increased production of the fine chemical, with the expression level or the genomic structure of a gene encoding said polypeptide or said nucleic acid molecule;
[28688] (c) crossing the first plant variety with a second plant variety, which significantly differs in its level of fine chemical; and
[28689] (d) identifying, which of the offspring varieties has got increased production of the fine chemical by the expression level of said polypeptide or nucleic acid molecule or the genomic structure of the gene(s) encoding said polypeptide or nucleic acid molecule of the invention.

[28690] [0462.1.1.3] to [0482.1.1.3] for the disclosure of these paragraphs see [0462.1.1.1] to [0482.1.1.1] above.

[28691] A special embodiment of this invention is related to genes which increase or generate the production of the fine chemical aspartate, asparagine, alanine, citrulline or ornithine in plant cells, plants or part thereof. Phenotypes thereto are associated with yield of plants (=yield related phenotypes). In accordance with the invention, therefore, the respective genes identified in Table I, wherein in column 7 aspartate, asparagine, alanine, citrulline or ornithine, respectively, are mentioned, especially the coding region thereof, or homologs or fragments thereof, may be employed to enhance any yield-related phenotype. Increased yield may be determined in field trials of transgenic plants and suitable control plants. Alternatively, a transgene's ability to increase yield may be determined in a model plant. An increased yield phenotype may be determined in the field test or in a model plant by measuring any one or any combination of the following phenotypes, in comparison to a control plant: yield of dry harvestable parts of the plant, yield of dry aerial harvestable parts of the plant, yield of underground dry harvestable parts of the plant, yield of fresh weight harvestable parts of the plant, yield of aerial fresh weight harvestable parts of the plant yield of underground fresh weight harvestable parts of the plant, yield of the plant's fruit (both fresh and dried), grain dry weight, yield of seeds (both fresh and dry), and the like.

[28692] The most basic yield-related phenotype is increased yield associated with the presence of the gene or a homolog or a fragment thereof as a transgene in the plant, i.e., the intrinsic yield of the plant. Intrinsic yield capacity of a plant can be, for example, manifested in a field test or in a model system by demonstrating an improvement of seed yield (e.g. in terms of increased seed/grain size, increased ear number, increased seed number per ear, improvement of seed filling, improvement of seed composition, embryo and/or endosperm improvements, and the like); modification and improvement of inherent growth and development mechanisms of a plant (such as plant height, plant growth rate, pod number, pod position on the plant, number of internodes, incidence of pod shatter, efficiency of nodulation and nitrogen fixation, efficiency of carbon assimilation, improvement of seedling vigour/early vigour, enhanced efficiency of germination (under non-stressed conditions), improvement in plant architecture.

[28693] Increased yield-related phenotypes may also be measured to determine tolerance to abiotic environmental stress. Abiotic stresses include drought, low temperature, salinity, osmotic stress, shade, high plant density, mechanical stresses, and oxidative stress, and yield-related phenotypes are encompassed by tolerance to such abiotic stresses. Additional phenotypes that can be monitored to determine enhanced tolerance to abiotic environmental stress include, without limitation, wilting; leaf browning; loss of turgor, which results in drooping of leaves or needles stems, and flowers; drooping and/or shedding of leaves or needles; the leaves are green but leaf angled slightly toward the ground compared with controls; leaf blades begun to fold (curl) inward; premature senescence of leaves or needles; loss of chlorophyll in leaves or needles and/or yellowing. Any of the yield-related phenotypes described above may be monitored in field tests or in model plants to demonstrate that a transgenic plant has increased tolerance to abiotic environmental stress. In accordance with the invention, the respective genes identified in Table 1, in case in column 7 is indicated, especially the coding region thereof, or homologs or fragments thereof, wherein in the same line aspartate, asparagine, alanine, citrulline or ornithine, respectively, may be employed to enhance tolerance to abiotic environmental stress in a plant, when confronted with abiotic environmental stress.

[28694] A polypeptide conferring an yield-increasing activity can be encoded by a respective nucleic acid sequence as shown in Table I, column 5 or 8, and/or comprises or consists of a respective polypeptide as depicted in Table II, column 5 and 8, and/or can be amplified with the respective primer set shown in Table III, column 8, in case in column 7 “aspartate”, “asparagine”, “alanine”, “citrulline” or “ornithine” is indicated.

[28695] “Improved adaptation” to environmental stress like e.g. freezing and/or chilling temperatures refers to an improved plant performance under environmental stress conditions.

[28696] A modification, i.e. an increase, can be caused by endogenous or exogenous factors. For example, an increase in activity in an organism or a part thereof can be caused by adding a gene product or a precursor or an activator or an agonist to the media or nutrition or can be caused by introducing said subjects into a organism, transient or stable. Furthermore such an increase can be reached by the introduction of the respective inventive nucleic acid sequence or the encoded protein in the correct cell compartment for example into the nucleus or cytoplasmic respectively or into plastids either by transformation and/or targeting.

[28697] The term “yield” as used herein generally refers to a measurable produce from a plant, particularly a crop. Yield and yield increase (in comparison to a non-transformed starting or wild-type plant) can be measured in a number of ways, and it is understood that a skilled person will be able to apply the correct meaning in view of the particular embodiments, the particular crop concerned and the specific purpose or application concerned. The terms “improved yield” or “increased yield” can be used interchangeable.

[28698] As used herein, the term “improved yield” or the term “increased yield” means any improvement in the yield of any measured plant product, such as grain, fruit or fiber. In accordance with the invention, changes in different phenotypic traits may improve yield. For example, and without limitation, parameters such as floral organ development, root initiation, root biomass, seed number, seed weight, harvest index, tolerance to abiotic environmental stress, leaf formation, phototropism, apical dominance, and fruit development, are suitable measurements of improved yield. Any increase in yield is an improved yield in accordance with the invention. For example, the improvement in yield can comprise a 0.1%, 0.5%, 1%, 3%, 5%, 10%, 15%, 20%, 30%, 40%, 50%, 60%, 70%, 80%, 90% or greater increase in any measured parameter. For example, an increase in the bushel/acre yield of soybeans or corn derived from a crop comprising plants which are transgenic for the nucleotides and polypeptides of Table I, in case in column 7 aspartate, asparagine, alanine, citrulline or ornithine, respectively, is mentioned, as compared with the bushel/acre yield from untreated soybeans or corn cultivated under the same conditions, is an improved yield in accordance with the invention. The increased or improved yield can be achieved in the absence or presence of stress conditions.

[28699] For example, enhanced or increased “yield” refers to one or more yield parameters selected from the group consisting of biomass yield, dry biomass yield, aerial dry biomass yield, underground dry biomass yield, fresh-weight biomass yield, aerial fresh-weight biomass yield, underground fresh-weight biomass yield; enhanced yield of harvestable parts, either dry or freshweight or both, either aerial or underground or both; enhanced yield of crop fruit, either dry or fresh-weight or both, either aerial or underground or both; and preferably enhanced yield of seeds, either dry or fresh-weight or both, either aerial or underground or both.

[28700] Crop yield is defined herein as the number of bushels of relevant agricultural product (such as grain, forage, or seed) harvested per acre. Crop yield is impacted by abiotic stresses, such as drought, heat, salinity, and cold stress, and by the size (biomass) of the plant. Traditional plant breeding strategies are relatively slow and have in general not been successful in conferring increased tolerance to abiotic stresses. Grain yield improvements by conventional breeding have nearly reached a plateau in maize.

[28701] Accordingly, the yield of a plant can depend on the specific plant/crop of interest as well as its intended application (such as food production, feed production, processed food production, biofuel, biogas or alcohol production, or the like) of interest in each particular case. Thus, in one embodiment, yield is calculated as harvest index (expressed as a ratio of the weight of the respective harvestable parts divided by the total biomass), harvestable parts weight per area (acre, square meter, or the like); and the like. The harvest index, i.e., the ratio of yield biomass to the total cumulative biomass at harvest, in maize has remained essentially unchanged during selective breeding for grain yield over the last hundred years. Accordingly, recent yield improvements that have occurred in maize are the result of the increased total biomass production per unit land area. This increased total biomass has been achieved by increasing planting density, which has led to adaptive phenotypic alterations, such as a reduction in leaf angle, which may reduce shading of lower leaves, and tassel size, which may increase harvest index. Harvest index is relatively stable under many environmental conditions, and so a robust correlation between plant size and grain yield is possible. Plant size and grain yield are intrinsically linked, because the majority of grain biomass is dependent on current or stored photosynthetic productivity by the leaves and stem of the plant. As with abiotic stress tolerance, measurements of plant size in early development, under standardized conditions in a growth chamber or greenhouse, are standard practices to measure potential yield advantages conferred by the presence of a transgene.

[28702] Acccordingly, the yield of a plant can be increased by improving one or more of the yield-related phenotypes.

[28703] Such yield-related phenotypes or traits of a plant the improvement of which results in increased yield comprise, without limitation, the increase of the intrinsic yield capacity of a plant and/or increased stress tolerance, e.g. improved nutrient use efficiency.

[28704] For example, yield refers to biomass yield, e.g. to dry weight biomass yield and/or fresh-weight biomass yield. Biomass yield refers to the aerial or underground parts of a plant, depending on the specific circumstances (test conditions, specific crop of interest, application of interest, and the like). In one embodiment, biomass yield refers to the aerial and underground parts. Biomass yield may be calculated as fresh-weight, dry weight or a moisture adjusted basis. Biomass yield may be calculated on a per plant basis or in relation to a specific area (e.g. biomass yield per acre/square meter/or the like).

[28705] In other embodiment, “yield” refers to seed yield which can be measured by one or more of the following parameters: number of seeds or number of filled seeds (per plant or per area (acre/square meter/or the like)); seed filling rate (ratio between number of filled seeds and total number of seeds); number of flowers per plant; seed biomass or total seeds weight (per plant or per area (acre/square meter/or the like); thousand kernel weight (TKW; extrapolated from the number of filled seeds counted and their total weight; an increase in TKW may be caused by an increased seed size, an increased seed weight, an increased embryo size, and/or an increased endosperm). Other parameters allowing to measure seed yield are also known in the art. Seed yield may be determined on a dry weight or on a fresh weight basis, or typically on a moisture adjusted basis, e.g. at 15.5 percent moisture.

[28706] For example, the term “increased yield” means that the a plant, exhibits an increased growth rate, under conditions of abiotic environmental stress, compared to the corresponding wild-type plant.

[28707] An increased growth rate may be reflected inter alia by or confers an increased biomass production of the whole plant, or an increased biomass production of the aerial parts of a plant, or by an increased biomass production of the underground parts of a plant, or by an increased biomass production of parts of a plant, like stems, leaves, blossoms, fruits, and/or seeds.

[28708] Increased yield includes higher fruit yields, higher seed yields, higher fresh matter production, and/or higher dry matter production.

[28709] The term “increased yield” means that the plant, exhibits an prolonged growth under conditions of abiotic environmental stress, as compared to the corresponding, e.g. non-transformed, wild type organism. A prolonged growth comprises survival and/or continued growth of the plant, at the moment when the non-transformed wild type organism shows visual symptoms of deficiency and/or death.

[28710] When the plant of the invention is a corn plant increased yield for corn plants means, for example, increased seed yield, in particular for corn varieties used for feed or food. Increased seed yield of corn refers to an increased kernel size or weight, an increased kernel per ear, or increased ears per plant. Alternatively or in addition the cob yield may be increased, or the length or size of the cob is increased, or the kernel per cob ratio is improved.

[28711] When the plant of the invention is a soy plant, increased yield for soy plants means increased seed yield, in particular for soy varieties used for feed or food. Increased seed yield of soy refers for example to an increased kernel size or weight, an increased kernel per pod, or increased pods per plant.

[28712] When the plant of the invention is an oil seed rape (OSR) plant, increased yield for OSR plants means increased seed yield, in particular for OSR varieties used for feed or food. Increased seed yield of OSR refers to an increased seed size or weight, an increased seed number per silique, or increased siliques per plant.

[28713] When the plant of the invention is a cotton plant. Increased yield for cotton plants means increased lint yield. Increased lint yield of cotton refers in one embodiment to an increased length of lint.

[28714] Said increased yield can typically be achieved by enhancing or improving, one or more yieldrelated traits of the plant. Such yield-related traits of a plant comprise, without limitation, the increase of the intrinsic yield capacity of a plant, and/or increased stress tolerance, in particular increased abiotic stress tolerance, like improved nutrient use efficiency, e.g. nitrogen use efficiency.

[28715] Intrinsic yield capacity of a plant can be, for example, manifested by improving the specific (intrinsic) seed yield (e.g. in terms of increased seed/ grain size, increased ear number, increased seed number per ear, improvement of seed filling, improvement of seed composition, embryo and/or endosperm improvements, or the like); modification and improvement of inherent growth and development mechanisms of a plant (such as plant height, plant growth rate, pod number, pod position on the plant, number of internodes, incidence of pod shatter, efficiency of nodulation and nitrogen fixation, efficiency of carbon assimilation, improvement of seedling vigour/early vigour, enhanced efficiency of germination (under stressed or non-stressed conditions), improvement in plant architecture, cell cycle modifications, photosynthesis modifications, various signaling pathway modifications, modification of transcriptional regulation, modification of translational regulation, modification of enzyme activities, and the like); and/or the like.

[28716] The improvement or increase of stress tolerance of a plant can for example be manifested by improving or increasing a plant's tolerance against stress, particularly abiotic stress. In the present application, abiotic stress refers generally to abiotic environmental conditions a plant is typically confronted with, including, but not limited to, drought (tolerance to drought may be achieved as a result of improved water use efficiency), heat, low temperatures and cold conditions (such as freezing and chilling conditions), nutrient depetion, salinity, osmotic stress , shade, high plant density, mechanical stress, oxidative stress, and the like.

[28717] The increased plant yield can for example be mediated by increasing the “nutrient use efficiency of a plant”, e.g. by improving the use efficiency of nutrients including, but not limited to, phosphorus, potassium, and nitrogen. Further, higher yields may be obtained with current or standard levels of nitrogen use.

[28718] Generally, the term “increased tolerance to stress” can be defined as survival of plants, and/or higher yield production, under stress conditions as compared to a non-transformed wild type or starting plant: For example, the plant of the invention or produced according to the method of the invention is better adapted to the stress conditions. “Improved adaptation” to environmental stress like e.g. drought, heat, nutrient depletion, freezing and/or chilling temperatures refers herein to an improved plant performance resulting in an increased yield, particularly with regard to one or more of the yield related traits as defined in more detail above.

[28719] During its life-cycle, a plant is generally confronted with a diversity of environmental conditions. Any such conditions, which may, under certain circumstances, have an impact on plant yield, are herein referred to as “stress” condition. Environmental stresses may generally be divided into biotic and abiotic (environmental) stresses. Unfavorable nutrient conditions are also referred to as “environmental stress”. The present invention does also contemplate solutions for this kind of environmental stress, e.g. referring to increased nutrient use efficiency.

[28720] For the purposes of the description of the present invention, the terms “enhanced tolerance to abiotic stress”, “enhanced resistance to abiotic environmental stress”, “enhanced tolerance to environmental stress”, “improved adaptation to environmental stress” and other variations and expressions similar in its meaning are used interchangeably and refer, without limitation, to an improvement in tolerance to one or more abiotic environmental stress(es) as described herein and as compared to a corresponding origin or wild type plant or a part thereof.

[28721] The term abiotic stress tolerance(s) refers for example low temperature tolerance, drought tolerance or improved water use efficiency (WUE), heat tolerance, improved nutrient efficiency, especially improved nitrogen use efficiency (NUE), salt stress tolerance and others. Studies of a plant's response to desiccation, osmotic shock, and temperature extremes are also employed to determine the plant's tolerance or resistance to abiotic stresses. Water use efficiency (WUE) is a parameter often correlated with drought tolerance. In selecting traits for improving crops, a decrease in water use, without a change in growth would have particular merit in an irrigated agricultural system where the water input costs were high. An increase in growth without a corresponding jump in water use would have applicability to all agricultural systems. In many agricultural systems where water supply is not limiting, an increase in growth, even if it came at the expense of an increase in water use also increases yield.

[28722] Drought stress means any environmental stress which leads to a lack of water in plants or reduction of water supply to plants, including a secondary stress by low temperature and/or salt, and/or a primary stress during drought or heat, e.g. desiccation etc.

### Specific Embodiments

[28723] Accordingly, this invention provides respective measures and methods to produce plants with increased yield, e.g. genes conferring an increased yield-related trait, for example enhanced tolerance to abiotic environmental stress, for example an increased drought tolerance and/or low temperature tolerance and/or an increased nutrient use efficiency, intrinsic yield and/or another increased yield-related trait, upon expression or over-expression. Accordingly, the present invention provides such genes in case in column 7 of the respective Table “aspartate” or “alanine” is indicated. In particular, such genes are described in column 5 as well as in column 8 of Tables I, especially the coding region thereof, or homologs or fragments thereof, in case aspartate or alanine are indicated in column 7 or the respective polypeptides are described in column 5 as well as in column 8 of Table II, or homologs or fragments thereof, in case aspartate or alanine are indicated in column 7.

[28724] Accordingly, the present invention provides respective transgenic plants showing one or more improved yield-related traits as compared to the corresponding origin or the wild type plant and methods for producing such transgenic plants with increased yield in case in column 7 of the respective Table aspartate, asparagine, alanine, citrulline or ornithine, respectively is indicated.

[28725] In one embodiment, one or more of said yield-increasing activities are increased by increasing the amount and/or the specific activity of one or more proteins listed in Table I, column 5 or 8 in a compartment of a cell indicated in Table I, column 6, in case in column 7 of the respective Table aspartate, asparagine, alanine, citrulline or ornithine is indicated.

[28726] Accordingly to present invention, the yield of the plant of the invention is increased by improving one or more of the yield-related traits as defined herein. Said increased yield in accordance with the present invention can typically be achieved by enhancing or improving, in comparison to an origin or wild-type plant, one or more yield-related traits of said plant. Such yield-related traits of a plant the improvement of which results in increased yield comprise, without limitation, the increase of the intrinsic yield capacity of a plant and/or increased stress tolerance, especially increased abiotic stress tolerance.

[28727] In a particular embodyment the present the invention relates to plants with a increased nutrient efficiency, especially a nitrogen use efficiency in case a plant is transformed with a gene being depited in Table I, and wherein in the same line of said gene in column 7 aspartate, asparagine, alanine, citrulline or ornithine is indicated.

[28728] In a further embodiment the present invention is characterized by the features as disclosed in the following items:

[28729] Item 1. A process for the production of a fine chemical selected from the group consisting of: 3,4-dihydroxyphenylalanine (dopa), 5-oxoproline, alanine, asparagine, aspartate, citrulline, glycine, homoserine, ornithine, phenylalanine, serine and tyrosine, which comprises
[28730] (a) increasing or generating one or more activities selected from the group consisting of 2,3-dihydroxyphenylpropionate 1,2-dioxygenase, 2-C-methyl-D-erythritol 4-phosphate cytidylyltransferase, 2-oxoglutarate dehydrogenase E1 subunit, 30S ribosomal protein S3, 3-deoxy-7-phosphoheptulonate synthase, 3-deoxy-D-arabinoheptulosonate-7-phosphatesynthase, 3-oxoacyl-[acyl-carrier-protein] synthase, 3-phosphoglycerate dehydrogenase, 47266012-protein, 49747384_SOYBEAN-protein, 50S ribosomal protein L14, 5′-nucleotidase, ABC metal ion transporter substrate-binding protein, ABC transporter ATP binding component, ABC transporter ATP-binding protein, ABC transporter component, ABC transporter permease protein, ABC transporter substrate-binding protein, acetolactate synthase, acetolactate synthase small subunit, acetyl CoA carboxylase, acetyl-CoA acetyltransferase, acetyltransferase, acid shock protein, acyl transferase, acyl-CoA dehydrogenase, acyl-CoA synthase, adenylate kinase, adenylylsulfate kinase, agmatinase, aldehyde dehydrogenase, amine oxidase, amino acid ABC transporter permease protein, amino acid acetyltransferase, amino acid transporter, amino-acid acetyltransferase, aminotransferase, ammonium transporter, ankyrin repeat family protein, anthranilate synthase component I, arginine exporter protein, arginine N-succinyltransferase, argininosuccinate lyase, asparaginase, aspartate 1-decarboxylase, aspartate aminotransferase, aspartate kinase, aspartate-ammonia ligase, At1g17440-protein, At1g19800-protein, At4g32480-protein, At5g16650-protein, at5g21910-protein, ATP-binding component of a transport system, ATP-dependent RNA helicase, auxin response factor, AX653549-protein, AY087308-protein, b0391-protein, b0456-protein, b0518-protein, b0801-protein, b0841-protein, b0917-protein, b1003-protein, b1024-protein, b1137-protein, b1155-protein, b1163-protein, b1179-protein, b1205-protein, b1229-protein, b1259-protein, b1280-protein, b1330-protein, b1445-protein, b1522-protein, b1583-protein, b1670-protein, b1672-protein, b1837-protein, b1898-protein, b1930-protein, b2032-protein, b2107-protein, b2360-protein, b2399-protein, b2474-protein, b2513-protein, b2613-protein, b2673-protein, b2739-protein, b2812-protein, b2849-protein, b3083-protein, b3098-protein, b3121-protein, b3221-protein, b3246-protein, b3346-protein, b3392-protein, b3410-protein, b3509-protein, b3646-protein, b3791-protein, b3814-protein, b3989-protein, b4029-protein, b4121-protein, beta-galactosidase, beta-hydroxylase, bifunctional aspartokinase/homoserine dehydrogenase, bifunctional purine biosynthesis protein, branched chain aminotransferase, branched-chain amino acid permease, calcium-dependent protein kinase, carbon dioxide concentrating mechanism protein, cation-transporting ATPase, CBL-interacting protein kinase, CDP-diacylglycerol-glycerol-3-phosphate 3-phosphatidyltransferase, CDP-diacylglycerol-serine O-phosphatidyltransferase, CDP-glucose-4,6-dehydratase, cell division control protein, cellulose synthase catalytic subunit, Chaperone protein CIpB, chorismate mutase-T and prephenate dehydrogenase, citrate synthase, coproporphyrinogen III oxidase, CTP synthetase, cullin, cyclin D, cystathionine gamma-synthase, cytochrome c-type protein, D-3-phosphoglycerate dehydrogenase, delta 1-pyrroline 5-carboxylase synthetase, diacylglycerol O-acyltransferase, dihydroxyacid dehydratase, DNA helicase II, DNA mismatch repair protein, DNA-binding protein, DnaJ-like chaperone, D-serine dehydratase, electron transfer flavoprotein subunit beta, elongation factor Tu, enoyl-CoA hydratase, enterobacterial common antigen polymerase, eukaryotic translation initiation factor, eukaryotic translation initiation factor 5, exopolyphosphatase, Fe—S subunit of oxidoreductase, flavodoxin, fumarylacetoacetate hydrolase, gamma-glutamyltranspeptidase, GDP-mannose dehydrogenase, geranylgeranyl pyrophosphate synthase, gibberellin 20-oxidase, Glu/Leu/Phe/Val dehydrogenase , glucokinase, glucose dehydrogenase, glucose-1-phosphate cytidylyltransferase, glucose-6-phosphate 1-dehydrogenase, glutamate ammonia-ligase, glutamine amidotransferase, glutamine synthetase, glutaredoxin, glutathione peroxidase, glutathione S-transferase, Glycine cleavage system T aminomethyltransferase, glycogen (starch) synthase, glycogen synthase, glycoprotease, glycosyl transferase, GM02LC11114-protein, GM02LC17485-protein, harpin-induced family protein, heat shock transcription factor, HesB/YadR/YfhF family protein, histone acetyltransferase, histone H2A, homocitrate synthase, homoserine O-acetyltransferase, hydrolase, integral membrane transporter family protein, iron(III) dicitrate-binding protein, isochorismate synthase, kinase, L-aspartate oxidase, lipoprotein precursor, lysine decarboxylase, lysyl-tRNA synthetase, major facilitator superfamily transporter protein, malate dehydrogenase, malic enzyme, membrane protein, membrane transport protein, metal ion transporter, metal-dependent hydrolase, methylglyoxal synthase, methylglyoxalase, methyltransferase, mitochondrial inner membrane protease subunit, molecular chaperone portein, monothiol glutaredoxin, monthiol glutaredoxin, multidrug resistance protein, multiple antibiotic resistance protein, murein transglycosylase, N-(5′-phosphoribosyl)anthranilate isomerase, Na+/K+ transporter, N-acetyl-gamma-glutamyl-phosphate reductase, NADH dehydrogenase I chain I, NADH dehydrogenase subunit N, NADH-quinone oxidoreductase subunit, NADP-dependent malic enzyme, nitrate/nitrite transport protein, O-antigen chain length determinant, oxidoreductase, oxidoreductase subunit, oxireductase, peptidase, permease protein of phosphate ABC transporter, phosphate permease, phosphate transporter, phosphoadenosine phosphosulfate reductase , phosphoanhydride phosphorylase, phosphoenolpyruvate carboxykinase, phosphopantetheine adenylyltransferase, phosphoribosylformyl glycinamidine synthase subunit, Photosystem I reaction center subunit XI, photosystem II protein, polygalacturonase, precorrin methylase, Pre-mRNA-splicing factor, prolipoprotein diacylglyceryl transferase, protease, protein kinase, protein phosphatase, PTS system N-acetylmuramic acid-specific EIIBC component, purine biosynthesis protein, pyruvate kinase, restriction alleviation protein, riboflavin biosynthesis protein, RNA binding protein, RNA polymerase sigma factor, RNA-binding protein, s_pp015018333r-protein, sec-independent protein translocase, Sec-independent protein translocase subunit, serine acetyltransferase, serine hydroxymethyltransferase, serine protease, serine/threonine dehydratase, Serine/threonine-protein phosphatase, short-chain alcohol dehydrogenase family, sll0281-protein, sll1032-protein, sll1761-protein, sn-glycerol-3-phosphate dehydrogenase, sodium/proton antiporter, sterol 24-C-methyltransferase, thioredoxin, thioredoxin family protein, threonine dehydratase, threonine synthase, transcription factor, transcriptional regulator, transport protein, trehalose-phosphatase, tryptophan biosynthesis protein, tryptophan synthase alpha chain, TTC0768-protein, TTC0881protein, TTC1386-protein, urease subunit, uridine/cytidine kinase, uroporphyrin-111 C-methyltransferase, XM_{—}473199-protein, ydr183w-protein, ydr273w-protein, ydr507cprotein, yer014w-protein, yer106w-protein, YFL019C-protein, yfl054c-protein, ygl096w-protein, ygl237c-protein, ygr221 c-protein, yhl013c-protein, yhr006w-protein, yhr207c-protein, YKL038W-protein, yml083c-protein, ymr013c-protein, YNL086W-protein, yol160w-protein, zinc finger protein, zinc transporter, or Zm_{—}4842_BE510522-protein, in a non-human organism or a part thereof, preferably a microorganism, a plant cell, a plant or a part thereof, as compared to a corresponding non-transformed wild type non-human organism or a part thereof; and
[28731] (b) growing the non-human organism or a part thereof under conditions which permit the production of 3,4-dihydroxyphenylalanine (dopa), 5-oxoproline, alanine, asparagine, aspartate, citrulline, glycine, homoserine, ornithine, phenylalanine, serine or tyrosine, respectively, or a composition comprising 3,4-dihydroxyphenylalanine (dopa), 5-oxoproline, alanine, asparagine, aspartate, citrulline, glycine, homoserine, ornithine, phenylalanine, serine or tyrosine, respectively, in said non-human organism or in the culture medium surrounding said non-human organism.

[28732] Item 2. A process for the production of a respective fine chemical 3,4-dihydroxyphenylalanine (dopa), 5-oxoproline, alanine, asparagine, aspartate, citrulline, glycine, homoserine, ornithine, phenylalanine, serine or tyrosine, which comprises
[28733] (A)
[28734] (i) increasing or generating of the expression of; and/or
[28735] (ii) increasing or generating the expression of an expression product of; and/or
[28736] (iii) increasing or generating one or more activities of an expression product encoded by; at least one respective nucleic acid molecule comprising a nucleic acid molecule selected from the group consisting of:
[28737] (a) a nucleic acid molecule encoding the polypeptide shown in column 5 or 8 of Table II, preferably Table II B, application no. 3, or a homolog or a fragment thereof, whereby the respective line discloses in column 7 3,4-dihydroxyphenylalanine (dopa), 5-oxoproline, alanine, asparagine, aspartate, citrulline, glycine, homoserine, ornithine, phenylalanine, serine or tyrosine, respectively;
[28738] (b) a nucleic acid molecule shown in column 5 or 8 of Table I, preferably Table I B, application no. 3, or a homolog or a fragment thereof (preferably the coding region thereof) , whereby the respective line discloses in column 7 3,4-dihydroxyphenylalanine (dopa), 5-oxoproline, alanine, asparagine, aspartate, citrulline, glycine, homoserine, ornithine, phenylalanine, serine or tyrosine, respectively;
[28739] (c) a nucleic acid molecule, which, as a result of the degeneracy of the genetic code, can be derived from a polypeptide sequence depicted in column 5 or 8 of Table II, preferably Table II B, application no. 3, whereby the respective line discloses in column 7 3,4-dihydroxyphenylalanine (dopa), 5-oxoproline, alanine, asparagine, aspartate, citrulline, glycine, homoserine, ornithine, phenylalanine, serine or tyrosine, respectively; (d) a nucleic acid molecule having at least 30%, in particular at least 50%, 60%, 70%, 80%, 85%, 90%, 95%, 97%, 98%, 99% or 99.5% identity with the nucleic acid molecule sequence of a polynucleotide comprising the nucleic acid molecule shown in column 5 or 8 of Table I, preferably Table I B, application no. 3, or the coding region thereof, whereby the respective line discloses in column 7 3,4-dihydroxyphenylalanine (dopa), 5-oxoproline, alanine, asparagine, aspartate, citrulline, glycine, homoserine, ornithine, phenylalanine, serine or tyrosine, respectively;
[28740] (e) a nucleic acid molecule encoding a polypeptide having at least 30%, in particular 50%, 60%, 70%, 80%, 85%, 90%, 95%, 97%, 98%, 99% or 99.5% identity with the amino acid sequence of the polypeptide encoded by the nucleic acid molecule of (a), (b), (c) or (d);
[28741] (f) a nucleic acid molecule which hybridizes with a nucleic acid molecule of (a), (b), (c), (d) or (e) under stringent hybridization conditions;
[28742] (g) a nucleic acid molecule encoding a polypeptide which can be isolated with the aid of monoclonal or polyclonal antibodies made against a polypeptide encoded by one of the nucleic acid molecules of (a), (b), (c), (d), (e) or (f);
[28743] (h) a nucleic acid molecule encoding a polypeptide comprising the consensus sequence or one or more polypeptide motifs as shown in column 8 of Table IV, application no. 3, whereby the respective line discloses in column 7 3,4-dihydroxyphenylalanine (dopa), 5-oxoproline, alanine, asparagine, aspartate, citrulline, glycine, homoserine, ornithine, phenylalanine, serine or tyrosine, respectively;
[28744] (i) a nucleic acid molecule encoding a polypeptide having the activity represented by a respective protein as depicted in column 5 of Table II, application no. 3, the respective line discloses in column 7 3,4-dihydroxyphenylalanine (dopa), 5-oxoproline, alanine, asparagine, aspartate, citrulline, glycine, homoserine, ornithine, phenylalanine, serine or tyrosine, respectively ;
[28745] (j) a nucleic acid molecule which comprises a polynucleotide, which is obtained by amplifying a cDNA library or a genomic library using the primers as depicted in column 8 of Table III, application no. 3, whereby the respective line discloses in column 7 3,4-dihydroxyphenylalanine (dopa), 5-oxoproline, alanine, asparagine, aspartate, citrulline, glycine, homoserine, ornithine, phenylalanine, serine or tyrosine, respectively; and
[28746] (k) a nucleic acid molecule which is obtainable by screening a suitable nucleic acid library, especially a cDNA library and/or a genomic library, under stringent hybridization conditions with a probe comprising a complementary sequence of a nucleic acid molecule of (a), (b), (c), (d), (e), (f), (g), (h), (i) or (j) or with a fragment thereof, having at least 15 nt, preferably 20 nt, 30 nt, 50 nt, 100 nt, 200 nt, 500 nt, 1000 nt, 1500 nt, 2000 nt or 3000 nt of a nucleic acid molecule complementary to a nucleic acid molecule sequence characterized in (a), (b), (c), (d), (e), (f), (g), (h), (i) or (j);
   or a nucleic acid molecule comprising a sequence which is complementary thereto;
   in a non-human organism or a part thereof, preferably a microorganism, a plant cell, a plant or a part thereof, as compared to a corresponding non-transformed wild type non-human organism or a part thereof; and
[28747] (B) growing the non-human organism or a part thereof under conditions which permit the production of 3,4-dihydroxyphenylalanine (dopa), 5-oxoproline, alanine, asparagine, aspartate, citrulline, glycine, homoserine, ornithine, phenylalanine, serine or tyrosine, respectively or a composition comprising 3,4-dihydroxyphenylalanine (dopa), 5-oxoproline, alanine, asparagine, aspartate, citrulline, glycine, homoserine, ornithine, phenylalanine, serine or tyrosine, respectively, in said non-human organism or in the culture medium surrounding said non-human organism.

[28748] Item 3. A process of items 1 or 2, comprising of recovering 3,4-dihydroxyphenylalanine (dopa), 5-oxoproline, alanine, asparagine, aspartate, citrulline, glycine, homoserine, ornithine, phenylalanine, serine or tyrosine, respectively, in its free or bound form.

[28749] Item 4. The process of any one of items 1 to 3, comprising the folowing steps:
[28750] (a) selecting a non-human organism or a part thereof expressing a polypeptide encoded by the nucleic acid molecule characterized in item 2;
[28751] (b) mutagenizing the selected non-human organism or the part thereof;
[28752] (c) comparing the activity or the expression level of said polypeptide in the mutagenized non-human organism or the part thereof with the activity or the expression of said polypeptide of the selected non-human organisms or the part thereof;
[28753] (d) selecting the mutated non-human organisms or parts thereof, which comprise an increased activity or expression level of said polypeptide compared to the selected non-human organism or the part thereof;
[28754] (e) optionally, growing and cultivating the non-human organisms or the parts thereof;
[28755] and
[28756] (f) recovering, and optionally isolating, the free or bound 3,4-dihydroxyphenylalanine (dopa), 5-oxoproline, alanine, asparagine, aspartate, citrulline, glycine, homoserine, ornithine, phenylalanine, serine or tyrosine, respectively, produced by the selected mutated non-human organisms or parts thereof.

[28757] Item 5. The process of any one of items 1 to 4 wherein the activity of said protein or the expression of said nucleic acid molecule is increased or generated transiently or stably.

[28758] Item 6. An isolated nucleic acid molecule comprising a nucleic acid molecule selected from the group consisting of:
[28759] (a) a nucleic acid molecule encoding a polypeptide shown in Table II, application no. 3, column 5 or 8, preferably shown in Table II B, application no. 3, column 8, or a homolog or a fragment thereof;
[28760] (b) a nucleic acid molecule shown in Table I, application no. 3, column 5 or 8, preferably shown in Table I B, application no. 3, column 8, preferably the coding region thereof, or a homolog or a fragment thereof;
[28761] (c) a nucleic acid molecule, which, as a result of the degeneracy of the genetic code, can be derived from a polypeptide sequence depicted in column 5 or 8 of Table II, application no. 3, preferably in column 8 of Table II B, application no. 3;
[28762] (d) a nucleic acid molecule having at least 30% identity, preferably at least 40%, 50%, 60%, 70%, 75%, 80%, 85%, 90%, 95%, 96%, 97%, 98%, 99%, 99.5%, with the nucleic acid molecule sequence of a polynucleotide comprising the nucleic acid molecule shown in column 5 or 8 of Table I, application no. 3, preferably shown in column 8 of Table I B, application no. 3, preferably the coding region thereof;
[28763] (e) a nucleic acid molecule encoding a polypeptide having at least 30% identity, preferably at least 40%, 50% 60%, 70%, 75%, 80%, 85%, 90%, 95%, 96%, 97%, 98%, 99%, 99.5%, identity with the amino acid sequence of the polypeptide encoded by the nucleic acid molecule of (a), (b), (c) or (d);
[28764] (f) a nucleic acid molecule which hybridizes with a nucleic acid molecule of (a), (b), (c), (d) or (e) under stringent hybridisation conditions;
[28765] (g) a nucleic acid molecule encoding a polypeptide which can be isolated with the aid of monoclonal or polyclonal antibodies made against a polypeptide encoded by one of the nucleic acid molecules of (a), (b), (c), (d), (e) or (f);
[28766] (h) a nucleic acid molecule encoding a polypeptide comprising the consensus sequence or one or more polypeptide motifs as shown in column 8 of Table IV, application no. 3;
[28767] (i) a nucleic acid molecule encoding a polypeptide having the activity represented by a respective protein as depicted in column 5 of Table II, application no. 3;
[28768] (j) a nucleic acid molecule comprising a polynucleotide which is obtained by amplifying a cDNA library or a genomic library using the primers in Table III, application no. 3, column 8;
[28769] and
[28770] (k) nucleic acid molecule which is obtainable by screening a suitable nucleic acid library, especially a cDNA library and/or a genomic library, under stringent hybridization conditions with a probe comprising one of the sequences of the nucleic acid molecule of (a), (b), (c), (d), (e), (f), (g), (h), (i) or (j) or with a fragment of at least 15 nt, preferably 20 nt, 30 nt, 50 nt, 100 nt, 200 nt,500 nt, 1000 nt, 1500 nt, 2000 nt or 3000 nt of the nucleic acid molecule characterized in (a), (b), (c), (d), (e), (f), (g), (h), (i) or (j);
   or a nucleic acid molecule comprising a sequence which is complementary thereto.

[28771] Item 7. A nucleic acid construct which confers the expression of the nucleic acid molecule as defined in item 6, comprising one or more regulatory elements.

[28772] Item 8. An expression cassette comprising
[28773] (a) a promoter, preferably selected from the group consisting of Big35S, PCUbi, Super ans USP;
[28774] (b) a nucleic acid molecule as defined in item 6.

[28775] Item 9. A vector comprising the nucleic acid molecule as defined in item 6 or the nucleic acid construct as claimed in item 7 or the expression cassette as claimed in item 8.

[28776] Item 10. A host cell or a plant organelle, which has been transformed with the vector as claimed in item 9 or the nucleic acid molecule as defined in item 6 or the nucleic acid construct as claimed in item 7 or the expression cassette as claimed in item 8.

[28777] Item 11. The host cell of item 10, which is a plant cell or a microorganism.

[28778] Item 12. A process for producing a polypeptide, wherein the polypeptide is expressed in a host cell as claimed in item 10 or 11.

[28779] Item 13. A polypeptide produced by the process as claimed in item 12 or encoded by the nucleic acid molecule as defined in item 6.

[28780] Item 14. An antibody, which binds specifically to the polypeptide as claimed in item 13.

[28781] Item 15. A plant tissue, propagation material, harvested material or a plant or a part thereof comprising the host cell as claimed in item 10 or 11.

[28782] Item 16. A process for the identification of a compound conferring an increase in 3,4-dihydroxyphenylalanine (dopa), 5-oxoproline, alanine, asparagine, aspartate, citrulline, glycine, homoserine, ornithine, phenylalanine, serine or tyrosineproduction, respectively, in a non-human organism, comprising the steps:
[28783] (a) culturing a plant cell or tissue or microorganism or maintaining a plant expressing the polypeptide encoded by the nucleic acid molecule as defined in item 6 conferring an increase in the amount of 3,4-dihydroxyphenylalanine (dopa), 5-oxoproline, alanine, asparagine, aspartate, citrulline, glycine, homoserine, ornithine, phenylalanine, serine or tyrosine, respectively, in a non-human organism or a part thereof and a readout system capable of interacting with the polypeptide under suitable conditions which permit the interaction of the polypeptide with said readout system in the presence of a compound or a sample comprising a plurality of compounds and capable of providing a detectable signal in response to the binding of a compound to said polypeptide under conditions which permit the expression of said readout system and of the polypeptide encoded by the nucleic acid molecule of item 6 conferring an increase in the amount of 3,4-dihydroxyphenylalanine (dopa), 5-oxoproline, alanine, asparagine, aspartate, citrulline, glycine, homoserine, ornithine, phenylalanine, serine or tyrosine, respectively, in a non-human organism or a part thereof;
[28784] (b) identifying if the compound is an effective agonist by detecting the presence or absence or increase of a signal produced by said readout system.

[28785] Item 17. A method for the production of an agricultural composition comprising the steps of the method of item 16 and formulating the compound identified in item 16 in a form acceptable for an application in agriculture.

[28786] Item 18. A composition comprising the nucleic acid molecule as defined in item 6, the polypeptide as claimed in item 13, the nucleic acid construct as claimed in item 7, the expression cassette as claimed in item 8, the vector as claimed in item 9, the compound as claimed in item 16, the antibody as claimed in item 14, and optionally an agricultural acceptable carrier.

[28787] Item 19. Use of the nucleic acid molecule as defined in item 6 for the identification of a nucleic acid molecule conferring an increase in 3,4-dihydroxyphenylalanine (dopa), 5-oxoproline, alanine, asparagine, aspartate, citrulline, glycine, homoserine, ornithine, phenylalanine, serine or tyrosine, respectively, after expression.

[28788] Item 20. Cosmetic, pharmaceutical, food or feed composition comprising the nucleic acid moleculeas defined in item 6, the polypeptide as claimed in item 13, the nucleic acid construct as claimed in item 7, the expression cassette as claimed in item 8, the vector as claimed in item 9, the antibody as claimed in item 14, the plant or a part thereof, or plant tissue as claimed in item 15, the harvested material or the propagation material as claimed in item 15 or the host cell as claimed in items 10 or 11.

[28789] Item 21. Use of the nucleic acid molecule as defined in item 6, the polypeptide as claimed in item 13, the nucleic acid construct as claimed in item 7, the expression cassette as claimed in item 8, the vector as claimed in item 9, the plant or plant tissue as claimed in item 15, or the host cell as claimed in item 10 to 11 for the production of plant resistant to a herbicide inhibiting the production of 3,4-dihydroxyphenylalanine (dopa), 5-oxoproline, alanine, asparagine, aspartate, citrulline, glycine, homoserine, ornithine, phenylalanine, serine or tyrosine, respectively.

[28790] Item 22. A method for producing a plant with increased yield as compared to a corresponding non-transformed wild type plant, whereby the method comprises
[28791] (i) increasing or generating of the expression of; and/or
[28792] (ii) increasing or generating the expression of an expression product of; and/or
[28793] (iii) increasing or generating one or more activities of an expression product encoded by;
[28794] at least one respective nucleic acid molecule comprising a nucleic acid molecule selected from the group consisting of:
[28795] (a) a nucleic acid molecule encoding the polypeptide shown in column 5 or 8 of Table II, preferably Table II B, application no. 3, or a homolog or a fragment thereof, in case in column 7 aspartate, asparagine, alanine, citrulline or ornithine, respectively, is indicated;
[28796] (b) a nucleic acid molecule shown in column 5 or 8 of Table I, preferably Table I B, application no. 3, or a homolog or a fragment thereof (preferably the coding region thereof) , in case in column 7 aspartate, asparagine, alanine, citrulline or ornithine, respectively is indicated;
[28797] (c) a nucleic acid molecule, which, as a result of the degeneracy of the genetic code, can be derived from a polypeptide sequence depicted in column 5 or 8 of Table II, preferably Table II B, application no. 3, in case in column 7 aspartate, asparagine, alanine, citrulline or ornithine, respectively, is indicated;
[28798] (d) a nucleic acid molecule having at least 30%, in particular at least 50%, 60%, 70%, 80%, 85%, 90%, 95%, 97%, 98%, 99% or 99.5% identity with the nucleic acid molecule sequence of a polynucleotide comprising the nucleic acid molecule shown in column 5 or 8 of Table I, preferably Table I B, application no. 3, or the coding region thereof, in case in column 7 aspartate, asparagine, alanine, citrulline or ornithine, respectively, is indicated;
[28799] (e) a nucleic acid molecule encoding a polypeptide having at least 30%, in particular 50%, 60%, 70%, 80%, 85%, 90%, 95%, 97%, 98%, 99% or 99.5% identity with the amino acid sequence of the polypeptide encoded by the nucleic acid molecule of (a), (b), (c) or (d);
[28800] (f) a nucleic acid molecule which hybridizes with a nucleic acid molecule of (a), (b), (c), (d) or (e) under stringent hybridization conditions;
[28801] (g) a nucleic acid molecule encoding a polypeptide which can be isolated with the aid of monoclonal or polyclonal antibodies made against a polypeptide encoded by one of the nucleic acid molecules of (a), (b), (c), (d), (e) or (f);
[28802] (h) a nucleic acid molecule encoding a polypeptide comprising the consensus sequence or one or more polypeptide motifs as shown in column 8 of Table IV, application no. 3, in case in column 7 aspartate, asparagine, alanine, citrulline or ornithine, respectively, is indicated;
[28803] (i) a nucleic acid molecule encoding a polypeptide having the activity represented by a respective protein as depicted in column 5 of Table II, application no. 3, in case in column 7 aspartate, asparagine, alanine, citrulline or ornithine, respectively, is indicated;
[28804] (j) a nucleic acid molecule which comprises a polynucleotide, which is obtained by amplifying a cDNA library or a genomic library using the primers as depicted in column 8 of Table III, application no. 3, in case in column 7 aspartate, asparagine, alanine, citrulline or ornithine, respectively, is indicated; and
[28805] (k) a nucleic acid molecule which is obtainable by screening a suitable nucleic acid library, especially a cDNA library and/or a genomic library, under stringent hybridization conditions with a probe comprising a complementary sequence of a nucleic acid molecule of (a), (b), (c), (d), (e), (f), (g), (h), (i) or (j) or with a fragment thereof, having at least 15 nt, preferably 20 nt, 30 nt, 50 nt, 100 nt, 200 nt, 500 nt, 1000 nt, 1500 nt, 2000 nt or 3000 nt of a nucleic acid molecule complementary to a nucleic acid molecule sequence characterized in (a), (b), (c), (d), (e), (f), (g), (h), (i) or (j); or a nucleic acid molecule comprising a sequence which is complementary thereto; in a plant cell, plant or a part thereof.

[28806] Item 23. A method for producing a plant with increased yield according to item 22, which comprises in addition the regeneration of a plant from such transformed plant cell, plant cell compartment, plant cell nucleus, plant cell or plant tissue with increased yield.

[28807] [0483.1.1.3] to [0494.1.1.3] for the disclosure of these paragraphs see [0483.1.1.1] to [0494.1.1.1] above.

### Example 11a

### PCR Amplification of the Sequences

[28808] Unless otherwise specified, standard methods as described in Sambrook et al., Molecular Cloning: A laboratory manual, Cold Spring Harbor 1989, Cold Spring Harbor Laboratory Press are used.

[28809] The inventive sequences as shown in the respective line in Table I, column 5, preferably the coding region thereof, were amplified by PCR as described in the protocol of the Pfu Ultra, Pfu Turbo or Herculase DNA polymerase (Stratagene). The composition for the protocol of the Pfu Ultra, Pfu Turbo or Herculase DNA polymerase was as follows: 1×PCR buffer (Stratagene), 0.2 mM of each dNTP, 100 ng genomic DNA of Saccharomyces cerevisiae (strain S288C; Research Genetics, Inc., now Invitrogen), Escherichia coli (strain MG1655; E. coli Genetic Stock Center), Synechocystis sp. (strain PCC6803), Azotobacter vinelandii (strain N. R. Smith, 16), Thermus thermophilus (HB8) or 50 ng cDNA from various tissues and development stages of Arabidopsis thaliana (ecotype Columbia), Physcomitrella patens, Glycine max (variety Resnick), Brassica napus, Oryza sativa or Zea mays (variety B73, Mo17, A188), 50 pmol forward primer, 50 pmol reverse primer, with or without 1 M Betaine, 2.5 u Pfu Ultra, Pfu Turbo or Herculase DNA polymerase.

[28810] The amplification cycles were as follows: 1 cycle of 2-3 minutes at 94-95° C., then 25-36 cycles with 30-60 seconds at 94-95° C., 30-45 seconds at 50-60° C. and 210-480 seconds at 72° C., followed by 1 cycle of 5-10 minutes at 72° C., then 4-16° C.—preferably for Saccharomyces cerevisiae, Escherichia coli, Synechocystis sp., Azotobacter vinelandii, Thermus thermophilus.

[28811] In case of Arabidopsis thaliana, Brassica napus, Glycine max, Oryza sativa, Physcomitrella patens, Zea mays the amplification cycles were as follows:

[28812] 1 cycle with 30 seconds at 94° C., 30 seconds at 61° C., 15 minutes at 72° C., then 2 cycles with 30 seconds at 94° C., 30 seconds at 60° C., 15 minutes at 72° C., then 3 cycles with 30 seconds at 94° C., 30 seconds at 59° C., 15 minutes at 72° C., then 4 cycles with 30 seconds at 94° C., 30 seconds at 58° C., 15 minutes at 72° C., then 25 cycles with 30 seconds at 94° C., 30 seconds at 57° C., 15 minutes at 72° C., then 1 cycle with 10 minutes at 72° C., then finally 4-16° C.

[28813] RNAs were generated with the RNeasy Plant Kit according to the standard protocol (Qiagen) and Superscript II Reverse Transkriptase was used to produce double stranded cDNA according to the standard protocol (Invitrogen).

[28814] ORF specific primer pairs for the genes to be expressed are shown in the respective line in Table III, column 8. The following adapter sequences were added to Saccharomyces cerevisiae ORF specific primers (see Table III) for cloning purposes:
[28815] i) foward primer: 5′-GGAATTCCAGCTGACCACC-3″ SEQ ID NO: 20
[28816] ii) reverse primer: 5′-GATCCCCGGGAATTGCCATG-3″ SEQ ID NO: 21

[28817] These adaptor sequences allow cloning of the ORF into the various vectors containing the Resgen adaptors, see table column E of Table c.

[28818] The following adapter sequences were added to Saccharomyces cerevisiae, Escherichia coli, Synechocystis sp., Azotobacter vinelandii, Thermus thermophilus, Arabidopsis thaliana, Brassica napus, Glycine max, Oryza sativa , Physcomitrella patens, or Zea mays ORF specific primers for cloning purposes:
[28819] iii) forward primer: 5″-TTGCTCTTCC-3′ SEQ ID NO: 22

[28820] iiii) reverse primer: 5′-TTGCTCTTCG-3′ SEQ ID NO: 23

[28821] The adaptor sequences allow cloning of the ORF into the various vectors containing the Colic adaptors, see table column E of Table c.

[28822] Therefore for amplification and cloning of Saccharomyces cerevisiae SEQ ID NO: 14843, a primer consisting of the adaptor sequence i) and the ORF specific sequence SEQ ID NO: 14871 and a second primer consisting of the adaptor sequence ii) and the ORF specific sequence SEQ ID NO: 14872 were used.

[28823] For amplification and cloning of Escherichia coli SEQ ID NO: 6818, a primer consisting of the adaptor sequence iii) and the ORF specific sequence SEQ ID NO: 7076 and a second primer consisting of the adaptor sequence iiii) and the ORF specific sequence SEQ ID NO: 7077 were used.

[28824] For amplification and cloning of Synechocystis sp. SEQ ID NO: 11211, a primer consisting of the adaptor sequence iii) and the ORF specific sequence SEQ ID NO: 11419 and a second primer consisting of the adaptor sequence iiii) and the ORF specific sequence SEQ ID NO: 11420 were used.

[28825] For amplification and cloning of Arabidopsis thaliana SEQ ID NO: 385, a primer consisting of the adaptor sequence iii) and the ORF specific sequence SEQ ID NO: 623 and a second primer consisting of the adaptor sequence iiii) and the ORF specific sequence SEQ ID NO: 624 were used.

[28826] For amplification and cloning of Azotobacter vinelandii SEQ ID NO: 5557, a primer consisting of the adaptor sequence iii) and the ORF specific sequence SEQ ID NO: 6033 and a second primer consisting of the adaptor sequence iiii) and the ORF specific sequence SEQ ID NO: 6034 were used.

[28827] For amplification and cloning of Brassica napus SEQ ID NO: 15532, a primer consisting of the adaptor sequence iii) and the ORF specific sequence SEQ ID NO: 16150 and a second primer consisting of the adaptor sequence iiii) and the ORF specific sequence SEQ ID NO: 16151 were used.

[28828] For amplification and cloning of Glycine max SEQ ID NO: 69, a primer consisting of the adaptor sequence iii) and the ORF specific sequence SEQ ID NO: 343 and a second primer consisting of the adaptor sequence iiii) and the ORF specific sequence SEQ ID NO: 344 were used.

[28829] For amplification and cloning of Oryza sativa SEQ ID NO: 34301, a primer consisting of the adaptor sequence iii) and the ORF specific sequence SEQ ID NO: 34595 and a second primer consisting of the adaptor sequence iiii) and the ORF specific sequence SEQ ID NO: 34596 were used.

[28830] For amplification and cloning of Physcomytrella patens SEQ ID NO: 45757, a primer consisting of the adaptor sequence iii) and the ORF specific sequence SEQ ID NO: 45791 and a second primer consisting of the adaptor sequence iiii) and the ORF specific sequence SEQ ID NO: 45792 were used.

[28831] For amplification and cloning of Thermus thermophilus SEQ ID NO: 12698, a primer consisting of the adaptor sequence iii) and the ORF specific sequence SEQ ID NO: 12970 and a second primer consisting of the adaptor sequence iiii) and the ORF specific sequence SEQ ID NO: 12971 were used.

[28832] For amplification and cloning of Zea mays SEQ ID NO: 68413, a primer consisting of the adapfor sequence iii) and the ORF specific sequence SEQ ID NO: 68531 and a second primer consisting of the adaptor sequence iiii) and the ORF specific sequence SEQ ID NO: 68532 were used.

[28833] Following these examples every sequence disclosed in Table I, preferably column 5, especially the coding region thereof can be cloned by fusing the adaptor sequences to the respective specific primers sequences as disclosed in Table III, column 8 using the respective vectors shown in Table c.

[28834] [0496.1.1.3] to [0499.1.1.3] for the disclosure of these paragraph see [0496.1.1.1] to [0499.1.1.1] above.

### Example 11e

### Cloning of Inventive Sequences as Shown in Table I, Column 5 in the Different Expression Vectors

[28835] For cloning of for example SEQ ID NO: 6818 from Escherichia coli or any other ORF from Escherichia coli, Synechocystis sp., Azotobacter vinelandii, Thermus thermophilus, Arabidopsis thaliana, Brassica napus, Glycine max, Oryza sativa , Physcomitrella patens, or Zea mays the vector DNA was treated with the restriction enzymes Pacl and Ncol following the standard protocol (MBI Fermentas).

[28836] For cloning for example the ORFs of SEQ ID NO: 14843 from Saccharomyces cerevisiae or any other ORF from Saccharomyces cerevisiae into vectors containing the Resgen adaptor sequence the respective vector DNA was treated with the restriction enzyme Ncol.

[28837] For cloning of for example ORFs SEQ ID NO: 63745 from Saccharomyces cerevisiae or any other ORF from Saccharomyces cerevisiae into vectors containing the Colic adaptor sequence, the respective vector DNA was treated with the restriction enzymes Pacl and Ncol following the standard protocol (MBI Fermentas).

[28838] In all cases the reaction was stopped by inactivation at 70° C. for 20 minutes and purified over QIAquick or NucleoSpin Extract II columns following the standard protocol (Qiagen or Macherey-Nagel).

[28839] Then the PCR-product representing the amplified ORF with the respective adapter sequences and the vector DNA were treated with T4 DNA polymerase according to the standard protocol (MBI Fermentas) to produce single stranded overhangs with the parameters 1 unit T4 DNA polymerase at 37° C. for 2-10 minutes for the vector and 1-2 u T4 DNA polymerase at 15-17° C. for 10-60 minutes for the PCR product representing SEQ ID NO: 6818.

[28840] The reaction was stopped by addition of high-salt buffer and purified over QIAquick or NucleoSpin Extract II columns following the standard protocol (Qiagen or Macherey-Nagel).

[28841] According to this example the skilled person is able to clone all sequences disclosed in Table I, preferably column 5 or column 8, especially the coding region thereof.

[28842] Approximately 30-60 ng of prepared vector and a defined amount of prepared amplificate were mixed and hybridized at 65° C. for 15 minutes followed by 37° C. 0,1 ° C./1 seconds, followed by 37° C. 10 minutes, followed by 0,1 ° C./1 seconds, then 4-10 ° C.

[28843] The ligated constructs were transformed in the same reaction vessel by addition of competent E. coli cells (strain DH5alpha) and incubation for 20 minutes at 1° C. followed by a heat shock for 90 seconds at 42° C. and cooling to 1-4° C. Then, complete medium (SOC) was added and the mixture was incubated for 45 minutes at 37° C. The entire mixture was subsequently plated onto an agar plate with 0.05 mg/ml kanamycin and incubated overnight at 37° C.

[28844] The outcome of the cloning step was verified by amplification with the aid of primers which bind upstream and downstream of the integration site, thus allowing the amplification of the insertion. The amplifications were carried out as described in the protocol of Taq DNA polymerase (Gibco-BRL).

[28845] The amplification cycles were as follows:

[28846] 1 cycle of 1-5 minutes at 94° C., followed by 35 cycles of in each case 15-60 seconds at 94° C., 15-60 seconds at 50-66° C. and 5-15 minutes at 72° C., followed by 1 cycle of 10 minutes at 72° C., then 4-16° C.

[28847] Several colonies were checked, but only one colony for which a PCR product of the expected size was detected was used in the following steps.

[28848] A portion of this positive colony was transferred into a reaction vessel filled with complete medium (LB) supplemented with kanamycin and incubated overnight at 37° C.

[28849] The plasmid preparation was carried out as specified in the Qiaprep or NucleoSpin Multi-96 Plus standard protocol (Qiagen or Macherey-Nagel).

[28850] [0501.1.1.3] to [0503.1.1.3] for the disclosure of these paragraphs see [0501.1.1.1] to [0503.1.1.1] above. Table d showing results of plant analyses

TABLE d

| SeqID | Target | Locus | Metabolite | Source | Promotor | Method | Min | Max |
|---|---|---|---|---|---|---|---|---|
| 15187 | non- | 47266012_SOYBEAN | aspartate | ARA_LEAF | p-PcUBI | GC | 48 | 125 |
| | targeted | | | | | | | |
| 15187 | non- | 47266012_SOYBEAN | tyrosine | ARA_LEAF | p-PcUBI | GC | 44 | 122 |
| | targeted | | | | | | | |
| 15187 | non- | 47266012_SOYBEAN | 5-oxo- | ARA_LEAF | p-PcUBI | GC | 52 | 161 |
| | targeted | | proline | | | | | |
| 69 | non- | 49747384_SOYBEAN | aspartate | ARA_LEAF | p-PcUBI | GC | 55 | 122 |
| | targeted | | | | | | | |
| 69 | non- | 49747384_SOYBEAN | tyrosine | ARA_LEAF | p-PcUBI | GC | 35 | 80 |
| | targeted | | | | | | | |
| 69 | non- | 49747384_SOYBEAN | 5-oxo- | ARA_LEAF | p-PcUBI | GC | 52 | 101 |
| | targeted | | proline | | | | | |
| 15532 | plastidic | 51340801_CANOLA | alanine | ARA_LEAF | p-PcUBI | GC | 38 | 153 |
| 15532 | plastidic | 51340801_CANOLA | phenyl- | ARA_LEAF | p-PcUBI | GC | 30 | 263 |
| | | | alanine | | | | | |
| 15532 | plastidic | 51340801_CANOLA | tyrosine | ARA_LEAF | p-PcUBI | LC | 42 | 123 |
| 16155 | non- | 59547452_SOYBEAN | citrulline | ARA_LEAF | p-PcUBI | LC | 40 | 104 |
| | targeted | | | | | | | |
| 16263 | plastidic | 59554615_SOYBEAN | asparagine | ARA_LEAF | p-PcUBI | GC | 54 | 113 |
| 16263 | plastidic | 59554615_SOYBEAN | serine | ARA_LEAF | p-PcUBI | GC | 27 | 31 |
| 16883 | plastidic | 59582753_SOYBEAN | alanine | ARA_LEAF | p-PcUBI | GC | 23 | 116 |
| 16883 | plastidic | 59582753_SOYBEAN | phenyl- | ARA_LEAF | p-PcUBI | GC | 27 | 61 |
| | | | alanine | | | | | |
| 16883 | plastidic | 59582753_SOYBEAN | tyrosine | ARA_LEAF | p-PcUBI | GC | 38 | 93 |
| 17356 | plastidic | AAC43185 | alanine | ARA_LEAF | p-PcUBI | GC | 22 | 31 |
| 17356 | plastidic | AAC43185 | citrulline | ARA_LEAF | p-PcUBI | LC | 76 | 618 |
| 17356 | plastidic | AAC43185 | phenyl- | ARA_LEAF | p-PcUBI | GC | 26 | 55 |
| | | | alanine | | | | | |
| 17451 | non- | At1g07430 | citrulline | ARA_LEAF | p-PcUBI | LC | 34 | 55 |
| | targeted | | | | | | | |
| 385 | non- | At1g14490 | glycine | ARA_LEAF | p-PcUBI | GC | 97 | 147 |
| | targeted | | | | | | | |
| 385 | non- | At1g14490 | serine | ARA_LEAF | p-PcUBI | GC | 27 | 51 |
| | targeted | | | | | | | |
| 17601 | non- | At1g17440 | phenyl- | ARA_LEAF | p-PcUBI | LC | 33 | 54 |
| | targeted | | alanine | | | | | |
| 17601 | non- | At1g17440 | tyrosine | ARA_LEAF | p-PcUBI | GC | 48 | 106 |
| | targeted | | | | | | | |
| 17637 | non- | At1g19800 | aspartate | ARA_LEAF | p-PcUBI | GC | 49 | 86 |
| | targeted | | | | | | | |
| 17637 | non- | At1g19800 | citrulline | ARA_LEAF | p-PcUBI | LC | 35 | 66 |
| | targeted | | | | | | | |
| 17637 | non- | At1g19800 | tyrosine | ARA_LEAF | p-PcUBI | LC | 41 | 398 |
| | targeted | | | | | | | |
| 17701 | non- | At1g26830 | phenyl- | ARA_LEAF | p-PcUBI | GC | 35 | 134 |
| | targeted | | alanine | | | | | |
| 17701 | non- | At1g26830 | tyrosine | ARA_LEAF | p-PcUBI | LC | 39 | 89 |
| | targeted | | | | | | | |
| 627 | non- | At1g31230 | homo- | ARA_LEAF | Big35S | GC | 84 | 1108 |
| | targeted | | serine | | | | | |
| 17968 | non- | At1g36730 | aspartate | ARA_LEAF | p-PcUBI | GC | 51 | 87 |
| | targeted | | | | | | | |
| 17968 | non- | At1g36730 | phenyl- | ARA_LEAF | p-PcUBI | GC | 32 | 97 |
| | targeted | | alanine | | | | | |
| 17968 | non- | At1g36730 | serine | ARA_LEAF | p-PcUBI | GC | 25 | 72 |
| | targeted | | | | | | | |
| 17968 | non- | At1g36730 | tyrosine | ARA_LEAF | p-PcUBI | GC | 36 | 86 |
| | targeted | | | | | | | |
| 17968 | non- | At1g36730 | 5-oxo- | ARA_LEAF | p-PcUBI | GC | 39 | 74 |
| | targeted | | proline | | | | | |
| 18070 | non- | At1g43850 | phenyl- | ARA_LEAF | p-PcUBI | GC | 77 | 358 |
| | targeted | | alanine | | | | | |
| 18070 | non- | At1g43850 | serine | ARA_LEAF | p-PcUBI | GC | 70 | 205 |
| | targeted | | | | | | | |
| 18070 | non- | At1g43850 | tyrosine | ARA_LEAF | p-PcUBI | GC | 76 | 313 |
| | targeted | | | | | | | |
| 18070 | non- | At1g43850 | 5-oxo- | ARA_LEAF | p-PcUBI | GC | 41 | 210 |
| | targeted | | proline | | | | | |
| 812 | non- | At1g48040 | glycine | ARA_LEAF | p-PcUBI | GC | 36 | 52 |
| | targeted | | | | | | | |
| 18235 | non- | At1g48260 | phenyl- | ARA_LEAF | p-PcUBI | GC | 58 | 432 |
| | targeted | | alanine | | | | | |
| 18235 | non- | At1g48260 | serine | ARA_LEAF | p-PcUBI | GC | 29 | 154 |
| | targeted | | | | | | | |
| 18235 | non- | At1g48260 | tyrosine | ARA_LEAF | p-PcUBI | LC | 48 | 182 |
| | targeted | | | | | | | |
| 18869 | non- | At1g61950 | aspartate | ARA_LEAF | p-PcUBI | GC | 60 | 312 |
| | targeted | | | | | | | |
| 18869 | non- | At1g61950 | phenyl- | ARA_LEAF | p-PcUBI | GC | 65 | 149 |
| | targeted | | alanine | | | | | |
| 19419 | non- | At1g72770 | alanine | ARA_LEAF | p-PcUBI | GC | 26 | 121 |
| | targeted | | | | | | | |
| 19419 | non- | At1g72770 | glycine | ARA_LEAF | p-PcUBI | GC | 48 | 108 |
| | targeted | | | | | | | |
| 19419 | non- | At1g72770 | tyrosine | ARA_LEAF | p-PcUBI | GC | 35 | 150 |
| | targeted | | | | | | | |
| 19419 | non- | At1g72770 | 5-oxo- | ARA_LEAF | p-PcUBI | GC | 45 | 171 |
| | targeted | | proline | | | | | |
| 68536 | non- | At2g13360 | alanine | ARA_LEAF | p-PcUBI | GC | 23 | 44 |
| | targeted | | | | | | | |
| 19502 | non- | At2g17560 | phenyl- | ARA_LEAF | p-PcUBI | GC | 32 | 315 |
| | targeted | | alanine | | | | | |
| 19502 | non- | At2g17560 | tyrosine | ARA_LEAF | p-PcUBI | GC | 37 | 182 |
| | targeted | | | | | | | |
| 1298 | non- | At2g25070 | aspartate | ARA_LEAF | p-PcUBI | GC | 74 | 147 |
| | targeted | | | | | | | |
| 1298 | non- | At2g25070 | 5-oxo- | ARA_LEAF | p-PcUBI | GC | 38 | 78 |
| | targeted | | proline | | | | | |
| 19874 | non- | At2g28890 | asparagine | ARA_LEAF | p-PcUBI | GC | 57 | 929 |
| | targeted | | | | | | | |
| 19874 | non- | At2g28890 | phenyl- | ARA_LEAF | p-PcUBI | GC | 36 | 520 |
| | targeted | | alanine | | | | | |
| 19874 | non- | At2g28890 | serine | ARA_LEAF | p-PcUBI | GC | 29 | 164 |
| | targeted | | | | | | | |
| 19874 | non- | At2g28890 | tyrosine | ARA_LEAF | p-PcUBI | GC | 62 | 555 |
| | targeted | | | | | | | |
| 19919 | non- | At2g30360 | phenyl- | ARA_LEAF | p-PcUBI | GC | 29 | 548 |
| | targeted | | alanine | | | | | |
| 19919 | non- | At2g30360 | tyrosine | ARA_LEAF | p-PcUBI | GC | 38 | 323 |
| | targeted | | | | | | | |
| 19919 | non- | At2g30360 | 5-oxo- | ARA_LEAF | p-PcUBI | GC | 33 | 92 |
| | targeted | | proline | | | | | |
| 20346 | non- | At2g30540 | serine | ARA_LEAF | p-PcUBI | GC | 24 | 171 |
| | targeted | | | | | | | |
| 20346 | non- | At2g30540 | tyrosine | ARA_LEAF | p-PcUBI | LC | 43 | 106 |
| | targeted | | | | | | | |
| 20578 | non- | At2g34180 | glycine | ARA_LEAF | p-PcUBI | GC | 56 | 191 |
| | targeted | | | | | | | |
| 21008 | non- | At2g39800 | alanine | ARA_LEAF | p-PcUBI | GC | 20 | 34 |
| | targeted | | | | | | | |
| 21008 | non- | At2g39800 | glycine | ARA_LEAF | p-PcUBI | GC | 34 | 83 |
| | targeted | | | | | | | |
| 21159 | non- | At2g47880 | phenyl- | ARA_LEAF | p-PcUBI | LC | 64 | 241 |
| | targeted | | alanine | | | | | |
| 21159 | non- | At2g47880 | tyrosine | ARA_LEAF | p-PcUBI | LC | 62 | 219 |
| | targeted | | | | | | | |
| 68657 | non- | At3g02990 | tyrosine | ARA_LEAF | p-PcUBI | LC | 46 | 84 |
| | targeted | | | | | | | |
| 21497 | plastidic | At3g04050 | alanine | ARA_LEAF | p-PcUBI | GC | 30 | 950 |
| 21497 | plastidic | At3g04050 | phenyl- | ARA_LEAF | p-PcUBI | GC | 104 | 300 |
| | | | alanine | | | | | |
| 21497 | plastidic | At3g04050 | tyrosine | ARA_LEAF | p-PcUBI | GC | 41 | 346 |
| 21902 | non- | At3g04710 | phenyl- | ARA_LEAF | p-PcUBI | GC | 50 | 58 |
| | targeted | | alanine | | | | | |
| 22015 | non- | At3g06270 | tyrosine | ARA_LEAF | p-PcUBI | GC | 44 | 46 |
| | targeted | | | | | | | |
| 22249 | non- | At3g08710 | aspartate | ARA_LEAF | p-PcUBI | GC | 77 | 149 |
| | targeted | | | | | | | |
| 22249 | non- | At3g08710 | phenyl- | ARA_LEAF | p-PcUBI | GC | 57 | 205 |
| | targeted | | alanine | | | | | |
| 22249 | non- | At3g08710 | tyrosine | ARA_LEAF | p-PcUBI | GC | 50 | 132 |
| | targeted | | | | | | | |
| 22611 | non- | At3g11650 | phenyl- | ARA_LEAF | p-PcUBI | GC | 34 | 149 |
| | targeted | | alanine | | | | | |
| 22611 | non- | At3g11650 | serine | ARA_LEAF | p-PcUBI | GC | 24 | 89 |
| | targeted | | | | | | | |
| 22611 | non- | At3g11650 | tyrosine | ARA_LEAF | p-PcUBI | GC | 35 | 125 |
| | targeted | | | | | | | |
| 22832 | non- | At3g18524 | phenyl- | ARA_LEAF | p-PcUBI | GC | 30 | 48 |
| | targeted | | alanine | | | | | |
| 1815 | non- | At3g23000 | phenyl- | ARA_LEAF | p-PcUBI | GC | 75 | 455 |
| | targeted | | alanine | | | | | |
| 1815 | non- | At3g23000 | serine | ARA_LEAF | p-PcUBI | GC | 23 | 78 |
| | targeted | | | | | | | |
| 1815 | non- | At3g23000 | tyrosine | ARA_LEAF | p-PcUBI | GC | 67 | 183 |
| | targeted | | | | | | | |
| 1815 | non- | At3g23000 | 5-oxo- | ARA_LEAF | p-PcUBI | GC | 42 | 110 |
| | targeted | | proline | | | | | |
| 68727 | non- | At3g26400 | serine | ARA_LEAF | p-PcUBI | GC | 23 | 62 |
| | targeted | | | | | | | |
| 23002 | non- | At3g27300 | tyrosine | ARA_LEAF | p-PcUBI | GC | 37 | 87 |
| | targeted | | | | | | | |
| 68777 | non- | At3g27540 | phenyl- | ARA_LEAF | p-PcUBI | GC | 36 | 179 |
| | targeted | | alanine | | | | | |
| 68777 | non- | At3g27540 | tyrosine | ARA_LEAF | p-PcUBI | GC | 42 | 324 |
| | targeted | | | | | | | |
| 2367 | non- | At3g61830 | phenyl- | ARA_LEAF | p-PcUBI | GC | 58 | 540 |
| | targeted | | alanine | | | | | |
| 2367 | non- | At3g61830 | tyrosine | ARA_LEAF | p-PcUBI | GC | 36 | 784 |
| | targeted | | | | | | | |
| 2573 | non- | At3g62930 | aspartate | ARA_LEAF | p-PcUBI | GC | 48 | 117 |
| | targeted | | | | | | | |
| 2573 | non- | At3g62930 | phenyl- | ARA_LEAF | p-PcUBI | GC | 26 | 274 |
| | targeted | | alanine | | | | | |
| 2935 | non- | At3g62950 | phenylalanine | ARA_LEAF | p-PcUBI | GC | 105 | 324 |
| | targeted | | | | | | | |
| 2935 | non- | At3g62950 | tyrosine | ARA_LEAF | p-PcUBI | GC | 55 | 249 |
| | targeted | | | | | | | |
| 2935 | non- | At3g62950 | 5-oxo- | ARA_LEAF | p-PcUBI | GC | 37 | 235 |
| | targeted | | proline | | | | | |
| 23482 | non- | At4g15660 | phenyl- | ARA_LEAF | p-PcUBI | LC | 33 | 139 |
| | targeted | | alanine | | | | | |
| 23482 | non- | At4g15660 | tyrosine | ARA_LEAF | p-PcUBI | GC | 36 | 211 |
| | targeted | | | | | | | |
| 3279 | non- | At4g15670 | tyrosine | ARA_LEAF | p-PcUBI | GC | 58 | 140 |
| | targeted | | | | | | | |
| 23844 | non- | At4g15690 | aspartate | ARA_LEAF | p-PcUBI | GC | 75 | 169 |
| | targeted | | | | | | | |
| 23844 | non- | At4g15690 | phenyl- | ARA_LEAF | p-PcUBI | GC | 29 | 90 |
| | targeted | | alanine | | | | | |
| 23844 | non- | At4g15690 | tyrosine | ARA_LEAF | p-PcUBI | GC | 41 | 150 |
| | targeted | | | | | | | |
| 23844 | non- | At4g15690 | 5-oxo- | ARA_LEAF | p-PcUBI | GC | 36 | 106 |
| | targeted | | proline | | | | | |
| 3654 | non- | At4g15700 | tyrosine | ARA_LEAF | p-PcUBI | GC | 52 | 121 |
| | targeted | | | | | | | |
| 24232 | non- | At4g18880 | serine | ARA_LEAF | p-PcUBI | GC | 23 | 140 |
| | targeted | | | | | | | |
| 68849 | non- | At4g26080 | alanine | ARA_LEAF | p-PcUBI | GC | 24 | 81 |
| | targeted | | | | | | | |
| 68849 | non- | At4g26080 | aspartate | ARA_LEAF | p-PcUBI | GC | 54 | 123 |
| | targeted | | | | | | | |
| 68849 | non- | At4g26080 | citrulline | ARA_LEAF | p-PcUBI | LC | 42 | 59 |
| | targeted | | | | | | | |
| 4040 | non- | At4g32480 | alanine | ARA_LEAF | p-PcUBI | GC | 48 | 318 |
| | targeted | | | | | | | |
| 4040 | non- | At4g32480 | asparagine | ARA_LEAF | p-PcUBI | GC | 86 | 1206 |
| | targeted | | | | | | | |
| 4040 | non- | At4g32480 | glycine | ARA_LEAF | p-PcUBI | GC | 38 | 686 |
| | targeted | | | | | | | |
| 4040 | non- | At4g32480 | phenyl- | ARA_LEAF | p-PcUBI | GC | 31 | 410 |
| | targeted | | alanine | | | | | |
| 4040 | non- | At4g32480 | serine | ARA_LEAF | p-PcUBI | GC | 40 | 98 |
| | targeted | | | | | | | |
| 4040 | non- | At4g32480 | tyrosine | ARA_LEAF | p-PcUBI | GC | 54 | 437 |
| | targeted | | | | | | | |
| 4102 | non- | At4g33040 | aspartate | ARA_LEAF | p-PcUBI | GC | 48 | 194 |
| | targeted | | | | | | | |
| 4102 | non- | At4g33040 | citrulline | ARA_LEAF | p-PcUBI | LC | 30 | 52 |
| | targeted | | | | | | | |
| 24311 | non- | At4g34160 | phenyl- | ARA_LEAF | p-PcUBI | GC | 29 | 152 |
| | targeted | | alanine | | | | | |
| 4348 | non- | At4g35310 | asparagine | ARA_LEAF | p-PcUBI | GC | 52 | 443 |
| | targeted | | | | | | | |
| 4348 | non- | At4g35310 | phenylalanine | ARA_LEAF | p-PcUBI | GC | 191 | 534 |
| | targeted | | | | | | | |
| 4348 | non- | At4g35310 | serine | ARA_LEAF | p-PcUBI | GC | 67 | 140 |
| | targeted | | | | | | | |
| 4348 | non- | At4g35310 | tyrosine | ARA_LEAF | p-PcUBI | GC | 149 | 427 |
| | targeted | | | | | | | |
| 4348 | non- | At4g35310 | 5-oxo- | ARA_LEAF | p-PcUBI | GC | 99 | 175 |
| | targeted | | proline | | | | | |
| 68987 | non- | At5g02760 | tyrosine | ARA_LEAF | p-PcUBI | LC | 54 | 95 |
| | targeted | | | | | | | |
| 24438 | non- | At5g03720 | aspartate | ARA_LEAF | p-PcUBI | GC | 56 | 212 |
| | targeted | | | | | | | |
| 24438 | non- | At5g03720 | 3,4-di- | ARA_LEAF | p-PcUBI | GC | 48 | 124 |
| | targeted | | hydroxy | | | | | |
| | | | phenyl- | | | | | |
| | | | alanine | | | | | |
| | | | (dopa) | | | | | |
| 24492 | non- | At5g07200 | phenyl- | ARA_LEAF | p-PcUBI | GC | 30 | 100 |
| | targeted | | alanine | | | | | |
| 24492 | non- | At5g07200 | serine | ARA_LEAF | p-PcUBI | GC | 24 | 98 |
| | targeted | | | | | | | |
| 25222 | non- | At5g10820 | serine | ARA_LEAF | p-PcUBI | GC | 26 | 72 |
| | targeted | | | | | | | |
| 69275 | non- | At5g14070 | phenyl- | ARA_LEAF | p-PcUBI | GC | 27 | 127 |
| | targeted | | alanine | | | | | |
| 25283 | non- | At5g16650 | asparagine | ARA_LEAF | p-PcUBI | GC | 48 | 386 |
| | targeted | | | | | | | |
| 25283 | non- | At5g16650 | aspartate | ARA_LEAF | p-PcUBI | GC | 48 | 224 |
| | targeted | | | | | | | |
| 25283 | non- | At5g16650 | serine | ARA_LEAF | p-PcUBI | GC | 35 | 139 |
| | targeted | | | | | | | |
| 25283 | non- | At5g16650 | 5-oxo- | ARA_LEAF | p-PcUBI | GC | 45 | 158 |
| | targeted | | proline | | | | | |
| 4904 | non- | At5g18600 | phenyl- | ARA_LEAF | p-PcUBI | GC | 43 | 184 |
| | targeted | | alanine | | | | | |
| 4904 | non- | At5g18600 | tyrosine | ARA_LEAF | p-PcUBI | GC | 66 | 212 |
| | targeted | | | | | | | |
| 69553 | non- | At5g21910 | phenyl- | ARA_LEAF | p-PcUBI | GC | 29 | 67 |
| | targeted | | alanine | | | | | |
| 25428 | non- | At5g39760 | tyrosine | ARA_LEAF | p-PcUBI | LC | 53 | 87 |
| | targeted | | | | | | | |
| 69574 | non- | At5g39950 | serine | ARA_LEAF | p-PcUBI | GC | 25 | 57 |
| | targeted | | | | | | | |
| 5318 | non- | At5g57050 | alanine | ARA_LEAF | p-PcUBI | GC | 31 | 116 |
| | targeted | | | | | | | |
| 5318 | non- | At5g57050 | citrulline | ARA_LEAF | p-PcUBI | LC | 42 | 54 |
| | targeted | | | | | | | |
| 25498 | non- | At5g59220 | citrulline | ARA_LEAF | p-PcUBI | LC | 41 | 122 |
| | targeted | | | | | | | |
| 70006 | non- | At5g60110 | phenyl- | ARA_LEAF | p-PcUBI | LC | 34 | 70 |
| | targeted | | alanine | | | | | |
| 70006 | non- | At5g60110 | tyrosine | ARA_LEAF | p-PcUBI | LC | 47 | 170 |
| | targeted | | | | | | | |
| 70038 | plastidic | At5g63680 | alanine | ARA_LEAF | p-PcUBI | GC | 42 | 264 |
| 5493 | non- | At5g64920 | alanine | ARA_LEAF | p-PcUBI | GC | 22 | 41 |
| | targeted | | | | | | | |
| 5493 | non- | At5g64920 | Phenyl- | ARA_LEAF | p-PcUBI | GC | 27 | 106 |
| | targeted | | alanine | | | | | |
| 5493 | non- | At5g64920 | serine | ARA_LEAF | p-PcUBI | GC | 29 | 82 |
| | targeted | | | | | | | |
| 5493 | non- | At5g64920 | 5-oxo- | ARA_LEAF | p-PcUBI | GC | 44 | 151 |
| | targeted | | proline | | | | | |
| 70583 | non- | Avin- | aspartate | ARA_LEAF | p-PcUBI | GC | 53 | 163 |
| | targeted | DRAFT_0035 | | | | | | |
| 70583 | non- | Avin- | 5-oxo- | ARA_LEAF | p-PcUBI | GC | 48 | 123 |
| | targeted | DRAFT_0035 | proline | | | | | |
| 70715 | non- | AVIN- | serine | ARA_LEAF | p-PcUBI | GC | 30 | 52 |
| | targeted | DRAFT_0539 | | | | | | |
| 25676 | non- | Avin- | serine | ARA_LEAF | p-PcUBI | GC | 26 | 49 |
| | targeted | DRAFT_1045 | | | | | | |
| 25780 | non- | Avin- | aspartate | ARA_LEAF | p-PcUBI | GC | 49 | 101 |
| | targeted | DRAFT_1398 | | | | | | |
| 5557 | non- | Avin- | alanine | ARA_LEAF | p-PcUBI | GC | 24 | 45 |
| | targeted | DRAFT_1495 | | | | | | |
| 5557 | non- | Avin- | phenyl- | ARA_LEAF | p-PcUBI | GC | 25 | 197 |
| | targeted | DRAFT_1495 | alanine | | | | | |
| 5557 | non- | Avin- | serine | ARA_LEAF | p-PcUBI | GC | 35 | 357 |
| | targeted | DRAFT_1495 | | | | | | |
| 26196 | non- | Avin- | alanine | ARA_LEAF | p-PcUBI | GC | 20 | 30 |
| | targeted | DRAFT_1624 | | | | | | |
| 26434 | non- | Avin- | alanine | ARA_LEAF | p-PcUBI | GC | 50 | 127 |
| | targeted | DRAFT_1806 | | | | | | |
| 6040 | non- | Avin- | alanine | ARA_LEAF | p-PcUBI | GC | 24 | 36 |
| | targeted | DRAFT_2091 | | | | | | |
| 6040 | non- | Avin- | aspartate | ARA_LEAF | p-PcUBI | GC | 89 | 237 |
| | targeted | DRAFT_2091 | | | | | | |
| 6040 | non- | Avin- | serine | ARA_LEAF | p-PcUBI | GC | 47 | 75 |
| | targeted | DRAFT_2091 | | | | | | |
| 27021 | non- | Avin- | aspartate | ARA_LEAF | p-PcUBI | GC | 83 | 94 |
| | targeted | DRAFT_2344 | | | | | | |
| 27021 | non- | Avin- | phenyl- | ARA_LEAF | p-PcUBI | LC | 57 | 254 |
| | targeted | DRAFT_2344 | alanine | | | | | |
| 27021 | non- | Avin- | serine | ARA_LEAF | p-PcUBI | GC | 32 | 198 |
| | targeted | DRAFT_2344 | | | | | | |
| 27021 | non- | Avin- | tyrosine | ARA_LEAF | p-PcUBI | GC | 42 | 298 |
| | targeted | DRAFT_2344 | | | | | | |
| 27021 | non- | Avin- | 5-oxo- | ARA_LEAF | p-PcUBI | GC | 50 | 194 |
| | targeted | DRAFT_2344 | proline | | | | | |
| 71325 | non- | Avin- | tyrosine | ARA_LEAF | p-PcUBI | GC | 36 | 65 |
| | targeted | DRAFT_2365 | | | | | | |
| 71763 | non- | Avin- | asparagine | ARA_LEAF | p-PcUBI | GC | 62 | 91 |
| | targeted | DRAFT_2369 | | | | | | |
| 27882 | non- | Avin- | tyrosine | ARA_LEAF | p-PcUBI | GC | 59 | 193 |
| | targeted | DRAFT_2521 | | | | | | |
| 28040 | non- | Avin- | aspartate | ARA_LEAF | p-PcUBI | GC | 96 | 314 |
| | targeted | DRAFT_2754 | | | | | | |
| 28040 | non- | Avin- | tyrosine | ARA_LEAF | p-PcUBI | GC | 48 | 95 |
| | targeted | DRAFT_2754 | | | | | | |
| 28040 | non- | Avin- | 5-oxo- | ARA_LEAF | p-PcUBI | GC | 34 | 112 |
| | targeted | DRAFT_2754 | proline | | | | | |
| 6075 | non- | Avin- | aspartate | ARA_LEAF | p-PcUBI | GC | 52 | 251 |
| | targeted | DRAFT_3028 | | | | | | |
| 6075 | non- | Avin- | 5-oxo- | ARA_LEAF | p-PcUBI | GC | 41 | 110 |
| | targeted | DRAFT_3028 | proline | | | | | |
| 72346 | non- | Avin- | serine | ARA_LEAF | p-PcUBI | GC | 28 | 60 |
| | targeted | DRAFT_3135 | | | | | | |
| 29246 | non- | Avin- | serine | ARA_LEAF | p-PcUBI | GC | 34 | 44 |
| | targeted | DRAFT_3186 | | | | | | |
| 29286 | non- | Avin- | phenyl- | ARA_LEAF | p-PcUBI | GC | 45 | 115 |
| | targeted | DRAFT_3209 | alanine | | | | | |
| 29500 | non- | Avin- | aspartate | ARA_LEAF | p-PcUBI | GC | 60 | 110 |
| | targeted | DRAFT_3253 | | | | | | |
| 29500 | non- | Avin- | tyrosine | ARA_LEAF | p-PcUBI | LC | 39 | 99 |
| | targeted | DRAFT_3253 | | | | | | |
| 30039 | non- | Avin- | citrulline | ARA_LEAF | p-PcUBI | LC | 30 | 54 |
| | targeted | DRAFT_3556 | | | | | | |
| 72520 | non- | AVIN- | asparagine | ARA_LEAF | p-PcUBI | GC | 49 | 246 |
| | targeted | DRAFT_4128 | | | | | | |
| 31717 | non- | Avin- | aspartate | ARA_LEAF | p-PcUBI | GC | 75 | 152 |
| | targeted | DRAFT_4384 | | | | | | |
| 72935 | non- | Avin- | glycine | ARA_LEAF | p-PcUBI | GC | 68 | 241 |
| | targeted | DRAFT_4385 | | | | | | |
| 73038 | non- | Avin- | phenyl- | ARA_LEAF | p-PcUBI | GC | 27 | 111 |
| | targeted | DRAFT_4420 | alanine | | | | | |
| 73284 | non- | Avin- | alanine | ARA_LEAF | p-PcUBI | GC | 19 | 35 |
| | targeted | DRAFT_4446 | | | | | | |
| 31926 | non- | Avin- | asparagine | ARA_LEAF | p-PcUBI | GC | 41 | 243 |
| | targeted | DRAFT_4562 | | | | | | |
| 31926 | non- | Avin- | phenylalanine | ARA_LEAF | p-PcUBI | GC | 34 | 69 |
| | targeted | DRAFT_4562 | | | | | | |
| 73719 | non- | Avin- | tyrosine | ARA_LEAF | p-PcUBI | GC | 36 | 126 |
| | targeted | DRAFT_4606 | | | | | | |
| 74163 | non- | Avin- | phenyl- | ARA_LEAF | p-PcUBI | LC | 78 | 218 |
| | targeted | DRAFT_4836 | alanine | | | | | |
| 74163 | non- | Avin- | tyrosine | ARA_LEAF | p-PcUBI | LC | 42 | 162 |
| | targeted | DRAFT_4836 | | | | | | |
| 74452 | non- | Avin- | 5-oxo- | ARA_LEAF | p-PcUBI | GC | 32 | 62 |
| | targeted | DRAFT_4989 | proline | | | | | |
| 6510 | non- | Avin- | phenyl- | ARA_LEAF | p-PcUBI | GC | 26 | 3660 |
| | targeted | DRAFT_5103 | alanine | | | | | |
| 6510 | non- | Avin- | tyrosine | ARA_LEAF | p-PcUBI | GC | 51 | 3096 |
| | targeted | DRAFT_5103 | | | | | | |
| 6510 | non- | Avin- | 5-oxo- | ARA_LEAF | p-PcUBI | GC | 34 | 205 |
| | targeted | DRAFT_5103 | proline | | | | | |
| 32037 | non- | Avin- | aspartate | ARA_LEAF | p-PcUBI | GC | 106 | 126 |
| | targeted | DRAFT_5246 | | | | | | |
| 32037 | non- | Avin- | serine | ARA_LEAF | p-PcUBI | GC | 35 | 147 |
| | targeted | DRAFT_5246 | | | | | | |
| 32037 | non- | Avin- | tyrosine | ARA_LEAF | p-PcUBI | GC | 41 | 131 |
| | targeted | DRAFT_5246 | | | | | | |
| 32308 | non- | Avin- | phenyl- | ARA_LEAF | p-PcUBI | GC | 36 | 246 |
| | targeted | DRAFT_5292 | alanine | | | | | |
| 32308 | non- | Avin- | tyrosine | ARA_LEAF | p-PcUBI | GC | 35 | 324 |
| | targeted | DRAFT_5292 | | | | | | |
| 32648 | non- | Avin- | serine | ARA_LEAF | p-PcUBI | GC | 47 | 78 |
| | targeted | DRAFT_5467 | | | | | | |
| 74662 | non- | Avin- | aspartate | ARA_LEAF | p-PcUBI | GC | 56 | 110 |
| | targeted | DRAFT_5579 | | | | | | |
| 33085 | non- | Avin- | aspartate | ARA_LEAF | p-PcUBI | GC | 52 | 122 |
| | targeted | DRAFT_5644 | | | | | | |
| 33596 | non- | Avin- | phenyl- | ARA_LEAF | p-PcUBI | GC | 39 | 90 |
| | targeted | DRAFT_6093 | alanine | | | | | |
| 74729 | non- | Avin- | phenyl- | ARA_LEAF | p-PcUBI | LC | 46 | 143 |
| | targeted | DRAFT_6679 | alanine | | | | | |
| 74729 | non- | Avin- | tyrosine | ARA_LEAF | p-PcUBI | LC | 50 | 143 |
| | targeted | DRAFT_6679 | | | | | | |
| 34301 | non- | AX653549 | citrulline | ARA_LEAF | p-PcUBI | LC | 39 | 48 |
| | targeted | | | | | | | |
| 34301 | non- | AX653549 | 5-oxo- | ARA_LEAF | p-PcUBI | GC | 43 | 93 |
| | targeted | | proline | | | | | |
| 34602 | non- | AY087308 | aspartate | ARA_LEAF | p-PcUBI | GC | 57 | 119 |
| | targeted | | | | | | | |
| 34602 | non- | AY087308 | 5-oxo- | ARA_LEAF | p-PcUBI | GC | 36 | 71 |
| | targeted | | proline | | | | | |
| 34889 | plastidic | B0004 | alanine | ARA_LEAF | p-Super | GC | 29 | 147 |
| 34889 | plastidic | B0004 | phenyl- | ARA_LEAF | p-Super | LC | 30 | 200 |
| | | | alanine | | | | | |
| 34889 | plastidic | B0004 | serine | ARA_LEAF | p-Super | GC | 23 | 195 |
| 34889 | plastidic | B0004 | tyrosine | ARA_LEAF | p-Super | GC | 37 | 458 |
| 34889 | plastidic | B0004 | 5-oxo- | ARA_LEAF | p-Super | GC | 44 | 1268 |
| | | | proline | | | | | |
| 6818 | non- | B0078 | phenyl- | ARA_SEED_2 | p-USP | GC | 32 | 59 |
| | targeted | | alanine | | | | | |
| 35482 | non- | B0124 | glycine | ARA_SEED_2 | p-USP | GC | 31 | 179 |
| | targeted | | | | | | | |
| 35482 | non- | B0124 | phenyl- | ARA_LEAF | p-Super | GC | 36 | 557 |
| | targeted | | alanine | | | | | |
| 35482 | non- | B0124 | serine | ARA_SEED_2 | p-USP | GC | 55 | 171 |
| | targeted | | | | | | | |
| 35482 | non- | B0124 | tyrosine | ARA_LEAF | p-Super | GC | 36 | 265 |
| | targeted | | | | | | | |
| 74986 | non- | B0131 | asparagine | ARA_LEAF | p-Super | GC | 49 | 85 |
| | targeted | | | | | | | |
| 74986 | non- | B0131 | serine | ARA_LEAF | p-Super | GC | 23 | 55 |
| | targeted | | | | | | | |
| 7081 | non- | B0161 | alanine | ARA_LEAF | p-Super | GC | 19 | 58 |
| | targeted | | | | | | | |
| 7081 | non- | B0161 | serine | ARA_LEAF | p-Super | GC | 42 | 103 |
| | targeted | | | | | | | |
| 7081 | non- | B0161 | tyrosine | ARA_LEAF | p-Super | GC | 277 | 1628 |
| | targeted | | | | | | | |
| 35590 | non- | B0221 | serine | ARA_LEAF | p-Super | GC | 25 | 63 |
| | targeted | | | | | | | |
| 35590 | non- | B0221 | tyrosine | ARA_LEAF | p-Super | GC | 39 | 107 |
| | targeted | | | | | | | |
| 35733 | plastidic | B0344 | tyrosine | ARA_SEED_2 | p-USP | GC | 34 | 103 |
| 35733 | plastidic | B0344 | 5-oxo- | ARA_SEED_2 | p-USP | GC | 31 | 40 |
| | | | proline | | | | | |
| 7269 | plastidic | B0348 | glycine | ARA_SEED_2 | p-USP | GC | 96 | 301 |
| 7269 | plastidic | B0348 | phenyl- | ARA_SEED_2 | p-USP | GC | 72 | 197 |
| | | | alanine | | | | | |
| 7269 | plastidic | B0348 | serine | ARA_SEED_2 | p-USP | GC | 38 | 320 |
| 7269 | plastidic | B0348 | tyrosine | ARA_SEED_2 | p-USP | GC | 67 | 83 |
| 75195 | plastidic | B0391 | aspartate | ARA_LEAF | p-Super | GC | 56 | 93 |
| 7333 | non- | B0449 | asparagine | ARA_LEAF | p-Super | GC | 51 | 684 |
| | targeted | | | | | | | |
| 7333 | non- | B0449 | aspartate | ARA_LEAF | p-Super | GC | 88 | 201 |
| | targeted | | | | | | | |
| 7333 | non- | B0449 | phenyl- | ARA_LEAF | p-Super | GC | 40 | 1462 |
| | targeted | | alanine | | | | | |
| 7333 | non- | B0449 | serine | ARA_LEAF | p-Super | GC | 29 | 113 |
| | targeted | | | | | | | |
| 7333 | non- | B0449 | tyrosine | ARA_LEAF | p-Super | GC | 46 | 1202 |
| | targeted | | | | | | | |
| 35875 | non- | B0456 | alanine | ARA_LEAF | p-Super | GC | 20 | 53 |
| | targeted | | | | | | | |
| 7686 | non- | B0486 | aspartate | ARA_LEAF | p-Super | GC | 75 | 129 |
| | targeted | | | | | | | |
| 7686 | non- | B0486 | phenyl- | ARA_LEAF | p-Super | LC | 35 | 156 |
| | targeted | | alanine | | | | | |
| 7686 | non- | B0486 | tyrosine | ARA_LEAF | p-Super | LC | 57 | 227 |
| | targeted | | | | | | | |
| 35936 | non- | B0518 | homo- | ARA_LEAF | p-Super | GC | 24 | 72 |
| | targeted | | serine | | | | | |
| 35967 | plastidic | B0593 | aspartate | ARA_LEAF | p-Super | GC | 84 | 319 |
| 35967 | plastidic | B0593 | phenyl- | ARA_LEAF | p-Super | LC | 37 | 256 |
| | | | alanine | | | | | |
| 35967 | plastidic | B0593 | serine | ARA_LEAF | p-Super | GC | 153 | 359 |
| 35967 | plastidic | B0593 | tyrosine | ARA_LEAF | p-Super | LC | 49 | 202 |
| 35967 | plastidic | B0593 | 3,4-di- | ARA_LEAF | p-Super | GC | 625 | 4899 |
| | | | hydroxy | | | | | |
| | | | phenyl- | | | | | |
| | | | alanine | | | | | |
| | | | (dopa) | | | | | |
| 35967 | plastidic | B0593 | 5-oxo- | ARA_LEAF | p-Super | GC | 100 | 636 |
| | | | proline | | | | | |
| 36114 | non- | B0752 | tyrosine | ARA_LEAF | p-Super | GC | 38 | 112 |
| | targeted | | | | | | | |
| 75286 | plastidic | B0754 | tyrosine | ARA_LEAF | p-USP | LC | 55 | 197 |
| 75807 | non- | B0801 | tyrosine | ARA_LEAF | p-Super | GC | 38 | 67 |
| | targeted | | | | | | | |
| 36299 | non- | B0828 | alanine | ARA_LEAF | p-Super | GC | 24 | 37 |
| | targeted | | | | | | | |
| 75873 | non- | B0841 | glycine | ARA_LEAF | p-Super | GC | 40 | 72 |
| | targeted | | | | | | | |
| 75873 | non- | B0841 | homo- | ARA_LEAF | p-Super | GC | 25 | 59 |
| | targeted | | serine | | | | | |
| 7917 | non- | B0898 | phenyl- | ARA_LEAF | p-Super | GC | 29 | 2908 |
| | targeted | | alanine | | | | | |
| 7917 | non- | B0898 | serine | ARA_LEAF | p-Super | GC | 34 | 290 |
| | targeted | | | | | | | |
| 7917 | non- | B0898 | tyrosine | ARA_LEAF | p-Super | GC | 41 | 2243 |
| | targeted | | | | | | | |
| 7917 | non- | B0898 | 5-oxo- | ARA_LEAF | p-Super | GC | 99 | 411 |
| | targeted | | proline | | | | | |
| 75915 | non- | B0917 | citrulline | ARA_LEAF | p-Super | LC | 32 | 58 |
| | targeted | | | | | | | |
| 75915 | non- | B0917 | glycine | ARA_LEAF | p-Super | GC | 60 | 65 |
| | targeted | | | | | | | |
| 75915 | non- | B0917 | phenyl- | ARA_LEAF | p-Super | GC | 32 | 68 |
| | targeted | | alanine | | | | | |
| 75915 | non- | B0917 | 5-oxo- | ARA_LEAF | p-Super | GC | 41 | 96 |
| | targeted | | proline | | | | | |
| 36670 | non- | B0963 | alanine | ARA_LEAF | p-Super | GC | 20 | 51 |
| | targeted | | | | | | | |
| 36670 | non- | B0963 | phenyl- | ARA_LEAF | p-Super | GC | 58 | 241 |
| | targeted | | alanine | | | | | |
| 36670 | non- | B0963 | tyrosine | ARA_LEAF | p-Super | GC | 46 | 453 |
| | targeted | | | | | | | |
| 36809 | non- | B0980 | phenyl- | ARA_SEED_2 | p-USP | GC | 32 | 89 |
| | targeted | | alanine | | | | | |
| 7941 | non- | B1003 | alanine | ARA_LEAF | p-Super | GC | 51 | 123 |
| | targeted | | | | | | | |
| 7941 | non- | B1003 | aspartate | ARA_LEAF | p-Super | GC | 60 | 317 |
| | targeted | | | | | | | |
| 7941 | non- | B1003 | phenyl- | ARA_LEAF | p-Super | GC | 72 | 728 |
| | targeted | | alanine | | | | | |
| 7941 | non- | B1003 | serine | ARA_LEAF | p-Super | GC | 33 | 327 |
| | targeted | | | | | | | |
| 7941 | non- | B1003 | tyrosine | ARA_LEAF | p-Super | GC | 119 | 664 |
| | targeted | | | | | | | |
| 7941 | non- | B1003 | 3,4-di- | ARA_LEAF | p-Super | GC | 36 | 327 |
| | targeted | | hydroxy | | | | | |
| | | | phenyl- | | | | | |
| | | | alanine | | | | | |
| | | | (dopa) | | | | | |
| 7941 | non- | B1003 | 5-oxo- | ARA_LEAF | p-Super | GC | 34 | 935 |
| | targeted | | proline | | | | | |
| 36880 | non- | B1023 | citrulline | ARA_LEAF | p-Super | LC | 44 | 123 |
| | targeted | | | | | | | |
| 36880 | non- | B1023 | 5-oxo- | ARA_LEAF | p-Super | GC | 38 | 138 |
| | targeted | | proline | | | | | |
| 36907 | non- | B1024 | aspartate | ARA_LEAF | p-Super | GC | 63 | 105 |
| | targeted | | | | | | | |
| 76032 | plastidic | B1065 | aspartate | ARA_LEAF | p-Super | GC | 53 | 132 |
| 76032 | plastidic | B1065 | tyrosine | ARA_LEAF | p-Super | GC | 34 | 45 |
| 37390 | non- | B1137 | serine | ARA_LEAF | p-Super | GC | 27 | 91 |
| | targeted | | | | | | | |
| 76068 | non- | B1155 | phenyl- | ARA_LEAF | p-Super | GC | 34 | 71 |
| | targeted | | alanine | | | | | |
| 37394 | non- | B1163 | phenyl- | ARA_LEAF | p-Super | GC | 30 | 38 |
| | targeted | | alanine | | | | | |
| 37394 | non- | B1163 | tyrosine | ARA_LEAF | p-Super | LC | 39 | 45 |
| | targeted | | | | | | | |
| 76087 | plastidic | B1179 | citrulline | ARA_LEAF | p-Super | LC | 35 | 47 |
| 37400 | non- | B1186 | alanine | ARA_LEAF | p-Super | GC | 28 | 76 |
| | targeted | | | | | | | |
| 37400 | non- | B1186 | serine | ARA_LEAF | p-Super | GC | 46 | 113 |
| | targeted | | | | | | | |
| 76138 | non- | B1205 | citrulline | ARA_LEAF | p-Super | LC | 35 | 77 |
| | targeted | | | | | | | |
| 76151 | non- | B1229 | phenyl- | ARA_LEAF | p-Super | GC | 35 | 44 |
| | targeted | | alanine | | | | | |
| 37483 | non- | B1255 | tyrosine | ARA_LEAF | p-Super | GC | 52 | 124 |
| | targeted | | | | | | | |
| 37503 | non- | B1259 | citrulline | ARA_LEAF | p-Super | LC | 32 | 142 |
| | targeted | | | | | | | |
| 37503 | non- | B1259 | 5-oxo- | ARA_LEAF | p-Super | GC | 38 | 91 |
| | targeted | | proline | | | | | |
| 76157 | plastidic | B1262 | tyrosine | ARA_SEED_2 | p-USP | GC | 27 | 79 |
| 76240 | plastidic | B1264 | phenyl- | ARA_LEAF | p-Super | GC | 33 | 47 |
| | | | alanine | | | | | |
| 37573 | non- | B1280 | glycine | ARA_LEAF | p-Super | GC | 38 | 169 |
| | targeted | | | | | | | |
| 37573 | non- | B1280 | serine | ARA_LEAF | p-Super | GC | 37 | 48 |
| | targeted | | | | | | | |
| 37573 | non- | B1280 | 5-oxo- | ARA_LEAF | p-Super | GC | 38 | 86 |
| | targeted | | proline | | | | | |
| 37658 | plastidic | B1297 | alanine | ARA_SEED_2 | p-USP | GC | 62 | 345 |
| 37658 | plastidic | B1297 | glycine | ARA_SEED_2 | p-USP | GC | 26 | 507 |
| 37807 | non- | B1300 | phenyl- | ARA_LEAF | p-Super | LC | 52 | 109 |
| | targeted | | alanine | | | | | |
| 37807 | non- | B1300 | tyrosine | ARA_LEAF | p-Super | LC | 59 | 115 |
| | targeted | | | | | | | |
| 76867 | non- | B1310 | citrulline | ARA_LEAF | p-Super | LC | 33 | 51 |
| | targeted | | | | | | | |
| 38226 | non- | B1330 | citrulline | ARA_LEAF | p-Super | LC | 33 | 162 |
| | targeted | | | | | | | |
| 76890 | non- | B1343 | phenyl- | ARA_LEAF | p-Super | GC | 27 | 100 |
| | targeted | | alanine | | | | | |
| 77768 | non- | B1348 | alanine | ARA_LEAF | p-Super | GC | 23 | 36 |
| | targeted | | | | | | | |
| 77768 | non- | B1348 | glycine | ARA_LEAF | p-Super | GC | 47 | 134 |
| | targeted | | | | | | | |
| 38266 | plastidic | B1431 | 5-oxo- | ARA_LEAF | p-Super | GC | 37 | 46 |
| | | | proline | | | | | |
| 38289 | non- | B1445 | alanine | ARA_LEAF | p-Super | GC | 19 | 46 |
| | targeted | | | | | | | |
| 38289 | non- | B1445 | citrulline | ARA_LEAF | p-Super | LC | 32 | 96 |
| | targeted | | | | | | | |
| 38289 | non- | B1445 | glycine | ARA_LEAF | p-Super | GC | 37 | 82 |
| | targeted | | | | | | | |
| 38289 | non- | B1445 | phenyl- | ARA_LEAF | p-Super | LC | 34 | 58 |
| | targeted | | alanine | | | | | |
| 38289 | non- | B1445 | serine | ARA_LEAF | p-Super | GC | 37 | 78 |
| | targeted | | | | | | | |
| 77774 | non- | B1479 | alanine | ARA_LEAF | p-Super | GC | 27 | 184 |
| | targeted | | | | | | | |
| 77774 | non- | B1479 | glycine | ARA_SEED_2 | p-USP | GC | 45 | 211 |
| | targeted | | | | | | | |
| 77774 | non- | B1479 | phenyl- | ARA_SEED_2 | p-USP | GC | 35 | 155 |
| | targeted | | alanine | | | | | |
| 77774 | non- | B1479 | serine | ARA_SEED_2 | p-USP | GC | 29 | 287 |
| | targeted | | | | | | | |
| 77774 | non- | B1479 | tyrosine | ARA_SEED_2 | p-USP | GC | 32 | 107 |
| | targeted | | | | | | | |
| 7947 | non- | B1522 | asparagine | ARA_LEAF | p-Super | GC | 42 | 1317 |
| | targeted | | | | | | | |
| 7947 | non- | B1522 | aspartate | ARA_LEAF | p-Super | GC | 66 | 168 |
| | targeted | | | | | | | |
| 7947 | non- | B1522 | phenyl- | ARA_LEAF | p-Super | GC | 34 | 1168 |
| | targeted | | alanine | | | | | |
| 7947 | non- | B1522 | serine | ARA_LEAF | p-Super | GC | 23 | 109 |
| | targeted | | | | | | | |
| 7947 | non- | B1522 | tyrosine | ARA_LEAF | p-Super | GC | 38 | 627 |
| | targeted | | | | | | | |
| 7947 | non- | B1522 | 5-oxo- | ARA_LEAF | p-Super | GC | 47 | 133 |
| | targeted | | proline | | | | | |
| 78138 | non- | B1583 | tyrosine | ARA_LEAF | p-Super | GC | 51 | 184 |
| | targeted | | | | | | | |
| 78154 | non- | B1589 | aspartate | ARA_LEAF | p-Super | GC | 52 | 74 |
| | targeted | | | | | | | |
| 38300 | non- | B1597 | phenyl- | ARA_LEAF | p-Super | GC | 65 | 190 |
| | targeted | | alanine | | | | | |
| 38300 | non- | B1597 | tyrosine | ARA_LEAF | p-Super | GC | 64 | 143 |
| | targeted | | | | | | | |
| 78265 | non- | B1651 | alanine | ARA_LEAF | p-Super | GC | 19 | 39 |
| | targeted | | | | | | | |
| 78753 | non- | B1670 | aspartate | ARA_LEAF | p-Super | GC | 58 | 193 |
| | targeted | | | | | | | |
| 78771 | non- | B1672 | aspartate | ARA_LEAF | p-Super | GC | 59 | 111 |
| | targeted | | | | | | | |
| 78779 | plastidic | B1747 | alanine | ARA_SEED_2 | p-USP | GC | 70 | 193 |
| 78852 | non- | B1755 | aspartate | ARA_LEAF | p-Super | GC | 52 | 103 |
| | targeted | | | | | | | |
| 78852 | non- | B1755 | tyrosine | ARA_LEAF | p-Super | GC | 51 | 120 |
| | targeted | | | | | | | |
| 78883 | non- | B1791 | aspartate | ARA_LEAF | p-Super | GC | 54 | 114 |
| | targeted | | | | | | | |
| 78953 | non- | B1837 | aspartate | ARA_LEAF | p-Super | GC | 51 | 69 |
| | targeted | | | | | | | |
| 8316 | non- | B1838 | aspartate | ARA_LEAF | p-Super | GC | 70 | 104 |
| | targeted | | | | | | | |
| 38573 | non- | B1845 | aspartate | ARA_LEAF | p-Super | GC | 57 | 199 |
| | targeted | | | | | | | |
| 38573 | non- | B1845 | serine | ARA_LEAF | p-Super | GC | 49 | 125 |
| | targeted | | | | | | | |
| 8363 | plastidic | B1854 | asparagine | ARA_SEED_2 | p-USP | GC | 32 | 157 |
| 78970 | non- | B1873 | tyrosine | ARA_LEAF | p-Super | GC | 58 | 217 |
| | targeted | | | | | | | |
| 79056 | non- | B1897 | phenyl- | ARA_LEAF | p-Super | GC | 28 | 196 |
| | targeted | | alanine | | | | | |
| 79056 | non- | B1897 | tyrosine | ARA_LEAF | p-Super | GC | 36 | 211 |
| | targeted | | | | | | | |
| 38767 | non- | B1898 | serine | ARA_LEAF | p-Super | GC | 28 | 106 |
| | targeted | | | | | | | |
| 79181 | non- | B1930 | serine | ARA_LEAF | p-Super | GC | 42 | 113 |
| | targeted | | | | | | | |
| 38899 | non- | B1981 | aspartate | ARA_LEAF | p-Super | GC | 66 | 90 |
| | targeted | | | | | | | |
| 79217 | non- | B2027 | tyrosine | ARA_LEAF | p-Super | GC | 56 | 437 |
| | targeted | | | | | | | |
| 8920 | non- | B2032 | aspartate | ARA_LEAF | p-Super | GC | 64 | 210 |
| | targeted | | | | | | | |
| 38947 | non- | B2063 | aspartate | ARA_LEAF | p-Super | GC | 56 | 184 |
| | targeted | | | | | | | |
| 38947 | non- | B2063 | phenyl- | ARA_LEAF | p-Super | GC | 32 | 1359 |
| | targeted | | alanine | | | | | |
| 38947 | non- | B2063 | serine | ARA_LEAF | p-Super | GC | 27 | 129 |
| | targeted | | | | | | | |
| 38947 | non- | B2063 | tyrosine | ARA_LEAF | p-Super | GC | 36 | 750 |
| | targeted | | | | | | | |
| 8937 | mitochondrial | B2066 | 5-oxo- | ARA_LEAF | p-Super | GC | 34 | 113 |
| | | | proline | | | | | |
| 39002 | non- | B2107 | aspartate | ARA_LEAF | p-Super | GC | 64 | 278 |
| | targeted | | | | | | | |
| 39040 | non- | B2178 | aspartate | ARA_LEAF | p-Super | GC | 58 | 132 |
| | targeted | | | | | | | |
| 39040 | non- | B2178 | citrulline | ARA_LEAF | p-Super | LC | 43 | 94 |
| | targeted | | | | | | | |
| 39040 | non- | B2178 | phenyl- | ARA_LEAF | p-Super | GC | 25 | 44 |
| | targeted | | alanine | | | | | |
| 39040 | non- | B2178 | serine | ARA_LEAF | p-Super | GC | 26 | 64 |
| | targeted | | | | | | | |
| 39040 | non- | B2178 | tyrosine | ARA_LEAF | p-Super | GC | 38 | 39 |
| | targeted | | | | | | | |
| 79279 | plastidic | B2242 | glycine | ARA_SEED_2 | p-USP | GC | 30 | 52 |
| 39120 | non- | B2281 | asparagine | ARA_SEED_2 | p-USP | GC | 34 | 63 |
| | targeted | | | | | | | |
| 39219 | non- | B2360 | aspartate | ARA_LEAF | p-Super | GC | 68 | 124 |
| | targeted | | | | | | | |
| 79342 | plastidic | B2366 | serine | ARA_LEAF | p-Super | GC | 24 | 67 |
| 39237 | non- | B2399 | tyrosine | ARA_LEAF | p-Super | GC | 37 | 156 |
| | targeted | | | | | | | |
| 39237 | non- | B2399 | 3,4-di- | ARA_LEAF | p-Super | GC | 44 | 168 |
| | targeted | | hydroxy | | | | | |
| | | | phenyl- | | | | | |
| | | | alanine | | | | | |
| | | | (dopa) | | | | | |
| 39237 | non- | B2399 | 5-oxo- | ARA_LEAF | p-Super | GC | 48 | 144 |
| | targeted | | proline | | | | | |
| 39255 | non- | B2405 | alanine | ARA_LEAF | p-Super | GC | 28 | 51 |
| | targeted | | | | | | | |
| 39255 | non- | B2405 | aspartate | ARA_LEAF | p-Super | GC | 52 | 87 |
| | targeted | | | | | | | |
| 79398 | non- | B2429 | phenyl- | ARA_LEAF | p-Super | GC | 37 | 52 |
| | targeted | | alanine | | | | | |
| 40329 | non- | B2474 | citrulline | ARA_LEAF | p-Super | LC | 31 | 119 |
| | targeted | | | | | | | |
| 40329 | non- | B2474 | glycine | ARA_LEAF | p-Super | GC | 41 | 71 |
| | targeted | | | | | | | |
| 79509 | non- | B2482 | serine | ARA_LEAF | p-Super | GC | 24 | 62 |
| | targeted | | | | | | | |
| 79509 | non- | B2482 | 5-oxo- | ARA_LEAF | p-Super | GC | 40 | 97 |
| | targeted | | proline | | | | | |
| 9167 | non- | B2513 | phenyl- | ARA_LEAF | p-Super | GC | 65 | 206 |
| | targeted | | alanine | | | | | |
| 9167 | non- | B2513 | tyrosine | ARA_LEAF | p-Super | GC | 38 | 456 |
| | targeted | | | | | | | |
| 79627 | non- | B2551 | serine | ARA_SEED_2 | p-USP | GC | 28 | 120 |
| | targeted | | | | | | | |
| 80521 | plastidic | B2600 | phenyl- | ARA_SEED_2 | p-USP | GC | 40 | 334 |
| | | | alanine | | | | | |
| 40665 | non- | B2613 | alanine | ARA_LEAF | p-Super | GC | 27 | 27 |
| | targeted | | | | | | | |
| 40726 | non- | B2634 | phenyl- | ARA_LEAF | p-Super | GC | 28 | 421 |
| | targeted | | alanine | | | | | |
| 40726 | non- | B2634 | tyrosine | ARA_LEAF | p-Super | GC | 35 | 1033 |
| | targeted | | | | | | | |
| 9244 | non- | B2673 | phenyl- | ARA_LEAF | p-Super | GC | 25 | 121 |
| | targeted | | alanine | | | | | |
| 9244 | non- | B2673 | tyrosine | ARA_LEAF | p-Super | GC | 46 | 58 |
| | targeted | | | | | | | |
| 80589 | non- | B2680 | aspartate | ARA_LEAF | p-Super | GC | 51 | 124 |
| | targeted | | | | | | | |
| 80756 | non- | B2701 | alanine | ARA_LEAF | p-Super | GC | 19 | 36 |
| | targeted | | | | | | | |
| 80756 | non- | B2701 | phenyl- | ARA_LEAF | p-Super | GC | 27 | 317 |
| | targeted | | alanine | | | | | |
| 80756 | non- | B2701 | tyrosine | ARA_LEAF | p-Super | GC | 143 | 237 |
| | targeted | | | | | | | |
| 40741 | non- | B2714 | alanine | ARA_LEAF | p-Super | GC | 26 | 48 |
| | targeted | | | | | | | |
| 80906 | non- | B2739 | alanine | ARA_LEAF | p-Super | GC | 21 | 76 |
| | targeted | | | | | | | |
| 80906 | non- | B2739 | phenyl- | ARA_LEAF | p-Super | GC | 25 | 234 |
| | targeted | | alanine | | | | | |
| 80906 | non- | B2739 | tyrosine | ARA_LEAF | p-Super | GC | 40 | 595 |
| | targeted | | | | | | | |
| 81075 | non- | B2747 | tyrosine | ARA_LEAF | p-Super | GC | 68 | 92 |
| | targeted | | | | | | | |
| 81075 | non- | B2747 | 5-oxo- | ARA_LEAF | p-Super | GC | 43 | 297 |
| | targeted | | proline | | | | | |
| 81451 | non- | B2762 | phenyl- | ARA_LEAF | p-Super | GC | 25 | 78 |
| | targeted | | alanine | | | | | |
| 40795 | non- | B2812 | phenyl- | ARA_LEAF | p-Super | GC | 44 | 99 |
| | targeted | | alanine | | | | | |
| 40795 | non- | B2812 | serine | ARA_LEAF | p-Super | GC | 26 | 123 |
| | targeted | | | | | | | |
| 40795 | non- | B2812 | tyrosine | ARA_LEAF | p-Super | GC | 38 | 122 |
| | targeted | | | | | | | |
| 81576 | non- | B2818 | phenyl- | ARA_LEAF | p-Super | GC | 27 | 826 |
| | targeted | | alanine | | | | | |
| 81576 | non- | B2818 | tyrosine | ARA_LEAF | p-Super | LC | 41 | 427 |
| | targeted | | | | | | | |
| 81576 | non- | B2818 | 5-oxo- | ARA_LEAF | p-Super | GC | 34 | 266 |
| | targeted | | proline | | | | | |
| 81692 | non- | B2828 | aspartate | ARA_SEED_2 | p-USP | GC | 40 | 154 |
| | targeted | | | | | | | |
| 81935 | non- | B2839 | tyrosine | ARA_LEAF | p-Super | LC | 42 | 55 |
| | targeted | | | | | | | |
| 81980 | non- | B2849 | phenyl- | ARA_LEAF | p-Super | GC | 26 | 78 |
| | targeted | | alanine | | | | | |
| 81988 | plastidic | B2913 | glycine | ARA_SEED_2 | p-USP | GC | 31 | 168 |
| 81988 | plastidic | B2913 | serine | ARA_SEED_2 | p-USP | GC | 28 | 215 |
| 9333 | non- | B2923 | aspartate | ARA_LEAF | p-Super | GC | 64 | 126 |
| | targeted | | | | | | | |
| 42046 | non- | B3064 | asparagine | ARA_SEED_2 | p-Super | GC | 30 | 189 |
| | targeted | | | | | | | |
| 82424 | non- | B3083 | phenyl- | ARA_LEAF | p-Super | GC | 28 | 61 |
| | targeted | | alanine | | | | | |
| 82424 | non- | B3083 | serine | ARA_LEAF | p-Super | GC | 23 | 108 |
| | targeted | | | | | | | |
| 82424 | non- | B3083 | tyrosine | ARA_LEAF | p-Super | GC | 35 | 72 |
| | targeted | | | | | | | |
| 82459 | non- | B3098 | alanine | ARA_LEAF | p-Super | GC | 31 | 58 |
| | targeted | | | | | | | |
| 82459 | non- | B3098 | glycine | ARA_LEAF | p-Super | GC | 38 | 76 |
| | targeted | | | | | | | |
| 42471 | non- | B3121 | tyrosine | ARA_LEAF | p-Super | GC | 39 | 73 |
| | targeted | | | | | | | |
| 82510 | plastidic | B3221 | tyrosine | ARA_LEAF | p-Super | LC | 37 | 55 |
| 9470 | non- | B3246 | serine | ARA_LEAF | p-Super | GC | 24 | 101 |
| | targeted | | | | | | | |
| 9470 | non- | B3246 | 5-oxo- | ARA_LEAF | p-Super | GC | 33 | 89 |
| | targeted | | proline | | | | | |
| 9492 | non- | B3256 | asparagine | ARA_SEED_2 | p-USP | GC | 67 | 286 |
| | targeted | | | | | | | |
| 9492 | non- | B3256 | glycine | ARA_SEED_2 | p-USP | GC | 28 | 344 |
| | targeted | | | | | | | |
| 9492 | non- | B3256 | serine | ARA_SEED_2 | p-USP | GC | 31 | 1323 |
| | targeted | | | | | | | |
| 9492 | non- | B3256 | 5-oxo- | ARA_SEED_2 | p-USP | GC | 32 | 175 |
| | targeted | | proline | | | | | |
| 42502 | non- | B3262 | alanine | ARA_LEAF | p-Super | GC | 25 | 58 |
| | targeted | | | | | | | |
| 42502 | non- | B3262 | phenyl- | ARA_LEAF | p-Super | LC | 36 | 199 |
| | targeted | | alanine | | | | | |
| 42502 | non- | B3262 | serine | ARA_LEAF | p-Super | GC | 34 | 141 |
| | targeted | | | | | | | |
| 42502 | non- | B3262 | tyrosine | ARA_LEAF | p-Super | LC | 45 | 322 |
| | targeted | | | | | | | |
| 42502 | non- | B3262 | 5-oxo- | ARA_LEAF | p-Super | GC | 72 | 179 |
| | targeted | | proline | | | | | |
| 10104 | non- | B3346 | alanine | ARA_LEAF | p-Super | GC | 20 | 53 |
| | targeted | | | | | | | |
| 82572 | non- | B3352 | alanine | ARA_LEAF | p-Super | GC | 19 | 45 |
| | targeted | | | | | | | |
| 82572 | non- | B3352 | glycine | ARA_LEAF | p-Super | GC | 40 | 80 |
| | targeted | | | | | | | |
| 82846 | plastidic | B3392 | aspartate | ARA_LEAF | p-Super | GC | 41 | 49 |
| 82866 | non- | B3403 | phenyl- | ARA_LEAF | p-Super | GC | 26 | 63 |
| | targeted | | alanine | | | | | |
| 82866 | non- | B3403 | serine | ARA_LEAF | p-Super | GC | 31 | 45 |
| | targeted | | | | | | | |
| 42559 | non- | B3410 | alanine | ARA_LEAF | p-Super | GC | 23 | 65 |
| | targeted | | | | | | | |
| 42592 | non- | B3509 | serine | ARA_LEAF | p-Super | GC | 26 | 63 |
| | targeted | | | | | | | |
| 83153 | non- | B3533 | aspartate | ARA_SEED_2 | p-USP | GC | 37 | 669 |
| | targeted | | | | | | | |
| 83213 | plastidic | B3607 | phenyl- | ARA_SEED_2 | p-USP | LC | 46 | 60 |
| | | | alanine | | | | | |
| 83213 | plastidic | B3607 | tyrosine | ARA_SEED_2 | p-USP | GC | 29 | 82 |
| 42931 | non- | B3634 | alanine | ARA_LEAF | p-Super | GC | 21 | 39 |
| | targeted | | | | | | | |
| 42931 | non- | B3634 | asparagine | ARA_LEAF | p-Super | GC | 44 | 169 |
| | targeted | | | | | | | |
| 42931 | non- | B3634 | phenyl- | ARA_LEAF | p-Super | GC | 82 | 92 |
| | targeted | | alanine | | | | | |
| 83429 | non- | B3646 | glycine | ARA_LEAF | p-Super | GC | 35 | 1154 |
| | targeted | | | | | | | |
| 83629 | plastidic | B3670 | tyrosine | ARA_SEED_2 | p-USP | GC | 60 | 97 |
| 83657 | plastidic | B3744 | asparagine | ARA_SEED_2 | p-USP | GC | 36 | 2817 |
| 10252 | non- | B3771 | glycine | ARA_SEED_2 | p-USP | GC | 39 | 114 |
| | targeted | | | | | | | |
| 10252 | non- | B3771 | phenyl- | ARA_SEED_2 | p-USP | LC | 69 | 81 |
| | targeted | | alanine | | | | | |
| 83726 | non- | B3791 | aspartate | ARA_LEAF | p-Super | GC | 53 | 158 |
| | targeted | | | | | | | |
| 83726 | non- | B3791 | 5-oxo- | ARA_LEAF | p-Super | GC | 39 | 117 |
| | targeted | | proline | | | | | |
| 43800 | non- | B3793 | phenyl- | ARA_LEAF | p-Super | GC | 26 | 438 |
| | targeted | | alanine | | | | | |
| 43839 | non- | B3813 | phenyl- | ARA_SEED_2 | p-USP | GC | 34 | 85 |
| | targeted | | alanine | | | | | |
| 44196 | non- | B3814 | citrulline | ARA_LEAF | p-Super | LC | 30 | 124 |
| | targeted | | | | | | | |
| 83821 | non- | B3872 | alanine | ARA_LEAF | p-Super | GC | 20 | 44 |
| | targeted | | | | | | | |
| 83821 | plastidic | B3872 | aspartate | ARA_LEAF | p-Super | GC | 55 | 96 |
| 83821 | non- | B3872 | serine | ARA_LEAF | p-Super | GC | 36 | 59 |
| | targeted | | | | | | | |
| 83821 | non- | B3872 | tyrosine | ARA_LEAF | p-Super | GC | 35 | 54 |
| | targeted | | | | | | | |
| 44372 | non- | B3989 | phenyl- | ARA_LEAF | p-Super | GC | 25 | 1035 |
| | targeted | | alanine | | | | | |
| 44372 | non- | B3989 | tyrosine | ARA_LEAF | p-Super | GC | 46 | 762 |
| | targeted | | | | | | | |
| 44378 | non- | B4012 | aspartate | ARA_SEED_2 | p-USP | GC | 51 | 282 |
| | targeted | | | | | | | |
| 44378 | non- | B4012 | 5-oxo- | ARA_SEED_2 | p-USP | GC | 33 | 47 |
| | targeted | | proline | | | | | |
| 83835 | plastidic | B4024 | glycine | ARA_SEED_2 | p-USP | GC | 210 | 262 |
| 83835 | plastidic | B4024 | serine | ARA_SEED_2 | p-USP | GC | 35 | 399 |
| 10740 | non- | B4029 | alanine | ARA_LEAF | p-Super | GC | 22 | 775 |
| | targeted | | | | | | | |
| 10740 | non- | B4029 | aspartate | ARA_LEAF | p-Super | GC | 59 | 231 |
| | targeted | | | | | | | |
| 10740 | non- | B4029 | glycine | ARA_LEAF | p-Super | GC | 39 | 590 |
| | targeted | | | | | | | |
| 10740 | non- | B4029 | phenyl- | ARA_LEAF | p-Super | GC | 28 | 2010 |
| | targeted | | alanine | | | | | |
| 10740 | non- | B4029 | serine | ARA_LEAF | p-Super | GC | 28 | 177 |
| | targeted | | | | | | | |
| 10740 | non- | B4029 | tyrosine | ARA_LEAF | p-Super | GC | 36 | 3270 |
| | targeted | | | | | | | |
| 10740 | non- | B4029 | 5-oxo- | ARA_LEAF | p-Super | GC | 44 | 367 |
| | targeted | | proline | | | | | |
| 44609 | non- | B4121 | serine | ARA_LEAF | p-Super | GC | 23 | 92 |
| | targeted | | | | | | | |
| 45321 | non- | B4256 | aspartate | ARA_LEAF | p-Super | GC | 56 | 155 |
| | targeted | | | | | | | |
| 45321 | non- | B4256 | phenyl- | ARA_LEAF | p-Super | GC | 29 | 242 |
| | targeted | | alanine | | | | | |
| 45321 | non- | B4256 | serine | ARA_LEAF | p-Super | GC | 31 | 227 |
| | targeted | | | | | | | |
| 45321 | non- | B4256 | tyrosine | ARA_LEAF | p-Super | GC | 151 | 280 |
| | targeted | | | | | | | |
| 45757 | non- | C_pp004096192r | serine | ARA_LEAF | p-Super | GC | 32 | 75 |
| | targeted | | | | | | | |
| 84079 | plastidic | D90900 | alanine | ARA_LEAF | p-PcUBI | GC | 20 | 34 |
| 45795 | non- | GM02LC11114 | asparagine | ARA_LEAF | p-PcUBI | GC | 78 | 249 |
| | targeted | | | | | | | |
| 45795 | non- | GM02LC11114 | phenyl- | ARA_LEAF | p-PcUBI | LC | 44 | 76 |
| | targeted | | alanine | | | | | |
| 10811 | non- | GM02LC12622 | alanine | ARA_LEAF | p-PcUBI | GC | 21 | 46 |
| | targeted | | | | | | | |
| 10811 | non- | GM02LC12622 | phenyl- | ARA_LEAF | p-PcUBI | LC | 44 | 218 |
| | targeted | | alanine | | | | | |
| 10811 | non- | GM02LC12622 | tyrosine | ARA_LEAF | p-PcUBI | GC | 45 | 525 |
| | targeted | | | | | | | |
| 45897 | non- | GM02LC15313 | phenyl- | ARA_LEAF | p-PcUBI | LC | 32 | 137 |
| | targeted | | alanine | | | | | |
| 45897 | non- | GM02LC15313 | tyrosine | ARA_LEAF | p-PcUBI | LC | 53 | 84 |
| | targeted | | | | | | | |
| 46405 | non- | GM02LC17485 | aspartate | ARA_LEAF | p-PcUBI | GC | 57 | 118 |
| | targeted | | | | | | | |
| 46515 | non- | GM02LC17556 | phenyl- | ARA_LEAF | p-PcUBI | GC | 26 | 179 |
| | targeted | | alanine | | | | | |
| 46515 | non- | GM02LC17556 | tyrosine | ARA_LEAF | p-PcUBI | LC | 48 | 179 |
| | targeted | | | | | | | |
| 84198 | non- | GM02LC21368 | phenyl- | ARA_LEAF | p-PcUBI | LC | 59 | 383 |
| | targeted | | alanine | | | | | |
| 84198 | non- | GM02LC21368 | serine | ARA_LEAF | p-PcUBI | GC | 26 | 82 |
| | targeted | | | | | | | |
| 84198 | non- | GM02LC21368 | tyrosine | ARA_LEAF | p-PcUBI | GC | 36 | 903 |
| | targeted | | | | | | | |
| 46850 | non- | GM02LC44512 | alanine | ARA_LEAF | p-PcUBI | GC | 29 | 66 |
| | targeted | | | | | | | |
| 46850 | non- | GM02LC44512 | serine | ARA_LEAF | p-PcUBI | GC | 37 | 67 |
| | targeted | | | | | | | |
| 47159 | non- | NZ_AAAU02000016.150 | alanine | ARA_LEAF | p-PcUBI | GC | 21 | 74 |
| | targeted | | | | | | | |
| 47159 | non- | NZ_AAAU02000016.150 | glycine | ARA_LEAF | p-PcUBI | GC | 40 | 103 |
| | targeted | | | | | | | |
| 47159 | non- | NZ_AAAU02000016.150 | serine | ARA_LEAF | p-PcUBI | GC | 24 | 65 |
| | targeted | | | | | | | |
| 59851 | non- | S_pp015018333r | asparagine | ARA_LEAF | p-Super | GC | 43 | 143 |
| | targeted | | | | | | | |
| 59851 | non- | S_pp015018333r | phenyl- | ARA_LEAF | p-Super | GC | 37 | 174 |
| | targeted | | alanine | | | | | |
| 59851 | non- | S_pp015018333r | tyrosine | ARA_LEAF | p-Super | LC | 41 | 102 |
| | targeted | | | | | | | |
| 59851 | non- | S_pp015018333r | 5-oxo- | ARA_LEAF | p-Super | GC | 45 | 114 |
| | targeted | | proline | | | | | |
| 47566 | plastidic | Sll0080 | citrulline | ARA_LEAF | p-PcUBI | LC | 31 | 60 |
| 84265 | plastidic | Sll0228 | asparagine | ARA_LEAF | p-PcUBI | GC | 76 | 319 |
| 84265 | plastidic | Sll0228 | tyrosine | ARA_LEAF | p-PcUBI | GC | 48 | 58 |
| 84441 | plastidic | Sll0240 | alanine | ARA_LEAF | p-PcUBI | GC | 30 | 40 |
| 49143 | plastidic | Sll0248 | phenyl- | ARA_LEAF | p-PcUBI | LC | 33 | 128 |
| | | | alanine | | | | | |
| 49143 | plastidic | Sll0248 | tyrosine | ARA_LEAF | p-PcUBI | LC | 40 | 277 |
| 84865 | plastidic | Sll0281 | alanine | ARA_LEAF | p-PcUBI | GC | 22 | 34 |
| 84869 | plastidic | Sll0378 | serine | ARA_LEAF | p-PcUBI | GC | 24 | 126 |
| 50104 | non- | Sll0420 | phenyl- | ARA_LEAF | p-PcUBI | GC | 31 | 49 |
| | targeted | | alanine | | | | | |
| 50104 | non- | Sll0420 | tyrosine | ARA_LEAF | p-PcUBI | GC | 36 | 94 |
| | targeted | | | | | | | |
| 85510 | plastidic | Sll0593 | citrulline | ARA_LEAF | p-PcUBI | LC | 54 | 140 |
| 50950 | non- | Sll0682 | serine | ARA_LEAF | p-PcUBI | GC | 26 | 90 |
| | targeted | | | | | | | |
| 50950 | non- | Sll0682 | 5-oxo- | ARA_LEAF | p-PcUBI | GC | 34 | 92 |
| | targeted | | proline | | | | | |
| 51198 | non- | Sll0816 | aspartate | ARA_LEAF | p-PcUBI | GC | 52 | 318 |
| | targeted | | | | | | | |
| 51198 | non- | Sll0816 | glycine | ARA_LEAF | p-PcUBI | GC | 37 | 110 |
| | targeted | | | | | | | |
| 51198 | non- | Sll0816 | serine | ARA_LEAF | p-PcUBI | GC | 32 | 198 |
| | targeted | | | | | | | |
| 51198 | non- | Sll0816 | tyrosine | ARA_LEAF | p-PcUBI | GC | 53 | 88 |
| | targeted | | | | | | | |
| 51268 | plastidic | Sll0891 | aspartate | ARA_LEAF | p-PcUBI | GC | 90 | 176 |
| 51268 | plastidic | Sll0891 | phenyl- | ARA_LEAF | p-PcUBI | GC | 37 | 118 |
| | | | alanine | | | | | |
| 51268 | plastidic | Sll0891 | serine | ARA_LEAF | p-PcUBI | GC | 23 | 95 |
| 52246 | mitochondrial | Sll0934 | aspartate | ARA_LEAF | p-PcUBI | GC | 61 | 94 |
| 52364 | non- | Sll0945 | serine | ARA_LEAF | p-PcUBI | GC | 28 | 86 |
| | targeted | | | | | | | |
| 52634 | mitochondrial | Sll1031 | aspartate | ARA_LEAF | p-PcUBI | GC | 61 | 317 |
| 52634 | mitochondrial | Sll1031 | phenyl- | ARA_LEAF | p-PcUBI | LC | 33 | 128 |
| | | | alanine | | | | | |
| 52634 | mitochondrial | Sll1031 | serine | ARA_LEAF | p-PcUBI | GC | 24 | 67 |
| 85723 | mitochondrial | Sll1032 | aspartate | ARA_LEAF | p-PcUBI | GC | 45 | 106 |
| 52660 | plastidic | Sll1056 | serine | ARA_LEAF | p-PcUBI | GC | 24 | 75 |
| 11211 | mitochondrial | Sll1108 | aspartate | ARA_LEAF | p-PcUBI | GC | 55 | 137 |
| 11211 | mitochondrial | Sll1108 | 5-oxo- | ARA_LEAF | p-PcUBI | GC | 39 | 103 |
| | | | proline | | | | | |
| 53456 | non- | Sll1393 | asparagine | ARA_LEAF | p-PcUBI | GC | 55 | 264 |
| | targeted | | | | | | | |
| 53456 | non- | Sll1393 | tyrosine | ARA_LEAF | p-PcUBI | GC | 82 | 129 |
| | targeted | | | | | | | |
| 53878 | mitochondrial | Sll1443 | aspartate | ARA_LEAF | p-PcUBI | GC | 58 | 119 |
| 54337 | mitochondrial | Sll1450 | glycine | ARA_LEAF | p-PcUBI | GC | 36 | 102 |
| 54337 | mitochondrial | Sll1450 | phenyl- | ARA_LEAF | p-PcUBI | LC | 32 | 42 |
| | | | alanine | | | | | |
| 54337 | mitochondrial | Sll1450 | serine | ARA_LEAF | p-PcUBI | GC | 24 | 83 |
| 54337 | mitochondrial | Sll1450 | tyrosine | ARA_LEAF | p-PcUBI | GC | 37 | 92 |
| 54452 | plastidic | Sll1522 | aspartate | ARA_LEAF | p-PcUBI | GC | 50 | 230 |
| 54452 | plastidic | Sll1522 | 5-oxo- | ARA_LEAF | p-PcUBI | GC | 33 | 103 |
| | | | proline | | | | | |
| 11423 | mitochondrial | Sll1545 | serine | ARA_LEAF | p-PcUBI | GC | 26 | 50 |
| 54804 | non- | Sll1546 | aspartate | ARA_LEAF | p-PcUBI | GC | 51 | 102 |
| | targeted | | | | | | | |
| 54804 | non- | Sll1546 | phenylalanine | ARA_LEAF | p-PcUBI | GC | 27 | 53 |
| | targeted | | | | | | | |
| 54804 | non- | Sll1546 | serine | ARA_LEAF | p-PcUBI | GC | 25 | 45 |
| | targeted | | | | | | | |
| 85743 | mitochondrial | Sll1598 | aspartate | ARA_LEAF | p-PcUBI | GC | 55 | 138 |
| 85743 | mitochondrial | Sll1598 | phenyl- | ARA_LEAF | p-PcUBI | GC | 26 | 113 |
| | | | alanine | | | | | |
| 55379 | non- | Sll1761 | serine | ARA_LEAF | p-PcUBI | GC | 23 | 63 |
| | targeted | | | | | | | |
| 55379 | non- | Sll1761 | tyrosine | ARA_LEAF | p-PcUBI | GC | 39 | 141 |
| | targeted | | | | | | | |
| 85808 | mitochondrial | Sll1815 | alanine | ARA_LEAF | p-PcUBI | GC | 31 | 483 |
| 85808 | mitochondrial | Sll1815 | citrulline | ARA_LEAF | p-PcUBI | LC | 39 | 122 |
| 85808 | mitochondrial | Sll1815 | glycine | ARA_LEAF | p-PcUBI | GC | 118 | 238 |
| 85808 | mitochondrial | Sll1815 | serine | ARA_LEAF | p-PcUBI | GC | 55 | 83 |
| 85808 | mitochondrial | Sll1815 | tyrosine | ARA_LEAF | p-PcUBI | GC | 39 | 88 |
| 86447 | plastidic | Sll1848 | glycine | ARA_LEAF | p-PcUBI | GC | 48 | 205 |
| 86447 | plastidic | Sll1848 | phenyl- | ARA_LEAF | p-PcUBI | GC | 26 | 318 |
| | | | alanine | | | | | |
| 86447 | plastidic | Sll1848 | serine | ARA_LEAF | p-PcUBI | GC | 28 | 319 |
| 11471 | mitochondrial | Sll1917 | aspartate | ARA_LEAF | p-PcUBI | GC | 64 | 265 |
| 11471 | mitochondrial | Sll1917 | citrulline | ARA_LEAF | p-PcUBI | LC | 41 | 71 |
| 11471 | mitochondrial | Sll1917 | phenyl- | ARA_LEAF | p-PcUBI | GC | 32 | 56 |
| | | | alanine | | | | | |
| 11471 | mitochondrial | Sll1917 | serine | ARA_LEAF | p-PcUBI | GC | 28 | 69 |
| 11471 | mitochondrial | Sll1917 | tyrosine | ARA_LEAF | p-PcUBI | GC | 35 | 60 |
| 55385 | non- | Sll1920 | aspartate | ARA_LEAF | p-PcUBI | GC | 52 | 204 |
| | targeted | | | | | | | |
| 55385 | mitochondrial | Sll1920 | aspartate | ARA_LEAF | p-PcUBI | GC | 65 | 142 |
| 86508 | plastidic | Sll2003 | glycine | ARA_LEAF | p-PcUBI | GC | 47 | 67 |
| 86540 | mitochondrial | Slr0239 | phenyl- | ARA_LEAF | p-PcUBI | LC | 41 | 279 |
| | | | alanine | | | | | |
| 86540 | mitochondrial | Slr0239 | tyrosine | ARA_LEAF | p-PcUBI | LC | 54 | 214 |
| 86820 | plastidic | Slr0370 | citrulline | ARA_LEAF | p-PcUBI | LC | 38 | 90 |
| 56153 | plastidic | Slr0597 | alanine | ARA_LEAF | p-PcUBI | GC | 28 | 38 |
| 56153 | plastidic | Slr0597 | serine | ARA_LEAF | p-PcUBI | GC | 27 | 104 |
| 56153 | plastidic | Slr0597 | 5-oxo- | ARA_LEAF | p-PcUBI | GC | 40 | 96 |
| | | | proline | | | | | |
| 56894 | mitochondrial | Slr0710 | asparagine | ARA_LEAF | p-PcUBI | GC | 49 | 215 |
| 56894 | mitochondrial | Slr0710 | phenyl- | ARA_LEAF | p-PcUBI | GC | 26 | 99 |
| | | | alanine | | | | | |
| 56894 | mitochondrial | Slr0710 | tyrosine | ARA_LEAF | p-PcUBI | GC | 37 | 80 |
| 87397 | plastidic | Slr0721 | phenyl- | ARA_LEAF | p-PcUBI | GC | 30 | 107 |
| | | | alanine | | | | | |
| 57235 | plastidic | Slr0739 | alanine | ARA_LEAF | p-PcUBI | GC | 19 | 56 |
| 57235 | plastidic | Slr0739 | asparagine | ARA_LEAF | p-PcUBI | GC | 155 | 1305 |
| 57235 | plastidic | Slr0739 | phenyl- | ARA_LEAF | p-PcUBI | GC | 44 | 71 |
| | | | alanine | | | | | |
| 57235 | plastidic | Slr0739 | serine | ARA_LEAF | p-PcUBI | GC | 52 | 166 |
| 57235 | plastidic | Slr0739 | tyrosine | ARA_LEAF | p-PcUBI | GC | 66 | 82 |
| 57235 | plastidic | Slr0739 | 5-oxo- | ARA_LEAF | p-PcUBI | GC | 33 | 130 |
| | | | proline | | | | | |
| 57679 | mitochondrial | Slr0782 | phenyl- | ARA_LEAF | p-PcUBI | LC | 34 | 38 |
| | | | alanine | | | | | |
| 87610 | mitochondrial | Slr0862 | serine | ARA_LEAF | p-PcUBI | GC | 23 | 45 |
| 87655 | plastidic | Slr0966 | tyrosine | ARA_LEAF | p-PcUBI | GC | 43 | 77 |
| 87853 | mitochondrial | Slr1133 | ornithine | ARA_LEAF | p-PcUBI | GC | 69 | 390 |
| 87853 | mitochondrial | Slr1133 | serine | ARA_LEAF | p-PcUBI | GC | 26 | 69 |
| 58058 | non- | Slr1269 | asparagine | ARA_LEAF | p-PcUBI | GC | 45 | 93 |
| | targeted | | | | | | | |
| 58668 | mitochondrial | Slr1492 | aspartate | ARA_LEAF | p-PcUBI | GC | 48 | 139 |
| 58668 | mitochondrial | Slr1492 | phenyl- | ARA_LEAF | p-PcUBI | GC | 31 | 35 |
| | | | alanine | | | | | |
| 88158 | mitochondrial | Slr1509 | phenyl- | ARA_LEAF | p-PcUBI | GC | 43 | 94 |
| | | | alanine | | | | | |
| 88158 | mitochondrial | Slr1509 | tyrosine | ARA_LEAF | p-PcUBI | GC | 67 | 86 |
| 88271 | non- | Slr1511 | phenyl- | ARA_LEAF | p-PcUBI | GC | 30 | 31 |
| | targeted | | alanine | | | | | |
| 88271 | non- | Slr1511 | serine | ARA_LEAF | p-PcUBI | GC | 30 | 71 |
| | targeted | | | | | | | |
| 12070 | mitochondrial | Slr1655 | phenyl- | ARA_LEAF | p-PcUBI | GC | 28 | 60 |
| | | | alanine | | | | | |
| 12070 | mitochondrial | Slr1655 | serine | ARA_LEAF | p-PcUBI | GC | 33 | 83 |
| 12070 | mitochondrial | Slr1655 | tyrosine | ARA_LEAF | p-PcUBI | GC | 35 | 104 |
| 58731 | plastidic | Slr1739 | phenyl- | ARA_LEAF | p-PcUBI | GC | 47 | 192 |
| | | | alanine | | | | | |
| 58731 | plastidic | Slr1739 | serine | ARA_LEAF | p-PcUBI | GC | 59 | 99 |
| 58731 | plastidic | Slr1739 | tyrosine | ARA_LEAF | p-PcUBI | GC | 73 | 163 |
| 58731 | plastidic | Slr1739 | 5-oxo- | ARA_LEAF | p-PcUBI | GC | 46 | 128 |
| | | | proline | | | | | |
| 58751 | mitochondrial | Slr1742 | asparagine | ARA_LEAF | p-PcUBI | GC | 45 | 188 |
| 12140 | mitochondrial | Slr1791 | citrulline | ARA_LEAF | p-PcUBI | LC | 32 | 95 |
| 59041 | non- | Slr1882 | asparagine | ARA_LEAF | p-PcUBI | GC | 65 | 112 |
| | targeted | | | | | | | |
| 12341 | plastidic | Slr2072 | homo- | ARA_LEAF | p-PcUBI | GC | 40 | 86 |
| | | | serine | | | | | |
| 12341 | mitochondrial | Slr2072 | tyrosine | ARA_LEAF | p-PcUBI | LC | 30 | 65 |
| 59370 | plastidic | Slr2124 | alanine | ARA_LEAF | p-PcUBI | GC | 19 | 44 |
| 59370 | plastidic | Slr2124 | phenyl- | ARA_LEAF | p-PcUBI | LC | 36 | 69 |
| | | | alanine | | | | | |
| 59370 | plastidic | Slr2124 | tyrosine | ARA_LEAF | p-PcUBI | GC | 36 | 87 |
| 12698 | non- | TTC0019 | phenyl- | ARA_LEAF | p-PcUBI | GC | 31 | 624 |
| | targeted | | alanine | | | | | |
| 12698 | non- | TTC0019 | tyrosine | ARA_LEAF | p-PcUBI | GC | 157 | 378 |
| | targeted | | | | | | | |
| 12698 | non- | TTC0019 | 5-oxo- | ARA_LEAF | p-PcUBI | GC | 36 | 277 |
| | targeted | | proline | | | | | |
| 88526 | non- | TTC0239 | tyrosine | ARA_LEAF | p-PcUBI | GC | 35 | 136 |
| | targeted | | | | | | | |
| 61070 | non- | TTC0337 | asparagine | ARA_LEAF | p-PcUBI | GC | 44 | 216 |
| | targeted | | | | | | | |
| 61532 | non- | TTC0768 | tyrosine | ARA_LEAF | p-PcUBI | LC | 51 | 97 |
| | targeted | | | | | | | |
| 88875 | non- | TTC0881 | alanine | ARA_LEAF | p-PcUBI | GC | 25 | 40 |
| | targeted | | | | | | | |
| 88875 | non- | TTC0881 | serine | ARA_LEAF | p-PcUBI | GC | 27 | 84 |
| | targeted | | | | | | | |
| 61553 | non- | TTC0917 | alanine | ARA_LEAF | p-PcUBI | GC | 20 | 37 |
| | targeted | | | | | | | |
| 61553 | non- | TTC0917 | serine | ARA_LEAF | p-PcUBI | GC | 23 | 35 |
| | targeted | | | | | | | |
| 61723 | non- | TTC1193 | phenyl- | ARA_LEAF | p-PcUBI | GC | 33 | 133 |
| | targeted | | alanine | | | | | |
| 61723 | non- | TTC1193 | tyrosine | ARA_LEAF | p-PcUBI | LC | 53 | 103 |
| | targeted | | | | | | | |
| 62079 | non- | TTC1386 | alanine | ARA_LEAF | p-PcUBI | GC | 54 | 91 |
| | targeted | | | | | | | |
| 62079 | non- | TTC1386 | glycine | ARA_LEAF | p-PcUBI | GC | 230 | 978 |
| | targeted | | | | | | | |
| 62079 | non- | TTC1386 | phenyl- | ARA_LEAF | p-PcUBI | GC | 45 | 528 |
| | targeted | | alanine | | | | | |
| 62079 | non- | TTC1386 | serine | ARA_LEAF | p-PcUBI | GC | 23 | 117 |
| | targeted | | | | | | | |
| 62079 | non- | TTC1386 | tyrosine | ARA_LEAF | p-PcUBI | GC | 39 | 829 |
| | targeted | | | | | | | |
| 12974 | non- | TTC1550 | alanine | ARA_LEAF | p-PcUBI | GC | 45 | 86 |
| | targeted | | | | | | | |
| 12974 | non- | TTC1550 | phenyl- | ARA_LEAF | p-PcUBI | GC | 54 | 266 |
| | targeted | | alanine | | | | | |
| 12974 | non- | TTC1550 | serine | ARA_LEAF | p-PcUBI | GC | 23 | 104 |
| | targeted | | | | | | | |
| 12974 | non- | TTC1550 | tyrosine | ARA_LEAF | p-PcUBI | GC | 35 | 213 |
| | targeted | | | | | | | |
| 12974 | non- | TTC1550 | 5-oxo- | ARA_LEAF | p-PcUBI | GC | 47 | 171 |
| | targeted | | proline | | | | | |
| 62160 | non- | TTC1918 | aspartate | ARA_LEAF | p-PcUBI | GC | 50 | 141 |
| | targeted | | | | | | | |
| 62160 | non- | TTC1918 | serine | ARA_LEAF | p-PcUBI | GC | 24 | 44 |
| | targeted | | | | | | | |
| 62244 | non- | XM_473199 | aspartate | ARA_LEAF | p-PcUBI | GC | 53 | 91 |
| | targeted | | | | | | | |
| 62244 | non- | XM_473199 | phenyl- | ARA_LEAF | p-PcUBI | GC | 31 | 44 |
| | targeted | | alanine | | | | | |
| 62244 | non- | XM_473199 | tyrosine | ARA_LEAF | p-PcUBI | GC | 35 | 47 |
| | targeted | | | | | | | |
| 62244 | non- | XM_473199 | 5-oxo- | ARA_LEAF | p-PcUBI | GC | 32 | 86 |
| | targeted | | proline | | | | | |
| 62524 | non- | Ybl021c | glycine | ARA_LEAF | Big35S | GC | 42 | 325 |
| | targeted | | | | | | | |
| 62524 | non- | Ybl021c | phenyl- | ARA_LEAF | Big35S | LC | 31 | 40 |
| | targeted | | alanine | | | | | |
| 62717 | non- | Ybr160w | aspartate | ARA_LEAF | Big35S | GC | 53 | 86 |
| | targeted | | | | | | | |
| 62717 | non- | Ybr160w | tyrosine | ARA_LEAF | Big35S | GC | 64 | 100 |
| | targeted | | | | | | | |
| 88879 | plastidic | Ybr249c | phenyl- | ARA_LEAF | p-Super | GC | 210 | 5005 |
| | | | alanine | | | | | |
| 88879 | plastidic | Ybr249c | tyrosine | ARA_LEAF | p-Super | GC | 159 | 2254 |
| 89317 | non- | Ybr296c | 5-oxo- | ARA_LEAF | p-PcUBI | GC | 33 | 51 |
| | targeted | | proline | | | | | |
| 89395 | plastidic | Ycl064c | alanine | ARA_LEAF | p-Super | GC | 23 | 51 |
| 89395 | plastidic | Ycl064c | glycine | ARA_LEAF | p-Super | GC | 36 | 106 |
| 14275 | plastidic | Ydl159w | aspartate | ARA_LEAF | p-Super | GC | 70 | 87 |
| 89483 | plastidic | Ydl188c | homo- | ARA_LEAF | p-Super | GC | 36 | 75 |
| | | | serine | | | | | |
| 89483 | plastidic | Ydl188c | phenyl- | ARA_LEAF | p-Super | GC | 28 | 41 |
| | | | alanine | | | | | |
| 89936 | plastidic | Ydl209c | 5-oxo- | ARA_LEAF | p-Super | GC | 46 | 97 |
| | | | proline | | | | | |
| 89973 | plastidic | Ydr007w | phenyl- | ARA_LEAF | p-Super | GC | 31 | 50 |
| | | | alanine | | | | | |
| 63544 | plastidic | Ydr046c | tyrosine | ARA_LEAF | p-Super | LC | 39 | 95 |
| 90103 | plastidic | Ydr183w | serine | ARA_LEAF | p-Super | GC | 25 | 80 |
| 90159 | plastidic | Ydr273w | aspartate | ARA_LEAF | p-Super | GC | 23 | 52 |
| 90159 | plastidic | Ydr273w | citrulline | ARA_LEAF | p-Super | LC | 34 | 36 |
| 90165 | non- | Ydr507c | aspartate | ARA_LEAF | Big35S | GC | 64 | 78 |
| | targeted | | | | | | | |
| 63745 | plastidic | Yer014w | asparagine | ARA_LEAF | p-PcUBI | GC | 46 | 159 |
| 63745 | plastidic | Yer014w | aspartate | ARA_LEAF | p-PcUBI | GC | 48 | 84 |
| 63745 | plastidic | Yer014w | serine | ARA_LEAF | p-PcUBI | GC | 25 | 82 |
| 63803 | plastidic | Yer106w | citrulline | ARA_LEAF | p-Super | LC | 34 | 85 |
| 63807 | non- | Yfl016c | serine | ARA_LEAF | Big35S | GC | 23 | 57 |
| | targeted | | | | | | | |
| 63807 | non- | Yfl016c | tyrosine | ARA_LEAF | Big35S | LC | 44 | 182 |
| | targeted | | | | | | | |
| 64144 | non- | Yfl019c | aspartate | ARA_LEAF | Big35S | GC | 103 | 305 |
| | targeted | | | | | | | |
| 64144 | non- | Yfl019c | phenyl- | ARA_LEAF | Big35S | GC | 34 | 185 |
| | targeted | | alanine | | | | | |
| 90189 | plastidic | Yfl030w | alanine | ARA_LEAF | p-Super | GC | 29 | 33 |
| 90189 | plastidic | Yfl030w | glycine | ARA_LEAF | p-Super | GC | 34 | 99 |
| 64148 | plastidic | Yfl054c | phenylalanine | ARA_LEAF | p-Super | GC | 36 | 39 |
| 64148 | plastidic | Yfl054c | serine | ARA_LEAF | p-Super | GC | 23 | 51 |
| 90278 | plastidic | Ygl096w | 5-oxo- | ARA_LEAF | p-Super | GC | 34 | 133 |
| | | | proline | | | | | |
| 64177 | non- | Ygl237c | tyrosine | ARA_LEAF | Big35S | LC | 45 | 166 |
| | targeted | | | | | | | |
| 64315 | plastidic | Ygr221c | aspartate | ARA_LEAF | p-Super | GC | 50 | 98 |
| 64315 | plastidic | Ygr221c | 5-oxo- | ARA_LEAF | p-Super | GC | 40 | 44 |
| | | | proline | | | | | |
| 14715 | plastidic | Yhl013c | phenyl- | ARA_LEAF | p-Super | GC | 35 | 410 |
| | | | alanine | | | | | |
| 90284 | non- | Yhr006w | Phenyl- | ARA_LEAF | Big35S | GC | 32 | 67 |
| | targeted | | alanine | | | | | |
| 90284 | non- | Yhr006w | tyrosine | ARA_LEAF | Big35S | GC | 39 | 129 |
| | targeted | | | | | | | |
| 64546 | plastidic | Yhr207c | aspartate | ARA_LEAF | p-Super | GC | 52 | 81 |
| 64563 | plastidic | Yil074c | citrulline | ARA_LEAF | p-Super | LC | 37 | 81 |
| 64563 | plastidic | Yil074c | glycine | ARA_LEAF | p-Super | GC | 57 | 94 |
| 90306 | plastidic | Yir038c | aspartate | ARA_LEAF | p-Super | GC | 49 | 72 |
| 90306 | plastidic | Yir038c | citrulline | ARA_LEAF | p-Super | LC | 35 | 43 |
| 64964 | plastidic | Yjl073w | aspartate | ARA_LEAF | p-Super | GC | 52 | 62 |
| 14843 | non- | Yjr130c | phenyl- | ARA_LEAF | Big35S | GC | 26 | 48 |
| | targeted | | alanine | | | | | |
| 90409 | plastidic | Yjr148w | citrulline | ARA_LEAF | p-Super | LC | 31 | 67 |
| 66274 | non- | Yjr153w | aspartate | ARA_LEAF | p-PcUBI | GC | 59 | 149 |
| | targeted | | | | | | | |
| 66274 | non- | Yjr153w | phenyl- | ARA_LEAF | p-PcUBI | LC | 34 | 51 |
| | targeted | | alanine | | | | | |
| 90602 | plastidic | YKL038W | alanine | ARA_LEAF | p-PcUBI | GC | 20 | 45 |
| 90602 | plastidic | YKL038W | aspartate | ARA_LEAF | p-PcUBI | GC | 59 | 125 |
| 90602 | plastidic | YKL038W | serine | ARA_LEAF | p-PcUBI | GC | 27 | 57 |
| 90615 | non- | Ylr027c | glycine | ARA_LEAF | Big35S | GC | 41 | 69 |
| | targeted | | | | | | | |
| 91045 | plastidic | Ylr043c | serine | ARA_LEAF | p-Super | GC | 29 | 110 |
| 91045 | plastidic | Ylr043c | tyrosine | ARA_LEAF | p-Super | LC | 40 | 94 |
| 91659 | plastidic | Yml008c | alanine | ARA_LEAF | p-PcUBI | GC | 21 | 52 |
| 91659 | plastidic | Yml008c | glycine | ARA_LEAF | p-PcUBI | GC | 40 | 96 |
| 91659 | plastidic | Yml008c | homo- | ARA_LEAF | p-PcUBI | GC | 30 | 46 |
| | | | serine | | | | | |
| 91659 | plastidic | Yml008c | 5-oxo- | ARA_LEAF | p-PcUBI | GC | 32 | 56 |
| | | | proline | | | | | |
| 91781 | plastidic | Yml083c | alanine | ARA_LEAF | p-Super | GC | 22 | 31 |
| 91785 | plastidic | Yml123c | phenyl- | ARA_LEAF | p-Super | LC | 32 | 57 |
| | | | alanine | | | | | |
| 91785 | plastidic | Yml123c | tyrosine | ARA_LEAF | p-Super | LC | 44 | 66 |
| 91958 | plastidic | Ymr013c | tyrosine | ARA_LEAF | p-Super | LC | 41 | 93 |
| 91973 | plastidic | Ymr120c | glycine | ARA_LEAF | p-Super | GC | 37 | 39 |
| 92274 | plastidic | Ymr150c | phenyl- | ARA_LEAF | p-Super | GC | 25 | 52 |
| | | | alanine | | | | | |
| 92325 | plastidic | Ynl086w | homo- | ARA_LEAF | p-Super | GC | 24 | 37 |
| | | | serine | | | | | |
| 92339 | plastidic | Ynl101w | tyrosine | ARA_LEAF | p-Super | GC | 33 | 43 |
| 92391 | plastidic | Ynl277w | homo- | ARA_LEAF | p-PcUBI | GC | 214 | 1243 |
| | | | serine | | | | | |
| 92510 | plastidic | Yol130w | alanine | ARA_LEAF | p-Super | GC | 21 | 33 |
| 15179 | plastidic | Yol160w | aspartate | ARA_LEAF | p-Super | GC | 57 | 62 |
| 67968 | non- | Yor233w | citrulline | ARA_LEAF | Big35S | LC | 36 | 92 |
| | targeted | | | | | | | |
| 92540 | plastidic | Yor244w | phenyl- | ARA_LEAF | p-Super | GC | 44 | 423 |
| | | | alanine | | | | | |
| 92540 | plastidic | Yor244w | tyrosine | ARA_LEAF | p-Super | GC | 53 | 85 |
| 92616 | non- | Yor245c | homo- | ARA_LEAF | Big35S | GC | 29 | 61 |
| | targeted | | serine | | | | | |
| 92616 | non- | Yor245c | serine | ARA_LEAF | Big35S | GC | 24 | 82 |
| | targeted | | | | | | | |
| 92616 | non- | Yor245c | 5-oxo- | ARA_LEAF | Big35S | GC | 35 | 145 |
| | targeted | | proline | | | | | |
| 92668 | non- | Ypl028w | glycine | ARA_LEAF | Big35S | GC | 43 | 82 |
| | targeted | | | | | | | |
| 93091 | non- | Ypr001w | serine | ARA_LEAF | Big35S | GC | 23 | 31 |
| | targeted | | | | | | | |
| 93218 | non- | Ypr138c | aspartate | ARA_SEED_2 | p-USP | GC | 42 | 217 |
| | targeted | | | | | | | |
| 68413 | non- | Zm_4842_BE510522 | phenyl- | ARA_LEAF | p-PcUBI | GC | 29 | 242 |
| | targeted | | alanine | | | | | |
| 68413 | non- | Zm_4842_BE510522 | serine | ARA_LEAF | p-PcUBI | GC | 28 | 95 |
| | targeted | | | | | | | |
| 68413 | non- | Zm_4842_BE510522 | tyrosine | ARA_LEAF | p-PcUBI | GC | 67 | 154 |
| | targeted | | | | | | | |
| 68413 | non- | Zm_4842_BE510522 | 5-oxo- | ARA_LEAF | p-PcUBI | GC | 33 | 173 |
| | targeted | | proline | | | | | |

[28851] Column 1 shows the SEQ ID NO, Column 2 shows the expression type (targeted or non-targeted), Column 3 shows the “gene name” (locus), Column 4 shows the metabolite analyzed, Column 5 indicates the A. thaliana source tissue analyzed, Column 6 indicates the used promoter for expression, Column 7 indicates the analytical method. Columns 8 and 9 show the minumum and the maximum increase of the analyzed metabolite (in percent) in comparison to the wild type (=ratio_by_weight, given as percent increase).

[28852] When the analyses were repeated independently, all results proved to be significant.

[28853] [0505.1.1.3] to [0515.1.1.3] for the disclosure of these paragraphs see [0505.1.1.1] to [0515.1.1.1] above.

[28854] In a further embodiment, the present invention relates in paragraphs

[28855] [0000.1.1.4] to [0514.1.4.4].to a further process for the production of the fine chemical threonine as defined below and corresponding embodiments as described herein as follows.

[28856] [0001.1.1.4] to [0006.1.1.4] for the disclosure of these paragraphs see [0001.1.1.1] to [0006.1.1.1] above.

[28857] Following the approach of deregulating specific enzymes in the amino acid biosynthetic pathway an increase of the levels of free threonine is disclosed in U.S. Pat. No. 5,942,660 which is achieved by overexpression of either a wild-type or deregulated aspartate kinase, homoserine dehydrogenase or threonine synthase.

[28858] for the disclosure of this paragraph see [0008.1.1.1] above.

[28859] As described above, the essential amino acids are necessary for humans and many mammals, for example for livestock. Threonine is an important constituent in many body proteins and is necessary for the formation of tooth enamel protein, collagen and elastin, which both needed for healthy skin and wound healing. It is a precursor to the amino acids glycine and serine. It acts as a lipotropic in controlling fat build-up in the liver. Threonine is an immune stimulant because it promotes thymus growth and activity. It is a component of digestive enzymes and immune secretions from the gut, particularly mucins. It has been used as a supplement to help alleviate anxiety and some cases of depression. In animal production, as an important essential amino acid, threonine is normally the second limiting amino acid for pigs and the third limiting amino acid for chicken (Gallus gallus f. domestica, e.g. laying hen or broiler).

[28860] [0010.1.1.4] to [0011.1.1.4] for the disclosure of these paragraphs see [0010.1.1.1] to [0011.1.1.1] above.

[28861] It is an object of the present invention to develop an inexpensive process for the synthesis of threonine, especially L-threonine. Threonine is with methionine and lysine (depending on the organism) one of the amino acids, which are most frequently limiting.

[28862] for the disclosure of this paragraph see [0013.1.1.1] above

[28863] Accordingly, in a first embodiment, the invention relates to a process for the production of threonine, or, in other words, of the “fine chemical” or “fine chemical of the invention”.

[28864] The terms “fine chemical of the invention”, “fine chemical” or “the fine chemical” are used herein equally and relate in context of the paragraphs or sections [0014.1.4.4] to [0514.1.1.4] essentially to the metabolite or the metabolites indicated in column 7, application no. 4 of Tables I, II and IV in the respective line.

[28865] Further, the term “in context of any of the paragraphs [0014.1.4.4] to [0514.1.1.4]” as used herein means that for any of said paragraphs [0014.1.4.4] to [0514.1.1.4] the term “the fine chemical” is understood to follow the definition of paragraphs or sections [0014.1.4.4] and [0015.1.4.4], independently whether it refers to any other paragraph or not and whether the reference recites the term “fine chemical” in an other context.

[28866] Thus, in cases where one or more paragraphs or sections are incorporated by reference into any of the present paragraphs [0014.1.4.4] to [0514.1.1.4], e.g. by usage of the term “see paragraph” or the term “for the disclosure of this paragraph see the disclosure of paragraph” or the term “incorporated by reference” or a corresponding term, the incorporated paragraph, section or term “the fine chemical” is also understood to have the meaning according to the definition of paragraph [0014.1.4.4] and [0015.1.4.4].

[28867] Accordingly, in one embodiment, the term “fine chemical of the invention”, “fine chemical” or “the fine chemical” as used herein (alone or in combination, like in FCRP) means “threonine” in context of the nucleic acid or polypeptide sequences listed in the respective same line of any one of Tables I to IV of application no. 4 and indicating in column 7 the metabolite “threonine”. In one embodiment, the term threonine or the term “fine chemical” mean in context of the paragraphs or sections [0014.1.4.4] to [0514.1.1.4] at least one chemical compound with an activity of the above mentioned threonine, respectively.

[28868] Accordingly, in one embodiment, the terms “fine chemical of the invention”, “fine chemical” or “the fine chemical” mean in context of any of the paragraphs [0014.1.4.4] to [0514.1.1.4] threonine, preferably the L-enantiomer of threonine, its salts, ester or amides in free form or bound form. In a preferred embodiment, the term “the fine chemical” means threonine or its salts, in free form or bound form. In a preferred embodiment, the term “the fine chemical” means the L-enantiomer of threonine. On the other hand in case “threonine” is stated it means threonine itself, its salts, ester or amides in free form or bound form, preferably the L-enantiomer of threonine, its salts, ester or amides in free form or bound to proteins. In a preferred embodiment “threonine” means the Lenantiomer of threonine in free form. In another preferred embodiment “threonine” means the Lenantiomer of threonine in bound form.

[28869] Further, the term “in context of any of the paragraphs [0014.1.4.4] to [0514.1.1.4]” as used herein means that for any of said paragraphs [0014.1.4.4] to [0514.1.4.4] the term “the fine chemical” is understood to follow the definition of section [0014.1.4.4] or section [0015.1.4.4], independently whether it refers to any other paragraph or not and whether the reference recites the term “fine chemical” in an other context.

[28870] Thus, in cases where one or more paragraphs or sections are incorporated by reference into any of the present paragraphs [0014.1.4.4] to [0514.1.1.4], e.g. by usage of the term “see paragraph” or the term “for the disclosure of this paragraph see the disclosure of paragraph” or the term “incorporated by reference” or a corresponding term, the incorporated paragraph, section or term “the fine chemical” is also understood to have the meaning according to this definition of this paragraph [0015.1.4.4].

[28871] Further, the term “fine chemicals” as used herein relates to compositions comprising said fine chemical(s), i.e. comprising threonine, respectively.

[28872] Accordingly, the present invention relates to a process for the production of threonine, which comprises
[28873] (a) increasing or generating one or more activities selected from the group consisting of 47266012-protein in a non-human organism or a part thereof, preferably a microorganism, a plant cell, a plant or a part thereof, as compared to a corresponding non-transformed wild type non-human organism or a part thereof; and
[28874] (b) growing the non-human organism or a part thereof under conditions which permit the production of threonine or a composition comprising threonine in said non-human organism or in the culture medium surrounding said non-human organism.

[28875] Accordingly, the present invention relates to a process for the production of threonine, which comprises
[28876] (a) increasing or generating one or more activities selected from the group consisting of 49747384_SOYBEAN-protein in a non-human organism or a part thereof, preferably a microorganism, a plant cell, a plant or a part thereof, as compared to a corresponding non-transformed wild type non-human organism or a part thereof; and
[28877] (b) growing the non-human organism or a part thereof under conditions which permit the production of threonine or a composition comprising threonine in said non-human organism or in the culture medium surrounding said non-human organism.

[28878] Accordingly, the present invention relates to a process for the production of threonine, which comprises
[28879] (a) increasing or generating one or more activities selected from the group consisting of glucose-6-phosphate 1-dehydrogenase in a non-human organism or a part thereof, preferably a microorganism, a plant cell, a plant or a part thereof, as compared to a corresponding non-transformed wild type non-human organism or a part thereof; and
[28880] (b) growing the non-human organism or a part thereof under conditions which permit the production of threonine or a composition comprising threonine in said non-human organism or in the culture medium surrounding said non-human organism.

[28881] Accordingly, the present invention relates to a process for the production of threonine, which comprises
[28882] (a) increasing or generating one or more activities selected from the group consisting of At1g09680-protein in a non-human organism or a part thereof, preferably a microorganism, a plant cell, a plant or a part thereof, as compared to a corresponding non-transformed wild type non-human organism or a part thereof; and
[28883] (b) growing the non-human organism or a part thereof under conditions which permit the production of threonine or a composition comprising threonine in said non-human organism or in the culture medium surrounding said non-human organism.

[28884] Accordingly, the present invention relates to a process for the production of threonine, which comprises
[28885] (a) increasing or generating one or more activities selected from the group consisting of bifunctional aspartokinase/homoserine dehydrogenase in a non-human organism or a part thereof, preferably a microorganism, a plant cell, a plant or a part thereof, as compared to a corresponding non-transformed wild type non-human organism or a part thereof; and
[28886] (b) growing the non-human organism or a part thereof under conditions which permit the production of threonine or a composition comprising threonine in said non-human organism or in the culture medium surrounding said non-human organism.

[28887] Accordingly, the present invention relates to a process for the production of threonine, which comprises
[28888] (a) increasing or generating one or more activities selected from the group consisting of eukaryotic translation initiation factor 5 in a non-human organism or a part thereof, preferably a microorganism, a plant cell, a plant or a part thereof, as compared to a corresponding non-transformed wild type non-human organism or a part thereof; and
[28889] (b) growing the non-human organism or a part thereof under conditions which permit the production of threonine or a composition comprising threonine in said non-human organism or in the culture medium surrounding said non-human organism.

[28890] Accordingly, the present invention relates to a process for the production of threonine, which comprises
[28891] (a) increasing or generating one or more activities selected from the group consisting of transcriptional regulator in a non-human organism or a part thereof, preferably a microorganism, a plant cell, a plant or a part thereof, as compared to a corresponding non-transformed wild type non-human organism or a part thereof; and
[28892] (b) growing the non-human organism or a part thereof under conditions which permit the production of threonine or a composition comprising threonine in said non-human organism or in the culture medium surrounding said non-human organism.

[28893] Accordingly, the present invention relates to a process for the production of threonine, which comprises
[28894] (a) increasing or generating one or more activities selected from the group consisting of protein phosphatase in a non-human organism or a part thereof, preferably a microorganism, a plant cell, a plant or a part thereof, as compared to a corresponding non-transformed wild type non-human organism or a part thereof; and
[28895] (b) growing the non-human organism or a part thereof under conditions which permit the production of threonine or a composition comprising threonine in said non-human organism or in the culture medium surrounding said non-human organism.

[28896] Accordingly, the present invention relates to a process for the production of threonine, which comprises
[28897] (a) increasing or generating one or more activities selected from the group consisting of protein kinase in a non-human organism or a part thereof, preferably a microorganism, a plant cell, a plant or a part thereof, as compared to a corresponding non-transformed wild type non-human organism or a part thereof; and
[28898] (b) growing the non-human organism or a part thereof under conditions which permit the production of threonine or a composition comprising threonine in said non-human organism or in the culture medium surrounding said non-human organism.

[28899] Accordingly, the present invention relates to a process for the production of threonine, which comprises
[28900] (a) increasing or generating one or more activities selected from the group consisting of protein phosphatase in a non-human organism or a part thereof, preferably a microorganism, a plant cell, a plant or a part thereof, as compared to a corresponding non-transformed wild type non-human organism or a part thereof; and
[28901] (b) growing the non-human organism or a part thereof under conditions which permit the production of threonine or a composition comprising threonine in said non-human organism or in the culture medium surrounding said non-human organism.

[28902] Accordingly, the present invention relates to a process for the production of threonine, which comprises
[28903] (a) increasing or generating one or more activities selected from the group consisting of protein phosphatase in a non-human organism or a part thereof, preferably a microorganism, a plant cell, a plant or a part thereof, as compared to a corresponding non-transformed wild type non-human organism or a part thereof; and
[28904] (b) growing the non-human organism or a part thereof under conditions which permit the production of threonine or a composition comprising threonine in said non-human organism or in the culture medium surrounding said non-human organism.

[28905] Accordingly, the present invention relates to a process for the production of threonine, which comprises
[28906] (a) increasing or generating one or more activities selected from the group consisting of glutaredoxin in a non-human organism or a part thereof, preferably a microorganism, a plant cell, a plant or a part thereof, as compared to a corresponding non-transformed wild type non-human organism or a part thereof; and
[28907] (b) growing the non-human organism or a part thereof under conditions which permit the production of threonine or a composition comprising threonine in said non-human organism or in the culture medium surrounding said non-human organism.

[28908] Accordingly, the present invention relates to a process for the production of threonine, which comprises
[28909] (a) increasing or generating one or more activities selected from the group consisting of CCAAT-binding transcription factor in a non-human organism or a part thereof, preferably a microorganism, a plant cell, a plant or a part thereof, as compared to a corresponding non-transformed wild type non-human organism or a part thereof; and
[28910] (b) growing the non-human organism or a part thereof under conditions which permit the production of threonine or a composition comprising threonine in said non-human organism or in the culture medium surrounding said non-human organism.

[28911] Accordingly, the present invention relates to a process for the production of threonine, which comprises
[28912] (a) increasing or generating one or more activities selected from the group consisting of protein kinase in a non-human organism or a part thereof, preferably a microorganism, a plant cell, a plant or a part thereof, as compared to a corresponding non-transformed wild type non-human organism or a part thereof; and
[28913] (b) growing the non-human organism or a part thereof under conditions which permit the production of threonine or a composition comprising threonine in said non-human organism or in the culture medium surrounding said non-human organism.

[28914] Accordingly, the present invention relates to a process for the production of threonine, which comprises
[28915] (a) increasing or generating one or more activities selected from the group consisting of glycosyl transferase in a non-human organism or a part thereof, preferably a microorganism, a plant cell, a plant or a part thereof, as compared to a corresponding non-transformed wild type non-human organism or a part thereof; and
[28916] (b) growing the non-human organism or a part thereof under conditions which permit the production of threonine or a composition comprising threonine in said non-human organism or in the culture medium surrounding said non-human organism.

[28917] Accordingly, the present invention relates to a process for the production of threonine, which comprises
[28918] (a) increasing or generating one or more activities selected from the group consisting of monthiol glutaredoxin in a non-human organism or a part thereof, preferably a microorganism, a plant cell, a plant or a part thereof, as compared to a corresponding non-transformed wild type non-human organism or a part thereof; and
[28919] (b) growing the non-human organism or a part thereof under conditions which permit the production of threonine or a composition comprising threonine in said non-human organism or in the culture medium surrounding said non-human organism.

[28920] Accordingly, the present invention relates to a process for the production of threonine, which comprises
[28921] (a) increasing or generating one or more activities selected from the group consisting of glutaredoxin in a non-human organism or a part thereof, preferably a microorganism, a plant cell, a plant or a part thereof, as compared to a corresponding non-transformed wild type non-human organism or a part thereof; and
[28922] (b) growing the non-human organism or a part thereof under conditions which permit the production of threonine or a composition comprising threonine in said non-human organism or in the culture medium surrounding said non-human organism.

[28923] Accordingly, the present invention relates to a process for the production of threonine, which comprises
[28924] (a) increasing or generating one or more activities selected from the group consisting of monothiol glutaredoxin in a non-human organism or a part thereof, preferably a microorganism, a plant cell, a plant or a part thereof, as compared to a corresponding non-transformed wild type non-human organism or a part thereof; and
[28925] (b) growing the non-human organism or a part thereof under conditions which permit the production of threonine or a composition comprising threonine in said non-human organism or in the culture medium surrounding said non-human organism.

[28926] Accordingly, the present invention relates to a process for the production of threonine, which comprises
[28927] (a) increasing or generating one or more activities selected from the group consisting of monothiol glutaredoxin in a non-human organism or a part thereof, preferably a microorganism, a plant cell, a plant or a part thereof, as compared to a corresponding non-transformed wild type non-human organism or a part thereof; and
[28928] (b) growing the non-human organism or a part thereof under conditions which permit the production of threonine or a composition comprising threonine in said non-human organism or in the culture medium surrounding said non-human organism.

[28929] Accordingly, the present invention relates to a process for the production of threonine, which comprises
[28930] (a) increasing or generating one or more activities selected from the group consisting of monothiol glutaredoxin in a non-human organism or a part thereof, preferably a microorganism, a plant cell, a plant or a part thereof, as compared to a corresponding non-transformed wild type non-human organism or a part thereof; and
[28931] (b) growing the non-human organism or a part thereof under conditions which permit the production of threonine or a composition comprising threonine in said non-human organism or in the culture medium surrounding said non-human organism.

[28932] Accordingly, the present invention relates to a process for the production of threonine, which comprises
[28933] (a) increasing or generating one or more activities selected from the group consisting of heat shock transcription factor in a non-human organism or a part thereof, preferably a microorganism, a plant cell, a plant or a part thereof, as compared to a corresponding non-transformed wild type non-human organism or a part thereof; and
[28934] (b) growing the non-human organism or a part thereof under conditions which permit the production of threonine or a composition comprising threonine in said non-human organism or in the culture medium surrounding said non-human organism.

[28935] Accordingly, the present invention relates to a process for the production of threonine, which comprises
[28936] (a) increasing or generating one or more activities selected from the group consisting of At4g32480-protein in a non-human organism or a part thereof, preferably a microorganism, a plant cell, a plant or a part thereof, as compared to a corresponding non-transformed wild type non-human organism or a part thereof; and
[28937] (b) growing the non-human organism or a part thereof under conditions which permit the production of threonine or a composition comprising threonine in said non-human organism or in the culture medium surrounding said non-human organism.

[28938] Accordingly, the present invention relates to a process for the production of threonine, which comprises
[28939] (a) increasing or generating one or more activities selected from the group consisting of cyclin D in a non-human organism or a part thereof, preferably a microorganism, a plant cell, a plant or a part thereof, as compared to a corresponding non-transformed wild type non-human organism or a part thereof; and
[28940] (b) growing the non-human organism or a part thereof under conditions which permit the production of threonine or a composition comprising threonine in said non-human organism or in the culture medium surrounding said non-human organism.

[28941] Accordingly, the present invention relates to a process for the production of threonine, which comprises
[28942] (a) increasing or generating one or more activities selected from the group consisting of calcium-dependent protein kinase in a non-human organism or a part thereof, preferably a microorganism, a plant cell, a plant or a part thereof, as compared to a corresponding non-transformed wild type non-human organism or a part thereof; and
[28943] (b) growing the non-human organism or a part thereof under conditions which permit the production of threonine or a composition comprising threonine in said non-human organism or in the culture medium surrounding said non-human organism.

[28944] Accordingly, the present invention relates to a process for the production of threonine, which comprises
[28945] (a) increasing or generating one or more activities selected from the group consisting of gibberellin 20-oxidase in a non-human organism or a part thereof, preferably a microorganism, a plant cell, a plant or a part thereof, as compared to a corresponding non-transformed wild type non-human organism or a part thereof; and
[28946] (b) growing the non-human organism or a part thereof under conditions which permit the production of threonine or a composition comprising threonine in said non-human organism or in the culture medium surrounding said non-human organism.

[28947] Accordingly, the present invention relates to a process for the production of threonine, which comprises
[28948] (a) increasing or generating one or more activities selected from the group consisting of aspartate kinase in a non-human organism or a part thereof, preferably a microorganism, a plant cell, a plant or a part thereof, as compared to a corresponding non-transformed wild type non-human organism or a part thereof; and
[28949] (b) growing the non-human organism or a part thereof under conditions which permit the production of threonine or a composition comprising threonine in said non-human organism or in the culture medium surrounding said non-human organism.

[28950] Accordingly, the present invention relates to a process for the production of threonine, which comprises
[28951] (a) increasing or generating one or more activities selected from the group consisting of At5g16650-protein in a non-human organism or a part thereof, preferably a microorganism, a plant cell, a plant or a part thereof, as compared to a corresponding non-transformed wild type non-human organism or a part thereof; and
[28952] (b) growing the non-human organism or a part thereof under conditions which permit the production of threonine or a composition comprising threonine in said non-human organism or in the culture medium surrounding said non-human organism.

[28953] Accordingly, the present invention relates to a process for the production of threonine, which comprises
[28954] (a) increasing or generating one or more activities selected from the group consisting of thioredoxin in a non-human organism or a part thereof, preferably a microorganism, a plant cell, a plant or a part thereof, as compared to a corresponding non-transformed wild type non-human organism or a part thereof; and
[28955] (b) growing the non-human organism or a part thereof under conditions which permit the production of threonine or a composition comprising threonine in said non-human organism or in the culture medium surrounding said non-human organism.

[28956] Accordingly, the present invention relates to a process for the production of threonine, which comprises
[28957] (a) increasing or generating one or more activities selected from the group consisting of protein phosphatase in a non-human organism or a part thereof, preferably a microorganism, a plant cell, a plant or a part thereof, as compared to a corresponding non-transformed wild type non-human organism or a part thereof; and
[28958] (b) growing the non-human organism or a part thereof under conditions which permit the production of threonine or a composition comprising threonine in said non-human organism or in the culture medium surrounding said non-human organism.

[28959] Accordingly, the present invention relates to a process for the production of threonine, which comprises
[28960] (a) increasing or generating one or more activities selected from the group consisting of zinc finger protein in a non-human organism or a part thereof, preferably a microorganism, a plant cell, a plant or a part thereof, as compared to a corresponding non-transformed wild type non-human organism or a part thereof; and
[28961] (b) growing the non-human organism or a part thereof under conditions which permit the production of threonine or a composition comprising threonine in said non-human organism or in the culture medium surrounding said non-human organism.

[28962] Accordingly, the present invention relates to a process for the production of threonine, which comprises
[28963] (a) increasing or generating one or more activities selected from the group consisting of CDP-diacylglycerol-serine O-phosphatidyltransferase in a non-human organism or a part thereof, preferably a microorganism, a plant cell, a plant or a part thereof, as compared to a corresponding non-transformed wild type non-human organism or a part thereof; and
[28964] (b) growing the non-human organism or a part thereof under conditions which permit the production of threonine or a composition comprising threonine in said non-human organism or in the culture medium surrounding said non-human organism.

[28965] Accordingly, the present invention relates to a process for the production of threonine, which comprises
[28966] (a) increasing or generating one or more activities selected from the group consisting of malic enzyme in a non-human organism or a part thereof, preferably a microorganism, a plant cell, a plant or a part thereof, as compared to a corresponding non-transformed wild type non-human organism or a part thereof; and
[28967] (b) growing the non-human organism or a part thereof under conditions which permit the production of threonine or a composition comprising threonine in said non-human organism or in the culture medium surrounding said non-human organism.

[28968] Accordingly, the present invention relates to a process for the production of threonine, which comprises
[28969] (a) increasing or generating one or more activities selected from the group consisting of secindependent protein translocase in a non-human organism or a part thereof, preferably a microorganism, a plant cell, a plant or a part thereof, as compared to a corresponding non-transformed wild type non-human organism or a part thereof; and
[28970] (b) growing the non-human organism or a part thereof under conditions which permit the production of threonine or a composition comprising threonine in said non-human organism or in the culture medium surrounding said non-human organism.

[28971] Accordingly, the present invention relates to a process for the production of threonine, which comprises
[28972] (a) increasing or generating one or more activities selected from the group consisting of betahydroxylase in a non-human organism or a part thereof, preferably a microorganism, a plant cell, a plant or a part thereof, as compared to a corresponding non-transformed wild type non-human organism or a part thereof; and
[28973] (b) growing the non-human organism or a part thereof under conditions which permit the production of threonine or a composition comprising threonine in said non-human organism or in the culture medium surrounding said non-human organism.

[28974] Accordingly, the present invention relates to a process for the production of threonine, which comprises
[28975] (a) increasing or generating one or more activities selected from the group consisting of elongation factor Tu in a non-human organism or a part thereof, preferably a microorganism, a plant cell, a plant or a part thereof, as compared to a corresponding non-transformed wild type non-human organism or a part thereof; and
[28976] (b) growing the non-human organism or a part thereof under conditions which permit the production of threonine or a composition comprising threonine in said non-human organism or in the culture medium surrounding said non-human organism.

[28977] Accordingly, the present invention relates to a process for the production of threonine, which comprises
[28978] (a) increasing or generating one or more activities selected from the group consisting of ABC transporter permease protein in a non-human organism or a part thereof, preferably a microorganism, a plant cell, a plant or a part thereof, as compared to a corresponding non-transformed wild type non-human organism or a part thereof; and
[28979] (b) growing the non-human organism or a part thereof under conditions which permit the production of threonine or a composition comprising threonine in said non-human organism or in the culture medium surrounding said non-human organism.

[28980] Accordingly, the present invention relates to a process for the production of threonine, which comprises
[28981] (a) increasing or generating one or more activities selected from the group consisting of acyl-CoA synthase in a non-human organism or a part thereof, preferably a microorganism, a plant cell, a plant or a part thereof, as compared to a corresponding non-transformed wild type non-human organism or a part thereof; and
[28982] (b) growing the non-human organism or a part thereof under conditions which permit the production of threonine or a composition comprising threonine in said non-human organism or in the culture medium surrounding said non-human organism.

[28983] Accordingly, the present invention relates to a process for the production of threonine, which comprises
[28984] (a) increasing or generating one or more activities selected from the group consisting of 2-oxoglutarate dehydrogenase E1 subunit in a non-human organism or a part thereof, preferably a microorganism, a plant cell, a plant or a part thereof, as compared to a corresponding non-transformed wild type non-human organism or a part thereof; and
[28985] (b) growing the non-human organism or a part thereof under conditions which permit the production of threonine or a composition comprising threonine in said non-human organism or in the culture medium surrounding said non-human organism.

[28986] Accordingly, the present invention relates to a process for the production of threonine, which comprises
[28987] (a) increasing or generating one or more activities selected from the group consisting of permease protein of peptide ABC transporter in a non-human organism or a part thereof, preferably a microorganism, a plant cell, a plant or a part thereof, as compared to a corresponding non-transformed wild type non-human organism or a part thereof; and
[28988] (b) growing the non-human organism or a part thereof under conditions which permit the production of threonine or a composition comprising threonine in said non-human organism or in the culture medium surrounding said non-human organism.

[28989] Accordingly, the present invention relates to a process for the production of threonine, which comprises
[28990] (a) increasing or generating one or more activities selected from the group consisting of GDP-mannose dehydrogenase in a non-human organism or a part thereof, preferably a microorganism, a plant cell, a plant or a part thereof, as compared to a corresponding non-transformed wild type non-human organism or a part thereof; and
[28991] (b) growing the non-human organism or a part thereof under conditions which permit the production of threonine or a composition comprising threonine in said non-human organism or in the culture medium surrounding said non-human organism.

[28992] Accordingly, the present invention relates to a process for the production of threonine, which comprises
[28993] (a) increasing or generating one or more activities selected from the group consisting of enoyl-CoA hydratase in a non-human organism or a part thereof, preferably a microorganism, a plant cell, a plant or a part thereof, as compared to a corresponding non-transformed wild type non-human organism or a part thereof; and
[28994] (b) growing the non-human organism or a part thereof under conditions which permit the production of threonine or a composition comprising threonine in said non-human organism or in the culture medium surrounding said non-human organism.

[28995] Accordingly, the present invention relates to a process for the production of threonine, which comprises
[28996] (a) increasing or generating one or more activities selected from the group consisting of transcriptional regulator in a non-human organism or a part thereof, preferably a microorganism, a plant cell, a plant or a part thereof, as compared to a corresponding non-transformed wild type non-human organism or a part thereof; and
[28997] (b) growing the non-human organism or a part thereof under conditions which permit the production of threonine or a composition comprising threonine in said non-human organism or in the culture medium surrounding said non-human organism.

[28998] Accordingly, the present invention relates to a process for the production of threonine, which comprises
[28999] (a) increasing or generating one or more activities selected from the group consisting of homoserine dehydrogenase in a non-human organism or a part thereof, preferably a microorganism, a plant cell, a plant or a part thereof, as compared to a corresponding non-transformed wild type non-human organism or a part thereof; and
[29000] (b) growing the non-human organism or a part thereof under conditions which permit the production of threonine or a composition comprising threonine in said non-human organism or in the culture medium surrounding said non-human organism.

[29001] Accordingly, the present invention relates to a process for the production of threonine, which comprises
[29002] (a) increasing or generating one or more activities selected from the group consisting of hydrolase in a non-human organism or a part thereof, preferably a microorganism, a plant cell, a plant or a part thereof, as compared to a corresponding non-transformed wild type non-human organism or a part thereof; and
[29003] (b) growing the non-human organism or a part thereof under conditions which permit the production of threonine or a composition comprising threonine in said non-human organism or in the culture medium surrounding said non-human organism.

[29004] Accordingly, the present invention relates to a process for the production of threonine, which comprises
[29005] (a) increasing or generating one or more activities selected from the group consisting of glutamate-ammonia-ligase in a non-human organism or a part thereof, preferably a microorganism, a plant cell, a plant or a part thereof, as compared to a corresponding non-transformed wild type non-human organism or a part thereof; and
[29006] (b) growing the non-human organism or a part thereof under conditions which permit the production of threonine or a composition comprising threonine in said non-human organism or in the culture medium surrounding said non-human organism.

[29007] Accordingly, the present invention relates to a process for the production of threonine, which comprises
[29008] (a) increasing or generating one or more activities selected from the group consisting of peptidase in a non-human organism or a part thereof, preferably a microorganism, a plant cell, a plant or a part thereof, as compared to a corresponding non-transformed wild type non-human organism or a part thereof; and
[29009] (b) growing the non-human organism or a part thereof under conditions which permit the production of threonine or a composition comprising threonine in said non-human organism or in the culture medium surrounding said non-human organism.

[29010] Accordingly, the present invention relates to a process for the production of threonine, which comprises
[29011] (a) increasing or generating one or more activities selected from the group consisting of Chaperone protein CIpB in a non-human organism or a part thereof, preferably a microorganism, a plant cell, a plant or a part thereof, as compared to a corresponding non-transformed wild type non-human organism or a part thereof; and
[29012] (b) growing the non-human organism or a part thereof under conditions which permit the production of threonine or a composition comprising threonine in said non-human organism or in the culture medium surrounding said non-human organism.

[29013] Accordingly, the present invention relates to a process for the production of threonine, which comprises
[29014] (a) increasing or generating one or more activities selected from the group consisting of transcriptional regulator protein in a non-human organism or a part thereof, preferably a microorganism, a plant cell, a plant or a part thereof, as compared to a corresponding non-transformed wild type non-human organism or a part thereof; and
[29015] (b) growing the non-human organism or a part thereof under conditions which permit the production of threonine or a composition comprising threonine in said non-human organism or in the culture medium surrounding said non-human organism.

[29016] Accordingly, the present invention relates to a process for the production of threonine, which comprises
[29017] (a) increasing or generating one or more activities selected from the group consisting of AX653549-protein in a non-human organism or a part thereof, preferably a microorganism, a plant cell, a plant or a part thereof, as compared to a corresponding non-transformed wild type non-human organism or a part thereof; and
[29018] (b) growing the non-human organism or a part thereof under conditions which permit the production of threonine or a composition comprising threonine in said non-human organism or in the culture medium surrounding said non-human organism.

[29019] Accordingly, the present invention relates to a process for the production of threonine, which comprises
[29020] (a) increasing or generating one or more activities selected from the group consisting of threonine synthase in a non-human organism or a part thereof, preferably a microorganism, a plant cell, a plant or a part thereof, as compared to a corresponding non-transformed wild type non-human organism or a part thereof; and
[29021] (b) growing the non-human organism or a part thereof under conditions which permit the production of threonine or a composition comprising threonine in said non-human organism or in the culture medium surrounding said non-human organism.

[29022] Accordingly, the present invention relates to a process for the production of threonine, which comprises
[29023] (a) increasing or generating one or more activities selected from the group consisting of acetolactate synthase small subunit in a non-human organism or a part thereof, preferably a microorganism, a plant cell, a plant or a part thereof, as compared to a corresponding non-transformed wild type non-human organism or a part thereof; and
[29024] (b) growing the non-human organism or a part thereof under conditions which permit the production of threonine or a composition comprising threonine in said non-human organism or in the culture medium surrounding said non-human organism.

[29025] Accordingly, the present invention relates to a process for the production of threonine, which comprises
[29026] (a) increasing or generating one or more activities selected from the group consisting of dihydrolipoamide acetyltransferase in a non-human organism or a part thereof, preferably a microorganism, a plant cell, a plant or a part thereof, as compared to a corresponding non-transformed wild type non-human organism or a part thereof; and
[29027] (b) growing the non-human organism or a part thereof under conditions which permit the production of threonine or a composition comprising threonine in said non-human organism or in the culture medium surrounding said non-human organism.

[29028] Accordingly, the present invention relates to a process for the production of threonine, which comprises
[29029] (a) increasing or generating one or more activities selected from the group consisting of glucose dehydrogenase in a non-human organism or a part thereof, preferably a microorganism, a plant cell, a plant or a part thereof, as compared to a corresponding non-transformed wild type non-human organism or a part thereof; and
[29030] (b) growing the non-human organism or a part thereof under conditions which permit the production of threonine or a composition comprising threonine in said non-human organism or in the culture medium surrounding said non-human organism.

[29031] Accordingly, the present invention relates to a process for the production of threonine, which comprises
[29032] (a) increasing or generating one or more activities selected from the group consisting of serine protease in a non-human organism or a part thereof, preferably a microorganism, a plant cell, a plant or a part thereof, as compared to a corresponding non-transformed wild type non-human organism or a part thereof; and
[29033] (b) growing the non-human organism or a part thereof under conditions which permit the production of threonine or a composition comprising threonine in said non-human organism or in the culture medium surrounding said non-human organism.

[29034] Accordingly, the present invention relates to a process for the production of threonine, which comprises
[29035] (a) increasing or generating one or more activities selected from the group consisting of acyl-CoA dehydrogenase in a non-human organism or a part thereof, preferably a microorganism, a plant cell, a plant or a part thereof, as compared to a corresponding non-transformed wild type non-human organism or a part thereof; and
[29036] (b) growing the non-human organism or a part thereof under conditions which permit the production of threonine or a composition comprising threonine in said non-human organism or in the culture medium surrounding said non-human organism.

[29037] Accordingly, the present invention relates to a process for the production of threonine, which comprises
[29038] (a) increasing or generating one or more activities selected from the group consisting of beta-galactosidase in a non-human organism or a part thereof, preferably a microorganism, a plant cell, a plant or a part thereof, as compared to a corresponding non-transformed wild type non-human organism or a part thereof; and
[29039] (b) growing the non-human organism or a part thereof under conditions which permit the production of threonine or a composition comprising threonine in said non-human organism or in the culture medium surrounding said non-human organism.

[29040] Accordingly, the present invention relates to a process for the production of threonine, which comprises
[29041] (a) increasing or generating one or more activities selected from the group consisting of 2,3-dihydroxyphenylpropionate 1,2-dioxygenase in a non-human organism or a part thereof, preferably a microorganism, a plant cell, a plant or a part thereof, as compared to a corresponding non-transformed wild type non-human organism or a part thereof; and
[29042] (b) growing the non-human organism or a part thereof under conditions which permit the production of threonine or a composition comprising threonine in said non-human organism or in the culture medium surrounding said non-human organism.

[29043] Accordingly, the present invention relates to a process for the production of threonine, which comprises
[29044] (a) increasing or generating one or more activities selected from the group consisting of ATP-binding component of a transport system in a non-human organism or a part thereof, preferably a microorganism, a plant cell, a plant or a part thereof, as compared to a corresponding non-transformed wild type non-human organism or a part thereof; and
[29045] (b) growing the non-human organism or a part thereof under conditions which permit the production of threonine or a composition comprising threonine in said non-human organism or in the culture medium surrounding said non-human organism.

[29046] Accordingly, the present invention relates to a process for the production of threonine, which comprises
[29047] (a) increasing or generating one or more activities selected from the group consisting of membrane transport protein in a non-human organism or a part thereof, preferably a microorganism, a plant cell, a plant or a part thereof, as compared to a corresponding non-transformed wild type non-human organism or a part thereof; and
[29048] (b) growing the non-human organism or a part thereof under conditions which permit the production of threonine or a composition comprising threonine in said non-human organism or in the culture medium surrounding said non-human organism.

[29049] Accordingly, the present invention relates to a process for the production of threonine, which comprises
[29050] (a) increasing or generating one or more activities selected from the group consisting of isochorismate synthase in a non-human organism or a part thereof, preferably a microorganism, a plant cell, a plant or a part thereof, as compared to a corresponding non-transformed wild type non-human organism or a part thereof; and
[29051] (b) growing the non-human organism or a part thereof under conditions which permit the production of threonine or a composition comprising threonine in said non-human organism or in the culture medium surrounding said non-human organism.

[29052] Accordingly, the present invention relates to a process for the production of threonine, which comprises
[29053] (a) increasing or generating one or more activities selected from the group consisting of sensor histidine kinase in a non-human organism or a part thereof, preferably a microorganism, a plant cell, a plant or a part thereof, as compared to a corresponding non-transformed wild type non-human organism or a part thereof; and
[29054] (b) growing the non-human organism or a part thereof under conditions which permit the production of threonine or a composition comprising threonine in said non-human organism or in the culture medium surrounding said non-human organism.

[29055] Accordingly, the present invention relates to a process for the production of threonine, which comprises
[29056] (a) increasing or generating one or more activities selected from the group consisting of succinyl-CoA synthetase beta chain in a non-human organism or a part thereof, preferably a microorganism, a plant cell, a plant or a part thereof, as compared to a corresponding non-transformed wild type non-human organism or a part thereof; and
[29057] (b) growing the non-human organism or a part thereof under conditions which permit the production of threonine or a composition comprising threonine in said non-human organism or in the culture medium surrounding said non-human organism.

[29058] Accordingly, the present invention relates to a process for the production of threonine, which comprises
[29059] (a) increasing or generating one or more activities selected from the group consisting of major facilitator superfamily transporter protein in a non-human organism or a part thereof, preferably a microorganism, a plant cell, a plant or a part thereof, as compared to a corresponding non-transformed wild type non-human organism or a part thereof; and
[29060] (b) growing the non-human organism or a part thereof under conditions which permit the production of threonine or a composition comprising threonine in said non-human organism or in the culture medium surrounding said non-human organism.

[29061] Accordingly, the present invention relates to a process for the production of threonine, which comprises
[29062] (a) increasing or generating one or more activities selected from the group consisting of phosphoanhydride phosphorylase in a non-human organism or a part thereof, preferably a microorganism, a plant cell, a plant or a part thereof, as compared to a corresponding non-transformed wild type non-human organism or a part thereof; and
[29063] (b) growing the non-human organism or a part thereof under conditions which permit the production of threonine or a composition comprising threonine in said non-human organism or in the culture medium surrounding said non-human organism.

[29064] Accordingly, the present invention relates to a process for the production of threonine, which comprises
[29065] (a) increasing or generating one or more activities selected from the group consisting of b1003-protein in a non-human organism or a part thereof, preferably a microorganism, a plant cell, a plant or a part thereof, as compared to a corresponding non-transformed wild type non-human organism or a part thereof; and
[29066] (b) growing the non-human organism or a part thereof under conditions which permit the production of threonine or a composition comprising threonine in said non-human organism or in the culture medium surrounding said non-human organism.

[29067] Accordingly, the present invention relates to a process for the production of threonine, which comprises
[29068] (a) increasing or generating one or more activities selected from the group consisting of b1108-protein in a non-human organism or a part thereof, preferably a microorganism, a plant cell, a plant or a part thereof, as compared to a corresponding non-transformed wild type non-human organism or a part thereof; and
[29069] (b) growing the non-human organism or a part thereof under conditions which permit the production of threonine or a composition comprising threonine in said non-human organism or in the culture medium surrounding said non-human organism.

[29070] Accordingly, the present invention relates to a process for the production of threonine, which comprises
[29071] (a) increasing or generating one or more activities selected from the group consisting of restriction alleviation protein in a non-human organism or a part thereof, preferably a microorganism, a plant cell, a plant or a part thereof, as compared to a corresponding non-transformed wild type non-human organism or a part thereof; and
[29072] (b) growing the non-human organism or a part thereof under conditions which permit the production of threonine or a composition comprising threonine in said non-human organism or in the culture medium surrounding said non-human organism.

[29073] Accordingly, the present invention relates to a process for the production of threonine, which comprises
[29074] (a) increasing or generating one or more activities selected from the group consisting of b1445-protein in a non-human organism or a part thereof, preferably a microorganism, a plant cell, a plant or a part thereof, as compared to a corresponding non-transformed wild type non-human organism or a part thereof; and
[29075] (b) growing the non-human organism or a part thereof under conditions which permit the production of threonine or a composition comprising threonine in said non-human organism or in the culture medium surrounding said non-human organism.

[29076] Accordingly, the present invention relates to a process for the production of threonine, which comprises
[29077] (a) increasing or generating one or more activities selected from the group consisting of NADP-dependent malic enzyme in a non-human organism or a part thereof, preferably a microorganism, a plant cell, a plant or a part thereof, as compared to a corresponding non-transformed wild type non-human organism or a part thereof; and
[29078] (b) growing the non-human organism or a part thereof under conditions which permit the production of threonine or a composition comprising threonine in said non-human organism or in the culture medium surrounding said non-human organism.

[29079] Accordingly, the present invention relates to a process for the production of threonine, which comprises
[29080] (a) increasing or generating one or more activities selected from the group consisting of b1522-protein in a non-human organism or a part thereof, preferably a microorganism, a plant cell, a plant or a part thereof, as compared to a corresponding non-transformed wild type non-human organism or a part thereof; and
[29081] (b) growing the non-human organism or a part thereof under conditions which permit the production of threonine or a composition comprising threonine in said non-human organism or in the culture medium surrounding said non-human organism.

[29082] Accordingly, the present invention relates to a process for the production of threonine, which comprises
[29083] (a) increasing or generating one or more activities selected from the group consisting of b1670-protein in a non-human organism or a part thereof, preferably a microorganism, a plant cell, a plant or a part thereof, as compared to a corresponding non-transformed wild type non-human organism or a part thereof; and
[29084] (b) growing the non-human organism or a part thereof under conditions which permit the production of threonine or a composition comprising threonine in said non-human organism or in the culture medium surrounding said non-human organism.

[29085] Accordingly, the present invention relates to a process for the production of threonine, which comprises
[29086] (a) increasing or generating one or more activities selected from the group consisting of pyruvate kinase in a non-human organism or a part thereof, preferably a microorganism, a plant cell, a plant or a part thereof, as compared to a corresponding non-transformed wild type non-human organism or a part thereof; and
[29087] (b) growing the non-human organism or a part thereof under conditions which permit the production of threonine or a composition comprising threonine in said non-human organism or in the culture medium surrounding said non-human organism.

[29088] Accordingly, the present invention relates to a process for the production of threonine, which comprises
[29089] (a) increasing or generating one or more activities selected from the group consisting of b1930-protein in a non-human organism or a part thereof, preferably a microorganism, a plant cell, a plant or a part thereof, as compared to a corresponding non-transformed wild type non-human organism or a part thereof; and
[29090] (b) growing the non-human organism or a part thereof under conditions which permit the production of threonine or a composition comprising threonine in said non-human organism or in the culture medium surrounding said non-human organism.

[29091] Accordingly, the present invention relates to a process for the production of threonine, which comprises
[29092] (a) increasing or generating one or more activities selected from the group consisting of transport protein in a non-human organism or a part thereof, preferably a microorganism, a plant cell, a plant or a part thereof, as compared to a corresponding non-transformed wild type non-human organism or a part thereof; and
[29093] (b) growing the non-human organism or a part thereof under conditions which permit the production of threonine or a composition comprising threonine in said non-human organism or in the culture medium surrounding said non-human organism.

[29094] Accordingly, the present invention relates to a process for the production of threonine, which comprises
[29095] (a) increasing or generating one or more activities selected from the group consisting of b2360-protein in a non-human organism or a part thereof, preferably a microorganism, a plant cell, a plant or a part thereof, as compared to a corresponding non-transformed wild type non-human organism or a part thereof; and
[29096] (b) growing the non-human organism or a part thereof under conditions which permit the production of threonine or a composition comprising threonine in said non-human organism or in the culture medium surrounding said non-human organism.

[29097] Accordingly, the present invention relates to a process for the production of threonine, which comprises
[29098] (a) increasing or generating one or more activities selected from the group consisting of D-serine dehydratase in a non-human organism or a part thereof, preferably a microorganism, a plant cell, a plant or a part thereof, as compared to a corresponding non-transformed wild type non-human organism or a part thereof; and
[29099] (b) growing the non-human organism or a part thereof under conditions which permit the production of threonine or a composition comprising threonine in said non-human organism or in the culture medium surrounding said non-human organism.

[29100] Accordingly, the present invention relates to a process for the production of threonine, which comprises
[29101] (a) increasing or generating one or more activities selected from the group consisting of b2399-protein in a non-human organism or a part thereof, preferably a microorganism, a plant cell, a plant or a part thereof, as compared to a corresponding non-transformed wild type non-human organism or a part thereof; and
[29102] (b) growing the non-human organism or a part thereof under conditions which permit the production of threonine or a composition comprising threonine in said non-human organism or in the culture medium surrounding said non-human organism.

[29103] Accordingly, the present invention relates to a process for the production of threonine, which comprises
[29104] (a) increasing or generating one or more activities selected from the group consisting of transcriptional regulator in a non-human organism or a part thereof, preferably a microorganism, a plant cell, a plant or a part thereof, as compared to a corresponding non-transformed wild type non-human organism or a part thereof; and
[29105] (b) growing the non-human organism or a part thereof under conditions which permit the production of threonine or a composition comprising threonine in said non-human organism or in the culture medium surrounding said non-human organism.

[29106] Accordingly, the present invention relates to a process for the production of threonine, which comprises
[29107] (a) increasing or generating one or more activities selected from the group consisting of b2513-protein in a non-human organism or a part thereof, preferably a microorganism, a plant cell, a plant or a part thereof, as compared to a corresponding non-transformed wild type non-human organism or a part thereof; and
[29108] (b) growing the non-human organism or a part thereof under conditions which permit the production of threonine or a composition comprising threonine in said non-human organism or in the culture medium surrounding said non-human organism.

[29109] Accordingly, the present invention relates to a process for the production of threonine, which comprises
[29110] (a) increasing or generating one or more activities selected from the group consisting of b2613-protein in a non-human organism or a part thereof, preferably a microorganism, a plant cell, a plant or a part thereof, as compared to a corresponding non-transformed wild type non-human organism or a part thereof; and
[29111] (b) growing the non-human organism or a part thereof under conditions which permit the production of threonine or a composition comprising threonine in said non-human organism or in the culture medium surrounding said non-human organism.

[29112] Accordingly, the present invention relates to a process for the production of threonine, which comprises
[29113] (a) increasing or generating one or more activities selected from the group consisting of murein transglycosylase in a non-human organism or a part thereof, preferably a microorganism, a plant cell, a plant or a part thereof, as compared to a corresponding non-transformed wild type non-human organism or a part thereof; and
[29114] (b) growing the non-human organism or a part thereof under conditions which permit the production of threonine or a composition comprising threonine in said non-human organism or in the culture medium surrounding said non-human organism.

[29115] Accordingly, the present invention relates to a process for the production of threonine, which comprises
[29116] (a) increasing or generating one or more activities selected from the group consisting of transcriptional regulator in a non-human organism or a part thereof, preferably a microorganism, a plant cell, a plant or a part thereof, as compared to a corresponding non-transformed wild type non-human organism or a part thereof; and
[29117] (b) growing the non-human organism or a part thereof under conditions which permit the production of threonine or a composition comprising threonine in said non-human organism or in the culture medium surrounding said non-human organism.

[29118] Accordingly, the present invention relates to a process for the production of threonine, which comprises
[29119] (a) increasing or generating one or more activities selected from the group consisting of b2739-protein in a non-human organism or a part thereof, preferably a microorganism, a plant cell, a plant or a part thereof, as compared to a corresponding non-transformed wild type non-human organism or a part thereof; and
[29120] (b) growing the non-human organism or a part thereof under conditions which permit the production of threonine or a composition comprising threonine in said non-human organism or in the culture medium surrounding said non-human organism.

[29121] Accordingly, the present invention relates to a process for the production of threonine, which comprises
[29122] (a) increasing or generating one or more activities selected from the group consisting of 2-C-methyl-D-erythritol 4-phosphate cytidylyltransferase in a non-human organism or a part thereof, preferably a microorganism, a plant cell, a plant or a part thereof, as compared to a corresponding non-transformed wild type non-human organism or a part thereof; and
[29123] (b) growing the non-human organism or a part thereof under conditions which permit the production of threonine or a composition comprising threonine in said non-human organism or in the culture medium surrounding said non-human organism.

[29124] Accordingly, the present invention relates to a process for the production of threonine, which comprises
[29125] (a) increasing or generating one or more activities selected from the group consisting of b2812-protein in a non-human organism or a part thereof, preferably a microorganism, a plant cell, a plant or a part thereof, as compared to a corresponding non-transformed wild type non-human organism or a part thereof; and
[29126] (b) growing the non-human organism or a part thereof under conditions which permit the production of threonine or a composition comprising threonine in said non-human organism or in the culture medium surrounding said non-human organism.

[29127] Accordingly, the present invention relates to a process for the production of threonine, which comprises
[29128] (a) increasing or generating one or more activities selected from the group consisting of b2812-protein in a non-human organism or a part thereof, preferably a microorganism, a plant cell, a plant or a part thereof, as compared to a corresponding non-transformed wild type non-human organism or a part thereof; and
[29129] (b) growing the non-human organism or a part thereof under conditions which permit the production of threonine or a composition comprising threonine in said non-human organism or in the culture medium surrounding said non-human organism.

[29130] Accordingly, the present invention relates to a process for the production of threonine, which comprises
[29131] (a) increasing or generating one or more activities selected from the group consisting of D-3-phosphoglycerate dehydrogenase in a non-human organism or a part thereof, preferably a microorganism, a plant cell, a plant or a part thereof, as compared to a corresponding non-transformed wild type non-human organism or a part thereof; and
[29132] (b) growing the non-human organism or a part thereof under conditions which permit the production of threonine or a composition comprising threonine in said non-human organism or in the culture medium surrounding said non-human organism.

[29133] Accordingly, the present invention relates to a process for the production of threonine, which comprises
[29134] (a) increasing or generating one or more activities selected from the group consisting of Lasparaginase in a non-human organism or a part thereof, preferably a microorganism, a plant cell, a plant or a part thereof, as compared to a corresponding non-transformed wild type non-human organism or a part thereof; and
[29135] (b) growing the non-human organism or a part thereof under conditions which permit the production of threonine or a composition comprising threonine in said non-human organism or in the culture medium surrounding said non-human organism.

[29136] Accordingly, the present invention relates to a process for the production of threonine, which comprises
[29137] (a) increasing or generating one or more activities selected from the group consisting of glycoprotease in a non-human organism or a part thereof, preferably a microorganism, a plant cell, a plant or a part thereof, as compared to a corresponding non-transformed wild type non-human organism or a part thereof; and
[29138] (b) growing the non-human organism or a part thereof under conditions which permit the production of threonine or a composition comprising threonine in said non-human organism or in the culture medium surrounding said non-human organism.

[29139] Accordingly, the present invention relates to a process for the production of threonine, which comprises
[29140] (a) increasing or generating one or more activities selected from the group consisting of b3083-protein in a non-human organism or a part thereof, preferably a microorganism, a plant cell, a plant or a part thereof, as compared to a corresponding non-transformed wild type non-human organism or a part thereof; and
[29141] (b) growing the non-human organism or a part thereof under conditions which permit the production of threonine or a composition comprising threonine in said non-human organism or in the culture medium surrounding said non-human organism.

[29142] Accordingly, the present invention relates to a process for the production of threonine, which comprises
[29143] (a) increasing or generating one or more activities selected from the group consisting of methyltransferase in a non-human organism or a part thereof, preferably a microorganism, a plant cell, a plant or a part thereof, as compared to a corresponding non-transformed wild type non-human organism or a part thereof; and
[29144] (b) growing the non-human organism or a part thereof under conditions which permit the production of threonine or a composition comprising threonine in said non-human organism or in the culture medium surrounding said non-human organism.

[29145] Accordingly, the present invention relates to a process for the production of threonine, which comprises
[29146] (a) increasing or generating one or more activities selected from the group consisting of glycogen synthase in a non-human organism or a part thereof, preferably a microorganism, a plant cell, a plant or a part thereof, as compared to a corresponding non-transformed wild type non-human organism or a part thereof; and
[29147] (b) growing the non-human organism or a part thereof under conditions which permit the production of threonine or a composition comprising threonine in said non-human organism or in the culture medium surrounding said non-human organism.

[29148] Accordingly, the present invention relates to a process for the production of threonine, which comprises
[29149] (a) increasing or generating one or more activities selected from the group consisting of b3442-protein in a non-human organism or a part thereof, preferably a microorganism, a plant cell, a plant or a part thereof, as compared to a corresponding non-transformed wild type non-human organism or a part thereof; and
[29150] (b) growing the non-human organism or a part thereof under conditions which permit the production of threonine or a composition comprising threonine in said non-human organism or in the culture medium surrounding said non-human organism.

[29151] Accordingly, the present invention relates to a process for the production of threonine, which comprises
[29152] (a) increasing or generating one or more activities selected from the group consisting of valine-pyruvate transaminase in a non-human organism or a part thereof, preferably a microorganism, a plant cell, a plant or a part thereof, as compared to a corresponding non-transformed wild type non-human organism or a part thereof; and
[29153] (b) growing the non-human organism or a part thereof under conditions which permit the production of threonine or a composition comprising threonine in said non-human organism or in the culture medium surrounding said non-human organism.

[29154] Accordingly, the present invention relates to a process for the production of threonine, which comprises
[29155] (a) increasing or generating one or more activities selected from the group consisting of b3646-protein in a non-human organism or a part thereof, preferably a microorganism, a plant cell, a plant or a part thereof, as compared to a corresponding non-transformed wild type non-human organism or a part thereof; and
[29156] (b) growing the non-human organism or a part thereof under conditions which permit the production of threonine or a composition comprising threonine in said non-human organism or in the culture medium surrounding said non-human organism.

[29157] Accordingly, the present invention relates to a process for the production of threonine, which comprises
[29158] (a) increasing or generating one or more activities selected from the group consisting of ATP synthase subunit beta in a non-human organism or a part thereof, preferably a microorganism, a plant cell, a plant or a part thereof, as compared to a corresponding non-transformed wild type non-human organism or a part thereof; and
[29159] (b) growing the non-human organism or a part thereof under conditions which permit the production of threonine or a composition comprising threonine in said non-human organism or in the culture medium surrounding said non-human organism.

[29160] Accordingly, the present invention relates to a process for the production of threonine, which comprises
[29161] (a) increasing or generating one or more activities selected from the group consisting of dihydroxyacid dehydratase in a non-human organism or a part thereof, preferably a microorganism, a plant cell, a plant or a part thereof, as compared to a corresponding non-transformed wild type non-human organism or a part thereof; and
[29162] (b) growing the non-human organism or a part thereof under conditions which permit the production of threonine or a composition comprising threonine in said non-human organism or in the culture medium surrounding said non-human organism.

[29163] Accordingly, the present invention relates to a process for the production of threonine, which comprises
[29164] (a) increasing or generating one or more activities selected from the group consisting of ketol-acid reductoisomerase in a non-human organism or a part thereof, preferably a microorganism, a plant cell, a plant or a part thereof, as compared to a corresponding non-transformed wild type non-human organism or a part thereof; and
[29165] (b) growing the non-human organism or a part thereof under conditions which permit the production of threonine or a composition comprising threonine in said non-human organism or in the culture medium surrounding said non-human organism.

[29166] Accordingly, the present invention relates to a process for the production of threonine, which comprises
[29167] (a) increasing or generating one or more activities selected from the group consisting of enterobacterial common antigen polymerase in a non-human organism or a part thereof, preferably a microorganism, a plant cell, a plant or a part thereof, as compared to a corresponding non-transformed wild type non-human organism or a part thereof; and
[29168] (b) growing the non-human organism or a part thereof under conditions which permit the production of threonine or a composition comprising threonine in said non-human organism or in the culture medium surrounding said non-human organism.

[29169] Accordingly, the present invention relates to a process for the production of threonine, which comprises
[29170] (a) increasing or generating one or more activities selected from the group consisting of DNA helicase II in a non-human organism or a part thereof, preferably a microorganism, a plant cell, a plant or a part thereof, as compared to a corresponding non-transformed wild type non-human organism or a part thereof; and
[29171] (b) growing the non-human organism or a part thereof under conditions which permit the production of threonine or a composition comprising threonine in said non-human organism or in the culture medium surrounding said non-human organism.

[29172] Accordingly, the present invention relates to a process for the production of threonine, which comprises
[29173] (a) increasing or generating one or more activities selected from the group consisting of transcriptional regulator in a non-human organism or a part thereof, preferably a microorganism, a plant cell, a plant or a part thereof, as compared to a corresponding non-transformed wild type non-human organism or a part thereof; and
[29174] (b) growing the non-human organism or a part thereof under conditions which permit the production of threonine or a composition comprising threonine in said non-human organism or in the culture medium surrounding said non-human organism.

[29175] Accordingly, the present invention relates to a process for the production of threonine, which comprises
[29176] (a) increasing or generating one or more activities selected from the group consisting of b3989-protein in a non-human organism or a part thereof, preferably a microorganism, a plant cell, a plant or a part thereof, as compared to a corresponding non-transformed wild type non-human organism or a part thereof; and
[29177] (b) growing the non-human organism or a part thereof under conditions which permit the production of threonine or a composition comprising threonine in said non-human organism or in the culture medium surrounding said non-human organism.

[29178] Accordingly, the present invention relates to a process for the production of threonine, which comprises
[29179] (a) increasing or generating one or more activities selected from the group consisting of aspartate kinase in a non-human organism or a part thereof, preferably a microorganism, a plant cell, a plant or a part thereof, as compared to a corresponding non-transformed wild type non-human organism or a part thereof; and
[29180] (b) growing the non-human organism or a part thereof under conditions which permit the production of threonine or a composition comprising threonine in said non-human organism or in the culture medium surrounding said non-human organism.

[29181] Accordingly, the present invention relates to a process for the production of threonine, which comprises
[29182] (a) increasing or generating one or more activities selected from the group consisting of b4029-protein in a non-human organism or a part thereof, preferably a microorganism, a plant cell, a plant or a part thereof, as compared to a corresponding non-transformed wild type non-human organism or a part thereof; and
[29183] (b) growing the non-human organism or a part thereof under conditions which permit the production of threonine or a composition comprising threonine in said non-human organism or in the culture medium surrounding said non-human organism.

[29184] Accordingly, the present invention relates to a process for the production of threonine, which comprises
[29185] (a) increasing or generating one or more activities selected from the group consisting of b4056-protein in a non-human organism or a part thereof, preferably a microorganism, a plant cell, a plant or a part thereof, as compared to a corresponding non-transformed wild type non-human organism or a part thereof; and
[29186] (b) growing the non-human organism or a part thereof under conditions which permit the production of threonine or a composition comprising threonine in said non-human organism or in the culture medium surrounding said non-human organism.

[29187] Accordingly, the present invention relates to a process for the production of threonine, which comprises
[29188] (a) increasing or generating one or more activities selected from the group consisting of b4250-protein in a non-human organism or a part thereof, preferably a microorganism, a plant cell, a plant or a part thereof, as compared to a corresponding non-transformed wild type non-human organism or a part thereof; and
[29189] (b) growing the non-human organism or a part thereof under conditions which permit the production of threonine or a composition comprising threonine in said non-human organism or in the culture medium surrounding said non-human organism.

[29190] Accordingly, the present invention relates to a process for the production of threonine, which comprises
[29191] (a) increasing or generating one or more activities selected from the group consisting of acetyltransferase in a non-human organism or a part thereof, preferably a microorganism, a plant cell, a plant or a part thereof, as compared to a corresponding non-transformed wild type non-human organism or a part thereof; and
[29192] (b) growing the non-human organism or a part thereof under conditions which permit the production of threonine or a composition comprising threonine in said non-human organism or in the culture medium surrounding said non-human organism.

[29193] Accordingly, the present invention relates to a process for the production of threonine, which comprises
[29194] (a) increasing or generating one or more activities selected from the group consisting of glutaredoxin in a non-human organism or a part thereof, preferably a microorganism, a plant cell, a plant or a part thereof, as compared to a corresponding non-transformed wild type non-human organism or a part thereof; and
[29195] (b) growing the non-human organism or a part thereof under conditions which permit the production of threonine or a composition comprising threonine in said non-human organism or in the culture medium surrounding said non-human organism.

[29196] Accordingly, the present invention relates to a process for the production of threonine, which comprises
[29197] (a) increasing or generating one or more activities selected from the group consisting of transcription factor in a non-human organism or a part thereof, preferably a microorganism, a plant cell, a plant or a part thereof, as compared to a corresponding non-transformed wild type non-human organism or a part thereof; and
[29198] (b) growing the non-human organism or a part thereof under conditions which permit the production of threonine or a composition comprising threonine in said non-human organism or in the culture medium surrounding said non-human organism.

[29199] Accordingly, the present invention relates to a process for the production of threonine, which comprises
[29200] (a) increasing or generating one or more activities selected from the group consisting of cyclin D in a non-human organism or a part thereof, preferably a microorganism, a plant cell, a plant or a part thereof, as compared to a corresponding non-transformed wild type non-human organism or a part thereof; and
[29201] (b) growing the non-human organism or a part thereof under conditions which permit the production of threonine or a composition comprising threonine in said non-human organism or in the culture medium surrounding said non-human organism.

[29202] Accordingly, the present invention relates to a process for the production of threonine, which comprises
[29203] (a) increasing or generating one or more activities selected from the group consisting of heat shock protein in a non-human organism or a part thereof, preferably a microorganism, a plant cell, a plant or a part thereof, as compared to a corresponding non-transformed wild type non-human organism or a part thereof; and
[29204] (b) growing the non-human organism or a part thereof under conditions which permit the production of threonine or a composition comprising threonine in said non-human organism or in the culture medium surrounding said non-human organism.

[29205] Accordingly, the present invention relates to a process for the production of threonine, which comprises
[29206] (a) increasing or generating one or more activities selected from the group consisting of polyphosphate kinase in a non-human organism or a part thereof, preferably a microorganism, a plant cell, a plant or a part thereof, as compared to a corresponding non-transformed wild type non-human organism or a part thereof; and
[29207] (b) growing the non-human organism or a part thereof under conditions which permit the production of threonine or a composition comprising threonine in said non-human organism or in the culture medium surrounding said non-human organism.

[29208] Accordingly, the present invention relates to a process for the production of threonine, which comprises
[29209] (a) increasing or generating one or more activities selected from the group consisting of branched chain amino acid ABC transporter ATP-binding protein in a non-human organism or a part thereof, preferably a microorganism, a plant cell, a plant or a part thereof, as compared to a corresponding non-transformed wild type non-human organism or a part thereof; and
[29210] (b) growing the non-human organism or a part thereof under conditions which permit the production of threonine or a composition comprising threonine in said non-human organism or in the culture medium surrounding said non-human organism.

[29211] Accordingly, the present invention relates to a process for the production of threonine, which comprises
[29212] (a) increasing or generating one or more activities selected from the group consisting of uroporphyrin-III C-methyltransferase in a non-human organism or a part thereof, preferably a microorganism, a plant cell, a plant or a part thereof, as compared to a corresponding non-transformed wild type non-human organism or a part thereof; and
[29213] (b) growing the non-human organism or a part thereof under conditions which permit the production of threonine or a composition comprising threonine in said non-human organism or in the culture medium surrounding said non-human organism.

[29214] Accordingly, the present invention relates to a process for the production of threonine, which comprises
[29215] (a) increasing or generating one or more activities selected from the group consisting of sll0418-protein in a non-human organism or a part thereof, preferably a microorganism, a plant cell, a plant or a part thereof, as compared to a corresponding non-transformed wild type non-human organism or a part thereof; and
[29216] (b) growing the non-human organism or a part thereof under conditions which permit the production of threonine or a composition comprising threonine in said non-human organism or in the culture medium surrounding said non-human organism.

[29217] Accordingly, the present invention relates to a process for the production of threonine, which comprises
[29218] (a) increasing or generating one or more activities selected from the group consisting of oxireductase in a non-human organism or a part thereof, preferably a microorganism, a plant cell, a plant or a part thereof, as compared to a corresponding non-transformed wild type non-human organism or a part thereof; and
[29219] (b) growing the non-human organism or a part thereof under conditions which permit the production of threonine or a composition comprising threonine in said non-human organism or in the culture medium surrounding said non-human organism.

[29220] Accordingly, the present invention relates to a process for the production of threonine, which comprises
[29221] (a) increasing or generating one or more activities selected from the group consisting of malate dehydrogenase in a non-human organism or a part thereof, preferably a microorganism, a plant cell, a plant or a part thereof, as compared to a corresponding non-transformed wild type non-human organism or a part thereof; and
[29222] (b) growing the non-human organism or a part thereof under conditions which permit the production of threonine or a composition comprising threonine in said non-human organism or in the culture medium surrounding said non-human organism.

[29223] Accordingly, the present invention relates to a process for the production of threonine, which comprises
[29224] (a) increasing or generating one or more activities selected from the group consisting of phosphoribosylaminoimidazole carboxylase catalytic subunit in a non-human organism or a part thereof, preferably a microorganism, a plant cell, a plant or a part thereof, as compared to a corresponding non-transformed wild type non-human organism or a part thereof; and
[29225] (b) growing the non-human organism or a part thereof under conditions which permit the production of threonine or a composition comprising threonine in said non-human organism or in the culture medium surrounding said non-human organism.

[29226] Accordingly, the present invention relates to a process for the production of threonine, which comprises
[29227] (a) increasing or generating one or more activities selected from the group consisting of glycogen synthase in a non-human organism or a part thereof, preferably a microorganism, a plant cell, a plant or a part thereof, as compared to a corresponding non-transformed wild type non-human organism or a part thereof; and
[29228] (b) growing the non-human organism or a part thereof under conditions which permit the production of threonine or a composition comprising threonine in said non-human organism or in the culture medium surrounding said non-human organism.

[29229] Accordingly, the present invention relates to a process for the production of threonine, which comprises
[29230] (a) increasing or generating one or more activities selected from the group consisting of glycogen (starch) synthase in a non-human organism or a part thereof, preferably a microorganism, a plant cell, a plant or a part thereof, as compared to a corresponding non-transformed wild type non-human organism or a part thereof; and
[29231] (b) growing the non-human organism or a part thereof under conditions which permit the production of threonine or a composition comprising threonine in said non-human organism or in the culture medium surrounding said non-human organism.

[29232] Accordingly, the present invention relates to a process for the production of threonine, which comprises
[29233] (a) increasing or generating one or more activities selected from the group consisting of nitrate/nitrite transport protein in a non-human organism or a part thereof, preferably a microorganism, a plant cell, a plant or a part thereof, as compared to a corresponding non-transformed wild type non-human organism or a part thereof; and
[29234] (b) growing the non-human organism or a part thereof under conditions which permit the production of threonine or a composition comprising threonine in said non-human organism or in the culture medium surrounding said non-human organism.

[29235] Accordingly, the present invention relates to a process for the production of threonine, which comprises
[29236] (a) increasing or generating one or more activities selected from the group consisting of carbamoyl-phosphate synthase subunit in a non-human organism or a part thereof, preferably a microorganism, a plant cell, a plant or a part thereof, as compared to a corresponding non-transformed wild type non-human organism or a part thereof; and
[29237] (b) growing the non-human organism or a part thereof under conditions which permit the production of threonine or a composition comprising threonine in said non-human organism or in the culture medium surrounding said non-human organism.

[29238] Accordingly, the present invention relates to a process for the production of threonine, which comprises
[29239] (a) increasing or generating one or more activities selected from the group consisting of glutathione S-transferase in a non-human organism or a part thereof, preferably a microorganism, a plant cell, a plant or a part thereof, as compared to a corresponding non-transformed wild type non-human organism or a part thereof; and
[29240] (b) growing the non-human organism or a part thereof under conditions which permit the production of threonine or a composition comprising threonine in said non-human organism or in the culture medium surrounding said non-human organism.

[29241] Accordingly, the present invention relates to a process for the production of threonine, which comprises
[29242] (a) increasing or generating one or more activities selected from the group consisting of ABC metal ion transporter substrate-binding protein in a non-human organism or a part thereof, preferably a microorganism, a plant cell, a plant or a part thereof, as compared to a corresponding non-transformed wild type non-human organism or a part thereof; and
[29243] (b) growing the non-human organism or a part thereof under conditions which permit the production of threonine or a composition comprising threonine in said non-human organism or in the culture medium surrounding said non-human organism.

[29244] Accordingly, the present invention relates to a process for the production of threonine, which comprises
[29245] (a) increasing or generating one or more activities selected from the group consisting of coproporphyrinogen III oxidase in a non-human organism or a part thereof, preferably a microorganism, a plant cell, a plant or a part thereof, as compared to a corresponding non-transformed wild type non-human organism or a part thereof; and
[29246] (b) growing the non-human organism or a part thereof under conditions which permit the production of threonine or a composition comprising threonine in said non-human organism or in the culture medium surrounding said non-human organism.

[29247] Accordingly, the present invention relates to a process for the production of threonine, which comprises
[29248] (a) increasing or generating one or more activities selected from the group consisting of ferredoxin in a non-human organism or a part thereof, preferably a microorganism, a plant cell, a plant or a part thereof, as compared to a corresponding non-transformed wild type non-human organism or a part thereof; and
[29249] (b) growing the non-human organism or a part thereof under conditions which permit the production of threonine or a composition comprising threonine in said non-human organism or in the culture medium surrounding said non-human organism.

[29250] Accordingly, the present invention relates to a process for the production of threonine, which comprises
[29251] (a) increasing or generating one or more activities selected from the group consisting of slr0383-protein in a non-human organism or a part thereof, preferably a microorganism, a plant cell, a plant or a part thereof, as compared to a corresponding non-transformed wild type non-human organism or a part thereof; and
[29252] (b) growing the non-human organism or a part thereof under conditions which permit the production of threonine or a composition comprising threonine in said non-human organism or in the culture medium surrounding said non-human organism.

[29253] Accordingly, the present invention relates to a process for the production of threonine, which comprises
[29254] (a) increasing or generating one or more activities selected from the group consisting of bifunctional purine biosynthesis protein in a non-human organism or a part thereof, preferably a microorganism, a plant cell, a plant or a part thereof, as compared to a corresponding non-transformed wild type non-human organism or a part thereof; and
[29255] (b) growing the non-human organism or a part thereof under conditions which permit the production of threonine or a composition comprising threonine in said non-human organism or in the culture medium surrounding said non-human organism.

[29256] Accordingly, the present invention relates to a process for the production of threonine, which comprises
[29257] (a) increasing or generating one or more activities selected from the group consisting of aspartate kinase in a non-human organism or a part thereof, preferably a microorganism, a plant cell, a plant or a part thereof, as compared to a corresponding non-transformed wild type non-human organism or a part thereof; and
[29258] (b) growing the non-human organism or a part thereof under conditions which permit the production of threonine or a composition comprising threonine in said non-human organism or in the culture medium surrounding said non-human organism.

[29259] Accordingly, the present invention relates to a process for the production of threonine, which comprises
[29260] (a) increasing or generating one or more activities selected from the group consisting of geranylgeranyl pyrophosphate synthase in a non-human organism or a part thereof, preferably a microorganism, a plant cell, a plant or a part thereof, as compared to a corresponding non-transformed wild type non-human organism or a part thereof; and
[29261] (b) growing the non-human organism or a part thereof under conditions which permit the production of threonine or a composition comprising threonine in said non-human organism or in the culture medium surrounding said non-human organism.

[29262] Accordingly, the present invention relates to a process for the production of threonine, which comprises
[29263] (a) increasing or generating one or more activities selected from the group consisting of kinase in a non-human organism or a part thereof, preferably a microorganism, a plant cell, a plant or a part thereof, as compared to a corresponding non-transformed wild type non-human organism or a part thereof; and
[29264] (b) growing the non-human organism or a part thereof under conditions which permit the production of threonine or a composition comprising threonine in said non-human organism or in the culture medium surrounding said non-human organism.

[29265] Accordingly, the present invention relates to a process for the production of threonine, which comprises
[29266] (a) increasing or generating one or more activities selected from the group consisting of argininosuccinate lyase in a non-human organism or a part thereof, preferably a microorganism, a plant cell, a plant or a part thereof, as compared to a corresponding non-transformed wild type non-human organism or a part thereof; and
[29267] (b) growing the non-human organism or a part thereof under conditions which permit the production of threonine or a composition comprising threonine in said non-human organism or in the culture medium surrounding said non-human organism.

[29268] Accordingly, the present invention relates to a process for the production of threonine, which comprises
[29269] (a) increasing or generating one or more activities selected from the group consisting of photosystem II protein in a non-human organism or a part thereof, preferably a microorganism, a plant cell, a plant or a part thereof, as compared to a corresponding non-transformed wild type non-human organism or a part thereof; and
[29270] (b) growing the non-human organism or a part thereof under conditions which permit the production of threonine or a composition comprising threonine in said non-human organism or in the culture medium surrounding said non-human organism.

[29271] Accordingly, the present invention relates to a process for the production of threonine, which comprises
[29272] (a) increasing or generating one or more activities selected from the group consisting of cell division protein in a non-human organism or a part thereof, preferably a microorganism, a plant cell, a plant or a part thereof, as compared to a corresponding non-transformed wild type non-human organism or a part thereof; and
[29273] (b) growing the non-human organism or a part thereof under conditions which permit the production of threonine or a composition comprising threonine in said non-human organism or in the culture medium surrounding said non-human organism.

[29274] Accordingly, the present invention relates to a process for the production of threonine, which comprises
[29275] (a) increasing or generating one or more activities selected from the group consisting of branched-chain amino acid ABC transporter permease protein in a non-human organism or a part thereof, preferably a microorganism, a plant cell, a plant or a part thereof, as compared to a corresponding non-transformed wild type non-human organism or a part thereof; and
[29276] (b) growing the non-human organism or a part thereof under conditions which permit the production of threonine or a composition comprising threonine in said non-human organism or in the culture medium surrounding said non-human organism.

[29277] Accordingly, the present invention relates to a process for the production of threonine, which comprises
[29278] (a) increasing or generating one or more activities selected from the group consisting of TTC0881-protein in a non-human organism or a part thereof, preferably a microorganism, a plant cell, a plant or a part thereof, as compared to a corresponding non-transformed wild type non-human organism or a part thereof; and
[29279] (b) growing the non-human organism or a part thereof under conditions which permit the production of threonine or a composition comprising threonine in said non-human organism or in the culture medium surrounding said non-human organism.

[29280] Accordingly, the present invention relates to a process for the production of threonine, which comprises
[29281] (a) increasing or generating one or more activities selected from the group consisting of metal-dependent hydrolase in a non-human organism or a part thereof, preferably a microorganism, a plant cell, a plant or a part thereof, as compared to a corresponding non-transformed wild type non-human organism or a part thereof; and
[29282] (b) growing the non-human organism or a part thereof under conditions which permit the production of threonine or a composition comprising threonine in said non-human organism or in the culture medium surrounding said non-human organism.

[29283] Accordingly, the present invention relates to a process for the production of threonine, which comprises
[29284] (a) increasing or generating one or more activities selected from the group consisting of homocitrate synthase in a non-human organism or a part thereof, preferably a microorganism, a plant cell, a plant or a part thereof, as compared to a corresponding non-transformed wild type non-human organism or a part thereof; and
[29285] (b) growing the non-human organism or a part thereof under conditions which permit the production of threonine or a composition comprising threonine in said non-human organism or in the culture medium surrounding said non-human organism.

[29286] Accordingly, the present invention relates to a process for the production of threonine, which comprises
[29287] (a) increasing or generating one or more activities selected from the group consisting of XM_{—}473199-protein in a non-human organism or a part thereof, preferably a microorganism, a plant cell, a plant or a part thereof, as compared to a corresponding non-transformed wild type non-human organism or a part thereof; and
[29288] (b) growing the non-human organism or a part thereof under conditions which permit the production of threonine or a composition comprising threonine in said non-human organism or in the culture medium surrounding said non-human organism.

[29289] Accordingly, the present invention relates to a process for the production of threonine, which comprises
[29290] (a) increasing or generating one or more activities selected from the group consisting of pyruvate kinase in a non-human organism or a part thereof, preferably a microorganism, a plant cell, a plant or a part thereof, as compared to a corresponding non-transformed wild type non-human organism or a part thereof; and
[29291] (b) growing the non-human organism or a part thereof under conditions which permit the production of threonine or a composition comprising threonine in said non-human organism or in the culture medium surrounding said non-human organism.

[29292] Accordingly, the present invention relates to a process for the production of threonine, which comprises
[29293] (a) increasing or generating one or more activities selected from the group consisting of transcription factor in a non-human organism or a part thereof, preferably a microorganism, a plant cell, a plant or a part thereof, as compared to a corresponding non-transformed wild type non-human organism or a part thereof; and
[29294] (b) growing the non-human organism or a part thereof under conditions which permit the production of threonine or a composition comprising threonine in said non-human organism or in the culture medium surrounding said non-human organism.

[29295] Accordingly, the present invention relates to a process for the production of threonine, which comprises
[29296] (a) increasing or generating one or more activities selected from the group consisting of cell division control protein in a non-human organism or a part thereof, preferably a microorganism, a plant cell, a plant or a part thereof, as compared to a corresponding non-transformed wild type non-human organism or a part thereof; and
[29297] (b) growing the non-human organism or a part thereof under conditions which permit the production of threonine or a composition comprising threonine in said non-human organism or in the culture medium surrounding said non-human organism.

[29298] Accordingly, the present invention relates to a process for the production of threonine, which comprises
[29299] (a) increasing or generating one or more activities selected from the group consisting of pyruvate carboxylase in a non-human organism or a part thereof, preferably a microorganism, a plant cell, a plant or a part thereof, as compared to a corresponding non-transformed wild type non-human organism or a part thereof; and
[29300] (b) growing the non-human organism or a part thereof under conditions which permit the production of threonine or a composition comprising threonine in said non-human organism or in the culture medium surrounding said non-human organism.

[29301] Accordingly, the present invention relates to a process for the production of threonine, which comprises
[29302] (a) increasing or generating one or more activities selected from the group consisting of ycl027w-protein in a non-human organism or a part thereof, preferably a microorganism, a plant cell, a plant or a part thereof, as compared to a corresponding non-transformed wild type non-human organism or a part thereof; and
[29303] (b) growing the non-human organism or a part thereof under conditions which permit the production of threonine or a composition comprising threonine in said non-human organism or in the culture medium surrounding said non-human organism.

[29304] Accordingly, the present invention relates to a process for the production of threonine, which comprises
[29305] (a) increasing or generating one or more activities selected from the group consisting of coproporphyrinogen III oxidase in a non-human organism or a part thereof, preferably a microorganism, a plant cell, a plant or a part thereof, as compared to a corresponding non-transformed wild type non-human organism or a part thereof; and
[29306] (b) growing the non-human organism or a part thereof under conditions which permit the production of threonine or a composition comprising threonine in said non-human organism or in the culture medium surrounding said non-human organism.

[29307] Accordingly, the present invention relates to a process for the production of threonine, which comprises
[29308] (a) increasing or generating one or more activities selected from the group consisting of ydr183w-protein in a non-human organism or a part thereof, preferably a microorganism, a plant cell, a plant or a part thereof, as compared to a corresponding non-transformed wild type non-human organism or a part thereof; and
[29309] (b) growing the non-human organism or a part thereof under conditions which permit the production of threonine or a composition comprising threonine in said non-human organism or in the culture medium surrounding said non-human organism.

[29310] Accordingly, the present invention relates to a process for the production of threonine, which comprises
[29311] (a) increasing or generating one or more activities selected from the group consisting of hexose transporter in a non-human organism or a part thereof, preferably a microorganism, a plant cell, a plant or a part thereof, as compared to a corresponding non-transformed wild type non-human organism or a part thereof; and
[29312] (b) growing the non-human organism or a part thereof under conditions which permit the production of threonine or a composition comprising threonine in said non-human organism or in the culture medium surrounding said non-human organism.

[29313] Accordingly, the present invention relates to a process for the production of threonine, which comprises
[29314] (a) increasing or generating one or more activities selected from the group consisting of YEL030C-A-protein in a non-human organism or a part thereof, preferably a microorganism, a plant cell, a plant or a part thereof, as compared to a corresponding non-transformed wild type non-human organism or a part thereof; and
[29315] (b) growing the non-human organism or a part thereof under conditions which permit the production of threonine or a composition comprising threonine in said non-human organism or in the culture medium surrounding said non-human organism.

[29316] Accordingly, the present invention relates to a process for the production of threonine, which comprises
[29317] (a) increasing or generating one or more activities selected from the group consisting of hexose transporter in a non-human organism or a part thereof, preferably a microorganism, a plant cell, a plant or a part thereof, as compared to a corresponding non-transformed wild type non-human organism or a part thereof; and
[29318] (b) growing the non-human organism or a part thereof under conditions which permit the production of threonine or a composition comprising threonine in said non-human organism or in the culture medium surrounding said non-human organism.

[29319] Accordingly, the present invention relates to a process for the production of threonine, which comprises
[29320] (a) increasing or generating one or more activities selected from the group consisting of yfl054c-protein in a non-human organism or a part thereof, preferably a microorganism, a plant cell, a plant or a part thereof, as compared to a corresponding non-transformed wild type non-human organism or a part thereof; and
[29321] (b) growing the non-human organism or a part thereof under conditions which permit the production of threonine or a composition comprising threonine in said non-human organism or in the culture medium surrounding said non-human organism.

[29322] Accordingly, the present invention relates to a process for the production of threonine, which comprises
[29323] (a) increasing or generating one or more activities selected from the group consisting of ygl237c-protein in a non-human organism or a part thereof, preferably a microorganism, a plant cell, a plant or a part thereof, as compared to a corresponding non-transformed wild type non-human organism or a part thereof; and
[29324] (b) growing the non-human organism or a part thereof under conditions which permit the production of threonine or a composition comprising threonine in said non-human organism or in the culture medium surrounding said non-human organism.

[29325] Accordingly, the present invention relates to a process for the production of threonine, which comprises
[29326] (a) increasing or generating one or more activities selected from the group consisting of yhr131c-protein in a non-human organism or a part thereof, preferably a microorganism, a plant cell, a plant or a part thereof, as compared to a corresponding non-transformed wild type non-human organism or a part thereof; and
[29327] (b) growing the non-human organism or a part thereof under conditions which permit the production of threonine or a composition comprising threonine in said non-human organism or in the culture medium surrounding said non-human organism.

[29328] Accordingly, the present invention relates to a process for the production of threonine, which comprises
[29329] (a) increasing or generating one or more activities selected from the group consisting of (DL)-glycerol-3-phosphatase in a non-human organism or a part thereof, preferably a microorganism, a plant cell, a plant or a part thereof, as compared to a corresponding non-transformed wild type non-human organism or a part thereof; and
[29330] (b) growing the non-human organism or a part thereof under conditions which permit the production of threonine or a composition comprising threonine in said non-human organism or in the culture medium surrounding said non-human organism.

[29331] Accordingly, the present invention relates to a process for the production of threonine, which comprises
[29332] (a) increasing or generating one or more activities selected from the group consisting of 3-phosphoglycerate dehydrogenase in a non-human organism or a part thereof, preferably a microorganism, a plant cell, a plant or a part thereof, as compared to a corresponding non-transformed wild type non-human organism or a part thereof; and
[29333] (b) growing the non-human organism or a part thereof under conditions which permit the production of threonine or a composition comprising threonine in said non-human organism or in the culture medium surrounding said non-human organism.

[29334] Accordingly, the present invention relates to a process for the production of threonine, which comprises
[29335] (a) increasing or generating one or more activities selected from the group consisting of glutathione S-transferase in a non-human organism or a part thereof, preferably a microorganism, a plant cell, a plant or a part thereof, as compared to a corresponding non-transformed wild type non-human organism or a part thereof; and
[29336] (b) growing the non-human organism or a part thereof under conditions which permit the production of threonine or a composition comprising threonine in said non-human organism or in the culture medium surrounding said non-human organism.

[29337] Accordingly, the present invention relates to a process for the production of threonine, which comprises
[29338] (a) increasing or generating one or more activities selected from the group consisting of DnaJ-like chaperone in a non-human organism or a part thereof, preferably a microorganism, a plant cell, a plant or a part thereof, as compared to a corresponding non-transformed wild type non-human organism or a part thereof; and
[29339] (b) growing the non-human organism or a part thereof under conditions which permit the production of threonine or a composition comprising threonine in said non-human organism or in the culture medium surrounding said non-human organism.

[29340] Accordingly, the present invention relates to a process for the production of threonine, which comprises
[29341] (a) increasing or generating one or more activities selected from the group consisting of YJL127W-A-protein in a non-human organism or a part thereof, preferably a microorganism, a plant cell, a plant or a part thereof, as compared to a corresponding non-transformed wild type non-human organism or a part thereof; and
[29342] (b) growing the non-human organism or a part thereof under conditions which permit the production of threonine or a composition comprising threonine in said non-human organism or in the culture medium surrounding said non-human organism.

[29343] Accordingly, the present invention relates to a process for the production of threonine, which comprises
[29344] (a) increasing or generating one or more activities selected from the group consisting of hexose transporter in a non-human organism or a part thereof, preferably a microorganism, a plant cell, a plant or a part thereof, as compared to a corresponding non-transformed wild type non-human organism or a part thereof; and
[29345] (b) growing the non-human organism or a part thereof under conditions which permit the production of threonine or a composition comprising threonine in said non-human organism or in the culture medium surrounding said non-human organism.

[29346] Accordingly, the present invention relates to a process for the production of threonine, which comprises
[29347] (a) increasing or generating one or more activities selected from the group consisting of homoserine dehydrogenase in a non-human organism or a part thereof, preferably a microorganism, a plant cell, a plant or a part thereof, as compared to a corresponding non-transformed wild type non-human organism or a part thereof; and
[29348] (b) growing the non-human organism or a part thereof under conditions which permit the production of threonine or a composition comprising threonine in said non-human organism or in the culture medium surrounding said non-human organism.

[29349] Accordingly, the present invention relates to a process for the production of threonine, which comprises
[29350] (a) increasing or generating one or more activities selected from the group consisting of branched chain aminotransferase in a non-human organism or a part thereof, preferably a microorganism, a plant cell, a plant or a part thereof, as compared to a corresponding non-transformed wild type non-human organism or a part thereof; and
[29351] (b) growing the non-human organism or a part thereof under conditions which permit the production of threonine or a composition comprising threonine in said non-human organism or in the culture medium surrounding said non-human organism.

[29352] Accordingly, the present invention relates to a process for the production of threonine, which comprises
[29353] (a) increasing or generating one or more activities selected from the group consisting of YKL038W-protein in a non-human organism or a part thereof, preferably a microorganism, a plant cell, a plant or a part thereof, as compared to a corresponding non-transformed wild type non-human organism or a part thereof; and
[29354] (b) growing the non-human organism or a part thereof under conditions which permit the production of threonine or a composition comprising threonine in said non-human organism or in the culture medium surrounding said non-human organism.

[29355] Accordingly, the present invention relates to a process for the production of threonine, which comprises
[29356] (a) increasing or generating one or more activities selected from the group consisting of phosphoenolpyruvate carboxykinase in a non-human organism or a part thereof, preferably a microorganism, a plant cell, a plant or a part thereof, as compared to a corresponding non-transformed wild type non-human organism or a part thereof; and
[29357] (b) growing the non-human organism or a part thereof under conditions which permit the production of threonine or a composition comprising threonine in said non-human organism or in the culture medium surrounding said non-human organism.

[29358] Accordingly, the present invention relates to a process for the production of threonine, which comprises
[29359] (a) increasing or generating one or more activities selected from the group consisting of aspartate aminotransferase in a non-human organism or a part thereof, preferably a microorganism, a plant cell, a plant or a part thereof, as compared to a corresponding non-transformed wild type non-human organism or a part thereof; and
[29360] (b) growing the non-human organism or a part thereof under conditions which permit the production of threonine or a composition comprising threonine in said non-human organism or in the culture medium surrounding said non-human organism.

[29361] Accordingly, the present invention relates to a process for the production of threonine, which comprises
[29362] (a) increasing or generating one or more activities selected from the group consisting of mitochondrial dicarboxylate transporter in a non-human organism or a part thereof, preferably a microorganism, a plant cell, a plant or a part thereof, as compared to a corresponding non-transformed wild type non-human organism or a part thereof; and
[29363] (b) growing the non-human organism or a part thereof under conditions which permit the production of threonine or a composition comprising threonine in said non-human organism or in the culture medium surrounding said non-human organism.

[29364] Accordingly, the present invention relates to a process for the production of threonine, which comprises
[29365] (a) increasing or generating one or more activities selected from the group consisting of phosphate transporter in a non-human organism or a part thereof, preferably a microorganism, a plant cell, a plant or a part thereof, as compared to a corresponding non-transformed wild type non-human organism or a part thereof; and
[29366] (b) growing the non-human organism or a part thereof under conditions which permit the production of threonine or a composition comprising threonine in said non-human organism or in the culture medium surrounding said non-human organism.

[29367] Accordingly, the present invention relates to a process for the production of threonine, which comprises
[29368] (a) increasing or generating one or more activities selected from the group consisting of protein kinase in a non-human organism or a part thereof, preferably a microorganism, a plant cell, a plant or a part thereof, as compared to a corresponding non-transformed wild type non-human organism or a part thereof; and
[29369] (b) growing the non-human organism or a part thereof under conditions which permit the production of threonine or a composition comprising threonine in said non-human organism or in the culture medium surrounding said non-human organism.

[29370] Accordingly, the present invention relates to a process for the production of threonine, which comprises
[29371] (a) increasing or generating one or more activities selected from the group consisting of histone acetyltransferase in a non-human organism or a part thereof, preferably a microorganism, a plant cell, a plant or a part thereof, as compared to a corresponding non-transformed wild type non-human organism or a part thereof; and
[29372] (b) growing the non-human organism or a part thereof under conditions which permit the production of threonine or a composition comprising threonine in said non-human organism or in the culture medium surrounding said non-human organism.

[29373] Accordingly, the present invention relates to a process for the production of threonine, which comprises
[29374] (a) increasing or generating one or more activities selected from the group consisting of cyclin in a non-human organism or a part thereof, preferably a microorganism, a plant cell, a plant or a part thereof, as compared to a corresponding non-transformed wild type non-human organism or a part thereof; and
[29375] (b) growing the non-human organism or a part thereof under conditions which permit the production of threonine or a composition comprising threonine in said non-human organism or in the culture medium surrounding said non-human organism.

[29376] Accordingly, the present invention relates to a process for the production of threonine, which comprises
[29377] (a) increasing or generating one or more activities selected from the group consisting of Zm_{—}4842_BE510522-protein in a non-human organism or a part thereof, preferably a microorganism, a plant cell, a plant or a part thereof, as compared to a corresponding non-transformed wild type non-human organism or a part thereof; and
[29378] (b) growing the non-human organism or a part thereof under conditions which permit the production of threonine or a composition comprising threonine in said non-human organism or in the culture medium surrounding said non-human organism.

[29379] An embodiment of the present invention relates to a process for the production of threonine, which comprises
[29380] (a1) increasing or generating the activity of a polypeptide comprising a polypeptide as depicted in a respective line in column 5 or 8 of Table II, application no. 4, or a homolog or a fragment thereof, a consensus sequence or at least one polypeptide motif as depicted in the respective line in column 8 of Table IV, application no. 4; or
[29381] (a2) increasing or generating the activity of an expression product of one or more nucleic acid molecule(s) comprising a polynucleotide as depicted in the respective line in column 5 or 8 of Table I, application no. 4, preferably the coding region thereof, or a homolog or a fragment thereof; or
[29382] (a3) increasing or generating the activity of a functional equivalent of (a1) or (a2);
[29383] in a non-human organism or a part thereof; preferably a microorganism, a plant cell, a plant or a part thereof, as compared to a corresponding non-transformed wild type non-human organism or a part thereof; and
[29384] (b) growing the non-human organism under conditions which permit the production of threonine or a composition comprising threonine in said non-human organism or in the culture medium surrounding said non-human organism.

[29385] Accordingly, the increase or generation of one or more said activities is for example conferred by one or more expression products of said nucleic acid molecule, e.g. proteins. Accordingly, in the present invention described above, the increase or generation of one or more said activities is for example conferred by one or more protein(s) each comprising a polypeptide selected from the group as depicted in Table II, application no. 4, column 5 and 8, or a homolog or a fragment thereof.

[29386] The process of the invention comprises in one embodiment the following steps:
[29387] (i) increasing or generating of the expression of; and/or
[29388] (ii) increasing or generating the expression of an expression product of; and/or
[29389] (iii) increasing or generating one or more activities of an expression product encoded by;
   at least one nucleic acid molecule (in the following “Fine Chemical Related Protein (FCRP)”-encoding gene or “FCRP”-gene) comprising a nucleic acid molecule selected from the group consisting of:
[29390] (a) a nucleic acid molecule encoding the polypeptide shown in column 5 or 8 of Table II, preferably Table II B, application no. 4, or a homolog or a fragment thereof;
[29391] (b) a nucleic acid molecule shown in column 5 or 8 of Table I, preferably Table I B, application no. 4, or a homolog or a fragment thereof (preferably the coding region thereof);
[29392] (c) a nucleic acid molecule, which, as a result of the degeneracy of the genetic code, can be derived from a polypeptide sequence depicted in column 5 or 8 of Table II, preferably Table II B, application no. 4;
[29393] (d) a nucleic acid molecule having at least 30%, in particular at least 50%, 60%, 70%, 80%, 85%, 90%, 95%, 97%, 98%, 99% or 99.5% identity with the nucleic acid molecule sequence of a polynucleotide comprising the nucleic acid molecule shown in column 5 or 8 of Table I, preferably Table I B, application no. 4, or the coding region thereof;
[29394] (e) a nucleic acid molecule encoding a polypeptide having at least 30%, in particular 50%, 60%, 70%, 80%, 85%, 90%, 95%, 97%, 98%, 99% or 99.5% identity with the amino acid sequence of the polypeptide encoded by the nucleic acid molecule of (a), (b), (c) or (d);
[29395] (f) a nucleic acid molecule which hybridizes with a nucleic acid molecule of (a), (b), (c), (d) or (e) under stringent hybridization conditions;
[29396] (g) a nucleic acid molecule encoding a polypeptide which can be isolated with the aid of monoclonal or polyclonal antibodies made against a polypeptide encoded by one of the nucleic acid molecules of (a), (b), (c), (d), (e) or (f);
[29397] (h) a nucleic acid molecule encoding a polypeptide comprising the consensus sequence or one or more polypeptide motifs as shown in column 8 of Table IV, application no. 4;
[29398] (i) a nucleic acid molecule encoding a polypeptide having the activity represented by a respective protein as depicted in column 5 of Table II, application no. 4;
[29399] (j) a nucleic acid molecule which comprises a polynucleotide, which is obtained by amplifying a cDNA library or a genomic library using the primers as depicted in column 8 of Table III, application no. 4; and
[29400] (k) a nucleic acid molecule which is obtainable by screening a suitable nucleic acid library, especially a cDNA library and/or a genomic library, under stringent hybridization conditions with a probe comprising a complementary sequence of a nucleic acid molecule of (a), (b), (c), (d), (e), (f), (g), (h), (i) or (j) or with a fragment thereof, having at least 15 nt, preferably 20 nt, 30 nt, 50 nt, 100 nt, 200 nt, 500 nt, 1000 nt, 1500 nt, 2000 nt or 3000 nt of a nucleic acid molecule complementary to a nucleic acid molecule sequence characterized in (a), (b), (c), (d), (e), (f), (g), (h), (i) or (j);
[29401] or a nucleic acid molecule comprising a sequence which is complementary thereto.
   (All the references to Tables I to IV are references to the corresponding lines of Tables I to IV.)

[29402] The term “increasing or generating of the expression of” may also be interchanged by the term “overexpressing”.

[29403] In a preferred embodiment thereof said nucleic acid molecule encodes a polypeptide which has the activity of the polypeptide represented by a protein comprising a polypeptide as depicted in the corresponding hit in column 5 of Table II, application no. 4.

[29404] In another preferred embodiment thereof said nucleic acid molecule confers a generation or an increase of the respective fine chemical in a non-human organism or a part thereof as compared to a corresponding wild-type non-human organism or part thereof.

[29405] In another preferred embodiment thereof said nucleic acid molecule encodes a polypeptide which has the activity of the polypeptide represented by a protein as depicted in the corresponding hit in column 5 of Table II, application no. 4, and confers a generation or an increase of the respective fine chemical in a non-human organism or a part thereof as compared to a corresponding wild-type non-human organism or part thereof.

[29406] Accordingly, the genes of the present invention or used in accordance with the present invention, which respectively encode a protein having an activity of (DL)-glycerol-3-phosphatase, 2,3-dihydroxyphenylpropionate 1,2-dioxygenase, 2-C-methyl-D-erythritol 4-phosphate cytidylyltransferase, 2-oxoglutarate dehydrogenase E1 subunit, 3-phosphoglycerate dehydrogenase, 47266012-protein, 49747384_SOYBEAN-protein, ABC metal ion transporter substrate-binding protein, ABC transporter permease protein, acetolactate synthase small subunit, acetyltransferase, acyl-CoA dehydrogenase, acyl-CoA synthase, argininosuccinate lyase, aspartate aminotransferase, aspartate kinase, At1g09680-protein, At4g32480-protein, At5g16650-protein, ATP synthase subunit beta, ATP-binding component of a transport system, AX653549-protein, b1003-protein, b1108-protein, b1445-protein, b1522-protein, b1670-protein, b1930-protein, b2360-protein, b2399-protein, b2513-protein, b2613-protein, b2739-protein, b2812-protein, b3083-protein, b3442-protein, b3646-protein, b3989-protein, b4029-protein, b4056-protein, b4250-protein, beta-galactosidase, beta-hydroxylase, bifunctional aspartokinase/homoserine dehydrogenase, bifunctional purine biosynthesis protein, branched chain amino acid ABC transporter ATP-binding protein, branched chain aminotransferase, branched-chain amino acid ABC transporter permease protein, calcium-dependent protein kinase, carbamoyl-phosphate synthase subunit, CCAAT-binding transcription factor, CDP-d iacylglycerolserine O-phosphatidyltransferase, cell division control protein, cell division protein, Chaperone protein CIpB, coproporphyrinogen III oxidase, cyclin, cyclin D , D-3-phosphoglycerate dehydrogenase, dihydrolipoamide acetyltransferase, dihydroxyacid dehydratase, DNA helicase II, DnaJ-like chaperone, D-serine dehydratase, elongation factor Tu, enoyl-CoA hydratase, enterobacterial common antigen polymerase, eukaryotic translation initiation factor 5, ferredoxin, GDP-mannose dehydrogenase, geranylgeranyl pyrophosphate synthase, gibberellin 20-oxidase, glucose dehydrogenase, glucose-6-phosphate 1-dehydrogenase, glutamate-ammonia-ligase, glutaredoxin, glutathione S-transferase, glycogen (starch) synthase, glycogen synthase, glycoprotease, glycosyl transferase, heat shock protein, heat shock transcription factor, hexose transporter, histone acetyltransferase, homocitrate synthase, homoserine dehydrogenase, hydrolase, isochorismate synthase, ketol-acid reductoisomerase, kinase, L-asparaginase, major facilitator superfamily transporter protein, malate dehydrogenase, malic enzyme, membrane transport protein, metal-dependent hydrolase, methyltransferase, mitochondrial dicarboxylate transporter, monothiol glutaredoxin, monthiol glutaredoxin, murein transglycosylase, NADP-dependent malic enzyme, nitrate/nitrite transport protein, oxireductase, peptidase, permease protein of peptide ABC transporter, phosphate transporter, phosphoanhydride phosphorylase, phosphoenolpyruvate carboxykinase, phosphoribosylaminoimidazole carboxylase catalytic subunit, photosystem II protein, polyphosphate kinase, protein kinase, protein phosphatase, pyruvate carboxylase, pyruvate kinase, restriction alleviation protein, sec-independent protein translocase, sensor histidine kinase, serine protease, sll0418-protein, slr0383-protein, succinyl-CoA synthetase beta chain, thioredoxin, threonine synthase, transcription factor, transcriptional regulator, transcriptional regulator protein, transport protein, TTC0881-protein, uroporphyrin-III C-methyltransferase, valine-pyruvate transaminase, XM_{—}473199-protein, ycl027w-protein, ydr183w-protein, YEL030C-A-protein, yfl054c-protein, ygl237c-protein, yhr131c-protein, YJL127W-A-protein, YKL038W-protein, zinc finger protein, or Zm_{—}4842_BE510522-protein, which respectively encode a protein comprising a polypeptide encoded by a nucleic acid sequence as shown in Table I, application no. 4, column 5 or 8, (preferably the coding region thereof), or a homolog or a fragment thereof, which respectively encode a protein comprising a polypeptide as depicted in Table II, application no. 4, column 5 or 8, or a homolg or a fragment thereof, and/or which respectively can be amplified with the primer set shown in Table III, application no. 4, column 8, are also referred to as “FCRP genes”.

[29407] Proteins or polypeptides encoded by “FCRP-genes” are referred to as “Fine Chemical Related Proteins” or “FCRP”. For the purposes of the description of the present invention, the respective protein having an activity of (DL)-glycerol-3-phosphatase, 2,3-dihydroxyphenylpropionate 1,2-dioxygenase, 2-C-methyl-D-erythritol 4-phosphate cytidylyltransferase, 2-oxoglutarate dehydrogenase E1 subunit, 3-phosphoglycerate dehydrogenase, 47266012-protein, 49747384_SOYBEAN-protein, ABC metal ion transporter substrate-binding protein, ABC transporter permease protein, acetolactate synthase small subunit, acetyltransferase, acyl-CoA dehydrogenase, acyl-CoA synthase, argininosuccinate lyase, aspartate aminotransferase, aspartate kinase, At1g09680-protein, At4g32480-protein, At5g16650-protein, ATP synthase subunit beta, ATP-binding component of a transport system, AX653549-protein, b1003-protein, b1108-protein, b1445-protein, b1522-protein, b1670-protein, b1930-protein, b2360-protein, b2399-protein, b2513-protein, b2613-protein, b2739-protein, b2812-protein, b3083-protein, b3442-protein, b3646-protein, b3989-protein, b4029-protein, b4056-protein, b4250-protein, beta-galactosidase, beta-hydroxylase, bifunctional aspartokinase/homoserine dehydrogenase, bifunctional purine biosynthesis protein, branched chain amino acid ABC transporter ATP-binding protein, branched chain aminotransferase, branched-chain amino acid ABC transporter permease protein, calcium-dependent protein kinase, carbamoyl-phosphate synthase subunit, CCAAT-binding transcription factor, CDP-diacylglycerol-serine O-phosphatidyltransferase, cell division control protein, cell division protein, Chaperone protein CIpB, coproporphyrinogen III oxidase, cyclin, cyclin D , D-3-phosphoglycerate dehydrogenase, dihydrolipoamide acetyltransferase, dihydroxyacid dehydratase, DNA helicase II, DnaJ-like chaperone, D-serine dehydratase, elongation factor Tu, enoyl-CoA hydratase, enterobacterial common antigen polymerase, eukaryotic translation initiation factor 5, ferredoxin, GDP-mannose dehydrogenase, geranylgeranyl pyrophosphate synthase, gibberellin 20-oxidase, glucose dehydrogenase, glucose-6-phosphate 1-dehydrogenase, glutamate-ammonia-ligase, glutaredoxin, glutathione S-transferase, glycogen (starch) synthase, glycogen synthase, glycoprotease, glycosyl transferase, heat shock protein, heat shock transcription factor, hexose transporter, histone acetyltransferase, homocitrate synthase, homoserine dehydrogenase, hydrolase, isochorismate synthase, ketol-acid reductoisomerase, kinase, L-asparaginase, major facilitator superfamily transporter protein, malate dehydrogenase, malic enzyme, membrane transport protein, metal-dependent hydrolase, methyltransferase, mitochondrial dicarboxylate transporter, monothiol glutaredoxin, monthiol glutaredoxin, murein transglycosylase, NADP-dependent malic enzyme, nitrate/nitrite transport protein, oxireductase, peptidase, permease protein of peptide ABC transporter, phosphate transporter, phosphoanhydride phosphorylase, phosphoenolpyruvate carboxykinase, phosphoribosylaminoimidazole carboxylase catalytic subunit, photosystem II protein, polyphosphate kinase, protein kinase, protein phosphatase, pyruvate carboxylase, pyruvate kinase, restriction alleviation protein, sec-independent protein translocase, sensor histidine kinase, serine protease, sll0418-protein, slr0383-protein, succinyl-CoA synthetase beta chain, thioredoxin, threonine synthase, transcription factor, transcriptional regulator, transcriptional regulator protein, transport protein, TTC0881-protein, uroporphyrin-III C-methyltransferase, valine-pyruvate transaminase, XM_{—}473199-protein, ycl027w-protein, ydr183w-protein, YEL030C-A-protein, yfl054c-protein, ygl237c-protein, yhr131c-protein, YJL127W-A-protein, YKL038W-protein, zinc finger protein, or Zm_{—}4842_BE510522-protein, the respective protein comprising a polypeptide encoded by one or more respective nucleic acid sequences as shown in Table I, application no. 4, column 5 or 8, (preferably the coding region thereof), or a homolog or fragment thereof, the respective protein comprising a respective polypeptide as depicted in Table II, application no. 4, column 5 or 8, or a homolog or fragment thereof, the respective protein comprising a sequence corresponding to the consensus sequence as shown in Table IV, application no. 4, column 8, and/or the respective protein comprising at least one polypeptide motif as shown in Table IV, application no. 4, column 8 is also referred to as Fine Chemical Related Protein” or “FCRP”.

[29408] Thus, in one embodiment, the present invention provides a process of the production of threonine, by increasing or generating one or more activities, especially selected from the group consisting of (DL)-glycerol-3-phosphatase, 2,3-dihydroxyphenylpropionate 1,2-dioxygenase, 2-C-methyl-D-erythritol 4-phosphate cytidylyltransferase, 2-oxoglutarate dehydrogenase E1 subunit, 3-phosphoglycerate dehydrogenase, 47266012-protein, 49747384_SOYBEAN -protein, ABC metal ion transporter substrate-binding protein, ABC transporter permease protein, acetolactate synthase small subunit, acetyltransferase, acyl-CoA dehydrogenase, acyl-CoA synthase, argininosuccinate lyase, aspartate aminotransferase, aspartate kinase, At1g09680-protein, At4g32480-protein, At5g16650-protein, ATP synthase subunit beta, ATP-binding component of a transport system, AX653549-protein, b1003-protein, b1108-protein, b1445-protein, b1522-protein, b1670-protein, b1930-protein, b2360-protein, b2399-protein, b2513-protein, b2613-protein, b2739-protein, b2812-protein, b3083-protein, b3442-protein, b3646-protein, b3989-protein, b4029-protein, b4056-protein, b4250-protein, beta-galactosidase, beta-hydroxylase, bifunctional aspartokinase/homoserine dehydrogenase, bifunctional purine biosynthesis protein, branched chain amino acid ABC transporter ATP-binding protein, branched chain aminotransferase, branched-chain amino acid ABC transporter permease protein, calcium-dependent protein kinase, carbamoyl-phosphate synthase subunit, CCAAT-binding transcription factor, CDP-diacylglycerol-serine O-phosphatidyltransferase, cell division control protein, cell division protein, Chaperone protein CIpB, coproporphyrinogen III oxidase, cyclin, cyclin D , D-3-phosphoglycerate dehydrogenase, dihydrolipoamide acetyltransferase, dihydroxyacid dehydratase, DNA helicase II, DnaJ-like chaperone, D-serine dehydratase, elongation factor Tu, enoyl-CoA hydratase, enterobacterial common antigen polymerase, eukaryotic translation initiation factor 5, ferredoxin, GDP-mannose dehydrogenase, geranylgeranyl pyrophosphate synthase, gibberellin 20-oxidase, glucose dehydrogenase, glucose-6-phosphate 1-dehydrogenase, glutamate-ammonia-ligase, glutaredoxin, glutathione S-transferase, glycogen (starch) synthase, glycogen synthase, glycoprotease, glycosyl transferase, heat shock protein, heat shock transcription factor, hexose transporter, histone acetyltransferase, homocitrate synthase, homoserine dehydrogenase, hydrolase, isochorismate synthase, ketol-acid reductoisomerase, kinase, L-asparaginase, major facilitator superfamily transporter protein, malate dehydrogenase, malic enzyme, membrane transport protein, metal-dependent hydrolase, methyltransferase, mitochondrial dicarboxylate transporter, monothiol glutaredoxin, monthiol glutaredoxin, murein transglycosylase, NADP-dependent malic enzyme, nitrate/nitrite transport protein, oxireductase, peptidase, permease protein of peptide ABC transporter, phosphate transporter, phosphoanhydride phosphorylase, phosphoenolpyruvate carboxykinase, phosphoribosylaminoimidazole carboxylase catalytic subunit, photosystem II protein, polyphosphate kinase, protein kinase, protein phosphatase, pyruvate carboxylase, pyruvate kinase, restriction alleviation protein, sec-independent protein translocase, sensor histidine kinase, serine protease, sll0418-protein, slr0383-protein, succinyl-CoA synthetase beta chain, thioredoxin, threonine synthase, transcription factor, transcriptional regulator, transcriptional regulator protein, transport protein, TTC0881-protein, uroporphyrin-111 C-methyltransferase, valine-pyruvate transaminase, XM_{—}473199-protein, ycl027w-protein, ydr183w-protein, YEL030C-A-protein, yfl054c-protein, ygl237c-protein, yhr131c-protein, YJL127W-A-protein, YKL038W-protein, zinc finger protein, and Zm_{—}4842_BE510522-protein, which is conferred by one or more FCRPs or the gene product of one or more FCRP-genes, for example by the gene product of a nucleic acid sequences comprising a polynucleotide selected from the group as shown in Table I, application no. 4, column 5 or 8, (preferably by the coding region thereof), or a homolog or a fragment thereof, e.g. or by one or more proteins each comprising a polypeptide encoded by one or more nucleic acid sequences selected from the group as shown in Table I, application no. 4, column 5 or 8, (preferably by the coding region thereof), or a homolog or a fragment thereof, or by one or more protein(s) each comprising a polypeptide selected from the group as depicted in Table II, application no. 4, column 5 and 8, or a homolog thereof, or a protein comprising a sequence corresponding to the consensus sequence or comprising at least one polypeptide motif as shown in Table IV, application no. 4, column 8.

[29409] for the disclosure of this paragraph see [0025.1.1.1] above.

[29410] In an embodiment, the process comprises increasing or generating the activity of one or more polypeptides having said activity, e.g. by generating or increasing the amount and/or specific activity in the cell or a compartment of a cell of one of more FCRP, especially selected from the group consisting of (DL)-glycerol-3-phosphatase, 2,3-dihydroxyphenylpropionate 1,2-dioxygenase, 2-C-methyl-D-erythritol 4-phosphate cytidylyltransferase, 2-oxoglutarate dehydrogenase E1 subunit, 3-phosphoglycerate dehydrogenase, 47266012-protein, 49747384_SOYBEAN-protein, ABC metal ion transporter substrate-binding protein, ABC transporter permease protein, acetolactate synthase small subunit, acetyltransferase, acyl-CoA dehydrogenase, acyl-CoA synthase, argininosuccinate lyase, aspartate aminotransferase, aspartate kinase, At1g09680-protein, At4g32480-protein, At5g16650-protein, ATP synthase subunit beta, ATP-binding component of a transport system, AX653549-protein, b1003-protein, b1108-protein, b1445-protein, b1522-protein, b1670-protein, b1930-protein, b2360-protein, b2399-protein, b2513-protein, b2613-protein, b2739-protein, b2812-protein, b3083-protein, b3442-protein, b3646-protein, b3989-protein, b4029-protein, b4056-protein, b4250-protein, beta-galactosidase, beta-hydroxylase, bifunctional aspartokinase/homoserine dehydrogenase, bifunctional purine biosynthesis protein, branched chain amino acid ABC transporter ATP-binding protein, branched chain aminotransferase, branched-chain amino acid ABC transporter permease protein, calcium-dependent protein kinase, carbamoyl-phosphate synthase subunit, CCAAT-binding transcription factor, CDP-diacylglycerolserine O-phosphatidyltransferase, cell division control protein, cell division protein, Chaperone protein CIpB, coproporphyrinogen III oxidase, cyclin, cyclin D , D-3-phosphoglycerate dehydrogenase, dihydrolipoamide acetyltransferase, dihydroxyacid dehydratase, DNA helicase II, DnaJ-like chaperone, D-serine dehydratase, elongation factor Tu, enoyl-CoA hydratase, enterobacterial common antigen polymerase, eukaryotic translation initiation factor 5, ferredoxin, GDP-mannose dehydrogenase, geranylgeranyl pyrophosphate synthase, gibberellin 20-oxidase, glucose dehydrogenase, glucose-6-phosphate 1-dehydrogenase, glutamate-ammonia-ligase, glutaredoxin, glutathione S-transferase, glycogen (starch) synthase, glycogen synthase, glycoprotease, glycosyl transferase, heat shock protein, heat shock transcription factor, hexose transporter, histone acetyltransferase, homocitrate synthase, homoserine dehydrogenase, hydrolase, isochorismate synthase, ketol-acid reductoisomerase, kinase, L-asparaginase, major facilitator superfamily transporter protein, malate dehydrogenase, malic enzyme, membrane transport protein, metal-dependent hydrolase, methyltransferase, mitochondrial dicarboxylate transporter, monothiol glutaredoxin, monthiol glutaredoxin, murein transglycosylase, NADP-dependent malic enzyme, nitrate/nitrite transport protein, oxireductase, peptidase, permease protein of peptide ABC transporter, phosphate transporter, phosphoanhydride phosphorylase, phosphoenolpyruvate carboxykinase, phosphoribosylaminoimidazole carboxylase catalytic subunit, photosystem II protein, polyphosphate kinase, protein kinase, protein phosphatase, pyruvate carboxylase, pyruvate kinase, restriction alleviation protein, sec-independent protein translocase, sensor histidine kinase, serine protease, sll0418-protein, slr0383-protein, succinyl-CoA synthetase beta chain, thioredoxin, threonine synthase, transcription factor, transcriptional regulator, transcriptional regulator protein, transport protein, TTC0881-protein, uroporphyrin-III C-methyltransferase, valine-pyruvate transaminase, XM_{—}473199-protein, ycl027w-protein, ydr183w-protein, YEL030C-A-protein, yfl054c-protein, ygl237c-protein, yhr131c-protein, YJL127W-A-protein, YKL038W-protein, zinc finger protein, and Zm_{—}4842_BE510522-protein, for example of the respective polypeptide as depicted in Table II, application no. 4, column 5 and 8, or a homolog or a fragment thereof, or the respective polypeptide comprising a sequence corresponding to the consensus sequences as shown in Table IV, application no. 4, column 8, or the respective polypeptide comprising at least one polypeptide motif as depicted in Table IV, application no. 4, column 8.

[29411] A further embodiment of the present invention relates to a process for the production of threonine, which comprises
[29412] (a) increasing or generating the activity of a 47266012-protein non-targeted in a non-human organism or a part thereof, preferably a microorganism, a plant cell, a plant or a part thereof, as compared to a corresponding non-transformed wild type non-human organism or a part thereof; and
[29413] (b) growing the non-human organism or a part thereof under conditions which permit the production of threonine or a composition comprising threonine in said non-human organism or in the culture medium surrounding said non-human organism.

[29414] A further embodiment of the present invention relates to a process for the production of threonine, which comprises
[29415] (a) increasing or generating the activity of a 49747384_SOYBEAN-protein non-targeted in a non-human organism or a part thereof, preferably a microorganism, a plant cell, a plant or a part thereof, as compared to a corresponding non-transformed wild type non-human organism or a part thereof; and
[29416] (b) growing the non-human organism or a part thereof under conditions which permit the production of threonine or a composition comprising threonine in said non-human organism or in the culture medium surrounding said non-human organism.

[29417] A further embodiment of the present invention relates to a process for the production of threonine, which comprises
[29418] (a) increasing or generating the activity of a glucose-6-phosphate 1-dehydrogenase non-targeted in a non-human organism or a part thereof, preferably a microorganism, a plant cell, a plant or a part thereof, as compared to a corresponding non-transformed wild type non-human organism or a part thereof; and
[29419] (b) growing the non-human organism or a part thereof under conditions which permit the production of threonine or a composition comprising threonine in said non-human organism or in the culture medium surrounding said non-human organism.

[29420] A further embodiment of the present invention relates to a process for the production of threonine, which comprises
[29421] (a) increasing or generating the activity of a At1g09680-protein non-targeted in a non-human organism or a part thereof, preferably a microorganism, a plant cell, a plant or a part thereof, as compared to a corresponding non-transformed wild type non-human organism or a part thereof; and
[29422] (b) growing the non-human organism or a part thereof under conditions which permit the production of threonine or a composition comprising threonine in said non-human organism or in the culture medium surrounding said non-human organism.

[29423] A further embodiment of the present invention relates to a process for the production of threonine, which comprises
[29424] (a) increasing or generating the activity of a bifunctional aspartokinase/homoserine dehydrogenase non-targeted in a non-human organism or a part thereof, preferably a microorganism, a plant cell, a plant or a part thereof, as compared to a corresponding non-transformed wild type non-human organism or a part thereof; and
[29425] (b) growing the non-human organism or a part thereof under conditions which permit the production of threonine or a composition comprising threonine in said non-human organism or in the culture medium surrounding said non-human organism.

[29426] A further embodiment of the present invention relates to a process for the production of threonine, which comprises
[29427] (a) increasing or generating the activity of a eukaryotic translation initiation factor 5 non-targeted in a non-human organism or a part thereof, preferably a microorganism, a plant cell, a plant or a part thereof, as compared to a corresponding non-transformed wild type non-human organism or a part thereof; and
[29428] (b) growing the non-human organism or a part thereof under conditions which permit the production of threonine or a composition comprising threonine in said non-human organism or in the culture medium surrounding said non-human organism.

[29429] A further embodiment of the present invention relates to a process for the production of threonine, which comprises
[29430] (a) increasing or generating the activity of a transcriptional regulator non-targeted in a non-human organism or a part thereof, preferably a microorganism, a plant cell, a plant or a part thereof, as compared to a corresponding non-transformed wild type non-human organism or a part thereof; and
[29431] (b) growing the non-human organism or a part thereof under conditions which permit the production of threonine or a composition comprising threonine in said non-human organism or in the culture medium surrounding said non-human organism.

[29432] A further embodiment of the present invention relates to a process for the production of threonine, which comprises
[29433] (a) increasing or generating the activity of a protein phosphatase non-targeted in a non-human organism or a part thereof, preferably a microorganism, a plant cell, a plant or a part thereof, as compared to a corresponding non-transformed wild type non-human organism or a part thereof; and
[29434] (b) growing the non-human organism or a part thereof under conditions which permit the production of threonine or a composition comprising threonine in said non-human organism or in the culture medium surrounding said non-human organism.

[29435] A further embodiment of the present invention relates to a process for the production of threonine, which comprises
[29436] (a) increasing or generating the activity of a protein kinase non-targeted in a non-human organism or a part thereof, preferably a microorganism, a plant cell, a plant or a part thereof, as compared to a corresponding non-transformed wild type non-human organism or a part thereof; and
[29437] (b) growing the non-human organism or a part thereof under conditions which permit the production of threonine or a composition comprising threonine in said non-human organism or in the culture medium surrounding said non-human organism.

[29438] A further embodiment of the present invention relates to a process for the production of threonine, which comprises
[29439] (a) increasing or generating the activity of a protein phosphatase non-targeted in a non-human organism or a part thereof, preferably a microorganism, a plant cell, a plant or a part thereof, as compared to a corresponding non-transformed wild type non-human organism or a part thereof; and
[29440] (b) growing the non-human organism or a part thereof under conditions which permit the production of threonine or a composition comprising threonine in said non-human organism or in the culture medium surrounding said non-human organism.

[29441] A further embodiment of the present invention relates to a process for the production of threonine, which comprises
[29442] (a) increasing or generating the activity of a protein phosphatase non-targeted in a non-human organism or a part thereof, preferably a microorganism, a plant cell, a plant or a part thereof, as compared to a corresponding non-transformed wild type non-human organism or a part thereof; and
[29443] (b) growing the non-human organism or a part thereof under conditions which permit the production of threonine or a composition comprising threonine in said non-human organism or in the culture medium surrounding said non-human organism.

[29444] A further embodiment of the present invention relates to a process for the production of threonine, which comprises
[29445] (a) increasing or generating the activity of a glutaredoxin non-targeted in a non-human organism or a part thereof, preferably a microorganism, a plant cell, a plant or a part thereof, as compared to a corresponding non-transformed wild type non-human organism or a part thereof; and
[29446] (b) growing the non-human organism or a part thereof under conditions which permit the production of threonine or a composition comprising threonine in said non-human organism or in the culture medium surrounding said non-human organism.

[29447] A further embodiment of the present invention relates to a process for the production of threonine, which comprises
[29448] (a) increasing or generating the activity of a CCAAT-binding transcription factor non-targeted in a non-human organism or a part thereof, preferably a microorganism, a plant cell, a plant or a part thereof, as compared to a corresponding non-transformed wild type non-human organism or a part thereof; and
[29449] (b) growing the non-human organism or a part thereof under conditions which permit the production of threonine or a composition comprising threonine in said non-human organism or in the culture medium surrounding said non-human organism.

[29450] A further embodiment of the present invention relates to a process for the production of threonine, which comprises
[29451] (a) increasing or generating the activity of a protein kinase non-targeted in a non-human organism or a part thereof, preferably a microorganism, a plant cell, a plant or a part thereof, as compared to a corresponding non-transformed wild type non-human organism or a part thereof; and
[29452] (b) growing the non-human organism or a part thereof under conditions which permit the production of threonine or a composition comprising threonine in said non-human organism or in the culture medium surrounding said non-human organism.

[29453] A further embodiment of the present invention relates to a process for the production of threonine, which comprises
[29454] (a) increasing or generating the activity of a glycosyl transferase non-targeted in a non-human organism or a part thereof, preferably a microorganism, a plant cell, a plant or a part thereof, as compared to a corresponding non-transformed wild type non-human organism or a part thereof; and
[29455] (b) growing the non-human organism or a part thereof under conditions which permit the production of threonine or a composition comprising threonine in said non-human organism or in the culture medium surrounding said non-human organism.

[29456] A further embodiment of the present invention relates to a process for the production of threonine, which comprises
[29457] (a) increasing or generating the activity of a monthiol glutaredoxin non-targeted in a non-human organism or a part thereof, preferably a microorganism, a plant cell, a plant or a part thereof, as compared to a corresponding non-transformed wild type non-human organism or a part thereof; and
[29458] (b) growing the non-human organism or a part thereof under conditions which permit the production of threonine or a composition comprising threonine in said non-human organism or in the culture medium surrounding said non-human organism.

[29459] A further embodiment of the present invention relates to a process for the production of threonine, which comprises
[29460] (a) increasing or generating the activity of a glutaredoxin non-targeted in a non-human organism or a part thereof, preferably a microorganism, a plant cell, a plant or a part thereof, as compared to a corresponding non-transformed wild type non-human organism or a part thereof; and
[29461] (b) growing the non-human organism or a part thereof under conditions which permit the production of threonine or a composition comprising threonine in said non-human organism or in the culture medium surrounding said non-human organism.

[29462] A further embodiment of the present invention relates to a process for the production of threonine, which comprises
[29463] (a) increasing or generating the activity of a monothiol glutaredoxin non-targeted in a non-human organism or a part thereof, preferably a microorganism, a plant cell, a plant or a part thereof, as compared to a corresponding non-transformed wild type non-human organism or a part thereof; and
[29464] (b) growing the non-human organism or a part thereof under conditions which permit the production of threonine or a composition comprising threonine in said non-human organism or in the culture medium surrounding said non-human organism.

[29465] A further embodiment of the present invention relates to a process for the production of threonine, which comprises
[29466] (a) increasing or generating the activity of a monothiol glutaredoxin non-targeted in a non-human organism or a part thereof, preferably a microorganism, a plant cell, a plant or a part thereof, as compared to a corresponding non-transformed wild type non-human organism or a part thereof; and
[29467] (b) growing the non-human organism or a part thereof under conditions which permit the production of threonine or a composition comprising threonine in said non-human organism or in the culture medium surrounding said non-human organism.

[29468] A further embodiment of the present invention relates to a process for the production of threonine, which comprises
[29469] (a) increasing or generating the activity of a monothiol glutaredoxin non-targeted in a non-human organism or a part thereof, preferably a microorganism, a plant cell, a plant or a part thereof, as compared to a corresponding non-transformed wild type non-human organism or a part thereof; and
[29470] (b) growing the non-human organism or a part thereof under conditions which permit the production of threonine or a composition comprising threonine in said non-human organism or in the culture medium surrounding said non-human organism.

[29471] A further embodiment of the present invention relates to a process for the production of threonine, which comprises
[29472] (a) increasing or generating the activity of a heat shock transcription factor non-targeted in a non-human organism or a part thereof, preferably a microorganism, a plant cell, a plant or a part thereof, as compared to a corresponding non-transformed wild type non-human organism or a part thereof; and
[29473] (b) growing the non-human organism or a part thereof under conditions which permit the production of threonine or a composition comprising threonine in said non-human organism or in the culture medium surrounding said non-human organism.

[29474] A further embodiment of the present invention relates to a process for the production of threonine, which comprises
[29475] (a) increasing or generating the activity of a At4g32480-protein non-targeted in a non-human organism or a part thereof, preferably a microorganism, a plant cell, a plant or a part thereof, as compared to a corresponding non-transformed wild type non-human organism or a part thereof; and
[29476] (b) growing the non-human organism or a part thereof under conditions which permit the production of threonine or a composition comprising threonine in said non-human organism or in the culture medium surrounding said non-human organism.

[29477] A further embodiment of the present invention relates to a process for the production of threonine, which comprises
[29478] (a) increasing or generating the activity of a cyclin D non-targeted in a non-human organism or a part thereof, preferably a microorganism, a plant cell, a plant or a part thereof, as compared to a corresponding non-transformed wild type non-human organism or a part thereof; and
[29479] (b) growing the non-human organism or a part thereof under conditions which permit the production of threonine or a composition comprising threonine in said non-human organism or in the culture medium surrounding said non-human organism.

[29480] A further embodiment of the present invention relates to a process for the production of threonine, which comprises
[29481] (a) increasing or generating the activity of a calcium-dependent protein kinase non-targeted in a non-human organism or a part thereof, preferably a microorganism, a plant cell, a plant or a part thereof, as compared to a corresponding non-transformed wild type non-human organism or a part thereof; and
[29482] (b) growing the non-human organism or a part thereof under conditions which permit the production of threonine or a composition comprising threonine in said non-human organism or in the culture medium surrounding said non-human organism.

[29483] A further embodiment of the present invention relates to a process for the production of threonine, which comprises
[29484] (a) increasing or generating the activity of a gibberellin 20-oxidase non-targeted in a non-human organism or a part thereof, preferably a microorganism, a plant cell, a plant or a part thereof, as compared to a corresponding non-transformed wild type non-human organism or a part thereof; and
[29485] (b) growing the non-human organism or a part thereof under conditions which permit the production of threonine or a composition comprising threonine in said non-human organism or in the culture medium surrounding said non-human organism.

[29486] A further embodiment of the present invention relates to a process for the production of threonine, which comprises
[29487] (a) increasing or generating the activity of a aspartate kinase non-targeted in a non-human organism or a part thereof, preferably a microorganism, a plant cell, a plant or a part thereof, as compared to a corresponding non-transformed wild type non-human organism or a part thereof; and
[29488] (b) growing the non-human organism or a part thereof under conditions which permit the production of threonine or a composition comprising threonine in said non-human organism or in the culture medium surrounding said non-human organism.

[29489] A further embodiment of the present invention relates to a process for the production of threonine, which comprises
[29490] (a) increasing or generating the activity of a At5g16650-protein non-targeted in a non-human organism or a part thereof, preferably a microorganism, a plant cell, a plant or a part thereof, as compared to a corresponding non-transformed wild type non-human organism or a part thereof; and
[29491] (b) growing the non-human organism or a part thereof under conditions which permit the production of threonine or a composition comprising threonine in said non-human organism or in the culture medium surrounding said non-human organism.

[29492] A further embodiment of the present invention relates to a process for the production of threonine, which comprises
[29493] (a) increasing or generating the activity of a thioredoxin non-targeted in a non-human organism or a part thereof, preferably a microorganism, a plant cell, a plant or a part thereof, as compared to a corresponding non-transformed wild type non-human organism or a part thereof; and
[29494] (b) growing the non-human organism or a part thereof under conditions which permit the production of threonine or a composition comprising threonine in said non-human organism or in the culture medium surrounding said non-human organism.

[29495] A further embodiment of the present invention relates to a process for the production of threonine, which comprises
[29496] (a) increasing or generating the activity of a protein phosphatase non-targeted in a non-human organism or a part thereof, preferably a microorganism, a plant cell, a plant or a part thereof, as compared to a corresponding non-transformed wild type non-human organism or a part thereof; and
[29497] (b) growing the non-human organism or a part thereof under conditions which permit the production of threonine or a composition comprising threonine in said non-human organism or in the culture medium surrounding said non-human organism.

[29498] A further embodiment of the present invention relates to a process for the production of threonine, which comprises
[29499] (a) increasing or generating the activity of a zinc finger protein non-targeted in a non-human organism or a part thereof, preferably a microorganism, a plant cell, a plant or a part thereof, as compared to a corresponding non-transformed wild type non-human organism or a part thereof; and
[29500] (b) growing the non-human organism or a part thereof under conditions which permit the production of threonine or a composition comprising threonine in said non-human organism or in the culture medium surrounding said non-human organism.

[29501] A further embodiment of the present invention relates to a process for the production of threonine, which comprises
[29502] (a) increasing or generating the activity of a CDP-diacylglycerol-serine O-phosphatidyltransferase non-targeted in a non-human organism or a part thereof, preferably a microorganism, a plant cell, a plant or a part thereof, as compared to a corresponding non-transformed wild type non-human organism or a part thereof; and
[29503] (b) growing the non-human organism or a part thereof under conditions which permit the production of threonine or a composition comprising threonine in said non-human organism or in the culture medium surrounding said non-human organism.

[29504] A further embodiment of the present invention relates to a process for the production of threonine, which comprises
[29505] (a) increasing or generating the activity of a malic enzyme non-targeted in a non-human organism or a part thereof, preferably a microorganism, a plant cell, a plant or a part thereof, as compared to a corresponding non-transformed wild type non-human organism or a part thereof; and
[29506] (b) growing the non-human organism or a part thereof under conditions which permit the production of threonine or a composition comprising threonine in said non-human organism or in the culture medium surrounding said non-human organism.

[29507] A further embodiment of the present invention relates to a process for the production of threonine, which comprises
[29508] (a) increasing or generating the activity of a sec-independent protein translocase non-targeted in a non-human organism or a part thereof, preferably a microorganism, a plant cell, a plant or a part thereof, as compared to a corresponding non-transformed wild type non-human organism or a part thereof; and
[29509] (b) growing the non-human organism or a part thereof under conditions which permit the production of threonine or a composition comprising threonine in said non-human organism or in the culture medium surrounding said non-human organism.

[29510] A further embodiment of the present invention relates to a process for the production of threonine, which comprises
[29511] (a) increasing or generating the activity of a beta-hydroxylase non-targeted in a non-human organism or a part thereof, preferably a microorganism, a plant cell, a plant or a part thereof, as compared to a corresponding non-transformed wild type non-human organism or a part thereof; and
[29512] (b) growing the non-human organism or a part thereof under conditions which permit the production of threonine or a composition comprising threonine in said non-human organism or in the culture medium surrounding said non-human organism.

[29513] A further embodiment of the present invention relates to a process for the production of threonine, which comprises
[29514] (a) increasing or generating the activity of a elongation factor Tu non-targeted in a non-human organism or a part thereof, preferably a microorganism, a plant cell, a plant or a part thereof, as compared to a corresponding non-transformed wild type non-human organism or a part thereof; and
[29515] (b) growing the non-human organism or a part thereof under conditions which permit the production of threonine or a composition comprising threonine in said non-human organism or in the culture medium surrounding said non-human organism.

[29516] A further embodiment of the present invention relates to a process for the production of threonine, which comprises
[29517] (a) increasing or generating the activity of a ABC transporter permease protein non-targeted in a non-human organism or a part thereof, preferably a microorganism, a plant cell, a plant or a part thereof, as compared to a corresponding non-transformed wild type non-human organism or a part thereof; and
[29518] (b) growing the non-human organism or a part thereof under conditions which permit the production of threonine or a composition comprising threonine in said non-human organism or in the culture medium surrounding said non-human organism.

[29519] A further embodiment of the present invention relates to a process for the production of threonine, which comprises
[29520] (a) increasing or generating the activity of a acyl-CoA synthase non-targeted in a non-human organism or a part thereof, preferably a microorganism, a plant cell, a plant or a part thereof, as compared to a corresponding non-transformed wild type non-human organism or a part thereof; and
[29521] (b) growing the non-human organism or a part thereof under conditions which permit the production of threonine or a composition comprising threonine in said non-human organism or in the culture medium surrounding said non-human organism.

[29522] A further embodiment of the present invention relates to a process for the production of threonine, which comprises
[29523] (a) increasing or generating the activity of a 2-oxoglutarate dehydrogenase E1 subunit non-targeted in a non-human organism or a part thereof, preferably a microorganism, a plant cell, a plant or a part thereof, as compared to a corresponding non-transformed wild type non-human organism or a part thereof; and
[29524] (b) growing the non-human organism or a part thereof under conditions which permit the production of threonine or a composition comprising threonine in said non-human organism or in the culture medium surrounding said non-human organism.

[29525] A further embodiment of the present invention relates to a process for the production of threonine, which comprises
[29526] (a) increasing or generating the activity of a permease protein of peptide ABC transporter non-targeted in a non-human organism or a part thereof, preferably a microorganism, a plant cell, a plant or a part thereof, as compared to a corresponding non-transformed wild type non-human organism or a part thereof; and
[29527] (b) growing the non-human organism or a part thereof under conditions which permit the production of threonine or a composition comprising threonine in said non-human organism or in the culture medium surrounding said non-human organism.

[29528] A further embodiment of the present invention relates to a process for the production of threonine, which comprises
[29529] (a) increasing or generating the activity of a GDP-mannose dehydrogenase non-targeted in a non-human organism or a part thereof, preferably a microorganism, a plant cell, a plant or a part thereof, as compared to a corresponding non-transformed wild type non-human organism or a part thereof; and
[29530] (b) growing the non-human organism or a part thereof under conditions which permit the production of threonine or a composition comprising threonine in said non-human organism or in the culture medium surrounding said non-human organism.

[29531] A further embodiment of the present invention relates to a process for the production of threonine, which comprises
[29532] (a) increasing or generating the activity of a enoyl-CoA hydratase non-targeted in a non-human organism or a part thereof, preferably a microorganism, a plant cell, a plant or a part thereof, as compared to a corresponding non-transformed wild type non-human organism or a part thereof; and
[29533] (b) growing the non-human organism or a part thereof under conditions which permit the production of threonine or a composition comprising threonine in said non-human organism or in the culture medium surrounding said non-human organism.

[29534] A further embodiment of the present invention relates to a process for the production of threonine, which comprises
[29535] (a) increasing or generating the activity of a transcriptional regulator non-targeted in a non-human organism or a part thereof, preferably a microorganism, a plant cell, a plant or a part thereof, as compared to a corresponding non-transformed wild type non-human organism or a part thereof; and
[29536] (b) growing the non-human organism or a part thereof under conditions which permit the production of threonine or a composition comprising threonine in said non-human organism or in the culture medium surrounding said non-human organism.

[29537] A further embodiment of the present invention relates to a process for the production of threonine, which comprises
[29538] (a) increasing or generating the activity of a homoserine dehydrogenase non-targeted in a non-human organism or a part thereof, preferably a microorganism, a plant cell, a plant or a part thereof, as compared to a corresponding non-transformed wild type non-human organism or a part thereof; and
[29539] (b) growing the non-human organism or a part thereof under conditions which permit the production of threonine or a composition comprising threonine in said non-human organism or in the culture medium surrounding said non-human organism.

[29540] A further embodiment of the present invention relates to a process for the production of threonine, which comprises
[29541] (a) increasing or generating the activity of a hydrolase non-targeted in a non-human organism or a part thereof, preferably a microorganism, a plant cell, a plant or a part thereof, as compared to a corresponding non-transformed wild type non-human organism or a part thereof; and
[29542] (b) growing the non-human organism or a part thereof under conditions which permit the production of threonine or a composition comprising threonine in said non-human organism or in the culture medium surrounding said non-human organism.

[29543] A further embodiment of the present invention relates to a process for the production of threonine, which comprises
[29544] (a) increasing or generating the activity of a glutamate-ammonia-ligase non-targeted in a non-human organism or a part thereof, preferably a microorganism, a plant cell, a plant or a part thereof, as compared to a corresponding non-transformed wild type non-human organism or a part thereof; and
[29545] (b) growing the non-human organism or a part thereof under conditions which permit the production of threonine or a composition comprising threonine in said non-human organism or in the culture medium surrounding said non-human organism.

[29546] A further embodiment of the present invention relates to a process for the production of threonine, which comprises
[29547] (a) increasing or generating the activity of a peptidase non-targeted in a non-human organism or a part thereof, preferably a microorganism, a plant cell, a plant or a part thereof, as compared to a corresponding non-transformed wild type non-human organism or a part thereof; and
[29548] (b) growing the non-human organism or a part thereof under conditions which permit the production of threonine or a composition comprising threonine in said non-human organism or in the culture medium surrounding said non-human organism.

[29549] A further embodiment of the present invention relates to a process for the production of threonine, which comprises
[29550] (a) increasing or generating the activity of a Chaperone protein CIpB non-targeted in a non-human organism or a part thereof, preferably a microorganism, a plant cell, a plant or a part thereof, as compared to a corresponding non-transformed wild type non-human organism or a part thereof; and
[29551] (b) growing the non-human organism or a part thereof under conditions which permit the production of threonine or a composition comprising threonine in said non-human organism or in the culture medium surrounding said non-human organism.

[29552] A further embodiment of the present invention relates to a process for the production of threonine, which comprises
[29553] (a) increasing or generating the activity of a transcriptional regulator protein non-targeted in a non-human organism or a part thereof, preferably a microorganism, a plant cell, a plant or a part thereof, as compared to a corresponding non-transformed wild type non-human organism or a part thereof; and
[29554] (b) growing the non-human organism or a part thereof under conditions which permit the production of threonine or a composition comprising threonine in said non-human organism or in the culture medium surrounding said non-human organism.

[29555] A further embodiment of the present invention relates to a process for the production of threonine, which comprises
[29556] (a) increasing or generating the activity of a AX653549-protein non-targeted in a non-human organism or a part thereof, preferably a microorganism, a plant cell, a plant or a part thereof, as compared to a corresponding non-transformed wild type non-human organism or a part thereof; and
[29557] (b) growing the non-human organism or a part thereof under conditions which permit the production of threonine or a composition comprising threonine in said non-human organism or in the culture medium surrounding said non-human organism.

[29558] A further embodiment of the present invention relates to a process for the production of threonine, which comprises
[29559] (a) increasing or generating the activity of a threonine synthase non-targeted in a non-human organism or a part thereof, preferably a microorganism, a plant cell, a plant or a part thereof, as compared to a corresponding non-transformed wild type non-human organism or a part thereof; and
[29560] (b) growing the non-human organism or a part thereof under conditions which permit the production of threonine or a composition comprising threonine in said non-human organism or in the culture medium surrounding said non-human organism.

[29561] A further embodiment of the present invention relates to a process for the production of threonine, which comprises
[29562] (a) increasing or generating the activity of a acetolactate synthase small subunit non-targeted in a non-human organism or a part thereof, preferably a microorganism, a plant cell, a plant or a part thereof, as compared to a corresponding non-transformed wild type non-human organism or a part thereof; and
[29563] (b) growing the non-human organism or a part thereof under conditions which permit the production of threonine or a composition comprising threonine in said non-human organism or in the culture medium surrounding said non-human organism.

[29564] A further embodiment of the present invention relates to a process for the production of threonine, which comprises
[29565] (a) increasing or generating the activity of a dihydrolipoamide acetyltransferase non-targeted in a non-human organism or a part thereof, preferably a microorganism, a plant cell, a plant or a part thereof, as compared to a corresponding non-transformed wild type non-human organism or a part thereof; and
[29566] (b) growing the non-human organism or a part thereof under conditions which permit the production of threonine or a composition comprising threonine in said non-human organism or in the culture medium surrounding said non-human organism.

[29567] A further embodiment of the present invention relates to a process for the production of threonine, which comprises
[29568] (a) increasing or generating the activity of a glucose dehydrogenase non-targeted in a non-human organism or a part thereof, preferably a microorganism, a plant cell, a plant or a part thereof, as compared to a corresponding non-transformed wild type non-human organism or a part thereof; and
[29569] (b) growing the non-human organism or a part thereof under conditions which permit the production of threonine or a composition comprising threonine in said non-human organism or in the culture medium surrounding said non-human organism.

[29570] A further embodiment of the present invention relates to a process for the production of threonine, which comprises
[29571] (a) increasing or generating the activity of a serine protease non-targeted in a non-human organism or a part thereof, preferably a microorganism, a plant cell, a plant or a part thereof, as compared to a corresponding non-transformed wild type non-human organism or a part thereof; and
[29572] (b) growing the non-human organism or a part thereof under conditions which permit the production of threonine or a composition comprising threonine in said non-human organism or in the culture medium surrounding said non-human organism.

[29573] A further embodiment of the present invention relates to a process for the production of threonine, which comprises
[29574] (a) increasing or generating the activity of a acyl-CoA dehydrogenase non-targeted in a non-human organism or a part thereof, preferably a microorganism, a plant cell, a plant or a part thereof, as compared to a corresponding non-transformed wild type non-human organism or a part thereof; and
[29575] (b) growing the non-human organism or a part thereof under conditions which permit the production of threonine or a composition comprising threonine in said non-human organism or in the culture medium surrounding said non-human organism.

[29576] A further embodiment of the present invention relates to a process for the production of threonine, which comprises
[29577] (a) increasing or generating the activity of a beta-galactosidase non-targeted in a non-human organism or a part thereof, preferably a microorganism, a plant cell, a plant or a part thereof, as compared to a corresponding non-transformed wild type non-human organism or a part thereof; and
[29578] (b) growing the non-human organism or a part thereof under conditions which permit the production of threonine or a composition comprising threonine in said non-human organism or in the culture medium surrounding said non-human organism.

[29579] A further embodiment of the present invention relates to a process for the production of threonine, which comprises
[29580] (a) increasing or generating the activity of a 2,3-dihydroxyphenylpropionate 1,2-dioxygenase non-targeted in a non-human organism or a part thereof, preferably a microorganism, a plant cell, a plant or a part thereof, as compared to a corresponding non-transformed wild type non-human organism or a part thereof; and
[29581] (b) growing the non-human organism or a part thereof under conditions which permit the production of threonine or a composition comprising threonine in said non-human organism or in the culture medium surrounding said non-human organism.

[29582] A further embodiment of the present invention relates to a process for the production of threonine, which comprises
[29583] (a) increasing or generating the activity of a ATP-binding component of a transport system non-targeted in a non-human organism or a part thereof, preferably a microorganism, a plant cell, a plant or a part thereof, as compared to a corresponding non-transformed wild type non-human organism or a part thereof; and
[29584] (b) growing the non-human organism or a part thereof under conditions which permit the production of threonine or a composition comprising threonine in said non-human organism or in the culture medium surrounding said non-human organism.

[29585] A further embodiment of the present invention relates to a process for the production of threonine, which comprises
[29586] (a) increasing or generating the activity of a membrane transport protein non-targeted in a non-human organism or a part thereof, preferably a microorganism, a plant cell, a plant or a part thereof, as compared to a corresponding non-transformed wild type non-human organism or a part thereof; and
[29587] (b) growing the non-human organism or a part thereof under conditions which permit the production of threonine or a composition comprising threonine in said non-human organism or in the culture medium surrounding said non-human organism.

[29588] A further embodiment of the present invention relates to a process for the production of threonine, which comprises
[29589] (a) increasing or generating the activity of a isochorismate synthase non-targeted in a non-human organism or a part thereof, preferably a microorganism, a plant cell, a plant or a part thereof, as compared to a corresponding non-transformed wild type non-human organism or a part thereof; and
[29590] (b) growing the non-human organism or a part thereof under conditions which permit the production of threonine or a composition comprising threonine in said non-human organism or in the culture medium surrounding said non-human organism.

[29591] A further embodiment of the present invention relates to a process for the production of threonine, which comprises
[29592] (a) increasing or generating the activity of a sensor histidine kinase non-targeted in a non-human organism or a part thereof, preferably a microorganism, a plant cell, a plant or a part thereof, as compared to a corresponding non-transformed wild type non-human organism or a part thereof; and
[29593] (b) growing the non-human organism or a part thereof under conditions which permit the production of threonine or a composition comprising threonine in said non-human organism or in the culture medium surrounding said non-human organism.

[29594] A further embodiment of the present invention relates to a process for the production of threonine, which comprises
[29595] (a) increasing or generating the activity of a succinyl-CoA synthetase beta chain non-targeted in a non-human organism or a part thereof, preferably a microorganism, a plant cell, a plant or a part thereof, as compared to a corresponding non-transformed wild type non-human organism or a part thereof; and
[29596] (b) growing the non-human organism or a part thereof under conditions which permit the production of threonine or a composition comprising threonine in said non-human organism or in the culture medium surrounding said non-human organism.

[29597] A further embodiment of the present invention relates to a process for the production of threonine, which comprises
[29598] (a) increasing or generating the activity of a major facilitator superfamily transporter protein non-targeted in a non-human organism or a part thereof, preferably a microorganism, a plant cell, a plant or a part thereof, as compared to a corresponding non-transformed wild type non-human organism or a part thereof; and
[29599] (b) growing the non-human organism or a part thereof under conditions which permit the production of threonine or a composition comprising threonine in said non-human organism or in the culture medium surrounding said non-human organism.

[29600] A further embodiment of the present invention relates to a process for the production of threonine, which comprises
[29601] (a) increasing or generating the activity of a phosphoanhydride phosphorylase non-targeted in a non-human organism or a part thereof, preferably a microorganism, a plant cell, a plant or a part thereof, as compared to a corresponding non-transformed wild type non-human organism or a part thereof; and
[29602] (b) growing the non-human organism or a part thereof under conditions which permit the production of threonine or a composition comprising threonine in said non-human organism or in the culture medium surrounding said non-human organism.

[29603] A further embodiment of the present invention relates to a process for the production of threonine, which comprises
[29604] (a) increasing or generating the activity of a b1003-protein non-targeted in a non-human organism or a part thereof, preferably a microorganism, a plant cell, a plant or a part thereof, as compared to a corresponding non-transformed wild type non-human organism or a part thereof; and
[29605] (b) growing the non-human organism or a part thereof under conditions which permit the production of threonine or a composition comprising threonine in said non-human organism or in the culture medium surrounding said non-human organism.

[29606] A further embodiment of the present invention relates to a process for the production of threonine, which comprises
[29607] (a) increasing or generating the activity of a b1108-protein non-targeted in a non-human organism or a part thereof, preferably a microorganism, a plant cell, a plant or a part thereof, as compared to a corresponding non-transformed wild type non-human organism or a part thereof; and
[29608] (b) growing the non-human organism or a part thereof under conditions which permit the production of threonine or a composition comprising threonine in said non-human organism or in the culture medium surrounding said non-human organism.

[29609] A further embodiment of the present invention relates to a process for the production of threonine, which comprises
[29610] (a) increasing or generating the activity of a restriction alleviation protein non-targeted in a non-human organism or a part thereof, preferably a microorganism, a plant cell, a plant or a part thereof, as compared to a corresponding non-transformed wild type non-human organism or a part thereof; and
[29611] (b) growing the non-human organism or a part thereof under conditions which permit the production of threonine or a composition comprising threonine in said non-human organism or in the culture medium surrounding said non-human organism.

[29612] A further embodiment of the present invention relates to a process for the production of threonine, which comprises
[29613] (a) increasing or generating the activity of a b1445-protein non-targeted in a non-human organism or a part thereof, preferably a microorganism, a plant cell, a plant or a part thereof, as compared to a corresponding non-transformed wild type non-human organism or a part thereof; and
[29614] (b) growing the non-human organism or a part thereof under conditions which permit the production of threonine or a composition comprising threonine in said non-human organism or in the culture medium surrounding said non-human organism.

[29615] A further embodiment of the present invention relates to a process for the production of threonine, which comprises
[29616] (a) increasing or generating the activity of a NADP-dependent malic enzyme non-targeted in a non-human organism or a part thereof, preferably a microorganism, a plant cell, a plant or a part thereof, as compared to a corresponding non-transformed wild type non-human organism or a part thereof; and
[29617] (b) growing the non-human organism or a part thereof under conditions which permit the production of threonine or a composition comprising threonine in said non-human organism or in the culture medium surrounding said non-human organism.

[29618] A further embodiment of the present invention relates to a process for the production of threonine, which comprises
[29619] (a) increasing or generating the activity of a b1522-protein non-targeted in a non-human organism or a part thereof, preferably a microorganism, a plant cell, a plant or a part thereof, as compared to a corresponding non-transformed wild type non-human organism or a part thereof; and
[29620] (b) growing the non-human organism or a part thereof under conditions which permit the production of threonine or a composition comprising threonine in said non-human organism or in the culture medium surrounding said non-human organism.

[29621] A further embodiment of the present invention relates to a process for the production of threonine, which comprises
[29622] (a) increasing or generating the activity of a b1670-protein non-targeted in a non-human organism or a part thereof, preferably a microorganism, a plant cell, a plant or a part thereof, as compared to a corresponding non-transformed wild type non-human organism or a part thereof; and
[29623] (b) growing the non-human organism or a part thereof under conditions which permit the production of threonine or a composition comprising threonine in said non-human organism or in the culture medium surrounding said non-human organism.

[29624] A further embodiment of the present invention relates to a process for the production of threonine, which comprises
[29625] (a) increasing or generating the activity of a pyruvate kinase non-targeted in a non-human organism or a part thereof, preferably a microorganism, a plant cell, a plant or a part thereof, as compared to a corresponding non-transformed wild type non-human organism or a part thereof; and
[29626] (b) growing the non-human organism or a part thereof under conditions which permit the production of threonine or a composition comprising threonine in said non-human organism or in the culture medium surrounding said non-human organism.

[29627] A further embodiment of the present invention relates to a process for the production of threonine, which comprises
[29628] (a) increasing or generating the activity of a b1930-protein non-targeted in a non-human organism or a part thereof, preferably a microorganism, a plant cell, a plant or a part thereof, as compared to a corresponding non-transformed wild type non-human organism or a part thereof; and
[29629] (b) growing the non-human organism or a part thereof under conditions which permit the production of threonine or a composition comprising threonine in said non-human organism or in the culture medium surrounding said non-human organism.

[29630] A further embodiment of the present invention relates to a process for the production of threonine, which comprises
[29631] (a) increasing or generating the activity of a transport protein non-targeted in a non-human organism or a part thereof, preferably a microorganism, a plant cell, a plant or a part thereof, as compared to a corresponding non-transformed wild type non-human organism or a part thereof; and
[29632] (b) growing the non-human organism or a part thereof under conditions which permit the production of threonine or a composition comprising threonine in said non-human organism or in the culture medium surrounding said non-human organism.

[29633] A further embodiment of the present invention relates to a process for the production of threonine, which comprises
[29634] (a) increasing or generating the activity of a b2360-protein non-targeted in a non-human organism or a part thereof, preferably a microorganism, a plant cell, a plant or a part thereof, as compared to a corresponding non-transformed wild type non-human organism or a part thereof; and
[29635] (b) growing the non-human organism or a part thereof under conditions which permit the production of threonine or a composition comprising threonine in said non-human organism or in the culture medium surrounding said non-human organism.

[29636] A further embodiment of the present invention relates to a process for the production of threonine, which comprises
[29637] (a) increasing or generating the activity of a D-serine dehydratase non-targeted in a non-human organism or a part thereof, preferably a microorganism, a plant cell, a plant or a part thereof, as compared to a corresponding non-transformed wild type non-human organism or a part thereof; and
[29638] (b) growing the non-human organism or a part thereof under conditions which permit the production of threonine or a composition comprising threonine in said non-human organism or in the culture medium surrounding said non-human organism.

[29639] A further embodiment of the present invention relates to a process for the production of threonine, which comprises
[29640] (a) increasing or generating the activity of a b2399-protein non-targeted in a non-human organism or a part thereof, preferably a microorganism, a plant cell, a plant or a part thereof, as compared to a corresponding non-transformed wild type non-human organism or a part thereof; and
[29641] (b) growing the non-human organism or a part thereof under conditions which permit the production of threonine or a composition comprising threonine in said non-human organism or in the culture medium surrounding said non-human organism.

[29642] A further embodiment of the present invention relates to a process for the production of threonine, which comprises
[29643] (a) increasing or generating the activity of a transcriptional regulator non-targeted in a non-human organism or a part thereof, preferably a microorganism, a plant cell, a plant or a part thereof, as compared to a corresponding non-transformed wild type non-human organism or a part thereof; and
[29644] (b) growing the non-human organism or a part thereof under conditions which permit the production of threonine or a composition comprising threonine in said non-human organism or in the culture medium surrounding said non-human organism.

[29645] A further embodiment of the present invention relates to a process for the production of threonine, which comprises
[29646] (a) increasing or generating the activity of a b2513-protein non-targeted in a non-human organism or a part thereof, preferably a microorganism, a plant cell, a plant or a part thereof, as compared to a corresponding non-transformed wild type non-human organism or a part thereof; and
[29647] (b) growing the non-human organism or a part thereof under conditions which permit the production of threonine or a composition comprising threonine in said non-human organism or in the culture medium surrounding said non-human organism.

[29648] A further embodiment of the present invention relates to a process for the production of threonine, which comprises
[29649] (a) increasing or generating the activity of a b2613-protein non-targeted in a non-human organism or a part thereof, preferably a microorganism, a plant cell, a plant or a part thereof, as compared to a corresponding non-transformed wild type non-human organism or a part thereof; and
[29650] (b) growing the non-human organism or a part thereof under conditions which permit the production of threonine or a composition comprising threonine in said non-human organism or in the culture medium surrounding said non-human organism.

[29651] A further embodiment of the present invention relates to a process for the production of threonine, which comprises
[29652] (a) increasing or generating the activity of a murein transglycosylase non-targeted in a non-human organism or a part thereof, preferably a microorganism, a plant cell, a plant or a part thereof, as compared to a corresponding non-transformed wild type non-human organism or a part thereof; and
[29653] (b) growing the non-human organism or a part thereof under conditions which permit the production of threonine or a composition comprising threonine in said non-human organism or in the culture medium surrounding said non-human organism.

[29654] A further embodiment of the present invention relates to a process for the production of threonine, which comprises
[29655] (a) increasing or generating the activity of a transcriptional regulator non-targeted in a non-human organism or a part thereof, preferably a microorganism, a plant cell, a plant or a part thereof, as compared to a corresponding non-transformed wild type non-human organism or a part thereof; and
[29656] (b) growing the non-human organism or a part thereof under conditions which permit the production of threonine or a composition comprising threonine in said non-human organism or in the culture medium surrounding said non-human organism.

[29657] A further embodiment of the present invention relates to a process for the production of threonine, which comprises
[29658] (a) increasing or generating the activity of a b2739-protein non-targeted in a non-human organism or a part thereof, preferably a microorganism, a plant cell, a plant or a part thereof, as compared to a corresponding non-transformed wild type non-human organism or a part thereof; and
[29659] (b) growing the non-human organism or a part thereof under conditions which permit the production of threonine or a composition comprising threonine in said non-human organism or in the culture medium surrounding said non-human organism.

[29660] A further embodiment of the present invention relates to a process for the production of threonine, which comprises
[29661] (a) increasing or generating the activity of a 2-C-methyl-D-erythritol 4-phosphate cytidylyltransferase non-targeted in a non-human organism or a part thereof, preferably a microorganism, a plant cell, a plant or a part thereof, as compared to a corresponding non-transformed wild type non-human organism or a part thereof; and
[29662] (b) growing the non-human organism or a part thereof under conditions which permit the production of threonine or a composition comprising threonine in said non-human organism or in the culture medium surrounding said non-human organism.

[29663] A further embodiment of the present invention relates to a process for the production of threonine, which comprises
[29664] (a) increasing or generating the activity of a b2812-protein non-targeted in a non-human organism or a part thereof, preferably a microorganism, a plant cell, a plant or a part thereof, as compared to a corresponding non-transformed wild type non-human organism or a part thereof; and
[29665] (b) growing the non-human organism or a part thereof under conditions which permit the production of threonine or a composition comprising threonine in said non-human organism or in the culture medium surrounding said non-human organism.

[29666] A further embodiment of the present invention relates to a process for the production of threonine, which comprises
[29667] (a) increasing or generating the activity of a b2812-protein non-targeted in a non-human organism or a part thereof, preferably a microorganism, a plant cell, a plant or a part thereof, as compared to a corresponding non-transformed wild type non-human organism or a part thereof; and
[29668] (b) growing the non-human organism or a part thereof under conditions which permit the production of threonine or a composition comprising threonine in said non-human organism or in the culture medium surrounding said non-human organism.

[29669] A further embodiment of the present invention relates to a process for the production of threonine, which comprises
[29670] (a) increasing or generating the activity of a D-3-phosphoglycerate dehydrogenase non-targeted in a non-human organism or a part thereof, preferably a microorganism, a plant cell, a plant or a part thereof, as compared to a corresponding non-transformed wild type non-human organism or a part thereof; and
[29671] (b) growing the non-human organism or a part thereof under conditions which permit the production of threonine or a composition comprising threonine in said non-human organism or in the culture medium surrounding said non-human organism.

[29672] A further embodiment of the present invention relates to a process for the production of threonine, which comprises
[29673] (a) increasing or generating the activity of a L-asparaginase non-targeted in a non-human organism or a part thereof, preferably a microorganism, a plant cell, a plant or a part thereof, as compared to a corresponding non-transformed wild type non-human organism or a part thereof; and
[29674] (b) growing the non-human organism or a part thereof under conditions which permit the production of threonine or a composition comprising threonine in said non-human organism or in the culture medium surrounding said non-human organism.

[29675] A further embodiment of the present invention relates to a process for the production of threonine, which comprises
[29676] (a) increasing or generating the activity of a glycoprotease non-targeted in a non-human organism or a part thereof, preferably a microorganism, a plant cell, a plant or a part thereof, as compared to a corresponding non-transformed wild type non-human organism or a part thereof; and
[29677] (b) growing the non-human organism or a part thereof under conditions which permit the production of threonine or a composition comprising threonine in said non-human organism or in the culture medium surrounding said non-human organism.

[29678] A further embodiment of the present invention relates to a process for the production of threonine, which comprises
[29679] (a) increasing or generating the activity of a b3083-protein non-targeted in a non-human organism or a part thereof, preferably a microorganism, a plant cell, a plant or a part thereof, as compared to a corresponding non-transformed wild type non-human organism or a part thereof; and
[29680] (b) growing the non-human organism or a part thereof under conditions which permit the production of threonine or a composition comprising threonine in said non-human organism or in the culture medium surrounding said non-human organism.

[29681] A further embodiment of the present invention relates to a process for the production of threonine, which comprises
[29682] (a) increasing or generating the activity of a methyltransferase non-targeted in a non-human organism or a part thereof, preferably a microorganism, a plant cell, a plant or a part thereof, as compared to a corresponding non-transformed wild type non-human organism or a part thereof; and
[29683] (b) growing the non-human organism or a part thereof under conditions which permit the production of threonine or a composition comprising threonine in said non-human organism or in the culture medium surrounding said non-human organism.

[29684] A further embodiment of the present invention relates to a process for the production of threonine, which comprises
[29685] (a) increasing or generating the activity of a glycogen synthase non-targeted in a non-human organism or a part thereof, preferably a microorganism, a plant cell, a plant or a part thereof, as compared to a corresponding non-transformed wild type non-human organism or a part thereof; and
[29686] (b) growing the non-human organism or a part thereof under conditions which permit the production of threonine or a composition comprising threonine in said non-human organism or in the culture medium surrounding said non-human organism.

[29687] A further embodiment of the present invention relates to a process for the production of threonine, which comprises
[29688] (a) increasing or generating the activity of a b3442-protein non-targeted in a non-human organism or a part thereof, preferably a microorganism, a plant cell, a plant or a part thereof, as compared to a corresponding non-transformed wild type non-human organism or a part thereof; and
[29689] (b) growing the non-human organism or a part thereof under conditions which permit the production of threonine or a composition comprising threonine in said non-human organism or in the culture medium surrounding said non-human organism.

[29690] A further embodiment of the present invention relates to a process for the production of threonine, which comprises
[29691] (a) increasing or generating the activity of a valine-pyruvate transaminase non-targeted in a non-human organism or a part thereof, preferably a microorganism, a plant cell, a plant or a part thereof, as compared to a corresponding non-transformed wild type non-human organism or a part thereof; and
[29692] (b) growing the non-human organism or a part thereof under conditions which permit the production of threonine or a composition comprising threonine in said non-human organism or in the culture medium surrounding said non-human organism.

[29693] A further embodiment of the present invention relates to a process for the production of threonine, which comprises
[29694] (a) increasing or generating the activity of a b3646-protein non-targeted in a non-human organism or a part thereof, preferably a microorganism, a plant cell, a plant or a part thereof, as compared to a corresponding non-transformed wild type non-human organism or a part thereof; and
[29695] (b) growing the non-human organism or a part thereof under conditions which permit the production of threonine or a composition comprising threonine in said non-human organism or in the culture medium surrounding said non-human organism.

[29696] A further embodiment of the present invention relates to a process for the production of threonine, which comprises
[29697] (a) increasing or generating the activity of a ATP synthase subunit beta non-targeted in a non-human organism or a part thereof, preferably a microorganism, a plant cell, a plant or a part thereof, as compared to a corresponding non-transformed wild type non-human organism or a part thereof; and
[29698] (b) growing the non-human organism or a part thereof under conditions which permit the production of threonine or a composition comprising threonine in said non-human organism or in the culture medium surrounding said non-human organism.

[29699] A further embodiment of the present invention relates to a process for the production of threonine, which comprises
[29700] (a) increasing or generating the activity of a dihydroxyacid dehydratase non-targeted in a non-human organism or a part thereof, preferably a microorganism, a plant cell, a plant or a part thereof, as compared to a corresponding non-transformed wild type non-human organism or a part thereof; and
[29701] (b) growing the non-human organism or a part thereof under conditions which permit the production of threonine or a composition comprising threonine in said non-human organism or in the culture medium surrounding said non-human organism.

[29702] A further embodiment of the present invention relates to a process for the production of threonine, which comprises
[29703] (a) increasing or generating the activity of a ketol-acid reductoisomerase non-targeted in a non-human organism or a part thereof, preferably a microorganism, a plant cell, a plant or a part thereof, as compared to a corresponding non-transformed wild type non-human organism or a part thereof; and
[29704] (b) growing the non-human organism or a part thereof under conditions which permit the production of threonine or a composition comprising threonine in said non-human organism or in the culture medium surrounding said non-human organism.

[29705] A further embodiment of the present invention relates to a process for the production of threonine, which comprises
[29706] (a) increasing or generating the activity of a enterobacterial common antigen polymerase non-targeted in a non-human organism or a part thereof, preferably a microorganism, a plant cell, a plant or a part thereof, as compared to a corresponding non-transformed wild type non-human organism or a part thereof; and
[29707] (b) growing the non-human organism or a part thereof under conditions which permit the production of threonine or a composition comprising threonine in said non-human organism or in the culture medium surrounding said non-human organism.

[29708] A further embodiment of the present invention relates to a process for the production of threonine, which comprises
[29709] (a) increasing or generating the activity of a DNA helicase II non-targeted in a non-human organism or a part thereof, preferably a microorganism, a plant cell, a plant or a part thereof, as compared to a corresponding non-transformed wild type non-human organism or a part thereof; and
[29710] (b) growing the non-human organism or a part thereof under conditions which permit the production of threonine or a composition comprising threonine in said non-human organism or in the culture medium surrounding said non-human organism.

[29711] A further embodiment of the present invention relates to a process for the production of threonine, which comprises
[29712] (a) increasing or generating the activity of a transcriptional regulator non-targeted in a non-human organism or a part thereof, preferably a microorganism, a plant cell, a plant or a part thereof, as compared to a corresponding non-transformed wild type non-human organism or a part thereof; and
[29713] (b) growing the non-human organism or a part thereof under conditions which permit the production of threonine or a composition comprising threonine in said non-human organism or in the culture medium surrounding said non-human organism.

[29714] A further embodiment of the present invention relates to a process for the production of threonine, which comprises
[29715] (a) increasing or generating the activity of a b3989-protein non-targeted in a non-human organism or a part thereof, preferably a microorganism, a plant cell, a plant or a part thereof, as compared to a corresponding non-transformed wild type non-human organism or a part thereof; and
[29716] (b) growing the non-human organism or a part thereof under conditions which permit the production of threonine or a composition comprising threonine in said non-human organism or in the culture medium surrounding said non-human organism.

[29717] A further embodiment of the present invention relates to a process for the production of threonine, which comprises
[29718] (a) increasing or generating the activity of a aspartate kinase non-targeted in a non-human organism or a part thereof, preferably a microorganism, a plant cell, a plant or a part thereof, as compared to a corresponding non-transformed wild type non-human organism or a part thereof; and
[29719] (b) growing the non-human organism or a part thereof under conditions which permit the production of threonine or a composition comprising threonine in said non-human organism or in the culture medium surrounding said non-human organism.

[29720] A further embodiment of the present invention relates to a process for the production of threonine, which comprises
[29721] (a) increasing or generating the activity of a b4029-protein non-targeted in a non-human organism or a part thereof, preferably a microorganism, a plant cell, a plant or a part thereof, as compared to a corresponding non-transformed wild type non-human organism or a part thereof; and
[29722] (b) growing the non-human organism or a part thereof under conditions which permit the production of threonine or a composition comprising threonine in said non-human organism or in the culture medium surrounding said non-human organism.

[29723] A further embodiment of the present invention relates to a process for the production of threonine, which comprises
[29724] (a) increasing or generating the activity of a b4056-protein non-targeted in a non-human organism or a part thereof, preferably a microorganism, a plant cell, a plant or a part thereof, as compared to a corresponding non-transformed wild type non-human organism or a part thereof; and
[29725] (b) growing the non-human organism or a part thereof under conditions which permit the production of threonine or a composition comprising threonine in said non-human organism or in the culture medium surrounding said non-human organism.

[29726] A further embodiment of the present invention relates to a process for the production of threonine, which comprises
[29727] (a) increasing or generating the activity of a b4250-protein non-targeted in a non-human organism or a part thereof, preferably a microorganism, a plant cell, a plant or a part thereof, as compared to a corresponding non-transformed wild type non-human organism or a part thereof; and
[29728] (b) growing the non-human organism or a part thereof under conditions which permit the production of threonine or a composition comprising threonine in said non-human organism or in the culture medium surrounding said non-human organism.

[29729] A further embodiment of the present invention relates to a process for the production of threonine, which comprises
[29730] (a) increasing or generating the activity of a acetyltransferase non-targeted in a non-human organism or a part thereof, preferably a microorganism, a plant cell, a plant or a part thereof, as compared to a corresponding non-transformed wild type non-human organism or a part thereof; and
[29731] (b) growing the non-human organism or a part thereof under conditions which permit the production of threonine or a composition comprising threonine in said non-human organism or in the culture medium surrounding said non-human organism.

[29732] A further embodiment of the present invention relates to a process for the production of threonine, which comprises
[29733] (a) increasing or generating the activity of a glutaredoxin non-targeted in a non-human organism or a part thereof, preferably a microorganism, a plant cell, a plant or a part thereof, as compared to a corresponding non-transformed wild type non-human organism or a part thereof; and
[29734] (b) growing the non-human organism or a part thereof under conditions which permit the production of threonine or a composition comprising threonine in said non-human organism or in the culture medium surrounding said non-human organism.

[29735] A further embodiment of the present invention relates to a process for the production of threonine, which comprises
[29736] (a) increasing or generating the activity of a transcription factor non-targeted in a non-human organism or a part thereof, preferably a microorganism, a plant cell, a plant or a part thereof, as compared to a corresponding non-transformed wild type non-human organism or a part thereof; and
[29737] (b) growing the non-human organism or a part thereof under conditions which permit the production of threonine or a composition comprising threonine in said non-human organism or in the culture medium surrounding said non-human organism.

[29738] A further embodiment of the present invention relates to a process for the production of threonine, which comprises
[29739] (a) increasing or generating the activity of a cyclin D non-targeted in a non-human organism or a part thereof, preferably a microorganism, a plant cell, a plant or a part thereof, as compared to a corresponding non-transformed wild type non-human organism or a part thereof; and
[29740] (b) growing the non-human organism or a part thereof under conditions which permit the production of threonine or a composition comprising threonine in said non-human organism or in the culture medium surrounding said non-human organism.

[29741] A further embodiment of the present invention relates to a process for the production of threonine, which comprises
[29742] (a) increasing or generating the activity of a heat shock protein non-targeted in a non-human organism or a part thereof, preferably a microorganism, a plant cell, a plant or a part thereof, as compared to a corresponding non-transformed wild type non-human organism or a part thereof; and
[29743] (b) growing the non-human organism or a part thereof under conditions which permit the production of threonine or a composition comprising threonine in said non-human organism or in the culture medium surrounding said non-human organism.

[29744] A further embodiment of the present invention relates to a process for the production of threonine, which comprises
[29745] (a) increasing or generating the activity of a polyphosphate kinase non-targeted in a non-human organism or a part thereof, preferably a microorganism, a plant cell, a plant or a part thereof, as compared to a corresponding non-transformed wild type non-human organism or a part thereof; and
[29746] (b) growing the non-human organism or a part thereof under conditions which permit the production of threonine or a composition comprising threonine in said non-human organism or in the culture medium surrounding said non-human organism.

[29747] A further embodiment of the present invention relates to a process for the production of threonine, which comprises
[29748] (a) increasing or generating the activity of a branched chain amino acid ABC transporter ATP-binding protein non-targeted in a non-human organism or a part thereof, preferably a microorganism, a plant cell, a plant or a part thereof, as compared to a corresponding non-transformed wild type non-human organism or a part thereof; and
[29749] (b) growing the non-human organism or a part thereof under conditions which permit the production of threonine or a composition comprising threonine in said non-human organism or in the culture medium surrounding said non-human organism.

[29750] A further embodiment of the present invention relates to a process for the production of threonine, which comprises
[29751] (a) increasing or generating the activity of a uroporphyrin-III C-methyltransferase non-targeted in a non-human organism or a part thereof, preferably a microorganism, a plant cell, a plant or a part thereof, as compared to a corresponding non-transformed wild type non-human organism or a part thereof; and
[29752] (b) growing the non-human organism or a part thereof under conditions which permit the production of threonine or a composition comprising threonine in said non-human organism or in the culture medium surrounding said non-human organism.

[29753] A further embodiment of the present invention relates to a process for the production of threonine, which comprises
[29754] (a) increasing or generating the activity of a sll0418-protein non-targeted in a non-human organism or a part thereof, preferably a microorganism, a plant cell, a plant or a part thereof, as compared to a corresponding non-transformed wild type non-human organism or a part thereof; and
[29755] (b) growing the non-human organism or a part thereof under conditions which permit the production of threonine or a composition comprising threonine in said non-human organism or in the culture medium surrounding said non-human organism.

[29756] A further embodiment of the present invention relates to a process for the production of threonine, which comprises
[29757] (a) increasing or generating the activity of a oxireductase non-targeted in a non-human organism or a part thereof, preferably a microorganism, a plant cell, a plant or a part thereof, as compared to a corresponding non-transformed wild type non-human organism or a part thereof; and
[29758] (b) growing the non-human organism or a part thereof under conditions which permit the production of threonine or a composition comprising threonine in said non-human organism or in the culture medium surrounding said non-human organism.

[29759] A further embodiment of the present invention relates to a process for the production of threonine, which comprises
[29760] (a) increasing or generating the activity of a malate dehydrogenase non-targeted in a non-human organism or a part thereof, preferably a microorganism, a plant cell, a plant or a part thereof, as compared to a corresponding non-transformed wild type non-human organism or a part thereof; and
[29761] (b) growing the non-human organism or a part thereof under conditions which permit the production of threonine or a composition comprising threonine in said non-human organism or in the culture medium surrounding said non-human organism.

[29762] A further embodiment of the present invention relates to a process for the production of threonine, which comprises
[29763] (a) increasing or generating the activity of a phosphoribosylaminoimidazole carboxylase catalytic subunit non-targeted in a non-human organism or a part thereof, preferably a microorganism, a plant cell, a plant or a part thereof, as compared to a corresponding non-transformed wild type non-human organism or a part thereof; and
[29764] (b) growing the non-human organism or a part thereof under conditions which permit the production of threonine or a composition comprising threonine in said non-human organism or in the culture medium surrounding said non-human organism.

[29765] A further embodiment of the present invention relates to a process for the production of threonine, which comprises
[29766] (a) increasing or generating the activity of a glycogen synthase non-targeted in a non-human organism or a part thereof, preferably a microorganism, a plant cell, a plant or a part thereof, as compared to a corresponding non-transformed wild type non-human organism or a part thereof; and
[29767] (b) growing the non-human organism or a part thereof under conditions which permit the production of threonine or a composition comprising threonine in said non-human organism or in the culture medium surrounding said non-human organism.

[29768] A further embodiment of the present invention relates to a process for the production of threonine, which comprises
[29769] (a) increasing or generating the activity of a glycogen (starch) synthase non-targeted in a non-human organism or a part thereof, preferably a microorganism, a plant cell, a plant or a part thereof, as compared to a corresponding non-transformed wild type non-human organism or a part thereof; and
[29770] (b) growing the non-human organism or a part thereof under conditions which permit the production of threonine or a composition comprising threonine in said non-human organism or in the culture medium surrounding said non-human organism.

[29771] A further embodiment of the present invention relates to a process for the production of threonine, which comprises
[29772] (a) increasing or generating the activity of a nitrate/nitrite transport protein non-targeted in a non-human organism or a part thereof, preferably a microorganism, a plant cell, a plant or a part thereof, as compared to a corresponding non-transformed wild type non-human organism or a part thereof; and
[29773] (b) growing the non-human organism or a part thereof under conditions which permit the production of threonine or a composition comprising threonine in said non-human organism or in the culture medium surrounding said non-human organism.

[29774] A further embodiment of the present invention relates to a process for the production of threonine, which comprises
[29775] (a) increasing or generating the activity of a carbamoyl-phosphate synthase subunit non-targeted in a non-human organism or a part thereof, preferably a microorganism, a plant cell, a plant or a part thereof, as compared to a corresponding non-transformed wild type non-human organism or a part thereof; and
[29776] (b) growing the non-human organism or a part thereof under conditions which permit the production of threonine or a composition comprising threonine in said non-human organism or in the culture medium surrounding said non-human organism.

[29777] A further embodiment of the present invention relates to a process for the production of threonine, which comprises
[29778] (a) increasing or generating the activity of a glutathione S-transferase non-targeted in a non-human organism or a part thereof, preferably a microorganism, a plant cell, a plant or a part thereof, as compared to a corresponding non-transformed wild type non-human organism or a part thereof; and
[29779] (b) growing the non-human organism or a part thereof under conditions which permit the production of threonine or a composition comprising threonine in said non-human organism or in the culture medium surrounding said non-human organism.

[29780] A further embodiment of the present invention relates to a process for the production of threonine, which comprises
[29781] (a) increasing or generating the activity of a ABC metal ion transporter substrate-binding protein non-targeted in a non-human organism or a part thereof, preferably a microorganism, a plant cell, a plant or a part thereof, as compared to a corresponding non-transformed wild type non-human organism or a part thereof; and
[29782] (b) growing the non-human organism or a part thereof under conditions which permit the production of threonine or a composition comprising threonine in said non-human organism or in the culture medium surrounding said non-human organism.

[29783] A further embodiment of the present invention relates to a process for the production of threonine, which comprises
[29784] (a) increasing or generating the activity of a coproporphyrinogen III oxidase non-targeted in a non-human organism or a part thereof, preferably a microorganism, a plant cell, a plant or a part thereof, as compared to a corresponding non-transformed wild type non-human organism or a part thereof; and
[29785] (b) growing the non-human organism or a part thereof under conditions which permit the production of threonine or a composition comprising threonine in said non-human organism or in the culture medium surrounding said non-human organism.

[29786] A further embodiment of the present invention relates to a process for the production of threonine, which comprises
[29787] (a) increasing or generating the activity of a ferredoxin non-targeted in a non-human organism or a part thereof, preferably a microorganism, a plant cell, a plant or a part thereof, as compared to a corresponding non-transformed wild type non-human organism or a part thereof; and
[29788] (b) growing the non-human organism or a part thereof under conditions which permit the production of threonine or a composition comprising threonine in said non-human organism or in the culture medium surrounding said non-human organism.

[29789] A further embodiment of the present invention relates to a process for the production of threonine, which comprises
[29790] (a) increasing or generating the activity of a slr0383-protein non-targeted in a non-human organism or a part thereof, preferably a microorganism, a plant cell, a plant or a part thereof, as compared to a corresponding non-transformed wild type non-human organism or a part thereof; and
[29791] (b) growing the non-human organism or a part thereof under conditions which permit the production of threonine or a composition comprising threonine in said non-human organism or in the culture medium surrounding said non-human organism.

[29792] A further embodiment of the present invention relates to a process for the production of threonine, which comprises
[29793] (a) increasing or generating the activity of a bifunctional purine biosynthesis protein non-targeted in a non-human organism or a part thereof, preferably a microorganism, a plant cell, a plant or a part thereof, as compared to a corresponding non-transformed wild type non-human organism or a part thereof; and
[29794] (b) growing the non-human organism or a part thereof under conditions which permit the production of threonine or a composition comprising threonine in said non-human organism or in the culture medium surrounding said non-human organism.

[29795] A further embodiment of the present invention relates to a process for the production of threonine, which comprises
[29796] (a) increasing or generating the activity of a aspartate kinase non-targeted in a non-human organism or a part thereof, preferably a microorganism, a plant cell, a plant or a part thereof, as compared to a corresponding non-transformed wild type non-human organism or a part thereof; and
[29797] (b) growing the non-human organism or a part thereof under conditions which permit the production of threonine or a composition comprising threonine in said non-human organism or in the culture medium surrounding said non-human organism.

[29798] A further embodiment of the present invention relates to a process for the production of threonine, which comprises
[29799] (a) increasing or generating the activity of a geranylgeranyl pyrophosphate synthase non-targeted in a non-human organism or a part thereof, preferably a microorganism, a plant cell, a plant or a part thereof, as compared to a corresponding non-transformed wild type non-human organism or a part thereof; and
[29800] (b) growing the non-human organism or a part thereof under conditions which permit the production of threonine or a composition comprising threonine in said non-human organism or in the culture medium surrounding said non-human organism.

[29801] A further embodiment of the present invention relates to a process for the production of threonine, which comprises
[29802] (a) increasing or generating the activity of a kinase non-targeted in a non-human organism or a part thereof, preferably a microorganism, a plant cell, a plant or a part thereof, as compared to a corresponding non-transformed wild type non-human organism or a part thereof; and
[29803] (b) growing the non-human organism or a part thereof under conditions which permit the production of threonine or a composition comprising threonine in said non-human organism or in the culture medium surrounding said non-human organism.

[29804] A further embodiment of the present invention relates to a process for the production of threonine, which comprises
[29805] (a) increasing or generating the activity of a argininosuccinate lyase non-targeted in a non-human organism or a part thereof, preferably a microorganism, a plant cell, a plant or a part thereof, as compared to a corresponding non-transformed wild type non-human organism or a part thereof; and
[29806] (b) growing the non-human organism or a part thereof under conditions which permit the production of threonine or a composition comprising threonine in said non-human organism or in the culture medium surrounding said non-human organism.

[29807] A further embodiment of the present invention relates to a process for the production of threonine, which comprises
[29808] (a) increasing or generating the activity of a photosystem II protein non-targeted in a non-human organism or a part thereof, preferably a microorganism, a plant cell, a plant or a part thereof, as compared to a corresponding non-transformed wild type non-human organism or a part thereof; and
[29809] (b) growing the non-human organism or a part thereof under conditions which permit the production of threonine or a composition comprising threonine in said non-human organism or in the culture medium surrounding said non-human organism.

[29810] A further embodiment of the present invention relates to a process for the production of threonine, which comprises
[29811] (a) increasing or generating the activity of a cell division protein non-targeted in a non-human organism or a part thereof, preferably a microorganism, a plant cell, a plant or a part thereof, as compared to a corresponding non-transformed wild type non-human organism or a part thereof; and
[29812] (b) growing the non-human organism or a part thereof under conditions which permit the production of threonine or a composition comprising threonine in said non-human organism or in the culture medium surrounding said non-human organism.

[29813] A further embodiment of the present invention relates to a process for the production of threonine, which comprises
[29814] (a) increasing or generating the activity of a branched-chain amino acid ABC transporter permease protein non-targeted in a non-human organism or a part thereof, preferably a microorganism, a plant cell, a plant or a part thereof, as compared to a corresponding non-transformed wild type non-human organism or a part thereof; and
[29815] (b) growing the non-human organism or a part thereof under conditions which permit the production of threonine or a composition comprising threonine in said non-human organism or in the culture medium surrounding said non-human organism.

[29816] A further embodiment of the present invention relates to a process for the production of threonine, which comprises
[29817] (a) increasing or generating the activity of a TTC0881-protein non-targeted in a non-human organism or a part thereof, preferably a microorganism, a plant cell, a plant or a part thereof, as compared to a corresponding non-transformed wild type non-human organism or a part thereof; and
[29818] (b) growing the non-human organism or a part thereof under conditions which permit the production of threonine or a composition comprising threonine in said non-human organism or in the culture medium surrounding said non-human organism.

[29819] A further embodiment of the present invention relates to a process for the production of threonine, which comprises
[29820] (a) increasing or generating the activity of a metal-dependent hydrolase non-targeted in a non-human organism or a part thereof, preferably a microorganism, a plant cell, a plant or a part thereof, as compared to a corresponding non-transformed wild type non-human organism or a part thereof; and
[29821] (b) growing the non-human organism or a part thereof under conditions which permit the production of threonine or a composition comprising threonine in said non-human organism or in the culture medium surrounding said non-human organism.

[29822] A further embodiment of the present invention relates to a process for the production of threonine, which comprises
[29823] (a) increasing or generating the activity of a homocitrate synthase non-targeted in a non-human organism or a part thereof, preferably a microorganism, a plant cell, a plant or a part thereof, as compared to a corresponding non-transformed wild type non-human organism or a part thereof; and
[29824] (b) growing the non-human organism or a part thereof under conditions which permit the production of threonine or a composition comprising threonine in said non-human organism or in the culture medium surrounding said non-human organism.

[29825] A further embodiment of the present invention relates to a process for the production of threonine, which comprises
[29826] (a) increasing or generating the activity of a XM_{—}473199-protein non-targeted in a non-human organism or a part thereof, preferably a microorganism, a plant cell, a plant or a part thereof, as compared to a corresponding non-transformed wild type non-human organism or a part thereof; and
[29827] (b) growing the non-human organism or a part thereof under conditions which permit the production of threonine or a composition comprising threonine in said non-human organism or in the culture medium surrounding said non-human organism.

[29828] A further embodiment of the present invention relates to a process for the production of threonine, which comprises
[29829] (a) increasing or generating the activity of a pyruvate kinase non-targeted in a non-human organism or a part thereof, preferably a microorganism, a plant cell, a plant or a part thereof, as compared to a corresponding non-transformed wild type non-human organism or a part thereof; and
[29830] (b) growing the non-human organism or a part thereof under conditions which permit the production of threonine or a composition comprising threonine in said non-human organism or in the culture medium surrounding said non-human organism.

[29831] A further embodiment of the present invention relates to a process for the production of threonine, which comprises
[29832] (a) increasing or generating the activity of a transcription factor non-targeted in a non-human organism or a part thereof, preferably a microorganism, a plant cell, a plant or a part thereof, as compared to a corresponding non-transformed wild type non-human organism or a part thereof; and
[29833] (b) growing the non-human organism or a part thereof under conditions which permit the production of threonine or a composition comprising threonine in said non-human organism or in the culture medium surrounding said non-human organism.

[29834] A further embodiment of the present invention relates to a process for the production of threonine, which comprises
[29835] (a) increasing or generating the activity of a cell division control protein non-targeted in a non-human organism or a part thereof, preferably a microorganism, a plant cell, a plant or a part thereof, as compared to a corresponding non-transformed wild type non-human organism or a part thereof; and
[29836] (b) growing the non-human organism or a part thereof under conditions which permit the production of threonine or a composition comprising threonine in said non-human organism or in the culture medium surrounding said non-human organism.

[29837] A further embodiment of the present invention relates to a process for the production of threonine, which comprises
[29838] (a) increasing or generating the activity of a pyruvate carboxylase non-targeted in a non-human organism or a part thereof, preferably a microorganism, a plant cell, a plant or a part thereof, as compared to a corresponding non-transformed wild type non-human organism or a part thereof; and
[29839] (b) growing the non-human organism or a part thereof under conditions which permit the production of threonine or a composition comprising threonine in said non-human organism or in the culture medium surrounding said non-human organism.

[29840] A further embodiment of the present invention relates to a process for the production of threonine, which comprises
[29841] (a) increasing or generating the activity of a ycl027w-protein non-targeted in a non-human organism or a part thereof, preferably a microorganism, a plant cell, a plant or a part thereof, as compared to a corresponding non-transformed wild type non-human organism or a part thereof; and
[29842] (b) growing the non-human organism or a part thereof under conditions which permit the production of threonine or a composition comprising threonine in said non-human organism or in the culture medium surrounding said non-human organism.

[29843] A further embodiment of the present invention relates to a process for the production of threonine, which comprises
[29844] (a) increasing or generating the activity of a coproporphyrinogen III oxidase non-targeted in a non-human organism or a part thereof, preferably a microorganism, a plant cell, a plant or a part thereof, as compared to a corresponding non-transformed wild type non-human organism or a part thereof; and
[29845] (b) growing the non-human organism or a part thereof under conditions which permit the production of threonine or a composition comprising threonine in said non-human organism or in the culture medium surrounding said non-human organism.

[29846] A further embodiment of the present invention relates to a process for the production of threonine, which comprises
[29847] (a) increasing or generating the activity of a ydr183w-protein non-targeted in a non-human organism or a part thereof, preferably a microorganism, a plant cell, a plant or a part thereof, as compared to a corresponding non-transformed wild type non-human organism or a part thereof; and
[29848] (b) growing the non-human organism or a part thereof under conditions which permit the production of threonine or a composition comprising threonine in said non-human organism or in the culture medium surrounding said non-human organism.

[29849] A further embodiment of the present invention relates to a process for the production of threonine, which comprises
[29850] (a) increasing or generating the activity of a hexose transporter non-targeted in a non-human organism or a part thereof, preferably a microorganism, a plant cell, a plant or a part thereof, as compared to a corresponding non-transformed wild type non-human organism or a part thereof; and
[29851] (b) growing the non-human organism or a part thereof under conditions which permit the production of threonine or a composition comprising threonine in said non-human organism or in the culture medium surrounding said non-human organism.

[29852] A further embodiment of the present invention relates to a process for the production of threonine, which comprises
[29853] (a) increasing or generating the activity of a YEL030C-A-protein non-targeted in a non-human organism or a part thereof, preferably a microorganism, a plant cell, a plant or a part thereof, as compared to a corresponding non-transformed wild type non-human organism or a part thereof; and
[29854] (b) growing the non-human organism or a part thereof under conditions which permit the production of threonine or a composition comprising threonine in said non-human organism or in the culture medium surrounding said non-human organism.

[29855] A further embodiment of the present invention relates to a process for the production of threonine, which comprises
[29856] (a) increasing or generating the activity of a hexose transporter non-targeted in a non-human organism or a part thereof, preferably a microorganism, a plant cell, a plant or a part thereof, as compared to a corresponding non-transformed wild type non-human organism or a part thereof; and
[29857] (b) growing the non-human organism or a part thereof under conditions which permit the production of threonine or a composition comprising threonine in said non-human organism or in the culture medium surrounding said non-human organism.

[29858] A further embodiment of the present invention relates to a process for the production of threonine, which comprises
[29859] (a) increasing or generating the activity of a yfl054c-protein non-targeted in a non-human organism or a part thereof, preferably a microorganism, a plant cell, a plant or a part thereof, as compared to a corresponding non-transformed wild type non-human organism or a part thereof; and
[29860] (b) growing the non-human organism or a part thereof under conditions which permit the production of threonine or a composition comprising threonine in said non-human organism or in the culture medium surrounding said non-human organism.

[29861] A further embodiment of the present invention relates to a process for the production of threonine, which comprises
[29862] (a) increasing or generating the activity of a ygl237c-protein non-targeted in a non-human organism or a part thereof, preferably a microorganism, a plant cell, a plant or a part thereof, as compared to a corresponding non-transformed wild type non-human organism or a part thereof; and
[29863] (b) growing the non-human organism or a part thereof under conditions which permit the production of threonine or a composition comprising threonine in said non-human organism or in the culture medium surrounding said non-human organism.

[29864] A further embodiment of the present invention relates to a process for the production of threonine, which comprises
[29865] (a) increasing or generating the activity of a yhr131c-protein non-targeted in a non-human organism or a part thereof, preferably a microorganism, a plant cell, a plant or a part thereof, as compared to a corresponding non-transformed wild type non-human organism or a part thereof; and
[29866] (b) growing the non-human organism or a part thereof under conditions which permit the production of threonine or a composition comprising threonine in said non-human organism or in the culture medium surrounding said non-human organism.

[29867] A further embodiment of the present invention relates to a process for the production of threonine, which comprises
[29868] (a) increasing or generating the activity of a (DL)-glycerol-3-phosphatase non-targeted in a non-human organism or a part thereof, preferably a microorganism, a plant cell, a plant or a part thereof, as compared to a corresponding non-transformed wild type non-human organism or a part thereof; and
[29869] (b) growing the non-human organism or a part thereof under conditions which permit the production of threonine or a composition comprising threonine in said non-human organism or in the culture medium surrounding said non-human organism.

[29870] A further embodiment of the present invention relates to a process for the production of threonine, which comprises
[29871] (a) increasing or generating the activity of a 3-phosphoglycerate dehydrogenase non-targeted in a non-human organism or a part thereof, preferably a microorganism, a plant cell, a plant or a part thereof, as compared to a corresponding non-transformed wild type non-human organism or a part thereof; and
[29872] (b) growing the non-human organism or a part thereof under conditions which permit the production of threonine or a composition comprising threonine in said non-human organism or in the culture medium surrounding said non-human organism.

[29873] A further embodiment of the present invention relates to a process for the production of threonine, which comprises
[29874] (a) increasing or generating the activity of a glutathione S-transferase non-targeted in a non-human organism or a part thereof, preferably a microorganism, a plant cell, a plant or a part thereof, as compared to a corresponding non-transformed wild type non-human organism or a part thereof; and
[29875] (b) growing the non-human organism or a part thereof under conditions which permit the production of threonine or a composition comprising threonine in said non-human organism or in the culture medium surrounding said non-human organism.

[29876] A further embodiment of the present invention relates to a process for the production of threonine, which comprises
[29877] (a) increasing or generating the activity of a DnaJ-like chaperone non-targeted in a non-human organism or a part thereof, preferably a microorganism, a plant cell, a plant or a part thereof, as compared to a corresponding non-transformed wild type non-human organism or a part thereof; and
[29878] (b) growing the non-human organism or a part thereof under conditions which permit the production of threonine or a composition comprising threonine in said non-human organism or in the culture medium surrounding said non-human organism.

[29879] A further embodiment of the present invention relates to a process for the production of threonine, which comprises
[29880] (a) increasing or generating the activity of a YJL127W-A-protein non-targeted in a non-human organism or a part thereof, preferably a microorganism, a plant cell, a plant or a part thereof, as compared to a corresponding non-transformed wild type non-human organism or a part thereof; and
[29881] (b) growing the non-human organism or a part thereof under conditions which permit the production of threonine or a composition comprising threonine in said non-human organism or in the culture medium surrounding said non-human organism.

[29882] A further embodiment of the present invention relates to a process for the production of threonine, which comprises
[29883] (a) increasing or generating the activity of a hexose transporter non-targeted in a non-human organism or a part thereof, preferably a microorganism, a plant cell, a plant or a part thereof, as compared to a corresponding non-transformed wild type non-human organism or a part thereof; and
[29884] (b) growing the non-human organism or a part thereof under conditions which permit the production of threonine or a composition comprising threonine in said non-human organism or in the culture medium surrounding said non-human organism.

[29885] A further embodiment of the present invention relates to a process for the production of threonine, which comprises
[29886] (a) increasing or generating the activity of a homoserine dehydrogenase non-targeted in a non-human organism or a part thereof, preferably a microorganism, a plant cell, a plant or a part thereof, as compared to a corresponding non-transformed wild type non-human organism or a part thereof; and
[29887] (b) growing the non-human organism or a part thereof under conditions which permit the production of threonine or a composition comprising threonine in said non-human organism or in the culture medium surrounding said non-human organism.

[29888] A further embodiment of the present invention relates to a process for the production of threonine, which comprises
[29889] (a) increasing or generating the activity of a branched chain aminotransferase non-targeted in a non-human organism or a part thereof, preferably a microorganism, a plant cell, a plant or a part thereof, as compared to a corresponding non-transformed wild type non-human organism or a part thereof; and
[29890] (b) growing the non-human organism or a part thereof under conditions which permit the production of threonine or a composition comprising threonine in said non-human organism or in the culture medium surrounding said non-human organism.

[29891] A further embodiment of the present invention relates to a process for the production of threonine, which comprises
[29892] (a) increasing or generating the activity of a YKL038W-protein non-targeted in a non-human organism or a part thereof, preferably a microorganism, a plant cell, a plant or a part thereof, as compared to a corresponding non-transformed wild type non-human organism or a part thereof; and
[29893] (b) growing the non-human organism or a part thereof under conditions which permit the production of threonine or a composition comprising threonine in said non-human organism or in the culture medium surrounding said non-human organism.

[29894] A further embodiment of the present invention relates to a process for the production of threonine, which comprises
[29895] (a) increasing or generating the activity of a phosphoenolpyruvate carboxykinase non-targeted in a non-human organism or a part thereof, preferably a microorganism, a plant cell, a plant or a part thereof, as compared to a corresponding non-transformed wild type non-human organism or a part thereof; and
[29896] (b) growing the non-human organism or a part thereof under conditions which permit the production of threonine or a composition comprising threonine in said non-human organism or in the culture medium surrounding said non-human organism.

[29897] A further embodiment of the present invention relates to a process for the production of threonine, which comprises
[29898] (a) increasing or generating the activity of a aspartate aminotransferase non-targeted in a non-human organism or a part thereof, preferably a microorganism, a plant cell, a plant or a part thereof, as compared to a corresponding non-transformed wild type non-human organism or a part thereof; and
[29899] (b) growing the non-human organism or a part thereof under conditions which permit the production of threonine or a composition comprising threonine in said non-human organism or in the culture medium surrounding said non-human organism.

[29900] A further embodiment of the present invention relates to a process for the production of threonine, which comprises
[29901] (a) increasing or generating the activity of a mitochondrial dicarboxylate transporter non-targeted in a non-human organism or a part thereof, preferably a microorganism, a plant cell, a plant or a part thereof, as compared to a corresponding non-transformed wild type non-human organism or a part thereof; and
[29902] (b) growing the non-human organism or a part thereof under conditions which permit the production of threonine or a composition comprising threonine in said non-human organism or in the culture medium surrounding said non-human organism.

[29903] A further embodiment of the present invention relates to a process for the production of threonine, which comprises
[29904] (a) increasing or generating the activity of a phosphate transporter non-targeted in a non-human organism or a part thereof, preferably a microorganism, a plant cell, a plant or a part thereof, as compared to a corresponding non-transformed wild type non-human organism or a part thereof; and
[29905] (b) growing the non-human organism or a part thereof under conditions which permit the production of threonine or a composition comprising threonine in said non-human organism or in the culture medium surrounding said non-human organism.

[29906] A further embodiment of the present invention relates to a process for the production of threonine, which comprises
[29907] (a) increasing or generating the activity of a protein kinase non-targeted in a non-human organism or a part thereof, preferably a microorganism, a plant cell, a plant or a part thereof, as compared to a corresponding non-transformed wild type non-human organism or a part thereof; and
[29908] (b) growing the non-human organism or a part thereof under conditions which permit the production of threonine or a composition comprising threonine in said non-human organism or in the culture medium surrounding said non-human organism.

[29909] A further embodiment of the present invention relates to a process for the production of threonine, which comprises
[29910] (a) increasing or generating the activity of a histone acetyltransferase non-targeted in a non-human organism or a part thereof, preferably a microorganism, a plant cell, a plant or a part thereof, as compared to a corresponding non-transformed wild type non-human organism or a part thereof; and
[29911] (b) growing the non-human organism or a part thereof under conditions which permit the production of threonine or a composition comprising threonine in said non-human organism or in the culture medium surrounding said non-human organism.

[29912] A further embodiment of the present invention relates to a process for the production of threonine, which comprises
[29913] (a) increasing or generating the activity of a cyclin non-targeted in a non-human organism or a part thereof, preferably a microorganism, a plant cell, a plant or a part thereof, as compared to a corresponding non-transformed wild type non-human organism or a part thereof; and
[29914] (b) growing the non-human organism or a part thereof under conditions which permit the production of threonine or a composition comprising threonine in said non-human organism or in the culture medium surrounding said non-human organism.

[29915] A further embodiment of the present invention relates to a process for the production of threonine, which comprises
[29916] (a) increasing or generating the activity of a Zm_{—}4842_BE510522-protein non-targeted in a non-human organism or a part thereof, preferably a microorganism, a plant cell, a plant or a part thereof, as compared to a corresponding non-transformed wild type non-human organism or a part thereof; and
[29917] (b) growing the non-human organism or a part thereof under conditions which permit the production of threonine or a composition comprising threonine in said non-human organism or in the culture medium surrounding said non-human organism.

[29918] A further embodiment of the present invention relates to a process for the production of threonine, which comprises
[29919] (a) increasing or generating the activity of a polypeptide comprising a polypeptide as depicted in the respective line in column 5 or 8 of Table II, application no. 4, or a homolog or a fragment thereof, a consensus sequence or at least one polypeptide motif as depicted in the respective line in column 8 of Table IV, application no. 4; or increasing or generating the activity of an expression product of one or more nucleic acid molecule(s) comprising a polynucleotide as depicted in the respective line in column 5 or 8 of Table I, application no. 4, preferably the coding region thereof, or a homolog or a fragment thereof;

[29920] non-targeted in a non-human organism or a part thereof; preferably a microorganism, a plant cell, a plant or a part thereof, as compared to a corresponding non-transformed wild type non-human organism or a part thereof; and
[29921] (b) growing the non-human organism under conditions which permit the production of threonine, or a composition comprising threonine in said non-human organism or in the culture medium surrounding said non-human organism.

[29922] A further embodiment of the present invention relates to a process for the production of threonine, which comprises
[29923] (a) increasing or generating one or more activities selected from the group consisting of 47266012-protein in an organelle, preferably in plastids or mitochondria, especially in plastids, of a non-human organism or a part thereof, preferably a microorganism, a plant cell, a plant or a part thereof, as compared to a corresponding non-transformed wild type non-human organism or a part thereof; and
[29924] (b) growing the non-human organism or a part thereof under conditions which permit the production of threonine or a composition comprising threonine in said non-human organism or in the culture medium surrounding said non-human organism.

[29925] A further embodiment of the present invention relates to a process for the production of threonine, which comprises
[29926] (a) increasing or generating one or more activities selected from the group consisting of 49747384_SOYBEAN-protein in an organelle, preferably in plastids or mitochondria, especially in plastids, of a non-human organism or a part thereof, preferably a microorganism, a plant cell, a plant or a part thereof, as compared to a corresponding non-transformed wild type non-human organism or a part thereof; and
[29927] (b) growing the non-human organism or a part thereof under conditions which permit the production of threonine or a composition comprising threonine in said non-human organism or in the culture medium surrounding said non-human organism.

[29928] A further embodiment of the present invention relates to a process for the production of threonine, which comprises
[29929] (a) increasing or generating one or more activities selected from the group consisting of glucose-6-phosphate 1-dehydrogenase in an organelle, preferably in plastids or mitochondria, especially in plastids, of a non-human organism or a part thereof, preferably a microorganism, a plant cell, a plant or a part thereof, as compared to a corresponding non-transformed wild type non-human organism or a part thereof; and
[29930] (b) growing the non-human organism or a part thereof under conditions which permit the production of threonine or a composition comprising threonine in said non-human organism or in the culture medium surrounding said non-human organism.

[29931] A further embodiment of the present invention relates to a process for the production of threonine, which comprises
[29932] (a) increasing or generating one or more activities selected from the group consisting of At1g09680-protein in an organelle, preferably in plastids or mitochondria, especially in plastids, of a non-human organism or a part thereof, preferably a microorganism, a plant cell, a plant or a part thereof, as compared to a corresponding non-transformed wild type non-human organism or a part thereof; and
[29933] (b) growing the non-human organism or a part thereof under conditions which permit the production of threonine or a composition comprising threonine in said non-human organism or in the culture medium surrounding said non-human organism.

[29934] A further embodiment of the present invention relates to a process for the production of threonine, which comprises
[29935] (a) increasing or generating one or more activities selected from the group consisting of bifunctional aspartokinase/homoserine dehydrogenase in an organelle, preferably in plastids or mitochondria, especially in plastids, of a non-human organism or a part thereof, preferably a microorganism, a plant cell, a plant or a part thereof, as compared to a corresponding non-transformed wild type non-human organism or a part thereof; and
[29936] (b) growing the non-human organism or a part thereof under conditions which permit the production of threonine or a composition comprising threonine in said non-human organism or in the culture medium surrounding said non-human organism.

[29937] A further embodiment of the present invention relates to a process for the production of threonine, which comprises
[29938] (a) increasing or generating one or more activities selected from the group consisting of eukaryotic translation initiation factor 5 in an organelle, preferably in plastids or mitochondria, especially in plastids, of a non-human organism or a part thereof, preferably a microorganism, a plant cell, a plant or a part thereof, as compared to a corresponding non-transformed wild type non-human organism or a part thereof; and
[29939] (b) growing the non-human organism or a part thereof under conditions which permit the production of threonine or a composition comprising threonine in said non-human organism or in the culture medium surrounding said non-human organism.

[29940] A further embodiment of the present invention relates to a process for the production of threonine, which comprises
[29941] (a) increasing or generating one or more activities selected from the group consisting of transcriptional regulator in an organelle, preferably in plastids or mitochondria, especially in plastids, of a non-human organism or a part thereof, preferably a microorganism, a plant cell, a plant or a part thereof, as compared to a corresponding non-transformed wild type non-human organism or a part thereof; and
[29942] (b) growing the non-human organism or a part thereof under conditions which permit the production of threonine or a composition comprising threonine in said non-human organism or in the culture medium surrounding said non-human organism.

[29943] A further embodiment of the present invention relates to a process for the production of threonine, which comprises
[29944] (a) increasing or generating one or more activities selected from the group consisting of protein phosphatase in an organelle, preferably in plastids or mitochondria, especially in plastids, of a non-human organism or a part thereof, preferably a microorganism, a plant cell, a plant or a part thereof, as compared to a corresponding non-transformed wild type non-human organism or a part thereof; and
[29945] (b) growing the non-human organism or a part thereof under conditions which permit the production of threonine or a composition comprising threonine in said non-human organism or in the culture medium surrounding said non-human organism.

[29946] A further embodiment of the present invention relates to a process for the production of threonine, which comprises
[29947] (a) increasing or generating one or more activities selected from the group consisting of protein kinase in an organelle, preferably in plastids or mitochondria, especially in plastids, of a non-human organism or a part thereof, preferably a microorganism, a plant cell, a plant or a part thereof, as compared to a corresponding non-transformed wild type non-human organism or a part thereof; and
[29948] (b) growing the non-human organism or a part thereof under conditions which permit the production of threonine or a composition comprising threonine in said non-human organism or in the culture medium surrounding said non-human organism.

[29949] A further embodiment of the present invention relates to a process for the production of threonine, which comprises
[29950] (a) increasing or generating one or more activities selected from the group consisting of protein phosphatase in an organelle, preferably in plastids or mitochondria, especially in plastids, of a non-human organism or a part thereof, preferably a microorganism, a plant cell, a plant or a part thereof, as compared to a corresponding non-transformed wild type non-human organism or a part thereof; and
[29951] (b) growing the non-human organism or a part thereof under conditions which permit the production of threonine or a composition comprising threonine in said non-human organism or in the culture medium surrounding said non-human organism.

[29952] A further embodiment of the present invention relates to a process for the production of threonine, which comprises
[29953] (a) increasing or generating one or more activities selected from the group consisting of protein phosphatase in an organelle, preferably in plastids or mitochondria, especially in plastids, of a non-human organism or a part thereof, preferably a microorganism, a plant cell, a plant or a part thereof, as compared to a corresponding non-transformed wild type non-human organism or a part thereof; and
[29954] (b) growing the non-human organism or a part thereof under conditions which permit the production of threonine or a composition comprising threonine in said non-human organism or in the culture medium surrounding said non-human organism.

[29955] A further embodiment of the present invention relates to a process for the production of threonine, which comprises
[29956] (a) increasing or generating one or more activities selected from the group consisting of glutaredoxin in an organelle, preferably in plastids or mitochondria, especially in plastids, of a non-human organism or a part thereof, preferably a microorganism, a plant cell, a plant or a part thereof, as compared to a corresponding non-transformed wild type non-human organism or a part thereof; and
[29957] (b) growing the non-human organism or a part thereof under conditions which permit the production of threonine or a composition comprising threonine in said non-human organism or in the culture medium surrounding said non-human organism.

[29958] A further embodiment of the present invention relates to a process for the production of threonine, which comprises
[29959] (a) increasing or generating one or more activities selected from the group consisting of CCAAT-binding transcription factor in an organelle, preferably in plastids or mitochondria, especially in plastids, of a non-human organism or a part thereof, preferably a microorganism, a plant cell, a plant or a part thereof, as compared to a corresponding non-transformed wild type non-human organism or a part thereof; and
[29960] (b) growing the non-human organism or a part thereof under conditions which permit the production of threonine or a composition comprising threonine in said non-human organism or in the culture medium surrounding said non-human organism.

[29961] A further embodiment of the present invention relates to a process for the production of threonine, which comprises
[29962] (a) increasing or generating one or more activities selected from the group consisting of protein kinase in an organelle, preferably in plastids or mitochondria, especially in plastids, of a non-human organism or a part thereof, preferably a microorganism, a plant cell, a plant or a part thereof, as compared to a corresponding non-transformed wild type non-human organism or a part thereof; and
[29963] (b) growing the non-human organism or a part thereof under conditions which permit the production of threonine or a composition comprising threonine in said non-human organism or in the culture medium surrounding said non-human organism.

[29964] A further embodiment of the present invention relates to a process for the production of threonine, which comprises
[29965] (a) increasing or generating one or more activities selected from the group consisting of glycosy) transferase in an organelle, preferably in plastids or mitochondria, especially in plastids, of a non-human organism or a part thereof, preferably a microorganism, a plant cell, a plant or a part thereof, as compared to a corresponding non-transformed wild type non-human organism or a part thereof; and
[29966] (b) growing the non-human organism or a part thereof under conditions which permit the production of threonine or a composition comprising threonine in said non-human organism or in the culture medium surrounding said non-human organism.

[29967] A further embodiment of the present invention relates to a process for the production of threonine, which comprises
[29968] (a) increasing or generating one or more activities selected from the group consisting of monthiol glutaredoxin in an organelle, preferably in plastids or mitochondria, especially in plastids, of a non-human organism or a part thereof, preferably a microorganism, a plant cell, a plant or a part thereof, as compared to a corresponding non-transformed wild type non-human organism or a part thereof; and
[29969] (b) growing the non-human organism or a part thereof under conditions which permit the production of threonine or a composition comprising threonine in said non-human organism or in the culture medium surrounding said non-human organism.

[29970] A further embodiment of the present invention relates to a process for the production of threonine, which comprises
[29971] (a) increasing or generating one or more activities selected from the group consisting of glutaredoxin in an organelle, preferably in plastids or mitochondria, especially in plastids, of a non-human organism or a part thereof, preferably a microorganism, a plant cell, a plant or a part thereof, as compared to a corresponding non-transformed wild type non-human organism or a part thereof; and
[29972] (b) growing the non-human organism or a part thereof under conditions which permit the production of threonine or a composition comprising threonine in said non-human organism or in the culture medium surrounding said non-human organism.

[29973] A further embodiment of the present invention relates to a process for the production of threonine, which comprises
[29974] (a) increasing or generating one or more activities selected from the group consisting of monothiol glutaredoxin in an organelle, preferably in plastids or mitochondria, especially in plastids, of a non-human organism or a part thereof, preferably a microorganism, a plant cell, a plant or a part thereof, as compared to a corresponding non-transformed wild type non-human organism or a part thereof; and
[29975] (b) growing the non-human organism or a part thereof under conditions which permit the production of threonine or a composition comprising threonine in said non-human organism or in the culture medium surrounding said non-human organism.

[29976] A further embodiment of the present invention relates to a process for the production of threonine, which comprises
[29977] (a) increasing or generating one or more activities selected from the group consisting of monothiol glutaredoxin in an organelle, preferably in plastids or mitochondria, especially in plastids, of a non-human organism or a part thereof, preferably a microorganism, a plant cell, a plant or a part thereof, as compared to a corresponding non-transformed wild type non-human organism or a part thereof; and
[29978] (b) growing the non-human organism or a part thereof under conditions which permit the production of threonine or a composition comprising threonine in said non-human organism or in the culture medium surrounding said non-human organism.

[29979] A further embodiment of the present invention relates to a process for the production of threonine, which comprises
[29980] (a) increasing or generating one or more activities selected from the group consisting of monothiol glutaredoxin in an organelle, preferably in plastids or mitochondria, especially in plastids, of a non-human organism or a part thereof, preferably a microorganism, a plant cell, a plant or a part thereof, as compared to a corresponding non-transformed wild type non-human organism or a part thereof; and
[29981] (b) growing the non-human organism or a part thereof under conditions which permit the production of threonine or a composition comprising threonine in said non-human organism or in the culture medium surrounding said non-human organism.

[29982] A further embodiment of the present invention relates to a process for the production of threonine, which comprises
[29983] (a) increasing or generating one or more activities selected from the group consisting of heat shock transcription factor in an organelle, preferably in plastids or mitochondria, especially in plastids, of a non-human organism or a part thereof, preferably a microorganism, a plant cell, a plant or a part thereof, as compared to a corresponding non-transformed wild type non-human organism or a part thereof; and
[29984] (b) growing the non-human organism or a part thereof under conditions which permit the production of threonine or a composition comprising threonine in said non-human organism or in the culture medium surrounding said non-human organism.

[29985] A further embodiment of the present invention relates to a process for the production of threonine, which comprises
[29986] (a) increasing or generating one or more activities selected from the group consisting of At4g32480-protein in an organelle, preferably in plastids or mitochondria, especially in plastids, of a non-human organism or a part thereof, preferably a microorganism, a plant cell, a plant or a part thereof, as compared to a corresponding non-transformed wild type non-human organism or a part thereof; and
[29987] (b) growing the non-human organism or a part thereof under conditions which permit the production of threonine or a composition comprising threonine in said non-human organism or in the culture medium surrounding said non-human organism.

[29988] A further embodiment of the present invention relates to a process for the production of threonine, which comprises
[29989] (a) increasing or generating one or more activities selected from the group consisting of cyclin D in an organelle, preferably in plastids or mitochondria, especially in plastids, of a non-human organism or a part thereof, preferably a microorganism, a plant cell, a plant or a part thereof, as compared to a corresponding non-transformed wild type non-human organism or a part thereof; and
[29990] (b) growing the non-human organism or a part thereof under conditions which permit the production of threonine or a composition comprising threonine in said non-human organism or in the culture medium surrounding said non-human organism.

[29991] A further embodiment of the present invention relates to a process for the production of threonine, which comprises
[29992] (a) increasing or generating one or more activities selected from the group consisting of calcium-dependent protein kinase in an organelle, preferably in plastids or mitochondria, especially in plastids, of a non-human organism or a part thereof, preferably a microorganism, a plant cell, a plant or a part thereof, as compared to a corresponding non-transformed wild type non-human organism or a part thereof; and
[29993] (b) growing the non-human organism or a part thereof under conditions which permit the production of threonine or a composition comprising threonine in said non-human organism or in the culture medium surrounding said non-human organism.

[29994] A further embodiment of the present invention relates to a process for the production of threonine, which comprises
[29995] (a) increasing or generating one or more activities selected from the group consisting of gibberellin 20-oxidase in an organelle, preferably in plastids or mitochondria, especially in plastids, of a non-human organism or a part thereof, preferably a microorganism, a plant cell, a plant or a part thereof, as compared to a corresponding non-transformed wild type non-human organism or a part thereof; and
[29996] (b) growing the non-human organism or a part thereof under conditions which permit the production of threonine or a composition comprising threonine in said non-human organism or in the culture medium surrounding said non-human organism.

[29997] A further embodiment of the present invention relates to a process for the production of threonine, which comprises
[29998] (a) increasing or generating one or more activities selected from the group consisting of aspartate kinase in an organelle, preferably in plastids or mitochondria, especially in plastids, of a non-human organism or a part thereof, preferably a microorganism, a plant cell, a plant or a part thereof, as compared to a corresponding non-transformed wild type non-human organism or a part thereof; and
[29999] (b) growing the non-human organism or a part thereof under conditions which permit the production of threonine or a composition comprising threonine in said non-human organism or in the culture medium surrounding said non-human organism.

[30000] A further embodiment of the present invention relates to a process for the production of threonine, which comprises
[30001] (a) increasing or generating one or more activities selected from the group consisting of At5g16650-protein in an organelle, preferably in plastids or mitochondria, especially in plastids, of a non-human organism or a part thereof, preferably a microorganism, a plant cell, a plant or a part thereof, as compared to a corresponding non-transformed wild type non-human organism or a part thereof; and
[30002] (b) growing the non-human organism or a part thereof under conditions which permit the production of threonine or a composition comprising threonine in said non-human organism or in the culture medium surrounding said non-human organism.

[30003] A further embodiment of the present invention relates to a process for the production of threonine, which comprises
[30004] (a) increasing or generating one or more activities selected from the group consisting of thioredoxin in an organelle, preferably in plastids or mitochondria, especially in plastids, of a non-human organism or a part thereof, preferably a microorganism, a plant cell, a plant or a part thereof, as compared to a corresponding non-transformed wild type non-human organism or a part thereof; and
[30005] (b) growing the non-human organism or a part thereof under conditions which permit the production of threonine or a composition comprising threonine in said non-human organism or in the culture medium surrounding said non-human organism.

[30006] A further embodiment of the present invention relates to a process for the production of threonine, which comprises
[30007] (a) increasing or generating one or more activities selected from the group consisting of protein phosphatase in an organelle, preferably in plastids or mitochondria, especially in plastids, of a non-human organism or a part thereof, preferably a microorganism, a plant cell, a plant or a part thereof, as compared to a corresponding non-transformed wild type non-human organism or a part thereof; and
[30008] (b) growing the non-human organism or a part thereof under conditions which permit the production of threonine or a composition comprising threonine in said non-human organism or in the culture medium surrounding said non-human organism.

[30009] A further embodiment of the present invention relates to a process for the production of threonine, which comprises
[30010] (a) increasing or generating one or more activities selected from the group consisting of zinc finger protein in an organelle, preferably in plastids or mitochondria, especially in plastids, of a non-human organism or a part thereof, preferably a microorganism, a plant cell, a plant or a part thereof, as compared to a corresponding non-transformed wild type non-human organism or a part thereof; and
[30011] (b) growing the non-human organism or a part thereof under conditions which permit the production of threonine or a composition comprising threonine in said non-human organism or in the culture medium surrounding said non-human organism.

[30012] A further embodiment of the present invention relates to a process for the production of threonine, which comprises
[30013] (a) increasing or generating one or more activities selected from the group consisting of CDP-diacylglycerol-serine O-phosphatidyltransferase in an organelle, preferably in plastids or mitochondria, especially in plastids, of a non-human organism or a part thereof, preferably a microorganism, a plant cell, a plant or a part thereof, as compared to a corresponding non-transformed wild type non-human organism or a part thereof; and
[30014] (b) growing the non-human organism or a part thereof under conditions which permit the production of threonine or a composition comprising threonine in said non-human organism or in the culture medium surrounding said non-human organism.

[30015] A further embodiment of the present invention relates to a process for the production of threonine, which comprises
[30016] (a) increasing or generating one or more activities selected from the group consisting of malic enzyme in an organelle, preferably in plastids or mitochondria, especially in plastids, of a non-human organism or a part thereof, preferably a microorganism, a plant cell, a plant or a part thereof, as compared to a corresponding non-transformed wild type non-human organism or a part thereof; and
[30017] (b) growing the non-human organism or a part thereof under conditions which permit the production of threonine or a composition comprising threonine in said non-human organism or in the culture medium surrounding said non-human organism.

[30018] A further embodiment of the present invention relates to a process for the production of threonine, which comprises
[30019] (a) increasing or generating one or more activities selected from the group consisting of sec-independent protein translocase in an organelle, preferably in plastids or mitochondria, especially in plastids, of a non-human organism or a part thereof, preferably a microorganism, a plant cell, a plant or a part thereof, as compared to a corresponding non-transformed wild type non-human organism or a part thereof; and
[30020] (b) growing the non-human organism or a part thereof under conditions which permit the production of threonine or a composition comprising threonine in said non-human organism or in the culture medium surrounding said non-human organism.

[30021] A further embodiment of the present invention relates to a process for the production of threonine, which comprises
[30022] (a) increasing or generating one or more activities selected from the group consisting of beta-hydroxylase in an organelle, preferably in plastids or mitochondria, especially in plastids, of a non-human organism or a part thereof, preferably a microorganism, a plant cell, a plant or a part thereof, as compared to a corresponding non-transformed wild type non-human organism or a part thereof; and
[30023] (b) growing the non-human organism or a part thereof under conditions which permit the production of threonine or a composition comprising threonine in said non-human organism or in the culture medium surrounding said non-human organism.

[30024] A further embodiment of the present invention relates to a process for the production of threonine, which comprises
[30025] (a) increasing or generating one or more activities selected from the group consisting of elongation factor Tu in an organelle, preferably in plastids or mitochondria, especially in plastids, of a non-human organism or a part thereof, preferably a microorganism, a plant cell, a plant or a part thereof, as compared to a corresponding non-transformed wild type non-human organism or a part thereof; and
[30026] (b) growing the non-human organism or a part thereof under conditions which permit the production of threonine or a composition comprising threonine in said non-human organism or in the culture medium surrounding said non-human organism.

[30027] A further embodiment of the present invention relates to a process for the production of threonine, which comprises
[30028] (a) increasing or generating one or more activities selected from the group consisting of ABC transporter permease protein in an organelle, preferably in plastids or mitochondria, especially in plastids, of a non-human organism or a part thereof, preferably a microorganism, a plant cell, a plant or a part thereof, as compared to a corresponding non-transformed wild type non-human organism or a part thereof; and
[30029] (b) growing the non-human organism or a part thereof under conditions which permit the production of threonine or a composition comprising threonine in said non-human organism or in the culture medium surrounding said non-human organism.

[30030] A further embodiment of the present invention relates to a process for the production of threonine, which comprises
[30031] (a) increasing or generating one or more activities selected from the group consisting of acyl-CoA synthase in an organelle, preferably in plastids or mitochondria, especially in plastids, of a non-human organism or a part thereof, preferably a microorganism, a plant cell, a plant or a part thereof, as compared to a corresponding non-transformed wild type non-human organism or a part thereof; and
[30032] (b) growing the non-human organism or a part thereof under conditions which permit the production of threonine or a composition comprising threonine in said non-human organism or in the culture medium surrounding said non-human organism.

[30033] A further embodiment of the present invention relates to a process for the production of threonine, which comprises
[30034] (a) increasing or generating one or more activities selected from the group consisting of 2-oxoglutarate dehydrogenase E1 subunit in an organelle, preferably in plastids or mitochondria, especially in plastids, of a non-human organism or a part thereof, preferably a microorganism, a plant cell, a plant or a part thereof, as compared to a corresponding non-transformed wild type non-human organism or a part thereof; and
[30035] (b) growing the non-human organism or a part thereof under conditions which permit the production of threonine or a composition comprising threonine in said non-human organism or in the culture medium surrounding said non-human organism.

[30036] A further embodiment of the present invention relates to a process for the production of threonine, which comprises
[30037] (a) increasing or generating one or more activities selected from the group consisting of permease protein of peptide ABC transporter in an organelle, preferably in plastids or mitochondria, especially in plastids, of a non-human organism or a part thereof, preferably a microorganism, a plant cell, a plant or a part thereof, as compared to a corresponding non-transformed wild type non-human organism or a part thereof; and
[30038] (b) growing the non-human organism or a part thereof under conditions which permit the production of threonine or a composition comprising threonine in said non-human organism or in the culture medium surrounding said non-human organism.

[30039] A further embodiment of the present invention relates to a process for the production of threonine, which comprises
[30040] (a) increasing or generating one or more activities selected from the group consisting of GDP-mannose dehydrogenase in an organelle, preferably in plastids or mitochondria, especially in plastids, of a non-human organism or a part thereof, preferably a microorganism, a plant cell, a plant or a part thereof, as compared to a corresponding non-transformed wild type non-human organism or a part thereof; and
[30041] (b) growing the non-human organism or a part thereof under conditions which permit the production of threonine or a composition comprising threonine in said non-human organism or in the culture medium surrounding said non-human organism.

[30042] A further embodiment of the present invention relates to a process for the production of threonine, which comprises
[30043] (a) increasing or generating one or more activities selected from the group consisting of enoyl-CoA hydratase in an organelle, preferably in plastids or mitochondria, especially in plastids, of a non-human organism or a part thereof, preferably a microorganism, a plant cell, a plant or a part thereof, as compared to a corresponding non-transformed wild type non-human organism or a part thereof; and
[30044] (b) growing the non-human organism or a part thereof under conditions which permit the production of threonine or a composition comprising threonine in said non-human organism or in the culture medium surrounding said non-human organism.

[30045] A further embodiment of the present invention relates to a process for the production of threonine, which comprises
[30046] (a) increasing or generating one or more activities selected from the group consisting of transcriptional regulator in an organelle, preferably in plastids or mitochondria, especially in plastids, of a non-human organism or a part thereof, preferably a microorganism, a plant cell, a plant or a part thereof, as compared to a corresponding non-transformed wild type non-human organism or a part thereof; and
[30047] (b) growing the non-human organism or a part thereof under conditions which permit the production of threonine or a composition comprising threonine in said non-human organism or in the culture medium surrounding said non-human organism.

[30048] A further embodiment of the present invention relates to a process for the production of threonine, which comprises
[30049] (a) increasing or generating one or more activities selected from the group consisting of homoserine dehydrogenase in an organelle, preferably in plastids or mitochondria, especially in plastids, of a non-human organism or a part thereof, preferably a microorganism, a plant cell, a plant or a part thereof, as compared to a corresponding non-transformed wild type non-human organism or a part thereof; and
[30050] (b) growing the non-human organism or a part thereof under conditions which permit the production of threonine or a composition comprising threonine in said non-human organism or in the culture medium surrounding said non-human organism.

[30051] A further embodiment of the present invention relates to a process for the production of threonine, which comprises
[30052] (a) increasing or generating one or more activities selected from the group consisting of hydrolase in an organelle, preferably in plastids or mitochondria, especially in plastids, of a non-human organism or a part thereof, preferably a microorganism, a plant cell, a plant or a part thereof, as compared to a corresponding non-transformed wild type non-human organism or a part thereof; and
[30053] (b) growing the non-human organism or a part thereof under conditions which permit the production of threonine or a composition comprising threonine in said non-human organism or in the culture medium surrounding said non-human organism.

[30054] A further embodiment of the present invention relates to a process for the production of threonine, which comprises
[30055] (a) increasing or generating one or more activities selected from the group consisting of glutamate-ammonia-ligase in an organelle, preferably in plastids or mitochondria, especially in plastids, of a non-human organism or a part thereof, preferably a microorganism, a plant cell, a plant or a part thereof, as compared to a corresponding non-transformed wild type non-human organism or a part thereof; and
[30056] (b) growing the non-human organism or a part thereof under conditions which permit the production of threonine or a composition comprising threonine in said non-human organism or in the culture medium surrounding said non-human organism.

[30057] A further embodiment of the present invention relates to a process for the production of threonine, which comprises
[30058] (a) increasing or generating one or more activities selected from the group consisting of peptidase in an organelle, preferably in plastids or mitochondria, especially in plastids, of a non-human organism or a part thereof, preferably a microorganism, a plant cell, a plant or a part thereof, as compared to a corresponding non-transformed wild type non-human organism or a part thereof; and
[30059] (b) growing the non-human organism or a part thereof under conditions which permit the production of threonine or a composition comprising threonine in said non-human organism or in the culture medium surrounding said non-human organism.

[30060] A further embodiment of the present invention relates to a process for the production of threonine, which comprises
[30061] (a) increasing or generating one or more activities selected from the group consisting of Chaperone protein CIpB in an organelle, preferably in plastids or mitochondria, especially in plastids, of a non-human organism or a part thereof, preferably a microorganism, a plant cell, a plant or a part thereof, as compared to a corresponding non-transformed wild type non-human organism or a part thereof; and
[30062] (b) growing the non-human organism or a part thereof under conditions which permit the production of threonine or a composition comprising threonine in said non-human organism or in the culture medium surrounding said non-human organism.

[30063] A further embodiment of the present invention relates to a process for the production of threonine, which comprises
[30064] (a) increasing or generating one or more activities selected from the group consisting of transcriptional regulator protein in an organelle, preferably in plastids or mitochondria, especially in plastids, of a non-human organism or a part thereof, preferably a microorganism, a plant cell, a plant or a part thereof, as compared to a corresponding non-transformed wild type non-human organism or a part thereof; and
[30065] (b) growing the non-human organism or a part thereof under conditions which permit the production of threonine or a composition comprising threonine in said non-human organism or in the culture medium surrounding said non-human organism.

[30066] A further embodiment of the present invention relates to a process for the production of threonine, which comprises
[30067] (a) increasing or generating one or more activities selected from the group consisting of AX653549-protein in an organelle, preferably in plastids or mitochondria, especially in plastids, of a non-human organism or a part thereof, preferably a microorganism, a plant cell, a plant or a part thereof, as compared to a corresponding non-transformed wild type non-human organism or a part thereof; and
[30068] (b) growing the non-human organism or a part thereof under conditions which permit the production of threonine or a composition comprising threonine in said non-human organism or in the culture medium surrounding said non-human organism.

[30069] A further embodiment of the present invention relates to a process for the production of threonine, which comprises
[30070] (a) increasing or generating one or more activities selected from the group consisting of threonine synthase in an organelle, preferably in plastids or mitochondria, especially in plastids, of a non-human organism or a part thereof, preferably a microorganism, a plant cell, a plant or a part thereof, as compared to a corresponding non-transformed wild type non-human organism or a part thereof; and
[30071] (b) growing the non-human organism or a part thereof under conditions which permit the production of threonine or a composition comprising threonine in said non-human organism or in the culture medium surrounding said non-human organism.

[30072] A further embodiment of the present invention relates to a process for the production of threonine, which comprises
[30073] (a) increasing or generating one or more activities selected from the group consisting of acetolactate synthase small subunit in an organelle, preferably in plastids or mitochondria, especially in plastids, of a non-human organism or a part thereof, preferably a microorganism, a plant cell, a plant or a part thereof, as compared to a corresponding non-transformed wild type non-human organism or a part thereof; and
[30074] (b) growing the non-human organism or a part thereof under conditions which permit the production of threonine or a composition comprising threonine in said non-human organism or in the culture medium surrounding said non-human organism.

[30075] A further embodiment of the present invention relates to a process for the production of threonine, which comprises
[30076] (a) increasing or generating one or more activities selected from the group consisting of dihydrolipoamide acetyltransferase in an organelle, preferably in plastids or mitochondria, especially in plastids, of a non-human organism or a part thereof, preferably a microorganism, a plant cell, a plant or a part thereof, as compared to a corresponding non-transformed wild type non-human organism or a part thereof; and
[30077] (b) growing the non-human organism or a part thereof under conditions which permit the production of threonine or a composition comprising threonine in said non-human organism or in the culture medium surrounding said non-human organism.

[30078] A further embodiment of the present invention relates to a process for the production of threonine, which comprises
[30079] (a) increasing or generating one or more activities selected from the group consisting of glucose dehydrogenase in an organelle, preferably in plastids or mitochondria, especially in plastids, of a non-human organism or a part thereof, preferably a microorganism, a plant cell, a plant or a part thereof, as compared to a corresponding non-transformed wild type non-human organism or a part thereof; and
[30080] (b) growing the non-human organism or a part thereof under conditions which permit the production of threonine or a composition comprising threonine in said non-human organism or in the culture medium surrounding said non-human organism.

[30081] A further embodiment of the present invention relates to a process for the production of threonine, which comprises
[30082] (a) increasing or generating one or more activities selected from the group consisting of serine protease in an organelle, preferably in plastids or mitochondria, especially in plastids, of a non-human organism or a part thereof, preferably a microorganism, a plant cell, a plant or a part thereof, as compared to a corresponding non-transformed wild type non-human organism or a part thereof; and
[30083] (b) growing the non-human organism or a part thereof under conditions which permit the production of threonine or a composition comprising threonine in said non-human organism or in the culture medium surrounding said non-human organism.

[30084] A further embodiment of the present invention relates to a process for the production of threonine, which comprises
[30085] (a) increasing or generating one or more activities selected from the group consisting of acyl-CoA dehydrogenase in an organelle, preferably in plastids or mitochondria, especially in plastids, of a non-human organism or a part thereof, preferably a microorganism, a plant cell, a plant or a part thereof, as compared to a corresponding non-transformed wild type non-human organism or a part thereof; and
[30086] (b) growing the non-human organism or a part thereof under conditions which permit the production of threonine or a composition comprising threonine in said non-human organism or in the culture medium surrounding said non-human organism.

[30087] A further embodiment of the present invention relates to a process for the production of threonine, which comprises
[30088] (a) increasing or generating one or more activities selected from the group consisting of betagalactosidase in an organelle, preferably in plastids or mitochondria, especially in plastids, of a non-human organism or a part thereof, preferably a microorganism, a plant cell, a plant or a part thereof, as compared to a corresponding non-transformed wild type non-human organism or a part thereof; and
[30089] (b) growing the non-human organism or a part thereof under conditions which permit the production of threonine or a composition comprising threonine in said non-human organism or in the culture medium surrounding said non-human organism.

[30090] A further embodiment of the present invention relates to a process for the production of threonine, which comprises
[30091] (a) increasing or generating one or more activities selected from the group consisting of 2,3-dihydroxyphenylpropionate 1,2-dioxygenase in an organelle, preferably in plastids or mitochondria, especially in plastids, of a non-human organism or a part thereof, preferably a microorganism, a plant cell, a plant or a part thereof, as compared to a corresponding non-transformed wild type non-human organism or a part thereof; and
[30092] (b) growing the non-human organism or a part thereof under conditions which permit the production of threonine or a composition comprising threonine in said non-human organism or in the culture medium surrounding said non-human organism.

[30093] A further embodiment of the present invention relates to a process for the production of threonine, which comprises
[30094] (a) increasing or generating one or more activities selected from the group consisting of ATP-binding component of a transport system in an organelle, preferably in plastids or mitochondria, especially in plastids, of a non-human organism or a part thereof, preferably a microorganism, a plant cell, a plant or a part thereof, as compared to a corresponding non-transformed wild type non-human organism or a part thereof; and
[30095] (b) growing the non-human organism or a part thereof under conditions which permit the production of threonine or a composition comprising threonine in said non-human organism or in the culture medium surrounding said non-human organism.

[30096] A further embodiment of the present invention relates to a process for the production of threonine, which comprises
[30097] (a) increasing or generating one or more activities selected from the group consisting of membrane transport protein in an organelle, preferably in plastids or mitochondria, especially in plastids, of a non-human organism or a part thereof, preferably a microorganism, a plant cell, a plant or a part thereof, as compared to a corresponding non-transformed wild type non-human organism or a part thereof; and
[30098] (b) growing the non-human organism or a part thereof under conditions which permit the production of threonine or a composition comprising threonine in said non-human organism or in the culture medium surrounding said non-human organism.

[30099] A further embodiment of the present invention relates to a process for the production of threonine, which comprises
[30100] (a) increasing or generating one or more activities selected from the group consisting of isochorismate synthase in an organelle, preferably in plastids or mitochondria, especially in plastids, of a non-human organism or a part thereof, preferably a microorganism, a plant cell, a plant or a part thereof, as compared to a corresponding non-transformed wild type non-human organism or a part thereof; and
[30101] (b) growing the non-human organism or a part thereof under conditions which permit the production of threonine or a composition comprising threonine in said non-human organism or in the culture medium surrounding said non-human organism.

[30102] A further embodiment of the present invention relates to a process for the production of threonine, which comprises
[30103] (a) increasing or generating one or more activities selected from the group consisting of sensor histidine kinase in an organelle, preferably in plastids or mitochondria, especially in plastids, of a non-human organism or a part thereof, preferably a microorganism, a plant cell, a plant or a part thereof, as compared to a corresponding non-transformed wild type non-human organism or a part thereof; and
[30104] (b) growing the non-human organism or a part thereof under conditions which permit the production of threonine or a composition comprising threonine in said non-human organism or in the culture medium surrounding said non-human organism.

[30105] A further embodiment of the present invention relates to a process for the production of threonine, which comprises
[30106] (a) increasing or generating one or more activities selected from the group consisting of succinyl-CoA synthetase beta chain in an organelle, preferably in plastids or mitochondria, especially in plastids, of a non-human organism or a part thereof, preferably a microorganism, a plant cell, a plant or a part thereof, as compared to a corresponding non-transformed wild type non-human organism or a part thereof; and
[30107] (b) growing the non-human organism or a part thereof under conditions which permit the production of threonine or a composition comprising threonine in said non-human organism or in the culture medium surrounding said non-human organism.

[30108] A further embodiment of the present invention relates to a process for the production of threonine, which comprises
[30109] (a) increasing or generating one or more activities selected from the group consisting of major facilitator superfamily transporter protein in an organelle, preferably in plastids or mitochondria, especially in plastids, of a non-human organism or a part thereof, preferably a microorganism, a plant cell, a plant or a part thereof, as compared to a corresponding non-transformed wild type non-human organism or a part thereof; and
[30110] (b) growing the non-human organism or a part thereof under conditions which permit the production of threonine or a composition comprising threonine in said non-human organism or in the culture medium surrounding said non-human organism.

[30111] A further embodiment of the present invention relates to a process for the production of threonine, which comprises
[30112] (a) increasing or generating one or more activities selected from the group consisting of phosphoanhydride phosphorylase in an organelle, preferably in plastids or mitochondria, especially in plastids, of a non-human organism or a part thereof, preferably a microorganism, a plant cell, a plant or a part thereof, as compared to a corresponding non-transformed wild type non-human organism or a part thereof; and
[30113] (b) growing the non-human organism or a part thereof under conditions which permit the production of threonine or a composition comprising threonine in said non-human organism or in the culture medium surrounding said non-human organism.

[30114] A further embodiment of the present invention relates to a process for the production of threonine, which comprises
[30115] (a) increasing or generating one or more activities selected from the group consisting of b1003-protein in an organelle, preferably in plastids or mitochondria, especially in plastids, of a non-human organism or a part thereof, preferably a microorganism, a plant cell, a plant or a part thereof, as compared to a corresponding non-transformed wild type non-human organism or a part thereof; and
[30116] (b) growing the non-human organism or a part thereof under conditions which permit the production of threonine or a composition comprising threonine in said non-human organism or in the culture medium surrounding said non-human organism.

[30117] A further embodiment of the present invention relates to a process for the production of threonine, which comprises
[30118] (a) increasing or generating one or more activities selected from the group consisting of b1108-protein in an organelle, preferably in plastids or mitochondria, especially in plastids, of a non-human organism or a part thereof, preferably a microorganism, a plant cell, a plant or a part thereof, as compared to a corresponding non-transformed wild type non-human organism or a part thereof; and
[30119] (b) growing the non-human organism or a part thereof under conditions which permit the production of threonine or a composition comprising threonine in said non-human organism or in the culture medium surrounding said non-human organism.

[30120] A further embodiment of the present invention relates to a process for the production of threonine, which comprises
[30121] (a) increasing or generating one or more activities selected from the group consisting of restriction alleviation protein in an organelle, preferably in plastids or mitochondria, especially in plastids, of a non-human organism or a part thereof, preferably a microorganism, a plant cell, a plant or a part thereof, as compared to a corresponding non-transformed wild type non-human organism or a part thereof; and
[30122] (b) growing the non-human organism or a part thereof under conditions which permit the production of threonine or a composition comprising threonine in said non-human organism or in the culture medium surrounding said non-human organism.

[30123] A further embodiment of the present invention relates to a process for the production of threonine, which comprises
[30124] (a) increasing or generating one or more activities selected from the group consisting of b1445-protein in an organelle, preferably in plastids or mitochondria, especially in plastids, of a non-human organism or a part thereof, preferably a microorganism, a plant cell, a plant or a part thereof, as compared to a corresponding non-transformed wild type non-human organism or a part thereof; and
[30125] (b) growing the non-human organism or a part thereof under conditions which permit the production of threonine or a composition comprising threonine in said non-human organism or in the culture medium surrounding said non-human organism.

[30126] A further embodiment of the present invention relates to a process for the production of threonine, which comprises
[30127] (a) increasing or generating one or more activities selected from the group consisting of NADP-dependent malic enzyme in an organelle, preferably in plastids or mitochondria, especially in plastids, of a non-human organism or a part thereof, preferably a microorganism, a plant cell, a plant or a part thereof, as compared to a corresponding non-transformed wild type non-human organism or a part thereof; and
[30128] (b) growing the non-human organism or a part thereof under conditions which permit the production of threonine or a composition comprising threonine in said non-human organism or in the culture medium surrounding said non-human organism.

[30129] A further embodiment of the present invention relates to a process for the production of threonine, which comprises
[30130] (a) increasing or generating one or more activities selected from the group consisting of b1522-protein in an organelle, preferably in plastids or mitochondria, especially in plastids, of a non-human organism or a part thereof, preferably a microorganism, a plant cell, a plant or a part thereof, as compared to a corresponding non-transformed wild type non-human organism or a part thereof; and
[30131] (b) growing the non-human organism or a part thereof under conditions which permit the production of threonine or a composition comprising threonine in said non-human organism or in the culture medium surrounding said non-human organism.

[30132] A further embodiment of the present invention relates to a process for the production of threonine, which comprises
[30133] (a) increasing or generating one or more activities selected from the group consisting of b1670-protein in an organelle, preferably in plastids or mitochondria, especially in plastids, of a non-human organism or a part thereof, preferably a microorganism, a plant cell, a plant or a part thereof, as compared to a corresponding non-transformed wild type non-human organism or a part thereof; and
[30134] (b) growing the non-human organism or a part thereof under conditions which permit the production of threonine or a composition comprising threonine in said non-human organism or in the culture medium surrounding said non-human organism.

[30135] A further embodiment of the present invention relates to a process for the production of threonine, which comprises
[30136] (a) increasing or generating one or more activities selected from the group consisting of pyruvate kinase in an organelle, preferably in plastids or mitochondria, especially in plastids, of a non-human organism or a part thereof, preferably a microorganism, a plant cell, a plant or a part thereof, as compared to a corresponding non-transformed wild type non-human organism or a part thereof; and
[30137] (b) growing the non-human organism or a part thereof under conditions which permit the production of threonine or a composition comprising threonine in said non-human organism or in the culture medium surrounding said non-human organism.

[30138] A further embodiment of the present invention relates to a process for the production of threonine, which comprises
[30139] (a) increasing or generating one or more activities selected from the group consisting of b1930-protein in an organelle, preferably in plastids or mitochondria, especially in plastids, of a non-human organism or a part thereof, preferably a microorganism, a plant cell, a plant or a part thereof, as compared to a corresponding non-transformed wild type non-human organism or a part thereof; and
[30140] (b) growing the non-human organism or a part thereof under conditions which permit the production of threonine or a composition comprising threonine in said non-human organism or in the culture medium surrounding said non-human organism.

[30141] A further embodiment of the present invention relates to a process for the production of threonine, which comprises
[30142] (a) increasing or generating one or more activities selected from the group consisting of transport protein in an organelle, preferably in plastids or mitochondria, especially in plastids, of a non-human organism or a part thereof, preferably a microorganism, a plant cell, a plant or a part thereof, as compared to a corresponding non-transformed wild type non-human organism or a part thereof; and
[30143] (b) growing the non-human organism or a part thereof under conditions which permit the production of threonine or a composition comprising threonine in said non-human organism or in the culture medium surrounding said non-human organism.

[30144] A further embodiment of the present invention relates to a process for the production of threonine, which comprises
[30145] (a) increasing or generating one or more activities selected from the group consisting of b2360-protein in an organelle, preferably in plastids or mitochondria, especially in plastids, of a non-human organism or a part thereof, preferably a microorganism, a plant cell, a plant or a part thereof, as compared to a corresponding non-transformed wild type non-human organism or a part thereof; and
[30146] (b) growing the non-human organism or a part thereof under conditions which permit the production of threonine or a composition comprising threonine in said non-human organism or in the culture medium surrounding said non-human organism.

[30147] A further embodiment of the present invention relates to a process for the production of threonine, which comprises
[30148] (a) increasing or generating one or more activities selected from the group consisting of Dserine dehydratase in an organelle, preferably in plastids or mitochondria, especially in plastids, of a non-human organism or a part thereof, preferably a microorganism, a plant cell, a plant or a part thereof, as compared to a corresponding non-transformed wild type non-human organism or a part thereof; and
[30149] (b) growing the non-human organism or a part thereof under conditions which permit the production of threonine or a composition comprising threonine in said non-human organism or in the culture medium surrounding said non-human organism.

[30150] A further embodiment of the present invention relates to a process for the production of threonine, which comprises
[30151] (a) increasing or generating one or more activities selected from the group consisting of b2399-protein in an organelle, preferably in plastids or mitochondria, especially in plastids, of a non-human organism or a part thereof, preferably a microorganism, a plant cell, a plant or a part thereof, as compared to a corresponding non-transformed wild type non-human organism or a part thereof; and
[30152] (b) growing the non-human organism or a part thereof under conditions which permit the production of threonine or a composition comprising threonine in said non-human organism or in the culture medium surrounding said non-human organism.

[30153] A further embodiment of the present invention relates to a process for the production of threonine, which comprises
[30154] (a) increasing or generating one or more activities selected from the group consisting of transcriptional regulator in an organelle, preferably in plastids or mitochondria, especially in plastids, of a non-human organism or a part thereof, preferably a microorganism, a plant cell, a plant or a part thereof, as compared to a corresponding non-transformed wild type non-human organism or a part thereof; and
[30155] (b) growing the non-human organism or a part thereof under conditions which permit the production of threonine or a composition comprising threonine in said non-human organism or in the culture medium surrounding said non-human organism.

[30156] A further embodiment of the present invention relates to a process for the production of threonine, which comprises
[30157] (a) increasing or generating one or more activities selected from the group consisting of b2513-protein in an organelle, preferably in plastids or mitochondria, especially in plastids, of a non-human organism or a part thereof, preferably a microorganism, a plant cell, a plant or a part thereof, as compared to a corresponding non-transformed wild type non-human organism or a part thereof; and
[30158] (b) growing the non-human organism or a part thereof under conditions which permit the production of threonine or a composition comprising threonine in said non-human organism or in the culture medium surrounding said non-human organism.

[30159] A further embodiment of the present invention relates to a process for the production of threonine, which comprises
[30160] (a) increasing or generating one or more activities selected from the group consisting of b2613-protein in an organelle, preferably in plastids or mitochondria, especially in plastids, of a non-human organism or a part thereof, preferably a microorganism, a plant cell, a plant or a part thereof, as compared to a corresponding non-transformed wild type non-human organism or a part thereof; and
[30161] (b) growing the non-human organism or a part thereof under conditions which permit the production of threonine or a composition comprising threonine in said non-human organism or in the culture medium surrounding said non-human organism.

[30162] A further embodiment of the present invention relates to a process for the production of threonine, which comprises
[30163] (a) increasing or generating one or more activities selected from the group consisting of murein transglycosylase in an organelle, preferably in plastids or mitochondria, especially in plastids, of a non-human organism or a part thereof, preferably a microorganism, a plant cell, a plant or a part thereof, as compared to a corresponding non-transformed wild type non-human organism or a part thereof; and
[30164] (b) growing the non-human organism or a part thereof under conditions which permit the production of threonine or a composition comprising threonine in said non-human organism or in the culture medium surrounding said non-human organism.

[30165] A further embodiment of the present invention relates to a process for the production of threonine, which comprises
[30166] (a) increasing or generating one or more activities selected from the group consisting of transcriptional regulator in an organelle, preferably in plastids or mitochondria, especially in plastids, of a non-human organism or a part thereof, preferably a microorganism, a plant cell, a plant or a part thereof, as compared to a corresponding non-transformed wild type non-human organism or a part thereof; and
[30167] (b) growing the non-human organism or a part thereof under conditions which permit the production of threonine or a composition comprising threonine in said non-human organism or in the culture medium surrounding said non-human organism.

[30168] A further embodiment of the present invention relates to a process for the production of threonine, which comprises
[30169] (a) increasing or generating one or more activities selected from the group consisting of b2739-protein in an organelle, preferably in plastids or mitochondria, especially in plastids, of a non-human organism or a part thereof, preferably a microorganism, a plant cell, a plant or a part thereof, as compared to a corresponding non-transformed wild type non-human organism or a part thereof; and
[30170] (b) growing the non-human organism or a part thereof under conditions which permit the production of threonine or a composition comprising threonine in said non-human organism or in the culture medium surrounding said non-human organism.

[30171] A further embodiment of the present invention relates to a process for the production of threonine, which comprises
[30172] (a) increasing or generating one or more activities selected from the group consisting of 2-C-methyl-D-erythritol 4-phosphate cytidylyltransferase in an organelle, preferably in plastids or mitochondria, especially in plastids, of a non-human organism or a part thereof, preferably a microorganism, a plant cell, a plant or a part thereof, as compared to a corresponding non-transformed wild type non-human organism or a part thereof; and
[30173] (b) growing the non-human organism or a part thereof under conditions which permit the production of threonine or a composition comprising threonine in said non-human organism or in the culture medium surrounding said non-human organism.

[30174] A further embodiment of the present invention relates to a process for the production of threonine, which comprises
[30175] (a) increasing or generating one or more activities selected from the group consisting of b2812-protein in an organelle, preferably in plastids or mitochondria, especially in plastids, of a non-human organism or a part thereof, preferably a microorganism, a plant cell, a plant or a part thereof, as compared to a corresponding non-transformed wild type non-human organism or a part thereof; and
[30176] (b) growing the non-human organism or a part thereof under conditions which permit the production of threonine or a composition comprising threonine in said non-human organism or in the culture medium surrounding said non-human organism.

[30177] A further embodiment of the present invention relates to a process for the production of threonine, which comprises
[30178] (a) increasing or generating one or more activities selected from the group consisting of b2812-protein in an organelle, preferably in plastids or mitochondria, especially in plastids, of a non-human organism or a part thereof, preferably a microorganism, a plant cell, a plant or a part thereof, as compared to a corresponding non-transformed wild type non-human organism or a part thereof; and
[30179] (b) growing the non-human organism or a part thereof under conditions which permit the production of threonine or a composition comprising threonine in said non-human organism or in the culture medium surrounding said non-human organism.

[30180] A further embodiment of the present invention relates to a process for the production of threonine, which comprises
[30181] (a) increasing or generating one or more activities selected from the group consisting of D-3-phosphoglycerate dehydrogenase in an organelle, preferably in plastids or mitochondria, especially in plastids, of a non-human organism or a part thereof, preferably a microorganism, a plant cell, a plant or a part thereof, as compared to a corresponding non-transformed wild type non-human organism or a part thereof; and
[30182] (b) growing the non-human organism or a part thereof under conditions which permit the production of threonine or a composition comprising threonine in said non-human organism or in the culture medium surrounding said non-human organism.

[30183] A further embodiment of the present invention relates to a process for the production of threonine, which comprises
[30184] (a) increasing or generating one or more activities selected from the group consisting of L-asparaginase in an organelle, preferably in plastids or mitochondria, especially in plastids, of a non-human organism or a part thereof, preferably a microorganism, a plant cell, a plant or a part thereof, as compared to a corresponding non-transformed wild type non-human organism or a part thereof; and
[30185] (b) growing the non-human organism or a part thereof under conditions which permit the production of threonine or a composition comprising threonine in said non-human organism or in the culture medium surrounding said non-human organism.

[30186] A further embodiment of the present invention relates to a process for the production of threonine, which comprises
[30187] (a) increasing or generating one or more activities selected from the group consisting of glycoprotease in an organelle, preferably in plastids or mitochondria, especially in plastids, of a non-human organism or a part thereof, preferably a microorganism, a plant cell, a plant or a part thereof, as compared to a corresponding non-transformed wild type non-human organism or a part thereof; and
[30188] (b) growing the non-human organism or a part thereof under conditions which permit the production of threonine or a composition comprising threonine in said non-human organism or in the culture medium surrounding said non-human organism.

[30189] A further embodiment of the present invention relates to a process for the production of threonine, which comprises
[30190] (a) increasing or generating one or more activities selected from the group consisting of b3083-protein in an organelle, preferably in plastids or mitochondria, especially in plastids, of a non-human organism or a part thereof, preferably a microorganism, a plant cell, a plant or a part thereof, as compared to a corresponding non-transformed wild type non-human organism or a part thereof; and
[30191] (b) growing the non-human organism or a part thereof under conditions which permit the production of threonine or a composition comprising threonine in said non-human organism or in the culture medium surrounding said non-human organism.

[30192] A further embodiment of the present invention relates to a process for the production of threonine, which comprises
[30193] (a) increasing or generating one or more activities selected from the group consisting of methyltransferase in an organelle, preferably in plastids or mitochondria, especially in plastids, of a non-human organism or a part thereof, preferably a microorganism, a plant cell, a plant or a part thereof, as compared to a corresponding non-transformed wild type non-human organism or a part thereof; and
[30194] (b) growing the non-human organism or a part thereof under conditions which permit the production of threonine or a composition comprising threonine in said non-human organism or in the culture medium surrounding said non-human organism.

[30195] A further embodiment of the present invention relates to a process for the production of threonine, which comprises
[30196] (a) increasing or generating one or more activities selected from the group consisting of glycogen synthase in an organelle, preferably in plastids or mitochondria, especially in plastids, of a non-human organism or a part thereof, preferably a microorganism, a plant cell, a plant or a part thereof, as compared to a corresponding non-transformed wild type non-human organism or a part thereof; and
[30197] (b) growing the non-human organism or a part thereof under conditions which permit the production of threonine or a composition comprising threonine in said non-human organism or in the culture medium surrounding said non-human organism.

[30198] A further embodiment of the present invention relates to a process for the production of threonine, which comprises
[30199] (a) increasing or generating one or more activities selected from the group consisting of b3442-protein in an organelle, preferably in plastids or mitochondria, especially in plastids, of a non-human organism or a part thereof, preferably a microorganism, a plant cell, a plant or a part thereof, as compared to a corresponding non-transformed wild type non-human organism or a part thereof; and
[30200] (b) growing the non-human organism or a part thereof under conditions which permit the production of threonine or a composition comprising threonine in said non-human organism or in the culture medium surrounding said non-human organism.

[30201] A further embodiment of the present invention relates to a process for the production of threonine, which comprises
[30202] (a) increasing or generating one or more activities selected from the group consisting of valine-pyruvate transaminase in an organelle, preferably in plastids or mitochondria, especially in plastids, of a non-human organism or a part thereof, preferably a microorganism, a plant cell, a plant or a part thereof, as compared to a corresponding non-transformed wild type non-human organism or a part thereof; and
[30203] (b) growing the non-human organism or a part thereof under conditions which permit the production of threonine or a composition comprising threonine in said non-human organism or in the culture medium surrounding said non-human organism.

[30204] A further embodiment of the present invention relates to a process for the production of threonine, which comprises
[30205] (a) increasing or generating one or more activities selected from the group consisting of b3646-protein in an organelle, preferably in plastids or mitochondria, especially in plastids, of a non-human organism or a part thereof, preferably a microorganism, a plant cell, a plant or a part thereof, as compared to a corresponding non-transformed wild type non-human organism or a part thereof; and
[30206] (b) growing the non-human organism or a part thereof under conditions which permit the production of threonine or a composition comprising threonine in said non-human organism or in the culture medium surrounding said non-human organism.

[30207] A further embodiment of the present invention relates to a process for the production of threonine, which comprises
[30208] (a) increasing or generating one or more activities selected from the group consisting of ATP synthase subunit beta in an organelle, preferably in plastids or mitochondria, especially in plastids, of a non-human organism or a part thereof, preferably a microorganism, a plant cell, a plant or a part thereof, as compared to a corresponding non-transformed wild type non-human organism or a part thereof; and
[30209] (b) growing the non-human organism or a part thereof under conditions which permit the production of threonine or a composition comprising threonine in said non-human organism or in the culture medium surrounding said non-human organism.

[30210] A further embodiment of the present invention relates to a process for the production of threonine, which comprises
[30211] (a) increasing or generating one or more activities selected from the group consisting of dihydroxyacid dehydratase in an organelle, preferably in plastids or mitochondria, especially in plastids, of a non-human organism or a part thereof, preferably a microorganism, a plant cell, a plant or a part thereof, as compared to a corresponding non-transformed wild type non-human organism or a part thereof; and
[30212] (b) growing the non-human organism or a part thereof under conditions which permit the production of threonine or a composition comprising threonine in said non-human organism or in the culture medium surrounding said non-human organism.

[30213] A further embodiment of the present invention relates to a process for the production of threonine, which comprises
[30214] (a) increasing or generating one or more activities selected from the group consisting of ketol-acid reductoisomerase in an organelle, preferably in plastids or mitochondria, especially in plastids, of a non-human organism or a part thereof, preferably a microorganism, a plant cell, a plant or a part thereof, as compared to a corresponding non-transformed wild type non-human organism or a part thereof; and
[30215] (b) growing the non-human organism or a part thereof under conditions which permit the production of threonine or a composition comprising threonine in said non-human organism or in the culture medium surrounding said non-human organism.

[30216] A further embodiment of the present invention relates to a process for the production of threonine, which comprises
[30217] (a) increasing or generating one or more activities selected from the group consisting of enterobacterial common antigen polymerase in an organelle, preferably in plastids or mitochondria, especially in plastids, of a non-human organism or a part thereof, preferably a microorganism, a plant cell, a plant or a part thereof, as compared to a corresponding non-transformed wild type non-human organism or a part thereof; and
[30218] (b) growing the non-human organism or a part thereof under conditions which permit the production of threonine or a composition comprising threonine in said non-human organism or in the culture medium surrounding said non-human organism.

[30219] A further embodiment of the present invention relates to a process for the production of threonine, which comprises
[30220] (a) increasing or generating one or more activities selected from the group consisting of DNA helicase II in an organelle, preferably in plastids or mitochondria, especially in plastids, of a non-human organism or a part thereof, preferably a microorganism, a plant cell, a plant or a part thereof, as compared to a corresponding non-transformed wild type non-human organism or a part thereof; and
[30221] (b) growing the non-human organism or a part thereof under conditions which permit the production of threonine or a composition comprising threonine in said non-human organism or in the culture medium surrounding said non-human organism.

[30222] A further embodiment of the present invention relates to a process for the production of threonine, which comprises
[30223] (a) increasing or generating one or more activities selected from the group consisting of transcriptional regulator in an organelle, preferably in plastids or mitochondria, especially in plastids, of a non-human organism or a part thereof, preferably a microorganism, a plant cell, a plant or a part thereof, as compared to a corresponding non-transformed wild type non-human organism or a part thereof; and
[30224] (b) growing the non-human organism or a part thereof under conditions which permit the production of threonine or a composition comprising threonine in said non-human organism or in the culture medium surrounding said non-human organism.

[30225] A further embodiment of the present invention relates to a process for the production of threonine, which comprises
[30226] (a) increasing or generating one or more activities selected from the group consisting of b3989-protein in an organelle, preferably in plastids or mitochondria, especially in plastids, of a non-human organism or a part thereof, preferably a microorganism, a plant cell, a plant or a part thereof, as compared to a corresponding non-transformed wild type non-human organism or a part thereof; and
[30227] (b) growing the non-human organism or a part thereof under conditions which permit the production of threonine or a composition comprising threonine in said non-human organism or in the culture medium surrounding said non-human organism.

[30228] A further embodiment of the present invention relates to a process for the production of threonine, which comprises
[30229] (a) increasing or generating one or more activities selected from the group consisting of aspartate kinase in an organelle, preferably in plastids or mitochondria, especially in plastids, of a non-human organism or a part thereof, preferably a microorganism, a plant cell, a plant or a part thereof, as compared to a corresponding non-transformed wild type non-human organism or a part thereof; and
[30230] (b) growing the non-human organism or a part thereof under conditions which permit the production of threonine or a composition comprising threonine in said non-human organism or in the culture medium surrounding said non-human organism.

[30231] A further embodiment of the present invention relates to a process for the production of threonine, which comprises
[30232] (a) increasing or generating one or more activities selected from the group consisting of b4029-protein in an organelle, preferably in plastids or mitochondria, especially in plastids, of a non-human organism or a part thereof, preferably a microorganism, a plant cell, a plant or a part thereof, as compared to a corresponding non-transformed wild type non-human organism or a part thereof; and
[30233] (b) growing the non-human organism or a part thereof under conditions which permit the production of threonine or a composition comprising threonine in said non-human organism or in the culture medium surrounding said non-human organism.

[30234] A further embodiment of the present invention relates to a process for the production of threonine, which comprises
[30235] (a) increasing or generating one or more activities selected from the group consisting of b4056-protein in an organelle, preferably in plastids or mitochondria, especially in plastids, of a non-human organism or a part thereof, preferably a microorganism, a plant cell, a plant or a part thereof, as compared to a corresponding non-transformed wild type non-human organism or a part thereof; and
[30236] (b) growing the non-human organism or a part thereof under conditions which permit the production of threonine or a composition comprising threonine in said non-human organism or in the culture medium surrounding said non-human organism.

[30237] A further embodiment of the present invention relates to a process for the production of threonine, which comprises
[30238] (a) increasing or generating one or more activities selected from the group consisting of b4250-protein in an organelle, preferably in plastids or mitochondria, especially in plastids, of a non-human organism or a part thereof, preferably a microorganism, a plant cell, a plant or a part thereof, as compared to a corresponding non-transformed wild type non-human organism or a part thereof; and
[30239] (b) growing the non-human organism or a part thereof under conditions which permit the production of threonine or a composition comprising threonine in said non-human organism or in the culture medium surrounding said non-human organism.

[30240] A further embodiment of the present invention relates to a process for the production of threonine, which comprises
[30241] (a) increasing or generating one or more activities selected from the group consisting of acetyltransferase in an organelle, preferably in plastids or mitochondria, especially in plastids, of a non-human organism or a part thereof, preferably a microorganism, a plant cell, a plant or a part thereof, as compared to a corresponding non-transformed wild type non-human organism or a part thereof; and
[30242] (b) growing the non-human organism or a part thereof under conditions which permit the production of threonine or a composition comprising threonine in said non-human organism or in the culture medium surrounding said non-human organism.

[30243] A further embodiment of the present invention relates to a process for the production of threonine, which comprises
[30244] (a) increasing or generating one or more activities selected from the group consisting of glutaredoxin in an organelle, preferably in plastids or mitochondria, especially in plastids, of a non-human organism or a part thereof, preferably a microorganism, a plant cell, a plant or a part thereof, as compared to a corresponding non-transformed wild type non-human organism or a part thereof; and
[30245] (b) growing the non-human organism or a part thereof under conditions which permit the production of threonine or a composition comprising threonine in said non-human organism or in the culture medium surrounding said non-human organism.

[30246] A further embodiment of the present invention relates to a process for the production of threonine, which comprises
[30247] (a) increasing or generating one or more activities selected from the group consisting of transcription factor in an organelle, preferably in plastids or mitochondria, especially in plastids, of a non-human organism or a part thereof, preferably a microorganism, a plant cell, a plant or a part thereof, as compared to a corresponding non-transformed wild type non-human organism or a part thereof; and
[30248] (b) growing the non-human organism or a part thereof under conditions which permit the production of threonine or a composition comprising threonine in said non-human organism or in the culture medium surrounding said non-human organism.

[30249] A further embodiment of the present invention relates to a process for the production of threonine, which comprises
[30250] (a) increasing or generating one or more activities selected from the group consisting of cyclin D in an organelle, preferably in plastids or mitochondria, especially in plastids, of a non-human organism or a part thereof, preferably a microorganism, a plant cell, a plant or a part thereof, as compared to a corresponding non-transformed wild type non-human organism or a part thereof; and
[30251] (b) growing the non-human organism or a part thereof under conditions which permit the production of threonine or a composition comprising threonine in said non-human organism or in the culture medium surrounding said non-human organism.

[30252] A further embodiment of the present invention relates to a process for the production of threonine, which comprises
[30253] (a) increasing or generating one or more activities selected from the group consisting of heat shock protein in an organelle, preferably in plastids or mitochondria, especially in plastids, of a non-human organism or a part thereof, preferably a microorganism, a plant cell, a plant or a part thereof, as compared to a corresponding non-transformed wild type non-human organism or a part thereof; and
[30254] (b) growing the non-human organism or a part thereof under conditions which permit the production of threonine or a composition comprising threonine in said non-human organism or in the culture medium surrounding said non-human organism.

[30255] A further embodiment of the present invention relates to a process for the production of threonine, which comprises
[30256] (a) increasing or generating one or more activities selected from the group consisting of polyphosphate kinase in an organelle, preferably in plastids or mitochondria, especially in plastids, of a non-human organism or a part thereof, preferably a microorganism, a plant cell, a plant or a part thereof, as compared to a corresponding non-transformed wild type non-human organism or a part thereof; and
[30257] (b) growing the non-human organism or a part thereof under conditions which permit the production of threonine or a composition comprising threonine in said non-human organism or in the culture medium surrounding said non-human organism.

[30258] A further embodiment of the present invention relates to a process for the production of threonine, which comprises
[30259] (a) increasing or generating one or more activities selected from the group consisting of branched chain amino acid ABC transporter ATP-binding protein in an organelle, preferably in plastids or mitochondria, especially in plastids, of a non-human organism or a part thereof, preferably a microorganism, a plant cell, a plant or a part thereof, as compared to a corresponding non-transformed wild type non-human organism or a part thereof; and
[30260] (b) growing the non-human organism or a part thereof under conditions which permit the production of threonine or a composition comprising threonine in said non-human organism or in the culture medium surrounding said non-human organism.

[30261] A further embodiment of the present invention relates to a process for the production of threonine, which comprises
[30262] (a) increasing or generating one or more activities selected from the group consisting of uroporphyrin-III C-methyltransferase in an organelle, preferably in plastids or mitochondria, especially in plastids, of a non-human organism or a part thereof, preferably a microorganism, a plant cell, a plant or a part thereof, as compared to a corresponding non-transformed wild type non-human organism or a part thereof; and
[30263] (b) growing the non-human organism or a part thereof under conditions which permit the production of threonine or a composition comprising threonine in said non-human organism or in the culture medium surrounding said non-human organism.

[30264] A further embodiment of the present invention relates to a process for the production of threonine, which comprises
[30265] (a) increasing or generating one or more activities selected from the group consisting of sll0418-protein in an organelle, preferably in plastids or mitochondria, especially in plastids, of a non-human organism or a part thereof, preferably a microorganism, a plant cell, a plant or a part thereof, as compared to a corresponding non-transformed wild type non-human organism or a part thereof; and
[30266] (b) growing the non-human organism or a part thereof under conditions which permit the production of threonine or a composition comprising threonine in said non-human organism or in the culture medium surrounding said non-human organism.

[30267] A further embodiment of the present invention relates to a process for the production of threonine, which comprises
[30268] (a) increasing or generating one or more activities selected from the group consisting of oxireductase in an organelle, preferably in plastids or mitochondria, especially in plastids, of a non-human organism or a part thereof, preferably a microorganism, a plant cell, a plant or a part thereof, as compared to a corresponding non-transformed wild type non-human organism or a part thereof; and
[30269] (b) growing the non-human organism or a part thereof under conditions which permit the production of threonine or a composition comprising threonine in said non-human organism or in the culture medium surrounding said non-human organism.

[30270] A further embodiment of the present invention relates to a process for the production of threonine, which comprises
[30271] (a) increasing or generating one or more activities selected from the group consisting of malate dehydrogenase in an organelle, preferably in plastids or mitochondria, especially in plastids, of a non-human organism or a part thereof, preferably a microorganism, a plant cell, a plant or a part thereof, as compared to a corresponding non-transformed wild type non-human organism or a part thereof; and
[30272] (b) growing the non-human organism or a part thereof under conditions which permit the production of threonine or a composition comprising threonine in said non-human organism or in the culture medium surrounding said non-human organism.

[30273] A further embodiment of the present invention relates to a process for the production of threonine, which comprises
[30274] (a) increasing or generating one or more activities selected from the group consisting of phosphoribosylaminoimidazole carboxylase catalytic subunit in an organelle, preferably in plastids or mitochondria, especially in plastids, of a non-human organism or a part thereof, preferably a microorganism, a plant cell, a plant or a part thereof, as compared to a corresponding non-transformed wild type non-human organism or a part thereof; and
[30275] (b) growing the non-human organism or a part thereof under conditions which permit the production of threonine or a composition comprising threonine in said non-human organism or in the culture medium surrounding said non-human organism.

[30276] A further embodiment of the present invention relates to a process for the production of threonine, which comprises
[30277] (a) increasing or generating one or more activities selected from the group consisting of glycogen synthase in an organelle, preferably in plastids or mitochondria, especially in plastids, of a non-human organism or a part thereof, preferably a microorganism, a plant cell, a plant or a part thereof, as compared to a corresponding non-transformed wild type non-human organism or a part thereof; and
[30278] (b) growing the non-human organism or a part thereof under conditions which permit the production of threonine or a composition comprising threonine in said non-human organism or in the culture medium surrounding said non-human organism.

[30279] A further embodiment of the present invention relates to a process for the production of threonine, which comprises
[30280] (a) increasing or generating one or more activities selected from the group consisting of glycogen (starch) synthase in an organelle, preferably in plastids or mitochondria, especially in plastids, of a non-human organism or a part thereof, preferably a microorganism, a plant cell, a plant or a part thereof, as compared to a corresponding non-transformed wild type non-human organism or a part thereof; and
[30281] (b) growing the non-human organism or a part thereof under conditions which permit the production of threonine or a composition comprising threonine in said non-human organism or in the culture medium surrounding said non-human organism.

[30282] A further embodiment of the present invention relates to a process for the production of threonine, which comprises
[30283] (a) increasing or generating one or more activities selected from the group consisting of nitrate/nitrite transport protein in an organelle, preferably in plastids or mitochondria, especially in plastids, of a non-human organism or a part thereof, preferably a microorganism, a plant cell, a plant or a part thereof, as compared to a corresponding non-transformed wild type non-human organism or a part thereof; and
[30284] (b) growing the non-human organism or a part thereof under conditions which permit the production of threonine or a composition comprising threonine in said non-human organism or in the culture medium surrounding said non-human organism.

[30285] A further embodiment of the present invention relates to a process for the production of threonine, which comprises
[30286] (a) increasing or generating one or more activities selected from the group consisting of carbamoyl-phosphate synthase subunit in an organelle, preferably in plastids or mitochondria, especially in plastids, of a non-human organism or a part thereof, preferably a microorganism, a plant cell, a plant or a part thereof, as compared to a corresponding non-transformed wild type non-human organism or a part thereof; and
[30287] (b) growing the non-human organism or a part thereof under conditions which permit the production of threonine or a composition comprising threonine in said non-human organism or in the culture medium surrounding said non-human organism.

[30288] A further embodiment of the present invention relates to a process for the production of threonine, which comprises
[30289] (a) increasing or generating one or more activities selected from the group consisting of glutathione S-transferase in an organelle, preferably in plastids or mitochondria, especially in plastids, of a non-human organism or a part thereof, preferably a microorganism, a plant cell, a plant or a part thereof, as compared to a corresponding non-transformed wild type non-human organism or a part thereof; and
[30290] (b) growing the non-human organism or a part thereof under conditions which permit the production of threonine or a composition comprising threonine in said non-human organism or in the culture medium surrounding said non-human organism.

[30291] A further embodiment of the present invention relates to a process for the production of threonine, which comprises
[30292] (a) increasing or generating one or more activities selected from the group consisting of ABC metal ion transporter substrate-binding protein in an organelle, preferably in plastids or mitochondria, especially in plastids, of a non-human organism or a part thereof, preferably a microorganism, a plant cell, a plant or a part thereof, as compared to a corresponding non-transformed wild type non-human organism or a part thereof; and
[30293] (b) growing the non-human organism or a part thereof under conditions which permit the production of threonine or a composition comprising threonine in said non-human organism or in the culture medium surrounding said non-human organism.

[30294] A further embodiment of the present invention relates to a process for the production of threonine, which comprises
[30295] (a) increasing or generating one or more activities selected from the group consisting of coproporphyrinogen III oxidase in an organelle, preferably in plastids or mitochondria, especially in plastids, of a non-human organism or a part thereof, preferably a microorganism, a plant cell, a plant or a part thereof, as compared to a corresponding non-transformed wild type non-human organism or a part thereof; and
[30296] (b) growing the non-human organism or a part thereof under conditions which permit the production of threonine or a composition comprising threonine in said non-human organism or in the culture medium surrounding said non-human organism.

[30297] A further embodiment of the present invention relates to a process for the production of threonine, which comprises
[30298] (a) increasing or generating one or more activities selected from the group consisting of ferredoxin in an organelle, preferably in plastids or mitochondria, especially in plastids, of a non-human organism or a part thereof, preferably a microorganism, a plant cell, a plant or a part thereof, as compared to a corresponding non-transformed wild type non-human organism or a part thereof; and
[30299] (b) growing the non-human organism or a part thereof under conditions which permit the production of threonine or a composition comprising threonine in said non-human organism or in the culture medium surrounding said non-human organism.

[30300] A further embodiment of the present invention relates to a process for the production of threonine, which comprises
[30301] (a) increasing or generating one or more activities selected from the group consisting of slr0383-protein in an organelle, preferably in plastids or mitochondria, especially in plastids, of a non-human organism or a part thereof, preferably a microorganism, a plant cell, a plant or a part thereof, as compared to a corresponding non-transformed wild type non-human organism or a part thereof; and
[30302] (b) growing the non-human organism or a part thereof under conditions which permit the production of threonine or a composition comprising threonine in said non-human organism or in the culture medium surrounding said non-human organism.

[30303] A further embodiment of the present invention relates to a process for the production of threonine, which comprises
[30304] (a) increasing or generating one or more activities selected from the group consisting of bifunctional purine biosynthesis protein in an organelle, preferably in plastids or mitochondria, especially in plastids, of a non-human organism or a part thereof, preferably a microorganism, a plant cell, a plant or a part thereof, as compared to a corresponding non-transformed wild type non-human organism or a part thereof; and
[30305] (b) growing the non-human organism or a part thereof under conditions which permit the production of threonine or a composition comprising threonine in said non-human organism or in the culture medium surrounding said non-human organism.

[30306] A further embodiment of the present invention relates to a process for the production of threonine, which comprises
[30307] (a) increasing or generating one or more activities selected from the group consisting of aspartate kinase in an organelle, preferably in plastids or mitochondria, especially in plastids, of a non-human organism or a part thereof, preferably a microorganism, a plant cell, a plant or a part thereof, as compared to a corresponding non-transformed wild type non-human organism or a part thereof; and
[30308] (b) growing the non-human organism or a part thereof under conditions which permit the production of threonine or a composition comprising threonine in said non-human organism or in the culture medium surrounding said non-human organism.

[30309] A further embodiment of the present invention relates to a process for the production of threonine, which comprises
[30310] (a) increasing or generating one or more activities selected from the group consisting of geranylgeranyl pyrophosphate synthase in an organelle, preferably in plastids or mitochondria, especially in plastids, of a non-human organism or a part thereof, preferably a microorganism, a plant cell, a plant or a part thereof, as compared to a corresponding non-transformed wild type non-human organism or a part thereof; and
[30311] (b) growing the non-human organism or a part thereof under conditions which permit the production of threonine or a composition comprising threonine in said non-human organism or in the culture medium surrounding said non-human organism.

[30312] A further embodiment of the present invention relates to a process for the production of threonine, which comprises
[30313] (a) increasing or generating one or more activities selected from the group consisting of kinase in an organelle, preferably in plastids or mitochondria, especially in plastids, of a non-human organism or a part thereof, preferably a microorganism, a plant cell, a plant or a part thereof, as compared to a corresponding non-transformed wild type non-human organism or a part thereof; and
[30314] (b) growing the non-human organism or a part thereof under conditions which permit the production of threonine or a composition comprising threonine in said non-human organism or in the culture medium surrounding said non-human organism.

[30315] A further embodiment of the present invention relates to a process for the production of threonine, which comprises
[30316] (a) increasing or generating one or more activities selected from the group consisting of argininosuccinate lyase in an organelle, preferably in plastids or mitochondria, especially in plastids, of a non-human organism or a part thereof, preferably a microorganism, a plant cell, a plant or a part thereof, as compared to a corresponding non-transformed wild type non-human organism or a part thereof; and
[30317] (b) growing the non-human organism or a part thereof under conditions which permit the production of threonine or a composition comprising threonine in said non-human organism or in the culture medium surrounding said non-human organism.

[30318] A further embodiment of the present invention relates to a process for the production of threonine, which comprises
[30319] (a) increasing or generating one or more activities selected from the group consisting of photosystem II protein in an organelle, preferably in plastids or mitochondria, especially in plastids, of a non-human organism or a part thereof, preferably a microorganism, a plant cell, a plant or a part thereof, as compared to a corresponding non-transformed wild type non-human organism or a part thereof; and
[30320] (b) growing the non-human organism or a part thereof under conditions which permit the production of threonine or a composition comprising threonine in said non-human organism or in the culture medium surrounding said non-human organism.

[30321] A further embodiment of the present invention relates to a process for the production of threonine, which comprises
[30322] (a) increasing or generating one or more activities selected from the group consisting of cell division protein in an organelle, preferably in plastids or mitochondria, especially in plastids, of a non-human organism or a part thereof, preferably a microorganism, a plant cell, a plant or a part thereof, as compared to a corresponding non-transformed wild type non-human organism or a part thereof; and
[30323] (b) growing the non-human organism or a part thereof under conditions which permit the production of threonine or a composition comprising threonine in said non-human organism or in the culture medium surrounding said non-human organism.

[30324] A further embodiment of the present invention relates to a process for the production of threonine, which comprises
[30325] (a) increasing or generating one or more activities selected from the group consisting of branched-chain amino acid ABC transporter permease protein in an organelle, preferably in plastids or mitochondria, especially in plastids, of a non-human organism or a part thereof, preferably a microorganism, a plant cell, a plant or a part thereof, as compared to a corresponding non-transformed wild type non-human organism or a part thereof; and
[30326] (b) growing the non-human organism or a part thereof under conditions which permit the production of threonine or a composition comprising threonine in said non-human organism or in the culture medium surrounding said non-human organism.

[30327] A further embodiment of the present invention relates to a process for the production of threonine, which comprises
[30328] (a) increasing or generating one or more activities selected from the group consisting of TTC0881-protein in an organelle, preferably in plastids or mitochondria, especially in plastids, of a non-human organism or a part thereof, preferably a microorganism, a plant cell, a plant or a part thereof, as compared to a corresponding non-transformed wild type non-human organism or a part thereof; and
[30329] (b) growing the non-human organism or a part thereof under conditions which permit the production of threonine or a composition comprising threonine in said non-human organism or in the culture medium surrounding said non-human organism.

[30330] A further embodiment of the present invention relates to a process for the production of threonine, which comprises
[30331] (a) increasing or generating one or more activities selected from the group consisting of metal-dependent hydrolase in an organelle, preferably in plastids or mitochondria, especially in plastids, of a non-human organism or a part thereof, preferably a microorganism, a plant cell, a plant or a part thereof, as compared to a corresponding non-transformed wild type non-human organism or a part thereof; and
[30332] (b) growing the non-human organism or a part thereof under conditions which permit the production of threonine or a composition comprising threonine in said non-human organism or in the culture medium surrounding said non-human organism.

[30333] A further embodiment of the present invention relates to a process for the production of threonine, which comprises
[30334] (a) increasing or generating one or more activities selected from the group consisting of homocitrate synthase in an organelle, preferably in plastids or mitochondria, especially in plastids, of a non-human organism or a part thereof, preferably a microorganism, a plant cell, a plant or a part thereof, as compared to a corresponding non-transformed wild type non-human organism or a part thereof; and
[30335] (b) growing the non-human organism or a part thereof under conditions which permit the production of threonine or a composition comprising threonine in said non-human organism or in the culture medium surrounding said non-human organism.

[30336] A further embodiment of the present invention relates to a process for the production of threonine, which comprises
[30337] (a) increasing or generating one or more activities selected from the group consisting of XM_{—}473199-protein in an organelle, preferably in plastids or mitochondria, especially in plastids, of a non-human organism or a part thereof, preferably a microorganism, a plant cell, a plant or a part thereof, as compared to a corresponding non-transformed wild type non-human organism or a part thereof; and
[30338] (b) growing the non-human organism or a part thereof under conditions which permit the production of threonine or a composition comprising threonine in said non-human organism or in the culture medium surrounding said non-human organism.

[30339] A further embodiment of the present invention relates to a process for the production of threonine, which comprises
[30340] (a) increasing or generating one or more activities selected from the group consisting of pyruvate kinase in an organelle, preferably in plastids or mitochondria, especially in plastids, of a non-human organism or a part thereof, preferably a microorganism, a plant cell, a plant or a part thereof, as compared to a corresponding non-transformed wild type non-human organism or a part thereof; and
[30341] (b) growing the non-human organism or a part thereof under conditions which permit the production of threonine or a composition comprising threonine in said non-human organism or in the culture medium surrounding said non-human organism.

[30342] A further embodiment of the present invention relates to a process for the production of threonine, which comprises
[30343] (a) increasing or generating one or more activities selected from the group consisting of transcription factor in an organelle, preferably in plastids or mitochondria, especially in plastids, of a non-human organism or a part thereof, preferably a microorganism, a plant cell, a plant or a part thereof, as compared to a corresponding non-transformed wild type non-human organism or a part thereof; and
[30344] (b) growing the non-human organism or a part thereof under conditions which permit the production of threonine or a composition comprising threonine in said non-human organism or in the culture medium surrounding said non-human organism.

[30345] A further embodiment of the present invention relates to a process for the production of threonine, which comprises
[30346] (a) increasing or generating one or more activities selected from the group consisting of cell division control protein in an organelle, preferably in plastids or mitochondria, especially in plastids, of a non-human organism or a part thereof, preferably a microorganism, a plant cell, a plant or a part thereof, as compared to a corresponding non-transformed wild type non-human organism or a part thereof; and
[30347] (b) growing the non-human organism or a part thereof under conditions which permit the production of threonine or a composition comprising threonine in said non-human organism or in the culture medium surrounding said non-human organism.

[30348] A further embodiment of the present invention relates to a process for the production of threonine, which comprises
[30349] (a) increasing or generating one or more activities selected from the group consisting of pyruvate carboxylase in an organelle, preferably in plastids or mitochondria, especially in plastids, of a non-human organism or a part thereof, preferably a microorganism, a plant cell, a plant or a part thereof, as compared to a corresponding non-transformed wild type non-human organism or a part thereof; and
[30350] (b) growing the non-human organism or a part thereof under conditions which permit the production of threonine or a composition comprising threonine in said non-human organism or in the culture medium surrounding said non-human organism.

[30351] A further embodiment of the present invention relates to a process for the production of threonine, which comprises
[30352] (a) increasing or generating one or more activities selected from the group consisting of ycl027w-protein in an organelle, preferably in plastids or mitochondria, especially in plastids, of a non-human organism or a part thereof, preferably a microorganism, a plant cell, a plant or a part thereof, as compared to a corresponding non-transformed wild type non-human organism or a part thereof; and
[30353] (b) growing the non-human organism or a part thereof under conditions which permit the production of threonine or a composition comprising threonine in said non-human organism or in the culture medium surrounding said non-human organism.

[30354] A further embodiment of the present invention relates to a process for the production of threonine, which comprises
[30355] (a) increasing or generating one or more activities selected from the group consisting of coproporphyrinogen III oxidase in an organelle, preferably in plastids or mitochondria, especially in plastids, of a non-human organism or a part thereof, preferably a microorganism, a plant cell, a plant or a part thereof, as compared to a corresponding non-transformed wild type non-human organism or a part thereof; and
[30356] (b) growing the non-human organism or a part thereof under conditions which permit the production of threonine or a composition comprising threonine in said non-human organism or in the culture medium surrounding said non-human organism.

[30357] A further embodiment of the present invention relates to a process for the production of threonine, which comprises
[30358] (a) increasing or generating one or more activities selected from the group consisting of ydr183w-protein in an organelle, preferably in plastids or mitochondria, especially in plastids, of a non-human organism or a part thereof, preferably a microorganism, a plant cell, a plant or a part thereof, as compared to a corresponding non-transformed wild type non-human organism or a part thereof; and
[30359] (b) growing the non-human organism or a part thereof under conditions which permit the production of threonine or a composition comprising threonine in said non-human organism or in the culture medium surrounding said non-human organism.

[30360] A further embodiment of the present invention relates to a process for the production of threonine, which comprises
[30361] (a) increasing or generating one or more activities selected from the group consisting of hexose transporter in an organelle, preferably in plastids or mitochondria, especially in plastids, of a non-human organism or a part thereof, preferably a microorganism, a plant cell, a plant or a part thereof, as compared to a corresponding non-transformed wild type non-human organism or a part thereof; and
[30362] (b) growing the non-human organism or a part thereof under conditions which permit the production of threonine or a composition comprising threonine in said non-human organism or in the culture medium surrounding said non-human organism.

[30363] A further embodiment of the present invention relates to a process for the production of threonine, which comprises
[30364] (a) increasing or generating one or more activities selected from the group consisting of YEL030C-A-protein in an organelle, preferably in plastids or mitochondria, especially in plastids, of a non-human organism or a part thereof, preferably a microorganism, a plant cell, a plant or a part thereof, as compared to a corresponding non-transformed wild type non-human organism or a part thereof; and
[30365] (b) growing the non-human organism or a part thereof under conditions which permit the production of threonine or a composition comprising threonine in said non-human organism or in the culture medium surrounding said non-human organism.

[30366] A further embodiment of the present invention relates to a process for the production of threonine, which comprises
[30367] (a) increasing or generating one or more activities selected from the group consisting of hexose transporter in an organelle, preferably in plastids or mitochondria, especially in plastids, of a non-human organism or a part thereof, preferably a microorganism, a plant cell, a plant or a part thereof, as compared to a corresponding non-transformed wild type non-human organism or a part thereof; and
[30368] (b) growing the non-human organism or a part thereof under conditions which permit the production of threonine or a composition comprising threonine in said non-human organism or in the culture medium surrounding said non-human organism.

[30369] A further embodiment of the present invention relates to a process for the production of threonine, which comprises
[30370] (a) increasing or generating one or more activities selected from the group consisting of yfl054c-protein in an organelle, preferably in plastids or mitochondria, especially in plastids, of a non-human organism or a part thereof, preferably a microorganism, a plant cell, a plant or a part thereof, as compared to a corresponding non-transformed wild type non-human organism or a part thereof; and
[30371] (b) growing the non-human organism or a part thereof under conditions which permit the production of threonine or a composition comprising threonine in said non-human organism or in the culture medium surrounding said non-human organism.

[30372] A further embodiment of the present invention relates to a process for the production of threonine, which comprises
[30373] (a) increasing or generating one or more activities selected from the group consisting of ygl237c-protein in an organelle, preferably in plastids or mitochondria, especially in plastids, of a non-human organism or a part thereof, preferably a microorganism, a plant cell, a plant or a part thereof, as compared to a corresponding non-transformed wild type non-human organism or a part thereof; and
[30374] (b) growing the non-human organism or a part thereof under conditions which permit the production of threonine or a composition comprising threonine in said non-human organism or in the culture medium surrounding said non-human organism.

[30375] A further embodiment of the present invention relates to a process for the production of threonine, which comprises
[30376] (a) increasing or generating one or more activities selected from the group consisting of yhr131c-protein in an organelle, preferably in plastids or mitochondria, especially in plastids, of a non-human organism or a part thereof, preferably a microorganism, a plant cell, a plant or a part thereof, as compared to a corresponding non-transformed wild type non-human organism or a part thereof; and
[30377] (b) growing the non-human organism or a part thereof under conditions which permit the production of threonine or a composition comprising threonine in said non-human organism or in the culture medium surrounding said non-human organism.

[30378] A further embodiment of the present invention relates to a process for the production of threonine, which comprises
[30379] (a) increasing or generating one or more activities selected from the group consisting of (DL)-glycerol-3-phosphatase in an organelle, preferably in plastids or mitochondria, especially in plastids, of a non-human organism or a part thereof, preferably a microorganism, a plant cell, a plant or a part thereof, as compared to a corresponding non-transformed wild type non-human organism or a part thereof; and
[30380] (b) growing the non-human organism or a part thereof under conditions which permit the production of threonine or a composition comprising threonine in said non-human organism or in the culture medium surrounding said non-human organism.

[30381] A further embodiment of the present invention relates to a process for the production of threonine, which comprises
[30382] (a) increasing or generating one or more activities selected from the group consisting of 3-phosphoglycerate dehydrogenase in an organelle, preferably in plastids or mitochondria, especially in plastids, of a non-human organism or a part thereof, preferably a microorganism, a plant cell, a plant or a part thereof, as compared to a corresponding non-transformed wild type non-human organism or a part thereof; and
[30383] (b) growing the non-human organism or a part thereof under conditions which permit the production of threonine or a composition comprising threonine in said non-human organism or in the culture medium surrounding said non-human organism.

[30384] A further embodiment of the present invention relates to a process for the production of threonine, which comprises
[30385] (a) increasing or generating one or more activities selected from the group consisting of glutathione S-transferase in an organelle, preferably in plastids or mitochondria, especially in plastids, of a non-human organism or a part thereof, preferably a microorganism, a plant cell, a plant or a part thereof, as compared to a corresponding non-transformed wild type non-human organism or a part thereof; and
[30386] (b) growing the non-human organism or a part thereof under conditions which permit the production of threonine or a composition comprising threonine in said non-human organism or in the culture medium surrounding said non-human organism.

[30387] A further embodiment of the present invention relates to a process for the production of threonine, which comprises
[30388] (a) increasing or generating one or more activities selected from the group consisting of DnaJ-like chaperone in an organelle, preferably in plastids or mitochondria, especially in plastids, of a non-human organism or a part thereof, preferably a microorganism, a plant cell, a plant or a part thereof, as compared to a corresponding non-transformed wild type non-human organism or a part thereof; and
[30389] (b) growing the non-human organism or a part thereof under conditions which permit the production of threonine or a composition comprising threonine in said non-human organism or in the culture medium surrounding said non-human organism.

[30390] A further embodiment of the present invention relates to a process for the production of threonine, which comprises
[30391] (a) increasing or generating one or more activities selected from the group consisting of YJL127W-A-protein in an organelle, preferably in plastids or mitochondria, especially in plastids, of a non-human organism or a part thereof, preferably a microorganism, a plant cell, a plant or a part thereof, as compared to a corresponding non-transformed wild type non-human organism or a part thereof; and
[30392] (b) growing the non-human organism or a part thereof under conditions which permit the production of threonine or a composition comprising threonine in said non-human organism or in the culture medium surrounding said non-human organism.

[30393] A further embodiment of the present invention relates to a process for the production of threonine, which comprises
[30394] (a) increasing or generating one or more activities selected from the group consisting of hexose transporter in an organelle, preferably in plastids or mitochondria, especially in plastids, of a non-human organism or a part thereof, preferably a microorganism, a plant cell, a plant or a part thereof, as compared to a corresponding non-transformed wild type non-human organism or a part thereof; and
[30395] (b) growing the non-human organism or a part thereof under conditions which permit the production of threonine or a composition comprising threonine in said non-human organism or in the culture medium surrounding said non-human organism.

[30396] A further embodiment of the present invention relates to a process for the production of threonine, which comprises
[30397] (a) increasing or generating one or more activities selected from the group consisting of homoserine dehydrogenase in an organelle, preferably in plastids or mitochondria, especially in plastids, of a non-human organism or a part thereof, preferably a microorganism, a plant cell, a plant or a part thereof, as compared to a corresponding non-transformed wild type non-human organism or a part thereof; and
[30398] (b) growing the non-human organism or a part thereof under conditions which permit the production of threonine or a composition comprising threonine in said non-human organism or in the culture medium surrounding said non-human organism.

[30399] A further embodiment of the present invention relates to a process for the production of threonine, which comprises
[30400] (a) increasing or generating one or more activities selected from the group consisting of branched chain aminotransferase in an organelle, preferably in plastids or mitochondria, especially in plastids, of a non-human organism or a part thereof, preferably a microorganism, a plant cell, a plant or a part thereof, as compared to a corresponding non-transformed wild type non-human organism or a part thereof; and
[30401] (b) growing the non-human organism or a part thereof under conditions which permit the production of threonine or a composition comprising threonine in said non-human organism or in the culture medium surrounding said non-human organism.

[30402] A further embodiment of the present invention relates to a process for the production of threonine, which comprises
[30403] (a) increasing or generating one or more activities selected from the group consisting of YKL038W-protein in an organelle, preferably in plastids or mitochondria, especially in plastids, of a non-human organism or a part thereof, preferably a microorganism, a plant cell, a plant or a part thereof, as compared to a corresponding non-transformed wild type non-human organism or a part thereof; and
[30404] (b) growing the non-human organism or a part thereof under conditions which permit the production of threonine or a composition comprising threonine in said non-human organism or in the culture medium surrounding said non-human organism.

[30405] A further embodiment of the present invention relates to a process for the production of threonine, which comprises
[30406] (a) increasing or generating one or more activities selected from the group consisting of phosphoenolpyruvate carboxykinase in an organelle, preferably in plastids or mitochondria, especially in plastids, of a non-human organism or a part thereof, preferably a microorganism, a plant cell, a plant or a part thereof, as compared to a corresponding non-transformed wild type non-human organism or a part thereof; and
[30407] (b) growing the non-human organism or a part thereof under conditions which permit the production of threonine or a composition comprising threonine in said non-human organism or in the culture medium surrounding said non-human organism.

[30408] A further embodiment of the present invention relates to a process for the production of threonine, which comprises
[30409] (a) increasing or generating one or more activities selected from the group consisting of aspartate aminotransferase in an organelle, preferably in plastids or mitochondria, especially in plastids, of a non-human organism or a part thereof, preferably a microorganism, a plant cell, a plant or a part thereof, as compared to a corresponding non-transformed wild type non-human organism or a part thereof; and
[30410] (b) growing the non-human organism or a part thereof under conditions which permit the production of threonine or a composition comprising threonine in said non-human organism or in the culture medium surrounding said non-human organism.

[30411] A further embodiment of the present invention relates to a process for the production of threonine, which comprises
[30412] (a) increasing or generating one or more activities selected from the group consisting of mitochondrial dicarboxylate transporter in an organelle, preferably in plastids or mitochondria, especially in plastids, of a non-human organism or a part thereof, preferably a microorganism, a plant cell, a plant or a part thereof, as compared to a corresponding non-transformed wild type non-human organism or a part thereof; and
[30413] (b) growing the non-human organism or a part thereof under conditions which permit the production of threonine or a composition comprising threonine in said non-human organism or in the culture medium surrounding said non-human organism.

[30414] A further embodiment of the present invention relates to a process for the production of threonine, which comprises
[30415] (a) increasing or generating one or more activities selected from the group consisting of phosphate transporter in an organelle, preferably in plastids or mitochondria, especially in plastids, of a non-human organism or a part thereof, preferably a microorganism, a plant cell, a plant or a part thereof, as compared to a corresponding non-transformed wild type non-human organism or a part thereof; and
[30416] (b) growing the non-human organism or a part thereof under conditions which permit the production of threonine or a composition comprising threonine in said non-human organism or in the culture medium surrounding said non-human organism.

[30417] A further embodiment of the present invention relates to a process for the production of threonine, which comprises
[30418] (a) increasing or generating one or more activities selected from the group consisting of protein kinase in an organelle, preferably in plastids or mitochondria, especially in plastids, of a non-human organism or a part thereof, preferably a microorganism, a plant cell, a plant or a part thereof, as compared to a corresponding non-transformed wild type non-human organism or a part thereof; and
[30419] (b) growing the non-human organism or a part thereof under conditions which permit the production of threonine or a composition comprising threonine in said non-human organism or in the culture medium surrounding said non-human organism.

[30420] A further embodiment of the present invention relates to a process for the production of threonine, which comprises
[30421] (a) increasing or generating one or more activities selected from the group consisting of histone acetyltransferase in an organelle, preferably in plastids or mitochondria, especially in plastids, of a non-human organism or a part thereof, preferably a microorganism, a plant cell, a plant or a part thereof, as compared to a corresponding non-transformed wild type non-human organism or a part thereof; and
[30422] (b) growing the non-human organism or a part thereof under conditions which permit the production of threonine or a composition comprising threonine in said non-human organism or in the culture medium surrounding said non-human organism.

[30423] A further embodiment of the present invention relates to a process for the production of threonine, which comprises
[30424] (a) increasing or generating one or more activities selected from the group consisting of cyclin in an organelle, preferably in plastids or mitochondria, especially in plastids, of a non-human organism or a part thereof, preferably a microorganism, a plant cell, a plant or a part thereof, as compared to a corresponding non-transformed wild type non-human organism or a part thereof; and
[30425] (b) growing the non-human organism or a part thereof under conditions which permit the production of threonine or a composition comprising threonine in said non-human organism or in the culture medium surrounding said non-human organism.

[30426] A further embodiment of the present invention relates to a process for the production of threonine, which comprises
[30427] (a) increasing or generating one or more activities selected from the group consisting of Zm_{—}4842_BE510522-protein in an organelle, preferably in plastids or mitochondria, especially in plastids, of a non-human organism or a part thereof, preferably a microorganism, a plant cell, a plant or a part thereof, as compared to a corresponding non-transformed wild type non-human organism or a part thereof; and
[30428] (b) growing the non-human organism or a part thereof under conditions which permit the production of threonine or a composition comprising threonine in said non-human organism or in the culture medium surrounding said non-human organism.

[30429] A further embodiment of the present invention relates to a process for the production of threonine, which comprises
[30430] (a1) increasing or generating the activity of a polypeptide comprising a polypeptide as depicted in the respective line in column 5 or 8 of Table II, application no. 4, or a homolog or fragment thereof, a consensus sequence or at least one polypeptide motif as depicted in column 8 of Table IV, application no. 4; or
[30431] increasing or generating the activity of an expression product of one or more nucleic acid molecule(s) comprising a polynucleotide as depicted in the respective line in column 5 or 8 of Table I, application no. 4, preferably the coding region thereof, or a homolog or a fragment thereof;
[30432] in an organelle, preferably in plastids or mitochondria, especially in plastids, in a non-human organism or a part thereof; preferably a microorganism, a plant cell, a plant or a part thereof, as compared to a corresponding non-transformed wild type non-human organism or a part thereof; or
[30433] (a2) increasing or generating the activity of a polypeptide comprising a polypeptide as depicted in the respective line in column 5 or 8 of Table II, application no. 4, or a homolog or a fragment thereof, a consensus sequence or at least one polypeptide motif as depicted in the respective line in column 8 of Table IV, application no. 4, which is joined to a transit peptide; or
[30434] increasing or generating the activity of an expression product of one or more nucleic acid molecule(s) comprising a polynucleotide as depicted in the respective line in column 5 or 8 of Table I, application no. 4, preferably the coding region thereof, or a homolog or a fragment thereof, which is joined to a nucleic acid sequence encoding an organelle localization sequence, preferably a plastid or a mitochondrion localization sequence, especially a plastid localization sequence;
[30435] in a non-human organism or a part thereof; preferably a microorganism, a plant cell, a plant or a part thereof, as compared to a corresponding non-transformed wild type non-human organism or a part thereof; or
[30436] (a3) increasing or generating the activity of a polypeptide comprising a polypeptide as depicted in the respective line in column 5 or 8 of Table II, application no. 4, or a homolog or a fragment thereof, a consensus sequence or at least one polypeptide motif as depicted in the respective line in column 8 of Table IV, application no. 4; or
[30437] increasing or generating the activity of an expression product of one or more nucleic acid molecule(s) comprising a polynucleotide as depicted in the respective line in column 5 or 8 of Table I, application no. 4, preferably the coding region thereof, or a homolog or a fragment thereof;
[30438] in an organelle, preferably in plastids or mitochondria, especially in plastids, in a non-human organism or a part thereof; preferably a microorganism, a plant cell, a plant or a part thereof, through transformation of the organelle, as compared to a corresponding non-transformed wild type non-human organism or a part thereof;
[30439] and
[30440] (b) growing the non-human organism under conditions which permit the production of threonine, or a composition comprising threonine in said non-human organism or in the culture medium surrounding said non-human organism.

[30441] Accordingly, the present invention relates to a process for the production of threonine, which comprises
[30442] (a) increasing or generating the activity of a 47266012-protein in the cytosol of a cell of a non-human organism or a part thereof, preferably a microorganism, a plant cell, a plant or a part thereof, as compared to a corresponding non-transformed wild type non-human organism or a part thereof; and
[30443] (b) growing the non-human organism or a part thereof under conditions which permit the production of threonine or a composition comprising threonine in said non-human organism or in the culture medium surrounding said non-human organism.

[30444] Accordingly, the present invention relates to a process for the production of threonine, which comprises
[30445] (a) increasing or generating the activity of a 49747384_SOYBEAN-protein in the cytosol of a cell of a non-human organism or a part thereof, preferably a microorganism, a plant cell, a plant or a part thereof, as compared to a corresponding non-transformed wild type non-human organism or a part thereof; and
[30446] (b) growing the non-human organism or a part thereof under conditions which permit the production of threonine or a composition comprising threonine in said non-human organism or in the culture medium surrounding said non-human organism.

[30447] Accordingly, the present invention relates to a process for the production of threonine, which comprises
[30448] (a) increasing or generating the activity of a glucose-6-phosphate 1-dehydrogenase in the cytosol of a cell of a non-human organism or a part thereof, preferably a microorganism, a plant cell, a plant or a part thereof, as compared to a corresponding non-transformed wild type non-human organism or a part thereof; and
[30449] (b) growing the non-human organism or a part thereof under conditions which permit the production of threonine or a composition comprising threonine in said non-human organism or in the culture medium surrounding said non-human organism.

[30450] Accordingly, the present invention relates to a process for the production of threonine, which comprises
[30451] (a) increasing or generating the activity of a At1g09680-protein in the cytosol of a cell of a non-human organism or a part thereof, preferably a microorganism, a plant cell, a plant or a part thereof, as compared to a corresponding non-transformed wild type non-human organism or a part thereof; and
[30452] (b) growing the non-human organism or a part thereof under conditions which permit the production of threonine or a composition comprising threonine in said non-human organism or in the culture medium surrounding said non-human organism.

[30453] Accordingly, the present invention relates to a process for the production of threonine, which comprises
[30454] (a) increasing or generating the activity of a bifunctional aspartokinase/homoserine dehydrogenase in the cytosol of a cell of a non-human organism or a part thereof, preferably a microorganism, a plant cell, a plant or a part thereof, as compared to a corresponding non-transformed wild type non-human organism or a part thereof; and
[30455] (b) growing the non-human organism or a part thereof under conditions which permit the production of threonine or a composition comprising threonine in said non-human organism or in the culture medium surrounding said non-human organism.

[30456] Accordingly, the present invention relates to a process for the production of threonine, which comprises
[30457] (a) increasing or generating the activity of a eukaryotic translation initiation factor 5 in the cytosol of a cell of a non-human organism or a part thereof, preferably a microorganism, a plant cell, a plant or a part thereof, as compared to a corresponding non-transformed wild type non-human organism or a part thereof; and
[30458] (b) growing the non-human organism or a part thereof under conditions which permit the production of threonine or a composition comprising threonine in said non-human organism or in the culture medium surrounding said non-human organism.

[30459] Accordingly, the present invention relates to a process for the production of threonine, which comprises
[30460] (a) increasing or generating the activity of a transcriptional regulator in the cytosol of a cell of a non-human organism or a part thereof, preferably a microorganism, a plant cell, a plant or a part thereof, as compared to a corresponding non-transformed wild type non-human organism or a part thereof; and
[30461] (b) growing the non-human organism or a part thereof under conditions which permit the production of threonine or a composition comprising threonine in said non-human organism or in the culture medium surrounding said non-human organism.

[30462] Accordingly, the present invention relates to a process for the production of threonine, which comprises
[30463] (a) increasing or generating the activity of a protein phosphatase in the cytosol of a cell of a non-human organism or a part thereof, preferably a microorganism, a plant cell, a plant or a part thereof, as compared to a corresponding non-transformed wild type non-human organism or a part thereof; and
[30464] (b) growing the non-human organism or a part thereof under conditions which permit the production of threonine or a composition comprising threonine in said non-human organism or in the culture medium surrounding said non-human organism.

[30465] Accordingly, the present invention relates to a process for the production of threonine, which comprises
[30466] (a) increasing or generating the activity of a protein kinase in the cytosol of a cell of a non-human organism or a part thereof, preferably a microorganism, a plant cell, a plant or a part thereof, as compared to a corresponding non-transformed wild type non-human organism or a part thereof; and
[30467] (b) growing the non-human organism or a part thereof under conditions which permit the production of threonine or a composition comprising threonine in said non-human organism or in the culture medium surrounding said non-human organism.

[30468] Accordingly, the present invention relates to a process for the production of threonine, which comprises
[30469] (a) increasing or generating the activity of a protein phosphatase in the cytosol of a cell of a non-human organism or a part thereof, preferably a microorganism, a plant cell, a plant or a part thereof, as compared to a corresponding non-transformed wild type non-human organism or a part thereof; and
[30470] (b) growing the non-human organism or a part thereof under conditions which permit the production of threonine or a composition comprising threonine in said non-human organism or in the culture medium surrounding said non-human organism.

[30471] Accordingly, the present invention relates to a process for the production of threonine, which comprises
[30472] (a) increasing or generating the activity of a protein phosphatase in the cytosol of a cell of a non-human organism or a part thereof, preferably a microorganism, a plant cell, a plant or a part thereof, as compared to a corresponding non-transformed wild type non-human organism or a part thereof; and
[30473] (b) growing the non-human organism or a part thereof under conditions which permit the production of threonine or a composition comprising threonine in said non-human organism or in the culture medium surrounding said non-human organism.

[30474] Accordingly, the present invention relates to a process for the production of threonine, which comprises
[30475] (a) increasing or generating the activity of a glutaredoxin in the cytosol of a cell of a non-human organism or a part thereof, preferably a microorganism, a plant cell, a plant or a part thereof, as compared to a corresponding non-transformed wild type non-human organism or a part thereof; and
[30476] (b) growing the non-human organism or a part thereof under conditions which permit the production of threonine or a composition comprising threonine in said non-human organism or in the culture medium surrounding said non-human organism.

[30477] Accordingly, the present invention relates to a process for the production of threonine, which comprises
[30478] (a) increasing or generating the activity of a CCAAT-binding transcription factor in the cytosol of a cell of a non-human organism or a part thereof, preferably a microorganism, a plant cell, a plant or a part thereof, as compared to a corresponding non-transformed wild type non-human organism or a part thereof; and
[30479] (b) growing the non-human organism or a part thereof under conditions which permit the production of threonine or a composition comprising threonine in said non-human organism or in the culture medium surrounding said non-human organism.

[30480] Accordingly, the present invention relates to a process for the production of threonine, which comprises
[30481] (a) increasing or generating the activity of a protein kinase in the cytosol of a cell of a non-human organism or a part thereof, preferably a microorganism, a plant cell, a plant or a part thereof, as compared to a corresponding non-transformed wild type non-human organism or a part thereof; and
[30482] (b) growing the non-human organism or a part thereof under conditions which permit the production of threonine or a composition comprising threonine in said non-human organism or in the culture medium surrounding said non-human organism.

[30483] Accordingly, the present invention relates to a process for the production of threonine, which comprises
[30484] (a) increasing or generating the activity of a glycosyl transferase in the cytosol of a cell of a non-human organism or a part thereof, preferably a microorganism, a plant cell, a plant or a part thereof, as compared to a corresponding non-transformed wild type non-human organism or a part thereof; and
[30485] (b) growing the non-human organism or a part thereof under conditions which permit the production of threonine or a composition comprising threonine in said non-human organism or in the culture medium surrounding said non-human organism.

[30486] Accordingly, the present invention relates to a process for the production of threonine, which comprises
[30487] (a) increasing or generating the activity of a monthiol glutaredoxin in the cytosol of a cell of a non-human organism or a part thereof, preferably a microorganism, a plant cell, a plant or a part thereof, as compared to a corresponding non-transformed wild type non-human organism or a part thereof; and
[30488] (b) growing the non-human organism or a part thereof under conditions which permit the production of threonine or a composition comprising threonine in said non-human organism or in the culture medium surrounding said non-human organism.

[30489] Accordingly, the present invention relates to a process for the production of threonine, which comprises
[30490] (a) increasing or generating the activity of a glutaredoxin in the cytosol of a cell of a non-human organism or a part thereof, preferably a microorganism, a plant cell, a plant or a part thereof, as compared to a corresponding non-transformed wild type non-human organism or a part thereof; and
[30491] (b) growing the non-human organism or a part thereof under conditions which permit the production of threonine or a composition comprising threonine in said non-human organism or in the culture medium surrounding said non-human organism.

[30492] Accordingly, the present invention relates to a process for the production of threonine, which comprises
[30493] (a) increasing or generating the activity of a monothiol glutaredoxin in the cytosol of a cell of a non-human organism or a part thereof, preferably a microorganism, a plant cell, a plant or a part thereof, as compared to a corresponding non-transformed wild type non-human organism or a part thereof; and
[30494] (b) growing the non-human organism or a part thereof under conditions which permit the production of threonine or a composition comprising threonine in said non-human organism or in the culture medium surrounding said non-human organism.

[30495] Accordingly, the present invention relates to a process for the production of threonine, which comprises
[30496] (a) increasing or generating the activity of a monothiol glutaredoxin in the cytosol of a cell of a non-human organism or a part thereof, preferably a microorganism, a plant cell, a plant or a part thereof, as compared to a corresponding non-transformed wild type non-human organism or a part thereof; and
[30497] (b) growing the non-human organism or a part thereof under conditions which permit the production of threonine or a composition comprising threonine in said non-human organism or in the culture medium surrounding said non-human organism.

[30498] Accordingly, the present invention relates to a process for the production of threonine, which comprises
[30499] (a) increasing or generating the activity of a monothiol glutaredoxin in the cytosol of a cell of a non-human organism or a part thereof, preferably a microorganism, a plant cell, a plant or a part thereof, as compared to a corresponding non-transformed wild type non-human organism or a part thereof; and
[30500] (b) growing the non-human organism or a part thereof under conditions which permit the production of threonine or a composition comprising threonine in said non-human organism or in the culture medium surrounding said non-human organism.

[30501] Accordingly, the present invention relates to a process for the production of threonine, which comprises
[30502] (a) increasing or generating the activity of a heat shock transcription factor in the cytosol of a cell of a non-human organism or a part thereof, preferably a microorganism, a plant cell, a plant or a part thereof, as compared to a corresponding non-transformed wild type non-human organism or a part thereof; and
[30503] (b) growing the non-human organism or a part thereof under conditions which permit the production of threonine or a composition comprising threonine in said non-human organism or in the culture medium surrounding said non-human organism.

[30504] Accordingly, the present invention relates to a process for the production of threonine, which comprises
[30505] (a) increasing or generating the activity of a At4g32480-protein in the cytosol of a cell of a non-human organism or a part thereof, preferably a microorganism, a plant cell, a plant or a part thereof, as compared to a corresponding non-transformed wild type non-human organism or a part thereof; and
[30506] (b) growing the non-human organism or a part thereof under conditions which permit the production of threonine or a composition comprising threonine in said non-human organism or in the culture medium surrounding said non-human organism.

[30507] Accordingly, the present invention relates to a process for the production of threonine, which comprises
[30508] (a) increasing or generating the activity of a cyclin D in the cytosol of a cell of a non-human organism or a part thereof, preferably a microorganism, a plant cell, a plant or a part thereof, as compared to a corresponding non-transformed wild type non-human organism or a part thereof; and
[30509] (b) growing the non-human organism or a part thereof under conditions which permit the production of threonine or a composition comprising threonine in said non-human organism or in the culture medium surrounding said non-human organism.

[30510] Accordingly, the present invention relates to a process for the production of threonine, which comprises
[30511] (a) increasing or generating the activity of a calcium-dependent protein kinase in the cytosol of a cell of a non-human organism or a part thereof, preferably a microorganism, a plant cell, a plant or a part thereof, as compared to a corresponding non-transformed wild type non-human organism or a part thereof; and
[30512] (b) growing the non-human organism or a part thereof under conditions which permit the production of threonine or a composition comprising threonine in said non-human organism or in the culture medium surrounding said non-human organism.

[30513] Accordingly, the present invention relates to a process for the production of threonine, which comprises
[30514] (a) increasing or generating the activity of a gibberellin 20-oxidase in the cytosol of a cell of a non-human organism or a part thereof, preferably a microorganism, a plant cell, a plant or a part thereof, as compared to a corresponding non-transformed wild type non-human organism or a part thereof; and
[30515] (b) growing the non-human organism or a part thereof under conditions which permit the production of threonine or a composition comprising threonine in said non-human organism or in the culture medium surrounding said non-human organism.

[30516] Accordingly, the present invention relates to a process for the production of threonine, which comprises
[30517] (a) increasing or generating the activity of a aspartate kinase in the cytosol of a cell of a non-human organism or a part thereof, preferably a microorganism, a plant cell, a plant or a part thereof, as compared to a corresponding non-transformed wild type non-human organism or a part thereof; and
[30518] (b) growing the non-human organism or a part thereof under conditions which permit the production of threonine or a composition comprising threonine in said non-human organism or in the culture medium surrounding said non-human organism.

[30519] Accordingly, the present invention relates to a process for the production of threonine, which comprises
[30520] (a) increasing or generating the activity of a At5g16650-protein in the cytosol of a cell of a non-human organism or a part thereof, preferably a microorganism, a plant cell, a plant or a part thereof, as compared to a corresponding non-transformed wild type non-human organism or a part thereof; and
[30521] (b) growing the non-human organism or a part thereof under conditions which permit the production of threonine or a composition comprising threonine in said non-human organism or in the culture medium surrounding said non-human organism.

[30522] Accordingly, the present invention relates to a process for the production of threonine, which comprises
[30523] (a) increasing or generating the activity of a thioredoxin in the cytosol of a cell of a non-human organism or a part thereof, preferably a microorganism, a plant cell, a plant or a part thereof, as compared to a corresponding non-transformed wild type non-human organism or a part thereof; and
[30524] (b) growing the non-human organism or a part thereof under conditions which permit the production of threonine or a composition comprising threonine in said non-human organism or in the culture medium surrounding said non-human organism.

[30525] Accordingly, the present invention relates to a process for the production of threonine, which comprises
[30526] (a) increasing or generating the activity of a protein phosphatase in the cytosol of a cell of a non-human organism or a part thereof, preferably a microorganism, a plant cell, a plant or a part thereof, as compared to a corresponding non-transformed wild type non-human organism or a part thereof; and
[30527] (b) growing the non-human organism or a part thereof under conditions which permit the production of threonine or a composition comprising threonine in said non-human organism or in the culture medium surrounding said non-human organism.

[30528] Accordingly, the present invention relates to a process for the production of threonine, which comprises
[30529] (a) increasing or generating the activity of a zinc finger protein in the cytosol of a cell of a non-human organism or a part thereof, preferably a microorganism, a plant cell, a plant or a part thereof, as compared to a corresponding non-transformed wild type non-human organism or a part thereof; and
[30530] (b) growing the non-human organism or a part thereof under conditions which permit the production of threonine or a composition comprising threonine in said non-human organism or in the culture medium surrounding said non-human organism.

[30531] Accordingly, the present invention relates to a process for the production of threonine, which comprises
[30532] (a) increasing or generating the activity of a CDP-diacylglycerol-serine O-phosphatidyltransferase in the cytosol of a cell of a non-human organism or a part thereof, preferably a microorganism, a plant cell, a plant or a part thereof, as compared to a corresponding non-transformed wild type non-human organism or a part thereof; and
[30533] (b) growing the non-human organism or a part thereof under conditions which permit the production of threonine or a composition comprising threonine in said non-human organism or in the culture medium surrounding said non-human organism.

[30534] Accordingly, the present invention relates to a process for the production of threonine, which comprises
[30535] (a) increasing or generating the activity of a malic enzyme in the cytosol of a cell of a non-human organism or a part thereof, preferably a microorganism, a plant cell, a plant or a part thereof, as compared to a corresponding non-transformed wild type non-human organism or a part thereof; and
[30536] (b) growing the non-human organism or a part thereof under conditions which permit the production of threonine or a composition comprising threonine in said non-human organism or in the culture medium surrounding said non-human organism.

[30537] Accordingly, the present invention relates to a process for the production of threonine, which comprises
[30538] (a) increasing or generating the activity of a sec-independent protein translocase in the cytosol of a cell of a non-human organism or a part thereof, preferably a microorganism, a plant cell, a plant or a part thereof, as compared to a corresponding non-transformed wild type non-human organism or a part thereof; and
[30539] (b) growing the non-human organism or a part thereof under conditions which permit the production of threonine or a composition comprising threonine in said non-human organism or in the culture medium surrounding said non-human organism.

[30540] Accordingly, the present invention relates to a process for the production of threonine, which comprises
[30541] (a) increasing or generating the activity of a beta-hydroxylase in the cytosol of a cell of a non-human organism or a part thereof, preferably a microorganism, a plant cell, a plant or a part thereof, as compared to a corresponding non-transformed wild type non-human organism or a part thereof; and
[30542] (b) growing the non-human organism or a part thereof under conditions which permit the production of threonine or a composition comprising threonine in said non-human organism or in the culture medium surrounding said non-human organism.

[30543] Accordingly, the present invention relates to a process for the production of threonine, which comprises
[30544] (a) increasing or generating the activity of a elongation factor Tu in the cytosol of a cell of a non-human organism or a part thereof, preferably a microorganism, a plant cell, a plant or a part thereof, as compared to a corresponding non-transformed wild type non-human organism or a part thereof; and
[30545] (b) growing the non-human organism or a part thereof under conditions which permit the production of threonine or a composition comprising threonine in said non-human organism or in the culture medium surrounding said non-human organism.

[30546] Accordingly, the present invention relates to a process for the production of threonine, which comprises
[30547] (a) increasing or generating the activity of a ABC transporter permease protein in the cytosol of a cell of a non-human organism or a part thereof, preferably a microorganism, a plant cell, a plant or a part thereof, as compared to a corresponding non-transformed wild type non-human organism or a part thereof; and
[30548] (b) growing the non-human organism or a part thereof under conditions which permit the production of threonine or a composition comprising threonine in said non-human organism or in the culture medium surrounding said non-human organism.

[30549] Accordingly, the present invention relates to a process for the production of threonine, which comprises
[30550] (a) increasing or generating the activity of a acyl-CoA synthase in the cytosol of a cell of a non-human organism or a part thereof, preferably a microorganism, a plant cell, a plant or a part thereof, as compared to a corresponding non-transformed wild type non-human organism or a part thereof; and
[30551] (b) growing the non-human organism or a part thereof under conditions which permit the production of threonine or a composition comprising threonine in said non-human organism or in the culture medium surrounding said non-human organism.

[30552] Accordingly, the present invention relates to a process for the production of threonine, which comprises
[30553] (a) increasing or generating the activity of a 2-oxoglutarate dehydrogenase E1 subunit in the cytosol of a cell of a non-human organism or a part thereof, preferably a microorganism, a plant cell, a plant or a part thereof, as compared to a corresponding non-transformed wild type non-human organism or a part thereof; and
[30554] (b) growing the non-human organism or a part thereof under conditions which permit the production of threonine or a composition comprising threonine in said non-human organism or in the culture medium surrounding said non-human organism.

[30555] Accordingly, the present invention relates to a process for the production of threonine, which comprises
[30556] (a) increasing or generating the activity of a permease protein of peptide ABC transporter in the cytosol of a cell of a non-human organism or a part thereof, preferably a microorganism, a plant cell, a plant or a part thereof, as compared to a corresponding non-transformed wild type non-human organism or a part thereof; and
[30557] (b) growing the non-human organism or a part thereof under conditions which permit the production of threonine or a composition comprising threonine in said non-human organism or in the culture medium surrounding said non-human organism.

[30558] Accordingly, the present invention relates to a process for the production of threonine, which comprises
[30559] (a) increasing or generating the activity of a GDP-mannose dehydrogenase in the cytosol of a cell of a non-human organism or a part thereof, preferably a microorganism, a plant cell, a plant or a part thereof, as compared to a corresponding non-transformed wild type non-human organism or a part thereof; and
[30560] (b) growing the non-human organism or a part thereof under conditions which permit the production of threonine or a composition comprising threonine in said non-human organism or in the culture medium surrounding said non-human organism.

[30561] Accordingly, the present invention relates to a process for the production of threonine, which comprises
[30562] (a) increasing or generating the activity of a enoyl-CoA hydratase in the cytosol of a cell of a non-human organism or a part thereof, preferably a microorganism, a plant cell, a plant or a part thereof, as compared to a corresponding non-transformed wild type non-human organism or a part thereof; and
[30563] (b) growing the non-human organism or a part thereof under conditions which permit the production of threonine or a composition comprising threonine in said non-human organism or in the culture medium surrounding said non-human organism.

[30564] Accordingly, the present invention relates to a process for the production of threonine, which comprises
[30565] (a) increasing or generating the activity of a transcriptional regulator in the cytosol of a cell of a non-human organism or a part thereof, preferably a microorganism, a plant cell, a plant or a part thereof, as compared to a corresponding non-transformed wild type non-human organism or a part thereof; and
[30566] (b) growing the non-human organism or a part thereof under conditions which permit the production of threonine or a composition comprising threonine in said non-human organism or in the culture medium surrounding said non-human organism.

[30567] Accordingly, the present invention relates to a process for the production of threonine, which comprises
[30568] (a) increasing or generating the activity of a homoserine dehydrogenase in the cytosol of a cell of a non-human organism or a part thereof, preferably a microorganism, a plant cell, a plant or a part thereof, as compared to a corresponding non-transformed wild type non-human organism or a part thereof; and
[30569] (b) growing the non-human organism or a part thereof under conditions which permit the production of threonine or a composition comprising threonine in said non-human organism or in the culture medium surrounding said non-human organism.

[30570] Accordingly, the present invention relates to a process for the production of threonine, which comprises
[30571] (a) increasing or generating the activity of a hydrolase in the cytosol of a cell of a non-human organism or a part thereof, preferably a microorganism, a plant cell, a plant or a part thereof, as compared to a corresponding non-transformed wild type non-human organism or a part thereof; and
[30572] (b) growing the non-human organism or a part thereof under conditions which permit the production of threonine or a composition comprising threonine in said non-human organism or in the culture medium surrounding said non-human organism.

[30573] Accordingly, the present invention relates to a process for the production of threonine, which comprises
[30574] (a) increasing or generating the activity of a glutamate-ammonia-ligase in the cytosol of a cell of a non-human organism or a part thereof, preferably a microorganism, a plant cell, a plant or a part thereof, as compared to a corresponding non-transformed wild type non-human organism or a part thereof; and
[30575] (b) growing the non-human organism or a part thereof under conditions which permit the production of threonine or a composition comprising threonine in said non-human organism or in the culture medium surrounding said non-human organism.

[30576] Accordingly, the present invention relates to a process for the production of threonine, which comprises
[30577] (a) increasing or generating the activity of a peptidase in the cytosol of a cell of a non-human organism or a part thereof, preferably a microorganism, a plant cell, a plant or a part thereof, as compared to a corresponding non-transformed wild type non-human organism or a part thereof; and
[30578] (b) growing the non-human organism or a part thereof under conditions which permit the production of threonine or a composition comprising threonine in said non-human organism or in the culture medium surrounding said non-human organism.

[30579] Accordingly, the present invention relates to a process for the production of threonine, which comprises
[30580] (a) increasing or generating the activity of a Chaperone protein CIpB in the cytosol of a cell of a non-human organism or a part thereof, preferably a microorganism, a plant cell, a plant or a part thereof, as compared to a corresponding non-transformed wild type non-human organism or a part thereof; and
[30581] (b) growing the non-human organism or a part thereof under conditions which permit the production of threonine or a composition comprising threonine in said non-human organism or in the culture medium surrounding said non-human organism.

[30582] Accordingly, the present invention relates to a process for the production of threonine, which comprises
[30583] (a) increasing or generating the activity of a transcriptional regulator protein in the cytosol of a cell of a non-human organism or a part thereof, preferably a microorganism, a plant cell, a plant or a part thereof, as compared to a corresponding non-transformed wild type non-human organism or a part thereof; and
[30584] (b) growing the non-human organism or a part thereof under conditions which permit the production of threonine or a composition comprising threonine in said non-human organism or in the culture medium surrounding said non-human organism.

[30585] Accordingly, the present invention relates to a process for the production of threonine, which comprises
[30586] (a) increasing or generating the activity of a AX653549-protein in the cytosol of a cell of a non-human organism or a part thereof, preferably a microorganism, a plant cell, a plant or a part thereof, as compared to a corresponding non-transformed wild type non-human organism or a part thereof; and
[30587] (b) growing the non-human organism or a part thereof under conditions which permit the production of threonine or a composition comprising threonine in said non-human organism or in the culture medium surrounding said non-human organism.

[30588] Accordingly, the present invention relates to a process for the production of threonine, which comprises
[30589] (a) increasing or generating the activity of a threonine synthase in the cytosol of a cell of a non-human organism or a part thereof, preferably a microorganism, a plant cell, a plant or a part thereof, as compared to a corresponding non-transformed wild type non-human organism or a part thereof; and
[30590] (b) growing the non-human organism or a part thereof under conditions which permit the production of threonine or a composition comprising threonine in said non-human organism or in the culture medium surrounding said non-human organism.

[30591] Accordingly, the present invention relates to a process for the production of threonine, which comprises
[30592] (a) increasing or generating the activity of a acetolactate synthase small subunit in the cytosol of a cell of a non-human organism or a part thereof, preferably a microorganism, a plant cell, a plant or a part thereof, as compared to a corresponding non-transformed wild type non-human organism or a part thereof; and
[30593] (b) growing the non-human organism or a part thereof under conditions which permit the production of threonine or a composition comprising threonine in said non-human organism or in the culture medium surrounding said non-human organism.

[30594] Accordingly, the present invention relates to a process for the production of threonine, which comprises
[30595] (a) increasing or generating the activity of a dihydrolipoamide acetyltransferase in the cytosol of a cell of a non-human organism or a part thereof, preferably a microorganism, a plant cell, a plant or a part thereof, as compared to a corresponding non-transformed wild type non-human organism or a part thereof; and
[30596] (b) growing the non-human organism or a part thereof under conditions which permit the production of threonine or a composition comprising threonine in said non-human organism or in the culture medium surrounding said non-human organism.

[30597] Accordingly, the present invention relates to a process for the production of threonine, which comprises
[30598] (a) increasing or generating the activity of a glucose dehydrogenase in the cytosol of a cell of a non-human organism or a part thereof, preferably a microorganism, a plant cell, a plant or a part thereof, as compared to a corresponding non-transformed wild type non-human organism or a part thereof; and
[30599] (b) growing the non-human organism or a part thereof under conditions which permit the production of threonine or a composition comprising threonine in said non-human organism or in the culture medium surrounding said non-human organism.

[30600] Accordingly, the present invention relates to a process for the production of threonine, which comprises
[30601] (a) increasing or generating the activity of a serine protease in the cytosol of a cell of a non-human organism or a part thereof, preferably a microorganism, a plant cell, a plant or a part thereof, as compared to a corresponding non-transformed wild type non-human organism or a part thereof; and
[30602] (b) growing the non-human organism or a part thereof under conditions which permit the production of threonine or a composition comprising threonine in said non-human organism or in the culture medium surrounding said non-human organism.

[30603] Accordingly, the present invention relates to a process for the production of threonine, which comprises
[30604] (a) increasing or generating the activity of a acyl-CoA dehydrogenase in the cytosol of a cell of a non-human organism or a part thereof, preferably a microorganism, a plant cell, a plant or a part thereof, as compared to a corresponding non-transformed wild type non-human organism or a part thereof; and
[30605] (b) growing the non-human organism or a part thereof under conditions which permit the production of threonine or a composition comprising threonine in said non-human organism or in the culture medium surrounding said non-human organism.

[30606] Accordingly, the present invention relates to a process for the production of threonine, which comprises
[30607] (a) increasing or generating the activity of a beta-galactosidase in the cytosol of a cell of a non-human organism or a part thereof, preferably a microorganism, a plant cell, a plant or a part thereof, as compared to a corresponding non-transformed wild type non-human organism or a part thereof; and
[30608] (b) growing the non-human organism or a part thereof under conditions which permit the production of threonine or a composition comprising threonine in said non-human organism or in the culture medium surrounding said non-human organism.

[30609] Accordingly, the present invention relates to a process for the production of threonine, which comprises
[30610] (a) increasing or generating the activity of a 2,3-dihydroxyphenylpropionate 1,2-dioxygenase in the cytosol of a cell of a non-human organism or a part thereof, preferably a microorganism, a plant cell, a plant or a part thereof, as compared to a corresponding non-transformed wild type non-human organism or a part thereof; and
[30611] (b) growing the non-human organism or a part thereof under conditions which permit the production of threonine or a composition comprising threonine in said non-human organism or in the culture medium surrounding said non-human organism.

[30612] Accordingly, the present invention relates to a process for the production of threonine, which comprises
[30613] (a) increasing or generating the activity of a ATP-binding component of a transport system in the cytosol of a cell of a non-human organism or a part thereof, preferably a microorganism, a plant cell, a plant or a part thereof, as compared to a corresponding non-transformed wild type non-human organism or a part thereof; and
[30614] (b) growing the non-human organism or a part thereof under conditions which permit the production of threonine or a composition comprising threonine in said non-human organism or in the culture medium surrounding said non-human organism.

[30615] Accordingly, the present invention relates to a process for the production of threonine, which comprises
[30616] (a) increasing or generating the activity of a membrane transport protein in the cytosol of a cell of a non-human organism or a part thereof, preferably a microorganism, a plant cell, a plant or a part thereof, as compared to a corresponding non-transformed wild type non-human organism or a part thereof; and
[30617] (b) growing the non-human organism or a part thereof under conditions which permit the production of threonine or a composition comprising threonine in said non-human organism or in the culture medium surrounding said non-human organism.

[30618] Accordingly, the present invention relates to a process for the production of threonine, which comprises
[30619] (a) increasing or generating the activity of a isochorismate synthase in the cytosol of a cell of a non-human organism or a part thereof, preferably a microorganism, a plant cell, a plant or a part thereof, as compared to a corresponding non-transformed wild type non-human organism or a part thereof; and
[30620] (b) growing the non-human organism or a part thereof under conditions which permit the production of threonine or a composition comprising threonine in said non-human organism or in the culture medium surrounding said non-human organism.

[30621] Accordingly, the present invention relates to a process for the production of threonine, which comprises
[30622] (a) increasing or generating the activity of a sensor histidine kinase in the cytosol of a cell of a non-human organism or a part thereof, preferably a microorganism, a plant cell, a plant or a part thereof, as compared to a corresponding non-transformed wild type non-human organism or a part thereof; and
[30623] (b) growing the non-human organism or a part thereof under conditions which permit the production of threonine or a composition comprising threonine in said non-human organism or in the culture medium surrounding said non-human organism.

[30624] Accordingly, the present invention relates to a process for the production of threonine, which comprises
[30625] (a) increasing or generating the activity of a succinyl-CoA synthetase beta chain in the cytosol of a cell of a non-human organism or a part thereof, preferably a microorganism, a plant cell, a plant or a part thereof, as compared to a corresponding non-transformed wild type non-human organism or a part thereof; and
[30626] (b) growing the non-human organism or a part thereof under conditions which permit the production of threonine or a composition comprising threonine in said non-human organism or in the culture medium surrounding said non-human organism.

[30627] Accordingly, the present invention relates to a process for the production of threonine, which comprises
[30628] (a) increasing or generating the activity of a major facilitator superfamily transporter protein in the cytosol of a cell of a non-human organism or a part thereof, preferably a microorganism, a plant cell, a plant or a part thereof, as compared to a corresponding non-transformed wild type non-human organism or a part thereof; and
[30629] (b) growing the non-human organism or a part thereof under conditions which permit the production of threonine or a composition comprising threonine in said non-human organism or in the culture medium surrounding said non-human organism.

[30630] Accordingly, the present invention relates to a process for the production of threonine, which comprises
[30631] (a) increasing or generating the activity of a phosphoanhydride phosphorylase in the cytosol of a cell of a non-human organism or a part thereof, preferably a microorganism, a plant cell, a plant or a part thereof, as compared to a corresponding non-transformed wild type non-human organism or a part thereof; and
[30632] (b) growing the non-human organism or a part thereof under conditions which permit the production of threonine or a composition comprising threonine in said non-human organism or in the culture medium surrounding said non-human organism.

[30633] Accordingly, the present invention relates to a process for the production of threonine, which comprises
[30634] (a) increasing or generating the activity of a b1003-protein in the cytosol of a cell of a non-human organism or a part thereof, preferably a microorganism, a plant cell, a plant or a part thereof, as compared to a corresponding non-transformed wild type non-human organism or a part thereof; and
[30635] (b) growing the non-human organism or a part thereof under conditions which permit the production of threonine or a composition comprising threonine in said non-human organism or in the culture medium surrounding said non-human organism.

[30636] Accordingly, the present invention relates to a process for the production of threonine, which comprises
[30637] (a) increasing or generating the activity of a b1108-protein in the cytosol of a cell of a non-human organism or a part thereof, preferably a microorganism, a plant cell, a plant or a part thereof, as compared to a corresponding non-transformed wild type non-human organism or a part thereof; and
[30638] (b) growing the non-human organism or a part thereof under conditions which permit the production of threonine or a composition comprising threonine in said non-human organism or in the culture medium surrounding said non-human organism.

[30639] Accordingly, the present invention relates to a process for the production of threonine, which comprises
[30640] (a) increasing or generating the activity of a restriction alleviation protein in the cytosol of a cell of a non-human organism or a part thereof, preferably a microorganism, a plant cell, a plant or a part thereof, as compared to a corresponding non-transformed wild type non-human organism or a part thereof; and
[30641] (b) growing the non-human organism or a part thereof under conditions which permit the production of threonine or a composition comprising threonine in said non-human organism or in the culture medium surrounding said non-human organism.

[30642] Accordingly, the present invention relates to a process for the production of threonine, which comprises
[30643] (a) increasing or generating the activity of a b1445-protein in the cytosol of a cell of a non-human organism or a part thereof, preferably a microorganism, a plant cell, a plant or a part thereof, as compared to a corresponding non-transformed wild type non-human organism or a part thereof; and
[30644] (b) growing the non-human organism or a part thereof under conditions which permit the production of threonine or a composition comprising threonine in said non-human organism or in the culture medium surrounding said non-human organism.

[30645] Accordingly, the present invention relates to a process for the production of threonine, which comprises
[30646] (a) increasing or generating the activity of a NADP-dependent malic enzyme in the cytosol of a cell of a non-human organism or a part thereof, preferably a microorganism, a plant cell, a plant or a part thereof, as compared to a corresponding non-transformed wild type non-human organism or a part thereof; and
[30647] (b) growing the non-human organism or a part thereof under conditions which permit the production of threonine or a composition comprising threonine in said non-human organism or in the culture medium surrounding said non-human organism.

[30648] Accordingly, the present invention relates to a process for the production of threonine, which comprises
[30649] (a) increasing or generating the activity of a b1522-protein in the cytosol of a cell of a non-human organism or a part thereof, preferably a microorganism, a plant cell, a plant or a part thereof, as compared to a corresponding non-transformed wild type non-human organism or a part thereof; and
[30650] (b) growing the non-human organism or a part thereof under conditions which permit the production of threonine or a composition comprising threonine in said non-human organism or in the culture medium surrounding said non-human organism.

[30651] Accordingly, the present invention relates to a process for the production of threonine, which comprises
[30652] (a) increasing or generating the activity of a b1670-protein in the cytosol of a cell of a non-human organism or a part thereof, preferably a microorganism, a plant cell, a plant or a part thereof, as compared to a corresponding non-transformed wild type non-human organism or a part thereof; and
[30653] (b) growing the non-human organism or a part thereof under conditions which permit the production of threonine or a composition comprising threonine in said non-human organism or in the culture medium surrounding said non-human organism.

[30654] Accordingly, the present invention relates to a process for the production of threonine, which comprises
[30655] (a) increasing or generating the activity of a pyruvate kinase in the cytosol of a cell of a non-human organism or a part thereof, preferably a microorganism, a plant cell, a plant or a part thereof, as compared to a corresponding non-transformed wild type non-human organism or a part thereof; and
[30656] (b) growing the non-human organism or a part thereof under conditions which permit the production of threonine or a composition comprising threonine in said non-human organism or in the culture medium surrounding said non-human organism.

[30657] Accordingly, the present invention relates to a process for the production of threonine, which comprises
[30658] (a) increasing or generating the activity of a b1930-protein in the cytosol of a cell of a non-human organism or a part thereof, preferably a microorganism, a plant cell, a plant or a part thereof, as compared to a corresponding non-transformed wild type non-human organism or a part thereof; and
[30659] (b) growing the non-human organism or a part thereof under conditions which permit the production of threonine or a composition comprising threonine in said non-human organism or in the culture medium surrounding said non-human organism.

[30660] Accordingly, the present invention relates to a process for the production of threonine, which comprises
[30661] (a) increasing or generating the activity of a transport protein in the cytosol of a cell of a non-human organism or a part thereof, preferably a microorganism, a plant cell, a plant or a part thereof, as compared to a corresponding non-transformed wild type non-human organism or a part thereof; and
[30662] (b) growing the non-human organism or a part thereof under conditions which permit the production of threonine or a composition comprising threonine in said non-human organism or in the culture medium surrounding said non-human organism.

[30663] Accordingly, the present invention relates to a process for the production of threonine, which comprises
[30664] (a) increasing or generating the activity of a b2360-protein in the cytosol of a cell of a non-human organism or a part thereof, preferably a microorganism, a plant cell, a plant or a part thereof, as compared to a corresponding non-transformed wild type non-human organism or a part thereof; and
[30665] (b) growing the non-human organism or a part thereof under conditions which permit the production of threonine or a composition comprising threonine in said non-human organism or in the culture medium surrounding said non-human organism.

[30666] Accordingly, the present invention relates to a process for the production of threonine, which comprises
[30667] (a) increasing or generating the activity of a D-serine dehydratase in the cytosol of a cell of a non-human organism or a part thereof, preferably a microorganism, a plant cell, a plant or a part thereof, as compared to a corresponding non-transformed wild type non-human organism or a part thereof; and
[30668] (b) growing the non-human organism or a part thereof under conditions which permit the production of threonine or a composition comprising threonine in said non-human organism or in the culture medium surrounding said non-human organism.

[30669] Accordingly, the present invention relates to a process for the production of threonine, which comprises
[30670] (a) increasing or generating the activity of a b2399-protein in the cytosol of a cell of a non-human organism or a part thereof, preferably a microorganism, a plant cell, a plant or a part thereof, as compared to a corresponding non-transformed wild type non-human organism or a part thereof; and
[30671] (b) growing the non-human organism or a part thereof under conditions which permit the production of threonine or a composition comprising threonine in said non-human organism or in the culture medium surrounding said non-human organism.

[30672] Accordingly, the present invention relates to a process for the production of threonine, which comprises
[30673] (a) increasing or generating the activity of a transcriptional regulator in the cytosol of a cell of a non-human organism or a part thereof, preferably a microorganism, a plant cell, a plant or a part thereof, as compared to a corresponding non-transformed wild type non-human organism or a part thereof; and
[30674] (b) growing the non-human organism or a part thereof under conditions which permit the production of threonine or a composition comprising threonine in said non-human organism or in the culture medium surrounding said non-human organism.

[30675] Accordingly, the present invention relates to a process for the production of threonine, which comprises
[30676] (a) increasing or generating the activity of a b2513-protein in the cytosol of a cell of a non-human organism or a part thereof, preferably a microorganism, a plant cell, a plant or a part thereof, as compared to a corresponding non-transformed wild type non-human organism or a part thereof; and
[30677] (b) growing the non-human organism or a part thereof under conditions which permit the production of threonine or a composition comprising threonine in said non-human organism or in the culture medium surrounding said non-human organism.

[30678] Accordingly, the present invention relates to a process for the production of threonine, which comprises
[30679] (a) increasing or generating the activity of a b2613-protein in the cytosol of a cell of a non-human organism or a part thereof, preferably a microorganism, a plant cell, a plant or a part thereof, as compared to a corresponding non-transformed wild type non-human organism or a part thereof; and
[30680] (b) growing the non-human organism or a part thereof under conditions which permit the production of threonine or a composition comprising threonine in said non-human organism or in the culture medium surrounding said non-human organism.

[30681] Accordingly, the present invention relates to a process for the production of threonine, which comprises
[30682] (a) increasing or generating the activity of a murein transglycosylase in the cytosol of a cell of a non-human organism or a part thereof, preferably a microorganism, a plant cell, a plant or a part thereof, as compared to a corresponding non-transformed wild type non-human organism or a part thereof; and
[30683] (b) growing the non-human organism or a part thereof under conditions which permit the production of threonine or a composition comprising threonine in said non-human organism or in the culture medium surrounding said non-human organism.

[30684] Accordingly, the present invention relates to a process for the production of threonine, which comprises
[30685] (a) increasing or generating the activity of a transcriptional regulator in the cytosol of a cell of a non-human organism or a part thereof, preferably a microorganism, a plant cell, a plant or a part thereof, as compared to a corresponding non-transformed wild type non-human organism or a part thereof; and
[30686] (b) growing the non-human organism or a part thereof under conditions which permit the production of threonine or a composition comprising threonine in said non-human organism or in the culture medium surrounding said non-human organism.

[30687] Accordingly, the present invention relates to a process for the production of threonine, which comprises
[30688] (a) increasing or generating the activity of a b2739-protein in the cytosol of a cell of a non-human organism or a part thereof, preferably a microorganism, a plant cell, a plant or a part thereof, as compared to a corresponding non-transformed wild type non-human organism or a part thereof; and
[30689] (b) growing the non-human organism or a part thereof under conditions which permit the production of threonine or a composition comprising threonine in said non-human organism or in the culture medium surrounding said non-human organism.

[30690] Accordingly, the present invention relates to a process for the production of threonine, which comprises
[30691] (a) increasing or generating the activity of a 2-C-methyl-D-erythritol 4-phosphate cytidylyltransferase in the cytosol of a cell of a non-human organism or a part thereof, preferably a microorganism, a plant cell, a plant or a part thereof, as compared to a corresponding non-transformed wild type non-human organism or a part thereof; and
[30692] (b) growing the non-human organism or a part thereof under conditions which permit the production of threonine or a composition comprising threonine in said non-human organism or in the culture medium surrounding said non-human organism.

[30693] Accordingly, the present invention relates to a process for the production of threonine, which comprises
[30694] (a) increasing or generating the activity of a b2812-protein in the cytosol of a cell of a non-human organism or a part thereof, preferably a microorganism, a plant cell, a plant or a part thereof, as compared to a corresponding non-transformed wild type non-human organism or a part thereof; and
[30695] (b) growing the non-human organism or a part thereof under conditions which permit the production of threonine or a composition comprising threonine in said non-human organism or in the culture medium surrounding said non-human organism.

[30696] Accordingly, the present invention relates to a process for the production of threonine, which comprises
[30697] (a) increasing or generating the activity of a b2812-protein in the cytosol of a cell of a non-human organism or a part thereof, preferably a microorganism, a plant cell, a plant or a part thereof, as compared to a corresponding non-transformed wild type non-human organism or a part thereof; and
[30698] (b) growing the non-human organism or a part thereof under conditions which permit the production of threonine or a composition comprising threonine in said non-human organism or in the culture medium surrounding said non-human organism.

[30699] Accordingly, the present invention relates to a process for the production of threonine, which comprises
[30700] (a) increasing or generating the activity of a D-3-phosphoglycerate dehydrogenase in the cytosol of a cell of a non-human organism or a part thereof, preferably a microorganism, a plant cell, a plant or a part thereof, as compared to a corresponding non-transformed wild type non-human organism or a part thereof; and
[30701] (b) growing the non-human organism or a part thereof under conditions which permit the production of threonine or a composition comprising threonine in said non-human organism or in the culture medium surrounding said non-human organism.

[30702] Accordingly, the present invention relates to a process for the production of threonine, which comprises
[30703] (a) increasing or generating the activity of a L-asparaginase in the cytosol of a cell of a non-human organism or a part thereof, preferably a microorganism, a plant cell, a plant or a part thereof, as compared to a corresponding non-transformed wild type non-human organism or a part thereof; and
[30704] (b) growing the non-human organism or a part thereof under conditions which permit the production of threonine or a composition comprising threonine in said non-human organism or in the culture medium surrounding said non-human organism.

[30705] Accordingly, the present invention relates to a process for the production of threonine, which comprises
[30706] (a) increasing or generating the activity of a glycoprotease in the cytosol of a cell of a non-human organism or a part thereof, preferably a microorganism, a plant cell, a plant or a part thereof, as compared to a corresponding non-transformed wild type non-human organism or a part thereof; and
[30707] (b) growing the non-human organism or a part thereof under conditions which permit the production of threonine or a composition comprising threonine in said non-human organism or in the culture medium surrounding said non-human organism.

[30708] Accordingly, the present invention relates to a process for the production of threonine, which comprises
[30709] (a) increasing or generating the activity of a b3083-protein in the cytosol of a cell of a non-human organism or a part thereof, preferably a microorganism, a plant cell, a plant or a part thereof, as compared to a corresponding non-transformed wild type non-human organism or a part thereof; and
[30710] (b) growing the non-human organism or a part thereof under conditions which permit the production of threonine or a composition comprising threonine in said non-human organism or in the culture medium surrounding said non-human organism.

[30711] Accordingly, the present invention relates to a process for the production of threonine, which comprises
[30712] (a) increasing or generating the activity of a methyltransferase in the cytosol of a cell of a non-human organism or a part thereof, preferably a microorganism, a plant cell, a plant or a part thereof, as compared to a corresponding non-transformed wild type non-human organism or a part thereof; and
[30713] (b) growing the non-human organism or a part thereof under conditions which permit the production of threonine or a composition comprising threonine in said non-human organism or in the culture medium surrounding said non-human organism.

[30714] Accordingly, the present invention relates to a process for the production of threonine, which comprises
[30715] (a) increasing or generating the activity of a glycogen synthase in the cytosol of a cell of a non-human organism or a part thereof, preferably a microorganism, a plant cell, a plant or a part thereof, as compared to a corresponding non-transformed wild type non-human organism or a part thereof; and
[30716] (b) growing the non-human organism or a part thereof under conditions which permit the production of threonine or a composition comprising threonine in said non-human organism or in the culture medium surrounding said non-human organism.

[30717] Accordingly, the present invention relates to a process for the production of threonine, which comprises
[30718] (a) increasing or generating the activity of a b3442-protein in the cytosol of a cell of a non-human organism or a part thereof, preferably a microorganism, a plant cell, a plant or a part thereof, as compared to a corresponding non-transformed wild type non-human organism or a part thereof; and
[30719] (b) growing the non-human organism or a part thereof under conditions which permit the production of threonine or a composition comprising threonine in said non-human organism or in the culture medium surrounding said non-human organism.

[30720] Accordingly, the present invention relates to a process for the production of threonine, which comprises
[30721] (a) increasing or generating the activity of a valine-pyruvate transaminase in the cytosol of a cell of a non-human organism or a part thereof, preferably a microorganism, a plant cell, a plant or a part thereof, as compared to a corresponding non-transformed wild type non-human organism or a part thereof; and
[30722] (b) growing the non-human organism or a part thereof under conditions which permit the production of threonine or a composition comprising threonine in said non-human organism or in the culture medium surrounding said non-human organism.

[30723] Accordingly, the present invention relates to a process for the production of threonine, which comprises
[30724] (a) increasing or generating the activity of a b3646-protein in the cytosol of a cell of a non-human organism or a part thereof, preferably a microorganism, a plant cell, a plant or a part thereof, as compared to a corresponding non-transformed wild type non-human organism or a part thereof; and
[30725] (b) growing the non-human organism or a part thereof under conditions which permit the production of threonine or a composition comprising threonine in said non-human organism or in the culture medium surrounding said non-human organism.

[30726] Accordingly, the present invention relates to a process for the production of threonine, which comprises
[30727] (a) increasing or generating the activity of a ATP synthase subunit beta in the cytosol of a cell of a non-human organism or a part thereof, preferably a microorganism, a plant cell, a plant or a part thereof, as compared to a corresponding non-transformed wild type non-human organism or a part thereof; and
[30728] (b) growing the non-human organism or a part thereof under conditions which permit the production of threonine or a composition comprising threonine in said non-human organism or in the culture medium surrounding said non-human organism.

[30729] Accordingly, the present invention relates to a process for the production of threonine, which comprises
[30730] (a) increasing or generating the activity of a dihydroxyacid dehydratase in the cytosol of a cell of a non-human organism or a part thereof, preferably a microorganism, a plant cell, a plant or a part thereof, as compared to a corresponding non-transformed wild type non-human organism or a part thereof; and
[30731] (b) growing the non-human organism or a part thereof under conditions which permit the production of threonine or a composition comprising threonine in said non-human organism or in the culture medium surrounding said non-human organism.

[30732] Accordingly, the present invention relates to a process for the production of threonine, which comprises
[30733] (a) increasing or generating the activity of a ketol-acid reductoisomerase in the cytosol of a cell of a non-human organism or a part thereof, preferably a microorganism, a plant cell, a plant or a part thereof, as compared to a corresponding non-transformed wild type non-human organism or a part thereof; and
[30734] (b) growing the non-human organism or a part thereof under conditions which permit the production of threonine or a composition comprising threonine in said non-human organism or in the culture medium surrounding said non-human organism.

[30735] Accordingly, the present invention relates to a process for the production of threonine, which comprises
[30736] (a) increasing or generating the activity of a enterobacterial common antigen polymerase in the cytosol of a cell of a non-human organism or a part thereof, preferably a microorganism, a plant cell, a plant or a part thereof, as compared to a corresponding non-transformed wild type non-human organism or a part thereof; and
[30737] (b) growing the non-human organism or a part thereof under conditions which permit the production of threonine or a composition comprising threonine in said non-human organism or in the culture medium surrounding said non-human organism.

[30738] Accordingly, the present invention relates to a process for the production of threonine, which comprises
[30739] (a) increasing or generating the activity of a DNA helicase II in the cytosol of a cell of a non-human organism or a part thereof, preferably a microorganism, a plant cell, a plant or a part thereof, as compared to a corresponding non-transformed wild type non-human organism or a part thereof; and
[30740] (b) growing the non-human organism or a part thereof under conditions which permit the production of threonine or a composition comprising threonine in said non-human organism or in the culture medium surrounding said non-human organism.

[30741] Accordingly, the present invention relates to a process for the production of threonine, which comprises
[30742] (a) increasing or generating the activity of a transcriptional regulator in the cytosol of a cell of a non-human organism or a part thereof, preferably a microorganism, a plant cell, a plant or a part thereof, as compared to a corresponding non-transformed wild type non-human organism or a part thereof; and
[30743] (b) growing the non-human organism or a part thereof under conditions which permit the production of threonine or a composition comprising threonine in said non-human organism or in the culture medium surrounding said non-human organism.

[30744] Accordingly, the present invention relates to a process for the production of threonine, which comprises
[30745] (a) increasing or generating the activity of a b3989-protein in the cytosol of a cell of a non-human organism or a part thereof, preferably a microorganism, a plant cell, a plant or a part thereof, as compared to a corresponding non-transformed wild type non-human organism or a part thereof; and
[30746] (b) growing the non-human organism or a part thereof under conditions which permit the production of threonine or a composition comprising threonine in said non-human organism or in the culture medium surrounding said non-human organism.

[30747] Accordingly, the present invention relates to a process for the production of threonine, which comprises
[30748] (a) increasing or generating the activity of a aspartate kinase in the cytosol of a cell of a non-human organism or a part thereof, preferably a microorganism, a plant cell, a plant or a part thereof, as compared to a corresponding non-transformed wild type non-human organism or a part thereof; and
[30749] (b) growing the non-human organism or a part thereof under conditions which permit the production of threonine or a composition comprising threonine in said non-human organism or in the culture medium surrounding said non-human organism.

[30750] Accordingly, the present invention relates to a process for the production of threonine, which comprises
[30751] (a) increasing or generating the activity of a b4029-protein in the cytosol of a cell of a non-human organism or a part thereof, preferably a microorganism, a plant cell, a plant or a part thereof, as compared to a corresponding non-transformed wild type non-human organism or a part thereof; and
[30752] (b) growing the non-human organism or a part thereof under conditions which permit the production of threonine or a composition comprising threonine in said non-human organism or in the culture medium surrounding said non-human organism.

[30753] Accordingly, the present invention relates to a process for the production of threonine, which comprises
[30754] (a) increasing or generating the activity of a b4056-protein in the cytosol of a cell of a non-human organism or a part thereof, preferably a microorganism, a plant cell, a plant or a part thereof, as compared to a corresponding non-transformed wild type non-human organism or a part thereof; and
[30755] (b) growing the non-human organism or a part thereof under conditions which permit the production of threonine or a composition comprising threonine in said non-human organism or in the culture medium surrounding said non-human organism.

[30756] Accordingly, the present invention relates to a process for the production of threonine, which comprises
[30757] (a) increasing or generating the activity of a b4250-protein in the cytosol of a cell of a non-human organism or a part thereof, preferably a microorganism, a plant cell, a plant or a part thereof, as compared to a corresponding non-transformed wild type non-human organism or a part thereof; and
[30758] (b) growing the non-human organism or a part thereof under conditions which permit the production of threonine or a composition comprising threonine in said non-human organism or in the culture medium surrounding said non-human organism.

[30759] Accordingly, the present invention relates to a process for the production of threonine, which comprises
[30760] (a) increasing or generating the activity of a acetyltransferase in the cytosol of a cell of a non-human organism or a part thereof, preferably a microorganism, a plant cell, a plant or a part thereof, as compared to a corresponding non-transformed wild type non-human organism or a part thereof; and
[30761] (b) growing the non-human organism or a part thereof under conditions which permit the production of threonine or a composition comprising threonine in said non-human organism or in the culture medium surrounding said non-human organism.

[30762] Accordingly, the present invention relates to a process for the production of threonine, which comprises
[30763] (a) increasing or generating the activity of a glutaredoxin in the cytosol of a cell of a non-human organism or a part thereof, preferably a microorganism, a plant cell, a plant or a part thereof, as compared to a corresponding non-transformed wild type non-human organism or a part thereof; and
[30764] (b) growing the non-human organism or a part thereof under conditions which permit the production of threonine or a composition comprising threonine in said non-human organism or in the culture medium surrounding said non-human organism.

[30765] Accordingly, the present invention relates to a process for the production of threonine, which comprises
[30766] (a) increasing or generating the activity of a transcription factor in the cytosol of a cell of a non-human organism or a part thereof, preferably a microorganism, a plant cell, a plant or a part thereof, as compared to a corresponding non-transformed wild type non-human organism or a part thereof; and
[30767] (b) growing the non-human organism or a part thereof under conditions which permit the production of threonine or a composition comprising threonine in said non-human organism or in the culture medium surrounding said non-human organism.

[30768] Accordingly, the present invention relates to a process for the production of threonine, which comprises
[30769] (a) increasing or generating the activity of a cyclin D in the cytosol of a cell of a non-human organism or a part thereof, preferably a microorganism, a plant cell, a plant or a part thereof, as compared to a corresponding non-transformed wild type non-human organism or a part thereof; and
[30770] (b) growing the non-human organism or a part thereof under conditions which permit the production of threonine or a composition comprising threonine in said non-human organism or in the culture medium surrounding said non-human organism.

[30771] Accordingly, the present invention relates to a process for the production of threonine, which comprises
[30772] (a) increasing or generating the activity of a heat shock protein in the cytosol of a cell of a non-human organism or a part thereof, preferably a microorganism, a plant cell, a plant or a part thereof, as compared to a corresponding non-transformed wild type non-human organism or a part thereof; and
[30773] (b) growing the non-human organism or a part thereof under conditions which permit the production of threonine or a composition comprising threonine in said non-human organism or in the culture medium surrounding said non-human organism.

[30774] Accordingly, the present invention relates to a process for the production of threonine, which comprises
[30775] (a) increasing or generating the activity of a polyphosphate kinase in the cytosol of a cell of a non-human organism or a part thereof, preferably a microorganism, a plant cell, a plant or a part thereof, as compared to a corresponding non-transformed wild type non-human organism or a part thereof; and
[30776] (b) growing the non-human organism or a part thereof under conditions which permit the production of threonine or a composition comprising threonine in said non-human organism or in the culture medium surrounding said non-human organism.

[30777] Accordingly, the present invention relates to a process for the production of threonine, which comprises
[30778] (a) increasing or generating the activity of a branched chain amino acid ABC transporter ATP-binding protein in the cytosol of a cell of a non-human organism or a part thereof, preferably a microorganism, a plant cell, a plant or a part thereof, as compared to a corresponding non-transformed wild type non-human organism or a part thereof; and
[30779] (b) growing the non-human organism or a part thereof under conditions which permit the production of threonine or a composition comprising threonine in said non-human organism or in the culture medium surrounding said non-human organism.

[30780] Accordingly, the present invention relates to a process for the production of threonine, which comprises
[30781] (a) increasing or generating the activity of a uroporphyrin-III C-methyltransferase in the cytosol of a cell of a non-human organism or a part thereof, preferably a microorganism, a plant cell, a plant or a part thereof, as compared to a corresponding non-transformed wild type non-human organism or a part thereof; and
[30782] (b) growing the non-human organism or a part thereof under conditions which permit the production of threonine or a composition comprising threonine in said non-human organism or in the culture medium surrounding said non-human organism.

[30783] Accordingly, the present invention relates to a process for the production of threonine, which comprises
[30784] (a) increasing or generating the activity of a sll0418-protein in the cytosol of a cell of a non-human organism or a part thereof, preferably a microorganism, a plant cell, a plant or a part thereof, as compared to a corresponding non-transformed wild type non-human organism or a part thereof; and
[30785] (b) growing the non-human organism or a part thereof under conditions which permit the production of threonine or a composition comprising threonine in said non-human organism or in the culture medium surrounding said non-human organism.

[30786] Accordingly, the present invention relates to a process for the production of threonine, which comprises
[30787] (a) increasing or generating the activity of a oxireductase in the cytosol of a cell of a non-human organism or a part thereof, preferably a microorganism, a plant cell, a plant or a part thereof, as compared to a corresponding non-transformed wild type non-human organism or a part thereof; and
[30788] (b) growing the non-human organism or a part thereof under conditions which permit the production of threonine or a composition comprising threonine in said non-human organism or in the culture medium surrounding said non-human organism.

[30789] Accordingly, the present invention relates to a process for the production of threonine, which comprises
[30790] (a) increasing or generating the activity of a malate dehydrogenase in the cytosol of a cell of a non-human organism or a part thereof, preferably a microorganism, a plant cell, a plant or a part thereof, as compared to a corresponding non-transformed wild type non-human organism or a part thereof; and
[30791] (b) growing the non-human organism or a part thereof under conditions which permit the production of threonine or a composition comprising threonine in said non-human organism or in the culture medium surrounding said non-human organism.

[30792] Accordingly, the present invention relates to a process for the production of threonine, which comprises
[30793] (a) increasing or generating the activity of a phosphoribosylaminoimidazole carboxylase catalytic subunit in the cytosol of a cell of a non-human organism or a part thereof, preferably a microorganism, a plant cell, a plant or a part thereof, as compared to a corresponding non-transformed wild type non-human organism or a part thereof; and
[30794] (b) growing the non-human organism or a part thereof under conditions which permit the production of threonine or a composition comprising threonine in said non-human organism or in the culture medium surrounding said non-human organism.

[30795] Accordingly, the present invention relates to a process for the production of threonine, which comprises
[30796] (a) increasing or generating the activity of a glycogen synthase in the cytosol of a cell of a non-human organism or a part thereof, preferably a microorganism, a plant cell, a plant or a part thereof, as compared to a corresponding non-transformed wild type non-human organism or a part thereof; and
[30797] (b) growing the non-human organism or a part thereof under conditions which permit the production of threonine or a composition comprising threonine in said non-human organism or in the culture medium surrounding said non-human organism.

[30798] Accordingly, the present invention relates to a process for the production of threonine, which comprises
[30799] (a) increasing or generating the activity of a glycogen (starch) synthase in the cytosol of a cell of a non-human organism or a part thereof, preferably a microorganism, a plant cell, a plant or a part thereof, as compared to a corresponding non-transformed wild type non-human organism or a part thereof; and
[30800] (b) growing the non-human organism or a part thereof under conditions which permit the production of threonine or a composition comprising threonine in said non-human organism or in the culture medium surrounding said non-human organism.

[30801] Accordingly, the present invention relates to a process for the production of threonine, which comprises
[30802] (a) increasing or generating the activity of a nitrate/nitrite transport protein in the cytosol of a cell of a non-human organism or a part thereof, preferably a microorganism, a plant cell, a plant or a part thereof, as compared to a corresponding non-transformed wild type non-human organism or a part thereof; and
[30803] (b) growing the non-human organism or a part thereof under conditions which permit the production of threonine or a composition comprising threonine in said non-human organism or in the culture medium surrounding said non-human organism.

[30804] Accordingly, the present invention relates to a process for the production of threonine, which comprises
[30805] (a) increasing or generating the activity of a carbamoyl-phosphate synthase subunit in the cytosol of a cell of a non-human organism or a part thereof, preferably a microorganism, a plant cell, a plant or a part thereof, as compared to a corresponding non-transformed wild type non-human organism or a part thereof; and
[30806] (b) growing the non-human organism or a part thereof under conditions which permit the production of threonine or a composition comprising threonine in said non-human organism or in the culture medium surrounding said non-human organism.

[30807] Accordingly, the present invention relates to a process for the production of threonine, which comprises
[30808] (a) increasing or generating the activity of a glutathione S-transferase in the cytosol of a cell of a non-human organism or a part thereof, preferably a microorganism, a plant cell, a plant or a part thereof, as compared to a corresponding non-transformed wild type non-human organism or a part thereof; and
[30809] (b) growing the non-human organism or a part thereof under conditions which permit the production of threonine or a composition comprising threonine in said non-human organism or in the culture medium surrounding said non-human organism.

[30810] Accordingly, the present invention relates to a process for the production of threonine, which comprises
[30811] (a) increasing or generating the activity of a ABC metal ion transporter substrate-binding protein in the cytosol of a cell of a non-human organism or a part thereof, preferably a microorganism, a plant cell, a plant or a part thereof, as compared to a corresponding non-transformed wild type non-human organism or a part thereof; and
[30812] (b) growing the non-human organism or a part thereof under conditions which permit the production of threonine or a composition comprising threonine in said non-human organism or in the culture medium surrounding said non-human organism.

[30813] Accordingly, the present invention relates to a process for the production of threonine, which comprises
[30814] (a) increasing or generating the activity of a coproporphyrinogen III oxidase in the cytosol of a cell of a non-human organism or a part thereof, preferably a microorganism, a plant cell, a plant or a part thereof, as compared to a corresponding non-transformed wild type non-human organism or a part thereof; and
[30815] (b) growing the non-human organism or a part thereof under conditions which permit the production of threonine or a composition comprising threonine in said non-human organism or in the culture medium surrounding said non-human organism.

[30816] Accordingly, the present invention relates to a process for the production of threonine, which comprises
[30817] (a) increasing or generating the activity of a ferredoxin in the cytosol of a cell of a non-human organism or a part thereof, preferably a microorganism, a plant cell, a plant or a part thereof, as compared to a corresponding non-transformed wild type non-human organism or a part thereof; and
[30818] (b) growing the non-human organism or a part thereof under conditions which permit the production of threonine or a composition comprising threonine in said non-human organism or in the culture medium surrounding said non-human organism.

[30819] Accordingly, the present invention relates to a process for the production of threonine, which comprises
[30820] (a) increasing or generating the activity of a slr0383-protein in the cytosol of a cell of a non-human organism or a part thereof, preferably a microorganism, a plant cell, a plant or a part thereof, as compared to a corresponding non-transformed wild type non-human organism or a part thereof; and
[30821] (b) growing the non-human organism or a part thereof under conditions which permit the production of threonine or a composition comprising threonine in said non-human organism or in the culture medium surrounding said non-human organism.

[30822] Accordingly, the present invention relates to a process for the production of threonine, which comprises
[30823] (a) increasing or generating the activity of a bifunctional purine biosynthesis protein in the cytosol of a cell of a non-human organism or a part thereof, preferably a microorganism, a plant cell, a plant or a part thereof, as compared to a corresponding non-transformed wild type non-human organism or a part thereof; and
[30824] (b) growing the non-human organism or a part thereof under conditions which permit the production of threonine or a composition comprising threonine in said non-human organism or in the culture medium surrounding said non-human organism.

[30825] Accordingly, the present invention relates to a process for the production of threonine, which comprises
[30826] (a) increasing or generating the activity of a aspartate kinase in the cytosol of a cell of a non-human organism or a part thereof, preferably a microorganism, a plant cell, a plant or a part thereof, as compared to a corresponding non-transformed wild type non-human organism or a part thereof; and
[30827] (b) growing the non-human organism or a part thereof under conditions which permit the production of threonine or a composition comprising threonine in said non-human organism or in the culture medium surrounding said non-human organism.

[30828] Accordingly, the present invention relates to a process for the production of threonine, which comprises
[30829] (a) increasing or generating the activity of a geranylgeranyl pyrophosphate synthase in the cytosol of a cell of a non-human organism or a part thereof, preferably a microorganism, a plant cell, a plant or a part thereof, as compared to a corresponding non-transformed wild type non-human organism or a part thereof; and
[30830] (b) growing the non-human organism or a part thereof under conditions which permit the production of threonine or a composition comprising threonine in said non-human organism or in the culture medium surrounding said non-human organism.

[30831] Accordingly, the present invention relates to a process for the production of threonine, which comprises
[30832] (a) increasing or generating the activity of a kinase in the cytosol of a cell of a non-human organism or a part thereof, preferably a microorganism, a plant cell, a plant or a part thereof, as compared to a corresponding non-transformed wild type non-human organism or a part thereof; and
[30833] (b) growing the non-human organism or a part thereof under conditions which permit the production of threonine or a composition comprising threonine in said non-human organism or in the culture medium surrounding said non-human organism.

[30834] Accordingly, the present invention relates to a process for the production of threonine, which comprises
[30835] (a) increasing or generating the activity of a argininosuccinate lyase in the cytosol of a cell of a non-human organism or a part thereof, preferably a microorganism, a plant cell, a plant or a part thereof, as compared to a corresponding non-transformed wild type non-human organism or a part thereof; and
[30836] (b) growing the non-human organism or a part thereof under conditions which permit the production of threonine or a composition comprising threonine in said non-human organism or in the culture medium surrounding said non-human organism.

[30837] Accordingly, the present invention relates to a process for the production of threonine, which comprises
[30838] (a) increasing or generating the activity of a photosystem II protein in the cytosol of a cell of a non-human organism or a part thereof, preferably a microorganism, a plant cell, a plant or a part thereof, as compared to a corresponding non-transformed wild type non-human organism or a part thereof; and
[30839] (b) growing the non-human organism or a part thereof under conditions which permit the production of threonine or a composition comprising threonine in said non-human organism or in the culture medium surrounding said non-human organism.

[30840] Accordingly, the present invention relates to a process for the production of threonine, which comprises
[30841] (a) increasing or generating the activity of a cell division protein in the cytosol of a cell of a non-human organism or a part thereof, preferably a microorganism, a plant cell, a plant or a part thereof, as compared to a corresponding non-transformed wild type non-human organism or a part thereof; and
[30842] (b) growing the non-human organism or a part thereof under conditions which permit the production of threonine or a composition comprising threonine in said non-human organism or in the culture medium surrounding said non-human organism.

[30843] Accordingly, the present invention relates to a process for the production of threonine, which comprises
[30844] (a) increasing or generating the activity of a branched-chain amino acid ABC transporter permease protein in the cytosol of a cell of a non-human organism or a part thereof, preferably a microorganism, a plant cell, a plant or a part thereof, as compared to a corresponding non-transformed wild type non-human organism or a part thereof; and
[30845] (b) growing the non-human organism or a part thereof under conditions which permit the production of threonine or a composition comprising threonine in said non-human organism or in the culture medium surrounding said non-human organism.

[30846] Accordingly, the present invention relates to a process for the production of threonine, which comprises
[30847] (a) increasing or generating the activity of a TTC0881-protein in the cytosol of a cell of a non-human organism or a part thereof, preferably a microorganism, a plant cell, a plant or a part thereof, as compared to a corresponding non-transformed wild type non-human organism or a part thereof; and
[30848] (b) growing the non-human organism or a part thereof under conditions which permit the production of threonine or a composition comprising threonine in said non-human organism or in the culture medium surrounding said non-human organism.

[30849] Accordingly, the present invention relates to a process for the production of threonine, which comprises
[30850] (a) increasing or generating the activity of a metal-dependent hydrolase in the cytosol of a cell of a non-human organism or a part thereof, preferably a microorganism, a plant cell, a plant or a part thereof, as compared to a corresponding non-transformed wild type non-human organism or a part thereof; and
[30851] (b) growing the non-human organism or a part thereof under conditions which permit the production of threonine or a composition comprising threonine in said non-human organism or in the culture medium surrounding said non-human organism.

[30852] Accordingly, the present invention relates to a process for the production of threonine, which comprises
[30853] (a) increasing or generating the activity of a homocitrate synthase in the cytosol of a cell of a non-human organism or a part thereof, preferably a microorganism, a plant cell, a plant or a part thereof, as compared to a corresponding non-transformed wild type non-human organism or a part thereof; and
[30854] (b) growing the non-human organism or a part thereof under conditions which permit the production of threonine or a composition comprising threonine in said non-human organism or in the culture medium surrounding said non-human organism.

[30855] Accordingly, the present invention relates to a process for the production of threonine, which comprises
[30856] (a) increasing or generating the activity of a XM_{—}473199-protein in the cytosol of a cell of a non-human organism or a part thereof, preferably a microorganism, a plant cell, a plant or a part thereof, as compared to a corresponding non-transformed wild type non-human organism or a part thereof; and
[30857] (b) growing the non-human organism or a part thereof under conditions which permit the production of threonine or a composition comprising threonine in said non-human organism or in the culture medium surrounding said non-human organism.

[30858] Accordingly, the present invention relates to a process for the production of threonine, which comprises
[30859] (a) increasing or generating the activity of a pyruvate kinase in the cytosol of a cell of a non-human organism or a part thereof, preferably a microorganism, a plant cell, a plant or a part thereof, as compared to a corresponding non-transformed wild type non-human organism or a part thereof; and
[30860] (b) growing the non-human organism or a part thereof under conditions which permit the production of threonine or a composition comprising threonine in said non-human organism or in the culture medium surrounding said non-human organism.

[30861] Accordingly, the present invention relates to a process for the production of threonine, which comprises
[30862] (a) increasing or generating the activity of a transcription factor in the cytosol of a cell of a non-human organism or a part thereof, preferably a microorganism, a plant cell, a plant or a part thereof, as compared to a corresponding non-transformed wild type non-human organism or a part thereof; and
[30863] (b) growing the non-human organism or a part thereof under conditions which permit the production of threonine or a composition comprising threonine in said non-human organism or in the culture medium surrounding said non-human organism.

[30864] Accordingly, the present invention relates to a process for the production of threonine, which comprises
[30865] (a) increasing or generating the activity of a cell division control protein in the cytosol of a cell of a non-human organism or a part thereof, preferably a microorganism, a plant cell, a plant or a part thereof, as compared to a corresponding non-transformed wild type non-human organism or a part thereof; and
[30866] (b) growing the non-human organism or a part thereof under conditions which permit the production of threonine or a composition comprising threonine in said non-human organism or in the culture medium surrounding said non-human organism.

[30867] Accordingly, the present invention relates to a process for the production of threonine, which comprises
[30868] (a) increasing or generating the activity of a pyruvate carboxylase in the cytosol of a cell of a non-human organism or a part thereof, preferably a microorganism, a plant cell, a plant or a part thereof, as compared to a corresponding non-transformed wild type non-human organism or a part thereof; and
[30869] (b) growing the non-human organism or a part thereof under conditions which permit the production of threonine or a composition comprising threonine in said non-human organism or in the culture medium surrounding said non-human organism.

[30870] Accordingly, the present invention relates to a process for the production of threonine, which comprises
[30871] (a) increasing or generating the activity of a ycl027w-protein in the cytosol of a cell of a non-human organism or a part thereof, preferably a microorganism, a plant cell, a plant or a part thereof, as compared to a corresponding non-transformed wild type non-human organism or a part thereof; and
[30872] (b) growing the non-human organism or a part thereof under conditions which permit the production of threonine or a composition comprising threonine in said non-human organism or in the culture medium surrounding said non-human organism.

[30873] Accordingly, the present invention relates to a process for the production of threonine, which comprises
[30874] (a) increasing or generating the activity of a coproporphyrinogen III oxidase in the cytosol of a cell of a non-human organism or a part thereof, preferably a microorganism, a plant cell, a plant or a part thereof, as compared to a corresponding non-transformed wild type non-human organism or a part thereof; and
[30875] (b) growing the non-human organism or a part thereof under conditions which permit the production of threonine or a composition comprising threonine in said non-human organism or in the culture medium surrounding said non-human organism.

[30876] Accordingly, the present invention relates to a process for the production of threonine, which comprises
[30877] (a) increasing or generating the activity of a ydr183w-protein in the cytosol of a cell of a non-human organism or a part thereof, preferably a microorganism, a plant cell, a plant or a part thereof, as compared to a corresponding non-transformed wild type non-human organism or a part thereof; and
[30878] (b) growing the non-human organism or a part thereof under conditions which permit the production of threonine or a composition comprising threonine in said non-human organism or in the culture medium surrounding said non-human organism.

[30879] Accordingly, the present invention relates to a process for the production of threonine, which comprises
[30880] (a) increasing or generating the activity of a hexose transporter in the cytosol of a cell of a non-human organism or a part thereof, preferably a microorganism, a plant cell, a plant or a part thereof, as compared to a corresponding non-transformed wild type non-human organism or a part thereof; and
[30881] (b) growing the non-human organism or a part thereof under conditions which permit the production of threonine or a composition comprising threonine in said non-human organism or in the culture medium surrounding said non-human organism.

[30882] Accordingly, the present invention relates to a process for the production of threonine, which comprises
[30883] (a) increasing or generating the activity of a YEL030C-A-protein in the cytosol of a cell of a non-human organism or a part thereof, preferably a microorganism, a plant cell, a plant or a part thereof, as compared to a corresponding non-transformed wild type non-human organism or a part thereof; and
[30884] (b) growing the non-human organism or a part thereof under conditions which permit the production of threonine or a composition comprising threonine in said non-human organism or in the culture medium surrounding said non-human organism.

[30885] Accordingly, the present invention relates to a process for the production of threonine, which comprises
[30886] (a) increasing or generating the activity of a hexose transporter in the cytosol of a cell of a non-human organism or a part thereof, preferably a microorganism, a plant cell, a plant or a part thereof, as compared to a corresponding non-transformed wild type non-human organism or a part thereof; and
[30887] (b) growing the non-human organism or a part thereof under conditions which permit the production of threonine or a composition comprising threonine in said non-human organism or in the culture medium surrounding said non-human organism.

[30888] Accordingly, the present invention relates to a process for the production of threonine, which comprises
[30889] (a) increasing or generating the activity of a yfl054c-protein in the cytosol of a cell of a non-human organism or a part thereof, preferably a microorganism, a plant cell, a plant or a part thereof, as compared to a corresponding non-transformed wild type non-human organism or a part thereof; and
[30890] (b) growing the non-human organism or a part thereof under conditions which permit the production of threonine or a composition comprising threonine in said non-human organism or in the culture medium surrounding said non-human organism.

[30891] Accordingly, the present invention relates to a process for the production of threonine, which comprises
[30892] (a) increasing or generating the activity of a ygl237c-protein in the cytosol of a cell of a non-human organism or a part thereof, preferably a microorganism, a plant cell, a plant or a part thereof, as compared to a corresponding non-transformed wild type non-human organism or a part thereof; and
[30893] (b) growing the non-human organism or a part thereof under conditions which permit the production of threonine or a composition comprising threonine in said non-human organism or in the culture medium surrounding said non-human organism.

[30894] Accordingly, the present invention relates to a process for the production of threonine, which comprises
[30895] (a) increasing or generating the activity of a yhr131c-protein in the cytosol of a cell of a non-human organism or a part thereof, preferably a microorganism, a plant cell, a plant or a part thereof, as compared to a corresponding non-transformed wild type non-human organism or a part thereof; and
[30896] (b) growing the non-human organism or a part thereof under conditions which permit the production of threonine or a composition comprising threonine in said non-human organism or in the culture medium surrounding said non-human organism.

[30897] Accordingly, the present invention relates to a process for the production of threonine, which comprises
[30898] (a) increasing or generating the activity of a (DL)-glycerol-3-phosphatase in the cytosol of a cell of a non-human organism or a part thereof, preferably a microorganism, a plant cell, a plant or a part thereof, as compared to a corresponding non-transformed wild type non-human organism or a part thereof; and
[30899] (b) growing the non-human organism or a part thereof under conditions which permit the production of threonine or a composition comprising threonine in said non-human organism or in the culture medium surrounding said non-human organism.

[30900] Accordingly, the present invention relates to a process for the production of threonine, which comprises
[30901] (a) increasing or generating the activity of a 3-phosphoglycerate dehydrogenase in the cytosol of a cell of a non-human organism or a part thereof, preferably a microorganism, a plant cell, a plant or a part thereof, as compared to a corresponding non-transformed wild type non-human organism or a part thereof; and
[30902] (b) growing the non-human organism or a part thereof under conditions which permit the production of threonine or a composition comprising threonine in said non-human organism or in the culture medium surrounding said non-human organism.

[30903] Accordingly, the present invention relates to a process for the production of threonine, which comprises
[30904] (a) increasing or generating the activity of a glutathione S-transferase in the cytosol of a cell of a non-human organism or a part thereof, preferably a microorganism, a plant cell, a plant or a part thereof, as compared to a corresponding non-transformed wild type non-human organism or a part thereof; and
[30905] (b) growing the non-human organism or a part thereof under conditions which permit the production of threonine or a composition comprising threonine in said non-human organism or in the culture medium surrounding said non-human organism.

[30906] Accordingly, the present invention relates to a process for the production of threonine, which comprises
[30907] (a) increasing or generating the activity of a DnaJ-like chaperone in the cytosol of a cell of a non-human organism or a part thereof, preferably a microorganism, a plant cell, a plant or a part thereof, as compared to a corresponding non-transformed wild type non-human organism or a part thereof; and
[30908] (b) growing the non-human organism or a part thereof under conditions which permit the production of threonine or a composition comprising threonine in said non-human organism or in the culture medium surrounding said non-human organism.

[30909] Accordingly, the present invention relates to a process for the production of threonine, which comprises
[30910] (a) increasing or generating the activity of a YJL127W-A-protein in the cytosol of a cell of a non-human organism or a part thereof, preferably a microorganism, a plant cell, a plant or a part thereof, as compared to a corresponding non-transformed wild type non-human organism or a part thereof; and
[30911] (b) growing the non-human organism or a part thereof under conditions which permit the production of threonine or a composition comprising threonine in said non-human organism or in the culture medium surrounding said non-human organism.

[30912] Accordingly, the present invention relates to a process for the production of threonine, which comprises
[30913] (a) increasing or generating the activity of a hexose transporter in the cytosol of a cell of a non-human organism or a part thereof, preferably a microorganism, a plant cell, a plant or a part thereof, as compared to a corresponding non-transformed wild type non-human organism or a part thereof; and
[30914] (b) growing the non-human organism or a part thereof under conditions which permit the production of threonine or a composition comprising threonine in said non-human organism or in the culture medium surrounding said non-human organism.

[30915] Accordingly, the present invention relates to a process for the production of threonine, which comprises
[30916] (a) increasing or generating the activity of a homoserine dehydrogenase in the cytosol of a cell of a non-human organism or a part thereof, preferably a microorganism, a plant cell, a plant or a part thereof, as compared to a corresponding non-transformed wild type non-human organism or a part thereof; and
[30917] (b) growing the non-human organism or a part thereof under conditions which permit the production of threonine or a composition comprising threonine in said non-human organism or in the culture medium surrounding said non-human organism.

[30918] Accordingly, the present invention relates to a process for the production of threonine, which comprises
[30919] (a) increasing or generating the activity of a branched chain aminotransferase in the cytosol of a cell of a non-human organism or a part thereof, preferably a microorganism, a plant cell, a plant or a part thereof, as compared to a corresponding non-transformed wild type non-human organism or a part thereof; and
[30920] (b) growing the non-human organism or a part thereof under conditions which permit the production of threonine or a composition comprising threonine in said non-human organism or in the culture medium surrounding said non-human organism.

[30921] Accordingly, the present invention relates to a process for the production of threonine, which comprises
[30922] (a) increasing or generating the activity of a YKL038W-protein in the cytosol of a cell of a non-human organism or a part thereof, preferably a microorganism, a plant cell, a plant or a part thereof, as compared to a corresponding non-transformed wild type non-human organism or a part thereof; and
[30923] (b) growing the non-human organism or a part thereof under conditions which permit the production of threonine or a composition comprising threonine in said non-human organism or in the culture medium surrounding said non-human organism.

[30924] Accordingly, the present invention relates to a process for the production of threonine, which comprises
[30925] (a) increasing or generating the activity of a phosphoenolpyruvate carboxykinase in the cytosol of a cell of a non-human organism or a part thereof, preferably a microorganism, a plant cell, a plant or a part thereof, as compared to a corresponding non-transformed wild type non-human organism or a part thereof; and
[30926] (b) growing the non-human organism or a part thereof under conditions which permit the production of threonine or a composition comprising threonine in said non-human organism or in the culture medium surrounding said non-human organism.

[30927] Accordingly, the present invention relates to a process for the production of threonine, which comprises
[30928] (a) increasing or generating the activity of a aspartate aminotransferase in the cytosol of a cell of a non-human organism or a part thereof, preferably a microorganism, a plant cell, a plant or a part thereof, as compared to a corresponding non-transformed wild type non-human organism or a part thereof; and
[30929] (b) growing the non-human organism or a part thereof under conditions which permit the production of threonine or a composition comprising threonine in said non-human organism or in the culture medium surrounding said non-human organism.

[30930] Accordingly, the present invention relates to a process for the production of threonine, which comprises
[30931] (a) increasing or generating the activity of a mitochondrial dicarboxylate transporter in the cytosol of a cell of a non-human organism or a part thereof, preferably a microorganism, a plant cell, a plant or a part thereof, as compared to a corresponding non-transformed wild type non-human organism or a part thereof; and
[30932] (b) growing the non-human organism or a part thereof under conditions which permit the production of threonine or a composition comprising threonine in said non-human organism or in the culture medium surrounding said non-human organism.

[30933] Accordingly, the present invention relates to a process for the production of threonine, which comprises
[30934] (a) increasing or generating the activity of a phosphate transporter in the cytosol of a cell of a non-human organism or a part thereof, preferably a microorganism, a plant cell, a plant or a part thereof, as compared to a corresponding non-transformed wild type non-human organism or a part thereof; and
[30935] (b) growing the non-human organism or a part thereof under conditions which permit the production of threonine or a composition comprising threonine in said non-human organism or in the culture medium surrounding said non-human organism.

[30936] Accordingly, the present invention relates to a process for the production of threonine, which comprises
[30937] (a) increasing or generating the activity of a protein kinase in the cytosol of a cell of a non-human organism or a part thereof, preferably a microorganism, a plant cell, a plant or a part thereof, as compared to a corresponding non-transformed wild type non-human organism or a part thereof; and
[30938] (b) growing the non-human organism or a part thereof under conditions which permit the production of threonine or a composition comprising threonine in said non-human organism or in the culture medium surrounding said non-human organism.

[30939] Accordingly, the present invention relates to a process for the production of threonine, which comprises
[30940] (a) increasing or generating the activity of a histone acetyltransferase in the cytosol of a cell of a non-human organism or a part thereof, preferably a microorganism, a plant cell, a plant or a part thereof, as compared to a corresponding non-transformed wild type non-human organism or a part thereof; and
[30941] (b) growing the non-human organism or a part thereof under conditions which permit the production of threonine or a composition comprising threonine in said non-human organism or in the culture medium surrounding said non-human organism.

[30942] Accordingly, the present invention relates to a process for the production of threonine, which comprises
[30943] (a) increasing or generating the activity of a cyclin in the cytosol of a cell of a non-human organism or a part thereof, preferably a microorganism, a plant cell, a plant or a part thereof, as compared to a corresponding non-transformed wild type non-human organism or a part thereof; and
[30944] (b) growing the non-human organism or a part thereof under conditions which permit the production of threonine or a composition comprising threonine in said non-human organism or in the culture medium surrounding said non-human organism.

[30945] Accordingly, the present invention relates to a process for the production of threonine, which comprises
[30946] (a) increasing or generating the activity of a Zm_{—}4842_BE510522-protein in the cytosol of a cell of a non-human organism or a part thereof, preferably a microorganism, a plant cell, a plant or a part thereof, as compared to a corresponding non-transformed wild type non-human organism or a part thereof; and
[30947] (b) growing the non-human organism or a part thereof under conditions which permit the production of threonine or a composition comprising threonine in said non-human organism or in the culture medium surrounding said non-human organism.

[30948] Accordingly, the present invention relates to a process for the production of threonine, which comprises
[30949] (a) increasing or generating the activity of a polypeptide comprising a polypeptide as depicted in the respective line in column 5 or 8 of Table II, application no. 4, or a homolog or a fragment thereof, a consensus sequence or at least one polypeptide motif as depicted in the respective line in column 8 of Table IV, application no. 4; or
[30950] increasing or generating the activity of an expression product of one or more nucleic acid molecule(s) comprising a polynucleotide as depicted in the respective line in column 5 or 8 of Table I, application no. 4, preferably the coding region thereof, or a homolog or a fragment thereof;

[30951] in the cytosol of a cell of a non-human organism or a part thereof; preferably a microorganism, a plant cell, a plant or a part thereof, as compared to a corresponding non-transformed wild type non-human organism or a part thereof; and
[30952] (b) growing the non-human organism under conditions which permit the production of threonine, or a composition comprising threonine in said non-human organism or in the culture medium surrounding said non-human organism.

[30953] In a further embodiment the activity of the polypeptide comprising a polypeptide as depicted in the respective line in column 5 or 8 of Table II, application no. 4, or a homolog or a fragment thereof, a consensus sequence or at least one polypeptide motif as depicted in the respective line in column 8 of Table IV, application no. 4, is increased or generated non-targeted in the above-mentioned process in a microorganism or plant or a part thereof.

[30954] In a further embodiment said polypeptide has the activity of the respective polypeptide represented by a protein comprising a polypeptide as depicted in the respective line in column 5 of Table II, application no. 4.

[30955] In a further embodiment the activity of the expression product of one or more nucleic acid molecule(s) comprising a polynucleotide as depicted in the respective line in column 5 or 8 of Table I, application no. 4, preferably the coding region thereof, or a homolog or a fragment thereof, is increased or generated non-targeted in the above-mentioned process in a microorganism or plant or a part thereof.

[30956] In a further embodiment the activity of the polypeptide comprising a polypeptide as depicted in the respective line in column 5 or 8 of Table II, application no. 4, or a homolog or a fragment thereof, a consensus sequence or at least one polypeptide motif as depicted in the respective line in column 8 of Table IV, application no. 4, is increased or generated in the above-mentioned process in an organelle preferably in plastids or mitochondria, especially in plastids, of a microorganism or plant.

[30957] In a further embodiment said polypeptide has the activity of the respective polypeptide represented by a protein comprising a polypeptide as depicted in the respective line in column 5 of Table II, application no. 4.

[30958] In a further embodiment the activity of the expression product of one or more nucleic acid molecule(s) comprising a polynucleotide as depicted in the respective line in column 5 or 8 of Table I, application no. 4, preferably the coding region thereof, or a homolog or a fragment thereof, is increased or generated in the above-mentioned process in an organelle, preferably in plasids or mitochondria, especially in plastids, of a microorganism or plant.

[30959] In a further embodiment the activity of the polypeptide comprising a polypeptide as depicted in the respective line in column 5 or 8 of Table II, application no. 4, or a homolog or a fragment thereof, a consensus sequence or at least one polypeptide motif as depicted in the respective line in column 8 of Table IV, application no. 4, is increased or generated in the above-mentioned process in the cyctosol of a cell, of a microorganism or plant.

[30960] In a further embodiment said polypeptide has the activity of the respective polypeptide represented by a protein comprising a polypeptide as depicted in the respective line in column 5 of Table II, application no. 4.

[30961] In a further embodiment the activity of the expression product of one or more nucleic acid molecule(s) comprising a polynucleotide as depicted in the respective line in column 5 or 8 of Table I, application no. 4, preferably the coding region thereof, or a homolog or a fragment thereof, is increased or generated in the above-mentioned process in the cytosol of a cell, of a microorganism or plant.

[30962] [0039.1.1.4] to [0066.1.1.4] for the disclosure of these paragraphs see [0039.1.1.1] to [0066.1.1.1 ]above.

[30963] As mentioned above the nucleic acid sequences coding for the proteins as shown in Table II, application no. 4, column 5 or 8, or homologs or fragments thereof, are joined to a nucleic acid sequence encoding a plastidic transit peptide, e.g., if for the nucleic acid molecule in Table I, column 6 the term “plastidic” is indicated. This nucleic acid sequence encoding a transit peptide ensures transport of the protein to the organelle. The nucleic acid sequence of the gene to be expressed and the nucleic acid sequence encoding the transit peptide are operably linked. Therefore the transit peptide encoding sequence is fused in frame to the nucleic acid sequence coding for proteins as shown in Table II, application no. 4, column 5 or 8, or homologs or fragments thereof, e.g., if for the nucleic acid molecule in Table I, column 6 the term “plastidic” is indicated.

[30964] [0068.1.1.4] to [0072.1.1.4] for the disclosure of these paragraphs see [0068.1.1.1] to [0072.1.1.1] above.

[30965] As mentioned above the nucleic acid sequences coding for the proteins as shown in the respective line in Table II, application no. 4, column 5 or 8, or homologs or fragments thereof, are joined to a nucleic acid sequence encoding a mitochondric transit peptide, e.g., if for the respective nucleic acid molecule in Table I, column 6 the term “mitochondrial” is indicated. This nucleic acid sequence encoding a transit peptide ensures transport of the protein to the organelle. The nucleic acid sequence of the gene to be expressed and the nucleic acid sequence encoding the transit peptide are operably linked. Therefore the transit peptide encoding sequence is fused in frame to the nucleic acid sequence coding for proteins as shown in the respective line in Table II, application no. 4, column 5 or 8, or homologs or fragments thereof, e.g., if for the nucleic acid molecule in the respective line in Table I, column 6 the term “mitochondrial” is indicated. (For the avoidance of doubt, the term “mitochondric” and “mitochondrial” are interchangeable.)

[30966] [0074.1.1.4] to [0075.1.1.4] for the disclosure of these paragraphs see [0074.1.1.1] to [0075.1.1.1] above.

[30967] Nucleic acid sequences coding for the transit peptides may be chemically synthesized either in part or wholly according to structure of transit peptide sequences disclosed in the prior art. Said natural or chemically synthesized sequences can be directly linked to the sequences encoding the mature protein or via a linker nucleic acid sequence, which may be typically less than 500 base pairs, preferably less than 450, 400, 350, 300, 250 or 200 base pairs, more preferably less than 150, 100, 90, 80, 70, 60, 50, 40 or 30 base pairs and most preferably less than 25, 20, 15, 12, 9, 6 or 3 base pairs in length and are in frame to the coding sequence. Furthermore favorable nucleic acid sequences encoding transit peptides may comprise sequences derived from more than one biological and/or chemical source and may include a nucleic acid sequence derived from the amino-terminal region of the mature protein, which in its native state is linked to the transit peptide. In a preferred embodiment of the invention said amino-terminal region of the mature protein is typically less than 150 amino acids, preferably less than 140, 130, 120, 110, 100 or 90 amino acids, more preferably less than 80, 70, 60, 50, 40, 35, 30, 25 or 20 amino acids and most preferably less than 19, 18, 17, 16, 15, 14, 13, 12, 11 or 10 amino acids in length. But even shorter or longer stretches are also possible. In addition target sequences, which facilitate the transport of proteins to other cell compartments such as the vacuole, endoplasmic reticulum, golgi complex, glyoxysomes, peroxisomes, mitochondria (in case of a plastidal transit peptide) or plastids, especially chloroplasts (in case of a mitochondric transit peptide) may be also part of the inventive nucleic acid sequence. The proteins translated from said inventive nucleic acid sequences are a kind of fusion proteins that means the nucleic acid sequences encoding the plastidal transit peptide for example the ones shown in Table a, preferably the last one of the Table a are joint to the respective nucleic acid sequences shown in Table I, application no. 4, columns 5 or 8, especially the coding region thereof, or homologs or fragments thereof, in case of nucleic acid sequences being expressed in plastids, and that means the nucleic acid sequences encoding the mitochondric transit peptide for example the ones shown in Table b, preferably the last one of the Table b are joint to the respective nucleic acid sequences shown in Table I, application no. 4, columns 5 or 8, especially the coding region thereof, or homologs or fragments thereof, in case of nucleic acid sequences being expressed in mitochondria. The person skilled in the art is able to join said sequences in a functional manner. Advantageously the transit peptide part is cleaved off from the protein part shown in Table II, application no. 4, columns 5 or 8, or a homolog or fragment thereof, during or after the transport into the organelles, preferably into the plastids or mitochondria, respectively.

[30968] All products of the cleavage of the preferred transit peptide shown in the last line of Table a have preferably the N-terminal amino acid sequences QIA CSS or QIA EFQLTT in front of the start methionine of the respective protein mentioned in Table II, application no. 4, column 5 or 8. or homologs or fragments thereof. Other short amino acid sequences of an range of 1 to 20 amino acids preferable 2 to 15 amino acids, more preferable 3 to 10 amino acids most preferably 4 to 8 amino acids are also possible in front of the start methionine of the protein mentioned in Table II, application no. 4, columns 5 or 8, or homologs or fragments thereof. In case of the amino acid sequence QIA CSS the three amino acids in front of the start methionine are stemming from the LIC (=ligatation independent cloning) cassette. Said short amino acid sequence is preferred in the case of the expression of E. coli genes. In case of the amino acid sequence QIA EFQLTT the six amino acids in front of the start methionine are stemming from the LIC cassette. Said short amino acid sequence is preferred in the case of the expression of S. cerevisiae genes. The skilled worker knowns that other short sequences are also useful in the expression of the respective nucleic acid molecule comprising a polynucleotide as depicted in Table I, application no. 4, column 5 or 8, preferably the coding region thereof, or a homolog or a fragment thereof. Furthermore the skilled worker is aware of the fact that there is not a need for such short sequences in the expression of the genes.

[30969] [0077.1.1.4] to [0078.1.1.4] for the disclosure of these paragraphs see [0077.1.1.1] to [0078.1.1.1] above.

[30970] Alternatively to the targeting of the respective sequences shown in Table II, application no. 4, columns 5 or 8, or homologs or fragments thereof, preferably of sequences in general encoded in the nucleus with the aid of the targeting sequences mentioned for example in Table a alone, Table b alone, or in combination with other targeting sequences preferably into plastids or mitochondria, respectively, the nucleic acids of the invention can directly be introduced into the plastidal or mitochondrial genome. Therefore in a preferred embodiment the respective nucleic acid sequences shown in the respective line in Table I, application no. 4, columns 5 or 8, preferably the coding region thereof, or homologs or fragments thereof, are directly introduced and expressed in plastids e.g., if for the nucleic acid molecule in the respective line in Table I, column 6, the term “plastidic” is indicated, or are directly introduced and expressed in mitochondria e.g., if for the nucleic acid molecule in the respective line in Table I, column 6 the term “mitochondrial” is indicated.

[30971] The term “introduced” in the context of this specification shall mean the insertion of a nucleic acid sequence into the organism by means of a “transfection”, “transduction” or preferably by “transformation”.

[30972] A plastid, such as a chloroplast, or a mitochondrion, has been “transformed” by an exogenous (preferably foreign) nucleic acid sequence if a nucleic acid sequence has been introduced into the plastid or mitochondrion that means that this sequence has crossed the membrane or the membranes of the plastid or of the mitochondrion. The exogenous, preferably foreign, DNA may be integrated (covalently linked) into plastid or mitochondrial DNA making up the genome of the plastid or mitochondrion, or it may remain unintegrated (e.g., by including a chloroplast origin of replication). “Stably” integrated DNA sequences are those, which are inherited through plastid or mitochondrion replication, thereby transferring new plastids or mitochondria, with the features of the integrated DNA sequence to the progeny.

[30973] [0080.1.1.4] to [0083.1.1.4] for the disclosure of this paragraph see [0080.1.1.1] to [0083.1.1.1] above.

[30974] For the process of the present invention it may be of great advantage that by transforming the plastids the intraspecies specific transgene flow is blocked, because a lot of species such as corn, cotton and rice have a strict maternal inheritance of plastids. By placing the respective genes specified in the respective line in Table I, application no. 4, columns 5 or 8, preferably the coding region, or homologs or fragments thereof, e.g. if for the nucleic acid molecule in the respective line in column 6 of Table I the term “plastidic” is indicated, in the plastids of plants, these genes will not be present in the pollen of said plants.

[30975] A further preferred embodiment of the invention relates to the use of so called “chloroplast localization sequences”, in which a first RNA sequence or molecule is capable of transporting or “chaperoning” a second RNA sequence, such as a RNA sequence transcribed from the sequences depicted in the respective line in Table I, application no. 4, columns 5 or 8, preferably the coding region thereof, or a homolog or a fragment thereof, or a sequence encoding a protein, as depicted in the respective line in Table II, application no. 4, columns 5 and 8, or a homolog or a fragment thereof, from an external environment inside a cell or outside a plastid into a chloroplast. In one embodiment the chloroplast localization signal is substantially similar or complementary to a complete or intact viroid sequence. The chloroplast localization signal may be encoded by a DNA sequence, which is transcribed into the chloroplast localization RNA. The term “viroid” refers to a naturally occurring single stranded RNA molecule (Flores, C. R. Acad. Sci. III. 324 (10), 943 (2001)). Viroids usually contain about 200-500 nucleotides and generally exist as circular molecules. Examples of viroids that contain chloroplast localization signals include but are not limited to ASBVd, PLMVd, CChMVd and ELVd. The viroid sequence or a functional part of it can be fused to the sequences depicted in the respective line in Table I, application no. 4, columns 5 or 8, preferably the coding region thereof, or a homolog or a fragment thereof, or a sequence encoding a protein, as depicted in the respective line in Table II, application no. 4, columns 5 or 8, or a homolog or a fragment thereof, in such a manner that the viroid sequence transports a sequence transcribed from a sequence as depicted in the respective line in Table I, application no. 4 columns 5 or 8, preferably the coding region thereof, or a homolog or a fragment thereof, or a sequence encoding a protein as depicted in the respective line in Table II, application no. 4 columns 5 or 8, or a homolog or a fragment thereof, into the chloroplasts, e.g. if for the nucleic acid molecule in column 6 of Table I the term “plastidic” is indicated. A preferred embodiment uses a modified ASBVd (Navarro et al., Virology. 268 (1), 218 (2000)).

[30976] In a further specific embodiment the protein to be expressed in the plastids such as the proteins depicted in the respective line in Table II, application no. 4, columns 5 or 8, or a homolog or a fragment thereof, e.g. if for the nucleic acid molecule in the respective line in column 6 of Table I the term “plastidic” is indicated, are encoded by different nucleic acids. Such a method is disclosed in WO 2004/040973, which shall be incorporated by reference. WO 2004/040973 teaches a method, which relates to the translocation of an RNA corresponding to a gene or gene fragment into the chloroplast by means of a chloroplast localization sequence. The genes, which should be expressed in the plant or plant cells, are split into nucleic acid fragments, which are introduced into different compartments in the plant e.g. the nucleus, the plastids and/or mitochondria. Additionally plant cells are described in which the chloroplast contains a ribozyme fused at one end to an RNA encoding a fragment of a protein used in the inventive process such that the ribozyme can trans-splice the translocated fusion RNA to the RNA encoding the gene fragment to form and as the case may be reunite the nucleic acid fragments to an intact mRNA encoding a functional protein for example as disclosed in the respective line in Table II, application no. 4, columns 5 or 8, or a homolog or a fragment thereof.

[30977] In a preferred embodiment of the invention the nucleic acid sequences as shown in the respective line in Table I, application no. 4, columns 5 or 8, preferably the coding region thereof, or homologs or fragments thereof, e.g. if for the nucleic acid molecule in the respective line in column 6 of Table I the term “plastidic” is indicated, used in the inventive process are transformed into plastids, which are metabolically active. Those plastids should preferably maintain at a high copy number in the plant or plant tissue of interest, most preferably the chloroplasts found in green plant tissues, such as leaves or cotyledons or in seeds.

[30978] For a good expression in the plastids the nucleic acid sequences as shown in the respective line in Table I, application no. 4, columns 5 or 8, preferably the coding region thereof, or homologs or fragments thereof, e.g. if for the nucleic acid molecule in the respective line in column 6 of Table I the term “plastidic” is indicated, are introduced into an expression cassette using preferably a promoter and terminater, which are active in plastids preferably a chloroplast promoter. Examples of such promoters include the psbA promoter from the gene from spinach or pea, the rbcL promoter, and the atpB promoter from corn.

[30979] [0089.1.1.4] to [0092.1.1.4] for the disclosure of these paragraphs see [0089.1.1.1] to [0092.1.1.1] above.

[30980] Advantageously the process for the production of the fine chemical threonine leads to an enhanced production of the respective fine chemical. The terms “enhanced” or “increase” mean at least a 10%, 20%, 30%, 40% or 50%, preferably at least 60%, 70%, 80%, 90% or 100%, more preferably 150%, 200%, 300%, 400% or 500% higher production of the respective fine chemical threonine in comparison to the wild-type as defined above, e.g. that means in comparison to a non-human organism without the aforementioned modification of the activity of a protein as shown in the respective line in Table II, application no. 4, column 5 or 8, or a fragment or a homolog thereof. The modification of the activity of a protein as shown in the respective line in Table II, application no. 4, column 5 or 8, or a homolog or a fragment thereof, or their combination can be achieved by joining the protein to a respective transit peptide, e.g. if for the respective encoding nucleic acid molecule in column 6 of Table I the term “plastidic” or “mitochondrial” is indicated.

[30981] Surprisingly it was found, that the transgenic expression of a protein as shown in the respective line in Table II, application no. 4, column 5, especially from the Saccaromyces cerevisiae, E. coli, Arabidopsis thaliana, Azotobacter vinelandii, Brassica napus, Glycine max, Oryza sativa, Physcomitrella patens, Synechocystis sp., Thermus thermophilus, Zea mays in a non-human organism, like a plant or a part thereof, such as Arabidopsis thaliana for example, or a microorganism, conferred a production of or an increase in threonine,respectively, to the transgenic non-human organism as compared to a corresponding non-transformed wild type.

[30982] In one embodiment the transgenic expression of a protein as shown in the respective line in Table II, application no. 4, column 5 or 8, or a homolog or a fragment thereof, especially from the Saccaromyces cerevisiae, E. coli, Arabidopsis thaliana, Azotobacter vinelandii, Brassica napus, Glycine max, Oryza sativa, Physcomitrella patens, Synechocystis sp., Thermus thermophilus, Zea mays in a non-human organism, like a plant or a part thereof, such as Arabidopsis thaliana for example, or a microorganism, conferred a production of or an increase in threonine,respectively, to the transgenic non-human organism as compared to a corresponding non-transformed wild type.

[30983] Accordingly, in one embodiment, an increase of threonine in a non-human organism, as compared to a corresponding non-transformed wild type non-human organism, is conferred in the process of the invention, if the activity of a polypeptide showing the activity of a 47266012-protein, or if the activity of the polypeptide 47266012_SOYBEAN, preferably represented by SEQ ID NO. 15188, or a homolog or fragment thereof, or if the activity of a polypeptide encoded by a nucleic acid molecule comprising the nucleic acid SEQ ID NO. 15187, preferably the coding region thereof, or a homolog or fragment thereof, e.g. derived from Glycine max, is increased or generated. For example the activity of a nucleic acid molecule or a polypeptide comprising the nucleic acid, preferably the coding region thereof, or polypeptide or the consensus sequence or the polypeptide motif, as depicted in Table I, II or IV, application No. 4, column 5 or 8 in the respective same line as the nucleic acid molecule SEQ ID NO. 15187 or polypeptide SEQ ID NO. 15188, respectively, or a homolog or a fragment thereof, is increased or generated, or if the activity 47266012-protein is increased or generated in a non-human organism, like a microorganism or a plant cell, plant or part thereof, especially with non-targeted localization, For example, an increase of the threonine of at least 1 percent, particularly in a range of 19 to 26-percent is conferred as compared to a corresponding non-transformed wild type non-human organism.

[30984] Accordingly, in one embodiment, an increase of threonine in a non-human organism, as compared to a corresponding non-transformed wild type non-human organism, is conferred in the process of the invention, if the activity of a polypeptide showing the activity of a 49747384_SOYBEAN-protein, or if the activity of the polypeptide 49747384_SOYBEAN, preferably represented by SEQ ID NO. 70, or a homolog or fragment thereof, or if the activity of a polypeptide encoded by a nucleic acid molecule comprising the nucleic acid SEQ ID NO. 69, preferably the coding region thereof, or a homolog or fragment thereof, e.g. derived from Glycine max, is increased or generated. For example the activity of a nucleic acid molecule or a polypeptide comprising the nucleic acid, preferably the coding region thereof, or polypeptide or the consensus sequence or the polypeptide motif, as depicted in Table I, II or IV, application No. 4, column 5 or 8 in the respective same line as the nucleic acid molecule SEQ ID NO. 69 or polypeptide SEQ ID NO. 70, respectively, or a homolog or a fragment thereof, is increased or generated, or if the activity 49747384_SOYBEAN-protein is increased or generated in a non-human organism, like a microorganism or a plant cell, plant or part thereof, especially with non-targeted localization, For example, an increase of the threonine of at least 1 percent, particularly in a range of 31 to 100 -percent is conferred as compared to a corresponding non-transformed wild type non-human organism.

[30985] Accordingly, in one embodiment, an increase of threonine in a non-human organism, as compared to a corresponding non-transformed wild type non-human organism, is conferred in the process of the invention, if the activity of a polypeptide showing the activity of a glucose-6-phosphate 1-dehydrogenase, or if the activity of the polypeptide 59582753_SOYBEAN, preferably represented by SEQ ID NO. 16884, or a homolog or fragment thereof, or if the activity of a polypeptide encoded by a nucleic acid molecule comprising the nucleic acid SEQ ID NO. 16883, preferably the coding region thereof, or a homolog or fragment thereof, e.g. derived from Glycine max, is increased or generated. For example the activity of a nucleic acid molecule or a polypeptide comprising the nucleic acid, preferably the coding region thereof, or polypeptide or the consensus sequence or the polypeptide motif, as depicted in Table I, II or IV, application No. 4, column 5 or 8 in the respective same line as the nucleic acid molecule SEQ ID NO. 16883 or polypeptide SEQ ID NO. 16884, respectively, or a homolog or a fragment thereof, is increased or generated, or if the activity glucose-6-phosphate 1-dehydrogenase is increased or generated in a non-human organism, like a microorganism or a plant cell, plant or part thereof, especially with plastidic localization, For example, an increase of the threonine of at least 1 percent, partitularly in a range of 16 to 54 -percent is conferred as compared to a corresponding non-transformed wild type non-human organism.

[30986] Accordingly, in one embodiment, an increase of threonine in a non-human organism, as compared to a corresponding non-transformed wild type non-human organism, is conferred in the process of the invention, if the activity of a polypeptide showing the activity of a At1g09680-protein, or if the activity of the polypeptide At1g09680, preferably represented by SEQ ID NO. 353, or a homolog or fragment thereof, or if the activity of a polypeptide encoded by a nucleic acid molecule comprising the nucleic acid SEQ ID NO. 352, preferably the coding region thereof, or a homolog or fragment thereof, e.g. derived from Arabidopsis thaliana, is increased or generated. For example the activity of a nucleic acid molecule or a polypeptide comprising the nucleic acid, preferably the coding region thereof, or polypeptide or the consensus sequence or the polypeptide motif, as depicted in Table I, II or IV, application No. 4, column 5 or 8 in the respective same line as the nucleic acid molecule SEQ ID NO. 352 or polypeptide SEQ ID NO. 353, respectively, or a homolog or a fragment thereof, is increased or generated, or if the activity At1g09680-protein is increased or generated in a non-human organism, like a microorganism or a plant cell, plant or part thereof, especially with non-targeted localization, For example, an increase of the threonine of at least 1 percent, particularly in a range of 18 to 69-percent is conferred as compared to a corresponding non-transformed wild type non-human organism.

[30987] Accordingly, in one embodiment, an increase of threonine in a non-human organism, as compared to a corresponding non-transformed wild type non-human organism, is conferred in the process of the invention, if the activity of a polypeptide showing the activity of a bifunctional aspartokinase/homoserine dehydrogenase, or if the activity of the polypeptide At1g31230, preferably represented by SEQ ID NO. 628, or a homolog or fragment thereof, or if the activity of a polypeptide encoded by a nucleic acid molecule comprising the nucleic acid SEQ ID NO. 627, preferably the coding region thereof, or a homolog or fragment thereof, e.g. derived from Arabidopsis thaliana, is increased or generated. For example the activity of a nucleic acid molecule or a polypeptide comprising the nucleic acid, preferably the coding region thereof, or polypeptide or the consensus sequence or the polypeptide motif, as depicted in Table I, II or IV, application No. 4, column 5 or 8 in the respective same line as the nucleic acid molecule SEQ ID NO. 627 or polypeptide SEQ ID NO. 628, respectively, or a homolog or a fragment thereof, is increased or generated, or if the activity bifunctional aspartokinase/homoserine dehydrogenase is increased or generated in a non-human organism, like a microorganism or a plant cell, plant or part thereof, especially with non-targeted localization, For example, an increase of the threonine of at least 1 percent, particularly in a range of 231 to 2283-percent is conferred as compared to a corresponding non-transformed wild type non-human organism.

[30988] Accordingly, in one embodiment, an increase of threonine in a non-human organism, as compared to a corresponding non-transformed wild type non-human organism, is conferred in the process of the invention, if the activity of a polypeptide showing the activity of a eukaryotic translation initiation factor 5, or if the activity of the polypeptide At1g36730, preferably represented by SEQ ID NO. 17969, or a homolog or fragment thereof, or if the activity of a polypeptide encoded by a nucleic acid molecule comprising the nucleic acid SEQ ID NO. 17968, preferably the coding region thereof, or a homolog or fragment thereof, e.g. derived from Arabidopsis thaliana, is increased or generated. For example the activity of a nucleic acid molecule or a polypeptide comprising the nucleic acid, preferably the coding region thereof, or polypeptide or the consensus sequence or the polypeptide motif, as depicted in Table I, II or IV, application No. 4, column 5 or 8 in the respective same line as the nucleic acid molecule SEQ ID NO. 17968 or polypeptide SEQ ID NO. 17969, respectively, or a homolog or a fragment thereof, is increased or generated, or if the activity eukaryotic translation initiation factor 5 is increased or generated in a non-human organism, like a microorganism or a plant cell, plant or part thereof, especially with non-targeted localization, For example, an increase of the threonine of at least 1 percent, particularly in a range of 18 to 84-percent is conferred as compared to a corresponding non-transformed wild type non-human organism.

[30989] Accordingly, in one embodiment, an increase of threonine in a non-human organism, as compared to a corresponding non-transformed wild type non-human organism, is conferred in the process of the invention, if the activity of a polypeptide showing the activity of a transcriptional regulator, or if the activity of the polypeptide At1g43850, preferably represented by SEQ ID NO. 18071, or a homolog or fragment thereof, or if the activity of a polypeptide encoded by a nucleic acid molecule comprising the nucleic acid SEQ ID NO. 18070, preferably the coding region thereof, or a homolog or fragment thereof, e.g. derived from Arabidopsis thaliana, is increased or generated. For example the activity of a nucleic acid molecule or a polypeptide comprising the nucleic acid, preferably the coding region thereof, or polypeptide or the consensus sequence or the polypeptide motif, as depicted in Table I, II or IV, application No. 4, column 5 or 8 in the respective same line as the nucleic acid molecule SEQ ID NO. 18070 or polypeptide SEQ ID NO. 18071, respectively, or a homolog or a fragment thereof, is increased or generated, or if the activity transcriptional regulator is increased or generated in a non-human organism, like a microorganism or a plant cell, plant or part thereof, especially with non-targeted localization, For example, an increase of the threonine of at least 1 percent, particularly in a range of 18 to 144-percent is conferred as compared to a corresponding non-transformed wild type non-human organism.

[30990] Accordingly, in one embodiment, an increase of threonine in a non-human organism, as compared to a corresponding non-transformed wild type non-human organism, is conferred in the process of the invention, if the activity of a polypeptide showing the activity of a protein phosphatase, or if the activity of the polypeptide At1g48040, preferably represented by SEQ ID NO. 813, or a homolog or fragment thereof, or if the activity of a polypeptide encoded by a nucleic acid molecule comprising the nucleic acid SEQ ID NO. 812, preferably the coding region thereof, or a homolog or fragment thereof, e.g. derived from Arabidopsis thaliana, is increased or generated. For example the activity of a nucleic acid molecule or a polypeptide comprising the nucleic acid, preferably the coding region thereof, or polypeptide or the consensus sequence or the polypeptide motif, as depicted in Table I, II or IV, application No. 4, column 5 or 8 in the respective same line as the nucleic acid molecule SEQ ID NO. 812 or polypeptide SEQ ID NO. 813, respectively, or a homolog or a fragment thereof, is increased or generated, or if the activity protein phosphatase is increased or generated in a non-human organism, like a microorganism or a plant cell, plant or part thereof, especially with non-targeted localization, For example, an increase of the threonine of at least 1 percent, particularly in a range of 24 to 88-percent is conferred as compared to a corresponding non-transformed wild type non-human organism.

[30991] Accordingly, in one embodiment, an increase of threonine in a non-human organism, as compared to a corresponding non-transformed wild type non-human organism, is conferred in the process of the invention, if the activity of a polypeptide showing the activity of a protein kinase, or if the activity of the polypeptide At1g48260, preferably represented by SEQ ID NO. 18236, or a homolog or fragment thereof, or if the activity of a polypeptide encoded by a nucleic acid molecule comprising the nucleic acid SEQ ID NO. 18235, preferably the coding region thereof, or a homolog or fragment thereof, e.g. derived from Arabidopsis thaliana, is increased or generated. For example the activity of a nucleic acid molecule or a polypeptide comprising the nucleic acid, preferably the coding region thereof, or polypeptide or the consensus sequence or the polypeptide motif, as depicted in Table I, II or IV, application No. 4, column 5 or 8 in the respective same line as the nucleic acid molecule SEQ ID NO. 18235 or polypeptide SEQ ID NO. 18236, respectively, or a homolog or a fragment thereof, is increased or generated, or if the activity protein kinase is increased or generated in a non-human organism, like a microorganism or a plant cell, plant or part thereof, especially with non-targeted localization, For example, an increase of the threonine of at least 1 percent, particularly in a range of 29 to 127-percent is conferred as compared to a corresponding non-transformed wild type non-human organism.

[30992] Accordingly, in one embodiment, an increase of threonine in a non-human organism, as compared to a corresponding non-transformed wild type non-human organism, is conferred in the process of the invention, if the activity of a polypeptide showing the activity of a protein phosphatase, or if the activity of the polypeptide At1g72770, preferably represented by SEQ ID NO. 19420, or a homolog or fragment thereof, or if the activity of a polypeptide encoded by a nucleic acid molecule comprising the nucleic acid SEQ ID NO. 19419, preferably the coding region thereof, or a homolog or fragment thereof, e.g. derived from Arabidopsis thaliana, is increased or generated. For example the activity of a nucleic acid molecule or a polypeptide comprising the nucleic acid, preferably the coding region thereof, or polypeptide or the consensus sequence or the polypeptide motif, as depicted in Table I, II or IV, application No. 4, column 5 or 8 in the respective same line as the nucleic acid molecule SEQ ID NO. 19419 or polypeptide SEQ ID NO. 19420, respectively, or a homolog or a fragment thereof, is increased or generated, or if the activity protein phosphatase is increased or generated in a non-human organism, like a microorganism or a plant cell, plant or part thereof, especially with non-targeted localization, For example, an increase of the threonine of at least 1 percent, particularly in a range of 41 to 302-percent is conferred as compared to a corresponding non-transformed wild type non-human organism.

[30993] Accordingly, in one embodiment, an increase of threonine in a non-human organism, as compared to a corresponding non-transformed wild type non-human organism, is conferred in the process of the invention, if the activity of a polypeptide showing the activity of a protein phosphatase, or if the activity of the polypeptide At2g25070, preferably represented by SEQ ID NO. 1299, or a homolog or fragment thereof, or if the activity of a polypeptide encoded by a nucleic acid molecule comprising the nucleic acid SEQ ID NO. 1298, preferably the coding region thereof, or a homolog or fragment thereof, e.g. derived from Arabidopsis thaliana, is increased or generated. For example the activity of a nucleic acid molecule or a polypeptide comprising the nucleic acid, preferably the coding region thereof, or polypeptide or the consensus sequence or the polypeptide motif, as depicted in Table I, II or IV, application No. 4, column 5 or 8 in the respective same line as the nucleic acid molecule SEQ ID NO. 1298 or polypeptide SEQ ID NO. 1299, respectively, or a homolog or a fragment thereof, is increased or generated, or if the activity protein phosphatase is increased or generated in a non-human organism, like a microorganism or a plant cell, plant or part thereof, especially with non-targeted localization, For example, an increase of the threonine of at least 1 percent, particularly in a range of 27 to 148-percent is conferred as compared to a corresponding non-transformed wild type non-human organism.

[30994] Accordingly, in one embodiment, an increase of threonine in a non-human organism, as compared to a corresponding non-transformed wild type non-human organism, is conferred in the process of the invention, if the activity of a polypeptide showing the activity of a glutaredoxin, or if the activity of the polypeptide At2g30540, preferably represented by SEQ ID NO. 20347, or a homolog or fragment thereof, or if the activity of a polypeptide encoded by a nucleic acid molecule comprising the nucleic acid SEQ ID NO. 20346, preferably the coding region thereof, or a homolog or fragment thereof, e.g. derived from Arabidopsis thaliana, is increased or generated. For example the activity of a nucleic acid molecule or a polypeptide comprising the nucleic acid, preferably the coding region thereof, or polypeptide or the consensus sequence or the polypeptide motif, as depicted in Table I, II or IV, application No. 4, column 5 or 8 in the respective same line as the nucleic acid molecule SEQ ID NO. 20346 or polypeptide SEQ ID NO. 20347, respectively, or a homolog or a fragment thereof, is increased or generated, or if the activity glutaredoxin is increased or generated in a non-human organism, like a microorganism or a plant cell, plant or part thereof, especially with non-targeted localization, For example, an increase of the threonine of at least 1 percent, particularly in a range of 21 to 74-percent is conferred as compared to a corresponding non-transformed wild type non-human organism.

[30995] Accordingly, in one embodiment, an increase of threonine in a non-human organism, as compared to a corresponding non-transformed wild type non-human organism, is conferred in the process of the invention, if the activity of a polypeptide showing the activity of a CCAAT-binding transcription factor, or if the activity of the polypeptide At3g20910, preferably represented by SEQ ID NO. 22922, or a homolog or fragment thereof, or if the activity of a polypeptide encoded by a nucleic acid molecule comprising the nucleic acid SEQ ID NO. 22921, preferably the coding region thereof, or a homolog or fragment thereof, e.g. derived from Arabidopsis thaliana, is increased or generated. For example the activity of a nucleic acid molecule or a polypeptide comprising the nucleic acid, preferably the coding region thereof, or polypeptide or the consensus sequence or the polypeptide motif, as depicted in Table I, II or IV, application No. 4, column 5 or 8 in the respective same line as the nucleic acid molecule SEQ ID NO. 22921 or polypeptide SEQ ID NO. 22922, respectively, or a homolog or a fragment thereof, is increased or generated, or if the activity CCAAT-binding transcription factor is increased or generated in a non-human organism, like a microorganism or a plant cell, plant or part thereof, especially with non-targeted localization, For example, an increase of the threonine of at least 1 percent, particularly in a range of 19 to 52-percent is conferred as compared to a corresponding non-transformed wild type non-human organism.

[30996] Accordingly, in one embodiment, an increase of threonine in a non-human organism, as compared to a corresponding non-transformed wild type non-human organism, is conferred in the process of the invention, if the activity of a polypeptide showing the activity of a protein kinase, or if the activity of the polypeptide At3g23000, preferably represented by SEQ ID NO. 1816, or a homolog or fragment thereof, or if the activity of a polypeptide encoded by a nucleic acid molecule comprising the nucleic acid SEQ ID NO. 1815, preferably the coding region thereof, or a homolog or fragment thereof, e.g. derived from Arabidopsis thaliana, is increased or generated.

[30997] For example the activity of a nucleic acid molecule or a polypeptide comprising the nucleic acid, preferably the coding region thereof, or polypeptide or the consensus sequence or the polypeptide motif, as depicted in Table I, II or IV, application No. 4, column 5 or 8 in the respective same line as the nucleic acid molecule SEQ ID NO. 1815 or polypeptide SEQ ID NO. 1816, respectively, or a homolog or a fragment thereof, is increased or generated, or if the activity protein kinase is increased or generated in a non-human organism, like a microorganism or a plant cell, plant or part thereof, especially with non-targeted localization, For example, an increase of the threonine of at least 1 percent, particularly in a range of 16 to 83-percent is conferred as compared to a corresponding non-transformed wild type non-human organism.

[30998] Accordingly, in one embodiment, an increase of threonine in a non-human organism, as compared to a corresponding non-transformed wild type non-human organism, is conferred in the process of the invention, if the activity of a polypeptide showing the activity of a glycosyl transferase, or if the activity of the polypeptide At3g27540, preferably represented by SEQ ID NO. 68778, or a homolog or fragment thereof, or if the activity of a polypeptide encoded by a nucleic acid molecule comprising the nucleic acid SEQ ID NO. 68777, preferably the coding region thereof, or a homolog or fragment thereof, e.g. derived from Arabidopsis thaliana, is increased or generated. For example the activity of a nucleic acid molecule or a polypeptide comprising the nucleic acid, preferably the coding region thereof, or polypeptide or the consensus sequence or the polypeptide motif, as depicted in Table I, II or IV, application No. 4, column 5 or 8 in the respective same line as the nucleic acid molecule SEQ ID NO. 68777 or polypeptide SEQ ID NO. 68778, respectively, or a homolog or a fragment thereof, is increased or generated, or if the activity glycosyl transferase is increased or generated in a non-human organism, like a microorganism or a plant cell, plant or part thereof, especially with non-targeted localization, For example, an increase of the threonine of at least 1 percent, particularly in a range of 20 to 48-percent is conferred as compared to a corresponding non-transformed wild type non-human organism.

[30999] Accordingly, in one embodiment, an increase of threonine in a non-human organism, as compared to a corresponding non-transformed wild type non-human organism, is conferred in the process of the invention, if the activity of a polypeptide showing the activity of a monthiol glutaredoxin, or if the activity of the polypeptide At3g62930, preferably represented by SEQ ID NO. 2574, or a homolog or fragment thereof, or if the activity of a polypeptide encoded by a nucleic acid molecule comprising the nucleic acid SEQ ID NO. 2573, preferably the coding region thereof, or a homolog or fragment thereof, e.g. derived from Arabidopsis thaliana, is increased or generated. For example the activity of a nucleic acid molecule or a polypeptide comprising the nucleic acid, preferably the coding region thereof, or polypeptide or the consensus sequence or the polypeptide motif, as depicted in Table I, II or IV, application No. 4, column 5 or 8 in the respective same line as the nucleic acid molecule SEQ ID NO. 2573 or polypeptide SEQ ID NO. 2574, respectively, or a homolog or a fragment thereof, is increased or generated, or if the activity monthiol glutaredoxin is increased or generated in a non-human organism, like a microorganism or a plant cell, plant or part thereof, especially with non-targeted localization, For example, an increase of the threonine of at least 1 percent, particularly in a range of 28 to 49-percent is conferred as compared to a corresponding non-transformed wild type non-human organism.

[31000] Accordingly, in one embodiment, an increase of threonine in a non-human organism, as compared to a corresponding non-transformed wild type non-human organism, is conferred in the process of the invention, if the activity of a polypeptide showing the activity of a glutaredoxin, or if the activity of the polypeptide At3g62950, preferably represented by SEQ ID NO. 2936, or a homolog or fragment thereof, or if the activity of a polypeptide encoded by a nucleic acid molecule comprising the nucleic acid SEQ ID NO. 2935, preferably the coding region thereof, or a homolog or fragment thereof, e.g. derived from Arabidopsis thaliana, is increased or generated. For example the activity of a nucleic acid molecule or a polypeptide comprising the nucleic acid, preferably the coding region thereof, or polypeptide or the consensus sequence or the polypeptide motif, as depicted in Table I, II or IV, application No. 4, column 5 or 8 in the respective same line as the nucleic acid molecule SEQ ID NO. 2935 or polypeptide SEQ ID NO. 2936, respectively, or a homolog or a fragment thereof, is increased or generated, or if the activity glutaredoxin is increased or generated in a non-human organism, like a microorganism or a plant cell, plant or part thereof, especially with non-targeted localization, For example, an increase of the threonine of at least 1 percent, particularly in a range of 32 to 130-percent is conferred as compared to a corresponding non-transformed wild type non-human organism.

[31001] Accordingly, in one embodiment, an increase of threonine in a non-human organism, as compared to a corresponding non-transformed wild type non-human organism, is conferred in the process of the invention, if the activity of a polypeptide showing the activity of a monothiol glutaredoxin, or if the activity of the polypeptide At4g15660, preferably represented by SEQ ID NO. 23483, or a homolog or fragment thereof, or if the activity of a polypeptide encoded by a nucleic acid molecule comprising the nucleic acid SEQ ID NO. 23482, preferably the coding region thereof, or a homolog or fragment thereof, e.g. derived from Arabidopsis thaliana, is increased or generated. For example the activity of a nucleic acid molecule or a polypeptide comprising the nucleic acid, preferably the coding region thereof, or polypeptide or the consensus sequence or the polypeptide motif, as depicted in Table I, II or IV, application No. 4, column 5 or 8 in the respective same line as the nucleic acid molecule SEQ ID NO. 23482 or polypeptide SEQ ID NO. 23483, respectively, or a homolog or a fragment thereof, is increased or generated, or if the activity monothiol glutaredoxin is increased or generated in a non-human organism, like a microorganism or a plant cell, plant or part thereof, especially with non-targeted localization, For example, an increase of the threonine of at least 1 percent, particularly in a range of 31 to 672-percent is conferred as compared to a corresponding non-transformed wild type non-human organism

[31002] Accordingly, in one embodiment, an increase of threonine in a non-human organism, as compared to a corresponding non-transformed wild type non-human organism, is conferred in the process of the invention, if the activity of a polypeptide showing the activity of a monothiol glutaredoxin, or if the activity of the polypeptide At4g15670, preferably represented by SEQ ID NO. 3280, or a homolog or fragment thereof, or if the activity of a polypeptide encoded by a nucleic acid molecule comprising the nucleic acid SEQ ID NO. 3279, preferably the coding region thereof, or a homolog or fragment thereof, e.g. derived from Arabidopsis thaliana, is increased or generated. For example the activity of a nucleic acid molecule or a polypeptide comprising the nucleic acid, preferably the coding region thereof, or polypeptide or the consensus sequence or the polypeptide motif, as depicted in Table I, II or IV, application No. 4, column 5 or 8 in the respective same line as the nucleic acid molecule SEQ ID NO. 3279 or polypeptide SEQ ID NO. 3280, respectively, or a homolog or a fragment thereof, is increased or generated, or if the activity monothiol glutaredoxin is increased or generated in a non-human organism, like a microorganism or a plant cell, plant or part thereof, especially with non-targeted localization, For example, an increase of the threonine of at least 1 percent, particularly in a range of 29 to 92-percent is conferred as compared to a corresponding non-transformed wild type non-human organism.

[31003] Accordingly, in one embodiment, an increase of threonine in a non-human organism, as compared to a corresponding non-transformed wild type non-human organism, is conferred in the process of the invention, if the activity of a polypeptide showing the activity of a monothiol glutaredoxin, or if the activity of the polypeptide At4g15690, preferably represented by SEQ ID NO. 23845, or a homolog or fragment thereof, or if the activity of a polypeptide encoded by a nucleic acid molecule comprising the nucleic acid SEQ ID NO. 23844, preferably the coding region thereof, or a homolog or fragment thereof, e.g. derived from Arabidopsis thaliana, is increased or generated. For example the activity of a nucleic acid molecule or a polypeptide comprising the nucleic acid, preferably the coding region thereof, or polypeptide or the consensus sequence or the polypeptide motif, as depicted in Table I, II or IV, application No. 4, column 5 or 8 in the respective same line as the nucleic acid molecule SEQ ID NO. 23844 or polypeptide SEQ ID NO. 23845, respectively, or a homolog or a fragment thereof, is increased or generated, or if the activity monothiol glutaredoxin is increased or generated in a non-human organism, like a microorganism or a plant cell, plant or part thereof, especially with non-targeted localization, For example, an increase of the threonine of at least 1 percent, particularly in a range of 26 to 59-percent is conferred as compared to a corresponding non-transformed wild type non-human organism.

[31004] Accordingly, in one embodiment, an increase of threonine in a non-human organism, as compared to a corresponding non-transformed wild type non-human organism, is conferred in the process of the invention, if the activity of a polypeptide showing the activity of a heat shock transcription factor, or if the activity of the polypeptide At4g18880, preferably represented by SEQ ID NO. 24233, or a homolog or fragment thereof, or if the activity of a polypeptide encoded by a nucleic acid molecule comprising the nucleic acid SEQ ID NO. 24232, preferably the coding region thereof, or a homolog or fragment thereof, e.g. derived from Arabidopsis thaliana, is increased or generated. For example the activity of a nucleic acid molecule or a polypeptide comprising the nucleic acid, preferably the coding region thereof, or polypeptide or the consensus sequence or the polypeptide motif, as depicted in Table I, II or IV, application No. 4, column 5 or 8 in the respective same line as the nucleic acid molecule SEQ ID NO. 24232 or polypeptide SEQ ID NO. 24233, respectively, or a homolog or a fragment thereof, is increased or generated, or if the activity heat shock transcription factor is increased or generated in a non-human organism, like a microorganism or a plant cell, plant or part thereof, especially with non-targeted localization, For example, an increase of the threonine of at least 1 percent, particularly in a range of 32 to 75-percent is conferred as compared to a corresponding non-transformed wild type non-human organism.

[31005] Accordingly, in one embodiment, an increase of threonine in a non-human organism, as compared to a corresponding non-transformed wild type non-human organism, is conferred in the process of the invention, if the activity of a polypeptide showing the activity of a At4g32480-protein, or if the activity of the polypeptide At4g32480, preferably represented by SEQ ID NO. 4041, or a homolog or fragment thereof, or if the activity of a polypeptide encoded by a nucleic acid molecule comprising the nucleic acid SEQ ID NO. 4040, preferably the coding region thereof, or a homolog or fragment thereof, e.g. derived from Arabidopsis thaliana, is increased or generated. For example the activity of a nucleic acid molecule or a polypeptide comprising the nucleic acid, preferably the coding region thereof, or polypeptide or the consensus sequence or the polypeptide motif, as depicted in Table I, II or IV, application No. 4, column 5 or 8 in the respective same line as the nucleic acid molecule SEQ ID NO. 4040 or polypeptide SEQ ID NO. 4041, respectively, or a homolog or a fragment thereof, is increased or generated, or if the activity At4g32480-protein is increased or generated in a non-human organism, like a microorganism or a plant cell, plant or part thereof, especially with non-targeted localization, For example, an increase of the threonine of at least 1 percent, particularly in a range of 32 to 265-percent is conferred as compared to a corresponding non-transformed wild type non-human organism.

[31006] Accordingly, in one embodiment, an increase of threonine in a non-human organism, as compared to a corresponding non-transformed wild type non-human organism, is conferred in the process of the invention, if the activity of a polypeptide showing the activity of a cyclin D , or if the activity of the polypeptide At4g34160, preferably represented by SEQ ID NO. 24312, or a homolog or fragment thereof, or if the activity of a polypeptide encoded by a nucleic acid molecule comprising the nucleic acid SEQ ID NO. 24311, preferably the coding region thereof, or a homolog or fragment thereof, e.g. derived from Arabidopsis thaliana, is increased or generated. For example the activity of a nucleic acid molecule or a polypeptide comprising the nucleic acid, preferably the coding region thereof, or polypeptide or the consensus sequence or the polypeptide motif, as depicted in Table I, II or IV, application No. 4, column 5 or 8 in the respective same line as the nucleic acid molecule SEQ ID NO. 24311 or polypeptide SEQ ID NO. 24312, respectively, or a homolog or a fragment thereof, is increased or generated, or if the activity cyclin D is increased or generated in a non-human organism, like a microorganism or a plant cell, plant or part thereof, especially with non-targeted localization, For example, an increase of the threonine of at least 1 percent, particularly in a range of 40 to 97-percent is conferred as compared to a corresponding non-transformed wild type non-human organism.

[31007] Accordingly, in one embodiment, an increase of threonine in a non-human organism, as compared to a corresponding non-transformed wild type non-human organism, is conferred in the process of the invention, if the activity of a polypeptide showing the activity of a calcium-dependent protein kinase, or if the activity of the polypeptide At4g35310, preferably represented by SEQ ID NO. 4349, or a homolog or fragment thereof, or if the activity of a polypeptide encoded by a nucleic acid molecule comprising the nucleic acid SEQ ID NO. 4348, preferably the coding region thereof, or a homolog or fragment thereof, e.g. derived from Arabidopsis thaliana, is increased or generated. For example the activity of a nucleic acid molecule or a polypeptide comprising the nucleic acid, preferably the coding region thereof, or polypeptide or the consensus sequence or the polypeptide motif, as depicted in Table I, II or IV, application No. 4, column 5 or 8 in the respective same line as the nucleic acid molecule SEQ ID NO. 4348 or polypeptide SEQ ID NO. 4349, respectively, or a homolog or a fragment thereof, is increased or generated, or if the activity calcium-dependent protein kinase is increased or generated in a non-human organism, like a microorganism or a plant cell, plant or part thereof, especially with non-targeted localization, For example, an increase of the threonine of at least 1 percent, particularly in a range of 29 to 102-percent is conferred as compared to a corresponding non-transformed wild type non-human organism.

[31008] Accordingly, in one embodiment, an increase of threonine in a non-human organism, as compared to a corresponding non-transformed wild type non-human organism, is conferred in the process of the invention, if the activity of a polypeptide showing the activity of a gibberellin 20-oxidase, or if the activity of the polypeptide At5g07200, preferably represented by SEQ ID NO. 24493, or a homolog or fragment thereof, or if the activity of a polypeptide encoded by a nucleic acid molecule comprising the nucleic acid SEQ ID NO. 24492, preferably the coding region thereof, or a homolog or fragment thereof, e.g. derived from Arabidopsis thaliana, is increased or generated. For example the activity of a nucleic acid molecule or a polypeptide comprising the nucleic acid, preferably the coding region thereof, or polypeptide or the consensus sequence or the polypeptide motif, as depicted in Table I, II or IV, application No. 4, column 5 or 8 in the respective same line as the nucleic acid molecule SEQ ID NO. 24492 or polypeptide SEQ ID NO. 24493, respectively, or a homolog or a fragment thereof, is increased or generated, or if the activity gibberellin 20-oxidase is increased or generated in a non-human organism, like a microorganism or a plant cell, plant or part thereof, especially with non-targeted localization, For example, an increase of the threonine of at least 1 percent, particularly in a range of 18 to 54-percent is conferred as compared to a corresponding non-transformed wild type non-human organism.

[31009] Accordingly, in one embodiment, an increase of threonine in a non-human organism, as compared to a corresponding non-transformed wild type non-human organism, is conferred in the process of the invention, if the activity of a polypeptide showing the activity of a aspartate kinase, or if the activity of the polypeptide At5g13280, preferably represented by SEQ ID NO. 93452, or a homolog or fragment thereof, or if the activity of a polypeptide encoded by a nucleic acid molecule comprising the nucleic acid SEQ ID NO. 93451, preferably the coding region thereof, or a homolog or fragment thereof, e.g. derived from Arabidopsis thaliana, is increased or generated. For example the activity of a nucleic acid molecule or a polypeptide comprising the nucleic acid, preferably the coding region thereof, or polypeptide or the consensus sequence or the polypeptide motif, as depicted in Table I, II or IV, application No. 4, column 5 or 8 in the respective same line as the nucleic acid molecule SEQ ID NO. 93451 or polypeptide SEQ ID NO. 93452, respectively, or a homolog or a fragment thereof, is increased or generated, or if the activity aspartate kinase is increased or generated in a non-human organism, like a microorganism or a plant cell, plant or part thereof, especially with non-targeted localization, For example, an increase of the threonine of at least 1 percent, particularly in a range of 38 to 356-percent is conferred as compared to a corresponding non-transformed wild type non-human organism.

[31010] Accordingly, in one embodiment, an increase of threonine in a non-human organism, as compared to a corresponding non-transformed wild type non-human organism, is conferred in the process of the invention, if the activity of a polypeptide showing the activity of a At5g16650-protein, or if the activity of the polypeptide At5g16650, preferably represented by SEQ ID NO. 25284, or a homolog or fragment thereof, or if the activity of a polypeptide encoded by a nucleic acid molecule comprising the nucleic acid SEQ ID NO. 25283, preferably the coding region thereof, or a homolog or fragment thereof, e.g. derived from Arabidopsis thaliana, is increased or generated. For example the activity of a nucleic acid molecule or a polypeptide comprising the nucleic acid, preferably the coding region thereof, or polypeptide or the consensus sequence or the polypeptide motif, as depicted in Table I, II or IV, application No. 4, column 5 or 8 in the respective same line as the nucleic acid molecule SEQ ID NO. 25283 or polypeptide SEQ ID NO. 25284, respectively, or a homolog or a fragment thereof, is increased or generated, or if the activity At5g16650-protein is increased or generated in a non-human organism, like a microorganism or a plant cell, plant or part thereof, especially with non-targeted localization, For example, an increase of the threonine of at least 1 percent, particularly in a range of 16 to 48-percent is conferred as compared to a corresponding non-transformed wild type non-human organism.

[31011] Accordingly, in one embodiment, an increase of threonine in a non-human organism, as compared to a corresponding non-transformed wild type non-human organism, is conferred in the process of the invention, if the activity of a polypeptide showing the activity of a thioredoxin, or if the activity of the polypeptide At5g39950, preferably represented by SEQ ID NO. 69575, or a homolog or fragment thereof, or if the activity of a polypeptide encoded by a nucleic acid molecule comprising the nucleic acid SEQ ID NO. 69574, preferably the coding region thereof, or a homolog or fragment thereof, e.g. derived from Arabidopsis thaliana, is increased or generated. For example the activity of a nucleic acid molecule or a polypeptide comprising the nucleic acid, preferably the coding region thereof, or polypeptide or the consensus sequence or the polypeptide motif, as depicted in Table I, II or IV, application No. 4, column 5 or 8 in the respective same line as the nucleic acid molecule SEQ ID NO. 69574 or polypeptide SEQ ID NO. 69575, respectively, or a homolog or a fragment thereof, is increased or generated, or if the activity thioredoxin is increased or generated in a non-human organism, like a microorganism or a plant cell, plant or part thereof, especially with non-targeted localization, For example, an increase of the threonine of at least 1 percent, particularly in a range of 16 to 23-percent is conferred as compared to a corresponding non-transformed wild type non-human organism.

[31012] Accordingly, in one embodiment, an increase of threonine in a non-human organism, as compared to a corresponding non-transformed wild type non-human organism, is conferred in the process of the invention, if the activity of a polypeptide showing the activity of a protein phosphatase, or if the activity of the polypeptide At5g57050, preferably represented by SEQ ID NO. 5319, or a homolog or fragment thereof, or if the activity of a polypeptide encoded by a nucleic acid molecule comprising the nucleic acid SEQ ID NO. 5318, preferably the coding region thereof, or a homolog or fragment thereof, e.g. derived from Arabidopsis thaliana, is increased or generated. For example the activity of a nucleic acid molecule or a polypeptide comprising the nucleic acid, preferably the coding region thereof, or polypeptide or the consensus sequence or the polypeptide motif, as depicted in Table I, II or IV, application No. 4, column 5 or 8 in the respective same line as the nucleic acid molecule SEQ ID NO. 5318 or polypeptide SEQ ID NO. 5319, respectively, or a homolog or a fragment thereof, is increased or generated, or if the activity protein phosphatase is increased or generated in a non-human organism, like a microorganism or a plant cell, plant or part thereof, especially with non-targeted localization, For example, an increase of the threonine of at least 1 percent, particularly in a range of 18 to 60-percent is conferred as compared to a corresponding non-transformed wild type non-human organism.

[31013] Accordingly, in one embodiment, an increase of threonine in a non-human organism, as compared to a corresponding non-transformed wild type non-human organism, is conferred in the process of the invention, if the activity of a polypeptide showing the activity of a zinc finger protein, or if the activity of the polypeptide At5g64920, preferably represented by SEQ ID NO. 5494, or a homolog or fragment thereof, or if the activity of a polypeptide encoded by a nucleic acid molecule comprising the nucleic acid SEQ ID NO. 5493, preferably the coding region thereof, or a homolog or fragment thereof, e.g. derived from Arabidopsis thaliana, is increased or generated. For example the activity of a nucleic acid molecule or a polypeptide comprising the nucleic acid, preferably the coding region thereof, or polypeptide or the consensus sequence or the polypeptide motif, as depicted in Table I, II or IV, application No. 4, column 5 or 8 in the respective same line as the nucleic acid molecule SEQ ID NO. 5493 or polypeptide SEQ ID NO. 5494, respectively, or a homolog or a fragment thereof, is increased or generated, or if the activity zinc finger protein is increased or generated in a non-human organism, like a microorganism or a plant cell, plant or part thereof, especially with non-targeted localization, For example, an increase of the threonine of at least 1 percent, particularly in a range of 30 to 578 percent is conferred as compared to a corresponding non-transformed wild type non-human organism.

[31014] Accordingly, in one embodiment, an increase of threonine in a non-human organism, as compared to a corresponding non-transformed wild type non-human organism, is conferred in the process of the invention, if the activity of a polypeptide showing the activity of a CDP-diacylglycerol-serine O-phosphatidyltransferase, or if the activity of the polypeptide AvinDRAFT_{—}0035, preferably represented by SEQ ID NO. 70584, or a homolog or fragment thereof, or if the activity of a polypeptide encoded by a nucleic acid molecule comprising the nucleic acid SEQ ID NO. 70583, preferably the coding region thereof, or a homolog or fragment thereof, e.g. derived from Azotobacter vinelandii, is increased or generated. For example the activity of a nucleic acid molecule or a polypeptide comprising the nucleic acid, preferably the coding region thereof, or polypeptide or the consensus sequence or the polypeptide motif, as depicted in Table I, II or IV, application No. 4, column 5 or 8 in the respective same line as the nucleic acid molecule SEQ ID NO. 70583 or polypeptide SEQ ID NO. 70584, respectively, or a homolog or a fragment thereof, is increased or generated, or if the activity CDP-diacylglycerol-serine O-phosphatidyltransferase is increased or generated in a non-human organism, like a microorganism or a plant cell, plant or part thereof, especially with non-targeted localization, For example, an increase of the threonine of at least 1 percent, particularly in a range of 17 to 41-percent is conferred as compared to a corresponding non-transformed wild type non-human organism.

[31015] Accordingly, in one embodiment, an increase of threonine in a non-human organism, as compared to a corresponding non-transformed wild type non-human organism, is conferred in the process of the invention, if the activity of a polypeptide showing the activity of a malic enzyme, or if the activity of the polypeptide AvinDRAFT_{—}1495, preferably represented by SEQ ID NO. 5558, or a homolog or fragment thereof, or if the activity of a polypeptide encoded by a nucleic acid molecule comprising the nucleic acid SEQ ID NO. 5557, preferably the coding region thereof, or a homolog or fragment thereof, e.g. derived from Azotobacter vinelandii, is increased or generated. For example the activity of a nucleic acid molecule or a polypeptide comprising the nucleic acid, preferably the coding region thereof, or polypeptide or the consensus sequence or the polypeptide motif, as depicted in Table I, II or IV, application No. 4, column 5 or 8 in the respective same line as the nucleic acid molecule SEQ ID NO. 5557 or polypeptide SEQ ID NO. 5558, respectively, or a homolog or a fragment thereof, is increased or generated, or if the activity malic enzyme is increased or generated in a non-human organism, like a microorganism or a plant cell, plant or part thereof, especially with non-targeted localization, For example, an increase of the threonine of at least 1 percent, particularly in a range of 33 to 157-percent is conferred as compared to a corresponding non-transformed wild type non-human organism.

[31016] Accordingly, in one embodiment, an increase of threonine in a non-human organism, as compared to a corresponding non-transformed wild type non-human organism, is conferred in the process of the invention, if the activity of a polypeptide showing the activity of a secindependent protein translocase, or if the activity of the polypeptide AvinDRAFT_{—}1624, preferably represented by SEQ ID NO. 26197, or a homolog or fragment thereof, or if the activity of a polypeptide encoded by a nucleic acid molecule comprising the nucleic acid SEQ ID NO. 26196, preferably the coding region thereof, or a homolog or fragment thereof, e.g. derived from Azotobacter vinelandii, is increased or generated. For example the activity of a nucleic acid molecule or a polypeptide comprising the nucleic acid, preferably the coding region thereof, or polypeptide or the consensus sequence or the polypeptide motif, as depicted in Table I, II or IV, application No. 4, column 5 or 8 in the respective same line as the nucleic acid molecule SEQ ID NO. 26196 or polypeptide SEQ ID NO. 26197, respectively, or a homolog or a fragment thereof, is increased or generated, or if the activity sec-independent protein translocase is increased or generated in a non-human organism, like a microorganism or a plant cell, plant or part thereof, especially with non-targeted localization, For example, an increase of the threonine of at least 1 percent, particularly in a range of 18 to 55-percent is conferred as compared to a corresponding non-transformed wild type non-human organism.

[31017] Accordingly, in one embodiment, an increase of threonine in a non-human organism, as compared to a corresponding non-transformed wild type non-human organism, is conferred in the process of the invention, if the activity of a polypeptide showing the activity of a beta-hydroxylase, or if the activity of the polypeptide AvinDRAFT_{—}2091, preferably represented by SEQ ID NO. 6041, or a homolog or fragment thereof, or if the activity of a polypeptide encoded by a nucleic acid molecule comprising the nucleic acid SEQ ID NO. 6040, preferably the coding region thereof, or a homolog or fragment thereof, e.g. derived from Azotobacter vinelandii, is increased or generated. For example the activity of a nucleic acid molecule or a polypeptide comprising the nucleic acid, preferably the coding region thereof, or polypeptide or the consensus sequence or the polypeptide motif, as depicted in Table I, II or IV, application No. 4, column 5 or 8 in the respective same line as the nucleic acid molecule SEQ ID NO. 6040 or polypeptide SEQ ID NO. 6041, respectively, or a homolog or a fragment thereof, is increased or generated, or if the activity beta-hydroxylase is increased or generated in a non-human organism, like a microorganism or a plant cell, plant or part thereof, especially with non-targeted localization, For example, an increase of the threonine of at least 1 percent, particularly in a range of 19 to 37-percent is conferred as compared to a corresponding non-transformed wild type non-human organism.

[31018] Accordingly, in one embodiment, an increase of threonine in a non-human organism, as compared to a corresponding non-transformed wild type non-human organism, is conferred in the process of the invention, if the activity of a polypeptide showing the activity of a elongation facfor Tu, or if the activity of the polypeptide AvinDRAFT_{—}2344, preferably represented by SEQ ID NO. 27022, or a homolog or fragment thereof, or if the activity of a polypeptide encoded by a nucleic acid molecule comprising the nucleic acid SEQ ID NO. 27021, preferably the coding region thereof, or a homolog or fragment thereof, e.g. derived from Azotobacter vinelandii, is increased or generated. For example the activity of a nucleic acid molecule or a polypeptide comprising the nucleic acid, preferably the coding region thereof, or polypeptide or the consensus sequence or the polypeptide motif, as depicted in Table I, II or IV, application No. 4, column 5 or 8 in the respective same line as the nucleic acid molecule SEQ ID NO. 27021 or polypeptide SEQ ID NO. 27022, respectively, or a homolog or a fragment thereof, is increased or generated, or if the activity elongation factor Tu is increased or generated in a non-human organism, like a microorganism or a plant cell, plant or part thereof, especially with non-targeted localization, For example, an increase of the threonine of at least 1 percent, particularly in a range of 25 to 121-percent is conferred as compared to a corresponding non-transformed wild type non-human organism.

[31019] Accordingly, in one embodiment, an increase of threonine in a non-human organism, as compared to a corresponding non-transformed wild type non-human organism, is conferred in the process of the invention, if the activity of a polypeptide showing the activity of a ABC transporter permease protein, or if the activity of the polypeptide AvinDRAFT_{—}2521, preferably represented by SEQ ID NO. 27883, or a homolog or fragment thereof, or if the activity of a polypeptide encoded by a nucleic acid molecule comprising the nucleic acid SEQ ID NO. 27882, preferably the coding region thereof, or a homolog or fragment thereof, e.g. derived from Azotobacter vinelandii, is increased or generated. For example the activity of a nucleic acid molecule or a polypeptide comprising the nucleic acid, preferably the coding region thereof, or polypeptide or the consensus sequence or the polypeptide motif, as depicted in Table I, II or IV, application No. 4, column 5 or 8 in the respective same line as the nucleic acid molecule SEQ ID NO. 27882 or polypeptide SEQ ID NO. 27883, respectively, or a homolog or a fragment thereof, is increased or generated, or if the activity ABC transporter permease protein is increased or generated in a non-human organism, like a microorganism or a plant cell, plant or part thereof, especially with non-targeted localization, For example, an increase of the threonine of at least 1 percent, particularly in a range of 33 to 116-percent is conferred as compared to a corresponding non-transformed wild type non-human organism.

[31020] Accordingly, in one embodiment, an increase of threonine in a non-human organism, as compared to a corresponding non-transformed wild type non-human organism, is conferred in the process of the invention, if the activity of a polypeptide showing the activity of a acyl-CoA synthase, or if the activity of the polypeptide AvinDRAFT_{—}2754, preferably represented by SEQ ID NO. 28041, or a homolog or fragment thereof, or if the activity of a polypeptide encoded by a nucleic acid molecule comprising the nucleic acid SEQ ID NO. 28040, preferably the coding region thereof, or a homolog or fragment thereof, e.g. derived from Azotobacter vinelandii, is increased or generated. For example the activity of a nucleic acid molecule or a polypeptide comprising the nucleic acid, preferably the coding region thereof, or polypeptide or the consensus sequence or the polypeptide motif, as depicted in Table I, II or IV, application No. 4, column 5 or 8 in the respective same line as the nucleic acid molecule SEQ ID NO. 28040 or polypeptide SEQ ID NO. 28041, respectively, or a homolog or a fragment thereof, is increased or generated, or if the activity acyl-CoA synthase is increased or generated in a non-human organism, like a microorganism or a plant cell, plant or part thereof, especially with non-targeted localization, For example, an increase of the threonine of at least 1 percent, particularly in a range of 17 to 61-percent is conferred as compared to a corresponding non-transformed wild type non-human organism.

[31021] Accordingly, in one embodiment, an increase of threonine in a non-human organism, as compared to a corresponding non-transformed wild type non-human organism, is conferred in the process of the invention, if the activity of a polypeptide showing the activity of a 2-oxoglutarate dehydrogenase E1 subunit, or if the activity of the polypeptide AvinDRAFT_{—}3028, preferably represented by SEQ ID NO. 6076, or a homolog or fragment thereof, or if the activity of a polypeptide encoded by a nucleic acid molecule comprising the nucleic acid SEQ ID NO. 6075, preferably the coding region thereof, or a homolog or fragment thereof, e.g. derived from Azotobacter vinelandii, is increased or generated. For example the activity of a nucleic acid molecule or a polypeptide comprising the nucleic acid, preferably the coding region thereof, or polypeptide or the consensus sequence or the polypeptide motif, as depicted in Table I, II or IV, application No. 4, column 5 or 8 in the respective same line as the nucleic acid molecule SEQ ID NO. 6075 or polypeptide SEQ ID NO. 6076, respectively, or a homolog or a fragment thereof, is increased or generated, or if the activity 2-oxoglutarate dehydrogenase E1 subunit is increased or generated in a non-human organism, like a microorganism or a plant cell, plant or part thereof, especially with non-targeted localization, For example, an increase of the threonine of at least 1 percent, particularly in a range of 29 to 249-percent is conferred as compared to a corresponding non-transformed wild type non-human organism.

[31022] Accordingly, in one embodiment, an increase of threonine in a non-human organism, as compared to a corresponding non-transformed wild type non-human organism, is conferred in the process of the invention, if the activity of a polypeptide showing the activity of a permease protein of peptide ABC transporter, or if the activity of the polypeptide AvinDRAFT_{—}3086, preferably represented by SEQ ID NO. 93533, or a homolog or fragment thereof, or if the activity of a polypeptide encoded by a nucleic acid molecule comprising the nucleic acid SEQ ID NO. 93532, preferably the coding region thereof, or a homolog or fragment thereof, e.g. derived from Azotobacter vinelandii, is increased or generated. For example the activity of a nucleic acid molecule or a polypeptide comprising the nucleic acid, preferably the coding region thereof, or polypeptide or the consensus sequence or the polypeptide motif, as depicted in Table I, II or IV, application No. 4, column 5 or 8 in the respective same line as the nucleic acid molecule SEQ ID NO. 93532 or polypeptide SEQ ID NO. 93533, respectively, or a homolog or a fragment thereof, is increased or generated, or if the activity permease protein of peptide ABC transporter is increased or generated in a non-human organism, like a microorganism or a plant cell, plant or part thereof, especially with non-targeted localization, For example, an increase of the threonine of at least 1 percent, particularly in a range of 24 to 34-percent is conferred as compared to a corresponding non-transformed wild type non-human organism.

[31023] Accordingly, in one embodiment, an increase of threonine in a non-human organism, as compared to a corresponding non-transformed wild type non-human organism, is conferred in the process of the invention, if the activity of a polypeptide showing the activity of a GDP-mannose dehydrogenase, or if the activity of the polypeptide AvinDRAFT_{—}3135, preferably represented by SEQ ID NO. 72347, or a homolog or fragment thereof, or if the activity of a polypeptide encoded by a nucleic acid molecule comprising the nucleic acid SEQ ID NO. 72346, preferably the coding region thereof, or a homolog or fragment thereof, e.g. derived from Azotobacter vinelandii, is increased or generated. For example the activity of a nucleic acid molecule or a polypeptide comprising the nucleic acid, preferably the coding region thereof, or polypeptide or the consensus sequence or the polypeptide motif, as depicted in Table I, II or IV, application No. 4, column 5 or 8 in the respective same line as the nucleic acid molecule SEQ ID NO. 72346 or polypeptide SEQ ID NO. 72347, respectively, or a homolog or a fragment thereof, is increased or generated, or if the activity GDP-mannose dehydrogenase is increased or generated in a non-human organism, like a microorganism or a plant cell, plant or part thereof, especially with non-targeted localization, For example, an increase of the threonine of at least 1 percent, partitularly in a range of 21 to 25-percent is conferred as compared to a corresponding non-transformed wild type non-human organism.

[31024] Accordingly, in one embodiment, an increase of threonine in a non-human organism, as compared to a corresponding non-transformed wild type non-human organism, is conferred in the process of the invention, if the activity of a polypeptide showing the activity of a enoyl-CoA hydratase, or if the activity of the polypeptide AvinDRAFT_{—}3159, preferably represented by SEQ ID NO. 28739, or a homolog or fragment thereof, or if the activity of a polypeptide encoded by a nucleic acid molecule comprising the nucleic acid SEQ ID NO. 28738, preferably the coding region thereof, or a homolog or fragment thereof, e.g. derived from Azotobacter vinelandii, is increased or generated. For example the activity of a nucleic acid molecule or a polypeptide comprising the nucleic acid, preferably the coding region thereof, or polypeptide or the consensus sequence or the polypeptide motif, as depicted in Table I, II or IV, application No. 4, column 5 or 8 in the respective same line as the nucleic acid molecule SEQ ID NO. 28738 or polypeptide SEQ ID NO. 28739, respectively, or a homolog or a fragment thereof, is increased or generated, or if the activity enoyl-CoA hydratase is increased or generated in a non-human organism, like a microorganism or a plant cell, plant or part thereof, especially with non-targeted localization, For example, an increase of the threonine of at least 1 percent, particularly in a range of 20 to 139-percent is conferred as compared to a corresponding non-transformed wild type non-human organism.

[31025] Accordingly, in one embodiment, an increase of threonine in a non-human organism, as compared to a corresponding non-transformed wild type non-human organism, is conferred in the process of the invention, if the activity of a polypeptide showing the activity of a transcriptional regulator, or if the activity of the polypeptide AvinDRAFT_{—}3209, preferably represented by SEQ ID NO. 29287, or a homolog or fragment thereof, or if the activity of a polypeptide encoded by a nucleic acid molecule comprising the nucleic acid SEQ ID NO. 29286, preferably the coding region thereof, or a homolog or fragment thereof, e.g. derived from Azotobacter vinelandii, is increased or generated. For example the activity of a nucleic acid molecule or a polypeptide comprising the nucleic acid, preferably the coding region thereof, or polypeptide or the consensus sequence or the polypeptide motif, as depicted in Table I, II or IV, application No. 4, column 5 or 8 in the respective same line as the nucleic acid molecule SEQ ID NO. 29286 or polypeptide SEQ ID NO. 29287, respectively, or a homolog or a fragment thereof, is increased or generated, or if the activity transcriptional regulator is increased or generated in a non-human organism, like a microorganism or a plant cell, plant or part thereof, especially with non-targeted localization, For example, an increase of the threonine of at least 1 percent, particularly in a range of 18 to 42-percent is conferred as compared to a corresponding non-transformed wild type non-human organism.

[31026] Accordingly, in one embodiment, an increase of threonine in a non-human organism, as compared to a corresponding non-transformed wild type non-human organism, is conferred in the process of the invention, if the activity of a polypeptide showing the activity of a homoserine dehydrogenase, or if the activity of the polypeptide AvinDRAFT_{—}3546, preferably represented by SEQ ID NO. 6269, or a homolog or fragment thereof, or if the activity of a polypeptide encoded by a nucleic acid molecule comprising the nucleic acid SEQ ID NO. 6268, preferably the coding region thereof, or a homolog or fragment thereof, e.g. derived from Azotobacter vinelandii, is increased or generated. For example the activity of a nucleic acid molecule or a polypeptide comprising the nucleic acid, preferably the coding region thereof, or polypeptide or the consensus sequence or the polypeptide motif, as depicted in Table I, II or IV, application No. 4, column 5 or 8 in the respective same line as the nucleic acid molecule SEQ ID NO. 6268 or polypeptide SEQ ID NO. 6269, respectively, or a homolog or a fragment thereof, is increased or generated, or if the activity homoserine dehydrogenase is increased or generated in a non-human organism, like a microorganism or a plant cell, plant or part thereof, especially with non-targeted localization, For example, an increase of the threonine of at least 1 percent, particularly in a range of 41 to 1222-percent is conferred as compared to a corresponding non-transformed wild type non-human organism.

[31027] Accordingly, in one embodiment, an increase of threonine in a non-human organism, as compared to a corresponding non-transformed wild type non-human organism, is conferred in the process of the invention, if the activity of a polypeptide showing the activity of a hydrolase, or if the activity of the polypeptide AvinDRAFT_{—}5103, preferably represented by SEQ ID NO. 6511, or a homolog or fragment thereof, or if the activity of a polypeptide encoded by a nucleic acid molecule comprising the nucleic acid SEQ ID NO. 6510, preferably the coding region thereof, or a homolog or fragment thereof, e.g. derived from Azotobacter vinelandii, is increased or generated. For example the activity of a nucleic acid molecule or a polypeptide comprising the nucleic acid, preferably the coding region thereof, or polypeptide or the consensus sequence or the polypeptide motif, as depicted in Table I, II or IV, application No. 4, column 5 or 8 in the respective same line as the nucleic acid molecule SEQ ID NO. 6510 or polypeptide SEQ ID NO. 6511, respectively, or a homolog or a fragment thereof, is increased or generated, or if the activity hydrolase is increased or generated in a non-human organism, like a microorganism or a plant cell, plant or part thereof, especially with non-targeted localization, For example, an increase of the threonine of at least 1 percent, particularly in a range of 22 to 170-percent is conferred as compared to a corresponding non-transformed wild type non-human organism.

[31028] Accordingly, in one embodiment, an increase of threonine in a non-human organism, as compared to a corresponding non-transformed wild type non-human organism, is conferred in the process of the invention, if the activity of a polypeptide showing the activity of a glutamate-ammonia-ligase, or if the activity of the polypeptide AvinDRAFT_{—}5246, preferably represented by SEQ ID NO. 32038, or a homolog or fragment thereof, or if the activity of a polypeptide encoded by a nucleic acid molecule comprising the nucleic acid SEQ ID NO. 32037, preferably the coding region thereof, or a homolog or fragment thereof, e.g. derived from Azotobacter vinelandii, is increased or generated. For example the activity of a nucleic acid molecule or a polypeptide comprising the nucleic acid, preferably the coding region thereof, or polypeptide or the consensus sequence or the polypeptide motif, as depicted in Table I, II or IV, application No. 4, column 5 or 8 in the respective same line as the nucleic acid molecule SEQ ID NO. 32037 or polypeptide SEQ ID NO. 32038, respectively, or a homolog or a fragment thereof, is increased or generated, or if the activity glutamate-ammonia-ligase is increased or generated in a non-human organism, like a microorganism or a plant cell, plant or part thereof, especially with non-targeted localization, For example, an increase of the threonine of at least 1 percent, particularly in a range of 24 to 136-percent is conferred as compared to a corresponding non-transformed wild type non-human organism.

[31029] Accordingly, in one embodiment, an increase of threonine in a non-human organism, as compared to a corresponding non-transformed wild type non-human organism, is conferred in the process of the invention, if the activity of a polypeptide showing the activity of a peptidase, or if the activity of the polypeptide AvinDRAFT_{—}5579, preferably represented by SEQ ID NO. 74663, or a homolog or fragment thereof, or if the activity of a polypeptide encoded by a nucleic acid molecule comprising the nucleic acid SEQ ID NO. 74662, preferably the coding region thereof, or a homolog or fragment thereof, e.g. derived from Azotobacter vinelandii, is increased or generated. For example the activity of a nucleic acid molecule or a polypeptide comprising the nucleic acid, preferably the coding region thereof, or polypeptide or the consensus sequence or the polypeptide motif, as depicted in Table I, II or IV, application No. 4, column 5 or 8 in the respective same line as the nucleic acid molecule SEQ ID NO. 74662 or polypeptide SEQ ID NO. 74663, respectively, or a homolog or a fragment thereof, is increased or generated, or if the activity peptidase is increased or generated in a non-human organism, like a microorganism or a plant cell, plant or part thereof, especially with non-targeted localization, For example, an increase of the threonine of at least 1 percent, particularly in a range of 17 to 35-percent is conferred as compared to a corresponding non-transformed wild type non-human organism.

[31030] Accordingly, in one embodiment, an increase of threonine in a non-human organism, as compared to a corresponding non-transformed wild type non-human organism, is conferred in the process of the invention, if the activity of a polypeptide showing the activity of a Chaperone protein CIpB, or if the activity of the polypeptide AvinDRAFT_{—}6093, preferably represented by SEQ ID NO. 33597, or a homolog or fragment thereof, or if the activity of a polypeptide encoded by a nucleic acid molecule comprising the nucleic acid SEQ ID NO. 33596, preferably the coding region thereof, or a homolog or fragment thereof, e.g. derived from Azotobacter vinelandii, is increased or generated. For example the activity of a nucleic acid molecule or a polypeptide comprising the nucleic acid, preferably the coding region thereof, or polypeptide or the consensus sequence or the polypeptide motif, as depicted in Table I, II or IV, application No. 4, column 5 or 8 in the respective same line as the nucleic acid molecule SEQ ID NO. 33596 or polypeptide SEQ ID NO. 33597, respectively, or a homolog or a fragment thereof, is increased or generated, or if the activity Chaperone protein CIpB is increased or generated in a non-human organism, like a microorganism or a plant cell, plant or part thereof, especially with non-targeted localization, For example, an increase of the threonine of at least 1 percent, particularly in a range of 18 to 56-percent is conferred as compared to a corresponding non-transformed wild type non-human organism.

[31031] Accordingly, in one embodiment, an increase of threonine in a non-human organism, as compared to a corresponding non-transformed wild type non-human organism, is conferred in the process of the invention, if the activity of a polypeptide showing the activity of a transcriptional regulator protein, or if the activity of the polypeptide AvinDRAFT_{—}6864, preferably represented by SEQ ID NO. 34205, or a homolog or fragment thereof, or if the activity of a polypeptide encoded by a nucleic acid molecule comprising the nucleic acid SEQ ID NO. 34204, preferably the coding region thereof, or a homolog or fragment thereof, e.g. derived from Azotobacter vinelandii, is increased or generated. For example the activity of a nucleic acid molecule or a polypeptide comprising the nucleic acid, preferably the coding region thereof, or polypeptide or the consensus sequence or the polypeptide motif, as depicted in Table I, II or IV, application No. 4, column 5 or 8 in the respective same line as the nucleic acid molecule SEQ ID NO. 34204 or polypeptide SEQ ID NO. 34205, respectively, or a homolog or a fragment thereof, is increased or generated, or if the activity transcriptional regulator protein is increased or generated in a non-human organism, like a microorganism or a plant cell, plant or part thereof, especially with non-targeted localization, For example, an increase of the threonine of at least 1 percent, particularly in a range of 47 to 68-percent is conferred as compared to a corresponding non-transformed wild type non-human organism.

[31032] Accordingly, in one embodiment, an increase of threonine in a non-human organism, as compared to a corresponding non-transformed wild type non-human organism, is conferred in the process of the invention, if the activity of a polypeptide showing the activity of a AX653549-protein, or if the activity of the polypeptide AX653549, preferably represented by SEQ ID NO. 34302, or a homolog or fragment thereof, or if the activity of a polypeptide encoded by a nucleic acid molecule comprising the nucleic acid SEQ ID NO. 34301, preferably the coding region thereof, or a homolog or fragment thereof, e.g. derived from Oryza sativa, is increased or generated. For example the activity of a nucleic acid molecule or a polypeptide comprising the nucleic acid, preferably the coding region thereof, or polypeptide or the consensus sequence or the polypeptide motif, as depicted in Table I, II or IV, application No. 4, column 5 or 8 in the respective same line as the nucleic acid molecule SEQ ID NO. 34301 or polypeptide SEQ ID NO. 34302, respectively, or a homolog or a fragment thereof, is increased or generated, or if the activity AX653549-protein is increased or generated in a non-human organism, like a microorganism or a plant cell, plant or part thereof, especially with non-targeted localization, For example, an increase of the threonine of at least 1 percent, particularly in a range of 17 to 50-percent is conferred as compared to a corresponding non-transformed wild type non-human organism.

[31033] Accordingly, in one embodiment, an increase of threonine in a non-human organism, as compared to a corresponding non-transformed wild type non-human organism, is conferred in the process of the invention, if the activity of a polypeptide showing the activity of a threonine synthase, or if the activity of the polypeptide B0004, preferably represented by SEQ ID NO. 34890, or a homolog or fragment thereof, or if the activity of a polypeptide encoded by a nucleic acid molecule comprising the nucleic acid SEQ ID NO. 34889, preferably the coding region thereof, or a homolog or fragment thereof, e.g. derived from Escherichia coli, is increased or generated. For example the activity of a nucleic acid molecule or a polypeptide comprising the nucleic acid, preferably the coding region thereof, or polypeptide or the consensus sequence or the polypeptide motif, as depicted in Table I, II or IV, application No. 4, column 5 or 8 in the respective same line as the nucleic acid molecule SEQ ID NO. 34889 or polypeptide SEQ ID NO. 34890, respectively, or a homolog or a fragment thereof, is increased or generated, or if the activity threonine synthase is increased or generated in a non-human organism, like a microorganism or a plant cell, plant or part thereof, especially with plastidic localization, For example, an increase of the threonine of at least 1 percent, particularly in a range of 23 to 123-percent is conferred as compared to a corresponding non-transformed wild type non-human organism.

[31034] Accordingly, in one embodiment, an increase of threonine in a non-human organism, as compared to a corresponding non-transformed wild type non-human organism, is conferred in the process of the invention, if the activity of a polypeptide showing the activity of a acetolactate synthase small subunit, or if the activity of the polypeptide B0078, preferably represented by SEQ ID NO. 6819, or a homolog or fragment thereof, or if the activity of a polypeptide encoded by a nucleic acid molecule comprising the nucleic acid SEQ ID NO. 6818, preferably the coding region thereof, or a homolog or fragment thereof, e.g. derived from Escherichia coli, is increased or generated. For example the activity of a nucleic acid molecule or a polypeptide comprising the nucleic acid, preferably the coding region thereof, or polypeptide or the consensus sequence or the polypeptide motif, as depicted in Table I, II or IV, application No. 4, column 5 or 8 in the respective same line as the nucleic acid molecule SEQ ID NO. 6818 or polypeptide SEQ ID NO. 6819, respectively, or a homolog or a fragment thereof, is increased or generated, or if the activity acetolactate synthase small subunit is increased or generated in a non-human organism, like a microorganism or a plant cell, plant or part thereof, especially with non-targeted localization, For example, an increase of the threonine of at least 1 percent, particularly in a range of 33 to 83-percent is conferred as compared to a corresponding non-transformed wild type non-human organism.

[31035] Accordingly, in one embodiment, an increase of threonine in a non-human organism, as compared to a corresponding non-transformed wild type non-human organism, is conferred in the process of the invention, if the activity of a polypeptide showing the activity of a dihydrolipoamide acetyltransferase, or if the activity of the polypeptide B0115, preferably represented by SEQ ID NO. 35367, or a homolog or fragment thereof, or if the activity of a polypeptide encoded by a nucleic acid molecule comprising the nucleic acid SEQ ID NO. 35366, preferably the coding region thereof, or a homolog or fragment thereof, e.g. derived from Escherichia coli, is increased or generated. For example the activity of a nucleic acid molecule or a polypeptide comprising the nucleic acid, preferably the coding region thereof, or polypeptide or the consensus sequence or the polypeptide motif, as depicted in Table I, II or IV, application No. 4, column 5 or 8 in the respective same line as the nucleic acid molecule SEQ ID NO. 35366 or polypeptide SEQ ID NO. 35367, respectively, or a homolog or a fragment thereof, is increased or generated, or if the activity dihydrolipoamide acetyltransferase is increased or generated in a non-human organism, like a microorganism or a plant cell, plant or part thereof, especially with plastidic localization, For example, an increase of the threonine of at least 1 percent, particularly in a range of 35 to 50-percent is conferred as compared to a corresponding non-transformed wild type non-human organism.

[31036] Accordingly, in one embodiment, an increase of threonine in a non-human organism, as compared to a corresponding non-transformed wild type non-human organism, is conferred in the process of the invention, if the activity of a polypeptide showing the activity of a glucose dehydrogenase, or if the activity of the polypeptide B0124, preferably represented by SEQ ID NO. 35483, or a homolog or fragment thereof, or if the activity of a polypeptide encoded by a nucleic acid molecule comprising the nucleic acid SEQ ID NO. 35482, preferably the coding region thereof, or a homolog or fragment thereof, e.g. derived from Escherichia coli, is increased or generated. For example the activity of a nucleic acid molecule or a polypeptide comprising the nucleic acid, preferably the coding region thereof, or polypeptide or the consensus sequence or the polypeptide motif, as depicted in Table I, II or IV, application No. 4, column 5 or 8 in the respective same line as the nucleic acid molecule SEQ ID NO. 35482 or polypeptide SEQ ID NO. 35483, respectively, or a homolog or a fragment thereof, is increased or generated, or if the activity glucose dehydrogenase is increased or generated in a non-human organism, like a microorganism or a plant cell, plant or part thereof, especially with non-targeted localization, For example, an increase of the threonine of at least 1 percent, particularly in a range of 20 to 127-percent is conferred as compared to a corresponding non-transformed wild type non-human organism.

[31037] Accordingly, in one embodiment, an increase of threonine in a non-human organism, as compared to a corresponding non-transformed wild type non-human organism, is conferred in the process of the invention, if the activity of a polypeptide showing the activity of a serine protease, or if the activity of the polypeptide B0161, preferably represented by SEQ ID NO. 7082, or a homolog or fragment thereof, or if the activity of a polypeptide encoded by a nucleic acid molecule comprising the nucleic acid SEQ ID NO. 7081, preferably the coding region thereof, or a homolog or fragment thereof, e.g. derived from Escherichia coli, is increased or generated. For example the activity of a nucleic acid molecule or a polypeptide comprising the nucleic acid, preferably the coding region thereof, or polypeptide or the consensus sequence or the polypeptide motif, as depicted in Table I, II or IV, application No. 4, column 5 or 8 in the respective same line as the nucleic acid molecule SEQ ID NO. 7081 or polypeptide SEQ ID NO. 7082, respectively, or a homolog or a fragment thereof, is increased or generated, or if the activity serine protease is increased or generated in a non-human organism, like a microorganism or a plant cell, plant or part thereof, especially with non-targeted localization, For example, an increase of the threonine of at least 1 percent, particularly in a range of 36 to 144-percent is conferred as compared to a corresponding non-transformed wild type non-human organism.

[31038] Accordingly, in one embodiment, an increase of threonine in a non-human organism, as compared to a corresponding non-transformed wild type non-human organism, is conferred in the process of the invention, if the activity of a polypeptide showing the activity of a acyl-CoA dehydrogenase, or if the activity of the polypeptide B0221, preferably represented by SEQ ID NO. 35591, or a homolog or fragment thereof, or if the activity of a polypeptide encoded by a nucleic acid molecule comprising the nucleic acid SEQ ID NO. 35590, preferably the coding region thereof, or a homolog or fragment thereof, e.g. derived from Escherichia coli, is increased or generated. For example the activity of a nucleic acid molecule or a polypeptide comprising the nucleic acid, preferably the coding region thereof, or polypeptide or the consensus sequence or the polypeptide motif, as depicted in Table I, II or IV, application No. 4, column 5 or 8 in the respective same line as the nucleic acid molecule SEQ ID NO. 35590 or polypeptide SEQ ID NO. 35591, respectively, or a homolog or a fragment thereof, is increased or generated, or if the activity acyl-CoA dehydrogenase is increased or generated in a non-human organism, like a microorganism or a plant cell, plant or part thereof, especially with non-targeted localization, For example, an increase of the threonine of at least 1 percent, particularly in a range of 18 to 53-percent is conferred as compared to a corresponding non-transformed wild type non-human organism.

[31039] Accordingly, in one embodiment, an increase of threonine in a non-human organism, as compared to a corresponding non-transformed wild type non-human organism, is conferred in the process of the invention, if the activity of a polypeptide showing the activity of a beta-galactosidase, or if the activity of the polypeptide B0344, preferably represented by SEQ ID NO. 35734, or a homolog or fragment thereof, or if the activity of a polypeptide encoded by a nucleic acid molecule comprising the nucleic acid SEQ ID NO. 35733, preferably the coding region thereof, or a homolog or fragment thereof, e.g. derived from Escherichia coli, is increased or generated. For example the activity of a nucleic acid molecule or a polypeptide comprising the nucleic acid, preferably the coding region thereof, or polypeptide or the consensus sequence or the polypeptide motif, as depicted in Table I, II or IV, application No. 4, column 5 or 8 in the respective same line as the nucleic acid molecule SEQ ID NO. 35733 or polypeptide SEQ ID NO. 35734, respectively, or a homolog or a fragment thereof, is increased or generated, or if the activity beta-galactosidase is increased or generated in a non-human organism, like a microorganism or a plant cell, plant or part thereof, especially with plastidic localization, For example, an increase of the threonine of at least 1 percent, particularly in a range of 36 to 41-percent is conferred as compared to a corresponding non-transformed wild type non-human organism.

[31040] Accordingly, in one embodiment, an increase of threonine in a non-human organism, as compared to a corresponding non-transformed wild type non-human organism, is conferred in the process of the invention, if the activity of a polypeptide showing the activity of a 2,3-dihydroxyphenylpropionate 1,2-dioxygenase, or if the activity of the polypeptide B0348, preferably represented by SEQ ID NO. 7270, or a homolog or fragment thereof, or if the activity of a polypeptide encoded by a nucleic acid molecule comprising the nucleic acid SEQ ID NO. 7269, preferably the coding region thereof, or a homolog or fragment thereof, e.g. derived from Escherichia coli, is increased or generated. For example the activity of a nucleic acid molecule or a polypeptide comprising the nucleic acid, preferably the coding region thereof, or polypeptide or the consensus sequence or the polypeptide motif, as depicted in Table I, II or IV, application No. 4, column 5 or 8 in the respective same line as the nucleic acid molecule SEQ ID NO. 7269 or polypeptide SEQ ID NO. 7270, respectively, or a homolog or a fragment thereof, is increased or generated, or if the activity 2,3-dihydroxyphenylpropionate 1,2-dioxygenase is increased or generated in a non-human organism, like a microorganism or a plant cell, plant or part thereof, especially with plastidic localization, For example, an increase of the threonine of at least 1 percent, particularly in a range of 36 to 157-percent is conferred as compared to a corresponding non-transformed wild type non-human organism.

[31041] Accordingly, in one embodiment, an increase of threonine in a non-human organism, as compared to a corresponding non-transformed wild type non-human organism, is conferred in the process of the invention, if the activity of a polypeptide showing the activity of a ATP-binding component of a transport system, or if the activity of the polypeptide B0449, preferably represented by SEQ ID NO. 7334, or a homolog or fragment thereof, or if the activity of a polypeptide encoded by a nucleic acid molecule comprising the nucleic acid SEQ ID NO. 7333, preferably the coding region thereof, or a homolog or fragment thereof, e.g. derived from Escherichia coli, is increased or generated. For example the activity of a nucleic acid molecule or a polypeptide comprising the nucleic acid, preferably the coding region thereof, or polypeptide or the consensus sequence or the polypeptide motif, as depicted in Table I, II or IV, application No. 4, column 5 or 8 in the respective same line as the nucleic acid molecule SEQ ID NO. 7333 or polypeptide SEQ ID NO. 7334, respectively, or a homolog or a fragment thereof, is increased or generated, or if the activity ATP-binding component of a transport system is increased or generated in a non-human organism, like a microorganism or a plant cell, plant or part thereof, especially with non-targeted localization, For example, an increase of the threonine of at least 1 percent, particularly in a range of 33 to 123-percent is conferred as compared to a corresponding non-transformed wild type non-human organism.

[31042] Accordingly, in one embodiment, an increase of threonine in a non-human organism, as compared to a corresponding non-transformed wild type non-human organism, is conferred in the process of the invention, if the activity of a polypeptide showing the activity of a membrane transport protein, or if the activity of the polypeptide B0486, preferably represented by SEQ ID NO. 7687, or a homolog or fragment thereof, or if the activity of a polypeptide encoded by a nucleic acid molecule comprising the nucleic acid SEQ ID NO. 7686, preferably the coding region thereof, or a homolog or fragment thereof, e.g. derived from Escherichia coli, is increased or generated. For example the activity of a nucleic acid molecule or a polypeptide comprising the nucleic acid, preferably the coding region thereof, or polypeptide or the consensus sequence or the polypeptide motif, as depicted in Table I, II or IV, application No. 4, column 5 or 8 in the respective same line as the nucleic acid molecule SEQ ID NO. 7686 or polypeptide SEQ ID NO. 7687, respectively, or a homolog or a fragment thereof, is increased or generated, or if the activity membrane transport protein is increased or generated in a non-human organism, like a microorganism or a plant cell, plant or part thereof, especially with non-targeted localization, For example, an increase of the threonine of at least 1 percent, particularly in a range of 29 to 45-percent is conferred as compared to a corresponding non-transformed wild type non-human organism.

[31043] Accordingly, in one embodiment, an increase of threonine in a non-human organism, as compared to a corresponding non-transformed wild type non-human organism, is conferred in the process of the invention, if the activity of a polypeptide showing the activity of a isochorismate synthase, or if the activity of the polypeptide B0593, preferably represented by SEQ ID NO. 35968, or a homolog or fragment thereof, or if the activity of a polypeptide encoded by a nucleic acid molecule comprising the nucleic acid SEQ ID NO. 35967, preferably the coding region thereof, or a homolog or fragment thereof, e.g. derived from Escherichia coli, is increased or generated. For example the activity of a nucleic acid molecule or a polypeptide comprising the nucleic acid, preferably the coding region thereof, or polypeptide or the consensus sequence or the polypeptide motif, as depicted in Table I, II or IV, application No. 4, column 5 or 8 in the respective same line as the nucleic acid molecule SEQ ID NO. 35967 or polypeptide SEQ ID NO. 35968, respectively, or a homolog or a fragment thereof, is increased or generated, or if the activity isochorismate synthase is increased or generated in a non-human organism, like a microorganism or a plant cell, plant or part thereof, especially with plastidic localization, For example, an increase of the threonine of at least 1 percent, particularly in a range of 31 to 76-percent is conferred as compared to a corresponding non-transformed wild type non-human organism.

[31044] Accordingly, in one embodiment, an increase of threonine in a non-human organism, as compared to a corresponding non-transformed wild type non-human organism, is conferred in the process of the invention, if the activity of a polypeptide showing the activity of a sensor histidine kinase, or if the activity of the polypeptide B0695, preferably represented by SEQ ID NO. 93679, or a homolog or fragment thereof, or if the activity of a polypeptide encoded by a nucleic acid molecule comprising the nucleic acid SEQ ID NO. 93678, preferably the coding region thereof, or a homolog or fragment thereof, e.g. derived from Escherichia coli, is increased or generated. For example the activity of a nucleic acid molecule or a polypeptide comprising the nucleic acid, preferably the coding region thereof, or polypeptide or the consensus sequence or the polypeptide motif, as depicted in Table I, II or IV, application No. 4, column 5 or 8 in the respective same line as the nucleic acid molecule SEQ ID NO. 93678 or polypeptide SEQ ID NO. 93679, respectively, or a homolog or a fragment thereof, is increased or generated, or if the activity sensor histidine kinase is increased or generated in a non-human organism, like a microorganism or a plant cell, plant or part thereof, especially with non-targeted localization, For example, an increase of the threonine of at least 1 percent, particularly in a range of 27 to 50-percent is conferred as compared to a corresponding non-transformed wild type non-human organism.

[31045] Accordingly, in one embodiment, an increase of threonine in a non-human organism, as compared to a corresponding non-transformed wild type non-human organism, is conferred in the process of the invention, if the activity of a polypeptide showing the activity of a succinyl-CoA synthetase beta chain, or if the activity of the polypeptide B0728, preferably represented by SEQ ID NO. 93794, or a homolog or fragment thereof, or if the activity of a polypeptide encoded by a nucleic acid molecule comprising the nucleic acid SEQ ID NO. 93793, preferably the coding region thereof, or a homolog or fragment thereof, e.g. derived from Escherichia coli, is increased or generated. For example the activity of a nucleic acid molecule or a polypeptide comprising the nucleic acid, preferably the coding region thereof, or polypeptide or the consensus sequence or the polypeptide motif, as depicted in Table I, II or IV, application No. 4, column 5 or 8 in the respective same line as the nucleic acid molecule SEQ ID NO. 93793 or polypeptide SEQ ID NO. 93794, respectively, or a homolog or a fragment thereof, is increased or generated, or if the activity succinyl-CoA synthetase beta chain is increased or generated in a non-human organism, like a microorganism or a plant cell, plant or part thereof, especially with plastidic localization, For example, an increase of the threonine of at least 1 percent, particularly in a range of 20 to 50-percent is conferred as compared to a corresponding non-transformed wild type non-human organism.

[31046] Accordingly, in one embodiment, an increase of threonine in a non-human organism, as compared to a corresponding non-transformed wild type non-human organism, is conferred in the process of the invention, if the activity of a polypeptide showing the activity of a major facilitator superfamily transporter protein, or if the activity of the polypeptide B0898, preferably represented by SEQ ID NO. 7918, or a homolog or fragment thereof, or if the activity of a polypeptide encoded by a nucleic acid molecule comprising the nucleic acid SEQ ID NO. 7917, preferably the coding region thereof, or a homolog or fragment thereof, e.g. derived from Escherichia coli, is increased or generated. For example the activity of a nucleic acid molecule or a polypeptide comprising the nucleic acid, preferably the coding region thereof, or polypeptide or the consensus sequence or the polypeptide motif, as depicted in Table I, II or IV, application No. 4, column 5 or 8 in the respective same line as the nucleic acid molecule SEQ ID NO. 7917 or polypeptide SEQ ID NO. 7918, respectively, or a homolog or a fragment thereof, is increased or generated, or if the activity major facilitator superfamily transporter protein is increased or generated in a non-human organism, like a microorganism or a plant cell, plant or part thereof, especially with non-targeted localization, For example, an increase of the threonine of at least 1 percent, particularly in a range of 19 to 355-percent is conferred as compared to a corresponding non-transformed wild type non-human organism.

[31047] Accordingly, in one embodiment, an increase of threonine in a non-human organism, as compared to a corresponding non-transformed wild type non-human organism, is conferred in the process of the invention, if the activity of a polypeptide showing the activity of a phosphoanhydride phosphorylase, or if the activity of the polypeptide B0980, preferably represented by SEQ ID NO. 36810, or a homolog or fragment thereof, or if the activity of a polypeptide encoded by a nucleic acid molecule comprising the nucleic acid SEQ ID NO. 36809, preferably the coding region thereof, or a homolog or fragment thereof, e.g. derived from Escherichia coli, is increased or generated. For example the activity of a nucleic acid molecule or a polypeptide comprising the nucleic acid, preferably the coding region thereof, or polypeptide or the consensus sequence or the polypeptide motif, as depicted in Table I, II or IV, application No. 4, column 5 or 8 in the respective same line as the nucleic acid molecule SEQ ID NO. 36809 or polypeptide SEQ ID NO. 36810, respectively, or a homolog or a fragment thereof, is increased or generated, or if the activity phosphoanhydride phosphorylase is increased or generated in a non-human organism, like a microorganism or a plant cell, plant or part thereof, especially with non-targeted localization, For example, an increase of the threonine of at least 1 percent, particularly in a range of 27 to 117-percent is conferred as compared to a corresponding non-transformed wild type non-human organism.

[31048] Accordingly, in one embodiment, an increase of threonine in a non-human organism, as compared to a corresponding non-transformed wild type non-human organism, is conferred in the process of the invention, if the activity of a polypeptide showing the activity of a b1003-protein, or if the activity of the polypeptide B1003, preferably represented by SEQ ID NO. 7942, or a homolog or fragment thereof, or if the activity of a polypeptide encoded by a nucleic acid molecule comprising the nucleic acid SEQ ID NO. 7941, preferably the coding region thereof, or a homolog or fragment thereof, e.g. derived from Escherichia coli, is increased or generated. For example the activity of a nucleic acid molecule or a polypeptide comprising the nucleic acid, preferably the coding region thereof, or polypeptide or the consensus sequence or the polypeptide motif, as depicted in Table I, II or IV, application No. 4, column 5 or 8 in the respective same line as the nucleic acid molecule SEQ ID NO. 7941 or polypeptide SEQ ID NO. 7942, respectively, or a homolog or a fragment thereof, is increased or generated, or if the activity b1003-protein is increased or generated in a non-human organism, like a microorganism or a plant cell, plant or part thereof, especially with non-targeted localization, For example, an increase of the threonine of at least 1 percent, particularly in a range of 60 to 144-percent is conferred as compared to a corresponding non-transformed wild type non-human organism.

[31049] Accordingly, in one embodiment, an increase of threonine in a non-human organism, as compared to a corresponding non-transformed wild type non-human organism, is conferred in the process of the invention, if the activity of a polypeptide showing the activity of a b1108-protein, or if the activity of the polypeptide B1108, preferably represented by SEQ ID NO. 36938, or a homolog or fragment thereof, or if the activity of a polypeptide encoded by a nucleic acid molecule comprising the nucleic acid SEQ ID NO. 36937, preferably the coding region thereof, or a homolog or fragment thereof, e.g. derived from Escherichia coli, is increased or generated. For example the activity of a nucleic acid molecule or a polypeptide comprising the nucleic acid, preferably the coding region thereof, or polypeptide or the consensus sequence or the polypeptide motif, as depicted in Table I, II or IV, application No. 4, column 5 or 8 in the respective same line as the nucleic acid molecule SEQ ID NO. 36937 or polypeptide SEQ ID NO. 36938, respectively, or a homolog or a fragment thereof, is increased or generated, or if the activity b1108-protein is increased or generated in a non-human organism, like a microorganism or a plant cell, plant or part thereof, especially with non-targeted localization, For example, an increase of the threonine of at least 1 percent, particularly in a range of 17 to 59-percent is conferred as compared to a corresponding non-transformed wild type non-human organism.

[31050] Accordingly, in one embodiment, an increase of threonine in a non-human organism, as compared to a corresponding non-transformed wild type non-human organism, is conferred in the process of the invention, if the activity of a polypeptide showing the activity of a restriction alleviation protein, or if the activity of the polypeptide B1348, preferably represented by SEQ ID NO. 77769, or a homolog or fragment thereof, or if the activity of a polypeptide encoded by a nucleic acid molecule comprising the nucleic acid SEQ ID NO. 77768, preferably the coding region thereof, or a homolog or fragment thereof, e.g. derived from Escherichia coli, is increased or generated. For example the activity of a nucleic acid molecule or a polypeptide comprising the nucleic acid, preferably the coding region thereof, or polypeptide or the consensus sequence or the polypeptide motif, as depicted in Table I, II or IV, application No. 4, column 5 or 8 in the respective same line as the nucleic acid molecule SEQ ID NO. 77768 or polypeptide SEQ ID NO. 77769, respectively, or a homolog or a fragment thereof, is increased or generated, or if the activity restriction alleviation protein is increased or generated in a non-human organism, like a microorganism or a plant cell, plant or part thereof, especially with non-targeted localization, For example, an increase of the threonine of at least 1 percent, particularly in a range of 32 to 412 percent is conferred as compared to a corresponding non-transformed wild type non-human organism.

[31051] Accordingly, in one embodiment, an increase of threonine in a non-human organism, as compared to a corresponding non-transformed wild type non-human organism, is conferred in the process of the invention, if the activity of a polypeptide showing the activity of a b1445-protein, or if the activity of the polypeptide B1445, preferably represented by SEQ ID NO. 38290, or a homolog or fragment thereof, or if the activity of a polypeptide encoded by a nucleic acid molecule comprising the nucleic acid SEQ ID NO. 38289, preferably the coding region thereof, or a homolog or fragment thereof, e.g. derived from Escherichia coli, is increased or generated. For example the activity of a nucleic acid molecule or a polypeptide comprising the nucleic acid, preferably the coding region thereof, or polypeptide or the consensus sequence or the polypeptide motif, as depicted in Table I, II or IV, application No. 4, column 5 or 8 in the respective same line as the nucleic acid molecule SEQ ID NO. 38289 or polypeptide SEQ ID NO. 38290, respectively, or a homolog or a fragment thereof, is increased or generated, or if the activity b1445-protein is increased or generated in a non-human organism, like a microorganism or a plant cell, plant or part thereof, especially with non-targeted localization, For example, an increase of the threonine of at least 1 percent, particularly in a range of 34 to 72-percent is conferred as compared to a corresponding non-transformed wild type non-human organism.

[31052] Accordingly, in one embodiment, an increase of threonine in a non-human organism, as compared to a corresponding non-transformed wild type non-human organism, is conferred in the process of the invention, if the activity of a polypeptide showing the activity of a NADP-dependent malic enzyme, or if the activity of the polypeptide B1479, preferably represented by SEQ ID NO. 77775, or a homolog or fragment thereof, or if the activity of a polypeptide encoded by a nucleic acid molecule comprising the nucleic acid SEQ ID NO. 77774, preferably the coding region thereof, or a homolog or fragment thereof, e.g. derived from Escherichia coli, is increased or generated. For example the activity of a nucleic acid molecule or a polypeptide comprising the nucleic acid, preferably the coding region thereof, or polypeptide or the consensus sequence or the polypeptide motif, as depicted in Table I, II or IV, application No. 4, column 5 or 8 in the respective same line as the nucleic acid molecule SEQ ID NO. 77774 or polypeptide SEQ ID NO. 77775, respectively, or a homolog or a fragment thereof, is increased or generated, or if the activity NADP-dependent malic enzyme is increased or generated in a non-human organism, like a microorganism or a plant cell, plant or part thereof, especially with non-targeted localization, For example, an increase of the threonine of at least 1 percent, particularly in a range of 71 to 160-percent is conferred as compared to a corresponding non-transformed wild type non-human organism.

[31053] Accordingly, in one embodiment, an increase of threonine in a non-human organism, as compared to a corresponding non-transformed wild type non-human organism, is conferred in the process of the invention, if the activity of a polypeptide showing the activity of a b1522-protein, or if the activity of the polypeptide B1522, preferably represented by SEQ ID NO. 7948, or a homolog or fragment thereof, or if the activity of a polypeptide encoded by a nucleic acid molecule comprising the nucleic acid SEQ ID NO. 7947, preferably the coding region thereof, or a homolog or fragment thereof, e.g. derived from Escherichia coli, is increased or generated. For example the activity of a nucleic acid molecule or a polypeptide comprising the nucleic acid, preferably the coding region thereof, or polypeptide or the consensus sequence or the polypeptide motif, as depicted in Table I, II or IV, application No. 4, column 5 or 8 in the respective same line as the nucleic acid molecule SEQ ID NO. 7947 or polypeptide SEQ ID NO. 7948, respectively, or a homolog or a fragment thereof, is increased or generated, or if the activity b1522-protein is increased or generated in a non-human organism, like a microorganism or a plant cell, plant or part thereof, especially with non-targeted localization, For example, an increase of the threonine of at least 1 percent, particularly in a range of 30 to 93-percent is conferred as compared to a corresponding non-transformed wild type non-human organism.

[31054] Accordingly, in one embodiment, an increase of threonine in a non-human organism, as compared to a corresponding non-transformed wild type non-human organism, is conferred in the process of the invention, if the activity of a polypeptide showing the activity of a b1670-protein, or if the activity of the polypeptide B1670, preferably represented by SEQ ID NO. 78754, or a homolog or fragment thereof, or if the activity of a polypeptide encoded by a nucleic acid molecule comprising the nucleic acid SEQ ID NO. 78753, preferably the coding region thereof, or a homolog or fragment thereof, e.g. derived from Escherichia coli, is increased or generated. For example the activity of a nucleic acid molecule or a polypeptide comprising the nucleic acid, preferably the coding region thereof, or polypeptide or the consensus sequence or the polypeptide motif, as depicted in Table I, II or IV, application No. 4, column 5 or 8 in the respective same line as the nucleic acid molecule SEQ ID NO. 78753 or polypeptide SEQ ID NO. 78754, respectively, or a homolog or a fragment thereof, is increased or generated, or if the activity b1670-protein is increased or generated in a non-human organism, like a microorganism or a plant cell, plant or part thereof, especially with non-targeted localization, For example, an increase of the threonine of at least 1 percent, particularly in a range of 18 to 47-percent is conferred as compared to a corresponding non-transformed wild type non-human organism.

[31055] Accordingly, in one embodiment, an increase of threonine in a non-human organism, as compared to a corresponding non-transformed wild type non-human organism, is conferred in the process of the invention, if the activity of a polypeptide showing the activity of a pyruvate kinase, or if the activity of the polypeptide B1854, preferably represented by SEQ ID NO. 8364, or a homolog or fragment thereof, or if the activity of a polypeptide encoded by a nucleic acid molecule comprising the nucleic acid SEQ ID NO. 8363, preferably the coding region thereof, or a homolog or fragment thereof, e.g. derived from Escherichia coli, is increased or generated. For example the activity of a nucleic acid molecule or a polypeptide comprising the nucleic acid, preferably the coding region thereof, or polypeptide or the consensus sequence or the polypeptide motif, as depicted in Table I, II or IV, application No. 4, column 5 or 8 in the respective same line as the nucleic acid molecule SEQ ID NO. 8363 or polypeptide SEQ ID NO. 8364, respectively, or a homolog or a fragment thereof, is increased or generated, or if the activity pyruvate kinase is increased or generated in a non-human organism, like a microorganism or a plant cell, plant or part thereof, especially with plastidic localization, For example, an increase of the threonine of at least 1 percent, particularly in a range of 28 to 121-percent is conferred as compared to a corresponding non-transformed wild type non-human organism.

[31056] Accordingly, in one embodiment, an increase of threonine in a non-human organism, as compared to a corresponding non-transformed wild type non-human organism, is conferred in the process of the invention, if the activity of a polypeptide showing the activity of a b1930-protein, or if the activity of the polypeptide B1930, preferably represented by SEQ ID NO. 79182, or a homolog or fragment thereof, or if the activity of a polypeptide encoded by a nucleic acid molecule comprising the nucleic acid SEQ ID NO. 79181, preferably the coding region thereof, or a homolog or fragment thereof, e.g. derived from Escherichia coli, is increased or generated. For example the activity of a nucleic acid molecule or a polypeptide comprising the nucleic acid, preferably the coding region thereof, or polypeptide or the consensus sequence or the polypeptide motif, as depicted in Table I, II or IV, application No. 4, column 5 or 8 in the respective same line as the nucleic acid molecule SEQ ID NO. 79181 or polypeptide SEQ ID NO. 79182, respectively, or a homolog or a fragment thereof, is increased or generated, or if the activity b1930-protein is increased or generated in a non-human organism, like a microorganism or a plant cell, plant or part thereof, especially with non-targeted localization, For example, an increase of the threonine of at least 1 percent, particularly in a range of 16 to 77-percent is conferred as compared to a corresponding non-transformed wild type non-human organism.

[31057] Accordingly, in one embodiment, an increase of threonine in a non-human organism, as compared to a corresponding non-transformed wild type non-human organism, is conferred in the process of the invention, if the activity of a polypeptide showing the activity of a transport protein, or if the activity of the polypeptide B2063, preferably represented by SEQ ID NO. 38948, or a homolog or fragment thereof, or if the activity of a polypeptide encoded by a nucleic acid molecule comprising the nucleic acid SEQ ID NO. 38947, preferably the coding region thereof, or a homolog or fragment thereof, e.g. derived from Escherichia coli, is increased or generated. For example the activity of a nucleic acid molecule or a polypeptide comprising the nucleic acid, preferably the coding region thereof, or polypeptide or the consensus sequence or the polypeptide motif, as depicted in Table I, II or IV, application No. 4, column 5 or 8 in the respective same line as the nucleic acid molecule SEQ ID NO. 38947 or polypeptide SEQ ID NO. 38948, respectively, or a homolog or a fragment thereof, is increased or generated, or if the activity transport protein is increased or generated in a non-human organism, like a microorganism or a plant cell, plant or part thereof, especially with non-targeted localization, For example, an increase of the threonine of at least 1 percent, particularly in a range of 17 to 157-percent is conferred as compared to a corresponding non-transformed wild type non-human organism.

[31058] Accordingly, in one embodiment, an increase of threonine in a non-human organism, as compared to a corresponding non-transformed wild type non-human organism, is conferred in the process of the invention, if the activity of a polypeptide showing the activity of a b2360-protein, or if the activity of the polypeptide B2360, preferably represented by SEQ ID NO. 39220, or a homolog or fragment thereof, or if the activity of a polypeptide encoded by a nucleic acid molecule comprising the nucleic acid SEQ ID NO. 39219, preferably the coding region thereof, or a homolog or fragment thereof, e.g. derived from Escherichia coli, is increased or generated. For example the activity of a nucleic acid molecule or a polypeptide comprising the nucleic acid, preferably the coding region thereof, or polypeptide or the consensus sequence or the polypeptide motif, as depicted in Table I, II or IV, application No. 4, column 5 or 8 in the respective same line as the nucleic acid molecule SEQ ID NO. 39219 or polypeptide SEQ ID NO. 39220, respectively, or a homolog or a fragment thereof, is increased or generated, or if the activity B2360-protein is increased or generated in a non-human organism, like a microorganism or a plant cell, plant or part thereof, especially with non-targeted localization, For example, an increase of the threonine of at least 1 percent, particularly in a range of 21 to 27-percent is conferred as compared to a corresponding non-transformed wild type non-human organism.

[31059] Accordingly, in one embodiment, an increase of threonine in a non-human organism, as compared to a corresponding non-transformed wild type non-human organism, is conferred in the process of the invention, if the activity of a polypeptide showing the activity of a D-serine dehydratase, or if the activity of the polypeptide B2366, preferably represented by SEQ ID NO. 79343, or a homolog or fragment thereof, or if the activity of a polypeptide encoded by a nucleic acid molecule comprising the nucleic acid SEQ ID NO. 79342, preferably the coding region thereof, or a homolog or fragment thereof, e.g. derived from Escherichia coli, is increased or generated. For example the activity of a nucleic acid molecule or a polypeptide comprising the nucleic acid, preferably the coding region thereof, or polypeptide or the consensus sequence or the polypeptide motif, as depicted in Table I, II or IV, application No. 4, column 5 or 8 in the respective same line as the nucleic acid molecule SEQ ID NO. 79342 or polypeptide SEQ ID NO. 79343, respectively, or a homolog or a fragment thereof, is increased or generated, or if the activity D-serine dehydratase is increased or generated in a non-human organism, like a microorganism or a plant cell, plant or part thereof, especially with plastidic localization, For example, an increase of the threonine of at least 1 percent, particularly in a range of 19 to 81-percent is conferred as compared to a corresponding non-transformed wild type non-human organism.

[31060] Accordingly, in one embodiment, an increase of threonine in a non-human organism, as compared to a corresponding non-transformed wild type non-human organism, is conferred in the process of the invention, if the activity of a polypeptide showing the activity of a b2399-protein, or if the activity of the polypeptide B2399, preferably represented by SEQ ID NO. 39238, or a homolog or fragment thereof, or if the activity of a polypeptide encoded by a nucleic acid molecule comprising the nucleic acid SEQ ID NO. 39237, preferably the coding region thereof, or a homolog or fragment thereof, e.g. derived from Escherichia coli, is increased or generated. For example the activity of a nucleic acid molecule or a polypeptide comprising the nucleic acid, preferably the coding region thereof, or polypeptide or the consensus sequence or the polypeptide motif, as depicted in Table I, II or IV, application No. 4, column 5 or 8 in the respective same line as the nucleic acid molecule SEQ ID NO. 39237 or polypeptide SEQ ID NO. 39238, respectively, or a homolog or a fragment thereof, is increased or generated, or if the activity b2399-protein is increased or generated in a non-human organism, like a microorganism or a plant cell, plant or part thereof, especially with non-targeted localization, For example, an increase of the threonine of at least 1 percent, particularly in a range of 29 to 74-percent is conferred as compared to a corresponding non-transformed wild type non-human organism.

[31061] Accordingly, in one embodiment, an increase of threonine in a non-human organism, as compared to a corresponding non-transformed wild type non-human organism, is conferred in the process of the invention, if the activity of a polypeptide showing the activity of a transcriptional regulator, or if the activity of the polypeptide B2405, preferably represented by SEQ ID NO. 39256, or a homolog or fragment thereof, or if the activity of a polypeptide encoded by a nucleic acid molecule comprising the nucleic acid SEQ ID NO. 39255, preferably the coding region thereof, or a homolog or fragment thereof, e.g. derived from Escherichia coli, is increased or generated. For example the activity of a nucleic acid molecule or a polypeptide comprising the nucleic acid, preferably the coding region thereof, or polypeptide or the consensus sequence or the polypeptide motif, as depicted in Table I, II or IV, application No. 4, column 5 or 8 in the respective same line as the nucleic acid molecule SEQ ID NO. 39255 or polypeptide SEQ ID NO. 39256, respectively, or a homolog or a fragment thereof, is increased or generated, or if the activity transcriptional regulator is increased or generated in a non-human organism, like a microorganism or a plant cell, plant or part thereof, especially with non-targeted localization, For example, an increase of the threonine of at least 1 percent, particularly in a range of 20 to 28-percent is conferred as compared to a corresponding non-transformed wild type non-human organism.

[31062] Accordingly, in one embodiment, an increase of threonine in a non-human organism, as compared to a corresponding non-transformed wild type non-human organism, is conferred in the process of the invention, if the activity of a polypeptide showing the activity of a b2513-protein, or if the activity of the polypeptide B2513, preferably represented by SEQ ID NO. 9168, or a homolog or fragment thereof, or if the activity of a polypeptide encoded by a nucleic acid molecule comprising the nucleic acid SEQ ID NO. 9167, preferably the coding region thereof, or a homolog or fragment thereof, e.g. derived from Escherichia coli, is increased or generated. For example the activity of a nucleic acid molecule or a polypeptide comprising the nucleic acid, preferably the coding region thereof, or polypeptide or the consensus sequence or the polypeptide motif, as depicted in Table I, II or IV, application No. 4, column 5 or 8 in the respective same line as the nucleic acid molecule SEQ ID NO. 9167 or polypeptide SEQ ID NO. 9168, respectively, or a homolog or a fragment thereof, is increased or generated, or if the activity b2513-protein is increased or generated in a non-human organism, like a microorganism or a plant cell, plant or part thereof, especially with non-targeted localization, For example, an increase of the threonine of at least 1 percent, particularly in a range of 38 to 74-percent is conferred as compared to a corresponding non-transformed wild type non-human organism.

[31063] Accordingly, in one embodiment, an increase of threonine in a non-human organism, as compared to a corresponding non-transformed wild type non-human organism, is conferred in the process of the invention, if the activity of a polypeptide showing the activity of a b2613-protein, or if the activity of the polypeptide B2613, preferably represented by SEQ ID NO. 40666, or a homolog or fragment thereof, or if the activity of a polypeptide encoded by a nucleic acid molecule comprising the nucleic acid SEQ ID NO. 40665, preferably the coding region thereof, or a homolog or fragment thereof, e.g. derived from Escherichia coli, is increased or generated. For example the activity of a nucleic acid molecule or a polypeptide comprising the nucleic acid, preferably the coding region thereof, or polypeptide or the consensus sequence or the polypeptide motif, as depicted in Table I, II or IV, application No. 4, column 5 or 8 in the respective same line as the nucleic acid molecule SEQ ID NO. 40665 or polypeptide SEQ ID NO. 40666, respectively, or a homolog or a fragment thereof, is increased or generated, or if the activity b2613-protein is increased or generated in a non-human organism, like a microorganism or a plant cell, plant or part thereof, especially with non-targeted localization, For example, an increase of the threonine of at least 1 percent, particularly in a range of 19 to 54-percent is conferred as compared to a corresponding non-transformed wild type non-human organism.

[31064] Accordingly, in one embodiment, an increase of threonine in a non-human organism, as compared to a corresponding non-transformed wild type non-human organism, is conferred in the process of the invention, if the activity of a polypeptide showing the activity of a murein transglycosylase, or if the activity of the polypeptide B2701, preferably represented by SEQ ID NO. 80757, or a homolog or fragment thereof, or if the activity of a polypeptide encoded by a nucleic acid molecule comprising the nucleic acid SEQ ID NO. 80756, preferably the coding region thereof, or a homolog or fragment thereof, e.g. derived from Escherichia coli, is increased or generated. For example the activity of a nucleic acid molecule or a polypeptide comprising the nucleic acid, preferably the coding region thereof, or polypeptide or the consensus sequence or the polypeptide motif, as depicted in Table I, II or IV, application No. 4, column 5 or 8 in the respective same line as the nucleic acid molecule SEQ ID NO. 80756 or polypeptide SEQ ID NO. 80757, respectively, or a homolog or a fragment thereof, is increased or generated, or if the activity murein transglycosylase is increased or generated in a non-human organism, like a microorganism or a plant cell, plant or part thereof, especially with non-targeted localization, For example, an increase of the threonine of at least 1 percent, particularly in a range of 30 to 59-percent is conferred as compared to a corresponding non-transformed wild type non-human organism.

[31065] Accordingly, in one embodiment, an increase of threonine in a non-human organism, as compared to a corresponding non-transformed wild type non-human organism, is conferred in the process of the invention, if the activity of a polypeptide showing the activity of a transcriptional regulator, or if the activity of the polypeptide B2714, preferably represented by SEQ ID NO. 40742, or a homolog or fragment thereof, or if the activity of a polypeptide encoded by a nucleic acid molecule comprising the nucleic acid SEQ ID NO. 40741, preferably the coding region thereof, or a homolog or fragment thereof, e.g. derived from Escherichia coli, is increased or generated. For example the activity of a nucleic acid molecule or a polypeptide comprising the nucleic acid, preferably the coding region thereof, or polypeptide or the consensus sequence or the polypeptide motif, as depicted in Table I, II or IV, application No. 4, column 5 or 8 in the respective same line as the nucleic acid molecule SEQ ID NO. 40741 or polypeptide SEQ ID NO. 40742, respectively, or a homolog or a fragment thereof, is increased or generated, or if the activity transcriptional regulator is increased or generated in a non-human organism, like a microorganism or a plant cell, plant or part thereof, especially with non-targeted localization, For example, an increase of the threonine of at least 1 percent, particularly in a range of 17 to 68-percent is conferred as compared to a corresponding non-transformed wild type non-human organism.

[31066] Accordingly, in one embodiment, an increase of threonine in a non-human organism, as compared to a corresponding non-transformed wild type non-human organism, is conferred in the process of the invention, if the activity of a polypeptide showing the activity of a b2739-protein, or if the activity of the polypeptide B2739, preferably represented by SEQ ID NO. 80907, or a homolog or fragment thereof, or if the activity of a polypeptide encoded by a nucleic acid molecule comprising the nucleic acid SEQ ID NO. 80906, preferably the coding region thereof, or a homolog or fragment thereof, e.g. derived from Escherichia coli, is increased or generated. For example the activity of a nucleic acid molecule or a polypeptide comprising the nucleic acid, preferably the coding region thereof, or polypeptide or the consensus sequence or the polypeptide motif, as depicted in Table I, II or IV, application No. 4, column 5 or 8 in the respective same line as the nucleic acid molecule SEQ ID NO. 80906 or polypeptide SEQ ID NO. 80907, respectively, or a homolog or a fragment thereof, is increased or generated, or if the activity b2739-protein is increased or generated in a non-human organism, like a microorganism or a plant cell, plant or part thereof, especially with non-targeted localization, For example, an increase of the threonine of at least 1 percent, particularly in a range of 28 to 74-percent is conferred as compared to a corresponding non-transformed wild type non-human organism.

[31067] Accordingly, in one embodiment, an increase of threonine in a non-human organism, as compared to a corresponding non-transformed wild type non-human organism, is conferred in the process of the invention, if the activity of a polypeptide showing the activity of a 2-C-methyl-D-erythritol 4-phosphate cytidylyltransferase, or if the activity of the polypeptide B2747, preferably represented by SEQ ID NO. 81076, or a homolog or fragment thereof, or if the activity of a polypeptide encoded by a nucleic acid molecule comprising the nucleic acid SEQ ID NO. 81075, preferably the coding region thereof, or a homolog or fragment thereof, e.g. derived from Escherichia coli, is increased or generated. For example the activity of a nucleic acid molecule or a polypeptide comprising the nucleic acid, preferably the coding region thereof, or polypeptide or the consensus sequence or the polypeptide motif, as depicted in Table I, II or IV, application No. 4, column 5 or 8 in the respective same line as the nucleic acid molecule SEQ ID NO. 81075 or polypeptide SEQ ID NO. 81076, respectively, or a homolog or a fragment thereof, is increased or generated, or if the activity 2-C-methyl-D-erythritol 4-phosphate cytidylyltransferase is increased or generated in a non-human organism, like a microorganism or a plant cell, plant or part thereof, especially with non-targeted localization, For example, an increase of the threonine of at least 1 percent, particularly in a range of 29 to 59-percent is conferred as compared to a corresponding non-transformed wild type non-human organism.

[31068] Accordingly, in one embodiment, an increase of threonine in a non-human organism, as compared to a corresponding non-transformed wild type non-human organism, is conferred in the process of the invention, if the activity of a polypeptide showing the activity of a b2812-protein, or if the activity of the polypeptide B2812, preferably represented by SEQ ID NO. 40796, or a homolog or fragment thereof, or if the activity of a polypeptide encoded by a nucleic acid molecule comprising the nucleic acid SEQ ID NO. 40795, preferably the coding region thereof, or a homolog or fragment thereof, e.g. derived from Escherichia coli, is increased or generated. For example the activity of a nucleic acid molecule or a polypeptide comprising the nucleic acid, preferably the coding region thereof, or polypeptide or the consensus sequence or the polypeptide motif, as depicted in Table I, II or IV, application No. 4, column 5 or 8 in the respective same line as the nucleic acid molecule SEQ ID NO. 40795 or polypeptide SEQ ID NO. 40796, respectively, or a homolog or a fragment thereof, is increased or generated, or if the activity b2812-protein is increased or generated in a non-human organism, like a microorganism or a plant cell, plant or part thereof, especially with plastidic localization, For example, an increase of the threonine of at least 1 percent, particularly in a range of 23 to 44-percent is conferred as compared to a corresponding non-transformed wild type non-human organism.

[31069] Accordingly, in one embodiment, an increase of threonine in a non-human organism, as compared to a corresponding non-transformed wild type non-human organism, is conferred in the process of the invention, if the activity of a polypeptide showing the activity of a b2812-protein, or if the activity of the polypeptide B2812, preferably represented by SEQ ID NO. 40796, or a homolog or fragment thereof, or if the activity of a polypeptide encoded by a nucleic acid molecule comprising the nucleic acid SEQ ID NO. 40795, preferably the coding region thereof, or a homolog or fragment thereof, e.g. derived from Escherichia coli, is increased or generated. For example the activity of a nucleic acid molecule or a polypeptide comprising the nucleic acid, preferably the coding region thereof, or polypeptide or the consensus sequence or the polypeptide motif, as depicted in Table I, II or IV, application No. 4, column 5 or 8 in the respective same line as the nucleic acid molecule SEQ ID NO. 40795 or polypeptide SEQ ID NO. 40796, respectively, or a homolog or a fragment thereof, is increased or generated, or if the activity b2812-protein is increased or generated in a non-human organism, like a microorganism or a plant cell, plant or part thereof, especially with non-targeted localization, For example, an increase of the threonine of at least 1 percent, particularly in a range of 28 to 59-percent is conferred as compared to a corresponding non-transformed wild type non-human organism.

[31070] Accordingly, in one embodiment, an increase of threonine in a non-human organism, as compared to a corresponding non-transformed wild type non-human organism, is conferred in the process of the invention, if the activity of a polypeptide showing the activity of a D-3-phosphoglycerate dehydrogenase, or if the activity of the polypeptide B2913, preferably represented by SEQ ID NO. 81989, or a homolog or fragment thereof, or if the activity of a polypeptide encoded by a nucleic acid molecule comprising the nucleic acid SEQ ID NO. 81988, preferably the coding region thereof, or a homolog or fragment thereof, e.g. derived from Escherichia coli, is increased or generated. For example the activity of a nucleic acid molecule or a polypeptide comprising the nucleic acid, preferably the coding region thereof, or polypeptide or the consensus sequence or the polypeptide motif, as depicted in Table I, II or IV, application No. 4, column 5 or 8 in the respective same line as the nucleic acid molecule SEQ ID NO. 81988 or polypeptide SEQ ID NO. 81989, respectively, or a homolog or a fragment thereof, is increased or generated, or if the activity D-3-phosphoglycerate dehydrogenase is increased or generated in a non-human organism, like a microorganism or a plant cell, plant or part thereof, especially with plastidic localization, For example, an increase of the threonine of at least 1 percent, particularly in a range of 26 to 200-percent is conferred as compared to a corresponding non-transformed wild type non-human organism.

[31071] Accordingly, in one embodiment, an increase of threonine in a non-human organism, as compared to a corresponding non-transformed wild type non-human organism, is conferred in the process of the invention, if the activity of a polypeptide showing the activity of a L-asparaginase, or if the activity of the polypeptide B2957, preferably represented by SEQ ID NO. 41500, or a homolog or fragment thereof, or if the activity of a polypeptide encoded by a nucleic acid molecule comprising the nucleic acid SEQ ID NO. 41499, preferably the coding region thereof, or a homolog or fragment thereof, e.g. derived from Escherichia coli, is increased or generated. For example the activity of a nucleic acid molecule or a polypeptide comprising the nucleic acid, preferably the coding region thereof, or polypeptide or the consensus sequence or the polypeptide motif, as depicted in Table I, II or IV, application No. 4, column 5 or 8 in the respective same line as the nucleic acid molecule SEQ ID NO. 41499 or polypeptide SEQ ID NO. 41500, respectively, or a homolog or a fragment thereof, is increased or generated, or if the activity L-asparaginase is increased or generated in a non-human organism, like a microorganism or a plant cell, plant or part thereof, especially with non-targeted localization, For example, an increase of the threonine of at least 1 percent, particularly in a range of 18 to 72-percent is conferred as compared to a corresponding non-transformed wild type non-human organism.

[31072] Accordingly, in one embodiment, an increase of threonine in a non-human organism, as compared to a corresponding non-transformed wild type non-human organism, is conferred in the process of the invention, if the activity of a polypeptide showing the activity of a glycoprotease, or if the activity of the polypeptide B3064, preferably represented by SEQ ID NO. 42047, or a homolog or fragment thereof, or if the activity of a polypeptide encoded by a nucleic acid molecule comprising the nucleic acid SEQ ID NO. 42046, preferably the coding region thereof, or a homolog or fragment thereof, e.g. derived from Escherichia coli, is increased or generated. For example the activity of a nucleic acid molecule or a polypeptide comprising the nucleic acid, preferably the coding region thereof, or polypeptide or the consensus sequence or the polypeptide motif, as depicted in Table I, II or IV, application No. 4, column 5 or 8 in the respective same line as the nucleic acid molecule SEQ ID NO. 42046 or polypeptide SEQ ID NO. 42047, respectively, or a homolog or a fragment thereof, is increased or generated, or if the activity glycoprotease is increased or generated in a non-human organism, like a microorganism or a plant cell, plant or part thereof, especially with non-targeted localization, For example, an increase of the threonine of at least 1 percent, particularly in a range of 23 to 76-percent is conferred as compared to a corresponding non-transformed wild type non-human organism.

[31073] Accordingly, in one embodiment, an increase of threonine in a non-human organism, as compared to a corresponding non-transformed wild type non-human organism, is conferred in the process of the invention, if the activity of a polypeptide showing the activity of a b3083-protein, or if the activity of the polypeptide B3083, preferably represented by SEQ ID NO. 82425, or a homolog or fragment thereof, or if the activity of a polypeptide encoded by a nucleic acid molecule comprising the nucleic acid SEQ ID NO. 82424, preferably the coding region thereof, or a homolog or fragment thereof, e.g. derived from Escherichia coli, is increased or generated. For example the activity of a nucleic acid molecule or a polypeptide comprising the nucleic acid, preferably the coding region thereof, or polypeptide or the consensus sequence or the polypeptide motif, as depicted in Table I, II or IV, application No. 4, column 5 or 8 in the respective same line as the nucleic acid molecule SEQ ID NO. 82424 or polypeptide SEQ ID NO. 82425, respectively, or a homolog or a fragment thereof, is increased or generated, or if the activity b3083-protein is increased or generated in a non-human organism, like a microorganism or a plant cell, plant or part thereof, especially with non-targeted localization, For example, an increase of the threonine of at least 1 percent, particularly in a range of 26 to 46-percent is conferred as compared to a corresponding non-transformed wild type non-human organism.

[31074] Accordingly, in one embodiment, an increase of threonine in a non-human organism, as compared to a corresponding non-transformed wild type non-human organism, is conferred in the process of the invention, if the activity of a polypeptide showing the activity of a methyltransferase, or if the activity of the polypeptide B3262, preferably represented by SEQ ID NO. 42503, or a homolog or fragment thereof, or if the activity of a polypeptide encoded by a nucleic acid molecule comprising the nucleic acid SEQ ID NO. 42502, preferably the coding region thereof, or a homolog or fragment thereof, e.g. derived from Escherichia coli, is increased or generated. For example the activity of a nucleic acid molecule or a polypeptide comprising the nucleic acid, preferably the coding region thereof, or polypeptide or the consensus sequence or the polypeptide motif, as depicted in Table I, II or IV, application No. 4, column 5 or 8 in the respective same line as the nucleic acid molecule SEQ ID NO. 42502 or polypeptide SEQ ID NO. 42503, respectively, or a homolog or a fragment thereof, is increased or generated, or if the activity methyltransferase is increased or generated in a non-human organism, like a microorganism or a plant cell, plant or part thereof, especially with non-targeted localization, For example, an increase of the threonine of at least 1 percent, particularly in a range of 28 to 141-percent is conferred as compared to a corresponding non-transformed wild type non-human organism.

[31075] Accordingly, in one embodiment, an increase of threonine in a non-human organism, as compared to a corresponding non-transformed wild type non-human organism, is conferred in the process of the invention, if the activity of a polypeptide showing the activity of a glycogen synthase, or if the activity of the polypeptide B3429, preferably represented by SEQ ID NO. 94052, or a homolog or fragment thereof, or if the activity of a polypeptide encoded by a nucleic acid molecule comprising the nucleic acid SEQ ID NO. 94051, preferably the coding region thereof, or a homolog or fragment thereof, e.g. derived from Escherichia coli, is increased or generated. For example the activity of a nucleic acid molecule or a polypeptide comprising the nucleic acid, preferably the coding region thereof, or polypeptide or the consensus sequence or the polypeptide motif, as depicted in Table I, II or IV, application No. 4, column 5 or 8 in the respective same line as the nucleic acid molecule SEQ ID NO. 94051 or polypeptide SEQ ID NO. 94052, respectively, or a homolog or a fragment thereof, is increased or generated, or if the activity glycogen synthase is increased or generated in a non-human organism, like a microorganism or a plant cell, plant or part thereof, especially with mitochondrial localization, For example, an increase of the threonine of at least 1 percent, particularly in a range of 27 to 60-percent is conferred as compared to a corresponding non-transformed wild type non-human organism.

[31076] Accordingly, in one embodiment, an increase of threonine in a non-human organism, as compared to a corresponding non-transformed wild type non-human organism, is conferred in the process of the invention, if the activity of a polypeptide showing the activity of a b3442-protein, or if the activity of the polypeptide B3442, preferably represented by SEQ ID NO. 94381, or a homolog or fragment thereof, or if the activity of a polypeptide encoded by a nucleic acid molecule comprising the nucleic acid SEQ ID NO. 94380, preferably the coding region thereof, or a homolog or fragment thereof, e.g. derived from Escherichia coli, is increased or generated. For example the activity of a nucleic acid molecule or a polypeptide comprising the nucleic acid, preferably the coding region thereof, or polypeptide or the consensus sequence or the polypeptide motif, as depicted in Table I, II or IV, application No. 4, column 5 or 8 in the respective same line as the nucleic acid molecule SEQ ID NO. 94380 or polypeptide SEQ ID NO. 94381, respectively, or a homolog or a fragment thereof, is increased or generated, or if the activity b3442-protein is increased or generated in a non-human organism, like a microorganism or a plant cell, plant or part thereof, especially with non-targeted localization, For example, an increase of the threonine of at least 1 percent, particularly in a range of 33 to 44-percent is conferred as compared to a corresponding non-transformed wild type non-human organism.

[31077] Accordingly, in one embodiment, an increase of threonine in a non-human organism, as compared to a corresponding non-transformed wild type non-human organism, is conferred in the process of the invention, if the activity of a polypeptide showing the activity of a valine-pyruvate transaminase, or if the activity of the polypeptide B3572, preferably represented by SEQ ID NO. 10173, or a homolog or fragment thereof, or if the activity of a polypeptide encoded by a nucleic acid molecule comprising the nucleic acid SEQ ID NO. 10172, preferably the coding region thereof, or a homolog or fragment thereof, e.g. derived from Escherichia coli, is increased or generated. For example the activity of a nucleic acid molecule or a polypeptide comprising the nucleic acid, preferably the coding region thereof, or polypeptide or the consensus sequence or the polypeptide motif, as depicted in Table I, II or IV, application No. 4, column 5 or 8 in the respective same line as the nucleic acid molecule SEQ ID NO. 10172 or polypeptide SEQ ID NO. 10173, respectively, or a homolog or a fragment thereof, is increased or generated, or if the activity valine-pyruvate transaminase is increased or generated in a non-human organism, like a microorganism or a plant cell, plant or part thereof, especially with plastidic localization, For example, an increase of the threonine of at least 1 percent, particularly in a range of 24 to 80 percent is conferred as compared to a corresponding non-transformed wild type non-human organism.

[31078] Accordingly, in one embodiment, an increase of threonine in a non-human organism, as compared to a corresponding non-transformed wild type non-human organism, is conferred in the process of the invention, if the activity of a polypeptide showing the activity of a b3646-protein, or if the activity of the polypeptide B3646, preferably represented by SEQ ID NO. 83430, or a homolog or fragment thereof, or if the activity of a polypeptide encoded by a nucleic acid molecule comprising the nucleic acid SEQ ID NO. 83429, preferably the coding region thereof, or a homolog or fragment thereof, e.g. derived from Escherichia coli, is increased or generated. For example the activity of a nucleic acid molecule or a polypeptide comprising the nucleic acid, preferably the coding region thereof, or polypeptide or the consensus sequence or the polypeptide motif, as depicted in Table I, II or IV, application No. 4, column 5 or 8 in the respective same line as the nucleic acid molecule SEQ ID NO. 83429 or polypeptide SEQ ID NO. 83430, respectively, or a homolog or a fragment thereof, is increased or generated, or if the activity b3646-protein is increased or generated in a non-human organism, like a microorganism or a plant cell, plant or part thereof, especially with non-targeted localization, For example, an increase of the threonine of at least 1 percent, particularly in a range of 24 to 35-percent is conferred as compared to a corresponding non-transformed wild type non-human organism.

[31079] Accordingly, in one embodiment, an increase of threonine in a non-human organism, as compared to a corresponding non-transformed wild type non-human organism, is conferred in the process of the invention, if the activity of a polypeptide showing the activity of a ATP synthase subunit beta, or if the activity of the polypeptide B3732, preferably represented by SEQ ID NO. 43249, or a homolog or fragment thereof, or if the activity of a polypeptide encoded by a nucleic acid molecule comprising the nucleic acid SEQ ID NO. 43248, preferably the coding region thereof, or a homolog or fragment thereof, e.g. derived from Escherichia coli, is increased or generated. For example the activity of a nucleic acid molecule or a polypeptide comprising the nucleic acid, preferably the coding region thereof, or polypeptide or the consensus sequence or the polypeptide motif, as depicted in Table I, II or IV, application No. 4, column 5 or 8 in the respective same line as the nucleic acid molecule SEQ ID NO. 43248 or polypeptide SEQ ID NO. 43249, respectively, or a homolog or a fragment thereof, is increased or generated, or if the activity ATP synthase subunit beta is increased or generated in a non-human organism, like a microorganism or a plant cell, plant or part thereof, especially with non-targeted localization, For example, an increase of the threonine of at least 1 percent, particularly in a range of 17 to 37-percent is conferred as compared to a corresponding non-transformed wild type non-human organism.

[31080] Accordingly, in one embodiment, an increase of threonine in a non-human organism, as compared to a corresponding non-transformed wild type non-human organism, is conferred in the process of the invention, if the activity of a polypeptide showing the activity of a dihydroxyacid dehydratase, or if the activity of the polypeptide B3771, preferably represented by SEQ ID NO. 10253, or a homolog or fragment thereof, or if the activity of a polypeptide encoded by a nucleic acid molecule comprising the nucleic acid SEQ ID NO. 10252, preferably the coding region thereof, or a homolog or fragment thereof, e.g. derived from Escherichia coli, is increased or generated. For example the activity of a nucleic acid molecule or a polypeptide comprising the nucleic acid, preferably the coding region thereof, or polypeptide or the consensus sequence or the polypeptide motif, as depicted in Table I, II or IV, application No. 4, column 5 or 8 in the respective same line as the nucleic acid molecule SEQ ID NO. 10252 or polypeptide SEQ ID NO. 10253, respectively, or a homolog or a fragment thereof, is increased or generated, or if the activity dihydroxyacid dehydratase is increased or generated in a non-human organism, like a microorganism or a plant cell, plant or part thereof, especially with non-targeted localization, For example, an increase of the threonine of at least 1 percent, particularly in a range of 26 to 72 percent is conferred as compared to a corresponding non-transformed wild type non-human organism.

[31081] Accordingly, in one embodiment, an increase of threonine in a non-human organism, as compared to a corresponding non-transformed wild type non-human organism, is conferred in the process of the invention, if the activity of a polypeptide showing the activity of a ketol-acid reductoisomerase, or if the activity of the polypeptide B3774, preferably represented by SEQ ID NO. 94387, or a homolog or fragment thereof, or if the activity of a polypeptide encoded by a nucleic acid molecule comprising the nucleic acid SEQ ID NO. 94386, preferably the coding region thereof, or a homolog or fragment thereof, e.g. derived from Escherichia coli, is increased or generated. For example the activity of a nucleic acid molecule or a polypeptide comprising the nucleic acid, preferably the coding region thereof, or polypeptide or the consensus sequence or the polypeptide motif, as depicted in Table I, II or IV, application No. 4, column 5 or 8 in the respective same line as the nucleic acid molecule SEQ ID NO. 94386 or polypeptide SEQ ID NO. 94387, respectively, or a homolog or a fragment thereof, is increased or generated, or if the activity ketol-acid reductoisomerase is increased or generated in a non-human organism, like a microorganism or a plant cell, plant or part thereof, especially with non-targeted localization, For example, an increase of the threonine of at least 1 percent, particularly in a range of 29 to 91-percent is conferred as compared to a corresponding non-transformed wild type non-human organism.

[31082] Accordingly, in one embodiment, an increase of threonine in a non-human organism, as compared to a corresponding non-transformed wild type non-human organism, is conferred in the process of the invention, if the activity of a polypeptide showing the activity of a enterobacterial common antigen polymerase, or if the activity of the polypeptide B3793, preferably represented by SEQ ID NO. 43801, or a homolog or fragment thereof, or if the activity of a polypeptide encoded by a nucleic acid molecule comprising the nucleic acid SEQ ID NO. 43800, preferably the coding region thereof, or a homolog or fragment thereof, e.g. derived from Escherichia coli, is increased or generated. For example the activity of a nucleic acid molecule or a polypeptide comprising the nucleic acid, preferably the coding region thereof, or polypeptide or the consensus sequence or the polypeptide motif, as depicted in Table I, II or IV, application No. 4, column 5 or 8 in the respective same line as the nucleic acid molecule SEQ ID NO. 43800 or polypeptide SEQ ID NO. 43801, respectively, or a homolog or a fragment thereof, is increased or generated, or if the activity enterobacterial common antigen polymerase is increased or generated in a non-human organism, like a microorganism or a plant cell, plant or part thereof, especially with non-targeted localization, For example, an increase of the threonine of at least 1 percent, particularly in a range of 17 to 70-percent is conferred as compared to a corresponding non-transformed wild type non-human organism.

[31083] Accordingly, in one embodiment, an increase of threonine in a non-human organism, as compared to a corresponding non-transformed wild type non-human organism, is conferred in the process of the invention, if the activity of a polypeptide showing the activity of a DNA helicase II, or if the activity of the polypeptide B3813, preferably represented by SEQ ID NO. 43840, or a homolog or fragment thereof, or if the activity of a polypeptide encoded by a nucleic acid molecule comprising the nucleic acid SEQ ID NO. 43839, preferably the coding region thereof, or a homolog or fragment thereof, e.g. derived from Escherichia coli, is increased or generated. For example the activity of a nucleic acid molecule or a polypeptide comprising the nucleic acid, preferably the coding region thereof, or polypeptide or the consensus sequence or the polypeptide motif, as depicted in Table I, II or IV, application No. 4, column 5 or 8 in the respective same line as the nucleic acid molecule SEQ ID NO. 43839 or polypeptide SEQ ID NO. 43840, respectively, or a homolog or a fragment thereof, is increased or generated, or if the activity DNA helicase II is increased or generated in a non-human organism, like a microorganism or a plant cell, plant or part thereof, especially with non-targeted localization, For example, an increase of the threonine of at least 1 percent, particularly in a range of 25 to 94-percent is conferred as compared to a corresponding non-transformed wild type non-human organism.

[31084] Accordingly, in one embodiment, an increase of threonine in a non-human organism, as compared to a corresponding non-transformed wild type non-human organism, is conferred in the process of the invention, if the activity of a polypeptide showing the activity of a transcriptional regulator, or if the activity of the polypeptide B3872, preferably represented by SEQ ID NO. 83822, or a homolog or fragment thereof, or if the activity of a polypeptide encoded by a nucleic acid molecule comprising the nucleic acid SEQ ID NO. 83821, preferably the coding region thereof, or a homolog or fragment thereof, e.g. derived from Escherichia coli, is increased or generated. For example the activity of a nucleic acid molecule or a polypeptide comprising the nucleic acid, preferably the coding region thereof, or polypeptide or the consensus sequence or the polypeptide motif, as depicted in Table I, II or IV, application No. 4, column 5 or 8 in the respective same line as the nucleic acid molecule SEQ ID NO. 83821 or polypeptide SEQ ID NO. 83822, respectively, or a homolog or a fragment thereof, is increased or generated, or if the activity transcriptional regulator is increased or generated in a non-human organism, like a microorganism or a plant cell, plant or part thereof, especially with non-targeted localization, For example, an increase of the threonine of at least 1 percent, particularly in a range of 17 to 51 percent is conferred as compared to a corresponding non-transformed wild type non-human organism.

[31085] Accordingly, in one embodiment, an increase of threonine in a non-human organism, as compared to a corresponding non-transformed wild type non-human organism, is conferred in the process of the invention, if the activity of a polypeptide showing the activity of a b3989-protein, or if the activity of the polypeptide B3989, preferably represented by SEQ ID NO. 44373, or a homolog or fragment thereof, or if the activity of a polypeptide encoded by a nucleic acid molecule comprising the nucleic acid SEQ ID NO. 44372, preferably the coding region thereof, or a homolog or fragment thereof, e.g. derived from Escherichia coli, is increased or generated. For example the activity of a nucleic acid molecule or a polypeptide comprising the nucleic acid, preferably the coding region thereof, or polypeptide or the consensus sequence or the polypeptide motif, as depicted in Table I, II or IV, application No. 4, column 5 or 8 in the respective same line as the nucleic acid molecule SEQ ID NO. 44372 or polypeptide SEQ ID NO. 44373, respectively, or a homolog or a fragment thereof, is increased or generated, or if the activity b3989-protein is increased or generated in a non-human organism, like a microorganism or a plant cell, plant or part thereof, especially with non-targeted localization, For example, an increase of the threonine of at least 1 percent, particularly in a range of 22 to 68-percent is conferred as compared to a corresponding non-transformed wild type non-human organism.

[31086] Accordingly, in one embodiment, an increase of threonine in a non-human organism, as compared to a corresponding non-transformed wild type non-human organism, is conferred in the process of the invention, if the activity of a polypeptide showing the activity of a aspartate kinase, or if the activity of the polypeptide B4024, preferably represented by SEQ ID NO. 83836, or a homolog or fragment thereof, or if the activity of a polypeptide encoded by a nucleic acid molecule comprising the nucleic acid SEQ ID NO. 83835, preferably the coding region thereof, or a homolog or fragment thereof, e.g. derived from Escherichia coli, is increased or generated. For example the activity of a nucleic acid molecule or a polypeptide comprising the nucleic acid, preferably the coding region thereof, or polypeptide or the consensus sequence or the polypeptide motif, as depicted in Table I, II or IV, application No. 4, column 5 or 8 in the respective same line as the nucleic acid molecule SEQ ID NO. 83835 or polypeptide SEQ ID NO. 83836, respectively, or a homolog or a fragment thereof, is increased or generated, or if the activity aspartate kinase is increased or generated in a non-human organism, like a microorganism or a plant cell, plant or part thereof, especially with plastidic localization, For example, an increase of the threonine of at least 1 percent, particularly in a range of 64 to 1969-percent is conferred as compared to a corresponding non-transformed wild type non-human organism.

[31087] Accordingly, in one embodiment, an increase of threonine in a non-human organism, as compared to a corresponding non-transformed wild type non-human organism, is conferred in the process of the invention, if the activity of a polypeptide showing the activity of a b4029-protein, or if the activity of the polypeptide B4029, preferably represented by SEQ ID NO. 10741, or a homolog or fragment thereof, or if the activity of a polypeptide encoded by a nucleic acid molecule comprising the nucleic acid SEQ ID NO. 10740, preferably the coding region thereof, or a homolog or fragment thereof, e.g. derived from Escherichia coli, is increased or generated. For example the activity of a nucleic acid molecule or a polypeptide comprising the nucleic acid, preferably the coding region thereof, or polypeptide or the consensus sequence or the polypeptide motif, as depicted in Table I, II or IV, application No. 4, column 5 or 8 in the respective same line as the nucleic acid molecule SEQ ID NO. 10740 or polypeptide SEQ ID NO. 10741, respectively, or a homolog or a fragment thereof, is increased or generated, or if the activity b4029-protein is increased or generated in a non-human organism, like a microorganism or a plant cell, plant or part thereof, especially with non-targeted localization, For example, an increase of the threonine of at least 1 percent, particularly in a range of 21 to 213-percent is conferred as compared to a corresponding non-transformed wild type non-human organism.

[31088] Accordingly, in one embodiment, an increase of threonine in a non-human organism, as compared to a corresponding non-transformed wild type non-human organism, is conferred in the process of the invention, if the activity of a polypeptide showing the activity of a b4056-protein, or if the activity of the polypeptide B4056, preferably represented by SEQ ID NO. 94543, or a homolog or fragment thereof, or if the activity of a polypeptide encoded by a nucleic acid molecule comprising the nucleic acid SEQ ID NO. 94542, preferably the coding region thereof, or a homolog or fragment thereof, e.g. derived from Escherichia coli, is increased or generated. For example the activity of a nucleic acid molecule or a polypeptide comprising the nucleic acid, preferably the coding region thereof, or polypeptide or the consensus sequence or the polypeptide motif, as depicted in Table I, II or IV, application No. 4, column 5 or 8 in the respective same line as the nucleic acid molecule SEQ ID NO. 94542 or polypeptide SEQ ID NO. 94543, respectively, or a homolog or a fragment thereof, is increased or generated, or if the activity b4056-protein is increased or generated in a non-human organism, like a microorganism or a plant cell, plant or part thereof, especially with non-targeted localization, For example, an increase of the threonine of at least 1 percent, particularly in a range of 18 to 43-percent is conferred as compared to a corresponding non-transformed wild type non-human organism.

[31089] Accordingly, in one embodiment, an increase of threonine in a non-human organism, as compared to a corresponding non-transformed wild type non-human organism, is conferred in the process of the invention, if the activity of a polypeptide showing the activity of a b4250-protein, or if the activity of the polypeptide B4250, preferably represented by SEQ ID NO. 94736, or a homolog or fragment thereof, or if the activity of a polypeptide encoded by a nucleic acid molecule comprising the nucleic acid SEQ ID NO. 94735, preferably the coding region thereof, or a homolog or fragment thereof, e.g. derived from Escherichia coli, is increased or generated. For example the activity of a nucleic acid molecule or a polypeptide comprising the nucleic acid, preferably the coding region thereof, or polypeptide or the consensus sequence or the polypeptide motif, as depicted in Table I, II or IV, application No. 4, column 5 or 8 in the respective same line as the nucleic acid molecule SEQ ID NO. 94735 or polypeptide SEQ ID NO. 94736, respectively, or a homolog or a fragment thereof, is increased or generated, or if the activity b4250-protein is increased or generated in a non-human organism, like a microorganism or a plant cell, plant or part thereof, especially with non-targeted localization, For example, an increase of the threonine of at least 1 percent, particularly in a range of 25 to 60-percent is conferred as compared to a corresponding non-transformed wild type non-human organism.

[31090] Accordingly, in one embodiment, an increase of threonine in a non-human organism, as compared to a corresponding non-transformed wild type non-human organism, is conferred in the process of the invention, if the activity of a polypeptide showing the activity of a acetyltransferase, or if the activity of the polypeptide B4256, preferably represented by SEQ ID NO. 45322, or a homolog or fragment thereof, or if the activity of a polypeptide encoded by a nucleic acid molecule comprising the nucleic acid SEQ ID NO. 45321, preferably the coding region thereof, or a homolog or fragment thereof, e.g. derived from Escherichia coli, is increased or generated.

[31091] For example the activity of a nucleic acid molecule or a polypeptide comprising the nucleic acid, preferably the coding region thereof, or polypeptide or the consensus sequence or the polypeptide motif, as depicted in Table I, II or IV, application No. 4, column 5 or 8 in the respective same line as the nucleic acid molecule SEQ ID NO. 45321 or polypeptide SEQ ID NO. 45322, respectively, or a homolog or a fragment thereof, is increased or generated, or if the activity acetyltransferase is increased or generated in a non-human organism, like a microorganism or a plant cell, plant or part thereof, especially with non-targeted localization, For example, an increase of the threonine of at least 1 percent, particularly in a range of 20 to 95-percent is conferred as compared to a corresponding non-transformed wild type non-human organism.

[31092] Accordingly, in one embodiment, an increase of threonine in a non-human organism, as compared to a corresponding non-transformed wild type non-human organism, is conferred in the process of the invention, if the activity of a polypeptide showing the activity of a glutaredoxin, or if the activity of the polypeptide GM02LC12622, preferably represented by SEQ ID NO. 10812, or a homolog or fragment thereof, or if the activity of a polypeptide encoded by a nucleic acid molecule comprising the nucleic acid SEQ ID NO. 10811, preferably the coding region thereof, or a homolog or fragment thereof, e.g. derived from Glycine max, is increased or generated. For example the activity of a nucleic acid molecule or a polypeptide comprising the nucleic acid, preferably the coding region thereof, or polypeptide or the consensus sequence or the polypeptide motif, as depicted in Table I, II or IV, application No. 4, column 5 or 8 in the respective same line as the nucleic acid molecule SEQ ID NO. 10811 or polypeptide SEQ ID NO. 10812, respectively, or a homolog or a fragment thereof, is increased or generated, or if the activity glutaredoxin is increased or generated in a non-human organism, like a microorganism or a plant cell, plant or part thereof, especially with non-targeted localization, For example, an increase of the threonine of at least 1 percent, particularly in a range of 20 to 83-percent is conferred as compared to a corresponding non-transformed wild type non-human organism.

[31093] Accordingly, in one embodiment, an increase of threonine in a non-human organism, as compared to a corresponding non-transformed wild type non-human organism, is conferred in the process of the invention, if the activity of a polypeptide showing the activity of a transcription factor, or if the activity of the polypeptide GM02LC21368, preferably represented by SEQ ID NO. 84199, or a homolog or fragment thereof, or if the activity of a polypeptide encoded by a nucleic acid molecule comprising the nucleic acid SEQ ID NO. 84198, preferably the coding region thereof, or a homolog or fragment thereof, e.g. derived from Glycine max, is increased or generated. For example the activity of a nucleic acid molecule or a polypeptide comprising the nucleic acid, preferably the coding region thereof, or polypeptide or the consensus sequence or the polypeptide motif, as depicted in Table I, II or IV, application No. 4, column 5 or 8 in the respective same line as the nucleic acid molecule SEQ ID NO. 84198 or polypeptide SEQ ID NO. 84199, respectively, or a homolog or a fragment thereof, is increased or generated, or if the activity transcription factor is increased or generated in a non-human organism, like a microorganism or a plant cell, plant or part thereof, especially with non-targeted localization, For example, an increase of the threonine of at least 1 percent, particularly in a range of 30 to 112-percent is conferred as compared to a corresponding non-transformed wild type non-human organism.

[31094] Accordingly, in one embodiment, an increase of threonine in a non-human organism, as compared to a corresponding non-transformed wild type non-human organism, is conferred in the process of the invention, if the activity of a polypeptide showing the activity of a cyclin D, or if the activity of the polypeptide GM02LC44512, preferably represented by SEQ ID NO. 46851, or a homolog or fragment thereof, or if the activity of a polypeptide encoded by a nucleic acid molecule comprising the nucleic acid SEQ ID NO. 46850, preferably the coding region thereof, or a homolog or fragment thereof, e.g. derived from Glycine max, is increased or generated. For example the activity of a nucleic acid molecule or a polypeptide comprising the nucleic acid, preferably the coding region thereof, or polypeptide or the consensus sequence or the polypeptide motif, as depicted in Table I, II or IV, application No. 4, column 5 or 8 in the respective same line as the nucleic acid molecule SEQ ID NO. 46850 or polypeptide SEQ ID NO. 46851, respectively, or a homolog or a fragment thereof, is increased or generated, or if the activity cyclin D is increased or generated in a non-human organism, like a microorganism or a plant cell, plant or part thereof, especially with non-targeted localization, For example, an increase of the threonine of at least 1 percent, particularly in a range of 24 to 60-percent is conferred as compared to a corresponding non-transformed wild type non-human organism.

[31095] Accordingly, in one embodiment, an increase of threonine in a non-human organism, as compared to a corresponding non-transformed wild type non-human organism, is conferred in the process of the invention, if the activity of a polypeptide showing the activity of a heat shock protein, or if the activity of the polypeptide Sll0170, preferably represented by SEQ ID NO. 48139, or a homolog or fragment thereof, or if the activity of a polypeptide encoded by a nucleic acid molecule comprising the nucleic acid SEQ ID NO. 48138, preferably the coding region thereof, or a homolog or fragment thereof, e.g. derived from Synechocystis sp., is increased or generated. For example the activity of a nucleic acid molecule or a polypeptide comprising the nucleic acid, preferably the coding region thereof, or polypeptide or the consensus sequence or the polypeptide motif, as depicted in Table I, II or IV, application No. 4, column 5 or 8 in the respective same line as the nucleic acid molecule SEQ ID NO. 48138 or polypeptide SEQ ID NO. 48139, respectively, or a homolog or a fragment thereof, is increased or generated, or if the activity heat shock protein is increased or generated in a non-human organism, like a microorganism or a plant cell, plant or part thereof, especially with non-targeted localization, For exampie, an increase of the threonine of at least 1 percent, particularly in a range of 23 to 96-percent is conferred as compared to a corresponding non-transformed wild type non-human organism.

[31096] Accordingly, in one embodiment, an increase of threonine in a non-human organism, as compared to a corresponding non-transformed wild type non-human organism, is conferred in the process of the invention, if the activity of a polypeptide showing the activity of a polyphosphate kinase, or if the activity of the polypeptide Sll0290, preferably represented by SEQ ID NO. 49829, or a homolog or fragment thereof, or if the activity of a polypeptide encoded by a nucleic acid molecule comprising the nucleic acid SEQ ID NO. 49828, preferably the coding region thereof, or a homolog or fragment thereof, e.g. derived from Synechocystis sp., is increased or generated. For example the activity of a nucleic acid molecule or a polypeptide comprising the nucleic acid, preferably the coding region thereof, or polypeptide or the consensus sequence or the polypeptide motif, as depicted in Table I, II or IV, application No. 4, column 5 or 8 in the respective same line as the nucleic acid molecule SEQ ID NO. 49828 or polypeptide SEQ ID NO. 49829, respectively, or a homolog or a fragment thereof, is increased or generated, or if the activity polyphosphate kinase is increased or generated in a non-human organism, like a microorganism or a plant cell, plant or part thereof, especially with non-targeted localization, For example, an increase of the threonine of at least 1 percent, particularly in a range of 17 to 53-percent is conferred as compared to a corresponding non-transformed wild type non-human organism.

[31097] Accordingly, in one embodiment, an increase of threonine in a non-human organism, as compared to a corresponding non-transformed wild type non-human organism, is conferred in the process of the invention, if the activity of a polypeptide showing the activity of a branched chain amino acid ABC transporter ATP-binding protein, or if the activity of the polypeptide Sll0374, preferably represented by SEQ ID NO. 94742, or a homolog or fragment thereof, or if the activity of a polypeptide encoded by a nucleic acid molecule comprising the nucleic acid SEQ ID NO. 94741, preferably the coding region thereof, or a homolog or fragment thereof, e.g. derived from Synechocystis sp., is increased or generated. For example the activity of a nucleic acid molecule or a polypeptide comprising the nucleic acid, preferably the coding region thereof, or polypeptide or the consensus sequence or the polypeptide motif, as depicted in Table I, II or IV, application No. 4, column 5 or 8 in the respective same line as the nucleic acid molecule SEQ ID NO. 94741 or polypeptide SEQ ID NO. 94742, respectively, or a homolog or a fragment thereof, is increased or generated, or if the activity branched chain amino acid ABC transporter ATP-binding protein is increased or generated in a non-human organism, like a microorganism or a plant cell, plant or part thereof, especially with plastidic localization, For example, an increase of the threonine of at least 1 percent, particularly in a range of 21 to 30-percent is conferred as compared to a corresponding non-transformed wild type non-human organism.

[31098] Accordingly, in one embodiment, an increase of threonine in a non-human organism, as compared to a corresponding non-transformed wild type non-human organism, is conferred in the process of the invention, if the activity of a polypeptide showing the activity of a uroporphyrin-III C-methyltransferase, or if the activity of the polypeptide Sll0378, preferably represented by SEQ ID NO. 84870, or a homolog or fragment thereof, or if the activity of a polypeptide encoded by a nucleic acid molecule comprising the nucleic acid SEQ ID NO. 84869, preferably the coding region thereof, or a homolog or fragment thereof, e.g. derived from Synechocystis sp., is increased or generated. For example the activity of a nucleic acid molecule or a polypeptide comprising the nucleic acid, preferably the coding region thereof, or polypeptide or the consensus sequence or the polypeptide motif, as depicted in Table I, II or IV, application No. 4, column 5 or 8 in the respective same line as the nucleic acid molecule SEQ ID NO. 84869 or polypeptide SEQ ID NO. 84870, respectively, or a homolog or a fragment thereof, is increased or generated, or if the activity uroporphyrin-III C-methyltransferase is increased or generated in a non-human organism, like a microorganism or a plant cell, plant or part thereof, especially with plastidic localization, For example, an increase of the threonine of at least 1 percent, particularly in a range of 19 to 83-percent is conferred as compared to a corresponding non-transformed wild type non-human organism.

[31099] Accordingly, in one embodiment, an increase of threonine in a non-human organism, as compared to a corresponding non-transformed wild type non-human organism, is conferred in the process of the invention, if the activity of a polypeptide showing the activity of a sll0418-protein, or if the activity of the polypeptide Sll0418, preferably represented by SEQ ID NO. 94943, or a homolog or fragment thereof, or if the activity of a polypeptide encoded by a nucleic acid molecule comprising the nucleic acid SEQ ID NO. 94942, preferably the coding region thereof, or a homolog or fragment thereof, e.g. derived from Synechocystis sp., is increased or generated.

[31100] For example the activity of a nucleic acid molecule or a polypeptide comprising the nucleic acid, preferably the coding region thereof, or polypeptide or the consensus sequence or the polypeptide motif, as depicted in Table I, II or IV, application No. 4, column 5 or 8 in the respective same line as the nucleic acid molecule SEQ ID NO. 94942 or polypeptide SEQ ID NO. 94943, respectively, or a homolog or a fragment thereof, is increased or generated, or if the activity sll0418-protein is increased or generated in a non-human organism, like a microorganism or a plant cell, plant or part thereof, especially with non-targeted localization, For example, an increase of the threonine of at least 1 percent, particularly in a range of 17 to 30-percent is conferred as compared to a corresponding non-transformed wild type non-human organism.

[31101] Accordingly, in one embodiment, an increase of threonine in a non-human organism, as compared to a corresponding non-transformed wild type non-human organism, is conferred in the process of the invention, if the activity of a polypeptide showing the activity of a oxireductase, or if the activity of the polypeptide Sll0816, preferably represented by SEQ ID NO. 51199, or a homolog or fragment thereof, or if the activity of a polypeptide encoded by a nucleic acid molecule comprising the nucleic acid SEQ ID NO. 51198, preferably the coding region thereof, or a homolog or fragment thereof, e.g. derived from Synechocystis sp., is increased or generated. For example the activity of a nucleic acid molecule or a polypeptide comprising the nucleic acid, preferably the coding region thereof, or polypeptide or the consensus sequence or the polypeptide motif, as depicted in Table I, II or IV, application No. 4, column 5 or 8 in the respective same line as the nucleic acid molecule SEQ ID NO. 51198 or polypeptide SEQ ID NO. 51199, respectively, or a homolog or a fragment thereof, is increased or generated, or if the activity oxireductase is increased or generated in a non-human organism, like a microorganism or a plant cell, plant or part thereof, especially with non-targeted localization, For example, an increase of the threonine of at least 1 percent, particularly in a range of 19 to 91-percent is conferred as compared to a corresponding non-transformed wild type non-human organism.

[31102] Accordingly, in one embodiment, an increase of threonine in a non-human organism, as compared to a corresponding non-transformed wild type non-human organism, is conferred in the process of the invention, if the activity of a polypeptide showing the activity of a malate dehydrogenase, or if the activity of the polypeptide Sll0891, preferably represented by SEQ ID NO. 51269, or a homolog or fragment thereof, or if the activity of a polypeptide encoded by a nucleic acid molecule comprising the nucleic acid SEQ ID NO. 51268, preferably the coding region thereof, or a homolog or fragment thereof, e.g. derived from Synechocystis sp., is increased or generated. For example the activity of a nucleic acid molecule or a polypeptide comprising the nucleic acid, preferably the coding region thereof, or polypeptide or the consensus sequence or the polypeptide motif, as depicted in Table I, II or IV, application No. 4, column 5 or 8 in the respective same line as the nucleic acid molecule SEQ ID NO. 51268 or polypeptide SEQ ID NO. 51269, respectively, or a homolog or a fragment thereof, is increased or generated, or if the activity malate dehydrogenase is increased or generated in a non-human organism, like a microorganism or a plant cell, plant or part thereof, especially with plastidic localization, For example, an increase of the threonine of at least 1 percent, particularly in a range of 23 to 61-percent is conferred as compared to a corresponding non-transformed wild type non-human organism.

[31103] Accordingly, in one embodiment, an increase of threonine in a non-human organism, as compared to a corresponding non-transformed wild type non-human organism, is conferred in the process of the invention, if the activity of a polypeptide showing the activity of a phosphoribosylaminoimidazole carboxylase catalytic subunit, or if the activity of the polypeptide Sll0901, preferably represented by SEQ ID NO. 51633, or a homolog or fragment thereof, or if the activity of a polypeptide encoded by a nucleic acid molecule comprising the nucleic acid SEQ ID NO. 51632, preferably the coding region thereof, or a homolog or fragment thereof, e.g. derived from Synechocystis sp., is increased or generated. For example the activity of a nucleic acid molecule or a polypeptide comprising the nucleic acid, preferably the coding region thereof, or polypeptide or the consensus sequence or the polypeptide motif, as depicted in Table I, II or IV, application No. 4, column 5 or 8 in the respective same line as the nucleic acid molecule SEQ ID NO. 51632 or polypeptide SEQ ID NO. 51633, respectively, or a homolog or a fragment thereof, is increased or generated, or if the activity phosphoribosylaminoimidazole carboxylase catalytic subunit is increased or generated in a non-human organism, like a microorganism or a plant cell, plant or part thereof, especially with mitochondrial localization, For example, an increase of the threonine of at least 1 percent, particularly in a range of 39 to 78-percent is conferred as compared to a corresponding non-transformed wild type non-human organism.

[31104] Accordingly, in one embodiment, an increase of threonine in a non-human organism, as compared to a corresponding non-transformed wild type non-human organism, is conferred in the process of the invention, if the activity of a polypeptide showing the activity of a glycogen synthase, or if the activity of the polypeptide Sll0945, preferably represented by SEQ ID NO. 52365, or a homolog or fragment thereof, or if the activity of a polypeptide encoded by a nucleic acid molecule comprising the nucleic acid SEQ ID NO. 52364, preferably the coding region thereof, or a homolog or fragment thereof, e.g. derived from Synechocystis sp., is increased or generated. For example the activity of a nucleic acid molecule or a polypeptide comprising the nucleic acid, preferably the coding region thereof, or polypeptide or the consensus sequence or the polypeptide motif, as depicted in Table I, II or IV, application No. 4, column 5 or 8 in the respective same line as the nucleic acid molecule SEQ ID NO. 52364 or polypeptide SEQ ID NO. 52365, respectively, or a homolog or a fragment thereof, is increased or generated, or if the activity glycogen synthase is increased or generated in a non-human organism, like a microorganism or a plant cell, plant or part thereof, especially with non-targeted localization, For exampie, an increase of the threonine of at least 1 percent, particularly in a range of 17 to 56-percent is conferred as compared to a corresponding non-transformed wild type non-human organism.

[31105] Accordingly, in one embodiment, an increase of threonine in a non-human organism, as compared to a corresponding non-transformed wild type non-human organism, is conferred in the process of the invention, if the activity of a polypeptide showing the activity of a glycogen (starch) synthase, or if the activity of the polypeptide Sll1393, preferably represented by SEQ ID NO. 53457, or a homolog or fragment thereof, or if the activity of a polypeptide encoded by a nucleic acid molecule comprising the nucleic acid SEQ ID NO. 53456, preferably the coding region thereof, or a homolog or fragment thereof, e.g. derived from Synechocystis sp., is increased or generated. For example the activity of a nucleic acid molecule or a polypeptide comprising the nucleic acid, preferably the coding region thereof, or polypeptide or the consensus sequence or the polypeptide motif, as depicted in Table I, II or IV, application No. 4, column 5 or 8 in the respective same line as the nucleic acid molecule SEQ ID NO. 53456 or polypeptide SEQ ID NO. 53457, respectively, or a homolog or a fragment thereof, is increased or generated, or if the activity glycogen (starch) synthase is increased or generated in a non-human organism, like a microorganism or a plant cell, plant or part thereof, especially with non-targeted localization, For example, an increase of the threonine of at least 1 percent, particularly in a range of 18 to 84-percent is conferred as compared to a corresponding non-transformed wild type non-human organism.

[31106] Accordingly, in one embodiment, an increase of threonine in a non-human organism, as compared to a corresponding non-transformed wild type non-human organism, is conferred in the process of the invention, if the activity of a polypeptide showing the activity of a nitrate/nitrite transport protein, or if the activity of the polypeptide Sll1450, preferably represented by SEQ ID NO. 54338, or a homolog or fragment thereof, or if the activity of a polypeptide encoded by a nucleic acid molecule comprising the nucleic acid SEQ ID NO. 54337, preferably the coding region thereof, or a homolog or fragment thereof, e.g. derived from Synechocystis sp., is increased or generated. For example the activity of a nucleic acid molecule or a polypeptide comprising the nucleic acid, preferably the coding region thereof, or polypeptide or the consensus sequence or the polypeptide motif, as depicted in Table I, II or IV, application No. 4, column 5 or 8 in the respective same line as the nucleic acid molecule SEQ ID NO. 54337 or polypeptide SEQ ID NO. 54338, respectively, or a homolog or a fragment thereof, is increased or generated, or if the activity nitrate/nitrite transport protein is increased or generated in a non-human organism, like a microorganism or a plant cell, plant or part thereof, especially with mitochondrial localization, For example, an increase of the threonine of at least 1 percent, particularly in a range of 17 to 40-percent is conferred as compared to a corresponding non-transformed wild type non-human organism.

[31107] Accordingly, in one embodiment, an increase of threonine in a non-human organism, as compared to a corresponding non-transformed wild type non-human organism, is conferred in the process of the invention, if the activity of a polypeptide showing the activity of a carbamoylphosphate synthase subunit, or if the activity of the polypeptide Sll1498, preferably represented by SEQ ID NO. 95048, or a homolog or fragment thereof, or if the activity of a polypeptide encoded by a nucleic acid molecule comprising the nucleic acid SEQ ID NO. 95047, preferably the coding region thereof, or a homolog or fragment thereof, e.g. derived from Synechocystis sp., is increased or generated. For example the activity of a nucleic acid molecule or a polypeptide comprising the nucleic acid, preferably the coding region thereof, or polypeptide or the consensus sequence or the polypeptide motif, as depicted in Table I, II or IV, application No. 4, column 5 or 8 in the respective same line as the nucleic acid molecule SEQ ID NO. 95047 or polypeptide SEQ ID NO. 95048, respectively, or a homolog or a fragment thereof, is increased or generated, or if the activity carbamoyl-phosphate synthase subunit is increased or generated in a non-human organism, like a microorganism or a plant cell, plant or part thereof, especially with plastidic localization, For example, an increase of the threonine of at least 1 percent, particularly in a range of 18 to 30-percent is conferred as compared to a corresponding non-transformed wild type non-human organism.

[31108] Accordingly, in one embodiment, an increase of threonine in a non-human organism, as compared to a corresponding non-transformed wild type non-human organism, is conferred in the process of the invention, if the activity of a polypeptide showing the activity of a glutathione S-transferase, or if the activity of the polypeptide Sll1545, preferably represented by SEQ ID NO. 11424, or a homolog or fragment thereof, or if the activity of a polypeptide encoded by a nucleic acid molecule comprising the nucleic acid SEQ ID NO. 11423, preferably the coding region thereof, or a homolog or fragment thereof, e.g. derived from Synechocystis sp., is increased or generated. For example the activity of a nucleic acid molecule or a polypeptide comprising the nucleic acid, preferably the coding region thereof, or polypeptide or the consensus sequence or the polypeptide motif, as depicted in Table I, II or IV, application No. 4, column 5 or 8 in the respective same line as the nucleic acid molecule SEQ ID NO. 11423 or polypeptide SEQ ID NO. 11424, respectively, or a homolog or a fragment thereof, is increased or generated, or if the activity glutathione S-transferase is increased or generated in a non-human organism, like a microorganism or a plant cell, plant or part thereof, especially with mitochondrial localization, For example, an increase of the threonine of at least 1 percent, particularly in a range of 17 to 42-percent is conferred as compared to a corresponding non-transformed wild type non-human organism

[31109] Accordingly, in one embodiment, an increase of threonine in a non-human organism, as compared to a corresponding non-transformed wild type non-human organism, is conferred in the process of the invention, if the activity of a polypeptide showing the activity of a ABC metal ion transporter substrate-binding protein, or if the activity of the polypeptide Sll1598, preferably represented by SEQ ID NO. 85744, or a homolog or fragment thereof, or if the activity of a polypeptide encoded by a nucleic acid molecule comprising the nucleic acid SEQ ID NO. 85743, preferably the coding region thereof, or a homolog or fragment thereof, e.g. derived from Synechocystis sp., is increased or generated. For example the activity of a nucleic acid molecule or a polypeptide comprising the nucleic acid, preferably the coding region thereof, or polypeptide or the consensus sequence or the polypeptide motif, as depicted in Table I, II or IV, application No. 4, column 5 or 8 in the respective same line as the nucleic acid molecule SEQ ID NO. 85743 or polypeptide SEQ ID NO. 85744, respectively, or a homolog or a fragment thereof, is increased or generated, or if the activity ABC metal ion transporter substrate-binding protein is increased or generated in a non-human organism, like a microorganism or a plant cell, plant or part thereof, especially with mitochondrial localization, For example, an increase of the threonine of at least 1 percent, particularly in a range of 21 to 35-percent is conferred as compared to a corresponding non-transformed wild type non-human organism.

[31110] Accordingly, in one embodiment, an increase of threonine in a non-human organism, as compared to a corresponding non-transformed wild type non-human organism, is conferred in the process of the invention, if the activity of a polypeptide showing the activity of a coproporphyrinogen III oxidase, or if the activity of the polypeptide Sll1917, preferably represented by SEQ ID NO. 11472, or a homolog or fragment thereof, or if the activity of a polypeptide encoded by a nucleic acid molecule comprising the nucleic acid SEQ ID NO. 11471, preferably the coding region thereof, or a homolog or fragment thereof, e.g. derived from Synechocystis sp., is increased or generated. For example the activity of a nucleic acid molecule or a polypeptide comprising the nucleic acid, preferably the coding region thereof, or polypeptide or the consensus sequence or the polypeptide motif, as depicted in Table I, II or IV, application No. 4, column 5 or 8 in the respective same line as the nucleic acid molecule SEQ ID NO. 11471 or polypeptide SEQ ID NO. 11472, respectively, or a homolog or a fragment thereof, is increased or generated, or if the activity coproporphyrinogen III oxidase is increased or generated in a non-human organism, like a microorganism or a plant cell, plant or part thereof, especially with mitochondrial localization, For example, an increase of the threonine of at least 1 percent, particularly in a range of 18 to 67-percent is conferred as compared to a corresponding non-transformed wild type non-human organism.

[31111] Accordingly, in one embodiment, an increase of threonine in a non-human organism, as compared to a corresponding non-transformed wild type non-human organism, is conferred in the process of the invention, if the activity of a polypeptide showing the activity of a ferredoxin, or if the activity of the polypeptide Slr0150, preferably represented by SEQ ID NO. 95528, or a homolog or fragment thereof, or if the activity of a polypeptide encoded by a nucleic acid molecule comprising the nucleic acid SEQ ID NO. 95527, preferably the coding region thereof, or a homolog or fragment thereof, e.g. derived from Synechocystis sp., is increased or generated. For example the activity of a nucleic acid molecule or a polypeptide comprising the nucleic acid, preferably the coding region thereof, or polypeptide or the consensus sequence or the polypeptide motif, as depicted in Table I, II or IV, application No. 4, column 5 or 8 in the respective same line as the nucleic acid molecule SEQ ID NO. 95527 or polypeptide SEQ ID NO. 95528, respectively, or a homolog or a fragment thereof, is increased or generated, or if the activity ferredoxin is increased or generated in a non-human organism, like a microorganism or a plant cell, plant or part thereof, especially with mitochondrial localization, For example, an increase of the threonine of at least 1 percent, particularly in a range of 18 to 53-percent is conferred as compared to a corresponding non-transformed wild type non-human organism.

[31112] Accordingly, in one embodiment, an increase of threonine in a non-human organism, as compared to a corresponding non-transformed wild type non-human organism, is conferred in the process of the invention, if the activity of a polypeptide showing the activity of a slr0383-protein, or if the activity of the polypeptide Slr0383, preferably represented by SEQ ID NO. 95745, or a homolog or fragment thereof, or if the activity of a polypeptide encoded by a nucleic acid molecule comprising the nucleic acid SEQ ID NO. 95744, preferably the coding region thereof, or a homolog or fragment thereof, e.g. derived from Synechocystis sp., is increased or generated. For example the activity of a nucleic acid molecule or a polypeptide comprising the nucleic acid, preferably the coding region thereof, or polypeptide or the consensus sequence or the polypeptide motif, as depicted in Table I, II or IV, application No. 4, column 5 or 8 in the respective same line as the nucleic acid molecule SEQ ID NO. 95744 or polypeptide SEQ ID NO. 95745, respectively, or a homolog or a fragment thereof, is increased or generated, or if the activity slr0383-protein is increased or generated in a non-human organism, like a microorganism or a plant cell, plant or part thereof, especially with non-targeted localization, For example, an increase of the threonine of at least 1 percent, particularly in a range of 18 to 35-percent is conferred as compared to a corresponding non-transformed wild type non-human organism.

[31113] Accordingly, in one embodiment, an increase of threonine in a non-human organism, as compared to a corresponding non-transformed wild type non-human organism, is conferred in the process of the invention, if the activity of a polypeptide showing the activity of a bifunctional purine biosynthesis protein, or if the activity of the polypeptide Slr0597, preferably represented by SEQ ID NO. 56154, or a homolog or fragment thereof, or if the activity of a polypeptide encoded by a nucleic acid molecule comprising the nucleic acid SEQ ID NO. 56153, preferably the coding region thereof, or a homolog or fragment thereof, e.g. derived from Synechocystis sp., is increased or generated. For example the activity of a nucleic acid molecule or a polypeptide comprising the nucleic acid, preferably the coding region thereof, or polypeptide or the consensus sequence or the polypeptide motif, as depicted in Table I, II or IV, application No. 4, column 5 or 8 in the respective same line as the nucleic acid molecule SEQ ID NO. 56153 or polypeptide SEQ ID NO. 56154, respectively, or a homolog or a fragment thereof, is increased or generated, or if the activity bifunctional purine biosynthesis protein is increased or generated in a non-human organism, like a microorganism or a plant cell, plant or part thereof, especially with plastidic localization, For example, an increase of the threonine of at least 1 percent, particularly in a range of 32 to 35-percent is conferred as compared to a corresponding non-transformed wild type non-human organism.

[31114] Accordingly, in one embodiment, an increase of threonine in a non-human organism, as compared to a corresponding non-transformed wild type non-human organism, is conferred in the process of the invention, if the activity of a polypeptide showing the activity of a aspartate kinase, or if the activity of the polypeptide Slr0657, preferably represented by SEQ ID NO. 95858, or a homolog or fragment thereof, or if the activity of a polypeptide encoded by a nucleic acid molecule comprising the nucleic acid SEQ ID NO. 95857, preferably the coding region thereof, or a homolog or fragment thereof, e.g. derived from Synechocystis sp., is increased or generated. For example the activity of a nucleic acid molecule or a polypeptide comprising the nucleic acid, preferably the coding region thereof, or polypeptide or the consensus sequence or the polypeptide motif, as depicted in Table I, II or IV, application No. 4, column 5 or 8 in the respective same line as the nucleic acid molecule SEQ ID NO. 95857 or polypeptide SEQ ID NO. 95858, respectively, or a homolog or a fragment thereof, is increased or generated, or if the activity aspartate kinase is increased or generated in a non-human organism, like a microorganism or a plant cell, plant or part thereof, especially with mitochondrial localization, For example, an increase of the threonine of at least 1 percent, particularly in a range of 20 to 46-percent is conferred as compared to a corresponding non-transformed wild type non-human organism.

[31115] Accordingly, in one embodiment, an increase of threonine in a non-human organism, as compared to a corresponding non-transformed wild type non-human organism, is conferred in the process of the invention, if the activity of a polypeptide showing the activity of a geranylgeranyl pyrophosphate synthase, or if the activity of the polypeptide Slr0739, preferably represented by SEQ ID NO. 57236, or a homolog or fragment thereof, or if the activity of a polypeptide encoded by a nucleic acid molecule comprising the nucleic acid SEQ ID NO. 57235, preferably the coding region thereof, or a homolog or fragment thereof, e.g. derived from Synechocystis sp., is increased or generated. For example the activity of a nucleic acid molecule or a polypeptide comprising the nucleic acid, preferably the coding region thereof, or polypeptide or the consensus sequence or the polypeptide motif, as depicted in Table I, II or IV, application No. 4, column 5 or 8 in the respective same line as the nucleic acid molecule SEQ ID NO. 57235 or polypeptide SEQ ID NO. 57236, respectively, or a homolog or a fragment thereof, is increased or generated, or if the activity geranylgeranyl pyrophosphate synthase is increased or generated in a non-human organism, like a microorganism or a plant cell, plant or part thereof, especially with plastidic localization, For example, an increase of the threonine of at least 1 percent, particularly in a range of 16 to 79-percent is conferred as compared to a corresponding non-transformed wild type non-human organism.

[31116] Accordingly, in one embodiment, an increase of threonine in a non-human organism, as compared to a corresponding non-transformed wild type non-human organism, is conferred in the process of the invention, if the activity of a polypeptide showing the activity of a kinase, or if the activity of the polypeptide Slr0862, preferably represented by SEQ ID NO. 87611, or a homolog or fragment thereof, or if the activity of a polypeptide encoded by a nucleic acid molecule comprising the nucleic acid SEQ ID NO. 87610, preferably the coding region thereof, or a homolog or fragment thereof, e.g. derived from Synechocystis sp., is increased or generated. For example the activity of a nucleic acid molecule or a polypeptide comprising the nucleic acid, preferably the coding region thereof, or polypeptide or the consensus sequence or the polypeptide motif, as depicted in Table I, II or IV, application No. 4, column 5 or 8 in the respective same line as the nucleic acid molecule SEQ ID NO. 87610 or polypeptide SEQ ID NO. 87611, respectively, or a homolog or a fragment thereof, is increased or generated, or if the activity kinase is increased or generated in a non-human organism, like a microorganism or a plant cell, plant or part thereof, especially with mitochondrial localization, For example, an increase of the threonine of at least 1 percent, particularly in a range of 39 to 45-percent is conferred as compared to a corresponding non-transformed wild type non-human organism.

[31117] Accordingly, in one embodiment, an increase of threonine in a non-human organism, as compared to a corresponding non-transformed wild type non-human organism, is conferred in the process of the invention, if the activity of a polypeptide showing the activity of a argininosuccinate lyase, or if the activity of the polypeptide Slr1133, preferably represented by SEQ ID NO. 87854, or a homolog or fragment thereof, or if the activity of a polypeptide encoded by a nucleic acid molecule comprising the nucleic acid SEQ ID NO. 87853, preferably the coding region thereof, or a homolog or fragment thereof, e.g. derived from Synechocystis sp., is increased or generated. For example the activity of a nucleic acid molecule or a polypeptide comprising the nucleic acid, preferably the coding region thereof, or polypeptide or the consensus sequence or the polypeptide motif, as depicted in Table I, II or IV, application No. 4, column 5 or 8 in the respective same line as the nucleic acid molecule SEQ ID NO. 87853 or polypeptide SEQ ID NO. 87854, respectively, or a homolog or a fragment thereof, is increased or generated, or if the activity argininosuccinate lyase is increased or generated in a non-human organism, like a microorganism or a plant cell, plant or part thereof, especially with mitochondrial localization, For example, an increase of the threonine of at least 1 percent, particularly in a range of 23 to 34-percent is conferred as compared to a corresponding non-transformed wild type non-human organism.

[31118] Accordingly, in one embodiment, an increase of threonine in a non-human organism, as compared to a corresponding non-transformed wild type non-human organism, is conferred in the process of the invention, if the activity of a polypeptide showing the activity of a photosystem II protein, or if the activity of the polypeptide Slr1739, preferably represented by SEQ ID NO. 58732, or a homolog or fragment thereof, or if the activity of a polypeptide encoded by a nucleic acid molecule comprising the nucleic acid SEQ ID NO. 58731, preferably the coding region thereof, or a homolog or fragment thereof, e.g. derived from Synechocystis sp., is increased or generated. For example the activity of a nucleic acid molecule or a polypeptide comprising the nucleic acid, preferably the coding region thereof, or polypeptide or the consensus sequence or the polypeptide motif, as depicted in Table I, II or IV, application No. 4, column 5 or 8 in the respective same line as the nucleic acid molecule SEQ ID NO. 58731 or polypeptide SEQ ID NO. 58732, respectively, or a homolog or a fragment thereof, is increased or generated, or if the activity photosystem II protein is increased or generated in a non-human organism, like a microorganism or a plant cell, plant or part thereof, especially with plastidic localization, For example, an increase of the threonine of at least 1 percent, particularly in a range of 27 to 512-percent is conferred as compared to a corresponding non-transformed wild type non-human organism.

[31119] Accordingly, in one embodiment, an increase of threonine in a non-human organism, as compared to a corresponding non-transformed wild type non-human organism, is conferred in the process of the invention, if the activity of a polypeptide showing the activity of a cell division protein, or if the activity of the polypeptide TTC0035, preferably represented by SEQ ID NO. 60302, or a homolog or fragment thereof, or if the activity of a polypeptide encoded by a nucleic acid molecule comprising the nucleic acid SEQ ID NO. 60301, preferably the coding region thereof, or a homolog or fragment thereof, e.g. derived from Thermus thermophilus, is increased or generated. For example the activity of a nucleic acid molecule or a polypeptide comprising the nucleic acid, preferably the coding region thereof, or polypeptide or the consensus sequence or the polypeptide motif, as depicted in Table I, II or IV, application No. 4, column 5 or 8 in the respective same line as the nucleic acid molecule SEQ ID NO. 60301 or polypeptide SEQ ID NO. 60302, respectively, or a homolog or a fragment thereof, is increased or generated, or if the activity cell division protein is increased or generated in a non-human organism, like a microorganism or a plant cell, plant or part thereof, especially with non-targeted localization, For example, an increase of the threonine of at least 1 percent, particularly in a range of 32 to 102-percent is conferred as compared to a corresponding non-transformed wild type non-human organism.

[31120] Accordingly, in one embodiment, an increase of threonine in a non-human organism, as compared to a corresponding non-transformed wild type non-human organism, is conferred in the process of the invention, if the activity of a polypeptide showing the activity of a branched-chain amino acid ABC transporter permease protein, or if the activity of the polypeptide TTC0216, preferably represented by SEQ ID NO. 60860, or a homolog or fragment thereof, or if the activity of a polypeptide encoded by a nucleic acid molecule comprising the nucleic acid SEQ ID NO. 60859, preferably the coding region thereof, or a homolog or fragment thereof, e.g. derived from Thermus thermophilus, is increased or generated. For example the activity of a nucleic acid molecule or a polypeptide comprising the nucleic acid, preferably the coding region thereof, or polypeptide or the consensus sequence or the polypeptide motif, as depicted in Table I, II or IV, application No. 4, column 5 or 8 in the respective same line as the nucleic acid molecule SEQ ID NO. 60859 or polypeptide SEQ ID NO. 60860, respectively, or a homolog or a fragment thereof, is increased or generated, or if the activity branched-chain amino acid ABC transporter permease protein is increased or generated in a non-human organism, like a microorganism or a plant cell, plant or part thereof, especially with non-targeted localization, For example, an increase of the threonine of at least 1 percent, particularly in a range of 18 to 35-percent is conferred as compared to a corresponding non-transformed wild type non-human organism.

[31121] Accordingly, in one embodiment, an increase of threonine in a non-human organism, as compared to a corresponding non-transformed wild type non-human organism, is conferred in the process of the invention, if the activity of a polypeptide showing the activity of a TTC0881protein, or if the activity of the polypeptide TTC0881, preferably represented by SEQ ID NO. 88876, or a homolog or fragment thereof, or if the activity of a polypeptide encoded by a nucleic acid molecule comprising the nucleic acid SEQ ID NO. 88875, preferably the coding region thereof, or a homolog or fragment thereof, e.g. derived from Thermus thermophilus, is increased or generated. For example the activity of a nucleic acid molecule or a polypeptide comprising the nucleic acid, preferably the coding region thereof, or polypeptide or the consensus sequence or the polypeptide motif, as depicted in Table I, II or IV, application No. 4, column 5 or 8 in the respective same line as the nucleic acid molecule SEQ ID NO. 88875 or polypeptide SEQ ID NO. 88876, respectively, or a homolog or a fragment thereof, is increased or generated, or if the activity TTC0881-protein is increased or generated in a non-human organism, like a microorganism or a plant cell, plant or part thereof, especially with non-targeted localization, For example, an increase of the threonine of at least 1 percent, particularly in a range of 19 to 34-percent is conferred as compared to a corresponding non-transformed wild type non-human organism.

[31122] Accordingly, in one embodiment, an increase of threonine in a non-human organism, as compared to a corresponding non-transformed wild type non-human organism, is conferred in the process of the invention, if the activity of a polypeptide showing the activity of a metal-dependent hydrolase, or if the activity of the polypeptide TTC0917, preferably represented by SEQ ID NO. 61554, or a homolog or fragment thereof, or if the activity of a polypeptide encoded by a nucleic acid molecule comprising the nucleic acid SEQ ID NO. 61553, preferably the coding region thereof, or a homolog or fragment thereof, e.g. derived from Thermus thermophilus, is increased or generated. For example the activity of a nucleic acid molecule or a polypeptide comprising the nucleic acid, preferably the coding region thereof, or polypeptide or the consensus sequence or the polypeptide motif, as depicted in Table I, II or IV, application No. 4, column 5 or 8 in the respective same line as the nucleic acid molecule SEQ ID NO. 61553 or polypeptide SEQ ID NO. 61554, respectively, or a homolog or a fragment thereof, is increased or generated, or if the activity metal-dependent hydrolase is increased or generated in a non-human organism, like a microorganism or a plant cell, plant or part thereof, especially with non-targeted localization, For example, an increase of the threonine of at least 1 percent, particularly in a range of 18 to 26-percent is conferred as compared to a corresponding non-transformed wild type non-human organism.

[31123] Accordingly, in one embodiment, an increase of threonine in a non-human organism, as compared to a corresponding non-transformed wild type non-human organism, is conferred in the process of the invention, if the activity of a polypeptide showing the activity of a homocitrate synthase, or if the activity of the polypeptide TTC1550, preferably represented by SEQ ID NO. 12975, or a homolog or fragment thereof, or if the activity of a polypeptide encoded by a nucleic acid molecule comprising the nucleic acid SEQ ID NO. 12974, preferably the coding region thereof, or a homolog or fragment thereof, e.g. derived from Thermus thermophilus, is increased or generated. For example the activity of a nucleic acid molecule or a polypeptide comprising the nucleic acid, preferably the coding region thereof, or polypeptide or the consensus sequence or the polypeptide motif, as depicted in Table I, II or IV, application No. 4, column 5 or 8 in the respective same line as the nucleic acid molecule SEQ ID NO. 12974 or polypeptide SEQ ID NO. 12975, respectively, or a homolog or a fragment thereof, is increased or generated, or if the activity homocitrate synthase is increased or generated in a non-human organism, like a microorganism or a plant cell, plant or part thereof, especially with non-targeted localization, For example, an increase of the threonine of at least 1 percent, particularly in a range of 32 to 94-percent is conferred as compared to a corresponding non-transformed wild type non-human organism.

[31124] Accordingly, in one embodiment, an increase of threonine in a non-human organism, as compared to a corresponding non-transformed wild type non-human organism, is conferred in the process of the invention, if the activity of a polypeptide showing the activity of a XM_{—}473199-protein, or if the activity of the polypeptide XM_{—}473199, preferably represented by SEQ ID NO. 62245, or a homolog or fragment thereof, or if the activity of a polypeptide encoded by a nucleic acid molecule comprising the nucleic acid SEQ ID NO. 62244, preferably the coding region thereof, or a homolog or fragment thereof, e.g. derived from Oryza sativa, is increased or generated. For example the activity of a nucleic acid molecule or a polypeptide comprising the nucleic acid, preferably the coding region thereof, or polypeptide or the consensus sequence or the polypeptide motif, as depicted in Table I, II or IV, application No. 4, column 5 or 8 in the respective same line as the nucleic acid molecule SEQ ID NO. 62244 or polypeptide SEQ ID NO. 62245, respectively, or a homolog or a fragment thereof, is increased or generated, or if the activity XM_{—}473199-protein is increased or generated in a non-human organism, like a microorganism or a plant cell, plant or part thereof, especially with non-targeted localization, For example, an increase of the threonine of at least 1 percent, particularly in a range of 25 to 82-percent is conferred as compared to a corresponding non-transformed wild type non-human organism.

[31125] Accordingly, in one embodiment, an increase of threonine in a non-human organism, as compared to a corresponding non-transformed wild type non-human organism, is conferred in the process of the invention, if the activity of a polypeptide showing the activity of a pyruvate kinase, or if the activity of the polypeptide Yal038w, preferably represented by SEQ ID NO. 96023, or a homolog or fragment thereof, or if the activity of a polypeptide encoded by a nucleic acid molecule comprising the nucleic acid SEQ ID NO. 96022, preferably the coding region thereof, or a homolog or fragment thereof, e.g. derived from Saccharomyces cerevisiae, is increased or generated. For example the activity of a nucleic acid molecule or a polypeptide comprising the nucleic acid, preferably the coding region thereof, or polypeptide or the consensus sequence or the polypeptide motif, as depicted in Table I, II or IV, application No. 4, column 5 or 8 in the respective same line as the nucleic acid molecule SEQ ID NO. 96022 or polypeptide SEQ ID NO. 96023, respectively, or a homolog or a fragment thereof, is increased or generated, or if the activity pyruvate kinase is increased or generated in a non-human organism, like a microorganism or a plant cell, plant or part thereof, especially with plastidic localization, For example, an increase of the threonine of at least 1 percent, particularly in a range of 23 to 101-percent is conferred as compared to a corresponding non-transformed wild type non-human organism.

[31126] Accordingly, in one embodiment, an increase of threonine in a non-human organism, as compared to a corresponding non-transformed wild type non-human organism, is conferred in the process of the invention, if the activity of a polypeptide showing the activity of a transcription factor, or if the activity of the polypeptide Ybl021 c, preferably represented by SEQ ID NO. 62525, or a homolog or fragment thereof, or if the activity of a polypeptide encoded by a nucleic acid molecule comprising the nucleic acid SEQ ID NO. 62524, preferably the coding region thereof, or a homolog or fragment thereof, e.g. derived from Saccharomyces cerevisiae, is increased or generated. For example the activity of a nucleic acid molecule or a polypeptide comprising the nucleic acid, preferably the coding region thereof, or polypeptide or the consensus sequence or the polypeptide motif, as depicted in Table I, II or IV, application No. 4, column 5 or 8 in the respective same line as the nucleic acid molecule SEQ ID NO. 62524 or polypeptide SEQ ID NO. 62525, respectively, or a homolog or a fragment thereof, is increased or generated, or if the activity transcription factor is increased or generated in a non-human organism, like a microorganism or a plant cell, plant or part thereof, especially with non-targeted localization, For example, an increase of the threonine of at least 1 percent, particularly in a range of 17 to 83-percent is conferred as compared to a corresponding non-transformed wild type non-human organism.

[31127] Accordingly, in one embodiment, an increase of threonine in a non-human organism, as compared to a corresponding non-transformed wild type non-human organism, is conferred in the process of the invention, if the activity of a polypeptide showing the activity of a cell division control protein, or if the activity of the polypeptide Ybr160w, preferably represented by SEQ ID NO. 62718, or a homolog or fragment thereof, or if the activity of a polypeptide encoded by a nucleic acid molecule comprising the nucleic acid SEQ ID NO. 62717, preferably the coding region thereof, or a homolog or fragment thereof, e.g. derived from Saccharomyces cerevisiae, is increased or generated. For example the activity of a nucleic acid molecule or a polypeptide comprising the nucleic acid, preferably the coding region thereof, or polypeptide or the consensus sequence or the polypeptide motif, as depicted in Table I, II or IV, application No. 4, column 5 or 8 in the respective same line as the nucleic acid molecule SEQ ID NO. 62717 or polypeptide SEQ ID NO. 62718, respectively, or a homolog or a fragment thereof, is increased or generated, or if the activity cell division control protein is increased or generated in a non-human organism, like a microorganism or a plant cell, plant or part thereof, especially with non-targeted localization, For example, an increase of the threonine of at least 1 percent, particularly in a range of 25 to 60-percent is conferred as compared to a corresponding non-transformed wild type non-human organism.

[31128] Accordingly, in one embodiment, an increase of threonine in a non-human organism, as compared to a corresponding non-transformed wild type non-human organism, is conferred in the process of the invention, if the activity of a polypeptide showing the activity of a pyruvate carboxylase, or if the activity of the polypeptide Ybr218c, preferably represented by SEQ ID NO. 96780, or a homolog or fragment thereof, or if the activity of a polypeptide encoded by a nucleic acid molecule comprising the nucleic acid SEQ ID NO. 96779, preferably the coding region thereof, or a homolog or fragment thereof, e.g. derived from Saccharomyces cerevisiae, is increased or generated. For example the activity of a nucleic acid molecule or a polypeptide comprising the nucleic acid, preferably the coding region thereof, or polypeptide or the consensus sequence or the polypeptide motif, as depicted in Table I, II or IV, application No. 4, column 5 or 8 in the respective same line as the nucleic acid molecule SEQ ID NO. 96779 or polypeptide SEQ ID NO. 96780, respectively, or a homolog or a fragment thereof, is increased or generated, or if the activity pyruvate carboxylase is increased or generated in a non-human organism, like a microorganism or a plant cell, plant or part thereof, especially with plastidic localization, For example, an increase of the threonine of at least 1 percent, particularly in a range of 17 to 27-percent is conferred as compared to a corresponding non-transformed wild type non-human organism.

[31129] Accordingly, in one embodiment, an increase of threonine in a non-human organism, as compared to a corresponding non-transformed wild type non-human organism, is conferred in the process of the invention, if the activity of a polypeptide showing the activity of a ycl027w-protein, or if the activity of the polypeptide Ycl027w, preferably represented by SEQ ID NO. 96981, or a homolog or fragment thereof, or if the activity of a polypeptide encoded by a nucleic acid molecule comprising the nucleic acid SEQ ID NO. 96980, preferably the coding region thereof, or a homolog or fragment thereof, e.g. derived from Saccharomyces cerevisiae, is increased or generated. For example the activity of a nucleic acid molecule or a polypeptide comprising the nucleic acid, preferably the coding region thereof, or polypeptide or the consensus sequence or the polypeptide motif, as depicted in Table I, II or IV, application No. 4, column 5 or 8 in the respective same line as the nucleic acid molecule SEQ ID NO. 96980 or polypeptide SEQ ID NO. 96981, respectively, or a homolog or a fragment thereof, is increased or generated, or if the activity ycl027w-protein is increased or generated in a non-human organism, like a microorganism or a plant cell, plant or part thereof, especially with plastidic localization, For example, an increase of the threonine of at least 1 percent, particularly in a range of 19 to 26-percent is conferred as compared to a corresponding non-transformed wild type non-human organism.

[31130] Accordingly, in one embodiment, an increase of threonine in a non-human organism, as compared to a corresponding non-transformed wild type non-human organism, is conferred in the process of the invention, if the activity of a polypeptide showing the activity of a coproporphyrinogen III oxidase, or if the activity of the polypeptide Ydr044w, preferably represented by SEQ ID NO. 63335, or a homolog or fragment thereof, or if the activity of a polypeptide encoded by a nucleic acid molecule comprising the nucleic acid SEQ ID NO. 63334, preferably the coding region thereof, or a homolog or fragment thereof, e.g. derived from Saccharomyces cerevisiae, is increased or generated. For example the activity of a nucleic acid molecule or a polypeptide comprising the nucleic acid, preferably the coding region thereof, or polypeptide or the consensus sequence or the polypeptide motif, as depicted in Table I, II or IV, application No. 4, column 5 or 8 in the respective same line as the nucleic acid molecule SEQ ID NO. 63334 or polypeptide SEQ ID NO. 63335, respectively, or a homolog or a fragment thereof, is increased or generated, or if the activity coproporphyrinogen III oxidase is increased or generated in a non-human organism, like a microorganism or a plant cell, plant or part thereof, especially with plastidic localization, For example, an increase of the threonine of at least 1 percent, particularly in a range of 74 to 194-percent is conferred as compared to a corresponding non-transformed wild type non-human organism.

[31131] Accordingly, in one embodiment, an increase of threonine in a non-human organism, as compared to a corresponding non-transformed wild type non-human organism, is conferred in the process of the invention, if the activity of a polypeptide showing the activity of a ydr183w-protein, or if the activity of the polypeptide Ydr183w, preferably represented by SEQ ID NO. 90104, or a homolog or fragment thereof, or if the activity of a polypeptide encoded by a nucleic acid molecule comprising the nucleic acid SEQ ID NO. 90103, preferably the coding region thereof, or a homolog or fragment thereof, e.g. derived from Saccharomyces cerevisiae, is increased or generated. For example the activity of a nucleic acid molecule or a polypeptide comprising the nucleic acid, preferably the coding region thereof, or polypeptide or the consensus sequence or the polypeptide motif, as depicted in Table I, II or IV, application No. 4, column 5 or 8 in the respective same line as the nucleic acid molecule SEQ ID NO. 90103 or polypeptide SEQ ID NO. 90104, respectively, or a homolog or a fragment thereof, is increased or generated, or if the activity ydr183w-protein is increased or generated in a non-human organism, like a microorganism or a plant cell, plant or part thereof, especially with plastidic localization, For example, an increase of the threonine of at least 1 percent, particularly in a range of 17 to 53-percent is conferred as compared to a corresponding non-transformed wild type non-human organism.

[31132] Accordingly, in one embodiment, an increase of threonine in a non-human organism, as compared to a corresponding non-transformed wild type non-human organism, is conferred in the process of the invention, if the activity of a polypeptide showing the activity of a hexose transporter, or if the activity of the polypeptide Ydr342c, preferably represented by SEQ ID NO. 96987, or a homolog or fragment thereof, or if the activity of a polypeptide encoded by a nucleic acid molecule comprising the nucleic acid SEQ ID NO. 96986, preferably the coding region thereof, or a homolog or fragment thereof, e.g. derived from Saccharomyces cerevisiae, is increased or generated. For example the activity of a nucleic acid molecule or a polypeptide comprising the nucleic acid, preferably the coding region thereof, or polypeptide or the consensus sequence or the polypeptide motif, as depicted in Table I, II or IV, application No. 4, column 5 or 8 in the respective same line as the nucleic acid molecule SEQ ID NO. 96986 or polypeptide SEQ ID NO. 96987, respectively, or a homolog or a fragment thereof, is increased or generated, or if the activity hexose transporter is increased or generated in a non-human organism, like a microorganism or a plant cell, plant or part thereof, especially with plastidic localization, For example, an increase of the threonine of at least 1 percent, particularly in a range of 19 to 92-percent is conferred as compared to a corresponding non-transformed wild type non-human organism.

[31133] Accordingly, in one embodiment, an increase of threonine in a non-human organism, as compared to a corresponding non-transformed wild type non-human organism, is conferred in the process of the invention, if the activity of a polypeptide showing the activity of a YEL030C-A-protein, or if the activity of the polypeptide Yel030c-a, preferably represented by SEQ ID NO. 97295, or a homolog or fragment thereof, or if the activity of a polypeptide encoded by a nucleic acid molecule comprising the nucleic acid SEQ ID NO. 97294, preferably the coding region thereof, or a homolog or fragment thereof, e.g. derived from Saccharomyces cerevisiae, is increased or generated. For example the activity of a nucleic acid molecule or a polypeptide comprising the nucleic acid, preferably the coding region thereof, or polypeptide or the consensus sequence or the polypeptide motif, as depicted in Table I, II or IV, application No. 4, column 5 or 8 in the respective same line as the nucleic acid molecule SEQ ID NO. 97294 or polypeptide SEQ ID NO. 97295, respectively, or a homolog or a fragment thereof, is increased or generated, or if the activity YEL030C-A-protein is increased or generated in a non-human organism, like a microorganism or a plant cell, plant or part thereof, especially with non-targeted localization, For example, an increase of the threonine of at least 1 percent, particularly in a range of 16 to 31-percent is conferred as compared to a corresponding non-transformed wild type non-human organism.

[31134] Accordingly, in one embodiment, an increase of threonine in a non-human organism, as compared to a corresponding non-transformed wild type non-human organism, is conferred in the process of the invention, if the activity of a polypeptide showing the activity of a hexose transporter, or if the activity of the polypeptide Yel069c, preferably represented by SEQ ID NO. 97299, or a homolog or fragment thereof, or if the activity of a polypeptide encoded by a nucleic acid molecule comprising the nucleic acid SEQ ID NO. 97298, preferably the coding region thereof, or a homolog or fragment thereof, e.g. derived from Saccharomyces cerevisiae, is increased or generated. For example the activity of a nucleic acid molecule or a polypeptide comprising the nucleic acid, preferably the coding region thereof, or polypeptide or the consensus sequence or the polypeptide motif, as depicted in Table I, II or IV, application No. 4, column 5 or 8 in the respective same line as the nucleic acid molecule SEQ ID NO. 97298 or polypeptide SEQ ID NO. 97299, respectively, or a homolog or a fragment thereof, is increased or generated, or if the activity hexose transporter is increased or generated in a non-human organism, like a microorganism or a plant cell, plant or part thereof, especially with plastidic localization, For example, an increase of the threonine of at least 1 percent, particularly in a range of 21 to 35-percent is conferred as compared to a corresponding non-transformed wild type non-human organism.

[31135] Accordingly, in one embodiment, an increase of threonine in a non-human organism, as compared to a corresponding non-transformed wild type non-human organism, is conferred in the process of the invention, if the activity of a polypeptide showing the activity of a yfl054c-protein, or if the activity of the polypeptide Yfl054c, preferably represented by SEQ ID NO. 64149, or a homolog or fragment thereof, or if the activity of a polypeptide encoded by a nucleic acid molecule comprising the nucleic acid SEQ ID NO. 64148, preferably the coding region thereof, or a homolog or fragment thereof, e.g. derived from Saccharomyces cerevisiae, is increased or generated. For example the activity of a nucleic acid molecule or a polypeptide comprising the nucleic acid, preferably the coding region thereof, or polypeptide or the consensus sequence or the polypeptide motif, as depicted in Table I, II or IV, application No. 4, column 5 or 8 in the respective same line as the nucleic acid molecule SEQ ID NO. 64148 or polypeptide SEQ ID NO. 64149, respectively, or a homolog or a fragment thereof, is increased or generated, or if the activity yfl054c-protein is increased or generated in a non-human organism, like a microorganism or a plant cell, plant or part thereof, especially with plastidic localization, For example, an increase of the threonine of at least 1 percent, particularly in a range of 16 to 23-percent is conferred as compared to a corresponding non-transformed wild type non-human organism.

[31136] Accordingly, in one embodiment, an increase of threonine in a non-human organism, as compared to a corresponding non-transformed wild type non-human organism, is conferred in the process of the invention, if the activity of a polypeptide showing the activity of a ygl237c-protein, or if the activity of the polypeptide Ygl237c, preferably represented by SEQ ID NO. 64178, or a homolog or fragment thereof, or if the activity of a polypeptide encoded by a nucleic acid molecule comprising the nucleic acid SEQ ID NO. 64177, preferably the coding region thereof, or a homolog or fragment thereof, e.g. derived from Saccharomyces cerevisiae, is increased or generated. For example the activity of a nucleic acid molecule or a polypeptide comprising the nucleic acid, preferably the coding region thereof, or polypeptide or the consensus sequence or the polypeptide motif, as depicted in Table I, II or IV, application No. 4, column 5 or 8 in the respective same line as the nucleic acid molecule SEQ ID NO. 64177 or polypeptide SEQ ID NO. 64178, respectively, or a homolog or a fragment thereof, is increased or generated, or if the activity ygl237c-protein is increased or generated in a non-human organism, like a microorganism or a plant cell, plant or part thereof, especially with non-targeted localization, For example, an increase of the threonine of at least 1 percent, particularly in a range of 27 to 84-percent is conferred as compared to a corresponding non-transformed wild type non-human organism.

[31137] Accordingly, in one embodiment, an increase of threonine in a non-human organism, as compared to a corresponding non-transformed wild type non-human organism, is conferred in the process of the invention, if the activity of a polypeptide showing the activity of a yhr131c-protein, or if the activity of the polypeptide Yhr131c, preferably represented by SEQ ID NO. 97621, or a homolog or fragment thereof, or if the activity of a polypeptide encoded by a nucleic acid molecule comprising the nucleic acid SEQ ID NO. 97620, preferably the coding region thereof, or a homolog or fragment thereof, e.g. derived from Saccharomyces cerevisiae, is increased or generated. For example the activity of a nucleic acid molecule or a polypeptide comprising the nucleic acid, preferably the coding region thereof, or polypeptide or the consensus sequence or the polypeptide motif, as depicted in Table I, II or IV, application No. 4, column 5 or 8 in the respective same line as the nucleic acid molecule SEQ ID NO. 97620 or polypeptide SEQ ID NO. 97621, respectively, or a homolog or a fragment thereof, is increased or generated, or if the activity yhr131c-protein is increased or generated in a non-human organism, like a microorganism or a plant cell, plant or part thereof, especially with plastidic localization, For example, an increase of the threonine of at least 1 percent, particularly in a range of 31 to 32-percent is conferred as compared to a corresponding non-transformed wild type non-human organism.

[31138] Accordingly, in one embodiment, an increase of threonine in a non-human organism, as compared to a corresponding non-transformed wild type non-human organism, is conferred in the process of the invention, if the activity of a polypeptide showing the activity of a (DL)-glycerol-3-phosphatase, or if the activity of the polypeptide Yil053w, preferably represented by SEQ ID NO. 14770, or a homolog or fragment thereof, or if the activity of a polypeptide encoded by a nucleic acid molecule comprising the nucleic acid SEQ ID NO. 14769, preferably the coding region thereof, or a homolog or fragment thereof, e.g. derived from Saccharomyces cerevisiae, is increased or generated. For example the activity of a nucleic acid molecule or a polypeptide comprising the nucleic acid, preferably the coding region thereof, or polypeptide or the consensus sequence or the polypeptide motif, as depicted in Table I, II or IV, application No. 4, column 5 or 8 in the respective same line as the nucleic acid molecule SEQ ID NO. 14769 or polypeptide SEQ ID NO. 14770, respectively, or a homolog or a fragment thereof, is increased or generated, or if the activity (DL)-glycerol-3-phosphatase is increased or generated in a non-human organism, like a microorganism or a plant cell, plant or part thereof, especially with plastidic localization, For example, an increase of the threonine of at least 1 percent, particularly in a range of 19 to 46-percent is conferred as compared to a corresponding non-transformed wild type non-human organism.

[31139] Accordingly, in one embodiment, an increase of threonine in a non-human organism, as compared to a corresponding non-transformed wild type non-human organism, is conferred in the process of the invention, if the activity of a polypeptide showing the activity of a 3-phosphoglycerate dehydrogenase, or if the activity of the polypeptide Yil074c, preferably represented by SEQ ID NO. 64564, or a homolog or fragment thereof, or if the activity of a polypeptide encoded by a nucleic acid molecule comprising the nucleic acid SEQ ID NO. 64563, preferably the coding region thereof, or a homolog or fragment thereof, e.g. derived from Saccharomyces cerevisiae, is increased or generated. For example the activity of a nucleic acid molecule or a polypeptide comprising the nucleic acid, preferably the coding region thereof, or polypeptide or the consensus sequence or the polypeptide motif, as depicted in Table I, II or IV, application No. 4, column 5 or 8 in the respective same line as the nucleic acid molecule SEQ ID NO. 64563 or polypeptide SEQ ID NO. 64564, respectively, or a homolog or a fragment thereof, is increased or generated, or if the activity 3-phosphoglycerate dehydrogenase is increased or generated in a non-human organism, like a microorganism or a plant cell, plant or part thereof, especially with plastidic localization, For example, an increase of the threonine of at least 1 percent, particularly in a range of 22 to 34-percent is conferred as compared to a corresponding non-transformed wild type non-human organism.

[31140] Accordingly, in one embodiment, an increase of threonine in a non-human organism, as compared to a corresponding non-transformed wild type non-human organism, is conferred in the process of the invention, if the activity of a polypeptide showing the activity of a glutathione S-transferase, or if the activity of the polypeptide Yir038c, preferably represented by SEQ ID NO. 90307, or a homolog or fragment thereof, or if the activity of a polypeptide encoded by a nucleic acid molecule comprising the nucleic acid SEQ ID NO. 90306, preferably the coding region thereof, or a homolog or fragment thereof, e.g. derived from Saccharomyces cerevisiae, is increased or generated. For example the activity of a nucleic acid molecule or a polypeptide comprising the nucleic acid, preferably the coding region thereof, or polypeptide or the consensus sequence or the polypeptide motif, as depicted in Table I, II or IV, application No. 4, column 5 or 8 in the respective same line as the nucleic acid molecule SEQ ID NO. 90306 or polypeptide SEQ ID NO. 90307, respectively, or a homolog or a fragment thereof, is increased or generated, or if the activity glutathione S-transferase is increased or generated in a non-human organism, like a microorganism or a plant cell, plant or part thereof, especially with plastidic localization, For example, an increase of the threonine of at least 1 percent, particularly in a range of 16 to 25-percent is conferred as compared to a corresponding non-transformed wild type non-human organism.

[31141] Accordingly, in one embodiment, an increase of threonine in a non-human organism, as compared to a corresponding non-transformed wild type non-human organism, is conferred in the process of the invention, if the activity of a polypeptide showing the activity of a DnaJ-like chaperone, or if the activity of the polypeptide Yjl073w, preferably represented by SEQ ID NO. 64965, or a homolog or fragment thereof, or if the activity of a polypeptide encoded by a nucleic acid molecule comprising the nucleic acid SEQ ID NO. 64964, preferably the coding region thereof, or a homolog or fragment thereof, e.g. derived from Saccharomyces cerevisiae, is increased or generated. For example the activity of a nucleic acid molecule or a polypeptide comprising the nucleic acid, preferably the coding region thereof, or polypeptide or the consensus sequence or the polypeptide motif, as depicted in Table I, II or IV, application No. 4, column 5 or 8 in the respective same line as the nucleic acid molecule SEQ ID NO. 64964 or polypeptide SEQ ID NO. 64965, respectively, or a homolog or a fragment thereof, is increased or generated, or if the activity DnaJ-like chaperone is increased or generated in a non-human organism, like a microorganism or a plant cell, plant or part thereof, especially with plastidic localization, For example, an increase of the threonine of at least 1 percent, particularly in a range of 24 to 27-percent is conferred as compared to a corresponding non-transformed wild type non-human organism.

[31142] Accordingly, in one embodiment, an increase of threonine in a non-human organism, as compared to a corresponding non-transformed wild type non-human organism, is conferred in the process of the invention, if the activity of a polypeptide showing the activity of a YJL127W-A-protein, or if the activity of the polypeptide Yjl127w-a, preferably represented by SEQ ID NO. 97632, or a homolog or fragment thereof, or if the activity of a polypeptide encoded by a nucleic acid molecule comprising the nucleic acid SEQ ID NO. 97631, preferably the coding region thereof, or a homolog or fragment thereof, e.g. derived from Saccharomyces cerevisiae, is increased or generated. For example the activity of a nucleic acid molecule or a polypeptide comprising the nucleic acid, preferably the coding region thereof, or polypeptide or the consensus sequence or the polypeptide motif, as depicted in Table I, II or IV, application No. 4, column 5 or 8 in the respective same line as the nucleic acid molecule SEQ ID NO. 97631 or polypeptide SEQ ID NO. 97632, respectively, or a homolog or a fragment thereof, is increased or generated, or if the activity YJL127W-A-protein is increased or generated in a non-human organism, like a microorganism or a plant cell, plant or part thereof, especially with non-targeted localization, For example, an increase of the threonine of at least 1 percent, particularly in a range of 18 to 61-percent is conferred as compared to a corresponding non-transformed wild type non-human organism.

[31143] Accordingly, in one embodiment, an increase of threonine in a non-human organism, as compared to a corresponding non-transformed wild type non-human organism, is conferred in the process of the invention, if the activity of a polypeptide showing the activity of a hexose transporter, or if the activity of the polypeptide Yjl219w, preferably represented by SEQ ID NO. 97636, or a homolog or fragment thereof, or if the activity of a polypeptide encoded by a nucleic acid molecule comprising the nucleic acid SEQ ID NO. 97635, preferably the coding region thereof, or a homolog or fragment thereof, e.g. derived from Saccharomyces cerevisiae, is increased or generated. For example the activity of a nucleic acid molecule or a polypeptide comprising the nucleic acid, preferably the coding region thereof, or polypeptide or the consensus sequence or the polypeptide motif, as depicted in Table I, II or IV, application No. 4, column 5 or 8 in the respective same line as the nucleic acid molecule SEQ ID NO. 97635 or polypeptide SEQ ID NO. 97636, respectively, or a homolog or a fragment thereof, is increased or generated, or if the activity hexose transporter is increased or generated in a non-human organism, like a microorganism or a plant cell, plant or part thereof, especially with non-targeted localization, For example, an increase of the threonine of at least 1 percent, particularly in a range of 27 to 157-percent is conferred as compared to a corresponding non-transformed wild type non-human organism.

[31144] Accordingly, in one embodiment, an increase of threonine in a non-human organism, as compared to a corresponding non-transformed wild type non-human organism, is conferred in the process of the invention, if the activity of a polypeptide showing the activity of a homoserine dehydrogenase, or if the activity of the polypeptide Yjr139c, preferably represented by SEQ ID NO. 14886, or a homolog or fragment thereof, or if the activity of a polypeptide encoded by a nucleic acid molecule comprising the nucleic acid SEQ ID NO. 14885, preferably the coding region thereof, or a homolog or fragment thereof, e.g. derived from Saccharomyces cerevisiae, is increased or generated. For example the activity of a nucleic acid molecule or a polypeptide comprising the nucleic acid, preferably the coding region thereof, or polypeptide or the consensus sequence or the polypeptide motif, as depicted in Table I, II or IV, application No. 4, column 5 or 8 in the respective same line as the nucleic acid molecule SEQ ID NO. 14885 or polypeptide SEQ ID NO. 14886, respectively, or a homolog or a fragment thereof, is increased or generated, or if the activity homoserine dehydrogenase is increased or generated in a non-human organism, like a microorganism or a plant cell, plant or part thereof, especially with plastidic localization, For example, an increase of the threonine of at least 1 percent, particularly in a range of 16 to 923-percent is conferred as compared to a corresponding non-transformed wild type non-human organism.

[31145] Accordingly, in one embodiment, an increase of threonine in a non-human organism, as compared to a corresponding non-transformed wild type non-human organism, is conferred in the process of the invention, if the activity of a polypeptide showing the activity of a branched chain aminotransferase, or if the activity of the polypeptide Yjr148w, preferably represented by SEQ ID NO. 90410, or a homolog or fragment thereof, or if the activity of a polypeptide encoded by a nucleic acid molecule comprising the nucleic acid SEQ ID NO. 90409, preferably the coding region thereof, or a homolog or fragment thereof, e.g. derived from Saccharomyces cerevisiae, is increased or generated. For example the activity of a nucleic acid molecule or a polypeptide comprising the nucleic acid, preferably the coding region thereof, or polypeptide or the consensus sequence or the polypeptide motif, as depicted in Table I, II or IV, application No. 4, column 5 or 8 in the respective same line as the nucleic acid molecule SEQ ID NO. 90409 or polypeptide SEQ ID NO. 90410, respectively, or a homolog or a fragment thereof, is increased or generated, or if the activity branched chain aminotransferase is increased or generated in a non-human organism, like a microorganism or a plant cell, plant or part thereof, especially with plastidic localization, For example, an increase of the threonine of at least 1 percent, particularly in a range of 18 to 59-percent is conferred as compared to a corresponding non-transformed wild type non-human organism.

[31146] Accordingly, in one embodiment, an increase of threonine in a non-human organism, as compared to a corresponding non-transformed wild type non-human organism, is conferred in the process of the invention, if the activity of a polypeptide showing the activity of a YKL038W-protein, or if the activity of the polypeptide YKL038W, preferably represented by SEQ ID NO. 90603, or a homolog or fragment thereof, or if the activity of a polypeptide encoded by a nucleic acid molecule comprising the nucleic acid SEQ ID NO. 90602, preferably the coding region thereof, or a homolog or fragment thereof, e.g. derived from Saccharomyces cerevisiae, is increased or generated. For example the activity of a nucleic acid molecule or a polypeptide comprising the nucleic acid, preferably the coding region thereof, or polypeptide or the consensus sequence or the polypeptide motif, as depicted in Table I, II or IV, application No. 4, column 5 or 8 in the respective same line as the nucleic acid molecule SEQ ID NO. 90602 or polypeptide SEQ ID NO. 90603, respectively, or a homolog or a fragment thereof, is increased or generated, or if the activity YKL038W-protein is increased or generated in a non-human organism, like a microorganism or a plant cell, plant or part thereof, especially with plastidic localization, For example, an increase of the threonine of at least 1 percent, particularly in a range of 16 to 45-percent is conferred as compared to a corresponding non-transformed wild type non-human organism.

[31147] Accordingly, in one embodiment, an increase of threonine in a non-human organism, as compared to a corresponding non-transformed wild type non-human organism, is conferred in the process of the invention, if the activity of a polypeptide showing the activity of a phosphoenolpyruvate carboxykinase, or if the activity of the polypeptide Ykr097w, preferably represented by SEQ ID NO. 98076, or a homolog or fragment thereof, or if the activity of a polypeptide encoded by a nucleic acid molecule comprising the nucleic acid SEQ ID NO. 98075, preferably the coding region thereof, or a homolog or fragment thereof, e.g. derived from Saccharomyces cerevisiae, is increased or generated. For example the activity of a nucleic acid molecule or a polypeptide comprising the nucleic acid, preferably the coding region thereof, or polypeptide or the consensus sequence or the polypeptide motif, as depicted in Table I, II or IV, application No. 4, column 5 or 8 in the respective same line as the nucleic acid molecule SEQ ID NO. 98075 or polypeptide SEQ ID NO. 98076, respectively, or a homolog or a fragment thereof, is increased or generated, or if the activity phosphoenolpyruvate carboxykinase is increased or generated in a non-human organism, like a microorganism or a plant cell, plant or part thereof, especially with plastidic localization, For example, an increase of the threonine of at least 1 percent, partitularly in a range of 17 to 35-percent is conferred as compared to a corresponding non-transformed wild type non-human organism.

[31148] Accordingly, in one embodiment, an increase of threonine in a non-human organism, as compared to a corresponding non-transformed wild type non-human organism, is conferred in the process of the invention, if the activity of a polypeptide showing the activity of a aspartate aminotransferase, or if the activity of the polypeptide Ylr027c, preferably represented by SEQ ID NO. 90616, or a homolog or fragment thereof, or if the activity of a polypeptide encoded by a nucleic acid molecule comprising the nucleic acid SEQ ID NO. 90615, preferably the coding region thereof, or a homolog or fragment thereof, e.g. derived from Saccharomyces cerevisiae, is increased or generated. For example the activity of a nucleic acid molecule or a polypeptide comprising the nucleic acid, preferably the coding region thereof, or polypeptide or the consensus sequence or the polypeptide motif, as depicted in Table I, II or IV, application No. 4, column 5 or 8 in the respective same line as the nucleic acid molecule SEQ ID NO. 90615 or polypeptide SEQ ID NO. 90616, respectively, or a homolog or a fragment thereof, is increased or generated, or if the activity aspartate aminotransferase is increased or generated in a non-human organism, like a microorganism or a plant cell, plant or part thereof, especially with non-targeted localization, For example, an increase of the threonine of at least 1 percent, particularly in a range of 57 to 111-percent is conferred as compared to a corresponding non-transformed wild type non-human organism.

[31149] Accordingly, in one embodiment, an increase of threonine in a non-human organism, as compared to a corresponding non-transformed wild type non-human organism, is conferred in the process of the invention, if the activity of a polypeptide showing the activity of a mitochondrial dicarboxylate transporter, or if the activity of the polypeptide Ylr348c, preferably represented by SEQ ID NO. 98244, or a homolog or fragment thereof, or if the activity of a polypeptide encoded by a nucleic acid molecule comprising the nucleic acid SEQ ID NO. 98243, preferably the coding region thereof, or a homolog or fragment thereof, e.g. derived from Saccharomyces cerevisiae, is increased or generated. For example the activity of a nucleic acid molecule or a polypeptide comprising the nucleic acid, preferably the coding region thereof, or polypeptide or the consensus sequence or the polypeptide motif, as depicted in Table I, II or IV, application No. 4, column 5 or 8 in the respective same line as the nucleic acid molecule SEQ ID NO. 98243 or polypeptide SEQ ID NO. 98244, respectively, or a homolog or a fragment thereof, is increased or generated, or if the activity mitochondrial dicarboxylate transporter is increased or generated in a non-human organism, like a microorganism or a plant cell, plant or part thereof, especially with non-targeted localization, For example, an increase of the threonine of at least 1 percent, particularly in a range of 23 to 68-percent is conferred as compared to a corresponding non-transformed wild type non-human organism.

[31150] Accordingly, in one embodiment, an increase of threonine in a non-human organism, as compared to a corresponding non-transformed wild type non-human organism, is conferred in the process of the invention, if the activity of a polypeptide showing the activity of a phosphate transporter, or if the activity of the polypeptide Yml123c, preferably represented by SEQ ID NO.

[31151] 91786, or a homolog or fragment thereof, or if the activity of a polypeptide encoded by a nucleic acid molecule comprising the nucleic acid SEQ ID NO. 91785, preferably the coding region thereof, or a homolog or fragment thereof, e.g. derived from Saccharomyces cerevisiae, is increased or generated. For example the activity of a nucleic acid molecule or a polypeptide comprising the nucleic acid, preferably the coding region thereof, or polypeptide or the consensus sequence or the polypeptide motif, as depicted in Table I, II or IV, application No. 4, column 5 or 8 in the respective same line as the nucleic acid molecule SEQ ID NO. 91785 or polypeptide SEQ ID NO. 91786, respectively, or a homolog or a fragment thereof, is increased or generated, or if the activity phosphate transporter is increased or generated in a non-human organism, like a microorganism or a plant cell, plant or part thereof, especially with plastidic localization, For example, an increase of the threonine of at least 1 percent, particularly in a range of 22 to 60-percent is conferred as compared to a corresponding non-transformed wild type non-human organism.

[31152] Accordingly, in one embodiment, an increase of threonine in a non-human organism, as compared to a corresponding non-transformed wild type non-human organism, is conferred in the process of the invention, if the activity of a polypeptide showing the activity of a protein kinase, or if the activity of the polypeptide Yol045w, preferably represented by SEQ ID NO. 67685, or a homolog or fragment thereof, or if the activity of a polypeptide encoded by a nucleic acid molecule comprising the nucleic acid SEQ ID NO. 67684, preferably the coding region thereof, or a homolog or fragment thereof, e.g. derived from Saccharomyces cerevisiae, is increased or generated. For example the activity of a nucleic acid molecule or a polypeptide comprising the nucleic acid, preferably the coding region thereof, or polypeptide or the consensus sequence or the polypeptide motif, as depicted in Table I, II or IV, application No. 4, column 5 or 8 in the respective same line as the nucleic acid molecule SEQ ID NO. 67684 or polypeptide SEQ ID NO. 67685, respectively, or a homolog or a fragment thereof, is increased or generated, or if the activity protein kinase is increased or generated in a non-human organism, like a microorganism or a plant cell, plant or part thereof, especially with plastidic localization, For example, an increase of the threonine of at least 1 percent, particularly in a range of 32 to 56-percent is conferred as compared to a corresponding non-transformed wild type non-human organism.

[31153] Accordingly, in one embodiment, an increase of threonine in a non-human organism, as compared to a corresponding non-transformed wild type non-human organism, is conferred in the process of the invention, if the activity of a polypeptide showing the activity of a histone acetyltransferase, or if the activity of the polypeptide Yor244w, preferably represented by SEQ ID NO. 92541, or a homolog or fragment thereof, or if the activity of a polypeptide encoded by a nucleic acid molecule comprising the nucleic acid SEQ ID NO. 92540, preferably the coding region thereof, or a homolog or fragment thereof, e.g. derived from Saccharomyces cerevisiae, is increased or generated. For example the activity of a nucleic acid molecule or a polypeptide comprising the nucleic acid, preferably the coding region thereof, or polypeptide or the consensus sequence or the polypeptide motif, as depicted in Table I, II or IV, application No. 4, column 5 or 8 in the respective same line as the nucleic acid molecule SEQ ID NO. 92540 or polypeptide SEQ ID NO. 92541, respectively, or a homolog or a fragment thereof, is increased or generated, or if the activity histone acetyltransferase is increased or generated in a non-human organism, like a microorganism or a plant cell, plant or part thereof, especially with plastidic localization, For example, an increase of the threonine of at least 1 percent, particularly in a range of 16 to 24-percent is conferred as compared to a corresponding non-transformed wild type non-human organism.

[31154] Accordingly, in one embodiment, an increase of threonine in a non-human organism, as compared to a corresponding non-transformed wild type non-human organism, is conferred in the process of the invention, if the activity of a polypeptide showing the activity of a cyclin, or if the activity of the polypeptide Ypr119w, preferably represented by SEQ ID NO. 98446, or a homolog or fragment thereof, or if the activity of a polypeptide encoded by a nucleic acid molecule comprising the nucleic acid SEQ ID NO. 98445, preferably the coding region thereof, or a homolog or fragment thereof, e.g. derived from Saccharomyces cerevisiae, is increased or generated. For example the activity of a nucleic acid molecule or a polypeptide comprising the nucleic acid, preferably the coding region thereof, or polypeptide or the consensus sequence or the polypeptide motif, as depicted in Table I, II or IV, application No. 4, column 5 or 8 in the respective same line as the nucleic acid molecule SEQ ID NO. 98445 or polypeptide SEQ ID NO. 98446, respectively, or a homolog or a fragment thereof, is increased or generated, or if the activity cyclin is increased or generated in a non-human organism, like a microorganism or a plant cell, plant or part thereof, especially with non-targeted localization, For example, an increase of the threonine of at least 1 percent, particularly in a range of 16 to 37-percent is conferred as compared to a corresponding non-transformed wild type non-human organism.

[31155] Accordingly, in one embodiment, an increase of threonine in a non-human organism, as compared to a corresponding non-transformed wild type non-human organism, is conferred in the process of the invention, if the activity of a polypeptide showing the activity of a Zm_{—}4842_BE510522-protein, or if the activity of the polypeptide Zm_{—}4842_BE510522, preferably represented by SEQ ID NO. 68414, or a homolog or fragment thereof, or if the activity of a polypeptide encoded by a nucleic acid molecule comprising the nucleic acid SEQ ID NO. 68413, preferably the coding region thereof, or a homolog or fragment thereof, e.g. derived from Zea mays, is increased or generated. For example the activity of a nucleic acid molecule or a polypeptide comprising the nucleic acid, preferably the coding region thereof, or polypeptide or the consensus sequence or the polypeptide motif, as depicted in Table I, II or IV, application No. 4, column 5 or 8 in the respective same line as the nucleic acid molecule SEQ ID NO. 68413 or polypeptide SEQ ID NO. 68414, respectively, or a homolog or a fragment thereof, is increased or generated, or if the activity Zm_{—}4842_BE510522-protein is increased or generated in a non-human organism, like a microorganism or a plant cell, plant or part thereof, especially with non-targeted localization, For example, an increase of the threonine of at least 1 percent, particularly in a range of 16 to 78-percent is conferred as compared to a corresponding non-transformed wild type non-human organism.

[31156] [0096.1.1.4] to [0103.1.1.4] for the disclosure of these paragraphs see [0096.1.1.1] to [0103.1.1.1] above.

[31157] In this paragraph “A” means “Goffeau et al., Science 274 (5287), 546 (1996)”, “B” means “Blattner et al., Science 277 (5331), 1453 (1997)”, “C” means “Nakamura et al., Nucleic Acids Res. 28(1), 72 (2000)”, “D” means “deposition of the sequences to the EMBL/GenBank/DDBJ databases under “Sequencing of the draft genome assembly of Azotobacter vinelandii AvOP”. in June 2005 by Copeland et al.”, “E” means “Henne et al., Nat. Biotechnol. 22 (5), 547 (2004)”, “F” means “Kaul et al., Nature 408 (6814), 796 (2000)”, and “G” means “Matsumoto et al., Nature 436 (7052), 793 (2005)”.

[31158] The nucleic acid sequence of 47266012_SOYBEAN from Glycine max, e.g. as shown in the respective line in column 5 of Table I, application no. 4, is unpublished. And the activity of the gene product thereof is the activity of 47266012-protein.

[31159] Accordingly, in one embodiment, the process of the present invention for producing threonine in a non-human organism, like a microorganism or a plant or a part thereof, comprises increasing or generating the activity of a gene product with the activity of a gene product conferring the activity of “47266012-protein”, especially from Glycine max or its functional equivalent or its homolog, e.g. the increase of
[31160] (a) a gene product of a gene comprising the nucleic acid molecule as shown in the respective line in column 5 of Table I, application no. 4, preferably the coding region thereof, or a homolog or a fragment thereof, and being depicted in the same respective line as said 47266012_SOYBEAN, or a functional equivalent or a homolog thereof as shown in column 8 of Table I, application no. 4, preferably the coding region thereof, particularly a homolog or functional equivalent as shown in column 8 of Table I B, application no. 4, and being depicted in the same respective line as said 47266012_SOYBEAN, and preferably the activity is increased non-targeted, or
[31161] (b) a polypeptide comprising a polypeptide, a consensus sequence or at least a polypeptide motif as shown in the respective line in column 5 of Table II or in column 8 of Table IV, application no. 4, respectively, and being depicted in the same respective line as said 47266012_SOYBEAN, or a functional equivalent or a homolog thereof as depicted in column 8 of Table II, application no. 4, preferably a homolog or functional equivalent as depicted in column 8 of Table II B, application no. 4, and being depicted in the same respective line as said 47266012_SOYBEAN, and preferably the activity is increased non-targeted

[31162] Accordingly, in one embodiment, the molecule which activity is to be increased in the process of the invention is the gene product with an activity as a “47266012-protein”, preferably it is the molecule of section (a) or (b) of this paragraph.

[31163] In particular, it was observed that in plants, especially in Arabidopsis thaliana, increasing or generating the activity of a gene product non-targeted with the activity of a “47266012-protein”, preferably being encoded by a gene comprising the nucleic acid sequence SEQ ID NO. 15187, preferably the coding region thereof, conferred the production of or the increase in threonine compared with the wild type control.

[31164] The nucleic acid sequence of 49747384_SOYBEAN from Glycine max, e.g. as shown in the respective line in column 5 of Table I, application no. 4, is unpublished. And the activity of the gene product thereof is the activity of 49747384_SOYBEAN-protein.

[31165] Accordingly, in one embodiment, the process of the present invention for producing threonine in a non-human organism, like a microorganism or a plant or a part thereof, comprises increasing or generating the activity of a gene product with the activity of a gene product conferring the activity of “49747384_SOYBEAN-protein”, especially from Glycine max or its functional equivalent or its homolog, e.g. the increase of
[31166] (a) a gene product of a gene comprising the nucleic acid molecule as shown in the respective line in column 5 of Table I, application no. 4, preferably the coding region thereof, or a homolog or a fragment thereof, and being depicted in the same respective line as said 49747384_SOYBEAN, or a functional equivalent or a homolog thereof as shown in column 8 of Table I, application no. 4, preferably the coding region thereof, particularly a homolog or functional equivalent as shown in column 8 of Table I B, application no. 4, and being depicted in the same respective line as said 49747384_SOYBEAN, and preferably the activity is increased non-targeted, or
[31167] (b) a polypeptide comprising a polypeptide, a consensus sequence or at least a polypeptide motif as shown in the respective line in column 5 of Table II or in column 8 of Table IV, application no. 4, respectively, and being depicted in the same respective line as said 49747384_SOYBEAN, or a functional equivalent or a homolog thereof as depicted in column 8 of Table II, application no. 4, preferably a homolog or functional equivalent as depicted in column 8 of Table II B, application no. 4, and being depicted in the same respective line as said 49747384_SOYBEAN, and preferably the activity is increased non-targeted.

[31168] Accordingly, in one embodiment, the molecule which activity is to be increased in the process of the invention is the gene product with an activity as a “49747384_SOYBEAN-protein”, preferably it is the molecule of section (a) or (b) of this paragraph.

[31169] In particular, it was observed that in plants, especially in Arabidopsis thaliana, increasing or generating the activity of a gene product non-targeted with the activity of a “49747384_SOYBEAN-protein”, preferably being encoded by a gene comprising the nucleic acid sequence SEQ ID NO. 69, preferably the coding region thereof, conferred the production of or the increase in threonine compared with the wild type control.

[31170] The nucleic acid sequence of 59582753_SOYBEAN from Glycine max, e.g. as shown in the respective line in column 5 of Table I, application no. 4, is unpublished. And the activity of the gene product thereof is the activity of glucose-6-phosphate 1-dehydrogenase.

[31171] Accordingly, in one embodiment, the process of the present invention for producing threonine in a non-human organism, like a microorganism or a plant or a part thereof, comprises increasing or generating the activity of a gene product with the activity of a gene product conferring the activity of “glucose-6-phosphate 1-dehydrogenase”, especially from Glycine max or its functional equivalent or its homolog, e.g. the increase of
[31172] (a) a gene product of a gene comprising the nucleic acid molecule as shown in the respective line in column 5 of Table I, application no. 4, preferably the coding region thereof, or a homolog or a fragment thereof, and being depicted in the same respective line as said 59582753_SOYBEAN, or a functional equivalent or a homolog thereof as shown in column 8 of Table I, application no. 4, preferably the coding region thereof, particularly a homolog or functional equivalent as shown in column 8 of Table I B, application no. 4, and being depicted in the same respective line as said 59582753_SOYBEAN, and preferably the activity is increased plastidic, or
[31173] (b) a polypeptide comprising a polypeptide, a consensus sequence or at least a polypeptide motif as shown in the respective line in column 5 of Table II or in column 8 of Table IV, application no. 4, respectively, and being depicted in the same respective line as said 59582753_SOYBEAN, or a functional equivalent or a homolog thereof as depicted in column 8 of Table II, application no. 4, preferably a homolog or functional equivalent as depicted in column 8 of Table II B, application no. 4, and being depicted in the same respective line as said 59582753_SOYBEAN, and preferably the activity is increased plastidic.

[31174] Accordingly, in one embodiment, the molecule which activity is to be increased in the process of the invention is the gene product with an activity as a “glucose-6-phosphate 1-dehydrogenase”, preferably it is the molecule of section (a) or (b) of this paragraph.

[31175] In particular, it was observed that in plants, especially in Arabidopsis thaliana, increasing or generating the activity of a gene product plastidic with the activity of a “glucose-6-phosphate 1-dehydrogenase”, preferably being encoded by a gene comprising the nucleic acid sequence SEQ ID NO. 16883, preferably the coding region thereof, conferred the production of or the increase in threonine compared with the wild type control.

[31176] The nucleic acid sequence of At1g09680 from Arabidopsis thaliana, e.g. as shown in the respective line in column 5 of Table I, application no. 4, has been published in F. And the activity of the gene product thereof is the activity of At1g09680-protein.

[31177] Accordingly, in one embodiment, the process of the present invention for producing threonine in a non-human organism, like a microorganism or a plant or a part thereof, comprises increasing or generating the activity of a gene product with the activity of a gene product conferring the activity of “At1g09680-protein”, especially from Arabidopsis thaliana or its functional equivalent or its homolog, e.g. the increase of
[31178] (a) a gene product of a gene comprising the nucleic acid molecule as shown in the respective line in column 5 of Table I, application no. 4, preferably the coding region thereof, or a homolog or a fragment thereof, and being depicted in the same respective line as said At1g09680, or a functional equivalent or a homolog thereof as shown in column 8 of Table I, application no. 4, preferably the coding region thereof, particularly a homolog or functional equivalent as shown in column 8 of Table I B, application no. 4, and being depicted in the same respective line as said At1g09680, and preferably the activity is increased non-targeted, or
[31179] (b) a polypeptide comprising a polypeptide, a consensus sequence or at least a polypeptide motif as shown in the respective line in column 5 of Table II or in column 8 of Table IV, application no. 4, respectively, and being depicted in the same respective line as said At1g09680, or a functional equivalent or a homolog thereof as depicted in column 8 of Table II, application no. 4, preferably a homolog or functional equivalent as depicted in column 8 of Table II B, application no. 4, and being depicted in the same respective line as said At1g09680, and preferably the activity is increased non-targeted.

[31180] Accordingly, in one embodiment, the molecule which activity is to be increased in the process of the invention is the gene product with an activity as a “At1g09680-protein”, preferably it is the molecule of section (a) or (b) of this paragraph.

[31181] In particular, it was observed that in plants, especially in Arabidopsis thaliana, increasing or generating the activity of a gene product non-targeted with the activity of a “At1g09680-protein”, preferably being encoded by a gene comprising the nucleic acid sequence SEQ ID NO. 352, preferably the coding region thereof, conferred the production of or the increase in threonine compared with the wild type control.

[31182] The nucleic acid sequence of At1g31230 from Arabidopsis thaliana, e.g. as shown in the respective line in column 5 of Table I, application no. 4, has been published in F. And the activity of the gene product thereof is the activity of bifunctional aspartokinase/homoserine dehydrogenase.

[31183] Accordingly, in one embodiment, the process of the present invention for producing threonine in a non-human organism, like a microorganism or a plant or a part thereof, comprises increasing or generating the activity of a gene product with the activity of a gene product conferring the activity of “bifunctional aspartokinase/homoserine dehydrogenase”, especially from Arabidopsis thaliana or its functional equivalent or its homolog, e.g. the increase of
[31184] (a) a gene product of a gene comprising the nucleic acid molecule as shown in the respective line in column 5 of Table I, application no. 4, preferably the coding region thereof, or a homolog or a fragment thereof, and being depicted in the same respective line as said At1g31230, or a functional equivalent or a homolog thereof as shown in column 8 of Table I, application no. 4, preferably the coding region thereof, particularly a homolog or functional equivalent as shown in column 8 of Table I B, application no. 4, and being depicted in the same respective line as said At1g31230, and preferably the activity is increased non-targeted, or
[31185] (b) a polypeptide comprising a polypeptide, a consensus sequence or at least a polypeptide motif as shown in the respective line in column 5 of Table II or in column 8 of Table IV, application no. 4, respectively, and being depicted in the same respective line as said At1g31230, or a functional equivalent or a homolog thereof as depicted in column 8 of Table II, application no. 4, preferably a homolog or functional equivalent as depicted in column 8 of Table II B, application no. 4, and being depicted in the same respective line as said At1g31230, and preferably the activity is increased non-targeted.

[31186] Accordingly, in one embodiment, the molecule which activity is to be increased in the process of the invention is the gene product with an activity as a “bifunctional aspartokinase/homoserine dehydrogenase”, preferably it is the molecule of section (a) or (b) of this paragraph.

[31187] In particular, it was observed that in plants, especially in Arabidopsis thaliana, increasing or generating the activity of a gene product non-targeted with the activity of a “bifunctional aspartokinase/homoserine dehydrogenase”, preferably being encoded by a gene comprising the nucleic acid sequence SEQ ID NO. 627, preferably the coding region thereof, conferred the production of or the increase in threonine compared with the wild type control.

[31188] The nucleic acid sequence of At1g36730 from Arabidopsis thaliana, e.g. as shown in the respective line in column 5 of Table I, application no. 4, has been published in F. And the activity of the gene product thereof is the activity of eukaryotic translation initiation factor 5.

[31189] Accordingly, in one embodiment, the process of the present invention for producing threonine in a non-human organism, like a microorganism or a plant or a part thereof, comprises increasing or generating the activity of a gene product with the activity of a gene product conferring the activity of “eukaryotic translation initiation factor 5”, especially from Arabidopsis thaliana or its functional equivalent or its homolog, e.g. the increase of
[31190] (a) a gene product of a gene comprising the nucleic acid molecule as shown in the respective line in column 5 of Table I, application no. 4, preferably the coding region thereof, or a homolog or a fragment thereof, and being depicted in the same respective line as said At1g36730, or a functional equivalent or a homolog thereof as shown in column 8 of Table I, application no. 4, preferably the coding region thereof, particularly a homolog or functional equivalent as shown in column 8 of Table I B, application no. 4, and being depicted in the same respective line as said At1g36730, and preferably the activity is increased non-targeted, or
[31191] (b) a polypeptide comprising a polypeptide, a consensus sequence or at least a polypeptide motif as shown in the respective line in column 5 of Table II or in column 8 of Table IV, application no. 4, respectively, and being depicted in the same respective line as said At1g36730, or a functional equivalent or a homolog thereof as depicted in column 8 of Table II, application no. 4, preferably a homolog or functional equivalent as depicted in column 8 of Table II B, application no. 4, and being depicted in the same respective line as said At1g36730, and preferably the activity is increased non-targeted.

[31192] Accordingly, in one embodiment, the molecule which activity is to be increased in the process of the invention is the gene product with an activity as a “eukaryotic translation initiation factor 5”, preferably it is the molecule of section (a) or (b) of this paragraph.

[31193] In particular, it was observed that in plants, especially in Arabidopsis thaliana, increasing or generating the activity of a gene product non-targeted with the activity of a “eukaryotic translation initiation factor 5”, preferably being encoded by a gene comprising the nucleic acid sequence SEQ ID NO. 17968, preferably the coding region thereof, conferred the production of or the increase in threonine compared with the wild type control.

[31194] The nucleic acid sequence of At1g43850 from Arabidopsis thaliana, e.g. as shown in the respective line in column 5 of Table I, application no. 4, has been published in F. And the activity of the gene product thereof is the activity of transcriptional regulator.

[31195] Accordingly, in one embodiment, the process of the present invention for producing threonine in a non-human organism, like a microorganism or a plant or a part thereof, comprises increasing or generating the activity of a gene product with the activity of a gene product conferring the activity of “transcriptional regulator”, especially from Arabidopsis thaliana or its functional equivalent or its homolog, e.g. the increase of
[31196] (a) a gene product of a gene comprising the nucleic acid molecule as shown in the respective line in column 5 of Table I, application no. 4, preferably the coding region thereof, or a homolog or a fragment thereof, and being depicted in the same respective line as said At1g43850, or a functional equivalent or a homolog thereof as shown in column 8 of Table I, application no. 4, preferably the coding region thereof, particularly a homolog or functional equivalent as shown in column 8 of Table I B, application no. 4, and being depicted in the same respective line as said At1g43850, and preferably the activity is increased non-targeted, or
[31197] (b) a polypeptide comprising a polypeptide, a consensus sequence or at least a polypeptide motif as shown in the respective line in column 5 of Table II or in column 8 of Table IV, application no. 4, respectively, and being depicted in the same respective line as said At1g43850, or a functional equivalent or a homolog thereof as depicted in column 8 of Table II, application no. 4, preferably a homolog or functional equivalent as depicted in column 8 of Table II B, application no. 4, and being depicted in the same respective line as said At1g43850, and preferably the activity is increased non-targeted.

[31198] Accordingly, in one embodiment, the molecule which activity is to be increased in the process of the invention is the gene product with an activity as a “transcriptional regulator”, preferably it is the molecule of section (a) or (b) of this paragraph.

[31199] In particular, it was observed that in plants, especially in Arabidopsis thaliana, increasing or generating the activity of a gene product non-targeted with the activity of a “transcriptional regulator”, preferably being encoded by a gene comprising the nucleic acid sequence SEQ ID NO. 18070, preferably the coding region thereof, conferred the production of or the increase in threonine compared with the wild type control.

[31200] The nucleic acid sequence of At1g48040 from Arabidopsis thaliana, e.g. as shown in the respective line in column 5 of Table I, application no. 4, has been published in F. And the activity of the gene product thereof is the activity of protein phosphatase.

[31201] Accordingly, in one embodiment, the process of the present invention for producing threonine in a non-human organism, like a microorganism or a plant or a part thereof, comprises increasing or generating the activity of a gene product with the activity of a gene product conferring the activity of “protein phosphatase”, especially from Arabidopsis thaliana or its functional equivalent or its homolog, e.g. the increase of
[31202] (a) a gene product of a gene comprising the nucleic acid molecule as shown in the respective line in column 5 of Table I, application no. 4, preferably the coding region thereof, or a homolog or a fragment thereof, and being depicted in the same respective line as said At1g48040, or a functional equivalent or a homolog thereof as shown in column 8 of Table I, application no. 4, preferably the coding region thereof, particularly a homolog or functional equivalent as shown in column 8 of Table I B, application no. 4, and being depicted in the same respective line as said At1g48040, and preferably the activity is increased non-targeted, or
[31203] (b) a polypeptide comprising a polypeptide, a consensus sequence or at least a polypeptide motif as shown in the respective line in column 5 of Table II or in column 8 of Table IV, application no. 4, respectively, and being depicted in the same respective line as said At1g48040, or a functional equivalent or a homolog thereof as depicted in column 8 of Table II, application no. 4, preferably a homolog or functional equivalent as depicted in column 8 of Table II B, application no. 4, and being depicted in the same respective line as said At1g48040, and preferably the activity is increased non-targeted.

[31204] Accordingly, in one embodiment, the molecule which activity is to be increased in the process of the invention is the gene product with an activity as a “protein phosphatase”, preferably it is the molecule of section (a) or (b) of this paragraph.

[31205] In particular, it was observed that in plants, especially in Arabidopsis thaliana, increasing or generating the activity of a gene product non-targeted with the activity of a “protein phosphatase”, preferably being encoded by a gene comprising the nucleic acid sequence SEQ ID NO. 812, preferably the coding region thereof, conferred the production of or the increase in threonine compared with the wild type control.

[31206] The nucleic acid sequence of At1g48260 from Arabidopsis thaliana, e.g. as shown in the respective line in column 5 of Table I, application no. 4, has been published in F. And the activity of the gene product thereof is the activity of protein kinase.

[31207] Accordingly, in one embodiment, the process of the present invention for producing threonine in a non-human organism, like a microorganism or a plant or a part thereof, comprises increasing or generating the activity of a gene product with the activity of a gene product conferring the activity of “protein kinase”, especially from Arabidopsis thaliana or its functional equivalent or its homolog, e.g. the increase of
[31208] (a) a gene product of a gene comprising the nucleic acid molecule as shown in the respective line in column 5 of Table I, application no. 4, preferably the coding region thereof, or a homolog or a fragment thereof, and being depicted in the same respective line as said At1g48260, or a functional equivalent or a homolog thereof as shown in column 8 of Table I, application no. 4, preferably the coding region thereof, particularly a homolog or functional equivalent as shown in column 8 of Table I B, application no. 4, and being depicted in the same respective line as said At1g48260, and preferably the activity is increased non-targeted, or
[31209] (b) a polypeptide comprising a polypeptide, a consensus sequence or at least a polypeptide motif as shown in the respective line in column 5 of Table II or in column 8 of Table IV, application no. 4, respectively, and being depicted in the same respective line as said At1g48260, or a functional equivalent or a homolog thereof as depicted in column 8 of Table II, application no. 4, preferably a homolog or functional equivalent as depicted in column 8 of Table II B, application no. 4, and being depicted in the same respective line as said At1g48260, and preferably the activity is increased non-targeted.

[31210] Accordingly, in one embodiment, the molecule which activity is to be increased in the process of the invention is the gene product with an activity as a “protein kinase”, preferably it is the molecule of section (a) or (b) of this paragraph.

[31211] In particular, it was observed that in plants, especially in Arabidopsis thaliana, increasing or generating the activity of a gene product non-targeted with the activity of a “protein kinase”, preferably being encoded by a gene comprising the nucleic acid sequence SEQ ID NO. 18235, preferably the coding region thereof, conferred the production of or the increase in threonine compared with the wild type control.

[31212] The nucleic acid sequence of At1g72770 from Arabidopsis thaliana, e.g. as shown in the respective line in column 5 of Table I, application no. 4, has been published in F. And the activity of the gene product thereof is the activity of protein phosphatase.

[31213] Accordingly, in one embodiment, the process of the present invention for producing threonine in a non-human organism, like a microorganism or a plant or a part thereof, comprises increasing or generating the activity of a gene product with the activity of a gene product conferring the activity of “protein phosphatase”, especially from Arabidopsis thaliana or its functional equivalent or its homolog, e.g. the increase of
[31214] (a) a gene product of a gene comprising the nucleic acid molecule as shown in the respective line in column 5 of Table I, application no. 4, preferably the coding region thereof, or a homolog or a fragment thereof, and being depicted in the same respective line as said At1g72770, or a functional equivalent or a homolog thereof as shown in column 8 of Table I, application no. 4, preferably the coding region thereof, particularly a homolog or functional equivalent as shown in column 8 of Table I B, application no. 4, and being depicted in the same respective line as said At1g72770, and preferably the activity is increased non-targeted, or
[31215] (b) a polypeptide comprising a polypeptide, a consensus sequence or at least a polypeptide motif as shown in the respective line in column 5 of Table II or in column 8 of Table IV, application no. 4, respectively, and being depicted in the same respective line as said At1g72770, or a functional equivalent or a homolog thereof as depicted in column 8 of Table II, application no. 4, preferably a homolog or functional equivalent as depicted in column 8 of Table II B, application no. 4, and being depicted in the same respective line as said At1g72770, and preferably the activity is increased non-targeted.

[31216] Accordingly, in one embodiment, the molecule which activity is to be increased in the process of the invention is the gene product with an activity as a “protein phosphatase”, preferably it is the molecule of section (a) or (b) of this paragraph.

[31217] In particular, it was observed that in plants, especially in Arabidopsis thaliana, increasing or generating the activity of a gene product non-targeted with the activity of a “protein phosphatase”, preferably being encoded by a gene comprising the nucleic acid sequence SEQ ID NO. 19419, preferably the coding region thereof, conferred the production of or the increase in threonine compared with the wild type control.

[31218] The nucleic acid sequence of At2g25070 from Arabidopsis thaliana, e.g. as shown in the respective line in column 5 of Table I, application no. 4, has been published in F. And the activity of the gene product thereof is the activity of protein phosphatase.

[31219] Accordingly, in one embodiment, the process of the present invention for producing threonine in a non-human organism, like a microorganism or a plant or a part thereof, comprises increasing or generating the activity of a gene product with the activity of a gene product conferring the activity of “protein phosphatase”, especially from Arabidopsis thaliana or its functional equivalent or its homolog, e.g. the increase of
[31220] (a) a gene product of a gene comprising the nucleic acid molecule as shown in the respective line in column 5 of Table I, application no. 4, preferably the coding region thereof, or a homolog or a fragment thereof, and being depicted in the same respective line as said At2g25070, or a functional equivalent or a homolog thereof as shown in column 8 of Table I, application no. 4, preferably the coding region thereof, particularly a homolog or functional equivalent as shown in column 8 of Table I B, application no. 4, and being depicted in the same respective line as said At2g25070, and preferably the activity is increased non-targeted, or
[31221] (b) a polypeptide comprising a polypeptide, a consensus sequence or at least a polypeptide motif as shown in the respective line in column 5 of Table II or in column 8 of Table IV, application no. 4, respectively, and being depicted in the same respective line as said At2g25070, or a functional equivalent or a homolog thereof as depicted in column 8 of Table II, application no. 4, preferably a homolog or functional equivalent as depicted in column 8 of Table II B, application no. 4, and being depicted in the same respective line as said At2g25070, and preferably the activity is increased non-targeted.

[31222] Accordingly, in one embodiment, the molecule which activity is to be increased in the process of the invention is the gene product with an activity as a “protein phosphatase”, preferably it is the molecule of section (a) or (b) of this paragraph.

[31223] In particular, it was observed that in plants, especially in Arabidopsis thaliana, increasing or generating the activity of a gene product non-targeted with the activity of a “protein phosphatase”, preferably being encoded by a gene comprising the nucleic acid sequence SEQ ID NO. 1298, preferably the coding region thereof, conferred the production of or the increase in threonine compared with the wild type control.

[31224] The nucleic acid sequence of At2g30540 from Arabidopsis thaliana, e.g. as shown in the respective line in column 5 of Table I, application no. 4, has been published in F. And the activity of the gene product thereof is the activity of glutaredoxin.

[31225] Accordingly, in one embodiment, the process of the present invention for producing threonine in a non-human organism, like a microorganism or a plant or a part thereof, comprises increasing or generating the activity of a gene product with the activity of a gene product conferring the activity of “glutaredoxin”, especially from Arabidopsis thaliana or its functional equivalent or its homolog, e.g. the increase of
[31226] (a) a gene product of a gene comprising the nucleic acid molecule as shown in the respective line in column 5 of Table I, application no. 4, preferably the coding region thereof, or a homolog or a fragment thereof, and being depicted in the same respective line as said At2g30540, or a functional equivalent or a homolog thereof as shown in column 8 of Table I, application no. 4, preferably the coding region thereof, particularly a homolog or functional equivalent as shown in column 8 of Table I B, application no. 4, and being depicted in the same respective line as said At2g30540, and preferably the activity is increased non-targeted, or
[31227] (b) a polypeptide comprising a polypeptide, a consensus sequence or at least a polypeptide motif as shown in the respective line in column 5 of Table II or in column 8 of Table IV, application no. 4, respectively, and being depicted in the same respective line as said At2g30540, or a functional equivalent or a homolog thereof as depicted in column 8 of Table II, application no. 4, preferably a homolog or functional equivalent as depicted in column 8 of Table II B, application no. 4, and being depicted in the same respective line as said At2g30540, and preferably the activity is increased non-targeted.

[31228] Accordingly, in one embodiment, the molecule which activity is to be increased in the process of the invention is the gene product with an activity as a “glutaredoxin”, preferably it is the molecule of section (a) or (b) of this paragraph.

[31229] In particular, it was observed that in plants, especially in Arabidopsis thaliana, increasing or generating the activity of a gene product non-targeted with the activity of a “glutaredoxin”, preferably being encoded by a gene comprising the nucleic acid sequence SEQ ID NO. 20346, preferably the coding region thereof, conferred the production of or the increase in threonine compared with the wild type control.

[31230] The nucleic acid sequence of At3g20910 from Arabidopsis thaliana, e.g. as shown in the respective line in column 5 of Table I, application no. 4, has been published in F. And the activity of the gene product thereof is the activity of CCAAT-binding transcription factor.

[31231] Accordingly, in one embodiment, the process of the present invention for producing threonine in a non-human organism, like a microorganism or a plant or a part thereof, comprises increasing or generating the activity of a gene product with the activity of a gene product conferring the activity of “CCAAT-binding transcription factor”, especially from Arabidopsis thaliana or its functional equivalent or its homolog, e.g. the increase of
[31232] (a) a gene product of a gene comprising the nucleic acid molecule as shown in the respective line in column 5 of Table I, application no. 4, preferably the coding region thereof, or a homolog or a fragment thereof, and being depicted in the same respective line as said At3g20910, or a functional equivalent or a homolog thereof as shown in column 8 of Table I, application no. 4, preferably the coding region thereof, particularly a homolog or functional equivalent as shown in column 8 of Table I B, application no. 4, and being depicted in the same respective line as said At3g20910, and preferably the activity is increased non-targeted, or
[31233] (b) a polypeptide comprising a polypeptide, a consensus sequence or at least a polypeptide motif as shown in the respective line in column 5 of Table II or in column 8 of Table IV, application no. 4, respectively, and being depicted in the same respective line as said At3g20910, or a functional equivalent or a homolog thereof as depicted in column 8 of Table II, application no. 4, preferably a homolog or functional equivalent as depicted in column 8 of Table II B, application no. 4, and being depicted in the same respective line as said At3g20910, and preferably the activity is increased non-targeted.

[31234] Accordingly, in one embodiment, the molecule which activity is to be increased in the process of the invention is the gene product with an activity as a “CCAAT-binding transcription factor”, preferably it is the molecule of section (a) or (b) of this paragraph.

[31235] In particular, it was observed that in plants, especially in Arabidopsis thaliana, increasing or generating the activity of a gene product non-targeted with the activity of a “CCAAT-binding transcription factor”, preferably being encoded by a gene comprising the nucleic acid sequence SEQ ID NO. 22921, preferably the coding region thereof, conferred the production of or the increase in threonine compared with the wild type control.

[31236] The nucleic acid sequence of At3g23000 from Arabidopsis thaliana, e.g. as shown in the respective line in column 5 of Table I, application no. 4, has been published in F. And the activity of the gene product thereof is the activity of protein kinase.

[31237] Accordingly, in one embodiment, the process of the present invention for producing threonine in a non-human organism, like a microorganism or a plant or a part thereof, comprises increasing or generating the activity of a gene product with the activity of a gene product conferring the activity of “protein kinase”, especially from Arabidopsis thaliana or its functional equivalent or its homolog, e.g. the increase of
[31238] (a) a gene product of a gene comprising the nucleic acid molecule as shown in the respective line in column 5 of Table I, application no. 4, preferably the coding region thereof, or a homolog or a fragment thereof, and being depicted in the same respective line as said At3g23000, or a functional equivalent or a homolog thereof as shown in column 8 of Table I, application no. 4, preferably the coding region thereof, particularly a homolog or functional equivalent as shown in column 8 of Table I B, application no. 4, and being depicted in the same respective line as said At3g23000, and preferably the activity is increased non-targeted, or
[31239] (b) a polypeptide comprising a polypeptide, a consensus sequence or at least a polypeptide motif as shown in the respective line in column 5 of Table II or in column 8 of Table IV, application no. 4, respectively, and being depicted in the same respective line as said At3g23000, or a functional equivalent or a homolog thereof as depicted in column 8 of Table II, application no. 4, preferably a homolog or functional equivalent as depicted in column 8 of Table II B, application no. 4, and being depicted in the same respective line as said At3g23000, and preferably the activity is increased non-targeted.

[31240] Accordingly, in one embodiment, the molecule which activity is to be increased in the process of the invention is the gene product with an activity as a “protein kinase”, preferably it is the molecule of section (a) or (b) of this paragraph.

[31241] In particular, it was observed that in plants, especially in Arabidopsis thaliana, increasing or generating the activity of a gene product non-targeted with the activity of a “protein kinase”, preferably being encoded by a gene comprising the nucleic acid sequence SEQ ID NO. 1815, preferably the coding region thereof, conferred the production of or the increase in threonine compared with the wild type control.

[31242] The nucleic acid sequence of At3g27540 from Arabidopsis thaliana, e.g. as shown in the respective line in column 5 of Table I, application no. 4, has been published in F. And the activity of the gene product thereof is the activity of glycosyl transferase.

[31243] Accordingly, in one embodiment, the process of the present invention for producing threonine in a non-human organism, like a microorganism or a plant or a part thereof, comprises increasing or generating the activity of a gene product with the activity of a gene product conferring the activity of “glycosyl transferase”, especially from Arabidopsis thaliana or its functional equivalent or its homolog, e.g. the increase of
[31244] (a) a gene product of a gene comprising the nucleic acid molecule as shown in the respective line in column 5 of Table I, application no. 4, preferably the coding region thereof, or a homolog or a fragment thereof, and being depicted in the same respective line as said At3g27540, or a functional equivalent or a homolog thereof as shown in column 8 of Table I, application no. 4, preferably the coding region thereof, particularly a homolog or functional equivalent as shown in column 8 of Table I B, application no. 4, and being depicted in the same respective line as said At3g27540, and preferably the activity is increased non-targeted, or
[31245] (b) a polypeptide comprising a polypeptide, a consensus sequence or at least a polypeptide motif as shown in the respective line in column 5 of Table II or in column 8 of Table IV, application no. 4, respectively, and being depicted in the same respective line as said At3g27540, or a functional equivalent or a homolog thereof as depicted in column 8 of Table II, application no. 4, preferably a homolog or functional equivalent as depicted in column 8 of Table II B, application no. 4, and being depicted in the same respective line as said At3g27540, and preferably the activity is increased non-targeted.

[31246] Accordingly, in one embodiment, the molecule which activity is to be increased in the process of the invention is the gene product with an activity as a “glycosyl transferase”, preferably it is the molecule of section (a) or (b) of this paragraph.

[31247] In particular, it was observed that in plants, especially in Arabidopsis thaliana, increasing or generating the activity of a gene product non-targeted with the activity of a “glycosyl transferase”, preferably being encoded by a gene comprising the nucleic acid sequence SEQ ID NO. 68777, preferably the coding region thereof, conferred the production of or the increase in threonine compared with the wild type control.

[31248] The nucleic acid sequence of At3g62930 from Arabidopsis thaliana, e.g. as shown in the respective line in column 5 of Table I, application no. 4, has been published in F. And the activity of the gene product thereof is the activity of monthiol glutaredoxin.

[31249] Accordingly, in one embodiment, the process of the present invention for producing threonine in a non-human organism, like a microorganism or a plant or a part thereof, comprises increasing or generating the activity of a gene product with the activity of a gene product conferring the activity of “monthiol glutaredoxin”, especially from Arabidopsis thaliana or its functional equivalent or its homolog, e.g. the increase of
[31250] (a) a gene product of a gene comprising the nucleic acid molecule as shown in the respective line in column 5 of Table I, application no. 4, preferably the coding region thereof, or a homolog or a fragment thereof, and being depicted in the same respective line as said At3g62930, or a functional equivalent or a homolog thereof as shown in column 8 of Table I, application no. 4, preferably the coding region thereof, particularly a homolog or functional equivalent as shown in column 8 of Table I B, application no. 4, and being depicted in the same respective line as said At3g62930, and preferably the activity is increased non-targeted, or
[31251] (b) a polypeptide comprising a polypeptide, a consensus sequence or at least a polypeptide motif as shown in the respective line in column 5 of Table II or in column 8 of Table IV, application no. 4, respectively, and being depicted in the same respective line as said At3g62930, or a functional equivalent or a homolog thereof as depicted in column 8 of Table II, application no. 4, preferably a homolog or functional equivalent as depicted in column 8 of Table II B, application no. 4, and being depicted in the same respective line as said At3g62930, and preferably the activity is increased non-targeted.

[31252] Accordingly, in one embodiment, the molecule which activity is to be increased in the process of the invention is the gene product with an activity as a “monthiol glutaredoxin”, preferably it is the molecule of section (a) or (b) of this paragraph.

[31253] In particular, it was observed that in plants, especially in Arabidopsis thaliana, increasing or generating the activity of a gene product non-targeted with the activity of a “monthiol glutaredoxin”, preferably being encoded by a gene comprising the nucleic acid sequence SEQ ID NO. 2573, preferably the coding region thereof, conferred the production of or the increase in threonine compared with the wild type control.

[31254] The nucleic acid sequence of At3g62950 from Arabidopsis thaliana, e.g. as shown in the respective line in column 5 of Table I, application no. 4, has been published in F. And the activity of the gene product thereof is the activity of glutaredoxin.

[31255] Accordingly, in one embodiment, the process of the present invention for producing threonine in a non-human organism, like a microorganism or a plant or a part thereof, comprises increasing or generating the activity of a gene product with the activity of a gene product conferring the activity of “glutaredoxin”, especially from Arabidopsis thaliana or its functional equivalent or its homolog, e.g. the increase of
[31256] (a) a gene product of a gene comprising the nucleic acid molecule as shown in the respective line in column 5 of Table I, application no. 4, preferably the coding region thereof, or a homolog or a fragment thereof, and being depicted in the same respective line as said At3g62950, or a functional equivalent or a homolog thereof as shown in column 8 of Table I, application no. 4, preferably the coding region thereof, particularly a homolog or functional equivalent as shown in column 8 of Table I B, application no. 4, and being depicted in the same respective line as said At3g62950, and preferably the activity is increased non-targeted, or
[31257] (b) a polypeptide comprising a polypeptide, a consensus sequence or at least a polypeptide motif as shown in the respective line in column 5 of Table II or in column 8 of Table IV, application no. 4, respectively, and being depicted in the same respective line as said At3g62950, or a functional equivalent or a homolog thereof as depicted in column 8 of Table II, application no. 4, preferably a homolog or functional equivalent as depicted in column 8 of Table II B, application no. 4, and being depicted in the same respective line as said At3g62950, and preferably the activity is increased non-targeted.

[31258] Accordingly, in one embodiment, the molecule which activity is to be increased in the process of the invention is the gene product with an activity as a “glutaredoxin”, preferably it is the molecule of section (a) or (b) of this paragraph.

[31259] In particular, it was observed that in plants, especially in Arabidopsis thaliana, increasing or generating the activity of a gene product non-targeted with the activity of a “glutaredoxin”, preferably being encoded by a gene comprising the nucleic acid sequence SEQ ID NO. 2935, preferably the coding region thereof, conferred the production of or the increase in threonine compared with the wild type control.

[31260] The nucleic acid sequence of At4g15660 from Arabidopsis thaliana, e.g. as shown in the respective line in column 5 of Table I, application no. 4, has been published in F. And the activity of the gene product thereof is the activity of monothiol glutaredoxin.

[31261] Accordingly, in one embodiment, the process of the present invention for producing threonine in a non-human organism, like a microorganism or a plant or a part thereof, comprises increasing or generating the activity of a gene product with the activity of a gene product conferring the activity of “monothiol glutaredoxin”, especially from Arabidopsis thaliana or its functional equivalent or its homolog, e.g. the increase of
[31262] (a) a gene product of a gene comprising the nucleic acid molecule as shown in the respective line in column 5 of Table I, application no. 4, preferably the coding region thereof, or a homolog or a fragment thereof, and being depicted in the same respective line as said At4g15660, or a functional equivalent or a homolog thereof as shown in column 8 of Table I, application no. 4, preferably the coding region thereof, particularly a homolog or functional equivalent as shown in column 8 of Table I B, application no. 4, and being depicted in the same respective line as said At4g15660, and preferably the activity is increased non-targeted, or
[31263] (b) a polypeptide comprising a polypeptide, a consensus sequence or at least a polypeptide motif as shown in the respective line in column 5 of Table II or in column 8 of Table IV, application no. 4, respectively, and being depicted in the same respective line as said At4g15660, or a functional equivalent or a homolog thereof as depicted in column 8 of Table II, application no. 4, preferably a homolog or functional equivalent as depicted in column 8 of Table II B, application no. 4, and being depicted in the same respective line as said At4g15660, and preferably the activity is increased non-targeted.

[31264] Accordingly, in one embodiment, the molecule which activity is to be increased in the process of the invention is the gene product with an activity as a “monothiol glutaredoxin”, preferably it is the molecule of section (a) or (b) of this paragraph.

[31265] In particular, it was observed that in plants, especially in Arabidopsis thaliana, increasing or generating the activity of a gene product non-targeted with the activity of a “monothiol glutaredoxin”, preferably being encoded by a gene comprising the nucleic acid sequence SEQ ID NO. 23482, preferably the coding region thereof, conferred the production of or the increase in threonine compared with the wild type control.

[31266] The nucleic acid sequence of At4g15670 from Arabidopsis thaliana, e.g. as shown in the respective line in column 5 of Table I, application no. 4, has been published in F. And the activity of the gene product thereof is the activity of monothiol glutaredoxin.

[31267] Accordingly, in one embodiment, the process of the present invention for producing threonine in a non-human organism, like a microorganism or a plant or a part thereof, comprises increasing or generating the activity of a gene product with the activity of a gene product conferring the activity of “monothiol glutaredoxin”, especially from Arabidopsis thaliana or its functional equivalent or its homolog, e.g. the increase of
[31268] (a) a gene product of a gene comprising the nucleic acid molecule as shown in the respective line in column 5 of Table I, application no. 4, preferably the coding region thereof, or a homolog or a fragment thereof, and being depicted in the same respective line as said At4g15670, or a functional equivalent or a homolog thereof as shown in column 8 of Table I, application no. 4, preferably the coding region thereof, particularly a homolog or functional equivalent as shown in column 8 of Table I B, application no. 4, and being depicted in the same respective line as said At4g15670, and preferably the activity is increased non-targeted, or
[31269] (b) a polypeptide comprising a polypeptide, a consensus sequence or at least a polypeptide motif as shown in the respective line in column 5 of Table II or in column 8 of Table IV, application no. 4, respectively, and being depicted in the same respective line as said At4g15670, or a functional equivalent or a homolog thereof as depicted in column 8 of Table II, application no. 4, preferably a homolog or functional equivalent as depicted in column 8 of Table II B, application no. 4, and being depicted in the same respective line as said At4g15670, and preferably the activity is increased non-targeted.

[31270] Accordingly, in one embodiment, the molecule which activity is to be increased in the process of the invention is the gene product with an activity as a “monothiol glutaredoxin”, preferably it is the molecule of section (a) or (b) of this paragraph.

[31271] In particular, it was observed that in plants, especially in Arabidopsis thaliana, increasing or generating the activity of a gene product non-targeted with the activity of a “monothiol glutaredoxin”, preferably being encoded by a gene comprising the nucleic acid sequence SEQ ID NO. 3279, preferably the coding region thereof, conferred the production of or the increase in threonine compared with the wild type control.

[31272] The nucleic acid sequence of At4g15690 from Arabidopsis thaliana, e.g. as shown in the respective line in column 5 of Table I, application no. 4, has been published in F. And the activity of the gene product thereof is the activity of monothiol glutaredoxin.

[31273] Accordingly, in one embodiment, the process of the present invention for producing threonine in a non-human organism, like a microorganism or a plant or a part thereof, comprises increasing or generating the activity of a gene product with the activity of a gene product conferring the activity of “monothiol glutaredoxin”, especially from Arabidopsis thaliana or its functional equivalent or its homolog, e.g. the increase of
[31274] (a) a gene product of a gene comprising the nucleic acid molecule as shown in the respective line in column 5 of Table I, application no. 4, preferably the coding region thereof, or a homolog or a fragment thereof, and being depicted in the same respective line as said At4g15690, or a functional equivalent or a homolog thereof as shown in column 8 of Table I, application no. 4, preferably the coding region thereof, particularly a homolog or functional equivalent as shown in column 8 of Table I B, application no. 4, and being depicted in the same respective line as said At4g15690, and preferably the activity is increased non-targeted, or
[31275] (b) a polypeptide comprising a polypeptide, a consensus sequence or at least a polypeptide motif as shown in the respective line in column 5 of Table II or in column 8 of Table IV, application no. 4, respectively, and being depicted in the same respective line as said At4g15690, or a functional equivalent or a homolog thereof as depicted in column 8 of Table II, application no. 4, preferably a homolog or functional equivalent as depicted in column 8 of Table II B, application no. 4, and being depicted in the same respective line as said At4g15690, and preferably the activity is increased non-targeted.

[31276] Accordingly, in one embodiment, the molecule which activity is to be increased in the process of the invention is the gene product with an activity as a “monothiol glutaredoxin”, preferably it is the molecule of section (a) or (b) of this paragraph.

[31277] In particular, it was observed that in plants, especially in Arabidopsis thaliana, increasing or generating the activity of a gene product non-targeted with the activity of a “monothiol glutaredoxin”, preferably being encoded by a gene comprising the nucleic acid sequence SEQ ID NO. 23844, preferably the coding region thereof, conferred the production of or the increase in threonine compared with the wild type control.

[31278] The nucleic acid sequence of At4g18880 from Arabidopsis thaliana, e.g. as shown in the respective line in column 5 of Table I, application no. 4, has been published in F. And the activity of the gene product thereof is the activity of heat shock transcription factor.

[31279] Accordingly, in one embodiment, the process of the present invention for producing threonine in a non-human organism, like a microorganism or a plant or a part thereof, comprises increasing or generating the activity of a gene product with the activity of a gene product conferring the activity of “heat shock transcription factor”, especially from Arabidopsis thaliana or its functional equivalent or its homolog, e.g. the increase of
[31280] (a) a gene product of a gene comprising the nucleic acid molecule as shown in the respective line in column 5 of Table I, application no. 4, preferably the coding region thereof, or a homolog or a fragment thereof, and being depicted in the same respective line as said At4g18880, or a functional equivalent or a homolog thereof as shown in column 8 of Table I, application no. 4, preferably the coding region thereof, particularly a homolog or functional equivalent as shown in column 8 of Table I B, application no. 4, and being depicted in the same respective line as said At4g18880, and preferably the activity is increased non-targeted, or
[31281] (b) a polypeptide comprising a polypeptide, a consensus sequence or at least a polypeptide motif as shown in the respective line in column 5 of Table II or in column 8 of Table IV, application no. 4, respectively, and being depicted in the same respective line as said At4g18880, or a functional equivalent or a homolog thereof as depicted in column 8 of Table II, application no. 4, preferably a homolog or functional equivalent as depicted in column 8 of Table II B, application no. 4, and being depicted in the same respective line as said At4g18880, and preferably the activity is increased non-targeted.

[31282] Accordingly, in one embodiment, the molecule which activity is to be increased in the process of the invention is the gene product with an activity as a “heat shock transcription factor”, preferably it is the molecule of section (a) or (b) of this paragraph.

[31283] In particular, it was observed that in plants, especially in Arabidopsis thaliana, increasing or generating the activity of a gene product non-targeted with the activity of a “heat shock transcription factor”, preferably being encoded by a gene comprising the nucleic acid sequence SEQ ID NO. 24232, preferably the coding region thereof, conferred the production of or the increase in threonine compared with the wild type control.

[31284] The nucleic acid sequence of At4g32480 from Arabidopsis thaliana, e.g. as shown in the respective line in column 5 of Table I, application no. 4, has been published in F. And the activity of the gene product thereof is the activity of At4g32480-protein.

[31285] Accordingly, in one embodiment, the process of the present invention for producing threonine in a non-human organism, like a microorganism or a plant or a part thereof, comprises increasing or generating the activity of a gene product with the activity of a gene product conferring the activity of “At4g32480-protein”, especially from Arabidopsis thaliana or its functional equivalent or its homolog, e.g. the increase of
[31286] (a) a gene product of a gene comprising the nucleic acid molecule as shown in the respective line in column 5 of Table I, application no. 4, preferably the coding region thereof, or a homolog or a fragment thereof, and being depicted in the same respective line as said At4g32480, or a functional equivalent or a homolog thereof as shown in column 8 of Table I, application no. 4, preferably the coding region thereof, particularly a homolog or functional equivalent as shown in column 8 of Table I B, application no. 4, and being depicted in the same respective line as said At4g32480, and preferably the activity is increased non-targeted, or
[31287] (b) a polypeptide comprising a polypeptide, a consensus sequence or at least a polypeptide motif as shown in the respective line in column 5 of Table II or in column 8 of Table IV, application no. 4, respectively, and being depicted in the same respective line as said At4g32480, or a functional equivalent or a homolog thereof as depicted in column 8 of Table II, application no. 4, preferably a homolog or functional equivalent as depicted in column 8 of Table II B, application no. 4, and being depicted in the same respective line as said At4g32480, and preferably the activity is increased non-targeted.

[31288] Accordingly, in one embodiment, the molecule which activity is to be increased in the process of the invention is the gene product with an activity as a “At4g32480-protein”, preferably it is the molecule of section (a) or (b) of this paragraph.

[31289] In particular, it was observed that in plants, especially in Arabidopsis thaliana, increasing or generating the activity of a gene product non-targeted with the activity of a “At4g32480-protein”, preferably being encoded by a gene comprising the nucleic acid sequence SEQ ID NO. 4040, preferably the coding region thereof, conferred the production of or the increase in threonine compared with the wild type control.

[31290] The nucleic acid sequence of At4g34160 from Arabidopsis thaliana, e.g. as shown in the respective line in column 5 of Table I, application no. 4, has been published in F. And the activity of the gene product thereof is the activity of cyclin D .

[31291] Accordingly, in one embodiment, the process of the present invention for producing threonine in a non-human organism, like a microorganism or a plant or a part thereof, comprises increasing or generating the activity of a gene product with the activity of a gene product conferring the activity of “cyclin D”, especially from Arabidopsis thaliana or its functional equivalent or its homolog, e.g. the increase of
[31292] (a) a gene product of a gene comprising the nucleic acid molecule as shown in the respective line in column 5 of Table I, application no. 4, preferably the coding region thereof, or a homolog or a fragment thereof, and being depicted in the same respective line as said At4g34160, or a functional equivalent or a homolog thereof as shown in column 8 of Table I, application no. 4, preferably the coding region thereof, particularly a homolog or functional equivalent as shown in column 8 of Table I B, application no. 4, and being depicted in the same respective line as said At4g34160, and preferably the activity is increased non-targeted, or
[31293] (b) a polypeptide comprising a polypeptide, a consensus sequence or at least a polypeptide motif as shown in the respective line in column 5 of Table II or in column 8 of Table IV, application no. 4, respectively, and being depicted in the same respective line as said At4g34160, or a functional equivalent or a homolog thereof as depicted in column 8 of Table II, application no. 4, preferably a homolog or functional equivalent as depicted in column 8 of Table II B, application no. 4, and being depicted in the same respective line as said At4g34160, and preferably the activity is increased non-targeted.

[31294] Accordingly, in one embodiment, the molecule which activity is to be increased in the process of the invention is the gene product with an activity as a “cyclin D”, preferably it is the molecule of section (a) or (b) of this paragraph.

[31295] In particular, it was observed that in plants, especially in Arabidopsis thaliana, increasing or generating the activity of a gene product non-targeted with the activity of a “cyclin D”, preferably being encoded by a gene comprising the nucleic acid sequence SEQ ID NO. 24311, preferably the coding region thereof, conferred the production of or the increase in threonine compared with the wild type control.

[31296] The nucleic acid sequence of At4g35310 from Arabidopsis thaliana, e.g. as shown in the respective line in column 5 of Table I, application no. 4, has been published in F. And the activity of the gene product thereof is the activity of calcium-dependent protein kinase.

[31297] Accordingly, in one embodiment, the process of the present invention for producing threonine in a non-human organism, like a microorganism or a plant or a part thereof, comprises increasing or generating the activity of a gene product with the activity of a gene product conferring the activity of “calcium-dependent protein kinase”, especially from Arabidopsis thaliana or its functional equivalent or its homolog, e.g. the increase of
[31298] (a) a gene product of a gene comprising the nucleic acid molecule as shown in the respective line in column 5 of Table I, application no. 4, preferably the coding region thereof, or a homolog or a fragment thereof, and being depicted in the same respective line as said At4g35310, or a functional equivalent or a homolog thereof as shown in column 8 of Table I, application no. 4, preferably the coding region thereof, particularly a homolog or functional equivalent as shown in column 8 of Table I B, application no. 4, and being depicted in the same respective line as said At4g35310, and preferably the activity is increased non-targeted, or
[31299] (b) a polypeptide comprising a polypeptide, a consensus sequence or at least a polypeptide motif as shown in the respective line in column 5 of Table II or in column 8 of Table IV, application no. 4, respectively, and being depicted in the same respective line as said At4g35310, or a functional equivalent or a homolog thereof as depicted in column 8 of Table II, application no. 4, preferably a homolog or functional equivalent as depicted in column 8 of Table II B, application no. 4, and being depicted in the same respective line as said At4g35310, and preferably the activity is increased non-targeted.

[31300] Accordingly, in one embodiment, the molecule which activity is to be increased in the process of the invention is the gene product with an activity as a “calcium-dependent protein kinase”, preferably it is the molecule of section (a) or (b) of this paragraph.

[31301] In particular, it was observed that in plants, especially in Arabidopsis thaliana, increasing or generating the activity of a gene product non-targeted with the activity of a “calcium-dependent protein kinase”, preferably being encoded by a gene comprising the nucleic acid sequence SEQ ID NO. 4348, preferably the coding region thereof, conferred the production of or the increase in threonine compared with the wild type control.

[31302] The nucleic acid sequence of At5g07200 from Arabidopsis thaliana, e.g. as shown in the respective line in column 5 of Table I, application no. 4, has been published in F. And the activity of the gene product thereof is the activity of gibberellin 20-oxidase.

[31303] Accordingly, in one embodiment, the process of the present invention for producing threonine in a non-human organism, like a microorganism or a plant or a part thereof, comprises increasing or generating the activity of a gene product with the activity of a gene product conferring the activity of “gibberellin 20-oxidase”, especially from Arabidopsis thaliana or its functional equivalent or its homolog, e.g. the increase of
[31304] (a) a gene product of a gene comprising the nucleic acid molecule as shown in the respective line in column 5 of Table I, application no. 4, preferably the coding region thereof, or a homolog or a fragment thereof, and being depicted in the same respective line as said At5g07200, or a functional equivalent or a homolog thereof as shown in column 8 of Table I, application no. 4, preferably the coding region thereof, particularly a homolog or functional equivalent as shown in column 8 of Table I B, application no. 4, and being depicted in the same respective line as said At5g07200, and preferably the activity is increased non-targeted, or
[31305] (b) a polypeptide comprising a polypeptide, a consensus sequence or at least a polypeptide motif as shown in the respective line in column 5 of Table II or in column 8 of Table IV, application no. 4, respectively, and being depicted in the same respective line as said At5g07200, or a functional equivalent or a homolog thereof as depicted in column 8 of Table II, application no. 4, preferably a homolog or functional equivalent as depicted in column 8 of Table II B, application no. 4, and being depicted in the same respective line as said At5g07200, and preferably the activity is increased non-targeted.

[31306] Accordingly, in one embodiment, the molecule which activity is to be increased in the process of the invention is the gene product with an activity as a “gibberellin 20-oxidase”, preferably it is the molecule of section (a) or (b) of this paragraph.

[31307] In particular, it was observed that in plants, especially in Arabidopsis thaliana, increasing or generating the activity of a gene product non-targeted with the activity of a “gibberellin 20-oxidase”, preferably being encoded by a gene comprising the nucleic acid sequence SEQ ID NO. 24492, preferably the coding region thereof, conferred the production of or the increase in threonine compared with the wild type control.

[31308] The nucleic acid sequence of At5g13280 from Arabidopsis thaliana, e.g. as shown in the respective line in column 5 of Table I, application no. 4, has been published in F. And the activity of the gene product thereof is the activity of aspartate kinase.

[31309] Accordingly, in one embodiment, the process of the present invention for producing threonine in a non-human organism, like a microorganism or a plant or a part thereof, comprises increasing or generating the activity of a gene product with the activity of a gene product conferring the activity of “aspartate kinase”, especially from Arabidopsis thaliana or its functional equivalent or its homolog, e.g. the increase of
[31310] (a) a gene product of a gene comprising the nucleic acid molecule as shown in the respective line in column 5 of Table I, application no. 4, preferably the coding region thereof, or a homolog or a fragment thereof, and being depicted in the same respective line as said At5g13280, or a functional equivalent or a homolog thereof as shown in column 8 of Table I, application no. 4, preferably the coding region thereof, particularly a homolog or functional equivalent as shown in column 8 of Table I B, application no. 4, and being depicted in the same respective line as said At5g13280, and preferably the activity is increased non-targeted, or
[31311] (b) a polypeptide comprising a polypeptide, a consensus sequence or at least a polypeptide motif as shown in the respective line in column 5 of Table II or in column 8 of Table IV, application no. 4, respectively, and being depicted in the same respective line as said At5g13280, or a functional equivalent or a homolog thereof as depicted in column 8 of Table II, application no. 4, preferably a homolog or functional equivalent as depicted in column 8 of Table II B, application no. 4, and being depicted in the same respective line as said At5g13280, and preferably the activity is increased non-targeted.

[31312] Accordingly, in one embodiment, the molecule which activity is to be increased in the process of the invention is the gene product with an activity as a “aspartate kinase”, preferably it is the molecule of section (a) or (b) of this paragraph.

[31313] In particular, it was observed that in plants, especially in Arabidopsis thaliana, increasing or generating the activity of a gene product non-targeted with the activity of a “aspartate kinase”, preferably being encoded by a gene comprising the nucleic acid sequence SEQ ID NO. 93451, preferably the coding region thereof, conferred the production of or the increase in threonine compared with the wild type control.

[31314] The nucleic acid sequence of At5g16650 from Arabidopsis thaliana, e.g. as shown in the respective line in column 5 of Table I, application no. 4, has been published in F. And the activity of the gene product thereof is the activity of At5g16650-protein.

[31315] Accordingly, in one embodiment, the process of the present invention for producing threonine in a non-human organism, like a microorganism or a plant or a part thereof, comprises increasing or generating the activity of a gene product with the activity of a gene product conferring the activity of “At5g16650-protein”, especially from Arabidopsis thaliana or its functional equivalent or its homolog, e.g. the increase of
[31316] (a) a gene product of a gene comprising the nucleic acid molecule as shown in the respective line in column 5 of Table I, application no. 4, preferably the coding region thereof, or a homolog or a fragment thereof, and being depicted in the same respective line as said At5g16650, or a functional equivalent or a homolog thereof as shown in column 8 of Table I, application no. 4, preferably the coding region thereof, particularly a homolog or functional equivalent as shown in column 8 of Table I B, application no. 4, and being depicted in the same respective line as said At5g16650, and preferably the activity is increased non-targeted, or
[31317] (b) a polypeptide comprising a polypeptide, a consensus sequence or at least a polypeptide motif as shown in the respective line in column 5 of Table II or in column 8 of Table IV, application no. 4, respectively, and being depicted in the same respective line as said At5g16650, or a functional equivalent or a homolog thereof as depicted in column 8 of Table II, application no. 4, preferably a homolog or functional equivalent as depicted in column 8 of Table II B, application no. 4, and being depicted in the same respective line as said At5g16650, and preferably the activity is increased non-targeted.

[31318] Accordingly, in one embodiment, the molecule which activity is to be increased in the process of the invention is the gene product with an activity as a “At5g16650-protein”, preferably it is the molecule of section (a) or (b) of this paragraph.

[31319] In particular, it was observed that in plants, especially in Arabidopsis thaliana, increasing or generating the activity of a gene product non-targeted with the activity of a “At5g16650-protein”, preferably being encoded by a gene comprising the nucleic acid sequence SEQ ID NO. 25283, preferably the coding region thereof, conferred the production of or the increase in threonine compared with the wild type control.

[31320] The nucleic acid sequence of At5g39950 from Arabidopsis thaliana, e.g. as shown in the respective line in column 5 of Table I, application no. 4, has been published in F. And the activity of the gene product thereof is the activity of thioredoxin.

[31321] Accordingly, in one embodiment, the process of the present invention for producing threonine in a non-human organism, like a microorganism or a plant or a part thereof, comprises increasing or generating the activity of a gene product with the activity of a gene product conferring the activity of “thioredoxin”, especially from Arabidopsis thaliana or its functional equivalent or its homolog, e.g. the increase of
[31322] (a) a gene product of a gene comprising the nucleic acid molecule as shown in the respective line in column 5 of Table I, application no. 4, preferably the coding region thereof, or a homolog or a fragment thereof, and being depicted in the same respective line as said At5g39950, or a functional equivalent or a homolog thereof as shown in column 8 of Table I, application no. 4, preferably the coding region thereof, particularly a homolog or functional equivalent as shown in column 8 of Table I B, application no. 4, and being depicted in the same respective line as said At5g39950, and preferably the activity is increased non-targeted, or
[31323] (b) a polypeptide comprising a polypeptide, a consensus sequence or at least a polypeptide motif as shown in the respective line in column 5 of Table II or in column 8 of Table IV, application no. 4, respectively, and being depicted in the same respective line as said At5g39950, or a functional equivalent or a homolog thereof as depicted in column 8 of Table II, application no. 4, preferably a homolog or functional equivalent as depicted in column 8 of Table II B, application no. 4, and being depicted in the same respective line as said At5g39950, and preferably the activity is increased non-targeted.

[31324] Accordingly, in one embodiment, the molecule which activity is to be increased in the process of the invention is the gene product with an activity as a “thioredoxin”, preferably it is the molecule of section (a) or (b) of this paragraph.

[31325] In particular, it was observed that in plants, especially in Arabidopsis thaliana, increasing or generating the activity of a gene product non-targeted with the activity of a “thioredoxin”, preferably being encoded by a gene comprising the nucleic acid sequence SEQ ID NO. 69574, preferably the coding region thereof, conferred the production of or the increase in threonine compared with the wild type control.

[31326] The nucleic acid sequence of At5g57050 from Arabidopsis thaliana, e.g. as shown in the respective line in column 5 of Table I, application no. 4, has been published in F. And the activity of the gene product thereof is the activity of protein phosphatase.

[31327] Accordingly, in one embodiment, the process of the present invention for producing threonine in a non-human organism, like a microorganism or a plant or a part thereof, comprises increasing or generating the activity of a gene product with the activity of a gene product conferring the activity of “protein phosphatase”, especially from Arabidopsis thaliana or its functional equivalent or its homolog, e.g. the increase of
[31328] (a) a gene product of a gene comprising the nucleic acid molecule as shown in the respective line in column 5 of Table I, application no. 4, preferably the coding region thereof, or a homolog or a fragment thereof, and being depicted in the same respective line as said At5g57050, or a functional equivalent or a homolog thereof as shown in column 8 of Table I, application no. 4, preferably the coding region thereof, particularly a homolog or functional equivalent as shown in column 8 of Table I B, application no. 4, and being depicted in the same respective line as said At5g57050, and preferably the activity is increased non-targeted, or
[31329] (b) a polypeptide comprising a polypeptide, a consensus sequence or at least a polypeptide motif as shown in the respective line in column 5 of Table II or in column 8 of Table IV, application no. 4, respectively, and being depicted in the same respective line as said At5g57050, or a functional equivalent or a homolog thereof as depicted in column 8 of Table II, application no. 4, preferably a homolog or functional equivalent as depicted in column 8 of Table II B, application no. 4, and being depicted in the same respective line as said At5g57050, and preferably the activity is increased non-targeted.

[31330] Accordingly, in one embodiment, the molecule which activity is to be increased in the process of the invention is the gene product with an activity as a “protein phosphatase”, preferably it is the molecule of section (a) or (b) of this paragraph.

[31331] In particular, it was observed that in plants, especially in Arabidopsis thaliana, increasing or generating the activity of a gene product non-targeted with the activity of a “protein phosphatase”, preferably being encoded by a gene comprising the nucleic acid sequence SEQ ID NO. 5318, preferably the coding region thereof, conferred the production of or the increase in threonine compared with the wild type control.

[31332] The nucleic acid sequence of At5g64920 from Arabidopsis thaliana, e.g. as shown in the respective line in column 5 of Table I, application no. 4, has been published in F. And the activity of the gene product thereof is the activity of zinc finger protein.

[31333] Accordingly, in one embodiment, the process of the present invention for producing threonine in a non-human organism, like a microorganism or a plant or a part thereof, comprises increasing or generating the activity of a gene product with the activity of a gene product conferring the activity of “zinc finger protein”, especially from Arabidopsis thaliana or its functional equivalent or its homolog, e.g. the increase of
[31334] (a) a gene product of a gene comprising the nucleic acid molecule as shown in the respective line in column 5 of Table I, application no. 4, preferably the coding region thereof, or a homolog or a fragment thereof, and being depicted in the same respective line as said At5g64920, or a functional equivalent or a homolog thereof as shown in column 8 of Table I, application no. 4, preferably the coding region thereof, particularly a homolog or functional equivalent as shown in column 8 of Table I B, application no. 4, and being depicted in the same respective line as said At5g64920, and preferably the activity is increased non-targeted, or
[31335] (b) a polypeptide comprising a polypeptide, a consensus sequence or at least a polypeptide motif as shown in the respective line in column 5 of Table II or in column 8 of Table IV, application no. 4, respectively, and being depicted in the same respective line as said At5g64920, or a functional equivalent or a homolog thereof as depicted in column 8 of Table II, application no. 4, preferably a homolog or functional equivalent as depicted in column 8 of Table II B, application no. 4, and being depicted in the same respective line as said At5g64920, and preferably the activity is increased non-targeted.

[31336] Accordingly, in one embodiment, the molecule which activity is to be increased in the process of the invention is the gene product with an activity as a “zinc finger protein”, preferably it is the molecule of section (a) or (b) of this paragraph.

[31337] In particular, it was observed that in plants, especially in Arabidopsis thaliana, increasing or generating the activity of a gene product non-targeted with the activity of a “zinc finger protein”, preferably being encoded by a gene comprising the nucleic acid sequence SEQ ID NO. 5493, preferably the coding region thereof, conferred the production of or the increase in threonine compared with the wild type control.

[31338] The nucleic acid sequence of AvinDRAFT_{—}0035 from Azotobacter vinelandii, e.g. as shown in the respective line in column 5 of Table I, application no. 4, has been published in F. And the activity of the gene product thereof is the activity of CDP-diacylglycerol-serine O-phosphatidyltransferase.

[31339] Accordingly, in one embodiment, the process of the present invention for producing threonine in a non-human organism, like a microorganism or a plant or a part thereof, comprises increasing or generating the activity of a gene product with the activity of a gene product conferring the activity of “CDP-diacylglycerol-serine O-phosphatidyltransferase”, especially from Azotobacter vinelandii or its functional equivalent or its homolog, e.g. the increase of
[31340] (a) a gene product of a gene comprising the nucleic acid molecule as shown in the respective line in column 5 of Table I, application no. 4, preferably the coding region thereof, or a homolog or a fragment thereof, and being depicted in the same respective line as said AvinDRAFT_{—}0035, or a functional equivalent or a homolog thereof as shown in column 8 of Table I, application no. 4, preferably the coding region thereof, particularly a homolog or functional equivalent as shown in column 8 of Table I B, application no. 4, and being depicted in the same respective line as said AvinDRAFT_{—}0035, and preferably the activity is increased non-targeted, or
[31341] (b) a polypeptide comprising a polypeptide, a consensus sequence or at least a polypeptide motif as shown in the respective line in column 5 of Table II or in column 8 of Table IV, application no. 4, respectively, and being depicted in the same respective line as said AvinDRAFT_{—}0035, or a functional equivalent or a homolog thereof as depicted in column 8 of Table II, application no. 4, preferably a homolog or functional equivalent as depicted in column 8 of Table II B, application no. 4, and being depicted in the same respective line as said AvinDRAFT_{—}0035, and preferably the activity is increased non-targeted.

[31342] Accordingly, in one embodiment, the molecule which activity is to be increased in the process of the invention is the gene product with an activity as a “CDP-diacylglycerol-serine O-phosphatidyltransferase”, preferably it is the molecule of section (a) or (b) of this paragraph.

[31343] In particular, it was observed that in plants, especially in Arabidopsis thaliana, increasing or generating the activity of a gene product non-targeted with the activity of a “CDP-diacylglycerolserine O-phosphatidyltransferase”, preferably being encoded by a gene comprising the nucleic acid sequence SEQ ID NO. 70583, preferably the coding region thereof, conferred the production of or the increase in threonine compared with the wild type control.

[31344] The nucleic acid sequence of AvinDRAFT_{—}1495 from Azotobacter vinelandii, e.g. as shown in the respective line in column 5 of Table I, application no. 4, has been published in F. And the activity of the gene product thereof is the activity of malic enzyme.

[31345] Accordingly, in one embodiment, the process of the present invention for producing threonine in a non-human organism, like a microorganism or a plant or a part thereof, comprises increasing or generating the activity of a gene product with the activity of a gene product conferring the activity of “malic enzyme”, especially from Azotobacter vinelandii or its functional equivalent or its homolog, e.g. the increase of
[31346] (a) a gene product of a gene comprising the nucleic acid molecule as shown in the respective line in column 5 of Table I, application no. 4, preferably the coding region thereof, or a homolog or a fragment thereof, and being depicted in the same respective line as said AvinDRAFT_{—}1495, or a functional equivalent or a homolog thereof as shown in column 8 of Table I, application no. 4, preferably the coding region thereof, particularly a homolog or functional equivalent as shown in column 8 of Table I B, application no. 4, and being depicted in the same respective line as said AvinDRAFT_{—}1495, and preferably the activity is increased non-targeted, or
[31347] (b) a polypeptide comprising a polypeptide, a consensus sequence or at least a polypeptide motif as shown in the respective line in column 5 of Table II or in column 8 of Table IV, application no. 4, respectively, and being depicted in the same respective line as said AvinDRAFT_{—}1495, or a functional equivalent or a homolog thereof as depicted in column 8 of Table II, application no. 4, preferably a homolog or functional equivalent as depicted in column 8 of Table II B, application no. 4, and being depicted in the same respective line as said AvinDRAFT_{—}1495, and preferably the activity is increased non-targeted.

[31348] Accordingly, in one embodiment, the molecule which activity is to be increased in the process of the invention is the gene product with an activity as a “malic enzyme”, preferably it is the molecule of section (a) or (b) of this paragraph.

[31349] In particular, it was observed that in plants, especially in Arabidopsis thaliana, increasing or generating the activity of a gene product non-targeted with the activity of a “malic enzyme”, preferably being encoded by a gene comprising the nucleic acid sequence SEQ ID NO. 5557, preferably the coding region thereof, conferred the production of or the increase in threonine compared with the wild type control.

[31350] The nucleic acid sequence of AvinDRAFT_{—}1624 from Azotobacter vinelandii, e.g. as shown in the respective line in column 5 of Table I, application no. 4, has been published in F. And the activity of the gene product thereof is the activity of sec-independent protein translocase.

[31351] Accordingly, in one embodiment, the process of the present invention for producing threonine in a non-human organism, like a microorganism or a plant or a part thereof, comprises increasing or generating the activity of a gene product with the activity of a gene product conferring the activity of “sec-independent protein translocase”, especially from Azotobacter vinelandii or its functional equivalent or its homolog, e.g. the increase of
[31352] (a) a gene product of a gene comprising the nucleic acid molecule as shown in the respective line in column 5 of Table I, application no. 4, preferably the coding region thereof, or a homolog or a fragment thereof, and being depicted in the same respective line as said AvinDRAFT_{—}1624, or a functional equivalent or a homolog thereof as shown in column 8 of Table I, application no. 4, preferably the coding region thereof, particularly a homolog or functional equivalent as shown in column 8 of Table I B, application no. 4, and being depicted in the same respective line as said AvinDRAFT_{—}1624, and preferably the activity is increased non-targeted, or
[31353] (b) a polypeptide comprising a polypeptide, a consensus sequence or at least a polypeptide motif as shown in the respective line in column 5 of Table II or in column 8 of Table IV, application no. 4, respectively, and being depicted in the same respective line as said AvinDRAFT_{—}1624, or a functional equivalent or a homolog thereof as depicted in column 8 of Table II, application no. 4, preferably a homolog or functional equivalent as depicted in column 8 of Table II B, application no. 4, and being depicted in the same respective line as said AvinDRAFT_{—}1624, and preferably the activity is increased non-targeted.

[31354] Accordingly, in one embodiment, the molecule which activity is to be increased in the process of the invention is the gene product with an activity as a “sec-independent protein translocase”, preferably it is the molecule of section (a) or (b) of this paragraph.

[31355] In particular, it was observed that in plants, especially in Arabidopsis thaliana, increasing or generating the activity of a gene product non-targeted with the activity of a “sec-independent protein translocase”, preferably being encoded by a gene comprising the nucleic acid sequence SEQ ID NO. 26196, preferably the coding region thereof, conferred the production of or the increase in threonine compared with the wild type control.

[31356] The nucleic acid sequence of AvinDRAFT_{—}2091 from Azotobacter vinelandii, e.g. as shown in the respective line in column 5 of Table I, application no. 4, has been published in F. And the activity of the gene product thereof is the activity of beta-hydroxylase.

[31357] Accordingly, in one embodiment, the process of the present invention for producing threonine in a non-human organism, like a microorganism or a plant or a part thereof, comprises increasing or generating the activity of a gene product with the activity of a gene product conferring the activity of “beta-hydroxylase”, especially from Azotobacter vinelandii or its functional equivalent or its homolog, e.g. the increase of
[31358] (a) a gene product of a gene comprising the nucleic acid molecule as shown in the respective line in column 5 of Table I, application no. 4, preferably the coding region thereof, or a homolog or a fragment thereof, and being depicted in the same respective line as said AvinDRAFT_{—}2091, or a functional equivalent or a homolog thereof as shown in column 8 of Table I, application no. 4, preferably the coding region thereof, particularly a homolog or functional equivalent as shown in column 8 of Table I B, application no. 4, and being depicted in the same respective line as said AvinDRAFT_{—}2091, and preferably the activity is increased non-targeted, or
[31359] (b) a polypeptide comprising a polypeptide, a consensus sequence or at least a polypeptide motif as shown in the respective line in column 5 of Table II or in column 8 of Table IV, application no. 4, respectively, and being depicted in the same respective line as said AvinDRAFT_{—}2091, or a functional equivalent or a homolog thereof as depicted in column 8 of Table II, application no. 4, preferably a homolog or functional equivalent as depicted in column 8 of Table II B, application no. 4, and being depicted in the same respective line as said AvinDRAFT_{—}2091, and preferably the activity is increased non-targeted.

[31360] Accordingly, in one embodiment, the molecule which activity is to be increased in the process of the invention is the gene product with an activity as a “beta-hydroxylase”, preferably it is the molecule of section (a) or (b) of this paragraph.

[31361] In particular, it was observed that in plants, especially in Arabidopsis thaliana, increasing or generating the activity of a gene product non-targeted with the activity of a “beta-hydroxylase”, preferably being encoded by a gene comprising the nucleic acid sequence SEQ ID NO. 6040, preferably the coding region thereof, conferred the production of or the increase in threonine compared with the wild type control.

[31362] The nucleic acid sequence of AvinDRAFT_{—}2344 from Azotobacter vinelandii, e.g. as shown in the respective line in column 5 of Table I, application no. 4, has been published in F. And the activity of the gene product thereof is the activity of elongation factor Tu.

[31363] Accordingly, in one embodiment, the process of the present invention for producing threonine in a non-human organism, like a microorganism or a plant or a part thereof, comprises increasing or generating the activity of a gene product with the activity of a gene product conferring the activity of “elongation factor Tu”, especially from Azotobacter vinelandii or its functional equivalent or its homolog, e.g. the increase of
[31364] (a) a gene product of a gene comprising the nucleic acid molecule as shown in the respective line in column 5 of Table I, application no. 4, preferably the coding region thereof, or a homolog or a fragment thereof, and being depicted in the same respective line as said AvinDRAFT_{—}2344, or a functional equivalent or a homolog thereof as shown in column 8 of Table I, application no. 4, preferably the coding region thereof, particularly a homolog or functional equivalent as shown in column 8 of Table I B, application no. 4, and being depicted in the same respective line as said AvinDRAFT_{—}2344, and preferably the activity is increased non-targeted, or
[31365] (b) a polypeptide comprising a polypeptide, a consensus sequence or at least a polypeptide motif as shown in the respective line in column 5 of Table II or in column 8 of Table IV, application no. 4, respectively, and being depicted in the same respective line as said AvinDRAFT_{—}2344, or a functional equivalent or a homolog thereof as depicted in column 8 of Table II, application no. 4, preferably a homolog or functional equivalent as depicted in column 8 of Table II B, application no. 4, and being depicted in the same respective line as said AvinDRAFT_{—}2344, and preferably the activity is increased non-targeted.

[31366] Accordingly, in one embodiment, the molecule which activity is to be increased in the process of the invention is the gene product with an activity as a “elongation factor Tu”, preferably it is the molecule of section (a) or (b) of this paragraph.

[31367] In particular, it was observed that in plants, especially in Arabidopsis thaliana, increasing or generating the activity of a gene product non-targeted with the activity of a “elongation factor Tu”, preferably being encoded by a gene comprising the nucleic acid sequence SEQ ID NO. 27021, preferably the coding region thereof, conferred the production of or the increase in threonine compared with the wild type control.

[31368] The nucleic acid sequence of AvinDRAFT_{—}2521 from Azotobacter vinelandii, e.g. as shown in the respective line in column 5 of Table I, application no. 4, has been published in F. And the activity of the gene product thereof is the activity of ABC transporter permease protein.

[31369] Accordingly, in one embodiment, the process of the present invention for producing threonine in a non-human organism, like a microorganism or a plant or a part thereof, comprises increasing or generating the activity of a gene product with the activity of a gene product conferring the activity of “ABC transporter permease protein”, especially from Azotobacter vinelandii or its functional equivalent or its homolog, e.g. the increase of
[31370] (a) a gene product of a gene comprising the nucleic acid molecule as shown in the respective line in column 5 of Table I, application no. 4, preferably the coding region thereof, or a homolog or a fragment thereof, and being depicted in the same respective line as said AvinDRAFT_{—}2521, or a functional equivalent or a homolog thereof as shown in column 8 of Table I, application no. 4, preferably the coding region thereof, particularly a homolog or functional equivalent as shown in column 8 of Table I B, application no. 4, and being depicted in the same respective line as said AvinDRAFT_{—}2521, and preferably the activity is increased non-targeted, or
[31371] (b) a polypeptide comprising a polypeptide, a consensus sequence or at least a polypeptide motif as shown in the respective line in column 5 of Table II or in column 8 of Table IV, application no. 4, respectively, and being depicted in the same respective line as said AvinDRAFT_{—}2521, or a functional equivalent or a homolog thereof as depicted in column 8 of Table II, application no. 4, preferably a homolog or functional equivalent as depicted in column 8 of Table II B, application no. 4, and being depicted in the same respective line as said AvinDRAFT_{—}2521, and preferably the activity is increased non-targeted.

[31372] Accordingly, in one embodiment, the molecule which activity is to be increased in the process of the invention is the gene product with an activity as a “ABC transporter permease protein”, preferably it is the molecule of section (a) or (b) of this paragraph.

[31373] In particular, it was observed that in plants, especially in Arabidopsis thaliana, increasing or generating the activity of a gene product non-targeted with the activity of a “ABC transporter permease protein”, preferably being encoded by a gene comprising the nucleic acid sequence SEQ ID NO. 27882, preferably the coding region thereof, conferred the production of or the increase in threonine compared with the wild type control.

[31374] The nucleic acid sequence of AvinDRAFT_{—}2754 from Azotobacter vinelandii, e.g. as shown in the respective line in column 5 of Table I, application no. 4, has been published in F. And the activity of the gene product thereof is the activity of acyl-CoA synthase.

[31375] Accordingly, in one embodiment, the process of the present invention for producing threonine in a non-human organism, like a microorganism or a plant or a part thereof, comprises increasing or generating the activity of a gene product with the activity of a gene product conferring the activity of “acyl-CoA synthase”, especially from Azotobacter vinelandii or its functional equivalent or its homolog, e.g. the increase of
[31376] (a) a gene product of a gene comprising the nucleic acid molecule as shown in the respective line in column 5 of Table I, application no. 4, preferably the coding region thereof, or a homolog or a fragment thereof, and being depicted in the same respective line as said AvinDRAFT_{—}2754, or a functional equivalent or a homolog thereof as shown in column 8 of Table I, application no. 4, preferably the coding region thereof, particularly a homolog or functional equivalent as shown in column 8 of Table I B, application no. 4, and being depicted in the same respective line as said AvinDRAFT_{—}2754, and preferably the activity is increased non-targeted, or
[31377] (b) a polypeptide comprising a polypeptide, a consensus sequence or at least a polypeptide motif as shown in the respective line in column 5 of Table II or in column 8 of Table IV, application no. 4, respectively, and being depicted in the same respective line as said AvinDRAFT_{—}2754, or a functional equivalent or a homolog thereof as depicted in column 8 of Table II, application no. 4, preferably a homolog or functional equivalent as depicted in column 8 of Table II B, application no. 4, and being depicted in the same respective line as said AvinDRAFT_{—}2754, and preferably the activity is increased non-targeted.

[31378] Accordingly, in one embodiment, the molecule which activity is to be increased in the process of the invention is the gene product with an activity as a “acyl-CoA synthase”, preferably it is the molecule of section (a) or (b) of this paragraph.

[31379] In particular, it was observed that in plants, especially in Arabidopsis thaliana, increasing or generating the activity of a gene product non-targeted with the activity of a “acyl-CoA synthase”, preferably being encoded by a gene comprising the nucleic acid sequence SEQ ID NO. 28040, preferably the coding region thereof, conferred the production of or the increase in threonine compared with the wild type control.

[31380] The nucleic acid sequence of AvinDRAFT_{—}3028 from Azotobacter vinelandii, e.g. as shown in the respective line in column 5 of Table I, application no. 4, has been published in F. And the activity of the gene product thereof is the activity of 2-oxoglutarate dehydrogenase E1 subunit.

[31381] Accordingly, in one embodiment, the process of the present invention for producing threonine in a non-human organism, like a microorganism or a plant or a part thereof, comprises increasing or generating the activity of a gene product with the activity of a gene product conferring the activity of “2-oxoglutarate dehydrogenase E1 subunit”, especially from Azotobacter vinelandii or its functional equivalent or its homolog, e.g. the increase of
[31382] (a) a gene product of a gene comprising the nucleic acid molecule as shown in the respective line in column 5 of Table I, application no. 4, preferably the coding region thereof, or a homolog or a fragment thereof, and being depicted in the same respective line as said AvinDRAFT_{—}3028, or a functional equivalent or a homolog thereof as shown in column 8 of Table I, application no. 4, preferably the coding region thereof, particularly a homolog or functional equivalent as shown in column 8 of Table I B, application no. 4, and being depicted in the same respective line as said AvinDRAFT_{—}3028, and preferably the activity is increased non-targeted, or
[31383] (b) a polypeptide comprising a polypeptide, a consensus sequence or at least a polypeptide motif as shown in the respective line in column 5 of Table II or in column 8 of Table IV, application no. 4, respectively, and being depicted in the same respective line as said AvinDRAFT_{—}3028, or a functional equivalent or a homolog thereof as depicted in column 8 of Table II, application no. 4, preferably a homolog or functional equivalent as depicted in column 8 of Table II B, application no. 4, and being depicted in the same respective line as said AvinDRAFT_{—}3028, and preferably the activity is increased non-targeted.

[31384] Accordingly, in one embodiment, the molecule which activity is to be increased in the process of the invention is the gene product with an activity as a “2-oxoglutarate dehydrogenase E1 subunit”, preferably it is the molecule of section (a) or (b) of this paragraph.

[31385] In particular, it was observed that in plants, especially in Arabidopsis thaliana, increasing or generating the activity of a gene product non-targeted with the activity of a “2-oxoglutarate dehydrogenase E1 subunit”, preferably being encoded by a gene comprising the nucleic acid sequence SEQ ID NO. 6075, preferably the coding region thereof, conferred the production of or the increase in threonine compared with the wild type control.

[31386] The nucleic acid sequence of AvinDRAFT_{—}3086 from Azotobacter vinelandii, e.g. as shown in the respective line in column 5 of Table I, application no. 4, has been published in F. And the activity of the gene product thereof is the activity of permease protein of peptide ABC transporter.

[31387] Accordingly, in one embodiment, the process of the present invention for producing threonine in a non-human organism, like a microorganism or a plant or a part thereof, comprises increasing or generating the activity of a gene product with the activity of a gene product conferring the activity of “permease protein of peptide ABC transporter”, especially from Arabidopsis thaliana or its functional equivalent or its homolog, e.g. the increase of
[31388] (a) a gene product of a gene comprising the nucleic acid molecule as shown in the respective line in column 5 of Table I, application no. 4, preferably the coding region thereof, or a homolog or a fragment thereof, and being depicted in the same respective line as said AvinDRAFT_{—}3086, or a functional equivalent or a homolog thereof as shown in column 8 of Table I, application no. 4, preferably the coding region thereof, particularly a homolog or functional equivalent as shown in column 8 of Table I B, application no. 4, and being depicted in the same respective line as said AvinDRAFT_{—}3086, and preferably the activity is increased non-targeted, or
[31389] (b) a polypeptide comprising a polypeptide, a consensus sequence or at least a polypeptide motif as shown in the respective line in column 5 of Table II or in column 8 of Table IV, application no. 4, respectively, and being depicted in the same respective line as said AvinDRAFT_{—}3086, or a functional equivalent or a homolog thereof as depicted in column 8 of Table II, application no. 4, preferably a homolog or functional equivalent as depicted in column 8 of Table II B, application no. 4, and being depicted in the same respective line as said AvinDRAFT_{—}3086, and preferably the activity is increased non-targeted.

[31390] Accordingly, in one embodiment, the molecule which activity is to be increased in the process of the invention is the gene product with an activity as a “permease protein of peptide ABC transporter”, preferably it is the molecule of section (a) or (b) of this paragraph.

[31391] In particular, it was observed that in plants, especially in Arabidopsis thaliana, increasing or generating the activity of a gene product non-targeted with the activity of a “permease protein of peptide ABC transporter”, preferably being encoded by a gene comprising the nucleic acid sequence SEQ ID NO. 93532, preferably the coding region thereof, conferred the production of or the increase in threonine compared with the wild type control.

[31392] The nucleic acid sequence of AvinDRAFT_{—}3135 from Azotobacter vinelandii, e.g. as shown in the respective line in column 5 of Table I, application no. 4, has been published in F. And the activity of the gene product thereof is the activity of GDP-mannose dehydrogenase.

[31393] Accordingly, in one embodiment, the process of the present invention for producing threonine in a non-human organism, like a microorganism or a plant or a part thereof, comprises increasing or generating the activity of a gene product with the activity of a gene product conferring the activity of “GDP-mannose dehydrogenase”, especially from Azotobacter vinelandii or its functional equivalent or its homolog, e.g. the increase of
[31394] (a) a gene product of a gene comprising the nucleic acid molecule as shown in the respective line in column 5 of Table I, application no. 4, preferably the coding region thereof, or a homolog or a fragment thereof, and being depicted in the same respective line as said AvinDRAFT_{—}3135, or a functional equivalent or a homolog thereof as shown in column 8 of Table I, application no. 4, preferably the coding region thereof, particularly a homolog or functional equivalent as shown in column 8 of Table I B, application no. 4, and being depicted in the same respective line as said AvinDRAFT_{—}3135, and preferably the activity is increased non-targeted, or
[31395] (b) a polypeptide comprising a polypeptide, a consensus sequence or at least a polypeptide motif as shown in the respective line in column 5 of Table II or in column 8 of Table IV, application no. 4, respectively, and being depicted in the same respective line as said AvinDRAFT_{—}3135, or a functional equivalent or a homolog thereof as depicted in column 8 of Table II, application no. 4, preferably a homolog or functional equivalent as depicted in column 8 of Table II B, application no. 4, and being depicted in the same respective line as said AvinDRAFT_{—}3135, and preferably the activity is increased non-targeted.

[31396] Accordingly, in one embodiment, the molecule which activity is to be increased in the process of the invention is the gene product with an activity as a “GDP-mannose dehydrogenase”, preferably it is the molecule of section (a) or (b) of this paragraph.

[31397] In particular, it was observed that in plants, especially in Arabidopsis thaliana, increasing or generating the activity of a gene product non-targeted with the activity of a “GDP-mannose dehydrogenase”, preferably being encoded by a gene comprising the nucleic acid sequence SEQ ID NO. 72346, preferably the coding region thereof, conferred the production of or the increase in threonine compared with the wild type control.

[31398] The nucleic acid sequence of AvinDRAFT_{—}3159 from Azotobacter vinelandii, e.g. as shown in the respective line in column 5 of Table I, application no. 4, has been published in F. And the activity of the gene product thereof is the activity of enoyl-CoA hydratase.

[31399] Accordingly, in one embodiment, the process of the present invention for producing threonine in a non-human organism, like a microorganism or a plant or a part thereof, comprises increasing or generating the activity of a gene product with the activity of a gene product conferring the activity of “enoyl-CoA hydratase”, especially from Azotobacter vinelandii or its functional equivalent or its homolog, e.g. the increase of
[31400] (a) a gene product of a gene comprising the nucleic acid molecule as shown in the respective line in column 5 of Table I, application no. 4, preferably the coding region thereof, or a homolog or a fragment thereof, and being depicted in the same respective line as said AvinDRAFT_{—}3159, or a functional equivalent or a homolog thereof as shown in column 8 of Table I, application no. 4, preferably the coding region thereof, particularly a homolog or functional equivalent as shown in column 8 of Table I B, application no. 4, and being depicted in the same respective line as said AvinDRAFT_{—}3159, and preferably the activity is increased non-targeted, or
[31401] (b) a polypeptide comprising a polypeptide, a consensus sequence or at least a polypeptide motif as shown in the respective line in column 5 of Table II or in column 8 of Table IV, application no. 4, respectively, and being depicted in the same respective line as said AvinDRAFT_{—}3159, or a functional equivalent or a homolog thereof as depicted in column 8 of Table II, application no. 4, preferably a homolog or functional equivalent as depicted in column 8 of Table II B, application no. 4, and being depicted in the same respective line as said AvinDRAFT_{—}3159, and preferably the activity is increased non-targeted.

[31402] Accordingly, in one embodiment, the molecule which activity is to be increased in the process of the invention is the gene product with an activity as a “enoyl-CoA hydratase”, preferably it is the molecule of section (a) or (b) of this paragraph.

[31403] In particular, it was observed that in plants, especially in Arabidopsis thaliana, increasing or generating the activity of a gene product non-targeted with the activity of a “enoyl-CoA hydratase”, preferably being encoded by a gene comprising the nucleic acid sequence SEQ ID NO. 28738, preferably the coding region thereof, conferred the production of or the increase in threonine compared with the wild type control.

[31404] The nucleic acid sequence of AvinDRAFT_{—}3209 from Azotobacter vinelandii, e.g. as shown in the respective line in column 5 of Table I, application no. 4, has been published in F. And the activity of the gene product thereof is the activity of transcriptional regulator.

[31405] Accordingly, in one embodiment, the process of the present invention for producing threonine in a non-human organism, like a microorganism or a plant or a part thereof, comprises increasing or generating the activity of a gene product with the activity of a gene product conferring the activity of “transcriptional regulator”, especially from Azotobacter vinelandii or its functional equivalent or its homolog, e.g. the increase of
[31406] (a) a gene product of a gene comprising the nucleic acid molecule as shown in the respective line in column 5 of Table I, application no. 4, preferably the coding region thereof, or a homolog or a fragment thereof, and being depicted in the same respective line as said AvinDRAFT_{—}3209, or a functional equivalent or a homolog thereof as shown in column 8 of Table I, application no. 4, preferably the coding region thereof, particularly a homolog or functional equivalent as shown in column 8 of Table I B, application no. 4, and being depicted in the same respective line as said AvinDRAFT_{—}3209, and preferably the activity is increased non-targeted, or
[31407] (b) a polypeptide comprising a polypeptide, a consensus sequence or at least a polypeptide motif as shown in the respective line in column 5 of Table II or in column 8 of Table IV, application no. 4, respectively, and being depicted in the same respective line as said AvinDRAFT_{—}3209, or a functional equivalent or a homolog thereof as depicted in column 8 of Table II, application no. 4, preferably a homolog or functional equivalent as depicted in column 8 of Table II B, application no. 4, and being depicted in the same respective line as said AvinDRAFT_{—}3209, and preferably the activity is increased non-targeted.

[31408] Accordingly, in one embodiment, the molecule which activity is to be increased in the process of the invention is the gene product with an activity as a “transcriptional regulator”, preferably it is the molecule of section (a) or (b) of this paragraph.

[31409] In particular, it was observed that in plants, especially in Arabidopsis thaliana, increasing or generating the activity of a gene product non-targeted with the activity of a “transcriptional regulator”, preferably being encoded by a gene comprising the nucleic acid sequence SEQ ID NO. 29286, preferably the coding region thereof, conferred the production of or the increase in threonine compared with the wild type control.

[31410] The nucleic acid sequence of AvinDRAFT_{—}3546 from Azotobacter vinelandii, e.g. as shown in the respective line in column 5 of Table I, application no. 4, has been published in F. And the activity of the gene product thereof is the activity of homoserine dehydrogenase.

[31411] Accordingly, in one embodiment, the process of the present invention for producing threonine in a non-human organism, like a microorganism or a plant or a part thereof, comprises increasing or generating the activity of a gene product with the activity of a gene product conferring the activity of “homoserine dehydrogenase”, especially from Azotobacter vinelandii or its functional equivalent or its homolog, e.g. the increase of
[31412] (a) a gene product of a gene comprising the nucleic acid molecule as shown in the respective line in column 5 of Table I, application no. 4, preferably the coding region thereof, or a homolog or a fragment thereof, and being depicted in the same respective line as said AvinDRAFT_{—}3546, or a functional equivalent or a homolog thereof as shown in column 8 of Table I, application no. 4, preferably the coding region thereof, particularly a homolog or functional equivalent as shown in column 8 of Table I B, application no. 4, and being depicted in the same respective line as said AvinDRAFT_{—}3546, and preferably the activity is increased non-targeted, or
[31413] (b) a polypeptide comprising a polypeptide, a consensus sequence or at least a polypeptide motif as shown in the respective line in column 5 of Table II or in column 8 of Table IV, application no. 4, respectively, and being depicted in the same respective line as said AvinDRAFT_{—}3546, or a functional equivalent or a homolog thereof as depicted in column 8 of Table II, application no. 4, preferably a homolog or functional equivalent as depicted in column 8 of Table II B, application no. 4, and being depicted in the same respective line as said AvinDRAFT_{—}3546, and preferably the activity is increased non-targeted.

[31414] Accordingly, in one embodiment, the molecule which activity is to be increased in the process of the invention is the gene product with an activity as a “homoserine dehydrogenase”, preferably it is the molecule of section (a) or (b) of this paragraph.

[31415] In particular, it was observed that in plants, especially in Arabidopsis thaliana, increasing or generating the activity of a gene product non-targeted with the activity of a “homoserine dehydrogenase”, preferably being encoded by a gene comprising the nucleic acid sequence SEQ ID NO. 6268, preferably the coding region thereof, conferred the production of or the increase in threonine compared with the wild type control.

[31416] The nucleic acid sequence of AvinDRAFT_{—}5103 from Azotobacter vinelandii, e.g. as shown in the respective line in column 5 of Table I, application no. 4, has been published in F. And the activity of the gene product thereof is the activity of hydrolase.

[31417] Accordingly, in one embodiment, the process of the present invention for producing threonine in a non-human organism, like a microorganism or a plant or a part thereof, comprises increasing or generating the activity of a gene product with the activity of a gene product conferring the activity of “hydrolase”, especially from Azotobacter vinelandii or its functional equivalent or its homolog, e.g. the increase of
[31418] (a) a gene product of a gene comprising the nucleic acid molecule as shown in the respective line in column 5 of Table I, application no. 4, preferably the coding region thereof, or a homolog or a fragment thereof, and being depicted in the same respective line as said AvinDRAFT_{—}5103, or a functional equivalent or a homolog thereof as shown in column 8 of Table I, application no. 4, preferably the coding region thereof, particularly a homolog or functional equivalent as shown in column 8 of Table I B, application no. 4, and being depicted in the same respective line as said AvinDRAFT_{—}5103, and preferably the activity is increased non-targeted, or
[31419] (b) a polypeptide comprising a polypeptide, a consensus sequence or at least a polypeptide motif as shown in the respective line in column 5 of Table II or in column 8 of Table IV, application no. 4, respectively, and being depicted in the same respective line as said AvinDRAFT_{—}5103, or a functional equivalent or a homolog thereof as depicted in column 8 of Table II, application no. 4, preferably a homolog or functional equivalent as depicted in column 8 of Table II B, application no. 4, and being depicted in the same respective line as said AvinDRAFT_{—}5103, and preferably the activity is increased non-targeted.

[31420] Accordingly, in one embodiment, the molecule which activity is to be increased in the process of the invention is the gene product with an activity as a “hydrolase”, preferably it is the molecule of section (a) or (b) of this paragraph.

[31421] In particular, it was observed that in plants, especially in Arabidopsis thaliana, increasing or generating the activity of a gene product non-targeted with the activity of a “hydrolase”, preferably being encoded by a gene comprising the nucleic acid sequence SEQ ID NO. 6510, preferably the coding region thereof, conferred the production of or the increase in threonine compared with the wild type control.

[31422] The nucleic acid sequence of AvinDRAFT_{—}5246 from Azotobacter vinelandii, e.g. as shown in the respective line in column 5 of Table I, application no. 4, has been published in F. And the activity of the gene product thereof is the activity of glutamate-ammonia-ligase.

[31423] Accordingly, in one embodiment, the process of the present invention for producing threonine in a non-human organism, like a microorganism or a plant or a part thereof, comprises increasing or generating the activity of a gene product with the activity of a gene product conferring the activity of “glutamate-ammonia-ligase”, especially from Azotobacter vinelandii or its functional equivalent or its homolog, e.g. the increase of
[31424] (a) a gene product of a gene comprising the nucleic acid molecule as shown in the respective line in column 5 of Table I, application no. 4, preferably the coding region thereof, or a homolog or a fragment thereof, and being depicted in the same respective line as said AvinDRAFT_{—}5246, or a functional equivalent or a homolog thereof as shown in column 8 of Table I, application no. 4, preferably the coding region thereof, particularly a homolog or functional equivalent as shown in column 8 of Table I B, application no. 4, and being depicted in the same respective line as said AvinDRAFT_{—}5246, and preferably the activity is increased non-targeted, or
[31425] (b) a polypeptide comprising a polypeptide, a consensus sequence or at least a polypeptide motif as shown in the respective line in column 5 of Table II or in column 8 of Table IV, application no. 4, respectively, and being depicted in the same respective line as said AvinDRAFT_{—}5246, or a functional equivalent or a homolog thereof as depicted in column 8 of Table II, application no. 4, preferably a homolog or functional equivalent as depicted in column 8 of Table II B, application no. 4, and being depicted in the same respective line as said AvinDRAFT_{—}5246, and preferably the activity is increased non-targeted.

[31426] Accordingly, in one embodiment, the molecule which activity is to be increased in the process of the invention is the gene product with an activity as a “glutamate-ammonia-ligase”, preferably it is the molecule of section (a) or (b) of this paragraph.

[31427] In particular, it was observed that in plants, especially in Arabidopsis thaliana, increasing or generating the activity of a gene product non-targeted with the activity of a “glutamate-ammonia-ligase”, preferably being encoded by a gene comprising the nucleic acid sequence SEQ ID NO. 32037, preferably the coding region thereof, conferred the production of or the increase in threonine compared with the wild type control.

[31428] The nucleic acid sequence of AvinDRAFT_{—}5579 from Azotobacter vinelandii, e.g. as shown in the respective line in column 5 of Table I, application no. 4, has been published in F. And the activity of the gene product thereof is the activity of peptidase.

[31429] Accordingly, in one embodiment, the process of the present invention for producing threonine in a non-human organism, like a microorganism or a plant or a part thereof, comprises increasing or generating the activity of a gene product with the activity of a gene product conferring the activity of “peptidase”, especially from Azotobacter vinelandii or its functional equivalent or its homolog, e.g. the increase of
[31430] (a) a gene product of a gene comprising the nucleic acid molecule as shown in the respective line in column 5 of Table I, application no. 4, preferably the coding region thereof, or a homolog or a fragment thereof, and being depicted in the same respective line as said AvinDRAFT_{—}5579, or a functional equivalent or a homolog thereof as shown in column 8 of Table I, application no. 4, preferably the coding region thereof, particularly a homolog or functional equivalent as shown in column 8 of Table I B, application no. 4, and being depicted in the same respective line as said AvinDRAFT_{—}5579, and preferably the activity is increased non-targeted, or
[31431] (b) a polypeptide comprising a polypeptide, a consensus sequence or at least a polypeptide motif as shown in the respective line in column 5 of Table II or in column 8 of Table IV, application no. 4, respectively, and being depicted in the same respective line as said AvinDRAFT_{—}5579, or a functional equivalent or a homolog thereof as depicted in column 8 of Table II, application no. 4, preferably a homolog or functional equivalent as depicted in column 8 of Table II B, application no. 4, and being depicted in the same respective line as said AvinDRAFT_{—}5579, and preferably the activity is increased non-targeted.

[31432] Accordingly, in one embodiment, the molecule which activity is to be increased in the process of the invention is the gene product with an activity as a “peptidase”, preferably it is the molecule of section (a) or (b) of this paragraph.

[31433] In particular, it was observed that in plants, especially in Arabidopsis thaliana, increasing or generating the activity of a gene product non-targeted with the activity of a “peptidase”, preferably being encoded by a gene comprising the nucleic acid sequence SEQ ID NO. 74662, preferably the coding region thereof, conferred the production of or the increase in threonine compared with the wild type control.

[31434] The nucleic acid sequence of AvinDRAFT_{—}6093 from Azotobacter vinelandii, e.g. as shown in the respective line in column 5 of Table I, application no. 4, has been published in F. And the activity of the gene product thereof is the activity of Chaperone protein CIpB.

[31435] Accordingly, in one embodiment, the process of the present invention for producing threonine in a non-human organism, like a microorganism or a plant or a part thereof, comprises increasing or generating the activity of a gene product with the activity of a gene product conferring the activity of “Chaperone protein CIpB”, especially from Azotobacter vinelandii or its functional equivalent or its homolog, e.g. the increase of
[31436] (a) a gene product of a gene comprising the nucleic acid molecule as shown in the respective line in column 5 of Table I, application no. 4, preferably the coding region thereof, or a homolog or a fragment thereof, and being depicted in the same respective line as said AvinDRAFT_{—}6093, or a functional equivalent or a homolog thereof as shown in column 8 of Table I, application no. 4, preferably the coding region thereof, particularly a homolog or functional equivalent as shown in column 8 of Table I B, application no. 4, and being depicted in the same respective line as said AvinDRAFT_{—}6093, and preferably the activity is increased non-targeted, or
[31437] (b) a polypeptide comprising a polypeptide, a consensus sequence or at least a polypeptide motif as shown in the respective line in column 5 of Table II or in column 8 of Table IV, application no. 4, respectively, and being depicted in the same respective line as said AvinDRAFT_{—}6093, or a functional equivalent or a homolog thereof as depicted in column 8 of Table II, application no. 4, preferably a homolog or functional equivalent as depicted in column 8 of Table II B, application no. 4, and being depicted in the same respective line as said AvinDRAFT_{—}6093, and preferably the activity is increased non-targeted.

[31438] Accordingly, in one embodiment, the molecule which activity is to be increased in the process of the invention is the gene product with an activity as a “Chaperone protein CIpB”, preferably it is the molecule of section (a) or (b) of this paragraph.

[31439] In particular, it was observed that in plants, especially in Arabidopsis thaliana, increasing or generating the activity of a gene product non-targeted with the activity of a “Chaperone protein CIpB”, preferably being encoded by a gene comprising the nucleic acid sequence SEQ ID NO. 33596, preferably the coding region thereof, conferred the production of or the increase in threonine compared with the wild type control.

[31440] The nucleic acid sequence of AvinDRAFT_{—}6864 from Azotobacter vinelandii, e.g. as shown in the respective line in column 5 of Table I, application no. 4, has been published in F. And the activity of the gene product thereof is the activity of transcriptional regulator protein.

[31441] Accordingly, in one embodiment, the process of the present invention for producing threonine in a non-human organism, like a microorganism or a plant or a part thereof, comprises increasing or generating the activity of a gene product with the activity of a gene product conferring the activity of “transcriptional regulator protein”, especially from Azotobacter vinelandii or its functional equivalent or its homolog, e.g. the increase of
[31442] (a) a gene product of a gene comprising the nucleic acid molecule as shown in the respective line in column 5 of Table I, application no. 4, preferably the coding region thereof, or a homolog or a fragment thereof, and being depicted in the same respective line as said AvinDRAFT_{—}6864, or a functional equivalent or a homolog thereof as shown in column 8 of Table I, application no. 4, preferably the coding region thereof, particularly a homolog or functional equivalent as shown in column 8 of Table I B, application no. 4, and being depicted in the same respective line as said AvinDRAFT_{—}6864, and preferably the activity is increased non-targeted, or
[31443] (b) a polypeptide comprising a polypeptide, a consensus sequence or at least a polypeptide motif as shown in the respective line in column 5 of Table II or in column 8 of Table IV, application no. 4, respectively, and being depicted in the same respective line as said AvinDRAFT_{—}6864, or a functional equivalent or a homolog thereof as depicted in column 8 of Table II, application no. 4, preferably a homolog or functional equivalent as depicted in column 8 of Table II B, application no. 4, and being depicted in the same respective line as said AvinDRAFT_{—}6864, and preferably the activity is increased non-targeted.

[31444] Accordingly, in one embodiment, the molecule which activity is to be increased in the process of the invention is the gene product with an activity as a “transcriptional regulator protein”, preferably it is the molecule of section (a) or (b) of this paragraph.

[31445] In particular, it was observed that in plants, especially in Arabidopsis thaliana, increasing or generating the activity of a gene product non-targeted with the activity of a “transcriptional regulator protein”, preferably being encoded by a gene comprising the nucleic acid sequence SEQ ID NO. 34204, preferably the coding region thereof, conferred the production of or the increase in threonine compared with the wild type control.

[31446] The nucleic acid sequence of AX653549 from Oryza sativa, e.g. as shown in the respective line in column 5 of Table I, application no. 4, has been published in F. And the activity of the gene product thereof is the activity of AX653549-protein.

[31447] Accordingly, in one embodiment, the process of the present invention for producing threonine in a non-human organism, like a microorganism or a plant or a part thereof, comprises increasing or generating the activity of a gene product with the activity of a gene product conferring the activity of “AX653549-protein”, especially from Oryza sativa or its functional equivalent or its homolog, e.g. the increase of
[31448] (a) a gene product of a gene comprising the nucleic acid molecule as shown in the respective line in column 5 of Table I, application no. 4, preferably the coding region thereof, or a homolog or a fragment thereof, and being depicted in the same respective line as said AX653549, or a functional equivalent or a homolog thereof as shown in column 8 of Table I, application no. 4, preferably the coding region thereof, particularly a homolog or functional equivalent as shown in column 8 of Table I B, application no. 4, and being depicted in the same respective line as said AX653549, and preferably the activity is increased non-targeted, or
[31449] (b) a polypeptide comprising a polypeptide, a consensus sequence or at least a polypeptide motif as shown in the respective line in column 5 of Table II or in column 8 of Table IV, application no. 4, respectively, and being depicted in the same respective line as said AX653549, or a functional equivalent or a homolog thereof as depicted in column 8 of Table II, application no. 4, preferably a homolog or functional equivalent as depicted in column 8 of Table II B, application no. 4, and being depicted in the same respective line as said AX653549, and preferably the activity is increased non-targeted.

[31450] Accordingly, in one embodiment, the molecule which activity is to be increased in the process of the invention is the gene product with an activity as a “AX653549-protein”, preferably it is the molecule of section (a) or (b) of this paragraph.

[31451] In particular, it was observed that in plants, especially in Arabidopsis thaliana, increasing or generating the activity of a gene product non-targeted with the activity of a “AX653549-protein”, preferably being encoded by a gene comprising the nucleic acid sequence SEQ ID NO. 34301, preferably the coding region thereof, conferred the production of or the increase in threonine compared with the wild type control.

[31452] The nucleic acid sequence of B0004 from Escherichia coli, e.g. as shown in the respective line in column 5 of Table I, application no. 4, has been published in B. And the activity of the gene product thereof is the activity of threonine synthase.

[31453] Accordingly, in one embodiment, the process of the present invention for producing threonine in a non-human organism, like a microorganism or a plant or a part thereof, comprises increasing or generating the activity of a gene product with the activity of a gene product conferring the activity of “threonine synthase”, especially from Escherichia coli or its functional equivalent or its homolog, e.g. the increase of
[31454] (a) a gene product of a gene comprising the nucleic acid molecule as shown in the respective line in column 5 of Table I, application no. 4, preferably the coding region thereof, or a homolog or a fragment thereof, and being depicted in the same respective line as said B0004, or a functional equivalent or a homolog thereof as shown in column 8 of Table I, application no. 4, preferably the coding region thereof, particularly a homolog or functional equivalent as shown in column 8 of Table I B, application no. 4, and being depicted in the same respective line as said B0004, and preferably the activity is increased plastidic, or
[31455] (b) a polypeptide comprising a polypeptide, a consensus sequence or at least a polypeptide motif as shown in the respective line in column 5 of Table II or in column 8 of Table IV, application no. 4, respectively, and being depicted in the same respective line as said B0004, or a functional equivalent or a homolog thereof as depicted in column 8 of Table II, application no. 4, preferably a homolog or functional equivalent as depicted in column 8 of Table II B, application no. 4, and being depicted in the same respective line as said B0004, and preferably the activity is increased plastidic.

[31456] Accordingly, in one embodiment, the molecule which activity is to be increased in the process of the invention is the gene product with an activity as a “threonine synthase”, preferably it is the molecule of section (a) or (b) of this paragraph.

[31457] In particular, it was observed that in plants, especially in Arabidopsis thaliana, increasing or generating the activity of a gene product plastidic with the activity of a “threonine synthase”, preferably being encoded by a gene comprising the nucleic acid sequence SEQ ID NO. 34889, preferably the coding region thereof, conferred the production of or the increase in threonine compared with the wild type control.

[31458] The nucleic acid sequence of B0078 from Escherichia coli, e.g. as shown in the respective line in column 5 of Table I, application no. 4, has been published in B. And the activity of the gene product thereof is the activity of acetolactate synthase small subunit.

[31459] Accordingly, in one embodiment, the process of the present invention for producing threonine in a non-human organism, like a microorganism or a plant or a part thereof, comprises increasing or generating the activity of a gene product with the activity of a gene product conferring the activity of “acetolactate synthase small subunit”, especially from Escherichia coli or its functional equivalent or its homolog, e.g. the increase of
[31460] (a) a gene product of a gene comprising the nucleic acid molecule as shown in the respective line in column 5 of Table I, application no. 4, preferably the coding region thereof, or a homolog or a fragment thereof, and being depicted in the same respective line as said B0078, or a functional equivalent or a homolog thereof as shown in column 8 of Table I, application no. 4, preferably the coding region thereof, particularly a homolog or functional equivalent as shown in column 8 of Table I B, application no. 4, and being depicted in the same respective line as said B0078, and preferably the activity is increased non-targeted, or
[31461] (b) a polypeptide comprising a polypeptide, a consensus sequence or at least a polypeptide motif as shown in the respective line in column 5 of Table II or in column 8 of Table IV, application no. 4, respectively, and being depicted in the same respective line as said B0078, or a functional equivalent or a homolog thereof as depicted in column 8 of Table II, application no. 4, preferably a homolog or functional equivalent as depicted in column 8 of Table II B, application no. 4, and being depicted in the same respective line as said B0078, and preferably the activity is increased non-targeted.

[31462] Accordingly, in one embodiment, the molecule which activity is to be increased in the process of the invention is the gene product with an activity as a “acetolactate synthase small subunit”, preferably it is the molecule of section (a) or (b) of this paragraph.

[31463] In particular, it was observed that in plants, especially in Arabidopsis thaliana, increasing or generating the activity of a gene product non-targeted with the activity of a “acetolactate synthase small subunit”, preferably being encoded by a gene comprising the nucleic acid sequence SEQ ID NO. 6818, preferably the coding region thereof, conferred the production of or the increase in threonine compared with the wild type control.

[31464] The nucleic acid sequence of B0115 from Escherichia coli, e.g. as shown in the respective line in column 5 of Table I, application no. 4, has been published in B. And the activity of the gene product thereof is the activity of dihydrolipoamide acetyltransferase.

[31465] Accordingly, in one embodiment, the process of the present invention for producing threonine in a non-human organism, like a microorganism or a plant or a part thereof, comprises increasing or generating the activity of a gene product with the activity of a gene product conferring the activity of “dihydrolipoamide acetyltransferase”, especially from Escherichia coli or its functional equivalent or its homolog, e.g. the increase of
[31466] (a) a gene product of a gene comprising the nucleic acid molecule as shown in the respective line in column 5 of Table I, application no. 4, preferably the coding region thereof, or a homolog or a fragment thereof, and being depicted in the same respective line as said B0115, or a functional equivalent or a homolog thereof as shown in column 8 of Table I, application no. 4, preferably the coding region thereof, particularly a homolog or functional equivalent as shown in column 8 of Table I B, application no. 4, and being depicted in the same respective line as said B0115, and preferably the activity is increased plastidic, or
[31467] (b) a polypeptide comprising a polypeptide, a consensus sequence or at least a polypeptide motif as shown in the respective line in column 5 of Table II or in column 8 of Table IV, application no. 4, respectively, and being depicted in the same respective line as said B0115, or a functional equivalent or a homolog thereof as depicted in column 8 of Table II, application no. 4, preferably a homolog or functional equivalent as depicted in column 8 of Table II B, application no. 4, and being depicted in the same respective line as said B0115, and preferably the activity is increased plastidic.

[31468] Accordingly, in one embodiment, the molecule which activity is to be increased in the process of the invention is the gene product with an activity as a “dihydrolipoamide acetyltransferase”, preferably it is the molecule of section (a) or (b) of this paragraph.

[31469] In particular, it was observed that in plants, especially in Arabidopsis thaliana, increasing or generating the activity of a gene product plastidic with the activity of a “dihydrolipoamide acetyltransferase”, preferably being encoded by a gene comprising the nucleic acid sequence SEQ ID NO. 35366, preferably the coding region thereof, conferred the production of or the increase in threonine compared with the wild type control.

[31470] The nucleic acid sequence of B0124 from Escherichia coli, e.g. as shown in the respective line in column 5 of Table I, application no. 4, has been published in B. And the activity of the gene product thereof is the activity of glucose dehydrogenase.

[31471] Accordingly, in one embodiment, the process of the present invention for producing threonine in a non-human organism, like a microorganism or a plant or a part thereof, comprises increasing or generating the activity of a gene product with the activity of a gene product conferring the activity of “glucose dehydrogenase”, especially from Escherichia coli or its functional equivalent or its homolog, e.g. the increase of
[31472] (a) a gene product of a gene comprising the nucleic acid molecule as shown in the respective line in column 5 of Table I, application no. 4, preferably the coding region thereof, or a homolog or a fragment thereof, and being depicted in the same respective line as said B0124, or a functional equivalent or a homolog thereof as shown in column 8 of Table I, application no. 4, preferably the coding region thereof, particularly a homolog or functional equivalent as shown in column 8 of Table I B, application no. 4, and being depicted in the same respective line as said B0124, and preferably the activity is increased non-targeted, or
[31473] (b) a polypeptide comprising a polypeptide, a consensus sequence or at least a polypeptide motif as shown in the respective line in column 5 of Table II or in column 8 of Table IV, application no. 4, respectively, and being depicted in the same respective line as said B0124, or a functional equivalent or a homolog thereof as depicted in column 8 of Table II, application no. 4, preferably a homolog or functional equivalent as depicted in column 8 of Table II B, application no. 4, and being depicted in the same respective line as said B0124, and preferably the activity is increased non-targeted.

[31474] Accordingly, in one embodiment, the molecule which activity is to be increased in the process of the invention is the gene product with an activity as a “glucose dehydrogenase”, preferably it is the molecule of section (a) or (b) of this paragraph.

[31475] In particular, it was observed that in plants, especially in Arabidopsis thaliana, increasing or generating the activity of a gene product non-targeted with the activity of a “glucose dehydrogenase”, preferably being encoded by a gene comprising the nucleic acid sequence SEQ ID NO. 35482, preferably the coding region thereof, conferred the production of or the increase in threonine compared with the wild type control.

[31476] The nucleic acid sequence of B0161 from Escherichia coli, e.g. as shown in the respective line in column 5 of Table I, application no. 4, has been published in B. And the activity of the gene product thereof is the activity of serine protease.

[31477] Accordingly, in one embodiment, the process of the present invention for producing threonine in a non-human organism, like a microorganism or a plant or a part thereof, comprises increasing or generating the activity of a gene product with the activity of a gene product conferring the activity of “serine protease”, especially from Escherichia coli or its functional equivalent or its homolog, e.g. the increase of
[31478] (a) a gene product of a gene comprising the nucleic acid molecule as shown in the respective line in column 5 of Table I, application no. 4, preferably the coding region thereof, or a homolog or a fragment thereof, and being depicted in the same respective line as said B0161, or a functional equivalent or a homolog thereof as shown in column 8 of Table I, application no. 4, preferably the coding region thereof, particularly a homolog or functional equivalent as shown in column 8 of Table I B, application no. 4, and being depicted in the same respective line as said B0161, and preferably the activity is increased non-targeted, or
[31479] (b) a polypeptide comprising a polypeptide, a consensus sequence or at least a polypeptide motif as shown in the respective line in column 5 of Table II or in column 8 of Table IV, application no. 4, respectively, and being depicted in the same respective line as said B0161, or a functional equivalent or a homolog thereof as depicted in column 8 of Table II, application no. 4, preferably a homolog or functional equivalent as depicted in column 8 of Table II B, application no. 4, and being depicted in the same respective line as said B0161, and preferably the activity is increased non-targeted.

[31480] Accordingly, in one embodiment, the molecule which activity is to be increased in the process of the invention is the gene product with an activity as a “serine protease”, preferably it is the molecule of section (a) or (b) of this paragraph.

[31481] In particular, it was observed that in plants, especially in Arabidopsis thaliana, increasing or generating the activity of a gene product non-targeted with the activity of a “serine protease”, preferably being encoded by a gene comprising the nucleic acid sequence SEQ ID NO. 7081, preferably the coding region thereof, conferred the production of or the increase in threonine compared with the wild type control.

[31482] The nucleic acid sequence of B0221 from Escherichia coli, e.g. as shown in the respective line in column 5 of Table I, application no. 4, has been published in B. And the activity of the gene product thereof is the activity of acyl-CoA dehydrogenase.

[31483] Accordingly, in one embodiment, the process of the present invention for producing threonine in a non-human organism, like a microorganism or a plant or a part thereof, comprises increasing or generating the activity of a gene product with the activity of a gene product conferring the activity of “acyl-CoA dehydrogenase”, especially from Escherichia coli or its functional equivalent or its homolog, e.g. the increase of
[31484] (a) a gene product of a gene comprising the nucleic acid molecule as shown in the respective line in column 5 of Table I, application no. 4, preferably the coding region thereof, or a homolog or a fragment thereof, and being depicted in the same respective line as said B0221, or a functional equivalent or a homolog thereof as shown in column 8 of Table I, application no. 4, preferably the coding region thereof, particularly a homolog or functional equivalent as shown in column 8 of Table I B, application no. 4, and being depicted in the same respective line as said B0221, and preferably the activity is increased non-targeted, or
[31485] (b) a polypeptide comprising a polypeptide, a consensus sequence or at least a polypeptide motif as shown in the respective line in column 5 of Table II or in column 8 of Table IV, application no. 4, respectively, and being depicted in the same respective line as said B0221, or a functional equivalent or a homolog thereof as depicted in column 8 of Table II, application no. 4, preferably a homolog or functional equivalent as depicted in column 8 of Table II B, application no. 4, and being depicted in the same respective line as said B0221, and preferably the activity is increased non-targeted.

[31486] Accordingly, in one embodiment, the molecule which activity is to be increased in the process of the invention is the gene product with an activity as a “acyl-CoA dehydrogenase”, preferably it is the molecule of section (a) or (b) of this paragraph.

[31487] In particular, it was observed that in plants, especially in Arabidopsis thaliana, increasing or generating the activity of a gene product non-targeted with the activity of a “acyl-CoA dehydrogenase”, preferably being encoded by a gene comprising the nucleic acid sequence SEQ ID NO. 35590, preferably the coding region thereof, conferred the production of or the increase in threonine compared with the wild type control.

[31488] The nucleic acid sequence of B0344 from Escherichia coli, e.g. as shown in the respective line in column 5 of Table I, application no. 4, has been published in B. And the activity of the gene product thereof is the activity of beta-galactosidase.

[31489] Accordingly, in one embodiment, the process of the present invention for producing threonine in a non-human organism, like a microorganism or a plant or a part thereof, comprises increasing or generating the activity of a gene product with the activity of a gene product conferring the activity of “beta-galactosidase”, especially from Escherichia coli or its functional equivalent or its homolog, e.g. the increase of
[31490] (a) a gene product of a gene comprising the nucleic acid molecule as shown in the respective line in column 5 of Table I, application no. 4, preferably the coding region thereof, or a homolog or a fragment thereof, and being depicted in the same respective line as said B0344, or a functional equivalent or a homolog thereof as shown in column 8 of Table I, application no. 4, preferably the coding region thereof, particularly a homolog or functional equivalent as shown in column 8 of Table I B, application no. 4, and being depicted in the same respective line as said B0344, and preferably the activity is increased plastidic, or
[31491] (b) a polypeptide comprising a polypeptide, a consensus sequence or at least a polypeptide motif as shown in the respective line in column 5 of Table II or in column 8 of Table IV, application no. 4, respectively, and being depicted in the same respective line as said B0344, or a functional equivalent or a homolog thereof as depicted in column 8 of Table II, application no. 4, preferably a homolog or functional equivalent as depicted in column 8 of Table II B, application no. 4, and being depicted in the same respective line as said B0344, and preferably the activity is increased plastidic.

[31492] Accordingly, in one embodiment, the molecule which activity is to be increased in the process of the invention is the gene product with an activity as a “beta-galactosidase”, preferably it is the molecule of section (a) or (b) of this paragraph.

[31493] In particular, it was observed that in plants, especially in Arabidopsis thaliana, increasing or generating the activity of a gene product plastidic with the activity of a “beta-galactosidase”, preferably being encoded by a gene comprising the nucleic acid sequence SEQ ID NO. 35733, preferably the coding region thereof, conferred the production of or the increase in threonine compared with the wild type control. The nucleic acid sequence of B0348 from Escherichia coli, e.g. as shown in the respective line in column 5 of Table I, application no. 4, has been published in B. And the activity of the gene product thereof is the activity of 2,3-dihydroxyphenylpropionate 1,2-dioxygenase.

[31494] Accordingly, in one embodiment, the process of the present invention for producing threonine in a non-human organism, like a microorganism or a plant or a part thereof, comprises increasing or generating the activity of a gene product with the activity of a gene product conferring the activity of “2,3-dihydroxyphenylpropionate 1,2-dioxygenase”, especially from Escherichia coli or its functional equivalent or its homolog, e.g. the increase of
[31495] (a) a gene product of a gene comprising the nucleic acid molecule as shown in the respective line in column 5 of Table I, application no. 4, preferably the coding region thereof, or a homolog or a fragment thereof, and being depicted in the same respective line as said B0348, or a functional equivalent or a homolog thereof as shown in column 8 of Table I, application no. 4, preferably the coding region thereof, particularly a homolog or functional equivalent as shown in column 8 of Table I B, application no. 4, and being depicted in the same respective line as said B0348, and preferably the activity is increased plastidic, or
[31496] (b) a polypeptide comprising a polypeptide, a consensus sequence or at least a polypeptide motif as shown in the respective line in column 5 of Table II or in column 8 of Table IV, application no. 4, respectively, and being depicted in the same respective line as said B0348, or a functional equivalent or a homolog thereof as depicted in column 8 of Table II, application no. 4, preferably a homolog or functional equivalent as depicted in column 8 of Table II B, application no. 4, and being depicted in the same respective line as said B0348, and preferably the activity is increased plastidic.

[31497] Accordingly, in one embodiment, the molecule which activity is to be increased in the process of the invention is the gene product with an activity as a “2,3-dihydroxyphenylpropionate 1,2-dioxygenase”, preferably it is the molecule of section (a) or (b) of this paragraph.

[31498] In particular, it was observed that in plants, especially in Arabidopsis thaliana, increasing or generating the activity of a gene product plastidic with the activity of a “2,3-dihydroxyphenylpropionate 1,2-dioxygenase”, preferably being encoded by a gene comprising the nucleic acid sequence SEQ ID NO. 7269, preferably the coding region thereof, conferred the production of or the increase in threonine compared with the wild type control.

[31499] The nucleic acid sequence of B0449 from Escherichia coli, e.g. as shown in the respective line in column 5 of Table I, application no. 4, has been published in B. And the activity of the gene product thereof is the activity of ATP-binding component of a transport system.

[31500] Accordingly, in one embodiment, the process of the present invention for producing threonine in a non-human organism, like a microorganism or a plant or a part thereof, comprises increasing or generating the activity of a gene product with the activity of a gene product conferring the activity of “ATP-binding component of a transport system”, especially from Escherichia coli or its functional equivalent or its homolog, e.g. the increase of
[31501] (a) a gene product of a gene comprising the nucleic acid molecule as shown in the respective line in column 5 of Table I, application no. 4, preferably the coding region thereof, or a homolog or a fragment thereof, and being depicted in the same respective line as said B0449, or a functional equivalent or a homolog thereof as shown in column 8 of Table I, application no. 4, preferably the coding region thereof, particularly a homolog or functional equivalent as shown in column 8 of Table I B, application no. 4, and being depicted in the same respective line as said B0449, and preferably the activity is increased non-targeted, or
[31502] (b) a polypeptide comprising a polypeptide, a consensus sequence or at least a polypeptide motif as shown in the respective line in column 5 of Table II or in column 8 of Table IV, application no. 4, respectively, and being depicted in the same respective line as said B0449, or a functional equivalent or a homolog thereof as depicted in column 8 of Table II, application no. 4, preferably a homolog or functional equivalent as depicted in column 8 of Table II B, application no. 4, and being depicted in the same respective line as said B0449, and preferably the activity is increased non-targeted.

[31503] Accordingly, in one embodiment, the molecule which activity is to be increased in the process of the invention is the gene product with an activity as a “ATP-binding component of a transport system”, preferably it is the molecule of section (a) or (b) of this paragraph.

[31504] In particular, it was observed that in plants, especially in Arabidopsis thaliana, increasing or generating the activity of a gene product non-targeted with the activity of a “ATP-binding component of a transport system”, preferably being encoded by a gene comprising the nucleic acid sequence SEQ ID NO. 7333, preferably the coding region thereof, conferred the production of or the increase in threonine compared with the wild type control.

[31505] The nucleic acid sequence of B0486 from Escherichia coli, e.g. as shown in the respective line in column 5 of Table I, application no. 4, has been published in B. And the activity of the gene product thereof is the activity of membrane transport protein.

[31506] Accordingly, in one embodiment, the process of the present invention for producing threonine in a non-human organism, like a microorganism or a plant or a part thereof, comprises increasing or generating the activity of a gene product with the activity of a gene product conferring the activity of “membrane transport protein”, especially from Escherichia coli or its functional equivalent or its homolog, e.g. the increase of
[31507] (a) a gene product of a gene comprising the nucleic acid molecule as shown in the respective line in column 5 of Table I, application no. 4, preferably the coding region thereof, or a homolog or a fragment thereof, and being depicted in the same respective line as said B0486, or a functional equivalent or a homolog thereof as shown in column 8 of Table I, application no. 4, preferably the coding region thereof, particularly a homolog or functional equivalent as shown in column 8 of Table I B, application no. 4, and being depicted in the same respective line as said B0486, and preferably the activity is increased non-targeted, or
[31508] (b) a polypeptide comprising a polypeptide, a consensus sequence or at least a polypeptide motif as shown in the respective line in column 5 of Table II or in column 8 of Table IV, application no. 4, respectively, and being depicted in the same respective line as said B0486, or a functional equivalent or a homolog thereof as depicted in column 8 of Table II, application no. 4, preferably a homolog or functional equivalent as depicted in column 8 of Table II B, application no. 4, and being depicted in the same respective line as said B0486, and preferably the activity is increased non-targeted.

[31509] Accordingly, in one embodiment, the molecule which activity is to be increased in the process of the invention is the gene product with an activity as a “membrane transport protein”, preferably it is the molecule of section (a) or (b) of this paragraph.

[31510] In particular, it was observed that in plants, especially in Arabidopsis thaliana, increasing or generating the activity of a gene product non-targeted with the activity of a “membrane transport protein”, preferably being encoded by a gene comprising the nucleic acid sequence SEQ ID NO. 7686, preferably the coding region thereof, conferred the production of or the increase in threonine compared with the wild type control.

[31511] The nucleic acid sequence of B0593 from Escherichia coli, e.g. as shown in the respective line in column 5 of Table I, application no. 4, has been published in B. And the activity of the gene product thereof is the activity of isochorismate synthase.

[31512] Accordingly, in one embodiment, the process of the present invention for producing threonine in a non-human organism, like a microorganism or a plant or a part thereof, comprises increasing or generating the activity of a gene product with the activity of a gene product conferring the activity of “isochorismate synthase”, especially from Escherichia coli or its functional equivalent or its homolog, e.g. the increase of
[31513] (a) a gene product of a gene comprising the nucleic acid molecule as shown in the respective line in column 5 of Table I, application no. 4, preferably the coding region thereof, or a homolog or a fragment thereof, and being depicted in the same respective line as said B0593, or a functional equivalent or a homolog thereof as shown in column 8 of Table I, application no. 4, preferably the coding region thereof, particularly a homolog or functional equivalent as shown in column 8 of Table I B, application no. 4, and being depicted in the same respective line as said B0593, and preferably the activity is increased plastidic, or
[31514] (b) a polypeptide comprising a polypeptide, a consensus sequence or at least a polypeptide motif as shown in the respective line in column 5 of Table II or in column 8 of Table IV, application no. 4, respectively, and being depicted in the same respective line as said B0593, or a functional equivalent or a homolog thereof as depicted in column 8 of Table II, application no. 4, preferably a homolog or functional equivalent as depicted in column 8 of Table II B, application no. 4, and being depicted in the same respective line as said B0593, and preferably the activity is increased plastidic.

[31515] Accordingly, in one embodiment, the molecule which activity is to be increased in the process of the invention is the gene product with an activity as a “isochorismate synthase”, preferably it is the molecule of section (a) or (b) of this paragraph.

[31516] In particular, it was observed that in plants, especially in Arabidopsis thaliana, increasing or generating the activity of a gene product plastidic with the activity of a “isochorismate synthase”, preferably being encoded by a gene comprising the nucleic acid sequence SEQ ID NO. 35967, preferably the coding region thereof, conferred the production of or the increase in threonine compared with the wild type control.

[31517] The nucleic acid sequence of B0695 from Escherichia coli, e.g. as shown in the respective line in column 5 of Table I, application no. 4, has been published in B. And the activity of the gene product thereof is the activity of sensor histidine kinase.

[31518] Accordingly, in one embodiment, the process of the present invention for producing threonine in a non-human organism, like a microorganism or a plant or a part thereof, comprises increasing or generating the activity of a gene product with the activity of a gene product conferring the activity of “sensor histidine kinase”, especially from Escherichia coli or its functional equivalent or its homolog, e.g. the increase of
[31519] (a) a gene product of a gene comprising the nucleic acid molecule as shown in the respective line in column 5 of Table I, application no. 4, preferably the coding region thereof, or a homolog or a fragment thereof, and being depicted in the same respective line as said B0695, or a functional equivalent or a homolog thereof as shown in column 8 of Table I, application no. 4, preferably the coding region thereof, particularly a homolog or functional equivalent as shown in column 8 of Table I B, application no. 4, and being depicted in the same respective line as said B0695, and preferably the activity is increased non-targeted, or
[31520] (b) a polypeptide comprising a polypeptide, a consensus sequence or at least a polypeptide motif as shown in the respective line in column 5 of Table II or in column 8 of Table IV, application no. 4, respectively, and being depicted in the same respective line as said B0695, or a functional equivalent or a homolog thereof as depicted in column 8 of Table II, application no. 4, preferably a homolog or functional equivalent as depicted in column 8 of Table II B, application no. 4, and being depicted in the same respective line as said B0695, and preferably the activity is increased non-targeted.

[31521] Accordingly, in one embodiment, the molecule which activity is to be increased in the process of the invention is the gene product with an activity as a “sensor histidine kinase”, preferably it is the molecule of section (a) or (b) of this paragraph.

[31522] In particular, it was observed that in plants, especially in Arabidopsis thaliana, increasing or generating the activity of a gene product non-targeted with the activity of a “sensor histidine kinase”, preferably being encoded by a gene comprising the nucleic acid sequence SEQ ID NO. 93678, preferably the coding region thereof, conferred the production of or the increase in threonine compared with the wild type control.

[31523] The nucleic acid sequence of B0728 from Escherichia coli, e.g. as shown in the respective line in column 5 of Table I, application no. 4, has been published in B. And the activity of the gene product thereof is the activity of succinyl-CoA synthetase beta chain.

[31524] Accordingly, in one embodiment, the process of the present invention for producing threonine in a non-human organism, like a microorganism or a plant or a part thereof, comprises increasing or generating the activity of a gene product with the activity of a gene product conferring the activity of “succinyl-CoA synthetase beta chain”, especially from Escherichia coli or its functional equivalent or its homolog, e.g. the increase of
[31525] (a) a gene product of a gene comprising the nucleic acid molecule as shown in the respective line in column 5 of Table I, application no. 4, preferably the coding region thereof, or a homolog or a fragment thereof, and being depicted in the same respective line as said B0728, or a functional equivalent or a homolog thereof as shown in column 8 of Table I, application no. 4, preferably the coding region thereof, particularly a homolog or functional equivalent as shown in column 8 of Table I B, application no. 4, and being depicted in the same respective line as said B0728, and preferably the activity is increased plastidic, or
[31526] (b) a polypeptide comprising a polypeptide, a consensus sequence or at least a polypeptide motif as shown in the respective line in column 5 of Table II or in column 8 of Table IV, application no. 4, respectively, and being depicted in the same respective line as said B0728, or a functional equivalent or a homolog thereof as depicted in column 8 of Table II, application no. 4, preferably a homolog or functional equivalent as depicted in column 8 of Table II B, application no. 4, and being depicted in the same respective line as said B0728, and preferably the activity is increased plastidic.

[31527] Accordingly, in one embodiment, the molecule which activity is to be increased in the process of the invention is the gene product with an activity as a “succinyl-CoA synthetase beta chain”, preferably it is the molecule of section (a) or (b) of this paragraph.

[31528] In particular, it was observed that in plants, especially in Arabidopsis thaliana, increasing or generating the activity of a gene product plastidic with the activity of a “succinyl-CoA synthetase beta chain”, preferably being encoded by a gene comprising the nucleic acid sequence SEQ ID NO. 93793, preferably the coding region thereof, conferred the production of or the increase in threonine compared with the wild type control.

[31529] The nucleic acid sequence of B0898 from Escherichia coli, e.g. as shown in the respective line in column 5 of Table I, application no. 4, has been published in B. And the activity of the gene product thereof is the activity of major facilitator superfamily transporter protein.

[31530] Accordingly, in one embodiment, the process of the present invention for producing threonine in a non-human organism, like a microorganism or a plant or a part thereof, comprises increasing or generating the activity of a gene product with the activity of a gene product conferring the activity of “major facilitator superfamily transporter protein”, especially from Escherichia coli or its functional equivalent or its homolog, e.g. the increase of
[31531] (a) a gene product of a gene comprising the nucleic acid molecule as shown in the respective line in column 5 of Table I, application no. 4, preferably the coding region thereof, or a homolog or a fragment thereof, and being depicted in the same respective line as said B0898, or a functional equivalent or a homolog thereof as shown in column 8 of Table I, application no. 4, preferably the coding region thereof, particularly a homolog or functional equivalent as shown in column 8 of Table I B, application no. 4, and being depicted in the same respective line as said B0898, and preferably the activity is increased non-targeted, or
[31532] (b) a polypeptide comprising a polypeptide, a consensus sequence or at least a polypeptide motif as shown in the respective line in column 5 of Table II or in column 8 of Table IV, application no. 4, respectively, and being depicted in the same respective line as said B0898, or a functional equivalent or a homolog thereof as depicted in column 8 of Table II, application no. 4, preferably a homolog or functional equivalent as depicted in column 8 of Table II B, application no. 4, and being depicted in the same respective line as said B0898, and preferably the activity is increased non-targeted.

[31533] Accordingly, in one embodiment, the molecule which activity is to be increased in the process of the invention is the gene product with an activity as a “major facilitator superfamily transporter protein”, preferably it is the molecule of section (a) or (b) of this paragraph.

[31534] In particular, it was observed that in plants, especially in Arabidopsis thaliana, increasing or generating the activity of a gene product non-targeted with the activity of a “major facilitator superfamily transporter protein”, preferably being encoded by a gene comprising the nucleic acid sequence SEQ ID NO. 7917, preferably the coding region thereof, conferred the production of or the increase in threonine compared with the wild type control.

[31535] The nucleic acid sequence of B0980 from Escherichia coli, e.g. as shown in the respective line in column 5 of Table I, application no. 4, has been published in B. And the activity of the gene product thereof is the activity of phosphoanhydride phosphorylase.

[31536] Accordingly, in one embodiment, the process of the present invention for producing threonine in a non-human organism, like a microorganism or a plant or a part thereof, comprises increasing or generating the activity of a gene product with the activity of a gene product conferring the activity of “phosphoanhydride phosphorylase”, especially from Escherichia coli or its functional equivalent or its homolog, e.g. the increase of
[31537] (a) a gene product of a gene comprising the nucleic acid molecule as shown in the respective line in column 5 of Table I, application no. 4, preferably the coding region thereof, or a homolog or a fragment thereof, and being depicted in the same respective line as said B0980, or a functional equivalent or a homolog thereof as shown in column 8 of Table I, application no. 4, preferably the coding region thereof, particularly a homolog or functional equivalent as shown in column 8 of Table I B, application no. 4, and being depicted in the same respective line as said B0980, and preferably the activity is increased non-targeted, or
[31538] (b) a polypeptide comprising a polypeptide, a consensus sequence or at least a polypeptide motif as shown in the respective line in column 5 of Table II or in column 8 of Table IV, application no. 4, respectively, and being depicted in the same respective line as said B0980, or a functional equivalent or a homolog thereof as depicted in column 8 of Table II, application no. 4, preferably a homolog or functional equivalent as depicted in column 8 of Table II B, application no. 4, and being depicted in the same respective line as said B0980, and preferably the activity is increased non-targeted.

[31539] Accordingly, in one embodiment, the molecule which activity is to be increased in the process of the invention is the gene product with an activity as a “phosphoanhydride phosphorylase”, preferably it is the molecule of section (a) or (b) of this paragraph.

[31540] In particular, it was observed that in plants, especially in Arabidopsis thaliana, increasing or generating the activity of a gene product non-targeted with the activity of a “phosphoanhydride phosphorylase”, preferably being encoded by a gene comprising the nucleic acid sequence SEQ ID NO. 36809, preferably the coding region thereof, conferred the production of or the increase in threonine compared with the wild type control.

[31541] The nucleic acid sequence of B1003 from Escherichia coli, e.g. as shown in the respective line in column 5 of Table I, application no. 4, has been published in B. And the activity of the gene product thereof is the activity of b1003-protein.

[31542] Accordingly, in one embodiment, the process of the present invention for producing threonine in a non-human organism, like a microorganism or a plant or a part thereof, comprises increasing or generating the activity of a gene product with the activity of a gene product conferring the activity of “b1003-protein”, especially from Escherichia coli or its functional equivalent or its homolog, e.g. the increase of
[31543] (a) a gene product of a gene comprising the nucleic acid molecule as shown in the respective line in column 5 of Table I, application no. 4, preferably the coding region thereof, or a homolog or a fragment thereof, and being depicted in the same respective line as said B1003, or a functional equivalent or a homolog thereof as shown in column 8 of Table I, application no. 4, preferably the coding region thereof, particularly a homolog or functional equivalent as shown in column 8 of Table I B, application no. 4, and being depicted in the same respective line as said B1003, and preferably the activity is increased non-targeted, or
[31544] (b) a polypeptide comprising a polypeptide, a consensus sequence or at least a polypeptide motif as shown in the respective line in column 5 of Table II or in column 8 of Table IV, application no. 4, respectively, and being depicted in the same respective line as said B1003, or a functional equivalent or a homolog thereof as depicted in column 8 of Table II, application no. 4, preferably a homolog or functional equivalent as depicted in column 8 of Table II B, application no. 4, and being depicted in the same respective line as said B1003, and preferably the activity is increased non-targeted.

[31545] Accordingly, in one embodiment, the molecule which activity is to be increased in the process of the invention is the gene product with an activity as a “b1003-protein”, preferably it is the molecule of section (a) or (b) of this paragraph.

[31546] In particular, it was observed that in plants, especially in Arabidopsis thaliana, increasing or generating the activity of a gene product non-targeted with the activity of a “b1003-protein”, preferably being encoded by a gene comprising the nucleic acid sequence SEQ ID NO. 7941, preferably the coding region thereof, conferred the production of or the increase in threonine compared with the wild type control.

[31547] The nucleic acid sequence of B1108 from Escherichia coli, e.g. as shown in the respective line in column 5 of Table I, application no. 4, has been published in B. And the activity of the gene product thereof is the activity of b1108-protein.

[31548] Accordingly, in one embodiment, the process of the present invention for producing threonine in a non-human organism, like a microorganism or a plant or a part thereof, comprises increasing or generating the activity of a gene product with the activity of a gene product conferring the activity of “b1108-protein”, especially from Escherichia coli or its functional equivalent or its homolog, e.g. the increase of
[31549] (a) a gene product of a gene comprising the nucleic acid molecule as shown in the respective line in column 5 of Table I, application no. 4, preferably the coding region thereof, or a homolog or a fragment thereof, and being depicted in the same respective line as said B1108, or a functional equivalent or a homolog thereof as shown in column 8 of Table I, application no. 4, preferably the coding region thereof, particularly a homolog or functional equivalent as shown in column 8 of Table I B, application no. 4, and being depicted in the same respective line as said B1108, and preferably the activity is increased non-targeted, or
[31550] (b) a polypeptide comprising a polypeptide, a consensus sequence or at least a polypeptide motif as shown in the respective line in column 5 of Table II or in column 8 of Table IV, application no. 4, respectively, and being depicted in the same respective line as said B1108, or a functional equivalent or a homolog thereof as depicted in column 8 of Table II, application no. 4, preferably a homolog or functional equivalent as depicted in column 8 of Table II B, application no. 4, and being depicted in the same respective line as said B1108, and preferably the activity is increased non-targeted.

[31551] Accordingly, in one embodiment, the molecule which activity is to be increased in the process of the invention is the gene product with an activity as a “b1108-protein”, preferably it is the molecule of section (a) or (b) of this paragraph.

[31552] In particular, it was observed that in plants, especially in Arabidopsis thaliana, increasing or generating the activity of a gene product non-targeted with the activity of a “b1108-protein”, preferably being encoded by a gene comprising the nucleic acid sequence SEQ ID NO. 36937, preferably the coding region thereof, conferred the production of or the increase in threonine compared with the wild type control.

[31553] The nucleic acid sequence of B1348 from Escherichia coli, e.g. as shown in the respective line in column 5 of Table I, application no. 4, has been published in B. And the activity of the gene product thereof is the activity of restriction alleviation protein.

[31554] Accordingly, in one embodiment, the process of the present invention for producing threonine in a non-human organism, like a microorganism or a plant or a part thereof, comprises increasing or generating the activity of a gene product with the activity of a gene product conferring the activity of “restriction alleviation protein”, especially from Escherichia coli or its functional equivalent or its homolog, e.g. the increase of
[31555] (a) a gene product of a gene comprising the nucleic acid molecule as shown in the respective line in column 5 of Table I, application no. 4, preferably the coding region thereof, or a homolog or a fragment thereof, and being depicted in the same respective line as said B1348, or a functional equivalent or a homolog thereof as shown in column 8 of Table I, application no. 4, preferably the coding region thereof, particularly a homolog or functional equivalent as shown in column 8 of Table I B, application no. 4, and being depicted in the same respective line as said B1348, and preferably the activity is increased non-targeted, or
[31556] (b) a polypeptide comprising a polypeptide, a consensus sequence or at least a polypeptide motif as shown in the respective line in column 5 of Table II or in column 8 of Table IV, application no. 4, respectively, and being depicted in the same respective line as said B1348, or a functional equivalent or a homolog thereof as depicted in column 8 of Table II, application no. 4, preferably a homolog or functional equivalent as depicted in column 8 of Table II B, application no. 4, and being depicted in the same respective line as said B1348, and preferably the activity is increased non-targeted.

[31557] Accordingly, in one embodiment, the molecule which activity is to be increased in the process of the invention is the gene product with an activity as a “restriction alleviation protein”, preferably it is the molecule of section (a) or (b) of this paragraph.

[31558] In particular, it was observed that in plants, especially in Arabidopsis thaliana, increasing or generating the activity of a gene product non-targeted with the activity of a “restriction alleviation protein”, preferably being encoded by a gene comprising the nucleic acid sequence SEQ ID NO. 77768, preferably the coding region thereof, conferred the production of or the increase in threonine compared with the wild type control. The nucleic acid sequence of B1445 from Escherichia coli, e.g. as shown in the respective line in column 5 of Table I, application no. 4, has been published in B. And the activity of the gene product thereof is the activity of b1445-protein.

[31559] Accordingly, in one embodiment, the process of the present invention for producing threonine in a non-human organism, like a microorganism or a plant or a part thereof, comprises increasing or generating the activity of a gene product with the activity of a gene product conferring the activity of “b1445-protein”, especially from Escherichia coli or its functional equivalent or its homolog, e.g. the increase of
[31560] (a) a gene product of a gene comprising the nucleic acid molecule as shown in the respective line in column 5 of Table I, application no. 4, preferably the coding region thereof, or a homolog or a fragment thereof, and being depicted in the same respective line as said B1445, or a functional equivalent or a homolog thereof as shown in column 8 of Table I, application no. 4, preferably the coding region thereof, particularly a homolog or functional equivalent as shown in column 8 of Table I B, application no. 4, and being depicted in the same respective line as said B1445, and preferably the activity is increased non-targeted, or
[31561] (b) a polypeptide comprising a polypeptide, a consensus sequence or at least a polypeptide motif as shown in the respective line in column 5 of Table II or in column 8 of Table IV, application no. 4, respectively, and being depicted in the same respective line as said B1445, or a functional equivalent or a homolog thereof as depicted in column 8 of Table II, application no. 4, preferably a homolog or functional equivalent as depicted in column 8 of Table II B, application no. 4, and being depicted in the same respective line as said B1445, and preferably the activity is increased non-targeted.

[31562] Accordingly, in one embodiment, the molecule which activity is to be increased in the process of the invention is the gene product with an activity as a “b1445-protein”, preferably it is the molecule of section (a) or (b) of this paragraph.

[31563] In particular, it was observed that in plants, especially in Arabidopsis thaliana, increasing or generating the activity of a gene product non-targeted with the activity of a “b1445-protein”, preferably being encoded by a gene comprising the nucleic acid sequence SEQ ID NO. 38289, preferably the coding region thereof, conferred the production of or the increase in threonine compared with the wild type control.

[31564] The nucleic acid sequence of B1479 from Escherichia coli, e.g. as shown in the respective line in column 5 of Table I, application no. 4, has been published in B. And the activity of the gene product thereof is the activity of NADP-dependent malic enzyme.

[31565] Accordingly, in one embodiment, the process of the present invention for producing threonine in a non-human organism, like a microorganism or a plant or a part thereof, comprises increasing or generating the activity of a gene product with the activity of a gene product conferring the activity of “NADP-dependent malic enzyme”, especially from Escherichia coli or its functional equivalent or its homolog, e.g. the increase of
[31566] (a) a gene product of a gene comprising the nucleic acid molecule as shown in the respective line in column 5 of Table I, application no. 4, preferably the coding region thereof, or a homolog or a fragment thereof, and being depicted in the same respective line as said B1479, or a functional equivalent or a homolog thereof as shown in column 8 of Table I, application no. 4, preferably the coding region thereof, particularly a homolog or functional equivalent as shown in column 8 of Table I B, application no. 4, and being depicted in the same respective line as said B1479, and preferably the activity is increased non-targeted, or
[31567] (b) a polypeptide comprising a polypeptide, a consensus sequence or at least a polypeptide motif as shown in the respective line in column 5 of Table II or in column 8 of Table IV, application no. 4, respectively, and being depicted in the same respective line as said B1479, or a functional equivalent or a homolog thereof as depicted in column 8 of Table II, application no. 4, preferably a homolog or functional equivalent as depicted in column 8 of Table II B, application no. 4, and being depicted in the same respective line as said B1479, and preferably the activity is increased non-targeted.

[31568] Accordingly, in one embodiment, the molecule which activity is to be increased in the process of the invention is the gene product with an activity as a “NADP-dependent malic enzyme”, preferably it is the molecule of section (a) or (b) of this paragraph.

[31569] In particular, it was observed that in plants, especially in Arabidopsis thaliana, increasing or generating the activity of a gene product non-targeted with the activity of a “NADP-dependent malic enzyme”, preferably being encoded by a gene comprising the nucleic acid sequence SEQ ID NO. 77774, preferably the coding region thereof, conferred the production of or the increase in threonine compared with the wild type control.

[31570] The nucleic acid sequence of B1522 from Escherichia coli, e.g. as shown in the respective line in column 5 of Table I, application no. 4, has been published in B. And the activity of the gene product thereof is the activity of b1522-protein.

[31571] Accordingly, in one embodiment, the process of the present invention for producing threonine in a non-human organism, like a microorganism or a plant or a part thereof, comprises increasing or generating the activity of a gene product with the activity of a gene product conferring the activity of “b1522-protein”, especially from Escherichia coli or its functional equivalent or its homolog, e.g. the increase of
[31572] (a) a gene product of a gene comprising the nucleic acid molecule as shown in the respective line in column 5 of Table I, application no. 4, preferably the coding region thereof, or a homolog or a fragment thereof, and being depicted in the same respective line as said B1522, or a functional equivalent or a homolog thereof as shown in column 8 of Table I, application no. 4, preferably the coding region thereof, particularly a homolog or functional equivalent as shown in column 8 of Table I B, application no. 4, and being depicted in the same respective line as said B1522, and preferably the activity is increased non-targeted, or
[31573] (b) a polypeptide comprising a polypeptide, a consensus sequence or at least a polypeptide motif as shown in the respective line in column 5 of Table II or in column 8 of Table IV, application no. 4, respectively, and being depicted in the same respective line as said B1522, or a functional equivalent or a homolog thereof as depicted in column 8 of Table II, application no. 4, preferably a homolog or functional equivalent as depicted in column 8 of Table II B, application no. 4, and being depicted in the same respective line as said B1522, and preferably the activity is increased non-targeted.

[31574] Accordingly, in one embodiment, the molecule which activity is to be increased in the process of the invention is the gene product with an activity as a “b1522-protein”, preferably it is the molecule of section (a) or (b) of this paragraph.

[31575] In particular, it was observed that in plants, especially in Arabidopsis thaliana, increasing or generating the activity of a gene product non-targeted with the activity of a “b1522-protein”, preferably being encoded by a gene comprising the nucleic acid sequence SEQ ID NO. 7947, preferably the coding region thereof, conferred the production of or the increase in threonine compared with the wild type control.

[31576] The nucleic acid sequence of B1670 from Escherichia coli, e.g. as shown in the respective line in column 5 of Table I, application no. 4, has been published in B. And the activity of the gene product thereof is the activity of b1670-protein.

[31577] Accordingly, in one embodiment, the process of the present invention for producing threonine in a non-human organism, like a microorganism or a plant or a part thereof, comprises increasing or generating the activity of a gene product with the activity of a gene product conferring the activity of “b1670-protein”, especially from Escherichia coli or its functional equivalent or its homolog, e.g. the increase of
[31578] (a) a gene product of a gene comprising the nucleic acid molecule as shown in the respective line in column 5 of Table I, application no. 4, preferably the coding region thereof, or a homolog or a fragment thereof, and being depicted in the same respective line as said B1670, or a functional equivalent or a homolog thereof as shown in column 8 of Table I, application no. 4, preferably the coding region thereof, particularly a homolog or functional equivalent as shown in column 8 of Table I B, application no. 4, and being depicted in the same respective line as said B1670, and preferably the activity is increased non-targeted, or
[31579] (b) a polypeptide comprising a polypeptide, a consensus sequence or at least a polypeptide motif as shown in the respective line in column 5 of Table II or in column 8 of Table IV, application no. 4, respectively, and being depicted in the same respective line as said B1670, or a functional equivalent or a homolog thereof as depicted in column 8 of Table II, application no. 4, preferably a homolog or functional equivalent as depicted in column 8 of Table II B, application no. 4, and being depicted in the same respective line as said B1670, and preferably the activity is increased non-targeted.

[31580] Accordingly, in one embodiment, the molecule which activity is to be increased in the process of the invention is the gene product with an activity as a “b1670-protein”, preferably it is the molecule of section (a) or (b) of this paragraph.

[31581] In particular, it was observed that in plants, especially in Arabidopsis thaliana, increasing or generating the activity of a gene product non-targeted with the activity of a “b1670-protein”, preferably being encoded by a gene comprising the nucleic acid sequence SEQ ID NO. 78753, preferably the coding region thereof, conferred the production of or the increase in threonine compared with the wild type control.

[31582] The nucleic acid sequence of B1854 from Escherichia coli, e.g. as shown in the respective line in column 5 of Table I, application no. 4, has been published in B. And the activity of the gene product thereof is the activity of pyruvate kinase.

[31583] Accordingly, in one embodiment, the process of the present invention for producing threonine in a non-human organism, like a microorganism or a plant or a part thereof, comprises increasing or generating the activity of a gene product with the activity of a gene product conferring the activity of “pyruvate kinase”, especially from Escherichia coli or its functional equivalent or its homolog, e.g. the increase of
[31584] (a) a gene product of a gene comprising the nucleic acid molecule as shown in the respective line in column 5 of Table I, application no. 4, preferably the coding region thereof, or a homolog or a fragment thereof, and being depicted in the same respective line as said B1854, or a functional equivalent or a homolog thereof as shown in column 8 of Table I, application no. 4, preferably the coding region thereof, particularly a homolog or functional equivalent as shown in column 8 of Table I B, application no. 4, and being depicted in the same respective line as said B1854, and preferably the activity is increased plastidic, or
[31585] (b) a polypeptide comprising a polypeptide, a consensus sequence or at least a polypeptide motif as shown in the respective line in column 5 of Table II or in column 8 of Table IV, application no. 4, respectively, and being depicted in the same respective line as said B1854, or a functional equivalent or a homolog thereof as depicted in column 8 of Table II, application no. 4, preferably a homolog or functional equivalent as depicted in column 8 of Table II B, application no. 4, and being depicted in the same respective line as said B1854, and preferably the activity is increased plastidic.

[31586] Accordingly, in one embodiment, the molecule which activity is to be increased in the process of the invention is the gene product with an activity as a “pyruvate kinase”, preferably it is the molecule of section (a) or (b) of this paragraph.

[31587] In particular, it was observed that in plants, especially in Arabidopsis thaliana, increasing or generating the activity of a gene product plastidic with the activity of a “pyruvate kinase”, preferably being encoded by a gene comprising the nucleic acid sequence SEQ ID NO. 8363, preferably the coding region thereof, conferred the production of or the increase in threonine compared with the wild type control.

[31588] The nucleic acid sequence of B1930 from Escherichia coli, e.g. as shown in the respective line in column 5 of Table I, application no. 4, has been published in B. And the activity of the gene product thereof is the activity of b1930-protein.

[31589] Accordingly, in one embodiment, the process of the present invention for producing threonine in a non-human organism, like a microorganism or a plant or a part thereof, comprises increasing or generating the activity of a gene product with the activity of a gene product conferring the activity of “b1930-protein”, especially from Escherichia coli or its functional equivalent or its homolog, e.g. the increase of
[31590] (a) a gene product of a gene comprising the nucleic acid molecule as shown in the respective line in column 5 of Table I, application no. 4, preferably the coding region thereof, or a homolog or a fragment thereof, and being depicted in the same respective line as said B1930, or a functional equivalent or a homolog thereof as shown in column 8 of Table I, application no. 4, preferably the coding region thereof, particularly a homolog or functional equivalent as shown in column 8 of Table I B, application no. 4, and being depicted in the same respective line as said B1930, and preferably the activity is increased non-targeted, or
[31591] (b) a polypeptide comprising a polypeptide, a consensus sequence or at least a polypeptide motif as shown in the respective line in column 5 of Table II or in column 8 of Table IV, application no. 4, respectively, and being depicted in the same respective line as said B1930, or a functional equivalent or a homolog thereof as depicted in column 8 of Table II, application no. 4, preferably a homolog or functional equivalent as depicted in column 8 of Table II B, application no. 4, and being depicted in the same respective line as said B1930, and preferably the activity is increased non-targeted.

[31592] Accordingly, in one embodiment, the molecule which activity is to be increased in the process of the invention is the gene product with an activity as a “b1930-protein”, preferably it is the molecule of section (a) or (b) of this paragraph.

[31593] In particular, it was observed that in plants, especially in Arabidopsis thaliana, increasing or generating the activity of a gene product non-targeted with the activity of a “b1930-protein”, preferably being encoded by a gene comprising the nucleic acid sequence SEQ ID NO. 79181, preferably the coding region thereof, conferred the production of or the increase in threonine compared with the wild type control.

[31594] The nucleic acid sequence of B2063 from Escherichia coli, e.g. as shown in the respective line in column 5 of Table I, application no. 4, has been published in B. And the activity of the gene product thereof is the activity of transport protein.

[31595] Accordingly, in one embodiment, the process of the present invention for producing threonine in a non-human organism, like a microorganism or a plant or a part thereof, comprises increasing or generating the activity of a gene product with the activity of a gene product conferring the activity of “transport protein”, especially from Escherichia coli or its functional equivalent or its homolog, e.g. the increase of
[31596] (a) a gene product of a gene comprising the nucleic acid molecule as shown in the respective line in column 5 of Table I, application no. 4, preferably the coding region thereof, or a homolog or a fragment thereof, and being depicted in the same respective line as said B2063, or a functional equivalent or a homolog thereof as shown in column 8 of Table I, application no. 4, preferably the coding region thereof, particularly a homolog or functional equivalent as shown in column 8 of Table I B, application no. 4, and being depicted in the same respective line as said B2063, and preferably the activity is increased non-targeted, or
[31597] (b) a polypeptide comprising a polypeptide, a consensus sequence or at least a polypeptide motif as shown in the respective line in column 5 of Table II or in column 8 of Table IV, application no. 4, respectively, and being depicted in the same respective line as said B2063, or a functional equivalent or a homolog thereof as depicted in column 8 of Table II, application no. 4, preferably a homolog or functional equivalent as depicted in column 8 of Table II B, application no. 4, and being depicted in the same respective line as said B2063, and preferably the activity is increased non-targeted.

[31598] Accordingly, in one embodiment, the molecule which activity is to be increased in the process of the invention is the gene product with an activity as a “transport protein”, preferably it is the molecule of section (a) or (b) of this paragraph.

[31599] In particular, it was observed that in plants, especially in Arabidopsis thaliana, increasing or generating the activity of a gene product non-targeted with the activity of a “transport protein”, preferably being encoded by a gene comprising the nucleic acid sequence SEQ ID NO. 38947, preferably the coding region thereof, conferred the production of or the increase in threonine compared with the wild type control.

[31600] The nucleic acid sequence of B2360 from Escherichia coli, e.g. as shown in the respective line in column 5 of Table I, application no. 4, has been published in B. And the activity of the gene product thereof is the activity of b2360-protein.

[31601] Accordingly, in one embodiment, the process of the present invention for producing threonine in a non-human organism, like a microorganism or a plant or a part thereof, comprises increasing or generating the activity of a gene product with the activity of a gene product conferring the activity of “b2360-protein”, especially from Escherichia coli or its functional equivalent or its homolog, e.g. the increase of
[31602] (a) a gene product of a gene comprising the nucleic acid molecule as shown in the respective line in column 5 of Table I, application no. 4, preferably the coding region thereof, or a homolog or a fragment thereof, and being depicted in the same respective line as said B2360, or a functional equivalent or a homolog thereof as shown in column 8 of Table I, application no. 4, preferably the coding region thereof, particularly a homolog or functional equivalent as shown in column 8 of Table I B, application no. 4, and being depicted in the same respective line as said B2360, and preferably the activity is increased non-targeted, or
[31603] (b) a polypeptide comprising a polypeptide, a consensus sequence or at least a polypeptide motif as shown in the respective line in column 5 of Table II or in column 8 of Table IV, application no. 4, respectively, and being depicted in the same respective line as said B2360, or a functional equivalent or a homolog thereof as depicted in column 8 of Table II, application no. 4, preferably a homolog or functional equivalent as depicted in column 8 of Table II B, application no. 4, and being depicted in the same respective line as said B2360, and preferably the activity is increased non-targeted.

[31604] Accordingly, in one embodiment, the molecule which activity is to be increased in the process of the invention is the gene product with an activity as a “b2360-protein”, preferably it is the molecule of section (a) or (b) of this paragraph.

[31605] In particular, it was observed that in plants, especially in Arabidopsis thaliana, increasing or generating the activity of a gene product non-targeted with the activity of a “b2360-protein”, preferably being encoded by a gene comprising the nucleic acid sequence SEQ ID NO. 39219, preferably the coding region thereof, conferred the production of or the increase in threonine compared with the wild type control.

[31606] The nucleic acid sequence of B2366 from Escherichia coli, e.g. as shown in the respective line in column 5 of Table I, application no. 4, has been published in B. And the activity of the gene product thereof is the activity of D-serine dehydratase.

[31607] Accordingly, in one embodiment, the process of the present invention for producing threonine in a non-human organism, like a microorganism or a plant or a part thereof, comprises increasing or generating the activity of a gene product with the activity of a gene product conferring the activity of “D-serine dehydratase”, especially from Escherichia coli or its functional equivalent or its homolog, e.g. the increase of
[31608] (a) a gene product of a gene comprising the nucleic acid molecule as shown in the respective line in column 5 of Table I, application no. 4, preferably the coding region thereof, or a homolog or a fragment thereof, and being depicted in the same respective line as said B2366, or a functional equivalent or a homolog thereof as shown in column 8 of Table I, application no. 4, preferably the coding region thereof, particularly a homolog or functional equivalent as shown in column 8 of Table I B, application no. 4, and being depicted in the same respective line as said B2366, and preferably the activity is increased plastidic, or
[31609] (b) a polypeptide comprising a polypeptide, a consensus sequence or at least a polypeptide motif as shown in the respective line in column 5 of Table II or in column 8 of Table IV, application no. 4, respectively, and being depicted in the same respective line as said B2366, or a functional equivalent or a homolog thereof as depicted in column 8 of Table II, application no. 4, preferably a homolog or functional equivalent as depicted in column 8 of Table II B, application no. 4, and being depicted in the same respective line as said B2366, and preferably the activity is increased plastidic.

[31610] Accordingly, in one embodiment, the molecule which activity is to be increased in the process of the invention is the gene product with an activity as a “D-serine dehydratase”, preferably it is the molecule of section (a) or (b) of this paragraph.

[31611] In particular, it was observed that in plants, especially in Arabidopsis thaliana, increasing or generating the activity of a gene product plastidic with the activity of a “D-serine dehydratase”, preferably being encoded by a gene comprising the nucleic acid sequence SEQ ID NO. 79342, preferably the coding region thereof, conferred the production of or the increase in threonine compared with the wild type control.

[31612] The nucleic acid sequence of B2399 from Escherichia coli, e.g. as shown in the respective line in column 5 of Table I, application no. 4, has been published in B. And the activity of the gene product thereof is the activity of b2399-protein.

[31613] Accordingly, in one embodiment, the process of the present invention for producing threonine in a non-human organism, like a microorganism or a plant or a part thereof, comprises increasing or generating the activity of a gene product with the activity of a gene product conferring the activity of “b2399-protein”, especially from Escherichia coli or its functional equivalent or its homolog, e.g. the increase of
[31614] (a) a gene product of a gene comprising the nucleic acid molecule as shown in the respective line in column 5 of Table I, application no. 4, preferably the coding region thereof, or a homolog or a fragment thereof, and being depicted in the same respective line as said B2399, or a functional equivalent or a homolog thereof as shown in column 8 of Table I, application no. 4, preferably the coding region thereof, particularly a homolog or functional equivalent as shown in column 8 of Table I B, application no. 4, and being depicted in the same respective line as said B2399, and preferably the activity is increased non-targeted, or
[31615] (b) a polypeptide comprising a polypeptide, a consensus sequence or at least a polypeptide motif as shown in the respective line in column 5 of Table II or in column 8 of Table IV, application no. 4, respectively, and being depicted in the same respective line as said B2399, or a functional equivalent or a homolog thereof as depicted in column 8 of Table II, application no. 4, preferably a homolog or functional equivalent as depicted in column 8 of Table II B, application no. 4, and being depicted in the same respective line as said B2399, and preferably the activity is increased non-targeted.

[31616] Accordingly, in one embodiment, the molecule which activity is to be increased in the process of the invention is the gene product with an activity as a “b2399-protein”, preferably it is the molecule of section (a) or (b) of this paragraph.

[31617] In particular, it was observed that in plants, especially in Arabidopsis thaliana, increasing or generating the activity of a gene product non-targeted with the activity of a “b2399-protein”, preferably being encoded by a gene comprising the nucleic acid sequence SEQ ID NO. 39237, preferably the coding region thereof, conferred the production of or the increase in threonine compared with the wild type control.

[31618] The nucleic acid sequence of B2405 from Escherichia coli, e.g. as shown in the respective line in column 5 of Table I, application no. 4, has been published in B. And the activity of the gene product thereof is the activity of transcriptional regulator.

[31619] Accordingly, in one embodiment, the process of the present invention for producing threonine in a non-human organism, like a microorganism or a plant or a part thereof, comprises increasing or generating the activity of a gene product with the activity of a gene product conferring the activity of “transcriptional regulator”, especially from Escherichia coli or its functional equivalent or its homolog, e.g. the increase of
[31620] (a) a gene product of a gene comprising the nucleic acid molecule as shown in the respective line in column 5 of Table I, application no. 4, preferably the coding region thereof, or a homolog or a fragment thereof, and being depicted in the same respective line as said B2405, or a functional equivalent or a homolog thereof as shown in column 8 of Table I, application no. 4, preferably the coding region thereof, particularly a homolog or functional equivalent as shown in column 8 of Table I B, application no. 4, and being depicted in the same respective line as said B2405, and preferably the activity is increased non-targeted, or
[31621] (b) a polypeptide comprising a polypeptide, a consensus sequence or at least a polypeptide motif as shown in the respective line in column 5 of Table II or in column 8 of Table IV, application no. 4, respectively, and being depicted in the same respective line as said B2405, or a functional equivalent or a homolog thereof as depicted in column 8 of Table II, application no. 4, preferably a homolog or functional equivalent as depicted in column 8 of Table II B, application no. 4, and being depicted in the same respective line as said B2405, and preferably the activity is increased non-targeted.

[31622] Accordingly, in one embodiment, the molecule which activity is to be increased in the process of the invention is the gene product with an activity as a “transcriptional regulator”, preferably it is the molecule of section (a) or (b) of this paragraph.

[31623] In particular, it was observed that in plants, especially in Arabidopsis thaliana, increasing or generating the activity of a gene product non-targeted with the activity of a “transcriptional regulator”, preferably being encoded by a gene comprising the nucleic acid sequence SEQ ID NO. 39255, preferably the coding region thereof, conferred the production of or the increase in threonine compared with the wild type control.

[31624] The nucleic acid sequence of B2513 from Escherichia coli, e.g. as shown in the respective line in column 5 of Table I, application no. 4, has been published in B. And the activity of the gene product thereof is the activity of b2513-protein.

[31625] Accordingly, in one embodiment, the process of the present invention for producing threonine in a non-human organism, like a microorganism or a plant or a part thereof, comprises increasing or generating the activity of a gene product with the activity of a gene product conferring the activity of “b2513-protein”, especially from Escherichia coli or its functional equivalent or its homolog, e.g. the increase of
[31626] (a) a gene product of a gene comprising the nucleic acid molecule as shown in the respective line in column 5 of Table I, application no. 4, preferably the coding region thereof, or a homolog or a fragment thereof, and being depicted in the same respective line as said B2513, or a functional equivalent or a homolog thereof as shown in column 8 of Table I, application no. 4, preferably the coding region thereof, particularly a homolog or functional equivalent as shown in column 8 of Table I B, application no. 4, and being depicted in the same respective line as said B2513, and preferably the activity is increased non-targeted, or
[31627] (b) a polypeptide comprising a polypeptide, a consensus sequence or at least a polypeptide motif as shown in the respective line in column 5 of Table II or in column 8 of Table IV, application no. 4, respectively, and being depicted in the same respective line as said B2513, or a functional equivalent or a homolog thereof as depicted in column 8 of Table II, application no. 4, preferably a homolog or functional equivalent as depicted in column 8 of Table II B, application no. 4, and being depicted in the same respective line as said B2513, and preferably the activity is increased non-targeted.

[31628] Accordingly, in one embodiment, the molecule which activity is to be increased in the process of the invention is the gene product with an activity as a “b2513-protein”, preferably it is the molecule of section (a) or (b) of this paragraph.

[31629] In particular, it was observed that in plants, especially in Arabidopsis thaliana, increasing or generating the activity of a gene product non-targeted with the activity of a “b2513-protein”, preferably being encoded by a gene comprising the nucleic acid sequence SEQ ID NO. 9167, preferably the coding region thereof, conferred the production of or the increase in threonine compared with the wild type control.

[31630] The nucleic acid sequence of B2613 from Escherichia coli, e.g. as shown in the respective line in column 5 of Table I, application no. 4, has been published in B. And the activity of the gene product thereof is the activity of b2613-protein.

[31631] Accordingly, in one embodiment, the process of the present invention for producing threonine in a non-human organism, like a microorganism or a plant or a part thereof, comprises increasing or generating the activity of a gene product with the activity of a gene product conferring the activity of “b2613-protein”, especially from Escherichia coli or its functional equivalent or its homolog, e.g. the increase of
[31632] (a) a gene product of a gene comprising the nucleic acid molecule as shown in the respective line in column 5 of Table I, application no. 4, preferably the coding region thereof, or a homolog or a fragment thereof, and being depicted in the same respective line as said B2613, or a functional equivalent or a homolog thereof as shown in column 8 of Table I, application no. 4, preferably the coding region thereof, particularly a homolog or functional equivalent as shown in column 8 of Table I B, application no. 4, and being depicted in the same respective line as said B2613, and preferably the activity is increased non-targeted, or
[31633] (b) a polypeptide comprising a polypeptide, a consensus sequence or at least a polypeptide motif as shown in the respective line in column 5 of Table II or in column 8 of Table IV, application no. 4, respectively, and being depicted in the same respective line as said B2613, or a functional equivalent or a homolog thereof as depicted in column 8 of Table II, application no. 4, preferably a homolog or functional equivalent as depicted in column 8 of Table II B, application no. 4, and being depicted in the same respective line as said B2613, and preferably the activity is increased non-targeted.

[31634] Accordingly, in one embodiment, the molecule which activity is to be increased in the process of the invention is the gene product with an activity as a “b2613-protein”, preferably it is the molecule of section (a) or (b) of this paragraph.

[31635] In particular, it was observed that in plants, especially in Arabidopsis thaliana, increasing or generating the activity of a gene product non-targeted with the activity of a “b2613-protein”, preferably being encoded by a gene comprising the nucleic acid sequence SEQ ID NO. 40665, preferably the coding region thereof, conferred the production of or the increase in threonine compared with the wild type control.

[31636] The nucleic acid sequence of B2701 from Escherichia coli, e.g. as shown in the respective line in column 5 of Table I, application no. 4, has been published in B. And the activity of the gene product thereof is the activity of murein transglycosylase.

[31637] Accordingly, in one embodiment, the process of the present invention for producing threonine in a non-human organism, like a microorganism or a plant or a part thereof, comprises increasing or generating the activity of a gene product with the activity of a gene product conferring the activity of “murein transglycosylase”, especially from Escherichia coli or its functional equivalent or its homolog, e.g. the increase of
[31638] (a) a gene product of a gene comprising the nucleic acid molecule as shown in the respective line in column 5 of Table I, application no. 4, preferably the coding region thereof, or a homolog or a fragment thereof, and being depicted in the same respective line as said B2701, or a functional equivalent or a homolog thereof as shown in column 8 of Table I, application no. 4, preferably the coding region thereof, particularly a homolog or functional equivalent as shown in column 8 of Table I B, application no. 4, and being depicted in the same respective line as said B2701, and preferably the activity is increased non-targeted, or
[31639] (b) a polypeptide comprising a polypeptide, a consensus sequence or at least a polypeptide motif as shown in the respective line in column 5 of Table II or in column 8 of Table IV, application no. 4, respectively, and being depicted in the same respective line as said B2701, or a functional equivalent or a homolog thereof as depicted in column 8 of Table II, application no. 4, preferably a homolog or functional equivalent as depicted in column 8 of Table II B, application no. 4, and being depicted in the same respective line as said B2701, and preferably the activity is increased non-targeted.

[31640] Accordingly, in one embodiment, the molecule which activity is to be increased in the process of the invention is the gene product with an activity as a “murein transglycosylase”, preferably it is the molecule of section (a) or (b) of this paragraph.

[31641] In particular, it was observed that in plants, especially in Arabidopsis thaliana, increasing or generating the activity of a gene product non-targeted with the activity of a “murein transglycosylase”, preferably being encoded by a gene comprising the nucleic acid sequence SEQ ID NO. 80756, preferably the coding region thereof, conferred the production of or the increase in threonine compared with the wild type control.

[31642] The nucleic acid sequence of B2714 from Escherichia coli, e.g. as shown in the respective line in column 5 of Table I, application no. 4, has been published in B. And the activity of the gene product thereof is the activity of transcriptional regulator.

[31643] Accordingly, in one embodiment, the process of the present invention for producing threonine in a non-human organism, like a microorganism or a plant or a part thereof, comprises increasing or generating the activity of a gene product with the activity of a gene product conferring the activity of “transcriptional regulator”, especially from Escherichia coli or its functional equivalent or its homolog, e.g. the increase of
[31644] (a) a gene product of a gene comprising the nucleic acid molecule as shown in the respective line in column 5 of Table I, application no. 4, preferably the coding region thereof, or a homolog or a fragment thereof, and being depicted in the same respective line as said B2714, or a functional equivalent or a homolog thereof as shown in column 8 of Table I, application no. 4, preferably the coding region thereof, particularly a homolog or functional equivalent as shown in column 8 of Table I B, application no. 4, and being depicted in the same respective line as said B2714, and preferably the activity is increased non-targeted, or
[31645] (b) a polypeptide comprising a polypeptide, a consensus sequence or at least a polypeptide motif as shown in the respective line in column 5 of Table II or in column 8 of Table IV, application no. 4, respectively, and being depicted in the same respective line as said B2714, or a functional equivalent or a homolog thereof as depicted in column 8 of Table II, application no. 4, preferably a homolog or functional equivalent as depicted in column 8 of Table II B, application no. 4, and being depicted in the same respective line as said B2714, and preferably the activity is increased non-targeted.

[31646] Accordingly, in one embodiment, the molecule which activity is to be increased in the process of the invention is the gene product with an activity as a “transcriptional regulator”, preferably it is the molecule of section (a) or (b) of this paragraph.

[31647] In particular, it was observed that in plants, especially in Arabidopsis thaliana, increasing or generating the activity of a gene product non-targeted with the activity of a “transcriptional regulator”, preferably being encoded by a gene comprising the nucleic acid sequence SEQ ID NO. 40741, preferably the coding region thereof, conferred the production of or the increase in threonine compared with the wild type control.

[31648] The nucleic acid sequence of B2739 from Escherichia coli, e.g. as shown in the respective line in column 5 of Table I, application no. 4, has been published in B. And the activity of the gene product thereof is the activity of b2739-protein.

[31649] Accordingly, in one embodiment, the process of the present invention for producing threonine in a non-human organism, like a microorganism or a plant or a part thereof, comprises increasing or generating the activity of a gene product with the activity of a gene product conferring the activity of “b2739-protein”, especially from Escherichia coli or its functional equivalent or its homolog, e.g. the increase of
[31650] (a) a gene product of a gene comprising the nucleic acid molecule as shown in the respective line in column 5 of Table I, application no. 4, preferably the coding region thereof, or a homolog or a fragment thereof, and being depicted in the same respective line as said B2739, or a functional equivalent or a homolog thereof as shown in column 8 of Table I, application no. 4, preferably the coding region thereof, particularly a homolog or functional equivalent as shown in column 8 of Table I B, application no. 4, and being depicted in the same respective line as said B2739, and preferably the activity is increased non-targeted, or
[31651] (b) a polypeptide comprising a polypeptide, a consensus sequence or at least a polypeptide motif as shown in the respective line in column 5 of Table II or in column 8 of Table IV, application no. 4, respectively, and being depicted in the same respective line as said B2739, or a functional equivalent or a homolog thereof as depicted in column 8 of Table II, application no. 4, preferably a homolog or functional equivalent as depicted in column 8 of Table II B, application no. 4, and being depicted in the same respective line as said B2739, and preferably the activity is increased non-targeted.

[31652] Accordingly, in one embodiment, the molecule which activity is to be increased in the process of the invention is the gene product with an activity as a “b2739-protein”, preferably it is the molecule of section (a) or (b) of this paragraph.

[31653] In particular, it was observed that in plants, especially in Arabidopsis thaliana, increasing or generating the activity of a gene product non-targeted with the activity of a “b2739-protein”, preferably being encoded by a gene comprising the nucleic acid sequence SEQ ID NO. 80906, preferably the coding region thereof, conferred the production of or the increase in threonine compared with the wild type control.

[31654] The nucleic acid sequence of B2747 from Escherichia coli, e.g. as shown in the respective line in column 5 of Table I, application no. 4, has been published in B. And the activity of the gene product thereof is the activity of 2-C-methyl-D-erythritol 4-phosphate cytidylyltransferase.

[31655] Accordingly, in one embodiment, the process of the present invention for producing threonine in a non-human organism, like a microorganism or a plant or a part thereof, comprises increasing or generating the activity of a gene product with the activity of a gene product conferring the activity of “2-C-methyl-D-erythritol 4-phosphate cytidylyltransferase”, especially from Escherichia coli or its functional equivalent or its homolog, e.g. the increase of
[31656] (a) a gene product of a gene comprising the nucleic acid molecule as shown in the respective line in column 5 of Table I, application no. 4, preferably the coding region thereof, or a homolog or a fragment thereof, and being depicted in the same respective line as said B2747, or a functional equivalent or a homolog thereof as shown in column 8 of Table I, application no. 4, preferably the coding region thereof, particularly a homolog or functional equivalent as shown in column 8 of Table I B, application no. 4, and being depicted in the same respective line as said B2747, and preferably the activity is increased non-targeted, or
[31657] (b) a polypeptide comprising a polypeptide, a consensus sequence or at least a polypeptide motif as shown in the respective line in column 5 of Table II or in column 8 of Table IV, application no. 4, respectively, and being depicted in the same respective line as said B2747, or a functional equivalent or a homolog thereof as depicted in column 8 of Table II, application no. 4, preferably a homolog or functional equivalent as depicted in column 8 of Table II B, application no. 4, and being depicted in the same respective line as said B2747, and preferably the activity is increased non-targeted.

[31658] Accordingly, in one embodiment, the molecule which activity is to be increased in the process of the invention is the gene product with an activity as a “2-C-methyl-D-erythritol 4-phosphate cytidylyltransferase”, preferably it is the molecule of section (a) or (b) of this paragraph.

[31659] In particular, it was observed that in plants, especially in Arabidopsis thaliana, increasing or generating the activity of a gene product non-targeted with the activity of a “2-C-methyl-Derythritol 4-phosphate cytidylyltransferase”, preferably being encoded by a gene comprising the nucleic acid sequence SEQ ID NO. 81075, preferably the coding region thereof, conferred the production of or the increase in threonine compared with the wild type control.

[31660] The nucleic acid sequence of B2812 from Escherichia coli, e.g. as shown in the respective line in column 5 of Table I, application no. 4, has been published in B. And the activity of the gene product thereof is the activity of b2812-protein.

[31661] Accordingly, in one embodiment, the process of the present invention for producing threonine in a non-human organism, like a microorganism or a plant or a part thereof, comprises increasing or generating the activity of a gene product with the activity of a gene product conferring the activity of “b2812-protein”, especially from Escherichia coli or its functional equivalent or its homolog, e.g. the increase of
[31662] (a) a gene product of a gene comprising the nucleic acid molecule as shown in the respective line in column 5 of Table I, application no. 4, preferably the coding region thereof, or a homolog or a fragment thereof, and being depicted in the same respective line as said B2812, or a functional equivalent or a homolog thereof as shown in column 8 of Table I, application no. 4, preferably the coding region thereof, particularly a homolog or functional equivalent as shown in column 8 of Table I B, application no. 4, and being depicted in the same respective line as said B2812, and preferably the activity is increased plastidic, or
[31663] (b) a polypeptide comprising a polypeptide, a consensus sequence or at least a polypeptide motif as shown in the respective line in column 5 of Table II or in column 8 of Table IV, application no. 4, respectively, and being depicted in the same respective line as said B2812, or a functional equivalent or a homolog thereof as depicted in column 8 of Table II, application no. 4, preferably a homolog or functional equivalent as depicted in column 8 of Table II B, application no. 4, and being depicted in the same respective line as said B2812, and preferably the activity is increased plastidic.

[31664] Accordingly, in one embodiment, the molecule which activity is to be increased in the process of the invention is the gene product with an activity as a “b2812-protein”, preferably it is the molecule of section (a) or (b) of this paragraph.

[31665] In particular, it was observed that in plants, especially in Arabidopsis thaliana, increasing or generating the activity of a gene product plastidic with the activity of a “b2812-protein”, preferably being encoded by a gene comprising the nucleic acid sequence SEQ ID NO. 40795, preferably the coding region thereof, conferred the production of or the increase in threonine compared with the wild type control.

[31666] The nucleic acid sequence of B2812 from Escherichia coli, e.g. as shown in the respective line in column 5 of Table I, application no. 4, has been published in B. And the activity of the gene product thereof is the activity of b2812-protein.

[31667] Accordingly, in one embodiment, the process of the present invention for producing threonine in a non-human organism, like a microorganism or a plant or a part thereof, comprises increasing or generating the activity of a gene product with the activity of a gene product conferring the activity of “b2812-protein”, especially from Escherichia coli or its functional equivalent or its homolog, e.g. the increase of
[31668] (a) a gene product of a gene comprising the nucleic acid molecule as shown in the respective line in column 5 of Table I, application no. 4, preferably the coding region thereof, or a homolog or a fragment thereof, and being depicted in the same respective line as said B2812, or a functional equivalent or a homolog thereof as shown in column 8 of Table I, application no. 4, preferably the coding region thereof, particularly a homolog or functional equivalent as shown in column 8 of Table I B, application no. 4, and being depicted in the same respective line as said B2812, and preferably the activity is increased non-targeted, or
[31669] (b) a polypeptide comprising a polypeptide, a consensus sequence or at least a polypeptide motif as shown in the respective line in column 5 of Table II or in column 8 of Table IV, application no. 4, respectively, and being depicted in the same respective line as said B2812, or a functional equivalent or a homolog thereof as depicted in column 8 of Table II, application no. 4, preferably a homolog or functional equivalent as depicted in column 8 of Table II B, application no. 4, and being depicted in the same respective line as said B2812, and preferably the activity is increased non-targeted.

[31670] Accordingly, in one embodiment, the molecule which activity is to be increased in the process of the invention is the gene product with an activity as a “b2812-protein”, preferably it is the molecule of section (a) or (b) of this paragraph.

[31671] In particular, it was observed that in plants, especially in Arabidopsis thaliana, increasing or generating the activity of a gene product non-targeted with the activity of a “b2812-protein”, preferably being encoded by a gene comprising the nucleic acid sequence SEQ ID NO. 40795, preferably the coding region thereof, conferred the production of or the increase in threonine compared with the wild type control.

[31672] The nucleic acid sequence of B2913 from Escherichia coli, e.g. as shown in the respective line in column 5 of Table I, application no. 4, has been published in B. And the activity of the gene product thereof is the activity of D-3-phosphoglycerate dehydrogenase.

[31673] Accordingly, in one embodiment, the process of the present invention for producing threonine in a non-human organism, like a microorganism or a plant or a part thereof, comprises increasing or generating the activity of a gene product with the activity of a gene product conferring the activity of “D-3-phosphoglycerate dehydrogenase”, especially from Escherichia coli or its functional equivalent or its homolog, e.g. the increase of
[31674] (a) a gene product of a gene comprising the nucleic acid molecule as shown in the respective line in column 5 of Table I, application no. 4, preferably the coding region thereof, or a homolog or a fragment thereof, and being depicted in the same respective line as said B2913, or a functional equivalent or a homolog thereof as shown in column 8 of Table I, application no. 4, preferably the coding region thereof, particularly a homolog or functional equivalent as shown in column 8 of Table I B, application no. 4, and being depicted in the same respective line as said B2913, and preferably the activity is increased plastidic, or
[31675] (b) a polypeptide comprising a polypeptide, a consensus sequence or at least a polypeptide motif as shown in the respective line in column 5 of Table II or in column 8 of Table IV, application no. 4, respectively, and being depicted in the same respective line as said B2913, or a functional equivalent or a homolog thereof as depicted in column 8 of Table II, application no. 4, preferably a homolog or functional equivalent as depicted in column 8 of Table II B, application no. 4, and being depicted in the same respective line as said B2913, and preferably the activity is increased plastidic.

[31676] Accordingly, in one embodiment, the molecule which activity is to be increased in the process of the invention is the gene product with an activity as a “D-3-phosphoglycerate dehydrogenase”, preferably it is the molecule of section (a) or (b) of this paragraph.

[31677] In particular, it was observed that in plants, especially in Arabidopsis thaliana, increasing or generating the activity of a gene product plastidic with the activity of a “D-3-phosphoglycerate dehydrogenase”, preferably being encoded by a gene comprising the nucleic acid sequence SEQ ID NO. 81988, preferably the coding region thereof, conferred the production of or the increase in threonine compared with the wild type control.

[31678] The nucleic acid sequence of B2957 from Escherichia coli, e.g. as shown in the respective line in column 5 of Table I, application no. 4, has been published in B. And the activity of the gene product thereof is the activity of L-asparaginase.

[31679] Accordingly, in one embodiment, the process of the present invention for producing threonine in a non-human organism, like a microorganism or a plant or a part thereof, comprises increasing or generating the activity of a gene product with the activity of a gene product conferring the activity of “L-asparaginase”, especially from Escherichia coli or its functional equivalent or its homolog, e.g. the increase of
[31680] (a) a gene product of a gene comprising the nucleic acid molecule as shown in the respective line in column 5 of Table I, application no. 4, preferably the coding region thereof, or a homolog or a fragment thereof, and being depicted in the same respective line as said B2957, or a functional equivalent or a homolog thereof as shown in column 8 of Table I, application no. 4, preferably the coding region thereof, particularly a homolog or functional equivalent as shown in column 8 of Table I B, application no. 4, and being depicted in the same respective line as said B2957, and preferably the activity is increased non-targeted, or
[31681] (b) a polypeptide comprising a polypeptide, a consensus sequence or at least a polypeptide motif as shown in the respective line in column 5 of Table II or in column 8 of Table IV, application no. 4, respectively, and being depicted in the same respective line as said B2957, or a functional equivalent or a homolog thereof as depicted in column 8 of Table II, application no. 4, preferably a homolog or functional equivalent as depicted in column 8 of Table II B, application no. 4, and being depicted in the same respective line as said B2957, and preferably the activity is increased non-targeted.

[31682] Accordingly, in one embodiment, the molecule which activity is to be increased in the process of the invention is the gene product with an activity as a “L-asparaginase”, preferably it is the molecule of section (a) or (b) of this paragraph.

[31683] In particular, it was observed that in plants, especially in Arabidopsis thaliana, increasing or generating the activity of a gene product non-targeted with the activity of a “L-asparaginase”, preferably being encoded by a gene comprising the nucleic acid sequence SEQ ID NO. 41499, preferably the coding region thereof, conferred the production of or the increase in threonine compared with the wild type control.

[31684] The nucleic acid sequence of B3064 from Escherichia coli, e.g. as shown in the respective line in column 5 of Table I, application no. 4, has been published in B. And the activity of the gene product thereof is the activity of glycoprotease.

[31685] Accordingly, in one embodiment, the process of the present invention for producing threonine in a non-human organism, like a microorganism or a plant or a part thereof, comprises increasing or generating the activity of a gene product with the activity of a gene product conferring the activity of “glycoprotease”, especially from Escherichia coli or its functional equivalent or its homolog, e.g. the increase of
[31686] (a) a gene product of a gene comprising the nucleic acid molecule as shown in the respective line in column 5 of Table I, application no. 4, preferably the coding region thereof, or a homolog or a fragment thereof, and being depicted in the same respective line as said B3064, or a functional equivalent or a homolog thereof as shown in column 8 of Table I, application no. 4, preferably the coding region thereof, particularly a homolog or functional equivalent as shown in column 8 of Table I B, application no. 4, and being depicted in the same respective line as said B3064, and preferably the activity is increased non-targeted, or
[31687] (b) a polypeptide comprising a polypeptide, a consensus sequence or at least a polypeptide motif as shown in the respective line in column 5 of Table II or in column 8 of Table IV, application no. 4, respectively, and being depicted in the same respective line as said B3064, or a functional equivalent or a homolog thereof as depicted in column 8 of Table II, application no. 4, preferably a homolog or functional equivalent as depicted in column 8 of Table II B, application no. 4, and being depicted in the same respective line as said B3064, and preferably the activity is increased non-targeted.

[31688] Accordingly, in one embodiment, the molecule which activity is to be increased in the process of the invention is the gene product with an activity as a “glycoprotease”, preferably it is the molecule of section (a) or (b) of this paragraph.

[31689] In particular, it was observed that in plants, especially in Arabidopsis thaliana, increasing or generating the activity of a gene product non-targeted with the activity of a “glycoprotease”, preferably being encoded by a gene comprising the nucleic acid sequence SEQ ID NO. 42046, preferably the coding region thereof, conferred the production of or the increase in threonine compared with the wild type control.

[31690] The nucleic acid sequence of B3083 from Escherichia coli, e.g. as shown in the respective line in column 5 of Table I, application no. 4, has been published in B. And the activity of the gene product thereof is the activity of b3083-protein.

[31691] Accordingly, in one embodiment, the process of the present invention for producing threonine in a non-human organism, like a microorganism or a plant or a part thereof, comprises increasing or generating the activity of a gene product with the activity of a gene product conferring the activity of “b3083-protein”, especially from Escherichia coli or its functional equivalent or its homolog, e.g. the increase of
[31692] (a) a gene product of a gene comprising the nucleic acid molecule as shown in the respective line in column 5 of Table I, application no. 4, preferably the coding region thereof, or a homolog or a fragment thereof, and being depicted in the same respective line as said B3083, or a functional equivalent or a homolog thereof as shown in column 8 of Table I, application no. 4, preferably the coding region thereof, particularly a homolog or functional equivalent as shown in column 8 of Table I B, application no. 4, and being depicted in the same respective line as said B3083, and preferably the activity is increased non-targeted, or
[31693] (b) a polypeptide comprising a polypeptide, a consensus sequence or at least a polypeptide motif as shown in the respective line in column 5 of Table II or in column 8 of Table IV, application no. 4, respectively, and being depicted in the same respective line as said B3083, or a functional equivalent or a homolog thereof as depicted in column 8 of Table II, application no. 4, preferably a homolog or functional equivalent as depicted in column 8 of Table II B, application no. 4, and being depicted in the same respective line as said B3083, and preferably the activity is increased non-targeted.

[31694] Accordingly, in one embodiment, the molecule which activity is to be increased in the process of the invention is the gene product with an activity as a “b3083-protein”, preferably it is the molecule of section (a) or (b) of this paragraph.

[31695] In particular, it was observed that in plants, especially in Arabidopsis thaliana, increasing or generating the activity of a gene product non-targeted with the activity of a “b3083-protein”, preferably being encoded by a gene comprising the nucleic acid sequence SEQ ID NO. 82424, preferably the coding region thereof, conferred the production of or the increase in threonine compared with the wild type control.

[31696] The nucleic acid sequence of B3262 from Escherichia coli, e.g. as shown in the respective line in column 5 of Table I, application no. 4, has been published in B. And the activity of the gene product thereof is the activity of methyltransferase.

[31697] Accordingly, in one embodiment, the process of the present invention for producing threonine in a non-human organism, like a microorganism or a plant or a part thereof, comprises increasing or generating the activity of a gene product with the activity of a gene product conferring the activity of “methyltransferase”, especially from Escherichia coli or its functional equivalent or its homolog, e.g. the increase of
[31698] (a) a gene product of a gene comprising the nucleic acid molecule as shown in the respective line in column 5 of Table I, application no. 4, preferably the coding region thereof, or a homolog or a fragment thereof, and being depicted in the same respective line as said B3262, or a functional equivalent or a homolog thereof as shown in column 8 of Table I, application no. 4, preferably the coding region thereof, particularly a homolog or functional equivalent as shown in column 8 of Table I B, application no. 4, and being depicted in the same respective line as said B3262, and preferably the activity is increased non-targeted, or
[31699] (b) a polypeptide comprising a polypeptide, a consensus sequence or at least a polypeptide motif as shown in the respective line in column 5 of Table II or in column 8 of Table IV, application no. 4, respectively, and being depicted in the same respective line as said B3262, or a functional equivalent or a homolog thereof as depicted in column 8 of Table II, application no. 4, preferably a homolog or functional equivalent as depicted in column 8 of Table II B, application no. 4, and being depicted in the same respective line as said B3262, and preferably the activity is increased non-targeted.

[31700] Accordingly, in one embodiment, the molecule which activity is to be increased in the process of the invention is the gene product with an activity as a “methyltransferase”, preferably it is the molecule of section (a) or (b) of this paragraph.

[31701] In particular, it was observed that in plants, especially in Arabidopsis thaliana, increasing or generating the activity of a gene product non-targeted with the activity of a “methyltransferase”, preferably being encoded by a gene comprising the nucleic acid sequence SEQ ID NO. 42502, preferably the coding region thereof, conferred the production of or the increase in threonine compared with the wild type control.

[31702] The nucleic acid sequence of B3429 from Escherichia coli, e.g. as shown in the respective line in column 5 of Table I, application no. 4, has been published in B. And the activity of the gene product thereof is the activity of glycogen synthase.

[31703] Accordingly, in one embodiment, the process of the present invention for producing threonine in a non-human organism, like a microorganism or a plant or a part thereof, comprises increasing or generating the activity of a gene product with the activity of a gene product conferring the activity of “glycogen synthase”, especially from Escherichia coli or its functional equivalent or its homolog, e.g. the increase of
[31704] (a) a gene product of a gene comprising the nucleic acid molecule as shown in the respective line in column 5 of Table I, application no. 4, preferably the coding region thereof, or a homolog or a fragment thereof, and being depicted in the same respective line as said B3429, or a functional equivalent or a homolog thereof as shown in column 8 of Table I, application no. 4, preferably the coding region thereof, particularly a homolog or functional equivalent as shown in column 8 of Table I B, application no. 4, and being depicted in the same respective line as said B3429, and preferably the activity is increased mitochondrial, or
[31705] (b) a polypeptide comprising a polypeptide, a consensus sequence or at least a polypeptide motif as shown in the respective line in column 5 of Table II or in column 8 of Table IV, application no. 4, respectively, and being depicted in the same respective line as said B3429, or a functional equivalent or a homolog thereof as depicted in column 8 of Table II, application no. 4, preferably a homolog or functional equivalent as depicted in column 8 of Table II B, application no. 4, and being depicted in the same respective line as said B3429, and preferably the activity is increased mitochondrial.

[31706] Accordingly, in one embodiment, the molecule which activity is to be increased in the process of the invention is the gene product with an activity as a “glycogen synthase”, preferably it is the molecule of section (a) or (b) of this paragraph.

[31707] In particular, it was observed that in plants, especially in Arabidopsis thaliana, increasing or generating the activity of a gene product mitochondrial with the activity of a “glycogen synthase”, preferably being encoded by a gene comprising the nucleic acid sequence SEQ ID NO. 94051, preferably the coding region thereof, conferred the production of or the increase in threonine compared with the wild type control.

[31708] The nucleic acid sequence of B3442 from Escherichia coli, e.g. as shown in the respective line in column 5 of Table I, application no. 4, has been published in B. And the activity of the gene product thereof is the activity of b3442-protein.

[31709] Accordingly, in one embodiment, the process of the present invention for producing threonine in a non-human organism, like a microorganism or a plant or a part thereof, comprises increasing or generating the activity of a gene product with the activity of a gene product conferring the activity of “b3442-protein”, especially from Escherichia coli or its functional equivalent or its homolog, e.g. the increase of
[31710] (a) a gene product of a gene comprising the nucleic acid molecule as shown in the respective line in column 5 of Table I, application no. 4, preferably the coding region thereof, or a homolog or a fragment thereof, and being depicted in the same respective line as said B3442, or a functional equivalent or a homolog thereof as shown in column 8 of Table I, application no. 4, preferably the coding region thereof, particularly a homolog or functional equivalent as shown in column 8 of Table I B, application no. 4, and being depicted in the same respective line as said B3442, and preferably the activity is increased non-targeted, or
[31711] (b) a polypeptide comprising a polypeptide, a consensus sequence or at least a polypeptide motif as shown in the respective line in column 5 of Table II or in column 8 of Table IV, application no. 4, respectively, and being depicted in the same respective line as said B3442, or a functional equivalent or a homolog thereof as depicted in column 8 of Table II, application no. 4, preferably a homolog or functional equivalent as depicted in column 8 of Table II B, application no. 4, and being depicted in the same respective line as said B3442, and preferably the activity is increased non-targeted.

[31712] Accordingly, in one embodiment, the molecule which activity is to be increased in the process of the invention is the gene product with an activity as a “b3442-protein”, preferably it is the molecule of section (a) or (b) of this paragraph.

[31713] In particular, it was observed that in plants, especially in Arabidopsis thaliana, increasing or generating the activity of a gene product non-targeted with the activity of a “b3442-protein”, preferably being encoded by a gene comprising the nucleic acid sequence SEQ ID NO. 94380, preferably the coding region thereof, conferred the production of or the increase in threonine compared with the wild type control.

[31714] The nucleic acid sequence of B3572 from Escherichia coli, e.g. as shown in the respective line in column 5 of Table I, application no. 4, has been published in B. And the activity of the gene product thereof is the activity of valine-pyruvate transaminase.

[31715] Accordingly, in one embodiment, the process of the present invention for producing threonine in a non-human organism, like a microorganism or a plant or a part thereof, comprises increasing or generating the activity of a gene product with the activity of a gene product conferring the activity of “valine-pyruvate transaminase”, especially from Escherichia coli or its functional equivalent or its homolog, e.g. the increase of
[31716] (a) a gene product of a gene comprising the nucleic acid molecule as shown in the respective line in column 5 of Table I, application no. 4, preferably the coding region thereof, or a homolog or a fragment thereof, and being depicted in the same respective line as said B3572, or a functional equivalent or a homolog thereof as shown in column 8 of Table I, application no. 4, preferably the coding region thereof, particularly a homolog or functional equivalent as shown in column 8 of Table I B, application no. 4, and being depicted in the same respective line as said B3572, and preferably the activity is increased plastidic, or
[31717] (b) a polypeptide comprising a polypeptide, a consensus sequence or at least a polypeptide motif as shown in the respective line in column 5 of Table II or in column 8 of Table IV, application no. 4, respectively, and being depicted in the same respective line as said B3572, or a functional equivalent or a homolog thereof as depicted in column 8 of Table II, application no. 4, preferably a homolog or functional equivalent as depicted in column 8 of Table II B, application no. 4, and being depicted in the same respective line as said B3572, and preferably the activity is increased plastidic.

[31718] Accordingly, in one embodiment, the molecule which activity is to be increased in the process of the invention is the gene product with an activity as a “valine-pyruvate transaminase”, preferably it is the molecule of section (a) or (b) of this paragraph.

[31719] In particular, it was observed that in plants, especially in Arabidopsis thaliana, increasing or generating the activity of a gene product plastidic with the activity of a “valine-pyruvate transaminase”, preferably being encoded by a gene comprising the nucleic acid sequence SEQ ID NO. 10172, preferably the coding region thereof, conferred the production of or the increase in threonine compared with the wild type control.

[31720] The nucleic acid sequence of B3646 from Escherichia coli, e.g. as shown in the respective line in column 5 of Table I, application no. 4, has been published in B. And the activity of the gene product thereof is the activity of b3646-protein.

[31721] Accordingly, in one embodiment, the process of the present invention for producing threonine in a non-human organism, like a microorganism or a plant or a part thereof, comprises increasing or generating the activity of a gene product with the activity of a gene product conferring the activity of “b3646-protein”, especially from Escherichia coli or its functional equivalent or its homolog, e.g. the increase of
[31722] (a) a gene product of a gene comprising the nucleic acid molecule as shown in the respective line in column 5 of Table I, application no. 4, preferably the coding region thereof, or a homolog or a fragment thereof, and being depicted in the same respective line as said B3646, or a functional equivalent or a homolog thereof as shown in column 8 of Table I, application no. 4, preferably the coding region thereof, particularly a homolog or functional equivalent as shown in column 8 of Table I B, application no. 4, and being depicted in the same respective line as said B3646, and preferably the activity is increased non-targeted, or
[31723] (b) a polypeptide comprising a polypeptide, a consensus sequence or at least a polypeptide motif as shown in the respective line in column 5 of Table II or in column 8 of Table IV, application no. 4, respectively, and being depicted in the same respective line as said B3646, or a functional equivalent or a homolog thereof as depicted in column 8 of Table II, application no. 4, preferably a homolog or functional equivalent as depicted in column 8 of Table II B, application no. 4, and being depicted in the same respective line as said B3646, and preferably the activity is increased non-targeted.

[31724] Accordingly, in one embodiment, the molecule which activity is to be increased in the process of the invention is the gene product with an activity as a “b3646-protein”, preferably it is the molecule of section (a) or (b) of this paragraph.

[31725] In particular, it was observed that in plants, especially in Arabidopsis thaliana, increasing or generating the activity of a gene product non-targeted with the activity of a “b3646-protein”, preferably being encoded by a gene comprising the nucleic acid sequence SEQ ID NO. 83429, preferably the coding region thereof, conferred the production of or the increase in threonine compared with the wild type control.

[31726] The nucleic acid sequence of B3732 from Escherichia coli, e.g. as shown in the respective line in column 5 of Table I, application no. 4, has been published in B. And the activity of the gene product thereof is the activity of ATP synthase subunit beta.

[31727] Accordingly, in one embodiment, the process of the present invention for producing threonine in a non-human organism, like a microorganism or a plant or a part thereof, comprises increasing or generating the activity of a gene product with the activity of a gene product conferring the activity of “ATP synthase subunit beta”, especially from Escherichia coli or its functional equivalent or its homolog, e.g. the increase of
[31728] (a) a gene product of a gene comprising the nucleic acid molecule as shown in the respective line in column 5 of Table I, application no. 4, preferably the coding region thereof, or a homolog or a fragment thereof, and being depicted in the same respective line as said B3732, or a functional equivalent or a homolog thereof as shown in column 8 of Table I, application no. 4, preferably the coding region thereof, particularly a homolog or functional equivalent as shown in column 8 of Table I B, application no. 4, and being depicted in the same respective line as said B3732, and preferably the activity is increased non-targeted, or
[31729] (b) a polypeptide comprising a polypeptide, a consensus sequence or at least a polypeptide motif as shown in the respective line in column 5 of Table II or in column 8 of Table IV, application no. 4, respectively, and being depicted in the same respective line as said B3732, or a functional equivalent or a homolog thereof as depicted in column 8 of Table II, application no. 4, preferably a homolog or functional equivalent as depicted in column 8 of Table II B, application no. 4, and being depicted in the same respective line as said B3732, and preferably the activity is increased non-targeted.

[31730] Accordingly, in one embodiment, the molecule which activity is to be increased in the process of the invention is the gene product with an activity as a “ATP synthase subunit beta”, preferably it is the molecule of section (a) or (b) of this paragraph.

[31731] In particular, it was observed that in plants, especially in Arabidopsis thaliana, increasing or generating the activity of a gene product non-targeted with the activity of a “ATP synthase subunit beta”, preferably being encoded by a gene comprising the nucleic acid sequence SEQ ID NO. 43248, preferably the coding region thereof, conferred the production of or the increase in threonine compared with the wild type control.

[31732] The nucleic acid sequence of B3771 from Escherichia coli, e.g. as shown in the respective line in column 5 of Table I, application no. 4, has been published in B. And the activity of the gene product thereof is the activity of dihydroxyacid dehydratase.

[31733] Accordingly, in one embodiment, the process of the present invention for producing threonine in a non-human organism, like a microorganism or a plant or a part thereof, comprises increasing or generating the activity of a gene product with the activity of a gene product conferring the activity of “dihydroxyacid dehydratase”, especially from Escherichia coli or its functional equivalent or its homolog, e.g. the increase of
[31734] (a) a gene product of a gene comprising the nucleic acid molecule as shown in the respective line in column 5 of Table I, application no. 4, preferably the coding region thereof, or a homolog or a fragment thereof, and being depicted in the same respective line as said B3771, or a functional equivalent or a homolog thereof as shown in column 8 of Table I, application no. 4, preferably the coding region thereof, particularly a homolog or functional equivalent as shown in column 8 of Table I B, application no. 4, and being depicted in the same respective line as said B3771, and preferably the activity is increased non-targeted, or
[31735] (b) a polypeptide comprising a polypeptide, a consensus sequence or at least a polypeptide motif as shown in the respective line in column 5 of Table II or in column 8 of Table IV, application no. 4, respectively, and being depicted in the same respective line as said B3771, or a functional equivalent or a homolog thereof as depicted in column 8 of Table II, application no. 4, preferably a homolog or functional equivalent as depicted in column 8 of Table II B, application no. 4, and being depicted in the same respective line as said B3771, and preferably the activity is increased non-targeted.

[31736] Accordingly, in one embodiment, the molecule which activity is to be increased in the process of the invention is the gene product with an activity as a “dihydroxyacid dehydratase”, preferably it is the molecule of section (a) or (b) of this paragraph.

[31737] In particular, it was observed that in plants, especially in Arabidopsis thaliana, increasing or generating the activity of a gene product non-targeted with the activity of a “dihydroxyacid dehydratase”, preferably being encoded by a gene comprising the nucleic acid sequence SEQ ID NO. 10252, preferably the coding region thereof, conferred the production of or the increase in threonine compared with the wild type control.

[31738] The nucleic acid sequence of B3774 from Escherichia coli, e.g. as shown in the respective line in column 5 of Table I, application no. 4, has been published in B. And the activity of the gene product thereof is the activity of ketol-acid reductoisomerase.

[31739] Accordingly, in one embodiment, the process of the present invention for producing threonine in a non-human organism, like a microorganism or a plant or a part thereof, comprises increasing or generating the activity of a gene product with the activity of a gene product conferring the activity of “ketol-acid reductoisomerase”, especially from Escherichia coli or its functional equivalent or its homolog, e.g. the increase of
[31740] (a) a gene product of a gene comprising the nucleic acid molecule as shown in the respective line in column 5 of Table I, application no. 4, preferably the coding region thereof, or a homolog or a fragment thereof, and being depicted in the same respective line as said B3774, or a functional equivalent or a homolog thereof as shown in column 8 of Table I, application no. 4, preferably the coding region thereof, particularly a homolog or functional equivalent as shown in column 8 of Table I B, application no. 4, and being depicted in the same respective line as said B3774, and preferably the activity is increased non-targeted, or
[31741] (b) a polypeptide comprising a polypeptide, a consensus sequence or at least a polypeptide motif as shown in the respective line in column 5 of Table II or in column 8 of Table IV, application no. 4, respectively, and being depicted in the same respective line as said B3774, or a functional equivalent or a homolog thereof as depicted in column 8 of Table II, application no. 4, preferably a homolog or functional equivalent as depicted in column 8 of Table II B, application no. 4, and being depicted in the same respective line as said B3774, and preferably the activity is increased non-targeted.

[31742] Accordingly, in one embodiment, the molecule which activity is to be increased in the process of the invention is the gene product with an activity as a “ketol-acid reductoisomerase”, preferably it is the molecule of section (a) or (b) of this paragraph.

[31743] In particular, it was observed that in plants, especially in Arabidopsis thaliana, increasing or generating the activity of a gene product non-targeted with the activity of a “ketol-acid reductoisomerase”, preferably being encoded by a gene comprising the nucleic acid sequence SEQ ID NO. 94386, preferably the coding region thereof, conferred the production of or the increase in threonine compared with the wild type control.

[31744] The nucleic acid sequence of B3793 from Escherichia coli, e.g. as shown in the respective line in column 5 of Table I, application no. 4, has been published in B. And the activity of the gene product thereof is the activity of enterobacterial common antigen polymerase.

[31745] Accordingly, in one embodiment, the process of the present invention for producing threonine in a non-human organism, like a microorganism or a plant or a part thereof, comprises increasing or generating the activity of a gene product with the activity of a gene product conferring the activity of “enterobacterial common antigen polymerase”, especially from Escherichia coli or its functional equivalent or its homolog, e.g. the increase of
[31746] (a) a gene product of a gene comprising the nucleic acid molecule as shown in the respective line in column 5 of Table I, application no. 4, preferably the coding region thereof, or a homolog or a fragment thereof, and being depicted in the same respective line as said B3793, or a functional equivalent or a homolog thereof as shown in column 8 of Table I, application no. 4, preferably the coding region thereof, particularly a homolog or functional equivalent as shown in column 8 of Table I B, application no. 4, and being depicted in the same respective line as said B3793, and preferably the activity is increased non-targeted, or
[31747] (b) a polypeptide comprising a polypeptide, a consensus sequence or at least a polypeptide motif as shown in the respective line in column 5 of Table II or in column 8 of Table IV, application no. 4, respectively, and being depicted in the same respective line as said B3793, or a functional equivalent or a homolog thereof as depicted in column 8 of Table II, application no. 4, preferably a homolog or functional equivalent as depicted in column 8 of Table II B, application no. 4, and being depicted in the same respective line as said B3793, and preferably the activity is increased non-targeted.

[31748] Accordingly, in one embodiment, the molecule which activity is to be increased in the process of the invention is the gene product with an activity as a “enterobacterial common antigen polymerase”, preferably it is the molecule of section (a) or (b) of this paragraph.

[31749] In particular, it was observed that in plants, especially in Arabidopsis thaliana, increasing or generating the activity of a gene product non-targeted with the activity of a “enterobacterial common antigen polymerase”, preferably being encoded by a gene comprising the nucleic acid sequence SEQ ID NO. 43800, preferably the coding region thereof, conferred the production of or the increase in threonine compared with the wild type control.

[31750] The nucleic acid sequence of B3813 from Escherichia coli, e.g. as shown in the respective line in column 5 of Table I, application no. 4, has been published in B. And the activity of the gene product thereof is the activity of DNA helicase II.

[31751] Accordingly, in one embodiment, the process of the present invention for producing threonine in a non-human organism, like a microorganism or a plant or a part thereof, comprises increasing or generating the activity of a gene product with the activity of a gene product conferring the activity of “DNA helicase II”, especially from Escherichia coli or its functional equivalent or its homolog, e.g. the increase of
[31752] (a) a gene product of a gene comprising the nucleic acid molecule as shown in the respective line in column 5 of Table I, application no. 4, preferably the coding region thereof, or a homolog or a fragment thereof, and being depicted in the same respective line as said B3813, or a functional equivalent or a homolog thereof as shown in column 8 of Table I, application no. 4, preferably the coding region thereof, particularly a homolog or functional equivalent as shown in column 8 of Table I B, application no. 4, and being depicted in the same respective line as said B3813, and preferably the activity is increased non-targeted, or
[31753] (b) a polypeptide comprising a polypeptide, a consensus sequence or at least a polypeptide motif as shown in the respective line in column 5 of Table II or in column 8 of Table IV, application no. 4, respectively, and being depicted in the same respective line as said B3813, or a functional equivalent or a homolog thereof as depicted in column 8 of Table II, application no. 4, preferably a homolog or functional equivalent as depicted in column 8 of Table II B, application no. 4, and being depicted in the same respective line as said B3813, and preferably the activity is increased non-targeted.

[31754] Accordingly, in one embodiment, the molecule which activity is to be increased in the process of the invention is the gene product with an activity as a “DNA helicase II”, preferably it is the molecule of section (a) or (b) of this paragraph.

[31755] In particular, it was observed that in plants, especially in Arabidopsis thaliana, increasing or generating the activity of a gene product non-targeted with the activity of a “DNA helicase II”, preferably being encoded by a gene comprising the nucleic acid sequence SEQ ID NO. 43839, preferably the coding region thereof, conferred the production of or the increase in threonine compared with the wild type control.

[31756] The nucleic acid sequence of B3872 from Escherichia coli, e.g. as shown in the respective line in column 5 of Table I, application no. 4, has been published in B. And the activity of the gene product thereof is the activity of transcriptional regulator.

[31757] Accordingly, in one embodiment, the process of the present invention for producing threonine in a non-human organism, like a microorganism or a plant or a part thereof, comprises increasing or generating the activity of a gene product with the activity of a gene product conferring the activity of “transcriptional regulator”, especially from Escherichia coli or its functional equivalent or its homolog, e.g. the increase of
[31758] (a) a gene product of a gene comprising the nucleic acid molecule as shown in the respective line in column 5 of Table I, application no. 4, preferably the coding region thereof, or a homolog or a fragment thereof, and being depicted in the same respective line as said B3872, or a functional equivalent or a homolog thereof as shown in column 8 of Table I, application no. 4, preferably the coding region thereof, particularly a homolog or functional equivalent as shown in column 8 of Table I B, application no. 4, and being depicted in the same respective line as said B3872, and preferably the activity is increased non-targeted, or
[31759] (b) a polypeptide comprising a polypeptide, a consensus sequence or at least a polypeptide motif as shown in the respective line in column 5 of Table II or in column 8 of Table IV, application no. 4, respectively, and being depicted in the same respective line as said B3872, or a functional equivalent or a homolog thereof as depicted in column 8 of Table II, application no. 4, preferably a homolog or functional equivalent as depicted in column 8 of Table II B, application no. 4, and being depicted in the same respective line as said B3872, and preferably the activity is increased non-targeted.

[31760] Accordingly, in one embodiment, the molecule which activity is to be increased in the process of the invention is the gene product with an activity as a “transcriptional regulator”, preferably it is the molecule of section (a) or (b) of this paragraph.

[31761] In particular, it was observed that in plants, especially in Arabidopsis thaliana, increasing or generating the activity of a gene product non-targeted with the activity of a “transcriptional regulator”, preferably being encoded by a gene comprising the nucleic acid sequence SEQ ID NO. 83821, preferably the coding region thereof, conferred the production of or the increase in threonine compared with the wild type control.

[31762] The nucleic acid sequence of B3989 from Escherichia coli, e.g. as shown in the respective line in column 5 of Table I, application no. 4, has been published in B. And the activity of the gene product thereof is the activity of b3989-protein.

[31763] Accordingly, in one embodiment, the process of the present invention for producing threonine in a non-human organism, like a microorganism or a plant or a part thereof, comprises increasing or generating the activity of a gene product with the activity of a gene product conferring the activity of “b3989-protein”, especially from Escherichia coli or its functional equivalent or its homolog, e.g. the increase of
[31764] (a) a gene product of a gene comprising the nucleic acid molecule as shown in the respective line in column 5 of Table I, application no. 4, preferably the coding region thereof, or a homolog or a fragment thereof, and being depicted in the same respective line as said B3989, or a functional equivalent or a homolog thereof as shown in column 8 of Table I, application no. 4, preferably the coding region thereof, particularly a homolog or functional equivalent as shown in column 8 of Table I B, application no. 4, and being depicted in the same respective line as said B3989, and preferably the activity is increased non-targeted, or
[31765] (b) a polypeptide comprising a polypeptide, a consensus sequence or at least a polypeptide motif as shown in the respective line in column 5 of Table II or in column 8 of Table IV, application no. 4, respectively, and being depicted in the same respective line as said B3989, or a functional equivalent or a homolog thereof as depicted in column 8 of Table II, application no. 4, preferably a homolog or functional equivalent as depicted in column 8 of Table II B, application no. 4, and being depicted in the same respective line as said B3989, and preferably the activity is increased non-targeted.

[31766] Accordingly, in one embodiment, the molecule which activity is to be increased in the process of the invention is the gene product with an activity as a “b3989-protein”, preferably it is the molecule of section (a) or (b) of this paragraph.

[31767] In particular, it was observed that in plants, especially in Arabidopsis thaliana, increasing or generating the activity of a gene product non-targeted with the activity of a “b3989-protein”, preferably being encoded by a gene comprising the nucleic acid sequence SEQ ID NO. 44372, preferably the coding region thereof, conferred the production of or the increase in threonine compared with the wild type control.

[31768] The nucleic acid sequence of B4024 from Escherichia coli, e.g. as shown in the respective line in column 5 of Table I, application no. 4, has been published in B. And the activity of the gene product thereof is the activity of aspartate kinase.

[31769] Accordingly, in one embodiment, the process of the present invention for producing threonine in a non-human organism, like a microorganism or a plant or a part thereof, comprises increasing or generating the activity of a gene product with the activity of a gene product conferring the activity of “aspartate kinase”, especially from Escherichia coli or its functional equivalent or its homolog, e.g. the increase of
[31770] (a) a gene product of a gene comprising the nucleic acid molecule as shown in the respective line in column 5 of Table I, application no. 4, preferably the coding region thereof, or a homolog or a fragment thereof, and being depicted in the same respective line as said B4024, or a functional equivalent or a homolog thereof as shown in column 8 of Table I, application no. 4, preferably the coding region thereof, particularly a homolog or functional equivalent as shown in column 8 of Table I B, application no. 4, and being depicted in the same respective line as said B4024, and preferably the activity is increased plastidic, or
[31771] (b) a polypeptide comprising a polypeptide, a consensus sequence or at least a polypeptide motif as shown in the respective line in column 5 of Table II or in column 8 of Table IV, application no. 4, respectively, and being depicted in the same respective line as said B4024, or a functional equivalent or a homolog thereof as depicted in column 8 of Table II, application no. 4, preferably a homolog or functional equivalent as depicted in column 8 of Table II B, application no. 4, and being depicted in the same respective line as said B4024, and preferably the activity is increased plastidic.

[31772] Accordingly, in one embodiment, the molecule which activity is to be increased in the process of the invention is the gene product with an activity as a “aspartate kinase”, preferably it is the molecule of section (a) or (b) of this paragraph.

[31773] In particular, it was observed that in plants, especially in Arabidopsis thaliana, increasing or generating the activity of a gene product plastidic with the activity of a “aspartate kinase”, preferably being encoded by a gene comprising the nucleic acid sequence SEQ ID NO. 83835, preferably the coding region thereof, conferred the production of or the increase in threonine compared with the wild type control.

[31774] The nucleic acid sequence of B4029 from Escherichia coli, e.g. as shown in the respective line in column 5 of Table I, application no. 4, has been published in B. And the activity of the gene product thereof is the activity of b4029-protein.

[31775] Accordingly, in one embodiment, the process of the present invention for producing threonine in a non-human organism, like a microorganism or a plant or a part thereof, comprises increasing or generating the activity of a gene product with the activity of a gene product conferring the activity of “b4029-protein”, especially from Escherichia coli or its functional equivalent or its homolog, e.g. the increase of
[31776] (a) a gene product of a gene comprising the nucleic acid molecule as shown in the respective line in column 5 of Table I, application no. 4, preferably the coding region thereof, or a homolog or a fragment thereof, and being depicted in the same respective line as said B4029, or a functional equivalent or a homolog thereof as shown in column 8 of Table I, application no. 4, preferably the coding region thereof, particularly a homolog or functional equivalent as shown in column 8 of Table I B, application no. 4, and being depicted in the same respective line as said B4029, and preferably the activity is increased non-targeted, or
[31777] (b) a polypeptide comprising a polypeptide, a consensus sequence or at least a polypeptide motif as shown in the respective line in column 5 of Table II or in column 8 of Table IV, application no. 4, respectively, and being depicted in the same respective line as said B4029, or a functional equivalent or a homolog thereof as depicted in column 8 of Table II, application no. 4, preferably a homolog or functional equivalent as depicted in column 8 of Table II B, application no. 4, and being depicted in the same respective line as said B4029, and preferably the activity is increased non-targeted.

[31778] Accordingly, in one embodiment, the molecule which activity is to be increased in the process of the invention is the gene product with an activity as a “b4029-protein”, preferably it is the molecule of section (a) or (b) of this paragraph.

[31779] In particular, it was observed that in plants, especially in Arabidopsis thaliana, increasing or generating the activity of a gene product non-targeted with the activity of a “b4029-protein”, preferably being encoded by a gene comprising the nucleic acid sequence SEQ ID NO. 10740, preferably the coding region thereof, conferred the production of or the increase in threonine compared with the wild type control.

[31780] The nucleic acid sequence of B4056 from Escherichia coli, e.g. as shown in the respective line in column 5 of Table I, application no. 4, has been published in B. And the activity of the gene product thereof is the activity of b4056-protein.

[31781] Accordingly, in one embodiment, the process of the present invention for producing threonine in a non-human organism, like a microorganism or a plant or a part thereof, comprises increasing or generating the activity of a gene product with the activity of a gene product conferring the activity of “b4056-protein”, especially from Escherichia coli or its functional equivalent or its homolog, e.g. the increase of
[31782] (a) a gene product of a gene comprising the nucleic acid molecule as shown in the respective line in column 5 of Table I, application no. 4, preferably the coding region thereof, or a homolog or a fragment thereof, and being depicted in the same respective line as said B4056, or a functional equivalent or a homolog thereof as shown in column 8 of Table I, application no. 4, preferably the coding region thereof, particularly a homolog or functional equivalent as shown in column 8 of Table I B, application no. 4, and being depicted in the same respective line as said B4056, and preferably the activity is increased non-targeted, or
[31783] (b) a polypeptide comprising a polypeptide, a consensus sequence or at least a polypeptide motif as shown in the respective line in column 5 of Table II or in column 8 of Table IV, application no. 4, respectively, and being depicted in the same respective line as said B4056, or a functional equivalent or a homolog thereof as depicted in column 8 of Table II, application no. 4, preferably a homolog or functional equivalent as depicted in column 8 of Table II B, application no. 4, and being depicted in the same respective line as said B4056, and preferably the activity is increased non-targeted.

[31784] Accordingly, in one embodiment, the molecule which activity is to be increased in the process of the invention is the gene product with an activity as a “b4056-protein”, preferably it is the molecule of section (a) or (b) of this paragraph.

[31785] In particular, it was observed that in plants, especially in Arabidopsis thaliana, increasing or generating the activity of a gene product non-targeted with the activity of a “b4056-protein”, preferably being encoded by a gene comprising the nucleic acid sequence SEQ ID NO. 94542, preferably the coding region thereof, conferred the production of or the increase in threonine compared with the wild type control.

[31786] The nucleic acid sequence of B4250 from Escherichia coli, e.g. as shown in the respective line in column 5 of Table I, application no. 4, has been published in B. And the activity of the gene product thereof is the activity of b4250-protein.

[31787] Accordingly, in one embodiment, the process of the present invention for producing threonine in a non-human organism, like a microorganism or a plant or a part thereof, comprises increasing or generating the activity of a gene product with the activity of a gene product conferring the activity of “b4250-protein”, especially from Escherichia coli or its functional equivalent or its homolog, e.g. the increase of
[31788] (a) a gene product of a gene comprising the nucleic acid molecule as shown in the respective line in column 5 of Table I, application no. 4, preferably the coding region thereof, or a homolog or a fragment thereof, and being depicted in the same respective line as said B4250, or a functional equivalent or a homolog thereof as shown in column 8 of Table I, application no. 4, preferably the coding region thereof, particularly a homolog or functional equivalent as shown in column 8 of Table I B, application no. 4, and being depicted in the same respective line as said B4250, and preferably the activity is increased non-targeted, or
[31789] (b) a polypeptide comprising a polypeptide, a consensus sequence or at least a polypeptide motif as shown in the respective line in column 5 of Table II or in column 8 of Table IV, application no. 4, respectively, and being depicted in the same respective line as said B4250, or a functional equivalent or a homolog thereof as depicted in column 8 of Table II, application no. 4, preferably a homolog or functional equivalent as depicted in column 8 of Table II B, application no. 4, and being depicted in the same respective line as said B4250, and preferably the activity is increased non-targeted.

[31790] Accordingly, in one embodiment, the molecule which activity is to be increased in the process of the invention is the gene product with an activity as a “b4250-protein”, preferably it is the molecule of section (a) or (b) of this paragraph.

[31791] In particular, it was observed that in plants, especially in Arabidopsis thaliana, increasing or generating the activity of a gene product non-targeted with the activity of a “b4250-protein”, preferably being encoded by a gene comprising the nucleic acid sequence SEQ ID NO. 94735, preferably the coding region thereof, conferred the production of or the increase in threonine compared with the wild type control.

[31792] The nucleic acid sequence of B4256 from Escherichia coli, e.g. as shown in the respective line in column 5 of Table I, application no. 4, has been published in B. And the activity of the gene product thereof is the activity of acetyltransferase.

[31793] Accordingly, in one embodiment, the process of the present invention for producing threonine in a non-human organism, like a microorganism or a plant or a part thereof, comprises increasing or generating the activity of a gene product with the activity of a gene product conferring the activity of “acetyltransferase”, especially from Escherichia coli or its functional equivalent or its homolog, e.g. the increase of
[31794] (a) a gene product of a gene comprising the nucleic acid molecule as shown in the respective line in column 5 of Table I, application no. 4, preferably the coding region thereof, or a homolog or a fragment thereof, and being depicted in the same respective line as said B4256, or a functional equivalent or a homolog thereof as shown in column 8 of Table I, application no. 4, preferably the coding region thereof, particularly a homolog or functional equivalent as shown in column 8 of Table I B, application no. 4, and being depicted in the same respective line as said B4256, and preferably the activity is increased non-targeted, or
[31795] (b) a polypeptide comprising a polypeptide, a consensus sequence or at least a polypeptide motif as shown in the respective line in column 5 of Table II or in column 8 of Table IV, application no. 4, respectively, and being depicted in the same respective line as said B4256, or a functional equivalent or a homolog thereof as depicted in column 8 of Table II, application no. 4, preferably a homolog or functional equivalent as depicted in column 8 of Table II B, application no. 4, and being depicted in the same respective line as said B4256, and preferably the activity is increased non-targeted.

[31796] Accordingly, in one embodiment, the molecule which activity is to be increased in the process of the invention is the gene product with an activity as a “acetyltransferase”, preferably it is the molecule of section (a) or (b) of this paragraph.

[31797] In particular, it was observed that in plants, especially in Arabidopsis thaliana, increasing or generating the activity of a gene product non-targeted with the activity of a “acetyltransferase”, preferably being encoded by a gene comprising the nucleic acid sequence SEQ ID NO. 45321, preferably the coding region thereof, conferred the production of or the increase in threonine compared with the wild type control.

[31798] The nucleic acid sequence of GM02LC12622 from Glycine max, e.g. as shown in the respective line in column 5 of Table I, application no. 4, is unpublished. And the activity of the gene product thereof is the activity of glutaredoxin.

[31799] Accordingly, in one embodiment, the process of the present invention for producing threonine in a non-human organism, like a microorganism or a plant or a part thereof, comprises increasing or generating the activity of a gene product with the activity of a gene product conferring the activity of “glutaredoxin”, especially from Glycine max or its functional equivalent or its homolog, e.g. the increase of
[31800] (a) a gene product of a gene comprising the nucleic acid molecule as shown in the respective line in column 5 of Table I, application no. 4, preferably the coding region thereof, or a homolog or a fragment thereof, and being depicted in the same respective line as said GM02LC12622, or a functional equivalent or a homolog thereof as shown in column 8 of Table I, application no. 4, preferably the coding region thereof, particularly a homolog or functional equivalent as shown in column 8 of Table I B, application no. 4, and being depicted in the same respective line as said GM02LC12622, and preferably the activity is increased non-targeted, or
[31801] (b) a polypeptide comprising a polypeptide, a consensus sequence or at least a polypeptide motif as shown in the respective line in column 5 of Table II or in column 8 of Table IV, application no. 4, respectively, and being depicted in the same respective line as said GM02LC12622, or a functional equivalent or a homolog thereof as depicted in column 8 of Table II, application no. 4, preferably a homolog or functional equivalent as depicted in column 8 of Table II B, application no. 4, and being depicted in the same respective line as said GM02LC12622, and preferably the activity is increased non-targeted.

[31802] Accordingly, in one embodiment, the molecule which activity is to be increased in the process of the invention is the gene product with an activity as a “glutaredoxin”, preferably it is the molecule of section (a) or (b) of this paragraph.

[31803] In particular, it was observed that in plants, especially in Arabidopsis thaliana, increasing or generating the activity of a gene product non-targeted with the activity of a “glutaredoxin”, preferably being encoded by a gene comprising the nucleic acid sequence SEQ ID NO. 10811, preferably the coding region thereof, conferred the production of or the increase in threonine compared with the wild type control.

[31804] The nucleic acid sequence of GM02LC21368 from Glycine max, e.g. as shown in the respective line in column 5 of Table I, application no. 4, is unpublished. And the activity of the gene product thereof is the activity of transcription factor.

[31805] Accordingly, in one embodiment, the process of the present invention for producing threonine in a non-human organism, like a microorganism or a plant or a part thereof, comprises increasing or generating the activity of a gene product with the activity of a gene product conferring the activity of “transcription factor”, especially from Glycine max or its functional equivalent or its homolog, e.g. the increase of
[31806] (a) a gene product of a gene comprising the nucleic acid molecule as shown in the respective line in column 5 of Table I, application no. 4, preferably the coding region thereof, or a homolog or a fragment thereof, and being depicted in the same respective line as said GM02LC21368, or a functional equivalent or a homolog thereof as shown in column 8 of Table I, application no. 4, preferably the coding region thereof, particularly a homolog or functional equivalent as shown in column 8 of Table I B, application no. 4, and being depicted in the same respective line as said GM02LC21368, and preferably the activity is increased non-targeted, or
[31807] (b) a polypeptide comprising a polypeptide, a consensus sequence or at least a polypeptide motif as shown in the respective line in column 5 of Table II or in column 8 of Table IV, application no. 4, respectively, and being depicted in the same respective line as said GM02LC21368, or a functional equivalent or a homolog thereof as depicted in column 8 of Table II, application no. 4, preferably a homolog or functional equivalent as depicted in column 8 of Table II B, application no. 4, and being depicted in the same respective line as said GM02LC21368, and preferably the activity is increased non-targeted.

[31808] Accordingly, in one embodiment, the molecule which activity is to be increased in the process of the invention is the gene product with an activity as a “transcription factor”, preferably it is the molecule of section (a) or (b) of this paragraph.

[31809] In particular, it was observed that in plants, especially in Arabidopsis thaliana, increasing or generating the activity of a gene product non-targeted with the activity of a “transcription factor”, preferably being encoded by a gene comprising the nucleic acid sequence SEQ ID NO. 84198, preferably the coding region thereof, conferred the production of or the increase in threonine compared with the wild type control.

[31810] The nucleic acid sequence of GM02LC44512 from Glycine max, e.g. as shown in the respective line in column 5 of Table I, application no. 4, is unpublished. And the activity of the gene product thereof is the activity of cyclin D.

[31811] Accordingly, in one embodiment, the process of the present invention for producing threonine in a non-human organism, like a microorganism or a plant or a part thereof, comprises increasing or generating the activity of a gene product with the activity of a gene product conferring the activity of “cyclin D”, especially from Glycine max or its functional equivalent or its homolog, e.g. the increase of
[31812] (a) a gene product of a gene comprising the nucleic acid molecule as shown in the respective line in column 5 of Table I, application no. 4, preferably the coding region thereof, or a homolog or a fragment thereof, and being depicted in the same respective line as said GM02LC44512, or a functional equivalent or a homolog thereof as shown in column 8 of Table I, application no. 4, preferably the coding region thereof, particularly a homolog or functional equivalent as shown in column 8 of Table I B, application no. 4, and being depicted in the same respective line as said GM02LC44512, and preferably the activity is increased non-targeted, or
[31813] (b) a polypeptide comprising a polypeptide, a consensus sequence or at least a polypeptide motif as shown in the respective line in column 5 of Table II or in column 8 of Table IV, application no. 4, respectively, and being depicted in the same respective line as said GM02LC44512, or a functional equivalent or a homolog thereof as depicted in column 8 of Table II, application no. 4, preferably a homolog or functional equivalent as depicted in column 8 of Table II B, application no. 4, and being depicted in the same respective line as said GM02LC44512, and preferably the activity is increased non-targeted.

[31814] Accordingly, in one embodiment, the molecule which activity is to be increased in the process of the invention is the gene product with an activity as a “cyclin D”, preferably it is the molecule of section (a) or (b) of this paragraph.

[31815] In particular, it was observed that in plants, especially in Arabidopsis thaliana, increasing or generating the activity of a gene product non-targeted with the activity of a “cyclin D”, preferably being encoded by a gene comprising the nucleic acid sequence SEQ ID NO. 46850, preferably the coding region thereof, conferred the production of or the increase in threonine compared with the wild type control.

[31816] The nucleic acid sequence of Sll0170 from Synechocystis sp., e.g. as shown in the respective line in column 5 of Table I, application no. 4, has been published in C. And the activity of the gene product thereof is the activity of heat shock protein.

[31817] Accordingly, in one embodiment, the process of the present invention for producing threonine in a non-human organism, like a microorganism or a plant or a part thereof, comprises increasing or generating the activity of a gene product with the activity of a gene product conferring the activity of “heat shock protein”, especially from Synechocystis sp. or its functional equivalent or its homolog, e.g. the increase of
[31818] (a) a gene product of a gene comprising the nucleic acid molecule as shown in the respective line in column 5 of Table I, application no. 4, preferably the coding region thereof, or a homolog or a fragment thereof, and being depicted in the same respective line as said Sll0170, or a functional equivalent or a homolog thereof as shown in column 8 of Table I, application no. 4, preferably the coding region thereof, particularly a homolog or functional equivalent as shown in column 8 of Table I B, application no. 4, and being depicted in the same respective line as said Sll0170, and preferably the activity is increased non-targeted, or
[31819] (b) a polypeptide comprising a polypeptide, a consensus sequence or at least a polypeptide motif as shown in the respective line in column 5 of Table II or in column 8 of Table IV, application no. 4, respectively, and being depicted in the same respective line as said Sll0170, or a functional equivalent or a homolog thereof as depicted in column 8 of Table II, application no. 4, preferably a homolog or functional equivalent as depicted in column 8 of Table II B, application no. 4, and being depicted in the same respective line as said Sll0170, and preferably the activity is increased non-targeted.

[31820] Accordingly, in one embodiment, the molecule which activity is to be increased in the process of the invention is the gene product with an activity as a “heat shock protein”, preferably it is the molecule of section (a) or (b) of this paragraph.

[31821] In particular, it was observed that in plants, especially in Arabidopsis thaliana, increasing or generating the activity of a gene product non-targeted with the activity of a “heat shock protein”, preferably being encoded by a gene comprising the nucleic acid sequence SEQ ID NO. 48138, preferably the coding region thereof, conferred the production of or the increase in threonine compared with the wild type control.

[31822] The nucleic acid sequence of 5110290 from Synechocystis sp., e.g. as shown in the respective line in column 5 of Table I, application no. 4, has been published in C. And the activity of the gene product thereof is the activity of polyphosphate kinase.

[31823] Accordingly, in one embodiment, the process of the present invention for producing threonine in a non-human organism, like a microorganism or a plant or a part thereof, comprises increasing or generating the activity of a gene product with the activity of a gene product conferring the activity of “polyphosphate kinase”, especially from Synechocystis sp. or its functional equivalent or its homolog, e.g. the increase of
[31824] (a) a gene product of a gene comprising the nucleic acid molecule as shown in the respective line in column 5 of Table I, application no. 4, preferably the coding region thereof, or a homolog or a fragment thereof, and being depicted in the same respective line as said Sll0290, or a functional equivalent or a homolog thereof as shown in column 8 of Table I, application no. 4, preferably the coding region thereof, particularly a homolog or functional equivalent as shown in column 8 of Table I B, application no. 4, and being depicted in the same respective line as said Sll0290, and preferably the activity is increased non-targeted, or
[31825] (b) a polypeptide comprising a polypeptide, a consensus sequence or at least a polypeptide motif as shown in the respective line in column 5 of Table II or in column 8 of Table IV, application no. 4, respectively, and being depicted in the same respective line as said Sll0290, or a functional equivalent or a homolog thereof as depicted in column 8 of Table II, application no. 4, preferably a homolog or functional equivalent as depicted in column 8 of Table II B, application no. 4, and being depicted in the same respective line as said Sll0290, and preferably the activity is increased non-targeted.

[31826] Accordingly, in one embodiment, the molecule which activity is to be increased in the process of the invention is the gene product with an activity as a “polyphosphate kinase”, preferably it is the molecule of section (a) or (b) of this paragraph.

[31827] In particular, it was observed that in plants, especially in Arabidopsis thaliana, increasing or generating the activity of a gene product non-targeted with the activity of a “polyphosphate kinase”, preferably being encoded by a gene comprising the nucleic acid sequence SEQ ID NO. 49828, preferably the coding region thereof, conferred the production of or the increase in threonine compared with the wild type control.

[31828] The nucleic acid sequence of Sll0374 from Synechocystis sp., e.g. as shown in the respective line in column 5 of Table I, application no. 4, has been published in C. And the activity of the gene product thereof is the activity of branched chain amino acid ABC transporter ATP-binding protein

[31829] Accordingly, in one embodiment, the process of the present invention for producing threonine in a non-human organism, like a microorganism or a plant or a part thereof, comprises increasing or generating the activity of a gene product with the activity of a gene product conferring the activity of “branched chain amino acid ABC transporter ATP-binding protein”, especially from Synechocystis sp. or its functional equivalent or its homolog, e.g. the increase of
[31830] (a) a gene product of a gene comprising the nucleic acid molecule as shown in the respective line in column 5 of Table I, application no. 4, preferably the coding region thereof, or a homolog or a fragment thereof, and being depicted in the same respective line as said Sll0374, or a functional equivalent or a homolog thereof as shown in column 8 of Table I, application no. 4, preferably the coding region thereof, particularly a homolog or functional equivalent as shown in column 8 of Table I B, application no. 4, and being depicted in the same respective line as said Sll0374, and preferably the activity is increased plastidic, or
[31831] (b) a polypeptide comprising a polypeptide, a consensus sequence or at least a polypeptide motif as shown in the respective line in column 5 of Table II or in column 8 of Table IV, application no. 4, respectively, and being depicted in the same respective line as said Sll0374, or a functional equivalent or a homolog thereof as depicted in column 8 of Table II, application no. 4, preferably a homolog or functional equivalent as depicted in column 8 of Table II B, application no. 4, and being depicted in the same respective line as said Sll0374, and preferably the activity is increased plastidic.

[31832] Accordingly, in one embodiment, the molecule which activity is to be increased in the process of the invention is the gene product with an activity as a “branched chain amino acid ABC transporter ATP-binding protein”, preferably it is the molecule of section (a) or (b) of this paragraph.

[31833] In particular, it was observed that in plants, especially in Arabidopsis thaliana, increasing or generating the activity of a gene product plastidic with the activity of a “branched chain amino acid ABC transporter ATP-binding protein”, preferably being encoded by a gene comprising the nucleic acid sequence SEQ ID NO. 94741, preferably the coding region thereof, conferred the production of or the increase in threonine compared with the wild type control.

[31834] The nucleic acid sequence of Sll0378 from Synechocystis sp., e.g. as shown in the respective line in column 5 of Table I, application no. 4, has been published in C. And the activity of the gene product thereof is the activity of uroporphyrin-III C-methyltransferase.

[31835] Accordingly, in one embodiment, the process of the present invention for producing threonine in a non-human organism, like a microorganism or a plant or a part thereof, comprises increasing or generating the activity of a gene product with the activity of a gene product conferring the activity of “uroporphyrin-III C-methyltransferase”, especially from Synechocystis sp. or its functional equivalent or its homolog, e.g. the increase of
[31836] (a) a gene product of a gene comprising the nucleic acid molecule as shown in the respective line in column 5 of Table I, application no. 4, preferably the coding region thereof, or a homolog or a fragment thereof, and being depicted in the same respective line as said Sll0378, or a functional equivalent or a homolog thereof as shown in column 8 of Table I, application no. 4, preferably the coding region thereof, particularly a homolog or functional equivalent as shown in column 8 of Table I B, application no. 4, and being depicted in the same respective line as said Sll0378, and preferably the activity is increased plastidic, or
[31837] (b) a polypeptide comprising a polypeptide, a consensus sequence or at least a polypeptide motif as shown in the respective line in column 5 of Table II or in column 8 of Table IV, application no. 4, respectively, and being depicted in the same respective line as said Sll0378, or a functional equivalent or a homolog thereof as depicted in column 8 of Table II, application no. 4, preferably a homolog or functional equivalent as depicted in column 8 of Table II B, application no. 4, and being depicted in the same respective line as said Sll0378, and preferably the activity is increased plastidic.

[31838] Accordingly, in one embodiment, the molecule which activity is to be increased in the process of the invention is the gene product with an activity as a “uroporphyrin-III C-methyltransferase”, preferably it is the molecule of section (a) or (b) of this paragraph.

[31839] In particular, it was observed that in plants, especially in Arabidopsis thaliana, increasing or generating the activity of a gene product plastidic with the activity of a “uroporphyrin-III C-methyltransferase”, preferably being encoded by a gene comprising the nucleic acid sequence SEQ ID NO. 84869, preferably the coding region thereof, conferred the production of or the increase in threonine compared with the wild type control.

[31840] The nucleic acid sequence of Sll0418 from Synechocystis sp., e.g. as shown in the respective line in column 5 of Table I, application no. 4, has been published in C. And the activity of the gene product thereof is the activity of sll0418-protein.

[31841] Accordingly, in one embodiment, the process of the present invention for producing threonine in a non-human organism, like a microorganism or a plant or a part thereof, comprises increasing or generating the activity of a gene product with the activity of a gene product conferring the activity of “sll0418-protein”, especially from Synechocystis sp. or its functional equivalent or its homolog, e.g. the increase of
[31842] (a) a gene product of a gene comprising the nucleic acid molecule as shown in the respective line in column 5 of Table I, application no. 4, preferably the coding region thereof, or a homolog or a fragment thereof, and being depicted in the same respective line as said Sll0418, or a functional equivalent or a homolog thereof as shown in column 8 of Table I, application no. 4, preferably the coding region thereof, particularly a homolog or functional equivalent as shown in column 8 of Table I B, application no. 4, and being depicted in the same respective line as said Sll0418, and preferably the activity is increased non-targeted, or
[31843] (b) a polypeptide comprising a polypeptide, a consensus sequence or at least a polypeptide motif as shown in the respective line in column 5 of Table II or in column 8 of Table IV, application no. 4, respectively, and being depicted in the same respective line as said Sll0418, or a functional equivalent or a homolog thereof as depicted in column 8 of Table II, application no. 4, preferably a homolog or functional equivalent as depicted in column 8 of Table II B, application no. 4, and being depicted in the same respective line as said Sll0418, and preferably the activity is increased non-targeted.

[31844] Accordingly, in one embodiment, the molecule which activity is to be increased in the process of the invention is the gene product with an activity as a “sll0418-protein”, preferably it is the molecule of section (a) or (b) of this paragraph.

[31845] In particular, it was observed that in plants, especially in Arabidopsis thaliana, increasing or generating the activity of a gene product non-targeted with the activity of a “sll0418-protein”, preferably being encoded by a gene comprising the nucleic acid sequence SEQ ID NO. 94942, preferably the coding region thereof, conferred the production of or the increase in threonine compared with the wild type control.

[31846] The nucleic acid sequence of Sll0816 from Synechocystis sp., e.g. as shown in the respective line in column 5 of Table I, application no. 4, has been published in C. And the activity of the gene product thereof is the activity of oxireductase.

[31847] Accordingly, in one embodiment, the process of the present invention for producing threonine in a non-human organism, like a microorganism or a plant or a part thereof, comprises increasing or generating the activity of a gene product with the activity of a gene product conferring the activity of “oxireductase”, especially from Synechocystis sp. or its functional equivalent or its homolog, e.g. the increase of
[31848] (a) a gene product of a gene comprising the nucleic acid molecule as shown in the respective line in column 5 of Table I, application no. 4, preferably the coding region thereof, or a homolog or a fragment thereof, and being depicted in the same respective line as said 5110816, or a functional equivalent or a homolog thereof as shown in column 8 of Table I, application no. 4, preferably the coding region thereof, particularly a homolog or functional equivalent as shown in column 8 of Table I B, application no. 4, and being depicted in the same respective line as said Sll0816, and preferably the activity is increased non-targeted, or
[31849] (b) a polypeptide comprising a polypeptide, a consensus sequence or at least a polypeptide motif as shown in the respective line in column 5 of Table II or in column 8 of Table IV, application no. 4, respectively, and being depicted in the same respective line as said Sll0816, or a functional equivalent or a homolog thereof as depicted in column 8 of Table II, application no. 4, preferably a homolog or functional equivalent as depicted in column 8 of Table II B, application no. 4, and being depicted in the same respective line as said Sll0816, and preferably the activity is increased non-targeted.

[31850] Accordingly, in one embodiment, the molecule which activity is to be increased in the process of the invention is the gene product with an activity as a “oxireductase”, preferably it is the molecule of section (a) or (b) of this paragraph.

[31851] In particular, it was observed that in plants, especially in Arabidopsis thaliana, increasing or generating the activity of a gene product non-targeted with the activity of a “oxireductase”, preferably being encoded by a gene comprising the nucleic acid sequence SEQ ID NO. 51198, preferably the coding region thereof, conferred the production of or the increase in threonine compared with the wild type control.

[31852] The nucleic acid sequence of Sll0891 from Synechocystis sp., e.g. as shown in the respective line in column 5 of Table I, application no. 4, has been published in C. And the activity of the gene product thereof is the activity of malate dehydrogenase.

[31853] Accordingly, in one embodiment, the process of the present invention for producing threonine in a non-human organism, like a microorganism or a plant or a part thereof, comprises increasing or generating the activity of a gene product with the activity of a gene product conferring the activity of “malate dehydrogenase”, especially from Synechocystis sp. or its functional equivalent or its homolog, e.g. the increase of
[31854] (a) a gene product of a gene comprising the nucleic acid molecule as shown in the respective line in column 5 of Table I, application no. 4, preferably the coding region thereof, or a homolog or a fragment thereof, and being depicted in the same respective line as said Sll0891, or a functional equivalent or a homolog thereof as shown in column 8 of Table I, application no. 4, preferably the coding region thereof, particularly a homolog or functional equivalent as shown in column 8 of Table I B, application no. 4, and being depicted in the same respective line as said Sll0891, and preferably the activity is increased plastidic, or
[31855] (b) a polypeptide comprising a polypeptide, a consensus sequence or at least a polypeptide motif as shown in the respective line in column 5 of Table II or in column 8 of Table IV, application no. 4, respectively, and being depicted in the same respective line as said Sll0891, or a functional equivalent or a homolog thereof as depicted in column 8 of Table II, application no. 4, preferably a homolog or functional equivalent as depicted in column 8 of Table II B, application no. 4, and being depicted in the same respective line as said Sll0891, and preferably the activity is increased plastidic.

[31856] Accordingly, in one embodiment, the molecule which activity is to be increased in the process of the invention is the gene product with an activity as a “malate dehydrogenase”, preferably it is the molecule of section (a) or (b) of this paragraph.

[31857] In particular, it was observed that in plants, especially in Arabidopsis thaliana, increasing or generating the activity of a gene product plastidic with the activity of a “malate dehydrogenase”, preferably being encoded by a gene comprising the nucleic acid sequence SEQ ID NO. 51268, preferably the coding region thereof, conferred the production of or the increase in threonine compared with the wild type control.

[31858] The nucleic acid sequence of Sll0901 from Synechocystis sp., e.g. as shown in the respective line in column 5 of Table I, application no. 4, has been published in C. And the activity of the gene product thereof is the activity of phosphoribosylaminoimidazole carboxylase catalytic subunit.

[31859] Accordingly, in one embodiment, the process of the present invention for producing threonine in a non-human organism, like a microorganism or a plant or a part thereof, comprises increasing or generating the activity of a gene product with the activity of a gene product conferring the activity of “phosphoribosylaminoimidazole carboxylase catalytic subunit”, especially from Synechocystis sp. or its functional equivalent or its homolog, e.g. the increase of
[31860] (a) a gene product of a gene comprising the nucleic acid molecule as shown in the respective line in column 5 of Table I, application no. 4, preferably the coding region thereof, or a homolog or a fragment thereof, and being depicted in the same respective line as said Sll0901, or a functional equivalent or a homolog thereof as shown in column 8 of Table I, application no. 4, preferably the coding region thereof, particularly a homolog or functional equivalent as shown in column 8 of Table I B, application no. 4, and being depicted in the same respective line as said Sll0901, and preferably the activity is increased mitochondrial, or
[31861] (b) a polypeptide comprising a polypeptide, a consensus sequence or at least a polypeptide motif as shown in the respective line in column 5 of Table II or in column 8 of Table IV, application no. 4, respectively, and being depicted in the same respective line as said Sll0901, or a functional equivalent or a homolog thereof as depicted in column 8 of Table II, application no. 4, preferably a homolog or functional equivalent as depicted in column 8 of Table II B, application no. 4, and being depicted in the same respective line as said Sll0901, and preferably the activity is increased mitochondrial.

[31862] Accordingly, in one embodiment, the molecule which activity is to be increased in the process of the invention is the gene product with an activity as a “phosphoribosylaminoimidazole carboxylase catalytic subunit”, preferably it is the molecule of section (a) or (b) of this paragraph.

[31863] In particular, it was observed that in plants, especially in Arabidopsis thaliana, increasing or generating the activity of a gene product mitochondrial with the activity of a “phosphoribosylaminoimidazole carboxylase catalytic subunit”, preferably being encoded by a gene comprising the nucleic acid sequence SEQ ID NO. 51632, preferably the coding region thereof, conferred the production of or the increase in threonine compared with the wild type control.

[31864] The nucleic acid sequence of Sll0945 from Synechocystis sp., e.g. as shown in the respective line in column 5 of Table I, application no. 4, has been published in C. And the activity of the gene product thereof is the activity of glycogen synthase.

[31865] Accordingly, in one embodiment, the process of the present invention for producing threonine in a non-human organism, like a microorganism or a plant or a part thereof, comprises increasing or generating the activity of a gene product with the activity of a gene product conferring the activity of “glycogen synthase”, especially from Synechocystis sp. or its functional equivalent or its homolog, e.g. the increase of
[31866] (a) a gene product of a gene comprising the nucleic acid molecule as shown in the respective line in column 5 of Table I, application no. 4, preferably the coding region thereof, or a homolog or a fragment thereof, and being depicted in the same respective line as said Sll0945, or a functional equivalent or a homolog thereof as shown in column 8 of Table I, application no. 4, preferably the coding region thereof, particularly a homolog or functional equivalent as shown in column 8 of Table I B, application no. 4, and being depicted in the same respective line as said Sll0945, and preferably the activity is increased non-targeted, or
[31867] (b) a polypeptide comprising a polypeptide, a consensus sequence or at least a polypeptide motif as shown in the respective line in column 5 of Table II or in column 8 of Table IV, application no. 4, respectively, and being depicted in the same respective line as said Sll0945, or a functional equivalent or a homolog thereof as depicted in column 8 of Table II, application no. 4, preferably a homolog or functional equivalent as depicted in column 8 of Table II B, application no. 4, and being depicted in the same respective line as said Sll0945, and preferably the activity is increased non-targeted.

[31868] Accordingly, in one embodiment, the molecule which activity is to be increased in the process of the invention is the gene product with an activity as a “glycogen synthase”, preferably it is the molecule of section (a) or (b) of this paragraph.

[31869] In particular, it was observed that in plants, especially in Arabidopsis thaliana, increasing or generating the activity of a gene product non-targeted with the activity of a “glycogen synthase”, preferably being encoded by a gene comprising the nucleic acid sequence SEQ ID NO. 52364, preferably the coding region thereof, conferred the production of or the increase in threonine compared with the wild type control.

[31870] The nucleic acid sequence of Sll1393 from Synechocystis sp., e.g. as shown in the respective line in column 5 of Table I, application no. 4, has been published in C. And the activity of the gene product thereof is the activity of glycogen (starch) synthase.

[31871] Accordingly, in one embodiment, the process of the present invention for producing threonine in a non-human organism, like a microorganism or a plant or a part thereof, comprises increasing or generating the activity of a gene product with the activity of a gene product conferring the activity of “glycogen (starch) synthase”, especially from Synechocystis sp. or its functional equivalent or its homolog, e.g. the increase of
[31872] (a) a gene product of a gene comprising the nucleic acid molecule as shown in the respective line in column 5 of Table I, application no. 4, preferably the coding region thereof, or a homolog or a fragment thereof, and being depicted in the same respective line as said Sll1393, or a functional equivalent or a homolog thereof as shown in column 8 of Table I, application no. 4, preferably the coding region thereof, particularly a homolog or functional equivalent as shown in column 8 of Table I B, application no. 4, and being depicted in the same respective line as said Sll1393, and preferably the activity is increased non-targeted, or
[31873] (b) a polypeptide comprising a polypeptide, a consensus sequence or at least a polypeptide motif as shown in the respective line in column 5 of Table II or in column 8 of Table IV, application no. 4, respectively, and being depicted in the same respective line as said Sll1393, or a functional equivalent or a homolog thereof as depicted in column 8 of Table II, application no. 4, preferably a homolog or functional equivalent as depicted in column 8 of Table II B, application no. 4, and being depicted in the same respective line as said Sll1393, and preferably the activity is increased non-targeted.

[31874] Accordingly, in one embodiment, the molecule which activity is to be increased in the process of the invention is the gene product with an activity as a “glycogen (starch) synthase”, preferably it is the molecule of section (a) or (b) of this paragraph.

[31875] In particular, it was observed that in plants, especially in Arabidopsis thaliana, increasing or generating the activity of a gene product non-targeted with the activity of a “glycogen (starch) synthase”, preferably being encoded by a gene comprising the nucleic acid sequence SEQ ID NO. 53456, preferably the coding region thereof, conferred the production of or the increase in threonine compared with the wild type control.

[31876] The nucleic acid sequence of Sll1450 from Synechocystis sp., e.g. as shown in the respective line in column 5 of Table I, application no. 4, has been published in C. And the activity of the gene product thereof is the activity of nitrate/nitrite transport protein.

[31877] Accordingly, in one embodiment, the process of the present invention for producing threonine in a non-human organism, like a microorganism or a plant or a part thereof, comprises increasing or generating the activity of a gene product with the activity of a gene product conferring the activity of “nitrate/nitrite transport protein”, especially from Synechocystis sp. or its functional equivalent or its homolog, e.g. the increase of
[31878] (a) a gene product of a gene comprising the nucleic acid molecule as shown in the respective line in column 5 of Table I, application no. 4, preferably the coding region thereof, or a homolog or a fragment thereof, and being depicted in the same respective line as said Sll1450, or a functional equivalent or a homolog thereof as shown in column 8 of Table I, application no. 4, preferably the coding region thereof, particularly a homolog or functional equivalent as shown in column 8 of Table I B, application no. 4, and being depicted in the same respective line as said Sll1450, and preferably the activity is increased mitochondrial, or
[31879] (b) a polypeptide comprising a polypeptide, a consensus sequence or at least a polypeptide motif as shown in the respective line in column 5 of Table II or in column 8 of Table IV, application no. 4, respectively, and being depicted in the same respective line as said Sll1450, or a functional equivalent or a homolog thereof as depicted in column 8 of Table II, application no. 4, preferably a homolog or functional equivalent as depicted in column 8 of Table II B, application no. 4, and being depicted in the same respective line as said Sll1450, and preferably the activity is increased mitochondrial.

[31880] Accordingly, in one embodiment, the molecule which activity is to be increased in the process of the invention is the gene product with an activity as a “nitrate/nitrite transport protein”, preferably it is the molecule of section (a) or (b) of this paragraph.

[31881] In particular, it was observed that in plants, especially in Arabidopsis thaliana, increasing or generating the activity of a gene product mitochondrial with the activity of a “nitrate/nitrite transport protein”, preferably being encoded by a gene comprising the nucleic acid sequence SEQ ID NO. 54337, preferably the coding region thereof, conferred the production of or the increase in threonine compared with the wild type control.

[31882] The nucleic acid sequence of Sll1498 from Synechocystis sp., e.g. as shown in the respective line in column 5 of Table I, application no. 4, has been published in C. And the activity of the gene product thereof is the activity of carbamoyl-phosphate synthase subunit.

[31883] Accordingly, in one embodiment, the process of the present invention for producing threonine in a non-human organism, like a microorganism or a plant or a part thereof, comprises increasing or generating the activity of a gene product with the activity of a gene product conferring the activity of “carbamoyl-phosphate synthase subunit”, especially from Synechocystis sp. or its functional equivalent or its homolog, e.g. the increase of
[31884] (a) a gene product of a gene comprising the nucleic acid molecule as shown in the respective line in column 5 of Table I, application no. 4, preferably the coding region thereof, or a homolog or a fragment thereof, and being depicted in the same respective line as said Sll1498, or a functional equivalent or a homolog thereof as shown in column 8 of Table I, application no. 4, preferably the coding region thereof, particularly a homolog or functional equivalent as shown in column 8 of Table I B, application no. 4, and being depicted in the same respective line as said Sll1498, and preferably the activity is increased plastidic, or
[31885] (b) a polypeptide comprising a polypeptide, a consensus sequence or at least a polypeptide motif as shown in the respective line in column 5 of Table II or in column 8 of Table IV, application no. 4, respectively, and being depicted in the same respective line as said Sll1498, or a functional equivalent or a homolog thereof as depicted in column 8 of Table II, application no. 4, preferably a homolog or functional equivalent as depicted in column 8 of Table II B, application no. 4, and being depicted in the same respective line as said Sll1498, and preferably the activity is increased plastidic.

[31886] Accordingly, in one embodiment, the molecule which activity is to be increased in the process of the invention is the gene product with an activity as a “carbamoyl-phosphate synthase subunit”, preferably it is the molecule of section (a) or (b) of this paragraph.

[31887] In particular, it was observed that in plants, especially in Arabidopsis thaliana, increasing or generating the activity of a gene product plastidic with the activity of a “carbamoyl-phosphate synthase subunit”, preferably being encoded by a gene comprising the nucleic acid sequence SEQ ID NO. 95047, preferably the coding region thereof, conferred the production of or the increase in threonine compared with the wild type control.

[31888] The nucleic acid sequence of Sll1545 from Synechocystis sp., e.g. as shown in the respective line in column 5 of Table I, application no. 4, has been published in C. And the activity of the gene product thereof is the activity of glutathione S-transferase.

[31889] Accordingly, in one embodiment, the process of the present invention for producing threonine in a non-human organism, like a microorganism or a plant or a part thereof, comprises increasing or generating the activity of a gene product with the activity of a gene product conferring the activity of “glutathione 5-transferase”, especially from Synechocystis sp. or its functional equivalent or its homolog, e.g. the increase of
[31890] (a) a gene product of a gene comprising the nucleic acid molecule as shown in the respective line in column 5 of Table I, application no. 4, preferably the coding region thereof, or a homolog or a fragment thereof, and being depicted in the same respective line as said Sll1545, or a functional equivalent or a homolog thereof as shown in column 8 of Table I, application no. 4, preferably the coding region thereof, particularly a homolog or functional equivalent as shown in column 8 of Table I B, application no. 4, and being depicted in the same respective line as said Sll1545, and preferably the activity is increased mitochondrial, or
[31891] (b) a polypeptide comprising a polypeptide, a consensus sequence or at least a polypeptide motif as shown in the respective line in column 5 of Table II or in column 8 of Table IV, application no. 4, respectively, and being depicted in the same respective line as said Sll1545, or a functional equivalent or a homolog thereof as depicted in column 8 of Table II, application no. 4, preferably a homolog or functional equivalent as depicted in column 8 of Table II B, application no. 4, and being depicted in the same respective line as said Sll1545, and preferably the activity is increased mitochondrial.

[31892] Accordingly, in one embodiment, the molecule which activity is to be increased in the process of the invention is the gene product with an activity as a “glutathione S-transferase”, preferably it is the molecule of section (a) or (b) of this paragraph.

[31893] In particular, it was observed that in plants, especially in Arabidopsis thaliana, increasing or generating the activity of a gene product mitochondrial with the activity of a “glutathione S-transferase”, preferably being encoded by a gene comprising the nucleic acid sequence SEQ ID NO. 11423, preferably the coding region thereof, conferred the production of or the increase in threonine compared with the wild type control.

[31894] The nucleic acid sequence of Sll1598 from Synechocystis sp., e.g. as shown in the respective line in column 5 of Table I, application no. 4, has been published in C. And the activity of the gene product thereof is the activity of ABC metal ion transporter substrate-binding protein.

[31895] Accordingly, in one embodiment, the process of the present invention for producing threonine in a non-human organism, like a microorganism or a plant or a part thereof, comprises increasing or generating the activity of a gene product with the activity of a gene product conferring the activity of “ABC metal ion transporter substrate-binding protein”, especially from Synechocystis sp. or its functional equivalent or its homolog, e.g. the increase of
[31896] (a) a gene product of a gene comprising the nucleic acid molecule as shown in the respective line in column 5 of Table I, application no. 4, preferably the coding region thereof, or a homolog or a fragment thereof, and being depicted in the same respective line as said Sll1598, or a functional equivalent or a homolog thereof as shown in column 8 of Table I, application no. 4, preferably the coding region thereof, particularly a homolog or functional equivalent as shown in column 8 of Table I B, application no. 4, and being depicted in the same respective line as said Sll1598, and preferably the activity is increased mitochondrial, or
[31897] (b) a polypeptide comprising a polypeptide, a consensus sequence or at least a polypeptide motif as shown in the respective line in column 5 of Table II or in column 8 of Table IV, application no. 4, respectively, and being depicted in the same respective line as said Sll1598, or a functional equivalent or a homolog thereof as depicted in column 8 of Table II, application no. 4, preferably a homolog or functional equivalent as depicted in column 8 of Table II B, application no. 4, and being depicted in the same respective line as said Sll1598, and preferably the activity is increased mitochondrial.

[31898] Accordingly, in one embodiment, the molecule which activity is to be increased in the process of the invention is the gene product with an activity as a “ABC metal ion transporter substratebinding protein”, preferably it is the molecule of section (a) or (b) of this paragraph.

[31899] In particular, it was observed that in plants, especially in Arabidopsis thaliana, increasing or generating the activity of a gene product mitochondrial with the activity of a “ABC metal ion transporter substrate-binding protein”, preferably being encoded by a gene comprising the nucleic acid sequence SEQ ID NO. 85743, preferably the coding region thereof, conferred the production of or the increase in threonine compared with the wild type control.

[31900] The nucleic acid sequence of Sll1917 from Synechocystis sp., e.g. as shown in the respective line in column 5 of Table I, application no. 4, has been published in C. And the activity of the gene product thereof is the activity of coproporphyrinogen III oxidase.

[31901] Accordingly, in one embodiment, the process of the present invention for producing threonine in a non-human organism, like a microorganism or a plant or a part thereof, comprises increasing or generating the activity of a gene product with the activity of a gene product conferring the activity of “coproporphyrinogen III oxidase”, especially from Synechocystis sp. or its functional equivalent or its homolog, e.g. the increase of
[31902] (a) a gene product of a gene comprising the nucleic acid molecule as shown in the respective line in column 5 of Table I, application no. 4, preferably the coding region thereof, or a homolog or a fragment thereof, and being depicted in the same respective line as said Sll1917, or a functional equivalent or a homolog thereof as shown in column 8 of Table I, application no. 4, preferably the coding region thereof, particularly a homolog or functional equivalent as shown in column 8 of Table I B, application no. 4, and being depicted in the same respective line as said Sll1917, and preferably the activity is increased mitochondrial, or
[31903] (b) a polypeptide comprising a polypeptide, a consensus sequence or at least a polypeptide motif as shown in the respective line in column 5 of Table II or in column 8 of Table IV, application no. 4, respectively, and being depicted in the same respective line as said Sll1917, or a functional equivalent or a homolog thereof as depicted in column 8 of Table II, application no. 4, preferably a homolog or functional equivalent as depicted in column 8 of Table II B, application no. 4, and being depicted in the same respective line as said Sll1917, and preferably the activity is increased mitochondrial.

[31904] Accordingly, in one embodiment, the molecule which activity is to be increased in the process of the invention is the gene product with an activity as a “coproporphyrinogen III oxidase”, preferably it is the molecule of section (a) or (b) of this paragraph.

[31905] In particular, it was observed that in plants, especially in Arabidopsis thaliana, increasing or generating the activity of a gene product mitochondrial with the activity of a “coproporphyrinogen III oxidase”, preferably being encoded by a gene comprising the nucleic acid sequence SEQ ID NO. 11471, preferably the coding region thereof, conferred the production of or the increase in threonine compared with the wild type control.

[31906] The nucleic acid sequence of Slr0150 from Synechocystis sp., e.g. as shown in the respective line in column 5 of Table I, application no. 4, has been published in C. And the activity of the gene product thereof is the activity of ferredoxin.

[31907] Accordingly, in one embodiment, the process of the present invention for producing threonine in a non-human organism, like a microorganism or a plant or a part thereof, comprises increasing or generating the activity of a gene product with the activity of a gene product conferring the activity of “ferredoxin”, especially from Synechocystis sp. or its functional equivalent or its homolog, e.g. the increase of
[31908] (a) a gene product of a gene comprising the nucleic acid molecule as shown in the respective line in column 5 of Table I, application no. 4, preferably the coding region thereof, or a homolog or a fragment thereof, and being depicted in the same respective line as said Slr0150, or a functional equivalent or a homolog thereof as shown in column 8 of Table I, application no. 4, preferably the coding region thereof, particularly a homolog or functional equivalent as shown in column 8 of Table I B, application no. 4, and being depicted in the same respective line as said Slr0150, and preferably the activity is increased mitochondrial, or
[31909] (b) a polypeptide comprising a polypeptide, a consensus sequence or at least a polypeptide motif as shown in the respective line in column 5 of Table II or in column 8 of Table IV, application no. 4, respectively, and being depicted in the same respective line as said Slr0150, or a functional equivalent or a homolog thereof as depicted in column 8 of Table II, application no. 4, preferably a homolog or functional equivalent as depicted in column 8 of Table II B, application no. 4, and being depicted in the same respective line as said Slr0150, and preferably the activity is increased mitochondrial.

[31910] Accordingly, in one embodiment, the molecule which activity is to be increased in the process of the invention is the gene product with an activity as a “ferredoxin”, preferably it is the molecule of section (a) or (b) of this paragraph.

[31911] In particular, it was observed that in plants, especially in Arabidopsis thaliana, increasing or generating the activity of a gene product mitochondrial with the activity of a “ferredoxin”, preferably being encoded by a gene comprising the nucleic acid sequence SEQ ID NO. 95527, preferably the coding region thereof, conferred the production of or the increase in threonine compared with the wild type control.

[31912] The nucleic acid sequence of Slr0383 from Synechocystis sp., e.g. as shown in the respective line in column 5 of Table I, application no. 4, has been published in C. And the activity of the gene product thereof is the activity of slr0383-protein.

[31913] Accordingly, in one embodiment, the process of the present invention for producing threonine in a non-human organism, like a microorganism or a plant or a part thereof, comprises increasing or generating the activity of a gene product with the activity of a gene product conferring the activity of “slr0383-protein”, especially from Synechocystis sp. or its functional equivalent or its homolog, e.g. the increase of
[31914] (a) a gene product of a gene comprising the nucleic acid molecule as shown in the respective line in column 5 of Table I, application no. 4, preferably the coding region thereof, or a homolog or a fragment thereof, and being depicted in the same respective line as said Slr0383, or a functional equivalent or a homolog thereof as shown in column 8 of Table I, application no. 4, preferably the coding region thereof, particularly a homolog or functional equivalent as shown in column 8 of Table I B, application no. 4, and being depicted in the same respective line as said Slr0383, and preferably the activity is increased non-targeted, or
[31915] (b) a polypeptide comprising a polypeptide, a consensus sequence or at least a polypeptide motif as shown in the respective line in column 5 of Table II or in column 8 of Table IV, application no. 4, respectively, and being depicted in the same respective line as said Slr0383, or a functional equivalent or a homolog thereof as depicted in column 8 of Table II, application no. 4, preferably a homolog or functional equivalent as depicted in column 8 of Table II B, application no. 4, and being depicted in the same respective line as said Slr0383, and preferably the activity is increased non-targeted.

[31916] Accordingly, in one embodiment, the molecule which activity is to be increased in the process of the invention is the gene product with an activity as a “slr0383-protein”, preferably it is the molecule of section (a) or (b) of this paragraph.

[31917] In particular, it was observed that in plants, especially in Arabidopsis thaliana, increasing or generating the activity of a gene product non-targeted with the activity of a “slr0383-protein”, preferably being encoded by a gene comprising the nucleic acid sequence SEQ ID NO. 95744, preferably the coding region thereof, conferred the production of or the increase in threonine compared with the wild type control.

[31918] The nucleic acid sequence of Slr0597 from Synechocystis sp., e.g. as shown in the respective line in column 5 of Table I, application no. 4, has been published in C. And the activity of the gene product thereof is the activity of bifunctional purine biosynthesis protein.

[31919] Accordingly, in one embodiment, the process of the present invention for producing threonine in a non-human organism, like a microorganism or a plant or a part thereof, comprises increasing or generating the activity of a gene product with the activity of a gene product conferring the activity of “bifunctional purine biosynthesis protein”, especially from Synechocystis sp. or its functional equivalent or its homolog, e.g. the increase of
[31920] (a) a gene product of a gene comprising the nucleic acid molecule as shown in the respective line in column 5 of Table I, application no. 4, preferably the coding region thereof, or a homolog or a fragment thereof, and being depicted in the same respective line as said Slr0597, or a functional equivalent or a homolog thereof as shown in column 8 of Table I, application no. 4, preferably the coding region thereof, particularly a homolog or functional equivalent as shown in column 8 of Table I B, application no. 4, and being depicted in the same respective line as said Slr0597, and preferably the activity is increased plastidic, or
[31921] (b) a polypeptide comprising a polypeptide, a consensus sequence or at least a polypeptide motif as shown in the respective line in column 5 of Table II or in column 8 of Table IV, application no. 4, respectively, and being depicted in the same respective line as said Slr0597, or a functional equivalent or a homolog thereof as depicted in column 8 of Table II, application no. 4, preferably a homolog or functional equivalent as depicted in column 8 of Table II B, application no. 4, and being depicted in the same respective line as said Slr0597, and preferably the activity is increased plastidic.

[31922] Accordingly, in one embodiment, the molecule which activity is to be increased in the process of the invention is the gene product with an activity as a “bifunctional purine biosynthesis protein”, preferably it is the molecule of section (a) or (b) of this paragraph.

[31923] In particular, it was observed that in plants, especially in Arabidopsis thaliana, increasing or generating the activity of a gene product plastidic with the activity of a “bifunctional purine biosynthesis protein”, preferably being encoded by a gene comprising the nucleic acid sequence SEQ ID NO. 56153, preferably the coding region thereof, conferred the production of or the increase in threonine compared with the wild type control.

[31924] The nucleic acid sequence of Slr0657 from Synechocystis sp., e.g. as shown in the respective line in column 5 of Table I, application no. 4, has been published in C. And the activity of the gene product thereof is the activity of aspartate kinase.

[31925] Accordingly, in one embodiment, the process of the present invention for producing threonine in a non-human organism, like a microorganism or a plant or a part thereof, comprises increasing or generating the activity of a gene product with the activity of a gene product conferring the activity of “aspartate kinase”, especially from Synechocystis sp. or its functional equivalent or its homolog, e.g. the increase of
[31926] (a) a gene product of a gene comprising the nucleic acid molecule as shown in the respective line in column 5 of Table I, application no. 4, preferably the coding region thereof, or a homolog or a fragment thereof, and being depicted in the same respective line as said Slr0657, or a functional equivalent or a homolog thereof as shown in column 8 of Table I, application no. 4, preferably the coding region thereof, particularly a homolog or functional equivalent as shown in column 8 of Table I B, application no. 4, and being depicted in the same respective line as said Slr0657, and preferably the activity is increased mitochondrial, or
[31927] (b) a polypeptide comprising a polypeptide, a consensus sequence or at least a polypeptide motif as shown in the respective line in column 5 of Table II or in column 8 of Table IV, application no. 4, respectively, and being depicted in the same respective line as said Slr0657, or a functional equivalent or a homolog thereof as depicted in column 8 of Table II, application no. 4, preferably a homolog or functional equivalent as depicted in column 8 of Table II B, application no. 4, and being depicted in the same respective line as said Slr0657, and preferably the activity is increased mitochondrial.

[31928] Accordingly, in one embodiment, the molecule which activity is to be increased in the process of the invention is the gene product with an activity as a “aspartate kinase”, preferably it is the molecule of section (a) or (b) of this paragraph.

[31929] In particular, it was observed that in plants, especially in Arabidopsis thaliana, increasing or generating the activity of a gene product mitochondrial with the activity of a “aspartate kinase”, preferably being encoded by a gene comprising the nucleic acid sequence SEQ ID NO. 95857, preferably the coding region thereof, conferred the production of or the increase in threonine compared with the wild type control.

[31930] The nucleic acid sequence of Slr0739 from Synechocystis sp., e.g. as shown in the respective line in column 5 of Table I, application no. 4, has been published in C. And the activity of the gene product thereof is the activity of geranylgeranyl pyrophosphate synthase.

[31931] Accordingly, in one embodiment, the process of the present invention for producing threonine in a non-human organism, like a microorganism or a plant or a part thereof, comprises increasing or generating the activity of a gene product with the activity of a gene product conferring the activity of “geranylgeranyl pyrophosphate synthase”, especially from Synechocystis sp. or its functional equivalent or its homolog, e.g. the increase of
[31932] (a) a gene product of a gene comprising the nucleic acid molecule as shown in the respective line in column 5 of Table I, application no. 4, preferably the coding region thereof, or a homolog or a fragment thereof, and being depicted in the same respective line as said Slr0739, or a functional equivalent or a homolog thereof as shown in column 8 of Table I, application no. 4, preferably the coding region thereof, particularly a homolog or functional equivalent as shown in column 8 of Table I B, application no. 4, and being depicted in the same respective line as said Slr0739, and preferably the activity is increased plastidic, or
[31933] (b) a polypeptide comprising a polypeptide, a consensus sequence or at least a polypeptide motif as shown in the respective line in column 5 of Table II or in column 8 of Table IV, application no. 4, respectively, and being depicted in the same respective line as said Slr0739, or a functional equivalent or a homolog thereof as depicted in column 8 of Table II, application no. 4, preferably a homolog or functional equivalent as depicted in column 8 of Table II B, application no. 4, and being depicted in the same respective line as said Slr0739, and preferably the activity is increased plastidic.

[31934] Accordingly, in one embodiment, the molecule which activity is to be increased in the process of the invention is the gene product with an activity as a “geranylgeranyl pyrophosphate synthase”, preferably it is the molecule of section (a) or (b) of this paragraph.

[31935] In particular, it was observed that in plants, especially in Arabidopsis thaliana, increasing or generating the activity of a gene product plastidic with the activity of a “geranylgeranyl pyrophosphate synthase”, preferably being encoded by a gene comprising the nucleic acid sequence SEQ ID NO. 57235, preferably the coding region thereof, conferred the production of or the increase in threonine compared with the wild type control. The nucleic acid sequence of Slr0862 from Synechocystis sp., e.g. as shown in the respective line in column 5 of Table I, application no. 4, has been published in C. And the activity of the gene product thereof is the activity of kinase.

[31936] Accordingly, in one embodiment, the process of the present invention for producing threonine in a non-human organism, like a microorganism or a plant or a part thereof, comprises increasing or generating the activity of a gene product with the activity of a gene product conferring the activity of “kinase”, especially from Synechocystis sp. or its functional equivalent or its homolog, e.g. the increase of
[31937] (a) a gene product of a gene comprising the nucleic acid molecule as shown in the respective line in column 5 of Table I, application no. 4, preferably the coding region thereof, or a homolog or a fragment thereof, and being depicted in the same respective line as said Slr0862, or a functional equivalent or a homolog thereof as shown in column 8 of Table I, application no. 4, preferably the coding region thereof, particularly a homolog or functional equivalent as shown in column 8 of Table I B, application no. 4, and being depicted in the same respective line as said Slr0862, and preferably the activity is increased mitochondrial, or
[31938] (b) a polypeptide comprising a polypeptide, a consensus sequence or at least a polypeptide motif as shown in the respective line in column 5 of Table II or in column 8 of Table IV, application no. 4, respectively, and being depicted in the same respective line as said Slr0862, or a functional equivalent or a homolog thereof as depicted in column 8 of Table II, application no. 4, preferably a homolog or functional equivalent as depicted in column 8 of Table II B, application no. 4, and being depicted in the same respective line as said Slr0862, and preferably the activity is increased mitochondrial.

[31939] Accordingly, in one embodiment, the molecule which activity is to be increased in the process of the invention is the gene product with an activity as a “kinase”, preferably it is the molecule of section (a) or (b) of this paragraph.

[31940] In particular, it was observed that in plants, especially in Arabidopsis thaliana, increasing or generating the activity of a gene product mitochondrial with the activity of a “kinase”, preferably being encoded by a gene comprising the nucleic acid sequence SEQ ID NO. 87610, preferably the coding region thereof, conferred the production of or the increase in threonine compared with the wild type control.

[31941] The nucleic acid sequence of Slr1133 from Synechocystis sp., e.g. as shown in the respective line in column 5 of Table I, application no. 4, has been published in C. And the activity of the gene product thereof is the activity of argininosuccinate lyase.

[31942] Accordingly, in one embodiment, the process of the present invention for producing threonine in a non-human organism, like a microorganism or a plant or a part thereof, comprises increasing or generating the activity of a gene product with the activity of a gene product conferring the activity of “argininosuccinate lyase”, especially from Synechocystis sp. or its functional equivalent or its homolog, e.g. the increase of
[31943] (a) a gene product of a gene comprising the nucleic acid molecule as shown in the respective line in column 5 of Table I, application no. 4, preferably the coding region thereof, or a homolog or a fragment thereof, and being depicted in the same respective line as said Slr1133, or a functional equivalent or a homolog thereof as shown in column 8 of Table I, application no. 4, preferably the coding region thereof, particularly a homolog or functional equivalent as shown in column 8 of Table I B, application no. 4, and being depicted in the same respective line as said Slr1133, and preferably the activity is increased mitochondrial, or
[31944] (b) a polypeptide comprising a polypeptide, a consensus sequence or at least a polypeptide motif as shown in the respective line in column 5 of Table II or in column 8 of Table IV, application no. 4, respectively, and being depicted in the same respective line as said Slr1133, or a functional equivalent or a homolog thereof as depicted in column 8 of Table II, application no. 4, preferably a homolog or functional equivalent as depicted in column 8 of Table II B, application no. 4, and being depicted in the same respective line as said Slr1133, and preferably the activity is increased mitochondrial.

[31945] Accordingly, in one embodiment, the molecule which activity is to be increased in the process of the invention is the gene product with an activity as a “argininosuccinate lyase”, preferably it is the molecule of section (a) or (b) of this paragraph.

[31946] In particular, it was observed that in plants, especially in Arabidopsis thaliana, increasing or generating the activity of a gene product mitochondrial with the activity of a “argininosuccinate lyase”, preferably being encoded by a gene comprising the nucleic acid sequence SEQ ID NO. 87853, preferably the coding region thereof, conferred the production of or the increase in threonine compared with the wild type control.

[31947] The nucleic acid sequence of Slr1739 from Synechocystis sp., e.g. as shown in the respective line in column 5 of Table I, application no. 4, has been published in C. And the activity of the gene product thereof is the activity of photosystem II protein.

[31948] Accordingly, in one embodiment, the process of the present invention for producing threonine in a non-human organism, like a microorganism or a plant or a part thereof, comprises increasing or generating the activity of a gene product with the activity of a gene product conferring the activity of “photosystem II protein”, especially from Synechocystis sp. or its functional equivalent or its homolog, e.g. the increase of
[31949] (a) a gene product of a gene comprising the nucleic acid molecule as shown in the respective line in column 5 of Table I, application no. 4, preferably the coding region thereof, or a homolog or a fragment thereof, and being depicted in the same respective line as said Slr1739, or a functional equivalent or a homolog thereof as shown in column 8 of Table I, application no. 4, preferably the coding region thereof, particularly a homolog or functional equivalent as shown in column 8 of Table I B, application no. 4, and being depicted in the same respective line as said Slr1739, and preferably the activity is increased plastidic, or
[31950] (b) a polypeptide comprising a polypeptide, a consensus sequence or at least a polypeptide motif as shown in the respective line in column 5 of Table II or in column 8 of Table IV, application no. 4, respectively, and being depicted in the same respective line as said Slr1739, or a functional equivalent or a homolog thereof as depicted in column 8 of Table II, application no. 4, preferably a homolog or functional equivalent as depicted in column 8 of Table II B, application no. 4, and being depicted in the same respective line as said Slr1739, and preferably the activity is increased plastidic.

[31951] Accordingly, in one embodiment, the molecule which activity is to be increased in the process of the invention is the gene product with an activity as a “photosystem II protein”, preferably it is the molecule of section (a) or (b) of this paragraph.

[31952] In particular, it was observed that in plants, especially in Arabidopsis thaliana, increasing or generating the activity of a gene product plastidic with the activity of a “photosystem II protein”, preferably being encoded by a gene comprising the nucleic acid sequence SEQ ID NO. 58731, preferably the coding region thereof, conferred the production of or the increase in threonine compared with the wild type control.

[31953] The nucleic acid sequence of TTC0035 from Thermus thermophilus, e.g. as shown in the respective line in column 5 of Table I, application no. 4, has been published in E. And the activity of the gene product thereof is the activity of cell division protein.

[31954] Accordingly, in one embodiment, the process of the present invention for producing threonine in a non-human organism, like a microorganism or a plant or a part thereof, comprises increasing or generating the activity of a gene product with the activity of a gene product conferring the activity of “cell division protein”, especially from Thermus thermophilus or its functional equivalent or its homolog, e.g. the increase of
[31955] (a) a gene product of a gene comprising the nucleic acid molecule as shown in the respective line in column 5 of Table I, application no. 4, preferably the coding region thereof, or a homolog or a fragment thereof, and being depicted in the same respective line as said TTC0035, or a functional equivalent or a homolog thereof as shown in column 8 of Table I, application no. 4, preferably the coding region thereof, particularly a homolog or functional equivalent as shown in column 8 of Table I B, application no. 4, and being depicted in the same respective line as said TTC0035, and preferably the activity is increased non-targeted, or
[31956] (b) a polypeptide comprising a polypeptide, a consensus sequence or at least a polypeptide motif as shown in the respective line in column 5 of Table II or in column 8 of Table IV, application no. 4, respectively, and being depicted in the same respective line as said TTC0035, or a functional equivalent or a homolog thereof as depicted in column 8 of Table II, application no. 4, preferably a homolog or functional equivalent as depicted in column 8 of Table II B, application no. 4, and being depicted in the same respective line as said TTC0035, and preferably the activity is increased non-targeted.

[31957] Accordingly, in one embodiment, the molecule which activity is to be increased in the process of the invention is the gene product with an activity as a “cell division protein”, preferably it is the molecule of section (a) or (b) of this paragraph.

[31958] In particular, it was observed that in plants, especially in Arabidopsis thaliana, increasing or generating the activity of a gene product non-targeted with the activity of a “cell division protein”, preferably being encoded by a gene comprising the nucleic acid sequence SEQ ID NO. 60301, preferably the coding region thereof, conferred the production of or the increase in threonine compared with the wild type control.

[31959] The nucleic acid sequence of TTC0216 from Thermus thermophilus, e.g. as shown in the respective line in column 5 of Table I, application no. 4, has been published in E. And the activity of the gene product thereof is the activity of branched-chain amino acid ABC transporter permease protein.

[31960] Accordingly, in one embodiment, the process of the present invention for producing threonine in a non-human organism, like a microorganism or a plant or a part thereof, comprises increasing or generating the activity of a gene product with the activity of a gene product conferring the activity of “branched-chain amino acid ABC transporter permease protein”, especially from Thermus thermophilus or its functional equivalent or its homolog, e.g. the increase of
[31961] (a) a gene product of a gene comprising the nucleic acid molecule as shown in the respective line in column 5 of Table I, application no. 4, preferably the coding region thereof, or a homolog or a fragment thereof, and being depicted in the same respective line as said TTC0216, or a functional equivalent or a homolog thereof as shown in column 8 of Table I, application no. 4, preferably the coding region thereof, particularly a homolog or functional equivalent as shown in column 8 of Table I B, application no. 4, and being depicted in the same respective line as said TTC0216, and preferably the activity is increased non-targeted, or
[31962] (b) a polypeptide comprising a polypeptide, a consensus sequence or at least a polypeptide motif as shown in the respective line in column 5 of Table II or in column 8 of Table IV, application no. 4, respectively, and being depicted in the same respective line as said TTC0216, or a functional equivalent or a homolog thereof as depicted in column 8 of Table II, application no. 4, preferably a homolog or functional equivalent as depicted in column 8 of Table II B, application no. 4, and being depicted in the same respective line as said TTC0216, and preferably the activity is increased non-targeted.

[31963] Accordingly, in one embodiment, the molecule which activity is to be increased in the process of the invention is the gene product with an activity as a “branched-chain amino acid ABC transporter permease protein”, preferably it is the molecule of section (a) or (b) of this paragraph.

[31964] In particular, it was observed that in plants, especially in Arabidopsis thaliana, increasing or generating the activity of a gene product non-targeted with the activity of a “branched-chain amino acid ABC transporter permease protein”, preferably being encoded by a gene comprising the nucleic acid sequence SEQ ID NO. 60859, preferably the coding region thereof, conferred the production of or the increase in threonine compared with the wild type control.

[31965] The nucleic acid sequence of TTC0881 from Thermus thermophilus, e.g. as shown in the respective line in column 5 of Table I, application no. 4, has been published in E. And the activity of the gene product thereof is the activity of TTC0881-protein.

[31966] Accordingly, in one embodiment, the process of the present invention for producing threonine in a non-human organism, like a microorganism or a plant or a part thereof, comprises increasing or generating the activity of a gene product with the activity of a gene product conferring the activity of “TTC0881-protein”, especially from Thermus thermophilus or its functional equivalent or its homolog, e.g. the increase of
[31967] (a) a gene product of a gene comprising the nucleic acid molecule as shown in the respective line in column 5 of Table I, application no. 4, preferably the coding region thereof, or a homolog or a fragment thereof, and being depicted in the same respective line as said TTC0881, or a functional equivalent or a homolog thereof as shown in column 8 of Table I, application no. 4, preferably the coding region thereof, particularly a homolog or functional equivalent as shown in column 8 of Table I B, application no. 4, and being depicted in the same respective line as said TTC0881, and preferably the activity is increased non-targeted, or
[31968] (b) a polypeptide comprising a polypeptide, a consensus sequence or at least a polypeptide motif as shown in the respective line in column 5 of Table II or in column 8 of Table IV, application no. 4, respectively, and being depicted in the same respective line as said TTC0881, or a functional equivalent or a homolog thereof as depicted in column 8 of Table II, application no. 4, preferably a homolog or functional equivalent as depicted in column 8 of Table II B, application no. 4, and being depicted in the same respective line as said TTC0881, and preferably the activity is increased non-targeted.

[31969] Accordingly, in one embodiment, the molecule which activity is to be increased in the process of the invention is the gene product with an activity as a “TTC0881-protein”, preferably it is the molecule of section (a) or (b) of this paragraph.

[31970] In particular, it was observed that in plants, especially in Arabidopsis thaliana, increasing or generating the activity of a gene product non-targeted with the activity of a “TTC0881-protein”, preferably being encoded by a gene comprising the nucleic acid sequence SEQ ID NO. 88875, preferably the coding region thereof, conferred the production of or the increase in threonine compared with the wild type control.

[31971] The nucleic acid sequence of TTC0917 from Thermus thermophilus, e.g. as shown in the respective line in column 5 of Table I, application no. 4, has been published in E. And the activity of the gene product thereof is the activity of metal-dependent hydrolase.

[31972] Accordingly, in one embodiment, the process of the present invention for producing threonine in a non-human organism, like a microorganism or a plant or a part thereof, comprises increasing or generating the activity of a gene product with the activity of a gene product conferring the activity of “metal-dependent hydrolase”, especially from Thermus thermophilus or its functional equivalent or its homolog, e.g. the increase of
[31973] (a) a gene product of a gene comprising the nucleic acid molecule as shown in the respective line in column 5 of Table I, application no. 4, preferably the coding region thereof, or a homolog or a fragment thereof, and being depicted in the same respective line as said TTC0917, or a functional equivalent or a homolog thereof as shown in column 8 of Table I, application no. 4, preferably the coding region thereof, particularly a homolog or functional equivalent as shown in column 8 of Table I B, application no. 4, and being depicted in the same respective line as said TTC0917, and preferably the activity is increased non-targeted, or
[31974] (b) a polypeptide comprising a polypeptide, a consensus sequence or at least a polypeptide motif as shown in the respective line in column 5 of Table II or in column 8 of Table IV, application no. 4, respectively, and being depicted in the same respective line as said TTC0917, or a functional equivalent or a homolog thereof as depicted in column 8 of Table II, application no. 4, preferably a homolog or functional equivalent as depicted in column 8 of Table II B, application no. 4, and being depicted in the same respective line as said TTC0917, and preferably the activity is increased non-targeted.

[31975] Accordingly, in one embodiment, the molecule which activity is to be increased in the process of the invention is the gene product with an activity as a “metal-dependent hydrolase”, preferably it is the molecule of section (a) or (b) of this paragraph.

[31976] In particular, it was observed that in plants, especially in Arabidopsis thaliana, increasing or generating the activity of a gene product non-targeted with the activity of a “metal-dependent hydrolase”, preferably being encoded by a gene comprising the nucleic acid sequence SEQ ID NO. 61553, preferably the coding region thereof, conferred the production of or the increase in threonine compared with the wild type control.

[31977] The nucleic acid sequence of TTC1550 from Thermus thermophilus, e.g. as shown in the respective line in column 5 of Table I, application no. 4, has been published in E. And the activity of the gene product thereof is the activity of homocitrate synthase.

[31978] Accordingly, in one embodiment, the process of the present invention for producing threonine in a non-human organism, like a microorganism or a plant or a part thereof, comprises increasing or generating the activity of a gene product with the activity of a gene product conferring the activity of “homocitrate synthase”, especially from Thermus thermophilus or its functional equivalent or its homolog, e.g. the increase of
[31979] (a) a gene product of a gene comprising the nucleic acid molecule as shown in the respective line in column 5 of Table I, application no. 4, preferably the coding region thereof, or a homolog or a fragment thereof, and being depicted in the same respective line as said TTC1550, or a functional equivalent or a homolog thereof as shown in column 8 of Table I, application no. 4, preferably the coding region thereof, particularly a homolog or functional equivalent as shown in column 8 of Table I B, application no. 4, and being depicted in the same respective line as said TTC1550, and preferably the activity is increased non-targeted, or
[31980] (b) a polypeptide comprising a polypeptide, a consensus sequence or at least a polypeptide motif as shown in the respective line in column 5 of Table II or in column 8 of Table IV, application no. 4, respectively, and being depicted in the same respective line as said TTC1550, or a functional equivalent or a homolog thereof as depicted in column 8 of Table II, application no. 4, preferably a homolog or functional equivalent as depicted in column 8 of Table II B, application no. 4, and being depicted in the same respective line as said TTC1550, and preferably the activity is increased non-targeted.

[31981] Accordingly, in one embodiment, the molecule which activity is to be increased in the process of the invention is the gene product with an activity as a “homocitrate synthase”, preferably it is the molecule of section (a) or (b) of this paragraph.

[31982] In particular, it was observed that in plants, especially in Arabidopsis thaliana, increasing or generating the activity of a gene product non-targeted with the activity of a “homocitrate synthase”, preferably being encoded by a gene comprising the nucleic acid sequence SEQ ID NO. 12974, preferably the coding region thereof, conferred the production of or the increase in threonine compared with the wild type control.

[31983] The nucleic acid sequence of XM_{—}473199 from Oryza sativa, e.g. as shown in the respective line in column 5 of Table I, application no. 4, has been published in G. And the activity of the gene product thereof is the activity of XM_{—}473199-protein.

[31984] Accordingly, in one embodiment, the process of the present invention for producing threonine in a non-human organism, like a microorganism or a plant or a part thereof, comprises increasing or generating the activity of a gene product with the activity of a gene product conferring the activity of “XM_{—}473199-protein”, especially from Oryza sativa or its functional equivalent or its homolog, e.g. the increase of
[31985] (a) a gene product of a gene comprising the nucleic acid molecule as shown in the respective line in column 5 of Table I, application no. 4, preferably the coding region thereof, or a homolog or a fragment thereof, and being depicted in the same respective line as said XM_{—}473199, or a functional equivalent or a homolog thereof as shown in column 8 of Table I, application no. 4, preferably the coding region thereof, particularly a homolog or functional equivalent as shown in column 8 of Table I B, application no. 4, and being depicted in the same respective line as said XM_{—}473199, and preferably the activity is increased non-targeted, or
[31986] (b) a polypeptide comprising a polypeptide, a consensus sequence or at least a polypeptide motif as shown in the respective line in column 5 of Table II or in column 8 of Table IV, application no. 4, respectively, and being depicted in the same respective line as said XM_{—}473199, or a functional equivalent or a homolog thereof as depicted in column 8 of Table II, application no. 4, preferably a homolog or functional equivalent as depicted in column 8 of Table II B, application no. 4, and being depicted in the same respective line as said XM_{—}473199, and preferably the activity is increased non-targeted.

[31987] Accordingly, in one embodiment, the molecule which activity is to be increased in the process of the invention is the gene product with an activity as a “XM_{—}473199-protein”, preferably it is the molecule of section (a) or (b) of this paragraph.

[31988] In particular, it was observed that in plants, especially in Arabidopsis thaliana, increasing or generating the activity of a gene product non-targeted with the activity of a “XM_{—}473199protein”, preferably being encoded by a gene comprising the nucleic acid sequence SEQ ID NO. 62244, preferably the coding region thereof, conferred the production of or the increase in threonine compared with the wild type control.

[31989] The nucleic acid sequence of Yal038w from Saccharomyces cerevisiae, e.g. as shown in the respective line in column 5 of Table I, application no. 4, has been published in A. And the activity of the gene product thereof is the activity of pyruvate kinase.

[31990] Accordingly, in one embodiment, the process of the present invention for producing threonine in a non-human organism, like a microorganism or a plant or a part thereof, comprises increasing or generating the activity of a gene product with the activity of a gene product conferring the activity of “pyruvate kinase”, especially from Saccharomyces cerevisiae or its functional equivalent or its homolog, e.g. the increase of
[31991] (a) a gene product of a gene comprising the nucleic acid molecule as shown in the respective line in column 5 of Table I, application no. 4, preferably the coding region thereof, or a homolog or a fragment thereof, and being depicted in the same respective line as said Yal038w, or a functional equivalent or a homolog thereof as shown in column 8 of Table I, application no. 4, preferably the coding region thereof, particularly a homolog or functional equivalent as shown in column 8 of Table I B, application no. 4, and being depicted in the same respective line as said Yal038w, and preferably the activity is increased plastidic, or
[31992] (b) a polypeptide comprising a polypeptide, a consensus sequence or at least a polypeptide motif as shown in the respective line in column 5 of Table II or in column 8 of Table IV, application no. 4, respectively, and being depicted in the same respective line as said Yal038w, or a functional equivalent or a homolog thereof as depicted in column 8 of Table II, application no. 4, preferably a homolog or functional equivalent as depicted in column 8 of Table II B, application no. 4, and being depicted in the same respective line as said Yal038w, and preferably the activity is increased plastidic.

[31993] Accordingly, in one embodiment, the molecule which activity is to be increased in the process of the invention is the gene product with an activity as a “pyruvate kinase”, preferably it is the molecule of section (a) or (b) of this paragraph.

[31994] In particular, it was observed that in plants, especially in Arabidopsis thaliana, increasing or generating the activity of a gene product plastidic with the activity of a “pyruvate kinase”, preferably being encoded by a gene comprising the nucleic acid sequence SEQ ID NO. 96022, preferably the coding region thereof, conferred the production of or the increase in threonine compared with the wild type control.

[31995] The nucleic acid sequence of Ybl021c from Saccharomyces cerevisiae, e.g. as shown in the respective line in column 5 of Table I, application no. 4, has been published in A. And the activity of the gene product thereof is the activity of transcription factor.

[31996] Accordingly, in one embodiment, the process of the present invention for producing threonine in a non-human organism, like a microorganism or a plant or a part thereof, comprises increasing or generating the activity of a gene product with the activity of a gene product conferring the activity of “transcription factor”, especially from Saccharomyces cerevisiae or its functional equivalent or its homolog, e.g. the increase of
[31997] (a) a gene product of a gene comprising the nucleic acid molecule as shown in the respective line in column 5 of Table I, application no. 4, preferably the coding region thereof, or a homolog or a fragment thereof, and being depicted in the same respective line as said Ybl021c, or a functional equivalent or a homolog thereof as shown in column 8 of Table I, application no. 4, preferably the coding region thereof, particularly a homolog or functional equivalent as shown in column 8 of Table I B, application no. 4, and being depicted in the same respective line as said Ybl021 c, and preferably the activity is increased non-targeted, or
[31998] (b) a polypeptide comprising a polypeptide, a consensus sequence or at least a polypeptide motif as shown in the respective line in column 5 of Table II or in column 8 of Table IV, application no. 4, respectively, and being depicted in the same respective line as said Ybl021c, or a functional equivalent or a homolog thereof as depicted in column 8 of Table II, application no. 4, preferably a homolog or functional equivalent as depicted in column 8 of Table II B, application no. 4, and being depicted in the same respective line as said Ybl021c, and preferably the activity is increased non-targeted.

[31999] Accordingly, in one embodiment, the molecule which activity is to be increased in the process of the invention is the gene product with an activity as a “transcription factor”, preferably it is the molecule of section (a) or (b) of this paragraph.

[32000] In particular, it was observed that in plants, especially in Arabidopsis thaliana, increasing or generating the activity of a gene product non-targeted with the activity of a “transcription factor”, preferably being encoded by a gene comprising the nucleic acid sequence SEQ ID NO. 62524, preferably the coding region thereof, conferred the production of or the increase in threonine compared with the wild type control.

[32001] The nucleic acid sequence of Ybr160w from Saccharomyces cerevisiae, e.g. as shown in the respective line in column 5 of Table I, application no. 4, has been published in A. And the activity of the gene product thereof is the activity of cell division control protein.

[32002] Accordingly, in one embodiment, the process of the present invention for producing threonine in a non-human organism, like a microorganism or a plant or a part thereof, comprises increasing or generating the activity of a gene product with the activity of a gene product conferring the activity of “cell division control protein”, especially from Saccharomyces cerevisiae or its functional equivalent or its homolog, e.g. the increase of
[32003] (a) a gene product of a gene comprising the nucleic acid molecule as shown in the respective line in column 5 of Table I, application no. 4, preferably the coding region thereof, or a homolog or a fragment thereof, and being depicted in the same respective line as said Ybr160w, or a functional equivalent or a homolog thereof as shown in column 8 of Table I, application no. 4, preferably the coding region thereof, particularly a homolog or functional equivalent as shown in column 8 of Table I B, application no. 4, and being depicted in the same respective line as said Ybr160w, and preferably the activity is increased non-targeted, or
[32004] (b) a polypeptide comprising a polypeptide, a consensus sequence or at least a polypeptide motif as shown in the respective line in column 5 of Table II or in column 8 of Table IV, application no. 4, respectively, and being depicted in the same respective line as said Ybr160w, or a functional equivalent or a homolog thereof as depicted in column 8 of Table II, application no. 4, preferably a homolog or functional equivalent as depicted in column 8 of Table II B, application no. 4, and being depicted in the same respective line as said Ybr160w, and preferably the activity is increased non-targeted.

[32005] Accordingly, in one embodiment, the molecule which activity is to be increased in the process of the invention is the gene product with an activity as a “cell division control protein”, preferably it is the molecule of section (a) or (b) of this paragraph.

[32006] In particular, it was observed that in plants, especially in Arabidopsis thaliana, increasing or generating the activity of a gene product non-targeted with the activity of a “cell division control protein”, preferably being encoded by a gene comprising the nucleic acid sequence SEQ ID NO. 62717, preferably the coding region thereof, conferred the production of or the increase in threonine compared with the wild type control.

[32007] The nucleic acid sequence of Ybr218c from Saccharomyces cerevisiae, e.g. as shown in the respective line in column 5 of Table I, application no. 4, has been published in A. And the activity of the gene product thereof is the activity of pyruvate carboxylase.

[32008] Accordingly, in one embodiment, the process of the present invention for producing threonine in a non-human organism, like a microorganism or a plant or a part thereof, comprises increasing or generating the activity of a gene product with the activity of a gene product conferring the activity of “pyruvate carboxylase”, especially from Saccharomyces cerevisiae or its functional equivalent or its homolog, e.g. the increase of
[32009] (a) a gene product of a gene comprising the nucleic acid molecule as shown in the respective line in column 5 of Table I, application no. 4, preferably the coding region thereof, or a homolog or a fragment thereof, and being depicted in the same respective line as said Ybr218c, or a functional equivalent or a homolog thereof as shown in column 8 of Table I, application no. 4, preferably the coding region thereof, particularly a homolog or functional equivalent as shown in column 8 of Table I B, application no. 4, and being depicted in the same respective line as said Ybr218c, and preferably the activity is increased plastidic, or
[32010] (b) a polypeptide comprising a polypeptide, a consensus sequence or at least a polypeptide motif as shown in the respective line in column 5 of Table II or in column 8 of Table IV, application no. 4, respectively, and being depicted in the same respective line as said Ybr218c, or a functional equivalent or a homolog thereof as depicted in column 8 of Table II, application no. 4, preferably a homolog or functional equivalent as depicted in column 8 of Table II B, application no. 4, and being depicted in the same respective line as said Ybr218c, and preferably the activity is increased plastidic.

[32011] Accordingly, in one embodiment, the molecule which activity is to be increased in the process of the invention is the gene product with an activity as a “pyruvate carboxylase”, preferably it is the molecule of section (a) or (b) of this paragraph.

[32012] In particular, it was observed that in plants, especially in Arabidopsis thaliana, increasing or generating the activity of a gene product plastidic with the activity of a “pyruvate carboxylase”, preferably being encoded by a gene comprising the nucleic acid sequence SEQ ID NO. 96779, preferably the coding region thereof, conferred the production of or the increase in threonine compared with the wild type control.

[32013] The nucleic acid sequence of Ycl027w from Saccharomyces cerevisiae, e.g. as shown in the respective line in column 5 of Table I, application no. 4, has been published in A. And the activity of the gene product thereof is the activity of ycl027w-protein.

[32014] Accordingly, in one embodiment, the process of the present invention for producing threonine in a non-human organism, like a microorganism or a plant or a part thereof, comprises increasing or generating the activity of a gene product with the activity of a gene product conferring the activity of “ycl027w-protein”, especially from Saccharomyces cerevisiae or its functional equivalent or its homolog, e.g. the increase of
[32015] (a) a gene product of a gene comprising the nucleic acid molecule as shown in the respective line in column 5 of Table I, application no. 4, preferably the coding region thereof, or a homolog or a fragment thereof, and being depicted in the same respective line as said Ycl027w, or a functional equivalent or a homolog thereof as shown in column 8 of Table I, application no. 4, preferably the coding region thereof, particularly a homolog or functional equivalent as shown in column 8 of Table I B, application no. 4, and being depicted in the same respective line as said Ycl027w, and preferably the activity is increased plastidic, or
[32016] (b) a polypeptide comprising a polypeptide, a consensus sequence or at least a polypeptide motif as shown in the respective line in column 5 of Table II or in column 8 of Table IV, application no. 4, respectively, and being depicted in the same respective line as said Ycl027w, or a functional equivalent or a homolog thereof as depicted in column 8 of Table II, application no. 4, preferably a homolog or functional equivalent as depicted in column 8 of Table II B, application no. 4, and being depicted in the same respective line as said Ycl027w, and preferably the activity is increased plastidic.

[32017] Accordingly, in one embodiment, the molecule which activity is to be increased in the process of the invention is the gene product with an activity as a “ycl027w-protein”, preferably it is the molecule of section (a) or (b) of this paragraph.

[32018] In particular, it was observed that in plants, especially in Arabidopsis thaliana, increasing or generating the activity of a gene product plastidic with the activity of a “ycl027w-protein”, preferably being encoded by a gene comprising the nucleic acid sequence SEQ ID NO. 96980, preferably the coding region thereof, conferred the production of or the increase in threonine compared with the wild type control.

[32019] The nucleic acid sequence of Ydr044w from Saccharomyces cerevisiae, e.g. as shown in the respective line in column 5 of Table I, application no. 4, has been published in A. And the activity of the gene product thereof is the activity of coproporphyrinogen III oxidase.

[32020] Accordingly, in one embodiment, the process of the present invention for producing threonine in a non-human organism, like a microorganism or a plant or a part thereof, comprises increasing or generating the activity of a gene product with the activity of a gene product conferring the activity of “coproporphyrinogen III oxidase”, especially from Saccharomyces cerevisiae or its functional equivalent or its homolog, e.g. the increase of
[32021] (a) a gene product of a gene comprising the nucleic acid molecule as shown in the respective line in column 5 of Table I, application no. 4, preferably the coding region thereof, or a homolog or a fragment thereof, and being depicted in the same respective line as said Ydr044w, or a functional equivalent or a homolog thereof as shown in column 8 of Table I, application no. 4, preferably the coding region thereof, particularly a homolog or functional equivalent as shown in column 8 of Table I B, application no. 4, and being depicted in the same respective line as said Ydr044w, and preferably the activity is increased plastidic, or
[32022] (b) a polypeptide comprising a polypeptide, a consensus sequence or at least a polypeptide motif as shown in the respective line in column 5 of Table II or in column 8 of Table IV, application no. 4, respectively, and being depicted in the same respective line as said Ydr044w, or a functional equivalent or a homolog thereof as depicted in column 8 of Table II, application no. 4, preferably a homolog or functional equivalent as depicted in column 8 of Table II B, application no. 4, and being depicted in the same respective line as said Ydr044w, and preferably the activity is increased plastidic.

[32023] Accordingly, in one embodiment, the molecule which activity is to be increased in the process of the invention is the gene product with an activity as a “coproporphyrinogen III oxidase”, preferably it is the molecule of section (a) or (b) of this paragraph.

[32024] In particular, it was observed that in plants, especially in Arabidopsis thaliana, increasing or generating the activity of a gene product plastidic with the activity of a “coproporphyrinogen III oxidase”, preferably being encoded by a gene comprising the nucleic acid sequence SEQ ID NO. 63334, preferably the coding region thereof, conferred the production of or the increase in threonine compared with the wild type control. The nucleic acid sequence of Ydr183w from Saccharomyces cerevisiae, e.g. as shown in the respective line in column 5 of Table I, application no. 4, has been published in A. And the activity of the gene product thereof is the activity of ydr183w-protein.

[32025] Accordingly, in one embodiment, the process of the present invention for producing threonine in a non-human organism, like a microorganism or a plant or a part thereof, comprises increasing or generating the activity of a gene product with the activity of a gene product conferring the activity of “ydr183w-protein”, especially from Saccharomyces cerevisiae or its functional equivalent or its homolog, e.g. the increase of
[32026] (a) a gene product of a gene comprising the nucleic acid molecule as shown in the respective line in column 5 of Table I, application no. 4, preferably the coding region thereof, or a homolog or a fragment thereof, and being depicted in the same respective line as said Ydr183w, or a functional equivalent or a homolog thereof as shown in column 8 of Table I, application no. 4, preferably the coding region thereof, particularly a homolog or functional equivalent as shown in column 8 of Table I B, application no. 4, and being depicted in the same respective line as said Ydr183w, and preferably the activity is increased plastidic, or
[32027] (b) a polypeptide comprising a polypeptide, a consensus sequence or at least a polypeptide motif as shown in the respective line in column 5 of Table II or in column 8 of Table IV, application no. 4, respectively, and being depicted in the same respective line as said Ydr183w, or a functional equivalent or a homolog thereof as depicted in column 8 of Table II, application no. 4, preferably a homolog or functional equivalent as depicted in column 8 of Table II B, application no. 4, and being depicted in the same respective line as said Ydr183w, and preferably the activity is increased plastidic.

[32028] Accordingly, in one embodiment, the molecule which activity is to be increased in the process of the invention is the gene product with an activity as a “ydr183w-protein”, preferably it is the molecule of section (a) or (b) of this paragraph.

[32029] In particular, it was observed that in plants, especially in Arabidopsis thaliana, increasing or generating the activity of a gene product plastidic with the activity of a “ydr183w-protein”, preferably being encoded by a gene comprising the nucleic acid sequence SEQ ID NO. 90103, preferably the coding region thereof, conferred the production of or the increase in threonine compared with the wild type control.

[32030] The nucleic acid sequence of Ydr342c from Saccharomyces cerevisiae, e.g. as shown in the respective line in column 5 of Table I, application no. 4, has been published in A. And the activity of the gene product thereof is the activity of hexose transporter.

[32031] Accordingly, in one embodiment, the process of the present invention for producing threonine in a non-human organism, like a microorganism or a plant or a part thereof, comprises increasing or generating the activity of a gene product with the activity of a gene product conferring the activity of “hexose transporter”, especially from Saccharomyces cerevisiae or its functional equivalent or its homolog, e.g. the increase of
[32032] (a) a gene product of a gene comprising the nucleic acid molecule as shown in the respective line in column 5 of Table I, application no. 4, preferably the coding region thereof, or a homolog or a fragment thereof, and being depicted in the same respective line as said Ydr342c, or a functional equivalent or a homolog thereof as shown in column 8 of Table I, application no. 4, preferably the coding region thereof, particularly a homolog or functional equivalent as shown in column 8 of Table I B, application no. 4, and being depicted in the same respective line as said Ydr342c, and preferably the activity is increased plastidic, or
[32033] (b) a polypeptide comprising a polypeptide, a consensus sequence or at least a polypeptide motif as shown in the respective line in column 5 of Table II or in column 8 of Table IV, application no. 4, respectively, and being depicted in the same respective line as said Ydr342c, or a functional equivalent or a homolog thereof as depicted in column 8 of Table II, application no. 4, preferably a homolog or functional equivalent as depicted in column 8 of Table II B, application no. 4, and being depicted in the same respective line as said Ydr342c, and preferably the activity is increased plastidic.

[32034] Accordingly, in one embodiment, the molecule which activity is to be increased in the process of the invention is the gene product with an activity as a “hexose transporter”, preferably it is the molecule of section (a) or (b) of this paragraph.

[32035] In particular, it was observed that in plants, especially in Arabidopsis thaliana, increasing or generating the activity of a gene product plastidic with the activity of a “hexose transporter”, preferably being encoded by a gene comprising the nucleic acid sequence SEQ ID NO. 96986, preferably the coding region thereof, conferred the production of or the increase in threonine compared with the wild type control.

[32036] The nucleic acid sequence of Yel030c-a from Saccharomyces cerevisiae, e.g. as shown in the respective line in column 5 of Table I, application no. 4, has been published in A. And the activity of the gene product thereof is the activity of YEL030C-A-protein.

[32037] Accordingly, in one embodiment, the process of the present invention for producing threonine in a non-human organism, like a microorganism or a plant or a part thereof, comprises increasing or generating the activity of a gene product with the activity of a gene product conferring the activity of “YEL030C-A-protein”, especially from Saccharomyces cerevisiae or its functional equivalent or its homolog, e.g. the increase of
[32038] (a) a gene product of a gene comprising the nucleic acid molecule as shown in the respective line in column 5 of Table I, application no. 4, preferably the coding region thereof, or a homolog or a fragment thereof, and being depicted in the same respective line as said Yel030c-a, or a functional equivalent or a homolog thereof as shown in column 8 of Table I, application no. 4, preferably the coding region thereof, particularly a homolog or functional equivalent as shown in column 8 of Table I B, application no. 4, and being depicted in the same respective line as said Yel030c-a, and preferably the activity is increased non-targeted, or
[32039] (b) a polypeptide comprising a polypeptide, a consensus sequence or at least a polypeptide motif as shown in the respective line in column 5 of Table II or in column 8 of Table IV, application no. 4, respectively, and being depicted in the same respective line as said Yel030c-a, or a functional equivalent or a homolog thereof as depicted in column 8 of Table II, application no. 4, preferably a homolog or functional equivalent as depicted in column 8 of Table II B, application no. 4, and being depicted in the same respective line as said Yel030c-a, and preferably the activity is increased non-targeted.

[32040] Accordingly, in one embodiment, the molecule which activity is to be increased in the process of the invention is the gene product with an activity as a “YEL030C-A-protein”, preferably it is the molecule of section (a) or (b) of this paragraph.

[32041] In particular, it was observed that in plants, especially in Arabidopsis thaliana, increasing or generating the activity of a gene product non-targeted with the activity of a “YEL030C-A-protein”, preferably being encoded by a gene comprising the nucleic acid sequence SEQ ID NO. 97294, preferably the coding region thereof, conferred the production of or the increase in threonine compared with the wild type control.

[32042] The nucleic acid sequence of Yel069c from Saccharomyces cerevisiae, e.g. as shown in the respective line in column 5 of Table I, application no. 4, has been published in A. And the activity of the gene product thereof is the activity of hexose transporter.

[32043] Accordingly, in one embodiment, the process of the present invention for producing threonine in a non-human organism, like a microorganism or a plant or a part thereof, comprises increasing or generating the activity of a gene product with the activity of a gene product conferring the activity of “hexose transporter”, especially from Saccharomyces cerevisiae or its functional equivalent or its homolog, e.g. the increase of
[32044] (a) a gene product of a gene comprising the nucleic acid molecule as shown in the respective line in column 5 of Table I, application no. 4, preferably the coding region thereof, or a homolog or a fragment thereof, and being depicted in the same respective line as said Yel069c, or a functional equivalent or a homolog thereof as shown in column 8 of Table I, application no. 4, preferably the coding region thereof, particularly a homolog or functional equivalent as shown in column 8 of Table I B, application no. 4, and being depicted in the same respective line as said Yel069c, and preferably the activity is increased plastidic, or
[32045] (b) a polypeptide comprising a polypeptide, a consensus sequence or at least a polypeptide motif as shown in the respective line in column 5 of Table II or in column 8 of Table IV, application no. 4, respectively, and being depicted in the same respective line as said Yel069c, or a functional equivalent or a homolog thereof as depicted in column 8 of Table II, application no. 4, preferably a homolog or functional equivalent as depicted in column 8 of Table II B, application no. 4, and being depicted in the same respective line as said Yel069c, and preferably the activity is increased plastidic.

[32046] Accordingly, in one embodiment, the molecule which activity is to be increased in the process of the invention is the gene product with an activity as a “hexose transporter”, preferably it is the molecule of section (a) or (b) of this paragraph.

[32047] In particular, it was observed that in plants, especially in Arabidopsis thaliana, increasing or generating the activity of a gene product plastidic with the activity of a “hexose transporter”, preferably being encoded by a gene comprising the nucleic acid sequence SEQ ID NO. 97298, preferably the coding region thereof, conferred the production of or the increase in threonine compared with the wild type control.

[32048] The nucleic acid sequence of Yfl054c from Saccharomyces cerevisiae, e.g. as shown in the respective line in column 5 of Table I, application no. 4, has been published in A. And the activity of the gene product thereof is the activity of yfl054c-protein.

[32049] Accordingly, in one embodiment, the process of the present invention for producing threonine in a non-human organism, like a microorganism or a plant or a part thereof, comprises increasing or generating the activity of a gene product with the activity of a gene product conferring the activity of “yfl054c-protein”, especially from Saccharomyces cerevisiae or its functional equivalent or its homolog, e.g. the increase of
[32050] (a) a gene product of a gene comprising the nucleic acid molecule as shown in the respective line in column 5 of Table I, application no. 4, preferably the coding region thereof, or a homolog or a fragment thereof, and being depicted in the same respective line as said Yfl054c, or a functional equivalent or a homolog thereof as shown in column 8 of Table I, application no. 4, preferably the coding region thereof, particularly a homolog or functional equivalent as shown in column 8 of Table I B, application no. 4, and being depicted in the same respective line as said Yfl054c, and preferably the activity is increased plastidic, or
[32051] (b) a polypeptide comprising a polypeptide, a consensus sequence or at least a polypeptide motif as shown in the respective line in column 5 of Table II or in column 8 of Table IV, application no. 4, respectively, and being depicted in the same respective line as said Yfl054c, or a functional equivalent or a homolog thereof as depicted in column 8 of Table II, application no. 4, preferably a homolog or functional equivalent as depicted in column 8 of Table II B, application no. 4, and being depicted in the same respective line as said Yfl054c, and preferably the activity is increased plastidic.

[32052] Accordingly, in one embodiment, the molecule which activity is to be increased in the process of the invention is the gene product with an activity as a “yfl054c-protein”, preferably it is the molecule of section (a) or (b) of this paragraph.

[32053] In particular, it was observed that in plants, especially in Arabidopsis thaliana, increasing or generating the activity of a gene product plastidic with the activity of a “yfl054c-protein”, preferably being encoded by a gene comprising the nucleic acid sequence SEQ ID NO. 64148, preferably the coding region thereof, conferred the production of or the increase in threonine compared with the wild type control.

[32054] The nucleic acid sequence of Ygl237c from Saccharomyces cerevisiae, e.g. as shown in the respective line in column 5 of Table I, application no. 4, has been published in A. And the activity of the gene product thereof is the activity of ygl237c-protein.

[32055] Accordingly, in one embodiment, the process of the present invention for producing threonine in a non-human organism, like a microorganism or a plant or a part thereof, comprises increasing or generating the activity of a gene product with the activity of a gene product conferring the activity of “ygl237c-protein”, especially from Saccharomyces cerevisiae or its functional equivalent or its homolog, e.g. the increase of
[32056] (a) a gene product of a gene comprising the nucleic acid molecule as shown in the respective line in column 5 of Table I, application no. 4, preferably the coding region thereof, or a homolog or a fragment thereof, and being depicted in the same respective line as said Ygl237c, or a functional equivalent or a homolog thereof as shown in column 8 of Table I, application no. 4, preferably the coding region thereof, particularly a homolog or functional equivalent as shown in column 8 of Table I B, application no. 4, and being depicted in the same respective line as said Ygl237c, and preferably the activity is increased non-targeted, or
[32057] (b) a polypeptide comprising a polypeptide, a consensus sequence or at least a polypeptide motif as shown in the respective line in column 5 of Table II or in column 8 of Table IV, application no. 4, respectively, and being depicted in the same respective line as said Ygl237c, or a functional equivalent or a homolog thereof as depicted in column 8 of Table II, application no. 4, preferably a homolog or functional equivalent as depicted in column 8 of Table II B, application no. 4, and being depicted in the same respective line as said Ygl237c, and preferably the activity is increased non-targeted.

[32058] Accordingly, in one embodiment, the molecule which activity is to be increased in the process of the invention is the gene product with an activity as a “ygl237c-protein”, preferably it is the molecule of section (a) or (b) of this paragraph.

[32059] In particular, it was observed that in plants, especially in Arabidopsis thaliana, increasing or generating the activity of a gene product non-targeted with the activity of a “ygl237c-protein”, preferably being encoded by a gene comprising the nucleic acid sequence SEQ ID NO. 64177, preferably the coding region thereof, conferred the production of or the increase in threonine compared with the wild type control.

[32060] The nucleic acid sequence of Yhr131c from Saccharomyces cerevisiae, e.g. as shown in the respective line in column 5 of Table I, application no. 4, has been published in A. And the activity of the gene product thereof is the activity of yhr131c-protein.

[32061] Accordingly, in one embodiment, the process of the present invention for producing threonine in a non-human organism, like a microorganism or a plant or a part thereof, comprises increasing or generating the activity of a gene product with the activity of a gene product conferring the activity of “yhr131c-protein”, especially from Saccharomyces cerevisiae or its functional equivalent or its homolog, e.g. the increase of
[32062] (a) a gene product of a gene comprising the nucleic acid molecule as shown in the respective line in column 5 of Table I, application no. 4, preferably the coding region thereof, or a homolog or a fragment thereof, and being depicted in the same respective line as said Yhr131c, or a functional equivalent or a homolog thereof as shown in column 8 of Table I, application no. 4, preferably the coding region thereof, particularly a homolog or functional equivalent as shown in column 8 of Table I B, application no. 4, and being depicted in the same respective line as said Yhr131c, and preferably the activity is increased plastidic, or
[32063] (b) a polypeptide comprising a polypeptide, a consensus sequence or at least a polypeptide motif as shown in the respective line in column 5 of Table II or in column 8 of Table IV, application no. 4, respectively, and being depicted in the same respective line as said Yhr131c, or a functional equivalent or a homolog thereof as depicted in column 8 of Table II, application no. 4, preferably a homolog or functional equivalent as depicted in column 8 of Table II B, application no. 4, and being depicted in the same respective line as said Yhr131c, and preferably the activity is increased plastidic.

[32064] Accordingly, in one embodiment, the molecule which activity is to be increased in the process of the invention is the gene product with an activity as a “yhr131c-protein”, preferably it is the molecule of section (a) or (b) of this paragraph.

[32065] In particular, it was observed that in plants, especially in Arabidopsis thaliana, increasing or generating the activity of a gene product plastidic with the activity of a “yhr131c-protein”, preferably being encoded by a gene comprising the nucleic acid sequence SEQ ID NO. 97620, preferably the coding region thereof, conferred the production of or the increase in threonine compared with the wild type control.

[32066] The nucleic acid sequence of Yil053w from Saccharomyces cerevisiae, e.g. as shown in the respective line in column 5 of Table I, application no. 4, has been published in A. And the activity of the gene product thereof is the activity of (DL)-glycerol-3-phosphatase.

[32067] Accordingly, in one embodiment, the process of the present invention for producing threonine in a non-human organism, like a microorganism or a plant or a part thereof, comprises increasing or generating the activity of a gene product with the activity of a gene product conferring the activity of “(DL)-glycerol-3-phosphatase”, especially from Saccharomyces cerevisiae or its functional equivalent or its homolog, e.g. the increase of
[32068] (a) a gene product of a gene comprising the nucleic acid molecule as shown in the respective line in column 5 of Table I, application no. 4, preferably the coding region thereof, or a homolog or a fragment thereof, and being depicted in the same respective line as said Yil053w, or a functional equivalent or a homolog thereof as shown in column 8 of Table I, application no. 4, preferably the coding region thereof, particularly a homolog or functional equivalent as shown in column 8 of Table I B, application no. 4, and being depicted in the same respective line as said Yil053w, and preferably the activity is increased plastidic, or
[32069] (b) a polypeptide comprising a polypeptide, a consensus sequence or at least a polypeptide motif as shown in the respective line in column 5 of Table II or in column 8 of Table IV, application no. 4, respectively, and being depicted in the same respective line as said Yil053w, or a functional equivalent or a homolog thereof as depicted in column 8 of Table II, application no. 4, preferably a homolog or functional equivalent as depicted in column 8 of Table II B, application no. 4, and being depicted in the same respective line as said Yil053w, and preferably the activity is increased plastidic.

[32070] Accordingly, in one embodiment, the molecule which activity is to be increased in the process of the invention is the gene product with an activity as a “(DL)-glycerol-3-phosphatase”, preferably it is the molecule of section (a) or (b) of this paragraph.

[32071] In particular, it was observed that in plants, especially in Arabidopsis thaliana, increasing or generating the activity of a gene product plastidic with the activity of a “(DL)-glycerol-3-phosphatase”, preferably being encoded by a gene comprising the nucleic acid sequence SEQ ID NO. 14769, preferably the coding region thereof, conferred the production of or the increase in threonine compared with the wild type control.

[32072] The nucleic acid sequence of Yil074c from Saccharomyces cerevisiae, e.g. as shown in the respective line in column 5 of Table I, application no. 4, has been published in A. And the activity of the gene product thereof is the activity of 3-phosphoglycerate dehydrogenase.

[32073] Accordingly, in one embodiment, the process of the present invention for producing threonine in a non-human organism, like a microorganism or a plant or a part thereof, comprises increasing or generating the activity of a gene product with the activity of a gene product conferring the activity of “3-phosphoglycerate dehydrogenase”, especially from Saccharomyces cerevisiae or its functional equivalent or its homolog, e.g. the increase of
[32074] (a) a gene product of a gene comprising the nucleic acid molecule as shown in the respective line in column 5 of Table I, application no. 4, preferably the coding region thereof, or a homolog or a fragment thereof, and being depicted in the same respective line as said Yil074c, or a functional equivalent or a homolog thereof as shown in column 8 of Table I, application no. 4, preferably the coding region thereof, particularly a homolog or functional equivalent as shown in column 8 of Table I B, application no. 4, and being depicted in the same respective line as said Yil074c, and preferably the activity is increased plastidic, or
[32075] (b) a polypeptide comprising a polypeptide, a consensus sequence or at least a polypeptide motif as shown in the respective line in column 5 of Table II or in column 8 of Table IV, application no. 4, respectively, and being depicted in the same respective line as said Yil074c, or a functional equivalent or a homolog thereof as depicted in column 8 of Table II, application no. 4, preferably a homolog or functional equivalent as depicted in column 8 of Table II B, application no. 4, and being depicted in the same respective line as said Yil074c, and preferably the activity is increased plastidic.

[32076] Accordingly, in one embodiment, the molecule which activity is to be increased in the process of the invention is the gene product with an activity as a “3-phosphoglycerate dehydrogenase”, preferably it is the molecule of section (a) or (b) of this paragraph.

[32077] In particular, it was observed that in plants, especially in Arabidopsis thaliana, increasing or generating the activity of a gene product plastidic with the activity of a “3-phosphoglycerate dehydrogenase”, preferably being encoded by a gene comprising the nucleic acid sequence SEQ ID NO. 64563, preferably the coding region thereof, conferred the production of or the increase in threonine compared with the wild type control.

[32078] The nucleic acid sequence of Yir038c from Saccharomyces cerevisiae, e.g. as shown in the respective line in column 5 of Table I, application no. 4, has been published in A. And the activity of the gene product thereof is the activity of glutathione S-transferase.

[32079] Accordingly, in one embodiment, the process of the present invention for producing threonine in a non-human organism, like a microorganism or a plant or a part thereof, comprises increasing or generating the activity of a gene product with the activity of a gene product conferring the activity of “glutathione S-transferase”, especially from Saccharomyces cerevisiae or its functional equivalent or its homolog, e.g. the increase of
[32080] (a) a gene product of a gene comprising the nucleic acid molecule as shown in the respective line in column 5 of Table I, application no. 4, preferably the coding region thereof, or a homolog or a fragment thereof, and being depicted in the same respective line as said Yir038c, or a functional equivalent or a homolog thereof as shown in column 8 of Table I, application no. 4, preferably the coding region thereof, particularly a homolog or functional equivalent as shown in column 8 of Table I B, application no. 4, and being depicted in the same respective line as said Yir038c, and preferably the activity is increased plastidic, or
[32081] (b) a polypeptide comprising a polypeptide, a consensus sequence or at least a polypeptide motif as shown in the respective line in column 5 of Table II or in column 8 of Table IV, application no. 4, respectively, and being depicted in the same respective line as said Yir038c, or a functional equivalent or a homolog thereof as depicted in column 8 of Table II, application no. 4, preferably a homolog or functional equivalent as depicted in column 8 of Table II B, application no. 4, and being depicted in the same respective line as said Yir038c, and preferably the activity is increased plastidic.

[32082] Accordingly, in one embodiment, the molecule which activity is to be increased in the process of the invention is the gene product with an activity as a “glutathione S-transferase”, preferably it is the molecule of section (a) or (b) of this paragraph.

[32083] In particular, it was observed that in plants, especially in Arabidopsis thaliana, increasing or generating the activity of a gene product plastidic with the activity of a “glutathione 5transferase”, preferably being encoded by a gene comprising the nucleic acid sequence SEQ ID NO. 90306, preferably the coding region thereof, conferred the production of or the increase in threonine compared with the wild type control.

[32084] The nucleic acid sequence of Yjl073w from Saccharomyces cerevisiae, e.g. as shown in the respective line in column 5 of Table I, application no. 4, has been published in A. And the activity of the gene product thereof is the activity of DnaJ-like chaperone.

[32085] Accordingly, in one embodiment, the process of the present invention for producing threonine in a non-human organism, like a microorganism or a plant or a part thereof, comprises increasing or generating the activity of a gene product with the activity of a gene product conferring the activity of “DnaJ-like chaperone”, especially from Saccharomyces cerevisiae or its functional equivalent or its homolog, e.g. the increase of
[32086] (a) a gene product of a gene comprising the nucleic acid molecule as shown in the respective line in column 5 of Table I, application no. 4, preferably the coding region thereof, or a homolog or a fragment thereof, and being depicted in the same respective line as said Yjl073w, or a functional equivalent or a homolog thereof as shown in column 8 of Table I, application no. 4, preferably the coding region thereof, particularly a homolog or functional equivalent as shown in column 8 of Table I B, application no. 4, and being depicted in the same respective line as said Yjl073w, and preferably the activity is increased plastidic, or
[32087] (b) a polypeptide comprising a polypeptide, a consensus sequence or at least a polypeptide motif as shown in the respective line in column 5 of Table II or in column 8 of Table IV, application no. 4, respectively, and being depicted in the same respective line as said Yjl073w, or a functional equivalent or a homolog thereof as depicted in column 8 of Table II, application no. 4, preferably a homolog or functional equivalent as depicted in column 8 of Table II B, application no. 4, and being depicted in the same respective line as said Yjl073w, and preferably the activity is increased plastidic.

[32088] Accordingly, in one embodiment, the molecule which activity is to be increased in the process of the invention is the gene product with an activity as a “DnaJ-like chaperone”, preferably it is the molecule of section (a) or (b) of this paragraph.

[32089] In particular, it was observed that in plants, especially in Arabidopsis thaliana, increasing or generating the activity of a gene product plastidic with the activity of a “DnaJ-like chaperone”, preferably being encoded by a gene comprising the nucleic acid sequence SEQ ID NO. 64964, preferably the coding region thereof, conferred the production of or the increase in threonine compared with the wild type control.

[32090] The nucleic acid sequence of Yjl127w-a from Saccharomyces cerevisiae, e.g. as shown in the respective line in column 5 of Table I, application no. 4, has been published in A. And the activity of the gene product thereof is the activity of YJL127W-A-protein.

[32091] Accordingly, in one embodiment, the process of the present invention for producing threonine in a non-human organism, like a microorganism or a plant or a part thereof, comprises increasing or generating the activity of a gene product with the activity of a gene product conferring the activity of “YJL127W-A-protein”, especially from Saccharomyces cerevisiae or its functional equivalent or its homolog, e.g. the increase of
[32092] (a) a gene product of a gene comprising the nucleic acid molecule as shown in the respective line in column 5 of Table I, application no. 4, preferably the coding region thereof, or a homolog or a fragment thereof, and being depicted in the same respective line as said Yjl127w-a, or a functional equivalent or a homolog thereof as shown in column 8 of Table I, application no. 4, preferably the coding region thereof, particularly a homolog or functional equivalent as shown in column 8 of Table I B, application no. 4, and being depicted in the same respective line as said Yjl127w-a, and preferably the activity is increased non-targeted, or
[32093] (b) a polypeptide comprising a polypeptide, a consensus sequence or at least a polypeptide motif as shown in the respective line in column 5 of Table II or in column 8 of Table IV, application no. 4, respectively, and being depicted in the same respective line as said Yjl127w-a, or a functional equivalent or a homolog thereof as depicted in column 8 of Table II, application no. 4, preferably a homolog or functional equivalent as depicted in column 8 of Table II B, application no. 4, and being depicted in the same respective line as said Yjl127w-a, and preferably the activity is increased non-targeted.

[32094] Accordingly, in one embodiment, the molecule which activity is to be increased in the process of the invention is the gene product with an activity as a “YJL127W-A-protein”, preferably it is the molecule of section (a) or (b) of this paragraph.

[32095] In particular, it was observed that in plants, especially in Arabidopsis thaliana, increasing or generating the activity of a gene product non-targeted with the activity of a “YJL127W-A-protein”, preferably being encoded by a gene comprising the nucleic acid sequence SEQ ID NO. 97631, preferably the coding region thereof, conferred the production of or the increase in threonine compared with the wild type control.

[32096] The nucleic acid sequence of Yjl219w from Saccharomyces cerevisiae, e.g. as shown in the respective line in column 5 of Table I, application no. 4, has been published in A. And the activity of the gene product thereof is the activity of hexose transporter.

[32097] Accordingly, in one embodiment, the process of the present invention for producing threonine in a non-human organism, like a microorganism or a plant or a part thereof, comprises increasing or generating the activity of a gene product with the activity of a gene product conferring the activity of “hexose transporter”, especially from Saccharomyces cerevisiae or its functional equivalent or its homolog, e.g. the increase of
[32098] (a) a gene product of a gene comprising the nucleic acid molecule as shown in the respective line in column 5 of Table I, application no. 4, preferably the coding region thereof, or a homolog or a fragment thereof, and being depicted in the same respective line as said Yjl219w, or a functional equivalent or a homolog thereof as shown in column 8 of Table I, application no. 4, preferably the coding region thereof, particularly a homolog or functional equivalent as shown in column 8 of Table I B, application no. 4, and being depicted in the same respective line as said Yjl219w, and preferably the activity is increased non-targeted, or
[32099] (b) a polypeptide comprising a polypeptide, a consensus sequence or at least a polypeptide motif as shown in the respective line in column 5 of Table II or in column 8 of Table IV, application no. 4, respectively, and being depicted in the same respective line as said Yjl219w, or a functional equivalent or a homolog thereof as depicted in column 8 of Table II, application no. 4, preferably a homolog or functional equivalent as depicted in column 8 of Table II B, application no. 4, and being depicted in the same respective line as said Yjl219w, and preferably the activity is increased non-targeted.

[32100] Accordingly, in one embodiment, the molecule which activity is to be increased in the process of the invention is the gene product with an activity as a “hexose transporter”, preferably it is the molecule of section (a) or (b) of this paragraph.

[32101] In particular, it was observed that in plants, especially in Arabidopsis thaliana, increasing or generating the activity of a gene product non-targeted with the activity of a “hexose transporter”, preferably being encoded by a gene comprising the nucleic acid sequence SEQ ID NO. 97635, preferably the coding region thereof, conferred the production of or the increase in threonine compared with the wild type control.

[32102] The nucleic acid sequence of Yjr139c from Saccharomyces cerevisiae, e.g. as shown in the respective line in column 5 of Table I, application no. 4, has been published in A. And the activity of the gene product thereof is the activity of homoserine dehydrogenase.

[32103] Accordingly, in one embodiment, the process of the present invention for producing threonine in a non-human organism, like a microorganism or a plant or a part thereof, comprises increasing or generating the activity of a gene product with the activity of a gene product conferring the activity of “homoserine dehydrogenase”, especially from Saccharomyces cerevisiae or its functional equivalent or its homolog, e.g. the increase of
[32104] (a) a gene product of a gene comprising the nucleic acid molecule as shown in the respective line in column 5 of Table I, application no. 4, preferably the coding region thereof, or a homolog or a fragment thereof, and being depicted in the same respective line as said Yjr139c, or a functional equivalent or a homolog thereof as shown in column 8 of Table I, application no. 4, preferably the coding region thereof, particularly a homolog or functional equivalent as shown in column 8 of Table I B, application no. 4, and being depicted in the same respective line as said Yjr139c, and preferably the activity is increased plastidic, or
[32105] (b) a polypeptide comprising a polypeptide, a consensus sequence or at least a polypeptide motif as shown in the respective line in column 5 of Table II or in column 8 of Table IV, application no. 4, respectively, and being depicted in the same respective line as said Yjr139c, or a functional equivalent or a homolog thereof as depicted in column 8 of Table II, application no. 4, preferably a homolog or functional equivalent as depicted in column 8 of Table II B, application no. 4, and being depicted in the same respective line as said Yjr139c, and preferably the activity is increased plastidic.

[32106] Accordingly, in one embodiment, the molecule which activity is to be increased in the process of the invention is the gene product with an activity as a “homoserine dehydrogenase”, preferably it is the molecule of section (a) or (b) of this paragraph.

[32107] In particular, it was observed that in plants, especially in Arabidopsis thaliana, increasing or generating the activity of a gene product plastidic with the activity of a “homoserine dehydrogenase”, preferably being encoded by a gene comprising the nucleic acid sequence SEQ ID NO. 14885, preferably the coding region thereof, conferred the production of or the increase in threonine compared with the wild type control.

[32108] The nucleic acid sequence of Yjr148w from Saccharomyces cerevisiae, e.g. as shown in the respective line in column 5 of Table I, application no. 4, has been published in A. And the activity of the gene product thereof is the activity of branched chain aminotransferase.

[32109] Accordingly, in one embodiment, the process of the present invention for producing threonine in a non-human organism, like a microorganism or a plant or a part thereof, comprises increasing or generating the activity of a gene product with the activity of a gene product conferring the activity of “branched chain aminotransferase”, especially from Saccharomyces cerevisiae or its functional equivalent or its homolog, e.g. the increase of
[32110] (a) a gene product of a gene comprising the nucleic acid molecule as shown in the respective line in column 5 of Table I, application no. 4, preferably the coding region thereof, or a homolog or a fragment thereof, and being depicted in the same respective line as said Yjr148w, or a functional equivalent or a homolog thereof as shown in column 8 of Table I, application no. 4, preferably the coding region thereof, particularly a homolog or functional equivalent as shown in column 8 of Table I B, application no. 4, and being depicted in the same respective line as said Yjr148w, and preferably the activity is increased plastidic, or
[32111] (b) a polypeptide comprising a polypeptide, a consensus sequence or at least a polypeptide motif as shown in the respective line in column 5 of Table II or in column 8 of Table IV, application no. 4, respectively, and being depicted in the same respective line as said Yjr148w, or a functional equivalent or a homolog thereof as depicted in column 8 of Table II, application no. 4, preferably a homolog or functional equivalent as depicted in column 8 of Table II B, application no. 4, and being depicted in the same respective line as said Yjr148w, and preferably the activity is increased plastidic.

[32112] Accordingly, in one embodiment, the molecule which activity is to be increased in the process of the invention is the gene product with an activity as a “branched chain aminotransferase”, preferably it is the molecule of section (a) or (b) of this paragraph.

[32113] In particular, it was observed that in plants, especially in Arabidopsis thaliana, increasing or generating the activity of a gene product plastidic with the activity of a “branched chain aminotransferase”, preferably being encoded by a gene comprising the nucleic acid sequence SEQ ID NO. 90409, preferably the coding region thereof, conferred the production of or the increase in threonine compared with the wild type control.

[32114] The nucleic acid sequence of YKL038W from Saccharomyces cerevisiae, e.g. as shown in the respective line in column 5 of Table I, application no. 4, has been published in A. And the activity of the gene product thereof is the activity of YKL038W-protein.

[32115] Accordingly, in one embodiment, the process of the present invention for producing threonine in a non-human organism, like a microorganism or a plant or a part thereof, comprises increasing or generating the activity of a gene product with the activity of a gene product conferring the activity of “YKL038W-protein”, especially from Saccharomyces cerevisiae or its functional equivalent or its homolog, e.g. the increase of
[32116] (a) a gene product of a gene comprising the nucleic acid molecule as shown in the respective line in column 5 of Table I, application no. 4, preferably the coding region thereof, or a homolog or a fragment thereof, and being depicted in the same respective line as said YKL038W, or a functional equivalent or a homolog thereof as shown in column 8 of Table I, application no. 4, preferably the coding region thereof, particularly a homolog or functional equivalent as shown in column 8 of Table I B, application no. 4, and being depicted in the same respective line as said YKL038W, and preferably the activity is increased plastidic, or
[32117] (b) a polypeptide comprising a polypeptide, a consensus sequence or at least a polypeptide motif as shown in the respective line in column 5 of Table II or in column 8 of Table IV, application no. 4, respectively, and being depicted in the same respective line as said YKL038W, or a functional equivalent or a homolog thereof as depicted in column 8 of Table II, application no. 4, preferably a homolog or functional equivalent as depicted in column 8 of Table II B, application no. 4, and being depicted in the same respective line as said YKL038W, and preferably the activity is increased plastidic.

[32118] Accordingly, in one embodiment, the molecule which activity is to be increased in the process of the invention is the gene product with an activity as a “YKL038W-protein”, preferably it is the molecule of section (a) or (b) of this paragraph.

[32119] In particular, it was observed that in plants, especially in Arabidopsis thaliana, increasing or generating the activity of a gene product plastidic with the activity of a “YKL038W-protein”, preferably being encoded by a gene comprising the nucleic acid sequence SEQ ID NO. 90602, preferably the coding region thereof, conferred the production of or the increase in threonine compared with the wild type control.

[32120] The nucleic acid sequence of Ykr097w from Saccharomyces cerevisiae, e.g. as shown in the respective line in column 5 of Table I, application no. 4, has been published in A. And the activity of the gene product thereof is the activity of phosphoenolpyruvate carboxykinase.

[32121] Accordingly, in one embodiment, the process of the present invention for producing threonine in a non-human organism, like a microorganism or a plant or a part thereof, comprises increasing or generating the activity of a gene product with the activity of a gene product conferring the activity of “phosphoenolpyruvate carboxykinase”, especially from Saccharomyces cerevisiae or its functional equivalent or its homolog, e.g. the increase of
[32122] (a) a gene product of a gene comprising the nucleic acid molecule as shown in the respective line in column 5 of Table I, application no. 4, preferably the coding region thereof, or a homolog or a fragment thereof, and being depicted in the same respective line as said Ykr097w, or a functional equivalent or a homolog thereof as shown in column 8 of Table I, application no. 4, preferably the coding region thereof, particularly a homolog or functional equivalent as shown in column 8 of Table I B, application no. 4, and being depicted in the same respective line as said Ykr097w, and preferably the activity is increased plastidic, or
[32123] (b) a polypeptide comprising a polypeptide, a consensus sequence or at least a polypeptide motif as shown in the respective line in column 5 of Table II or in column 8 of Table IV, application no. 4, respectively, and being depicted in the same respective line as said Ykr097w, or a functional equivalent or a homolog thereof as depicted in column 8 of Table II, application no. 4, preferably a homolog or functional equivalent as depicted in column 8 of Table II B, application no. 4, and being depicted in the same respective line as said Ykr097w, and preferably the activity is increased plastidic.

[32124] Accordingly, in one embodiment, the molecule which activity is to be increased in the process of the invention is the gene product with an activity as a “phosphoenolpyruvate carboxykinase”, preferably it is the molecule of section (a) or (b) of this paragraph.

[32125] In particular, it was observed that in plants, especially in Arabidopsis thaliana, increasing or generating the activity of a gene product plastidic with the activity of a “phosphoenolpyruvate carboxykinase”, preferably being encoded by a gene comprising the nucleic acid sequence SEQ ID NO. 98075, preferably the coding region thereof, conferred the production of or the increase in threonine compared with the wild type control.

[32126] The nucleic acid sequence of Ylr027c from Saccharomyces cerevisiae, e.g. as shown in the respective line in column 5 of Table I, application no. 4, has been published in A. And the activity of the gene product thereof is the activity of aspartate aminotransferase.

[32127] Accordingly, in one embodiment, the process of the present invention for producing threonine in a non-human organism, like a microorganism or a plant or a part thereof, comprises increasing or generating the activity of a gene product with the activity of a gene product conferring the activity of “aspartate aminotransferase”, especially from Saccharomyces cerevisiae or its functional equivalent or its homolog, e.g. the increase of
[32128] (a) a gene product of a gene comprising the nucleic acid molecule as shown in the respective line in column 5 of Table I, application no. 4, preferably the coding region thereof, or a homolog or a fragment thereof, and being depicted in the same respective line as said Ylr027c, or a functional equivalent or a homolog thereof as shown in column 8 of Table I, application no. 4, preferably the coding region thereof, particularly a homolog or functional equivalent as shown in column 8 of Table I B, application no. 4, and being depicted in the same respective line as said Ylr027c, and preferably the activity is increased non-targeted, or
[32129] (b) a polypeptide comprising a polypeptide, a consensus sequence or at least a polypeptide motif as shown in the respective line in column 5 of Table II or in column 8 of Table IV, application no. 4, respectively, and being depicted in the same respective line as said Ylr027c, or a functional equivalent or a homolog thereof as depicted in column 8 of Table II, application no. 4, preferably a homolog or functional equivalent as depicted in column 8 of Table II B, application no. 4, and being depicted in the same respective line as said Ylr027c, and preferably the activity is increased non-targeted.

[32130] Accordingly, in one embodiment, the molecule which activity is to be increased in the process of the invention is the gene product with an activity as a “aspartate aminotransferase”, preferably it is the molecule of section (a) or (b) of this paragraph.

[32131] In particular, it was observed that in plants, especially in Arabidopsis thaliana, increasing or generating the activity of a gene product non-targeted with the activity of a “aspartate aminotransferase”, preferably being encoded by a gene comprising the nucleic acid sequence SEQ ID NO. 90615, preferably the coding region thereof, conferred the production of or the increase in threonine compared with the wild type control.

[32132] The nucleic acid sequence of Ylr348c from Saccharomyces cerevisiae, e.g. as shown in the respective line in column 5 of Table I, application no. 4, has been published in A. And the activity of the gene product thereof is the activity of mitochondrial dicarboxylate transporter.

[32133] Accordingly, in one embodiment, the process of the present invention for producing threonine in a non-human organism, like a microorganism or a plant or a part thereof, comprises increasing or generating the activity of a gene product with the activity of a gene product conferring the activity of “mitochondrial dicarboxylate transporter”, especially from Saccharomyces cerevisiae or its functional equivalent or its homolog, e.g. the increase of
[32134] (a) a gene product of a gene comprising the nucleic acid molecule as shown in the respective line in column 5 of Table I, application no. 4, preferably the coding region thereof, or a homolog or a fragment thereof, and being depicted in the same respective line as said Ylr348c, or a functional equivalent or a homolog thereof as shown in column 8 of Table I, application no. 4, preferably the coding region thereof, particularly a homolog or functional equivalent as shown in column 8 of Table I B, application no. 4, and being depicted in the same respective line as said Ylr348c, and preferably the activity is increased non-targeted, or
[32135] (b) a polypeptide comprising a polypeptide, a consensus sequence or at least a polypeptide motif as shown in the respective line in column 5 of Table II or in column 8 of Table IV, application no. 4, respectively, and being depicted in the same respective line as said Ylr348c, or a functional equivalent or a homolog thereof as depicted in column 8 of Table II, application no. 4, preferably a homolog or functional equivalent as depicted in column 8 of Table II B, application no. 4, and being depicted in the same respective line as said Ylr348c, and preferably the activity is increased non-targeted.

[32136] Accordingly, in one embodiment, the molecule which activity is to be increased in the process of the invention is the gene product with an activity as a “mitochondrial dicarboxylate transporter”, preferably it is the molecule of section (a) or (b) of this paragraph.

[32137] In particular, it was observed that in plants, especially in Arabidopsis thaliana, increasing or generating the activity of a gene product non-targeted with the activity of a “mitochondrial dicarboxylate transporter”, preferably being encoded by a gene comprising the nucleic acid sequence SEQ ID NO. 98243, preferably the coding region thereof, conferred the production of or the increase in threonine compared with the wild type control.

[32138] The nucleic acid sequence of Yml123c from Saccharomyces cerevisiae, e.g. as shown in the respective line in column 5 of Table I, application no. 4, has been published in A. And the activity of the gene product thereof is the activity of phosphate transporter.

[32139] Accordingly, in one embodiment, the process of the present invention for producing threonine in a non-human organism, like a microorganism or a plant or a part thereof, comprises increasing or generating the activity of a gene product with the activity of a gene product conferring the activity of “phosphate transporter”, especially from Saccharomyces cerevisiae or its functional equivalent or its homolog, e.g. the increase of
[32140] (a) a gene product of a gene comprising the nucleic acid molecule as shown in the respective line in column 5 of Table I, application no. 4, preferably the coding region thereof, or a homolog or a fragment thereof, and being depicted in the same respective line as said Yml123c, or a functional equivalent or a homolog thereof as shown in column 8 of Table I, application no. 4, preferably the coding region thereof, particularly a homolog or functional equivalent as shown in column 8 of Table I B, application no. 4, and being depicted in the same respective line as said Yml123c, and preferably the activity is increased plastidic, or
[32141] (b) a polypeptide comprising a polypeptide, a consensus sequence or at least a polypeptide motif as shown in the respective line in column 5 of Table II or in column 8 of Table IV, application no. 4, respectively, and being depicted in the same respective line as said Yml123c, or a functional equivalent or a homolog thereof as depicted in column 8 of Table II, application no. 4, preferably a homolog or functional equivalent as depicted in column 8 of Table II B, application no. 4, and being depicted in the same respective line as said Yml123c, and preferably the activity is increased plastidic.

[32142] Accordingly, in one embodiment, the molecule which activity is to be increased in the process of the invention is the gene product with an activity as a “phosphate transporter”, preferably it is the molecule of section (a) or (b) of this paragraph.

[32143] In particular, it was observed that in plants, especially in Arabidopsis thaliana, increasing or generating the activity of a gene product plastidic with the activity of a “phosphate transporter”, preferably being encoded by a gene comprising the nucleic acid sequence SEQ ID NO. 91785, preferably the coding region thereof, conferred the production of or the increase in threonine compared with the wild type control.

[32144] The nucleic acid sequence of Yol045w from Saccharomyces cerevisiae, e.g. as shown in the respective line in column 5 of Table I, application no. 4, has been published in A. And the activity of the gene product thereof is the activity of protein kinase.

[32145] Accordingly, in one embodiment, the process of the present invention for producing threonine in a non-human organism, like a microorganism or a plant or a part thereof, comprises increasing or generating the activity of a gene product with the activity of a gene product conferring the activity of “protein kinase”, especially from Saccharomyces cerevisiae or its functional equivalent or its homolog, e.g. the increase of
[32146] (a) a gene product of a gene comprising the nucleic acid molecule as shown in the respective line in column 5 of Table I, application no. 4, preferably the coding region thereof, or a homolog or a fragment thereof, and being depicted in the same respective line as said Yol045w, or a functional equivalent or a homolog thereof as shown in column 8 of Table I, application no. 4, preferably the coding region thereof, particularly a homolog or functional equivalent as shown in column 8 of Table I B, application no. 4, and being depicted in the same respective line as said Yol045w, and preferably the activity is increased plastidic, or
[32147] (b) a polypeptide comprising a polypeptide, a consensus sequence or at least a polypeptide motif as shown in the respective line in column 5 of Table II or in column 8 of Table IV, application no. 4, respectively, and being depicted in the same respective line as said Yol045w, or a functional equivalent or a homolog thereof as depicted in column 8 of Table II, application no. 4, preferably a homolog or functional equivalent as depicted in column 8 of Table II B, application no. 4, and being depicted in the same respective line as said Yol045w, and preferably the activity is increased plastidic.

[32148] Accordingly, in one embodiment, the molecule which activity is to be increased in the process of the invention is the gene product with an activity as a “protein kinase”, preferably it is the molecule of section (a) or (b) of this paragraph.

[32149] In particular, it was observed that in plants, especially in Arabidopsis thaliana, increasing or generating the activity of a gene product plastidic with the activity of a “protein kinase”, preferably being encoded by a gene comprising the nucleic acid sequence SEQ ID NO. 67684, preferably the coding region thereof, conferred the production of or the increase in threonine compared with the wild type control.

[32150] The nucleic acid sequence of Yor244w from Saccharomyces cerevisiae, e.g. as shown in the respective line in column 5 of Table I, application no. 4, has been published in A. And the activity of the gene product thereof is the activity of histone acetyltransferase.

[32151] Accordingly, in one embodiment, the process of the present invention for producing threonine in a non-human organism, like a microorganism or a plant or a part thereof, comprises increasing or generating the activity of a gene product with the activity of a gene product conferring the activity of “histone acetyltransferase”, especially from Saccharomyces cerevisiae or its functional equivalent or its homolog, e.g. the increase of
[32152] (a) a gene product of a gene comprising the nucleic acid molecule as shown in the respective line in column 5 of Table I, application no. 4, preferably the coding region thereof, or a homolog or a fragment thereof, and being depicted in the same respective line as said Yor244w, or a functional equivalent or a homolog thereof as shown in column 8 of Table I, application no. 4, preferably the coding region thereof, particularly a homolog or functional equivalent as shown in column 8 of Table I B, application no. 4, and being depicted in the same respective line as said Yor244w, and preferably the activity is increased plastidic, or
[32153] (b) a polypeptide comprising a polypeptide, a consensus sequence or at least a polypeptide motif as shown in the respective line in column 5 of Table II or in column 8 of Table IV, application no. 4, respectively, and being depicted in the same respective line as said Yor244w, or a functional equivalent or a homolog thereof as depicted in column 8 of Table II, application no. 4, preferably a homolog or functional equivalent as depicted in column 8 of Table II B, application no. 4, and being depicted in the same respective line as said Yor244w, and preferably the activity is increased plastidic.

[32154] Accordingly, in one embodiment, the molecule which activity is to be increased in the process of the invention is the gene product with an activity as a “histone acetyltransferase”, preferably it is the molecule of section (a) or (b) of this paragraph.

[32155] In particular, it was observed that in plants, especially in Arabidopsis thaliana, increasing or generating the activity of a gene product plastidic with the activity of a “histone acetyltransferase”, preferably being encoded by a gene comprising the nucleic acid sequence SEQ ID NO. 92540, preferably the coding region thereof, conferred the production of or the increase in threonine compared with the wild type control.

[32156] The nucleic acid sequence of Ypr119w from Saccharomyces cerevisiae, e.g. as shown in the respective line in column 5 of Table I, application no. 4, has been published in A. And the activity of the gene product thereof is the activity of cyclin.

[32157] Accordingly, in one embodiment, the process of the present invention for producing threonine in a non-human organism, like a microorganism or a plant or a part thereof, comprises increasing or generating the activity of a gene product with the activity of a gene product conferring the activity of “cyclin”, especially from Saccharomyces cerevisiae or its functional equivalent or its homolog, e.g. the increase of
[32158] (a) a gene product of a gene comprising the nucleic acid molecule as shown in the respective line in column 5 of Table I, application no. 4, preferably the coding region thereof, or a homolog or a fragment thereof, and being depicted in the same respective line as said Ypr119w, or a functional equivalent or a homolog thereof as shown in column 8 of Table I, application no. 4, preferably the coding region thereof, particularly a homolog or functional equivalent as shown in column 8 of Table I B, application no. 4, and being depicted in the same respective line as said Ypr119w, and preferably the activity is increased non-targeted, or
[32159] (b) a polypeptide comprising a polypeptide, a consensus sequence or at least a polypeptide motif as shown in the respective line in column 5 of Table II or in column 8 of Table IV, application no. 4, respectively, and being depicted in the same respective line as said Ypr119w, or a functional equivalent or a homolog thereof as depicted in column 8 of Table II, application no. 4, preferably a homolog or functional equivalent as depicted in column 8 of Table II B, application no. 4, and being depicted in the same respective line as said Ypr119w, and preferably the activity is increased non-targeted.

[32160] Accordingly, in one embodiment, the molecule which activity is to be increased in the process of the invention is the gene product with an activity as a “cyclin”, preferably it is the molecule of section (a) or (b) of this paragraph.

[32161] In particular, it was observed that in plants, especially in Arabidopsis thaliana, increasing or generating the activity of a gene product non-targeted with the activity of a “cyclin”, preferably being encoded by a gene comprising the nucleic acid sequence SEQ ID NO. 98445, preferably the coding region thereof, conferred the production of or the increase in threonine compared with the wild type control.

[32162] The nucleic acid sequence of Zm_{—}4842_BE510522 from Zea mays, e.g. as shown in the respective line in column 5 of Table I, application no. 4, is unpublished. And the activity of the gene product thereof is the activity of Zm_{—}4842_BE510522-protein.

[32163] Accordingly, in one embodiment, the process of the present invention for producing threonine in a non-human organism, like a microorganism or a plant or a part thereof, comprises increasing or generating the activity of a gene product with the activity of a gene product conferring the activity of “Zm_{—}4842_BE510522-protein”, especially from Zea mays or its functional equivalent or its homolog, e.g. the increase of
[32164] (a) a gene product of a gene comprising the nucleic acid molecule as shown in the respective line in column 5 of Table I, application no. 4, preferably the coding region thereof, or a homolog or a fragment thereof, and being depicted in the same respective line as said Zm_{—}4842_BE510522, or a functional equivalent or a homolog thereof as shown in column 8 of Table I, application no. 4, preferably the coding region thereof, particularly a homolog or functional equivalent as shown in column 8 of Table I B, application no. 4, and being depicted in the same respective line as said Zm_{—}4842_BE510522, and preferably the activity is increased non-targeted, or
[32165] (b) a polypeptide comprising a polypeptide, a consensus sequence or at least a polypeptide motif as shown in the respective line in column 5 of Table II or in column 8 of Table IV, application no. 4, respectively, and being depicted in the same respective line as said Zm_{—}4842_BE510522, or a functional equivalent or a homolog thereof as depicted in column 8 of Table II, application no. 4, preferably a homolog or functional equivalent as depicted in column 8 of Table II B, application no. 4, and being depicted in the same respective line as said Zm_{—}4842_BE510522, and preferably the activity is increased non-targeted.

[32166] Accordingly, in one embodiment, the molecule which activity is to be increased in the process of the invention is the gene product with an activity as a “Zm_{—}4842_BE510522-protein”, preferably it is the molecule of section (a) or (b) of this paragraph.

[32167] In particular, it was observed that in plants, especially in Arabidopsis thaliana, increasing or generating the activity of a gene product non-targeted with the activity of a “Zm_{—}4842_BE510522-protein”, preferably being encoded by a gene comprising the nucleic acid sequence SEQ ID NO. 68413, preferably the coding region thereof, conferred the production of or the increase in threonine compared with the wild type control.

[32168] [0105.1.1.4] to [0107.1.1.4] for the disclosure of these paragraphs see [0105.1.1.1] to [0107.1.1.1] above.

[32169] A protein having an activity conferring an increase in the amount or level of the fine chemical threonine, upon targeting to the plastids or mitochondria or upon non-targeting, preferably has the structure of the respective polypeptide described herein, in particular of the polypeptides comprising the consensus sequence or at least one polypeptide motifs as shown in the respective line in Table IV, application no. 4, column 8 or of the polypeptide comprising an amino acid sequence as disclosed in the respective line in Table II, application no. 4, columns 5 or 8, or homologs or fragments thereof as described herein, or is encoded by the nucleic acid molecule characterized herein or the nucleic acid molecule according to the invention, for example by the nucleic acid molecule as shown in the respective line in Table I, application no. 4, columns 5 or 8, preferably the coding region thereof, or homologs or fragments thereof and has the herein mentioned activity.

[32170] [0109.1.1.4] to [0110.1.1.4] for the disclosure of these paragraphs see [0109.1.1.1] to [0110.1.1.1] above.

[32171] In one embodiment, the process of the present invention comprises one or more of the following steps
[32172] (a) stabilizing a protein conferring the generation or increased expression of a protein encoded by the nucleic acid molecule of the invention or of the polypeptide of the invention, e.g. of a polypeptide having the activity selected from the group consisting of (DL)-glycerol-3-phosphatase, 2,3-dihydroxyphenylpropionate 1,2-dioxygenase, 2-C-methyl-D-erythritol 4-phosphate cytidylyltransferase, 2-oxoglutarate dehydrogenase E1 subunit, 3-phosphoglycerate dehydrogenase, 47266012-protein, 49747384_SOYBEAN-protein, ABC metal ion transporter substrate-binding protein, ABC transporter permease protein, acetolactate synthase small subunit, acetyltransferase, acyl-CoA dehydrogenase, acyl-CoA synthase, argininosuccinate lyase, aspartate aminotransferase, aspartate kinase, At1g09680-protein, At4g32480-protein, At5g16650-protein, ATP synthase subunit beta, ATP-binding component of a transport system, AX653549-protein,b1003-protein, b1108p-rotein, b1445-protein,b1522-protein,b1670-protein,b1930-protein, b2360-protein, b2399-protein, b2513-protein, b2613-protein, b2739-protein, b2812-protein, b3083-protein, B3442-protein, b3646-protein, b3989-protein, b4029-protein, b4056-protein, b4250-protein, beta-galactosidase, beta-hydroxylase, bifunctional aspartokinase/homoserine dehydrogenase, bifunctional purine biosynthesis protein, branched chain amino acid ABC transporter ATP-binding protein, branched chain aminotransferase, branched-chain amino acid ABC transporter permease protein, calcium-dependent protein kinase, carbamoyl-phosphate synthase subunit, CCAAT-binding transcription factor, CDP-diacylglycerol-serine O-phosphatidyltransferase, cell division control protein, cell division protein, Chaperone protein CIpB, coproporphyrinogen III oxidase, cyclin, cyclin D , D-3-phosphoglycerate dehydrogenase, dihydrolipoamide acetyltransferase, dihydroxyacid dehydratase, DNA helicase II, DnaJ-like chaperone, D-serine dehydratase, elongation factor Tu, enoyl-CoA hydratase, enterobacterial common antigen polymerase, eukaryotic translation initiation factor 5, ferredoxin, GDP-mannose dehydrogenase, geranylgeranyl pyrophosphate synthase, gibberellin 20-oxidase, glucose dehydrogenase, glucose-6-phosphate 1-dehydrogenase, glutamate-ammonia-ligase, glutaredoxin, glutathione S-transferase, glycogen (starch) synthase, glycogen synthase, glycoprotease, glycosyl transferase, heat shock protein, heat shock transcription factor, hexose transporter, histone acetyltransferase, homocitrate synthase, homoserine dehydrogenase, hydrolase, isochorismate synthase, ketol-acid reductoisomerase, kinase, L-asparaginase, major facilitator superfamily transporter protein, malate dehydrogenase, malic enzyme, membrane transport protein, metal-dependent hydrolase, methyltransferase, mitochondrial dicarboxylate transporter, monothiol glutaredoxin, monthiol glutaredoxin, murein transglycosylase, NADP-dependent malic enzyme, nitrate/nitrite transport protein, oxireductase, peptidase, permease protein of peptide ABC transporter, phosphate transporter, phosphoanhydride phosphorylase, phosphoenolpyruvate carboxykinase, phosphoribosylaminoimidazole carboxylase catalytic subunit, photosystem II protein, polyphosphate kinase, protein kinase, protein phosphatase, pyruvate carboxylase, pyruvate kinase, restriction alleviation protein, sec-independent protein translocase, sensor histidine kinase, serine protease, sll0418-protein, slr0383-protein, succinyl-CoA synthetase beta chain, thioredoxin, threonine synthase, transcription factor, transcriptional regulator, transcriptional regulator protein, transport protein, TTC0881-protein, uroporphyrin-III C-methyltransferase, valine-pyruvate transaminase, XM_{—}473199-protein, ycl027w-protein, ydr183w-protein, YEL030C-A-protein, yfl054c-protein, ygl237c-protein, yhr131c-protein, YJL127W-A-protein, YKL038W-protein, zinc finger protein, and Zm_{—}4842_BE510522-protein, or of a polypeptide as indicated in the respective line in Table II, application no. 4, columns 5 or 8, or its homologs or fragments, and conferring the production of or an increase in threonine, respectively; and/or
[32173] (b) stabilizing a mRNA conferring the generation or increased expression of a FCRP, e.g. protein encoded by the nucleic acid molecule of the invention or its homologs or fragments, or of a mRNA encoding the polypeptide of the present invention having the hereinmentioned activity selected from the group consisting of said activities mentioned in (a) and conferring the production of or an increase in threonine, respectively; and/or
[32174] (c) increasing the specific activity of a protein conferring the increased expression of a FCRP, e.g. a protein encoded by the nucleic acid molecule of the invention or of the polypeptide of the present invention having herein-mentioned threonine generating or increasing activity, respectively, e.g. of a polypeptide having the activity of a protein as indicated in the respective line in Table II, application no. 4, columns 5 or 8, or its homologs or fragments, or decreasing the inhibitory regulation of the polypeptide of the invention; and/or
[32175] (d) generating or increasing the expression of an endogenous or artificial transcription factor mediating the expression of a protein conferring the generation or increased expression of a FCRP, e.g. a protein encoded by the nucleic acid molecule of the invention or of the polypeptide of the invention having herein-mentioned activity selected from the group consisting of said activities mentioned in (a) and conferring a threonine increasing activity, respectively, e.g. of a polypeptide having the activity of a protein as indicated in the respective line in Table II, application no. 4, columns 5 or 8 or its homologs; and/or
[32176] (e) stimulating activity of a protein conferring the increased expression of a FCRP, e.g. a protein encoded by the nucleic acid molecule of the present invention or a polypeptide of the present invention having herein-mentioned activity selected from the group consisting of said activities mentioned in (a) and conferring a threonine increasing activity, respectively, e.g. of a polypeptide having the activity of a protein as indicated in the respective line in Table II, application no. 4, columns 5 or 8, or its homologs or fragments, by adding one or more exogenous inducing factors to the non-human organism or parts thereof; and/or
[32177] (f) expressing a transgenic gene encoding a protein conferring the increased expression of a FCRP, e.g. a polypeptide encoded by the nucleic acid molecule of the present invention or a polypeptide of the present invention, having herein-mentioned activity selected from the group consisting of said activities mentioned in (a) and conferring a threonine increasing activity, respectively, e.g. of a polypeptide having the activity of a protein as indicated in the respective line in Table II, application no. 4, columns 5 or 8, or its homologs or fragments; and/or
[32178] (g) increasing the copy number of a gene conferring the increased expression of a nucleic acid molecule encoding a FCRP, e.g. a polypeptide encoded by the nucleic acid molecule of the invention or the polypeptide of the invention having herein-mentioned activity selected from the group consisting of said activities mentioned in (a) and conferring a threonine increasing activity, respectively, e.g. of a polypeptide having the activity of a protein as indicated in the respective line in Table II, application no. 4, columns 5 or 8, or its homologs or fragments; and/or
[32179] (h) increasing the expression of the endogenous gene encoding the FCRP, polypeptide of the invention, e.g. a polypeptide encoded by the nucleic acid molecule of the invention or the polypeptide of the invention having herein-mentioned activity selected from the group consisting of said activities mentioned in (a) and conferring a threonine increasing activity, respectively, e.g. of a polypeptide having the activity of a protein as indicated in the respective line in Table II, application no. 4, columns 5 or 8, or its homologs or fragments, by adding positive expression or removing negative expression elements, e.g. homologous recombination can be used to either introduce positive regulatory elements like for plants the 35S enhancer into the promoter or to remove repressor elements form regulatory regions. Further gene conversion methods can be used to disrupt repressor elements or to enhance to activity of positive elements. Positive elements can be randomly introduced in plants by T-DNA or transposon mutagenesis and lines can be identified in which the positive elements have be integrated near to a gene of the invention, the expression of which is thereby enhanced; and/or
[32180] (i) modulating growth conditions of the non-human organism in such a manner, that the expression or activity of the gene encoding the FCRP, e.g. a protein of the invention or the protein itself is enhanced, for example microorganisms or plants can be grown for example under a higher temperature regime leading to an enhanced expression of heat shock proteins, which can lead to an enhanced threonine production, respectively; and/or
[32181] (j) selecting of non-human organisms with especially high activity of the proteins of the invention from natural or from mutagenized resources and breeding them into the target organisms, e.g. the elite crops; and/or
[32182] (k) directing a protein encoded by the nucleic acid molecule of the invention or of the polypeptide of the present invention having herein-mentioned activity selected from the group consisting of said activities mentioned in (a) and conferring a threonine increasing activity, respectively, e.g. of a polypeptide having the activity of a protein as indicated in the respective line in Table II, application no. 4, columns 5 or 8, or its homologs or fragments, if for the corresponding nucleic acid molecule in the respective line in column 6 of Table I the term “plastidic” is indicated, to the plastids by the addition of a plastidial targeting sequence or if for the corresponding nucleic acid molecule in the respective line in column 6 of Table I the term “mitochondrial” is indicated, to the mitochondria by the addition of a mitochondrial targeting sequence; and/or
[32183] (l) generating the expression of a protein encoded by the nucleic acid molecule of the invention or of the polypeptide of the present invention having herein-mentioned activity selected from the group consisting of said activities mentioned in (a) and conferring a threonine increasing activity, respectively, e.g. of a polypeptide having the activity of a protein as indicated in the respective line in Table II, application no. 4, columns 5 or 8, or its homologs or fragments, if for the corresponding nucleic acid molecule in the respective line in column 6 of Table I the term “plastidic” or “mitochondrial” is indicated, in these organelles by the stable or transient transformation, advantageously stable transformation, of organelles, preferably plastids or mitochondria, with an inventive nucleic acid sequence preferably in form of an expression cassette containing said sequence leading to the expression of the nucleic acids or polypeptides of the invention in the respective organelle; and/or
[32184] (m) generating the expression of a protein encoded by the nucleic acid molecule of the invention or of the polypeptide of the present invention having herein-mentioned activity selected from the group consisting of said activities mentioned in (a) and conferring a threonine increasing activity, respectively, e.g. of a polypeptide having the activity of a protein as indicated in the respective line in Table II, application no. 4, columns 5 or 8, or its homologs or fragments, if for the corresponding nucleic acid molecule in the respective line in column 6 of Table I the term “plastidic” or “mitochondrial” is indicated, in these organelles by integration of a nucleic acid of the invention into the genome of the respective organelle under control of preferable a promoter selective for the respective organelle.

[32185] Preferably, said mRNA is the coding region of the nucleic acid molecule of the present invention and/or the protein conferring the increased expression of a protein encoded by the coding region of the nucleic acid molecule of the present invention alone or linked to a transit nucleic acid sequence or transit peptide encoding nucleic acid sequence or the polypeptide having the herein mentioned activity, e.g. conferring the generation of or increase of threonine, respectively, after increasing the expression or activity of the encoded polypeptide, non-targeted or in organelles such as plastids and/or mitochondria, preferably plastids, or having the activity of a polypeptide having an activity as the protein as shown in the respective line in Table II, application no. 4, column 3, or its homologs. Preferably the increase of threonine, respectively, takes place non-targeted or in plastids and/or mitochondria, preferably non-targeted or in plastids.

[32186] [0113.1.1.4] to [0122.1.1.4] for the disclosure of these paragraphs see [0113.1.1.1] to [0122.1.1.1] above.

[32187] The activation of an endogenous polypeptide having above-mentioned activity, e.g. having the activity of a protein as shown in the respective line in Table II, application no. 4, column 3 or of the polypeptide of the invention, e.g. conferring the increase of the fine chemical threonine, respectively, by increase of expression or activity in the cytoplasm, and/or in the cytosol, and/or in an organelle, such as plastids or mitochondria, can also be increased by introducing a synthetic transcription factor, which binds close to the coding region of the gene encoding the protein as shown in the respective line in Table II, application no. 4, column 5 or 8, or homologs or fragments thereof, and activates its transcription. A chimeric zinc finger protein can be constructed, which comprises a specific DNA-binding domain and an activation domain as e.g. the VP16 domain of Herpes Simplex virus. The specific binding domain can bind to the regulatory region of the gene encoding the protein as shown in the respective line in Table II, application no. 4, column 5 or 8, or homologs or fragments thereof. The expression of the chimeric transcription factor in a non-human organism, in particular in a plant, leads to a specific expression of the protein as shown in the respective line in Table II, application no. 4, column 5 or 8, or homologs or fragments thereof, see e.g. in WO01/52620, Oriz, Proc. Natl. Acad. Sci. USA 99, 13290 (2002), or Guan, Proc. Natl. Acad. Sci. USA 99, 13296 (2002).

[32188] [0124.1.1.4] to [0127.1.1.4] for the disclosure of these paragraphs see [0124.1.1.1] to [0127.1.1.1] above.

[32189] Owing to the introduction of a gene or a plurality of genes conferring the expression of the nucleic acid molecule of the invention or the polypeptide of the invention, for example the nucleic acid construct mentioned below, or encoding the protein as shown in the respective line in Table II, application no. 4, column 5 or 8, or homologs or fragments thereof, into a non-human organism alone or in combination with other genes, it is possible not only to increase the biosynthetic flux towards the end product, but also to increase, modify or create de novo an advantageous, preferably novel metabolites composition in the non-human organism, e.g. an advantageous composition comprising a higher content of (from a viewpoint of nutritional physiology limited) threonine and if desired other amino acids, and/or other metabolites, in free or bound form.

[32190] for the disclosure of this paragraph see [0129.1.1.1] above.

[32191] Accordingly, in one embodiment, the process according to the invention relates to a process, which comprises:
[32192] (a) providing a non-human organism, preferably a microorganism, a plant cell, a plant tissue, a plant or a part thereof, more preferably a microorganism, a plant tissue, a plant or a part thereof;
[32193] (b) increasing the activity of a protein as shown in the respective line in Table II, application no. 4, column 3 or of a polypeptide being encoded by the respective nucleic acid molecule of the present invention and described below, e.g. conferring an increase of the fine chemical threonine, respectively, in the non-human organism, preferably in the microorganism, the plant cell, the plant tissue, the plant or a part thereof, more preferably a microorganism, a plant tissue, a plant or a part thereof, especially cytoplasmic or in an organelle, like plastids or mitochondria,
[32194] (c) growing the non-human organism, preferably the microorganism, the plant cell, the plant tissue, the plant or a part thereof, under conditions which permit the production of said fine chemical in the non-human organism, preferably the microorganism, the plant cell, the plant tissue, the plant or a part thereof; and
[32195] (d) if desired, recovering, optionally isolating, said fine chemical, in free and/or bound form, and, optionally further free and/or bound amino acids, and/or other metabolites synthesized by the non-human organism, the microorganism, the plant cell, the plant tissue, the plant or a part thereof.

[32196] [0131.1.1.4] to [0139.1.1.4] for the disclosure of these paragraphs see [0131.1.1.1] to [0139.1.1.1] above.

[32197] In another embodiment, the invention relates to a (isolated) nucleic acid molecule, which comprises a nucleic acid molecule selected from the group consisting of:
[32198] (a) a nucleic acid molecule encoding a polypeptide shown in Table II, application no. 4, column 5 or 8, preferably shown in Table II B, application no. 4, column 8, or a homolog or a fragment thereof;
[32199] (b) a nucleic acid molecule shown in Table I, application no. 4, column 5 or 8, preferably shown in Table I B, application no. 4, column 8, preferably the coding region thereof, or a homolog or a fragment thereof;
[32200] (c) a nucleic acid molecule, which, as a result of the degeneracy of the genetic code, can be derived from a polypeptide sequence depicted in column 5 or 8 of Table II, application no. 4, preferably in column 8 of Table II B, application no. 4;
[32201] (d) a nucleic acid molecule having at least 30% identity, preferably at least 40%, 50%, 60%, 70%, 75%, 80%, 85%, 90%, 95%, 96%, 97%, 98%, 99%, 99.5%, with the nucleic acid molecule sequence of a polynucleotide comprising the nucleic acid molecule shown in column 5 or 8 of Table I, application no. 4, preferably shown in column 8 of Table I B, application no. 4, preferably the coding region thereof;
[32202] (e) a nucleic acid molecule encoding a polypeptide having at least 30% identity, preferably at least 40%, 50% 60%, 70%, 75%, 80%, 85%, 90%, 95%, 96%, 97%, 98%, 99%, 99.5%, identity with the amino acid sequence of the polypeptide encoded by the nucleic acid molecule of (a), (b), (c) or (d);
[32203] (f) a nucleic acid molecule which hybridizes with a nucleic acid molecule of (a), (b), (c), (d) or (e) under stringent hybridization conditions;
[32204] (g) a nucleic acid molecule encoding a polypeptide which can be isolated with the aid of monoclonal or polyclonal antibodies made against a polypeptide encoded by one of the nucleic acid molecules of (a), (b), (c), (d), (e) or (f);
[32205] (h) a nucleic acid molecule encoding a polypeptide comprising the consensus sequence or one or more polypeptide motifs as shown in column 8 of Table IV, application no. 4;
[32206] (i) a nucleic acid molecule encoding a polypeptide having the activity represented by a respective protein as depicted in column 5 of Table II, application no. 4;
[32207] (j) a nucleic acid molecule comprising a polynucleotide which is obtained by amplifying a cDNA library or a genomic library using the primers in Table III, application no. 4, column 8;
[32208] and
[32209] (k) nucleic acid molecule which is obtainable by screening a suitable nucleic acid library, especially a cDNA library and/or a genomic library, under stringent hybridization conditions with a probe comprising one of the sequences of the nucleic acid molecule of (a), (b), (c), (d), (e), (f), (g), (h), (i) or (j) or with a fragment of at least 15 nt, preferably 20 nt, 30 nt, 50 nt, 100 nt, 200 nt,500 nt, 1000 nt, 1500 nt, 2000 nt or 3000 nt of the nucleic acid molecule characterized in (a), (b), (c), (d), (e), (f), (g), (h), (i) or (j);
   or a nucleic acid molecule comprising a sequence which is complementary thereto.
   (All the references to Tables I to IV are references to the corresponding lines of Tables I to IV.)

[32210] In a preferred embodiment thereof said nucleic acid molecule according to (a), (b), (c), (d), (e), (f), (g), (h), (i), (j) or (k) encodes a polypeptide which has the activity of the respective polypeptide represented by a protein comprising a polypeptide as depicted in the respective line in column 5 of Table II, application no. 4.

[32211] In another preferred embodiment thereof said nucleic acid molecule according to (a), (b), (c), (d), (e), (f), (g), (h), (i), (j) or (k) confers a generation or an increase of the respective fine chemical in a non-human organism or a part thereof as compared to a corresponding wild-type non-human organism or part thereof.

[32212] In another preferred embodiment thereof said nucleic acid molecule according to (a), (b), (c), (d), (e), (f), (g), (h), (i), (j) or (k) encodes a polypeptide which has the activity of the respective polypeptide represented by a protein as depicted in the respective line in column 5 of Table II application no. 4 and confers a generation or an increase of the respective fine chemical in a non-human organism or a part thereof as compared to a corresponding wild-type non-human organism or part thereof.

[32213] In another embodiment, the invention relates to a (isolated) nucleic acid molecule, which comprises a nucleic acid molecule selected from the group consisting of:
[32214] (a) a nucleic acid molecule encoding a polypeptide shown in Table II, column 5 or 8, application no. 4, preferably shown in Table II A, application no. 4, in column 5 or in Table II A, application no. 4, column 8 or in Table II B, application no. 4, column 8, or a homolog or a fragment thereof;
[32215] (b) a nucleic acid molecule shown in Table I, application no. 4, column 5 or 8, preferably shown in Table I A, application no. 4, in column 5 or in Table I A, application no. 4, column 8 or in Table I B, application no. 4, column 8, preferably the coding region thereof, or a homolog or a fragment thereof;
[32216] (c) a nucleic acid molecule, which, as a result of the degeneracy of the genetic code, can be derived from a polypeptide sequence depicted in column 5 or 8 of Table II, application no. 4, preferably shown in Table II A, application no. 4, in column 5 or in Table II A, application no. 4, column 8 or in Table II B, application no. 4, column 8;
[32217] (d) a nucleic acid molecule having at least 30% identity, preferably at least 40%, 50%, 60%, 70%, 75%, 80%, 85%, 90%, 95%, 96%, 97%, 98%, 99%, 99.5%, with the nucleic acid molecule sequence of a polynucleotide comprising the nucleic acid molecule shown in column 5 or 8 of Table I, application no. 4, preferably shown in Table I A, application no. 4, in column 5 or in Table I A, application no. 4, column 8 or in Table I B column 8, preferably the coding region thereof;
[32218] (e) a nucleic acid molecule encoding a polypeptide having at least 30% identity, preferably at least 40%, 50% 60%, 70%, 75%, 80%, 85%, 90%, 95%, 96%, 97%, 98%, 99%, 99.5%, identity with the amino acid sequence of the polypeptide encoded by the nucleic acid molecule of (a), (b), (c) or (d);
[32219] (f) a nucleic acid molecule which hybridizes with a nucleic acid molecule of (a), (b), (c), (d) or (e) under stringent hybridization conditions;
[32220] (g) a nucleic acid molecule encoding a polypeptide which can be isolated with the aid of monoclonal or polyclonal antibodies made against a polypeptide encoded by one of the nucleic acid molecules of (a), (b), (c), (d), (e) or (f);
[32221] (h) a nucleic acid molecule encoding a polypeptide comprising the consensus sequence or one or more polypeptide motifs as shown in column 8 of Table IV, application no. 4;
[32222] (i) a nucleic acid molecule encoding a polypeptide having the activity represented by a respective protein as depicted in column 5 of Table II, application no. 4;
[32223] (j) a nucleic acid molecule comprising a polynucleotide which is obtained by amplifying a cDNA library or a genomic library using the primers in Table III, application no. 4, column 8;
[32224] and
[32225] (k) nucleic acid molecule which is obtainable by screening a suitable nucleic acid library, especially a cDNA library and/or a genomic library, under stringent hybridization conditions with a probe comprising one of the sequences of the nucleic acid molecule of (a), (b), (c), (d), (e), (f), (g), (h), (i) or (j) or with a fragment thereof having at least 15 nt, preferably 20 nt, 30 nt, 50 nt, 100 nt, 200 nt,500 nt, 1000 nt, 1500 nt, 2000 nt or 3000 nt of the nucleic acid molecule complementary to a nucleic acid sequence characterized in (a), (b), (c), (d), (e), (f), (g), (h), (i) or (j);
   or a nucleic acid molecule comprising a sequence which is complementary thereto;
   whereby, preferably, the nucleic acid molecule according to (a), (b), (c), (d), (e), (f), (g), (h), (i), (j) or (k) distinguishes over the sequence depicted in Table I A and/or I B, application no. 4, column 5 or 8, or the coding regions thereof, by one or more nucleotides (especially but not exceeding 5%, preferably 4%, 3%, 2%, 1%, 0.5%, 0.2% or 0.1%). In an embodiment, the nucleic acid molecule of the invention does not consist of the sequence shown in Table I A and/or I B, application no. 4, column 5 or 8, or the coding region thereof. In another embodiment, the nucleic acid molecule of the present invention, preferably the coding region thereof, is at least 30%, 40%, 50%, 60%, 70%, 80%, 90%, 95% identical but less than 100%, 99.999%, 99.99%, 99.9%, 99%, 98%, 97%, 96% or 95% identical to the sequence shown in Table I A and/or I B, application no. 4, column 5 or 8, or the coding region thereof, respectively. In a further embodiment the nucleic acid molecule does not encode the polypeptide sequence shown in Table II A and/or II B, application no. 4, column 5 or 8 but homologs thereof. Accordingly, in one embodiment, the nucleic acid molecule of the present invention encodes in one embodiment a polypeptide which differs at least in one or more amino acids (especially but not exceeding 5%, preferably 4%, 3%, 2%, 1%, 0.5%, 0.2% or 0.1%) from the polypeptide shown in Table II, application no. 4, column 5 or 8 and does not encode a protein of the sequence shown in Table II A and/or II B, application no. 4, column 5 or 8. Accordingly, in one embodiment, the protein encoded by a sequence of a nucleic acid according to (a), (b), (c), (d), (e), (f), (g), (h), (i), (j) or (k) does not consist of the sequence shown in Table I A and/or I B, application no. 4, column 5 or 8, or the coding region thereof. In a further embodiment, the protein of the present invention is at least 30%, 40%, 50%, 60%, 70%, 80%, 90%, 95% identical to protein sequence depicted in Table II A and/or II B, application no. 4, column 5 or 8 but less than 100%, preferably less than 99.999%, 99.99%, 99.9%, 99%, 98%, 97%, 96% or 95% identical to the sequence shown in Table II A and/or II B, application no. 4, column 5 or 8.
   (All the references to Tables I to IV are references to the corresponding lines of Tables I to IV.)

[32226] In a preferred embodiment thereof said nucleic acid molecule according to (a), (b), (c), (d), (e), (f), (g), (h), (i), (j) or (k) encodes a polypeptide which has the activity of the respective polypeptide represented by a protein comprising a polypeptide as depicted in the respective line in column 5 of Table II, application no. 4.

[32227] In another preferred embodiment thereof said nucleic acid molecule according to (a), (b), (c), (d), (e), (f), (g), (h), (i), (j) or (k) confers a generation or an increase of the respective fine chemical in a non-human organism or a part thereof as compared to a corresponding wild-type non-human organism or part thereof.

[32228] In another preferred embodiment thereof said nucleic acid molecule according to (a), (b), (c), (d), (e), (f), (g), (h), (i), (j) or (k) encodes a polypeptide which has the activity of the respective polypeptide represented by a protein as depicted in the respective line in column 5 of Table II, application no. 4, and confers a generation or an increase of the respective fine chemical in a non-human organism or a part thereof as compared to a corresponding wild-type non-human organism or part thereof.

[32229] [0144.1.1.4] to [0155.1.1.4] for the disclosure of these paragraphs see [0144.1.1.1] to [0155.1.1.1] above.

[32230] In a preferred embodiment a nucleic acid construct, for example an expression cassette, comprises upstream, i.e. at the 5′ end of the encoding sequence, a promoter and downstream, i.e. at the 3′ end, a polyadenylation signal and optionally other regulatory elements which are operably linked to the intervening encoding sequence with one of the nucleic acids as depicted in the respective line in Table I, application no. 4, column 5 or 8, preferably the coding region thereof, or a homolog or a fragment thereof. By an operable linkage is meant the sequential arrangement of promoter, encoding sequence, terminator, optionally other regulatory elements and optionally targeting sequences in such a way that each of the regulatory elements/targeting sequence can fulfill its function in the expression of the encoding sequence in due manner. In one embodiment the sequences preferred for operable linkage are targeting sequences for ensuring subcellular localization in organelles, like plastids or mitochondria. However, targeting sequences for ensuring subcellular localization in the endoplasmic reticulum (=ER), in the nucleus, in oil corpuscles or other compartments may also be employed as well as translation promoters such as the 5′ lead sequence in tobacco mosaic virus (Gallie et al., Nucl. Acids Res. 15, 8693 (1987)).

[32231] for the disclosure of this paragraph see [0157.1.1.1] above.

[32232] In an embodiment, the invention relates to an expression cassette, comprising
[32233] 1) a promoter, preferably a promoter selected from the group consisting of Big35S, PCUbi, Super and USP;
[32234] 2) a nucleic acid molecule selected from the group consisting of
   [32235] (a) a nucleic acid molecule encoding a polypeptide shown in Table II, application no. 4, column 5 or 8, preferably shown in Table II A, application no. 4, column 5, or in Table II A, application no. 4, column 8, or in Table II B, application no. 4, column 8, or a homolog or a fragment thereof;
   [32236] (b) a nucleic acid molecule shown in Table I, application no. 4, column 5 or 8, preferably shown in Table I A, application no. 4, column 5, or in Table I A, application no. 4, column 8, or in Table I B, application no. 4, column 8, preferably the coding region thereof, or a homolog or a fragment thereof;
   [32237] (c) a nucleic acid molecule, which, as a result of the degeneracy of the genetic code, can be derived from a polypeptide sequence depicted in column 5 or 8 of Table II, application no. 4, preferably shown in Table II A, application no. 4, column 5, or in Table II A, application no. 4, column 8, or in Table II B, application no. 4, column 8;
   [32238] (d) a nucleic acid molecule having at least 30% identity, preferably at least 40%, 50%, 60%, 70%, 75%, 80%, 85%, 90%, 95%, 96%, 97%, 98%, 99%, 99.5%, with the nu oleic acid molecule sequence of a polynucleotide comprising the nucleic acid molecule shown in column 5 or 8 of Table I, application no. 4, preferably shown in Table I A, application no. 4, column 5, or in Table I A, application no. 4, column 8, or in Table I B, application no. 4, column 8, preferably the coding region thereof;
   [32239] (e) a nucleic acid molecule encoding a polypeptide having at least 30% identity, preferably at least 40%, 50% 60%, 70%, 75%, 80%, 85%, 90%, 95%, 96%, 97%, 98%, 99%, 99.5%, identity with the amino acid sequence of the polypeptide encoded by the nucleic acid molecule of (a), (b), (c) or (d);
   [32240] (f) a nucleic acid molecule which hybridizes with a nucleic acid molecule of (a), (b), (c), (d) or (e) under stringent hybridization conditions;
   [32241] (g) a nucleic acid molecule encoding a polypeptide which can be isolated with the aid of monoclonal or polyclonal antibodies made against a polypeptide encoded by one of the nucleic acid molecules of (a), (b), (c), (d), (e) or (f);
   [32242] (h) a nucleic acid molecule encoding a polypeptide comprising the consensus sequence or one or more polypeptide motifs as shown in column 8 of Table IV, application no. 4;
   [32243] (i) a nucleic acid molecule encoding a polypeptide having the activity represented by a respective protein as depicted in column 5 of Table II, application no. 4;
   [32244] (j) a nucleic acid molecule comprising a polynucleotide which is obtained by amplifying a cDNA library or a genomic library using the primers in Table III, application no. 4, column 8;
   [32245] and
   [32246] (k) nucleic acid molecule which is obtainable by screening a suitable nucleic acid library, especially a cDNA library and/or a genomic library, under stringent hybridization conditions with a probe comprising one of the sequences of the nucleic acid molecule of (a), (b), (c), (d), (e), (f), (g), (h), (i) or (j) or with a fragment of at least 15 nt, preferably 20 nt, 30 nt, 50 nt, 100 nt, 200 nt,500 nt, 1000 nt, 1500 nt, 2000 nt or 3000 nt of the nucleic acid molecule characterized in (a), (b), (c), (d), (e), (f), (g), (h), (i) or (j);
   [32247] or a nucleic acid molecule comprising a sequence which is complementary thereto. and, optionally
[32248] 3) nucleic acid molecule encoding a transit peptide, preferably encoding a plastidal transit peptide or a mitochondrial transit peptide;
   which are operable linked.
   (All the references to Tables I to IV are references to the corresponding lines of Tables I to IV.)

[32249] In a preferred embodiment thereof said nucleic acid molecule according to 2 (a), (b), (c), (d), (e), (f), (g), (h), (i), (j) or (k) encodes a polypeptide which has the activity of the respective polypeptide represented by a protein comprising a polypeptide as depicted in the respective line in column 5 of Table II, application no. 4.

[32250] In another preferred embodiment thereof said nucleic acid molecule according to 2 (a), (b), (c), (d), (e), (f), (g), (h), (i), (j) or (k) confers a generation or an increase of the respective fine chemical in a non-human organism or a part thereof as compared to a corresponding wild-type non-human organism or part thereof.

[32251] In another preferred embodiment thereof said nucleic acid molecule according to 2 (a), (b), (c), (d), (e), (f), (g), (h), (i), (j) or (k) encodes a polypeptide which has the activity of the respective polypeptide represented by a protein as depicted in the respective line in column 5 of Table II application no. 4 and confers a generation or an increase of the respective fine chemical in a non-human organism or a part thereof as compared to a corresponding wild-type non-human organism or part thereof.

[32252] In another embodiment thereof the expression cassette comprises 3) a nucleic acid molecule encoding a transit peptide, preferably encoding a plastidal transit peptide, especially in case in column 6 of Table I, application no. 4, in the same line as of the respective nucleic acid molecule according to 2) “plastidic” is depicted, or encoding a mitochondrial transit peptide, especially in case in column 6 of Table I, application no. 4, in the same line as of the respective nucleic acid molecule according to 2) “mitochondrial” is depicted.

[32253] In another embodiment thereof the expression cassette does not comprise 3) a nucleic acid molecule encoding a transit peptide, especially in case in column 6 of Table I, application no. 4, in the same line as of the respective nucleic acid molecule according to 2) “non-targeted” is depicted.

[32254] In a further embodiment, the invention relates to an expression cassette, comprising
[32255] 1) a promoter, preferably a promoter selected from the group consisting of Big35S, PCUbi, Super and USP;
[32256] 2) a nucleic acid molecule selected from the group consisting of
   [32257] (a) a nucleic acid molecule encoding a polypeptide shown in Table II, application no. 4, column 5 or 8, preferably shown in Table II A, application no. 4, column 5, or in Table II A, application no. 4, column 8, or in Table II B, application no. 4, column 8, or a homolog or a fragment thereof;
   [32258] (b) a nucleic acid molecule shown in Table I, application no. 4, column 5 or 8, preferably shown in Table I A, application no. 4, column 5, or in Table I A, application no. 4, column 8, or in Table I B, application no. 4, column 8, preferably the coding region thereof, or a homolog or a fragment thereof;
   [32259] (c) a nucleic acid molecule, which, as a result of the degeneracy of the genetic code, can be derived from a polypeptide sequence depicted in column 5 or 8 of Table II, application no. 4, preferably shown in Table II A, application no. 4, column 5, or in Table II A, application no. 4, column 8, or in Table II B, application no. 4, column 8;
   [32260] (d) a nucleic acid molecule having at least 30% identity, preferably at least 40%, 50%, 60%, 70%, 75%, 80%, 85%, 90%, 95%, 96%, 97%, 98%, 99%, 99.5%, with the nucleic acid molecule sequence of a polynucleotide comprising the nucleic acid molecule shown in column 5 or 8 of Table I, application no. 4, preferably shown in Table I A, application no. 4, column 5, or in Table I A, application no. 4, column 8,or in Table I B, application no. 4, column 8, preferably the coding region thereof;
   [32261] (e) a nucleic acid molecule encoding a polypeptide having at least 30% identity, preferably at least 40%, 50% 60%, 70%, 75%, 80%, 85%, 90%, 95%, 96%, 97%, 98%, 99%, 99.5%, identity with the amino acid sequence of the polypeptide encoded by the nucleic acid molecule of (a), (b), (c) or (d);
   [32262] (f) a nucleic acid molecule which hybridizes with a nucleic acid molecule of (a), (b), (c), (d) or (e) under stringent hybridization conditions;
   [32263] (g) a nucleic acid molecule encoding a polypeptide which can be isolated with the aid of monoclonal or polyclonal antibodies made against a polypeptide encoded by one of the nucleic acid molecules of (a), (b), (c), (d), (e) or (f);
   [32264] (h) a nucleic acid molecule encoding a polypeptide comprising the consensus sequence or one or more polypeptide motifs as shown in column 8 of Table IV, application no. 4;
   [32265] (i) a nucleic acid molecule encoding a polypeptide having the activity represented by a respective protein as depicted in column 5 of Table II, application no. 4;
   [32266] (j) a nucleic acid molecule comprising a polynucleotide which is obtained by amplifying a cDNA library or a genomic library using the primers in Table III, application no. 4, column 8;
   [32267] and
   [32268] (k) nucleic acid molecule which is obtainable by screening a suitable nucleic acid library, especially a cDNA library and/or a genomic library, under stringent hybridization conditions with a probe comprising one of the sequences of the nucleic acid molecule of (a), (b), (c), (d), (e), (f), (g), (h), (i) or (j) or with a fragment of at least 15 nt, preferably 20 nt, 30 nt, 50 nt, 100 nt, 200 nt,500 nt, 1000 nt, 1500 nt, 2000 nt or 3000 nt of the nucleic acid molecule characterized in (a), (b), (c), (d), (e), (f), (g), (h), (i) or (j);
   [32269] or a nucleic acid molecule comprising a sequence which is complementary thereto; and, optionally 3) nucleic acid molecule encoding a transit peptide, preferably encoding a plastidal transit peptide or a mitochondrial transit peptide;
      which are operable linked and
      whereby, preferably, the nucleic acid molecule according to 2 (a), (b), (c), (d), (e), (f), (g), (h), (i), (j) or (k) distinguishes over the sequence depicted in Table I A and/or I B, application no. 4, column 5 or 8, or the coding region thereof, by one or more nucleotides (especially but not exceeding 5%, preferably 4%, 3%, 2%, 1%, 0.5%, 0.2% or 0.1%). In an embodiment, the nucleic acid molecule of the invention according to 2) does not consist of the sequence shown in Table I A and/or I B, application no. 4, column 5 or 8, or the coding region thereof. In another embodiment, the nucleic acid molecule of the present invention, preferably the coding region thereof, is at least 30%, 40%, 50%, 60%, 70%, 80%, 90%, 95% identical but less than 100%, 99.999%, 99.99%, 99.9%, 99%, 98%, 97%, 96% or 95% identical to the sequence shown in Table I A and/or I B, application no. 4, column 5 or 8, or the coding region thereof, respectively. In a further embodiment the nucleic acid molecule does not encode the polypeptide sequence shown in Table II A and/or II B, application no. 4, column 5 or 8 but homologs thereof. Accordingly, in one embodiment, the nucleic acid molecule of the present invention encodes in one embodiment a polypeptide which differs at least in one or more amino acids (especially but not exceeding 5%, preferably 4%, 3%, 2%, 1%, 0.5%, 0.2% or 0.1%) from the polypeptide shown in Table II, application no. 4, column 5 or 8 and does not encode a protein of the sequence shown in Table II A and/or II B, application no. 4, column 5 or 8. Accordingly, in one embodiment, the protein encoded by a sequence of a nucleic acid according to 2(a), (b), (c), (d), (e), (f), (g), (h), (i), (j) or (k) does not consist of the sequence shown in Table I A and/or I B, application no. 4, column 5 or 8, or the coding region thereof. In a further embodiment, the protein of the present invention is at least 30%, 40%, 50%, 60%, 70%, 80%, 90%, 95% identical to protein sequence depicted in Table II A and/or II B, application no. 4, column 5 or 8 but less than 100%, 99.999%, 99.99%, 99.9%, 99%, 98%, 97%, 96% or 95% identical to the sequence shown in Table II A and/or II B, application no. 4, column 5 or 8.
      (All the references to Tables I to IV are references to the corresponding lines of Tables I to IV.)

[32270] In a preferred embodiment thereof said nucleic acid molecule according to 2 (a), (b), (c), (d), (e), (f), (g), (h), (i), (j) or (k) encodes a polypeptide which has the activity of the respective polypeptide represented by a protein comprising a polypeptide as depicted in the respective line in column 5 of Table II, application no. 4.

[32271] In another preferred embodiment thereof said nucleic acid molecule according to 2 (a), (b), (c), (d), (e), (f), (g), (h), (i), (j) or (k) confers a generation or an increase of the respective fine chemical in a non-human organism or a part thereof as compared to a corresponding wild-type non-human organism or part thereof.

[32272] In another preferred embodiment thereof said nucleic acid molecule according to 2 (a), (b), (c), (d), (e), (f), (g), (h), (i), (j) or (k) encodes a polypeptide which has the activity of the respective polypeptide represented by a protein as depicted in the respective line in column 5 of Table II application no. 4 and confers a generation or an increase of the respective fine chemical in a non-human organism or a part thereof as compared to a corresponding wild-type non-human organism or part thereof.

[32273] In another embodiment thereof the expression cassette comprises 3) a nucleic acid molecule encoding a transit peptide, preferably encoding a plastidal transit peptide, especially in case in column 6 of Table I, application no. 4, in the same line as of the respective nucleic acid molecule according to 2) “plastidic” is depicted, or encoding a mitochondrial transit peptide, especially in case in column 6 of Table I, application no. 4, in the same line as of the respective nucleic acid molecule according to 2) “mitochondrial” is depicted.

[32274] In another embodiment thereof the expression cassette does not comprise 3) a nucleic acid molecule encoding a transit peptide, especially in case in column 6 of Table I, application no. 4, in the same line as of the respective nucleic acid molecule according to 2) “non-targeted” is depicted.

[32275] In an embodiment the present invention relates to an expresssion cassette comprising a) a promoter, preferably a promoter selected from the group consisting of Big35S, PCUbi, Super and USP, in particular p-PcUBI; and b) the nucleic acid SEQ ID NO. 15187, or a homolog or fragment thereof, or a homolog thereof being depicted in Table I, application no. 4, column 8, in the same line as SEQ ID NO. 15187, preferably the coding region thereof, a homolog or a fragment thereof; which are operable linked.

[32276] In an embodiment thereof the expression cassette comprises in addition c) a nucleic acid molecule encoding a transit peptide, especially a plastidal transit petide in case in Table I, application no. 4, in column 6 in the same line as SEQ ID NO. 15187 is depicted, plastidic is mentioned, or a mitochondrial transit peptide in case in Table I, application no. 4, in column 6 in the same line as SEQ ID NO. 15187 is depicted, mitochondrial is mentioned; which is operable linked, too.

[32277] In another embodiment thereof the expression cassette does not comprise an additional transit peptide in case in Table I, application no. 4, in column 6 in the same line as SEQ ID NO. 15187 is depicted, non-targeted is mentioned.

[32278] In an embodiment the present invention relates to an expresssion cassette comprising a) a promoter, preferably a promoter selected from the group consisting of Big35S, PCUbi, Super and USP, in particular p-PcUBI; and b) the nucleic acid SEQ ID NO. 69, or a homolog or fragment thereof, or a homolog thereof being depicted in Table I, application no. 4, column 8, in the same line as SEQ ID NO. 69, preferably the coding region thereof, a homolog or a fragment thereof; which are operable linked.

[32279] In an embodiment thereof the expression cassette comprises in addition c) a nucleic acid molecule encoding a transit peptide, especially a plastidal transit petide in case in Table I, application no. 4, in column 6 in the same line as SEQ ID NO. 69 is depicted, plastidic is mentioned, or a mitochondrial transit peptide in case in Table I, application no. 4, in column 6 in the same line as SEQ ID NO. 69 is depicted, mitochondrial is mentioned; which is operable linked, too.

[32280] In another embodiment thereof the expression cassette does not comprise an additional transit peptide in case in Table I, application no. 4, in column 6 in the same line as SEQ ID NO. 69 is depicted, non-targeted is mentioned.

[32281] In an embodiment the present invention relates to an expresssion cassette comprising a) a promoter, preferably a promoter selected from the group consisting of Big35S, PCUbi, Super and USP, in particular p-PcUBI; and b) the nucleic acid SEQ ID NO. 16883, or a homolog or fragment thereof, or a homolog thereof being depicted in Table I, application no. 4, column 8, in the same line as SEQ ID NO. 16883, preferably the coding region thereof, a homolog or a fragment thereof; which are operable linked.

[32282] In an embodiment thereof the expression cassette comprises in addition c) a nucleic acid molecule encoding a transit peptide, especially a plastidal transit petide in case in Table I, application no. 4, in column 6 in the same line as SEQ ID NO. 16883 is depicted, plastidic is mentioned, or a mitochondrial transit peptide in case in Table I, application no. 4, in column 6 in the same line as SEQ ID NO. 16883 is depicted, mitochondrial is mentioned; which is operable linked, too.

[32283] In another embodiment thereof the expression cassette does not comprise an additional transit peptide in case in Table I, application no. 4, in column 6 in the same line as SEQ ID NO. 16883 is depicted, non-targeted is mentioned.

[32284] In an embodiment the present invention relates to an expresssion cassette comprising a) a promoter, preferably a promoter selected from the group consisting of Big35S, PCUbi, Super and USP, in particular p-PcUBI; and b) the nucleic acid SEQ ID NO. 352, or a homolog or fragment thereof, or a homolog thereof being depicted in Table I, application no. 4, column 8, in the same line as SEQ ID NO. 352, preferably the coding region thereof, a homolog or a fragment thereof; which are operable linked.

[32285] In an embodiment thereof the expression cassette comprises in addition c) a nucleic acid molecule encoding a transit peptide, especially a plastidal transit petide in case in Table I, application no. 4, in column 6 in the same line as SEQ ID NO. 352 is depicted, plastidic is mentioned, or a mitochondrial transit peptide in case in Table I, application no. 4, in column 6 in the same line as SEQ ID NO. 352 is depicted, mitochondrial is mentioned; which is operable linked, too.

[32286] In another embodiment thereof the expression cassette does not comprise an additional transit peptide in case in Table I, application no. 4, in column 6 in the same line as SEQ ID NO. 352 is depicted, non-targeted is mentioned.

[32287] In an embodiment the present invention relates to an expresssion cassette comprising a) a promoter, preferably a promoter selected from the group consisting of Big35S, PCUbi, Super and USP, in particular Big35S; and b) the nucleic acid SEQ ID NO. 627, or a homolog or fragment thereof, or a homolog thereof being depicted in Table I, application no. 4, column 8, in the same line as SEQ ID NO. 627, preferably the coding region thereof, a homolog or a fragment thereof; which are operable linked.

[32288] In an embodiment thereof the expression cassette comprises in addition c) a nucleic acid molecule encoding a transit peptide, especially a plastidal transit petide in case in Table I, application no. 4, in column 6 in the same line as SEQ ID NO. 627 is depicted, plastidic is mentioned, or a mitochondrial transit peptide in case in Table I, application no. 4, in column 6 in the same line as SEQ ID NO. 627 is depicted, mitochondrial is mentioned; which is operable linked, too.

[32289] In another embodiment thereof the expression cassette does not comprise an additional transit peptide in case in Table I, application no. 4, in column 6 in the same line as SEQ ID NO. 627 is depicted, non-targeted is mentioned.

[32290] In an embodiment the present invention relates to an expresssion cassette comprising a) a promoter, preferably a promoter selected from the group consisting of Big35S, PCUbi, Super and USP, in particular p-PcUBI; and b) the nucleic acid SEQ ID NO. 17968, or a homolog or fragment thereof, or a homolog thereof being depicted in Table I, application no. 4, column 8, in the same line as SEQ ID NO. 17968, preferably the coding region thereof, a homolog or a fragment thereof; which are operable linked.

[32291] In an embodiment thereof the expression cassette comprises in addition c) a nucleic acid molecule encoding a transit peptide, especially a plastidal transit petide in case in Table I, application no. 4, in column 6 in the same line as SEQ ID NO. 17968 is depicted, plastidic is mentioned, or a mitochondrial transit peptide in case in Table I, application no. 4, in column 6 in the same line as SEQ ID NO. 17968 is depicted, mitochondrial is mentioned; which is operable linked, too.

[32292] In another embodiment thereof the expression cassette does not comprise an additional transit peptide in case in Table I, application no. 4, in column 6 in the same line as SEQ ID NO. 17968 is depicted, non-targeted is mentioned.

[32293] In an embodiment the present invention relates to an expresssion cassette comprising a) a promoter, preferably a promoter selected from the group consisting of Big35S, PCUbi, Super and USP, in particular p-PcUBI; and b) the nucleic acid SEQ ID NO. 18070, or a homolog or fragment thereof, or a homolog thereof being depicted in Table I, application no. 4, column 8, in the same line as SEQ ID NO. 18070, preferably the coding region thereof, a homolog or a fragment thereof; which are operable linked.

[32294] In an embodiment thereof the expression cassette comprises in addition c) a nucleic acid molecule encoding a transit peptide, especially a plastidal transit petide in case in Table I, application no. 4, in column 6 in the same line as SEQ ID NO. 18070 is depicted, plastidic is mentioned, or a mitochondrial transit peptide in case in Table I, application no. 4, in column 6 in the same line as SEQ ID NO. 18070 is depicted, mitochondrial is mentioned; which is operable linked, too.

[32295] In another embodiment thereof the expression cassette does not comprise an additional transit peptide in case in Table I, application no. 4, in column 6 in the same line as SEQ ID NO. 18070 is depicted, non-targeted is mentioned.

[32296] In an embodiment the present invention relates to an expresssion cassette comprising a) a promoter, preferably a promoter selected from the group consisting of Big35S, PCUbi, Super and USP, in particular p-PcUBI; and b) the nucleic acid SEQ ID NO. 812, or a homolog or fragment thereof, or a homolog thereof being depicted in Table I, application no. 4, column 8, in the same line as SEQ ID NO. 812, preferably the coding region thereof, a homolog or a fragment thereof; which are operable linked.

[32297] In an embodiment thereof the expression cassette comprises in addition c) a nucleic acid molecule encoding a transit peptide, especially a plastidal transit petide in case in Table I, application no. 4, in column 6 in the same line as SEQ ID NO. 812 is depicted, plastidic is mentioned, or a mitochondrial transit peptide in case in Table I, application no. 4, in column 6 in the same line as SEQ ID NO. 812 is depicted, mitochondrial is mentioned; which is operable linked, too.

[32298] In another embodiment thereof the expression cassette does not comprise an additional transit peptide in case in Table I, application no. 4, in column 6 in the same line as SEQ ID NO. 812 is depicted, non-targeted is mentioned.

[32299] In an embodiment the present invention relates to an expresssion cassette comprising a) a promoter, preferably a promoter selected from the group consisting of Big35S, PCUbi, Super and USP, in particular p-PcUBI; and b) the nucleic acid SEQ ID NO. 18235, or a homolog or fragment thereof, or a homolog thereof being depicted in Table I, application no. 4, column 8, in the same line as SEQ ID NO. 18235, preferably the coding region thereof, a homolog or a fragment thereof; which are operable linked.

[32300] In an embodiment thereof the expression cassette comprises in addition c) a nucleic acid molecule encoding a transit peptide, especially a plastidal transit petide in case in Table I, application no. 4, in column 6 in the same line as SEQ ID NO. 18235 is depicted, plastidic is mentioned, or a mitochondrial transit peptide in case in Table I, application no. 4, in column 6 in the same line as SEQ ID NO. 18235 is depicted, mitochondrial is mentioned; which is operable linked, too.

[32301] In another embodiment thereof the expression cassette does not comprise an additional transit peptide in case in Table I, application no. 4, in column 6 in the same line as SEQ ID NO. 18235 is depicted, non-targeted is mentioned.

[32302] In an embodiment the present invention relates to an expresssion cassette comprising a) a promoter, preferably a promoter selected from the group consisting of Big35S, PCUbi, Super and USP, in particular p-PcUBI; and b) the nucleic acid SEQ ID NO. 19419, or a homolog or fragment thereof, or a homolog thereof being depicted in Table I, application no. 4, column 8, in the same line as SEQ ID NO. 19419, preferably the coding region thereof, a homolog or a fragment thereof; which are operable linked.

[32303] In an embodiment thereof the expression cassette comprises in addition c) a nucleic acid molecule encoding a transit peptide, especially a plastidal transit petide in case in Table I, application no. 4, in column 6 in the same line as SEQ ID NO. 19419 is depicted, plastidic is mentioned, or a mitochondrial transit peptide in case in Table I, application no. 4, in column 6 in the same line as SEQ ID NO. 19419 is depicted, mitochondrial is mentioned; which is operable linked, too.

[32304] In another embodiment thereof the expression cassette does not comprise an additional transit peptide in case in Table I, application no. 4, in column 6 in the same line as SEQ ID NO. 19419 is depicted, non-targeted is mentioned.

[32305] In an embodiment the present invention relates to an expresssion cassette comprising a) a promoter, preferably a promoter selected from the group consisting of Big35S, PCUbi, Super and USP, in particular p-PcUBI; and b) the nucleic acid SEQ ID NO. 1298, or a homolog or fragment thereof, or a homolog thereof being depicted in Table I, application no. 4, column 8, in the same line as SEQ ID NO. 1298, preferably the coding region thereof, a homolog or a fragment thereof; which are operable linked.

[32306] In an embodiment thereof the expression cassette comprises in addition c) a nucleic acid molecule encoding a transit peptide, especially a plastidal transit petide in case in Table I, application no. 4, in column 6 in the same line as SEQ ID NO. 1298 is depicted, plastidic is mentioned, or a mitochondrial transit peptide in case in Table I, application no. 4, in column 6 in the same line as SEQ ID NO. 1298 is depicted, mitochondrial is mentioned; which is operable linked, too.

[32307] In another embodiment thereof the expression cassette does not comprise an additional transit peptide in case in Table I, application no. 4, in column 6 in the same line as SEQ ID NO. 1298 is depicted, non-targeted is mentioned.

[32308] In an embodiment the present invention relates to an expresssion cassette comprising a) a promoter, preferably a promoter selected from the group consisting of Big35S, PCUbi, Super and USP, in particular p-PcUBI; and b) the nucleic acid SEQ ID NO. 20346, or a homolog or fragment thereof, or a homolog thereof being depicted in Table I, application no. 4, column 8, in the same line as SEQ ID NO. 20346, preferably the coding region thereof, a homolog or a fragment thereof; which are operable linked.

[32309] In an embodiment thereof the expression cassette comprises in addition c) a nucleic acid molecule encoding a transit peptide, especially a plastidal transit petide in case in Table I, application no. 4, in column 6 in the same line as SEQ ID NO. 20346 is depicted, plastidic is mentioned, or a mitochondrial transit peptide in case in Table I, application no. 4, in column 6 in the same line as SEQ ID NO. 20346 is depicted, mitochondrial is mentioned; which is operable linked, too.

[32310] In another embodiment thereof the expression cassette does not comprise an additional transit peptide in case in Table I, application no. 4, in column 6 in the same line as SEQ ID NO. 20346 is depicted, non-targeted is mentioned.

[32311] In an embodiment the present invention relates to an expresssion cassette comprising a) a promoter, preferably a promoter selected from the group consisting of Big35S, PCUbi, Super and USP, in particular p-PcUBI; and b) the nucleic acid SEQ ID NO. 22921, or a homolog or fragment thereof, or a homolog thereof being depicted in Table I, application no. 4, column 8, in the same line as SEQ ID NO. 22921, preferably the coding region thereof, a homolog or a fragment thereof; which are operable linked.

[32312] In an embodiment thereof the expression cassette comprises in addition c) a nucleic acid molecule encoding a transit peptide, especially a plastidal transit petide in case in Table I, application no. 4, in column 6 in the same line as SEQ ID NO. 22921 is depicted, plastidic is mentioned, or a mitochondrial transit peptide in case in Table I, application no. 4, in column 6 in the same line as SEQ ID NO. 22921 is depicted, mitochondrial is mentioned; which is operable linked, too.

[32313] In another embodiment thereof the expression cassette does not comprise an additional transit peptide in case in Table I, application no. 4, in column 6 in the same line as SEQ ID NO. 22921 is depicted, non-targeted is mentioned.

[32314] In an embodiment the present invention relates to an expresssion cassette comprising a) a promoter, preferably a promoter selected from the group consisting of Big35S, PCUbi, Super and USP, in particular p-PcUBI; and b) the nucleic acid SEQ ID NO. 1815, or a homolog or fragment thereof, or a homolog thereof being depicted in Table I, application no. 4, column 8, in the same line as SEQ ID NO. 1815, preferably the coding region thereof, a homolog or a fragment thereof; which are operable linked.

[32315] In an embodiment thereof the expression cassette comprises in addition c) a nucleic acid molecule encoding a transit peptide, especially a plastidal transit petide in case in Table I, application no. 4, in column 6 in the same line as SEQ ID NO. 1815 is depicted, plastidic is mentioned, or a mitochondrial transit peptide in case in Table I, application no. 4, in column 6 in the same line as SEQ ID NO. 1815 is depicted, mitochondrial is mentioned; which is operable linked, too.

[32316] In another embodiment thereof the expression cassette does not comprise an additional transit peptide in case in Table I, application no. 4, in column 6 in the same line as SEQ ID NO. 1815 is depicted, non-targeted is mentioned.

[32317] In an embodiment the present invention relates to an expresssion cassette comprising a) a promoter, preferably a promoter selected from the group consisting of Big35S, PCUbi, Super and USP, in particular p-PcUBI; and b) the nucleic acid SEQ ID NO. 68777, or a homolog or fragment thereof, or a homolog thereof being depicted in Table I, application no. 4, column 8, in the same line as SEQ ID NO. 68777, preferably the coding region thereof, a homolog or a fragment thereof; which are operable linked.

[32318] In an embodiment thereof the expression cassette comprises in addition c) a nucleic acid molecule encoding a transit peptide, especially a plastidal transit petide in case in Table I, application no. 4, in column 6 in the same line as SEQ ID NO. 68777 is depicted, plastidic is mentioned, or a mitochondrial transit peptide in case in Table I, application no. 4, in column 6 in the same line as SEQ ID NO. 68777 is depicted, mitochondrial is mentioned; which is operable linked, too.

[32319] In another embodiment thereof the expression cassette does not comprise an additional transit peptide in case in Table I, application no. 4, in column 6 in the same line as SEQ ID NO. 68777 is depicted, non-targeted is mentioned.

[32320] In an embodiment the present invention relates to an expresssion cassette comprising a) a promoter, preferably a promoter selected from the group consisting of Big35S, PCUbi, Super and USP, in particular p-PcUBI; and b) the nucleic acid SEQ ID NO. 2573, or a homolog or fragment thereof, or a homolog thereof being depicted in Table I, application no. 4, column 8, in the same line as SEQ ID NO. 2573, preferably the coding region thereof, a homolog or a fragment thereof; which are operable linked.

[32321] In an embodiment thereof the expression cassette comprises in addition c) a nucleic acid molecule encoding a transit peptide, especially a plastidal transit petide in case in Table I, application no. 4, in column 6 in the same line as SEQ ID NO. 2573 is depicted, plastidic is mentioned, or a mitochondrial transit peptide in case in Table I, application no. 4, in column 6 in the same line as SEQ ID NO. 2573 is depicted, mitochondrial is mentioned; which is operable linked, too.

[32322] In another embodiment thereof the expression cassette does not comprise an additional transit peptide in case in Table I, application no. 4, in column 6 in the same line as SEQ ID NO. 2573 is depicted, non-targeted is mentioned.

[32323] In an embodiment the present invention relates to an expresssion cassette comprising a) a promoter, preferably a promoter selected from the group consisting of Big35S, PCUbi, Super and USP, in particular p-PcUBI; and b) the nucleic acid SEQ ID NO. 2935, or a homolog or fragment thereof, or a homolog thereof being depicted in Table I, application no. 4, column 8, in the same line as SEQ ID NO. 2935, preferably the coding region thereof, a homolog or a fragment thereof; which are operable linked.

[32324] In an embodiment thereof the expression cassette comprises in addition c) a nucleic acid molecule encoding a transit peptide, especially a plastidal transit petide in case in Table I, application no. 4, in column 6 in the same line as SEQ ID NO. 2935 is depicted, plastidic is mentioned, or a mitochondrial transit peptide in case in Table I, application no. 4, in column 6 in the same line as SEQ ID NO. 2935 is depicted, mitochondrial is mentioned; which is operable linked, too.

[32325] In another embodiment thereof the expression cassette does not comprise an additional transit peptide in case in Table I, application no. 4, in column 6 in the same line as SEQ ID NO. 2935 is depicted, non-targeted is mentioned.

[32326] In an embodiment the present invention relates to an expresssion cassette comprising a) a promoter, preferably a promoter selected from the group consisting of Big35S, PCUbi, Super and USP, in particular p-PcUBI; and b) the nucleic acid SEQ ID NO. 23482, or a homolog or fragment thereof, or a homolog thereof being depicted in Table I, application no. 4, column 8, in the same line as SEQ ID NO. 23482, preferably the coding region thereof, a homolog or a fragment thereof; which are operable linked.

[32327] In an embodiment thereof the expression cassette comprises in addition c) a nucleic acid molecule encoding a transit peptide, especially a plastidal transit petide in case in Table I, application no. 4, in column 6 in the same line as SEQ ID NO. 23482 is depicted, plastidic is mentioned, or a mitochondrial transit peptide in case in Table I, application no. 4, in column 6 in the same line as SEQ ID NO. 23482 is depicted, mitochondrial is mentioned; which is operable linked, too.

[32328] In another embodiment thereof the expression cassette does not comprise an additional transit peptide in case in Table I, application no. 4, in column 6 in the same line as SEQ ID NO. 23482 is depicted, non-targeted is mentioned.

[32329] In an embodiment the present invention relates to an expresssion cassette comprising a) a promoter, preferably a promoter selected from the group consisting of Big35S, PCUbi, Super and USP, in particular p-PcUBI; and b) the nucleic acid SEQ ID NO. 3279, or a homolog or fragment thereof, or a homolog thereof being depicted in Table I, application no. 4, column 8, in the same line as SEQ ID NO. 3279, preferably the coding region thereof, a homolog or a fragment thereof; which are operable linked.

[32330] In an embodiment thereof the expression cassette comprises in addition c) a nucleic acid molecule encoding a transit peptide, especially a plastidal transit petide in case in Table I, application no. 4, in column 6 in the same line as SEQ ID NO. 3279 is depicted, plastidic is mentioned, or a mitochondrial transit peptide in case in Table I, application no. 4, in column 6 in the same line as SEQ ID NO. 3279 is depicted, mitochondrial is mentioned; which is operable linked, too.

[32331] In another embodiment thereof the expression cassette does not comprise an additional transit peptide in case in Table I, application no. 4, in column 6 in the same line as SEQ ID NO. 3279 is depicted, non-targeted is mentioned.

[32332] In an embodiment the present invention relates to an expresssion cassette comprising a) a promoter, preferably a promoter selected from the group consisting of Big35S, PCUbi, Super and USP, in particular p-PcUBI; and b) the nucleic acid SEQ ID NO. 23844, or a homolog or fragment thereof, or a homolog thereof being depicted in Table I, application no. 4, column 8, in the same line as SEQ ID NO. 23844, preferably the coding region thereof, a homolog or a fragment thereof; which are operable linked.

[32333] In an embodiment thereof the expression cassette comprises in addition c) a nucleic acid molecule encoding a transit peptide, especially a plastidal transit petide in case in Table I, application no. 4, in column 6 in the same line as SEQ ID NO. 23844 is depicted, plastidic is mentioned, or a mitochondrial transit peptide in case in Table I, application no. 4, in column 6 in the same line as SEQ ID NO. 23844 is depicted, mitochondrial is mentioned; which is operable linked, too.

[32334] In another embodiment thereof the expression cassette does not comprise an additional transit peptide in case in Table I, application no. 4, in column 6 in the same line as SEQ ID NO. 23844 is depicted, non-targeted is mentioned.

[32335] In an embodiment the present invention relates to an expresssion cassette comprising a) a promoter, preferably a promoter selected from the group consisting of Big35S, PCUbi, Super and USP, in particular p-PcUBI; and b) the nucleic acid SEQ ID NO. 24232, or a homolog or fragment thereof, or a homolog thereof being depicted in Table I, application no. 4, column 8, in the same line as SEQ ID NO. 24232, preferably the coding region thereof, a homolog or a fragment thereof; which are operable linked.

[32336] In an embodiment thereof the expression cassette comprises in addition c) a nucleic acid molecule encoding a transit peptide, especially a plastidal transit petide in case in Table I, application no. 4, in column 6 in the same line as SEQ ID NO. 24232 is depicted, plastidic is mentioned, or a mitochondrial transit peptide in case in Table I, application no. 4, in column 6 in the same line as SEQ ID NO. 24232 is depicted, mitochondrial is mentioned; which is operable linked, too.

[32337] In another embodiment thereof the expression cassette does not comprise an additional transit peptide in case in Table I, application no. 4, in column 6 in the same line as SEQ ID NO. 24232 is depicted, non-targeted is mentioned.

[32338] In an embodiment the present invention relates to an expresssion cassette comprising a) a promoter, preferably a promoter selected from the group consisting of Big35S, PCUbi, Super and USP, in particular p-PcUBI; and b) the nucleic acid SEQ ID NO. 4040, or a homolog or fragment thereof, or a homolog thereof being depicted in Table I, application no. 4, column 8, in the same line as SEQ ID NO. 4040, preferably the coding region thereof, a homolog or a fragment thereof; which are operable linked.

[32339] In an embodiment thereof the expression cassette comprises in addition c) a nucleic acid molecule encoding a transit peptide, especially a plastidal transit petide in case in Table I, application no. 4, in column 6 in the same line as SEQ ID NO. 4040 is depicted, plastidic is mentioned, or a mitochondrial transit peptide in case in Table I, application no. 4, in column 6 in the same line as SEQ ID NO. 4040 is depicted, mitochondrial is mentioned; which is operable linked, too.

[32340] In another embodiment thereof the expression cassette does not comprise an additional transit peptide in case in Table I, application no. 4, in column 6 in the same line as SEQ ID NO. 4040 is depicted, non-targeted is mentioned.

[32341] In an embodiment the present invention relates to an expresssion cassette comprising a) a promoter, preferably a promoter selected from the group consisting of Big35S, PCUbi, Super and USP, in particular p-PcUBI; and b) the nucleic acid SEQ ID NO. 24311, or a homolog or fragment thereof, or a homolog thereof being depicted in Table I, application no. 4, column 8, in the same line as SEQ ID NO. 24311, preferably the coding region thereof, a homolog or a fragment thereof; which are operable linked.

[32342] In an embodiment thereof the expression cassette comprises in addition c) a nucleic acid molecule encoding a transit peptide, especially a plastidal transit petide in case in Table I, application no. 4, in column 6 in the same line as SEQ ID NO. 24311 is depicted, plastidic is mentioned, or a mitochondrial transit peptide in case in Table I, application no. 4, in column 6 in the same line as SEQ ID NO. 24311 is depicted, mitochondrial is mentioned; which is operable linked, too.

[32343] In another embodiment thereof the expression cassette does not comprise an additional transit peptide in case in Table I, application no. 4, in column 6 in the same line as SEQ ID NO. 24311 is depicted, non-targeted is mentioned.

[32344] In an embodiment the present invention relates to an expresssion cassette comprising a) a promoter, preferably a promoter selected from the group consisting of Big35S, PCUbi, Super and USP, in particular p-PcUBI; and b) the nucleic acid SEQ ID NO. 4348, or a homolog or fragment thereof, or a homolog thereof being depicted in Table I, application no. 4, column 8, in the same line as SEQ ID NO. 4348, preferably the coding region thereof, a homolog or a fragment thereof; which are operable linked.

[32345] In an embodiment thereof the expression cassette comprises in addition c) a nucleic acid molecule encoding a transit peptide, especially a plastidal transit petide in case in Table I, application no. 4, in column 6 in the same line as SEQ ID NO. 4348 is depicted, plastidic is mentioned, or a mitochondrial transit peptide in case in Table I, application no. 4, in column 6 in the same line as SEQ ID NO. 4348 is depicted, mitochondrial is mentioned; which is operable linked, too.

[32346] In another embodiment thereof the expression cassette does not comprise an additional transit peptide in case in Table I, application no. 4, in column 6 in the same line as SEQ ID NO. 4348 is depicted, non-targeted is mentioned.

[32347] In an embodiment the present invention relates to an expresssion cassette comprising a) a promoter, preferably a promoter selected from the group consisting of Big35S, PCUbi, Super and USP, in particular p-PcUBI; and b) the nucleic acid SEQ ID NO. 24492, or a homolog or fragment thereof, or a homolog thereof being depicted in Table I, application no. 4, column 8, in the same line as SEQ ID NO. 24492, preferably the coding region thereof, a homolog or a fragment thereof; which are operable linked.

[32348] In an embodiment thereof the expression cassette comprises in addition c) a nucleic acid molecule encoding a transit peptide, especially a plastidal transit petide in case in Table I, application no. 4, in column 6 in the same line as SEQ ID NO. 24492 is depicted, plastidic is mentioned, or a mitochondrial transit peptide in case in Table I, application no. 4, in column 6 in the same line as SEQ ID NO. 24492 is depicted, mitochondrial is mentioned; which is operable linked, too.

[32349] In another embodiment thereof the expression cassette does not comprise an additional transit peptide in case in Table I, application no. 4, in column 6 in the same line as SEQ ID NO. 24492 is depicted, non-targeted is mentioned.

[32350] In an embodiment the present invention relates to an expresssion cassette comprising a) a promoter, preferably a promoter selected from the group consisting of Big35S, PCUbi, Super and USP, in particular p-PcUBI; and b) the nucleic acid SEQ ID NO. 93451, or a homolog or fragment thereof, or a homolog thereof being depicted in Table I, application no. 4, column 8, in the same line as SEQ ID NO. 93451, preferably the coding region thereof, a homolog or a fragment thereof; which are operable linked.

[32351] In an embodiment thereof the expression cassette comprises in addition c) a nucleic acid molecule encoding a transit peptide, especially a plastidal transit petide in case in Table I, application no. 4, in column 6 in the same line as SEQ ID NO. 93451 is depicted, plastidic is mentioned, or a mitochondrial transit peptide in case in Table I, application no. 4, in column 6 in the same line as SEQ ID NO. 93451 is depicted, mitochondrial is mentioned; which is operable linked, too.

[32352] In another embodiment thereof the expression cassette does not comprise an additional transit peptide in case in Table I, application no. 4, in column 6 in the same line as SEQ ID NO. 93451 is depicted, non-targeted is mentioned.

[32353] In an embodiment the present invention relates to an expresssion cassette comprising a) a promoter, preferably a promoter selected from the group consisting of Big35S, PCUbi, Super and USP, in particular p-PcUBI; and b) the nucleic acid SEQ ID NO. 25283, or a homolog or fragment thereof, or a homolog thereof being depicted in Table I, application no. 4, column 8, in the same line as SEQ ID NO. 25283, preferably the coding region thereof, a homolog or a fragment thereof; which are operable linked.

[32354] In an embodiment thereof the expression cassette comprises in addition c) a nucleic acid molecule encoding a transit peptide, especially a plastidal transit petide in case in Table I, application no. 4, in column 6 in the same line as SEQ ID NO. 25283 is depicted, plastidic is mentioned, or a mitochondrial transit peptide in case in Table I, application no. 4, in column 6 in the same line as SEQ ID NO. 25283 is depicted, mitochondrial is mentioned; which is operable linked, too.

[32355] In another embodiment thereof the expression cassette does not comprise an additional transit peptide in case in Table I, application no. 4, in column 6 in the same line as SEQ ID NO. 25283 is depicted, non-targeted is mentioned.

[32356] In an embodiment the present invention relates to an expresssion cassette comprising a) a promoter, preferably a promoter selected from the group consisting of Big35S, PCUbi, Super and USP, in particular p-PcUBI; and b) the nucleic acid SEQ ID NO. 69574, or a homolog or fragment thereof, or a homolog thereof being depicted in Table I, application no. 4, column 8, in the same line as SEQ ID NO. 69574, preferably the coding region thereof, a homolog or a fragment thereof; which are operable linked.

[32357] In an embodiment thereof the expression cassette comprises in addition c) a nucleic acid molecule encoding a transit peptide, especially a plastidal transit petide in case in Table I, application no. 4, in column 6 in the same line as SEQ ID NO. 69574 is depicted, plastidic is mentioned, or a mitochondrial transit peptide in case in Table I, application no. 4, in column 6 in the same line as SEQ ID NO. 69574 is depicted, mitochondrial is mentioned; which is operable linked, too.

[32358] In another embodiment thereof the expression cassette does not comprise an additional transit peptide in case in Table I, application no. 4, in column 6 in the same line as SEQ ID NO. 69574 is depicted, non-targeted is mentioned.

[32359] In an embodiment the present invention relates to an expresssion cassette comprising a) a promoter, preferably a promoter selected from the group consisting of Big35S, PCUbi, Super and USP, in particular p-PcUBI; and b) the nucleic acid SEQ ID NO. 5318, or a homolog or fragment thereof, or a homolog thereof being depicted in Table I, application no. 4, column 8, in the same line as SEQ ID NO. 5318, preferably the coding region thereof, a homolog or a fragment thereof; which are operable linked.

[32360] In an embodiment thereof the expression cassette comprises in addition c) a nucleic acid molecule encoding a transit peptide, especially a plastidal transit petide in case in Table I, application no. 4, in column 6 in the same line as SEQ ID NO. 5318 is depicted, plastidic is mentioned, or a mitochondrial transit peptide in case in Table I, application no. 4, in column 6 in the same line as SEQ ID NO. 5318 is depicted, mitochondrial is mentioned; which is operable linked, too.

[32361] In another embodiment thereof the expression cassette does not comprise an additional transit peptide in case in Table I, application no. 4, in column 6 in the same line as SEQ ID NO. 5318 is depicted, non-targeted is mentioned.

[32362] In an embodiment the present invention relates to an expresssion cassette comprising a) a promoter, preferably a promoter selected from the group consisting of Big35S, PCUbi, Super and USP, in particular p-PcUBI; and b) the nucleic acid SEQ ID NO. 5493, or a homolog or fragment thereof, or a homolog thereof being depicted in Table I, application no. 4, column 8, in the same line as SEQ ID NO. 5493, preferably the coding region thereof, a homolog or a fragment thereof; which are operable linked.

[32363] In an embodiment thereof the expression cassette comprises in addition c) a nucleic acid molecule encoding a transit peptide, especially a plastidal transit petide in case in Table I, application no. 4, in column 6 in the same line as SEQ ID NO. 5493 is depicted, plastidic is mentioned, or a mitochondrial transit peptide in case in Table I, application no. 4, in column 6 in the same line as SEQ ID NO. 5493 is depicted, mitochondrial is mentioned; which is operable linked, too.

[32364] In another embodiment thereof the expression cassette does not comprise an additional transit peptide in case in Table I, application no. 4, in column 6 in the same line as SEQ ID NO. 5493 is depicted, non-targeted is mentioned.

[32365] In an embodiment the present invention relates to an expresssion cassette comprising a) a promoter, preferably a promoter selected from the group consisting of Big35S, PCUbi, Super and USP, in particular p-PcUBI; and b) the nucleic acid SEQ ID NO. 70583, or a homolog or fragment thereof, or a homolog thereof being depicted in Table I, application no. 4, column 8, in the same line as SEQ ID NO. 70583, preferably the coding region thereof, a homolog or a fragment thereof; which are operable linked.

[32366] In an embodiment thereof the expression cassette comprises in addition c) a nucleic acid molecule encoding a transit peptide, especially a plastidal transit petide in case in Table I, application no. 4, in column 6 in the same line as SEQ ID NO. 70583 is depicted, plastidic is mentioned, or a mitochondrial transit peptide in case in Table I, application no. 4, in column 6 in the same line as SEQ ID NO. 70583 is depicted, mitochondrial is mentioned; which is operable linked, too.

[32367] In another embodiment thereof the expression cassette does not comprise an additional transit peptide in case in Table I, application no. 4, in column 6 in the same line as SEQ ID NO. 70583 is depicted, non-targeted is mentioned.

[32368] In an embodiment the present invention relates to an expresssion cassette comprising a) a promoter, preferably a promoter selected from the group consisting of Big35S, PCUbi, Super and USP, in particular p-PcUBI; and b) the nucleic acid SEQ ID NO. 5557, or a homolog or fragment thereof, or a homolog thereof being depicted in Table I, application no. 4, column 8, in the same line as SEQ ID NO. 5557, preferably the coding region thereof, a homolog or a fragment thereof; which are operable linked.

[32369] In an embodiment thereof the expression cassette comprises in addition c) a nucleic acid molecule encoding a transit peptide, especially a plastidal transit petide in case in Table I, application no. 4, in column 6 in the same line as SEQ ID NO. 5557 is depicted, plastidic is mentioned, or a mitochondrial transit peptide in case in Table I, application no. 4, in column 6 in the same line as SEQ ID NO. 5557 is depicted, mitochondrial is mentioned; which is operable linked, too.

[32370] In another embodiment thereof the expression cassette does not comprise an additional transit peptide in case in Table I, application no. 4, in column 6 in the same line as SEQ ID NO. 5557 is depicted, non-targeted is mentioned.

[32371] In an embodiment the present invention relates to an expresssion cassette comprising a) a promoter, preferably a promoter selected from the group consisting of Big35S, PCUbi, Super and USP, in particular p-PcUBI; and b) the nucleic acid SEQ ID NO. 26196, or a homolog or fragment thereof, or a homolog thereof being depicted in Table I, application no. 4, column 8, in the same line as SEQ ID NO. 26196, preferably the coding region thereof, a homolog or a fragment thereof; which are operable linked.

[32372] In an embodiment thereof the expression cassette comprises in addition c) a nucleic acid molecule encoding a transit peptide, especially a plastidal transit petide in case in Table I, application no. 4, in column 6 in the same line as SEQ ID NO. 26196 is depicted, plastidic is mentioned, or a mitochondrial transit peptide in case in Table I, application no. 4, in column 6 in the same line as SEQ ID NO. 26196 is depicted, mitochondrial is mentioned; which is operable linked, too.

[32373] In another embodiment thereof the expression cassette does not comprise an additional transit peptide in case in Table I, application no. 4, in column 6 in the same line as SEQ ID NO. 26196 is depicted, non-targeted is mentioned.

[32374] In an embodiment the present invention relates to an expresssion cassette comprising a) a promoter, preferably a promoter selected from the group consisting of Big35S, PCUbi, Super and USP, in particular p-PcUBI; and b) the nucleic acid SEQ ID NO. 6040, or a homolog or fragment thereof, or a homolog thereof being depicted in Table I, application no. 4, column 8, in the same line as SEQ ID NO. 6040, preferably the coding region thereof, a homolog or a fragment thereof; which are operable linked.

[32375] In an embodiment thereof the expression cassette comprises in addition c) a nucleic acid molecule encoding a transit peptide, especially a plastidal transit petide in case in Table I, application no. 4, in column 6 in the same line as SEQ ID NO. 6040 is depicted, plastidic is mentioned, or a mitochondrial transit peptide in case in Table I, application no. 4, in column 6 in the same line as SEQ ID NO. 6040 is depicted, mitochondrial is mentioned; which is operable linked, too.

[32376] In another embodiment thereof the expression cassette does not comprise an additional transit peptide in case in Table I, application no. 4, in column 6 in the same line as SEQ ID NO. 6040 is depicted, non-targeted is mentioned.

[32377] In an embodiment the present invention relates to an expresssion cassette comprising a) a promoter, preferably a promoter selected from the group consisting of Big35S, PCUbi, Super and USP, in particular p-PcUBI; and b) the nucleic acid SEQ ID NO. 27021, or a homolog or fragment thereof, or a homolog thereof being depicted in Table I, application no. 4, column 8, in the same line as SEQ ID NO. 27021, preferably the coding region thereof, a homolog or a fragment thereof; which are operable linked.

[32378] In an embodiment thereof the expression cassette comprises in addition c) a nucleic acid molecule encoding a transit peptide, especially a plastidal transit petide in case in Table I, application no. 4, in column 6 in the same line as SEQ ID NO. 27021 is depicted, plastidic is mentioned, or a mitochondrial transit peptide in case in Table I, application no. 4, in column 6 in the same line as SEQ ID NO. 27021 is depicted, mitochondrial is mentioned; which is operable linked, too.

[32379] In another embodiment thereof the expression cassette does not comprise an additional transit peptide in case in Table I, application no. 4, in column 6 in the same line as SEQ ID NO. 27021 is depicted, non-targeted is mentioned.

[32380] In an embodiment the present invention relates to an expresssion cassette comprising a) a promoter, preferably a promoter selected from the group consisting of Big35S, PCUbi, Super and USP, in particular p-PcUBI; and b) the nucleic acid SEQ ID NO. 27882, or a homolog or fragment thereof, or a homolog thereof being depicted in Table I, application no. 4, column 8, in the same line as SEQ ID NO. 27882, preferably the coding region thereof, a homolog or a fragment thereof; which are operable linked.

[32381] In an embodiment thereof the expression cassette comprises in addition c) a nucleic acid molecule encoding a transit peptide, especially a plastidal transit petide in case in Table I, application no. 4, in column 6 in the same line as SEQ ID NO. 27882 is depicted, plastidic is mentioned, or a mitochondrial transit peptide in case in Table I, application no. 4, in column 6 in the same line as SEQ ID NO. 27882 is depicted, mitochondrial is mentioned; which is operable linked, too.

[32382] In another embodiment thereof the expression cassette does not comprise an additional transit peptide in case in Table I, application no. 4, in column 6 in the same line as SEQ ID NO. 27882 is depicted, non-targeted is mentioned.

[32383] In an embodiment the present invention relates to an expresssion cassette comprising a) a promoter, preferably a promoter selected from the group consisting of Big35S, PCUbi, Super and USP, in particular p-PcUBI; and b) the nucleic acid SEQ ID NO. 28040, or a homolog or fragment thereof, or a homolog thereof being depicted in Table I, application no. 4, column 8, in the same line as SEQ ID NO. 28040, preferably the coding region thereof, a homolog or a fragment thereof; which are operable linked.

[32384] In an embodiment thereof the expression cassette comprises in addition c) a nucleic acid molecule encoding a transit peptide, especially a plastidal transit petide in case in Table I, application no. 4, in column 6 in the same line as SEQ ID NO. 28040 is depicted, plastidic is mentioned, or a mitochondrial transit peptide in case in Table I, application no. 4, in column 6 in the same line as SEQ ID NO. 28040 is depicted, mitochondrial is mentioned; which is operable linked, too.

[32385] In another embodiment thereof the expression cassette does not comprise an additional transit peptide in case in Table I, application no. 4, in column 6 in the same line as SEQ ID NO. 28040 is depicted, non-targeted is mentioned.

[32386] In an embodiment the present invention relates to an expresssion cassette comprising a) a promoter, preferably a promoter selected from the group consisting of Big35S, PCUbi, Super and USP, in particular p-PcUBI; and b) the nucleic acid SEQ ID NO. 6075, or a homolog or fragment thereof, or a homolog thereof being depicted in Table I, application no. 4, column 8, in the same line as SEQ ID NO. 6075, preferably the coding region thereof, a homolog or a fragment thereof; which are operable linked.

[32387] In an embodiment thereof the expression cassette comprises in addition c) a nucleic acid molecule encoding a transit peptide, especially a plastidal transit petide in case in Table I, application no. 4, in column 6 in the same line as SEQ ID NO. 6075 is depicted, plastidic is mentioned, or a mitochondrial transit peptide in case in Table I, application no. 4, in column 6 in the same line as SEQ ID NO. 6075 is depicted, mitochondrial is mentioned; which is operable linked, too.

[32388] In another embodiment thereof the expression cassette does not comprise an additional transit peptide in case in Table I, application no. 4, in column 6 in the same line as SEQ ID NO. 6075 is depicted, non-targeted is mentioned.

[32389] In an embodiment the present invention relates to an expresssion cassette comprising a) a promoter, preferably a promoter selected from the group consisting of Big35S, PCUbi, Super and USP, in particular p-PcUBI; and b) the nucleic acid SEQ ID NO. 93532, or a homolog or fragment thereof, or a homolog thereof being depicted in Table I, application no. 4, column 8, in the same line as SEQ ID NO. 93532, preferably the coding region thereof, a homolog or a fragment thereof; which are operable linked.

[32390] In an embodiment thereof the expression cassette comprises in addition c) a nucleic acid molecule encoding a transit peptide, especially a plastidal transit petide in case in Table I, application no. 4, in column 6 in the same line as SEQ ID NO. 93532 is depicted, plastidic is mentioned, or a mitochondrial transit peptide in case in Table I, application no. 4, in column 6 in the same line as SEQ ID NO. 93532 is depicted, mitochondrial is mentioned; which is operable linked, too.

[32391] In another embodiment thereof the expression cassette does not comprise an additional transit peptide in case in Table I, application no. 4, in column 6 in the same line as SEQ ID NO. 93532 is depicted, non-targeted is mentioned.

[32392] In an embodiment the present invention relates to an expresssion cassette comprising a) a promoter, preferably a promoter selected from the group consisting of Big35S, PCUbi, Super and USP, in particular p-PcUBI; and b) the nucleic acid SEQ ID NO. 72346, or a homolog or fragment thereof, or a homolog thereof being depicted in Table I, application no. 4, column 8, in the same line as SEQ ID NO. 72346, preferably the coding region thereof, a homolog or a fragment thereof; which are operable linked.

[32393] In an embodiment thereof the expression cassette comprises in addition c) a nucleic acid molecule encoding a transit peptide, especially a plastidal transit petide in case in Table I, application no. 4, in column 6 in the same line as SEQ ID NO. 72346 is depicted, plastidic is mentioned, or a mitochondrial transit peptide in case in Table I, application no. 4, in column 6 in the same line as SEQ ID NO. 72346 is depicted, mitochondrial is mentioned; which is operable linked, too.

[32394] In another embodiment thereof the expression cassette does not comprise an additional transit peptide in case in Table I, application no. 4, in column 6 in the same line as SEQ ID NO. 72346 is depicted, non-targeted is mentioned.

[32395] In an embodiment the present invention relates to an expresssion cassette comprising a) a promoter, preferably a promoter selected from the group consisting of Big35S, PCUbi, Super and USP, in particular p-PcUBI; and b) the nucleic acid SEQ ID NO. 28738, or a homolog or fragment thereof, or a homolog thereof being depicted in Table I, application no. 4, column 8, in the same line as SEQ ID NO. 28738, preferably the coding region thereof, a homolog or a fragment thereof; which are operable linked.

[32396] In an embodiment thereof the expression cassette comprises in addition c) a nucleic acid molecule encoding a transit peptide, especially a plastidal transit petide in case in Table I, application no. 4, in column 6 in the same line as SEQ ID NO. 28738 is depicted, plastidic is mentioned, or a mitochondrial transit peptide in case in Table I, application no. 4, in column 6 in the same line as SEQ ID NO. 28738 is depicted, mitochondrial is mentioned; which is operable linked, too.

[32397] In another embodiment thereof the expression cassette does not comprise an additional transit peptide in case in Table I, application no. 4, in column 6 in the same line as SEQ ID NO. 28738 is depicted, non-targeted is mentioned.

[32398] In an embodiment the present invention relates to an expresssion cassette comprising a) a promoter, preferably a promoter selected from the group consisting of Big35S, PCUbi, Super and USP, in particular p-PcUBI; and b) the nucleic acid SEQ ID NO. 29286, or a homolog or fragment thereof, or a homolog thereof being depicted in Table I, application no. 4, column 8, in the same line as SEQ ID NO. 29286, preferably the coding region thereof, a homolog or a fragment thereof; which are operable linked.

[32399] In an embodiment thereof the expression cassette comprises in addition c) a nucleic acid molecule encoding a transit peptide, especially a plastidal transit petide in case in Table I, application no. 4, in column 6 in the same line as SEQ ID NO. 29286 is depicted, plastidic is mentioned, or a mitochondrial transit peptide in case in Table I, application no. 4, in column 6 in the same line as SEQ ID NO. 29286 is depicted, mitochondrial is mentioned; which is operable linked, too.

[32400] In another embodiment thereof the expression cassette does not comprise an additional transit peptide in case in Table I, application no. 4, in column 6 in the same line as SEQ ID NO. 29286 is depicted, non-targeted is mentioned.

[32401] In an embodiment the present invention relates to an expresssion cassette comprising a) a promoter, preferably a promoter selected from the group consisting of Big35S, PCUbi, Super and USP, in particular p-PcUBI; and b) the nucleic acid SEQ ID NO. 6268, or a homolog or fragment thereof, or a homolog thereof being depicted in Table I, application no. 4, column 8, in the same line as SEQ ID NO. 6268, preferably the coding region thereof, a homolog or a fragment thereof; which are operable linked.

[32402] In an embodiment thereof the expression cassette comprises in addition c) a nucleic acid molecule encoding a transit peptide, especially a plastidal transit petide in case in Table I, application no. 4, in column 6 in the same line as SEQ ID NO. 6268 is depicted, plastidic is mentioned, or a mitochondrial transit peptide in case in Table I, application no. 4, in column 6 in the same line as SEQ ID NO. 6268 is depicted, mitochondrial is mentioned; which is operable linked, too.

[32403] In another embodiment thereof the expression cassette does not comprise an additional transit peptide in case in Table I, application no. 4, in column 6 in the same line as SEQ ID NO. 6268 is depicted, non-targeted is mentioned.

[32404] In an embodiment the present invention relates to an expresssion cassette comprising a) a promoter, preferably a promoter selected from the group consisting of Big35S, PCUbi, Super and USP, in particular p-PcUBI; and b) the nucleic acid SEQ ID NO. 6510, or a homolog or fragment thereof, or a homolog thereof being depicted in Table I, application no. 4, column 8, in the same line as SEQ ID NO. 6510, preferably the coding region thereof, a homolog or a fragment thereof; which are operable linked.

[32405] In an embodiment thereof the expression cassette comprises in addition c) a nucleic acid molecule encoding a transit peptide, especially a plastidal transit petide in case in Table I, application no. 4, in column 6 in the same line as SEQ ID NO. 6510 is depicted, plastidic is mentioned, or a mitochondrial transit peptide in case in Table I, application no. 4, in column 6 in the same line as SEQ ID NO. 6510 is depicted, mitochondrial is mentioned; which is operable linked, too.

[32406] In another embodiment thereof the expression cassette does not comprise an additional transit peptide in case in Table I, application no. 4, in column 6 in the same line as SEQ ID NO. 6510 is depicted, non-targeted is mentioned.

[32407] In an embodiment the present invention relates to an expresssion cassette comprising a) a promoter, preferably a promoter selected from the group consisting of Big35S, PCUbi, Super and USP, in particular p-PcUBI; and b) the nucleic acid SEQ ID NO. 32037, or a homolog or fragment thereof, or a homolog thereof being depicted in Table I, application no. 4, column 8, in the same line as SEQ ID NO. 32037, preferably the coding region thereof, a homolog or a fragment thereof; which are operable linked.

[32408] In an embodiment thereof the expression cassette comprises in addition c) a nucleic acid molecule encoding a transit peptide, especially a plastidal transit petide in case in Table I, application no. 4, in column 6 in the same line as SEQ ID NO. 32037 is depicted, plastidic is mentioned, or a mitochondrial transit peptide in case in Table I, application no. 4, in column 6 in the same line as SEQ ID NO. 32037 is depicted, mitochondrial is mentioned; which is operable linked, too.

[32409] In another embodiment thereof the expression cassette does not comprise an additional transit peptide in case in Table I, application no. 4, in column 6 in the same line as SEQ ID NO. 32037 is depicted, non-targeted is mentioned.

[32410] In an embodiment the present invention relates to an expresssion cassette comprising a) a promoter, preferably a promoter selected from the group consisting of Big35S, PCUbi, Super and USP, in particular p-PcUBI; and b) the nucleic acid SEQ ID NO. 74662, or a homolog or fragment thereof, or a homolog thereof being depicted in Table I, application no. 4, column 8, in the same line as SEQ ID NO. 74662, preferably the coding region thereof, a homolog or a fragment thereof; which are operable linked.

[32411] In an embodiment thereof the expression cassette comprises in addition c) a nucleic acid molecule encoding a transit peptide, especially a plastidal transit petide in case in Table I, application no. 4, in column 6 in the same line as SEQ ID NO. 74662 is depicted, plastidic is mentioned, or a mitochondrial transit peptide in case in Table I, application no. 4, in column 6 in the same line as SEQ ID NO. 74662 is depicted, mitochondrial is mentioned; which is operable linked, too.

[32412] In another embodiment thereof the expression cassette does not comprise an additional transit peptide in case in Table I, application no. 4, in column 6 in the same line as SEQ ID NO. 74662 is depicted, non-targeted is mentioned.

[32413] In an embodiment the present invention relates to an expresssion cassette comprising a) a promoter, preferably a promoter selected from the group consisting of Big35S, PCUbi, Super and USP, in particular p-PcUBI; and b) the nucleic acid SEQ ID NO. 33596, or a homolog or fragment thereof, or a homolog thereof being depicted in Table I, application no. 4, column 8, in the same line as SEQ ID NO. 33596, preferably the coding region thereof, a homolog or a fragment thereof; which are operable linked.

[32414] In an embodiment thereof the expression cassette comprises in addition c) a nucleic acid molecule encoding a transit peptide, especially a plastidal transit petide in case in Table I, application no. 4, in column 6 in the same line as SEQ ID NO. 33596 is depicted, plastidic is mentioned, or a mitochondrial transit peptide in case in Table I, application no. 4, in column 6 in the same line as SEQ ID NO. 33596 is depicted, mitochondrial is mentioned; which is operable linked, too.

[32415] In another embodiment thereof the expression cassette does not comprise an additional transit peptide in case in Table I, application no. 4, in column 6 in the same line as SEQ ID NO. 33596 is depicted, non-targeted is mentioned.

[32416] In an embodiment the present invention relates to an expresssion cassette comprising a) a promoter, preferably a promoter selected from the group consisting of Big35S, PCUbi, Super and USP, in particular p-PcUBI; and b) the nucleic acid SEQ ID NO. 34204, or a homolog or fragment thereof, or a homolog thereof being depicted in Table I, application no. 4, column 8, in the same line as SEQ ID NO. 34204, preferably the coding region thereof, a homolog or a fragment thereof; which are operable linked.

[32417] In an embodiment thereof the expression cassette comprises in addition c) a nucleic acid molecule encoding a transit peptide, especially a plastidal transit petide in case in Table I, application no. 4, in column 6 in the same line as SEQ ID NO. 34204 is depicted, plastidic is mentioned, or a mitochondrial transit peptide in case in Table I, application no. 4, in column 6 in the same line as SEQ ID NO. 34204 is depicted, mitochondrial is mentioned; which is operable linked, too.

[32418] In another embodiment thereof the expression cassette does not comprise an additional transit peptide in case in Table I, application no. 4, in column 6 in the same line as SEQ ID NO. 34204 is depicted, non-targeted is mentioned.

[32419] In an embodiment the present invention relates to an expresssion cassette comprising a) a promoter, preferably a promoter selected from the group consisting of Big35S, PCUbi, Super and USP, in particular p-PcUBI; and b) the nucleic acid SEQ ID NO. 34301, or a homolog or fragment thereof, or a homolog thereof being depicted in Table I, application no. 4, column 8, in the same line as SEQ ID NO. 34301, preferably the coding region thereof, a homolog or a fragment thereof; which are operable linked.

[32420] In an embodiment thereof the expression cassette comprises in addition c) a nucleic acid molecule encoding a transit peptide, especially a plastidal transit petide in case in Table I, application no. 4, in column 6 in the same line as SEQ ID NO. 34301 is depicted, plastidic is mentioned, or a mitochondrial transit peptide in case in Table I, application no. 4, in column 6 in the same line as SEQ ID NO. 34301 is depicted, mitochondrial is mentioned; which is operable linked, too.

[32421] In another embodiment thereof the expression cassette does not comprise an additional transit peptide in case in Table I, application no. 4, in column 6 in the same line as SEQ ID NO. 34301 is depicted, non-targeted is mentioned.

[32422] In an embodiment the present invention relates to an expresssion cassette comprising a) a promoter, preferably a promoter selected from the group consisting of Big35S, PCUbi, Super and USP, in particular p-USP; and b) the nucleic acid SEQ ID NO. 34889, or a homolog or fragment thereof, or a homolog thereof being depicted in Table I, application no. 4, column 8, in the same line as SEQ ID NO. 34889, preferably the coding region thereof, a homolog or a fragment thereof; which are operable linked.

[32423] In an embodiment thereof the expression cassette comprises in addition c) a nucleic acid molecule encoding a transit peptide, especially a plastidal transit petide in case in Table I, application no. 4, in column 6 in the same line as SEQ ID NO. 34889 is depicted, plastidic is mentioned, or a mitochondrial transit peptide in case in Table I, application no. 4, in column 6 in the same line as SEQ ID NO. 34889 is depicted, mitochondrial is mentioned; which is operable linked, too.

[32424] In another embodiment thereof the expression cassette does not comprise an additional transit peptide in case in Table I, application no. 4, in column 6 in the same line as SEQ ID NO. 34889 is depicted, non-targeted is mentioned.

[32425] In an embodiment the present invention relates to an expresssion cassette comprising a) a promoter, preferably a promoter selected from the group consisting of Big35S, PCUbi, Super and USP, in particular p-USP; and b) the nucleic acid SEQ ID NO. 6818, or a homolog or fragment thereof, or a homolog thereof being depicted in Table I, application no. 4, column 8, in the same line as SEQ ID NO. 6818, preferably the coding region thereof, a homolog or a fragment thereof; which are operable linked.

[32426] In an embodiment thereof the expression cassette comprises in addition c) a nucleic acid molecule encoding a transit peptide, especially a plastidal transit petide in case in Table I, application no. 4, in column 6 in the same line as SEQ ID NO. 6818 is depicted, plastidic is mentioned, or a mitochondrial transit peptide in case in Table I, application no. 4, in column 6 in the same line as SEQ ID NO. 6818 is depicted, mitochondrial is mentioned; which is operable linked, too.

[32427] In another embodiment thereof the expression cassette does not comprise an additional transit peptide in case in Table I, application no. 4, in column 6 in the same line as SEQ ID NO. 6818 is depicted, non-targeted is mentioned.

[32428] In an embodiment the present invention relates to an expresssion cassette comprising a) a promoter, preferably a promoter selected from the group consisting of Big35S, PCUbi, Super and USP, in particular p-USP; and b) the nucleic acid SEQ ID NO. 35366, or a homolog or fragment thereof, or a homolog thereof being depicted in Table I, application no. 4, column 8, in the same line as SEQ ID NO. 35366, preferably the coding region thereof, a homolog or a fragment thereof; which are operable linked.

[32429] In an embodiment thereof the expression cassette comprises in addition c) a nucleic acid molecule encoding a transit peptide, especially a plastidal transit petide in case in Table I, application no. 4, in column 6 in the same line as SEQ ID NO. 35366 is depicted, plastidic is mentioned, or a mitochondrial transit peptide in case in Table I, application no. 4, in column 6 in the same line as SEQ ID NO. 35366 is depicted, mitochondrial is mentioned; which is operable linked, too.

[32430] In another embodiment thereof the expression cassette does not comprise an additional transit peptide in case in Table I, application no. 4, in column 6 in the same line as SEQ ID NO. 35366 is depicted, non-targeted is mentioned.

[32431] In an embodiment the present invention relates to an expresssion cassette comprising a) a promoter, preferably a promoter selected from the group consisting of Big35S, PCUbi, Super and USP, in particular p-Super; and b) the nucleic acid SEQ ID NO. 35482, or a homolog or fragment thereof, or a homolog thereof being depicted in Table I, application no. 4, column 8, in the same line as SEQ ID NO. 35482, preferably the coding region thereof, a homolog or a fragment thereof; which are operable linked.

[32432] In an embodiment thereof the expression cassette comprises in addition c) a nucleic acid molecule encoding a transit peptide, especially a plastidal transit petide in case in Table I, application no. 4, in column 6 in the same line as SEQ ID NO. 35482 is depicted, plastidic is mentioned, or a mitochondrial transit peptide in case in Table I, application no. 4, in column 6 in the same line as SEQ ID NO. 35482 is depicted, mitochondrial is mentioned; which is operable linked, too.

[32433] In another embodiment thereof the expression cassette does not comprise an additional transit peptide in case in Table I, application no. 4, in column 6 in the same line as SEQ ID NO. 35482 is depicted, non-targeted is mentioned.

[32434] In an embodiment the present invention relates to an expresssion cassette comprising a) a promoter, preferably a promoter selected from the group consisting of Big35S, PCUbi, Super and USP, in particular p-Super; and b) the nucleic acid SEQ ID NO. 7081, or a homolog or fragment thereof, or a homolog thereof being depicted in Table I, application no. 4, column 8, in the same line as SEQ ID NO. 7081, preferably the coding region thereof, a homolog or a fragment thereof; which are operable linked.

[32435] In an embodiment thereof the expression cassette comprises in addition c) a nucleic acid molecule encoding a transit peptide, especially a plastidal transit petide in case in Table I, application no. 4, in column 6 in the same line as SEQ ID NO. 7081 is depicted, plastidic is mentioned, or a mitochondrial transit peptide in case in Table I, application no. 4, in column 6 in the same line as SEQ ID NO. 7081 is depicted, mitochondrial is mentioned; which is operable linked, too.

[32436] In another embodiment thereof the expression cassette does not comprise an additional transit peptide in case in Table I, application no. 4, in column 6 in the same line as SEQ ID NO. 7081 is depicted, non-targeted is mentioned.

[32437] In an embodiment the present invention relates to an expresssion cassette comprising a) a promoter, preferably a promoter selected from the group consisting of Big35S, PCUbi, Super and USP, in particular p-Super; and b) the nucleic acid SEQ ID NO. 35590, or a homolog or fragment thereof, or a homolog thereof being depicted in Table I, application no. 4, column 8, in the same line as SEQ ID NO. 35590, preferably the coding region thereof, a homolog or a fragment thereof; which are operable linked.

[32438] In an embodiment thereof the expression cassette comprises in addition c) a nucleic acid molecule encoding a transit peptide, especially a plastidal transit petide in case in Table I, application no. 4, in column 6 in the same line as SEQ ID NO. 35590 is depicted, plastidic is mentioned, or a mitochondrial transit peptide in case in Table I, application no. 4, in column 6 in the same line as SEQ ID NO. 35590 is depicted, mitochondrial is mentioned; which is operable linked, too.

[32439] In another embodiment thereof the expression cassette does not comprise an additional transit peptide in case in Table I, application no. 4, in column 6 in the same line as SEQ ID NO. 35590 is depicted, non-targeted is mentioned.

[32440] In an embodiment the present invention relates to an expresssion cassette comprising a) a promoter, preferably a promoter selected from the group consisting of Big35S, PCUbi, Super and USP, in particular p-USP; and b) the nucleic acid SEQ ID NO. 35733, or a homolog or fragment thereof, or a homolog thereof being depicted in Table I, application no. 4, column 8, in the same line as SEQ ID NO. 35733, preferably the coding region thereof, a homolog or a fragment thereof; which are operable linked.

[32441] In an embodiment thereof the expression cassette comprises in addition c) a nucleic acid molecule encoding a transit peptide, especially a plastidal transit petide in case in Table I, application no. 4, in column 6 in the same line as SEQ ID NO. 35733 is depicted, plastidic is mentioned, or a mitochondrial transit peptide in case in Table I, application no. 4, in column 6 in the same line as SEQ ID NO. 35733 is depicted, mitochondrial is mentioned; which is operable linked, too.

[32442] In another embodiment thereof the expression cassette does not comprise an additional transit peptide in case in Table I, application no. 4, in column 6 in the same line as SEQ ID NO. 35733 is depicted, non-targeted is mentioned.

[32443] In an embodiment the present invention relates to an expresssion cassette comprising a) a promoter, preferably a promoter selected from the group consisting of Big35S, PCUbi, Super and USP, in particular p-USP; and b) the nucleic acid SEQ ID NO. 7269, or a homolog or fragment thereof, or a homolog thereof being depicted in Table I, application no. 4, column 8, in the same line as SEQ ID NO. 7269, preferably the coding region thereof, a homolog or a fragment thereof; which are operable linked.

[32444] In an embodiment thereof the expression cassette comprises in addition c) a nucleic acid molecule encoding a transit peptide, especially a plastidal transit petide in case in Table I, application no. 4, in column 6 in the same line as SEQ ID NO. 7269 is depicted, plastidic is mentioned, or a mitochondrial transit peptide in case in Table I, application no. 4, in column 6 in the same line as SEQ ID NO. 7269 is depicted, mitochondrial is mentioned; which is operable linked, too.

[32445] In another embodiment thereof the expression cassette does not comprise an additional transit peptide in case in Table I, application no. 4, in column 6 in the same line as SEQ ID NO. 7269 is depicted, non-targeted is mentioned.

[32446] In an embodiment the present invention relates to an expresssion cassette comprising a) a promoter, preferably a promoter selected from the group consisting of Big35S, PCUbi, Super and USP, in particular p-Super; and b) the nucleic acid SEQ ID NO. 7333, or a homolog or fragment thereof, or a homolog thereof being depicted in Table I, application no. 4, column 8, in the same line as SEQ ID NO. 7333, preferably the coding region thereof, a homolog or a fragment thereof; which are operable linked.

[32447] In an embodiment thereof the expression cassette comprises in addition c) a nucleic acid molecule encoding a transit peptide, especially a plastidal transit petide in case in Table I, application no. 4, in column 6 in the same line as SEQ ID NO. 7333 is depicted, plastidic is mentioned, or a mitochondrial transit peptide in case in Table I, application no. 4, in column 6 in the same line as SEQ ID NO. 7333 is depicted, mitochondrial is mentioned; which is operable linked, too.

[32448] In another embodiment thereof the expression cassette does not comprise an additional transit peptide in case in Table I, application no. 4, in column 6 in the same line as SEQ ID NO. 7333 is depicted, non-targeted is mentioned.

[32449] In an embodiment the present invention relates to an expresssion cassette comprising a) a promoter, preferably a promoter selected from the group consisting of Big35S, PCUbi, Super and USP, in particular p-Super; and b) the nucleic acid SEQ ID NO. 7686, or a homolog or fragment thereof, or a homolog thereof being depicted in Table I, application no. 4, column 8, in the same line as SEQ ID NO. 7686, preferably the coding region thereof, a homolog or a fragment thereof; which are operable linked.

[32450] In an embodiment thereof the expression cassette comprises in addition c) a nucleic acid molecule encoding a transit peptide, especially a plastidal transit petide in case in Table I, application no. 4, in column 6 in the same line as SEQ ID NO. 7686 is depicted, plastidic is mentioned, or a mitochondrial transit peptide in case in Table I, application no. 4, in column 6 in the same line as SEQ ID NO. 7686 is depicted, mitochondrial is mentioned; which is operable linked, too.

[32451] In another embodiment thereof the expression cassette does not comprise an additional transit peptide in case in Table I, application no. 4, in column 6 in the same line as SEQ ID NO. 7686 is depicted, non-targeted is mentioned.

[32452] In an embodiment the present invention relates to an expresssion cassette comprising a) a promoter, preferably a promoter selected from the group consisting of Big35S, PCUbi, Super and USP, in particular p-Super; and b) the nucleic acid SEQ ID NO. 35967, or a homolog or fragment thereof, or a homolog thereof being depicted in Table I, application no. 4, column 8, in the same line as SEQ ID NO. 35967, preferably the coding region thereof, a homolog or a fragment thereof; which are operable linked.

[32453] In an embodiment thereof the expression cassette comprises in addition c) a nucleic acid molecule encoding a transit peptide, especially a plastidal transit petide in case in Table I, application no. 4, in column 6 in the same line as SEQ ID NO. 35967 is depicted, plastidic is mentioned, or a mitochondrial transit peptide in case in Table I, application no. 4, in column 6 in the same line as SEQ ID NO. 35967 is depicted, mitochondrial is mentioned; which is operable linked, too.

[32454] In another embodiment thereof the expression cassette does not comprise an additional transit peptide in case in Table I, application no. 4, in column 6 in the same line as SEQ ID NO. 35967 is depicted, non-targeted is mentioned.

[32455] In an embodiment the present invention relates to an expresssion cassette comprising a) a promoter, preferably a promoter selected from the group consisting of Big35S, PCUbi, Super and USP, in particular p-Super; and b) the nucleic acid SEQ ID NO. 93678, or a homolog or fragment thereof, or a homolog thereof being depicted in Table I, application no. 4, column 8, in the same line as SEQ ID NO. 93678, preferably the coding region thereof, a homolog or a fragment thereof; which are operable linked.

[32456] In an embodiment thereof the expression cassette comprises in addition c) a nucleic acid molecule encoding a transit peptide, especially a plastidal transit petide in case in Table I, application no. 4, in column 6 in the same line as SEQ ID NO. 93678 is depicted, plastidic is mentioned, or a mitochondrial transit peptide in case in Table I, application no. 4, in column 6 in the same line as SEQ ID NO. 93678 is depicted, mitochondrial is mentioned; which is operable linked, too.

[32457] In another embodiment thereof the expression cassette does not comprise an additional transit peptide in case in Table I, application no. 4, in column 6 in the same line as SEQ ID NO. 93678 is depicted, non-targeted is mentioned.

[32458] In an embodiment the present invention relates to an expresssion cassette comprising a) a promoter, preferably a promoter selected from the group consisting of Big35S, PCUbi, Super and USP, in particular p-Super; and b) the nucleic acid SEQ ID NO. 93793, or a homolog or fragment thereof, or a homolog thereof being depicted in Table I, application no. 4, column 8, in the same line as SEQ ID NO. 93793, preferably the coding region thereof, a homolog or a fragment thereof; which are operable linked.

[32459] In an embodiment thereof the expression cassette comprises in addition c) a nucleic acid molecule encoding a transit peptide, especially a plastidal transit petide in case in Table I, application no. 4, in column 6 in the same line as SEQ ID NO. 93793 is depicted, plastidic is mentioned, or a mitochondrial transit peptide in case in Table I, application no. 4, in column 6 in the same line as SEQ ID NO. 93793 is depicted, mitochondrial is mentioned; which is operable linked, too.

[32460] In another embodiment thereof the expression cassette does not comprise an additional transit peptide in case in Table I, application no. 4, in column 6 in the same line as SEQ ID NO. 93793 is depicted, non-targeted is mentioned.

[32461] In an embodiment the present invention relates to an expresssion cassette comprising a) a promoter, preferably a promoter selected from the group consisting of Big35S, PCUbi, Super and USP, in particular p-Super; and b) the nucleic acid SEQ ID NO. 7917, or a homolog or fragment thereof, or a homolog thereof being depicted in Table I, application no. 4, column 8, in the same line as SEQ ID NO. 7917, preferably the coding region thereof, a homolog or a fragment thereof; which are operable linked.

[32462] In an embodiment thereof the expression cassette comprises in addition c) a nucleic acid molecule encoding a transit peptide, especially a plastidal transit petide in case in Table I, application no. 4, in column 6 in the same line as SEQ ID NO. 7917 is depicted, plastidic is mentioned, or a mitochondrial transit peptide in case in Table I, application no. 4, in column 6 in the same line as SEQ ID NO. 7917 is depicted, mitochondrial is mentioned; which is operable linked, too.

[32463] In another embodiment thereof the expression cassette does not comprise an additional transit peptide in case in Table I, application no. 4, in column 6 in the same line as SEQ ID NO. 7917 is depicted, non-targeted is mentioned.

[32464] In an embodiment the present invention relates to an expresssion cassette comprising a) a promoter, preferably a promoter selected from the group consisting of Big35S, PCUbi, Super and USP, in particular p-USP; and b) the nucleic acid SEQ ID NO. 36809, or a homolog or fragment thereof, or a homolog thereof being depicted in Table I, application no. 4, column 8, in the same line as SEQ ID NO. 36809, preferably the coding region thereof, a homolog or a fragment thereof; which are operable linked.

[32465] In an embodiment thereof the expression cassette comprises in addition c) a nucleic acid molecule encoding a transit peptide, especially a plastidal transit petide in case in Table I, application no. 4, in column 6 in the same line as SEQ ID NO. 36809 is depicted, plastidic is mentioned, or a mitochondrial transit peptide in case in Table I, application no. 4, in column 6 in the same line as SEQ ID NO. 36809 is depicted, mitochondrial is mentioned; which is operable linked, too.

[32466] In another embodiment thereof the expression cassette does not comprise an additional transit peptide in case in Table I, application no. 4, in column 6 in the same line as SEQ ID NO. 36809 is depicted, non-targeted is mentioned.

[32467] In an embodiment the present invention relates to an expresssion cassette comprising a) a promoter, preferably a promoter selected from the group consisting of Big35S, PCUbi, Super and USP, in particular p-Super; and b) the nucleic acid SEQ ID NO. 7941, or a homolog or fragment thereof, or a homolog thereof being depicted in Table I, application no. 4, column 8, in the same line as SEQ ID NO. 7941, preferably the coding region thereof, a homolog or a fragment thereof; which are operable linked.

[32468] In an embodiment thereof the expression cassette comprises in addition c) a nucleic acid molecule encoding a transit peptide, especially a plastidal transit petide in case in Table I, application no. 4, in column 6 in the same line as SEQ ID NO. 7941 is depicted, plastidic is mentioned, or a mitochondrial transit peptide in case in Table I, application no. 4, in column 6 in the same line as SEQ ID NO. 7941 is depicted, mitochondrial is mentioned; which is operable linked, too.

[32469] In another embodiment thereof the expression cassette does not comprise an additional transit peptide in case in Table I, application no. 4, in column 6 in the same line as SEQ ID NO. 7941 is depicted, non-targeted is mentioned.

[32470] In an embodiment the present invention relates to an expresssion cassette comprising a) a promoter, preferably a promoter selected from the group consisting of Big35S, PCUbi, Super and USP, in particular p-Super; and b) the nucleic acid SEQ ID NO. 36937, or a homolog or fragment thereof, or a homolog thereof being depicted in Table I, application no. 4, column 8, in the same line as SEQ ID NO. 36937, preferably the coding region thereof, a homolog or a fragment thereof; which are operable linked.

[32471] In an embodiment thereof the expression cassette comprises in addition c) a nucleic acid molecule encoding a transit peptide, especially a plastidal transit petide in case in Table I, application no. 4, in column 6 in the same line as SEQ ID NO. 36937 is depicted, plastidic is mentioned, or a mitochondrial transit peptide in case in Table I, application no. 4, in column 6 in the same line as SEQ ID NO. 36937 is depicted, mitochondrial is mentioned; which is operable linked, too.

[32472] In another embodiment thereof the expression cassette does not comprise an additional transit peptide in case in Table I, application no. 4, in column 6 in the same line as SEQ ID NO. 36937 is depicted, non-targeted is mentioned.

[32473] In an embodiment the present invention relates to an expresssion cassette comprising a) a promoter, preferably a promoter selected from the group consisting of Big35S, PCUbi, Super and USP, in particular p-Super; and b) the nucleic acid SEQ ID NO. 77768, or a homolog or fragment thereof, or a homolog thereof being depicted in Table I, application no. 4, column 8, in the same line as SEQ ID NO. 77768, preferably the coding region thereof, a homolog or a fragment thereof; which are operable linked.

[32474] In an embodiment thereof the expression cassette comprises in addition c) a nucleic acid molecule encoding a transit peptide, especially a plastidal transit petide in case in Table I, application no. 4, in column 6 in the same line as SEQ ID NO. 77768 is depicted, plastidic is mentioned, or a mitochondrial transit peptide in case in Table I, application no. 4, in column 6 in the same line as SEQ ID NO. 77768 is depicted, mitochondrial is mentioned; which is operable linked, too.

[32475] In another embodiment thereof the expression cassette does not comprise an additional transit peptide in case in Table I, application no. 4, in column 6 in the same line as SEQ ID NO. 77768 is depicted, non-targeted is mentioned.

[32476] In an embodiment the present invention relates to an expresssion cassette comprising a) a promoter, preferably a promoter selected from the group consisting of Big35S, PCUbi, Super and USP, in particular p-Super; and b) the nucleic acid SEQ ID NO. 38289, or a homolog or fragment thereof, or a homolog thereof being depicted in Table I, application no. 4, column 8, in the same line as SEQ ID NO. 38289, preferably the coding region thereof, a homolog or a fragment thereof; which are operable linked.

[32477] In an embodiment thereof the expression cassette comprises in addition c) a nucleic acid molecule encoding a transit peptide, especially a plastidal transit petide in case in Table I, application no. 4, in column 6 in the same line as SEQ ID NO. 38289 is depicted, plastidic is mentioned, or a mitochondrial transit peptide in case in Table I, application no. 4, in column 6 in the same line as SEQ ID NO. 38289 is depicted, mitochondrial is mentioned; which is operable linked, too.

[32478] In another embodiment thereof the expression cassette does not comprise an additional transit peptide in case in Table I, application no. 4, in column 6 in the same line as SEQ ID NO. 38289 is depicted, non-targeted is mentioned.

[32479] In an embodiment the present invention relates to an expresssion cassette comprising a) a promoter, preferably a promoter selected from the group consisting of Big35S, PCUbi, Super and USP, in particular p-USP; and b) the nucleic acid SEQ ID NO. 77774, or a homolog or fragment thereof, or a homolog thereof being depicted in Table I, application no. 4, column 8, in the same line as SEQ ID NO. 77774, preferably the coding region thereof, a homolog or a fragment thereof; which are operable linked.

[32480] In an embodiment thereof the expression cassette comprises in addition c) a nucleic acid molecule encoding a transit peptide, especially a plastidal transit petide in case in Table I, application no. 4, in column 6 in the same line as SEQ ID NO. 77774 is depicted, plastidic is mentioned, or a mitochondrial transit peptide in case in Table I, application no. 4, in column 6 in the same line as SEQ ID NO. 77774 is depicted, mitochondrial is mentioned; which is operable linked, too.

[32481] In another embodiment thereof the expression cassette does not comprise an additional transit peptide in case in Table I, application no. 4, in column 6 in the same line as SEQ ID NO. 77774 is depicted, non-targeted is mentioned.

[32482] In an embodiment the present invention relates to an expresssion cassette comprising a) a promoter, preferably a promoter selected from the group consisting of Big35S, PCUbi, Super and USP, in particular p-Super; and b) the nucleic acid SEQ ID NO. 7947, or a homolog or fragment thereof, or a homolog thereof being depicted in Table I, application no. 4, column 8, in the same line as SEQ ID NO. 7947, preferably the coding region thereof, a homolog or a fragment thereof; which are operable linked.

[32483] In an embodiment thereof the expression cassette comprises in addition c) a nucleic acid molecule encoding a transit peptide, especially a plastidal transit petide in case in Table I, application no. 4, in column 6 in the same line as SEQ ID NO. 7947 is depicted, plastidic is mentioned, or a mitochondrial transit peptide in case in Table I, application no. 4, in column 6 in the same line as SEQ ID NO. 7947 is depicted, mitochondrial is mentioned; which is operable linked, too.

[32484] In another embodiment thereof the expression cassette does not comprise an additional transit peptide in case in Table I, application no. 4, in column 6 in the same line as SEQ ID NO. 7947 is depicted, non-targeted is mentioned.

[32485] In an embodiment the present invention relates to an expresssion cassette comprising a) a promoter, preferably a promoter selected from the group consisting of Big35S, PCUbi, Super and USP, in particular p-Super; and b) the nucleic acid SEQ ID NO. 78753, or a homolog or fragment thereof, or a homolog thereof being depicted in Table I, application no. 4, column 8, in the same line as SEQ ID NO. 78753, preferably the coding region thereof, a homolog or a fragment thereof; which are operable linked.

[32486] In an embodiment thereof the expression cassette comprises in addition c) a nucleic acid molecule encoding a transit peptide, especially a plastidal transit petide in case in Table I, application no. 4, in column 6 in the same line as SEQ ID NO. 78753 is depicted, plastidic is mentioned, or a mitochondrial transit peptide in case in Table I, application no. 4, in column 6 in the same line as SEQ ID NO. 78753 is depicted, mitochondrial is mentioned; which is operable linked, too.

[32487] In another embodiment thereof the expression cassette does not comprise an additional transit peptide in case in Table I, application no. 4, in column 6 in the same line as SEQ ID NO. 78753 is depicted, non-targeted is mentioned.

[32488] In an embodiment the present invention relates to an expresssion cassette comprising a) a promoter, preferably a promoter selected from the group consisting of Big35S, PCUbi, Super and USP, in particular p-USP; and b) the nucleic acid SEQ ID NO. 8363, or a homolog or fragment thereof, or a homolog thereof being depicted in Table I, application no. 4, column 8, in the same line as SEQ ID NO. 8363, preferably the coding region thereof, a homolog or a fragment thereof; which are operable linked.

[32489] In an embodiment thereof the expression cassette comprises in addition c) a nucleic acid molecule encoding a transit peptide, especially a plastidal transit petide in case in Table I, application no. 4, in column 6 in the same line as SEQ ID NO. 8363 is depicted, plastidic is mentioned, or a mitochondrial transit peptide in case in Table I, application no. 4, in column 6 in the same line as SEQ ID NO. 8363 is depicted, mitochondrial is mentioned; which is operable linked, too.

[32490] In another embodiment thereof the expression cassette does not comprise an additional transit peptide in case in Table I, application no. 4, in column 6 in the same line as SEQ ID NO. 8363 is depicted, non-targeted is mentioned.

[32491] In an embodiment the present invention relates to an expresssion cassette comprising a) a promoter, preferably a promoter selected from the group consisting of Big35S, PCUbi, Super and USP, in particular p-Super; and b) the nucleic acid SEQ ID NO. 79181, or a homolog or fragment thereof, or a homolog thereof being depicted in Table I, application no. 4, column 8, in the same line as SEQ ID NO. 79181, preferably the coding region thereof, a homolog or a fragment thereof; which are operable linked.

[32492] In an embodiment thereof the expression cassette comprises in addition c) a nucleic acid molecule encoding a transit peptide, especially a plastidal transit petide in case in Table I, application no. 4, in column 6 in the same line as SEQ ID NO. 79181 is depicted, plastidic is mentioned, or a mitochondrial transit peptide in case in Table I, application no. 4, in column 6 in the same line as SEQ ID NO. 79181 is depicted, mitochondrial is mentioned; which is operable linked, too.

[32493] In another embodiment thereof the expression cassette does not comprise an additional transit peptide in case in Table I, application no. 4, in column 6 in the same line as SEQ ID NO. 79181 is depicted, non-targeted is mentioned.

[32494] In an embodiment the present invention relates to an expresssion cassette comprising a) a promoter, preferably a promoter selected from the group consisting of Big35S, PCUbi, Super and USP, in particular p-Super; and b) the nucleic acid SEQ ID NO. 38947, or a homolog or fragment thereof, or a homolog thereof being depicted in Table I, application no. 4, column 8, in the same line as SEQ ID NO. 38947, preferably the coding region thereof, a homolog or a fragment thereof; which are operable linked.

[32495] In an embodiment thereof the expression cassette comprises in addition c) a nucleic acid molecule encoding a transit peptide, especially a plastidal transit petide in case in Table I, application no. 4, in column 6 in the same line as SEQ ID NO. 38947 is depicted, plastidic is mentioned, or a mitochondrial transit peptide in case in Table I, application no. 4, in column 6 in the same line as SEQ ID NO. 38947 is depicted, mitochondrial is mentioned; which is operable linked, too.

[32496] In another embodiment thereof the expression cassette does not comprise an additional transit peptide in case in Table I, application no. 4, in column 6 in the same line as SEQ ID NO. 38947 is depicted, non-targeted is mentioned.

[32497] In an embodiment the present invention relates to an expresssion cassette comprising a) a promoter, preferably a promoter selected from the group consisting of Big35S, PCUbi, Super and USP, in particular p-Super; and b) the nucleic acid SEQ ID NO. 39219, or a homolog or fragment thereof, or a homolog thereof being depicted in Table I, application no. 4, column 8, in the same line as SEQ ID NO. 39219, preferably the coding region thereof, a homolog or a fragment thereof; which are operable linked.

[32498] In an embodiment thereof the expression cassette comprises in addition c) a nucleic acid molecule encoding a transit peptide, especially a plastidal transit petide in case in Table I, application no. 4, in column 6 in the same line as SEQ ID NO. 39219 is depicted, plastidic is mentioned, or a mitochondrial transit peptide in case in Table I, application no. 4, in column 6 in the same line as SEQ ID NO. 39219 is depicted, mitochondrial is mentioned; which is operable linked, too.

[32499] In another embodiment thereof the expression cassette does not comprise an additional transit peptide in case in Table I, application no. 4, in column 6 in the same line as SEQ ID NO. 39219 is depicted, non-targeted is mentioned.

[32500] In an embodiment the present invention relates to an expresssion cassette comprising a) a promoter, preferably a promoter selected from the group consisting of Big35S, PCUbi, Super and USP, in particular p-Super; and b) the nucleic acid SEQ ID NO. 79342, or a homolog or fragment thereof, or a homolog thereof being depicted in Table I, application no. 4, column 8, in the same line as SEQ ID NO. 79342, preferably the coding region thereof, a homolog or a fragment thereof; which are operable linked.

[32501] In an embodiment thereof the expression cassette comprises in addition c) a nucleic acid molecule encoding a transit peptide, especially a plastidal transit petide in case in Table I, application no. 4, in column 6 in the same line as SEQ ID NO. 79342 is depicted, plastidic is mentioned, or a mitochondrial transit peptide in case in Table I, application no. 4, in column 6 in the same line as SEQ ID NO. 79342 is depicted, mitochondrial is mentioned; which is operable linked, too.

[32502] In another embodiment thereof the expression cassette does not comprise an additional transit peptide in case in Table I, application no. 4, in column 6 in the same line as SEQ ID NO. 79342 is depicted, non-targeted is mentioned.

[32503] In an embodiment the present invention relates to an expresssion cassette comprising a) a promoter, preferably a promoter selected from the group consisting of Big35S, PCUbi, Super and USP, in particular p-Super; and b) the nucleic acid SEQ ID NO. 39237, or a homolog or fragment thereof, or a homolog thereof being depicted in Table I, application no. 4, column 8, in the same line as SEQ ID NO. 39237, preferably the coding region thereof, a homolog or a fragment thereof; which are operable linked.

[32504] In an embodiment thereof the expression cassette comprises in addition c) a nucleic acid molecule encoding a transit peptide, especially a plastidal transit petide in case in Table I, application no. 4, in column 6 in the same line as SEQ ID NO. 39237 is depicted, plastidic is mentioned, or a mitochondrial transit peptide in case in Table I, application no. 4, in column 6 in the same line as SEQ ID NO. 39237 is depicted, mitochondrial is mentioned; which is operable linked, too.

[32505] In another embodiment thereof the expression cassette does not comprise an additional transit peptide in case in Table I, application no. 4, in column 6 in the same line as SEQ ID NO. 39237 is depicted, non-targeted is mentioned.

[32506] In an embodiment the present invention relates to an expresssion cassette comprising a) a promoter, preferably a promoter selected from the group consisting of Big35S, PCUbi, Super and USP, in particular p-Super; and b) the nucleic acid SEQ ID NO. 39255, or a homolog or fragment thereof, or a homolog thereof being depicted in Table I, application no. 4, column 8, in the same line as SEQ ID NO. 39255, preferably the coding region thereof, a homolog or a fragment thereof; which are operable linked.

[32507] In an embodiment thereof the expression cassette comprises in addition c) a nucleic acid molecule encoding a transit peptide, especially a plastidal transit petide in case in Table I, application no. 4, in column 6 in the same line as SEQ ID NO. 39255 is depicted, plastidic is mentioned, or a mitochondrial transit peptide in case in Table I, application no. 4, in column 6 in the same line as SEQ ID NO. 39255 is depicted, mitochondrial is mentioned; which is operable linked, too.

[32508] In another embodiment thereof the expression cassette does not comprise an additional transit peptide in case in Table I, application no. 4, in column 6 in the same line as SEQ ID NO. 39255 is depicted, non-targeted is mentioned.

[32509] In an embodiment the present invention relates to an expresssion cassette comprising a) a promoter, preferably a promoter selected from the group consisting of Big35S, PCUbi, Super and USP, in particular p-Super; and b) the nucleic acid SEQ ID NO. 9167, or a homolog or fragment thereof, or a homolog thereof being depicted in Table I, application no. 4, column 8, in the same line as SEQ ID NO. 9167, preferably the coding region thereof, a homolog or a fragment thereof; which are operable linked.

[32510] In an embodiment thereof the expression cassette comprises in addition c) a nucleic acid molecule encoding a transit peptide, especially a plastidal transit petide in case in Table I, application no. 4, in column 6 in the same line as SEQ ID NO. 9167 is depicted, plastidic is mentioned, or a mitochondrial transit peptide in case in Table I, application no. 4, in column 6 in the same line as SEQ ID NO. 9167 is depicted, mitochondrial is mentioned; which is operable linked, too.

[32511] In another embodiment thereof the expression cassette does not comprise an additional transit peptide in case in Table I, application no. 4, in column 6 in the same line as SEQ ID NO. 9167 is depicted, non-targeted is mentioned.

[32512] In an embodiment the present invention relates to an expresssion cassette comprising a) a promoter, preferably a promoter selected from the group consisting of Big35S, PCUbi, Super and USP, in particular p-Super; and b) the nucleic acid SEQ ID NO. 40665, or a homolog or fragment thereof, or a homolog thereof being depicted in Table I, application no. 4, column 8, in the same line as SEQ ID NO. 40665, preferably the coding region thereof, a homolog or a fragment thereof; which are operable linked.

[32513] In an embodiment thereof the expression cassette comprises in addition c) a nucleic acid molecule encoding a transit peptide, especially a plastidal transit petide in case in Table I, application no. 4, in column 6 in the same line as SEQ ID NO. 40665 is depicted, plastidic is mentioned, or a mitochondrial transit peptide in case in Table I, application no. 4, in column 6 in the same line as SEQ ID NO. 40665 is depicted, mitochondrial is mentioned; which is operable linked, too.

[32514] In another embodiment thereof the expression cassette does not comprise an additional transit peptide in case in Table I, application no. 4, in column 6 in the same line as SEQ ID NO. 40665 is depicted, non-targeted is mentioned.

[32515] In an embodiment the present invention relates to an expresssion cassette comprising a) a promoter, preferably a promoter selected from the group consisting of Big35S, PCUbi, Super and USP, in particular p-Super; and b) the nucleic acid SEQ ID NO. 80756, or a homolog or fragment thereof, or a homolog thereof being depicted in Table I, application no. 4, column 8, in the same line as SEQ ID NO. 80756, preferably the coding region thereof, a homolog or a fragment thereof; which are operable linked.

[32516] In an embodiment thereof the expression cassette comprises in addition c) a nucleic acid molecule encoding a transit peptide, especially a plastidal transit petide in case in Table I, application no. 4, in column 6 in the same line as SEQ ID NO. 80756 is depicted, plastidic is mentioned, or a mitochondrial transit peptide in case in Table I, application no. 4, in column 6 in the same line as SEQ ID NO. 80756 is depicted, mitochondrial is mentioned; which is operable linked, too.

[32517] In another embodiment thereof the expression cassette does not comprise an additional transit peptide in case in Table I, application no. 4, in column 6 in the same line as SEQ ID NO. 80756 is depicted, non-targeted is mentioned.

[32518] In an embodiment the present invention relates to an expresssion cassette comprising a) a promoter, preferably a promoter selected from the group consisting of Big35S, PCUbi, Super and USP, in particular p-Super; and b) the nucleic acid SEQ ID NO. 40741, or a homolog or fragment thereof, or a homolog thereof being depicted in Table I, application no. 4, column 8, in the same line as SEQ ID NO. 40741, preferably the coding region thereof, a homolog or a fragment thereof; which are operable linked.

[32519] In an embodiment thereof the expression cassette comprises in addition c) a nucleic acid molecule encoding a transit peptide, especially a plastidal transit petide in case in Table I, application no. 4, in column 6 in the same line as SEQ ID NO. 40741 is depicted, plastidic is mentioned, or a mitochondrial transit peptide in case in Table I, application no. 4, in column 6 in the same line as SEQ ID NO. 40741 is depicted, mitochondrial is mentioned; which is operable linked, too.

[32520] In another embodiment thereof the expression cassette does not comprise an additional transit peptide in case in Table I, application no. 4, in column 6 in the same line as SEQ ID NO. 40741 is depicted, non-targeted is mentioned.

[32521] In an embodiment the present invention relates to an expresssion cassette comprising a) a promoter, preferably a promoter selected from the group consisting of Big35S, PCUbi, Super and USP, in particular p-Super; and b) the nucleic acid SEQ ID NO. 80906, or a homolog or fragment thereof, or a homolog thereof being depicted in Table I, application no. 4, column 8, in the same line as SEQ ID NO. 80906, preferably the coding region thereof, a homolog or a fragment thereof; which are operable linked.

[32522] In an embodiment thereof the expression cassette comprises in addition c) a nucleic acid molecule encoding a transit peptide, especially a plastidal transit petide in case in Table I, application no. 4, in column 6 in the same line as SEQ ID NO. 80906 is depicted, plastidic is mentioned, or a mitochondrial transit peptide in case in Table I, application no. 4, in column 6 in the same line as SEQ ID NO. 80906 is depicted, mitochondrial is mentioned; which is operable linked, too.

[32523] In another embodiment thereof the expression cassette does not comprise an additional transit peptide in case in Table I, application no. 4, in column 6 in the same line as SEQ ID NO. 80906 is depicted, non-targeted is mentioned.

[32524] In an embodiment the present invention relates to an expresssion cassette comprising a) a promoter, preferably a promoter selected from the group consisting of Big35S, PCUbi, Super and USP, in particular p-Super; and b) the nucleic acid SEQ ID NO. 81075, or a homolog or fragment thereof, or a homolog thereof being depicted in Table I, application no. 4, column 8, in the same line as SEQ ID NO. 81075, preferably the coding region thereof, a homolog or a fragment thereof; which are operable linked.

[32525] In an embodiment thereof the expression cassette comprises in addition c) a nucleic acid molecule encoding a transit peptide, especially a plastidal transit petide in case in Table I, application no. 4, in column 6 in the same line as SEQ ID NO. 81075 is depicted, plastidic is mentioned, or a mitochondrial transit peptide in case in Table I, application no. 4, in column 6 in the same line as SEQ ID NO. 81075 is depicted, mitochondrial is mentioned; which is operable linked, too.

[32526] In another embodiment thereof the expression cassette does not comprise an additional transit peptide in case in Table I, application no. 4, in column 6 in the same line as SEQ ID NO. 81075 is depicted, non-targeted is mentioned.

[32527] In an embodiment the present invention relates to an expresssion cassette comprising a) a promoter, preferably a promoter selected from the group consisting of Big35S, PCUbi, Super and USP, in particular p-Super; and b) the nucleic acid SEQ ID NO. 40795, or a homolog or fragment thereof, or a homolog thereof being depicted in Table I, application no. 4, column 8, in the same line as SEQ ID NO. 40795, preferably the coding region thereof, a homolog or a fragment thereof; which are operable linked.

[32528] In an embodiment thereof the expression cassette comprises in addition c) a nucleic acid molecule encoding a transit peptide, especially a plastidal transit petide in case in Table I, application no. 4, in column 6 in the same line as SEQ ID NO. 40795 is depicted, plastidic is mentioned, or a mitochondrial transit peptide in case in Table I, application no. 4, in column 6 in the same line as SEQ ID NO. 40795 is depicted, mitochondrial is mentioned; which is operable linked, too.

[32529] In another embodiment thereof the expression cassette does not comprise an additional transit peptide in case in Table I, application no. 4, in column 6 in the same line as SEQ ID NO. 40795 is depicted, non-targeted is mentioned.

[32530] In an embodiment the present invention relates to an expresssion cassette comprising a) a promoter, preferably a promoter selected from the group consisting of Big35S, PCUbi, Super and USP, in particular p-Super; and b) the nucleic acid SEQ ID NO. 40795, or a homolog or fragment thereof, or a homolog thereof being depicted in Table I, application no. 4, column 8, in the same line as SEQ ID NO. 40795, preferably the coding region thereof, a homolog or a fragment thereof; which are operable linked.

[32531] In an embodiment thereof the expression cassette comprises in addition c) a nucleic acid molecule encoding a transit peptide, especially a plastidal transit petide in case in Table I, application no. 4, in column 6 in the same line as SEQ ID NO. 40795 is depicted, plastidic is mentioned, or a mitochondrial transit peptide in case in Table I, application no. 4, in column 6 in the same line as SEQ ID NO. 40795 is depicted, mitochondrial is mentioned; which is operable linked, too.

[32532] In another embodiment thereof the expression cassette does not comprise an additional transit peptide in case in Table I, application no. 4, in column 6 in the same line as SEQ ID NO. 40795 is depicted, non-targeted is mentioned.

[32533] In an embodiment the present invention relates to an expresssion cassette comprising a) a promoter, preferably a promoter selected from the group consisting of Big35S, PCUbi, Super and USP, in particular p-USP; and b) the nucleic acid SEQ ID NO. 81988, or a homolog or fragment thereof, or a homolog thereof being depicted in Table I, application no. 4, column 8, in the same line as SEQ ID NO. 81988, preferably the coding region thereof, a homolog or a fragment thereof; which are operable linked.

[32534] In an embodiment thereof the expression cassette comprises in addition c) a nucleic acid molecule encoding a transit peptide, especially a plastidal transit petide in case in Table I, application no. 4, in column 6 in the same line as SEQ ID NO. 81988 is depicted, plastidic is mentioned, or a mitochondrial transit peptide in case in Table I, application no. 4, in column 6 in the same line as SEQ ID NO. 81988 is depicted, mitochondrial is mentioned; which is operable linked, too.

[32535] In another embodiment thereof the expression cassette does not comprise an additional transit peptide in case in Table I, application no. 4, in column 6 in the same line as SEQ ID NO. 81988 is depicted, non-targeted is mentioned.

[32536] In an embodiment the present invention relates to an expresssion cassette comprising a) a promoter, preferably a promoter selected from the group consisting of Big35S, PCUbi, Super and USP, in particular p-Super; and b) the nucleic acid SEQ ID NO. 41499, or a homolog or fragment thereof, or a homolog thereof being depicted in Table I, application no. 4, column 8, in the same line as SEQ ID NO. 41499, preferably the coding region thereof, a homolog or a fragment thereof; which are operable linked.

[32537] In an embodiment thereof the expression cassette comprises in addition c) a nucleic acid molecule encoding a transit peptide, especially a plastidal transit petide in case in Table I, application no. 4, in column 6 in the same line as SEQ ID NO. 41499 is depicted, plastidic is mentioned, or a mitochondrial transit peptide in case in Table I, application no. 4, in column 6 in the same line as SEQ ID NO. 41499 is depicted, mitochondrial is mentioned; which is operable linked, too.

[32538] In another embodiment thereof the expression cassette does not comprise an additional transit peptide in case in Table I, application no. 4, in column 6 in the same line as SEQ ID NO. 41499 is depicted, non-targeted is mentioned.

[32539] In an embodiment the present invention relates to an expresssion cassette comprising a) a promoter, preferably a promoter selected from the group consisting of Big35S, PCUbi, Super and USP, in particular p-Super; and b) the nucleic acid SEQ ID NO. 42046, or a homolog or fragment thereof, or a homolog thereof being depicted in Table I, application no. 4, column 8, in the same line as SEQ ID NO. 42046, preferably the coding region thereof, a homolog or a fragment thereof; which are operable linked.

[32540] In an embodiment thereof the expression cassette comprises in addition c) a nucleic acid molecule encoding a transit peptide, especially a plastidal transit petide in case in Table I, application no. 4, in column 6 in the same line as SEQ ID NO. 42046 is depicted, plastidic is mentioned, or a mitochondrial transit peptide in case in Table I, application no. 4, in column 6 in the same line as SEQ ID NO. 42046 is depicted, mitochondrial is mentioned; which is operable linked, too.

[32541] In another embodiment thereof the expression cassette does not comprise an additional transit peptide in case in Table I, application no. 4, in column 6 in the same line as SEQ ID NO. 42046 is depicted, non-targeted is mentioned.

[32542] In an embodiment the present invention relates to an expresssion cassette comprising a) a promoter, preferably a promoter selected from the group consisting of Big35S, PCUbi, Super and USP, in particular p-Super; and b) the nucleic acid SEQ ID NO. 82424, or a homolog or fragment thereof, or a homolog thereof being depicted in Table I, application no. 4, column 8, in the same line as SEQ ID NO. 82424, preferably the coding region thereof, a homolog or a fragment thereof; which are operable linked.

[32543] In an embodiment thereof the expression cassette comprises in addition c) a nucleic acid molecule encoding a transit peptide, especially a plastidal transit petide in case in Table I, application no. 4, in column 6 in the same line as SEQ ID NO. 82424 is depicted, plastidic is mentioned, or a mitochondrial transit peptide in case in Table I, application no. 4, in column 6 in the same line as SEQ ID NO. 82424 is depicted, mitochondrial is mentioned; which is operable linked, too.

[32544] In another embodiment thereof the expression cassette does not comprise an additional transit peptide in case in Table I, application no. 4, in column 6 in the same line as SEQ ID NO. 82424 is depicted, non-targeted is mentioned.

[32545] In an embodiment the present invention relates to an expresssion cassette comprising a) a promoter, preferably a promoter selected from the group consisting of Big35S, PCUbi, Super and USP, in particular p-Super; and b) the nucleic acid SEQ ID NO. 42502, or a homolog or fragment thereof, or a homolog thereof being depicted in Table I, application no. 4, column 8, in the same line as SEQ ID NO. 42502, preferably the coding region thereof, a homolog or a fragment thereof; which are operable linked.

[32546] In an embodiment thereof the expression cassette comprises in addition c) a nucleic acid molecule encoding a transit peptide, especially a plastidal transit petide in case in Table I, application no. 4, in column 6 in the same line as SEQ ID NO. 42502 is depicted, plastidic is mentioned, or a mitochondrial transit peptide in case in Table I, application no. 4, in column 6 in the same line as SEQ ID NO. 42502 is depicted, mitochondrial is mentioned; which is operable linked, too.

[32547] In another embodiment thereof the expression cassette does not comprise an additional transit peptide in case in Table I, application no. 4, in column 6 in the same line as SEQ ID NO. 42502 is depicted, non-targeted is mentioned.

[32548] In an embodiment the present invention relates to an expresssion cassette comprising a) a promoter, preferably a promoter selected from the group consisting of Big35S, PCUbi, Super and USP, in particular p-Super; and b) the nucleic acid SEQ ID NO. 94051, or a homolog or fragment thereof, or a homolog thereof being depicted in Table I, application no. 4, column 8, in the same line as SEQ ID NO. 94051, preferably the coding region thereof, a homolog or a fragment thereof; which are operable linked.

[32549] In an embodiment thereof the expression cassette comprises in addition c) a nucleic acid molecule encoding a transit peptide, especially a plastidal transit petide in case in Table I, application no. 4, in column 6 in the same line as SEQ ID NO. 94051 is depicted, plastidic is mentioned, or a mitochondrial transit peptide in case in Table I, application no. 4, in column 6 in the same line as SEQ ID NO. 94051 is depicted, mitochondrial is mentioned; which is operable linked, too.

[32550] In another embodiment thereof the expression cassette does not comprise an additional transit peptide in case in Table I, application no. 4, in column 6 in the same line as SEQ ID NO. 94051 is depicted, non-targeted is mentioned.

[32551] In an embodiment the present invention relates to an expresssion cassette comprising a) a promoter, preferably a promoter selected from the group consisting of Big35S, PCUbi, Super and USP, in particular p-Super; and b) the nucleic acid SEQ ID NO. 94380, or a homolog or fragment thereof, or a homolog thereof being depicted in Table I, application no. 4, column 8, in the same line as SEQ ID NO. 94380, preferably the coding region thereof, a homolog or a fragment thereof; which are operable linked.

[32552] In an embodiment thereof the expression cassette comprises in addition c) a nucleic acid molecule encoding a transit peptide, especially a plastidal transit petide in case in Table I, application no. 4, in column 6 in the same line as SEQ ID NO. 94380 is depicted, plastidic is mentioned, or a mitochondrial transit peptide in case in Table I, application no. 4, in column 6 in the same line as SEQ ID NO. 94380 is depicted, mitochondrial is mentioned; which is operable linked, too.

[32553] In another embodiment thereof the expression cassette does not comprise an additional transit peptide in case in Table I, application no. 4, in column 6 in the same line as SEQ ID NO. 94380 is depicted, non-targeted is mentioned.

[32554] In an embodiment the present invention relates to an expresssion cassette comprising a) a promoter, preferably a promoter selected from the group consisting of Big35S, PCUbi, Super and USP, in particular p-USP; and b) the nucleic acid SEQ ID NO. 10172, or a homolog or fragment thereof, or a homolog thereof being depicted in Table I, application no. 4, column 8, in the same line as SEQ ID NO. 10172, preferably the coding region thereof, a homolog or a fragment thereof; which are operable linked.

[32555] In an embodiment thereof the expression cassette comprises in addition c) a nucleic acid molecule encoding a transit peptide, especially a plastidal transit petide in case in Table I, application no. 4, in column 6 in the same line as SEQ ID NO. 10172 is depicted, plastidic is mentioned, or a mitochondrial transit peptide in case in Table I, application no. 4, in column 6 in the same line as SEQ ID NO. 10172 is depicted, mitochondrial is mentioned; which is operable linked, too.

[32556] In another embodiment thereof the expression cassette does not comprise an additional transit peptide in case in Table I, application no. 4, in column 6 in the same line as SEQ ID NO. 10172 is depicted, non-targeted is mentioned.

[32557] In an embodiment the present invention relates to an expresssion cassette comprising a) a promoter, preferably a promoter selected from the group consisting of Big35S, PCUbi, Super and USP, in particular p-Super; and b) the nucleic acid SEQ ID NO. 83429, or a homolog or fragment thereof, or a homolog thereof being depicted in Table I, application no. 4, column 8, in the same line as SEQ ID NO. 83429, preferably the coding region thereof, a homolog or a fragment thereof; which are operable linked.

[32558] In an embodiment thereof the expression cassette comprises in addition c) a nucleic acid molecule encoding a transit peptide, especially a plastidal transit petide in case in Table I, application no. 4, in column 6 in the same line as SEQ ID NO. 83429 is depicted, plastidic is mentioned, or a mitochondrial transit peptide in case in Table I, application no. 4, in column 6 in the same line as SEQ ID NO. 83429 is depicted, mitochondrial is mentioned; which is operable linked, too.

[32559] In another embodiment thereof the expression cassette does not comprise an additional transit peptide in case in Table I, application no. 4, in column 6 in the same line as SEQ ID NO. 83429 is depicted, non-targeted is mentioned.

[32560] In an embodiment the present invention relates to an expresssion cassette comprising a) a promoter, preferably a promoter selected from the group consisting of Big35S, PCUbi, Super and USP, in particular p-Super; and b) the nucleic acid SEQ ID NO. 43248, or a homolog or fragment thereof, or a homolog thereof being depicted in Table I, application no. 4, column 8, in the same line as SEQ ID NO. 43248, preferably the coding region thereof, a homolog or a fragment thereof; which are operable linked.

[32561] In an embodiment thereof the expression cassette comprises in addition c) a nucleic acid molecule encoding a transit peptide, especially a plastidal transit petide in case in Table I, application no. 4, in column 6 in the same line as SEQ ID NO. 43248 is depicted, plastidic is mentioned, or a mitochondrial transit peptide in case in Table I, application no. 4, in column 6 in the same line as SEQ ID NO. 43248 is depicted, mitochondrial is mentioned; which is operable linked, too.

[32562] In another embodiment thereof the expression cassette does not comprise an additional transit peptide in case in Table I, application no. 4, in column 6 in the same line as SEQ ID NO. 43248 is depicted, non-targeted is mentioned.

[32563] In an embodiment the present invention relates to an expresssion cassette comprising a) a promoter, preferably a promoter selected from the group consisting of Big35S, PCUbi, Super and USP, in particular p-USP; and b) the nucleic acid SEQ ID NO. 10252, or a homolog or fragment thereof, or a homolog thereof being depicted in Table I, application no. 4, column 8, in the same line as SEQ ID NO. 10252, preferably the coding region thereof, a homolog or a fragment thereof; which are operable linked.

[32564] In an embodiment thereof the expression cassette comprises in addition c) a nucleic acid molecule encoding a transit peptide, especially a plastidal transit petide in case in Table I, application no. 4, in column 6 in the same line as SEQ ID NO. 10252 is depicted, plastidic is mentioned, or a mitochondrial transit peptide in case in Table I, application no. 4, in column 6 in the same line as SEQ ID NO. 10252 is depicted, mitochondrial is mentioned; which is operable linked, too.

[32565] In another embodiment thereof the expression cassette does not comprise an additional transit peptide in case in Table I, application no. 4, in column 6 in the same line as SEQ ID NO. 10252 is depicted, non-targeted is mentioned.

[32566] In an embodiment the present invention relates to an expresssion cassette comprising a) a promoter, preferably a promoter selected from the group consisting of Big35S, PCUbi, Super and USP, in particular p-USP; and b) the nucleic acid SEQ ID NO. 94386, or a homolog or fragment thereof, or a homolog thereof being depicted in Table I, application no. 4, column 8, in the same line as SEQ ID NO. 94386, preferably the coding region thereof, a homolog or a fragment thereof; which are operable linked.

[32567] In an embodiment thereof the expression cassette comprises in addition c) a nucleic acid molecule encoding a transit peptide, especially a plastidal transit petide in case in Table I, application no. 4, in column 6 in the same line as SEQ ID NO. 94386 is depicted, plastidic is mentioned, or a mitochondrial transit peptide in case in Table I, application no. 4, in column 6 in the same line as SEQ ID NO. 94386 is depicted, mitochondrial is mentioned; which is operable linked, too.

[32568] In another embodiment thereof the expression cassette does not comprise an additional transit peptide in case in Table I, application no. 4, in column 6 in the same line as SEQ ID NO. 94386 is depicted, non-targeted is mentioned.

[32569] In an embodiment the present invention relates to an expresssion cassette comprising a) a promoter, preferably a promoter selected from the group consisting of Big35S, PCUbi, Super and USP, in particular p-Super; and b) the nucleic acid SEQ ID NO. 43800, or a homolog or fragment thereof, or a homolog thereof being depicted in Table I, application no. 4, column 8, in the same line as SEQ ID NO. 43800, preferably the coding region thereof, a homolog or a fragment thereof; which are operable linked.

[32570] In an embodiment thereof the expression cassette comprises in addition c) a nucleic acid molecule encoding a transit peptide, especially a plastidal transit petide in case in Table I, application no. 4, in column 6 in the same line as SEQ ID NO. 43800 is depicted, plastidic is mentioned, or a mitochondrial transit peptide in case in Table I, application no. 4, in column 6 in the same line as SEQ ID NO. 43800 is depicted, mitochondrial is mentioned; which is operable linked, too.

[32571] In another embodiment thereof the expression cassette does not comprise an additional transit peptide in case in Table I, application no. 4, in column 6 in the same line as SEQ ID NO. 43800 is depicted, non-targeted is mentioned.

[32572] In an embodiment the present invention relates to an expresssion cassette comprising a) a promoter, preferably a promoter selected from the group consisting of Big35S, PCUbi, Super and USP, in particular p-USP; and b) the nucleic acid SEQ ID NO. 43839, or a homolog or fragment thereof, or a homolog thereof being depicted in Table I, application no. 4, column 8, in the same line as SEQ ID NO. 43839, preferably the coding region thereof, a homolog or a fragment thereof; which are operable linked.

[32573] In an embodiment thereof the expression cassette comprises in addition c) a nucleic acid molecule encoding a transit peptide, especially a plastidal transit petide in case in Table I, application no. 4, in column 6 in the same line as SEQ ID NO. 43839 is depicted, plastidic is mentioned, or a mitochondrial transit peptide in case in Table I, application no. 4, in column 6 in the same line as SEQ ID NO. 43839 is depicted, mitochondrial is mentioned; which is operable linked, too.

[32574] In another embodiment thereof the expression cassette does not comprise an additional transit peptide in case in Table I, application no. 4, in column 6 in the same line as SEQ ID NO. 43839 is depicted, non-targeted is mentioned.

[32575] In an embodiment the present invention relates to an expresssion cassette comprising a) a promoter, preferably a promoter selected from the group consisting of Big35S, PCUbi, Super and USP, in particular p-Super; and b) the nucleic acid SEQ ID NO. 83821, or a homolog or fragment thereof, or a homolog thereof being depicted in Table I, application no. 4, column 8, in the same line as SEQ ID NO. 83821, preferably the coding region thereof, a homolog or a fragment thereof; which are operable linked.

[32576] In an embodiment thereof the expression cassette comprises in addition c) a nucleic acid molecule encoding a transit peptide, especially a plastidal transit petide in case in Table I, application no. 4, in column 6 in the same line as SEQ ID NO. 83821 is depicted, plastidic is mentioned, or a mitochondrial transit peptide in case in Table I, application no. 4, in column 6 in the same line as SEQ ID NO. 83821 is depicted, mitochondrial is mentioned; which is operable linked, too.

[32577] In another embodiment thereof the expression cassette does not comprise an additional transit peptide in case in Table I, application no. 4, in column 6 in the same line as SEQ ID NO. 83821 is depicted, non-targeted is mentioned.

[32578] In an embodiment the present invention relates to an expresssion cassette comprising a) a promoter, preferably a promoter selected from the group consisting of Big35S, PCUbi, Super and USP, in particular p-Super; and b) the nucleic acid SEQ ID NO. 44372, or a homolog or fragment thereof, or a homolog thereof being depicted in Table I, application no. 4, column 8, in the same line as SEQ ID NO. 44372, preferably the coding region thereof, a homolog or a fragment thereof; which are operable linked.

[32579] In an embodiment thereof the expression cassette comprises in addition c) a nucleic acid molecule encoding a transit peptide, especially a plastidal transit petide in case in Table I, application no. 4, in column 6 in the same line as SEQ ID NO. 44372 is depicted, plastidic is mentioned, or a mitochondrial transit peptide in case in Table I, application no. 4, in column 6 in the same line as SEQ ID NO. 44372 is depicted, mitochondrial is mentioned; which is operable linked, too.

[32580] In another embodiment thereof the expression cassette does not comprise an additional transit peptide in case in Table I, application no. 4, in column 6 in the same line as SEQ ID NO. 44372 is depicted, non-targeted is mentioned.

[32581] In an embodiment the present invention relates to an expresssion cassette comprising a) a promoter, preferably a promoter selected from the group consisting of Big35S, PCUbi, Super and USP, in particular p-USP; and b) the nucleic acid SEQ ID NO. 83835, or a homolog or fragment thereof, or a homolog thereof being depicted in Table I, application no. 4, column 8, in the same line as SEQ ID NO. 83835, preferably the coding region thereof, a homolog or a fragment thereof; which are operable linked.

[32582] In an embodiment thereof the expression cassette comprises in addition c) a nucleic acid molecule encoding a transit peptide, especially a plastidal transit petide in case in Table I, application no. 4, in column 6 in the same line as SEQ ID NO. 83835 is depicted, plastidic is mentioned, or a mitochondrial transit peptide in case in Table I, application no. 4, in column 6 in the same line as SEQ ID NO. 83835 is depicted, mitochondrial is mentioned; which is operable linked, too.

[32583] In another embodiment thereof the expression cassette does not comprise an additional transit peptide in case in Table I, application no. 4, in column 6 in the same line as SEQ ID NO. 83835 is depicted, non-targeted is mentioned.

[32584] In an embodiment the present invention relates to an expresssion cassette comprising a) a promoter, preferably a promoter selected from the group consisting of Big35S, PCUbi, Super and USP, in particular p-Super; and b) the nucleic acid SEQ ID NO. 10740, or a homolog or fragment thereof, or a homolog thereof being depicted in Table I, application no. 4, column 8, in the same line as SEQ ID NO. 10740, preferably the coding region thereof, a homolog or a fragment thereof; which are operable linked.

[32585] In an embodiment thereof the expression cassette comprises in addition c) a nucleic acid molecule encoding a transit peptide, especially a plastidal transit petide in case in Table I, application no. 4, in column 6 in the same line as SEQ ID NO. 10740 is depicted, plastidic is mentioned, or a mitochondrial transit peptide in case in Table I, application no. 4, in column 6 in the same line as SEQ ID NO. 10740 is depicted, mitochondrial is mentioned; which is operable linked, too.

[32586] In another embodiment thereof the expression cassette does not comprise an additional transit peptide in case in Table I, application no. 4, in column 6 in the same line as SEQ ID NO. 10740 is depicted, non-targeted is mentioned.

[32587] In an embodiment the present invention relates to an expresssion cassette comprising a) a promoter, preferably a promoter selected from the group consisting of Big35S, PCUbi, Super and USP, in particular p-Super; and b) the nucleic acid SEQ ID NO. 94542, or a homolog or fragment thereof, or a homolog thereof being depicted in Table I, application no. 4, column 8, in the same line as SEQ ID NO. 94542, preferably the coding region thereof, a homolog or a fragment thereof; which are operable linked.

[32588] In an embodiment thereof the expression cassette comprises in addition c) a nucleic acid molecule encoding a transit peptide, especially a plastidal transit petide in case in Table I, application no. 4, in column 6 in the same line as SEQ ID NO. 94542 is depicted, plastidic is mentioned, or a mitochondrial transit peptide in case in Table I, application no. 4, in column 6 in the same line as SEQ ID NO. 94542 is depicted, mitochondrial is mentioned; which is operable linked, too.

[32589] In another embodiment thereof the expression cassette does not comprise an additional transit peptide in case in Table I, application no. 4, in column 6 in the same line as SEQ ID NO. 94542 is depicted, non-targeted is mentioned.

[32590] In an embodiment the present invention relates to an expresssion cassette comprising a) a promoter, preferably a promoter selected from the group consisting of Big35S, PCUbi, Super and USP, in particular p-Super; and b) the nucleic acid SEQ ID NO. 94735, or a homolog or fragment thereof, or a homolog thereof being depicted in Table I, application no. 4, column 8, in the same line as SEQ ID NO. 94735, preferably the coding region thereof, a homolog or a fragment thereof; which are operable linked.

[32591] In an embodiment thereof the expression cassette comprises in addition c) a nucleic acid molecule encoding a transit peptide, especially a plastidal transit petide in case in Table I, application no. 4, in column 6 in the same line as SEQ ID NO. 94735 is depicted, plastidic is mentioned, or a mitochondrial transit peptide in case in Table I, application no. 4, in column 6 in the same line as SEQ ID NO. 94735 is depicted, mitochondrial is mentioned; which is operable linked, too.

[32592] In another embodiment thereof the expression cassette does not comprise an additional transit peptide in case in Table I, application no. 4, in column 6 in the same line as SEQ ID NO. 94735 is depicted, non-targeted is mentioned.

[32593] In an embodiment the present invention relates to an expresssion cassette comprising a) a promoter, preferably a promoter selected from the group consisting of Big35S, PCUbi, Super and USP, in particular p-Super; and b) the nucleic acid SEQ ID NO. 45321, or a homolog or fragment thereof, or a homolog thereof being depicted in Table I, application no. 4, column 8, in the same line as SEQ ID NO. 45321, preferably the coding region thereof, a homolog or a fragment thereof; which are operable linked.

[32594] In an embodiment thereof the expression cassette comprises in addition c) a nucleic acid molecule encoding a transit peptide, especially a plastidal transit petide in case in Table I, application no. 4, in column 6 in the same line as SEQ ID NO. 45321 is depicted, plastidic is mentioned, or a mitochondrial transit peptide in case in Table I, application no. 4, in column 6 in the same line as SEQ ID NO. 45321 is depicted, mitochondrial is mentioned; which is operable linked, too.

[32595] In another embodiment thereof the expression cassette does not comprise an additional transit peptide in case in Table I, application no. 4, in column 6 in the same line as SEQ ID NO. 45321 is depicted, non-targeted is mentioned.

[32596] In an embodiment the present invention relates to an expresssion cassette comprising a) a promoter, preferably a promoter selected from the group consisting of Big35S, PCUbi, Super and USP, in particular p-PcUBI; and b) the nucleic acid SEQ ID NO. 10811, or a homolog or fragment thereof, or a homolog thereof being depicted in Table I, application no. 4, column 8, in the same line as SEQ ID NO. 10811, preferably the coding region thereof, a homolog or a fragment thereof; which are operable linked.

[32597] In an embodiment thereof the expression cassette comprises in addition c) a nucleic acid molecule encoding a transit peptide, especially a plastidal transit petide in case in Table I, application no. 4, in column 6 in the same line as SEQ ID NO. 10811 is depicted, plastidic is mentioned, or a mitochondrial transit peptide in case in Table I, application no. 4, in column 6 in the same line as SEQ ID NO. 10811 is depicted, mitochondrial is mentioned; which is operable linked, too.

[32598] In another embodiment thereof the expression cassette does not comprise an additional transit peptide in case in Table I, application no. 4, in column 6 in the same line as SEQ ID NO. 10811 is depicted, non-targeted is mentioned.

[32599] In an embodiment the present invention relates to an expresssion cassette comprising a) a promoter, preferably a promoter selected from the group consisting of Big35S, PCUbi, Super and USP, in particular p-PcUBI; and b) the nucleic acid SEQ ID NO. 84198, or a homolog or fragment thereof, or a homolog thereof being depicted in Table I, application no. 4, column 8, in the same line as SEQ ID NO. 84198, preferably the coding region thereof, a homolog or a fragment thereof; which are operable linked.

[32600] In an embodiment thereof the expression cassette comprises in addition c) a nucleic acid molecule encoding a transit peptide, especially a plastidal transit petide in case in Table I, application no. 4, in column 6 in the same line as SEQ ID NO. 84198 is depicted, plastidic is mentioned, or a mitochondrial transit peptide in case in Table I, application no. 4, in column 6 in the same line as SEQ ID NO. 84198 is depicted, mitochondrial is mentioned; which is operable linked, too.

[32601] In another embodiment thereof the expression cassette does not comprise an additional transit peptide in case in Table I, application no. 4, in column 6 in the same line as SEQ ID NO. 84198 is depicted, non-targeted is mentioned.

[32602] In an embodiment the present invention relates to an expresssion cassette comprising a) a promoter, preferably a promoter selected from the group consisting of Big35S, PCUbi, Super and USP, in particular p-PcUBI; and b) the nucleic acid SEQ ID NO. 46850, or a homolog or fragment thereof, or a homolog thereof being depicted in Table I, application no. 4, column 8, in the same line as SEQ ID NO. 46850, preferably the coding region thereof, a homolog or a fragment thereof; which are operable linked.

[32603] In an embodiment thereof the expression cassette comprises in addition c) a nucleic acid molecule encoding a transit peptide, especially a plastidal transit petide in case in Table I, application no. 4, in column 6 in the same line as SEQ ID NO. 46850 is depicted, plastidic is mentioned, or a mitochondrial transit peptide in case in Table I, application no. 4, in column 6 in the same line as SEQ ID NO. 46850 is depicted, mitochondrial is mentioned; which is operable linked, too.

[32604] In another embodiment thereof the expression cassette does not comprise an additional transit peptide in case in Table I, application no. 4, in column 6 in the same line as SEQ ID NO. 46850 is depicted, non-targeted is mentioned.

[32605] In an embodiment the present invention relates to an expresssion cassette comprising a) a promoter, preferably a promoter selected from the group consisting of Big35S, PCUbi, Super and USP, in particular p-PcUBI; and b) the nucleic acid SEQ ID NO. 48138, or a homolog or fragment thereof, or a homolog thereof being depicted in Table I, application no. 4, column 8, in the same line as SEQ ID NO. 48138, preferably the coding region thereof, a homolog or a fragment thereof; which are operable linked.

[32606] In an embodiment thereof the expression cassette comprises in addition c) a nucleic acid molecule encoding a transit peptide, especially a plastidal transit petide in case in Table I, application no. 4, in column 6 in the same line as SEQ ID NO. 48138 is depicted, plastidic is mentioned, or a mitochondrial transit peptide in case in Table I, application no. 4, in column 6 in the same line as SEQ ID NO. 48138 is depicted, mitochondrial is mentioned; which is operable linked, too.

[32607] In another embodiment thereof the expression cassette does not comprise an additional transit peptide in case in Table I, application no. 4, in column 6 in the same line as SEQ ID NO. 48138 is depicted, non-targeted is mentioned.

[32608] In an embodiment the present invention relates to an expresssion cassette comprising a) a promoter, preferably a promoter selected from the group consisting of Big35S, PCUbi, Super and USP, in particular p-PcUBI; and b) the nucleic acid SEQ ID NO. 49828, or a homolog or fragment thereof, or a homolog thereof being depicted in Table I, application no. 4, column 8, in the same line as SEQ ID NO. 49828, preferably the coding region thereof, a homolog or a fragment thereof; which are operable linked.

[32609] In an embodiment thereof the expression cassette comprises in addition c) a nucleic acid molecule encoding a transit peptide, especially a plastidal transit petide in case in Table I, application no. 4, in column 6 in the same line as SEQ ID NO. 49828 is depicted, plastidic is mentioned, or a mitochondrial transit peptide in case in Table I, application no. 4, in column 6 in the same line as SEQ ID NO. 49828 is depicted, mitochondrial is mentioned; which is operable linked, too.

[32610] In another embodiment thereof the expression cassette does not comprise an additional transit peptide in case in Table I, application no. 4, in column 6 in the same line as SEQ ID NO. 49828 is depicted, non-targeted is mentioned.

[32611] In an embodiment the present invention relates to an expresssion cassette comprising a) a promoter, preferably a promoter selected from the group consisting of Big35S, PCUbi, Super and USP, in particular p-PcUBI; and b) the nucleic acid SEQ ID NO. 94741, or a homolog or fragment thereof, or a homolog thereof being depicted in Table I, application no. 4, column 8, in the same line as SEQ ID NO. 94741, preferably the coding region thereof, a homolog or a fragment thereof; which are operable linked.

[32612] In an embodiment thereof the expression cassette comprises in addition c) a nucleic acid molecule encoding a transit peptide, especially a plastidal transit petide in case in Table I, application no. 4, in column 6 in the same line as SEQ ID NO. 94741 is depicted, plastidic is mentioned, or a mitochondrial transit peptide in case in Table I, application no. 4, in column 6 in the same line as SEQ ID NO. 94741 is depicted, mitochondrial is mentioned; which is operable linked, too.

[32613] In another embodiment thereof the expression cassette does not comprise an additional transit peptide in case in Table I, application no. 4, in column 6 in the same line as SEQ ID NO. 94741 is depicted, non-targeted is mentioned.

[32614] In an embodiment the present invention relates to an expresssion cassette comprising a) a promoter, preferably a promoter selected from the group consisting of Big35S, PCUbi, Super and USP, in particular p-PcUBI; and b) the nucleic acid SEQ ID NO. 84869, or a homolog or fragment thereof, or a homolog thereof being depicted in Table I, application no. 4, column 8, in the same line as SEQ ID NO. 84869, preferably the coding region thereof, a homolog or a fragment thereof; which are operable linked.

[32615] In an embodiment thereof the expression cassette comprises in addition c) a nucleic acid molecule encoding a transit peptide, especially a plastidal transit petide in case in Table I, application no. 4, in column 6 in the same line as SEQ ID NO. 84869 is depicted, plastidic is mentioned, or a mitochondrial transit peptide in case in Table I, application no. 4, in column 6 in the same line as SEQ ID NO. 84869 is depicted, mitochondrial is mentioned; which is operable linked, too.

[32616] In another embodiment thereof the expression cassette does not comprise an additional transit peptide in case in Table I, application no. 4, in column 6 in the same line as SEQ ID NO. 84869 is depicted, non-targeted is mentioned.

[32617] In an embodiment the present invention relates to an expresssion cassette comprising a) a promoter, preferably a promoter selected from the group consisting of Big35S, PCUbi, Super and USP, in particular p-PcUBI; and b) the nucleic acid SEQ ID NO. 94942, or a homolog or fragment thereof, or a homolog thereof being depicted in Table I, application no. 4, column 8, in the same line as SEQ ID NO. 94942, preferably the coding region thereof, a homolog or a fragment thereof; which are operable linked.

[32618] In an embodiment thereof the expression cassette comprises in addition c) a nucleic acid molecule encoding a transit peptide, especially a plastidal transit petide in case in Table I, application no. 4, in column 6 in the same line as SEQ ID NO. 94942 is depicted, plastidic is mentioned, or a mitochondrial transit peptide in case in Table I, application no. 4, in column 6 in the same line as SEQ ID NO. 94942 is depicted, mitochondrial is mentioned; which is operable linked, too.

[32619] In another embodiment thereof the expression cassette does not comprise an additional transit peptide in case in Table I, application no. 4, in column 6 in the same line as SEQ ID NO. 94942 is depicted, non-targeted is mentioned.

[32620] In an embodiment the present invention relates to an expresssion cassette comprising a) a promoter, preferably a promoter selected from the group consisting of Big35S, PCUbi, Super and USP, in particular p-PcUBI; and b) the nucleic acid SEQ ID NO. 51198, or a homolog or fragment thereof, or a homolog thereof being depicted in Table I, application no. 4, column 8, in the same line as SEQ ID NO. 51198, preferably the coding region thereof, a homolog or a fragment thereof; which are operable linked.

[32621] In an embodiment thereof the expression cassette comprises in addition c) a nucleic acid molecule encoding a transit peptide, especially a plastidal transit petide in case in Table I, application no. 4, in column 6 in the same line as SEQ ID NO. 51198 is depicted, plastidic is mentioned, or a mitochondrial transit peptide in case in Table I, application no. 4, in column 6 in the same line as SEQ ID NO. 51198 is depicted, mitochondrial is mentioned; which is operable linked, too.

[32622] In another embodiment thereof the expression cassette does not comprise an additional transit peptide in case in Table I, application no. 4, in column 6 in the same line as SEQ ID NO. 51198 is depicted, non-targeted is mentioned.

[32623] In an embodiment the present invention relates to an expresssion cassette comprising a) a promoter, preferably a promoter selected from the group consisting of Big35S, PCUbi, Super and USP, in particular p-PcUBI; and b) the nucleic acid SEQ ID NO. 51268, or a homolog or fragment thereof, or a homolog thereof being depicted in Table I, application no. 4, column 8, in the same line as SEQ ID NO. 51268, preferably the coding region thereof, a homolog or a fragment thereof; which are operable linked.

[32624] In an embodiment thereof the expression cassette comprises in addition c) a nucleic acid molecule encoding a transit peptide, especially a plastidal transit petide in case in Table I, application no. 4, in column 6 in the same line as SEQ ID NO. 51268 is depicted, plastidic is mentioned, or a mitochondrial transit peptide in case in Table I, application no. 4, in column 6 in the same line as SEQ ID NO. 51268 is depicted, mitochondrial is mentioned; which is operable linked, too.

[32625] In another embodiment thereof the expression cassette does not comprise an additional transit peptide in case in Table I, application no. 4, in column 6 in the same line as SEQ ID NO. 51268 is depicted, non-targeted is mentioned.

[32626] In an embodiment the present invention relates to an expresssion cassette comprising a) a promoter, preferably a promoter selected from the group consisting of Big35S, PCUbi, Super and USP, in particular p-PcUBI; and b) the nucleic acid SEQ ID NO. 51632, or a homolog or fragment thereof, or a homolog thereof being depicted in Table I, application no. 4, column 8, in the same line as SEQ ID NO. 51632, preferably the coding region thereof, a homolog or a fragment thereof; which are operable linked.

[32627] In an embodiment thereof the expression cassette comprises in addition c) a nucleic acid molecule encoding a transit peptide, especially a plastidal transit petide in case in Table I, application no. 4, in column 6 in the same line as SEQ ID NO. 51632 is depicted, plastidic is mentioned, or a mitochondrial transit peptide in case in Table I, application no. 4, in column 6 in the same line as SEQ ID NO. 51632 is depicted, mitochondrial is mentioned; which is operable linked, too.

[32628] In another embodiment thereof the expression cassette does not comprise an additional transit peptide in case in Table I, application no. 4, in column 6 in the same line as SEQ ID NO. 51632 is depicted, non-targeted is mentioned.

[32629] In an embodiment the present invention relates to an expresssion cassette comprising a) a promoter, preferably a promoter selected from the group consisting of Big35S, PCUbi, Super and USP, in particular p-PcUBI; and b) the nucleic acid SEQ ID NO. 52364, or a homolog or fragment thereof, or a homolog thereof being depicted in Table I, application no. 4, column 8, in the same line as SEQ ID NO. 52364, preferably the coding region thereof, a homolog or a fragment thereof; which are operable linked.

[32630] In an embodiment thereof the expression cassette comprises in addition c) a nucleic acid molecule encoding a transit peptide, especially a plastidal transit petide in case in Table I, application no. 4, in column 6 in the same line as SEQ ID NO. 52364 is depicted, plastidic is mentioned, or a mitochondrial transit peptide in case in Table I, application no. 4, in column 6 in the same line as SEQ ID NO. 52364 is depicted, mitochondrial is mentioned; which is operable linked, too.

[32631] In another embodiment thereof the expression cassette does not comprise an additional transit peptide in case in Table I, application no. 4, in column 6 in the same line as SEQ ID NO. 52364 is depicted, non-targeted is mentioned.

[32632] In an embodiment the present invention relates to an expresssion cassette comprising a) a promoter, preferably a promoter selected from the group consisting of Big35S, PCUbi, Super and USP, in particular p-PcUBI; and b) the nucleic acid SEQ ID NO. 53456, or a homolog or fragment thereof, or a homolog thereof being depicted in Table I, application no. 4, column 8, in the same line as SEQ ID NO. 53456, preferably the coding region thereof, a homolog or a fragment thereof; which are operable linked.

[32633] In an embodiment thereof the expression cassette comprises in addition c) a nucleic acid molecule encoding a transit peptide, especially a plastidal transit petide in case in Table I, application no. 4, in column 6 in the same line as SEQ ID NO. 53456 is depicted, plastidic is mentioned, or a mitochondrial transit peptide in case in Table I, application no. 4, in column 6 in the same line as SEQ ID NO. 53456 is depicted, mitochondrial is mentioned; which is operable linked, too.

[32634] In another embodiment thereof the expression cassette does not comprise an additional transit peptide in case in Table I, application no. 4, in column 6 in the same line as SEQ ID NO. 53456 is depicted, non-targeted is mentioned.

[32635] In an embodiment the present invention relates to an expresssion cassette comprising a) a promoter, preferably a promoter selected from the group consisting of Big35S, PCUbi, Super and USP, in particular p-PcUBI; and b) the nucleic acid SEQ ID NO. 54337, or a homolog or fragment thereof, or a homolog thereof being depicted in Table I, application no. 4, column 8, in the same line as SEQ ID NO. 54337, preferably the coding region thereof, a homolog or a fragment thereof; which are operable linked.

[32636] In an embodiment thereof the expression cassette comprises in addition c) a nucleic acid molecule encoding a transit peptide, especially a plastidal transit petide in case in Table I, application no. 4, in column 6 in the same line as SEQ ID NO. 54337 is depicted, plastidic is mentioned, or a mitochondrial transit peptide in case in Table I, application no. 4, in column 6 in the same line as SEQ ID NO. 54337 is depicted, mitochondrial is mentioned; which is operable linked, too.

[32637] In another embodiment thereof the expression cassette does not comprise an additional transit peptide in case in Table I, application no. 4, in column 6 in the same line as SEQ ID NO. 54337 is depicted, non-targeted is mentioned.

[32638] In an embodiment the present invention relates to an expresssion cassette comprising a) a promoter, preferably a promoter selected from the group consisting of Big35S, PCUbi, Super and USP, in particular p-PcUBI; and b) the nucleic acid SEQ ID NO. 95047, or a homolog or fragment thereof, or a homolog thereof being depicted in Table I, application no. 4, column 8, in the same line as SEQ ID NO. 95047, preferably the coding region thereof, a homolog or a fragment thereof; which are operable linked.

[32639] In an embodiment thereof the expression cassette comprises in addition c) a nucleic acid molecule encoding a transit peptide, especially a plastidal transit petide in case in Table I, application no. 4, in column 6 in the same line as SEQ ID NO. 95047 is depicted, plastidic is mentioned, or a mitochondrial transit peptide in case in Table I, application no. 4, in column 6 in the same line as SEQ ID NO. 95047 is depicted, mitochondrial is mentioned; which is operable linked, too.

[32640] In another embodiment thereof the expression cassette does not comprise an additional transit peptide in case in Table I, application no. 4, in column 6 in the same line as SEQ ID NO. 95047 is depicted, non-targeted is mentioned.

[32641] In an embodiment the present invention relates to an expresssion cassette comprising a) a promoter, preferably a promoter selected from the group consisting of Big35S, PCUbi, Super and USP, in particular p-PcUBI; and b) the nucleic acid SEQ ID NO. 11423, or a homolog or fragment thereof, or a homolog thereof being depicted in Table I, application no. 4, column 8, in the same line as SEQ ID NO. 11423, preferably the coding region thereof, a homolog or a fragment thereof; which are operable linked.

[32642] In an embodiment thereof the expression cassette comprises in addition c) a nucleic acid molecule encoding a transit peptide, especially a plastidal transit petide in case in Table I, application no. 4, in column 6 in the same line as SEQ ID NO. 11423 is depicted, plastidic is mentioned, or a mitochondrial transit peptide in case in Table I, application no. 4, in column 6 in the same line as SEQ ID NO. 11423 is depicted, mitochondrial is mentioned; which is operable linked, too.

[32643] In another embodiment thereof the expression cassette does not comprise an additional transit peptide in case in Table I, application no. 4, in column 6 in the same line as SEQ ID NO. 11423 is depicted, non-targeted is mentioned.

[32644] In an embodiment the present invention relates to an expresssion cassette comprising a) a promoter, preferably a promoter selected from the group consisting of Big35S, PCUbi, Super and USP, in particular p-PcUBI; and b) the nucleic acid SEQ ID NO. 85743, or a homolog or fragment thereof, or a homolog thereof being depicted in Table I, application no. 4, column 8, in the same line as SEQ ID NO. 85743, preferably the coding region thereof, a homolog or a fragment thereof; which are operable linked.

[32645] In an embodiment thereof the expression cassette comprises in addition c) a nucleic acid molecule encoding a transit peptide, especially a plastidal transit petide in case in Table I, application no. 4, in column 6 in the same line as SEQ ID NO. 85743 is depicted, plastidic is mentioned, or a mitochondrial transit peptide in case in Table I, application no. 4, in column 6 in the same line as SEQ ID NO. 85743 is depicted, mitochondrial is mentioned; which is operable linked, too.

[32646] In another embodiment thereof the expression cassette does not comprise an additional transit peptide in case in Table I, application no. 4, in column 6 in the same line as SEQ ID NO. 85743 is depicted, non-targeted is mentioned.

[32647] In an embodiment the present invention relates to an expresssion cassette comprising a) a promoter, preferably a promoter selected from the group consisting of Big35S, PCUbi, Super and USP, in particular p-PcUBI; and b) the nucleic acid SEQ ID NO. 11471, or a homolog or fragment thereof, or a homolog thereof being depicted in Table I, application no. 4, column 8, in the same line as SEQ ID NO. 11471, preferably the coding region thereof, a homolog or a fragment thereof; which are operable linked.

[32648] In an embodiment thereof the expression cassette comprises in addition c) a nucleic acid molecule encoding a transit peptide, especially a plastidal transit petide in case in Table I, application no. 4, in column 6 in the same line as SEQ ID NO. 11471 is depicted, plastidic is mentioned, or a mitochondrial transit peptide in case in Table I, application no. 4, in column 6 in the same line as SEQ ID NO. 11471 is depicted, mitochondrial is mentioned; which is operable linked, too.

[32649] In another embodiment thereof the expression cassette does not comprise an additional transit peptide in case in Table I, application no. 4, in column 6 in the same line as SEQ ID NO. 11471 is depicted, non-targeted is mentioned.

[32650] In an embodiment the present invention relates to an expresssion cassette comprising a) a promoter, preferably a promoter selected from the group consisting of Big35S, PCUbi, Super and USP, in particular p-PcUBI; and b) the nucleic acid SEQ ID NO. 95527, or a homolog or fragment thereof, or a homolog thereof being depicted in Table I, application no. 4, column 8, in the same line as SEQ ID NO. 95527, preferably the coding region thereof, a homolog or a fragment thereof; which are operable linked.

[32651] In an embodiment thereof the expression cassette comprises in addition c) a nucleic acid molecule encoding a transit peptide, especially a plastidal transit petide in case in Table I, application no. 4, in column 6 in the same line as SEQ ID NO. 95527 is depicted, plastidic is mentioned, or a mitochondrial transit peptide in case in Table I, application no. 4, in column 6 in the same line as SEQ ID NO. 95527 is depicted, mitochondrial is mentioned; which is operable linked, too.

[32652] In another embodiment thereof the expression cassette does not comprise an additional transit peptide in case in Table I, application no. 4, in column 6 in the same line as SEQ ID NO. 95527 is depicted, non-targeted is mentioned.

[32653] In an embodiment the present invention relates to an expresssion cassette comprising a) a promoter, preferably a promoter selected from the group consisting of Big35S, PCUbi, Super and USP, in particular p-PcUBI; and b) the nucleic acid SEQ ID NO. 95744, or a homolog or fragment thereof, or a homolog thereof being depicted in Table I, application no. 4, column 8, in the same line as SEQ ID NO. 95744, preferably the coding region thereof, a homolog or a fragment thereof; which are operable linked.

[32654] In an embodiment thereof the expression cassette comprises in addition c) a nucleic acid molecule encoding a transit peptide, especially a plastidal transit petide in case in Table I, application no. 4, in column 6 in the same line as SEQ ID NO. 95744 is depicted, plastidic is mentioned, or a mitochondrial transit peptide in case in Table I, application no. 4, in column 6 in the same line as SEQ ID NO. 95744 is depicted, mitochondrial is mentioned; which is operable linked, too.

[32655] In another embodiment thereof the expression cassette does not comprise an additional transit peptide in case in Table I, application no. 4, in column 6 in the same line as SEQ ID NO. 95744 is depicted, non-targeted is mentioned.

[32656] In an embodiment the present invention relates to an expresssion cassette comprising a) a promoter, preferably a promoter selected from the group consisting of Big35S, PCUbi, Super and USP, in particular p-PcUBI; and b) the nucleic acid SEQ ID NO. 56153, or a homolog or fragment thereof, or a homolog thereof being depicted in Table I, application no. 4, column 8, in the same line as SEQ ID NO. 56153, preferably the coding region thereof, a homolog or a fragment thereof; which are operable linked.

[32657] In an embodiment thereof the expression cassette comprises in addition c) a nucleic acid molecule encoding a transit peptide, especially a plastidal transit petide in case in Table I, application no. 4, in column 6 in the same line as SEQ ID NO. 56153 is depicted, plastidic is mentioned, or a mitochondrial transit peptide in case in Table I, application no. 4, in column 6 in the same line as SEQ ID NO. 56153 is depicted, mitochondrial is mentioned; which is operable linked, too.

[32658] In another embodiment thereof the expression cassette does not comprise an additional transit peptide in case in Table I, application no. 4, in column 6 in the same line as SEQ ID NO. 56153 is depicted, non-targeted is mentioned.

[32659] In an embodiment the present invention relates to an expresssion cassette comprising a) a promoter, preferably a promoter selected from the group consisting of Big35S, PCUbi, Super and USP, in particular p-PcUBI; and b) the nucleic acid SEQ ID NO. 95857, or a homolog or fragment thereof, or a homolog thereof being depicted in Table I, application no. 4, column 8, in the same line as SEQ ID NO. 95857, preferably the coding region thereof, a homolog or a fragment thereof; which are operable linked.

[32660] In an embodiment thereof the expression cassette comprises in addition c) a nucleic acid molecule encoding a transit peptide, especially a plastidal transit petide in case in Table I, application no. 4, in column 6 in the same line as SEQ ID NO. 95857 is depicted, plastidic is mentioned, or a mitochondrial transit peptide in case in Table I, application no. 4, in column 6 in the same line as SEQ ID NO. 95857 is depicted, mitochondrial is mentioned; which is operable linked, too.

[32661] In another embodiment thereof the expression cassette does not comprise an additional transit peptide in case in Table I, application no. 4, in column 6 in the same line as SEQ ID NO. 95857 is depicted, non-targeted is mentioned.

[32662] In an embodiment the present invention relates to an expresssion cassette comprising a) a promoter, preferably a promoter selected from the group consisting of Big35S, PCUbi, Super and USP, in particular p-PcUBI; and b) the nucleic acid SEQ ID NO. 57235, or a homolog or fragment thereof, or a homolog thereof being depicted in Table I, application no. 4, column 8, in the same line as SEQ ID NO. 57235, preferably the coding region thereof, a homolog or a fragment thereof; which are operable linked.

[32663] In an embodiment thereof the expression cassette comprises in addition c) a nucleic acid molecule encoding a transit peptide, especially a plastidal transit petide in case in Table I, application no. 4, in column 6 in the same line as SEQ ID NO. 57235 is depicted, plastidic is mentioned, or a mitochondrial transit peptide in case in Table I, application no. 4, in column 6 in the same line as SEQ ID NO. 57235 is depicted, mitochondrial is mentioned; which is operable linked, too.

[32664] In another embodiment thereof the expression cassette does not comprise an additional transit peptide in case in Table I, application no. 4, in column 6 in the same line as SEQ ID NO. 57235 is depicted, non-targeted is mentioned.

[32665] In an embodiment the present invention relates to an expresssion cassette comprising a) a promoter, preferably a promoter selected from the group consisting of Big35S, PCUbi, Super and USP, in particular p-PcUBI; and b) the nucleic acid SEQ ID NO. 87610, or a homolog or fragment thereof, or a homolog thereof being depicted in Table I, application no. 4, column 8, in the same line as SEQ ID NO. 87610, preferably the coding region thereof, a homolog or a fragment thereof; which are operable linked.

[32666] In an embodiment thereof the expression cassette comprises in addition c) a nucleic acid molecule encoding a transit peptide, especially a plastidal transit petide in case in Table I, application no. 4, in column 6 in the same line as SEQ ID NO. 87610 is depicted, plastidic is mentioned, or a mitochondrial transit peptide in case in Table I, application no. 4, in column 6 in the same line as SEQ ID NO. 87610 is depicted, mitochondrial is mentioned; which is operable linked, too.

[32667] In another embodiment thereof the expression cassette does not comprise an additional transit peptide in case in Table I, application no. 4, in column 6 in the same line as SEQ ID NO. 87610 is depicted, non-targeted is mentioned.

[32668] In an embodiment the present invention relates to an expresssion cassette comprising a) a promoter, preferably a promoter selected from the group consisting of Big35S, PCUbi, Super and USP, in particular p-PcUBI; and b) the nucleic acid SEQ ID NO. 87853, or a homolog or fragment thereof, or a homolog thereof being depicted in Table I, application no. 4, column 8, in the same line as SEQ ID NO. 87853, preferably the coding region thereof, a homolog or a fragment thereof; which are operable linked.

[32669] In an embodiment thereof the expression cassette comprises in addition c) a nucleic acid molecule encoding a transit peptide, especially a plastidal transit petide in case in Table I, application no. 4, in column 6 in the same line as SEQ ID NO. 87853 is depicted, plastidic is mentioned, or a mitochondrial transit peptide in case in Table I, application no. 4, in column 6 in the same line as SEQ ID NO. 87853 is depicted, mitochondrial is mentioned; which is operable linked, too.

[32670] In another embodiment thereof the expression cassette does not comprise an additional transit peptide in case in Table I, application no. 4, in column 6 in the same line as SEQ ID NO. 87853 is depicted, non-targeted is mentioned.

[32671] In an embodiment the present invention relates to an expresssion cassette comprising a) a promoter, preferably a promoter selected from the group consisting of Big35S, PCUbi, Super and USP, in particular p-PcUBI; and b) the nucleic acid SEQ ID NO. 58731, or a homolog or fragment thereof, or a homolog thereof being depicted in Table I, application no. 4, column 8, in the same line as SEQ ID NO. 58731, preferably the coding region thereof, a homolog or a fragment thereof; which are operable linked.

[32672] In an embodiment thereof the expression cassette comprises in addition c) a nucleic acid molecule encoding a transit peptide, especially a plastidal transit petide in case in Table I, application no. 4, in column 6 in the same line as SEQ ID NO. 58731 is depicted, plastidic is mentioned, or a mitochondrial transit peptide in case in Table I, application no. 4, in column 6 in the same line as SEQ ID NO. 58731 is depicted, mitochondrial is mentioned; which is operable linked, too.

[32673] In another embodiment thereof the expression cassette does not comprise an additional transit peptide in case in Table I, application no. 4, in column 6 in the same line as SEQ ID NO. 58731 is depicted, non-targeted is mentioned.

[32674] In an embodiment the present invention relates to an expresssion cassette comprising a) a promoter, preferably a promoter selected from the group consisting of Big35S, PCUbi, Super and USP, in particular p-PcUBI; and b) the nucleic acid SEQ ID NO. 60301, or a homolog or fragment thereof, or a homolog thereof being depicted in Table I, application no. 4, column 8, in the same line as SEQ ID NO. 60301, preferably the coding region thereof, a homolog or a fragment thereof; which are operable linked.

[32675] In an embodiment thereof the expression cassette comprises in addition c) a nucleic acid molecule encoding a transit peptide, especially a plastidal transit petide in case in Table I, application no. 4, in column 6 in the same line as SEQ ID NO. 60301 is depicted, plastidic is mentioned, or a mitochondrial transit peptide in case in Table I, application no. 4, in column 6 in the same line as SEQ ID NO. 60301 is depicted, mitochondrial is mentioned; which is operable linked, too.

[32676] In another embodiment thereof the expression cassette does not comprise an additional transit peptide in case in Table I, application no. 4, in column 6 in the same line as SEQ ID NO. 60301 is depicted, non-targeted is mentioned.

[32677] In an embodiment the present invention relates to an expresssion cassette comprising a) a promoter, preferably a promoter selected from the group consisting of Big35S, PCUbi, Super and USP, in particular p-PcUBI; and b) the nucleic acid SEQ ID NO. 60859, or a homolog or fragment thereof, or a homolog thereof being depicted in Table I, application no. 4, column 8, in the same line as SEQ ID NO. 60859, preferably the coding region thereof, a homolog or a fragment thereof; which are operable linked.

[32678] In an embodiment thereof the expression cassette comprises in addition c) a nucleic acid molecule encoding a transit peptide, especially a plastidal transit petide in case in Table I, application no. 4, in column 6 in the same line as SEQ ID NO. 60859 is depicted, plastidic is mentioned, or a mitochondrial transit peptide in case in Table I, application no. 4, in column 6 in the same line as SEQ ID NO. 60859 is depicted, mitochondrial is mentioned; which is operable linked, too.

[32679] In another embodiment thereof the expression cassette does not comprise an additional transit peptide in case in Table I, application no. 4, in column 6 in the same line as SEQ ID NO. 60859 is depicted, non-targeted is mentioned.

[32680] In an embodiment the present invention relates to an expresssion cassette comprising a) a promoter, preferably a promoter selected from the group consisting of Big35S, PCUbi, Super and USP, in particular p-PcUBI; and b) the nucleic acid SEQ ID NO. 88875, or a homolog or fragment thereof, or a homolog thereof being depicted in Table I, application no. 4, column 8, in the same line as SEQ ID NO. 88875, preferably the coding region thereof, a homolog or a fragment thereof; which are operable linked.

[32681] In an embodiment thereof the expression cassette comprises in addition c) a nucleic acid molecule encoding a transit peptide, especially a plastidal transit petide in case in Table I, application no. 4, in column 6 in the same line as SEQ ID NO. 88875 is depicted, plastidic is mentioned, or a mitochondrial transit peptide in case in Table I, application no. 4, in column 6 in the same line as SEQ ID NO. 88875 is depicted, mitochondrial is mentioned; which is operable linked, too.

[32682] In another embodiment thereof the expression cassette does not comprise an additional transit peptide in case in Table I, application no. 4, in column 6 in the same line as SEQ ID NO. 88875 is depicted, non-targeted is mentioned.

[32683] In an embodiment the present invention relates to an expresssion cassette comprising a) a promoter, preferably a promoter selected from the group consisting of Big35S, PCUbi, Super and USP, in particular p-PcUBI; and b) the nucleic acid SEQ ID NO. 61553, or a homolog or fragment thereof, or a homolog thereof being depicted in Table I, application no. 4, column 8, in the same line as SEQ ID NO. 61553, preferably the coding region thereof, a homolog or a fragment thereof; which are operable linked.

[32684] In an embodiment thereof the expression cassette comprises in addition c) a nucleic acid molecule encoding a transit peptide, especially a plastidal transit petide in case in Table I, application no. 4, in column 6 in the same line as SEQ ID NO. 61553 is depicted, plastidic is mentioned, or a mitochondrial transit peptide in case in Table I, application no. 4, in column 6 in the same line as SEQ ID NO. 61553 is depicted, mitochondrial is mentioned; which is operable linked, too.

[32685] In another embodiment thereof the expression cassette does not comprise an additional transit peptide in case in Table I, application no. 4, in column 6 in the same line as SEQ ID NO. 61553 is depicted, non-targeted is mentioned.

[32686] In an embodiment the present invention relates to an expresssion cassette comprising a) a promoter, preferably a promoter selected from the group consisting of Big35S, PCUbi, Super and USP, in particular p-PcUBI; and b) the nucleic acid SEQ ID NO. 12974, or a homolog or fragment thereof, or a homolog thereof being depicted in Table I, application no. 4, column 8, in the same line as SEQ ID NO. 12974, preferably the coding region thereof, a homolog or a fragment thereof; which are operable linked.

[32687] In an embodiment thereof the expression cassette comprises in addition c) a nucleic acid molecule encoding a transit peptide, especially a plastidal transit petide in case in Table I, application no. 4, in column 6 in the same line as SEQ ID NO. 12974 is depicted, plastidic is mentioned, or a mitochondrial transit peptide in case in Table I, application no. 4, in column 6 in the same line as SEQ ID NO. 12974 is depicted, mitochondrial is mentioned; which is operable linked, too.

[32688] In another embodiment thereof the expression cassette does not comprise an additional transit peptide in case in Table I, application no. 4, in column 6 in the same line as SEQ ID NO. 12974 is depicted, non-targeted is mentioned.

[32689] In an embodiment the present invention relates to an expresssion cassette comprising a) a promoter, preferably a promoter selected from the group consisting of Big35S, PCUbi, Super and USP, in particular p-PcUBI; and b) the nucleic acid SEQ ID NO. 62244, or a homolog or fragment thereof, or a homolog thereof being depicted in Table I, application no. 4, column 8, in the same line as SEQ ID NO. 62244, preferably the coding region thereof, a homolog or a fragment thereof; which are operable linked.

[32690] In an embodiment thereof the expression cassette comprises in addition c) a nucleic acid molecule encoding a transit peptide, especially a plastidal transit petide in case in Table I, application no. 4, in column 6 in the same line as SEQ ID NO. 62244 is depicted, plastidic is mentioned, or a mitochondrial transit peptide in case in Table I, application no. 4, in column 6 in the same line as SEQ ID NO. 62244 is depicted, mitochondrial is mentioned; which is operable linked, too.

[32691] In another embodiment thereof the expression cassette does not comprise an additional transit peptide in case in Table I, application no. 4, in column 6 in the same line as SEQ ID NO. 62244 is depicted, non-targeted is mentioned.

[32692] In an embodiment the present invention relates to an expresssion cassette comprising a) a promoter, preferably a promoter selected from the group consisting of Big35S, PCUbi, Super and USP, in particular p-Super; and b) the nucleic acid SEQ ID NO. 96022, or a homolog or fragment thereof, or a homolog thereof being depicted in Table I, application no. 4, column 8, in the same line as SEQ ID NO. 96022, preferably the coding region thereof, a homolog or a fragment thereof; which are operable linked.

[32693] In an embodiment thereof the expression cassette comprises in addition c) a nucleic acid molecule encoding a transit peptide, especially a plastidal transit petide in case in Table I, application no. 4, in column 6 in the same line as SEQ ID NO. 96022 is depicted, plastidic is mentioned, or a mitochondrial transit peptide in case in Table I, application no. 4, in column 6 in the same line as SEQ ID NO. 96022 is depicted, mitochondrial is mentioned; which is operable linked, too.

[32694] In another embodiment thereof the expression cassette does not comprise an additional transit peptide in case in Table I, application no. 4, in column 6 in the same line as SEQ ID NO. 96022 is depicted, non-targeted is mentioned.

[32695] In an embodiment the present invention relates to an expresssion cassette comprising a) a promoter, preferably a promoter selected from the group consisting of Big35S, PCUbi, Super and USP, in particular Big35S; and b) the nucleic acid SEQ ID NO. 62524, or a homolog or fragment thereof, or a homolog thereof being depicted in Table I, application no. 4, column 8, in the same line as SEQ ID NO. 62524, preferably the coding region thereof, a homolog or a fragment thereof; which are operable linked.

[32696] In an embodiment thereof the expression cassette comprises in addition c) a nucleic acid molecule encoding a transit peptide, especially a plastidal transit petide in case in Table I, application no. 4, in column 6 in the same line as SEQ ID NO. 62524 is depicted, plastidic is mentioned, or a mitochondrial transit peptide in case in Table I, application no. 4, in column 6 in the same line as SEQ ID NO. 62524 is depicted, mitochondrial is mentioned; which is operable linked, too.

[32697] In another embodiment thereof the expression cassette does not comprise an additional transit peptide in case in Table I, application no. 4, in column 6 in the same line as SEQ ID NO. 62524 is depicted, non-targeted is mentioned.

[32698] In an embodiment the present invention relates to an expresssion cassette comprising a) a promoter, preferably a promoter selected from the group consisting of Big35S, PCUbi, Super and USP, in particular Big35S; and b) the nucleic acid SEQ ID NO. 62717, or a homolog or fragment thereof, or a homolog thereof being depicted in Table I, application no. 4, column 8, in the same line as SEQ ID NO. 62717, preferably the coding region thereof, a homolog or a fragment thereof; which are operable linked.

[32699] In an embodiment thereof the expression cassette comprises in addition c) a nucleic acid molecule encoding a transit peptide, especially a plastidal transit petide in case in Table I, application no. 4, in column 6 in the same line as SEQ ID NO. 62717 is depicted, plastidic is mentioned, or a mitochondrial transit peptide in case in Table I, application no. 4, in column 6 in the same line as SEQ ID NO. 62717 is depicted, mitochondrial is mentioned; which is operable linked, too.

[32700] In another embodiment thereof the expression cassette does not comprise an additional transit peptide in case in Table I, application no. 4, in column 6 in the same line as SEQ ID NO. 62717 is depicted, non-targeted is mentioned.

[32701] In an embodiment the present invention relates to an expresssion cassette comprising a) a promoter, preferably a promoter selected from the group consisting of Big35S, PCUbi, Super and USP, in particular p-Super; and b) the nucleic acid SEQ ID NO. 96779, or a homolog or fragment thereof, or a homolog thereof being depicted in Table I, application no. 4, column 8, in the same line as SEQ ID NO. 96779, preferably the coding region thereof, a homolog or a fragment thereof; which are operable linked.

[32702] In an embodiment thereof the expression cassette comprises in addition c) a nucleic acid molecule encoding a transit peptide, especially a plastidal transit petide in case in Table I, application no. 4, in column 6 in the same line as SEQ ID NO. 96779 is depicted, plastidic is mentioned, or a mitochondrial transit peptide in case in Table I, application no. 4, in column 6 in the same line as SEQ ID NO. 96779 is depicted, mitochondrial is mentioned; which is operable linked, too.

[32703] In another embodiment thereof the expression cassette does not comprise an additional transit peptide in case in Table I, application no. 4, in column 6 in the same line as SEQ ID NO. 96779 is depicted, non-targeted is mentioned.

[32704] In an embodiment the present invention relates to an expresssion cassette comprising a) a promoter, preferably a promoter selected from the group consisting of Big35S, PCUbi, Super and USP, in particular p-Super; and b) the nucleic acid SEQ ID NO. 96980, or a homolog or fragment thereof, or a homolog thereof being depicted in Table I, application no. 4, column 8, in the same line as SEQ ID NO. 96980, preferably the coding region thereof, a homolog or a fragment thereof; which are operable linked.

[32705] In an embodiment thereof the expression cassette comprises in addition c) a nucleic acid molecule encoding a transit peptide, especially a plastidal transit petide in case in Table I, application no. 4, in column 6 in the same line as SEQ ID NO. 96980 is depicted, plastidic is mentioned, or a mitochondrial transit peptide in case in Table I, application no. 4, in column 6 in the same line as SEQ ID NO. 96980 is depicted, mitochondrial is mentioned; which is operable linked, too.

[32706] In another embodiment thereof the expression cassette does not comprise an additional transit peptide in case in Table I, application no. 4, in column 6 in the same line as SEQ ID NO. 96980 is depicted, non-targeted is mentioned.

[32707] In an embodiment the present invention relates to an expresssion cassette comprising a) a promoter, preferably a promoter selected from the group consisting of Big35S, PCUbi, Super and USP, in particular p-PcUBI; and b) the nucleic acid SEQ ID NO. 63334, or a homolog or fragment thereof, or a homolog thereof being depicted in Table I, application no. 4, column 8, in the same line as SEQ ID NO. 63334, preferably the coding region thereof, a homolog or a fragment thereof; which are operable linked.

[32708] In an embodiment thereof the expression cassette comprises in addition c) a nucleic acid molecule encoding a transit peptide, especially a plastidal transit petide in case in Table I, application no. 4, in column 6 in the same line as SEQ ID NO. 63334 is depicted, plastidic is mentioned, or a mitochondrial transit peptide in case in Table I, application no. 4, in column 6 in the same line as SEQ ID NO. 63334 is depicted, mitochondrial is mentioned; which is operable linked, too.

[32709] In another embodiment thereof the expression cassette does not comprise an additional transit peptide in case in Table I, application no. 4, in column 6 in the same line as SEQ ID NO. 63334 is depicted, non-targeted is mentioned.

[32710] In an embodiment the present invention relates to an expresssion cassette comprising a) a promoter, preferably a promoter selected from the group consisting of Big35S, PCUbi, Super and USP, in particular p-Super; and b) the nucleic acid SEQ ID NO. 90103, or a homolog or fragment thereof, or a homolog thereof being depicted in Table I, application no. 4, column 8, in the same line as SEQ ID NO. 90103, preferably the coding region thereof, a homolog or a fragment thereof; which are operable linked.

[32711] In an embodiment thereof the expression cassette comprises in addition c) a nucleic acid molecule encoding a transit peptide, especially a plastidal transit petide in case in Table I, application no. 4, in column 6 in the same line as SEQ ID NO. 90103 is depicted, plastidic is mentioned, or a mitochondrial transit peptide in case in Table I, application no. 4, in column 6 in the same line as SEQ ID NO. 90103 is depicted, mitochondrial is mentioned; which is operable linked, too.

[32712] In another embodiment thereof the expression cassette does not comprise an additional transit peptide in case in Table I, application no. 4, in column 6 in the same line as SEQ ID NO. 90103 is depicted, non-targeted is mentioned.

[32713] In an embodiment the present invention relates to an expresssion cassette comprising a) a promoter, preferably a promoter selected from the group consisting of Big35S, PCUbi, Super and USP, in particular p-PcUBI; and b) the nucleic acid SEQ ID NO. 96986, or a homolog or fragment thereof, or a homolog thereof being depicted in Table I, application no. 4, column 8, in the same line as SEQ ID NO. 96986, preferably the coding region thereof, a homolog or a fragment thereof; which are operable linked.

[32714] In an embodiment thereof the expression cassette comprises in addition c) a nucleic acid molecule encoding a transit peptide, especially a plastidal transit petide in case in Table I, application no. 4, in column 6 in the same line as SEQ ID NO. 96986 is depicted, plastidic is mentioned, or a mitochondrial transit peptide in case in Table I, application no. 4, in column 6 in the same line as SEQ ID NO. 96986 is depicted, mitochondrial is mentioned; which is operable linked, too.

[32715] In another embodiment thereof the expression cassette does not comprise an additional transit peptide in case in Table I, application no. 4, in column 6 in the same line as SEQ ID NO. 96986 is depicted, non-targeted is mentioned.

[32716] In an embodiment the present invention relates to an expresssion cassette comprising a) a promoter, preferably a promoter selected from the group consisting of Big35S, PCUbi, Super and USP, in particular Big35S; and b) the nucleic acid SEQ ID NO. 97294, or a homolog or fragment thereof, or a homolog thereof being depicted in Table I, application no. 4, column 8, in the same line as SEQ ID NO. 97294, preferably the coding region thereof, a homolog or a fragment thereof; which are operable linked.

[32717] In an embodiment thereof the expression cassette comprises in addition c) a nucleic acid molecule encoding a transit peptide, especially a plastidal transit petide in case in Table I, application no. 4, in column 6 in the same line as SEQ ID NO. 97294 is depicted, plastidic is mentioned, or a mitochondrial transit peptide in case in Table I, application no. 4, in column 6 in the same line as SEQ ID NO. 97294 is depicted, mitochondrial is mentioned; which is operable linked, too.

[32718] In another embodiment thereof the expression cassette does not comprise an additional transit peptide in case in Table I, application no. 4, in column 6 in the same line as SEQ ID NO. 97294 is depicted, non-targeted is mentioned.

[32719] In an embodiment the present invention relates to an expresssion cassette comprising a) a promoter, preferably a promoter selected from the group consisting of Big355, PCUbi, Super and USP, in particular p-PcUBI; and b) the nucleic acid SEQ ID NO. 97298, or a homolog or fragment thereof, or a homolog thereof being depicted in Table I, application no. 4, column 8, in the same line as SEQ ID NO. 97298, preferably the coding region thereof, a homolog or a fragment thereof; which are operable linked.

[32720] In an embodiment thereof the expression cassette comprises in addition c) a nucleic acid molecule encoding a transit peptide, especially a plastidal transit petide in case in Table I, application no. 4, in column 6 in the same line as SEQ ID NO. 97298 is depicted, plastidic is mentioned, or a mitochondrial transit peptide in case in Table I, application no. 4, in column 6 in the same line as SEQ ID NO. 97298 is depicted, mitochondrial is mentioned; which is operable linked, too.

[32721] In another embodiment thereof the expression cassette does not comprise an additional transit peptide in case in Table I, application no. 4, in column 6 in the same line as SEQ ID NO. 97298 is depicted, non-targeted is mentioned.

[32722] In an embodiment the present invention relates to an expresssion cassette comprising a) a promoter, preferably a promoter selected from the group consisting of Big355, PCUbi, Super and USP, in particular p-Super; and b) the nucleic acid SEQ ID NO. 64148, or a homolog or fragment thereof, or a homolog thereof being depicted in Table I, application no. 4, column 8, in the same line as SEQ ID NO. 64148, preferably the coding region thereof, a homolog or a fragment thereof; which are operable linked.

[32723] In an embodiment thereof the expression cassette comprises in addition c) a nucleic acid molecule encoding a transit peptide, especially a plastidal transit petide in case in Table I, application no. 4, in column 6 in the same line as SEQ ID NO. 64148 is depicted, plastidic is mentioned, or a mitochondrial transit peptide in case in Table I, application no. 4, in column 6 in the same line as SEQ ID NO. 64148 is depicted, mitochondrial is mentioned; which is operable linked, too.

[32724] In another embodiment thereof the expression cassette does not comprise an additional transit peptide in case in Table I, application no. 4, in column 6 in the same line as SEQ ID NO. 64148 is depicted, non-targeted is mentioned.

[32725] In an embodiment the present invention relates to an expresssion cassette comprising a) a promoter, preferably a promoter selected from the group consisting of Big355, PCUbi, Super and USP, in particular Big355; and b) the nucleic acid SEQ ID NO. 64177, or a homolog or fragment thereof, or a homolog thereof being depicted in Table I, application no. 4, column 8, in the same line as SEQ ID NO. 64177, preferably the coding region thereof, a homolog or a fragment thereof; which are operable linked.

[32726] In an embodiment thereof the expression cassette comprises in addition c) a nucleic acid molecule encoding a transit peptide, especially a plastidal transit petide in case in Table I, application no. 4, in column 6 in the same line as SEQ ID NO. 64177 is depicted, plastidic is mentioned, or a mitochondrial transit peptide in case in Table I, application no. 4, in column 6 in the same line as SEQ ID NO. 64177 is depicted, mitochondrial is mentioned; which is operable linked, too.

[32727] In another embodiment thereof the expression cassette does not comprise an additional transit peptide in case in Table I, application no. 4, in column 6 in the same line as SEQ ID NO. 64177 is depicted, non-targeted is mentioned.

[32728] In an embodiment the present invention relates to an expresssion cassette comprising a) a promoter, preferably a promoter selected from the group consisting of Big35S, PCUbi, Super and USP, in particular p-Super; and b) the nucleic acid SEQ ID NO. 97620, or a homolog or fragment thereof, or a homolog thereof being depicted in Table I, application no. 4, column 8, in the same line as SEQ ID NO. 97620, preferably the coding region thereof, a homolog or a fragment thereof; which are operable linked.

[32729] In an embodiment thereof the expression cassette comprises in addition c) a nucleic acid molecule encoding a transit peptide, especially a plastidal transit petide in case in Table I, application no. 4, in column 6 in the same line as SEQ ID NO. 97620 is depicted, plastidic is mentioned, or a mitochondrial transit peptide in case in Table I, application no. 4, in column 6 in the same line as SEQ ID NO. 97620 is depicted, mitochondrial is mentioned; which is operable linked, too.

[32730] In another embodiment thereof the expression cassette does not comprise an additional transit peptide in case in Table I, application no. 4, in column 6 in the same line as SEQ ID NO. 97620 is depicted, non-targeted is mentioned.

[32731] In an embodiment the present invention relates to an expresssion cassette comprising a) a promoter, preferably a promoter selected from the group consisting of Big35S, PCUbi, Super and USP, in particular p-Super; and b) the nucleic acid SEQ ID NO. 14769, or a homolog or fragment thereof, or a homolog thereof being depicted in Table I, application no. 4, column 8, in the same line as SEQ ID NO. 14769, preferably the coding region thereof, a homolog or a fragment thereof; which are operable linked.

[32732] In an embodiment thereof the expression cassette comprises in addition c) a nucleic acid molecule encoding a transit peptide, especially a plastidal transit petide in case in Table I, application no. 4, in column 6 in the same line as SEQ ID NO. 14769 is depicted, plastidic is mentioned, or a mitochondrial transit peptide in case in Table I, application no. 4, in column 6 in the same line as SEQ ID NO. 14769 is depicted, mitochondrial is mentioned; which is operable linked, too.

[32733] In another embodiment thereof the expression cassette does not comprise an additional transit peptide in case in Table I, application no. 4, in column 6 in the same line as SEQ ID NO. 14769 is depicted, non-targeted is mentioned.

[32734] In an embodiment the present invention relates to an expresssion cassette comprising a) a promoter, preferably a promoter selected from the group consisting of Big35S, PCUbi, Super and USP, in particular p-Super; and b) the nucleic acid SEQ ID NO. 64563, or a homolog or fragment thereof, or a homolog thereof being depicted in Table I, application no. 4, column 8, in the same line as SEQ ID NO. 64563, preferably the coding region thereof, a homolog or a fragment thereof; which are operable linked.

[32735] In an embodiment thereof the expression cassette comprises in addition c) a nucleic acid molecule encoding a transit peptide, especially a plastidal transit petide in case in Table I, application no. 4, in column 6 in the same line as SEQ ID NO. 64563 is depicted, plastidic is mentioned, or a mitochondrial transit peptide in case in Table I, application no. 4, in column 6 in the same line as SEQ ID NO. 64563 is depicted, mitochondrial is mentioned; which is operable linked, too.

[32736] In another embodiment thereof the expression cassette does not comprise an additional transit peptide in case in Table I, application no. 4, in column 6 in the same line as SEQ ID NO. 64563 is depicted, non-targeted is mentioned.

[32737] In an embodiment the present invention relates to an expresssion cassette comprising a) a promoter, preferably a promoter selected from the group consisting of Big35S, PCUbi, Super and USP, in particular p-Super; and b) the nucleic acid SEQ ID NO. 90306, or a homolog or fragment thereof, or a homolog thereof being depicted in Table I, application no. 4, column 8, in the same line as SEQ ID NO. 90306, preferably the coding region thereof, a homolog or a fragment thereof; which are operable linked.

[32738] In an embodiment thereof the expression cassette comprises in addition c) a nucleic acid molecule encoding a transit peptide, especially a plastidal transit petide in case in Table I, application no. 4, in column 6 in the same line as SEQ ID NO. 90306 is depicted, plastidic is mentioned, or a mitochondrial transit peptide in case in Table I, application no. 4, in column 6 in the same line as SEQ ID NO. 90306 is depicted, mitochondrial is mentioned; which is operable linked, too.

[32739] In another embodiment thereof the expression cassette does not comprise an additional transit peptide in case in Table I, application no. 4, in column 6 in the same line as SEQ ID NO. 90306 is depicted, non-targeted is mentioned.

[32740] In an embodiment the present invention relates to an expresssion cassette comprising a) a promoter, preferably a promoter selected from the group consisting of Big35S, PCUbi, Super and USP, in particular p-Super; and b) the nucleic acid SEQ ID NO. 64964, or a homolog or fragment thereof, or a homolog thereof being depicted in Table I, application no. 4, column 8, in the same line as SEQ ID NO. 64964, preferably the coding region thereof, a homolog or a fragment thereof; which are operable linked.

[32741] In an embodiment thereof the expression cassette comprises in addition c) a nucleic acid molecule encoding a transit peptide, especially a plastidal transit petide in case in Table I, application no. 4, in column 6 in the same line as SEQ ID NO. 64964 is depicted, plastidic is mentioned, or a mitochondrial transit peptide in case in Table I, application no. 4, in column 6 in the same line as SEQ ID NO. 64964 is depicted, mitochondrial is mentioned; which is operable linked, too.

[32742] In another embodiment thereof the expression cassette does not comprise an additional transit peptide in case in Table I, application no. 4, in column 6 in the same line as SEQ ID NO. 64964 is depicted, non-targeted is mentioned.

[32743] In an embodiment the present invention relates to an expresssion cassette comprising a) a promoter, preferably a promoter selected from the group consisting of Big35S, PCUbi, Super and USP, in particular Big35S; and b) the nucleic acid SEQ ID NO. 97631, or a homolog or fragment thereof, or a homolog thereof being depicted in Table I, application no. 4, column 8, in the same line as SEQ ID NO. 97631, preferably the coding region thereof, a homolog or a fragment thereof; which are operable linked.

[32744] In an embodiment thereof the expression cassette comprises in addition c) a nucleic acid molecule encoding a transit peptide, especially a plastidal transit petide in case in Table I, application no. 4, in column 6 in the same line as SEQ ID NO. 97631 is depicted, plastidic is mentioned, or a mitochondrial transit peptide in case in Table I, application no. 4, in column 6 in the same line as SEQ ID NO. 97631 is depicted, mitochondrial is mentioned; which is operable linked, too.

[32745] In another embodiment thereof the expression cassette does not comprise an additional transit peptide in case in Table I, application no. 4, in column 6 in the same line as SEQ ID NO. 97631 is depicted, non-targeted is mentioned.

[32746] In an embodiment the present invention relates to an expresssion cassette comprising a) a promoter, preferably a promoter selected from the group consisting of Big35S, PCUbi, Super and USP, in particular p-PcUBI; and b) the nucleic acid SEQ ID NO. 97635, or a homolog or fragment thereof, or a homolog thereof being depicted in Table I, application no. 4, column 8, in the same line as SEQ ID NO. 97635, preferably the coding region thereof, a homolog or a fragment thereof; which are operable linked.

[32747] In an embodiment thereof the expression cassette comprises in addition c) a nucleic acid molecule encoding a transit peptide, especially a plastidal transit petide in case in Table I, application no. 4, in column 6 in the same line as SEQ ID NO. 97635 is depicted, plastidic is mentioned, or a mitochondrial transit peptide in case in Table I, application no. 4, in column 6 in the same line as SEQ ID NO. 97635 is depicted, mitochondrial is mentioned; which is operable linked, too.

[32748] In another embodiment thereof the expression cassette does not comprise an additional transit peptide in case in Table I, application no. 4, in column 6 in the same line as SEQ ID NO. 97635 is depicted, non-targeted is mentioned.

[32749] In an embodiment the present invention relates to an expresssion cassette comprising a) a promoter, preferably a promoter selected from the group consisting of Big35S, PCUbi, Super and USP, in particular p-PcUBI; and b) the nucleic acid SEQ ID NO. 14885, or a homolog or fragment thereof, or a homolog thereof being depicted in Table I, application no. 4, column 8, in the same line as SEQ ID NO. 14885, preferably the coding region thereof, a homolog or a fragment thereof; which are operable linked.

[32750] In an embodiment thereof the expression cassette comprises in addition c) a nucleic acid molecule encoding a transit peptide, especially a plastidal transit petide in case in Table I, application no. 4, in column 6 in the same line as SEQ ID NO. 14885 is depicted, plastidic is mentioned, or a mitochondrial transit peptide in case in Table I, application no. 4, in column 6 in the same line as SEQ ID NO. 14885 is depicted, mitochondrial is mentioned; which is operable linked, too.

[32751] In another embodiment thereof the expression cassette does not comprise an additional transit peptide in case in Table I, application no. 4, in column 6 in the same line as SEQ ID NO. 14885 is depicted, non-targeted is mentioned.

[32752] In an embodiment the present invention relates to an expresssion cassette comprising a) a promoter, preferably a promoter selected from the group consisting of Big35S, PCUbi, Super and USP, in particular p-Super; and b) the nucleic acid SEQ ID NO. 90409, or a homolog or fragment thereof, or a homolog thereof being depicted in Table I, application no. 4, column 8, in the same line as SEQ ID NO. 90409, preferably the coding region thereof, a homolog or a fragment thereof; which are operable linked.

[32753] In an embodiment thereof the expression cassette comprises in addition c) a nucleic acid molecule encoding a transit peptide, especially a plastidal transit petide in case in Table I, application no. 4, in column 6 in the same line as SEQ ID NO. 90409 is depicted, plastidic is mentioned, or a mitochondrial transit peptide in case in Table I, application no. 4, in column 6 in the same line as SEQ ID NO. 90409 is depicted, mitochondrial is mentioned; which is operable linked, too.

[32754] In another embodiment thereof the expression cassette does not comprise an additional transit peptide in case in Table I, application no. 4, in column 6 in the same line as SEQ ID NO. 90409 is depicted, non-targeted is mentioned.

[32755] In an embodiment the present invention relates to an expresssion cassette comprising a) a promoter, preferably a promoter selected from the group consisting of Big35S, PCUbi, Super and USP, in particular p-PcUBI; and b) the nucleic acid SEQ ID NO. 90602, or a homolog or fragment thereof, or a homolog thereof being depicted in Table I, application no. 4, column 8, in the same line as SEQ ID NO. 90602, preferably the coding region thereof, a homolog or a fragment thereof; which are operable linked.

[32756] In an embodiment thereof the expression cassette comprises in addition c) a nucleic acid molecule encoding a transit peptide, especially a plastidal transit petide in case in Table I, application no. 4, in column 6 in the same line as SEQ ID NO. 90602 is depicted, plastidic is mentioned, or a mitochondrial transit peptide in case in Table I, application no. 4, in column 6 in the same line as SEQ ID NO. 90602 is depicted, mitochondrial is mentioned; which is operable linked, too.

[32757] In another embodiment thereof the expression cassette does not comprise an additional transit peptide in case in Table I, application no. 4, in column 6 in the same line as SEQ ID NO. 90602 is depicted, non-targeted is mentioned.

[32758] In an embodiment the present invention relates to an expresssion cassette comprising a) a promoter, preferably a promoter selected from the group consisting of Big35S, PCUbi, Super and USP, in particular p-Super; and b) the nucleic acid SEQ ID NO. 98075, or a homolog or fragment thereof, or a homolog thereof being depicted in Table I, application no. 4, column 8, in the same line as SEQ ID NO. 98075, preferably the coding region thereof, a homolog or a fragment thereof; which are operable linked.

[32759] In an embodiment thereof the expression cassette comprises in addition c) a nucleic acid molecule encoding a transit peptide, especially a plastidal transit petide in case in Table I, application no. 4, in column 6 in the same line as SEQ ID NO. 98075 is depicted, plastidic is mentioned, or a mitochondrial transit peptide in case in Table I, application no. 4, in column 6 in the same line as SEQ ID NO. 98075 is depicted, mitochondrial is mentioned; which is operable linked, too.

[32760] In another embodiment thereof the expression cassette does not comprise an additional transit peptide in case in Table I, application no. 4, in column 6 in the same line as SEQ ID NO. 98075 is depicted, non-targeted is mentioned.

[32761] In an embodiment the present invention relates to an expresssion cassette comprising a) a promoter, preferably a promoter selected from the group consisting of Big35S, PCUbi, Super and USP, in particular Big35S; and b) the nucleic acid SEQ ID NO. 90615, or a homolog or fragment thereof, or a homolog thereof being depicted in Table I, application no. 4, column 8, in the same line as SEQ ID NO. 90615, preferably the coding region thereof, a homolog or a fragment thereof; which are operable linked.

[32762] In an embodiment thereof the expression cassette comprises in addition c) a nucleic acid molecule encoding a transit peptide, especially a plastidal transit petide in case in Table I, application no. 4, in column 6 in the same line as SEQ ID NO. 90615 is depicted, plastidic is mentioned, or a mitochondrial transit peptide in case in Table I, application no. 4, in column 6 in the same line as SEQ ID NO. 90615 is depicted, mitochondrial is mentioned; which is operable linked, too.

[32763] In another embodiment thereof the expression cassette does not comprise an additional transit peptide in case in Table I, application no. 4, in column 6 in the same line as SEQ ID NO. 90615 is depicted, non-targeted is mentioned.

[32764] In an embodiment the present invention relates to an expresssion cassette comprising a) a promoter, preferably a promoter selected from the group consisting of Big35S, PCUbi, Super and USP, in particular p-PcUBI; and b) the nucleic acid SEQ ID NO. 98243, or a homolog or fragment thereof, or a homolog thereof being depicted in Table I, application no. 4, column 8, in the same line as SEQ ID NO. 98243, preferably the coding region thereof, a homolog or a fragment thereof; which are operable linked.

[32765] In an embodiment thereof the expression cassette comprises in addition c) a nucleic acid molecule encoding a transit peptide, especially a plastidal transit petide in case in Table I, application no. 4, in column 6 in the same line as SEQ ID NO. 98243 is depicted, plastidic is mentioned, or a mitochondrial transit peptide in case in Table I, application no. 4, in column 6 in the same line as SEQ ID NO. 98243 is depicted, mitochondrial is mentioned; which is operable linked, too.

[32766] In another embodiment thereof the expression cassette does not comprise an additional transit peptide in case in Table I, application no. 4, in column 6 in the same line as SEQ ID NO. 98243 is depicted, non-targeted is mentioned.

[32767] In an embodiment the present invention relates to an expresssion cassette comprising a) a promoter, preferably a promoter selected from the group consisting of Big35S, PCUbi, Super and USP, in particular p-Super; and b) the nucleic acid SEQ ID NO. 91785, or a homolog or fragment thereof, or a homolog thereof being depicted in Table I, application no. 4, column 8, in the same line as SEQ ID NO. 91785, preferably the coding region thereof, a homolog or a fragment thereof; which are operable linked.

[32768] In an embodiment thereof the expression cassette comprises in addition c) a nucleic acid molecule encoding a transit peptide, especially a plastidal transit petide in case in Table I, application no. 4, in column 6 in the same line as SEQ ID NO. 91785 is depicted, plastidic is mentioned, or a mitochondrial transit peptide in case in Table I, application no. 4, in column 6 in the same line as SEQ ID NO. 91785 is depicted, mitochondrial is mentioned; which is operable linked, too.

[32769] In another embodiment thereof the expression cassette does not comprise an additional transit peptide in case in Table I, application no. 4, in column 6 in the same line as SEQ ID NO. 91785 is depicted, non-targeted is mentioned.

[32770] In an embodiment the present invention relates to an expresssion cassette comprising a) a promoter, preferably a promoter selected from the group consisting of Big35S, PCUbi, Super and USP, in particular p-Super; and b) the nucleic acid SEQ ID NO. 67684, or a homolog or fragment thereof, or a homolog thereof being depicted in Table I, application no. 4, column 8, in the same line as SEQ ID NO. 67684, preferably the coding region thereof, a homolog or a fragment thereof; which are operable linked.

[32771] In an embodiment thereof the expression cassette comprises in addition c) a nucleic acid molecule encoding a transit peptide, especially a plastidal transit petide in case in Table I, application no. 4, in column 6 in the same line as SEQ ID NO. 67684 is depicted, plastidic is mentioned, or a mitochondrial transit peptide in case in Table I, application no. 4, in column 6 in the same line as SEQ ID NO. 67684 is depicted, mitochondrial is mentioned; which is operable linked, too.

[32772] In another embodiment thereof the expression cassette does not comprise an additional transit peptide in case in Table I, application no. 4, in column 6 in the same line as SEQ ID NO. 67684 is depicted, non-targeted is mentioned.

[32773] In an embodiment the present invention relates to an expresssion cassette comprising a) a promoter, preferably a promoter selected from the group consisting of Big35S, PCUbi, Super and USP, in particular p-Super; and b) the nucleic acid SEQ ID NO. 92540, or a homolog or fragment thereof, or a homolog thereof being depicted in Table I, application no. 4, column 8, in the same line as SEQ ID NO. 92540, preferably the coding region thereof, a homolog or a fragment thereof; which are operable linked.

[32774] In an embodiment thereof the expression cassette comprises in addition c) a nucleic acid molecule encoding a transit peptide, especially a plastidal transit petide in case in Table I, application no. 4, in column 6 in the same line as SEQ ID NO. 92540 is depicted, plastidic is mentioned, or a mitochondrial transit peptide in case in Table I, application no. 4, in column 6 in the same line as SEQ ID NO. 92540 is depicted, mitochondrial is mentioned; which is operable linked, too.

[32775] In another embodiment thereof the expression cassette does not comprise an additional transit peptide in case in Table I, application no. 4, in column 6 in the same line as SEQ ID NO. 92540 is depicted, non-targeted is mentioned.

[32776] In an embodiment the present invention relates to an expresssion cassette comprising a) a promoter, preferably a promoter selected from the group consisting of Big35S, PCUbi, Super and USP, in particular Big35S; and b) the nucleic acid SEQ ID NO. 98445, or a homolog or fragment thereof, or a homolog thereof being depicted in Table I, application no. 4, column 8, in the same line as SEQ ID NO. 98445, preferably the coding region thereof, a homolog or a fragment thereof; which are operable linked.

[32777] In an embodiment thereof the expression cassette comprises in addition c) a nucleic acid molecule encoding a transit peptide, especially a plastidal transit petide in case in Table I, application no. 4, in column 6 in the same line as SEQ ID NO. 98445 is depicted, plastidic is mentioned, or a mitochondrial transit peptide in case in Table I, application no. 4, in column 6 in the same line as SEQ ID NO. 98445 is depicted, mitochondrial is mentioned; which is operable linked, too.

[32778] In another embodiment thereof the expression cassette does not comprise an additional transit peptide in case in Table I, application no. 4, in column 6 in the same line as SEQ ID NO. 98445 is depicted, non-targeted is mentioned.

[32779] In an embodiment the present invention relates to an expresssion cassette comprising a) a promoter, preferably a promoter selected from the group consisting of Big35S, PCUbi, Super and USP, in particular p-PcUBI; and b) the nucleic acid SEQ ID NO. 68413, or a homolog or fragment thereof, or a homolog thereof being depicted in Table I, application no. 4, column 8, in the same line as SEQ ID NO. 68413, preferably the coding region thereof, a homolog or a fragment thereof; which are operable linked.

[32780] In an embodiment thereof the expression cassette comprises in addition c) a nucleic acid molecule encoding a transit peptide, especially a plastidal transit petide in case in Table I, application no. 4, in column 6 in the same line as SEQ ID NO. 68413 is depicted, plastidic is mentioned, or a mitochondrial transit peptide in case in Table I, application no. 4, in column 6 in the same line as SEQ ID NO. 68413 is depicted, mitochondrial is mentioned; which is operable linked, too.

[32781] In another embodiment thereof the expression cassette does not comprise an additional transit peptide in case in Table I, application no. 4, in column 6 in the same line as SEQ ID NO. 68413 is depicted, non-targeted is mentioned.

[32782] [0165.1.1.4] to [0170.1.1.4] for the disclosure of these paragraphs see [0165.1.1.1] to [0170.1.1.1] above.

[32783] The invention further provides a vector, comprising a nucleic acid molecule comprising 1) a nucleic acid molecule selected from the group consisting of:
[32784] (a) a nucleic acid molecule encoding a polypeptide shown in Table II, column 5 or 8, application no. 4, preferably shown in Table II A, application no. 4, in column 5, or in Table II A, application no. 4, column 8, or in Table II B, application no. 4, column 8, or a homolog or a fragment thereof;
[32785] (b) a nucleic acid molecule shown in Table I, application no. 4, column 5 or 8, preferably shown in Table I A, application no. 4, in column 5, or in Table I A, application no. 4, column 8, or in Table I B, application no. 4, column 8, preferably the coding region thereof, or a homolog or a fragment thereof;
[32786] (c) a nucleic acid molecule, which, as a result of the degeneracy of the genetic code, can be derived from a polypeptide sequence depicted in column 5 or 8 of Table II, application no. 4, preferably shown in Table II A, application no. 4, in column 5, or in Table II A, application no. 4, column 8, or in Table II B, application no. 4, column 8;
[32787] (d) a nucleic acid molecule having at least 30% identity, preferably at least 40%, 50%, 60%, 70%, 75%, 80%, 85%, 90%, 95%, 96%, 97%, 98%, 99%, 99.5%, with the nucleic acid molecule sequence of a polynucleotide comprising the nucleic acid molecule shown in column 5 or 8 of Table I, application no. 4, preferably shown in Table I A, application no. 4, in column 5, or in Table I A, application no. 4, column 8, or in Table I B, application no. 4, column 8, preferably the coding region thereof;
[32788] (e) a nucleic acid molecule encoding a polypeptide having at least 30% identity, preferably at least 40%, 50% 60%, 70%, 75%, 80%, 85%, 90%, 95%, 96%, 97%, 98%, 99%, 99.5%, identity with the amino acid sequence of the polypeptide encoded by the nucleic acid molecule of (a), (b), (c), or (d);
[32789] (f) a nucleic acid molecule which hybridizes with a nucleic acid molecule of (a), (b), (c), (d), or (e) under stringent hybridization conditions;
[32790] (g) a nucleic acid molecule encoding a polypeptide which can be isolated with the aid of monoclonal or polyclonal antibodies made against a polypeptide encoded by one of the nucleic acid molecules of (a), (b), (c), (d), (e) or (f);
[32791] (h) a nucleic acid molecule encoding a polypeptide comprising the consensus sequence or one or more polypeptide motifs as shown in column 8 of Table IV, application no. 4;
[32792] (i) a nucleic acid molecule encoding a polypeptide having the activity represented by a protein as depicted in column 5 of Table II, application no. 4;
[32793] (j) a nucleic acid molecule comprising a polynucleotide which is obtained by amplifying a cDNA library or a genomic library using the primers in Table III, application no. 4, column 8;
[32794] and
[32795] (k) nucleic acid molecule which is obtainable by screening a suitable nucleic acid library, especially a cDNA library and/or a genomic library, under stringent hybridization conditions with a probe comprising one of the sequences of the nucleic acid molecule of (a), (b), (c), (d), (e), (f), (g), (h), (i) or (j) or with a fragment thereof having at least 15 nt, preferably 20 nt, 30 nt, 50 nt, 100 nt, 200 nt, 500 nt, 1000 nt, 1500 nt, 2000 nt or 3000 nt of the nucleic acid molecule complementary to a nucleic acid sequence characterized in (a), (b), (c), (d), (e), (f), (g), (h), (i) or (j);
   or a nucleic acid molecule comprising a sequence which is complementary thereto.
   (All the references to Tables I to IV are references to the corresponding lines of Tables I to IV.)

[32796] In a preferred embodiment of said vector said nucleic acid molecule according to 1 (a), (b), (c), (d), (e), (f), (g), (h), (i), (j) or (k) encodes a polypeptide which has the activity of the respective polypeptide represented by a protein comprising a polypeptide as depicted in the respective line in column 5 of Table II, application no. 4.

[32797] In another preferred embodiment of said vector said nucleic acid molecule according to 1 (a), (b), (c), (d), (e), (f), (g), (h), (i), (j) or (k) confers a generation or an increase of the respective fine chemical in a non-human organism or a part thereof as compared to a corresponding wild-type non-human organism or part thereof.

[32798] In another preferred embodiment of said vector said nucleic acid molecule according to 1 (a), (b), (c), (d), (e), (f), (g), (h), (i), (j) or (k) encodes a polypeptide which has the activity of the respective polypeptide represented by a protein as depicted in the respective line in column 5 of Table II, application no. 4, and confers a generation or an increase of the respective fine chemical in a non-human organism or a part thereof as compared to a corresponding wild-type non-human organism or part thereof.

[32799] In another embodiment thereof said vector comprises beneath said nucleic acid molecule according to 1 (a), (b), (c), (d), (e), (f), (g), (h), (i), (j) or (k), a promoter, preferably a promoter selected from the group consisting of Big35S, PCUbi, Super and USP, which are operable linked.

[32800] In a preferred embodiment thereof said vector comprises beneath said nucleic acid molecule according to 1 (a), (b), (c), (d), (e), (f), (g), (h), (i), (j) or (k), a promoter, preferably a promoter selected from the group consisting of Big35S, PCUbi, Super and USP, which are operable linked; and said nucleic acid molecule according to 1 (a), (b), (c), (d), (e), (f), (g), (h), (i), (j) or (k) encodes a polypeptide which has the activity of the respective polypeptide represented by a protein comprising a polypeptide as depicted in the respective line in column 5 of Table II, application no. 4.

[32801] In another preferred embodiment thereof said vector comprises beneath said nucleic acid molecule according to 1 (a), (b), (c), (d), (e), (f), (g), (h), (i), (j) or (k), a promoter, preferably a promoter selected from the group consisting of Big35S, PCUbi, Super and USP, which are operable linked; and said nucleic acid molecule according to 1 (a), (b), (c), (d), (e), (f), (g), (h), (i), (j) or (k) confers a generation or an increase of the respective fine chemical in a non-human organism or a part thereof as compared to a corresponding wild-type non-human organism or part thereof.

[32802] In another preferred embodiment thereof said vector comprises beneath said nucleic acid molecule according to 1 (a), (b), (c), (d), (e), (f), (g), (h), (i), (j) or (k), a promoter, preferably a promoter selected from the group consisting of Big35S, PCUbi, Super and USP, which are operable linked; and said nucleic acid molecule according to 1 (a), (b), (c), (d), (e), (f), (g), (h), (i), (j) or (k) encodes a polypeptide which has the activity of the respective polypeptide represented by a protein as depicted in the respective line in column 5 of Table II, application no. 4, and confers a generation or an increase of the respective fine chemical in a non-human organism or a part thereof as compared to a corresponding wild-type non-human organism or part thereof.

[32803] In another embodiment thereof said vector comprises beneath said nucleic acid molecule according to 1 (a), (b), (c), (d), (e), (f), (g), (h), (i), (j) or (k), a nucleic acid molecule encoding a transit peptide, preferably encoding a plastidal transit peptide, especially in case in column 6 of Table I, application no. 4, in the same line as of the respective nucleic acid molecule according to 1) “plastidic” is depicted, or encoding a mitochondrial transit peptide, especially in case in column 6 of Table I, application no. 4, in the same line as of the respective nucleic acid molecule according to 1) “mitochondrial” is depicted, which are operable linked.

[32804] In another embodiment thereof said vector does not comprise beneath said nucleic acid molecule according to 1 (a), (b), (c), (d), (e), (f), (g), (h), (i), (j) or (k), a nucleic acid molecule encoding a transit peptide in case in column 6 of Table I, application no. 4, in the same line as of the respective nucleic acid molecule according to 1) “non-targeted” is depicted.

[32805] In another embodiment thereof said vector comprises beneath said nucleic acid molecule according to 1 (a), (b), (c), (d), (e), (f), (g), (h), (i), (j) or (k), and a promoter, preferably a promoter selected from the group consisting of Big35S, PCUbi, Super and USP; a nucleic acid molecule encoding a transit peptide, preferably encoding a plastidal transit peptide, especially in case in column 6 of Table I, application no. 4, in the same line as of the respective nucleic acid molecule according to 1) “plastidic” is depicted, or encoding a mitochondrial transit peptide, especially in case in column 6 of Table I, application no. 4, in the same line as of the respective nucleic acid molecule according to 1) “mitochondrial” is depicted, which are operable linked.

[32806] In another embodiment thereof said vector does not comprise beneath said nucleic acid molecule according to 1 (a), (b), (c), (d), (e), (f), (g), (h), (i), (j) or (k), and a promoter, preferably a promoter selected from the group consisting of Big35S, PCUbi, Super and USP, which are operable linked; a nucleic acid molecule encoding a transit peptide, especially in case in column 6 of Table I, application no. 4, in the same line as of the respective nucleic acid molecule according to 1) “non-targeted” is depicted.

[32807] In another embodiment thereof said vector comprises beneath said nucleic acid molecule according to 1 (a), (b), (c), (d), (e), (f), (g), (h), (i), (j) or (k), and a promoter, preferably a promoter selected from the group consisting of Big35S, PCUbi, Super and USP; a nucleic acid molecule encoding a transit peptide, preferably encoding a plastidal transit peptide, especially in case in column 6 of Table I, application no. 4, in the same line as of the respective nucleic acid molecule according to 1) “plastidic” is depicted, or encoding a mitochondrial transit peptide, especially in case in column 6 of Table I, application no. 4, in the same line as of the respective nucleic acid molecule according to 1) “mitochondrial” is depicted, which are operable linked; and wherein said nucleic acid molecule according to 1 (a), (b), (c), (d), (e), (f), (g), (h), (i), (j) or (k) encodes a polypeptide which has the activity of the respective polypeptide represented by a protein comprising a polypeptide as depicted in column 5 of Table II, application no. 4 (in the same line).

[32808] In another embodiment thereof said vector does not comprise beneath said nucleic acid molecule according to 1 (a), (b), (c), (d), (e), (f), (g), (h), (i), (j) or (k), and a promoter, preferably a promoter selected from the group consisting of Big35S, PCUbi, Super and USP, which are operatively linked; a nucleic acid molecule encoding a transit peptide, especially in case in column 6 of Table I, application no. 4, in the same line as of the respective nucleic acid molecule according to 1) “non-targeted” is depicted; and wherein said nucleic acid molecule according to 1 (a), (b), (c), (d), (e), (f), (g), (h), (i), (j) or (k) encodes a polypeptide which has the activity of the respective polypeptide represented by a protein comprising a polypeptide as depicted in column 5 of Table II, application no. 4.

[32809] In another embodiment thereof said vector comprises beneath said nucleic acid molecule according to 1 (a), (b), (c), (d), (e), (f), (g), (h), (i), (j) or (k), and a promoter, preferably a promoter selected from the group consisting of Big35S, PCUbi, Super and USP; a nucleic acid molecule encoding a transit peptide, preferably encoding a plastidal transit peptide, especially in case in column 6 of Table I, application no. 4, in the same line as of the respective nucleic acid molecule according to 1) “plastidic” is depicted, or encoding a mitochondrial transit peptide, especially in case in column 6 of Table I, application no. 4, in the same line as of the respective nucleic acid molecule according to 1) “mitochondrial” is depicted, which are operable linked; and wherein said nucleic acid molecule according to 1 (a), (b), (c), (d), (e), (f), (g), (h), (i), (j) or (k) confers a generation or an increase of the respective fine chemical in a non-human organism or a part thereof as compared to a corresponding wild-type non-human organism or part thereof.

[32810] In another embodiment thereof said vector does not comprise beneath said nucleic acid molecule according to 1 (a), (b), (c), (d), (e), (f), (g), (h), (i), (j) or (k), and a promoter, preferably a promoter selected from the group consisting of Big35S, PCUbi, Super and USP, which are operatively linked; a nucleic acid molecule encoding a transit peptide, especially in case in column 6 of Table I, application no. 4, in the same line as of the respective nucleic acid molecule according to 1) “non-targeted” is depicted; and wherein said nucleic acid molecule according to 1 (a), (b), (c), (d), (e), (f), (g), (h), (i), (j) or (k) confers a generation or an increase of the respective fine chemical in a non-human organism or a part thereof as compared to a corresponding wild-type non-human organism or part thereof.

[32811] In another embodiment thereof said vector comprises beneath said nucleic acid molecule according to 1 (a), (b), (c), (d), (e), (f), (g), (h), (i), (j) or (k), and a promoter, preferably a promoter selected from the group consisting of Big35S, PCUbi, Super and USP; a nucleic acid molecule encoding a transit peptide, preferably encoding a plastidal transit peptide, especially in case in column 6 of Table I, application no. 4, in the same line as of the respective nucleic acid molecule according to 1) “plastidic” is depicted, or encoding a mitochondrial transit peptide, especially in case in column 6 of Table I, application no. 4, in the same line as of the respective nucleic acid molecule according to 1) “mitochondrial” is depicted, which are operable linked; and wherein said nucleic acid molecule according to 1 (a), (b), (c), (d), (e), (f), (g), (h), (i), (j) or (k) encodes a polypeptide which has the activity of the respective polypeptide represented by a protein as depicted in column 5 of Table II application no. 4 and confers a generation or an increase of the respective fine chemical in a non-human organism or a part thereof as compared to a corresponding wild-type non-human organism or part thereof.

[32812] In another embodiment thereof said vector does not comprise beneath said nucleic acid molecule according to 1 (a), (b), (c), (d), (e), (f), (g), (h), (i), (j) or (k), and a promoter, preferably a promoter selected from the group consisting of Big35S, PCUbi, Super and USP, which are operatively linked; a nucleic acid molecule encoding a transit peptide, especially in case in column 6 of Table I, application no. 4, in the same line as of the respective nucleic acid molecule according to 1) “non-targeted” is depicted; and wherein said nucleic acid molecule according to 1 (a), (b), (c), (d), (e), (f), (g), (h), (i), (j) or (k) encodes a polypeptide which has the activity of the respective polypeptide represented by a protein as depicted in column 5 of Table II application no. 4 (in the same line) and confers a generation or an increase of the respective fine chemical in a non-human organism or a part thereof as compared to a corresponding wild-type non-human organism or part thereof.

[32813] In a preferred embodiment of said vector said nucleic acid molecule according to 1 (a), (b), (c), (d), (e), (f), (g), (h), (i), (j) or (k), said promoter and optionally said nucleic acid molecule encoding a transit peptide are encompassed in an expression cassette. Accordingly in an embodiment the invention provides a vector comprising an expression cassette comprising said nucleic acid molecule according to 1 (a), (b), (c), (d), (e), (f), (g), (h), (i), (j) or (k), said promoter and optionally said a nucleic acid molecule encoding a transit peptide, operable linked. Said expression cassette may encompass a terminator, too.

[32814] The invention further provides a vector comprising a nucleic acid molecule comprising 1) a nucleic acid molecule selected from the group consisting of:
[32815] (a) a nucleic acid molecule encoding a polypeptide shown in Table II, column 5 or 8, application no. 4, preferably shown in Table II A, application no. 4, in column 5, or in Table II A, application no. 4, column 8, or in Table II B, application no. 4, column 8, or a homolog or a fragment thereof;
[32816] (b) a nucleic acid molecule shown in Table I, application no. 4, column 5 or 8, preferably shown in Table I A, application no. 4, in column 5, or in Table I A, application no. 4, column 8, or in Table I B, application no. 4, column 8, preferably the coding region thereof, or a homolog or a fragment thereof;
[32817] (c) a nucleic acid molecule, which, as a result of the degeneracy of the genetic code, can be derived from a polypeptide sequence depicted in column 5 or 8 of Table II, application no. 4, preferably shown in Table II A, application no. 4, in column 5, or in Table II A, application no. 4, column 8, or in Table II B, application no. 4, column 8;
[32818] (d) a nucleic acid molecule having at least 30% identity, preferably at least 40%, 50%, 60%, 70%, 75%, 80%, 85%, 90%, 95%, 96%, 97%, 98%, 99%, 99.5%, with the nucleic acid molecule sequence of a polynucleotide comprising the nucleic acid molecule shown in column 5 or 8 of Table I, application no. 4, preferably shown in Table I A, application no. 4, in column 5, or in Table I A, application no. 4, column 8, or in Table I B, application no. 4, column 8, preferably the coding region thereof;
[32819] (e) a nucleic acid molecule encoding a polypeptide having at least 30% identity, preferably at least 40%, 50% 60%, 70%, 75%, 80%, 85%, 90%, 95%, 96%, 97%, 98%, 99%, 99.5%, identity with the amino acid sequence of the polypeptide encoded by the nucleic acid molecule of (a), (b), (c), or (d);
[32820] (f) a nucleic acid molecule which hybridizes with a nucleic acid molecule of (a), (b), (c), (d), or (e) under stringent hybridization conditions;
[32821] (g) a nucleic acid molecule encoding a polypeptide which can be isolated with the aid of monoclonal or polyclonal antibodies made against a polypeptide encoded by one of the nucleic acid molecules of (a), (b), (c), (d), (e) or (f);
[32822] (h) a nucleic acid molecule encoding a polypeptide comprising the consensus sequence or one or more polypeptide motifs as shown in column 8 of Table IV, application no. 4;
[32823] (i) a nucleic acid molecule encoding a polypeptide having the activity represented by a protein as depicted in column 5 of Table II, application no. 4;
[32824] (j) a nucleic acid molecule comprising a polynucleotide which is obtained by amplifying a cDNA library or a genomic library using the primers in Table III, application no. 4, column 8;
[32825] and
[32826] (k) nucleic acid molecule which is obtainable by screening a suitable nucleic acid library, especially a cDNA library and/or a genomic library, under stringent hybridization conditions with a probe comprising one of the sequences of the nucleic acid molecule of (a), (b), (c), (d), (e), (f), (g), (h), (i) or (j) or with a fragment thereof having at least 15 nt, preferably 20 nt, 30 nt, 50 nt, 100 nt, 200 nt, 500 nt, 1000 nt, 1500 nt, 2000 nt or 3000 nt of the nucleic acid molecule complementary to a nucleic acid sequence characterized in (a), (b), (c), (d), (e), (f), (g), (h), (i) or (j);
   or a nucleic acid molecule comprising a sequence which is complementary thereto;
   whereby, preferably, the nucleic acid molecule according to 1 (a), (b), (c), (d), (e), (f), (g), (h), (i), (j) or (k) distinguishes over the sequence depicted in Table I A and/or I B, application no. 4, column 5 or 8, or the coding region thereof, by one or more nucleotides (especially but not exceeding 5%, preferably 4%, 3%, 2%, 1%, 0.5%, 0.2% or 0.1%). In an embodiment, the nucleic acid molecule of the invention does not consist of the sequence shown in Table I A and/or I B, application no. 4, column 5 or 8, or the coding region thereof, respectively. In another embodiment, the nucleic acid molecule of the present invention, preferably the coding region thereof, is 30%, 40%, 50%, 60%, 70%, 80%, 90%, 95% identical but less than 100%, 99.999%, 99.99%, 99.9%, 99%, 98%, 97%, 96% or 95% identical to the sequence shown in Table I A and/or I B, application no. 4, column 5 or 8, or the coding region thereof, respectively. In a further embodiment the nucleic acid molecule does not encode the polypeptide sequence shown in Table II A and/or II B, application no. 4, column 5 or 8 but homologs thereof. Accordingly, in one embodiment, the nucleic acid molecule of the present invention encodes in one embodiment a polypeptide which differs at least in one or more amino acids (especially but not exceeding 5%, preferably 4%, 3%, 2%, 1%, 0.5%, 0.2% or 0.1%) from the polypeptide shown in Table II, application no. 4, column 5 or 8 and does not encode a protein of the sequence shown in Table II A and/or II B, application no. 4, column 5 or 8. Accordingly, in one embodiment, the protein encoded by a sequence of a nucleic acid according to (a), (b), (c), (d), (e), (f), (g), (h), (i), (j) or (k) does not consist of the sequence shown in Table I A and/or I B, application no. 4, column 5 and 8, or the coding region thereof. In a further embodiment, the protein of the present invention is at least 30%,40%, 50%, 60%, 70%, 80%, 90%, 95% identical to protein sequence depicted in Table II A and/or II B, application no. 4, column 5 or 8 but less than 100%, preferably less than 99.999%, 99.99% or 99.9%, more preferably less than 99%, 985, 97%, 96% or 95% identical to the sequence shown in Table II A and/or II B, application no. 4, column 5 or 8.
   (All the references to Tables I to IV are references to the corresponding lines of Tables I to IV.)

[32827] In a preferred embodiment of said vector said nucleic acid molecule according to 1 (a), (b), (c), (d), (e), (f), (g), (h), (i), (j) or (k) encodes a polypeptide which has the activity of the respective polypeptide represented by a protein comprising a polypeptide as depicted in the respective line in column 5 of Table II, application no. 4.

[32828] In another preferred embodiment of said vector said nucleic acid molecule according to 1 (a), (b), (c), (d), (e), (f), (g), (h), (i), (j) or (k) confers a generation or an increase of the respective fine chemical in a non-human organism or a part thereof as compared to a corresponding wild-type non-human organism or part thereof.

[32829] In another preferred embodiment of said vector said nucleic acid molecule according to 1 (a), (b), (c), (d), (e), (f), (g), (h), (i), (j) or (k) encodes a polypeptide which has the activity of the respective polypeptide represented by a protein as depicted in the respective line in column 5 of Table II, application no. 4, and confers a generation or an increase of the respective fine chemical in a non-human organism or a part thereof as compared to a corresponding wild-type non-human organism or part thereof.

[32830] In another embodiment thereof said vector comprises beneath said nucleic acid molecule according to 1 (a), (b), (c), (d), (e), (f), (g), (h), (i), (j) or (k), a promoter, preferably a promoter selected from the group consisting of Big35S, PCUbi, Super and USP, which are operable linked.

[32831] In a preferred embodiment thereof said vector comprises beneath said nucleic acid molecule according to 1 (a), (b), (c), (d), (e), (f), (g), (h), (i), (j) or (k), a promoter, preferably a promoter selected from the group consisting of Big35S, PCUbi, Super and USP, which are operable linked; and said nucleic acid molecule according to 1 (a), (b), (c), (d), (e), (f), (g), (h), (i), (j) or (k) encodes a polypeptide which has the activity of the respective polypeptide represented by a protein comprising a polypeptide as depicted in the respective line in column 5 of Table II, application no. 4.

[32832] In another preferred embodiment thereof said vector comprises beneath said nucleic acid molecule according to 1 (a), (b), (c), (d), (e), (f), (g), (h), (i), (j) or (k), a promoter, preferably a promoter selected from the group consisting of Big35S, PCUbi, Super and USP, which are operable linked; and said nucleic acid molecule according to 1 (a), (b), (c), (d), (e), (f), (g), (h), (i), (j) or (k) confers a generation or an increase of the respective fine chemical in a non-human organism or a part thereof as compared to a corresponding wild-type non-human organism or part thereof.

[32833] In another preferred embodiment thereof said vector comprises beneath said nucleic acid molecule according to 1 (a), (b), (c), (d), (e), (f), (g), (h), (i), (j) or (k), a promoter, preferably a promoter selected from the group consisting of Big35S, PCUbi, Super and USP, which are operable linked; and said nucleic acid molecule according to 1 (a), (b), (c), (d), (e), (f), (g), (h), (i), (j) or (k) encodes a polypeptide which has the activity of the respective polypeptide represented by a protein as depicted in the respective line in column 5 of Table II, application no. 4, and confers a generation or an increase of the respective fine chemical in a non-human organism or a part thereof as compared to a corresponding wild-type non-human organism or part thereof.

[32834] In another embodiment thereof said vector comprises beneath said nucleic acid molecule according to 1 (a), (b), (c), (d), (e), (f), (g), (h), (i), (j) or (k), a nucleic acid molecule encoding a transit peptide, preferably encoding a plastidal transit peptide, especially in case in column 6 of Table I, application no. 4, in the same line as of the respective nucleic acid molecule according to 1) “plastidic” is depicted, or encoding a mitochondrial transit peptide, especially in case in column 6 of Table I, application no. 4, in the same line as of the respective nucleic acid molecule according to 1) “mitochondrial” is depicted, which are operable linked.

[32835] In another embodiment thereof said vector does not comprise beneath said nucleic acid molecule according to 1 (a), (b), (c), (d), (e), (f), (g), (h), (i), (j) or (k), a nucleic acid molecule encoding a transit peptide in case in column 6 of Table I, application no. 4, in the same line as of the respective nucleic acid molecule according to 1) “non-targeted” is depicted.

[32836] In another embodiment thereof said vector comprises beneath said nucleic acid molecule according to 1 (a), (b), (c), (d), (e), (f), (g), (h), (i), (j) or (k), and a promoter, preferably a promoter selected from the group consisting of Big35S, PCUbi, Super and USP; a nucleic acid molecule encoding a transit peptide, preferably encoding a plastidal transit peptide, especially in case in column 6 of Table I, application no. 4, in the same line as of the respective nucleic acid molecule according to 1) “plastidic” is depicted, or encoding a mitochondrial transit peptide, especially in case in column 6 of Table I, application no. 4, in the same line as of the respective nucleic acid molecule according to 1) “mitochondrial” is depicted, which are operable linked.

[32837] In another embodiment thereof said vector does not comprise beneath said nucleic acid molecule according to 1 (a), (b), (c), (d), (e), (f), (g), (h), (i), (j) or (k), and a promoter, preferably a promoter selected from the group consisting of Big35S, PCUbi, Super and USP, which are operatively linked; a nucleic acid molecule encoding a transit peptide, especially in case in column 6 of Table I, application no. 4, in the same line as of the respective nucleic acid molecule according to 1) “non-targeted” is depicted.

[32838] In another embodiment thereof said vector comprises beneath said nucleic acid molecule according to 1 (a), (b), (c), (d), (e), (f), (g), (h), (i), (j) or (k), and a promoter, preferably a promoter selected from the group consisting of Big35S, PCUbi, Super and USP; a nucleic acid molecule encoding a transit peptide, preferably encoding a plastidal transit peptide, especially in case in column 6 of Table I, application no. 4, in the same line as of the respective nucleic acid molecule according to 1) “plastidic” is depicted, or encoding a mitochondrial transit peptide, especially in case in column 6 of Table I, application no. 4, in the same line as of the respective nucleic acid molecule according to 1) “mitochondrial” is depicted, which are operable linked; and wherein said nucleic acid molecule according to 1 (a), (b), (c), (d), (e), (f), (g), (h), (i), (j) or (k) encodes a polypeptide which has the activity of the respective polypeptide represented by a protein comprising a polypeptide as depicted in column 5 of Table II, application no. 4.

[32839] In another embodiment thereof said vector does not comprise beneath said nucleic acid molecule according to 1 (a), (b), (c), (d), (e), (f), (g), (h), (i), (j) or (k), and a promoter, preferably a promoter selected from the group consisting of Big35S, PCUbi, Super and USP, which are operatively linked; a nucleic acid molecule encoding a transit peptide, especially in case in column 6 of Table I, application no. 4, in the same line as of the respective nucleic acid molecule according to 1) “non-targeted” is depicted; and wherein said nucleic acid molecule according to 1 (a), (b), (c), (d), (e), (f), (g), (h), (i), (j) or (k) encodes a polypeptide which has the activity of the respective polypeptide represented by a protein comprising a polypeptide as depicted in column 5 of Table II, application no. 4.

[32840] In another embodiment thereof said vector comprises beneath said nucleic acid molecule according to 1 (a), (b), (c), (d), (e), (f), (g), (h), (i), (j) or (k), and a promoter, preferably a promoter selected from the group consisting of Big35S, PCUbi, Super and USP; a nucleic acid molecule encoding a transit peptide, preferably encoding a plastidal transit peptide, especially in case in column 6 of Table I, application no. 4, in the same line as of the respective nucleic acid molecule according to 1) “plastidic” is depicted, or encoding a mitochondrial transit peptide, especially in case in column 6 of Table I, application no. 4, in the same line as of the respective nucleic acid molecule according to 1) “mitochondrial” is depicted, which are operable linked; and wherein said nucleic acid molecule according to 1 (a), (b), (c), (d), (e), (f), (g), (h), (i), (j) or (k) confers a generation or an increase of the respective fine chemical in a non-human organism or a part thereof as compared to a corresponding wild-type non-human organism or part thereof.

[32841] In another embodiment thereof said vector does not comprise beneath said nucleic acid molecule according to 1 (a), (b), (c), (d), (e), (f), (g), (h), (i), (j) or (k), and a promoter, preferably a promoter selected from the group consisting of Big35S, PCUbi, Super and USP, which are operatively linked; a nucleic acid molecule encoding a transit peptide, especially in case in column 6 of Table I, application no. 4, in the same line as of the respective nucleic acid molecule according to 1) “non-targeted” is depicted; and wherein said nucleic acid molecule according to 1 (a), (b), (c), (d), (e), (f), (g), (h), (i), (j) or (k) confers a generation or an increase of the respective fine chemical in a non-human organism or a part thereof as compared to a corresponding wild-type non-human organism or part thereof.

[32842] In another embodiment thereof said vector comprises beneath said nucleic acid molecule according to 1 (a), (b), (c), (d), (e), (f), (g), (h), (i), (j) or (k), and a promoter, preferably a promoter selected from the group consisting of Big35S, PCUbi, Super and USP; a nucleic acid molecule encoding a transit peptide, preferably encoding a plastidal transit peptide, especially in case in column 6 of Table I, application no. 4, in the same line as of the respective nucleic acid molecule according to 1) “plastidic” is depicted, or encoding a mitochondrial transit peptide, especially in case in column 6 of Table I, application no. 4, in the same line as of the respective nucleic acid molecule according to 1) “mitochondrial” is depicted, which are operable linked; and wherein said nucleic acid molecule according to 1 (a), (b), (c), (d), (e), (f), (g), (h), (i), (j) or (k) encodes a polypeptide which has the activity of the respective polypeptide represented by a protein as depicted in column 5 of Table II application no. 4 and confers a generation or an increase of the respective fine chemical in a non-human organism or a part thereof as compared to a corresponding wild-type non-human organism or part thereof.

[32843] In another embodiment thereof said vector does not comprise beneath said nucleic acid molecule according to 1 (a), (b), (c), (d), (e), (f), (g), (h), (i), (j) or (k), and a promoter, preferably a promoter selected from the group consisting of Big35S, PCUbi, Super and USP, which are operatively linked; a nucleic acid molecule encoding a transit peptide, especially in case in column 6 of Table I, application no. 4, in the same line as of the respective nucleic acid molecule according to 1) “non-targeted” is depicted; and wherein said nucleic acid molecule according to 1 (a), (b), (c), (d), (e), (f), (g), (h), (i), (j) or (k) encodes a polypeptide which has the activity of the respective polypeptide represented by a protein as depicted in column 5 of Table II application no. 4 and confers a generation or an increase of the respective fine chemical in a non-human organism or a part thereof as compared to a corresponding wild-type non-human organism or part thereof.

[32844] [0181.1.1.4] to [0209.1.1.4] for the disclosure of these paragraphs see [0181.1.1.1] to [0209.1.1.1] above.

[32845] The genes of the invention, coding for an activity selected from the group consisting of (DL)-glycerol-3-phosphatase, 2,3-dihydroxyphenylpropionate 1,2-dioxygenase, 2-C-methyl-D-erythritol 4-phosphate cytidylyltransferase, 2-oxoglutarate dehydrogenase E1 subunit, 3-phosphoglycerate dehydrogenase, 47266012-protein, 49747384_SOYBEAN-protein, ABC metal ion transporter substrate-binding protein, ABC transporter permease protein, acetolactate synthase small subunit, acetyltransferase, acyl-CoA dehydrogenase, acyl-CoA synthase, argininosuccinate lyase, aspartate aminotransferase, aspartate kinase, At1g09680-protein, At4g32480-protein, At5g16650-protein, ATP synthase subunit beta, ATP-binding component of a transport system, AX653549-protein, b1003-protein, b1108-protein, b1445-protein, b1522-protein, b1670-protein, b1930-protein, b2360-protein, b2399-protein, b2513-protein, b2613-protein, b2739-protein, b2812-protein, b3083-protein, b3442-protein, b3646-protein, b3989-protein, b4029-protein, b4056-protein, b4250-protein, beta-galactosidase, beta-hydroxylase, bifunctional aspartokinase/homoserine dehydrogenase, bifunctional purine biosynthesis protein, branched chain amino acid ABC transporter ATP-binding protein, branched chain aminotransferase, branched-chain amino acid ABC transporter permease protein, calcium-dependent protein kinase, carbamoyl-phosphate synthase subunit, CCAAT-binding transcription factor, CDP-diacylglycerol -serine O-phosphatidyltransferase, cell division control protein, cell division protein, Chaperone protein CIpB, coproporphyrinogen III oxidase, cyclin, cyclin D , D-3-phosphoglycerate dehydrogenase, dihydrolipoamide acetyltransferase, dihydroxyacid dehydratase, DNA helicase II, DnaJ-like chaperone, D-serine dehydratase, elongation factor Tu, enoyl-CoA hydratase, enterobacterial common antigen polymerase, eukaryotic translation initiation factor 5, ferredoxin, GDP-mannose dehydrogenase, geranylgeranyl pyrophosphate synthase, gibberellin 20-oxidase, glucose dehydrogenase, glucose-6-phosphate 1-dehydrogenase, glutamate-ammonia-ligase, glutaredoxin, glutathione S-transferase, glycogen (starch) synthase, glycogen synthase, glycoprotease, glycosyl transferase, heat shock protein, heat shock transcription factor, hexose transporter, histone acetyltransferase, homocitrate synthase, homoserine dehydrogenase, hydrolase, isochorismate synthase, ketol-acid reductoisomerase, kinase, L-asparaginase, major facilitator superfamily transporter protein, malate dehydrogenase, malic enzyme, membrane transport protein, metal-dependent hydrolase, methyltransferase, mitochondrial dicarboxylate transporter, monothiol glutaredoxin, monthiol glutaredoxin, murein transglycosylase, NADP-dependent malic enzyme, nitrate/nitrite transport protein, oxireductase, peptidase, permease protein of peptide ABC transporter, phosphate transporter, phosphoanhydride phosphorylase, phosphoenolpyruvate carboxykinase, phosphoribosylaminoimidazole carboxylase catalytic subunit, photosystem II protein, polyphosphate kinase, protein kinase, protein phosphatase, pyruvate carboxylase, pyruvate kinase, restriction alleviation protein, sec-independent protein translocase, sensor histidine kinase, serine protease, sll0418-protein, slr0383-protein, succinyl-CoA synthetase beta chain, thioredoxin, threonine synthase, transcription factor, transcriptional regulator, transcriptional regulator protein, transport protein, TTC0881-protein, uroporphyrin-III C-methyltransferase, valine-pyruvate transaminase, XM_{—}473199-protein, ycl027w-protein, ydr183w-protein, YEL030C-A-protein, yfl054c-protein, ygl237c-protein, yhr131c-protein, YJL127W-A-protein, YKL038W-protein, zinc finger protein, and Zm_{—}4842_BE510522-protein are also called “FCRP genes”.

[32846] [0211.1.1.4] to [0225.1.1.4] for the disclosure of these paragraphs see [0211.1.1.1] to [0225.1.1.1] above.

[32847] In addition to the sequence mentioned in Table I, application no. 4, column 5 or 8, preferably the coding region thereof, or its homologs or fragments, it may be advantageous additionally to express and/or mutate further genes in the non-human organisms. Especially advantageously, additionally at least one further gene of the biosynthetic pathway of the fine chemical is expressed in the non-human organisms such as plants or microorganisms. It is also possible that the regulation of the natural genes has been modified advantageously so that the gene and/or its gene product is no longer subject to the regulatory mechanisms which exist in the non-human organisms. This leads to an increased synthesis of the respective amino acid since, for example, feedback regulations no longer exist to the same extent or not at all. In addition it might be advantageously to combine the nucleic acids sequences of the invention containing the sequences shown in the respective line in Table I, application no. 4, column 5 or 8, preferably the coding region thereof, or homologs or fragments thereof, with genes which generally support or enhance the growth or yield of the target non-human organisms, for example genes which lead to faster growth rate of non human organism like microorganisms or plants or genes which produce stress-, pathogen-, or herbicide-resistant plants.

[32848] [0227.1.1.4] to [0239.1.1.4] for the disclosure of these paragraphs see [0227.1.1.1] to [0239.1.1.1] above.

[32849] In an embodiment of the present invention the nucleic acid construct of the present invention comprises a nucleic acid molecule as depicted in the respective line in Table I, application no. 4, column 5 or 8, preferably the coding region thereof, a fragment or a homolog thereof, and a plant promoter, such as the Big 35S promoter, the DC3 promoter, the PC Ubi promoter, the LegB4-promoter, the Super promoter, the USP promoter or the like. In another embodiment the nucleic acid construct of the present invention comprises a nucleic acid molecule as depicted in the respective line in Table I, application no. 4, column 5 or 8, preferably the coding region thereof, a fragment or a homolog thereof, and a plant promoter such as, for example, the USP, the LegB4-, the DC3 promoter or the ubiquitin promoter from parsley or other herein mentioned promoters. In a further embodiment the nucleic acid construct of the present invention comprises a nucleic acid molecule as depicted in the respective line in Table I, application no. 4, column 5 or 8, preferably the coding region thereof, a fragment or a homolog thereof, and a plant promoter, such as the Big 35S promoter, the PC Ubi promoter, the

[32850] Super promoter, the USP promoter or the like. In addition different terminators may advantageously be used in these nucleic acid constructs; examples for transcriptional termination are polyadenylation signals.

[32851] [0241.1.1.4] to [0245.1.1.4] for the disclosure of these paragraphs see [0241.1.1.1] to [0245.1.1.1] above.

[32852] Other preferred sequences for use in operable linkage in gene expression constructs are targeting sequences, which are required for targeting the gene product into specific cell compartments (for a review, see Kermode, Crit. Rev. Plant Sci. 15 (4), 285 (1996) and references cited therein), for example into the vacuole, the nucleus, all types of plastids, such as amyloplasts, chloroplasts, chromoplasts, the extracellular space, the mitochondria, the endoplasmic reticulum, elaioplasts, peroxisomes, glycosomes, and other compartments of cells or extracellular; preferred are sequences, which are involved in targeting to plastids as mentioned above. Sequences, which must be mentioned in this context are, in particular, the signal-peptide- or transit-peptide-encoding sequences which are known per se. For example, plastid-transit-peptide-encoding sequences enable the targeting of the expression product into the plastids of a plant cell. Targeting sequences are also known for eukaryotic and to a lower extent for prokaryotic organisms and can advantageously be operable linked with the nucleic acid molecule of the present invention as shown in Table I, application no. 4, columns 5 and 8, preferably the coding region thereof, or homologs or fragments thereof, and described herein to achieve an expression in one of said compartments or extracellular.

[32853] [0247.1.1.4] to [0266.1.1.4] for the disclosure of these paragraphs see [0247.1.1.1] to [0266.1.1.1] above.

[32854] An embodiment of the invention relates to a vector where the nucleic acid molecule according to the invention is linked operably to regulatory sequences which permit the expression in a prokaryotic or eukaryotic host.

[32855] A further embodiment of the invention relates to a vector in which a nucleic acid sequence encoding one of the polypeptides shown in the respective line in Table II, application no. 4, columns 5 or 8, or homologs or fragments thereof, is functionally linked to a targeting sequence such as a plastidial or mitochondrial targeting sequence. A further embodiment of the invention relates to a vector in which a nucleic acid sequence encoding one of the polypeptides shown in the respective line in Table II, application no. 4, columns 5 or 8, or homologs or fragments thereof, is functionally linked to (a) regulatory sequence which permit the expression in an organelle, such as plastids or mitochondria, preferably plastids.

[32856] A further embodiment of the invention relates to a vector which comprises a nucleic acid sequence encoding one of the polypeptides shown in the respective line in Table II, application no. 4, columns 5 or 8, or homologs or fragments thereof, but no additional targeting sequence.

[32857] [0268.1.1.4] to [0273.1.1.4] for the disclosure of these paragraphs see [0268.1.1.1] to [0273.1.1.1] above.

[32858] A further object of the invention relates to the use of a nucleic acid construct, e.g. an expression cassette, comprising one or more nucleic acid molecules encoding one or more polypeptides as depicted in the respective line(s) in Table II, application no. 4, columns 5 or 8, or homologs or fragments thereof, or comprising one or more nucleic acid molecules as depicted in the respective line(s) in Table I, application no. 4, columns 5 or 8, preferably the coding region thereof, or homologs or fragments thereof, or comprising a nucleic acid molecule hybridizing therewith for the transformation of a microorganism or a plant cell, plant tissues or a part of a plant.

[32859] In doing so, depending on the choice of promoter, the nucleic acid molecules shown in the respective line in Table I, application no. 4, column 5 or 8, preferably the coding region thereof, or homologs or fragments thereof, or the nucleic acid molecules encoding a polypeptide as depicted in the respective line in Table II, application no. 4, column 5 or 8, or homologs or fragments thereof, can be expressed in the whole plant or specifically e.g. in the leaves, in the seeds, the nodules, in roots, in the stem or other parts of the plant. Those transgenic plants overproducing sequences, e.g. as depicted in the respective line in Table I, application no. 4, column 5 or 8, preferably the coding region thereof, or homologs or fragments thereof, the plant cell, plant tissues, plants, the reproductive material thereof, or parts thereof are a further object of the present invention.

[32860] Within the framework of the present invention, the production of the threonine is due to the generation or over-expression of one or more polypeptides as depicted in the respective line(s) in Table II, application no. 4, column 5 or 8, or homologs or fragments thereof, or encoded by the corresponding nucleic acid molecules as depicted in the respective line(s) in Table I, application no. 4, column 5 or 8, preferably the coding region thereof, or homologs or fragments thereof, in the non-human organism according to the invention, advantageously in the transgenic microorganism or plant according to the invention, at least for the duration of at least one plant generation.

[32861] A constitutive expression of the polypeptide as depicted in the respective line in Table II, application no. 4, column 5 or 8, or homologs or fragments thereof, or encoded by the respective nucleic acid molecule as depicted in the respective line in Table I, application no. 4, column 5 or 8, preferably the coding region thereof, or homologs or fragments thereof, may be advantageous. On the other hand, an inducible expression may also appear desirable. Expression of the polypeptide sequences of the invention can be either directed to the cytosol or to the organelles, such as plastids or mitochondria, preferably the plastids of the host cells, preferably the plant cells, or non-targeted.

[32862] for the disclosure of this paragraph see [0278.1.1.1] above.

[32863] In a further embodiment the invention relates to a transgenic non-human organisms such as transgenic microorganism or transgenic plant comprising a nucleic acid molecule comprising
[32864] [1) a nucleic acid molecule selected from the group consisting of
   [32865] (a) a nucleic acid molecule encoding a polypeptide shown in Table II, application no. 4, column 5 or 8, preferably shown in Table II A, application no. 4, column 5, or in Table II A, application no. 4, column 8, or in Table II B, application no. 4, column 8, or a homolog or a fragment thereof;
   [32866] (b) a nucleic acid molecule shown in Table I, application no. 4, column 5 or 8, preferably shown in Table I A, application no. 4, column 5, or in Table I A, application no. 4, column 8, or in Table I B, application no. 4, column 8, preferably the coding region thereof, or a homolog or a fragment thereof;
   [32867] (c) a nucleic acid molecule, which, as a result of the degeneracy of the genetic code, can be derived from a polypeptide sequence depicted in column 5 or 8 of Table II, application no. 4, preferably shown in Table II A, application no. 4, column 5, or in Table II A, application no. 4, column 8, or in Table II B, application no. 4, column 8;
   [32868] (d) a nucleic acid molecule having at least 30% identity, preferably at least 40%, 50%, 60%, 70%, 75%, 80%, 85%, 90%, 95%, 96%, 97%, 98%, 99%, 99.5%, with the nucleic acid molecule sequence of a polynucleotide comprising the nucleic acid molecule shown in column 5 or 8 of Table I, application no. 4, preferably shown in Table I A, application no. 4, column 5, or in Table I A, application no. 4, column 8, or in Table I B, application no. 4, column 8, preferably the coding region thereof;
   [32869] (e) a nucleic acid molecule encoding a polypeptide having at least 30% identity, preferably at least 40%, 50% 60%, 70%, 75%, 80%, 85%, 90%, 95%, 96%, 97%, 98%, 99%, 99.5%, identity with the amino acid sequence of the polypeptide encoded by the nucleic acid molecule of (a), (b), (c) or (d);
   [32870] (f) a nucleic acid molecule which hybridizes with a nucleic acid molecule of (a), (b), (c), (d) or (e) under stringent hybridization conditions;
   [32871] (g) a nucleic acid molecule encoding a polypeptide which can be isolated with the aid of monoclonal or polyclonal antibodies made against a polypeptide encoded by one of the nucleic acid molecules of (a), (b), (c), (d), (e) or (f);
   [32872] (h) a nucleic acid molecule encoding a polypeptide comprising the consensus sequence or one or more polypeptide motifs as shown in column 8 of Table IV, application no. 4;
   [32873] (i) a nucleic acid molecule encoding a polypeptide having the activity represented by a respective protein as depicted in column 5 of Table II, application no. 4;
   [32874] (j) a nucleic acid molecule comprising a polynucleotide which is obtained by amplifying a cDNA library or a genomic library using the primers in Table III, application no. 4, column 8;

[32875] and
[32876] (k) nucleic acid molecule which is obtainable by screening a suitable nucleic acid library, especially a cDNA library and/or a genomic library, under stringent hybridization conditions with a probe comprising one of the sequences of the nucleic acid molecule of (a), (b), (c), (d), (e), (f), (g), (h), (i) or (j) or with a fragment of at least 15 nt, preferably 20 nt, 30 nt, 50 nt, 100 nt, 200 nt,500 nt, 1000 nt, 1500 nt, 2000 nt or 3000 nt of the nucleic acid molecule characterized in (a), (b), (c), (d), (e), (f), (g), (h), (i) or (j);
[32877] or a nucleic acid molecule comprising a sequence which is complementary thereto; and, if desired
[32878] 2) nucleic acid molecule encoding a transit peptide, preferably encoding a plastidal transit peptide or a mitochondrial transit peptide;
   which are operable linked;]
   or comprising an expression cassette comprising
[32879] [0) a promoter, preferably a promoter selected from the group consisting of Big35S, PCUbi, Super and USP; and
[32880] 1) a nucleic acid molecule selected from the group consisting of
   [32881] (a) a nucleic acid molecule encoding a polypeptide shown in Table II, application no. 4, column 5 or 8, preferably shown in Table II A, application no. 4, column 5, or in Table II A, application no. 4, column 8, or in Table II B, application no. 4, column 8, or a homolog or a fragment thereof;
   [32882] (b) a nucleic acid molecule shown in Table I, application no. 4, column 5 or 8, preferably shown in Table I A, application no. 4, column 5, or in Table I A, application no. 4, column 8, or in Table I B, application no. 4, column 8, preferably the coding region thereof, or a homolog or a fragment thereof;
   [32883] (c) a nucleic acid molecule, which, as a result of the degeneracy of the genetic code, can be derived from a polypeptide sequence depicted in column 5 or 8 of Table II, application no. 4, preferably shown in Table II A, application no. 4, column 5, or in Table II A, application no. 4, column 8, or in Table II B, application no. 4, column 8;
   [32884] (d) a nucleic acid molecule having at least 30% identity, preferably at least 40%, 50%, 60%, 70%, 75%, 80%, 85%, 90%, 95%, 96%, 97%, 98%, 99%, 99.5%, with the nucleic acid molecule sequence of a polynucleotide comprising the nucleic acid molecule shown in column 5 or 8 of Table I, application no. 4, preferably shown in Table I A, application no. 4, column 5, or in Table I A, application no. 4, column 8, or in Table I B, application no. 4, column 8, preferably the coding region thereof;
   [32885] (e) a nucleic acid molecule encoding a polypeptide having at least 30% identity, preferably at least 40%, 50% 60%, 70%, 75%, 80%, 85%, 90%, 95%, 96%, 97%, 98%, 99%, 99.5%, identity with the amino acid sequence of the polypeptide encoded by the nucleic acid molecule of (a), (b), (c) or (d);
   [32886] (f) a nucleic acid molecule which hybridizes with a nucleic acid molecule of (a), (b), (c), (d) or (e) under stringent hybridization conditions;
   [32887] (g) a nucleic acid molecule encoding a polypeptide which can be isolated with the aid of monoclonal or polyclonal antibodies made against a polypeptide encoded by one of the nucleic acid molecules of (a), (b), (c), (d), (e) or (f);
   [32888] (h) a nucleic acid molecule encoding a polypeptide comprising the consensus sequence or one or more polypeptide motifs as shown in column 8 of Table IV, application no. 4;
   [32889] (i) a nucleic acid molecule encoding a polypeptide having the activity represented by a respective protein as depicted in column 5 of Table II, application no. 4;
   [32890] (j) a nucleic acid molecule comprising a polynucleotide which is obtained by amplifying a cDNA library or a genomic library using the primers in Table III, application no. 4, column 8;
   [32891] and
   [32892] (k) nucleic acid molecule which is obtainable by screening a suitable nucleic acid library, especially a cDNA library and/or a genomic library, under stringent hybridization conditions with a probe comprising one of the sequences of the nucleic acid molecule of (a), (b), (c), (d), (e), (f), (g), (h), (i) or (j) or with a fragment of at least 15 nt, preferably 20 nt, 30 nt, 50 nt, 100 nt, 200 nt,500 nt, 1000 nt, 1500 nt, 2000 nt or 3000 nt of the nucleic acid molecule characterized in (a), (b), (c), (d), (e), (f), (g), (h), (i) or (j);
   [32893] or a nucleic acid molecule comprising a sequence which is complementary thereto;
      and, if desired
[32894] 2) nucleic acid molecule encoding a transit peptide, preferably encoding a plastidal transit peptide or a mitochondrial transit peptide;
   which are operable linked;]

[32895] or comprising or being transformed by a vector comprising
[32896] [1) a nucleic acid molecule selected from the group consisting of
   [32897] (a) a nucleic acid molecule encoding a polypeptide shown in Table II, application no. 4, column 5 or 8, preferably shown in Table II A, application no. 4, column 5, or in Table II A, application no. 4, column 8, or in Table II B, application no. 4, column 8, or a homolog or a fragment thereof;
   [32898] (b) a nucleic acid molecule shown in Table I, application no. 4, column 5 or 8, preferably shown in Table I A, application no. 4, column 5, or in Table I A, application no. 4, column 8, or in Table I B, application no. 4, column 8, preferably the coding region thereof, or a homolog or a fragment thereof;
   [32899] (c) a nucleic acid molecule, which, as a result of the degeneracy of the genetic code, can be derived from a polypeptide sequence depicted in column 5 or 8 of Table II, application no. 4, preferably shown in Table II A, application no. 4, column 5, or in Table II A, application no. 4, column 8, or in Table II B, application no. 4, column 8;
   [32900] (d) a nucleic acid molecule having at least 30% identity, preferably at least 40%, 50%, 60%, 70%, 75%, 80%, 85%, 90%, 95%, 96%, 97%, 98%, 99%, 99.5%, with the nucleic acid molecule sequence of a polynucleotide comprising the nucleic acid molecule shown in column 5 or 8 of Table I, application no. 4, preferably shown in Table I A, application no. 4, column 5, or in Table I A, application no. 4, column 8, or in Table I B, application no. 4, column 8, preferably the coding region thereof;
   [32901] (e) a nucleic acid molecule encoding a polypeptide having at least 30% identity, preferably at least 40%, 50% 60%, 70%, 75%, 80%, 85%, 90%, 95%, 96%, 97%, 98%, 99%, 99.5%, identity with the amino acid sequence of the polypeptide encoded by the nucleic acid molecule of (a), (b), (c) or (d);
   [32902] (f) a nucleic acid molecule which hybridizes with a nucleic acid molecule of (a), (b), (c), (d) or (e) under stringent hybridization conditions;
   [32903] (g) a nucleic acid molecule encoding a polypeptide which can be isolated with the aid of monoclonal or polyclonal antibodies made against a polypeptide encoded by one of the nucleic acid molecules of (a), (b), (c), (d), (e) or (f);
   [32904] (h) a nucleic acid molecule encoding a polypeptide comprising the consensus sequence or one or more polypeptide motifs as shown in column 8 of Table IV, application no. 4;
   [32905] (i) a nucleic acid molecule encoding a polypeptide having the activity represented by a respective protein as depicted in column 5 of Table II, application no. 4;
   [32906] (j) a nucleic acid molecule comprising a polynucleotide which is obtained by amplifying a cDNA library or a genomic library using the primers in Table III, application no. 4, column 8;
   [32907] and
   [32908] (k) nucleic acid molecule which is obtainable by screening a suitable nucleic acid library, especially a cDNA library and/or a genomic library, under stringent hybridization conditions with a probe comprising one of the sequences of the nucleic acid molecule of (a), (b), (c), (d), (e), (f), (g), (h), (i) or (j) or with a fragment of at least 15 nt, preferably 20 nt, 30 nt, 50 nt, 100 nt, 200 nt,500 nt, 1000 nt, 1500 nt, 2000 nt or 3000 nt of the nucleic acid molecule characterized in (a), (b), (c), (d), (e), (f), (g), (h), (i) or (j);
   [32909] or a nucleic acid molecule comprising a sequence which is complementary thereto;]
      as well as respective transgenic cells, tissue, parts of such non-human organism, e.g. plant cells, plant tissue, part of plants, like leaves, roots, stems, blossoms, seeds, fruits, pollen and the like.
      (All the references to Tables I to IV are references to the corresponding lines of Tables I to IV.)

[32910] In a preferred embodiment of said transgenic non-human organism said nucleic acid molecule according to 1 (a), (b), (c), (d), (e), (f), (g), (h), (i), (j) or (k) encodes a polypeptide which has the activity of the respective polypeptide represented by a protein comprising a polypeptide as depicted in the respective line in column 5 of Table II, application no. 4.

[32911] In another preferred embodiment of said transgenic non-human organism said nucleic acid molecule according to 1 (a), (b), (c), (d), (e), (f), (g), (h), (i), (j) or (k) confers a generation or an increase of the respective fine chemical in a non-human organism or a part thereof as compared to a corresponding wild-type non-human organism or part thereof.

[32912] In another preferred embodiment of said transgenic non-human organism said nucleic acid molecule according to 1 (a), (b), (c), (d), (e), (f), (g), (h), (i), (j) or (k) encodes a polypeptide which has the activity of the respective polypeptide represented by a protein as depicted in the respective line in column 5 of Table II application no. 4 and confers a generation or an increase of the respective fine chemical in a non-human organism or a part thereof as compared to a corresponding wild-type non-human organism or part thereof.

[32913] In another embodiment of said transgenic non-human organism the expression cassette comprises 2) a nucleic acid molecule encoding a transit peptide, preferably encoding a plastidal transit peptide, especially in case in column 6 of Table I, application no. 4, in the same line as of the respective nucleic acid molecule according to 1) “plastidic” is depicted, or encoding a mitochondrial transit peptide, especially in case in column 6 of Table I, application no. 4, in the same line as of the respective nucleic acid molecule according to 1) “mitochondrial” is depicted.

[32914] In another embodiment of said transgenic non-human organism the expression cassette does not comprise 2) a nucleic acid molecule encoding a transit peptide, especially in case in column 6 of Table I, application no. 4, in the same line as of the respective nucleic acid molecule according to 1) “non-targeted” is depicted.

[32915] In another embodiment of said transgenic non-human organism said vector comprises beneath said nucleic acid molecule according to 1 (a), (b), (c), (d), (e), (f), (g), (h), (i), (j) or (k), a promoter, preferably a promoter selected from the group consisting of Big35S, PCUbi, Super and USP, which are operable linked.

[32916] In a preferred embodiment of said transgenic non-human organism said vector comprises beneath said nucleic acid molecule according to 1 (a), (b), (c), (d), (e), (f), (g), (h), (i), (j) or (k), a promoter, preferably a promoter selected from the group consisting of Big35S, PCUbi, Super and USP, which are operable linked; and said nucleic acid molecule according to 1 (a), (b), (c), (d), (e), (f), (g), (h), (i), (j) or (k) encodes a polypeptide which has the activity of the respective polypeptide represented by a protein comprising a polypeptide as depicted in the respective line in column 5 of Table II, application no. 4.

[32917] In another preferred embodiment of said transgenic non-human organism said vector comprises beneath said nucleic acid molecule according to 1 (a), (b), (c), (d), (e), (f), (g), (h), (i), (j) or (k), a promoter, preferably a promoter selected from the group consisting of Big35S, PCUbi, Super and USP, which are operable linked; and said nucleic acid molecule according to 1 (a), (b), (c), (d), (e), (f), (g), (h), (i), (j) or (k) confers a generation or an increase of the respective fine chemical in a non-human organism or a part thereof as compared to a corresponding wild-type non-human organism or part thereof.

[32918] In another preferred embodiment of said transgenic non-human organism said vector comprises beneath said nucleic acid molecule according to 1 (a), (b), (c), (d), (e), (f), (g), (h), (i), (j) or (k), a promoter, preferably a promoter selected from the group consisting of Big35S, PCUbi, Super and USP, which are operable linked; and said nucleic acid molecule according to 1 (a), (b), (c), (d), (e), (f), (g), (h), (i), (j) or (k) encodes a polypeptide which has the activity of the respective polypeptide represented by a protein as depicted in the respective line in column 5 of Table II, application no. 4, and confers a generation or an increase of the respective fine chemical in a non-human organism or a part thereof as compared to a corresponding wild-type non-human organism or part thereof.

[32919] In another embodiment of said transgenic non-human organism said vector comprises beneath said nucleic acid molecule according to 1 (a), (b), (c), (d), (e), (f), (g), (h), (i), (j) or (k), a nucleic acid molecule encoding a transit peptide, preferably encoding a plastidal transit peptide, especially in case in column 6 of Table I, application no. 4, in the same line as of the respective nucleic acid molecule according to 1) “plastidic” is depicted, or encoding a mitochondrial transit peptide, especially in case in column 6 of Table I, application no. 4, in the same line as of the respective nucleic acid molecule according to 1) “mitochondrial” is depicted, which are operable linked.

[32920] In another embodiment of said transgenic non-human organism said vector does not comprise beneath said nucleic acid molecule according to 1 (a), (b), (c), (d), (e), (f), (g), (h), (i), (j) or (k), a nucleic acid molecule encoding a transit peptide in case in column 6 of Table I, application no. 4, in the same line as of the respective nucleic acid molecule according to 1) “non-targeted” is depicted, which are operable linked.

[32921] In another embodiment of said transgenic non-human organism said vector comprises beneath said nucleic acid molecule according to 1 (a), (b), (c), (d), (e), (f), (g), (h), (i), (j) or (k), and a promoter, preferably a promoter selected from the group consisting of Big35S, PCUbi, Super and USP; a nucleic acid molecule encoding a transit peptide, preferably encoding a plastidal transit peptide, especially in case in column 6 of Table I, application no. 4, in the same line as of the respective nucleic acid molecule according to 1) “plastidic” is depicted, or encoding a mitochondrial transit peptide, especially in case in column 6 of Table I, application no. 4, in the same line as of the respective nucleic acid molecule according to 1) “mitochondrial” is depicted, which are operable linked.

[32922] In another embodiment of said transgenic non-human organism said vector does not comprise beneath said nucleic acid molecule according to 1 (a), (b), (c), (d), (e), (f), (g), (h), (i), (j) or (k), and a promoter, preferably a promoter selected from the group consisting of Big35S, PCUbi, Super and USP; a nucleic acid molecule encoding a transit peptide, especially in case in column 6 of Table I, application no. 4, in the same line as of the respective nucleic acid molecule according to 1) “non-targeted” is depicted, which are operable linked.

[32923] In another embodiment of said transgenic non-human organism said vector comprises beneath said nucleic acid molecule according to 1 (a), (b), (c), (d), (e), (f), (g), (h), (i), (j) or (k), and a promoter, preferably a promoter selected from the group consisting of Big35S, PCUbi, Super and USP; a nucleic acid molecule encoding a transit peptide, preferably encoding a plastidal transit peptide, especially in case in column 6 of Table I, application no. 4, in the same line as of the respective nucleic acid molecule according to 1) “plastidic” is depicted, or encoding a mitochondrial transit peptide, especially in case in column 6 of Table I, application no. 4, in the same line as of the respective nucleic acid molecule according to 1) “mitochondrial” is depicted, which are operable linked; and wherein said nucleic acid molecule according to 1 (a), (b), (c), (d), (e), (f), (g), (h), (i), (j) or (k) encodes a polypeptide which has the activity of the respective polypeptide represented by a protein comprising a polypeptide as depicted in the respective line in column 5 of Table II, application no. 4.

[32924] In another embodiment of said transgenic non-human organism said vector does not comprise beneath said nucleic acid molecule according to 1 (a), (b), (c), (d), (e), (f), (g), (h), (i), (j) or (k), and a promoter, preferably a promoter selected from the group consisting of Big35S, PCUbi, Super and USP; a nucleic acid molecule encoding a transit peptide, especially in case in column 6 of Table I, application no. 4, in the same line as of the respective nucleic acid molecule according to 1) “non-targeted” is depicted, which are operable linked; and wherein said nucleic acid molecule according to 1 (a), (b), (c), (d), (e), (f), (g), (h), (i), (j) or (k) encodes a polypeptide which has the activity of the respective polypeptide represented by a protein comprising a polypeptide as depicted in the respective line in column 5 of Table II, application no. 4.

[32925] In another embodiment of said transgenic non-human organism said vector comprises beneath said nucleic acid molecule according to 1 (a), (b), (c), (d), (e), (f), (g), (h), (i), (j) or (k), and a promoter, preferably a promoter selected from the group consisting of Big35S, PCUbi, Super and USP; a nucleic acid molecule encoding a transit peptide, preferably encoding a plastidal transit peptide, especially in case in column 6 of Table I, application no. 4, in the same line as of the respective nucleic acid molecule according to 1) “plastidic” is depicted, or encoding a mitochondrial transit peptide, especially in case in column 6 of Table I, application no. 4, in the same line as of the respective nucleic acid molecule according to 1) “mitochondrial” is depicted, which are operable linked; and wherein said nucleic acid molecule according to 1 (a), (b), (c), (d), (e), (f), (g), (h), (i), (j) or (k) confers a generation or an increase of the respective fine chemical in a non-human organism or a part thereof as compared to a corresponding wild-type non-human organism or part thereof.

[32926] In another embodiment of said transgenic non-human organism said vector does not comprise beneath said nucleic acid molecule according to 1 (a), (b), (c), (d), (e), (f), (g), (h), (i), (j) or (k), and a promoter, preferably a promoter selected from the group consisting of Big35S, PCUbi, Super and USP; a nucleic acid molecule encoding a transit peptide, especially in case in column 6 of Table I, application no. 4, in the same line as of the respective nucleic acid molecule according to 1) “non-targeted” is depicted, which are operable linked; and wherein said nucleic acid molecule according to 1 (a), (b), (c), (d), (e), (f), (g), (h), (i), (j) or (k) confers a generation or an increase of the respective fine chemical in a non-human organism or a part thereof as compared to a corresponding wild-type non-human organism or part thereof.

[32927] In another embodiment of said transgenic non-human organism said vector comprises beneath said nucleic acid molecule according to 1 (a), (b), (c), (d), (e), (f), (g), (h), (i), (j) or (k), and a promoter, preferably a promoter selected from the group consisting of Big35S, PCUbi, Super and USP; a nucleic acid molecule encoding a transit peptide, preferably encoding a plastidal transit peptide, especially in case in column 6 of Table I, application no. 4, in the same line as of the respective nucleic acid molecule according to 1) “plastidic” is depicted, or encoding a mitochondrial transit peptide, especially in case in column 6 of Table I, application no. 4, in the same line as of the respective nucleic acid molecule according to 1) “mitochondrial” is depicted, which are operable linked; and wherein said nucleic acid molecule according to 1 (a), (b), (c), (d), (e), (f), (g), (h), (i), (j) or (k) encodes a polypeptide which has the activity of the respective polypeptide represented by a protein as depicted in the respective line in column 5 of Table II application no. 4 and confers a generation or an increase of the respective fine chemical in a non-human organism or a part thereof as compared to a corresponding wild-type non-human organism or part thereof.

[32928] In another embodiment of said transgenic non-human organism said vector does not comprise beneath said nucleic acid molecule according to 1 (a), (b), (c), (d), (e), (f), (g), (h), (i), (j) or (k), and a promoter, preferably a promoter selected from the group consisting of Big35S, PCUbi, Super and USP; a nucleic acid molecule encoding a transit peptide, especially in case in column 6 of Table I, application no. 4, in the same line as of the respective nucleic acid molecule according to 1) “non-targeted” is depicted, which are operable linked; and wherein said nucleic acid molecule according to 1 (a), (b), (c), (d), (e), (f), (g), (h), (i), (j) or (k) encodes a polypeptide which has the activity of the respective polypeptide represented by a protein as depicted in the respective line in column 5 of Table II application no. 4 (in the same line) and confers a generation or an increase of the respective fine chemical in a non-human organism or a part thereof as compared to a corresponding wild-type non-human organism or part thereof.

[32929] In a preferred embodiment of said transgenic non-human organism said nucleic acid molecule according to 1 (a), (b), (c), (d), (e), (f), (g), (h), (i), (j) or (k), said promoter and optionally said nucleic acid molecule encoding a transit peptide are encompassed in an expression cassette in said vector. Accordingly an embodiment the invention provides a non-human organism comprising or being transformed by a vector comprising an expression cassette comprising said nucleic acid molecule according to 1 (a), (b), (c), (d), (e), (f), (g), (h), (i), (j) or (k), said promoter and optionally said a nucleic acid molecule encoding a transit peptide, operable linked. Said expression cassette may encompass a terminator, too.

[32930] In a further embodiment the invention relates to a transgenic non-human organisms such as transgenic microorganism or transgenic plant comprising a nucleic acid molecule comprising
[32931] [1) a nucleic acid molecule selected from the group consisting of P1 (a) a nucleic acid molecule encoding a polypeptide shown in Table II, application no. 4, column 5 or 8, preferably shown in Table II A, application no. 4, column 5, or in Table II A, application no. 4, column 8, or in Table II B, application no. 4, column 8, or a homolog or a fragment thereof; P1 (b) a nucleic acid molecule shown in Table I, application no. 4, column 5 or 8, preferably shown in Table I A, application no. 4, column 5, or in Table I A, application no. 4, column 8, or in Table I B, application no. 4, column 8, preferably the coding region thereof, or a homolog or a fragment thereof; P1 (c) a nucleic acid molecule, which, as a result of the degeneracy of the genetic code, can be derived from a polypeptide sequence depicted in column 5 or 8 of Table II, application no. 4, preferably shown in Table II A, application no. 4, column 5, or in Table II A, application no. 4, column 8, or in Table II B, application no. 4, column 8;
   [32932] (d) a nucleic acid molecule having at least 30% identity, preferably at least 40%, 50%, 60%, 70%, 75%, 80%, 85%, 90%, 95%, 96%, 97%, 98%, 99%, 99.5%, with the nucleic acid molecule sequence of a polynucleotide comprising the nucleic acid molecule shown in column 5 or 8 of Table I, application no. 4, preferably shown in Table I A, application no. 4, column 5, or in Table I A, application no. 4, column 8, or in Table I B, application no. 4, column 8, preferably the coding region thereof;
   [32933] (e) a nucleic acid molecule encoding a polypeptide having at least 30% identity, preferably at least 40%, 50% 60%, 70%, 75%, 80%, 85%, 90%, 95%, 96%, 97%, 98%, 99%, 99.5%, identity with the amino acid sequence of the polypeptide encoded by the nucleic acid molecule of (a), (b), (c) or (d);
   [32934] (f) a nucleic acid molecule which hybridizes with a nucleic acid molecule of (a), (b), (c), (d) or (e) under stringent hybridization conditions;
   [32935] (g) a nucleic acid molecule encoding a polypeptide which can be isolated with the aid of monoclonal or polyclonal antibodies made against a polypeptide encoded by one of the nucleic acid molecules of (a), (b), (c), (d), (e) or (f);
   [32936] (h) a nucleic acid molecule encoding a polypeptide comprising the consensus sequence or one or more polypeptide motifs as shown in column 8 of Table IV, application no. 4;
   [32937] (i) a nucleic acid molecule encoding a polypeptide having the activity represented by a respective protein as depicted in column 5 of Table II, application no. 4;
   [32938] (j) a nucleic acid molecule comprising a polynucleotide which is obtained by amplifying a cDNA library or a genomic library using the primers in Table III, application no. 4, column 8;
   [32939] and
   [32940] (k) nucleic acid molecule which is obtainable by screening a suitable nucleic acid library, especially a cDNA library and/or a genomic library, under stringent hybridization conditions with a probe comprising one of the sequences of the nucleic acid molecule of (a), (b), (c), (d), (e), (f), (g), (h), (i) or (j) or with a fragment of at least 15 nt, preferably 20 nt, 30 nt, 50 nt, 100 nt, 200 nt,500 nt, 1000 nt, 1500 nt, 2000 nt or 3000 nt of the nucleic acid molecule characterized in (a), (b), (c), (d), (e), (f), (g), (h), (i) or (j);
   [32941] or a nucleic acid molecule comprising a sequence which is complementary thereto;
      and, if desired
[32942] 2) nucleic acid molecule encoding a transit peptide, preferably encoding a plastidal transit peptide or a mitochondrial transit peptide; which are operable linked;]

[32943] or comprising an expression cassette comprising
[32944] [0) a promoter, preferably a promoter selected from the group consisting of Big35S, PCUbi, Super and USP; and
[32945] 1) a nucleic acid molecule selected from the group consisting of
   [32946] (a) a nucleic acid molecule encoding a polypeptide shown in Table II, application no. 4, column 5 or 8, preferably shown in Table II A, application no. 4, column 5, or in Table II A, application no. 4, column 8, or in Table II B, application no. 4, column 8, or a homolog or a fragment thereof;
   [32947] (b) a nucleic acid molecule shown in Table I, application no. 4, column 5 or 8, preferably shown in Table I A, application no. 4, column 5, or in Table I A, application no. 4, column 8, or in Table I B, application no. 4, column 8, preferably the coding region thereof, or a homolog or a fragment thereof;
   [32948] (c) a nucleic acid molecule, which, as a result of the degeneracy of the genetic code, can be derived from a polypeptide sequence depicted in column 5 or 8 of Table II, application no. 4, preferably shown in Table II A, application no. 4, column 5, or in Table II A, application no. 4, column 8, or in Table II B, application no. 4, column 8;
   [32949] (d) a nucleic acid molecule having at least 30% identity, preferably at least 40%, 50%, 60%, 70%, 75%, 80%, 85%, 90%, 95%, 96%, 97%, 98%, 99%, 99.5%, with the nucleic acid molecule sequence of a polynucleotide comprising the nucleic acid molecule shown in column 5 or 8 of Table I, application no. 4, preferably shown in Table I A, application no. 4, column 5, or in Table I A, application no. 4, column 8, or in Table I B, application no. 4, column 8, preferably the coding region thereof;
   [32950] (e) a nucleic acid molecule encoding a polypeptide having at least 30% identity, preferably at least 40%, 50% 60%, 70%, 75%, 80%, 85%, 90%, 95%, 96%, 97%, 98%, 99%, 99.5%, identity with the amino acid sequence of the polypeptide encoded by the nucleic acid molecule of (a), (b), (c) or (d);
   [32951] (f) a nucleic acid molecule which hybridizes with a nucleic acid molecule of (a), (b), (c), (d) or (e) under stringent hybridization conditions;
   [32952] (g) a nucleic acid molecule encoding a polypeptide which can be isolated with the aid of monoclonal or polyclonal antibodies made against a polypeptide encoded by one of the nucleic acid molecules of (a), (b), (c), (d), (e) or (f);
   [32953] (h) a nucleic acid molecule encoding a polypeptide comprising the consensus sequence or one or more polypeptide motifs as shown in column 8 of Table IV, application no. 4;
   [32954] (i) a nucleic acid molecule encoding a polypeptide having the activity represented by a respective protein as depicted in column 5 of Table II, application no. 4;
   [32955] (j) a nucleic acid molecule comprising a polynucleotide which is obtained by amplifying a cDNA library or a genomic library using the primers in Table III, application no. 4, column 8;
   [32956] and
   [32957] (k) nucleic acid molecule which is obtainable by screening a suitable nucleic acid library, especially a cDNA library and/or a genomic library, under stringent hybridization conditions with a probe comprising one of the sequences of the nucleic acid molecule of (a), (b), (c), (d), (e), (f), (g), (h), (i) or (j) or with a fragment of at least 15 nt, preferably 20 nt, 30 nt, 50 nt, 100 nt, 200 nt,500 nt, 1000 nt, 1500 nt, 2000 nt or 3000 nt of the nucleic acid molecule characterized in (a), (b), (c), (d), (e), (f), (g), (h), (i) or (j);
   [32958] or a nucleic acid molecule comprising a sequence which is complementary thereto;]
      and, if desired
[32959] 2) nucleic acid molecule encoding a transit peptide, preferably encoding a plastidal transit peptide or a mitochondrial transit peptide;
   which are operable linked;]
   or comprising or being transformed by a vector comprising
[32960] [1) a nucleic acid molecule selected from the group consisting of
   [32961] (a) a nucleic acid molecule encoding a polypeptide shown in Table II, application no. 4, column 5 or 8, preferably shown in Table II A, application no. 4, column 5, or in Table II A, application no. 4, column 8, or in Table II B, application no. 4, column 8, or a homolog or a fragment thereof;
   [32962] (b) a nucleic acid molecule shown in Table I, application no. 4, column 5 or 8, preferably shown in Table I A, application no. 4, column 5, or in Table I A, application no. 4, column 8, or in Table I B, application no. 4, column 8, preferably the coding region thereof, or a homolog or a fragment thereof;
   [32963] (c) a nucleic acid molecule, which, as a result of the degeneracy of the genetic code, can be derived from a polypeptide sequence depicted in column 5 or 8 of Table II, application no. 4, preferably shown in Table II A, application no. 4, column 5, or in Table II A, application no. 4, column 8, or in Table II B, application no. 4, column 8;
   [32964] (d) a nucleic acid molecule having at least 30% identity, preferably at least 40%, 50%, 60%, 70%, 75%, 80%, 85%, 90%, 95%, 96%, 97%, 98%, 99%, 99.5%, with the nucleic acid molecule sequence of a polynucleotide comprising the nucleic acid molecule shown in column 5 or 8 of Table I, application no. 4, preferably shown in Table I A, application no. 4, column 5, or in Table I A, application no. 4, column 8, or in Table I B, application no. 4, column 8, preferably the coding region thereof;
   [32965] (e) a nucleic acid molecule encoding a polypeptide having at least 30% identity, preferably at least 40%, 50% 60%, 70%, 75%, 80%, 85%, 90%, 95%, 96%, 97%, 98%, 99%, 99.5%, identity with the amino acid sequence of the polypeptide encoded by the nucleic acid molecule of (a), (b), (c) or (d);
   [32966] (f) a nucleic acid molecule which hybridizes with a nucleic acid molecule of (a), (b), (c), (d) or (e) under stringent hybridization conditions;
   [32967] (g) a nucleic acid molecule encoding a polypeptide which can be isolated with the aid of monoclonal or polyclonal antibodies made against a polypeptide encoded by one of the nucleic acid molecules of (a), (b), (c), (d), (e) or (f);
   [32968] (h) a nucleic acid molecule encoding a polypeptide comprising the consensus sequence or one or more polypeptide motifs as shown in column 8 of Table IV, application no. 4;
   [32969] (i) a nucleic acid molecule encoding a polypeptide having the activity represented by a respective protein as depicted in column 5 of Table II, application no. 4;
   [32970] (j) a nucleic acid molecule comprising a polynucleotide which is obtained by amplifying a cDNA library or a genomic library using the primers in Table III, application no. 4, column 8;
   [32971] and
   [32972] (k) nucleic acid molecule which is obtainable by screening a suitable nucleic acid library, especially a cDNA library and/or a genomic library, under stringent hybridization conditions with a probe comprising one of the sequences of the nucleic acid molecule of (a), (b), (c), (d), (e), (f), (g), (h), (i) or (j) or with a fragment of at least 15 nt, preferably 20 nt, 30 nt, 50 nt, 100 nt, 200 nt,500 nt, 1000 nt, 1500 nt, 2000 nt or 3000 nt of the nucleic acid molecule characterized in (a), (b), (c), (d), (e), (f), (g), (h), (i) or (j);
   [32973] or a nucleic acid molecule comprising a sequence which is complementary thereto;]
      whereby, preferably, the nucleic acid molecule according to 1 (a), (b), (c), (d), (e), (f), (g), (h), (i), (j) or (k) distinguishes over the sequence depicted in Table I A and/or I B, application no. 4, column 5 or 8, or the coding regions thereof, by one or more nucleotides (especially but not exceeding 5%, preferably 4%, 3%, 2%, 1%, 0.5%, 0.2% or 0.1%). In an embodiment, the nucleic acid molecule of the invention does not consist of the sequence shown in Table I A and/or I B, application no. 4, column 5 or 8, or the coding region thereof. In another embodiment, the nucleic acid molecule of the present invention, preferably the coding region thereof, is at least 30%, 40%, 50%, 60%, 70%, 80%, 90%, 95% identical but less than 100%, 99.999%, 99.99%, 99.9%, 99%, 98%, 97%, 96% or 95% identical to the sequence shown in Table I A and/or I B, application no. 4, column 5 or 8, or the coding region thereof, respectively. In a further embodiment the nucleic acid molecule does not encode the polypeptide sequence shown in Table II A and/or II B, application no. 4, column 5 or 8 but homologs thereof. Accordingly, in one embodiment, the nucleic acid molecule of the present invention encodes in one embodiment a polypeptide which differs at least in one or more amino acids (especially but not exceeding 5%, preferably 4%, 3%, 2%, 1%, 0.5%, 0.2% or 0.1%) from the polypeptide shown in Table II, application no. 4, column 5 or 8 and does not encode a protein of the sequence shown in Table II A and/or II B, application no. 4, column 5 or 8. Accordingly, in one embodiment, the protein encoded by a sequence of a nucleic acid according to 1 (a), (b), (c), (d), (e), (f), (g), (h), (i), (j) or (k) does not consist of the sequence shown in Table I A and/or I B, application no. 4, column 5 or 8, or the coding region thereof. In a further embodiment, the protein of the present invention is at least 30%, 40%, 50%, 60%, 70%, 80%, 90%, 95% identical to protein sequence depicted in Table II A and/or II B, application no. 4, column 5 or 8 but less than 100%, preferably less than 99.999%, 99.99%, 99.9%, 99%, 98%, 97%, 96% or 95% identical to the sequence shown in Table II A and/or II B, application no. 4, column 5 or 8;
      as well as respective transgenic cells, tissue, parts of such non-human organism, e.g. plant cells, plant tissue, part of plants, like leaves, roots, stems, blossoms, seeds, fruits, pollen and the like.
      (All the references to Tables I to IV are references to the corresponding lines of Tables I to IV.)

[32974] In a preferred embodiment of said transgenic non-human organism said nucleic acid molecule according to 1 (a), (b), (c), (d), (e), (f), (g), (h), (i), (j) or (k) encodes a polypeptide which has the activity of the respective polypeptide represented by a protein comprising a polypeptide as depicted in the respective line in column 5 of Table II, application no. 4.

[32975] In another preferred embodiment of said transgenic non-human organism said nucleic acid molecule according to 1 (a), (b), (c), (d), (e), (f), (g), (h), (i), (j) or (k) confers a generation or an increase of the respective fine chemical in a non-human organism or a part thereof as compared to a corresponding wild-type non-human organism or part thereof.

[32976] In another preferred embodiment of said transgenic non-human organism said nucleic acid molecule according to 1 (a), (b), (c), (d), (e), (f), (g), (h), (i), (j) or (k) encodes a polypeptide which has the activity of the respective polypeptide represented by a protein as depicted in the respective line in column 5 of Table II application no. 4 and confers a generation or an increase of the respective fine chemical in a non-human organism or a part thereof as compared to a corresponding wild-type non-human organism or part thereof.

[32977] In another embodiment of said transgenic non-human organism the expression cassette comprises 2) a nucleic acid molecule encoding a transit peptide, preferably encoding a plastidal transit peptide, especially in case in column 6 of Table I, application no. 4, in the same line as of the respective nucleic acid molecule according to 1) “plastidic” is depicted, or encoding a mitochondrial transit peptide, especially in case in column 6 of Table I, application no. 4, in the same line as of the respective nucleic acid molecule according to 1) “mitochondrial” is depicted.

[32978] In another embodiment thereof the expression cassette does not comprise 2) a nucleic acid molecule encoding a transit peptide, especially in case in column 6 of Table I, application no. 4, in the same line as of the respective nucleic acid molecule according to 1) “non-targeted” is depicted.

[32979] In another embodiment of said transgenic non-human organism said vector comprises beneath said nucleic acid molecule according to 1 (a), (b), (c), (d), (e), (f), (g), (h), (i), (j) or (k), a promoter, preferably a promoter selected from the group consisting of Big35S, PCUbi, Super and USP, which are operable linked.

[32980] In a preferred embodiment of said transgenic non-human organism said vector comprises beneath said nucleic acid molecule according to 1 (a), (b), (c), (d), (e), (f), (g), (h), (i), (j) or (k), a promoter, preferably a promoter selected from the group consisting of Big35S, PCUbi, Super and USP, which are operable linked; and said nucleic acid molecule according to 1 (a), (b), (c), (d), (e), (f), (g), (h), (i), (j) or (k) encodes a polypeptide which has the activity of the respective polypeptide represented by a protein comprising a polypeptide as depicted in the respective line in column 5 of Table II, application no. 4.

[32981] In another preferred embodiment of said transgenic non-human organism said vector comprises beneath said nucleic acid molecule according to 1 (a), (b), (c), (d), (e), (f), (g), (h), (i), (j) or (k), a promoter, preferably a promoter selected from the group consisting of Big35S, PCUbi, Super and USP, which are operable linked; and said nucleic acid molecule according to 1 (a), (b), (c), (d), (e), (f), (g), (h), (i), (j) or (k) confers a generation or an increase of the respective fine chemical in a non-human organism or a part thereof as compared to a corresponding wild-type non-human organism or part thereof.

[32982] In another preferred embodiment of said transgenic non-human organism said vector comprises beneath said nucleic acid molecule according to 1 (a), (b), (c), (d), (e), (f), (g), (h), (i), (j) or (k), a promoter, preferably a promoter selected from the group consisting of Big35S, PCUbi, Super and USP, which are operable linked; and said nucleic acid molecule according to 1 (a), (b), (c), (d), (e), (f), (g), (h), (i), (j) or (k) encodes a polypeptide which has the activity of the respective polypeptide represented by a protein as depicted in the same line in column 5 of Table II, application no. 4, and confers a generation or an increase of the respective fine chemical in a non-human organism or a part thereof as compared to a corresponding wild-type non-human organism or part thereof.

[32983] In another embodiment of said transgenic non-human organism said vector comprises beneath said nucleic acid molecule according to 1 (a), (b), (c), (d), (e), (f), (g), (h), (i), (j) or (k), a nucleic acid molecule encoding a transit peptide, preferably encoding a plastidal transit peptide, especially in case in column 6 of Table I, application no. 4, in the same line as of the respective nucleic acid molecule according to 1) “plastidic” is depicted, or encoding a mitochondrial transit peptide, especially in case in column 6 of Table I, application no. 4, in the same line as of the respective nucleic acid molecule according to 1) “mitochondrial” is depicted, which are operable linked.

[32984] In another embodiment of said transgenic non-human organism said vector does not comprise beneath said nucleic acid molecule according to 1 (a), (b), (c), (d), (e), (f), (g), (h), (i), (j) or (k), a nucleic acid molecule encoding a transit peptide in case in column 6 of Table I, application no. 4, in the same line as of the respective nucleic acid molecule according to 1) “non-targeted” is depicted, which are operable linked.

[32985] In another embodiment of said transgenic non-human organism said vector comprises beneath said nucleic acid molecule according to 1 (a), (b), (c), (d), (e), (f), (g), (h), (i), (j) or (k), and a promoter, preferably a promoter selected from the group consisting of Big35S, PCUbi, Super and USP; a nucleic acid molecule encoding a transit peptide, preferably encoding a plastidal transit peptide, especially in case in column 6 of Table I, application no. 4, in the same line as of the respective nucleic acid molecule according to 1) “plastidic” is depicted, or encoding a mitochondrial transit peptide, especially in case in column 6 of Table I, application no. 4, in the same line as of the respective nucleic acid molecule according to 1) “mitochondrial” is depicted, which are operable linked.

[32986] In another embodiment of said transgenic non-human organism said vector does not comprise beneath said nucleic acid molecule according to 1 (a), (b), (c), (d), (e), (f), (g), (h), (i), (j) or (k), and a promoter, preferably a promoter selected from the group consisting of Big35S, PCUbi, Super and USP; a nucleic acid molecule encoding a transit peptide, especially in case in column 6 of Table I, application no. 4, in the same line as of the respective nucleic acid molecule according to 1) “non-targeted” is depicted, which are operable linked.

[32987] In another embodiment of said transgenic non-human organism said vector comprises beneath said nucleic acid molecule according to 1 (a), (b), (c), (d), (e), (f), (g), (h), (i), (j) or (k), and a promoter, preferably a promoter selected from the group consisting of Big35S, PCUbi, Super and USP; a nucleic acid molecule encoding a transit peptide, preferably encoding a plastidal transit peptide, especially in case in column 6 of Table I, application no. 4, in the same line as of the respective nucleic acid molecule according to 1) “plastidic” is depicted, or encoding a mitochondrial transit peptide, especially in case in column 6 of Table I, application no. 4, in the same line as of the respective nucleic acid molecule according to 1) “mitochondrial” is depicted, which are operable linked; and wherein said nucleic acid molecule according to 1 (a), (b), (c), (d), (e), (f), (g), (h), (i), (j) or (k) encodes a polypeptide which has the activity of the respective polypeptide represented by a protein comprising a polypeptide as depicted in the respective line in column 5 of Table II, application no. 4.

[32988] In another embodiment of said transgenic non-human organism said vector does not comprise beneath said nucleic acid molecule according to 1 (a), (b), (c), (d), (e), (f), (g), (h), (i), (j) or (k), and a promoter, preferably a promoter selected from the group consisting of Big35S, PCUbi, Super and USP; a nucleic acid molecule encoding a transit peptide, especially in case in column 6 of Table I, application no. 4, in the same line as of the respective nucleic acid molecule according to 1) “non-targeted” is depicted, which are operable linked; and wherein said nucleic acid molecule according to 1 (a), (b), (c), (d), (e), (f), (g), (h), (i), (j) or (k) encodes a polypeptide which has the activity of the respective polypeptide represented by a protein comprising a polypeptide as depicted in the respective line in column 5 of Table II, application no. 4.

[32989] In another embodiment of said transgenic non-human organism said vector comprises beneath said nucleic acid molecule according to 1 (a), (b), (c), (d), (e), (f), (g), (h), (i), (j) or (k), and a promoter, preferably a promoter selected from the group consisting of Big35S, PCUbi, Super and USP; a nucleic acid molecule encoding a transit peptide, preferably encoding a plastidal transit peptide, especially in case in column 6 of Table I, application no. 4, in the same line as of the respective nucleic acid molecule according to 1) “plastidic” is depicted, or encoding a mitochondrial transit peptide, especially in case in column 6 of Table I, application no. 4, in the same line as of the respective nucleic acid molecule according to 1) “mitochondrial” is depicted, which are operable linked; and wherein said nucleic acid molecule according to 1 (a), (b), (c), (d), (e), (f), (g), (h), (i), (j) or (k) confers a generation or an increase of the respective fine chemical in a non-human organism or a part thereof as compared to a corresponding wild-type non-human organism or part thereof.

[32990] In another embodiment of said transgenic non-human organism said vector does not comprise beneath said nucleic acid molecule according to 1 (a), (b), (c), (d), (e), (f), (g), (h), (i), (j) or (k), and a promoter, preferably a promoter selected from the group consisting of Big35S, PCUbi, Super and USP; a nucleic acid molecule encoding a transit peptide, especially in case in column 6 of Table I, application no. 4, in the same line as of the respective nucleic acid molecule according to 1) “non-targeted” is depicted, which are operable linked; and wherein said nucleic acid molecule according to 1 (a), (b), (c), (d), (e), (f), (g), (h), (i), (j) or (k) confers a generation or an increase of the respective fine chemical in a non-human organism or a part thereof as compared to a corresponding wild-type non-human organism or part thereof.

[32991] In another embodiment of said transgenic non-human organism said vector comprises beneath said nucleic acid molecule according to 1 (a), (b), (c), (d), (e), (f), (g), (h), (i), (j) or (k), and a promoter, preferably a promoter selected from the group consisting of Big35S, PCUbi, Super and USP; a nucleic acid molecule encoding a transit peptide, preferably encoding a plastidal transit peptide, especially in case in column 6 of Table I, application no. 4, in the same line as of the respective nucleic acid molecule according to 1) “plastidic” is depicted, or encoding a mitochondrial transit peptide, especially in case in column 6 of Table I, application no. 4, in the same line as of the respective nucleic acid molecule according to 1) “mitochondrial” is depicted, which are operable linked; and wherein said nucleic acid molecule according to 1 (a), (b), (c), (d), (e), (f), (g), (h), (i), (j) or (k) encodes a polypeptide which has the activity of the respective polypeptide represented by a protein as depicted in the respective line in column 5 of Table II application no. 4 and confers a generation or an increase of the respective fine chemical in a non-human organism or a part thereof as compared to a corresponding wild-type non-human organism or part thereof.

[32992] In another embodiment of said transgenic non-human organism said vector does not comprise beneath said nucleic acid molecule according to 1 (a), (b), (c), (d), (e), (f), (g), (h), (i), (j) or (k), and a promoter, preferably a promoter selected from the group consisting of Big35S, PCUbi, Super and USP; a nucleic acid molecule encoding a transit peptide, especially in case in column 6 of Table I, application no. 4, in the same line as of the respective nucleic acid molecule according to 1) “non-targeted” is depicted, which are operable linked; and wherein said nucleic acid molecule according to 1 (a), (b), (c), (d), (e), (f), (g), (h), (i), (j) or (k) encodes a polypeptide which has the activity of the respective polypeptide represented by a protein as depicted in the respective line in column 5 of Table II application no. 4 and confers a generation or an increase of the respective fine chemical in a non-human organism or a part thereof as compared to a corresponding wild-type non-human organism or part thereof.

[32993] In a preferred embodiment of said transgenic non-human organism said nucleic acid molecule according to 1 (a), (b), (c), (d), (e), (f), (g), (h), (i), (j) or (k), said promoter and optionally said nucleic acid molecule encoding a transit peptide are encompassed in an expression cassette in said vector. Accordingly an embodiment the invention provides a non-human organism comprising or being transformed by a vector comprising an expression cassette comprising said nucleic acid molecule according to 1 (a), (b), (c), (d), (e), (f), (g), (h), (i), (j) or (k), said promoter and optionally said a nucleic acid molecule encoding a transit peptide, operable linked. Said expression cassette may encompass a terminator, too.

[32994] [0291.1.1.4] to [0299.1.1.4] for the disclosure of these paragraphs see [0291.1.1.1] to [0299.1.1.1] above.

[32995] The term “biological active portion” or “biological activity” means a polypeptide as depicted in the respective line in Table II, application no. 4, column 3 or a portion of said polypeptide which still has at least 10% or 20%, preferably 30%, 40%, 50% or 60%, especially preferably 70%, 75%, 80%, 90% or 95% of the enzymatic or biological activity of the natural or starting enzyme or protein.

[32996] [0301.1.1.4] to [0304.1.1.4] for the disclosure of these paragraphs see [0301.1.1.1] to [0304.1.1.1] above.

[32997] Synthetic oligonucleotide primers for the amplification, e.g. as shown in the respective line in Table III, application no. 4, column 8, by means of polymerase chain reaction can be generated on the basis of a sequence shown herein, for example the sequence shown in the respective line in Table I, application no. 4, columns 5 or 8, or the sequences derived from Table II, application no. 4, columns 5 or 8, respectively.

[32998] Moreover, it is possible to identify a conserved region of a protein from various organism by carrying out protein sequence alignments with the polypeptide encoded by the nucleic acid molecules of the present invention, in particular with the sequences encoded by the nucleic acid molecule shown in the respective line in column 5 or 8 of Table I, application no. 4, from which conserved regions, and in turn, degenerate primers can be derived. Conserved regions are those, which show a very little variation in the amino acid in one particular position of several homologs from different origin. The consensus sequence and polypeptide motifs shown in the respective line in column 8 of Table IV, application no. 4, are derived from such alignments of homologous proteins.

[32999] In an embodiment of the present invention, in the method of the present invention the activity of a polypeptide comprising or consisting of a consensus sequence or at least one polypeptide motif shown in the respective line in Table IV, application no. 4, column 8, is increased. In another embodiment thereof, the method of the present invention relates to a polypeptide comprising or consisting of a consensus sequence shown in the respective line in Table IV, application no. 4, column 8 or comprising at least one polypeptide motif shown in the respective line in Table IV, application no. 4, column 8, whereby not more than 20, 15, 10, 9, 8, 7, 6, 5 4, 3, 2 or 1, or 0 of the amino acid positions indicated can be replaced by any amino acid. In another embodiment thereof, the method of the present invention relates to a polypeptide comprising or consisting of a consensus sequence shown in the respective line in Table IV, application no. 4, column 8 or comprising at least one polypeptide motif shown in the respective line in Table IV, application no. 4, column 8, whereby not more than 15%, 10%, 5%, 4%, 3%, 2% or 1%, or 0% of the amino acid positions defined as distinct specific amino acids are/is replaced by another amino acid. In another embodiment thereof, the method of the present invention relates to a polypeptide comprising or consisting of a consensus sequence shown in the respective line in Table IV, application no. 4, column 8 or comprising at least one polypeptide motif shown in the respective line in Table IV, application no. 4, column 8, whereby not more than 20, 15, 10, 9, 8, 7, 6, 5, 4, 3, 2 or 1, or 0 amino acids are inserted into a consensus sequence or polypeptide motif.

[33000] In an embodiment of the present invention, in the method of the present invention the activity of a polypeptide comprising or consisting of a consensus sequence or at least one polypeptide motif shown in the respective line in Table IV, application no. 4, column 8, is increased, whereby said polypeptide distinguishes over the sequence depicted in Table II, application no. 4, columns 5 or 8 by one or more amino acids.

[33001] In one embodiment, said polypeptide of the invention distinguishes over the sequence shown in the respective line in Table II, application no. 4, columns 5 and 8 by more than 5, 6, 7, 8 or 9 amino acids, preferably by more than 10, 15, 20, 25 or 30 amino acids, even more preferred are more than 40, 50, or 60 amino acids and, preferably, the sequence of the polypeptide of the invention distinguishes from the sequence shown in the respective line in Table II B, application no. 4, columns 5 and 8 by not more than 80%, 70%, 60%, 50%, 40%, 30%, 20%, 10%, 5%, 4%, 3%, 2%, 1% or 0.5%. In another embodiment, said polypeptide of the invention does not consist of the sequence shown in Table II, application no. 4, columns 5 or 8.

[33002] [0309.1.1.4] to [0321.1.1.4] for the disclosure of these paragraphs see [0309.1.1.1] to [0321.1.1.1] above.

[33003] Polypeptides having above-mentioned activity, i.e. conferring the production or the increased production of the fine chemical threonine as compared to a corresponding, e.g.

[33004] non-transformed, wild type non-human organism, like a microorganism or a plant cell, plant or part thereof, can be encoded by other DNA sequences which hybridize to the sequences shown in the respective line in Table I, application no. 4, columns 5 and 8, preferably the coding region thereof, at least under relaxed hybridization conditions and which encode the expression of polypeptides conferring the production or the increased production of the respective fine chemical threonine as compared to a corresponding, e.g. non-transformed, wild type non-human organism, like a microorganism or a plant cell, plant or part thereof.

[33005] [0323.1.1.4] to [0329.1.1.4] for the disclosure of this paragraph see [0323.1.1.1] to [0329.1.1.1] above.

[33006] Further, the nucleic acid molecule of the invention comprises a nucleic acid molecule, which is a complement of one of the nucleotide sequences of above-mentioned nucleic acid molecules or a portion thereof. A nucleic acid molecule or its sequence which is complementary to one of the nucleotide molecules or sequences shown in the respective line in Table I, application no. 4, columns 5 or 8, preferably the coding region thereof, homologs or fragments thereof, is one which is sufficiently complementary to one of the nucleotide molecules or sequences shown in the respective line in Table I, application no. 4, columns 5 or 8, preferably the coding region thereof, homologs or fragments thereof, such that it can hybridize to one of the nucleotide sequences shown in Table I, application no. 4, columns 5 or 8, preferably the coding region thereof, homologs or fragments thereof, thereby forming a stable duplex. Preferably, the hybridization is performed under stringent hybridization conditions. However, a complement of one of the herein disclosed sequences is preferably a sequence complement thereto according to the base pairing of nucleic acid molecules well known to the skilled person. For example, the bases A and G undergo base pairing with the bases T and U or C, resp. and visa versa. Modifications of the bases can influence the base-pairing partner.

[33007] The nucleic acid molecule of the invention comprises a nucleotide sequence which is at least about 30%, 35%, 40%, 45%, 50%, 55%, 60%, 65%, 70%, 75%, 80%, 90%, 95%, 96%, 97%, 98%, 99%, 99.5% or more homologous to a nucleotide sequence shown in Table I, application no. 4, columns 5 or 8, preferably the coding region thereof, homologs or fragments thereof, and preferably has above-mentioned activity, in particular conferring the production or the increased production of the fine chemical threonine, respectively, after increasing the activity or an activity of a gene as shown in the respective line in Table I or of a gene product, e.g. as shown in the respective line in Table II, application no. 4, column 5 or 8, by for example in one embodiment expression either in the cytosol or in an organelle such as a plastid or mitochondria or both, preferably in a plastid, or in another embodiment non-targeted or targeted.

[33008] The nucleic acid molecule of the invention comprises a nucleotide sequence or molecule which hybridizes, preferably hybridizes under stringent conditions as defined herein, to one of the nucleic acid molecule shown in the respective line in Table I, preferably Table IB, application no. 4, columns 5 or 8, preferably the coding region thereof, fragments or homologs thereof, and encodes a protein having above-mentioned activity, e.g. conferring the production or the increased production of the respective fine chemical threonine as compared to a corresponding, e.g. non-transformed, wild type non-human organism, like a microorganism or a plant cell, plant or part thereof, by for example in one embodiment expression either in the cytosol or in an organelle such as a plastid or mitochondria or both, preferably in a plastid, or in another embodiment non-targeted or targeted, and optionally, the activity thereof is selected from the group consisting of (DL)-glycerol-3-phosphatase, 2,3-dihydroxyphenylpropionate 1,2-dioxygenase, 2-C-methyl-D-erythritol 4-phosphate cytidylyltransferase, 2-oxoglutarate dehydrogenase E1 subunit, 3-phosphoglycerate dehydrogenase, 47266012-protein, 49747384_SOYBEAN-protein, ABC metal ion transporter substrate-binding protein, ABC transporter permease protein, acetolactate synthase small subunit, acetyltransferase, acyl-CoA dehydrogenase, acyl-CoA synthase, argininosuccinate lyase, aspartate aminotransferase, aspartate kinase, At1g09680-protein, At4g32480-protein, At5g16650-protein, ATP synthase subunit beta, ATP-binding component of a transport system, AX653549-protein,b1003-protein, b1108-protein, b1445-protein,b1522-protein,b1670-protein,b1930-protein, b2360-protein, b2399-protein, b2513-protein, b2613-protein, b2739-protein, b2812-protein, b3083-protein, b3442-protein, b3646-protein, b3989-protein, b4029-protein, b4056-protein, b4250-protein, beta-galactosidase, beta-hydroxylase, bifunctional aspartokinase/homoserine dehydrogenase, bifunctional purine biosynthesis protein, branched chain amino acid ABC transporter ATP-binding protein, branched chain aminotransferase, branched-chain amino acid ABC transporter permease protein, calcium-dependent protein kinase, carbamoyl-phosphate synthase subunit, CCAAT-binding transcription factor, CDP-diacylglycerol-serine O-phosphatidyltransferase, cell division control protein, cell division protein, Chaperone protein CIpB, coproporphyrinogen III oxidase, cyclin, cyclin D , D-3-phosphoglycerate dehydrogenase, dihydrolipoamide acetyltransferase, dihydroxyacid dehydratase, DNA helicase II, DnaJ-like chaperone, D-serine dehydratase, elongation factor Tu, enoyl-CoA hydratase, enterobacterial common antigen polymerase, eukaryotic translation initiation factor 5, ferredoxin, GDP-mannose dehydrogenase, geranylgeranyl pyrophosphate synthase, gibberellin 20-oxidase, glucose dehydrogenase, glucose-6-phosphate 1-dehydrogenase, glutamate-ammonia-ligase, glutaredoxin, glutathione S-transferase, glycogen (starch) synthase, glycogen synthase, glycoprotease, glycosyl transferase, heat shock protein, heat shock transcription factor, hexose transporter, histone acetyltransferase, homocitrate synthase, homoserine dehydrogenase, hydrolase, isochorismate synthase, ketol-acid reductoisomerase, kinase, L-asparaginase, major facilitator superfamily transporter protein, malate dehydrogenase, malic enzyme, membrane transport protein, metaldependent hydrolase, methyltransferase, mitochondrial dicarboxylate transporter, monothiol glutaredoxin, monthiol glutaredoxin, murein transglycosylase, NADP-dependent malic enzyme, nitrate/nitrite transport protein, oxireductase, peptidase, permease protein of peptide ABC transporter, phosphate transporter, phosphoanhydride phosphorylase, phosphoenolpyruvate carboxykinase, phosphoribosylaminoimidazole carboxylase catalytic subunit, photosystem II protein, polyphosphate kinase, protein kinase, protein phosphatase, pyruvate carboxylase, pyruvate kinase, restriction alleviation protein, sec-independent protein translocase, sensor histidine kinase, serine protease, sll0418-protein, slr0383-protein, succinyl-CoA synthetase beta chain, thioredoxin, threonine synthase, transcription factor, transcriptional regulator, transcriptional regulator protein, transport protein, TTC0881-protein, uroporphyrin-III C-methyltransferase, valine-pyruvate transaminase, XM_{—}473199-protein, ycl027w-protein, ydr183w-protein, YEL030C-A-protein, yfl054c-protein, ygl237c-protein, yhr131c-protein, YJL127W-A-protein, YKL038W-protein, zinc finger protein, and Zm_{—}4842_BE510522-protein, respectively.

[33009] Moreover, the nucleic acid molecule of the invention can comprise only a portion of the coding region of one of the nucleic acid molecules depicted in Table I, application no.

[33010] 4, columns 5 or 8, for example a fragment which can be used as a probe or primer or a fragment encoding a biologically active portion of the polypeptide of the present invention or of a polypeptide used in the process of the present invention, i.e. having above-mentioned activity, e.g. conferring the production or the increased production of the respective fine chemical threonine as compared to a corresponding, e.g. non-transformed, wild type non-human organism, like a microorganism or a plant cell, plant or part thereof, by for example in one embodiment expression either in the cytosol or in an organelle such as a plastid or mitochondria or both, preferably in a plastid, or in another embodiment non-targeted or targeted. The nucleotide sequences determined from the cloning of the present protein-according-to-the-inventionencoding gene allows for the generation of probes and primers designed for use in identifying and/or cloning its homologues from other cell types and organisms. The probe/primer typically comprises a substantially purified oligonucleotide. The oligonucleotide typically comprises a region of nucleotide sequence that hybridizes under stringent conditions to at least about 12, 15 preferably about 20 or 25, more preferably about 40, 50 or 75 consecutive nucleotides of a sense strand of one of the sequences set forth, e.g., in the respective line in Table I, application no. 4, column 5 or 8, preferably the coding region thereof, or a homolog or a fragment thereof, an anti-sense sequence of one of the sequences, e.g., set forth in the respective line in Table I, application no. 4, columns 5 or 8, preferably the coding region thereof, or a homolog or a fragment thereof or naturally occurring mutants thereof. Primers based on a nucleic acid molecule of invention can be used in PCR reactions to clone homologs of the polypeptide of the invention or of the polypeptide used in the process of the invention, e.g. as the primers described in the examples of the present invention, e.g. as shown in the examples. A PCR with the primers shown in the respective line in Table III, column 8 will result in a fragment of the gene product as shown in Table II, application no. 4, column 5.

[33011] Primer sets are interchangeable. The person skilled in the art knows how to design and combine said primers to result in the desired product, e.g. in a full length clone or a partial sequence. Probes based on the sequences of the nucleic acid molecule of the invention or used in the process of the present invention can be used to detect transcripts or genomic sequences encoding the same or homologous proteins. The probe can further comprise a label group attached thereto, e.g. the label group can be a radioisotope, a fluorescent compound, an enzyme, or an enzyme co-factor. Such probes can be used as a part of a genomic marker test kit for identifying cells which express a polypeptide of the invention or used in the process of the present invention, such as by measuring a level of an encoding nucleic acid molecule in a sample of cells, e.g. detecting mRNA levels or determining, whether a genomic gene comprising the sequence of the polynucleotide of the invention or used in the processes of the present invention has been mutated or deleted.

[33012] As the expression of a respective nucleic acids of the invention is related to the synthesis of the respective fine chemical threonine its function as a probe extends to the detection of microorganisms, plant tissues, plants, plant variets, plant ecotypes or plant genera with varying capability or potential for synthesis of the respective fine chemical threonine. Therefore in one embodiment the present invention relates to a method for analyzing the capability or potential of a plant tissue, a plant, a plant variety or plant ecotype to produce the fine chemical threonine by using the nucleic acid of the invention or parts thereof as a probe to detect the amount of the nucleic acid of the invention in the non-human organism or a part thereof in comparison to another non-human organism.

[33013] The nucleic acid molecule of the invention encodes a polypeptide or portion thereof which includes an amino acid sequence which is sufficiently homologous to the amino acid sequence shown in respective line in Table II, application no. 4, columns 5 or 8 such that the protein or portion thereof maintains the ability to confer the production or the increased production of the respective fine chemical threonine as compared to a corresponding, e.g. non-transformed, wild type non-human organism, like a microorganism or a plant cell, plant or part thereof, in particular increasing the activity as mentioned above or as described in the examples in microorganisms or plants.

[33014] As used herein, the language “sufficiently homologous” refers to proteins or portions thereof which have amino acid sequences which include a minimum number of identical or equivalent amino acids (e.g. an amino acid which has a similar side chain as an amino acid in one of the sequences of the polypeptide of the present invention) to an amino acid sequence shown in the respective line in Table II, application no. 4, columns 5 or 8 such that the protein or portion thereof is able to confer the production or the increased production of the respective fine chemical threonine as compared to a corresponding, e.g. non-transformed, wild type non-human organism, like a microorganism or a plant cell, plant or part thereof. For example having the activity of a protein as shown in the respective line in Table II, application no. 4, column 3 and as described herein.

[33015] In an embodiment of the present invention, the nucleic acid molecule of the present invention comprises a nucleic acid molecule that encodes a portion of the protein of the present invention. The protein is at least about 30%, 35%, 40%, 45% 50%, 55%, 60%, 65%, 70%, 75%, 80%, 85%, 90%, 91%, 92%, 93%, 94%, 95%, 96%, 97%, 98%, 99%, 99.5% or more homologous to an entire amino acid sequence shown in the respective line of Table II, application no. 4, column 5 or 8 and has the above-mentioned activity, e.g. conferring the production or the increased production of the respective fine chemical threonine as compared to a corresponding, e.g. non-transformed, wild type non-human organism, like a microorganism or a plant cell, plant or part thereof by, for example in a embodiment expression either in the cytosol or in an organelle such as a plastid or mitochondria or both, preferably in a plastid, or in another embodiment by targeted or non-targeted expression.

[33016] [0338.1.1.4] to [0339.1.1.4] for the disclosure of these paragraphs see [0338.1.1.1] to [0339.1.1.1] above.

[33017] The invention further relates to nucleic acid molecules or methods using said nucleic acid molecules that differ from one of the nucleotide sequences shown in the respective line in Table I, application no. 4, columns 5 or 8, preferably the coding region thereof, or fragments or homologs thereof, due to degeneracy of the genetic code but encode a polypeptide of the present invention, in particular a polypeptide having the above-mentioned activity, e.g. as those polypeptides depicted in the respective line in Table II, application no. 4, columns 5 or 8, fragments or homologs thereof. Advantageously, the nucleic acid molecule of the invention comprises, or in an other embodiment has, a nucleotide sequence encoding a protein comprising, or in an other embodiment having, an amino acid sequence shown in the respective line in Table II, application no. 4, columns 5 or 8, fragments or homologs thereof. In a further embodiment, the nucleic acid molecule of the invention encodes a full length protein which is substantially homologous to an amino acid sequence shown in the respective line in Table II, application no. 4, columns 5 or 8, or homologs thereof. However, in an embodiment, the nucleic acid molecule of the present invention does not consist of the sequence shown in the respective line in Table I, preferably Table IA, application no. 4, columns 5 or 8, preferably the coding region thereof, but the functional homologs thereof.

[33018] [0341.1.1.4] to [0343.1.1.4] for the disclosure of this paragraph see [0341.1.1.1] to [0343.1.1.1] above.

[33019] Accordingly, in another embodiment, a nucleic acid molecule of the invention is at least 15, 20, 25 or 30 nucleotides in length. Preferably, it hybridizes under stringent conditions to a nucleic acid molecule comprising a nucleotide sequence of the nucleic acid molecule of the present invention or used in the process of the present invention, e.g. comprising the sequence shown in the respective line in Table I, application no. 4, columns 5 or 8, preferably the coding region thereof. In another embodiment the nucleic acid molecule is preferably at least 20, 30, 50, 100, 250 or more nucleotides in length.

[33020] for the disclosure of this paragraph see [0345.1.1.1] above.

[33021] Preferably, a nucleic acid molecule of the invention that hybridizes under stringent conditions to a sequence shown in the respective line in Table I, application no. 4, columns 5 or 8, preferably the coding region thereof, corresponds to a naturally-occurring nucleic acid molecule of the invention. As used herein, a “naturally-occurring” nucleic acid molecule refers to a RNA or DNA molecule having a nucleotide sequence that occurs in nature (e.g. encodes a natural protein). Preferably, the nucleic acid molecule encodes a natural protein having above-mentioned activity, e.g. conferring the production or the increased production of the respective fine chemical threonine as compared to a corresponding, e.g. non-transformed, wild type non-human organism, like a microorganism or a plant cell, plant or part thereof after increasing the expression or activity thereof or the activity of a protein of the invention or used in the process of the invention, in an embodiment for example expression either in the cytosol or in an organelle such as a plastid or mitochondria, preferably in plastids, or, in another embodiment by targeted or non-targeted expression.

[33022] for the disclosure of this paragraph see [0347.1.1.1] above.

[33023] For example, nucleotide substitutions leading to amino acid substitutions at “non-essential” amino acid residues can be made in a sequence of the nucleic acid molecule of the invention or used in the process of the invention, e.g. shown in the respective line in Table I, application no. 4, columns 5 or 8, preferably the coding region thereof, or fragments or homologs thereof.

[33024] [0349.1.1.4] to [0350.1.1.4] for the disclosure of these paragraphs see [0349.1.1.1] to [0350.1.1.1] above.

[33025] Accordingly, the invention relates to nucleic acid molecules encoding a polypeptide having above-mentioned activity, in a non-human organisms or parts thereof by for example expression either in the cytosol or in an organelle such as a plastid or mitochondria or both, preferably in plastids, that contain changes in amino acid residues that are not essential for said activity. Such polypeptides differ in amino acid sequence from a sequence depicted in the respective line in Table II, especially Table IIA, application no. 4, columns 5 or 8, but retain said activity described herein. The nucleic acid molecule can comprise a nucleotide sequence encoding a polypeptide, wherein the polypeptide comprises an amino acid sequence at least about 50% identical to an amino acid sequence shown in the respective line in Table II, application no. 4, columns 5 or 8, and is capable of conferring the production or the increased production of the respective fine chemical threonine as compared to a corresponding, e.g. non-transformed, wild type non-human organism, like a microorganism or a plant cell, plant or part thereof, after increasing its activity for example in an embodiment by expression either in the cytosol or in an organelle such as a plastid or mitochondria or both, preferably in plastids, or, in another embodiment by targeted or non-targeted expression. Preferably, the protein encoded by the nucleic acid molecule is at least about 60%, 70%, 80%, 90%, 95%, 96%, 97%, 98%, 99% or 99.5% identical to the sequence shown in the respective line in Table II, application no. 4, columns 5 or 8.

[33026] 8 0352.1.1.4] to [0357.1.1.4] for the disclosure of these paragraphs see [0352.1.1.1] to [0357.1.1.1] above.

[33027] Functional equivalents of the nucleic acid molecules according to the present invention and/or used in the process according to the present invention represent an embodiment of homologs. Functional equivalents derived from the nucleic acid molecules as shown in the respective line in Table I, application no. 4, columns 5 or 8, preferably the coding region thereof, according to the invention by substitution, insertion or deletion have at least 30%, 35%, 40%, 45%, 50%, 55%, 60%, 65%, 70%, 75%, 80%, 85%, 90%, 91%, 92%, 93%, 94%, 95%, 96%, 97%, 98%, 99% or 99.5% homology with one of the nucleic acid molecules as shown in the respective line in Table I, application no. 4, columns 5 or 8, preferably the coding region thereof, according to the invention and encode polypeptides having essentially the same properties as the polypeptide as shown in the respective line in Table II, application no. 4, columns 5 or 8.

[33028] Functional equivalents derived from one of the polypeptides as shown in the respective line in Table II, application no. 4, columns 5 or 8 according to the invention by substitution, insertion or deletion have at least 30%, 35%, 40%, 45%, 50%, 55%, 60%, 65%, 70%, 75%, 80%, 85%, 90%, 91%, 92%, 93%, 94%, 95%, 96%, 97%, 98%, 99% or 99.5% homology with one of the polypeptides as shown in the respective line in Table II, application no. 4, columns 5 or 8 according to the invention and having essentially the same properties as the polypeptide as shown in the respective line in Table II, application no. 4, columns 5 or 8.

[33029] for the disclosure of this paragraph see [0359.1.1.1] above.

[33030] A nucleic acid molecule encoding a homolog to a polypeptide depicted in the respective line in Table II, application no. 4, columns 5 or 8 can be created by introducing one or more nucleotide substitutions, additions or deletions into the nucleic acid molecule of the present invention, in particular of Table I, application no. 4, columns 5 or 8, in the respective line, such that one or more amino acid substitutions, additions or deletions are introduced into the encoded protein. Mutations can be introduced into the nucleic acid molecules as depicted in the respective line in Table I, application no. 4, columns 5 or 8, preferably the coding region thereof, by standard techniques, such as site-directed mutagenesis, PCR-mediated mutagenesis or other methods known to the person skilled in the art.

[33031] [0361.1.1.4] to [0363.1.1.4] for the disclosure of these paragraphs see [0361.1.1.1] to [0363.1.1.1] above.

[33032] Homologues of the nucleic acid sequences used, with the sequences shown in the respective line in Table I, application no. 4, columns 5 or 8, preferably the coding region thereof, comprise also allelic variants with at least approximately 30%, 35%, 40%, 45%, 50%, 55%, 60%, 65%, 70%, 75%, 80%, 85%, 90%, 91%, 92%, 93%, 94% 95%. 96%, 97%, 98%, 99%, 99.5% or more % homology with one of the nucleotide sequences shown or the above-mentioned derived nucleic acid sequences or their homologues or derivatives or parts of these.

[33033] Allelic variants encompass in particular functional variants which can be obtained by deletion, insertion or substitution of nucleotides from the sequences shown in the respective line, preferably in Table I, columns 5 or 8, preferably the coding region thereof, or from the derived nucleic acid sequences, the intention being, however, that the enzymatic activity or the biological activity of the resulting proteins synthesized is advantageously retained or increased.

[33034] In one embodiment of the present invention, the nucleic acid molecule of the invention or used in the process of the invention comprises the sequences shown in the respective line in any of the Table I, application no. 4, columns 5 or 8, preferably the coding region thereof, fragments or homologs thereof. It is preferred that the nucleic acid molecule comprises as little as possible other nucleotides not shown in the respective line in any one of Table I, application no. 4, columns 5 or 8, preferably the coding region thereof, fragments or homologs thereof. In one embodiment, the nucleic acid molecule comprises less than 500, 400, 300, 200, 100, 90, 80, 70, 60, 50 or 40 further nucleotides. In a further embodiment, the nucleic acid molecule comprises less than 30, 20 or 10 further nucleotides. In one embodiment, the nucleic acid molecule used in the process of the invention is identical to the sequences shown in the respective line in Table I, application no. 4, columns 5 or 8, preferably the coding region thereof.

[33035] Also preferred is that the nucleic acid molecule used in the process of the invention encodes a polypeptide comprising the sequence shown in the respective line in Table II, application no. 4, columns 5 or 8, fragments or homologs thereof. In one embodiment, the nucleic acid molecule encodes less than 150, 130, 100, 80, 60, 50, 40 or 30 further amino acids. In a further embodiment, the encoded polypeptide comprises less than 20, 15, 10, 9, 8, 7, 6 or 5 further amino acids. In one embodiment used in the inventive process, the encoded polypeptide is identical to the sequences shown in the respective line in Table II, application no. 4, columns 5 or 8.

[33036] In one embodiment, the nucleic acid molecule of the invention or used in the process encodes a polypeptide comprising the sequence shown in the respective line in Table II, application no. 4, columns 5 or 8, or fragments or homologs thereof, and comprises less than 100 further nucleotides. In a further embodiment, said nucleic acid molecule comprises less than 30 further nucleotides. In one embodiment, the nucleic acid molecule used in the process is identical to a coding sequence of the sequences shown in the respective line in Table I, application no. 4, columns 5 or 8.

[33037] Polypeptides (=proteins), which still have the essential biological or enzymatic activity of the polypeptide of the present invention conferring the production or the increased production of the respective fine chemical threonine as compared to a corresponding, e.g. non-transformed, wild type non-human organism, like a microorganism or a plant cell, plant or part thereof, i.e. whose activity is essentially not reduced, are polypeptides with at least 10%, 20%, 30%, 40%, 50%, 60%, 70%, 80%, 90%, 95% or more of the wild type biological activity or enzymatic activity, advantageously, the activity is essentially not reduced in comparison with the activity of a polypeptide shown in the respective line in Table II, application no. 4, columns 5 or 8 expressed under identical conditions.

[33038] Homologues of nucleic acid molecules shown in the respective line in Table I, application no. 4, columns 5 or 8, preferably the coding region thereof, or fragments thereof, or of the derived sequences shown in the respective line in Table II, application no. 4, columns 5 or 8, or fragments thereof, also mean truncated sequences, cDNA, single-stranded DNA or RNA of the coding and noncoding DNA sequence. Homologues of said sequences are also understood as meaning derivatives, which comprise noncoding regions such as, for example, UTRs, introns, terminators, enhancers or promoter variants. The promoters upstream of the nucleotide sequences stated can be modified by one or more nucleotide substitution(s), insertion(s) and/or deletion(s) without, however, interfering with the functionality or activity either of the promoters, the open reading frame (=ORF) or with the 3′-regulatory region such as terminators or other 3′-regulatory regions, which are far away from the ORF. It is furthermore possible that the activity of the promoters is increased by modification of their sequence, or that they are replaced completely by more active promoters, even promoters from heterologous organisms. Appropriate promoters are known to the person skilled in the art and are mentioned herein below.

[33039] [0370.1.1.4] to [0379.1.1.4] for the disclosure of these paragraphs see [0370.1.1.1] [0379.1.1.1] above.

[33040] Moreover, a native polypeptide conferring the increase of the respective fine chemical threonine in a non-human organism or a part thereof can be isolated from cells (e.g., endothelial cells), for example using the antibody of the present invention as described below, in particular, an antibody against proteins having (DL)-glycerol-3-phosphatase, 2,3-dihydroxyphenylpropionate 1,2-dioxygenase, 2-C-methyl-D-erythritol 4-phosphate cytidylyltransferase, 2-oxoglutarate dehydrogenase E1 subunit, 3-phosphoglycerate dehydrogenase, 47266012-protein, 49747384_SOYBEAN-protein, ABC metal ion transporter substrate-binding protein, ABC transporter permease protein, acetolactate synthase small subunit, acetyltransferase, acyl-CoA dehydrogenase, acyl-CoA synthase, argininosuccinate lyase, aspartate aminotransferase, aspartate kinase, At1g09680-protein, At4g32480-protein, At5g16650-protein, ATP synthase subunit beta, ATP-binding component of a transport system, AX653549-protein, b1003-protein, b1108-protein, b1445-protein, b1522-protein, b1670-protein, b1930-protein, b2360-protein, b2399-protein, b2513-protein, b2613-protein, b2739-protein, b2812-protein, b3083-protein, b3442-protein, b3646-protein, b3989-protein, b4029-protein, b4056-protein, b4250-protein, beta-galactosidase, beta-hydroxylase, bifunctional aspartokinase/homoserine dehydrogenase, bifunctional purine biosynthesis protein, branched chain amino acid ABC transporter ATP-binding protein, branched chain aminotransferase, branched-chain amino acid ABC transporter permease protein, calcium-dependent protein kinase, carbamoyl-phosphate synthase subunit, CCAAT-binding transcription factor, CDP-diacylglycerol-serine O-phosphatidyltransferase, cell division control protein, cell division protein, Chaperone protein CIpB, coproporphyrinogen III oxidase, cyclin, cyclin D , D-3-phosphoglycerate dehydrogenase, dihydrolipoamide acetyltransferase, dihydroxyacid dehydratase, DNA helicase II, DnaJ-like chaperone, D-serine dehydratase, elongation factor Tu, enoyl-CoA hydratase, enterobacterial common antigen polymerase, eukaryotic translation initiation factor 5, ferredoxin, GDP-mannose dehydrogenase, geranylgeranyl pyrophosphate synthase, gibberellin 20-oxidase, glucose dehydrogenase, glucose-6-phosphate 1-dehydrogenase, glutamate-ammonia-ligase, glutaredoxin, glutathione S-transferase, glycogen (starch) synthase, glycogen synthase, glycoprotease, glycosyl transferase, heat shock protein, heat shock transcription factor, hexose transporter, histone acetyltransferase, homocitrate synthase, homoserine dehydrogenase, hydrolase, isochorismate synthase, ketol-acid reductoisomerase, kinase, L-asparaginase, major facilitator superfamily transporter protein, malate dehydrogenase, malic enzyme, membrane transport protein, metaldependent hydrolase, methyltransferase, mitochondrial dicarboxylate transporter, monothiol glutaredoxin, monthiol glutaredoxin, murein transglycosylase, NADP-dependent malic enzyme, nitrate/nitrite transport protein, oxireductase, peptidase, permease protein of peptide ABC transporter, phosphate transporter, phosphoanhydride phosphorylase, phosphoenolpyruvate carboxykinase, phosphoribosylaminoimidazole carboxylase catalytic subunit, photosystem II protein, polyphosphate kinase, protein kinase, protein phosphatase, pyruvate carboxylase, pyruvate kinase, restriction alleviation protein, sec-independent protein translocase, sensor histidine kinase, serine protease, sll0418-protein, slr0383-protein, succinyl-CoA synthetase beta chain, thioredoxin, threonine synthase, transcription factor, transcriptional regulator, transcriptional regulator protein, transport protein, TTC0881-protein, uroporphyrin-III C-methyltransferase, valine-pyruvate transaminase, XM_{—}473199-protein, ycl027w-protein, ydr183w-protein, YEL030C-A-protein, yfl054c-protein, ygl237c-protein, yhr131c-protein, YJL127W-A-protein, YKL038W-protein, zinc finger protein, or Zm_{—}4842_BE510522-protein activity, respectively, or an antibody against polypeptides as shown in the respective line in Table II, application no. 4, columns 5 or 8, or fragments or homologs thereof which can be produced by standard techniques utilizing the polypeptid of the present invention or fragment thereof, i.e., the polypeptide of this invention (FCRP). Preferred are monoclonal antibodies.

[33041] for the disclosure of this paragraph see [0381.1.1.1] above.

[33042] In one embodiment, the present invention relates to a polypeptide as depicted in the respective line in Table II, especially in Table IIA or especially in Table IIB, application no. 4, columns 5 or 8, or fragment or homolog thereof or as coded by the nucleic acid molecule shown in the respective line in Table I, especially Table IA or especially Table IB, application no. 4, columns 5 or 8, preferably the coding region thereof, or fragment or homolog thereof.

[33043] In an embodiment, the present invention relates to a polypeptide comprising or consisting of a consensus sequence shown in the respective line in Table IV, application no. 4, column 8 or at least one polypeptide motif shown in the respective line in Table IV, application no. 4, column 8.

[33044] In an embodiment thereof, the present invention relates to a polypeptide comprising or consisting of a consensus sequence shown in the respective line in Table IV, application no. 4, column 8 or comprising at least one polypeptide motif shown in the respective line in Table IV, application no. 4, column 8, whereby not more than 20, 15, 10, 9, 8, 7, 6, 5, 4, 3, 2, or 1, or 0 of the amino acids can be replaced by any amino acid.

[33045] In another embodiment thereof, the present invention relates to a polypeptide comprising or consisting of a consensus sequence shown in the respective line in Table IV, application no. 4, column 8 or comprising at least one polypeptide motif shown in the respective line in Table IV, application no. 4, column 8, whereby not more than 15%, 10%, 5%, 4%, 3%, 2% or1% or 0% of the amino acids defined as distinct specific amino acids are/is replaced by another amino acid.

[33046] In another embodiment thereof, the present invention relates to a polypeptide comprising or consisting of a consensus sequence shown in the respective line in Table IV, application no. 4, column 8 or comprising at least one polypeptide motif shown in the respective line in Table IV, application no. 4, column 8, whereby not more than 20, 15, 10, 9, 8, 7, 6, 5, 4, 3, 2, or 1, or 0 amino acids are inserted into the consensus sequence or polypeptide motif.

[33047] In an embodiment of the present invention, the polypeptide of the present invention comprises or consists of a consensus sequence or at least one polypeptide motif shown in the respective line in Table IV, application no. 4, column 8, whereby said polypeptide distinguishes over the sequence depicted in the respective line in Table II, application no. 4, columns 5 or 8 by one or more amino acids. In one embodiment, said polypeptide of the invention distinguishes over the sequence shown in the respective line in Table II, application no. 4, columns 5 and 8 by more than 5, 6, 7, 8 or 9 amino acids, preferably by more than 10, 15, 20, 25 or 30 amino acids, even more preferred are more than 40, 50, or 60 amino acids and, preferably, the sequence of the polypeptide of the invention distinguishes from the sequence shown in the respective line in Table II, application no. 4, columns 5 and 8 by not more than 80%, 70%, 60%, 50%, 40%, 30%, 20%, 10%, 5%, 4%, 3%, 2%, 1% or 0.5%. In another embodiment, said polypeptide of the invention does not consist of the sequence shown in the respective line in Table II, application no. 4, columns 5 and 8.

[33048] In an embodiment, the invention relates to a polypeptide conferring an increase in the respective fine chemical threonine in a non-human organism, especially a microorganism or a plant, or a part thereof, being encoded by the nucleic acid molecule of the invention or used in the process of the invention and having a sequence which distinguishes over the sequence as shown in the respective line in Table II, application no. 4, columns 5 or 8 by one or more amino acids (but not exceeding 5%, preferably 4%, 3%, 2%, 1%, 0.5%, 0.2% or 0.1%). In an embodiment, said polypeptide of the invention does not comprise or consist of the sequence shown in the respective line in Table II, application no. 4, columns 5 or 8. In an embodiment, said polypeptide of the present invention is less than 100%, 99.999%, 99.99%, 99.9% or 99% identical. In one embodiment, said polypeptide which differs at least in one or more amino acids (but not exceeding 5%, preferably 4%, 3%, 2%, 1%, 0.5%, 0.2% or 0.1%) from the polypeptide shown in the respective line in Table II, application no. 4, columns 5 and 8 does not comprise a protein of the sequence shown in the respective line in Table II A and/or II B, application no. 4, columns 5 or 8.

[33049] In an embodiment, the present invention relates to a polypeptide having the activity of the protein as shown in the respective line in Table II, application no. 4, column 3, which distinguishes over the sequence depicted in the respective line in Table II, application no. 4, columns 5 or 8 by one or more amino acids, preferably by more than 5, 6, 7, 8 or 9 amino acids, preferably by more than 10, 15, 20, 25 or 30 amino acids, even more preferred are more than 40, 50, or 60 amino acids and, preferably, the sequence of the polypeptide of the invention distinguishes from the sequence shown in the respective line in Table II, application no. 4, columns 5 and 8 by not more than 80%, 70%, 60%, 50%, 40%, 30%, 20%, 10%, 5%, 4%, 3%, 2%, 1% or 0.5%.

[33050] In another embodiment the polypeptide of the invention takes the form of a preprotein consisting of a plastidial or mitochondrial transit peptide joint to a polypeptide having the activity of the protein as shown in Table II, column 3, from which the transit peptide is preferably cleaved off upon transport of the preprotein into the organelle for example into the plastid or mitochondrion.

[33051] In another embodiment the polypeptide of the invention takes not the form of a preprotein.

[33052] [0390.1.1.4] to [0391.1.1.4] for the disclosure of these paragraphs see [0390.1.1.1] to [0391.1.1.1] above.

[33053] A polypeptide of the invention can participate in the process of the present invention. The polypeptide or a portion thereof comprises preferably an amino acid sequence, which is sufficiently homologous to an amino acid sequence shown in the respective line in Table II A and/or II B, application no. 4, columns 5 or 8.

[33054] Further, the polypeptide can have an amino acid sequence which is encoded by a nucleotide sequence which hybridizes, preferably hybridizes under stringent conditions as described above, to a nucleotide sequence of the nucleic acid molecule of the present invention. Accordingly, the polypeptide has an amino acid sequence which is encoded by a nucleotide sequence that is at least about 35%, 40%, 45%, 50%, 55%, 60%, 65%, 70%, 75%, 80%, 85%, 90%, 91%, 92%, 93%, 94%, 95%, 96%, 97%, 98%, 99%, 99.5% or more homologous to one of the amino acid sequences as shown in the respective line in Table II A and/or II B, application no. 4, columns 5 or 8, or fragments thereof. The preferred polypeptide of the present invention preferably possesses at least one of the activities according to the invention and described herein. A preferred polypeptide of the present invention includes an amino acid sequence encoded by a nucleotide sequence which hybridizes, preferably hybridizes under stringent conditions, to a nucleotide sequence shown in the respective line in Table I A and/or I B, application no. 4, columns 5 or 8, preferably the coding region thereof, or fragments thereto or which is homologous thereto, as defined above.

[33055] The polypeptide of the present invention can vary from the sequences shown in the respective line in Table II A and/or II B, application no. 4, columns 5 or 8 in amino acid sequence due to natural variation or mutagenesis, as described in detail herein. Accordingly, the polypeptide comprise an amino acid sequence which is at least about 35%, 40%, 45%, 50%, 55%, 60%, 65%, 70%, 75%, 80%, 85% or 90, 91%, 92%, 93%, 94%, 95%, 96%, 97%, 98%, 99%, 99.5% or more homologous to an entire amino acid sequence shown in the respective line in Table II A and/or II B, application no. 4, columns 5 or 8.

[33056] Biologically active portions of a polypeptide of the present invention include peptides comprising amino acid sequences derived from the amino acid sequence of the polypeptide of the present invention or used in the process of the present invention, e.g., the amino acid sequence shown in the respective line in Table II, application no. 4, columns 5 or 8 or the amino acid sequence of a protein homologous thereto, which include fewer amino acids than a full length polypeptide of the present invention or used in the process of the present invention or the full length protein which is homologous to a polypeptide of the present invention or used in the process of the present invention depicted herein, and exhibit at least one activity of a polypeptide of the present invention or used in the process of the present invention.

[33057] for the disclosure of this paragraph see [0396.1.1.1] above.

[33058] Manipulation of the nucleic acid molecule of the invention may result in the production of a protein having differences from the protein as shown in the respective line in Table II, application no. 4, column 5 or 8. Differences shall mean at least one amino acid different from the sequences as shown in the respective line in Table II, application no. 4, column 5 or 8, preferably at least 2, 3, 4, 5, 6, 7, 8, 9 or 10 amino acids (especially but not exceeding 0.1%, preferably 0.2%, 0.5%, 1%, 2%, 3% 4% or 5%), more preferably at least 15, 20, 25, 30, 35, 40, 45 or 50 amino acids (especially but not exceeding 0.5%, preferably 1%, 2%, 3% 4%, 5%, 10% or 25%) different from the sequences as shown in the respective line in Table II, application no. 4, column 5 or 8. These proteins may be improved in efficiency or activity, or may be more stable and therefore present in greater numbers in the cell as compared to the wild-type cell.

[33059] Any mutagenesis strategies for the polypeptide of the present invention or the polypeptide used in the process of the present invention to result in increasing said activity are not meant to be limiting; variations on these strategies will be readily apparent to one skilled in the art. Using such strategies, and incorporating the mechanisms disclosed herein, the nucleic acid molecule and polypeptide of the invention may be utilized to generate algae, ciliates, fungi, other microorganisms like C. glutamicum or plants or parts thereof, expressing proteins as shown in the respective line in Table II, application no. 4, column 5 or 8, or mutated proteins thereof. The nucleic acid molecules and polypeptide molecules of the invention are expressed such that the yield, production, and/or efficiency of production of a desired compound is improved.

[33060] [0399.1.1.4] to [0401.1.1.4] for the disclosure of this paragraph see [0399.1.1.1] to [0401.1.1.1] above.

[33061] In one embodiment, a protein (=polypeptide) as shown in the respective line in Table II, application no. 4, column 5 or 8 refers to a polypeptide having an amino acid sequence corresponding to the polypeptide of the invention, especially to a polypeptide as shown in Table II, application no. 4, columns 5 or 8 or homologs thereof, or used in the process of the invention, whereas a “non-inventive protein or polypeptide” or “other polypeptide” refers to a polypeptide having an amino acid sequence corresponding to a protein which is not substantially homologous to a polypeptide of the invention, preferably which is not substantially homologous to a polypeptide or protein as shown in the respective line in Table II, application no. 4, column 5 or 8 or homologs thereof, e.g., a protein which does not confer the activity described herein and which is derived from the same or a different organism.

[33062] [0403.1.1.4] to [0409.1.1.4] for the disclosure of these paragraphs see [0403.1.1.1] to [0409.1.1.1] above.

[33063] As the nucleic acid molecules of the invention and/or the expression thereof is related to the synthesis of the respective fine chemical threonine its function as a probe extends to the detection of microorganisms, plant tissues, plants, plant variets, plant ecotypes or plant genera with varying, advantageously increased, capability or potential for synthesis of the respective fine chemical threonine. Therefore in one embodiment the present invention relates to a method for analyzing the capability or potential of a plant tissue, a plant, a plant variety or ecotype to produce the respective fine chemical threonine by using the respective antibody of the invention as a probe to detect the amount of the polypeptide encoded by said nucleic acid molecule of the invention in a non-human organism in comparison to another organism.

[33064] Therefore in one embodiment the invention relates to a method to probe a non-human organism for its capability for the production of the respective fine chemical comprising the steps of
[33065] a) analyzing the sequence and/or the expression of the respective nucleic acid molecule of the invention in least two non-human organisms which differ in the capability to produce the respective fine chemical;
[33066] b) associate the different sequence and/or expression level of the nucleic acid molecules of the invention with their different capability to produce the respective fine chemical;
[33067] c) analyze the sequence and/or the expression of the nucleic acid molecule of the invention in at least a third non-human organism;
[33068] d) predict the capability of the at least third organism to produce the respective fine chemical based by comparing the sequence and/or expression of the nucleic acid of the invention to the sequences and/or expression levels of the nucleic acid molecule of the invention of the at least two organisms analyzed in step a.

[33069] [0411.1.1.4] to [0430.1.1.4] for the disclosure of these paragraphs see [0411.1.1.1] to [0430.1.1.1] above.

[33070] Accordingly the present invention relates to any cell transgenic for any nucleic acid characterized as part of the invention, e.g. conferring the increase of the respective fine chemical threonine in a cell or a non-human organism or a part thereof, e.g. the nucleic acid molecule of the invention, the nucleic acid construct of the invention, the vector of the invention, the expression cassette according to the invention, or a nucleic acid molecule encoding the polypeptide of the invention, e.g. encoding a polypeptide having an activity as the protein as shown in the respective line in Table II, application no. 4, column 3. Due to the above-mentioned activity the respective fine chemical threonine content in a cell or a non-human organism is increased. For example, due to modulation or manipulation, the cellular activity is increased, in a preferred embodiment in organelles such as plastids or mitochondria, e.g. due to an increased expression or specific activity or specific targeting of the subject matters of the invention in a cell or a non-human organism or a part thereof especially in organelles such as plastids or mitochondria, or in another embodiment in the cytosol. Transgenic for a polypeptide having a protein or a protein activity means herein that due to modulation or manipulation of the genome, the activity of protein as shown in the respective line in Table II, application no. 4, column 3 or a protein as shown in the respective line in Table II, application no. 4, column 3-like activity is increased in the cell or non-human organism or part thereof, especially in organelles such as plastids or mitochondria, or especially in the cytosol. Examples are described above in context with the process of the invention.

[33071] for the disclosure of this paragraph see [0432.1.1.1] above.

[33072] A naturally occurring expression cassette—for example the naturally occurring combination of the promoter of the gene encoding a protein as shown in the respective line in Table II, application no. 4, column 5 or 8, preferably the coding region thereof, or fragments or homologs thereof with the corresponding encoding gene—becomes a transgenic expression cassette when it is modified by non-natural, synthetic “artificial” methods such as, for example, mutagenesis. Such methods have been described (U.S. Pat. No. 5,565,350; WO 00/15815; also see above).

[33073] [0434.1.1.4] to [0435.1.1.4] for the disclosure of these paragraph see [0434.1.1.1] to [0435.1.1.1] above.

[33074] Transgenic plants comprising the respective fine chemical(s) synthesized in the process according to the invention can be marketed directly without isolation of the fine chemical synthesized. In the process according to the invention, plants are understood as meaning all plant parts, plant organs such as leaf, stalk, root, tubers or seeds or propagation material or harvested material or the intact plant. In this context, the seed encompasses all parts of the seed such as the seed coats, epidermal cells, seed cells, endosperm or embryonic tissue. The fine chemical produced in the process according to the invention may, however, also be isolated from the plant. In case of threonine this can be in free form or bound to proteins. Fine chemical(s) produced by this process can be harvested by harvesting the non-human organisms either from the culture in which they grow or from the field. For example, this can be done via squeezing, grinding and/or extraction, salt precipitation and/or ion-exchange chromatography of the plant parts, preferably the plant seeds, plant fruits, plant tubers and the like.

[33075] [0440.1.1.4] to [0440.1.1.4] for the disclosure of these paragraphs see [0437.1.1.1] to [0440.1.1.1] above.

[33076] [0442.1.1.4] to [0454.1.1.4] for the disclosure of these paragraphs see [0442.1.1.1] to [0454.1.1.1] above.

[33077] In one embodiment, the present invention relates to a method for the identification of a gene product conferring the production of or an increase in the fine chemical production in a non-human cell, comprising the following steps:
[33078] (a) contacting, e.g. hybridizing, a, some or all nucleic acid molecules of a sample, e.g. cells, tissues, plants or microorganisms or a nucleic acid library, which can contain a candidate gene encoding a gene product conferring the production of or an increase in the fine chemical after expression, with the nucleic acid molecule of the present invention as shown in the respective line in column 5 or 8 of Table I A or B of application no. 4, preferably the coding region thereof, or a fragment or homolog thereof;
[33079] (b) identifying the nucleic acid molecules, which hybridize under relaxed stringent conditions with the nucleic acid molecule of the present invention in particular to the nucleic acid molecule sequence shown in the respective line in Table I, application no. 4, columns 5 or 8, preferably the coding region thereof, of a fragment or a homolog thereof, preferably in Table I B, application no. 4, columns 5 or 8, preferably the coding region thereof, of a fragment or a homolog thereof, and, optionally, isolating the full length cDNA clone or complete genomic clone;
[33080] (c) introducing the candidate nucleic acid molecules or a fragment thereof in host cells, preferably in a plant cell or a microorganism, appropriate for producing the fine chemical;
[33081] (d) expressing the identified nucleic acid molecules in the host cells for which the production of or the increased production of the fine chemical is desired;
[33082] (e) assaying the fine chemical level in the non-human host cells; and
[33083] (f) identifying the nucleic acid molecule and/or its gene product which expression confers the production of or an increase in the fine chemical level in the non-human host cell after expression compared to the wild type.

[33084] for the disclosure of this paragraph see [0456.1.1.1] above.

[33085] In another embodiment, the present invention relates to a method for the identification of a gene product conferring the production of or an increase in the fine chemical production in a cell, comprising the following steps:
[33086] (a) identifying a nucleic acid molecule of a non-human organism, which is at least 20%, 25%, 30%, 35%, 40%, 50%, 60%, 70%, 80%, 90%, 95%, 96%, 97%, 98%, 99%, 99.5% or more homolog to the nucleic acid molecule encoding a polypeptide comprising the polypeptide molecule as shown in the respective line in column 5 or 8 of Table II, application no. 4, or comprising a consensus sequence or a polypeptide motif as shown in the respective line in column 8 of Table IV, application no. 4, or being encoded by a nucleic acid molecule comprising a polynucleotide as shown in the respective line in column 5 or 8 of Table I, application no. 4, preferably the coding region thereof, or a homologue thereof as described herein, for example via homology search in a data bank;
[33087] (b) introducing the candidate nucleic acid molecule in non-human host cells, preferably in a plant cell or a microorganism, appropriate for producing the fine chemical;
[33088] (c) expressing the identified nucleic acid molecule in the non-human host cells;
[33089] (d) assaying the fine chemical level in the non-human host cells; and
[33090] (e) identifying the nucleic acid molecule and its gene product which expression confers the production of or an increase in the fine chemical level in the non-human host cell after expression compared to the wild type.

[33091] for the disclosure of this paragraph see [0458.1.1.1] above

[33092] Further, the nucleic acid molecules disclosed herein, in particular the nucleic acid molecules shown in the respective line in column 5 or 8 of Table I A or B of application no. 4, may be sufficiently homologous to the sequences of related species such that these nucleic acid molecules may serve as markers for the construction of a genomic map in related organism or for association mapping. Furthermore natural variation in the genomic regions corresponding to nucleic acids disclosed herein, in particular the nucleic acid molecule shown in the respective line in column 5 or 8 of Table I A or B, of application no. 4 or homologous thereof, may lead to variation in the activity of the proteins disclosed herein, in particular the proteins comprising polypeptides as shown in the respective lines in column 5 or 8 of Table II A or B, of application no. 4 or their homologous, or comprising the consensus sequence or the polypeptide motif as shown in the respective line in column 8 of Table IV, and in consequence in a natural variation of an increased fine chemical production.

[33093] In consequence natural variation eventually also exists in form of more active allelic variants leading already to a relative increase in the fine chemical. Different variants of the nucleic acid molecules disclosed herein, in particular the nucleic acid molecules comprising the nucleic acid molecules as shown in the respective line in column 5 or 8 of Table I A or B of application no. 4, preferably the coding region thereof, which corresponds to different levels of increase in fine chemical, e.g. different levels of increase in fine chemical, can be indentified and used for marker assisted breeding for an enhanced production of the fine chemical.

[33094] Natural variation may also exist in the regulatory regions, e.g. the promoters of the natural genes comprising the nucleic acid molecules as shown in the respective line column 5 or 8 of Table I A or B of application no. 4, preferably the coding region thereof, which can similarly correspond to different levels of increase in the fine chemical, e.g. different levels of increase in the fine chemical can be identified and used for marker assisted breeding for an enhanced production of the fine chemical.

[33095] Accordingly, the present invention relates to a method for breeding plants for the production of the fine chemical, comprising
[33096] (a) selecting a first plant variety with an increased production of the fine chemical, e.g. based on an increased expression of a nucleic acid molecule of the invention as disclosed herein, in particular of a nucleic acid molecule comprising a nucleic acid molecule as shown in the respective line in column 5 or 8 of Table I A or B of application no. 4, preferably the coding region thereof, or fragments or homologs thereof, or a polypeptide comprising a polypeptide as shown in the respective line in column 5 or 8 of Table II A or B of application no. 4, or fragments or homologs thereof, or comprising a consensus sequence or a polypeptide motif as shown in the respective line in column 8 of Table IV, or a homolog thereof, as described herein;
[33097] (b) associating the level of increased production of the fine chemical, with the expression level or the genomic structure of a gene encoding said polypeptide or said nucleic acid molecule;
[33098] (c) crossing the first plant variety with a second plant variety, which significantly differs in its level of fine chemical; and
[33099] (d) identifying, which of the offspring varieties has got increased production of the fine chemical by the expression level of said polypeptide or nucleic acid molecule or the genomic structure of the gene(s) encoding said polypeptide or nucleic acid molecule of the invention.

[33100] [0462.1.1.4] to [0482.1.1.4] for the disclosure of these paragraphs see [0462.1.1.1] to [0482.1.1.1] above.

[33101] In a further embodiment the present invention is characterized by the features as disclosed in the following items:

[33102] Item 1. A process for the production of the fine chemical threonine
[33103] (a) increasing or generating one or more activities selected from the group consisting of (DL)-glycerol-3-phosphatase, 2,3-dihydroxyphenylpropionate 1,2-dioxygenase, 2-C-methyl-D-erythritol 4-phosphate cytidylyltransferase, 2-oxoglutarate dehydrogenase E1 subunit, 3-phosphoglycerate dehydrogenase, 47266012-protein, 49747384_SOYBEAN-protein, ABC metal ion transporter substrate-binding protein, ABC transporter permease protein, acetolactate synthase small subunit, acetyltransferase, acyl-CoA dehydrogenase, acyl-CoA synthase, argininosuccinate lyase, aspartate aminotransferase, aspartate kinase, At1g09680-protein, At4g32480-protein, At5g16650-protein, ATP synthase subunit beta, ATP-binding component of a transport system, AX653549-protein,b1003-protein, b1108-protein,b1445-protein, b1522-protein,b1670-protein,b1930-protein, b2360-protein, b2399-protein, b2513-protein, b2613-protein, b2739-protein, b2812-protein, b3083-protein, b3442-protein, b3646-protein, b3989-protein, b4029-protein, b4056-protein, b4250-protein, beta-galactosidase, beta-hydroxylase, bifunctional aspartokinase/homoserine dehydrogenase, bifunctional purine biosynthesis protein, branched chain amino acid ABC transporter ATP-binding protein, branched chain aminotransferase, branched-chain amino acid ABC transporter permease protein, calcium-dependent protein kinase, carbamoyl-phosphate synthase subunit, CCAAT-binding transcription factor, CDP-diacylglycerol-serine O-phosphatidyltransferase, cell division control protein, cell division protein, chaperone protein CIpB, coproporphyrinogen III oxidase, cyclin, cyclin D , D-3-phosphoglycerate dehydrogenase, dihydrolipoamide acetyltransferase, dihydroxyacid dehydratase, DNA helicase II, DnaJ-like chaperone, D-serine dehydratase, elongation factor Tu, enoyl-CoA hydratase, enterobacterial common antigen polymerase, eukaryotic translation initiation factor 5, ferredoxin, GDP-mannose dehydrogenase, geranylgeranyl pyrophosphate synthase, gibberellin 20-oxidase, glucose dehydrogenase, glucose-6-phosphate 1-dehydrogenase, glutamate-ammonia-ligase, glutaredoxin, glutathione S-transferase, glycogen (starch) synthase, glycogen synthase, glycoprotease, glycosyl transferase, heat shock protein, heat shock transcription factor, hexose transporter, histone acetyltransferase, homocitrate synthase, homoserine dehydrogenase, hydrolase, isochorismate synthase, ketol-acid reductoisomerase, kinase, L-asparaginase, major facilitator superfamily transporter protein, malate dehydrogenase, malic enzyme, membrane transport protein, metaldependent hydrolase, methyltransferase, mitochondrial dicarboxylate transporter, monothiol glutaredoxin, monthiol glutaredoxin, murein transglycosylase, NADP-dependent malic enzyme, nitrate/nitrite transport protein, oxireductase, peptidase, permease protein of peptide ABC transporter, phosphate transporter, phosphoanhydride phosphorylase, phosphoenolpyruvate carboxykinase, phosphoribosylaminoimidazole carboxylase catalytic subunit, photosystem II protein, polyphosphate kinase, protein kinase, protein phosphatase, pyruvate carboxylase, pyruvate kinase, restriction alleviation protein, sec-independent protein translocase, sensor histidine kinase, serine protease, sll0418-protein, slr0383-protein, succinyl-CoA synthetase beta chain, thioredoxin, threonine synthase, transcription factor, transcriptional regulator, transcriptional regulator protein, transport protein, TTC0881-protein, uroporphyrin-III C-methyltransferase, valine-pyruvate transaminase, XM_{—}473199-protein, ycl027w-protein, ydr183w-protein, YEL030C-A-protein, yfl054c-protein, ygl237c-protein, yhr131c-protein, YJL127W-A-protein, YKL038W-protein, zinc finger protein, and Zm_{—}4842_BE510522-protein, in a non-human organism or a part thereof, preferably a microorganism, a plant cell, a plant or a part thereof, as compared to a corresponding non-transformed wild type non-human organism or a part thereof; and
[33104] (b) growing the non-human organism or a part thereof under conditions which permit the production of threonine or a composition comprising threonine in said non-human organism or in the culture medium surrounding said non-human organism.

[33105] Item 2. A process for the production of a respective fine chemical threonine, which comprises
[33106] (A) (i) increasing or generating of the expression of; and/or
[33107] (ii) increasing or generating the expression of an expression product of; and/or
[33108] (iii) increasing or generating one or more activities of an expression product encoded by;
[33109] at least one respective nucleic acid molecule comprising a nucleic acid molecule selected from the group consisting of:
[33110] (a) a nucleic acid molecule encoding the polypeptide shown in column 5 or 8 of Table II, preferably Table II B, application no.4, or a homolog or a fragment thereof;
[33111] (b) a nucleic acid molecule shown in column 5 or 8 of Table I, preferably Table I B, application no.4, or a homolog or a fragment thereof (preferably the coding region thereof);
[33112] (c) a nucleic acid molecule, which, as a result of the degeneracy of the genetic code, can be derived from a polypeptide sequence depicted in column 5 or 8 of Table II, preferably Table II B, application no.4;
[33113] (d) a nucleic acid molecule having at least 30%, in particular at least 50%, 60%, 70%, 80%, 85%, 90%, 95%, 97%, 98%, 99% or 99.5% identity with the nucleic acid molecule sequence of a polynucleotide comprising the nucleic acid molecule shown in column 5 or 8 of Table I, preferably Table I B, application no. 4, or the coding region thereof;
[33114] (e) a nucleic acid molecule encoding a polypeptide having at least 30%, in particular 50%, 60%, 70%, 80%, 85%, 90%, 95%, 97%, 98%, 99% or 99.5% identity with the amino acid sequence of the polypeptide encoded by the nucleic acid molecule of (a), (b), (c) or (d);
[33115] (f) a nucleic acid molecule which hybridizes with a nucleic acid molecule of (a), (b), (c), (d) or (e) under stringent hybridization conditions;
[33116] (g) a nucleic acid molecule encoding a polypeptide which can be isolated with the aid of monoclonal or polyclonal antibodies made against a polypeptide encoded by one of the nucleic acid molecules of (a), (b), (c), (d), (e) or (f);
[33117] (h) a nucleic acid molecule encoding a polypeptide comprising the consensus sequence or one or more polypeptide motifs as shown in column 8 of Table IV, application no.4;
[33118] (i) a nucleic acid molecule encoding a polypeptide having the activity represented by a respective protein as depicted in column 5 of Table II, application no. 4;
[33119] (j) a nucleic acid molecule which comprises a polynucleotide, which is obtained by amplifying a cDNA library or a genomic library using the primers as depicted in column 8 of Table III, application no. 4; and
[33120] (k) a nucleic acid molecule which is obtainable by screening a suitable nucleic acid library, especially a cDNA library and/or a genomic library, under stringent hybridization conditions with a probe comprising a complementary sequence of a nucleic acid molecule of (a), (b), (c), (d), (e), (f), (g), (h), (i) or (j) or with a fragment thereof, having at least 15 nt, preferably 20 nt, 30 nt, 50 nt, 100 nt, 200 nt, 500 nt, 1000 nt, 1500 nt, 2000 nt or 3000 nt of a nucleic acid molecule complementary to a nucleic acid molecule sequence characterized in (a), (b), (c), (d), (e), (f), (g), (h), (i) or (j);
[33121] or a nucleic acid molecule comprising a sequence which is complementary thereto;
[33122] in a non-human organism or a part thereof, preferably a microorganism, a plant cell, a plant or a part thereof, as compared to a corresponding non-transformed wild type non-human organism or a part thereof; and
[33123] (B) growing the non-human organism or a part thereof under conditions which permit the production of threonine or a composition comprising threonine in said non-human organism or in the culture medium surrounding said non-human organism.

[33124] Item 3. A process of items 1 or 2, comprising of recovering threonine in its free or bound form.

[33125] Item 4. The process of any one of items 1 to 3, comprising the following steps:
[33126] (a) selecting a non-human organism or a part thereof expressing a polypeptide encoded by the nucleic acid molecule characterized in item 2;
[33127] (b) mutagenizing the selected non-human organism or the part thereof;
[33128] (c) comparing the activity or the expression level of said polypeptide in the mutagenized non-human organism or the part thereof with the activity or the expression of said polypeptide of the selected non-human organisms or the part thereof;
[33129] (d) selecting the mutated non-human organisms or parts thereof, which comprise an increased activity or expression level of said polypeptide compared to the selected non-human organism or the part thereof;
[33130] (e) optionally, growing and cultivating the non-human organisms or the parts thereof;
[33131] and
[33132] (f) recovering, and optionally isolating, the free or bound threonine produced by the selected mutated non-human organisms or parts thereof.

[33133] Item 5. The process of any one of items 1 to 4 wherein the activity of said protein or the expression of said nucleic acid molecule is increased or generated transiently or stably.

[33134] Item 6. An isolated nucleic acid molecule comprising a nucleic acid molecule selected from the group consisting of:
[33135] (a) a nucleic acid molecule encoding a polypeptide shown in Table II, application no. 4, column 5 or 8, preferably shown in Table II B, application no. 4, column 8, or a homolog or a fragment thereof;
[33136] (b) a nucleic acid molecule shown in Table I, application no. 4, column 5 or 8, preferably shown in Table I B, application no. 4, column 8, preferably the coding region thereof, or a homolog or a fragment thereof;
[33137] (c) a nucleic acid molecule, which, as a result of the degeneracy of the genetic code, can be derived from a polypeptide sequence depicted in column 5 or 8 of Table II, application no. 4, preferably in column 8 of Table II B, application no. application no.;
[33138] (d) a nucleic acid molecule having at least 30% identity, preferably at least 40%, 50%, 60%, 70%, 75%, 80%, 85%, 90%, 95%, 96%, 97%, 98%, 99%, 99.5%, with the nucleic acid molecule sequence of a polynucleotide comprising the nucleic acid molecule shown in column 5 or 8 of Table I, application no. 3, preferably shown in column 8 of Table I B, application no. 4, preferably the coding region thereof;
[33139] (e) a nucleic acid molecule encoding a polypeptide having at least 30% identity, preferably at least 40%, 50% 60%, 70%, 75%, 80%, 85%, 90%, 95%, 96%, 97%, 98%, 99%, 99.5%, identity with the amino acid sequence of the polypeptide encoded by the nucleic acid molecule of (a), (b), (c) or (d);
[33140] (f) a nucleic acid molecule which hybridizes with a nucleic acid molecule of (a), (b), (c), (d) or (e) under stringent hybridisation conditions;
[33141] (g) a nucleic acid molecule encoding a polypeptide which can be isolated with the aid of monoclonal or polyclonal antibodies made against a polypeptide encoded by one of the nucleic acid molecules of (a), (b), (c), (d), (e) or (f);
[33142] (h) a nucleic acid molecule encoding a polypeptide comprising the consensus sequence or one or more polypeptide motifs as shown in column 8 of Table IV, application no. 4;
[33143] (i) a nucleic acid molecule encoding a polypeptide having the activity represented by a respective protein as depicted in column 5 of Table II, application no. 4;
[33144] (j) a nucleic acid molecule comprising a polynucleotide which is obtained by amplifying a cDNA library or a genomic library using the primers in Table III, application no. 4, column 8;
[33145] and
[33146] (k) nucleic acid molecule which is obtainable by screening a suitable nucleic acid library, especially a cDNA library and/or a genomic library, under stringent hybridization conditions with a probe comprising one of the sequences of the nucleic acid molecule of (a), (b), (c), (d), (e), (f), (g), (h), (i) or (j) or with a fragment of at least 15 nt, preferably 20 nt, 30 nt, 50 nt, 100 nt, 200 nt,500 nt, 1000 nt, 1500 nt, 2000 nt or 3000 nt of the nucleic acid molecule characterized in (a), (b), (c), (d), (e), (f), (g), (h), (i) or (i);
[33147] or a nucleic acid molecule comprising a sequence which is complementary thereto.

[33148] Item 7. A nucleic acid construct which confers the expression of the nucleic acid molecule as defined in item 6, comprising one or more regulatory elements.

[33149] Item 8. An expression cassette comprising
[33150] (a) a promoter, preferably selected from the group consisting of Big35S, PCUbi, Super and USP;
[33151] (b) a nucleic acid molecule as defined in item 6.

[33152] Item 9. A vector comprising the nucleic acid molecule as defined in item 6 or the nucleic acid construct as claimed in item 7 or the expression cassette as claimed in item 8.

[33153] Item 10. A host cell or a plant organelle, which has been transformed with the vector as claimed in item 9 or the nucleic acid molecule as defined in item 6 or the nucleic acid construct as claimed in item 7 or the expression cassette as claimed in item 8.

[33154] Item 11. The host cell of item 10, which is a plant cell or a microorganism.

[33155] Item 12. A process for producing a polypeptide, wherein the polypeptide is expressed in a host cell as claimed in item 10 or 11.

[33156] Item 13. A polypeptide produced by the process as claimed in item 12 or encoded by the nucleic acid molecule as defined in item 6.

[33157] Item 14. An antibody, which binds specifically to the polypeptide as claimed in item 13.

[33158] Item 15. A plant tissue, propagation material, harvested material or a plant comprising the host cell as claimed in item 10 or 11.

[33159] Item 16. A process for the identification of a compound conferring an increase in threonine production in a non-human organism, comprising the steps:
[33160] (a) culturing a plant cell or tissue or microorganism or maintaining a plant expressing the polypeptide encoded by the nucleic acid molecule as defined in item 6 conferring an increase in the amount of threonine in a non-human organism or a part thereof and a readout system capable of interacting with the polypeptide under suitable conditions which permit the interaction of the polypeptide with said readout system in the presence of a compound or a sample comprising a plurality of compounds and capable of providing a detectable signal in response to the binding of a compound to said polypeptide under conditions which permit the expression of said readout system and of the polypeptide encoded by the nucleic acid molecule of item 6 conferring an increase in the amount of threonine in a non-human organism or a part thereof;
[33161] (b) identifying if the compound is an effective agonist by detecting the presence or absence or increase of a signal produced by said readout system.

[33162] Item 17. A method for the production of an agricultural composition comprising the steps of the method of item 16 and formulating the compound identified in item 16 in a form acceptable for an application in agriculture.

[33163] Item 18. A composition comprising the nucleic acid molecule as defined in item 6, the polypeptide as claimed in item 13, the nucleic acid construct as claimed in item 7, the expression cassette as claimed in item 8, the vector as claimed in item 9, the compound as claimed in item 16, the antibody as claimed in item 14, and optionally an agricultural acceptable carrier.

[33164] Item 19. Use of the nucleic acid molecule as defined in item 6 for the identification of a nucleic acid molecule conferring an increase in threonine after expression.

[33165] Item 20. Cosmetic, pharmaceutical, food or feed composition comprising the nucleic acid moleculeas defined in item 6, the polypeptide as claimed in item 13, the nucleic acid construct as claimed in item 7, the expression cassette as claimed in item 8, the vector as claimed in item 9, the antibody as claimed in item 14 , the plant or a part thereof, or plant tissue as claimed in item 15, the harvested material or propagation material as claimed in item 15 or the host cell of item as claimed in items 10 or 11.

[33166] Item 21. Use of the nucleic acid molecule as defined in item 6, the polypeptide as claimed in item 13, the nucleic acid construct as claimed in item 7, the expression cassette as claimed in item 8, the vector as claimed in item 9, the plant or plant tissue as claimed in item 15, or the host cell as claimed in item 10 to 11 for the production of plant resistant to a herbicide inhibiting the production of threonine.

[33167] [0483.1.1.4] to [0494.1.1.4] for the disclosure of these paragraphs see [0483.1.1.1] to [0494.1.1.1] above.

### Example 11a

### PCR Amplification of the Sequences

[33168] Unless otherwise specified, standard methods as described in Sambrook et al., Molecular Cloning: A laboratory manual, Cold Spring Harbor 1989, Cold Spring Harbor Laboratory Press are used.

[33169] The inventive sequences as shown in the respective line in Table I, column 5, preferably the coding region thereof, were amplified by PCR as described in the protocol of the Pfu Ultra, Pfu Turbo or Herculase DNA polymerase (Stratagene). The composition for the protocol of the Pfu Ultra, Pfu Turbo or Herculase DNA polymerase was as follows: 1×PCR buffer (Stratagene), 0.2 mM of each dNTP, 100 ng genomic DNA of Saccharomyces cerevisiae (strain S288C; Research Genetics, Inc., now Invitrogen), Escherichia coli (strain MG1655; E. coli Genetic Stock Center), Synechocystis sp. (strain PCC6803), Azotobacter vinelandii (strain N.R. Smith,16), Thermus thermophilus (HB8) or 50 ng cDNA from various tissues and development stages of Arabidopsis thaliana (ecotype Columbia), Physcomitrella patens, Glycine max (variety Resnick), Brassica napus, Oryza sativa or Zea mays (variety B73, Mo17, A188), 50 pmol forward primer, 50 pmol reverse primer, with or without 1 M Betaine, 2.5 u Pfu Ultra, Pfu Turbo or Herculase DNA polymerase.

[33170] The amplification cycles were as follows:

[33171] 1 cycle of 2-3 minutes at 94-95° C., then 25-36 cycles with 30-60 seconds at 94-95° C., 30-45 seconds at 50-60° C. and 210-480 seconds at 72° C., followed by 1 cycle of 5-10 minutes at 72° C., then 4-16° C.—preferably for Saccharomyces cerevisiae, Escherichia coli, Synechocystis sp., Azotobacter vinelandii, Thermus thermophilus.

[33172] In case of Arabidopsis thaliana, Brassica napus, Glycine max, Oryza sativa, Physcomitrella patens, Zea mays the amplification cycles were as follows:

[33173] 1 cycle with 30 seconds at 94° C., 30 seconds at 61° C., 15 minutes at 72° C., then 2 cycles with 30 seconds at 94° C., 30 seconds at 60° C., 15 minutes at 72° C., then 3 cycles with 30 seconds at 94° C., 30 seconds at 59° C., 15 minutes at 72° C., then 4 cycles with 30 seconds at 94° C., 30 seconds at 58° C., 15 minutes at 72° C., then 25 cycles with 30 seconds at 94° C., 30 seconds at 57° C., 15 minutes at 72° C., then 1 cycle with 10 minutes at 72° C., then finally 4-16° C.

[33174] RNAs were generated with the RNeasy Plant Kit according to the standard protocol (Qiagen) and Superscript II Reverse Transkriptase was used to produce double stranded cDNA according to the standard protocol (Invitrogen).

[33175] ORF specific primer pairs for the genes to be expressed are shown in the respective line in Table III, column 8. The following adapter sequences were added to Saccharomyces cerevisiae ORF specific primers (see Table III) for cloning purposes:

SEQ ID NO: 20

| | | |
|---|---|---|
| i) | foward primer: | 5′-GGAATTCCAGCTGACCACC-3′ |

SEQ ID NO: 21

| | | |
|---|---|---|
| ii) | reverse primer: | 5′-GATCCCCGGGAATTGCCATG-3′ |

[33176] These adaptor sequences allow cloning of the ORF into the various vectors containing the Resgen adaptors, see table column E of Table c.

[33177] The following adapter sequences were added to Saccharomyces cerevisiae, Escherichia coli, Synechocystis sp., Azotobacter vinelandii, Thermus thermophilus, Arabidopsis thaliana, Brassica napus, Glycine max, Oryza sativa , Physcomitrella patens, or Zea mays ORF specific primers for cloning purposes:

SEQ ID NO: 22
iii) forward primer: 5′-TTGCTCTTCC-3′
SEQ ID NO: 23
iiii) reverse primer: 5′-TTGCTCTTCG-3′

[33178] The adaptor sequences allow cloning of the ORF into the various vectors containing the Colic adaptors, see table column E of Table c.

[33179] Therefore for amplification and cloning of Saccharomyces cerevisiae SEQ ID NO: 62524, a primer consisting of the adaptor sequence i) and the ORF specific sequence SEQ ID NO: 62712 and a second primer consisting of the adaptor sequence ii) and the ORF specific sequence SEQ ID NO: 62713 were used.

[33180] For amplification and cloning of Escherichia coli SEQ ID NO: 6818, a primer consisting of the adaptor sequence iii) and the ORF specific sequence SEQ ID NO: 7076 and a second primer consisting of the adaptor sequence iiii) and the ORF specific sequence SEQ ID NO: 7077 were used.

[33181] For amplification and cloning of Synechocystis sp. SEQ ID NO: 11423, a primer consisting of the adaptor sequence iii) and the ORF specific sequence SEQ ID NO: 11465 and a second primer consisting of the adaptor sequence iiii) and the ORF specific sequence SEQ ID NO: 11466 were used.

[33182] For amplification and cloning of Arabidopsis thaliana SEQ ID NO: 352, a primer consisting of the adaptor sequence iii) and the ORF specific sequence SEQ ID NO: 380 and a second primer consisting of the adaptor sequence iiii) and the ORF specific sequence SEQ ID NO: 381 were used.

[33183] For amplification and cloning of Azotobacter vinelandii SEQ ID NO: 5557, a primer consisting of the adaptor sequence iii) and the ORF specific sequence SEQ ID NO: 6033 and a second primer consisting of the adaptor sequence iiii) and the ORF specific sequence SEQ ID NO: 6034 were used.

[33184] For amplification and cloning of Glycine max SEQ ID NO: 69, a primer consisting of the adaptor sequence iii) and the ORF specific sequence SEQ ID NO: 343 and a second primer consisting of the adaptor sequence iiii) and the ORF specific sequence SEQ ID NO: 344 were used.

[33185] For amplification and cloning of Oryza sativa SEQ ID NO: 34301, a primer consisting of the adaptor sequence iii) and the ORF specific sequence SEQ ID NO: 34595 and a second primer consisting of the adaptor sequence iiii) and the ORF specific sequence SEQ ID NO: 34596 were used.

[33186] For amplification and cloning of Thermus thermophilus SEQ ID NO: 12974, a primer consisting of the adaptor sequence iii) and the ORF specific sequence SEQ ID NO: 13372 and a second primer consisting of the adaptor sequence iiii) and the ORF specific sequence SEQ ID NO: 13373 were used.

[33187] For amplification and cloning of Zea mays SEQ ID NO: 68413, a primer consisting of the adaptor sequence iii) and the ORF specific sequence SEQ ID NO: 68531 and a second primer consisting of the adaptor sequence iiii) and the ORF specific sequence SEQ ID NO: 68532 were used.

[33188] Following these examples every sequence disclosed in Table I, preferably column 5, especially the coding region thereof can be cloned by fusing the adaptor sequences to the respective specific primers sequences as disclosed in Table III, column 8 using the respective vectors shown in Table c.

[33189] [0496.1.1.4] to [0499.1.1.4] for the disclosure of these paragraphs see [0496.1.1.1] to [0499.1.1.1] above.

### Example 11e

### Cloning of Inventive Sequences as Sown in Table I, Column 5 in the Different Expression Vectors

[33190] For cloning of for example SEQ ID NO: 6818 from Escherichia coli or any other ORF from Escherichia coli, Synechocystis sp., Azotobacter vinelandii, Thermus thermophilus, Arabidopsis thaliana, Glycine max, Oryza sativa, or Zea mays the vector DNA was treated with the restriction enzymes Pacl and Ncol following the standard protocol (MBI Fermentas).

[33191] For cloning for example the ORFs of SEQ ID NO: 62524 from Saccharomyces cerevisiae or any other ORF from Saccharomyces cerevisiae into vectors containing the Resgen adaptor sequence the respective vector DNA was treated with the restriction enzyme Ncol.

[33192] For cloning of for example ORFs SEQ ID NO: 14885 from Saccharomyces cerevisiae or any other ORF from Saccharomyces cerevisiae into vectors containing the Colic adaptor sequence, the respective vector DNA was treated with the restriction enzymes Pacl and Ncol following the standard protocol (MBI Fermentas).

[33193] In all cases the reaction was stopped by inactivation at 70° C. for 20 minutes and purified over QIAquick or NucleoSpin Extract II columns following the standard protocol (Qiagen or Macherey-Nagel).

[33194] Then the PCR-product representing the amplified ORF with the respective adapter sequences and the vector DNA were treated with T4 DNA polymerase according to the standard protocol (MBI Fermentas) to produce single stranded overhangs with the parameters 1 unit T4 DNA polymerase at 37° C. for 2-10 minutes for the vector and 1-2 u T4 DNA polymerase at 15-17° C. for 10-60 minutes for the PCR product representing SEQ ID NO: 6818.

[33195] The reaction was stopped by addition of high-salt buffer and purified over QIAquick or NucleoSpin Extract II columns following the standard protocol (Qiagen or Macherey-Nagel).

[33196] According to this example the skilled person is able to clone all sequences disclosed in Table I, preferably column 5 or column 8, especially the coding region thereof.

[33197] Approximately 30-60 ng of prepared vector and a defined amount of prepared amplificate were mixed and hybridized at 65° C. for 15 minutes followed by 37° C. 0,1 ° C./1 seconds, followed by 37° C. 10 minutes, followed by 0,1 ° C./1 seconds, then 4-10 ° C.

[33198] The ligated constructs were transformed in the same reaction vessel by addition of competent E. coli cells (strain DHSalpha) and incubation for 20 minutes at 1° C. followed by a heat shock for 90 seconds at 42° C. and cooling to 1-4° C. Then, complete medium (SOC) was added and the mixture was incubated for 45 minutes at 37° C. The entire mixture was subsequently plated onto an agar plate with 0.05 mg/ml kanamycin and incubated overnight at 37° C.

[33199] The outcome of the cloning step was verified by amplification with the aid of primers which bind upstream and downstream of the integration site, thus allowing the amplification of the insertion. The amplifications were carried out as described in the protocol of Taq DNA polymerase (Gibco-BRL).

[33200] The amplification cycles were as follows:

[33201] 1 cycle of 1-5 minutes at 94° C., followed by 35 cycles of in each case 15-60 seconds at 94° C., 15-60 seconds at 50-66° C. and 5-15 minutes at 72° C., followed by 1 cycle of 10 minutes at 72° C., then 4-16° C.

[33202] Several colonies were checked, but only one colony for which a PCR product of the expected size was detected was used in the following steps.

[33203] A portion of this positive colony was transferred into a reaction vessel filled with complete medium (LB) supplemented with kanamycin and incubated overnight at 37° C.

[33204] The plasmid preparation was carried out as specified in the Qiaprep or NucleoSpin Multi-96 Plus standard protocol (Qiagen or Macherey-Nagel).

[33205] [0501.1.1.4] to [0503.1.1.4] for the disclosure of these paragraphs see [0501.1.1.1] to [0503.1.1.1] above. Table d showing results of plant analyses

TABLE d

| SeqID | Target | Locus | Metabolite | Source | Promotor | Method | Min | Max |
|---|---|---|---|---|---|---|---|---|
| 15187 | non- | 47266012_ | threonine | ARA_LEAF | p-PcUBI | GC | 19 | 26 |
| | targeted | SOYBEAN | | | | | | |
| 69 | non- | 49747384_ | threonine | ARA_LEAF | p-PcUBI | LC | 31 | 100 |
| | targeted | SOYBEAN | | | | | | |
| 16883 | plastidic | 59582753_ | threonine | ARA_LEAF | p-PcUBI | GC | 16 | 54 |
| | | SOYBEAN | | | | | | |
| 352 | non- | At1g09680 | threonine | ARA_LEAF | p-PcUBI | GC | 18 | 69 |
| | targeted | | | | | | | |
| 627 | non- | At1g31230 | threonine | ARA_LEAF | Big35S | LC | 231 | 2283 |
| | targeted | | | | | | | |
| 17968 | non- | At1g36730 | threonine | ARA_LEAF | p-PcUBI | GC | 18 | 84 |
| | targeted | | | | | | | |
| 18070 | non- | At1g43850 | threonine | ARA_LEAF | p-PcUBI | GC | 18 | 144 |
| | targeted | | | | | | | |
| 812 | non- | At1g48040 | threonine | ARA_LEAF | p-PcUBI | LC | 24 | 88 |
| | targeted | | | | | | | |
| 18235 | non- | At1g48260 | threonine | ARA_LEAF | p-PcUBI | LC | 29 | 127 |
| | targeted | | | | | | | |
| 19419 | non- | At1g72770 | threonine | ARA_LEAF | p-PcUBI | LC | 41 | 302 |
| | targeted | | | | | | | |
| 1298 | non- | At2g25070 | threonine | ARA_LEAF | p-PcUBI | LC | 27 | 148 |
| | targeted | | | | | | | |
| 20346 | non- | At2g30540 | threonine | ARA_LEAF | p-PcUBI | GC | 21 | 74 |
| | targeted | | | | | | | |
| 22921 | non- | At3g20910 | threonine | ARA_LEAF | p-PcUBI | GC | 19 | 52 |
| | targeted | | | | | | | |
| 1815 | non- | At3g23000 | threonine | ARA_LEAF | p-PcUBI | GC | 16 | 83 |
| | targeted | | | | | | | |
| 68777 | non- | At3g27540 | threonine | ARA_LEAF | p-PcUBI | GC | 20 | 48 |
| | targeted | | | | | | | |
| 2573 | non- | At3g62930 | threonine | ARA_LEAF | p-PcUBI | LC | 28 | 49 |
| | targeted | | | | | | | |
| 2935 | non- | At3g62950 | threonine | ARA_LEAF | p-PcUBI | LC | 32 | 130 |
| | targeted | | | | | | | |
| 23482 | non- | At4g15660 | threonine | ARA_LEAF | p-PcUBI | LC | 31 | 672 |
| | targeted | | | | | | | |
| 3279 | non- | At4g15670 | threonine | ARA_LEAF | p-PcUBI | LC | 29 | 92 |
| | targeted | | | | | | | |
| 23844 | non- | At4g15690 | threonine | ARA_LEAF | p-PcUBI | LC | 26 | 59 |
| | targeted | | | | | | | |
| 24232 | non- | At4g18880 | threonine | ARA_LEAF | p-PcUBI | LC | 32 | 75 |
| | targeted | | | | | | | |
| 4040 | non- | At4g32480 | threonine | ARA_LEAF | p-PcUBI | GC | 32 | 265 |
| | targeted | | | | | | | |
| 24311 | non- | At4g34160 | threonine | ARA_LEAF | p-PcUBI | GC | 40 | 97 |
| | targeted | | | | | | | |
| 4348 | non- | At4g35310 | threonine | ARA_LEAF | p-PcUBI | LC | 29 | 102 |
| | targeted | | | | | | | |
| 24492 | non- | At5g07200 | threonine | ARA_LEAF | p-PcUBI | GC | 18 | 54 |
| | targeted | | | | | | | |
| 93451 | non- | At5g13280 | threonine | ARA_LEAF | p-PcUBI | GC | 38 | 356 |
| | targeted | | | | | | | |
| 25283 | non- | At5g16650 | threonine | ARA_LEAF | p-PcUBI | GC | 16 | 48 |
| | targeted | | | | | | | |
| 69574 | non- | At5g39950 | threonine | ARA_LEAF | p-PcUBI | GC | 16 | 23 |
| | targeted | | | | | | | |
| 5318 | non- | At5g57050 | threonine | ARA_LEAF | p-PcUBI | GC | 18 | 60 |
| | targeted | | | | | | | |
| 5493 | non- | At5g64920 | threonine | ARA_LEAF | p-PcUBI | LC | 30 | 578 |
| | targeted | | | | | | | |
| 70583 | non- | Avin- | threonine | ARA_LEAF | p-PcUBI | GC | 17 | 41 |
| | targeted | DRAFT_0035 | | | | | | |
| 5557 | non- | Avin- | threonine | ARA_LEAF | p-PcUBI | GC | 33 | 157 |
| | targeted | DRAFT_1495 | | | | | | |
| 26196 | non- | Avin- | threonine | ARA_LEAF | p-PcUBI | GC | 18 | 55 |
| | targeted | DRAFT_1624 | | | | | | |
| 6040 | non- | Avin- | threonine | ARA_LEAF | p-PcUBI | GC | 19 | 37 |
| | targeted | DRAFT_2091 | | | | | | |
| 27021 | non- | Avin- | threonine | ARA_LEAF | p-PcUBI | GC | 25 | 121 |
| | targeted | DRAFT_2344 | | | | | | |
| 27882 | non- | Avin- | threonine | ARA_LEAF | p-PcUBI | GC | 33 | 116 |
| | targeted | DRAFT_2521 | | | | | | |
| 28040 | non- | Avin- | threonine | ARA_LEAF | p-PcUBI | GC | 17 | 61 |
| | targeted | DRAFT_2754 | | | | | | |
| 6075 | non- | Avin- | threonine | ARA_LEAF | p-PcUBI | LC | 29 | 249 |
| | targeted | DRAFT_3028 | | | | | | |
| 93532 | non- | Avin- | threonine | ARA_LEAF | p-PcUBI | GC | 24 | 34 |
| | targeted | DRAFT_3086 | | | | | | |
| 72346 | non- | Avin- | threonine | ARA_LEAF | p-PcUBI | GC | 21 | 25 |
| | targeted | DRAFT_3135 | | | | | | |
| 28738 | non- | Avin- | threonine | ARA_LEAF | p-PcUBI | GC | 20 | 139 |
| | targeted | DRAFT_3159 | | | | | | |
| 29286 | non- | Avin- | threonine | ARA_LEAF | p-PcUBI | GC | 18 | 42 |
| | targeted | DRAFT_3209 | | | | | | |
| 6268 | non- | Avin- | threonine | ARA_LEAF | p-PcUBI | LC | 41 | 1222 |
| | targeted | DRAFT_3546 | | | | | | |
| 6510 | non- | Avin- | threonine | ARA_LEAF | p-PcUBI | GC | 22 | 170 |
| | targeted | DRAFT_5103 | | | | | | |
| 32037 | non- | Avin- | threonine | ARA_LEAF | p-PcUBI | GC | 24 | 136 |
| | targeted | DRAFT_5246 | | | | | | |
| 74662 | non- | Avin- | threonine | ARA_LEAF | p-PcUBI | GC | 17 | 35 |
| | targeted | DRAFT_5579 | | | | | | |
| 33596 | non- | Avin- | threonine | ARA_LEAF | p-PcUBI | GC | 18 | 56 |
| | targeted | DRAFT_6093 | | | | | | |
| 34204 | non- | Avin- | threonine | ARA_LEAF | p-PcUBI | GC | 47 | 68 |
| | targeted | DRAFT_6864 | | | | | | |
| 34301 | non- | AX653549 | threonine | ARA_LEAF | p-PcUBI | GC | 17 | 50 |
| | targeted | | | | | | | |
| 34889 | plastidic | B0004 | threonine | ARA_SEED_2 | p-USP | GC | 23 | 123 |
| 6818 | non- | B0078 | threonine | ARA_SEED_2 | p-USP | GC | 33 | 83 |
| | targeted | | | | | | | |
| 35366 | plastidic | B0115 | threonine | ARA_SEED_2 | p-USP | LC | 35 | 50 |
| 35482 | non- | B0124 | threonine | ARA_LEAF | p-Super | GC | 20 | 127 |
| | targeted | | | | | | | |
| 7081 | non- | B0161 | threonine | ARA_LEAF | p-Super | LC | 36 | 144 |
| | targeted | | | | | | | |
| 35590 | non- | B0221 | threonine | ARA_LEAF | p-Super | GC | 18 | 53 |
| | targeted | | | | | | | |
| 35733 | plastidic | B0344 | threonine | ARA_SEED_2 | p-USP | GC | 36 | 41 |
| 7269 | plastidic | B0348 | threonine | ARA_SEED_2 | p-USP | GC | 36 | 157 |
| 7333 | non- | B0449 | threonine | ARA_LEAF | p-Super | GC | 33 | 123 |
| | targeted | | | | | | | |
| 7686 | non- | B0486 | threonine | ARA_LEAF | p-Super | GC | 29 | 45 |
| | targeted | | | | | | | |
| 35967 | plastidic | B0593 | threonine | ARA_LEAF | p-Super | LC | 31 | 76 |
| 93678 | non- | B0695 | threonine | ARA_LEAF | p-Super | LC | 27 | 50 |
| | targeted | | | | | | | |
| 93793 | plastidic | B0728 | threonine | ARA_LEAF | p-Super | GC | 20 | 50 |
| 7917 | non- | B0898 | threonine | ARA_LEAF | p-Super | GC | 19 | 355 |
| | targeted | | | | | | | |
| 36809 | non- | B0980 | threonine | ARA_SEED_2 | p-USP | GC | 27 | 117 |
| | targeted | | | | | | | |
| 7941 | non- | B1003 | threonine | ARA_LEAF | p-Super | GC | 60 | 144 |
| | targeted | | | | | | | |
| 36937 | non- | B1108 | threonine | ARA_LEAF | p-Super | GC | 17 | 59 |
| | targeted | | | | | | | |
| 77768 | non- | B1348 | threonine | ARA_LEAF | p-Super | LC | 32 | 412 |
| | targeted | | | | | | | |
| 38289 | non- | B1445 | threonine | ARA_LEAF | p-Super | LC | 34 | 72 |
| | targeted | | | | | | | |
| 77774 | non- | B1479 | threonine | ARA_SEED_2 | p-USP | GC | 71 | 160 |
| | targeted | | | | | | | |
| 7947 | non- | B1522 | threonine | ARA_LEAF | p-Super | LC | 30 | 93 |
| | targeted | | | | | | | |
| 78753 | non- | B1670 | threonine | ARA_LEAF | p-Super | GC | 18 | 47 |
| | targeted | | | | | | | |
| 8363 | plastidic | B1854 | threonine | ARA_SEED_2 | p-USP | GC | 28 | 121 |
| 79181 | non- | B1930 | threonine | ARA_LEAF | p-Super | GC | 16 | 77 |
| | targeted | | | | | | | |
| 38947 | non- | B2063 | threonine | ARA_LEAF | p-Super | GC | 17 | 157 |
| | targeted | | | | | | | |
| 39219 | non- | B2360 | threonine | ARA_LEAF | p-Super | GC | 21 | 27 |
| | targeted | | | | | | | |
| 79342 | plastidic | B2366 | threonine | ARA_LEAF | p-Super | GC | 19 | 81 |
| 39237 | non- | B2399 | threonine | ARA_LEAF | p-Super | LC | 29 | 74 |
| | targeted | | | | | | | |
| 39255 | non- | B2405 | threonine | ARA_LEAF | p-Super | GC | 20 | 28 |
| | targeted | | | | | | | |
| 9167 | non- | B2513 | threonine | ARA_LEAF | p-Super | LC | 38 | 74 |
| | targeted | | | | | | | |
| 40665 | non- | B2613 | threonine | ARA_LEAF | p-Super | GC | 19 | 54 |
| | targeted | | | | | | | |
| 80756 | non- | B2701 | threonine | ARA_LEAF | p-Super | GC | 30 | 59 |
| | targeted | | | | | | | |
| 40741 | non- | B2714 | threonine | ARA_LEAF | p-Super | GC | 17 | 68 |
| | targeted | | | | | | | |
| 80906 | non- | B2739 | threonine | ARA_LEAF | p-Super | LC | 28 | 74 |
| | targeted | | | | | | | |
| 81075 | non- | B2747 | threonine | ARA_LEAF | p-Super | GC | 29 | 59 |
| | targeted | | | | | | | |
| 40795 | plastidic | B2812 | threonine | ARA_LEAF | p-Super | GC | 23 | 44 |
| 40795 | non- | B2812 | threonine | ARA_LEAF | p-Super | LC | 28 | 59 |
| | targeted | | | | | | | |
| 81988 | plastidic | B2913 | threonine | ARA_SEED_2 | p-USP | GC | 26 | 200 |
| 41499 | non- | B2957 | threonine | ARA_LEAF | p-Super | GC | 18 | 72 |
| | targeted | | | | | | | |
| 42046 | non- | B3064 | threonine | ARA_SEED_2 | p-Super | GC | 23 | 76 |
| | targeted | | | | | | | |
| 82424 | non- | B3083 | threonine | ARA_LEAF | p-Super | LC | 26 | 46 |
| | targeted | | | | | | | |
| 42502 | non- | B3262 | threonine | ARA_LEAF | p-Super | LC | 28 | 141 |
| | targeted | | | | | | | |
| 94051 | mitochon- | B3429 | threonine | ARA_LEAF | p-Super | GC | 27 | 60 |
| | drial | | | | | | | |
| 94380 | non- | B3442 | threonine | ARA_LEAF | p-Super | LC | 33 | 44 |
| | targeted | | | | | | | |
| 10172 | plastidic | B3572 | threonine | ARA_SEED_2 | p-USP | GC | 24 | 80 |
| 83429 | non- | B3646 | threonine | ARA_LEAF | p-Super | GC | 24 | 35 |
| | targeted | | | | | | | |
| 43248 | non- | B3732 | threonine | ARA_LEAF | p-Super | GC | 17 | 37 |
| | targeted | | | | | | | |
| 10252 | non- | B3771 | threonine | ARA_SEED_2 | p-USP | GC | 26 | 72 |
| | targeted | | | | | | | |
| 94386 | non- | B3774 | threonine | ARA_SEED_2 | p-USP | LC | 29 | 91 |
| | targeted | | | | | | | |
| 43800 | non- | B3793 | threonine | ARA_LEAF | p-Super | GC | 17 | 70 |
| | targeted | | | | | | | |
| 43839 | non- | B3813 | threonine | ARA_SEED_2 | p-USP | GC | 25 | 94 |
| | targeted | | | | | | | |
| 83821 | non- | B3872 | threonine | ARA_LEAF | p-Super | GC | 17 | 51 |
| | targeted | | | | | | | |
| 44372 | non- | B3989 | threonine | ARA_LEAF | p-Super | GC | 22 | 68 |
| | targeted | | | | | | | |
| 83835 | plastidic | B4024 | threonine | ARA_SEED_2 | p-USP | GC | 64 | 1969 |
| 10740 | non- | B4029 | threonine | ARA_LEAF | p-Super | GC | 21 | 213 |
| | targeted | | | | | | | |
| 94542 | non- | B4056 | threonine | ARA_LEAF | p-Super | GC | 18 | 43 |
| | targeted | | | | | | | |
| 94735 | non- | B4250 | threonine | ARA_LEAF | p-Super | LC | 25 | 60 |
| | targeted | | | | | | | |
| 45321 | non- | B4256 | threonine | ARA_LEAF | p-Super | GC | 20 | 95 |
| | targeted | | | | | | | |
| 10811 | non- | GM02LC12622 | threonine | ARA_LEAF | p-PcUBI | GC | 20 | 83 |
| | targeted | | | | | | | |
| 84198 | non- | GM02LC21368 | threonine | ARA_LEAF | p-PcUBI | GC | 30 | 112 |
| | targeted | | | | | | | |
| 46850 | non- | GM02LC44512 | threonine | ARA_LEAF | p-PcUBI | GC | 24 | 60 |
| | targeted | | | | | | | |
| 48138 | non- | Sll0170 | threonine | ARA_LEAF | p-PcUBI | GC | 23 | 96 |
| | targeted | | | | | | | |
| 49828 | non- | Sll0290 | threonine | ARA_LEAF | p-PcUBI | GC | 17 | 53 |
| | targeted | | | | | | | |
| 94741 | plastidic | Sll0374 | threonine | ARA_LEAF | p-PcUBI | GC | 21 | 30 |
| 84869 | plastidic | Sll0378 | threonine | ARA_LEAF | p-PcUBI | GC | 19 | 83 |
| 94942 | non- | Sll0418 | threonine | ARA_LEAF | p-PcUBI | GC | 17 | 30 |
| | targeted | | | | | | | |
| 51198 | non- | Sll0816 | threonine | ARA_LEAF | p-PcUBI | GC | 19 | 91 |
| | targeted | | | | | | | |
| 51268 | plastidic | Sll0891 | threonine | ARA_LEAF | p-PcUBI | GC | 23 | 61 |
| 51632 | mitochon- | Sll0901 | threonine | ARA_LEAF | p-PcUBI | GC | 39 | 78 |
| | drial | | | | | | | |
| 52364 | non- | Sll0945 | threonine | ARA_LEAF | p-PcUBI | GC | 17 | 56 |
| | targeted | | | | | | | |
| 53456 | non- | Sll1393 | threonine | ARA_LEAF | p-PcUBI | GC | 18 | 84 |
| | targeted | | | | | | | |
| 54337 | mitochon- | Sll1450 | threonine | ARA_LEAF | p-PcUBI | GC | 17 | 40 |
| | drial | | | | | | | |
| 95047 | plastidic | Sll1498 | threonine | ARA_LEAF | p-PcUBI | GC | 18 | 30 |
| 11423 | mitochon- | Sll1545 | threonine | ARA_LEAF | p-PcUBI | GC | 17 | 42 |
| | drial | | | | | | | |
| 85743 | mitochon- | Sll1598 | threonine | ARA_LEAF | p-PcUBI | GC | 21 | 35 |
| | drial | | | | | | | |
| 11471 | mitochon- | Sll1917 | threonine | ARA_LEAF | p-PcUBI | GC | 18 | 67 |
| | drial | | | | | | | |
| 95527 | mitochon- | Slr0150 | threonine | ARA_LEAF | p-PcUBI | GC | 18 | 53 |
| | drial | | | | | | | |
| 95744 | non- | Slr0383 | threonine | ARA_LEAF | p-PcUBI | GC | 18 | 35 |
| | targeted | | | | | | | |
| 56153 | plastidic | Slr0597 | threonine | ARA_LEAF | p-PcUBI | GC | 32 | 35 |
| 95857 | mitochon- | Slr0657 | threonine | ARA_LEAF | p-PcUBI | GC | 20 | 46 |
| | drial | | | | | | | |
| 57235 | plastidic | Slr0739 | threonine | ARA_LEAF | p-PcUBI | GC | 16 | 79 |
| 87610 | mitochon- | Slr0862 | threonine | ARA_LEAF | p-PcUBI | LC | 39 | 45 |
| | drial | | | | | | | |
| 87853 | mitochon- | Slr1133 | threonine | ARA_LEAF | p-PcUBI | GC | 23 | 34 |
| | drial | | | | | | | |
| 58731 | plastidic | Slr1739 | threonine | ARA_LEAF | p-PcUBI | LC | 27 | 512 |
| 60301 | non- | TTC0035 | threonine | ARA_LEAF | p-PcUBI | LC | 32 | 102 |
| | targeted | | | | | | | |
| 60859 | non- | TTC0216 | threonine | ARA_LEAF | p-PcUBI | GC | 18 | 35 |
| | targeted | | | | | | | |
| 88875 | non- | TTC0881 | threonine | ARA_LEAF | p-PcUBI | GC | 19 | 34 |
| | targeted | | | | | | | |
| 61553 | non- | TTC0917 | threonine | ARA_LEAF | p-PcUBI | GC | 18 | 26 |
| | targeted | | | | | | | |
| 12974 | non- | TTC1550 | threonine | ARA_LEAF | p-PcUBI | GC | 32 | 94 |
| | targeted | | | | | | | |
| 62244 | non- | XM_473199 | threonine | ARA_LEAF | p-PcUBI | LC | 25 | 82 |
| | targeted | | | | | | | |
| 96022 | plastidic | Yal038w | threonine | ARA_SEED_2 | p-Super | GC | 23 | 101 |
| 62524 | non- | Ybl021c | threonine | ARA_LEAF | Big35S | GC | 17 | 83 |
| | targeted | | | | | | | |
| 62717 | non- | Ybr160w | threonine | ARA_LEAF | Big35S | LC | 25 | 60 |
| | targeted | | | | | | | |
| 96779 | plastidic | Ybr218c | threonine | ARA_LEAF | p-Super | GC | 17 | 27 |
| 96980 | plastidic | Ycl027w | threonine | ARA_LEAF | p-Super | GC | 19 | 26 |
| 63334 | plastidic | Ydr044w | threonine | ARA_LEAF | p-PcUBI | LC | 74 | 194 |
| 90103 | plastidic | Ydr183w | threonine | ARA_LEAF | p-Super | GC | 17 | 53 |
| 96986 | plastidic | Ydr342c | threonine | ARA_LEAF | p-PcUBI | GC | 19 | 92 |
| 97294 | non- | Yel030c-a | threonine | ARA_LEAF | Big35S | GC | 16 | 31 |
| | targeted | | | | | | | |
| 97298 | plastidic | Yel069c | threonine | ARA_LEAF | p-PcUBI | GC | 21 | 35 |
| 64148 | plastidic | Yfl054c | threonine | ARA_LEAF | p-Super | GC | 16 | 23 |
| 64177 | non- | Ygl237c | threonine | ARA_LEAF | Big35S | LC | 27 | 84 |
| | targeted | | | | | | | |
| 97620 | plastidic | Yhr131c | threonine | ARA_LEAF | p-Super | GC | 31 | 32 |
| 14769 | plastidic | Yil053w | threonine | ARA_LEAF | p-Super | GC | 19 | 46 |
| 64563 | plastidic | Yil074c | threonine | ARA_LEAF | p-Super | GC | 22 | 34 |
| 90306 | plastidic | Yir038c | threonine | ARA_LEAF | p-Super | GC | 16 | 25 |
| 64964 | plastidic | Yjl073w | threonine | ARA_LEAF | p-Super | GC | 24 | 27 |
| 97631 | non- | Yjl127w-a | threonine | ARA_LEAF | Big35S | GC | 18 | 61 |
| | targeted | | | | | | | |
| 97635 | non- | Yjl219w | threonine | ARA_SEED_2 | p-PcUBI | GC | 27 | 157 |
| | targeted | | | | | | | |
| 14885 | plastidic | Yjr139c | threonine | ARA_LEAF | p-PcUBI | GC | 16 | 923 |
| 90409 | plastidic | Yjr148w | threonine | ARA_LEAF | p-Super | GC | 18 | 59 |
| 90602 | plastidic | YKL038W | threonine | ARA_LEAF | p-PcUBI | GC | 16 | 45 |
| 98075 | plastidic | Ykr097w | threonine | ARA_LEAF | p-Super | GC | 17 | 35 |
| 90615 | non- | Ylr027c | threonine | ARA_LEAF | Big35S | LC | 57 | 111 |
| | targeted | | | | | | | |
| 98243 | non- | Ylr348c | threonine | ARA_LEAF | p-PcUBI | GC | 23 | 68 |
| | targeted | | | | | | | |
| 91785 | plastidic | Yml123c | threonine | ARA_LEAF | p-Super | GC | 22 | 60 |
| 67684 | plastidic | Yol045w | threonine | ARA_LEAF | p-Super | LC | 32 | 56 |
| 92540 | plastidic | Yor244w | threonine | ARA_LEAF | p-Super | GC | 16 | 24 |
| 98445 | non- | Ypr119w | threonine | ARA_LEAF | Big35S | GC | 16 | 37 |
| | targeted | | | | | | | |
| 68413 | non- | Zm_4842_B | threonine | ARA_LEAF | p-PcUBI | GC | 16 | 78 |
| | targeted | E510522 | | | | | | |

[33206] Column 1 shows the SEQ ID NO, Column 2 shows the expression type (targeted or non-targeted), Column 3 shows the “gene name” (locus), Column 4 shows the metabolite analyzed, Column 5 indicates the A. thaliana source tissue analyzed, Column 6 indicates the used promoter for expression, Column 7 indicates the analytical method. Columns 8 and 9 show the minumum and the maximum increase of the analyzed metabolite(in percent) in comparison to the wild type (=ratio_by_weight, given as percent increase).

[33207] When the analyses were repeated independently, all results proved to be significant.

[33208] [0505.1.1.4] to [0515.1.1.4] for the disclosure of this paragraph see [0505.1.1.1] to [0515.1.1.1] above.

[33209] In a further embodiment, the present invention relates to a further process for the production of the fine chemical trypthophane as defined below and corresponding embodiments as described herein as follows.

[33210] [0001.1.1.5] to [0008.1.1.5] for the disclosure of these paragraphs see [0001.1.1.1] to [0008.1.1.1] above.

[33211] As described above, the essential amino acids are necessary for humans and many mammals, for example for livestock. Tryptophane (L-tryptophane) is one of the most reactive amino acids. At pH 4.0-6.0 tryptophane amino group reacts with aldehydes producing Schiff-bases. On the other hand if the amino group is blocked by acetylation, tryptophane reacts with aldehydes yielding carboline derivatives (1,2,3,4-tetrahydro-carboline-3-carboxylic acid). Tryptophane plays a unique role in defense against infection because of its relative scarcity compared to other amino acids. During infection, the body induces tryptophane-catabolizing enzymes which increase tryptophane's scarcity in an attempt to starve the infecting organisms (Brown R. R., Ozaki Y., Datta S. P. et al., “Implications of interferon-induced tryptophane catabolism in cancer, auto-immune diseases and AIDS” in “Kynurenine and Serotonin Pathways, Schwarcz R. et al. (Eds.), Plenum Press, New York, 1991). In most proteins, tryptophane is the least abundant essential amino acid, comprising approximately 1% of plant proteins and 1.5% of animal proteins. Although the minimum daily requirement for tryptophane is 160 mg for women and 250 mg for men, 500-700 mg are recommended to ensure high-quality protein intake. Actual tryptophane utilization is substantially higher. Men use approximately 3.5 grams of tryptophane to make one days's worth of protein (Peters J. C., “Tryptophane Nutrition and Metabolism: an Overview” in “Kynurenine and Serotonin Pathways”, Schwarcz R. et al., (Eds.), Plenum Press, New York, 1991). The balance is obtained by hepatic recycling of tryptophane from used (catabolized) proteins.

[33212] Dietary tryptophane is well absorbed intestinally. About 10% of the tryptophane circulating in the bloodstream is free, and 90% is bound to the protein albumin. The tryptophane binding site on albumin also has affinity for free fatty acids (FFAs), so tryptophane is displaced when FFAs rise, as when fasting.

[33213] Although tryptophane is not usually the limiting amino acid in protein synthesis, tryptophane may become insufficient for the normal functioning of other tryptophane-dependent pathways. Numerous lines of research point to tryptophane's central role in regulation of feeding and other behaviors. Tryptophane is not only typically the least abundant amino acid in the liver's free amino acid pool, but liver tryptophane-tRNA levels fall faster during food deprivation than other indispensable amino acids (Rogers Q. R., “The nutritional and metabolic effects of amino acid imbalances” in “Protein Metabolism and Nutrition” Cole D. J. A. (Ed.), Butterworths, London, 1976). Under fasting conditions, and possibly in wasting syndromes, tryptophane may become the rate-limiting amino acid for protein synthesis (Peters J. C., “Tryptophane Nutrition and Metabolism: an Overview” in “Kynurenine and Serotonin Pathways”, Schwarcz R. et al., (Eds.), Plenum Press, New York, 1991).

[33214] [0010.1.1.5] to [0011.1.1.5] for the disclosure of these paragraphs see [0010.1.1.1] to [0011.1.1.1] above.

[33215] It is an object of the present invention to develop an inexpensive process for the synthesis of tryptophan, especially L-tryptophan. L-tryptophan is one of the amino acids which is limiting.

[33216] for the disclosure of this paragraph see [0013.1.1.1] above

[33217] Accordingly, in a first embodiment, the invention relates to a process for the production of tryptophan, or, in other words, of the “fine chemical” or “fine chemical of the invention”.

[33218] The terms “fine chemical of the invention”, “fine chemical” or “the fine chemical” are used herein equally and relate in context of the paragraphs or sections [0014.1.5.5] to [0514.1.1.5] essentially to the metabolite or the metabolites indicated in column 7, application no. 5 of Tables I, II and IV in the respective line.

[33219] Further, the term “in context of any of the paragraphs [0014.1.5.5] to [0514.1.1.5]” as used herein means that for any of said paragraphs [0014.1.5.5] to [0514.1.1.5] the term “the fine chemical” is understood to follow the definition of paragraphs or sections [0014.1.1.5] and [0015.1.5.5], independently whether it refers to any other paragraph or not and whether the reference recites the term “fine chemical” in an other context.

[33220] Thus, in cases where one or more paragraphs or sections are incorporated by reference into any of the present paragraphs [0014.1.5.5] to [0514.1.1.5], e.g. by usage of the term “see paragraph” or the term “for the disclosure of this paragraph see the disclosure of paragraph” or the term “incorporated by reference” or a corresponding term, the incorporated paragraph, section or term “the fine chemical” is also understood to have the meaning according to the definition of paragraph [0014.1.5.5] and [0015.1.5.5].

[33221] Accordingly, in one embodiment, the term “fine chemical of the invention”, “fine chemical” or “the fine chemical” as used herein (alone or in combination, like in FCRP) means “tryptophan in context of the nucleic acid or polypeptide sequences listed in the respective same line of any one of Tables I to IV of application no. 5 and indicating in column 7 the metabolite “tryptophan”.

[33222] In one embodiment, the term tryptophan or the term “fine chemical” mean in context of the paragraphs or sections [0014.1.5.5] to [0514.1.1.5] at least one chemical compound with an activity of the above mentioned tryptophan, respectively.

[33223] Accordingly, in one embodiment, the terms “fine chemical of the invention”, “fine chemical” or “the fine chemical” mean in context of any of the paragraphs [0014.1.1.5] to [0514.1.1.5] tryptophan, preferably the L-enantiomer of tryptophan, its salts, ester or amides in free form or bound form. In a preferred embodiment, the term “the fine chemical” means tryptophan or its salts, in free form or bound to proteins. In a preferred embodiment, the term “the fine chemical” means the L-enantiomer of tryptophan.

[33224] On the other hand in case “tryptophan” is stated it means tryptophan itself, its salts, ester or amides in free form or bound form, preferably the L-enantiomer of tryptophan, its salts, ester or amides in free form or bound to proteins. In a preferred embodiment “tryptophan” means the Lenantiomer of tryptophan in free form. In another preferred embodiment “tryptophan” means the L-enantiomer of tryptophan bound form.

[33225] Further, the term “in context of any of the paragraphs [0014.1.5.5] to [0514.1.1.5]” as used herein means that for any of said paragraphs [0014.1.5.5] to [0514.1.1.5] the term “the fine chemical” is understood to follow the definition of section [0014.1.5.5] or section [0015.1.1.5], independently whether it refers to any other paragraph or not and whether the reference recites the term “fine chemical” in an other context.

[33226] Thus, in cases where one or more paragraphs or sections are incorporated by reference into any of the present paragraphs [0014.1.5.5] to [0514.1.1.5], e.g. by usage of the term “see paragraph” or the term “for the disclosure of this paragraph see the disclosure of paragraph” or the term “incorporated by reference” or a corresponding term, the incorporated paragraph, section or term “the fine chemical” is also understood to have the meaning according to this definition of this paragraph [0015.1.5.5].

[33227] Further, the term “fine chemicals” as used herein relates to compositions comprising said fine chemical(s), i.e. comprising tryptophan, respectively.

[33228] Accordingly, the present invention relates to a process for the production of tryptophan, which comprises
[33229] (a) increasing or generating one or more activities selected from the group consisting of glucose-6-phosphate 1-dehydrogenase in a non-human organism or a part thereof, preferably a microorganism, a plant cell, a plant or a part thereof, as compared to a corresponding non-transformed wild type non-human organism or a part thereof; and
[33230] (b) growing the non-human organism or a part thereof under conditions which permit the production of tryptophan or a composition comprising tryptophan in said non-human organism or in the culture medium surrounding said non-human organism.

[33231] Accordingly, the present invention relates to a process for the production of tryptophan, which comprises
[33232] (a) increasing or generating one or more activities selected from the group consisting of At1g19800-protein in a non-human organism or a part thereof, preferably a microorganism, a plant cell, a plant or a part thereof, as compared to a corresponding non-transformed wild type non-human organism or a part thereof; and
[33233] (b) growing the non-human organism or a part thereof under conditions which permit the production of tryptophan or a composition comprising tryptophan in said non-human organism or in the culture medium surrounding said non-human organism.

[33234] Accordingly, the present invention relates to a process for the production of tryptophan, which comprises
[33235] (a) increasing or generating one or more activities selected from the group consisting of cullin in a non-human organism or a part thereof, preferably a microorganism, a plant cell, a plant or a part thereof, as compared to a corresponding non-transformed wild type non-human organism or a part thereof; and
[33236] (b) growing the non-human organism or a part thereof under conditions which permit the production of tryptophan or a composition comprising tryptophan in said non-human organism or in the culture medium surrounding said non-human organism.

[33237] Accordingly, the present invention relates to a process for the production of tryptophan, which comprises
[33238] (a) increasing or generating one or more activities selected from the group consisting of eukaryotic translation initiation factor 5 in a non-human organism or a part thereof, preferably a microorganism, a plant cell, a plant or a part thereof, as compared to a corresponding non-transformed wild type non-human organism or a part thereof; and
[33239] (b) growing the non-human organism or a part thereof under conditions which permit the production of tryptophan or a composition comprising tryptophan in said non-human organism or in the culture medium surrounding said non-human organism.

[33240] Accordingly, the present invention relates to a process for the production of tryptophan, which comprises
[33241] (a) increasing or generating one or more activities selected from the group consisting of protein kinase in a non-human organism or a part thereof, preferably a microorganism, a plant cell, a plant or a part thereof, as compared to a corresponding non-transformed wild type non-human organism or a part thereof; and
[33242] (b) growing the non-human organism or a part thereof under conditions which permit the production of tryptophan or a composition comprising tryptophan in said non-human organism or in the culture medium surrounding said non-human organism.

[33243] Accordingly, the present invention relates to a process for the production of tryptophan, which comprises
[33244] (a) increasing or generating one or more activities selected from the group consisting of transcription factor in a non-human organism or a part thereof, preferably a microorganism, a plant cell, a plant or a part thereof, as compared to a corresponding non-transformed wild type non-human organism or a part thereof; and
[33245] (b) growing the non-human organism or a part thereof under conditions which permit the production of tryptophan or a composition comprising tryptophan in said non-human organism or in the culture medium surrounding said non-human organism.

[33246] Accordingly, the present invention relates to a process for the production of tryptophan, which comprises
[33247] (a) increasing or generating one or more activities selected from the group consisting of protein phosphatase in a non-human organism or a part thereof, preferably a microorganism, a plant cell, a plant or a part thereof, as compared to a corresponding non-transformed wild type non-human organism or a part thereof; and
[33248] (b) growing the non-human organism or a part thereof under conditions which permit the production of tryptophan or a composition comprising tryptophan in said non-human organism or in the culture medium surrounding said non-human organism.

[33249] Accordingly, the present invention relates to a process for the production of tryptophan, which comprises
[33250] (a) increasing or generating one or more activities selected from the group consisting of CBL-interacting protein kinase in a non-human organism or a part thereof, preferably a microorganism, a plant cell, a plant or a part thereof, as compared to a corresponding non-transformed wild type non-human organism or a part thereof; and
[33251] (b) growing the non-human organism or a part thereof under conditions which permit the production of tryptophan or a composition comprising tryptophan in said non-human organism or in the culture medium surrounding said non-human organism.

[33252] Accordingly, the present invention relates to a process for the production of tryptophan, which comprises
[33253] (a) increasing or generating one or more activities selected from the group consisting of glutaredoxin in a non-human organism or a part thereof, preferably a microorganism, a plant cell, a plant or a part thereof, as compared to a corresponding non-transformed wild type non-human organism or a part thereof; and
[33254] (b) growing the non-human organism or a part thereof under conditions which permit the production of tryptophan or a composition comprising tryptophan in said non-human organism or in the culture medium surrounding said non-human organism.

[33255] Accordingly, the present invention relates to a process for the production of tryptophan, which comprises
[33256] (a) increasing or generating one or more activities selected from the group consisting of At2g33510-protein in a non-human organism or a part thereof, preferably a microorganism, a plant cell, a plant or a part thereof, as compared to a corresponding non-transformed wild type non-human organism or a part thereof; and
[33257] (b) growing the non-human organism or a part thereof under conditions which permit the production of tryptophan or a composition comprising tryptophan in said non-human organism or in the culture medium surrounding said non-human organism.

[33258] Accordingly, the present invention relates to a process for the production of tryptophan, which comprises
[33259] (a) increasing or generating one or more activities selected from the group consisting of glutaredoxin in a non-human organism or a part thereof, preferably a microorganism, a plant cell, a plant or a part thereof, as compared to a corresponding non-transformed wild type non-human organism or a part thereof; and
[33260] (b) growing the non-human organism or a part thereof under conditions which permit the production of tryptophan or a composition comprising tryptophan in said non-human organism or in the culture medium surrounding said non-human organism.

[33261] Accordingly, the present invention relates to a process for the production of tryptophan, which comprises
[33262] (a) increasing or generating one or more activities selected from the group consisting of pyruvate kinase in a non-human organism or a part thereof, preferably a microorganism, a plant cell, a plant or a part thereof, as compared to a corresponding non-transformed wild type non-human organism or a part thereof; and
[33263] (b) growing the non-human organism or a part thereof under conditions which permit the production of tryptophan or a composition comprising tryptophan in said non-human organism or in the culture medium surrounding said non-human organism.

[33264] Accordingly, the present invention relates to a process for the production of tryptophan, which comprises
[33265] (a) increasing or generating one or more activities selected from the group consisting of harpin-induced family protein in a non-human organism or a part thereof, preferably a microorganism, a plant cell, a plant or a part thereof, as compared to a corresponding non-transformed wild type non-human organism or a part thereof; and
[33266] (b) growing the non-human organism or a part thereof under conditions which permit the production of tryptophan or a composition comprising tryptophan in said non-human organism or in the culture medium surrounding said non-human organism.

[33267] Accordingly, the present invention relates to a process for the production of tryptophan, which comprises
[33268] (a) increasing or generating one or more activities selected from the group consisting of DNA mismatch repair protein in a non-human organism or a part thereof, preferably a microorganism, a plant cell, a plant or a part thereof, as compared to a corresponding non-transformed wild type non-human organism or a part thereof; and
[33269] (b) growing the non-human organism or a part thereof under conditions which permit the production of tryptophan or a composition comprising tryptophan in said non-human organism or in the culture medium surrounding said non-human organism.

[33270] Accordingly, the present invention relates to a process for the production of tryptophan, which comprises
[33271] (a) increasing or generating one or more activities selected from the group consisting of protein kinase in a non-human organism or a part thereof, preferably a microorganism, a plant cell, a plant or a part thereof, as compared to a corresponding non-transformed wild type non-human organism or a part thereof; and
[33272] (b) growing the non-human organism or a part thereof under conditions which permit the production of tryptophan or a composition comprising tryptophan in said non-human organism or in the culture medium surrounding said non-human organism.

[33273] Accordingly, the present invention relates to a process for the production of tryptophan, which comprises
[33274] (a) increasing or generating one or more activities selected from the group consisting of eukaryotic translation initiation factor in a non-human organism or a part thereof, preferably a microorganism, a plant cell, a plant or a part thereof, as compared to a corresponding non-transformed wild type non-human organism or a part thereof; and
[33275] (b) growing the non-human organism or a part thereof under conditions which permit the production of tryptophan or a composition comprising tryptophan in said non-human organism or in the culture medium surrounding said non-human organism.

[33276] Accordingly, the present invention relates to a process for the production of tryptophan, which comprises
[33277] (a) increasing or generating one or more activities selected from the group consisting of glycosyl transferase in a non-human organism or a part thereof, preferably a microorganism, a plant cell, a plant or a part thereof, as compared to a corresponding non-transformed wild type non-human organism or a part thereof; and
[33278] (b) growing the non-human organism or a part thereof under conditions which permit the production of tryptophan or a composition comprising tryptophan in said non-human organism or in the culture medium surrounding said non-human organism.

[33279] Accordingly, the present invention relates to a process for the production of tryptophan, which comprises
[33280] (a) increasing or generating one or more activities selected from the group consisting of auxin response factor in a non-human organism or a part thereof, preferably a microorganism, a plant cell, a plant or a part thereof, as compared to a corresponding non-transformed wild type non-human organism or a part thereof; and
[33281] (b) growing the non-human organism or a part thereof under conditions which permit the production of tryptophan or a composition comprising tryptophan in said non-human organism or in the culture medium surrounding said non-human organism.

[33282] Accordingly, the present invention relates to a process for the production of tryptophan, which comprises
[33283] (a) increasing or generating one or more activities selected from the group consisting of monthiol glutaredoxin in a non-human organism or a part thereof, preferably a microorganism, a plant cell, a plant or a part thereof, as compared to a corresponding non-transformed wild type non-human organism or a part thereof; and
[33284] (b) growing the non-human organism or a part thereof under conditions which permit the production of tryptophan or a composition comprising tryptophan in said non-human organism or in the culture medium surrounding said non-human organism.

[33285] Accordingly, the present invention relates to a process for the production of tryptophan, which comprises
[33286] (a) increasing or generating one or more activities selected from the group consisting of glutaredoxin in a non-human organism or a part thereof, preferably a microorganism, a plant cell, a plant or a part thereof, as compared to a corresponding non-transformed wild type non-human organism or a part thereof; and
[33287] (b) growing the non-human organism or a part thereof under conditions which permit the production of tryptophan or a composition comprising tryptophan in said non-human organism or in the culture medium surrounding said non-human organism.

[33288] Accordingly, the present invention relates to a process for the production of tryptophan, which comprises
[33289] (a) increasing or generating one or more activities selected from the group consisting of At4g32480-protein in a non-human organism or a part thereof, preferably a microorganism, a plant cell, a plant or a part thereof, as compared to a corresponding non-transformed wild type non-human organism or a part thereof; and
[33290] (b) growing the non-human organism or a part thereof under conditions which permit the production of tryptophan or a composition comprising tryptophan in said non-human organism or in the culture medium surrounding said non-human organism.

[33291] Accordingly, the present invention relates to a process for the production of tryptophan, which comprises
[33292] (a) increasing or generating one or more activities selected from the group consisting of cyclin D in a non-human organism or a part thereof, preferably a microorganism, a plant cell, a plant or a part thereof, as compared to a corresponding non-transformed wild type non-human organism or a part thereof; and
[33293] (b) growing the non-human organism or a part thereof under conditions which permit the production of tryptophan or a composition comprising tryptophan in said non-human organism or in the culture medium surrounding said non-human organism.

[33294] Accordingly, the present invention relates to a process for the production of tryptophan, which comprises
[33295] (a) increasing or generating one or more activities selected from the group consisting of calcium-dependent protein kinase in a non-human organism or a part thereof, preferably a microorganism, a plant cell, a plant or a part thereof, as compared to a corresponding non-transformed wild type non-human organism or a part thereof; and
[33296] (b) growing the non-human organism or a part thereof under conditions which permit the production of tryptophan or a composition comprising tryptophan in said non-human organism or in the culture medium surrounding said non-human organism.

[33297] Accordingly, the present invention relates to a process for the production of tryptophan, which comprises
[33298] (a) increasing or generating one or more activities selected from the group consisting of protein phosphatase in a non-human organism or a part thereof, preferably a microorganism, a plant cell, a plant or a part thereof, as compared to a corresponding non-transformed wild type non-human organism or a part thereof; and
[33299] (b) growing the non-human organism or a part thereof under conditions which permit the production of tryptophan or a composition comprising tryptophan in said non-human organism or in the culture medium surrounding said non-human organism.

[33300] Accordingly, the present invention relates to a process for the production of tryptophan, which comprises
[33301] (a) increasing or generating one or more activities selected from the group consisting of gibberellin 20-oxidase in a non-human organism or a part thereof, preferably a microorganism, a plant cell, a plant or a part thereof, as compared to a corresponding non-transformed wild type non-human organism or a part thereof; and
[33302] (b) growing the non-human organism or a part thereof under conditions which permit the production of tryptophan or a composition comprising tryptophan in said non-human organism or in the culture medium surrounding said non-human organism.

[33303] Accordingly, the present invention relates to a process for the production of tryptophan, which comprises
[33304] (a) increasing or generating one or more activities selected from the group consisting of At5g16650-protein in a non-human organism or a part thereof, preferably a microorganism, a plant cell, a plant or a part thereof, as compared to a corresponding non-transformed wild type non-human organism or a part thereof; and
[33305] (b) growing the non-human organism or a part thereof under conditions which permit the production of tryptophan or a composition comprising tryptophan in said non-human organism or in the culture medium surrounding said non-human organism.

[33306] Accordingly, the present invention relates to a process for the production of tryptophan, which comprises
[33307] (a) increasing or generating one or more activities selected from the group consisting of at5g21910-protein in a non-human organism or a part thereof, preferably a microorganism, a plant cell, a plant or a part thereof, as compared to a corresponding non-transformed wild type non-human organism or a part thereof; and
[33308] (b) growing the non-human organism or a part thereof under conditions which permit the production of tryptophan or a composition comprising tryptophan in said non-human organism or in the culture medium surrounding said non-human organism.

[33309] Accordingly, the present invention relates to a process for the production of tryptophan, which comprises
[33310] (a) increasing or generating one or more activities selected from the group consisting of transcription factor in a non-human organism or a part thereof, preferably a microorganism, a plant cell, a plant or a part thereof, as compared to a corresponding non-transformed wild type non-human organism or a part thereof; and
[33311] (b) growing the non-human organism or a part thereof under conditions which permit the production of tryptophan or a composition comprising tryptophan in said non-human organism or in the culture medium surrounding said non-human organism.

[33312] Accordingly, the present invention relates to a process for the production of tryptophan, which comprises
[33313] (a) increasing or generating one or more activities selected from the group consisting of RNA-binding protein in a non-human organism or a part thereof, preferably a microorganism, a plant cell, a plant or a part thereof, as compared to a corresponding non-transformed wild type non-human organism or a part thereof; and
[33314] (b) growing the non-human organism or a part thereof under conditions which permit the production of tryptophan or a composition comprising tryptophan in said non-human organism or in the culture medium surrounding said non-human organism.

[33315] Accordingly, the present invention relates to a process for the production of tryptophan, which comprises
[33316] (a) increasing or generating one or more activities selected from the group consisting of malic enzyme in a non-human organism or a part thereof, preferably a microorganism, a plant cell, a plant or a part thereof, as compared to a corresponding non-transformed wild type non-human organism or a part thereof; and
[33317] (b) growing the non-human organism or a part thereof under conditions which permit the production of tryptophan or a composition comprising tryptophan in said non-human organism or in the culture medium surrounding said non-human organism.

[33318] Accordingly, the present invention relates to a process for the production of tryptophan, which comprises
[33319] (a) increasing or generating one or more activities selected from the group consisting of elongation factor Tu in a non-human organism or a part thereof, preferably a microorganism, a plant cell, a plant or a part thereof, as compared to a corresponding non-transformed wild type non-human organism or a part thereof; and
[33320] (b) growing the non-human organism or a part thereof under conditions which permit the production of tryptophan or a composition comprising tryptophan in said non-human organism or in the culture medium surrounding said non-human organism.

[33321] Accordingly, the present invention relates to a process for the production of tryptophan, which comprises
[33322] (a) increasing or generating one or more activities selected from the group consisting of enoyl-CoA hydratase in a non-human organism or a part thereof, preferably a microorganism, a plant cell, a plant or a part thereof, as compared to a corresponding non-transformed wild type non-human organism or a part thereof; and
[33323] (b) growing the non-human organism or a part thereof under conditions which permit the production of tryptophan or a composition comprising tryptophan in said non-human organism or in the culture medium surrounding said non-human organism.

[33324] Accordingly, the present invention relates to a process for the production of tryptophan, which comprises
[33325] (a) increasing or generating one or more activities selected from the group consisting of transcriptional regulator in a non-human organism or a part thereof, preferably a microorganism, a plant cell, a plant or a part thereof, as compared to a corresponding non-transformed wild type non-human organism or a part thereof; and
[33326] (b) growing the non-human organism or a part thereof under conditions which permit the production of tryptophan or a composition comprising tryptophan in said non-human organism or in the culture medium surrounding said non-human organism.

[33327] Accordingly, the present invention relates to a process for the production of tryptophan, which comprises
[33328] (a) increasing or generating one or more activities selected from the group consisting of enoyl-CoA hydratase in a non-human organism or a part thereof, preferably a microorganism, a plant cell, a plant or a part thereof, as compared to a corresponding non-transformed wild type non-human organism or a part thereof; and
[33329] (b) growing the non-human organism or a part thereof under conditions which permit the production of tryptophan or a composition comprising tryptophan in said non-human organism or in the culture medium surrounding said non-human organism.

[33330] Accordingly, the present invention relates to a process for the production of tryptophan, which comprises
[33331] (a) increasing or generating one or more activities selected from the group consisting of glutamate-ammonia-ligase in a non-human organism or a part thereof, preferably a microorganism, a plant cell, a plant or a part thereof, as compared to a corresponding non-transformed wild type non-human organism or a part thereof; and
[33332] (b) growing the non-human organism or a part thereof under conditions which permit the production of tryptophan or a composition comprising tryptophan in said non-human organism or in the culture medium surrounding said non-human organism.

[33333] Accordingly, the present invention relates to a process for the production of tryptophan, which comprises
[33334] (a) increasing or generating one or more activities selected from the group consisting of hydrolase in a non-human organism or a part thereof, preferably a microorganism, a plant cell, a plant or a part thereof, as compared to a corresponding non-transformed wild type non-human organism or a part thereof; and
[33335] (b) growing the non-human organism or a part thereof under conditions which permit the production of tryptophan or a composition comprising tryptophan in said non-human organism or in the culture medium surrounding said non-human organism.

[33336] Accordingly, the present invention relates to a process for the production of tryptophan, which comprises
[33337] (a) increasing or generating one or more activities selected from the group consisting of Chaperone protein CIpB in a non-human organism or a part thereof, preferably a microorganism, a plant cell, a plant or a part thereof, as compared to a corresponding non-transformed wild type non-human organism or a part thereof; and
[33338] (b) growing the non-human organism or a part thereof under conditions which permit the production of tryptophan or a composition comprising tryptophan in said non-human organism or in the culture medium surrounding said non-human organism.

[33339] Accordingly, the present invention relates to a process for the production of tryptophan, which comprises
[33340] (a) increasing or generating one or more activities selected from the group consisting of electron transfer flavoprotein subunit beta in a non-human organism or a part thereof, preferably a microorganism, a plant cell, a plant or a part thereof, as compared to a corresponding non-transformed wild type non-human organism or a part thereof; and
[33341] (b) growing the non-human organism or a part thereof under conditions which permit the production of tryptophan or a composition comprising tryptophan in said non-human organism or in the culture medium surrounding said non-human organism.

[33342] Accordingly, the present invention relates to a process for the production of tryptophan, which comprises
[33343] (a) increasing or generating one or more activities selected from the group consisting of threonine synthase in a non-human organism or a part thereof, preferably a microorganism, a plant cell, a plant or a part thereof, as compared to a corresponding non-transformed wild type non-human organism or a part thereof; and
[33344] (b) growing the non-human organism or a part thereof under conditions which permit the production of tryptophan or a composition comprising tryptophan in said non-human organism or in the culture medium surrounding said non-human organism.

[33345] Accordingly, the present invention relates to a process for the production of tryptophan, which comprises
[33346] (a) increasing or generating one or more activities selected from the group consisting of transaldolase in a non-human organism or a part thereof, preferably a microorganism, a plant cell, a plant or a part thereof, as compared to a corresponding non-transformed wild type non-human organism or a part thereof; and
[33347] (b) growing the non-human organism or a part thereof under conditions which permit the production of tryptophan or a composition comprising tryptophan in said non-human organism or in the culture medium surrounding said non-human organism.

[33348] Accordingly, the present invention relates to a process for the production of tryptophan, which comprises
[33349] (a) increasing or generating one or more activities selected from the group consisting of L-ribulose-5-phosphate 4-epimerase in a non-human organism or a part thereof, preferably a microorganism, a plant cell, a plant or a part thereof, as compared to a corresponding non-transformed wild type non-human organism or a part thereof; and
[33350] (b) growing the non-human organism or a part thereof under conditions which permit the production of tryptophan or a composition comprising tryptophan in said non-human organism or in the culture medium surrounding said non-human organism.

[33351] Accordingly, the present invention relates to a process for the production of tryptophan, which comprises
[33352] (a) increasing or generating one or more activities selected from the group consisting of glucose dehydrogenase in a non-human organism or a part thereof, preferably a microorganism, a plant cell, a plant or a part thereof, as compared to a corresponding non-transformed wild type non-human organism or a part thereof; and
[33353] (b) growing the non-human organism or a part thereof under conditions which permit the production of tryptophan or a composition comprising tryptophan in said non-human organism or in the culture medium surrounding said non-human organism.

[33354] Accordingly, the present invention relates to a process for the production of tryptophan, which comprises
[33355] (a) increasing or generating one or more activities selected from the group consisting of ATP-binding component of a transport system in a non-human organism or a part thereof, preferably a microorganism, a plant cell, a plant or a part thereof, as compared to a corresponding non-transformed wild type non-human organism or a part thereof; and
[33356] (b) growing the non-human organism or a part thereof under conditions which permit the production of tryptophan or a composition comprising tryptophan in said non-human organism or in the culture medium surrounding said non-human organism.

[33357] Accordingly, the present invention relates to a process for the production of tryptophan, which comprises
[33358] (a) increasing or generating one or more activities selected from the group consisting of isochorismate synthase in a non-human organism or a part thereof, preferably a microorganism, a plant cell, a plant or a part thereof, as compared to a corresponding non-transformed wild type non-human organism or a part thereof; and
[33359] (b) growing the non-human organism or a part thereof under conditions which permit the production of tryptophan or a composition comprising tryptophan in said non-human organism or in the culture medium surrounding said non-human organism.

[33360] Accordingly, the present invention relates to a process for the production of tryptophan, which comprises
[33361] (a) increasing or generating one or more activities selected from the group consisting of Leucyl/phenylalanyl-tRNA-protein transferase in a non-human organism or a part thereof, preferably a microorganism, a plant cell, a plant or a part thereof, as compared to a corresponding non-transformed wild type non-human organism or a part thereof; and
[33362] (b) growing the non-human organism or a part thereof under conditions which permit the production of tryptophan or a composition comprising tryptophan in said non-human organism or in the culture medium surrounding said non-human organism.

[33363] Accordingly, the present invention relates to a process for the production of tryptophan, which comprises
[33364] (a) increasing or generating one or more activities selected from the group consisting of b1163-protein in a non-human organism or a part thereof, preferably a microorganism, a plant cell, a plant or a part thereof, as compared to a corresponding non-transformed wild type non-human organism or a part thereof; and
[33365] (b) growing the non-human organism or a part thereof under conditions which permit the production of tryptophan or a composition comprising tryptophan in said non-human organism or in the culture medium surrounding said non-human organism.

[33366] Accordingly, the present invention relates to a process for the production of tryptophan, which comprises
[33367] (a) increasing or generating one or more activities selected from the group consisting of cardiolipin synthase in a non-human organism or a part thereof, preferably a microorganism, a plant cell, a plant or a part thereof, as compared to a corresponding non-transformed wild type non-human organism or a part thereof; and
[33368] (b) growing the non-human organism or a part thereof under conditions which permit the production of tryptophan or a composition comprising tryptophan in said non-human organism or in the culture medium surrounding said non-human organism.

[33369] Accordingly, the present invention relates to a process for the production of tryptophan, which comprises
[33370] (a) increasing or generating one or more activities selected from the group consisting of tryptophan biosynthesis protein in a non-human organism or a part thereof, preferably a microorganism, a plant cell, a plant or a part thereof, as compared to a corresponding non-transformed wild type non-human organism or a part thereof; and
[33371] (b) growing the non-human organism or a part thereof under conditions which permit the production of tryptophan or a composition comprising tryptophan in said non-human organism or in the culture medium surrounding said non-human organism.

[33372] Accordingly, the present invention relates to a process for the production of tryptophan, which comprises
[33373] (a) increasing or generating one or more activities selected from the group consisting of aldehyde dehydrogenase in a non-human organism or a part thereof, preferably a microorganism, a plant cell, a plant or a part thereof, as compared to a corresponding non-transformed wild type non-human organism or a part thereof; and
[33374] (b) growing the non-human organism or a part thereof under conditions which permit the production of tryptophan or a composition comprising tryptophan in said non-human organism or in the culture medium surrounding said non-human organism.

[33375] Accordingly, the present invention relates to a process for the production of tryptophan, which comprises
[33376] (a) increasing or generating one or more activities selected from the group consisting of b1346-protein in a non-human organism or a part thereof, preferably a microorganism, a plant cell, a plant or a part thereof, as compared to a corresponding non-transformed wild type non-human organism or a part thereof; and
[33377] (b) growing the non-human organism or a part thereof under conditions which permit the production of tryptophan or a composition comprising tryptophan in said non-human organism or in the culture medium surrounding said non-human organism.

[33378] Accordingly, the present invention relates to a process for the production of tryptophan, which comprises
[33379] (a) increasing or generating one or more activities selected from the group consisting of b1522-protein in a non-human organism or a part thereof, preferably a microorganism, a plant cell, a plant or a part thereof, as compared to a corresponding non-transformed wild type non-human organism or a part thereof; and
[33380] (b) growing the non-human organism or a part thereof under conditions which permit the production of tryptophan or a composition comprising tryptophan in said non-human organism or in the culture medium surrounding said non-human organism.

[33381] Accordingly, the present invention relates to a process for the production of tryptophan, which comprises
[33382] (a) increasing or generating one or more activities selected from the group consisting of b1796-protein in a non-human organism or a part thereof, preferably a microorganism, a plant cell, a plant or a part thereof, as compared to a corresponding non-transformed wild type non-human organism or a part thereof; and
[33383] (b) growing the non-human organism or a part thereof under conditions which permit the production of tryptophan or a composition comprising tryptophan in said non-human organism or in the culture medium surrounding said non-human organism.

[33384] Accordingly, the present invention relates to a process for the production of tryptophan, which comprises
[33385] (a) increasing or generating one or more activities selected from the group consisting of methyl-accepting chemotaxis protein in a non-human organism or a part thereof, preferably a microorganism, a plant cell, a plant or a part thereof, as compared to a corresponding non-transformed wild type non-human organism or a part thereof; and
[33386] (b) growing the non-human organism or a part thereof under conditions which permit the production of tryptophan or a composition comprising tryptophan in said non-human organism or in the culture medium surrounding said non-human organism.

[33387] Accordingly, the present invention relates to a process for the production of tryptophan, which comprises
[33388] (a) increasing or generating one or more activities selected from the group consisting of trehalose-phosphatase in a non-human organism or a part thereof, preferably a microorganism, a plant cell, a plant or a part thereof, as compared to a corresponding non-transformed wild type non-human organism or a part thereof; and
[33389] (b) growing the non-human organism or a part thereof under conditions which permit the production of tryptophan or a composition comprising tryptophan in said non-human organism or in the culture medium surrounding said non-human organism.

[33390] Accordingly, the present invention relates to a process for the production of tryptophan, which comprises
[33391] (a) increasing or generating one or more activities selected from the group consisting of imidazole glycerol phosphate synthase subunit in a non-human organism or a part thereof, preferably a microorganism, a plant cell, a plant or a part thereof, as compared to a corresponding non-transformed wild type non-human organism or a part thereof; and
[33392] (b) growing the non-human organism or a part thereof under conditions which permit the production of tryptophan or a composition comprising tryptophan in said non-human organism or in the culture medium surrounding said non-human organism.

[33393] Accordingly, the present invention relates to a process for the production of tryptophan, which comprises
[33394] (a) increasing or generating one or more activities selected from the group consisting of transport protein in a non-human organism or a part thereof, preferably a microorganism, a plant cell, a plant or a part thereof, as compared to a corresponding non-transformed wild type non-human organism or a part thereof; and
[33395] (b) growing the non-human organism or a part thereof under conditions which permit the production of tryptophan or a composition comprising tryptophan in said non-human organism or in the culture medium surrounding said non-human organism.

[33396] Accordingly, the present invention relates to a process for the production of tryptophan, which comprises
[33397] (a) increasing or generating one or more activities selected from the group consisting of ATP synthase subunit E in a non-human organism or a part thereof, preferably a microorganism, a plant cell, a plant or a part thereof, as compared to a corresponding non-transformed wild type non-human organism or a part thereof; and
[33398] (b) growing the non-human organism or a part thereof under conditions which permit the production of tryptophan or a composition comprising tryptophan in said non-human organism or in the culture medium surrounding said non-human organism.

[33399] Accordingly, the present invention relates to a process for the production of tryptophan, which comprises
[33400] (a) increasing or generating one or more activities selected from the group consisting of putative transport system permease protein in a non-human organism or a part thereof, preferably a microorganism, a plant cell, a plant or a part thereof, as compared to a corresponding non-transformed wild type non-human organism or a part thereof; and
[33401] (b) growing the non-human organism or a part thereof under conditions which permit the production of tryptophan or a composition comprising tryptophan in said non-human organism or in the culture medium surrounding said non-human organism.

[33402] Accordingly, the present invention relates to a process for the production of tryptophan, which comprises
[33403] (a) increasing or generating one or more activities selected from the group consisting of recombinase A in a non-human organism or a part thereof, preferably a microorganism, a plant cell, a plant or a part thereof, as compared to a corresponding non-transformed wild type non-human organism or a part thereof; and
[33404] (b) growing the non-human organism or a part thereof under conditions which permit the production of tryptophan or a composition comprising tryptophan in said non-human organism or in the culture medium surrounding said non-human organism.

[33405] Accordingly, the present invention relates to a process for the production of tryptophan, which comprises
[33406] (a) increasing or generating one or more activities selected from the group consisting of b2739-protein in a non-human organism or a part thereof, preferably a microorganism, a plant cell, a plant or a part thereof, as compared to a corresponding non-transformed wild type non-human organism or a part thereof; and
[33407] (b) growing the non-human organism or a part thereof under conditions which permit the production of tryptophan or a composition comprising tryptophan in said non-human organism or in the culture medium surrounding said non-human organism.

[33408] Accordingly, the present invention relates to a process for the production of tryptophan, which comprises
[33409] (a) increasing or generating one or more activities selected from the group consisting of b2849-protein in a non-human organism or a part thereof, preferably a microorganism, a plant cell, a plant or a part thereof, as compared to a corresponding non-transformed wild type non-human organism or a part thereof; and
[33410] (b) growing the non-human organism or a part thereof under conditions which permit the production of tryptophan or a composition comprising tryptophan in said non-human organism or in the culture medium surrounding said non-human organism.

[33411] Accordingly, the present invention relates to a process for the production of tryptophan, which comprises
[33412] (a) increasing or generating one or more activities selected from the group consisting of fimbrial-like protein in a non-human organism or a part thereof, preferably a microorganism, a plant cell, a plant or a part thereof, as compared to a corresponding non-transformed wild type non-human organism or a part thereof; and
[33413] (b) growing the non-human organism or a part thereof under conditions which permit the production of tryptophan or a composition comprising tryptophan in said non-human organism or in the culture medium surrounding said non-human organism.

[33414] Accordingly, the present invention relates to a process for the production of tryptophan, which comprises
[33415] (a) increasing or generating one or more activities selected from the group consisting of methyltransferase in a non-human organism or a part thereof, preferably a microorganism, a plant cell, a plant or a part thereof, as compared to a corresponding non-transformed wild type non-human organism or a part thereof; and
[33416] (b) growing the non-human organism or a part thereof under conditions which permit the production of tryptophan or a composition comprising tryptophan in said non-human organism or in the culture medium surrounding said non-human organism.

[33417] Accordingly, the present invention relates to a process for the production of tryptophan, which comprises
[33418] (a) increasing or generating one or more activities selected from the group consisting of 3-ketoacyl-CoA thiolase in a non-human organism or a part thereof, preferably a microorganism, a plant cell, a plant or a part thereof, as compared to a corresponding non-transformed wild type non-human organism or a part thereof; and
[33419] (b) growing the non-human organism or a part thereof under conditions which permit the production of tryptophan or a composition comprising tryptophan in said non-human organism or in the culture medium surrounding said non-human organism.

[33420] Accordingly, the present invention relates to a process for the production of tryptophan, which comprises
[33421] (a) increasing or generating one or more activities selected from the group consisting of glutamine synthetase in a non-human organism or a part thereof, preferably a microorganism, a plant cell, a plant or a part thereof, as compared to a corresponding non-transformed wild type non-human organism or a part thereof; and
[33422] (b) growing the non-human organism or a part thereof under conditions which permit the production of tryptophan or a composition comprising tryptophan in said non-human organism or in the culture medium surrounding said non-human organism.

[33423] Accordingly, the present invention relates to a process for the production of tryptophan, which comprises
[33424] (a) increasing or generating one or more activities selected from the group consisting of b3989-protein in a non-human organism or a part thereof, preferably a microorganism, a plant cell, a plant or a part thereof, as compared to a corresponding non-transformed wild type non-human organism or a part thereof; and
[33425] (b) growing the non-human organism or a part thereof under conditions which permit the production of tryptophan or a composition comprising tryptophan in said non-human organism or in the culture medium surrounding said non-human organism.

[33426] Accordingly, the present invention relates to a process for the production of tryptophan, which comprises
[33427] (a) increasing or generating one or more activities selected from the group consisting of b4029-protein in a non-human organism or a part thereof, preferably a microorganism, a plant cell, a plant or a part thereof, as compared to a corresponding non-transformed wild type non-human organism or a part thereof; and
[33428] (b) growing the non-human organism or a part thereof under conditions which permit the production of tryptophan or a composition comprising tryptophan in said non-human organism or in the culture medium surrounding said non-human organism.

[33429] Accordingly, the present invention relates to a process for the production of tryptophan, which comprises
[33430] (a) increasing or generating one or more activities selected from the group consisting of b4121-protein in a non-human organism or a part thereof, preferably a microorganism, a plant cell, a plant or a part thereof, as compared to a corresponding non-transformed wild type non-human organism or a part thereof; and
[33431] (b) growing the non-human organism or a part thereof under conditions which permit the production of tryptophan or a composition comprising tryptophan in said non-human organism or in the culture medium surrounding said non-human organism.

[33432] Accordingly, the present invention relates to a process for the production of tryptophan, which comprises
[33433] (a) increasing or generating one or more activities selected from the group consisting of acetyltransferase in a non-human organism or a part thereof, preferably a microorganism, a plant cell, a plant or a part thereof, as compared to a corresponding non-transformed wild type non-human organism or a part thereof; and
[33434] (b) growing the non-human organism or a part thereof under conditions which permit the production of tryptophan or a composition comprising tryptophan in said non-human organism or in the culture medium surrounding said non-human organism.

[33435] Accordingly, the present invention relates to a process for the production of tryptophan, which comprises
[33436] (a) increasing or generating one or more activities selected from the group consisting of RNA binding protein in a non-human organism or a part thereof, preferably a microorganism, a plant cell, a plant or a part thereof, as compared to a corresponding non-transformed wild type non-human organism or a part thereof; and
[33437] (b) growing the non-human organism or a part thereof under conditions which permit the production of tryptophan or a composition comprising tryptophan in said non-human organism or in the culture medium surrounding said non-human organism.

[33438] Accordingly, the present invention relates to a process for the production of tryptophan, which comprises
[33439] (a) increasing or generating one or more activities selected from the group consisting of transcription factor in a non-human organism or a part thereof, preferably a microorganism, a plant cell, a plant or a part thereof, as compared to a corresponding non-transformed wild type non-human organism or a part thereof; and
[33440] (b) growing the non-human organism or a part thereof under conditions which permit the production of tryptophan or a composition comprising tryptophan in said non-human organism or in the culture medium surrounding said non-human organism.

[33441] Accordingly, the present invention relates to a process for the production of tryptophan, which comprises
[33442] (a) increasing or generating one or more activities selected from the group consisting of choline kinase in a non-human organism or a part thereof, preferably a microorganism, a plant cell, a plant or a part thereof, as compared to a corresponding non-transformed wild type non-human organism or a part thereof; and
[33443] (b) growing the non-human organism or a part thereof under conditions which permit the production of tryptophan or a composition comprising tryptophan in said non-human organism or in the culture medium surrounding said non-human organism.

[33444] Accordingly, the present invention relates to a process for the production of tryptophan, which comprises
[33445] (a) increasing or generating one or more activities selected from the group consisting of flavodoxin in a non-human organism or a part thereof, preferably a microorganism, a plant cell, a plant or a part thereof, as compared to a corresponding non-transformed wild type non-human organism or a part thereof; and
[33446] (b) growing the non-human organism or a part thereof under conditions which permit the production of tryptophan or a composition comprising tryptophan in said non-human organism or in the culture medium surrounding said non-human organism.

[33447] Accordingly, the present invention relates to a process for the production of tryptophan, which comprises
[33448] (a) increasing or generating one or more activities selected from the group consisting of NAD(P)H-quinone oxidoreductase subunit in a non-human organism or a part thereof, preferably a microorganism, a plant cell, a plant or a part thereof, as compared to a corresponding non-transformed wild type non-human organism or a part thereof; and
[33449] (b) growing the non-human organism or a part thereof under conditions which permit the production of tryptophan or a composition comprising tryptophan in said non-human organism or in the culture medium surrounding said non-human organism.

[33450] Accordingly, the present invention relates to a process for the production of tryptophan, which comprises
[33451] (a) increasing or generating one or more activities selected from the group consisting of binding-protein-dependent transport systems inner membrane component in a non-human organism or a part thereof, preferably a microorganism, a plant cell, a plant or a part thereof, as compared to a corresponding non-transformed wild type non-human organism or a part thereof; and
[33452] (b) growing the non-human organism or a part thereof under conditions which permit the production of tryptophan or a composition comprising tryptophan in said non-human organism or in the culture medium surrounding said non-human organism.

[33453] Accordingly, the present invention relates to a process for the production of tryptophan, which comprises
[33454] (a) increasing or generating one or more activities selected from the group consisting of carbon dioxide concentrating mechanism protein in a non-human organism or a part thereof, preferably a microorganism, a plant cell, a plant or a part thereof, as compared to a corresponding non-transformed wild type non-human organism or a part thereof; and
[33455] (b) growing the non-human organism or a part thereof under conditions which permit the production of tryptophan or a composition comprising tryptophan in said non-human organism or in the culture medium surrounding said non-human organism.

[33456] Accordingly, the present invention relates to a process for the production of tryptophan, which comprises
[33457] (a) increasing or generating one or more activities selected from the group consisting of nitrate/nitrite transport protein in a non-human organism or a part thereof, preferably a microorganism, a plant cell, a plant or a part thereof, as compared to a corresponding non-transformed wild type non-human organism or a part thereof; and
[33458] (b) growing the non-human organism or a part thereof under conditions which permit the production of tryptophan or a composition comprising tryptophan in said non-human organism or in the culture medium surrounding said non-human organism.

[33459] Accordingly, the present invention relates to a process for the production of tryptophan, which comprises
[33460] (a) increasing or generating one or more activities selected from the group consisting of coproporphyrinogen III oxidase in a non-human organism or a part thereof, preferably a microorganism, a plant cell, a plant or a part thereof, as compared to a corresponding non-transformed wild type non-human organism or a part thereof; and
[33461] (b) growing the non-human organism or a part thereof under conditions which permit the production of tryptophan or a composition comprising tryptophan in said non-human organism or in the culture medium surrounding said non-human organism.

[33462] Accordingly, the present invention relates to a process for the production of tryptophan, which comprises
[33463] (a) increasing or generating one or more activities selected from the group consisting of precorrin methylase in a non-human organism or a part thereof, preferably a microorganism, a plant cell, a plant or a part thereof, as compared to a corresponding non-transformed wild type non-human organism or a part thereof; and
[33464] (b) growing the non-human organism or a part thereof under conditions which permit the production of tryptophan or a composition comprising tryptophan in said non-human organism or in the culture medium surrounding said non-human organism.

[33465] Accordingly, the present invention relates to a process for the production of tryptophan, which comprises
[33466] (a) increasing or generating one or more activities selected from the group consisting of malate dehydrogenase in a non-human organism or a part thereof, preferably a microorganism, a plant cell, a plant or a part thereof, as compared to a corresponding non-transformed wild type non-human organism or a part thereof; and
[33467] (b) growing the non-human organism or a part thereof under conditions which permit the production of tryptophan or a composition comprising tryptophan in said non-human organism or in the culture medium surrounding said non-human organism.

[33468] Accordingly, the present invention relates to a process for the production of tryptophan, which comprises
[33469] (a) increasing or generating one or more activities selected from the group consisting of geranylgeranyl pyrophosphate synthase in a non-human organism or a part thereof, preferably a microorganism, a plant cell, a plant or a part thereof, as compared to a corresponding non-transformed wild type non-human organism or a part thereof; and
[33470] (b) growing the non-human organism or a part thereof under conditions which permit the production of tryptophan or a composition comprising tryptophan in said non-human organism or in the culture medium surrounding said non-human organism.

[33471] Accordingly, the present invention relates to a process for the production of tryptophan, which comprises
[33472] (a) increasing or generating one or more activities selected from the group consisting of slr1107-protein in a non-human organism or a part thereof, preferably a microorganism, a plant cell, a plant or a part thereof, as compared to a corresponding non-transformed wild type non-human organism or a part thereof; and
[33473] (b) growing the non-human organism or a part thereof under conditions which permit the production of tryptophan or a composition comprising tryptophan in said non-human organism or in the culture medium surrounding said non-human organism.

[33474] Accordingly, the present invention relates to a process for the production of tryptophan, which comprises
[33475] (a) increasing or generating one or more activities selected from the group consisting of photosystem II protein in a non-human organism or a part thereof, preferably a microorganism, a plant cell, a plant or a part thereof, as compared to a corresponding non-transformed wild type non-human organism or a part thereof; and
[33476] (b) growing the non-human organism or a part thereof under conditions which permit the production of tryptophan or a composition comprising tryptophan in said non-human organism or in the culture medium surrounding said non-human organism.

[33477] Accordingly, the present invention relates to a process for the production of tryptophan, which comprises
[33478] (a) increasing or generating one or more activities selected from the group consisting of short-chain alcohol dehydrogenase family in a non-human organism or a part thereof, preferably a microorganism, a plant cell, a plant or a part thereof, as compared to a corresponding non-transformed wild type non-human organism or a part thereof; and
[33479] (b) growing the non-human organism or a part thereof under conditions which permit the production of tryptophan or a composition comprising tryptophan in said non-human organism or in the culture medium surrounding said non-human organism.

[33480] Accordingly, the present invention relates to a process for the production of tryptophan, which comprises
[33481] (a) increasing or generating one or more activities selected from the group consisting of Sec-independent protein translocase subunit in a non-human organism or a part thereof, preferably a microorganism, a plant cell, a plant or a part thereof, as compared to a corresponding non-transformed wild type non-human organism or a part thereof; and
[33482] (b) growing the non-human organism or a part thereof under conditions which permit the production of tryptophan or a composition comprising tryptophan in said non-human organism or in the culture medium surrounding said non-human organism.

[33483] Accordingly, the present invention relates to a process for the production of tryptophan, which comprises
[33484] (a) increasing or generating one or more activities selected from the group consisting of 3-deoxy-7-phosphoheptulonate synthase in a non-human organism or a part thereof, preferably a microorganism, a plant cell, a plant or a part thereof, as compared to a corresponding non-transformed wild type non-human organism or a part thereof; and
[33485] (b) growing the non-human organism or a part thereof under conditions which permit the production of tryptophan or a composition comprising tryptophan in said non-human organism or in the culture medium surrounding said non-human organism.

[33486] Accordingly, the present invention relates to a process for the production of tryptophan, which comprises
[33487] (a) increasing or generating one or more activities selected from the group consisting of branched-chain amino acid permease in a non-human organism or a part thereof, preferably a microorganism, a plant cell, a plant or a part thereof, as compared to a corresponding non-transformed wild type non-human organism or a part thereof; and
[33488] (b) growing the non-human organism or a part thereof under conditions which permit the production of tryptophan or a composition comprising tryptophan in said non-human organism or in the culture medium surrounding said non-human organism.

[33489] Accordingly, the present invention relates to a process for the production of tryptophan, which comprises
[33490] (a) increasing or generating one or more activities selected from the group consisting of yfl054c-protein in a non-human organism or a part thereof, preferably a microorganism, a plant cell, a plant or a part thereof, as compared to a corresponding non-transformed wild type non-human organism or a part thereof; and
[33491] (b) growing the non-human organism or a part thereof under conditions which permit the production of tryptophan or a composition comprising tryptophan in said non-human organism or in the culture medium surrounding said non-human organism.

[33492] Accordingly, the present invention relates to a process for the production of tryptophan, which comprises
[33493] (a) increasing or generating one or more activities selected from the group consisting of glycerol kinase in a non-human organism or a part thereof, preferably a microorganism, a plant cell, a plant or a part thereof, as compared to a corresponding non-transformed wild type non-human organism or a part thereof; and
[33494] (b) growing the non-human organism or a part thereof under conditions which permit the production of tryptophan or a composition comprising tryptophan in said non-human organism or in the culture medium surrounding said non-human organism.

[33495] Accordingly, the present invention relates to a process for the production of tryptophan, which comprises
[33496] (a) increasing or generating one or more activities selected from the group consisting of aromatic amino acid aminotransferase in a non-human organism or a part thereof, preferably a microorganism, a plant cell, a plant or a part thereof, as compared to a corresponding non-transformed wild type non-human organism or a part thereof; and
[33497] (b) growing the non-human organism or a part thereof under conditions which permit the production of tryptophan or a composition comprising tryptophan in said non-human organism or in the culture medium surrounding said non-human organism.

[33498] Accordingly, the present invention relates to a process for the production of tryptophan, which comprises
[33499] (a) increasing or generating one or more activities selected from the group consisting of cystathionine gamma-synthase in a non-human organism or a part thereof, preferably a microorganism, a plant cell, a plant or a part thereof, as compared to a corresponding non-transformed wild type non-human organism or a part thereof; and
[33500] (b) growing the non-human organism or a part thereof under conditions which permit the production of tryptophan or a composition comprising tryptophan in said non-human organism or in the culture medium surrounding said non-human organism.

[33501] Accordingly, the present invention relates to a process for the production of tryptophan, which comprises
[33502] (a) increasing or generating one or more activities selected from the group consisting of polygalacturonase in a non-human organism or a part thereof, preferably a microorganism, a plant cell, a plant or a part thereof, as compared to a corresponding non-transformed wild type non-human organism or a part thereof; and
[33503] (b) growing the non-human organism or a part thereof under conditions which permit the production of tryptophan or a composition comprising tryptophan in said non-human organism or in the culture medium surrounding said non-human organism.

[33504] Accordingly, the present invention relates to a process for the production of tryptophan, which comprises
[33505] (a) increasing or generating one or more activities selected from the group consisting of lipase in a non-human organism or a part thereof, preferably a microorganism, a plant cell, a plant or a part thereof, as compared to a corresponding non-transformed wild type non-human organism or a part thereof; and
[33506] (b) growing the non-human organism or a part thereof under conditions which permit the production of tryptophan or a composition comprising tryptophan in said non-human organism or in the culture medium surrounding said non-human organism.

[33507] Accordingly, the present invention relates to a process for the production of tryptophan, which comprises
[33508] (a) increasing or generating one or more activities selected from the group consisting of amino acid transporter in a non-human organism or a part thereof, preferably a microorganism, a plant cell, a plant or a part thereof, as compared to a corresponding non-transformed wild type non-human organism or a part thereof; and
[33509] (b) growing the non-human organism or a part thereof under conditions which permit the production of tryptophan or a composition comprising tryptophan in said non-human organism or in the culture medium surrounding said non-human organism.

[33510] Accordingly, the present invention relates to a process for the production of tryptophan, which comprises
[33511] (a) increasing or generating one or more activities selected from the group consisting of histone acetyltransferase in a non-human organism or a part thereof, preferably a microorganism, a plant cell, a plant or a part thereof, as compared to a corresponding non-transformed wild type non-human organism or a part thereof; and
[33512] (b) growing the non-human organism or a part thereof under conditions which permit the production of tryptophan or a composition comprising tryptophan in said non-human organism or in the culture medium surrounding said non-human organism.

[33513] Accordingly, the present invention relates to a process for the production of tryptophan, which comprises
[33514] (a) increasing or generating one or more activities selected from the group consisting of isopentenyl diphosphate isomerase in a non-human organism or a part thereof, preferably a microorganism, a plant cell, a plant or a part thereof, as compared to a corresponding non-transformed wild type non-human organism or a part thereof; and
[33515] (b) growing the non-human organism or a part thereof under conditions which permit the production of tryptophan or a composition comprising tryptophan in said non-human organism or in the culture medium surrounding said non-human organism.

[33516] Accordingly, the present invention relates to a process for the production of tryptophan, which comprises
[33517] (a) increasing or generating one or more activities selected from the group consisting of cyclin in a non-human organism or a part thereof, preferably a microorganism, a plant cell, a plant or a part thereof, as compared to a corresponding non-transformed wild type non-human organism or a part thereof; and
[33518] (b) growing the non-human organism or a part thereof under conditions which permit the production of tryptophan or a composition comprising tryptophan in said non-human organism or in the culture medium surrounding said non-human organism.

[33519] Accordingly, the present invention relates to a process for the production of tryptophan, which comprises
[33520] (a) increasing or generating one or more activities selected from the group consisting of Zm_{—}4842_BE510522-protein in a non-human organism or a part thereof, preferably a microorganism, a plant cell, a plant or a part thereof, as compared to a corresponding non-transformed wild type non-human organism or a part thereof; and
[33521] (b) growing the non-human organism or a part thereof under conditions which permit the production of tryptophan or a composition comprising tryptophan in said non-human organism or in the culture medium surrounding said non-human organism.

[33522] An embodiment of the present invention relates to a process for the production of tryptophan, which comprises
[33523] (a1) increasing or generating the activity of a polypeptide comprising a polypeptide as depicted in a respective line in column 5 or 8 of Table II, application no. 5, or a homolog or a fragment thereof, a consensus sequence or at least one polypeptide motif as depicted in the respective line in column 8 of Table IV, application no. 5; or
[33524] (a2) increasing or generating the activity of an expression product of one or more nucleic acid molecule(s) comprising a polynucleotide as depicted in the respective line in column 5 or 8 of Table I, application no. 5, preferably the coding region thereof, or a homolog or a fragment thereof; or
[33525] (a3) increasing or generating the activity of a functional equivalent of (a1) or (a2); in a non-human organism or a part thereof; preferably a microorganism, a plant cell, a plant or a part thereof, as compared to a corresponding non-transformed wild type non-human organism or a part thereof; and
[33526] (b) growing the non-human organism under conditions which permit the production of tryptophan or a composition comprising tryptophan in said non-human organism or in the culture medium surrounding said non-human organism.

[33527] Accordingly, the increase or generation of one or more said activities is for example conferred by one or more expression products of said nucleic acid molecule, e.g. proteins. Accordingly, in the present invention described above, the increase or generation of one or more said activities is for example conferred by one or more protein(s) each comprising a polypeptide selected from the group as depicted in Table II, application no. 5, column 5 and 8, or a homolog or a fragment thereof.

[33528] The process of the invention comprises in one embodiment the following steps:
[33529] (i) increasing or generating of the expression of; and/or
[33530] (ii) increasing or generating the expression of an expression product of; and/or
[33531] (iii) increasing or generating one or more activities of an expression product encoded by; at least one nucleic acid molecule (in the following “Fine Chemical Related Protein (FCRP)”-encoding gene or “FCRP”-gene) comprising a nucleic acid molecule selected from the group consisting of:
[33532] (a) a nucleic acid molecule encoding the polypeptide shown in column 5 or 8 of Table II, preferably Table II B, application no. 5, or a homolog or a fragment thereof;
[33533] (b) a nucleic acid molecule shown in column 5 or 8 of Table I, preferably Table I B, application no. 5, or a homolog or a fragment thereof (preferably the coding region thereof);
[33534] (c) a nucleic acid molecule, which, as a result of the degeneracy of the genetic code, can be derived from a polypeptide sequence depicted in column 5 or 8 of Table II, preferably Table II B, application no. 5;
[33535] (d) a nucleic acid molecule having at least 30%, in particular at least 50%, 60%, 70%, 80%, 85%, 90%, 95%, 97%, 98%, 99% or 99.5% identity with the nucleic acid molecule sequence of a polynucleotide comprising the nucleic acid molecule shown in column 5 or 8 of Table I, preferably Table I B, application no. 5, or the coding region thereof;
[33536] (e) a nucleic acid molecule encoding a polypeptide having at least 30%, in particular 50%, 60%, 70%, 80%, 85%, 90%, 95%, 97%, 98%, 99% or 99.5% identity with the amino acid sequence of the polypeptide encoded by the nucleic acid molecule of (a), (b), (c) or (d),
[33537] (f) a nucleic acid molecule which hybridizes with a nucleic acid molecule of (a), (b), (c), (d) or (e) under stringent hybridization conditions;
[33538] (g) a nucleic acid molecule encoding a polypeptide which can be isolated with the aid of monoclonal or polyclonal antibodies made against a polypeptide encoded by one of the nucleic acid molecules of (a), (b), (c), (d), (e) or (f);
[33539] (h) a nucleic acid molecule encoding a polypeptide comprising the consensus sequence or one or more polypeptide motifs as shown in column 8 of Table IV, application no. 5;
[33540] (i) a nucleic acid molecule encoding a polypeptide having the activity represented by a respective protein as depicted in column 5 of Table II, application no. 5;
[33541] (j) a nucleic acid molecule which comprises a polynucleotide, which is obtained by amplifying a cDNA library or a genomic library using the primers as depicted in column 8 of Table III, application no. 5; and
[33542] (k) a nucleic acid molecule which is obtainable by screening a suitable nucleic acid library, especially a cDNA library and/or a genomic library, under stringent hybridization conditions with a probe comprising a complementary sequence of a nucleic acid molecule of (a), (b), (c), (d), (e), (f), (g), (h), (i) or (j) or with a fragment thereof, having at least 15 nt, preferably 20 nt, 30 nt, 50 nt, 100 nt, 200 nt, 500 nt, 1000 nt, 1500 nt, 2000 nt or 3000 nt of a nucleic acid molecule complementary to a nucleic acid molecule sequence characterized in (a), (b), (c), (d), (e), (f), (g), (h), (i) or (j);
[33543] or a nucleic acid molecule comprising a sequence which is complementary thereto.
   (All the references to Tables I to IV are references to the corresponding lines of Tables I to IV.)

[33544] The term “increasing or generating of the expression of” may also be interchanged by the term “overexpressing”.

[33545] In a preferred embodiment thereof said nucleic acid molecule encodes a polypeptide which has the activity of the polypeptide represented by a protein comprising a polypeptide as depicted in the corresponding hit in column 5 of Table II, application no. 5.

[33546] In another preferred embodiment thereof said nucleic acid molecule confers a generation or an increase of the respective fine chemical in a non-human organism or a part thereof as compared to a corresponding wild-type non-human organism or part thereof.

[33547] In another preferred embodiment thereof said nucleic acid molecule encodes a polypeptide which has the activity of the polypeptide represented by a protein as depicted in the corresponding hit in column 5 of Table II, application no. 5, and confers a generation or an increase of the respective fine chemical in a non-human organism or a part thereof as compared to a corresponding wild-type non-human organism or part thereof.

[33548] Accordingly, the genes of the present invention or used in accordance with the present invention, which respectively encode a protein having an activity of 3-deoxy-7-phosphoheptulonate synthase, 3-ketoacyl-CoA thiolase, acetyltransferase, aldehyde dehydrogenase, amino acid transporter, aromatic amino acid aminotransferase, At1g19800-protein, At2g33510-protein, At4g32480-protein, At5g16650-protein, at5g21910-protein, ATP synthase subunit E, ATP-binding component of a transport system, auxin response factor, b1163-protein, b1346-protein, b1522-protein, b1796-protein, b2739-protein, b2849-protein, b3989-protein, b4029-protein, b4121-protein, binding-protein-dependent transport systems inner membrane component, branched-chain amino acid permease, calcium-dependent protein kinase, carbon dioxide concentrating mechanism protein, cardiolipin synthase, CBL-interacting protein kinase, Chaperone protein CIpB, choline kinase, coproporphyrinogen III oxidase, cullin, cyclin, cyclin D , cystathionine gamma-synthase, DNA mismatch repair protein, electron transfer flavoprotein subunit beta, elongation factor Tu, enoyl-CoA hydratase, eukaryotic translation initiation factor, eukaryotic translation initiation factor 5, fimbrial-like protein, flavodoxin, geranylgeranyl pyrophosphate synthase, gibberellin 20-oxidase, glucose dehydrogenase, glucose-6-phosphate 1-dehydrogenase, glutamate-ammonia-ligase, glutamine synthetase, glutaredoxin, glycerol kinase, glycosyl transferase, harpin-induced family protein, histone acetyltransferase, hydrolase, imidazole glycerol phosphate synthase subunit, isochorismate synthase, isopentenyl diphosphate isomerase, Leucyl/phenylalanyl-tRNA-protein transferase, lipase, L-ribulose-5-phosphate 4-epimerase, malate dehydrogenase, malic enzyme, methyl-accepting chemotaxis protein, methyltransferase, monthiol glutaredoxin, NAD(P)H-quinone oxidoreductase subunit, nitrate/nitrite transport protein, photosystem II protein, polygalacturonase, precorrin methylase, protein kinase, protein phosphatase, putative transport system permease protein, pyruvate kinase, recombinase A, RNA binding protein, RNA-binding protein, Sec-independent protein translocase subunit, short-chain alcohol dehydrogenase family, slr1107-protein, threonine synthase, transaldolase, transcription factor, transcriptional regulator, transport protein, trehalosephosphatase, tryptophan biosynthesis protein, yfl054c-protein, or Zm_{—}4842_BE510522-protein, which respectively encode a protein comprising a polypeptide encoded by a nucleic acid sequence as shown in Table I, application no. 5, column 5 or 8, (preferably the coding region thereof), or a homolog or a fragment thereof, which respectively encode a protein comprising a polypeptide as depicted in Table II, application no. 5, column 5 or 8, or a homolg or a fragment thereof, and/or which respectively can be amplified with the primer set shown in Table III, application no. 5, column 8, are also referred to as “FCRP genes”.

[33549] Proteins or polypeptides encoded by “FCRP-genes” are referred to as “Fine Chemical Related Proteins” or “FCRP”. For the purposes of the description of the present invention, the respective protein having an activity of 3-deoxy-7-phosphoheptulonate synthase, 3-ketoacyl-CoA thiolase, acetyltransferase, aldehyde dehydrogenase, amino acid transporter, aromatic amino acid aminotransferase, At1g19800-protein, At2g33510-protein, At4g32480protein, At5g16650-protein, at5g21910-protein, ATP synthase subunit E, ATP-binding component of a transport system, auxin response factor, b1163-protein, b1346-protein, b1522-protein, b1796-protein, b2739-protein, b2849-protein, b3989-protein, b4029-protein, b4121-protein, binding-protein-dependent transport systems inner membrane component, branched-chain amino acid permease, calcium-dependent protein kinase, carbon dioxide concentrating mechanism protein, cardiolipin synthase, CBL-interacting protein kinase, Chaperone protein CIpB, choline kinase, coproporphyrinogen III oxidase, cullin, cyclin, cyclin D , cystathionine gammasynthase, DNA mismatch repair protein, electron transfer flavoprotein subunit beta, elongation factor Tu, enoyl-CoA hydratase, eukaryotic translation initiation factor, eukaryotic translation initiation factor 5, fimbrial-like protein, flavodoxin, geranylgeranyl pyrophosphate synthase, gibberellin 20-oxidase, glucose dehydrogenase, glucose-6-phosphate 1-dehydrogenase, glutamate-ammonia-ligase, glutamine synthetase, glutaredoxin, glycerol kinase, glycosyl transferase, harpin-induced family protein, histone acetyltransferase, hydrolase, imidazole glycerol phosphate synthase subunit, isochorismate synthase, isopentenyl diphosphate isomerase, Leucyl/phenylalanyl-tRNA-protein transferase, lipase, L-ribulose-5-phosphate 4-epimerase, malate dehydrogenase, malic enzyme, methyl-accepting chemotaxis protein, methyltransferase, monthiol glutaredoxin, NAD(P)H-quinone oxidoreductase subunit, nitrate/nitrite transport protein, photosystem II protein, polygalacturonase, precorrin methylase, protein kinase, protein phosphatase, putative transport system permease protein, pyruvate kinase, recombinase A, RNA binding protein, RNA-binding protein, Sec-independent protein translocase subunit, shortchain alcohol dehydrogenase family, slr1107-protein, threonine synthase, transaldolase, transcription factor, transcriptional regulator, transport protein, trehalose-phosphatase, tryptophan biosynthesis protein, yfl054c-protein, or Zm_{—}4842_BE510522-protein, the respective protein comprising a polypeptide encoded by one or more respective nucleic acid sequences as shown in Table I, application no. 5, column 5 or 8, (preferably the coding region thereof), or a homolog or fragment thereof, the respective protein comprising a respective polypeptide as depicted in Table II, application no. 5, column 5 or 8, or a homolog or fragment thereof, the respective protein comprising a sequence corresponding to the consensus sequence as shown in Table IV, application no. 5, column 8, and/or the respective protein comprising at least one polypeptide motif as shown in Table IV, application no. 5, column 8 is also referred to as Fine Chemical Related Protein” or “FCRP”.

[33550] Thus, in one embodiment, the present invention provides a process of the production of tryptophan, by increasing or generating one or more activities, especially selected from the group consisting of 3-deoxy-7-phosphoheptulonate synthase, 3-ketoacyl-CoA thiolase, acetyltransferase, aldehyde dehydrogenase, amino acid transporter, aromatic amino acid aminotransferase, At1g19800-protein, At2g33510-protein, At4g32480-protein, At5g16650-protein, at5g21910-protein, ATP synthase subunit E, ATP-binding component of a transport system, auxin response factor, b1163-protein, b1346-protein, b1522-protein, b1796-protein, b2739-protein, b2849-protein, b3989-protein, b4029-protein, b4121-protein, binding-protein-dependent transport systems inner membrane component, branched-chain amino acid permease, calcium-dependent protein kinase, carbon dioxide concentrating mechanism protein, cardiolipin synthase, CBL-interacting protein kinase, Chaperone protein CIpB, choline kinase, coproporphyrinogen III oxidase, cullin, cyclin, cyclin D , cystathionine gamma-synthase, DNA mismatch repair protein, electron transfer flavoprotein subunit beta, elongation factor Tu, enoyl-CoA hydratase, eukaryotic translation initiation factor, eukaryotic translation initiation factor 5, fimbrial-like protein, flavodoxin, geranylgeranyl pyrophosphate synthase, gibberellin 20-oxidase, glucose dehydrogenase, glucose-6-phosphate 1-dehydrogenase, glutamate-ammonia-ligase, glutamine synthetase, glutaredoxin, glycerol kinase, glycosyl transferase, harpin-induced family protein, histone acetyltransferase, hydrolase, imidazole glycerol phosphate synthase subunit, isochorismate synthase, isopentenyl diphosphate isomerase, Leucyl/phenylalanyl-tRNA-protein transferase, lipase, L-ribulose-5-phosphate 4-epimerase, malate dehydrogenase, malic enzyme, methyl-accepting chemotaxis protein, methyltransferase, monthiol glutaredoxin, NAD(P)H-quinone oxidoreductase subunit, nitrate/nitrite transport protein, photosystem II protein, polygalacturonase, precorrin methylase, protein kinase, protein phosphatase, putative transport system permease protein, pyruvate kinase, recombinase A, RNA binding protein, RNA-binding protein, Sec-independent protein translocase subunit, short-chain alcohol dehydrogenase family, slr1107-protein, threonine synthase, transaldolase, transcription factor, transcriptional regulator, transport protein, trehalose-phosphatase, tryptophan biosynthesis protein, yfl054c-protein, and Zm_{—}4842_BE510522-protein, which is conferred by one or more FCRPs or the gene product of one or more FCRP-genes, for example by the gene product of a nucleic acid sequences comprising a polynucleotide selected from the group as shown in Table I, application no. 5, column 5 or 8, (preferably by the coding region thereof), or a homolog or a fragment thereof, e.g. or by one or more proteins each comprising a polypeptide encoded by one or more nucleic acid sequences selected from the group as shown in Table I, application no. 5, column 5 or 8, (preferably by the coding region thereof), or a homolog or a fragment thereof, or by one or more protein(s) each comprising a polypeptide selected from the group as depicted in Table II, application no. 5, column 5 and 8, or a homolog thereof, or a protein comprising a sequence corresponding to the consensus sequence or comprising at least one polypeptide motif as shown in Table IV, application no. 5, column 8.

[33551] for the disclosure of this paragraph see [0025.1.1.1] above

[33552] In an embodiment, the process comprises increasing or generating the activity of one or more polypeptides having said activity, e.g. by generating or increasing the amount and/or specific activity in the cell or a compartment of a cell of one of more FCRP, especially selected from the group consisting of 3-deoxy-7-phosphoheptulonate synthase, 3-ketoacyl-CoA thiolase, acetyltransferase, aldehyde dehydrogenase, amino acid transporter, aromatic amino acid aminotransferase, At1g19800-protein, At2g33510-protein, At4g32480-protein, At5g16650-protein, at5g21910-protein, ATP synthase subunit E, ATP-binding component of a transport system, auxin response factor, b1163-protein, b1346-protein, b1522-protein, b1796-protein, b2739-protein, b2849-protein, b3989-protein, b4029-protein, b4121-protein, binding-protein-dependent transport systems inner membrane component, branched-chain amino acid permease, calcium-dependent protein kinase, carbon dioxide concentrating mechanism protein, cardiolipin synthase, CBL-interacting protein kinase, Chaperone protein CIpB, choline kinase, coproporphyrinogen III oxidase, cullin, cyclin, cyclin D , cystathionine gamma-synthase, DNA mismatch repair protein, electron transfer flavoprotein subunit beta, elongation factor Tu, enoyl-CoA hydratase, eukaryotic translation initiation factor, eukaryotic translation initiation factor 5, fimbrial-like protein, flavodoxin, geranylgeranyl pyrophosphate synthase, gibberellin 20-oxidase, glucose dehydrogenase, glucose-6-phosphate 1-dehydrogenase, glutamate-ammonia-ligase, glutamine synthetase, glutaredoxin, glycerol kinase, glycosyl transferase, harpin-induced family protein, histone acetyltransferase, hydrolase, imidazole glycerol phosphate synthase subunit, isochorismate synthase, isopentenyl diphosphate isomerase, Leucyl/phenylalanyl-tRNA-protein transferase, lipase, L-ribulose-5-phosphate 4-epimerase, malate dehydrogenase, malic enzyme, methyl-accepting chemotaxis protein, methyltransferase, monthiol glutaredoxin, NAD(P)H-quinone oxidoreductase subunit, nitrate/nitrite transport protein, photosystem II protein, polygalacturonase, precorrin methylase, protein kinase, protein phosphatase, putative transport system permease protein, pyruvate kinase, recombinase A, RNA binding protein, RNA-binding protein, Sec-independent protein translocase subunit, short-chain alcohol dehydrogenase family, slr1107-protein, threonine synthase, transaldolase, transcription factor, transcriptional regulator, transport protein, trehalosephosphatase, tryptophan biosynthesis protein, yfl054c-protein, and Zm_{—}4842_BE510522protein, for example of the respective polypeptide as depicted in Table II, application no. 5, column 5 and 8, or a homolog or a fragment thereof, or the respective polypeptide comprising a sequence corresponding to the consensus sequences as shown in Table IV, application no. 5, column 8, or the respective polypeptide comprising at least one polypeptide motif as depicted in Table IV, application no. 5, column 8.

[33553] A further embodiment of the present invention relates to a process for the production of tryptophan, which comprises
[33554] (a) increasing or generating the activity of a glucose-6-phosphate 1-dehydrogenase non-targeted in a non-human organism or a part thereof, preferably a microorganism, a plant cell, a plant or a part thereof, as compared to a corresponding non-transformed wild type non-human organism or a part thereof; and
[33555] (b) growing the non-human organism or a part thereof under conditions which permit the production of tryptophan or a composition comprising tryptophan in said non-human organism or in the culture medium surrounding said non-human organism.

[33556] A further embodiment of the present invention relates to a process for the production of tryptophan, which comprises
[33557] (a) increasing or generating the activity of a At1g19800-protein non-targeted in a non-human organism or a part thereof, preferably a microorganism, a plant cell, a plant or a part thereof, as compared to a corresponding non-transformed wild type non-human organism or a part thereof; and
[33558] (b) growing the non-human organism or a part thereof under conditions which permit the production of tryptophan or a composition comprising tryptophan in said non-human organism or in the culture medium surrounding said non-human organism.

[33559] A further embodiment of the present invention relates to a process for the production of tryptophan, which comprises
[33560] (a) increasing or generating the activity of a cullin non-targeted in a non-human organism or a part thereof, preferably a microorganism, a plant cell, a plant or a part thereof, as compared to a corresponding non-transformed wild type non-human organism or a part thereof; and
[33561] (b) growing the non-human organism or a part thereof under conditions which permit the production of tryptophan or a composition comprising tryptophan in said non-human organism or in the culture medium surrounding said non-human organism.

[33562] A further embodiment of the present invention relates to a process for the production of tryptophan, which comprises
[33563] (a) increasing or generating the activity of a eukaryotic translation initiation factor 5 non-targeted in a non-human organism or a part thereof, preferably a microorganism, a plant cell, a plant or a part thereof, as compared to a corresponding non-transformed wild type non-human organism or a part thereof; and
[33564] (b) growing the non-human organism or a part thereof under conditions which permit the production of tryptophan or a composition comprising tryptophan in said non-human organism or in the culture medium surrounding said non-human organism.

[33565] A further embodiment of the present invention relates to a process for the production of tryptophan, which comprises
[33566] (a) increasing or generating the activity of a protein kinase non-targeted in a non-human organism or a part thereof, preferably a microorganism, a plant cell, a plant or a part thereof, as compared to a corresponding non-transformed wild type non-human organism or a part thereof; and
[33567] (b) growing the non-human organism or a part thereof under conditions which permit the production of tryptophan or a composition comprising tryptophan in said non-human organism or in the culture medium surrounding said non-human organism.

[33568] A further embodiment of the present invention relates to a process for the production of tryptophan, which comprises
[33569] (a) increasing or generating the activity of a transcription factor non-targeted in a non-human organism or a part thereof, preferably a microorganism, a plant cell, a plant or a part thereof, as compared to a corresponding non-transformed wild type non-human organism or a part thereof; and
[33570] (b) growing the non-human organism or a part thereof under conditions which permit the production of tryptophan or a composition comprising tryptophan in said non-human organism or in the culture medium surrounding said non-human organism.

[33571] A further embodiment of the present invention relates to a process for the production of tryptophan, which comprises
[33572] (a) increasing or generating the activity of a protein phosphatase non-targeted in a non-human organism or a part thereof, preferably a microorganism, a plant cell, a plant or a part thereof, as compared to a corresponding non-transformed wild type non-human organism or a part thereof; and
[33573] (b) growing the non-human organism or a part thereof under conditions which permit the production of tryptophan or a composition comprising tryptophan in said non-human organism or in the culture medium surrounding said non-human organism.

[33574] A further embodiment of the present invention relates to a process for the production of tryptophan, which comprises
[33575] (a) increasing or generating the activity of a CBL-interacting protein kinase non-targeted in a non-human organism or a part thereof, preferably a microorganism, a plant cell, a plant or a part thereof, as compared to a corresponding non-transformed wild type non-human organism or a part thereof; and
[33576] (b) growing the non-human organism or a part thereof under conditions which permit the production of tryptophan or a composition comprising tryptophan in said non-human organism or in the culture medium surrounding said non-human organism.

[33577] A further embodiment of the present invention relates to a process for the production of tryptophan, which comprises
[33578] (a) increasing or generating the activity of a glutaredoxin non-targeted in a non-human organism or a part thereof, preferably a microorganism, a plant cell, a plant or a part thereof, as compared to a corresponding non-transformed wild type non-human organism or a part thereof; and
[33579] (b) growing the non-human organism or a part thereof under conditions which permit the production of tryptophan or a composition comprising tryptophan in said non-human organism or in the culture medium surrounding said non-human organism.

[33580] A further embodiment of the present invention relates to a process for the production of tryptophan, which comprises
[33581] (a) increasing or generating the activity of a At2g33510-protein non-targeted in a non-human organism or a part thereof, preferably a microorganism, a plant cell, a plant or a part thereof, as compared to a corresponding non-transformed wild type non-human organism or a part thereof; and
[33582] (b) growing the non-human organism or a part thereof under conditions which permit the production of tryptophan or a composition comprising tryptophan in said non-human organism or in the culture medium surrounding said non-human organism.

[33583] A further embodiment of the present invention relates to a process for the production of tryptophan, which comprises
[33584] (a) increasing or generating the activity of a glutaredoxin non-targeted in a non-human organism or a part thereof, preferably a microorganism, a plant cell, a plant or a part thereof, as compared to a corresponding non-transformed wild type non-human organism or a part thereof; and
[33585] (b) growing the non-human organism or a part thereof under conditions which permit the production of tryptophan or a composition comprising tryptophan in said non-human organism or in the culture medium surrounding said non-human organism.

[33586] A further embodiment of the present invention relates to a process for the production of tryptophan, which comprises
[33587] (a) increasing or generating the activity of a pyruvate kinase non-targeted in a non-human organism or a part thereof, preferably a microorganism, a plant cell, a plant or a part thereof, as compared to a corresponding non-transformed wild type non-human organism or a part thereof; and
[33588] (b) growing the non-human organism or a part thereof under conditions which permit the production of tryptophan or a composition comprising tryptophan in said non-human organism or in the culture medium surrounding said non-human organism.

[33589] A further embodiment of the present invention relates to a process for the production of tryptophan, which comprises
[33590] (a) increasing or generating the activity of a harpin-induced family protein non-targeted in a non-human organism or a part thereof, preferably a microorganism, a plant cell, a plant or a part thereof, as compared to a corresponding non-transformed wild type non-human organism or a part thereof; and
[33591] (b) growing the non-human organism or a part thereof under conditions which permit the production of tryptophan or a composition comprising tryptophan in said non-human organism or in the culture medium surrounding said non-human organism.

[33592] A further embodiment of the present invention relates to a process for the production of tryptophan, which comprises
[33593] (a) increasing or generating the activity of a DNA mismatch repair protein non-targeted in a non-human organism or a part thereof, preferably a microorganism, a plant cell, a plant or a part thereof, as compared to a corresponding non-transformed wild type non-human organism or a part thereof; and
[33594] (b) growing the non-human organism or a part thereof under conditions which permit the production of tryptophan or a composition comprising tryptophan in said non-human organism or in the culture medium surrounding said non-human organism.

[33595] A further embodiment of the present invention relates to a process for the production of tryptophan, which comprises
[33596] (a) increasing or generating the activity of a protein kinase non-targeted in a non-human organism or a part thereof, preferably a microorganism, a plant cell, a plant or a part thereof, as compared to a corresponding non-transformed wild type non-human organism or a part thereof; and
[33597] (b) growing the non-human organism or a part thereof under conditions which permit the production of tryptophan or a composition comprising tryptophan in said non-human organism or in the culture medium surrounding said non-human organism.

[33598] A further embodiment of the present invention relates to a process for the production of tryptophan, which comprises
[33599] (a) increasing or generating the activity of a eukaryotic translation initiation factor non-targeted in a non-human organism or a part thereof, preferably a microorganism, a plant cell, a plant or a part thereof, as compared to a corresponding non-transformed wild type non-human organism or a part thereof; and
[33600] (b) growing the non-human organism or a part thereof under conditions which permit the production of tryptophan or a composition comprising tryptophan in said non-human organism or in the culture medium surrounding said non-human organism.

[33601] A further embodiment of the present invention relates to a process for the production of tryptophan, which comprises
[33602] (a) increasing or generating the activity of a glycosyl transferase non-targeted in a non-human organism or a part thereof, preferably a microorganism, a plant cell, a plant or a part thereof, as compared to a corresponding non-transformed wild type non-human organism or a part thereof; and
[33603] (b) growing the non-human organism or a part thereof under conditions which permit the production of tryptophan or a composition comprising tryptophan in said non-human organism or in the culture medium surrounding said non-human organism.

[33604] A further embodiment of the present invention relates to a process for the production of tryptophan, which comprises
[33605] (a) increasing or generating the activity of a auxin response factor non-targeted in a non-human organism or a part thereof, preferably a microorganism, a plant cell, a plant or a part thereof, as compared to a corresponding non-transformed wild type non-human organism or a part thereof; and
[33606] (b) growing the non-human organism or a part thereof under conditions which permit the production of tryptophan or a composition comprising tryptophan in said non-human organism or in the culture medium surrounding said non-human organism.

[33607] A further embodiment of the present invention relates to a process for the production of tryptophan, which comprises
[33608] (a) increasing or generating the activity of a monthiol glutaredoxin non-targeted in a non-human organism or a part thereof, preferably a microorganism, a plant cell, a plant or a part thereof, as compared to a corresponding non-transformed wild type non-human organism or a part thereof; and
[33609] (b) growing the non-human organism or a part thereof under conditions which permit the production of tryptophan or a composition comprising tryptophan in said non-human organism or in the culture medium surrounding said non-human organism.

[33610] A further embodiment of the present invention relates to a process for the production of tryptophan, which comprises
[33611] (a) increasing or generating the activity of a glutaredoxin non-targeted in a non-human organism or a part thereof, preferably a microorganism, a plant cell, a plant or a part thereof, as compared to a corresponding non-transformed wild type non-human organism or a part thereof; and
[33612] (b) growing the non-human organism or a part thereof under conditions which permit the production of tryptophan or a composition comprising tryptophan in said non-human organism or in the culture medium surrounding said non-human organism.

[33613] A further embodiment of the present invention relates to a process for the production of tryptophan, which comprises
[33614] (a) increasing or generating the activity of a At4g32480-protein non-targeted in a non-human organism or a part thereof, preferably a microorganism, a plant cell, a plant or a part thereof, as compared to a corresponding non-transformed wild type non-human organism or a part thereof; and
[33615] (b) growing the non-human organism or a part thereof under conditions which permit the production of tryptophan or a composition comprising tryptophan in said non-human organism or in the culture medium surrounding said non-human organism.

[33616] A further embodiment of the present invention relates to a process for the production of tryptophan, which comprises
[33617] (a) increasing or generating the activity of a cyclin D non-targeted in a non-human organism or a part thereof, preferably a microorganism, a plant cell, a plant or a part thereof, as compared to a corresponding non-transformed wild type non-human organism or a part thereof; and
[33618] (b) growing the non-human organism or a part thereof under conditions which permit the production of tryptophan or a composition comprising tryptophan in said non-human organism or in the culture medium surrounding said non-human organism.

[33619] A further embodiment of the present invention relates to a process for the production of tryptophan, which comprises
[33620] (a) increasing or generating the activity of a calcium-dependent protein kinase non-targeted in a non-human organism or a part thereof, preferably a microorganism, a plant cell, a plant or a part thereof, as compared to a corresponding non-transformed wild type non-human organism or a part thereof; and
[33621] (b) growing the non-human organism or a part thereof under conditions which permit the production of tryptophan or a composition comprising tryptophan in said non-human organism or in the culture medium surrounding said non-human organism.

[33622] A further embodiment of the present invention relates to a process for the production of tryptophan, which comprises
[33623] (a) increasing or generating the activity of a protein phosphatase non-targeted in a non-human organism or a part thereof, preferably a microorganism, a plant cell, a plant or a part thereof, as compared to a corresponding non-transformed wild type non-human organism or a part thereof; and
[33624] (b) growing the non-human organism or a part thereof under conditions which permit the production of tryptophan or a composition comprising tryptophan in said non-human organism or in the culture medium surrounding said non-human organism.

[33625] A further embodiment of the present invention relates to a process for the production of tryptophan, which comprises
[33626] (a) increasing or generating the activity of a gibberellin 20-oxidase non-targeted in a non-human organism or a part thereof, preferably a microorganism, a plant cell, a plant or a part thereof, as compared to a corresponding non-transformed wild type non-human organism or a part thereof; and
[33627] (b) growing the non-human organism or a part thereof under conditions which permit the production of tryptophan or a composition comprising tryptophan in said non-human organism or in the culture medium surrounding said non-human organism.

[33628] A further embodiment of the present invention relates to a process for the production of tryptophan, which comprises
[33629] (a) increasing or generating the activity of a At5g16650-protein non-targeted in a non-human organism or a part thereof, preferably a microorganism, a plant cell, a plant or a part thereof, as compared to a corresponding non-transformed wild type non-human organism or a part thereof; and
[33630] (b) growing the non-human organism or a part thereof under conditions which permit the production of tryptophan or a composition comprising tryptophan in said non-human organism or in the culture medium surrounding said non-human organism.

[33631] A further embodiment of the present invention relates to a process for the production of tryptophan, which comprises
[33632] (a) increasing or generating the activity of a at5g21910-protein non-targeted in a non-human organism or a part thereof, preferably a microorganism, a plant cell, a plant or a part thereof, as compared to a corresponding non-transformed wild type non-human organism or a part thereof; and
[33633] (b) growing the non-human organism or a part thereof under conditions which permit the production of tryptophan or a composition comprising tryptophan in said non-human organism or in the culture medium surrounding said non-human organism.

[33634] A further embodiment of the present invention relates to a process for the production of tryptophan, which comprises
[33635] (a) increasing or generating the activity of a transcription factor non-targeted in a non-human organism or a part thereof, preferably a microorganism, a plant cell, a plant or a part thereof, as compared to a corresponding non-transformed wild type non-human organism or a part thereof; and
[33636] (b) growing the non-human organism or a part thereof under conditions which permit the production of tryptophan or a composition comprising tryptophan in said non-human organism or in the culture medium surrounding said non-human organism.

[33637] A further embodiment of the present invention relates to a process for the production of tryptophan, which comprises
[33638] (a) increasing or generating the activity of a RNA-binding protein non-targeted in a non-human organism or a part thereof, preferably a microorganism, a plant cell, a plant or a part thereof, as compared to a corresponding non-transformed wild type non-human organism or a part thereof; and
[33639] (b) growing the non-human organism or a part thereof under conditions which permit the production of tryptophan or a composition comprising tryptophan in said non-human organism or in the culture medium surrounding said non-human organism.

[33640] A further embodiment of the present invention relates to a process for the production of tryptophan, which comprises
[33641] (a) increasing or generating the activity of a malic enzyme non-targeted in a non-human organism or a part thereof, preferably a microorganism, a plant cell, a plant or a part thereof, as compared to a corresponding non-transformed wild type non-human organism or a part thereof; and
[33642] (b) growing the non-human organism or a part thereof under conditions which permit the production of tryptophan or a composition comprising tryptophan in said non-human organism or in the culture medium surrounding said non-human organism.

[33643] A further embodiment of the present invention relates to a process for the production of tryptophan, which comprises
[33644] (a) increasing or generating the activity of a elongation factor Tu non-targeted in a non-human organism or a part thereof, preferably a microorganism, a plant cell, a plant or a part thereof, as compared to a corresponding non-transformed wild type non-human organism or a part thereof; and
[33645] (b) growing the non-human organism or a part thereof under conditions which permit the production of tryptophan or a composition comprising tryptophan in said non-human organism or in the culture medium surrounding said non-human organism.

[33646] A further embodiment of the present invention relates to a process for the production of tryptophan, which comprises
[33647] (a) increasing or generating the activity of a enoyl-CoA hydratase non-targeted in a non-human organism or a part thereof, preferably a microorganism, a plant cell, a plant or a part thereof, as compared to a corresponding non-transformed wild type non-human organism or a part thereof; and
[33648] (b) growing the non-human organism or a part thereof under conditions which permit the production of tryptophan or a composition comprising tryptophan in said non-human organism or in the culture medium surrounding said non-human organism.

[33649] A further embodiment of the present invention relates to a process for the production of tryptophan, which comprises
[33650] (a) increasing or generating the activity of a transcriptional regulator non-targeted in a non-human organism or a part thereof, preferably a microorganism, a plant cell, a plant or a part thereof, as compared to a corresponding non-transformed wild type non-human organism or a part thereof; and
[33651] (b) growing the non-human organism or a part thereof under conditions which permit the production of tryptophan or a composition comprising tryptophan in said non-human organism or in the culture medium surrounding said non-human organism.

[33652] A further embodiment of the present invention relates to a process for the production of tryptophan, which comprises
[33653] (a) increasing or generating the activity of a enoyl-CoA hydratase non-targeted in a non-human organism or a part thereof, preferably a microorganism, a plant cell, a plant or a part thereof, as compared to a corresponding non-transformed wild type non-human organism or a part thereof; and
[33654] (b) growing the non-human organism or a part thereof under conditions which permit the production of tryptophan or a composition comprising tryptophan in said non-human organism or in the culture medium surrounding said non-human organism.

[33655] A further embodiment of the present invention relates to a process for the production of tryptophan, which comprises
[33656] (a) increasing or generating the activity of a glutamate-ammonia-ligase non-targeted in a non-human organism or a part thereof, preferably a microorganism, a plant cell, a plant or a part thereof, as compared to a corresponding non-transformed wild type non-human organism or a part thereof; and
[33657] (b) growing the non-human organism or a part thereof under conditions which permit the production of tryptophan or a composition comprising tryptophan in said non-human organism or in the culture medium surrounding said non-human organism.

[33658] A further embodiment of the present invention relates to a process for the production of tryptophan, which comprises
[33659] (a) increasing or generating the activity of a hydrolase non-targeted in a non-human organism or a part thereof, preferably a microorganism, a plant cell, a plant or a part thereof, as compared to a corresponding non-transformed wild type non-human organism or a part thereof; and
[33660] (b) growing the non-human organism or a part thereof under conditions which permit the production of tryptophan or a composition comprising tryptophan in said non-human organism or in the culture medium surrounding said non-human organism.

[33661] A further embodiment of the present invention relates to a process for the production of tryptophan, which comprises
[33662] (a) increasing or generating the activity of a Chaperone protein CIpB non-targeted in a non-human organism or a part thereof, preferably a microorganism, a plant cell, a plant or a part thereof, as compared to a corresponding non-transformed wild type non-human organism or a part thereof; and
[33663] (b) growing the non-human organism or a part thereof under conditions which permit the production of tryptophan or a composition comprising tryptophan in said non-human organism or in the culture medium surrounding said non-human organism.

[33664] A further embodiment of the present invention relates to a process for the production of tryptophan, which comprises
[33665] (a) increasing or generating the activity of a electron transfer flavoprotein subunit beta non-targeted in a non-human organism or a part thereof, preferably a microorganism, a plant cell, a plant or a part thereof, as compared to a corresponding non-transformed wild type non-human organism or a part thereof; and
[33666] (b) growing the non-human organism or a part thereof under conditions which permit the production of tryptophan or a composition comprising tryptophan in said non-human organism or in the culture medium surrounding said non-human organism.

[33667] A further embodiment of the present invention relates to a process for the production of tryptophan, which comprises
[33668] (a) increasing or generating the activity of a threonine synthase non-targeted in a non-human organism or a part thereof, preferably a microorganism, a plant cell, a plant or a part thereof, as compared to a corresponding non-transformed wild type non-human organism or a part thereof; and
[33669] (b) growing the non-human organism or a part thereof under conditions which permit the production of tryptophan or a composition comprising tryptophan in said non-human organism or in the culture medium surrounding said non-human organism.

[33670] A further embodiment of the present invention relates to a process for the production of tryptophan, which comprises
[33671] (a) increasing or generating the activity of a transaldolase non-targeted in a non-human organism or a part thereof, preferably a microorganism, a plant cell, a plant or a part thereof, as compared to a corresponding non-transformed wild type non-human organism or a part thereof; and
[33672] (b) growing the non-human organism or a part thereof under conditions which permit the production of tryptophan or a composition comprising tryptophan in said non-human organism or in the culture medium surrounding said non-human organism.

[33673] A further embodiment of the present invention relates to a process for the production of tryptophan, which comprises
[33674] (a) increasing or generating the activity of a L-ribulose-5-phosphate 4-epimerase non-targeted in a non-human organism or a part thereof, preferably a microorganism, a plant cell, a plant or a part thereof, as compared to a corresponding non-transformed wild type non-human organism or a part thereof; and
[33675] (b) growing the non-human organism or a part thereof under conditions which permit the production of tryptophan or a composition comprising tryptophan in said non-human organism or in the culture medium surrounding said non-human organism.

[33676] A further embodiment of the present invention relates to a process for the production of tryptophan, which comprises
[33677] (a) increasing or generating the activity of a glucose dehydrogenase non-targeted in a non-human organism or a part thereof, preferably a microorganism, a plant cell, a plant or a part thereof, as compared to a corresponding non-transformed wild type non-human organism or a part thereof; and
[33678] (b) growing the non-human organism or a part thereof under conditions which permit the production of tryptophan or a composition comprising tryptophan in said non-human organism or in the culture medium surrounding said non-human organism.

[33679] A further embodiment of the present invention relates to a process for the production of tryptophan, which comprises
[33680] (a) increasing or generating the activity of a ATP-binding component of a transport system non-targeted in a non-human organism or a part thereof, preferably a microorganism, a plant cell, a plant or a part thereof, as compared to a corresponding non-transformed wild type non-human organism or a part thereof; and
[33681] (b) growing the non-human organism or a part thereof under conditions which permit the production of tryptophan or a composition comprising tryptophan in said non-human organism or in the culture medium surrounding said non-human organism.

[33682] A further embodiment of the present invention relates to a process for the production of tryptophan, which comprises
[33683] (a) increasing or generating the activity of a isochorismate synthase non-targeted in a non-human organism or a part thereof, preferably a microorganism, a plant cell, a plant or a part thereof, as compared to a corresponding non-transformed wild type non-human organism or a part thereof; and
[33684] (b) growing the non-human organism or a part thereof under conditions which permit the production of tryptophan or a composition comprising tryptophan in said non-human organism or in the culture medium surrounding said non-human organism.

[33685] A further embodiment of the present invention relates to a process for the production of tryptophan, which comprises
[33686] (a) increasing or generating the activity of a Leucyl/phenylalanyl-tRNA-protein transferase non-targeted in a non-human organism or a part thereof, preferably a microorganism, a plant cell, a plant or a part thereof, as compared to a corresponding non-transformed wild type non-human organism or a part thereof; and
[33687] (b) growing the non-human organism or a part thereof under conditions which permit the production of tryptophan or a composition comprising tryptophan in said non-human organism or in the culture medium surrounding said non-human organism.

[33688] A further embodiment of the present invention relates to a process for the production of tryptophan, which comprises
[33689] (a) increasing or generating the activity of a b1163-protein non-targeted in a non-human organism or a part thereof, preferably a microorganism, a plant cell, a plant or a part thereof, as compared to a corresponding non-transformed wild type non-human organism or a part thereof; and
[33690] (b) growing the non-human organism or a part thereof under conditions which permit the production of tryptophan or a composition comprising tryptophan in said non-human organism or in the culture medium surrounding said non-human organism.

[33691] A further embodiment of the present invention relates to a process for the production of tryptophan, which comprises
[33692] (a) increasing or generating the activity of a cardiolipin synthase non-targeted in a non-human organism or a part thereof, preferably a microorganism, a plant cell, a plant or a part thereof, as compared to a corresponding non-transformed wild type non-human organism or a part thereof; and
[33693] (b) growing the non-human organism or a part thereof under conditions which permit the production of tryptophan or a composition comprising tryptophan in said non-human organism or in the culture medium surrounding said non-human organism.

[33694] A further embodiment of the present invention relates to a process for the production of tryptophan, which comprises
[33695] (a) increasing or generating the activity of a tryptophan biosynthesis protein non-targeted in a non-human organism or a part thereof, preferably a microorganism, a plant cell, a plant or a part thereof, as compared to a corresponding non-transformed wild type non-human organism or a part thereof; and
[33696] (b) growing the non-human organism or a part thereof under conditions which permit the production of tryptophan or a composition comprising tryptophan in said non-human organism or in the culture medium surrounding said non-human organism.

[33697] A further embodiment of the present invention relates to a process for the production of tryptophan, which comprises
[33698] (a) increasing or generating the activity of a aldehyde dehydrogenase non-targeted in a non-human organism or a part thereof, preferably a microorganism, a plant cell, a plant or a part thereof, as compared to a corresponding non-transformed wild type non-human organism or a part thereof; and
[33699] (b) growing the non-human organism or a part thereof under conditions which permit the production of tryptophan or a composition comprising tryptophan in said non-human organism or in the culture medium surrounding said non-human organism.

[33700] A further embodiment of the present invention relates to a process for the production of tryptophan, which comprises
[33701] (a) increasing or generating the activity of a b1346-protein non-targeted in a non-human organism or a part thereof, preferably a microorganism, a plant cell, a plant or a part thereof, as compared to a corresponding non-transformed wild type non-human organism or a part thereof; and
[33702] (b) growing the non-human organism or a part thereof under conditions which permit the production of tryptophan or a composition comprising tryptophan in said non-human organism or in the culture medium surrounding said non-human organism.

[33703] A further embodiment of the present invention relates to a process for the production of tryptophan, which comprises
[33704] (a) increasing or generating the activity of a b1522-protein non-targeted in a non-human organism or a part thereof, preferably a microorganism, a plant cell, a plant or a part thereof, as compared to a corresponding non-transformed wild type non-human organism or a part thereof; and
[33705] (b) growing the non-human organism or a part thereof under conditions which permit the production of tryptophan or a composition comprising tryptophan in said non-human organism or in the culture medium surrounding said non-human organism.

[33706] A further embodiment of the present invention relates to a process for the production of tryptophan, which comprises
[33707] (a) increasing or generating the activity of a b1796-protein non-targeted in a non-human organism or a part thereof, preferably a microorganism, a plant cell, a plant or a part thereof, as compared to a corresponding non-transformed wild type non-human organism or a part thereof; and
[33708] (b) growing the non-human organism or a part thereof under conditions which permit the production of tryptophan or a composition comprising tryptophan in said non-human organism or in the culture medium surrounding said non-human organism.

[33709] A further embodiment of the present invention relates to a process for the production of tryptophan, which comprises
[33710] (a) increasing or generating the activity of a methyl-accepting chemotaxis protein non-targeted in a non-human organism or a part thereof, preferably a microorganism, a plant cell, a plant or a part thereof, as compared to a corresponding non-transformed wild type non-human organism or a part thereof; and
[33711] (b) growing the non-human organism or a part thereof under conditions which permit the production of tryptophan or a composition comprising tryptophan in said non-human organism or in the culture medium surrounding said non-human organism.

[33712] A further embodiment of the present invention relates to a process for the production of tryptophan, which comprises
[33713] (a) increasing or generating the activity of a trehalose-phosphatase non-targeted in a non-human organism or a part thereof, preferably a microorganism, a plant cell, a plant or a part thereof, as compared to a corresponding non-transformed wild type non-human organism or a part thereof; and
[33714] (b) growing the non-human organism or a part thereof under conditions which permit the production of tryptophan or a composition comprising tryptophan in said non-human organism or in the culture medium surrounding said non-human organism.

[33715] A further embodiment of the present invention relates to a process for the production of tryptophan, which comprises
[33716] (a) increasing or generating the activity of a imidazole glycerol phosphate synthase subunit non-targeted in a non-human organism or a part thereof, preferably a microorganism, a plant cell, a plant or a part thereof, as compared to a corresponding non-transformed wild type non-human organism or a part thereof; and
[33717] (b) growing the non-human organism or a part thereof under conditions which permit the production of tryptophan or a composition comprising tryptophan in said non-human organism or in the culture medium surrounding said non-human organism.

[33718] A further embodiment of the present invention relates to a process for the production of tryptophan, which comprises
[33719] (a) increasing or generating the activity of a transport protein non-targeted in a non-human organism or a part thereof, preferably a microorganism, a plant cell, a plant or a part thereof, as compared to a corresponding non-transformed wild type non-human organism or a part thereof; and
[33720] (b) growing the non-human organism or a part thereof under conditions which permit the production of tryptophan or a composition comprising tryptophan in said non-human organism or in the culture medium surrounding said non-human organism.

[33721] A further embodiment of the present invention relates to a process for the production of tryptophan, which comprises
[33722] (a) increasing or generating the activity of a ATP synthase subunit E non-targeted in a non-human organism or a part thereof, preferably a microorganism, a plant cell, a plant or a part thereof, as compared to a corresponding non-transformed wild type non-human organism or a part thereof; and
[33723] (b) growing the non-human organism or a part thereof under conditions which permit the production of tryptophan or a composition comprising tryptophan in said non-human organism or in the culture medium surrounding said non-human organism.

[33724] A further embodiment of the present invention relates to a process for the production of tryptophan, which comprises
[33725] (a) increasing or generating the activity of a putative transport system permease protein non-targeted in a non-human organism or a part thereof, preferably a microorganism, a plant cell, a plant or a part thereof, as compared to a corresponding non-transformed wild type non-human organism or a part thereof; and
[33726] (b) growing the non-human organism or a part thereof under conditions which permit the production of tryptophan or a composition comprising tryptophan in said non-human organism or in the culture medium surrounding said non-human organism.

[33727] A further embodiment of the present invention relates to a process for the production of tryptophan, which comprises
[33728] (a) increasing or generating the activity of a recombinase A non-targeted in a non-human organism or a part thereof, preferably a microorganism, a plant cell, a plant or a part thereof, as compared to a corresponding non-transformed wild type non-human organism or a part thereof; and
[33729] (b) growing the non-human organism or a part thereof under conditions which permit the production of tryptophan or a composition comprising tryptophan in said non-human organism or in the culture medium surrounding said non-human organism.

[33730] A further embodiment of the present invention relates to a process for the production of tryptophan, which comprises
[33731] (a) increasing or generating the activity of a b2739-protein non-targeted in a non-human organism or a part thereof, preferably a microorganism, a plant cell, a plant or a part thereof, as compared to a corresponding non-transformed wild type non-human organism or a part thereof; and
[33732] (b) growing the non-human organism or a part thereof under conditions which permit the production of tryptophan or a composition comprising tryptophan in said non-human organism or in the culture medium surrounding said non-human organism.

[33733] A further embodiment of the present invention relates to a process for the production of tryptophan, which comprises
[33734] (a) increasing or generating the activity of a b2849-protein non-targeted in a non-human organism or a part thereof, preferably a microorganism, a plant cell, a plant or a part thereof, as compared to a corresponding non-transformed wild type non-human organism or a part thereof; and
[33735] (b) growing the non-human organism or a part thereof under conditions which permit the production of tryptophan or a composition comprising tryptophan in said non-human organism or in the culture medium surrounding said non-human organism.

[33736] A further embodiment of the present invention relates to a process for the production of tryptophan, which comprises
[33737] (a) increasing or generating the activity of a fimbrial-like protein non-targeted in a non-human organism or a part thereof, preferably a microorganism, a plant cell, a plant or a part thereof, as compared to a corresponding non-transformed wild type non-human organism or a part thereof; and
[33738] (b) growing the non-human organism or a part thereof under conditions which permit the production of tryptophan or a composition comprising tryptophan in said non-human organism or in the culture medium surrounding said non-human organism.

[33739] A further embodiment of the present invention relates to a process for the production of tryptophan, which comprises
[33740] (a) increasing or generating the activity of a methyltransferase non-targeted in a non-human organism or a part thereof, preferably a microorganism, a plant cell, a plant or a part thereof, as compared to a corresponding non-transformed wild type non-human organism or a part thereof; and
[33741] (b) growing the non-human organism or a part thereof under conditions which permit the production of tryptophan or a composition comprising tryptophan in said non-human organism or in the culture medium surrounding said non-human organism.

[33742] A further embodiment of the present invention relates to a process for the production of tryptophan, which comprises
[33743] (a) increasing or generating the activity of a 3-ketoacyl-CoA thiolase non-targeted in a non-human organism or a part thereof, preferably a microorganism, a plant cell, a plant or a part thereof, as compared to a corresponding non-transformed wild type non-human organism or a part thereof; and
[33744] (b) growing the non-human organism or a part thereof under conditions which permit the production of tryptophan or a composition comprising tryptophan in said non-human organism or in the culture medium surrounding said non-human organism.

[33745] A further embodiment of the present invention relates to a process for the production of tryptophan, which comprises
[33746] (a) increasing or generating the activity of a glutamine synthetase non-targeted in a non-human organism or a part thereof, preferably a microorganism, a plant cell, a plant or a part thereof, as compared to a corresponding non-transformed wild type non-human organism or a part thereof; and
[33747] (b) growing the non-human organism or a part thereof under conditions which permit the production of tryptophan or a composition comprising tryptophan in said non-human organism or in the culture medium surrounding said non-human organism.

[33748] A further embodiment of the present invention relates to a process for the production of tryptophan, which comprises
[33749] (a) increasing or generating the activity of a b3989-protein non-targeted in a non-human organism or a part thereof, preferably a microorganism, a plant cell, a plant or a part thereof, as compared to a corresponding non-transformed wild type non-human organism or a part thereof; and
[33750] (b) growing the non-human organism or a part thereof under conditions which permit the production of tryptophan or a composition comprising tryptophan in said non-human organism or in the culture medium surrounding said non-human organism.

[33751] A further embodiment of the present invention relates to a process for the production of tryptophan, which comprises
[33752] (a) increasing or generating the activity of a b4029-protein non-targeted in a non-human organism or a part thereof, preferably a microorganism, a plant cell, a plant or a part thereof, as compared to a corresponding non-transformed wild type non-human organism or a part thereof; and
[33753] (b) growing the non-human organism or a part thereof under conditions which permit the production of tryptophan or a composition comprising tryptophan in said non-human organism or in the culture medium surrounding said non-human organism.

[33754] A further embodiment of the present invention relates to a process for the production of tryptophan, which comprises
[33755] (a) increasing or generating the activity of a b4121-protein non-targeted in a non-human organism or a part thereof, preferably a microorganism, a plant cell, a plant or a part thereof, as compared to a corresponding non-transformed wild type non-human organism or a part thereof; and
[33756] (b) growing the non-human organism or a part thereof under conditions which permit the production of tryptophan or a composition comprising tryptophan in said non-human organism or in the culture medium surrounding said non-human organism.

[33757] A further embodiment of the present invention relates to a process for the production of tryptophan, which comprises
[33758] (a) increasing or generating the activity of a acetyltransferase non-targeted in a non-human organism or a part thereof, preferably a microorganism, a plant cell, a plant or a part thereof, as compared to a corresponding non-transformed wild type non-human organism or a part thereof; and
[33759] (b) growing the non-human organism or a part thereof under conditions which permit the production of tryptophan or a composition comprising tryptophan in said non-human organism or in the culture medium surrounding said non-human organism.

[33760] A further embodiment of the present invention relates to a process for the production of tryptophan, which comprises
[33761] (a) increasing or generating the activity of a RNA binding protein non-targeted in a non-human organism or a part thereof, preferably a microorganism, a plant cell, a plant or a part thereof, as compared to a corresponding non-transformed wild type non-human organism or a part thereof; and
[33762] (b) growing the non-human organism or a part thereof under conditions which permit the production of tryptophan or a composition comprising tryptophan in said non-human organism or in the culture medium surrounding said non-human organism.

[33763] A further embodiment of the present invention relates to a process for the production of tryptophan, which comprises
[33764] (a) increasing or generating the activity of a transcription factor non-targeted in a non-human organism or a part thereof, preferably a microorganism, a plant cell, a plant or a part thereof, as compared to a corresponding non-transformed wild type non-human organism or a part thereof; and
[33765] (b) growing the non-human organism or a part thereof under conditions which permit the production of tryptophan or a composition comprising tryptophan in said non-human organism or in the culture medium surrounding said non-human organism.

[33766] A further embodiment of the present invention relates to a process for the production of tryptophan, which comprises
[33767] (a) increasing or generating the activity of a choline kinase non-targeted in a non-human organism or a part thereof, preferably a microorganism, a plant cell, a plant or a part thereof, as compared to a corresponding non-transformed wild type non-human organism or a part thereof; and
[33768] (b) growing the non-human organism or a part thereof under conditions which permit the production of tryptophan or a composition comprising tryptophan in said non-human organism or in the culture medium surrounding said non-human organism.

[33769] A further embodiment of the present invention relates to a process for the production of tryptophan, which comprises
[33770] (a) increasing or generating the activity of a flavodoxin non-targeted in a non-human organism or a part thereof, preferably a microorganism, a plant cell, a plant or a part thereof, as compared to a corresponding non-transformed wild type non-human organism or a part thereof; and
[33771] (b) growing the non-human organism or a part thereof under conditions which permit the production of tryptophan or a composition comprising tryptophan in said non-human organism or in the culture medium surrounding said non-human organism.

[33772] A further embodiment of the present invention relates to a process for the production of tryptophan, which comprises
[33773] (a) increasing or generating the activity of a NAD(P)H-quinone oxidoreductase subunit non-targeted in a non-human organism or a part thereof, preferably a microorganism, a plant cell, a plant or a part thereof, as compared to a corresponding non-transformed wild type non-human organism or a part thereof; and
[33774] (b) growing the non-human organism or a part thereof under conditions which permit the production of tryptophan or a composition comprising tryptophan in said non-human organism or in the culture medium surrounding said non-human organism.

[33775] A further embodiment of the present invention relates to a process for the production of tryptophan, which comprises
[33776] (a) increasing or generating the activity of a binding-protein-dependent transport systems inner membrane component non-targeted in a non-human organism or a part thereof, preferably a microorganism, a plant cell, a plant or a part thereof, as compared to a corresponding non-transformed wild type non-human organism or a part thereof; and
[33777] (b) growing the non-human organism or a part thereof under conditions which permit the production of tryptophan or a composition comprising tryptophan in said non-human organism or in the culture medium surrounding said non-human organism.

[33778] A further embodiment of the present invention relates to a process for the production of tryptophan, which comprises
[33779] (a) increasing or generating the activity of a carbon dioxide concentrating mechanism protein non-targeted in a non-human organism or a part thereof, preferably a microorganism, a plant cell, a plant or a part thereof, as compared to a corresponding non-transformed wild type non-human organism or a part thereof; and
[33780] (b) growing the non-human organism or a part thereof under conditions which permit the production of tryptophan or a composition comprising tryptophan in said non-human organism or in the culture medium surrounding said non-human organism.

[33781] A further embodiment of the present invention relates to a process for the production of tryptophan, which comprises
[33782] (a) increasing or generating the activity of a nitrate/nitrite transport protein non-targeted in a non-human organism or a part thereof, preferably a microorganism, a plant cell, a plant or a part thereof, as compared to a corresponding non-transformed wild type non-human organism or a part thereof; and
[33783] (b) growing the non-human organism or a part thereof under conditions which permit the production of tryptophan or a composition comprising tryptophan in said non-human organism or in the culture medium surrounding said non-human organism.

[33784] A further embodiment of the present invention relates to a process for the production of tryptophan, which comprises
[33785] (a) increasing or generating the activity of a coproporphyrinogen III oxidase non-targeted in a non-human organism or a part thereof, preferably a microorganism, a plant cell, a plant or a part thereof, as compared to a corresponding non-transformed wild type non-human organism or a part thereof; and
[33786] (b) growing the non-human organism or a part thereof under conditions which permit the production of tryptophan or a composition comprising tryptophan in said non-human organism or in the culture medium surrounding said non-human organism.

[33787] A further embodiment of the present invention relates to a process for the production of tryptophan, which comprises
[33788] (a) increasing or generating the activity of a precorrin methylase non-targeted in a non-human organism or a part thereof, preferably a microorganism, a plant cell, a plant or a part thereof, as compared to a corresponding non-transformed wild type non-human organism or a part thereof; and
[33789] (b) growing the non-human organism or a part thereof under conditions which permit the production of tryptophan or a composition comprising tryptophan in said non-human organism or in the culture medium surrounding said non-human organism.

[33790] A further embodiment of the present invention relates to a process for the production of tryptophan, which comprises
[33791] (a) increasing or generating the activity of a malate dehydrogenase non-targeted in a non-human organism or a part thereof, preferably a microorganism, a plant cell, a plant or a part thereof, as compared to a corresponding non-transformed wild type non-human organism or a part thereof; and
[33792] (b) growing the non-human organism or a part thereof under conditions which permit the production of tryptophan or a composition comprising tryptophan in said non-human organism or in the culture medium surrounding said non-human organism.

[33793] A further embodiment of the present invention relates to a process for the production of tryptophan, which comprises
[33794] (a) increasing or generating the activity of a geranylgeranyl pyrophosphate synthase non-targeted in a non-human organism or a part thereof, preferably a microorganism, a plant cell, a plant or a part thereof, as compared to a corresponding non-transformed wild type non-human organism or a part thereof; and
[33795] (b) growing the non-human organism or a part thereof under conditions which permit the production of tryptophan or a composition comprising tryptophan in said non-human organism or in the culture medium surrounding said non-human organism.

[33796] A further embodiment of the present invention relates to a process for the production of tryptophan, which comprises
[33797] (a) increasing or generating the activity of a slr1107-protein non-targeted in a non-human organism or a part thereof, preferably a microorganism, a plant cell, a plant or a part thereof, as compared to a corresponding non-transformed wild type non-human organism or a part thereof; and
[33798] (b) growing the non-human organism or a part thereof under conditions which permit the production of tryptophan or a composition comprising tryptophan in said non-human organism or in the culture medium surrounding said non-human organism.

[33799] A further embodiment of the present invention relates to a process for the production of tryptophan, which comprises
[33800] (a) increasing or generating the activity of a photosystem II protein non-targeted in a non-human organism or a part thereof, preferably a microorganism, a plant cell, a plant or a part thereof, as compared to a corresponding non-transformed wild type non-human organism or a part thereof; and
[33801] (b) growing the non-human organism or a part thereof under conditions which permit the production of tryptophan or a composition comprising tryptophan in said non-human organism or in the culture medium surrounding said non-human organism.

[33802] A further embodiment of the present invention relates to a process for the production of tryptophan, which comprises
[33803] (a) increasing or generating the activity of a short-chain alcohol dehydrogenase family non-targeted in a non-human organism or a part thereof, preferably a microorganism, a plant cell, a plant or a part thereof, as compared to a corresponding non-transformed wild type non-human organism or a part thereof; and
[33804] (b) growing the non-human organism or a part thereof under conditions which permit the production of tryptophan or a composition comprising tryptophan in said non-human organism or in the culture medium surrounding said non-human organism.

[33805] A further embodiment of the present invention relates to a process for the production of tryptophan, which comprises
[33806] (a) increasing or generating the activity of a Sec-independent protein translocase subunit non-targeted in a non-human organism or a part thereof, preferably a microorganism, a plant cell, a plant or a part thereof, as compared to a corresponding non-transformed wild type non-human organism or a part thereof; and
[33807] (b) growing the non-human organism or a part thereof under conditions which permit the production of tryptophan or a composition comprising tryptophan in said non-human organism or in the culture medium surrounding said non-human organism.

[33808] A further embodiment of the present invention relates to a process for the production of tryptophan, which comprises
[33809] (a) increasing or generating the activity of a 3-deoxy-7-phosphoheptulonate synthase non-targeted in a non-human organism or a part thereof, preferably a microorganism, a plant cell, a plant or a part thereof, as compared to a corresponding non-transformed wild type non-human organism or a part thereof; and
[33810] (b) growing the non-human organism or a part thereof under conditions which permit the production of tryptophan or a composition comprising tryptophan in said non-human organism or in the culture medium surrounding said non-human organism.

[33811] A further embodiment of the present invention relates to a process for the production of tryptophan, which comprises
[33812] (a) increasing or generating the activity of a branched-chain amino acid permease non-targeted in a non-human organism or a part thereof, preferably a microorganism, a plant cell, a plant or a part thereof, as compared to a corresponding non-transformed wild type non-human organism or a part thereof; and
[33813] (b) growing the non-human organism or a part thereof under conditions which permit the production of tryptophan or a composition comprising tryptophan in said non-human organism or in the culture medium surrounding said non-human organism.

[33814] A further embodiment of the present invention relates to a process for the production of tryptophan, which comprises
[33815] (a) increasing or generating the activity of a yfl054c-protein non-targeted in a non-human organism or a part thereof, preferably a microorganism, a plant cell, a plant or a part thereof, as compared to a corresponding non-transformed wild type non-human organism or a part thereof; and
[33816] (b) growing the non-human organism or a part thereof under conditions which permit the production of tryptophan or a composition comprising tryptophan in said non-human organism or in the culture medium surrounding said non-human organism.

[33817] A further embodiment of the present invention relates to a process for the production of tryptophan, which comprises
[33818] (a) increasing or generating the activity of a glycerol kinase non-targeted in a non-human organism or a part thereof, preferably a microorganism, a plant cell, a plant or a part thereof, as compared to a corresponding non-transformed wild type non-human organism or a part thereof; and
[33819] (b) growing the non-human organism or a part thereof under conditions which permit the production of tryptophan or a composition comprising tryptophan in said non-human organism or in the culture medium surrounding said non-human organism.

[33820] A further embodiment of the present invention relates to a process for the production of tryptophan, which comprises
[33821] (a) increasing or generating the activity of a aromatic amino acid aminotransferase non-targeted in a non-human organism or a part thereof, preferably a microorganism, a plant cell, a plant or a part thereof, as compared to a corresponding non-transformed wild type non-human organism or a part thereof; and
[33822] (b) growing the non-human organism or a part thereof under conditions which permit the production of tryptophan or a composition comprising tryptophan in said non-human organism or in the culture medium surrounding said non-human organism.

[33823] A further embodiment of the present invention relates to a process for the production of tryptophan, which comprises
[33824] (a) increasing or generating the activity of a cystathionine gamma-synthase non-targeted in a non-human organism or a part thereof, preferably a microorganism, a plant cell, a plant or a part thereof, as compared to a corresponding non-transformed wild type non-human organism or a part thereof; and
[33825] (b) growing the non-human organism or a part thereof under conditions which permit the production of tryptophan or a composition comprising tryptophan in said non-human organism or in the culture medium surrounding said non-human organism.

[33826] A further embodiment of the present invention relates to a process for the production of tryptophan, which comprises
[33827] (a) increasing or generating the activity of a polygalacturonase non-targeted in a non-human organism or a part thereof, preferably a microorganism, a plant cell, a plant or a part thereof, as compared to a corresponding non-transformed wild type non-human organism or a part thereof; and
[33828] (b) growing the non-human organism or a part thereof under conditions which permit the production of tryptophan or a composition comprising tryptophan in said non-human organism or in the culture medium surrounding said non-human organism.

[33829] A further embodiment of the present invention relates to a process for the production of tryptophan, which comprises
[33830] (a) increasing or generating the activity of a lipase non-targeted in a non-human organism or a part thereof, preferably a microorganism, a plant cell, a plant or a part thereof, as compared to a corresponding non-transformed wild type non-human organism or a part thereof; and
[33831] (b) growing the non-human organism or a part thereof under conditions which permit the production of tryptophan or a composition comprising tryptophan in said non-human organism or in the culture medium surrounding said non-human organism.

[33832] A further embodiment of the present invention relates to a process for the production of tryptophan, which comprises
[33833] (a) increasing or generating the activity of a amino acid transporter non-targeted in a non-human organism or a part thereof, preferably a microorganism, a plant cell, a plant or a part thereof, as compared to a corresponding non-transformed wild type non-human organism or a part thereof; and
[33834] (b) growing the non-human organism or a part thereof under conditions which permit the production of tryptophan or a composition comprising tryptophan in said non-human organism or in the culture medium surrounding said non-human organism.

[33835] A further embodiment of the present invention relates to a process for the production of tryptophan, which comprises
[33836] (a) increasing or generating the activity of a histone acetyltransferase non-targeted in a non-human organism or a part thereof, preferably a microorganism, a plant cell, a plant or a part thereof, as compared to a corresponding non-transformed wild type non-human organism or a part thereof; and
[33837] (b) growing the non-human organism or a part thereof under conditions which permit the production of tryptophan or a composition comprising tryptophan in said non-human organism or in the culture medium surrounding said non-human organism.

[33838] A further embodiment of the present invention relates to a process for the production of tryptophan, which comprises
[33839] (a) increasing or generating the activity of a isopentenyl diphosphate isomerase non-targeted in a non-human organism or a part thereof, preferably a microorganism, a plant cell, a plant or a part thereof, as compared to a corresponding non-transformed wild type non-human organism or a part thereof; and
[33840] (b) growing the non-human organism or a part thereof under conditions which permit the production of tryptophan or a composition comprising tryptophan in said non-human organism or in the culture medium surrounding said non-human organism.

[33841] A further embodiment of the present invention relates to a process for the production of tryptophan, which comprises
[33842] (a) increasing or generating the activity of a cyclin non-targeted in a non-human organism or a part thereof, preferably a microorganism, a plant cell, a plant or a part thereof, as compared to a corresponding non-transformed wild type non-human organism or a part thereof; and
[33843] (b) growing the non-human organism or a part thereof under conditions which permit the production of tryptophan or a composition comprising tryptophan in said non-human organism or in the culture medium surrounding said non-human organism.

[33844] A further embodiment of the present invention relates to a process for the production of tryptophan, which comprises
[33845] (a) increasing or generating the activity of a Zm_{—}4842_BE510522-protein non-targeted in a non-human organism or a part thereof, preferably a microorganism, a plant cell, a plant or a part thereof, as compared to a corresponding non-transformed wild type non-human organism or a part thereof; and
[33846] (b) growing the non-human organism or a part thereof under conditions which permit the production of tryptophan or a composition comprising tryptophan in said non-human organism or in the culture medium surrounding said non-human organism.

[33847] A further embodiment of the present invention relates to a process for the production of tryptophan, which comprises
[33848] (a) increasing or generating the activity of a polypeptide comprising a polypeptide as depicted in the respective line in column 5 or 8 of Table II, application no. 5, or a homolog or a fragment thereof, a consensus sequence or at least one polypeptide motif as depicted in the respective line in column 8 of Table IV, application no. 5; or increasing or generating the activity of an expression product of one or more nucleic acid molecule(s) comprising a polynucleotide as depicted in the respective line in column 5 or 8 of Table I, application no. 5, preferably the coding region thereof, or a homolog or a fragment thereof;
[33849] non-targeted in a non-human organism or a part thereof; preferably a microorganism, a plant cell, a plant or a part thereof, as compared to a corresponding non-transformed wild type non-human organism or a part thereof; and
[33850] (b) growing the non-human organism under conditions which permit the production of tryptophan, or a composition comprising tryptophan in said non-human organism or in the culture medium surrounding said non-human organism.

[33851] A further embodiment of the present invention relates to a process for the production of tryptophan, which comprises
[33852] (a) increasing or generating one or more activities selected from the group consisting of glucose-6-phosphate 1-dehydrogenase in an organelle, preferably in plastids or mitochondria, especially in plastids, of a non-human organism or a part thereof, preferably a microorganism, a plant cell, a plant or a part thereof, as compared to a corresponding non-transformed wild type non-human organism or a part thereof; and
[33853] (b) growing the non-human organism or a part thereof under conditions which permit the production of tryptophan or a composition comprising tryptophan in said non-human organism or in the culture medium surrounding said non-human organism.

[33854] A further embodiment of the present invention relates to a process for the production of tryptophan, which comprises
[33855] (a) increasing or generating one or more activities selected from the group consisting of At1g19800-protein in an organelle, preferably in plastids or mitochondria, especially in plastids, of a non-human organism or a part thereof, preferably a microorganism, a plant cell, a plant or a part thereof, as compared to a corresponding non-transformed wild type non-human organism or a part thereof; and
[33856] (b) growing the non-human organism or a part thereof under conditions which permit the production of tryptophan or a composition comprising tryptophan in said non-human organism or in the culture medium surrounding said non-human organism.

[33857] A further embodiment of the present invention relates to a process for the production of tryptophan, which comprises
[33858] (a) increasing or generating one or more activities selected from the group consisting of cullin in an organelle, preferably in plastids or mitochondria, especially in plastids, of a non-human organism or a part thereof, preferably a microorganism, a plant cell, a plant or a part thereof, as compared to a corresponding non-transformed wild type non-human organism or a part thereof; and
[33859] (b) growing the non-human organism or a part thereof under conditions which permit the production of tryptophan or a composition comprising tryptophan in said non-human organism or in the culture medium surrounding said non-human organism.

[33860] A further embodiment of the present invention relates to a process for the production of tryptophan, which comprises
[33861] (a) increasing or generating one or more activities selected from the group consisting of eukaryotic translation initiation factor 5 in an organelle, preferably in plastids or mitochondria, especially in plastids, of a non-human organism or a part thereof, preferably a microorganism, a plant cell, a plant or a part thereof, as compared to a corresponding non-transformed wild type non-human organism or a part thereof; and
[33862] (b) growing the non-human organism or a part thereof under conditions which permit the production of tryptophan or a composition comprising tryptophan in said non-human organism or in the culture medium surrounding said non-human organism.

[33863] A further embodiment of the present invention relates to a process for the production of tryptophan, which comprises
[33864] (a) increasing or generating one or more activities selected from the group consisting of protein kinase in an organelle, preferably in plastids or mitochondria, especially in plastids, of a non-human organism or a part thereof, preferably a microorganism, a plant cell, a plant or a part thereof, as compared to a corresponding non-transformed wild type non-human organism or a part thereof; and
[33865] (b) growing the non-human organism or a part thereof under conditions which permit the production of tryptophan or a composition comprising tryptophan in said non-human organism or in the culture medium surrounding said non-human organism.

[33866] A further embodiment of the present invention relates to a process for the production of tryptophan, which comprises
[33867] (a) increasing or generating one or more activities selected from the group consisting of transcription factor in an organelle, preferably in plastids or mitochondria, especially in plastids, of a non-human organism or a part thereof, preferably a microorganism, a plant cell, a plant or a part thereof, as compared to a corresponding non-transformed wild type non-human organism or a part thereof; and
[33868] (b) growing the non-human organism or a part thereof under conditions which permit the production of tryptophan or a composition comprising tryptophan in said non-human organism or in the culture medium surrounding said non-human organism.

[33869] A further embodiment of the present invention relates to a process for the production of tryptophan, which comprises
[33870] (a) increasing or generating one or more activities selected from the group consisting of protein phosphatase in an organelle, preferably in plastids or mitochondria, especially in plastids, of a non-human organism or a part thereof, preferably a microorganism, a plant cell, a plant or a part thereof, as compared to a corresponding non-transformed wild type non-human organism or a part thereof; and
[33871] (b) growing the non-human organism or a part thereof under conditions which permit the production of tryptophan or a composition comprising tryptophan in said non-human organism or in the culture medium surrounding said non-human organism.

[33872] A further embodiment of the present invention relates to a process for the production of tryptophan, which comprises
[33873] (a) increasing or generating one or more activities selected from the group consisting of CBL-interacting protein kinase in an organelle, preferably in plastids or mitochondria, especially in plastids, of a non-human organism or a part thereof, preferably a microorganism, a plant cell, a plant or a part thereof, as compared to a corresponding non-transformed wild type non-human organism or a part thereof; and
[33874] (b) growing the non-human organism or a part thereof under conditions which permit the production of tryptophan or a composition comprising tryptophan in said non-human organism or in the culture medium surrounding said non-human organism.

[33875] A further embodiment of the present invention relates to a process for the production of tryptophan, which comprises
[33876] (a) increasing or generating one or more activities selected from the group consisting of glutaredoxin in an organelle, preferably in plastids or mitochondria, especially in plastids, of a non-human organism or a part thereof, preferably a microorganism, a plant cell, a plant or a part thereof, as compared to a corresponding non-transformed wild type non-human organism or a part thereof; and
[33877] (b) growing the non-human organism or a part thereof under conditions which permit the production of tryptophan or a composition comprising tryptophan in said non-human organism or in the culture medium surrounding said non-human organism.

[33878] A further embodiment of the present invention relates to a process for the production of tryptophan, which comprises
[33879] (a) increasing or generating one or more activities selected from the group consisting of At2g33510-protein in an organelle, preferably in plastids or mitochondria, especially in plastids, of a non-human organism or a part thereof, preferably a microorganism, a plant cell, a plant or a part thereof, as compared to a corresponding non-transformed wild type non-human organism or a part thereof; and
[33880] (b) growing the non-human organism or a part thereof under conditions which permit the production of tryptophan or a composition comprising tryptophan in said non-human organism or in the culture medium surrounding said non-human organism.

[33881] A further embodiment of the present invention relates to a process for the production of tryptophan, which comprises
[33882] (a) increasing or generating one or more activities selected from the group consisting of glutaredoxin in an organelle, preferably in plastids or mitochondria, especially in plastids, of a non-human organism or a part thereof, preferably a microorganism, a plant cell, a plant or a part thereof, as compared to a corresponding non-transformed wild type non-human organism or a part thereof; and
[33883] (b) growing the non-human organism or a part thereof under conditions which permit the production of tryptophan or a composition comprising tryptophan in said non-human organism or in the culture medium surrounding said non-human organism.

[33884] A further embodiment of the present invention relates to a process for the production of tryptophan, which comprises
[33885] (a) increasing or generating one or more activities selected from the group consisting of pyruvate kinase in an organelle, preferably in plastids or mitochondria, especially in plastids, of a non-human organism or a part thereof, preferably a microorganism, a plant cell, a plant or a part thereof, as compared to a corresponding non-transformed wild type non-human organism or a part thereof; and
[33886] (b) growing the non-human organism or a part thereof under conditions which permit the production of tryptophan or a composition comprising tryptophan in said non-human organism or in the culture medium surrounding said non-human organism.

[33887] A further embodiment of the present invention relates to a process for the production of tryptophan, which comprises
[33888] (a) increasing or generating one or more activities selected from the group consisting of harpin-induced family protein in an organelle, preferably in plastids or mitochondria, especially in plastids, of a non-human organism or a part thereof, preferably a microorganism, a plant cell, a plant or a part thereof, as compared to a corresponding non-transformed wild type non-human organism or a part thereof; and
[33889] (b) growing the non-human organism or a part thereof under conditions which permit the production of tryptophan or a composition comprising tryptophan in said non-human organism or in the culture medium surrounding said non-human organism.

[33890] A further embodiment of the present invention relates to a process for the production of tryptophan, which comprises
[33891] (a) increasing or generating one or more activities selected from the group consisting of DNA mismatch repair protein in an organelle, preferably in plastids or mitochondria, especially in plastids, of a non-human organism or a part thereof, preferably a microorganism, a plant cell, a plant or a part thereof, as compared to a corresponding non-transformed wild type non-human organism or a part thereof; and
[33892] (b) growing the non-human organism or a part thereof under conditions which permit the production of tryptophan or a composition comprising tryptophan in said non-human organism or in the culture medium surrounding said non-human organism.

[33893] A further embodiment of the present invention relates to a process for the production of tryptophan, which comprises
[33894] (a) increasing or generating one or more activities selected from the group consisting of protein kinase in an organelle, preferably in plastids or mitochondria, especially in plastids, of a non-human organism or a part thereof, preferably a microorganism, a plant cell, a plant or a part thereof, as compared to a corresponding non-transformed wild type non-human organism or a part thereof; and
[33895] (b) growing the non-human organism or a part thereof under conditions which permit the production of tryptophan or a composition comprising tryptophan in said non-human organism or in the culture medium surrounding said non-human organism.

[33896] A further embodiment of the present invention relates to a process for the production of tryptophan, which comprises
[33897] (a) increasing or generating one or more activities selected from the group consisting of eukaryotic translation initiation factor in an organelle, preferably in plastids or mitochondria, especially in plastids, of a non-human organism or a part thereof, preferably a microorganism, a plant cell, a plant or a part thereof, as compared to a corresponding non-transformed wild type non-human organism or a part thereof; and
[33898] (b) growing the non-human organism or a part thereof under conditions which permit the production of tryptophan or a composition comprising tryptophan in said non-human organism or in the culture medium surrounding said non-human organism.

[33899] A further embodiment of the present invention relates to a process for the production of tryptophan, which comprises
[33900] (a) increasing or generating one or more activities selected from the group consisting of glycosyl transferase in an organelle, preferably in plastids or mitochondria, especially in plastids, of a non-human organism or a part thereof, preferably a microorganism, a plant cell, a plant or a part thereof, as compared to a corresponding non-transformed wild type non-human organism or a part thereof; and
[33901] (b) growing the non-human organism or a part thereof under conditions which permit the production of tryptophan or a composition comprising tryptophan in said non-human organism or in the culture medium surrounding said non-human organism.

[33902] A further embodiment of the present invention relates to a process for the production of tryptophan, which comprises
[33903] (a) increasing or generating one or more activities selected from the group consisting of auxin response factor in an organelle, preferably in plastids or mitochondria, especially in plastids, of a non-human organism or a part thereof, preferably a microorganism, a plant cell, a plant or a part thereof, as compared to a corresponding non-transformed wild type non-human organism or a part thereof; and
[33904] (b) growing the non-human organism or a part thereof under conditions which permit the production of tryptophan or a composition comprising tryptophan in said non-human organism or in the culture medium surrounding said non-human organism.

[33905] A further embodiment of the present invention relates to a process for the production of tryptophan, which comprises
[33906] (a) increasing or generating one or more activities selected from the group consisting of monthiol glutaredoxin in an organelle, preferably in plastids or mitochondria, especially in plastids, of a non-human organism or a part thereof, preferably a microorganism, a plant cell, a plant or a part thereof, as compared to a corresponding non-transformed wild type non-human organism or a part thereof; and
[33907] (b) growing the non-human organism or a part thereof under conditions which permit the production of tryptophan or a composition comprising tryptophan in said non-human organism or in the culture medium surrounding said non-human organism.

[33908] A further embodiment of the present invention relates to a process for the production of tryptophan, which comprises
[33909] (a) increasing or generating one or more activities selected from the group consisting of glutaredoxin in an organelle, preferably in plastids or mitochondria, especially in plastids, of a non-human organism or a part thereof, preferably a microorganism, a plant cell, a plant or a part thereof, as compared to a corresponding non-transformed wild type non-human organism or a part thereof; and
[33910] (b) growing the non-human organism or a part thereof under conditions which permit the production of tryptophan or a composition comprising tryptophan in said non-human organism or in the culture medium surrounding said non-human organism.

[33911] A further embodiment of the present invention relates to a process for the production of tryptophan, which comprises
[33912] (a) increasing or generating one or more activities selected from the group consisting of At4g32480-protein in an organelle, preferably in plastids or mitochondria, especially in plastids, of a non-human organism or a part thereof, preferably a microorganism, a plant cell, a plant or a part thereof, as compared to a corresponding non-transformed wild type non-human organism or a part thereof; and
[33913] (b) growing the non-human organism or a part thereof under conditions which permit the production of tryptophan or a composition comprising tryptophan in said non-human organism or in the culture medium surrounding said non-human organism.

[33914] A further embodiment of the present invention relates to a process for the production of tryptophan, which comprises
[33915] (a) increasing or generating one or more activities selected from the group consisting of cyclin D in an organelle, preferably in plastids or mitochondria, especially in plastids, of a non-human organism or a part thereof, preferably a microorganism, a plant cell, a plant or a part thereof, as compared to a corresponding non-transformed wild type non-human organism or a part thereof; and
[33916] (b) growing the non-human organism or a part thereof under conditions which permit the production of tryptophan or a composition comprising tryptophan in said non-human organism or in the culture medium surrounding said non-human organism.

[33917] A further embodiment of the present invention relates to a process for the production of tryptophan, which comprises
[33918] (a) increasing or generating one or more activities selected from the group consisting of calcium-dependent protein kinase in an organelle, preferably in plastids or mitochondria, especially in plastids, of a non-human organism or a part thereof, preferably a microorganism, a plant cell, a plant or a part thereof, as compared to a corresponding non-transformed wild type non-human organism or a part thereof; and
[33919] (b) growing the non-human organism or a part thereof under conditions which permit the production of tryptophan or a composition comprising tryptophan in said non-human organism or in the culture medium surrounding said non-human organism.

[33920] A further embodiment of the present invention relates to a process for the production of tryptophan, which comprises
[33921] (a) increasing or generating one or more activities selected from the group consisting of protein phosphatase in an organelle, preferably in plastids or mitochondria, especially in plastids, of a non-human organism or a part thereof, preferably a microorganism, a plant cell, a plant or a part thereof, as compared to a corresponding non-transformed wild type non-human organism or a part thereof; and
[33922] (b) growing the non-human organism or a part thereof under conditions which permit the production of tryptophan or a composition comprising tryptophan in said non-human organism or in the culture medium surrounding said non-human organism.

[33923] A further embodiment of the present invention relates to a process for the production of tryptophan, which comprises
[33924] (a) increasing or generating one or more activities selected from the group consisting of gibberellin 20-oxidase in an organelle, preferably in plastids or mitochondria, especially in plastids, of a non-human organism or a part thereof, preferably a microorganism, a plant cell, a plant or a part thereof, as compared to a corresponding non-transformed wild type non-human organism or a part thereof; and
[33925] (b) growing the non-human organism or a part thereof under conditions which permit the production of tryptophan or a composition comprising tryptophan in said non-human organism or in the culture medium surrounding said non-human organism.

[33926] A further embodiment of the present invention relates to a process for the production of tryptophan, which comprises
[33927] (a) increasing or generating one or more activities selected from the group consisting of At5g16650-protein in an organelle, preferably in plastids or mitochondria, especially in plastids, of a non-human organism or a part thereof, preferably a microorganism, a plant cell, a plant or a part thereof, as compared to a corresponding non-transformed wild type non-human organism or a part thereof; and
[33928] (b) growing the non-human organism or a part thereof under conditions which permit the production of tryptophan or a composition comprising tryptophan in said non-human organism or in the culture medium surrounding said non-human organism.

[33929] A further embodiment of the present invention relates to a process for the production of tryptophan, which comprises
[33930] (a) increasing or generating one or more activities selected from the group consisting of at5g21910-protein in an organelle, preferably in plastids or mitochondria, especially in plastids, of a non-human organism or a part thereof, preferably a microorganism, a plant cell, a plant or a part thereof, as compared to a corresponding non-transformed wild type non-human organism or a part thereof; and
[33931] (b) growing the non-human organism or a part thereof under conditions which permit the production of tryptophan or a composition comprising tryptophan in said non-human organism or in the culture medium surrounding said non-human organism.

[33932] A further embodiment of the present invention relates to a process for the production of tryptophan, which comprises
[33933] (a) increasing or generating one or more activities selected from the group consisting of transcription factor in an organelle, preferably in plastids or mitochondria, especially in plastids, of a non-human organism or a part thereof, preferably a microorganism, a plant cell, a plant or a part thereof, as compared to a corresponding non-transformed wild type non-human organism or a part thereof; and
[33934] (b) growing the non-human organism or a part thereof under conditions which permit the production of tryptophan or a composition comprising tryptophan in said non-human organism or in the culture medium surrounding said non-human organism.

[33935] A further embodiment of the present invention relates to a process for the production of tryptophan, which comprises
[33936] (a) increasing or generating one or more activities selected from the group consisting of RNA-binding protein in an organelle, preferably in plastids or mitochondria, especially in plastids, of a non-human organism or a part thereof, preferably a microorganism, a plant cell, a plant or a part thereof, as compared to a corresponding non-transformed wild type non-human organism or a part thereof; and
[33937] (b) growing the non-human organism or a part thereof under conditions which permit the production of tryptophan or a composition comprising tryptophan in said non-human organism or in the culture medium surrounding said non-human organism.

[33938] A further embodiment of the present invention relates to a process for the production of tryptophan, which comprises
[33939] (a) increasing or generating one or more activities selected from the group consisting of malic enzyme in an organelle, preferably in plastids or mitochondria, especially in plastids, of a non-human organism or a part thereof, preferably a microorganism, a plant cell, a plant or a part thereof, as compared to a corresponding non-transformed wild type non-human organism or a part thereof; and
[33940] (b) growing the non-human organism or a part thereof under conditions which permit the production of tryptophan or a composition comprising tryptophan in said non-human organism or in the culture medium surrounding said non-human organism.

[33941] A further embodiment of the present invention relates to a process for the production of tryptophan, which comprises
[33942] (a) increasing or generating one or more activities selected from the group consisting of elongation factor Tu in an organelle, preferably in plastids or mitochondria, especially in plastids, of a non-human organism or a part thereof, preferably a microorganism, a plant cell, a plant or a part thereof, as compared to a corresponding non-transformed wild type non-human organism or a part thereof; and
[33943] (b) growing the non-human organism or a part thereof under conditions which permit the production of tryptophan or a composition comprising tryptophan in said non-human organism or in the culture medium surrounding said non-human organism.

[33944] A further embodiment of the present invention relates to a process for the production of tryptophan, which comprises
[33945] (a) increasing or generating one or more activities selected from the group consisting of enoyl-CoA hydratase in an organelle, preferably in plastids or mitochondria, especially in plastids, of a non-human organism or a part thereof, preferably a microorganism, a plant cell, a plant or a part thereof, as compared to a corresponding non-transformed wild type non-human organism or a part thereof; and
[33946] (b) growing the non-human organism or a part thereof under conditions which permit the production of tryptophan or a composition comprising tryptophan in said non-human organism or in the culture medium surrounding said non-human organism.

[33947] A further embodiment of the present invention relates to a process for the production of tryptophan, which comprises
[33948] (a) increasing or generating one or more activities selected from the group consisting of transcriptional regulator in an organelle, preferably in plastids or mitochondria, especially in plastids, of a non-human organism or a part thereof, preferably a microorganism, a plant cell, a plant or a part thereof, as compared to a corresponding non-transformed wild type non-human organism or a part thereof; and
[33949] (b) growing the non-human organism or a part thereof under conditions which permit the production of tryptophan or a composition comprising tryptophan in said non-human organism or in the culture medium surrounding said non-human organism.

[33950] A further embodiment of the present invention relates to a process for the production of tryptophan, which comprises
[33951] (a) increasing or generating one or more activities selected from the group consisting of enoyl-CoA hydratase in an organelle, preferably in plastids or mitochondria, especially in plastids, of a non-human organism or a part thereof, preferably a microorganism, a plant cell, a plant or a part thereof, as compared to a corresponding non-transformed wild type non-human organism or a part thereof; and
[33952] (b) growing the non-human organism or a part thereof under conditions which permit the production of tryptophan or a composition comprising tryptophan in said non-human organism or in the culture medium surrounding said non-human organism.

[33953] A further embodiment of the present invention relates to a process for the production of tryptophan, which comprises
[33954] (a) increasing or generating one or more activities selected from the group consisting of glutamate-ammonia-ligase in an organelle, preferably in plastids or mitochondria, especially in plastids, of a non-human organism or a part thereof, preferably a microorganism, a plant cell, a plant or a part thereof, as compared to a corresponding non-transformed wild type non-human organism or a part thereof; and
[33955] (b) growing the non-human organism or a part thereof under conditions which permit the production of tryptophan or a composition comprising tryptophan in said non-human organism or in the culture medium surrounding said non-human organism.

[33956] A further embodiment of the present invention relates to a process for the production of tryptophan, which comprises
[33957] (a) increasing or generating one or more activities selected from the group consisting of hydrolase in an organelle, preferably in plastids or mitochondria, especially in plastids, of a non-human organism or a part thereof, preferably a microorganism, a plant cell, a plant or a part thereof, as compared to a corresponding non-transformed wild type non-human organism or a part thereof; and
[33958] (b) growing the non-human organism or a part thereof under conditions which permit the production of tryptophan or a composition comprising tryptophan in said non-human organism or in the culture medium surrounding said non-human organism.

[33959] A further embodiment of the present invention relates to a process for the production of tryptophan, which comprises
[33960] (a) increasing or generating one or more activities selected from the group consisting of Chaperone protein CIpB in an organelle, preferably in plastids or mitochondria, especially in plastids, of a non-human organism or a part thereof, preferably a microorganism, a plant cell, a plant or a part thereof, as compared to a corresponding non-transformed wild type non-human organism or a part thereof; and
[33961] (b) growing the non-human organism or a part thereof under conditions which permit the production of tryptophan or a composition comprising tryptophan in said non-human organism or in the culture medium surrounding said non-human organism.

[33962] A further embodiment of the present invention relates to a process for the production of tryptophan, which comprises
[33963] (a) increasing or generating one or more activities selected from the group consisting of electron transfer flavoprotein subunit beta in an organelle, preferably in plastids or mitochondria, especially in plastids, of a non-human organism or a part thereof, preferably a microorganism, a plant cell, a plant or a part thereof, as compared to a corresponding non-transformed wild type non-human organism or a part thereof; and
[33964] (b) growing the non-human organism or a part thereof under conditions which permit the production of tryptophan or a composition comprising tryptophan in said non-human organism or in the culture medium surrounding said non-human organism.

[33965] A further embodiment of the present invention relates to a process for the production of tryptophan, which comprises
[33966] (a) increasing or generating one or more activities selected from the group consisting of threonine synthase in an organelle, preferably in plastids or mitochondria, especially in plastids, of a non-human organism or a part thereof, preferably a microorganism, a plant cell, a plant or a part thereof, as compared to a corresponding non-transformed wild type non-human organism or a part thereof; and
[33967] (b) growing the non-human organism or a part thereof under conditions which permit the production of tryptophan or a composition comprising tryptophan in said non-human organism or in the culture medium surrounding said non-human organism.

[33968] A further embodiment of the present invention relates to a process for the production of tryptophan, which comprises
[33969] (a) increasing or generating one or more activities selected from the group consisting of transaldolase in an organelle, preferably in plastids or mitochondria, especially in plastids, of a non-human organism or a part thereof, preferably a microorganism, a plant cell, a plant or a part thereof, as compared to a corresponding non-transformed wild type non-human organism or a part thereof; and
[33970] (b) growing the non-human organism or a part thereof under conditions which permit the production of tryptophan or a composition comprising tryptophan in said non-human organism or in the culture medium surrounding said non-human organism.

[33971] A further embodiment of the present invention relates to a process for the production of tryptophan, which comprises
[33972] (a) increasing or generating one or more activities selected from the group consisting of L-ribulose-5-phosphate 4-epimerase in an organelle, preferably in plastids or mitochondria, especially in plastids, of a non-human organism or a part thereof, preferably a microorganism, a plant cell, a plant or a part thereof, as compared to a corresponding non-transformed wild type non-human organism or a part thereof; and
[33973] (b) growing the non-human organism or a part thereof under conditions which permit the production of tryptophan or a composition comprising tryptophan in said non-human organism or in the culture medium surrounding said non-human organism.

[33974] A further embodiment of the present invention relates to a process for the production of tryptophan, which comprises
[33975] (a) increasing or generating one or more activities selected from the group consisting of glucose dehydrogenase in an organelle, preferably in plastids or mitochondria, especially in plastids, of a non-human organism or a part thereof, preferably a microorganism, a plant cell, a plant or a part thereof, as compared to a corresponding non-transformed wild type non-human organism or a part thereof; and
[33976] (b) growing the non-human organism or a part thereof under conditions which permit the production of tryptophan or a composition comprising tryptophan in said non-human organism or in the culture medium surrounding said non-human organism.

[33977] A further embodiment of the present invention relates to a process for the production of tryptophan, which comprises
[33978] (a) increasing or generating one or more activities selected from the group consisting of ATP-binding component of a transport system in an organelle, preferably in plastids or mitochondria, especially in plastids, of a non-human organism or a part thereof, preferably a microorganism, a plant cell, a plant or a part thereof, as compared to a corresponding non-transformed wild type non-human organism or a part thereof; and
[33979] (b) growing the non-human organism or a part thereof under conditions which permit the production of tryptophan or a composition comprising tryptophan in said non-human organism or in the culture medium surrounding said non-human organism.

[33980] A further embodiment of the present invention relates to a process for the production of tryptophan, which comprises
[33981] (a) increasing or generating one or more activities selected from the group consisting of isochorismate synthase in an organelle, preferably in plastids or mitochondria, especially in plastids, of a non-human organism or a part thereof, preferably a microorganism, a plant cell, a plant or a part thereof, as compared to a corresponding non-transformed wild type non-human organism or a part thereof; and
[33982] (b) growing the non-human organism or a part thereof under conditions which permit the production of tryptophan or a composition comprising tryptophan in said non-human organism or in the culture medium surrounding said non-human organism.

[33983] A further embodiment of the present invention relates to a process for the production of tryptophan, which comprises
[33984] (a) increasing or generating one or more activities selected from the group consisting of Leucyl/phenylalanyl-tRNA-protein transferase in an organelle, preferably in plastids or mitochondria, especially in plastids, of a non-human organism or a part thereof, preferably a microorganism, a plant cell, a plant or a part thereof, as compared to a corresponding non-transformed wild type non-human organism or a part thereof; and
[33985] (b) growing the non-human organism or a part thereof under conditions which permit the production of tryptophan or a composition comprising tryptophan in said non-human organism or in the culture medium surrounding said non-human organism.

[33986] A further embodiment of the present invention relates to a process for the production of tryptophan, which comprises
[33987] (a) increasing or generating one or more activities selected from the group consisting of b1163-protein in an organelle, preferably in plastids or mitochondria, especially in plastids, of a non-human organism or a part thereof, preferably a microorganism, a plant cell, a plant or a part thereof, as compared to a corresponding non-transformed wild type non-human organism or a part thereof; and
[33988] (b) growing the non-human organism or a part thereof under conditions which permit the production of tryptophan or a composition comprising tryptophan in said non-human organism or in the culture medium surrounding said non-human organism.

[33989] A further embodiment of the present invention relates to a process for the production of tryptophan, which comprises
[33990] (a) increasing or generating one or more activities selected from the group consisting of cardiolipin synthase in an organelle, preferably in plastids or mitochondria, especially in plastids, of a non-human organism or a part thereof, preferably a microorganism, a plant cell, a plant or a part thereof, as compared to a corresponding non-transformed wild type non-human organism or a part thereof; and
[33991] (b) growing the non-human organism or a part thereof under conditions which permit the production of tryptophan or a composition comprising tryptophan in said non-human organism or in the culture medium surrounding said non-human organism.

[33992] A further embodiment of the present invention relates to a process for the production of tryptophan, which comprises
[33993] (a) increasing or generating one or more activities selected from the group consisting of tryptophan biosynthesis protein in an organelle, preferably in plastids or mitochondria, especially in plastids, of a non-human organism or a part thereof, preferably a microorganism, a plant cell, a plant or a part thereof, as compared to a corresponding non-transformed wild type non-human organism or a part thereof; and
[33994] (b) growing the non-human organism or a part thereof under conditions which permit the production of tryptophan or a composition comprising tryptophan in said non-human organism or in the culture medium surrounding said non-human organism.

[33995] A further embodiment of the present invention relates to a process for the production of tryptophan, which comprises
[33996] (a) increasing or generating one or more activities selected from the group consisting of aldehyde dehydrogenase in an organelle, preferably in plastids or mitochondria, especially in plastids, of a non-human organism or a part thereof, preferably a microorganism, a plant cell, a plant or a part thereof, as compared to a corresponding non-transformed wild type non-human organism or a part thereof; and
[33997] (b) growing the non-human organism or a part thereof under conditions which permit the production of tryptophan or a composition comprising tryptophan in said non-human organism or in the culture medium surrounding said non-human organism.

[33998] A further embodiment of the present invention relates to a process for the production of tryptophan, which comprises
[33999] (a) increasing or generating one or more activities selected from the group consisting of b1346-protein in an organelle, preferably in plastids or mitochondria, especially in plastids, of a non-human organism or a part thereof, preferably a microorganism, a plant cell, a plant or a part thereof, as compared to a corresponding non-transformed wild type non-human organism or a part thereof; and
[34000] (b) growing the non-human organism or a part thereof under conditions which permit the production of tryptophan or a composition comprising tryptophan in said non-human organism or in the culture medium surrounding said non-human organism.

[34001] A further embodiment of the present invention relates to a process for the production of tryptophan, which comprises
[34002] (a) increasing or generating one or more activities selected from the group consisting of b1522-protein in an organelle, preferably in plastids or mitochondria, especially in plastids, of a non-human organism or a part thereof, preferably a microorganism, a plant cell, a plant or a part thereof, as compared to a corresponding non-transformed wild type non-human organism or a part thereof; and
[34003] (b) growing the non-human organism or a part thereof under conditions which permit the production of tryptophan or a composition comprising tryptophan in said non-human organism or in the culture medium surrounding said non-human organism.

[34004] A further embodiment of the present invention relates to a process for the production of tryptophan, which comprises
[34005] (a) increasing or generating one or more activities selected from the group consisting of b1796-protein in an organelle, preferably in plastids or mitochondria, especially in plastids, of a non-human organism or a part thereof, preferably a microorganism, a plant cell, a plant or a part thereof, as compared to a corresponding non-transformed wild type non-human organism or a part thereof; and
[34006] (b) growing the non-human organism or a part thereof under conditions which permit the production of tryptophan or a composition comprising tryptophan in said non-human organism or in the culture medium surrounding said non-human organism.

[34007] A further embodiment of the present invention relates to a process for the production of tryptophan, which comprises
[34008] (a) increasing or generating one or more activities selected from the group consisting of methyl-accepting chemotaxis protein in an organelle, preferably in plastids or mitochondria, especially in plastids, of a non-human organism or a part thereof, preferably a microorganism, a plant cell, a plant or a part thereof, as compared to a corresponding non-transformed wild type non-human organism or a part thereof; and
[34009] (b) growing the non-human organism or a part thereof under conditions which permit the production of tryptophan or a composition comprising tryptophan in said non-human organism or in the culture medium surrounding said non-human organism.

[34010] A further embodiment of the present invention relates to a process for the production of tryptophan, which comprises
[34011] (a) increasing or generating one or more activities selected from the group consisting of trehalose-phosphatase in an organelle, preferably in plastids or mitochondria, especially in plastids, of a non-human organism or a part thereof, preferably a microorganism, a plant cell, a plant or a part thereof, as compared to a corresponding non-transformed wild type non-human organism or a part thereof; and
[34012] (b) growing the non-human organism or a part thereof under conditions which permit the production of tryptophan or a composition comprising tryptophan in said non-human organism or in the culture medium surrounding said non-human organism.

[34013] A further embodiment of the present invention relates to a process for the production of tryptophan, which comprises
[34014] (a) increasing or generating one or more activities selected from the group consisting of imidazole glycerol phosphate synthase subunit in an organelle, preferably in plastids or mitochondria, especially in plastids, of a non-human organism or a part thereof, preferably a microorganism, a plant cell, a plant or a part thereof, as compared to a corresponding non-transformed wild type non-human organism or a part thereof; and
[34015] (b) growing the non-human organism or a part thereof under conditions which permit the production of tryptophan or a composition comprising tryptophan in said non-human organism or in the culture medium surrounding said non-human organism.

[34016] A further embodiment of the present invention relates to a process for the production of tryptophan, which comprises
[34017] (a) increasing or generating one or more activities selected from the group consisting of transport protein in an organelle, preferably in plastids or mitochondria, especially in plastids, of a non-human organism or a part thereof, preferably a microorganism, a plant cell, a plant or a part thereof, as compared to a corresponding non-transformed wild type non-human organism or a part thereof; and
[34018] (b) growing the non-human organism or a part thereof under conditions which permit the production of tryptophan or a composition comprising tryptophan in said non-human organism or in the culture medium surrounding said non-human organism.

[34019] A further embodiment of the present invention relates to a process for the production of tryptophan, which comprises
[34020] (a) increasing or generating one or more activities selected from the group consisting of ATP synthase subunit E in an organelle, preferably in plastids or mitochondria, especially in plastids, of a non-human organism or a part thereof, preferably a microorganism, a plant cell, a plant or a part thereof, as compared to a corresponding non-transformed wild type non-human organism or a part thereof; and
[34021] (b) growing the non-human organism or a part thereof under conditions which permit the production of tryptophan or a composition comprising tryptophan in said non-human organism or in the culture medium surrounding said non-human organism.

[34022] A further embodiment of the present invention relates to a process for the production of tryptophan, which comprises
[34023] (a) increasing or generating one or more activities selected from the group consisting of putative transport system permease protein in an organelle, preferably in plastids or mitochondria, especially in plastids, of a non-human organism or a part thereof, preferably a microorganism, a plant cell, a plant or a part thereof, as compared to a corresponding non-transformed wild type non-human organism or a part thereof; and
[34024] (b) growing the non-human organism or a part thereof under conditions which permit the production of tryptophan or a composition comprising tryptophan in said non-human organism or in the culture medium surrounding said non-human organism.

[34025] A further embodiment of the present invention relates to a process for the production of tryptophan, which comprises
[34026] (a) increasing or generating one or more activities selected from the group consisting of recombinase A in an organelle, preferably in plastids or mitochondria, especially in plastids, of a non-human organism or a part thereof, preferably a microorganism, a plant cell, a plant or a part thereof, as compared to a corresponding non-transformed wild type non-human organism or a part thereof; and
[34027] (b) growing the non-human organism or a part thereof under conditions which permit the production of tryptophan or a composition comprising tryptophan in said non-human organism or in the culture medium surrounding said non-human organism.

[34028] A further embodiment of the present invention relates to a process for the production of tryptophan, which comprises
[34029] (a) increasing or generating one or more activities selected from the group consisting of b2739-protein in an organelle, preferably in plastids or mitochondria, especially in plastids, of a non-human organism or a part thereof, preferably a microorganism, a plant cell, a plant or a part thereof, as compared to a corresponding non-transformed wild type non-human organism or a part thereof; and
[34030] (b) growing the non-human organism or a part thereof under conditions which permit the production of tryptophan or a composition comprising tryptophan in said non-human organism or in the culture medium surrounding said non-human organism.

[34031] A further embodiment of the present invention relates to a process for the production of tryptophan, which comprises
[34032] (a) increasing or generating one or more activities selected from the group consisting of b2849-protein in an organelle, preferably in plastids or mitochondria, especially in plastids, of a non-human organism or a part thereof, preferably a microorganism, a plant cell, a plant or a part thereof, as compared to a corresponding non-transformed wild type non-human organism or a part thereof; and
[34033] (b) growing the non-human organism or a part thereof under conditions which permit the production of tryptophan or a composition comprising tryptophan in said non-human organism or in the culture medium surrounding said non-human organism.

[34034] A further embodiment of the present invention relates to a process for the production of tryptophan, which comprises
[34035] (a) increasing or generating one or more activities selected from the group consisting of fimbrial-like protein in an organelle, preferably in plastids or mitochondria, especially in plastids, of a non-human organism or a part thereof, preferably a microorganism, a plant cell, a plant or a part thereof, as compared to a corresponding non-transformed wild type non-human organism or a part thereof; and
[34036] (b) growing the non-human organism or a part thereof under conditions which permit the production of tryptophan or a composition comprising tryptophan in said non-human organism or in the culture medium surrounding said non-human organism.

[34037] A further embodiment of the present invention relates to a process for the production of tryptophan, which comprises
[34038] (a) increasing or generating one or more activities selected from the group consisting of methyltransferase in an organelle, preferably in plastids or mitochondria, especially in plastids, of a non-human organism or a part thereof, preferably a microorganism, a plant cell, a plant or a part thereof, as compared to a corresponding non-transformed wild type non-human organism or a part thereof; and
[34039] (b) growing the non-human organism or a part thereof under conditions which permit the production of tryptophan or a composition comprising tryptophan in said non-human organism or in the culture medium surrounding said non-human organism.

[34040] A further embodiment of the present invention relates to a process for the production of tryptophan, which comprises
[34041] (a) increasing or generating one or more activities selected from the group consisting of 3ketoacyl-CoA thiolase in an organelle, preferably in plastids or mitochondria, especially in plastids, of a non-human organism or a part thereof, preferably a microorganism, a plant cell, a plant or a part thereof, as compared to a corresponding non-transformed wild type non-human organism or a part thereof; and
[34042] (b) growing the non-human organism or a part thereof under conditions which permit the production of tryptophan or a composition comprising tryptophan in said non-human organism or in the culture medium surrounding said non-human organism.

[34043] A further embodiment of the present invention relates to a process for the production of tryptophan, which comprises
[34044] (a) increasing or generating one or more activities selected from the group consisting of glutamine synthetase in an organelle, preferably in plastids or mitochondria, especially in plastids, of a non-human organism or a part thereof, preferably a microorganism, a plant cell, a plant or a part thereof, as compared to a corresponding non-transformed wild type non-human organism or a part thereof; and
[34045] (b) growing the non-human organism or a part thereof under conditions which permit the production of tryptophan or a composition comprising tryptophan in said non-human organism or in the culture medium surrounding said non-human organism.

[34046] A further embodiment of the present invention relates to a process for the production of tryptophan, which comprises
[34047] (a) increasing or generating one or more activities selected from the group consisting of b3989-protein in an organelle, preferably in plastids or mitochondria, especially in plastids, of a non-human organism or a part thereof, preferably a microorganism, a plant cell, a plant or a part thereof, as compared to a corresponding non-transformed wild type non-human organism or a part thereof; and
[34048] (b) growing the non-human organism or a part thereof under conditions which permit the production of tryptophan or a composition comprising tryptophan in said non-human organism or in the culture medium surrounding said non-human organism.

[34049] A further embodiment of the present invention relates to a process for the production of tryptophan, which comprises
[34050] (a) increasing or generating one or more activities selected from the group consisting of b4029-protein in an organelle, preferably in plastids or mitochondria, especially in plastids, of a non-human organism or a part thereof, preferably a microorganism, a plant cell, a plant or a part thereof, as compared to a corresponding non-transformed wild type non-human organism or a part thereof; and
[34051] (b) growing the non-human organism or a part thereof under conditions which permit the production of tryptophan or a composition comprising tryptophan in said non-human organism or in the culture medium surrounding said non-human organism.

[34052] A further embodiment of the present invention relates to a process for the production of tryptophan, which comprises
[34053] (a) increasing or generating one or more activities selected from the group consisting of b4121-protein in an organelle, preferably in plastids or mitochondria, especially in plastids, of a non-human organism or a part thereof, preferably a microorganism, a plant cell, a plant or a part thereof, as compared to a corresponding non-transformed wild type non-human organism or a part thereof; and
[34054] (b) growing the non-human organism or a part thereof under conditions which permit the production of tryptophan or a composition comprising tryptophan in said non-human organism or in the culture medium surrounding said non-human organism.

[34055] A further embodiment of the present invention relates to a process for the production of tryptophan, which comprises
[34056] (a) increasing or generating one or more activities selected from the group consisting of acetyltransferase in an organelle, preferably in plastids or mitochondria, especially in plastids, of a non-human organism or a part thereof, preferably a microorganism, a plant cell, a plant or a part thereof, as compared to a corresponding non-transformed wild type non-human organism or a part thereof; and
[34057] (b) growing the non-human organism or a part thereof under conditions which permit the production of tryptophan or a composition comprising tryptophan in said non-human organism or in the culture medium surrounding said non-human organism.

[34058] A further embodiment of the present invention relates to a process for the production of tryptophan, which comprises
[34059] (a) increasing or generating one or more activities selected from the group consisting of RNA binding protein in an organelle, preferably in plastids or mitochondria, especially in plastids, of a non-human organism or a part thereof, preferably a microorganism, a plant cell, a plant or a part thereof, as compared to a corresponding non-transformed wild type non-human organism or a part thereof; and
[34060] (b) growing the non-human organism or a part thereof under conditions which permit the production of tryptophan or a composition comprising tryptophan in said non-human organism or in the culture medium surrounding said non-human organism.

[34061] A further embodiment of the present invention relates to a process for the production of tryptophan, which comprises
[34062] (a) increasing or generating one or more activities selected from the group consisting of transcription factor in an organelle, preferably in plastids or mitochondria, especially in plastids, of a non-human organism or a part thereof, preferably a microorganism, a plant cell, a plant or a part thereof, as compared to a corresponding non-transformed wild type non-human organism or a part thereof; and
[34063] (b) growing the non-human organism or a part thereof under conditions which permit the production of tryptophan or a composition comprising tryptophan in said non-human organism or in the culture medium surrounding said non-human organism.

[34064] A further embodiment of the present invention relates to a process for the production of tryptophan, which comprises
[34065] (a) increasing or generating one or more activities selected from the group consisting of choline kinase in an organelle, preferably in plastids or mitochondria, especially in plastids, of a non-human organism or a part thereof, preferably a microorganism, a plant cell, a plant or a part thereof, as compared to a corresponding non-transformed wild type non-human organism or a part thereof; and
[34066] (b) growing the non-human organism or a part thereof under conditions which permit the production of tryptophan or a composition comprising tryptophan in said non-human organism or in the culture medium surrounding said non-human organism.

[34067] A further embodiment of the present invention relates to a process for the production of tryptophan, which comprises
[34068] (a) increasing or generating one or more activities selected from the group consisting of flavodoxin in an organelle, preferably in plastids or mitochondria, especially in plastids, of a non-human organism or a part thereof, preferably a microorganism, a plant cell, a plant or a part thereof, as compared to a corresponding non-transformed wild type non-human organism or a part thereof; and
[34069] (b) growing the non-human organism or a part thereof under conditions which permit the production of tryptophan or a composition comprising tryptophan in said non-human organism or in the culture medium surrounding said non-human organism.

[34070] A further embodiment of the present invention relates to a process for the production of tryptophan, which comprises
[34071] (a) increasing or generating one or more activities selected from the group consisting of NAD(P)H-quinone oxidoreductase subunit in an organelle, preferably in plastids or mitochondria, especially in plastids, of a non-human organism or a part thereof, preferably a microorganism, a plant cell, a plant or a part thereof, as compared to a corresponding non-transformed wild type non-human organism or a part thereof; and
[34072] (b) growing the non-human organism or a part thereof under conditions which permit the production of tryptophan or a composition comprising tryptophan in said non-human organism or in the culture medium surrounding said non-human organism.

[34073] A further embodiment of the present invention relates to a process for the production of tryptophan, which comprises
[34074] (a) increasing or generating one or more activities selected from the group consisting of binding-protein-dependent transport systems inner membrane component in an organelle, preferably in plastids or mitochondria, especially in plastids, of a non-human organism or a part thereof, preferably a microorganism, a plant cell, a plant or a part thereof, as compared to a corresponding non-transformed wild type non-human organism or a part thereof; and
[34075] (b) growing the non-human organism or a part thereof under conditions which permit the production of tryptophan or a composition comprising tryptophan in said non-human organism or in the culture medium surrounding said non-human organism.

[34076] A further embodiment of the present invention relates to a process for the production of tryptophan, which comprises
[34077] (a) increasing or generating one or more activities selected from the group consisting of carbon dioxide concentrating mechanism protein in an organelle, preferably in plastids or mitochondria, especially in plastids, of a non-human organism or a part thereof, preferably a microorganism, a plant cell, a plant or a part thereof, as compared to a corresponding non-transformed wild type non-human organism or a part thereof; and
[34078] (b) growing the non-human organism or a part thereof under conditions which permit the production of tryptophan or a composition comprising tryptophan in said non-human organism or in the culture medium surrounding said non-human organism.

[34079] A further embodiment of the present invention relates to a process for the production of tryptophan, which comprises
[34080] (a) increasing or generating one or more activities selected from the group consisting of nitrate/nitrite transport protein in an organelle, preferably in plastids or mitochondria, especially in plastids, of a non-human organism or a part thereof, preferably a microorganism, a plant cell, a plant or a part thereof, as compared to a corresponding non-transformed wild type non-human organism or a part thereof; and
[34081] (b) growing the non-human organism or a part thereof under conditions which permit the production of tryptophan or a composition comprising tryptophan in said non-human organism or in the culture medium surrounding said non-human organism.

[34082] A further embodiment of the present invention relates to a process for the production of tryptophan, which comprises
[34083] (a) increasing or generating one or more activities selected from the group consisting of coproporphyrinogen III oxidase in an organelle, preferably in plastids or mitochondria, especially in plastids, of a non-human organism or a part thereof, preferably a microorganism, a plant cell, a plant or a part thereof, as compared to a corresponding non-transformed wild type non-human organism or a part thereof; and
[34084] (b) growing the non-human organism or a part thereof under conditions which permit the production of tryptophan or a composition comprising tryptophan in said non-human organism or in the culture medium surrounding said non-human organism.

[34085] A further embodiment of the present invention relates to a process for the production of tryptophan, which comprises
[34086] (a) increasing or generating one or more activities selected from the group consisting of precorrin methylase in an organelle, preferably in plastids or mitochondria, especially in plastids, of a non-human organism or a part thereof, preferably a microorganism, a plant cell, a plant or a part thereof, as compared to a corresponding non-transformed wild type non-human organism or a part thereof; and
[34087] (b) growing the non-human organism or a part thereof under conditions which permit the production of tryptophan or a composition comprising tryptophan in said non-human organism or in the culture medium surrounding said non-human organism.

[34088] A further embodiment of the present invention relates to a process for the production of tryptophan, which comprises
[34089] (a) increasing or generating one or more activities selected from the group consisting of malate dehydrogenase in an organelle, preferably in plastids or mitochondria, especially in plastids, of a non-human organism or a part thereof, preferably a microorganism, a plant cell, a plant or a part thereof, as compared to a corresponding non-transformed wild type non-human organism or a part thereof; and
[34090] (b) growing the non-human organism or a part thereof under conditions which permit the production of tryptophan or a composition comprising tryptophan in said non-human organism or in the culture medium surrounding said non-human organism.

[34091] A further embodiment of the present invention relates to a process for the production of tryptophan, which comprises
[34092] (a) increasing or generating one or more activities selected from the group consisting of geranylgeranyl pyrophosphate synthase in an organelle, preferably in plastids or mitochondria, especially in plastids, of a non-human organism or a part thereof, preferably a microorganism, a plant cell, a plant or a part thereof, as compared to a corresponding non-transformed wild type non-human organism or a part thereof; and
[34093] (b) growing the non-human organism or a part thereof under conditions which permit the production of tryptophan or a composition comprising tryptophan in said non-human organism or in the culture medium surrounding said non-human organism.

[34094] A further embodiment of the present invention relates to a process for the production of tryptophan, which comprises
[34095] (a) increasing or generating one or more activities selected from the group consisting of slr1107-protein in an organelle, preferably in plastids or mitochondria, especially in plastids, of a non-human organism or a part thereof, preferably a microorganism, a plant cell, a plant or a part thereof, as compared to a corresponding non-transformed wild type non-human organism or a part thereof; and
[34096] (b) growing the non-human organism or a part thereof under conditions which permit the production of tryptophan or a composition comprising tryptophan in said non-human organism or in the culture medium surrounding said non-human organism.

[34097] A further embodiment of the present invention relates to a process for the production of tryptophan, which comprises
[34098] (a) increasing or generating one or more activities selected from the group consisting of photosystem II protein in an organelle, preferably in plastids or mitochondria, especially in plastids, of a non-human organism or a part thereof, preferably a microorganism, a plant cell, a plant or a part thereof, as compared to a corresponding non-transformed wild type non-human organism or a part thereof; and
[34099] (b) growing the non-human organism or a part thereof under conditions which permit the production of tryptophan or a composition comprising tryptophan in said non-human organism or in the culture medium surrounding said non-human organism.

[34100] A further embodiment of the present invention relates to a process for the production of tryptophan, which comprises
[34101] (a) increasing or generating one or more activities selected from the group consisting of short-chain alcohol dehydrogenase family in an organelle, preferably in plastids or mitochondria, especially in plastids, of a non-human organism or a part thereof, preferably a microorganism, a plant cell, a plant or a part thereof, as compared to a corresponding non-transformed wild type non-human organism or a part thereof; and
[34102] (b) growing the non-human organism or a part thereof under conditions which permit the production of tryptophan or a composition comprising tryptophan in said non-human organism or in the culture medium surrounding said non-human organism.

[34103] A further embodiment of the present invention relates to a process for the production of tryptophan, which comprises
[34104] (a) increasing or generating one or more activities selected from the group consisting of Sec-independent protein translocase subunit in an organelle, preferably in plastids or mitochondria, especially in plastids, of a non-human organism or a part thereof, preferably a microorganism, a plant cell, a plant or a part thereof, as compared to a corresponding non-transformed wild type non-human organism or a part thereof; and
[34105] (b) growing the non-human organism or a part thereof under conditions which permit the production of tryptophan or a composition comprising tryptophan in said non-human organism or in the culture medium surrounding said non-human organism.

[34106] A further embodiment of the present invention relates to a process for the production of tryptophan, which comprises
[34107] (a) increasing or generating one or more activities selected from the group consisting of 3-deoxy-7-phosphoheptulonate synthase in an organelle, preferably in plastids or mitochondria, especially in plastids, of a non-human organism or a part thereof, preferably a microorganism, a plant cell, a plant or a part thereof, as compared to a corresponding non-transformed wild type non-human organism or a part thereof; and
[34108] (b) growing the non-human organism or a part thereof under conditions which permit the production of tryptophan or a composition comprising tryptophan in said non-human organism or in the culture medium surrounding said non-human organism.

[34109] A further embodiment of the present invention relates to a process for the production of tryptophan, which comprises
[34110] (a) increasing or generating one or more activities selected from the group consisting of branched-chain amino acid permease in an organelle, preferably in plastids or mitochondria, especially in plastids, of a non-human organism or a part thereof, preferably a microorganism, a plant cell, a plant or a part thereof, as compared to a corresponding non-transformed wild type non-human organism or a part thereof; and
[34111] (b) growing the non-human organism or a part thereof under conditions which permit the production of tryptophan or a composition comprising tryptophan in said non-human organism or in the culture medium surrounding said non-human organism.

[34112] A further embodiment of the present invention relates to a process for the production of tryptophan, which comprises
[34113] (a) increasing or generating one or more activities selected from the group consisting of yfl054c-protein in an organelle, preferably in plastids or mitochondria, especially in plastids, of a non-human organism or a part thereof, preferably a microorganism, a plant cell, a plant or a part thereof, as compared to a corresponding non-transformed wild type non-human organism or a part thereof; and
[34114] (b) growing the non-human organism or a part thereof under conditions which permit the production of tryptophan or a composition comprising tryptophan in said non-human organism or in the culture medium surrounding said non-human organism.

[34115] A further embodiment of the present invention relates to a process for the production of tryptophan, which comprises
[34116] (a) increasing or generating one or more activities selected from the group consisting of glycerol kinase in an organelle, preferably in plastids or mitochondria, especially in plastids, of a non-human organism or a part thereof, preferably a microorganism, a plant cell, a plant or a part thereof, as compared to a corresponding non-transformed wild type non-human organism or a part thereof; and
[34117] (b) growing the non-human organism or a part thereof under conditions which permit the production of tryptophan or a composition comprising tryptophan in said non-human organism or in the culture medium surrounding said non-human organism.

[34118] A further embodiment of the present invention relates to a process for the production of tryptophan, which comprises
[34119] (a) increasing or generating one or more activities selected from the group consisting of aromatic amino acid aminotransferase in an organelle, preferably in plastids or mitochondria, especially in plastids, of a non-human organism or a part thereof, preferably a microorganism, a plant cell, a plant or a part thereof, as compared to a corresponding non-transformed wild type non-human organism or a part thereof; and
[34120] (b) growing the non-human organism or a part thereof under conditions which permit the production of tryptophan or a composition comprising tryptophan in said non-human organism or in the culture medium surrounding said non-human organism.

[34121] A further embodiment of the present invention relates to a process for the production of tryptophan, which comprises
[34122] (a) increasing or generating one or more activities selected from the group consisting of cystathionine gamma-synthase in an organelle, preferably in plastids or mitochondria, especially in plastids, of a non-human organism or a part thereof, preferably a microorganism, a plant cell, a plant or a part thereof, as compared to a corresponding non-transformed wild type non-human organism or a part thereof; and
[34123] (b) growing the non-human organism or a part thereof under conditions which permit the production of tryptophan or a composition comprising tryptophan in said non-human organism or in the culture medium surrounding said non-human organism.

[34124] A further embodiment of the present invention relates to a process for the production of tryptophan, which comprises
[34125] (a) increasing or generating one or more activities selected from the group consisting of polygalacturonase in an organelle, preferably in plastids or mitochondria, especially in plastids, of a non-human organism or a part thereof, preferably a microorganism, a plant cell, a plant or a part thereof, as compared to a corresponding non-transformed wild type non-human organism or a part thereof; and
[34126] (b) growing the non-human organism or a part thereof under conditions which permit the production of tryptophan or a composition comprising tryptophan in said non-human organism or in the culture medium surrounding said non-human organism.

[34127] A further embodiment of the present invention relates to a process for the production of tryptophan, which comprises
[34128] (a) increasing or generating one or more activities selected from the group consisting of lipase in an organelle, preferably in plastids or mitochondria, especially in plastids, of a non-human organism or a part thereof, preferably a microorganism, a plant cell, a plant or a part thereof, as compared to a corresponding non-transformed wild type non-human organism or a part thereof; and
[34129] (b) growing the non-human organism or a part thereof under conditions which permit the production of tryptophan or a composition comprising tryptophan in said non-human organism or in the culture medium surrounding said non-human organism.

[34130] A further embodiment of the present invention relates to a process for the production of tryptophan, which comprises
[34131] (a) increasing or generating one or more activities selected from the group consisting of amino acid transporter in an organelle, preferably in plastids or mitochondria, especially in plastids, of a non-human organism or a part thereof, preferably a microorganism, a plant cell, a plant or a part thereof, as compared to a corresponding non-transformed wild type non-human organism or a part thereof; and
[34132] (b) growing the non-human organism or a part thereof under conditions which permit the production of tryptophan or a composition comprising tryptophan in said non-human organism or in the culture medium surrounding said non-human organism.

[34133] A further embodiment of the present invention relates to a process for the production of tryptophan, which comprises
[34134] (a) increasing or generating one or more activities selected from the group consisting of histone acetyltransferase in an organelle, preferably in plastids or mitochondria, especially in plastids, of a non-human organism or a part thereof, preferably a microorganism, a plant cell, a plant or a part thereof, as compared to a corresponding non-transformed wild type non-human organism or a part thereof; and
[34135] (b) growing the non-human organism or a part thereof under conditions which permit the production of tryptophan or a composition comprising tryptophan in said non-human organism or in the culture medium surrounding said non-human organism.

[34136] A further embodiment of the present invention relates to a process for the production of tryptophan, which comprises
[34137] (a) increasing or generating one or more activities selected from the group consisting of isopentenyl diphosphate isomerase in an organelle, preferably in plastids or mitochondria, especially in plastids, of a non-human organism or a part thereof, preferably a microorganism, a plant cell, a plant or a part thereof, as compared to a corresponding non-transformed wild type non-human organism or a part thereof; and
[34138] (b) growing the non-human organism or a part thereof under conditions which permit the production of tryptophan or a composition comprising tryptophan in said non-human organism or in the culture medium surrounding said non-human organism.

[34139] A further embodiment of the present invention relates to a process for the production of tryptophan, which comprises
[34140] (a) increasing or generating one or more activities selected from the group consisting of cyclin in an organelle, preferably in plastids or mitochondria, especially in plastids, of a non-human organism or a part thereof, preferably a microorganism, a plant cell, a plant or a part thereof, as compared to a corresponding non-transformed wild type non-human organism or a part thereof; and
[34141] (b) growing the non-human organism or a part thereof under conditions which permit the production of tryptophan or a composition comprising tryptophan in said non-human organism or in the culture medium surrounding said non-human organism.

[34142] A further embodiment of the present invention relates to a process for the production of tryptophan, which comprises
[34143] (a) increasing or generating one or more activities selected from the group consisting of Zm_{—}4842_BE510522-protein in an organelle, preferably in plastids or mitochondria, especially in plastids, of a non-human organism or a part thereof, preferably a microorganism, a plant cell, a plant or a part thereof, as compared to a corresponding non-transformed wild type non-human organism or a part thereof; and
[34144] (b) growing the non-human organism or a part thereof under conditions which permit the production of tryptophan or a composition comprising tryptophan in said non-human organism or in the culture medium surrounding said non-human organism.

[34145] A further embodiment of the present invention relates to a process for the production of tryptophan, which comprises
[34146] (a1) increasing or generating the activity of a polypeptide comprising a polypeptide as depicted in the respective line in column 5 or 8 of Table II, application no. 5, or a homolog or fragment thereof, a consensus sequence or at least one polypeptide motif as depicted in column 8 of Table IV, application no. 5; or increasing or generating the activity of an expression product of one or more nucleic acid molecule(s) comprising a polynucleotide as depicted in the respective line in column 5 or 8 of Table I, application no. 5, preferably the coding region thereof, or a homolog or a fragment thereof;
[34147] in an organelle, preferably in plastids or mitochondria, especially in plastids, in a non-human organism or a part thereof; preferably a microorganism, a plant cell, a plant or a part thereof, as compared to a corresponding non-transformed wild type non-human organism or a part thereof; or
[34148] (a2) increasing or generating the activity of a polypeptide comprising a polypeptide as depicted in the respective line in column 5 or 8 of Table II, application no. 5, or a homolog or a fragment thereof, a consensus sequence or at least one polypeptide motif as depicted in the respective line in column 8 of Table IV, application no. 5, which is joined to a transit peptide; or
[34149] increasing or generating the activity of an expression product of one or more nucleic acid molecule(s) comprising a polynucleotide as depicted in the respective line in column 5 or 8 of Table I, application no. 5, preferably the coding region thereof, or a homolog or a fragment thereof, which is joined to a nucleic acid sequence encoding an organelle localization sequence, preferably a plastid or a mitochondrion localization sequence, especially a plastid localization sequence;
[34150] in a non-human organism or a part thereof; preferably a microorganism, a plant cell, a plant or a part thereof, as compared to a corresponding non-transformed wild type non-human organism or a part thereof; or
[34151] (a3) increasing or generating the activity of a polypeptide comprising a polypeptide as depicted in the respective line in column 5 or 8 of Table II, application no. 5, or a homolog or a fragment thereof, a consensus sequence or at least one polypeptide motif as depicted in the respective line in column 8 of Table IV, application no. 5; or increasing or generating the activity of an expression product of one or more nucleic acid molecule(s) comprising a polynucleotide as depicted in the respective line in column 5 or 8 of Table I, application no. 5, preferably the coding region thereof, or a homolog or a fragment thereof;
[34152] in an organelle, preferably in plastids or mitochondria, especially in plastids, in a non-human organism or a part thereof; preferably a microorganism, a plant cell, a plant or a part thereof, through transformation of the organelle, as compared to a corresponding non-transformed wild type non-human organism or a part thereof;
[34153] and
[34154] (b) growing the non-human organism under conditions which permit the production of tryptophan, or a composition comprising tryptophan in said non-human organism or in the culture medium surrounding said non-human organism.

[34155] Accordingly, the present invention relates to a process for the production of tryptophan, which comprises
[34156] (a) increasing or generating the activity of a glucose-6-phosphate 1-dehydrogenase in the cytosol of a cell of a non-human organism or a part thereof, preferably a microorganism, a plant cell, a plant or a part thereof, as compared to a corresponding non-transformed wild type non-human organism or a part thereof; and
[34157] (b) growing the non-human organism or a part thereof under conditions which permit the production of tryptophan or a composition comprising tryptophan in said non-human organism or in the culture medium surrounding said non-human organism.

[34158] Accordingly, the present invention relates to a process for the production of tryptophan, which comprises
[34159] (a) increasing or generating the activity of a At1g19800-protein in the cytosol of a cell of a non-human organism or a part thereof, preferably a microorganism, a plant cell, a plant or a part thereof, as compared to a corresponding non-transformed wild type non-human organism or a part thereof; and
[34160] (b) growing the non-human organism or a part thereof under conditions which permit the production of tryptophan or a composition comprising tryptophan in said non-human organism or in the culture medium surrounding said non-human organism.

[34161] Accordingly, the present invention relates to a process for the production of tryptophan, which comprises
[34162] (a) increasing or generating the activity of a cullin in the cytosol of a cell of a non-human organism or a part thereof, preferably a microorganism, a plant cell, a plant or a part thereof, as compared to a corresponding non-transformed wild type non-human organism or a part thereof; and
[34163] (b) growing the non-human organism or a part thereof under conditions which permit the production of tryptophan or a composition comprising tryptophan in said non-human organism or in the culture medium surrounding said non-human organism.

[34164] Accordingly, the present invention relates to a process for the production of tryptophan, which comprises
[34165] (a) increasing or generating the activity of a eukaryotic translation initiation factor 5 in the cytosol of a cell of a non-human organism or a part thereof, preferably a microorganism, a plant cell, a plant or a part thereof, as compared to a corresponding non-transformed wild type non-human organism or a part thereof; and
[34166] (b) growing the non-human organism or a part thereof under conditions which permit the production of tryptophan or a composition comprising tryptophan in said non-human organism or in the culture medium surrounding said non-human organism.

[34167] Accordingly, the present invention relates to a process for the production of tryptophan, which comprises
[34168] (a) increasing or generating the activity of a protein kinase in the cytosol of a cell of a non-human organism or a part thereof, preferably a microorganism, a plant cell, a plant or a part thereof, as compared to a corresponding non-transformed wild type non-human organism or a part thereof; and
[34169] (b) growing the non-human organism or a part thereof under conditions which permit the production of tryptophan or a composition comprising tryptophan in said non-human organism or in the culture medium surrounding said non-human organism.

[34170] Accordingly, the present invention relates to a process for the production of tryptophan, which comprises
[34171] (a) increasing or generating the activity of a transcription factor in the cytosol of a cell of a non-human organism or a part thereof, preferably a microorganism, a plant cell, a plant or a part thereof, as compared to a corresponding non-transformed wild type non-human organism or a part thereof; and
[34172] (b) growing the non-human organism or a part thereof under conditions which permit the production of tryptophan or a composition comprising tryptophan in said non-human organism or in the culture medium surrounding said non-human organism.

[34173] Accordingly, the present invention relates to a process for the production of tryptophan, which comprises
[34174] (a) increasing or generating the activity of a protein phosphatase in the cytosol of a cell of a non-human organism or a part thereof, preferably a microorganism, a plant cell, a plant or a part thereof, as compared to a corresponding non-transformed wild type non-human organism or a part thereof; and
[34175] (b) growing the non-human organism or a part thereof under conditions which permit the production of tryptophan or a composition comprising tryptophan in said non-human organism or in the culture medium surrounding said non-human organism.

[34176] Accordingly, the present invention relates to a process for the production of tryptophan, which comprises
[34177] (a) increasing or generating the activity of a CBL-interacting protein kinase in the cytosol of a cell of a non-human organism or a part thereof, preferably a microorganism, a plant cell, a plant or a part thereof, as compared to a corresponding non-transformed wild type non-human organism or a part thereof; and
[34178] (b) growing the non-human organism or a part thereof under conditions which permit the production of tryptophan or a composition comprising tryptophan in said non-human organism or in the culture medium surrounding said non-human organism.

[34179] Accordingly, the present invention relates to a process for the production of tryptophan, which comprises
[34180] (a) increasing or generating the activity of a glutaredoxin in the cytosol of a cell of a non-human organism or a part thereof, preferably a microorganism, a plant cell, a plant or a part thereof, as compared to a corresponding non-transformed wild type non-human organism or a part thereof; and
[34181] (b) growing the non-human organism or a part thereof under conditions which permit the production of tryptophan or a composition comprising tryptophan in said non-human organism or in the culture medium surrounding said non-human organism.

[34182] Accordingly, the present invention relates to a process for the production of tryptophan, which comprises
[34183] (a) increasing or generating the activity of a At2g33510-protein in the cytosol of a cell of a non-human organism or a part thereof, preferably a microorganism, a plant cell, a plant or a part thereof, as compared to a corresponding non-transformed wild type non-human organism or a part thereof; and
[34184] (b) growing the non-human organism or a part thereof under conditions which permit the production of tryptophan or a composition comprising tryptophan in said non-human organism or in the culture medium surrounding said non-human organism.

[34185] Accordingly, the present invention relates to a process for the production of tryptophan, which comprises
[34186] (a) increasing or generating the activity of a glutaredoxin in the cytosol of a cell of a non-human organism or a part thereof, preferably a microorganism, a plant cell, a plant or a part thereof, as compared to a corresponding non-transformed wild type non-human organism or a part thereof; and
[34187] (b) growing the non-human organism or a part thereof under conditions which permit the production of tryptophan or a composition comprising tryptophan in said non-human organism or in the culture medium surrounding said non-human organism.

[34188] Accordingly, the present invention relates to a process for the production of tryptophan, which comprises
[34189] (a) increasing or generating the activity of a pyruvate kinase in the cytosol of a cell of a non-human organism or a part thereof, preferably a microorganism, a plant cell, a plant or a part thereof, as compared to a corresponding non-transformed wild type non-human organism or a part thereof; and
[34190] (b) growing the non-human organism or a part thereof under conditions which permit the production of tryptophan or a composition comprising tryptophan in said non-human organism or in the culture medium surrounding said non-human organism.

[34191] Accordingly, the present invention relates to a process for the production of tryptophan, which comprises
[34192] (a) increasing or generating the activity of a harpin-induced family protein in the cytosol of a cell of a non-human organism or a part thereof, preferably a microorganism, a plant cell, a plant or a part thereof, as compared to a corresponding non-transformed wild type non-human organism or a part thereof; and
[34193] (b) growing the non-human organism or a part thereof under conditions which permit the production of tryptophan or a composition comprising tryptophan in said non-human organism or in the culture medium surrounding said non-human organism.

[34194] Accordingly, the present invention relates to a process for the production of tryptophan, which comprises
[34195] (a) increasing or generating the activity of a DNA mismatch repair protein in the cytosol of a cell of a non-human organism or a part thereof, preferably a microorganism, a plant cell, a plant or a part thereof, as compared to a corresponding non-transformed wild type non-human organism or a part thereof; and
[34196] (b) growing the non-human organism or a part thereof under conditions which permit the production of tryptophan or a composition comprising tryptophan in said non-human organism or in the culture medium surrounding said non-human organism.

[34197] Accordingly, the present invention relates to a process for the production of tryptophan, which comprises
[34198] (a) increasing or generating the activity of a protein kinase in the cytosol of a cell of a non-human organism or a part thereof, preferably a microorganism, a plant cell, a plant or a part thereof, as compared to a corresponding non-transformed wild type non-human organism or a part thereof; and
[34199] (b) growing the non-human organism or a part thereof under conditions which permit the production of tryptophan or a composition comprising tryptophan in said non-human organism or in the culture medium surrounding said non-human organism.

[34200] Accordingly, the present invention relates to a process for the production of tryptophan, which comprises
[34201] (a) increasing or generating the activity of a eukaryotic translation initiation factor in the cytosol of a cell of a non-human organism or a part thereof, preferably a microorganism, a plant cell, a plant or a part thereof, as compared to a corresponding non-transformed wild type non-human organism or a part thereof; and
[34202] (b) growing the non-human organism or a part thereof under conditions which permit the production of tryptophan or a composition comprising tryptophan in said non-human organism or in the culture medium surrounding said non-human organism.

[34203] Accordingly, the present invention relates to a process for the production of tryptophan, which comprises
[34204] (a) increasing or generating the activity of a glycosyl transferase in the cytosol of a cell of a non-human organism or a part thereof, preferably a microorganism, a plant cell, a plant or a part thereof, as compared to a corresponding non-transformed wild type non-human organism or a part thereof; and
[34205] (b) growing the non-human organism or a part thereof under conditions which permit the production of tryptophan or a composition comprising tryptophan in said non-human organism or in the culture medium surrounding said non-human organism.

[34206] Accordingly, the present invention relates to a process for the production of tryptophan, which comprises
[34207] (a) increasing or generating the activity of a auxin response factor in the cytosol of a cell of a non-human organism or a part thereof, preferably a microorganism, a plant cell, a plant or a part thereof, as compared to a corresponding non-transformed wild type non-human organism or a part thereof; and
[34208] (b) growing the non-human organism or a part thereof under conditions which permit the production of tryptophan or a composition comprising tryptophan in said non-human organism or in the culture medium surrounding said non-human organism.

[34209] Accordingly, the present invention relates to a process for the production of tryptophan, which comprises
[34210] (a) increasing or generating the activity of a monthiol glutaredoxin in the cytosol of a cell of a non-human organism or a part thereof, preferably a microorganism, a plant cell, a plant or a part thereof, as compared to a corresponding non-transformed wild type non-human organism or a part thereof; and
[34211] (b) growing the non-human organism or a part thereof under conditions which permit the production of tryptophan or a composition comprising tryptophan in said non-human organism or in the culture medium surrounding said non-human organism.

[34212] Accordingly, the present invention relates to a process for the production of tryptophan, which comprises
[34213] (a) increasing or generating the activity of a glutaredoxin in the cytosol of a cell of a non-human organism or a part thereof, preferably a microorganism, a plant cell, a plant or a part thereof, as compared to a corresponding non-transformed wild type non-human organism or a part thereof; and
[34214] (b) growing the non-human organism or a part thereof under conditions which permit the production of tryptophan or a composition comprising tryptophan in said non-human organism or in the culture medium surrounding said non-human organism.

[34215] Accordingly, the present invention relates to a process for the production of tryptophan, which comprises
[34216] (a) increasing or generating the activity of a At4g32480-protein in the cytosol of a cell of a non-human organism or a part thereof, preferably a microorganism, a plant cell, a plant or a part thereof, as compared to a corresponding non-transformed wild type non-human organism or a part thereof; and
[34217] (b) growing the non-human organism or a part thereof under conditions which permit the production of tryptophan or a composition comprising tryptophan in said non-human organism or in the culture medium surrounding said non-human organism.

[34218] Accordingly, the present invention relates to a process for the production of tryptophan, which comprises
[34219] (a) increasing or generating the activity of a cyclin D in the cytosol of a cell of a non-human organism or a part thereof, preferably a microorganism, a plant cell, a plant or a part thereof, as compared to a corresponding non-transformed wild type non-human organism or a part thereof; and
[34220] (b) growing the non-human organism or a part thereof under conditions which permit the production of tryptophan or a composition comprising tryptophan in said non-human organism or in the culture medium surrounding said non-human organism.

[34221] Accordingly, the present invention relates to a process for the production of tryptophan, which comprises
[34222] (a) increasing or generating the activity of a calcium-dependent protein kinase in the cytosol of a cell of a non-human organism or a part thereof, preferably a microorganism, a plant cell, a plant or a part thereof, as compared to a corresponding non-transformed wild type non-human organism or a part thereof; and
[34223] (b) growing the non-human organism or a part thereof under conditions which permit the production of tryptophan or a composition comprising tryptophan in said non-human organism or in the culture medium surrounding said non-human organism.

[34224] Accordingly, the present invention relates to a process for the production of tryptophan, which comprises
[34225] (a) increasing or generating the activity of a protein phosphatase in the cytosol of a cell of a non-human organism or a part thereof, preferably a microorganism, a plant cell, a plant or a part thereof, as compared to a corresponding non-transformed wild type non-human organism or a part thereof; and
[34226] (b) growing the non-human organism or a part thereof under conditions which permit the production of tryptophan or a composition comprising tryptophan in said non-human organism or in the culture medium surrounding said non-human organism.

[34227] Accordingly, the present invention relates to a process for the production of tryptophan, which comprises
[34228] (a) increasing or generating the activity of a gibberellin 20-oxidase in the cytosol of a cell of a non-human organism or a part thereof, preferably a microorganism, a plant cell, a plant or a part thereof, as compared to a corresponding non-transformed wild type non-human organism or a part thereof; and
[34229] (b) growing the non-human organism or a part thereof under conditions which permit the production of tryptophan or a composition comprising tryptophan in said non-human organism or in the culture medium surrounding said non-human organism.

[34230] Accordingly, the present invention relates to a process for the production of tryptophan, which comprises
[34231] (a) increasing or generating the activity of a At5g16650-protein in the cytosol of a cell of a non-human organism or a part thereof, preferably a microorganism, a plant cell, a plant or a part thereof, as compared to a corresponding non-transformed wild type non-human organism or a part thereof; and
[34232] (b) growing the non-human organism or a part thereof under conditions which permit the production of tryptophan or a composition comprising tryptophan in said non-human organism or in the culture medium surrounding said non-human organism.

[34233] Accordingly, the present invention relates to a process for the production of tryptophan, which comprises
[34234] (a) increasing or generating the activity of a at5g21910-protein in the cytosol of a cell of a non-human organism or a part thereof, preferably a microorganism, a plant cell, a plant or a part thereof, as compared to a corresponding non-transformed wild type non-human organism or a part thereof; and
[34235] (b) growing the non-human organism or a part thereof under conditions which permit the production of tryptophan or a composition comprising tryptophan in said non-human organism or in the culture medium surrounding said non-human organism.

[34236] Accordingly, the present invention relates to a process for the production of tryptophan, which comprises
[34237] (a) increasing or generating the activity of a transcription factor in the cytosol of a cell of a non-human organism or a part thereof, preferably a microorganism, a plant cell, a plant or a part thereof, as compared to a corresponding non-transformed wild type non-human organism or a part thereof; and
[34238] (b) growing the non-human organism or a part thereof under conditions which permit the production of tryptophan or a composition comprising tryptophan in said non-human organism or in the culture medium surrounding said non-human organism.

[34239] Accordingly, the present invention relates to a process for the production of tryptophan, which comprises
[34240] (a) increasing or generating the activity of a RNA-binding protein in the cytosol of a cell of a non-human organism or a part thereof, preferably a microorganism, a plant cell, a plant or a part thereof, as compared to a corresponding non-transformed wild type non-human organism or a part thereof; and
[34241] (b) growing the non-human organism or a part thereof under conditions which permit the production of tryptophan or a composition comprising tryptophan in said non-human organism or in the culture medium surrounding said non-human organism.

[34242] Accordingly, the present invention relates to a process for the production of tryptophan, which comprises
[34243] (a) increasing or generating the activity of a malic enzyme in the cytosol of a cell of a non-human organism or a part thereof, preferably a microorganism, a plant cell, a plant or a part thereof, as compared to a corresponding non-transformed wild type non-human organism or a part thereof; and
[34244] (b) growing the non-human organism or a part thereof under conditions which permit the production of tryptophan or a composition comprising tryptophan in said non-human organism or in the culture medium surrounding said non-human organism.

[34245] Accordingly, the present invention relates to a process for the production of tryptophan, which comprises
[34246] (a) increasing or generating the activity of a elongation factor Tu in the cytosol of a cell of a non-human organism or a part thereof, preferably a microorganism, a plant cell, a plant or a part thereof, as compared to a corresponding non-transformed wild type non-human organism or a part thereof; and
[34247] (b) growing the non-human organism or a part thereof under conditions which permit the production of tryptophan or a composition comprising tryptophan in said non-human organism or in the culture medium surrounding said non-human organism.

[34248] Accordingly, the present invention relates to a process for the production of tryptophan, which comprises
[34249] (a) increasing or generating the activity of a enoyl-CoA hydratase in the cytosol of a cell of a non-human organism or a part thereof, preferably a microorganism, a plant cell, a plant or a part thereof, as compared to a corresponding non-transformed wild type non-human organism or a part thereof; and
[34250] (b) growing the non-human organism or a part thereof under conditions which permit the production of tryptophan or a composition comprising tryptophan in said non-human organism or in the culture medium surrounding said non-human organism.

[34251] Accordingly, the present invention relates to a process for the production of tryptophan, which comprises
[34252] (a) increasing or generating the activity of a transcriptional regulator in the cytosol of a cell of a non-human organism or a part thereof, preferably a microorganism, a plant cell, a plant or a part thereof, as compared to a corresponding non-transformed wild type non-human organism or a part thereof; and
[34253] (b) growing the non-human organism or a part thereof under conditions which permit the production of tryptophan or a composition comprising tryptophan in said non-human organism or in the culture medium surrounding said non-human organism.

[34254] Accordingly, the present invention relates to a process for the production of tryptophan, which comprises
[34255] (a) increasing or generating the activity of a enoyl-CoA hydratase in the cytosol of a cell of a non-human organism or a part thereof, preferably a microorganism, a plant cell, a plant or a part thereof, as compared to a corresponding non-transformed wild type non-human organism or a part thereof; and
[34256] (b) growing the non-human organism or a part thereof under conditions which permit the production of tryptophan or a composition comprising tryptophan in said non-human organism or in the culture medium surrounding said non-human organism.

[34257] Accordingly, the present invention relates to a process for the production of tryptophan, which comprises
[34258] (a) increasing or generating the activity of a glutamate-ammonia-ligase in the cytosol of a cell of a non-human organism or a part thereof, preferably a microorganism, a plant cell, a plant or a part thereof, as compared to a corresponding non-transformed wild type non-human organism or a part thereof; and
[34259] (b) growing the non-human organism or a part thereof under conditions which permit the production of tryptophan or a composition comprising tryptophan in said non-human organism or in the culture medium surrounding said non-human organism.

[34260] Accordingly, the present invention relates to a process for the production of tryptophan, which comprises
[34261] (a) increasing or generating the activity of a hydrolase in the cytosol of a cell of a non-human organism or a part thereof, preferably a microorganism, a plant cell, a plant or a part thereof, as compared to a corresponding non-transformed wild type non-human organism or a part thereof; and
[34262] (b) growing the non-human organism or a part thereof under conditions which permit the production of tryptophan or a composition comprising tryptophan in said non-human organism or in the culture medium surrounding said non-human organism.

[34263] Accordingly, the present invention relates to a process for the production of tryptophan, which comprises
[34264] (a) increasing or generating the activity of a Chaperone protein CIpB in the cytosol of a cell of a non-human organism or a part thereof, preferably a microorganism, a plant cell, a plant or a part thereof, as compared to a corresponding non-transformed wild type non-human organism or a part thereof; and
[34265] (b) growing the non-human organism or a part thereof under conditions which permit the production of tryptophan or a composition comprising tryptophan in said non-human organism or in the culture medium surrounding said non-human organism.

[34266] Accordingly, the present invention relates to a process for the production of tryptophan, which comprises
[34267] (a) increasing or generating the activity of a electron transfer flavoprotein subunit beta in the cytosol of a cell of a non-human organism or a part thereof, preferably a microorganism, a plant cell, a plant or a part thereof, as compared to a corresponding non-transformed wild type non-human organism or a part thereof; and
[34268] (b) growing the non-human organism or a part thereof under conditions which permit the production of tryptophan or a composition comprising tryptophan in said non-human organism or in the culture medium surrounding said non-human organism.

[34269] Accordingly, the present invention relates to a process for the production of tryptophan, which comprises
[34270] (a) increasing or generating the activity of a threonine synthase in the cytosol of a cell of a non-human organism or a part thereof, preferably a microorganism, a plant cell, a plant or a part thereof, as compared to a corresponding non-transformed wild type non-human organism or a part thereof; and
[34271] (b) growing the non-human organism or a part thereof under conditions which permit the production of tryptophan or a composition comprising tryptophan in said non-human organism or in the culture medium surrounding said non-human organism.

[34272] Accordingly, the present invention relates to a process for the production of tryptophan, which comprises
[34273] (a) increasing or generating the activity of a transaldolase in the cytosol of a cell of a non-human organism or a part thereof, preferably a microorganism, a plant cell, a plant or a part thereof, as compared to a corresponding non-transformed wild type non-human organism or a part thereof; and
[34274] (b) growing the non-human organism or a part thereof under conditions which permit the production of tryptophan or a composition comprising tryptophan in said non-human organism or in the culture medium surrounding said non-human organism.

[34275] Accordingly, the present invention relates to a process for the production of tryptophan, which comprises
[34276] (a) increasing or generating the activity of a L-ribulose-5-phosphate 4-epimerase in the cytosol of a cell of a non-human organism or a part thereof, preferably a microorganism, a plant cell, a plant or a part thereof, as compared to a corresponding non-transformed wild type non-human organism or a part thereof; and
[34277] (b) growing the non-human organism or a part thereof under conditions which permit the production of tryptophan or a composition comprising tryptophan in said non-human organism or in the culture medium surrounding said non-human organism.

[34278] Accordingly, the present invention relates to a process for the production of tryptophan, which comprises
[34279] (a) increasing or generating the activity of a glucose dehydrogenase in the cytosol of a cell of a non-human organism or a part thereof, preferably a microorganism, a plant cell, a plant or a part thereof, as compared to a corresponding non-transformed wild type non-human organism or a part thereof; and
[34280] (b) growing the non-human organism or a part thereof under conditions which permit the production of tryptophan or a composition comprising tryptophan in said non-human organism or in the culture medium surrounding said non-human organism.

[34281] Accordingly, the present invention relates to a process for the production of tryptophan, which comprises
[34282] (a) increasing or generating the activity of a ATP-binding component of a transport system in the cytosol of a cell of a non-human organism or a part thereof, preferably a microorganism, a plant cell, a plant or a part thereof, as compared to a corresponding non-transformed wild type non-human organism or a part thereof; and
[34283] (b) growing the non-human organism or a part thereof under conditions which permit the production of tryptophan or a composition comprising tryptophan in said non-human organism or in the culture medium surrounding said non-human organism.

[34284] Accordingly, the present invention relates to a process for the production of tryptophan, which comprises
[34285] (a) increasing or generating the activity of a isochorismate synthase in the cytosol of a cell of a non-human organism or a part thereof, preferably a microorganism, a plant cell, a plant or a part thereof, as compared to a corresponding non-transformed wild type non-human organism or a part thereof; and
[34286] (b) growing the non-human organism or a part thereof under conditions which permit the production of tryptophan or a composition comprising tryptophan in said non-human organism or in the culture medium surrounding said non-human organism.

[34287] Accordingly, the present invention relates to a process for the production of tryptophan, which comprises
[34288] (a) increasing or generating the activity of a Leucyl/phenylalanyl-tRNA-protein transferase in the cytosol of a cell of a non-human organism or a part thereof, preferably a microorganism, a plant cell, a plant or a part thereof, as compared to a corresponding non-transformed wild type non-human organism or a part thereof; and
[34289] (b) growing the non-human organism or a part thereof under conditions which permit the production of tryptophan or a composition comprising tryptophan in said non-human organism or in the culture medium surrounding said non-human organism.

[34290] Accordingly, the present invention relates to a process for the production of tryptophan, which comprises
[34291] (a) increasing or generating the activity of a b1163-protein in the cytosol of a cell of a non-human organism or a part thereof, preferably a microorganism, a plant cell, a plant or a part thereof, as compared to a corresponding non-transformed wild type non-human organism or a part thereof; and
[34292] (b) growing the non-human organism or a part thereof under conditions which permit the production of tryptophan or a composition comprising tryptophan in said non-human organism or in the culture medium surrounding said non-human organism.

[34293] Accordingly, the present invention relates to a process for the production of tryptophan, which comprises
[34294] (a) increasing or generating the activity of a cardiolipin synthase in the cytosol of a cell of a non-human organism or a part thereof, preferably a microorganism, a plant cell, a plant or a part thereof, as compared to a corresponding non-transformed wild type non-human organism or a part thereof; and
[34295] (b) growing the non-human organism or a part thereof under conditions which permit the production of tryptophan or a composition comprising tryptophan in said non-human organism or in the culture medium surrounding said non-human organism.

[34296] Accordingly, the present invention relates to a process for the production of tryptophan, which comprises
[34297] (a) increasing or generating the activity of a tryptophan biosynthesis protein in the cytosol of a cell of a non-human organism or a part thereof, preferably a microorganism, a plant cell, a plant or a part thereof, as compared to a corresponding non-transformed wild type non-human organism or a part thereof; and
[34298] (b) growing the non-human organism or a part thereof under conditions which permit the production of tryptophan or a composition comprising tryptophan in said non-human organism or in the culture medium surrounding said non-human organism.

[34299] Accordingly, the present invention relates to a process for the production of tryptophan, which comprises
[34300] (a) increasing or generating the activity of a aldehyde dehydrogenase in the cytosol of a cell of a non-human organism or a part thereof, preferably a microorganism, a plant cell, a plant or a part thereof, as compared to a corresponding non-transformed wild type non-human organism or a part thereof; and
[34301] (b) growing the non-human organism or a part thereof under conditions which permit the production of tryptophan or a composition comprising tryptophan in said non-human organism or in the culture medium surrounding said non-human organism.

[34302] Accordingly, the present invention relates to a process for the production of tryptophan, which comprises
[34303] (a) increasing or generating the activity of a b1346-protein in the cytosol of a cell of a non-human organism or a part thereof, preferably a microorganism, a plant cell, a plant or a part thereof, as compared to a corresponding non-transformed wild type non-human organism or a part thereof; and
[34304] (b) growing the non-human organism or a part thereof under conditions which permit the production of tryptophan or a composition comprising tryptophan in said non-human organism or in the culture medium surrounding said non-human organism.

[34305] Accordingly, the present invention relates to a process for the production of tryptophan, which comprises
[34306] (a) increasing or generating the activity of a b1522-protein in the cytosol of a cell of a non-human organism or a part thereof, preferably a microorganism, a plant cell, a plant or a part thereof, as compared to a corresponding non-transformed wild type non-human organism or a part thereof; and
[34307] (b) growing the non-human organism or a part thereof under conditions which permit the production of tryptophan or a composition comprising tryptophan in said non-human organism or in the culture medium surrounding said non-human organism.

[34308] Accordingly, the present invention relates to a process for the production of tryptophan, which comprises
[34309] (a) increasing or generating the activity of a b1796-protein in the cytosol of a cell of a non-human organism or a part thereof, preferably a microorganism, a plant cell, a plant or a part thereof, as compared to a corresponding non-transformed wild type non-human organism or a part thereof; and
[34310] (b) growing the non-human organism or a part thereof under conditions which permit the production of tryptophan or a composition comprising tryptophan in said non-human organism or in the culture medium surrounding said non-human organism.

[34311] Accordingly, the present invention relates to a process for the production of tryptophan, which comprises
[34312] (a) increasing or generating the activity of a methyl-accepting chemotaxis protein in the cytosol of a cell of a non-human organism or a part thereof, preferably a microorganism, a plant cell, a plant or a part thereof, as compared to a corresponding non-transformed wild type non-human organism or a part thereof; and
[34313] (b) growing the non-human organism or a part thereof under conditions which permit the production of tryptophan or a composition comprising tryptophan in said non-human organism or in the culture medium surrounding said non-human organism.

[34314] Accordingly, the present invention relates to a process for the production of tryptophan, which comprises
[34315] (a) increasing or generating the activity of a trehalose-phosphatase in the cytosol of a cell of a non-human organism or a part thereof, preferably a microorganism, a plant cell, a plant or a part thereof, as compared to a corresponding non-transformed wild type non-human organism or a part thereof; and
[34316] (b) growing the non-human organism or a part thereof under conditions which permit the production of tryptophan or a composition comprising tryptophan in said non-human organism or in the culture medium surrounding said non-human organism.

[34317] Accordingly, the present invention relates to a process for the production of tryptophan, which comprises
[34318] (a) increasing or generating the activity of a imidazole glycerol phosphate synthase subunit in the cytosol of a cell of a non-human organism or a part thereof, preferably a microorganism, a plant cell, a plant or a part thereof, as compared to a corresponding non-transformed wild type non-human organism or a part thereof; and
[34319] (b) growing the non-human organism or a part thereof under conditions which permit the production of tryptophan or a composition comprising tryptophan in said non-human organism or in the culture medium surrounding said non-human organism.

[34320] Accordingly, the present invention relates to a process for the production of tryptophan, which comprises
[34321] (a) increasing or generating the activity of a transport protein in the cytosol of a cell of a non-human organism or a part thereof, preferably a microorganism, a plant cell, a plant or a part thereof, as compared to a corresponding non-transformed wild type non-human organism or a part thereof; and
[34322] (b) growing the non-human organism or a part thereof under conditions which permit the production of tryptophan or a composition comprising tryptophan in said non-human organism or in the culture medium surrounding said non-human organism.

[34323] Accordingly, the present invention relates to a process for the production of tryptophan, which comprises
[34324] (a) increasing or generating the activity of a ATP synthase subunit E in the cytosol of a cell of a non-human organism or a part thereof, preferably a microorganism, a plant cell, a plant or a part thereof, as compared to a corresponding non-transformed wild type non-human organism or a part thereof; and
[34325] (b) growing the non-human organism or a part thereof under conditions which permit the production of tryptophan or a composition comprising tryptophan in said non-human organism or in the culture medium surrounding said non-human organism.

[34326] Accordingly, the present invention relates to a process for the production of tryptophan, which comprises
[34327] (a) increasing or generating the activity of a putative transport system permease protein in the cytosol of a cell of a non-human organism or a part thereof, preferably a microorganism, a plant cell, a plant or a part thereof, as compared to a corresponding non-transformed wild type non-human organism or a part thereof; and
[34328] (b) growing the non-human organism or a part thereof under conditions which permit the production of tryptophan or a composition comprising tryptophan in said non-human organism or in the culture medium surrounding said non-human organism.

[34329] Accordingly, the present invention relates to a process for the production of tryptophan, which comprises
[34330] (a) increasing or generating the activity of a recombinase A in the cytosol of a cell of a non-human organism or a part thereof, preferably a microorganism, a plant cell, a plant or a part thereof, as compared to a corresponding non-transformed wild type non-human organism or a part thereof; and
[34331] (b) growing the non-human organism or a part thereof under conditions which permit the production of tryptophan or a composition comprising tryptophan in said non-human organism or in the culture medium surrounding said non-human organism.

[34332] Accordingly, the present invention relates to a process for the production of tryptophan, which comprises
[34333] (a) increasing or generating the activity of a b2739-protein in the cytosol of a cell of a non-human organism or a part thereof, preferably a microorganism, a plant cell, a plant or a part thereof, as compared to a corresponding non-transformed wild type non-human organism or a part thereof; and
[34334] (b) growing the non-human organism or a part thereof under conditions which permit the production of tryptophan or a composition comprising tryptophan in said non-human organism or in the culture medium surrounding said non-human organism.

[34335] Accordingly, the present invention relates to a process for the production of tryptophan, which comprises
[34336] (a) increasing or generating the activity of a b2849-protein in the cytosol of a cell of a non-human organism or a part thereof, preferably a microorganism, a plant cell, a plant or a part thereof, as compared to a corresponding non-transformed wild type non-human organism or a part thereof; and
[34337] (b) growing the non-human organism or a part thereof under conditions which permit the production of tryptophan or a composition comprising tryptophan in said non-human organism or in the culture medium surrounding said non-human organism.

[34338] Accordingly, the present invention relates to a process for the production of tryptophan, which comprises
[34339] (a) increasing or generating the activity of a fimbrial-like protein in the cytosol of a cell of a non-human organism or a part thereof, preferably a microorganism, a plant cell, a plant or a part thereof, as compared to a corresponding non-transformed wild type non-human organism or a part thereof; and
[34340] (b) growing the non-human organism or a part thereof under conditions which permit the production of tryptophan or a composition comprising tryptophan in said non-human organism or in the culture medium surrounding said non-human organism.

[34341] Accordingly, the present invention relates to a process for the production of tryptophan, which comprises
[34342] (a) increasing or generating the activity of a methyltransferase in the cytosol of a cell of a non-human organism or a part thereof, preferably a microorganism, a plant cell, a plant or a part thereof, as compared to a corresponding non-transformed wild type non-human organism or a part thereof; and
[34343] (b) growing the non-human organism or a part thereof under conditions which permit the production of tryptophan or a composition comprising tryptophan in said non-human organism or in the culture medium surrounding said non-human organism.

[34344] Accordingly, the present invention relates to a process for the production of tryptophan, which comprises
[34345] (a) increasing or generating the activity of a 3-ketoacyl-CoA thiolase in the cytosol of a cell of a non-human organism or a part thereof, preferably a microorganism, a plant cell, a plant or a part thereof, as compared to a corresponding non-transformed wild type non-human organism or a part thereof; and
[34346] (b) growing the non-human organism or a part thereof under conditions which permit the production of tryptophan or a composition comprising tryptophan in said non-human organism or in the culture medium surrounding said non-human organism.

[34347] Accordingly, the present invention relates to a process for the production of tryptophan, which comprises
[34348] (a) increasing or generating the activity of a glutamine synthetase in the cytosol of a cell of a non-human organism or a part thereof, preferably a microorganism, a plant cell, a plant or a part thereof, as compared to a corresponding non-transformed wild type non-human organism or a part thereof; and
[34349] (b) growing the non-human organism or a part thereof under conditions which permit the production of tryptophan or a composition comprising tryptophan in said non-human organism or in the culture medium surrounding said non-human organism.

[34350] Accordingly, the present invention relates to a process for the production of tryptophan, which comprises
[34351] (a) increasing or generating the activity of a b3989-protein in the cytosol of a cell of a non-human organism or a part thereof, preferably a microorganism, a plant cell, a plant or a part thereof, as compared to a corresponding non-transformed wild type non-human organism or a part thereof; and
[34352] (b) growing the non-human organism or a part thereof under conditions which permit the production of tryptophan or a composition comprising tryptophan in said non-human organism or in the culture medium surrounding said non-human organism.

[34353] Accordingly, the present invention relates to a process for the production of tryptophan, which comprises
[34354] (a) increasing or generating the activity of a b4029-protein in the cytosol of a cell of a non-human organism or a part thereof, preferably a microorganism, a plant cell, a plant or a part thereof, as compared to a corresponding non-transformed wild type non-human organism or a part thereof; and
[34355] (b) growing the non-human organism or a part thereof under conditions which permit the production of tryptophan or a composition comprising tryptophan in said non-human organism or in the culture medium surrounding said non-human organism.

[34356] Accordingly, the present invention relates to a process for the production of tryptophan, which comprises
[34357] (a) increasing or generating the activity of a b4121-protein in the cytosol of a cell of a non-human organism or a part thereof, preferably a microorganism, a plant cell, a plant or a part thereof, as compared to a corresponding non-transformed wild type non-human organism or a part thereof; and
[34358] (b) growing the non-human organism or a part thereof under conditions which permit the production of tryptophan or a composition comprising tryptophan in said non-human organism or in the culture medium surrounding said non-human organism.

[34359] Accordingly, the present invention relates to a process for the production of tryptophan, which comprises
[34360] (a) increasing or generating the activity of a acetyltransferase in the cytosol of a cell of a non-human organism or a part thereof, preferably a microorganism, a plant cell, a plant or a part thereof, as compared to a corresponding non-transformed wild type non-human organism or a part thereof; and
[34361] (b) growing the non-human organism or a part thereof under conditions which permit the production of tryptophan or a composition comprising tryptophan in said non-human organism or in the culture medium surrounding said non-human organism.

[34362] Accordingly, the present invention relates to a process for the production of tryptophan, which comprises
[34363] (a) increasing or generating the activity of a RNA binding protein in the cytosol of a cell of a non-human organism or a part thereof, preferably a microorganism, a plant cell, a plant or a part thereof, as compared to a corresponding non-transformed wild type non-human organism or a part thereof; and
[34364] (b) growing the non-human organism or a part thereof under conditions which permit the production of tryptophan or a composition comprising tryptophan in said non-human organism or in the culture medium surrounding said non-human organism.

[34365] Accordingly, the present invention relates to a process for the production of tryptophan, which comprises
[34366] (a) increasing or generating the activity of a transcription factor in the cytosol of a cell of a non-human organism or a part thereof, preferably a microorganism, a plant cell, a plant or a part thereof, as compared to a corresponding non-transformed wild type non-human organism or a part thereof; and
[34367] (b) growing the non-human organism or a part thereof under conditions which permit the production of tryptophan or a composition comprising tryptophan in said non-human organism or in the culture medium surrounding said non-human organism.

[34368] Accordingly, the present invention relates to a process for the production of tryptophan, which comprises
[34369] (a) increasing or generating the activity of a choline kinase in the cytosol of a cell of a non-human organism or a part thereof, preferably a microorganism, a plant cell, a plant or a part thereof, as compared to a corresponding non-transformed wild type non-human organism or a part thereof; and
[34370] (b) growing the non-human organism or a part thereof under conditions which permit the production of tryptophan or a composition comprising tryptophan in said non-human organism or in the culture medium surrounding said non-human organism.

[34371] Accordingly, the present invention relates to a process for the production of tryptophan, which comprises
[34372] (a) increasing or generating the activity of a flavodoxin in the cytosol of a cell of a non-human organism or a part thereof, preferably a microorganism, a plant cell, a plant or a part thereof, as compared to a corresponding non-transformed wild type non-human organism or a part thereof; and
[34373] (b) growing the non-human organism or a part thereof under conditions which permit the production of tryptophan or a composition comprising tryptophan in said non-human organism or in the culture medium surrounding said non-human organism.

[34374] Accordingly, the present invention relates to a process for the production of tryptophan, which comprises
[34375] (a) increasing or generating the activity of a NAD(P)H-quinone oxidoreductase subunit in the cytosol of a cell of a non-human organism or a part thereof, preferably a microorganism, a plant cell, a plant or a part thereof, as compared to a corresponding non-transformed wild type non-human organism or a part thereof; and
[34376] (b) growing the non-human organism or a part thereof under conditions which permit the production of tryptophan or a composition comprising tryptophan in said non-human organism or in the culture medium surrounding said non-human organism.

[34377] Accordingly, the present invention relates to a process for the production of tryptophan, which comprises
[34378] (a) increasing or generating the activity of a binding-protein-dependent transport systems inner membrane component in the cytosol of a cell of a non-human organism or a part thereof, preferably a microorganism, a plant cell, a plant or a part thereof, as compared to a corresponding non-transformed wild type non-human organism or a part thereof; and
[34379] (b) growing the non-human organism or a part thereof under conditions which permit the production of tryptophan or a composition comprising tryptophan in said non-human organism or in the culture medium surrounding said non-human organism.

[34380] Accordingly, the present invention relates to a process for the production of tryptophan, which comprises
[34381] (a) increasing or generating the activity of a carbon dioxide concentrating mechanism protein in the cytosol of a cell of a non-human organism or a part thereof, preferably a microorganism, a plant cell, a plant or a part thereof, as compared to a corresponding non-transformed wild type non-human organism or a part thereof; and
[34382] (b) growing the non-human organism or a part thereof under conditions which permit the production of tryptophan or a composition comprising tryptophan in said non-human organism or in the culture medium surrounding said non-human organism.

[34383] Accordingly, the present invention relates to a process for the production of tryptophan, which comprises
[34384] (a) increasing or generating the activity of a nitrate/nitrite transport protein in the cytosol of a cell of a non-human organism or a part thereof, preferably a microorganism, a plant cell, a plant or a part thereof, as compared to a corresponding non-transformed wild type non-human organism or a part thereof; and
[34385] (b) growing the non-human organism or a part thereof under conditions which permit the production of tryptophan or a composition comprising tryptophan in said non-human organism or in the culture medium surrounding said non-human organism.

[34386] Accordingly, the present invention relates to a process for the production of tryptophan, which comprises
[34387] (a) increasing or generating the activity of a coproporphyrinogen III oxidase in the cytosol of a cell of a non-human organism or a part thereof, preferably a microorganism, a plant cell, a plant or a part thereof, as compared to a corresponding non-transformed wild type non-human organism or a part thereof; and
[34388] (b) growing the non-human organism or a part thereof under conditions which permit the production of tryptophan or a composition comprising tryptophan in said non-human organism or in the culture medium surrounding said non-human organism.

[34389] Accordingly, the present invention relates to a process for the production of tryptophan, which comprises
[34390] (a) increasing or generating the activity of a precorrin methylase in the cytosol of a cell of a non-human organism or a part thereof, preferably a microorganism, a plant cell, a plant or a part thereof, as compared to a corresponding non-transformed wild type non-human organism or a part thereof; and
[34391] (b) growing the non-human organism or a part thereof under conditions which permit the production of tryptophan or a composition comprising tryptophan in said non-human organism or in the culture medium surrounding said non-human organism.

[34392] Accordingly, the present invention relates to a process for the production of tryptophan, which comprises
[34393] (a) increasing or generating the activity of a malate dehydrogenase in the cytosol of a cell of a non-human organism or a part thereof, preferably a microorganism, a plant cell, a plant or a part thereof, as compared to a corresponding non-transformed wild type non-human organism or a part thereof; and
[34394] (b) growing the non-human organism or a part thereof under conditions which permit the production of tryptophan or a composition comprising tryptophan in said non-human organism or in the culture medium surrounding said non-human organism.

[34395] Accordingly, the present invention relates to a process for the production of tryptophan, which comprises
[34396] (a) increasing or generating the activity of a geranylgeranyl pyrophosphate synthase in the cytosol of a cell of a non-human organism or a part thereof, preferably a microorganism, a plant cell, a plant or a part thereof, as compared to a corresponding non-transformed wild type non-human organism or a part thereof; and
[34397] (b) growing the non-human organism or a part thereof under conditions which permit the production of tryptophan or a composition comprising tryptophan in said non-human organism or in the culture medium surrounding said non-human organism.

[34398] Accordingly, the present invention relates to a process for the production of tryptophan, which comprises
[34399] (a) increasing or generating the activity of a slr1107-protein in the cytosol of a cell of a non-human organism or a part thereof, preferably a microorganism, a plant cell, a plant or a part thereof, as compared to a corresponding non-transformed wild type non-human organism or a part thereof; and
[34400] (b) growing the non-human organism or a part thereof under conditions which permit the production of tryptophan or a composition comprising tryptophan in said non-human organism or in the culture medium surrounding said non-human organism.

[34401] Accordingly, the present invention relates to a process for the production of tryptophan, which comprises
[34402] (a) increasing or generating the activity of a photosystem II protein in the cytosol of a cell of a non-human organism or a part thereof, preferably a microorganism, a plant cell, a plant or a part thereof, as compared to a corresponding non-transformed wild type non-human organism or a part thereof; and
[34403] (b) growing the non-human organism or a part thereof under conditions which permit the production of tryptophan or a composition comprising tryptophan in said non-human organism or in the culture medium surrounding said non-human organism.

[34404] Accordingly, the present invention relates to a process for the production of tryptophan, which comprises
[34405] (a) increasing or generating the activity of a short-chain alcohol dehydrogenase family in the cytosol of a cell of a non-human organism or a part thereof, preferably a microorganism, a plant cell, a plant or a part thereof, as compared to a corresponding non-transformed wild type non-human organism or a part thereof; and
[34406] (b) growing the non-human organism or a part thereof under conditions which permit the production of tryptophan or a composition comprising tryptophan in said non-human organism or in the culture medium surrounding said non-human organism.

[34407] Accordingly, the present invention relates to a process for the production of tryptophan, which comprises
[34408] (a) increasing or generating the activity of a Sec-independent protein translocase subunit in the cytosol of a cell of a non-human organism or a part thereof, preferably a microorganism, a plant cell, a plant or a part thereof, as compared to a corresponding non-transformed wild type non-human organism or a part thereof; and
[34409] (b) growing the non-human organism or a part thereof under conditions which permit the production of tryptophan or a composition comprising tryptophan in said non-human organism or in the culture medium surrounding said non-human organism.

[34410] Accordingly, the present invention relates to a process for the production of tryptophan, which comprises
[34411] (a) increasing or generating the activity of a 3-deoxy-7-phosphoheptulonate synthase in the cytosol of a cell of a non-human organism or a part thereof, preferably a microorganism, a plant cell, a plant or a part thereof, as compared to a corresponding non-transformed wild type non-human organism or a part thereof; and
[34412] (b) growing the non-human organism or a part thereof under conditions which permit the production of tryptophan or a composition comprising tryptophan in said non-human organism or in the culture medium surrounding said non-human organism.

[34413] Accordingly, the present invention relates to a process for the production of tryptophan, which comprises
[34414] (a) increasing or generating the activity of a branched-chain amino acid permease in the cytosol of a cell of a non-human organism or a part thereof, preferably a microorganism, a plant cell, a plant or a part thereof, as compared to a corresponding non-transformed wild type non-human organism or a part thereof; and
[34415] (b) growing the non-human organism or a part thereof under conditions which permit the production of tryptophan or a composition comprising tryptophan in said non-human organism or in the culture medium surrounding said non-human organism.

[34416] Accordingly, the present invention relates to a process for the production of tryptophan, which comprises
[34417] (a) increasing or generating the activity of a yfl054c-protein in the cytosol of a cell of a non-human organism or a part thereof, preferably a microorganism, a plant cell, a plant or a part thereof, as compared to a corresponding non-transformed wild type non-human organism or a part thereof; and
[34418] (b) growing the non-human organism or a part thereof under conditions which permit the production of tryptophan or a composition comprising tryptophan in said non-human organism or in the culture medium surrounding said non-human organism.

[34419] Accordingly, the present invention relates to a process for the production of tryptophan, which comprises
[34420] (a) increasing or generating the activity of a glycerol kinase in the cytosol of a cell of a non-human organism or a part thereof, preferably a microorganism, a plant cell, a plant or a part thereof, as compared to a corresponding non-transformed wild type non-human organism or a part thereof; and
[34421] (b) growing the non-human organism or a part thereof under conditions which permit the production of tryptophan or a composition comprising tryptophan in said non-human organism or in the culture medium surrounding said non-human organism.

[34422] Accordingly, the present invention relates to a process for the production of tryptophan, which comprises
[34423] (a) increasing or generating the activity of a aromatic amino acid aminotransferase in the cytosol of a cell of a non-human organism or a part thereof, preferably a microorganism, a plant cell, a plant or a part thereof, as compared to a corresponding non-transformed wild type non-human organism or a part thereof; and
[34424] (b) growing the non-human organism or a part thereof under conditions which permit the production of tryptophan or a composition comprising tryptophan in said non-human organism or in the culture medium surrounding said non-human organism.

[34425] Accordingly, the present invention relates to a process for the production of tryptophan, which comprises
[34426] (a) increasing or generating the activity of a cystathionine gamma-synthase in the cytosol of a cell of a non-human organism or a part thereof, preferably a microorganism, a plant cell, a plant or a part thereof, as compared to a corresponding non-transformed wild type non-human organism or a part thereof; and
[34427] (b) growing the non-human organism or a part thereof under conditions which permit the production of tryptophan or a composition comprising tryptophan in said non-human organism or in the culture medium surrounding said non-human organism.

[34428] Accordingly, the present invention relates to a process for the production of tryptophan, which comprises
[34429] (a) increasing or generating the activity of a polygalacturonase in the cytosol of a cell of a non-human organism or a part thereof, preferably a microorganism, a plant cell, a plant or a part thereof, as compared to a corresponding non-transformed wild type non-human organism or a part thereof; and
[34430] (b) growing the non-human organism or a part thereof under conditions which permit the production of tryptophan or a composition comprising tryptophan in said non-human organism or in the culture medium surrounding said non-human organism.

[34431] Accordingly, the present invention relates to a process for the production of tryptophan, which comprises
[34432] (a) increasing or generating the activity of a lipase in the cytosol of a cell of a non-human organism or a part thereof, preferably a microorganism, a plant cell, a plant or a part thereof, as compared to a corresponding non-transformed wild type non-human organism or a part thereof; and
[34433] (b) growing the non-human organism or a part thereof under conditions which permit the production of tryptophan or a composition comprising tryptophan in said non-human organism or in the culture medium surrounding said non-human organism.

[34434] Accordingly, the present invention relates to a process for the production of tryptophan, which comprises
[34435] (a) increasing or generating the activity of a amino acid transporter in the cytosol of a cell of a non-human organism or a part thereof, preferably a microorganism, a plant cell, a plant or a part thereof, as compared to a corresponding non-transformed wild type non-human organism or a part thereof; and
[34436] (b) growing the non-human organism or a part thereof under conditions which permit the production of tryptophan or a composition comprising tryptophan in said non-human organism or in the culture medium surrounding said non-human organism.

[34437] Accordingly, the present invention relates to a process for the production of tryptophan, which comprises
[34438] (a) increasing or generating the activity of a histone acetyltransferase in the cytosol of a cell of a non-human organism or a part thereof, preferably a microorganism, a plant cell, a plant or a part thereof, as compared to a corresponding non-transformed wild type non-human organism or a part thereof; and
[34439] (b) growing the non-human organism or a part thereof under conditions which permit the production of tryptophan or a composition comprising tryptophan in said non-human organism or in the culture medium surrounding said non-human organism.

[34440] Accordingly, the present invention relates to a process for the production of tryptophan, which comprises
[34441] (a) increasing or generating the activity of a isopentenyl diphosphate isomerase in the cytosol of a cell of a non-human organism or a part thereof, preferably a microorganism, a plant cell, a plant or a part thereof, as compared to a corresponding non-transformed wild type non-human organism or a part thereof; and
[34442] (b) growing the non-human organism or a part thereof under conditions which permit the production of tryptophan or a composition comprising tryptophan in said non-human organism or in the culture medium surrounding said non-human organism.

[34443] Accordingly, the present invention relates to a process for the production of tryptophan, which comprises
[34444] (a) increasing or generating the activity of a cyclin in the cytosol of a cell of a non-human organism or a part thereof, preferably a microorganism, a plant cell, a plant or a part thereof, as compared to a corresponding non-transformed wild type non-human organism or a part thereof; and
[34445] (b) growing the non-human organism or a part thereof under conditions which permit the production of tryptophan or a composition comprising tryptophan in said non-human organism or in the culture medium surrounding said non-human organism.

[34446] Accordingly, the present invention relates to a process for the production of tryptophan, which comprises
[34447] (a) increasing or generating the activity of a Zm_{—}4842_BE510522-protein in the cytosol of a cell of a non-human organism or a part thereof, preferably a microorganism, a plant cell, a plant or a part thereof, as compared to a corresponding non-transformed wild type non-human organism or a part thereof; and
[34448] (b) growing the non-human organism or a part thereof under conditions which permit the production of tryptophan or a composition comprising tryptophan in said non-human organism or in the culture medium surrounding said non-human organism.

[34449] Accordingly, the present invention relates to a process for the production of tryptophan, which comprises
[34450] (a) increasing or generating the activity of a polypeptide comprising a polypeptide as depicted in the respective line in column 5 or 8 of Table II, application no. 5, or a homolog or a fragment thereof, a consensus sequence or at least one polypeptide motif as depicted in the respective line in column 8 of Table IV, application no. 5; or increasing or generating the activity of an expression product of one or more nucleic acid molecule(s) comprising a polynucleotide as depicted in the respective line in column 5 or 8 of Table I, application no. 5, preferably the coding region thereof, or a homolog or a fragment thereof;
[34451] in the cytosol of a cell of a non-human organism or a part thereof; preferably a microorganism, a plant cell, a plant or a part thereof, as compared to a corresponding non-transformed wild type non-human organism or a part thereof; and
[34452] (b) growing the non-human organism under conditions which permit the production of tryptophan, or a composition comprising tryptophan in said non-human organism or in the culture medium surrounding said non-human organism.

[34453] In a further embodiment the activity of the polypeptide comprising a polypeptide as depicted in the respective line in column 5 or 8 of Table II, application no. 5, or a homolog or a fragment thereof, a consensus sequence or at least one polypeptide motif as depicted in the respective line in column 8 of Table IV, application no. 5, is increased or generated non-targeted in the above-mentioned process in a microorganism or plant or a part thereof.

[34454] In a further embodiment said polypeptide has the activity of the respective polypeptide represented by a protein comprising a polypeptide as depicted in the respective line in column 5 of Table II, application no. 5.

[34455] In a further embodiment the activity of the expression product of one or more nucleic acid molecule(s) comprising a polynucleotide as depicted in the respective line in column 5 or 8 of Table I, application no. 5, preferably the coding region thereof, or a homolog or a fragment thereof, is increased or generated non-targeted in the above-mentioned process in a microorganism or plant or a part thereof.

[34456] In a further embodiment the activity of the polypeptide comprising a polypeptide as depicted in the respective line in column 5 or 8 of Table II, application no. 5, or a homolog or a fragment thereof, a consensus sequence or at least one polypeptide motif as depicted in the respective line in column 8 of Table IV, application no. 5, is increased or generated in the above-mentioned process in an organelle preferably in plastids or mitochondria, especially in plastids, of a microorganism or plant.

[34457] In a further embodiment said polypeptide has the activity of the respective polypeptide represented by a protein comprising a polypeptide as depicted in the respective line in column 5 of Table II, application no. 5.

[34458] In a further embodiment the activity of the expression product of one or more nucleic acid molecule(s) comprising a polynucleotide as depicted in the respective line in column 5 or 8 of Table I, application no. 5, preferably the coding region thereof, or a homolog or a fragment thereof, is increased or generated in the above-mentioned process in an organelle, preferably in plasids or mitochondria, especially in plastids, of a microorganism or plant.

[34459] In a further embodiment the activity of the polypeptide comprising a polypeptide as depicted in the respective line in column 5 or 8 of Table II, application no. 5, or a homolog or a fragment thereof, a consensus sequence or at least one polypeptide motif as depicted in the respective line in column 8 of Table IV, application no. 5, is increased or generated in the above-mentioned process in the cyctosol of a cell, of a microorganism or plant.

[34460] In a further embodiment said polypeptide has the activity of the respective polypeptide represented by a protein comprising a polypeptide as depicted in the respective line in column 5 of Table II, application no. 5.

[34461] In a further embodiment the activity of the expression product of one or more nucleic acid molecule(s) comprising a polynucleotide as depicted in the respective line in column 5 or 8 of Table I, application no. 5, preferably the coding region thereof, or a homolog or a fragment thereof, is increased or generated in the above-mentioned process in the cytosol of a cell, of a microorganism or plant.

[34462] [0039.1.1.5] to [0066.1.1.5] for the disclosure of these paragraphs see [0039.1.1.1] to [0066.1.1.1] above.

[34463] As mentioned above the nucleic acid sequences coding for the proteins as shown in Table II, application no. 5, column 5 or 8, or homologs or fragments thereof, are joined to a nucleic acid sequence encoding a plastidic transit peptide, e.g, if for the nucleic acid molecule in Table I, column 6 the term “plastidic” is indicated. This nucleic acid sequence encoding a transit peptide ensures transport of the protein to the organelle. The nucleic acid sequence of the gene to be expressed and the nucleic acid sequence encoding the transit peptide are operably linked. Therefore the transit peptide encoding sequence is fused in frame to the nucleic acid sequence coding for proteins as shown in Table II, application no. 5, column 5 or 8, or homologs or fragments thereof, e.g., if for the nucleic acid molecule in Table I, column 6 the term “plastidic” is indicated.

[34464] [0068.1.1.5] to [0072.1.1.5] for the disclosure of these paragraphs see [0068.1.1.1] to [0072.1.1.1] above.

[34465] As mentioned above the nucleic acid sequences coding for the proteins as shown in the respective line in Table II, application no. 5, column 5 or 8, or homologs or fragments thereof, are joined to a nucleic acid sequence encoding a mitochondric transit peptide, e.g., if for the respective nucleic acid molecule in Table I, column 6 the term “mitochondrial” is indicated. This nucleic acid sequence encoding a transit peptide ensures transport of the protein to the organelle. The nucleic acid sequence of the gene to be expressed and the nucleic acid sequence encoding the transit peptide are operably linked. Therefore the transit peptide encoding sequence is fused in frame to the nucleic acid sequence coding for proteins as shown in the respective line in Table II, application no. 5, column 5 or 8, or homologs or fragments thereof, e.g., if for the nucleic acid molecule in the respective line in Table I, column 6 the term “mitochondrial” is indicated. (For the avoidance of doubt, the term “mitochondric” and “mitochondrial” are interchangeable.)

[34466] [0074.1.1.5] to [0075.1.1.5] for the disclosure of these paragraphs see [0074.1.1.1] to [0075.1.1.1] above

[34467] Nucleic acid sequences coding for the transit peptides may be chemically synthesized either in part or wholly according to structure of transit peptide sequences disclosed in the prior art. Said natural or chemically synthesized sequences can be directly linked to the sequences encoding the mature protein or via a linker nucleic acid sequence, which may be typically less than 500 base pairs, preferably less than 450, 400, 350, 300, 250 or 200 base pairs, more preferably less than 150, 100, 90, 80, 70, 60, 50, 40 or 30 base pairs and most preferably less than 25, 20, 15, 12, 9, 6 or 3 base pairs in length and are in frame to the coding sequence. Furthermore favorable nucleic acid sequences encoding transit peptides may comprise sequences derived from more than one biological and/or chemical source and may include a nucleic acid sequence derived from the amino-terminal region of the mature protein, which in its native state is linked to the transit peptide. In a preferred embodiment of the invention said amino-terminal region of the mature protein is typically less than 150 amino acids, preferably less than 140, 130, 120, 110, 100 or 90 amino acids, more preferably less than 80, 70, 60, 50, 40, 35, 30, 25 or 20 amino acids and most preferably less than 19, 18, 17, 16, 15, 14, 13, 12, 11 or 10 amino acids in length. But even shorter or longer stretches are also possible. In addition target sequences, which facilitate the transport of proteins to other cell compartments such as the vacuole, endoplasmic reticulum, golgi complex, glyoxysomes, peroxisomes, mitochondria (in case of a plastidal transit peptide) or plastids, especially chloroplasts (in case of a mitochondric transit peptide) may be also part of the inventive nucleic acid sequence. The proteins translated from said inventive nucleic acid sequences are a kind of fusion proteins that means the nucleic acid sequences encoding the plastidal transit peptide for example the ones shown in Table a, preferably the last one of the Table a are joint to the respective nucleic acid sequences shown in Table I, application no. 5, columns 5 or 8, especially the coding region thereof, or homologs or fragments thereof, in case of nucleic acid sequences being expressed in plastids, and that means the nucleic acid sequences encoding the mitochondric transit peptide for example the ones shown in Table b, preferably the last one of the Table b are joint to the respective nucleic acid sequences shown in Table I, application no. 5, columns 5 or 8, especially the coding region thereof, or homologs or fragments thereof, in case of nucleic acid sequences being expressed in mitochondria. The person skilled in the art is able to join said sequences in a functional manner. Advantageously the transit peptide part is cleaved off from the protein part shown in Table II, application no. 5, columns 5 or 8, or a homolog or fragment thereof, during or after the transport into the organelles, preferably into the plastids or mitochondria, respectively.

[34468] All products of the cleavage of the preferred transit peptide shown in the last line of Table a have preferably the N-terminal amino acid sequences QIA CSS or QIA EFQLTT in front of the start methionine of the respective protein mentioned in Table II, application no. 5, column 5 or 8. or homologs or fragments thereof. Other short amino acid sequences of an range of 1 to 20 amino acids preferable 2 to 15 amino acids, more preferable 3 to 10 amino acids most preferably 4 to 8 amino acids are also possible in front of the start methionine of the protein mentioned in Table II, application no. 5, columns 5 or 8, or homologs or fragments thereof. In case of the amino acid sequence QIA CSS the three amino acids in front of the start methionine are stemming from the LIC (=ligatation independent cloning) cassette. Said short amino acid sequence is preferred in the case of the expression of E. coli genes. In case of the amino acid sequence QIA EFQLTT the six amino acids in front of the start methionine are stemming from the LIC cassette. Said short amino acid sequence is preferred in the case of the expression of S. cerevisiae genes. The skilled worker knowns that other short sequences are also useful in the expression of the respective nucleic acid molecule comprising a polynucleotide as depicted in Table I, application no. 5, column 5 or 8, preferably the coding region thereof, or a homolog or a fragment thereof. Furthermore the skilled worker is aware of the fact that there is not a need for such short sequences in the expression of the genes.

[34469] [0077.1.1.5]to [0078.1.1.5] for the disclosure of these paragraphs see [0077.1.1.1] to [0078.1.1.1] above.

[34470] Alternatively to the targeting of the respective sequences shown in Table II, application no. 5, columns 5 or 8, or homologs or fragments thereof, preferably of sequences in general encoded in the nucleus with the aid of the targeting sequences mentioned for example in Table a alone, Table b alone, or in combination with other targeting sequences preferably into plastids or mitochondria, respectively, the nucleic acids of the invention can directly be introduced into the plastidal or mitochondrial genome. Therefore in a preferred embodiment the respective nucleic acid sequences shown in the respective line in Table I, application no. 5, columns 5 or 8, preferably the coding region thereof, or homologs or fragments thereof, are directly introduced and expressed in plastids e.g., if for the nucleic acid molecule in the respective line in Table I, column 6, the term “plastidic” is indicated, or are directly introduced and expressed in mitochondria e.g., if for the nucleic acid molecule in the respective line in Table I, column 6 the term “mitochondrial” is indicated.

[34471] The term “introduced” in the context of this specification shall mean the insertion of a nucleic acid sequence into the organism by means of a “transfection”, “transduction” or preferably by “transformation”.

[34472] A plastid, such as a chloroplast, or a mitochondrion, has been “transformed” by an exogenous (preferably foreign) nucleic acid sequence if a nucleic acid sequence has been introduced into the plastid or mitochondrion that means that this sequence has crossed the membrane or the membranes of the plastid or of the mitochondrion. The exogenous, preferably foreign, DNA may be integrated (covalently linked) into plastid or mitochondrial DNA making up the genome of the plastid or mitochondrion, or it may remain unintegrated (e.g., by including a chloroplast origin of replication). “Stably” integrated DNA sequences are those, which are inherited through plastid or mitochondrion replication, thereby transferring new plastids or mitochondria, with the features of the integrated DNA sequence to the progeny.

[34473] [0080.1.1.5] to [0083.1.1.5] for the disclosure of these paragraphs see [0080.1.1.1] to [0083.1.1.1] above.

[34474] For the process of the present invention it may be of great advantage that by transforming the plastids the intraspecies specific transgene flow is blocked, because a lot of species such as corn, cotton and rice have a strict maternal inheritance of plastids. By placing the respective genes specified in the respective line in Table I, application no. 5, columns 5 or 8, preferably the coding region, or homologs or fragments thereof, e.g. if for the nucleic acid molecule in the respective line in column 6 of Table I the term “plastidic” is indicated, in the plastids of plants, these genes will not be present in the pollen of said plants.

[34475] A further preferred embodiment of the invention relates to the use of so called “chloroplast localization sequences”, in which a first RNA sequence or molecule is capable of transporting or “chaperoning” a second RNA sequence, such as a RNA sequence transcribed from the sequences depicted in the respective line in Table I, application no. 5, columns 5 or 8, preferably the coding region thereof, or a homolog or a fragment thereof, or a sequence encoding a protein, as depicted in the respective line in Table II, application no. 5, columns 5 and 8, or a homolog or a fragment thereof, from an external environment inside a cell or outside a plastid into a chloroplast. In one embodiment the chloroplast localization signal is substantially similar or complementary to a complete or intact viroid sequence. The chloroplast localization signal may be encoded by a DNA sequence, which is transcribed into the chloroplast localization RNA. The term “viroid” refers to a naturally occurring single stranded RNA molecule (Flores, C. R. Acad. Sci. III. 324 (10), 943 (2001)). Viroids usually contain about 200-500 nucleotides and generally exist as circular molecules. Examples of viroids that contain chloroplast localization signals include but are not limited to ASBVd, PLMVd, CChMVd and ELVd. The viroid sequence or a functional part of it can be fused to the sequences depicted in the respective line in Table I, application no. 5, columns 5 or 8, preferably the coding region thereof, or a homolog or a fragment thereof, or a sequence encoding a protein, as depicted in the respective line in Table II, application no. 5, columns 5 or 8, or a homolog or a fragment thereof, in such a manner that the viroid sequence transports a sequence transcribed from a sequence as depicted in the respective line in Table I, application no. 5 columns 5 or 8, preferably the coding region thereof, or a homolog or a fragment thereof, or a sequence encoding a protein as depicted in the respective line in Table II, application no. 5 columns 5 or 8, or a homolog or a fragment thereof, into the chloroplasts, e.g. if for the nucleic acid molecule in column 6 of Table I the term “plastidic” is indicated. A preferred embodiment uses a modified ASBVd (Navarro et al., Virology. 268 (1), 218 (2000)).

[34476] In a further specific embodiment the protein to be expressed in the plastids such as the proteins depicted in the respective line in Table II, application no. 5, columns 5 or 8, or a homolog or a fragment thereof, e.g. if for the nucleic acid molecule in the respective line in column 6 of Table I the term “plastidic” is indicated, are encoded by different nucleic acids. Such a method is disclosed in WO 2004/040973, which shall be incorporated by reference. WO 2004/040973 teaches a method, which relates to the translocation of an RNA corresponding to a gene or gene fragment into the chloroplast by means of a chloroplast localization sequence. The genes, which should be expressed in the plant or plant cells, are split into nucleic acid fragments, which are introduced into different compartments in the plant e.g. the nucleus, the plastids and/or mitochondria. Additionally plant cells are described in which the chloroplast contains a ribozyme fused at one end to an RNA encoding a fragment of a protein used in the inventive process such that the ribozyme can trans-splice the translocated fusion RNA to the RNA encoding the gene fragment to form and as the case may be reunite the nucleic acid fragments to an intact mRNA encoding a functional protein for example as disclosed in the respective line in Table II, application no. 5, columns 5 or 8, or a homolog or a fragment thereof.

[34477] In a preferred embodiment of the invention the nucleic acid sequences as shown in the respective line in Table I, application no. 5, columns 5 or 8, preferably the coding region thereof, or homologs or fragments thereof, e.g. if for the nucleic acid molecule in the respective line in column 6 of Table I the term “plastidic” is indicated, used in the inventive process are transformed into plastids, which are metabolically active. Those plastids should preferably maintain at a high copy number in the plant or plant tissue of interest, most preferably the chloroplasts found in green plant tissues, such as leaves or cotyledons or in seeds.

[34478] For a good expression in the plastids the nucleic acid sequences as shown in the respective line in Table I, application no. 5, columns 5 or 8, preferably the coding region thereof, or homologs or fragments thereof, e.g. if for the nucleic acid molecule in the respective line in column 6 of Table I the term “plastidic” is indicated, are introduced into an expression cassette using preferably a promoter and terminater, which are active in plastids preferably a chloroplast promoter. Examples of such promoters include the psbA promoter from the gene from spinach or pea, the rbcL promoter, and the atpB promoter from corn.

[34479] [0089.1.1.5] to [0092.1.1.5] for the disclosure of these paragraphs see [0089.1.1.1] to [0092.1.1.1] above.

[34480] Advantageously the process for the production of the fine chemical tryptophan leads to an enhanced production of the respective fine chemical. The terms “enhanced” or “increase” mean at least a 10%, 20%, 30%, 40% or 50%, preferably at least 60%, 70%, 80%, 90% or 100%, more preferably 150%, 200%, 300%, 400% or 500% higher production of the respective fine chemical tryptophan in comparison to the wild-type as defined above, e.g. that means in comparison to a non-human organism without the aforementioned modification of the activity of a protein as shown in the respective line in Table II, application no. 5, column 5 or 8, or a fragment or a homolog thereof. The modification of the activity of a protein as shown in the respective line in Table II, application no. 5, column 5 or 8, or a homolog or a fragment thereof, or their combination can be achieved by joining the protein to a respective transit peptide, e.g. if for the respective encoding nucleic acid molecule in column 6 of Table I the term “plastidic” or “mitochondrial” is indicated.

[34481] Surprisingly it was found, that the transgenic expression of a protein as shown in the respective line in Table II, application no. 5, column 5, especially from the Saccaromyces cerevisiae, E. coli, Arabidopsis thaliana, Azotobacter vinelandii, Brassica napus, Glycine max, Oryza sativa, Physcomitrella patens, Synechocystis sp., Thermus thermophilus, Zea mays in a non-human organism, like a plant or a part thereof, such as Arabidopsis thaliana for example, or a microorganism, conferred a production of or an increase in tryptophan,respectively, to the transgenic non-human organism as compared to a corresponding non-transformed wild type.

[34482] In one embodiment the transgenic expression of a protein as shown in the respective line in Table II, application no. 4, column 5 or 8, or a homolog or a fragment thereof, especially from the Saccaromyces cerevisiae, E. coli, Arabidopsis thaliana, Azotobacter vinelandii, Brassica napus, Glycine max, Oryza sativa, Physcomitrella patens, Synechocystis sp., Thermus thermophilus, Zea mays in a non-human organism, like a plant or a part thereof, such as Arabidopsis thaliana for example, or a microorganism, conferred a production of or an increase in threonine,respectively, to the transgenic non-human organism as compared to a corresponding non-transformed wild type.

[34483] Accordingly, in one embodiment, an increase of tryptophan in a non-human organism, as compared to a corresponding non-transformed wild type non-human organism, is conferred in the process of the invention, if the activity of a polypeptide showing the activity of a glucose-6-phosphate 1-dehydrogenase, or if the activity of the polypeptide 59582753_SOYBEAN, preferably represented by SEQ ID NO. 16884, or a homolog or fragment thereof, or if the activity of a polypeptide encoded by a nucleic acid molecule comprising the nucleic acid SEQ ID NO. 16883, preferably the coding region thereof, or a homolog or fragment thereof, e.g. derived from Glycine max, is increased or generated. For example the activity of a nucleic acid molecule or a polypeptide comprising the nucleic acid, preferably the coding region thereof, or polypeptide or the consensus sequence or the polypeptide motif, as depicted in Table I, II or IV, application No. 5, column 5 or 8 in the respective same line as the nucleic acid molecule SEQ ID NO. 16883 or polypeptide SEQ ID NO. 16884, respectively, or a homolog or a fragment thereof, is increased or generated, or if the activity glucose-6-phosphate 1-dehydrogenase is increased or generated in a non-human organism, like a microorganism or a plant cell, plant or part thereof, especially with plastidic localization, For example, an increase of the tryptophan of at least 1 percent, particularly in a range of 28 to 92-percent is conferred as compared to a corresponding non-transformed wild type non-human organism.

[34484] Accordingly, in one embodiment, an increase of tryptophan in a non-human organism, as compared to a corresponding non-transformed wild type non-human organism, is conferred in the process of the invention, if the activity of a polypeptide showing the activity of a At1g19800-protein, or if the activity of the polypeptide At1g19800, preferably represented by SEQ ID NO. 17638, or a homolog or fragment thereof, or if the activity of a polypeptide encoded by a nucleic acid molecule comprising the nucleic acid SEQ ID NO. 17637, preferably the coding region thereof, or a homolog or fragment thereof, e.g. derived from Arabidopsis thaliana, is increased or generated. For example the activity of a nucleic acid molecule or a polypeptide comprising the nucleic acid, preferably the coding region thereof, or polypeptide or the consensus sequence or the polypeptide motif, as depicted in Table I, II or IV, application No. 5, column 5 or 8 in the respective same line as the nucleic acid molecule SEQ ID NO. 17637 or polypeptide SEQ ID NO. 17638, respectively, or a homolog or a fragment thereof, is increased or generated, or if the activity At1g19800-protein is increased or generated in a non-human organism, like a microorganism or a plant cell, plant or part thereof, especially with non-targeted localization, For example, an increase of the tryptophan of at least 1 percent, particularly in a range of 30 to 443-percent is conferred as compared to a corresponding non-transformed wild type non-human organism.

[34485] Accordingly, in one embodiment, an increase of tryptophan in a non-human organism, as compared to a corresponding non-transformed wild type non-human organism, is conferred in the process of the invention, if the activity of a polypeptide showing the activity of a cullin, or if the activity of the polypeptide At1g26830, preferably represented by SEQ ID NO. 17702, or a homolog or fragment thereof, or if the activity of a polypeptide encoded by a nucleic acid molecule comprising the nucleic acid SEQ ID NO. 17701, preferably the coding region thereof, or a homolog or fragment thereof, e.g. derived from Arabidopsis thaliana, is increased or generated. For example the activity of a nucleic acid molecule or a polypeptide comprising the nucleic acid, preferably the coding region thereof, or polypeptide or the consensus sequence or the polypeptide motif, as depicted in Table I, II or IV, application No. 5, column 5 or 8 in the respective same line as the nucleic acid molecule SEQ ID NO. 17701 or polypeptide SEQ ID NO. 17702, respectively, or a homolog or a fragment thereof, is increased or generated, or if the activity cullin is increased or generated in a non-human organism, like a microorganism or a plant cell, plant or part thereof, especially with non-targeted localization, For example, an increase of the tryptophan of at least 1 percent, particularly in a range of 32 to 117-percent is conferred as compared to a corresponding non-transformed wild type non-human organism.

[34486] Accordingly, in one embodiment, an increase of tryptophan in a non-human organism, as compared to a corresponding non-transformed wild type non-human organism, is conferred in the process of the invention, if the activity of a polypeptide showing the activity of a eukaryotic translation initiation factor 5, or if the activity of the polypeptide At1g36730, preferably represented by SEQ ID NO. 17969, or a homolog or fragment thereof, or if the activity of a polypeptide encoded by a nucleic acid molecule comprising the nucleic acid SEQ ID NO. 17968, preferably the coding region thereof, or a homolog or fragment thereof, e.g. derived from Arabidopsis thaliana, is increased or generated. For example the activity of a nucleic acid molecule or a polypeptide comprising the nucleic acid, preferably the coding region thereof, or polypeptide or the consensus sequence or the polypeptide motif, as depicted in Table I, II or IV, application No. 5, column 5 or 8 in the respective same line as the nucleic acid molecule SEQ ID NO. 17968 or polypeptide SEQ ID NO. 17969, respectively, or a homolog or a fragment thereof, is increased or generated, or if the activity eukaryotic translation initiation factor 5 is increased or generated in a non-human organism, like a microorganism or a plant cell, plant or part thereof, especially with non-targeted localization, For example, an increase of the tryptophan of at least 1 percent, particularly in a range of 39 to 78-percent is conferred as compared to a corresponding non-transformed wild type non-human organism.

[34487] Accordingly, in one embodiment, an increase of tryptophan in a non-human organism, as compared to a corresponding non-transformed wild type non-human organism, is conferred in the process of the invention, if the activity of a polypeptide showing the activity of a protein kinase, or if the activity of the polypeptide At1g48260, preferably represented by SEQ ID NO. 18236, or a homolog or fragment thereof, or if the activity of a polypeptide encoded by a nucleic acid molecule comprising the nucleic acid SEQ ID NO. 18235, preferably the coding region thereof, or a homolog or fragment thereof, e.g. derived from Arabidopsis thaliana, is increased or generated. For example the activity of a nucleic acid molecule or a polypeptide comprising the nucleic acid, preferably the coding region thereof, or polypeptide or the consensus sequence or the polypeptide motif, as depicted in Table I, II or IV, application No. 5, column 5 or 8 in the respective same line as the nucleic acid molecule SEQ ID NO. 18235 or polypeptide SEQ ID NO. 18236, respectively, or a homolog or a fragment thereof, is increased or generated, or if the activity protein kinase is increased or generated in a non-human organism, like a microorganism or a plant cell, plant or part thereof, especially with non-targeted localization, For example, an increase of the tryptophan of at least 1 percent, particularly in a range of 36 to 239-percent is conferred as compared to a corresponding non-transformed wild type non-human organism.

[34488] Accordingly, in one embodiment, an increase of tryptophan in a non-human organism, as compared to a corresponding non-transformed wild type non-human organism, is conferred in the process of the invention, if the activity of a polypeptide showing the activity of a transcription factor, or if the activity of the polypeptide At2g17560, preferably represented by SEQ ID NO. 19503, or a homolog or fragment thereof, or if the activity of a polypeptide encoded by a nucleic acid molecule comprising the nucleic acid SEQ ID NO. 19502, preferably the coding region thereof, or a homolog or fragment thereof, e.g. derived from Arabidopsis thaliana, is increased or generated. For example the activity of a nucleic acid molecule or a polypeptide comprising the nucleic acid, preferably the coding region thereof, or polypeptide or the consensus sequence or the polypeptide motif, as depicted in Table I, II or IV, application No. 5, column 5 or 8 in the respective same line as the nucleic acid molecule SEQ ID NO. 19502 or polypeptide SEQ ID NO. 19503, respectively, or a homolog or a fragment thereof, is increased or generated, or if the activity transcription factor is increased or generated in a non-human organism, like a microorganism or a plant cell, plant or part thereof, especially with non-targeted localization, For example, an increase of the tryptophan of at least 1 percent, particularly in a range of 34 to 179 -percent is conferred as compared to a corresponding non-transformed wild type non-human organism.

[34489] Accordingly, in one embodiment, an increase of tryptophan in a non-human organism, as compared to a corresponding non-transformed wild type non-human organism, is conferred in the process of the invention, if the activity of a polypeptide showing the activity of a protein phosphatase, or if the activity of the polypeptide At2g28890, preferably represented by SEQ ID NO. 19875, or a homolog or fragment thereof, or if the activity of a polypeptide encoded by a nucleic acid molecule comprising the nucleic acid SEQ ID NO. 19874, preferably the coding region thereof, or a homolog or fragment thereof, e.g. derived from Arabidopsis thaliana, is increased or generated. For example the activity of a nucleic acid molecule or a polypeptide comprising the nucleic acid, preferably the coding region thereof, or polypeptide or the consensus sequence or the polypeptide motif, as depicted in Table I, II or IV, application No. 5, column 5 or 8 in the respective same line as the nucleic acid molecule SEQ ID NO. 19874 or polypeptide SEQ ID NO. 19875, respectively, or a homolog or a fragment thereof, is increased or generated, or if the activity protein phosphatase is increased or generated in a non-human organism, like a microorganism or a plant cell, plant or part thereof, especially with non-targeted localization, For example, an increase of the tryptophan of at least 1 percent, particularly in a range of 32 to 330-percent is conferred as compared to a corresponding non-transformed wild type non-human organism.

[34490] Accordingly, in one embodiment, an increase of tryptophan in a non-human organism, as compared to a corresponding non-transformed wild type non-human organism, is conferred in the process of the invention, if the activity of a polypeptide showing the activity of a CBL-interacting protein kinase, or if the activity of the polypeptide At2g30360, preferably represented by SEQ ID NO. 19920, or a homolog or fragment thereof, or if the activity of a polypeptide encoded by a nucleic acid molecule comprising the nucleic acid SEQ ID NO. 19919, preferably the coding region thereof, or a homolog or fragment thereof, e.g. derived from Arabidopsis thaliana, is increased or generated. For example the activity of a nucleic acid molecule or a polypeptide comprising the nucleic acid, preferably the coding region thereof, or polypeptide or the consensus sequence or the polypeptide motif, as depicted in Table I, II or IV, application No. 5, column 5 or 8 in the respective same line as the nucleic acid molecule SEQ ID NO. 19919 or polypeptide SEQ ID NO. 19920, respectively, or a homolog or a fragment thereof, is increased or generated, or if the activity CBL-interacting protein kinase is increased or generated in a non-human organism, like a microorganism or a plant cell, plant or part thereof, especially with non-targeted localization, For example, an increase of the tryptophan of at least 1 percent, particularly in a range of 46 to 700-percent is conferred as compared to a corresponding non-transformed wild type non-human organism.

[34491] Accordingly, in one embodiment, an increase of tryptophan in a non-human organism, as compared to a corresponding non-transformed wild type non-human organism, is conferred in the process of the invention, if the activity of a polypeptide showing the activity of a glutaredoxin, or if the activity of the polypeptide At2g30540, preferably represented by SEQ ID NO. 20347, or a homolog or fragment thereof, or if the activity of a polypeptide encoded by a nucleic acid molecule comprising the nucleic acid SEQ ID NO. 20346, preferably the coding region thereof, or a homolog or fragment thereof, e.g. derived from Arabidopsis thaliana, is increased or generated. For example the activity of a nucleic acid molecule or a polypeptide comprising the nucleic acid, preferably the coding region thereof, or polypeptide or the consensus sequence or the polypeptide motif, as depicted in Table I, II or IV, application No. 5, column 5 or 8 in the respective same line as the nucleic acid molecule SEQ ID NO. 20346 or polypeptide SEQ ID NO. 20347, respectively, or a homolog or a fragment thereof, is increased or generated, or if the activity glutaredoxin is increased or generated in a non-human organism, like a microorganism or a plant cell, plant or part thereof, especially with non-targeted localization, For example, an increase of the tryptophan of at least 1 percent, particularly in a range of 28 to 126-percent is conferred as compared to a corresponding non-transformed wild type non-human organism.

[34492] Accordingly, in one embodiment, an increase of tryptophan in a non-human organism, as compared to a corresponding non-transformed wild type non-human organism, is conferred in the process of the invention, if the activity of a polypeptide showing the activity of a At2g33510protein, or if the activity of the polypeptide At2g33510, preferably represented by SEQ ID NO. 98523, or a homolog or fragment thereof, or if the activity of a polypeptide encoded by a nucleic acid molecule comprising the nucleic acid SEQ ID NO. 98522, preferably the coding region thereof, or a homolog or fragment thereof, e.g. derived from Arabidopsis thaliana, is increased or generated. For example the activity of a nucleic acid molecule or a polypeptide comprising the nucleic acid, preferably the coding region thereof, or polypeptide or the consensus sequence or the polypeptide motif, as depicted in Table I, II or IV, application No. 5, column 5 or 8 in the respective same line as the nucleic acid molecule SEQ ID NO. 98522 or polypeptide SEQ ID NO. 98523, respectively, or a homolog or a fragment thereof, is increased or generated, or if the activity At2g33510-protein is increased or generated in a non-human organism, like a microorganism or a plant cell, plant or part thereof, especially with non-targeted localization, For example, an increase of the tryptophan of at least 1 percent, particularly in a range of 34 to 59-percent is conferred as compared to a corresponding non-transformed wild type non-human organism.

[34493] Accordingly, in one embodiment, an increase of tryptophan in a non-human organism, as compared to a corresponding non-transformed wild type non-human organism, is conferred in the process of the invention, if the activity of a polypeptide showing the activity of a glutaredoxin, or if the activity of the polypeptide At2g47880, preferably represented by SEQ ID NO. 21160, or a homolog or fragment thereof, or if the activity of a polypeptide encoded by a nucleic acid molecule comprising the nucleic acid SEQ ID NO. 21159, preferably the coding region thereof, or a homolog or fragment thereof, e.g. derived from Arabidopsis thaliana, is increased or generated.

[34494] For example the activity of a nucleic acid molecule or a polypeptide comprising the nucleic acid, preferably the coding region thereof, or polypeptide or the consensus sequence or the polypeptide motif, as depicted in Table I, II or IV, application No. 5, column 5 or 8 in the respective same line as the nucleic acid molecule SEQ ID NO. 21159 or polypeptide SEQ ID NO. 21160, respectively, or a homolog or a fragment thereof, is increased or generated, or if the activity glutaredoxin is increased or generated in a non-human organism, like a microorganism or a plant cell, plant or part thereof, especially with non-targeted localization, For example, an increase of the tryptophan of at least 1 percent, particularly in a range of 33 to 380-percent is conferred as compared to a corresponding non-transformed wild type non-human organism.

[34495] Accordingly, in one embodiment, an increase of tryptophan in a non-human organism, as compared to a corresponding non-transformed wild type non-human organism, is conferred in the process of the invention, if the activity of a polypeptide showing the activity of a pyruvate kinase, or if the activity of the polypeptide At3g04050, preferably represented by SEQ ID NO. 21498, or a homolog or fragment thereof, or if the activity of a polypeptide encoded by a nucleic acid molecule comprising the nucleic acid SEQ ID NO. 21497, preferably the coding region thereof, or a homolog or fragment thereof, e.g. derived from Arabidopsis thaliana, is increased or generated. For example the activity of a nucleic acid molecule or a polypeptide comprising the nucleic acid, preferably the coding region thereof, or polypeptide or the consensus sequence or the polypeptide motif, as depicted in Table I, II or IV, application No. 5, column 5 or 8 in the respective same line as the nucleic acid molecule SEQ ID NO. 21497 or polypeptide SEQ ID NO.

[34496] 21498, respectively, or a homolog or a fragment thereof, is increased or generated, or if the activity pyruvate kinase is increased or generated in a non-human organism, like a microorganism or a plant cell, plant or part thereof, especially with plastidic localization, For example, an increase of the tryptophan of at least 1 percent, particularly in a range of 76 to 131-percent is conferred as compared to a corresponding non-transformed wild type non-human organism.

[34497] Accordingly, in one embodiment, an increase of tryptophan in a non-human organism, as compared to a corresponding non-transformed wild type non-human organism, is conferred in the process of the invention, if the activity of a polypeptide showing the activity of a harpin-induced family protein, or if the activity of the polypeptide At3g11650, preferably represented by SEQ ID NO. 22612, or a homolog or fragment thereof, or if the activity of a polypeptide encoded by a nucleic acid molecule comprising the nucleic acid SEQ ID NO. 22611, preferably the coding region thereof, or a homolog or fragment thereof, e.g. derived from Arabidopsis thaliana, is increased or generated. For example the activity of a nucleic acid molecule or a polypeptide comprising the nucleic acid, preferably the coding region thereof, or polypeptide or the consensus sequence or the polypeptide motif, as depicted in Table I, II or IV, application No. 5, column 5 or 8 in the respective same line as the nucleic acid molecule SEQ ID NO. 22611 or polypeptide SEQ ID NO. 22612, respectively, or a homolog or a fragment thereof, is increased or generated, or if the activity harpin-induced family protein is increased or generated in a non-human organism, like a microorganism or a plant cell, plant or part thereof, especially with non-targeted localization, For example, an increase of the tryptophan of at least 1 percent, particularly in a range of 29 to 146-percent is conferred as compared to a corresponding non-transformed wild type non-human organism.

[34498] Accordingly, in one embodiment, an increase of tryptophan in a non-human organism, as compared to a corresponding non-transformed wild type non-human organism, is conferred in the process of the invention, if the activity of a polypeptide showing the activity of a DNA mismatch repair protein, or if the activity of the polypeptide At3g18524, preferably represented by SEQ ID NO. 22833, or a homolog or fragment thereof, or if the activity of a polypeptide encoded by a nucleic acid molecule comprising the nucleic acid SEQ ID NO. 22832, preferably the coding region thereof, or a homolog or fragment thereof, e.g. derived from Arabidopsis thaliana, is increased or generated. For example the activity of a nucleic acid molecule or a polypeptide comprising the nucleic acid, preferably the coding region thereof, or polypeptide or the consensus sequence or the polypeptide motif, as depicted in Table I, II or IV, application No. 5, column 5 or 8 in the respective same line as the nucleic acid molecule SEQ ID NO. 22832 or polypeptide SEQ ID NO. 22833, respectively, or a homolog or a fragment thereof, is increased or generated, or if the activity DNA mismatch repair protein is increased or generated in a non-human organism, like a microorganism or a plant cell, plant or part thereof, especially with non-targeted localization, For example, an increase of the tryptophan of at least 1 percent, particularly in a range of 41 to 74-percent is conferred as compared to a corresponding non-transformed wild type non-human organism.

[34499] Accordingly, in one embodiment, an increase of tryptophan in a non-human organism, as compared to a corresponding non-transformed wild type non-human organism, is conferred in the process of the invention, if the activity of a polypeptide showing the activity of a protein kinase, or if the activity of the polypeptide At3g23000, preferably represented by SEQ ID NO. 1816, or a homolog or fragment thereof, or if the activity of a polypeptide encoded by a nucleic acid molecule comprising the nucleic acid SEQ ID NO. 1815, preferably the coding region thereof, or a homolog or fragment thereof, e.g. derived from Arabidopsis thaliana, is increased or generated. For example the activity of a nucleic acid molecule or a polypeptide comprising the nucleic acid, preferably the coding region thereof, or polypeptide or the consensus sequence or the polypeptide motif, as depicted in Table I, II or IV, application No. 5, column 5 or 8 in the respective same line as the nucleic acid molecule SEQ ID NO. 1815 or polypeptide SEQ ID NO. 1816, respectively, or a homolog or a fragment thereof, is increased or generated, or if the activity protein kinase is increased or generated in a non-human organism, like a microorganism or a plant cell, plant or part thereof, especially with non-targeted localization, For example, an increase of the tryptophan of at least 1 percent, particularly in a range of 105 to 239-percent is conferred as compared to a corresponding non-transformed wild type non-human organism.

[34500] Accordingly, in one embodiment, an increase of tryptophan in a non-human organism, as compared to a corresponding non-transformed wild type non-human organism, is conferred in the process of the invention, if the activity of a polypeptide showing the activity of a eukaryotic translation initiation factor, or if the activity of the polypeptide At3g26400, preferably represented by SEQ ID NO. 68728, or a homolog or fragment thereof, or if the activity of a polypeptide encoded by a nucleic acid molecule comprising the nucleic acid SEQ ID NO. 68727, preferably the coding region thereof, or a homolog or fragment thereof, e.g. derived from Arabidopsis thaliana, is increased or generated. For example the activity of a nucleic acid molecule or a polypeptide comprising the nucleic acid, preferably the coding region thereof, or polypeptide or the consensus sequence or the polypeptide motif, as depicted in Table I, II or IV, application No. 5, column 5 or 8 in the respective same line as the nucleic acid molecule SEQ ID NO. 68727 or polypeptide SEQ ID NO. 68728, respectively, or a homolog or a fragment thereof, is increased or generated, or if the activity eukaryotic translation initiation factor is increased or generated in a non-human organism, like a microorganism or a plant cell, plant or part thereof, especially with non-targeted localization, For example, an increase of the tryptophan of at least 1 percent, particularly in a range of 30 to 77-percent is conferred as compared to a corresponding non-transformed wild type non-human organism.

[34501] Accordingly, in one embodiment, an increase of tryptophan in a non-human organism, as compared to a corresponding non-transformed wild type non-human organism, is conferred in the process of the invention, if the activity of a polypeptide showing the activity of a glycosyl transferase, or if the activity of the polypeptide At3g27540, preferably represented by SEQ ID NO. 68778, or a homolog or fragment thereof, or if the activity of a polypeptide encoded by a nucleic acid molecule comprising the nucleic acid SEQ ID NO. 68777, preferably the coding region thereof, or a homolog or fragment thereof, e.g. derived from Arabidopsis thaliana, is increased or generated. For example the activity of a nucleic acid molecule or a polypeptide comprising the nucleic acid, preferably the coding region thereof, or polypeptide or the consensus sequence or the polypeptide motif, as depicted in Table I, II or IV, application No. 5, column 5 or 8 in the respective same line as the nucleic acid molecule SEQ ID NO. 68777 or polypeptide SEQ ID NO. 68778, respectively, or a homolog or a fragment thereof, is increased or generated, or if the activity glycosyl transferase is increased or generated in a non-human organism, like a microorganism or a plant cell, plant or part thereof, especially with non-targeted localization, For example, an increase of the tryptophan of at least 1 percent, particularly in a range of 35 to 148-percent is conferred as compared to a corresponding non-transformed wild type non-human organism.

[34502] Accordingly, in one embodiment, an increase of tryptophan in a non-human organism, as compared to a corresponding non-transformed wild type non-human organism, is conferred in the process of the invention, if the activity of a polypeptide showing the activity of a auxin response factor, or if the activity of the polypeptide At3g61830, preferably represented by SEQ ID NO. 2368, or a homolog or fragment thereof, or if the activity of a polypeptide encoded by a nucleic acid molecule comprising the nucleic acid SEQ ID NO. 2367, preferably the coding region thereof, or a homolog or fragment thereof, e.g. derived from Arabidopsis thaliana, is increased or generated. For example the activity of a nucleic acid molecule or a polypeptide comprising the nucleic acid, preferably the coding region thereof, or polypeptide or the consensus sequence or the polypeptide motif, as depicted in Table I, II or IV, application No. 5, column 5 or 8 in the respective same line as the nucleic acid molecule SEQ ID NO. 2367 or polypeptide SEQ ID NO. 2368, respectively, or a homolog or a fragment thereof, is increased or generated, or if the activity auxin response factor is increased or generated in a non-human organism, like a microorganism or a plant cell, plant or part thereof, especially with non-targeted localization, For example, an increase of the tryptophan of at least 1 percent, particularly in a range of 45 to 123-percent is conferred as compared to a corresponding non-transformed wild type non-human organism.

[34503] Accordingly, in one embodiment, an increase of tryptophan in a non-human organism, as compared to a corresponding non-transformed wild type non-human organism, is conferred in the process of the invention, if the activity of a polypeptide showing the activity of a monthiol glutaredoxin, or if the activity of the polypeptide At3g62930, preferably represented by SEQ ID NO. 2574, or a homolog or fragment thereof, or if the activity of a polypeptide encoded by a nucleic acid molecule comprising the nucleic acid SEQ ID NO. 2573, preferably the coding region thereof, or a homolog or fragment thereof, e.g. derived from Arabidopsis thaliana, is increased or generated. For example the activity of a nucleic acid molecule or a polypeptide comprising the nucleic acid, preferably the coding region thereof, or polypeptide or the consensus sequence or the polypeptide motif, as depicted in Table I, II or IV, application No. 5, column 5 or 8 in the respective same line as the nucleic acid molecule SEQ ID NO. 2573 or polypeptide SEQ ID NO. 2574, respectively, or a homolog or a fragment thereof, is increased or generated, or if the activity monthiol glutaredoxin is increased or generated in a non-human organism, like a microorganism or a plant cell, plant or part thereof, especially with non-targeted localization, For example, an increase of the tryptophan of at least 1 percent, particularly in a range of 38 to 123-percent is conferred as compared to a corresponding non-transformed wild type non-human organism.

[34504] Accordingly, in one embodiment, an increase of tryptophan in a non-human organism, as compared to a corresponding non-transformed wild type non-human organism, is conferred in the process of the invention, if the activity of a polypeptide showing the activity of a glutaredoxin, or if the activity of the polypeptide At3g62950, preferably represented by SEQ ID NO. 2936, or a homolog or fragment thereof, or if the activity of a polypeptide encoded by a nucleic acid molecule comprising the nucleic acid SEQ ID NO. 2935, preferably the coding region thereof, or a homolog or fragment thereof, e.g. derived from Arabidopsis thaliana, is increased or generated. For example the activity of a nucleic acid molecule or a polypeptide comprising the nucleic acid, preferably the coding region thereof, or polypeptide or the consensus sequence or the polypeptide motif, as depicted in Table I, II or IV, application No. 5, column 5 or 8 in the respective same line as the nucleic acid molecule SEQ ID NO. 2935 or polypeptide SEQ ID NO. 2936, respectively, or a homolog or a fragment thereof, is increased or generated, or if the activity glutaredoxin is increased or generated in a non-human organism, like a microorganism or a plant cell, plant or part thereof, especially with non-targeted localization, For example, an increase of the tryptophan of at least 1 percent, particularly in a range of 29 to 86-percent is conferred as compared to a corresponding non-transformed wild type non-human organism.

[34505] Accordingly, in one embodiment, an increase of tryptophan in a non-human organism, as compared to a corresponding non-transformed wild type non-human organism, is conferred in the process of the invention, if the activity of a polypeptide showing the activity of a At4g32480protein, or if the activity of the polypeptide At4g32480, preferably represented by SEQ ID NO. 4041, or a homolog or fragment thereof, or if the activity of a polypeptide encoded by a nucleic acid molecule comprising the nucleic acid SEQ ID NO. 4040, preferably the coding region thereof, or a homolog or fragment thereof, e.g. derived from Arabidopsis thaliana, is increased or generated. For example the activity of a nucleic acid molecule or a polypeptide comprising the nucleic acid, preferably the coding region thereof, or polypeptide or the consensus sequence or the polypeptide motif, as depicted in Table I, II or IV, application No. 5, column 5 or 8 in the respective same line as the nucleic acid molecule SEQ ID NO. 4040 or polypeptide SEQ ID NO. 4041, respectively, or a homolog or a fragment thereof, is increased or generated, or if the activity At4g32480-protein is increased or generated in a non-human organism, like a microorganism or a plant cell, plant or part thereof, especially with non-targeted localization, For example, an increase of the tryptophan of at least 1 percent, particularly in a range of 41 to 460-percent is conferred as compared to a corresponding non-transformed wild type non-human organism.

[34506] Accordingly, in one embodiment, an increase of tryptophan in a non-human organism, as compared to a corresponding non-transformed wild type non-human organism, is conferred in the process of the invention, if the activity of a polypeptide showing the activity of a cyclin D , or if the activity of the polypeptide At4g34160, preferably represented by SEQ ID NO. 24312, or a homolog or fragment thereof, or if the activity of a polypeptide encoded by a nucleic acid molecule comprising the nucleic acid SEQ ID NO. 24311, preferably the coding region thereof, or a homolog or fragment thereof, e.g. derived from Arabidopsis thaliana, is increased or generated. For example the activity of a nucleic acid molecule or a polypeptide comprising the nucleic acid, preferably the coding region thereof, or polypeptide or the consensus sequence or the polypeptide motif, as depicted in Table I, II or IV, application No. 5, column 5 or 8 in the respective same line as the nucleic acid molecule SEQ ID NO. 24311 or polypeptide SEQ ID NO. 24312, respectively, or a homolog or a fragment thereof, is increased or generated, or if the activity cyclin D is increased or generated in a non-human organism, like a microorganism or a plant cell, plant or part thereof, especially with non-targeted localization, For example, an increase of the tryptophan of at least 1 percent, particularly in a range of 36 to 123-percent is conferred as compared to a corresponding non-transformed wild type non-human organism.

[34507] Accordingly, in one embodiment, an increase of tryptophan in a non-human organism, as compared to a corresponding non-transformed wild type non-human organism, is conferred in the process of the invention, if the activity of a polypeptide showing the activity of a calcium-dependent protein kinase, or if the activity of the polypeptide At4g35310, preferably represented by SEQ ID NO. 4349, or a homolog or fragment thereof, or if the activity of a polypeptide encoded by a nucleic acid molecule comprising the nucleic acid SEQ ID NO. 4348, preferably the coding region thereof, or a homolog or fragment thereof, e.g. derived from Arabidopsis thaliana, is increased or generated. For example the activity of a nucleic acid molecule or a polypeptide comprising the nucleic acid, preferably the coding region thereof, or polypeptide or the consensus sequence or the polypeptide motif, as depicted in Table I, II or IV, application No. 5, column 5 or 8 in the respective same line as the nucleic acid molecule SEQ ID NO. 4348 or polypeptide SEQ ID NO. 4349, respectively, or a homolog or a fragment thereof, is increased or generated, or if the activity calcium-dependent protein kinase is increased or generated in a non-human organism, like a microorganism or a plant cell, plant or part thereof, especially with non-targeted localization, For example, an increase of the tryptophan of at least 1 percent, particularly in a range of 62 to 231-percent is conferred as compared to a corresponding non-transformed wild type non-human organism.

[34508] Accordingly, in one embodiment, an increase of tryptophan in a non-human organism, as compared to a corresponding non-transformed wild type non-human organism, is conferred in the process of the invention, if the activity of a polypeptide showing the activity of a protein phosphatase, or if the activity of the polypeptide At5g02760, preferably represented by SEQ ID NO. 68988, or a homolog or fragment thereof, or if the activity of a polypeptide encoded by a nucleic acid molecule comprising the nucleic acid SEQ ID NO. 68987, preferably the coding region thereof, or a homolog or fragment thereof, e.g. derived from Arabidopsis thaliana, is increased or generated. For example the activity of a nucleic acid molecule or a polypeptide comprising the nucleic acid, preferably the coding region thereof, or polypeptide or the consensus sequence or the polypeptide motif, as depicted in Table I, II or IV, application No. 5, column 5 or 8 in the respective same line as the nucleic acid molecule SEQ ID NO. 68987 or polypeptide SEQ ID NO. 68988, respectively, or a homolog or a fragment thereof, is increased or generated, or if the activity protein phosphatase is increased or generated in a non-human organism, like a microorganism or a plant cell, plant or part thereof, especially with non-targeted localization, For example, an increase of the tryptophan of at least 1 percent, particularly in a range of 30 to 228-percent is conferred as compared to a corresponding non-transformed wild type non-human organism.

[34509] Accordingly, in one embodiment, an increase of tryptophan in a non-human organism, as compared to a corresponding non-transformed wild type non-human organism, is conferred in the process of the invention, if the activity of a polypeptide showing the activity of a gibberellin 20-oxidase, or if the activity of the polypeptide At5g07200, preferably represented by SEQ ID NO. 24493, or a homolog or fragment thereof, or if the activity of a polypeptide encoded by a nucleic acid molecule comprising the nucleic acid SEQ ID NO. 24492, preferably the coding region thereof, or a homolog or fragment thereof, e.g. derived from Arabidopsis thaliana, is increased or generated. For example the activity of a nucleic acid molecule or a polypeptide comprising the nucleic acid, preferably the coding region thereof, or polypeptide or the consensus sequence or the polypeptide motif, as depicted in Table I, II or IV, application No. 5, column 5 or 8 in the respective same line as the nucleic acid molecule SEQ ID NO. 24492 or polypeptide SEQ ID NO. 24493, respectively, or a homolog or a fragment thereof, is increased or generated, or if the activity gibberellin 20-oxidase is increased or generated in a non-human organism, like a microorganism or a plant cell, plant or part thereof, especially with non-targeted localization, For example, an increase of the tryptophan of at least 1 percent, particularly in a range of 33 to 57-percent is conferred as compared to a corresponding non-transformed wild type non-human organism.

[34510] Accordingly, in one embodiment, an increase of tryptophan in a non-human organism, as compared to a corresponding non-transformed wild type non-human organism, is conferred in the process of the invention, if the activity of a polypeptide showing the activity of a At5g16650protein, or if the activity of the polypeptide At5g16650, preferably represented by SEQ ID NO. 25284, or a homolog or fragment thereof, or if the activity of a polypeptide encoded by a nucleic acid molecule comprising the nucleic acid SEQ ID NO. 25283, preferably the coding region thereof, or a homolog or fragment thereof, e.g. derived from Arabidopsis thaliana, is increased or generated. For example the activity of a nucleic acid molecule or a polypeptide comprising the nucleic acid, preferably the coding region thereof, or polypeptide or the consensus sequence or the polypeptide motif, as depicted in Table I, II or IV, application No. 5, column 5 or 8 in the respective same line as the nucleic acid molecule SEQ ID NO. 25283 or polypeptide SEQ ID NO. 25284, respectively, or a homolog or a fragment thereof, is increased or generated, or if the activity At5g16650-protein is increased or generated in a non-human organism, like a microorganism or a plant cell, plant or part thereof, especially with non-targeted localization, For example, an increase of the tryptophan of at least 1 percent, particularly in a range of 32 to 83-percent is conferred as compared to a corresponding non-transformed wild type non-human organism

[34511] Accordingly, in one embodiment, an increase of tryptophan in a non-human organism, as compared to a corresponding non-transformed wild type non-human organism, is conferred in the process of the invention, if the activity of a polypeptide showing the activity of a at5g21910protein, or if the activity of the polypeptide At5g21910, preferably represented by SEQ ID NO. 69554, or a homolog or fragment thereof, or if the activity of a polypeptide encoded by a nucleic acid molecule comprising the nucleic acid SEQ ID NO. 69553, preferably the coding region thereof, or a homolog or fragment thereof, e.g. derived from Arabidopsis thaliana, is increased or generated. For example the activity of a nucleic acid molecule or a polypeptide comprising the nucleic acid, preferably the coding region thereof, or polypeptide or the consensus sequence or the polypeptide motif, as depicted in Table I, II or IV, application No. 5, column 5 or 8 in the respective same line as the nucleic acid molecule SEQ ID NO. 69553 or polypeptide SEQ ID NO. 69554, respectively, or a homolog or a fragment thereof, is increased or generated, or if the activity at5g21910-protein is increased or generated in a non-human organism, like a microorganism or a plant cell, plant or part thereof, especially with non-targeted localization, For example, an increase of the tryptophan of at least 1 percent, particularly in a range of 36 to 57-percent is conferred as compared to a corresponding non-transformed wild type non-human organism.

[34512] Accordingly, in one embodiment, an increase of tryptophan in a non-human organism, as compared to a corresponding non-transformed wild type non-human organism, is conferred in the process of the invention, if the activity of a polypeptide showing the activity of a transcription factor, or if the activity of the polypeptide At5g39760, preferably represented by SEQ ID NO. 25429, or a homolog or fragment thereof, or if the activity of a polypeptide encoded by a nucleic acid molecule comprising the nucleic acid SEQ ID NO. 25428, preferably the coding region thereof, or a homolog or fragment thereof, e.g. derived from Arabidopsis thaliana, is increased or generated. For example the activity of a nucleic acid molecule or a polypeptide comprising the nucleic acid, preferably the coding region thereof, or polypeptide or the consensus sequence or the polypeptide motif, as depicted in Table I, II or IV, application No. 5, column 5 or 8 in the respective same line as the nucleic acid molecule SEQ ID NO. 25428 or polypeptide SEQ ID NO. 25429, respectively, or a homolog or a fragment thereof, is increased or generated, or if the activity transcription factor is increased or generated in a non-human organism, like a microorganism or a plant cell, plant or part thereof, especially with non-targeted localization, For example, an increase of the tryptophan of at least 1 percent, particularly in a range of 28 to 121-percent is conferred as compared to a corresponding non-transformed wild type non-human organism.

[34513] Accordingly, in one embodiment, an increase of tryptophan in a non-human organism, as compared to a corresponding non-transformed wild type non-human organism, is conferred in the process of the invention, if the activity of a polypeptide showing the activity of a RNA-binding protein, or if the activity of the polypeptide At5g60110, preferably represented by SEQ ID NO. 70007, or a homolog or fragment thereof, or if the activity of a polypeptide encoded by a nucleic acid molecule comprising the nucleic acid SEQ ID NO. 70006, preferably the coding region thereof, or a homolog or fragment thereof, e.g. derived from Arabidopsis thaliana, is increased or generated. For example the activity of a nucleic acid molecule or a polypeptide comprising the nucleic acid, preferably the coding region thereof, or polypeptide or the consensus sequence or the polypeptide motif, as depicted in Table I, II or IV, application No. 5, column 5 or 8 in the respective same line as the nucleic acid molecule SEQ ID NO. 70006 or polypeptide SEQ ID NO. 70007, respectively, or a homolog or a fragment thereof, is increased or generated, or if the activity RNA-binding protein is increased or generated in a non-human organism, like a microorganism or a plant cell, plant or part thereof, especially with non-targeted localization, For example, an increase of the tryptophan of at least 1 percent, particularly in a range of 43 to 60-percent is conferred as compared to a corresponding non-transformed wild type non-human organism.

[34514] Accordingly, in one embodiment, an increase of tryptophan in a non-human organism, as compared to a corresponding non-transformed wild type non-human organism, is conferred in the process of the invention, if the activity of a polypeptide showing the activity of a malic enzyme, or if the activity of the polypeptide AvinDRAFT_{—}1495, preferably represented by SEQ ID NO. 5558, or a homolog or fragment thereof, or if the activity of a polypeptide encoded by a nucleic acid molecule comprising the nucleic acid SEQ ID NO. 5557, preferably the coding region thereof, or a homolog or fragment thereof, e.g. derived from Azotobacter vinelandii, is increased or generated. For example the activity of a nucleic acid molecule or a polypeptide comprising the nucleic acid, preferably the coding region thereof, or polypeptide or the consensus sequence or the polypeptide motif, as depicted in Table I, II or IV, application No. 5, column 5 or 8 in the respective same line as the nucleic acid molecule SEQ ID NO. 5557 or polypeptide SEQ ID NO. 5558, respectively, or a homolog or a fragment thereof, is increased or generated, or if the activity malic enzyme is increased or generated in a non-human organism, like a microorganism or a plant cell, plant or part thereof, especially with non-targeted localization, For example, an increase of the tryptophan of at least 1 percent, particularly in a range of 62 to 203-percent is conferred as compared to a corresponding non-transformed wild type non-human organism.

[34515] Accordingly, in one embodiment, an increase of tryptophan in a non-human organism, as compared to a corresponding non-transformed wild type non-human organism, is conferred in the process of the invention, if the activity of a polypeptide showing the activity of a elongation facfor Tu, or if the activity of the polypeptide AvinDRAFT_{—}2344, preferably represented by SEQ ID NO. 27022, or a homolog or fragment thereof, or if the activity of a polypeptide encoded by a nucleic acid molecule comprising the nucleic acid SEQ ID NO. 27021, preferably the coding region thereof, or a homolog or fragment thereof, e.g. derived from Azotobacter vinelandii, is increased or generated. For example the activity of a nucleic acid molecule or a polypeptide comprising the nucleic acid, preferably the coding region thereof, or polypeptide or the consensus sequence or the polypeptide motif, as depicted in Table I, II or IV, application No. 5, column 5 or 8 in the respective same line as the nucleic acid molecule SEQ ID NO. 27021 or polypeptide SEQ ID NO. 27022, respectively, or a homolog or a fragment thereof, is increased or generated, or if the activity elongation factor Tu is increased or generated in a non-human organism, like a microorganism or a plant cell, plant or part thereof, especially with non-targeted localization, For example, an increase of the tryptophan of at least 1 percent, particularly in a range of 34 to 173-percent is conferred as compared to a corresponding non-transformed wild type non-human organism.

[34516] Accordingly, in one embodiment, an increase of tryptophan in a non-human organism, as compared to a corresponding non-transformed wild type non-human organism, is conferred in the process of the invention, if the activity of a polypeptide showing the activity of a enoyl-CoA hydratase, or if the activity of the polypeptide AvinDRAFT_{—}3159, preferably represented by SEQ ID NO. 28739, or a homolog or fragment thereof, or if the activity of a polypeptide encoded by a nucleic acid molecule comprising the nucleic acid SEQ ID NO. 28738, preferably the coding region thereof, or a homolog or fragment thereof, e.g. derived from Azotobacter vinelandii, is increased or generated. For example the activity of a nucleic acid molecule or a polypeptide comprising the nucleic acid, preferably the coding region thereof, or polypeptide or the consensus sequence or the polypeptide motif, as depicted in Table I, II or IV, application No. 5, column 5 or 8 in the respective same line as the nucleic acid molecule SEQ ID NO. 28738 or polypeptide SEQ ID NO. 28739, respectively, or a homolog or a fragment thereof, is increased or generated, or if the activity enoyl-CoA hydratase is increased or generated in a non-human organism, like a microorganism or a plant cell, plant or part thereof, especially with non-targeted localization, For example, an increase of the tryptophan of at least 1 percent, particularly in a range of 46 to 139-percent is conferred as compared to a corresponding non-transformed wild type non-human organism.

[34517] Accordingly, in one embodiment, an increase of tryptophan in a non-human organism, as compared to a corresponding non-transformed wild type non-human organism, is conferred in the process of the invention, if the activity of a polypeptide showing the activity of a transcriptional regulator, or if the activity of the polypeptide AvinDRAFT_{—}3209, preferably represented by SEQ ID NO. 29287, or a homolog or fragment thereof, or if the activity of a polypeptide encoded by a nucleic acid molecule comprising the nucleic acid SEQ ID NO. 29286, preferably the coding region thereof, or a homolog or fragment thereof, e.g. derived from Azotobacter vinelandii, is increased or generated. For example the activity of a nucleic acid molecule or a polypeptide comprising the nucleic acid, preferably the coding region thereof, or polypeptide or the consensus sequence or the polypeptide motif, as depicted in Table I, II or IV, application No. 5, column 5 or 8 in the respective same line as the nucleic acid molecule SEQ ID NO. 29286 or polypeptide SEQ ID NO. 29287, respectively, or a homolog or a fragment thereof, is increased or generated, or if the activity transcriptional regulator is increased or generated in a non-human organism, like a microorganism or a plant cell, plant or part thereof, especially with non-targeted localization, For example, an increase of the tryptophan of at least 1 percent, particularly in a range of 34 to 143-percent is conferred as compared to a corresponding non-transformed wild type non-human organism.

[34518] Accordingly, in one embodiment, an increase of tryptophan in a non-human organism, as compared to a corresponding non-transformed wild type non-human organism, is conferred in the process of the invention, if the activity of a polypeptide showing the activity of a enoyl-CoA hydratase, or if the activity of the polypeptide AvinDRAFT_{—}4420, preferably represented by SEQ ID NO. 73039, or a homolog or fragment thereof, or if the activity of a polypeptide encoded by a nucleic acid molecule comprising the nucleic acid SEQ ID NO. 73038, preferably the coding region thereof, or a homolog or fragment thereof, e.g. derived from Azotobacter vinelandii, is increased or generated. For example the activity of a nucleic acid molecule or a polypeptide comprising the nucleic acid, preferably the coding region thereof, or polypeptide or the consensus sequence or the polypeptide motif, as depicted in Table I, II or IV, application No. 5, column 5 or 8 in the respective same line as the nucleic acid molecule SEQ ID NO. 73038 or polypeptide SEQ ID NO. 73039, respectively, or a homolog or a fragment thereof, is increased or generated, or if the activity enoyl-CoA hydratase is increased or generated in a non-human organism, like a microorganism or a plant cell, plant or part thereof, especially with non-targeted localization, For example, an increase of the tryptophan of at least 1 percent, particularly in a range of 29 to 81-percent is conferred as compared to a corresponding non-transformed wild type non-human organism.

[34519] Accordingly, in one embodiment, an increase of tryptophan in a non-human organism, as compared to a corresponding non-transformed wild type non-human organism, is conferred in the process of the invention, if the activity of a polypeptide showing the activity of a glutamateammonia -ligase, or if the activity of the polypeptide AvinDRAFT_{—}4836, preferably represented by SEQ ID NO. 74164, or a homolog or fragment thereof, or if the activity of a polypeptide encoded by a nucleic acid molecule comprising the nucleic acid SEQ ID NO. 74163, preferably the coding region thereof, or a homolog or fragment thereof, e.g. derived from Azotobacter vinelandii, is increased or generated. For example the activity of a nucleic acid molecule or a polypeptide comprising the nucleic acid, preferably the coding region thereof, or polypeptide or the consensus sequence or the polypeptide motif, as depicted in Table I, II or IV, application No. 5, column 5 or 8 in the respective same line as the nucleic acid molecule SEQ ID NO. 74163 or polypeptide SEQ ID NO. 74164, respectively, or a homolog or a fragment thereof, is increased or generated, or if the activity glutamate-ammonia-ligase is increased or generated in a non-human organism, like a microorganism or a plant cell, plant or part thereof, especially with non-targeted localization, For example, an increase of the tryptophan of at least 1 percent, particularly in a range of 35 to 163-percent is conferred as compared to a corresponding non-transformed wild type non-human organism.

[34520] Accordingly, in one embodiment, an increase of tryptophan in a non-human organism, as compared to a corresponding non-transformed wild type non-human organism, is conferred in the process of the invention, if the activity of a polypeptide showing the activity of a hydrolase, or if the activity of the polypeptide AvinDRAFT_{—}5103, preferably represented by SEQ ID NO. 6511, or a homolog or fragment thereof, or if the activity of a polypeptide encoded by a nucleic acid molecule comprising the nucleic acid SEQ ID NO. 6510, preferably the coding region thereof, or a homolog or fragment thereof, e.g. derived from Azotobacter vinelandii, is increased or generated. For example the activity of a nucleic acid molecule or a polypeptide comprising the nucleic acid, preferably the coding region thereof, or polypeptide or the consensus sequence or the polypeptide motif, as depicted in Table I, II or IV, application No. 5, column 5 or 8 in the respective same line as the nucleic acid molecule SEQ ID NO. 6510 or polypeptide SEQ ID NO. 6511, respectively, or a homolog or a fragment thereof, is increased or generated, or if the activity hydrolase is increased or generated in a non-human organism, like a microorganism or a plant cell, plant or part thereof, especially with non-targeted localization, For example, an increase of the tryptophan of at least 1 percent, particularly in a range of 41 to 75-percent is conferred as compared to a corresponding non-transformed wild type non-human organism.

[34521] Accordingly, in one embodiment, an increase of tryptophan in a non-human organism, as compared to a corresponding non-transformed wild type non-human organism, is conferred in the process of the invention, if the activity of a polypeptide showing the activity of a Chaperone protein CIpB, or if the activity of the polypeptide AvinDRAFT_{—}6093, preferably represented by SEQ ID NO. 33597, or a homolog or fragment thereof, or if the activity of a polypeptide encoded by a nucleic acid molecule comprising the nucleic acid SEQ ID NO. 33596, preferably the coding region thereof, or a homolog or fragment thereof, e.g. derived from Azotobacter vinelandii, is increased or generated. For example the activity of a nucleic acid molecule or a polypeptide comprising the nucleic acid, preferably the coding region thereof, or polypeptide or the consensus sequence or the polypeptide motif, as depicted in Table I, II or IV, application No. 5, column 5 or 8 in the respective same line as the nucleic acid molecule SEQ ID NO. 33596 or polypeptide SEQ ID NO. 33597, respectively, or a homolog or a fragment thereof, is increased or generated, or if the activity Chaperone protein CIpB is increased or generated in a non-human organism, like a microorganism or a plant cell, plant or part thereof, especially with non-targeted localization, For example, an increase of the tryptophan of at least 1 percent, particularly in a range of 59 to 124-percent is conferred as compared to a corresponding non-transformed wild type non-human organism.

[34522] Accordingly, in one embodiment, an increase of tryptophan in a non-human organism, as compared to a corresponding non-transformed wild type non-human organism, is conferred in the process of the invention, if the activity of a polypeptide showing the activity of a electron transfer flavoprotein subunit beta, or if the activity of the polypeptide AvinDRAFT_{—}6679, preferably represented by SEQ ID NO. 74730, or a homolog or fragment thereof, or if the activity of a polypeptide encoded by a nucleic acid molecule comprising the nucleic acid SEQ ID NO. 74729, preferably the coding region thereof, or a homolog or fragment thereof, e.g. derived from Azotobacter vinelandii, is increased or generated. For example the activity of a nucleic acid molecule or a polypeptide comprising the nucleic acid, preferably the coding region thereof, or polypeptide or the consensus sequence or the polypeptide motif, as depicted in Table I, II or IV, application No. 5, column 5 or 8 in the respective same line as the nucleic acid molecule SEQ ID NO. 74729 or polypeptide SEQ ID NO. 74730, respectively, or a homolog or a fragment thereof, is increased or generated, or if the activity electron transfer flavoprotein subunit beta is increased or generated in a non-human organism, like a microorganism or a plant cell, plant or part thereof, especially with non-targeted localization, For example, an increase of the tryptophan of at least 1 percent, particularly in a range of 39 to 126-percent is conferred as compared to a corresponding non-transformed wild type non-human organism.

[34523] Accordingly, in one embodiment, an increase of tryptophan in a non-human organism, as compared to a corresponding non-transformed wild type non-human organism, is conferred in the process of the invention, if the activity of a polypeptide showing the activity of a threonine synthase, or if the activity of the polypeptide B0004, preferably represented by SEQ ID NO. 34890, or a homolog or fragment thereof, or if the activity of a polypeptide encoded by a nucleic acid molecule comprising the nucleic acid SEQ ID NO. 34889, preferably the coding region thereof, or a homolog or fragment thereof, e.g. derived from Escherichia coli, is increased or generated. For example the activity of a nucleic acid molecule or a polypeptide comprising the nucleic acid, preferably the coding region thereof, or polypeptide or the consensus sequence or the polypeptide motif, as depicted in Table I, II or IV, application No. 5, column 5 or 8 in the respective same line as the nucleic acid molecule SEQ ID NO. 34889 or polypeptide SEQ ID NO. 34890, respectively, or a homolog or a fragment thereof, is increased or generated, or if the activity threonine synthase is increased or generated in a non-human organism, like a microorganism or a plant cell, plant or part thereof, especially with plastidic localization, For example, an increase of the tryptophan of at least 1 percent, particularly in a range of 57 to 168-percent is conferred as compared to a corresponding non-transformed wild type non-human organism.

[34524] Accordingly, in one embodiment, an increase of tryptophan in a non-human organism, as compared to a corresponding non-transformed wild type non-human organism, is conferred in the process of the invention, if the activity of a polypeptide showing the activity of a transaldolase, or if the activity of the polypeptide B0008, preferably represented by SEQ ID NO. 98554, or a homolog or fragment thereof, or if the activity of a polypeptide encoded by a nucleic acid molecule comprising the nucleic acid SEQ ID NO. 98553, preferably the coding region thereof, or a homolog or fragment thereof, e.g. derived from Escherichia coli, is increased or generated. For example the activity of a nucleic acid molecule or a polypeptide comprising the nucleic acid, preferably the coding region thereof, or polypeptide or the consensus sequence or the polypeptide motif, as depicted in Table I, II or IV, application No. 5, column 5 or 8 in the respective same line as the nucleic acid molecule SEQ ID NO. 98553 or polypeptide SEQ ID NO. 98554, respectively, or a homolog or a fragment thereof, is increased or generated, or if the activity transaldolase is increased or generated in a non-human organism, like a microorganism or a plant cell, plant or part thereof, especially with non-targeted localization, For example, an increase of the tryptophan of at least 1 percent, particularly in a range of 51 to 91-percent is conferred as compared to a corresponding non-transformed wild type non-human organism.

[34525] Accordingly, in one embodiment, an increase of tryptophan in a non-human organism, as compared to a corresponding non-transformed wild type non-human organism, is conferred in the process of the invention, if the activity of a polypeptide showing the activity of a L-ribulose-5-phosphate 4-epimerase, or if the activity of the polypeptide B0061, preferably represented by SEQ ID NO. 35205, or a homolog or fragment thereof, or if the activity of a polypeptide encoded by a nucleic acid molecule comprising the nucleic acid SEQ ID NO. 35204, preferably the coding region thereof, or a homolog or fragment thereof, e.g. derived from Escherichia coli, is increased or generated. For example the activity of a nucleic acid molecule or a polypeptide comprising the nucleic acid, preferably the coding region thereof, or polypeptide or the consensus sequence or the polypeptide motif, as depicted in Table I, II or IV, application No. 5, column 5 or 8 in the respective same line as the nucleic acid molecule SEQ ID NO. 35204 or polypeptide SEQ ID NO. 35205, respectively, or a homolog or a fragment thereof, is increased or generated, or if the activity L-ribulose-5-phosphate 4-epimerase is increased or generated in a non-human organism, like a microorganism or a plant cell, plant or part thereof, especially with non-targeted localization, For example, an increase of the tryptophan of at least 1 percent, particularly in a range of 72 to 173-percent is conferred as compared to a corresponding non-transformed wild type non-human organism.

[34526] Accordingly, in one embodiment, an increase of tryptophan in a non-human organism, as compared to a corresponding non-transformed wild type non-human organism, is conferred in the process of the invention, if the activity of a polypeptide showing the activity of a glucose dehydrogenase, or if the activity of the polypeptide B0124, preferably represented by SEQ ID NO. 35483, or a homolog or fragment thereof, or if the activity of a polypeptide encoded by a nucleic acid molecule comprising the nucleic acid SEQ ID NO. 35482, preferably the coding region thereof, or a homolog or fragment thereof, e.g. derived from Escherichia coli, is increased or generated. For example the activity of a nucleic acid molecule or a polypeptide comprising the nucleic acid, preferably the coding region thereof, or polypeptide or the consensus sequence or the polypeptide motif, as depicted in Table I, II or IV, application No. 5, column 5 or 8 in the respective same line as the nucleic acid molecule SEQ ID NO. 35482 or polypeptide SEQ ID NO. 35483, respectively, or a homolog or a fragment thereof, is increased or generated, or if the activity glucose dehydrogenase is increased or generated in a non-human organism, like a microorganism or a plant cell, plant or part thereof, especially with non-targeted localization, For example, an increase of the tryptophan of at least 1 percent, particularly in a range of 29 to 213 -percent is conferred as compared to a corresponding non-transformed wild type non-human organism.

[34527] Accordingly, in one embodiment, an increase of tryptophan in a non-human organism, as compared to a corresponding non-transformed wild type non-human organism, is conferred in the process of the invention, if the activity of a polypeptide showing the activity of a ATP-binding component of a transport system, or if the activity of the polypeptide B0449, preferably represented by SEQ ID NO. 7334, or a homolog or fragment thereof, or if the activity of a polypeptide encoded by a nucleic acid molecule comprising the nucleic acid SEQ ID NO. 7333, preferably the coding region thereof, or a homolog or fragment thereof, e.g. derived from Escherichia coli, is increased or generated. For example the activity of a nucleic acid molecule or a polypeptide comprising the nucleic acid, preferably the coding region thereof, or polypeptide or the consensus sequence or the polypeptide motif, as depicted in Table I, II or IV, application No. 5, column 5 or 8 in the respective same line as the nucleic acid molecule SEQ ID NO. 7333 or polypeptide SEQ ID NO. 7334, respectively, or a homolog or a fragment thereof, is increased or generated, or if the activity ATP-binding component of a transport system is increased or generated in a non-human organism, like a microorganism or a plant cell, plant or part thereof, especially with non-targeted localization, For example, an increase of the tryptophan of at least 1 percent, partitularly in a range of 38 to 281-percent is conferred as compared to a corresponding non-transformed wild type non-human organism.

[34528] Accordingly, in one embodiment, an increase of tryptophan in a non-human organism, as compared to a corresponding non-transformed wild type non-human organism, is conferred in the process of the invention, if the activity of a polypeptide showing the activity of a isochorismate synthase, or if the activity of the polypeptide B0593, preferably represented by SEQ ID NO.

[34529] 35968, or a homolog or fragment thereof, or if the activity of a polypeptide encoded by a nucleic acid molecule comprising the nucleic acid SEQ ID NO. 35967, preferably the coding region thereof, or a homolog or fragment thereof, e.g. derived from Escherichia coli, is increased or generated. For example the activity of a nucleic acid molecule or a polypeptide comprising the nucleic acid, preferably the coding region thereof, or polypeptide or the consensus sequence or the polypeptide motif, as depicted in Table I, II or IV, application No. 5, column 5 or 8 in the respective same line as the nucleic acid molecule SEQ ID NO. 35967 or polypeptide SEQ ID NO. 35968, respectively, or a homolog or a fragment thereof, is increased or generated, or if the activity isochorismate synthase is increased or generated in a non-human organism, like a microorganism or a plant cell, plant or part thereof, especially with plastidic localization, For example, an increase of the tryptophan of at least 1 percent, particularly in a range of 43 to 358 percent is conferred as compared to a corresponding non-transformed wild type non-human organism.

[34530] Accordingly, in one embodiment, an increase of tryptophan in a non-human organism, as compared to a corresponding non-transformed wild type non-human organism, is conferred in the process of the invention, if the activity of a polypeptide showing the activity of a Leucyl/phenylalanyl-tRNA-protein transferase, or if the activity of the polypeptide B0885, preferably represented by SEQ ID NO. 36490, or a homolog or fragment thereof, or if the activity of a polypeptide encoded by a nucleic acid molecule comprising the nucleic acid SEQ ID NO. 36489, preferably the coding region thereof, or a homolog or fragment thereof, e.g. derived from Escherichia coli, is increased or generated. For example the activity of a nucleic acid molecule or a polypeptide comprising the nucleic acid, preferably the coding region thereof, or polypeptide or the consensus sequence or the polypeptide motif, as depicted in Table I, II or IV, application No. 5, column 5 or 8 in the respective same line as the nucleic acid molecule SEQ ID NO. 36489 or polypeptide SEQ ID NO. 36490, respectively, or a homolog or a fragment thereof, is increased or generated, or if the activity Leucyl/phenylalanyl-tRNA-protein transferase is increased or generated in a non-human organism, like a microorganism or a plant cell, plant or part thereof, especially with non-targeted localization, For example, an increase of the tryptophan of at least 1 percent, particularly in a range of 39 to 143-percent is conferred as compared to a corresponding non-transformed wild type non-human organism.

[34531] Accordingly, in one embodiment, an increase of tryptophan in a non-human organism, as compared to a corresponding non-transformed wild type non-human organism, is conferred in the process of the invention, if the activity of a polypeptide showing the activity of a b1163-protein, or if the activity of the polypeptide B1163, preferably represented by SEQ ID NO. 37395, or a homolog or fragment thereof, or if the activity of a polypeptide encoded by a nucleic acid molecule comprising the nucleic acid SEQ ID NO. 37394, preferably the coding region thereof, or a homolog or fragment thereof, e.g. derived from Escherichia coli, is increased or generated. For example the activity of a nucleic acid molecule or a polypeptide comprising the nucleic acid, preferably the coding region thereof, or polypeptide or the consensus sequence or the polypeptide motif, as depicted in Table I, II or IV, application No. 5, column 5 or 8 in the respective same line as the nucleic acid molecule SEQ ID NO. 37394 or polypeptide SEQ ID NO. 37395, respectively, or a homolog or a fragment thereof, is increased or generated, or if the activity b1163-protein is increased or generated in a non-human organism, like a microorganism or a plant cell, plant or part thereof, especially with non-targeted localization, For example, an increase of the tryptophan of at least 1 percent, particularly in a range of 30 to 56-percent is conferred as compared to a corresponding non-transformed wild type non-human organism.

[34532] Accordingly, in one embodiment, an increase of tryptophan in a non-human organism, as compared to a corresponding non-transformed wild type non-human organism, is conferred in the process of the invention, if the activity of a polypeptide showing the activity of a cardiolipin synthase, or if the activity of the polypeptide B1249, preferably represented by SEQ ID NO. 98779, or a homolog or fragment thereof, or if the activity of a polypeptide encoded by a nucleic acid molecule comprising the nucleic acid SEQ ID NO. 98778, preferably the coding region thereof, or a homolog or fragment thereof, e.g. derived from Escherichia coli, is increased or generated.

[34533] For example the activity of a nucleic acid molecule or a polypeptide comprising the nucleic acid, preferably the coding region thereof, or polypeptide or the consensus sequence or the polypeptide motif, as depicted in Table I, II or IV, application No. 5, column 5 or 8 in the respective same line as the nucleic acid molecule SEQ ID NO. 98778 or polypeptide SEQ ID NO. 98779, respectively, or a homolog or a fragment thereof, is increased or generated, or if the activity cardiolipin synthase is increased or generated in a non-human organism, like a microorganism or a plant cell, plant or part thereof, especially with plastidic localization, For example, an increase of the tryptophan of at least 1 percent, particularly in a range of 71 to 214-percent is conferred as compared to a corresponding non-transformed wild type non-human organism.

[34534] Accordingly, in one embodiment, an increase of tryptophan in a non-human organism, as compared to a corresponding non-transformed wild type non-human organism, is conferred in the process of the invention, if the activity of a polypeptide showing the activity of a tryptophan biosynthesis protein, or if the activity of the polypeptide B1262, preferably represented by SEQ ID NO. 76158, or a homolog or fragment thereof, or if the activity of a polypeptide encoded by a nucleic acid molecule comprising the nucleic acid SEQ ID NO. 76157, preferably the coding region thereof, or a homolog or fragment thereof, e.g. derived from Escherichia coli, is increased or generated. For example the activity of a nucleic acid molecule or a polypeptide comprising the nucleic acid, preferably the coding region thereof, or polypeptide or the consensus sequence or the polypeptide motif, as depicted in Table I, II or IV, application No. 5, column 5 or 8 in the respective same line as the nucleic acid molecule SEQ ID NO. 76157 or polypeptide SEQ ID NO. 76158, respectively, or a homolog or a fragment thereof, is increased or generated, or if the activity tryptophan biosynthesis protein is increased or generated in a non-human organism, like a microorganism or a plant cell, plant or part thereof, especially with plastidic localization, For example, an increase of the tryptophan of at least 1 percent, particularly in a range of 74 to 104-percent is conferred as compared to a corresponding non-transformed wild type non-human organism.

[34535] Accordingly, in one embodiment, an increase of tryptophan in a non-human organism, as compared to a corresponding non-transformed wild type non-human organism, is conferred in the process of the invention, if the activity of a polypeptide showing the activity of a aldehyde dehydrogenase, or if the activity of the polypeptide B1300, preferably represented by SEQ ID NO.

[34536] 37808, or a homolog or fragment thereof, or if the activity of a polypeptide encoded by a nucleic acid molecule comprising the nucleic acid SEQ ID NO. 37807, preferably the coding region thereof, or a homolog or fragment thereof, e.g. derived from Escherichia coli, is increased or generated. For example the activity of a nucleic acid molecule or a polypeptide comprising the nucleic acid, preferably the coding region thereof, or polypeptide or the consensus sequence or the polypeptide motif, as depicted in Table I, II or IV, application No. 5, column 5 or 8 in the respective same line as the nucleic acid molecule SEQ ID NO. 37807 or polypeptide SEQ ID NO. 37808, respectively, or a homolog or a fragment thereof, is increased or generated, or if the activity aldehyde dehydrogenase is increased or generated in a non-human organism, like a microorganism or a plant cell, plant or part thereof, especially with non-targeted localization, For example, an increase of the tryptophan of at least 1 percent, particularly in a range of 31 to 68-percent is conferred as compared to a corresponding non-transformed wild type non-human organism.

[34537] Accordingly, in one embodiment, an increase of tryptophan in a non-human organism, as compared to a corresponding non-transformed wild type non-human organism, is conferred in the process of the invention, if the activity of a polypeptide showing the activity of a b1346-protein, or if the activity of the polypeptide B1346, preferably represented by SEQ ID NO. 99189, or a homolog or fragment thereof, or if the activity of a polypeptide encoded by a nucleic acid molecule comprising the nucleic acid SEQ ID NO. 99188, preferably the coding region thereof, or a homolog or fragment thereof, e.g. derived from Escherichia coli, is increased or generated. For example the activity of a nucleic acid molecule or a polypeptide comprising the nucleic acid, preferably the coding region thereof, or polypeptide or the consensus sequence or the polypeptide motif, as depicted in Table I, II or IV, application No. 5, column 5 or 8 in the respective same line as the nucleic acid molecule SEQ ID NO. 99188 or polypeptide SEQ ID NO. 99189, respectively, or a homolog or a fragment thereof, is increased or generated, or if the activity b1346-protein is increased or generated in a non-human organism, like a microorganism or a plant cell, plant or part thereof, especially with plastidic localization, For example, an increase of the tryptophan of at least 1 percent, particularly in a range of 31 to 96-percent is conferred as compared to a corresponding non-transformed wild type non-human organism.

[34538] Accordingly, in one embodiment, an increase of tryptophan in a non-human organism, as compared to a corresponding non-transformed wild type non-human organism, is conferred in the process of the invention, if the activity of a polypeptide showing the activity of a b1522-protein, or if the activity of the polypeptide B1522, preferably represented by SEQ ID NO. 7948, or a homolog or fragment thereof, or if the activity of a polypeptide encoded by a nucleic acid molecule comprising the nucleic acid SEQ ID NO. 7947, preferably the coding region thereof, or a homolog or fragment thereof, e.g. derived from Escherichia coli, is increased or generated. For example the activity of a nucleic acid molecule or a polypeptide comprising the nucleic acid, preferably the coding region thereof, or polypeptide or the consensus sequence or the polypeptide motif, as depicted in Table I, II or IV, application No. 5, column 5 or 8 in the respective same line as the nucleic acid molecule SEQ ID NO. 7947 or polypeptide SEQ ID NO. 7948, respectively, or a homolog or a fragment thereof, is increased or generated, or if the activity b1522-protein is increased or generated in a non-human organism, like a microorganism or a plant cell, plant or part thereof, especially with non-targeted localization, For example, an increase of the tryptophan of at least 1 percent, particularly in a range of 109 to 261-percent is conferred as compared to a corresponding non-transformed wild type non-human organism.

[34539] Accordingly, in one embodiment, an increase of tryptophan in a non-human organism, as compared to a corresponding non-transformed wild type non-human organism, is conferred in the process of the invention, if the activity of a polypeptide showing the activity of a b1796-protein, or if the activity of the polypeptide B1796, preferably represented by SEQ ID NO. 99197, or a homolog or fragment thereof, or if the activity of a polypeptide encoded by a nucleic acid molecule comprising the nucleic acid SEQ ID NO. 99196, preferably the coding region thereof, or a homolog or fragment thereof, e.g. derived from Escherichia coli, is increased or generated. For example the activity of a nucleic acid molecule or a polypeptide comprising the nucleic acid, preferably the coding region thereof, or polypeptide or the consensus sequence or the polypeptide motif, as depicted in Table I, II or IV, application No. 5, column 5 or 8 in the respective same line as the nucleic acid molecule SEQ ID NO. 99196 or polypeptide SEQ ID NO. 99197, respectively, or a homolog or a fragment thereof, is increased or generated, or if the activity b1796-protein is increased or generated in a non-human organism, like a microorganism or a plant cell, plant or part thereof, especially with non-targeted localization, For example, an increase of the tryptophan of at least 1 percent, particularly in a range of 27 to 39-percent is conferred as compared to a corresponding non-transformed wild type non-human organism.

[34540] Accordingly, in one embodiment, an increase of tryptophan in a non-human organism, as compared to a corresponding non-transformed wild type non-human organism, is conferred in the process of the invention, if the activity of a polypeptide showing the activity of a methylaccepting chemotaxis protein, or if the activity of the polypeptide B1886, preferably represented by SEQ ID NO. 99211, or a homolog or fragment thereof, or if the activity of a polypeptide encoded by a nucleic acid molecule comprising the nucleic acid SEQ ID NO. 99210, preferably the coding region thereof, or a homolog or fragment thereof, e.g. derived from Escherichia coli, is increased or generated. For example the activity of a nucleic acid molecule or a polypeptide comprising the nucleic acid, preferably the coding region thereof, or polypeptide or the consensus sequence or the polypeptide motif, as depicted in Table I, II or IV, application No. 5, column 5 or 8 in the respective same line as the nucleic acid molecule SEQ ID NO. 99210 or polypeptide SEQ ID NO. 99211, respectively, or a homolog or a fragment thereof, is increased or generated, or if the activity methyl-accepting chemotaxis protein is increased or generated in a non-human organism, like a microorganism or a plant cell, plant or part thereof, especially with non-targeted localization, For example, an increase of the tryptophan of at least 1 percent, particularly in a range of 54 to 108-percent is conferred as compared to a corresponding non-transformed wild type non-human organism.

[34541] Accordingly, in one embodiment, an increase of tryptophan in a non-human organism, as compared to a corresponding non-transformed wild type non-human organism, is conferred in the process of the invention, if the activity of a polypeptide showing the activity of a trehalosephosphatase, or if the activity of the polypeptide B1897, preferably represented by SEQ ID NO. 79057, or a homolog or fragment thereof, or if the activity of a polypeptide encoded by a nucleic acid molecule comprising the nucleic acid SEQ ID NO. 79056, preferably the coding region thereof, or a homolog or fragment thereof, e.g. derived from Escherichia coli, is increased or generated. For example the activity of a nucleic acid molecule or a polypeptide comprising the nucleic acid, preferably the coding region thereof, or polypeptide or the consensus sequence or the polypeptide motif, as depicted in Table I, II or IV, application No. 5, column 5 or 8 in the respective same line as the nucleic acid molecule SEQ ID NO. 79056 or polypeptide SEQ ID NO. 79057, respectively, or a homolog or a fragment thereof, is increased or generated, or if the activity trehalose-phosphatase is increased or generated in a non-human organism, like a microorganism or a plant cell, plant or part thereof, especially with non-targeted localization, For example, an increase of the tryptophan of at least 1 percent, particularly in a range of 44 to 190-percent is conferred as compared to a corresponding non-transformed wild type non-human organism.

[34542] Accordingly, in one embodiment, an increase of tryptophan in a non-human organism, as compared to a corresponding non-transformed wild type non-human organism, is conferred in the process of the invention, if the activity of a polypeptide showing the activity of a imidazole glycerol phosphate synthase subunit, or if the activity of the polypeptide B2023, preferably represented by SEQ ID NO. 99372, or a homolog or fragment thereof, or if the activity of a polypeptide encoded by a nucleic acid molecule comprising the nucleic acid SEQ ID NO. 99371, preferably the coding region thereof, or a homolog or fragment thereof, e.g. derived from Escherichia coli, is increased or generated. For example the activity of a nucleic acid molecule or a polypeptide comprising the nucleic acid, preferably the coding region thereof, or polypeptide or the consensus sequence or the polypeptide motif, as depicted in Table I, II or IV, application No. 5, column 5 or 8 in the respective same line as the nucleic acid molecule SEQ ID NO. 99371 or polypeptide SEQ ID NO. 99372, respectively, or a homolog or a fragment thereof, is increased or generated, or if the activity imidazole glycerol phosphate synthase subunit is increased or generated in a non-human organism, like a microorganism or a plant cell, plant or part thereof, especially with non-targeted localization, For example, an increase of the tryptophan of at least 1 percent, particularly in a range of 44 to 148-percent is conferred as compared to a corresponding non-transformed wild type non-human organism.

[34543] Accordingly, in one embodiment, an increase of tryptophan in a non-human organism, as compared to a corresponding non-transformed wild type non-human organism, is conferred in the process of the invention, if the activity of a polypeptide showing the activity of a transport protein, or if the activity of the polypeptide B2063, preferably represented by SEQ ID NO. 38948, or a homolog or fragment thereof, or if the activity of a polypeptide encoded by a nucleic acid molecule comprising the nucleic acid SEQ ID NO. 38947, preferably the coding region thereof, or a homolog or fragment thereof, e.g. derived from Escherichia coli, is increased or generated. For example the activity of a nucleic acid molecule or a polypeptide comprising the nucleic acid, preferably the coding region thereof, or polypeptide or the consensus sequence or the polypeptide motif, as depicted in Table I, II or IV, application No. 5, column 5 or 8 in the respective same line as the nucleic acid molecule SEQ ID NO. 38947 or polypeptide SEQ ID NO. 38948, respectively, or a homolog or a fragment thereof, is increased or generated, or if the activity transport protein is increased or generated in a non-human organism, like a microorganism or a plant cell, plant or part thereof, especially with non-targeted localization, For example, an increase of the tryptophan of at least 1 percent, particularly in a range of 35 to 270-percent is conferred as compared to a corresponding non-transformed wild type non-human organism.

[34544] Accordingly, in one embodiment, an increase of tryptophan in a non-human organism, as compared to a corresponding non-transformed wild type non-human organism, is conferred in the process of the invention, if the activity of a polypeptide showing the activity of a ATP synthase subunit E, or if the activity of the polypeptide B2285, preferably represented by SEQ ID NO. 99621, or a homolog or fragment thereof, or if the activity of a polypeptide encoded by a nucleic acid molecule comprising the nucleic acid SEQ ID NO. 99620, preferably the coding region thereof, or a homolog or fragment thereof, e.g. derived from Escherichia coli, is increased or generated. For example the activity of a nucleic acid molecule or a polypeptide comprising the nucleic acid, preferably the coding region thereof, or polypeptide or the consensus sequence or the polypeptide motif, as depicted in Table I, II or IV, application No. 5, column 5 or 8 in the respective same line as the nucleic acid molecule SEQ ID NO. 99620 or polypeptide SEQ ID NO. 99621, respectively, or a homolog or a fragment thereof, is increased or generated, or if the activity ATP synthase subunit E is increased or generated in a non-human organism, like a microorganism or a plant cell, plant or part thereof, especially with non-targeted localization, For example, an increase of the tryptophan of at least 1 percent, particularly in a range of 57 to 109-percent is conferred as compared to a corresponding non-transformed wild type non-human organism.

[34545] Accordingly, in one embodiment, an increase of tryptophan in a non-human organism, as compared to a corresponding non-transformed wild type non-human organism, is conferred in the process of the invention, if the activity of a polypeptide showing the activity of a putative transport system permease protein, or if the activity of the polypeptide B2546, preferably represented by SEQ ID NO. 99899, or a homolog or fragment thereof, or if the activity of a polypeptide encoded by a nucleic acid molecule comprising the nucleic acid SEQ ID NO. 99898, preferably the coding region thereof, or a homolog or fragment thereof, e.g. derived from Escherichia coli, is increased or generated. For example the activity of a nucleic acid molecule or a polypeptide comprising the nucleic acid, preferably the coding region thereof, or polypeptide or the consensus sequence or the polypeptide motif, as depicted in Table I, II or IV, application No. 5, column 5 or 8 in the respective same line as the nucleic acid molecule SEQ ID NO. 99898 or polypeptide SEQ ID NO. 99899, respectively, or a homolog or a fragment thereof, is increased or generated, or if the activity putative transport system permease protein is increased or generated in a non-human organism, like a microorganism or a plant cell, plant or part thereof, especially with non-targeted localization, For example, an increase of the tryptophan of at least 1 percent, particularly in a range of 32 to 95-percent is conferred as compared to a corresponding non-transformed wild type non-human organism.

[34546] Accordingly, in one embodiment, an increase of tryptophan in a non-human organism, as compared to a corresponding non-transformed wild type non-human organism, is conferred in the process of the invention, if the activity of a polypeptide showing the activity of a recombinase A, or if the activity of the polypeptide B2699, preferably represented by SEQ ID NO. 100106, or a homolog or fragment thereof, or if the activity of a polypeptide encoded by a nucleic acid molecule comprising the nucleic acid SEQ ID NO. 100105, preferably the coding region thereof, or a homolog or fragment thereof, e.g. derived from Escherichia coli, is increased or generated. For example the activity of a nucleic acid molecule or a polypeptide comprising the nucleic acid, preferably the coding region thereof, or polypeptide or the consensus sequence or the polypeptide motif, as depicted in Table I, II or IV, application No. 5, column 5 or 8 in the respective same line as the nucleic acid molecule SEQ ID NO. 100105 or polypeptide SEQ ID NO. 100106, respectively, or a homolog or a fragment thereof, is increased or generated, or if the activity recombinase A is increased or generated in a non-human organism, like a microorganism or a plant cell, plant or part thereof, especially with non-targeted localization, For example, an increase of the tryptophan of at least 1 percent, particularly in a range of 55 to 82-percent is conferred as compared to a corresponding non-transformed wild type non-human organism.

[34547] Accordingly, in one embodiment, an increase of tryptophan in a non-human organism, as compared to a corresponding non-transformed wild type non-human organism, is conferred in the process of the invention, if the activity of a polypeptide showing the activity of a b2739-protein, or if the activity of the polypeptide B2739, preferably represented by SEQ ID NO. 80907, or a homolog or fragment thereof, or if the activity of a polypeptide encoded by a nucleic acid molecule comprising the nucleic acid SEQ ID NO. 80906, preferably the coding region thereof, or a homolog or fragment thereof, e.g. derived from Escherichia coli, is increased or generated. For example the activity of a nucleic acid molecule or a polypeptide comprising the nucleic acid, preferably the coding region thereof, or polypeptide or the consensus sequence or the polypeptide motif, as depicted in Table I, II or IV, application No. 5, column 5 or 8 in the respective same line as the nucleic acid molecule SEQ ID NO. 80906 or polypeptide SEQ ID NO. 80907, respectively, or a homolog or a fragment thereof, is increased or generated, or if the activity b2739-protein is increased or generated in a non-human organism, like a microorganism or a plant cell, plant or part thereof, especially with non-targeted localization, For example, an increase of the tryptophan of at least 1 percent, particularly in a range of 75 to 134-percent is conferred as compared to a corresponding non-transformed wild type non-human organism.

[34548] Accordingly, in one embodiment, an increase of tryptophan in a non-human organism, as compared to a corresponding non-transformed wild type non-human organism, is conferred in the process of the invention, if the activity of a polypeptide showing the activity of a b2849-protein, or if the activity of the polypeptide B2849, preferably represented by SEQ ID NO. 81981, or a homolog or fragment thereof, or if the activity of a polypeptide encoded by a nucleic acid molecule comprising the nucleic acid SEQ ID NO. 81980, preferably the coding region thereof, or a homolog or fragment thereof, e.g. derived from Escherichia coli, is increased or generated. For example the activity of a nucleic acid molecule or a polypeptide comprising the nucleic acid, preferably the coding region thereof, or polypeptide or the consensus sequence or the polypeptide motif, as depicted in Table I, II or IV, application No. 5, column 5 or 8 in the respective same line as the nucleic acid molecule SEQ ID NO. 81980 or polypeptide SEQ ID NO. 81981, respectively, or a homolog or a fragment thereof, is increased or generated, or if the activity b2849-protein is increased or generated in a non-human organism, like a microorganism or a plant cell, plant or part thereof, especially with non-targeted localization, For example, an increase of the tryptophan of at least 1 percent, particularly in a range of 33 to 152-percent is conferred as compared to a corresponding non-transformed wild type non-human organism.

[34549] Accordingly, in one embodiment, an increase of tryptophan in a non-human organism, as compared to a corresponding non-transformed wild type non-human organism, is conferred in the process of the invention, if the activity of a polypeptide showing the activity of a fimbrial-like protein, or if the activity of the polypeptide B3142, preferably represented by SEQ ID NO. 100544, or a homolog or fragment thereof, or if the activity of a polypeptide encoded by a nucleic acid molecule comprising the nucleic acid SEQ ID NO. 100543, preferably the coding region thereof, or a homolog or fragment thereof, e.g. derived from Escherichia coli, is increased or generated. For example the activity of a nucleic acid molecule or a polypeptide comprising the nucleic acid, preferably the coding region thereof, or polypeptide or the consensus sequence or the polypeptide motif, as depicted in Table I, II or IV, application No. 5, column 5 or 8 in the respective same line as the nucleic acid molecule SEQ ID NO. 100543 or polypeptide SEQ ID NO. 100544, respectively, or a homolog or a fragment thereof, is increased or generated, or if the activity fimbrial-like protein is increased or generated in a non-human organism, like a microorganism or a plant cell, plant or part thereof, especially with non-targeted localization, For example, an increase of the tryptophan of at least 1 percent, particularly in a range of 35 to 65-percent is conferred as compared to a corresponding non-transformed wild type non-human organism.

[34550] Accordingly, in one embodiment, an increase of tryptophan in a non-human organism, as compared to a corresponding non-transformed wild type non-human organism, is conferred in the process of the invention, if the activity of a polypeptide showing the activity of a methyltransferase, or if the activity of the polypeptide B3262, preferably represented by SEQ ID NO. 42503, or a homolog or fragment thereof, or if the activity of a polypeptide encoded by a nucleic acid molecule comprising the nucleic acid SEQ ID NO. 42502, preferably the coding region thereof, or a homolog or fragment thereof, e.g. derived from Escherichia coli, is increased or generated.

[34551] For example the activity of a nucleic acid molecule or a polypeptide comprising the nucleic acid, preferably the coding region thereof, or polypeptide or the consensus sequence or the polypeptide motif, as depicted in Table I, II or IV, application No. 5, column 5 or 8 in the respective same line as the nucleic acid molecule SEQ ID NO. 42502 or polypeptide SEQ ID NO. 42503, respectively, or a homolog or a fragment thereof, is increased or generated, or if the activity methyltransferase is increased or generated in a non-human organism, like a microorganism or a plant cell, plant or part thereof, especially with non-targeted localization, For example, an increase of the tryptophan of at least 1 percent, particularly in a range of 47 to 277-percent is conferred as compared to a corresponding non-transformed wild type non-human organism.

[34552] Accordingly, in one embodiment, an increase of tryptophan in a non-human organism, as compared to a corresponding non-transformed wild type non-human organism, is conferred in the process of the invention, if the activity of a polypeptide showing the activity of a 3-ketoacyl-CoA thiolase, or if the activity of the polypeptide B3845, preferably represented by SEQ ID NO. 100676, or a homolog or fragment thereof, or if the activity of a polypeptide encoded by a nucleic acid molecule comprising the nucleic acid SEQ ID NO. 100675, preferably the coding region thereof, or a homolog or fragment thereof, e.g. derived from Escherichia coli, is increased or generated. For example the activity of a nucleic acid molecule or a polypeptide comprising the nucleic acid, preferably the coding region thereof, or polypeptide or the consensus sequence or the polypeptide motif, as depicted in Table I, II or IV, application No. 5, column 5 or 8 in the respective same line as the nucleic acid molecule SEQ ID NO. 100675 or polypeptide SEQ ID NO. 100676, respectively, or a homolog or a fragment thereof, is increased or generated, or if the activity 3-ketoacyl-CoA thiolase is increased or generated in a non-human organism, like a microorganism or a plant cell, plant or part thereof, especially with plastidic localization, For example, an increase of the tryptophan of at least 1 percent, particularly in a range of 56 to 87-percent is conferred as compared to a corresponding non-transformed wild type non-human organism.

[34553] Accordingly, in one embodiment, an increase of tryptophan in a non-human organism, as compared to a corresponding non-transformed wild type non-human organism, is conferred in the process of the invention, if the activity of a polypeptide showing the activity of a glutamine synthetase, or if the activity of the polypeptide B3870, preferably represented by SEQ ID NO. 101328, or a homolog or fragment thereof, or if the activity of a polypeptide encoded by a nucleic acid molecule comprising the nucleic acid SEQ ID NO. 101327, preferably the coding region thereof, or a homolog or fragment thereof, e.g. derived from Escherichia coli, is increased or generated. For example the activity of a nucleic acid molecule or a polypeptide comprising the nucleic acid, preferably the coding region thereof, or polypeptide or the consensus sequence or the polypeptide motif, as depicted in Table I, II or IV, application No. 5, column 5 or 8 in the respective same line as the nucleic acid molecule SEQ ID NO. 101327 or polypeptide SEQ ID NO. 101328, respectively, or a homolog or a fragment thereof, is increased or generated, or if the activity glutamine synthetase is increased or generated in a non-human organism, like a microorganism or a plant cell, plant or part thereof, especially with plastidic localization, For example, an increase of the tryptophan of at least 1 percent, particularly in a range of 47 to 85-percent is conferred as compared to a corresponding non-transformed wild type non-human organism.

[34554] Accordingly, in one embodiment, an increase of tryptophan in a non-human organism, as compared to a corresponding non-transformed wild type non-human organism, is conferred in the process of the invention, if the activity of a polypeptide showing the activity of a b3989-protein, or if the activity of the polypeptide B3989, preferably represented by SEQ ID NO. 44373, or a homolog or fragment thereof, or if the activity of a polypeptide encoded by a nucleic acid molecule comprising the nucleic acid SEQ ID NO. 44372, preferably the coding region thereof, or a homolog or fragment thereof, e.g. derived from Escherichia coli, is increased or generated. For example the activity of a nucleic acid molecule or a polypeptide comprising the nucleic acid, preferably the coding region thereof, or polypeptide or the consensus sequence or the polypeptide motif, as depicted in Table I, II or IV, application No. 5, column 5 or 8 in the respective same line as the nucleic acid molecule SEQ ID NO. 44372 or polypeptide SEQ ID NO. 44373, respectively, or a homolog or a fragment thereof, is increased or generated, or if the activity b3989-protein is increased or generated in a non-human organism, like a microorganism or a plant cell, plant or part thereof, especially with non-targeted localization, For example, an increase of the tryptophan of at least 1 percent, particularly in a range of 32 to 398-percent is conferred as compared to a corresponding non-transformed wild type non-human organism.

[34555] Accordingly, in one embodiment, an increase of tryptophan in a non-human organism, as compared to a corresponding non-transformed wild type non-human organism, is conferred in the process of the invention, if the activity of a polypeptide showing the activity of a b4029-protein, or if the activity of the polypeptide B4029, preferably represented by SEQ ID NO. 10741, or a homolog or fragment thereof, or if the activity of a polypeptide encoded by a nucleic acid molecule comprising the nucleic acid SEQ ID NO. 10740, preferably the coding region thereof, or a homolog or fragment thereof, e.g. derived from Escherichia coli, is increased or generated. For example the activity of a nucleic acid molecule or a polypeptide comprising the nucleic acid, preferably the coding region thereof, or polypeptide or the consensus sequence or the polypeptide motif, as depicted in Table I, II or IV, application No. 5, column 5 or 8 in the respective same line as the nucleic acid molecule SEQ ID NO. 10740 or polypeptide SEQ ID NO. 10741, respectively, or a homolog or a fragment thereof, is increased or generated, or if the activity b4029-protein is increased or generated in a non-human organism, like a microorganism or a plant cell, plant or part thereof, especially with non-targeted localization, For example, an increase of the tryptophan of at least 1 percent, particularly in a range of 27 to 814-percent is conferred as compared to a corresponding non-transformed wild type non-human organism.

[34556] Accordingly, in one embodiment, an increase of tryptophan in a non-human organism, as compared to a corresponding non-transformed wild type non-human organism, is conferred in the process of the invention, if the activity of a polypeptide showing the activity of a b4121-protein, or if the activity of the polypeptide B4121, preferably represented by SEQ ID NO. 44610, or a homolog or fragment thereof, or if the activity of a polypeptide encoded by a nucleic acid molecule comprising the nucleic acid SEQ ID NO. 44609, preferably the coding region thereof, or a homolog or fragment thereof, e.g. derived from Escherichia coli, is increased or generated. For example the activity of a nucleic acid molecule or a polypeptide comprising the nucleic acid, preferably the coding region thereof, or polypeptide or the consensus sequence or the polypeptide motif, as depicted in Table I, II or IV, application No. 5, column 5 or 8 in the respective same line as the nucleic acid molecule SEQ ID NO. 44609 or polypeptide SEQ ID NO. 44610, respectively, or a homolog or a fragment thereof, is increased or generated, or if the activity b4121-protein is increased or generated in a non-human organism, like a microorganism or a plant cell, plant or part thereof, especially with non-targeted localization, For example, an increase of the tryptophan of at least 1 percent, particularly in a range of 30 to 46-percent is conferred as compared to a corresponding non-transformed wild type non-human organism.

[34557] Accordingly, in one embodiment, an increase of tryptophan in a non-human organism, as compared to a corresponding non-transformed wild type non-human organism, is conferred in the process of the invention, if the activity of a polypeptide showing the activity of a acetyltransferase, or if the activity of the polypeptide B4256, preferably represented by SEQ ID NO. 45322, or a homolog or fragment thereof, or if the activity of a polypeptide encoded by a nucleic acid molecule comprising the nucleic acid SEQ ID NO. 45321, preferably the coding region thereof, or a homolog or fragment thereof, e.g. derived from Escherichia coli, is increased or generated.

[34558] For example the activity of a nucleic acid molecule or a polypeptide comprising the nucleic acid, preferably the coding region thereof, or polypeptide or the consensus sequence or the polypeptide motif, as depicted in Table I, II or IV, application No. 5, column 5 or 8 in the respective same line as the nucleic acid molecule SEQ ID NO. 45321 or polypeptide SEQ ID NO. 45322, respectively, or a homolog or a fragment thereof, is increased or generated, or if the activity acetyltransferase is increased or generated in a non-human organism, like a microorganism or a plant cell, plant or part thereof, especially with non-targeted localization, For example, an increase of the tryptophan of at least 1 percent, particularly in a range of 34 to 217-percent is conferred as compared to a corresponding non-transformed wild type non-human organism.

[34559] Accordingly, in one embodiment, an increase of tryptophan in a non-human organism, as compared to a corresponding non-transformed wild type non-human organism, is conferred in the process of the invention, if the activity of a polypeptide showing the activity of a RNA binding protein, or if the activity of the polypeptide GM02LC17556, preferably represented by SEQ ID NO. 46516, or a homolog or fragment thereof, or if the activity of a polypeptide encoded by a nucleic acid molecule comprising the nucleic acid SEQ ID NO. 46515, preferably the coding region thereof, or a homolog or fragment thereof, e.g. derived from Glycine max, is increased or generated. For example the activity of a nucleic acid molecule or a polypeptide comprising the nucleic acid, preferably the coding region thereof, or polypeptide or the consensus sequence or the polypeptide motif, as depicted in Table I, II or IV, application No. 5, column 5 or 8 in the respective same line as the nucleic acid molecule SEQ ID NO. 46515 or polypeptide SEQ ID NO. 46516, respectively, or a homolog or a fragment thereof, is increased or generated, or if the activity RNA binding protein is increased or generated in a non-human organism, like a microorganism or a plant cell, plant or part thereof, especially with non-targeted localization, For example, an increase of the tryptophan of at least 1 percent, particularly in a range of 37 to 149-percent is conferred as compared to a corresponding non-transformed wild type non-human organism.

[34560] Accordingly, in one embodiment, an increase of tryptophan in a non-human organism, as compared to a corresponding non-transformed wild type non-human organism, is conferred in the process of the invention, if the activity of a polypeptide showing the activity of a transcription factor, or if the activity of the polypeptide GM02LC21368, preferably represented by SEQ ID NO. 84199, or a homolog or fragment thereof, or if the activity of a polypeptide encoded by a nucleic acid molecule comprising the nucleic acid SEQ ID NO. 84198, preferably the coding region thereof, or a homolog or fragment thereof, e.g. derived from Glycine max, is increased or generated. For example the activity of a nucleic acid molecule or a polypeptide comprising the nucleic acid, preferably the coding region thereof, or polypeptide or the consensus sequence or the polypeptide motif, as depicted in Table I, II or IV, application No. 5, column 5 or 8 in the respective same line as the nucleic acid molecule SEQ ID NO. 84198 or polypeptide SEQ ID NO. 84199, respectively, or a homolog or a fragment thereof, is increased or generated, or if the activity transcription factor is increased or generated in a non-human organism, like a microorganism or a plant cell, plant or part thereof, especially with non-targeted localization, For example, an increase of the tryptophan of at least 1 percent, particularly in a range of 43 to 224-percent is conferred as compared to a corresponding non-transformed wild type non-human organism.

[34561] Accordingly, in one embodiment, an increase of tryptophan in a non-human organism, as compared to a corresponding non-transformed wild type non-human organism, is conferred in the process of the invention, if the activity of a polypeptide showing the activity of a choline kinase, or if the activity of the polypeptide S_pp020029328r, preferably represented by SEQ ID NO. 101781, or a homolog or fragment thereof, or if the activity of a polypeptide encoded by a nucleic acid molecule comprising the nucleic acid SEQ ID NO. 101780, preferably the coding region thereof, or a homolog or fragment thereof, e.g. derived from Physcomitrella patens, is increased or generated. For example the activity of a nucleic acid molecule or a polypeptide comprising the nucleic acid, preferably the coding region thereof, or polypeptide or the consensus sequence or the polypeptide motif, as depicted in Table I, II or IV, application No. 5, column 5 or 8 in the respective same line as the nucleic acid molecule SEQ ID NO. 101780 or polypeptide SEQ ID NO. 101781, respectively, or a homolog or a fragment thereof, is increased or generated, or if the activity choline kinase is increased or generated in a non-human organism, like a microorganism or a plant cell, plant or part thereof, especially with non-targeted localization, For example, an increase of the tryptophan of at least 1 percent, particularly in a range of 40 to 55-percent is conferred as compared to a corresponding non-transformed wild type non-human organism.

[34562] Accordingly, in one embodiment, an increase of tryptophan in a non-human organism, as compared to a corresponding non-transformed wild type non-human organism, is conferred in the process of the invention, if the activity of a polypeptide showing the activity of a flavodoxin, or if the activity of the polypeptide Sll0248, preferably represented by SEQ ID NO. 49144, or a homolog or fragment thereof, or if the activity of a polypeptide encoded by a nucleic acid molecule comprising the nucleic acid SEQ ID NO. 49143, preferably the coding region thereof, or a homolog or fragment thereof, e.g. derived from Synechocystis sp., is increased or generated. For example the activity of a nucleic acid molecule or a polypeptide comprising the nucleic acid, preferably the coding region thereof, or polypeptide or the consensus sequence or the polypeptide motif, as depicted in Table I, II or IV, application No. 5, column 5 or 8 in the respective same line as the nucleic acid molecule SEQ ID NO. 49143 or polypeptide SEQ ID NO. 49144, respectively, or a homolog or a fragment thereof, is increased or generated, or if the activity flavodoxin is increased or generated in a non-human organism, like a microorganism or a plant cell, plant or part thereof, especially with plastidic localization, For example, an increase of the tryptophan of at least 1 percent, particularly in a range of 32 to 169-percent is conferred as compared to a corresponding non-transformed wild type non-human organism.

[34563] Accordingly, in one embodiment, an increase of tryptophan in a non-human organism, as compared to a corresponding non-transformed wild type non-human organism, is conferred in the process of the invention, if the activity of a polypeptide showing the activity of a NAD(P)H-quinone oxidoreductase subunit, or if the activity of the polypeptide 5110521, preferably represented by SEQ ID NO. 50340, or a homolog or fragment thereof, or if the activity of a polypeptide encoded by a nucleic acid molecule comprising the nucleic acid SEQ ID NO. 50339, preferably the coding region thereof, or a homolog or fragment thereof, e.g. derived from Synechocystis sp., is increased or generated. For example the activity of a nucleic acid molecule or a polypeptide comprising the nucleic acid, preferably the coding region thereof, or polypeptide or the consensus sequence or the polypeptide motif, as depicted in Table I, II or IV, application No. 5, column 5 or 8 in the respective same line as the nucleic acid molecule SEQ ID NO. 50339 or polypeptide SEQ ID NO. 50340, respectively, or a homolog or a fragment thereof, is increased or generated, or if the activity NAD(P)H-quinone oxidoreductase subunit is increased or generated in a non-human organism, like a microorganism or a plant cell, plant or part thereof, especially with plastidic localization, For example, an increase of the tryptophan of at least 1 percent, particularly in a range of 31 to 49-percent is conferred as compared to a corresponding non-transformed wild type non-human organism.

[34564] Accordingly, in one embodiment, an increase of tryptophan in a non-human organism, as compared to a corresponding non-transformed wild type non-human organism, is conferred in the process of the invention, if the activity of a polypeptide showing the activity of a binding-protein-dependent transport systems inner membrane component, or if the activity of the polypeptide Sll0833, preferably represented by SEQ ID NO. 101708, or a homolog or fragment thereof, or if the activity of a polypeptide encoded by a nucleic acid molecule comprising the nucleic acid SEQ ID NO. 101707, preferably the coding region thereof, or a homolog or fragment thereof, e.g. derived from Synechocystis sp., is increased or generated. For example the activity of a nucleic acid molecule or a polypeptide comprising the nucleic acid, preferably the coding region thereof, or polypeptide or the consensus sequence or the polypeptide motif, as depicted in Table I, II or IV, application No. 5, column 5 or 8 in the respective same line as the nucleic acid molecule SEQ ID NO. 101707 or polypeptide SEQ ID NO. 101708, respectively, or a homolog or a fragment thereof, is increased or generated, or if the activity binding-protein-dependent transport systems inner membrane component is increased or generated in a non-human organism, like a microorganism or a plant cell, plant or part thereof, especially with non-targeted localization, For example, an increase of the tryptophan of at least 1 percent, particularly in a range of 42 to 92-percent is conferred as compared to a corresponding non-transformed wild type non-human organism.

[34565] Accordingly, in one embodiment, an increase of tryptophan in a non-human organism, as compared to a corresponding non-transformed wild type non-human organism, is conferred in the process of the invention, if the activity of a polypeptide showing the activity of a carbon dioxide concentrating mechanism protein, or if the activity of the polypeptide Sll1031, preferably represented by SEQ ID NO. 52635, or a homolog or fragment thereof, or if the activity of a polypeptide encoded by a nucleic acid molecule comprising the nucleic acid SEQ ID NO. 52634, preferably the coding region thereof, or a homolog or fragment thereof, e.g. derived from Synechocystis sp., is increased or generated. For example the activity of a nucleic acid molecule or a polypeptide comprising the nucleic acid, preferably the coding region thereof, or polypeptide or the consensus sequence or the polypeptide motif, as depicted in Table I, II or IV, application No. 5, column 5 or 8 in the respective same line as the nucleic acid molecule SEQ ID NO. 52634 or polypeptide SEQ ID NO. 52635, respectively, or a homolog or a fragment thereof, is increased or generated, or if the activity carbon dioxide concentrating mechanism protein is increased or generated in a non-human organism, like a microorganism or a plant cell, plant or part thereof, especially with mitochondrial localization, For example, an increase of the tryptophan of at least 1 percent, particularly in a range of 28 to 167-percent is conferred as compared to a corresponding non-transformed wild type non-human organism.

[34566] Accordingly, in one embodiment, an increase of tryptophan in a non-human organism, as compared to a corresponding non-transformed wild type non-human organism, is conferred in the process of the invention, if the activity of a polypeptide showing the activity of a nitrate/nitrite transport protein, or if the activity of the polypeptide Sll1450, preferably represented by SEQ ID NO. 54338, or a homolog or fragment thereof, or if the activity of a polypeptide encoded by a nucleic acid molecule comprising the nucleic acid SEQ ID NO. 54337, preferably the coding region thereof, or a homolog or fragment thereof, e.g. derived from Synechocystis sp., is increased or generated. For example the activity of a nucleic acid molecule or a polypeptide comprising the nucleic acid, preferably the coding region thereof, or polypeptide or the consensus sequence or the polypeptide motif, as depicted in Table I, II or IV, application No. 5, column 5 or 8 in the respective same line as the nucleic acid molecule SEQ ID NO. 54337 or polypeptide SEQ ID NO. 54338, respectively, or a homolog or a fragment thereof, is increased or generated, or if the activity nitrate/nitrite transport protein is increased or generated in a non-human organism, like a microorganism or a plant cell, plant or part thereof, especially with mitochondrial localization, For example, an increase of the tryptophan of at least 1 percent, particularly in a range of 42 to 85-percent is conferred as compared to a corresponding non-transformed wild type non-human organism.

[34567] Accordingly, in one embodiment, an increase of tryptophan in a non-human organism, as compared to a corresponding non-transformed wild type non-human organism, is conferred in the process of the invention, if the activity of a polypeptide showing the activity of a coproporphyrinogen III oxidase, or if the activity of the polypeptide Sll1917, preferably represented by SEQ ID NO. 11472, or a homolog or fragment thereof, or if the activity of a polypeptide encoded by a nucleic acid molecule comprising the nucleic acid SEQ ID NO. 11471, preferably the coding region thereof, or a homolog or fragment thereof, e.g. derived from Synechocystis sp., is increased or generated. For example the activity of a nucleic acid molecule or a polypeptide comprising the nucleic acid, preferably the coding region thereof, or polypeptide or the consensus sequence or the polypeptide motif, as depicted in Table I, II or IV, application No. 5, column 5 or 8 in the respective same line as the nucleic acid molecule SEQ ID NO. 11471 or polypeptide SEQ ID NO. 11472, respectively, or a homolog or a fragment thereof, is increased or generated, or if the activity coproporphyrinogen III oxidase is increased or generated in a non-human organism, like a microorganism or a plant cell, plant or part thereof, especially with mitochondrial localization, For example, an increase of the tryptophan of at least 1 percent, particularly in a range of 31 to 36-percent is conferred as compared to a corresponding non-transformed wild type non-human organism.

[34568] Accordingly, in one embodiment, an increase of tryptophan in a non-human organism, as compared to a corresponding non-transformed wild type non-human organism, is conferred in the process of the invention, if the activity of a polypeptide showing the activity of a precorrin methylase, or if the activity of the polypeptide Slr0239, preferably represented by SEQ ID NO. 86541, or a homolog or fragment thereof, or if the activity of a polypeptide encoded by a nucleic acid molecule comprising the nucleic acid SEQ ID NO. 86540, preferably the coding region thereof, or a homolog or fragment thereof, e.g. derived from Synechocystis sp., is increased or generated. For example the activity of a nucleic acid molecule or a polypeptide comprising the nucleic acid, preferably the coding region thereof, or polypeptide or the consensus sequence or the polypeptide motif, as depicted in Table I, II or IV, application No. 5, column 5 or 8 in the respective same line as the nucleic acid molecule SEQ ID NO. 86540 or polypeptide SEQ ID NO. 86541, respectively, or a homolog or a fragment thereof, is increased or generated, or if the activity precorrin methylase is increased or generated in a non-human organism, like a microorganism or a plant cell, plant or part thereof, especially with mitochondrial localization, For example, an increase of the tryptophan of at least 1 percent, particularly in a range of 37 to 162-percent is conferred as compared to a corresponding non-transformed wild type non-human organism

[34569] Accordingly, in one embodiment, an increase of tryptophan in a non-human organism, as compared to a corresponding non-transformed wild type non-human organism, is conferred in the process of the invention, if the activity of a polypeptide showing the activity of a malate dehydrogenase, or if the activity of the polypeptide Slr0721, preferably represented by SEQ ID NO. 87398, or a homolog or fragment thereof, or if the activity of a polypeptide encoded by a nucleic acid molecule comprising the nucleic acid SEQ ID NO. 87397, preferably the coding region thereof, or a homolog or fragment thereof, e.g. derived from Synechocystis sp., is increased or generated. For example the activity of a nucleic acid molecule or a polypeptide comprising the nucleic acid, preferably the coding region thereof, or polypeptide or the consensus sequence or the polypeptide motif, as depicted in Table I, II or IV, application No. 5, column 5 or 8 in the respective same line as the nucleic acid molecule SEQ ID NO. 87397 or polypeptide SEQ ID NO. 87398, respectively, or a homolog or a fragment thereof, is increased or generated, or if the activity malate dehydrogenase is increased or generated in a non-human organism, like a microorganism or a plant cell, plant or part thereof, especially with plastidic localization, For example, an increase of the tryptophan of at least 1 percent, particularly in a range of 46 to 100-percent is conferred as compared to a corresponding non-transformed wild type non-human organism.

[34570] Accordingly, in one embodiment, an increase of tryptophan in a non-human organism, as compared to a corresponding non-transformed wild type non-human organism, is conferred in the process of the invention, if the activity of a polypeptide showing the activity of a geranylgeranyl pyrophosphate synthase, or if the activity of the polypeptide Slr0739, preferably represented by SEQ ID NO. 57236, or a homolog or fragment thereof, or if the activity of a polypeptide encoded by a nucleic acid molecule comprising the nucleic acid SEQ ID NO. 57235, preferably the coding region thereof, or a homolog or fragment thereof, e.g. derived from Synechocystis sp., is increased or generated. For example the activity of a nucleic acid molecule or a polypeptide comprising the nucleic acid, preferably the coding region thereof, or polypeptide or the consensus sequence or the polypeptide motif, as depicted in Table I, II or IV, application No. 5, column 5 or 8 in the respective same line as the nucleic acid molecule SEQ ID NO. 57235 or polypeptide SEQ ID NO. 57236, respectively, or a homolog or a fragment thereof, is increased or generated, or if the activity geranylgeranyl pyrophosphate synthase is increased or generated in a non-human organism, like a microorganism or a plant cell, plant or part thereof, especially with plastidic localization, For example, an increase of the tryptophan of at least 1 percent, particularly in a range of 35 to 54-percent is conferred as compared to a corresponding non-transformed wild type non-human organism.

[34571] Accordingly, in one embodiment, an increase of tryptophan in a non-human organism, as compared to a corresponding non-transformed wild type non-human organism, is conferred in the process of the invention, if the activity of a polypeptide showing the activity of a slr1107-protein, or if the activity of the polypeptide Slr1107, preferably represented by SEQ ID NO. 101777, or a homolog or fragment thereof, or if the activity of a polypeptide encoded by a nucleic acid molecule comprising the nucleic acid SEQ ID NO. 101776, preferably the coding region thereof, or a homolog or fragment thereof, e.g. derived from Synechocystis sp., is increased or generated. For example the activity of a nucleic acid molecule or a polypeptide comprising the nucleic acid, preferably the coding region thereof, or polypeptide or the consensus sequence or the polypeptide motif, as depicted in Table I, II or IV, application No. 5, column 5 or 8 in the respective same line as the nucleic acid molecule SEQ ID NO. 101776 or polypeptide SEQ ID NO. 101777, respectively, or a homolog or a fragment thereof, is increased or generated, or if the activity slr1107-protein is increased or generated in a non-human organism, like a microorganism or a plant cell, plant or part thereof, especially with plastidic localization, For example, an increase of the tryptophan of at least 1 percent, particularly in a range of 30 to 54-percent is conferred as compared to a corresponding non-transformed wild type non-human organism.

[34572] Accordingly, in one embodiment, an increase of tryptophan in a non-human organism, as compared to a corresponding non-transformed wild type non-human organism, is conferred in the process of the invention, if the activity of a polypeptide showing the activity of a photosystem II protein, or if the activity of the polypeptide Slr1739, preferably represented by SEQ ID NO. 58732, or a homolog or fragment thereof, or if the activity of a polypeptide encoded by a nucleic acid molecule comprising the nucleic acid SEQ ID NO. 58731, preferably the coding region thereof, or a homolog or fragment thereof, e.g. derived from Synechocystis sp., is increased or generated. For example the activity of a nucleic acid molecule or a polypeptide comprising the nucleic acid, preferably the coding region thereof, or polypeptide or the consensus sequence or the polypeptide motif, as depicted in Table I, II or IV, application No. 5, column 5 or 8 in the respective same line as the nucleic acid molecule SEQ ID NO. 58731 or polypeptide SEQ ID NO. 58732, respectively, or a homolog or a fragment thereof, is increased or generated, or if the activity photosystem II protein is increased or generated in a non-human organism, like a microorganism or a plant cell, plant or part thereof, especially with plastidic localization, For example, an increase of the tryptophan of at least 1 percent, particularly in a range of 86 to 157-percent is conferred as compared to a corresponding non-transformed wild type non-human organism.

[34573] Accordingly, in one embodiment, an increase of tryptophan in a non-human organism, as compared to a corresponding non-transformed wild type non-human organism, is conferred in the process of the invention, if the activity of a polypeptide showing the activity of a short-chain alcohol dehydrogenase family, or if the activity of the polypeptide Slr2124, preferably represented by SEQ ID NO. 59371, or a homolog or fragment thereof, or if the activity of a polypeptide encoded by a nucleic acid molecule comprising the nucleic acid SEQ ID NO. 59370, preferably the coding region thereof, or a homolog or fragment thereof, e.g. derived from Synechocystis sp., is increased or generated. For example the activity of a nucleic acid molecule or a polypeptide comprising the nucleic acid, preferably the coding region thereof, or polypeptide or the consensus sequence or the polypeptide motif, as depicted in Table I, II or IV, application No. 5, column 5 or 8 in the respective same line as the nucleic acid molecule SEQ ID NO. 59370 or polypeptide SEQ ID NO. 59371, respectively, or a homolog or a fragment thereof, is increased or generated, or if the activity short-chain alcohol dehydrogenase family is increased or generated in a non-human organism, like a microorganism or a plant cell, plant or part thereof, especially with plastidic localization, For example, an increase of the tryptophan of at least 1 percent, particularly in a range of 38 to 80-percent is conferred as compared to a corresponding non-transformed wild type non-human organism.

[34574] Accordingly, in one embodiment, an increase of tryptophan in a non-human organism, as compared to a corresponding non-transformed wild type non-human organism, is conferred in the process of the invention, if the activity of a polypeptide showing the activity of a Sec-independent protein translocase subunit, or if the activity of the polypeptide TTC0019, preferably represented by SEQ ID NO. 12699, or a homolog or fragment thereof, or if the activity of a polypeptide encoded by a nucleic acid molecule comprising the nucleic acid SEQ ID NO. 12698, preferably the coding region thereof, or a homolog or fragment thereof, e.g. derived from Thermus thermophilus, is increased or generated. For example the activity of a nucleic acid molecule or a polypeptide comprising the nucleic acid, preferably the coding region thereof, or polypeptide or the consensus sequence or the polypeptide motif, as depicted in Table I, II or IV, application No. 5, column 5 or 8 in the respective same line as the nucleic acid molecule SEQ ID NO. 12698 or polypeptide SEQ ID NO. 12699, respectively, or a homolog or a fragment thereof, is increased or generated, or if the activity Sec-independent protein translocase subunit is increased or generated in a non-human organism, like a microorganism or a plant cell, plant or part thereof, especially with non-targeted localization, For example, an increase of the tryptophan of at least 1 percent, particularly in a range of 306 to 472-percent is conferred as compared to a corresponding non-transformed wild type non-human organism.

[34575] Accordingly, in one embodiment, an increase of tryptophan in a non-human organism, as compared to a corresponding non-transformed wild type non-human organism, is conferred in the process of the invention, if the activity of a polypeptide showing the activity of a 3-deoxy-7-phosphoheptulonate synthase, or if the activity of the polypeptide Ybr249c, preferably represented by SEQ ID NO. 88880, or a homolog or fragment thereof, or if the activity of a polypeptide encoded by a nucleic acid molecule comprising the nucleic acid SEQ ID NO. 88879, preferably the coding region thereof, or a homolog or fragment thereof, e.g. derived from Saccharomyces cerevisiae, is increased or generated. For example the activity of a nucleic acid molecule or a polypeptide comprising the nucleic acid, preferably the coding region thereof, or polypeptide or the consensus sequence or the polypeptide motif, as depicted in Table I, II or IV, application No. 5, column 5 or 8 in the respective same line as the nucleic acid molecule SEQ ID NO. 88879 or polypeptide SEQ ID NO. 88880, respectively, or a homolog or a fragment thereof, is increased or generated, or if the activity 3-deoxy-7-phosphoheptulonate synthase is increased or generated in a non-human organism, like a microorganism or a plant cell, plant or part thereof, especially with plastidic localization, For example, an increase of the tryptophan of at least 1 percent, particularly in a range of 59 to 405-percent is conferred as compared to a corresponding non-transformed wild type non-human organism.

[34576] Accordingly, in one embodiment, an increase of tryptophan in a non-human organism, as compared to a corresponding non-transformed wild type non-human organism, is conferred in the process of the invention, if the activity of a polypeptide showing the activity of a branched-chain amino acid permease, or if the activity of the polypeptide Ydr046c, preferably represented by SEQ ID NO. 63545, or a homolog or fragment thereof, or if the activity of a polypeptide encoded by a nucleic acid molecule comprising the nucleic acid SEQ ID NO. 63544, preferably the coding region thereof, or a homolog or fragment thereof, e.g. derived from Saccharomyces cerevisiae, is increased or generated. For example the activity of a nucleic acid molecule or a polypeptide comprising the nucleic acid, preferably the coding region thereof, or polypeptide or the consensus sequence or the polypeptide motif, as depicted in Table I, II or IV, application No. 5, column 5 or 8 in the respective same line as the nucleic acid molecule SEQ ID NO. 63544 or polypeptide SEQ ID NO. 63545, respectively, or a homolog or a fragment thereof, is increased or generated, or if the activity branched-chain amino acid permease is increased or generated in a non-human organism, like a microorganism or a plant cell, plant or part thereof, especially with plastidic localization, For example, an increase of the tryptophan of at least 1 percent, particularly in a range of 30 to 63-percent is conferred as compared to a corresponding non-transformed wild type non-human organism.

[34577] Accordingly, in one embodiment, an increase of tryptophan in a non-human organism, as compared to a corresponding non-transformed wild type non-human organism, is conferred in the process of the invention, if the activity of a polypeptide showing the activity of a yfl054c-protein, or if the activity of the polypeptide Yfl054c, preferably represented by SEQ ID NO. 64149, or a homolog or fragment thereof, or if the activity of a polypeptide encoded by a nucleic acid molecule comprising the nucleic acid SEQ ID NO. 64148, preferably the coding region thereof, or a homolog or fragment thereof, e.g. derived from Saccharomyces cerevisiae, is increased or generated. For example the activity of a nucleic acid molecule or a polypeptide comprising the nucleic acid, preferably the coding region thereof, or polypeptide or the consensus sequence or the polypeptide motif, as depicted in Table I, II or IV, application No. 5, column 5 or 8 in the respective same line as the nucleic acid molecule SEQ ID NO. 64148 or polypeptide SEQ ID NO. 64149, respectively, or a homolog or a fragment thereof, is increased or generated, or if the activity yfl054c-protein is increased or generated in a non-human organism, like a microorganism or a plant cell, plant or part thereof, especially with plastidic localization, For example, an increase of the tryptophan of at least 1 percent, particularly in a range of 30 to 41-percent is conferred as compared to a corresponding non-transformed wild type non-human organism.

[34578] Accordingly, in one embodiment, an increase of tryptophan in a non-human organism, as compared to a corresponding non-transformed wild type non-human organism, is conferred in the process of the invention, if the activity of a polypeptide showing the activity of a glycerol kinase, or if the activity of the polypeptide Yhl032c, preferably represented by SEQ ID NO. 101856, or a homolog or fragment thereof, or if the activity of a polypeptide encoded by a nucleic acid molecule comprising the nucleic acid SEQ ID NO. 101855, preferably the coding region thereof, or a homolog or fragment thereof, e.g. derived from Saccharomyces cerevisiae, is increased or generated. For example the activity of a nucleic acid molecule or a polypeptide comprising the nucleic acid, preferably the coding region thereof, or polypeptide or the consensus sequence or the polypeptide motif, as depicted in Table I, II or IV, application No. 5, column 5 or 8 in the respective same line as the nucleic acid molecule SEQ ID NO. 101855 or polypeptide SEQ ID NO. 101856, respectively, or a homolog or a fragment thereof, is increased or generated, or if the activity glycerol kinase is increased or generated in a non-human organism, like a microorganism or a plant cell, plant or part thereof, especially with plastidic localization, For example, an increase of the tryptophan of at least 1 percent, particularly in a range of 61 to 101-percent is conferred as compared to a corresponding non-transformed wild type non-human organism.

[34579] Accordingly, in one embodiment, an increase of tryptophan in a non-human organism, as compared to a corresponding non-transformed wild type non-human organism, is conferred in the process of the invention, if the activity of a polypeptide showing the activity of a aromatic amino acid aminotransferase, or if the activity of the polypeptide Yhr137w, preferably represented by SEQ ID NO. 102016, or a homolog or fragment thereof, or if the activity of a polypeptide encoded by a nucleic acid molecule comprising the nucleic acid SEQ ID NO. 102015, preferably the coding region thereof, or a homolog or fragment thereof, e.g. derived from Saccharomyces cerevisiae, is increased or generated. For example the activity of a nucleic acid molecule or a polypeptide comprising the nucleic acid, preferably the coding region thereof, or polypeptide or the consensus sequence or the polypeptide motif, as depicted in Table I, II or IV, application No. 5, column 5 or 8 in the respective same line as the nucleic acid molecule SEQ ID NO. 102015 or polypeptide SEQ ID NO. 102016, respectively, or a homolog or a fragment thereof, is increased or generated, or if the activity aromatic amino acid aminotransferase is increased or generated in a non-human organism, like a microorganism or a plant cell, plant or part thereof, especially with plastidic localization, For example, an increase of the tryptophan of at least 1 percent, particularly in a range of 29 to 77-percent is conferred as compared to a corresponding non-transformed wild type non-human organism.

[34580] Accordingly, in one embodiment, an increase of tryptophan in a non-human organism, as compared to a corresponding non-transformed wild type non-human organism, is conferred in the process of the invention, if the activity of a polypeptide showing the activity of a cystathionine gamma-synthase, or if the activity of the polypeptide Yjr130c, preferably represented by SEQ ID NO. 14844, or a homolog or fragment thereof, or if the activity of a polypeptide encoded by a nucleic acid molecule comprising the nucleic acid SEQ ID NO. 14843, preferably the coding region thereof, or a homolog or fragment thereof, e.g. derived from Saccharomyces cerevisiae, is increased or generated. For example the activity of a nucleic acid molecule or a polypeptide comprising the nucleic acid, preferably the coding region thereof, or polypeptide or the consensus sequence or the polypeptide motif, as depicted in Table I, II or IV, application No. 5, column 5 or 8 in the respective same line as the nucleic acid molecule SEQ ID NO. 14843 or polypeptide SEQ ID NO. 14844, respectively, or a homolog or a fragment thereof, is increased or generated, or if the activity cystathionine gamma-synthase is increased or generated in a non-human organism, like a microorganism or a plant cell, plant or part thereof, especially with non-targeted localization, For example, an increase of the tryptophan of at least 1 percent, particularly in a range of 30 to 62-percent is conferred as compared to a corresponding non-transformed wild type non-human organism.

[34581] Accordingly, in one embodiment, an increase of tryptophan in a non-human organism, as compared to a corresponding non-transformed wild type non-human organism, is conferred in the process of the invention, if the activity of a polypeptide showing the activity of a polygalacturonase, or if the activity of the polypeptide Yjr153w, preferably represented by SEQ ID NO. 66275, or a homolog or fragment thereof, or if the activity of a polypeptide encoded by a nucleic acid molecule comprising the nucleic acid SEQ ID NO. 66274, preferably the coding region thereof, or a homolog or fragment thereof, e.g. derived from Saccharomyces cerevisiae, is increased or generated. For example the activity of a nucleic acid molecule or a polypeptide comprising the nucleic acid, preferably the coding region thereof, or polypeptide or the consensus sequence or the polypeptide motif, as depicted in Table I, II or IV, application No. 5, column 5 or 8 in the respective same line as the nucleic acid molecule SEQ ID NO. 66274 or polypeptide SEQ ID NO. 66275, respectively, or a homolog or a fragment thereof, is increased or generated, or if the activity polygalacturonase is increased or generated in a non-human organism, like a microorganism or a plant cell, plant or part thereof, especially with non-targeted localization, For example, an increase of the tryptophan of at least 1 percent, particularly in a range of 34 to 115-percent is conferred as compared to a corresponding non-transformed wild type non-human organism.

[34582] Accordingly, in one embodiment, an increase of tryptophan in a non-human organism, as compared to a corresponding non-transformed wild type non-human organism, is conferred in the process of the invention, if the activity of a polypeptide showing the activity of a lipase, or if the activity of the polypeptide Ykr089c, preferably represented by SEQ ID NO. 102062, or a homolog or fragment thereof, or if the activity of a polypeptide encoded by a nucleic acid molecule comprising the nucleic acid SEQ ID NO. 102061, preferably the coding region thereof, or a homolog or fragment thereof, e.g. derived from Saccharomyces cerevisiae, is increased or generated. For example the activity of a nucleic acid molecule or a polypeptide comprising the nucleic acid, preferably the coding region thereof, or polypeptide or the consensus sequence or the polypeptide motif, as depicted in Table I, II or IV, application No. 5, column 5 or 8 in the respective same line as the nucleic acid molecule SEQ ID NO. 102061 or polypeptide SEQ ID NO. 102062, respectively, or a homolog or a fragment thereof, is increased or generated, or if the activity lipase is increased or generated in a non-human organism, like a microorganism or a plant cell, plant or part thereof, especially with mitochondrial localization, For example, an increase of the tryptophan of at least 1 percent, particularly in a range of 60 to 288-percent is conferred as compared to a corresponding non-transformed wild type non-human organism.

[34583] Accordingly, in one embodiment, an increase of tryptophan in a non-human organism, as compared to a corresponding non-transformed wild type non-human organism, is conferred in the process of the invention, if the activity of a polypeptide showing the activity of a amino acid transporter, or if the activity of the polypeptide Ynl101w, preferably represented by SEQ ID NO. 92340, or a homolog or fragment thereof, or if the activity of a polypeptide encoded by a nucleic acid molecule comprising the nucleic acid SEQ ID NO. 92339, preferably the coding region thereof, or a homolog or fragment thereof, e.g. derived from Saccharomyces cerevisiae, is increased or generated. For example the activity of a nucleic acid molecule or a polypeptide comprising the nucleic acid, preferably the coding region thereof, or polypeptide or the consensus sequence or the polypeptide motif, as depicted in Table I, II or IV, application No. 5, column 5 or 8 in the respective same line as the nucleic acid molecule SEQ ID NO. 92339 or polypeptide SEQ ID NO. 92340, respectively, or a homolog or a fragment thereof, is increased or generated, or if the activity amino acid transporter is increased or generated in a non-human organism, like a microorganism or a plant cell, plant or part thereof, especially with plastidic localization, For example, an increase of the tryptophan of at least 1 percent, particularly in a range of 33 to 45 percent is conferred as compared to a corresponding non-transformed wild type non-human organism.

[34584] Accordingly, in one embodiment, an increase of tryptophan in a non-human organism, as compared to a corresponding non-transformed wild type non-human organism, is conferred in the process of the invention, if the activity of a polypeptide showing the activity of a histone acetyltransferase, or if the activity of the polypeptide Yor244w, preferably represented by SEQ ID NO. 92541, or a homolog or fragment thereof, or if the activity of a polypeptide encoded by a nucleic acid molecule comprising the nucleic acid SEQ ID NO. 92540, preferably the coding region thereof, or a homolog or fragment thereof, e.g. derived from Saccharomyces cerevisiae, is increased or generated. For example the activity of a nucleic acid molecule or a polypeptide comprising the nucleic acid, preferably the coding region thereof, or polypeptide or the consensus sequence or the polypeptide motif, as depicted in Table I, II or IV, application No. 5, column 5 or 8 in the respective same line as the nucleic acid molecule SEQ ID NO. 92540 or polypeptide SEQ ID NO. 92541, respectively, or a homolog or a fragment thereof, is increased or generated, or if the activity histone acetyltransferase is increased or generated in a non-human organism, like a microorganism or a plant cell, plant or part thereof, especially with plastidic localization, For example, an increase of the tryptophan of at least 1 percent, particularly in a range of 39 to 135-percent is conferred as compared to a corresponding non-transformed wild type non-human organism.

[34585] Accordingly, in one embodiment, an increase of tryptophan in a non-human organism, as compared to a corresponding non-transformed wild type non-human organism, is conferred in the process of the invention, if the activity of a polypeptide showing the activity of a isopentenyl diphosphate isomerase, or if the activity of the polypeptide Ypl117c, preferably represented by SEQ ID NO. 67999, or a homolog or fragment thereof, or if the activity of a polypeptide encoded by a nucleic acid molecule comprising the nucleic acid SEQ ID NO. 67998, preferably the coding region thereof, or a homolog or fragment thereof, e.g. derived from Saccharomyces cerevisiae, is increased or generated. For example the activity of a nucleic acid molecule or a polypeptide comprising the nucleic acid, preferably the coding region thereof, or polypeptide or the consensus sequence or the polypeptide motif, as depicted in Table I, II or IV, application No. 5, column 5 or 8 in the respective same line as the nucleic acid molecule SEQ ID NO. 67998 or polypeptide SEQ ID NO. 67999, respectively, or a homolog or a fragment thereof, is increased or generated, or if the activity isopentenyl diphosphate isomerase is increased or generated in a non-human organism, like a microorganism or a plant cell, plant or part thereof, especially with plastidic localization, For example, an increase of the tryptophan of at least 1 percent, particularly in a range of 29 to 59-percent is conferred as compared to a corresponding non-transformed wild type non-human organism.

[34586] Accordingly, in one embodiment, an increase of tryptophan in a non-human organism, as compared to a corresponding non-transformed wild type non-human organism, is conferred in the process of the invention, if the activity of a polypeptide showing the activity of a cyclin, or if the activity of the polypeptide Ypr119w, preferably represented by SEQ ID NO. 98446, or a homolog or fragment thereof, or if the activity of a polypeptide encoded by a nucleic acid molecule comprising the nucleic acid SEQ ID NO. 98445, preferably the coding region thereof, or a homolog or fragment thereof, e.g. derived from Saccharomyces cerevisiae, is increased or generated. For example the activity of a nucleic acid molecule or a polypeptide comprising the nucleic acid, preferably the coding region thereof, or polypeptide or the consensus sequence or the polypeptide motif, as depicted in Table I, II or IV, application No. 5, column 5 or 8 in the respective same line as the nucleic acid molecule SEQ ID NO. 98445 or polypeptide SEQ ID NO. 98446, respectively, or a homolog or a fragment thereof, is increased or generated, or if the activity cyclin is increased or generated in a non-human organism, like a microorganism or a plant cell, plant or part thereof, especially with non-targeted localization, For example, an increase of the tryptophan of at least 1 percent, particularly in a range of 36 to 54-percent is conferred as compared to a corresponding non-transformed wild type non-human organism.

[34587] Accordingly, in one embodiment, an increase of tryptophan in a non-human organism, as compared to a corresponding non-transformed wild type non-human organism, is conferred in the process of the invention, if the activity of a polypeptide showing the activity of a Zm_{—}4842_BE510522-protein, or if the activity of the polypeptide Zm_{—}4842_BE510522, preferably represented by SEQ ID NO. 68414, or a homolog or fragment thereof, or if the activity of a polypeptide encoded by a nucleic acid molecule comprising the nucleic acid SEQ ID NO. 68413, preferably the coding region thereof, or a homolog or fragment thereof, e.g. derived from Zea mays, is increased or generated. For example the activity of a nucleic acid molecule or a polypeptide comprising the nucleic acid, preferably the coding region thereof, or polypeptide or the consensus sequence or the polypeptide motif, as depicted in Table I, II or IV, application No. 5, column 5 or 8 in the respective same line as the nucleic acid molecule SEQ ID NO. 68413 or polypeptide SEQ ID NO. 68414, respectively, or a homolog or a fragment thereof, is increased or generated, or if the activity Zm_{—}4842_BE510522-protein is increased or generated in a non-human organism, like a microorganism or a plant cell, plant or part thereof, especially with non-targeted localization, For example, an increase of the tryptophan of at least 1 percent, particularly in a range of 53 to 117-percent is conferred as compared to a corresponding non-transformed wild type non-human organism.

[34588] [0096.1.1.5] to [0103.1.1.5] for the disclosure of these paragraphs see [0096.1.1.1] to [0103.1.1.1] above.

[34589] In this paragraph “A” means “Goffeau et al., Science 274 (5287), 546 (1996)”, “B” means “Blattner et al., Science 277 (5331), 1453 (1997)”, “C” means “Nakamura et al., Nucleic Acids Res. 28(1), 72 (2000)”, “D” means “deposition of the sequences to the EMBL/GenBank/DDBJ databases under “Sequencing of the draft genome assembly of Azotobacter vinelandii AvOP”. in June 2005 by Copeland et al.”, “E” means “Henne et al., Nat. Biotechnol. 22 (5), 547 (2004)”, “F” means “Kaul et al., Nature 408 (6814), 796 (2000)”, and “G” means “Matsumoto et al., Nature 436 (7052), 793 (2005)”.

[34590] The nucleic acid sequence of 59582753_SOYBEAN from Glycine max, e.g. as shown in the respective line in column 5 of Table I, application no. 5, is unpublished. And the activity of the gene product thereof is the activity of glucose-6-phosphate 1-dehydrogenase.

[34591] Accordingly, in one embodiment, the process of the present invention for producing tryptophan in a non-human organism, like a microorganism or a plant or a part thereof, comprises increasing or generating the activity of a gene product with the activity of a gene product conferring the activity of “glucose-6-phosphate 1-dehydrogenase”, especially from Glycine max or its functional equivalent or its homolog, e.g. the increase of
[34592] (a) a gene product of a gene comprising the nucleic acid molecule as shown in the respective line in column 5 of Table I, application no. 5, preferably the coding region thereof, or a homolog or a fragment thereof, and being depicted in the same respective line as said 59582753_SOYBEAN, or a functional equivalent or a homolog thereof as shown in column 8 of Table I, application no. 5, preferably the coding region thereof, particularly a homolog or functional equivalent as shown in column 8 of Table I B, application no. 5, and being depicted in the same respective line as said 59582753_SOYBEAN, and preferably the activity is increased plastidic, or
[34593] (b) a polypeptide comprising a polypeptide, a consensus sequence or at least a polypeptide motif as shown in the respective line in column 5 of Table II or in column 8 of Table IV, application no. 5, respectively, and being depicted in the same respective line as said 59582753_SOYBEAN, or a functional equivalent or a homolog thereof as depicted in column 8 of Table II, application no. 5, preferably a homolog or functional equivalent as depicted in column 8 of Table II B, application no. 5, and being depicted in the same respective line as said 59582753_SOYBEAN, and preferably the activity is increased plastidic.

[34594] Accordingly, in one embodiment, the molecule which activity is to be increased in the process of the invention is the gene product with an activity as a “glucose-6-phosphate 1-dehydrogenase”, preferably it is the molecule of section (a) or (b) of this paragraph.

[34595] In particular, it was observed that in plants, especially in Arabidopsis thaliana, increasing or generating the activity of a gene product plastidic with the activity of a “glucose-6-phosphate 1-dehydrogenase”, preferably being encoded by a gene comprising the nucleic acid sequence SEQ ID NO. 16883, preferably the coding region thereof, conferred the production of or the increase in tryptophan compared with the wild type control.

[34596] The nucleic acid sequence of At1g19800 from Arabidopsis thaliana, e.g. as shown in the respective line in column 5 of Table I, application no. 5, has been published in F. And the activity of the gene product thereof is the activity of At1g19800-protein.

[34597] Accordingly, in one embodiment, the process of the present invention for producing tryptophan in a non-human organism, like a microorganism or a plant or a part thereof, comprises increasing or generating the activity of a gene product with the activity of a gene product conferring the activity of “At1g19800-protein”, especially from Arabidopsis thaliana or its functional equivalent or its homolog, e.g. the increase of
[34598] (a) a gene product of a gene comprising the nucleic acid molecule as shown in the respective line in column 5 of Table I, application no. 5, preferably the coding region thereof, or a homolog or a fragment thereof, and being depicted in the same respective line as said At1g19800, or a functional equivalent or a homolog thereof as shown in column 8 of Table I, application no. 5, preferably the coding region thereof, particularly a homolog or functional equivalent as shown in column 8 of Table I B, application no. 5, and being depicted in the same respective line as said At1g19800, and preferably the activity is increased non-targeted, or
[34599] (b) a polypeptide comprising a polypeptide, a consensus sequence or at least a polypeptide motif as shown in the respective line in column 5 of Table II or in column 8 of Table IV, application no. 5, respectively, and being depicted in the same respective line as said At1g19800, or a functional equivalent or a homolog thereof as depicted in column 8 of Table II, application no. 5, preferably a homolog or functional equivalent as depicted in column 8 of Table II B, application no. 5, and being depicted in the same respective line as said At1g19800, and preferably the activity is increased non-targeted.

[34600] Accordingly, in one embodiment, the molecule which activity is to be increased in the process of the invention is the gene product with an activity as a “At1g19800-protein”, preferably it is the molecule of section (a) or (b) of this paragraph.

[34601] In particular, it was observed that in plants, especially in Arabidopsis thaliana, increasing or generating the activity of a gene product non-targeted with the activity of a “At1g19800-protein”, preferably being encoded by a gene comprising the nucleic acid sequence SEQ ID NO. 17637, preferably the coding region thereof, conferred the production of or the increase in tryptophan compared with the wild type control.

[34602] The nucleic acid sequence of At1g26830 from Arabidopsis thaliana, e.g. as shown in the respective line in column 5 of Table I, application no. 5, has been published in F. And the activity of the gene product thereof is the activity of cullin.

[34603] Accordingly, in one embodiment, the process of the present invention for producing tryptophan in a non-human organism, like a microorganism or a plant or a part thereof, comprises increasing or generating the activity of a gene product with the activity of a gene product conferring the activity of “cullin”, especially from Arabidopsis thaliana or its functional equivalent or its homolog, e.g. the increase of
[34604] (a) a gene product of a gene comprising the nucleic acid molecule as shown in the respective line in column 5 of Table I, application no. 5, preferably the coding region thereof, or a homolog or a fragment thereof, and being depicted in the same respective line as said At1g26830, or a functional equivalent or a homolog thereof as shown in column 8 of Table I, application no. 5, preferably the coding region thereof, particularly a homolog or functional equivalent as shown in column 8 of Table I B, application no. 5, and being depicted in the same respective line as said At1g26830, and preferably the activity is increased non-targeted, or
[34605] (b) a polypeptide comprising a polypeptide, a consensus sequence or at least a polypeptide motif as shown in the respective line in column 5 of Table II or in column 8 of Table IV, application no. 5, respectively, and being depicted in the same respective line as said At1g26830, or a functional equivalent or a homolog thereof as depicted in column 8 of Table II, application no. 5, preferably a homolog or functional equivalent as depicted in column 8 of Table II B, application no. 5, and being depicted in the same respective line as said At1g26830, and preferably the activity is increased non-targeted.

[34606] Accordingly, in one embodiment, the molecule which activity is to be increased in the process of the invention is the gene product with an activity as a “cullin”, preferably it is the molecule of section (a) or (b) of this paragraph.

[34607] In particular, it was observed that in plants, especially in Arabidopsis thaliana, increasing or generating the activity of a gene product non-targeted with the activity of a “cullin”, preferably being encoded by a gene comprising the nucleic acid sequence SEQ ID NO. 17701, preferably the coding region thereof, conferred the production of or the increase in tryptophan compared with the wild type control.

[34608] The nucleic acid sequence of At1g36730 from Arabidopsis thaliana, e.g. as shown in the respective line in column 5 of Table I, application no. 5, has been published in F. And the activity of the gene product thereof is the activity of eukaryotic translation initiation factor 5.

[34609] Accordingly, in one embodiment, the process of the present invention for producing tryptophan in a non-human organism, like a microorganism or a plant or a part thereof, comprises increasing or generating the activity of a gene product with the activity of a gene product conferring the activity of “eukaryotic translation initiation factor 5”, especially from Arabidopsis thaliana or its functional equivalent or its homolog, e.g. the increase of
[34610] (a) a gene product of a gene comprising the nucleic acid molecule as shown in the respective line in column 5 of Table I, application no. 5, preferably the coding region thereof, or a homolog or a fragment thereof, and being depicted in the same respective line as said At1g36730, or a functional equivalent or a homolog thereof as shown in column 8 of Table I, application no. 5, preferably the coding region thereof, particularly a homolog or functional equivalent as shown in column 8 of Table I B, application no. 5, and being depicted in the same respective line as said At1g36730, and preferably the activity is increased non-targeted, or
[34611] (b) a polypeptide comprising a polypeptide, a consensus sequence or at least a polypeptide motif as shown in the respective line in column 5 of Table II or in column 8 of Table IV, application no. 5, respectively, and being depicted in the same respective line as said At1g36730, or a functional equivalent or a homolog thereof as depicted in column 8 of Table II, application no. 5, preferably a homolog or functional equivalent as depicted in column 8 of Table II B, application no. 5, and being depicted in the same respective line as said At1g36730, and preferably the activity is increased non-targeted.

[34612] Accordingly, in one embodiment, the molecule which activity is to be increased in the process of the invention is the gene product with an activity as a “eukaryotic translation initiation factor 5”, preferably it is the molecule of section (a) or (b) of this paragraph.

[34613] In particular, it was observed that in plants, especially in Arabidopsis thaliana, increasing or generating the activity of a gene product non-targeted with the activity of a “eukaryotic translation initiation factor 5”, preferably being encoded by a gene comprising the nucleic acid sequence SEQ ID NO. 17968, preferably the coding region thereof, conferred the production of or the increase in tryptophan compared with the wild type control.

[34614] The nucleic acid sequence of At1g48260 from Arabidopsis thaliana, e.g. as shown in the respective line in column 5 of Table I, application no. 5, has been published in F. And the activity of the gene product thereof is the activity of protein kinase.

[34615] Accordingly, in one embodiment, the process of the present invention for producing tryptophan in a non-human organism, like a microorganism or a plant or a part thereof, comprises increasing or generating the activity of a gene product with the activity of a gene product conferring the activity of “protein kinase”, especially from Arabidopsis thaliana or its functional equivalent or its homolog, e.g. the increase of
[34616] (a) a gene product of a gene comprising the nucleic acid molecule as shown in the respective line in column 5 of Table I, application no. 5, preferably the coding region thereof, or a homolog or a fragment thereof, and being depicted in the same respective line as said At1g48260, or a functional equivalent or a homolog thereof as shown in column 8 of Table I, application no. 5, preferably the coding region thereof, particularly a homolog or functional equivalent as shown in column 8 of Table I B, application no. 5, and being depicted in the same respective line as said At1g48260, and preferably the activity is increased non-targeted, or
[34617] (b) a polypeptide comprising a polypeptide, a consensus sequence or at least a polypeptide motif as shown in the respective line in column 5 of Table II or in column 8 of Table IV, application no. 5, respectively, and being depicted in the same respective line as said At1g48260, or a functional equivalent or a homolog thereof as depicted in column 8 of Table II, application no. 5, preferably a homolog or functional equivalent as depicted in column 8 of Table II B, application no. 5, and being depicted in the same respective line as said At1g48260, and preferably the activity is increased non-targeted.

[34618] Accordingly, in one embodiment, the molecule which activity is to be increased in the process of the invention is the gene product with an activity as a “protein kinase”, preferably it is the molecule of section (a) or (b) of this paragraph.

[34619] In particular, it was observed that in plants, especially in Arabidopsis thaliana, increasing or generating the activity of a gene product non-targeted with the activity of a “protein kinase”, preferably being encoded by a gene comprising the nucleic acid sequence SEQ ID NO. 18235, preferably the coding region thereof, conferred the production of or the increase in tryptophan compared with the wild type control.

[34620] The nucleic acid sequence of At2g17560 from Arabidopsis thaliana, e.g. as shown in the respective line in column 5 of Table I, application no. 5, has been published in F. And the activity of the gene product thereof is the activity of transcription factor.

[34621] Accordingly, in one embodiment, the process of the present invention for producing tryptophan in a non-human organism, like a microorganism or a plant or a part thereof, comprises increasing or generating the activity of a gene product with the activity of a gene product conferring the activity of “transcription factor”, especially from Arabidopsis thaliana or its functional equivalent or its homolog, e.g. the increase of
[34622] (a) a gene product of a gene comprising the nucleic acid molecule as shown in the respective line in column 5 of Table I, application no. 5, preferably the coding region thereof, or a homolog or a fragment thereof, and being depicted in the same respective line as said At2g17560, or a functional equivalent or a homolog thereof as shown in column 8 of Table I, application no. 5, preferably the coding region thereof, particularly a homolog or functional equivalent as shown in column 8 of Table I B, application no. 5, and being depicted in the same respective line as said At2g17560, and preferably the activity is increased non-targeted, or
[34623] (b) a polypeptide comprising a polypeptide, a consensus sequence or at least a polypeptide motif as shown in the respective line in column 5 of Table II or in column 8 of Table IV, application no. 5, respectively, and being depicted in the same respective line as said At2g17560, or a functional equivalent or a homolog thereof as depicted in column 8 of Table II, application no. 5, preferably a homolog or functional equivalent as depicted in column 8 of Table II B, application no. 5, and being depicted in the same respective line as said At2g17560, and preferably the activity is increased non-targeted.

[34624] Accordingly, in one embodiment, the molecule which activity is to be increased in the process of the invention is the gene product with an activity as a “transcription factor”, preferably it is the molecule of section (a) or (b) of this paragraph.

[34625] In particular, it was observed that in plants, especially in Arabidopsis thaliana, increasing or generating the activity of a gene product non-targeted with the activity of a “transcription factor”, preferably being encoded by a gene comprising the nucleic acid sequence SEQ ID NO. 19502, preferably the coding region thereof, conferred the production of or the increase in tryptophan compared with the wild type control.

[34626] The nucleic acid sequence of At2g28890 from Arabidopsis thaliana, e.g. as shown in the respective line in column 5 of Table I, application no. 5, has been published in F. And the activity of the gene product thereof is the activity of protein phosphatase.

[34627] Accordingly, in one embodiment, the process of the present invention for producing tryptophan in a non-human organism, like a microorganism or a plant or a part thereof, comprises increasing or generating the activity of a gene product with the activity of a gene product conferring the activity of “protein phosphatase”, especially from Arabidopsis thaliana or its functional equivalent or its homolog, e.g. the increase of
[34628] (a) a gene product of a gene comprising the nucleic acid molecule as shown in the respective line in column 5 of Table I, application no. 5, preferably the coding region thereof, or a homolog or a fragment thereof, and being depicted in the same respective line as said At2g28890, or a functional equivalent or a homolog thereof as shown in column 8 of Table I, application no. 5, preferably the coding region thereof, particularly a homolog or functional equivalent as shown in column 8 of Table I B, application no. 5, and being depicted in the same respective line as said At2g28890, and preferably the activity is increased non-targeted, or
[34629] (b) a polypeptide comprising a polypeptide, a consensus sequence or at least a polypeptide motif as shown in the respective line in column 5 of Table II or in column 8 of Table IV, application no. 5, respectively, and being depicted in the same respective line as said At2g28890, or a functional equivalent or a homolog thereof as depicted in column 8 of Table II, application no. 5, preferably a homolog or functional equivalent as depicted in column 8 of Table II B, application no. 5, and being depicted in the same respective line as said At2g28890, and preferably the activity is increased non-targeted.

[34630] Accordingly, in one embodiment, the molecule which activity is to be increased in the process of the invention is the gene product with an activity as a “protein phosphatase”, preferably it is the molecule of section (a) or (b) of this paragraph.

[34631] In particular, it was observed that in plants, especially in Arabidopsis thaliana, increasing or generating the activity of a gene product non-targeted with the activity of a “protein phosphatase”, preferably being encoded by a gene comprising the nucleic acid sequence SEQ ID NO. 19874, preferably the coding region thereof, conferred the production of or the increase in tryptophan compared with the wild type control.

[34632] The nucleic acid sequence of At2g30360 from Arabidopsis thaliana, e.g. as shown in the respective line in column 5 of Table I, application no. 5, has been published in F. And the activity of the gene product thereof is the activity of CBL-interacting protein kinase.

[34633] Accordingly, in one embodiment, the process of the present invention for producing tryptophan in a non-human organism, like a microorganism or a plant or a part thereof, comprises increasing or generating the activity of a gene product with the activity of a gene product conferring the activity of “CBL-interacting protein kinase”, especially from Arabidopsis thaliana or its functional equivalent or its homolog, e.g. the increase of
[34634] (a) a gene product of a gene comprising the nucleic acid molecule as shown in the respective line in column 5 of Table I, application no. 5, preferably the coding region thereof, or a homolog or a fragment thereof, and being depicted in the same respective line as said At2g30360, or a functional equivalent or a homolog thereof as shown in column 8 of Table I, application no. 5, preferably the coding region thereof, particularly a homolog or functional equivalent as shown in column 8 of Table I B, application no. 5, and being depicted in the same respective line as said At2g30360, and preferably the activity is increased non-targeted, or
[34635] (b) a polypeptide comprising a polypeptide, a consensus sequence or at least a polypeptide motif as shown in the respective line in column 5 of Table II or in column 8 of Table IV, application no. 5, respectively, and being depicted in the same respective line as said At2g30360, or a functional equivalent or a homolog thereof as depicted in column 8 of Table II, application no. 5, preferably a homolog or functional equivalent as depicted in column 8 of Table II B, application no. 5, and being depicted in the same respective line as said At2g30360, and preferably the activity is increased non-targeted.

[34636] Accordingly, in one embodiment, the molecule which activity is to be increased in the process of the invention is the gene product with an activity as a “CBL-interacting protein kinase”, preferably it is the molecule of section (a) or (b) of this paragraph.

[34637] In particular, it was observed that in plants, especially in Arabidopsis thaliana, increasing or generating the activity of a gene product non-targeted with the activity of a “CBL-interacting protein kinase”, preferably being encoded by a gene comprising the nucleic acid sequence SEQ ID NO. 19919, preferably the coding region thereof, conferred the production of or the increase in tryptophan compared with the wild type control.

[34638] The nucleic acid sequence of At2g30540 from Arabidopsis thaliana, e.g. as shown in the respective line in column 5 of Table I, application no. 5, has been published in F. And the activity of the gene product thereof is the activity of glutaredoxin.

[34639] Accordingly, in one embodiment, the process of the present invention for producing tryptophan in a non-human organism, like a microorganism or a plant or a part thereof, comprises increasing or generating the activity of a gene product with the activity of a gene product conferring the activity of “glutaredoxin”, especially from Arabidopsis thaliana or its functional equivalent or its homolog, e.g. the increase of
[34640] (a) a gene product of a gene comprising the nucleic acid molecule as shown in the respective line in column 5 of Table I, application no. 5, preferably the coding region thereof, or a homolog or a fragment thereof, and being depicted in the same respective line as said At2g30540, or a functional equivalent or a homolog thereof as shown in column 8 of Table I, application no. 5, preferably the coding region thereof, particularly a homolog or functional equivalent as shown in column 8 of Table I B, application no. 5, and being depicted in the same respective line as said At2g30540, and preferably the activity is increased non-targeted, or
[34641] (b) a polypeptide comprising a polypeptide, a consensus sequence or at least a polypeptide motif as shown in the respective line in column 5 of Table II or in column 8 of Table IV, application no. 5, respectively, and being depicted in the same respective line as said At2g30540, or a functional equivalent or a homolog thereof as depicted in column 8 of Table II, application no. 5, preferably a homolog or functional equivalent as depicted in column 8 of Table II B, application no. 5, and being depicted in the same respective line as said At2g30540, and preferably the activity is increased non-targeted.

[34642] Accordingly, in one embodiment, the molecule which activity is to be increased in the process of the invention is the gene product with an activity as a “glutaredoxin”, preferably it is the molecule of section (a) or (b) of this paragraph.

[34643] In particular, it was observed that in plants, especially in Arabidopsis thaliana, increasing or generating the activity of a gene product non-targeted with the activity of a “glutaredoxin”, preferably being encoded by a gene comprising the nucleic acid sequence SEQ ID NO. 20346, preferably the coding region thereof, conferred the production of or the increase in tryptophan compared with the wild type control.

[34644] The nucleic acid sequence of At2g33510 from Arabidopsis thaliana, e.g. as shown in the respective line in column 5 of Table I, application no. 5, has been published in F. And the activity of the gene product thereof is the activity of At2g33510-protein.

[34645] Accordingly, in one embodiment, the process of the present invention for producing tryptophan in a non-human organism, like a microorganism or a plant or a part thereof, comprises increasing or generating the activity of a gene product with the activity of a gene product conferring the activity of “At2g33510-protein”, especially from Arabidopsis thaliana or its functional equivalent or its homolog, e.g. the increase of
[34646] (a) a gene product of a gene comprising the nucleic acid molecule as shown in the respective line in column 5 of Table I, application no. 5, preferably the coding region thereof, or a homolog or a fragment thereof, and being depicted in the same respective line as said At2g33510, or a functional equivalent or a homolog thereof as shown in column 8 of Table I, application no. 5, preferably the coding region thereof, particularly a homolog or functional equivalent as shown in column 8 of Table I B, application no. 5, and being depicted in the same respective line as said At2g33510, and preferably the activity is increased non-targeted, or
[34647] (b) a polypeptide comprising a polypeptide, a consensus sequence or at least a polypeptide motif as shown in the respective line in column 5 of Table II or in column 8 of Table IV, application no. 5, respectively, and being depicted in the same respective line as said At2g33510, or a functional equivalent or a homolog thereof as depicted in column 8 of Table II, application no. 5, preferably a homolog or functional equivalent as depicted in column 8 of Table II B, application no. 5, and being depicted in the same respective line as said At2g33510, and preferably the activity is increased non-targeted.

[34648] Accordingly, in one embodiment, the molecule which activity is to be increased in the process of the invention is the gene product with an activity as a “At2g33510-protein”, preferably it is the molecule of section (a) or (b) of this paragraph.

[34649] In particular, it was observed that in plants, especially in Arabidopsis thaliana, increasing or generating the activity of a gene product non-targeted with the activity of a “At2g33510-protein”, preferably being encoded by a gene comprising the nucleic acid sequence SEQ ID NO. 98522, preferably the coding region thereof, conferred the production of or the increase in tryptophan compared with the wild type control.

[34650] The nucleic acid sequence of At2g47880 from Arabidopsis thaliana, e.g. as shown in the respective line in column 5 of Table I, application no. 5, has been published in F. And the activity of the gene product thereof is the activity of glutaredoxin.

[34651] Accordingly, in one embodiment, the process of the present invention for producing tryptophan in a non-human organism, like a microorganism or a plant or a part thereof, comprises increasing or generating the activity of a gene product with the activity of a gene product conferring the activity of “glutaredoxin”, especially from Arabidopsis thaliana or its functional equivalent or its homolog, e.g. the increase of
[34652] (a) a gene product of a gene comprising the nucleic acid molecule as shown in the respective line in column 5 of Table I, application no. 5, preferably the coding region thereof, or a homolog or a fragment thereof, and being depicted in the same respective line as said At2g47880, or a functional equivalent or a homolog thereof as shown in column 8 of Table I, application no. 5, preferably the coding region thereof, particularly a homolog or functional equivalent as shown in column 8 of Table I B, application no. 5, and being depicted in the same respective line as said At2g47880, and preferably the activity is increased non-targeted, or
[34653] (b) a polypeptide comprising a polypeptide, a consensus sequence or at least a polypeptide motif as shown in the respective line in column 5 of Table II or in column 8 of Table IV, application no. 5, respectively, and being depicted in the same respective line as said At2g47880, or a functional equivalent or a homolog thereof as depicted in column 8 of Table II, application no. 5, preferably a homolog or functional equivalent as depicted in column 8 of Table II B, application no. 5, and being depicted in the same respective line as said At2g47880, and preferably the activity is increased non-targeted.

[34654] Accordingly, in one embodiment, the molecule which activity is to be increased in the process of the invention is the gene product with an activity as a “glutaredoxin”, preferably it is the molecule of section (a) or (b) of this paragraph.

[34655] In particular, it was observed that in plants, especially in Arabidopsis thaliana, increasing or generating the activity of a gene product non-targeted with the activity of a “glutaredoxin”, preferably being encoded by a gene comprising the nucleic acid sequence SEQ ID NO. 21159, preferably the coding region thereof, conferred the production of or the increase in tryptophan compared with the wild type control. The nucleic acid sequence of At3g04050 from Arabidopsis thaliana, e.g. as shown in the respective line in column 5 of Table I, application no. 5, has been published in F. And the activity of the gene product thereof is the activity of pyruvate kinase.

[34656] Accordingly, in one embodiment, the process of the present invention for producing tryptophan in a non-human organism, like a microorganism or a plant or a part thereof, comprises increasing or generating the activity of a gene product with the activity of a gene product conferring the activity of “pyruvate kinase”, especially from Arabidopsis thaliana or its functional equivalent or its homolog, e.g. the increase of
[34657] (a) a gene product of a gene comprising the nucleic acid molecule as shown in the respective line in column 5 of Table I, application no. 5, preferably the coding region thereof, or a homolog or a fragment thereof, and being depicted in the same respective line as said At3g04050, or a functional equivalent or a homolog thereof as shown in column 8 of Table I, application no. 5, preferably the coding region thereof, particularly a homolog or functional equivalent as shown in column 8 of Table I B, application no. 5, and being depicted in the same respective line as said At3g04050, and preferably the activity is increased plastidic, or
[34658] (b) a polypeptide comprising a polypeptide, a consensus sequence or at least a polypeptide motif as shown in the respective line in column 5 of Table II or in column 8 of Table IV, application no. 5, respectively, and being depicted in the same respective line as said At3g04050, or a functional equivalent or a homolog thereof as depicted in column 8 of Table II, application no. 5, preferably a homolog or functional equivalent as depicted in column 8 of Table II B, application no. 5, and being depicted in the same respective line as said At3g04050, and preferably the activity is increased plastidic.

[34659] Accordingly, in one embodiment, the molecule which activity is to be increased in the process of the invention is the gene product with an activity as a “pyruvate kinase”, preferably it is the molecule of section (a) or (b) of this paragraph.

[34660] In particular, it was observed that in plants, especially in Arabidopsis thaliana, increasing or generating the activity of a gene product plastidic with the activity of a “pyruvate kinase”, preferably being encoded by a gene comprising the nucleic acid sequence SEQ ID NO. 21497, preferably the coding region thereof, conferred the production of or the increase in tryptophan compared with the wild type control.

[34661] The nucleic acid sequence of At3g11650 from Arabidopsis thaliana, e.g. as shown in the respective line in column 5 of Table I, application no. 5, has been published in F. And the activity of the gene product thereof is the activity of harpin-induced family protein.

[34662] Accordingly, in one embodiment, the process of the present invention for producing tryptophan in a non-human organism, like a microorganism or a plant or a part thereof, comprises increasing or generating the activity of a gene product with the activity of a gene product conferring the activity of “harpin-induced family protein”, especially from Arabidopsis thaliana or its functional equivalent or its homolog, e.g. the increase of
[34663] (a) a gene product of a gene comprising the nucleic acid molecule as shown in the respective line in column 5 of Table I, application no. 5, preferably the coding region thereof, or a homolog or a fragment thereof, and being depicted in the same respective line as said At3g11650, or a functional equivalent or a homolog thereof as shown in column 8 of Table I, application no. 5, preferably the coding region thereof, particularly a homolog or functional equivalent as shown in column 8 of Table I B, application no. 5, and being depicted in the same respective line as said At3g11650, and preferably the activity is increased non-targeted, or
[34664] (b) a polypeptide comprising a polypeptide, a consensus sequence or at least a polypeptide motif as shown in the respective line in column 5 of Table II or in column 8 of Table IV, application no. 5, respectively, and being depicted in the same respective line as said At3g11650, or a functional equivalent or a homolog thereof as depicted in column 8 of Table II, application no. 5, preferably a homolog or functional equivalent as depicted in column 8 of Table II B, application no. 5, and being depicted in the same respective line as said At3g11650, and preferably the activity is increased non-targeted.

[34665] Accordingly, in one embodiment, the molecule which activity is to be increased in the process of the invention is the gene product with an activity as a “harpin-induced family protein”, preferably it is the molecule of section (a) or (b) of this paragraph.

[34666] In particular, it was observed that in plants, especially in Arabidopsis thaliana, increasing or generating the activity of a gene product non-targeted with the activity of a “harpin-induced family protein”, preferably being encoded by a gene comprising the nucleic acid sequence SEQ ID NO. 22611, preferably the coding region thereof, conferred the production of or the increase in tryptophan compared with the wild type control.

[34667] The nucleic acid sequence of At3g18524 from Arabidopsis thaliana, e.g. as shown in the respective line in column 5 of Table I, application no. 5, has been published in F. And the activity of the gene product thereof is the activity of DNA mismatch repair protein.

[34668] Accordingly, in one embodiment, the process of the present invention for producing tryptophan in a non-human organism, like a microorganism or a plant or a part thereof, comprises increasing or generating the activity of a gene product with the activity of a gene product conferring the activity of “DNA mismatch repair protein”, especially from Arabidopsis thaliana or its functional equivalent or its homolog, e.g. the increase of
[34669] (a) a gene product of a gene comprising the nucleic acid molecule as shown in the respective line in column 5 of Table I, application no. 5, preferably the coding region thereof, or a homolog or a fragment thereof, and being depicted in the same respective line as said At3g18524, or a functional equivalent or a homolog thereof as shown in column 8 of Table I, application no. 5, preferably the coding region thereof, particularly a homolog or functional equivalent as shown in column 8 of Table I B, application no. 5, and being depicted in the same respective line as said At3g18524, and preferably the activity is increased non-targeted, or
[34670] (b) a polypeptide comprising a polypeptide, a consensus sequence or at least a polypeptide motif as shown in the respective line in column 5 of Table II or in column 8 of Table IV, application no. 5, respectively, and being depicted in the same respective line as said At3g18524, or a functional equivalent or a homolog thereof as depicted in column 8 of Table II, application no. 5, preferably a homolog or functional equivalent as depicted in column 8 of Table II B, application no. 5, and being depicted in the same respective line as said At3g18524, and preferably the activity is increased non-targeted.

[34671] Accordingly, in one embodiment, the molecule which activity is to be increased in the process of the invention is the gene product with an activity as a “DNA mismatch repair protein”, preferably it is the molecule of section (a) or (b) of this paragraph.

[34672] In particular, it was observed that in plants, especially in Arabidopsis thaliana, increasing or generating the activity of a gene product non-targeted with the activity of a “DNA mismatch repair protein”, preferably being encoded by a gene comprising the nucleic acid sequence SEQ ID NO. 22832, preferably the coding region thereof, conferred the production of or the increase in tryptophan compared with the wild type control.

[34673] The nucleic acid sequence of At3g23000 from Arabidopsis thaliana, e.g. as shown in the respective line in column 5 of Table I, application no. 5, has been published in F. And the activity of the gene product thereof is the activity of protein kinase.

[34674] Accordingly, in one embodiment, the process of the present invention for producing tryptophan in a non-human organism, like a microorganism or a plant or a part thereof, comprises increasing or generating the activity of a gene product with the activity of a gene product conferring the activity of “protein kinase”, especially from Arabidopsis thaliana or its functional equivalent or its homolog, e.g. the increase of
[34675] (a) a gene product of a gene comprising the nucleic acid molecule as shown in the respective line in column 5 of Table I, application no. 5, preferably the coding region thereof, or a homolog or a fragment thereof, and being depicted in the same respective line as said At3g23000, or a functional equivalent or a homolog thereof as shown in column 8 of Table I, application no. 5, preferably the coding region thereof, particularly a homolog or functional equivalent as shown in column 8 of Table I B, application no. 5, and being depicted in the same respective line as said At3g23000, and preferably the activity is increased non-targeted, or
[34676] (b) a polypeptide comprising a polypeptide, a consensus sequence or at least a polypeptide motif as shown in the respective line in column 5 of Table II or in column 8 of Table IV, application no. 5, respectively, and being depicted in the same respective line as said At3g23000, or a functional equivalent or a homolog thereof as depicted in column 8 of Table II, application no. 5, preferably a homolog or functional equivalent as depicted in column 8 of Table II B, application no. 5, and being depicted in the same respective line as said At3g23000, and preferably the activity is increased non-targeted.

[34677] Accordingly, in one embodiment, the molecule which activity is to be increased in the process of the invention is the gene product with an activity as a “protein kinase”, preferably it is the molecule of section (a) or (b) of this paragraph.

[34678] In particular, it was observed that in plants, especially in Arabidopsis thaliana, increasing or generating the activity of a gene product non-targeted with the activity of a “protein kinase”, preferably being encoded by a gene comprising the nucleic acid sequence SEQ ID NO. 1815, preferably the coding region thereof, conferred the production of or the increase in tryptophan compared with the wild type control.

[34679] The nucleic acid sequence of At3g26400 from Arabidopsis thaliana, e.g. as shown in the respective line in column 5 of Table I, application no. 5, has been published in F. And the activity of the gene product thereof is the activity of eukaryotic translation initiation factor.

[34680] Accordingly, in one embodiment, the process of the present invention for producing tryptophan in a non-human organism, like a microorganism or a plant or a part thereof, comprises increasing or generating the activity of a gene product with the activity of a gene product conferring the activity of “eukaryotic translation initiation factor”, especially from Arabidopsis thaliana or its functional equivalent or its homolog, e.g. the increase of
[34681] (a) a gene product of a gene comprising the nucleic acid molecule as shown in the respective line in column 5 of Table I, application no. 5, preferably the coding region thereof, or a homolog or a fragment thereof, and being depicted in the same respective line as said At3g26400, or a functional equivalent or a homolog thereof as shown in column 8 of Table I, application no. 5, preferably the coding region thereof, particularly a homolog or functional equivalent as shown in column 8 of Table I B, application no. 5, and being depicted in the same respective line as said At3g26400, and preferably the activity is increased non-targeted, or
[34682] (b) a polypeptide comprising a polypeptide, a consensus sequence or at least a polypeptide motif as shown in the respective line in column 5 of Table II or in column 8 of Table IV, application no. 5, respectively, and being depicted in the same respective line as said At3g26400, or a functional equivalent or a homolog thereof as depicted in column 8 of Table II, application no. 5, preferably a homolog or functional equivalent as depicted in column 8 of Table II B, application no. 5, and being depicted in the same respective line as said At3g26400, and preferably the activity is increased non-targeted.

[34683] Accordingly, in one embodiment, the molecule which activity is to be increased in the process of the invention is the gene product with an activity as a “eukaryotic translation initiation factor”, preferably it is the molecule of section (a) or (b) of this paragraph.

[34684] In particular, it was observed that in plants, especially in Arabidopsis thaliana, increasing or generating the activity of a gene product non-targeted with the activity of a “eukaryotic translation initiation factor”, preferably being encoded by a gene comprising the nucleic acid sequence SEQ ID NO. 68727, preferably the coding region thereof, conferred the production of or the increase in tryptophan compared with the wild type control.

[34685] The nucleic acid sequence of At3g27540 from Arabidopsis thaliana, e.g. as shown in the respective line in column 5 of Table I, application no. 5, has been published in F. And the activity of the gene product thereof is the activity of glycosyl transferase.

[34686] Accordingly, in one embodiment, the process of the present invention for producing tryptophan in a non-human organism, like a microorganism or a plant or a part thereof, comprises increasing or generating the activity of a gene product with the activity of a gene product conferring the activity of “glycosyl transferase”, especially from Arabidopsis thaliana or its functional equivalent or its homolog, e.g. the increase of
[34687] (a) a gene product of a gene comprising the nucleic acid molecule as shown in the respective line in column 5 of Table I, application no. 5, preferably the coding region thereof, or a homolog or a fragment thereof, and being depicted in the same respective line as said At3g27540, or a functional equivalent or a homolog thereof as shown in column 8 of Table I, application no. 5, preferably the coding region thereof, particularly a homolog or functional equivalent as shown in column 8 of Table I B, application no. 5, and being depicted in the same respective line as said At3g27540, and preferably the activity is increased non-targeted, or
[34688] (b) a polypeptide comprising a polypeptide, a consensus sequence or at least a polypeptide motif as shown in the respective line in column 5 of Table II or in column 8 of Table IV, application no. 5, respectively, and being depicted in the same respective line as said At3g27540, or a functional equivalent or a homolog thereof as depicted in column 8 of Table II, application no. 5, preferably a homolog or functional equivalent as depicted in column 8 of Table II B, application no. 5, and being depicted in the same respective line as said At3g27540, and preferably the activity is increased non-targeted.

[34689] Accordingly, in one embodiment, the molecule which activity is to be increased in the process of the invention is the gene product with an activity as a “glycosyl transferase”, preferably it is the molecule of section (a) or (b) of this paragraph.

[34690] In particular, it was observed that in plants, especially in Arabidopsis thaliana, increasing or generating the activity of a gene product non-targeted with the activity of a “glycosyl transferase”, preferably being encoded by a gene comprising the nucleic acid sequence SEQ ID NO. 68777, preferably the coding region thereof, conferred the production of or the increase in tryptophan compared with the wild type control.

[34691] The nucleic acid sequence of At3g61830 from Arabidopsis thaliana, e.g. as shown in the respective line in column 5 of Table I, application no. 5, has been published in F. And the activity of the gene product thereof is the activity of auxin response factor.

[34692] Accordingly, in one embodiment, the process of the present invention for producing tryptophan in a non-human organism, like a microorganism or a plant or a part thereof, comprises increasing or generating the activity of a gene product with the activity of a gene product conferring the activity of “auxin response factor”, especially from Arabidopsis thaliana or its functional equivalent or its homolog, e.g. the increase of
[34693] (a) a gene product of a gene comprising the nucleic acid molecule as shown in the respective line in column 5 of Table I, application no. 5, preferably the coding region thereof, or a homolog or a fragment thereof, and being depicted in the same respective line as said At3g61830, or a functional equivalent or a homolog thereof as shown in column 8 of Table I, application no. 5, preferably the coding region thereof, particularly a homolog or functional equivalent as shown in column 8 of Table I B, application no. 5, and being depicted in the same respective line as said At3g61830, and preferably the activity is increased non-targeted, or
[34694] (b) a polypeptide comprising a polypeptide, a consensus sequence or at least a polypeptide motif as shown in the respective line in column 5 of Table II or in column 8 of Table IV, application no. 5, respectively, and being depicted in the same respective line as said At3g61830, or a functional equivalent or a homolog thereof as depicted in column 8 of Table II, application no. 5, preferably a homolog or functional equivalent as depicted in column 8 of Table II B, application no. 5, and being depicted in the same respective line as said At3g61830, and preferably the activity is increased non-targeted.

[34695] Accordingly, in one embodiment, the molecule which activity is to be increased in the process of the invention is the gene product with an activity as a “auxin response factor”, preferably it is the molecule of section (a) or (b) of this paragraph.

[34696] In particular, it was observed that in plants, especially in Arabidopsis thaliana, increasing or generating the activity of a gene product non-targeted with the activity of a “auxin response factor”, preferably being encoded by a gene comprising the nucleic acid sequence SEQ ID NO. 2367, preferably the coding region thereof, conferred the production of or the increase in tryptophan compared with the wild type control.

[34697] The nucleic acid sequence of At3g62930 from Arabidopsis thaliana, e.g. as shown in the respective line in column 5 of Table I, application no. 5, has been published in F. And the activity of the gene product thereof is the activity of monthiol glutaredoxin.

[34698] Accordingly, in one embodiment, the process of the present invention for producing tryptophan in a non-human organism, like a microorganism or a plant or a part thereof, comprises increasing or generating the activity of a gene product with the activity of a gene product conferring the activity of “monthiol glutaredoxin”, especially from Arabidopsis thaliana or its functional equivalent or its homolog, e.g. the increase of
[34699] (a) a gene product of a gene comprising the nucleic acid molecule as shown in the respective line in column 5 of Table I, application no. 5, preferably the coding region thereof, or a homolog or a fragment thereof, and being depicted in the same respective line as said At3g62930, or a functional equivalent or a homolog thereof as shown in column 8 of Table I, application no. 5, preferably the coding region thereof, particularly a homolog or functional equivalent as shown in column 8 of Table I B, application no. 5, and being depicted in the same respective line as said At3g62930, and preferably the activity is increased non-targeted, or
[34700] (b) a polypeptide comprising a polypeptide, a consensus sequence or at least a polypeptide motif as shown in the respective line in column 5 of Table II or in column 8 of Table IV, application no. 5, respectively, and being depicted in the same respective line as said At3g62930, or a functional equivalent or a homolog thereof as depicted in column 8 of Table II, application no. 5, preferably a homolog or functional equivalent as depicted in column 8 of Table II B, application no. 5, and being depicted in the same respective line as said At3g62930, and preferably the activity is increased non-targeted.

[34701] Accordingly, in one embodiment, the molecule which activity is to be increased in the process of the invention is the gene product with an activity as a “monthiol glutaredoxin”, preferably it is the molecule of section (a) or (b) of this paragraph.

[34702] In particular, it was observed that in plants, especially in Arabidopsis thaliana, increasing or generating the activity of a gene product non-targeted with the activity of a “monthiol glutaredoxin”, preferably being encoded by a gene comprising the nucleic acid sequence SEQ ID NO.

[34703] 2573, preferably the coding region thereof, conferred the production of or the increase in tryptophan compared with the wild type control.

[34704] The nucleic acid sequence of At3g62950 from Arabidopsis thaliana, e.g. as shown in the respective line in column 5 of Table I, application no. 5, has been published in F. And the activity of the gene product thereof is the activity of glutaredoxin.

[34705] Accordingly, in one embodiment, the process of the present invention for producing tryptophan in a non-human organism, like a microorganism or a plant or a part thereof, comprises increasing or generating the activity of a gene product with the activity of a gene product conferring the activity of “glutaredoxin”, especially from Arabidopsis thaliana or its functional equivalent or its homolog, e.g. the increase of
[34706] (a) a gene product of a gene comprising the nucleic acid molecule as shown in the respective line in column 5 of Table I, application no. 5, preferably the coding region thereof, or a homolog or a fragment thereof, and being depicted in the same respective line as said At3g62950, or a functional equivalent or a homolog thereof as shown in column 8 of Table I, application no. 5, preferably the coding region thereof, particularly a homolog or functional equivalent as shown in column 8 of Table I B, application no. 5, and being depicted in the same respective line as said At3g62950, and preferably the activity is increased non-targeted, or
[34707] (b) a polypeptide comprising a polypeptide, a consensus sequence or at least a polypeptide motif as shown in the respective line in column 5 of Table II or in column 8 of Table IV, application no. 5, respectively, and being depicted in the same respective line as said At3g62950, or a functional equivalent or a homolog thereof as depicted in column 8 of Table II, application no. 5, preferably a homolog or functional equivalent as depicted in column 8 of Table II B, application no. 5, and being depicted in the same respective line as said At3g62950, and preferably the activity is increased non-targeted.

[34708] Accordingly, in one embodiment, the molecule which activity is to be increased in the process of the invention is the gene product with an activity as a “glutaredoxin”, preferably it is the molecule of section (a) or (b) of this paragraph.

[34709] In particular, it was observed that in plants, especially in Arabidopsis thaliana, increasing or generating the activity of a gene product non-targeted with the activity of a “glutaredoxin”, preferably being encoded by a gene comprising the nucleic acid sequence SEQ ID NO. 2935, preferably the coding region thereof, conferred the production of or the increase in tryptophan compared with the wild type control.

[34710] The nucleic acid sequence of At4g32480 from Arabidopsis thaliana, e.g. as shown in the respective line in column 5 of Table I, application no. 5, has been published in F. And the activity of the gene product thereof is the activity of At4g32480-protein.

[34711] Accordingly, in one embodiment, the process of the present invention for producing tryptophan in a non-human organism, like a microorganism or a plant or a part thereof, comprises increasing or generating the activity of a gene product with the activity of a gene product conferring the activity of “At4g32480-protein”, especially from Arabidopsis thaliana or its functional equivalent or its homolog, e.g. the increase of
[34712] (a) a gene product of a gene comprising the nucleic acid molecule as shown in the respective line in column 5 of Table I, application no. 5, preferably the coding region thereof, or a homolog or a fragment thereof, and being depicted in the same respective line as said At4g32480, or a functional equivalent or a homolog thereof as shown in column 8 of Table I, application no. 5, preferably the coding region thereof, particularly a homolog or functional equivalent as shown in column 8 of Table I B, application no. 5, and being depicted in the same respective line as said At4g32480, and preferably the activity is increased non-targeted, or
[34713] (b) a polypeptide comprising a polypeptide, a consensus sequence or at least a polypeptide motif as shown in the respective line in column 5 of Table II or in column 8 of Table IV, application no. 5, respectively, and being depicted in the same respective line as said At4g32480, or a functional equivalent or a homolog thereof as depicted in column 8 of Table II, application no. 5, preferably a homolog or functional equivalent as depicted in column 8 of Table II B, application no. 5, and being depicted in the same respective line as said At4g32480, and preferably the activity is increased non-targeted.

[34714] Accordingly, in one embodiment, the molecule which activity is to be increased in the process of the invention is the gene product with an activity as a “At4g32480-protein”, preferably it is the molecule of section (a) or (b) of this paragraph.

[34715] In particular, it was observed that in plants, especially in Arabidopsis thaliana, increasing or generating the activity of a gene product non-targeted with the activity of a “At4g32480-protein”, preferably being encoded by a gene comprising the nucleic acid sequence SEQ ID NO. 4040, preferably the coding region thereof, conferred the production of or the increase in tryptophan compared with the wild type control.

[34716] The nucleic acid sequence of At4g34160 from Arabidopsis thaliana, e.g. as shown in the respective line in column 5 of Table I, application no. 5, has been published in F. And the activity of the gene product thereof is the activity of cyclin D .

[34717] Accordingly, in one embodiment, the process of the present invention for producing tryptophan in a non-human organism, like a microorganism or a plant or a part thereof, comprises increasing or generating the activity of a gene product with the activity of a gene product conferring the activity of “cyclin D”, especially from Arabidopsis thaliana or its functional equivalent or its homolog, e.g. the increase of
[34718] (a) a gene product of a gene comprising the nucleic acid molecule as shown in the respective line in column 5 of Table I, application no. 5, preferably the coding region thereof, or a homolog or a fragment thereof, and being depicted in the same respective line as said At4g34160, or a functional equivalent or a homolog thereof as shown in column 8 of Table I, application no. 5, preferably the coding region thereof, particularly a homolog or functional equivalent as shown in column 8 of Table I B, application no. 5, and being depicted in the same respective line as said At4g34160, and preferably the activity is increased non-targeted, or
[34719] (b) a polypeptide comprising a polypeptide, a consensus sequence or at least a polypeptide motif as shown in the respective line in column 5 of Table II or in column 8 of Table IV, application no. 5, respectively, and being depicted in the same respective line as said At4g34160, or a functional equivalent or a homolog thereof as depicted in column 8 of Table II, application no. 5, preferably a homolog or functional equivalent as depicted in column 8 of Table II B, application no. 5, and being depicted in the same respective line as said At4g34160, and preferably the activity is increased non-targeted.

[34720] Accordingly, in one embodiment, the molecule which activity is to be increased in the process of the invention is the gene product with an activity as a “cyclin D”, preferably it is the molecule of section (a) or (b) of this paragraph.

[34721] In particular, it was observed that in plants, especially in Arabidopsis thaliana, increasing or generating the activity of a gene product non-targeted with the activity of a “cyclin D”, preferably being encoded by a gene comprising the nucleic acid sequence SEQ ID NO. 24311, preferably the coding region thereof, conferred the production of or the increase in tryptophan compared with the wild type control.

[34722] The nucleic acid sequence of At4g35310 from Arabidopsis thaliana, e.g. as shown in the respective line in column 5 of Table I, application no. 5, has been published in F. And the activity of the gene product thereof is the activity of calcium-dependent protein kinase.

[34723] Accordingly, in one embodiment, the process of the present invention for producing tryptophan in a non-human organism, like a microorganism or a plant or a part thereof, comprises increasing or generating the activity of a gene product with the activity of a gene product conferring the activity of “calcium-dependent protein kinase”, especially from Arabidopsis thaliana or its functional equivalent or its homolog, e.g. the increase of
[34724] (a) a gene product of a gene comprising the nucleic acid molecule as shown in the respective line in column 5 of Table I, application no. 5, preferably the coding region thereof, or a homolog or a fragment thereof, and being depicted in the same respective line as said At4g35310, or a functional equivalent or a homolog thereof as shown in column 8 of Table I, application no. 5, preferably the coding region thereof, particularly a homolog or functional equivalent as shown in column 8 of Table I B, application no. 5, and being depicted in the same respective line as said At4g35310, and preferably the activity is increased non-targeted, or
[34725] (b) a polypeptide comprising a polypeptide, a consensus sequence or at least a polypeptide motif as shown in the respective line in column 5 of Table II or in column 8 of Table IV, application no. 5, respectively, and being depicted in the same respective line as said At4g35310, or a functional equivalent or a homolog thereof as depicted in column 8 of Table II, application no. 5, preferably a homolog or functional equivalent as depicted in column 8 of Table II B, application no. 5, and being depicted in the same respective line as said At4g35310, and preferably the activity is increased non-targeted.

[34726] Accordingly, in one embodiment, the molecule which activity is to be increased in the process of the invention is the gene product with an activity as a “calcium-dependent protein kinase”, preferably it is the molecule of section (a) or (b) of this paragraph.

[34727] In particular, it was observed that in plants, especially in Arabidopsis thaliana, increasing or generating the activity of a gene product non-targeted with the activity of a “calcium-dependent protein kinase”, preferably being encoded by a gene comprising the nucleic acid sequence SEQ ID NO. 4348, preferably the coding region thereof, conferred the production of or the increase in tryptophan compared with the wild type control.

[34728] The nucleic acid sequence of At5g02760 from Arabidopsis thaliana, e.g. as shown in the respective line in column 5 of Table I, application no. 5, has been published in F. And the activity of the gene product thereof is the activity of protein phosphatase.

[34729] Accordingly, in one embodiment, the process of the present invention for producing tryptophan in a non-human organism, like a microorganism or a plant or a part thereof, comprises increasing or generating the activity of a gene product with the activity of a gene product conferring the activity of “protein phosphatase”, especially from Arabidopsis thaliana or its functional equivalent or its homolog, e.g. the increase of
[34730] (a) a gene product of a gene comprising the nucleic acid molecule as shown in the respective line in column 5 of Table I, application no. 5, preferably the coding region thereof, or a homolog or a fragment thereof, and being depicted in the same respective line as said At5g02760, or a functional equivalent or a homolog thereof as shown in column 8 of Table I, application no. 5, preferably the coding region thereof, particularly a homolog or functional equivalent as shown in column 8 of Table I B, application no. 5, and being depicted in the same respective line as said At5g02760, and preferably the activity is increased non-targeted, or
[34731] (b) a polypeptide comprising a polypeptide, a consensus sequence or at least a polypeptide motif as shown in the respective line in column 5 of Table II or in column 8 of Table IV, application no. 5, respectively, and being depicted in the same respective line as said At5g02760, or a functional equivalent or a homolog thereof as depicted in column 8 of Table II, application no. 5, preferably a homolog or functional equivalent as depicted in column 8 of Table II B, application no. 5, and being depicted in the same respective line as said At5g02760, and preferably the activity is increased non-targeted.

[34732] Accordingly, in one embodiment, the molecule which activity is to be increased in the process of the invention is the gene product with an activity as a “protein phosphatase”, preferably it is the molecule of section (a) or (b) of this paragraph.

[34733] In particular, it was observed that in plants, especially in Arabidopsis thaliana, increasing or generating the activity of a gene product non-targeted with the activity of a “protein phosphatase”, preferably being encoded by a gene comprising the nucleic acid sequence SEQ ID NO. 68987, preferably the coding region thereof, conferred the production of or the increase in tryptophan compared with the wild type control.

[34734] The nucleic acid sequence of At5g07200 from Arabidopsis thaliana, e.g. as shown in the respective line in column 5 of Table I, application no. 5, has been published in F. And the activity of the gene product thereof is the activity of gibberellin 20-oxidase.

[34735] Accordingly, in one embodiment, the process of the present invention for producing tryptophan in a non-human organism, like a microorganism or a plant or a part thereof, comprises increasing or generating the activity of a gene product with the activity of a gene product conferring the activity of “gibberellin 20-oxidase”, especially from Arabidopsis thaliana or its functional equivalent or its homolog, e.g. the increase of
[34736] (a) a gene product of a gene comprising the nucleic acid molecule as shown in the respective line in column 5 of Table I, application no. 5, preferably the coding region thereof, or a homolog or a fragment thereof, and being depicted in the same respective line as said At5g07200, or a functional equivalent or a homolog thereof as shown in column 8 of Table I, application no. 5, preferably the coding region thereof, particularly a homolog or functional equivalent as shown in column 8 of Table I B, application no. 5, and being depicted in the same respective line as said At5g07200, and preferably the activity is increased non-targeted, or
[34737] (b) a polypeptide comprising a polypeptide, a consensus sequence or at least a polypeptide motif as shown in the respective line in column 5 of Table II or in column 8 of Table IV, application no. 5, respectively, and being depicted in the same respective line as said At5g07200, or a functional equivalent or a homolog thereof as depicted in column 8 of Table II, application no. 5, preferably a homolog or functional equivalent as depicted in column 8 of Table II B, application no. 5, and being depicted in the same respective line as said At5g07200, and preferably the activity is increased non-targeted.

[34738] Accordingly, in one embodiment, the molecule which activity is to be increased in the process of the invention is the gene product with an activity as a “gibberellin 20-oxidase”, preferably it is the molecule of section (a) or (b) of this paragraph.

[34739] In particular, it was observed that in plants, especially in Arabidopsis thaliana, increasing or generating the activity of a gene product non-targeted with the activity of a “gibberellin 20-oxidase”, preferably being encoded by a gene comprising the nucleic acid sequence SEQ ID NO. 24492, preferably the coding region thereof, conferred the production of or the increase in tryptophan compared with the wild type control.

[34740] The nucleic acid sequence of At5g16650 from Arabidopsis thaliana, e.g. as shown in the respective line in column 5 of Table I, application no. 5, has been published in F. And the activity of the gene product thereof is the activity of At5g16650-protein.

[34741] Accordingly, in one embodiment, the process of the present invention for producing tryptophan in a non-human organism, like a microorganism or a plant or a part thereof, comprises increasing or generating the activity of a gene product with the activity of a gene product conferring the activity of “At5g16650-protein”, especially from Arabidopsis thaliana or its functional equivalent or its homolog, e.g. the increase of
[34742] (a) a gene product of a gene comprising the nucleic acid molecule as shown in the respective line in column 5 of Table I, application no. 5, preferably the coding region thereof, or a homolog or a fragment thereof, and being depicted in the same respective line as said At5g16650, or a functional equivalent or a homolog thereof as shown in column 8 of Table I, application no. 5, preferably the coding region thereof, particularly a homolog or functional equivalent as shown in column 8 of Table I B, application no. 5, and being depicted in the same respective line as said At5g16650, and preferably the activity is increased non-targeted, or
[34743] (b) a polypeptide comprising a polypeptide, a consensus sequence or at least a polypeptide motif as shown in the respective line in column 5 of Table II or in column 8 of Table IV, application no. 5, respectively, and being depicted in the same respective line as said At5g16650, or a functional equivalent or a homolog thereof as depicted in column 8 of Table II, application no. 5, preferably a homolog or functional equivalent as depicted in column 8 of Table II B, application no. 5, and being depicted in the same respective line as said At5g16650, and preferably the activity is increased non-targeted.

[34744] Accordingly, in one embodiment, the molecule which activity is to be increased in the process of the invention is the gene product with an activity as a “At5g16650-protein”, preferably it is the molecule of section (a) or (b) of this paragraph.

[34745] In particular, it was observed that in plants, especially in Arabidopsis thaliana, increasing or generating the activity of a gene product non-targeted with the activity of a “At5g16650-protein”, preferably being encoded by a gene comprising the nucleic acid sequence SEQ ID NO. 25283, preferably the coding region thereof, conferred the production of or the increase in tryptophan compared with the wild type control.

[34746] The nucleic acid sequence of At5g21910 from Arabidopsis thaliana, e.g. as shown in the respective line in column 5 of Table I, application no. 5, has been published in F. And the activity of the gene product thereof is the activity of at5g21910-protein.

[34747] Accordingly, in one embodiment, the process of the present invention for producing tryptophan in a non-human organism, like a microorganism or a plant or a part thereof, comprises increasing or generating the activity of a gene product with the activity of a gene product conferring the activity of “at5g21910-protein”, especially from Arabidopsis thaliana or its functional equivalent or its homolog, e.g. the increase of
[34748] (a) a gene product of a gene comprising the nucleic acid molecule as shown in the respective line in column 5 of Table I, application no. 5, preferably the coding region thereof, or a homolog or a fragment thereof, and being depicted in the same respective line as said At5g21910, or a functional equivalent or a homolog thereof as shown in column 8 of Table I, application no. 5, preferably the coding region thereof, particularly a homolog or functional equivalent as shown in column 8 of Table I B, application no. 5, and being depicted in the same respective line as said At5g21910, and preferably the activity is increased non-targeted, or
[34749] (b) a polypeptide comprising a polypeptide, a consensus sequence or at least a polypeptide motif as shown in the respective line in column 5 of Table II or in column 8 of Table IV, application no. 5, respectively, and being depicted in the same respective line as said At5g21910, or a functional equivalent or a homolog thereof as depicted in column 8 of Table II, application no. 5, preferably a homolog or functional equivalent as depicted in column 8 of Table II B, application no. 5, and being depicted in the same respective line as said At5g21910, and preferably the activity is increased non-targeted.

[34750] Accordingly, in one embodiment, the molecule which activity is to be increased in the process of the invention is the gene product with an activity as a “at5g21910-protein”, preferably it is the molecule of section (a) or (b) of this paragraph.

[34751] In particular, it was observed that in plants, especially in Arabidopsis thaliana, increasing or generating the activity of a gene product non-targeted with the activity of a “at5g21910-protein”, preferably being encoded by a gene comprising the nucleic acid sequence SEQ ID NO. 69553, preferably the coding region thereof, conferred the production of or the increase in tryptophan compared with the wild type control.

[34752] The nucleic acid sequence of At5g39760 from Arabidopsis thaliana, e.g. as shown in the respective line in column 5 of Table I, application no. 5, has been published in F. And the activity of the gene product thereof is the activity of transcription factor.

[34753] Accordingly, in one embodiment, the process of the present invention for producing tryptophan in a non-human organism, like a microorganism or a plant or a part thereof, comprises increasing or generating the activity of a gene product with the activity of a gene product conferring the activity of “transcription factor”, especially from Arabidopsis thaliana or its functional equivalent or its homolog, e.g. the increase of
[34754] (a) a gene product of a gene comprising the nucleic acid molecule as shown in the respective line in column 5 of Table I, application no. 5, preferably the coding region thereof, or a homolog or a fragment thereof, and being depicted in the same respective line as said At5g39760, or a functional equivalent or a homolog thereof as shown in column 8 of Table I, application no. 5, preferably the coding region thereof, particularly a homolog or functional equivalent as shown in column 8 of Table I B, application no. 5, and being depicted in the same respective line as said At5g39760, and preferably the activity is increased non-targeted, or
[34755] (b) a polypeptide comprising a polypeptide, a consensus sequence or at least a polypeptide motif as shown in the respective line in column 5 of Table II or in column 8 of Table IV, application no. 5, respectively, and being depicted in the same respective line as said At5g39760, or a functional equivalent or a homolog thereof as depicted in column 8 of Table II, application no. 5, preferably a homolog or functional equivalent as depicted in column 8 of Table II B, application no. 5, and being depicted in the same respective line as said At5g39760, and preferably the activity is increased non-targeted.

[34756] Accordingly, in one embodiment, the molecule which activity is to be increased in the process of the invention is the gene product with an activity as a “transcription factor”, preferably it is the molecule of section (a) or (b) of this paragraph.

[34757] In particular, it was observed that in plants, especially in Arabidopsis thaliana, increasing or generating the activity of a gene product non-targeted with the activity of a “transcription factor”, preferably being encoded by a gene comprising the nucleic acid sequence SEQ ID NO. 25428, preferably the coding region thereof, conferred the production of or the increase in tryptophan compared with the wild type control.

[34758] The nucleic acid sequence of At5g60110 from Arabidopsis thaliana, e.g. as shown in the respective line in column 5 of Table I, application no. 5, has been published in F. And the activity of the gene product thereof is the activity of RNA-binding protein.

[34759] Accordingly, in one embodiment, the process of the present invention for producing tryptophan in a non-human organism, like a microorganism or a plant or a part thereof, comprises increasing or generating the activity of a gene product with the activity of a gene product conferring the activity of “RNA-binding protein”, especially from Arabidopsis thaliana or its functional equivalent or its homolog, e.g. the increase of
[34760] (a) a gene product of a gene comprising the nucleic acid molecule as shown in the respective line in column 5 of Table I, application no. 5, preferably the coding region thereof, or a homolog or a fragment thereof, and being depicted in the same respective line as said At5g60110, or a functional equivalent or a homolog thereof as shown in column 8 of Table I, application no. 5, preferably the coding region thereof, particularly a homolog or functional equivalent as shown in column 8 of Table I B, application no. 5, and being depicted in the same respective line as said At5g60110, and preferably the activity is increased non-targeted, or
[34761] (b) a polypeptide comprising a polypeptide, a consensus sequence or at least a polypeptide motif as shown in the respective line in column 5 of Table II or in column 8 of Table IV, application no. 5, respectively, and being depicted in the same respective line as said At5g60110, or a functional equivalent or a homolog thereof as depicted in column 8 of Table II, application no. 5, preferably a homolog or functional equivalent as depicted in column 8 of Table II B, application no. 5, and being depicted in the same respective line as said At5g60110, and preferably the activity is increased non-targeted.

[34762] Accordingly, in one embodiment, the molecule which activity is to be increased in the process of the invention is the gene product with an activity as a “RNA-binding protein”, preferably it is the molecule of section (a) or (b) of this paragraph.

[34763] In particular, it was observed that in plants, especially in Arabidopsis thaliana, increasing or generating the activity of a gene product non-targeted with the activity of a “RNA-binding protein”, preferably being encoded by a gene comprising the nucleic acid sequence SEQ ID NO. 70006, preferably the coding region thereof, conferred the production of or the increase in tryptophan compared with the wild type control.

[34764] The nucleic acid sequence of AvinDRAFT_{—}1495 from Azotobacter vinelandii, e.g. as shown in the respective line in column 5 of Table I, application no. 5, has been published in D. And the activity of the gene product thereof is the activity of malic enzyme.

[34765] Accordingly, in one embodiment, the process of the present invention for producing tryptophan in a non-human organism, like a microorganism or a plant or a part thereof, comprises increasing or generating the activity of a gene product with the activity of a gene product conferring the activity of “malic enzyme”, especially from Azotobacter vinelandii or its functional equivalent or its homolog, e.g. the increase of
[34766] (a) a gene product of a gene comprising the nucleic acid molecule as shown in the respective line in column 5 of Table I, application no. 5, preferably the coding region thereof, or a homolog or a fragment thereof, and being depicted in the same respective line as said AvinDRAFT_{—}1495, or a functional equivalent or a homolog thereof as shown in column 8 of Table I, application no. 5, preferably the coding region thereof, particularly a homolog or functional equivalent as shown in column 8 of Table I B, application no. 5, and being depicted in the same respective line as said AvinDRAFT_{—}1495, and preferably the activity is increased non-targeted, or
[34767] (b) a polypeptide comprising a polypeptide, a consensus sequence or at least a polypeptide motif as shown in the respective line in column 5 of Table II or in column 8 of Table IV, application no. 5, respectively, and being depicted in the same respective line as said AvinDRAFT_{—}1495, or a functional equivalent or a homolog thereof as depicted in column 8 of Table II, application no. 5, preferably a homolog or functional equivalent as depicted in column 8 of Table II B, application no. 5, and being depicted in the same respective line as said AvinDRAFT_{—}1495, and preferably the activity is increased non-targeted.

[34768] Accordingly, in one embodiment, the molecule which activity is to be increased in the process of the invention is the gene product with an activity as a “malic enzyme”, preferably it is the molecule of section (a) or (b) of this paragraph.

[34769] In particular, it was observed that in plants, especially in Arabidopsis thaliana, increasing or generating the activity of a gene product non-targeted with the activity of a “malic enzyme”, preferably being encoded by a gene comprising the nucleic acid sequence SEQ ID NO. 5557, preferably the coding region thereof, conferred the production of or the increase in tryptophan compared with the wild type control.

[34770] The nucleic acid sequence of AvinDRAFT_{—}2344 from Azotobacter vinelandii, e.g. as shown in the respective line in column 5 of Table I, application no. 5, has been published in D. And the activity of the gene product thereof is the activity of elongation factor Tu.

[34771] Accordingly, in one embodiment, the process of the present invention for producing tryptophan in a non-human organism, like a microorganism or a plant or a part thereof, comprises increasing or generating the activity of a gene product with the activity of a gene product conferring the activity of “elongation factor Tu”, especially from Azotobacter vinelandii or its functional equivalent or its homolog, e.g. the increase of
[34772] (a) a gene product of a gene comprising the nucleic acid molecule as shown in the respective line in column 5 of Table I, application no. 5, preferably the coding region thereof, or a homolog or a fragment thereof, and being depicted in the same respective line as said AvinDRAFT_{—}2344, or a functional equivalent or a homolog thereof as shown in column 8 of Table I, application no. 5, preferably the coding region thereof, particularly a homolog or functional equivalent as shown in column 8 of Table I B, application no. 5, and being depicted in the same respective line as said AvinDRAFT_{—}2344, and preferably the activity is increased non-targeted, or
[34773] (b) a polypeptide comprising a polypeptide, a consensus sequence or at least a polypeptide motif as shown in the respective line in column 5 of Table II or in column 8 of Table IV, application no. 5, respectively, and being depicted in the same respective line as said AvinDRAFT_{—}2344, or a functional equivalent or a homolog thereof as depicted in column 8 of Table II, application no. 5, preferably a homolog or functional equivalent as depicted in column 8 of Table II B, application no. 5, and being depicted in the same respective line as said AvinDRAFT_{—}2344, and preferably the activity is increased non-targeted.

[34774] Accordingly, in one embodiment, the molecule which activity is to be increased in the process of the invention is the gene product with an activity as a “elongation factor Tu”, preferably it is the molecule of section (a) or (b) of this paragraph.

[34775] In particular, it was observed that in plants, especially in Arabidopsis thaliana, increasing or generating the activity of a gene product non-targeted with the activity of a “elongation factor Tu”, preferably being encoded by a gene comprising the nucleic acid sequence SEQ ID NO. 27021, preferably the coding region thereof, conferred the production of or the increase in tryptophan compared with the wild type control.

[34776] The nucleic acid sequence of AvinDRAFT_{—}3159 from Azotobacter vinelandii, e.g. as shown in the respective line in column 5 of Table I, application no. 5, has been published in D. And the activity of the gene product thereof is the activity of enoyl-CoA hydratase.

[34777] Accordingly, in one embodiment, the process of the present invention for producing tryptophan in a non-human organism, like a microorganism or a plant or a part thereof, comprises increasing or generating the activity of a gene product with the activity of a gene product conferring the activity of “enoyl-CoA hydratase”, especially from Azotobacter vinelandii or its functional equivalent or its homolog, e.g. the increase of
[34778] (a) a gene product of a gene comprising the nucleic acid molecule as shown in the respective line in column 5 of Table I, application no. 5, preferably the coding region thereof, or a homolog or a fragment thereof, and being depicted in the same respective line as said AvinDRAFT_{—}3159, or a functional equivalent or a homolog thereof as shown in column 8 of Table I, application no. 5, preferably the coding region thereof, particularly a homolog or functional equivalent as shown in column 8 of Table I B, application no. 5, and being depicted in the same respective line as said AvinDRAFT_{—}3159, and preferably the activity is increased non-targeted, or
[34779] (b) a polypeptide comprising a polypeptide, a consensus sequence or at least a polypeptide motif as shown in the respective line in column 5 of Table II or in column 8 of Table IV, application no. 5, respectively, and being depicted in the same respective line as said AvinDRAFT_{—}3159, or a functional equivalent or a homolog thereof as depicted in column 8 of Table II, application no. 5, preferably a homolog or functional equivalent as depicted in column 8 of Table II B, application no. 5, and being depicted in the same respective line as said AvinDRAFT_{—}3159, and preferably the activity is increased non-targeted.

[34780] Accordingly, in one embodiment, the molecule which activity is to be increased in the process of the invention is the gene product with an activity as a “enoyl-CoA hydratase”, preferably it is the molecule of section (a) or (b) of this paragraph.

[34781] In particular, it was observed that in plants, especially in Arabidopsis thaliana, increasing or generating the activity of a gene product non-targeted with the activity of a “enoyl-CoA hydratase”, preferably being encoded by a gene comprising the nucleic acid sequence SEQ ID NO. 28738, preferably the coding region thereof, conferred the production of or the increase in tryptophan compared with the wild type control.

[34782] The nucleic acid sequence of AvinDRAFT_{—}3209 from Azotobacter vinelandii, e.g. as shown in the respective line in column 5 of Table I, application no. 5, has been published in D. And the activity of the gene product thereof is the activity of transcriptional regulator.

[34783] Accordingly, in one embodiment, the process of the present invention for producing tryptophan in a non-human organism, like a microorganism or a plant or a part thereof, comprises increasing or generating the activity of a gene product with the activity of a gene product conferring the activity of “transcriptional regulator”, especially from Azotobacter vinelandii or its functional equivalent or its homolog, e.g. the increase of
[34784] (a) a gene product of a gene comprising the nucleic acid molecule as shown in the respective line in column 5 of Table I, application no. 5, preferably the coding region thereof, or a homolog or a fragment thereof, and being depicted in the same respective line as said AvinDRAFT_{—}3209, or a functional equivalent or a homolog thereof as shown in column 8 of Table I, application no. 5, preferably the coding region thereof, particularly a homolog or functional equivalent as shown in column 8 of Table I B, application no. 5, and being depicted in the same respective line as said AvinDRAFT_{—}3209, and preferably the activity is increased non-targeted, or
[34785] (b) a polypeptide comprising a polypeptide, a consensus sequence or at least a polypeptide motif as shown in the respective line in column 5 of Table II or in column 8 of Table IV, application no. 5, respectively, and being depicted in the same respective line as said AvinDRAFT_{—}3209, or a functional equivalent or a homolog thereof as depicted in column 8 of Table II, application no. 5, preferably a homolog or functional equivalent as depicted in column 8 of Table II B, application no. 5, and being depicted in the same respective line as said AvinDRAFT_{—}3209, and preferably the activity is increased non-targeted.

[34786] Accordingly, in one embodiment, the molecule which activity is to be increased in the process of the invention is the gene product with an activity as a “transcriptional regulator”, preferably it is the molecule of section (a) or (b) of this paragraph.

[34787] In particular, it was observed that in plants, especially in Arabidopsis thaliana, increasing or generating the activity of a gene product non-targeted with the activity of a “transcriptional regulator”, preferably being encoded by a gene comprising the nucleic acid sequence SEQ ID NO. 29286, preferably the coding region thereof, conferred the production of or the increase in tryptophan compared with the wild type control.

[34788] The nucleic acid sequence of AvinDRAFT_{—}4420 from Azotobacter vinelandii, e.g. as shown in the respective line in column 5 of Table I, application no. 5, has been published in D. And the activity of the gene product thereof is the activity of enoyl-CoA hydratase.

[34789] Accordingly, in one embodiment, the process of the present invention for producing tryptophan in a non-human organism, like a microorganism or a plant or a part thereof, comprises increasing or generating the activity of a gene product with the activity of a gene product conferring the activity of “enoyl-CoA hydratase”, especially from Azotobacter vinelandii or its functional equivalent or its homolog, e.g. the increase of
[34790] (a) a gene product of a gene comprising the nucleic acid molecule as shown in the respective line in column 5 of Table I, application no. 5, preferably the coding region thereof, or a homolog or a fragment thereof, and being depicted in the same respective line as said AvinDRAFT_{—}4420, or a functional equivalent or a homolog thereof as shown in column 8 of Table I, application no. 5, preferably the coding region thereof, particularly a homolog or functional equivalent as shown in column 8 of Table I B, application no. 5, and being depicted in the same respective line as said AvinDRAFT_{—}4420, and preferably the activity is increased non-targeted, or
[34791] (b) a polypeptide comprising a polypeptide, a consensus sequence or at least a polypeptide motif as shown in the respective line in column 5 of Table II or in column 8 of Table IV, application no. 5, respectively, and being depicted in the same respective line as said AvinDRAFT_{—}4420, or a functional equivalent or a homolog thereof as depicted in column 8 of Table II, application no. 5, preferably a homolog or functional equivalent as depicted in column 8 of Table II B, application no. 5, and being depicted in the same respective line as said AvinDRAFT_{—}4420, and preferably the activity is increased non-targeted.

[34792] Accordingly, in one embodiment, the molecule which activity is to be increased in the process of the invention is the gene product with an activity as a “enoyl-CoA hydratase”, preferably it is the molecule of section (a) or (b) of this paragraph.

[34793] In particular, it was observed that in plants, especially in Arabidopsis thaliana, increasing or generating the activity of a gene product non-targeted with the activity of a “enoyl-CoA hydratase”, preferably being encoded by a gene comprising the nucleic acid sequence SEQ ID NO. 73038, preferably the coding region thereof, conferred the production of or the increase in tryptophan compared with the wild type control.

[34794] The nucleic acid sequence of AvinDRAFT_{—}4836 from Azotobacter vinelandii, e.g. as shown in the respective line in column 5 of Table I, application no. 5, has been published in D. And the activity of the gene product thereof is the activity of glutamate-ammonia-ligase.

[34795] Accordingly, in one embodiment, the process of the present invention for producing tryptophan in a non-human organism, like a microorganism or a plant or a part thereof, comprises increasing or generating the activity of a gene product with the activity of a gene product conferring the activity of “glutamate-ammonia-ligase”, especially from Azotobacter vinelandii or its functional equivalent or its homolog, e.g. the increase of
[34796] (a) a gene product of a gene comprising the nucleic acid molecule as shown in the respective line in column 5 of Table I, application no. 5, preferably the coding region thereof, or a homolog or a fragment thereof, and being depicted in the same respective line as said AvinDRAFT_{—}4836, or a functional equivalent or a homolog thereof as shown in column 8 of Table I, application no. 5, preferably the coding region thereof, particularly a homolog or functional equivalent as shown in column 8 of Table I B, application no. 5, and being depicted in the same respective line as said AvinDRAFT_{—}4836, and preferably the activity is increased non-targeted, or
[34797] (b) a polypeptide comprising a polypeptide, a consensus sequence or at least a polypeptide motif as shown in the respective line in column 5 of Table II or in column 8 of Table IV, application no. 5, respectively, and being depicted in the same respective line as said AvinDRAFT_{—}4836, or a functional equivalent or a homolog thereof as depicted in column 8 of Table II, application no. 5, preferably a homolog or functional equivalent as depicted in column 8 of Table II B, application no. 5, and being depicted in the same respective line as said AvinDRAFT_{—}4836, and preferably the activity is increased non-targeted.

[34798] Accordingly, in one embodiment, the molecule which activity is to be increased in the process of the invention is the gene product with an activity as a “glutamate-ammonia-ligase”, preferably it is the molecule of section (a) or (b) of this paragraph.

[34799] In particular, it was observed that in plants, especially in Arabidopsis thaliana, increasing or generating the activity of a gene product non-targeted with the activity of a “glutamate-ammonia-ligase”, preferably being encoded by a gene comprising the nucleic acid sequence SEQ ID NO. 74163, preferably the coding region thereof, conferred the production of or the increase in tryptophan compared with the wild type control.

[34800] The nucleic acid sequence of AvinDRAFT_{—}5103 from Azotobacter vinelandii, e.g. as shown in the respective line in column 5 of Table I, application no. 5, has been published in D. And the activity of the gene product thereof is the activity of hydrolase.

[34801] Accordingly, in one embodiment, the process of the present invention for producing tryptophan in a non-human organism, like a microorganism or a plant or a part thereof, comprises increasing or generating the activity of a gene product with the activity of a gene product conferring the activity of “hydrolase”, especially from Azotobacter vinelandii or its functional equivalent or its homolog, e.g. the increase of
[34802] (a) a gene product of a gene comprising the nucleic acid molecule as shown in the respective line in column 5 of Table I, application no. 5, preferably the coding region thereof, or a homolog or a fragment thereof, and being depicted in the same respective line as said AvinDRAFT_{—}5103, or a functional equivalent or a homolog thereof as shown in column 8 of Table I, application no. 5, preferably the coding region thereof, particularly a homolog or functional equivalent as shown in column 8 of Table I B, application no. 5, and being depicted in the same respective line as said AvinDRAFT_{—}5103, and preferably the activity is increased non-targeted, or
[34803] (b) a polypeptide comprising a polypeptide, a consensus sequence or at least a polypeptide motif as shown in the respective line in column 5 of Table II or in column 8 of Table IV, application no. 5, respectively, and being depicted in the same respective line as said AvinDRAFT_{—}5103, or a functional equivalent or a homolog thereof as depicted in column 8 of Table II, application no. 5, preferably a homolog or functional equivalent as depicted in column 8 of Table II B, application no. 5, and being depicted in the same respective line as said AvinDRAFT_{—}5103, and preferably the activity is increased non-targeted.

[34804] Accordingly, in one embodiment, the molecule which activity is to be increased in the process of the invention is the gene product with an activity as a “hydrolase”, preferably it is the molecule of section (a) or (b) of this paragraph.

[34805] In particular, it was observed that in plants, especially in Arabidopsis thaliana, increasing or generating the activity of a gene product non-targeted with the activity of a “hydrolase”, preferably being encoded by a gene comprising the nucleic acid sequence SEQ ID NO. 6510, preferably the coding region thereof, conferred the production of or the increase in tryptophan compared with the wild type control.

[34806] The nucleic acid sequence of AvinDRAFT_{—}6093 from Azotobacter vinelandii, e.g. as shown in the respective line in column 5 of Table I, application no. 5, has been published in D. And the activity of the gene product thereof is the activity of Chaperone protein CIpB.

[34807] Accordingly, in one embodiment, the process of the present invention for producing tryptophan in a non-human organism, like a microorganism or a plant or a part thereof, comprises increasing or generating the activity of a gene product with the activity of a gene product conferring the activity of “Chaperone protein CIpB”, especially from Azotobacter vinelandii or its functional equivalent or its homolog, e.g. the increase of
[34808] (a) a gene product of a gene comprising the nucleic acid molecule as shown in the respective line in column 5 of Table I, application no. 5, preferably the coding region thereof, or a homolog or a fragment thereof, and being depicted in the same respective line as said AvinDRAFT_{—}6093, or a functional equivalent or a homolog thereof as shown in column 8 of Table I, application no. 5, preferably the coding region thereof, particularly a homolog or functional equivalent as shown in column 8 of Table I B, application no. 5, and being depicted in the same respective line as said AvinDRAFT_{—}6093, and preferably the activity is increased non-targeted, or
[34809] (b) a polypeptide comprising a polypeptide, a consensus sequence or at least a polypeptide motif as shown in the respective line in column 5 of Table II or in column 8 of Table IV, application no. 5, respectively, and being depicted in the same respective line as said AvinDRAFT_{—}6093, or a functional equivalent or a homolog thereof as depicted in column 8 of Table II, application no. 5, preferably a homolog or functional equivalent as depicted in column 8 of Table II B, application no. 5, and being depicted in the same respective line as said AvinDRAFT_{—}6093, and preferably the activity is increased non-targeted.

[34810] Accordingly, in one embodiment, the molecule which activity is to be increased in the process of the invention is the gene product with an activity as a “Chaperone protein CIpB”, preferably it is the molecule of section (a) or (b) of this paragraph.

[34811] In particular, it was observed that in plants, especially in Arabidopsis thaliana, increasing or generating the activity of a gene product non-targeted with the activity of a “Chaperone protein CIpB”, preferably being encoded by a gene comprising the nucleic acid sequence SEQ ID NO. 33596, preferably the coding region thereof, conferred the production of or the increase in tryptophan compared with the wild type control.

[34812] The nucleic acid sequence of AvinDRAFT_{—}6679 from Azotobacter vinelandii, e.g. as shown in the respective line in column 5 of Table I, application no. 5, has been published in D. And the activity of the gene product thereof is the activity of electron transfer flavoprotein subunit beta.

[34813] Accordingly, in one embodiment, the process of the present invention for producing tryptophan in a non-human organism, like a microorganism or a plant or a part thereof, comprises increasing or generating the activity of a gene product with the activity of a gene product conferring the activity of “electron transfer flavoprotein subunit beta”, especially from Azotobacter vinelandii or its functional equivalent or its homolog, e.g. the increase of
[34814] (a) a gene product of a gene comprising the nucleic acid molecule as shown in the respective line in column 5 of Table I, application no. 5, preferably the coding region thereof, or a homolog or a fragment thereof, and being depicted in the same respective line as said AvinDRAFT_{—}6679, or a functional equivalent or a homolog thereof as shown in column 8 of Table I, application no. 5, preferably the coding region thereof, particularly a homolog or functional equivalent as shown in column 8 of Table I B, application no. 5, and being depicted in the same respective line as said AvinDRAFT_{—}6679, and preferably the activity is increased non-targeted, or
[34815] (b) a polypeptide comprising a polypeptide, a consensus sequence or at least a polypeptide motif as shown in the respective line in column 5 of Table II or in column 8 of Table IV, application no. 5, respectively, and being depicted in the same respective line as said AvinDRAFT_{—}6679, or a functional equivalent or a homolog thereof as depicted in column 8 of Table II, application no. 5, preferably a homolog or functional equivalent as depicted in column 8 of Table II B, application no. 5, and being depicted in the same respective line as said AvinDRAFT_{—}6679, and preferably the activity is increased non-targeted.

[34816] Accordingly, in one embodiment, the molecule which activity is to be increased in the process of the invention is the gene product with an activity as a “electron transfer flavoprotein subunit beta”, preferably it is the molecule of section (a) or (b) of this paragraph.

[34817] In particular, it was observed that in plants, especially in Arabidopsis thaliana, increasing or generating the activity of a gene product non-targeted with the activity of a “electron transfer flavoprotein subunit beta”, preferably being encoded by a gene comprising the nucleic acid sequence SEQ ID NO. 74729, preferably the coding region thereof, conferred the production of or the increase in tryptophan compared with the wild type control.

[34818] The nucleic acid sequence of B0004 from Escherichia coli, e.g. as shown in the respective line in column 5 of Table I, application no. 5, has been published in B. And the activity of the gene product thereof is the activity of threonine synthase.

[34819] Accordingly, in one embodiment, the process of the present invention for producing tryptophan in a non-human organism, like a microorganism or a plant or a part thereof, comprises increasing or generating the activity of a gene product with the activity of a gene product conferring the activity of “threonine synthase”, especially from Escherichia coli or its functional equivalent or its homolog, e.g. the increase of
[34820] (a) a gene product of a gene comprising the nucleic acid molecule as shown in the respective line in column 5 of Table I, application no. 5, preferably the coding region thereof, or a homolog or a fragment thereof, and being depicted in the same respective line as said B0004, or a functional equivalent or a homolog thereof as shown in column 8 of Table I, application no. 5, preferably the coding region thereof, particularly a homolog or functional equivalent as shown in column 8 of Table I B, application no. 5, and being depicted in the same respective line as said B0004, and preferably the activity is increased plastidic, or
[34821] (b) a polypeptide comprising a polypeptide, a consensus sequence or at least a polypeptide motif as shown in the respective line in column 5 of Table II or in column 8 of Table IV, application no. 5, respectively, and being depicted in the same respective line as said B0004, or a functional equivalent or a homolog thereof as depicted in column 8 of Table II, application no. 5, preferably a homolog or functional equivalent as depicted in column 8 of Table II B, application no. 5, and being depicted in the same respective line as said B0004, and preferably the activity is increased plastidic.

[34822] Accordingly, in one embodiment, the molecule which activity is to be increased in the process of the invention is the gene product with an activity as a “threonine synthase”, preferably it is the molecule of section (a) or (b) of this paragraph.

[34823] In particular, it was observed that in plants, especially in Arabidopsis thaliana, increasing or generating the activity of a gene product plastidic with the activity of a “threonine synthase”, preferably being encoded by a gene comprising the nucleic acid sequence SEQ ID NO. 34889, preferably the coding region thereof, conferred the production of or the increase in tryptophan compared with the wild type control.

[34824] The nucleic acid sequence of B0008 from Escherichia coli, e.g. as shown in the respective line in column 5 of Table I, application no. 5, has been published in B. And the activity of the gene product thereof is the activity of transaldolase.

[34825] Accordingly, in one embodiment, the process of the present invention for producing tryptophan in a non-human organism, like a microorganism or a plant or a part thereof, comprises increasing or generating the activity of a gene product with the activity of a gene product conferring the activity of “transaldolase”, especially from Escherichia coli or its functional equivalent or its homolog, e.g. the increase of
[34826] (a) a gene product of a gene comprising the nucleic acid molecule as shown in the respective line in column 5 of Table I, application no. 5, preferably the coding region thereof, or a homolog or a fragment thereof, and being depicted in the same respective line as said B0008, or a functional equivalent or a homolog thereof as shown in column 8 of Table I, application no. 5, preferably the coding region thereof, particularly a homolog or functional equivalent as shown in column 8 of Table I B, application no. 5, and being depicted in the same respective line as said B0008, and preferably the activity is increased non-targeted, or
[34827] (b) a polypeptide comprising a polypeptide, a consensus sequence or at least a polypeptide motif as shown in the respective line in column 5 of Table II or in column 8 of Table IV, application no. 5, respectively, and being depicted in the same respective line as said B0008, or a functional equivalent or a homolog thereof as depicted in column 8 of Table II, application no. 5, preferably a homolog or functional equivalent as depicted in column 8 of Table II B, application no. 5, and being depicted in the same respective line as said B0008, and preferably the activity is increased non-targeted.

[34828] Accordingly, in one embodiment, the molecule which activity is to be increased in the process of the invention is the gene product with an activity as a “transaldolase”, preferably it is the molecule of section (a) or (b) of this paragraph.

[34829] In particular, it was observed that in plants, especially in Arabidopsis thaliana, increasing or generating the activity of a gene product non-targeted with the activity of a “transaldolase”, preferably being encoded by a gene comprising the nucleic acid sequence SEQ ID NO. 98553, preferably the coding region thereof, conferred the production of or the increase in tryptophan compared with the wild type control.

[34830] The nucleic acid sequence of B0061 from Escherichia coli, e.g. as shown in the respective line in column 5 of Table I, application no. 5, has been published in B. And the activity of the gene product thereof is the activity of L-ribulose-5-phosphate 4-epimerase.

[34831] Accordingly, in one embodiment, the process of the present invention for producing tryptophan in a non-human organism, like a microorganism or a plant or a part thereof, comprises increasing or generating the activity of a gene product with the activity of a gene product conferring the activity of “L-ribulose-5-phosphate 4-epimerase”, especially from Escherichia coli or its functional equivalent or its homolog, e.g. the increase of
[34832] (a) a gene product of a gene comprising the nucleic acid molecule as shown in the respective line in column 5 of Table I, application no. 5, preferably the coding region thereof, or a homolog or a fragment thereof, and being depicted in the same respective line as said B0061, or a functional equivalent or a homolog thereof as shown in column 8 of Table I, application no. 5, preferably the coding region thereof, particularly a homolog or functional equivalent as shown in column 8 of Table I B, application no. 5, and being depicted in the same respective line as said B0061, and preferably the activity is increased non-targeted, or
[34833] (b) a polypeptide comprising a polypeptide, a consensus sequence or at least a polypeptide motif as shown in the respective line in column 5 of Table II or in column 8 of Table IV, application no. 5, respectively, and being depicted in the same respective line as said B0061, or a functional equivalent or a homolog thereof as depicted in column 8 of Table II, application no. 5, preferably a homolog or functional equivalent as depicted in column 8 of Table II B, application no. 5, and being depicted in the same respective line as said B0061, and preferably the activity is increased non-targeted.

[34834] Accordingly, in one embodiment, the molecule which activity is to be increased in the process of the invention is the gene product with an activity as a “L-ribulose-5-phosphate 4-epimerase”, preferably it is the molecule of section (a) or (b) of this paragraph.

[34835] In particular, it was observed that in plants, especially in Arabidopsis thaliana, increasing or generating the activity of a gene product non-targeted with the activity of a “L-ribulose-5-phosphate 4-epimerase”, preferably being encoded by a gene comprising the nucleic acid sequence SEQ ID NO. 35204, preferably the coding region thereof, conferred the production of or the increase in tryptophan compared with the wild type control.

[34836] The nucleic acid sequence of B0124 from Escherichia coli, e.g. as shown in the respective line in column 5 of Table I, application no. 5, has been published in B. And the activity of the gene product thereof is the activity of glucose dehydrogenase.

[34837] Accordingly, in one embodiment, the process of the present invention for producing tryptophan in a non-human organism, like a microorganism or a plant or a part thereof, comprises increasing or generating the activity of a gene product with the activity of a gene product conferring the activity of “glucose dehydrogenase”, especially from Escherichia coli or its functional equivalent or its homolog, e.g. the increase of
[34838] (a) a gene product of a gene comprising the nucleic acid molecule as shown in the respective line in column 5 of Table I, application no. 5, preferably the coding region thereof, or a homolog or a fragment thereof, and being depicted in the same respective line as said B0124, or a functional equivalent or a homolog thereof as shown in column 8 of Table I, application no. 5, preferably the coding region thereof, particularly a homolog or functional equivalent as shown in column 8 of Table I B, application no. 5, and being depicted in the same respective line as said B0124, and preferably the activity is increased non-targeted, or
[34839] (b) a polypeptide comprising a polypeptide, a consensus sequence or at least a polypeptide motif as shown in the respective line in column 5 of Table II or in column 8 of Table IV, application no. 5, respectively, and being depicted in the same respective line as said B0124, or a functional equivalent or a homolog thereof as depicted in column 8 of Table II, application no. 5, preferably a homolog or functional equivalent as depicted in column 8 of Table II B, application no. 5, and being depicted in the same respective line as said B0124, and preferably the activity is increased non-targeted.

[34840] Accordingly, in one embodiment, the molecule which activity is to be increased in the process of the invention is the gene product with an activity as a “glucose dehydrogenase”, preferably it is the molecule of section (a) or (b) of this paragraph.

[34841] In particular, it was observed that in plants, especially in Arabidopsis thaliana, increasing or generating the activity of a gene product non-targeted with the activity of a “glucose dehydrogenase”, preferably being encoded by a gene comprising the nucleic acid sequence SEQ ID NO. 35482, preferably the coding region thereof, conferred the production of or the increase in tryptophan compared with the wild type control.

[34842] The nucleic acid sequence of B0449 from Escherichia coli, e.g. as shown in the respective line in column 5 of Table I, application no. 5, has been published in B. And the activity of the gene product thereof is the activity of ATP-binding component of a transport system.

[34843] Accordingly, in one embodiment, the process of the present invention for producing tryptophan in a non-human organism, like a microorganism or a plant or a part thereof, comprises increasing or generating the activity of a gene product with the activity of a gene product conferring the activity of “ATP-binding component of a transport system”, especially from Escherichia coli or its functional equivalent or its homolog, e.g. the increase of
[34844] (a) a gene product of a gene comprising the nucleic acid molecule as shown in the respective line in column 5 of Table I, application no. 5, preferably the coding region thereof, or a homolog or a fragment thereof, and being depicted in the same respective line as said B0449, or a functional equivalent or a homolog thereof as shown in column 8 of Table I, application no. 5, preferably the coding region thereof, particularly a homolog or functional equivalent as shown in column 8 of Table I B, application no. 5, and being depicted in the same respective line as said B0449, and preferably the activity is increased non-targeted, or
[34845] (b) a polypeptide comprising a polypeptide, a consensus sequence or at least a polypeptide motif as shown in the respective line in column 5 of Table II or in column 8 of Table IV, application no. 5, respectively, and being depicted in the same respective line as said B0449, or a functional equivalent or a homolog thereof as depicted in column 8 of Table II, application no. 5, preferably a homolog or functional equivalent as depicted in column 8 of Table II B, application no. 5, and being depicted in the same respective line as said B0449, and preferably the activity is increased non-targeted.

[34846] Accordingly, in one embodiment, the molecule which activity is to be increased in the process of the invention is the gene product with an activity as a “ATP-binding component of a transport system”, preferably it is the molecule of section (a) or (b) of this paragraph.

[34847] In particular, it was observed that in plants, especially in Arabidopsis thaliana, increasing or generating the activity of a gene product non-targeted with the activity of a “ATP-binding component of a transport system”, preferably being encoded by a gene comprising the nucleic acid sequence SEQ ID NO. 7333, preferably the coding region thereof, conferred the production of or the increase in tryptophan compared with the wild type control.

[34848] The nucleic acid sequence of B0593 from Escherichia coli, e.g. as shown in the respective line in column 5 of Table I, application no. 5, has been published in B. And the activity of the gene product thereof is the activity of isochorismate synthase.

[34849] Accordingly, in one embodiment, the process of the present invention for producing tryptophan in a non-human organism, like a microorganism or a plant or a part thereof, comprises increasing or generating the activity of a gene product with the activity of a gene product conferring the activity of “isochorismate synthase”, especially from Escherichia coli or its functional equivalent or its homolog, e.g. the increase of
[34850] (a) a gene product of a gene comprising the nucleic acid molecule as shown in the respective line in column 5 of Table I, application no. 5, preferably the coding region thereof, or a homolog or a fragment thereof, and being depicted in the same respective line as said B0593, or a functional equivalent or a homolog thereof as shown in column 8 of Table I, application no. 5, preferably the coding region thereof, particularly a homolog or functional equivalent as shown in column 8 of Table I B, application no. 5, and being depicted in the same respective line as said B0593, and preferably the activity is increased plastidic, or
[34851] (b) a polypeptide comprising a polypeptide, a consensus sequence or at least a polypeptide motif as shown in the respective line in column 5 of Table II or in column 8 of Table IV, application no. 5, respectively, and being depicted in the same respective line as said B0593, or a functional equivalent or a homolog thereof as depicted in column 8 of Table II, application no. 5, preferably a homolog or functional equivalent as depicted in column 8 of Table II B, application no. 5, and being depicted in the same respective line as said B0593, and preferably the activity is increased plastidic.

[34852] Accordingly, in one embodiment, the molecule which activity is to be increased in the process of the invention is the gene product with an activity as a “isochorismate synthase”, preferably it is the molecule of section (a) or (b) of this paragraph.

[34853] In particular, it was observed that in plants, especially in Arabidopsis thaliana, increasing or generating the activity of a gene product plastidic with the activity of a “isochorismate synthase”, preferably being encoded by a gene comprising the nucleic acid sequence SEQ ID NO. 35967, preferably the coding region thereof, conferred the production of or the increase in tryptophan compared with the wild type control.

[34854] The nucleic acid sequence of B0885 from Escherichia coli, e.g. as shown in the respective line in column 5 of Table I, application no. 5, has been published in B. And the activity of the gene product thereof is the activity of Leucyl/phenylalanyl-tRNA-protein transferase.

[34855] Accordingly, in one embodiment, the process of the present invention for producing tryptophan in a non-human organism, like a microorganism or a plant or a part thereof, comprises increasing or generating the activity of a gene product with the activity of a gene product conferring the activity of “Leucyl/phenylalanyl-tRNA-protein transferase”, especially from Escherichia coli or its functional equivalent or its homolog, e.g. the increase of
[34856] (a) a gene product of a gene comprising the nucleic acid molecule as shown in the respective line in column 5 of Table I, application no. 5, preferably the coding region thereof, or a homolog or a fragment thereof, and being depicted in the same respective line as said B0885, or a functional equivalent or a homolog thereof as shown in column 8 of Table I, application no. 5, preferably the coding region thereof, particularly a homolog or functional equivalent as shown in column 8 of Table I B, application no. 5, and being depicted in the same respective line as said B0885, and preferably the activity is increased non-targeted, or
[34857] (b) a polypeptide comprising a polypeptide, a consensus sequence or at least a polypeptide motif as shown in the respective line in column 5 of Table II or in column 8 of Table IV, application no. 5, respectively, and being depicted in the same respective line as said B0885, or a functional equivalent or a homolog thereof as depicted in column 8 of Table II, application no. 5, preferably a homolog or functional equivalent as depicted in column 8 of Table II B, application no. 5, and being depicted in the same respective line as said B0885, and preferably the activity is increased non-targeted.

[34858] Accordingly, in one embodiment, the molecule which activity is to be increased in the process of the invention is the gene product with an activity as a “Leucyl/phenylalanyl-tRNA-protein transferase”, preferably it is the molecule of section (a) or (b) of this paragraph.

[34859] In particular, it was observed that in plants, especially in Arabidopsis thaliana, increasing or generating the activity of a gene product non-targeted with the activity of a “Leucyl/phenylalanyl-tRNA-protein transferase”, preferably being encoded by a gene comprising the nucleic acid sequence SEQ ID NO. 36489, preferably the coding region thereof, conferred the production of or the increase in tryptophan compared with the wild type control.

[34860] The nucleic acid sequence of B1163 from Escherichia coli, e.g. as shown in the respective line in column 5 of Table I, application no. 5, has been published in B. And the activity of the gene product thereof is the activity of b1163-protein.

[34861] Accordingly, in one embodiment, the process of the present invention for producing tryptophan in a non-human organism, like a microorganism or a plant or a part thereof, comprises increasing or generating the activity of a gene product with the activity of a gene product conferring the activity of “b1163-protein”, especially from Escherichia coli or its functional equivalent or its homolog, e.g. the increase of
[34862] (a) a gene product of a gene comprising the nucleic acid molecule as shown in the respective line in column 5 of Table I, application no. 5, preferably the coding region thereof, or a homolog or a fragment thereof, and being depicted in the same respective line as said B1163, or a functional equivalent or a homolog thereof as shown in column 8 of Table I, application no. 5, preferably the coding region thereof, particularly a homolog or functional equivalent as shown in column 8 of Table I B, application no. 5, and being depicted in the same respective line as said B1163, and preferably the activity is increased non-targeted, or
[34863] (b) a polypeptide comprising a polypeptide, a consensus sequence or at least a polypeptide motif as shown in the respective line in column 5 of Table II or in column 8 of Table IV, application no. 5, respectively, and being depicted in the same respective line as said B1163, or a functional equivalent or a homolog thereof as depicted in column 8 of Table II, application no. 5, preferably a homolog or functional equivalent as depicted in column 8 of Table II B, application no. 5, and being depicted in the same respective line as said B1163, and preferably the activity is increased non-targeted.

[34864] Accordingly, in one embodiment, the molecule which activity is to be increased in the process of the invention is the gene product with an activity as a “b1163-protein”, preferably it is the molecule of section (a) or (b) of this paragraph.

[34865] In particular, it was observed that in plants, especially in Arabidopsis thaliana, increasing or generating the activity of a gene product non-targeted with the activity of a “b1163-protein”, preferably being encoded by a gene comprising the nucleic acid sequence SEQ ID NO. 37394, preferably the coding region thereof, conferred the production of or the increase in tryptophan compared with the wild type control.

[34866] The nucleic acid sequence of B1249 from Escherichia coli, e.g. as shown in the respective line in column 5 of Table I, application no. 5, has been published in B. And the activity of the gene product thereof is the activity of cardiolipin synthase.

[34867] Accordingly, in one embodiment, the process of the present invention for producing tryptophan in a non-human organism, like a microorganism or a plant or a part thereof, comprises increasing or generating the activity of a gene product with the activity of a gene product conferring the activity of “cardiolipin synthase”, especially from Escherichia coli or its functional equivalent or its homolog, e.g. the increase of
[34868] (a) a gene product of a gene comprising the nucleic acid molecule as shown in the respective line in column 5 of Table I, application no. 5, preferably the coding region thereof, or a homolog or a fragment thereof, and being depicted in the same respective line as said B1249, or a functional equivalent or a homolog thereof as shown in column 8 of Table I, application no. 5, preferably the coding region thereof, particularly a homolog or functional equivalent as shown in column 8 of Table I B, application no. 5, and being depicted in the same respective line as said B1249, and preferably the activity is increased plastidic, or
[34869] (b) a polypeptide comprising a polypeptide, a consensus sequence or at least a polypeptide motif as shown in the respective line in column 5 of Table II or in column 8 of Table IV, application no. 5, respectively, and being depicted in the same respective line as said B1249, or a functional equivalent or a homolog thereof as depicted in column 8 of Table II, application no. 5, preferably a homolog or functional equivalent as depicted in column 8 of Table II B, application no. 5, and being depicted in the same respective line as said B1249, and preferably the activity is increased plastidic.

[34870] Accordingly, in one embodiment, the molecule which activity is to be increased in the process of the invention is the gene product with an activity as a “cardiolipin synthase”, preferably it is the molecule of section (a) or (b) of this paragraph.

[34871] In particular, it was observed that in plants, especially in Arabidopsis thaliana, increasing or generating the activity of a gene product plastidic with the activity of a “cardiolipin synthase”, preferably being encoded by a gene comprising the nucleic acid sequence SEQ ID NO. 98778, preferably the coding region thereof, conferred the production of or the increase in tryptophan compared with the wild type control.

[34872] The nucleic acid sequence of B1262 from Escherichia coli, e.g. as shown in the respective line in column 5 of Table I, application no. 5, has been published in B. And the activity of the gene product thereof is the activity of tryptophan biosynthesis protein.

[34873] Accordingly, in one embodiment, the process of the present invention for producing tryptophan in a non-human organism, like a microorganism or a plant or a part thereof, comprises increasing or generating the activity of a gene product with the activity of a gene product conferring the activity of “tryptophan biosynthesis protein”, especially from Escherichia coli or its functional equivalent or its homolog, e.g. the increase of
[34874] (a) a gene product of a gene comprising the nucleic acid molecule as shown in the respective line in column 5 of Table I, application no. 5, preferably the coding region thereof, or a homolog or a fragment thereof, and being depicted in the same respective line as said B1262, or a functional equivalent or a homolog thereof as shown in column 8 of Table I, application no. 5, preferably the coding region thereof, particularly a homolog or functional equivalent as shown in column 8 of Table I B, application no. 5, and being depicted in the same respective line as said B1262, and preferably the activity is increased plastidic, or
[34875] (b) a polypeptide comprising a polypeptide, a consensus sequence or at least a polypeptide motif as shown in the respective line in column 5 of Table II or in column 8 of Table IV, application no. 5, respectively, and being depicted in the same respective line as said B1262, or a functional equivalent or a homolog thereof as depicted in column 8 of Table II, application no. 5, preferably a homolog or functional equivalent as depicted in column 8 of Table II B, application no. 5, and being depicted in the same respective line as said B1262, and preferably the activity is increased plastidic.

[34876] Accordingly, in one embodiment, the molecule which activity is to be increased in the process of the invention is the gene product with an activity as a “tryptophan biosynthesis protein”, preferably it is the molecule of section (a) or (b) of this paragraph.

[34877] In particular, it was observed that in plants, especially in Arabidopsis thaliana, increasing or generating the activity of a gene product plastidic with the activity of a “tryptophan biosynthesis protein”, preferably being encoded by a gene comprising the nucleic acid sequence SEQ ID NO. 76157, preferably the coding region thereof, conferred the production of or the increase in tryptophan compared with the wild type control.

[34878] The nucleic acid sequence of B1300 from Escherichia coli, e.g. as shown in the respective line in column 5 of Table I, application no. 5, has been published in B. And the activity of the gene product thereof is the activity of aldehyde dehydrogenase.

[34879] Accordingly, in one embodiment, the process of the present invention for producing tryptophan in a non-human organism, like a microorganism or a plant or a part thereof, comprises increasing or generating the activity of a gene product with the activity of a gene product conferring the activity of “aldehyde dehydrogenase”, especially from Escherichia coli or its functional equivalent or its homolog, e.g. the increase of
[34880] (a) a gene product of a gene comprising the nucleic acid molecule as shown in the respective line in column 5 of Table I, application no. 5, preferably the coding region thereof, or a homolog or a fragment thereof, and being depicted in the same respective line as said B1300, or a functional equivalent or a homolog thereof as shown in column 8 of Table I, application no. 5, preferably the coding region thereof, particularly a homolog or functional equivalent as shown in column 8 of Table I B, application no. 5, and being depicted in the same respective line as said B1300, and preferably the activity is increased non-targeted, or
[34881] (b) a polypeptide comprising a polypeptide, a consensus sequence or at least a polypeptide motif as shown in the respective line in column 5 of Table II or in column 8 of Table IV, application no. 5, respectively, and being depicted in the same respective line as said B1300, or a functional equivalent or a homolog thereof as depicted in column 8 of Table II, application no. 5, preferably a homolog or functional equivalent as depicted in column 8 of Table II B, application no. 5, and being depicted in the same respective line as said B1300, and preferably the activity is increased non-targeted.

[34882] Accordingly, in one embodiment, the molecule which activity is to be increased in the process of the invention is the gene product with an activity as a “aldehyde dehydrogenase”, preferably it is the molecule of section (a) or (b) of this paragraph.

[34883] In particular, it was observed that in plants, especially in Arabidopsis thaliana, increasing or generating the activity of a gene product non-targeted with the activity of a “aldehyde dehydrogenase”, preferably being encoded by a gene comprising the nucleic acid sequence SEQ ID NO. 37807, preferably the coding region thereof, conferred the production of or the increase in tryptophan compared with the wild type control.

[34884] The nucleic acid sequence of B1346 from Escherichia coli, e.g. as shown in the respective line in column 5 of Table I, application no. 5, has been published in B. And the activity of the gene product thereof is the activity of b1346-protein.

[34885] Accordingly, in one embodiment, the process of the present invention for producing tryptophan in a non-human organism, like a microorganism or a plant or a part thereof, comprises increasing or generating the activity of a gene product with the activity of a gene product conferring the activity of “b1346-protein”, especially from Escherichia coli or its functional equivalent or its homolog, e.g. the increase of
[34886] (a) a gene product of a gene comprising the nucleic acid molecule as shown in the respective line in column 5 of Table I, application no. 5, preferably the coding region thereof, or a homolog or a fragment thereof, and being depicted in the same respective line as said B1346, or a functional equivalent or a homolog thereof as shown in column 8 of Table I, application no. 5, preferably the coding region thereof, particularly a homolog or functional equivalent as shown in column 8 of Table I B, application no. 5, and being depicted in the same respective line as said B1346, and preferably the activity is increased plastidic, or
[34887] (b) a polypeptide comprising a polypeptide, a consensus sequence or at least a polypeptide motif as shown in the respective line in column 5 of Table II or in column 8 of Table IV, application no. 5, respectively, and being depicted in the same respective line as said B1346, or a functional equivalent or a homolog thereof as depicted in column 8 of Table II, application no. 5, preferably a homolog or functional equivalent as depicted in column 8 of Table II B, application no. 5, and being depicted in the same respective line as said B1346, and preferably the activity is increased plastidic.

[34888] Accordingly, in one embodiment, the molecule which activity is to be increased in the process of the invention is the gene product with an activity as a “b1346-protein”, preferably it is the molecule of section (a) or (b) of this paragraph.

[34889] In particular, it was observed that in plants, especially in Arabidopsis thaliana, increasing or generating the activity of a gene product plastidic with the activity of a “b1346-protein”, preferably being encoded by a gene comprising the nucleic acid sequence SEQ ID NO. 99188, preferably the coding region thereof, conferred the production of or the increase in tryptophan compared with the wild type control.

[34890] The nucleic acid sequence of B1522 from Escherichia coli, e.g. as shown in the respective line in column 5 of Table I, application no. 5, has been published in B. And the activity of the gene product thereof is the activity of b1522-protein.

[34891] Accordingly, in one embodiment, the process of the present invention for producing tryptophan in a non-human organism, like a microorganism or a plant or a part thereof, comprises increasing or generating the activity of a gene product with the activity of a gene product conferring the activity of “b1522-protein”, especially from Escherichia coli or its functional equivalent or its homolog, e.g. the increase of
[34892] (a) a gene product of a gene comprising the nucleic acid molecule as shown in the respective line in column 5 of Table I, application no. 5, preferably the coding region thereof, or a homolog or a fragment thereof, and being depicted in the same respective line as said B1522, or a functional equivalent or a homolog thereof as shown in column 8 of Table I, application no. 5, preferably the coding region thereof, particularly a homolog or functional equivalent as shown in column 8 of Table I B, application no. 5, and being depicted in the same respective line as said B1522, and preferably the activity is increased non-targeted, or
[34893] (b) a polypeptide comprising a polypeptide, a consensus sequence or at least a polypeptide motif as shown in the respective line in column 5 of Table II or in column 8 of Table IV, application no. 5, respectively, and being depicted in the same respective line as said B1522, or a functional equivalent or a homolog thereof as depicted in column 8 of Table II, application no. 5, preferably a homolog or functional equivalent as depicted in column 8 of Table II B, application no. 5, and being depicted in the same respective line as said B1522, and preferably the activity is increased non-targeted.

[34894] Accordingly, in one embodiment, the molecule which activity is to be increased in the process of the invention is the gene product with an activity as a “b1522-protein”, preferably it is the molecule of section (a) or (b) of this paragraph.

[34895] In particular, it was observed that in plants, especially in Arabidopsis thaliana, increasing or generating the activity of a gene product non-targeted with the activity of a “b1522-protein”, preferably being encoded by a gene comprising the nucleic acid sequence SEQ ID NO. 7947, preferably the coding region thereof, conferred the production of or the increase in tryptophan compared with the wild type control.

[34896] The nucleic acid sequence of B1796 from Escherichia coli, e.g. as shown in the respective line in column 5 of Table I, application no. 5, has been published in B. And the activity of the gene product thereof is the activity of b1796-protein.

[34897] Accordingly, in one embodiment, the process of the present invention for producing tryptophan in a non-human organism, like a microorganism or a plant or a part thereof, comprises increasing or generating the activity of a gene product with the activity of a gene product conferring the activity of “b1796-protein”, especially from Escherichia coli or its functional equivalent or its homolog, e.g. the increase of
[34898] (a) a gene product of a gene comprising the nucleic acid molecule as shown in the respective line in column 5 of Table I, application no. 5, preferably the coding region thereof, or a homolog or a fragment thereof, and being depicted in the same respective line as said B1796, or a functional equivalent or a homolog thereof as shown in column 8 of Table I, application no. 5, preferably the coding region thereof, particularly a homolog or functional equivalent as shown in column 8 of Table I B, application no. 5, and being depicted in the same respective line as said B1796, and preferably the activity is increased non-targeted, or
[34899] (b) a polypeptide comprising a polypeptide, a consensus sequence or at least a polypeptide motif as shown in the respective line in column 5 of Table II or in column 8 of Table IV, application no. 5, respectively, and being depicted in the same respective line as said B1796, or a functional equivalent or a homolog thereof as depicted in column 8 of Table II, application no. 5, preferably a homolog or functional equivalent as depicted in column 8 of Table II B, application no. 5, and being depicted in the same respective line as said B1796, and preferably the activity is increased non-targeted.

[34900] Accordingly, in one embodiment, the molecule which activity is to be increased in the process of the invention is the gene product with an activity as a “b1796-protein”, preferably it is the molecule of section (a) or (b) of this paragraph.

[34901] In particular, it was observed that in plants, especially in Arabidopsis thaliana, increasing or generating the activity of a gene product non-targeted with the activity of a “b1796-protein”, preferably being encoded by a gene comprising the nucleic acid sequence SEQ ID NO. 99196, preferably the coding region thereof, conferred the production of or the increase in tryptophan compared with the wild type control. The nucleic acid sequence of B1886 from Escherichia coli, e.g. as shown in the respective line in column 5 of Table I, application no. 5, has been published in B. And the activity of the gene product thereof is the activity of methyl-accepting chemotaxis protein.

[34902] Accordingly, in one embodiment, the process of the present invention for producing tryptophan in a non-human organism, like a microorganism or a plant or a part thereof, comprises increasing or generating the activity of a gene product with the activity of a gene product conferring the activity of “methyl-accepting chemotaxis protein”, especially from Escherichia coli or its functional equivalent or its homolog, e.g. the increase of
[34903] (a) a gene product of a gene comprising the nucleic acid molecule as shown in the respective line in column 5 of Table I, application no. 5, preferably the coding region thereof, or a homolog or a fragment thereof, and being depicted in the same respective line as said B1886, or a functional equivalent or a homolog thereof as shown in column 8 of Table I, application no. 5, preferably the coding region thereof, particularly a homolog or functional equivalent as shown in column 8 of Table I B, application no. 5, and being depicted in the same respective line as said B1886, and preferably the activity is increased non-targeted, or
[34904] (b) a polypeptide comprising a polypeptide, a consensus sequence or at least a polypeptide motif as shown in the respective line in column 5 of Table II or in column 8 of Table IV, application no. 5, respectively, and being depicted in the same respective line as said B1886, or a functional equivalent or a homolog thereof as depicted in column 8 of Table II, application no. 5, preferably a homolog or functional equivalent as depicted in column 8 of Table II B, application no. 5, and being depicted in the same respective line as said B1886, and preferably the activity is increased non-targeted.

[34905] Accordingly, in one embodiment, the molecule which activity is to be increased in the process of the invention is the gene product with an activity as a “methyl-accepting chemotaxis protein”, preferably it is the molecule of section (a) or (b) of this paragraph.

[34906] In particular, it was observed that in plants, especially in Arabidopsis thaliana, increasing or generating the activity of a gene product non-targeted with the activity of a “methyl-accepting chemotaxis protein”, preferably being encoded by a gene comprising the nucleic acid sequence SEQ ID NO. 99210, preferably the coding region thereof, conferred the production of or the increase in tryptophan compared with the wild type control.

[34907] The nucleic acid sequence of B1897 from Escherichia coli, e.g. as shown in the respective line in column 5 of Table I, application no. 5, has been published in B. And the activity of the gene product thereof is the activity of trehalose-phosphatase.

[34908] Accordingly, in one embodiment, the process of the present invention for producing tryptophan in a non-human organism, like a microorganism or a plant or a part thereof, comprises increasing or generating the activity of a gene product with the activity of a gene product conferring the activity of “trehalose-phosphatase”, especially from Escherichia coli or its functional equivalent or its homolog, e.g. the increase of
[34909] (a) a gene product of a gene comprising the nucleic acid molecule as shown in the respective line in column 5 of Table I, application no. 5, preferably the coding region thereof, or a homolog or a fragment thereof, and being depicted in the same respective line as said B1897, or a functional equivalent or a homolog thereof as shown in column 8 of Table I, application no. 5, preferably the coding region thereof, particularly a homolog or functional equivalent as shown in column 8 of Table I B, application no. 5, and being depicted in the same respective line as said B1897, and preferably the activity is increased non-targeted, or
[34910] (b) a polypeptide comprising a polypeptide, a consensus sequence or at least a polypeptide motif as shown in the respective line in column 5 of Table II or in column 8 of Table IV, application no. 5, respectively, and being depicted in the same respective line as said B1897, or a functional equivalent or a homolog thereof as depicted in column 8 of Table II, application no. 5, preferably a homolog or functional equivalent as depicted in column 8 of Table II B, application no. 5, and being depicted in the same respective line as said B1897, and preferably the activity is increased non-targeted.

[34911] Accordingly, in one embodiment, the molecule which activity is to be increased in the process of the invention is the gene product with an activity as a “trehalose-phosphatase”, preferably it is the molecule of section (a) or (b) of this paragraph.

[34912] In particular, it was observed that in plants, especially in Arabidopsis thaliana, increasing or generating the activity of a gene product non-targeted with the activity of a “trehalosephosphatase”, preferably being encoded by a gene comprising the nucleic acid sequence SEQ ID NO. 79056, preferably the coding region thereof, conferred the production of or the increase in tryptophan compared with the wild type control.

[34913] The nucleic acid sequence of B2023 from Escherichia coli, e.g. as shown in the respective line in column 5 of Table I, application no. 5, has been published in B. And the activity of the gene product thereof is the activity of imidazole glycerol phosphate synthase subunit.

[34914] Accordingly, in one embodiment, the process of the present invention for producing tryptophan in a non-human organism, like a microorganism or a plant or a part thereof, comprises increasing or generating the activity of a gene product with the activity of a gene product conferring the activity of “imidazole glycerol phosphate synthase subunit”, especially from Escherichia coli or its functional equivalent or its homolog, e.g. the increase of
[34915] (a) a gene product of a gene comprising the nucleic acid molecule as shown in the respective line in column 5 of Table I, application no. 5, preferably the coding region thereof, or a homolog or a fragment thereof, and being depicted in the same respective line as said B2023, or a functional equivalent or a homolog thereof as shown in column 8 of Table I, application no. 5, preferably the coding region thereof, particularly a homolog or functional equivalent as shown in column 8 of Table I B, application no. 5, and being depicted in the same respective line as said B2023, and preferably the activity is increased non-targeted, or
[34916] (b) a polypeptide comprising a polypeptide, a consensus sequence or at least a polypeptide motif as shown in the respective line in column 5 of Table II or in column 8 of Table IV, application no. 5, respectively, and being depicted in the same respective line as said B2023, or a functional equivalent or a homolog thereof as depicted in column 8 of Table II, application no. 5, preferably a homolog or functional equivalent as depicted in column 8 of Table II B, application no. 5, and being depicted in the same respective line as said B2023, and preferably the activity is increased non-targeted.

[34917] Accordingly, in one embodiment, the molecule which activity is to be increased in the process of the invention is the gene product with an activity as a “imidazole glycerol phosphate synthase subunit”, preferably it is the molecule of section (a) or (b) of this paragraph.

[34918] In particular, it was observed that in plants, especially in Arabidopsis thaliana, increasing or generating the activity of a gene product non-targeted with the activity of a “imidazole glycerol phosphate synthase subunit”, preferably being encoded by a gene comprising the nucleic acid sequence SEQ ID NO. 99371, preferably the coding region thereof, conferred the production of or the increase in tryptophan compared with the wild type control.

[34919] The nucleic acid sequence of B2063 from Escherichia coli, e.g. as shown in the respective line in column 5 of Table I, application no. 5, has been published in B. And the activity of the gene product thereof is the activity of transport protein.

[34920] Accordingly, in one embodiment, the process of the present invention for producing tryptophan in a non-human organism, like a microorganism or a plant or a part thereof, comprises increasing or generating the activity of a gene product with the activity of a gene product conferring the activity of “transport protein”, especially from Escherichia coli or its functional equivalent or its homolog, e.g. the increase of
[34921] (a) a gene product of a gene comprising the nucleic acid molecule as shown in the respective line in column 5 of Table I, application no. 5, preferably the coding region thereof, or a homolog or a fragment thereof, and being depicted in the same respective line as said B2063, or a functional equivalent or a homolog thereof as shown in column 8 of Table I, application no. 5, preferably the coding region thereof, particularly a homolog or functional equivalent as shown in column 8 of Table I B, application no. 5, and being depicted in the same respective line as said B2063, and preferably the activity is increased non-targeted, or
[34922] (b) a polypeptide comprising a polypeptide, a consensus sequence or at least a polypeptide motif as shown in the respective line in column 5 of Table II or in column 8 of Table IV, application no. 5, respectively, and being depicted in the same respective line as said B2063, or a functional equivalent or a homolog thereof as depicted in column 8 of Table II, application no. 5, preferably a homolog or functional equivalent as depicted in column 8 of Table II B, application no. 5, and being depicted in the same respective line as said B2063, and preferably the activity is increased non-targeted.

[34923] Accordingly, in one embodiment, the molecule which activity is to be increased in the process of the invention is the gene product with an activity as a “transport protein”, preferably it is the molecule of section (a) or (b) of this paragraph.

[34924] In particular, it was observed that in plants, especially in Arabidopsis thaliana, increasing or generating the activity of a gene product non-targeted with the activity of a “transport protein”, preferably being encoded by a gene comprising the nucleic acid sequence SEQ ID NO. 38947, preferably the coding region thereof, conferred the production of or the increase in tryptophan compared with the wild type control.

[34925] The nucleic acid sequence of B2285 from Escherichia coli, e.g. as shown in the respective line in column 5 of Table I, application no. 5, has been published in B. And the activity of the gene product thereof is the activity of ATP synthase subunit E.

[34926] Accordingly, in one embodiment, the process of the present invention for producing tryptophan in a non-human organism, like a microorganism or a plant or a part thereof, comprises increasing or generating the activity of a gene product with the activity of a gene product conferring the activity of “ATP synthase subunit E”, especially from Escherichia coli or its functional equivalent or its homolog, e.g. the increase of
[34927] (a) a gene product of a gene comprising the nucleic acid molecule as shown in the respective line in column 5 of Table I, application no. 5, preferably the coding region thereof, or a homolog or a fragment thereof, and being depicted in the same respective line as said B2285, or a functional equivalent or a homolog thereof as shown in column 8 of Table I, application no. 5, preferably the coding region thereof, particularly a homolog or functional equivalent as shown in column 8 of Table I B, application no. 5, and being depicted in the same respective line as said B2285, and preferably the activity is increased non-targeted, or
[34928] (b) a polypeptide comprising a polypeptide, a consensus sequence or at least a polypeptide motif as shown in the respective line in column 5 of Table II or in column 8 of Table IV, application no. 5, respectively, and being depicted in the same respective line as said B2285, or a functional equivalent or a homolog thereof as depicted in column 8 of Table II, application no. 5, preferably a homolog or functional equivalent as depicted in column 8 of Table II B, application no. 5, and being depicted in the same respective line as said B2285, and preferably the activity is increased non-targeted.

[34929] Accordingly, in one embodiment, the molecule which activity is to be increased in the process of the invention is the gene product with an activity as a “ATP synthase subunit E”, preferably it is the molecule of section (a) or (b) of this paragraph.

[34930] In particular, it was observed that in plants, especially in Arabidopsis thaliana, increasing or generating the activity of a gene product non-targeted with the activity of a “ATP synthase subunit E”, preferably being encoded by a gene comprising the nucleic acid sequence SEQ ID NO. 99620, preferably the coding region thereof, conferred the production of or the increase in tryptophan compared with the wild type control.

[34931] The nucleic acid sequence of B2546 from Escherichia coli, e.g. as shown in the respective line in column 5 of Table I, application no. 5, has been published in B. And the activity of the gene product thereof is the activity of putative transport system permease protein.

[34932] Accordingly, in one embodiment, the process of the present invention for producing tryptophan in a non-human organism, like a microorganism or a plant or a part thereof, comprises increasing or generating the activity of a gene product with the activity of a gene product conferring the activity of “putative transport system permease protein”, especially from Escherichia coli or its functional equivalent or its homolog, e.g. the increase of
[34933] (a) a gene product of a gene comprising the nucleic acid molecule as shown in the respective line in column 5 of Table I, application no. 5, preferably the coding region thereof, or a homolog or a fragment thereof, and being depicted in the same respective line as said B2546, or a functional equivalent or a homolog thereof as shown in column 8 of Table I, application no. 5, preferably the coding region thereof, particularly a homolog or functional equivalent as shown in column 8 of Table I B, application no. 5, and being depicted in the same respective line as said B2546, and preferably the activity is increased non-targeted, or
[34934] (b) a polypeptide comprising a polypeptide, a consensus sequence or at least a polypeptide motif as shown in the respective line in column 5 of Table II or in column 8 of Table IV, application no. 5, respectively, and being depicted in the same respective line as said B2546, or a functional equivalent or a homolog thereof as depicted in column 8 of Table II, application no. 5, preferably a homolog or functional equivalent as depicted in column 8 of Table II B, application no. 5, and being depicted in the same respective line as said B2546, and preferably the activity is increased non-targeted.

[34935] Accordingly, in one embodiment, the molecule which activity is to be increased in the process of the invention is the gene product with an activity as a “putative transport system permease protein”, preferably it is the molecule of section (a) or (b) of this paragraph.

[34936] In particular, it was observed that in plants, especially in Arabidopsis thaliana, increasing or generating the activity of a gene product non-targeted with the activity of a “putative transport system permease protein”, preferably being encoded by a gene comprising the nucleic acid sequence SEQ ID NO. 99898, preferably the coding region thereof, conferred the production of or the increase in tryptophan compared with the wild type control.

[34937] The nucleic acid sequence of B2699 from Escherichia coli, e.g. as shown in the respective line in column 5 of Table I, application no. 5, has been published in B. And the activity of the gene product thereof is the activity of recombinase A.

[34938] Accordingly, in one embodiment, the process of the present invention for producing tryptophan in a non-human organism, like a microorganism or a plant or a part thereof, comprises increasing or generating the activity of a gene product with the activity of a gene product conferring the activity of “recombinase A”, especially from Escherichia coli or its functional equivalent or its homolog, e.g. the increase of
[34939] (a) a gene product of a gene comprising the nucleic acid molecule as shown in the respective line in column 5 of Table I, application no. 5, preferably the coding region thereof, or a homolog or a fragment thereof, and being depicted in the same respective line as said B2699, or a functional equivalent or a homolog thereof as shown in column 8 of Table I, application no. 5, preferably the coding region thereof, particularly a homolog or functional equivalent as shown in column 8 of Table I B, application no. 5, and being depicted in the same respective line as said B2699, and preferably the activity is increased non-targeted, or
[34940] (b) a polypeptide comprising a polypeptide, a consensus sequence or at least a polypeptide motif as shown in the respective line in column 5 of Table II or in column 8 of Table IV, application no. 5, respectively, and being depicted in the same respective line as said B2699, or a functional equivalent or a homolog thereof as depicted in column 8 of Table II, application no. 5, preferably a homolog or functional equivalent as depicted in column 8 of Table II B, application no. 5, and being depicted in the same respective line as said B2699, and preferably the activity is increased non-targeted.

[34941] Accordingly, in one embodiment, the molecule which activity is to be increased in the process of the invention is the gene product with an activity as a “recombinase A”, preferably it is the molecule of section (a) or (b) of this paragraph.

[34942] In particular, it was observed that in plants, especially in Arabidopsis thaliana, increasing or generating the activity of a gene product non-targeted with the activity of a “recombinase A”, preferably being encoded by a gene comprising the nucleic acid sequence SEQ ID NO. 100105, preferably the coding region thereof, conferred the production of or the increase in tryptophan compared with the wild type control.

[34943] The nucleic acid sequence of B2739 from Escherichia coli, e.g. as shown in the respective line in column 5 of Table I, application no. 5, has been published in B. And the activity of the gene product thereof is the activity of b2739-protein.

[34944] Accordingly, in one embodiment, the process of the present invention for producing tryptophan in a non-human organism, like a microorganism or a plant or a part thereof, comprises increasing or generating the activity of a gene product with the activity of a gene product conferring the activity of “b2739-protein”, especially from Escherichia coli or its functional equivalent or its homolog, e.g. the increase of
[34945] (a) a gene product of a gene comprising the nucleic acid molecule as shown in the respective line in column 5 of Table I, application no. 5, preferably the coding region thereof, or a homolog or a fragment thereof, and being depicted in the same respective line as said B2739, or a functional equivalent or a homolog thereof as shown in column 8 of Table I, application no. 5, preferably the coding region thereof, particularly a homolog or functional equivalent as shown in column 8 of Table I B, application no. 5, and being depicted in the same respective line as said B2739, and preferably the activity is increased non-targeted, or
[34946] (b) a polypeptide comprising a polypeptide, a consensus sequence or at least a polypeptide motif as shown in the respective line in column 5 of Table II or in column 8 of Table IV, application no. 5, respectively, and being depicted in the same respective line as said B2739, or a functional equivalent or a homolog thereof as depicted in column 8 of Table II, application no. 5, preferably a homolog or functional equivalent as depicted in column 8 of Table II B, application no. 5, and being depicted in the same respective line as said B2739, and preferably the activity is increased non-targeted.

[34947] Accordingly, in one embodiment, the molecule which activity is to be increased in the process of the invention is the gene product with an activity as a “b2739-protein”, preferably it is the molecule of section (a) or (b) of this paragraph.

[34948] In particular, it was observed that in plants, especially in Arabidopsis thaliana, increasing or generating the activity of a gene product non-targeted with the activity of a “b2739-protein”, preferably being encoded by a gene comprising the nucleic acid sequence SEQ ID NO. 80906, preferably the coding region thereof, conferred the production of or the increase in tryptophan compared with the wild type control.

[34949] The nucleic acid sequence of B2849 from Escherichia coli, e.g. as shown in the respective line in column 5 of Table I, application no. 5, has been published in B. And the activity of the gene product thereof is the activity of b2849-protein.

[34950] Accordingly, in one embodiment, the process of the present invention for producing tryptophan in a non-human organism, like a microorganism or a plant or a part thereof, comprises increasing or generating the activity of a gene product with the activity of a gene product conferring the activity of “b2849-protein”, especially from Escherichia coli or its functional equivalent or its homolog, e.g. the increase of
[34951] (a) a gene product of a gene comprising the nucleic acid molecule as shown in the respective line in column 5 of Table I, application no. 5, preferably the coding region thereof, or a homolog or a fragment thereof, and being depicted in the same respective line as said B2849, or a functional equivalent or a homolog thereof as shown in column 8 of Table I, application no. 5, preferably the coding region thereof, particularly a homolog or functional equivalent as shown in column 8 of Table I B, application no. 5, and being depicted in the same respective line as said B2849, and preferably the activity is increased non-targeted, or
[34952] (b) a polypeptide comprising a polypeptide, a consensus sequence or at least a polypeptide motif as shown in the respective line in column 5 of Table II or in column 8 of Table IV, application no. 5, respectively, and being depicted in the same respective line as said B2849, or a functional equivalent or a homolog thereof as depicted in column 8 of Table II, application no. 5, preferably a homolog or functional equivalent as depicted in column 8 of Table II B, application no. 5, and being depicted in the same respective line as said B2849, and preferably the activity is increased non-targeted.

[34953] Accordingly, in one embodiment, the molecule which activity is to be increased in the process of the invention is the gene product with an activity as a “b2849-protein”, preferably it is the molecule of section (a) or (b) of this paragraph.

[34954] In particular, it was observed that in plants, especially in Arabidopsis thaliana, increasing or generating the activity of a gene product non-targeted with the activity of a “b2849-protein”, preferably being encoded by a gene comprising the nucleic acid sequence SEQ ID NO. 81980, preferably the coding region thereof, conferred the production of or the increase in tryptophan compared with the wild type control.

[34955] The nucleic acid sequence of B3142 from Escherichia coli, e.g. as shown in the respective line in column 5 of Table I, application no. 5, has been published in B. And the activity of the gene product thereof is the activity of fimbrial-like protein.

[34956] Accordingly, in one embodiment, the process of the present invention for producing tryptophan in a non-human organism, like a microorganism or a plant or a part thereof, comprises increasing or generating the activity of a gene product with the activity of a gene product conferring the activity of “fimbrial-like protein”, especially from Escherichia coli or its functional equivalent or its homolog, e.g. the increase of
[34957] (a) a gene product of a gene comprising the nucleic acid molecule as shown in the respective line in column 5 of Table I, application no. 5, preferably the coding region thereof, or a homolog or a fragment thereof, and being depicted in the same respective line as said B3142, or a functional equivalent or a homolog thereof as shown in column 8 of Table I, application no. 5, preferably the coding region thereof, particularly a homolog or functional equivalent as shown in column 8 of Table I B, application no. 5, and being depicted in the same respective line as said B3142, and preferably the activity is increased non-targeted, or
[34958] (b) a polypeptide comprising a polypeptide, a consensus sequence or at least a polypeptide motif as shown in the respective line in column 5 of Table II or in column 8 of Table IV, application no. 5, respectively, and being depicted in the same respective line as said B3142, or a functional equivalent or a homolog thereof as depicted in column 8 of Table II, application no. 5, preferably a homolog or functional equivalent as depicted in column 8 of Table II B, application no. 5, and being depicted in the same respective line as said B3142, and preferably the activity is increased non-targeted.

[34959] Accordingly, in one embodiment, the molecule which activity is to be increased in the process of the invention is the gene product with an activity as a “fimbrial-like protein”, preferably it is the molecule of section (a) or (b) of this paragraph.

[34960] In particular, it was observed that in plants, especially in Arabidopsis thaliana, increasing or generating the activity of a gene product non-targeted with the activity of a “fimbrial-like protein”, preferably being encoded by a gene comprising the nucleic acid sequence SEQ ID NO. 100543, preferably the coding region thereof, conferred the production of or the increase in tryptophan compared with the wild type control.

[34961] The nucleic acid sequence of B3262 from Escherichia coli, e.g. as shown in the respective line in column 5 of Table I, application no. 5, has been published in B. And the activity of the gene product thereof is the activity of methyltransferase.

[34962] Accordingly, in one embodiment, the process of the present invention for producing tryptophan in a non-human organism, like a microorganism or a plant or a part thereof, comprises increasing or generating the activity of a gene product with the activity of a gene product conferring the activity of “methyltransferase”, especially from Escherichia coli or its functional equivalent or its homolog, e.g. the increase of
[34963] (a) a gene product of a gene comprising the nucleic acid molecule as shown in the respective line in column 5 of Table I, application no. 5, preferably the coding region thereof, or a homolog or a fragment thereof, and being depicted in the same respective line as said B3262, or a functional equivalent or a homolog thereof as shown in column 8 of Table I, application no. 5, preferably the coding region thereof, particularly a homolog or functional equivalent as shown in column 8 of Table I B, application no. 5, and being depicted in the same respective line as said B3262, and preferably the activity is increased non-targeted, or
[34964] (b) a polypeptide comprising a polypeptide, a consensus sequence or at least a polypeptide motif as shown in the respective line in column 5 of Table II or in column 8 of Table IV, application no. 5, respectively, and being depicted in the same respective line as said B3262, or a functional equivalent or a homolog thereof as depicted in column 8 of Table II, application no. 5, preferably a homolog or functional equivalent as depicted in column 8 of Table II B, application no. 5, and being depicted in the same respective line as said B3262, and preferably the activity is increased non-targeted.

[34965] Accordingly, in one embodiment, the molecule which activity is to be increased in the process of the invention is the gene product with an activity as a “methyltransferase”, preferably it is the molecule of section (a) or (b) of this paragraph.

[34966] In particular, it was observed that in plants, especially in Arabidopsis thaliana, increasing or generating the activity of a gene product non-targeted with the activity of a “methyltransferase”, preferably being encoded by a gene comprising the nucleic acid sequence SEQ ID NO. 42502, preferably the coding region thereof, conferred the production of or the increase in tryptophan compared with the wild type control.

[34967] The nucleic acid sequence of B3845 from Escherichia coli, e.g. as shown in the respective line in column 5 of Table I, application no. 5, has been published in B. And the activity of the gene product thereof is the activity of 3-ketoacyl-CoA thiolase.

[34968] Accordingly, in one embodiment, the process of the present invention for producing tryptophan in a non-human organism, like a microorganism or a plant or a part thereof, comprises increasing or generating the activity of a gene product with the activity of a gene product conferring the activity of “3-ketoacyl-CoA thiolase”, especially from Escherichia coli or its functional equivalent or its homolog, e.g. the increase of
[34969] (a) a gene product of a gene comprising the nucleic acid molecule as shown in the respective line in column 5 of Table I, application no. 5, preferably the coding region thereof, or a homolog or a fragment thereof, and being depicted in the same respective line as said B3845, or a functional equivalent or a homolog thereof as shown in column 8 of Table I, application no. 5, preferably the coding region thereof, particularly a homolog or functional equivalent as shown in column 8 of Table I B, application no. 5, and being depicted in the same respective line as said B3845, and preferably the activity is increased plastidic, or
[34970] (b) a polypeptide comprising a polypeptide, a consensus sequence or at least a polypeptide motif as shown in the respective line in column 5 of Table II or in column 8 of Table IV, application no. 5, respectively, and being depicted in the same respective line as said B3845, or a functional equivalent or a homolog thereof as depicted in column 8 of Table II, application no. 5, preferably a homolog or functional equivalent as depicted in column 8 of Table II B, application no. 5, and being depicted in the same respective line as said B3845, and preferably the activity is increased plastidic.

[34971] Accordingly, in one embodiment, the molecule which activity is to be increased in the process of the invention is the gene product with an activity as a “3-ketoacyl-CoA thiolase”, preferably it is the molecule of section (a) or (b) of this paragraph.

[34972] In particular, it was observed that in plants, especially in Arabidopsis thaliana, increasing or generating the activity of a gene product plastidic with the activity of a “3-ketoacyl-CoA thiolase”, preferably being encoded by a gene comprising the nucleic acid sequence SEQ ID NO. 100675, preferably the coding region thereof, conferred the production of or the increase in tryptophan compared with the wild type control.

[34973] The nucleic acid sequence of B3870 from Escherichia coli, e.g. as shown in the respective line in column 5 of Table I, application no. 5, has been published in B. And the activity of the gene product thereof is the activity of glutamine synthetase.

[34974] Accordingly, in one embodiment, the process of the present invention for producing tryptophan in a non-human organism, like a microorganism or a plant or a part thereof, comprises increasing or generating the activity of a gene product with the activity of a gene product conferring the activity of “glutamine synthetase”, especially from Escherichia coli or its functional equivalent or its homolog, e.g. the increase of
[34975] (a) a gene product of a gene comprising the nucleic acid molecule as shown in the respective line in column 5 of Table I, application no. 5, preferably the coding region thereof, or a homolog or a fragment thereof, and being depicted in the same respective line as said B3870, or a functional equivalent or a homolog thereof as shown in column 8 of Table I, application no. 5, preferably the coding region thereof, particularly a homolog or functional equivalent as shown in column 8 of Table I B, application no. 5, and being depicted in the same respective line as said B3870, and preferably the activity is increased plastidic, or
[34976] (b) a polypeptide comprising a polypeptide, a consensus sequence or at least a polypeptide motif as shown in the respective line in column 5 of Table II or in column 8 of Table IV, application no. 5, respectively, and being depicted in the same respective line as said B3870, or a functional equivalent or a homolog thereof as depicted in column 8 of Table II, application no. 5, preferably a homolog or functional equivalent as depicted in column 8 of Table II B, application no. 5, and being depicted in the same respective line as said B3870, and preferably the activity is increased plastidic.

[34977] Accordingly, in one embodiment, the molecule which activity is to be increased in the process of the invention is the gene product with an activity as a “glutamine synthetase”, preferably it is the molecule of section (a) or (b) of this paragraph.

[34978] In particular, it was observed that in plants, especially in Arabidopsis thaliana, increasing or generating the activity of a gene product plastidic with the activity of a “glutamine synthetase”, preferably being encoded by a gene comprising the nucleic acid sequence SEQ ID NO. 101327, preferably the coding region thereof, conferred the production of or the increase in tryptophan compared with the wild type control.

[34979] The nucleic acid sequence of B3989 from Escherichia coli, e.g. as shown in the respective line in column 5 of Table I, application no. 5, has been published in B. And the activity of the gene product thereof is the activity of b3989-protein.

[34980] Accordingly, in one embodiment, the process of the present invention for producing tryptophan in a non-human organism, like a microorganism or a plant or a part thereof, comprises increasing or generating the activity of a gene product with the activity of a gene product conferring the activity of “b3989-protein”, especially from Escherichia coli or its functional equivalent or its homolog, e.g. the increase of
[34981] (a) a gene product of a gene comprising the nucleic acid molecule as shown in the respective line in column 5 of Table I, application no. 5, preferably the coding region thereof, or a homolog or a fragment thereof, and being depicted in the same respective line as said B3989, or a functional equivalent or a homolog thereof as shown in column 8 of Table I, application no. 5, preferably the coding region thereof, particularly a homolog or functional equivalent as shown in column 8 of Table I B, application no. 5, and being depicted in the same respective line as said B3989, and preferably the activity is increased non-targeted, or
[34982] (b) a polypeptide comprising a polypeptide, a consensus sequence or at least a polypeptide motif as shown in the respective line in column 5 of Table II or in column 8 of Table IV, application no. 5, respectively, and being depicted in the same respective line as said B3989, or a functional equivalent or a homolog thereof as depicted in column 8 of Table II, application no. 5, preferably a homolog or functional equivalent as depicted in column 8 of Table II B, application no. 5, and being depicted in the same respective line as said B3989, and preferably the activity is increased non-targeted.

[34983] Accordingly, in one embodiment, the molecule which activity is to be increased in the process of the invention is the gene product with an activity as a “b3989-protein”, preferably it is the molecule of section (a) or (b) of this paragraph.

[34984] In particular, it was observed that in plants, especially in Arabidopsis thaliana, increasing or generating the activity of a gene product non-targeted with the activity of a “b3989-protein”, preferably being encoded by a gene comprising the nucleic acid sequence SEQ ID NO. 44372, preferably the coding region thereof, conferred the production of or the increase in tryptophan compared with the wild type control.

[34985] The nucleic acid sequence of B4029 from Escherichia coli, e.g. as shown in the respective line in column 5 of Table I, application no. 5, has been published in B. And the activity of the gene product thereof is the activity of b4029-protein.

[34986] Accordingly, in one embodiment, the process of the present invention for producing tryptophan in a non-human organism, like a microorganism or a plant or a part thereof, comprises increasing or generating the activity of a gene product with the activity of a gene product conferring the activity of “b4029-protein”, especially from Escherichia coli or its functional equivalent or its homolog, e.g. the increase of
[34987] (a) a gene product of a gene comprising the nucleic acid molecule as shown in the respective line in column 5 of Table I, application no. 5, preferably the coding region thereof, or a homolog or a fragment thereof, and being depicted in the same respective line as said B4029, or a functional equivalent or a homolog thereof as shown in column 8 of Table I, application no. 5, preferably the coding region thereof, particularly a homolog or functional equivalent as shown in column 8 of Table I B, application no. 5, and being depicted in the same respective line as said B4029, and preferably the activity is increased non-targeted, or
[34988] (b) a polypeptide comprising a polypeptide, a consensus sequence or at least a polypeptide motif as shown in the respective line in column 5 of Table II or in column 8 of Table IV, application no. 5, respectively, and being depicted in the same respective line as said B4029, or a functional equivalent or a homolog thereof as depicted in column 8 of Table II, application no. 5, preferably a homolog or functional equivalent as depicted in column 8 of Table II B, application no. 5, and being depicted in the same respective line as said B4029, and preferably the activity is increased non-targeted.

[34989] Accordingly, in one embodiment, the molecule which activity is to be increased in the process of the invention is the gene product with an activity as a “b4029-protein”, preferably it is the molecule of section (a) or (b) of this paragraph.

[34990] In particular, it was observed that in plants, especially in Arabidopsis thaliana, increasing or generating the activity of a gene product non-targeted with the activity of a “b4029-protein”, preferably being encoded by a gene comprising the nucleic acid sequence SEQ ID NO. 10740, preferably the coding region thereof, conferred the production of or the increase in tryptophan compared with the wild type control.

[34991] The nucleic acid sequence of B4121 from Escherichia coli, e.g. as shown in the respective line in column 5 of Table I, application no. 5, has been published in B. And the activity of the gene product thereof is the activity of b4121-protein.

[34992] Accordingly, in one embodiment, the process of the present invention for producing tryptophan in a non-human organism, like a microorganism or a plant or a part thereof, comprises increasing or generating the activity of a gene product with the activity of a gene product conferring the activity of “b4121-protein”, especially from Escherichia coli or its functional equivalent or its homolog, e.g. the increase of
[34993] (a) a gene product of a gene comprising the nucleic acid molecule as shown in the respective line in column 5 of Table I, application no. 5, preferably the coding region thereof, or a homolog or a fragment thereof, and being depicted in the same respective line as said B4121, or a functional equivalent or a homolog thereof as shown in column 8 of Table I, application no. 5, preferably the coding region thereof, particularly a homolog or functional equivalent as shown in column 8 of Table I B, application no. 5, and being depicted in the same respective line as said B4121, and preferably the activity is increased non-targeted, or
[34994] (b) a polypeptide comprising a polypeptide, a consensus sequence or at least a polypeptide motif as shown in the respective line in column 5 of Table II or in column 8 of Table IV, application no. 5, respectively, and being depicted in the same respective line as said B4121, or a functional equivalent or a homolog thereof as depicted in column 8 of Table II, application no. 5, preferably a homolog or functional equivalent as depicted in column 8 of Table II B, application no. 5, and being depicted in the same respective line as said B4121, and preferably the activity is increased non-targeted.

[34995] Accordingly, in one embodiment, the molecule which activity is to be increased in the process of the invention is the gene product with an activity as a “b4121-protein”, preferably it is the molecule of section (a) or (b) of this paragraph.

[34996] In particular, it was observed that in plants, especially in Arabidopsis thaliana, increasing or generating the activity of a gene product non-targeted with the activity of a “b4121-protein”, preferably being encoded by a gene comprising the nucleic acid sequence SEQ ID NO. 44609, preferably the coding region thereof, conferred the production of or the increase in tryptophan compared with the wild type control.

[34997] The nucleic acid sequence of B4256 from Escherichia coli, e.g. as shown in the respective line in column 5 of Table I, application no. 5, has been published in B. And the activity of the gene product thereof is the activity of acetyltransferase.

[34998] Accordingly, in one embodiment, the process of the present invention for producing tryptophan in a non-human organism, like a microorganism or a plant or a part thereof, comprises increasing or generating the activity of a gene product with the activity of a gene product conferring the activity of “acetyltransferase”, especially from Escherichia coli or its functional equivalent or its homolog, e.g. the increase of
[34999] (a) a gene product of a gene comprising the nucleic acid molecule as shown in the respective line in column 5 of Table I, application no. 5, preferably the coding region thereof, or a homolog or a fragment thereof, and being depicted in the same respective line as said B4256, or a functional equivalent or a homolog thereof as shown in column 8 of Table I, application no. 5, preferably the coding region thereof, particularly a homolog or functional equivalent as shown in column 8 of Table I B, application no. 5, and being depicted in the same respective line as said B4256, and preferably the activity is increased non-targeted, or
[35000] (b) a polypeptide comprising a polypeptide, a consensus sequence or at least a polypeptide motif as shown in the respective line in column 5 of Table II or in column 8 of Table IV, application no. 5, respectively, and being depicted in the same respective line as said B4256, or a functional equivalent or a homolog thereof as depicted in column 8 of Table II, application no. 5, preferably a homolog or functional equivalent as depicted in column 8 of Table II B, application no. 5, and being depicted in the same respective line as said B4256, and preferably the activity is increased non-targeted.

[35001] Accordingly, in one embodiment, the molecule which activity is to be increased in the process of the invention is the gene product with an activity as a “acetyltransferase”, preferably it is the molecule of section (a) or (b) of this paragraph.

[35002] In particular, it was observed that in plants, especially in Arabidopsis thaliana, increasing or generating the activity of a gene product non-targeted with the activity of a “acetyltransferase”, preferably being encoded by a gene comprising the nucleic acid sequence SEQ ID NO. 45321, preferably the coding region thereof, conferred the production of or the increase in tryptophan compared with the wild type control.

[35003] The nucleic acid sequence of GM02LC17556 from Glycine max, e.g. as shown in the respective line in column 5 of Table I, application no. 5, is unpublished. And the activity of the gene product thereof is the activity of RNA binding protein.

[35004] Accordingly, in one embodiment, the process of the present invention for producing tryptophan in a non-human organism, like a microorganism or a plant or a part thereof, comprises increasing or generating the activity of a gene product with the activity of a gene product conferring the activity of “RNA binding protein”, especially from Glycine max or its functional equivalent or its homolog, e.g. the increase of
[35005] (a) a gene product of a gene comprising the nucleic acid molecule as shown in the respective line in column 5 of Table I, application no. 5, preferably the coding region thereof, or a homolog or a fragment thereof, and being depicted in the same respective line as said GM02LC17556, or a functional equivalent or a homolog thereof as shown in column 8 of Table I, application no. 5, preferably the coding region thereof, particularly a homolog or functional equivalent as shown in column 8 of Table I B, application no. 5, and being depicted in the same respective line as said GM02LC17556, and preferably the activity is increased non-targeted, or
[35006] (b) a polypeptide comprising a polypeptide, a consensus sequence or at least a polypeptide motif as shown in the respective line in column 5 of Table II or in column 8 of Table IV, application no. 5, respectively, and being depicted in the same respective line as said GM02LC17556, or a functional equivalent or a homolog thereof as depicted in column 8 of Table II, application no. 5, preferably a homolog or functional equivalent as depicted in column 8 of Table II B, application no. 5, and being depicted in the same respective line as said GM02LC17556, and preferably the activity is increased non-targeted.

[35007] Accordingly, in one embodiment, the molecule which activity is to be increased in the process of the invention is the gene product with an activity as a “RNA binding protein”, preferably it is the molecule of section (a) or (b) of this paragraph.

[35008] In particular, it was observed that in plants, especially in Arabidopsis thaliana, increasing or generating the activity of a gene product non-targeted with the activity of a “RNA binding protein”, preferably being encoded by a gene comprising the nucleic acid sequence SEQ ID NO. 46515, preferably the coding region thereof, conferred the production of or the increase in tryptophan compared with the wild type control.

[35009] The nucleic acid sequence of GM02LC21368 from Glycine max, e.g. as shown in the respective line in column 5 of Table I, application no. 5, is unpublished. And the activity of the gene product thereof is the activity of transcription factor.

[35010] Accordingly, in one embodiment, the process of the present invention for producing tryptophan in a non-human organism, like a microorganism or a plant or a part thereof, comprises increasing or generating the activity of a gene product with the activity of a gene product conferring the activity of “transcription factor”, especially from Glycine max or its functional equivalent or its homolog, e.g. the increase of
[35011] (a) a gene product of a gene comprising the nucleic acid molecule as shown in the respective line in column 5 of Table I, application no. 5, preferably the coding region thereof, or a homolog or a fragment thereof, and being depicted in the same respective line as said GM02LC21368, or a functional equivalent or a homolog thereof as shown in column 8 of Table I, application no. 5, preferably the coding region thereof, particularly a homolog or functional equivalent as shown in column 8 of Table I B, application no. 5, and being depicted in the same respective line as said GM02LC21368, and preferably the activity is increased non-targeted, or
[35012] (b) a polypeptide comprising a polypeptide, a consensus sequence or at least a polypeptide motif as shown in the respective line in column 5 of Table II or in column 8 of Table IV, application no. 5, respectively, and being depicted in the same respective line as said GM02LC21368, or a functional equivalent or a homolog thereof as depicted in column 8 of Table II, application no. 5, preferably a homolog or functional equivalent as depicted in column 8 of Table II B, application no. 5, and being depicted in the same respective line as said GM02LC21368, and preferably the activity is increased non-targeted.

[35013] Accordingly, in one embodiment, the molecule which activity is to be increased in the process of the invention is the gene product with an activity as a “transcription factor”, preferably it is the molecule of section (a) or (b) of this paragraph.

[35014] In particular, it was observed that in plants, especially in Arabidopsis thaliana, increasing or generating the activity of a gene product non-targeted with the activity of a “transcription factor”, preferably being encoded by a gene comprising the nucleic acid sequence SEQ ID NO. 84198, preferably the coding region thereof, conferred the production of or the increase in tryptophan compared with the wild type control.

[35015] The nucleic acid sequence of S_pp020029328r from Physcomitrella patens, e.g. as shown in the respective line in column 5 of Table I, application no. 5, is unpublished. And the activity of the gene product thereof is the activity of choline kinase.

[35016] Accordingly, in one embodiment, the process of the present invention for producing tryptophan in a non-human organism, like a microorganism or a plant or a part thereof, comprises increasing or generating the activity of a gene product with the activity of a gene product conferring the activity of “choline kinase”, especially from Physcomitrella patens or its functional equivalent or its homolog, e.g. the increase of
[35017] (a) a gene product of a gene comprising the nucleic acid molecule as shown in the respective line in column 5 of Table I, application no. 5, preferably the coding region thereof, or a homolog or a fragment thereof, and being depicted in the same respective line as said S_pp020029328r, or a functional equivalent or a homolog thereof as shown in column 8 of Table I, application no. 5, preferably the coding region thereof, particularly a homolog or functional equivalent as shown in column 8 of Table I B, application no. 5, and being depicted in the same respective line as said S_pp020029328r, and preferably the activity is increased non-targeted, or
[35018] (b) a polypeptide comprising a polypeptide, a consensus sequence or at least a polypeptide motif as shown in the respective line in column 5 of Table II or in column 8 of Table IV, application no. 5, respectively, and being depicted in the same respective line as said S_pp020029328r, or a functional equivalent or a homolog thereof as depicted in column 8 of Table II, application no. 5, preferably a homolog or functional equivalent as depicted in column 8 of Table II B, application no. 5, and being depicted in the same respective line as said S_pp020029328r, and preferably the activity is increased non-targeted.

[35019] Accordingly, in one embodiment, the molecule which activity is to be increased in the process of the invention is the gene product with an activity as a “choline kinase”, preferably it is the molecule of section (a) or (b) of this paragraph.

[35020] In particular, it was observed that in plants, especially in Arabidopsis thaliana, increasing or generating the activity of a gene product non-targeted with the activity of a “choline kinase”, preferably being encoded by a gene comprising the nucleic acid sequence SEQ ID NO. 101780, preferably the coding region thereof, conferred the production of or the increase in tryptophan compared with the wild type control.

[35021] The nucleic acid sequence of Sll0248 from Synechocystis sp., e.g. as shown in the respective line in column 5 of Table I, application no. 5, has been published in C. And the activity of the gene product thereof is the activity of flavodoxin.

[35022] Accordingly, in one embodiment, the process of the present invention for producing tryptophan in a non-human organism, like a microorganism or a plant or a part thereof, comprises increasing or generating the activity of a gene product with the activity of a gene product conferring the activity of “flavodoxin”, especially from Synechocystis sp. or its functional equivalent or its homolog, e.g. the increase of
[35023] (a) a gene product of a gene comprising the nucleic acid molecule as shown in the respective line in column 5 of Table I, application no. 5, preferably the coding region thereof, or a homolog or a fragment thereof, and being depicted in the same respective line as said Sll0248, or a functional equivalent or a homolog thereof as shown in column 8 of Table I, application no. 5, preferably the coding region thereof, particularly a homolog or functional equivalent as shown in column 8 of Table I B, application no. 5, and being depicted in the same respective line as said Sll0248, and preferably the activity is increased plastidic, or
[35024] (b) a polypeptide comprising a polypeptide, a consensus sequence or at least a polypeptide motif as shown in the respective line in column 5 of Table II or in column 8 of Table IV, application no. 5, respectively, and being depicted in the same respective line as said Sll0248, or a functional equivalent or a homolog thereof as depicted in column 8 of Table II, application no. 5, preferably a homolog or functional equivalent as depicted in column 8 of Table II B, application no. 5, and being depicted in the same respective line as said Sll0248, and preferably the activity is increased plastidic.

[35025] Accordingly, in one embodiment, the molecule which activity is to be increased in the process of the invention is the gene product with an activity as a “flavodoxin”, preferably it is the molecule of section (a) or (b) of this paragraph.

[35026] In particular, it was observed that in plants, especially in Arabidopsis thaliana, increasing or generating the activity of a gene product plastidic with the activity of a “flavodoxin”, preferably being encoded by a gene comprising the nucleic acid sequence SEQ ID NO. 49143, preferably the coding region thereof, conferred the production of or the increase in tryptophan compared with the wild type control.

[35027] The nucleic acid sequence of Sll0521 from Synechocystis sp., e.g. as shown in the respective line in column 5 of Table I, application no. 5, has been published in C. And the activity of the gene product thereof is the activity of NAD(P)H-quinone oxidoreductase subunit.

[35028] Accordingly, in one embodiment, the process of the present invention for producing tryptophan in a non-human organism, like a microorganism or a plant or a part thereof, comprises increasing or generating the activity of a gene product with the activity of a gene product conferring the activity of “NAD(P)H-quinone oxidoreductase subunit”, especially from Synechocystis sp. or its functional equivalent or its homolog, e.g. the increase of
[35029] (a) a gene product of a gene comprising the nucleic acid molecule as shown in the respective line in column 5 of Table I, application no. 5, preferably the coding region thereof, or a homolog or a fragment thereof, and being depicted in the same respective line as said Sll0521, or a functional equivalent or a homolog thereof as shown in column 8 of Table I, application no. 5, preferably the coding region thereof, particularly a homolog or functional equivalent as shown in column 8 of Table I B, application no. 5, and being depicted in the same respective line as said Sll0521, and preferably the activity is increased plastidic, or
[35030] (b) a polypeptide comprising a polypeptide, a consensus sequence or at least a polypeptide motif as shown in the respective line in column 5 of Table II or in column 8 of Table IV, application no. 5, respectively, and being depicted in the same respective line as said Sll0521, or a functional equivalent or a homolog thereof as depicted in column 8 of Table II, application no. 5, preferably a homolog or functional equivalent as depicted in column 8 of Table II B, application no. 5, and being depicted in the same respective line as said Sll0521, and preferably the activity is increased plastidic.

[35031] Accordingly, in one embodiment, the molecule which activity is to be increased in the process of the invention is the gene product with an activity as a “NAD(P)H-quinone oxidoreductase subunit”, preferably it is the molecule of section (a) or (b) of this paragraph.

[35032] In particular, it was observed that in plants, especially in Arabidopsis thaliana, increasing or generating the activity of a gene product plastidic with the activity of a “NAD(P)H-quinone oxidoreductase subunit”, preferably being encoded by a gene comprising the nucleic acid sequence SEQ ID NO. 50339, preferably the coding region thereof, conferred the production of or the increase in tryptophan compared with the wild type control.

[35033] The nucleic acid sequence of Sll0833 from Synechocystis sp., e.g. as shown in the respective line in column 5 of Table I, application no. 5, has been published in C. And the activity of the gene product thereof is the activity of binding-protein-dependent transport systems inner membrane component.

[35034] Accordingly, in one embodiment, the process of the present invention for producing tryptophan in a non-human organism, like a microorganism or a plant or a part thereof, comprises increasing or generating the activity of a gene product with the activity of a gene product conferring the activity of “binding-protein-dependent transport systems inner membrane component”, especially from Synechocystis sp. or its functional equivalent or its homolog, e.g. the increase of
[35035] (a) a gene product of a gene comprising the nucleic acid molecule as shown in the respective line in column 5 of Table I, application no. 5, preferably the coding region thereof, or a homolog or a fragment thereof, and being depicted in the same respective line as said Sll0833, or a functional equivalent or a homolog thereof as shown in column 8 of Table I, application no. 5, preferably the coding region thereof, particularly a homolog or functional equivalent as shown in column 8 of Table I B, application no. 5, and being depicted in the same respective line as said Sll0833, and preferably the activity is increased non-targeted, or
[35036] (b) a polypeptide comprising a polypeptide, a consensus sequence or at least a polypeptide motif as shown in the respective line in column 5 of Table II or in column 8 of Table IV, application no. 5, respectively, and being depicted in the same respective line as said Sll0833, or a functional equivalent or a homolog thereof as depicted in column 8 of Table II, application no. 5, preferably a homolog or functional equivalent as depicted in column 8 of Table II B, application no. 5, and being depicted in the same respective line as said Sll0833, and preferably the activity is increased non-targeted.

[35037] Accordingly, in one embodiment, the molecule which activity is to be increased in the process of the invention is the gene product with an activity as a “binding-protein-dependent transport systems inner membrane component”, preferably it is the molecule of section (a) or (b) of this paragraph.

[35038] In particular, it was observed that in plants, especially in Arabidopsis thaliana, increasing or generating the activity of a gene product non-targeted with the activity of a “binding-proteindependent transport systems inner membrane component”, preferably being encoded by a gene comprising the nucleic acid sequence SEQ ID NO. 101707, preferably the coding region thereof, conferred the production of or the increase in tryptophan compared with the wild type control.

[35039] The nucleic acid sequence of Sll1031 from Synechocystis sp., e.g. as shown in the respective line in column 5 of Table I, application no. 5, has been published in C. And the activity of the gene product thereof is the activity of carbon dioxide concentrating mechanism protein.

[35040] Accordingly, in one embodiment, the process of the present invention for producing tryptophan in a non-human organism, like a microorganism or a plant or a part thereof, comprises increasing or generating the activity of a gene product with the activity of a gene product conferring the activity of “carbon dioxide concentrating mechanism protein”, especially from Synechocystis sp. or its functional equivalent or its homolog, e.g. the increase of
[35041] (a) a gene product of a gene comprising the nucleic acid molecule as shown in the respective line in column 5 of Table I, application no. 5, preferably the coding region thereof, or a homolog or a fragment thereof, and being depicted in the same respective line as said Sll1031, or a functional equivalent or a homolog thereof as shown in column 8 of Table I, application no. 5, preferably the coding region thereof, particularly a homolog or functional equivalent as shown in column 8 of Table I B, application no. 5, and being depicted in the same respective line as said Sll1031, and preferably the activity is increased mitochondrial, or
[35042] (b) a polypeptide comprising a polypeptide, a consensus sequence or at least a polypeptide motif as shown in the respective line in column 5 of Table II or in column 8 of Table IV, application no. 5, respectively, and being depicted in the same respective line as said Sll1031, or a functional equivalent or a homolog thereof as depicted in column 8 of Table II, application no. 5, preferably a homolog or functional equivalent as depicted in column 8 of Table II B, application no. 5, and being depicted in the same respective line as said Sll1031, and preferably the activity is increased mitochondrial.

[35043] Accordingly, in one embodiment, the molecule which activity is to be increased in the process of the invention is the gene product with an activity as a “carbon dioxide concentrating mechanism protein”, preferably it is the molecule of section (a) or (b) of this paragraph.

[35044] In particular, it was observed that in plants, especially in Arabidopsis thaliana, increasing or generating the activity of a gene product mitochondrial with the activity of a “carbon dioxide concentrating mechanism protein”, preferably being encoded by a gene comprising the nucleic acid sequence SEQ ID NO. 52634, preferably the coding region thereof, conferred the production of or the increase in tryptophan compared with the wild type control.

[35045] The nucleic acid sequence of Sll1450 from Synechocystis sp., e.g. as shown in the respective line in column 5 of Table I, application no. 5, has been published in C. And the activity of the gene product thereof is the activity of nitrate/nitrite transport protein.

[35046] Accordingly, in one embodiment, the process of the present invention for producing tryptophan in a non-human organism, like a microorganism or a plant or a part thereof, comprises increasing or generating the activity of a gene product with the activity of a gene product conferring the activity of “nitrate/nitrite transport protein”, especially from Synechocystis sp. or its functional equivalent or its homolog, e.g. the increase of
[35047] (a) a gene product of a gene comprising the nucleic acid molecule as shown in the respective line in column 5 of Table I, application no. 5, preferably the coding region thereof, or a homolog or a fragment thereof, and being depicted in the same respective line as said Sll1450, or a functional equivalent or a homolog thereof as shown in column 8 of Table I, application no. 5, preferably the coding region thereof, particularly a homolog or functional equivalent as shown in column 8 of Table I B, application no. 5, and being depicted in the same respective line as said Sll1450, and preferably the activity is increased mitochondrial, or
[35048] (b) a polypeptide comprising a polypeptide, a consensus sequence or at least a polypeptide motif as shown in the respective line in column 5 of Table II or in column 8 of Table IV, application no. 5, respectively, and being depicted in the same respective line as said Sll1450, or a functional equivalent or a homolog thereof as depicted in column 8 of Table II, application no. 5, preferably a homolog or functional equivalent as depicted in column 8 of Table II B, application no. 5, and being depicted in the same respective line as said Sll1450, and preferably the activity is increased mitochondrial.

[35049] Accordingly, in one embodiment, the molecule which activity is to be increased in the process of the invention is the gene product with an activity as a “nitrate/nitrite transport protein”, preferably it is the molecule of section (a) or (b) of this paragraph.

[35050] In particular, it was observed that in plants, especially in Arabidopsis thaliana, increasing or generating the activity of a gene product mitochondrial with the activity of a “nitrate/nitrite transport protein”, preferably being encoded by a gene comprising the nucleic acid sequence SEQ ID NO. 54337, preferably the coding region thereof, conferred the production of or the increase in tryptophan compared with the wild type control.

[35051] The nucleic acid sequence of Sll1917 from Synechocystis sp., e.g. as shown in the respective line in column 5 of Table I, application no. 5, has been published in C. And the activity of the gene product thereof is the activity of coproporphyrinogen III oxidase.

[35052] Accordingly, in one embodiment, the process of the present invention for producing tryptophan in a non-human organism, like a microorganism or a plant or a part thereof, comprises increasing or generating the activity of a gene product with the activity of a gene product conferring the activity of “coproporphyrinogen III oxidase”, especially from Synechocystis sp. or its functional equivalent or its homolog, e.g. the increase of
[35053] (a) a gene product of a gene comprising the nucleic acid molecule as shown in the respective line in column 5 of Table I, application no. 5, preferably the coding region thereof, or a homolog or a fragment thereof, and being depicted in the same respective line as said Sll1917, or a functional equivalent or a homolog thereof as shown in column 8 of Table I, application no. 5, preferably the coding region thereof, particularly a homolog or functional equivalent as shown in column 8 of Table I B, application no. 5, and being depicted in the same respective line as said Sll1917, and preferably the activity is increased mitochondrial, or
[35054] (b) a polypeptide comprising a polypeptide, a consensus sequence or at least a polypeptide motif as shown in the respective line in column 5 of Table II or in column 8 of Table IV, application no. 5, respectively, and being depicted in the same respective line as said Sll1917, or a functional equivalent or a homolog thereof as depicted in column 8 of Table II, application no. 5, preferably a homolog or functional equivalent as depicted in column 8 of Table II B, application no. 5, and being depicted in the same respective line as said Sll1917, and preferably the activity is increased mitochondrial.

[35055] Accordingly, in one embodiment, the molecule which activity is to be increased in the process of the invention is the gene product with an activity as a “coproporphyrinogen III oxidase”, preferably it is the molecule of section (a) or (b) of this paragraph.

[35056] In particular, it was observed that in plants, especially in Arabidopsis thaliana, increasing or generating the activity of a gene product mitochondrial with the activity of a “coproporphyrinogen III oxidase”, preferably being encoded by a gene comprising the nucleic acid sequence SEQ ID NO. 11471, preferably the coding region thereof, conferred the production of or the increase in tryptophan compared with the wild type control. The nucleic acid sequence of Slr0239 from Synechocystis sp., e.g. as shown in the respective line in column 5 of Table I, application no. 5, has been published in C. And the activity of the gene product thereof is the activity of precorrin methylase.

[35057] Accordingly, in one embodiment, the process of the present invention for producing tryptophan in a non-human organism, like a microorganism or a plant or a part thereof, comprises increasing or generating the activity of a gene product with the activity of a gene product conferring the activity of “precorrin methylase”, especially from Synechocystis sp. or its functional equivalent or its homolog, e.g. the increase of
[35058] (a) a gene product of a gene comprising the nucleic acid molecule as shown in the respective line in column 5 of Table I, application no. 5, preferably the coding region thereof, or a homolog or a fragment thereof, and being depicted in the same respective line as said Slr0239, or a functional equivalent or a homolog thereof as shown in column 8 of Table I, application no. 5, preferably the coding region thereof, particularly a homolog or functional equivalent as shown in column 8 of Table I B, application no. 5, and being depicted in the same respective line as said Slr0239, and preferably the activity is increased mitochondrial, or
[35059] (b) a polypeptide comprising a polypeptide, a consensus sequence or at least a polypeptide motif as shown in the respective line in column 5 of Table II or in column 8 of Table IV, application no. 5, respectively, and being depicted in the same respective line as said Slr0239, or a functional equivalent or a homolog thereof as depicted in column 8 of Table II, application no. 5, preferably a homolog or functional equivalent as depicted in column 8 of Table II B, application no. 5, and being depicted in the same respective line as said Slr0239, and preferably the activity is increased mitochondrial.

[35060] Accordingly, in one embodiment, the molecule which activity is to be increased in the process of the invention is the gene product with an activity as a “precorrin methylase”, preferably it is the molecule of section (a) or (b) of this paragraph.

[35061] In particular, it was observed that in plants, especially in Arabidopsis thaliana, increasing or generating the activity of a gene product mitochondrial with the activity of a “precorrin methylase”, preferably being encoded by a gene comprising the nucleic acid sequence SEQ ID NO. 86540, preferably the coding region thereof, conferred the production of or the increase in tryptophan compared with the wild type control.

[35062] The nucleic acid sequence of Slr0721 from Synechocystis sp., e.g. as shown in the respective line in column 5 of Table I, application no. 5, has been published in C. And the activity of the gene product thereof is the activity of malate dehydrogenase.

[35063] Accordingly, in one embodiment, the process of the present invention for producing tryptophan in a non-human organism, like a microorganism or a plant or a part thereof, comprises increasing or generating the activity of a gene product with the activity of a gene product conferring the activity of “malate dehydrogenase”, especially from Synechocystis sp. or its functional equivalent or its homolog, e.g. the increase of
[35064] (a) a gene product of a gene comprising the nucleic acid molecule as shown in the respective line in column 5 of Table I, application no. 5, preferably the coding region thereof, or a homolog or a fragment thereof, and being depicted in the same respective line as said Slr0721, or a functional equivalent or a homolog thereof as shown in column 8 of Table I, application no. 5, preferably the coding region thereof, particularly a homolog or functional equivalent as shown in column 8 of Table I B, application no. 5, and being depicted in the same respective line as said Slr0721, and preferably the activity is increased plastidic, or
[35065] (b) a polypeptide comprising a polypeptide, a consensus sequence or at least a polypeptide motif as shown in the respective line in column 5 of Table II or in column 8 of Table IV, application no. 5, respectively, and being depicted in the same respective line as said Slr0721, or a functional equivalent or a homolog thereof as depicted in column 8 of Table II, application no. 5, preferably a homolog or functional equivalent as depicted in column 8 of Table II B, application no. 5, and being depicted in the same respective line as said Slr0721, and preferably the activity is increased plastidic.

[35066] Accordingly, in one embodiment, the molecule which activity is to be increased in the process of the invention is the gene product with an activity as a “malate dehydrogenase”, preferably it is the molecule of section (a) or (b) of this paragraph.

[35067] In particular, it was observed that in plants, especially in Arabidopsis thaliana, increasing or generating the activity of a gene product plastidic with the activity of a “malate dehydrogenase”, preferably being encoded by a gene comprising the nucleic acid sequence SEQ ID NO. 87397, preferably the coding region thereof, conferred the production of or the increase in tryptophan compared with the wild type control.

[35068] The nucleic acid sequence of Slr0739 from Synechocystis sp., e.g. as shown in the respective line in column 5 of Table I, application no. 5, has been published in C. And the activity of the gene product thereof is the activity of geranylgeranyl pyrophosphate synthase.

[35069] Accordingly, in one embodiment, the process of the present invention for producing tryptophan in a non-human organism, like a microorganism or a plant or a part thereof, comprises increasing or generating the activity of a gene product with the activity of a gene product conferring the activity of “geranylgeranyl pyrophosphate synthase”, especially from Synechocystis sp. or its functional equivalent or its homolog, e.g. the increase of
[35070] (a) a gene product of a gene comprising the nucleic acid molecule as shown in the respective line in column 5 of Table I, application no. 5, preferably the coding region thereof, or a homolog or a fragment thereof, and being depicted in the same respective line as said Slr0739, or a functional equivalent or a homolog thereof as shown in column 8 of Table I, application no. 5, preferably the coding region thereof, particularly a homolog or functional equivalent as shown in column 8 of Table I B, application no. 5, and being depicted in the same respective line as said Slr0739, and preferably the activity is increased plastidic, or
[35071] (b) a polypeptide comprising a polypeptide, a consensus sequence or at least a polypeptide motif as shown in the respective line in column 5 of Table II or in column 8 of Table IV, application no. 5, respectively, and being depicted in the same respective line as said Slr0739, or a functional equivalent or a homolog thereof as depicted in column 8 of Table II, application no. 5, preferably a homolog or functional equivalent as depicted in column 8 of Table II B, application no. 5, and being depicted in the same respective line as said Slr0739, and preferably the activity is increased plastidic.

[35072] Accordingly, in one embodiment, the molecule which activity is to be increased in the process of the invention is the gene product with an activity as a “geranylgeranyl pyrophosphate synthase”, preferably it is the molecule of section (a) or (b) of this paragraph.

[35073] In particular, it was observed that in plants, especially in Arabidopsis thaliana, increasing or generating the activity of a gene product plastidic with the activity of a “geranylgeranyl pyrophosphate synthase”, preferably being encoded by a gene comprising the nucleic acid sequence SEQ ID NO. 57235, preferably the coding region thereof, conferred the production of or the increase in tryptophan compared with the wild type control.

[35074] The nucleic acid sequence of Slr1107 from Synechocystis sp., e.g. as shown in the respective line in column 5 of Table I, application no. 5, has been published in C. And the activity of the gene product thereof is the activity of slr1107-protein.

[35075] Accordingly, in one embodiment, the process of the present invention for producing tryptophan in a non-human organism, like a microorganism or a plant or a part thereof, comprises increasing or generating the activity of a gene product with the activity of a gene product conferring the activity of “slr1107-protein”, especially from Synechocystis sp. or its functional equivalent or its homolog, e.g. the increase of
[35076] (a) a gene product of a gene comprising the nucleic acid molecule as shown in the respective line in column 5 of Table I, application no. 5, preferably the coding region thereof, or a homolog or a fragment thereof, and being depicted in the same respective line as said Slr1107, or a functional equivalent or a homolog thereof as shown in column 8 of Table I, application no. 5, preferably the coding region thereof, particularly a homolog or functional equivalent as shown in column 8 of Table I B, application no. 5, and being depicted in the same respective line as said Slr1107, and preferably the activity is increased plastidic, or
[35077] (b) a polypeptide comprising a polypeptide, a consensus sequence or at least a polypeptide motif as shown in the respective line in column 5 of Table II or in column 8 of Table IV, application no. 5, respectively, and being depicted in the same respective line as said Slr1107, or a functional equivalent or a homolog thereof as depicted in column 8 of Table II, application no. 5, preferably a homolog or functional equivalent as depicted in column 8 of Table II B, application no. 5, and being depicted in the same respective line as said Slr1107, and preferably the activity is increased plastidic.

[35078] Accordingly, in one embodiment, the molecule which activity is to be increased in the process of the invention is the gene product with an activity as a “slr1107-protein”, preferably it is the molecule of section (a) or (b) of this paragraph.

[35079] In particular, it was observed that in plants, especially in Arabidopsis thaliana, increasing or generating the activity of a gene product plastidic with the activity of a “slr1107-protein”, preferably being encoded by a gene comprising the nucleic acid sequence SEQ ID NO. 101776, preferably the coding region thereof, conferred the production of or the increase in tryptophan compared with the wild type control.

[35080] The nucleic acid sequence of Slr1739 from Synechocystis sp., e.g. as shown in the respective line in column 5 of Table I, application no. 5, has been published in C. And the activity of the gene product thereof is the activity of photosystem II protein.

[35081] Accordingly, in one embodiment, the process of the present invention for producing tryptophan in a non-human organism, like a microorganism or a plant or a part thereof, comprises increasing or generating the activity of a gene product with the activity of a gene product conferring the activity of “photosystem II protein”, especially from Synechocystis sp. or its functional equivalent or its homolog, e.g. the increase of
[35082] (a) a gene product of a gene comprising the nucleic acid molecule as shown in the respective line in column 5 of Table I, application no. 5, preferably the coding region thereof, or a homolog or a fragment thereof, and being depicted in the same respective line as said Slr1739, or a functional equivalent or a homolog thereof as shown in column 8 of Table I, application no. 5, preferably the coding region thereof, particularly a homolog or functional equivalent as shown in column 8 of Table I B, application no. 5, and being depicted in the same respective line as said Slr1739, and preferably the activity is increased plastidic, or
[35083] (b) a polypeptide comprising a polypeptide, a consensus sequence or at least a polypeptide motif as shown in the respective line in column 5 of Table II or in column 8 of Table IV, application no. 5, respectively, and being depicted in the same respective line as said Slr1739, or a functional equivalent or a homolog thereof as depicted in column 8 of Table II, application no. 5, preferably a homolog or functional equivalent as depicted in column 8 of Table II B, application no. 5, and being depicted in the same respective line as said Slr1739, and preferably the activity is increased plastidic.

[35084] Accordingly, in one embodiment, the molecule which activity is to be increased in the process of the invention is the gene product with an activity as a “photosystem II protein”, preferably it is the molecule of section (a) or (b) of this paragraph.

[35085] In particular, it was observed that in plants, especially in Arabidopsis thaliana, increasing or generating the activity of a gene product plastidic with the activity of a “photosystem II protein”, preferably being encoded by a gene comprising the nucleic acid sequence SEQ ID NO. 58731, preferably the coding region thereof, conferred the production of or the increase in tryptophan compared with the wild type control.

[35086] The nucleic acid sequence of Slr2124 from Synechocystis sp., e.g. as shown in the respective line in column 5 of Table I, application no. 5, has been published in C. And the activity of the gene product thereof is the activity of short-chain alcohol dehydrogenase family.

[35087] Accordingly, in one embodiment, the process of the present invention for producing tryptophan in a non-human organism, like a microorganism or a plant or a part thereof, comprises increasing or generating the activity of a gene product with the activity of a gene product conferring the activity of “short-chain alcohol dehydrogenase family”, especially from Synechocystis sp. or its functional equivalent or its homolog, e.g. the increase of
[35088] (a) a gene product of a gene comprising the nucleic acid molecule as shown in the respective line in column 5 of Table I, application no. 5, preferably the coding region thereof, or a homolog or a fragment thereof, and being depicted in the same respective line as said Slr2124, or a functional equivalent or a homolog thereof as shown in column 8 of Table I, application no. 5, preferably the coding region thereof, particularly a homolog or functional equivalent as shown in column 8 of Table I B, application no. 5, and being depicted in the same respective line as said Slr2124, and preferably the activity is increased plastidic, or
[35089] (b) a polypeptide comprising a polypeptide, a consensus sequence or at least a polypeptide motif as shown in the respective line in column 5 of Table II or in column 8 of Table IV, application no. 5, respectively, and being depicted in the same respective line as said Slr2124, or a functional equivalent or a homolog thereof as depicted in column 8 of Table II, application no. 5, preferably a homolog or functional equivalent as depicted in column 8 of Table II B, application no. 5, and being depicted in the same respective line as said Slr2124, and preferably the activity is increased plastidic.

[35090] Accordingly, in one embodiment, the molecule which activity is to be increased in the process of the invention is the gene product with an activity as a “short-chain alcohol dehydrogenase family”, preferably it is the molecule of section (a) or (b) of this paragraph.

[35091] In particular, it was observed that in plants, especially in Arabidopsis thaliana, increasing or generating the activity of a gene product plastidic with the activity of a “short-chain alcohol dehydrogenase family”, preferably being encoded by a gene comprising the nucleic acid sequence SEQ ID NO. 59370, preferably the coding region thereof, conferred the production of or the increase in tryptophan compared with the wild type control.

[35092] The nucleic acid sequence of TTC0019 from Thermus thermophilus, e.g. as shown in the respective line in column 5 of Table I, application no. 5, has been published in E. And the activity of the gene product thereof is the activity of Sec-independent protein translocase subunit.

[35093] Accordingly, in one embodiment, the process of the present invention for producing tryptophan in a non-human organism, like a microorganism or a plant or a part thereof, comprises increasing or generating the activity of a gene product with the activity of a gene product conferring the activity of “Sec-independent protein translocase subunit”, especially from Thermus thermophilus or its functional equivalent or its homolog, e.g. the increase of
[35094] (a) a gene product of a gene comprising the nucleic acid molecule as shown in the respective line in column 5 of Table I, application no. 5, preferably the coding region thereof, or a homolog or a fragment thereof, and being depicted in the same respective line as said TTC0019, or a functional equivalent or a homolog thereof as shown in column 8 of Table I, application no. 5, preferably the coding region thereof, particularly a homolog or functional equivalent as shown in column 8 of Table I B, application no. 5, and being depicted in the same respective line as said TTC0019, and preferably the activity is increased non-targeted, or
[35095] (b) a polypeptide comprising a polypeptide, a consensus sequence or at least a polypeptide motif as shown in the respective line in column 5 of Table II or in column 8 of Table IV, application no. 5, respectively, and being depicted in the same respective line as said TTC0019, or a functional equivalent or a homolog thereof as depicted in column 8 of Table II, application no. 5, preferably a homolog or functional equivalent as depicted in column 8 of Table II B, application no. 5, and being depicted in the same respective line as said TTC0019, and preferably the activity is increased non-targeted.

[35096] Accordingly, in one embodiment, the molecule which activity is to be increased in the process of the invention is the gene product with an activity as a “Sec-independent protein translocase subunit”, preferably it is the molecule of section (a) or (b) of this paragraph.

[35097] In particular, it was observed that in plants, especially in Arabidopsis thaliana, increasing or generating the activity of a gene product non-targeted with the activity of a “Sec-independent protein translocase subunit”, preferably being encoded by a gene comprising the nucleic acid sequence SEQ ID NO. 12698, preferably the coding region thereof, conferred the production of or the increase in tryptophan compared with the wild type control.

[35098] The nucleic acid sequence of Ybr249c from Saccharomyces cerevisiae, e.g. as shown in the respective line in column 5 of Table I, application no. 5, has been published in A. And the activity of the gene product thereof is the activity of 3-deoxy-7-phosphoheptulonate synthase.

[35099] Accordingly, in one embodiment, the process of the present invention for producing tryptophan in a non-human organism, like a microorganism or a plant or a part thereof, comprises increasing or generating the activity of a gene product with the activity of a gene product conferring the activity of “3-deoxy-7-phosphoheptulonate synthase”, especially from Saccharomyces cerevisiae or its functional equivalent or its homolog, e.g. the increase of
[35100] (a) a gene product of a gene comprising the nucleic acid molecule as shown in the respective line in column 5 of Table I, application no. 5, preferably the coding region thereof, or a homolog or a fragment thereof, and being depicted in the same respective line as said Ybr249c, or a functional equivalent or a homolog thereof as shown in column 8 of Table I, application no. 5, preferably the coding region thereof, particularly a homolog or functional equivalent as shown in column 8 of Table I B, application no. 5, and being depicted in the same respective line as said Ybr249c, and preferably the activity is increased plastidic, or
[35101] (b) a polypeptide comprising a polypeptide, a consensus sequence or at least a polypeptide motif as shown in the respective line in column 5 of Table II or in column 8 of Table IV, application no. 5, respectively, and being depicted in the same respective line as said Ybr249c, or a functional equivalent or a homolog thereof as depicted in column 8 of Table II, application no. 5, preferably a homolog or functional equivalent as depicted in column 8 of Table II B, application no. 5, and being depicted in the same respective line as said Ybr249c, and preferably the activity is increased plastidic.

[35102] Accordingly, in one embodiment, the molecule which activity is to be increased in the process of the invention is the gene product with an activity as a “3-deoxy-7-phosphoheptulonate synthase”, preferably it is the molecule of section (a) or (b) of this paragraph.

[35103] In particular, it was observed that in plants, especially in Arabidopsis thaliana, increasing or generating the activity of a gene product plastidic with the activity of a “3-deoxy-7-phosphoheptulonate synthase”, preferably being encoded by a gene comprising the nucleic acid sequence SEQ ID NO. 88879, preferably the coding region thereof, conferred the production of or the increase in tryptophan compared with the wild type control.

[35104] The nucleic acid sequence of Ydr046c from Saccharomyces cerevisiae, e.g. as shown in the respective line in column 5 of Table I, application no. 5, has been published in A. And the activity of the gene product thereof is the activity of branched-chain amino acid permease.

[35105] Accordingly, in one embodiment, the process of the present invention for producing tryptophan in a non-human organism, like a microorganism or a plant or a part thereof, comprises increasing or generating the activity of a gene product with the activity of a gene product conferring the activity of “branched-chain amino acid permease”, especially from Saccharomyces cerevisiae or its functional equivalent or its homolog, e.g. the increase of
[35106] (a) a gene product of a gene comprising the nucleic acid molecule as shown in the respective line in column 5 of Table I, application no. 5, preferably the coding region thereof, or a homolog or a fragment thereof, and being depicted in the same respective line as said Ydr046c, or a functional equivalent or a homolog thereof as shown in column 8 of Table I, application no. 5, preferably the coding region thereof, particularly a homolog or functional equivalent as shown in column 8 of Table I B, application no. 5, and being depicted in the same respective line as said Ydr046c, and preferably the activity is increased plastidic, or
[35107] (b) a polypeptide comprising a polypeptide, a consensus sequence or at least a polypeptide motif as shown in the respective line in column 5 of Table II or in column 8 of Table IV, application no. 5, respectively, and being depicted in the same respective line as said Ydr046c, or a functional equivalent or a homolog thereof as depicted in column 8 of Table II, application no. 5, preferably a homolog or functional equivalent as depicted in column 8 of Table II B, application no. 5, and being depicted in the same respective line as said Ydr046c, and preferably the activity is increased plastidic.

[35108] Accordingly, in one embodiment, the molecule which activity is to be increased in the process of the invention is the gene product with an activity as a “branched-chain amino acid permease”, preferably it is the molecule of section (a) or (b) of this paragraph.

[35109] In particular, it was observed that in plants, especially in Arabidopsis thaliana, increasing or generating the activity of a gene product plastidic with the activity of a “branched-chain amino acid permease”, preferably being encoded by a gene comprising the nucleic acid sequence SEQ ID NO. 63544, preferably the coding region thereof, conferred the production of or the increase in tryptophan compared with the wild type control.

[35110] The nucleic acid sequence of Yfl054c from Saccharomyces cerevisiae, e.g. as shown in the respective line in column 5 of Table I, application no. 5, has been published in A. And the activity of the gene product thereof is the activity of yfl054c-protein.

[35111] Accordingly, in one embodiment, the process of the present invention for producing tryptophan in a non-human organism, like a microorganism or a plant or a part thereof, comprises increasing or generating the activity of a gene product with the activity of a gene product conferring the activity of “yfl054c-protein”, especially from Saccharomyces cerevisiae or its functional equivalent or its homolog, e.g. the increase of
[35112] (a) a gene product of a gene comprising the nucleic acid molecule as shown in the respective line in column 5 of Table I, application no. 5, preferably the coding region thereof, or a homolog or a fragment thereof, and being depicted in the same respective line as said Yfl054c, or a functional equivalent or a homolog thereof as shown in column 8 of Table I, application no. 5, preferably the coding region thereof, particularly a homolog or functional equivalent as shown in column 8 of Table I B, application no. 5, and being depicted in the same respective line as said Yfl054c, and preferably the activity is increased plastidic, or
[35113] (b) a polypeptide comprising a polypeptide, a consensus sequence or at least a polypeptide motif as shown in the respective line in column 5 of Table II or in column 8 of Table IV, application no. 5, respectively, and being depicted in the same respective line as said Yfl054c, or a functional equivalent or a homolog thereof as depicted in column 8 of Table II, application no. 5, preferably a homolog or functional equivalent as depicted in column 8 of Table II B, application no. 5, and being depicted in the same respective line as said Yfl054c, and preferably the activity is increased plastidic.

[35114] Accordingly, in one embodiment, the molecule which activity is to be increased in the process of the invention is the gene product with an activity as a “yfl054c-protein”, preferably it is the molecule of section (a) or (b) of this paragraph.

[35115] In particular, it was observed that in plants, especially in Arabidopsis thaliana, increasing or generating the activity of a gene product plastidic with the activity of a “yfl054c-protein”, preferably being encoded by a gene comprising the nucleic acid sequence SEQ ID NO. 64148, preferably the coding region thereof, conferred the production of or the increase in tryptophan compared with the wild type control.

[35116] The nucleic acid sequence of Yhl032c from Saccharomyces cerevisiae, e.g. as shown in the respective line in column 5 of Table I, application no. 5, has been published in A. And the activity of the gene product thereof is the activity of glycerol kinase.

[35117] Accordingly, in one embodiment, the process of the present invention for producing tryptophan in a non-human organism, like a microorganism or a plant or a part thereof, comprises increasing or generating the activity of a gene product with the activity of a gene product conferring the activity of “glycerol kinase”, especially from Saccharomyces cerevisiae or its functional equivalent or its homolog, e.g. the increase of
[35118] (a) a gene product of a gene comprising the nucleic acid molecule as shown in the respective line in column 5 of Table I, application no. 5, preferably the coding region thereof, or a homolog or a fragment thereof, and being depicted in the same respective line as said Yhl032c, or a functional equivalent or a homolog thereof as shown in column 8 of Table I, application no. 5, preferably the coding region thereof, particularly a homolog or functional equivalent as shown in column 8 of Table I B, application no. 5, and being depicted in the same respective line as said Yhl032c, and preferably the activity is increased plastidic, or
[35119] (b) a polypeptide comprising a polypeptide, a consensus sequence or at least a polypeptide motif as shown in the respective line in column 5 of Table II or in column 8 of Table IV, application no. 5, respectively, and being depicted in the same respective line as said Yhl032c, or a functional equivalent or a homolog thereof as depicted in column 8 of Table II, application no. 5, preferably a homolog or functional equivalent as depicted in column 8 of Table II B, application no. 5, and being depicted in the same respective line as said Yhl032c, and preferably the activity is increased plastidic.

[35120] Accordingly, in one embodiment, the molecule which activity is to be increased in the process of the invention is the gene product with an activity as a “glycerol kinase”, preferably it is the molecule of section (a) or (b) of this paragraph.

[35121] In particular, it was observed that in plants, especially in Arabidopsis thaliana, increasing or generating the activity of a gene product plastidic with the activity of a “glycerol kinase”, preferably being encoded by a gene comprising the nucleic acid sequence SEQ ID NO. 101855, preferably the coding region thereof, conferred the production of or the increase in tryptophan compared with the wild type control.

[35122] The nucleic acid sequence of Yhr137w from Saccharomyces cerevisiae, e.g. as shown in the respective line in column 5 of Table I, application no. 5, has been published in A. And the activity of the gene product thereof is the activity of aromatic amino acid aminotransferase.

[35123] Accordingly, in one embodiment, the process of the present invention for producing tryptophan in a non-human organism, like a microorganism or a plant or a part thereof, comprises increasing or generating the activity of a gene product with the activity of a gene product conferring the activity of “aromatic amino acid aminotransferase”, especially from Saccharomyces cerevisiae or its functional equivalent or its homolog, e.g. the increase of
[35124] (a) a gene product of a gene comprising the nucleic acid molecule as shown in the respective line in column 5 of Table I, application no. 5, preferably the coding region thereof, or a homolog or a fragment thereof, and being depicted in the same respective line as said Yhr137w, or a functional equivalent or a homolog thereof as shown in column 8 of Table I, application no. 5, preferably the coding region thereof, particularly a homolog or functional equivalent as shown in column 8 of Table I B, application no. 5, and being depicted in the same respective line as said Yhr137w, and preferably the activity is increased plastidic, or
[35125] (b) a polypeptide comprising a polypeptide, a consensus sequence or at least a polypeptide motif as shown in the respective line in column 5 of Table II or in column 8 of Table IV, application no. 5, respectively, and being depicted in the same respective line as said Yhr137w, or a functional equivalent or a homolog thereof as depicted in column 8 of Table II, application no. 5, preferably a homolog or functional equivalent as depicted in column 8 of Table II B, application no. 5, and being depicted in the same respective line as said Yhr137w, and preferably the activity is increased plastidic.

[35126] Accordingly, in one embodiment, the molecule which activity is to be increased in the process of the invention is the gene product with an activity as a “aromatic amino acid aminotransferase”, preferably it is the molecule of section (a) or (b) of this paragraph.

[35127] In particular, it was observed that in plants, especially in Arabidopsis thaliana, increasing or generating the activity of a gene product plastidic with the activity of a “aromatic amino acid aminotransferase”, preferably being encoded by a gene comprising the nucleic acid sequence SEQ ID NO. 102015, preferably the coding region thereof, conferred the production of or the increase in tryptophan compared with the wild type control.

[35128] The nucleic acid sequence of Yjr130c from Saccharomyces cerevisiae, e.g. as shown in the respective line in column 5 of Table I, application no. 5, has been published in A. And the activity of the gene product thereof is the activity of cystathionine gamma-synthase.

[35129] Accordingly, in one embodiment, the process of the present invention for producing tryptophan in a non-human organism, like a microorganism or a plant or a part thereof, comprises increasing or generating the activity of a gene product with the activity of a gene product conferring the activity of “cystathionine gamma-synthase”, especially from Saccharomyces cerevisiae or its functional equivalent or its homolog, e.g. the increase of
[35130] (a) a gene product of a gene comprising the nucleic acid molecule as shown in the respective line in column 5 of Table I, application no. 5, preferably the coding region thereof, or a homolog or a fragment thereof, and being depicted in the same respective line as said Yjr130c, or a functional equivalent or a homolog thereof as shown in column 8 of Table I, application no. 5, preferably the coding region thereof, particularly a homolog or functional equivalent as shown in column 8 of Table I B, application no. 5, and being depicted in the same respective line as said Yjr130c, and preferably the activity is increased non-targeted, or
[35131] (b) a polypeptide comprising a polypeptide, a consensus sequence or at least a polypeptide motif as shown in the respective line in column 5 of Table II or in column 8 of Table IV, application no. 5, respectively, and being depicted in the same respective line as said Yjr130c, or a functional equivalent or a homolog thereof as depicted in column 8 of Table II, application no. 5, preferably a homolog or functional equivalent as depicted in column 8 of Table II B, application no. 5, and being depicted in the same respective line as said Yjr130c, and preferably the activity is increased non-targeted.

[35132] Accordingly, in one embodiment, the molecule which activity is to be increased in the process of the invention is the gene product with an activity as a “cystathionine gamma-synthase”, preferably it is the molecule of section (a) or (b) of this paragraph.

[35133] In particular, it was observed that in plants, especially in Arabidopsis thaliana, increasing or generating the activity of a gene product non-targeted with the activity of a “cystathionine gamma-synthase”, preferably being encoded by a gene comprising the nucleic acid sequence SEQ ID NO. 14843, preferably the coding region thereof, conferred the production of or the increase in tryptophan compared with the wild type control.

[35134] The nucleic acid sequence of Yjr153w from Saccharomyces cerevisiae, e.g. as shown in the respective line in column 5 of Table I, application no. 5, has been published in A. And the activity of the gene product thereof is the activity of polygalacturonase.

[35135] Accordingly, in one embodiment, the process of the present invention for producing tryptophan in a non-human organism, like a microorganism or a plant or a part thereof, comprises increasing or generating the activity of a gene product with the activity of a gene product conferring the activity of “polygalacturonase”, especially from Saccharomyces cerevisiae or its functional equivalent or its homolog, e.g. the increase of
[35136] (a) a gene product of a gene comprising the nucleic acid molecule as shown in the respective line in column 5 of Table I, application no. 5, preferably the coding region thereof, or a homolog or a fragment thereof, and being depicted in the same respective line as said Yjr153w, or a functional equivalent or a homolog thereof as shown in column 8 of Table I, application no. 5, preferably the coding region thereof, particularly a homolog or functional equivalent as shown in column 8 of Table I B, application no. 5, and being depicted in the same respective line as said Yjr153w, and preferably the activity is increased non-targeted, or
[35137] (b) a polypeptide comprising a polypeptide, a consensus sequence or at least a polypeptide motif as shown in the respective line in column 5 of Table II or in column 8 of Table IV, application no. 5, respectively, and being depicted in the same respective line as said Yjr153w, or a functional equivalent or a homolog thereof as depicted in column 8 of Table II, application no. 5, preferably a homolog or functional equivalent as depicted in column 8 of Table II B, application no. 5, and being depicted in the same respective line as said Yjr153w, and preferably the activity is increased non-targeted.

[35138] Accordingly, in one embodiment, the molecule which activity is to be increased in the process of the invention is the gene product with an activity as a “polygalacturonase”, preferably it is the molecule of section (a) or (b) of this paragraph.

[35139] In particular, it was observed that in plants, especially in Arabidopsis thaliana, increasing or generating the activity of a gene product non-targeted with the activity of a “polygalacturonase”, preferably being encoded by a gene comprising the nucleic acid sequence SEQ ID NO. 66274, preferably the coding region thereof, conferred the production of or the increase in tryptophan compared with the wild type control.

[35140] The nucleic acid sequence of Ykr089c from Saccharomyces cerevisiae, e.g. as shown in the respective line in column 5 of Table I, application no. 5, has been published in A. And the activity of the gene product thereof is the activity of lipase.

[35141] Accordingly, in one embodiment, the process of the present invention for producing tryptophan in a non-human organism, like a microorganism or a plant or a part thereof, comprises increasing or generating the activity of a gene product with the activity of a gene product conferring the activity of “lipase”, especially from Saccharomyces cerevisiae or its functional equivalent or its homolog, e.g. the increase of
[35142] (a) a gene product of a gene comprising the nucleic acid molecule as shown in the respective line in column 5 of Table I, application no. 5, preferably the coding region thereof, or a homolog or a fragment thereof, and being depicted in the same respective line as said Ykr089c, or a functional equivalent or a homolog thereof as shown in column 8 of Table I, application no. 5, preferably the coding region thereof, particularly a homolog or functional equivalent as shown in column 8 of Table I B, application no. 5, and being depicted in the same respective line as said Ykr089c, and preferably the activity is increased mitochondrial, or
[35143] (b) a polypeptide comprising a polypeptide, a consensus sequence or at least a polypeptide motif as shown in the respective line in column 5 of Table II or in column 8 of Table IV, application no. 5, respectively, and being depicted in the same respective line as said Ykr089c, or a functional equivalent or a homolog thereof as depicted in column 8 of Table II, application no. 5, preferably a homolog or functional equivalent as depicted in column 8 of Table II B, application no. 5, and being depicted in the same respective line as said Ykr089c, and preferably the activity is increased mitochondrial.

[35144] Accordingly, in one embodiment, the molecule which activity is to be increased in the process of the invention is the gene product with an activity as a “lipase”, preferably it is the molecule of section (a) or (b) of this paragraph.

[35145] In particular, it was observed that in plants, especially in Arabidopsis thaliana, increasing or generating the activity of a gene product mitochondrial with the activity of a “lipase”, preferably being encoded by a gene comprising the nucleic acid sequence SEQ ID NO. 102061, preferably the coding region thereof, conferred the production of or the increase in tryptophan compared with the wild type control.

[35146] The nucleic acid sequence of Ynl101w from Saccharomyces cerevisiae, e.g. as shown in the respective line in column 5 of Table I, application no. 5, has been published in A. And the activity of the gene product thereof is the activity of amino acid transporter.

[35147] Accordingly, in one embodiment, the process of the present invention for producing tryptophan in a non-human organism, like a microorganism or a plant or a part thereof, comprises increasing or generating the activity of a gene product with the activity of a gene product conferring the activity of “amino acid transporter”, especially from Saccharomyces cerevisiae or its functional equivalent or its homolog, e.g. the increase of
[35148] (a) a gene product of a gene comprising the nucleic acid molecule as shown in the respective line in column 5 of Table I, application no. 5, preferably the coding region thereof, or a homolog or a fragment thereof, and being depicted in the same respective line as said Ynl101w, or a functional equivalent or a homolog thereof as shown in column 8 of Table I, application no. 5, preferably the coding region thereof, particularly a homolog or functional equivalent as shown in column 8 of Table I B, application no. 5, and being depicted in the same respective line as said Ynl101w, and preferably the activity is increased plastidic, or
[35149] (b) a polypeptide comprising a polypeptide, a consensus sequence or at least a polypeptide motif as shown in the respective line in column 5 of Table II or in column 8 of Table IV, application no. 5, respectively, and being depicted in the same respective line as said Ynl101w, or a functional equivalent or a homolog thereof as depicted in column 8 of Table II, application no. 5, preferably a homolog or functional equivalent as depicted in column 8 of Table II B, application no. 5, and being depicted in the same respective line as said Ynl101w, and preferably the activity is increased plastidic.

[35150] Accordingly, in one embodiment, the molecule which activity is to be increased in the process of the invention is the gene product with an activity as a “amino acid transporter”, preferably it is the molecule of section (a) or (b) of this paragraph.

[35151] In particular, it was observed that in plants, especially in Arabidopsis thaliana, increasing or generating the activity of a gene product plastidic with the activity of a “amino acid transporter”, preferably being encoded by a gene comprising the nucleic acid sequence SEQ ID NO. 92339, preferably the coding region thereof, conferred the production of or the increase in tryptophan compared with the wild type control.

[35152] The nucleic acid sequence of Yor244w from Saccharomyces cerevisiae, e.g. as shown in the respective line in column 5 of Table I, application no. 5, has been published in A. And the activity of the gene product thereof is the activity of histone acetyltransferase.

[35153] Accordingly, in one embodiment, the process of the present invention for producing tryptophan in a non-human organism, like a microorganism or a plant or a part thereof, comprises increasing or generating the activity of a gene product with the activity of a gene product conferring the activity of “histone acetyltransferase”, especially from Saccharomyces cerevisiae or its functional equivalent or its homolog, e.g. the increase of
[35154] (a) a gene product of a gene comprising the nucleic acid molecule as shown in the respective line in column 5 of Table I, application no. 5, preferably the coding region thereof, or a homolog or a fragment thereof, and being depicted in the same respective line as said Yor244w, or a functional equivalent or a homolog thereof as shown in column 8 of Table I, application no. 5, preferably the coding region thereof, particularly a homolog or functional equivalent as shown in column 8 of Table I B, application no. 5, and being depicted in the same respective line as said Yor244w, and preferably the activity is increased plastidic, or
[35155] (b) a polypeptide comprising a polypeptide, a consensus sequence or at least a polypeptide motif as shown in the respective line in column 5 of Table II or in column 8 of Table IV, application no. 5, respectively, and being depicted in the same respective line as said Yor244w, or a functional equivalent or a homolog thereof as depicted in column 8 of Table II, application no. 5, preferably a homolog or functional equivalent as depicted in column 8 of Table II B, application no. 5, and being depicted in the same respective line as said Yor244w, and preferably the activity is increased plastidic.

[35156] Accordingly, in one embodiment, the molecule which activity is to be increased in the process of the invention is the gene product with an activity as a “histone acetyltransferase”, preferably it is the molecule of section (a) or (b) of this paragraph.

[35157] In particular, it was observed that in plants, especially in Arabidopsis thaliana, increasing or generating the activity of a gene product plastidic with the activity of a “histone acetyltransferase”, preferably being encoded by a gene comprising the nucleic acid sequence SEQ ID NO. 92540, preferably the coding region thereof, conferred the production of or the increase in tryptophan compared with the wild type control.

[35158] The nucleic acid sequence of Ypl117c from Saccharomyces cerevisiae, e.g. as shown in the respective line in column 5 of Table I, application no. 5, has been published in A. And the activity of the gene product thereof is the activity of isopentenyl diphosphate isomerase.

[35159] Accordingly, in one embodiment, the process of the present invention for producing tryptophan in a non-human organism, like a microorganism or a plant or a part thereof, comprises increasing or generating the activity of a gene product with the activity of a gene product conferring the activity of “isopentenyl diphosphate isomerase”, especially from Saccharomyces cerevisiae or its functional equivalent or its homolog, e.g. the increase of
[35160] (a) a gene product of a gene comprising the nucleic acid molecule as shown in the respective line in column 5 of Table I, application no. 5, preferably the coding region thereof, or a homolog or a fragment thereof, and being depicted in the same respective line as said Ypl117c, or a functional equivalent or a homolog thereof as shown in column 8 of Table I, application no. 5, preferably the coding region thereof, particularly a homolog or functional equivalent as shown in column 8 of Table I B, application no. 5, and being depicted in the same respective line as said Ypl117c, and preferably the activity is increased plastidic, or
[35161] (b) a polypeptide comprising a polypeptide, a consensus sequence or at least a polypeptide motif as shown in the respective line in column 5 of Table II or in column 8 of Table IV, application no. 5, respectively, and being depicted in the same respective line as said Ypl117c, or a functional equivalent or a homolog thereof as depicted in column 8 of Table II, application no. 5, preferably a homolog or functional equivalent as depicted in column 8 of Table II B, application no. 5, and being depicted in the same respective line as said Ypl117c, and preferably the activity is increased plastidic.

[35162] Accordingly, in one embodiment, the molecule which activity is to be increased in the process of the invention is the gene product with an activity as a “isopentenyl diphosphate isomerase”, preferably it is the molecule of section (a) or (b) of this paragraph.

[35163] In particular, it was observed that in plants, especially in Arabidopsis thaliana, increasing or generating the activity of a gene product plastidic with the activity of a “isopentenyl diphosphate isomerase”, preferably being encoded by a gene comprising the nucleic acid sequence SEQ ID NO. 67998, preferably the coding region thereof, conferred the production of or the increase in tryptophan compared with the wild type control.

[35164] The nucleic acid sequence of Ypr119w from Saccharomyces cerevisiae, e.g. as shown in the respective line in column 5 of Table I, application no. 5, has been published in A. And the activity of the gene product thereof is the activity of cyclin.

[35165] Accordingly, in one embodiment, the process of the present invention for producing tryptophan in a non-human organism, like a microorganism or a plant or a part thereof, comprises increasing or generating the activity of a gene product with the activity of a gene product conferring the activity of “cyclin”, especially from Saccharomyces cerevisiae or its functional equivalent or its homolog, e.g. the increase of
[35166] (a) a gene product of a gene comprising the nucleic acid molecule as shown in the respective line in column 5 of Table I, application no. 5, preferably the coding region thereof, or a homolog or a fragment thereof, and being depicted in the same respective line as said Ypr119w, or a functional equivalent or a homolog thereof as shown in column 8 of Table I, application no. 5, preferably the coding region thereof, particularly a homolog or functional equivalent as shown in column 8 of Table I B, application no. 5, and being depicted in the same respective line as said Ypr119w, and preferably the activity is increased non-targeted, or
[35167] (b) a polypeptide comprising a polypeptide, a consensus sequence or at least a polypeptide motif as shown in the respective line in column 5 of Table II or in column 8 of Table IV, application no. 5, respectively, and being depicted in the same respective line as said Ypr119w, or a functional equivalent or a homolog thereof as depicted in column 8 of Table II, application no. 5, preferably a homolog or functional equivalent as depicted in column 8 of Table II B, application no. 5, and being depicted in the same respective line as said Ypr119w, and preferably the activity is increased non-targeted.

[35168] Accordingly, in one embodiment, the molecule which activity is to be increased in the process of the invention is the gene product with an activity as a “cyclin”, preferably it is the molecule of section (a) or (b) of this paragraph.

[35169] In particular, it was observed that in plants, especially in Arabidopsis thaliana, increasing or generating the activity of a gene product non-targeted with the activity of a “cyclin”, preferably being encoded by a gene comprising the nucleic acid sequence SEQ ID NO. 98445, preferably the coding region thereof, conferred the production of or the increase in tryptophan compared with the wild type control.

[35170] The nucleic acid sequence of Zm_{—}4842_BE510522 from Zea mays, e.g. as shown in the respective line in column 5 of Table I, application no. 5, is unpublished. And the activity of the gene product thereof is the activity of Zm_{—}4842_BE510522-protein.

[35171] Accordingly, in one embodiment, the process of the present invention for producing tryptophan in a non-human organism, like a microorganism or a plant or a part thereof, comprises increasing or generating the activity of a gene product with the activity of a gene product conferring the activity of “Zm_{—}4842_BE510522-protein”, especially from Zea mays or its functional equivalent or its homolog, e.g. the increase of
[35172] (a) a gene product of a gene comprising the nucleic acid molecule as shown in the respective line in column 5 of Table I, application no. 5, preferably the coding region thereof, or a homolog or a fragment thereof, and being depicted in the same respective line as said Zm_{—}4842_BE510522, or a functional equivalent or a homolog thereof as shown in column 8 of Table I, application no. 5, preferably the coding region thereof, particularly a homolog or functional equivalent as shown in column 8 of Table I B, application no. 5, and being depicted in the same respective line as said Zm_{—}4842_BE510522, and preferably the activity is increased non-targeted, or
[35173] (b) a polypeptide comprising a polypeptide, a consensus sequence or at least a polypeptide motif as shown in the respective line in column 5 of Table II or in column 8 of Table IV, application no. 5, respectively, and being depicted in the same respective line as said Zm_{—}4842_BE510522, or a functional equivalent or a homolog thereof as depicted in column 8 of Table II, application no. 5, preferably a homolog or functional equivalent as depicted in column 8 of Table II B, application no. 5, and being depicted in the same respective line as said Zm_{—}4842_BE510522, and preferably the activity is increased non-targeted.

[35174] Accordingly, in one embodiment, the molecule which activity is to be increased in the process of the invention is the gene product with an activity as a “Zm_{—}4842_BE510522-protein”, preferably it is the molecule of section (a) or (b) of this paragraph.

[35175] In particular, it was observed that in plants, especially in Arabidopsis thaliana, increasing or generating the activity of a gene product non-targeted with the activity of a “Zm_{—}4842_BE510522-protein”, preferably being encoded by a gene comprising the nucleic acid sequence SEQ ID NO. 68413, preferably the coding region thereof, conferred the production of or the increase in tryptophan compared with the wild type control.

[35176] [0105.1.1.5] to [0107.1.1.5] for the disclosure of these paragraphs see [0105.1.1.1] to [0107.1.1.1] above.

[35177] A protein having an activity conferring an increase in the amount or level of the fine chemical tryptophan, upon targeting to the plastids or mitochondria or upon non-targeting, preferably has the structure of the respective polypeptide described herein, in particular of the polypeptides comprising the consensus sequence or at least one polypeptide motifs as shown in the respective line in Table IV, application no. 5, column 8 or of the polypeptide comprising an amino acid sequence as disclosed in the respective line in Table II, application no. 5, columns 5 or 8, or homologs or fragments thereof as described herein, or is encoded by the nucleic acid molecule characterized herein or the nucleic acid molecule according to the invention, for example by the nucleic acid molecule as shown in the respective line in Table I, application no. 5, columns 5 or 8, preferably the coding region thereof, or homologs or fragments thereof and has the herein mentioned activity.

[35178] [0109.1.1.5] to [0110.1.1.5] for the disclosure of these paragraphs see [0109.1.1.1] to [0110.1.1.1] above.

[35179] In one embodiment, the process of the present invention comprises one or more of the following steps
[35180] (a) stabilizing a protein conferring the generation or increased expression of a protein encoded by the nucleic acid molecule of the invention or of the polypeptide of the invention, e.g. of a polypeptide having the activity selected from the group consisting of 3-deoxy-7-phosphoheptulonate synthase, 3-ketoacyl-CoA thiolase, acetyltransferase, aldehyde dehydrogenase, amino acid transporter, aromatic amino acid aminotransferase, At1g19800 protein, At2g33510-protein, At4g32480-protein, At5g16650-protein, at5g21910-protein, ATP synthase subunit E, ATP-binding component of a transport system, auxin response factor, b1163-protein, b1346-protein, b1522-protein, b1796-protein, b2739-protein, b2849-protein, b3989-protein, b4029-protein, b4121-protein, binding-protein-dependent transport systems inner membrane component, branched-chain amino acid permease, calcium-dependent protein kinase, carbon dioxide concentrating mechanism protein, cardiolipin synthase, CBL-interacting protein kinase, Chaperone protein CIpB, choline kinase, coproporphyrinogen III oxidase, cullin, cyclin, cyclin D , cystathionine gammasynthase, DNA mismatch repair protein, electron transfer flavoprotein subunit beta, elongation factor Tu, enoyl-CoA hydratase, eukaryotic translation initiation factor, eukaryotic translation initiation factor 5, fimbrial-like protein, flavodoxin, geranylgeranyl pyrophosphate synthase, gibberellin 20-oxidase, glucose dehydrogenase, glucose-6-phosphate 1-dehydrogenase, glutamate-ammonia-ligase, glutamine synthetase, glutaredoxin, glycerol kinase, glycosyl transferase, harpin-induced family protein, histone acetyltransferase, hydrolase, imidazole glycerol phosphate synthase subunit, isochorismate synthase, isopentenyl diphosphate isomerase, Leucyl/phenylalanyl-tRNA-protein transferase, lipase, L-ribulose-5-phosphate 4-epimerase, malate dehydrogenase, malic enzyme, methylaccepting chemotaxis protein, methyltransferase, monthiol glutaredoxin, NAD(P)H-quinone oxidoreductase subunit, nitrate/nitrite transport protein, photosystem II protein, polygalacturonase, precorrin methylase, protein kinase, protein phosphatase, putative transport system permease protein, pyruvate kinase, recombinase A, RNA binding protein, RNA-binding protein, Sec-independent protein translocase subunit, short-chain alcohol dehydrogenase family, slr1107-protein, threonine synthase, transaldolase, transcription factor, transcriptional regulator, transport protein, trehalose-phosphatase, tryptophan biosynthesis protein, yfl054c-protein, and Zm_{—}4842_BE510522-protein, or of a polypeptide as indicated in the respective line in Table II, application no. 5, columns 5 or 8, or its homologs or fragments, and conferring the production of or an increase in tryptophan, respectively; and/or
[35181] (b) stabilizing a mRNA conferring the generation or increased expression of a FCRP, e.g. protein encoded by the nucleic acid molecule of the invention or its homologs or fragments, or of a mRNA encoding the polypeptide of the present invention having the hereinmentioned activity selected from the group consisting of said activities mentioned in (a) and conferring the production of or an increase in tryptophan, respectively; and/or
[35182] (c) increasing the specific activity of a protein conferring the increased expression of a FCRP, e.g. a protein encoded by the nucleic acid molecule of the invention or of the polypeptide of the present invention having herein-mentioned tryptophan generating or increasing activity, respectively, e.g. of a polypeptide having the activity of a protein as indicated in the respective line in Table II, application no. 5, columns 5 or 8, or its homologs or fragments, or decreasing the inhibitory regulation of the polypeptide of the invention; and/or
[35183] (d) generating or increasing the expression of an endogenous or artificial transcription factor mediating the expression of a protein conferring the generation or increased expression of a FCRP, e.g. a protein encoded by the nucleic acid molecule of the invention or of the polypeptide of the invention having herein-mentioned activity selected from the group consisting of said activities mentioned in (a) and conferring a tryptophan increasing activity, respectively, e.g. of a polypeptide having the activity of a protein as indicated in the respective line in Table II, application no. 5, columns 5 or 8 or its homologs; and/or
[35184] (e) stimulating activity of a protein conferring the increased expression of a FCRP, e.g. a protein encoded by the nucleic acid molecule of the present invention or a polypeptide of the present invention having herein-mentioned activity selected from the group consisting of said activities mentioned in (a) and conferring a tryptophan increasing activity, respectively, e.g. of a polypeptide having the activity of a protein as indicated in the respective line in Table II, application no. 5, columns 5 or 8, or its homologs or fragments, by adding one or more exogenous inducing factors to the non-human organism or parts thereof; and/or
[35185] (f) expressing a transgenic gene encoding a protein conferring the increased expression of a FCRP, e.g. a polypeptide encoded by the nucleic acid molecule of the present invention or a polypeptide of the present invention, having herein-mentioned activity selected from the group consisting of said activities mentioned in (a) and conferring a tryptophan increasing activity, respectively, e.g. of a polypeptide having the activity of a protein as indicated in the respective line in Table II, application no. 5, columns 5 or 8, or its homologs or fragments, and/or
[35186] (g) increasing the copy number of a gene conferring the increased expression of a nucleic acid molecule encoding a FCRP, e.g. a polypeptide encoded by the nucleic acid molecule of the invention or the polypeptide of the invention having herein-mentioned activity selected from the group consisting of said activities mentioned in (a) and conferring a tryptophan increasing activity, respectively, e.g. of a polypeptide having the activity of a protein as indicated in the respective line in Table II, application no. 5, columns 5 or 8, or its homologs or fragments; and/or
[35187] (h) increasing the expression of the endogenous gene encoding the FCRP, polypeptide of the invention, e.g. a polypeptide encoded by the nucleic acid molecule of the invention or the polypeptide of the invention having herein-mentioned activity selected from the group consisting of said activities mentioned in (a) and conferring a tryptophan; increasing activity, respectively, e.g. of a polypeptide having the activity of a protein as indicated in the respective line in Table II, application no. 5, columns 5 or 8, or its homologs or fragments, by adding positive expression or removing negative expression elements, e.g. homologous recombination can be used to either introduce positive regulatory elements like for plants the 35S enhancer into the promoter or to remove repressor elements form regulatory regions. Further gene conversion methods can be used to disrupt repressor elements or to enhance to activity of positive elements. Positive elements can be randomly introduced in plants by T-DNA or transposon mutagenesis and lines can be identified in which the positive elements have be integrated near to a gene of the invention, the expression of which is thereby enhanced; and/or
[35188] (i) modulating growth conditions of the non-human organism in such a manner, that the expression or activity of the gene encoding the FCRP, e.g. a protein of the invention or the protein itself is enhanced, for example microorganisms or plants can be grown for example under a higher temperature regime leading to an enhanced expression of heat shock proteins, which can lead to an enhanced tryptophan production, respectively; and/or
[35189] (j) selecting of non-human organisms with especially high activity of the proteins of the invention from natural or from mutagenized resources and breeding them into the target organisms, e.g. the elite crops; and/or
[35190] (k) directing a protein encoded by the nucleic acid molecule of the invention or of the polypeptide of the present invention having herein-mentioned activity selected from the group consisting of said activities mentioned in (a) and conferring a tryptophan increasing activity, respectively, e.g. of a polypeptide having the activity of a protein as indicated in the respective line in Table II, application no. 5, columns 5 or 8, or its homologs or fragments, if for the corresponding nucleic acid molecule in the respective line in column 6 of Table I the term “plastidic” is indicated, to the plastids by the addition of a plastidial targeting sequence or if for the corresponding nucleic acid molecule in the respective line in column 6 of Table I the term “mitochondrial” is indicated, to the mitochondria by the addition of a mitochondrial targeting sequence; and/or
[35191] (l) generating the expression of a protein encoded by the nucleic acid molecule of the invention or of the polypeptide of the present invention having herein-mentioned activity selected from the group consisting of said activities mentioned in (a) and conferring a tryptophan increasing activity, respectively, e.g. of a polypeptide having the activity of a protein as indicated in the respective line in Table II, application no. 5, columns 5 or 8, or its homologs or fragments, if for the corresponding nucleic acid molecule in the respective line in column 6 of Table I the term “plastidic” or “mitochondrial” is indicated, in these organelles by the stable or transient transformation, advantageously stable transformation, of organelles, preferably plastids or mitochondria, with an inventive nucleic acid sequence preferably in form of an expression cassette containing said sequence leading to the expression of the nucleic acids or polypeptides of the invention in the respective organelle; and/or
[35192] (m) generating the expression of a protein encoded by the nucleic acid molecule of the invention or of the polypeptide of the present invention having herein-mentioned activity selected from the group consisting of said activities mentioned in (a) and conferring a tryptophan increasing activity, respectively, e.g. of a polypeptide having the activity of a protein as indicated in the respective line in Table II, application no. 5, columns 5 or 8, or its homologs or fragments, if for the corresponding nucleic acid molecule in the respective line in column 6 of Table I the term “plastidic” or “mitochondrial” is indicated, in these organelles by integration of a nucleic acid of the invention into the genome of the respective organelle under control of preferable a promoter selective for the respective organelle.

[35193] Preferably, said mRNA is the coding region of the nucleic acid molecule of the present invention and/or the protein conferring the increased expression of a protein encoded by the coding region of the nucleic acid molecule of the present invention alone or linked to a transit nucleic acid sequence or transit peptide encoding nucleic acid sequence or the polypeptide having the herein mentioned activity, e.g. conferring the generation of or increase of tryptophan, respectively, after increasing the expression or activity of the encoded polypeptide, non-targeted or in organelles such as plastids and/or mitochondria, preferably plastids, or having the activity of a polypeptide having an activity as the protein as shown in the respective line in Table II, application no. 5, column 3, or its homologs. Preferably the increase of tryptophan, respectively, takes place non-targeted or in plastids and/or mitochondria, preferably non-targeted or in plastids.

[35194] [0113.1.1.5] to [0122.1.1.5] for the disclosure of these paragraphs see [0113.1.1.1] to [0122.1.1.1] above.

[35195] The activation of an endogenous polypeptide having above-mentioned activity, e.g. having the activity of a protein as shown in the respective line in Table II, application no. 5, column 3 or of the polypeptide of the invention, e.g. conferring the increase of the fine chemical tryptophan, respectively, by increase of expression or activity in the cytoplasm, and/or in the cytosol, and/or in an organelle, such as plastids or mitochondria, can also be increased by introducing a synthetic transcription factor, which binds close to the coding region of the gene encoding the protein as shown in the respective line in Table II, application no. 5, column 5 or 8, or homologs or fragments thereof, and activates its transcription. A chimeric zinc finger protein can be constructed, which comprises a specific DNA-binding domain and an activation domain as e.g. the VP16 domain of Herpes Simplex virus. The specific binding domain can bind to the regulatory region of the gene encoding the protein as shown in the respective line in Table II, application no. 5, column 5 or 8, or homologs or fragments thereof. The expression of the chimeric transcription factor in a non-human organism, in particular in a plant, leads to a specific expression of the protein as shown in the respective line in Table II, application no. 5, column 5 or 8, or homologs or fragments thereof, see e.g. in WO01/52620, Oriz, Proc. Natl. Acad. Sci. USA 99, 13290 (2002), or Guan, Proc. Natl. Acad. Sci. USA 99, 13296 (2002).

[35196] [0124.1.1.5] to [0127.1.1.5] for the disclosure of these paragraphs see [0124.1.1.1] to [0127.1.1.1] above.

[35197] Owing to the introduction of a gene or a plurality of genes conferring the expression of the nucleic acid molecule of the invention or the polypeptide of the invention, for example the nucleic acid construct mentioned below, or encoding the protein as shown in the respective line in Table II, application no. 5, column 5 or 8, or homologs or fragments thereof, into a non-human organism alone or in combination with other genes, it is possible not only to increase the biosynthetic flux towards the end product, but also to increase, modify or create de novo an advantageous, preferably novel metabolites composition in the non-human organism, e.g. an advantageous composition comprising a higher content of (from a viewpoint of nutritional physiology limited) tryptophan and if desired other amino acids, and/or other metabolites, in free or bound form.

[35198] for the disclosure of this paragraph see [0129.1.1.1] above [0130.1.5.5]

[35199] Accordingly, in one embodiment, the process according to the invention relates to a process, which comprises:
[35200] (a) providing a non-human organism, preferably a microorganism, a plant cell, a plant tissue, a plant or a part thereof, more preferably a microorganism, a plant tissue, a plant or a part thereof;
[35201] (b) increasing the activity of a protein as shown in the respective line in Table II, application no. 5, column 3 or of a polypeptide being encoded by the respective nucleic acid molecule of the present invention and described below, e.g. conferring an increase of the fine chemical tryptophan, respectively, in the non-human organism, preferably in the microorganism, the plant cell, the plant tissue, the plant or a part thereof, more preferably a microorganism, a plant tissue, a plant or a part thereof, especially cytoplasmic or in an organelle, like plastids or mitochondria,
[35202] (c) growing the non-human organism, preferably the microorganism, the plant cell, the plant tissue, the plant or a part thereof, under conditions which permit the production of said fine chemical in the non-human organism, preferably the microorganism, the plant cell, the plant tissue, the plant or a part thereof; and
[35203] (d) if desired, recovering, optionally isolating, said fine chemical, in free and/or bound form, and, optionally further free and/or bound amino acids, and/or other metabolites synthesized by the non-human organism, the microorganism, the plant cell, the plant tissue, the plant or a part thereof.

[35204] [0131.1.1.5] to [0139.1.1.5] for the disclosure of these paragraphs see [0131.1.1.1] to [0139.1.1.1] above.

[35205] In another embodiment, the invention relates to a (isolated) nucleic acid molecule, which comprises a nucleic acid molecule selected from the group consisting of:
[35206] (a) a nucleic acid molecule encoding a polypeptide shown in Table II, application no. 5, column 5 or 8, preferably shown in Table II B, application no. 5, column 8, or a homolog or a fragment thereof;
[35207] (b) a nucleic acid molecule shown in Table I, application no. 5, column 5 or 8, preferably shown in Table I B, application no. 5, column 8, preferably the coding region thereof, or a homolog or a fragment thereof;
[35208] (c) a nucleic acid molecule, which, as a result of the degeneracy of the genetic code, can be derived from a polypeptide sequence depicted in column 5 or 8 of Table II, application no. 5, preferably in column 8 of Table II B, application no. 5;
[35209] (d) a nucleic acid molecule having at least 30% identity, preferably at least 40%, 50%, 60%, 70%, 75%, 80%, 85%, 90%, 95%, 96%, 97%, 98%, 99%, 99.5%, with the nucleic acid molecule sequence of a polynucleotide comprising the nucleic acid molecule shown in column 5 or 8 of Table I, application no. 5, preferably shown in column 8 of Table I B, application no. 5, preferably the coding region thereof;
[35210] (e) a nucleic acid molecule encoding a polypeptide having at least 30% identity, preferably at least 40%, 50% 60%, 70%, 75%, 80%, 85%, 90%, 95%, 96%, 97%, 98%, 99%, 99.5%, identity with the amino acid sequence of the polypeptide encoded by the nucleic acid molecule of (a), (b), (c) or (d);
[35211] (f) a nucleic acid molecule which hybridizes with a nucleic acid molecule of (a), (b), (c), (d) or (e) under stringent hybridization conditions;
[35212] (g) a nucleic acid molecule encoding a polypeptide which can be isolated with the aid of monoclonal or polyclonal antibodies made against a polypeptide encoded by one of the nucleic acid molecules of (a), (b), (c), (d), (e) or (f);
[35213] (h) a nucleic acid molecule encoding a polypeptide comprising the consensus sequence or one or more polypeptide motifs as shown in column 8 of Table IV, application no. 5;
[35214] (i) a nucleic acid molecule encoding a polypeptide having the activity represented by a respective protein as depicted in column 5 of Table II, application no. 5;
[35215] (j) a nucleic acid molecule comprising a polynucleotide which is obtained by amplifying a cDNA library or a genomic library using the primers in Table III, application no. 5, column 8;
[35216] and
[35217] (k) nucleic acid molecule which is obtainable by screening a suitable nucleic acid library, especially a cDNA library and/or a genomic library, under stringent hybridization conditions with a probe comprising one of the sequences of the nucleic acid molecule of (a), (b), (c), (d), (e), (f), (g), (h), (i) or (j) or with a fragment of at least 15 nt, preferably 20 nt, 30 nt, 50 nt, 100 nt, 200 nt,500 nt, 1000 nt, 1500 nt, 2000 nt or 3000 nt of the nucleic acid molecule characterized in (a), (b), (c), (d), (e), (f), (g), (h), (i) or (j);
[35218] or a nucleic acid molecule comprising a sequence which is complementary thereto.
   (All the references to Tables I to IV are references to the corresponding lines of Tables I to IV.)

[35219] In a preferred embodiment thereof said nucleic acid molecule according to (a), (b), (c), (d), (e), (f), (g), (h), (i), (j) or (k) encodes a polypeptide which has the activity of the respective polypeptide represented by a protein comprising a polypeptide as depicted in the respective line in column 5 of Table II, application no. 5.

[35220] In another preferred embodiment thereof said nucleic acid molecule according to (a), (b), (c), (d), (e), (f), (g), (h), (i), (j) or (k) confers a generation or an increase of the respective fine chemical in a non-human organism or a part thereof as compared to a corresponding wild-type non-human organism or part thereof.

[35221] In another preferred embodiment thereof said nucleic acid molecule according to (a), (b), (c), (d), (e), (f), (g), (h), (i), (j) or (k) encodes a polypeptide which has the activity of the respective polypeptide represented by a protein as depicted in the respective line in column 5 of Table II application no. 5 and confers a generation or an increase of the respective fine chemical in a non-human organism or a part thereof as compared to a corresponding wild-type non-human organism or part thereof.

[35222] In another embodiment, the invention relates to a (isolated) nucleic acid molecule, which comprises a nucleic acid molecule selected from the group consisting of:
[35223] (a) a nucleic acid molecule encoding a polypeptide shown in Table II, column 5 or 8, application no. 5, preferably shown in Table II A, application no. 5, in column 5 or in Table II A, application no. 5, column 8 or in Table II B, application no. 5, column 8, or a homolog or a fragment thereof;
[35224] (b) a nucleic acid molecule shown in Table I, application no. 5, column 5 or 8, preferably shown in Table I A, application no. 5, in column 5 or in Table I A, application no. 5, column 8 or in Table I B, application no. 5, column 8, preferably the coding region thereof, or a homolog or a fragment thereof;
[35225] (c) a nucleic acid molecule, which, as a result of the degeneracy of the genetic code, can be derived from a polypeptide sequence depicted in column 5 or 8 of Table II, application no. 5, preferably shown in Table II A, application no. 5, in column 5 or in Table II A, application no. 5, column 8 or in Table II B, application no. 5, column 8;
[35226] (d) a nucleic acid molecule having at least 30% identity, preferably at least 40%, 50%, 60%, 70%, 75%, 80%, 85%, 90%, 95%, 96%, 97%, 98%, 99%, 99.5%, with the nucleic acid molecule sequence of a polynucleotide comprising the nucleic acid molecule shown in column 5 or 8 of Table I, application no. 5, preferably shown in Table I A, application no. 5, in column 5 or in Table I A, application no. 5, column 8 or in Table I B column 8, preferably the coding region thereof;
[35227] (e) a nucleic acid molecule encoding a polypeptide having at least 30% identity, preferably at least 40%, 50% 60%, 70%, 75%, 80%, 85%, 90%, 95%, 96%, 97%, 98%, 99%, 99.5%, identity with the amino acid sequence of the polypeptide encoded by the nucleic acid molecule of (a), (b), (c) or (d);
[35228] (f) a nucleic acid molecule which hybridizes with a nucleic acid molecule of (a), (b), (c), (d) or (e) under stringent hybridization conditions;
[35229] (g) a nucleic acid molecule encoding a polypeptide which can be isolated with the aid of monoclonal or polyclonal antibodies made against a polypeptide encoded by one of the nucleic acid molecules of (a), (b), (c), (d), (e) or (f);
[35230] (h) a nucleic acid molecule encoding a polypeptide comprising the consensus sequence or one or more polypeptide motifs as shown in column 8 of Table IV, application no. 5;
[35231] (i) a nucleic acid molecule encoding a polypeptide having the activity represented by a respective protein as depicted in column 5 of Table II, application no. 5;
[35232] (j) a nucleic acid molecule comprising a polynucleotide which is obtained by amplifying a cDNA library or a genomic library using the primers in Table III, application no. 5, column 8;
[35233] and
[35234] (k) nucleic acid molecule which is obtainable by screening a suitable nucleic acid library, especially a cDNA library and/or a genomic library, under stringent hybridization conditions with a probe comprising one of the sequences of the nucleic acid molecule of (a), (b), (c), (d), (e), (f), (g), (h), (i) or (j) or with a fragment thereof having at least 15 nt, preferably 20 nt, 30 nt, 50 nt, 100 nt, 200 nt,500 nt, 1000 nt, 1500 nt, 2000 nt or 3000 nt of the nucleic acid molecule complementary to a nucleic acid sequence characterized in (a), (b), (c), (d), (e), (f), (g), (h), (i) or (j);
[35235] or a nucleic acid molecule comprising a sequence which is complementary thereto;
   whereby, preferably, the nucleic acid molecule according to (a), (b), (c), (d), (e), (f), (g), (h), (i), (j) or (k) distinguishes over the sequence depicted in Table I A and/or I B, application no. 5, column 5 or 8, or the coding regions thereof, by one or more nucleotides (especially but not exceeding 5%, preferably 4%, 3%, 2%, 1%, 0.5%, 0.2% or 0.1%). In an embodiment, the nucleic acid molecule of the invention does not consist of the sequence shown in Table I A and/or I B, application no. 5, column 5 or 8, or the coding region thereof. In another embodiment, the nucleic acid molecule of the present invention, preferably the coding region thereof, is at least 30%, 40%, 50%, 60%, 70%, 80%, 90%, 95% identical but less than 100%, 99.999%, 99.99%, 99.9%, 99%, 98%, 97%, 96% or 95% identical to the sequence shown in Table I A and/or I B, application no. 5, column 5 or 8, or the coding region thereof, respectively. In a further embodiment the nucleic acid molecule does not encode the polypeptide sequence shown in Table II A and/or II B, application no. 5, column 5 or 8 but homologs thereof. Accordingly, in one embodiment, the nucleic acid molecule of the present invention encodes in one embodiment a polypeptide which differs at least in one or more amino acids (especially but not exceeding 5%, preferably 4%, 3%, 2%, 1%, 0.5%, 0.2% or 0.1%) from the polypeptide shown in Table II, application no. 5, column 5 or 8 and does not encode a protein of the sequence shown in Table II A and/or II B, application no. 5, column 5 or 8. Accordingly, in one embodiment, the protein encoded by a sequence of a nucleic acid according to (a), (b), (c), (d), (e), (f), (g), (h), (i), (j) or (k) does not consist of the sequence shown in Table I A and/or I B, application no. 5, column 5 or 8, or the coding region thereof. In a further embodiment, the protein of the present invention is at least 30%, 40%, 50%, 60%, 70%, 80%, 90%, 95% identical to protein sequence depicted in Table II A and/or II B, application no. 5, column 5 or 8 but less than 100%, preferably less than 99.999%, 99.99%, 99.9%, 99%, 98%, 97%, 96% or 95% identical to the sequence shown in Table II A and/or II B, application no. 5, column 5 or 8.
   (All the references to Tables I to IV are references to the corresponding lines of Tables I to IV.)

[35236] In a preferred embodiment thereof said nucleic acid molecule according to (a), (b), (c), (d), (e), (f), (g), (h), (i), (j) or (k) encodes a polypeptide which has the activity of the respective polypeptide represented by a protein comprising a polypeptide as depicted in the respective line in column 5 of Table II, application no. 5.

[35237] In another preferred embodiment thereof said nucleic acid molecule according to (a), (b), (c), (d), (e), (f), (g), (h), (i), (j) or (k) confers a generation or an increase of the respective fine chemical in a non-human organism or a part thereof as compared to a corresponding wild-type non-human organism or part thereof.

[35238] In another preferred embodiment thereof said nucleic acid molecule according to (a), (b), (c), (d), (e), (f), (g), (h), (i), (j) or (k) encodes a polypeptide which has the activity of the respective polypeptide represented by a protein as depicted in the respective line in column 5 of Table II, application no. 5, and confers a generation or an increase of the respective fine chemical in a non-human organism or a part thereof as compared to a corresponding wild-type non-human organism or part thereof.

[35239] [0144.1.1.5] to [0155.1.1.5] for the disclosure of these paragraphs see [0144.1.1.1] to [0155.1.1.1] above.

[35240] In a preferred embodiment a nucleic acid construct, for example an expression cassette, comprises upstream, i.e. at the 5′ end of the encoding sequence, a promoter and downstream, i.e. at the 3′ end, a polyadenylation signal and optionally other regulatory elements which are operably linked to the intervening encoding sequence with one of the nucleic acids as depicted in the respective line in Table I, application no. 5, column 5 or 8, preferably the coding region thereof, or a homolog or a fragment thereof. By an operable linkage is meant the sequential arrangement of promoter, encoding sequence, terminator, optionally other regulatory elements and optionally targeting sequences in such a way that each of the regulatory elements/targeting sequence can fulfill its function in the expression of the encoding sequence in due manner. In one embodiment the sequences preferred for operable linkage are targeting sequences for ensuring subcellular localization in organelles, like plastids or mitochondria. However, targeting sequences for ensuring subcellular localization in the endoplasmic reticulum (=ER), in the nucleus, in oil corpuscles or other compartments may also be employed as well as translation promoters such as the 5′ lead sequence in tobacco mosaic virus (Gallie et al., Nucl. Acids Res. 15, 8693 (1987)).

[35241] for the disclosure of this paragraph see [0157.1.1.1] above [0158.1.5.5] In an embodiment, the invention relates to an expression cassette, comprising
[35242] 1) a promoter, preferably a promoter selected from the group consisting of Big35S, PCUbi, Super and USP;
[35243] 2) a nucleic acid molecule selected from the group consisting of
   [35244] (a) a nucleic acid molecule encoding a polypeptide shown in Table II, application no. 5, column 5 or 8, preferably shown in Table II A, application no. 5, column 5, or in Table II A, application no. 5, column 8, or in Table II B, application no. 5, column 8, or a homolog or a fragment thereof;
   [35245] (b) a nucleic acid molecule shown in Table I, application no. 5, column 5 or 8, preferably shown in Table I A, application no. 5, column 5, or in Table I A, application no. 5, column 8, or in Table I B, application no. 5, column 8, preferably the coding region thereof, or a homolog or a fragment thereof;
   [35246] (c) a nucleic acid molecule, which, as a result of the degeneracy of the genetic code, can be derived from a polypeptide sequence depicted in column 5 or 8 of Table II, application no. 5, preferably shown in Table II A, application no. 5, column 5, or in Table II A, application no. 5, column 8, or in Table II B, application no. 5, column 8;
   [35247] (d) a nucleic acid molecule having at least 30% identity, preferably at least 40%, 50%, 60%, 70%, 75%, 80%, 85%, 90%, 95%, 96%, 97%, 98%, 99%, 99.5%, with the nucleic acid molecule sequence of a polynucleotide comprising the nucleic acid molecule shown in column 5 or 8 of Table I, application no. 5, preferably shown in Table I A, application no. 5, column 5, or in Table I A, application no. 5, column 8, or in Table I B, application no. 5, column 8, preferably the coding region thereof;
   [35248] (e) a nucleic acid molecule encoding a polypeptide having at least 30% identity, preferably at least 40%, 50% 60%, 70%, 75%, 80%, 85%, 90%, 95%, 96%, 97%, 98%, 99%, 99.5%, identity with the amino acid sequence of the polypeptide encoded by the nucleic acid molecule of (a), (b), (c) or (d);
   [35249] (f) a nucleic acid molecule which hybridizes with a nucleic acid molecule of (a), (b), (c), (d) or (e) under stringent hybridization conditions;
   [35250] (g) a nucleic acid molecule encoding a polypeptide which can be isolated with the aid of monoclonal or polyclonal antibodies made against a polypeptide encoded by one of the nucleic acid molecules of (a), (b), (c), (d), (e) or (f);
   [35251] (h) a nucleic acid molecule encoding a polypeptide comprising the consensus sequence or one or more polypeptide motifs as shown in column 8 of Table IV, application no. 5;
   [35252] (i) a nucleic acid molecule encoding a polypeptide having the activity represented by a respective protein as depicted in column 5 of Table II, application no. 5;
   [35253] (j) a nucleic acid molecule comprising a polynucleotide which is obtained by amplifying a cDNA library or a genomic library using the primers in Table III, application no. 5, column 8;
   [35254] and
   [35255] (k) nucleic acid molecule which is obtainable by screening a suitable nucleic acid library, especially a cDNA library and/or a genomic library, under stringent hybridization conditions with a probe comprising one of the sequences of the nucleic acid molecule of (a), (b), (c), (d), (e), (f), (g), (h), (i) or (j) or with a fragment of at least 15 nt, preferably 20 nt, 30 nt, 50 nt, 100 nt, 200 nt,500 nt, 1000 nt, 1500 nt, 2000 nt or 3000 nt of the nucleic acid molecule characterized in (a), (b), (c), (d), (e), (f), (g), (h), (i) or (j);
   [35256] or a nucleic acid molecule comprising a sequence which is complementary thereto.
      and, optionally
[35257] 3) nucleic acid molecule encoding a transit peptide, preferably encoding a plastidal transit peptide or a mitochondrial transit peptide;
   which are operable linked.
   (All the references to Tables I to IV are references to the corresponding lines of Tables I to IV.)

[35258] In a preferred embodiment thereof said nucleic acid molecule according to 2 (a), (b), (c), (d), (e), (f), (g), (h), (i), (j) or (k) encodes a polypeptide which has the activity of the respective polypeptide represented by a protein comprising a polypeptide as depicted in the respective line in column 5 of Table II, application no. 5.

[35259] In another preferred embodiment thereof said nucleic acid molecule according to 2 (a), (b), (c), (d), (e), (f), (g), (h), (i), (j) or (k) confers a generation or an increase of the respective fine chemical in a non-human organism or a part thereof as compared to a corresponding wild-type non-human organism or part thereof.

[35260] In another preferred embodiment thereof said nucleic acid molecule according to 2 (a), (b), (c), (d), (e), (f), (g), (h), (i), (j) or (k) encodes a polypeptide which has the activity of the respective polypeptide represented by a protein as depicted in the respective line in column 5 of Table II application no. 5 and confers a generation or an increase of the respective fine chemical in a non-human organism or a part thereof as compared to a corresponding wild-type non-human organism or part thereof.

[35261] In another embodiment thereof the expression cassette comprises 3) a nucleic acid molecule encoding a transit peptide, preferably encoding a plastidal transit peptide, especially in case in column 6 of Table I, application no. 5, in the same line as of the respective nucleic acid molecule according to 2) “plastidic” is depicted, or encoding a mitochondrial transit peptide, especially in case in column 6 of Table I, application no. 5, in the same line as of the respective nucleic acid molecule according to 2) “mitochondrial” is depicted.

[35262] In another embodiment thereof the expression cassette does not comprise 3) a nucleic acid molecule encoding a transit peptide, especially in case in column 6 of Table I, application no. 5, in the same line as of the respective nucleic acid molecule according to 2) “non-targeted” is depicted.

[35263] In a further embodiment, the invention relates to an expression cassette, comprising
[35264] 1) a promoter, preferably a promoter selected from the group consisting of Big35S, PCUbi, Super and USP;
[35265] 2) a nucleic acid molecule selected from the group consisting of
   [35266] (a) a nucleic acid molecule encoding a polypeptide shown in Table II, application no. 5, column 5 or 8, preferably shown in Table II A, application no. 5, column 5, or in Table II A, application no. 5, column 8, or in Table II B, application no. 5, column 8, or a homolog or a fragment thereof;
   [35267] (b) a nucleic acid molecule shown in Table I, application no. 5, column 5 or 8, preferably shown in Table I A, application no. 5, column 5, or in Table I A, application no. 5, column 8, or in Table I B, application no. 5, column 8, preferably the coding region thereof, or a homolog or a fragment thereof;
   [35268] (c) a nucleic acid molecule, which, as a result of the degeneracy of the genetic code, can be derived from a polypeptide sequence depicted in column 5 or 8 of Table II, application no. 5, preferably shown in Table II A, application no. 5, column 5, or in Table II A, application no. 5, column 8, or in Table II B, application no. 5, column 8;
   [35269] (d) a nucleic acid molecule having at least 30% identity, preferably at least 40%, 50%, 60%, 70%, 75%, 80%, 85%, 90%, 95%, 96%, 97%, 98%, 99%, 99.5%, with the nucleic acid molecule sequence of a polynucleotide comprising the nucleic acid molecule shown in column 5 or 8 of Table I, application no. 5, preferably shown in Table I A, application no. 5, column 5, or in Table I A, application no. 5, column 8,or in Table I B, application no. 5, column 8, preferably the coding region thereof;
   [35270] (e) a nucleic acid molecule encoding a polypeptide having at least 30% identity, preferably at least 40%, 50% 60%, 70%, 75%, 80%, 85%, 90%, 95%, 96%, 97%, 98%, 99%, 99.5%, identity with the amino acid sequence of the polypeptide encoded by the nucleic acid molecule of (a), (b), (c) or (d);
   [35271] (f) a nucleic acid molecule which hybridizes with a nucleic acid molecule of (a), (b), (c), (d) or (e) under stringent hybridization conditions;
   [35272] (g) a nucleic acid molecule encoding a polypeptide which can be isolated with the aid of monoclonal or polyclonal antibodies made against a polypeptide encoded by one of the nucleic acid molecules of (a), (b), (c), (d), (e) or (f);
   [35273] (h) a nucleic acid molecule encoding a polypeptide comprising the consensus sequence or one or more polypeptide motifs as shown in column 8 of Table IV, application no. 5;
   [35274] (i) a nucleic acid molecule encoding a polypeptide having the activity represented by a respective protein as depicted in column 5 of Table II, application no. 5;
   [35275] (j) a nucleic acid molecule comprising a polynucleotide which is obtained by amplifying a cDNA library or a genomic library using the primers in Table III, application no. 5, column 8;
   [35276] and
   [35277] (k) nucleic acid molecule which is obtainable by screening a suitable nucleic acid library, especially a cDNA library and/or a genomic library, under stringent hybridization conditions with a probe comprising one of the sequences of the nucleic acid molecule of (a), (b), (c), (d), (e), (f), (g), (h), (i) or (j) or with a fragment of at least 15 nt, preferably 20 nt, 30 nt, 50 nt, 100 nt, 200 nt,500 nt, 1000 nt, 1500 nt, 2000 nt or 3000 nt of the nucleic acid molecule characterized in (a), (b), (c), (d), (e), (f), (g), (h), (i) or (j);
   [35278] or a nucleic acid molecule comprising a sequence which is complementary thereto;
      and, optionally
[35279] 3) nucleic acid molecule encoding a transit peptide, preferably encoding a plastidal transit peptide or a mitochondrial transit peptide;
   which are operable linked and
   whereby, preferably, the nucleic acid molecule according to 2 (a), (b), (c), (d), (e), (f), (g), (h), (i), (j) or (k) distinguishes over the sequence depicted in Table I A and/or I B, application no. 5, column 5 or 8, or the coding region thereof, by one or more nucleotides (especially but not exceeding 5%, preferably 4%, 3%, 2%, 1%, 0.5%, 0.2% or 0.1%). In an embodiment, the nucleic acid molecule of the invention according to 2) does not consist of the sequence shown in Table I A and/or I B, application no. 5, column 5 or 8, or the coding region thereof. In another embodiment, the nucleic acid molecule of the present invention, preferably the coding region thereof, is at least 30%, 40%, 50%, 60%, 70%, 80%, 90%, 95% identical but less than 100%, 99.999%, 99.99%, 99.9%, 99%, 98%, 97%, 96% or 95% identical to the sequence shown in Table I A and/or I B, application no. 5, column 5 or 8, or the coding region thereof, respectively. In a further embodiment the nucleic acid molecule does not encode the polypeptide sequence shown in Table II A and/or II B, application no. 5, column 5 or 8 but homologs thereof. Accordingly, in one embodiment, the nucleic acid molecule of the present invention encodes in one embodiment a polypeptide which differs at least in one or more amino acids (especially but not exceeding 5%, preferably 4%, 3%, 2%, 1%, 0.5%, 0.2% or 0.1%) from the polypeptide shown in Table II, application no. 5, column 5 or 8 and does not encode a protein of the sequence shown in Table II A and/or II B, application no. 5, column 5 or 8. Accordingly, in one embodiment, the protein encoded by a sequence of a nucleic acid according to 2(a), (b), (c), (d), (e), (f), (g), (h), (i), (j) or (k) does not consist of the sequence shown in Table I A and/or I B, application no. 5, column 5 or 8, or the coding region thereof. In a further embodiment, the protein of the present invention is at least 30%, 40%, 50%, 60%, 70%, 80%, 90%, 95% identical to protein sequence depicted in Table II A and/or II B, application no. 5, column 5 or 8 but less than 100%, 99.999%, 99.99%, 99.9%, 99%, 98%, 97%, 96% or 95% identical to the sequence shown in Table II A and/or II B, application no. 5, column 5 or 8.
   (All the references to Tables I to IV are references to the corresponding lines of Tables I to IV.)

[35280] In a preferred embodiment thereof said nucleic acid molecule according to 2 (a), (b), (c), (d), (e), (f), (g), (h), (i), (j) or (k) encodes a polypeptide which has the activity of the respective polypeptide represented by a protein comprising a polypeptide as depicted in the respective line in column 5 of Table II, application no. 5.

[35281] In another preferred embodiment thereof said nucleic acid molecule according to 2 (a), (b), (c), (d), (e), (f), (g), (h), (i), (j) or (k) confers a generation or an increase of the respective fine chemical in a non-human organism or a part thereof as compared to a corresponding wild-type non-human organism or part thereof.

[35282] In another preferred embodiment thereof said nucleic acid molecule according to 2 (a), (b), (c), (d), (e), (f), (g), (h), (i), (j) or (k) encodes a polypeptide which has the activity of the respective polypeptide represented by a protein as depicted in the respective line in column 5 of Table II application no. 5 and confers a generation or an increase of the respective fine chemical in a non-human organism or a part thereof as compared to a corresponding wild-type non-human organism or part thereof.

[35283] In another embodiment thereof the expression cassette comprises 3) a nucleic acid molecule encoding a transit peptide, preferably encoding a plastidal transit peptide, especially in case in column 6 of Table I, application no. 5, in the same line as of the respective nucleic acid molecule according to 2) “plastidic” is depicted, or encoding a mitochondrial transit peptide, especially in case in column 6 of Table I, application no. 5, in the same line as of the respective nucleic acid molecule according to 2) “mitochondrial” is depicted.

[35284] In another embodiment thereof the expression cassette does not comprise 3) a nucleic acid molecule encoding a transit peptide, especially in case in column 6 of Table I, application no. 5, in the same line as of the respective nucleic acid molecule according to 2) “non-targeted” is depicted.

[35285] In an embodiment the present invention relates to an expresssion cassette comprising a) a promoter, preferably a promoter selected from the group consisting of Big35S, PCUbi, Super and USP, in particular p-PcUBI; and b) the nucleic acid SEQ ID NO. 16883, or a homolog or fragment thereof, or a homolog thereof being depicted in Table I, application no. 5, column 8, in the same line as SEQ ID NO. 16883, preferably the coding region thereof, a homolog or a fragment thereof; which are operable linked.

[35286] In an embodiment thereof the expression cassette comprises in addition c) a nucleic acid molecule encoding a transit peptide, especially a plastidal transit petide in case in Table I, application no. 5, in column 6 in the same line as SEQ ID NO. 16883 is depicted, plastidic is mentioned, or a mitochondrial transit peptide in case in Table I, application no. 5, in column 6 in the same line as SEQ ID NO. 16883 is depicted, mitochondrial is mentioned; which is operable linked, too.

[35287] In another embodiment thereof the expression cassette does not comprise an additional transit peptide in case in Table I, application no. 5, in column 6 in the same line as SEQ ID NO. 16883 is depicted, non-targeted is mentioned.

[35288] In an embodiment the present invention relates to an expresssion cassette comprising a) a promoter, preferably a promoter selected from the group consisting of Big35S, PCUbi, Super and USP, in particular p-PcUBI; and b) the nucleic acid SEQ ID NO. 17637, or a homolog or fragment thereof, or a homolog thereof being depicted in Table I, application no. 5, column 8, in the same line as SEQ ID NO. 17637, preferably the coding region thereof, a homolog or a fragment thereof; which are operable linked.

[35289] In an embodiment thereof the expression cassette comprises in addition c) a nucleic acid molecule encoding a transit peptide, especially a plastidal transit petide in case in Table I, application no. 5, in column 6 in the same line as SEQ ID NO. 17637 is depicted, plastidic is mentioned, or a mitochondrial transit peptide in case in Table I, application no. 5, in column 6 in the same line as SEQ ID NO. 17637 is depicted, mitochondrial is mentioned; which is operable linked, too.

[35290] In another embodiment thereof the expression cassette does not comprise an additional transit peptide in case in Table I, application no. 5, in column 6 in the same line as SEQ ID NO. 17637 is depicted, non-targeted is mentioned.

[35291] In an embodiment the present invention relates to an expresssion cassette comprising a) a promoter, preferably a promoter selected from the group consisting of Big35S, PCUbi, Super and USP, in particular p-PcUBI; and b) the nucleic acid SEQ ID NO. 17701, or a homolog or fragment thereof, or a homolog thereof being depicted in Table I, application no. 5, column 8, in the same line as SEQ ID NO. 17701, preferably the coding region thereof, a homolog or a fragment thereof; which are operable linked.

[35292] In an embodiment thereof the expression cassette comprises in addition c) a nucleic acid molecule encoding a transit peptide, especially a plastidal transit petide in case in Table I, application no. 5, in column 6 in the same line as SEQ ID NO. 17701 is depicted, plastidic is mentioned, or a mitochondrial transit peptide in case in Table I, application no. 5, in column 6 in the same line as SEQ ID NO. 17701 is depicted, mitochondrial is mentioned; which is operable linked, too.

[35293] In another embodiment thereof the expression cassette does not comprise an additional transit peptide in case in Table I, application no. 5, in column 6 in the same line as SEQ ID NO. 17701 is depicted, non-targeted is mentioned.

[35294] In an embodiment the present invention relates to an expresssion cassette comprising a) a promoter, preferably a promoter selected from the group consisting of Big35S, PCUbi, Super and USP, in particular p-PcUBI; and b) the nucleic acid SEQ ID NO. 17968, or a homolog or fragment thereof, or a homolog thereof being depicted in Table I, application no. 5, column 8, in the same line as SEQ ID NO. 17968, preferably the coding region thereof, a homolog or a fragment thereof; which are operable linked.

[35295] In an embodiment thereof the expression cassette comprises in addition c) a nucleic acid molecule encoding a transit peptide, especially a plastidal transit petide in case in Table I, application no. 5, in column 6 in the same line as SEQ ID NO. 17968 is depicted, plastidic is mentioned, or a mitochondrial transit peptide in case in Table I, application no. 5, in column 6 in the same line as SEQ ID NO. 17968 is depicted, mitochondrial is mentioned; which is operable linked, too.

[35296] In another embodiment thereof the expression cassette does not comprise an additional transit peptide in case in Table I, application no. 5, in column 6 in the same line as SEQ ID NO. 17968 is depicted, non-targeted is mentioned.

[35297] In an embodiment the present invention relates to an expresssion cassette comprising a) a promoter, preferably a promoter selected from the group consisting of Big35S, PCUbi, Super and USP, in particular p-PcUBI; and b) the nucleic acid SEQ ID NO. 18235, or a homolog or fragment thereof, or a homolog thereof being depicted in Table I, application no. 5, column 8, in the same line as SEQ ID NO. 18235, preferably the coding region thereof, a homolog or a fragment thereof; which are operable linked.

[35298] In an embodiment thereof the expression cassette comprises in addition c) a nucleic acid molecule encoding a transit peptide, especially a plastidal transit petide in case in Table I, application no. 5, in column 6 in the same line as SEQ ID NO. 18235 is depicted, plastidic is mentioned, or a mitochondrial transit peptide in case in Table I, application no. 5, in column 6 in the same line as SEQ ID NO. 18235 is depicted, mitochondrial is mentioned; which is operable linked, too.

[35299] In another embodiment thereof the expression cassette does not comprise an additional transit peptide in case in Table I, application no. 5, in column 6 in the same line as SEQ ID NO. 18235 is depicted, non-targeted is mentioned.

[35300] In an embodiment the present invention relates to an expresssion cassette comprising a) a promoter, preferably a promoter selected from the group consisting of Big35S, PCUbi, Super and USP, in particular p-PcUBI; and b) the nucleic acid SEQ ID NO. 19502, or a homolog or fragment thereof, or a homolog thereof being depicted in Table I, application no. 5, column 8, in the same line as SEQ ID NO. 19502, preferably the coding region thereof, a homolog or a fragment thereof; which are operable linked.

[35301] In an embodiment thereof the expression cassette comprises in addition c) a nucleic acid molecule encoding a transit peptide, especially a plastidal transit petide in case in Table I, application no. 5, in column 6 in the same line as SEQ ID NO. 19502 is depicted, plastidic is mentioned, or a mitochondrial transit peptide in case in Table I, application no. 5, in column 6 in the same line as SEQ ID NO. 19502 is depicted, mitochondrial is mentioned; which is operable linked, too.

[35302] In another embodiment thereof the expression cassette does not comprise an additional transit peptide in case in Table I, application no. 5, in column 6 in the same line as SEQ ID NO. 19502 is depicted, non-targeted is mentioned.

[35303] In an embodiment the present invention relates to an expresssion cassette comprising a) a promoter, preferably a promoter selected from the group consisting of Big35S, PCUbi, Super and USP, in particular p-PcUBI; and b) the nucleic acid SEQ ID NO. 19874, or a homolog or fragment thereof, or a homolog thereof being depicted in Table I, application no. 5, column 8, in the same line as SEQ ID NO. 19874, preferably the coding region thereof, a homolog or a fragment thereof; which are operable linked.

[35304] In an embodiment thereof the expression cassette comprises in addition c) a nucleic acid molecule encoding a transit peptide, especially a plastidal transit petide in case in Table I, application no. 5, in column 6 in the same line as SEQ ID NO. 19874 is depicted, plastidic is mentioned, or a mitochondrial transit peptide in case in Table I, application no. 5, in column 6 in the same line as SEQ ID NO. 19874 is depicted, mitochondrial is mentioned; which is operable linked, too.

[35305] In another embodiment thereof the expression cassette does not comprise an additional transit peptide in case in Table I, application no. 5, in column 6 in the same line as SEQ ID NO. 19874 is depicted, non-targeted is mentioned.

[35306] In an embodiment the present invention relates to an expresssion cassette comprising a) a promoter, preferably a promoter selected from the group consisting of Big35S, PCUbi, Super and USP, in particular p-PcUBI; and b) the nucleic acid SEQ ID NO. 19919, or a homolog or fragment thereof, or a homolog thereof being depicted in Table I, application no. 5, column 8, in the same line as SEQ ID NO. 19919, preferably the coding region thereof, a homolog or a fragment thereof; which are operable linked.

[35307] In an embodiment thereof the expression cassette comprises in addition c) a nucleic acid molecule encoding a transit peptide, especially a plastidal transit petide in case in Table I, application no. 5, in column 6 in the same line as SEQ ID NO. 19919 is depicted, plastidic is mentioned, or a mitochondrial transit peptide in case in Table I, application no. 5, in column 6 in the same line as SEQ ID NO. 19919 is depicted, mitochondrial is mentioned; which is operable linked, too.

[35308] In another embodiment thereof the expression cassette does not comprise an additional transit peptide in case in Table I, application no. 5, in column 6 in the same line as SEQ ID NO. 19919 is depicted, non-targeted is mentioned.

[35309] In an embodiment the present invention relates to an expresssion cassette comprising a) a promoter, preferably a promoter selected from the group consisting of Big35S, PCUbi, Super and USP, in particular p-PcUBI; and b) the nucleic acid SEQ ID NO. 20346, or a homolog or fragment thereof, or a homolog thereof being depicted in Table I, application no. 5, column 8, in the same line as SEQ ID NO. 20346, preferably the coding region thereof, a homolog or a fragment thereof; which are operable linked.

[35310] In an embodiment thereof the expression cassette comprises in addition c) a nucleic acid molecule encoding a transit peptide, especially a plastidal transit petide in case in Table I, application no. 5, in column 6 in the same line as SEQ ID NO. 20346 is depicted, plastidic is mentioned, or a mitochondrial transit peptide in case in Table I, application no. 5, in column 6 in the same line as SEQ ID NO. 20346 is depicted, mitochondrial is mentioned; which is operable linked, too.

[35311] In another embodiment thereof the expression cassette does not comprise an additional transit peptide in case in Table I, application no. 5, in column 6 in the same line as SEQ ID NO. 20346 is depicted, non-targeted is mentioned.

[35312] In an embodiment the present invention relates to an expresssion cassette comprising a) a promoter, preferably a promoter selected from the group consisting of Big35S, PCUbi, Super and USP, in particular p-PcUBI; and b) the nucleic acid SEQ ID NO. 98522, or a homolog or fragment thereof, or a homolog thereof being depicted in Table I, application no. 5, column 8, in the same line as SEQ ID NO. 98522, preferably the coding region thereof, a homolog or a fragment thereof; which are operable linked.

[35313] In an embodiment thereof the expression cassette comprises in addition c) a nucleic acid molecule encoding a transit peptide, especially a plastidal transit petide in case in Table I, application no. 5, in column 6 in the same line as SEQ ID NO. 98522 is depicted, plastidic is mentioned, or a mitochondrial transit peptide in case in Table I, application no. 5, in column 6 in the same line as SEQ ID NO. 98522 is depicted, mitochondrial is mentioned; which is operable linked, too.

[35314] In another embodiment thereof the expression cassette does not comprise an additional transit peptide in case in Table I, application no. 5, in column 6 in the same line as SEQ ID NO. 98522 is depicted, non-targeted is mentioned.

[35315] In an embodiment the present invention relates to an expresssion cassette comprising a) a promoter, preferably a promoter selected from the group consisting of Big35S, PCUbi, Super and USP, in particular p-PcUBI; and b) the nucleic acid SEQ ID NO. 21159, or a homolog or fragment thereof, or a homolog thereof being depicted in Table I, application no. 5, column 8, in the same line as SEQ ID NO. 21159, preferably the coding region thereof, a homolog or a fragment thereof; which are operable linked.

[35316] In an embodiment thereof the expression cassette comprises in addition c) a nucleic acid molecule encoding a transit peptide, especially a plastidal transit petide in case in Table I, application no. 5, in column 6 in the same line as SEQ ID NO. 21159 is depicted, plastidic is mentioned, or a mitochondrial transit peptide in case in Table I, application no. 5, in column 6 in the same line as SEQ ID NO. 21159 is depicted, mitochondrial is mentioned; which is operable linked, too.

[35317] In another embodiment thereof the expression cassette does not comprise an additional transit peptide in case in Table I, application no. 5, in column 6 in the same line as SEQ ID NO. 21159 is depicted, non-targeted is mentioned.

[35318] In an embodiment the present invention relates to an expresssion cassette comprising a) a promoter, preferably a promoter selected from the group consisting of Big35S, PCUbi, Super and USP, in particular p-PcUBI; and b) the nucleic acid SEQ ID NO. 21497, or a homolog or fragment thereof, or a homolog thereof being depicted in Table I, application no. 5, column 8, in the same line as SEQ ID NO. 21497, preferably the coding region thereof, a homolog or a fragment thereof; which are operable linked.

[35319] In an embodiment thereof the expression cassette comprises in addition c) a nucleic acid molecule encoding a transit peptide, especially a plastidal transit petide in case in Table I, application no. 5, in column 6 in the same line as SEQ ID NO. 21497 is depicted, plastidic is mentioned, or a mitochondrial transit peptide in case in Table I, application no. 5, in column 6 in the same line as SEQ ID NO. 21497 is depicted, mitochondrial is mentioned; which is operable linked, too.

[35320] In another embodiment thereof the expression cassette does not comprise an additional transit peptide in case in Table I, application no. 5, in column 6 in the same line as SEQ ID NO. 21497 is depicted, non-targeted is mentioned.

[35321] In an embodiment the present invention relates to an expresssion cassette comprising a) a promoter, preferably a promoter selected from the group consisting of Big35S, PCUbi, Super and USP, in particular p-PcUBI; and b) the nucleic acid SEQ ID NO. 22611, or a homolog or fragment thereof, or a homolog thereof being depicted in Table I, application no. 5, column 8, in the same line as SEQ ID NO. 22611, preferably the coding region thereof, a homolog or a fragment thereof; which are operable linked.

[35322] In an embodiment thereof the expression cassette comprises in addition c) a nucleic acid molecule encoding a transit peptide, especially a plastidal transit petide in case in Table I, application no. 5, in column 6 in the same line as SEQ ID NO. 22611 is depicted, plastidic is mentioned, or a mitochondrial transit peptide in case in Table I, application no. 5, in column 6 in the same line as SEQ ID NO. 22611 is depicted, mitochondrial is mentioned; which is operable linked, too.

[35323] In another embodiment thereof the expression cassette does not comprise an additional transit peptide in case in Table I, application no. 5, in column 6 in the same line as SEQ ID NO. 22611 is depicted, non-targeted is mentioned.

[35324] In an embodiment the present invention relates to an expresssion cassette comprising a) a promoter, preferably a promoter selected from the group consisting of Big35S, PCUbi, Super and USP, in particular p-PcUBI; and b) the nucleic acid SEQ ID NO. 22832, or a homolog or fragment thereof, or a homolog thereof being depicted in Table I, application no. 5, column 8, in the same line as SEQ ID NO. 22832, preferably the coding region thereof, a homolog or a fragment thereof; which are operable linked.

[35325] In an embodiment thereof the expression cassette comprises in addition c) a nucleic acid molecule encoding a transit peptide, especially a plastidal transit petide in case in Table I, application no. 5, in column 6 in the same line as SEQ ID NO. 22832 is depicted, plastidic is mentioned, or a mitochondrial transit peptide in case in Table I, application no. 5, in column 6 in the same line as SEQ ID NO. 22832 is depicted, mitochondrial is mentioned; which is operable linked, too.

[35326] In another embodiment thereof the expression cassette does not comprise an additional transit peptide in case in Table I, application no. 5, in column 6 in the same line as SEQ ID NO. 22832 is depicted, non-targeted is mentioned.

[35327] In an embodiment the present invention relates to an expresssion cassette comprising a) a promoter, preferably a promoter selected from the group consisting of Big35S, PCUbi, Super and USP, in particular p-PcUBI; and b) the nucleic acid SEQ ID NO. 1815, or a homolog or fragment thereof, or a homolog thereof being depicted in Table I, application no. 5, column 8, in the same line as SEQ ID NO. 1815, preferably the coding region thereof, a homolog or a fragment thereof; which are operable linked.

[35328] In an embodiment thereof the expression cassette comprises in addition c) a nucleic acid molecule encoding a transit peptide, especially a plastidal transit petide in case in Table I, application no. 5, in column 6 in the same line as SEQ ID NO. 1815 is depicted, plastidic is mentioned, or a mitochondrial transit peptide in case in Table I, application no. 5, in column 6 in the same line as SEQ ID NO. 1815 is depicted, mitochondrial is mentioned; which is operable linked, too.

[35329] In another embodiment thereof the expression cassette does not comprise an additional transit peptide in case in Table I, application no. 5, in column 6 in the same line as SEQ ID NO. 1815 is depicted, non-targeted is mentioned.

[35330] In an embodiment the present invention relates to an expresssion cassette comprising a) a promoter, preferably a promoter selected from the group consisting of Big35S, PCUbi, Super and USP, in particular p-PcUBI; and b) the nucleic acid SEQ ID NO. 68727, or a homolog or fragment thereof, or a homolog thereof being depicted in Table I, application no. 5, column 8, in the same line as SEQ ID NO. 68727, preferably the coding region thereof, a homolog or a fragment thereof; which are operable linked.

[35331] In an embodiment thereof the expression cassette comprises in addition c) a nucleic acid molecule encoding a transit peptide, especially a plastidal transit petide in case in Table I, application no. 5, in column 6 in the same line as SEQ ID NO. 68727 is depicted, plastidic is mentioned, or a mitochondrial transit peptide in case in Table I, application no. 5, in column 6 in the same line as SEQ ID NO. 68727 is depicted, mitochondrial is mentioned; which is operable linked, too.

[35332] In another embodiment thereof the expression cassette does not comprise an additional transit peptide in case in Table I, application no. 5, in column 6 in the same line as SEQ ID NO. 68727 is depicted, non-targeted is mentioned.

[35333] In an embodiment the present invention relates to an expresssion cassette comprising a) a promoter, preferably a promoter selected from the group consisting of Big35S, PCUbi, Super and USP, in particular p-PcUBI; and b) the nucleic acid SEQ ID NO. 68777, or a homolog or fragment thereof, or a homolog thereof being depicted in Table I, application no. 5, column 8, in the same line as SEQ ID NO. 68777, preferably the coding region thereof, a homolog or a fragment thereof; which are operable linked.

[35334] In an embodiment thereof the expression cassette comprises in addition c) a nucleic acid molecule encoding a transit peptide, especially a plastidal transit petide in case in Table I, application no. 5, in column 6 in the same line as SEQ ID NO. 68777 is depicted, plastidic is mentioned, or a mitochondrial transit peptide in case in Table I, application no. 5, in column 6 in the same line as SEQ ID NO. 68777 is depicted, mitochondrial is mentioned; which is operable linked, too.

[35335] In another embodiment thereof the expression cassette does not comprise an additional transit peptide in case in Table I, application no. 5, in column 6 in the same line as SEQ ID NO. 68777 is depicted, non-targeted is mentioned.

[35336] In an embodiment the present invention relates to an expresssion cassette comprising a) a promoter, preferably a promoter selected from the group consisting of Big35S, PCUbi, Super and USP, in particular p-PcUBI; and b) the nucleic acid SEQ ID NO. 2367, or a homolog or fragment thereof, or a homolog thereof being depicted in Table I, application no. 5, column 8, in the same line as SEQ ID NO. 2367, preferably the coding region thereof, a homolog or a fragment thereof; which are operable linked.

[35337] In an embodiment thereof the expression cassette comprises in addition c) a nucleic acid molecule encoding a transit peptide, especially a plastidal transit petide in case in Table I, application no. 5, in column 6 in the same line as SEQ ID NO. 2367 is depicted, plastidic is mentioned, or a mitochondrial transit peptide in case in Table I, application no. 5, in column 6 in the same line as SEQ ID NO. 2367 is depicted, mitochondrial is mentioned; which is operable linked, too.

[35338] In another embodiment thereof the expression cassette does not comprise an additional transit peptide in case in Table I, application no. 5, in column 6 in the same line as SEQ ID NO. 2367 is depicted, non-targeted is mentioned.

[35339] In an embodiment the present invention relates to an expresssion cassette comprising a) a promoter, preferably a promoter selected from the group consisting of Big35S, PCUbi, Super and USP, in particular p-PcUBI; and b) the nucleic acid SEQ ID NO. 2573, or a homolog or fragment thereof, or a homolog thereof being depicted in Table I, application no. 5, column 8, in the same line as SEQ ID NO. 2573, preferably the coding region thereof, a homolog or a fragment thereof; which are operable linked.

[35340] In an embodiment thereof the expression cassette comprises in addition c) a nucleic acid molecule encoding a transit peptide, especially a plastidal transit petide in case in Table I, application no. 5, in column 6 in the same line as SEQ ID NO. 2573 is depicted, plastidic is mentioned, or a mitochondrial transit peptide in case in Table I, application no. 5, in column 6 in the same line as SEQ ID NO. 2573 is depicted, mitochondrial is mentioned; which is operable linked, too.

[35341] In another embodiment thereof the expression cassette does not comprise an additional transit peptide in case in Table I, application no. 5, in column 6 in the same line as SEQ ID NO. 2573 is depicted, non-targeted is mentioned.

[35342] In an embodiment the present invention relates to an expresssion cassette comprising a) a promoter, preferably a promoter selected from the group consisting of Big35S, PCUbi, Super and USP, in particular p-PcUBI; and b) the nucleic acid SEQ ID NO. 2935, or a homolog or fragment thereof, or a homolog thereof being depicted in Table I, application no. 5, column 8, in the same line as SEQ ID NO. 2935, preferably the coding region thereof, a homolog or a fragment thereof; which are operable linked.

[35343] In an embodiment thereof the expression cassette comprises in addition c) a nucleic acid molecule encoding a transit peptide, especially a plastidal transit petide in case in Table I, application no. 5, in column 6 in the same line as SEQ ID NO. 2935 is depicted, plastidic is mentioned, or a mitochondrial transit peptide in case in Table I, application no. 5, in column 6 in the same line as SEQ ID NO. 2935 is depicted, mitochondrial is mentioned; which is operable linked, too.

[35344] In another embodiment thereof the expression cassette does not comprise an additional transit peptide in case in Table I, application no. 5, in column 6 in the same line as SEQ ID NO. 2935 is depicted, non-targeted is mentioned.

[35345] In an embodiment the present invention relates to an expresssion cassette comprising a) a promoter, preferably a promoter selected from the group consisting of Big35S, PCUbi, Super and USP, in particular p-PcUBI; and b) the nucleic acid SEQ ID NO. 4040, or a homolog or fragment thereof, or a homolog thereof being depicted in Table I, application no. 5, column 8, in the same line as SEQ ID NO. 4040, preferably the coding region thereof, a homolog or a fragment thereof; which are operable linked.

[35346] In an embodiment thereof the expression cassette comprises in addition c) a nucleic acid molecule encoding a transit peptide, especially a plastidal transit petide in case in Table I, application no. 5, in column 6 in the same line as SEQ ID NO. 4040 is depicted, plastidic is mentioned, or a mitochondrial transit peptide in case in Table I, application no. 5, in column 6 in the same line as SEQ ID NO. 4040 is depicted, mitochondrial is mentioned; which is operable linked, too.

[35347] In another embodiment thereof the expression cassette does not comprise an additional transit peptide in case in Table I, application no. 5, in column 6 in the same line as SEQ ID NO. 4040 is depicted, non-targeted is mentioned.

[35348] In an embodiment the present invention relates to an expresssion cassette comprising a) a promoter, preferably a promoter selected from the group consisting of Big35S, PCUbi, Super and USP, in particular p-PcUBI; and b) the nucleic acid SEQ ID NO. 24311, or a homolog or fragment thereof, or a homolog thereof being depicted in Table I, application no. 5, column 8, in the same line as SEQ ID NO. 24311, preferably the coding region thereof, a homolog or a fragment thereof; which are operable linked.

[35349] In an embodiment thereof the expression cassette comprises in addition c) a nucleic acid molecule encoding a transit peptide, especially a plastidal transit petide in case in Table I, application no. 5, in column 6 in the same line as SEQ ID NO. 24311 is depicted, plastidic is mentioned, or a mitochondrial transit peptide in case in Table I, application no. 5, in column 6 in the same line as SEQ ID NO. 24311 is depicted, mitochondrial is mentioned; which is operable linked, too.

[35350] In another embodiment thereof the expression cassette does not comprise an additional transit peptide in case in Table I, application no. 5, in column 6 in the same line as SEQ ID NO. 24311 is depicted, non-targeted is mentioned.

[35351] In an embodiment the present invention relates to an expresssion cassette comprising a) a promoter, preferably a promoter selected from the group consisting of Big35S, PCUbi, Super and USP, in particular p-PcUBI; and b) the nucleic acid SEQ ID NO. 4348, or a homolog or fragment thereof, or a homolog thereof being depicted in Table I, application no. 5, column 8, in the same line as SEQ ID NO. 4348, preferably the coding region thereof, a homolog or a fragment thereof; which are operable linked.

[35352] In an embodiment thereof the expression cassette comprises in addition c) a nucleic acid molecule encoding a transit peptide, especially a plastidal transit petide in case in Table I, application no. 5, in column 6 in the same line as SEQ ID NO. 4348 is depicted, plastidic is mentioned, or a mitochondrial transit peptide in case in Table I, application no. 5, in column 6 in the same line as SEQ ID NO. 4348 is depicted, mitochondrial is mentioned; which is operable linked, too.

[35353] In another embodiment thereof the expression cassette does not comprise an additional transit peptide in case in Table I, application no. 5, in column 6 in the same line as SEQ ID NO. 4348 is depicted, non-targeted is mentioned.

[35354] In an embodiment the present invention relates to an expresssion cassette comprising a) a promoter, preferably a promoter selected from the group consisting of Big35S, PCUbi, Super and USP, in particular p-PcUBI; and b) the nucleic acid SEQ ID NO. 68987, or a homolog or fragment thereof, or a homolog thereof being depicted in Table I, application no. 5, column 8, in the same line as SEQ ID NO. 68987, preferably the coding region thereof, a homolog or a fragment thereof; which are operable linked.

[35355] In an embodiment thereof the expression cassette comprises in addition c) a nucleic acid molecule encoding a transit peptide, especially a plastidal transit petide in case in Table I, application no. 5, in column 6 in the same line as SEQ ID NO. 68987 is depicted, plastidic is mentioned, or a mitochondrial transit peptide in case in Table I, application no. 5, in column 6 in the same line as SEQ ID NO. 68987 is depicted, mitochondrial is mentioned; which is operable linked, too.

[35356] In another embodiment thereof the expression cassette does not comprise an additional transit peptide in case in Table I, application no. 5, in column 6 in the same line as SEQ ID NO. 68987 is depicted, non-targeted is mentioned.

[35357] In an embodiment the present invention relates to an expresssion cassette comprising a) a promoter, preferably a promoter selected from the group consisting of Big35S, PCUbi, Super and USP, in particular p-PcUBI; and b) the nucleic acid SEQ ID NO. 24492, or a homolog or fragment thereof, or a homolog thereof being depicted in Table I, application no. 5, column 8, in the same line as SEQ ID NO. 24492, preferably the coding region thereof, a homolog or a fragment thereof; which are operable linked.

[35358] In an embodiment thereof the expression cassette comprises in addition c) a nucleic acid molecule encoding a transit peptide, especially a plastidal transit petide in case in Table I, application no. 5, in column 6 in the same line as SEQ ID NO. 24492 is depicted, plastidic is mentioned, or a mitochondrial transit peptide in case in Table I, application no. 5, in column 6 in the same line as SEQ ID NO. 24492 is depicted, mitochondrial is mentioned; which is operable linked, too.

[35359] In another embodiment thereof the expression cassette does not comprise an additional transit peptide in case in Table I, application no. 5, in column 6 in the same line as SEQ ID NO. 24492 is depicted, non-targeted is mentioned.

[35360] In an embodiment the present invention relates to an expresssion cassette comprising a) a promoter, preferably a promoter selected from the group consisting of Big35S, PCUbi, Super and USP, in particular p-PcUBI; and b) the nucleic acid SEQ ID NO. 25283, or a homolog or fragment thereof, or a homolog thereof being depicted in Table I, application no. 5, column 8, in the same line as SEQ ID NO. 25283, preferably the coding region thereof, a homolog or a fragment thereof; which are operable linked.

[35361] In an embodiment thereof the expression cassette comprises in addition c) a nucleic acid molecule encoding a transit peptide, especially a plastidal transit petide in case in Table I, application no. 5, in column 6 in the same line as SEQ ID NO. 25283 is depicted, plastidic is mentioned, or a mitochondrial transit peptide in case in Table I, application no. 5, in column 6 in the same line as SEQ ID NO. 25283 is depicted, mitochondrial is mentioned; which is operable linked, too.

[35362] In another embodiment thereof the expression cassette does not comprise an additional transit peptide in case in Table I, application no. 5, in column 6 in the same line as SEQ ID NO. 25283 is depicted, non-targeted is mentioned.

[35363] In an embodiment the present invention relates to an expresssion cassette comprising a) a promoter, preferably a promoter selected from the group consisting of Big35S, PCUbi, Super and USP, in particular p-PcUBI; and b) the nucleic acid SEQ ID NO. 69553, or a homolog or fragment thereof, or a homolog thereof being depicted in Table I, application no. 5, column 8, in the same line as SEQ ID NO. 69553, preferably the coding region thereof, a homolog or a fragment thereof; which are operable linked.

[35364] In an embodiment thereof the expression cassette comprises in addition c) a nucleic acid molecule encoding a transit peptide, especially a plastidal transit petide in case in Table I, application no. 5, in column 6 in the same line as SEQ ID NO. 69553 is depicted, plastidic is mentioned, or a mitochondrial transit peptide in case in Table I, application no. 5, in column 6 in the same line as SEQ ID NO. 69553 is depicted, mitochondrial is mentioned; which is operable linked, too.

[35365] In another embodiment thereof the expression cassette does not comprise an additional transit peptide in case in Table I, application no. 5, in column 6 in the same line as SEQ ID NO. 69553 is depicted, non-targeted is mentioned.

[35366] In an embodiment the present invention relates to an expresssion cassette comprising a) a promoter, preferably a promoter selected from the group consisting of Big35S, PCUbi, Super and USP, in particular p-PcUBI; and b) the nucleic acid SEQ ID NO. 25428, or a homolog or fragment thereof, or a homolog thereof being depicted in Table I, application no. 5, column 8, in the same line as SEQ ID NO. 25428, preferably the coding region thereof, a homolog or a fragment thereof; which are operable linked.

[35367] In an embodiment thereof the expression cassette comprises in addition c) a nucleic acid molecule encoding a transit peptide, especially a plastidal transit petide in case in Table I, application no. 5, in column 6 in the same line as SEQ ID NO. 25428 is depicted, plastidic is mentioned, or a mitochondrial transit peptide in case in Table I, application no. 5, in column 6 in the same line as SEQ ID NO. 25428 is depicted, mitochondrial is mentioned; which is operable linked, too.

[35368] In another embodiment thereof the expression cassette does not comprise an additional transit peptide in case in Table I, application no. 5, in column 6 in the same line as SEQ ID NO. 25428 is depicted, non-targeted is mentioned.

[35369] In an embodiment the present invention relates to an expresssion cassette comprising a) a promoter, preferably a promoter selected from the group consisting of Big35S, PCUbi, Super and USP, in particular p-PcUBI; and b) the nucleic acid SEQ ID NO. 70006, or a homolog or fragment thereof, or a homolog thereof being depicted in Table I, application no. 5, column 8, in the same line as SEQ ID NO. 70006, preferably the coding region thereof, a homolog or a fragment thereof; which are operable linked.

[35370] In an embodiment thereof the expression cassette comprises in addition c) a nucleic acid molecule encoding a transit peptide, especially a plastidal transit petide in case in Table I, application no. 5, in column 6 in the same line as SEQ ID NO. 70006 is depicted, plastidic is mentioned, or a mitochondrial transit peptide in case in Table I, application no. 5, in column 6 in the same line as SEQ ID NO. 70006 is depicted, mitochondrial is mentioned; which is operable linked, too.

[35371] In another embodiment thereof the expression cassette does not comprise an additional transit peptide in case in Table I, application no. 5, in column 6 in the same line as SEQ ID NO. 70006 is depicted, non-targeted is mentioned.

[35372] In an embodiment the present invention relates to an expresssion cassette comprising a) a promoter, preferably a promoter selected from the group consisting of Big35S, PCUbi, Super and USP, in particular p-PcUBI; and b) the nucleic acid SEQ ID NO. 5557, or a homolog or fragment thereof, or a homolog thereof being depicted in Table I, application no. 5, column 8, in the same line as SEQ ID NO. 5557, preferably the coding region thereof, a homolog or a fragment thereof; which are operable linked.

[35373] In an embodiment thereof the expression cassette comprises in addition c) a nucleic acid molecule encoding a transit peptide, especially a plastidal transit petide in case in Table I, application no. 5, in column 6 in the same line as SEQ ID NO. 5557 is depicted, plastidic is mentioned, or a mitochondrial transit peptide in case in Table I, application no. 5, in column 6 in the same line as SEQ ID NO. 5557 is depicted, mitochondrial is mentioned; which is operable linked, too.

[35374] In another embodiment thereof the expression cassette does not comprise an additional transit peptide in case in Table I, application no. 5, in column 6 in the same line as SEQ ID NO. 5557 is depicted, non-targeted is mentioned.

[35375] In an embodiment the present invention relates to an expresssion cassette comprising a) a promoter, preferably a promoter selected from the group consisting of Big35S, PCUbi, Super and USP, in particular p-PcUBI; and b) the nucleic acid SEQ ID NO. 27021, or a homolog or fragment thereof, or a homolog thereof being depicted in Table I, application no. 5, column 8, in the same line as SEQ ID NO. 27021, preferably the coding region thereof, a homolog or a fragment thereof; which are operable linked.

[35376] In an embodiment thereof the expression cassette comprises in addition c) a nucleic acid molecule encoding a transit peptide, especially a plastidal transit petide in case in Table I, application no. 5, in column 6 in the same line as SEQ ID NO. 27021 is depicted, plastidic is mentioned, or a mitochondrial transit peptide in case in Table I, application no. 5, in column 6 in the same line as SEQ ID NO. 27021 is depicted, mitochondrial is mentioned; which is operable linked, too.

[35377] In another embodiment thereof the expression cassette does not comprise an additional transit peptide in case in Table I, application no. 5, in column 6 in the same line as SEQ ID NO. 27021 is depicted, non-targeted is mentioned.

[35378] In an embodiment the present invention relates to an expresssion cassette comprising a) a promoter, preferably a promoter selected from the group consisting of Big35S, PCUbi, Super and USP, in particular p-PcUBI; and b) the nucleic acid SEQ ID NO. 28738, or a homolog or fragment thereof, or a homolog thereof being depicted in Table I, application no. 5, column 8, in the same line as SEQ ID NO. 28738, preferably the coding region thereof, a homolog or a fragment thereof; which are operable linked.

[35379] In an embodiment thereof the expression cassette comprises in addition c) a nucleic acid molecule encoding a transit peptide, especially a plastidal transit petide in case in Table I, application no. 5, in column 6 in the same line as SEQ ID NO. 28738 is depicted, plastidic is mentioned, or a mitochondrial transit peptide in case in Table I, application no. 5, in column 6 in the same line as SEQ ID NO. 28738 is depicted, mitochondrial is mentioned; which is operable linked, too.

[35380] In another embodiment thereof the expression cassette does not comprise an additional transit peptide in case in Table I, application no. 5, in column 6 in the same line as SEQ ID NO. 28738 is depicted, non-targeted is mentioned.

[35381] In an embodiment the present invention relates to an expresssion cassette comprising a) a promoter, preferably a promoter selected from the group consisting of Big35S, PCUbi, Super and USP, in particular p-PcUBI; and b) the nucleic acid SEQ ID NO. 29286, or a homolog or fragment thereof, or a homolog thereof being depicted in Table I, application no. 5, column 8, in the same line as SEQ ID NO. 29286, preferably the coding region thereof, a homolog or a fragment thereof; which are operable linked.

[35382] In an embodiment thereof the expression cassette comprises in addition c) a nucleic acid molecule encoding a transit peptide, especially a plastidal transit petide in case in Table I, application no. 5, in column 6 in the same line as SEQ ID NO. 29286 is depicted, plastidic is mentioned, or a mitochondrial transit peptide in case in Table I, application no. 5, in column 6 in the same line as SEQ ID NO. 29286 is depicted, mitochondrial is mentioned; which is operable linked, too.

[35383] In another embodiment thereof the expression cassette does not comprise an additional transit peptide in case in Table I, application no. 5, in column 6 in the same line as SEQ ID NO. 29286 is depicted, non-targeted is mentioned.

[35384] In an embodiment the present invention relates to an expresssion cassette comprising a) a promoter, preferably a promoter selected from the group consisting of Big35S, PCUbi, Super and USP, in particular p-PcUBI; and b) the nucleic acid SEQ ID NO. 73038, or a homolog or fragment thereof, or a homolog thereof being depicted in Table I, application no. 5, column 8, in the same line as SEQ ID NO. 73038, preferably the coding region thereof, a homolog or a fragment thereof; which are operable linked.

[35385] In an embodiment thereof the expression cassette comprises in addition c) a nucleic acid molecule encoding a transit peptide, especially a plastidal transit petide in case in Table I, application no. 5, in column 6 in the same line as SEQ ID NO. 73038 is depicted, plastidic is mentioned, or a mitochondrial transit peptide in case in Table I, application no. 5, in column 6 in the same line as SEQ ID NO. 73038 is depicted, mitochondrial is mentioned; which is operable linked, too.

[35386] In another embodiment thereof the expression cassette does not comprise an additional transit peptide in case in Table I, application no. 5, in column 6 in the same line as SEQ ID NO. 73038 is depicted, non-targeted is mentioned.

[35387] In an embodiment the present invention relates to an expresssion cassette comprising a) a promoter, preferably a promoter selected from the group consisting of Big35S, PCUbi, Super and USP, in particular p-PcUBI; and b) the nucleic acid SEQ ID NO. 74163, or a homolog or fragment thereof, or a homolog thereof being depicted in Table I, application no. 5, column 8, in the same line as SEQ ID NO. 74163, preferably the coding region thereof, a homolog or a fragment thereof; which are operable linked.

[35388] In an embodiment thereof the expression cassette comprises in addition c) a nucleic acid molecule encoding a transit peptide, especially a plastidal transit petide in case in Table I, application no. 5, in column 6 in the same line as SEQ ID NO. 74163 is depicted, plastidic is mentioned, or a mitochondrial transit peptide in case in Table I, application no. 5, in column 6 in the same line as SEQ ID NO. 74163 is depicted, mitochondrial is mentioned; which is operable linked, too.

[35389] In another embodiment thereof the expression cassette does not comprise an additional transit peptide in case in Table I, application no. 5, in column 6 in the same line as SEQ ID NO. 74163 is depicted, non-targeted is mentioned.

[35390] In an embodiment the present invention relates to an expresssion cassette comprising a) a promoter, preferably a promoter selected from the group consisting of Big35S, PCUbi, Super and USP, in particular p-PcUBI; and b) the nucleic acid SEQ ID NO. 6510, or a homolog or fragment thereof, or a homolog thereof being depicted in Table I, application no. 5, column 8, in the same line as SEQ ID NO. 6510, preferably the coding region thereof, a homolog or a fragment thereof; which are operable linked.

[35391] In an embodiment thereof the expression cassette comprises in addition c) a nucleic acid molecule encoding a transit peptide, especially a plastidal transit petide in case in Table I, application no. 5, in column 6 in the same line as SEQ ID NO. 6510 is depicted, plastidic is mentioned, or a mitochondrial transit peptide in case in Table I, application no. 5, in column 6 in the same line as SEQ ID NO. 6510 is depicted, mitochondrial is mentioned; which is operable linked, too.

[35392] In another embodiment thereof the expression cassette does not comprise an additional transit peptide in case in Table I, application no. 5, in column 6 in the same line as SEQ ID NO. 6510 is depicted, non-targeted is mentioned.

[35393] In an embodiment the present invention relates to an expresssion cassette comprising a) a promoter, preferably a promoter selected from the group consisting of Big35S, PCUbi, Super and USP, in particular p-PcUBI; and b) the nucleic acid SEQ ID NO. 33596, or a homolog or fragment thereof, or a homolog thereof being depicted in Table I, application no. 5, column 8, in the same line as SEQ ID NO. 33596, preferably the coding region thereof, a homolog or a fragment thereof; which are operable linked.

[35394] In an embodiment thereof the expression cassette comprises in addition c) a nucleic acid molecule encoding a transit peptide, especially a plastidal transit petide in case in Table I, application no. 5, in column 6 in the same line as SEQ ID NO. 33596 is depicted, plastidic is mentioned, or a mitochondrial transit peptide in case in Table I, application no. 5, in column 6 in the same line as SEQ ID NO. 33596 is depicted, mitochondrial is mentioned; which is operable linked, too.

[35395] In another embodiment thereof the expression cassette does not comprise an additional transit peptide in case in Table I, application no. 5, in column 6 in the same line as SEQ ID NO. 33596 is depicted, non-targeted is mentioned.

[35396] In an embodiment the present invention relates to an expresssion cassette comprising a) a promoter, preferably a promoter selected from the group consisting of Big35S, PCUbi, Super and USP, in particular p-PcUBI; and b) the nucleic acid SEQ ID NO. 74729, or a homolog or fragment thereof, or a homolog thereof being depicted in Table I, application no. 5, column 8, in the same line as SEQ ID NO. 74729, preferably the coding region thereof, a homolog or a fragment thereof; which are operable linked.

[35397] In an embodiment thereof the expression cassette comprises in addition c) a nucleic acid molecule encoding a transit peptide, especially a plastidal transit petide in case in Table I, application no. 5, in column 6 in the same line as SEQ ID NO. 74729 is depicted, plastidic is mentioned, or a mitochondrial transit peptide in case in Table I, application no. 5, in column 6 in the same line as SEQ ID NO. 74729 is depicted, mitochondrial is mentioned; which is operable linked, too.

[35398] In another embodiment thereof the expression cassette does not comprise an additional transit peptide in case in Table I, application no. 5, in column 6 in the same line as SEQ ID NO. 74729 is depicted, non-targeted is mentioned.

[35399] In an embodiment the present invention relates to an expresssion cassette comprising a) a promoter, preferably a promoter selected from the group consisting of Big35S, PCUbi, Super and USP, in particular p-Super; and b) the nucleic acid SEQ ID NO. 34889, or a homolog or fragment thereof, or a homolog thereof being depicted in Table I, application no. 5, column 8, in the same line as SEQ ID NO. 34889, preferably the coding region thereof, a homolog or a fragment thereof; which are operable linked.

[35400] In an embodiment thereof the expression cassette comprises in addition c) a nucleic acid molecule encoding a transit peptide, especially a plastidal transit petide in case in Table I, application no. 5, in column 6 in the same line as SEQ ID NO. 34889 is depicted, plastidic is mentioned, or a mitochondrial transit peptide in case in Table I, application no. 5, in column 6 in the same line as SEQ ID NO. 34889 is depicted, mitochondrial is mentioned; which is operable linked, too.

[35401] In another embodiment thereof the expression cassette does not comprise an additional transit peptide in case in Table I, application no. 5, in column 6 in the same line as SEQ ID NO. 34889 is depicted, non-targeted is mentioned.

[35402] In an embodiment the present invention relates to an expresssion cassette comprising a) a promoter, preferably a promoter selected from the group consisting of Big35S, PCUbi, Super and USP, in particular p-USP; and b) the nucleic acid SEQ ID NO. 98553, or a homolog or fragment thereof, or a homolog thereof being depicted in Table I, application no. 5, column 8, in the same line as SEQ ID NO. 98553, preferably the coding region thereof, a homolog or a fragment thereof; which are operable linked.

[35403] In an embodiment thereof the expression cassette comprises in addition c) a nucleic acid molecule encoding a transit peptide, especially a plastidal transit petide in case in Table I, application no. 5, in column 6 in the same line as SEQ ID NO. 98553 is depicted, plastidic is mentioned, or a mitochondrial transit peptide in case in Table I, application no. 5, in column 6 in the same line as SEQ ID NO. 98553 is depicted, mitochondrial is mentioned; which is operable linked, too.

[35404] In another embodiment thereof the expression cassette does not comprise an additional transit peptide in case in Table I, application no. 5, in column 6 in the same line as SEQ ID NO. 98553 is depicted, non-targeted is mentioned.

[35405] In an embodiment the present invention relates to an expresssion cassette comprising a) a promoter, preferably a promoter selected from the group consisting of Big35S, PCUbi, Super and USP, in particular p-USP; and b) the nucleic acid SEQ ID NO. 35204, or a homolog or fragment thereof, or a homolog thereof being depicted in Table I, application no. 5, column 8, in the same line as SEQ ID NO. 35204, preferably the coding region thereof, a homolog or a fragment thereof; which are operable linked.

[35406] In an embodiment thereof the expression cassette comprises in addition c) a nucleic acid molecule encoding a transit peptide, especially a plastidal transit petide in case in Table I, application no. 5, in column 6 in the same line as SEQ ID NO. 35204 is depicted, plastidic is mentioned, or a mitochondrial transit peptide in case in Table I, application no. 5, in column 6 in the same line as SEQ ID NO. 35204 is depicted, mitochondrial is mentioned; which is operable linked, too.

[35407] In another embodiment thereof the expression cassette does not comprise an additional transit peptide in case in Table I, application no. 5, in column 6 in the same line as SEQ ID NO. 35204 is depicted, non-targeted is mentioned.

[35408] In an embodiment the present invention relates to an expresssion cassette comprising a) a promoter, preferably a promoter selected from the group consisting of Big35S, PCUbi, Super and USP, in particular p-Super; and b) the nucleic acid SEQ ID NO. 35482, or a homolog or fragment thereof, or a homolog thereof being depicted in Table I, application no. 5, column 8, in the same line as SEQ ID NO. 35482, preferably the coding region thereof, a homolog or a fragment thereof; which are operable linked.

[35409] In an embodiment thereof the expression cassette comprises in addition c) a nucleic acid molecule encoding a transit peptide, especially a plastidal transit petide in case in Table I, application no. 5, in column 6 in the same line as SEQ ID NO. 35482 is depicted, plastidic is mentioned, or a mitochondrial transit peptide in case in Table I, application no. 5, in column 6 in the same line as SEQ ID NO. 35482 is depicted, mitochondrial is mentioned; which is operable linked, too.

[35410] In another embodiment thereof the expression cassette does not comprise an additional transit peptide in case in Table I, application no. 5, in column 6 in the same line as SEQ ID NO. 35482 is depicted, non-targeted is mentioned.

[35411] In an embodiment the present invention relates to an expresssion cassette comprising a) a promoter, preferably a promoter selected from the group consisting of Big35S, PCUbi, Super and USP, in particular p-Super; and b) the nucleic acid SEQ ID NO. 7333, or a homolog or fragment thereof, or a homolog thereof being depicted in Table I, application no. 5, column 8, in the same line as SEQ ID NO. 7333, preferably the coding region thereof, a homolog or a fragment thereof; which are operable linked.

[35412] In an embodiment thereof the expression cassette comprises in addition c) a nucleic acid molecule encoding a transit peptide, especially a plastidal transit petide in case in Table I, application no. 5, in column 6 in the same line as SEQ ID NO. 7333 is depicted, plastidic is mentioned, or a mitochondrial transit peptide in case in Table I, application no. 5, in column 6 in the same line as SEQ ID NO. 7333 is depicted, mitochondrial is mentioned; which is operable linked, too.

[35413] In another embodiment thereof the expression cassette does not comprise an additional transit peptide in case in Table I, application no. 5, in column 6 in the same line as SEQ ID NO. 7333 is depicted, non-targeted is mentioned.

[35414] In an embodiment the present invention relates to an expresssion cassette comprising a) a promoter, preferably a promoter selected from the group consisting of Big35S, PCUbi, Super and USP, in particular p-Super; and b) the nucleic acid SEQ ID NO. 35967, or a homolog or fragment thereof, or a homolog thereof being depicted in Table I, application no. 5, column 8, in the same line as SEQ ID NO. 35967, preferably the coding region thereof, a homolog or a fragment thereof; which are operable linked.

[35415] In an embodiment thereof the expression cassette comprises in addition c) a nucleic acid molecule encoding a transit peptide, especially a plastidal transit petide in case in Table I, application no. 5, in column 6 in the same line as SEQ ID NO. 35967 is depicted, plastidic is mentioned, or a mitochondrial transit peptide in case in Table I, application no. 5, in column 6 in the same line as SEQ ID NO. 35967 is depicted, mitochondrial is mentioned; which is operable linked, too.

[35416] In another embodiment thereof the expression cassette does not comprise an additional transit peptide in case in Table I, application no. 5, in column 6 in the same line as SEQ ID NO. 35967 is depicted, non-targeted is mentioned.

[35417] In an embodiment the present invention relates to an expresssion cassette comprising a) a promoter, preferably a promoter selected from the group consisting of Big35S, PCUbi, Super and USP, in particular p-Super; and b) the nucleic acid SEQ ID NO. 36489, or a homolog or fragment thereof, or a homolog thereof being depicted in Table I, application no. 5, column 8, in the same line as SEQ ID NO. 36489, preferably the coding region thereof, a homolog or a fragment thereof; which are operable linked.

[35418] In an embodiment thereof the expression cassette comprises in addition c) a nucleic acid molecule encoding a transit peptide, especially a plastidal transit petide in case in Table I, application no. 5, in column 6 in the same line as SEQ ID NO. 36489 is depicted, plastidic is mentioned, or a mitochondrial transit peptide in case in Table I, application no. 5, in column 6 in the same line as SEQ ID NO. 36489 is depicted, mitochondrial is mentioned; which is operable linked, too.

[35419] In another embodiment thereof the expression cassette does not comprise an additional transit peptide in case in Table I, application no. 5, in column 6 in the same line as SEQ ID NO. 36489 is depicted, non-targeted is mentioned.

[35420] In an embodiment the present invention relates to an expresssion cassette comprising a) a promoter, preferably a promoter selected from the group consisting of Big35S, PCUbi, Super and USP, in particular p-Super; and b) the nucleic acid SEQ ID NO. 37394, or a homolog or fragment thereof, or a homolog thereof being depicted in Table I, application no. 5, column 8, in the same line as SEQ ID NO. 37394, preferably the coding region thereof, a homolog or a fragment thereof; which are operable linked.

[35421] In an embodiment thereof the expression cassette comprises in addition c) a nucleic acid molecule encoding a transit peptide, especially a plastidal transit petide in case in Table I, application no. 5, in column 6 in the same line as SEQ ID NO. 37394 is depicted, plastidic is mentioned, or a mitochondrial transit peptide in case in Table I, application no. 5, in column 6 in the same line as SEQ ID NO. 37394 is depicted, mitochondrial is mentioned; which is operable linked, too.

[35422] In another embodiment thereof the expression cassette does not comprise an additional transit peptide in case in Table I, application no. 5, in column 6 in the same line as SEQ ID NO. 37394 is depicted, non-targeted is mentioned.

[35423] In an embodiment the present invention relates to an expresssion cassette comprising a) a promoter, preferably a promoter selected from the group consisting of Big35S, PCUbi, Super and USP, in particular p-USP; and b) the nucleic acid SEQ ID NO. 98778, or a homolog or fragment thereof, or a homolog thereof being depicted in Table I, application no. 5, column 8, in the same line as SEQ ID NO. 98778, preferably the coding region thereof, a homolog or a fragment thereof; which are operable linked.

[35424] In an embodiment thereof the expression cassette comprises in addition c) a nucleic acid molecule encoding a transit peptide, especially a plastidal transit petide in case in Table I, application no. 5, in column 6 in the same line as SEQ ID NO. 98778 is depicted, plastidic is mentioned, or a mitochondrial transit peptide in case in Table I, application no. 5, in column 6 in the same line as SEQ ID NO. 98778 is depicted, mitochondrial is mentioned; which is operable linked, too.

[35425] In another embodiment thereof the expression cassette does not comprise an additional transit peptide in case in Table I, application no. 5, in column 6 in the same line as SEQ ID NO. 98778 is depicted, non-targeted is mentioned.

[35426] In an embodiment the present invention relates to an expresssion cassette comprising a) a promoter, preferably a promoter selected from the group consisting of Big35S, PCUbi, Super and USP, in particular p-USP; and b) the nucleic acid SEQ ID NO. 76157, or a homolog or fragment thereof, or a homolog thereof being depicted in Table I, application no. 5, column 8, in the same line as SEQ ID NO. 76157, preferably the coding region thereof, a homolog or a fragment thereof; which are operable linked.

[35427] In an embodiment thereof the expression cassette comprises in addition c) a nucleic acid molecule encoding a transit peptide, especially a plastidal transit petide in case in Table I, application no. 5, in column 6 in the same line as SEQ ID NO. 76157 is depicted, plastidic is mentioned, or a mitochondrial transit peptide in case in Table I, application no. 5, in column 6 in the same line as SEQ ID NO. 76157 is depicted, mitochondrial is mentioned; which is operable linked, too.

[35428] In another embodiment thereof the expression cassette does not comprise an additional transit peptide in case in Table I, application no. 5, in column 6 in the same line as SEQ ID NO. 76157 is depicted, non-targeted is mentioned.

[35429] In an embodiment the present invention relates to an expresssion cassette comprising a) a promoter, preferably a promoter selected from the group consisting of Big35S, PCUbi, Super and USP, in particular p-Super; and b) the nucleic acid SEQ ID NO. 37807, or a homolog or fragment thereof, or a homolog thereof being depicted in Table I, application no. 5, column 8, in the same line as SEQ ID NO. 37807, preferably the coding region thereof, a homolog or a fragment thereof; which are operable linked.

[35430] In an embodiment thereof the expression cassette comprises in addition c) a nucleic acid molecule encoding a transit peptide, especially a plastidal transit petide in case in Table I, application no. 5, in column 6 in the same line as SEQ ID NO. 37807 is depicted, plastidic is mentioned, or a mitochondrial transit peptide in case in Table I, application no. 5, in column 6 in the same line as SEQ ID NO. 37807 is depicted, mitochondrial is mentioned; which is operable linked, too.

[35431] In another embodiment thereof the expression cassette does not comprise an additional transit peptide in case in Table I, application no. 5, in column 6 in the same line as SEQ ID NO. 37807 is depicted, non-targeted is mentioned.

[35432] In an embodiment the present invention relates to an expresssion cassette comprising a) a promoter, preferably a promoter selected from the group consisting of Big35S, PCUbi, Super and USP, in particular p-Super; and b) the nucleic acid SEQ ID NO. 99188, or a homolog or fragment thereof, or a homolog thereof being depicted in Table I, application no. 5, column 8, in the same line as SEQ ID NO. 99188, preferably the coding region thereof, a homolog or a fragment thereof; which are operable linked.

[35433] In an embodiment thereof the expression cassette comprises in addition c) a nucleic acid molecule encoding a transit peptide, especially a plastidal transit petide in case in Table I, application no. 5, in column 6 in the same line as SEQ ID NO. 99188 is depicted, plastidic is mentioned, or a mitochondrial transit peptide in case in Table I, application no. 5, in column 6 in the same line as SEQ ID NO. 99188 is depicted, mitochondrial is mentioned; which is operable linked, too.

[35434] In another embodiment thereof the expression cassette does not comprise an additional transit peptide in case in Table I, application no. 5, in column 6 in the same line as SEQ ID NO. 99188 is depicted, non-targeted is mentioned.

[35435] In an embodiment the present invention relates to an expresssion cassette comprising a) a promoter, preferably a promoter selected from the group consisting of Big35S, PCUbi, Super and USP, in particular p-Super; and b) the nucleic acid SEQ ID NO. 7947, or a homolog or fragment thereof, or a homolog thereof being depicted in Table I, application no. 5, column 8, in the same line as SEQ ID NO. 7947, preferably the coding region thereof, a homolog or a fragment thereof; which are operable linked.

[35436] In an embodiment thereof the expression cassette comprises in addition c) a nucleic acid molecule encoding a transit peptide, especially a plastidal transit petide in case in Table I, application no. 5, in column 6 in the same line as SEQ ID NO. 7947 is depicted, plastidic is mentioned, or a mitochondrial transit peptide in case in Table I, application no. 5, in column 6 in the same line as SEQ ID NO. 7947 is depicted, mitochondrial is mentioned; which is operable linked, too.

[35437] In another embodiment thereof the expression cassette does not comprise an additional transit peptide in case in Table I, application no. 5, in column 6 in the same line as SEQ ID NO. 7947 is depicted, non-targeted is mentioned.

[35438] In an embodiment the present invention relates to an expresssion cassette comprising a) a promoter, preferably a promoter selected from the group consisting of Big35S, PCUbi, Super and USP, in particular p-Super; and b) the nucleic acid SEQ ID NO. 99196, or a homolog or fragment thereof, or a homolog thereof being depicted in Table I, application no. 5, column 8, in the same line as SEQ ID NO. 99196, preferably the coding region thereof, a homolog or a fragment thereof; which are operable linked.

[35439] In an embodiment thereof the expression cassette comprises in addition c) a nucleic acid molecule encoding a transit peptide, especially a plastidal transit petide in case in Table I, application no. 5, in column 6 in the same line as SEQ ID NO. 99196 is depicted, plastidic is mentioned, or a mitochondrial transit peptide in case in Table I, application no. 5, in column 6 in the same line as SEQ ID NO. 99196 is depicted, mitochondrial is mentioned; which is operable linked, too.

[35440] In another embodiment thereof the expression cassette does not comprise an additional transit peptide in case in Table I, application no. 5, in column 6 in the same line as SEQ ID NO. 99196 is depicted, non-targeted is mentioned.

[35441] In an embodiment the present invention relates to an expresssion cassette comprising a) a promoter, preferably a promoter selected from the group consisting of Big35S, PCUbi, Super and USP, in particular p-USP; and b) the nucleic acid SEQ ID NO. 99210, or a homolog or fragment thereof, or a homolog thereof being depicted in Table I, application no. 5, column 8, in the same line as SEQ ID NO. 99210, preferably the coding region thereof, a homolog or a fragment thereof; which are operable linked.

[35442] In an embodiment thereof the expression cassette comprises in addition c) a nucleic acid molecule encoding a transit peptide, especially a plastidal transit petide in case in Table I, application no. 5, in column 6 in the same line as SEQ ID NO. 99210 is depicted, plastidic is mentioned, or a mitochondrial transit peptide in case in Table I, application no. 5, in column 6 in the same line as SEQ ID NO. 99210 is depicted, mitochondrial is mentioned; which is operable linked, too.

[35443] In another embodiment thereof the expression cassette does not comprise an additional transit peptide in case in Table I, application no. 5, in column 6 in the same line as SEQ ID NO. 99210 is depicted, non-targeted is mentioned.

[35444] In an embodiment the present invention relates to an expresssion cassette comprising a) a promoter, preferably a promoter selected from the group consisting of Big35S, PCUbi, Super and USP, in particular p-Super; and b) the nucleic acid SEQ ID NO. 79056, or a homolog or fragment thereof, or a homolog thereof being depicted in Table I, application no. 5, column 8, in the same line as SEQ ID NO. 79056, preferably the coding region thereof, a homolog or a fragment thereof; which are operable linked.

[35445] In an embodiment thereof the expression cassette comprises in addition c) a nucleic acid molecule encoding a transit peptide, especially a plastidal transit petide in case in Table I, application no. 5, in column 6 in the same line as SEQ ID NO. 79056 is depicted, plastidic is mentioned, or a mitochondrial transit peptide in case in Table I, application no. 5, in column 6 in the same line as SEQ ID NO. 79056 is depicted, mitochondrial is mentioned; which is operable linked, too.

[35446] In another embodiment thereof the expression cassette does not comprise an additional transit peptide in case in Table I, application no. 5, in column 6 in the same line as SEQ ID NO. 79056 is depicted, non-targeted is mentioned.

[35447] In an embodiment the present invention relates to an expresssion cassette comprising a) a promoter, preferably a promoter selected from the group consisting of Big35S, PCUbi, Super and USP, in particular p-USP; and b) the nucleic acid SEQ ID NO. 99371, or a homolog or fragment thereof, or a homolog thereof being depicted in Table I, application no. 5, column 8, in the same line as SEQ ID NO. 99371, preferably the coding region thereof, a homolog or a fragment thereof; which are operable linked.

[35448] In an embodiment thereof the expression cassette comprises in addition c) a nucleic acid molecule encoding a transit peptide, especially a plastidal transit petide in case in Table I, application no. 5, in column 6 in the same line as SEQ ID NO. 99371 is depicted, plastidic is mentioned, or a mitochondrial transit peptide in case in Table I, application no. 5, in column 6 in the same line as SEQ ID NO. 99371 is depicted, mitochondrial is mentioned; which is operable linked, too.

[35449] In another embodiment thereof the expression cassette does not comprise an additional transit peptide in case in Table I, application no. 5, in column 6 in the same line as SEQ ID NO. 99371 is depicted, non-targeted is mentioned.

[35450] In an embodiment the present invention relates to an expresssion cassette comprising a) a promoter, preferably a promoter selected from the group consisting of Big35S, PCUbi, Super and USP, in particular p-Super; and b) the nucleic acid SEQ ID NO. 38947, or a homolog or fragment thereof, or a homolog thereof being depicted in Table I, application no. 5, column 8, in the same line as SEQ ID NO. 38947, preferably the coding region thereof, a homolog or a fragment thereof; which are operable linked.

[35451] In an embodiment thereof the expression cassette comprises in addition c) a nucleic acid molecule encoding a transit peptide, especially a plastidal transit petide in case in Table I, application no. 5, in column 6 in the same line as SEQ ID NO. 38947 is depicted, plastidic is mentioned, or a mitochondrial transit peptide in case in Table I, application no. 5, in column 6 in the same line as SEQ ID NO. 38947 is depicted, mitochondrial is mentioned; which is operable linked, too.

[35452] In another embodiment thereof the expression cassette does not comprise an additional transit peptide in case in Table I, application no. 5, in column 6 in the same line as SEQ ID NO. 38947 is depicted, non-targeted is mentioned.

[35453] In an embodiment the present invention relates to an expresssion cassette comprising a) a promoter, preferably a promoter selected from the group consisting of Big35S, PCUbi, Super and USP, in particular p-USP; and b) the nucleic acid SEQ ID NO. 99620, or a homolog or fragment thereof, or a homolog thereof being depicted in Table I, application no. 5, column 8, in the same line as SEQ ID NO. 99620, preferably the coding region thereof, a homolog or a fragment thereof; which are operable linked.

[35454] In an embodiment thereof the expression cassette comprises in addition c) a nucleic acid molecule encoding a transit peptide, especially a plastidal transit petide in case in Table I, application no. 5, in column 6 in the same line as SEQ ID NO. 99620 is depicted, plastidic is mentioned, or a mitochondrial transit peptide in case in Table I, application no. 5, in column 6 in the same line as SEQ ID NO. 99620 is depicted, mitochondrial is mentioned; which is operable linked, too.

[35455] In another embodiment thereof the expression cassette does not comprise an additional transit peptide in case in Table I, application no. 5, in column 6 in the same line as SEQ ID NO. 99620 is depicted, non-targeted is mentioned.

[35456] In an embodiment the present invention relates to an expresssion cassette comprising a) a promoter, preferably a promoter selected from the group consisting of Big35S, PCUbi, Super and USP, in particular p-Super; and b) the nucleic acid SEQ ID NO. 99898, or a homolog or fragment thereof, or a homolog thereof being depicted in Table I, application no. 5, column 8, in the same line as SEQ ID NO. 99898, preferably the coding region thereof, a homolog or a fragment thereof; which are operable linked.

[35457] In an embodiment thereof the expression cassette comprises in addition c) a nucleic acid molecule encoding a transit peptide, especially a plastidal transit petide in case in Table I, application no. 5, in column 6 in the same line as SEQ ID NO. 99898 is depicted, plastidic is mentioned, or a mitochondrial transit peptide in case in Table I, application no. 5, in column 6 in the same line as SEQ ID NO. 99898 is depicted, mitochondrial is mentioned; which is operable linked, too.

[35458] In another embodiment thereof the expression cassette does not comprise an additional transit peptide in case in Table I, application no. 5, in column 6 in the same line as SEQ ID NO. 99898 is depicted, non-targeted is mentioned.

[35459] In an embodiment the present invention relates to an expresssion cassette comprising a) a promoter, preferably a promoter selected from the group consisting of Big35S, PCUbi, Super and USP, in particular p-USP; and b) the nucleic acid SEQ ID NO. 100105, or a homolog or fragment thereof, or a homolog thereof being depicted in Table I, application no. 5, column 8, in the same line as SEQ ID NO. 100105, preferably the coding region thereof, a homolog or a fragment thereof; which are operable linked.

[35460] In an embodiment thereof the expression cassette comprises in addition c) a nucleic acid molecule encoding a transit peptide, especially a plastidal transit petide in case in Table I, application no. 5, in column 6 in the same line as SEQ ID NO. 100105 is depicted, plastidic is mentioned, or a mitochondrial transit peptide in case in Table I, application no. 5, in column 6 in the same line as SEQ ID NO. 100105 is depicted, mitochondrial is mentioned; which is operable linked, too.

[35461] In another embodiment thereof the expression cassette does not comprise an additional transit peptide in case in Table I, application no. 5, in column 6 in the same line as SEQ ID NO. 100105 is depicted, non-targeted is mentioned.

[35462] In an embodiment the present invention relates to an expresssion cassette comprising a) a promoter, preferably a promoter selected from the group consisting of Big35S, PCUbi, Super and USP, in particular p-Super; and b) the nucleic acid SEQ ID NO. 80906, or a homolog or fragment thereof, or a homolog thereof being depicted in Table I, application no. 5, column 8, in the same line as SEQ ID NO. 80906, preferably the coding region thereof, a homolog or a fragment thereof; which are operable linked.

[35463] In an embodiment thereof the expression cassette comprises in addition c) a nucleic acid molecule encoding a transit peptide, especially a plastidal transit petide in case in Table I, application no. 5, in column 6 in the same line as SEQ ID NO. 80906 is depicted, plastidic is mentioned, or a mitochondrial transit peptide in case in Table I, application no. 5, in column 6 in the same line as SEQ ID NO. 80906 is depicted, mitochondrial is mentioned; which is operable linked, too.

[35464] In another embodiment thereof the expression cassette does not comprise an additional transit peptide in case in Table I, application no. 5, in column 6 in the same line as SEQ ID NO. 80906 is depicted, non-targeted is mentioned.

[35465] In an embodiment the present invention relates to an expresssion cassette comprising a) a promoter, preferably a promoter selected from the group consisting of Big35S, PCUbi, Super and USP, in particular p-Super; and b) the nucleic acid SEQ ID NO. 81980, or a homolog or fragment thereof, or a homolog thereof being depicted in Table I, application no. 5, column 8, in the same line as SEQ ID NO. 81980, preferably the coding region thereof, a homolog or a fragment thereof; which are operable linked.

[35466] In an embodiment thereof the expression cassette comprises in addition c) a nucleic acid molecule encoding a transit peptide, especially a plastidal transit petide in case in Table I, application no. 5, in column 6 in the same line as SEQ ID NO. 81980 is depicted, plastidic is mentioned, or a mitochondrial transit peptide in case in Table I, application no. 5, in column 6 in the same line as SEQ ID NO. 81980 is depicted, mitochondrial is mentioned; which is operable linked, too.

[35467] In another embodiment thereof the expression cassette does not comprise an additional transit peptide in case in Table I, application no. 5, in column 6 in the same line as SEQ ID NO. 81980 is depicted, non-targeted is mentioned.

[35468] In an embodiment the present invention relates to an expresssion cassette comprising a) a promoter, preferably a promoter selected from the group consisting of Big35S, PCUbi, Super and USP, in particular p-Super; and b) the nucleic acid SEQ ID NO. 100543, or a homolog or fragment thereof, or a homolog thereof being depicted in Table I, application no. 5, column 8, in the same line as SEQ ID NO. 100543, preferably the coding region thereof, a homolog or a fragment thereof; which are operable linked.

[35469] In an embodiment thereof the expression cassette comprises in addition c) a nucleic acid molecule encoding a transit peptide, especially a plastidal transit petide in case in Table I, application no. 5, in column 6 in the same line as SEQ ID NO. 100543 is depicted, plastidic is mentioned, or a mitochondrial transit peptide in case in Table I, application no. 5, in column 6 in the same line as SEQ ID NO. 100543 is depicted, mitochondrial is mentioned; which is operable linked, too.

[35470] In another embodiment thereof the expression cassette does not comprise an additional transit peptide in case in Table I, application no. 5, in column 6 in the same line as SEQ ID NO. 100543 is depicted, non-targeted is mentioned.

[35471] In an embodiment the present invention relates to an expresssion cassette comprising a) a promoter, preferably a promoter selected from the group consisting of Big35S, PCUbi, Super and USP, in particular p-Super; and b) the nucleic acid SEQ ID NO. 42502, or a homolog or fragment thereof, or a homolog thereof being depicted in Table I, application no. 5, column 8, in the same line as SEQ ID NO. 42502, preferably the coding region thereof, a homolog or a fragment thereof; which are operable linked.

[35472] In an embodiment thereof the expression cassette comprises in addition c) a nucleic acid molecule encoding a transit peptide, especially a plastidal transit petide in case in Table I, application no. 5, in column 6 in the same line as SEQ ID NO. 42502 is depicted, plastidic is mentioned, or a mitochondrial transit peptide in case in Table I, application no. 5, in column 6 in the same line as SEQ ID NO. 42502 is depicted, mitochondrial is mentioned; which is operable linked, too.

[35473] In another embodiment thereof the expression cassette does not comprise an additional transit peptide in case in Table I, application no. 5, in column 6 in the same line as SEQ ID NO. 42502 is depicted, non-targeted is mentioned.

[35474] In an embodiment the present invention relates to an expresssion cassette comprising a) a promoter, preferably a promoter selected from the group consisting of Big35S, PCUbi, Super and USP, in particular p-USP; and b) the nucleic acid SEQ ID NO. 100675, or a homolog or fragment thereof, or a homolog thereof being depicted in Table I, application no. 5, column 8, in the same line as SEQ ID NO. 100675, preferably the coding region thereof, a homolog or a fragment thereof; which are operable linked.

[35475] In an embodiment thereof the expression cassette comprises in addition c) a nucleic acid molecule encoding a transit peptide, especially a plastidal transit petide in case in Table I, application no. 5, in column 6 in the same line as SEQ ID NO. 100675 is depicted, plastidic is mentioned, or a mitochondrial transit peptide in case in Table I, application no. 5, in column 6 in the same line as SEQ ID NO. 100675 is depicted, mitochondrial is mentioned; which is operable linked, too.

[35476] In another embodiment thereof the expression cassette does not comprise an additional transit peptide in case in Table I, application no. 5, in column 6 in the same line as SEQ ID NO. 100675 is depicted, non-targeted is mentioned.

[35477] In an embodiment the present invention relates to an expresssion cassette comprising a) a promoter, preferably a promoter selected from the group consisting of Big35S, PCUbi, Super and USP, in particular p-USP; and b) the nucleic acid SEQ ID NO. 101327, or a homolog or fragment thereof, or a homolog thereof being depicted in Table I, application no. 5, column 8, in the same line as SEQ ID NO. 101327, preferably the coding region thereof, a homolog or a fragment thereof; which are operable linked.

[35478] In an embodiment thereof the expression cassette comprises in addition c) a nucleic acid molecule encoding a transit peptide, especially a plastidal transit petide in case in Table I, application no. 5, in column 6 in the same line as SEQ ID NO. 101327 is depicted, plastidic is mentioned, or a mitochondrial transit peptide in case in Table I, application no. 5, in column 6 in the same line as SEQ ID NO. 101327 is depicted, mitochondrial is mentioned; which is operable linked, too.

[35479] In another embodiment thereof the expression cassette does not comprise an additional transit peptide in case in Table I, application no. 5, in column 6 in the same line as SEQ ID NO. 101327 is depicted, non-targeted is mentioned.

[35480] In an embodiment the present invention relates to an expresssion cassette comprising a) a promoter, preferably a promoter selected from the group consisting of Big35S, PCUbi, Super and USP, in particular p-Super; and b) the nucleic acid SEQ ID NO. 44372, or a homolog or fragment thereof, or a homolog thereof being depicted in Table I, application no. 5, column 8, in the same line as SEQ ID NO. 44372, preferably the coding region thereof, a homolog or a fragment thereof; which are operable linked.

[35481] In an embodiment thereof the expression cassette comprises in addition c) a nucleic acid molecule encoding a transit peptide, especially a plastidal transit petide in case in Table I, application no. 5, in column 6 in the same line as SEQ ID NO. 44372 is depicted, plastidic is mentioned, or a mitochondrial transit peptide in case in Table I, application no. 5, in column 6 in the same line as SEQ ID NO. 44372 is depicted, mitochondrial is mentioned; which is operable linked, too.

[35482] In another embodiment thereof the expression cassette does not comprise an additional transit peptide in case in Table I, application no. 5, in column 6 in the same line as SEQ ID NO. 44372 is depicted, non-targeted is mentioned.

[35483] In an embodiment the present invention relates to an expresssion cassette comprising a) a promoter, preferably a promoter selected from the group consisting of Big35S, PCUbi, Super and USP, in particular p-Super; and b) the nucleic acid SEQ ID NO. 10740, or a homolog or fragment thereof, or a homolog thereof being depicted in Table I, application no. 5, column 8, in the same line as SEQ ID NO. 10740, preferably the coding region thereof, a homolog or a fragment thereof; which are operable linked.

[35484] In an embodiment thereof the expression cassette comprises in addition c) a nucleic acid molecule encoding a transit peptide, especially a plastidal transit petide in case in Table I, application no. 5, in column 6 in the same line as SEQ ID NO. 10740 is depicted, plastidic is mentioned, or a mitochondrial transit peptide in case in Table I, application no. 5, in column 6 in the same line as SEQ ID NO. 10740 is depicted, mitochondrial is mentioned; which is operable linked, too.

[35485] In another embodiment thereof the expression cassette does not comprise an additional transit peptide in case in Table I, application no. 5, in column 6 in the same line as SEQ ID NO. 10740 is depicted, non-targeted is mentioned.

[35486] In an embodiment the present invention relates to an expresssion cassette comprising a) a promoter, preferably a promoter selected from the group consisting of Big35S, PCUbi, Super and USP, in particular p-Super; and b) the nucleic acid SEQ ID NO. 44609, or a homolog or fragment thereof, or a homolog thereof being depicted in Table I, application no. 5, column 8, in the same line as SEQ ID NO. 44609, preferably the coding region thereof, a homolog or a fragment thereof; which are operable linked.

[35487] In an embodiment thereof the expression cassette comprises in addition c) a nucleic acid molecule encoding a transit peptide, especially a plastidal transit petide in case in Table I, application no. 5, in column 6 in the same line as SEQ ID NO. 44609 is depicted, plastidic is mentioned, or a mitochondrial transit peptide in case in Table I, application no. 5, in column 6 in the same line as SEQ ID NO. 44609 is depicted, mitochondrial is mentioned; which is operable linked, too.

[35488] In another embodiment thereof the expression cassette does not comprise an additional transit peptide in case in Table I, application no. 5, in column 6 in the same line as SEQ ID NO. 44609 is depicted, non-targeted is mentioned.

[35489] In an embodiment the present invention relates to an expresssion cassette comprising a) a promoter, preferably a promoter selected from the group consisting of Big35S, PCUbi, Super and USP, in particular p-Super; and b) the nucleic acid SEQ ID NO. 45321, or a homolog or fragment thereof, or a homolog thereof being depicted in Table I, application no. 5, column 8, in the same line as SEQ ID NO. 45321, preferably the coding region thereof, a homolog or a fragment thereof; which are operable linked.

[35490] In an embodiment thereof the expression cassette comprises in addition c) a nucleic acid molecule encoding a transit peptide, especially a plastidal transit petide in case in Table I, application no. 5, in column 6 in the same line as SEQ ID NO. 45321 is depicted, plastidic is mentioned, or a mitochondrial transit peptide in case in Table I, application no. 5, in column 6 in the same line as SEQ ID NO. 45321 is depicted, mitochondrial is mentioned; which is operable linked, too.

[35491] In another embodiment thereof the expression cassette does not comprise an additional transit peptide in case in Table I, application no. 5, in column 6 in the same line as SEQ ID NO. 45321 is depicted, non-targeted is mentioned.

[35492] In an embodiment the present invention relates to an expresssion cassette comprising a) a promoter, preferably a promoter selected from the group consisting of Big35S, PCUbi, Super and USP, in particular p-PcUBI; and b) the nucleic acid SEQ ID NO. 46515, or a homolog or fragment thereof, or a homolog thereof being depicted in Table I, application no. 5, column 8, in the same line as SEQ ID NO. 46515, preferably the coding region thereof, a homolog or a fragment thereof; which are operable linked.

[35493] In an embodiment thereof the expression cassette comprises in addition c) a nucleic acid molecule encoding a transit peptide, especially a plastidal transit petide in case in Table I, application no. 5, in column 6 in the same line as SEQ ID NO. 46515 is depicted, plastidic is mentioned, or a mitochondrial transit peptide in case in Table I, application no. 5, in column 6 in the same line as SEQ ID NO. 46515 is depicted, mitochondrial is mentioned; which is operable linked, too.

[35494] In another embodiment thereof the expression cassette does not comprise an additional transit peptide in case in Table I, application no. 5, in column 6 in the same line as SEQ ID NO. 46515 is depicted, non-targeted is mentioned.

[35495] In an embodiment the present invention relates to an expresssion cassette comprising a) a promoter, preferably a promoter selected from the group consisting of Big35S, PCUbi, Super and USP, in particular p-PcUBI; and b) the nucleic acid SEQ ID NO. 84198, or a homolog or fragment thereof, or a homolog thereof being depicted in Table I, application no. 5, column 8, in the same line as SEQ ID NO. 84198, preferably the coding region thereof, a homolog or a fragment thereof; which are operable linked.

[35496] In an embodiment thereof the expression cassette comprises in addition c) a nucleic acid molecule encoding a transit peptide, especially a plastidal transit petide in case in Table I, application no. 5, in column 6 in the same line as SEQ ID NO. 84198 is depicted, plastidic is mentioned, or a mitochondrial transit peptide in case in Table I, application no. 5, in column 6 in the same line as SEQ ID NO. 84198 is depicted, mitochondrial is mentioned; which is operable linked, too.

[35497] In another embodiment thereof the expression cassette does not comprise an additional transit peptide in case in Table I, application no. 5, in column 6 in the same line as SEQ ID NO. 84198 is depicted, non-targeted is mentioned.

[35498] In an embodiment the present invention relates to an expresssion cassette comprising a) a promoter, preferably a promoter selected from the group consisting of Big35S, PCUbi, Super and USP, in particular p-Super; and b) the nucleic acid SEQ ID NO. 101780, or a homolog or fragment thereof, or a homolog thereof being depicted in Table I, application no. 5, column 8, in the same line as SEQ ID NO. 101780, preferably the coding region thereof, a homolog or a fragment thereof; which are operable linked.

[35499] In an embodiment thereof the expression cassette comprises in addition c) a nucleic acid molecule encoding a transit peptide, especially a plastidal transit petide in case in Table I, application no. 5, in column 6 in the same line as SEQ ID NO. 101780 is depicted, plastidic is mentioned, or a mitochondrial transit peptide in case in Table I, application no. 5, in column 6 in the same line as SEQ ID NO. 101780 is depicted, mitochondrial is mentioned; which is operable linked, too.

[35500] In another embodiment thereof the expression cassette does not comprise an additional transit peptide in case in Table I, application no. 5, in column 6 in the same line as SEQ ID NO. 101780 is depicted, non-targeted is mentioned.

[35501] In an embodiment the present invention relates to an expresssion cassette comprising a) a promoter, preferably a promoter selected from the group consisting of Big35S, PCUbi, Super and USP, in particular p-PcUBI; and b) the nucleic acid SEQ ID NO. 49143, or a homolog or fragment thereof, or a homolog thereof being depicted in Table I, application no. 5, column 8, in the same line as SEQ ID NO. 49143, preferably the coding region thereof, a homolog or a fragment thereof; which are operable linked.

[35502] In an embodiment thereof the expression cassette comprises in addition c) a nucleic acid molecule encoding a transit peptide, especially a plastidal transit petide in case in Table I, application no. 5, in column 6 in the same line as SEQ ID NO. 49143 is depicted, plastidic is mentioned, or a mitochondrial transit peptide in case in Table I, application no. 5, in column 6 in the same line as SEQ ID NO. 49143 is depicted, mitochondrial is mentioned; which is operable linked, too.

[35503] In another embodiment thereof the expression cassette does not comprise an additional transit peptide in case in Table I, application no. 5, in column 6 in the same line as SEQ ID NO. 49143 is depicted, non-targeted is mentioned.

[35504] In an embodiment the present invention relates to an expresssion cassette comprising a) a promoter, preferably a promoter selected from the group consisting of Big35S, PCUbi, Super and USP, in particular p-PcUBI; and b) the nucleic acid SEQ ID NO. 50339, or a homolog or fragment thereof, or a homolog thereof being depicted in Table I, application no. 5, column 8, in the same line as SEQ ID NO. 50339, preferably the coding region thereof, a homolog or a fragment thereof; which are operable linked.

[35505] In an embodiment thereof the expression cassette comprises in addition c) a nucleic acid molecule encoding a transit peptide, especially a plastidal transit petide in case in Table I, application no. 5, in column 6 in the same line as SEQ ID NO. 50339 is depicted, plastidic is mentioned, or a mitochondrial transit peptide in case in Table I, application no. 5, in column 6 in the same line as SEQ ID NO. 50339 is depicted, mitochondrial is mentioned; which is operable linked, too.

[35506] In another embodiment thereof the expression cassette does not comprise an additional transit peptide in case in Table I, application no. 5, in column 6 in the same line as SEQ ID NO. 50339 is depicted, non-targeted is mentioned.

[35507] In an embodiment the present invention relates to an expresssion cassette comprising a) a promoter, preferably a promoter selected from the group consisting of Big35S, PCUbi, Super and USP, in particular p-PcUBI; and b) the nucleic acid SEQ ID NO. 101707, or a homolog or fragment thereof, or a homolog thereof being depicted in Table I, application no. 5, column 8, in the same line as SEQ ID NO. 101707, preferably the coding region thereof, a homolog or a fragment thereof; which are operable linked.

[35508] In an embodiment thereof the expression cassette comprises in addition c) a nucleic acid molecule encoding a transit peptide, especially a plastidal transit petide in case in Table I, application no. 5, in column 6 in the same line as SEQ ID NO. 101707 is depicted, plastidic is mentioned, or a mitochondrial transit peptide in case in Table I, application no. 5, in column 6 in the same line as SEQ ID NO. 101707 is depicted, mitochondrial is mentioned; which is operable linked, too.

[35509] In another embodiment thereof the expression cassette does not comprise an additional transit peptide in case in Table I, application no. 5, in column 6 in the same line as SEQ ID NO. 101707 is depicted, non-targeted is mentioned.

[35510] In an embodiment the present invention relates to an expresssion cassette comprising a) a promoter, preferably a promoter selected from the group consisting of Big35S, PCUbi, Super and USP, in particular p-PcUBI; and b) the nucleic acid SEQ ID NO. 52634, or a homolog or fragment thereof, or a homolog thereof being depicted in Table I, application no. 5, column 8, in the same line as SEQ ID NO. 52634, preferably the coding region thereof, a homolog or a fragment thereof; which are operable linked.

[35511] In an embodiment thereof the expression cassette comprises in addition c) a nucleic acid molecule encoding a transit peptide, especially a plastidal transit petide in case in Table I, application no. 5, in column 6 in the same line as SEQ ID NO. 52634 is depicted, plastidic is mentioned, or a mitochondrial transit peptide in case in Table I, application no. 5, in column 6 in the same line as SEQ ID NO. 52634 is depicted, mitochondrial is mentioned; which is operable linked, too.

[35512] In another embodiment thereof the expression cassette does not comprise an additional transit peptide in case in Table I, application no. 5, in column 6 in the same line as SEQ ID NO. 52634 is depicted, non-targeted is mentioned.

[35513] In an embodiment the present invention relates to an expresssion cassette comprising a) a promoter, preferably a promoter selected from the group consisting of Big35S, PCUbi, Super and USP, in particular p-PcUBI; and b) the nucleic acid SEQ ID NO. 54337, or a homolog or fragment thereof, or a homolog thereof being depicted in Table I, application no. 5, column 8, in the same line as SEQ ID NO. 54337, preferably the coding region thereof, a homolog or a fragment thereof; which are operable linked.

[35514] In an embodiment thereof the expression cassette comprises in addition c) a nucleic acid molecule encoding a transit peptide, especially a plastidal transit petide in case in Table I, application no. 5, in column 6 in the same line as SEQ ID NO. 54337 is depicted, plastidic is mentioned, or a mitochondrial transit peptide in case in Table I, application no. 5, in column 6 in the same line as SEQ ID NO. 54337 is depicted, mitochondrial is mentioned; which is operable linked, too.

[35515] In another embodiment thereof the expression cassette does not comprise an additional transit peptide in case in Table I, application no. 5, in column 6 in the same line as SEQ ID NO. 54337 is depicted, non-targeted is mentioned.

[35516] In an embodiment the present invention relates to an expresssion cassette comprising a) a promoter, preferably a promoter selected from the group consisting of Big35S, PCUbi, Super and USP, in particular p-PcUBI; and b) the nucleic acid SEQ ID NO. 11471, or a homolog or fragment thereof, or a homolog thereof being depicted in Table I, application no. 5, column 8, in the same line as SEQ ID NO. 11471, preferably the coding region thereof, a homolog or a fragment thereof; which are operable linked.

[35517] In an embodiment thereof the expression cassette comprises in addition c) a nucleic acid molecule encoding a transit peptide, especially a plastidal transit petide in case in Table I, application no. 5, in column 6 in the same line as SEQ ID NO. 11471 is depicted, plastidic is mentioned, or a mitochondrial transit peptide in case in Table I, application no. 5, in column 6 in the same line as SEQ ID NO. 11471 is depicted, mitochondrial is mentioned; which is operable linked, too.

[35518] In another embodiment thereof the expression cassette does not comprise an additional transit peptide in case in Table I, application no. 5, in column 6 in the same line as SEQ ID NO. 11471 is depicted, non-targeted is mentioned.

[35519] In an embodiment the present invention relates to an expresssion cassette comprising a) a promoter, preferably a promoter selected from the group consisting of Big35S, PCUbi, Super and USP, in particular p-PcUBI; and b) the nucleic acid SEQ ID NO. 86540, or a homolog or fragment thereof, or a homolog thereof being depicted in Table I, application no. 5, column 8, in the same line as SEQ ID NO. 86540, preferably the coding region thereof, a homolog or a fragment thereof; which are operable linked.

[35520] In an embodiment thereof the expression cassette comprises in addition c) a nucleic acid molecule encoding a transit peptide, especially a plastidal transit petide in case in Table I, application no. 5, in column 6 in the same line as SEQ ID NO. 86540 is depicted, plastidic is mentioned, or a mitochondrial transit peptide in case in Table I, application no. 5, in column 6 in the same line as SEQ ID NO. 86540 is depicted, mitochondrial is mentioned; which is operable linked, too.

[35521] In another embodiment thereof the expression cassette does not comprise an additional transit peptide in case in Table I, application no. 5, in column 6 in the same line as SEQ ID NO. 86540 is depicted, non-targeted is mentioned.

[35522] In an embodiment the present invention relates to an expresssion cassette comprising a) a promoter, preferably a promoter selected from the group consisting of Big35S, PCUbi, Super and USP, in particular p-PcUBI; and b) the nucleic acid SEQ ID NO. 87397, or a homolog or fragment thereof, or a homolog thereof being depicted in Table I, application no. 5, column 8, in the same line as SEQ ID NO. 87397, preferably the coding region thereof, a homolog or a fragment thereof; which are operable linked.

[35523] In an embodiment thereof the expression cassette comprises in addition c) a nucleic acid molecule encoding a transit peptide, especially a plastidal transit petide in case in Table I, application no. 5, in column 6 in the same line as SEQ ID NO. 87397 is depicted, plastidic is mentioned, or a mitochondrial transit peptide in case in Table I, application no. 5, in column 6 in the same line as SEQ ID NO. 87397 is depicted, mitochondrial is mentioned; which is operable linked, too.

[35524] In another embodiment thereof the expression cassette does not comprise an additional transit peptide in case in Table I, application no. 5, in column 6 in the same line as SEQ ID NO. 87397 is depicted, non-targeted is mentioned.

[35525] In an embodiment the present invention relates to an expresssion cassette comprising a) a promoter, preferably a promoter selected from the group consisting of Big35S, PCUbi, Super and USP, in particular p-PcUBI; and b) the nucleic acid SEQ ID NO. 57235, or a homolog or fragment thereof, or a homolog thereof being depicted in Table I, application no. 5, column 8, in the same line as SEQ ID NO. 57235, preferably the coding region thereof, a homolog or a fragment thereof; which are operable linked.

[35526] In an embodiment thereof the expression cassette comprises in addition c) a nucleic acid molecule encoding a transit peptide, especially a plastidal transit petide in case in Table I, application no. 5, in column 6 in the same line as SEQ ID NO. 57235 is depicted, plastidic is mentioned, or a mitochondrial transit peptide in case in Table I, application no. 5, in column 6 in the same line as SEQ ID NO. 57235 is depicted, mitochondrial is mentioned; which is operable linked, too.

[35527] In another embodiment thereof the expression cassette does not comprise an additional transit peptide in case in Table I, application no. 5, in column 6 in the same line as SEQ ID NO. 57235 is depicted, non-targeted is mentioned.

[35528] In an embodiment the present invention relates to an expresssion cassette comprising a) a promoter, preferably a promoter selected from the group consisting of Big35S, PCUbi, Super and USP, in particular p-PcUBI; and b) the nucleic acid SEQ ID NO. 101776, or a homolog or fragment thereof, or a homolog thereof being depicted in Table I, application no. 5, column 8, in the same line as SEQ ID NO. 101776, preferably the coding region thereof, a homolog or a fragment thereof; which are operable linked.

[35529] In an embodiment thereof the expression cassette comprises in addition c) a nucleic acid molecule encoding a transit peptide, especially a plastidal transit petide in case in Table I, application no. 5, in column 6 in the same line as SEQ ID NO. 101776 is depicted, plastidic is mentioned, or a mitochondrial transit peptide in case in Table I, application no. 5, in column 6 in the same line as SEQ ID NO. 101776 is depicted, mitochondrial is mentioned; which is operable linked, too.

[35530] In another embodiment thereof the expression cassette does not comprise an additional transit peptide in case in Table I, application no. 5, in column 6 in the same line as SEQ ID NO. 101776 is depicted, non-targeted is mentioned.

[35531] In an embodiment the present invention relates to an expresssion cassette comprising a) a promoter, preferably a promoter selected from the group consisting of Big35S, PCUbi, Super and USP, in particular p-PcUBI; and b) the nucleic acid SEQ ID NO. 58731, or a homolog or fragment thereof, or a homolog thereof being depicted in Table I, application no. 5, column 8, in the same line as SEQ ID NO. 58731, preferably the coding region thereof, a homolog or a fragment thereof; which are operable linked.

[35532] In an embodiment thereof the expression cassette comprises in addition c) a nucleic acid molecule encoding a transit peptide, especially a plastidal transit petide in case in Table I, application no. 5, in column 6 in the same line as SEQ ID NO. 58731 is depicted, plastidic is mentioned, or a mitochondrial transit peptide in case in Table I, application no. 5, in column 6 in the same line as SEQ ID NO. 58731 is depicted, mitochondrial is mentioned; which is operable linked, too.

[35533] In another embodiment thereof the expression cassette does not comprise an additional transit peptide in case in Table I, application no. 5, in column 6 in the same line as SEQ ID NO. 58731 is depicted, non-targeted is mentioned.

[35534] In an embodiment the present invention relates to an expresssion cassette comprising a) a promoter, preferably a promoter selected from the group consisting of Big35S, PCUbi, Super and USP, in particular p-PcUBI; and b) the nucleic acid SEQ ID NO. 59370, or a homolog or fragment thereof, or a homolog thereof being depicted in Table I, application no. 5, column 8, in the same line as SEQ ID NO. 59370, preferably the coding region thereof, a homolog or a fragment thereof; which are operable linked.

[35535] In an embodiment thereof the expression cassette comprises in addition c) a nucleic acid molecule encoding a transit peptide, especially a plastidal transit petide in case in Table I, application no. 5, in column 6 in the same line as SEQ ID NO. 59370 is depicted, plastidic is mentioned, or a mitochondrial transit peptide in case in Table I, application no. 5, in column 6 in the same line as SEQ ID NO. 59370 is depicted, mitochondrial is mentioned; which is operable linked, too.

[35536] In another embodiment thereof the expression cassette does not comprise an additional transit peptide in case in Table I, application no. 5, in column 6 in the same line as SEQ ID NO. 59370 is depicted, non-targeted is mentioned.

[35537] In an embodiment the present invention relates to an expresssion cassette comprising a) a promoter, preferably a promoter selected from the group consisting of Big35S, PCUbi, Super and USP, in particular p-PcUBI; and b) the nucleic acid SEQ ID NO. 12698, or a homolog or fragment thereof, or a homolog thereof being depicted in Table I, application no. 5, column 8, in the same line as SEQ ID NO. 12698, preferably the coding region thereof, a homolog or a fragment thereof; which are operable linked.

[35538] In an embodiment thereof the expression cassette comprises in addition c) a nucleic acid molecule encoding a transit peptide, especially a plastidal transit petide in case in Table I, application no. 5, in column 6 in the same line as SEQ ID NO. 12698 is depicted, plastidic is mentioned, or a mitochondrial transit peptide in case in Table I, application no. 5, in column 6 in the same line as SEQ ID NO. 12698 is depicted, mitochondrial is mentioned; which is operable linked, too.

[35539] In another embodiment thereof the expression cassette does not comprise an additional transit peptide in case in Table I, application no. 5, in column 6 in the same line as SEQ ID NO. 12698 is depicted, non-targeted is mentioned.

[35540] In an embodiment the present invention relates to an expresssion cassette comprising a) a promoter, preferably a promoter selected from the group consisting of Big35S, PCUbi, Super and USP, in particular p-Super; and b) the nucleic acid SEQ ID NO. 88879, or a homolog or fragment thereof, or a homolog thereof being depicted in Table I, application no. 5, column 8, in the same line as SEQ ID NO. 88879, preferably the coding region thereof, a homolog or a fragment thereof; which are operable linked.

[35541] In an embodiment thereof the expression cassette comprises in addition c) a nucleic acid molecule encoding a transit peptide, especially a plastidal transit petide in case in Table I, application no. 5, in column 6 in the same line as SEQ ID NO. 88879 is depicted, plastidic is mentioned, or a mitochondrial transit peptide in case in Table I, application no. 5, in column 6 in the same line as SEQ ID NO. 88879 is depicted, mitochondrial is mentioned; which is operable linked, too.

[35542] In another embodiment thereof the expression cassette does not comprise an additional transit peptide in case in Table I, application no. 5, in column 6 in the same line as SEQ ID NO. 88879 is depicted, non-targeted is mentioned.

[35543] In an embodiment the present invention relates to an expresssion cassette comprising a) a promoter, preferably a promoter selected from the group consisting of Big35S, PCUbi, Super and USP, in particular p-Super; and b) the nucleic acid SEQ ID NO. 63544, or a homolog or fragment thereof, or a homolog thereof being depicted in Table I, application no. 5, column 8, in the same line as SEQ ID NO. 63544, preferably the coding region thereof, a homolog or a fragment thereof; which are operable linked.

[35544] In an embodiment thereof the expression cassette comprises in addition c) a nucleic acid molecule encoding a transit peptide, especially a plastidal transit petide in case in Table I, application no. 5, in column 6 in the same line as SEQ ID NO. 63544 is depicted, plastidic is mentioned, or a mitochondrial transit peptide in case in Table I, application no. 5, in column 6 in the same line as SEQ ID NO. 63544 is depicted, mitochondrial is mentioned; which is operable linked, too.

[35545] In another embodiment thereof the expression cassette does not comprise an additional transit peptide in case in Table I, application no. 5, in column 6 in the same line as SEQ ID NO. 63544 is depicted, non-targeted is mentioned.

[35546] In an embodiment the present invention relates to an expresssion cassette comprising a) a promoter, preferably a promoter selected from the group consisting of Big35S, PCUbi, Super and USP, in particular p-Super; and b) the nucleic acid SEQ ID NO. 64148, or a homolog or fragment thereof, or a homolog thereof being depicted in Table I, application no. 5, column 8, in the same line as SEQ ID NO. 64148, preferably the coding region thereof, a homolog or a fragment thereof; which are operable linked.

[35547] In an embodiment thereof the expression cassette comprises in addition c) a nucleic acid molecule encoding a transit peptide, especially a plastidal transit petide in case in Table I, application no. 5, in column 6 in the same line as SEQ ID NO. 64148 is depicted, plastidic is mentioned, or a mitochondrial transit peptide in case in Table I, application no. 5, in column 6 in the same line as SEQ ID NO. 64148 is depicted, mitochondrial is mentioned; which is operable linked, too.

[35548] In another embodiment thereof the expression cassette does not comprise an additional transit peptide in case in Table I, application no. 5, in column 6 in the same line as SEQ ID NO. 64148 is depicted, non-targeted is mentioned.

[35549] In an embodiment the present invention relates to an expresssion cassette comprising a) a promoter, preferably a promoter selected from the group consisting of Big35S, PCUbi, Super and USP, in particular p-USP; and b) the nucleic acid SEQ ID NO. 101855, or a homolog or fragment thereof, or a homolog thereof being depicted in Table I, application no. 5, column 8, in the same line as SEQ ID NO. 101855, preferably the coding region thereof, a homolog or a fragment thereof; which are operable linked.

[35550] In an embodiment thereof the expression cassette comprises in addition c) a nucleic acid molecule encoding a transit peptide, especially a plastidal transit petide in case in Table I, application no. 5, in column 6 in the same line as SEQ ID NO. 101855 is depicted, plastidic is mentioned, or a mitochondrial transit peptide in case in Table I, application no. 5, in column 6 in the same line as SEQ ID NO. 101855 is depicted, mitochondrial is mentioned; which is operable linked, too.

[35551] In another embodiment thereof the expression cassette does not comprise an additional transit peptide in case in Table I, application no. 5, in column 6 in the same line as SEQ ID NO. 101855 is depicted, non-targeted is mentioned.

[35552] In an embodiment the present invention relates to an expresssion cassette comprising a) a promoter, preferably a promoter selected from the group consisting of Big35S, PCUbi, Super and USP, in particular p-PcUBI; and b) the nucleic acid SEQ ID NO. 102015, or a homolog or fragment thereof, or a homolog thereof being depicted in Table I, application no. 5, column 8, in the same line as SEQ ID NO. 102015, preferably the coding region thereof, a homolog or a fragment thereof; which are operable linked.

[35553] In an embodiment thereof the expression cassette comprises in addition c) a nucleic acid molecule encoding a transit peptide, especially a plastidal transit petide in case in Table I, application no. 5, in column 6 in the same line as SEQ ID NO. 102015 is depicted, plastidic is mentioned, or a mitochondrial transit peptide in case in Table I, application no. 5, in column 6 in the same line as SEQ ID NO. 102015 is depicted, mitochondrial is mentioned; which is operable linked, too.

[35554] In another embodiment thereof the expression cassette does not comprise an additional transit peptide in case in Table I, application no. 5, in column 6 in the same line as SEQ ID NO. 102015 is depicted, non-targeted is mentioned.

[35555] In an embodiment the present invention relates to an expresssion cassette comprising a) a promoter, preferably a promoter selected from the group consisting of Big35S, PCUbi, Super and USP, in particular Big35S; and b) the nucleic acid SEQ ID NO. 14843, or a homolog or fragment thereof, or a homolog thereof being depicted in Table I, application no. 5, column 8, in the same line as SEQ ID NO. 14843, preferably the coding region thereof, a homolog or a fragment thereof; which are operable linked.

[35556] In an embodiment thereof the expression cassette comprises in addition c) a nucleic acid molecule encoding a transit peptide, especially a plastidal transit petide in case in Table I, application no. 5, in column 6 in the same line as SEQ ID NO. 14843 is depicted, plastidic is mentioned, or a mitochondrial transit peptide in case in Table I, application no. 5, in column 6 in the same line as SEQ ID NO. 14843 is depicted, mitochondrial is mentioned; which is operable linked, too.

[35557] In another embodiment thereof the expression cassette does not comprise an additional transit peptide in case in Table I, application no. 5, in column 6 in the same line as SEQ ID NO. 14843 is depicted, non-targeted is mentioned.

[35558] In an embodiment the present invention relates to an expresssion cassette comprising a) a promoter, preferably a promoter selected from the group consisting of Big35S, PCUbi, Super and USP, in particular p-PcUBI; and b) the nucleic acid SEQ ID NO. 66274, or a homolog or fragment thereof, or a homolog thereof being depicted in Table I, application no. 5, column 8, in the same line as SEQ ID NO. 66274, preferably the coding region thereof, a homolog or a fragment thereof; which are operable linked.

[35559] In an embodiment thereof the expression cassette comprises in addition c) a nucleic acid molecule encoding a transit peptide, especially a plastidal transit petide in case in Table I, application no. 5, in column 6 in the same line as SEQ ID NO. 66274 is depicted, plastidic is mentioned, or a mitochondrial transit peptide in case in Table I, application no. 5, in column 6 in the same line as SEQ ID NO. 66274 is depicted, mitochondrial is mentioned; which is operable linked, too.

[35560] In another embodiment thereof the expression cassette does not comprise an additional transit peptide in case in Table I, application no. 5, in column 6 in the same line as SEQ ID NO. 66274 is depicted, non-targeted is mentioned.

[35561] In an embodiment the present invention relates to an expresssion cassette comprising a) a promoter, preferably a promoter selected from the group consisting of Big35S, PCUbi, Super and USP, in particular p-USP; and b) the nucleic acid SEQ ID NO. 102061, or a homolog or fragment thereof, or a homolog thereof being depicted in Table I, application no. 5, column 8, in the same line as SEQ ID NO. 102061, preferably the coding region thereof, a homolog or a fragment thereof; which are operable linked.

[35562] In an embodiment thereof the expression cassette comprises in addition c) a nucleic acid molecule encoding a transit peptide, especially a plastidal transit petide in case in Table I, application no. 5, in column 6 in the same line as SEQ ID NO. 102061 is depicted, plastidic is mentioned, or a mitochondrial transit peptide in case in Table I, application no. 5, in column 6 in the same line as SEQ ID NO. 102061 is depicted, mitochondrial is mentioned; which is operable linked, too.

[35563] In another embodiment thereof the expression cassette does not comprise an additional transit peptide in case in Table I, application no. 5, in column 6 in the same line as SEQ ID NO. 102061 is depicted, non-targeted is mentioned.

[35564] In an embodiment the present invention relates to an expresssion cassette comprising a) a promoter, preferably a promoter selected from the group consisting of Big35S, PCUbi, Super and USP, in particular p-Super; and b) the nucleic acid SEQ ID NO. 92339, or a homolog or fragment thereof, or a homolog thereof being depicted in Table I, application no. 5, column 8, in the same line as SEQ ID NO. 92339, preferably the coding region thereof, a homolog or a fragment thereof; which are operable linked.

[35565] In an embodiment thereof the expression cassette comprises in addition c) a nucleic acid molecule encoding a transit peptide, especially a plastidal transit petide in case in Table I, application no. 5, in column 6 in the same line as SEQ ID NO. 92339 is depicted, plastidic is mentioned, or a mitochondrial transit peptide in case in Table I, application no. 5, in column 6 in the same line as SEQ ID NO. 92339 is depicted, mitochondrial is mentioned; which is operable linked, too.

[35566] In another embodiment thereof the expression cassette does not comprise an additional transit peptide in case in Table I, application no. 5, in column 6 in the same line as SEQ ID NO. 92339 is depicted, non-targeted is mentioned.

[35567] In an embodiment the present invention relates to an expresssion cassette comprising a) a promoter, preferably a promoter selected from the group consisting of Big35S, PCUbi, Super and USP, in particular p-Super; and b) the nucleic acid SEQ ID NO. 92540, or a homolog or fragment thereof, or a homolog thereof being depicted in Table I, application no. 5, column 8, in the same line as SEQ ID NO. 92540, preferably the coding region thereof, a homolog or a fragment thereof; which are operable linked.

[35568] In an embodiment thereof the expression cassette comprises in addition c) a nucleic acid molecule encoding a transit peptide, especially a plastidal transit petide in case in Table I, application no. 5, in column 6 in the same line as SEQ ID NO. 92540 is depicted, plastidic is mentioned, or a mitochondrial transit peptide in case in Table I, application no. 5, in column 6 in the same line as SEQ ID NO. 92540 is depicted, mitochondrial is mentioned; which is operable linked, too.

[35569] In another embodiment thereof the expression cassette does not comprise an additional transit peptide in case in Table I, application no. 5, in column 6 in the same line as SEQ ID NO. 92540 is depicted, non-targeted is mentioned.

[35570] In an embodiment the present invention relates to an expresssion cassette comprising a) a promoter, preferably a promoter selected from the group consisting of Big35S, PCUbi, Super and USP, in particular p-PcUBI; and b) the nucleic acid SEQ ID NO. 67998, or a homolog or fragment thereof, or a homolog thereof being depicted in Table I, application no. 5, column 8, in the same line as SEQ ID NO. 67998, preferably the coding region thereof, a homolog or a fragment thereof; which are operable linked.

[35571] In an embodiment thereof the expression cassette comprises in addition c) a nucleic acid molecule encoding a transit peptide, especially a plastidal transit petide in case in Table I, application no. 5, in column 6 in the same line as SEQ ID NO. 67998 is depicted, plastidic is mentioned, or a mitochondrial transit peptide in case in Table I, application no. 5, in column 6 in the same line as SEQ ID NO. 67998 is depicted, mitochondrial is mentioned; which is operable linked, too.

[35572] In another embodiment thereof the expression cassette does not comprise an additional transit peptide in case in Table I, application no. 5, in column 6 in the same line as SEQ ID NO. 67998 is depicted, non-targeted is mentioned.

[35573] In an embodiment the present invention relates to an expresssion cassette comprising a) a promoter, preferably a promoter selected from the group consisting of Big35S, PCUbi, Super and USP, in particular Big35S; and b) the nucleic acid SEQ ID NO. 98445, or a homolog or fragment thereof, or a homolog thereof being depicted in Table I, application no. 5, column 8, in the same line as SEQ ID NO. 98445, preferably the coding region thereof, a homolog or a fragment thereof; which are operable linked.

[35574] In an embodiment thereof the expression cassette comprises in addition c) a nucleic acid molecule encoding a transit peptide, especially a plastidal transit petide in case in Table I, application no. 5, in column 6 in the same line as SEQ ID NO. 98445 is depicted, plastidic is mentioned, or a mitochondrial transit peptide in case in Table I, application no. 5, in column 6 in the same line as SEQ ID NO. 98445 is depicted, mitochondrial is mentioned; which is operable linked, too.

[35575] In another embodiment thereof the expression cassette does not comprise an additional transit peptide in case in Table I, application no. 5, in column 6 in the same line as SEQ ID NO. 98445 is depicted, non-targeted is mentioned.

[35576] In an embodiment the present invention relates to an expresssion cassette comprising a) a promoter, preferably a promoter selected from the group consisting of Big35S, PCUbi, Super and USP, in particular p-PcUBI; and b) the nucleic acid SEQ ID NO. 68413, or a homolog or fragment thereof, or a homolog thereof being depicted in Table I, application no. 5, column 8, in the same line as SEQ ID NO. 68413, preferably the coding region thereof, a homolog or a fragment thereof; which are operable linked.

[35577] In an embodiment thereof the expression cassette comprises in addition c) a nucleic acid molecule encoding a transit peptide, especially a plastidal transit petide in case in Table I, application no. 5, in column 6 in the same line as SEQ ID NO. 68413 is depicted, plastidic is mentioned, or a mitochondrial transit peptide in case in Table I, application no. 5, in column 6 in the same line as SEQ ID NO. 68413 is depicted, mitochondrial is mentioned; which is operable linked, too.

[35578] In another embodiment thereof the expression cassette does not comprise an additional transit peptide in case in Table I, application no. 5, in column 6 in the same line as SEQ ID NO. 68413 is depicted, non-targeted is mentioned.

[35579] [0165.1.1.5] to [0170.1.1.5] for the disclosure of these paragraphs see [0165.1.1.1] to [0170.1.1.1] above.

[35580] The invention further provides a vector, comprising a nucleic acid molecule comprising 1) a nucleic acid molecule selected from the group consisting of:
[35581] (a) a nucleic acid molecule encoding a polypeptide shown in Table II, column 5 or 8, application no. 5, preferably shown in Table II A, application no. 5, in column 5, or in Table II A, application no. 5, column 8, or in Table II B, application no. 5, column 8, or a homolog or a fragment thereof;
[35582] (b) a nucleic acid molecule shown in Table I, application no. 5, column 5 or 8, preferably shown in Table I A, application no. 5, in column 5, or in Table I A, application no. 5, column 8, or in Table I B, application no. 5, column 8, preferably the coding region thereof, or a homolog or a fragment thereof;
[35583] (c) a nucleic acid molecule, which, as a result of the degeneracy of the genetic code, can be derived from a polypeptide sequence depicted in column 5 or 8 of Table II, application no. 5, preferably shown in Table II A, application no. 5, in column 5, or in Table II A, application no. 5, column 8, or in Table II B, application no. 5, column 8;
[35584] (d) a nucleic acid molecule having at least 30% identity, preferably at least 40%, 50%, 60%, 70%, 75%, 80%, 85%, 90%, 95%, 96%, 97%, 98%, 99%, 99.5%, with the nucleic acid molecule sequence of a polynucleotide comprising the nucleic acid molecule shown in column 5 or 8 of Table I, application no. 5, preferably shown in Table I A, application no. 5, in column 5, or in Table I A, application no. 5, column 8, or in Table I B, application no. 5, column 8, preferably the coding region thereof;
[35585] (e) a nucleic acid molecule encoding a polypeptide having at least 30% identity, preferably at least 40%, 50% 60%, 70%, 75%, 80%, 85%, 90%, 95%, 96%, 97%, 98%, 99%, 99.5%, identity with the amino acid sequence of the polypeptide encoded by the nucleic acid molecule of (a), (b), (c), or (d);
[35586] (f) a nucleic acid molecule which hybridizes with a nucleic acid molecule of (a), (b), (c), (d), or (e) under stringent hybridization conditions;
[35587] (g) a nucleic acid molecule encoding a polypeptide which can be isolated with the aid of monoclonal or polyclonal antibodies made against a polypeptide encoded by one of the nucleic acid molecules of (a), (b), (c), (d), (e) or (f);
[35588] (h) a nucleic acid molecule encoding a polypeptide comprising the consensus sequence or one or more polypeptide motifs as shown in column 8 of Table IV, application no. 5;
[35589] (i) a nucleic acid molecule encoding a polypeptide having the activity represented by a protein as depicted in column 5 of Table II, application no. 5;
[35590] (j) a nucleic acid molecule comprising a polynucleotide which is obtained by amplifying a cDNA library or a genomic library using the primers in Table III, application no. 5, column 8;
[35591] and
[35592] (k) nucleic acid molecule which is obtainable by screening a suitable nucleic acid library, especially a cDNA library and/or a genomic library, under stringent hybridization conditions with a probe comprising one of the sequences of the nucleic acid molecule of (a), (b), (c), (d), (e), (f), (g), (h), (i) or (j) or with a fragment thereof having at least 15 nt, preferably 20 nt, 30 nt, 50 nt, 100 nt, 200 nt, 500 nt, 1000 nt, 1500 nt, 2000 nt or 3000 nt of the nucleic acid molecule complementary to a nucleic acid sequence characterized in (a), (b), (c), (d), (e), (f), (g), (h), (i) or (j);
[35593] or a nucleic acid molecule comprising a sequence which is complementary thereto.
   (All the references to Tables I to IV are references to the corresponding lines of Tables I to IV.)

[35594] In a preferred embodiment of said vector said nucleic acid molecule according to 1 (a), (b), (c), (d), (e), (f), (g), (h), (i), (j) or (k) encodes a polypeptide which has the activity of the respective polypeptide represented by a protein comprising a polypeptide as depicted in the respective line in column 5 of Table II, application no. 5.

[35595] In another preferred embodiment of said vector said nucleic acid molecule according to 1 (a), (b), (c), (d), (e), (f), (g), (h), (i), (j) or (k) confers a generation or an increase of the respective fine chemical in a non-human organism or a part thereof as compared to a corresponding wild-type non-human organism or part thereof.

[35596] In another preferred embodiment of said vector said nucleic acid molecule according to 1 (a), (b), (c), (d), (e), (f), (g), (h), (i), (j) or (k) encodes a polypeptide which has the activity of the respective polypeptide represented by a protein as depicted in the respective line in column 5 of Table II, application no. 5, and confers a generation or an increase of the respective fine chemical in a non-human organism or a part thereof as compared to a corresponding wild-type non-human organism or part thereof.

[35597] In another embodiment thereof said vector comprises beneath said nucleic acid molecule according to 1 (a), (b), (c), (d), (e), (f), (g), (h), (i), (j) or (k), a promoter, preferably a promoter selected from the group consisting of Big35S, PCUbi, Super and USP, which are operable linked.

[35598] In a preferred embodiment thereof said vector comprises beneath said nucleic acid molecule according to 1 (a), (b), (c), (d), (e), (f), (g), (h), (i), (j) or (k), a promoter, preferably a promoter selected from the group consisting of Big35S, PCUbi, Super and USP, which are operable linked; and said nucleic acid molecule according to 1 (a), (b), (c), (d), (e), (f), (g), (h), (i), (j) or (k) encodes a polypeptide which has the activity of the respective polypeptide represented by a protein comprising a polypeptide as depicted in the respective line in column 5 of Table II, application no. 5.

[35599] In another preferred embodiment thereof said vector comprises beneath said nucleic acid molecule according to 1 (a), (b), (c), (d), (e), (f), (g), (h), (i), (j) or (k), a promoter, preferably a promoter selected from the group consisting of Big35S, PCUbi, Super and USP, which are operable linked; and said nucleic acid molecule according to 1 (a), (b), (c), (d), (e), (f), (g), (h), (i), (j) or (k) confers a generation or an increase of the respective fine chemical in a non-human organism or a part thereof as compared to a corresponding wild-type non-human organism or part thereof.

[35600] In another preferred embodiment thereof said vector comprises beneath said nucleic acid molecule according to 1 (a), (b), (c), (d), (e), (f), (g), (h), (i), (j) or (k), a promoter, preferably a promoter selected from the group consisting of Big35S, PCUbi, Super and USP, which are operable linked; and said nucleic acid molecule according to 1 (a), (b), (c), (d), (e), (f), (g), (h), (i), (j) or (k) encodes a polypeptide which has the activity of the respective polypeptide represented by a protein as depicted in the respective line in column 5 of Table II, application no. 5, and confers a generation or an increase of the respective fine chemical in a non-human organism or a part thereof as compared to a corresponding wild-type non-human organism or part thereof.

[35601] In another embodiment thereof said vector comprises beneath said nucleic acid molecule according to 1 (a), (b), (c), (d), (e), (f), (g), (h), (i), (j) or (k), a nucleic acid molecule encoding a transit peptide, preferably encoding a plastidal transit peptide, especially in case in column 6 of Table I, application no. 5, in the same line as of the respective nucleic acid molecule according to 1) “plastidic” is depicted, or encoding a mitochondrial transit peptide, especially in case in column 6 of Table I, application no. 5, in the same line as of the respective nucleic acid molecule according to 1) “mitochondrial” is depicted, which are operable linked.

[35602] In another embodiment thereof said vector does not comprise beneath said nucleic acid molecule according to 1 (a), (b), (c), (d), (e), (f), (g), (h), (i), (j) or (k), a nucleic acid molecule encoding a transit peptide in case in column 6 of Table I, application no. 5, in the same line as of the respective nucleic acid molecule according to 1) “non-targeted” is depicted.

[35603] In another embodiment thereof said vector comprises beneath said nucleic acid molecule according to 1 (a), (b), (c), (d), (e), (f), (g), (h), (i), (j) or (k), and a promoter, preferably a promoter selected from the group consisting of Big35S, PCUbi, Super and USP; a nucleic acid molecule encoding a transit peptide, preferably encoding a plastidal transit peptide, especially in case in column 6 of Table I, application no. 5, in the same line as of the respective nucleic acid molecule according to 1) “plastidic” is depicted, or encoding a mitochondrial transit peptide, especially in case in column 6 of Table I, application no. 5, in the same line as of the respective nucleic acid molecule according to 1) “mitochondrial” is depicted, which are operable linked.

[35604] In another embodiment thereof said vector does not comprise beneath said nucleic acid molecule according to 1 (a), (b), (c), (d), (e), (f), (g), (h), (i), (j) or (k), and a promoter, preferably a promoter selected from the group consisting of Big35S, PCUbi, Super and USP, which are operable linked; a nucleic acid molecule encoding a transit peptide, especially in case in column 6 of Table I, application no. 5, in the same line as of the respective nucleic acid molecule according to 1) “non-targeted” is depicted.

[35605] In another embodiment thereof said vector comprises beneath said nucleic acid molecule according to 1 (a), (b), (c), (d), (e), (f), (g), (h), (i), (j) or (k), and a promoter, preferably a promoter selected from the group consisting of Big35S, PCUbi, Super and USP; a nucleic acid molecule encoding a transit peptide, preferably encoding a plastidal transit peptide, especially in case in column 6 of Table I, application no. 5, in the same line as of the respective nucleic acid molecule according to 1) “plastidic” is depicted, or encoding a mitochondrial transit peptide, especially in case in column 6 of Table I, application no. 5, in the same line as of the respective nucleic acid molecule according to 1) “mitochondrial” is depicted, which are operable linked; and wherein said nucleic acid molecule according to 1 (a), (b), (c), (d), (e), (f), (g), (h), (i), (j) or (k) encodes a polypeptide which has the activity of the respective polypeptide represented by a protein comprising a polypeptide as depicted in column 5 of Table II, application no. 5 (in the same line).

[35606] In another embodiment thereof said vector does not comprise beneath said nucleic acid molecule according to 1 (a), (b), (c), (d), (e), (f), (g), (h), (i), (j) or (k), and a promoter, preferably a promoter selected from the group consisting of Big35S, PCUbi, Super and USP, which are operatively linked; a nucleic acid molecule encoding a transit peptide, especially in case in column 6 of Table I, application no. 5, in the same line as of the respective nucleic acid molecule according to 1) “non-targeted” is depicted; and wherein said nucleic acid molecule according to 1 (a), (b), (c), (d), (e), (f), (g), (h), (i), (j) or (k) encodes a polypeptide which has the activity of the respective polypeptide represented by a protein comprising a polypeptide as depicted in column 5 of Table II, application no. 5.

[35607] In another embodiment thereof said vector comprises beneath said nucleic acid molecule according to 1 (a), (b), (c), (d), (e), (f), (g), (h), (i), (j) or (k), and a promoter, preferably a promoter selected from the group consisting of Big35S, PCUbi, Super and USP; a nucleic acid molecule encoding a transit peptide, preferably encoding a plastidal transit peptide, especially in case in column 6 of Table I, application no. 5, in the same line as of the respective nucleic acid molecule according to 1) “plastidic” is depicted, or encoding a mitochondrial transit peptide, especially in case in column 6 of Table I, application no. 5, in the same line as of the respective nucleic acid molecule according to 1) “mitochondrial” is depicted, which are operable linked; and wherein said nucleic acid molecule according to 1 (a), (b), (c), (d), (e), (f), (g), (h), (i), (j) or (k) confers a generation or an increase of the respective fine chemical in a non-human organism or a part thereof as compared to a corresponding wild-type non-human organism or part thereof.

[35608] In another embodiment thereof said vector does not comprise beneath said nucleic acid molecule according to 1 (a), (b), (c), (d), (e), (f), (g), (h), (i), (j) or (k), and a promoter, preferably a promoter selected from the group consisting of Big35S, PCUbi, Super and USP, which are operatively linked; a nucleic acid molecule encoding a transit peptide, especially in case in column 6 of Table I, application no. 5, in the same line as of the respective nucleic acid molecule according to 1) “non-targeted” is depicted; and wherein said nucleic acid molecule according to 1 (a), (b), (c), (d), (e), (f), (g), (h), (i), (j) or (k) confers a generation or an increase of the respective fine chemical in a non-human organism or a part thereof as compared to a corresponding wild-type non-human organism or part thereof.

[35609] In another embodiment thereof said vector comprises beneath said nucleic acid molecule according to 1 (a), (b), (c), (d), (e), (f), (g), (h), (i), (j) or (k), and a promoter, preferably a promoter selected from the group consisting of Big35S, PCUbi, Super and USP; a nucleic acid molecule encoding a transit peptide, preferably encoding a plastidal transit peptide, especially in case in column 6 of Table I, application no. 5, in the same line as of the respective nucleic acid molecule according to 1) “plastidic” is depicted, or encoding a mitochondrial transit peptide, especially in case in column 6 of Table I, application no. 5, in the same line as of the respective nucleic acid molecule according to 1) “mitochondrial” is depicted, which are operable linked; and wherein said nucleic acid molecule according to 1 (a), (b), (c), (d), (e), (f), (g), (h), (i), (j) or (k) encodes a polypeptide which has the activity of the respective polypeptide represented by a protein as depicted in column 5 of Table II application no. 5 and confers a generation or an increase of the respective fine chemical in a non-human organism or a part thereof as compared to a corresponding wild-type non-human organism or part thereof.

[35610] In another embodiment thereof said vector does not comprise beneath said nucleic acid molecule according to 1 (a), (b), (c), (d), (e), (f), (g), (h), (i), (j) or (k), and a promoter, preferably a promoter selected from the group consisting of Big35S, PCUbi, Super and USP, which are operatively linked; a nucleic acid molecule encoding a transit peptide, especially in case in column 6 of Table I, application no. 5, in the same line as of the respective nucleic acid molecule according to 1) “non-targeted” is depicted; and wherein said nucleic acid molecule according to 1 (a), (b), (c), (d), (e), (f), (g), (h), (i), (j) or (k) encodes a polypeptide which has the activity of the respective polypeptide represented by a protein as depicted in column 5 of Table II application no. 5 (in the same line) and confers a generation or an increase of the respective fine chemical in a non-human organism or a part thereof as compared to a corresponding wild-type non-human organism or part thereof. In a preferred embodiment of said vector said nucleic acid molecule according to 1 (a), (b), (c), (d), (e), (f), (g), (h), (i), (j) or (k), said promoter and optionally said nucleic acid molecule encoding a transit peptide are encompassed in an expression cassette. Accordingly in an embodiment the invention provides a vector comprising an expression cassette comprising said nucleic acid molecule according to 1 (a), (b), (c), (d), (e), (f), (g), (h), (i), (j) or (k), said promoter and optionally said a nucleic acid molecule encoding a transit peptide, operable linked. Said expression cassette may encompass a terminator, too.

[35611] The invention further provides a vector comprising a nucleic acid molecule comprising 1) a nucleic acid molecule selected from the group consisting of:
[35612] (a) a nucleic acid molecule encoding a polypeptide shown in Table II, column 5 or 8, application no. 5, preferably shown in Table II A, application no. 5, in column 5, or in Table II A, application no. 5, column 8, or in Table II B, application no. 5, column 8, or a homolog or a fragment thereof;
[35613] (b) a nucleic acid molecule shown in Table I, application no. 5, column 5 or 8, preferably shown in Table I A, application no. 5, in column 5, or in Table I A, application no. 5, column 8, or in Table I B, application no. 5, column 8, preferably the coding region thereof, or a homolog or a fragment thereof;
[35614] (c) a nucleic acid molecule, which, as a result of the degeneracy of the genetic code, can be derived from a polypeptide sequence depicted in column 5 or 8 of Table II, application no. 5, preferably shown in Table II A, application no. 5, in column 5, or in Table II A, application no. 5, column 8, or in Table II B, application no. 5, column 8;
[35615] (d) a nucleic acid molecule having at least 30% identity, preferably at least 40%, 50%, 60%, 70%, 75%, 80%, 85%, 90%, 95%, 96%, 97%, 98%, 99%, 99.5%, with the nucleic acid molecule sequence of a polynucleotide comprising the nucleic acid molecule shown in column 5 or 8 of Table I, application no. 5, preferably shown in Table I A, application no. 5, in column 5, or in Table I A, application no. 5, column 8, or in Table I B, application no. 5, column 8, preferably the coding region thereof;
[35616] (e) a nucleic acid molecule encoding a polypeptide having at least 30% identity, preferably at least 40%, 50% 60%, 70%, 75%, 80%, 85%, 90%, 95%, 96%, 97%, 98%, 99%, 99.5%, identity with the amino acid sequence of the polypeptide encoded by the nucleic acid molecule of (a), (b), (c), or (d);
[35617] (f) a nucleic acid molecule which hybridizes with a nucleic acid molecule of (a), (b), (c), (d), or (e) under stringent hybridization conditions;
[35618] (g) a nucleic acid molecule encoding a polypeptide which can be isolated with the aid of monoclonal or polyclonal antibodies made against a polypeptide encoded by one of the nucleic acid molecules of (a), (b), (c), (d), (e) or (f);
[35619] (h) a nucleic acid molecule encoding a polypeptide comprising the consensus sequence or one or more polypeptide motifs as shown in column 8 of Table IV, application no. 5;
[35620] (i) a nucleic acid molecule encoding a polypeptide having the activity represented by a protein as depicted in column 5 of Table II, application no. 5;
[35621] (j) a nucleic acid molecule comprising a polynucleotide which is obtained by amplifying a cDNA library or a genomic library using the primers in Table III, application no. 5, column 8;
[35622] and
[35623] (k) nucleic acid molecule which is obtainable by screening a suitable nucleic acid library, especially a cDNA library and/or a genomic library, under stringent hybridization conditions with a probe comprising one of the sequences of the nucleic acid molecule of (a), (b), (c), (d), (e), (f), (g), (h), (i) or (j) or with a fragment thereof having at least 15 nt, preferably 20 nt, 30 nt, 50 nt, 100 nt, 200 nt, 500 nt, 1000 nt, 1500 nt, 2000 nt or 3000 nt of the nucleic acid molecule complementary to a nucleic acid sequence characterized in (a), (b), (c), (d), (e), (f), (g), (h), (i) or (j);
[35624] or a nucleic acid molecule comprising a sequence which is complementary thereto;
   whereby, preferably, the nucleic acid molecule according to 1 (a), (b), (c), (d), (e), (f), (g), (h), (i), (j) or (k) distinguishes over the sequence depicted in Table I A and/or I B, application no. 5, column 5 or 8, or the coding region thereof, by one or more nucleotides (especially but not exceeding 5%, preferably 4%, 3%, 2%, 1%, 0.5%, 0.2% or 0.1%). In an embodiment, the nucleic acid molecule of the invention does not consist of the sequence shown in Table I A and/or I B, application no. 5, column 5 or 8, or the coding region thereof, respectively. In another embodiment, the nucleic acid molecule of the present invention, preferably the coding region thereof, is 30%, 40%, 50%, 60%, 70%, 80%, 90%, 95% identical but less than 100%, 99.999%, 99.99%, 99.9%, 99%, 98%, 97%, 96% or 95% identical to the sequence shown in Table I A and/or I B, application no. 5, column 5 or 8, or the coding region thereof, respectively. In a further embodiment the nucleic acid molecule does not encode the polypeptide sequence shown in Table II A and/or II B, application no. 5, column 5 or 8 but homologs thereof. Accordingly, in one embodiment, the nucleic acid molecule of the present invention encodes in one embodiment a polypeptide which differs at least in one or more amino acids (especially but not exceeding 5%, preferably 4%, 3%, 2%, 1%, 0.5%, 0.2% or 0.1%) from the polypeptide shown in Table II, application no. 5, column 5 or 8 and does not encode a protein of the sequence shown in Table II A and/or II B, application no. 5, column 5 or 8. Accordingly, in one embodiment, the protein encoded by a sequence of a nucleic acid according to (a), (b), (c), (d), (e), (f), (g), (h), (i), (j) or (k) does not consist of the sequence shown in Table I A and/or I B, application no. 5, column 5 and 8, or the coding region thereof. In a further embodiment, the protein of the present invention is at least 30%,40%, 50%, 60%, 70%, 80%, 90%, 95% identical to protein sequence depicted in Table II A and/or II B, application no. 5, column 5 or 8 but less than 100%, preferably less than 99.999%, 99.99% or 99.9%, more preferably less than 99%, 985, 97%, 96% or 95% identical to the sequence shown in Table II A and/or II B, application no. 5, column 5 or 8.
   (All the references to Tables I to IV are references to the corresponding lines of Tables I to IV.)

[35625] In a preferred embodiment of said vector said nucleic acid molecule according to 1 (a), (b), (c), (d), (e), (f), (g), (h), (i), (j) or (k) encodes a polypeptide which has the activity of the respective polypeptide represented by a protein comprising a polypeptide as depicted in the respective line in column 5 of Table II, application no. 5.

[35626] In another preferred embodiment of said vector said nucleic acid molecule according to 1 (a), (b), (c), (d), (e), (f), (g), (h), (i), (j) or (k) confers a generation or an increase of the respective fine chemical in a non-human organism or a part thereof as compared to a corresponding wild-type non-human organism or part thereof.

[35627] In another preferred embodiment of said vector said nucleic acid molecule according to 1 (a), (b), (c), (d), (e), (f), (g), (h), (i), (j) or (k) encodes a polypeptide which has the activity of the respective polypeptide represented by a protein as depicted in the respective line in column 5 of Table II, application no. 5, and confers a generation or an increase of the respective fine chemical in a non-human organism or a part thereof as compared to a corresponding wild-type non-human organism or part thereof.

[35628] In another embodiment thereof said vector comprises beneath said nucleic acid molecule according to 1 (a), (b), (c), (d), (e), (f), (g), (h), (i), (j) or (k), a promoter, preferably a promoter selected from the group consisting of Big35S, PCUbi, Super and USP, which are operable linked.

[35629] In a preferred embodiment thereof said vector comprises beneath said nucleic acid molecule according to 1 (a), (b), (c), (d), (e), (f), (g), (h), (i), (j) or (k), a promoter, preferably a promoter selected from the group consisting of Big35S, PCUbi, Super and USP, which are operable linked; and said nucleic acid molecule according to 1 (a), (b), (c), (d), (e), (f), (g), (h), (i), (j) or (k) encodes a polypeptide which has the activity of the respective polypeptide represented by a protein comprising a polypeptide as depicted in the respective line in column 5 of Table II, application no. 5.

[35630] In another preferred embodiment thereof said vector comprises beneath said nucleic acid molecule according to 1 (a), (b), (c), (d), (e), (f), (g), (h), (i), (j) or (k), a promoter, preferably a promoter selected from the group consisting of Big35S, PCUbi, Super and USP, which are operable linked; and said nucleic acid molecule according to 1 (a), (b), (c), (d), (e), (f), (g), (h), (i), (j) or (k) confers a generation or an increase of the respective fine chemical in a non-human organism or a part thereof as compared to a corresponding wild-type non-human organism or part thereof.

[35631] In another preferred embodiment thereof said vector comprises beneath said nucleic acid molecule according to 1 (a), (b), (c), (d), (e), (f), (g), (h), (i), (j) or (k), a promoter, preferably a promoter selected from the group consisting of Big35S, PCUbi, Super and USP, which are operable linked; and said nucleic acid molecule according to 1 (a), (b), (c), (d), (e), (f), (g), (h), (i), (j) or (k) encodes a polypeptide which has the activity of the respective polypeptide represented by a protein as depicted in the respective line in column 5 of Table II, application no. 5, and confers a generation or an increase of the respective fine chemical in a non-human organism or a part thereof as compared to a corresponding wild-type non-human organism or part thereof.

[35632] In another embodiment thereof said vector comprises beneath said nucleic acid molecule according to 1 (a), (b), (c), (d), (e), (f), (g), (h), (i), (j) or (k), a nucleic acid molecule encoding a transit peptide, preferably encoding a plastidal transit peptide, especially in case in column 6 of Table I, application no. 5, in the same line as of the respective nucleic acid molecule according to 1) “plastidic” is depicted, or encoding a mitochondrial transit peptide, especially in case in column 6 of Table I, application no. 5, in the same line as of the respective nucleic acid molecule according to 1) “mitochondrial” is depicted, which are operable linked.

[35633] In another embodiment thereof said vector does not comprise beneath said nucleic acid molecule according to 1 (a), (b), (c), (d), (e), (f), (g), (h), (i), (j) or (k), a nucleic acid molecule encoding a transit peptide in case in column 6 of Table I, application no. 5, in the same line as of the respective nucleic acid molecule according to 1) “non-targeted” is depicted.

[35634] In another embodiment thereof said vector comprises beneath said nucleic acid molecule according to 1 (a), (b), (c), (d), (e), (f), (g), (h), (i), (j) or (k), and a promoter, preferably a promoter selected from the group consisting of Big35S, PCUbi, Super and USP; a nucleic acid molecule encoding a transit peptide, preferably encoding a plastidal transit peptide, especially in case in column 6 of Table I, application no. 5, in the same line as of the respective nucleic acid molecule according to 1) “plastidic” is depicted, or encoding a mitochondrial transit peptide, especially in case in column 6 of Table I, application no. 5, in the same line as of the respective nucleic acid molecule according to 1) “mitochondrial” is depicted, which are operable linked.

[35635] In another embodiment thereof said vector does not comprise beneath said nucleic acid molecule according to 1 (a), (b), (c), (d), (e), (f), (g), (h), (i), (j) or (k), and a promoter, preferably a promoter selected from the group consisting of Big35S, PCUbi, Super and USP, which are operatively linked; a nucleic acid molecule encoding a transit peptide, especially in case in column 6 of Table I, application no. 5, in the same line as of the respective nucleic acid molecule according to 1) “non-targeted” is depicted.

[35636] In another embodiment thereof said vector comprises beneath said nucleic acid molecule according to 1 (a), (b), (c), (d), (e), (f), (g), (h), (i), (j) or (k), and a promoter, preferably a promoter selected from the group consisting of Big35S, PCUbi, Super and USP; a nucleic acid molecule encoding a transit peptide, preferably encoding a plastidal transit peptide, especially in case in column 6 of Table I, application no. 5, in the same line as of the respective nucleic acid molecule according to 1) “plastidic” is depicted, or encoding a mitochondrial transit peptide, especially in case in column 6 of Table I, application no. 5, in the same line as of the respective nucleic acid molecule according to 1) “mitochondrial” is depicted, which are operable linked; and wherein said nucleic acid molecule according to 1 (a), (b), (c), (d), (e), (f), (g), (h), (i), (j) or (k) encodes a polypeptide which has the activity of the respective polypeptide represented by a protein comprising a polypeptide as depicted in column 5 of Table II, application no. 5.

[35637] In another embodiment thereof said vector does not comprise beneath said nucleic acid molecule according to 1 (a), (b), (c), (d), (e), (f), (g), (h), (i), (j) or (k), and a promoter, preferably a promoter selected from the group consisting of Big35S, PCUbi, Super and USP, which are operatively linked; a nucleic acid molecule encoding a transit peptide, especially in case in column 6 of Table I, application no. 5, in the same line as of the respective nucleic acid molecule according to 1) “non-targeted” is depicted; and wherein said nucleic acid molecule according to 1 (a), (b), (c), (d), (e), (f), (g), (h), (i), (j) or (k) encodes a polypeptide which has the activity of the respective polypeptide represented by a protein comprising a polypeptide as depicted in column 5 of Table II, application no. 5.

[35638] In another embodiment thereof said vector comprises beneath said nucleic acid molecule according to 1 (a), (b), (c), (d), (e), (f), (g), (h), (i), (j) or (k), and a promoter, preferably a promoter selected from the group consisting of Big35S, PCUbi, Super and USP; a nucleic acid molecule encoding a transit peptide, preferably encoding a plastidal transit peptide, especially in case in column 6 of Table I, application no. 5, in the same line as of the respective nucleic acid molecule according to 1) “plastidic” is depicted, or encoding a mitochondrial transit peptide, especially in case in column 6 of Table I, application no. 5, in the same line as of the respective nucleic acid molecule according to 1) “mitochondrial” is depicted, which are operable linked; and wherein said nucleic acid molecule according to 1 (a), (b), (c), (d), (e), (f), (g), (h), (i), (j) or (k) confers a generation or an increase of the respective fine chemical in a non-human organism or a part thereof as compared to a corresponding wild-type non-human organism or part thereof.

[35639] In another embodiment thereof said vector does not comprise beneath said nucleic acid molecule according to 1 (a), (b), (c), (d), (e), (f), (g), (h), (i), (j) or (k), and a promoter, preferably a promoter selected from the group consisting of Big35S, PCUbi, Super and USP, which are operatively linked; a nucleic acid molecule encoding a transit peptide, especially in case in column 6 of Table I, application no. 5, in the same line as of the respective nucleic acid molecule according to 1) “non-targeted” is depicted; and wherein said nucleic acid molecule according to 1 (a), (b), (c), (d), (e), (f), (g), (h), (i), (j) or (k) confers a generation or an increase of the respective fine chemical in a non-human organism or a part thereof as compared to a corresponding wild-type non-human organism or part thereof.

[35640] In another embodiment thereof said vector comprises beneath said nucleic acid molecule according to 1 (a), (b), (c), (d), (e), (f), (g), (h), (i), (j) or (k), and a promoter, preferably a promoter selected from the group consisting of Big35S, PCUbi, Super and USP; a nucleic acid molecule encoding a transit peptide, preferably encoding a plastidal transit peptide, especially in case in column 6 of Table I, application no. 5, in the same line as of the respective nucleic acid molecule according to 1) “plastidic” is depicted, or encoding a mitochondrial transit peptide, especially in case in column 6 of Table I, application no. 5, in the same line as of the respective nucleic acid molecule according to 1) “mitochondrial” is depicted, which are operable linked; and wherein said nucleic acid molecule according to 1 (a), (b), (c), (d), (e), (f), (g), (h), (i), (j) or (k) encodes a polypeptide which has the activity of the respective polypeptide represented by a protein as depicted in column 5 of Table II application no. 5 and confers a generation or an increase of the respective fine chemical in a non-human organism or a part thereof as compared to a corresponding wild-type non-human organism or part thereof.

[35641] In another embodiment thereof said vector does not comprise beneath said nucleic acid molecule according to 1 (a), (b), (c), (d), (e), (f), (g), (h), (i), (j) or (k), and a promoter, preferably a promoter selected from the group consisting of Big35S, PCUbi, Super and USP, which are operatively linked; a nucleic acid molecule encoding a transit peptide, especially in case in column 6 of Table I, application no. 5, in the same line as of the respective nucleic acid molecule according to 1) “non-targeted” is depicted; and wherein said nucleic acid molecule according to 1 (a), (b), (c), (d), (e), (f), (g), (h), (i), (j) or (k) encodes a polypeptide which has the activity of the respective polypeptide represented by a protein as depicted in column 5 of Table II application no. 5 and confers a generation or an increase of the respective fine chemical in a non-human organism or a part thereof as compared to a corresponding wild-type non-human organism or part thereof.

[35642] [0181.1.1.5] to [0209.1.1.5] for the disclosure of these paragraphs see [0181.1.1.1] to [0209.1.1.1] above.

[35643] The genes of the invention, coding for an activity selected from the group consisting of 3-deoxy-7-phosphoheptulonate synthase, 3-ketoacyl-CoA thiolase, acetyltransferase, aldehyde dehydrogenase, amino acid transporter, aromatic amino acid aminotransferase, At1g19800-protein, At2g33510-protein, At4g32480-protein, At5g16650-protein, at5g21910-protein, ATP synthase subunit E, ATP-binding component of a transport system, auxin response factor, b1163-protein, b1346-protein, b1522-protein, b1796-protein, b2739-protein, b2849-protein, b3989-protein, b4029-protein, b4121-protein, binding-protein-dependent transport systems inner membrane component, branched-chain amino acid permease, calcium-dependent protein kinase, carbon dioxide concentrating mechanism protein, cardiolipin synthase, CBL-interacting protein kinase, Chaperone protein CIpB, choline kinase, coproporphyrinogen III oxidase, cullin, cyclin, cyclin D , cystathionine gamma-synthase, DNA mismatch repair protein, electron transfer flavoprotein subunit beta, elongation factor Tu, enoyl-CoA hydratase, eukaryotic translation initiation factor, eukaryotic translation initiation factor 5, fimbrial-like protein, flavodoxin, geranylgeranyl pyrophosphate synthase, gibberellin 20-oxidase, glucose dehydrogenase, glucose-6-phosphate 1-dehydrogenase, glutamate-ammonia-ligase, glutamine synthetase, glutaredoxin, glycerol kinase, glycosyl transferase, harpin-induced family protein, histone acetyltransferase, hydrolase, imidazole glycerol phosphate synthase subunit, isochorismate synthase, isopentenyl diphosphate isomerase, Leucyl/phenylalanyl-tRNA-protein transferase, lipase, L-ribulose-5-phosphate 4-epimerase, malate dehydrogenase, malic enzyme, methyl-accepting chemotaxis protein, methyltransferase, monthiol glutaredoxin, NAD(P)H-quinone oxidoreductase subunit, nitrate/nitrite transport protein, photosystem II protein, polygalacturonase, precorrin methylase, protein kinase, protein phosphatase, putative transport system permease protein, pyruvate kinase, recombinase A, RNA binding protein, RNA-binding protein, Sec-independent protein translocase subunit, short-chain alcohol dehydrogenase family, slr1107-protein, threonine synthase, transaldolase, transcription factor, transcriptional regulator, transport protein, trehalose-phosphatase, tryptophan biosynthesis protein, yfl054c-protein, and Zm_{—}4842_BE510522-protein are also called “FCRP genes”.

[35644] [0211.1.1.5] to [0225.1.1.5] for the disclosure of these paragraphs see [0211.1.1.1] to [0225.1.1.1] above.

[35645] In addition to the sequence mentioned in Table I, application no. 5, column 5 or 8, preferably the coding region thereof, or its homologs or fragments, it may be advantageous additionally to express and/or mutate further genes in the non-human organisms. Especially advantageously, additionally at least one further gene of the biosynthetic pathway of the fine chemical is expressed in the non-human organisms such as plants or microorganisms. It is also possible that the regulation of the natural genes has been modified advantageously so that the gene and/or its gene product is no longer subject to the regulatory mechanisms which exist in the non-human organisms. This leads to an increased synthesis of the respective amino acid since, for example, feedback regulations no longer exist to the same extent or not at all. In addition it might be advantageously to combine the nucleic acids sequences of the invention containing the sequences shown in the respective line in Table I, application no. 5, column 5 or 8, preferably the coding region thereof, or homologs or fragments thereof, with genes which generally support or enhance the growth or yield of the target non-human organisms, for example genes which lead to faster growth rate of non human organism like microorganisms or plants or genes which produce stress-, pathogen-, or herbicide-resistant plants.

[35646] [0227.1.1.5] to [0239.1.1.5] for the disclosure of these paragraphs see [0227.1.1.1] to [0239.1.1.1] above.

[35647] In an embodiment of the present invention the nucleic acid construct of the present invention comprises a nucleic acid molecule as depicted in the respective line in Table I, application no. 5, column 5 or 8, preferably the coding region thereof, a fragment or a homolog thereof, and a plant promoter, such as the Big 35S promoter, the DC3 promoter, the PC Ubi promoter, the LegB4-promoter, the Super promoter, the USP promoter or the like. In another embodiment the nucleic acid construct of the present invention comprises a nucleic acid molecule as depicted in the respective line in Table I, application no. 5, column 5 or 8, preferably the coding region thereof, a fragment or a homolog thereof, and a plant promoter such as, for example, the USP, the LegB4-, the DC3 promoter or the ubiquitin promoter from parsley or other herein mentioned promoters. In a further embodiment the nucleic acid construct of the present invention comprises a nucleic acid molecule as depicted in the respective line in Table I, application no. 5, column 5 or 8, preferably the coding region thereof, a fragment or a homolog thereof, and a plant promoter, such as the Big 35S promoter, the PC Ubi promoter, the Super promoter, the USP promoter or the like. In addition different terminators may advantageously be used in these nucleic acid constructs; examples for transcriptional termination are polyadenylation signals.

[35648] [0241.1.1.5] to [0245.1.1.5] for the disclosure of these paragraphs see [0241.1.1.1] to 0245.1.1.1] above.

[35649] Other preferred sequences for use in operable linkage in gene expression constructs are targeting sequences, which are required for targeting the gene product into specific cell compartments (for a review, see Kermode, Crit. Rev. Plant Sci. 15 (4), 285 (1996) and references cited therein), for example into the vacuole, the nucleus, all types of plastids, such as amyloplasts, chloroplasts, chromoplasts, the extracellular space, the mitochondria, the endoplasmic reticulum, elaioplasts, peroxisomes, glycosomes, and other compartments of cells or extracellular; preferred are sequences, which are involved in targeting to plastids as mentioned above. Sequences, which must be mentioned in this context are, in particular, the signal-peptide- or transit-peptide-encoding sequences which are known per se. For example, plastid-transit-peptide-encoding sequences enable the targeting of the expression product into the plastids of a plant cell. Targeting sequences are also known for eukaryotic and to a lower extent for prokaryotic organisms and can advantageously be operable linked with the nucleic acid molecule of the present invention as shown in Table I, application no. 5, columns 5 and 8, preferably the coding region thereof, or homologs or fragments thereof, and described herein to achieve an expression in one of said compartments or extracellular.

[35650] [0247.1.1.5] to [0266.1.1.5] for the disclosure of these paragraphs see [0247.1.1.1] to [0266.1.1.1] above.

[35651] An embodiment of the invention relates to a vector where the nucleic acid molecule according to the invention is linked operably to regulatory sequences which permit the expression in a prokaryotic or eukaryotic host.

[35652] A further embodiment of the invention relates to a vector in which a nucleic acid sequence encoding one of the polypeptides shown in the respective line in Table II, application no. 5, columns 5 or 8, or homologs or fragments thereof, is functionally linked to a targeting sequence such as a plastidial or mitochondrial targeting sequence. A further embodiment of the invention relates to a vector in which a nucleic acid sequence encoding one of the polypeptides shown in the respective line in Table II, application no. 5, columns 5 or 8, or homologs or fragments thereof, is functionally linked to (a) regulatory sequence which permit the expression in an organelle, such as plastids or mitochondria, preferably plastids.

[35653] A further embodiment of the invention relates to a vector which comprises a nucleic acid sequence encoding one of the polypeptides shown in the respective line in Table II, application no. 5, columns 5 or 8, or homologs or fragments thereof, but no additional targeting sequence.

[35654] [0268.1.1.5] to [0273.1.1.5] for the disclosure of these paragraphs see [0268.1.1.1] to [0273.1.1.1] above.

[35655] A further object of the invention relates to the use of a nucleic acid construct, e.g. an expression cassette, comprising one or more nucleic acid molecules encoding one or more polypeptides as depicted in the respective line(s) in Table II, application no. 5, columns 5 or 8, or homologs or fragments thereof, or comprising one or more nucleic acid molecules as depicted in the respective line(s) in Table I, application no. 5, columns 5 or 8, preferably the coding region thereof, or homologs or fragments thereof, or comprising a nucleic acid molecule hybridizing therewith for the transformation of a microorganism or a plant cell, plant tissues or a part of a plant.

[35656] In doing so, depending on the choice of promoter, the nucleic acid molecules shown in the respective line in Table I, application no. 5, column 5 or 8, preferably the coding region thereof, or homologs or fragments thereof, or the nucleic acid molecules encoding a polypeptide as depicted in the respective line in Table II, application no. 5, column 5 or 8, or homologs or fragments thereof, can be expressed in the whole plant or specifically e.g. in the leaves, in the seeds, the nodules, in roots, in the stem or other parts of the plant. Those transgenic plants overproducing sequences, e.g. as depicted in the respective line in Table I, application no. 5, column 5 or 8, preferably the coding region thereof, or homologs or fragments thereof, the plant cell, plant tissues, plants, the reproductive material thereof, or parts thereof are a further object of the present invention.

[35657] Within the framework of the present invention, the production of the tryptophan is due to the generation or over-expression of one or more polypeptides as depicted in the respective line(s) in Table II, application no. 5, column 5 or 8, or homologs or fragments thereof, or encoded by the corresponding nucleic acid molecules as depicted in the respective line(s) in Table I, application no. 5, column 5 or 8, preferably the coding region thereof, or homologs or fragments thereof, in the non-human organism according to the invention, advantageously in the transgenic microorganism or plant according to the invention, at least for the duration of at least one plant generation.

[35658] A constitutive expression of the polypeptide as depicted in the respective line in Table II, application no. 5, column 5 or 8, or homologs or fragments thereof, or encoded by the respective nucleic acid molecule as depicted in the respective line in Table I, application no. 5, column 5 or 8, preferably the coding region thereof, or homologs or fragments thereof, may be advantageous. On the other hand, an inducible expression may also appear desirable. Expression of the polypeptide sequences of the invention can be either directed to the cytosol or to the organelles, such as plastids or mitochondria, preferably the plastids of the host cells, preferably the plant cells, or non-targeted.

[35659] for the disclosure of this paragraph see [0278.1.1.1] above

[35660] In a further embodiment the invention relates to a transgenic non-human organisms such as transgenic microorganism or transgenic plant comprising a nucleic acid molecule comprising
[35661] [1) a nucleic acid molecule selected from the group consisting of
   [35662] (a) a nucleic acid molecule encoding a polypeptide shown in Table II, application no. 5, column 5 or 8, preferably shown in Table II A, application no. 5, column 5, or in Table II A, application no. 5, column 8, or in Table II B, application no. 5, column 8, or a homolog or a fragment thereof;
   [35663] (b) a nucleic acid molecule shown in Table I, application no. 5, column 5 or 8, preferably shown in Table I A, application no. 5, column 5, or in Table I A, application no. 5, column 8, or in Table I B, application no. 5, column 8, preferably the coding region thereof, or a homolog or a fragment thereof;
   [35664] (c) a nucleic acid molecule, which, as a result of the degeneracy of the genetic code, can be derived from a polypeptide sequence depicted in column 5 or 8 of Table II, application no. 5, preferably shown in Table II A, application no. 5, column 5, or in Table II A, application no. 5, column 8, or in Table II B, application no. 5, column 8;
   [35665] (d) a nucleic acid molecule having at least 30% identity, preferably at least 40%, 50%, 60%, 70%, 75%, 80%, 85%, 90%, 95%, 96%, 97%, 98%, 99%, 99.5%, with the nucleic acid molecule sequence of a polynucleotide comprising the nucleic acid molecule shown in column 5 or 8 of Table I, application no. 5, preferably shown in Table I A, application no. 5, column 5, or in Table I A, application no. 5, column 8, or in Table I B, application no. 5, column 8, preferably the coding region thereof;
   [35666] (e) a nucleic acid molecule encoding a polypeptide having at least 30% identity, preferably at least 40%, 50% 60%, 70%, 75%, 80%, 85%, 90%, 95%, 96%, 97%, 98%, 99%, 99.5%, identity with the amino acid sequence of the polypeptide encoded by the nucleic acid molecule of (a), (b), (c) or (d);
   [35667] (f) a nucleic acid molecule which hybridizes with a nucleic acid molecule of (a), (b), (c), (d) or (e) under stringent hybridization conditions;
   [35668] (g) a nucleic acid molecule encoding a polypeptide which can be isolated with the aid of monoclonal or polyclonal antibodies made against a polypeptide encoded by one of the nucleic acid molecules of (a), (b), (c), (d), (e) or (f);
   [35669] (h) a nucleic acid molecule encoding a polypeptide comprising the consensus sequence or one or more polypeptide motifs as shown in column 8 of Table IV, application no. 5;
   [35670] (i) a nucleic acid molecule encoding a polypeptide having the activity represented by a respective protein as depicted in column 5 of Table II, application no. 5;
   [35671] (j) a nucleic acid molecule comprising a polynucleotide which is obtained by amplifying a cDNA library or a genomic library using the primers in Table III, application no. 5, column 8;
   [35672] and
   [35673] (k) nucleic acid molecule which is obtainable by screening a suitable nucleic acid library, especially a cDNA library and/or a genomic library, under stringent hybridization conditions with a probe comprising one of the sequences of the nucleic acid molecule of (a), (b), (c), (d), (e), (f), (g), (h), (i) or (j) or with a fragment of at least 15 nt, preferably 20 nt, 30 nt, 50 nt, 100 nt, 200 nt,500 nt, 1000 nt, 1500 nt, 2000 nt or 3000 nt of the nucleic acid molecule characterized in (a), (b), (c), (d), (e), (f), (g), (h), (i) or (j);
   [35674] or a nucleic acid molecule comprising a sequence which is complementary thereto;
      and, if desired
[35675] 2) nucleic acid molecule encoding a transit peptide, preferably encoding a plastidal transit peptide or a mitochondrial transit peptide;
   which are operable linked;]
   or comprising an expression cassette comprising
[35676] [0) a promoter, preferably a promoter selected from the group consisting of Big35S, PCUbi, Super and USP; and
[35677] 1) a nucleic acid molecule selected from the group consisting of
   [35678] (a) a nucleic acid molecule encoding a polypeptide shown in Table II, application no. 5, column 5 or 8, preferably shown in Table II A, application no. 5, column 5, or in Table II A, application no. 5, column 8, or in Table II B, application no. 5, column 8, or a homolog or a fragment thereof;
   [35679] (b) a nucleic acid molecule shown in Table I, application no. 5, column 5 or 8, preferably shown in Table I A, application no. 5, column 5, or in Table I A, application no. 5, column 8, or in Table I B, application no. 5, column 8, preferably the coding region thereof, or a homolog or a fragment thereof;
   [35680] (c) a nucleic acid molecule, which, as a result of the degeneracy of the genetic code, can be derived from a polypeptide sequence depicted in column 5 or 8 of Table II, application no. 5, preferably shown in Table II A, application no. 5, column 5, or in Table II A, application no. 5, column 8, or in Table II B, application no. 5, column 8;
   [35681] (d) a nucleic acid molecule having at least 30% identity, preferably at least 40%, 50%, 60%, 70%, 75%, 80%, 85%, 90%, 95%, 96%, 97%, 98%, 99%, 99.5%, with the nucleic acid molecule sequence of a polynucleotide comprising the nucleic acid molecule shown in column 5 or 8 of Table I, application no. 5, preferably shown in Table I A, application no. 5, column 5, or in Table I A, application no. 5, column 8, or in Table I B, application no. 5, column 8, preferably the coding region thereof;
   [35682] (e) a nucleic acid molecule encoding a polypeptide having at least 30% identity, preferably at least 40%, 50% 60%, 70%, 75%, 80%, 85%, 90%, 95%, 96%, 97%, 98%, 99%, 99.5%, identity with the amino acid sequence of the polypeptide encoded by the nucleic acid molecule of (a), (b), (c) or (d);
   [35683] (f) a nucleic acid molecule which hybridizes with a nucleic acid molecule of (a), (b), (c), (d) or (e) under stringent hybridization conditions;
   [35684] (g) a nucleic acid molecule encoding a polypeptide which can be isolated with the aid of monoclonal or polyclonal antibodies made against a polypeptide encoded by one of the nucleic acid molecules of (a), (b), (c), (d), (e) or (f);
   [35685] (h) a nucleic acid molecule encoding a polypeptide comprising the consensus sequence or one or more polypeptide motifs as shown in column 8 of Table IV, application no. 5;
   [35686] (i) a nucleic acid molecule encoding a polypeptide having the activity represented by a respective protein as depicted in column 5 of Table II, application no. 5;
   [35687] (j) a nucleic acid molecule comprising a polynucleotide which is obtained by amplifying a cDNA library or a genomic library using the primers in Table III, application no. 5, column 8;
   [35688] and
   [35689] (k) nucleic acid molecule which is obtainable by screening a suitable nucleic acid library, especially a cDNA library and/or a genomic library, under stringent hybridization conditions with a probe comprising one of the sequences of the nucleic acid molecule of (a), (b), (c), (d), (e), (f), (g), (h), (i) or (j) or with a fragment of at least 15 nt, preferably 20 nt, 30 nt, 50 nt, 100 nt, 200 nt,500 nt, 1000 nt, 1500 nt, 2000 nt or 3000 nt of the nucleic acid molecule characterized in (a), (b), (c), (d), (e), (f), (g), (h), (i) or (j);
   [35690] or a nucleic acid molecule comprising a sequence which is complementary thereto;
      and, if desired
[35691] 2) nucleic acid molecule encoding a transit peptide, preferably encoding a plastidal transit peptide or a mitochondrial transit peptide;
   which are operable linked;]
   or comprising or being transformed by a vector comprising
[35692] [1) a nucleic acid molecule selected from the group consisting of
   [35693] (a) a nucleic acid molecule encoding a polypeptide shown in Table II, application no. 5, column 5 or 8, preferably shown in Table II A, application no. 5, column 5, or in Table II A, application no. 5, column 8, or in Table II B, application no. 5, column 8, or a homolog or a fragment thereof;
   [35694] (b) a nucleic acid molecule shown in Table I, application no. 5, column 5 or 8, preferably shown in Table I A, application no. 5, column 5, or in Table I A, application no. 5, column 8, or in Table I B, application no. 5, column 8, preferably the coding region thereof, or a homolog or a fragment thereof;
   [35695] (c) a nucleic acid molecule, which, as a result of the degeneracy of the genetic code, can be derived from a polypeptide sequence depicted in column 5 or 8 of Table II, application no. 5, preferably shown in Table II A, application no. 5, column 5, or in Table II A, application no. 5, column 8, or in Table II B, application no. 5, column 8;
   [35696] (d) a nucleic acid molecule having at least 30% identity, preferably at least 40%, 50%, 60%, 70%, 75%, 80%, 85%, 90%, 95%, 96%, 97%, 98%, 99%, 99.5%, with the nucleic acid molecule sequence of a polynucleotide comprising the nucleic acid molecule shown in column 5 or 8 of Table I, application no. 5, preferably shown in Table I A, application no. 5, column 5, or in Table I A, application no. 5, column 8, or in Table I B, application no. 5, column 8, preferably the coding region thereof;
   [35697] (e) a nucleic acid molecule encoding a polypeptide having at least 30% identity, preferably at least 40%, 50% 60%, 70%, 75%, 80%, 85%, 90%, 95%, 96%, 97%, 98%, 99%, 99.5%, identity with the amino acid sequence of the polypeptide encoded by the nucleic acid molecule of (a), (b), (c) or (d);
   [35698] (f) a nucleic acid molecule which hybridizes with a nucleic acid molecule of (a), (b), (c), (d) or (e) under stringent hybridization conditions;
   [35699] (g) a nucleic acid molecule encoding a polypeptide which can be isolated with the aid of monoclonal or polyclonal antibodies made against a polypeptide encoded by one of the nucleic acid molecules of (a), (b), (c), (d), (e) or (f);
   [35700] (h) a nucleic acid molecule encoding a polypeptide comprising the consensus sequence or one or more polypeptide motifs as shown in column 8 of Table IV, application no. 5;
   [35701] (i) a nucleic acid molecule encoding a polypeptide having the activity represented by a respective protein as depicted in column 5 of Table II, application no. 5;
   [35702] (j) a nucleic acid molecule comprising a polynucleotide which is obtained by amplifying a cDNA library or a genomic library using the primers in Table III, application no. 5, column 8;
   [35703] and
   [35704] (k) nucleic acid molecule which is obtainable by screening a suitable nucleic acid library, especially a cDNA library and/or a genomic library, under stringent hybridization conditions with a probe comprising one of the sequences of the nucleic acid molecule of (a), (b), (c), (d), (e), (f), (g), (h), (i) or (j) or with a fragment of at least 15 nt, preferably 20 nt, 30 nt, 50 nt, 100 nt, 200 nt,500 nt, 1000 nt, 1500 nt, 2000 nt or 3000 nt of the nucleic acid molecule characterized in (a), (b), (c), (d), (e), (f), (g), (h), (i) or (j);
   [35705] or a nucleic acid molecule comprising a sequence which is complementary thereto;]
      as well as respective transgenic cells, tissue, parts of such non-human organism, e.g. plant cells, plant tissue, part of plants, like leaves, roots, stems, blossoms, seeds, fruits, pollen and the like.
      (All the references to Tables I to IV are references to the corresponding lines of Tables I to IV.)

[35706] In a preferred embodiment of said transgenic non-human organism said nucleic acid molecule according to 1 (a), (b), (c), (d), (e), (f), (g), (h), (i), (j) or (k) encodes a polypeptide which has the activity of the respective polypeptide represented by a protein comprising a polypeptide as depicted in the respective line in column 5 of Table II, application no. 5.

[35707] In another preferred embodiment of said transgenic non-human organism said nucleic acid molecule according to 1 (a), (b), (c), (d), (e), (f), (g), (h), (i), (j) or (k) confers a generation or an increase of the respective fine chemical in a non-human organism or a part thereof as compared to a corresponding wild-type non-human organism or part thereof.

[35708] In another preferred embodiment of said transgenic non-human organism said nucleic acid molecule according to 1 (a), (b), (c), (d), (e), (f), (g), (h), (i), (j) or (k) encodes a polypeptide which has the activity of the respective polypeptide represented by a protein as depicted in the respective line in column 5 of Table II application no. 5 and confers a generation or an increase of the respective fine chemical in a non-human organism or a part thereof as compared to a corresponding wild-type non-human organism or part thereof.

[35709] In another embodiment of said transgenic non-human organism the expression cassette comprises 2) a nucleic acid molecule encoding a transit peptide, preferably encoding a plastidal transit peptide, especially in case in column 6 of Table I, application no. 5, in the same line as of the respective nucleic acid molecule according to 1) “plastidic” is depicted, or encoding a mitochondrial transit peptide, especially in case in column 6 of Table I, application no. 5, in the same line as of the respective nucleic acid molecule according to 1) “mitochondrial” is depicted.

[35710] In another embodiment of said transgenic non-human organism the expression cassette does not comprise 2) a nucleic acid molecule encoding a transit peptide, especially in case in column 6 of Table I, application no. 5, in the same line as of the respective nucleic acid molecule according to 1) “non-targeted” is depicted.

[35711] In another embodiment of said transgenic non-human organism said vector comprises beneath said nucleic acid molecule according to 1 (a), (b), (c), (d), (e), (f), (g), (h), (i), (j) or (k), a promoter, preferably a promoter selected from the group consisting of Big35S, PCUbi, Super and USP, which are operable linked.

[35712] In a preferred embodiment of said transgenic non-human organism said vector comprises beneath said nucleic acid molecule according to 1 (a), (b), (c), (d), (e), (f), (g), (h), (i), (j) or (k), a promoter, preferably a promoter selected from the group consisting of Big35S, PCUbi, Super and USP, which are operable linked; and said nucleic acid molecule according to 1 (a), (b), (c), (d), (e), (f), (g), (h), (i), (j) or (k) encodes a polypeptide which has the activity of the respective polypeptide represented by a protein comprising a polypeptide as depicted in the respective line in column 5 of Table II, application no. 5.

[35713] In another preferred embodiment of said transgenic non-human organism said vector comprises beneath said nucleic acid molecule according to 1 (a), (b), (c), (d), (e), (f), (g), (h), (i), (j) or (k), a promoter, preferably a promoter selected from the group consisting of Big35S, PCUbi, Super and USP, which are operable linked; and said nucleic acid molecule according to 1 (a), (b), (c), (d), (e), (f), (g), (h), (i), (j) or (k) confers a generation or an increase of the respective fine chemical in a non-human organism or a part thereof as compared to a corresponding wild-type non-human organism or part thereof.

[35714] In another preferred embodiment of said transgenic non-human organism said vector comprises beneath said nucleic acid molecule according to 1 (a), (b), (c), (d), (e), (f), (g), (h), (i), (j) or (k), a promoter, preferably a promoter selected from the group consisting of Big35S, PCUbi, Super and USP, which are operable linked; and said nucleic acid molecule according to 1 (a), (b), (c), (d), (e), (f), (g), (h), (i), (j) or (k) encodes a polypeptide which has the activity of the respective polypeptide represented by a protein as depicted in the respective line in column 5 of Table II, application no. 5, and confers a generation or an increase of the respective fine chemical in a non-human organism or a part thereof as compared to a corresponding wild-type non-human organism or part thereof.

[35715] In another embodiment of said transgenic non-human organism said vector comprises beneath said nucleic acid molecule according to 1 (a), (b), (c), (d), (e), (f), (g), (h), (i), (j) or (k), a nucleic acid molecule encoding a transit peptide, preferably encoding a plastidal transit peptide, especially in case in column 6 of Table I, application no. 5, in the same line as of the respective nucleic acid molecule according to 1) “plastidic” is depicted, or encoding a mitochondrial transit peptide, especially in case in column 6 of Table I, application no. 5, in the same line as of the respective nucleic acid molecule according to 1) “mitochondrial” is depicted, which are operable linked.

[35716] In another embodiment of said transgenic non-human organism said vector does not comprise beneath said nucleic acid molecule according to 1 (a), (b), (c), (d), (e), (f), (g), (h), (i), (j) or (k), a nucleic acid molecule encoding a transit peptide in case in column 6 of Table I, application no. 5, in the same line as of the respective nucleic acid molecule according to 1) “non-targeted” is depicted, which are operable linked.

[35717] In another embodiment of said transgenic non-human organism said vector comprises beneath said nucleic acid molecule according to 1 (a), (b), (c), (d), (e), (f), (g), (h), (i), (j) or (k), and a promoter, preferably a promoter selected from the group consisting of Big35S, PCUbi, Super and USP; a nucleic acid molecule encoding a transit peptide, preferably encoding a plastidal transit peptide, especially in case in column 6 of Table I, application no. 5, in the same line as of the respective nucleic acid molecule according to 1) “plastidic” is depicted, or encoding a mitochondrial transit peptide, especially in case in column 6 of Table I, application no. 5, in the same line as of the respective nucleic acid molecule according to 1) “mitochondrial” is depicted, which are operable linked.

[35718] In another embodiment of said transgenic non-human organism said vector does not comprise beneath said nucleic acid molecule according to 1 (a), (b), (c), (d), (e), (f), (g), (h), (i), (j) or (k), and a promoter, preferably a promoter selected from the group consisting of Big35S, PCUbi, Super and USP; a nucleic acid molecule encoding a transit peptide, especially in case in column 6 of Table I, application no. 5, in the same line as of the respective nucleic acid molecule according to 1) “non-targeted” is depicted, which are operable linked.

[35719] In another embodiment of said transgenic non-human organism said vector comprises beneath said nucleic acid molecule according to 1 (a), (b), (c), (d), (e), (f), (g), (h), (i), (j) or (k), and a promoter, preferably a promoter selected from the group consisting of Big35S, PCUbi, Super and USP; a nucleic acid molecule encoding a transit peptide, preferably encoding a plastidal transit peptide, especially in case in column 6 of Table I, application no. 5, in the same line as of the respective nucleic acid molecule according to 1) “plastidic” is depicted, or encoding a mitochondrial transit peptide, especially in case in column 6 of Table I, application no. 5, in the same line as of the respective nucleic acid molecule according to 1) “mitochondrial” is depicted, which are operable linked; and wherein said nucleic acid molecule according to 1 (a), (b), (c), (d), (e), (f), (g), (h), (i), (j) or (k) encodes a polypeptide which has the activity of the respective polypeptide represented by a protein comprising a polypeptide as depicted in the respective line in column 5 of Table II, application no. 5.

[35720] In another embodiment of said transgenic non-human organism said vector does not comprise beneath said nucleic acid molecule according to 1 (a), (b), (c), (d), (e), (f), (g), (h), (i), (j) or (k), and a promoter, preferably a promoter selected from the group consisting of Big35S, PCUbi, Super and USP; a nucleic acid molecule encoding a transit peptide, especially in case in column 6 of Table I, application no. 5, in the same line as of the respective nucleic acid molecule according to 1) “non-targeted” is depicted, which are operable linked; and wherein said nucleic acid molecule according to 1 (a), (b), (c), (d), (e), (f), (g), (h), (i), (j) or (k) encodes a polypeptide which has the activity of the respective polypeptide represented by a protein comprising a polypeptide as depicted in the respective line in column 5 of Table II, application no. 5.

[35721] In another embodiment of said transgenic non-human organism said vector comprises beneath said nucleic acid molecule according to 1 (a), (b), (c), (d), (e), (f), (g), (h), (i), (j) or (k), and a promoter, preferably a promoter selected from the group consisting of Big35S, PCUbi, Super and USP; a nucleic acid molecule encoding a transit peptide, preferably encoding a plastidal transit peptide, especially in case in column 6 of Table I, application no. 5, in the same line as of the respective nucleic acid molecule according to 1) “plastidic” is depicted, or encoding a mitochondrial transit peptide, especially in case in column 6 of Table I, application no. 5, in the same line as of the respective nucleic acid molecule according to 1) “mitochondrial” is depicted, which are operable linked; and wherein said nucleic acid molecule according to 1 (a), (b), (c), (d), (e), (f), (g), (h), (i), (j) or (k) confers a generation or an increase of the respective fine chemical in a non-human organism or a part thereof as compared to a corresponding wild-type non-human organism or part thereof.

[35722] In another embodiment of said transgenic non-human organism said vector does not comprise beneath said nucleic acid molecule according to 1 (a), (b), (c), (d), (e), (f), (g), (h), (i), (j) or (k), and a promoter, preferably a promoter selected from the group consisting of Big35S, PCUbi, Super and USP; a nucleic acid molecule encoding a transit peptide, especially in case in column 6 of Table I, application no. 5, in the same line as of the respective nucleic acid molecule according to 1) “non-targeted” is depicted, which are operable linked; and wherein said nucleic acid molecule according to 1 (a), (b), (c), (d), (e), (f), (g), (h), (i), (j) or (k) confers a generation or an increase of the respective fine chemical in a non-human organism or a part thereof as compared to a corresponding wild-type non-human organism or part thereof.

[35723] In another embodiment of said transgenic non-human organism said vector comprises beneath said nucleic acid molecule according to 1 (a), (b), (c), (d), (e), (f), (g), (h), (i), (j) or (k), and a promoter, preferably a promoter selected from the group consisting of Big35S, PCUbi, Super and USP; a nucleic acid molecule encoding a transit peptide, preferably encoding a plastidal transit peptide, especially in case in column 6 of Table I, application no. 5, in the same line as of the respective nucleic acid molecule according to 1) “plastidic” is depicted, or encoding a mitochondrial transit peptide, especially in case in column 6 of Table I, application no. 5, in the same line as of the respective nucleic acid molecule according to 1) “mitochondrial” is depicted, which are operable linked; and wherein said nucleic acid molecule according to 1 (a), (b), (c), (d), (e), (f), (g), (h), (i), (j) or (k) encodes a polypeptide which has the activity of the respective polypeptide represented by a protein as depicted in the respective line in column 5 of Table II application no. 5 and confers a generation or an increase of the respective fine chemical in a non-human organism or a part thereof as compared to a corresponding wild-type non-human organism or part thereof.

[35724] In another embodiment of said transgenic non-human organism said vector does not comprise beneath said nucleic acid molecule according to 1 (a), (b), (c), (d), (e), (f), (g), (h), (i), (j) or (k), and a promoter, preferably a promoter selected from the group consisting of Big35S, PCUbi, Super and USP; a nucleic acid molecule encoding a transit peptide, especially in case in column 6 of Table I, application no. 5, in the same line as of the respective nucleic acid molecule according to 1) “non-targeted” is depicted, which are operable linked; and wherein said nucleic acid molecule according to 1 (a), (b), (c), (d), (e), (f), (g), (h), (i), (j) or (k) encodes a polypeptide which has the activity of the respective polypeptide represented by a protein as depicted in the respective line in column 5 of Table II application no. 5 (in the same line) and confers a generation or an increase of the respective fine chemical in a non-human organism or a part thereof as compared to a corresponding wild-type non-human organism or part thereof.

[35725] In a preferred embodiment of said transgenic non-human organism said nucleic acid molecule according to 1 (a), (b), (c), (d), (e), (f), (g), (h), (i), (j) or (k), said promoter and optionally said nucleic acid molecule encoding a transit peptide are encompassed in an expression cassette in said vector. Accordingly an embodiment the invention provides a non-human organism comprising or being transformed by a vector comprising an expression cassette comprising said nucleic acid molecule according to 1 (a), (b), (c), (d), (e), (f), (g), (h), (i), (j) or (k), said promoter and optionally said a nucleic acid molecule encoding a transit peptide, operable linked. Said expression cassette may encompass a terminator, too.

[35726] In a further embodiment the invention relates to a transgenic non-human organisms such as transgenic microorganism or transgenic plant comprising a nucleic acid molecule comprising
[35727] [1) a nucleic acid molecule selected from the group consisting of
   [35728] (a) a nucleic acid molecule encoding a polypeptide shown in Table II, application no. 5, column 5 or 8, preferably shown in Table II A, application no. 5, column 5, or in Table II A, application no. 5, column 8, or in Table II B, application no. 5, column 8, or a homolog or a fragment thereof;
   [35729] (b) a nucleic acid molecule shown in Table I, application no. 5, column 5 or 8, preferably shown in Table I A, application no. 5, column 5, or in Table I A, application no. 5, column 8, or in Table I B, application no. 5, column 8, preferably the coding region thereof, or a homolog or a fragment thereof;
   [35730] (c) a nucleic acid molecule, which, as a result of the degeneracy of the genetic code, can be derived from a polypeptide sequence depicted in column 5 or 8 of Table II, application no. 5, preferably shown in Table II A, application no. 5, column 5, or in Table II A, application no. 5, column 8, or in Table II B, application no. 5, column 8;
   [35731] (d) a nucleic acid molecule having at least 30% identity, preferably at least 40%, 50%, 60%, 70%, 75%, 80%, 85%, 90%, 95%, 96%, 97%, 98%, 99%, 99.5%, with the nucleic acid molecule sequence of a polynucleotide comprising the nucleic acid molecule shown in column 5 or 8 of Table I, application no. 5, preferably shown in Table I A, application no. 5, column 5, or in Table I A, application no. 5, column 8, or in Table I B, application no. 5, column 8, preferably the coding region thereof;
   [35732] (e) a nucleic acid molecule encoding a polypeptide having at least 30% identity, preferably at least 40%, 50% 60%, 70%, 75%, 80%, 85%, 90%, 95%, 96%, 97%, 98%, 99%, 99.5%, identity with the amino acid sequence of the polypeptide encoded by the nucleic acid molecule of (a), (b), (c) or (d);
   [35733] (f) a nucleic acid molecule which hybridizes with a nucleic acid molecule of (a), (b), (c), (d) or (e) under stringent hybridization conditions;
   [35734] (g) a nucleic acid molecule encoding a polypeptide which can be isolated with the aid of monoclonal or polyclonal antibodies made against a polypeptide encoded by one of the nucleic acid molecules of (a), (b), (c), (d), (e) or (f);
   [35735] (h) a nucleic acid molecule encoding a polypeptide comprising the consensus sequence or one or more polypeptide motifs as shown in column 8 of Table IV, application no. 5;
   [35736] (i) a nucleic acid molecule encoding a polypeptide having the activity represented by a respective protein as depicted in column 5 of Table II, application no. 5;
   [35737] (j) a nucleic acid molecule comprising a polynucleotide which is obtained by amplifying a cDNA library or a genomic library using the primers in Table III, application no. 5, column 8;
   [35738] and
   [35739] (k) nucleic acid molecule which is obtainable by screening a suitable nucleic acid library, especially a cDNA library and/or a genomic library, under stringent hybridization conditions with a probe comprising one of the sequences of the nucleic acid molecule of (a), (b), (c), (d), (e), (f), (g), (h), (i) or (j) or with a fragment of at least 15 nt, preferably 20 nt, 30 nt, 50 nt, 100 nt, 200 nt,500 nt, 1000 nt, 1500 nt, 2000 nt or 3000 nt of the nucleic acid molecule characterized in (a), (b), (c), (d), (e), (f), (g), (h), (i) or (j);
   [35740] or a nucleic acid molecule comprising a sequence which is complementary thereto;
      and, if desired
[35741] 2) nucleic acid molecule encoding a transit peptide, preferably encoding a plastidal transit peptide or a mitochondrial transit peptide;
   which are operable linked;]
   or comprising an expression cassette comprising
[35742] [0) a promoter, preferably a promoter selected from the group consisting of Big35S, PCUbi, Super and USP; and
[35743] 1) a nucleic acid molecule selected from the group consisting of
   [35744] (a) a nucleic acid molecule encoding a polypeptide shown in Table II, application no. 5, column 5 or 8, preferably shown in Table II A, application no. 5, column 5, or in Table II A, application no. 5, column 8, or in Table II B, application no. 5, column 8, or a homolog or a fragment thereof;
   [35745] (b) a nucleic acid molecule shown in Table I, application no. 5, column 5 or 8, preferably shown in Table I A, application no. 5, column 5, or in Table I A, application no. 5, column 8, or in Table I B, application no. 5, column 8, preferably the coding region thereof, or a homolog or a fragment thereof;
   [35746] (c) a nucleic acid molecule, which, as a result of the degeneracy of the genetic code, can be derived from a polypeptide sequence depicted in column 5 or 8 of Table II, application no. 5, preferably shown in Table II A, application no. 5, column 5, or in Table II A, application no. 5, column 8, or in Table II B, application no. 5, column 8;
   [35747] (d) a nucleic acid molecule having at least 30% identity, preferably at least 40%, 50%, 60%, 70%, 75%, 80%, 85%, 90%, 95%, 96%, 97%, 98%, 99%, 99.5%, with the nucleic acid molecule sequence of a polynucleotide comprising the nucleic acid molecule shown in column 5 or 8 of Table I, application no. 5, preferably shown in Table

[35748] I A, application no. 5, column 5, or in Table I A, application no. 5, column 8, or in Table I B, application no. 5, column 8, preferably the coding region thereof;
[35749] (e) a nucleic acid molecule encoding a polypeptide having at least 30% identity, preferably at least 40%, 50% 60%, 70%, 75%, 80%, 85%, 90%, 95%, 96%, 97%, 98%, 99%, 99.5%, identity with the amino acid sequence of the polypeptide encoded by the nucleic acid molecule of (a), (b), (c) or (d);
[35750] (f) a nucleic acid molecule which hybridizes with a nucleic acid molecule of (a), (b), (c), (d) or (e) under stringent hybridization conditions;
[35751] (g) a nucleic acid molecule encoding a polypeptide which can be isolated with the aid of monoclonal or polyclonal antibodies made against a polypeptide encoded by one of the nucleic acid molecules of (a), (b), (c), (d), (e) or (f);
[35752] (h) a nucleic acid molecule encoding a polypeptide comprising the consensus sequence or one or more polypeptide motifs as shown in column 8 of Table IV, application no. 5;
[35753] (i) a nucleic acid molecule encoding a polypeptide having the activity represented by a respective protein as depicted in column 5 of Table II, application no. 5;
[35754] (j) a nucleic acid molecule comprising a polynucleotide which is obtained by amplifying a cDNA library or a genomic library using the primers in Table III, application no. 5, column 8;
[35755] and
[35756] (k) nucleic acid molecule which is obtainable by screening a suitable nucleic acid library, especially a cDNA library and/or a genomic library, under stringent hybridization conditions with a probe comprising one of the sequences of the nucleic acid molecule of (a), (b), (c), (d), (e), (f), (g), (h), (i) or (j) or with a fragment of at least 15 nt, preferably 20 nt, 30 nt, 50 nt, 100 nt, 200 nt,500 nt, 1000 nt, 1500 nt, 2000 nt or 3000 nt of the nucleic acid molecule characterized in (a), (b), (c), (d), (e), (f), (g), (h), (i) or (j);
[35757] or a nucleic acid molecule comprising a sequence which is complementary thereto;]
   and, if desired
[35758] 2) nucleic acid molecule encoding a transit peptide, preferably encoding a plastidal transit peptide or a mitochondrial transit peptide;
   which are operable linked;]
   or comprising or being transformed by a vector comprising
[35759] [1) a nucleic acid molecule selected from the group consisting of
   [35760] (a) a nucleic acid molecule encoding a polypeptide shown in Table II, application no. 5, column 5 or 8, preferably shown in Table II A, application no. 5, column 5, or in Table II A, application no. 5, column 8, or in Table II B, application no. 5, column 8, or a homolog or a fragment thereof;
   [35761] (b) a nucleic acid molecule shown in Table I, application no. 5, column 5 or 8, preferably shown in Table I A, application no. 5, column 5, or in Table I A, application no. 5, column 8, or in Table I B, application no. 5, column 8, preferably the coding region thereof, or a homolog or a fragment thereof;
   [35762] (c) a nucleic acid molecule, which, as a result of the degeneracy of the genetic code, can be derived from a polypeptide sequence depicted in column 5 or 8 of Table II, application no. 5, preferably shown in Table II A, application no. 5, column 5, or in Table II A, application no. 5, column 8, or in Table II B, application no. 5, column 8;
   [35763] (d) a nucleic acid molecule having at least 30% identity, preferably at least 40%, 50%, 60%, 70%, 75%, 80%, 85%, 90%, 95%, 96%, 97%, 98%, 99%, 99.5%, with the nucleic acid molecule sequence of a polynucleotide comprising the nucleic acid molecule shown in column 5 or 8 of Table I, application no. 5, preferably shown in Table I A, application no. 5, column 5, or in Table I A, application no. 5, column 8, or in Table I B, application no. 5, column 8, preferably the coding region thereof;
   [35764] (e) a nucleic acid molecule encoding a polypeptide having at least 30% identity, preferably at least 40%, 50% 60%, 70%, 75%, 80%, 85%, 90%, 95%, 96%, 97%, 98%, 99%, 99.5%, identity with the amino acid sequence of the polypeptide encoded by the nucleic acid molecule of (a), (b), (c) or (d);
   [35765] (f) a nucleic acid molecule which hybridizes with a nucleic acid molecule of (a), (b), (c), (d) or (e) under stringent hybridization conditions;
   [35766] (g) a nucleic acid molecule encoding a polypeptide which can be isolated with the aid of monoclonal or polyclonal antibodies made against a polypeptide encoded by one of the nucleic acid molecules of (a), (b), (c), (d), (e) or (f);
   [35767] (h) a nucleic acid molecule encoding a polypeptide comprising the consensus sequence or one or more polypeptide motifs as shown in column 8 of Table IV, application no. 5;
   [35768] (i) a nucleic acid molecule encoding a polypeptide having the activity represented by a respective protein as depicted in column 5 of Table II, application no. 5;
   [35769] (j) a nucleic acid molecule comprising a polynucleotide which is obtained by amplifying a cDNA library or a genomic library using the primers in Table III, application no. 5, column 8;
   [35770] and
   [35771] (k) nucleic acid molecule which is obtainable by screening a suitable nucleic acid library, especially a cDNA library and/or a genomic library, under stringent hybridization conditions with a probe comprising one of the sequences of the nucleic acid molecule of (a), (b), (c), (d), (e), (f), (g), (h), (i) or (j) or with a fragment of at least 15 nt, preferably 20 nt, 30 nt, 50 nt, 100 nt, 200 nt,500 nt, 1000 nt, 1500 nt, 2000 nt or 3000 nt of the nucleic acid molecule characterized in (a), (b), (c), (d), (e), (f), (g), (h), (i) or (j);
   [35772] or a nucleic acid molecule comprising a sequence which is complementary thereto;]
      whereby, preferably, the nucleic acid molecule according to 1 (a), (b), (c), (d), (e), (f), (g), (h), (i), (j) or (k) distinguishes over the sequence depicted in Table I A and/or I B, application no. 5, column 5 or 8, or the coding regions thereof, by one or more nucleotides (especially but not exceeding 5%, preferably 4%, 3%, 2%, 1%, 0.5%, 0.2% or 0.1%). In an embodiment, the nucleic acid molecule of the invention does not consist of the sequence shown in Table I A and/or I B, application no. 5, column 5 or 8, or the coding region thereof. In another embodiment, the nucleic acid molecule of the present invention, preferably the coding region thereof, is at least 30%, 40%, 50%, 60%, 70%, 80%, 90%, 95% identical but less than 100%, 99.999%, 99.99%, 99.9%, 99%, 98%, 97%, 96% or 95% identical to the sequence shown in Table I A and/or I B, application no. 5, column 5 or 8, or the coding region thereof, respectively. In a further embodiment the nucleic acid molecule does not encode the polypeptide sequence shown in Table II A and/or II B, application no. 5, column 5 or 8 but homologs thereof. Accordingly, in one embodiment, the nucleic acid molecule of the present invention encodes in one embodiment a polypeptide which differs at least in one or more amino acids (especially but not exceeding 5%, preferably 4%, 3%, 2%, 1%, 0.5%, 0.2% or 0.1%) from the polypeptide shown in Table II, application no. 5, column 5 or 8 and does not encode a protein of the sequence shown in Table II A and/or II B, application no. 5, column 5 or 8. Accordingly, in one embodiment, the protein encoded by a sequence of a nucleic acid according to 1 (a), (b), (c), (d), (e), (f), (g), (h), (i), (j) or (k) does not consist of the sequence shown in Table I A and/or I B, application no. 5, column 5 or 8, or the coding region thereof. In a further embodiment, the protein of the present invention is at least 30%, 40%, 50%, 60%, 70%, 80%, 90%, 95% identical to protein sequence depicted in Table II A and/or II B, application no. 5, column 5 or 8 but less than 100%, preferably less than 99.999%, 99.99%, 99.9%, 99%, 98%, 97%, 96% or 95% identical to the sequence shown in Table II A and/or II B, application no. 5, column 5 or 8;
      as well as respective transgenic cells, tissue, parts of such non-human organism, e.g. plant cells, plant tissue, part of plants, like leaves, roots, stems, blossoms, seeds, fruits, pollen and the like.
      (All the references to Tables I to IV are references to the corresponding lines of Tables I to IV.)

[35773] In a preferred embodiment of said transgenic non-human organism said nucleic acid molecule according to 1 (a), (b), (c), (d), (e), (f), (g), (h), (i), (j) or (k) encodes a polypeptide which has the activity of the respective polypeptide represented by a protein comprising a polypeptide as depicted in the respective line in column 5 of Table II, application no. 5.

[35774] In another preferred embodiment of said transgenic non-human organism said nucleic acid molecule according to 1 (a), (b), (c), (d), (e), (f), (g), (h), (i), (j) or (k) confers a generation or an increase of the respective fine chemical in a non-human organism or a part thereof as compared to a corresponding wild-type non-human organism or part thereof.

[35775] In another preferred embodiment of said transgenic non-human organism said nucleic acid molecule according to 1 (a), (b), (c), (d), (e), (f), (g), (h), (i), (j) or (k) encodes a polypeptide which has the activity of the respective polypeptide represented by a protein as depicted in the respective line in column 5 of Table II application no. 5 and confers a generation or an increase of the respective fine chemical in a non-human organism or a part thereof as compared to a corresponding wild-type non-human organism or part thereof.

[35776] In another embodiment of said transgenic non-human organism the expression cassette comprises 2) a nucleic acid molecule encoding a transit peptide, preferably encoding a plastidal transit peptide, especially in case in column 6 of Table I, application no. 5, in the same line as of the respective nucleic acid molecule according to 1) “plastidic” is depicted, or encoding a mitochondrial transit peptide, especially in case in column 6 of Table I, application no. 5, in the same line as of the respective nucleic acid molecule according to 1) “mitochondrial” is depicted.

[35777] In another embodiment thereof the expression cassette does not comprise 2) a nucleic acid molecule encoding a transit peptide, especially in case in column 6 of Table I, application no. 5, in the same line as of the respective nucleic acid molecule according to 1) “non-targeted” is depicted.

[35778] In another embodiment of said transgenic non-human organism said vector comprises beneath said nucleic acid molecule according to 1 (a), (b), (c), (d), (e), (f), (g), (h), (i), (j) or (k), a promoter, preferably a promoter selected from the group consisting of Big35S, PCUbi, Super and USP, which are operable linked.

[35779] In a preferred embodiment of said transgenic non-human organism said vector comprises beneath said nucleic acid molecule according to 1 (a), (b), (c), (d), (e), (f), (g), (h), (i), (j) or (k), a promoter, preferably a promoter selected from the group consisting of Big35S, PCUbi, Super and USP, which are operable linked; and said nucleic acid molecule according to 1 (a), (b), (c), (d), (e), (f), (g), (h), (i), (j) or (k) encodes a polypeptide which has the activity of the respective polypeptide represented by a protein comprising a polypeptide as depicted in the respective line in column 5 of Table II, application no. 5.

[35780] In another preferred embodiment of said transgenic non-human organism said vector comprises beneath said nucleic acid molecule according to 1 (a), (b), (c), (d), (e), (f), (g), (h), (i), (j) or (k), a promoter, preferably a promoter selected from the group consisting of Big35S, PCUbi, Super and USP, which are operable linked; and said nucleic acid molecule according to 1 (a), (b), (c), (d), (e), (f), (g), (h), (i), (j) or (k) confers a generation or an increase of the respective fine chemical in a non-human organism or a part thereof as compared to a corresponding wild-type non-human organism or part thereof.

[35781] In another preferred embodiment of said transgenic non-human organism said vector comprises beneath said nucleic acid molecule according to 1 (a), (b), (c), (d), (e), (f), (g), (h), (i), (j) or (k), a promoter, preferably a promoter selected from the group consisting of Big35S, PCUbi, Super and USP, which are operable linked; and said nucleic acid molecule according to 1 (a), (b), (c), (d), (e), (f), (g), (h), (i), (j) or (k) encodes a polypeptide which has the activity of the respective polypeptide represented by a protein as depicted in the same line in column 5 of Table II, application no. 5, and confers a generation or an increase of the respective fine chemical in a non-human organism or a part thereof as compared to a corresponding wild-type non-human organism or part thereof.

[35782] In another embodiment of said transgenic non-human organism said vector comprises beneath said nucleic acid molecule according to 1 (a), (b), (c), (d), (e), (f), (g), (h), (i), (j) or (k), a nucleic acid molecule encoding a transit peptide, preferably encoding a plastidal transit peptide, especially in case in column 6 of Table I, application no. 5, in the same line as of the respective nucleic acid molecule according to 1) “plastidic” is depicted, or encoding a mitochondrial transit peptide, especially in case in column 6 of Table I, application no. 5, in the same line as of the respective nucleic acid molecule according to 1) “mitochondrial” is depicted, which are operable linked.

[35783] In another embodiment of said transgenic non-human organism said vector does not comprise beneath said nucleic acid molecule according to 1 (a), (b), (c), (d), (e), (f), (g), (h), (i), (j) or (k), a nucleic acid molecule encoding a transit peptide in case in column 6 of Table I, application no. 5, in the same line as of the respective nucleic acid molecule according to 1) “non-targeted” is depicted, which are operable linked.

[35784] In another embodiment of said transgenic non-human organism said vector comprises beneath said nucleic acid molecule according to 1 (a), (b), (c), (d), (e), (f), (g), (h), (i), (j) or (k), and a promoter, preferably a promoter selected from the group consisting of Big35S, PCUbi, Super and USP; a nucleic acid molecule encoding a transit peptide, preferably encoding a plastidal transit peptide, especially in case in column 6 of Table I, application no. 5, in the same line as of the respective nucleic acid molecule according to 1) “plastidic” is depicted, or encoding a mitochondrial transit peptide, especially in case in column 6 of Table I, application no. 5, in the same line as of the respective nucleic acid molecule according to 1) “mitochondrial” is depicted, which are operable linked.

[35785] In another embodiment of said transgenic non-human organism said vector does not comprise beneath said nucleic acid molecule according to 1 (a), (b), (c), (d), (e), (f), (g), (h), (i), (j) or (k), and a promoter, preferably a promoter selected from the group consisting of Big35S, PCUbi, Super and USP; a nucleic acid molecule encoding a transit peptide, especially in case in column 6 of Table I, application no. 5, in the same line as of the respective nucleic acid molecule according to 1) “non-targeted” is depicted, which are operable linked.

[35786] In another embodiment of said transgenic non-human organism said vector comprises beneath said nucleic acid molecule according to 1 (a), (b), (c), (d), (e), (f), (g), (h), (i), (j) or (k), and a promoter, preferably a promoter selected from the group consisting of Big35S, PCUbi, Super and USP; a nucleic acid molecule encoding a transit peptide, preferably encoding a plastidal transit peptide, especially in case in column 6 of Table I, application no. 5, in the same line as of the respective nucleic acid molecule according to 1) “plastidic” is depicted, or encoding a mitochondrial transit peptide, especially in case in column 6 of Table I, application no. 5, in the same line as of the respective nucleic acid molecule according to 1) “mitochondrial” is depicted, which are operable linked; and wherein said nucleic acid molecule according to 1 (a), (b), (c), (d), (e), (f), (g), (h), (i), (j) or (k) encodes a polypeptide which has the activity of the respective polypeptide represented by a protein comprising a polypeptide as depicted in the respective line in column 5 of Table II, application no. 5.

[35787] In another embodiment of said transgenic non-human organism said vector does not comprise beneath said nucleic acid molecule according to 1 (a), (b), (c), (d), (e), (f), (g), (h), (i), (j) or (k), and a promoter, preferably a promoter selected from the group consisting of Big35S, PCUbi, Super and USP; a nucleic acid molecule encoding a transit peptide, especially in case in column 6 of Table I, application no. 5, in the same line as of the respective nucleic acid molecule according to 1) “non-targeted” is depicted, which are operable linked; and wherein said nucleic acid molecule according to 1 (a), (b), (c), (d), (e), (f), (g), (h), (i), (j) or (k) encodes a polypeptide which has the activity of the respective polypeptide represented by a protein comprising a polypeptide as depicted in the respective line in column 5 of Table II, application no. 5.

[35788] In another embodiment of said transgenic non-human organism said vector comprises beneath said nucleic acid molecule according to 1 (a), (b), (c), (d), (e), (f), (g), (h), (i), (j) or (k), and a promoter, preferably a promoter selected from the group consisting of Big35S, PCUbi, Super and USP; a nucleic acid molecule encoding a transit peptide, preferably encoding a plastidal transit peptide, especially in case in column 6 of Table I, application no. 5, in the same line as of the respective nucleic acid molecule according to 1) “plastidic” is depicted, or encoding a mitochondrial transit peptide, especially in case in column 6 of Table I, application no. 5, in the same line as of the respective nucleic acid molecule according to 1) “mitochondrial” is depicted, which are operable linked; and wherein said nucleic acid molecule according to 1 (a), (b), (c), (d), (e), (f), (g), (h), (i), (j) or (k) confers a generation or an increase of the respective fine chemical in a non-human organism or a part thereof as compared to a corresponding wild-type non-human organism or part thereof.

[35789] In another embodiment of said transgenic non-human organism said vector does not comprise beneath said nucleic acid molecule according to 1 (a), (b), (c), (d), (e), (f), (g), (h), (i), (j) or (k), and a promoter, preferably a promoter selected from the group consisting of Big35S, PCUbi, Super and USP; a nucleic acid molecule encoding a transit peptide, especially in case in column 6 of Table I, application no. 5, in the same line as of the respective nucleic acid molecule according to 1) “non-targeted” is depicted, which are operable linked; and wherein said nucleic acid molecule according to 1 (a), (b), (c), (d), (e), (f), (g), (h), (i), (j) or (k) confers a generation or an increase of the respective fine chemical in a non-human organism or a part thereof as compared to a corresponding wild-type non-human organism or part thereof.

[35790] In another embodiment of said transgenic non-human organism said vector comprises beneath said nucleic acid molecule according to 1 (a), (b), (c), (d), (e), (f), (g), (h), (i), (j) or (k), and a promoter, preferably a promoter selected from the group consisting of Big35S, PCUbi, Super and USP; a nucleic acid molecule encoding a transit peptide, preferably encoding a plastidal transit peptide, especially in case in column 6 of Table I, application no. 5, in the same line as of the respective nucleic acid molecule according to 1) “plastidic” is depicted, or encoding a mitochondrial transit peptide, especially in case in column 6 of Table I, application no. 5, in the same line as of the respective nucleic acid molecule according to 1) “mitochondrial” is depicted, which are operable linked; and wherein said nucleic acid molecule according to 1 (a), (b), (c), (d), (e), (f), (g), (h), (i), (j) or (k) encodes a polypeptide which has the activity of the respective polypeptide represented by a protein as depicted in the respective line in column 5 of Table II application no. 5 and confers a generation or an increase of the respective fine chemical in a non-human organism or a part thereof as compared to a corresponding wild-type non-human organism or part thereof.

[35791] In another embodiment of said transgenic non-human organism said vector does not comprise beneath said nucleic acid molecule according to 1 (a), (b), (c), (d), (e), (f), (g), (h), (i), (j) or (k), and a promoter, preferably a promoter selected from the group consisting of Big35S, PCUbi, Super and USP; a nucleic acid molecule encoding a transit peptide, especially in case in column 6 of Table I, application no. 5, in the same line as of the respective nucleic acid molecule according to 1) “non-targeted” is depicted, which are operable linked; and wherein said nucleic acid molecule according to 1 (a), (b), (c), (d), (e), (f), (g), (h), (i), (j) or (k) encodes a polypeptide which has the activity of the respective polypeptide represented by a protein as depicted in the respective line in column 5 of Table II application no. 5 and confers a generation or an increase of the respective fine chemical in a non-human organism or a part thereof as compared to a corresponding wild-type non-human organism or part thereof.

[35792] In a preferred embodiment of said transgenic non-human organism said nucleic acid molecule according to 1 (a), (b), (c), (d), (e), (f), (g), (h), (i), (j) or (k), said promoter and optionally said nucleic acid molecule encoding a transit peptide are encompassed in an expression cassette in said vector. Accordingly an embodiment the invention provides a non-human organism comprising or being transformed by a vector comprising an expression cassette comprising said nucleic acid molecule according to 1 (a), (b), (c), (d), (e), (f), (g), (h), (i), (j) or (k), said promoter and optionally said a nucleic acid molecule encoding a transit peptide, operable linked. Said expression cassette may encompass a terminator, too.

[35793] [0291.1.1.5] to [0299.1.1.5] for the disclosure of these paragraphs see [0291.1.1.1] to [0299.1.1.1] above.

[35794] The term “biological active portion” or “biological activity” means a polypeptide as depicted in the respective line in Table II, application no. 5, column 3 or a portion of said polypeptide which still has at least 10% or 20%, preferably 30%, 40%, 50% or 60%, especially preferably 70%, 75%, 80%, 90% or 95% of the enzymatic or biological activity of the natural or starting enzyme or protein. [0301.1.1.5] to [0304.1.1.5] for the disclosure of these paragraphs see [0301.1.1.1] to [0304.1.1.1] above.

[35795] Synthetic oligonucleotide primers for the amplification, e.g. as shown in the respective line in Table III, application no. 5, column 8, by means of polymerase chain reaction can be generated on the basis of a sequence shown herein, for example the sequence shown in the respective line in Table I, application no. 5, columns 5 or 8, or the sequences derived from Table II, application no. 5, columns 5 or 8, respectively.

[35796] Moreover, it is possible to identify a conserved region of a protein from various organism by carrying out protein sequence alignments with the polypeptide encoded by the nucleic acid molecules of the present invention, in particular with the sequences encoded by the nucleic acid molecule shown in the respective line in column 5 or 8 of Table I, application no. 5, from which conserved regions, and in turn, degenerate primers can be derived. Conserved regions are those, which show a very little variation in the amino acid in one particular position of several homologs from different origin. The consensus sequence and polypeptide motifs shown in the respective line in column 8 of Table IV, application no. 5, are derived from such alignments of homologous proteins.

[35797] In an embodiment of the present invention, in the method of the present invention the activity of a polypeptide comprising or consisting of a consensus sequence or at least one polypeptide motif shown in the respective line in Table IV, application no. 5, column 8, is increased. In another embodiment thereof, the method of the present invention relates to a polypeptide comprising or consisting of a consensus sequence shown in the respective line in Table IV, application no. 5, column 8 or comprising at least one polypeptide motif shown in the respective line in Table IV, application no. 5, column 8, whereby not more than 20, 15, 10, 9, 8, 7, 6, 5 4, 3, 2 or 1, or 0 of the amino acid positions indicated can be replaced by any amino acid. In another embodiment thereof, the method of the present invention relates to a polypeptide comprising or consisting of a consensus sequence shown in the respective line in Table IV, application no. 5, column 8 or comprising at least one polypeptide motif shown in the respective line in Table IV, application no. 5, column 8, whereby not more than 15%, 10%, 5%, 4%, 3%, 2% or 1%, or 0% of the amino acid positions defined as distinct specific amino acids are/is replaced by another amino acid. In another embodiment thereof, the method of the present invention relates to a polypeptide comprising or consisting of a consensus sequence shown in the respective line in Table IV, application no. 5, column 8 or comprising at least one polypeptide motif shown in the respective line in Table IV, application no. 5, column 8, whereby not more than 20, 15, 10, 9, 8, 7, 6, 5, 4, 3, 2 or 1, or 0 amino acids are inserted into a consensus sequence or polypeptide motif.

[35798] In an embodiment of the present invention, in the method of the present invention the activity of a polypeptide comprising or consisting of a consensus sequence or at least one polypeptide motif shown in the respective line in Table IV, application no. 5, column 8, is increased, whereby said polypeptide distinguishes over the sequence depicted in Table II, application no. 5, columns 5 or 8 by one or more amino acids.

[35799] In one embodiment, said polypeptide of the invention distinguishes over the sequence shown in the respective line in Table II, application no. 5, columns 5 and 8 by more than 5, 6, 7, 8 or 9 amino acids, preferably by more than 10, 15, 20, 25 or 30 amino acids, even more preferred are more than 40, 50, or 60 amino acids and, preferably, the sequence of the polypeptide of the invention distinguishes from the sequence shown in the respective line in Table II B, application no. 5, columns 5 and 8 by not more than 80%, 70%, 60%, 50%, 40%, 30%, 20%, 10%, 5%, 4%, 3%, 2%, 1% or 0.5%. In another embodiment, said polypeptide of the invention does not consist of the sequence shown in Table II, application no. 5, columns 5 or 8.

[35800] [0309.1.1.5] to [0321.1.1.5] for the disclosure of these paragraphs see [0309.1.1.1] to [0321.1.1.1] above.

[35801] Polypeptides having above-mentioned activity, i.e. conferring the production or the increased production of the fine chemical tryptophan as compared to a corresponding, e.g.

[35802] non-transformed, wild type non-human organism, like a microorganism or a plant cell, plant or part thereof, can be encoded by other DNA sequences which hybridize to the sequences shown in the respective line in Table I, application no. 5, columns 5 and 8, preferably the coding region thereof, at least under relaxed hybridization conditions and which encode the expression of polypeptides conferring the production or the increased production of the respective fine chemical tryptophan as compared to a corresponding, e.g. non-transformed, wild type non-human organism, like a microorganism or a plant cell, plant or part thereof.

[35803] [0323.1.1.5] to [0329.1.1.5] for the disclosure of these paragraphs see [0323.1.1.1] to [0329.1.1.1] above.

[35804] Further, the nucleic acid molecule of the invention comprises a nucleic acid molecule, which is a complement of one of the nucleotide sequences of above-mentioned nucleic acid molecules or a portion thereof. A nucleic acid molecule or its sequence which is complementary to one of the nucleotide molecules or sequences shown in the respective line in Table I, application no. 5, columns 5 or 8, preferably the coding region thereof, homologs or fragments thereof, is one which is sufficiently complementary to one of the nucleotide molecules or sequences shown in the respective line in Table I, application no. 5, columns 5 or 8, preferably the coding region thereof, homologs or fragments thereof, such that it can hybridize to one of the nucleotide sequences shown in Table I, application no. 5, columns 5 or 8, preferably the coding region thereof, homologs or fragments thereof, thereby forming a stable duplex. Preferably, the hybridization is performed under stringent hybridization conditions. However, a complement of one of the herein disclosed sequences is preferably a sequence complement thereto according to the base pairing of nucleic acid molecules well known to the skilled person. For example, the bases A and G undergo base pairing with the bases T and U or C, resp. and visa versa. Modifications of the bases can influence the base-pairing partner.

[35805] The nucleic acid molecule of the invention comprises a nucleotide sequence which is at least about 30%, 35%, 40%, 45%, 50%, 55%, 60%, 65%, 70%, 75%, 80%, 90%, 95%, 96%, 97%, 98%, 99%, 99.5% or more homologous to a nucleotide sequence shown in Table I, application no. 5, columns 5 or 8, preferably the coding region thereof, homologs or fragments thereof, and preferably has above-mentioned activity, in particular conferring the production or the increased production of the fine chemical tryptophan, respectively, after increasing the activity or an activity of a gene as shown in the respective line in Table I or of a gene product, e.g. as shown in the respective line in Table II, application no. 5, column 5 or 8, by for example in one embodiment expression either in the cytosol or in an organelle such as a plastid or mitochondria or both, preferably in a plastid, or in another embodiment non-targeted or targeted.

[35806] The nucleic acid molecule of the invention comprises a nucleotide sequence or molecule which hybridizes, preferably hybridizes under stringent conditions as defined herein, to one of the nucleic acid molecule shown in the respective line in Table I, preferably Table IB, application no. 5, columns 5 or 8, preferably the coding region thereof, fragments or homologs thereof, and encodes a protein having above-mentioned activity, e.g. conferring the production or the increased production of the respective fine chemical tryptophan as compared to a corresponding, e.g. non-transformed, wild type non-human organism, like a microorganism or a plant cell, plant or part thereof, by for example in one embodiment expression either in the cytosol or in an organelle such as a plastid or mitochondria or both, preferably in a plastid, or in another embodiment non-targeted or targeted, and optionally, the activity thereof is selected from the group consisting of 3-deoxy-7-phosphoheptulonate synthase, 3-ketoacyl-CoA thiolase, acetyltransferase, aldehyde dehydrogenase, amino acid transporter, aromatic amino acid aminotransferase, At1g19800-protein, At2g33510-protein, At4g32480-protein, At5g16650-protein, at5g21910-protein, ATP synthase subunit E, ATP-binding component of a transport system, auxin response factor, b1163-protein, b1346-protein, b1522-protein, b1796-protein, b2739-protein, b2849-protein, b3989-protein, b4029-protein, b4121-protein, binding-protein-dependent transport systems inner membrane component, branched-chain amino acid permease, calcium-dependent protein kinase, carbon dioxide concentrating mechanism protein, cardiolipin synthase, CBL-interacting protein kinase, Chaperone protein CIpB, choline kinase, coproporphyrinogen III oxidase, cullin, cyclin, cyclin D , cystathionine gamma-synthase, DNA mismatch repair protein, electron transfer flavoprotein subunit beta, elongation factor Tu, enoyl-CoA hydratase, eukaryotic translation initiation factor, eukaryotic translation initiation factor 5, fimbrial-like protein, flavodoxin, geranylgeranyl pyrophosphate synthase, gibberellin 20-oxidase, glucose dehydrogenase, glucose-6-phosphate 1-dehydrogenase, glutamate-ammonia-ligase, glutamine synthetase, glutaredoxin, glycerol kinase, glycosyl transferase, harpin-induced family protein, histone acetyltransferase, hydrolase, imidazole glycerol phosphate synthase subunit, isochorismate synthase, isopentenyl diphosphate isomerase, Leucyl/phenylalanyl-tRNA-protein transferase, lipase, L-ribulose-5-phosphate 4-epimerase, malate dehydrogenase, malic enzyme, methyl-accepting chemotaxis protein, methyltransferase, monthiol glutaredoxin, NAD(P)H-quinone oxidoreductase subunit, nitrate/nitrite transport protein, photosystem II protein, polygalacturonase, precorrin methylase, protein kinase, protein phosphatase, putative transport system permease protein, pyruvate kinase, recombinase A, RNA binding protein, RNA-binding protein, Sec-independent protein translocase subunit, short-chain alcohol dehydrogenase family, slr1107-protein, threonine synthase, transaldolase, transcription factor, transcriptional regulator, transport protein, trehalose-phosphatase, tryptophan biosynthesis protein, yfl054c-protein, and Zm_{—}4842_BE510522-protein, respectively.

[35807] Moreover, the nucleic acid molecule of the invention can comprise only a portion of the coding region of one of the nucleic acid molecules depicted in Table I, application no. 5, columns 5 or 8, for example a fragment which can be used as a probe or primer or a fragment encoding a biologically active portion of the polypeptide of the present invention or of a polypeptide used in the process of the present invention, i.e. having above-mentioned activity, e.g. conferring the production or the increased production of the respective fine chemical tryptophan as compared to a corresponding, e.g. non-transformed, wild type non-human organism, like a microorganism or a plant cell, plant or part thereof, by for example in one embodiment expression either in the cytosol or in an organelle such as a plastid or mitochondria or both, preferably in a plastid, or in another embodiment non-targeted or targeted. The nucleotide sequences determined from the cloning of the present protein-according-to-the-invention-encoding gene allows for the generation of probes and primers designed for use in identifying and/or cloning its homologues from other cell types and organisms. The probe/primer typically comprises a substantially purified oligonucleotide. The oligonucleotide typically comprises a region of nucleotide sequence that hybridizes under stringent conditions to at least about 12, 15 preferably about 20 or 25, more preferably about 40, 50 or 75 consecutive nucleotides of a sense strand of one of the sequences set forth, e.g., in the respective line in Table I, application no. 5, column 5 or 8, preferably the coding region thereof, or a homolog or a fragment thereof, an anti-sense sequence of one of the sequences, e.g., set forth in the respective line in Table I, application no. 5, columns 5 or 8, preferably the coding region thereof, or a homolog or a fragment thereof or naturally occurring mutants thereof. Primers based on a nucleic acid molecule of invention can be used in PCR reactions to clone homologs of the polypeptide of the invention or of the polypeptide used in the process of the invention, e.g. as the primers described in the examples of the present invention, e.g. as shown in the examples. A PCR with the primers shown in the respective line in Table III, column 8 will result in a fragment of the gene product as shown in Table II, application no. 5, column 5.

[35808] Primer sets are interchangeable. The person skilled in the art knows how to design and combine said primers to result in the desired product, e.g. in a full length clone or a partial sequence. Probes based on the sequences of the nucleic acid molecule of the invention or used in the process of the present invention can be used to detect transcripts or genomic sequences encoding the same or homologous proteins. The probe can further comprise a label group attached thereto, e.g. the label group can be a radioisotope, a fluorescent compound, an enzyme, or an enzyme co-factor. Such probes can be used as a part of a genomic marker test kit for identifying cells which express a polypeptide of the invention or used in the process of the present invention, such as by measuring a level of an encoding nucleic acid molecule in a sample of cells, e.g. detecting mRNA levels or determining, whether a genomic gene comprising the sequence of the polynucleotide of the invention or used in the processes of the present invention has been mutated or deleted.

[35809] As the expression of a respective nucleic acids of the invention is related to the synthesis of the respective fine chemical tryptophan its function as a probe extends to the detection of microorganisms, plant tissues, plants, plant variets, plant ecotypes or plant genera with varying capability or potential for synthesis of the respective fine chemical tryptophan. Therefore in one embodiment the present invention relates to a method for analyzing the capability or potential of a plant tissue, a plant, a plant variety or plant ecotype to produce the fine chemical tryptophan by using the nucleic acid of the invention or parts thereof as a probe to detect the amount of the nucleic acid of the invention in the non-human organism or a part thereof in comparison to another non-human organism.

[35810] The nucleic acid molecule of the invention encodes a polypeptide or portion thereof which includes an amino acid sequence which is sufficiently homologous to the amino acid sequence shown in respective line in Table II, application no. 5, columns 5 or 8 such that the protein or portion thereof maintains the ability to confer the production or the increased production of the respective fine chemical tryptophan as compared to a corresponding, e.g. non-transformed, wild type non-human organism, like a microorganism or a plant cell, plant or part thereof, in particular increasing the activity as mentioned above or as described in the examples in microorganisms or plants.

[35811] As used herein, the language “sufficiently homologous” refers to proteins or portions thereof which have amino acid sequences which include a minimum number of identical or equivalent amino acids (e.g. an amino acid which has a similar side chain as an amino acid in one of the sequences of the polypeptide of the present invention) to an amino acid sequence shown in the respective line in Table II, application no. 5, columns 5 or 8 such that the protein or portion thereof is able to confer the production or the increased production of the respective fine chemical tryptophan as compared to a corresponding, e.g. non-transformed, wild type non-human organism, like a microorganism or a plant cell, plant or part thereof. For example having the activity of a protein as shown in the respective line in Table II, application no. 5, column 3 and as described herein.

[35812] In an embodiment of the present invention, the nucleic acid molecule of the present invention comprises a nucleic acid molecule that encodes a portion of the protein of the present invention. The protein is at least about 30%, 35%, 40%, 45% 50%, 55%, 60%, 65%, 70%, 75%, 80%, 85%, 90%, 91%, 92%, 93%, 94%, 95%, 96%, 97%, 98%, 99%, 99.5% or more homologous to an entire amino acid sequence shown in the respective line of Table II, application no. 5, column 5 or 8 and has the above-mentioned activity, e.g. conferring the production or the increased production of the respective fine chemical tryptophan as compared to a corresponding, e.g. non-transformed, wild type non-human organism, like a microorganism or a plant cell, plant or part thereof by, for example in a embodiment expression either in the cytosol or in an organelle such as a plastid or mitochondria or both, preferably in a plastid, or in another embodiment by targeted or non-targeted expression.

[35813] [0338.1.1.5] to [0339.1.1.5] for the disclosure of these paragraphs see [0338.1.1.1] to [0339.1.1.1] above.

[35814] The invention further relates to nucleic acid molecules or methods using said nucleic acid molecules that differ from one of the nucleotide sequences shown in the respective line in Table I, application no. 5, columns 5 or 8, preferably the coding region thereof, or fragments or homologs thereof, due to degeneracy of the genetic code but encode a polypeptide of the present invention, in particular a polypeptide having the above-mentioned activity, e.g. as those polypeptides depicted in the respective line in Table II, application no. 5, columns 5 or 8, fragments or homologs thereof. Advantageously, the nucleic acid molecule of the invention comprises, or in an other embodiment has, a nucleotide sequence encoding a protein comprising, or in an other embodiment having, an amino acid sequence shown in the respective line in Table II, application no. 5, columns 5 or 8, fragments or homologs thereof. In a further embodiment, the nucleic acid molecule of the invention encodes a full length protein which is substantially homologous to an amino acid sequence shown in the respective line in Table II, application no. 5, columns 5 or 8, or homologs thereof. However, in an embodiment, the nucleic acid molecule of the present invention does not consist of the sequence shown in the respective line in Table I, preferably Table IA, application no. 5, columns 5 or 8, preferably the coding region thereof, but the functional homologs thereof.

[35815] [0341.1.1.5] to [0343.1.1.5] for the disclosure of these paragraphs see [0341.1.1.1] to [0343.1.1.1] above.

[35816] Accordingly, in another embodiment, a nucleic acid molecule of the invention is at least 15, 20, 25 or 30 nucleotides in length. Preferably, it hybridizes under stringent conditions to a nucleic acid molecule comprising a nucleotide sequence of the nucleic acid molecule of the present invention or used in the process of the present invention, e.g. comprising the sequence shown in the respective line in Table I, application no. 5, columns 5 or 8, preferably the coding region thereof. In another embodiment the nucleic acid molecule is preferably at least 20, 30, 50, 100, 250 or more nucleotides in length.

[35817] for the disclosure of this paragraph see [0345.1.1.1] above.

[35818] Preferably, a nucleic acid molecule of the invention that hybridizes under stringent conditions to a sequence shown in the respective line in Table I, application no. 5, columns 5 or 8, preferably the coding region thereof, corresponds to a naturally-occurring nucleic acid molecule of the invention. As used herein, a “naturally-occurring” nucleic acid molecule refers to a RNA or DNA molecule having a nucleotide sequence that occurs in nature (e.g. encodes a natural protein). Preferably, the nucleic acid molecule encodes a natural protein having above-mentioned activity, e.g. conferring the production or the increased production of the respective fine chemical tryptophan as compared to a corresponding, e.g. non-transformed, wild type non-human organism, like a microorganism or a plant cell, plant or part thereof after increasing the expression or activity thereof or the activity of a protein of the invention or used in the process of the invention, in an embodiment for example expression either in the cytosol or in an organelle such as a plastid or mitochondria, preferably in plastids, or, in another embodiment by targeted or non-targeted expression.

[35819] for the disclosure of this paragraph see [0347.1.1.1] above [0348.1.5.5] For example, nucleotide substitutions leading to amino acid substitutions at “non-essential” amino acid residues can be made in a sequence of the nucleic acid molecule of the invention or used in the process of the invention, e.g. shown in the respective line in Table I, application no. 5, columns 5 or 8, preferably the coding region thereof, or fragments or homologs thereof.

[35820] [0349.1.1.5] to [0350.1.1.5] for the disclosure of these paragraphs see [0349.1.1.1] to 0350.1.1.1] above.

[35821] Accordingly, the invention relates to nucleic acid molecules encoding a polypeptide having above-mentioned activity, in a non-human organisms or parts thereof by for example expression either in the cytosol or in an organelle such as a plastid or mitochondria or both, preferably in plastids, that contain changes in amino acid residues that are not essential for said activity. Such polypeptides differ in amino acid sequence from a sequence depicted in the respective line in Table II, especially Table IIA, application no. 5, columns 5 or 8, but retain said activity described herein. The nucleic acid molecule can comprise a nucleotide sequence encoding a polypeptide, wherein the polypeptide comprises an amino acid sequence at least about 50% identical to an amino acid sequence shown in the respective line in Table II, application no. 5, columns 5 or 8, and is capable of conferring the production or the increased production of the respective fine chemical tryptophan as compared to a corresponding, e.g. non-transformed, wild type non-human organism, like a microorganism or a plant cell, plant or part thereof, after increasing its activity for example in an embodiment by expression either in the cytosol or in an organelle such as a plastid or mitochondria or both, preferably in plastids, or, in another embodiment by targeted or non-targeted expression. Preferably, the protein encoded by the nucleic acid molecule is at least about 60%, 70%, 80%, 90%, 95%, 96%, 97%, 98%, 99% or 99.5% identical to the sequence shown in the respective line in Table II, application no. 5, columns 5 or 8.

[35822] [0352.1.1.5] to [0357.1.1.5] for the disclosure of these paragraphs see [0352.1.1.1] to [0357.1.1.1] above.

[35823] Functional equivalents of the nucleic acid molecules according to the present invention and/or used in the process according to the present invention represent an embodiment of homologs. Functional equivalents derived from the nucleic acid molecules as shown in the respective line in Table I, application no. 5, columns 5 or 8, preferably the coding region thereof, according to the invention by substitution, insertion or deletion have at least 30%, 35%, 40%, 45%, 50%, 55%, 60%, 65%, 70%, 75%, 80%, 85%, 90%, 91%, 92%, 93%, 94%, 95%, 96%, 97%, 98%, 99% or 99.5% homology with one of the nucleic acid molecules as shown in the respective line in Table I, application no. 5, columns 5 or 8, preferably the coding region thereof, according to the invention and encode polypeptides having essentially the same properties as the polypeptide as shown in the respective line in Table II, application no. 5, columns 5 or 8.

[35824] Functional equivalents derived from one of the polypeptides as shown in the respective line in Table II, application no. 5, columns 5 or 8 according to the invention by substitution, insertion or deletion have at least 30%, 35%, 40%, 45%, 50%, 55%, 60%, 65%, 70%, 75%, 80%, 85%, 90%, 91%, 92%, 93%, 94%, 95%, 96%, 97%, 98%, 99% or 99.5% homology with one of the polypeptides as shown in the respective line in Table II, application no. 5, columns 5 or 8 according to the invention and having essentially the same properties as the polypeptide as shown in the respective line in Table II, application no. 5, columns 5 or 8.

[35825] for the disclosure of this paragraph see [0359.1.1.1] above [0360.1.5.5] A nucleic acid molecule encoding a homolog to a polypeptide depicted in the respective line in Table II, application no. 5, columns 5 or 8 can be created by introducing one or more nucleotide substitutions, additions or deletions into the nucleic acid molecule of the present invention, in particular of Table I, application no. 5, columns 5 or 8, in the respective line, such that one or more amino acid substitutions, additions or deletions are introduced into the encoded protein. Mutations can be introduced into the nucleic acid molecules as depicted in the respective line in Table I, application no. 5, columns 5 or 8, preferably the coding region thereof, by standard techniques, such as site-directed mutagenesis, PCR-mediated mutagenesis or other methods known to the person skilled in the art.

[35826] [0361.1.1.5] to [0363.1.1.5] for the disclosure of these paragraphs see [0361.1.1.1] to [0363.1.1.1] above.

[35827] Homologues of the nucleic acid sequences used, with the sequences shown in the respective line in Table I, application no. 5, columns 5 or 8, preferably the coding region thereof, comprise also allelic variants with at least approximately 30%, 35%, 40%, 45%, 50%, 55%, 60%, 65%, 70%, 75%, 80%, 85%, 90%, 91%, 92%, 93%, 94% 95%. 96%, 97%, 98%, 99%, 99.5% or more % homology with one of the nucleotide sequences shown or the above-mentioned derived nucleic acid sequences or their homologues or derivatives or parts of these. Allelic variants encompass in particular functional variants which can be obtained by deletion, insertion or substitution of nucleotides from the sequences shown in the respective line, preferably in Table I, columns 5 or 8, preferably the coding region thereof, or from the derived nucleic acid sequences, the intention being, however, that the enzymatic activity or the biological activity of the resulting proteins synthesized is advantageously retained or increased.

[35828] In one embodiment of the present invention, the nucleic acid molecule of the invention or used in the process of the invention comprises the sequences shown in the respective line in any of the Table I, application no. 5, columns 5 or 8, preferably the coding region thereof, fragments or homologs thereof. It is preferred that the nucleic acid molecule comprises as little as possible other nucleotides not shown in the respective line in any one of Table I, application no. 5, columns 5 or 8, preferably the coding region thereof, fragments or homologs thereof. In one embodiment, the nucleic acid molecule comprises less than 500, 400, 300, 200, 100, 90, 80, 70, 60, 50 or 40 further nucleotides. In a further embodiment, the nucleic acid molecule comprises less than 30, 20 or 10 further nucleotides. In one embodiment, the nucleic acid molecule used in the process of the invention is identical to the sequences shown in the respective line in Table I, application no. 5, columns 5 or 8, preferably the coding region thereof.

[35829] Also preferred is that the nucleic acid molecule used in the process of the invention encodes a polypeptide comprising the sequence shown in the respective line in Table II, application no. 5, columns 5 or 8, fragments or homologs thereof. In one embodiment, the nucleic acid molecule encodes less than 150, 130, 100, 80, 60, 50, 40 or 30 further amino acids. In a further embodiment, the encoded polypeptide comprises less than 20, 15, 10, 9, 8, 7, 6 or 5 further amino acids. In one embodiment used in the inventive process, the encoded polypeptide is identical to the sequences shown in the respective line in Table II, application no. 5, columns 5 or 8.

[35830] In one embodiment, the nucleic acid molecule of the invention or used in the process encodes a polypeptide comprising the sequence shown in the respective line in Table II, application no. 5, columns 5 or 8, or fragments or homologs thereof, and comprises less than 100 further nucleotides. In a further embodiment, said nucleic acid molecule comprises less than 30 further nucleotides. In one embodiment, the nucleic acid molecule used in the process is identical to a coding sequence of the sequences shown in the respective line in Table I, application no. 5, columns 5 or 8.

[35831] Polypeptides (=proteins), which still have the essential biological or enzymatic activity of the polypeptide of the present invention conferring the production or the increased production of the respective fine chemical tryptophan as compared to a corresponding, e.g.

[35832] non-transformed, wild type non-human organism, like a microorganism or a plant cell, plant or part thereof, i.e. whose activity is essentially not reduced, are polypeptides with at least 10%, 20%, 30%, 40%, 50%, 60%, 70%, 80%, 90%, 95% or more of the wild type biological activity or enzymatic activity, advantageously, the activity is essentially not reduced in comparison with the activity of a polypeptide shown in the respective line in Table II, application no. 5, columns 5 or 8 expressed under identical conditions.

[35833] Homologues of nucleic acid molecules shown in the respective line in Table I, application no. 5, columns 5 or 8, preferably the coding region thereof, or fragments thereof, or of the derived sequences shown in the respective line in Table II, application no. 5, columns 5 or 8, or fragments thereof, also mean truncated sequences, cDNA, single-stranded DNA or RNA of the coding and noncoding DNA sequence. Homologues of said sequences are also understood as meaning derivatives, which comprise noncoding regions such as, for example, UTRs, introns, terminators, enhancers or promoter variants. The promoters upstream of the nucleotide sequences stated can be modified by one or more nucleotide substitution(s), insertion(s) and/or deletion(s) without, however, interfering with the functionality or activity either of the promoters, the open reading frame (=ORF) or with the 3′-regulatory region such as terminators or other 3′-regulatory regions, which are far away from the ORF. It is furthermore possible that the activity of the promoters is increased by modification of their sequence, or that they are replaced completely by more active promoters, even promoters from heterologous organisms. Appropriate promoters are known to the person skilled in the art and are mentioned herein below.

[35834] [0370.1.1.5] to [0379.1.1.1] for the disclosure of these paragraphs see [0370.1.1.1] to [0379.1.1.1] above.

[35835] Moreover, a native polypeptide conferring the increase of the respective fine chemical tryptophan in a non-human organism or a part thereof can be isolated from cells (e.g., endothelial cells), for example using the antibody of the present invention as described below, in particular, an antibody against proteins having 3-deoxy-7-phosphoheptulonate synthase, 3-ketoacyl-CoA thiolase, acetyltransferase, aldehyde dehydrogenase, amino acid transporter, aromatic amino acid aminotransferase, At1g19800-protein, At2g33510-protein, At4g32480-protein, At5g16650-protein, at5g21910-protein, ATP synthase subunit E, ATP-binding component of a transport system, auxin response factor, b1163-protein, b1346-protein, b1522-protein, b1796-protein, b2739-protein, b2849-protein, b3989-protein, b4029-protein, b4121-protein, binding-protein-dependent transport systems inner membrane component, branched-chain amino acid permease, calcium-dependent protein kinase, carbon dioxide concentrating mechanism protein, cardiolipin synthase, CBL-interacting protein kinase, Chaperone protein CIpB, choline kinase, coproporphyrinogen III oxidase, cullin, cyclin, cyclin D , cystathionine gamma-synthase, DNA mismatch repair protein, electron transfer flavoprotein subunit beta, elongation factor Tu, enoyl-CoA hydratase, eukaryotic translation initiation factor, eukaryotic translation initiation factor 5, fimbrial-like protein, flavodoxin, geranylgeranyl pyrophosphate synthase, gibberellin 20-oxidase, glucose dehydrogenase, glucose-6-phosphate 1-dehydrogenase, glutamate-ammonia-ligase, glutamine synthetase, glutaredoxin, glycerol kinase, glycosyl transferase, harpin-induced family protein, histone acetyltransferase, hydrolase, imidazole glycerol phosphate synthase subunit, isochorismate synthase, isopentenyl diphosphate isomerase, Leucyl/phenylalanyl-tRNA-protein transferase, lipase, L-ribulose-5-phosphate 4-epimerase, malate dehydrogenase, malic enzyme, methyl-accepting chemotaxis protein, methyltransferase, monthiol glutaredoxin, NAD(P)H-quinone oxidoreductase subunit, nitrate/nitrite transport protein, photosystem II protein, polygalacturonase, precorrin methylase, protein kinase, protein phosphatase, putative transport system permease protein, pyruvate kinase, recombinase A, RNA binding protein, RNA-binding protein, Sec-independent protein translocase subunit, shortchain alcohol dehydrogenase family, slr1107-protein, threonine synthase, transaldolase, transcription factor, transcriptional regulator, transport protein, trehalose-phosphatase, tryptophan biosynthesis protein, yfl054c-protein, or Zm_{—}4842_BE510522-protein activity, respectively, or an antibody against polypeptides as shown in the respective line in Table II, application no. 5, columns 5 or 8, or fragments or homologs thereof which can be produced by standard techniques utilizing the polypeptid of the present invention or fragment thereof, i.e., the polypeptide of this invention (FCRP). Preferred are monoclonal antibodies.

[35836] for the disclosure of this paragraph see [0381.1.1.1] above.

[35837] In one embodiment, the present invention relates to a polypeptide as depicted in the respective line in Table II, especially in Table IIA or especially in Table IIB, application no. 5, columns 5 or 8, or fragment or homolog thereof or as coded by the nucleic acid molecule shown in the respective line in Table I, especially Table IA or especially Table IB, application no. 5, columns 5 or 8, preferably the coding region thereof, or fragment or homolog thereof.

[35838] In an embodiment, the present invention relates to a polypeptide comprising or consisting of a consensus sequence shown in the respective line in Table IV, application no. 5, column 8 or at least one polypeptide motif shown in the respective line in Table IV, application no. 5, column 8.

[35839] In an embodiment thereof, the present invention relates to a polypeptide comprising or consisting of a consensus sequence shown in the respective line in Table IV, application no. 5, column 8 or comprising at least one polypeptide motif shown in the respective line in Table IV, application no. 5, column 8, whereby not more than 20, 15, 10, 9, 8, 7, 6, 5, 4, 3, 2, or 1, or 0 of the amino acids can be replaced by any amino acid.

[35840] In another embodiment thereof, the present invention relates to a polypeptide comprising or consisting of a consensus sequence shown in the respective line in Table IV, application no. 5, column 8 or comprising at least one polypeptide motif shown in the respective line in Table IV, application no. 5, column 8, whereby not more than 15%, 10%, 5%, 4%, 3%, 2% or1% or 0% of the amino acids defined as distinct specific amino acids are/is replaced by another amino acid.

[35841] In another embodiment thereof, the present invention relates to a polypeptide comprising or consisting of a consensus sequence shown in the respective line in Table IV, application no. 5, column 8 or comprising at least one polypeptide motif shown in the respective line in Table IV, application no. 5, column 8, whereby not more than 20, 15, 10, 9, 8, 7, 6, 5, 4, 3, 2, or 1, or 0 amino acids are inserted into the consensus sequence or polypeptide motif.

[35842] In an embodiment of the present invention, the polypeptide of the present invention comprises or consists of a consensus sequence or at least one polypeptide motif shown in the respective line in Table IV, application no. 5, column 8, whereby said polypeptide distinguishes over the sequence depicted in the respective line in Table II, application no. 5, columns 5 or 8 by one or more amino acids. In one embodiment, said polypeptide of the invention distinguishes over the sequence shown in the respective line in Table II, application no. 5, columns 5 and 8 by more than 5, 6, 7, 8 or 9 amino acids, preferably by more than 10, 15, 20, 25 or 30 amino acids, even more preferred are more than 40, 50, or 60 amino acids and, preferably, the sequence of the polypeptide of the invention distinguishes from the sequence shown in the respective line in Table II, application no. 5, columns 5 and 8 by not more than 80%, 70%, 60%, 50%, 40%, 30%, 20%, 10%, 5%, 4%, 3%, 2%, 1% or 0.5%. In another embodiment, said polypeptide of the invention does not consist of the sequence shown in the respective line in Table II, application no. 5, columns 5 and 8.

[35843] In an embodiment, the invention relates to a polypeptide conferring an increase in the respective fine chemical tryptophan in a non-human organism, especially a microorganism or a plant, or a part thereof, being encoded by the nucleic acid molecule of the invention or used in the process of the invention and having a sequence which distinguishes over the sequence as shown in the respective line in Table II, application no. 5, columns 5 or 8 by one or more amino acids (but not exceeding 5%, preferably 4%, 3%, 2%, 1%, 0.5%, 0.2% or 0.1%). In an embodiment, said polypeptide of the invention does not comprise or consist of the sequence shown in the respective line in Table II, application no. 5, columns 5 or 8. In an embodiment, said polypeptide of the present invention is less than 100%, 99.999%, 99.99%, 99.9% or 99% identical. In one embodiment, said polypeptide which differs at least in one or more amino acids (but not exceeding 5%, preferably 4%, 3%, 2%, 1%, 0.5%, 0.2% or 0.1%) from the polypeptide shown in the respective line in Table II, application no. 5, columns 5 and 8 does not comprise a protein of the sequence shown in the respective line in Table II A and/or II B, application no. 5, columns 5 or 8.

[35844] In an embodiment, the present invention relates to a polypeptide having the activity of the protein as shown in the respective line in Table II, application no. 5, column 3, which distinguishes over the sequence depicted in the respective line in Table II, application no. 5, columns 5 or 8 by one or more amino acids, preferably by more than 5, 6, 7, 8 or 9 amino acids, preferably by more than 10, 15, 20, 25 or 30 amino acids, even more preferred are more than 40, 50, or 60 amino acids and, preferably, the sequence of the polypeptide of the invention distinguishes from the sequence shown in the respective line in Table II, application no. 5, columns 5 and 8 by not more than 80%, 70%, 60%, 50%, 40%, 30%, 20%, 10%, 5%, 4%, 3%, 2%, 1% or 0.5%.

[35845] In another embodiment the polypeptide of the invention takes the form of a preprotein consisting of a plastidial or mitochondrial transit peptide joint to a polypeptide having the activity of the protein as shown in Table II, column 3, from which the transit peptide is preferably cleaved off upon transport of the preprotein into the organelle for example into the plastid or mitochondrion.

[35846] In another embodiment the polypeptide of the invention takes not the form of a preprotein.

[35847] [0390.1.1.5] to [0391.1.1.5] for the disclosure of these paragraphs see [0390.1.1.1] to [0391.1.1.1] above.

[35848] A polypeptide of the invention can participate in the process of the present invention. The polypeptide or a portion thereof comprises preferably an amino acid sequence, which is sufficiently homologous to an amino acid sequence shown in the respective line in Table II A and/or II B, application no. 5, columns 5 or 8.

[35849] Further, the polypeptide can have an amino acid sequence which is encoded by a nucleotide sequence which hybridizes, preferably hybridizes under stringent conditions as described above, to a nucleotide sequence of the nucleic acid molecule of the present invention. Accordingly, the polypeptide has an amino acid sequence which is encoded by a nucleotide sequence that is at least about 35%, 40%, 45%, 50%, 55%, 60%, 65%, 70%, 75%, 80%, 85%, 90%, 91%, 92%, 93%, 94%, 95%, 96%, 97%, 98%, 99%, 99.5% or more homologous to one of the amino acid sequences as shown in the respective line in Table II A and/or II B, application no. 5, columns 5 or 8, or fragments thereof. The preferred polypeptide of the present invention preferably possesses at least one of the activities according to the invention and described herein. A preferred polypeptide of the present invention includes an amino acid sequence encoded by a nucleotide sequence which hybridizes, preferably hybridizes under stringent conditions, to a nucleotide sequence shown in the respective line in Table I A and/or I B, application no. 5, columns 5 or 8, preferably the coding region thereof, or fragments thereto or which is homologous thereto, as defined above.

[35850] The polypeptide of the present invention can vary from the sequences shown in the respective line in Table II A and/or II B, application no. 5, columns 5 or 8 in amino acid sequence due to natural variation or mutagenesis, as described in detail herein. Accordingly, the polypeptide comprise an amino acid sequence which is at least about 35%, 40%, 45%, 50%, 55%, 60%, 65%, 70%, 75%, 80%, 85% or 90, 91%, 92%, 93%, 94%, 95%, 96%, 97%, 98%, 99%, 99.5% or more homologous to an entire amino acid sequence shown in the respective line in Table II A and/or II B, application no. 5, columns 5 or 8.

[35851] Biologically active portions of a polypeptide of the present invention include peptides comprising amino acid sequences derived from the amino acid sequence of the polypeptide of the present invention or used in the process of the present invention, e.g., the amino acid sequence shown in the respective line in Table II, application no. 5, columns 5 or 8 or the amino acid sequence of a protein homologous thereto, which include fewer amino acids than a full length polypeptide of the present invention or used in the process of the present invention or the full length protein which is homologous to a polypeptide of the present invention or used in the process of the present invention depicted herein, and exhibit at least one activity of a polypeptide of the present invention or used in the process of the present invention.

[35852] for the disclosure of this paragraph see [0396.1.1.1] above.

[35853] Manipulation of the nucleic acid molecule of the invention may result in the production of a protein having differences from the protein as shown in the respective line in Table II, application no. 5, column 5 or 8. Differences shall mean at least one amino acid different from the sequences as shown in the respective line in Table II, application no. 5, column 5 or 8, preferably at least 2, 3, 4, 5, 6, 7, 8, 9 or 10 amino acids (especially but not exceeding 0.1%, preferably 0.2%, 0.5%, 1%, 2%, 3% 4% or 5%), more preferably at least 15, 20, 25, 30, 35, 40, 45 or 50 amino acids (especially but not exceeding 0.5%, preferably 1%, 2%, 3% 4%, 5%, 10% or 25%) different from the sequences as shown in the respective line in Table II, application no. 5, column 5 or 8. These proteins may be improved in efficiency or activity, or may be more stable and therefore present in greater numbers in the cell as compared to the wild-type cell.

[35854] Any mutagenesis strategies for the polypeptide of the present invention or the polypeptide used in the process of the present invention to result in increasing said activity are not meant to be limiting; variations on these strategies will be readily apparent to one skilled in the art. Using such strategies, and incorporating the mechanisms disclosed herein, the nucleic acid molecule and polypeptide of the invention may be utilized to generate algae, ciliates, fungi, other microorganisms like C. glutamicum or plants or parts thereof, expressing proteins as shown in the respective line in Table II, application no. 5, column 5 or 8, or mutated proteins thereof. The nucleic acid molecules and polypeptide molecules of the invention are expressed such that the yield, production, and/or efficiency of production of a desired compound is improved.

[35855] [0399.1.1.5] to [0401.1.1.5] for the disclosure of these paragraph see [0399.1.1.1] to [0401.1.1.1] above.

[35856] In one embodiment, a protein (=polypeptide) as shown in the respective line in Table II, application no. 5, column 5 or 8 refers to a polypeptide having an amino acid sequence corresponding to the polypeptide of the invention, especially to a polypeptide as shown in Table II, application no. 5, columns 5 or 8 or homologs thereof, or used in the process of the invention, whereas a “non- inventive protein or polypeptide” or “other polypeptide” refers to a polypeptide having an amino acid sequence corresponding to a protein which is not substantially homologous to a polypeptide of the invention, preferably which is not substantially homologous to a polypeptide or protein as shown in the respective line in Table II, application no. 5, column 5 or 8 or homologs thereof, e.g., a protein which does not confer the activity described herein and which is derived from the same or a different organism.

[35857] [0403.1.1.5] to [0409.1.1.5] for the disclosure of these paragraphs see [0403.1.1.1] to [0409.1.1.1] above.

[35858] As the nucleic acid molecules of the invention and/or the expression thereof is related to the synthesis of the respective fine chemical tryptophan its function as a probe extends to the detection of microorganisms, plant tissues, plants, plant variets, plant ecotypes or plant genera with varying, advantageously increased, capability or potential for synthesis of the respective fine chemical tryptophan. Therefore in one embodiment the present invention relates to a method for analyzing the capability or potential of a plant tissue, a plant, a plant variety or ecotype to produce the respective fine chemical tryptophan by using the respective antibody of the invention as a probe to detect the amount of the polypeptide encoded by said nucleic acid molecule of the invention in a non-human organism in comparison to another organism.

[35859] Therefore in one embodiment the invention relates to a method to probe a non-human organism for its capability for the production of the respective fine chemical comprising the steps of
[35860] a) analyzing the sequence and/or the expression of the respective nucleic acid molecule of the invention in least two non-human organisms which differ in the capability to produce the respective fine chemical;
[35861] b) associate the different sequence and/or expression level of the nucleic acid molecules of the invention with their different capability to produce the respective fine chemical;
[35862] c) analyze the sequence and/or the expression of the nucleic acid molecule of the invention in at least a third non-human organism;
[35863] d) predict the capability of the at least third organism to produce the respective fine chemical based by comparing the sequence and/or expression of the nucleic acid of the invention to the sequences and/or expression levels of the nucleic acid molecule of the invention of the at least two organisms analyzed in step a.

[35864] [0411.1.1.5] to [0430.1.1.5] for the disclosure of these paragraphs see [0411.1.1.1] to [0430.1.1.1] above.

[35865] Accordingly the present invention relates to any cell transgenic for any nucleic acid characterized as part of the invention, e.g. conferring the increase of the respective fine chemical tryptophan in a cell or a non-human organism or a part thereof, e.g. the nucleic acid molecule of the invention, the nucleic acid construct of the invention, the vector of the invention, the expression cassette according to the invention, or a nucleic acid molecule encoding the polypeptide of the invention, e.g. encoding a polypeptide having an activity as the protein as shown in the respective line in Table II, application no. 5, column 3. Due to the above-mentioned activity the respective fine chemical tryptophan content in a cell or a non-human organism is increased. For example, due to modulation or manipulation, the cellular activity is increased, in a preferred embodiment in organelles such as plastids or mitochondria, e.g. due to an increased expression or specific activity or specific targeting of the subject matters of the invention in a cell or a non-human organism or a part thereof especially in organelles such as plastids or mitochondria, or in another embodiment in the cytosol. Transgenic for a polypeptide having a protein or a protein activity means herein that due to modulation or manipulation of the genome, the activity of protein as shown in the respective line in Table II, application no. 5, column 3 or a protein as shown in the respective line in Table II, application no. 5, column 3-like activity is increased in the cell or non-human organism or part thereof, especially in organelles such as plastids or mitochondria, or especially in the cytosol. Examples are described above in context with the process of the invention.

[35866] for the disclosure of this paragraph see [0432.1.1.1] above.

[35867] A naturally occurring expression cassette - for example the naturally occurring combination of the promoter of the gene encoding a protein as shown in the respective line in Table II, application no. 5, column 5 or 8, preferably the coding region thereof, or fragments or homologs thereof with the corresponding encoding gene - becomes a transgenic expression cassette when it is modified by non-natural, synthetic “artificial” methods such as, for example, mutagenesis. Such methods have been described (U.S. Pat. No. 5,565,350; WO 00/15815; also see above).

[35868] [0434.1.1.5] to [0435.1.1.5] for the disclosure of these paragraphs see [0434.1.1.1] to [0435.1.1.1] above.

[35869] Transgenic plants comprising the respective fine chemical(s) synthesized in the process according to the invention can be marketed directly without isolation of the fine chemical synthesized. In the process according to the invention, plants are understood as meaning all plant parts, plant organs such as leaf, stalk, root, tubers or seeds or propagation material or harvested material or the intact plant. In this context, the seed encompasses all parts of the seed such as the seed coats, epidermal cells, seed cells, endosperm or embryonic tissue. The fine chemical produced in the process according to the invention may, however, also be isolated from the plant. In case of tryptophan this can be in free form or bound to proteins. Fine chemical(s) produced by this process can be harvested by harvesting the non-human organisms either from the culture in which they grow or from the field. For example, this can be done via squeezing, grinding and/or extraction, salt precipitation and/or ion-exchange chromatography of the plant parts, preferably the plant seeds, plant fruits, plant tubers and the like.

[35870] [0437.1.1.5] to [0440.1.1.5] for the disclosure of these paragraphs see [0437.1.1.1] to [0440.1.1.1] above.

[35871] [0442.1.1.5] to [0454.1.1.5] for the disclosure of these paragraphs see [0442.1.1.1] to [0454.1.1.1] above.

[35872] In one embodiment, the present invention relates to a method for the identification of a gene product conferring the production of or an increase in the fine chemical production in a non-human cell, comprising the following steps:
[35873] (a) contacting, e.g. hybridizing, a, some or all nucleic acid molecules of a sample, e.g. cells, tissues, plants or microorganisms or a nucleic acid library, which can contain a candidate gene encoding a gene product conferring the production of or an increase in the fine chemical after expression, with the nucleic acid molecule of the present invention as shown in the respective line in column 5 or 8 of Table I A or B of application no. 5, preferably the coding region thereof, or a fragment or homolog thereof;
[35874] (b) identifying the nucleic acid molecules, which hybridize under relaxed stringent conditions with the nucleic acid molecule of the present invention in particular to the nucleic acid molecule sequence shown in the respective line in Table I, application no. 5, columns 5 or 8, preferably the coding region thereof, of a fragment or a homolog thereof, preferably in Table I B, application no. 5, columns 5 or 8, preferably the coding region thereof, of a fragment or a homolog thereof, and, optionally, isolating the full length cDNA clone or complete genomic clone;
[35875] (c) introducing the candidate nucleic acid molecules or a fragment thereof in host cells, preferably in a plant cell or a microorganism, appropriate for producing the fine chemical;
[35876] (d) expressing the identified nucleic acid molecules in the host cells for which the production of or the increased production of the fine chemical is desired;
[35877] (e) assaying the fine chemical level in the non-human host cells; and
[35878] (f) identifying the nucleic acid molecule and/or its gene product which expression confers the production of or an increase in the fine chemical level in the non-human host cell after expression compared to the wild type.

[35879] for the disclosure of this paragraph see [0456.1.1.1] above.

[35880] In another embodiment, the present invention relates to a method for the identification of a gene product conferring the production of or an increase in the fine chemical production in a cell, comprising the following steps:
[35881] (a) identifying a nucleic acid molecule of a non-human organism, which is at least 20%, 25%, 30%, 35%, 40%, 50%, 60%, 70%, 80%, 90%, 95%, 96%, 97%, 98%, 99%, 99.5% or more homolog to the nucleic acid molecule encoding a polypeptide comprising the polypeptide molecule as shown in the respective line in column 5 or 8 of Table II, application no. 5, or comprising a consensus sequence or a polypeptide motif as shown in the respective line in column 8 of Table IV, application no. 5, or being encoded by a nucleic acid molecule comprising a polynucleotide as shown in the respective line in column 5 or 8 of Table I, application no. 5, preferably the coding region thereof, or a homologue thereof as described herein, for example via homology search in a data bank;
[35882] (b) introducing the candidate nucleic acid molecule in non-human host cells, preferably in a plant cell or a microorganism, appropriate for producing the fine chemical;
[35883] (c) expressing the identified nucleic acid molecule in the non-human host cells;
[35884] (d) assaying the fine chemical level in the non-human host cells; and
[35885] (e) identifying the nucleic acid molecule and its gene product which expression confers the production of or an increase in the fine chemical level in the non-human host cell after expression compared to the wild type.

[35886] for the disclosure of this paragraph see [0458.1.1.1] above.

[35887] Further, the nucleic acid molecules disclosed herein, in particular the nucleic acid molecules shown in the respective line in column 5 or 8 of Table I A or B of application no. 5, may be sufficiently homologous to the sequences of related species such that these nucleic acid molecules may serve as markers for the construction of a genomic map in related organism or for association mapping. Furthermore natural variation in the genomic regions corresponding to nucleic acids disclosed herein, in particular the nucleic acid molecule shown in the respective line in column 5 or 8 of Table I A or B, of application no. 5 or homologous thereof, may lead to variation in the activity of the proteins disclosed herein, in particular the proteins comprising polypeptides as shown in the respective lines in column 5 or 8 of Table II A or B, of application no. 5 or their homologous, or comprising the consensus sequence or the polypeptide motif as shown in the respective line in column 8 of Table IV, and in consequence in a natural variation of an increased fine chemical production.

[35888] In consequence natural variation eventually also exists in form of more active allelic variants leading already to a relative increase in the fine chemical. Different variants of the nucleic acid molecules disclosed herein, in particular the nucleic acid molecules comprising the nucleic acid molecules as shown in the respective line in column 5 or 8 of Table I A or B of application no. 5, preferably the coding region thereof, which corresponds to different levels of increase in fine chemical, e.g. different levels of increase in fine chemical, can be indentified and used for marker assisted breeding for an enhanced production of the fine chemical.

[35889] Natural variation may also exist in the regulatory regions, e.g. the promoters of the natural genes comprising the nucleic acid molecules as shown in the respective line column 5 or 8 of Table I A or B of application no. 5, preferably the coding region thereof, which can similarly correspond to different levels of increase in the fine chemical, e.g. different levels of increase in the fine chemical can be identified and used for marker assisted breeding for an enhanced production of the fine chemical.

[35890] Accordingly, the present invention relates to a method for breeding plants for the production of the fine chemical, comprising
[35891] (a) selecting a first plant variety with an increased production of the fine chemical, e.g. based on an increased expression of a nucleic acid molecule of the invention as disclosed herein, in particular of a nucleic acid molecule comprising a nucleic acid molecule as shown in the respective line in column 5 or 8 of Table I A or B of application no. 5, preferably the coding region thereof, or fragments or homologs thereof, or a polypeptide comprising a polypeptide as shown in the respective line in column 5 or 8 of Table II A or B of application no. 5, or fragments or homologs thereof, or comprising a consensus sequence or a polypeptide motif as shown in the respective line in column 8 of Table IV, or a homolog thereof, as described herein;
[35892] (b) associating the level of increased production of the fine chemical, with the expression level or the genomic structure of a gene encoding said polypeptide or said nucleic acid molecule;
[35893] (c) crossing the first plant variety with a second plant variety, which significantly differs in its level of fine chemical; and
[35894] (d) identifying, which of the offspring varieties has got increased production of the fine chemical by the expression level of said polypeptide or nucleic acid molecule or the genomic structure of the gene(s) encoding said polypeptide or nucleic acid molecule of the invention.

[35895] [0462.1.1.5] to [0494.1.1.5] for the disclosure of these paragraphs see [0462.1.1.1] to [0494.1.1.1] above.

[35896] In a further embodiment the present invention is characterized by the features as disclosed in the following items:

[35897] Item 1. A process for the production of a fine chemical selected from the group consisting of:
[35898] tryptophan
[35899] (a) increasing or generating one or more activities selected from the group consisting of 3-deoxy-7-phosphoheptulonate synthase, 3-ketoacyl-CoA thiolase, acetyltransferase, aldehyde dehydrogenase, amino acid transporter, aromatic amino acid aminotransferase, At1g19800-protein, At2g33510-protein, At4g32480-protein, At5g16650-protein, at5g21910-protein, ATP synthase subunit E, ATP-binding component of a transport system, auxin response factor, b1163-protein, b1346-protein, b1522-protein, b1796-protein, b2739-protein, b2849-protein, b3989-protein, b4029-protein, b4121-protein, binding-protein-dependent transport systems inner membrane component, branched-chain amino acid permease, calcium-dependent protein kinase, carbon dioxide concentrating mechanism protein, cardiolipin synthase, CBL-interacting protein kinase, chaperone protein CIpB, choline kinase, coproporphyrinogen Ill oxidase, cullin, cyclin, cyclin D , cystathionine gamma-synthase, DNA mismatch repair protein, electron transfer flavoprotein subunit beta, elongation factor Tu, enoyl-CoA hydratase, eukaryotic translation initiation factor, eukaryotic translation initiation factor 5, fimbrial-like protein, flavodoxin, geranylgeranyl pyrophosphate synthase, gibberellin 20-oxidase, glucose dehydrogenase, glucose-6-phosphate 1-dehydrogenase, glutamate-ammonia-ligase, glutamine synthetase, glutaredoxin, glycerol kinase, glycosyl transferase, harpin-induced family protein, histone acetyltransferase, hydrolase, imidazole glycerol phosphate synthase subunit, isochorismate synthase, isopentenyl diphosphate isomerase, leucyl/phenylalanyl-tRNA-protein transferase, lipase, L-ribulose-5-phosphate 4-epimerase, malate dehydrogenase, malic enzyme, methyl-accepting chemotaxis protein, methyltransferase, monthiol glutaredoxin, NAD(P)H-quinone oxidoreductase subunit, nitrate/nitrite transport protein, photosystem II protein, polygalacturonase, precorrin methylase, protein kinase, protein phosphatase, putative transport system permease protein, pyruvate kinase, recombinase A, RNA binding protein, RNA-binding protein, Sec-independent protein translocase subunit, short-chain alcohol dehydrogenase family, slr1107-protein, threonine synthase, transaldolase, transcription factor, transcriptional regulator, transport protein, trehalose-phosphatase, tryptophan biosynthesis protein, yfl054c-protein, and Zm_{—}4842_BE510522-protein, in a non-human organism or a part thereof, preferably a microorganism, a plant cell, a plant or a part thereof, as compared to a corresponding non-transformed wild type non-human organism or a part thereof; and
[35900] (b) growing the non-human organism or a part thereof under conditions which permit the production of tryptophan or a composition comprising tryptophan in said non-human organism or in the culture medium surrounding said non-human organism.

[35901] Item 2. A process for the production of a respective fine chemical, which comprises
[35902] (A)
[35903] (i) increasing or generating of the expression of; and/or
[35904] (ii) increasing or generating the expression of an expression product of; and/or
[35905] (iii) increasing or generating one or more activities of an expression product encoded by; at least one respective nucleic acid molecule comprising a nucleic acid molecule selected from the group consisting of:
[35906] (a) a nucleic acid molecule encoding the polypeptide shown in column 5 or 8 of Table II, preferably Table II B, application no.5, or a homolog or a fragment thereof;
[35907] (b) a nucleic acid molecule shown in column 5 or 8 of Table I, preferably Table I B, application no.5, or a homolog or a fragment thereof (preferably the coding region thereof);
[35908] (c) a nucleic acid molecule, which, as a result of the degeneracy of the genetic code, can be derived from a polypeptide sequence depicted in column 5 or 8 of Table II, preferably Table II B, application no.5;
[35909] (d) a nucleic acid molecule having at least 30%, in particular at least 50%, 60%, 70%, 80%, 85%, 90%, 95%, 97%, 98%, 99% or 99.5% identity with the nucleic acid molecule sequence of a polynucleotide comprising the nucleic acid molecule shown in column 5 or 8 of Table I, preferably Table I B, application no. 5, or the coding region thereof;
[35910] (e) a nucleic acid molecule encoding a polypeptide having at least 30%, in particular 50%, 60%, 70%, 80%, 85%, 90%, 95%, 97%, 98%, 99% or 99.5% identity with the amino acid sequence of the polypeptide encoded by the nucleic acid molecule of (a), (b), (c) or (d);
[35911] (f) a nucleic acid molecule which hybridizes with a nucleic acid molecule of (a), (b), (c), (d) or (e) under stringent hybridization conditions;
[35912] (g) a nucleic acid molecule encoding a polypeptide which can be isolated with the aid of monoclonal or polyclonal antibodies made against a polypeptide encoded by one of the nucleic acid molecules of (a), (b), (c), (d), (e) or (f);
[35913] (h) a nucleic acid molecule encoding a polypeptide comprising the consensus sequence or one or more polypeptide motifs as shown in column 8 of Table IV, application no.5;
[35914] (i) a nucleic acid molecule encoding a polypeptide having the activity represented by a respective protein as depicted in column 5 of Table II, application no. 5;
[35915] (j) a nucleic acid molecule which comprises a polynucleotide, which is obtained by amplifying a cDNA library or a genomic library using the primers as depicted in column 8 of Table III, application no. 5; and
[35916] (k) a nucleic acid molecule which is obtainable by screening a suitable nucleic acid library, especially a cDNA library and/or a genomic library, under stringent hybridization conditions with a probe comprising a complementary sequence of a nucleic acid molecule of (a), (b), (c), (d), (e), (f), (g), (h), (i) or (j) or with a fragment thereof, having at least 15 nt, preferably 20 nt, 30 nt, 50 nt, 100 nt, 200 nt, 500 nt, 1000 nt, 1500 nt, 2000 nt or 3000 nt of a nucleic acid molecule complementary to a nucleic acid molecule sequence characterized in (a), (b), (c), (d), (e), (f), (g), (h), (i) or (j);
[35917] or a nucleic acid molecule comprising a sequence which is complementary thereto;
[35918] in a non-human organism or a part thereof, preferably a microorganism, a plant cell, a plant or a part thereof, as compared to a corresponding non-transformed wild type non-human organism or a part thereof; and
[35919] (B) growing the non-human organism or a part thereof under conditions which permit the production of tryptophan or a composition comprising tryptophan in said non-human organism or in the culture medium surrounding said non-human organism.

[35920] Item 3. A process of items 1 or 2, comprising of recovering tryptophan in its free or bound form.

[35921] Item 4. The process of any one of items 1 to 3, comprising the following steps:
[35922] (a) selecting a non-human organism or a part thereof expressing a polypeptide encoded by the nucleic acid molecule characterized in item 2;
[35923] (b) mutagenizing the selected non-human organism or the part thereof;
[35924] (c) comparing the activity or the expression level of said polypeptide in the mutagenized non-human organism or the part thereof with the activity or the expression of said polypeptide of the selected non-human organisms or the part thereof;
[35925] (d) selecting the mutated non-human organisms or parts thereof, which comprise an increased activity or expression level of said polypeptide compared to the selected non-human organism or the part thereof;
[35926] (e) optionally, growing and cultivating the non-human organisms or the parts thereof;
[35927] and
[35928] (f) recovering, and optionally isolating, the free or bound tryptophan produced by the selected mutated non-human organisms or parts thereof.

[35929] Item 5. The process of any one of items 1 to 4 wherein the activity of said protein or the expression of said nucleic acid molecule is increased or generated transiently or stably.

[35930] Item 6. An isolated nucleic acid molecule comprising a nucleic acid molecule selected from the group consisting of:
[35931] (a) a nucleic acid molecule encoding a polypeptide shown in Table II, application no. 5, column 5 or 8, preferably shown in Table II B, application no. 5, column 8, or a homolog or a fragment thereof;
[35932] (b) a nucleic acid molecule shown in Table I, application no. 5, column 5 or 8, preferably shown in Table I B, application no. 5, column 8, preferably the coding region thereof, or a homolog or a fragment thereof;
[35933] (c) a nucleic acid molecule, which, as a result of the degeneracy of the genetic code, can be derived from a polypeptide sequence depicted in column 5 or 8 of Table II, application no. 5, preferably in column 8 of Table II B, application no. application no.;
[35934] (d) a nucleic acid molecule having at least 30% identity, preferably at least 40%, 50%, 60%, 70%, 75%, 80%, 85%, 90%, 95%, 96%, 97%, 98%, 99%, 99.5%, with the nucleic acid molecule sequence of a polynucleotide comprising the nucleic acid molecule shown in column 5 or 8 of Table I, application no. 3, preferably shown in column 8 of Table I B, application no. 5, preferably the coding region thereof;
[35935] (e) a nucleic acid molecule encoding a polypeptide having at least 30% identity, preferably at least 40%, 50% 60%, 70%, 75%, 80%, 85%, 90%, 95%, 96%, 97%, 98%, 99%, 99.5%, identity with the amino acid sequence of the polypeptide encoded by the nucleic acid molecule of (a), (b), (c) or (d);
[35936] (f) a nucleic acid molecule which hybridizes with a nucleic acid molecule of (a), (b), (c), (d) or (e) under stringent hybridisation conditions;
[35937] (g) a nucleic acid molecule encoding a polypeptide which can be isolated with the aid of monoclonal or polyclonal antibodies made against a polypeptide encoded by one of the nucleic acid molecules of (a), (b), (c), (d), (e) or (f);
[35938] (h) a nucleic acid molecule encoding a polypeptide comprising the consensus sequence or one or more polypeptide motifs as shown in column 8 of Table IV, application no. 5;
[35939] (i) a nucleic acid molecule encoding a polypeptide having the activity represented by a respective protein as depicted in column 5 of Table II, application no. 5;
[35940] (j) a nucleic acid molecule comprising a polynucleotide which is obtained by amplifying a cDNA library or a genomic library using the primers in Table III, application no. 5, column 8;
[35941] and
[35942] (k) nucleic acid molecule which is obtainable by screening a suitable nucleic acid library, especially a cDNA library and/or a genomic library, under stringent hybridization conditions with a probe comprising one of the sequences of the nucleic acid molecule of (a), (b), (c), (d), (e), (f), (g), (h), (i) or (j) or with a fragment of at least 15 nt, preferably 20 nt, 30 nt, 50 nt, 100 nt, 200 nt,500 nt, 1000 nt, 1500 nt, 2000 nt or 3000 nt of the nucleic acid molecule characterized in (a), (b), (c), (d), (e), (f), (g), (h), (i) or (i) ,
[35943] or a nucleic acid molecule comprising a sequence which is complementary thereto.

[35944] Item 7. A nucleic acid construct which confers the expression of the nucleic acid molecule as defined in item 6, comprising one or more regulatory elements.

[35945] Item 8. An expression cassette comprising
[35946] (a) a promoter, preferably selected from the group consisting of Big35S, PCUbi, Super and USP;
[35947] (b) a nucleic acid molecule as defined in item 6.

[35948] Item 9. A vector comprising the nucleic acid molecule as defined in item 6 or the nucleic acid construct as claimed in item 7 or the expression cassette as claimed in item 8.

[35949] Item 10. A host cell or a plant organelle, which has been transformed with the vector as claimed in item 9 or the nucleic acid molecule as defined in item 6 or the nucleic acid construct as claimed in item 7 or the expression cassette as claimed in item 8.

[35950] Item 11. The host cell of item 10, which is a plant cell or a microorganism.

[35951] Item 12. A process for producing a polypeptide, wherein the polypeptide is expressed in a host cell as claimed in item 10 or 11.

[35952] Item 13. A polypeptide produced by the process as claimed in item 12 or encoded by the nucleic acid molecule as defined in item 6.

[35953] Item 14. An antibody, which binds specifically to the polypeptide as claimed in item 13.

[35954] Item 15. A plant tissue, propagation material, harvested material or a plant comprising the host cell as claimed in item 10 or 11.

[35955] Item 16. A process for the identification of a compound conferring an increase in tryptophan production in a non-human organism, comprising the steps:
[35956] (a) culturing a plant cell or tissue or microorganism or maintaining a plant expressing the polypeptide encoded by the nucleic acid molecule as defined in item 6 conferring an increase in the amount of tryptophan in a non-human organism or a part thereof and a readout system capable of interacting with the polypeptide under suitable conditions which permit the interaction of the polypeptide with said readout system in the presence of a compound or a sample comprising a plurality of compounds and capable of providing a detectable signal in response to the binding of a compound to said polypeptide under conditions which permit the expression of said readout system and of the polypeptide encoded by the nucleic acid molecule of item 6 conferring an increase in the amount of tryptophanin a non-human organism or a part thereof;
[35957] (b) identifying if the compound is an effective agonist by detecting the presence or absence or increase of a signal produced by said readout system.

[35958] Item 17. A method for the production of an agricultural composition comprising the steps of the method of item 16 and formulating the compound identified in item 16 in a form acceptable for an application in agriculture.

[35959] Item 18. A composition comprising the nucleic acid molecule as defined in item 6, the polypeptide as claimed in item 13, the nucleic acid construct as claimed in item 7, the expression cassette as claimed in item 8, the vector as claimed in item 9, the compound as claimed in item 16, the antibody as claimed in item 14, and optionally an agricultural acceptable carrier.

[35960] Item 19. Use of the nucleic acid molecule as defined in item 6 for the identification of a nucleic acid molecule conferring an increase in tryptophan after expression.

[35961] Item 20. Cosmetic, pharmaceutical, food or feed composition comprising the nucleic acid moleculeas defined in item 6, the polypeptide as claimed in item 13, the nucleic acid construct as claimed in item 7, the expression cassette as claimed in item 8, the vector as claimed in item 9, the antibody as claimed in item 14 , the plant or plant tissue as claimed in item 15, the harvested material as claimed in item 15 or the host cell of item as claimed in items 10 or 11.

[35962] Item 21. Use of the nuclei acid molecule as defined in item 6, the polypeptide as claimed in item 13, the nucleic acid construct as claimed in item 7, the expression cassette as claimed in item 8, the vector as claimed in claim9, the plant or plant tissue as claimed in item 15, or the host cell of item 10 to 11 for the production of plant resistant to a herbicide inhibiting the production of tryptophan.

[35963] [0483.1.1.5] to [0494.1.1.5] for the disclosure of these paragraphs see [0483.1.1.1] to [0494.1.1.1] above.

### Example 11a

### PCR Amplification of the Sequences

[35964] Unless otherwise specified, standard methods as described in Sambrook et al., Molecular Cloning: A laboratory manual, Cold Spring Harbor 1989, Cold Spring Harbor Laboratory Press are used.

[35965] The inventive sequences as shown in the respective line in Table I, column 5, preferably the coding region thereof, were amplified by PCR as described in the protocol of the Pfu Ultra, Pfu Turbo or Herculase DNA polymerase (Stratagene). The composition for the protocol of the Pfu Ultra, Pfu Turbo or Herculase DNA polymerase was as follows: 1×PCR buffer (Stratagene), 0.2 mM of each dNTP, 100 ng genomic DNA of Saccharomyces cerevisiae (strain S288C; Research Genetics, Inc., now Invitrogen), Escherichia coli (strain MG1655; E. coli Genetic Stock Center), Synechocystis sp. (strain PCC6803), Azotobacter vinelandii (strain N.R. Smith,16), Thermus thermophilus (HB8) or 50 ng cDNA from various tissues and development stages of Arabidopsis thaliana (ecotype Columbia), Physcomitrella patens, Glycine max (variety Resnick), Brassica napus, Oryza sativa or Zea mays (variety B73, Mo17, A188), 50 pmol forward primer, 50 pmol reverse primer, with or without 1 M Betaine, 2.5 u Pfu Ultra, Pfu Turbo or Herculase DNA polymerase.

[35966] The amplification cycles were as follows:

[35967] 1 cycle of 2-3 minutes at 94-95° C., then 25-36 cycles with 30-60 seconds at 94-95° C., 30-45 seconds at 50-60° C. and 210-480 seconds at 72° C., followed by 1 cycle of 5-10 minutes at 72° C., then 4-16° C.—preferably for Saccharomyces cerevisiae, Escherichia coli, Synechocystis sp., Azotobacter vinelandii, Thermus thermophilus.

[35968] In case of Arabidopsis thaliana, Brassica napus, Glycine max, Oryza sativa, Physcomitrella patens, Zea mays the amplification cycles were as follows:

[35969] 1 cycle with 30 seconds at 94° C., 30 seconds at 61° C., 15 minutes at 72° C., then 2 cycles with 30 seconds at 94° C., 30 seconds at 60° C., 15 minutes at 72° C., then 3 cycles with 30 seconds at 94° C., 30 seconds at 59° C., 15 minutes at 72° C., then 4 cycles with 30 seconds at 94° C., 30 seconds at 58° C., 15 minutes at 72° C., then 25 cycles with 30 seconds at 94° C., 30 seconds at 57° C., 15 minutes at 72° C., then 1 cycle with 10 minutes at 72° C., then finally 4-16° C.

[35970] RNAs were generated with the RNeasy Plant Kit according to the standard protocol (Qiagen) and Superscript II Reverse Transkriptase was used to produce double stranded cDNA according to the standard protocol (Invitrogen).

[35971] ORF specific primer pairs for the genes to be expressed are shown in the respective line in Table III, column 8. The following adapter sequences were added to Saccharomyces cerevisiae ORF specific primers (see Table III) for cloning purposes:

SEQ ID NO: 20
i) foward primer: 5′-GGAATTCCAGCTGACCACC-3′
SEQ ID NO: 21
ii) reverse primer: 5′-GATCCCCGGGAATTGCCATG-3′

[35972] These adaptor sequences allow cloning of the ORF into the various vectors containing the Resgen adaptors, see table column E of Table c.

[35973] The following adapter sequences were added to Saccharomyces cerevisiae, Escherichia coli, Synechocystis sp., Azotobacter vinelandii, Thermus thermophilus, Arabidopsis thaliana, Brassica napus, Glycine max, Oryza sativa , Physcomitrella patens, or Zea mays ORF specific primers for cloning purposes:

SEQ ID NO: 22
iii) forward primer: 5′-TTGCTCTTCC-3′
SEQ ID NO: 23
iiii) reverse primer: 5′-TTGCTCTTCG-3′

[35974] The adaptor sequences allow cloning of the ORF into the various vectors containing the Colic adaptors, see table column E of Table c.

[35975] Therefore for amplification and cloning of Saccharomyces cerevisiae SEQ ID NO: 14843, a primer consisting of the adaptor sequence i) and the ORF specific sequence SEQ ID NO: 14871 and a second primer consisting of the adaptor sequence ii) and the ORF specific sequence SEQ ID NO: 14872 were used.

[35976] For amplification and cloning of Escherichia coli SEQ ID NO: 7333, a primer consisting of the adaptor sequence iii) and the ORF specific sequence SEQ ID NO: 7679 and a second primer consisting of the adaptor sequence iiii) and the ORF specific sequence SEQ ID NO: 7680 were used.

[35977] For amplification and cloning of Synechocystis sp. SEQ ID NO: 11471, a primer consisting of the adaptor sequence iii) and the ORF specific sequence SEQ ID NO: 11983 and a second primer consisting of the adaptor sequence iiii) and the ORF specific sequence SEQ ID NO: 11984 were used.

[35978] For amplification and cloning of Arabidopsis thaliana SEQ ID NO: 1815, a primer consisting of the adaptor sequence iii) and the ORF specific sequence SEQ ID NO: 2361 and a second primer consisting of the adaptor sequence iiii) and the ORF specific sequence SEQ ID NO: 2362 were used.

[35979] For amplification and cloning of Azotobacter vinelandii SEQ ID NO: 5557, a primer consisting of the adaptor sequence iii) and the ORF specific sequence SEQ ID NO: 6033 and a second primer consisting of the adaptor sequence iiii) and the ORF specific sequence SEQ ID NO: 6034 were used.

[35980] For amplification and cloning of Glycine max SEQ ID NO: 16883, a primer consisting of the adaptor sequence iii) and the ORF specific sequence SEQ ID NO: 17345 and a second primer consisting of the adaptor sequence iiii) and the ORF specific sequence SEQ ID NO: 17346 were used.

[35981] For amplification and cloning of Physcomytrella patens SEQ ID NO: 101780, a primer consisting of the adaptor sequence iii) and the ORF specific sequence SEQ ID NO: 101852 and a second primer consisting of the adaptor sequence iiii) and the ORF specific sequence SEQ ID NO: 101853 were used.

[35982] For amplification and cloning of Thermus thermophilus SEQ ID NO: 12698, a primer consisting of the adaptor sequence iii) and the ORF specific sequence SEQ ID NO: 12970 and a second primer consisting of the adaptor sequence iiii) and the ORF specific sequence SEQ ID NO: 12971 were used.

[35983] For amplification and cloning of Zea mays SEQ ID NO: 68413, a primer consisting of the adaptor sequence iii) and the ORF specific sequence SEQ ID NO: 68531 and a second primer consisting of the adaptor sequence iiii) and the ORF specific sequence SEQ ID NO: 68532 were used.

[35984] Following these examples every sequence disclosed in Table I, preferably column 5, especially the coding region thereof can be cloned by fusing the adaptor sequences to the respective specific primers sequences as disclosed in Table III, column 8 using the respective vectors shown in Table c.

[35985] [0496.1.1.5] to [0499.1.1.5] for the disclosure of these paragraphs see [0496.1.1.1] to [0499.1.1.1] above.

### Example 11e

### Cloning of Inventive Sequences as Shown in Table I, Column 5 in the Different Expression Vectors

[35986] For cloning of for example SEQ ID NO: 7333 from Escherichia coli or any other ORF from Escherichia coli, Synechocystis sp., Azotobacter vinelandii, Thermus thermophilus, Arabidopsis thaliana, Glycine max, Physcomitrella patens, or Zea mays the vector DNA was treated with the restriction enzymes Pacl and Ncol following the standard protocol (MBI Fermentas).

[35987] For cloning for example the ORFs of SEQ ID NO: 14843 from Saccharomyces cerevisiae or any other ORF from Saccharomyces cerevisiae into vectors containing the Resgen adaptor sequence the respective vector DNA was treated with the restriction enzyme Ncol.

[35988] For cloning of for example ORFs SEQ ID NO: 66274 from Saccharomyces cerevisiae or any other ORF from Saccharomyces cerevisiae into vectors containing the Colic adaptor sequence, the respective vector DNA was treated with the restriction enzymes Pacl and Ncol following the standard protocol (MBI Fermentas).

[35989] In all cases the reaction was stopped by inactivation at 70° C. for 20 minutes and purified over QIAquick or NucleoSpin Extract II columns following the standard protocol (Qiagen or Macherey-Nagel).

[35990] Then the PCR-product representing the amplified ORF with the respective adapter sequences and the vector DNA were treated with T4 DNA polymerase according to the standard protocol (MBI Fermentas) to produce single stranded overhangs with the parameters 1 unit T4 DNA polymerase at 37° C. for 2-10 minutes for the vector and 1-2 u T4 DNA polymerase at 15-17° C. for 10-60 minutes for the PCR product representing SEQ ID NO: 7333.

[35991] The reaction was stopped by addition of high-salt buffer and purified over QIAquick or NucleoSpin Extract II columns following the standard protocol (Qiagen or Macherey-Nagel).

[35992] According to this example the skilled person is able to clone all sequences disclosed in Table I, preferably column 5 or column 8, especially the coding region thereof.

[35993] Approximately 30-60 ng of prepared vector and a defined amount of prepared amplificate were mixed and hybridized at 65° C. for 15 minutes followed by 37° C. 0,1 ° C./1 seconds, followed by 37° C. 10 minutes, followed by 0.1° C./1 seconds, then 4-10 ° C.

[35994] The ligated constructs were transformed in the same reaction vessel by addition of competent E. coli cells (strain DHSalpha) and incubation for 20 minutes at 1 ° C. followed by a heat shock for 90 seconds at 42° C. and cooling to 1-4° C. Then, complete medium (SOC) was added and the mixture was incubated for 45 minutes at 37° C. The entire mixture was subsequently plated onto an agar plate with 0.05 mg/ml kanamycin and incubated overnight at 37° C.

[35995] The outcome of the cloning step was verified by amplification with the aid of primers which bind upstream and downstream of the integration site, thus allowing the amplification of the insertion. The amplifications were carried out as described in the protocol of Taq DNA polymerase (Gibco-BRL).

[35996] The amplification cycles were as follows: 1 cycle of 1-5 minutes at 94° C., followed by 35 cycles of in each case 15-60 seconds at 94° C., 15-60 seconds at 50-66° C. and 5-15 minutes at 72° C., followed by 1 cycle of 10 minutes at 72° C., then 4-16° C.

[35997] Several colonies were checked, but only one colony for which a PCR product of the expected size was detected was used in the following steps.

[35998] A portion of this positive colony was transferred into a reaction vessel filled with complete medium (LB) supplemented with kanamycin and incubated overnight at 37° C.

[35999] The plasmid preparation was carried out as specified in the Qiaprep or NucleoSpin Multi-96 Plus standard protocol (Qiagen or Macherey-Nagel).

[36000] [0501.1.1.5] to [0503.1.1.5] for the disclosure of these paragraphs see [0501.1.1.1] to [0503.1.1.1] above. Table d showing results of plant analyses

TABLE d

| SeqID | Target | Locus | Metabolite | Source | Promotor | Method | Min | Max |
|---|---|---|---|---|---|---|---|---|
| 16883 | plastidic | 59582753_ | tryptophan | ARA_LEAF | p-PcUBI | LC | 28 | 92 |
| | | SOYBEAN | | | | | | |
| 17637 | non- | At1g19800 | tryptophan | ARA_LEAF | p-PcUBI | LC | 30 | 443 |
| | targeted | | | | | | | |
| 17701 | non- | At1g26830 | tryptophan | ARA_LEAF | p-PcUBI | LC | 32 | 117 |
| | targeted | | | | | | | |
| 17968 | non- | At1g36730 | tryptophan | ARA_LEAF | p-PcUBI | LC | 39 | 78 |
| | targeted | | | | | | | |
| 18235 | non- | At1g48260 | tryptophan | ARA_LEAF | p-PcUBI | LC | 36 | 239 |
| | targeted | | | | | | | |
| 19502 | non- | At2g17560 | tryptophan | ARA_LEAF | p-PcUBI | LC | 34 | 179 |
| | targeted | | | | | | | |
| 19874 | non- | At2g28890 | tryptophan | ARA_LEAF | p-PcUBI | LC | 32 | 330 |
| | targeted | | | | | | | |
| 19919 | non- | At2g30360 | tryptophan | ARA_LEAF | p-PcUBI | LC | 46 | 700 |
| | targeted | | | | | | | |
| 20346 | non- | At2g30540 | tryptophan | ARA_LEAF | p-PcUBI | LC | 28 | 126 |
| | targeted | | | | | | | |
| 98522 | non- | At2g33510 | tryptophan | ARA_LEAF | p-PcUBI | LC | 34 | 59 |
| | targeted | | | | | | | |
| 21159 | non- | At2g47880 | tryptophan | ARA_LEAF | p-PcUBI | LC | 33 | 380 |
| | targeted | | | | | | | |
| 21497 | plastidic | At3g04050 | tryptophan | ARA_LEAF | p-PcUBI | LC | 76 | 131 |
| 22611 | non- | At3g11650 | tryptophan | ARA_LEAF | p-PcUBI | LC | 29 | 146 |
| | targeted | | | | | | | |
| 22832 | non- | At3g18524 | tryptophan | ARA_LEAF | p-PcUBI | LC | 41 | 74 |
| | targeted | | | | | | | |
| 1815 | non- | At3g23000 | tryptophan | ARA_LEAF | p-PcUBI | LC | 105 | 239 |
| | targeted | | | | | | | |
| 68727 | non- | At3g26400 | tryptophan | ARA_LEAF | p-PcUBI | LC | 30 | 77 |
| | targeted | | | | | | | |
| 68777 | non- | At3g27540 | tryptophan | ARA_LEAF | p-PcUBI | LC | 35 | 148 |
| | targeted | | | | | | | |
| 2367 | non- | At3g61830 | tryptophan | ARA_LEAF | p-PcUBI | LC | 45 | 123 |
| | targeted | | | | | | | |
| 2573 | non- | At3g62930 | tryptophan | ARA_LEAF | p-PcUBI | LC | 38 | 123 |
| | targeted | | | | | | | |
| 2935 | non- | At3g62950 | tryptophan | ARA_LEAF | p-PcUBI | LC | 29 | 86 |
| | targeted | | | | | | | |
| 4040 | non- | At4g32480 | tryptophan | ARA_LEAF | p-PcUBI | LC | 41 | 460 |
| | targeted | | | | | | | |
| 24311 | non- | At4g34160 | tryptophan | ARA_LEAF | p-PcUBI | LC | 36 | 123 |
| | targeted | | | | | | | |
| 4348 | non- | At4g35310 | tryptophan | ARA_LEAF | p-PcUBI | LC | 62 | 231 |
| | targeted | | | | | | | |
| 68987 | non- | At5g02760 | tryptophan | ARA_LEAF | p-PcUBI | LC | 30 | 228 |
| | targeted | | | | | | | |
| 24492 | non- | At5g07200 | tryptophan | ARA_LEAF | p-PcUBI | LC | 33 | 57 |
| | targeted | | | | | | | |
| 25283 | non- | At5g16650 | tryptophan | ARA_LEAF | p-PcUBI | LC | 32 | 83 |
| | targeted | | | | | | | |
| 69553 | non- | At5g21910 | tryptophan | ARA_LEAF | p-PcUBI | LC | 36 | 57 |
| | targeted | | | | | | | |
| 25428 | non- | At5g39760 | tryptophan | ARA_LEAF | p-PcUBI | LC | 28 | 121 |
| | targeted | | | | | | | |
| 70006 | non- | At5g60110 | tryptophan | ARA_LEAF | p-PcUBI | LC | 43 | 60 |
| | targeted | | | | | | | |
| 5557 | non- | Avin- | tryptophan | ARA_LEAF | p-PcUBI | LC | 62 | 203 |
| | targeted | DRAFT_1495 | | | | | | |
| 27021 | non- | Avin- | tryptophan | ARA_LEAF | p-PcUBI | LC | 34 | 173 |
| | targeted | DRAFT_2344 | | | | | | |
| 28738 | non- | Avin- | tryptophan | ARA_LEAF | p-PcUBI | LC | 46 | 139 |
| | targeted | DRAFT_3159 | | | | | | |
| 29286 | non- | Avin- | tryptophan | ARA_LEAF | p-PcUBI | LC | 34 | 143 |
| | targeted | DRAFT_3209 | | | | | | |
| 73038 | non- | Avin- | tryptophan | ARA_LEAF | p-PcUBI | LC | 29 | 81 |
| | targeted | DRAFT_4420 | | | | | | |
| 74163 | non- | Avin- | tryptophan | ARA_LEAF | p-PcUBI | LC | 35 | 163 |
| | targeted | DRAFT_4836 | | | | | | |
| 6510 | non- | Avin- | tryptophan | ARA_LEAF | p-PcUBI | LC | 41 | 75 |
| | targeted | DRAFT_5103 | | | | | | |
| 33596 | non- | Avin- | tryptophan | ARA_LEAF | p-PcUBI | LC | 59 | 124 |
| | targeted | DRAFT_6093 | | | | | | |
| 74729 | non- | Avin- | tryptophan | ARA_LEAF | p-PcUBI | LC | 39 | 126 |
| | targeted | DRAFT_6679 | | | | | | |
| 34889 | plastidic | B0004 | tryptophan | ARA_LEAF | p-Super | LC | 57 | 168 |
| 98553 | non- | B0008 | tryptophan | ARA_SEED_2 | p-USP | GC | 51 | 91 |
| | targeted | | | | | | | |
| 35204 | non- | B0061 | tryptophan | ARA_LEAF | p-USP | LC | 72 | 173 |
| | targeted | | | SEED_2 | | | | |
| 35482 | non- | B0124 | tryptophan | ARA_LEAF | p-Super | LC | 29 | 213 |
| | targeted | | | | | | | |
| 7333 | non- | B0449 | tryptophan | ARA_LEAF | p-Super | LC | 38 | 281 |
| | targeted | | | | | | | |
| 35967 | plastidic | B0593 | tryptophan | ARA_LEAF | p-Super | LC | 43 | 358 |
| 36489 | non- | B0885 | tryptophan | ARA_LEAF | p-Super | LC | 39 | 143 |
| | targeted | | | | | | | |
| 37394 | non- | B1163 | tryptophan | ARA_LEAF | p-Super | LC | 30 | 56 |
| | targeted | | | | | | | |
| 98778 | plastidic | B1249 | tryptophan | ARA_SEED_2 | p-USP | GC | 71 | 214 |
| 76157 | plastidic | B1262 | tryptophan | ARA_SEED_2 | p-USP | GC | 74 | 104 |
| 37807 | non- | B1300 | tryptophan | ARA_LEAF | p-Super | LC | 31 | 68 |
| | targeted | | | | | | | |
| 99188 | plastidic | B1346 | tryptophan | ARA_LEAF | p-Super | LC | 31 | 96 |
| 7947 | non- | B1522 | tryptophan | ARA_LEAF | p-Super | LC | 109 | 261 |
| | targeted | | | | | | | |
| 99196 | non- | B1796 | tryptophan | ARA_LEAF | p-Super | LC | 27 | 39 |
| | targeted | | | | | | | |
| 99210 | non- | B1886 | tryptophan | ARA_SEED_2 | p-USP | LC | 54 | 108 |
| | targeted | | | | | | | |
| 79056 | non- | B1897 | tryptophan | ARA_LEAF | p-Super | LC | 44 | 190 |
| | targeted | | | | | | | |
| 99371 | non- | B2023 | tryptophan | ARA_SEED_2 | p-USP | LC | 44 | 148 |
| | targeted | | | | | | | |
| 38947 | non- | B2063 | tryptophan | ARA_LEAF | p-Super | LC | 35 | 270 |
| | targeted | | | | | | | |
| 99620 | non- | B2285 | tryptophan | ARA_SEED_2 | p-USP | GC | 57 | 109 |
| | targeted | | | | | | | |
| 99898 | non- | B2546 | tryptophan | ARA_LEAF | p-Super | LC | 32 | 95 |
| | targeted | | | | | | | |
| 100105 | non- | B2699 | tryptophan | ARA_SEED_2 | p-USP | LC | 55 | 82 |
| | targeted | | | | | | | |
| 80906 | non- | B2739 | tryptophan | ARA_LEAF | p-Super | LC | 75 | 134 |
| | targeted | | | | | | | |
| 81980 | non- | B2849 | tryptophan | ARA_LEAF | p-Super | LC | 33 | 152 |
| | targeted | | | | | | | |
| 100543 | non- | B3142 | tryptophan | ARA_LEAF | p-Super | LC | 35 | 65 |
| | targeted | | | | | | | |
| 42502 | non- | B3262 | tryptophan | ARA_LEAF | p-Super | LC | 47 | 277 |
| | targeted | | | | | | | |
| 100675 | plastidic | B3845 | tryptophan | ARA_SEED_2 | p-USP | GC | 56 | 87 |
| 101327 | plastidic | B3870 | tryptophan | ARA_SEED_2 | p-USP | LC | 47 | 85 |
| 44372 | non- | B3989 | tryptophan | ARA_LEAF | p-Super | LC | 32 | 398 |
| | targeted | | | | | | | |
| 10740 | non- | B4029 | tryptophan | ARA_LEAF | p-Super | LC | 27 | 814 |
| | targeted | | | | | | | |
| 44609 | non- | B4121 | tryptophan | ARA_LEAF | p-Super | LC | 30 | 46 |
| | targeted | | | | | | | |
| 45321 | non- | B4256 | tryptophan | ARA_LEAF | p-Super | LC | 34 | 217 |
| | targeted | | | | | | | |
| 46515 | non- | GM | tryptophan | ARA_LEAF | p-PcUBI | LC | 37 | 149 |
| | targeted | 02LC17556 | | | | | | |
| 84198 | non- | GM | tryptophan | ARA_LEAF | p-PcUBI | LC | 43 | 224 |
| | targeted | 02LC21368 | | | | | | |
| 101780 | non- | S_pp | tryptophan | ARA_LEAF | p-Super | LC | 40 | 55 |
| | targeted | 020029328r | | | | | | |
| 49143 | plastidic | Sll0248 | tryptophan | ARA_LEAF | p-PcUBI | LC | 32 | 169 |
| 50339 | plastidic | Sll0521 | tryptophan | ARA_LEAF | p-PcUBI | LC | 31 | 49 |
| 101707 | non- | Sll0833 | tryptophan | ARA_LEAF | p-PcUBI | LC | 42 | 92 |
| | targeted | | | | | | | |
| 52634 | mito- | Sll1031 | tryptophan | ARA_LEAF | p-PcUBI | LC | 28 | 167 |
| | chondrial | | | | | | | |
| 54337 | mito- | Sll1450 | tryptophan | ARA_LEAF | p-PcUBI | LC | 42 | 85 |
| | chondrial | | | | | | | |
| 11471 | mito- | Sll1917 | tryptophan | ARA_LEAF | p-PcUBI | LC | 31 | 36 |
| | chondrial | | | | | | | |
| 86540 | mito- | Slr0239 | tryptophan | ARA_LEAF | p-PcUBI | LC | 37 | 162 |
| | chondrial | | | | | | | |
| 87397 | plastidic | Slr0721 | tryptophan | ARA_LEAF | p-PcUBI | LC | 46 | 100 |
| 57235 | plastidic | Slr0739 | tryptophan | ARA_LEAF | p-PcUBI | LC | 35 | 54 |
| 101776 | plastidic | Slr1107 | tryptophan | ARA_LEAF | p-PcUBI | LC | 30 | 54 |
| 58731 | plastidic | Slr1739 | tryptophan | ARA_LEAF | p-PcUBI | LC | 86 | 157 |
| 59370 | plastidic | Slr2124 | tryptophan | ARA_LEAF | p-PcUBI | LC | 38 | 80 |
| 12698 | non- | TTC0019 | tryptophan | ARA_LEAF | p-PcUBI | LC | 306 | 472 |
| | targeted | | | | | | | |
| 88879 | plastidic | Ybr249c | tryptophan | ARA_LEAF | p-Super | LC | 59 | 405 |
| 63544 | plastidic | Ydr046c | tryptophan | ARA_LEAF | p-Super | LC | 30 | 63 |
| 64148 | plastidic | Yfl054c | tryptophan | ARA_LEAF | p-Super | LC | 30 | 41 |
| 101855 | plastidic | Yhl032c | tryptophan | ARA_SEED_2 | p-USP | GC | 61 | 101 |
| 102015 | plastidic | Yhr137w | tryptophan | ARA_LEAF | p-PcUBI | LC | 29 | 77 |
| 14843 | non- | Yjr130c | tryptophan | ARA_LEAF | Big35S | LC | 30 | 62 |
| | targeted | | | | | | | |
| 66274 | non- | Yjr153w | tryptophan | ARA_LEAF | p-PcUBI | LC | 34 | 115 |
| | targeted | | | | | | | |
| 102061 | mito- | Ykr089c | tryptophan | ARA_SEED_2 | p-USP | GC | 60 | 288 |
| | chondrial | | | | | | | |
| 92339 | plastidic | Ynl101w | tryptophan | ARA_LEAF | p-Super | LC | 33 | 45 |
| 92540 | plastidic | Yor244w | tryptophan | ARA_LEAF | p-Super | LC | 39 | 135 |
| 67998 | plastidic | Ypl117c | tryptophan | ARA_LEAF | p-PcUBI | LC | 29 | 59 |
| 98445 | non- | Ypr119w | tryptophan | ARA_LEAF | Big35S | LC | 36 | 54 |
| | targeted | | | | | | | |
| 68413 | non- | Zm_4842_ | tryptophan | ARA_LEAF | p-PcUBI | LC | 53 | 117 |
| | targeted | BE510522 | | | | | | |

[36001] Column 1 shows the SEQ ID NO, Column 2 shows the expression type (targeted or non-targeted), Column 3 shows the “gene name” (locus), Column 4 shows the metabolite analyzed, Column 5 indicates the A. thaliana source tissue analyzed, Column 6 indicates the used promoter for expression, Column 7 indicates the analytical method. Columns 8 and 9 show the minumum and the maximum increase of the analyzed metabolite (in percent) in comparison to the wild type (=ratio_by_weight, given as percent increase).

[36002] When the analyses were repeated independently, all results proved to be significant.

[36003] [0505.1.1.5] to [0515.1.1.5] for the disclosure of these paragraphs see [0505.1.1.1] to [0515.1.1.1] above.

[36004] In a further embodiment, the present invention relates in paragraphs [0000.1.1.6.] to [0514.1.1.6.] to a further process for the production of the fine chemical isoleucine, leucine or valine, respectively, as defined below and corresponding embodiments as described herein as follows.

[36005] [00011.1.6]0 to [0008.1.1.6] for the disclosure of these paragraphs see [0001.1.1.1] to [0008.1.1.1] above.

[36006] As described above, the essential amino acids are necessary for humans and many mammals, for example for livestock. The branched-chain amino acids (BCAA) leucine, isoleucine and valine are among the nine dietary indispensable amino acids for humans. BCAA accounts for 35-40% of the dietary indispensable amino acids in body protein and 14% of the total amino acids in skeletal muscle (Ferrando et al., J. Parenter. Enteral Nutr. 19, 47 (1995)). They share a common membrane transport system and enzymes for their transamination and irreversible oxidation (Block K. P., “Interactions among leucine, isoleucine, and valine with special reference to the branched chain amino acid antagonism” in “Absorption and Utilization of Amino Acids”, Friedman M. (Ed.), pp. 229-244, 1989, CRC Press, Boca Raton, Fla.; Champe P. C., Harvey R. A., “Amino acids: metabolism of carbon atoms” in “Biochemistry”, Champ P. C., Harvery P. A.,(Eds.), pp.242-252, 1987, Lippincott J. B., Philadelphia, Pa.). Further, for patient suffering from Maple Syrup Urine Disease (MSUD) a reduced uptake of those branched-chain amino acids is essential. Dietary sources of the branched-chain amino acids are principally derived from animal and vegetable proteins. The branched-chain amino acids leucine, isoleucine and valine are limiting for the growth of many mammals. Therefore the branched-chain amino acids are supplemented in the feed of broiler, leg hens, turkey, swine or cattle diets.

[36007] [0010.1.1.6] to [0011.1.1.6] for the disclosure of these paragraphs see [0010.1.1.1] to [0011.1.1.1] above.

[36008] It is an object of the present invention to develop an inexpensive process for the synthesis of isoleucine, leucine, and/or valine.

[36009] for the disclosure of this paragraph see [0013.1.1.1] above.

[36010] Accordingly, in a first embodiment, the invention relates to a process for the production of at least one fine chemical selected from the group consisting of: isoleucine, leucine and valine, or, in other words, of the “fine chemical” or “fine chemical of the invention”.

[36011] Accordingly, in a first embodiment, the invention relates to a process for the production of a fine chemical, whereby the fine chemical is leucine or isoleucine or valine, preferably L-leucine or Lisoleucine or L-valine, as the case may be. Accordingly, in the present invention, the term “the fine chemical” as used herein relates to “leucine or isoleucine or valine” as th ecase may be.

[36012] Further, the term “the fine chemicals” as used herein also relates to fine chemicals comprising leucine or isoleucine or valine.

[36013] The terms “fine chemical of the invention”, “fine chemical” or “the fine chemical” are used herein equally and relate in context of the paragraphs or sections [0014.1.6.6] to [0514.1.1.6] essentially to the metabolite or the metabolites indicated in column 7, application no. 6 of Tables I, II and IV in the respective line.

[36014] Further, the term “in context of any of the paragraphs [0014.1.6.6] to [0514.1.1.6]” as used herein means that for any of said paragraphs [0014.1.6.6] to [0514.1.1.6] the term “the fine chemical” is understood to follow the definition of paragraphs or sections [0014.1.6.6] and [0015.1.6.6], independently whether it refers to any other paragraph or not and whether the reference recites the term “fine chemical” in an other context.

[36015] Thus, in cases where one or more paragraphs or sections are incorporated by reference into any of the present paragraphs [0014.1.6.6] to [0514.1.1.6], e.g. by usage of the term “see paragraph” or the term “for the disclosure of this paragraph see the disclosure of paragraph” or the term “incorporated by reference” or a corresponding term, the incorporated paragraph, section or term “the fine chemical” is also understood to have the meaning according to the definition of paragraph [0014.1.6.6] and [0015.1.6.6].

[36016] Accordingly, in one embodiment, the term “fine chemical of the invention”, “fine chemical” or “the fine chemical” as used herein (alone or in combination, like in FCRP) means “isoleucine” in context of the nucleic acid or polypeptide sequences listed in the respective same line of any one of Tables I to IV of application no. 6 and indicating in column 7 the metabolite “isoleucine”. In one embodiment, the term isoleucine or the term “fine chemical” mean in context of the paragraphs or sections [0014.1.6.6] to [0514.1.1.6] at least one chemical compound with an activity of the above mentioned isoleucine, respectively.

[36017] Accordingly, in one embodiment, the term “fine chemical of the invention”, “fine chemical” or “the fine chemical” as used herein (alone or in combination, like in FCRP) means “leucine” in context of the nucleic acid or polypeptide sequences listed in the respective same line of any one of Tables I to IV of application no. 6 and indicating in column 7 the metabolite “leucine”. In one embodiment, the term leucine or the term “fine chemical” mean in context of the paragraphs or sections [0014.1.6.6] to [0514.1.1.6] at least one chemical compound with an activity of the above mentioned leucine, respectively.

[36018] Accordingly, in one embodiment, the term “fine chemical of the invention”, “fine chemical” or “the fine chemical” as used herein (alone or in combination, like in FCRP) means “valine” in context of the nucleic acid or polypeptide sequences listed in the respective same line of any one of Tables I to IV of application no. 6 and indicating in column 7 the metabolite “valine”. In one embodiment, the term valine or the term “fine chemical” mean in context of the paragraphs or sections [0014.1.6.6] to [0514.1.1.6] at least one chemical compound with an activity of the above mentioned valine, respectively.

[36019] Accordingly, in one embodiment, the terms “fine chemical of the invention”, “fine chemical” or “the fine chemical” mean in context of any of the paragraphs [0014.1.6.6] to [0514.1.1.6] isoleucine, preferably the L-enantiomer of isoleucine, its salts, ester or amides in free form or boundform. In a preferred embodiment, the term “the fine chemical” means isoleucine or its salts, in free form or boundform. In a preferred embodiment, the term “the fine chemical” means the L-enantiomer of isoleucine.

[36020] On the other hand in case “isoleucine” is stated it means isoleucine itself, its salts, ester or amides in free form or bound form, preferably the L-enantiomer of isoleucine, its salts, ester or amides in free form or bound form. In a preferred embodiment “isoleucine” means the Lenantiomer of isoleucine in free form. In another preferred embodiment “isoleucine” means the L-enantiomer of isoleucine bound form.

[36021] Accordingly, in one embodiment, the terms “fine chemical of the invention”, “fine chemical” or “the fine chemical” mean in context of any of the paragraphs [0014.1.6.6] to [0514.1.1.6] leucine, preferably the L-enantiomer of leucine, its salts, ester or amides in free form or boundform.

[36022] In a preferred embodiment, the term “the fine chemical” means leucine or its salts, in free form or bound form. In a preferred embodiment, the term “the fine chemical” means the L-enantiomer of leucine.

[36023] On the other hand in case “leucine” is stated it means leucine itself, its salts, ester or amides in free form or bound form, preferably the L-enantiomer of leucine, its salts, ester or amides in free form or bound form. In a preferred embodiment “leucine” means the L-enantiomer of leucine in free form. In another preferred embodiment “leucine” means the L-enantiomer of leucine bound form.

[36024] Accordingly, in one embodiment, the terms “fine chemical of the invention”, “fine chemical” or “the fine chemical” mean in context of any of the paragraphs [0014.1.6.6] to [0514.1.1.6] valine, preferably the L-enantiomer of valine, its salts, ester or amides in free form or bound form. In a preferred embodiment, the term “the fine chemical” means valine or its salts, in free form or boundform. In a preferred embodiment, the term “the fine chemical” means the L-enantiomer of valine.

[36025] On the other hand in case “valine” is stated it means valine itself, its salts, ester or amides in free form or bound form, preferably the L-enantiomer of valine, its salts, ester or amides in free form or bound form. In a preferred embodiment “valine” means the L-enantiomer of valine in free form. In another preferred embodiment “valine” means the L-enantiomer of valine bound form.

[36026] Further, the term “in context of any of the paragraphs [0014.1.6.6] to [0514.1.1.6]” as used herein means that for any of said paragraphs [0014.1.6.6] to [0514.1.1.6] the term “the fine chemical” is understood to follow the definition of section [0014.1.6.6] or section [0015.1.6.6], independently whether it refers to any other paragraph or not and whether the reference recites the term “fine chemical” in an other context.

[36027] Thus, in cases where one or more paragraphs or sections are incorporated by reference into any of the present paragraphs [0014.1.6.6] to [0514.1.1.6], e.g. by usage of the term “see paragraph” or the term “for the disclosure of this paragraph see the disclosure of paragraph” or the term “incorporated by reference” or a corresponding term, the incorporated paragraph, section or term “the fine chemical” is also understood to have the meaning according to this definition of this paragraph [0015.1.6.6].

[36028] Further, the term “fine chemicals” as used herein relates to compositions comprising said fine chemical(s), i.e. comprising isoleucine, or comprising leucine, or compring valine, or comprising at least one of isoleucine, leucine and valine, respectively.

[36029] Accordingly, the present invention relates to a process for the production of isoleucine, which comprises
[36030] (a) increasing or generating one or more activities selected from the group consisting of 47266012-protein in a non-human organism or a part thereof, preferably a microorganism, a plant cell, a plant or a part thereof, as compared to a corresponding non-transformed wild type non-human organism or a part thereof; and
[36031] (b) growing the non-human organism or a part thereof under conditions which permit the production of isoleucine or a composition comprising isoleucine in said non-human organism or in the culture medium surrounding said non-human organism.

[36032] Accordingly, the present invention relates to a process for the production of leucine, which comprises
[36033] (a) increasing or generating one or more activities selected from the group consisting of pyruvate kinase in a non-human organism or a part thereof, preferably a microorganism, a plant cell, a plant or a part thereof, as compared to a corresponding non-transformed wild type non-human organism or a part thereof; and
[36034] (b) growing the non-human organism or a part thereof under conditions which permit the production of leucine or a composition comprising leucine in said non-human organism or in the culture medium surrounding said non-human organism.

[36035] Accordingly, the present invention relates to a process for the production of valine, which comprises
[36036] (a) increasing or generating one or more activities selected from the group consisting of pyruvate kinase in a non-human organism or a part thereof, preferably a microorganism, a plant cell, a plant or a part thereof, as compared to a corresponding non-transformed wild type non-human organism or a part thereof; and
[36037] (b) growing the non-human organism or a part thereof under conditions which permit the production of valine or a composition comprising valine in said non-human organism or in the culture medium surrounding said non-human organism.

[36038] Accordingly, the present invention relates to a process for the production of valine, which comprises
[36039] (a) increasing or generating one or more activities selected from the group consisting of pyruvate kinase in a non-human organism or a part thereof, preferably a microorganism, a plant cell, a plant or a part thereof, as compared to a corresponding non-transformed wild type non-human organism or a part thereof; and
[36040] (b) growing the non-human organism or a part thereof under conditions which permit the production of valine or a composition comprising valine in said non-human organism or in the culture medium surrounding said non-human organism.

[36041] Accordingly, the present invention relates to a process for the production of isoleucine, which comprises
[36042] (a) increasing or generating one or more activities selected from the group consisting of glucose-6-phosphate 1-dehydrogenase in a non-human organism or a part thereof, preferably a microorganism, a plant cell, a plant or a part thereof, as compared to a corresponding non-transformed wild type non-human organism or a part thereof; and
[36043] (b) growing the non-human organism or a part thereof under conditions which permit the production of isoleucine or a composition comprising isoleucine in said non-human organism or in the culture medium surrounding said non-human organism.

[36044] Accordingly, the present invention relates to a process for the production of leucine, which comprises
[36045] (a) increasing or generating one or more activities selected from the group consisting of glucose-6-phosphate 1-dehydrogenase in a non-human organism or a part thereof, preferably a microorganism, a plant cell, a plant or a part thereof, as compared to a corresponding non-transformed wild type non-human organism or a part thereof; and
[36046] (b) growing the non-human organism or a part thereof under conditions which permit the production of leucine or a composition comprising leucine in said non-human organism or in the culture medium surrounding said non-human organism.

[36047] Accordingly, the present invention relates to a process for the production of valine, which comprises
[36048] (a) increasing or generating one or more activities selected from the group consisting of glucose-6-phosphate 1-dehydrogenase in a non-human organism or a part thereof, preferably a microorganism, a plant cell, a plant or a part thereof, as compared to a corresponding non-transformed wild type non-human organism or a part thereof; and
[36049] (b) growing the non-human organism or a part thereof under conditions which permit the production of valine or a composition comprising valine in said non-human organism or in the culture medium surrounding said non-human organism.

[36050] Accordingly, the present invention relates to a process for the production of valine, which comprises
[36051] (a) increasing or generating one or more activities selected from the group consisting of protein phosphatase in a non-human organism or a part thereof, preferably a microorganism, a plant cell, a plant or a part thereof, as compared to a corresponding non-transformed wild type non-human organism or a part thereof; and
[36052] (b) growing the non-human organism or a part thereof under conditions which permit the production of valine or a composition comprising valine in said non-human organism or in the culture medium surrounding said non-human organism.

[36053] Accordingly, the present invention relates to a process for the production of valine, which comprises
[36054] (a) increasing or generating one or more activities selected from the group consisting of DNA-binding protein in a non-human organism or a part thereof, preferably a microorganism, a plant cell, a plant or a part thereof, as compared to a corresponding non-transformed wild type non-human organism or a part thereof; and
[36055] (b) growing the non-human organism or a part thereof under conditions which permit the production of valine or a composition comprising valine in said non-human organism or in the culture medium surrounding said non-human organism.

[36056] Accordingly, the present invention relates to a process for the production of isoleucine, which comprises
[36057] (a) increasing or generating one or more activities selected from the group consisting of At1g19800-protein in a non-human organism or a part thereof, preferably a microorganism, a plant cell, a plant or a part thereof, as compared to a corresponding non-transformed wild type non-human organism or a part thereof; and
[36058] (b) growing the non-human organism or a part thereof under conditions which permit the production of isoleucine or a composition comprising isoleucine in said non-human organism or in the culture medium surrounding said non-human organism.

[36059] Accordingly, the present invention relates to a process for the production of leucine, which comprises
[36060] (a) increasing or generating one or more activities selected from the group consisting of At1g19800-protein in a non-human organism or a part thereof, preferably a microorganism, a plant cell, a plant or a part thereof, as compared to a corresponding non-transformed wild type non-human organism or a part thereof; and
[36061] (b) growing the non-human organism or a part thereof under conditions which permit the production of leucine or a composition comprising leucine in said non-human organism or in the culture medium surrounding said non-human organism.

[36062] Accordingly, the present invention relates to a process for the production of valine, which comprises
[36063] (a) increasing or generating one or more activities selected from the group consisting of At1g23110-protein in a non-human organism or a part thereof, preferably a microorganism, a plant cell, a plant or a part thereof, as compared to a corresponding non-transformed wild type non-human organism or a part thereof; and
[36064] (b) growing the non-human organism or a part thereof under conditions which permit the production of valine or a composition comprising valine in said non-human organism or in the culture medium surrounding said non-human organism.

[36065] Accordingly, the present invention relates to a process for the production of isoleucine, which comprises
[36066] (a) increasing or generating one or more activities selected from the group consisting of cullin in a non-human organism or a part thereof, preferably a microorganism, a plant cell, a plant or a part thereof, as compared to a corresponding non-transformed wild type non-human organism or a part thereof; and
[36067] (b) growing the non-human organism or a part thereof under conditions which permit the production of isoleucine or a composition comprising isoleucine in said non-human organism or in the culture medium surrounding said non-human organism.

[36068] Accordingly, the present invention relates to a process for the production of leucine, which comprises
[36069] (a) increasing or generating one or more activities selected from the group consisting of cullin in a non-human organism or a part thereof, preferably a microorganism, a plant cell, a plant or a part thereof, as compared to a corresponding non-transformed wild type non-human organism or a part thereof; and
[36070] (b) growing the non-human organism or a part thereof under conditions which permit the production of leucine or a composition comprising leucine in said non-human organism or in the culture medium surrounding said non-human organism.

[36071] Accordingly, the present invention relates to a process for the production of isoleucine, which comprises
[36072] (a) increasing or generating one or more activities selected from the group consisting of eukaryotic translation initiation factor 5 in a non-human organism or a part thereof, preferably a microorganism, a plant cell, a plant or a part thereof, as compared to a corresponding non-transformed wild type non-human organism or a part thereof; and
[36073] (b) growing the non-human organism or a part thereof under conditions which permit the production of isoleucine or a composition comprising isoleucine in said non-human organism or in the culture medium surrounding said non-human organism.

[36074] Accordingly, the present invention relates to a process for the production of leucine, which comprises
[36075] (a) increasing or generating one or more activities selected from the group consisting of eukaryotic translation initiation factor 5 in a non-human organism or a part thereof, preferably a microorganism, a plant cell, a plant or a part thereof, as compared to a corresponding non-transformed wild type non-human organism or a part thereof; and
[36076] (b) growing the non-human organism or a part thereof under conditions which permit the production of leucine or a composition comprising leucine in said non-human organism or in the culture medium surrounding said non-human organism.

[36077] Accordingly, the present invention relates to a process for the production of isoleucine, which comprises
[36078] (a) increasing or generating one or more activities selected from the group consisting of transcriptional regulator in a non-human organism or a part thereof, preferably a microorganism, a plant cell, a plant or a part thereof, as compared to a corresponding non-transformed wild type non-human organism or a part thereof; and
[36079] (b) growing the non-human organism or a part thereof under conditions which permit the production of isoleucine or a composition comprising isoleucine in said non-human organism or in the culture medium surrounding said non-human organism.

[36080] Accordingly, the present invention relates to a process for the production of leucine, which comprises
[36081] (a) increasing or generating one or more activities selected from the group consisting of transcriptional regulator in a non-human organism or a part thereof, preferably a microorganism, a plant cell, a plant or a part thereof, as compared to a corresponding non-transformed wild type non-human organism or a part thereof; and
[36082] (b) growing the non-human organism or a part thereof under conditions which permit the production of leucine or a composition comprising leucine in said non-human organism or in the culture medium surrounding said non-human organism.

[36083] Accordingly, the present invention relates to a process for the production of valine, which comprises
[36084] (a) increasing or generating one or more activities selected from the group consisting of transcriptional regulator in a non-human organism or a part thereof, preferably a microorganism, a plant cell, a plant or a part thereof, as compared to a corresponding non-transformed wild type non-human organism or a part thereof; and
[36085] (b) growing the non-human organism or a part thereof under conditions which permit the production of valine or a composition comprising valine in said non-human organism or in the culture medium surrounding said non-human organism.

[36086] Accordingly, the present invention relates to a process for the production of leucine, which comprises
[36087] (a) increasing or generating one or more activities selected from the group consisting of At1g47380-protein in a non-human organism or a part thereof, preferably a microorganism, a plant cell, a plant or a part thereof, as compared to a corresponding non-transformed wild type non-human organism or a part thereof; and
[36088] (b) growing the non-human organism or a part thereof under conditions which permit the production of leucine or a composition comprising leucine in said non-human organism or in the culture medium surrounding said non-human organism.

[36089] Accordingly, the present invention relates to a process for the production of valine, which comprises
[36090] (a) increasing or generating one or more activities selected from the group consisting of At1g47380-protein in a non-human organism or a part thereof, preferably a microorganism, a plant cell, a plant or a part thereof, as compared to a corresponding non-transformed wild type non-human organism or a part thereof; and
[36091] (b) growing the non-human organism or a part thereof under conditions which permit the production of valine or a composition comprising valine in said non-human organism or in the culture medium surrounding said non-human organism.

[36092] Accordingly, the present invention relates to a process for the production of isoleucine, which comprises
[36093] (a) increasing or generating one or more activities selected from the group consisting of protein kinase in a non-human organism or a part thereof, preferably a microorganism, a plant cell, a plant or a part thereof, as compared to a corresponding non-transformed wild type non-human organism or a part thereof; and
[36094] (b) growing the non-human organism or a part thereof under conditions which permit the production of isoleucine or a composition comprising isoleucine in said non-human organism or in the culture medium surrounding said non-human organism.

[36095] Accordingly, the present invention relates to a process for the production of leucine, which comprises
[36096] (a) increasing or generating one or more activities selected from the group consisting of protein kinase in a non-human organism or a part thereof, preferably a microorganism, a plant cell, a plant or a part thereof, as compared to a corresponding non-transformed wild type non-human organism or a part thereof; and
[36097] (b) growing the non-human organism or a part thereof under conditions which permit the production of leucine or a composition comprising leucine in said non-human organism or in the culture medium surrounding said non-human organism.

[36098] Accordingly, the present invention relates to a process for the production of valine, which comprises
[36099] (a) increasing or generating one or more activities selected from the group consisting of protein kinase in a non-human organism or a part thereof, preferably a microorganism, a plant cell, a plant or a part thereof, as compared to a corresponding non-transformed wild type non-human organism or a part thereof; and
[36100] (b) growing the non-human organism or a part thereof under conditions which permit the production of valine or a composition comprising valine in said non-human organism or in the culture medium surrounding said non-human organism.

[36101] Accordingly, the present invention relates to a process for the production of isoleucine, which comprises
[36102] (a) increasing or generating one or more activities selected from the group consisting of calcium-dependent protein kinase in a non-human organism or a part thereof, preferably a microorganism, a plant cell, a plant or a part thereof, as compared to a corresponding non-transformed wild type non-human organism or a part thereof; and
[36103] (b) growing the non-human organism or a part thereof under conditions which permit the production of isoleucine or a composition comprising isoleucine in said non-human organism or in the culture medium surrounding said non-human organism.

[36104] Accordingly, the present invention relates to a process for the production of leucine, which comprises
[36105] (a) increasing or generating one or more activities selected from the group consisting of calcium-dependent protein kinase in a non-human organism or a part thereof, preferably a microorganism, a plant cell, a plant or a part thereof, as compared to a corresponding non-transformed wild type non-human organism or a part thereof; and
[36106] (b) growing the non-human organism or a part thereof under conditions which permit the production of leucine or a composition comprising leucine in said non-human organism or in the culture medium surrounding said non-human organism.

[36107] Accordingly, the present invention relates to a process for the production of valine, which comprises
[36108] (a) increasing or generating one or more activities selected from the group consisting of calcium-dependent protein kinase in a non-human organism or a part thereof, preferably a microorganism, a plant cell, a plant or a part thereof, as compared to a corresponding non-transformed wild type non-human organism or a part thereof; and
[36109] (b) growing the non-human organism or a part thereof under conditions which permit the production of valine or a composition comprising valine in said non-human organism or in the culture medium surrounding said non-human organism.

[36110] Accordingly, the present invention relates to a process for the production of isoleucine, which comprises
[36111] (a) increasing or generating one or more activities selected from the group consisting of protein phosphatase in a non-human organism or a part thereof, preferably a microorganism, a plant cell, a plant or a part thereof, as compared to a corresponding non-transformed wild type non-human organism or a part thereof; and
[36112] (b) growing the non-human organism or a part thereof under conditions which permit the production of isoleucine or a composition comprising isoleucine in said non-human organism or in the culture medium surrounding said non-human organism.

[36113] Accordingly, the present invention relates to a process for the production of leucine, which comprises
[36114] (a) increasing or generating one or more activities selected from the group consisting of protein phosphatase in a non-human organism or a part thereof, preferably a microorganism, a plant cell, a plant or a part thereof, as compared to a corresponding non-transformed wild type non-human organism or a part thereof; and
[36115] (b) growing the non-human organism or a part thereof under conditions which permit the production of leucine or a composition comprising leucine in said non-human organism or in the culture medium surrounding said non-human organism.

[36116] Accordingly, the present invention relates to a process for the production of valine, which comprises
[36117] (a) increasing or generating one or more activities selected from the group consisting of protein phosphatase in a non-human organism or a part thereof, preferably a microorganism, a plant cell, a plant or a part thereof, as compared to a corresponding non-transformed wild type non-human organism or a part thereof; and
[36118] (b) growing the non-human organism or a part thereof under conditions which permit the production of valine or a composition comprising valine in said non-human organism or in the culture medium surrounding said non-human organism.

[36119] Accordingly, the present invention relates to a process for the production of valine, which comprises
[36120] (a) increasing or generating one or more activities selected from the group consisting of transcription factor in a non-human organism or a part thereof, preferably a microorganism, a plant cell, a plant or a part thereof, as compared to a corresponding non-transformed wild type non-human organism or a part thereof; and
[36121] (b) growing the non-human organism or a part thereof under conditions which permit the production of valine or a composition comprising valine in said non-human organism or in the culture medium surrounding said non-human organism.

[36122] Accordingly, the present invention relates to a process for the production of isoleucine, which comprises
[36123] (a) increasing or generating one or more activities selected from the group consisting of protein phosphatase in a non-human organism or a part thereof, preferably a microorganism, a plant cell, a plant or a part thereof, as compared to a corresponding non-transformed wild type non-human organism or a part thereof; and
[36124] (b) growing the non-human organism or a part thereof under conditions which permit the production of isoleucine or a composition comprising isoleucine in said non-human organism or in the culture medium surrounding said non-human organism.

[36125] Accordingly, the present invention relates to a process for the production of valine, which comprises
[36126] (a) increasing or generating one or more activities selected from the group consisting of protein phosphatase in a non-human organism or a part thereof, preferably a microorganism, a plant cell, a plant or a part thereof, as compared to a corresponding non-transformed wild type non-human organism or a part thereof; and
[36127] (b) growing the non-human organism or a part thereof under conditions which permit the production of valine or a composition comprising valine in said non-human organism or in the culture medium surrounding said non-human organism.

[36128] Accordingly, the present invention relates to a process for the production of isoleucine, which comprises
[36129] (a) increasing or generating one or more activities selected from the group consisting of CBL-interacting protein kinase in a non-human organism or a part thereof, preferably a microorganism, a plant cell, a plant or a part thereof, as compared to a corresponding non-transformed wild type non-human organism or a part thereof; and
[36130] (b) growing the non-human organism or a part thereof under conditions which permit the production of isoleucine or a composition comprising isoleucine in said non-human organism or in the culture medium surrounding said non-human organism.

[36131] Accordingly, the present invention relates to a process for the production of leucine, which comprises
[36132] (a) increasing or generating one or more activities selected from the group consisting of CBL-interacting protein kinase in a non-human organism or a part thereof, preferably a microorganism, a plant cell, a plant or a part thereof, as compared to a corresponding non-transformed wild type non-human organism or a part thereof; and
[36133] (b) growing the non-human organism or a part thereof under conditions which permit the production of leucine or a composition comprising leucine in said non-human organism or in the culture medium surrounding said non-human organism.

[36134] Accordingly, the present invention relates to a process for the production of valine, which comprises
[36135] (a) increasing or generating one or more activities selected from the group consisting of CBL-interacting protein kinase in a non-human organism or a part thereof, preferably a microorganism, a plant cell, a plant or a part thereof, as compared to a corresponding non-transformed wild type non-human organism or a part thereof; and
[36136] (b) growing the non-human organism or a part thereof under conditions which permit the production of valine or a composition comprising valine in said non-human organism or in the culture medium surrounding said non-human organism.

[36137] Accordingly, the present invention relates to a process for the production of isoleucine, which comprises
[36138] (a) increasing or generating one or more activities selected from the group consisting of glutaredoxin in a non-human organism or a part thereof, preferably a microorganism, a plant cell, a plant or a part thereof, as compared to a corresponding non-transformed wild type non-human organism or a part thereof; and
[36139] (b) growing the non-human organism or a part thereof under conditions which permit the production of isoleucine or a composition comprising isoleucine in said non-human organism or in the culture medium surrounding said non-human organism.

[36140] Accordingly, the present invention relates to a process for the production of leucine, which comprises
[36141] (a) increasing or generating one or more activities selected from the group consisting of glutaredoxin in a non-human organism or a part thereof, preferably a microorganism, a plant cell, a plant or a part thereof, as compared to a corresponding non-transformed wild type non-human organism or a part thereof; and
[36142] (b) growing the non-human organism or a part thereof under conditions which permit the production of leucine or a composition comprising leucine in said non-human organism or in the culture medium surrounding said non-human organism.

[36143] Accordingly, the present invention relates to a process for the production of valine, which comprises
[36144] (a) increasing or generating one or more activities selected from the group consisting of glutaredoxin in a non-human organism or a part thereof, preferably a microorganism, a plant cell, a plant or a part thereof, as compared to a corresponding non-transformed wild type non-human organism or a part thereof; and
[36145] (b) growing the non-human organism or a part thereof under conditions which permit the production of valine or a composition comprising valine in said non-human organism or in the culture medium surrounding said non-human organism.

[36146] Accordingly, the present invention relates to a process for the production of valine, which comprises
[36147] (a) increasing or generating one or more activities selected from the group consisting of glutaredoxin in a non-human organism or a part thereof, preferably a microorganism, a plant cell, a plant or a part thereof, as compared to a corresponding non-transformed wild type non-human organism or a part thereof; and
[36148] (b) growing the non-human organism or a part thereof under conditions which permit the production of valine or a composition comprising valine in said non-human organism or in the culture medium surrounding said non-human organism.

[36149] Accordingly, the present invention relates to a process for the production of isoleucine, which comprises
[36150] (a) increasing or generating one or more activities selected from the group consisting of pyruvate kinase in a non-human organism or a part thereof, preferably a microorganism, a plant cell, a plant or a part thereof, as compared to a corresponding non-transformed wild type non-human organism or a part thereof; and
[36151] (b) growing the non-human organism or a part thereof under conditions which permit the production of isoleucine or a composition comprising isoleucine in said non-human organism or in the culture medium surrounding said non-human organism.

[36152] Accordingly, the present invention relates to a process for the production of leucine, which comprises
[36153] (a) increasing or generating one or more activities selected from the group consisting of pyruvate kinase in a non-human organism or a part thereof, preferably a microorganism, a plant cell, a plant or a part thereof, as compared to a corresponding non-transformed wild type non-human organism or a part thereof; and
[36154] (b) growing the non-human organism or a part thereof under conditions which permit the production of leucine or a composition comprising leucine in said non-human organism or in the culture medium surrounding said non-human organism.

[36155] Accordingly, the present invention relates to a process for the production of valine, which comprises
[36156] (a) increasing or generating one or more activities selected from the group consisting of pyruvate kinase in a non-human organism or a part thereof, preferably a microorganism, a plant cell, a plant or a part thereof, as compared to a corresponding non-transformed wild type non-human organism or a part thereof; and
[36157] (b) growing the non-human organism or a part thereof under conditions which permit the production of valine or a composition comprising valine in said non-human organism or in the culture medium surrounding said non-human organism.

[36158] Accordingly, the present invention relates to a process for the production of isoleucine, which comprises
[36159] (a) increasing or generating one or more activities selected from the group consisting of thioredoxin family protein in a non-human organism or a part thereof, preferably a microorganism, a plant cell, a plant or a part thereof, as compared to a corresponding non-transformed wild type non-human organism or a part thereof; and
[36160] (b) growing the non-human organism or a part thereof under conditions which permit the production of isoleucine or a composition comprising isoleucine in said non-human organism or in the culture medium surrounding said non-human organism.

[36161] Accordingly, the present invention relates to a process for the production of leucine, which comprises
[36162] (a) increasing or generating one or more activities selected from the group consisting of thioredoxin family protein in a non-human organism or a part thereof, preferably a microorganism, a plant cell, a plant or a part thereof, as compared to a corresponding non-transformed wild type non-human organism or a part thereof; and
[36163] (b) growing the non-human organism or a part thereof under conditions which permit the production of leucine or a composition comprising leucine in said non-human organism or in the culture medium surrounding said non-human organism.

[36164] Accordingly, the present invention relates to a process for the production of isoleucine, which comprises
[36165] (a) increasing or generating one or more activities selected from the group consisting of harpin-induced family protein in a non-human organism or a part thereof, preferably a microorganism, a plant cell, a plant or a part thereof, as compared to a corresponding non-transformed wild type non-human organism or a part thereof; and
[36166] (b) growing the non-human organism or a part thereof under conditions which permit the production of isoleucine or a composition comprising isoleucine in said non-human organism or in the culture medium surrounding said non-human organism.

[36167] Accordingly, the present invention relates to a process for the production of leucine, which comprises
[36168] (a) increasing or generating one or more activities selected from the group consisting of harpin-induced family protein in a non-human organism or a part thereof, preferably a microorganism, a plant cell, a plant or a part thereof, as compared to a corresponding non-transformed wild type non-human organism or a part thereof; and
[36169] (b) growing the non-human organism or a part thereof under conditions which permit the production of leucine or a composition comprising leucine in said non-human organism or in the culture medium surrounding said non-human organism.

[36170] Accordingly, the present invention relates to a process for the production of isoleucine, which comprises
[36171] (a) increasing or generating one or more activities selected from the group consisting of DNA mismatch repair protein in a non-human organism or a part thereof, preferably a microorganism, a plant cell, a plant or a part thereof, as compared to a corresponding non-transformed wild type non-human organism or a part thereof; and
[36172] (b) growing the non-human organism or a part thereof under conditions which permit the production of isoleucine or a composition comprising isoleucine in said non-human organism or in the culture medium surrounding said non-human organism.

[36173] Accordingly, the present invention relates to a process for the production of leucine, which comprises
[36174] (a) increasing or generating one or more activities selected from the group consisting of DNA mismatch repair protein in a non-human organism or a part thereof, preferably a microorganism, a plant cell, a plant or a part thereof, as compared to a corresponding non-transformed wild type non-human organism or a part thereof; and
[36175] (b) growing the non-human organism or a part thereof under conditions which permit the production of leucine or a composition comprising leucine in said non-human organism or in the culture medium surrounding said non-human organism.

[36176] Accordingly, the present invention relates to a process for the production of valine, which comprises
[36177] (a) increasing or generating one or more activities selected from the group consisting of DNA mismatch repair protein in a non-human organism or a part thereof, preferably a microorganism, a plant cell, a plant or a part thereof, as compared to a corresponding non-transformed wild type non-human organism or a part thereof; and
[36178] (b) growing the non-human organism or a part thereof under conditions which permit the production of valine or a composition comprising valine in said non-human organism or in the culture medium surrounding said non-human organism.

[36179] Accordingly, the present invention relates to a process for the production of isoleucine, which comprises
[36180] (a) increasing or generating one or more activities selected from the group consisting of protein kinase in a non-human organism or a part thereof, preferably a microorganism, a plant cell, a plant or a part thereof, as compared to a corresponding non-transformed wild type non-human organism or a part thereof; and
[36181] (b) growing the non-human organism or a part thereof under conditions which permit the production of isoleucine or a composition comprising isoleucine in said non-human organism or in the culture medium surrounding said non-human organism.

[36182] Accordingly, the present invention relates to a process for the production of leucine, which comprises
[36183] (a) increasing or generating one or more activities selected from the group consisting of protein kinase in a non-human organism or a part thereof, preferably a microorganism, a plant cell, a plant or a part thereof, as compared to a corresponding non-transformed wild type non-human organism or a part thereof; and
[36184] (b) growing the non-human organism or a part thereof under conditions which permit the production of leucine or a composition comprising leucine in said non-human organism or in the culture medium surrounding said non-human organism.

[36185] Accordingly, the present invention relates to a process for the production of valine, which comprises
[36186] (a) increasing or generating one or more activities selected from the group consisting of protein kinase in a non-human organism or a part thereof, preferably a microorganism, a plant cell, a plant or a part thereof, as compared to a corresponding non-transformed wild type non-human organism or a part thereof; and
[36187] (b) growing the non-human organism or a part thereof under conditions which permit the production of valine or a composition comprising valine in said non-human organism or in the culture medium surrounding said non-human organism.

[36188] Accordingly, the present invention relates to a process for the production of isoleucine, which comprises
[36189] (a) increasing or generating one or more activities selected from the group consisting of eukaryotic translation initiation factor in a non-human organism or a part thereof, preferably a microorganism, a plant cell, a plant or a part thereof, as compared to a corresponding non-transformed wild type non-human organism or a part thereof; and
[36190] (b) growing the non-human organism or a part thereof under conditions which permit the production of isoleucine or a composition comprising isoleucine in said non-human organism or in the culture medium surrounding said non-human organism.

[36191] Accordingly, the present invention relates to a process for the production of leucine, which comprises
[36192] (a) increasing or generating one or more activities selected from the group consisting of eukaryotic translation initiation factor in a non-human organism or a part thereof, preferably a microorganism, a plant cell, a plant or a part thereof, as compared to a corresponding non-transformed wild type non-human organism or a part thereof; and
[36193] (b) growing the non-human organism or a part thereof under conditions which permit the production of leucine or a composition comprising leucine in said non-human organism or in the culture medium surrounding said non-human organism.

[36194] Accordingly, the present invention relates to a process for the production of valine, which comprises
[36195] (a) increasing or generating one or more activities selected from the group consisting of eukaryotic translation initiation factor in a non-human organism or a part thereof, preferably a microorganism, a plant cell, a plant or a part thereof, as compared to a corresponding non-transformed wild type non-human organism or a part thereof; and
[36196] (b) growing the non-human organism or a part thereof under conditions which permit the production of valine or a composition comprising valine in said non-human organism or in the culture medium surrounding said non-human organism.

[36197] Accordingly, the present invention relates to a process for the production of isoleucine, which comprises
[36198] (a) increasing or generating one or more activities selected from the group consisting of glycosyl transferase in a non-human organism or a part thereof, preferably a microorganism, a plant cell, a plant or a part thereof, as compared to a corresponding non-transformed wild type non-human organism or a part thereof; and
[36199] (b) growing the non-human organism or a part thereof under conditions which permit the production of isoleucine or a composition comprising isoleucine in said non-human organism or in the culture medium surrounding said non-human organism.

[36200] Accordingly, the present invention relates to a process for the production of leucine, which comprises
[36201] (a) increasing or generating one or more activities selected from the group consisting of glycosyl transferase in a non-human organism or a part thereof, preferably a microorganism, a plant cell, a plant or a part thereof, as compared to a corresponding non-transformed wild type non-human organism or a part thereof; and
[36202] (b) growing the non-human organism or a part thereof under conditions which permit the production of leucine or a composition comprising leucine in said non-human organism or in the culture medium surrounding said non-human organism.

[36203] Accordingly, the present invention relates to a process for the production of valine, which comprises
[36204] (a) increasing or generating one or more activities selected from the group consisting of glycosyl transferase in a non-human organism or a part thereof, preferably a microorganism, a plant cell, a plant or a part thereof, as compared to a corresponding non-transformed wild type non-human organism or a part thereof; and
[36205] (b) growing the non-human organism or a part thereof under conditions which permit the production of valine or a composition comprising valine in said non-human organism or in the culture medium surrounding said non-human organism.

[36206] Accordingly, the present invention relates to a process for the production of isoleucine, which comprises
[36207] (a) increasing or generating one or more activities selected from the group consisting of auxin response factor in a non-human organism or a part thereof, preferably a microorganism, a plant cell, a plant or a part thereof, as compared to a corresponding non-transformed wild type non-human organism or a part thereof; and
[36208] (b) growing the non-human organism or a part thereof under conditions which permit the production of isoleucine or a composition comprising isoleucine in said non-human organism or in the culture medium surrounding said non-human organism.

[36209] Accordingly, the present invention relates to a process for the production of leucine, which comprises
[36210] (a) increasing or generating one or more activities selected from the group consisting of auxin response factor in a non-human organism or a part thereof, preferably a microorganism, a plant cell, a plant or a part thereof, as compared to a corresponding non-transformed wild type non-human organism or a part thereof; and
[36211] (b) growing the non-human organism or a part thereof under conditions which permit the production of leucine or a composition comprising leucine in said non-human organism or in the culture medium surrounding said non-human organism.

[36212] Accordingly, the present invention relates to a process for the production of valine, which comprises
[36213] (a) increasing or generating one or more activities selected from the group consisting of auxin response factor in a non-human organism or a part thereof, preferably a microorganism, a plant cell, a plant or a part thereof, as compared to a corresponding non-transformed wild type non-human organism or a part thereof; and
[36214] (b) growing the non-human organism or a part thereof under conditions which permit the production of valine or a composition comprising valine in said non-human organism or in the culture medium surrounding said non-human organism.

[36215] Accordingly, the present invention relates to a process for the production of isoleucine, which comprises
[36216] (a) increasing or generating one or more activities selected from the group consisting of glutaredoxin in a non-human organism or a part thereof, preferably a microorganism, a plant cell, a plant or a part thereof, as compared to a corresponding non-transformed wild type non-human organism or a part thereof; and
[36217] (b) growing the non-human organism or a part thereof under conditions which permit the production of isoleucine or a composition comprising isoleucine in said non-human organism or in the culture medium surrounding said non-human organism.

[36218] Accordingly, the present invention relates to a process for the production of leucine, which comprises
[36219] (a) increasing or generating one or more activities selected from the group consisting of glutaredoxin in a non-human organism or a part thereof, preferably a microorganism, a plant cell, a plant or a part thereof, as compared to a corresponding non-transformed wild type non-human organism or a part thereof; and
[36220] (b) growing the non-human organism or a part thereof under conditions which permit the production of leucine or a composition comprising leucine in said non-human organism or in the culture medium surrounding said non-human organism.

[36221] Accordingly, the present invention relates to a process for the production of valine, which comprises
[36222] (a) increasing or generating one or more activities selected from the group consisting of glutaredoxin in a non-human organism or a part thereof, preferably a microorganism, a plant cell, a plant or a part thereof, as compared to a corresponding non-transformed wild type non-human organism or a part thereof; and
[36223] (b) growing the non-human organism or a part thereof under conditions which permit the production of valine or a composition comprising valine in said non-human organism or in the culture medium surrounding said non-human organism.

[36224] Accordingly, the present invention relates to a process for the production of isoleucine, which comprises
[36225] (a) increasing or generating one or more activities selected from the group consisting of heat shock transcription factor in a non-human organism or a part thereof, preferably a microorganism, a plant cell, a plant or a part thereof, as compared to a corresponding non-transformed wild type non-human organism or a part thereof; and
[36226] (b) growing the non-human organism or a part thereof under conditions which permit the production of isoleucine or a composition comprising isoleucine in said non-human organism or in the culture medium surrounding said non-human organism.

[36227] Accordingly, the present invention relates to a process for the production of valine, which comprises
[36228] (a) increasing or generating one or more activities selected from the group consisting of protein phosphatase in a non-human organism or a part thereof, preferably a microorganism, a plant cell, a plant or a part thereof, as compared to a corresponding non-transformed wild type non-human organism or a part thereof; and
[36229] (b) growing the non-human organism or a part thereof under conditions which permit the production of valine or a composition comprising valine in said non-human organism or in the culture medium surrounding said non-human organism.

[36230] Accordingly, the present invention relates to a process for the production of isoleucine, which comprises
[36231] (a) increasing or generating one or more activities selected from the group consisting of At4g32480-protein in a non-human organism or a part thereof, preferably a microorganism, a plant cell, a plant or a part thereof, as compared to a corresponding non-transformed wild type non-human organism or a part thereof; and
[36232] (b) growing the non-human organism or a part thereof under conditions which permit the production of isoleucine or a composition comprising isoleucine in said non-human organism or in the culture medium surrounding said non-human organism.

[36233] Accordingly, the present invention relates to a process for the production of leucine, which comprises
[36234] (a) increasing or generating one or more activities selected from the group consisting of At4g32480-protein in a non-human organism or a part thereof, preferably a microorganism, a plant cell, a plant or a part thereof, as compared to a corresponding non-transformed wild type non-human organism or a part thereof; and
[36235] (b) growing the non-human organism or a part thereof under conditions which permit the production of leucine or a composition comprising leucine in said non-human organism or in the culture medium surrounding said non-human organism.

[36236] Accordingly, the present invention relates to a process for the production of valine, which comprises
[36237] (a) increasing or generating one or more activities selected from the group consisting of At4g32480-protein in a non-human organism or a part thereof, preferably a microorganism, a plant cell, a plant or a part thereof, as compared to a corresponding non-transformed wild type non-human organism or a part thereof; and
[36238] (b) growing the non-human organism or a part thereof under conditions which permit the production of valine or a composition comprising valine in said non-human organism or in the culture medium surrounding said non-human organism.

[36239] Accordingly, the present invention relates to a process for the production of isoleucine, which comprises
[36240] (a) increasing or generating one or more activities selected from the group consisting of cyclin D in a non-human organism or a part thereof, preferably a microorganism, a plant cell, a plant or a part thereof, as compared to a corresponding non-transformed wild type non-human organism or a part thereof; and
[36241] (b) growing the non-human organism or a part thereof under conditions which permit the production of isoleucine or a composition comprising isoleucine in said non-human organism or in the culture medium surrounding said non-human organism.

[36242] Accordingly, the present invention relates to a process for the production of leucine, which comprises
[36243] (a) increasing or generating one or more activities selected from the group consisting of cyclin D in a non-human organism or a part thereof, preferably a microorganism, a plant cell, a plant or a part thereof, as compared to a corresponding non-transformed wild type non-human organism or a part thereof; and
[36244] (b) growing the non-human organism or a part thereof under conditions which permit the production of leucine or a composition comprising leucine in said non-human organism or in the culture medium surrounding said non-human organism.

[36245] Accordingly, the present invention relates to a process for the production of valine, which comprises
[36246] (a) increasing or generating one or more activities selected from the group consisting of cyclin D in a non-human organism or a part thereof, preferably a microorganism, a plant cell, a plant or a part thereof, as compared to a corresponding non-transformed wild type non-human organism or a part thereof; and
[36247] (b) growing the non-human organism or a part thereof under conditions which permit the production of valine or a composition comprising valine in said non-human organism or in the culture medium surrounding said non-human organism.

[36248] Accordingly, the present invention relates to a process for the production of isoleucine, which comprises
[36249] (a) increasing or generating one or more activities selected from the group consisting of calcium-dependent protein kinase in a non-human organism or a part thereof, preferably a microorganism, a plant cell, a plant or a part thereof, as compared to a corresponding non-transformed wild type non-human organism or a part thereof; and
[36250] (b) growing the non-human organism or a part thereof under conditions which permit the production of isoleucine or a composition comprising isoleucine in said non-human organism or in the culture medium surrounding said non-human organism.

[36251] Accordingly, the present invention relates to a process for the production of leucine, which comprises
[36252] (a) increasing or generating one or more activities selected from the group consisting of calcium-dependent protein kinase in a non-human organism or a part thereof, preferably a microorganism, a plant cell, a plant or a part thereof, as compared to a corresponding non-transformed wild type non-human organism or a part thereof; and
[36253] (b) growing the non-human organism or a part thereof under conditions which permit the production of leucine or a composition comprising leucine in said non-human organism or in the culture medium surrounding said non-human organism.

[36254] Accordingly, the present invention relates to a process for the production of valine, which comprises
[36255] (a) increasing or generating one or more activities selected from the group consisting of calcium-dependent protein kinase in a non-human organism or a part thereof, preferably a microorganism, a plant cell, a plant or a part thereof, as compared to a corresponding non-transformed wild type non-human organism or a part thereof; and
[36256] (b) growing the non-human organism or a part thereof under conditions which permit the production of valine or a composition comprising valine in said non-human organism or in the culture medium surrounding said non-human organism.

[36257] Accordingly, the present invention relates to a process for the production of isoleucine, which comprises
[36258] (a) increasing or generating one or more activities selected from the group consisting of protein phosphatase in a non-human organism or a part thereof, preferably a microorganism, a plant cell, a plant or a part thereof, as compared to a corresponding non-transformed wild type non-human organism or a part thereof; and
[36259] (b) growing the non-human organism or a part thereof under conditions which permit the production of isoleucine or a composition comprising isoleucine in said non-human organism or in the culture medium surrounding said non-human organism.

[36260] Accordingly, the present invention relates to a process for the production of isoleucine, which comprises
[36261] (a) increasing or generating one or more activities selected from the group consisting of At5g16650-protein in a non-human organism or a part thereof, preferably a microorganism, a plant cell, a plant or a part thereof, as compared to a corresponding non-transformed wild type non-human organism or a part thereof; and
[36262] (b) growing the non-human organism or a part thereof under conditions which permit the production of isoleucine or a composition comprising isoleucine in said non-human organism or in the culture medium surrounding said non-human organism.

[36263] Accordingly, the present invention relates to a process for the production of valine, which comprises
[36264] (a) increasing or generating one or more activities selected from the group consisting of At5g16650-protein in a non-human organism or a part thereof, preferably a microorganism, a plant cell, a plant or a part thereof, as compared to a corresponding non-transformed wild type non-human organism or a part thereof; and
[36265] (b) growing the non-human organism or a part thereof under conditions which permit the production of valine or a composition comprising valine in said non-human organism or in the culture medium surrounding said non-human organism.

[36266] Accordingly, the present invention relates to a process for the production of valine, which comprises
[36267] (a) increasing or generating one or more activities selected from the group consisting of monothiol glutaredoxin in a non-human organism or a part thereof, preferably a microorganism, a plant cell, a plant or a part thereof, as compared to a corresponding non-transformed wild type non-human organism or a part thereof; and
[36268] (b) growing the non-human organism or a part thereof under conditions which permit the production of valine or a composition comprising valine in said non-human organism or in the culture medium surrounding said non-human organism.

[36269] Accordingly, the present invention relates to a process for the production of leucine, which comprises
[36270] (a) increasing or generating one or more activities selected from the group consisting of thioredoxin in a non-human organism or a part thereof, preferably a microorganism, a plant cell, a plant or a part thereof, as compared to a corresponding non-transformed wild type non-human organism or a part thereof; and
[36271] (b) growing the non-human organism or a part thereof under conditions which permit the production of leucine or a composition comprising leucine in said non-human organism or in the culture medium surrounding said non-human organism.

[36272] Accordingly, the present invention relates to a process for the production of valine, which comprises
[36273] (a) increasing or generating one or more activities selected from the group consisting of thioredoxin in a non-human organism or a part thereof, preferably a microorganism, a plant cell, a plant or a part thereof, as compared to a corresponding non-transformed wild type non-human organism or a part thereof; and
[36274] (b) growing the non-human organism or a part thereof under conditions which permit the production of valine or a composition comprising valine in said non-human organism or in the culture medium surrounding said non-human organism.

[36275] Accordingly, the present invention relates to a process for the production of valine, which comprises
[36276] (a) increasing or generating one or more activities selected from the group consisting of disease resistance protein in a non-human organism or a part thereof, preferably a microorganism, a plant cell, a plant or a part thereof, as compared to a corresponding non-transformed wild type non-human organism or a part thereof; and
[36277] (b) growing the non-human organism or a part thereof under conditions which permit the production of valine or a composition comprising valine in said non-human organism or in the culture medium surrounding said non-human organism.

[36278] Accordingly, the present invention relates to a process for the production of isoleucine, which comprises
[36279] (a) increasing or generating one or more activities selected from the group consisting of pyruvate kinase in a non-human organism or a part thereof, preferably a microorganism, a plant cell, a plant or a part thereof, as compared to a corresponding non-transformed wild type non-human organism or a part thereof; and
[36280] (b) growing the non-human organism or a part thereof under conditions which permit the production of isoleucine or a composition comprising isoleucine in said non-human organism or in the culture medium surrounding said non-human organism.

[36281] Accordingly, the present invention relates to a process for the production of leucine, which comprises
[36282] (a) increasing or generating one or more activities selected from the group consisting of pyruvate kinase in a non-human organism or a part thereof, preferably a microorganism, a plant cell, a plant or a part thereof, as compared to a corresponding non-transformed wild type non-human organism or a part thereof; and
[36283] (b) growing the non-human organism or a part thereof under conditions which permit the production of leucine or a composition comprising leucine in said non-human organism or in the culture medium surrounding said non-human organism.

[36284] Accordingly, the present invention relates to a process for the production of valine, which comprises
[36285] (a) increasing or generating one or more activities selected from the group consisting of RNA-binding protein in a non-human organism or a part thereof, preferably a microorganism, a plant cell, a plant or a part thereof, as compared to a corresponding non-transformed wild type non-human organism or a part thereof; and
[36286] (b) growing the non-human organism or a part thereof under conditions which permit the production of valine or a composition comprising valine in said non-human organism or in the culture medium surrounding said non-human organism.

[36287] Accordingly, the present invention relates to a process for the production of isoleucine, which comprises
[36288] (a) increasing or generating one or more activities selected from the group consisting of MADS-box transcription factor in a non-human organism or a part thereof, preferably a microorganism, a plant cell, a plant or a part thereof, as compared to a corresponding non-transformed wild type non-human organism or a part thereof; and
[36289] (b) growing the non-human organism or a part thereof under conditions which permit the production of isoleucine or a composition comprising isoleucine in said non-human organism or in the culture medium surrounding said non-human organism.

[36290] Accordingly, the present invention relates to a process for the production of leucine, which comprises
[36291] (a) increasing or generating one or more activities selected from the group consisting of MADS-box transcription factor in a non-human organism or a part thereof, preferably a microorganism, a plant cell, a plant or a part thereof, as compared to a corresponding non-transformed wild type non-human organism or a part thereof; and
[36292] (b) growing the non-human organism or a part thereof under conditions which permit the production of leucine or a composition comprising leucine in said non-human organism or in the culture medium surrounding said non-human organism.

[36293] Accordingly, the present invention relates to a process for the production of isoleucine, which comprises
[36294] (a) increasing or generating one or more activities selected from the group consisting of pyruvate kinase in a non-human organism or a part thereof, preferably a microorganism, a plant cell, a plant or a part thereof, as compared to a corresponding non-transformed wild type non-human organism or a part thereof; and
[36295] (b) growing the non-human organism or a part thereof under conditions which permit the production of isoleucine or a composition comprising isoleucine in said non-human organism or in the culture medium surrounding said non-human organism.

[36296] Accordingly, the present invention relates to a process for the production of leucine, which comprises
[36297] (a) increasing or generating one or more activities selected from the group consisting of pyruvate kinase in a non-human organism or a part thereof, preferably a microorganism, a plant cell, a plant or a part thereof, as compared to a corresponding non-transformed wild type non-human organism or a part thereof; and
[36298] (b) growing the non-human organism or a part thereof under conditions which permit the production of leucine or a composition comprising leucine in said non-human organism or in the culture medium surrounding said non-human organism.

[36299] Accordingly, the present invention relates to a process for the production of valine, which comprises
[36300] (a) increasing or generating one or more activities selected from the group consisting of pyruvate kinase in a non-human organism or a part thereof, preferably a microorganism, a plant cell, a plant or a part thereof, as compared to a corresponding non-transformed wild type non-human organism or a part thereof; and
[36301] (b) growing the non-human organism or a part thereof under conditions which permit the production of valine or a composition comprising valine in said non-human organism or in the culture medium surrounding said non-human organism.

[36302] Accordingly, the present invention relates to a process for the production of valine, which comprises
[36303] (a) increasing or generating one or more activities selected from the group consisting of zinc finger protein in a non-human organism or a part thereof, preferably a microorganism, a plant cell, a plant or a part thereof, as compared to a corresponding non-transformed wild type non-human organism or a part thereof; and
[36304] (b) growing the non-human organism or a part thereof under conditions which permit the production of valine or a composition comprising valine in said non-human organism or in the culture medium surrounding said non-human organism.

[36305] Accordingly, the present invention relates to a process for the production of isoleucine, which comprises
[36306] (a) increasing or generating one or more activities selected from the group consisting of malic enzyme in a non-human organism or a part thereof, preferably a microorganism, a plant cell, a plant or a part thereof, as compared to a corresponding non-transformed wild type non-human organism or a part thereof; and
[36307] (b) growing the non-human organism or a part thereof under conditions which permit the production of isoleucine or a composition comprising isoleucine in said non-human organism or in the culture medium surrounding said non-human organism.

[36308] Accordingly, the present invention relates to a process for the production of leucine, which comprises
[36309] (a) increasing or generating one or more activities selected from the group consisting of malic enzyme in a non-human organism or a part thereof, preferably a microorganism, a plant cell, a plant or a part thereof, as compared to a corresponding non-transformed wild type non-human organism or a part thereof; and
[36310] (b) growing the non-human organism or a part thereof under conditions which permit the production of leucine or a composition comprising leucine in said non-human organism or in the culture medium surrounding said non-human organism.

[36311] Accordingly, the present invention relates to a process for the production of valine, which comprises
[36312] (a) increasing or generating one or more activities selected from the group consisting of malic enzyme in a non-human organism or a part thereof, preferably a microorganism, a plant cell, a plant or a part thereof, as compared to a corresponding non-transformed wild type non-human organism or a part thereof; and
[36313] (b) growing the non-human organism or a part thereof under conditions which permit the production of valine or a composition comprising valine in said non-human organism or in the culture medium surrounding said non-human organism.

[36314] Accordingly, the present invention relates to a process for the production of valine, which comprises
[36315] (a) increasing or generating one or more activities selected from the group consisting of pyruvate kinase in a non-human organism or a part thereof, preferably a microorganism, a plant cell, a plant or a part thereof, as compared to a corresponding non-transformed wild type non-human organism or a part thereof; and
[36316] (b) growing the non-human organism or a part thereof under conditions which permit the production of valine or a composition comprising valine in said non-human organism or in the culture medium surrounding said non-human organism.

[36317] Accordingly, the present invention relates to a process for the production of valine, which comprises
[36318] (a) increasing or generating one or more activities selected from the group consisting of beta-hydroxylase in a non-human organism or a part thereof, preferably a microorganism, a plant cell, a plant or a part thereof, as compared to a corresponding non-transformed wild type non-human organism or a part thereof; and
[36319] (b) growing the non-human organism or a part thereof under conditions which permit the production of valine or a composition comprising valine in said non-human organism or in the culture medium surrounding said non-human organism.

[36320] Accordingly, the present invention relates to a process for the production of isoleucine, which comprises
[36321] (a) increasing or generating one or more activities selected from the group consisting of elongation factor Tu in a non-human organism or a part thereof, preferably a microorganism, a plant cell, a plant or a part thereof, as compared to a corresponding non-transformed wild type non-human organism or a part thereof; and
[36322] (b) growing the non-human organism or a part thereof under conditions which permit the production of isoleucine or a composition comprising isoleucine in said non-human organism or in the culture medium surrounding said non-human organism.

[36323] Accordingly, the present invention relates to a process for the production of leucine, which comprises
[36324] (a) increasing or generating one or more activities selected from the group consisting of elongation factor Tu in a non-human organism or a part thereof, preferably a microorganism, a plant cell, a plant or a part thereof, as compared to a corresponding non-transformed wild type non-human organism or a part thereof; and
[36325] (b) growing the non-human organism or a part thereof under conditions which permit the production of leucine or a composition comprising leucine in said non-human organism or in the culture medium surrounding said non-human organism.

[36326] Accordingly, the present invention relates to a process for the production of valine, which comprises
[36327] (a) increasing or generating one or more activities selected from the group consisting of elongation factor Tu in a non-human organism or a part thereof, preferably a microorganism, a plant cell, a plant or a part thereof, as compared to a corresponding non-transformed wild type non-human organism or a part thereof; and
[36328] (b) growing the non-human organism or a part thereof under conditions which permit the production of valine or a composition comprising valine in said non-human organism or in the culture medium surrounding said non-human organism.

[36329] Accordingly, the present invention relates to a process for the production of valine, which comprises
[36330] (a) increasing or generating one or more activities selected from the group consisting of 50S ribosomal protein L14 in a non-human organism or a part thereof, preferably a microorganism, a plant cell, a plant or a part thereof, as compared to a corresponding non-transformed wild type non-human organism or a part thereof; and
[36331] (b) growing the non-human organism or a part thereof under conditions which permit the production of valine or a composition comprising valine in said non-human organism or in the culture medium surrounding said non-human organism.

[36332] Accordingly, the present invention relates to a process for the production of valine, which comprises
[36333] (a) increasing or generating one or more activities selected from the group consisting of ABC transporter permease protein in a non-human organism or a part thereof, preferably a microorganism, a plant cell, a plant or a part thereof, as compared to a corresponding non-transformed wild type non-human organism or a part thereof; and
[36334] (b) growing the non-human organism or a part thereof under conditions which permit the production of valine or a composition comprising valine in said non-human organism or in the culture medium surrounding said non-human organism.

[36335] Accordingly, the present invention relates to a process for the production of isoleucine, which comprises
[36336] (a) increasing or generating one or more activities selected from the group consisting of enoyl-CoA hydratase in a non-human organism or a part thereof, preferably a microorganism, a plant cell, a plant or a part thereof, as compared to a corresponding non-transformed wild type non-human organism or a part thereof; and
[36337] (b) growing the non-human organism or a part thereof under conditions which permit the production of isoleucine or a composition comprising isoleucine in said non-human organism or in the culture medium surrounding said non-human organism.

[36338] Accordingly, the present invention relates to a process for the production of leucine, which comprises
[36339] (a) increasing or generating one or more activities selected from the group consisting of enoyl-CoA hydratase in a non-human organism or a part thereof, preferably a microorganism, a plant cell, a plant or a part thereof, as compared to a corresponding non-transformed wild type non-human organism or a part thereof; and
[36340] (b) growing the non-human organism or a part thereof under conditions which permit the production of leucine or a composition comprising leucine in said non-human organism or in the culture medium surrounding said non-human organism.

[36341] Accordingly, the present invention relates to a process for the production of valine, which comprises
[36342] (a) increasing or generating one or more activities selected from the group consisting of enoyl-CoA hydratase in a non-human organism or a part thereof, preferably a microorganism, a plant cell, a plant or a part thereof, as compared to a corresponding non-transformed wild type non-human organism or a part thereof; and
[36343] (b) growing the non-human organism or a part thereof under conditions which permit the production of valine or a composition comprising valine in said non-human organism or in the culture medium surrounding said non-human organism.

[36344] Accordingly, the present invention relates to a process for the production of isoleucine, which comprises
[36345] (a) increasing or generating one or more activities selected from the group consisting of transcriptional regulator in a non-human organism or a part thereof, preferably a microorganism, a plant cell, a plant or a part thereof, as compared to a corresponding non-transformed wild type non-human organism or a part thereof; and
[36346] (b) growing the non-human organism or a part thereof under conditions which permit the production of isoleucine or a composition comprising isoleucine in said non-human organism or in the culture medium surrounding said non-human organism.

[36347] Accordingly, the present invention relates to a process for the production of leucine, which comprises
[36348] (a) increasing or generating one or more activities selected from the group consisting of transcriptional regulator in a non-human organism or a part thereof, preferably a microorganism, a plant cell, a plant or a part thereof, as compared to a corresponding non-transformed wild type non-human organism or a part thereof; and
[36349] (b) growing the non-human organism or a part thereof under conditions which permit the production of leucine or a composition comprising leucine in said non-human organism or in the culture medium surrounding said non-human organism.

[36350] Accordingly, the present invention relates to a process for the production of valine, which comprises
[36351] (a) increasing or generating one or more activities selected from the group consisting of transcriptional regulator in a non-human organism or a part thereof, preferably a microorganism, a plant cell, a plant or a part thereof, as compared to a corresponding non-transformed wild type non-human organism or a part thereof; and
[36352] (b) growing the non-human organism or a part thereof under conditions which permit the production of valine or a composition comprising valine in said non-human organism or in the culture medium surrounding said non-human organism.

[36353] Accordingly, the present invention relates to a process for the production of isoleucine, which comprises
[36354] (a) increasing or generating one or more activities selected from the group consisting of acyltransferase in a non-human organism or a part thereof, preferably a microorganism, a plant cell, a plant or a part thereof, as compared to a corresponding non-transformed wild type non-human organism or a part thereof; and
[36355] (b) growing the non-human organism or a part thereof under conditions which permit the production of isoleucine or a composition comprising isoleucine in said non-human organism or in the culture medium surrounding said non-human organism.

[36356] Accordingly, the present invention relates to a process for the production of leucine, which comprises
[36357] (a) increasing or generating one or more activities selected from the group consisting of acyltransferase in a non-human organism or a part thereof, preferably a microorganism, a plant cell, a plant or a part thereof, as compared to a corresponding non-transformed wild type non-human organism or a part thereof; and
[36358] (b) growing the non-human organism or a part thereof under conditions which permit the production of leucine or a composition comprising leucine in said non-human organism or in the culture medium surrounding said non-human organism.

[36359] Accordingly, the present invention relates to a process for the production of valine, which comprises
[36360] (a) increasing or generating one or more activities selected from the group consisting of acyltransferase in a non-human organism or a part thereof, preferably a microorganism, a plant cell, a plant or a part thereof, as compared to a corresponding non-transformed wild type non-human organism or a part thereof; and
[36361] (b) growing the non-human organism or a part thereof under conditions which permit the production of valine or a composition comprising valine in said non-human organism or in the culture medium surrounding said non-human organism.

[36362] Accordingly, the present invention relates to a process for the production of isoleucine, which comprises
[36363] (a) increasing or generating one or more activities selected from the group consisting of oxidoreductase in a non-human organism or a part thereof, preferably a microorganism, a plant cell, a plant or a part thereof, as compared to a corresponding non-transformed wild type non-human organism or a part thereof; and
[36364] (b) growing the non-human organism or a part thereof under conditions which permit the production of isoleucine or a composition comprising isoleucine in said non-human organism or in the culture medium surrounding said non-human organism.

[36365] Accordingly, the present invention relates to a process for the production of leucine, which comprises
[36366] (a) increasing or generating one or more activities selected from the group consisting of oxidoreductase in a non-human organism or a part thereof, preferably a microorganism, a plant cell, a plant or a part thereof, as compared to a corresponding non-transformed wild type non-human organism or a part thereof; and
[36367] (b) growing the non-human organism or a part thereof under conditions which permit the production of leucine or a composition comprising leucine in said non-human organism or in the culture medium surrounding said non-human organism.

[36368] Accordingly, the present invention relates to a process for the production of valine, which comprises
[36369] (a) increasing or generating one or more activities selected from the group consisting of oxidoreductase in a non-human organism or a part thereof, preferably a microorganism, a plant cell, a plant or a part thereof, as compared to a corresponding non-transformed wild type non-human organism or a part thereof; and
[36370] (b) growing the non-human organism or a part thereof under conditions which permit the production of valine or a composition comprising valine in said non-human organism or in the culture medium surrounding said non-human organism.

[36371] Accordingly, the present invention relates to a process for the production of valine, which comprises
[36372] (a) increasing or generating one or more activities selected from the group consisting of ABC transporter component in a non-human organism or a part thereof, preferably a microorganism, a plant cell, a plant or a part thereof, as compared to a corresponding non-transformed wild type non-human organism or a part thereof; and
[36373] (b) growing the non-human organism or a part thereof under conditions which permit the production of valine or a composition comprising valine in said non-human organism or in the culture medium surrounding said non-human organism.

[36374] Accordingly, the present invention relates to a process for the production of valine, which comprises
[36375] (a) increasing or generating one or more activities selected from the group consisting of glucose-1-phosphate cytidylyltransferase in a non-human organism or a part thereof, preferably a microorganism, a plant cell, a plant or a part thereof, as compared to a corresponding non-transformed wild type non-human organism or a part thereof; and
[36376] (b) growing the non-human organism or a part thereof under conditions which permit the production of valine or a composition comprising valine in said non-human organism or in the culture medium surrounding said non-human organism.

[36377] Accordingly, the present invention relates to a process for the production of isoleucine, which comprises
[36378] (a) increasing or generating one or more activities selected from the group consisting of aminotransferase in a non-human organism or a part thereof, preferably a microorganism, a plant cell, a plant or a part thereof, as compared to a corresponding non-transformed wild type non-human organism or a part thereof; and
[36379] (b) growing the non-human organism or a part thereof under conditions which permit the production of isoleucine or a composition comprising isoleucine in said non-human organism or in the culture medium surrounding said non-human organism.

[36380] Accordingly, the present invention relates to a process for the production of valine, which comprises
[36381] (a) increasing or generating one or more activities selected from the group consisting of aminotransferase in a non-human organism or a part thereof, preferably a microorganism, a plant cell, a plant or a part thereof, as compared to a corresponding non-transformed wild type non-human organism or a part thereof; and
[36382] (b) growing the non-human organism or a part thereof under conditions which permit the production of valine or a composition comprising valine in said non-human organism or in the culture medium surrounding said non-human organism.

[36383] Accordingly, the present invention relates to a process for the production of isoleucine, which comprises
[36384] (a) increasing or generating one or more activities selected from the group consisting of NADH-quinone oxidoreductase subunit in a non-human organism or a part thereof, preferably a microorganism, a plant cell, a plant or a part thereof, as compared to a corresponding non-transformed wild type non-human organism or a part thereof; and
[36385] (b) growing the non-human organism or a part thereof under conditions which permit the production of isoleucine or a composition comprising isoleucine in said non-human organism or in the culture medium surrounding said non-human organism.

[36386] Accordingly, the present invention relates to a process for the production of leucine, which comprises
[36387] (a) increasing or generating one or more activities selected from the group consisting of NADH-quinone oxidoreductase subunit in a non-human organism or a part thereof, preferably a microorganism, a plant cell, a plant or a part thereof, as compared to a corresponding non-transformed wild type non-human organism or a part thereof; and
[36388] (b) growing the non-human organism or a part thereof under conditions which permit the production of leucine or a composition comprising leucine in said non-human organism or in the culture medium surrounding said non-human organism.

[36389] Accordingly, the present invention relates to a process for the production of isoleucine, which comprises
[36390] (a) increasing or generating one or more activities selected from the group consisting of glutamate-ammonia-ligase in a non-human organism or a part thereof, preferably a microorganism, a plant cell, a plant or a part thereof, as compared to a corresponding non-transformed wild type non-human organism or a part thereof; and
[36391] (b) growing the non-human organism or a part thereof under conditions which permit the production of isoleucine or a composition comprising isoleucine in said non-human organism or in the culture medium surrounding said non-human organism.

[36392] Accordingly, the present invention relates to a process for the production of leucine, which comprises
[36393] (a) increasing or generating one or more activities selected from the group consisting of glutamate-ammonia-ligase in a non-human organism or a part thereof, preferably a microorganism, a plant cell, a plant or a part thereof, as compared to a corresponding non-transformed wild type non-human organism or a part thereof; and
[36394] (b) growing the non-human organism or a part thereof under conditions which permit the production of leucine or a composition comprising leucine in said non-human organism or in the culture medium surrounding said non-human organism.

[36395] Accordingly, the present invention relates to a process for the production of valine, which comprises
[36396] (a) increasing or generating one or more activities selected from the group consisting of glutamate-ammonia-ligase in a non-human organism or a part thereof, preferably a microorganism, a plant cell, a plant or a part thereof, as compared to a corresponding non-transformed wild type non-human organism or a part thereof; and
[36397] (b) growing the non-human organism or a part thereof under conditions which permit the production of valine or a composition comprising valine in said non-human organism or in the culture medium surrounding said non-human organism.

[36398] Accordingly, the present invention relates to a process for the production of valine, which comprises
[36399] (a) increasing or generating one or more activities selected from the group consisting of isopropylmalate isomerase large subunit in a non-human organism or a part thereof, preferably a microorganism, a plant cell, a plant or a part thereof, as compared to a corresponding non-transformed wild type non-human organism or a part thereof; and
[36400] (b) growing the non-human organism or a part thereof under conditions which permit the production of valine or a composition comprising valine in said non-human organism or in the culture medium surrounding said non-human organism.

[36401] Accordingly, the present invention relates to a process for the production of isoleucine, which comprises
[36402] (a) increasing or generating one or more activities selected from the group consisting of hydrolase in a non-human organism or a part thereof, preferably a microorganism, a plant cell, a plant or a part thereof, as compared to a corresponding non-transformed wild type non-human organism or a part thereof; and
[36403] (b) growing the non-human organism or a part thereof under conditions which permit the production of isoleucine or a composition comprising isoleucine in said non-human organism or in the culture medium surrounding said non-human organism.

[36404] Accordingly, the present invention relates to a process for the production of leucine, which comprises
[36405] (a) increasing or generating one or more activities selected from the group consisting of hydrolase in a non-human organism or a part thereof, preferably a microorganism, a plant cell, a plant or a part thereof, as compared to a corresponding non-transformed wild type non-human organism or a part thereof; and
[36406] (b) growing the non-human organism or a part thereof under conditions which permit the production of leucine or a composition comprising leucine in said non-human organism or in the culture medium surrounding said non-human organism.

[36407] Accordingly, the present invention relates to a process for the production of valine, which comprises
[36408] (a) increasing or generating one or more activities selected from the group consisting of hydrolase in a non-human organism or a part thereof, preferably a microorganism, a plant cell, a plant or a part thereof, as compared to a corresponding non-transformed wild type non-human organism or a part thereof; and
[36409] (b) growing the non-human organism or a part thereof under conditions which permit the production of valine or a composition comprising valine in said non-human organism or in the culture medium surrounding said non-human organism.

[36410] Accordingly, the present invention relates to a process for the production of isoleucine, which comprises
[36411] (a) increasing or generating one or more activities selected from the group consisting of fumarylacetoacetate hydrolase in a non-human organism or a part thereof, preferably a microorganism, a plant cell, a plant or a part thereof, as compared to a corresponding non-transformed wild type non-human organism or a part thereof; and
[36412] (b) growing the non-human organism or a part thereof under conditions which permit the production of isoleucine or a composition comprising isoleucine in said non-human organism or in the culture medium surrounding said non-human organism.

[36413] Accordingly, the present invention relates to a process for the production of leucine, which comprises
[36414] (a) increasing or generating one or more activities selected from the group consisting of fumarylacetoacetate hydrolase in a non-human organism or a part thereof, preferably a microorganism, a plant cell, a plant or a part thereof, as compared to a corresponding non-transformed wild type non-human organism or a part thereof; and
[36415] (b) growing the non-human organism or a part thereof under conditions which permit the production of leucine or a composition comprising leucine in said non-human organism or in the culture medium surrounding said non-human organism.

[36416] Accordingly, the present invention relates to a process for the production of valine, which comprises
[36417] (a) increasing or generating one or more activities selected from the group consisting of fumarylacetoacetate hydrolase in a non-human organism or a part thereof, preferably a microorganism, a plant cell, a plant or a part thereof, as compared to a corresponding non-transformed wild type non-human organism or a part thereof; and
[36418] (b) growing the non-human organism or a part thereof under conditions which permit the production of valine or a composition comprising valine in said non-human organism or in the culture medium surrounding said non-human organism.

[36419] Accordingly, the present invention relates to a process for the production of leucine, which comprises
[36420] (a) increasing or generating one or more activities selected from the group consisting of peptidase in a non-human organism or a part thereof, preferably a microorganism, a plant cell, a plant or a part thereof, as compared to a corresponding non-transformed wild type non-human organism or a part thereof; and
[36421] (b) growing the non-human organism or a part thereof under conditions which permit the production of leucine or a composition comprising leucine in said non-human organism or in the culture medium surrounding said non-human organism.

[36422] Accordingly, the present invention relates to a process for the production of isoleucine, which comprises
[36423] (a) increasing or generating one or more activities selected from the group consisting of chaperone protein CIpB in a non-human organism or a part thereof, preferably a microorganism, a plant cell, a plant or a part thereof, as compared to a corresponding non-transformed wild type non-human organism or a part thereof; and
[36424] (b) growing the non-human organism or a part thereof under conditions which permit the production of isoleucine or a composition comprising isoleucine in said non-human organism or in the culture medium surrounding said non-human organism.

[36425] Accordingly, the present invention relates to a process for the production of isoleucine, which comprises
[36426] (a) increasing or generating one or more activities selected from the group consisting of purine nucleoside phosphorylase in a non-human organism or a part thereof, preferably a microorganism, a plant cell, a plant or a part thereof, as compared to a corresponding non-transformed wild type non-human organism or a part thereof; and
[36427] (b) growing the non-human organism or a part thereof under conditions which permit the production of isoleucine or a composition comprising isoleucine in said non-human organism or in the culture medium surrounding said non-human organism.

[36428] Accordingly, the present invention relates to a process for the production of leucine, which comprises
[36429] (a) increasing or generating one or more activities selected from the group consisting of purine nucleoside phosphorylase in a non-human organism or a part thereof, preferably a microorganism, a plant cell, a plant or a part thereof, as compared to a corresponding non-transformed wild type non-human organism or a part thereof; and
[36430] (b) growing the non-human organism or a part thereof under conditions which permit the production of leucine or a composition comprising leucine in said non-human organism or in the culture medium surrounding said non-human organism.

[36431] Accordingly, the present invention relates to a process for the production of valine, which comprises
[36432] (a) increasing or generating one or more activities selected from the group consisting of purine nucleoside phosphorylase in a non-human organism or a part thereof, preferably a microorganism, a plant cell, a plant or a part thereof, as compared to a corresponding non-transformed wild type non-human organism or a part thereof; and
[36433] (b) growing the non-human organism or a part thereof under conditions which permit the production of valine or a composition comprising valine in said non-human organism or in the culture medium surrounding said non-human organism.

[36434] Accordingly, the present invention relates to a process for the production of isoleucine, which comprises
[36435] (a) increasing or generating one or more activities selected from the group consisting of pyruvate kinase in a non-human organism or a part thereof, preferably a microorganism, a plant cell, a plant or a part thereof, as compared to a corresponding non-transformed wild type non-human organism or a part thereof; and
[36436] (b) growing the non-human organism or a part thereof under conditions which permit the production of isoleucine or a composition comprising isoleucine in said non-human organism or in the culture medium surrounding said non-human organism.

[36437] Accordingly, the present invention relates to a process for the production of valine, which comprises
[36438] (a) increasing or generating one or more activities selected from the group consisting of pyruvate kinase in a non-human organism or a part thereof, preferably a microorganism, a plant cell, a plant or a part thereof, as compared to a corresponding non-transformed wild type non-human organism or a part thereof; and
[36439] (b) growing the non-human organism or a part thereof under conditions which permit the production of valine or a composition comprising valine in said non-human organism or in the culture medium surrounding said non-human organism.

[36440] Accordingly, the present invention relates to a process for the production of isoleucine, which comprises
[36441] (a) increasing or generating one or more activities selected from the group consisting of threonine synthase in a non-human organism or a part thereof, preferably a microorganism, a plant cell, a plant or a part thereof, as compared to a corresponding non-transformed wild type non-human organism or a part thereof; and
[36442] (b) growing the non-human organism or a part thereof under conditions which permit the production of isoleucine or a composition comprising isoleucine in said non-human organism or in the culture medium surrounding said non-human organism.

[36443] Accordingly, the present invention relates to a process for the production of leucine, which comprises
[36444] (a) increasing or generating one or more activities selected from the group consisting of threonine synthase in a non-human organism or a part thereof, preferably a microorganism, a plant cell, a plant or a part thereof, as compared to a corresponding non-transformed wild type non-human organism or a part thereof; and
[36445] (b) growing the non-human organism or a part thereof under conditions which permit the production of leucine or a composition comprising leucine in said non-human organism or in the culture medium surrounding said non-human organism.

[36446] Accordingly, the present invention relates to a process for the production of valine, which comprises
[36447] (a) increasing or generating one or more activities selected from the group consisting of threonine synthase in a non-human organism or a part thereof, preferably a microorganism, a plant cell, a plant or a part thereof, as compared to a corresponding non-transformed wild type non-human organism or a part thereof; and
[36448] (b) growing the non-human organism or a part thereof under conditions which permit the production of valine or a composition comprising valine in said non-human organism or in the culture medium surrounding said non-human organism.

[36449] Accordingly, the present invention relates to a process for the production of valine, which comprises
[36450] (a) increasing or generating one or more activities selected from the group consisting of b0050-protein in a non-human organism or a part thereof, preferably a microorganism, a plant cell, a plant or a part thereof, as compared to a corresponding non-transformed wild type non-human organism or a part thereof; and
[36451] (b) growing the non-human organism or a part thereof under conditions which permit the production of valine or a composition comprising valine in said non-human organism or in the culture medium surrounding said non-human organism.

[36452] Accordingly, the present invention relates to a process for the production of leucine, which comprises
[36453] (a) increasing or generating one or more activities selected from the group consisting of acetolactate synthase small subunit in a non-human organism or a part thereof, preferably a microorganism, a plant cell, a plant or a part thereof, as compared to a corresponding non-transformed wild type non-human organism or a part thereof; and
[36454] (b) growing the non-human organism or a part thereof under conditions which permit the production of leucine or a composition comprising leucine in said non-human organism or in the culture medium surrounding said non-human organism.

[36455] Accordingly, the present invention relates to a process for the production of leucine, which comprises
[36456] (a) increasing or generating one or more activities selected from the group consisting of betagalactosidase in a non-human organism or a part thereof, preferably a microorganism, a plant cell, a plant or a part thereof, as compared to a corresponding non-transformed wild type non-human organism or a part thereof; and
[36457] (b) growing the non-human organism or a part thereof under conditions which permit the production of leucine or a composition comprising leucine in said non-human organism or in the culture medium surrounding said non-human organism.

[36458] Accordingly, the present invention relates to a process for the production of isoleucine, which comprises
[36459] (a) increasing or generating one or more activities selected from the group consisting of 2,3-dihydroxyphenylpropionate 1,2-dioxygenase in a non-human organism or a part thereof, preferably a microorganism, a plant cell, a plant or a part thereof, as compared to a corresponding non-transformed wild type non-human organism or a part thereof; and
[36460] (b) growing the non-human organism or a part thereof under conditions which permit the production of isoleucine or a composition comprising isoleucine in said non-human organism or in the culture medium surrounding said non-human organism.

[36461] Accordingly, the present invention relates to a process for the production of valine, which comprises
[36462] (a) increasing or generating one or more activities selected from the group consisting of 2,3-dihydroxyphenylpropionate 1,2-dioxygenase in a non-human organism or a part thereof, preferably a microorganism, a plant cell, a plant or a part thereof, as compared to a corresponding non-transformed wild type non-human organism or a part thereof; and
[36463] (b) growing the non-human organism or a part thereof under conditions which permit the production of valine or a composition comprising valine in said non-human organism or in the culture medium surrounding said non-human organism.

[36464] Accordingly, the present invention relates to a process for the production of isoleucine, which comprises
[36465] (a) increasing or generating one or more activities selected from the group consisting of ATP-binding component of a transport system in a non-human organism or a part thereof, preferably a microorganism, a plant cell, a plant or a part thereof, as compared to a corresponding non-transformed wild type non-human organism or a part thereof; and
[36466] (b) growing the non-human organism or a part thereof under conditions which permit the production of isoleucine or a composition comprising isoleucine in said non-human organism or in the culture medium surrounding said non-human organism.

[36467] Accordingly, the present invention relates to a process for the production of leucine, which comprises
[36468] (a) increasing or generating one or more activities selected from the group consisting of ATP-binding component of a transport system in a non-human organism or a part thereof, preferably a microorganism, a plant cell, a plant or a part thereof, as compared to a corresponding non-transformed wild type non-human organism or a part thereof; and
[36469] (b) growing the non-human organism or a part thereof under conditions which permit the production of leucine or a composition comprising leucine in said non-human organism or in the culture medium surrounding said non-human organism.

[36470] Accordingly, the present invention relates to a process for the production of valine, which comprises
[36471] (a) increasing or generating one or more activities selected from the group consisting of ATP-binding component of a transport system in a non-human organism or a part thereof, preferably a microorganism, a plant cell, a plant or a part thereof, as compared to a corresponding non-transformed wild type non-human organism or a part thereof; and
[36472] (b) growing the non-human organism or a part thereof under conditions which permit the production of valine or a composition comprising valine in said non-human organism or in the culture medium surrounding said non-human organism.

[36473] Accordingly, the present invention relates to a process for the production of isoleucine, which comprises
[36474] (a) increasing or generating one or more activities selected from the group consisting of membrane transport protein in a non-human organism or a part thereof, preferably a microorganism, a plant cell, a plant or a part thereof, as compared to a corresponding non-transformed wild type non-human organism or a part thereof; and
[36475] (b) growing the non-human organism or a part thereof under conditions which permit the production of isoleucine or a composition comprising isoleucine in said non-human organism or in the culture medium surrounding said non-human organism.

[36476] Accordingly, the present invention relates to a process for the production of isoleucine, which comprises
[36477] (a) increasing or generating one or more activities selected from the group consisting of isochorismate synthase in a non-human organism or a part thereof, preferably a microorganism, a plant cell, a plant or a part thereof, as compared to a corresponding non-transformed wild type non-human organism or a part thereof; and
[36478] (b) growing the non-human organism or a part thereof under conditions which permit the production of isoleucine or a composition comprising isoleucine in said non-human organism or in the culture medium surrounding said non-human organism.

[36479] Accordingly, the present invention relates to a process for the production of leucine, which comprises
[36480] (a) increasing or generating one or more activities selected from the group consisting of isochorismate synthase in a non-human organism or a part thereof, preferably a microorganism, a plant cell, a plant or a part thereof, as compared to a corresponding non-transformed wild type non-human organism or a part thereof; and
[36481] (b) growing the non-human organism or a part thereof under conditions which permit the production of leucine or a composition comprising leucine in said non-human organism or in the culture medium surrounding said non-human organism.

[36482] Accordingly, the present invention relates to a process for the production of valine, which comprises
[36483] (a) increasing or generating one or more activities selected from the group consisting of isochorismate synthase in a non-human organism or a part thereof, preferably a microorganism, a plant cell, a plant or a part thereof, as compared to a corresponding non-transformed wild type non-human organism or a part thereof; and
[36484] (b) growing the non-human organism or a part thereof under conditions which permit the production of valine or a composition comprising valine in said non-human organism or in the culture medium surrounding said non-human organism.

[36485] Accordingly, the present invention relates to a process for the production of isoleucine, which comprises
[36486] (a) increasing or generating one or more activities selected from the group consisting of zinc transporter in a non-human organism or a part thereof, preferably a microorganism, a plant cell, a plant or a part thereof, as compared to a corresponding non-transformed wild type non-human organism or a part thereof; and
[36487] (b) growing the non-human organism or a part thereof under conditions which permit the production of isoleucine or a composition comprising isoleucine in said non-human organism or in the culture medium surrounding said non-human organism.

[36488] Accordingly, the present invention relates to a process for the production of leucine, which comprises
[36489] (a) increasing or generating one or more activities selected from the group consisting of zinc transporter in a non-human organism or a part thereof, preferably a microorganism, a plant cell, a plant or a part thereof, as compared to a corresponding non-transformed wild type non-human organism or a part thereof; and
[36490] (b) growing the non-human organism or a part thereof under conditions which permit the production of leucine or a composition comprising leucine in said non-human organism or in the culture medium surrounding said non-human organism.

[36491] Accordingly, the present invention relates to a process for the production of isoleucine, which comprises
[36492] (a) increasing or generating one or more activities selected from the group consisting of major facilitator superfamily transporter protein in a non-human organism or a part thereof, preferably a microorganism, a plant cell, a plant or a part thereof, as compared to a corresponding non-transformed wild type non-human organism or a part thereof; and
[36493] (b) growing the non-human organism or a part thereof under conditions which permit the production of isoleucine or a composition comprising isoleucine in said non-human organism or in the culture medium surrounding said non-human organism.

[36494] Accordingly, the present invention relates to a process for the production of leucine, which comprises
[36495] (a) increasing or generating one or more activities selected from the group consisting of major facilitator superfamily transporter protein in a non-human organism or a part thereof, preferably a microorganism, a plant cell, a plant or a part thereof, as compared to a corresponding non-transformed wild type non-human organism or a part thereof; and
[36496] (b) growing the non-human organism or a part thereof under conditions which permit the production of leucine or a composition comprising leucine in said non-human organism or in the culture medium surrounding said non-human organism.

[36497] Accordingly, the present invention relates to a process for the production of valine, which comprises
[36498] (a) increasing or generating one or more activities selected from the group consisting of major facilitator superfamily transporter protein in a non-human organism or a part thereof, preferably a microorganism, a plant cell, a plant or a part thereof, as compared to a corresponding non-transformed wild type non-human organism or a part thereof; and
[36499] (b) growing the non-human organism or a part thereof under conditions which permit the production of valine or a composition comprising valine in said non-human organism or in the culture medium surrounding said non-human organism.

[36500] Accordingly, the present invention relates to a process for the production of leucine, which comprises
[36501] (a) increasing or generating one or more activities selected from the group consisting of DNA helicase IV in a non-human organism or a part thereof, preferably a microorganism, a plant cell, a plant or a part thereof, as compared to a corresponding non-transformed wild type non-human organism or a part thereof; and
[36502] (b) growing the non-human organism or a part thereof under conditions which permit the production of leucine or a composition comprising leucine in said non-human organism or in the culture medium surrounding said non-human organism.

[36503] Accordingly, the present invention relates to a process for the production of valine, which comprises
[36504] (a) increasing or generating one or more activities selected from the group consisting of methylglyoxal synthase in a non-human organism or a part thereof, preferably a microorganism, a plant cell, a plant or a part thereof, as compared to a corresponding non-transformed wild type non-human organism or a part thereof; and
[36505] (b) growing the non-human organism or a part thereof under conditions which permit the production of valine or a composition comprising valine in said non-human organism or in the culture medium surrounding said non-human organism.

[36506] Accordingly, the present invention relates to a process for the production of valine, which comprises
[36507] (a) increasing or generating one or more activities selected from the group consisting of phosphoanhydride phosphorylase in a non-human organism or a part thereof, preferably a microorganism, a plant cell, a plant or a part thereof, as compared to a corresponding non-transformed wild type non-human organism or a part thereof; and
[36508] (b) growing the non-human organism or a part thereof under conditions which permit the production of valine or a composition comprising valine in said non-human organism or in the culture medium surrounding said non-human organism.

[36509] Accordingly, the present invention relates to a process for the production of isoleucine, which comprises
[36510] (a) increasing or generating one or more activities selected from the group consisting of b1003-protein in a non-human organism or a part thereof, preferably a microorganism, a plant cell, a plant or a part thereof, as compared to a corresponding non-transformed wild type non-human organism or a part thereof; and
[36511] (b) growing the non-human organism or a part thereof under conditions which permit the production of isoleucine or a composition comprising isoleucine in said non-human organism or in the culture medium surrounding said non-human organism.

[36512] Accordingly, the present invention relates to a process for the production of leucine, which comprises
[36513] (a) increasing or generating one or more activities selected from the group consisting of b1003-protein in a non-human organism or a part thereof, preferably a microorganism, a plant cell, a plant or a part thereof, as compared to a corresponding non-transformed wild type non-human organism or a part thereof; and
[36514] (b) growing the non-human organism or a part thereof under conditions which permit the production of leucine or a composition comprising leucine in said non-human organism or in the culture medium surrounding said non-human organism.

[36515] Accordingly, the present invention relates to a process for the production of valine, which comprises
[36516] (a) increasing or generating one or more activities selected from the group consisting of b1003-protein in a non-human organism or a part thereof, preferably a microorganism, a plant cell, a plant or a part thereof, as compared to a corresponding non-transformed wild type non-human organism or a part thereof; and
[36517] (b) growing the non-human organism or a part thereof under conditions which permit the production of valine or a composition comprising valine in said non-human organism or in the culture medium surrounding said non-human organism.

[36518] Accordingly, the present invention relates to a process for the production of isoleucine, which comprises
[36519] (a) increasing or generating one or more activities selected from the group consisting of b1163-protein in a non-human organism or a part thereof, preferably a microorganism, a plant cell, a plant or a part thereof, as compared to a corresponding non-transformed wild type non-human organism or a part thereof; and
[36520] (b) growing the non-human organism or a part thereof under conditions which permit the production of isoleucine or a composition comprising isoleucine in said non-human organism or in the culture medium surrounding said non-human organism.

[36521] Accordingly, the present invention relates to a process for the production of leucine, which comprises
[36522] (a) increasing or generating one or more activities selected from the group consisting of b1163-protein in a non-human organism or a part thereof, preferably a microorganism, a plant cell, a plant or a part thereof, as compared to a corresponding non-transformed wild type non-human organism or a part thereof; and
[36523] (b) growing the non-human organism or a part thereof under conditions which permit the production of leucine or a composition comprising leucine in said non-human organism or in the culture medium surrounding said non-human organism.

[36524] Accordingly, the present invention relates to a process for the production of valine, which comprises
[36525] (a) increasing or generating one or more activities selected from the group consisting of b1163-protein in a non-human organism or a part thereof, preferably a microorganism, a plant cell, a plant or a part thereof, as compared to a corresponding non-transformed wild type non-human organism or a part thereof; and
[36526] (b) growing the non-human organism or a part thereof under conditions which permit the production of valine or a composition comprising valine in said non-human organism or in the culture medium surrounding said non-human organism.

[36527] Accordingly, the present invention relates to a process for the production of leucine, which comprises
[36528] (a) increasing or generating one or more activities selected from the group consisting of DNA polymerase in a non-human organism or a part thereof, preferably a microorganism, a plant cell, a plant or a part thereof, as compared to a corresponding non-transformed wild type non-human organism or a part thereof; and
[36529] (b) growing the non-human organism or a part thereof under conditions which permit the production of leucine or a composition comprising leucine in said non-human organism or in the culture medium surrounding said non-human organism.

[36530] Accordingly, the present invention relates to a process for the production of valine, which comprises
[36531] (a) increasing or generating one or more activities selected from the group consisting of DNA polymerase in a non-human organism or a part thereof, preferably a microorganism, a plant cell, a plant or a part thereof, as compared to a corresponding non-transformed wild type non-human organism or a part thereof; and
[36532] (b) growing the non-human organism or a part thereof under conditions which permit the production of valine or a composition comprising valine in said non-human organism or in the culture medium surrounding said non-human organism.

[36533] Accordingly, the present invention relates to a process for the production of isoleucine, which comprises
[36534] (a) increasing or generating one or more activities selected from the group consisting of membrane protein in a non-human organism or a part thereof, preferably a microorganism, a plant cell, a plant or a part thereof, as compared to a corresponding non-transformed wild type non-human organism or a part thereof; and
[36535] (b) growing the non-human organism or a part thereof under conditions which permit the production of isoleucine or a composition comprising isoleucine in said non-human organism or in the culture medium surrounding said non-human organism.

[36536] Accordingly, the present invention relates to a process for the production of leucine, which comprises
[36537] (a) increasing or generating one or more activities selected from the group consisting of membrane protein in a non-human organism or a part thereof, preferably a microorganism, a plant cell, a plant or a part thereof, as compared to a corresponding non-transformed wild type non-human organism or a part thereof; and
[36538] (b) growing the non-human organism or a part thereof under conditions which permit the production of leucine or a composition comprising leucine in said non-human organism or in the culture medium surrounding said non-human organism.

[36539] Accordingly, the present invention relates to a process for the production of valine, which comprises
[36540] (a) increasing or generating one or more activities selected from the group consisting of membrane protein in a non-human organism or a part thereof, preferably a microorganism, a plant cell, a plant or a part thereof, as compared to a corresponding non-transformed wild type non-human organism or a part thereof; and
[36541] (b) growing the non-human organism or a part thereof under conditions which permit the production of valine or a composition comprising valine in said non-human organism or in the culture medium surrounding said non-human organism.

[36542] Accordingly, the present invention relates to a process for the production of isoleucine, which comprises
[36543] (a) increasing or generating one or more activities selected from the group consisting of anthranilate synthase component II in a non-human organism or a part thereof, preferably a microorganism, a plant cell, a plant or a part thereof, as compared to a corresponding non-transformed wild type non-human organism or a part thereof; and
[36544] (b) growing the non-human organism or a part thereof under conditions which permit the production of isoleucine or a composition comprising isoleucine in said non-human organism or in the culture medium surrounding said non-human organism.

[36545] Accordingly, the present invention relates to a process for the production of leucine, which comprises
[36546] (a) increasing or generating one or more activities selected from the group consisting of anthranilate synthase component II in a non-human organism or a part thereof, preferably a microorganism, a plant cell, a plant or a part thereof, as compared to a corresponding non-transformed wild type non-human organism or a part thereof; and
[36547] (b) growing the non-human organism or a part thereof under conditions which permit the production of leucine or a composition comprising leucine in said non-human organism or in the culture medium surrounding said non-human organism.

[36548] Accordingly, the present invention relates to a process for the production of valine, which comprises
[36549] (a) increasing or generating one or more activities selected from the group consisting of anthranilate synthase component II in a non-human organism or a part thereof, preferably a microorganism, a plant cell, a plant or a part thereof, as compared to a corresponding non-transformed wild type non-human organism or a part thereof; and
[36550] (b) growing the non-human organism or a part thereof under conditions which permit the production of valine or a composition comprising valine in said non-human organism or in the culture medium surrounding said non-human organism.

[36551] Accordingly, the present invention relates to a process for the production of leucine, which comprises
[36552] (a) increasing or generating one or more activities selected from the group consisting of glutamine synthetase in a non-human organism or a part thereof, preferably a microorganism, a plant cell, a plant or a part thereof, as compared to a corresponding non-transformed wild type non-human organism or a part thereof; and
[36553] (b) growing the non-human organism or a part thereof under conditions which permit the production of leucine or a composition comprising leucine in said non-human organism or in the culture medium surrounding said non-human organism.

[36554] Accordingly, the present invention relates to a process for the production of valine, which comprises
[36555] (a) increasing or generating one or more activities selected from the group consisting of aldehyde dehydrogenase in a non-human organism or a part thereof, preferably a microorganism, a plant cell, a plant or a part thereof, as compared to a corresponding non-transformed wild type non-human organism or a part thereof; and
[36556] (b) growing the non-human organism or a part thereof under conditions which permit the production of valine or a composition comprising valine in said non-human organism or in the culture medium surrounding said non-human organism.

[36557] Accordingly, the present invention relates to a process for the production of valine, which comprises
[36558] (a) increasing or generating one or more activities selected from the group consisting of b1445-protein in a non-human organism or a part thereof, preferably a microorganism, a plant cell, a plant or a part thereof, as compared to a corresponding non-transformed wild type non-human organism or a part thereof; and
[36559] (b) growing the non-human organism or a part thereof under conditions which permit the production of valine or a composition comprising valine in said non-human organism or in the culture medium surrounding said non-human organism.

[36560] Accordingly, the present invention relates to a process for the production of valine, which comprises
[36561] (a) increasing or generating one or more activities selected from the group consisting of NADP-dependent malic enzyme in a non-human organism or a part thereof, preferably a microorganism, a plant cell, a plant or a part thereof, as compared to a corresponding non-transformed wild type non-human organism or a part thereof; and
[36562] (b) growing the non-human organism or a part thereof under conditions which permit the production of valine or a composition comprising valine in said non-human organism or in the culture medium surrounding said non-human organism.

[36563] Accordingly, the present invention relates to a process for the production of isoleucine, which comprises
[36564] (a) increasing or generating one or more activities selected from the group consisting of b1522-protein in a non-human organism or a part thereof, preferably a microorganism, a plant cell, a plant or a part thereof, as compared to a corresponding non-transformed wild type non-human organism or a part thereof; and
[36565] (b) growing the non-human organism or a part thereof under conditions which permit the production of isoleucine or a composition comprising isoleucine in said non-human organism or in the culture medium surrounding said non-human organism.

[36566] Accordingly, the present invention relates to a process for the production of leucine, which comprises
[36567] (a) increasing or generating one or more activities selected from the group consisting of b1522-protein in a non-human organism or a part thereof, preferably a microorganism, a plant cell, a plant or a part thereof, as compared to a corresponding non-transformed wild type non-human organism or a part thereof; and
[36568] (b) growing the non-human organism or a part thereof under conditions which permit the production of leucine or a composition comprising leucine in said non-human organism or in the culture medium surrounding said non-human organism.

[36569] Accordingly, the present invention relates to a process for the production of valine, which comprises
[36570] (a) increasing or generating one or more activities selected from the group consisting of b1522-protein in a non-human organism or a part thereof, preferably a microorganism, a plant cell, a plant or a part thereof, as compared to a corresponding non-transformed wild type non-human organism or a part thereof; and
[36571] (b) growing the non-human organism or a part thereof under conditions which permit the production of valine or a composition comprising valine in said non-human organism or in the culture medium surrounding said non-human organism.

[36572] Accordingly, the present invention relates to a process for the production of isoleucine, which comprises
[36573] (a) increasing or generating one or more activities selected from the group consisting of acid shock protein in a non-human organism or a part thereof, preferably a microorganism, a plant cell, a plant or a part thereof, as compared to a corresponding non-transformed wild type non-human organism or a part thereof; and
[36574] (b) growing the non-human organism or a part thereof under conditions which permit the production of isoleucine or a composition comprising isoleucine in said non-human organism or in the culture medium surrounding said non-human organism.

[36575] Accordingly, the present invention relates to a process for the production of leucine, which comprises
[36576] (a) increasing or generating one or more activities selected from the group consisting of acid shock protein in a non-human organism or a part thereof, preferably a microorganism, a plant cell, a plant or a part thereof, as compared to a corresponding non-transformed wild type non-human organism or a part thereof; and
[36577] (b) growing the non-human organism or a part thereof under conditions which permit the production of leucine or a composition comprising leucine in said non-human organism or in the culture medium surrounding said non-human organism.

[36578] Accordingly, the present invention relates to a process for the production of valine, which comprises
[36579] (a) increasing or generating one or more activities selected from the group consisting of acid shock protein in a non-human organism or a part thereof, preferably a microorganism, a plant cell, a plant or a part thereof, as compared to a corresponding non-transformed wild type non-human organism or a part thereof; and
[36580] (b) growing the non-human organism or a part thereof under conditions which permit the production of valine or a composition comprising valine in said non-human organism or in the culture medium surrounding said non-human organism.

[36581] Accordingly, the present invention relates to a process for the production of valine, which comprises
[36582] (a) increasing or generating one or more activities selected from the group consisting of transport protein in a non-human organism or a part thereof, preferably a microorganism, a plant cell, a plant or a part thereof, as compared to a corresponding non-transformed wild type non-human organism or a part thereof; and
[36583] (b) growing the non-human organism or a part thereof under conditions which permit the production of valine or a composition comprising valine in said non-human organism or in the culture medium surrounding said non-human organism.

[36584] Accordingly, the present invention relates to a process for the production of valine, which comprises
[36585] (a) increasing or generating one or more activities selected from the group consisting of b1670-protein in a non-human organism or a part thereof, preferably a microorganism, a plant cell, a plant or a part thereof, as compared to a corresponding non-transformed wild type non-human organism or a part thereof; and
[36586] (b) growing the non-human organism or a part thereof under conditions which permit the production of valine or a composition comprising valine in said non-human organism or in the culture medium surrounding said non-human organism.

[36587] Accordingly, the present invention relates to a process for the production of valine, which comprises
[36588] (a) increasing or generating one or more activities selected from the group consisting of b1672-protein in a non-human organism or a part thereof, preferably a microorganism, a plant cell, a plant or a part thereof, as compared to a corresponding non-transformed wild type non-human organism or a part thereof; and
[36589] (b) growing the non-human organism or a part thereof under conditions which permit the production of valine or a composition comprising valine in said non-human organism or in the culture medium surrounding said non-human organism.

[36590] Accordingly, the present invention relates to a process for the production of leucine, which comprises
[36591] (a) increasing or generating one or more activities selected from the group consisting of pyruvate kinase in a non-human organism or a part thereof, preferably a microorganism, a plant cell, a plant or a part thereof, as compared to a corresponding non-transformed wild type non-human organism or a part thereof; and
[36592] (b) growing the non-human organism or a part thereof under conditions which permit the production of leucine or a composition comprising leucine in said non-human organism or in the culture medium surrounding said non-human organism.

[36593] Accordingly, the present invention relates to a process for the production of valine, which comprises
[36594] (a) increasing or generating one or more activities selected from the group consisting of cytochrome c-type protein in a non-human organism or a part thereof, preferably a microorganism, a plant cell, a plant or a part thereof, as compared to a corresponding non-transformed wild type non-human organism or a part thereof; and
[36595] (b) growing the non-human organism or a part thereof under conditions which permit the production of valine or a composition comprising valine in said non-human organism or in the culture medium surrounding said non-human organism.

[36596] Accordingly, the present invention relates to a process for the production of isoleucine, which comprises
[36597] (a) increasing or generating one or more activities selected from the group consisting of trehalose-phosphatase in a non-human organism or a part thereof, preferably a microorganism, a plant cell, a plant or a part thereof, as compared to a corresponding non-transformed wild type non-human organism or a part thereof; and
[36598] (b) growing the non-human organism or a part thereof under conditions which permit the production of isoleucine or a composition comprising isoleucine in said non-human organism or in the culture medium surrounding said non-human organism.

[36599] Accordingly, the present invention relates to a process for the production of leucine, which comprises
[36600] (a) increasing or generating one or more activities selected from the group consisting of trehalose-phosphatase in a non-human organism or a part thereof, preferably a microorganism, a plant cell, a plant or a part thereof, as compared to a corresponding non-transformed wild type non-human organism or a part thereof; and
[36601] (b) growing the non-human organism or a part thereof under conditions which permit the production of leucine or a composition comprising leucine in said non-human organism or in the culture medium surrounding said non-human organism.

[36602] Accordingly, the present invention relates to a process for the production of valine, which comprises
[36603] (a) increasing or generating one or more activities selected from the group consisting of trehalose-phosphatase in a non-human organism or a part thereof, preferably a microorganism, a plant cell, a plant or a part thereof, as compared to a corresponding non-transformed wild type non-human organism or a part thereof; and
[36604] (b) growing the non-human organism or a part thereof under conditions which permit the production of valine or a composition comprising valine in said non-human organism or in the culture medium surrounding said non-human organism.

[36605] Accordingly, the present invention relates to a process for the production of isoleucine, which comprises
[36606] (a) increasing or generating one or more activities selected from the group consisting of O-antigen chain length determinant in a non-human organism or a part thereof, preferably a microorganism, a plant cell, a plant or a part thereof, as compared to a corresponding non-transformed wild type non-human organism or a part thereof; and
[36607] (b) growing the non-human organism or a part thereof under conditions which permit the production of isoleucine or a composition comprising isoleucine in said non-human organism or in the culture medium surrounding said non-human organism.

[36608] Accordingly, the present invention relates to a process for the production of leucine, which comprises
[36609] (a) increasing or generating one or more activities selected from the group consisting of O-antigen chain length determinant in a non-human organism or a part thereof, preferably a microorganism, a plant cell, a plant or a part thereof, as compared to a corresponding non-transformed wild type non-human organism or a part thereof; and
[36610] (b) growing the non-human organism or a part thereof under conditions which permit the production of leucine or a composition comprising leucine in said non-human organism or in the culture medium surrounding said non-human organism.

[36611] Accordingly, the present invention relates to a process for the production of valine, which comprises
[36612] (a) increasing or generating one or more activities selected from the group consisting of GDP-mannose 4,6-dehydratase in a non-human organism or a part thereof, preferably a microorganism, a plant cell, a plant or a part thereof, as compared to a corresponding non-transformed wild type non-human organism or a part thereof; and
[36613] (b) growing the non-human organism or a part thereof under conditions which permit the production of valine or a composition comprising valine in said non-human organism or in the culture medium surrounding said non-human organism.

[36614] Accordingly, the present invention relates to a process for the production of isoleucine, which comprises
[36615] (a) increasing or generating one or more activities selected from the group consisting of transport protein in a non-human organism or a part thereof, preferably a microorganism, a plant cell, a plant or a part thereof, as compared to a corresponding non-transformed wild type non-human organism or a part thereof; and
[36616] (b) growing the non-human organism or a part thereof under conditions which permit the production of isoleucine or a composition comprising isoleucine in said non-human organism or in the culture medium surrounding said non-human organism.

[36617] Accordingly, the present invention relates to a process for the production of leucine, which comprises
[36618] (a) increasing or generating one or more activities selected from the group consisting of transport protein in a non-human organism or a part thereof, preferably a microorganism, a plant cell, a plant or a part thereof, as compared to a corresponding non-transformed wild type non-human organism or a part thereof; and
[36619] (b) growing the non-human organism or a part thereof under conditions which permit the production of leucine or a composition comprising leucine in said non-human organism or in the culture medium surrounding said non-human organism.

[36620] Accordingly, the present invention relates to a process for the production of valine, which comprises
[36621] (a) increasing or generating one or more activities selected from the group consisting of Nucleoside monophosphate phosphohydrolase in a non-human organism or a part thereof, preferably a microorganism, a plant cell, a plant or a part thereof, as compared to a corresponding non-transformed wild type non-human organism or a part thereof; and
[36622] (b) growing the non-human organism or a part thereof under conditions which permit the production of valine or a composition comprising valine in said non-human organism or in the culture medium surrounding said non-human organism.

[36623] Accordingly, the present invention relates to a process for the production of isoleucine, which comprises
[36624] (a) increasing or generating one or more activities selected from the group consisting of transcriptional regulator in a non-human organism or a part thereof, preferably a microorganism, a plant cell, a plant or a part thereof, as compared to a corresponding non-transformed wild type non-human organism or a part thereof; and
[36625] (b) growing the non-human organism or a part thereof under conditions which permit the production of isoleucine or a composition comprising isoleucine in said non-human organism or in the culture medium surrounding said non-human organism.

[36626] Accordingly, the present invention relates to a process for the production of valine, which comprises
[36627] (a) increasing or generating one or more activities selected from the group consisting of transcriptional regulator in a non-human organism or a part thereof, preferably a microorganism, a plant cell, a plant or a part thereof, as compared to a corresponding non-transformed wild type non-human organism or a part thereof; and
[36628] (b) growing the non-human organism or a part thereof under conditions which permit the production of valine or a composition comprising valine in said non-human organism or in the culture medium surrounding said non-human organism.

[36629] Accordingly, the present invention relates to a process for the production of isoleucine, which comprises
[36630] (a) increasing or generating one or more activities selected from the group consisting of b2513-protein in a non-human organism or a part thereof, preferably a microorganism, a plant cell, a plant or a part thereof, as compared to a corresponding non-transformed wild type non-human organism or a part thereof; and
[36631] (b) growing the non-human organism or a part thereof under conditions which permit the production of isoleucine or a composition comprising isoleucine in said non-human organism or in the culture medium surrounding said non-human organism.

[36632] Accordingly, the present invention relates to a process for the production of leucine, which comprises
[36633] (a) increasing or generating one or more activities selected from the group consisting of b2513-protein in a non-human organism or a part thereof, preferably a microorganism, a plant cell, a plant or a part thereof, as compared to a corresponding non-transformed wild type non-human organism or a part thereof; and
[36634] (b) growing the non-human organism or a part thereof under conditions which permit the production of leucine or a composition comprising leucine in said non-human organism or in the culture medium surrounding said non-human organism.

[36635] Accordingly, the present invention relates to a process for the production of valine, which comprises
[36636] (a) increasing or generating one or more activities selected from the group consisting of b2513-protein in a non-human organism or a part thereof, preferably a microorganism, a plant cell, a plant or a part thereof, as compared to a corresponding non-transformed wild type non-human organism or a part thereof; and
[36637] (b) growing the non-human organism or a part thereof under conditions which permit the production of valine or a composition comprising valine in said non-human organism or in the culture medium surrounding said non-human organism.

[36638] Accordingly, the present invention relates to a process for the production of isoleucine, which comprises
[36639] (a) increasing or generating one or more activities selected from the group consisting of serine hydroxymethyltransferase in a non-human organism or a part thereof, preferably a microorganism, a plant cell, a plant or a part thereof, as compared to a corresponding non-transformed wild type non-human organism or a part thereof; and
[36640] (b) growing the non-human organism or a part thereof under conditions which permit the production of isoleucine or a composition comprising isoleucine in said non-human organism or in the culture medium surrounding said non-human organism.

[36641] Accordingly, the present invention relates to a process for the production of valine, which comprises
[36642] (a) increasing or generating one or more activities selected from the group consisting of b2613-protein in a non-human organism or a part thereof, preferably a microorganism, a plant cell, a plant or a part thereof, as compared to a corresponding non-transformed wild type non-human organism or a part thereof; and
[36643] (b) growing the non-human organism or a part thereof under conditions which permit the production of valine or a composition comprising valine in said non-human organism or in the culture medium surrounding said non-human organism.

[36644] Accordingly, the present invention relates to a process for the production of isoleucine, which comprises
[36645] (a) increasing or generating one or more activities selected from the group consisting of transcriptional regulator in a non-human organism or a part thereof, preferably a microorganism, a plant cell, a plant or a part thereof, as compared to a corresponding non-transformed wild type non-human organism or a part thereof; and
[36646] (b) growing the non-human organism or a part thereof under conditions which permit the production of isoleucine or a composition comprising isoleucine in said non-human organism or in the culture medium surrounding said non-human organism.

[36647] Accordingly, the present invention relates to a process for the production of leucine, which comprises
[36648] (a) increasing or generating one or more activities selected from the group consisting of transcriptional regulator in a non-human organism or a part thereof, preferably a microorganism, a plant cell, a plant or a part thereof, as compared to a corresponding non-transformed wild type non-human organism or a part thereof; and
[36649] (b) growing the non-human organism or a part thereof under conditions which permit the production of leucine or a composition comprising leucine in said non-human organism or in the culture medium surrounding said non-human organism.

[36650] Accordingly, the present invention relates to a process for the production of isoleucine, which comprises
[36651] (a) increasing or generating one or more activities selected from the group consisting of b2673-protein in a non-human organism or a part thereof, preferably a microorganism, a plant cell, a plant or a part thereof, as compared to a corresponding non-transformed wild type non-human organism or a part thereof; and
[36652] (b) growing the non-human organism or a part thereof under conditions which permit the production of isoleucine or a composition comprising isoleucine in said non-human organism or in the culture medium surrounding said non-human organism.

[36653] Accordingly, the present invention relates to a process for the production of isoleucine, which comprises
[36654] (a) increasing or generating one or more activities selected from the group consisting of murein transglycosylase in a non-human organism or a part thereof, preferably a microorganism, a plant cell, a plant or a part thereof, as compared to a corresponding non-transformed wild type non-human organism or a part thereof; and
[36655] (b) growing the non-human organism or a part thereof under conditions which permit the production of isoleucine or a composition comprising isoleucine in said non-human organism or in the culture medium surrounding said non-human organism.

[36656] Accordingly, the present invention relates to a process for the production of leucine, which comprises
[36657] (a) increasing or generating one or more activities selected from the group consisting of murein transglycosylase in a non-human organism or a part thereof, preferably a microorganism, a plant cell, a plant or a part thereof, as compared to a corresponding non-transformed wild type non-human organism or a part thereof; and
[36658] (b) growing the non-human organism or a part thereof under conditions which permit the production of leucine or a composition comprising leucine in said non-human organism or in the culture medium surrounding said non-human organism.

[36659] Accordingly, the present invention relates to a process for the production of valine, which comprises
[36660] (a) increasing or generating one or more activities selected from the group consisting of murein transglycosylase in a non-human organism or a part thereof, preferably a microorganism, a plant cell, a plant or a part thereof, as compared to a corresponding non-transformed wild type non-human organism or a part thereof; and
[36661] (b) growing the non-human organism or a part thereof under conditions which permit the production of valine or a composition comprising valine in said non-human organism or in the culture medium surrounding said non-human organism.

[36662] Accordingly, the present invention relates to a process for the production of valine, which comprises
[36663] (a) increasing or generating one or more activities selected from the group consisting of transcriptional regulator in a non-human organism or a part thereof, preferably a microorganism, a plant cell, a plant or a part thereof, as compared to a corresponding non-transformed wild type non-human organism or a part thereof; and
[36664] (b) growing the non-human organism or a part thereof under conditions which permit the production of valine or a composition comprising valine in said non-human organism or in the culture medium surrounding said non-human organism.

[36665] Accordingly, the present invention relates to a process for the production of isoleucine, which comprises
[36666] (a) increasing or generating one or more activities selected from the group consisting of b2739-protein in a non-human organism or a part thereof, preferably a microorganism, a plant cell, a plant or a part thereof, as compared to a corresponding non-transformed wild type non-human organism or a part thereof; and
[36667] (b) growing the non-human organism or a part thereof under conditions which permit the production of isoleucine or a composition comprising isoleucine in said non-human organism or in the culture medium surrounding said non-human organism.

[36668] Accordingly, the present invention relates to a process for the production of leucine, which comprises
[36669] (a) increasing or generating one or more activities selected from the group consisting of b2739-protein in a non-human organism or a part thereof, preferably a microorganism, a plant cell, a plant or a part thereof, as compared to a corresponding non-transformed wild type non-human organism or a part thereof; and
[36670] (b) growing the non-human organism or a part thereof under conditions which permit the production of leucine or a composition comprising leucine in said non-human organism or in the culture medium surrounding said non-human organism.

[36671] Accordingly, the present invention relates to a process for the production of valine, which comprises
[36672] (a) increasing or generating one or more activities selected from the group consisting of b2739-protein in a non-human organism or a part thereof, preferably a microorganism, a plant cell, a plant or a part thereof, as compared to a corresponding non-transformed wild type non-human organism or a part thereof; and
[36673] (b) growing the non-human organism or a part thereof under conditions which permit the production of valine or a composition comprising valine in said non-human organism or in the culture medium surrounding said non-human organism.

[36674] Accordingly, the present invention relates to a process for the production of isoleucine, which comprises
[36675] (a) increasing or generating one or more activities selected from the group consisting of b2812-protein in a non-human organism or a part thereof, preferably a microorganism, a plant cell, a plant or a part thereof, as compared to a corresponding non-transformed wild type non-human organism or a part thereof; and
[36676] (b) growing the non-human organism or a part thereof under conditions which permit the production of isoleucine or a composition comprising isoleucine in said non-human organism or in the culture medium surrounding said non-human organism.

[36677] Accordingly, the present invention relates to a process for the production of leucine, which comprises
[36678] (a) increasing or generating one or more activities selected from the group consisting of b2812-protein in a non-human organism or a part thereof, preferably a microorganism, a plant cell, a plant or a part thereof, as compared to a corresponding non-transformed wild type non-human organism or a part thereof; and
[36679] (b) growing the non-human organism or a part thereof under conditions which permit the production of leucine or a composition comprising leucine in said non-human organism or in the culture medium surrounding said non-human organism.

[36680] Accordingly, the present invention relates to a process for the production of isoleucine, which comprises
[36681] (a) increasing or generating one or more activities selected from the group consisting of transcriptional regulator in a non-human organism or a part thereof, preferably a microorganism, a plant cell, a plant or a part thereof, as compared to a corresponding non-transformed wild type non-human organism or a part thereof; and
[36682] (b) growing the non-human organism or a part thereof under conditions which permit the production of isoleucine or a composition comprising isoleucine in said non-human organism or in the culture medium surrounding said non-human organism.

[36683] Accordingly, the present invention relates to a process for the production of leucine, which comprises
[36684] (a) increasing or generating one or more activities selected from the group consisting of transcriptional regulator in a non-human organism or a part thereof, preferably a microorganism, a plant cell, a plant or a part thereof, as compared to a corresponding non-transformed wild type non-human organism or a part thereof; and
[36685] (b) growing the non-human organism or a part thereof under conditions which permit the production of leucine or a composition comprising leucine in said non-human organism or in the culture medium surrounding said non-human organism.

[36686] Accordingly, the present invention relates to a process for the production of valine, which comprises
[36687] (a) increasing or generating one or more activities selected from the group consisting of transcriptional regulator in a non-human organism or a part thereof, preferably a microorganism, a plant cell, a plant or a part thereof, as compared to a corresponding non-transformed wild type non-human organism or a part thereof; and
[36688] (b) growing the non-human organism or a part thereof under conditions which permit the production of valine or a composition comprising valine in said non-human organism or in the culture medium surrounding said non-human organism.

[36689] Accordingly, the present invention relates to a process for the production of isoleucine, which comprises
[36690] (a) increasing or generating one or more activities selected from the group consisting of ribosephosphate isomerase, constitutive in a non-human organism or a part thereof, preferably a microorganism, a plant cell, a plant or a part thereof, as compared to a corresponding non-transformed wild type non-human organism or a part thereof; and
[36691] (b) growing the non-human organism or a part thereof under conditions which permit the production of isoleucine or a composition comprising isoleucine in said non-human organism or in the culture medium surrounding said non-human organism.

[36692] Accordingly, the present invention relates to a process for the production of valine, which comprises
[36693] (a) increasing or generating one or more activities selected from the group consisting of arginine exporter protein in a non-human organism or a part thereof, preferably a microorganism, a plant cell, a plant or a part thereof, as compared to a corresponding non-transformed wild type non-human organism or a part thereof; and
[36694] (b) growing the non-human organism or a part thereof under conditions which permit the production of valine or a composition comprising valine in said non-human organism or in the culture medium surrounding said non-human organism.

[36695] Accordingly, the present invention relates to a process for the production of isoleucine, which comprises
[36696] (a) increasing or generating one or more activities selected from the group consisting of glycoprotease in a non-human organism or a part thereof, preferably a microorganism, a plant cell, a plant or a part thereof, as compared to a corresponding non-transformed wild type non-human organism or a part thereof; and
[36697] (b) growing the non-human organism or a part thereof under conditions which permit the production of isoleucine or a composition comprising isoleucine in said non-human organism or in the culture medium surrounding said non-human organism.

[36698] Accordingly, the present invention relates to a process for the production of leucine, which comprises
[36699] (a) increasing or generating one or more activities selected from the group consisting of glycoprotease in a non-human organism or a part thereof, preferably a microorganism, a plant cell, a plant or a part thereof, as compared to a corresponding non-transformed wild type non-human organism or a part thereof; and
[36700] (b) growing the non-human organism or a part thereof under conditions which permit the production of leucine or a composition comprising leucine in said non-human organism or in the culture medium surrounding said non-human organism.

[36701] Accordingly, the present invention relates to a process for the production of valine, which comprises
[36702] (a) increasing or generating one or more activities selected from the group consisting of glycoprotease in a non-human organism or a part thereof, preferably a microorganism, a plant cell, a plant or a part thereof, as compared to a corresponding non-transformed wild type non-human organism or a part thereof; and
[36703] (b) growing the non-human organism or a part thereof under conditions which permit the production of valine or a composition comprising valine in said non-human organism or in the culture medium surrounding said non-human organism.

[36704] Accordingly, the present invention relates to a process for the production of isoleucine, which comprises
[36705] (a) increasing or generating one or more activities selected from the group consisting of b3083-protein in a non-human organism or a part thereof, preferably a microorganism, a plant cell, a plant or a part thereof, as compared to a corresponding non-transformed wild type non-human organism or a part thereof; and
[36706] (b) growing the non-human organism or a part thereof under conditions which permit the production of isoleucine or a composition comprising isoleucine in said non-human organism or in the culture medium surrounding said non-human organism.

[36707] Accordingly, the present invention relates to a process for the production of valine, which comprises
[36708] (a) increasing or generating one or more activities selected from the group consisting of b3083-protein in a non-human organism or a part thereof, preferably a microorganism, a plant cell, a plant or a part thereof, as compared to a corresponding non-transformed wild type non-human organism or a part thereof; and
[36709] (b) growing the non-human organism or a part thereof under conditions which permit the production of valine or a composition comprising valine in said non-human organism or in the culture medium surrounding said non-human organism.

[36710] Accordingly, the present invention relates to a process for the production of leucine, which comprises
[36711] (a) increasing or generating one or more activities selected from the group consisting of L-serine dehydratase in a non-human organism or a part thereof, preferably a microorganism, a plant cell, a plant or a part thereof, as compared to a corresponding non-transformed wild type non-human organism or a part thereof; and
[36712] (b) growing the non-human organism or a part thereof under conditions which permit the production of leucine or a composition comprising leucine in said non-human organism or in the culture medium surrounding said non-human organism.

[36713] Accordingly, the present invention relates to a process for the production of valine, which comprises
[36714] (a) increasing or generating one or more activities selected from the group consisting of threonine dehydratase in a non-human organism or a part thereof, preferably a microorganism, a plant cell, a plant or a part thereof, as compared to a corresponding non-transformed wild type non-human organism or a part thereof; and
[36715] (b) growing the non-human organism or a part thereof under conditions which permit the production of valine or a composition comprising valine in said non-human organism or in the culture medium surrounding said non-human organism.

[36716] Accordingly, the present invention relates to a process for the production of leucine, which comprises
[36717] (a) increasing or generating one or more activities selected from the group consisting of acetyl CoA carboxylase in a non-human organism or a part thereof, preferably a microorganism, a plant cell, a plant or a part thereof, as compared to a corresponding non-transformed wild type non-human organism or a part thereof; and
[36718] (b) growing the non-human organism or a part thereof under conditions which permit the production of leucine or a composition comprising leucine in said non-human organism or in the culture medium surrounding said non-human organism.

[36719] Accordingly, the present invention relates to a process for the production of valine, which comprises
[36720] (a) increasing or generating one or more activities selected from the group consisting of ABC transporter ATP-binding protein in a non-human organism or a part thereof, preferably a microorganism, a plant cell, a plant or a part thereof, as compared to a corresponding non-transformed wild type non-human organism or a part thereof; and
[36721] (b) growing the non-human organism or a part thereof under conditions which permit the production of valine or a composition comprising valine in said non-human organism or in the culture medium surrounding said non-human organism.

[36722] Accordingly, the present invention relates to a process for the production of isoleucine, which comprises
[36723] (a) increasing or generating one or more activities selected from the group consisting of glycogen synthase in a non-human organism or a part thereof, preferably a microorganism, a plant cell, a plant or a part thereof, as compared to a corresponding non-transformed wild type non-human organism or a part thereof; and
[36724] (b) growing the non-human organism or a part thereof under conditions which permit the production of isoleucine or a composition comprising isoleucine in said non-human organism or in the culture medium surrounding said non-human organism.

[36725] Accordingly, the present invention relates to a process for the production of leucine, which comprises
[36726] (a) increasing or generating one or more activities selected from the group consisting of glycogen synthase in a non-human organism or a part thereof, preferably a microorganism, a plant cell, a plant or a part thereof, as compared to a corresponding non-transformed wild type non-human organism or a part thereof; and
[36727] (b) growing the non-human organism or a part thereof under conditions which permit the production of leucine or a composition comprising leucine in said non-human organism or in the culture medium surrounding said non-human organism.

[36728] Accordingly, the present invention relates to a process for the production of valine, which comprises
[36729] (a) increasing or generating one or more activities selected from the group consisting of b3490-protein in a non-human organism or a part thereof, preferably a microorganism, a plant cell, a plant or a part thereof, as compared to a corresponding non-transformed wild type non-human organism or a part thereof; and
[36730] (b) growing the non-human organism or a part thereof under conditions which permit the production of valine or a composition comprising valine in said non-human organism or in the culture medium surrounding said non-human organism.

[36731] Accordingly, the present invention relates to a process for the production of isoleucine, which comprises
[36732] (a) increasing or generating one or more activities selected from the group consisting of valine-pyruvate transaminase in a non-human organism or a part thereof, preferably a microorganism, a plant cell, a plant or a part thereof, as compared to a corresponding non-transformed wild type non-human organism or a part thereof; and
[36733] (b) growing the non-human organism or a part thereof under conditions which permit the production of isoleucine or a composition comprising isoleucine in said non-human organism or in the culture medium surrounding said non-human organism.

[36734] Accordingly, the present invention relates to a process for the production of leucine, which comprises
[36735] (a) increasing or generating one or more activities selected from the group consisting of valine-pyruvate transaminase in a non-human organism or a part thereof, preferably a microorganism, a plant cell, a plant or a part thereof, as compared to a corresponding non-transformed wild type non-human organism or a part thereof; and
[36736] (b) growing the non-human organism or a part thereof under conditions which permit the production of leucine or a composition comprising leucine in said non-human organism or in the culture medium surrounding said non-human organism.

[36737] Accordingly, the present invention relates to a process for the production of isoleucine, which comprises
[36738] (a) increasing or generating one or more activities selected from the group consisting of phosphopantetheine adenylyltransferase in a non-human organism or a part thereof, preferably a microorganism, a plant cell, a plant or a part thereof, as compared to a corresponding non-transformed wild type non-human organism or a part thereof; and
[36739] (b) growing the non-human organism or a part thereof under conditions which permit the production of isoleucine or a composition comprising isoleucine in said non-human organism or in the culture medium surrounding said non-human organism.

[36740] Accordingly, the present invention relates to a process for the production of leucine, which comprises
[36741] (a) increasing or generating one or more activities selected from the group consisting of phosphopantetheine adenylyltransferase in a non-human organism or a part thereof, preferably a microorganism, a plant cell, a plant or a part thereof, as compared to a corresponding non-transformed wild type non-human organism or a part thereof; and
[36742] (b) growing the non-human organism or a part thereof under conditions which permit the production of leucine or a composition comprising leucine in said non-human organism or in the culture medium surrounding said non-human organism.

[36743] Accordingly, the present invention relates to a process for the production of valine, which comprises
[36744] (a) increasing or generating one or more activities selected from the group consisting of phosphopantetheine adenylyltransferase in a non-human organism or a part thereof, preferably a microorganism, a plant cell, a plant or a part thereof, as compared to a corresponding non-transformed wild type non-human organism or a part thereof; and
[36745] (b) growing the non-human organism or a part thereof under conditions which permit the production of valine or a composition comprising valine in said non-human organism or in the culture medium surrounding said non-human organism.

[36746] Accordingly, the present invention relates to a process for the production of leucine, which comprises
[36747] (a) increasing or generating one or more activities selected from the group consisting of acetolactate synthase in a non-human organism or a part thereof, preferably a microorganism, a plant cell, a plant or a part thereof, as compared to a corresponding non-transformed wild type non-human organism or a part thereof; and
[36748] (b) growing the non-human organism or a part thereof under conditions which permit the production of leucine or a composition comprising leucine in said non-human organism or in the culture medium surrounding said non-human organism.

[36749] Accordingly, the present invention relates to a process for the production of isoleucine, which comprises
[36750] (a) increasing or generating one or more activities selected from the group consisting of branched-chain amino-acid aminotransferase in a non-human organism or a part thereof, preferably a microorganism, a plant cell, a plant or a part thereof, as compared to a corresponding non-transformed wild type non-human organism or a part thereof; and
[36751] (b) growing the non-human organism or a part thereof under conditions which permit the production of isoleucine or a composition comprising isoleucine in said non-human organism or in the culture medium surrounding said non-human organism.

[36752] Accordingly, the present invention relates to a process for the production of isoleucine, which comprises
[36753] (a) increasing or generating one or more activities selected from the group consisting of dihydroxyacid dehydratase in a non-human organism or a part thereof, preferably a microorganism, a plant cell, a plant or a part thereof, as compared to a corresponding non-transformed wild type non-human organism or a part thereof; and
[36754] (b) growing the non-human organism or a part thereof under conditions which permit the production of isoleucine or a composition comprising isoleucine in said non-human organism or in the culture medium surrounding said non-human organism.

[36755] Accordingly, the present invention relates to a process for the production of leucine, which comprises
[36756] (a) increasing or generating one or more activities selected from the group consisting of dihydroxyacid dehydratase in a non-human organism or a part thereof, preferably a microorganism, a plant cell, a plant or a part thereof, as compared to a corresponding non-transformed wild type non-human organism or a part thereof; and
[36757] (b) growing the non-human organism or a part thereof under conditions which permit the production of leucine or a composition comprising leucine in said non-human organism or in the culture medium surrounding said non-human organism.

[36758] Accordingly, the present invention relates to a process for the production of leucine, which comprises
[36759] (a) increasing or generating one or more activities selected from the group consisting of dihydroxyacid dehydratase in a non-human organism or a part thereof, preferably a microorganism, a plant cell, a plant or a part thereof, as compared to a corresponding non-transformed wild type non-human organism or a part thereof; and
[36760] (b) growing the non-human organism or a part thereof under conditions which permit the production of leucine or a composition comprising leucine in said non-human organism or in the culture medium surrounding said non-human organism.

[36761] Accordingly, the present invention relates to a process for the production of valine, which comprises
[36762] (a) increasing or generating one or more activities selected from the group consisting of dihydroxyacid dehydratase in a non-human organism or a part thereof, preferably a microorganism, a plant cell, a plant or a part thereof, as compared to a corresponding non-transformed wild type non-human organism or a part thereof; and
[36763] (b) growing the non-human organism or a part thereof under conditions which permit the production of valine or a composition comprising valine in said non-human organism or in the culture medium surrounding said non-human organism.

[36764] Accordingly, the present invention relates to a process for the production of isoleucine, which comprises
[36765] (a) increasing or generating one or more activities selected from the group consisting of ketol-acid reductoisomerase in a non-human organism or a part thereof, preferably a microorganism, a plant cell, a plant or a part thereof, as compared to a corresponding non-transformed wild type non-human organism or a part thereof; and
[36766] (b) growing the non-human organism or a part thereof under conditions which permit the production of isoleucine or a composition comprising isoleucine in said non-human organism or in the culture medium surrounding said non-human organism.

[36767] Accordingly, the present invention relates to a process for the production of leucine, which comprises
[36768] (a) increasing or generating one or more activities selected from the group consisting of ketol-acid reductoisomerase in a non-human organism or a part thereof, preferably a microorganism, a plant cell, a plant or a part thereof, as compared to a corresponding non-transformed wild type non-human organism or a part thereof; and
[36769] (b) growing the non-human organism or a part thereof under conditions which permit the production of leucine or a composition comprising leucine in said non-human organism or in the culture medium surrounding said non-human organism.

[36770] Accordingly, the present invention relates to a process for the production of isoleucine, which comprises
[36771] (a) increasing or generating one or more activities selected from the group consisting of DNA helicase II in a non-human organism or a part thereof, preferably a microorganism, a plant cell, a plant or a part thereof, as compared to a corresponding non-transformed wild type non-human organism or a part thereof; and
[36772] (b) growing the non-human organism or a part thereof under conditions which permit the production of isoleucine or a composition comprising isoleucine in said non-human organism or in the culture medium surrounding said non-human organism.

[36773] Accordingly, the present invention relates to a process for the production of leucine, which comprises
[36774] (a) increasing or generating one or more activities selected from the group consisting of DNA helicase II in a non-human organism or a part thereof, preferably a microorganism, a plant cell, a plant or a part thereof, as compared to a corresponding non-transformed wild type non-human organism or a part thereof; and
[36775] (b) growing the non-human organism or a part thereof under conditions which permit the production of leucine or a composition comprising leucine in said non-human organism or in the culture medium surrounding said non-human organism.

[36776] Accordingly, the present invention relates to a process for the production of valine, which comprises
[36777] (a) increasing or generating one or more activities selected from the group consisting of DNA helicase II in a non-human organism or a part thereof, preferably a microorganism, a plant cell, a plant or a part thereof, as compared to a corresponding non-transformed wild type non-human organism or a part thereof; and
[36778] (b) growing the non-human organism or a part thereof under conditions which permit the production of valine or a composition comprising valine in said non-human organism or in the culture medium surrounding said non-human organism.

[36779] Accordingly, the present invention relates to a process for the production of leucine, which comprises
[36780] (a) increasing or generating one or more activities selected from the group consisting of protoporphyrin oxidase in a non-human organism or a part thereof, preferably a microorganism, a plant cell, a plant or a part thereof, as compared to a corresponding non-transformed wild type non-human organism or a part thereof; and
[36781] (b) growing the non-human organism or a part thereof under conditions which permit the production of leucine or a composition comprising leucine in said non-human organism or in the culture medium surrounding said non-human organism.

[36782] Accordingly, the present invention relates to a process for the production of leucine, which comprises
[36783] (a) increasing or generating one or more activities selected from the group consisting of superoxide dismutase in a non-human organism or a part thereof, preferably a microorganism, a plant cell, a plant or a part thereof, as compared to a corresponding non-transformed wild type non-human organism or a part thereof; and
[36784] (b) growing the non-human organism or a part thereof under conditions which permit the production of leucine or a composition comprising leucine in said non-human organism or in the culture medium surrounding said non-human organism.

[36785] Accordingly, the present invention relates to a process for the production of isoleucine, which comprises
[36786] (a) increasing or generating one or more activities selected from the group consisting of b3989-protein in a non-human organism or a part thereof, preferably a microorganism, a plant cell, a plant or a part thereof, as compared to a corresponding non-transformed wild type non-human organism or a part thereof; and
[36787] (b) growing the non-human organism or a part thereof under conditions which permit the production of isoleucine or a composition comprising isoleucine in said non-human organism or in the culture medium surrounding said non-human organism.

[36788] Accordingly, the present invention relates to a process for the production of leucine, which comprises
[36789] (a) increasing or generating one or more activities selected from the group consisting of b3989-protein in a non-human organism or a part thereof, preferably a microorganism, a plant cell, a plant or a part thereof, as compared to a corresponding non-transformed wild type non-human organism or a part thereof; and
[36790] (b) growing the non-human organism or a part thereof under conditions which permit the production of leucine or a composition comprising leucine in said non-human organism or in the culture medium surrounding said non-human organism.

[36791] Accordingly, the present invention relates to a process for the production of valine, which comprises
[36792] (a) increasing or generating one or more activities selected from the group consisting of b3989-protein in a non-human organism or a part thereof, preferably a microorganism, a plant cell, a plant or a part thereof, as compared to a corresponding non-transformed wild type non-human organism or a part thereof; and
[36793] (b) growing the non-human organism or a part thereof under conditions which permit the production of valine or a composition comprising valine in said non-human organism or in the culture medium surrounding said non-human organism.

[36794] Accordingly, the present invention relates to a process for the production of isoleucine, which comprises
[36795] (a) increasing or generating one or more activities selected from the group consisting of b4029-protein in a non-human organism or a part thereof, preferably a microorganism, a plant cell, a plant or a part thereof, as compared to a corresponding non-transformed wild type non-human organism or a part thereof; and
[36796] (b) growing the non-human organism or a part thereof under conditions which permit the production of isoleucine or a composition comprising isoleucine in said non-human organism or in the culture medium surrounding said non-human organism.

[36797] Accordingly, the present invention relates to a process for the production of leucine, which comprises
[36798] (a) increasing or generating one or more activities selected from the group consisting of b4029-protein in a non-human organism or a part thereof, preferably a microorganism, a plant cell, a plant or a part thereof, as compared to a corresponding non-transformed wild type non-human organism or a part thereof; and
[36799] (b) growing the non-human organism or a part thereof under conditions which permit the production of leucine or a composition comprising leucine in said non-human organism or in the culture medium surrounding said non-human organism.

[36800] Accordingly, the present invention relates to a process for the production of valine, which comprises
[36801] (a) increasing or generating one or more activities selected from the group consisting of b4029-protein in a non-human organism or a part thereof, preferably a microorganism, a plant cell, a plant or a part thereof, as compared to a corresponding non-transformed wild type non-human organism or a part thereof; and
[36802] (b) growing the non-human organism or a part thereof under conditions which permit the production of valine or a composition comprising valine in said non-human organism or in the culture medium surrounding said non-human organism.

[36803] Accordingly, the present invention relates to a process for the production of isoleucine, which comprises
[36804] (a) increasing or generating one or more activities selected from the group consisting of b4050-protein in a non-human organism or a part thereof, preferably a microorganism, a plant cell, a plant or a part thereof, as compared to a corresponding non-transformed wild type non-human organism or a part thereof; and
[36805] (b) growing the non-human organism or a part thereof under conditions which permit the production of isoleucine or a composition comprising isoleucine in said non-human organism or in the culture medium surrounding said non-human organism.

[36806] Accordingly, the present invention relates to a process for the production of isoleucine, which comprises
[36807] (a) increasing or generating one or more activities selected from the group consisting of b4056-protein in a non-human organism or a part thereof, preferably a microorganism, a plant cell, a plant or a part thereof, as compared to a corresponding non-transformed wild type non-human organism or a part thereof; and
[36808] (b) growing the non-human organism or a part thereof under conditions which permit the production of isoleucine or a composition comprising isoleucine in said non-human organism or in the culture medium surrounding said non-human organism.

[36809] Accordingly, the present invention relates to a process for the production of leucine, which comprises
[36810] (a) increasing or generating one or more activities selected from the group consisting of b4056-protein in a non-human organism or a part thereof, preferably a microorganism, a plant cell, a plant or a part thereof, as compared to a corresponding non-transformed wild type non-human organism or a part thereof; and
[36811] (b) growing the non-human organism or a part thereof under conditions which permit the production of leucine or a composition comprising leucine in said non-human organism or in the culture medium surrounding said non-human organism.

[36812] Accordingly, the present invention relates to a process for the production of isoleucine, which comprises
[36813] (a) increasing or generating one or more activities selected from the group consisting of acetyltransferase in a non-human organism or a part thereof, preferably a microorganism, a plant cell, a plant or a part thereof, as compared to a corresponding non-transformed wild type non-human organism or a part thereof; and
[36814] (b) growing the non-human organism or a part thereof under conditions which permit the production of isoleucine or a composition comprising isoleucine in said non-human organism or in the culture medium surrounding said non-human organism.

[36815] Accordingly, the present invention relates to a process for the production of leucine, which comprises
[36816] (a) increasing or generating one or more activities selected from the group consisting of acetyltransferase in a non-human organism or a part thereof, preferably a microorganism, a plant cell, a plant or a part thereof, as compared to a corresponding non-transformed wild type non-human organism or a part thereof; and
[36817] (b) growing the non-human organism or a part thereof under conditions which permit the production of leucine or a composition comprising leucine in said non-human organism or in the culture medium surrounding said non-human organism.

[36818] Accordingly, the present invention relates to a process for the production of valine, which comprises
[36819] (a) increasing or generating one or more activities selected from the group consisting of acetyltransferase in a non-human organism or a part thereof, preferably a microorganism, a plant cell, a plant or a part thereof, as compared to a corresponding non-transformed wild type non-human organism or a part thereof; and
[36820] (b) growing the non-human organism or a part thereof under conditions which permit the production of valine or a composition comprising valine in said non-human organism or in the culture medium surrounding said non-human organism.

[36821] Accordingly, the present invention relates to a process for the production of valine, which comprises
[36822] (a) increasing or generating one or more activities selected from the group consisting of b4263-protein in a non-human organism or a part thereof, preferably a microorganism, a plant cell, a plant or a part thereof, as compared to a corresponding non-transformed wild type non-human organism or a part thereof; and
[36823] (b) growing the non-human organism or a part thereof under conditions which permit the production of valine or a composition comprising valine in said non-human organism or in the culture medium surrounding said non-human organism.

[36824] Accordingly, the present invention relates to a process for the production of isoleucine, which comprises
[36825] (a) increasing or generating one or more activities selected from the group consisting of gluconate transport system permease 3 in a non-human organism or a part thereof, preferably a microorganism, a plant cell, a plant or a part thereof, as compared to a corresponding non-transformed wild type non-human organism or a part thereof; and
[36826] (b) growing the non-human organism or a part thereof under conditions which permit the production of isoleucine or a composition comprising isoleucine in said non-human organism or in the culture medium surrounding said non-human organism.

[36827] Accordingly, the present invention relates to a process for the production of leucine, which comprises
[36828] (a) increasing or generating one or more activities selected from the group consisting of gluconate transport system permease 3 in a non-human organism or a part thereof, preferably a microorganism, a plant cell, a plant or a part thereof, as compared to a corresponding non-transformed wild type non-human organism or a part thereof; and
[36829] (b) growing the non-human organism or a part thereof under conditions which permit the production of leucine or a composition comprising leucine in said non-human organism or in the culture medium surrounding said non-human organism.

[36830] Accordingly, the present invention relates to a process for the production of valine, which comprises
[36831] (a) increasing or generating one or more activities selected from the group consisting of gluconate transport system permease 3 in a non-human organism or a part thereof, preferably a microorganism, a plant cell, a plant or a part thereof, as compared to a corresponding non-transformed wild type non-human organism or a part thereof; and
[36832] (b) growing the non-human organism or a part thereof under conditions which permit the production of valine or a composition comprising valine in said non-human organism or in the culture medium surrounding said non-human organism.

[36833] Accordingly, the present invention relates to a process for the production of isoleucine, which comprises
[36834] (a) increasing or generating one or more activities selected from the group consisting of purine-nucleoside phosphorylase in a non-human organism or a part thereof, preferably a microorganism, a plant cell, a plant or a part thereof, as compared to a corresponding non-transformed wild type non-human organism or a part thereof; and
[36835] (b) growing the non-human organism or a part thereof under conditions which permit the production of isoleucine or a composition comprising isoleucine in said non-human organism or in the culture medium surrounding said non-human organism.

[36836] Accordingly, the present invention relates to a process for the production of isoleucine, which comprises
[36837] (a) increasing or generating one or more activities selected from the group consisting of thioredoxin in a non-human organism or a part thereof, preferably a microorganism, a plant cell, a plant or a part thereof, as compared to a corresponding non-transformed wild type non-human organism or a part thereof; and
[36838] (b) growing the non-human organism or a part thereof under conditions which permit the production of isoleucine or a composition comprising isoleucine in said non-human organism or in the culture medium surrounding said non-human organism.

[36839] Accordingly, the present invention relates to a process for the production of leucine, which comprises
[36840] (a) increasing or generating one or more activities selected from the group consisting of thioredoxin in a non-human organism or a part thereof, preferably a microorganism, a plant cell, a plant or a part thereof, as compared to a corresponding non-transformed wild type non-human organism or a part thereof; and
[36841] (b) growing the non-human organism or a part thereof under conditions which permit the production of leucine or a composition comprising leucine in said non-human organism or in the culture medium surrounding said non-human organism.

[36842] Accordingly, the present invention relates to a process for the production of valine, which comprises
[36843] (a) increasing or generating one or more activities selected from the group consisting of thioredoxin in a non-human organism or a part thereof, preferably a microorganism, a plant cell, a plant or a part thereof, as compared to a corresponding non-transformed wild type non-human organism or a part thereof; and
[36844] (b) growing the non-human organism or a part thereof under conditions which permit the production of valine or a composition comprising valine in said non-human organism or in the culture medium surrounding said non-human organism.

[36845] Accordingly, the present invention relates to a process for the production of isoleucine, which comprises
[36846] (a) increasing or generating one or more activities selected from the group consisting of GM02LC11114-protein in a non-human organism or a part thereof, preferably a microorganism, a plant cell, a plant or a part thereof, as compared to a corresponding non-transformed wild type non-human organism or a part thereof; and
[36847] (b) growing the non-human organism or a part thereof under conditions which permit the production of isoleucine or a composition comprising isoleucine in said non-human organism or in the culture medium surrounding said non-human organism.

[36848] Accordingly, the present invention relates to a process for the production of leucine, which comprises
[36849] (a) increasing or generating one or more activities selected from the group consisting of GM02LC11114-protein in a non-human organism or a part thereof, preferably a microorganism, a plant cell, a plant or a part thereof, as compared to a corresponding non-transformed wild type non-human organism or a part thereof; and
[36850] (b) growing the non-human organism or a part thereof under conditions which permit the production of leucine or a composition comprising leucine in said non-human organism or in the culture medium surrounding said non-human organism.

[36851] Accordingly, the present invention relates to a process for the production of isoleucine, which comprises
[36852] (a) increasing or generating one or more activities selected from the group consisting of glutaredoxin in a non-human organism or a part thereof, preferably a microorganism, a plant cell, a plant or a part thereof, as compared to a corresponding non-transformed wild type non-human organism or a part thereof; and
[36853] (b) growing the non-human organism or a part thereof under conditions which permit the production of isoleucine or a composition comprising isoleucine in said non-human organism or in the culture medium surrounding said non-human organism.

[36854] Accordingly, the present invention relates to a process for the production of leucine, which comprises
[36855] (a) increasing or generating one or more activities selected from the group consisting of glutaredoxin in a non-human organism or a part thereof, preferably a microorganism, a plant cell, a plant or a part thereof, as compared to a corresponding non-transformed wild type non-human organism or a part thereof; and
[36856] (b) growing the non-human organism or a part thereof under conditions which permit the production of leucine or a composition comprising leucine in said non-human organism or in the culture medium surrounding said non-human organism.

[36857] Accordingly, the present invention relates to a process for the production of valine, which comprises
[36858] (a) increasing or generating one or more activities selected from the group consisting of glutaredoxin in a non-human organism or a part thereof, preferably a microorganism, a plant cell, a plant or a part thereof, as compared to a corresponding non-transformed wild type non-human organism or a part thereof; and
[36859] (b) growing the non-human organism or a part thereof under conditions which permit the production of valine or a composition comprising valine in said non-human organism or in the culture medium surrounding said non-human organism.

[36860] Accordingly, the present invention relates to a process for the production of isoleucine, which comprises
[36861] (a) increasing or generating one or more activities selected from the group consisting of histone H2A in a non-human organism or a part thereof, preferably a microorganism, a plant cell, a plant or a part thereof, as compared to a corresponding non-transformed wild type non-human organism or a part thereof; and
[36862] (b) growing the non-human organism or a part thereof under conditions which permit the production of isoleucine or a composition comprising isoleucine in said non-human organism or in the culture medium surrounding said non-human organism.

[36863] Accordingly, the present invention relates to a process for the production of leucine, which comprises
[36864] (a) increasing or generating one or more activities selected from the group consisting of histone H2A in a non-human organism or a part thereof, preferably a microorganism, a plant cell, a plant or a part thereof, as compared to a corresponding non-transformed wild type non-human organism or a part thereof; and
[36865] (b) growing the non-human organism or a part thereof under conditions which permit the production of leucine or a composition comprising leucine in said non-human organism or in the culture medium surrounding said non-human organism.

[36866] Accordingly, the present invention relates to a process for the production of valine, which comprises
[36867] (a) increasing or generating one or more activities selected from the group consisting of histone H2A in a non-human organism or a part thereof, preferably a microorganism, a plant cell, a plant or a part thereof, as compared to a corresponding non-transformed wild type non-human organism or a part thereof; and
[36868] (b) growing the non-human organism or a part thereof under conditions which permit the production of valine or a composition comprising valine in said non-human organism or in the culture medium surrounding said non-human organism.

[36869] Accordingly, the present invention relates to a process for the production of valine, which comprises
[36870] (a) increasing or generating one or more activities selected from the group consisting of vacuolar ATPase subunit in a non-human organism or a part thereof, preferably a microorganism, a plant cell, a plant or a part thereof, as compared to a corresponding non-transformed wild type non-human organism or a part thereof; and
[36871] (b) growing the non-human organism or a part thereof under conditions which permit the production of valine or a composition comprising valine in said non-human organism or in the culture medium surrounding said non-human organism.

[36872] Accordingly, the present invention relates to a process for the production of isoleucine, which comprises
[36873] (a) increasing or generating one or more activities selected from the group consisting of RNA binding protein in a non-human organism or a part thereof, preferably a microorganism, a plant cell, a plant or a part thereof, as compared to a corresponding non-transformed wild type non-human organism or a part thereof; and
[36874] (b) growing the non-human organism or a part thereof under conditions which permit the production of isoleucine or a composition comprising isoleucine in said non-human organism or in the culture medium surrounding said non-human organism.

[36875] Accordingly, the present invention relates to a process for the production of leucine, which comprises
[36876] (a) increasing or generating one or more activities selected from the group consisting of RNA binding protein in a non-human organism or a part thereof, preferably a microorganism, a plant cell, a plant or a part thereof, as compared to a corresponding non-transformed wild type non-human organism or a part thereof; and
[36877] (b) growing the non-human organism or a part thereof under conditions which permit the production of leucine or a composition comprising leucine in said non-human organism or in the culture medium surrounding said non-human organism.

[36878] Accordingly, the present invention relates to a process for the production of valine, which comprises
[36879] (a) increasing or generating one or more activities selected from the group consisting of RNA binding protein in a non-human organism or a part thereof, preferably a microorganism, a plant cell, a plant or a part thereof, as compared to a corresponding non-transformed wild type non-human organism or a part thereof; and
[36880] (b) growing the non-human organism or a part thereof under conditions which permit the production of valine or a composition comprising valine in said non-human organism or in the culture medium surrounding said non-human organism.

[36881] Accordingly, the present invention relates to a process for the production of isoleucine, which comprises
[36882] (a) increasing or generating one or more activities selected from the group consisting of transcription factor in a non-human organism or a part thereof, preferably a microorganism, a plant cell, a plant or a part thereof, as compared to a corresponding non-transformed wild type non-human organism or a part thereof; and
[36883] (b) growing the non-human organism or a part thereof under conditions which permit the production of isoleucine or a composition comprising isoleucine in said non-human organism or in the culture medium surrounding said non-human organism.

[36884] Accordingly, the present invention relates to a process for the production of leucine, which comprises
[36885] (a) increasing or generating one or more activities selected from the group consisting of transcription factor in a non-human organism or a part thereof, preferably a microorganism, a plant cell, a plant or a part thereof, as compared to a corresponding non-transformed wild type non-human organism or a part thereof; and
[36886] (b) growing the non-human organism or a part thereof under conditions which permit the production of leucine or a composition comprising leucine in said non-human organism or in the culture medium surrounding said non-human organism.

[36887] Accordingly, the present invention relates to a process for the production of valine, which comprises
[36888] (a) increasing or generating one or more activities selected from the group consisting of transcription factor in a non-human organism or a part thereof, preferably a microorganism, a plant cell, a plant or a part thereof, as compared to a corresponding non-transformed wild type non-human organism or a part thereof; and
[36889] (b) growing the non-human organism or a part thereof under conditions which permit the production of valine or a composition comprising valine in said non-human organism or in the culture medium surrounding said non-human organism.

[36890] Accordingly, the present invention relates to a process for the production of isoleucine, which comprises
[36891] (a) increasing or generating one or more activities selected from the group consisting of cyclin D in a non-human organism or a part thereof, preferably a microorganism, a plant cell, a plant or a part thereof, as compared to a corresponding non-transformed wild type non-human organism or a part thereof; and
[36892] (b) growing the non-human organism or a part thereof under conditions which permit the production of isoleucine or a composition comprising isoleucine in said non-human organism or in the culture medium surrounding said non-human organism.

[36893] Accordingly, the present invention relates to a process for the production of leucine, which comprises
[36894] (a) increasing or generating one or more activities selected from the group consisting of cyclin D in a non-human organism or a part thereof, preferably a microorganism, a plant cell, a plant or a part thereof, as compared to a corresponding non-transformed wild type non-human organism or a part thereof; and
[36895] (b) growing the non-human organism or a part thereof under conditions which permit the production of leucine or a composition comprising leucine in said non-human organism or in the culture medium surrounding said non-human organism.

[36896] Accordingly, the present invention relates to a process for the production of valine, which comprises
[36897] (a) increasing or generating one or more activities selected from the group consisting of cyclin D in a non-human organism or a part thereof, preferably a microorganism, a plant cell, a plant or a part thereof, as compared to a corresponding non-transformed wild type non-human organism or a part thereof; and
[36898] (b) growing the non-human organism or a part thereof under conditions which permit the production of valine or a composition comprising valine in said non-human organism or in the culture medium surrounding said non-human organism.

[36899] Accordingly, the present invention relates to a process for the production of leucine, which comprises
[36900] (a) increasing or generating one or more activities selected from the group consisting of GM02LC5744-protein in a non-human organism or a part thereof, preferably a microorganism, a plant cell, a plant or a part thereof, as compared to a corresponding non-transformed wild type non-human organism or a part thereof; and
[36901] (b) growing the non-human organism or a part thereof under conditions which permit the production of leucine or a composition comprising leucine in said non-human organism or in the culture medium surrounding said non-human organism.

[36902] Accordingly, the present invention relates to a process for the production of valine, which comprises
[36903] (a) increasing or generating one or more activities selected from the group consisting of agmatinase in a non-human organism or a part thereof, preferably a microorganism, a plant cell, a plant or a part thereof, as compared to a corresponding non-transformed wild type non-human organism or a part thereof; and
[36904] (b) growing the non-human organism or a part thereof under conditions which permit the production of valine or a composition comprising valine in said non-human organism or in the culture medium surrounding said non-human organism.

[36905] Accordingly, the present invention relates to a process for the production of valine, which comprises
[36906] (a) increasing or generating one or more activities selected from the group consisting of ABC transporter ATP binding component in a non-human organism or a part thereof, preferably a microorganism, a plant cell, a plant or a part thereof, as compared to a corresponding non-transformed wild type non-human organism or a part thereof; and
[36907] (b) growing the non-human organism or a part thereof under conditions which permit the production of valine or a composition comprising valine in said non-human organism or in the culture medium surrounding said non-human organism.

[36908] Accordingly, the present invention relates to a process for the production of isoleucine, which comprises
[36909] (a) increasing or generating one or more activities selected from the group consisting of flavodoxin in a non-human organism or a part thereof, preferably a microorganism, a plant cell, a plant or a part thereof, as compared to a corresponding non-transformed wild type non-human organism or a part thereof; and
[36910] (b) growing the non-human organism or a part thereof under conditions which permit the production of isoleucine or a composition comprising isoleucine in said non-human organism or in the culture medium surrounding said non-human organism.

[36911] Accordingly, the present invention relates to a process for the production of leucine, which comprises
[36912] (a) increasing or generating one or more activities selected from the group consisting of flavodoxin in a non-human organism or a part thereof, preferably a microorganism, a plant cell, a plant or a part thereof, as compared to a corresponding non-transformed wild type non-human organism or a part thereof; and
[36913] (b) growing the non-human organism or a part thereof under conditions which permit the production of leucine or a composition comprising leucine in said non-human organism or in the culture medium surrounding said non-human organism.

[36914] Accordingly, the present invention relates to a process for the production of isoleucine, which comprises
[36915] (a) increasing or generating one or more activities selected from the group consisting of polyphosphate kinase in a non-human organism or a part thereof, preferably a microorganism, a plant cell, a plant or a part thereof, as compared to a corresponding non-transformed wild type non-human organism or a part thereof; and
[36916] (b) growing the non-human organism or a part thereof under conditions which permit the production of isoleucine or a composition comprising isoleucine in said non-human organism or in the culture medium surrounding said non-human organism.

[36917] Accordingly, the present invention relates to a process for the production of leucine, which comprises
[36918] (a) increasing or generating one or more activities selected from the group consisting of polyphosphate kinase in a non-human organism or a part thereof, preferably a microorganism, a plant cell, a plant or a part thereof, as compared to a corresponding non-transformed wild type non-human organism or a part thereof; and
[36919] (b) growing the non-human organism or a part thereof under conditions which permit the production of leucine or a composition comprising leucine in said non-human organism or in the culture medium surrounding said non-human organism.

[36920] Accordingly, the present invention relates to a process for the production of valine, which comprises
[36921] (a) increasing or generating one or more activities selected from the group consisting of polyphosphate kinase in a non-human organism or a part thereof, preferably a microorganism, a plant cell, a plant or a part thereof, as compared to a corresponding non-transformed wild type non-human organism or a part thereof; and
[36922] (b) growing the non-human organism or a part thereof under conditions which permit the production of valine or a composition comprising valine in said non-human organism or in the culture medium surrounding said non-human organism.

[36923] Accordingly, the present invention relates to a process for the production of valine, which comprises
[36924] (a) increasing or generating one or more activities selected from the group consisting of bifunctional protein (phosphoribosyltransferase and regulatory protein) in a non-human organism or a part thereof, preferably a microorganism, a plant cell, a plant or a part thereof, as compared to a corresponding non-transformed wild type non-human organism or a part thereof; and
[36925] (b) growing the non-human organism or a part thereof under conditions which permit the production of valine or a composition comprising valine in said non-human organism or in the culture medium surrounding said non-human organism.

[36926] Accordingly, the present invention relates to a process for the production of isoleucine, which comprises
[36927] (a) increasing or generating one or more activities selected from the group consisting of urease subunit in a non-human organism or a part thereof, preferably a microorganism, a plant cell, a plant or a part thereof, as compared to a corresponding non-transformed wild type non-human organism or a part thereof; and
[36928] (b) growing the non-human organism or a part thereof under conditions which permit the production of isoleucine or a composition comprising isoleucine in said non-human organism or in the culture medium surrounding said non-human organism.

[36929] Accordingly, the present invention relates to a process for the production of valine, which comprises
[36930] (a) increasing or generating one or more activities selected from the group consisting of NAD(P)H-quinone oxidoreductase subunit in a non-human organism or a part thereof, preferably a microorganism, a plant cell, a plant or a part thereof, as compared to a corresponding non-transformed wild type non-human organism or a part thereof; and
[36931] (b) growing the non-human organism or a part thereof under conditions which permit the production of valine or a composition comprising valine in said non-human organism or in the culture medium surrounding said non-human organism.

[36932] Accordingly, the present invention relates to a process for the production of isoleucine, which comprises
[36933] (a) increasing or generating one or more activities selected from the group consisting of oxireductase in a non-human organism or a part thereof, preferably a microorganism, a plant cell, a plant or a part thereof, as compared to a corresponding non-transformed wild type non-human organism or a part thereof; and
[36934] (b) growing the non-human organism or a part thereof under conditions which permit the production of isoleucine or a composition comprising isoleucine in said non-human organism or in the culture medium surrounding said non-human organism.

[36935] Accordingly, the present invention relates to a process for the production of isoleucine, which comprises
[36936] (a) increasing or generating one or more activities selected from the group consisting of binding-protein-dependent transport systems inner membrane component in a non-human organism or a part thereof, preferably a microorganism, a plant cell, a plant or a part thereof, as compared to a corresponding non-transformed wild type non-human organism or a part thereof; and
[36937] (b) growing the non-human organism or a part thereof under conditions which permit the production of isoleucine or a composition comprising isoleucine in said non-human organism or in the culture medium surrounding said non-human organism.

[36938] Accordingly, the present invention relates to a process for the production of valine, which comprises
[36939] (a) increasing or generating one or more activities selected from the group consisting of sll1032-protein in a non-human organism or a part thereof, preferably a microorganism, a plant cell, a plant or a part thereof, as compared to a corresponding non-transformed wild type non-human organism or a part thereof; and
[36940] (b) growing the non-human organism or a part thereof under conditions which permit the production of valine or a composition comprising valine in said non-human organism or in the culture medium surrounding said non-human organism.

[36941] Accordingly, the present invention relates to a process for the production of isoleucine, which comprises
[36942] (a) increasing or generating one or more activities selected from the group consisting of glycogen (starch) synthase in a non-human organism or a part thereof, preferably a microorganism, a plant cell, a plant or a part thereof, as compared to a corresponding non-transformed wild type non-human organism or a part thereof; and
[36943] (b) growing the non-human organism or a part thereof under conditions which permit the production of isoleucine or a composition comprising isoleucine in said non-human organism or in the culture medium surrounding said non-human organism.

[36944] Accordingly, the present invention relates to a process for the production of leucine, which comprises
[36945] (a) increasing or generating one or more activities selected from the group consisting of glycogen (starch) synthase in a non-human organism or a part thereof, preferably a microorganism, a plant cell, a plant or a part thereof, as compared to a corresponding non-transformed wild type non-human organism or a part thereof; and
[36946] (b) growing the non-human organism or a part thereof under conditions which permit the production of leucine or a composition comprising leucine in said non-human organism or in the culture medium surrounding said non-human organism.

[36947] Accordingly, the present invention relates to a process for the production of valine, which comprises
[36948] (a) increasing or generating one or more activities selected from the group consisting of glycogen (starch) synthase in a non-human organism or a part thereof, preferably a microorganism, a plant cell, a plant or a part thereof, as compared to a corresponding non-transformed wild type non-human organism or a part thereof; and
[36949] (b) growing the non-human organism or a part thereof under conditions which permit the production of valine or a composition comprising valine in said non-human organism or in the culture medium surrounding said non-human organism.

[36950] Accordingly, the present invention relates to a process for the production of valine, which comprises
[36951] (a) increasing or generating one or more activities selected from the group consisting of sll1455-protein in a non-human organism or a part thereof, preferably a microorganism, a plant cell, a plant or a part thereof, as compared to a corresponding non-transformed wild type non-human organism or a part thereof; and
[36952] (b) growing the non-human organism or a part thereof under conditions which permit the production of valine or a composition comprising valine in said non-human organism or in the culture medium surrounding said non-human organism.

[36953] Accordingly, the present invention relates to a process for the production of isoleucine, which comprises
[36954] (a) increasing or generating one or more activities selected from the group consisting of carbamoyl-phosphate synthase subunit in a non-human organism or a part thereof, preferably a microorganism, a plant cell, a plant or a part thereof, as compared to a corresponding non-transformed wild type non-human organism or a part thereof; and
[36955] (b) growing the non-human organism or a part thereof under conditions which permit the production of isoleucine or a composition comprising isoleucine in said non-human organism or in the culture medium surrounding said non-human organism.

[36956] Accordingly, the present invention relates to a process for the production of leucine, which comprises
[36957] (a) increasing or generating one or more activities selected from the group consisting of carbamoyl-phosphate synthase subunit in a non-human organism or a part thereof, preferably a microorganism, a plant cell, a plant or a part thereof, as compared to a corresponding non-transformed wild type non-human organism or a part thereof; and
[36958] (b) growing the non-human organism or a part thereof under conditions which permit the production of leucine or a composition comprising leucine in said non-human organism or in the culture medium surrounding said non-human organism.

[36959] Accordingly, the present invention relates to a process for the production of isoleucine, which comprises
[36960] (a) increasing or generating one or more activities selected from the group consisting of sll1761-protein in a non-human organism or a part thereof, preferably a microorganism, a plant cell, a plant or a part thereof, as compared to a corresponding non-transformed wild type non-human organism or a part thereof; and
[36961] (b) growing the non-human organism or a part thereof under conditions which permit the production of isoleucine or a composition comprising isoleucine in said non-human organism or in the culture medium surrounding said non-human organism.

[36962] Accordingly, the present invention relates to a process for the production of leucine, which comprises
[36963] (a) increasing or generating one or more activities selected from the group consisting of sll1761-protein in a non-human organism or a part thereof, preferably a microorganism, a plant cell, a plant or a part thereof, as compared to a corresponding non-transformed wild type non-human organism or a part thereof; and
[36964] (b) growing the non-human organism or a part thereof under conditions which permit the production of leucine or a composition comprising leucine in said non-human organism or in the culture medium surrounding said non-human organism.

[36965] Accordingly, the present invention relates to a process for the production of isoleucine, which comprises
[36966] (a) increasing or generating one or more activities selected from the group consisting of adenylate kinase in a non-human organism or a part thereof, preferably a microorganism, a plant cell, a plant or a part thereof, as compared to a corresponding non-transformed wild type non-human organism or a part thereof; and
[36967] (b) growing the non-human organism or a part thereof under conditions which permit the production of isoleucine or a composition comprising isoleucine in said non-human organism or in the culture medium surrounding said non-human organism.

[36968] Accordingly, the present invention relates to a process for the production of leucine, which comprises
[36969] (a) increasing or generating one or more activities selected from the group consisting of adenylate kinase in a non-human organism or a part thereof, preferably a microorganism, a plant cell, a plant or a part thereof, as compared to a corresponding non-transformed wild type non-human organism or a part thereof; and
[36970] (b) growing the non-human organism or a part thereof under conditions which permit the production of leucine or a composition comprising leucine in said non-human organism or in the culture medium surrounding said non-human organism.

[36971] Accordingly, the present invention relates to a process for the production of valine, which comprises
[36972] (a) increasing or generating one or more activities selected from the group consisting of adenylate kinase in a non-human organism or a part thereof, preferably a microorganism, a plant cell, a plant or a part thereof, as compared to a corresponding non-transformed wild type non-human organism or a part thereof; and
[36973] (b) growing the non-human organism or a part thereof under conditions which permit the production of valine or a composition comprising valine in said non-human organism or in the culture medium surrounding said non-human organism.

[36974] Accordingly, the present invention relates to a process for the production of isoleucine, which comprises
[36975] (a) increasing or generating one or more activities selected from the group consisting of acyl transferase in a non-human organism or a part thereof, preferably a microorganism, a plant cell, a plant or a part thereof, as compared to a corresponding non-transformed wild type non-human organism or a part thereof; and
[36976] (b) growing the non-human organism or a part thereof under conditions which permit the production of isoleucine or a composition comprising isoleucine in said non-human organism or in the culture medium surrounding said non-human organism.

[36977] Accordingly, the present invention relates to a process for the production of valine, which comprises
[36978] (a) increasing or generating one or more activities selected from the group consisting of ferredoxin in a non-human organism or a part thereof, preferably a microorganism, a plant cell, a plant or a part thereof, as compared to a corresponding non-transformed wild type non-human organism or a part thereof; and
[36979] (b) growing the non-human organism or a part thereof under conditions which permit the production of valine or a composition comprising valine in said non-human organism or in the culture medium surrounding said non-human organism.

[36980] Accordingly, the present invention relates to a process for the production of isoleucine, which comprises
[36981] (a) increasing or generating one or more activities selected from the group consisting of precorrin methylase in a non-human organism or a part thereof, preferably a microorganism, a plant cell, a plant or a part thereof, as compared to a corresponding non-transformed wild type non-human organism or a part thereof; and
[36982] (b) growing the non-human organism or a part thereof under conditions which permit the production of isoleucine or a composition comprising isoleucine in said non-human organism or in the culture medium surrounding said non-human organism.

[36983] Accordingly, the present invention relates to a process for the production of leucine, which comprises
[36984] (a) increasing or generating one or more activities selected from the group consisting of precorrin methylase in a non-human organism or a part thereof, preferably a microorganism, a plant cell, a plant or a part thereof, as compared to a corresponding non-transformed wild type non-human organism or a part thereof; and
[36985] (b) growing the non-human organism or a part thereof under conditions which permit the production of leucine or a composition comprising leucine in said non-human organism or in the culture medium surrounding said non-human organism.

[36986] Accordingly, the present invention relates to a process for the production of valine, which comprises
[36987] (a) increasing or generating one or more activities selected from the group consisting of precorrin methylase in a non-human organism or a part thereof, preferably a microorganism, a plant cell, a plant or a part thereof, as compared to a corresponding non-transformed wild type non-human organism or a part thereof; and
[36988] (b) growing the non-human organism or a part thereof under conditions which permit the production of valine or a composition comprising valine in said non-human organism or in the culture medium surrounding said non-human organism.

[36989] Accordingly, the present invention relates to a process for the production of isoleucine, which comprises
[36990] (a) increasing or generating one or more activities selected from the group consisting of malate dehydrogenase in a non-human organism or a part thereof, preferably a microorganism, a plant cell, a plant or a part thereof, as compared to a corresponding non-transformed wild type non-human organism or a part thereof; and
[36991] (b) growing the non-human organism or a part thereof under conditions which permit the production of isoleucine or a composition comprising isoleucine in said non-human organism or in the culture medium surrounding said non-human organism.

[36992] Accordingly, the present invention relates to a process for the production of isoleucine, which comprises
[36993] (a) increasing or generating one or more activities selected from the group consisting of malate dehydrogenase in a non-human organism or a part thereof, preferably a microorganism, a plant cell, a plant or a part thereof, as compared to a corresponding non-transformed wild type non-human organism or a part thereof; and
[36994] (b) growing the non-human organism or a part thereof under conditions which permit the production of isoleucine or a composition comprising isoleucine in said non-human organism or in the culture medium surrounding said non-human organism.

[36995] Accordingly, the present invention relates to a process for the production of leucine, which comprises
[36996] (a) increasing or generating one or more activities selected from the group consisting of malate dehydrogenase in a non-human organism or a part thereof, preferably a microorganism, a plant cell, a plant or a part thereof, as compared to a corresponding non-transformed wild type non-human organism or a part thereof; and
[36997] (b) growing the non-human organism or a part thereof under conditions which permit the production of leucine or a composition comprising leucine in said non-human organism or in the culture medium surrounding said non-human organism.

[36998] Accordingly, the present invention relates to a process for the production of leucine, which comprises
[36999] (a) increasing or generating one or more activities selected from the group consisting of malate dehydrogenase in a non-human organism or a part thereof, preferably a microorganism, a plant cell, a plant or a part thereof, as compared to a corresponding non-transformed wild type non-human organism or a part thereof; and
[37000] (b) growing the non-human organism or a part thereof under conditions which permit the production of leucine or a composition comprising leucine in said non-human organism or in the culture medium surrounding said non-human organism.

[37001] Accordingly, the present invention relates to a process for the production of valine, which comprises
[37002] (a) increasing or generating one or more activities selected from the group consisting of malate dehydrogenase in a non-human organism or a part thereof, preferably a microorganism, a plant cell, a plant or a part thereof, as compared to a corresponding non-transformed wild type non-human organism or a part thereof; and
[37003] (b) growing the non-human organism or a part thereof under conditions which permit the production of valine or a composition comprising valine in said non-human organism or in the culture medium surrounding said non-human organism.

[37004] Accordingly, the present invention relates to a process for the production of valine, which comprises
[37005] (a) increasing or generating one or more activities selected from the group consisting of malate dehydrogenase in a non-human organism or a part thereof, preferably a microorganism, a plant cell, a plant or a part thereof, as compared to a corresponding non-transformed wild type non-human organism or a part thereof; and
[37006] (b) growing the non-human organism or a part thereof under conditions which permit the production of valine or a composition comprising valine in said non-human organism or in the culture medium surrounding said non-human organism.

[37007] Accordingly, the present invention relates to a process for the production of isoleucine, which comprises
[37008] (a) increasing or generating one or more activities selected from the group consisting of geranylgeranyl pyrophosphate synthase in a non-human organism or a part thereof, preferably a microorganism, a plant cell, a plant or a part thereof, as compared to a corresponding non-transformed wild type non-human organism or a part thereof; and
[37009] (b) growing the non-human organism or a part thereof under conditions which permit the production of isoleucine or a composition comprising isoleucine in said non-human organism or in the culture medium surrounding said non-human organism.

[37010] Accordingly, the present invention relates to a process for the production of leucine, which comprises
[37011] (a) increasing or generating one or more activities selected from the group consisting of geranylgeranyl pyrophosphate synthase in a non-human organism or a part thereof, preferably a microorganism, a plant cell, a plant or a part thereof, as compared to a corresponding non-transformed wild type non-human organism or a part thereof; and
[37012] (b) growing the non-human organism or a part thereof under conditions which permit the production of leucine or a composition comprising leucine in said non-human organism or in the culture medium surrounding said non-human organism.

[37013] Accordingly, the present invention relates to a process for the production of valine, which comprises
[37014] (a) increasing or generating one or more activities selected from the group consisting of geranylgeranyl pyrophosphate synthase in a non-human organism or a part thereof, preferably a microorganism, a plant cell, a plant or a part thereof, as compared to a corresponding non-transformed wild type non-human organism or a part thereof; and
[37015] (b) growing the non-human organism or a part thereof under conditions which permit the production of valine or a composition comprising valine in said non-human organism or in the culture medium surrounding said non-human organism.

[37016] Accordingly, the present invention relates to a process for the production of isoleucine, which comprises
[37017] (a) increasing or generating one or more activities selected from the group consisting of iron(III) dicitrate-binding protein in a non-human organism or a part thereof, preferably a microorganism, a plant cell, a plant or a part thereof, as compared to a corresponding non-transformed wild type non-human organism or a part thereof; and
[37018] (b) growing the non-human organism or a part thereof under conditions which permit the production of isoleucine or a composition comprising isoleucine in said non-human organism or in the culture medium surrounding said non-human organism.

[37019] Accordingly, the present invention relates to a process for the production of isoleucine, which comprises
[37020] (a) increasing or generating one or more activities selected from the group consisting of Na+/K+ transporter in a non-human organism or a part thereof, preferably a microorganism, a plant cell, a plant or a part thereof, as compared to a corresponding non-transformed wild type non-human organism or a part thereof; and
[37021] (b) growing the non-human organism or a part thereof under conditions which permit the production of isoleucine or a composition comprising isoleucine in said non-human organism or in the culture medium surrounding said non-human organism.

[37022] Accordingly, the present invention relates to a process for the production of leucine, which comprises
[37023] (a) increasing or generating one or more activities selected from the group consisting of Na+/K+ transporter in a non-human organism or a part thereof, preferably a microorganism, a plant cell, a plant or a part thereof, as compared to a corresponding non-transformed wild type non-human organism or a part thereof; and
[37024] (b) growing the non-human organism or a part thereof under conditions which permit the production of leucine or a composition comprising leucine in said non-human organism or in the culture medium surrounding said non-human organism.

[37025] Accordingly, the present invention relates to a process for the production of valine, which comprises
[37026] (a) increasing or generating one or more activities selected from the group consisting of 3-isopropylmalate dehydrogenase in a non-human organism or a part thereof, preferably a microorganism, a plant cell, a plant or a part thereof, as compared to a corresponding non-transformed wild type non-human organism or a part thereof; and
[37027] (b) growing the non-human organism or a part thereof under conditions which permit the production of valine or a composition comprising valine in said non-human organism or in the culture medium surrounding said non-human organism.

[37028] Accordingly, the present invention relates to a process for the production of isoleucine, which comprises
[37029] (a) increasing or generating one or more activities selected from the group consisting of photosystem II protein in a non-human organism or a part thereof, preferably a microorganism, a plant cell, a plant or a part thereof, as compared to a corresponding non-transformed wild type non-human organism or a part thereof; and
[37030] (b) growing the non-human organism or a part thereof under conditions which permit the production of isoleucine or a composition comprising isoleucine in said non-human organism or in the culture medium surrounding said non-human organism.

[37031] Accordingly, the present invention relates to a process for the production of leucine, which comprises
[37032] (a) increasing or generating one or more activities selected from the group consisting of photosystem II protein in a non-human organism or a part thereof, preferably a microorganism, a plant cell, a plant or a part thereof, as compared to a corresponding non-transformed wild type non-human organism or a part thereof; and
[37033] (b) growing the non-human organism or a part thereof under conditions which permit the production of leucine or a composition comprising leucine in said non-human organism or in the culture medium surrounding said non-human organism.

[37034] Accordingly, the present invention relates to a process for the production of valine, which comprises
[37035] (a) increasing or generating one or more activities selected from the group consisting of photosystem II protein in a non-human organism or a part thereof, preferably a microorganism, a plant cell, a plant or a part thereof, as compared to a corresponding non-transformed wild type non-human organism or a part thereof; and
[37036] (b) growing the non-human organism or a part thereof under conditions which permit the production of valine or a composition comprising valine in said non-human organism or in the culture medium surrounding said non-human organism.

[37037] Accordingly, the present invention relates to a process for the production of valine, which comprises
[37038] (a) increasing or generating one or more activities selected from the group consisting of phosphoadenosine phosphosulfate reductase in a non-human organism or a part thereof, preferably a microorganism, a plant cell, a plant or a part thereof, as compared to a corresponding non-transformed wild type non-human organism or a part thereof; and
[37039] (b) growing the non-human organism or a part thereof under conditions which permit the production of valine or a composition comprising valine in said non-human organism or in the culture medium surrounding said non-human organism.

[37040] Accordingly, the present invention relates to a process for the production of valine, which comprises
[37041] (a) increasing or generating one or more activities selected from the group consisting of riboflavin biosynthesis protein in a non-human organism or a part thereof, preferably a microorganism, a plant cell, a plant or a part thereof, as compared to a corresponding non-transformed wild type non-human organism or a part thereof; and
[37042] (b) growing the non-human organism or a part thereof under conditions which permit the production of valine or a composition comprising valine in said non-human organism or in the culture medium surrounding said non-human organism.

[37043] Accordingly, the present invention relates to a process for the production of isoleucine, which comprises
[37044] (a) increasing or generating one or more activities selected from the group consisting of threonine dehydratase in a non-human organism or a part thereof, preferably a microorganism, a plant cell, a plant or a part thereof, as compared to a corresponding non-transformed wild type non-human organism or a part thereof; and
[37045] (b) growing the non-human organism or a part thereof under conditions which permit the production of isoleucine or a composition comprising isoleucine in said non-human organism or in the culture medium surrounding said non-human organism.

[37046] Accordingly, the present invention relates to a process for the production of isoleucine, which comprises
[37047] (a) increasing or generating one or more activities selected from the group consisting of threonine dehydratase in a non-human organism or a part thereof, preferably a microorganism, a plant cell, a plant or a part thereof, as compared to a corresponding non-transformed wild type non-human organism or a part thereof; and
[37048] (b) growing the non-human organism or a part thereof under conditions which permit the production of isoleucine or a composition comprising isoleucine in said non-human organism or in the culture medium surrounding said non-human organism.

[37049] Accordingly, the present invention relates to a process for the production of leucine, which comprises
[37050] (a) increasing or generating one or more activities selected from the group consisting of threonine dehydratase in a non-human organism or a part thereof, preferably a microorganism, a plant cell, a plant or a part thereof, as compared to a corresponding non-transformed wild type non-human organism or a part thereof; and
[37051] (b) growing the non-human organism or a part thereof under conditions which permit the production of leucine or a composition comprising leucine in said non-human organism or in the culture medium surrounding said non-human organism.

[37052] Accordingly, the present invention relates to a process for the production of leucine, which comprises
[37053] (a) increasing or generating one or more activities selected from the group consisting of threonine dehydratase in a non-human organism or a part thereof, preferably a microorganism, a plant cell, a plant or a part thereof, as compared to a corresponding non-transformed wild type non-human organism or a part thereof; and
[37054] (b) growing the non-human organism or a part thereof under conditions which permit the production of leucine or a composition comprising leucine in said non-human organism or in the culture medium surrounding said non-human organism.

[37055] Accordingly, the present invention relates to a process for the production of valine, which comprises
[37056] (a) increasing or generating one or more activities selected from the group consisting of threonine dehydratase in a non-human organism or a part thereof, preferably a microorganism, a plant cell, a plant or a part thereof, as compared to a corresponding non-transformed wild type non-human organism or a part thereof; and
[37057] (b) growing the non-human organism or a part thereof under conditions which permit the production of valine or a composition comprising valine in said non-human organism or in the culture medium surrounding said non-human organism.

[37058] Accordingly, the present invention relates to a process for the production of valine, which comprises
[37059] (a) increasing or generating one or more activities selected from the group consisting of threonine dehydratase in a non-human organism or a part thereof, preferably a microorganism, a plant cell, a plant or a part thereof, as compared to a corresponding non-transformed wild type non-human organism or a part thereof; and
[37060] (b) growing the non-human organism or a part thereof under conditions which permit the production of valine or a composition comprising valine in said non-human organism or in the culture medium surrounding said non-human organism.

[37061] Accordingly, the present invention relates to a process for the production of valine, which comprises
[37062] (a) increasing or generating one or more activities selected from the group consisting of short-chain alcohol dehydrogenase family in a non-human organism or a part thereof, preferably a microorganism, a plant cell, a plant or a part thereof, as compared to a corresponding non-transformed wild type non-human organism or a part thereof; and
[37063] (b) growing the non-human organism or a part thereof under conditions which permit the production of valine or a composition comprising valine in said non-human organism or in the culture medium surrounding said non-human organism.

[37064] Accordingly, the present invention relates to a process for the production of isoleucine, which comprises
[37065] (a) increasing or generating one or more activities selected from the group consisting of Sec-independent protein translocase subunit in a non-human organism or a part thereof, preferably a microorganism, a plant cell, a plant or a part thereof, as compared to a corresponding non-transformed wild type non-human organism or a part thereof; and
[37066] (b) growing the non-human organism or a part thereof under conditions which permit the production of isoleucine or a composition comprising isoleucine in said non-human organism or in the culture medium surrounding said non-human organism.

[37067] Accordingly, the present invention relates to a process for the production of leucine, which comprises
[37068] (a) increasing or generating one or more activities selected from the group consisting of Sec-independent protein translocase subunit in a non-human organism or a part thereof, preferably a microorganism, a plant cell, a plant or a part thereof, as compared to a corresponding non-transformed wild type non-human organism or a part thereof; and
[37069] (b) growing the non-human organism or a part thereof under conditions which permit the production of leucine or a composition comprising leucine in said non-human organism or in the culture medium surrounding said non-human organism.

[37070] Accordingly, the present invention relates to a process for the production of valine, which comprises
[37071] (a) increasing or generating one or more activities selected from the group consisting of Sec-independent protein translocase subunit in a non-human organism or a part thereof, preferably a microorganism, a plant cell, a plant or a part thereof, as compared to a corresponding non-transformed wild type non-human organism or a part thereof; and
[37072] (b) growing the non-human organism or a part thereof under conditions which permit the production of valine or a composition comprising valine in said non-human organism or in the culture medium surrounding said non-human organism.

[37073] Accordingly, the present invention relates to a process for the production of isoleucine, which comprises
[37074] (a) increasing or generating one or more activities selected from the group consisting of 2-isopropylmalate synthase in a non-human organism or a part thereof, preferably a microorganism, a plant cell, a plant or a part thereof, as compared to a corresponding non-transformed wild type non-human organism or a part thereof; and
[37075] (b) growing the non-human organism or a part thereof under conditions which permit the production of isoleucine or a composition comprising isoleucine in said non-human organism or in the culture medium surrounding said non-human organism.

[37076] Accordingly, the present invention relates to a process for the production of leucine, which comprises
[37077] (a) increasing or generating one or more activities selected from the group consisting of 2-isopropylmalate synthase in a non-human organism or a part thereof, preferably a microorganism, a plant cell, a plant or a part thereof, as compared to a corresponding non-transformed wild type non-human organism or a part thereof; and
[37078] (b) growing the non-human organism or a part thereof under conditions which permit the production of leucine or a composition comprising leucine in said non-human organism or in the culture medium surrounding said non-human organism.

[37079] Accordingly, the present invention relates to a process for the production of isoleucine, which comprises
[37080] (a) increasing or generating one or more activities selected from the group consisting of TTC1386-protein in a non-human organism or a part thereof, preferably a microorganism, a plant cell, a plant or a part thereof, as compared to a corresponding non-transformed wild type non-human organism or a part thereof; and
[37081] (b) growing the non-human organism or a part thereof under conditions which permit the production of isoleucine or a composition comprising isoleucine in said non-human organism or in the culture medium surrounding said non-human organism.

[37082] Accordingly, the present invention relates to a process for the production of leucine, which comprises
[37083] (a) increasing or generating one or more activities selected from the group consisting of TTC1386-protein in a non-human organism or a part thereof, preferably a microorganism, a plant cell, a plant or a part thereof, as compared to a corresponding non-transformed wild type non-human organism or a part thereof; and
[37084] (b) growing the non-human organism or a part thereof under conditions which permit the production of leucine or a composition comprising leucine in said non-human organism or in the culture medium surrounding said non-human organism.

[37085] Accordingly, the present invention relates to a process for the production of valine, which comprises
[37086] (a) increasing or generating one or more activities selected from the group consisting of TTC1386-protein in a non-human organism or a part thereof, preferably a microorganism, a plant cell, a plant or a part thereof, as compared to a corresponding non-transformed wild type non-human organism or a part thereof; and
[37087] (b) growing the non-human organism or a part thereof under conditions which permit the production of valine or a composition comprising valine in said non-human organism or in the culture medium surrounding said non-human organism.

[37088] Accordingly, the present invention relates to a process for the production of isoleucine, which comprises
[37089] (a) increasing or generating one or more activities selected from the group consisting of homocitrate synthase in a non-human organism or a part thereof, preferably a microorganism, a plant cell, a plant or a part thereof, as compared to a corresponding non-transformed wild type non-human organism or a part thereof; and
[37090] (b) growing the non-human organism or a part thereof under conditions which permit the production of isoleucine or a composition comprising isoleucine in said non-human organism or in the culture medium surrounding said non-human organism.

[37091] Accordingly, the present invention relates to a process for the production of leucine, which comprises
[37092] (a) increasing or generating one or more activities selected from the group consisting of homocitrate synthase in a non-human organism or a part thereof, preferably a microorganism, a plant cell, a plant or a part thereof, as compared to a corresponding non-transformed wild type non-human organism or a part thereof; and
[37093] (b) growing the non-human organism or a part thereof under conditions which permit the production of leucine or a composition comprising leucine in said non-human organism or in the culture medium surrounding said non-human organism.

[37094] Accordingly, the present invention relates to a process for the production of valine, which comprises
[37095] (a) increasing or generating one or more activities selected from the group consisting of homocitrate synthase in a non-human organism or a part thereof, preferably a microorganism, a plant cell, a plant or a part thereof, as compared to a corresponding non-transformed wild type non-human organism or a part thereof; and
[37096] (b) growing the non-human organism or a part thereof under conditions which permit the production of valine or a composition comprising valine in said non-human organism or in the culture medium surrounding said non-human organism.

[37097] Accordingly, the present invention relates to a process for the production of leucine, which comprises
[37098] (a) increasing or generating one or more activities selected from the group consisting of YAL013W-protein in a non-human organism or a part thereof, preferably a microorganism, a plant cell, a plant or a part thereof, as compared to a corresponding non-transformed wild type non-human organism or a part thereof; and
[37099] (b) growing the non-human organism or a part thereof under conditions which permit the production of leucine or a composition comprising leucine in said non-human organism or in the culture medium surrounding said non-human organism.

[37100] Accordingly, the present invention relates to a process for the production of valine, which comprises
[37101] (a) increasing or generating one or more activities selected from the group consisting of cell division control protein in a non-human organism or a part thereof, preferably a microorganism, a plant cell, a plant or a part thereof, as compared to a corresponding non-transformed wild type non-human organism or a part thereof; and
[37102] (b) growing the non-human organism or a part thereof under conditions which permit the production of valine or a composition comprising valine in said non-human organism or in the culture medium surrounding said non-human organism.

[37103] Accordingly, the present invention relates to a process for the production of isoleucine, which comprises
[37104] (a) increasing or generating one or more activities selected from the group consisting of phosphoglycerate kinase in a non-human organism or a part thereof, preferably a microorganism, a plant cell, a plant or a part thereof, as compared to a corresponding non-transformed wild type non-human organism or a part thereof; and
[37105] (b) growing the non-human organism or a part thereof under conditions which permit the production of isoleucine or a composition comprising isoleucine in said non-human organism or in the culture medium surrounding said non-human organism.

[37106] Accordingly, the present invention relates to a process for the production of leucine, which comprises
[37107] (a) increasing or generating one or more activities selected from the group consisting of phosphoglycerate kinase in a non-human organism or a part thereof, preferably a microorganism, a plant cell, a plant or a part thereof, as compared to a corresponding non-transformed wild type non-human organism or a part thereof; and
[37108] (b) growing the non-human organism or a part thereof under conditions which permit the production of leucine or a composition comprising leucine in said non-human organism or in the culture medium surrounding said non-human organism.

[37109] Accordingly, the present invention relates to a process for the production of isoleucine, which comprises
[37110] (a) increasing or generating one or more activities selected from the group consisting of branched-chain amino acid permease in a non-human organism or a part thereof, preferably a microorganism, a plant cell, a plant or a part thereof, as compared to a corresponding non-transformed wild type non-human organism or a part thereof; and
[37111] (b) growing the non-human organism or a part thereof under conditions which permit the production of isoleucine or a composition comprising isoleucine in said non-human organism or in the culture medium surrounding said non-human organism.

[37112] Accordingly, the present invention relates to a process for the production of valine, which comprises
[37113] (a) increasing or generating one or more activities selected from the group consisting of branched-chain amino acid permease in a non-human organism or a part thereof, preferably a microorganism, a plant cell, a plant or a part thereof, as compared to a corresponding non-transformed wild type non-human organism or a part thereof; and
[37114] (b) growing the non-human organism or a part thereof under conditions which permit the production of valine or a composition comprising valine in said non-human organism or in the culture medium surrounding said non-human organism.

[37115] Accordingly, the present invention relates to a process for the production of valine, which comprises
[37116] (a) increasing or generating one or more activities selected from the group consisting of ydr183w-protein in a non-human organism or a part thereof, preferably a microorganism, a plant cell, a plant or a part thereof, as compared to a corresponding non-transformed wild type non-human organism or a part thereof; and
[37117] (b) growing the non-human organism or a part thereof under conditions which permit the production of valine or a composition comprising valine in said non-human organism or in the culture medium surrounding said non-human organism.

[37118] Accordingly, the present invention relates to a process for the production of isoleucine, which comprises
[37119] (a) increasing or generating one or more activities selected from the group consisting of hexose transporter in a non-human organism or a part thereof, preferably a microorganism, a plant cell, a plant or a part thereof, as compared to a corresponding non-transformed wild type non-human organism or a part thereof; and
[37120] (b) growing the non-human organism or a part thereof under conditions which permit the production of isoleucine or a composition comprising isoleucine in said non-human organism or in the culture medium surrounding said non-human organism.

[37121] Accordingly, the present invention relates to a process for the production of isoleucine, which comprises
[37122] (a) increasing or generating one or more activities selected from the group consisting of ygl237c-protein in a non-human organism or a part thereof, preferably a microorganism, a plant cell, a plant or a part thereof, as compared to a corresponding non-transformed wild type non-human organism or a part thereof; and
[37123] (b) growing the non-human organism or a part thereof under conditions which permit the production of isoleucine or a composition comprising isoleucine in said non-human organism or in the culture medium surrounding said non-human organism.

[37124] Accordingly, the present invention relates to a process for the production of leucine, which comprises
[37125] (a) increasing or generating one or more activities selected from the group consisting of ygl237c-protein in a non-human organism or a part thereof, preferably a microorganism, a plant cell, a plant or a part thereof, as compared to a corresponding non-transformed wild type non-human organism or a part thereof; and
[37126] (b) growing the non-human organism or a part thereof under conditions which permit the production of leucine or a composition comprising leucine in said non-human organism or in the culture medium surrounding said non-human organism.

[37127] Accordingly, the present invention relates to a process for the production of leucine, which comprises
[37128] (a) increasing or generating one or more activities selected from the group consisting of YGR193C-protein in a non-human organism or a part thereof, preferably a microorganism, a plant cell, a plant or a part thereof, as compared to a corresponding non-transformed wild type non-human organism or a part thereof; and
[37129] (b) growing the non-human organism or a part thereof under conditions which permit the production of leucine or a composition comprising leucine in said non-human organism or in the culture medium surrounding said non-human organism.

[37130] Accordingly, the present invention relates to a process for the production of isoleucine, which comprises
[37131] (a) increasing or generating one or more activities selected from the group consisting of yhr006w-protein in a non-human organism or a part thereof, preferably a microorganism, a plant cell, a plant or a part thereof, as compared to a corresponding non-transformed wild type non-human organism or a part thereof; and
[37132] (b) growing the non-human organism or a part thereof under conditions which permit the production of isoleucine or a composition comprising isoleucine in said non-human organism or in the culture medium surrounding said non-human organism.

[37133] Accordingly, the present invention relates to a process for the production of leucine, which comprises
[37134] (a) increasing or generating one or more activities selected from the group consisting of yhr006w-protein in a non-human organism or a part thereof, preferably a microorganism, a plant cell, a plant or a part thereof, as compared to a corresponding non-transformed wild type non-human organism or a part thereof; and
[37135] (b) growing the non-human organism or a part thereof under conditions which permit the production of leucine or a composition comprising leucine in said non-human organism or in the culture medium surrounding said non-human organism.

[37136] Accordingly, the present invention relates to a process for the production of isoleucine, which comprises
[37137] (a) increasing or generating one or more activities selected from the group consisting of H/ACA ribonucleoprotein complex subunit 3 in a non-human organism or a part thereof, preferably a microorganism, a plant cell, a plant or a part thereof, as compared to a corresponding non-transformed wild type non-human organism or a part thereof; and
[37138] (b) growing the non-human organism or a part thereof under conditions which permit the production of isoleucine or a composition comprising isoleucine in said non-human organism or in the culture medium surrounding said non-human organism.

[37139] Accordingly, the present invention relates to a process for the production of leucine, which comprises
[37140] (a) increasing or generating one or more activities selected from the group consisting of H/ACA ribonucleoprotein complex subunit 3 in a non-human organism or a part thereof, preferably a microorganism, a plant cell, a plant or a part thereof, as compared to a corresponding non-transformed wild type non-human organism or a part thereof; and
[37141] (b) growing the non-human organism or a part thereof under conditions which permit the production of leucine or a composition comprising leucine in said non-human organism or in the culture medium surrounding said non-human organism.

[37142] Accordingly, the present invention relates to a process for the production of isoleucine, which comprises
[37143] (a) increasing or generating one or more activities selected from the group consisting of glycerol-3-phosphate dehydrogenase in a non-human organism or a part thereof, preferably a microorganism, a plant cell, a plant or a part thereof, as compared to a corresponding non-transformed wild type non-human organism or a part thereof; and
[37144] (b) growing the non-human organism or a part thereof under conditions which permit the production of isoleucine or a composition comprising isoleucine in said non-human organism or in the culture medium surrounding said non-human organism.

[37145] Accordingly, the present invention relates to a process for the production of leucine, which comprises
[37146] (a) increasing or generating one or more activities selected from the group consisting of glycerol-3-phosphate dehydrogenase in a non-human organism or a part thereof, preferably a microorganism, a plant cell, a plant or a part thereof, as compared to a corresponding non-transformed wild type non-human organism or a part thereof; and
[37147] (b) growing the non-human organism or a part thereof under conditions which permit the production of leucine or a composition comprising leucine in said non-human organism or in the culture medium surrounding said non-human organism.

[37148] Accordingly, the present invention relates to a process for the production of isoleucine, which comprises
[37149] (a) increasing or generating one or more activities selected from the group consisting of homoserine dehydrogenase in a non-human organism or a part thereof, preferably a microorganism, a plant cell, a plant or a part thereof, as compared to a corresponding non-transformed wild type non-human organism or a part thereof; and
[37150] (b) growing the non-human organism or a part thereof under conditions which permit the production of isoleucine or a composition comprising isoleucine in said non-human organism or in the culture medium surrounding said non-human organism.

[37151] Accordingly, the present invention relates to a process for the production of isoleucine, which comprises
[37152] (a) increasing or generating one or more activities selected from the group consisting of branched chain aminotransferase in a non-human organism or a part thereof, preferably a microorganism, a plant cell, a plant or a part thereof, as compared to a corresponding non-transformed wild type non-human organism or a part thereof; and
[37153] (b) growing the non-human organism or a part thereof under conditions which permit the production of isoleucine or a composition comprising isoleucine in said non-human organism or in the culture medium surrounding said non-human organism.

[37154] Accordingly, the present invention relates to a process for the production of valine, which comprises
[37155] (a) increasing or generating one or more activities selected from the group consisting of branched chain aminotransferase in a non-human organism or a part thereof, preferably a microorganism, a plant cell, a plant or a part thereof, as compared to a corresponding non-transformed wild type non-human organism or a part thereof; and
[37156] (b) growing the non-human organism or a part thereof under conditions which permit the production of valine or a composition comprising valine in said non-human organism or in the culture medium surrounding said non-human organism.

[37157] Accordingly, the present invention relates to a process for the production of isoleucine, which comprises
[37158] (a) increasing or generating one or more activities selected from the group consisting of polygalacturonase in a non-human organism or a part thereof, preferably a microorganism, a plant cell, a plant or a part thereof, as compared to a corresponding non-transformed wild type non-human organism or a part thereof; and
[37159] (b) growing the non-human organism or a part thereof under conditions which permit the production of isoleucine or a composition comprising isoleucine in said non-human organism or in the culture medium surrounding said non-human organism.

[37160] Accordingly, the present invention relates to a process for the production of leucine, which comprises
[37161] (a) increasing or generating one or more activities selected from the group consisting of poly-galacturonase in a non-human organism or a part thereof, preferably a microorganism, a plant cell, a plant or a part thereof, as compared to a corresponding non-transformed wild type non-human organism or a part thereof; and
[37162] (b) growing the non-human organism or a part thereof under conditions which permit the production of leucine or a composition comprising leucine in said non-human organism or in the culture medium surrounding said non-human organism.

[37163] Accordingly, the present invention relates to a process for the production of valine, which comprises
[37164] (a) increasing or generating one or more activities selected from the group consisting of poly-galacturonase in a non-human organism or a part thereof, preferably a microorganism, a plant cell, a plant or a part thereof, as compared to a corresponding non-transformed wild type non-human organism or a part thereof; and
[37165] (b) growing the non-human organism or a part thereof under conditions which permit the production of valine or a composition comprising valine in said non-human organism or in the culture medium surrounding said non-human organism.

[37166] Accordingly, the present invention relates to a process for the production of isoleucine, which comprises
[37167] (a) increasing or generating one or more activities selected from the group consisting of YKL038W-protein in a non-human organism or a part thereof, preferably a microorganism, a plant cell, a plant or a part thereof, as compared to a corresponding non-transformed wild type non-human organism or a part thereof; and
[37168] (b) growing the non-human organism or a part thereof under conditions which permit the production of isoleucine or a composition comprising isoleucine in said non-human organism or in the culture medium surrounding said non-human organism.

[37169] Accordingly, the present invention relates to a process for the production of leucine, which comprises
[37170] (a) increasing or generating one or more activities selected from the group consisting of YKL038W-protein in a non-human organism or a part thereof, preferably a microorganism, a plant cell, a plant or a part thereof, as compared to a corresponding non-transformed wild type non-human organism or a part thereof; and
[37171] (b) growing the non-human organism or a part thereof under conditions which permit the production of leucine or a composition comprising leucine in said non-human organism or in the culture medium surrounding said non-human organism.

[37172] Accordingly, the present invention relates to a process for the production of isoleucine, which comprises
[37173] (a) increasing or generating one or more activities selected from the group consisting of YLR224W-protein in a non-human organism or a part thereof, preferably a microorganism, a plant cell, a plant or a part thereof, as compared to a corresponding non-transformed wild type non-human organism or a part thereof; and
[37174] (b) growing the non-human organism or a part thereof under conditions which permit the production of isoleucine or a composition comprising isoleucine in said non-human organism or in the culture medium surrounding said non-human organism.

[37175] Accordingly, the present invention relates to a process for the production of isoleucine, which comprises
[37176] (a) increasing or generating one or more activities selected from the group consisting of mitochondrial dicarboxylate transporter in a non-human organism or a part thereof, preferably a microorganism, a plant cell, a plant or a part thereof, as compared to a corresponding non-transformed wild type non-human organism or a part thereof; and
[37177] (b) growing the non-human organism or a part thereof under conditions which permit the production of isoleucine or a composition comprising isoleucine in said non-human organism or in the culture medium surrounding said non-human organism.

[37178] Accordingly, the present invention relates to a process for the production of isoleucine, which comprises
[37179] (a) increasing or generating one or more activities selected from the group consisting of adenylosuccinate lyase in a non-human organism or a part thereof, preferably a microorganism, a plant cell, a plant or a part thereof, as compared to a corresponding non-transformed wild type non-human organism or a part thereof; and
[37180] (b) growing the non-human organism or a part thereof under conditions which permit the production of isoleucine or a composition comprising isoleucine in said non-human organism or in the culture medium surrounding said non-human organism.

[37181] Accordingly, the present invention relates to a process for the production of leucine, which comprises
[37182] (a) increasing or generating one or more activities selected from the group consisting of adenylosuccinate lyase in a non-human organism or a part thereof, preferably a microorganism, a plant cell, a plant or a part thereof, as compared to a corresponding non-transformed wild type non-human organism or a part thereof; and
[37183] (b) growing the non-human organism or a part thereof under conditions which permit the production of leucine or a composition comprising leucine in said non-human organism or in the culture medium surrounding said non-human organism.

[37184] Accordingly, the present invention relates to a process for the production of valine, which comprises
[37185] (a) increasing or generating one or more activities selected from the group consisting of adenylosuccinate lyase in a non-human organism or a part thereof, preferably a microorganism, a plant cell, a plant or a part thereof, as compared to a corresponding non-transformed wild type non-human organism or a part thereof; and
[37186] (b) growing the non-human organism or a part thereof under conditions which permit the production of valine or a composition comprising valine in said non-human organism or in the culture medium surrounding said non-human organism.

[37187] Accordingly, the present invention relates to a process for the production of leucine, which comprises
[37188] (a) increasing or generating one or more activities selected from the group consisting of phosphate transporter in a non-human organism or a part thereof, preferably a microorganism, a plant cell, a plant or a part thereof, as compared to a corresponding non-transformed wild type non-human organism or a part thereof; and
[37189] (b) growing the non-human organism or a part thereof under conditions which permit the production of leucine or a composition comprising leucine in said non-human organism or in the culture medium surrounding said non-human organism.

[37190] Accordingly, the present invention relates to a process for the production of isoleucine, which comprises
[37191] (a) increasing or generating one or more activities selected from the group consisting of acetyl-CoA acetyltransferase in a non-human organism or a part thereof, preferably a microorganism, a plant cell, a plant or a part thereof, as compared to a corresponding non-transformed wild type non-human organism or a part thereof; and
[37192] (b) growing the non-human organism or a part thereof under conditions which permit the production of isoleucine or a composition comprising isoleucine in said non-human organism or in the culture medium surrounding said non-human organism.

[37193] Accordingly, the present invention relates to a process for the production of leucine, which comprises
[37194] (a) increasing or generating one or more activities selected from the group consisting of acetyl-CoA acetyltransferase in a non-human organism or a part thereof, preferably a microorganism, a plant cell, a plant or a part thereof, as compared to a corresponding non-transformed wild type non-human organism or a part thereof; and
[37195] (b) growing the non-human organism or a part thereof under conditions which permit the production of leucine or a composition comprising leucine in said non-human organism or in the culture medium surrounding said non-human organism.

[37196] Accordingly, the present invention relates to a process for the production of isoleucine, which comprises
[37197] (a) increasing or generating one or more activities selected from the group consisting of cyclin in a non-human organism or a part thereof, preferably a microorganism, a plant cell, a plant or a part thereof, as compared to a corresponding non-transformed wild type non-human organism or a part thereof; and
[37198] (b) growing the non-human organism or a part thereof under conditions which permit the production of isoleucine or a composition comprising isoleucine in said non-human organism or in the culture medium surrounding said non-human organism.

[37199] Accordingly, the present invention relates to a process for the production of isoleucine, which comprises
[37200] (a) increasing or generating one or more activities selected from the group consisting of Zm_{—}4842_BE510522-protein in a non-human organism or a part thereof, preferably a microorganism, a plant cell, a plant or a part thereof, as compared to a corresponding non-transformed wild type non-human organism or a part thereof; and
[37201] (b) growing the non-human organism or a part thereof under conditions which permit the production of isoleucine or a composition comprising isoleucine in said non-human organism or in the culture medium surrounding said non-human organism.

[37202] Accordingly, the present invention relates to a process for the production of leucine, which comprises
[37203] (a) increasing or generating one or more activities selected from the group consisting of Zm_{—}4842_BE510522-protein in a non-human organism or a part thereof, preferably a microorganism, a plant cell, a plant or a part thereof, as compared to a corresponding non-transformed wild type non-human organism or a part thereof; and
[37204] (b) growing the non-human organism or a part thereof under conditions which permit the production of leucine or a composition comprising leucine in said non-human organism or in the culture medium surrounding said non-human organism.

[37205] Accordingly, the present invention relates to a process for the production of valine, which comprises
[37206] (a) increasing or generating one or more activities selected from the group consisting of Zm_{—}4842_BE510522-protein in a non-human organism or a part thereof, preferably a microorganism, a plant cell, a plant or a part thereof, as compared to a corresponding non-transformed wild type non-human organism or a part thereof; and
[37207] (b) growing the non-human organism or a part thereof under conditions which permit the production of valine or a composition comprising valine in said non-human organism or in the culture medium surrounding said non-human organism.

[37208] An embodiment of the present invention relates to a process for the production of isoleucine, which comprises
[37209] (a1) increasing or generating the activity of a polypeptide comprising a polypeptide as depicted in a respective line in column 5 or 8 of Table II, application no. 6, or a homolog or a fragment thereof, a consensus sequence or at least one polypeptide motif as depicted in the respective line in column 8 of Table IV, application no. 6, whereby the respective line discloses in column 7 the fine chemical isoleucine; or (a2) increasing or generating the activity of an expression product of one or more nucleic acid molecule(s) comprising a polynucleotide as depicted in the respective line in column 5 or 8 of Table I, application no. 6, preferably the coding region thereof, or a homolog or a fragment thereof, whereby the respective line discloses in column 7 the fine chemical isoleucine; or (a3) increasing or generating the activity of a functional equivalent of (a1) or (a2); in a non-human organism or a part thereof; preferably a microorganism, a plant cell, a plant or a part thereof, as compared to a corresponding non-transformed wild type non-human organism or a part thereof; and
[37210] (b) growing the non-human organism under conditions which permit the production of isoleucine or a composition comprising isoleucine in said non-human organism or in the culture medium surrounding said non-human organism.

[37211] An embodiment of the present invention relates to a process for the production of leucine, which comprises
[37212] (a1) increasing or generating the activity of a polypeptide comprising a polypeptide as depicted in a respective line in column 5 or 8 of Table II, application no. 6, or a homolog or a fragment thereof, a consensus sequence or at least one polypeptide motif as depicted in the respective line in column 8 of Table IV, application no. 6, whereby the respective line discloses in column 7 the fine chemical leucine; or
[37213] (a2) increasing or generating the activity of an expression product of one or more nucleic acid molecule(s) comprising a polynucleotide as depicted in the respective line in column 5 or 8 of Table I, application no. 6, preferably the coding region thereof, or a homolog or a fragment thereof, whereby the respective line discloses in column 7 the fine chemical leucine; or
[37214] (a3) increasing or generating the activity of a functional equivalent of (a1) or (a2); in a non-human organism or a part thereof; preferably a microorganism, a plant cell, a plant or a part thereof, as compared to a corresponding non-transformed wild type non-human organism or a part thereof; and
[37215] (b) growing the non-human organism under conditions which permit the production of leucine or a composition comprising leucine in said non-human organism or in the culture medium surrounding said non-human organism.

[37216] An embodiment of the present invention relates to a process for the production of valine, which comprises
[37217] (a1) increasing or generating the activity of a polypeptide comprising a polypeptide as depicted in a respective line in column 5 or 8 of Table II, application no. 6, or a homolog or a fragment thereof, a consensus sequence or at least one polypeptide motif as depicted in the respective line in column 8 of Table IV, application no. 6, whereby the respective line discloses in column 7 the fine chemical valine; or
[37218] (a2) increasing or generating the activity of an expression product of one or more nucleic acid molecule(s) comprising a polynucleotide as depicted in the respective line in column 5 or 8 of Table I, application no. 6, preferably the coding region thereof, or a homolog or a fragment thereof, whereby the respective line discloses in column 7 the fine chemical valine; or
[37219] (a3) increasing or generating the activity of a functional equivalent of (a1) or (a2);
[37220] in a non-human organism or a part thereof; preferably a microorganism, a plant cell, a plant or a part thereof, as compared to a corresponding non-transformed wild type non-human organism or a part thereof; and
[37221] (b) growing the non-human organism under conditions which permit the production of valine or a composition comprising valine in said non-human organism or in the culture medium surrounding said non-human organism.

[37222] Accordingly, the increase or generation of one or more said activities is for example conferred by one or more expression products of said nucleic acid molecule, e.g. proteins. Accordingly, in the present invention described above, the increase or generation of one or more said activities is for example conferred by one or more protein(s) each comprising a polypeptide selected from the group as depicted in Table II, application no. 6, column 5 and 8, or a homolog or a fragment thereof.

[37223] The process of the invention comprises in one embodiment the following steps:
[37224] (i) increasing or generating of the expression of; and/or
[37225] (ii) increasing or generating the expression of an expression product of; and/or
[37226] (iii) increasing or generating one or more activities of an expression product encoded by;
   at least one nucleic acid molecule (in the following “Fine Chemical Related Protein (FCRP)”-encoding gene or “FCRP”-gene) comprising a nucleic acid molecule selected from the group consisting of:
[37227] (a) a nucleic acid molecule encoding the polypeptide shown in column 5 or 8 of Table II, preferably Table II B, application no. 6, or a homolog or a fragment thereof;
[37228] (b) a nucleic acid molecule shown in column 5 or 8 of Table I, preferably Table I B, application no. 6, or a homolog or a fragment thereof (preferably the coding region thereof);
[37229] (c) a nucleic acid molecule, which, as a result of the degeneracy of the genetic code, can be derived from a polypeptide sequence depicted in column 5 or 8 of Table II, preferably Table II B, application no. 6;
[37230] (d) a nucleic acid molecule having at least 30%, in particular at least 50%, 60%, 70%, 80%, 85%, 90%, 95%, 97%, 98%, 99% or 99.5% identity with the nucleic acid molecule sequence of a polynucleotide comprising the nucleic acid molecule shown in column 5 or 8 of Table I, preferably Table I B, application no. 6, or the coding region thereof;
[37231] (e) a nucleic acid molecule encoding a polypeptide having at least 30%, in particular 50%, 60%, 70%, 80%, 85%, 90%, 95%, 97%, 98%, 99% or 99.5% identity with the amino acid sequence of the polypeptide encoded by the nucleic acid molecule of (a), (b), (c) or (d);
[37232] (f) a nucleic acid molecule which hybridizes with a nucleic acid molecule of (a), (b), (c), (d) or (e) under stringent hybridization conditions;
[37233] (g) a nucleic acid molecule encoding a polypeptide which can be isolated with the aid of monoclonal or polyclonal antibodies made against a polypeptide encoded by one of the nucleic acid molecules of (a), (b), (c), (d), (e) or (f);
[37234] (h) a nucleic acid molecule encoding a polypeptide comprising the consensus sequence or one or more polypeptide motifs as shown in column 8 of Table IV, application no. 6;
[37235] (i) a nucleic acid molecule encoding a polypeptide having the activity represented by a respective protein as depicted in column 5 of Table II, application no. 6;
[37236] (j) a nucleic acid molecule which comprises a polynucleotide, which is obtained by amplifying a cDNA library or a genomic library using the primers as depicted in column 8 of Table III, application no. 6; and
[37237] (k) a nucleic acid molecule which is obtainable by screening a suitable nucleic acid library, especially a cDNA library and/or a genomic library, under stringent hybridization conditions with a probe comprising a complementary sequence of a nucleic acid molecule of (a), (b), (c), (d), (e), (f), (g), (h), (i) or (j) or with a fragment thereof, having at least 15 nt, preferably 20 nt, 30 nt, 50 nt, 100 nt, 200 nt, 500 nt, 1000 nt, 1500 nt, 2000 nt or 3000 nt
[37238] of a nucleic acid molecule complementary to a nucleic acid molecule sequence characterized in (a), (b), (c), (d), (e), (f), (g), (h), (i) or (j); or a nucleic acid molecule comprising a sequence which is complementary thereto.
   (All the references to Tables I to IV are references to the corresponding lines of Tables I to IV.)

[37239] The term “increasing or generating of the expression of” may also be interchanged by the term “overexpressing”.

[37240] In a preferred embodiment thereof said nucleic acid molecule encodes a polypeptide which has the activity of the polypeptide represented by a protein comprising a polypeptide as depicted in the corresponding hit in column 5 of Table II, application no. 6.

[37241] In another preferred embodiment thereof said nucleic acid molecule confers a generation or an increase of the respective fine chemical in a non-human organism or a part thereof as compared to a corresponding wild-type non-human organism or part thereof.

[37242] In another preferred embodiment thereof said nucleic acid molecule encodes a polypeptide which has the activity of the polypeptide represented by a protein as depicted in the corresponding hit in column 5 of Table II, application no. 6, and confers a generation or an increase of the respective fine chemical in a non-human organism or a part thereof as compared to a corresponding wild-type non-human organism or part thereof.

[37243] Accordingly, the genes of the present invention or used in accordance with the present invention, which respectively encode a protein having an activity of 2,3-dihydroxyphenylpropionate 1,2-dioxygenase, 2-isopropylmalate synthase, 3-isopropylmalate dehydrogenase, 47266012-protein, 50S ribosomal protein L14, ABC transporter ATP binding component, ABC transporter ATP-binding protein, ABC transporter component, ABC transporter permease protein, acetolactate synthase, acetolactate synthase small subunit, acetyl CoA carboxylase, acetyl-CoA acetyltransferase, acetyltransferase, acid shock protein, acyl transferase, acyltransferase, adenylate kinase, adenylosuccinate lyase, agmatinase, aldehyde dehydrogenase, aminotransferase, anthranilate synthase component II, arginine exporter protein, At1g19800-protein, At1g23110-protein, At1g47380-protein, At4g32480-protein, At5g16650-protein, ATP-binding component of a transport system, auxin response factor, b0050-protein, b1003-protein, b1163-protein, b1445-protein, b1522-protein, b1670-protein, b1672-protein, b2513-protein, b2613-protein, b2673-protein, b2739-protein, b2812-protein, b3083-protein, b3490-protein, b3989-protein, b4029-protein, b4050-protein, b4056-protein, b4263-protein, beta-galactosidase, beta-hydroxylase, bifunctional protein (phosphoribosyltransferase and regulatory protein), binding-protein-dependent transport systems inner membrane component, branched chain aminotransferase, branched-chain amino acid permease, branched-chain amino-acid aminotransferase, calcium-dependent protein kinase, carbamoyl-phosphate synthase subunit, CBL-interacting protein kinase, cell division control protein, chaperone protein CIpB, cullin, cyclin, cyclin D, cytochrome c-type protein, dihydroxyacid dehydratase, disease resistance protein, DNA helicase II, DNA helicase IV, DNA mismatch repair protein, DNA polymerase, DNA-binding protein, elongation factor Tu, enoyl-CoA hydratase, eukaryotic translation initiation factor, eukaryotic translation initiation factor 5, ferredoxin, flavodoxin, fumarylacetoacetate hydrolase, GDP-mannose 4,6-dehydratase, geranylgeranyl pyrophosphate synthase, gluconate transport system permease 3, glucose-1-phosphate cytidylyltransferase, glucose-6-phosphate 1-dehydrogenase, glutamate-ammonia-ligase, glutamine synthetase, glutaredoxin, glycerol-3-phosphate dehydrogenase, glycogen (starch) synthase, glycogen synthase, glycoprotease, glycosyl transferase, GM02LC11114-protein, GM02LC5744-protein, H/ACA ribonucleoprotein complex subunit 3, harpin-induced family protein, heat shock transcription factor, hexose transporter, histone H2A, homocitrate synthase, homoserine dehydrogenase, hydrolase, iron(III) dicitrate-binding protein, isochorismate synthase, isopropylmalate isomerase large subunit, ketol-acid reductoisomerase, L-serine dehydratase, MADS-box transcription factor, major facilitator superfamily transporter protein, malate dehydrogenase, malic enzyme, membrane protein, membrane transport protein, methylglyoxal synthase, mitochondrial dicarboxylate transporter, monothiol glutaredoxin, murein transglycosylase, Na+/K+ transporter, NAD(P)H-quinone oxidoreductase subunit, NADH-quinone oxidoreductase subunit, NADP-dependent malic enzyme, Nucleoside monophosphate phosphohydrolase, O-antigen chain length determinant, oxidoreductase, oxireductase, peptidase, phosphate transporter, phosphoadenosine phosphosulfate reductase , phosphoanhydride phosphorylase, phosphoglycerate kinase, phosphopantetheine adenylyltransferase, photosystem II protein, polygalacturonase, polyphosphate kinase, precorrin methylase, protein kinase, protein phosphatase, protoporphyrin oxidase, purine nucleoside phosphorylase, purine-nucleoside phosphorylase, pyruvate kinase, riboflavin biosynthesis protein, ribosephosphate isomerase, constitutive, RNA binding protein, RNA-binding protein, Sec-independent protein translocase subunit, serine hydroxymethyltransferase, short-chain alcohol dehydrogenase family, sll1032-protein, sll1455-protein, sll1761-protein, superoxide dismutase, thioredoxin, thioredoxin family protein, threonine dehydratase, threonine synthase, transcription factor, transcriptional regulator, transport protein, trehalose phosphatase, TTC1386-protein, urease subunit, vacuolar ATPase subunit, valine-pyruvate transaminase, YAL013W-protein, ydr183w-protein, ygl237c-protein, YGR193C-protein, yhr006w-protein, YKL038W-protein, YLR224W-protein, zinc finger protein, zinc transporter, or Zm_{—}4842_BE510522-protein, which respectively encode a protein comprising a polypeptide encoded by a nucleic acid sequence as shown in Table I, application no. 6, column 5 or 8, (preferably the coding region thereof), or a homolog or a fragment thereof, which respectively encode a protein comprising a polypeptide as depicted in Table II, application no. 6, column 5 or 8, or a homolg or a fragment thereof, and/or which respectively can be amplified with the primer set shown in Table III, application no. 6, column 8, are also referred to as “FCRP genes”.

[37244] Proteins or polypeptides encoded by “FCRP-genes” are referred to as “Fine Chemical Related Proteins” or “FCRP”. For the purposes of the description of the present invention, the respective protein having an activity of 2,3-dihydroxyphenylpropionate 1,2-dioxygenase, 2-isopropylmalate synthase, 3-isopropylmalate dehydrogenase, 47266012-protein, 50S ribosomal protein L14, ABC transporter ATP binding component, ABC transporter ATP-binding protein, ABC transporter component, ABC transporter permease protein, acetolactate synthase, acetolactate synthase small subunit, acetyl CoA carboxylase, acetyl-CoA acetyltransferase, acetyltransferase, acid shock protein, acyl transferase, acyltransferase, adenylate kinase, adenylosuccinate lyase, agmatinase, aldehyde dehydrogenase, aminotransferase, anthranilate synthase component II, arginine exporter protein, At1g19800-protein, At1g23110-protein, At1g47380-protein, At4g32480-protein, At5g16650-protein, ATP-binding component of a transport system, auxin response factor, b0050-protein, b1003-protein, b1163-protein, b1445-protein, b1522-protein, b1670-protein, b1672-protein, b2513-protein, b2613-protein, b2673-protein, b2739-protein, b2812-protein, b3083-protein, b3490-protein, b3989-protein, b4029-protein, b4050-protein, b4056-protein, b4263-protein, beta-galactosidase, beta-hydroxylase, bifunctional protein (phosphoribosyltransferase and regulatory protein), binding-proteindependent transport systems inner membrane component, branched chain aminotransferase, branched-chain amino acid permease, branched-chain amino-acid aminotransferase, calcium-dependent protein kinase, carbamoyl-phosphate synthase subunit, CBL-interacting protein kinase, cell division control protein, chaperone protein CIpB, cullin, cyclin, cyclin D, cytochrome c-type protein, dihydroxyacid dehydratase, disease resistance protein, DNA helicase II, DNA helicase IV, DNA mismatch repair protein, DNA polymerase, DNA-binding protein, elongation factor Tu, enoyl-CoA hydratase, eukaryotic translation initiation factor, eukaryotic translation initiation factor 5, ferredoxin, flavodoxin, fumarylacetoacetate hydrolase, GDP-mannose 4,6-dehydratase, geranylgeranyl pyrophosphate synthase, gluconate transport system permease 3, glucose-1-phosphate cytidylyltransferase, glucose-6-phosphate 1-dehydrogenase, glutamate-ammonia-ligase, glutamine synthetase, glutaredoxin, glycerol-3-phosphate dehydrogenase, glycogen (starch) synthase, glycogen synthase, glycoprotease, glycosyl transferase, GM02LC11114-protein, GM02LC5744-protein, H/ACA ribonucleoprotein complex subunit 3, harpin-induced family protein, heat shock transcription factor, hexose transporter, histone H2A, homocitrate synthase, homoserine dehydrogenase, hydrolase, iron(III) dicitrate-binding protein, isochorismate synthase, isopropylmalate isomerase large subunit, ketol-acid reductoisomerase, L-serine dehydratase, MADS-box transcription factor, major facilitator superfamily transporter protein, malate dehydrogenase, malic enzyme, membrane protein, membrane transport protein, methylglyoxal synthase, mitochondrial dicarboxylate transporter, monothiol glutaredoxin, murein transglycosylase, Na+/K+ transporter, NAD(P)H-quinone oxidoreductase subunit, NADH-quinone oxidoreductase subunit, NADP-dependent malic enzyme, Nucleoside monophosphate phosphohydrolase, O-antigen chain length determinant, oxidoreductase, oxireductase, peptidase, phosphate transporter, phosphoadenosine phosphosulfate reductase , phosphoanhydride phosphorylase, phosphoglycerate kinase, phosphopantetheine adenylyltransferase, photosystem II protein, polygalacturonase, polyphosphate kinase, precorrin methylase, protein kinase, protein phosphatase, protoporphyrin oxidase, purine nucleoside phosphorylase, purinenucleoside phosphorylase, pyruvate kinase, riboflavin biosynthesis protein, ribosephosphate isomerase, constitutive, RNA binding protein, RNA-binding protein, Sec-independent protein translocase subunit, serine hydroxymethyltransferase, short-chain alcohol dehydrogenase family, sll1032-protein, sll1455-protein, sll1761-protein, superoxide dismutase, thioredoxin, thioredoxin family protein, threonine dehydratase, threonine synthase, transcription factor, transcriptional regulator, transport protein, trehalose-phosphatase, TTC1386-protein, urease subunit, vacuolar ATPase subunit, valine-pyruvate transaminase, YAL013W-protein, ydr183w-protein, ygl237c-protein, YGR193C-protein, yhr006w-protein, YKL038W-protein, YLR224W-protein, zinc finger protein, zinc transporter, or Zm_{—}4842_BE510522-protein, the respective protein comprising a polypeptide encoded by one or more respective nucleic acid sequences as shown in Table I, application no. 6, column 5 or 8, (preferably the coding region thereof), or a homolog or fragment thereof, the respective protein comprising a respective polypeptide as depicted in Table II, application no. 6, column 5 or 8, or a homolog or fragment thereof, the respective protein comprising a sequence corresponding to the consensus sequence as shown in Table IV, application no. 6, column 8, and/or the respective protein comprising at least one polypeptide motif as shown in Table IV, application no. 6, column 8 is also referred to as Fine Chemical Related Protein” or “FCRP”.

[37245] Thus, in one embodiment, the present invention provides a process of the production of isoleucine, leucine, and/or valine, by increasing or generating one or more activities, especially selected from the group consisting of 2,3-dihydroxyphenylpropionate 1,2-dioxygenase, 2-isopropylmalate synthase, 3-isopropylmalate dehydrogenase, 47266012-protein, 50S ribosomal protein L14, ABC transporter ATP binding component, ABC transporter ATP-binding protein, ABC transporter component, ABC transporter permease protein, acetolactate synthase, acetolactate synthase small subunit, acetyl CoA carboxylase, acetyl-CoA acetyltransferase, acetyltransferase, acid shock protein, acyl transferase, acyltransferase, adenylate kinase, adenylosuccinate lyase, agmatinase, aldehyde dehydrogenase, aminotransferase, anthranilate synthase component II, arginine exporter protein, At1g19800-protein, At1g23110-protein, At1g47380-protein, At4g32480-protein, At5g16650-protein, ATP-binding component of a transport system, auxin response factor, b0050-protein, b1003-protein, b1163-protein, b1445-protein, b1522-protein, b1670-protein, b1672-protein, b2513-protein, b2613-protein, b2673-protein, b2739-protein, b2812-protein, b3083-protein, b3490-protein, b3989-protein, b4029-protein, b4050-protein, b4056-protein, b4263-protein, beta-galactosidase, beta-hydroxylase, bifunctional protein (phosphoribosyltransferase and regulatory protein), binding-protein-dependent transport systems inner membrane component, branched chain aminotransferase, branched-chain amino acid permease, branched-chain amino-acid aminotransferase, calcium-dependent protein kinase, carbamoyl-phosphate synthase subunit, CBL-interacting protein kinase, cell division control protein, chaperone protein CIpB, cullin, cyclin, cyclin D, cytochrome c-type protein, dihydroxyacid dehydratase, disease resistance protein, DNA helicase II, DNA helicase IV, DNA mismatch repair protein, DNA polymerase, DNA-binding protein, elongation factor Tu, enoyl-CoA hydratase, eukaryotic translation initiation factor, eukaryotic translation initiation factor 5, ferredoxin, flavodoxin, fumarylacetoacetate hydrolase, GDP-mannose 4,6-dehydratase, geranylgeranyl pyrophosphate synthase, gluconate transport system permease 3, glucose-1-phosphate cytidylyltransferase, glucose-6-phosphate 1-dehydrogenase, glutamate-ammonia-ligase, glutamine synthetase, glutaredoxin, glycerol-3-phosphate dehydrogenase, glycogen (starch) synthase, glycogen synthase, glycoprotease, glycosyl transferase, GM02LC11114-protein, GM02LC5744-protein, H/ACA ribonucleoprotein complex subunit 3, harpin-induced family protein, heat shock transcription factor, hexose transporter, histone H2A, homocitrate synthase, homoserine dehydrogenase, hydrolase, iron(III) dicitrate-binding protein, isochorismate synthase, isopropylmalate isomerase large subunit, ketol-acid reductoisomerase, L-serine dehydratase, MADS-box transcription factor, major facilitator superfamily transporter protein, malate dehydrogenase, malic enzyme, membrane protein, membrane transport protein, methylglyoxal synthase, mitochondrial dicarboxylate transporter, monothiol glutaredoxin, murein transglycosylase, Na+/K+ transporter, NAD(P)H-quinone oxidoreductase subunit, NADH-quinone oxidoreductase subunit, NADP-dependent malic enzyme, Nucleoside monophosphate phosphohydrolase, O-antigen chain length determinant, oxidoreductase, oxireductase, peptidase, phosphate transporter, phosphoadenosine phosphosulfate reductase , phosphoanhydride phosphorylase, phosphoglycerate kinase, phosphopantetheine adenylyltransferase, photosystem II protein, polygalacturonase, polyphosphate kinase, precorrin methylase, protein kinase, protein phosphatase, protoporphyrin oxidase, purine nucleoside phosphorylase, purinenucleoside phosphorylase, pyruvate kinase, riboflavin biosynthesis protein, ribosephosphate isomerase, constitutive, RNA binding protein, RNA-binding protein, Sec-independent protein translocase subunit, serine hydroxymethyltransferase, short-chain alcohol dehydrogenase family, sll1032-protein, sll1455-protein, sll1761-protein, superoxide dismutase, thioredoxin, thioredoxin family protein, threonine dehydratase, threonine synthase, transcription factor, transcriptional regulator, transport protein, trehalose-phosphatase, TTC1386-protein, urease subunit, vacuolar ATPase subunit, valine-pyruvate transaminase, YAL013W-protein, ydr183w-protein, ygl237c-protein, YGR193C-protein, yhr006w-protein, YKL038W-protein, YLR224W-protein, zinc finger protein, zinc transporter, and Zm_{—}4842_BE510522-protein, which is conferred by one or more FCRPs or the gene product of one or more FCRP-genes, for example by the gene product of a nucleic acid sequences comprising a polynucleotide selected from the group as shown in Table I, application no. 6, column 5 or 8, (preferably by the coding region thereof), or a homolog or a fragment thereof, e.g. or by one or more proteins each comprising a polypeptide encoded by one or more nucleic acid sequences selected from the group as shown in Table I, application no. 6, column 5 or 8, (preferably by the coding region thereof), or a homolog or a fragment thereof, or by one or more protein(s) each comprising a polypeptide selected from the group as depicted in Table II, application no. 6, column 5 and 8, or a homolog thereof, or a protein comprising a sequence corresponding to the consensus sequence or comprising at least one polypeptide motif as shown in Table IV, application no. 6, column 8.

[37246] for the disclosure of this paragraph see [0025.1.1.1] above.

[37247] In an embodiment, the process comprises increasing or generating the activity of one or more polypeptides having said activity, e.g. by generating or increasing the amount and/or specific activity in the cell or a compartment of a cell of one of more FCRP, especially selected from the group consisting of 2,3-dihydroxyphenylpropionate 1,2-dioxygenase, 2-isopropylmalate synthase, 3-isopropylmalate dehydrogenase, 47266012-protein, 50S ribosomal protein L14, ABC transporter ATP binding component, ABC transporter ATP-binding protein, ABC transporter component, ABC transporter permease protein, acetolactate synthase, acetolactate synthase small subunit, acetyl CoA carboxylase, acetyl-CoA acetyltransferase, acetyltransferase, acid shock protein, acyl transferase, acyltransferase, adenylate kinase, adenylosuccinate lyase, agmatinase, aldehyde dehydrogenase, aminotransferase, anthranilate synthase component II, arginine exporter protein, At1g19800-protein, At1g23110-protein, At1g47380-protein, At4g32480-protein, At5g16650-protein, ATP-binding component of a transport system, auxin response factor, b0050-protein, b1003-protein, b1163-protein, b1445-protein, b1522-protein, b1670-protein, b1672-protein, b2513-protein, b2613-protein, b2673-protein, b2739-protein, b2812-protein, b3083-protein, b3490-protein, b3989-protein, b4029-protein, b4050-protein, b4056-protein, b4263-protein, beta-galactosidase, beta-hydroxylase, bifunctional protein (phosphoribosyltransferase and regulatory protein), binding-protein-dependent transport systems inner membrane component, branched chain aminotransferase, branched-chain amino acid permease, branched-chain amino-acid aminotransferase, calcium-dependent protein kinase, carbamoyl-phosphate synthase subunit, CBL-interacting protein kinase, cell division control protein, chaperone protein CIpB, cullin, cyclin, cyclin D, cytochrome c-type protein, dihydroxyacid dehydratase, disease resistance protein, DNA helicase II, DNA helicase IV, DNA mismatch repair protein, DNA polymerase, DNA-binding protein, elongation factor Tu, enoyl-CoA hydratase, eukaryotic translation initiation factor, eukaryotic translation initiation factor 5, ferredoxin, flavodoxin, fumarylacetoacetate hydrolase, GDP-mannose 4,6-dehydratase, geranylgeranyl pyrophosphate synthase, gluconate transport system permease 3, glucose-1-phosphate cytidylyltransferase, glucose-6-phosphate 1-dehydrogenase, glutamate-ammonia-ligase, glutamine synthetase, glutaredoxin, glycerol-3-phosphate dehydrogenase, glycogen (starch) synthase, glycogen synthase, glycoprotease, glycosyl transferase, GM02LC11114-protein, GM02LC5744-protein, H/ACA ribonucleoprotein complex subunit 3, harpin-induced family protein, heat shock transcription factor, hexose transporter, histone H2A, homocitrate synthase, homoserine dehydrogenase, hydrolase, iron(III) dicitrate-binding protein, isochorismate synthase, isopropylmalate isomerase large subunit, ketol-acid reductoisomerase, L-serine dehydratase, MADS-box transcription factor, major facilitator superfamily transporter protein, malate dehydrogenase, malic enzyme, membrane protein, membrane transport protein, methylglyoxal synthase, mitochondrial dicarboxylate transporter, monothiol glutaredoxin, murein transglycosylase, Na+/K+ transporter, NAD(P)H-quinone oxidoreductase subunit, NADH-quinone oxidoreductase subunit, NADP-dependent malic enzyme, Nucleoside monophosphate phosphohydrolase, O-antigen chain length determinant, oxidoreductase, oxireductase, peptidase, phosphate transporter, phosphoadenosine phosphosulfate reductase , phosphoanhydride phosphorylase, phosphoglycerate kinase, phosphopantetheine adenylyltransferase, photosystem II protein, polygalacturonase, polyphosphate kinase, precorrin methylase, protein kinase, protein phosphatase, protoporphyrin oxidase, purine nucleoside phosphorylase, purine-nucleoside phosphorylase, pyruvate kinase, riboflavin biosynthesis protein, ribosephosphate isomerase, constitutive, RNA binding protein, RNA-binding protein, Sec-independent protein translocase subunit, serine hydroxymethyltransferase, short-chain alcohol dehydrogenase family, sll1032-protein, sll1455-protein, sll1761protein, superoxide dismutase, thioredoxin, thioredoxin family protein, threonine dehydratase, threonine synthase, transcription factor, transcriptional regulator, transport protein, trehalosephosphatase, TTC1386-protein, urease subunit, vacuolar ATPase subunit, valine-pyruvate transaminase, YAL013W-protein, ydr183w-protein, ygl237c-protein, YGR193C-protein, yhr006w-protein, YKL038W-protein, YLR224W-protein, zinc finger protein, zinc transporter, and Zm_{—}4842_BE510522-protein, for example of the respective polypeptide as depicted in Table II, application no. 6, column 5 and 8, or a homolog or a fragment thereof, or the respective polypeptide comprising a sequence corresponding to the consensus sequences as shown in Table IV, application no. 6, column 8, or the respective polypeptide comprising at least one polypeptide motif as depicted in Table IV, application no. 6, column 8.

[37248] A further embodiment of the present invention relates to a process for the production of isoleucine, which comprises
[37249] (a) increasing or generating the activity of a 47266012-protein non-targeted in a non-human organism or a part thereof, preferably a microorganism, a plant cell, a plant or a part thereof, as compared to a corresponding non-transformed wild type non-human organism or a part thereof; and
[37250] (b) growing the non-human organism or a part thereof under conditions which permit the production of isoleucine or a composition comprising isoleucine in said non-human organism or in the culture medium surrounding said non-human organism.

[37251] A further embodiment of the present invention relates to a process for the production of leucine, which comprises
[37252] (a) increasing or generating the activity of a pyruvate kinase non-targeted in a non-human organism or a part thereof, preferably a microorganism, a plant cell, a plant or a part thereof, as compared to a corresponding non-transformed wild type non-human organism or a part thereof; and
[37253] (b) growing the non-human organism or a part thereof under conditions which permit the production of leucine or a composition comprising leucine in said non-human organism or in the culture medium surrounding said non-human organism.

[37254] A further embodiment of the present invention relates to a process for the production of valine, which comprises
[37255] (a) increasing or generating the activity of a pyruvate kinase non-targeted in a non-human organism or a part thereof, preferably a microorganism, a plant cell, a plant or a part thereof, as compared to a corresponding non-transformed wild type non-human organism or a part thereof; and
[37256] (b) growing the non-human organism or a part thereof under conditions which permit the production of valine or a composition comprising valine in said non-human organism or in the culture medium surrounding said non-human organism.

[37257] A further embodiment of the present invention relates to a process for the production of valine, which comprises
[37258] (a) increasing or generating the activity of a pyruvate kinase non-targeted in a non-human organism or a part thereof, preferably a microorganism, a plant cell, a plant or a part thereof, as compared to a corresponding non-transformed wild type non-human organism or a part thereof; and
[37259] (b) growing the non-human organism or a part thereof under conditions which permit the production of valine or a composition comprising valine in said non-human organism or in the culture medium surrounding said non-human organism.

[37260] A further embodiment of the present invention relates to a process for the production of isoleucine, which comprises
[37261] (a) increasing or generating the activity of a glucose-6-phosphate 1-dehydrogenase non-targeted in a non-human organism or a part thereof, preferably a microorganism, a plant cell, a plant or a part thereof, as compared to a corresponding non-transformed wild type non-human organism or a part thereof; and
[37262] (b) growing the non-human organism or a part thereof under conditions which permit the production of isoleucine or a composition comprising isoleucine in said non-human organism or in the culture medium surrounding said non-human organism.

[37263] A further embodiment of the present invention relates to a process for the production of leucine, which comprises
[37264] (a) increasing or generating the activity of a glucose-6-phosphate 1-dehydrogenase non-targeted in a non-human organism or a part thereof, preferably a microorganism, a plant cell, a plant or a part thereof, as compared to a corresponding non-transformed wild type non-human organism or a part thereof; and
[37265] (b) growing the non-human organism or a part thereof under conditions which permit the production of leucine or a composition comprising leucine in said non-human organism or in the culture medium surrounding said non-human organism.

[37266] A further embodiment of the present invention relates to a process for the production of valine, which comprises
[37267] (a) increasing or generating the activity of a glucose-6-phosphate 1-dehydrogenase non-targeted in a non-human organism or a part thereof, preferably a microorganism, a plant cell, a plant or a part thereof, as compared to a corresponding non-transformed wild type non-human organism or a part thereof; and
[37268] (b) growing the non-human organism or a part thereof under conditions which permit the production of valine or a composition comprising valine in said non-human organism or in the culture medium surrounding said non-human organism.

[37269] A further embodiment of the present invention relates to a process for the production of valine, which comprises
[37270] (a) increasing or generating the activity of a protein phosphatase non-targeted in a non-human organism or a part thereof, preferably a microorganism, a plant cell, a plant or a part thereof, as compared to a corresponding non-transformed wild type non-human organism or a part thereof; and
[37271] (b) growing the non-human organism or a part thereof under conditions which permit the production of valine or a composition comprising valine in said non-human organism or in the culture medium surrounding said non-human organism.

[37272] A further embodiment of the present invention relates to a process for the production of valine, which comprises
[37273] (a) increasing or generating the activity of a DNA-binding protein non-targeted in a non-human organism or a part thereof, preferably a microorganism, a plant cell, a plant or a part thereof, as compared to a corresponding non-transformed wild type non-human organism or a part thereof; and
[37274] (b) growing the non-human organism or a part thereof under conditions which permit the production of valine or a composition comprising valine in said non-human organism or in the culture medium surrounding said non-human organism.

[37275] A further embodiment of the present invention relates to a process for the production of isoleucine, which comprises
[37276] (a) increasing or generating the activity of a At1g19800-protein non-targeted in a non-human organism or a part thereof, preferably a microorganism, a plant cell, a plant or a part thereof, as compared to a corresponding non-transformed wild type non-human organism or a part thereof; and
[37277] (b) growing the non-human organism or a part thereof under conditions which permit the production of isoleucine or a composition comprising isoleucine in said non-human organism or in the culture medium surrounding said non-human organism.

[37278] A further embodiment of the present invention relates to a process for the production of leucine, which comprises
[37279] (a) increasing or generating the activity of a At1g19800-protein non-targeted in a non-human organism or a part thereof, preferably a microorganism, a plant cell, a plant or a part thereof, as compared to a corresponding non-transformed wild type non-human organism or a part thereof; and
[37280] (b) growing the non-human organism or a part thereof under conditions which permit the production of leucine or a composition comprising leucine in said non-human organism or in the culture medium surrounding said non-human organism.

[37281] A further embodiment of the present invention relates to a process for the production of valine, which comprises
[37282] (a) increasing or generating the activity of a At1g23110-protein non-targeted in a non-human organism or a part thereof, preferably a microorganism, a plant cell, a plant or a part thereof, as compared to a corresponding non-transformed wild type non-human organism or a part thereof; and
[37283] (b) growing the non-human organism or a part thereof under conditions which permit the production of valine or a composition comprising valine in said non-human organism or in the culture medium surrounding said non-human organism.

[37284] A further embodiment of the present invention relates to a process for the production of isoleucine, which comprises
[37285] (a) increasing or generating the activity of a cullin non-targeted in a non-human organism or a part thereof, preferably a microorganism, a plant cell, a plant or a part thereof, as compared to a corresponding non-transformed wild type non-human organism or a part thereof; and
[37286] (b) growing the non-human organism or a part thereof under conditions which permit the production of isoleucine or a composition comprising isoleucine in said non-human organism or in the culture medium surrounding said non-human organism.

[37287] A further embodiment of the present invention relates to a process for the production of leucine, which comprises
[37288] (a) increasing or generating the activity of a cullin non-targeted in a non-human organism or a part thereof, preferably a microorganism, a plant cell, a plant or a part thereof, as compared to a corresponding non-transformed wild type non-human organism or a part thereof; and
[37289] (b) growing the non-human organism or a part thereof under conditions which permit the production of leucine or a composition comprising leucine in said non-human organism or in the culture medium surrounding said non-human organism.

[37290] A further embodiment of the present invention relates to a process for the production of isoleucine, which comprises
[37291] (a) increasing or generating the activity of a eukaryotic translation initiation factor 5 non-targeted in a non-human organism or a part thereof, preferably a microorganism, a plant cell, a plant or a part thereof, as compared to a corresponding non-transformed wild type non-human organism or a part thereof; and
[37292] (b) growing the non-human organism or a part thereof under conditions which permit the production of isoleucine or a composition comprising isoleucine in said non-human organism or in the culture medium surrounding said non-human organism.

[37293] A further embodiment of the present invention relates to a process for the production of leucine, which comprises
[37294] (a) increasing or generating the activity of a eukaryotic translation initiation factor 5 non-targeted in a non-human organism or a part thereof, preferably a microorganism, a plant cell, a plant or a part thereof, as compared to a corresponding non-transformed wild type non-human organism or a part thereof; and
[37295] (b) growing the non-human organism or a part thereof under conditions which permit the production of leucine or a composition comprising leucine in said non-human organism or in the culture medium surrounding said non-human organism.

[37296] A further embodiment of the present invention relates to a process for the production of isoleucine, which comprises
[37297] (a) increasing or generating the activity of a transcriptional regulator non-targeted in a non-human organism or a part thereof, preferably a microorganism, a plant cell, a plant or a part thereof, as compared to a corresponding non-transformed wild type non-human organism or a part thereof; and
[37298] (b) growing the non-human organism or a part thereof under conditions which permit the production of isoleucine or a composition comprising isoleucine in said non-human organism or in the culture medium surrounding said non-human organism.

[37299] A further embodiment of the present invention relates to a process for the production of leucine, which comprises
[37300] (a) increasing or generating the activity of a transcriptional regulator non-targeted in a non-human organism or a part thereof, preferably a microorganism, a plant cell, a plant or a part thereof, as compared to a corresponding non-transformed wild type non-human organism or a part thereof; and
[37301] (b) growing the non-human organism or a part thereof under conditions which permit the production of leucine or a composition comprising leucine in said non-human organism or in the culture medium surrounding said non-human organism.

[37302] A further embodiment of the present invention relates to a process for the production of valine, which comprises
[37303] (a) increasing or generating the activity of a transcriptional regulator non-targeted in a non-human organism or a part thereof, preferably a microorganism, a plant cell, a plant or a part thereof, as compared to a corresponding non-transformed wild type non-human organism or a part thereof; and
[37304] (b) growing the non-human organism or a part thereof under conditions which permit the production of valine or a composition comprising valine in said non-human organism or in the culture medium surrounding said non-human organism.

[37305] A further embodiment of the present invention relates to a process for the production of leucine, which comprises
[37306] (a) increasing or generating the activity of a At1g47380-protein non-targeted in a non-human organism or a part thereof, preferably a microorganism, a plant cell, a plant or a part thereof, as compared to a corresponding non-transformed wild type non-human organism or a part thereof; and
[37307] (b) growing the non-human organism or a part thereof under conditions which permit the production of leucine or a composition comprising leucine in said non-human organism or in the culture medium surrounding said non-human organism.

[37308] A further embodiment of the present invention relates to a process for the production of valine, which comprises
[37309] (a) increasing or generating the activity of a At1g47380-protein non-targeted in a non-human organism or a part thereof, preferably a microorganism, a plant cell, a plant or a part thereof, as compared to a corresponding non-transformed wild type non-human organism or a part thereof; and
[37310] (b) growing the non-human organism or a part thereof under conditions which permit the production of valine or a composition comprising valine in said non-human organism or in the culture medium surrounding said non-human organism.

[37311] A further embodiment of the present invention relates to a process for the production of isoleucine, which comprises
[37312] (a) increasing or generating the activity of a protein kinase non-targeted in a non-human organism or a part thereof, preferably a microorganism, a plant cell, a plant or a part thereof, as compared to a corresponding non-transformed wild type non-human organism or a part thereof; and
[37313] (b) growing the non-human organism or a part thereof under conditions which permit the production of isoleucine or a composition comprising isoleucine in said non-human organism or in the culture medium surrounding said non-human organism.

[37314] A further embodiment of the present invention relates to a process for the production of leucine, which comprises
[37315] (a) increasing or generating the activity of a protein kinase non-targeted in a non-human organism or a part thereof, preferably a microorganism, a plant cell, a plant or a part thereof, as compared to a corresponding non-transformed wild type non-human organism or a part thereof; and
[37316] (b) growing the non-human organism or a part thereof under conditions which permit the production of leucine or a composition comprising leucine in said non-human organism or in the culture medium surrounding said non-human organism.

[37317] A further embodiment of the present invention relates to a process for the production of valine, which comprises
[37318] (a) increasing or generating the activity of a protein kinase non-targeted in a non-human organism or a part thereof, preferably a microorganism, a plant cell, a plant or a part thereof, as compared to a corresponding non-transformed wild type non-human organism or a part thereof; and
[37319] (b) growing the non-human organism or a part thereof under conditions which permit the production of valine or a composition comprising valine in said non-human organism or in the culture medium surrounding said non-human organism.

[37320] A further embodiment of the present invention relates to a process for the production of isoleucine, which comprises
[37321] (a) increasing or generating the activity of a calcium-dependent protein kinase non-targeted in a non-human organism or a part thereof, preferably a microorganism, a plant cell, a plant or a part thereof, as compared to a corresponding non-transformed wild type non-human organism or a part thereof; and
[37322] (b) growing the non-human organism or a part thereof under conditions which permit the production of isoleucine or a composition comprising isoleucine in said non-human organism or in the culture medium surrounding said non-human organism.

[37323] A further embodiment of the present invention relates to a process for the production of leucine, which comprises
[37324] (a) increasing or generating the activity of a calcium-dependent protein kinase non-targeted in a non-human organism or a part thereof, preferably a microorganism, a plant cell, a plant or a part thereof, as compared to a corresponding non-transformed wild type non-human organism or a part thereof; and
[37325] (b) growing the non-human organism or a part thereof under conditions which permit the production of leucine or a composition comprising leucine in said non-human organism or in the culture medium surrounding said non-human organism.

[37326] A further embodiment of the present invention relates to a process for the production of valine, which comprises
[37327] (a) increasing or generating the activity of a calcium-dependent protein kinase non-targeted in a non-human organism or a part thereof, preferably a microorganism, a plant cell, a plant or a part thereof, as compared to a corresponding non-transformed wild type non-human organism or a part thereof; and
[37328] (b) growing the non-human organism or a part thereof under conditions which permit the production of valine or a composition comprising valine in said non-human organism or in the culture medium surrounding said non-human organism.

[37329] A further embodiment of the present invention relates to a process for the production of isoleucine, which comprises
[37330] (a) increasing or generating the activity of a protein phosphatase non-targeted in a non-human organism or a part thereof, preferably a microorganism, a plant cell, a plant or a part thereof, as compared to a corresponding non-transformed wild type non-human organism or a part thereof; and
[37331] (b) growing the non-human organism or a part thereof under conditions which permit the production of isoleucine or a composition comprising isoleucine in said non-human organism or in the culture medium surrounding said non-human organism.

[37332] A further embodiment of the present invention relates to a process for the production of leucine, which comprises
[37333] (a) increasing or generating the activity of a protein phosphatase non-targeted in a non-human organism or a part thereof, preferably a microorganism, a plant cell, a plant or a part thereof, as compared to a corresponding non-transformed wild type non-human organism or a part thereof; and
[37334] (b) growing the non-human organism or a part thereof under conditions which permit the production of leucine or a composition comprising leucine in said non-human organism or in the culture medium surrounding said non-human organism.

[37335] A further embodiment of the present invention relates to a process for the production of valine, which comprises
[37336] (a) increasing or generating the activity of a protein phosphatase non-targeted in a non-human organism or a part thereof, preferably a microorganism, a plant cell, a plant or a part thereof, as compared to a corresponding non-transformed wild type non-human organism or a part thereof; and
[37337] (b) growing the non-human organism or a part thereof under conditions which permit the production of valine or a composition comprising valine in said non-human organism or in the culture medium surrounding said non-human organism.

[37338] A further embodiment of the present invention relates to a process for the production of valine, which comprises
[37339] (a) increasing or generating the activity of a transcription factor non-targeted in a non-human organism or a part thereof, preferably a microorganism, a plant cell, a plant or a part thereof, as compared to a corresponding non-transformed wild type non-human organism or a part thereof; and
[37340] (b) growing the non-human organism or a part thereof under conditions which permit the production of valine or a composition comprising valine in said non-human organism or in the culture medium surrounding said non-human organism.

[37341] A further embodiment of the present invention relates to a process for the production of isoleucine, which comprises
[37342] (a) increasing or generating the activity of a protein phosphatase non-targeted in a non-human organism or a part thereof, preferably a microorganism, a plant cell, a plant or a part thereof, as compared to a corresponding non-transformed wild type non-human organism or a part thereof; and
[37343] (b) growing the non-human organism or a part thereof under conditions which permit the production of isoleucine or a composition comprising isoleucine in said non-human organism or in the culture medium surrounding said non-human organism.

[37344] A further embodiment of the present invention relates to a process for the production of valine, which comprises
[37345] (a) increasing or generating the activity of a protein phosphatase non-targeted in a non-human organism or a part thereof, preferably a microorganism, a plant cell, a plant or a part thereof, as compared to a corresponding non-transformed wild type non-human organism or a part thereof; and
[37346] (b) growing the non-human organism or a part thereof under conditions which permit the production of valine or a composition comprising valine in said non-human organism or in the culture medium surrounding said non-human organism.

[37347] A further embodiment of the present invention relates to a process for the production of isoleucine, which comprises
[37348] (a) increasing or generating the activity of a CBL-interacting protein kinase non-targeted in a non-human organism or a part thereof, preferably a microorganism, a plant cell, a plant or a part thereof, as compared to a corresponding non-transformed wild type non-human organism or a part thereof; and
[37349] (b) growing the non-human organism or a part thereof under conditions which permit the production of isoleucine or a composition comprising isoleucine in said non-human organism or in the culture medium surrounding said non-human organism.

[37350] A further embodiment of the present invention relates to a process for the production of leucine, which comprises
[37351] (a) increasing or generating the activity of a CBL-interacting protein kinase non-targeted in a non-human organism or a part thereof, preferably a microorganism, a plant cell, a plant or a part thereof, as compared to a corresponding non-transformed wild type non-human organism or a part thereof; and
[37352] (b) growing the non-human organism or a part thereof under conditions which permit the production of leucine or a composition comprising leucine in said non-human organism or in the culture medium surrounding said non-human organism.

[37353] A further embodiment of the present invention relates to a process for the production of valine, which comprises
[37354] (a) increasing or generating the activity of a CBL-interacting protein kinase non-targeted in a non-human organism or a part thereof, preferably a microorganism, a plant cell, a plant or a part thereof, as compared to a corresponding non-transformed wild type non-human organism or a part thereof; and
[37355] (b) growing the non-human organism or a part thereof under conditions which permit the production of valine or a composition comprising valine in said non-human organism or in the culture medium surrounding said non-human organism.

[37356] A further embodiment of the present invention relates to a process for the production of isoleucine, which comprises
[37357] (a) increasing or generating the activity of a glutaredoxin non-targeted in a non-human organism or a part thereof, preferably a microorganism, a plant cell, a plant or a part thereof, as compared to a corresponding non-transformed wild type non-human organism or a part thereof; and
[37358] (b) growing the non-human organism or a part thereof under conditions which permit the production of isoleucine or a composition comprising isoleucine in said non-human organism or in the culture medium surrounding said non-human organism.

[37359] A further embodiment of the present invention relates to a process for the production of leucine, which comprises
[37360] (a) increasing or generating the activity of a glutaredoxin non-targeted in a non-human organism or a part thereof, preferably a microorganism, a plant cell, a plant or a part thereof, as compared to a corresponding non-transformed wild type non-human organism or a part thereof; and
[37361] (b) growing the non-human organism or a part thereof under conditions which permit the production of leucine or a composition comprising leucine in said non-human organism or in the culture medium surrounding said non-human organism.

[37362] A further embodiment of the present invention relates to a process for the production of valine, which comprises
[37363] (a) increasing or generating the activity of a glutaredoxin non-targeted in a non-human organism or a part thereof, preferably a microorganism, a plant cell, a plant or a part thereof, as compared to a corresponding non-transformed wild type non-human organism or a part thereof; and
[37364] (b) growing the non-human organism or a part thereof under conditions which permit the production of valine or a composition comprising valine in said non-human organism or in the culture medium surrounding said non-human organism.

[37365] A further embodiment of the present invention relates to a process for the production of valine, which comprises
[37366] (a) increasing or generating the activity of a glutaredoxin non-targeted in a non-human organism or a part thereof, preferably a microorganism, a plant cell, a plant or a part thereof, as compared to a corresponding non-transformed wild type non-human organism or a part thereof; and
[37367] (b) growing the non-human organism or a part thereof under conditions which permit the production of valine or a composition comprising valine in said non-human organism or in the culture medium surrounding said non-human organism.

[37368] A further embodiment of the present invention relates to a process for the production of isoleucine, which comprises
[37369] (a) increasing or generating the activity of a pyruvate kinase non-targeted in a non-human organism or a part thereof, preferably a microorganism, a plant cell, a plant or a part thereof, as compared to a corresponding non-transformed wild type non-human organism or a part thereof; and
[37370] (b) growing the non-human organism or a part thereof under conditions which permit the production of isoleucine or a composition comprising isoleucine in said non-human organism or in the culture medium surrounding said non-human organism.

[37371] A further embodiment of the present invention relates to a process for the production of leucine, which comprises
[37372] (a) increasing or generating the activity of a pyruvate kinase non-targeted in a non-human organism or a part thereof, preferably a microorganism, a plant cell, a plant or a part thereof, as compared to a corresponding non-transformed wild type non-human organism or a part thereof; and
[37373] (b) growing the non-human organism or a part thereof under conditions which permit the production of leucine or a composition comprising leucine in said non-human organism or in the culture medium surrounding said non-human organism.

[37374] A further embodiment of the present invention relates to a process for the production of valine, which comprises
[37375] (a) increasing or generating the activity of a pyruvate kinase non-targeted in a non-human organism or a part thereof, preferably a microorganism, a plant cell, a plant or a part thereof, as compared to a corresponding non-transformed wild type non-human organism or a part thereof; and
[37376] (b) growing the non-human organism or a part thereof under conditions which permit the production of valine or a composition comprising valine in said non-human organism or in the culture medium surrounding said non-human organism.

[37377] A further embodiment of the present invention relates to a process for the production of isoleucine, which comprises
[37378] (a) increasing or generating the activity of a thioredoxin family protein non-targeted in a non-human organism or a part thereof, preferably a microorganism, a plant cell, a plant or a part thereof, as compared to a corresponding non-transformed wild type non-human organism or a part thereof; and
[37379] (b) growing the non-human organism or a part thereof under conditions which permit the production of isoleucine or a composition comprising isoleucine in said non-human organism or in the culture medium surrounding said non-human organism.

[37380] A further embodiment of the present invention relates to a process for the production of leucine, which comprises
[37381] (a) increasing or generating the activity of a thioredoxin family protein non-targeted in a non-human organism or a part thereof, preferably a microorganism, a plant cell, a plant or a part thereof, as compared to a corresponding non-transformed wild type non-human organism or a part thereof; and
[37382] (b) growing the non-human organism or a part thereof under conditions which permit the production of leucine or a composition comprising leucine in said non-human organism or in the culture medium surrounding said non-human organism.

[37383] A further embodiment of the present invention relates to a process for the production of isoleucine, which comprises
[37384] (a) increasing or generating the activity of a harpin-induced family protein non-targeted in a non-human organism or a part thereof, preferably a microorganism, a plant cell, a plant or a part thereof, as compared to a corresponding non-transformed wild type non-human organism or a part thereof; and
[37385] (b) growing the non-human organism or a part thereof under conditions which permit the production of isoleucine or a composition comprising isoleucine in said non-human organism or in the culture medium surrounding said non-human organism.

[37386] A further embodiment of the present invention relates to a process for the production of leucine, which comprises
[37387] (a) increasing or generating the activity of a harpin-induced family protein non-targeted in a non-human organism or a part thereof, preferably a microorganism, a plant cell, a plant or a part thereof, as compared to a corresponding non-transformed wild type non-human organism or a part thereof; and
[37388] (b) growing the non-human organism or a part thereof under conditions which permit the production of leucine or a composition comprising leucine in said non-human organism or in the culture medium surrounding said non-human organism.

[37389] A further embodiment of the present invention relates to a process for the production of isoleucine, which comprises
[37390] (a) increasing or generating the activity of a DNA mismatch repair protein non-targeted in a non-human organism or a part thereof, preferably a microorganism, a plant cell, a plant or a part thereof, as compared to a corresponding non-transformed wild type non-human organism or a part thereof; and
[37391] (b) growing the non-human organism or a part thereof under conditions which permit the production of isoleucine or a composition comprising isoleucine in said non-human organism or in the culture medium surrounding said non-human organism.

[37392] A further embodiment of the present invention relates to a process for the production of leucine, which comprises
[37393] (a) increasing or generating the activity of a DNA mismatch repair protein non-targeted in a non-human organism or a part thereof, preferably a microorganism, a plant cell, a plant or a part thereof, as compared to a corresponding non-transformed wild type non-human organism or a part thereof; and
[37394] (b) growing the non-human organism or a part thereof under conditions which permit the production of leucine or a composition comprising leucine in said non-human organism or in the culture medium surrounding said non-human organism.

[37395] A further embodiment of the present invention relates to a process for the production of valine, which comprises
[37396] (a) increasing or generating the activity of a DNA mismatch repair protein non-targeted in a non-human organism or a part thereof, preferably a microorganism, a plant cell, a plant or a part thereof, as compared to a corresponding non-transformed wild type non-human organism or a part thereof; and
[37397] (b) growing the non-human organism or a part thereof under conditions which permit the production of valine or a composition comprising valine in said non-human organism or in the culture medium surrounding said non-human organism.

[37398] A further embodiment of the present invention relates to a process for the production of isoleucine, which comprises
[37399] (a) increasing or generating the activity of a protein kinase non-targeted in a non-human organism or a part thereof, preferably a microorganism, a plant cell, a plant or a part thereof, as compared to a corresponding non-transformed wild type non-human organism or a part thereof; and
[37400] (b) growing the non-human organism or a part thereof under conditions which permit the production of isoleucine or a composition comprising isoleucine in said non-human organism or in the culture medium surrounding said non-human organism.

[37401] A further embodiment of the present invention relates to a process for the production of leucine, which comprises
[37402] (a) increasing or generating the activity of a protein kinase non-targeted in a non-human organism or a part thereof, preferably a microorganism, a plant cell, a plant or a part thereof, as compared to a corresponding non-transformed wild type non-human organism or a part thereof; and
[37403] (b) growing the non-human organism or a part thereof under conditions which permit the production of leucine or a composition comprising leucine in said non-human organism or in the culture medium surrounding said non-human organism.

[37404] A further embodiment of the present invention relates to a process for the production of valine, which comprises
[37405] (a) increasing or generating the activity of a protein kinase non-targeted in a non-human organism or a part thereof, preferably a microorganism, a plant cell, a plant or a part thereof, as compared to a corresponding non-transformed wild type non-human organism or a part thereof; and
[37406] (b) growing the non-human organism or a part thereof under conditions which permit the production of valine or a composition comprising valine in said non-human organism or in the culture medium surrounding said non-human organism.

[37407] A further embodiment of the present invention relates to a process for the production of isoleucine, which comprises
[37408] (a) increasing or generating the activity of a eukaryotic translation initiation factor non-targeted in a non-human organism or a part thereof, preferably a microorganism, a plant cell, a plant or a part thereof, as compared to a corresponding non-transformed wild type non-human organism or a part thereof; and
[37409] (b) growing the non-human organism or a part thereof under conditions which permit the production of isoleucine or a composition comprising isoleucine in said non-human organism or in the culture medium surrounding said non-human organism.

[37410] A further embodiment of the present invention relates to a process for the production of leucine, which comprises
[37411] (a) increasing or generating the activity of a eukaryotic translation initiation factor non-targeted in a non-human organism or a part thereof, preferably a microorganism, a plant cell, a plant or a part thereof, as compared to a corresponding non-transformed wild type non-human organism or a part thereof; and
[37412] (b) growing the non-human organism or a part thereof under conditions which permit the production of leucine or a composition comprising leucine in said non-human organism or in the culture medium surrounding said non-human organism.

[37413] A further embodiment of the present invention relates to a process for the production of valine, which comprises
[37414] (a) increasing or generating the activity of a eukaryotic translation initiation factor non-targeted in a non-human organism or a part thereof, preferably a microorganism, a plant cell, a plant or a part thereof, as compared to a corresponding non-transformed wild type non-human organism or a part thereof; and
[37415] (b) growing the non-human organism or a part thereof under conditions which permit the production of valine or a composition comprising valine in said non-human organism or in the culture medium surrounding said non-human organism.

[37416] A further embodiment of the present invention relates to a process for the production of isoleucine, which comprises
[37417] (a) increasing or generating the activity of a glycosyl transferase non-targeted in a non-human organism or a part thereof, preferably a microorganism, a plant cell, a plant or a part thereof, as compared to a corresponding non-transformed wild type non-human organism or a part thereof; and
[37418] (b) growing the non-human organism or a part thereof under conditions which permit the production of isoleucine or a composition comprising isoleucine in said non-human organism or in the culture medium surrounding said non-human organism.

[37419] A further embodiment of the present invention relates to a process for the production of leucine, which comprises
[37420] (a) increasing or generating the activity of a glycosyl transferase non-targeted in a non-human organism or a part thereof, preferably a microorganism, a plant cell, a plant or a part thereof, as compared to a corresponding non-transformed wild type non-human organism or a part thereof; and
[37421] (b) growing the non-human organism or a part thereof under conditions which permit the production of leucine or a composition comprising leucine in said non-human organism or in the culture medium surrounding said non-human organism.

[37422] A further embodiment of the present invention relates to a process for the production of valine, which comprises
[37423] (a) increasing or generating the activity of a glycosyl transferase non-targeted in a non-human organism or a part thereof, preferably a microorganism, a plant cell, a plant or a part thereof, as compared to a corresponding non-transformed wild type non-human organism or a part thereof; and
[37424] (b) growing the non-human organism or a part thereof under conditions which permit the production of valine or a composition comprising valine in said non-human organism or in the culture medium surrounding said non-human organism.

[37425] A further embodiment of the present invention relates to a process for the production of isoleucine, which comprises
[37426] (a) increasing or generating the activity of a auxin response factor non-targeted in a non-human organism or a part thereof, preferably a microorganism, a plant cell, a plant or a part thereof, as compared to a corresponding non-transformed wild type non-human organism or a part thereof; and
[37427] (b) growing the non-human organism or a part thereof under conditions which permit the production of isoleucine or a composition comprising isoleucine in said non-human organism or in the culture medium surrounding said non-human organism.

[37428] A further embodiment of the present invention relates to a process for the production of leucine, which comprises
[37429] (a) increasing or generating the activity of a auxin response factor non-targeted in a non-human organism or a part thereof, preferably a microorganism, a plant cell, a plant or a part thereof, as compared to a corresponding non-transformed wild type non-human organism or a part thereof; and
[37430] (b) growing the non-human organism or a part thereof under conditions which permit the production of leucine or a composition comprising leucine in said non-human organism or in the culture medium surrounding said non-human organism.

[37431] A further embodiment of the present invention relates to a process for the production of valine, which comprises
[37432] (a) increasing or generating the activity of a auxin response factor non-targeted in a non-human organism or a part thereof, preferably a microorganism, a plant cell, a plant or a part thereof, as compared to a corresponding non-transformed wild type non-human organism or a part thereof; and
[37433] (b) growing the non-human organism or a part thereof under conditions which permit the production of valine or a composition comprising valine in said non-human organism or in the culture medium surrounding said non-human organism.

[37434] A further embodiment of the present invention relates to a process for the production of isoleucine, which comprises
[37435] (a) increasing or generating the activity of a glutaredoxin non-targeted in a non-human organism or a part thereof, preferably a microorganism, a plant cell, a plant or a part thereof, as compared to a corresponding non-transformed wild type non-human organism or a part thereof; and
[37436] (b) growing the non-human organism or a part thereof under conditions which permit the production of isoleucine or a composition comprising isoleucine in said non-human organism or in the culture medium surrounding said non-human organism.

[37437] A further embodiment of the present invention relates to a process for the production of leucine, which comprises
[37438] (a) increasing or generating the activity of a glutaredoxin non-targeted in a non-human organism or a part thereof, preferably a microorganism, a plant cell, a plant or a part thereof, as compared to a corresponding non-transformed wild type non-human organism or a part thereof; and
[37439] (b) growing the non-human organism or a part thereof under conditions which permit the production of leucine or a composition comprising leucine in said non-human organism or in the culture medium surrounding said non-human organism.

[37440] A further embodiment of the present invention relates to a process for the production of valine, which comprises
[37441] (a) increasing or generating the activity of a glutaredoxin non-targeted in a non-human organism or a part thereof, preferably a microorganism, a plant cell, a plant or a part thereof, as compared to a corresponding non-transformed wild type non-human organism or a part thereof; and
[37442] (b) growing the non-human organism or a part thereof under conditions which permit the production of valine or a composition comprising valine in said non-human organism or in the culture medium surrounding said non-human organism.

[37443] A further embodiment of the present invention relates to a process for the production of isoleucine, which comprises
[37444] (a) increasing or generating the activity of a heat shock transcription factor non-targeted in a non-human organism or a part thereof, preferably a microorganism, a plant cell, a plant or a part thereof, as compared to a corresponding non-transformed wild type non-human organism or a part thereof; and
[37445] (b) growing the non-human organism or a part thereof under conditions which permit the production of isoleucine or a composition comprising isoleucine in said non-human organism or in the culture medium surrounding said non-human organism.

[37446] A further embodiment of the present invention relates to a process for the production of valine, which comprises
[37447] (a) increasing or generating the activity of a protein phosphatase non-targeted in a non-human organism or a part thereof, preferably a microorganism, a plant cell, a plant or a part thereof, as compared to a corresponding non-transformed wild type non-human organism or a part thereof; and
[37448] (b) growing the non-human organism or a part thereof under conditions which permit the production of valine or a composition comprising valine in said non-human organism or in the culture medium surrounding said non-human organism.

[37449] A further embodiment of the present invention relates to a process for the production of isoleucine, which comprises
[37450] (a) increasing or generating the activity of a At4g32480-protein non-targeted in a non-human organism or a part thereof, preferably a microorganism, a plant cell, a plant or a part thereof, as compared to a corresponding non-transformed wild type non-human organism or a part thereof; and
[37451] (b) growing the non-human organism or a part thereof under conditions which permit the production of isoleucine or a composition comprising isoleucine in said non-human organism or in the culture medium surrounding said non-human organism.

[37452] A further embodiment of the present invention relates to a process for the production of leucine, which comprises
[37453] (a) increasing or generating the activity of a At4g32480-protein non-targeted in a non-human organism or a part thereof, preferably a microorganism, a plant cell, a plant or a part thereof, as compared to a corresponding non-transformed wild type non-human organism or a part thereof; and
[37454] (b) growing the non-human organism or a part thereof under conditions which permit the production of leucine or a composition comprising leucine in said non-human organism or in the culture medium surrounding said non-human organism.

[37455] A further embodiment of the present invention relates to a process for the production of valine, which comprises
[37456] (a) increasing or generating the activity of a At4g32480-protein non-targeted in a non-human organism or a part thereof, preferably a microorganism, a plant cell, a plant or a part thereof, as compared to a corresponding non-transformed wild type non-human organism or a part thereof; and
[37457] (b) growing the non-human organism or a part thereof under conditions which permit the production of valine or a composition comprising valine in said non-human organism or in the culture medium surrounding said non-human organism.

[37458] A further embodiment of the present invention relates to a process for the production of isoleucine, which comprises
[37459] (a) increasing or generating the activity of a cyclin D non-targeted in a non-human organism or a part thereof, preferably a microorganism, a plant cell, a plant or a part thereof, as compared to a corresponding non-transformed wild type non-human organism or a part thereof; and
[37460] (b) growing the non-human organism or a part thereof under conditions which permit the production of isoleucine or a composition comprising isoleucine in said non-human organism or in the culture medium surrounding said non-human organism.

[37461] A further embodiment of the present invention relates to a process for the production of leucine, which comprises
[37462] (a) increasing or generating the activity of a cyclin D non-targeted in a non-human organism or a part thereof, preferably a microorganism, a plant cell, a plant or a part thereof, as compared to a corresponding non-transformed wild type non-human organism or a part thereof; and
[37463] (b) growing the non-human organism or a part thereof under conditions which permit the production of leucine or a composition comprising leucine in said non-human organism or in the culture medium surrounding said non-human organism.

[37464] A further embodiment of the present invention relates to a process for the production of valine, which comprises
[37465] (a) increasing or generating the activity of a cyclin D non-targeted in a non-human organism or a part thereof, preferably a microorganism, a plant cell, a plant or a part thereof, as compared to a corresponding non-transformed wild type non-human organism or a part thereof; and
[37466] (b) growing the non-human organism or a part thereof under conditions which permit the production of valine or a composition comprising valine in said non-human organism or in the culture medium surrounding said non-human organism.

[37467] A further embodiment of the present invention relates to a process for the production of isoleucine, which comprises
[37468] (a) increasing or generating the activity of a calcium-dependent protein kinase non-targeted in a non-human organism or a part thereof, preferably a microorganism, a plant cell, a plant or a part thereof, as compared to a corresponding non-transformed wild type non-human organism or a part thereof; and
[37469] (b) growing the non-human organism or a part thereof under conditions which permit the production of isoleucine or a composition comprising isoleucine in said non-human organism or in the culture medium surrounding said non-human organism.

[37470] A further embodiment of the present invention relates to a process for the production of leucine, which comprises
[37471] (a) increasing or generating the activity of a calcium-dependent protein kinase non-targeted in a non-human organism or a part thereof, preferably a microorganism, a plant cell, a plant or a part thereof, as compared to a corresponding non-transformed wild type non-human organism or a part thereof; and
[37472] (b) growing the non-human organism or a part thereof under conditions which permit the production of leucine or a composition comprising leucine in said non-human organism or in the culture medium surrounding said non-human organism.

[37473] A further embodiment of the present invention relates to a process for the production of valine, which comprises
[37474] (a) increasing or generating the activity of a calcium-dependent protein kinase non-targeted in a non-human organism or a part thereof, preferably a microorganism, a plant cell, a plant or a part thereof, as compared to a corresponding non-transformed wild type non-human organism or a part thereof; and
[37475] (b) growing the non-human organism or a part thereof under conditions which permit the production of valine or a composition comprising valine in said non-human organism or in the culture medium surrounding said non-human organism.

[37476] A further embodiment of the present invention relates to a process for the production of isoleucine, which comprises
[37477] (a) increasing or generating the activity of a protein phosphatase non-targeted in a non-human organism or a part thereof, preferably a microorganism, a plant cell, a plant or a part thereof, as compared to a corresponding non-transformed wild type non-human organism or a part thereof; and
[37478] (b) growing the non-human organism or a part thereof under conditions which permit the production of isoleucine or a composition comprising isoleucine in said non-human organism or in the culture medium surrounding said non-human organism.

[37479] A further embodiment of the present invention relates to a process for the production of isoleucine, which comprises
[37480] (a) increasing or generating the activity of a At5g16650-protein non-targeted in a non-human organism or a part thereof, preferably a microorganism, a plant cell, a plant or a part thereof, as compared to a corresponding non-transformed wild type non-human organism or a part thereof; and
[37481] (b) growing the non-human organism or a part thereof under conditions which permit the production of isoleucine or a composition comprising isoleucine in said non-human organism or in the culture medium surrounding said non-human organism.

[37482] A further embodiment of the present invention relates to a process for the production of valine, which comprises
[37483] (a) increasing or generating the activity of a At5g16650-protein non-targeted in a non-human organism or a part thereof, preferably a microorganism, a plant cell, a plant or a part thereof, as compared to a corresponding non-transformed wild type non-human organism or a part thereof; and
[37484] (b) growing the non-human organism or a part thereof under conditions which permit the production of valine or a composition comprising valine in said non-human organism or in the culture medium surrounding said non-human organism.

[37485] A further embodiment of the present invention relates to a process for the production of valine, which comprises
[37486] (a) increasing or generating the activity of a monothiol glutaredoxin non-targeted in a non-human organism or a part thereof, preferably a microorganism, a plant cell, a plant or a part thereof, as compared to a corresponding non-transformed wild type non-human organism or a part thereof; and
[37487] (b) growing the non-human organism or a part thereof under conditions which permit the production of valine or a composition comprising valine in said non-human organism or in the culture medium surrounding said non-human organism.

[37488] A further embodiment of the present invention relates to a process for the production of leucine, which comprises
[37489] (a) increasing or generating the activity of a thioredoxin non-targeted in a non-human organism or a part thereof, preferably a microorganism, a plant cell, a plant or a part thereof, as compared to a corresponding non-transformed wild type non-human organism or a part thereof; and
[37490] (b) growing the non-human organism or a part thereof under conditions which permit the production of leucine or a composition comprising leucine in said non-human organism or in the culture medium surrounding said non-human organism.

[37491] A further embodiment of the present invention relates to a process for the production of valine, which comprises
[37492] (a) increasing or generating the activity of a thioredoxin non-targeted in a non-human organism or a part thereof, preferably a microorganism, a plant cell, a plant or a part thereof, as compared to a corresponding non-transformed wild type non-human organism or a part thereof; and
[37493] (b) growing the non-human organism or a part thereof under conditions which permit the production of valine or a composition comprising valine in said non-human organism or in the culture medium surrounding said non-human organism.

[37494] A further embodiment of the present invention relates to a process for the production of valine, which comprises
[37495] (a) increasing or generating the activity of a disease resistance protein non-targeted in a non-human organism or a part thereof, preferably a microorganism, a plant cell, a plant or a part thereof, as compared to a corresponding non-transformed wild type non-human organism or a part thereof; and
[37496] (b) growing the non-human organism or a part thereof under conditions which permit the production of valine or a composition comprising valine in said non-human organism or in the culture medium surrounding said non-human organism.

[37497] A further embodiment of the present invention relates to a process for the production of isoleucine, which comprises
[37498] (a) increasing or generating the activity of a pyruvate kinase non-targeted in a non-human organism or a part thereof, preferably a microorganism, a plant cell, a plant or a part thereof, as compared to a corresponding non-transformed wild type non-human organism or a part thereof; and
[37499] (b) growing the non-human organism or a part thereof under conditions which permit the production of isoleucine or a composition comprising isoleucine in said non-human organism or in the culture medium surrounding said non-human organism.

[37500] A further embodiment of the present invention relates to a process for the production of leucine, which comprises
[37501] (a) increasing or generating the activity of a pyruvate kinase non-targeted in a non-human organism or a part thereof, preferably a microorganism, a plant cell, a plant or a part thereof, as compared to a corresponding non-transformed wild type non-human organism or a part thereof; and
[37502] (b) growing the non-human organism or a part thereof under conditions which permit the production of leucine or a composition comprising leucine in said non-human organism or in the culture medium surrounding said non-human organism.

[37503] A further embodiment of the present invention relates to a process for the production of valine, which comprises
[37504] (a) increasing or generating the activity of a RNA-binding protein non-targeted in a non-human organism or a part thereof, preferably a microorganism, a plant cell, a plant or a part thereof, as compared to a corresponding non-transformed wild type non-human organism or a part thereof; and
[37505] (b) growing the non-human organism or a part thereof under conditions which permit the production of valine or a composition comprising valine in said non-human organism or in the culture medium surrounding said non-human organism.

[37506] A further embodiment of the present invention relates to a process for the production of isoleucine, which comprises
[37507] (a) increasing or generating the activity of a MADS-box transcription factor non-targeted in a non-human organism or a part thereof, preferably a microorganism, a plant cell, a plant or a part thereof, as compared to a corresponding non-transformed wild type non-human organism or a part thereof; and
[37508] (b) growing the non-human organism or a part thereof under conditions which permit the production of isoleucine or a composition comprising isoleucine in said non-human organism or in the culture medium surrounding said non-human organism.

[37509] A further embodiment of the present invention relates to a process for the production of leucine, which comprises
[37510] (a) increasing or generating the activity of a MADS-box transcription factor non-targeted in a non-human organism or a part thereof, preferably a microorganism, a plant cell, a plant or a part thereof, as compared to a corresponding non-transformed wild type non-human organism or a part thereof; and
[37511] (b) growing the non-human organism or a part thereof under conditions which permit the production of leucine or a composition comprising leucine in said non-human organism or in the culture medium surrounding said non-human organism.

[37512] A further embodiment of the present invention relates to a process for the production of isoleucine, which comprises
[37513] (a) increasing or generating the activity of a pyruvate kinase non-targeted in a non-human organism or a part thereof, preferably a microorganism, a plant cell, a plant or a part thereof, as compared to a corresponding non-transformed wild type non-human organism or a part thereof; and
[37514] (b) growing the non-human organism or a part thereof under conditions which permit the production of isoleucine or a composition comprising isoleucine in said non-human organism or in the culture medium surrounding said non-human organism.

[37515] A further embodiment of the present invention relates to a process for the production of leucine, which comprises
[37516] (a) increasing or generating the activity of a pyruvate kinase non-targeted in a non-human organism or a part thereof, preferably a microorganism, a plant cell, a plant or a part thereof, as compared to a corresponding non-transformed wild type non-human organism or a part thereof; and
[37517] (b) growing the non-human organism or a part thereof under conditions which permit the production of leucine or a composition comprising leucine in said non-human organism or in the culture medium surrounding said non-human organism.

[37518] A further embodiment of the present invention relates to a process for the production of valine, which comprises
[37519] (a) increasing or generating the activity of a pyruvate kinase non-targeted in a non-human organism or a part thereof, preferably a microorganism, a plant cell, a plant or a part thereof, as compared to a corresponding non-transformed wild type non-human organism or a part thereof; and
[37520] (b) growing the non-human organism or a part thereof under conditions which permit the production of valine or a composition comprising valine in said non-human organism or in the culture medium surrounding said non-human organism.

[37521] A further embodiment of the present invention relates to a process for the production of valine, which comprises
[37522] (a) increasing or generating the activity of a zinc finger protein non-targeted in a non-human organism or a part thereof, preferably a microorganism, a plant cell, a plant or a part thereof, as compared to a corresponding non-transformed wild type non-human organism or a part thereof; and
[37523] (b) growing the non-human organism or a part thereof under conditions which permit the production of valine or a composition comprising valine in said non-human organism or in the culture medium surrounding said non-human organism.

[37524] A further embodiment of the present invention relates to a process for the production of isoleucine, which comprises
[37525] (a) increasing or generating the activity of a malic enzyme non-targeted in a non-human organism or a part thereof, preferably a microorganism, a plant cell, a plant or a part thereof, as compared to a corresponding non-transformed wild type non-human organism or a part thereof; and
[37526] (b) growing the non-human organism or a part thereof under conditions which permit the production of isoleucine or a composition comprising isoleucine in said non-human organism or in the culture medium surrounding said non-human organism.

[37527] A further embodiment of the present invention relates to a process for the production of leucine, which comprises
[37528] (a) increasing or generating the activity of a malic enzyme non-targeted in a non-human organism or a part thereof, preferably a microorganism, a plant cell, a plant or a part thereof, as compared to a corresponding non-transformed wild type non-human organism or a part thereof; and
[37529] (b) growing the non-human organism or a part thereof under conditions which permit the production of leucine or a composition comprising leucine in said non-human organism or in the culture medium surrounding said non-human organism.

[37530] A further embodiment of the present invention relates to a process for the production of valine, which comprises
[37531] (a) increasing or generating the activity of a malic enzyme non-targeted in a non-human organism or a part thereof, preferably a microorganism, a plant cell, a plant or a part thereof, as compared to a corresponding non-transformed wild type non-human organism or a part thereof; and
[37532] (b) growing the non-human organism or a part thereof under conditions which permit the production of valine or a composition comprising valine in said non-human organism or in the culture medium surrounding said non-human organism.

[37533] A further embodiment of the present invention relates to a process for the production of valine, which comprises
[37534] (a) increasing or generating the activity of a pyruvate kinase non-targeted in a non-human organism or a part thereof, preferably a microorganism, a plant cell, a plant or a part thereof, as compared to a corresponding non-transformed wild type non-human organism or a part thereof; and
[37535] (b) growing the non-human organism or a part thereof under conditions which permit the production of valine or a composition comprising valine in said non-human organism or in the culture medium surrounding said non-human organism.

[37536] A further embodiment of the present invention relates to a process for the production of valine, which comprises
[37537] (a) increasing or generating the activity of a beta-hydroxylase non-targeted in a non-human organism or a part thereof, preferably a microorganism, a plant cell, a plant or a part thereof, as compared to a corresponding non-transformed wild type non-human organism or a part thereof; and
[37538] (b) growing the non-human organism or a part thereof under conditions which permit the production of valine or a composition comprising valine in said non-human organism or in the culture medium surrounding said non-human organism.

[37539] A further embodiment of the present invention relates to a process for the production of isoleucine, which comprises
[37540] (a) increasing or generating the activity of a elongation factor Tu non-targeted in a non-human organism or a part thereof, preferably a microorganism, a plant cell, a plant or a part thereof, as compared to a corresponding non-transformed wild type non-human organism or a part thereof; and
[37541] (b) growing the non-human organism or a part thereof under conditions which permit the production of isoleucine or a composition comprising isoleucine in said non-human organism or in the culture medium surrounding said non-human organism.

[37542] A further embodiment of the present invention relates to a process for the production of leucine, which comprises
[37543] (a) increasing or generating the activity of a elongation factor Tu non-targeted in a non-human organism or a part thereof, preferably a microorganism, a plant cell, a plant or a part thereof, as compared to a corresponding non-transformed wild type non-human organism or a part thereof; and
[37544] (b) growing the non-human organism or a part thereof under conditions which permit the production of leucine or a composition comprising leucine in said non-human organism or in the culture medium surrounding said non-human organism.

[37545] A further embodiment of the present invention relates to a process for the production of valine, which comprises
[37546] (a) increasing or generating the activity of a elongation factor Tu non-targeted in a non-human organism or a part thereof, preferably a microorganism, a plant cell, a plant or a part thereof, as compared to a corresponding non-transformed wild type non-human organism or a part thereof; and
[37547] (b) growing the non-human organism or a part thereof under conditions which permit the production of valine or a composition comprising valine in said non-human organism or in the culture medium surrounding said non-human organism.

[37548] A further embodiment of the present invention relates to a process for the production of valine, which comprises
[37549] (a) increasing or generating the activity of a 50S ribosomal protein L14 non-targeted in a non-human organism or a part thereof, preferably a microorganism, a plant cell, a plant or a part thereof, as compared to a corresponding non-transformed wild type non-human organism or a part thereof; and
[37550] (b) growing the non-human organism or a part thereof under conditions which permit the production of valine or a composition comprising valine in said non-human organism or in the culture medium surrounding said non-human organism.

[37551] A further embodiment of the present invention relates to a process for the production of valine, which comprises
[37552] (a) increasing or generating the activity of a ABC transporter permease protein non-targeted in a non-human organism or a part thereof, preferably a microorganism, a plant cell, a plant or a part thereof, as compared to a corresponding non-transformed wild type non-human organism or a part thereof; and
[37553] (b) growing the non-human organism or a part thereof under conditions which permit the production of valine or a composition comprising valine in said non-human organism or in the culture medium surrounding said non-human organism.

[37554] A further embodiment of the present invention relates to a process for the production of isoleucine, which comprises
[37555] (a) increasing or generating the activity of a enoyl-CoA hydratase non-targeted in a non-human organism or a part thereof, preferably a microorganism, a plant cell, a plant or a part thereof, as compared to a corresponding non-transformed wild type non-human organism or a part thereof; and
[37556] (b) growing the non-human organism or a part thereof under conditions which permit the production of isoleucine or a composition comprising isoleucine in said non-human organism or in the culture medium surrounding said non-human organism.

[37557] A further embodiment of the present invention relates to a process for the production of leucine, which comprises
[37558] (a) increasing or generating the activity of a enoyl-CoA hydratase non-targeted in a non-human organism or a part thereof, preferably a microorganism, a plant cell, a plant or a part thereof, as compared to a corresponding non-transformed wild type non-human organism or a part thereof; and
[37559] (b) growing the non-human organism or a part thereof under conditions which permit the production of leucine or a composition comprising leucine in said non-human organism or in the culture medium surrounding said non-human organism.

[37560] A further embodiment of the present invention relates to a process for the production of valine, which comprises
[37561] (a) increasing or generating the activity of a enoyl-CoA hydratase non-targeted in a non-human organism or a part thereof, preferably a microorganism, a plant cell, a plant or a part thereof, as compared to a corresponding non-transformed wild type non-human organism or a part thereof; and
[37562] (b) growing the non-human organism or a part thereof under conditions which permit the production of valine or a composition comprising valine in said non-human organism or in the culture medium surrounding said non-human organism.

[37563] A further embodiment of the present invention relates to a process for the production of isoleucine, which comprises
[37564] (a) increasing or generating the activity of a transcriptional regulator non-targeted in a non-human organism or a part thereof, preferably a microorganism, a plant cell, a plant or a part thereof, as compared to a corresponding non-transformed wild type non-human organism or a part thereof; and
[37565] (b) growing the non-human organism or a part thereof under conditions which permit the production of isoleucine or a composition comprising isoleucine in said non-human organism or in the culture medium surrounding said non-human organism.

[37566] A further embodiment of the present invention relates to a process for the production of leucine, which comprises
[37567] (a) increasing or generating the activity of a transcriptional regulator non-targeted in a non-human organism or a part thereof, preferably a microorganism, a plant cell, a plant or a part thereof, as compared to a corresponding non-transformed wild type non-human organism or a part thereof; and
[37568] (b) growing the non-human organism or a part thereof under conditions which permit the production of leucine or a composition comprising leucine in said non-human organism or in the culture medium surrounding said non-human organism.

[37569] A further embodiment of the present invention relates to a process for the production of valine, which comprises
[37570] (a) increasing or generating the activity of a transcriptional regulator non-targeted in a non-human organism or a part thereof, preferably a microorganism, a plant cell, a plant or a part thereof, as compared to a corresponding non-transformed wild type non-human organism or a part thereof; and
[37571] (b) growing the non-human organism or a part thereof under conditions which permit the production of valine or a composition comprising valine in said non-human organism or in the culture medium surrounding said non-human organism.

[37572] A further embodiment of the present invention relates to a process for the production of isoleucine, which comprises
[37573] (a) increasing or generating the activity of a acyltransferase non-targeted in a non-human organism or a part thereof, preferably a microorganism, a plant cell, a plant or a part thereof, as compared to a corresponding non-transformed wild type non-human organism or a part thereof; and
[37574] (b) growing the non-human organism or a part thereof under conditions which permit the production of isoleucine or a composition comprising isoleucine in said non-human organism or in the culture medium surrounding said non-human organism.

[37575] A further embodiment of the present invention relates to a process for the production of leucine, which comprises
[37576] (a) increasing or generating the activity of a acyltransferase non-targeted in a non-human organism or a part thereof, preferably a microorganism, a plant cell, a plant or a part thereof, as compared to a corresponding non-transformed wild type non-human organism or a part thereof; and
[37577] (b) growing the non-human organism or a part thereof under conditions which permit the production of leucine or a composition comprising leucine in said non-human organism or in the culture medium surrounding said non-human organism.

[37578] A further embodiment of the present invention relates to a process for the production of valine, which comprises
[37579] (a) increasing or generating the activity of a acyltransferase non-targeted in a non-human organism or a part thereof, preferably a microorganism, a plant cell, a plant or a part thereof, as compared to a corresponding non-transformed wild type non-human organism or a part thereof; and
[37580] (b) growing the non-human organism or a part thereof under conditions which permit the production of valine or a composition comprising valine in said non-human organism or in the culture medium surrounding said non-human organism.

[37581] A further embodiment of the present invention relates to a process for the production of isoleucine, which comprises
[37582] (a) increasing or generating the activity of a oxidoreductase non-targeted in a non-human organism or a part thereof, preferably a microorganism, a plant cell, a plant or a part thereof, as compared to a corresponding non-transformed wild type non-human organism or a part thereof; and
[37583] (b) growing the non-human organism or a part thereof under conditions which permit the production of isoleucine or a composition comprising isoleucine in said non-human organism or in the culture medium surrounding said non-human organism.

[37584] A further embodiment of the present invention relates to a process for the production of leucine, which comprises
[37585] (a) increasing or generating the activity of a oxidoreductase non-targeted in a non-human organism or a part thereof, preferably a microorganism, a plant cell, a plant or a part thereof, as compared to a corresponding non-transformed wild type non-human organism or a part thereof; and
[37586] (b) growing the non-human organism or a part thereof under conditions which permit the production of leucine or a composition comprising leucine in said non-human organism or in the culture medium surrounding said non-human organism.

[37587] A further embodiment of the present invention relates to a process for the production of valine, which comprises
[37588] (a) increasing or generating the activity of a oxidoreductase non-targeted in a non-human organism or a part thereof, preferably a microorganism, a plant cell, a plant or a part thereof, as compared to a corresponding non-transformed wild type non-human organism or a part thereof; and
[37589] (b) growing the non-human organism or a part thereof under conditions which permit the production of valine or a composition comprising valine in said non-human organism or in the culture medium surrounding said non-human organism.

[37590] A further embodiment of the present invention relates to a process for the production of valine, which comprises
[37591] (a) increasing or generating the activity of a ABC transporter component non-targeted in a non-human organism or a part thereof, preferably a microorganism, a plant cell, a plant or a part thereof, as compared to a corresponding non-transformed wild type non-human organism or a part thereof; and
[37592] (b) growing the non-human organism or a part thereof under conditions which permit the production of valine or a composition comprising valine in said non-human organism or in the culture medium surrounding said non-human organism.

[37593] A further embodiment of the present invention relates to a process for the production of valine, which comprises
[37594] (a) increasing or generating the activity of a glucose-1-phosphate cytidylyltransferase non-targeted in a non-human organism or a part thereof, preferably a microorganism, a plant cell, a plant or a part thereof, as compared to a corresponding non-transformed wild type non-human organism or a part thereof; and
[37595] (b) growing the non-human organism or a part thereof under conditions which permit the production of valine or a composition comprising valine in said non-human organism or in the culture medium surrounding said non-human organism.

[37596] A further embodiment of the present invention relates to a process for the production of isoleucine, which comprises
[37597] (a) increasing or generating the activity of a aminotransferase non-targeted in a non-human organism or a part thereof, preferably a microorganism, a plant cell, a plant or a part thereof, as compared to a corresponding non-transformed wild type non-human organism or a part thereof; and
[37598] (b) growing the non-human organism or a part thereof under conditions which permit the production of isoleucine or a composition comprising isoleucine in said non-human organism or in the culture medium surrounding said non-human organism.

[37599] A further embodiment of the present invention relates to a process for the production of valine, which comprises
[37600] (a) increasing or generating the activity of a aminotransferase non-targeted in a non-human organism or a part thereof, preferably a microorganism, a plant cell, a plant or a part thereof, as compared to a corresponding non-transformed wild type non-human organism or a part thereof; and
[37601] (b) growing the non-human organism or a part thereof under conditions which permit the production of valine or a composition comprising valine in said non-human organism or in the culture medium surrounding said non-human organism.

[37602] A further embodiment of the present invention relates to a process for the production of isoleucine, which comprises
[37603] (a) increasing or generating the activity of a NADH-quinone oxidoreductase subunit non-targeted in a non-human organism or a part thereof, preferably a microorganism, a plant cell, a plant or a part thereof, as compared to a corresponding non-transformed wild type non-human organism or a part thereof; and
[37604] (b) growing the non-human organism or a part thereof under conditions which permit the production of isoleucine or a composition comprising isoleucine in said non-human organism or in the culture medium surrounding said non-human organism.

[37605] A further embodiment of the present invention relates to a process for the production of leucine, which comprises
[37606] (a) increasing or generating the activity of a NADH-quinone oxidoreductase subunit non-targeted in a non-human organism or a part thereof, preferably a microorganism, a plant cell, a plant or a part thereof, as compared to a corresponding non-transformed wild type non-human organism or a part thereof; and
[37607] (b) growing the non-human organism or a part thereof under conditions which permit the production of leucine or a composition comprising leucine in said non-human organism or in the culture medium surrounding said non-human organism.

[37608] A further embodiment of the present invention relates to a process for the production of isoleucine, which comprises
[37609] (a) increasing or generating the activity of a glutamate-ammonia-ligase non-targeted in a non-human organism or a part thereof, preferably a microorganism, a plant cell, a plant or a part thereof, as compared to a corresponding non-transformed wild type non-human organism or a part thereof; and
[37610] (b) growing the non-human organism or a part thereof under conditions which permit the production of isoleucine or a composition comprising isoleucine in said non-human organism or in the culture medium surrounding said non-human organism.

[37611] A further embodiment of the present invention relates to a process for the production of leucine, which comprises
[37612] (a) increasing or generating the activity of a glutamate-ammonia-ligase non-targeted in a non-human organism or a part thereof, preferably a microorganism, a plant cell, a plant or a part thereof, as compared to a corresponding non-transformed wild type non-human organism or a part thereof; and
[37613] (b) growing the non-human organism or a part thereof under conditions which permit the production of leucine or a composition comprising leucine in said non-human organism or in the culture medium surrounding said non-human organism.

[37614] A further embodiment of the present invention relates to a process for the production of valine, which comprises
[37615] (a) increasing or generating the activity of a glutamate-ammonia-ligase non-targeted in a non-human organism or a part thereof, preferably a microorganism, a plant cell, a plant or a part thereof, as compared to a corresponding non-transformed wild type non-human organism or a part thereof; and
[37616] (b) growing the non-human organism or a part thereof under conditions which permit the production of valine or a composition comprising valine in said non-human organism or in the culture medium surrounding said non-human organism.

[37617] A further embodiment of the present invention relates to a process for the production of valine, which comprises
[37618] (a) increasing or generating the activity of a isopropylmalate isomerase large subunit non-targeted in a non-human organism or a part thereof, preferably a microorganism, a plant cell, a plant or a part thereof, as compared to a corresponding non-transformed wild type non-human organism or a part thereof; and
[37619] (b) growing the non-human organism or a part thereof under conditions which permit the production of valine or a composition comprising valine in said non-human organism or in the culture medium surrounding said non-human organism.

[37620] A further embodiment of the present invention relates to a process for the production of isoleucine, which comprises
[37621] (a) increasing or generating the activity of a hydrolase non-targeted in a non-human organism or a part thereof, preferably a microorganism, a plant cell, a plant or a part thereof, as compared to a corresponding non-transformed wild type non-human organism or a part thereof; and
[37622] (b) growing the non-human organism or a part thereof under conditions which permit the production of isoleucine or a composition comprising isoleucine in said non-human organism or in the culture medium surrounding said non-human organism.

[37623] A further embodiment of the present invention relates to a process for the production of leucine, which comprises
[37624] (a) increasing or generating the activity of a hydrolase non-targeted in a non-human organism or a part thereof, preferably a microorganism, a plant cell, a plant or a part thereof, as compared to a corresponding non-transformed wild type non-human organism or a part thereof; and
[37625] (b) growing the non-human organism or a part thereof under conditions which permit the production of leucine or a composition comprising leucine in said non-human organism or in the culture medium surrounding said non-human organism.

[37626] A further embodiment of the present invention relates to a process for the production of valine, which comprises
[37627] (a) increasing or generating the activity of a hydrolase non-targeted in a non-human organism or a part thereof, preferably a microorganism, a plant cell, a plant or a part thereof, as compared to a corresponding non-transformed wild type non-human organism or a part thereof; and
[37628] (b) growing the non-human organism or a part thereof under conditions which permit the production of valine or a composition comprising valine in said non-human organism or in the culture medium surrounding said non-human organism.

[37629] A further embodiment of the present invention relates to a process for the production of isoleucine, which comprises
[37630] (a) increasing or generating the activity of a fumarylacetoacetate hydrolase non-targeted in a non-human organism or a part thereof, preferably a microorganism, a plant cell, a plant or a part thereof, as compared to a corresponding non-transformed wild type non-human organism or a part thereof; and
[37631] (b) growing the non-human organism or a part thereof under conditions which permit the production of isoleucine or a composition comprising isoleucine in said non-human organism or in the culture medium surrounding said non-human organism.

[37632] A further embodiment of the present invention relates to a process for the production of leucine, which comprises
[37633] (a) increasing or generating the activity of a fumarylacetoacetate hydrolase non-targeted in a non-human organism or a part thereof, preferably a microorganism, a plant cell, a plant or a part thereof, as compared to a corresponding non-transformed wild type non-human organism or a part thereof; and
[37634] (b) growing the non-human organism or a part thereof under conditions which permit the production of leucine or a composition comprising leucine in said non-human organism or in the culture medium surrounding said non-human organism.

[37635] A further embodiment of the present invention relates to a process for the production of valine, which comprises
[37636] (a) increasing or generating the activity of a fumarylacetoacetate hydrolase non-targeted in a non-human organism or a part thereof, preferably a microorganism, a plant cell, a plant or a part thereof, as compared to a corresponding non-transformed wild type non-human organism or a part thereof; and
[37637] (b) growing the non-human organism or a part thereof under conditions which permit the production of valine or a composition comprising valine in said non-human organism or in the culture medium surrounding said non-human organism.

[37638] A further embodiment of the present invention relates to a process for the production of leucine, which comprises
[37639] (a) increasing or generating the activity of a peptidase non-targeted in a non-human organism or a part thereof, preferably a microorganism, a plant cell, a plant or a part thereof, as compared to a corresponding non-transformed wild type non-human organism or a part thereof; and
[37640] (b) growing the non-human organism or a part thereof under conditions which permit the production of leucine or a composition comprising leucine in said non-human organism or in the culture medium surrounding said non-human organism.

[37641] A further embodiment of the present invention relates to a process for the production of isoleucine, which comprises
[37642] (a) increasing or generating the activity of a chaperone protein CIpB non-targeted in a non-human organism or a part thereof, preferably a microorganism, a plant cell, a plant or a part thereof, as compared to a corresponding non-transformed wild type non-human organism or a part thereof; and
[37643] (b) growing the non-human organism or a part thereof under conditions which permit the production of isoleucine or a composition comprising isoleucine in said non-human organism or in the culture medium surrounding said non-human organism.

[37644] A further embodiment of the present invention relates to a process for the production of isoleucine, which comprises
[37645] (a) increasing or generating the activity of a purine nucleoside phosphorylase non-targeted in a non-human organism or a part thereof, preferably a microorganism, a plant cell, a plant or a part thereof, as compared to a corresponding non-transformed wild type non-human organism or a part thereof; and
[37646] (b) growing the non-human organism or a part thereof under conditions which permit the production of isoleucine or a composition comprising isoleucine in said non-human organism or in the culture medium surrounding said non-human organism.

[37647] A further embodiment of the present invention relates to a process for the production of leucine, which comprises
[37648] (a) increasing or generating the activity of a purine nucleoside phosphorylase non-targeted in a non-human organism or a part thereof, preferably a microorganism, a plant cell, a plant or a part thereof, as compared to a corresponding non-transformed wild type non-human organism or a part thereof; and
[37649] (b) growing the non-human organism or a part thereof under conditions which permit the production of leucine or a composition comprising leucine in said non-human organism or in the culture medium surrounding said non-human organism.

[37650] A further embodiment of the present invention relates to a process for the production of valine, which comprises
[37651] (a) increasing or generating the activity of a purine nucleoside phosphorylase non-targeted in a non-human organism or a part thereof, preferably a microorganism, a plant cell, a plant or a part thereof, as compared to a corresponding non-transformed wild type non-human organism or a part thereof; and
[37652] (b) growing the non-human organism or a part thereof under conditions which permit the production of valine or a composition comprising valine in said non-human organism or in the culture medium surrounding said non-human organism.

[37653] A further embodiment of the present invention relates to a process for the production of isoleucine, which comprises
[37654] (a) increasing or generating the activity of a pyruvate kinase non-targeted in a non-human organism or a part thereof, preferably a microorganism, a plant cell, a plant or a part thereof, as compared to a corresponding non-transformed wild type non-human organism or a part thereof; and
[37655] (b) growing the non-human organism or a part thereof under conditions which permit the production of isoleucine or a composition comprising isoleucine in said non-human organism or in the culture medium surrounding said non-human organism.

[37656] A further embodiment of the present invention relates to a process for the production of valine, which comprises
[37657] (a) increasing or generating the activity of a pyruvate kinase non-targeted in a non-human organism or a part thereof, preferably a microorganism, a plant cell, a plant or a part thereof, as compared to a corresponding non-transformed wild type non-human organism or a part thereof; and
[37658] (b) growing the non-human organism or a part thereof under conditions which permit the production of valine or a composition comprising valine in said non-human organism or in the culture medium surrounding said non-human organism.

[37659] A further embodiment of the present invention relates to a process for the production of isoleucine, which comprises
[37660] (a) increasing or generating the activity of a threonine synthase non-targeted in a non-human organism or a part thereof, preferably a microorganism, a plant cell, a plant or a part thereof, as compared to a corresponding non-transformed wild type non-human organism or a part thereof; and
[37661] (b) growing the non-human organism or a part thereof under conditions which permit the production of isoleucine or a composition comprising isoleucine in said non-human organism or in the culture medium surrounding said non-human organism.

[37662] A further embodiment of the present invention relates to a process for the production of leucine, which comprises
[37663] (a) increasing or generating the activity of a threonine synthase non-targeted in a non-human organism or a part thereof, preferably a microorganism, a plant cell, a plant or a part thereof, as compared to a corresponding non-transformed wild type non-human organism or a part thereof; and
[37664] (b) growing the non-human organism or a part thereof under conditions which permit the production of leucine or a composition comprising leucine in said non-human organism or in the culture medium surrounding said non-human organism.

[37665] A further embodiment of the present invention relates to a process for the production of valine, which comprises
[37666] (a) increasing or generating the activity of a threonine synthase non-targeted in a non-human organism or a part thereof, preferably a microorganism, a plant cell, a plant or a part thereof, as compared to a corresponding non-transformed wild type non-human organism or a part thereof; and
[37667] (b) growing the non-human organism or a part thereof under conditions which permit the production of valine or a composition comprising valine in said non-human organism or in the culture medium surrounding said non-human organism.

[37668] A further embodiment of the present invention relates to a process for the production of valine, which comprises
[37669] (a) increasing or generating the activity of a b0050-protein non-targeted in a non-human organism or a part thereof, preferably a microorganism, a plant cell, a plant or a part thereof, as compared to a corresponding non-transformed wild type non-human organism or a part thereof; and
[37670] (b) growing the non-human organism or a part thereof under conditions which permit the production of valine or a composition comprising valine in said non-human organism or in the culture medium surrounding said non-human organism.

[37671] A further embodiment of the present invention relates to a process for the production of leucine, which comprises
[37672] (a) increasing or generating the activity of a acetolactate synthase small subunit non-targeted in a non-human organism or a part thereof, preferably a microorganism, a plant cell, a plant or a part thereof, as compared to a corresponding non-transformed wild type non-human organism or a part thereof; and
[37673] (b) growing the non-human organism or a part thereof under conditions which permit the production of leucine or a composition comprising leucine in said non-human organism or in the culture medium surrounding said non-human organism.

[37674] A further embodiment of the present invention relates to a process for the production of leucine, which comprises
[37675] (a) increasing or generating the activity of a beta-galactosidase non-targeted in a non-human organism or a part thereof, preferably a microorganism, a plant cell, a plant or a part thereof, as compared to a corresponding non-transformed wild type non-human organism or a part thereof; and
[37676] (b) growing the non-human organism or a part thereof under conditions which permit the production of leucine or a composition comprising leucine in said non-human organism or in the culture medium surrounding said non-human organism.

[37677] A further embodiment of the present invention relates to a process for the production of isoleucine, which comprises
[37678] (a) increasing or generating the activity of a 2,3-dihydroxyphenylpropionate 1,2-dioxygenase non-targeted in a non-human organism or a part thereof, preferably a microorganism, a plant cell, a plant or a part thereof, as compared to a corresponding non-transformed wild type non-human organism or a part thereof; and
[37679] (b) growing the non-human organism or a part thereof under conditions which permit the production of isoleucine or a composition comprising isoleucine in said non-human organism or in the culture medium surrounding said non-human organism.

[37680] A further embodiment of the present invention relates to a process for the production of valine, which comprises
[37681] (a) increasing or generating the activity of a 2,3-dihydroxyphenylpropionate 1,2-dioxygenase non-targeted in a non-human organism or a part thereof, preferably a microorganism, a plant cell, a plant or a part thereof, as compared to a corresponding non-transformed wild type non-human organism or a part thereof; and
[37682] (b) growing the non-human organism or a part thereof under conditions which permit the production of valine or a composition comprising valine in said non-human organism or in the culture medium surrounding said non-human organism.

[37683] A further embodiment of the present invention relates to a process for the production of isoleucine, which comprises
[37684] (a) increasing or generating the activity of a ATP-binding component of a transport system non-targeted in a non-human organism or a part thereof, preferably a microorganism, a plant cell, a plant or a part thereof, as compared to a corresponding non-transformed wild type non-human organism or a part thereof; and
[37685] (b) growing the non-human organism or a part thereof under conditions which permit the production of isoleucine or a composition comprising isoleucine in said non-human organism or in the culture medium surrounding said non-human organism.

[37686] A further embodiment of the present invention relates to a process for the production of leucine, which comprises
[37687] (a) increasing or generating the activity of a ATP-binding component of a transport system non-targeted in a non-human organism or a part thereof, preferably a microorganism, a plant cell, a plant or a part thereof, as compared to a corresponding non-transformed wild type non-human organism or a part thereof; and
[37688] (b) growing the non-human organism or a part thereof under conditions which permit the production of leucine or a composition comprising leucine in said non-human organism or in the culture medium surrounding said non-human organism.

[37689] A further embodiment of the present invention relates to a process for the production of valine, which comprises
[37690] (a) increasing or generating the activity of a ATP-binding component of a transport system non-targeted in a non-human organism or a part thereof, preferably a microorganism, a plant cell, a plant or a part thereof, as compared to a corresponding non-transformed wild type non-human organism or a part thereof; and
[37691] (b) growing the non-human organism or a part thereof under conditions which permit the production of valine or a composition comprising valine in said non-human organism or in the culture medium surrounding said non-human organism.

[37692] A further embodiment of the present invention relates to a process for the production of isoleucine, which comprises
[37693] (a) increasing or generating the activity of a membrane transport protein non-targeted in a non-human organism or a part thereof, preferably a microorganism, a plant cell, a plant or a part thereof, as compared to a corresponding non-transformed wild type non-human organism or a part thereof; and
[37694] (b) growing the non-human organism or a part thereof under conditions which permit the production of isoleucine or a composition comprising isoleucine in said non-human organism or in the culture medium surrounding said non-human organism.

[37695] A further embodiment of the present invention relates to a process for the production of isoleucine, which comprises
[37696] (a) increasing or generating the activity of a isochorismate synthase non-targeted in a non-human organism or a part thereof, preferably a microorganism, a plant cell, a plant or a part thereof, as compared to a corresponding non-transformed wild type non-human organism or a part thereof; and
[37697] (b) growing the non-human organism or a part thereof under conditions which permit the production of isoleucine or a composition comprising isoleucine in said non-human organism or in the culture medium surrounding said non-human organism.

[37698] A further embodiment of the present invention relates to a process for the production of leucine, which comprises
[37699] (a) increasing or generating the activity of a isochorismate synthase non-targeted in a non-human organism or a part thereof, preferably a microorganism, a plant cell, a plant or a part thereof, as compared to a corresponding non-transformed wild type non-human organism or a part thereof; and
[37700] (b) growing the non-human organism or a part thereof under conditions which permit the production of leucine or a composition comprising leucine in said non-human organism or in the culture medium surrounding said non-human organism.

[37701] A further embodiment of the present invention relates to a process for the production of valine, which comprises
[37702] (a) increasing or generating the activity of a isochorismate synthase non-targeted in a non-human organism or a part thereof, preferably a microorganism, a plant cell, a plant or a part thereof, as compared to a corresponding non-transformed wild type non-human organism or a part thereof; and
[37703] (b) growing the non-human organism or a part thereof under conditions which permit the production of valine or a composition comprising valine in said non-human organism or in the culture medium surrounding said non-human organism.

[37704] A further embodiment of the present invention relates to a process for the production of isoleucine, which comprises
[37705] (a) increasing or generating the activity of a zinc transporter non-targeted in a non-human organism or a part thereof, preferably a microorganism, a plant cell, a plant or a part thereof, as compared to a corresponding non-transformed wild type non-human organism or a part thereof; and
[37706] (b) growing the non-human organism or a part thereof under conditions which permit the production of isoleucine or a composition comprising isoleucine in said non-human organism or in the culture medium surrounding said non-human organism.

[37707] A further embodiment of the present invention relates to a process for the production of leucine, which comprises
[37708] (a) increasing or generating the activity of a zinc transporter non-targeted in a non-human organism or a part thereof, preferably a microorganism, a plant cell, a plant or a part thereof, as compared to a corresponding non-transformed wild type non-human organism or a part thereof; and
[37709] (b) growing the non-human organism or a part thereof under conditions which permit the production of leucine or a composition comprising leucine in said non-human organism or in the culture medium surrounding said non-human organism.

[37710] A further embodiment of the present invention relates to a process for the production of isoleucine, which comprises
[37711] (a) increasing or generating the activity of a major facilitator superfamily transporter protein non-targeted in a non-human organism or a part thereof, preferably a microorganism, a plant cell, a plant or a part thereof, as compared to a corresponding non-transformed wild type non-human organism or a part thereof; and
[37712] (b) growing the non-human organism or a part thereof under conditions which permit the production of isoleucine or a composition comprising isoleucine in said non-human organism or in the culture medium surrounding said non-human organism.

[37713] A further embodiment of the present invention relates to a process for the production of leucine, which comprises
[37714] (a) increasing or generating the activity of a major facilitator superfamily transporter protein non-targeted in a non-human organism or a part thereof, preferably a microorganism, a plant cell, a plant or a part thereof, as compared to a corresponding non-transformed wild type non-human organism or a part thereof; and
[37715] (b) growing the non-human organism or a part thereof under conditions which permit the production of leucine or a composition comprising leucine in said non-human organism or in the culture medium surrounding said non-human organism.

[37716] A further embodiment of the present invention relates to a process for the production of valine, which comprises
[37717] (a) increasing or generating the activity of a major facilitator superfamily transporter protein non-targeted in a non-human organism or a part thereof, preferably a microorganism, a plant cell, a plant or a part thereof, as compared to a corresponding non-transformed wild type non-human organism or a part thereof; and
[37718] (b) growing the non-human organism or a part thereof under conditions which permit the production of valine or a composition comprising valine in said non-human organism or in the culture medium surrounding said non-human organism.

[37719] A further embodiment of the present invention relates to a process for the production of leucine, which comprises
[37720] (a) increasing or generating the activity of a DNA helicase IV non-targeted in a non-human organism or a part thereof, preferably a microorganism, a plant cell, a plant or a part thereof, as compared to a corresponding non-transformed wild type non-human organism or a part thereof; and
[37721] (b) growing the non-human organism or a part thereof under conditions which permit the production of leucine or a composition comprising leucine in said non-human organism or in the culture medium surrounding said non-human organism.

[37722] A further embodiment of the present invention relates to a process for the production of valine, which comprises
[37723] (a) increasing or generating the activity of a methylglyoxal synthase non-targeted in a non-human organism or a part thereof, preferably a microorganism, a plant cell, a plant or a part thereof, as compared to a corresponding non-transformed wild type non-human organism or a part thereof; and
[37724] (b) growing the non-human organism or a part thereof under conditions which permit the production of valine or a composition comprising valine in said non-human organism or in the culture medium surrounding said non-human organism.

[37725] A further embodiment of the present invention relates to a process for the production of valine, which comprises
[37726] (a) increasing or generating the activity of a phosphoanhydride phosphorylase non-targeted in a non-human organism or a part thereof, preferably a microorganism, a plant cell, a plant or a part thereof, as compared to a corresponding non-transformed wild type non-human organism or a part thereof; and
[37727] (b) growing the non-human organism or a part thereof under conditions which permit the production of valine or a composition comprising valine in said non-human organism or in the culture medium surrounding said non-human organism.

[37728] A further embodiment of the present invention relates to a process for the production of isoleucine, which comprises
[37729] (a) increasing or generating the activity of a b1003-protein non-targeted in a non-human organism or a part thereof, preferably a microorganism, a plant cell, a plant or a part thereof, as compared to a corresponding non-transformed wild type non-human organism or a part thereof; and
[37730] (b) growing the non-human organism or a part thereof under conditions which permit the production of isoleucine or a composition comprising isoleucine in said non-human organism or in the culture medium surrounding said non-human organism.

[37731] A further embodiment of the present invention relates to a process for the production of leucine, which comprises
[37732] (a) increasing or generating the activity of a b1003-protein non-targeted in a non-human organism or a part thereof, preferably a microorganism, a plant cell, a plant or a part thereof, as compared to a corresponding non-transformed wild type non-human organism or a part thereof; and
[37733] (b) growing the non-human organism or a part thereof under conditions which permit the production of leucine or a composition comprising leucine in said non-human organism or in the culture medium surrounding said non-human organism.

[37734] A further embodiment of the present invention relates to a process for the production of valine, which comprises
[37735] (a) increasing or generating the activity of a b1003-protein non-targeted in a non-human organism or a part thereof, preferably a microorganism, a plant cell, a plant or a part thereof, as compared to a corresponding non-transformed wild type non-human organism or a part thereof; and
[37736] (b) growing the non-human organism or a part thereof under conditions which permit the production of valine or a composition comprising valine in said non-human organism or in the culture medium surrounding said non-human organism.

[37737] A further embodiment of the present invention relates to a process for the production of isoleucine, which comprises
[37738] (a) increasing or generating the activity of a b1163-protein non-targeted in a non-human organism or a part thereof, preferably a microorganism, a plant cell, a plant or a part thereof, as compared to a corresponding non-transformed wild type non-human organism or a part thereof; and
[37739] (b) growing the non-human organism or a part thereof under conditions which permit the production of isoleucine or a composition comprising isoleucine in said non-human organism or in the culture medium surrounding said non-human organism.

[37740] A further embodiment of the present invention relates to a process for the production of leucine, which comprises
[37741] (a) increasing or generating the activity of a b1163-protein non-targeted in a non-human organism or a part thereof, preferably a microorganism, a plant cell, a plant or a part thereof, as compared to a corresponding non-transformed wild type non-human organism or a part thereof; and
[37742] (b) growing the non-human organism or a part thereof under conditions which permit the production of leucine or a composition comprising leucine in said non-human organism or in the culture medium surrounding said non-human organism.

[37743] A further embodiment of the present invention relates to a process for the production of valine, which comprises
[37744] (a) increasing or generating the activity of a b1163-protein non-targeted in a non-human organism or a part thereof, preferably a microorganism, a plant cell, a plant or a part thereof, as compared to a corresponding non-transformed wild type non-human organism or a part thereof; and
[37745] (b) growing the non-human organism or a part thereof under conditions which permit the production of valine or a composition comprising valine in said non-human organism or in the culture medium surrounding said non-human organism.

[37746] A further embodiment of the present invention relates to a process for the production of leucine, which comprises
[37747] (a) increasing or generating the activity of a DNA polymerase non-targeted in a non-human organism or a part thereof, preferably a microorganism, a plant cell, a plant or a part thereof, as compared to a corresponding non-transformed wild type non-human organism or a part thereof; and
[37748] (b) growing the non-human organism or a part thereof under conditions which permit the production of leucine or a composition comprising leucine in said non-human organism or in the culture medium surrounding said non-human organism.

[37749] A further embodiment of the present invention relates to a process for the production of valine, which comprises
[37750] (a) increasing or generating the activity of a DNA polymerase non-targeted in a non-human organism or a part thereof, preferably a microorganism, a plant cell, a plant or a part thereof, as compared to a corresponding non-transformed wild type non-human organism or a part thereof; and
[37751] (b) growing the non-human organism or a part thereof under conditions which permit the production of valine or a composition comprising valine in said non-human organism or in the culture medium surrounding said non-human organism.

[37752] A further embodiment of the present invention relates to a process for the production of isoleucine, which comprises
[37753] (a) increasing or generating the activity of a membrane protein non-targeted in a non-human organism or a part thereof, preferably a microorganism, a plant cell, a plant or a part thereof, as compared to a corresponding non-transformed wild type non-human organism or a part thereof; and
[37754] (b) growing the non-human organism or a part thereof under conditions which permit the production of isoleucine or a composition comprising isoleucine in said non-human organism or in the culture medium surrounding said non-human organism.

[37755] A further embodiment of the present invention relates to a process for the production of leucine, which comprises
[37756] (a) increasing or generating the activity of a membrane protein non-targeted in a non-human organism or a part thereof, preferably a microorganism, a plant cell, a plant or a part thereof, as compared to a corresponding non-transformed wild type non-human organism or a part thereof; and
[37757] (b) growing the non-human organism or a part thereof under conditions which permit the production of leucine or a composition comprising leucine in said non-human organism or in the culture medium surrounding said non-human organism.

[37758] A further embodiment of the present invention relates to a process for the production of valine, which comprises
[37759] (a) increasing or generating the activity of a membrane protein non-targeted in a non-human organism or a part thereof, preferably a microorganism, a plant cell, a plant or a part thereof, as compared to a corresponding non-transformed wild type non-human organism or a part thereof; and
[37760] (b) growing the non-human organism or a part thereof under conditions which permit the production of valine or a composition comprising valine in said non-human organism or in the culture medium surrounding said non-human organism.

[37761] A further embodiment of the present invention relates to a process for the production of isoleucine, which comprises
[37762] (a) increasing or generating the activity of a anthranilate synthase component II non-targeted in a non-human organism or a part thereof, preferably a microorganism, a plant cell, a plant or a part thereof, as compared to a corresponding non-transformed wild type non-human organism or a part thereof; and
[37763] (b) growing the non-human organism or a part thereof under conditions which permit the production of isoleucine or a composition comprising isoleucine in said non-human organism or in the culture medium surrounding said non-human organism.

[37764] A further embodiment of the present invention relates to a process for the production of leucine, which comprises
[37765] (a) increasing or generating the activity of a anthranilate synthase component II non-targeted in a non-human organism or a part thereof, preferably a microorganism, a plant cell, a plant or a part thereof, as compared to a corresponding non-transformed wild type non-human organism or a part thereof; and
[37766] (b) growing the non-human organism or a part thereof under conditions which permit the production of leucine or a composition comprising leucine in said non-human organism or in the culture medium surrounding said non-human organism.

[37767] A further embodiment of the present invention relates to a process for the production of valine, which comprises
[37768] (a) increasing or generating the activity of a anthranilate synthase component II non-targeted in a non-human organism or a part thereof, preferably a microorganism, a plant cell, a plant or a part thereof, as compared to a corresponding non-transformed wild type non-human organism or a part thereof; and
[37769] (b) growing the non-human organism or a part thereof under conditions which permit the production of valine or a composition comprising valine in said non-human organism or in the culture medium surrounding said non-human organism.

[37770] A further embodiment of the present invention relates to a process for the production of leucine, which comprises
[37771] (a) increasing or generating the activity of a glutamine synthetase non-targeted in a non-human organism or a part thereof, preferably a microorganism, a plant cell, a plant or a part thereof, as compared to a corresponding non-transformed wild type non-human organism or a part thereof; and
[37772] (b) growing the non-human organism or a part thereof under conditions which permit the production of leucine or a composition comprising leucine in said non-human organism or in the culture medium surrounding said non-human organism.

[37773] A further embodiment of the present invention relates to a process for the production of valine, which comprises
[37774] (a) increasing or generating the activity of a aldehyde dehydrogenase non-targeted in a non-human organism or a part thereof, preferably a microorganism, a plant cell, a plant or a part thereof, as compared to a corresponding non-transformed wild type non-human organism or a part thereof; and
[37775] (b) growing the non-human organism or a part thereof under conditions which permit the production of valine or a composition comprising valine in said non-human organism or in the culture medium surrounding said non-human organism.

[37776] A further embodiment of the present invention relates to a process for the production of valine, which comprises
[37777] (a) increasing or generating the activity of a b1445-protein non-targeted in a non-human organism or a part thereof, preferably a microorganism, a plant cell, a plant or a part thereof, as compared to a corresponding non-transformed wild type non-human organism or a part thereof; and
[37778] (b) growing the non-human organism or a part thereof under conditions which permit the production of valine or a composition comprising valine in said non-human organism or in the culture medium surrounding said non-human organism.

[37779] A further embodiment of the present invention relates to a process for the production of valine, which comprises
[37780] (a) increasing or generating the activity of a NADP-dependent malic enzyme non-targeted in a non-human organism or a part thereof, preferably a microorganism, a plant cell, a plant or a part thereof, as compared to a corresponding non-transformed wild type non-human organism or a part thereof; and
[37781] (b) growing the non-human organism or a part thereof under conditions which permit the production of valine or a composition comprising valine in said non-human organism or in the culture medium surrounding said non-human organism.

[37782] A further embodiment of the present invention relates to a process for the production of isoleucine, which comprises
[37783] (a) increasing or generating the activity of a b1522-protein non-targeted in a non-human organism or a part thereof, preferably a microorganism, a plant cell, a plant or a part thereof, as compared to a corresponding non-transformed wild type non-human organism or a part thereof; and
[37784] (b) growing the non-human organism or a part thereof under conditions which permit the production of isoleucine or a composition comprising isoleucine in said non-human organism or in the culture medium surrounding said non-human organism.

[37785] A further embodiment of the present invention relates to a process for the production of leucine, which comprises
[37786] (a) increasing or generating the activity of a b1522-protein non-targeted in a non-human organism or a part thereof, preferably a microorganism, a plant cell, a plant or a part thereof, as compared to a corresponding non-transformed wild type non-human organism or a part thereof; and
[37787] (b) growing the non-human organism or a part thereof under conditions which permit the production of leucine or a composition comprising leucine in said non-human organism or in the culture medium surrounding said non-human organism.

[37788] A further embodiment of the present invention relates to a process for the production of valine, which comprises
[37789] (a) increasing or generating the activity of a b1522-protein non-targeted in a non-human organism or a part thereof, preferably a microorganism, a plant cell, a plant or a part thereof, as compared to a corresponding non-transformed wild type non-human organism or a part thereof; and
[37790] (b) growing the non-human organism or a part thereof under conditions which permit the production of valine or a composition comprising valine in said non-human organism or in the culture medium surrounding said non-human organism.

[37791] A further embodiment of the present invention relates to a process for the production of isoleucine, which comprises
[37792] (a) increasing or generating the activity of a acid shock protein non-targeted in a non-human organism or a part thereof, preferably a microorganism, a plant cell, a plant or a part thereof, as compared to a corresponding non-transformed wild type non-human organism or a part thereof; and
[37793] (b) growing the non-human organism or a part thereof under conditions which permit the production of isoleucine or a composition comprising isoleucine in said non-human organism or in the culture medium surrounding said non-human organism.

[37794] A further embodiment of the present invention relates to a process for the production of leucine, which comprises
[37795] (a) increasing or generating the activity of a acid shock protein non-targeted in a non-human organism or a part thereof, preferably a microorganism, a plant cell, a plant or a part thereof, as compared to a corresponding non-transformed wild type non-human organism or a part thereof; and
[37796] (b) growing the non-human organism or a part thereof under conditions which permit the production of leucine or a composition comprising leucine in said non-human organism or in the culture medium surrounding said non-human organism.

[37797] A further embodiment of the present invention relates to a process for the production of valine, which comprises
[37798] (a) increasing or generating the activity of a acid shock protein non-targeted in a non-human organism or a part thereof, preferably a microorganism, a plant cell, a plant or a part thereof, as compared to a corresponding non-transformed wild type non-human organism or a part thereof; and
[37799] (b) growing the non-human organism or a part thereof under conditions which permit the production of valine or a composition comprising valine in said non-human organism or in the culture medium surrounding said non-human organism.

[37800] A further embodiment of the present invention relates to a process for the production of valine, which comprises
[37801] (a) increasing or generating the activity of a transport protein non-targeted in a non-human organism or a part thereof, preferably a microorganism, a plant cell, a plant or a part thereof, as compared to a corresponding non-transformed wild type non-human organism or a part thereof; and
[37802] (b) growing the non-human organism or a part thereof under conditions which permit the production of valine or a composition comprising valine in said non-human organism or in the culture medium surrounding said non-human organism.

[37803] A further embodiment of the present invention relates to a process for the production of valine, which comprises
[37804] (a) increasing or generating the activity of a b1670-protein non-targeted in a non-human organism or a part thereof, preferably a microorganism, a plant cell, a plant or a part thereof, as compared to a corresponding non-transformed wild type non-human organism or a part thereof; and
[37805] (b) growing the non-human organism or a part thereof under conditions which permit the production of valine or a composition comprising valine in said non-human organism or in the culture medium surrounding said non-human organism.

[37806] A further embodiment of the present invention relates to a process for the production of valine, which comprises
[37807] (a) increasing or generating the activity of a b1672-protein non-targeted in a non-human organism or a part thereof, preferably a microorganism, a plant cell, a plant or a part thereof, as compared to a corresponding non-transformed wild type non-human organism or a part thereof; and
[37808] (b) growing the non-human organism or a part thereof under conditions which permit the production of valine or a composition comprising valine in said non-human organism or in the culture medium surrounding said non-human organism.

[37809] A further embodiment of the present invention relates to a process for the production of leucine, which comprises
[37810] (a) increasing or generating the activity of a pyruvate kinase non-targeted in a non-human organism or a part thereof, preferably a microorganism, a plant cell, a plant or a part thereof, as compared to a corresponding non-transformed wild type non-human organism or a part thereof; and
[37811] (b) growing the non-human organism or a part thereof under conditions which permit the production of leucine or a composition comprising leucine in said non-human organism or in the culture medium surrounding said non-human organism.

[37812] A further embodiment of the present invention relates to a process for the production of valine, which comprises
[37813] (a) increasing or generating the activity of a cytochrome c-type protein non-targeted in a non-human organism or a part thereof, preferably a microorganism, a plant cell, a plant or a part thereof, as compared to a corresponding non-transformed wild type non-human organism or a part thereof; and
[37814] (b) growing the non-human organism or a part thereof under conditions which permit the production of valine or a composition comprising valine in said non-human organism or in the culture medium surrounding said non-human organism.

[37815] A further embodiment of the present invention relates to a process for the production of isoleucine, which comprises
[37816] (a) increasing or generating the activity of a trehalose-phosphatase non-targeted in a non-human organism or a part thereof, preferably a microorganism, a plant cell, a plant or a part thereof, as compared to a corresponding non-transformed wild type non-human organism or a part thereof; and
[37817] (b) growing the non-human organism or a part thereof under conditions which permit the production of isoleucine or a composition comprising isoleucine in said non-human organism or in the culture medium surrounding said non-human organism.

[37818] A further embodiment of the present invention relates to a process for the production of leucine, which comprises
[37819] (a) increasing or generating the activity of a trehalose-phosphatase non-targeted in a non-human organism or a part thereof, preferably a microorganism, a plant cell, a plant or a part thereof, as compared to a corresponding non-transformed wild type non-human organism or a part thereof; and
[37820] (b) growing the non-human organism or a part thereof under conditions which permit the production of leucine or a composition comprising leucine in said non-human organism or in the culture medium surrounding said non-human organism.

[37821] A further embodiment of the present invention relates to a process for the production of valine, which comprises
[37822] (a) increasing or generating the activity of a trehalose-phosphatase non-targeted in a non-human organism or a part thereof, preferably a microorganism, a plant cell, a plant or a part thereof, as compared to a corresponding non-transformed wild type non-human organism or a part thereof; and
[37823] (b) growing the non-human organism or a part thereof under conditions which permit the production of valine or a composition comprising valine in said non-human organism or in the culture medium surrounding said non-human organism.

[37824] A further embodiment of the present invention relates to a process for the production of isoleucine, which comprises
[37825] (a) increasing or generating the activity of a O-antigen chain length determinant non-targeted in a non-human organism or a part thereof, preferably a microorganism, a plant cell, a plant or a part thereof, as compared to a corresponding non-transformed wild type non-human organism or a part thereof; and
[37826] (b) growing the non-human organism or a part thereof under conditions which permit the production of isoleucine or a composition comprising isoleucine in said non-human organism or in the culture medium surrounding said non-human organism.

[37827] A further embodiment of the present invention relates to a process for the production of leucine, which comprises
[37828] (a) increasing or generating the activity of a O-antigen chain length determinant non-targeted in a non-human organism or a part thereof, preferably a microorganism, a plant cell, a plant or a part thereof, as compared to a corresponding non-transformed wild type non-human organism or a part thereof; and
[37829] (b) growing the non-human organism or a part thereof under conditions which permit the production of leucine or a composition comprising leucine in said non-human organism or in the culture medium surrounding said non-human organism.

[37830] A further embodiment of the present invention relates to a process for the production of valine, which comprises
[37831] (a) increasing or generating the activity of a GDP-mannose 4,6-dehydratase non-targeted in a non-human organism or a part thereof, preferably a microorganism, a plant cell, a plant or a part thereof, as compared to a corresponding non-transformed wild type non-human organism or a part thereof; and
[37832] (b) growing the non-human organism or a part thereof under conditions which permit the production of valine or a composition comprising valine in said non-human organism or in the culture medium surrounding said non-human organism.

[37833] A further embodiment of the present invention relates to a process for the production of isoleucine, which comprises
[37834] (a) increasing or generating the activity of a transport protein non-targeted in a non-human organism or a part thereof, preferably a microorganism, a plant cell, a plant or a part thereof, as compared to a corresponding non-transformed wild type non-human organism or a part thereof; and
[37835] (b) growing the non-human organism or a part thereof under conditions which permit the production of isoleucine or a composition comprising isoleucine in said non-human organism or in the culture medium surrounding said non-human organism.

[37836] A further embodiment of the present invention relates to a process for the production of leucine, which comprises
[37837] (a) increasing or generating the activity of a transport protein non-targeted in a non-human organism or a part thereof, preferably a microorganism, a plant cell, a plant or a part thereof, as compared to a corresponding non-transformed wild type non-human organism or a part thereof; and
[37838] (b) growing the non-human organism or a part thereof under conditions which permit the production of leucine or a composition comprising leucine in said non-human organism or in the culture medium surrounding said non-human organism.

[37839] A further embodiment of the present invention relates to a process for the production of valine, which comprises
[37840] (a) increasing or generating the activity of a Nucleoside monophosphate phosphohydrolase non-targeted in a non-human organism or a part thereof, preferably a microorganism, a plant cell, a plant or a part thereof, as compared to a corresponding non-transformed wild type non-human organism or a part thereof; and
[37841] (b) growing the non-human organism or a part thereof under conditions which permit the production of valine or a composition comprising valine in said non-human organism or in the culture medium surrounding said non-human organism.

[37842] A further embodiment of the present invention relates to a process for the production of isoleucine, which comprises
[37843] (a) increasing or generating the activity of a transcriptional regulator non-targeted in a non-human organism or a part thereof, preferably a microorganism, a plant cell, a plant or a part thereof, as compared to a corresponding non-transformed wild type non-human organism or a part thereof; and
[37844] (b) growing the non-human organism or a part thereof under conditions which permit the production of isoleucine or a composition comprising isoleucine in said non-human organism or in the culture medium surrounding said non-human organism.

[37845] A further embodiment of the present invention relates to a process for the production of valine, which comprises
[37846] (a) increasing or generating the activity of a transcriptional regulator non-targeted in a non-human organism or a part thereof, preferably a microorganism, a plant cell, a plant or a part thereof, as compared to a corresponding non-transformed wild type non-human organism or a part thereof; and
[37847] (b) growing the non-human organism or a part thereof under conditions which permit the production of valine or a composition comprising valine in said non-human organism or in the culture medium surrounding said non-human organism.

[37848] A further embodiment of the present invention relates to a process for the production of isoleucine, which comprises
[37849] (a) increasing or generating the activity of a b2513-protein non-targeted in a non-human organism or a part thereof, preferably a microorganism, a plant cell, a plant or a part thereof, as compared to a corresponding non-transformed wild type non-human organism or a part thereof; and
[37850] (b) growing the non-human organism or a part thereof under conditions which permit the production of isoleucine or a composition comprising isoleucine in said non-human organism or in the culture medium surrounding said non-human organism.

[37851] A further embodiment of the present invention relates to a process for the production of leucine, which comprises
[37852] (a) increasing or generating the activity of a b2513-protein non-targeted in a non-human organism or a part thereof, preferably a microorganism, a plant cell, a plant or a part thereof, as compared to a corresponding non-transformed wild type non-human organism or a part thereof; and
[37853] (b) growing the non-human organism or a part thereof under conditions which permit the production of leucine or a composition comprising leucine in said non-human organism or in the culture medium surrounding said non-human organism.

[37854] A further embodiment of the present invention relates to a process for the production of valine, which comprises
[37855] (a) increasing or generating the activity of a b2513-protein non-targeted in a non-human organism or a part thereof, preferably a microorganism, a plant cell, a plant or a part thereof, as compared to a corresponding non-transformed wild type non-human organism or a part thereof; and
[37856] (b) growing the non-human organism or a part thereof under conditions which permit the production of valine or a composition comprising valine in said non-human organism or in the culture medium surrounding said non-human organism.

[37857] A further embodiment of the present invention relates to a process for the production of isoleucine, which comprises
[37858] (a) increasing or generating the activity of a serine hydroxymethyltransferase non-targeted in a non-human organism or a part thereof, preferably a microorganism, a plant cell, a plant or a part thereof, as compared to a corresponding non-transformed wild type non-human organism or a part thereof; and
[37859] (b) growing the non-human organism or a part thereof under conditions which permit the production of isoleucine or a composition comprising isoleucine in said non-human organism or in the culture medium surrounding said non-human organism.

[37860] A further embodiment of the present invention relates to a process for the production of valine, which comprises
[37861] (a) increasing or generating the activity of a b2613-protein non-targeted in a non-human organism or a part thereof, preferably a microorganism, a plant cell, a plant or a part thereof, as compared to a corresponding non-transformed wild type non-human organism or a part thereof; and
[37862] (b) growing the non-human organism or a part thereof under conditions which permit the production of valine or a composition comprising valine in said non-human organism or in the culture medium surrounding said non-human organism.

[37863] A further embodiment of the present invention relates to a process for the production of isoleucine, which comprises
[37864] (a) increasing or generating the activity of a transcriptional regulator non-targeted in a non-human organism or a part thereof, preferably a microorganism, a plant cell, a plant or a part thereof, as compared to a corresponding non-transformed wild type non-human organism or a part thereof; and
[37865] (b) growing the non-human organism or a part thereof under conditions which permit the production of isoleucine or a composition comprising isoleucine in said non-human organism or in the culture medium surrounding said non-human organism.

[37866] A further embodiment of the present invention relates to a process for the production of leucine, which comprises
[37867] (a) increasing or generating the activity of a transcriptional regulator non-targeted in a non-human organism or a part thereof, preferably a microorganism, a plant cell, a plant or a part thereof, as compared to a corresponding non-transformed wild type non-human organism or a part thereof; and
[37868] (b) growing the non-human organism or a part thereof under conditions which permit the production of leucine or a composition comprising leucine in said non-human organism or in the culture medium surrounding said non-human organism.

[37869] A further embodiment of the present invention relates to a process for the production of isoleucine, which comprises
[37870] (a) increasing or generating the activity of a b2673-protein non-targeted in a non-human organism or a part thereof, preferably a microorganism, a plant cell, a plant or a part thereof, as compared to a corresponding non-transformed wild type non-human organism or a part thereof; and
[37871] (b) growing the non-human organism or a part thereof under conditions which permit the production of isoleucine or a composition comprising isoleucine in said non-human organism or in the culture medium surrounding said non-human organism.

[37872] A further embodiment of the present invention relates to a process for the production of isoleucine, which comprises
[37873] (a) increasing or generating the activity of a murein transglycosylase non-targeted in a non-human organism or a part thereof, preferably a microorganism, a plant cell, a plant or a part thereof, as compared to a corresponding non-transformed wild type non-human organism or a part thereof; and
[37874] (b) growing the non-human organism or a part thereof under conditions which permit the production of isoleucine or a composition comprising isoleucine in said non-human organism or in the culture medium surrounding said non-human organism.

[37875] A further embodiment of the present invention relates to a process for the production of leucine, which comprises
[37876] (a) increasing or generating the activity of a murein transglycosylase non-targeted in a non-human organism or a part thereof, preferably a microorganism, a plant cell, a plant or a part thereof, as compared to a corresponding non-transformed wild type non-human organism or a part thereof; and
[37877] (b) growing the non-human organism or a part thereof under conditions which permit the production of leucine or a composition comprising leucine in said non-human organism or in the culture medium surrounding said non-human organism.

[37878] A further embodiment of the present invention relates to a process for the production of valine, which comprises
[37879] (a) increasing or generating the activity of a murein transglycosylase non-targeted in a non-human organism or a part thereof, preferably a microorganism, a plant cell, a plant or a part thereof, as compared to a corresponding non-transformed wild type non-human organism or a part thereof; and
[37880] (b) growing the non-human organism or a part thereof under conditions which permit the production of valine or a composition comprising valine in said non-human organism or in the culture medium surrounding said non-human organism.

[37881] A further embodiment of the present invention relates to a process for the production of valine, which comprises
[37882] (a) increasing or generating the activity of a transcriptional regulator non-targeted in a non-human organism or a part thereof, preferably a microorganism, a plant cell, a plant or a part thereof, as compared to a corresponding non-transformed wild type non-human organism or a part thereof; and
[37883] (b) growing the non-human organism or a part thereof under conditions which permit the production of valine or a composition comprising valine in said non-human organism or in the culture medium surrounding said non-human organism.

[37884] A further embodiment of the present invention relates to a process for the production of isoleucine, which comprises
[37885] (a) increasing or generating the activity of a b2739-protein non-targeted in a non-human organism or a part thereof, preferably a microorganism, a plant cell, a plant or a part thereof, as compared to a corresponding non-transformed wild type non-human organism or a part thereof; and
[37886] (b) growing the non-human organism or a part thereof under conditions which permit the production of isoleucine or a composition comprising isoleucine in said non-human organism or in the culture medium surrounding said non-human organism.

[37887] A further embodiment of the present invention relates to a process for the production of leucine, which comprises
[37888] (a) increasing or generating the activity of a b2739-protein non-targeted in a non-human organism or a part thereof, preferably a microorganism, a plant cell, a plant or a part thereof, as compared to a corresponding non-transformed wild type non-human organism or a part thereof; and
[37889] (b) growing the non-human organism or a part thereof under conditions which permit the production of leucine or a composition comprising leucine in said non-human organism or in the culture medium surrounding said non-human organism.

[37890] A further embodiment of the present invention relates to a process for the production of valine, which comprises
[37891] (a) increasing or generating the activity of a b2739-protein non-targeted in a non-human organism or a part thereof, preferably a microorganism, a plant cell, a plant or a part thereof, as compared to a corresponding non-transformed wild type non-human organism or a part thereof; and
[37892] (b) growing the non-human organism or a part thereof under conditions which permit the production of valine or a composition comprising valine in said non-human organism or in the culture medium surrounding said non-human organism.

[37893] A further embodiment of the present invention relates to a process for the production of isoleucine, which comprises
[37894] (a) increasing or generating the activity of a b2812-protein non-targeted in a non-human organism or a part thereof, preferably a microorganism, a plant cell, a plant or a part thereof, as compared to a corresponding non-transformed wild type non-human organism or a part thereof; and
[37895] (b) growing the non-human organism or a part thereof under conditions which permit the production of isoleucine or a composition comprising isoleucine in said non-human organism or in the culture medium surrounding said non-human organism.

[37896] A further embodiment of the present invention relates to a process for the production of leucine, which comprises
[37897] (a) increasing or generating the activity of a b2812-protein non-targeted in a non-human organism or a part thereof, preferably a microorganism, a plant cell, a plant or a part thereof, as compared to a corresponding non-transformed wild type non-human organism or a part thereof; and
[37898] (b) growing the non-human organism or a part thereof under conditions which permit the production of leucine or a composition comprising leucine in said non-human organism or in the culture medium surrounding said non-human organism.

[37899] A further embodiment of the present invention relates to a process for the production of isoleucine, which comprises
[37900] (a) increasing or generating the activity of a transcriptional regulator non-targeted in a non-human organism or a part thereof, preferably a microorganism, a plant cell, a plant or a part thereof, as compared to a corresponding non-transformed wild type non-human organism or a part thereof; and
[37901] (b) growing the non-human organism or a part thereof under conditions which permit the production of isoleucine or a composition comprising isoleucine in said non-human organism or in the culture medium surrounding said non-human organism.

[37902] A further embodiment of the present invention relates to a process for the production of leucine, which comprises
[37903] (a) increasing or generating the activity of a transcriptional regulator non-targeted in a non-human organism or a part thereof, preferably a microorganism, a plant cell, a plant or a part thereof, as compared to a corresponding non-transformed wild type non-human organism or a part thereof; and
[37904] (b) growing the non-human organism or a part thereof under conditions which permit the production of leucine or a composition comprising leucine in said non-human organism or in the culture medium surrounding said non-human organism.

[37905] A further embodiment of the present invention relates to a process for the production of valine, which comprises
[37906] (a) increasing or generating the activity of a transcriptional regulator non-targeted in a non-human organism or a part thereof, preferably a microorganism, a plant cell, a plant or a part thereof, as compared to a corresponding non-transformed wild type non-human organism or a part thereof; and
[37907] (b) growing the non-human organism or a part thereof under conditions which permit the production of valine or a composition comprising valine in said non-human organism or in the culture medium surrounding said non-human organism.

[37908] A further embodiment of the present invention relates to a process for the production of isoleucine, which comprises
[37909] (a) increasing or generating the activity of a ribosephosphate isomerase, constitutive non-targeted in a non-human organism or a part thereof, preferably a microorganism, a plant cell, a plant or a part thereof, as compared to a corresponding non-transformed wild type non-human organism or a part thereof; and
[37910] (b) growing the non-human organism or a part thereof under conditions which permit the production of isoleucine or a composition comprising isoleucine in said non-human organism or in the culture medium surrounding said non-human organism.

[37911] A further embodiment of the present invention relates to a process for the production of valine, which comprises
[37912] (a) increasing or generating the activity of a arginine exporter protein non-targeted in a non-human organism or a part thereof, preferably a microorganism, a plant cell, a plant or a part thereof, as compared to a corresponding non-transformed wild type non-human organism or a part thereof; and
[37913] (b) growing the non-human organism or a part thereof under conditions which permit the production of valine or a composition comprising valine in said non-human organism or in the culture medium surrounding said non-human organism.

[37914] A further embodiment of the present invention relates to a process for the production of isoleucine, which comprises
[37915] (a) increasing or generating the activity of a glycoprotease non-targeted in a non-human organism or a part thereof, preferably a microorganism, a plant cell, a plant or a part thereof, as compared to a corresponding non-transformed wild type non-human organism or a part thereof; and
[37916] (b) growing the non-human organism or a part thereof under conditions which permit the production of isoleucine or a composition comprising isoleucine in said non-human organism or in the culture medium surrounding said non-human organism.

[37917] A further embodiment of the present invention relates to a process for the production of leucine, which comprises
[37918] (a) increasing or generating the activity of a glycoprotease non-targeted in a non-human organism or a part thereof, preferably a microorganism, a plant cell, a plant or a part thereof, as compared to a corresponding non-transformed wild type non-human organism or a part thereof; and
[37919] (b) growing the non-human organism or a part thereof under conditions which permit the production of leucine or a composition comprising leucine in said non-human organism or in the culture medium surrounding said non-human organism.

[37920] A further embodiment of the present invention relates to a process for the production of valine, which comprises
[37921] (a) increasing or generating the activity of a glycoprotease non-targeted in a non-human organism or a part thereof, preferably a microorganism, a plant cell, a plant or a part thereof, as compared to a corresponding non-transformed wild type non-human organism or a part thereof; and
[37922] (b) growing the non-human organism or a part thereof under conditions which permit the production of valine or a composition comprising valine in said non-human organism or in the culture medium surrounding said non-human organism.

[37923] A further embodiment of the present invention relates to a process for the production of isoleucine, which comprises
[37924] (a) increasing or generating the activity of a b3083-protein non-targeted in a non-human organism or a part thereof, preferably a microorganism, a plant cell, a plant or a part thereof, as compared to a corresponding non-transformed wild type non-human organism or a part thereof; and
[37925] (b) growing the non-human organism or a part thereof under conditions which permit the production of isoleucine or a composition comprising isoleucine in said non-human organism or in the culture medium surrounding said non-human organism.

[37926] A further embodiment of the present invention relates to a process for the production of valine, which comprises
[37927] (a) increasing or generating the activity of a b3083-protein non-targeted in a non-human organism or a part thereof, preferably a microorganism, a plant cell, a plant or a part thereof, as compared to a corresponding non-transformed wild type non-human organism or a part thereof; and
[37928] (b) growing the non-human organism or a part thereof under conditions which permit the production of valine or a composition comprising valine in said non-human organism or in the culture medium surrounding said non-human organism.

[37929] A further embodiment of the present invention relates to a process for the production of leucine, which comprises
[37930] (a) increasing or generating the activity of a L-serine dehydratase non-targeted in a non-human organism or a part thereof, preferably a microorganism, a plant cell, a plant or a part thereof, as compared to a corresponding non-transformed wild type non-human organism or a part thereof; and
[37931] (b) growing the non-human organism or a part thereof under conditions which permit the production of leucine or a composition comprising leucine in said non-human organism or in the culture medium surrounding said non-human organism.

[37932] A further embodiment of the present invention relates to a process for the production of valine, which comprises
[37933] (a) increasing or generating the activity of a threonine dehydratase non-targeted in a non-human organism or a part thereof, preferably a microorganism, a plant cell, a plant or a part thereof, as compared to a corresponding non-transformed wild type non-human organism or a part thereof; and
[37934] (b) growing the non-human organism or a part thereof under conditions which permit the production of valine or a composition comprising valine in said non-human organism or in the culture medium surrounding said non-human organism.

[37935] A further embodiment of the present invention relates to a process for the production of leucine, which comprises
[37936] (a) increasing or generating the activity of a acetyl CoA carboxylase non-targeted in a non-human organism or a part thereof, preferably a microorganism, a plant cell, a plant or a part thereof, as compared to a corresponding non-transformed wild type non-human organism or a part thereof; and
[37937] (b) growing the non-human organism or a part thereof under conditions which permit the production of leucine or a composition comprising leucine in said non-human organism or in the culture medium surrounding said non-human organism.

[37938] A further embodiment of the present invention relates to a process for the production of valine, which comprises
[37939] (a) increasing or generating the activity of a ABC transporter ATP-binding protein non-targeted in a non-human organism or a part thereof, preferably a microorganism, a plant cell, a plant or a part thereof, as compared to a corresponding non-transformed wild type non-human organism or a part thereof; and
[37940] (b) growing the non-human organism or a part thereof under conditions which permit the production of valine or a composition comprising valine in said non-human organism or in the culture medium surrounding said non-human organism.

[37941] A further embodiment of the present invention relates to a process for the production of isoleucine, which comprises
[37942] (a) increasing or generating the activity of a glycogen synthase non-targeted in a non-human organism or a part thereof, preferably a microorganism, a plant cell, a plant or a part thereof, as compared to a corresponding non-transformed wild type non-human organism or a part thereof; and
[37943] (b) growing the non-human organism or a part thereof under conditions which permit the production of isoleucine or a composition comprising isoleucine in said non-human organism or in the culture medium surrounding said non-human organism.

[37944] A further embodiment of the present invention relates to a process for the production of leucine, which comprises
[37945] (a) increasing or generating the activity of a glycogen synthase non-targeted in a non-human organism or a part thereof, preferably a microorganism, a plant cell, a plant or a part thereof, as compared to a corresponding non-transformed wild type non-human organism or a part thereof; and
[37946] (b) growing the non-human organism or a part thereof under conditions which permit the production of leucine or a composition comprising leucine in said non-human organism or in the culture medium surrounding said non-human organism.

[37947] A further embodiment of the present invention relates to a process for the production of valine, which comprises
[37948] (a) increasing or generating the activity of a b3490-protein non-targeted in a non-human organism or a part thereof, preferably a microorganism, a plant cell, a plant or a part thereof, as compared to a corresponding non-transformed wild type non-human organism or a part thereof; and
[37949] (b) growing the non-human organism or a part thereof under conditions which permit the production of valine or a composition comprising valine in said non-human organism or in the culture medium surrounding said non-human organism.

[37950] A further embodiment of the present invention relates to a process for the production of isoleucine, which comprises
[37951] (a) increasing or generating the activity of a valine-pyruvate transaminase non-targeted in a non-human organism or a part thereof, preferably a microorganism, a plant cell, a plant or a part thereof, as compared to a corresponding non-transformed wild type non-human organism or a part thereof; and
[37952] (b) growing the non-human organism or a part thereof under conditions which permit the production of isoleucine or a composition comprising isoleucine in said non-human organism or in the culture medium surrounding said non-human organism.

[37953] A further embodiment of the present invention relates to a process for the production of leucine, which comprises
[37954] (a) increasing or generating the activity of a valine-pyruvate transaminase non-targeted in a non-human organism or a part thereof, preferably a microorganism, a plant cell, a plant or a part thereof, as compared to a corresponding non-transformed wild type non-human organism or a part thereof; and
[37955] (b) growing the non-human organism or a part thereof under conditions which permit the production of leucine or a composition comprising leucine in said non-human organism or in the culture medium surrounding said non-human organism.

[37956] A further embodiment of the present invention relates to a process for the production of isoleucine, which comprises
[37957] (a) increasing or generating the activity of a phosphopantetheine adenylyltransferase non-targeted in a non-human organism or a part thereof, preferably a microorganism, a plant cell, a plant or a part thereof, as compared to a corresponding non-transformed wild type non-human organism or a part thereof; and
[37958] (b) growing the non-human organism or a part thereof under conditions which permit the production of isoleucine or a composition comprising isoleucine in said non-human organism or in the culture medium surrounding said non-human organism.

[37959] A further embodiment of the present invention relates to a process for the production of leucine, which comprises
[37960] (a) increasing or generating the activity of a phosphopantetheine adenylyltransferase non-targeted in a non-human organism or a part thereof, preferably a microorganism, a plant cell, a plant or a part thereof, as compared to a corresponding non-transformed wild type non-human organism or a part thereof; and
[37961] (b) growing the non-human organism or a part thereof under conditions which permit the production of leucine or a composition comprising leucine in said non-human organism or in the culture medium surrounding said non-human organism.

[37962] A further embodiment of the present invention relates to a process for the production of valine, which comprises
[37963] (a) increasing or generating the activity of a phosphopantetheine adenylyltransferase non-targeted in a non-human organism or a part thereof, preferably a microorganism, a plant cell, a plant or a part thereof, as compared to a corresponding non-transformed wild type non-human organism or a part thereof; and
[37964] (b) growing the non-human organism or a part thereof under conditions which permit the production of valine or a composition comprising valine in said non-human organism or in the culture medium surrounding said non-human organism.

[37965] A further embodiment of the present invention relates to a process for the production of leucine, which comprises
[37966] (a) increasing or generating the activity of a acetolactate synthase non-targeted in a non-human organism or a part thereof, preferably a microorganism, a plant cell, a plant or a part thereof, as compared to a corresponding non-transformed wild type non-human organism or a part thereof; and
[37967] (b) growing the non-human organism or a part thereof under conditions which permit the production of leucine or a composition comprising leucine in said non-human organism or in the culture medium surrounding said non-human organism.

[37968] A further embodiment of the present invention relates to a process for the production of isoleucine, which comprises
[37969] (a) increasing or generating the activity of a branched-chain amino-acid aminotransferase non-targeted in a non-human organism or a part thereof, preferably a microorganism, a plant cell, a plant or a part thereof, as compared to a corresponding non-transformed wild type non-human organism or a part thereof; and
[37970] (b) growing the non-human organism or a part thereof under conditions which permit the production of isoleucine or a composition comprising isoleucine in said non-human organism or in the culture medium surrounding said non-human organism.

[37971] A further embodiment of the present invention relates to a process for the production of isoleucine, which comprises
[37972] (a) increasing or generating the activity of a dihydroxyacid dehydratase non-targeted in a non-human organism or a part thereof, preferably a microorganism, a plant cell, a plant or a part thereof, as compared to a corresponding non-transformed wild type non-human organism or a part thereof; and
[37973] (b) growing the non-human organism or a part thereof under conditions which permit the production of isoleucine or a composition comprising isoleucine in said non-human organism or in the culture medium surrounding said non-human organism.

[37974] A further embodiment of the present invention relates to a process for the production of leucine, which comprises
[37975] (a) increasing or generating the activity of a dihydroxyacid dehydratase non-targeted in a non-human organism or a part thereof, preferably a microorganism, a plant cell, a plant or a part thereof, as compared to a corresponding non-transformed wild type non-human organism or a part thereof; and
[37976] (b) growing the non-human organism or a part thereof under conditions which permit the production of leucine or a composition comprising leucine in said non-human organism or in the culture medium surrounding said non-human organism.

[37977] A further embodiment of the present invention relates to a process for the production of leucine, which comprises
[37978] (a) increasing or generating the activity of a dihydroxyacid dehydratase non-targeted in a non-human organism or a part thereof, preferably a microorganism, a plant cell, a plant or a part thereof, as compared to a corresponding non-transformed wild type non-human organism or a part thereof; and
[37979] (b) growing the non-human organism or a part thereof under conditions which permit the production of leucine or a composition comprising leucine in said non-human organism or in the culture medium surrounding said non-human organism.

[37980] A further embodiment of the present invention relates to a process for the production of valine, which comprises
[37981] (a) increasing or generating the activity of a dihydroxyacid dehydratase non-targeted in a non-human organism or a part thereof, preferably a microorganism, a plant cell, a plant or a part thereof, as compared to a corresponding non-transformed wild type non-human organism or a part thereof; and
[37982] (b) growing the non-human organism or a part thereof under conditions which permit the production of valine or a composition comprising valine in said non-human organism or in the culture medium surrounding said non-human organism.

[37983] A further embodiment of the present invention relates to a process for the production of isoleucine, which comprises
[37984] (a) increasing or generating the activity of a ketol-acid reductoisomerase non-targeted in a non-human organism or a part thereof, preferably a microorganism, a plant cell, a plant or a part thereof, as compared to a corresponding non-transformed wild type non-human organism or a part thereof; and
[37985] (b) growing the non-human organism or a part thereof under conditions which permit the production of isoleucine or a composition comprising isoleucine in said non-human organism or in the culture medium surrounding said non-human organism.

[37986] A further embodiment of the present invention relates to a process for the production of leucine, which comprises
[37987] (a) increasing or generating the activity of a ketol-acid reductoisomerase non-targeted in a non-human organism or a part thereof, preferably a microorganism, a plant cell, a plant or a part thereof, as compared to a corresponding non-transformed wild type non-human organism or a part thereof; and
[37988] (b) growing the non-human organism or a part thereof under conditions which permit the production of leucine or a composition comprising leucine in said non-human organism or in the culture medium surrounding said non-human organism.

[37989] A further embodiment of the present invention relates to a process for the production of isoleucine, which comprises
[37990] (a) increasing or generating the activity of a DNA helicase II non-targeted in a non-human organism or a part thereof, preferably a microorganism, a plant cell, a plant or a part thereof, as compared to a corresponding non-transformed wild type non-human organism or a part thereof; and
[37991] (b) growing the non-human organism or a part thereof under conditions which permit the production of isoleucine or a composition comprising isoleucine in said non-human organism or in the culture medium surrounding said non-human organism.

[37992] A further embodiment of the present invention relates to a process for the production of leucine, which comprises
[37993] (a) increasing or generating the activity of a DNA helicase II non-targeted in a non-human organism or a part thereof, preferably a microorganism, a plant cell, a plant or a part thereof, as compared to a corresponding non-transformed wild type non-human organism or a part thereof; and
[37994] (b) growing the non-human organism or a part thereof under conditions which permit the production of leucine or a composition comprising leucine in said non-human organism or in the culture medium surrounding said non-human organism.

[37995] A further embodiment of the present invention relates to a process for the production of valine, which comprises
[37996] (a) increasing or generating the activity of a DNA helicase II non-targeted in a non-human organism or a part thereof, preferably a microorganism, a plant cell, a plant or a part thereof, as compared to a corresponding non-transformed wild type non-human organism or a part thereof; and
[37997] (b) growing the non-human organism or a part thereof under conditions which permit the production of valine or a composition comprising valine in said non-human organism or in the culture medium surrounding said non-human organism.

[37998] A further embodiment of the present invention relates to a process for the production of leucine, which comprises
[37999] (a) increasing or generating the activity of a protoporphyrin oxidase non-targeted in a non-human organism or a part thereof, preferably a microorganism, a plant cell, a plant or a part thereof, as compared to a corresponding non-transformed wild type non-human organism or a part thereof; and
[38000] (b) growing the non-human organism or a part thereof under conditions which permit the production of leucine or a composition comprising leucine in said non-human organism or in the culture medium surrounding said non-human organism.

[38001] A further embodiment of the present invention relates to a process for the production of leucine, which comprises
[38002] (a) increasing or generating the activity of a superoxide dismutase non-targeted in a non-human organism or a part thereof, preferably a microorganism, a plant cell, a plant or a part thereof, as compared to a corresponding non-transformed wild type non-human organism or a part thereof; and
[38003] (b) growing the non-human organism or a part thereof under conditions which permit the production of leucine or a composition comprising leucine in said non-human organism or in the culture medium surrounding said non-human organism.

[38004] A further embodiment of the present invention relates to a process for the production of isoleucine, which comprises
[38005] (a) increasing or generating the activity of a b3989-protein non-targeted in a non-human organism or a part thereof, preferably a microorganism, a plant cell, a plant or a part thereof, as compared to a corresponding non-transformed wild type non-human organism or a part thereof; and
[38006] (b) growing the non-human organism or a part thereof under conditions which permit the production of isoleucine or a composition comprising isoleucine in said non-human organism or in the culture medium surrounding said non-human organism.

[38007] A further embodiment of the present invention relates to a process for the production of leucine, which comprises
[38008] (a) increasing or generating the activity of a b3989-protein non-targeted in a non-human organism or a part thereof, preferably a microorganism, a plant cell, a plant or a part thereof, as compared to a corresponding non-transformed wild type non-human organism or a part thereof; and
[38009] (b) growing the non-human organism or a part thereof under conditions which permit the production of leucine or a composition comprising leucine in said non-human organism or in the culture medium surrounding said non-human organism.

[38010] A further embodiment of the present invention relates to a process for the production of valine, which comprises
[38011] (a) increasing or generating the activity of a b3989-protein non-targeted in a non-human organism or a part thereof, preferably a microorganism, a plant cell, a plant or a part thereof, as compared to a corresponding non-transformed wild type non-human organism or a part thereof; and
[38012] (b) growing the non-human organism or a part thereof under conditions which permit the production of valine or a composition comprising valine in said non-human organism or in the culture medium surrounding said non-human organism.

[38013] A further embodiment of the present invention relates to a process for the production of isoleucine, which comprises
[38014] (a) increasing or generating the activity of a b4029-protein non-targeted in a non-human organism or a part thereof, preferably a microorganism, a plant cell, a plant or a part thereof, as compared to a corresponding non-transformed wild type non-human organism or a part thereof; and
[38015] (b) growing the non-human organism or a part thereof under conditions which permit the production of isoleucine or a composition comprising isoleucine in said non-human organism or in the culture medium surrounding said non-human organism.

[38016] A further embodiment of the present invention relates to a process for the production of leucine, which comprises
[38017] (a) increasing or generating the activity of a b4029-protein non-targeted in a non-human organism or a part thereof, preferably a microorganism, a plant cell, a plant or a part thereof, as compared to a corresponding non-transformed wild type non-human organism or a part thereof; and
[38018] (b) growing the non-human organism or a part thereof under conditions which permit the production of leucine or a composition comprising leucine in said non-human organism or in the culture medium surrounding said non-human organism.

[38019] A further embodiment of the present invention relates to a process for the production of valine, which comprises
[38020] (a) increasing or generating the activity of a b4029-protein non-targeted in a non-human organism or a part thereof, preferably a microorganism, a plant cell, a plant or a part thereof, as compared to a corresponding non-transformed wild type non-human organism or a part thereof; and
[38021] (b) growing the non-human organism or a part thereof under conditions which permit the production of valine or a composition comprising valine in said non-human organism or in the culture medium surrounding said non-human organism.

[38022] A further embodiment of the present invention relates to a process for the production of isoleucine, which comprises
[38023] (a) increasing or generating the activity of a b4050-protein non-targeted in a non-human organism or a part thereof, preferably a microorganism, a plant cell, a plant or a part thereof, as compared to a corresponding non-transformed wild type non-human organism or a part thereof; and
[38024] (b) growing the non-human organism or a part thereof under conditions which permit the production of isoleucine or a composition comprising isoleucine in said non-human organism or in the culture medium surrounding said non-human organism.

[38025] A further embodiment of the present invention relates to a process for the production of isoleucine, which comprises
[38026] (a) increasing or generating the activity of a b4056-protein non-targeted in a non-human organism or a part thereof, preferably a microorganism, a plant cell, a plant or a part thereof, as compared to a corresponding non-transformed wild type non-human organism or a part thereof; and
[38027] (b) growing the non-human organism or a part thereof under conditions which permit the production of isoleucine or a composition comprising isoleucine in said non-human organism or in the culture medium surrounding said non-human organism.

[38028] A further embodiment of the present invention relates to a process for the production of leucine, which comprises
[38029] (a) increasing or generating the activity of a b4056-protein non-targeted in a non-human organism or a part thereof, preferably a microorganism, a plant cell, a plant or a part thereof, as compared to a corresponding non-transformed wild type non-human organism or a part thereof; and
[38030] (b) growing the non-human organism or a part thereof under conditions which permit the production of leucine or a composition comprising leucine in said non-human organism or in the culture medium surrounding said non-human organism.

[38031] A further embodiment of the present invention relates to a process for the production of isoleucine, which comprises
[38032] (a) increasing or generating the activity of a acetyltransferase non-targeted in a non-human organism or a part thereof, preferably a microorganism, a plant cell, a plant or a part thereof, as compared to a corresponding non-transformed wild type non-human organism or a part thereof; and
[38033] (b) growing the non-human organism or a part thereof under conditions which permit the production of isoleucine or a composition comprising isoleucine in said non-human organism or in the culture medium surrounding said non-human organism.

[38034] A further embodiment of the present invention relates to a process for the production of leucine, which comprises
[38035] (a) increasing or generating the activity of a acetyltransferase non-targeted in a non-human organism or a part thereof, preferably a microorganism, a plant cell, a plant or a part thereof, as compared to a corresponding non-transformed wild type non-human organism or a part thereof; and
[38036] (b) growing the non-human organism or a part thereof under conditions which permit the production of leucine or a composition comprising leucine in said non-human organism or in the culture medium surrounding said non-human organism.

[38037] A further embodiment of the present invention relates to a process for the production of valine, which comprises
[38038] (a) increasing or generating the activity of a acetyltransferase non-targeted in a non-human organism or a part thereof, preferably a microorganism, a plant cell, a plant or a part thereof, as compared to a corresponding non-transformed wild type non-human organism or a part thereof; and
[38039] (b) growing the non-human organism or a part thereof under conditions which permit the production of valine or a composition comprising valine in said non-human organism or in the culture medium surrounding said non-human organism.

[38040] A further embodiment of the present invention relates to a process for the production of valine, which comprises
[38041] (a) increasing or generating the activity of a b4263-protein non-targeted in a non-human organism or a part thereof, preferably a microorganism, a plant cell, a plant or a part thereof, as compared to a corresponding non-transformed wild type non-human organism or a part thereof; and
[38042] (b) growing the non-human organism or a part thereof under conditions which permit the production of valine or a composition comprising valine in said non-human organism or in the culture medium surrounding said non-human organism.

[38043] A further embodiment of the present invention relates to a process for the production of isoleucine, which comprises
[38044] (a) increasing or generating the activity of a gluconate transport system permease 3 non-targeted in a non-human organism or a part thereof, preferably a microorganism, a plant cell, a plant or a part thereof, as compared to a corresponding non-transformed wild type non-human organism or a part thereof; and
[38045] (b) growing the non-human organism or a part thereof under conditions which permit the production of isoleucine or a composition comprising isoleucine in said non-human organism or in the culture medium surrounding said non-human organism.

[38046] A further embodiment of the present invention relates to a process for the production of leucine, which comprises
[38047] (a) increasing or generating the activity of a gluconate transport system permease 3 non-targeted in a non-human organism or a part thereof, preferably a microorganism, a plant cell, a plant or a part thereof, as compared to a corresponding non-transformed wild type non-human organism or a part thereof; and
[38048] (b) growing the non-human organism or a part thereof under conditions which permit the production of leucine or a composition comprising leucine in said non-human organism or in the culture medium surrounding said non-human organism.

[38049] A further embodiment of the present invention relates to a process for the production of valine, which comprises
[38050] (a) increasing or generating the activity of a gluconate transport system permease 3 non-targeted in a non-human organism or a part thereof, preferably a microorganism, a plant cell, a plant or a part thereof, as compared to a corresponding non-transformed wild type non-human organism or a part thereof; and
[38051] (b) growing the non-human organism or a part thereof under conditions which permit the production of valine or a composition comprising valine in said non-human organism or in the culture medium surrounding said non-human organism.

[38052] A further embodiment of the present invention relates to a process for the production of isoleucine, which comprises
[38053] (a) increasing or generating the activity of a purine-nucleoside phosphorylase non-targeted in a non-human organism or a part thereof, preferably a microorganism, a plant cell, a plant or a part thereof, as compared to a corresponding non-transformed wild type non-human organism or a part thereof; and
[38054] (b) growing the non-human organism or a part thereof under conditions which permit the production of isoleucine or a composition comprising isoleucine in said non-human organism or in the culture medium surrounding said non-human organism.

[38055] A further embodiment of the present invention relates to a process for the production of isoleucine, which comprises
[38056] (a) increasing or generating the activity of a thioredoxin non-targeted in a non-human organism or a part thereof, preferably a microorganism, a plant cell, a plant or a part thereof, as compared to a corresponding non-transformed wild type non-human organism or a part thereof; and
[38057] (b) growing the non-human organism or a part thereof under conditions which permit the production of isoleucine or a composition comprising isoleucine in said non-human organism or in the culture medium surrounding said non-human organism.

[38058] A further embodiment of the present invention relates to a process for the production of leucine, which comprises
[38059] (a) increasing or generating the activity of a thioredoxin non-targeted in a non-human organism or a part thereof, preferably a microorganism, a plant cell, a plant or a part thereof, as compared to a corresponding non-transformed wild type non-human organism or a part thereof; and
[38060] (b) growing the non-human organism or a part thereof under conditions which permit the production of leucine or a composition comprising leucine in said non-human organism or in the culture medium surrounding said non-human organism.

[38061] A further embodiment of the present invention relates to a process for the production of valine, which comprises
[38062] (a) increasing or generating the activity of a thioredoxin non-targeted in a non-human organism or a part thereof, preferably a microorganism, a plant cell, a plant or a part thereof, as compared to a corresponding non-transformed wild type non-human organism or a part thereof; and
[38063] (b) growing the non-human organism or a part thereof under conditions which permit the production of valine or a composition comprising valine in said non-human organism or in the culture medium surrounding said non-human organism.

[38064] A further embodiment of the present invention relates to a process for the production of isoleucine, which comprises
[38065] (a) increasing or generating the activity of a GM02LC11114-protein non-targeted in a non-human organism or a part thereof, preferably a microorganism, a plant cell, a plant or a part thereof, as compared to a corresponding non-transformed wild type non-human organism or a part thereof; and
[38066] (b) growing the non-human organism or a part thereof under conditions which permit the production of isoleucine or a composition comprising isoleucine in said non-human organism or in the culture medium surrounding said non-human organism.

[38067] A further embodiment of the present invention relates to a process for the production of leucine, which comprises
[38068] (a) increasing or generating the activity of a GM02LC11114-protein non-targeted in a non-human organism or a part thereof, preferably a microorganism, a plant cell, a plant or a part thereof, as compared to a corresponding non-transformed wild type non-human organism or a part thereof; and
[38069] (b) growing the non-human organism or a part thereof under conditions which permit the production of leucine or a composition comprising leucine in said non-human organism or in the culture medium surrounding said non-human organism.

[38070] A further embodiment of the present invention relates to a process for the production of isoleucine, which comprises
[38071] (a) increasing or generating the activity of a glutaredoxin non-targeted in a non-human organism or a part thereof, preferably a microorganism, a plant cell, a plant or a part thereof, as compared to a corresponding non-transformed wild type non-human organism or a part thereof; and
[38072] (b) growing the non-human organism or a part thereof under conditions which permit the production of isoleucine or a composition comprising isoleucine in said non-human organism or in the culture medium surrounding said non-human organism.

[38073] A further embodiment of the present invention relates to a process for the production of leucine, which comprises
[38074] (a) increasing or generating the activity of a glutaredoxin non-targeted in a non-human organism or a part thereof, preferably a microorganism, a plant cell, a plant or a part thereof, as compared to a corresponding non-transformed wild type non-human organism or a part thereof; and
[38075] (b) growing the non-human organism or a part thereof under conditions which permit the production of leucine or a composition comprising leucine in said non-human organism or in the culture medium surrounding said non-human organism.

[38076] A further embodiment of the present invention relates to a process for the production of valine, which comprises
[38077] (a) increasing or generating the activity of a glutaredoxin non-targeted in a non-human organism or a part thereof, preferably a microorganism, a plant cell, a plant or a part thereof, as compared to a corresponding non-transformed wild type non-human organism or a part thereof; and
[38078] (b) growing the non-human organism or a part thereof under conditions which permit the production of valine or a composition comprising valine in said non-human organism or in the culture medium surrounding said non-human organism.

[38079] A further embodiment of the present invention relates to a process for the production of isoleucine, which comprises
[38080] (a) increasing or generating the activity of a histone H2A non-targeted in a non-human organism or a part thereof, preferably a microorganism, a plant cell, a plant or a part thereof, as compared to a corresponding non-transformed wild type non-human organism or a part thereof; and
[38081] (b) growing the non-human organism or a part thereof under conditions which permit the production of isoleucine or a composition comprising isoleucine in said non-human organism or in the culture medium surrounding said non-human organism.

[38082] A further embodiment of the present invention relates to a process for the production of leucine, which comprises
[38083] (a) increasing or generating the activity of a histone H2A non-targeted in a non-human organism or a part thereof, preferably a microorganism, a plant cell, a plant or a part thereof, as compared to a corresponding non-transformed wild type non-human organism or a part thereof; and
[38084] (b) growing the non-human organism or a part thereof under conditions which permit the production of leucine or a composition comprising leucine in said non-human organism or in the culture medium surrounding said non-human organism.

[38085] A further embodiment of the present invention relates to a process for the production of valine, which comprises
[38086] (a) increasing or generating the activity of a histone H2A non-targeted in a non-human organism or a part thereof, preferably a microorganism, a plant cell, a plant or a part thereof, as compared to a corresponding non-transformed wild type non-human organism or a part thereof; and
[38087] (b) growing the non-human organism or a part thereof under conditions which permit the production of valine or a composition comprising valine in said non-human organism or in the culture medium surrounding said non-human organism.

[38088] A further embodiment of the present invention relates to a process for the production of valine, which comprises
[38089] (a) increasing or generating the activity of a vacuolar ATPase subunit non-targeted in a non-human organism or a part thereof, preferably a microorganism, a plant cell, a plant or a part thereof, as compared to a corresponding non-transformed wild type non-human organism or a part thereof; and
[38090] (b) growing the non-human organism or a part thereof under conditions which permit the production of valine or a composition comprising valine in said non-human organism or in the culture medium surrounding said non-human organism.

[38091] A further embodiment of the present invention relates to a process for the production of isoleucine, which comprises
[38092] (a) increasing or generating the activity of a RNA binding protein non-targeted in a non-human organism or a part thereof, preferably a microorganism, a plant cell, a plant or a part thereof, as compared to a corresponding non-transformed wild type non-human organism or a part thereof; and
[38093] (b) growing the non-human organism or a part thereof under conditions which permit the production of isoleucine or a composition comprising isoleucine in said non-human organism or in the culture medium surrounding said non-human organism.

[38094] A further embodiment of the present invention relates to a process for the production of leucine, which comprises
[38095] (a) increasing or generating the activity of a RNA binding protein non-targeted in a non-human organism or a part thereof, preferably a microorganism, a plant cell, a plant or a part thereof, as compared to a corresponding non-transformed wild type non-human organism or a part thereof; and
[38096] (b) growing the non-human organism or a part thereof under conditions which permit the production of leucine or a composition comprising leucine in said non-human organism or in the culture medium surrounding said non-human organism.

[38097] A further embodiment of the present invention relates to a process for the production of valine, which comprises
[38098] (a) increasing or generating the activity of a RNA binding protein non-targeted in a non-human organism or a part thereof, preferably a microorganism, a plant cell, a plant or a part thereof, as compared to a corresponding non-transformed wild type non-human organism or a part thereof; and
[38099] (b) growing the non-human organism or a part thereof under conditions which permit the production of valine or a composition comprising valine in said non-human organism or in the culture medium surrounding said non-human organism.

[38100] A further embodiment of the present invention relates to a process for the production of isoleucine, which comprises
[38101] (a) increasing or generating the activity of a transcription factor non-targeted in a non-human organism or a part thereof, preferably a microorganism, a plant cell, a plant or a part thereof, as compared to a corresponding non-transformed wild type non-human organism or a part thereof; and
[38102] (b) growing the non-human organism or a part thereof under conditions which permit the production of isoleucine or a composition comprising isoleucine in said non-human organism or in the culture medium surrounding said non-human organism.

[38103] A further embodiment of the present invention relates to a process for the production of leucine, which comprises
[38104] (a) increasing or generating the activity of a transcription factor non-targeted in a non-human organism or a part thereof, preferably a microorganism, a plant cell, a plant or a part thereof, as compared to a corresponding non-transformed wild type non-human organism or a part thereof; and
[38105] (b) growing the non-human organism or a part thereof under conditions which permit the production of leucine or a composition comprising leucine in said non-human organism or in the culture medium surrounding said non-human organism.

[38106] A further embodiment of the present invention relates to a process for the production of valine, which comprises
[38107] (a) increasing or generating the activity of a transcription factor non-targeted in a non-human organism or a part thereof, preferably a microorganism, a plant cell, a plant or a part thereof, as compared to a corresponding non-transformed wild type non-human organism or a part thereof; and
[38108] (b) growing the non-human organism or a part thereof under conditions which permit the production of valine or a composition comprising valine in said non-human organism or in the culture medium surrounding said non-human organism.

[38109] A further embodiment of the present invention relates to a process for the production of isoleucine, which comprises
[38110] (a) increasing or generating the activity of a cyclin D non-targeted in a non-human organism or a part thereof, preferably a microorganism, a plant cell, a plant or a part thereof, as compared to a corresponding non-transformed wild type non-human organism or a part thereof; and
[38111] (b) growing the non-human organism or a part thereof under conditions which permit the production of isoleucine or a composition comprising isoleucine in said non-human organism or in the culture medium surrounding said non-human organism.

[38112] A further embodiment of the present invention relates to a process for the production of leucine, which comprises
[38113] (a) increasing or generating the activity of a cyclin D non-targeted in a non-human organism or a part thereof, preferably a microorganism, a plant cell, a plant or a part thereof, as compared to a corresponding non-transformed wild type non-human organism or a part thereof; and
[38114] (b) growing the non-human organism or a part thereof under conditions which permit the production of leucine or a composition comprising leucine in said non-human organism or in the culture medium surrounding said non-human organism.

[38115] A further embodiment of the present invention relates to a process for the production of valine, which comprises
[38116] (a) increasing or generating the activity of a cyclin D non-targeted in a non-human organism or a part thereof, preferably a microorganism, a plant cell, a plant or a part thereof, as compared to a corresponding non-transformed wild type non-human organism or a part thereof; and
[38117] (b) growing the non-human organism or a part thereof under conditions which permit the production of valine or a composition comprising valine in said non-human organism or in the culture medium surrounding said non-human organism.

[38118] A further embodiment of the present invention relates to a process for the production of leucine, which comprises
[38119] (a) increasing or generating the activity of a GM02LC5744-protein non-targeted in a non-human organism or a part thereof, preferably a microorganism, a plant cell, a plant or a part thereof, as compared to a corresponding non-transformed wild type non-human organism or a part thereof; and
[38120] (b) growing the non-human organism or a part thereof under conditions which permit the production of leucine or a composition comprising leucine in said non-human organism or in the culture medium surrounding said non-human organism.

[38121] A further embodiment of the present invention relates to a process for the production of valine, which comprises
[38122] (a) increasing or generating the activity of a agmatinase non-targeted in a non-human organism or a part thereof, preferably a microorganism, a plant cell, a plant or a part thereof, as compared to a corresponding non-transformed wild type non-human organism or a part thereof; and
[38123] (b) growing the non-human organism or a part thereof under conditions which permit the production of valine or a composition comprising valine in said non-human organism or in the culture medium surrounding said non-human organism.

[38124] A further embodiment of the present invention relates to a process for the production of valine, which comprises
[38125] (a) increasing or generating the activity of a ABC transporter ATP binding component non-targeted in a non-human organism or a part thereof, preferably a microorganism, a plant cell, a plant or a part thereof, as compared to a corresponding non-transformed wild type non-human organism or a part thereof; and
[38126] (b) growing the non-human organism or a part thereof under conditions which permit the production of valine or a composition comprising valine in said non-human organism or in the culture medium surrounding said non-human organism.

[38127] A further embodiment of the present invention relates to a process for the production of isoleucine, which comprises
[38128] (a) increasing or generating the activity of a flavodoxin non-targeted in a non-human organism or a part thereof, preferably a microorganism, a plant cell, a plant or a part thereof, as compared to a corresponding non-transformed wild type non-human organism or a part thereof; and
[38129] (b) growing the non-human organism or a part thereof under conditions which permit the production of isoleucine or a composition comprising isoleucine in said non-human organism or in the culture medium surrounding said non-human organism.

[38130] A further embodiment of the present invention relates to a process for the production of leucine, which comprises
[38131] (a) increasing or generating the activity of a flavodoxin non-targeted in a non-human organism or a part thereof, preferably a microorganism, a plant cell, a plant or a part thereof, as compared to a corresponding non-transformed wild type non-human organism or a part thereof; and
[38132] (b) growing the non-human organism or a part thereof under conditions which permit the production of leucine or a composition comprising leucine in said non-human organism or in the culture medium surrounding said non-human organism.

[38133] A further embodiment of the present invention relates to a process for the production of isoleucine, which comprises
[38134] (a) increasing or generating the activity of a polyphosphate kinase non-targeted in a non-human organism or a part thereof, preferably a microorganism, a plant cell, a plant or a part thereof, as compared to a corresponding non-transformed wild type non-human organism or a part thereof; and
[38135] (b) growing the non-human organism or a part thereof under conditions which permit the production of isoleucine or a composition comprising isoleucine in said non-human organism or in the culture medium surrounding said non-human organism.

[38136] A further embodiment of the present invention relates to a process for the production of leucine, which comprises
[38137] (a) increasing or generating the activity of a polyphosphate kinase non-targeted in a non-human organism or a part thereof, preferably a microorganism, a plant cell, a plant or a part thereof, as compared to a corresponding non-transformed wild type non-human organism or a part thereof; and
[38138] (b) growing the non-human organism or a part thereof under conditions which permit the production of leucine or a composition comprising leucine in said non-human organism or in the culture medium surrounding said non-human organism.

[38139] A further embodiment of the present invention relates to a process for the production of valine, which comprises
[38140] (a) increasing or generating the activity of a polyphosphate kinase non-targeted in a non-human organism or a part thereof, preferably a microorganism, a plant cell, a plant or a part thereof, as compared to a corresponding non-transformed wild type non-human organism or a part thereof; and
[38141] (b) growing the non-human organism or a part thereof under conditions which permit the production of valine or a composition comprising valine in said non-human organism or in the culture medium surrounding said non-human organism.

[38142] A further embodiment of the present invention relates to a process for the production of valine, which comprises
[38143] (a) increasing or generating the activity of a bifunctional protein (phosphoribosyltransferase and regulatory protein) non-targeted in a non-human organism or a part thereof, preferably a microorganism, a plant cell, a plant or a part thereof, as compared to a corresponding non-transformed wild type non-human organism or a part thereof; and
[38144] (b) growing the non-human organism or a part thereof under conditions which permit the production of valine or a composition comprising valine in said non-human organism or in the culture medium surrounding said non-human organism.

[38145] A further embodiment of the present invention relates to a process for the production of isoleucine, which comprises
[38146] (a) increasing or generating the activity of a urease subunit non-targeted in a non-human organism or a part thereof, preferably a microorganism, a plant cell, a plant or a part thereof, as compared to a corresponding non-transformed wild type non-human organism or a part thereof; and
[38147] (b) growing the non-human organism or a part thereof under conditions which permit the production of isoleucine or a composition comprising isoleucine in said non-human organism or in the culture medium surrounding said non-human organism.

[38148] A further embodiment of the present invention relates to a process for the production of valine, which comprises
[38149] (a) increasing or generating the activity of a NAD(P)H-quinone oxidoreductase subunit non-targeted in a non-human organism or a part thereof, preferably a microorganism, a plant cell, a plant or a part thereof, as compared to a corresponding non-transformed wild type non-human organism or a part thereof; and
[38150] (b) growing the non-human organism or a part thereof under conditions which permit the production of valine or a composition comprising valine in said non-human organism or in the culture medium surrounding said non-human organism.

[38151] A further embodiment of the present invention relates to a process for the production of isoleucine, which comprises
[38152] (a) increasing or generating the activity of a oxireductase non-targeted in a non-human organism or a part thereof, preferably a microorganism, a plant cell, a plant or a part thereof, as compared to a corresponding non-transformed wild type non-human organism or a part thereof; and
[38153] (b) growing the non-human organism or a part thereof under conditions which permit the production of isoleucine or a composition comprising isoleucine in said non-human organism or in the culture medium surrounding said non-human organism.

[38154] A further embodiment of the present invention relates to a process for the production of isoleucine, which comprises
[38155] (a) increasing or generating the activity of a binding-protein-dependent transport systems inner membrane component non-targeted in a non-human organism or a part thereof, preferably a microorganism, a plant cell, a plant or a part thereof, as compared to a corresponding non-transformed wild type non-human organism or a part thereof; and
[38156] (b) growing the non-human organism or a part thereof under conditions which permit the production of isoleucine or a composition comprising isoleucine in said non-human organism or in the culture medium surrounding said non-human organism.

[38157] A further embodiment of the present invention relates to a process for the production of valine, which comprises
[38158] (a) increasing or generating the activity of a sll1032-protein non-targeted in a non-human organism or a part thereof, preferably a microorganism, a plant cell, a plant or a part thereof, as compared to a corresponding non-transformed wild type non-human organism or a part thereof; and
[38159] (b) growing the non-human organism or a part thereof under conditions which permit the production of valine or a composition comprising valine in said non-human organism or in the culture medium surrounding said non-human organism.

[38160] A further embodiment of the present invention relates to a process for the production of isoleucine, which comprises
[38161] (a) increasing or generating the activity of a glycogen (starch) synthase non-targeted in a non-human organism or a part thereof, preferably a microorganism, a plant cell, a plant or a part thereof, as compared to a corresponding non-transformed wild type non-human organism or a part thereof; and
[38162] (b) growing the non-human organism or a part thereof under conditions which permit the production of isoleucine or a composition comprising isoleucine in said non-human organism or in the culture medium surrounding said non-human organism.

[38163] A further embodiment of the present invention relates to a process for the production of leucine, which comprises
[38164] (a) increasing or generating the activity of a glycogen (starch) synthase non-targeted in a non-human organism or a part thereof, preferably a microorganism, a plant cell, a plant or a part thereof, as compared to a corresponding non-transformed wild type non-human organism or a part thereof; and
[38165] (b) growing the non-human organism or a part thereof under conditions which permit the production of leucine or a composition comprising leucine in said non-human organism or in the culture medium surrounding said non-human organism.

[38166] A further embodiment of the present invention relates to a process for the production of valine, which comprises
[38167] (a) increasing or generating the activity of a glycogen (starch) synthase non-targeted in a non-human organism or a part thereof, preferably a microorganism, a plant cell, a plant or a part thereof, as compared to a corresponding non-transformed wild type non-human organism or a part thereof; and
[38168] (b) growing the non-human organism or a part thereof under conditions which permit the production of valine or a composition comprising valine in said non-human organism or in the culture medium surrounding said non-human organism.

[38169] A further embodiment of the present invention relates to a process for the production of valine, which comprises
[38170] (a) increasing or generating the activity of a sll1455-protein non-targeted in a non-human organism or a part thereof, preferably a microorganism, a plant cell, a plant or a part thereof, as compared to a corresponding non-transformed wild type non-human organism or a part thereof; and
[38171] (b) growing the non-human organism or a part thereof under conditions which permit the production of valine or a composition comprising valine in said non-human organism or in the culture medium surrounding said non-human organism.

[38172] A further embodiment of the present invention relates to a process for the production of isoleucine, which comprises
[38173] (a) increasing or generating the activity of a carbamoyl-phosphate synthase subunit non-targeted in a non-human organism or a part thereof, preferably a microorganism, a plant cell, a plant or a part thereof, as compared to a corresponding non-transformed wild type non-human organism or a part thereof; and
[38174] (b) growing the non-human organism or a part thereof under conditions which permit the production of isoleucine or a composition comprising isoleucine in said non-human organism or in the culture medium surrounding said non-human organism.

[38175] A further embodiment of the present invention relates to a process for the production of leucine, which comprises
[38176] (a) increasing or generating the activity of a carbamoyl-phosphate synthase subunit non-targeted in a non-human organism or a part thereof, preferably a microorganism, a plant cell, a plant or a part thereof, as compared to a corresponding non-transformed wild type non-human organism or a part thereof; and
[38177] (b) growing the non-human organism or a part thereof under conditions which permit the production of leucine or a composition comprising leucine in said non-human organism or in the culture medium surrounding said non-human organism.

[38178] A further embodiment of the present invention relates to a process for the production of isoleucine, which comprises
[38179] (a) increasing or generating the activity of a sll1761-protein non-targeted in a non-human organism or a part thereof, preferably a microorganism, a plant cell, a plant or a part thereof, as compared to a corresponding non-transformed wild type non-human organism or a part thereof; and
[38180] (b) growing the non-human organism or a part thereof under conditions which permit the production of isoleucine or a composition comprising isoleucine in said non-human organism or in the culture medium surrounding said non-human organism.

[38181] A further embodiment of the present invention relates to a process for the production of leucine, which comprises
[38182] (a) increasing or generating the activity of a sll1761-protein non-targeted in a non-human organism or a part thereof, preferably a microorganism, a plant cell, a plant or a part thereof, as compared to a corresponding non-transformed wild type non-human organism or a part thereof; and
[38183] (b) growing the non-human organism or a part thereof under conditions which permit the production of leucine or a composition comprising leucine in said non-human organism or in the culture medium surrounding said non-human organism.

[38184] A further embodiment of the present invention relates to a process for the production of isoleucine, which comprises
[38185] (a) increasing or generating the activity of a adenylate kinase non-targeted in a non-human organism or a part thereof, preferably a microorganism, a plant cell, a plant or a part thereof, as compared to a corresponding non-transformed wild type non-human organism or a part thereof; and
[38186] (b) growing the non-human organism or a part thereof under conditions which permit the production of isoleucine or a composition comprising isoleucine in said non-human organism or in the culture medium surrounding said non-human organism.

[38187] A further embodiment of the present invention relates to a process for the production of leucine, which comprises
[38188] (a) increasing or generating the activity of a adenylate kinase non-targeted in a non-human organism or a part thereof, preferably a microorganism, a plant cell, a plant or a part thereof, as compared to a corresponding non-transformed wild type non-human organism or a part thereof; and
[38189] (b) growing the non-human organism or a part thereof under conditions which permit the production of leucine or a composition comprising leucine in said non-human organism or in the culture medium surrounding said non-human organism.

[38190] A further embodiment of the present invention relates to a process for the production of valine, which comprises
[38191] (a) increasing or generating the activity of a adenylate kinase non-targeted in a non-human organism or a part thereof, preferably a microorganism, a plant cell, a plant or a part thereof, as compared to a corresponding non-transformed wild type non-human organism or a part thereof; and
[38192] (b) growing the non-human organism or a part thereof under conditions which permit the production of valine or a composition comprising valine in said non-human organism or in the culture medium surrounding said non-human organism.

[38193] A further embodiment of the present invention relates to a process for the production of isoleucine, which comprises
[38194] (a) increasing or generating the activity of a acyl transferase non-targeted in a non-human organism or a part thereof, preferably a microorganism, a plant cell, a plant or a part thereof, as compared to a corresponding non-transformed wild type non-human organism or a part thereof; and
[38195] (b) growing the non-human organism or a part thereof under conditions which permit the production of isoleucine or a composition comprising isoleucine in said non-human organism or in the culture medium surrounding said non-human organism.

[38196] A further embodiment of the present invention relates to a process for the production of valine, which comprises
[38197] (a) increasing or generating the activity of a ferredoxin non-targeted in a non-human organism or a part thereof, preferably a microorganism, a plant cell, a plant or a part thereof, as compared to a corresponding non-transformed wild type non-human organism or a part thereof; and
[38198] (b) growing the non-human organism or a part thereof under conditions which permit the production of valine or a composition comprising valine in said non-human organism or in the culture medium surrounding said non-human organism.

[38199] A further embodiment of the present invention relates to a process for the production of isoleucine, which comprises
[38200] (a) increasing or generating the activity of a precorrin methylase non-targeted in a non-human organism or a part thereof, preferably a microorganism, a plant cell, a plant or a part thereof, as compared to a corresponding non-transformed wild type non-human organism or a part thereof; and
[38201] (b) growing the non-human organism or a part thereof under conditions which permit the production of isoleucine or a composition comprising isoleucine in said non-human organism or in the culture medium surrounding said non-human organism.

[38202] A further embodiment of the present invention relates to a process for the production of leucine, which comprises
[38203] (a) increasing or generating the activity of a precorrin methylase non-targeted in a non-human organism or a part thereof, preferably a microorganism, a plant cell, a plant or a part thereof, as compared to a corresponding non-transformed wild type non-human organism or a part thereof; and
[38204] (b) growing the non-human organism or a part thereof under conditions which permit the production of leucine or a composition comprising leucine in said non-human organism or in the culture medium surrounding said non-human organism.

[38205] A further embodiment of the present invention relates to a process for the production of valine, which comprises
[38206] (a) increasing or generating the activity of a precorrin methylase non-targeted in a non-human organism or a part thereof, preferably a microorganism, a plant cell, a plant or a part thereof, as compared to a corresponding non-transformed wild type non-human organism or a part thereof; and
[38207] (b) growing the non-human organism or a part thereof under conditions which permit the production of valine or a composition comprising valine in said non-human organism or in the culture medium surrounding said non-human organism.

[38208] A further embodiment of the present invention relates to a process for the production of isoleucine, which comprises
[38209] (a) increasing or generating the activity of a malate dehydrogenase non-targeted in a non-human organism or a part thereof, preferably a microorganism, a plant cell, a plant or a part thereof, as compared to a corresponding non-transformed wild type non-human organism or a part thereof; and
[38210] (b) growing the non-human organism or a part thereof under conditions which permit the production of isoleucine or a composition comprising isoleucine in said non-human organism or in the culture medium surrounding said non-human organism.

[38211] A further embodiment of the present invention relates to a process for the production of isoleucine, which comprises
[38212] (a) increasing or generating the activity of a malate dehydrogenase non-targeted in a non-human organism or a part thereof, preferably a microorganism, a plant cell, a plant or a part thereof, as compared to a corresponding non-transformed wild type non-human organism or a part thereof; and
[38213] (b) growing the non-human organism or a part thereof under conditions which permit the production of isoleucine or a composition comprising isoleucine in said non-human organism or in the culture medium surrounding said non-human organism.

[38214] A further embodiment of the present invention relates to a process for the production of leucine, which comprises
[38215] (a) increasing or generating the activity of a malate dehydrogenase non-targeted in a non-human organism or a part thereof, preferably a microorganism, a plant cell, a plant or a part thereof, as compared to a corresponding non-transformed wild type non-human organism or a part thereof; and
[38216] (b) growing the non-human organism or a part thereof under conditions which permit the production of leucine or a composition comprising leucine in said non-human organism or in the culture medium surrounding said non-human organism.

[38217] A further embodiment of the present invention relates to a process for the production of leucine, which comprises
[38218] (a) increasing or generating the activity of a malate dehydrogenase non-targeted in a non-human organism or a part thereof, preferably a microorganism, a plant cell, a plant or a part thereof, as compared to a corresponding non-transformed wild type non-human organism or a part thereof; and
[38219] (b) growing the non-human organism or a part thereof under conditions which permit the production of leucine or a composition comprising leucine in said non-human organism or in the culture medium surrounding said non-human organism.

[38220] A further embodiment of the present invention relates to a process for the production of valine, which comprises
[38221] (a) increasing or generating the activity of a malate dehydrogenase non-targeted in a non-human organism or a part thereof, preferably a microorganism, a plant cell, a plant or a part thereof, as compared to a corresponding non-transformed wild type non-human organism or a part thereof; and
[38222] (b) growing the non-human organism or a part thereof under conditions which permit the production of valine or a composition comprising valine in said non-human organism or in the culture medium surrounding said non-human organism.

[38223] A further embodiment of the present invention relates to a process for the production of valine, which comprises
[38224] (a) increasing or generating the activity of a malate dehydrogenase non-targeted in a non-human organism or a part thereof, preferably a microorganism, a plant cell, a plant or a part thereof, as compared to a corresponding non-transformed wild type non-human organism or a part thereof; and
[38225] (b) growing the non-human organism or a part thereof under conditions which permit the production of valine or a composition comprising valine in said non-human organism or in the culture medium surrounding said non-human organism.

[38226] A further embodiment of the present invention relates to a process for the production of isoleucine, which comprises
[38227] (a) increasing or generating the activity of a geranylgeranyl pyrophosphate synthase non-targeted in a non-human organism or a part thereof, preferably a microorganism, a plant cell, a plant or a part thereof, as compared to a corresponding non-transformed wild type non-human organism or a part thereof; and
[38228] (b) growing the non-human organism or a part thereof under conditions which permit the production of isoleucine or a composition comprising isoleucine in said non-human organism or in the culture medium surrounding said non-human organism.

[38229] A further embodiment of the present invention relates to a process for the production of leucine, which comprises
[38230] (a) increasing or generating the activity of a geranylgeranyl pyrophosphate synthase non-targeted in a non-human organism or a part thereof, preferably a microorganism, a plant cell, a plant or a part thereof, as compared to a corresponding non-transformed wild type non-human organism or a part thereof; and
[38231] (b) growing the non-human organism or a part thereof under conditions which permit the production of leucine or a composition comprising leucine in said non-human organism or in the culture medium surrounding said non-human organism.

[38232] A further embodiment of the present invention relates to a process for the production of valine, which comprises
[38233] (a) increasing or generating the activity of a geranylgeranyl pyrophosphate synthase non-targeted in a non-human organism or a part thereof, preferably a microorganism, a plant cell, a plant or a part thereof, as compared to a corresponding non-transformed wild type non-human organism or a part thereof; and
[38234] (b) growing the non-human organism or a part thereof under conditions which permit the production of valine or a composition comprising valine in said non-human organism or in the culture medium surrounding said non-human organism.

[38235] A further embodiment of the present invention relates to a process for the production of isoleucine, which comprises
[38236] (a) increasing or generating the activity of a iron(III) dicitrate-binding protein non-targeted in a non-human organism or a part thereof, preferably a microorganism, a plant cell, a plant or a part thereof, as compared to a corresponding non-transformed wild type non-human organism or a part thereof; and
[38237] (b) growing the non-human organism or a part thereof under conditions which permit the production of isoleucine or a composition comprising isoleucine in said non-human organism or in the culture medium surrounding said non-human organism.

[38238] A further embodiment of the present invention relates to a process for the production of isoleucine, which comprises
[38239] (a) increasing or generating the activity of a Na+/K+ transporter non-targeted in a non-human organism or a part thereof, preferably a microorganism, a plant cell, a plant or a part thereof, as compared to a corresponding non-transformed wild type non-human organism or a part thereof; and
[38240] (b) growing the non-human organism or a part thereof under conditions which permit the production of isoleucine or a composition comprising isoleucine in said non-human organism or in the culture medium surrounding said non-human organism.

[38241] A further embodiment of the present invention relates to a process for the production of leucine, which comprises
[38242] (a) increasing or generating the activity of a Na+/K+ transporter non-targeted in a non-human organism or a part thereof, preferably a microorganism, a plant cell, a plant or a part thereof, as compared to a corresponding non-transformed wild type non-human organism or a part thereof; and
[38243] (b) growing the non-human organism or a part thereof under conditions which permit the production of leucine or a composition comprising leucine in said non-human organism or in the culture medium surrounding said non-human organism.

[38244] A further embodiment of the present invention relates to a process for the production of valine, which comprises
[38245] (a) increasing or generating the activity of a 3-isopropylmalate dehydrogenase non-targeted in a non-human organism or a part thereof, preferably a microorganism, a plant cell, a plant or a part thereof, as compared to a corresponding non-transformed wild type non-human organism or a part thereof; and
[38246] (b) growing the non-human organism or a part thereof under conditions which permit the production of valine or a composition comprising valine in said non-human organism or in the culture medium surrounding said non-human organism.

[38247] A further embodiment of the present invention relates to a process for the production of isoleucine, which comprises
[38248] (a) increasing or generating the activity of a photosystem II protein non-targeted in a non-human organism or a part thereof, preferably a microorganism, a plant cell, a plant or a part thereof, as compared to a corresponding non-transformed wild type non-human organism or a part thereof; and
[38249] (b) growing the non-human organism or a part thereof under conditions which permit the production of isoleucine or a composition comprising isoleucine in said non-human organism or in the culture medium surrounding said non-human organism.

[38250] A further embodiment of the present invention relates to a process for the production of leucine, which comprises
[38251] (a) increasing or generating the activity of a photosystem II protein non-targeted in a non-human organism or a part thereof, preferably a microorganism, a plant cell, a plant or a part thereof, as compared to a corresponding non-transformed wild type non-human organism or a part thereof; and
[38252] (b) growing the non-human organism or a part thereof under conditions which permit the production of leucine or a composition comprising leucine in said non-human organism or in the culture medium surrounding said non-human organism.

[38253] A further embodiment of the present invention relates to a process for the production of valine, which comprises
[38254] (a) increasing or generating the activity of a photosystem II protein non-targeted in a non-human organism or a part thereof, preferably a microorganism, a plant cell, a plant or a part thereof, as compared to a corresponding non-transformed wild type non-human organism or a part thereof; and
[38255] (b) growing the non-human organism or a part thereof under conditions which permit the production of valine or a composition comprising valine in said non-human organism or in the culture medium surrounding said non-human organism.

[38256] A further embodiment of the present invention relates to a process for the production of valine, which comprises
[38257] (a) increasing or generating the activity of a phosphoadenosine phosphosulfate reductase non-targeted in a non-human organism or a part thereof, preferably a microorganism, a plant cell, a plant or a part thereof, as compared to a corresponding non-transformed wild type non-human organism or a part thereof; and
[38258] (b) growing the non-human organism or a part thereof under conditions which permit the production of valine or a composition comprising valine in said non-human organism or in the culture medium surrounding said non-human organism.

[38259] A further embodiment of the present invention relates to a process for the production of valine, which comprises
[38260] (a) increasing or generating the activity of a riboflavin biosynthesis protein non-targeted in a non-human organism or a part thereof, preferably a microorganism, a plant cell, a plant or a part thereof, as compared to a corresponding non-transformed wild type non-human organism or a part thereof; and
[38261] (b) growing the non-human organism or a part thereof under conditions which permit the production of valine or a composition comprising valine in said non-human organism or in the culture medium surrounding said non-human organism.

[38262] A further embodiment of the present invention relates to a process for the production of isoleucine, which comprises
[38263] (a) increasing or generating the activity of a threonine dehydratase non-targeted in a non-human organism or a part thereof, preferably a microorganism, a plant cell, a plant or a part thereof, as compared to a corresponding non-transformed wild type non-human organism or a part thereof; and
[38264] (b) growing the non-human organism or a part thereof under conditions which permit the production of isoleucine or a composition comprising isoleucine in said non-human organism or in the culture medium surrounding said non-human organism.

[38265] A further embodiment of the present invention relates to a process for the production of isoleucine, which comprises
[38266] (a) increasing or generating the activity of a threonine dehydratase non-targeted in a non-human organism or a part thereof, preferably a microorganism, a plant cell, a plant or a part thereof, as compared to a corresponding non-transformed wild type non-human organism or a part thereof; and
[38267] (b) growing the non-human organism or a part thereof under conditions which permit the production of isoleucine or a composition comprising isoleucine in said non-human organism or in the culture medium surrounding said non-human organism.

[38268] A further embodiment of the present invention relates to a process for the production of leucine, which comprises
[38269] (a) increasing or generating the activity of a threonine dehydratase non-targeted in a non-human organism or a part thereof, preferably a microorganism, a plant cell, a plant or a part thereof, as compared to a corresponding non-transformed wild type non-human organism or a part thereof; and
[38270] (b) growing the non-human organism or a part thereof under conditions which permit the production of leucine or a composition comprising leucine in said non-human organism or in the culture medium surrounding said non-human organism.

[38271] A further embodiment of the present invention relates to a process for the production of leucine, which comprises
[38272] (a) increasing or generating the activity of a threonine dehydratase non-targeted in a non-human organism or a part thereof, preferably a microorganism, a plant cell, a plant or a part thereof, as compared to a corresponding non-transformed wild type non-human organism or a part thereof; and
[38273] (b) growing the non-human organism or a part thereof under conditions which permit the production of leucine or a composition comprising leucine in said non-human organism or in the culture medium surrounding said non-human organism.

[38274] A further embodiment of the present invention relates to a process for the production of valine, which comprises
[38275] (a) increasing or generating the activity of a threonine dehydratase non-targeted in a non-human organism or a part thereof, preferably a microorganism, a plant cell, a plant or a part thereof, as compared to a corresponding non-transformed wild type non-human organism or a part thereof; and
[38276] (b) growing the non-human organism or a part thereof under conditions which permit the production of valine or a composition comprising valine in said non-human organism or in the culture medium surrounding said non-human organism.

[38277] A further embodiment of the present invention relates to a process for the production of valine, which comprises
[38278] (a) increasing or generating the activity of a threonine dehydratase non-targeted in a non-human organism or a part thereof, preferably a microorganism, a plant cell, a plant or a part thereof, as compared to a corresponding non-transformed wild type non-human organism or a part thereof; and
[38279] (b) growing the non-human organism or a part thereof under conditions which permit the production of valine or a composition comprising valine in said non-human organism or in the culture medium surrounding said non-human organism.

[38280] A further embodiment of the present invention relates to a process for the production of valine, which comprises
[38281] (a) increasing or generating the activity of a short-chain alcohol dehydrogenase family non-targeted in a non-human organism or a part thereof, preferably a microorganism, a plant cell, a plant or a part thereof, as compared to a corresponding non-transformed wild type non-human organism or a part thereof; and
[38282] (b) growing the non-human organism or a part thereof under conditions which permit the production of valine or a composition comprising valine in said non-human organism or in the culture medium surrounding said non-human organism.

[38283] A further embodiment of the present invention relates to a process for the production of isoleucine, which comprises
[38284] (a) increasing or generating the activity of a Sec-independent protein translocase subunit non-targeted in a non-human organism or a part thereof, preferably a microorganism, a plant cell, a plant or a part thereof, as compared to a corresponding non-transformed wild type non-human organism or a part thereof; and
[38285] (b) growing the non-human organism or a part thereof under conditions which permit the production of isoleucine or a composition comprising isoleucine in said non-human organism or in the culture medium surrounding said non-human organism.

[38286] A further embodiment of the present invention relates to a process for the production of leucine, which comprises
[38287] (a) increasing or generating the activity of a Sec-independent protein translocase subunit non-targeted in a non-human organism or a part thereof, preferably a microorganism, a plant cell, a plant or a part thereof, as compared to a corresponding non-transformed wild type non-human organism or a part thereof; and
[38288] (b) growing the non-human organism or a part thereof under conditions which permit the production of leucine or a composition comprising leucine in said non-human organism or in the culture medium surrounding said non-human organism.

[38289] A further embodiment of the present invention relates to a process for the production of valine, which comprises
[38290] (a) increasing or generating the activity of a Sec-independent protein translocase subunit non-targeted in a non-human organism or a part thereof, preferably a microorganism, a plant cell, a plant or a part thereof, as compared to a corresponding non-transformed wild type non-human organism or a part thereof; and
[38291] (b) growing the non-human organism or a part thereof under conditions which permit the production of valine or a composition comprising valine in said non-human organism or in the culture medium surrounding said non-human organism.

[38292] A further embodiment of the present invention relates to a process for the production of isoleucine, which comprises
[38293] (a) increasing or generating the activity of a 2-isopropylmalate synthase non-targeted in a non-human organism or a part thereof, preferably a microorganism, a plant cell, a plant or a part thereof, as compared to a corresponding non-transformed wild type non-human organism or a part thereof; and
[38294] (b) growing the non-human organism or a part thereof under conditions which permit the production of isoleucine or a composition comprising isoleucine in said non-human organism or in the culture medium surrounding said non-human organism.

[38295] A further embodiment of the present invention relates to a process for the production of leucine, which comprises
[38296] (a) increasing or generating the activity of a 2-isopropylmalate synthase non-targeted in a non-human organism or a part thereof, preferably a microorganism, a plant cell, a plant or a part thereof, as compared to a corresponding non-transformed wild type non-human organism or a part thereof; and
[38297] (b) growing the non-human organism or a part thereof under conditions which permit the production of leucine or a composition comprising leucine in said non-human organism or in the culture medium surrounding said non-human organism.

[38298] A further embodiment of the present invention relates to a process for the production of isoleucine, which comprises
[38299] (a) increasing or generating the activity of a TTC1386-protein non-targeted in a non-human organism or a part thereof, preferably a microorganism, a plant cell, a plant or a part thereof, as compared to a corresponding non-transformed wild type non-human organism or a part thereof; and
[38300] (b) growing the non-human organism or a part thereof under conditions which permit the production of isoleucine or a composition comprising isoleucine in said non-human organism or in the culture medium surrounding said non-human organism.

[38301] A further embodiment of the present invention relates to a process for the production of leucine, which comprises
[38302] (a) increasing or generating the activity of a TTC1386-protein non-targeted in a non-human organism or a part thereof, preferably a microorganism, a plant cell, a plant or a part thereof, as compared to a corresponding non-transformed wild type non-human organism or a part thereof; and
[38303] (b) growing the non-human organism or a part thereof under conditions which permit the production of leucine or a composition comprising leucine in said non-human organism or in the culture medium surrounding said non-human organism.

[38304] A further embodiment of the present invention relates to a process for the production of valine, which comprises
[38305] (a) increasing or generating the activity of a TTC1386-protein non-targeted in a non-human organism or a part thereof, preferably a microorganism, a plant cell, a plant or a part thereof, as compared to a corresponding non-transformed wild type non-human organism or a part thereof; and
[38306] (b) growing the non-human organism or a part thereof under conditions which permit the production of valine or a composition comprising valine in said non-human organism or in the culture medium surrounding said non-human organism.

[38307] A further embodiment of the present invention relates to a process for the production of isoleucine, which comprises
[38308] (a) increasing or generating the activity of a homocitrate synthase non-targeted in a non-human organism or a part thereof, preferably a microorganism, a plant cell, a plant or a part thereof, as compared to a corresponding non-transformed wild type non-human organism or a part thereof; and
[38309] (b) growing the non-human organism or a part thereof under conditions which permit the production of isoleucine or a composition comprising isoleucine in said non-human organism or in the culture medium surrounding said non-human organism.

[38310] A further embodiment of the present invention relates to a process for the production of leucine, which comprises
[38311] (a) increasing or generating the activity of a homocitrate synthase non-targeted in a non-human organism or a part thereof, preferably a microorganism, a plant cell, a plant or a part thereof, as compared to a corresponding non-transformed wild type non-human organism or a part thereof; and
[38312] (b) growing the non-human organism or a part thereof under conditions which permit the production of leucine or a composition comprising leucine in said non-human organism or in the culture medium surrounding said non-human organism.

[38313] A further embodiment of the present invention relates to a process for the production of valine, which comprises
[38314] (a) increasing or generating the activity of a homocitrate synthase non-targeted in a non-human organism or a part thereof, preferably a microorganism, a plant cell, a plant or a part thereof, as compared to a corresponding non-transformed wild type non-human organism or a part thereof; and
[38315] (b) growing the non-human organism or a part thereof under conditions which permit the production of valine or a composition comprising valine in said non-human organism or in the culture medium surrounding said non-human organism.

[38316] A further embodiment of the present invention relates to a process for the production of leucine, which comprises
[38317] (a) increasing or generating the activity of a YAL013W-protein non-targeted in a non-human organism or a part thereof, preferably a microorganism, a plant cell, a plant or a part thereof, as compared to a corresponding non-transformed wild type non-human organism or a part thereof; and
[38318] (b) growing the non-human organism or a part thereof under conditions which permit the production of leucine or a composition comprising leucine in said non-human organism or in the culture medium surrounding said non-human organism.

[38319] A further embodiment of the present invention relates to a process for the production of valine, which comprises
[38320] (a) increasing or generating the activity of a cell division control protein non-targeted in a non-human organism or a part thereof, preferably a microorganism, a plant cell, a plant or a part thereof, as compared to a corresponding non-transformed wild type non-human organism or a part thereof; and
[38321] (b) growing the non-human organism or a part thereof under conditions which permit the production of valine or a composition comprising valine in said non-human organism or in the culture medium surrounding said non-human organism.

[38322] A further embodiment of the present invention relates to a process for the production of isoleucine, which comprises
[38323] (a) increasing or generating the activity of a phosphoglycerate kinase non-targeted in a non-human organism or a part thereof, preferably a microorganism, a plant cell, a plant or a part thereof, as compared to a corresponding non-transformed wild type non-human organism or a part thereof; and
[38324] (b) growing the non-human organism or a part thereof under conditions which permit the production of isoleucine or a composition comprising isoleucine in said non-human organism or in the culture medium surrounding said non-human organism.

[38325] A further embodiment of the present invention relates to a process for the production of leucine, which comprises
[38326] (a) increasing or generating the activity of a phosphoglycerate kinase non-targeted in a non-human organism or a part thereof, preferably a microorganism, a plant cell, a plant or a part thereof, as compared to a corresponding non-transformed wild type non-human organism or a part thereof; and
[38327] (b) growing the non-human organism or a part thereof under conditions which permit the production of leucine or a composition comprising leucine in said non-human organism or in the culture medium surrounding said non-human organism.

[38328] A further embodiment of the present invention relates to a process for the production of isoleucine, which comprises
[38329] (a) increasing or generating the activity of a branched-chain amino acid permease non-targeted in a non-human organism or a part thereof, preferably a microorganism, a plant cell, a plant or a part thereof, as compared to a corresponding non-transformed wild type non-human organism or a part thereof; and
[38330] (b) growing the non-human organism or a part thereof under conditions which permit the production of isoleucine or a composition comprising isoleucine in said non-human organism or in the culture medium surrounding said non-human organism.

[38331] A further embodiment of the present invention relates to a process for the production of valine, which comprises
[38332] (a) increasing or generating the activity of a branched-chain amino acid permease non-targeted in a non-human organism or a part thereof, preferably a microorganism, a plant cell, a plant or a part thereof, as compared to a corresponding non-transformed wild type non-human organism or a part thereof; and
[38333] (b) growing the non-human organism or a part thereof under conditions which permit the production of valine or a composition comprising valine in said non-human organism or in the culture medium surrounding said non-human organism.

[38334] A further embodiment of the present invention relates to a process for the production of valine, which comprises
[38335] (a) increasing or generating the activity of a ydr183w-protein non-targeted in a non-human organism or a part thereof, preferably a microorganism, a plant cell, a plant or a part thereof, as compared to a corresponding non-transformed wild type non-human organism or a part thereof; and
[38336] (b) growing the non-human organism or a part thereof under conditions which permit the production of valine or a composition comprising valine in said non-human organism or in the culture medium surrounding said non-human organism.

[38337] A further embodiment of the present invention relates to a process for the production of isoleucine, which comprises
[38338] (a) increasing or generating the activity of a hexose transporter non-targeted in a non-human organism or a part thereof, preferably a microorganism, a plant cell, a plant or a part thereof, as compared to a corresponding non-transformed wild type non-human organism or a part thereof; and
[38339] (b) growing the non-human organism or a part thereof under conditions which permit the production of isoleucine or a composition comprising isoleucine in said non-human organism or in the culture medium surrounding said non-human organism.

[38340] A further embodiment of the present invention relates to a process for the production of isoleucine, which comprises
[38341] (a) increasing or generating the activity of a ygl237c-protein non-targeted in a non-human organism or a part thereof, preferably a microorganism, a plant cell, a plant or a part thereof, as compared to a corresponding non-transformed wild type non-human organism or a part thereof; and
[38342] (b) growing the non-human organism or a part thereof under conditions which permit the production of isoleucine or a composition comprising isoleucine in said non-human organism or in the culture medium surrounding said non-human organism.

[38343] A further embodiment of the present invention relates to a process for the production of leucine, which comprises
[38344] (a) increasing or generating the activity of a ygl237c-protein non-targeted in a non-human organism or a part thereof, preferably a microorganism, a plant cell, a plant or a part thereof, as compared to a corresponding non-transformed wild type non-human organism or a part thereof; and
[38345] (b) growing the non-human organism or a part thereof under conditions which permit the production of leucine or a composition comprising leucine in said non-human organism or in the culture medium surrounding said non-human organism.

[38346] A further embodiment of the present invention relates to a process for the production of leucine, which comprises
[38347] (a) increasing or generating the activity of a YGR193C-protein non-targeted in a non-human organism or a part thereof, preferably a microorganism, a plant cell, a plant or a part thereof, as compared to a corresponding non-transformed wild type non-human organism or a part thereof; and
[38348] (b) growing the non-human organism or a part thereof under conditions which permit the production of leucine or a composition comprising leucine in said non-human organism or in the culture medium surrounding said non-human organism.

[38349] A further embodiment of the present invention relates to a process for the production of isoleucine, which comprises
[38350] (a) increasing or generating the activity of a yhr006w-protein non-targeted in a non-human organism or a part thereof, preferably a microorganism, a plant cell, a plant or a part thereof, as compared to a corresponding non-transformed wild type non-human organism or a part thereof; and
[38351] (b) growing the non-human organism or a part thereof under conditions which permit the production of isoleucine or a composition comprising isoleucine in said non-human organism or in the culture medium surrounding said non-human organism.

[38352] A further embodiment of the present invention relates to a process for the production of leucine, which comprises
[38353] (a) increasing or generating the activity of a yhr006w-protein non-targeted in a non-human organism or a part thereof, preferably a microorganism, a plant cell, a plant or a part thereof, as compared to a corresponding non-transformed wild type non-human organism or a part thereof; and
[38354] (b) growing the non-human organism or a part thereof under conditions which permit the production of leucine or a composition comprising leucine in said non-human organism or in the culture medium surrounding said non-human organism.

[38355] A further embodiment of the present invention relates to a process for the production of isoleucine, which comprises
[38356] (a) increasing or generating the activity of a H/ACA ribonucleoprotein complex subunit 3 non-targeted in a non-human organism or a part thereof, preferably a microorganism, a plant cell, a plant or a part thereof, as compared to a corresponding non-transformed wild type non-human organism or a part thereof; and
[38357] (b) growing the non-human organism or a part thereof under conditions which permit the production of isoleucine or a composition comprising isoleucine in said non-human organism or in the culture medium surrounding said non-human organism.

[38358] A further embodiment of the present invention relates to a process for the production of leucine, which comprises
[38359] (a) increasing or generating the activity of a H/ACA ribonucleoprotein complex subunit 3 non-targeted in a non-human organism or a part thereof, preferably a microorganism, a plant cell, a plant or a part thereof, as compared to a corresponding non-transformed wild type non-human organism or a part thereof; and
[38360] (b) growing the non-human organism or a part thereof under conditions which permit the production of leucine or a composition comprising leucine in said non-human organism or in the culture medium surrounding said non-human organism.

[38361] A further embodiment of the present invention relates to a process for the production of isoleucine, which comprises
[38362] (a) increasing or generating the activity of a glycerol-3-phosphate dehydrogenase non-targeted in a non-human organism or a part thereof, preferably a microorganism, a plant cell, a plant or a part thereof, as compared to a corresponding non-transformed wild type non-human organism or a part thereof; and
[38363] (b) growing the non-human organism or a part thereof under conditions which permit the production of isoleucine or a composition comprising isoleucine in said non-human organism or in the culture medium surrounding said non-human organism.

[38364] A further embodiment of the present invention relates to a process for the production of leucine, which comprises
[38365] (a) increasing or generating the activity of a glycerol-3-phosphate dehydrogenase non-targeted in a non-human organism or a part thereof, preferably a microorganism, a plant cell, a plant or a part thereof, as compared to a corresponding non-transformed wild type non-human organism or a part thereof; and
[38366] (b) growing the non-human organism or a part thereof under conditions which permit the production of leucine or a composition comprising leucine in said non-human organism or in the culture medium surrounding said non-human organism.

[38367] A further embodiment of the present invention relates to a process for the production of isoleucine, which comprises
[38368] (a) increasing or generating the activity of a homoserine dehydrogenase non-targeted in a non-human organism or a part thereof, preferably a microorganism, a plant cell, a plant or a part thereof, as compared to a corresponding non-transformed wild type non-human organism or a part thereof; and
[38369] (b) growing the non-human organism or a part thereof under conditions which permit the production of isoleucine or a composition comprising isoleucine in said non-human organism or in the culture medium surrounding said non-human organism.

[38370] A further embodiment of the present invention relates to a process for the production of isoleucine, which comprises
[38371] (a) increasing or generating the activity of a branched chain aminotransferase non-targeted in a non-human organism or a part thereof, preferably a microorganism, a plant cell, a plant or a part thereof, as compared to a corresponding non-transformed wild type non-human organism or a part thereof; and
[38372] (b) growing the non-human organism or a part thereof under conditions which permit the production of isoleucine or a composition comprising isoleucine in said non-human organism or in the culture medium surrounding said non-human organism.

[38373] A further embodiment of the present invention relates to a process for the production of valine, which comprises
[38374] (a) increasing or generating the activity of a branched chain aminotransferase non-targeted in a non-human organism or a part thereof, preferably a microorganism, a plant cell, a plant or a part thereof, as compared to a corresponding non-transformed wild type non-human organism or a part thereof; and
[38375] (b) growing the non-human organism or a part thereof under conditions which permit the production of valine or a composition comprising valine in said non-human organism or in the culture medium surrounding said non-human organism.

[38376] A further embodiment of the present invention relates to a process for the production of isoleucine, which comprises
[38377] (a) increasing or generating the activity of a polygalacturonase non-targeted in a non-human organism or a part thereof, preferably a microorganism, a plant cell, a plant or a part thereof, as compared to a corresponding non-transformed wild type non-human organism or a part thereof; and
[38378] (b) growing the non-human organism or a part thereof under conditions which permit the production of isoleucine or a composition comprising isoleucine in said non-human organism or in the culture medium surrounding said non-human organism.

[38379] A further embodiment of the present invention relates to a process for the production of leucine, which comprises
[38380] (a) increasing or generating the activity of a polygalacturonase non-targeted in a non-human organism or a part thereof, preferably a microorganism, a plant cell, a plant or a part thereof, as compared to a corresponding non-transformed wild type non-human organism or a part thereof; and
[38381] (b) growing the non-human organism or a part thereof under conditions which permit the production of leucine or a composition comprising leucine in said non-human organism or in the culture medium surrounding said non-human organism.

[38382] A further embodiment of the present invention relates to a process for the production of valine, which comprises
[38383] (a) increasing or generating the activity of a polygalacturonase non-targeted in a non-human organism or a part thereof, preferably a microorganism, a plant cell, a plant or a part thereof, as compared to a corresponding non-transformed wild type non-human organism or a part thereof; and
[38384] (b) growing the non-human organism or a part thereof under conditions which permit the production of valine or a composition comprising valine in said non-human organism or in the culture medium surrounding said non-human organism.

[38385] A further embodiment of the present invention relates to a process for the production of isoleucine, which comprises
[38386] (a) increasing or generating the activity of a YKL038W-protein non-targeted in a non-human organism or a part thereof, preferably a microorganism, a plant cell, a plant or a part thereof, as compared to a corresponding non-transformed wild type non-human organism or a part thereof; and
[38387] (b) growing the non-human organism or a part thereof under conditions which permit the production of isoleucine or a composition comprising isoleucine in said non-human organism or in the culture medium surrounding said non-human organism.

[38388] A further embodiment of the present invention relates to a process for the production of leucine, which comprises
[38389] (a) increasing or generating the activity of a YKL038W-protein non-targeted in a non-human organism or a part thereof, preferably a microorganism, a plant cell, a plant or a part thereof, as compared to a corresponding non-transformed wild type non-human organism or a part thereof; and
[38390] (b) growing the non-human organism or a part thereof under conditions which permit the production of leucine or a composition comprising leucine in said non-human organism or in the culture medium surrounding said non-human organism.

[38391] A further embodiment of the present invention relates to a process for the production of isoleucine, which comprises
[38392] (a) increasing or generating the activity of a YLR224W-protein non-targeted in a non-human organism or a part thereof, preferably a microorganism, a plant cell, a plant or a part thereof, as compared to a corresponding non-transformed wild type non-human organism or a part thereof; and
[38393] (b) growing the non-human organism or a part thereof under conditions which permit the production of isoleucine or a composition comprising isoleucine in said non-human organism or in the culture medium surrounding said non-human organism.

[38394] A further embodiment of the present invention relates to a process for the production of isoleucine, which comprises
[38395] (a) increasing or generating the activity of a mitochondrial dicarboxylate transporter non-targeted in a non-human organism or a part thereof, preferably a microorganism, a plant cell, a plant or a part thereof, as compared to a corresponding non-transformed wild type non-human organism or a part thereof; and
[38396] (b) growing the non-human organism or a part thereof under conditions which permit the production of isoleucine or a composition comprising isoleucine in said non-human organism or in the culture medium surrounding said non-human organism.

[38397] A further embodiment of the present invention relates to a process for the production of isoleucine, which comprises
[38398] (a) increasing or generating the activity of a adenylosuccinate lyase non-targeted in a non-human organism or a part thereof, preferably a microorganism, a plant cell, a plant or a part thereof, as compared to a corresponding non-transformed wild type non-human organism or a part thereof; and
[38399] (b) growing the non-human organism or a part thereof under conditions which permit the production of isoleucine or a composition comprising isoleucine in said non-human organism or in the culture medium surrounding said non-human organism.

[38400] A further embodiment of the present invention relates to a process for the production of leucine, which comprises
[38401] (a) increasing or generating the activity of a adenylosuccinate lyase non-targeted in a non-human organism or a part thereof, preferably a microorganism, a plant cell, a plant or a part thereof, as compared to a corresponding non-transformed wild type non-human organism or a part thereof; and
[38402] (b) growing the non-human organism or a part thereof under conditions which permit the production of leucine or a composition comprising leucine in said non-human organism or in the culture medium surrounding said non-human organism.

[38403] A further embodiment of the present invention relates to a process for the production of valine, which comprises
[38404] (a) increasing or generating the activity of a adenylosuccinate lyase non-targeted in a non-human organism or a part thereof, preferably a microorganism, a plant cell, a plant or a part thereof, as compared to a corresponding non-transformed wild type non-human organism or a part thereof; and
[38405] (b) growing the non-human organism or a part thereof under conditions which permit the production of valine or a composition comprising valine in said non-human organism or in the culture medium surrounding said non-human organism.

[38406] A further embodiment of the present invention relates to a process for the production of leucine, which comprises
[38407] (a) increasing or generating the activity of a phosphate transporter non-targeted in a non-human organism or a part thereof, preferably a microorganism, a plant cell, a plant or a part thereof, as compared to a corresponding non-transformed wild type non-human organism or a part thereof; and
[38408] (b) growing the non-human organism or a part thereof under conditions which permit the production of leucine or a composition comprising leucine in said non-human organism or in the culture medium surrounding said non-human organism.

[38409] A further embodiment of the present invention relates to a process for the production of isoleucine, which comprises
[38410] (a) increasing or generating the activity of a acetyl-CoA acetyltransferase non-targeted in a non-human organism or a part thereof, preferably a microorganism, a plant cell, a plant or a part thereof, as compared to a corresponding non-transformed wild type non-human organism or a part thereof; and
[38411] (b) growing the non-human organism or a part thereof under conditions which permit the production of isoleucine or a composition comprising isoleucine in said non-human organism or in the culture medium surrounding said non-human organism.

[38412] A further embodiment of the present invention relates to a process for the production of leucine, which comprises
[38413] (a) increasing or generating the activity of a acetyl-CoA acetyltransferase non-targeted in a non-human organism or a part thereof, preferably a microorganism, a plant cell, a plant or a part thereof, as compared to a corresponding non-transformed wild type non-human organism or a part thereof; and
[38414] (b) growing the non-human organism or a part thereof under conditions which permit the production of leucine or a composition comprising leucine in said non-human organism or in the culture medium surrounding said non-human organism.

[38415] A further embodiment of the present invention relates to a process for the production of isoleucine, which comprises
[38416] (a) increasing or generating the activity of a cyclin non-targeted in a non-human organism or a part thereof, preferably a microorganism, a plant cell, a plant or a part thereof, as compared to a corresponding non-transformed wild type non-human organism or a part thereof; and
[38417] (b) growing the non-human organism or a part thereof under conditions which permit the production of isoleucine or a composition comprising isoleucine in said non-human organism or in the culture medium surrounding said non-human organism.

[38418] A further embodiment of the present invention relates to a process for the production of isoleucine, which comprises
[38419] (a) increasing or generating the activity of a Zm_{—}4842_BE510522-protein non-targeted in a non-human organism or a part thereof, preferably a microorganism, a plant cell, a plant or a part thereof, as compared to a corresponding non-transformed wild type non-human organism or a part thereof; and
[38420] (b) growing the non-human organism or a part thereof under conditions which permit the production of isoleucine or a composition comprising isoleucine in said non-human organism or in the culture medium surrounding said non-human organism.

[38421] A further embodiment of the present invention relates to a process for the production of leucine, which comprises
[38422] (a) increasing or generating the activity of a Zm_{—}4842_BE510522-protein non-targeted in a non-human organism or a part thereof, preferably a microorganism, a plant cell, a plant or a part thereof, as compared to a corresponding non-transformed wild type non-human organism or a part thereof; and
[38423] (b) growing the non-human organism or a part thereof under conditions which permit the production of leucine or a composition comprising leucine in said non-human organism or in the culture medium surrounding said non-human organism.

[38424] A further embodiment of the present invention relates to a process for the production of valine, which comprises
[38425] (a) increasing or generating the activity of a Zm_{—}4842_BE510522-protein non-targeted in a non-human organism or a part thereof, preferably a microorganism, a plant cell, a plant or a part thereof, as compared to a corresponding non-transformed wild type non-human organism or a part thereof; and
[38426] (b) growing the non-human organism or a part thereof under conditions which permit the production of valine or a composition comprising valine in said non-human organism or in the culture medium surrounding said non-human organism.

[38427] A further embodiment of the present invention relates to a process for the production of isoleucine, which comprises
[38428] (a) increasing or generating the activity of a polypeptide comprising a polypeptide as depicted in the respective line in column 5 or 8 of Table II, application no. 6, or a homolog or a fragment thereof, a consensus sequence or at least one polypeptide motif as depicted in the respective line in column 8 of Table IV, application no. 6, whereby the respective line discloses in column 7 the fine chemical isoleucine; or
[38429] increasing or generating the activity of an expression product of one or more nucleic acid molecule(s) comprising a polynucleotide as depicted in the respective line in column 5 or 8 of Table I, application no. 6, preferably the coding region thereof, or a homolog or a fragment thereof, whereby the respective line discloses in column 7 the fine chemical isoleucine;
[38430] non-targeted in a non-human organism or a part thereof; preferably a microorganism, a plant cell, a plant or a part thereof, as compared to a corresponding non-transformed wild type non-human organism or a part thereof; and
[38431] (b) growing the non-human organism under conditions which permit the production of isoleucine, or a composition comprising isoleucine in said non-human organism or in the culture medium surrounding said non-human organism.

[38432] A further embodiment of the present invention relates to a process for the production of leucine, which comprises
[38433] (a) increasing or generating the activity of a polypeptide comprising a polypeptide as depicted in the respective line in column 5 or 8 of Table II, application no. 6, or a homolog or a fragment thereof, a consensus sequence or at least one polypeptide motif as depicted in the respective line in column 8 of Table IV, application no. 6, whereby the respective line discloses in column 7 the fine chemical leucine; or
[38434] increasing or generating the activity of an expression product of one or more nucleic acid molecule(s) comprising a polynucleotide as depicted in the respective line in column 5 or 8 of Table I, application no. 6, preferably the coding region thereof, or a homolog or a fragment thereof, whereby the respective line discloses in column 7 the fine chemical leucine;
[38435] non-targeted in a non-human organism or a part thereof; preferably a microorganism, a plant cell, a plant or a part thereof, as compared to a corresponding non-transformed wild type non-human organism or a part thereof; and
[38436] (b) growing the non-human organism under conditions which permit the production of leucine, or a composition comprising leucine in said non-human organism or in the culture medium surrounding said non-human organism.

[38437] A further embodiment of the present invention relates to a process for the production of valine, which comprises
[38438] (a) increasing or generating the activity of a polypeptide comprising a polypeptide as depicted in the respective line in column 5 or 8 of Table II, application no. 6, or a homolog or a fragment thereof, a consensus sequence or at least one polypeptide motif as depicted in the respective line in column 8 of Table IV, application no. 6, whereby the respective line discloses in column 7 the fine chemical valine; or
[38439] increasing or generating the activity of an expression product of one or more nucleic acid molecule(s) comprising a polynucleotide as depicted in the respective line in column 5 or 8 of Table I, application no. 6, preferably the coding region thereof, or a homolog or a fragment thereof, whereby the respective line discloses in column 7 the fine chemical valine;
[38440] non-targeted in a non-human organism or a part thereof; preferably a microorganism, a plant cell, a plant or a part thereof, as compared to a corresponding non-transformed wild type non-human organism or a part thereof; and
[38441] (b) growing the non-human organism under conditions which permit the production of valine, or a composition comprising valine in said non-human organism or in the culture medium surrounding said non-human organism.

[38442] A further embodiment of the present invention relates to a process for the production of isoleucine, which comprises
[38443] (a) increasing or generating one or more activities selected from the group consisting of 47266012-protein in an organelle, preferably in plastids or mitochondria, especially in plastids, of a non-human organism or a part thereof, preferably a microorganism, a plant cell, a plant or a part thereof, as compared to a corresponding non-transformed wild type non-human organism or a part thereof; and
[38444] (b) growing the non-human organism or a part thereof under conditions which permit the production of isoleucine or a composition comprising isoleucine in said non-human organism or in the culture medium surrounding said non-human organism.

[38445] A further embodiment of the present invention relates to a process for the production of leucine, which comprises
[38446] (a) increasing or generating one or more activities selected from the group consisting of pyruvate kinase in an organelle, preferably in plastids or mitochondria, especially in plastids, of a non-human organism or a part thereof, preferably a microorganism, a plant cell, a plant or a part thereof, as compared to a corresponding non-transformed wild type non-human organism or a part thereof; and
[38447] (b) growing the non-human organism or a part thereof under conditions which permit the production of leucine or a composition comprising leucine in said non-human organism or in the culture medium surrounding said non-human organism.

[38448] A further embodiment of the present invention relates to a process for the production of valine, which comprises
[38449] (a) increasing or generating one or more activities selected from the group consisting of pyruvate kinase in an organelle, preferably in plastids or mitochondria, especially in plastids, of a non-human organism or a part thereof, preferably a microorganism, a plant cell, a plant or a part thereof, as compared to a corresponding non-transformed wild type non-human organism or a part thereof; and
[38450] (b) growing the non-human organism or a part thereof under conditions which permit the production of valine or a composition comprising valine in said non-human organism or in the culture medium surrounding said non-human organism.

[38451] A further embodiment of the present invention relates to a process for the production of valine, which comprises
[38452] (a) increasing or generating one or more activities selected from the group consisting of pyruvate kinase in an organelle, preferably in plastids or mitochondria, especially in plastids, of a non-human organism or a part thereof, preferably a microorganism, a plant cell, a plant or a part thereof, as compared to a corresponding non-transformed wild type non-human organism or a part thereof; and
[38453] (b) growing the non-human organism or a part thereof under conditions which permit the production of valine or a composition comprising valine in said non-human organism or in the culture medium surrounding said non-human organism.

[38454] A further embodiment of the present invention relates to a process for the production of isoleucine, which comprises
[38455] (a) increasing or generating one or more activities selected from the group consisting of glucose-6-phosphate 1-dehydrogenase in an organelle, preferably in plastids or mitochondria, especially in plastids, of a non-human organism or a part thereof, preferably a microorganism, a plant cell, a plant or a part thereof, as compared to a corresponding non-transformed wild type non-human organism or a part thereof; and
[38456] (b) growing the non-human organism or a part thereof under conditions which permit the production of isoleucine or a composition comprising isoleucine in said non-human organism or in the culture medium surrounding said non-human organism.

[38457] A further embodiment of the present invention relates to a process for the production of leucine, which comprises
[38458] (a) increasing or generating one or more activities selected from the group consisting of glucose-6-phosphate 1-dehydrogenase in an organelle, preferably in plastids or mitochondria, especially in plastids, of a non-human organism or a part thereof, preferably a microorganism, a plant cell, a plant or a part thereof, as compared to a corresponding non-transformed wild type non-human organism or a part thereof; and
[38459] (b) growing the non-human organism or a part thereof under conditions which permit the production of leucine or a composition comprising leucine in said non-human organism or in the culture medium surrounding said non-human organism.

[38460] A further embodiment of the present invention relates to a process for the production of valine, which comprises
[38461] (a) increasing or generating one or more activities selected from the group consisting of glucose-6-phosphate 1-dehydrogenase in an organelle, preferably in plastids or mitochondria, especially in plastids, of a non-human organism or a part thereof, preferably a microorganism, a plant cell, a plant or a part thereof, as compared to a corresponding non-transformed wild type non-human organism or a part thereof; and
[38462] (b) growing the non-human organism or a part thereof under conditions which permit the production of valine or a composition comprising valine in said non-human organism or in the culture medium surrounding said non-human organism.

[38463] A further embodiment of the present invention relates to a process for the production of valine, which comprises
[38464] (a) increasing or generating one or more activities selected from the group consisting of protein phosphatase in an organelle, preferably in plastids or mitochondria, especially in plastids, of a non-human organism or a part thereof, preferably a microorganism, a plant cell, a plant or a part thereof, as compared to a corresponding non-transformed wild type non-human organism or a part thereof; and
[38465] (b) growing the non-human organism or a part thereof under conditions which permit the production of valine or a composition comprising valine in said non-human organism or in the culture medium surrounding said non-human organism.

[38466] A further embodiment of the present invention relates to a process for the production of valine, which comprises
[38467] (a) increasing or generating one or more activities selected from the group consisting of DNA-binding protein in an organelle, preferably in plastids or mitochondria, especially in plastids, of a non-human organism or a part thereof, preferably a microorganism, a plant cell, a plant or a part thereof, as compared to a corresponding non-transformed wild type non-human organism or a part thereof; and
[38468] (b) growing the non-human organism or a part thereof under conditions which permit the production of valine or a composition comprising valine in said non-human organism or in the culture medium surrounding said non-human organism.

[38469] A further embodiment of the present invention relates to a process for the production of isoleucine, which comprises
[38470] (a) increasing or generating one or more activities selected from the group consisting of At1g19800-protein in an organelle, preferably in plastids or mitochondria, especially in plastids, of a non-human organism or a part thereof, preferably a microorganism, a plant cell, a plant or a part thereof, as compared to a corresponding non-transformed wild type non-human organism or a part thereof; and
[38471] (b) growing the non-human organism or a part thereof under conditions which permit the production of isoleucine or a composition comprising isoleucine in said non-human organism or in the culture medium surrounding said non-human organism.

[38472] A further embodiment of the present invention relates to a process for the production of leucine, which comprises
[38473] (a) increasing or generating one or more activities selected from the group consisting of At1g19800-protein in an organelle, preferably in plastids or mitochondria, especially in plastids, of a non-human organism or a part thereof, preferably a microorganism, a plant cell, a plant or a part thereof, as compared to a corresponding non-transformed wild type non-human organism or a part thereof; and
[38474] (b) growing the non-human organism or a part thereof under conditions which permit the production of leucine or a composition comprising leucine in said non-human organism or in the culture medium surrounding said non-human organism.

[38475] A further embodiment of the present invention relates to a process for the production of valine, which comprises
[38476] (a) increasing or generating one or more activities selected from the group consisting of At1g23110-protein in an organelle, preferably in plastids or mitochondria, especially in plastids, of a non-human organism or a part thereof, preferably a microorganism, a plant cell, a plant or a part thereof, as compared to a corresponding non-transformed wild type non-human organism or a part thereof; and
[38477] (b) growing the non-human organism or a part thereof under conditions which permit the production of valine or a composition comprising valine in said non-human organism or in the culture medium surrounding said non-human organism.

[38478] A further embodiment of the present invention relates to a process for the production of isoleucine, which comprises
[38479] (a) increasing or generating one or more activities selected from the group consisting of cullin in an organelle, preferably in plastids or mitochondria, especially in plastids, of a non-human organism or a part thereof, preferably a microorganism, a plant cell, a plant or a part thereof, as compared to a corresponding non-transformed wild type non-human organism or a part thereof; and
[38480] (b) growing the non-human organism or a part thereof under conditions which permit the production of isoleucine or a composition comprising isoleucine in said non-human organism or in the culture medium surrounding said non-human organism.

[38481] A further embodiment of the present invention relates to a process for the production of leucine, which comprises
[38482] (a) increasing or generating one or more activities selected from the group consisting of cullin in an organelle, preferably in plastids or mitochondria, especially in plastids, of a non-human organism or a part thereof, preferably a microorganism, a plant cell, a plant or a part thereof, as compared to a corresponding non-transformed wild type non-human organism or a part thereof; and
[38483] (b) growing the non-human organism or a part thereof under conditions which permit the production of leucine or a composition comprising leucine in said non-human organism or in the culture medium surrounding said non-human organism.

[38484] A further embodiment of the present invention relates to a process for the production of isoleucine, which comprises
[38485] (a) increasing or generating one or more activities selected from the group consisting of eukaryotic translation initiation factor 5 in an organelle, preferably in plastids or mitochondria, especially in plastids, of a non-human organism or a part thereof, preferably a microorganism, a plant cell, a plant or a part thereof, as compared to a corresponding non-transformed wild type non-human organism or a part thereof; and
[38486] (b) growing the non-human organism or a part thereof under conditions which permit the production of isoleucine or a composition comprising isoleucine in said non-human organism or in the culture medium surrounding said non-human organism.

[38487] A further embodiment of the present invention relates to a process for the production of leucine, which comprises
[38488] (a) increasing or generating one or more activities selected from the group consisting of eukaryotic translation initiation factor 5 in an organelle, preferably in plastids or mitochondria, especially in plastids, of a non-human organism or a part thereof, preferably a microorganism, a plant cell, a plant or a part thereof, as compared to a corresponding non-transformed wild type non-human organism or a part thereof; and
[38489] (b) growing the non-human organism or a part thereof under conditions which permit the production of leucine or a composition comprising leucine in said non-human organism or in the culture medium surrounding said non-human organism.

[38490] A further embodiment of the present invention relates to a process for the production of isoleucine, which comprises
[38491] (a) increasing or generating one or more activities selected from the group consisting of transcriptional regulator in an organelle, preferably in plastids or mitochondria, especially in plastids, of a non-human organism or a part thereof, preferably a microorganism, a plant cell, a plant or a part thereof, as compared to a corresponding non-transformed wild type non-human organism or a part thereof; and
[38492] (b) growing the non-human organism or a part thereof under conditions which permit the production of isoleucine or a composition comprising isoleucine in said non-human organism or in the culture medium surrounding said non-human organism.

[38493] A further embodiment of the present invention relates to a process for the production of leucine, which comprises
[38494] (a) increasing or generating one or more activities selected from the group consisting of transcriptional regulator in an organelle, preferably in plastids or mitochondria, especially in plastids, of a non-human organism or a part thereof, preferably a microorganism, a plant cell, a plant or a part thereof, as compared to a corresponding non-transformed wild type non-human organism or a part thereof; and
[38495] (b) growing the non-human organism or a part thereof under conditions which permit the production of leucine or a composition comprising leucine in said non-human organism or in the culture medium surrounding said non-human organism.

[38496] A further embodiment of the present invention relates to a process for the production of valine, which comprises
[38497] (a) increasing or generating one or more activities selected from the group consisting of transcriptional regulator in an organelle, preferably in plastids or mitochondria, especially in plastids, of a non-human organism or a part thereof, preferably a microorganism, a plant cell, a plant or a part thereof, as compared to a corresponding non-transformed wild type non-human organism or a part thereof; and
[38498] (b) growing the non-human organism or a part thereof under conditions which permit the production of valine or a composition comprising valine in said non-human organism or in the culture medium surrounding said non-human organism.

[38499] A further embodiment of the present invention relates to a process for the production of leucine, which comprises
[38500] (a) increasing or generating one or more activities selected from the group consisting of At1g47380-protein in an organelle, preferably in plastids or mitochondria, especially in plastids, of a non-human organism or a part thereof, preferably a microorganism, a plant cell, a plant or a part thereof, as compared to a corresponding non-transformed wild type non-human organism or a part thereof; and
[38501] (b) growing the non-human organism or a part thereof under conditions which permit the production of leucine or a composition comprising leucine in said non-human organism or in the culture medium surrounding said non-human organism.

[38502] A further embodiment of the present invention relates to a process for the production of valine, which comprises
[38503] (a) increasing or generating one or more activities selected from the group consisting of At1g47380-protein in an organelle, preferably in plastids or mitochondria, especially in plastids, of a non-human organism or a part thereof, preferably a microorganism, a plant cell, a plant or a part thereof, as compared to a corresponding non-transformed wild type non-human organism or a part thereof; and
[38504] (b) growing the non-human organism or a part thereof under conditions which permit the production of valine or a composition comprising valine in said non-human organism or in the culture medium surrounding said non-human organism.

[38505] A further embodiment of the present invention relates to a process for the production of isoleucine, which comprises
[38506] (a) increasing or generating one or more activities selected from the group consisting of protein kinase in an organelle, preferably in plastids or mitochondria, especially in plastids, of a non-human organism or a part thereof, preferably a microorganism, a plant cell, a plant or a part thereof, as compared to a corresponding non-transformed wild type non-human organism or a part thereof; and
[38507] (b) growing the non-human organism or a part thereof under conditions which permit the production of isoleucine or a composition comprising isoleucine in said non-human organism or in the culture medium surrounding said non-human organism.

[38508] A further embodiment of the present invention relates to a process for the production of leucine, which comprises
[38509] (a) increasing or generating one or more activities selected from the group consisting of protein kinase in an organelle, preferably in plastids or mitochondria, especially in plastids, of a non-human organism or a part thereof, preferably a microorganism, a plant cell, a plant or a part thereof, as compared to a corresponding non-transformed wild type non-human organism or a part thereof; and
[38510] (b) growing the non-human organism or a part thereof under conditions which permit the production of leucine or a composition comprising leucine in said non-human organism or in the culture medium surrounding said non-human organism.

[38511] A further embodiment of the present invention relates to a process for the production of valine, which comprises
[38512] (a) increasing or generating one or more activities selected from the group consisting of protein kinase in an organelle, preferably in plastids or mitochondria, especially in plastids, of a non-human organism or a part thereof, preferably a microorganism, a plant cell, a plant or a part thereof, as compared to a corresponding non-transformed wild type non-human organism or a part thereof; and
[38513] (b) growing the non-human organism or a part thereof under conditions which permit the production of valine or a composition comprising valine in said non-human organism or in the culture medium surrounding said non-human organism.

[38514] A further embodiment of the present invention relates to a process for the production of isoleucine, which comprises
[38515] (a) increasing or generating one or more activities selected from the group consisting of calcium-dependent protein kinase in an organelle, preferably in plastids or mitochondria, especially in plastids, of a non-human organism or a part thereof, preferably a microorganism, a plant cell, a plant or a part thereof, as compared to a corresponding non-transformed wild type non-human organism or a part thereof; and
[38516] (b) growing the non-human organism or a part thereof under conditions which permit the production of isoleucine or a composition comprising isoleucine in said non-human organism or in the culture medium surrounding said non-human organism.

[38517] A further embodiment of the present invention relates to a process for the production of leucine, which comprises
[38518] (a) increasing or generating one or more activities selected from the group consisting of calcium-dependent protein kinase in an organelle, preferably in plastids or mitochondria, especially in plastids, of a non-human organism or a part thereof, preferably a microorganism, a plant cell, a plant or a part thereof, as compared to a corresponding non-transformed wild type non-human organism or a part thereof; and
[38519] (b) growing the non-human organism or a part thereof under conditions which permit the production of leucine or a composition comprising leucine in said non-human organism or in the culture medium surrounding said non-human organism.

[38520] A further embodiment of the present invention relates to a process for the production of valine, which comprises
[38521] (a) increasing or generating one or more activities selected from the group consisting of calcium-dependent protein kinase in an organelle, preferably in plastids or mitochondria, especially in plastids, of a non-human organism or a part thereof, preferably a microorganism, a plant cell, a plant or a part thereof, as compared to a corresponding non-transformed wild type non-human organism or a part thereof; and
[38522] (b) growing the non-human organism or a part thereof under conditions which permit the production of valine or a composition comprising valine in said non-human organism or in the culture medium surrounding said non-human organism.

[38523] A further embodiment of the present invention relates to a process for the production of isoleucine, which comprises
[38524] (a) increasing or generating one or more activities selected from the group consisting of protein phosphatase in an organelle, preferably in plastids or mitochondria, especially in plastids, of a non-human organism or a part thereof, preferably a microorganism, a plant cell, a plant or a part thereof, as compared to a corresponding non-transformed wild type non-human organism or a part thereof; and
[38525] (b) growing the non-human organism or a part thereof under conditions which permit the production of isoleucine or a composition comprising isoleucine in said non-human organism or in the culture medium surrounding said non-human organism.

[38526] A further embodiment of the present invention relates to a process for the production of leucine, which comprises
[38527] (a) increasing or generating one or more activities selected from the group consisting of protein phosphatase in an organelle, preferably in plastids or mitochondria, especially in plastids, of a non-human organism or a part thereof, preferably a microorganism, a plant cell, a plant or a part thereof, as compared to a corresponding non-transformed wild type non-human organism or a part thereof; and
[38528] (b) growing the non-human organism or a part thereof under conditions which permit the production of leucine or a composition comprising leucine in said non-human organism or in the culture medium surrounding said non-human organism.

[38529] A further embodiment of the present invention relates to a process for the production of valine, which comprises
[38530] (a) increasing or generating one or more activities selected from the group consisting of protein phosphatase in an organelle, preferably in plastids or mitochondria, especially in plastids, of a non-human organism or a part thereof, preferably a microorganism, a plant cell, a plant or a part thereof, as compared to a corresponding non-transformed wild type non-human organism or a part thereof; and
[38531] (b) growing the non-human organism or a part thereof under conditions which permit the production of valine or a composition comprising valine in said non-human organism or in the culture medium surrounding said non-human organism.

[38532] A further embodiment of the present invention relates to a process for the production of valine, which comprises
[38533] (a) increasing or generating one or more activities selected from the group consisting of transcription factor in an organelle, preferably in plastids or mitochondria, especially in plastids, of a non-human organism or a part thereof, preferably a microorganism, a plant cell, a plant or a part thereof, as compared to a corresponding non-transformed wild type non-human organism or a part thereof; and
[38534] (b) growing the non-human organism or a part thereof under conditions which permit the production of valine or a composition comprising valine in said non-human organism or in the culture medium surrounding said non-human organism.

[38535] A further embodiment of the present invention relates to a process for the production of isoleucine, which comprises
[38536] (a) increasing or generating one or more activities selected from the group consisting of protein phosphatase in an organelle, preferably in plastids or mitochondria, especially in plastids, of a non-human organism or a part thereof, preferably a microorganism, a plant cell, a plant or a part thereof, as compared to a corresponding non-transformed wild type non-human organism or a part thereof; and
[38537] (b) growing the non-human organism or a part thereof under conditions which permit the production of isoleucine or a composition comprising isoleucine in said non-human organism or in the culture medium surrounding said non-human organism.

[38538] A further embodiment of the present invention relates to a process for the production of valine, which comprises
[38539] (a) increasing or generating one or more activities selected from the group consisting of protein phosphatase in an organelle, preferably in plastids or mitochondria, especially in plastids, of a non-human organism or a part thereof, preferably a microorganism, a plant cell, a plant or a part thereof, as compared to a corresponding non-transformed wild type non-human organism or a part thereof; and
[38540] (b) growing the non-human organism or a part thereof under conditions which permit the production of valine or a composition comprising valine in said non-human organism or in the culture medium surrounding said non-human organism.

[38541] A further embodiment of the present invention relates to a process for the production of isoleucine, which comprises
[38542] (a) increasing or generating one or more activities selected from the group consisting of CBL-interacting protein kinase in an organelle, preferably in plastids or mitochondria, especially in plastids, of a non-human organism or a part thereof, preferably a microorganism, a plant cell, a plant or a part thereof, as compared to a corresponding non-transformed wild type non-human organism or a part thereof; and
[38543] (b) growing the non-human organism or a part thereof under conditions which permit the production of isoleucine or a composition comprising isoleucine in said non-human organism or in the culture medium surrounding said non-human organism.

[38544] A further embodiment of the present invention relates to a process for the production of leucine, which comprises
[38545] (a) increasing or generating one or more activities selected from the group consisting of CBL-interacting protein kinase in an organelle, preferably in plastids or mitochondria, especially in plastids, of a non-human organism or a part thereof, preferably a microorganism, a plant cell, a plant or a part thereof, as compared to a corresponding non-transformed wild type non-human organism or a part thereof; and
[38546] (b) growing the non-human organism or a part thereof under conditions which permit the production of leucine or a composition comprising leucine in said non-human organism or in the culture medium surrounding said non-human organism.

[38547] A further embodiment of the present invention relates to a process for the production of valine, which comprises
[38548] (a) increasing or generating one or more activities selected from the group consisting of CBL-interacting protein kinase in an organelle, preferably in plastids or mitochondria, especially in plastids, of a non-human organism or a part thereof, preferably a microorganism, a plant cell, a plant or a part thereof, as compared to a corresponding non-transformed wild type non-human organism or a part thereof; and
[38549] (b) growing the non-human organism or a part thereof under conditions which permit the production of valine or a composition comprising valine in said non-human organism or in the culture medium surrounding said non-human organism.

[38550] A further embodiment of the present invention relates to a process for the production of isoleucine, which comprises
[38551] (a) increasing or generating one or more activities selected from the group consisting of glutaredoxin in an organelle, preferably in plastids or mitochondria, especially in plastids, of a non-human organism or a part thereof, preferably a microorganism, a plant cell, a plant or a part thereof, as compared to a corresponding non-transformed wild type non-human organism or a part thereof; and
[38552] (b) growing the non-human organism or a part thereof under conditions which permit the production of isoleucine or a composition comprising isoleucine in said non-human organism or in the culture medium surrounding said non-human organism.

[38553] A further embodiment of the present invention relates to a process for the production of leucine, which comprises
[38554] (a) increasing or generating one or more activities selected from the group consisting of glutaredoxin in an organelle, preferably in plastids or mitochondria, especially in plastids, of a non-human organism or a part thereof, preferably a microorganism, a plant cell, a plant or a part thereof, as compared to a corresponding non-transformed wild type non-human organism or a part thereof; and
[38555] (b) growing the non-human organism or a part thereof under conditions which permit the production of leucine or a composition comprising leucine in said non-human organism or in the culture medium surrounding said non-human organism.

[38556] A further embodiment of the present invention relates to a process for the production of valine, which comprises
[38557] (a) increasing or generating one or more activities selected from the group consisting of glutaredoxin in an organelle, preferably in plastids or mitochondria, especially in plastids, of a non-human organism or a part thereof, preferably a microorganism, a plant cell, a plant or a part thereof, as compared to a corresponding non-transformed wild type non-human organism or a part thereof; and
[38558] (b) growing the non-human organism or a part thereof under conditions which permit the production of valine or a composition comprising valine in said non-human organism or in the culture medium surrounding said non-human organism.

[38559] A further embodiment of the present invention relates to a process for the production of valine, which comprises
[38560] (a) increasing or generating one or more activities selected from the group consisting of glutaredoxin in an organelle, preferably in plastids or mitochondria, especially in plastids, of a non-human organism or a part thereof, preferably a microorganism, a plant cell, a plant or a part thereof, as compared to a corresponding non-transformed wild type non-human organism or a part thereof; and
[38561] (b) growing the non-human organism or a part thereof under conditions which permit the production of valine or a composition comprising valine in said non-human organism or in the culture medium surrounding said non-human organism.

[38562] A further embodiment of the present invention relates to a process for the production of isoleucine, which comprises
[38563] (a) increasing or generating one or more activities selected from the group consisting of pyruvate kinase in an organelle, preferably in plastids or mitochondria, especially in plastids, of a non-human organism or a part thereof, preferably a microorganism, a plant cell, a plant or a part thereof, as compared to a corresponding non-transformed wild type non-human organism or a part thereof; and
[38564] (b) growing the non-human organism or a part thereof under conditions which permit the production of isoleucine or a composition comprising isoleucine in said non-human organism or in the culture medium surrounding said non-human organism.

[38565] A further embodiment of the present invention relates to a process for the production of leucine, which comprises
[38566] (a) increasing or generating one or more activities selected from the group consisting of pyruvate kinase in an organelle, preferably in plastids or mitochondria, especially in plastids, of a non-human organism or a part thereof, preferably a microorganism, a plant cell, a plant or a part thereof, as compared to a corresponding non-transformed wild type non-human organism or a part thereof; and
[38567] (b) growing the non-human organism or a part thereof under conditions which permit the production of leucine or a composition comprising leucine in said non-human organism or in the culture medium surrounding said non-human organism.

[38568] A further embodiment of the present invention relates to a process for the production of valine, which comprises
[38569] (a) increasing or generating one or more activities selected from the group consisting of pyruvate kinase in an organelle, preferably in plastids or mitochondria, especially in plastids, of a non-human organism or a part thereof, preferably a microorganism, a plant cell, a plant or a part thereof, as compared to a corresponding non-transformed wild type non-human organism or a part thereof; and
[38570] (b) growing the non-human organism or a part thereof under conditions which permit the production of valine or a composition comprising valine in said non-human organism or in the culture medium surrounding said non-human organism.

[38571] A further embodiment of the present invention relates to a process for the production of isoleucine, which comprises
[38572] (a) increasing or generating one or more activities selected from the group consisting of thioredoxin family protein in an organelle, preferably in plastids or mitochondria, especially in plastids, of a non-human organism or a part thereof, preferably a microorganism, a plant cell, a plant or a part thereof, as compared to a corresponding non-transformed wild type non-human organism or a part thereof; and
[38573] (b) growing the non-human organism or a part thereof under conditions which permit the production of isoleucine or a composition comprising isoleucine in said non-human organism or in the culture medium surrounding said non-human organism.

[38574] A further embodiment of the present invention relates to a process for the production of leucine, which comprises
[38575] (a) increasing or generating one or more activities selected from the group consisting of thioredoxin family protein in an organelle, preferably in plastids or mitochondria, especially in plastids, of a non-human organism or a part thereof, preferably a microorganism, a plant cell, a plant or a part thereof, as compared to a corresponding non-transformed wild type non-human organism or a part thereof; and
[38576] (b) growing the non-human organism or a part thereof under conditions which permit the production of leucine or a composition comprising leucine in said non-human organism or in the culture medium surrounding said non-human organism.

[38577] A further embodiment of the present invention relates to a process for the production of isoleucine, which comprises
[38578] (a) increasing or generating one or more activities selected from the group consisting of harpin-induced family protein in an organelle, preferably in plastids or mitochondria, especially in plastids, of a non-human organism or a part thereof, preferably a microorganism, a plant cell, a plant or a part thereof, as compared to a corresponding non-transformed wild type non-human organism or a part thereof; and
[38579] (b) growing the non-human organism or a part thereof under conditions which permit the production of isoleucine or a composition comprising isoleucine in said non-human organism or in the culture medium surrounding said non-human organism.

[38580] A further embodiment of the present invention relates to a process for the production of leucine, which comprises
[38581] (a) increasing or generating one or more activities selected from the group consisting of harpin-induced family protein in an organelle, preferably in plastids or mitochondria, especially in plastids, of a non-human organism or a part thereof, preferably a microorganism, a plant cell, a plant or a part thereof, as compared to a corresponding non-transformed wild type non-human organism or a part thereof; and
[38582] (b) growing the non-human organism or a part thereof under conditions which permit the production of leucine or a composition comprising leucine in said non-human organism or in the culture medium surrounding said non-human organism.

[38583] A further embodiment of the present invention relates to a process for the production of isoleucine, which comprises
[38584] (a) increasing or generating one or more activities selected from the group consisting of DNA mismatch repair protein in an organelle, preferably in plastids or mitochondria, especially in plastids, of a non-human organism or a part thereof, preferably a microorganism, a plant cell, a plant or a part thereof, as compared to a corresponding non-transformed wild type non-human organism or a part thereof; and
[38585] (b) growing the non-human organism or a part thereof under conditions which permit the production of isoleucine or a composition comprising isoleucine in said non-human organism or in the culture medium surrounding said non-human organism.

[38586] A further embodiment of the present invention relates to a process for the production of leucine, which comprises
[38587] (a) increasing or generating one or more activities selected from the group consisting of DNA mismatch repair protein in an organelle, preferably in plastids or mitochondria, especially in plastids, of a non-human organism or a part thereof, preferably a microorganism, a plant cell, a plant or a part thereof, as compared to a corresponding non-transformed wild type non-human organism or a part thereof; and
[38588] (b) growing the non-human organism or a part thereof under conditions which permit the production of leucine or a composition comprising leucine in said non-human organism or in the culture medium surrounding said non-human organism.

[38589] A further embodiment of the present invention relates to a process for the production of valine, which comprises
[38590] (a) increasing or generating one or more activities selected from the group consisting of DNA mismatch repair protein in an organelle, preferably in plastids or mitochondria, especially in plastids, of a non-human organism or a part thereof, preferably a microorganism, a plant cell, a plant or a part thereof, as compared to a corresponding non-transformed wild type non-human organism or a part thereof; and
[38591] (b) growing the non-human organism or a part thereof under conditions which permit the production of valine or a composition comprising valine in said non-human organism or in the culture medium surrounding said non-human organism.

[38592] A further embodiment of the present invention relates to a process for the production of isoleucine, which comprises
[38593] (a) increasing or generating one or more activities selected from the group consisting of protein kinase in an organelle, preferably in plastids or mitochondria, especially in plastids, of a non-human organism or a part thereof, preferably a microorganism, a plant cell, a plant or a part thereof, as compared to a corresponding non-transformed wild type non-human organism or a part thereof; and
[38594] (b) growing the non-human organism or a part thereof under conditions which permit the production of isoleucine or a composition comprising isoleucine in said non-human organism or in the culture medium surrounding said non-human organism.

[38595] A further embodiment of the present invention relates to a process for the production of leucine, which comprises
[38596] (a) increasing or generating one or more activities selected from the group consisting of protein kinase in an organelle, preferably in plastids or mitochondria, especially in plastids, of a non-human organism or a part thereof, preferably a microorganism, a plant cell, a plant or a part thereof, as compared to a corresponding non-transformed wild type non-human organism or a part thereof; and
[38597] (b) growing the non-human organism or a part thereof under conditions which permit the production of leucine or a composition comprising leucine in said non-human organism or in the culture medium surrounding said non-human organism.

[38598] A further embodiment of the present invention relates to a process for the production of valine, which comprises
[38599] (a) increasing or generating one or more activities selected from the group consisting of protein kinase in an organelle, preferably in plastids or mitochondria, especially in plastids, of a non-human organism or a part thereof, preferably a microorganism, a plant cell, a plant or a part thereof, as compared to a corresponding non-transformed wild type non-human organism or a part thereof; and
[38600] (b) growing the non-human organism or a part thereof under conditions which permit the production of valine or a composition comprising valine in said non-human organism or in the culture medium surrounding said non-human organism.

[38601] A further embodiment of the present invention relates to a process for the production of isoleucine, which comprises
[38602] (a) increasing or generating one or more activities selected from the group consisting of eukaryotic translation initiation factor in an organelle, preferably in plastids or mitochondria, especially in plastids, of a non-human organism or a part thereof, preferably a microorganism, a plant cell, a plant or a part thereof, as compared to a corresponding non-transformed wild type non-human organism or a part thereof; and
[38603] (b) growing the non-human organism or a part thereof under conditions which permit the production of isoleucine or a composition comprising isoleucine in said non-human organism or in the culture medium surrounding said non-human organism.

[38604] A further embodiment of the present invention relates to a process for the production of leucine, which comprises
[38605] (a) increasing or generating one or more activities selected from the group consisting of eukaryotic translation initiation factor in an organelle, preferably in plastids or mitochondria, especially in plastids, of a non-human organism or a part thereof, preferably a microorganism, a plant cell, a plant or a part thereof, as compared to a corresponding non-transformed wild type non-human organism or a part thereof; and
[38606] (b) growing the non-human organism or a part thereof under conditions which permit the production of leucine or a composition comprising leucine in said non-human organism or in the culture medium surrounding said non-human organism.

[38607] A further embodiment of the present invention relates to a process for the production of valine, which comprises
[38608] (a) increasing or generating one or more activities selected from the group consisting of eukaryotic translation initiation factor in an organelle, preferably in plastids or mitochondria, especially in plastids, of a non-human organism or a part thereof, preferably a microorganism, a plant cell, a plant or a part thereof, as compared to a corresponding non-transformed wild type non-human organism or a part thereof; and
[38609] (b) growing the non-human organism or a part thereof under conditions which permit the production of valine or a composition comprising valine in said non-human organism or in the culture medium surrounding said non-human organism.

[38610] A further embodiment of the present invention relates to a process for the production of isoleucine, which comprises
[38611] (a) increasing or generating one or more activities selected from the group consisting of glycosyl transferase in an organelle, preferably in plastids or mitochondria, especially in plastids, of a non-human organism or a part thereof, preferably a microorganism, a plant cell, a plant or a part thereof, as compared to a corresponding non-transformed wild type non-human organism or a part thereof; and
[38612] (b) growing the non-human organism or a part thereof under conditions which permit the production of isoleucine or a composition comprising isoleucine in said non-human organism or in the culture medium surrounding said non-human organism.

[38613] A further embodiment of the present invention relates to a process for the production of leucine, which comprises
[38614] (a) increasing or generating one or more activities selected from the group consisting of glycosyl transferase in an organelle, preferably in plastids or mitochondria, especially in plastids, of a non-human organism or a part thereof, preferably a microorganism, a plant cell, a plant or a part thereof, as compared to a corresponding non-transformed wild type non-human organism or a part thereof; and
[38615] (b) growing the non-human organism or a part thereof under conditions which permit the production of leucine or a composition comprising leucine in said non-human organism or in the culture medium surrounding said non-human organism.

[38616] A further embodiment of the present invention relates to a process for the production of valine, which comprises
[38617] (a) increasing or generating one or more activities selected from the group consisting of glycosyl transferase in an organelle, preferably in plastids or mitochondria, especially in plastids, of a non-human organism or a part thereof, preferably a microorganism, a plant cell, a plant or a part thereof, as compared to a corresponding non-transformed wild type non-human organism or a part thereof; and
[38618] (b) growing the non-human organism or a part thereof under conditions which permit the production of valine or a composition comprising valine in said non-human organism or in the culture medium surrounding said non-human organism.

[38619] A further embodiment of the present invention relates to a process for the production of isoleucine, which comprises
[38620] (a) increasing or generating one or more activities selected from the group consisting of auxin response factor in an organelle, preferably in plastids or mitochondria, especially in plastids, of a non-human organism or a part thereof, preferably a microorganism, a plant cell, a plant or a part thereof, as compared to a corresponding non-transformed wild type non-human organism or a part thereof; and
[38621] (b) growing the non-human organism or a part thereof under conditions which permit the production of isoleucine or a composition comprising isoleucine in said non-human organism or in the culture medium surrounding said non-human organism.

[38622] A further embodiment of the present invention relates to a process for the production of leucine, which comprises
[38623] (a) increasing or generating one or more activities selected from the group consisting of auxin response factor in an organelle, preferably in plastids or mitochondria, especially in plastids, of a non-human organism or a part thereof, preferably a microorganism, a plant cell, a plant or a part thereof, as compared to a corresponding non-transformed wild type non-human organism or a part thereof; and
[38624] (b) growing the non-human organism or a part thereof under conditions which permit the production of leucine or a composition comprising leucine in said non-human organism or in the culture medium surrounding said non-human organism.

[38625] A further embodiment of the present invention relates to a process for the production of valine, which comprises
[38626] (a) increasing or generating one or more activities selected from the group consisting of auxin response factor in an organelle, preferably in plastids or mitochondria, especially in plastids, of a non-human organism or a part thereof, preferably a microorganism, a plant cell, a plant or a part thereof, as compared to a corresponding non-transformed wild type non-human organism or a part thereof; and
[38627] (b) growing the non-human organism or a part thereof under conditions which permit the production of valine or a composition comprising valine in said non-human organism or in the culture medium surrounding said non-human organism.

[38628] A further embodiment of the present invention relates to a process for the production of isoleucine, which comprises
[38629] (a) increasing or generating one or more activities selected from the group consisting of glutaredoxin in an organelle, preferably in plastids or mitochondria, especially in plastids, of a non-human organism or a part thereof, preferably a microorganism, a plant cell, a plant or a part thereof, as compared to a corresponding non-transformed wild type non-human organism or a part thereof; and
[38630] (b) growing the non-human organism or a part thereof under conditions which permit the production of isoleucine or a composition comprising isoleucine in said non-human organism or in the culture medium surrounding said non-human organism.

[38631] A further embodiment of the present invention relates to a process for the production of leucine, which comprises
[38632] (a) increasing or generating one or more activities selected from the group consisting of glutaredoxin in an organelle, preferably in plastids or mitochondria, especially in plastids, of a non-human organism or a part thereof, preferably a microorganism, a plant cell, a plant or a part thereof, as compared to a corresponding non-transformed wild type non-human organism or a part thereof; and
[38633] (b) growing the non-human organism or a part thereof under conditions which permit the production of leucine or a composition comprising leucine in said non-human organism or in the culture medium surrounding said non-human organism.

[38634] A further embodiment of the present invention relates to a process for the production of valine, which comprises
[38635] (a) increasing or generating one or more activities selected from the group consisting of glutaredoxin in an organelle, preferably in plastids or mitochondria, especially in plastids, of a non-human organism or a part thereof, preferably a microorganism, a plant cell, a plant or a part thereof, as compared to a corresponding non-transformed wild type non-human organism or a part thereof; and
[38636] (b) growing the non-human organism or a part thereof under conditions which permit the production of valine or a composition comprising valine in said non-human organism or in the culture medium surrounding said non-human organism.

[38637] A further embodiment of the present invention relates to a process for the production of isoleucine, which comprises
[38638] (a) increasing or generating one or more activities selected from the group consisting of heat shock transcription factor in an organelle, preferably in plastids or mitochondria, especially in plastids, of a non-human organism or a part thereof, preferably a microorganism, a plant cell, a plant or a part thereof, as compared to a corresponding non-transformed wild type non-human organism or a part thereof; and
[38639] (b) growing the non-human organism or a part thereof under conditions which permit the production of isoleucine or a composition comprising isoleucine in said non-human organism or in the culture medium surrounding said non-human organism.

[38640] A further embodiment of the present invention relates to a process for the production of valine, which comprises
[38641] (a) increasing or generating one or more activities selected from the group consisting of protein phosphatase in an organelle, preferably in plastids or mitochondria, especially in plastids, of a non-human organism or a part thereof, preferably a microorganism, a plant cell, a plant or a part thereof, as compared to a corresponding non-transformed wild type non-human organism or a part thereof; and
[38642] (b) growing the non-human organism or a part thereof under conditions which permit the production of valine or a composition comprising valine in said non-human organism or in the culture medium surrounding said non-human organism.

[38643] A further embodiment of the present invention relates to a process for the production of isoleucine, which comprises
[38644] (a) increasing or generating one or more activities selected from the group consisting of At4g32480-protein in an organelle, preferably in plastids or mitochondria, especially in plastids, of a non-human organism or a part thereof, preferably a microorganism, a plant cell, a plant or a part thereof, as compared to a corresponding non-transformed wild type non-human organism or a part thereof; and
[38645] (b) growing the non-human organism or a part thereof under conditions which permit the production of isoleucine or a composition comprising isoleucine in said non-human organism or in the culture medium surrounding said non-human organism.

[38646] A further embodiment of the present invention relates to a process for the production of leucine, which comprises
[38647] (a) increasing or generating one or more activities selected from the group consisting of At4g32480-protein in an organelle, preferably in plastids or mitochondria, especially in plastids, of a non-human organism or a part thereof, preferably a microorganism, a plant cell, a plant or a part thereof, as compared to a corresponding non-transformed wild type non-human organism or a part thereof; and
[38648] (b) growing the non-human organism or a part thereof under conditions which permit the production of leucine or a composition comprising leucine in said non-human organism or in the culture medium surrounding said non-human organism.

[38649] A further embodiment of the present invention relates to a process for the production of valine, which comprises
[38650] (a) increasing or generating one or more activities selected from the group consisting of At4g32480-protein in an organelle, preferably in plastids or mitochondria, especially in plastids, of a non-human organism or a part thereof, preferably a microorganism, a plant cell, a plant or a part thereof, as compared to a corresponding non-transformed wild type non-human organism or a part thereof; and
[38651] (b) growing the non-human organism or a part thereof under conditions which permit the production of valine or a composition comprising valine in said non-human organism or in the culture medium surrounding said non-human organism.

[38652] A further embodiment of the present invention relates to a process for the production of isoleucine, which comprises
[38653] (a) increasing or generating one or more activities selected from the group consisting of cyclin D in an organelle, preferably in plastids or mitochondria, especially in plastids, of a non-human organism or a part thereof, preferably a microorganism, a plant cell, a plant or a part thereof, as compared to a corresponding non-transformed wild type non-human organism or a part thereof; and
[38654] (b) growing the non-human organism or a part thereof under conditions which permit the production of isoleucine or a composition comprising isoleucine in said non-human organism or in the culture medium surrounding said non-human organism.

[38655] A further embodiment of the present invention relates to a process for the production of leucine, which comprises
[38656] (a) increasing or generating one or more activities selected from the group consisting of cyclin D in an organelle, preferably in plastids or mitochondria, especially in plastids, of a non-human organism or a part thereof, preferably a microorganism, a plant cell, a plant or a part thereof, as compared to a corresponding non-transformed wild type non-human organism or a part thereof; and
[38657] (b) growing the non-human organism or a part thereof under conditions which permit the production of leucine or a composition comprising leucine in said non-human organism or in the culture medium surrounding said non-human organism.

[38658] A further embodiment of the present invention relates to a process for the production of valine, which comprises
[38659] (a) increasing or generating one or more activities selected from the group consisting of cyclin D in an organelle, preferably in plastids or mitochondria, especially in plastids, of a non-human organism or a part thereof, preferably a microorganism, a plant cell, a plant or a part thereof, as compared to a corresponding non-transformed wild type non-human organism or a part thereof; and
[38660] (b) growing the non-human organism or a part thereof under conditions which permit the production of valine or a composition comprising valine in said non-human organism or in the culture medium surrounding said non-human organism.

[38661] A further embodiment of the present invention relates to a process for the production of isoleucine, which comprises
[38662] (a) increasing or generating one or more activities selected from the group consisting of calcium-dependent protein kinase in an organelle, preferably in plastids or mitochondria, especially in plastids, of a non-human organism or a part thereof, preferably a microorganism, a plant cell, a plant or a part thereof, as compared to a corresponding non-transformed wild type non-human organism or a part thereof; and
[38663] (b) growing the non-human organism or a part thereof under conditions which permit the production of isoleucine or a composition comprising isoleucine in said non-human organism or in the culture medium surrounding said non-human organism.

[38664] A further embodiment of the present invention relates to a process for the production of leucine, which comprises
[38665] (a) increasing or generating one or more activities selected from the group consisting of calcium-dependent protein kinase in an organelle, preferably in plastids or mitochondria, especially in plastids, of a non-human organism or a part thereof, preferably a microorganism, a plant cell, a plant or a part thereof, as compared to a corresponding non-transformed wild type non-human organism or a part thereof; and
[38666] (b) growing the non-human organism or a part thereof under conditions which permit the production of leucine or a composition comprising leucine in said non-human organism or in the culture medium surrounding said non-human organism.

[38667] A further embodiment of the present invention relates to a process for the production of valine, which comprises
[38668] (a) increasing or generating one or more activities selected from the group consisting of calcium-dependent protein kinase in an organelle, preferably in plastids or mitochondria, especially in plastids, of a non-human organism or a part thereof, preferably a microorganism, a plant cell, a plant or a part thereof, as compared to a corresponding non-transformed wild type non-human organism or a part thereof; and
[38669] (b) growing the non-human organism or a part thereof under conditions which permit the production of valine or a composition comprising valine in said non-human organism or in the culture medium surrounding said non-human organism.

[38670] A further embodiment of the present invention relates to a process for the production of isoleucine, which comprises
[38671] (a) increasing or generating one or more activities selected from the group consisting of protein phosphatase in an organelle, preferably in plastids or mitochondria, especially in plastids, of a non-human organism or a part thereof, preferably a microorganism, a plant cell, a plant or a part thereof, as compared to a corresponding non-transformed wild type non-human organism or a part thereof; and
[38672] (b) growing the non-human organism or a part thereof under conditions which permit the production of isoleucine or a composition comprising isoleucine in said non-human organism or in the culture medium surrounding said non-human organism.

[38673] A further embodiment of the present invention relates to a process for the production of isoleucine, which comprises
[38674] (a) increasing or generating one or more activities selected from the group consisting of At5g16650-protein in an organelle, preferably in plastids or mitochondria, especially in plastids, of a non-human organism or a part thereof, preferably a microorganism, a plant cell, a plant or a part thereof, as compared to a corresponding non-transformed wild type non-human organism or a part thereof; and
[38675] (b) growing the non-human organism or a part thereof under conditions which permit the production of isoleucine or a composition comprising isoleucine in said non-human organism or in the culture medium surrounding said non-human organism.

[38676] A further embodiment of the present invention relates to a process for the production of valine, which comprises
[38677] (a) increasing or generating one or more activities selected from the group consisting of At5g16650-protein in an organelle, preferably in plastids or mitochondria, especially in plastids, of a non-human organism or a part thereof, preferably a microorganism, a plant cell, a plant or a part thereof, as compared to a corresponding non-transformed wild type non-human organism or a part thereof; and
[38678] (b) growing the non-human organism or a part thereof under conditions which permit the production of valine or a composition comprising valine in said non-human organism or in the culture medium surrounding said non-human organism.

[38679] A further embodiment of the present invention relates to a process for the production of valine, which comprises
[38680] (a) increasing or generating one or more activities selected from the group consisting of monothiol glutaredoxin in an organelle, preferably in plastids or mitochondria, especially in plastids, of a non-human organism or a part thereof, preferably a microorganism, a plant cell, a plant or a part thereof, as compared to a corresponding non-transformed wild type non-human organism or a part thereof; and
[38681] (b) growing the non-human organism or a part thereof under conditions which permit the production of valine or a composition comprising valine in said non-human organism or in the culture medium surrounding said non-human organism.

[38682] A further embodiment of the present invention relates to a process for the production of leucine, which comprises
[38683] (a) increasing or generating one or more activities selected from the group consisting of thioredoxin in an organelle, preferably in plastids or mitochondria, especially in plastids, of a non-human organism or a part thereof, preferably a microorganism, a plant cell, a plant or a part thereof, as compared to a corresponding non-transformed wild type non-human organism or a part thereof; and
[38684] (b) growing the non-human organism or a part thereof under conditions which permit the production of leucine or a composition comprising leucine in said non-human organism or in the culture medium surrounding said non-human organism.

[38685] A further embodiment of the present invention relates to a process for the production of valine, which comprises
[38686] (a) increasing or generating one or more activities selected from the group consisting of thioredoxin in an organelle, preferably in plastids or mitochondria, especially in plastids, of a non-human organism or a part thereof, preferably a microorganism, a plant cell, a plant or a part thereof, as compared to a corresponding non-transformed wild type non-human organism or a part thereof; and
[38687] (b) growing the non-human organism or a part thereof under conditions which permit the production of valine or a composition comprising valine in said non-human organism or in the culture medium surrounding said non-human organism.

[38688] A further embodiment of the present invention relates to a process for the production of valine, which comprises
[38689] (a) increasing or generating one or more activities selected from the group consisting of disease resistance protein in an organelle, preferably in plastids or mitochondria, especially in plastids, of a non-human organism or a part thereof, preferably a microorganism, a plant cell, a plant or a part thereof, as compared to a corresponding non-transformed wild type non-human organism or a part thereof; and
[38690] (b) growing the non-human organism or a part thereof under conditions which permit the production of valine or a composition comprising valine in said non-human organism or in the culture medium surrounding said non-human organism.

[38691] A further embodiment of the present invention relates to a process for the production of isoleucine, which comprises
[38692] (a) increasing or generating one or more activities selected from the group consisting of pyruvate kinase in an organelle, preferably in plastids or mitochondria, especially in plastids, of a non-human organism or a part thereof, preferably a microorganism, a plant cell, a plant or a part thereof, as compared to a corresponding non-transformed wild type non-human organism or a part thereof; and
[38693] (b) growing the non-human organism or a part thereof under conditions which permit the production of isoleucine or a composition comprising isoleucine in said non-human organism or in the culture medium surrounding said non-human organism.

[38694] A further embodiment of the present invention relates to a process for the production of leucine, which comprises
[38695] (a) increasing or generating one or more activities selected from the group consisting of pyruvate kinase in an organelle, preferably in plastids or mitochondria, especially in plastids, of a non-human organism or a part thereof, preferably a microorganism, a plant cell, a plant or a part thereof, as compared to a corresponding non-transformed wild type non-human organism or a part thereof; and
[38696] (b) growing the non-human organism or a part thereof under conditions which permit the production of leucine or a composition comprising leucine in said non-human organism or in the culture medium surrounding said non-human organism.

[38697] A further embodiment of the present invention relates to a process for the production of valine, which comprises
[38698] (a) increasing or generating one or more activities selected from the group consisting of RNA-binding protein in an organelle, preferably in plastids or mitochondria, especially in plastids, of a non-human organism or a part thereof, preferably a microorganism, a plant cell, a plant or a part thereof, as compared to a corresponding non-transformed wild type non-human organism or a part thereof; and
[38699] (b) growing the non-human organism or a part thereof under conditions which permit the production of valine or a composition comprising valine in said non-human organism or in the culture medium surrounding said non-human organism.

[38700] A further embodiment of the present invention relates to a process for the production of isoleucine, which comprises
[38701] (a) increasing or generating one or more activities selected from the group consisting of MADS-box transcription factor in an organelle, preferably in plastids or mitochondria, especially in plastids, of a non-human organism or a part thereof, preferably a microorganism, a plant cell, a plant or a part thereof, as compared to a corresponding non-transformed wild type non-human organism or a part thereof; and
[38702] (b) growing the non-human organism or a part thereof under conditions which permit the production of isoleucine or a composition comprising isoleucine in said non-human organism or in the culture medium surrounding said non-human organism.

[38703] A further embodiment of the present invention relates to a process for the production of leucine, which comprises
[38704] (a) increasing or generating one or more activities selected from the group consisting of MADS-box transcription factor in an organelle, preferably in plastids or mitochondria, especially in plastids, of a non-human organism or a part thereof, preferably a microorganism, a plant cell, a plant or a part thereof, as compared to a corresponding non-transformed wild type non-human organism or a part thereof; and
[38705] (b) growing the non-human organism or a part thereof under conditions which permit the production of leucine or a composition comprising leucine in said non-human organism or in the culture medium surrounding said non-human organism.

[38706] A further embodiment of the present invention relates to a process for the production of isoleucine, which comprises
[38707] (a) increasing or generating one or more activities selected from the group consisting of pyruvate kinase in an organelle, preferably in plastids or mitochondria, especially in plastids, of a non-human organism or a part thereof, preferably a microorganism, a plant cell, a plant or a part thereof, as compared to a corresponding non-transformed wild type non-human organism or a part thereof; and
[38708] (b) growing the non-human organism or a part thereof under conditions which permit the production of isoleucine or a composition comprising isoleucine in said non-human organism or in the culture medium surrounding said non-human organism.

[38709] A further embodiment of the present invention relates to a process for the production of leucine, which comprises
[38710] (a) increasing or generating one or more activities selected from the group consisting of pyruvate kinase in an organelle, preferably in plastids or mitochondria, especially in plastids, of a non-human organism or a part thereof, preferably a microorganism, a plant cell, a plant or a part thereof, as compared to a corresponding non-transformed wild type non-human organism or a part thereof; and
[38711] (b) growing the non-human organism or a part thereof under conditions which permit the production of leucine or a composition comprising leucine in said non-human organism or in the culture medium surrounding said non-human organism.

[38712] A further embodiment of the present invention relates to a process for the production of valine, which comprises
[38713] (a) increasing or generating one or more activities selected from the group consisting of pyruvate kinase in an organelle, preferably in plastids or mitochondria, especially in plastids, of a non-human organism or a part thereof, preferably a microorganism, a plant cell, a plant or a part thereof, as compared to a corresponding non-transformed wild type non-human organism or a part thereof; and
[38714] (b) growing the non-human organism or a part thereof under conditions which permit the production of valine or a composition comprising valine in said non-human organism or in the culture medium surrounding said non-human organism.

[38715] A further embodiment of the present invention relates to a process for the production of valine, which comprises
[38716] (a) increasing or generating one or more activities selected from the group consisting of zinc finger protein in an organelle, preferably in plastids or mitochondria, especially in plastids, of a non-human organism or a part thereof, preferably a microorganism, a plant cell, a plant or a part thereof, as compared to a corresponding non-transformed wild type non-human organism or a part thereof; and
[38717] (b) growing the non-human organism or a part thereof under conditions which permit the production of valine or a composition comprising valine in said non-human organism or in the culture medium surrounding said non-human organism.

[38718] A further embodiment of the present invention relates to a process for the production of isoleucine, which comprises
[38719] (a) increasing or generating one or more activities selected from the group consisting of malic enzyme in an organelle, preferably in plastids or mitochondria, especially in plastids, of a non-human organism or a part thereof, preferably a microorganism, a plant cell, a plant or a part thereof, as compared to a corresponding non-transformed wild type non-human organism or a part thereof; and
[38720] (b) growing the non-human organism or a part thereof under conditions which permit the production of isoleucine or a composition comprising isoleucine in said non-human organism or in the culture medium surrounding said non-human organism.

[38721] A further embodiment of the present invention relates to a process for the production of leucine, which comprises
[38722] (a) increasing or generating one or more activities selected from the group consisting of malic enzyme in an organelle, preferably in plastids or mitochondria, especially in plastids, of a non-human organism or a part thereof, preferably a microorganism, a plant cell, a plant or a part thereof, as compared to a corresponding non-transformed wild type non-human organism or a part thereof; and
[38723] (b) growing the non-human organism or a part thereof under conditions which permit the production of leucine or a composition comprising leucine in said non-human organism or in the culture medium surrounding said non-human organism.

[38724] A further embodiment of the present invention relates to a process for the production of valine, which comprises
[38725] (a) increasing or generating one or more activities selected from the group consisting of malic enzyme in an organelle, preferably in plastids or mitochondria, especially in plastids, of a non-human organism or a part thereof, preferably a microorganism, a plant cell, a plant or a part thereof, as compared to a corresponding non-transformed wild type non-human organism or a part thereof; and
[38726] (b) growing the non-human organism or a part thereof under conditions which permit the production of valine or a composition comprising valine in said non-human organism or in the culture medium surrounding said non-human organism.

[38727] A further embodiment of the present invention relates to a process for the production of valine, which comprises
[38728] (a) increasing or generating one or more activities selected from the group consisting of pyruvate kinase in an organelle, preferably in plastids or mitochondria, especially in plastids, of a non-human organism or a part thereof, preferably a microorganism, a plant cell, a plant or a part thereof, as compared to a corresponding non-transformed wild type non-human organism or a part thereof; and
[38729] (b) growing the non-human organism or a part thereof under conditions which permit the production of valine or a composition comprising valine in said non-human organism or in the culture medium surrounding said non-human organism.

[38730] A further embodiment of the present invention relates to a process for the production of valine, which comprises
[38731] (a) increasing or generating one or more activities selected from the group consisting of betahydroxylase in an organelle, preferably in plastids or mitochondria, especially in plastids, of a non-human organism or a part thereof, preferably a microorganism, a plant cell, a plant or a part thereof, as compared to a corresponding non-transformed wild type non-human organism or a part thereof; and
[38732] (b) growing the non-human organism or a part thereof under conditions which permit the production of valine or a composition comprising valine in said non-human organism or in the culture medium surrounding said non-human organism.

[38733] A further embodiment of the present invention relates to a process for the production of isoleucine, which comprises
[38734] (a) increasing or generating one or more activities selected from the group consisting of elongation factor Tu in an organelle, preferably in plastids or mitochondria, especially in plastids, of a non-human organism or a part thereof, preferably a microorganism, a plant cell, a plant or a part thereof, as compared to a corresponding non-transformed wild type non-human organism or a part thereof; and
[38735] (b) growing the non-human organism or a part thereof under conditions which permit the production of isoleucine or a composition comprising isoleucine in said non-human organism or in the culture medium surrounding said non-human organism.

[38736] A further embodiment of the present invention relates to a process for the production of leucine, which comprises
[38737] (a) increasing or generating one or more activities selected from the group consisting of elongation factor Tu in an organelle, preferably in plastids or mitochondria, especially in plastids, of a non-human organism or a part thereof, preferably a microorganism, a plant cell, a plant or a part thereof, as compared to a corresponding non-transformed wild type non-human organism or a part thereof; and
[38738] (b) growing the non-human organism or a part thereof under conditions which permit the production of leucine or a composition comprising leucine in said non-human organism or in the culture medium surrounding said non-human organism.

[38739] A further embodiment of the present invention relates to a process for the production of valine, which comprises
[38740] (a) increasing or generating one or more activities selected from the group consisting of elongation factor Tu in an organelle, preferably in plastids or mitochondria, especially in plastids, of a non-human organism or a part thereof, preferably a microorganism, a plant cell, a plant or a part thereof, as compared to a corresponding non-transformed wild type non-human organism or a part thereof; and
[38741] (b) growing the non-human organism or a part thereof under conditions which permit the production of valine or a composition comprising valine in said non-human organism or in the culture medium surrounding said non-human organism.

[38742] A further embodiment of the present invention relates to a process for the production of valine, which comprises
[38743] (a) increasing or generating one or more activities selected from the group consisting of 50S ribosomal protein L14 in an organelle, preferably in plastids or mitochondria, especially in plastids, of a non-human organism or a part thereof, preferably a microorganism, a plant cell, a plant or a part thereof, as compared to a corresponding non-transformed wild type non-human organism or a part thereof; and
[38744] (b) growing the non-human organism or a part thereof under conditions which permit the production of valine or a composition comprising valine in said non-human organism or in the culture medium surrounding said non-human organism.

[38745] A further embodiment of the present invention relates to a process for the production of valine, which comprises
[38746] (a) increasing or generating one or more activities selected from the group consisting of ABC transporter permease protein in an organelle, preferably in plastids or mitochondria, especially in plastids, of a non-human organism or a part thereof, preferably a microorganism, a plant cell, a plant or a part thereof, as compared to a corresponding non-transformed wild type non-human organism or a part thereof; and
[38747] (b) growing the non-human organism or a part thereof under conditions which permit the production of valine or a composition comprising valine in said non-human organism or in the culture medium surrounding said non-human organism.

[38748] A further embodiment of the present invention relates to a process for the production of isoleucine, which comprises
[38749] (a) increasing or generating one or more activities selected from the group consisting of enoyl-CoA hydratase in an organelle, preferably in plastids or mitochondria, especially in plastids, of a non-human organism or a part thereof, preferably a microorganism, a plant cell, a plant or a part thereof, as compared to a corresponding non-transformed wild type non-human organism or a part thereof; and
[38750] (b) growing the non-human organism or a part thereof under conditions which permit the production of isoleucine or a composition comprising isoleucine in said non-human organism or in the culture medium surrounding said non-human organism.

[38751] A further embodiment of the present invention relates to a process for the production of leucine, which comprises
[38752] (a) increasing or generating one or more activities selected from the group consisting of enoyl-CoA hydratase in an organelle, preferably in plastids or mitochondria, especially in plastids, of a non-human organism or a part thereof, preferably a microorganism, a plant cell, a plant or a part thereof, as compared to a corresponding non-transformed wild type non-human organism or a part thereof; and
[38753] (b) growing the non-human organism or a part thereof under conditions which permit the production of leucine or a composition comprising leucine in said non-human organism or in the culture medium surrounding said non-human organism.

[38754] A further embodiment of the present invention relates to a process for the production of valine, which comprises
[38755] (a) increasing or generating one or more activities selected from the group consisting of enoyl-CoA hydratase in an organelle, preferably in plastids or mitochondria, especially in plastids, of a non-human organism or a part thereof, preferably a microorganism, a plant cell, a plant or a part thereof, as compared to a corresponding non-transformed wild type non-human organism or a part thereof; and
[38756] (b) growing the non-human organism or a part thereof under conditions which permit the production of valine or a composition comprising valine in said non-human organism or in the culture medium surrounding said non-human organism.

[38757] A further embodiment of the present invention relates to a process for the production of isoleucine, which comprises
[38758] (a) increasing or generating one or more activities selected from the group consisting of transcriptional regulator in an organelle, preferably in plastids or mitochondria, especially in plastids, of a non-human organism or a part thereof, preferably a microorganism, a plant cell, a plant or a part thereof, as compared to a corresponding non-transformed wild type non-human organism or a part thereof; and
[38759] (b) growing the non-human organism or a part thereof under conditions which permit the production of isoleucine or a composition comprising isoleucine in said non-human organism or in the culture medium surrounding said non-human organism.

[38760] A further embodiment of the present invention relates to a process for the production of leucine, which comprises
[38761] (a) increasing or generating one or more activities selected from the group consisting of transcriptional regulator in an organelle, preferably in plastids or mitochondria, especially in plastids, of a non-human organism or a part thereof, preferably a microorganism, a plant cell, a plant or a part thereof, as compared to a corresponding non-transformed wild type non-human organism or a part thereof; and
[38762] (b) growing the non-human organism or a part thereof under conditions which permit the production of leucine or a composition comprising leucine in said non-human organism or in the culture medium surrounding said non-human organism.

[38763] A further embodiment of the present invention relates to a process for the production of valine, which comprises
[38764] (a) increasing or generating one or more activities selected from the group consisting of transcriptional regulator in an organelle, preferably in plastids or mitochondria, especially in plastids, of a non-human organism or a part thereof, preferably a microorganism, a plant cell, a plant or a part thereof, as compared to a corresponding non-transformed wild type non-human organism or a part thereof; and
[38765] (b) growing the non-human organism or a part thereof under conditions which permit the production of valine or a composition comprising valine in said non-human organism or in the culture medium surrounding said non-human organism.

[38766] A further embodiment of the present invention relates to a process for the production of isoleucine, which comprises
[38767] (a) increasing or generating one or more activities selected from the group consisting of acyltransferase in an organelle, preferably in plastids or mitochondria, especially in plastids, of a non-human organism or a part thereof, preferably a microorganism, a plant cell, a plant or a part thereof, as compared to a corresponding non-transformed wild type non-human organism or a part thereof; and
[38768] (b) growing the non-human organism or a part thereof under conditions which permit the production of isoleucine or a composition comprising isoleucine in said non-human organism or in the culture medium surrounding said non-human organism.

[38769] A further embodiment of the present invention relates to a process for the production of leucine, which comprises
[38770] (a) increasing or generating one or more activities selected from the group consisting of acyltransferase in an organelle, preferably in plastids or mitochondria, especially in plastids, of a non-human organism or a part thereof, preferably a microorganism, a plant cell, a plant or a part thereof, as compared to a corresponding non-transformed wild type non-human organism or a part thereof; and
[38771] (b) growing the non-human organism or a part thereof under conditions which permit the production of leucine or a composition comprising leucine in said non-human organism or in the culture medium surrounding said non-human organism.

[38772] A further embodiment of the present invention relates to a process for the production of valine, which comprises
[38773] (a) increasing or generating one or more activities selected from the group consisting of acyltransferase in an organelle, preferably in plastids or mitochondria, especially in plastids, of a non-human organism or a part thereof, preferably a microorganism, a plant cell, a plant or a part thereof, as compared to a corresponding non-transformed wild type non-human organism or a part thereof; and
[38774] (b) growing the non-human organism or a part thereof under conditions which permit the production of valine or a composition comprising valine in said non-human organism or in the culture medium surrounding said non-human organism.

[38775] A further embodiment of the present invention relates to a process for the production of isoleucine, which comprises
[38776] (a) increasing or generating one or more activities selected from the group consisting of oxidoreductase in an organelle, preferably in plastids or mitochondria, especially in plastids, of a non-human organism or a part thereof, preferably a microorganism, a plant cell, a plant or a part thereof, as compared to a corresponding non-transformed wild type non-human organism or a part thereof; and
[38777] (b) growing the non-human organism or a part thereof under conditions which permit the production of isoleucine or a composition comprising isoleucine in said non-human organism or in the culture medium surrounding said non-human organism.

[38778] A further embodiment of the present invention relates to a process for the production of leucine, which comprises
[38779] (a) increasing or generating one or more activities selected from the group consisting of oxidoreductase in an organelle, preferably in plastids or mitochondria, especially in plastids, of a non-human organism or a part thereof, preferably a microorganism, a plant cell, a plant or a part thereof, as compared to a corresponding non-transformed wild type non-human organism or a part thereof; and
[38780] (b) growing the non-human organism or a part thereof under conditions which permit the production of leucine or a composition comprising leucine in said non-human organism or in the culture medium surrounding said non-human organism.

[38781] A further embodiment of the present invention relates to a process for the production of valine, which comprises
[38782] (a) increasing or generating one or more activities selected from the group consisting of oxidoreductase in an organelle, preferably in plastids or mitochondria, especially in plastids, of a non-human organism or a part thereof, preferably a microorganism, a plant cell, a plant or a part thereof, as compared to a corresponding non-transformed wild type non-human organism or a part thereof; and
[38783] (b) growing the non-human organism or a part thereof under conditions which permit the production of valine or a composition comprising valine in said non-human organism or in the culture medium surrounding said non-human organism.

[38784] A further embodiment of the present invention relates to a process for the production of valine, which comprises
[38785] (a) increasing or generating one or more activities selected from the group consisting of ABC transporter component in an organelle, preferably in plastids or mitochondria, especially in plastids, of a non-human organism or a part thereof, preferably a microorganism, a plant cell, a plant or a part thereof, as compared to a corresponding non-transformed wild type non-human organism or a part thereof; and
[38786] (b) growing the non-human organism or a part thereof under conditions which permit the production of valine or a composition comprising valine in said non-human organism or in the culture medium surrounding said non-human organism.

[38787] A further embodiment of the present invention relates to a process for the production of valine, which comprises
[38788] (a) increasing or generating one or more activities selected from the group consisting of glucose-1-phosphate cytidylyltransferase in an organelle, preferably in plastids or mitochondria, especially in plastids, of a non-human organism or a part thereof, preferably a microorganism, a plant cell, a plant or a part thereof, as compared to a corresponding non-transformed wild type non-human organism or a part thereof; and
[38789] (b) growing the non-human organism or a part thereof under conditions which permit the production of valine or a composition comprising valine in said non-human organism or in the culture medium surrounding said non-human organism.

[38790] A further embodiment of the present invention relates to a process for the production of isoleucine, which comprises
[38791] (a) increasing or generating one or more activities selected from the group consisting of aminotransferase in an organelle, preferably in plastids or mitochondria, especially in plastids, of a non-human organism or a part thereof, preferably a microorganism, a plant cell, a plant or a part thereof, as compared to a corresponding non-transformed wild type non-human organism or a part thereof; and
[38792] (b) growing the non-human organism or a part thereof under conditions which permit the production of isoleucine or a composition comprising isoleucine in said non-human organism or in the culture medium surrounding said non-human organism.

[38793] A further embodiment of the present invention relates to a process for the production of valine, which comprises
[38794] (a) increasing or generating one or more activities selected from the group consisting of aminotransferase in an organelle, preferably in plastids or mitochondria, especially in plastids, of a non-human organism or a part thereof, preferably a microorganism, a plant cell, a plant or a part thereof, as compared to a corresponding non-transformed wild type non-human organism or a part thereof; and
[38795] (b) growing the non-human organism or a part thereof under conditions which permit the production of valine or a composition comprising valine in said non-human organism or in the culture medium surrounding said non-human organism.

[38796] A further embodiment of the present invention relates to a process for the production of isoleucine, which comprises
[38797] (a) increasing or generating one or more activities selected from the group consisting of NADH-quinone oxidoreductase subunit in an organelle, preferably in plastids or mitochondria, especially in plastids, of a non-human organism or a part thereof, preferably a microorganism, a plant cell, a plant or a part thereof, as compared to a corresponding non-transformed wild type non-human organism or a part thereof; and
[38798] (b) growing the non-human organism or a part thereof under conditions which permit the production of isoleucine or a composition comprising isoleucine in said non-human organism or in the culture medium surrounding said non-human organism.

[38799] A further embodiment of the present invention relates to a process for the production of leucine, which comprises
[38800] (a) increasing or generating one or more activities selected from the group consisting of NADH-quinone oxidoreductase subunit in an organelle, preferably in plastids or mitochondria, especially in plastids, of a non-human organism or a part thereof, preferably a microorganism, a plant cell, a plant or a part thereof, as compared to a corresponding non-transformed wild type non-human organism or a part thereof; and
[38801] (b) growing the non-human organism or a part thereof under conditions which permit the production of leucine or a composition comprising leucine in said non-human organism or in the culture medium surrounding said non-human organism.

[38802] A further embodiment of the present invention relates to a process for the production of isoleucine, which comprises
[38803] (a) increasing or generating one or more activities selected from the group consisting of glutamate-ammonia-ligase in an organelle, preferably in plastids or mitochondria, especially in plastids, of a non-human organism or a part thereof, preferably a microorganism, a plant cell, a plant or a part thereof, as compared to a corresponding non-transformed wild type non-human organism or a part thereof; and
[38804] (b) growing the non-human organism or a part thereof under conditions which permit the production of isoleucine or a composition comprising isoleucine in said non-human organism or in the culture medium surrounding said non-human organism.

[38805] A further embodiment of the present invention relates to a process for the production of leucine, which comprises
[38806] (a) increasing or generating one or more activities selected from the group consisting of glutamate-ammonia-ligase in an organelle, preferably in plastids or mitochondria, especially in plastids, of a non-human organism or a part thereof, preferably a microorganism, a plant cell, a plant or a part thereof, as compared to a corresponding non-transformed wild type non-human organism or a part thereof; and
[38807] (b) growing the non-human organism or a part thereof under conditions which permit the production of leucine or a composition comprising leucine in said non-human organism or in the culture medium surrounding said non-human organism.

[38808] A further embodiment of the present invention relates to a process for the production of valine, which comprises
[38809] (a) increasing or generating one or more activities selected from the group consisting of glutamate-ammonia-ligase in an organelle, preferably in plastids or mitochondria, especially in plastids, of a non-human organism or a part thereof, preferably a microorganism, a plant cell, a plant or a part thereof, as compared to a corresponding non-transformed wild type non-human organism or a part thereof; and
[38810] (b) growing the non-human organism or a part thereof under conditions which permit the production of valine or a composition comprising valine in said non-human organism or in the culture medium surrounding said non-human organism.

[38811] A further embodiment of the present invention relates to a process for the production of valine, which comprises
[38812] (a) increasing or generating one or more activities selected from the group consisting of isopropylmalate isomerase large subunit in an organelle, preferably in plastids or mitochondria, especially in plastids, of a non-human organism or a part thereof, preferably a microorganism, a plant cell, a plant or a part thereof, as compared to a corresponding non-transformed wild type non-human organism or a part thereof; and
[38813] (b) growing the non-human organism or a part thereof under conditions which permit the production of valine or a composition comprising valine in said non-human organism or in the culture medium surrounding said non-human organism.

[38814] A further embodiment of the present invention relates to a process for the production of isoleucine, which comprises
[38815] (a) increasing or generating one or more activities selected from the group consisting of hydrolase in an organelle, preferably in plastids or mitochondria, especially in plastids, of a non-human organism or a part thereof, preferably a microorganism, a plant cell, a plant or a part thereof, as compared to a corresponding non-transformed wild type non-human organism or a part thereof; and
[38816] (b) growing the non-human organism or a part thereof under conditions which permit the production of isoleucine or a composition comprising isoleucine in said non-human organism or in the culture medium surrounding said non-human organism.

[38817] A further embodiment of the present invention relates to a process for the production of leucine, which comprises
[38818] (a) increasing or generating one or more activities selected from the group consisting of hydrolase in an organelle, preferably in plastids or mitochondria, especially in plastids, of a non-human organism or a part thereof, preferably a microorganism, a plant cell, a plant or a part thereof, as compared to a corresponding non-transformed wild type non-human organism or a part thereof; and
[38819] (b) growing the non-human organism or a part thereof under conditions which permit the production of leucine or a composition comprising leucine in said non-human organism or in the culture medium surrounding said non-human organism.

[38820] A further embodiment of the present invention relates to a process for the production of valine, which comprises
[38821] (a) increasing or generating one or more activities selected from the group consisting of hydrolase in an organelle, preferably in plastids or mitochondria, especially in plastids, of a non-human organism or a part thereof, preferably a microorganism, a plant cell, a plant or a part thereof, as compared to a corresponding non-transformed wild type non-human organism or a part thereof; and
[38822] (b) growing the non-human organism or a part thereof under conditions which permit the production of valine or a composition comprising valine in said non-human organism or in the culture medium surrounding said non-human organism.

[38823] A further embodiment of the present invention relates to a process for the production of isoleucine, which comprises
[38824] (a) increasing or generating one or more activities selected from the group consisting of fumarylacetoacetate hydrolase in an organelle, preferably in plastids or mitochondria, especially in plastids, of a non-human organism or a part thereof, preferably a microorganism, a plant cell, a plant or a part thereof, as compared to a corresponding non-transformed wild type non-human organism or a part thereof; and
[38825] (b) growing the non-human organism or a part thereof under conditions which permit the production of isoleucine or a composition comprising isoleucine in said non-human organism or in the culture medium surrounding said non-human organism.

[38826] A further embodiment of the present invention relates to a process for the production of leucine, which comprises
[38827] (a) increasing or generating one or more activities selected from the group consisting of fumarylacetoacetate hydrolase in an organelle, preferably in plastids or mitochondria, especially in plastids, of a non-human organism or a part thereof, preferably a microorganism, a plant cell, a plant or a part thereof, as compared to a corresponding non-transformed wild type non-human organism or a part thereof; and
[38828] (b) growing the non-human organism or a part thereof under conditions which permit the production of leucine or a composition comprising leucine in said non-human organism or in the culture medium surrounding said non-human organism.

[38829] A further embodiment of the present invention relates to a process for the production of valine, which comprises
[38830] (a) increasing or generating one or more activities selected from the group consisting of fumarylacetoacetate hydrolase in an organelle, preferably in plastids or mitochondria, especially in plastids, of a non-human organism or a part thereof, preferably a microorganism, a plant cell, a plant or a part thereof, as compared to a corresponding non-transformed wild type non-human organism or a part thereof; and
[38831] (b) growing the non-human organism or a part thereof under conditions which permit the production of valine or a composition comprising valine in said non-human organism or in the culture medium surrounding said non-human organism.

[38832] A further embodiment of the present invention relates to a process for the production of leucine, which comprises
[38833] (a) increasing or generating one or more activities selected from the group consisting of peptidase in an organelle, preferably in plastids or mitochondria, especially in plastids, of a non-human organism or a part thereof, preferably a microorganism, a plant cell, a plant or a part thereof, as compared to a corresponding non-transformed wild type non-human organism or a part thereof; and
[38834] (b) growing the non-human organism or a part thereof under conditions which permit the production of leucine or a composition comprising leucine in said non-human organism or in the culture medium surrounding said non-human organism.

[38835] A further embodiment of the present invention relates to a process for the production of isoleucine, which comprises
[38836] (a) increasing or generating one or more activities selected from the group consisting of chaperone protein CIpB in an organelle, preferably in plastids or mitochondria, especially in plastids, of a non-human organism or a part thereof, preferably a microorganism, a plant cell, a plant or a part thereof, as compared to a corresponding non-transformed wild type non-human organism or a part thereof; and
[38837] (b) growing the non-human organism or a part thereof under conditions which permit the production of isoleucine or a composition comprising isoleucine in said non-human organism or in the culture medium surrounding said non-human organism.

[38838] A further embodiment of the present invention relates to a process for the production of isoleucine, which comprises
[38839] (a) increasing or generating one or more activities selected from the group consisting of purine nucleoside phosphorylase in an organelle, preferably in plastids or mitochondria, especially in plastids, of a non-human organism or a part thereof, preferably a microorganism, a plant cell, a plant or a part thereof, as compared to a corresponding non-transformed wild type non-human organism or a part thereof; and
[38840] (b) growing the non-human organism or a part thereof under conditions which permit the production of isoleucine or a composition comprising isoleucine in said non-human organism or in the culture medium surrounding said non-human organism.

[38841] A further embodiment of the present invention relates to a process for the production of leucine, which comprises
[38842] (a) increasing or generating one or more activities selected from the group consisting of purine nucleoside phosphorylase in an organelle, preferably in plastids or mitochondria, especially in plastids, of a non-human organism or a part thereof, preferably a microorganism, a plant cell, a plant or a part thereof, as compared to a corresponding non-transformed wild type non-human organism or a part thereof; and
[38843] (b) growing the non-human organism or a part thereof under conditions which permit the production of leucine or a composition comprising leucine in said non-human organism or in the culture medium surrounding said non-human organism.

[38844] A further embodiment of the present invention relates to a process for the production of valine, which comprises
[38845] (a) increasing or generating one or more activities selected from the group consisting of purine nucleoside phosphorylase in an organelle, preferably in plastids or mitochondria, especially in plastids, of a non-human organism or a part thereof, preferably a microorganism, a plant cell, a plant or a part thereof, as compared to a corresponding non-transformed wild type non-human organism or a part thereof; and
[38846] (b) growing the non-human organism or a part thereof under conditions which permit the production of valine or a composition comprising valine in said non-human organism or in the culture medium surrounding said non-human organism.

[38847] A further embodiment of the present invention relates to a process for the production of isoleucine, which comprises
[38848] (a) increasing or generating one or more activities selected from the group consisting of pyruvate kinase in an organelle, preferably in plastids or mitochondria, especially in plastids, of a non-human organism or a part thereof, preferably a microorganism, a plant cell, a plant or a part thereof, as compared to a corresponding non-transformed wild type non-human organism or a part thereof; and
[38849] (b) growing the non-human organism or a part thereof under conditions which permit the production of isoleucine or a composition comprising isoleucine in said non-human organism or in the culture medium surrounding said non-human organism.

[38850] A further embodiment of the present invention relates to a process for the production of valine, which comprises
[38851] (a) increasing or generating one or more activities selected from the group consisting of pyruvate kinase in an organelle, preferably in plastids or mitochondria, especially in plastids, of a non-human organism or a part thereof, preferably a microorganism, a plant cell, a plant or a part thereof, as compared to a corresponding non-transformed wild type non-human organism or a part thereof; and
[38852] (b) growing the non-human organism or a part thereof under conditions which permit the production of valine or a composition comprising valine in said non-human organism or in the culture medium surrounding said non-human organism.

[38853] A further embodiment of the present invention relates to a process for the production of isoleucine, which comprises
[38854] (a) increasing or generating one or more activities selected from the group consisting of threonine synthase in an organelle, preferably in plastids or mitochondria, especially in plastids, of a non-human organism or a part thereof, preferably a microorganism, a plant cell, a plant or a part thereof, as compared to a corresponding non-transformed wild type non-human organism or a part thereof; and
[38855] (b) growing the non-human organism or a part thereof under conditions which permit the production of isoleucine or a composition comprising isoleucine in said non-human organism or in the culture medium surrounding said non-human organism.

[38856] A further embodiment of the present invention relates to a process for the production of leucine, which comprises
[38857] (a) increasing or generating one or more activities selected from the group consisting of threonine synthase in an organelle, preferably in plastids or mitochondria, especially in plastids, of a non-human organism or a part thereof, preferably a microorganism, a plant cell, a plant or a part thereof, as compared to a corresponding non-transformed wild type non-human organism or a part thereof; and
[38858] (b) growing the non-human organism or a part thereof under conditions which permit the production of leucine or a composition comprising leucine in said non-human organism or in the culture medium surrounding said non-human organism.

[38859] A further embodiment of the present invention relates to a process for the production of valine, which comprises
[38860] (a) increasing or generating one or more activities selected from the group consisting of threonine synthase in an organelle, preferably in plastids or mitochondria, especially in plastids, of a non-human organism or a part thereof, preferably a microorganism, a plant cell, a plant or a part thereof, as compared to a corresponding non-transformed wild type non-human organism or a part thereof; and
[38861] (b) growing the non-human organism or a part thereof under conditions which permit the production of valine or a composition comprising valine in said non-human organism or in the culture medium surrounding said non-human organism.

[38862] A further embodiment of the present invention relates to a process for the production of valine, which comprises
[38863] (a) increasing or generating one or more activities selected from the group consisting of b0050-protein in an organelle, preferably in plastids or mitochondria, especially in plastids, of a non-human organism or a part thereof, preferably a microorganism, a plant cell, a plant or a part thereof, as compared to a corresponding non-transformed wild type non-human organism or a part thereof; and
[38864] (b) growing the non-human organism or a part thereof under conditions which permit the production of valine or a composition comprising valine in said non-human organism or in the culture medium surrounding said non-human organism.

[38865] A further embodiment of the present invention relates to a process for the production of leucine, which comprises
[38866] (a) increasing or generating one or more activities selected from the group consisting of acetolactate synthase small subunit in an organelle, preferably in plastids or mitochondria, especially in plastids, of a non-human organism or a part thereof, preferably a microorganism, a plant cell, a plant or a part thereof, as compared to a corresponding non-transformed wild type non-human organism or a part thereof; and
[38867] (b) growing the non-human organism or a part thereof under conditions which permit the production of leucine or a composition comprising leucine in said non-human organism or in the culture medium surrounding said non-human organism.

[38868] A further embodiment of the present invention relates to a process for the production of leucine, which comprises
[38869] (a) increasing or generating one or more activities selected from the group consisting of betagalactosidase in an organelle, preferably in plastids or mitochondria, especially in plastids, of a non-human organism or a part thereof, preferably a microorganism, a plant cell, a plant or a part thereof, as compared to a corresponding non-transformed wild type non-human organism or a part thereof; and
[38870] (b) growing the non-human organism or a part thereof under conditions which permit the production of leucine or a composition comprising leucine in said non-human organism or in the culture medium surrounding said non-human organism.

[38871] A further embodiment of the present invention relates to a process for the production of isoleucine, which comprises
[38872] (a) increasing or generating one or more activities selected from the group consisting of 2,3-dihydroxyphenylpropionate 1,2-dioxygenase in an organelle, preferably in plastids or mitochondria, especially in plastids, of a non-human organism or a part thereof, preferably a microorganism, a plant cell, a plant or a part thereof, as compared to a corresponding non-transformed wild type non-human organism or a part thereof; and
[38873] (b) growing the non-human organism or a part thereof under conditions which permit the production of isoleucine or a composition comprising isoleucine in said non-human organism or in the culture medium surrounding said non-human organism.

[38874] A further embodiment of the present invention relates to a process for the production of valine, which comprises
[38875] (a) increasing or generating one or more activities selected from the group consisting of 2,3-dihydroxyphenylpropionate 1,2-dioxygenase in an organelle, preferably in plastids or mitochondria, especially in plastids, of a non-human organism or a part thereof, preferably a microorganism, a plant cell, a plant or a part thereof, as compared to a corresponding non-transformed wild type non-human organism or a part thereof; and
[38876] (b) growing the non-human organism or a part thereof under conditions which permit the production of valine or a composition comprising valine in said non-human organism or in the culture medium surrounding said non-human organism.

[38877] A further embodiment of the present invention relates to a process for the production of isoleucine, which comprises
[38878] (a) increasing or generating one or more activities selected from the group consisting of ATP-binding component of a transport system in an organelle, preferably in plastids or mitochondria, especially in plastids, of a non-human organism or a part thereof, preferably a microorganism, a plant cell, a plant or a part thereof, as compared to a corresponding non-transformed wild type non-human organism or a part thereof; and
[38879] (b) growing the non-human organism or a part thereof under conditions which permit the production of isoleucine or a composition comprising isoleucine in said non-human organism or in the culture medium surrounding said non-human organism.

[38880] A further embodiment of the present invention relates to a process for the production of leucine, which comprises
[38881] (a) increasing or generating one or more activities selected from the group consisting of ATP-binding component of a transport system in an organelle, preferably in plastids or mitochondria, especially in plastids, of a non-human organism or a part thereof, preferably a microorganism, a plant cell, a plant or a part thereof, as compared to a corresponding non-transformed wild type non-human organism or a part thereof; and
[38882] (b) growing the non-human organism or a part thereof under conditions which permit the production of leucine or a composition comprising leucine in said non-human organism or in the culture medium surrounding said non-human organism.

[38883] A further embodiment of the present invention relates to a process for the production of valine, which comprises
[38884] (a) increasing or generating one or more activities selected from the group consisting of ATP-binding component of a transport system in an organelle, preferably in plastids or mitochondria, especially in plastids, of a non-human organism or a part thereof, preferably a microorganism, a plant cell, a plant or a part thereof, as compared to a corresponding non-transformed wild type non-human organism or a part thereof; and
[38885] (b) growing the non-human organism or a part thereof under conditions which permit the production of valine or a composition comprising valine in said non-human organism or in the culture medium surrounding said non-human organism.

[38886] A further embodiment of the present invention relates to a process for the production of isoleucine, which comprises
[38887] (a) increasing or generating one or more activities selected from the group consisting of membrane transport protein in an organelle, preferably in plastids or mitochondria, especially in plastids, of a non-human organism or a part thereof, preferably a microorganism, a plant cell, a plant or a part thereof, as compared to a corresponding non-transformed wild type non-human organism or a part thereof; and
[38888] (b) growing the non-human organism or a part thereof under conditions which permit the production of isoleucine or a composition comprising isoleucine in said non-human organism or in the culture medium surrounding said non-human organism.

[38889] A further embodiment of the present invention relates to a process for the production of isoleucine, which comprises
[38890] (a) increasing or generating one or more activities selected from the group consisting of isochorismate synthase in an organelle, preferably in plastids or mitochondria, especially in plastids, of a non-human organism or a part thereof, preferably a microorganism, a plant cell, a plant or a part thereof, as compared to a corresponding non-transformed wild type non-human organism or a part thereof; and
[38891] (b) growing the non-human organism or a part thereof under conditions which permit the production of isoleucine or a composition comprising isoleucine in said non-human organism or in the culture medium surrounding said non-human organism.

[38892] A further embodiment of the present invention relates to a process for the production of leucine, which comprises
[38893] (a) increasing or generating one or more activities selected from the group consisting of isochorismate synthase in an organelle, preferably in plastids or mitochondria, especially in plastids, of a non-human organism or a part thereof, preferably a microorganism, a plant cell, a plant or a part thereof, as compared to a corresponding non-transformed wild type non-human organism or a part thereof; and
[38894] (b) growing the non-human organism or a part thereof under conditions which permit the production of leucine or a composition comprising leucine in said non-human organism or in the culture medium surrounding said non-human organism.

[38895] A further embodiment of the present invention relates to a process for the production of valine, which comprises
[38896] (a) increasing or generating one or more activities selected from the group consisting of isochorismate synthase in an organelle, preferably in plastids or mitochondria, especially in plastids, of a non-human organism or a part thereof, preferably a microorganism, a plant cell, a plant or a part thereof, as compared to a corresponding non-transformed wild type non-human organism or a part thereof; and
[38897] (b) growing the non-human organism or a part thereof under conditions which permit the production of valine or a composition comprising valine in said non-human organism or in the culture medium surrounding said non-human organism.

[38898] A further embodiment of the present invention relates to a process for the production of isoleucine, which comprises
[38899] (a) increasing or generating one or more activities selected from the group consisting of zinc transporter in an organelle, preferably in plastids or mitochondria, especially in plastids, of a non-human organism or a part thereof, preferably a microorganism, a plant cell, a plant or a part thereof, as compared to a corresponding non-transformed wild type non-human organism or a part thereof; and
[38900] (b) growing the non-human organism or a part thereof under conditions which permit the production of isoleucine or a composition comprising isoleucine in said non-human organism or in the culture medium surrounding said non-human organism.

[38901] A further embodiment of the present invention relates to a process for the production of leucine, which comprises
[38902] (a) increasing or generating one or more activities selected from the group consisting of zinc transporter in an organelle, preferably in plastids or mitochondria, especially in plastids, of a non-human organism or a part thereof, preferably a microorganism, a plant cell, a plant or a part thereof, as compared to a corresponding non-transformed wild type non-human organism or a part thereof; and
[38903] (b) growing the non-human organism or a part thereof under conditions which permit the production of leucine or a composition comprising leucine in said non-human organism or in the culture medium surrounding said non-human organism.

[38904] A further embodiment of the present invention relates to a process for the production of isoleucine, which comprises
[38905] (a) increasing or generating one or more activities selected from the group consisting of major facilitator superfamily transporter protein in an organelle, preferably in plastids or mitochondria, especially in plastids, of a non-human organism or a part thereof, preferably a microorganism, a plant cell, a plant or a part thereof, as compared to a corresponding non-transformed wild type non-human organism or a part thereof; and
[38906] (b) growing the non-human organism or a part thereof under conditions which permit the production of isoleucine or a composition comprising isoleucine in said non-human organism or in the culture medium surrounding said non-human organism.

[38907] A further embodiment of the present invention relates to a process for the production of leucine, which comprises
[38908] (a) increasing or generating one or more activities selected from the group consisting of major facilitator superfamily transporter protein in an organelle, preferably in plastids or mitochondria, especially in plastids, of a non-human organism or a part thereof, preferably a microorganism, a plant cell, a plant or a part thereof, as compared to a corresponding non-transformed wild type non-human organism or a part thereof; and
[38909] (b) growing the non-human organism or a part thereof under conditions which permit the production of leucine or a composition comprising leucine in said non-human organism or in the culture medium surrounding said non-human organism.

[38910] A further embodiment of the present invention relates to a process for the production of valine, which comprises
[38911] (a) increasing or generating one or more activities selected from the group consisting of major facilitator superfamily transporter protein in an organelle, preferably in plastids or mitochondria, especially in plastids, of a non-human organism or a part thereof, preferably a microorganism, a plant cell, a plant or a part thereof, as compared to a corresponding non-transformed wild type non-human organism or a part thereof; and
[38912] (b) growing the non-human organism or a part thereof under conditions which permit the production of valine or a composition comprising valine in said non-human organism or in the culture medium surrounding said non-human organism.

[38913] A further embodiment of the present invention relates to a process for the production of leucine, which comprises
[38914] (a) increasing or generating one or more activities selected from the group consisting of DNA helicase IV in an organelle, preferably in plastids or mitochondria, especially in plastids, of a non-human organism or a part thereof, preferably a microorganism, a plant cell, a plant or a part thereof, as compared to a corresponding non-transformed wild type non-human organism or a part thereof; and
[38915] (b) growing the non-human organism or a part thereof under conditions which permit the production of leucine or a composition comprising leucine in said non-human organism or in the culture medium surrounding said non-human organism.

[38916] A further embodiment of the present invention relates to a process for the production of valine, which comprises
[38917] (a) increasing or generating one or more activities selected from the group consisting of methylglyoxal synthase in an organelle, preferably in plastids or mitochondria, especially in plastids, of a non-human organism or a part thereof, preferably a microorganism, a plant cell, a plant or a part thereof, as compared to a corresponding non-transformed wild type non-human organism or a part thereof; and
[38918] (b) growing the non-human organism or a part thereof under conditions which permit the production of valine or a composition comprising valine in said non-human organism or in the culture medium surrounding said non-human organism.

[38919] A further embodiment of the present invention relates to a process for the production of valine, which comprises
[38920] (a) increasing or generating one or more activities selected from the group consisting of phosphoanhydride phosphorylase in an organelle, preferably in plastids or mitochondria, especially in plastids, of a non-human organism or a part thereof, preferably a microorganism, a plant cell, a plant or a part thereof, as compared to a corresponding non-transformed wild type non-human organism or a part thereof; and
[38921] (b) growing the non-human organism or a part thereof under conditions which permit the production of valine or a composition comprising valine in said non-human organism or in the culture medium surrounding said non-human organism.

[38922] A further embodiment of the present invention relates to a process for the production of isoleucine, which comprises
[38923] (a) increasing or generating one or more activities selected from the group consisting of b1003-protein in an organelle, preferably in plastids or mitochondria, especially in plastids, of a non-human organism or a part thereof, preferably a microorganism, a plant cell, a plant or a part thereof, as compared to a corresponding non-transformed wild type non-human organism or a part thereof; and
[38924] (b) growing the non-human organism or a part thereof under conditions which permit the production of isoleucine or a composition comprising isoleucine in said non-human organism or in the culture medium surrounding said non-human organism.

[38925] A further embodiment of the present invention relates to a process for the production of leucine, which comprises
[38926] (a) increasing or generating one or more activities selected from the group consisting of b1003-protein in an organelle, preferably in plastids or mitochondria, especially in plastids, of a non-human organism or a part thereof, preferably a microorganism, a plant cell, a plant or a part thereof, as compared to a corresponding non-transformed wild type non-human organism or a part thereof; and
[38927] (b) growing the non-human organism or a part thereof under conditions which permit the production of leucine or a composition comprising leucine in said non-human organism or in the culture medium surrounding said non-human organism.

[38928] A further embodiment of the present invention relates to a process for the production of valine, which comprises
[38929] (a) increasing or generating one or more activities selected from the group consisting of b1003-protein in an organelle, preferably in plastids or mitochondria, especially in plastids, of a non-human organism or a part thereof, preferably a microorganism, a plant cell, a plant or a part thereof, as compared to a corresponding non-transformed wild type non-human organism or a part thereof; and
[38930] (b) growing the non-human organism or a part thereof under conditions which permit the production of valine or a composition comprising valine in said non-human organism or in the culture medium surrounding said non-human organism.

[38931] A further embodiment of the present invention relates to a process for the production of isoleucine, which comprises
[38932] (a) increasing or generating one or more activities selected from the group consisting of b1163-protein in an organelle, preferably in plastids or mitochondria, especially in plastids, of a non-human organism or a part thereof, preferably a microorganism, a plant cell, a plant or a part thereof, as compared to a corresponding non-transformed wild type non-human organism or a part thereof; and
[38933] (b) growing the non-human organism or a part thereof under conditions which permit the production of isoleucine or a composition comprising isoleucine in said non-human organism or in the culture medium surrounding said non-human organism.

[38934] A further embodiment of the present invention relates to a process for the production of leucine, which comprises
[38935] (a) increasing or generating one or more activities selected from the group consisting of b1163-protein in an organelle, preferably in plastids or mitochondria, especially in plastids, of a non-human organism or a part thereof, preferably a microorganism, a plant cell, a plant or a part thereof, as compared to a corresponding non-transformed wild type non-human organism or a part thereof; and
[38936] (b) growing the non-human organism or a part thereof under conditions which permit the production of leucine or a composition comprising leucine in said non-human organism or in the culture medium surrounding said non-human organism.

[38937] A further embodiment of the present invention relates to a process for the production of valine, which comprises
[38938] (a) increasing or generating one or more activities selected from the group consisting of b1163-protein in an organelle, preferably in plastids or mitochondria, especially in plastids, of a non-human organism or a part thereof, preferably a microorganism, a plant cell, a plant or a part thereof, as compared to a corresponding non-transformed wild type non-human organism or a part thereof; and
[38939] (b) growing the non-human organism or a part thereof under conditions which permit the production of valine or a composition comprising valine in said non-human organism or in the culture medium surrounding said non-human organism.

[38940] A further embodiment of the present invention relates to a process for the production of leucine, which comprises
[38941] (a) increasing or generating one or more activities selected from the group consisting of DNA polymerase in an organelle, preferably in plastids or mitochondria, especially in plastids, of a non-human organism or a part thereof, preferably a microorganism, a plant cell, a plant or a part thereof, as compared to a corresponding non-transformed wild type non-human organism or a part thereof; and
[38942] (b) growing the non-human organism or a part thereof under conditions which permit the production of leucine or a composition comprising leucine in said non-human organism or in the culture medium surrounding said non-human organism.

[38943] A further embodiment of the present invention relates to a process for the production of valine, which comprises
[38944] (a) increasing or generating one or more activities selected from the group consisting of DNA polymerase in an organelle, preferably in plastids or mitochondria, especially in plastids, of a non-human organism or a part thereof, preferably a microorganism, a plant cell, a plant or a part thereof, as compared to a corresponding non-transformed wild type non-human organism or a part thereof; and
[38945] (b) growing the non-human organism or a part thereof under conditions which permit the production of valine or a composition comprising valine in said non-human organism or in the culture medium surrounding said non-human organism.

[38946] A further embodiment of the present invention relates to a process for the production of isoleucine, which comprises
[38947] (a) increasing or generating one or more activities selected from the group consisting of membrane protein in an organelle, preferably in plastids or mitochondria, especially in plastids, of a non-human organism or a part thereof, preferably a microorganism, a plant cell, a plant or a part thereof, as compared to a corresponding non-transformed wild type non-human organism or a part thereof; and
[38948] (b) growing the non-human organism or a part thereof under conditions which permit the production of isoleucine or a composition comprising isoleucine in said non-human organism or in the culture medium surrounding said non-human organism.

[38949] A further embodiment of the present invention relates to a process for the production of leucine, which comprises
[38950] (a) increasing or generating one or more activities selected from the group consisting of membrane protein in an organelle, preferably in plastids or mitochondria, especially in plastids, of a non-human organism or a part thereof, preferably a microorganism, a plant cell, a plant or a part thereof, as compared to a corresponding non-transformed wild type non-human organism or a part thereof; and
[38951] (b) growing the non-human organism or a part thereof under conditions which permit the production of leucine or a composition comprising leucine in said non-human organism or in the culture medium surrounding said non-human organism.

[38952] A further embodiment of the present invention relates to a process for the production of valine, which comprises
[38953] (a) increasing or generating one or more activities selected from the group consisting of membrane protein in an organelle, preferably in plastids or mitochondria, especially in plastids, of a non-human organism or a part thereof, preferably a microorganism, a plant cell, a plant or a part thereof, as compared to a corresponding non-transformed wild type non-human organism or a part thereof; and
[38954] (b) growing the non-human organism or a part thereof under conditions which permit the production of valine or a composition comprising valine in said non-human organism or in the culture medium surrounding said non-human organism.

[38955] A further embodiment of the present invention relates to a process for the production of isoleucine, which comprises
[38956] (a) increasing or generating one or more activities selected from the group consisting of anthranilate synthase component II in an organelle, preferably in plastids or mitochondria, especially in plastids, of a non-human organism or a part thereof, preferably a microorganism, a plant cell, a plant or a part thereof, as compared to a corresponding non-transformed wild type non-human organism or a part thereof; and
[38957] (b) growing the non-human organism or a part thereof under conditions which permit the production of isoleucine or a composition comprising isoleucine in said non-human organism or in the culture medium surrounding said non-human organism.

[38958] A further embodiment of the present invention relates to a process for the production of leucine, which comprises
[38959] (a) increasing or generating one or more activities selected from the group consisting of anthranilate synthase component II in an organelle, preferably in plastids or mitochondria, especially in plastids, of a non-human organism or a part thereof, preferably a microorganism, a plant cell, a plant or a part thereof, as compared to a corresponding non-transformed wild type non-human organism or a part thereof; and
[38960] (b) growing the non-human organism or a part thereof under conditions which permit the production of leucine or a composition comprising leucine in said non-human organism or in the culture medium surrounding said non-human organism.

[38961] A further embodiment of the present invention relates to a process for the production of valine, which comprises
[38962] (a) increasing or generating one or more activities selected from the group consisting of anthranilate synthase component II in an organelle, preferably in plastids or mitochondria, especially in plastids, of a non-human organism or a part thereof, preferably a microorganism, a plant cell, a plant or a part thereof, as compared to a corresponding non-transformed wild type non-human organism or a part thereof; and
[38963] (b) growing the non-human organism or a part thereof under conditions which permit the production of valine or a composition comprising valine in said non-human organism or in the culture medium surrounding said non-human organism.

[38964] A further embodiment of the present invention relates to a process for the production of leucine, which comprises
[38965] (a) increasing or generating one or more activities selected from the group consisting of glutamine synthetase in an organelle, preferably in plastids or mitochondria, especially in plastids, of a non-human organism or a part thereof, preferably a microorganism, a plant cell, a plant or a part thereof, as compared to a corresponding non-transformed wild type non-human organism or a part thereof; and
[38966] (b) growing the non-human organism or a part thereof under conditions which permit the production of leucine or a composition comprising leucine in said non-human organism or in the culture medium surrounding said non-human organism.

[38967] A further embodiment of the present invention relates to a process for the production of valine, which comprises
[38968] (a) increasing or generating one or more activities selected from the group consisting of aldehyde dehydrogenase in an organelle, preferably in plastids or mitochondria, especially in plastids, of a non-human organism or a part thereof, preferably a microorganism, a plant cell, a plant or a part thereof, as compared to a corresponding non-transformed wild type non-human organism or a part thereof; and
[38969] (b) growing the non-human organism or a part thereof under conditions which permit the production of valine or a composition comprising valine in said non-human organism or in the culture medium surrounding said non-human organism.

[38970] A further embodiment of the present invention relates to a process for the production of valine, which comprises
[38971] (a) increasing or generating one or more activities selected from the group consisting of b1445-protein in an organelle, preferably in plastids or mitochondria, especially in plastids, of a non-human organism or a part thereof, preferably a microorganism, a plant cell, a plant or a part thereof, as compared to a corresponding non-transformed wild type non-human organism or a part thereof; and
[38972] (b) growing the non-human organism or a part thereof under conditions which permit the production of valine or a composition comprising valine in said non-human organism or in the culture medium surrounding said non-human organism.

[38973] A further embodiment of the present invention relates to a process for the production of valine, which comprises
[38974] (a) increasing or generating one or more activities selected from the group consisting of NADP-dependent malic enzyme in an organelle, preferably in plastids or mitochondria, especially in plastids, of a non-human organism or a part thereof, preferably a microorganism, a plant cell, a plant or a part thereof, as compared to a corresponding non-transformed wild type non-human organism or a part thereof; and
[38975] (b) growing the non-human organism or a part thereof under conditions which permit the production of valine or a composition comprising valine in said non-human organism or in the culture medium surrounding said non-human organism.

[38976] A further embodiment of the present invention relates to a process for the production of isoleucine, which comprises
[38977] (a) increasing or generating one or more activities selected from the group consisting of b1522-protein in an organelle, preferably in plastids or mitochondria, especially in plastids, of a non-human organism or a part thereof, preferably a microorganism, a plant cell, a plant or a part thereof, as compared to a corresponding non-transformed wild type non-human organism or a part thereof; and
[38978] (b) growing the non-human organism or a part thereof under conditions which permit the production of isoleucine or a composition comprising isoleucine in said non-human organism or in the culture medium surrounding said non-human organism.

[38979] A further embodiment of the present invention relates to a process for the production of leucine, which comprises
[38980] (a) increasing or generating one or more activities selected from the group consisting of b1522-protein in an organelle, preferably in plastids or mitochondria, especially in plastids, of a non-human organism or a part thereof, preferably a microorganism, a plant cell, a plant or a part thereof, as compared to a corresponding non-transformed wild type non-human organism or a part thereof; and
[38981] (b) growing the non-human organism or a part thereof under conditions which permit the production of leucine or a composition comprising leucine in said non-human organism or in the culture medium surrounding said non-human organism.

[38982] A further embodiment of the present invention relates to a process for the production of valine, which comprises
[38983] (a) increasing or generating one or more activities selected from the group consisting of b1522-protein in an organelle, preferably in plastids or mitochondria, especially in plastids, of a non-human organism or a part thereof, preferably a microorganism, a plant cell, a plant or a part thereof, as compared to a corresponding non-transformed wild type non-human organism or a part thereof; and
[38984] (b) growing the non-human organism or a part thereof under conditions which permit the production of valine or a composition comprising valine in said non-human organism or in the culture medium surrounding said non-human organism.

[38985] A further embodiment of the present invention relates to a process for the production of isoleucine, which comprises
[38986] (a) increasing or generating one or more activities selected from the group consisting of acid shock protein in an organelle, preferably in plastids or mitochondria, especially in plastids, of a non-human organism or a part thereof, preferably a microorganism, a plant cell, a plant or a part thereof, as compared to a corresponding non-transformed wild type non-human organism or a part thereof; and
[38987] (b) growing the non-human organism or a part thereof under conditions which permit the production of isoleucine or a composition comprising isoleucine in said non-human organism or in the culture medium surrounding said non-human organism.

[38988] A further embodiment of the present invention relates to a process for the production of leucine, which comprises
[38989] (a) increasing or generating one or more activities selected from the group consisting of acid shock protein in an organelle, preferably in plastids or mitochondria, especially in plastids, of a non-human organism or a part thereof, preferably a microorganism, a plant cell, a plant or a part thereof, as compared to a corresponding non-transformed wild type non-human organism or a part thereof; and
[38990] (b) growing the non-human organism or a part thereof under conditions which permit the production of leucine or a composition comprising leucine in said non-human organism or in the culture medium surrounding said non-human organism.

[38991] A further embodiment of the present invention relates to a process for the production of valine, which comprises
[38992] (a) increasing or generating one or more activities selected from the group consisting of acid shock protein in an organelle, preferably in plastids or mitochondria, especially in plastids, of a non-human organism or a part thereof, preferably a microorganism, a plant cell, a plant or a part thereof, as compared to a corresponding non-transformed wild type non-human organism or a part thereof; and
[38993] (b) growing the non-human organism or a part thereof under conditions which permit the production of valine or a composition comprising valine in said non-human organism or in the culture medium surrounding said non-human organism.

[38994] A further embodiment of the present invention relates to a process for the production of valine, which comprises
[38995] (a) increasing or generating one or more activities selected from the group consisting of transport protein in an organelle, preferably in plastids or mitochondria, especially in plastids, of a non-human organism or a part thereof, preferably a microorganism, a plant cell, a plant or a part thereof, as compared to a corresponding non-transformed wild type non-human organism or a part thereof; and
[38996] (b) growing the non-human organism or a part thereof under conditions which permit the production of valine or a composition comprising valine in said non-human organism or in the culture medium surrounding said non-human organism.

[38997] A further embodiment of the present invention relates to a process for the production of valine, which comprises
[38998] (a) increasing or generating one or more activities selected from the group consisting of b1670-protein in an organelle, preferably in plastids or mitochondria, especially in plastids, of a non-human organism or a part thereof, preferably a microorganism, a plant cell, a plant or a part thereof, as compared to a corresponding non-transformed wild type non-human organism or a part thereof; and
[38999] (b) growing the non-human organism or a part thereof under conditions which permit the production of valine or a composition comprising valine in said non-human organism or in the culture medium surrounding said non-human organism.

[39000] A further embodiment of the present invention relates to a process for the production of valine, which comprises
[39001] (a) increasing or generating one or more activities selected from the group consisting of b1672-protein in an organelle, preferably in plastids or mitochondria, especially in plastids, of a non-human organism or a part thereof, preferably a microorganism, a plant cell, a plant or a part thereof, as compared to a corresponding non-transformed wild type non-human organism or a part thereof; and
[39002] (b) growing the non-human organism or a part thereof under conditions which permit the production of valine or a composition comprising valine in said non-human organism or in the culture medium surrounding said non-human organism.

[39003] A further embodiment of the present invention relates to a process for the production of leucine, which comprises
[39004] (a) increasing or generating one or more activities selected from the group consisting of pyruvate kinase in an organelle, preferably in plastids or mitochondria, especially in plastids, of a non-human organism or a part thereof, preferably a microorganism, a plant cell, a plant or a part thereof, as compared to a corresponding non-transformed wild type non-human organism or a part thereof; and
[39005] (b) growing the non-human organism or a part thereof under conditions which permit the production of leucine or a composition comprising leucine in said non-human organism or in the culture medium surrounding said non-human organism.

[39006] A further embodiment of the present invention relates to a process for the production of valine, which comprises
[39007] (a) increasing or generating one or more activities selected from the group consisting of cytochrome c-type protein in an organelle, preferably in plastids or mitochondria, especially in plastids, of a non-human organism or a part thereof, preferably a microorganism, a plant cell, a plant or a part thereof, as compared to a corresponding non-transformed wild type non-human organism or a part thereof; and
[39008] (b) growing the non-human organism or a part thereof under conditions which permit the production of valine or a composition comprising valine in said non-human organism or in the culture medium surrounding said non-human organism.

[39009] A further embodiment of the present invention relates to a process for the production of isoleucine, which comprises
[39010] (a) increasing or generating one or more activities selected from the group consisting of trehalose-phosphatase in an organelle, preferably in plastids or mitochondria, especially in plastids, of a non-human organism or a part thereof, preferably a microorganism, a plant cell, a plant or a part thereof, as compared to a corresponding non-transformed wild type non-human organism or a part thereof; and
[39011] (b) growing the non-human organism or a part thereof under conditions which permit the production of isoleucine or a composition comprising isoleucine in said non-human organism or in the culture medium surrounding said non-human organism.

[39012] A further embodiment of the present invention relates to a process for the production of leucine, which comprises
[39013] (a) increasing or generating one or more activities selected from the group consisting of trehalose-phosphatase in an organelle, preferably in plastids or mitochondria, especially in plastids, of a non-human organism or a part thereof, preferably a microorganism, a plant cell, a plant or a part thereof, as compared to a corresponding non-transformed wild type non-human organism or a part thereof; and
[39014] (b) growing the non-human organism or a part thereof under conditions which permit the production of leucine or a composition comprising leucine in said non-human organism or in the culture medium surrounding said non-human organism.

[39015] A further embodiment of the present invention relates to a process for the production of valine, which comprises
[39016] (a) increasing or generating one or more activities selected from the group consisting of trehalose-phosphatase in an organelle, preferably in plastids or mitochondria, especially in plastids, of a non-human organism or a part thereof, preferably a microorganism, a plant cell, a plant or a part thereof, as compared to a corresponding non-transformed wild type non-human organism or a part thereof; and
[39017] (b) growing the non-human organism or a part thereof under conditions which permit the production of valine or a composition comprising valine in said non-human organism or in the culture medium surrounding said non-human organism.

[39018] A further embodiment of the present invention relates to a process for the production of isoleucine, which comprises
[39019] (a) increasing or generating one or more activities selected from the group consisting of O-antigen chain length determinant in an organelle, preferably in plastids or mitochondria, especially in plastids, of a non-human organism or a part thereof, preferably a microorganism, a plant cell, a plant or a part thereof, as compared to a corresponding non-transformed wild type non-human organism or a part thereof; and
[39020] (b) growing the non-human organism or a part thereof under conditions which permit the production of isoleucine or a composition comprising isoleucine in said non-human organism or in the culture medium surrounding said non-human organism.

[39021] A further embodiment of the present invention relates to a process for the production of leucine, which comprises
[39022] (a) increasing or generating one or more activities selected from the group consisting of O-antigen chain length determinant in an organelle, preferably in plastids or mitochondria, especially in plastids, of a non-human organism or a part thereof, preferably a microorganism, a plant cell, a plant or a part thereof, as compared to a corresponding non-transformed wild type non-human organism or a part thereof; and
[39023] (b) growing the non-human organism or a part thereof under conditions which permit the production of leucine or a composition comprising leucine in said non-human organism or in the culture medium surrounding said non-human organism.

[39024] A further embodiment of the present invention relates to a process for the production of valine, which comprises
[39025] (a) increasing or generating one or more activities selected from the group consisting of GDP-mannose 4,6-dehydratase in an organelle, preferably in plastids or mitochondria, especially in plastids, of a non-human organism or a part thereof, preferably a microorganism, a plant cell, a plant or a part thereof, as compared to a corresponding non-transformed wild type non-human organism or a part thereof; and
[39026] (b) growing the non-human organism or a part thereof under conditions which permit the production of valine or a composition comprising valine in said non-human organism or in the culture medium surrounding said non-human organism.

[39027] A further embodiment of the present invention relates to a process for the production of isoleucine, which comprises
[39028] (a) increasing or generating one or more activities selected from the group consisting of transport protein in an organelle, preferably in plastids or mitochondria, especially in plastids, of a non-human organism or a part thereof, preferably a microorganism, a plant cell, a plant or a part thereof, as compared to a corresponding non-transformed wild type non-human organism or a part thereof; and
[39029] (b) growing the non-human organism or a part thereof under conditions which permit the production of isoleucine or a composition comprising isoleucine in said non-human organism or in the culture medium surrounding said non-human organism.

[39030] A further embodiment of the present invention relates to a process for the production of leucine, which comprises
[39031] (a) increasing or generating one or more activities selected from the group consisting of transport protein in an organelle, preferably in plastids or mitochondria, especially in plastids, of a non-human organism or a part thereof, preferably a microorganism, a plant cell, a plant or a part thereof, as compared to a corresponding non-transformed wild type non-human organism or a part thereof; and
[39032] (b) growing the non-human organism or a part thereof under conditions which permit the production of leucine or a composition comprising leucine in said non-human organism or in the culture medium surrounding said non-human organism.

[39033] A further embodiment of the present invention relates to a process for the production of valine, which comprises
[39034] (a) increasing or generating one or more activities selected from the group consisting of Nucleoside monophosphate phosphohydrolase in an organelle, preferably in plastids or mitochondria, especially in plastids, of a non-human organism or a part thereof, preferably a microorganism, a plant cell, a plant or a part thereof, as compared to a corresponding non-transformed wild type non-human organism or a part thereof; and
[39035] (b) growing the non-human organism or a part thereof under conditions which permit the production of valine or a composition comprising valine in said non-human organism or in the culture medium surrounding said non-human organism.

[39036] A further embodiment of the present invention relates to a process for the production of isoleucine, which comprises
[39037] (a) increasing or generating one or more activities selected from the group consisting of transcriptional regulator in an organelle, preferably in plastids or mitochondria, especially in plastids, of a non-human organism or a part thereof, preferably a microorganism, a plant cell, a plant or a part thereof, as compared to a corresponding non-transformed wild type non-human organism or a part thereof; and
[39038] (b) growing the non-human organism or a part thereof under conditions which permit the production of isoleucine or a composition comprising isoleucine in said non-human organism or in the culture medium surrounding said non-human organism.

[39039] A further embodiment of the present invention relates to a process for the production of valine, which comprises
[39040] (a) increasing or generating one or more activities selected from the group consisting of transcriptional regulator in an organelle, preferably in plastids or mitochondria, especially in plastids, of a non-human organism or a part thereof, preferably a microorganism, a plant cell, a plant or a part thereof, as compared to a corresponding non-transformed wild type non-human organism or a part thereof; and
[39041] (b) growing the non-human organism or a part thereof under conditions which permit the production of valine or a composition comprising valine in said non-human organism or in the culture medium surrounding said non-human organism.

[39042] A further embodiment of the present invention relates to a process for the production of isoleucine, which comprises
[39043] (a) increasing or generating one or more activities selected from the group consisting of b2513-protein in an organelle, preferably in plastids or mitochondria, especially in plastids, of a non-human organism or a part thereof, preferably a microorganism, a plant cell, a plant or a part thereof, as compared to a corresponding non-transformed wild type non-human organism or a part thereof; and
[39044] (b) growing the non-human organism or a part thereof under conditions which permit the production of isoleucine or a composition comprising isoleucine in said non-human organism or in the culture medium surrounding said non-human organism.

[39045] A further embodiment of the present invention relates to a process for the production of leucine, which comprises
[39046] (a) increasing or generating one or more activities selected from the group consisting of b2513-protein in an organelle, preferably in plastids or mitochondria, especially in plastids, of a non-human organism or a part thereof, preferably a microorganism, a plant cell, a plant or a part thereof, as compared to a corresponding non-transformed wild type non-human organism or a part thereof; and
[39047] (b) growing the non-human organism or a part thereof under conditions which permit the production of leucine or a composition comprising leucine in said non-human organism or in the culture medium surrounding said non-human organism.

[39048] A further embodiment of the present invention relates to a process for the production of valine, which comprises
[39049] (a) increasing or generating one or more activities selected from the group consisting of b2513-protein in an organelle, preferably in plastids or mitochondria, especially in plastids, of a non-human organism or a part thereof, preferably a microorganism, a plant cell, a plant or a part thereof, as compared to a corresponding non-transformed wild type non-human organism or a part thereof; and
[39050] (b) growing the non-human organism or a part thereof under conditions which permit the production of valine or a composition comprising valine in said non-human organism or in the culture medium surrounding said non-human organism.

[39051] A further embodiment of the present invention relates to a process for the production of isoleucine, which comprises
[39052] (a) increasing or generating one or more activities selected from the group consisting of serine hydroxymethyltransferase in an organelle, preferably in plastids or mitochondria, especially in plastids, of a non-human organism or a part thereof, preferably a microorganism, a plant cell, a plant or a part thereof, as compared to a corresponding non-transformed wild type non-human organism or a part thereof; and
[39053] (b) growing the non-human organism or a part thereof under conditions which permit the production of isoleucine or a composition comprising isoleucine in said non-human organism or in the culture medium surrounding said non-human organism.

[39054] A further embodiment of the present invention relates to a process for the production of valine, which comprises
[39055] (a) increasing or generating one or more activities selected from the group consisting of b2613-protein in an organelle, preferably in plastids or mitochondria, especially in plastids, of a non-human organism or a part thereof, preferably a microorganism, a plant cell, a plant or a part thereof, as compared to a corresponding non-transformed wild type non-human organism or a part thereof; and
[39056] (b) growing the non-human organism or a part thereof under conditions which permit the production of valine or a composition comprising valine in said non-human organism or in the culture medium surrounding said non-human organism.

[39057] A further embodiment of the present invention relates to a process for the production of isoleucine, which comprises
[39058] (a) increasing or generating one or more activities selected from the group consisting of transcriptional regulator in an organelle, preferably in plastids or mitochondria, especially in plastids, of a non-human organism or a part thereof, preferably a microorganism, a plant cell, a plant or a part thereof, as compared to a corresponding non-transformed wild type non-human organism or a part thereof; and
[39059] (b) growing the non-human organism or a part thereof under conditions which permit the production of isoleucine or a composition comprising isoleucine in said non-human organism or in the culture medium surrounding said non-human organism.

[39060] A further embodiment of the present invention relates to a process for the production of leucine, which comprises
[39061] (a) increasing or generating one or more activities selected from the group consisting of transcriptional regulator in an organelle, preferably in plastids or mitochondria, especially in plastids, of a non-human organism or a part thereof, preferably a microorganism, a plant cell, a plant or a part thereof, as compared to a corresponding non-transformed wild type non-human organism or a part thereof; and
[39062] (b) growing the non-human organism or a part thereof under conditions which permit the production of leucine or a composition comprising leucine in said non-human organism or in the culture medium surrounding said non-human organism.

[39063] A further embodiment of the present invention relates to a process for the production of isoleucine, which comprises
[39064] (a) increasing or generating one or more activities selected from the group consisting of b2673-protein in an organelle, preferably in plastids or mitochondria, especially in plastids, of a non-human organism or a part thereof, preferably a microorganism, a plant cell, a plant or a part thereof, as compared to a corresponding non-transformed wild type non-human organism or a part thereof; and
[39065] (b) growing the non-human organism or a part thereof under conditions which permit the production of isoleucine or a composition comprising isoleucine in said non-human organism or in the culture medium surrounding said non-human organism.

[39066] A further embodiment of the present invention relates to a process for the production of isoleucine, which comprises
[39067] (a) increasing or generating one or more activities selected from the group consisting of murein transglycosylase in an organelle, preferably in plastids or mitochondria, especially in plastids, of a non-human organism or a part thereof, preferably a microorganism, a plant cell, a plant or a part thereof, as compared to a corresponding non-transformed wild type non-human organism or a part thereof; and
[39068] (b) growing the non-human organism or a part thereof under conditions which permit the production of isoleucine or a composition comprising isoleucine in said non-human organism or in the culture medium surrounding said non-human organism.

[39069] A further embodiment of the present invention relates to a process for the production of leucine, which comprises
[39070] (a) increasing or generating one or more activities selected from the group consisting of murein transglycosylase in an organelle, preferably in plastids or mitochondria, especially in plastids, of a non-human organism or a part thereof, preferably a microorganism, a plant cell, a plant or a part thereof, as compared to a corresponding non-transformed wild type non-human organism or a part thereof; and
[39071] (b) growing the non-human organism or a part thereof under conditions which permit the production of leucine or a composition comprising leucine in said non-human organism or in the culture medium surrounding said non-human organism.

[39072] A further embodiment of the present invention relates to a process for the production of valine, which comprises
[39073] (a) increasing or generating one or more activities selected from the group consisting of murein transglycosylase in an organelle, preferably in plastids or mitochondria, especially in plastids, of a non-human organism or a part thereof, preferably a microorganism, a plant cell, a plant or a part thereof, as compared to a corresponding non-transformed wild type non-human organism or a part thereof; and
[39074] (b) growing the non-human organism or a part thereof under conditions which permit the production of valine or a composition comprising valine in said non-human organism or in the culture medium surrounding said non-human organism.

[39075] A further embodiment of the present invention relates to a process for the production of valine, which comprises
[39076] (a) increasing or generating one or more activities selected from the group consisting of transcriptional regulator in an organelle, preferably in plastids or mitochondria, especially in plastids, of a non-human organism or a part thereof, preferably a microorganism, a plant cell, a plant or a part thereof, as compared to a corresponding non-transformed wild type non-human organism or a part thereof; and
[39077] (b) growing the non-human organism or a part thereof under conditions which permit the production of valine or a composition comprising valine in said non-human organism or in the culture medium surrounding said non-human organism.

[39078] A further embodiment of the present invention relates to a process for the production of isoleucine, which comprises
[39079] (a) increasing or generating one or more activities selected from the group consisting of b2739-protein in an organelle, preferably in plastids or mitochondria, especially in plastids, of a non-human organism or a part thereof, preferably a microorganism, a plant cell, a plant or a part thereof, as compared to a corresponding non-transformed wild type non-human organism or a part thereof; and
[39080] (b) growing the non-human organism or a part thereof under conditions which permit the production of isoleucine or a composition comprising isoleucine in said non-human organism or in the culture medium surrounding said non-human organism.

[39081] A further embodiment of the present invention relates to a process for the production of leucine, which comprises
[39082] (a) increasing or generating one or more activities selected from the group consisting of b2739-protein in an organelle, preferably in plastids or mitochondria, especially in plastids, of a non-human organism or a part thereof, preferably a microorganism, a plant cell, a plant or a part thereof, as compared to a corresponding non-transformed wild type non-human organism or a part thereof; and
[39083] (b) growing the non-human organism or a part thereof under conditions which permit the production of leucine or a composition comprising leucine in said non-human organism or in the culture medium surrounding said non-human organism.

[39084] A further embodiment of the present invention relates to a process for the production of valine, which comprises
[39085] (a) increasing or generating one or more activities selected from the group consisting of b2739-protein in an organelle, preferably in plastids or mitochondria, especially in plastids, of a non-human organism or a part thereof, preferably a microorganism, a plant cell, a plant or a part thereof, as compared to a corresponding non-transformed wild type non-human organism or a part thereof; and
[39086] (b) growing the non-human organism or a part thereof under conditions which permit the production of valine or a composition comprising valine in said non-human organism or in the culture medium surrounding said non-human organism.

[39087] A further embodiment of the present invention relates to a process for the production of isoleucine, which comprises
[39088] (a) increasing or generating one or more activities selected from the group consisting of b2812-protein in an organelle, preferably in plastids or mitochondria, especially in plastids, of a non-human organism or a part thereof, preferably a microorganism, a plant cell, a plant or a part thereof, as compared to a corresponding non-transformed wild type non-human organism or a part thereof; and
[39089] (b) growing the non-human organism or a part thereof under conditions which permit the production of isoleucine or a composition comprising isoleucine in said non-human organism or in the culture medium surrounding said non-human organism.

[39090] A further embodiment of the present invention relates to a process for the production of leucine, which comprises
[39091] (a) increasing or generating one or more activities selected from the group consisting of b2812-protein in an organelle, preferably in plastids or mitochondria, especially in plastids, of a non-human organism or a part thereof, preferably a microorganism, a plant cell, a plant or a part thereof, as compared to a corresponding non-transformed wild type non-human organism or a part thereof; and
[39092] (b) growing the non-human organism or a part thereof under conditions which permit the production of leucine or a composition comprising leucine in said non-human organism or in the culture medium surrounding said non-human organism.

[39093] A further embodiment of the present invention relates to a process for the production of isoleucine, which comprises
[39094] (a) increasing or generating one or more activities selected from the group consisting of transcriptional regulator in an organelle, preferably in plastids or mitochondria, especially in plastids, of a non-human organism or a part thereof, preferably a microorganism, a plant cell, a plant or a part thereof, as compared to a corresponding non-transformed wild type non-human organism or a part thereof; and
[39095] (b) growing the non-human organism or a part thereof under conditions which permit the production of isoleucine or a composition comprising isoleucine in said non-human organism or in the culture medium surrounding said non-human organism.

[39096] A further embodiment of the present invention relates to a process for the production of leucine, which comprises
[39097] (a) increasing or generating one or more activities selected from the group consisting of transcriptional regulator in an organelle, preferably in plastids or mitochondria, especially in plastids, of a non-human organism or a part thereof, preferably a microorganism, a plant cell, a plant or a part thereof, as compared to a corresponding non-transformed wild type non-human organism or a part thereof; and
[39098] (b) growing the non-human organism or a part thereof under conditions which permit the production of leucine or a composition comprising leucine in said non-human organism or in the culture medium surrounding said non-human organism.

[39099] A further embodiment of the present invention relates to a process for the production of valine, which comprises
[39100] (a) increasing or generating one or more activities selected from the group consisting of transcriptional regulator in an organelle, preferably in plastids or mitochondria, especially in plastids, of a non-human organism or a part thereof, preferably a microorganism, a plant cell, a plant or a part thereof, as compared to a corresponding non-transformed wild type non-human organism or a part thereof; and
[39101] (b) growing the non-human organism or a part thereof under conditions which permit the production of valine or a composition comprising valine in said non-human organism or in the culture medium surrounding said non-human organism.

[39102] A further embodiment of the present invention relates to a process for the production of isoleucine, which comprises
[39103] (a) increasing or generating one or more activities selected from the group consisting of ribosephosphate isomerase, constitutive in an organelle, preferably in plastids or mitochondria, especially in plastids, of a non-human organism or a part thereof, preferably a microorganism, a plant cell, a plant or a part thereof, as compared to a corresponding non-transformed wild type non-human organism or a part thereof; and
[39104] (b) growing the non-human organism or a part thereof under conditions which permit the production of isoleucine or a composition comprising isoleucine in said non-human organism or in the culture medium surrounding said non-human organism.

[39105] A further embodiment of the present invention relates to a process for the production of valine, which comprises
[39106] (a) increasing or generating one or more activities selected from the group consisting of arginine exporter protein in an organelle, preferably in plastids or mitochondria, especially in plastids, of a non-human organism or a part thereof, preferably a microorganism, a plant cell, a plant or a part thereof, as compared to a corresponding non-transformed wild type non-human organism or a part thereof; and
[39107] (b) growing the non-human organism or a part thereof under conditions which permit the production of valine or a composition comprising valine in said non-human organism or in the culture medium surrounding said non-human organism.

[39108] A further embodiment of the present invention relates to a process for the production of isoleucine, which comprises
[39109] (a) increasing or generating one or more activities selected from the group consisting of glycoprotease in an organelle, preferably in plastids or mitochondria, especially in plastids, of a non-human organism or a part thereof, preferably a microorganism, a plant cell, a plant or a part thereof, as compared to a corresponding non-transformed wild type non-human organism or a part thereof; and
[39110] (b) growing the non-human organism or a part thereof under conditions which permit the production of isoleucine or a composition comprising isoleucine in said non-human organism or in the culture medium surrounding said non-human organism.

[39111] A further embodiment of the present invention relates to a process for the production of leucine, which comprises
[39112] (a) increasing or generating one or more activities selected from the group consisting of glycoprotease in an organelle, preferably in plastids or mitochondria, especially in plastids, of a non-human organism or a part thereof, preferably a microorganism, a plant cell, a plant or a part thereof, as compared to a corresponding non-transformed wild type non-human organism or a part thereof; and
[39113] (b) growing the non-human organism or a part thereof under conditions which permit the production of leucine or a composition comprising leucine in said non-human organism or in the culture medium surrounding said non-human organism.

[39114] A further embodiment of the present invention relates to a process for the production of valine, which comprises
[39115] (a) increasing or generating one or more activities selected from the group consisting of glycoprotease in an organelle, preferably in plastids or mitochondria, especially in plastids, of a non-human organism or a part thereof, preferably a microorganism, a plant cell, a plant or a part thereof, as compared to a corresponding non-transformed wild type non-human organism or a part thereof; and
[39116] (b) growing the non-human organism or a part thereof under conditions which permit the production of valine or a composition comprising valine in said non-human organism or in the culture medium surrounding said non-human organism.

[39117] A further embodiment of the present invention relates to a process for the production of isoleucine, which comprises
[39118] (a) increasing or generating one or more activities selected from the group consisting of b3083-protein in an organelle, preferably in plastids or mitochondria, especially in plastids, of a non-human organism or a part thereof, preferably a microorganism, a plant cell, a plant or a part thereof, as compared to a corresponding non-transformed wild type non-human organism or a part thereof; and
[39119] (b) growing the non-human organism or a part thereof under conditions which permit the production of isoleucine or a composition comprising isoleucine in said non-human organism or in the culture medium surrounding said non-human organism.

[39120] A further embodiment of the present invention relates to a process for the production of valine, which comprises
[39121] (a) increasing or generating one or more activities selected from the group consisting of b3083-protein in an organelle, preferably in plastids or mitochondria, especially in plastids, of a non-human organism or a part thereof, preferably a microorganism, a plant cell, a plant or a part thereof, as compared to a corresponding non-transformed wild type non-human organism or a part thereof; and
[39122] (b) growing the non-human organism or a part thereof under conditions which permit the production of valine or a composition comprising valine in said non-human organism or in the culture medium surrounding said non-human organism.

[39123] A further embodiment of the present invention relates to a process for the production of leucine, which comprises
[39124] (a) increasing or generating one or more activities selected from the group consisting of L-serine dehydratase in an organelle, preferably in plastids or mitochondria, especially in plastids, of a non-human organism or a part thereof, preferably a microorganism, a plant cell, a plant or a part thereof, as compared to a corresponding non-transformed wild type non-human organism or a part thereof; and
[39125] (b) growing the non-human organism or a part thereof under conditions which permit the production of leucine or a composition comprising leucine in said non-human organism or in the culture medium surrounding said non-human organism.

[39126] A further embodiment of the present invention relates to a process for the production of valine, which comprises
[39127] (a) increasing or generating one or more activities selected from the group consisting of threonine dehydratase in an organelle, preferably in plastids or mitochondria, especially in plastids, of a non-human organism or a part thereof, preferably a microorganism, a plant cell, a plant or a part thereof, as compared to a corresponding non-transformed wild type non-human organism or a part thereof; and
[39128] (b) growing the non-human organism or a part thereof under conditions which permit the production of valine or a composition comprising valine in said non-human organism or in the culture medium surrounding said non-human organism.

[39129] A further embodiment of the present invention relates to a process for the production of leucine, which comprises
[39130] (a) increasing or generating one or more activities selected from the group consisting of acetyl CoA carboxylase in an organelle, preferably in plastids or mitochondria, especially in plastids, of a non-human organism or a part thereof, preferably a microorganism, a plant cell, a plant or a part thereof, as compared to a corresponding non-transformed wild type non-human organism or a part thereof; and
[39131] (b) growing the non-human organism or a part thereof under conditions which permit the production of leucine or a composition comprising leucine in said non-human organism or in the culture medium surrounding said non-human organism.

[39132] A further embodiment of the present invention relates to a process for the production of valine, which comprises
[39133] (a) increasing or generating one or more activities selected from the group consisting of ABC transporter ATP-binding protein in an organelle, preferably in plastids or mitochondria, especially in plastids, of a non-human organism or a part thereof, preferably a microorganism, a plant cell, a plant or a part thereof, as compared to a corresponding non-transformed wild type non-human organism or a part thereof; and
[39134] (b) growing the non-human organism or a part thereof under conditions which permit the production of valine or a composition comprising valine in said non-human organism or in the culture medium surrounding said non-human organism.

[39135] A further embodiment of the present invention relates to a process for the production of isoleucine, which comprises
[39136] (a) increasing or generating one or more activities selected from the group consisting of glycogen synthase in an organelle, preferably in plastids or mitochondria, especially in plastids, of a non-human organism or a part thereof, preferably a microorganism, a plant cell, a plant or a part thereof, as compared to a corresponding non-transformed wild type non-human organism or a part thereof; and
[39137] (b) growing the non-human organism or a part thereof under conditions which permit the production of isoleucine or a composition comprising isoleucine in said non-human organism or in the culture medium surrounding said non-human organism.

[39138] A further embodiment of the present invention relates to a process for the production of leucine, which comprises
[39139] (a) increasing or generating one or more activities selected from the group consisting of glycogen synthase in an organelle, preferably in plastids or mitochondria, especially in plastids, of a non-human organism or a part thereof, preferably a microorganism, a plant cell, a plant or a part thereof, as compared to a corresponding non-transformed wild type non-human organism or a part thereof; and
[39140] (b) growing the non-human organism or a part thereof under conditions which permit the production of leucine or a composition comprising leucine in said non-human organism or in the culture medium surrounding said non-human organism.

[39141] A further embodiment of the present invention relates to a process for the production of valine, which comprises
[39142] (a) increasing or generating one or more activities selected from the group consisting of b3490-protein in an organelle, preferably in plastids or mitochondria, especially in plastids, of a non-human organism or a part thereof, preferably a microorganism, a plant cell, a plant or a part thereof, as compared to a corresponding non-transformed wild type non-human organism or a part thereof; and
[39143] (b) growing the non-human organism or a part thereof under conditions which permit the production of valine or a composition comprising valine in said non-human organism or in the culture medium surrounding said non-human organism.

[39144] A further embodiment of the present invention relates to a process for the production of isoleucine, which comprises
[39145] (a) increasing or generating one or more activities selected from the group consisting of valine-pyruvate transaminase in an organelle, preferably in plastids or mitochondria, especially in plastids, of a non-human organism or a part thereof, preferably a microorganism, a plant cell, a plant or a part thereof, as compared to a corresponding non-transformed wild type non-human organism or a part thereof; and
[39146] (b) growing the non-human organism or a part thereof under conditions which permit the production of isoleucine or a composition comprising isoleucine in said non-human organism or in the culture medium surrounding said non-human organism.

[39147] A further embodiment of the present invention relates to a process for the production of leucine, which comprises
[39148] (a) increasing or generating one or more activities selected from the group consisting of valine-pyruvate transaminase in an organelle, preferably in plastids or mitochondria, especially in plastids, of a non-human organism or a part thereof, preferably a microorganism, a plant cell, a plant or a part thereof, as compared to a corresponding non-transformed wild type non-human organism or a part thereof; and
[39149] (b) growing the non-human organism or a part thereof under conditions which permit the production of leucine or a composition comprising leucine in said non-human organism or in the culture medium surrounding said non-human organism.

[39150] A further embodiment of the present invention relates to a process for the production of isoleucine, which comprises
[39151] (a) increasing or generating one or more activities selected from the group consisting of phosphopantetheine adenylyltransferase in an organelle, preferably in plastids or mitochondria, especially in plastids, of a non-human organism or a part thereof, preferably a microorganism, a plant cell, a plant or a part thereof, as compared to a corresponding non-transformed wild type non-human organism or a part thereof; and
[39152] (b) growing the non-human organism or a part thereof under conditions which permit the production of isoleucine or a composition comprising isoleucine in said non-human organism or in the culture medium surrounding said non-human organism.

[39153] A further embodiment of the present invention relates to a process for the production of leucine, which comprises
[39154] (a) increasing or generating one or more activities selected from the group consisting of phosphopantetheine adenylyltransferase in an organelle, preferably in plastids or mitochondria, especially in plastids, of a non-human organism or a part thereof, preferably a microorganism, a plant cell, a plant or a part thereof, as compared to a corresponding non-transformed wild type non-human organism or a part thereof; and
[39155] (b) growing the non-human organism or a part thereof under conditions which permit the production of leucine or a composition comprising leucine in said non-human organism or in the culture medium surrounding said non-human organism.

[39156] A further embodiment of the present invention relates to a process for the production of valine, which comprises
[39157] (a) increasing or generating one or more activities selected from the group consisting of phosphopantetheine adenylyltransferase in an organelle, preferably in plastids or mitochondria, especially in plastids, of a non-human organism or a part thereof, preferably a microorganism, a plant cell, a plant or a part thereof, as compared to a corresponding non-transformed wild type non-human organism or a part thereof; and
[39158] (b) growing the non-human organism or a part thereof under conditions which permit the production of valine or a composition comprising valine in said non-human organism or in the culture medium surrounding said non-human organism.

[39159] A further embodiment of the present invention relates to a process for the production of leucine, which comprises
[39160] (a) increasing or generating one or more activities selected from the group consisting of acetolactate synthase in an organelle, preferably in plastids or mitochondria, especially in plastids, of a non-human organism or a part thereof, preferably a microorganism, a plant cell, a plant or a part thereof, as compared to a corresponding non-transformed wild type non-human organism or a part thereof; and
[39161] (b) growing the non-human organism or a part thereof under conditions which permit the production of leucine or a composition comprising leucine in said non-human organism or in the culture medium surrounding said non-human organism.

[39162] A further embodiment of the present invention relates to a process for the production of isoleucine, which comprises
[39163] (a) increasing or generating one or more activities selected from the group consisting of branched-chain amino-acid aminotransferase in an organelle, preferably in plastids or mitochondria, especially in plastids, of a non-human organism or a part thereof, preferably a microorganism, a plant cell, a plant or a part thereof, as compared to a corresponding non-transformed wild type non-human organism or a part thereof; and
[39164] (b) growing the non-human organism or a part thereof under conditions which permit the production of isoleucine or a composition comprising isoleucine in said non-human organism or in the culture medium surrounding said non-human organism.

[39165] A further embodiment of the present invention relates to a process for the production of isoleucine, which comprises
[39166] (a) increasing or generating one or more activities selected from the group consisting of dihydroxyacid dehydratase in an organelle, preferably in plastids or mitochondria, especially in plastids, of a non-human organism or a part thereof, preferably a microorganism, a plant cell, a plant or a part thereof, as compared to a corresponding non-transformed wild type non-human organism or a part thereof; and
[39167] (b) growing the non-human organism or a part thereof under conditions which permit the production of isoleucine or a composition comprising isoleucine in said non-human organism or in the culture medium surrounding said non-human organism.

[39168] A further embodiment of the present invention relates to a process for the production of leucine, which comprises
[39169] (a) increasing or generating one or more activities selected from the group consisting of dihydroxyacid dehydratase in an organelle, preferably in plastids or mitochondria, especially in plastids, of a non-human organism or a part thereof, preferably a microorganism, a plant cell, a plant or a part thereof, as compared to a corresponding non-transformed wild type non-human organism or a part thereof; and
[39170] (b) growing the non-human organism or a part thereof under conditions which permit the production of leucine or a composition comprising leucine in said non-human organism or in the culture medium surrounding said non-human organism.

[39171] A further embodiment of the present invention relates to a process for the production of leucine, which comprises
[39172] (a) increasing or generating one or more activities selected from the group consisting of dihydroxyacid dehydratase in an organelle, preferably in plastids or mitochondria, especially in plastids, of a non-human organism or a part thereof, preferably a microorganism, a plant cell, a plant or a part thereof, as compared to a corresponding non-transformed wild type non-human organism or a part thereof; and
[39173] (b) growing the non-human organism or a part thereof under conditions which permit the production of leucine or a composition comprising leucine in said non-human organism or in the culture medium surrounding said non-human organism.

[39174] A further embodiment of the present invention relates to a process for the production of valine, which comprises
[39175] (a) increasing or generating one or more activities selected from the group consisting of dihydroxyacid dehydratase in an organelle, preferably in plastids or mitochondria, especially in plastids, of a non-human organism or a part thereof, preferably a microorganism, a plant cell, a plant or a part thereof, as compared to a corresponding non-transformed wild type non-human organism or a part thereof; and
[39176] (b) growing the non-human organism or a part thereof under conditions which permit the production of valine or a composition comprising valine in said non-human organism or in the culture medium surrounding said non-human organism.

[39177] A further embodiment of the present invention relates to a process for the production of isoleucine, which comprises
[39178] (a) increasing or generating one or more activities selected from the group consisting of ketol-acid reductoisomerase in an organelle, preferably in plastids or mitochondria, especially in plastids, of a non-human organism or a part thereof, preferably a microorganism, a plant cell, a plant or a part thereof, as compared to a corresponding non-transformed wild type non-human organism or a part thereof; and
[39179] (b) growing the non-human organism or a part thereof under conditions which permit the production of isoleucine or a composition comprising isoleucine in said non-human organism or in the culture medium surrounding said non-human organism.

[39180] A further embodiment of the present invention relates to a process for the production of leucine, which comprises
[39181] (a) increasing or generating one or more activities selected from the group consisting of ketol-acid reductoisomerase in an organelle, preferably in plastids or mitochondria, especially in plastids, of a non-human organism or a part thereof, preferably a microorganism, a plant cell, a plant or a part thereof, as compared to a corresponding non-transformed wild type non-human organism or a part thereof; and
[39182] (b) growing the non-human organism or a part thereof under conditions which permit the production of leucine or a composition comprising leucine in said non-human organism or in the culture medium surrounding said non-human organism.

[39183] A further embodiment of the present invention relates to a process for the production of isoleucine, which comprises
[39184] (a) increasing or generating one or more activities selected from the group consisting of DNA helicase II in an organelle, preferably in plastids or mitochondria, especially in plastids, of a non-human organism or a part thereof, preferably a microorganism, a plant cell, a plant or a part thereof, as compared to a corresponding non-transformed wild type non-human organism or a part thereof; and
[39185] (b) growing the non-human organism or a part thereof under conditions which permit the production of isoleucine or a composition comprising isoleucine in said non-human organism or in the culture medium surrounding said non-human organism.

[39186] A further embodiment of the present invention relates to a process for the production of leucine, which comprises
[39187] (a) increasing or generating one or more activities selected from the group consisting of DNA helicase II in an organelle, preferably in plastids or mitochondria, especially in plastids, of a non-human organism or a part thereof, preferably a microorganism, a plant cell, a plant or a part thereof, as compared to a corresponding non-transformed wild type non-human organism or a part thereof; and
[39188] (b) growing the non-human organism or a part thereof under conditions which permit the production of leucine or a composition comprising leucine in said non-human organism or in the culture medium surrounding said non-human organism.

[39189] A further embodiment of the present invention relates to a process for the production of valine, which comprises
[39190] (a) increasing or generating one or more activities selected from the group consisting of DNA helicase II in an organelle, preferably in plastids or mitochondria, especially in plastids, of a non-human organism or a part thereof, preferably a microorganism, a plant cell, a plant or a part thereof, as compared to a corresponding non-transformed wild type non-human organism or a part thereof; and
[39191] (b) growing the non-human organism or a part thereof under conditions which permit the production of valine or a composition comprising valine in said non-human organism or in the culture medium surrounding said non-human organism.

[39192] A further embodiment of the present invention relates to a process for the production of leucine, which comprises
[39193] (a) increasing or generating one or more activities selected from the group consisting of protoporphyrin oxidase in an organelle, preferably in plastids or mitochondria, especially in plastids, of a non-human organism or a part thereof, preferably a microorganism, a plant cell, a plant or a part thereof, as compared to a corresponding non-transformed wild type non-human organism or a part thereof; and
[39194] (b) growing the non-human organism or a part thereof under conditions which permit the production of leucine or a composition comprising leucine in said non-human organism or in the culture medium surrounding said non-human organism.

[39195] A further embodiment of the present invention relates to a process for the production of leucine, which comprises
[39196] (a) increasing or generating one or more activities selected from the group consisting of superoxide dismutase in an organelle, preferably in plastids or mitochondria, especially in plastids, of a non-human organism or a part thereof, preferably a microorganism, a plant cell, a plant or a part thereof, as compared to a corresponding non-transformed wild type non-human organism or a part thereof; and
[39197] (b) growing the non-human organism or a part thereof under conditions which permit the production of leucine or a composition comprising leucine in said non-human organism or in the culture medium surrounding said non-human organism.

[39198] A further embodiment of the present invention relates to a process for the production of isoleucine, which comprises
[39199] (a) increasing or generating one or more activities selected from the group consisting of b3989-protein in an organelle, preferably in plastids or mitochondria, especially in plastids, of a non-human organism or a part thereof, preferably a microorganism, a plant cell, a plant or a part thereof, as compared to a corresponding non-transformed wild type non-human organism or a part thereof; and
[39200] (b) growing the non-human organism or a part thereof under conditions which permit the production of isoleucine or a composition comprising isoleucine in said non-human organism or in the culture medium surrounding said non-human organism.

[39201] A further embodiment of the present invention relates to a process for the production of leucine, which comprises
[39202] (a) increasing or generating one or more activities selected from the group consisting of b3989-protein in an organelle, preferably in plastids or mitochondria, especially in plastids, of a non-human organism or a part thereof, preferably a microorganism, a plant cell, a plant or a part thereof, as compared to a corresponding non-transformed wild type non-human organism or a part thereof; and
[39203] (b) growing the non-human organism or a part thereof under conditions which permit the production of leucine or a composition comprising leucine in said non-human organism or in the culture medium surrounding said non-human organism.

[39204] A further embodiment of the present invention relates to a process for the production of valine, which comprises
[39205] (a) increasing or generating one or more activities selected from the group consisting of b3989-protein in an organelle, preferably in plastids or mitochondria, especially in plastids, of a non-human organism or a part thereof, preferably a microorganism, a plant cell, a plant or a part thereof, as compared to a corresponding non-transformed wild type non-human organism or a part thereof; and
[39206] (b) growing the non-human organism or a part thereof under conditions which permit the production of valine or a composition comprising valine in said non-human organism or in the culture medium surrounding said non-human organism.

[39207] A further embodiment of the present invention relates to a process for the production of isoleucine, which comprises
[39208] (a) increasing or generating one or more activities selected from the group consisting of b4029-protein in an organelle, preferably in plastids or mitochondria, especially in plastids, of a non-human organism or a part thereof, preferably a microorganism, a plant cell, a plant or a part thereof, as compared to a corresponding non-transformed wild type non-human organism or a part thereof; and
[39209] (b) growing the non-human organism or a part thereof under conditions which permit the production of isoleucine or a composition comprising isoleucine in said non-human organism or in the culture medium surrounding said non-human organism.

[39210] A further embodiment of the present invention relates to a process for the production of leucine, which comprises
[39211] (a) increasing or generating one or more activities selected from the group consisting of b4029-protein in an organelle, preferably in plastids or mitochondria, especially in plastids, of a non-human organism or a part thereof, preferably a microorganism, a plant cell, a plant or a part thereof, as compared to a corresponding non-transformed wild type non-human organism or a part thereof; and
[39212] (b) growing the non-human organism or a part thereof under conditions which permit the production of leucine or a composition comprising leucine in said non-human organism or in the culture medium surrounding said non-human organism.

[39213] A further embodiment of the present invention relates to a process for the production of valine, which comprises
[39214] (a) increasing or generating one or more activities selected from the group consisting of b4029-protein in an organelle, preferably in plastids or mitochondria, especially in plastids, of a non-human organism or a part thereof, preferably a microorganism, a plant cell, a plant or a part thereof, as compared to a corresponding non-transformed wild type non-human organism or a part thereof; and
[39215] (b) growing the non-human organism or a part thereof under conditions which permit the production of valine or a composition comprising valine in said non-human organism or in the culture medium surrounding said non-human organism.

[39216] A further embodiment of the present invention relates to a process for the production of isoleucine, which comprises
[39217] (a) increasing or generating one or more activities selected from the group consisting of b4050-protein in an organelle, preferably in plastids or mitochondria, especially in plastids, of a non-human organism or a part thereof, preferably a microorganism, a plant cell, a plant or a part thereof, as compared to a corresponding non-transformed wild type non-human organism or a part thereof; and
[39218] (b) growing the non-human organism or a part thereof under conditions which permit the production of isoleucine or a composition comprising isoleucine in said non-human organism or in the culture medium surrounding said non-human organism.

[39219] A further embodiment of the present invention relates to a process for the production of isoleucine, which comprises
[39220] (a) increasing or generating one or more activities selected from the group consisting of b4056-protein in an organelle, preferably in plastids or mitochondria, especially in plastids, of a non-human organism or a part thereof, preferably a microorganism, a plant cell, a plant or a part thereof, as compared to a corresponding non-transformed wild type non-human organism or a part thereof; and
[39221] (b) growing the non-human organism or a part thereof under conditions which permit the production of isoleucine or a composition comprising isoleucine in said non-human organism or in the culture medium surrounding said non-human organism.

[39222] A further embodiment of the present invention relates to a process for the production of leucine, which comprises
[39223] (a) increasing or generating one or more activities selected from the group consisting of b4056-protein in an organelle, preferably in plastids or mitochondria, especially in plastids, of a non-human organism or a part thereof, preferably a microorganism, a plant cell, a plant or a part thereof, as compared to a corresponding non-transformed wild type non-human organism or a part thereof; and
[39224] (b) growing the non-human organism or a part thereof under conditions which permit the production of leucine or a composition comprising leucine in said non-human organism or in the culture medium surrounding said non-human organism.

[39225] A further embodiment of the present invention relates to a process for the production of isoleucine, which comprises
[39226] (a) increasing or generating one or more activities selected from the group consisting of acetyltransferase in an organelle, preferably in plastids or mitochondria, especially in plastids, of a non-human organism or a part thereof, preferably a microorganism, a plant cell, a plant or a part thereof, as compared to a corresponding non-transformed wild type non-human organism or a part thereof; and
[39227] (b) growing the non-human organism or a part thereof under conditions which permit the production of isoleucine or a composition comprising isoleucine in said non-human organism or in the culture medium surrounding said non-human organism.

[39228] A further embodiment of the present invention relates to a process for the production of leucine, which comprises
[39229] (a) increasing or generating one or more activities selected from the group consisting of acetyltransferase in an organelle, preferably in plastids or mitochondria, especially in plastids, of a non-human organism or a part thereof, preferably a microorganism, a plant cell, a plant or a part thereof, as compared to a corresponding non-transformed wild type non-human organism or a part thereof; and
[39230] (b) growing the non-human organism or a part thereof under conditions which permit the production of leucine or a composition comprising leucine in said non-human organism or in the culture medium surrounding said non-human organism.

[39231] A further embodiment of the present invention relates to a process for the production of valine, which comprises
[39232] (a) increasing or generating one or more activities selected from the group consisting of acetyltransferase in an organelle, preferably in plastids or mitochondria, especially in plastids, of a non-human organism or a part thereof, preferably a microorganism, a plant cell, a plant or a part thereof, as compared to a corresponding non-transformed wild type non-human organism or a part thereof; and
[39233] (b) growing the non-human organism or a part thereof under conditions which permit the production of valine or a composition comprising valine in said non-human organism or in the culture medium surrounding said non-human organism.

[39234] A further embodiment of the present invention relates to a process for the production of valine, which comprises
[39235] (a) increasing or generating one or more activities selected from the group consisting of b4263-protein in an organelle, preferably in plastids or mitochondria, especially in plastids, of a non-human organism or a part thereof, preferably a microorganism, a plant cell, a plant or a part thereof, as compared to a corresponding non-transformed wild type non-human organism or a part thereof; and
[39236] (b) growing the non-human organism or a part thereof under conditions which permit the production of valine or a composition comprising valine in said non-human organism or in the culture medium surrounding said non-human organism.

[39237] A further embodiment of the present invention relates to a process for the production of isoleucine, which comprises
[39238] (a) increasing or generating one or more activities selected from the group consisting of gluconate transport system permease 3 in an organelle, preferably in plastids or mitochondria, especially in plastids, of a non-human organism or a part thereof, preferably a microorganism, a plant cell, a plant or a part thereof, as compared to a corresponding non-transformed wild type non-human organism or a part thereof; and
[39239] (b) growing the non-human organism or a part thereof under conditions which permit the production of isoleucine or a composition comprising isoleucine in said non-human organism or in the culture medium surrounding said non-human organism.

[39240] A further embodiment of the present invention relates to a process for the production of leucine, which comprises
[39241] (a) increasing or generating one or more activities selected from the group consisting of gluconate transport system permease 3 in an organelle, preferably in plastids or mitochondria, especially in plastids, of a non-human organism or a part thereof, preferably a microorganism, a plant cell, a plant or a part thereof, as compared to a corresponding non-transformed wild type non-human organism or a part thereof; and
[39242] (b) growing the non-human organism or a part thereof under conditions which permit the production of leucine or a composition comprising leucine in said non-human organism or in the culture medium surrounding said non-human organism.

[39243] A further embodiment of the present invention relates to a process for the production of valine, which comprises
[39244] (a) increasing or generating one or more activities selected from the group consisting of gluconate transport system permease 3 in an organelle, preferably in plastids or mitochondria, especially in plastids, of a non-human organism or a part thereof, preferably a microorganism, a plant cell, a plant or a part thereof, as compared to a corresponding non-transformed wild type non-human organism or a part thereof; and
[39245] (b) growing the non-human organism or a part thereof under conditions which permit the production of valine or a composition comprising valine in said non-human organism or in the culture medium surrounding said non-human organism.

[39246] A further embodiment of the present invention relates to a process for the production of isoleucine, which comprises
[39247] (a) increasing or generating one or more activities selected from the group consisting of purine-nucleoside phosphorylase in an organelle, preferably in plastids or mitochondria, especially in plastids, of a non-human organism or a part thereof, preferably a microorganism, a plant cell, a plant or a part thereof, as compared to a corresponding non-transformed wild type non-human organism or a part thereof; and
[39248] (b) growing the non-human organism or a part thereof under conditions which permit the production of isoleucine or a composition comprising isoleucine in said non-human organism or in the culture medium surrounding said non-human organism.

[39249] A further embodiment of the present invention relates to a process for the production of isoleucine, which comprises
[39250] (a) increasing or generating one or more activities selected from the group consisting of thioredoxin in an organelle, preferably in plastids or mitochondria, especially in plastids, of a non-human organism or a part thereof, preferably a microorganism, a plant cell, a plant or a part thereof, as compared to a corresponding non-transformed wild type non-human organism or a part thereof; and
[39251] (b) growing the non-human organism or a part thereof under conditions which permit the production of isoleucine or a composition comprising isoleucine in said non-human organism or in the culture medium surrounding said non-human organism.

[39252] A further embodiment of the present invention relates to a process for the production of leucine, which comprises
[39253] (a) increasing or generating one or more activities selected from the group consisting of thioredoxin in an organelle, preferably in plastids or mitochondria, especially in plastids, of a non-human organism or a part thereof, preferably a microorganism, a plant cell, a plant or a part thereof, as compared to a corresponding non-transformed wild type non-human organism or a part thereof; and
[39254] (b) growing the non-human organism or a part thereof under conditions which permit the production of leucine or a composition comprising leucine in said non-human organism or in the culture medium surrounding said non-human organism.

[39255] A further embodiment of the present invention relates to a process for the production of valine, which comprises
[39256] (a) increasing or generating one or more activities selected from the group consisting of thioredoxin in an organelle, preferably in plastids or mitochondria, especially in plastids, of a non-human organism or a part thereof, preferably a microorganism, a plant cell, a plant or a part thereof, as compared to a corresponding non-transformed wild type non-human organism or a part thereof; and
[39257] (b) growing the non-human organism or a part thereof under conditions which permit the production of valine or a composition comprising valine in said non-human organism or in the culture medium surrounding said non-human organism.

[39258] A further embodiment of the present invention relates to a process for the production of isoleucine, which comprises
[39259] (a) increasing or generating one or more activities selected from the group consisting of GM02LC11114-protein in an organelle, preferably in plastids or mitochondria, especially in plastids, of a non-human organism or a part thereof, preferably a microorganism, a plant cell, a plant or a part thereof, as compared to a corresponding non-transformed wild type non-human organism or a part thereof; and
[39260] (b) growing the non-human organism or a part thereof under conditions which permit the production of isoleucine or a composition comprising isoleucine in said non-human organism or in the culture medium surrounding said non-human organism.

[39261] A further embodiment of the present invention relates to a process for the production of leucine, which comprises
[39262] (a) increasing or generating one or more activities selected from the group consisting of GM02LC11114-protein in an organelle, preferably in plastids or mitochondria, especially in plastids, of a non-human organism or a part thereof, preferably a microorganism, a plant cell, a plant or a part thereof, as compared to a corresponding non-transformed wild type non-human organism or a part thereof; and
[39263] (b) growing the non-human organism or a part thereof under conditions which permit the production of leucine or a composition comprising leucine in said non-human organism or in the culture medium surrounding said non-human organism.

[39264] A further embodiment of the present invention relates to a process for the production of isoleucine, which comprises
[39265] (a) increasing or generating one or more activities selected from the group consisting of glutaredoxin in an organelle, preferably in plastids or mitochondria, especially in plastids, of a non-human organism or a part thereof, preferably a microorganism, a plant cell, a plant or a part thereof, as compared to a corresponding non-transformed wild type non-human organism or a part thereof; and
[39266] (b) growing the non-human organism or a part thereof under conditions which permit the production of isoleucine or a composition comprising isoleucine in said non-human organism or in the culture medium surrounding said non-human organism.

[39267] A further embodiment of the present invention relates to a process for the production of leucine, which comprises
[39268] (a) increasing or generating one or more activities selected from the group consisting of glutaredoxin in an organelle, preferably in plastids or mitochondria, especially in plastids, of a non-human organism or a part thereof, preferably a microorganism, a plant cell, a plant or a part thereof, as compared to a corresponding non-transformed wild type non-human organism or a part thereof; and
[39269] (b) growing the non-human organism or a part thereof under conditions which permit the production of leucine or a composition comprising leucine in said non-human organism or in the culture medium surrounding said non-human organism.

[39270] A further embodiment of the present invention relates to a process for the production of valine, which comprises
[39271] (a) increasing or generating one or more activities selected from the group consisting of glutaredoxin in an organelle, preferably in plastids or mitochondria, especially in plastids, of a non-human organism or a part thereof, preferably a microorganism, a plant cell, a plant or a part thereof, as compared to a corresponding non-transformed wild type non-human organism or a part thereof; and
[39272] (b) growing the non-human organism or a part thereof under conditions which permit the production of valine or a composition comprising valine in said non-human organism or in the culture medium surrounding said non-human organism.

[39273] A further embodiment of the present invention relates to a process for the production of isoleucine, which comprises
[39274] (a) increasing or generating one or more activities selected from the group consisting of histone H2A in an organelle, preferably in plastids or mitochondria, especially in plastids, of a non-human organism or a part thereof, preferably a microorganism, a plant cell, a plant or a part thereof, as compared to a corresponding non-transformed wild type non-human organism or a part thereof; and
[39275] (b) growing the non-human organism or a part thereof under conditions which permit the production of isoleucine or a composition comprising isoleucine in said non-human organism or in the culture medium surrounding said non-human organism.

[39276] A further embodiment of the present invention relates to a process for the production of leucine, which comprises
[39277] (a) increasing or generating one or more activities selected from the group consisting of histone H2A in an organelle, preferably in plastids or mitochondria, especially in plastids, of a non-human organism or a part thereof, preferably a microorganism, a plant cell, a plant or a part thereof, as compared to a corresponding non-transformed wild type non-human organism or a part thereof; and
[39278] (b) growing the non-human organism or a part thereof under conditions which permit the production of leucine or a composition comprising leucine in said non-human organism or in the culture medium surrounding said non-human organism.

[39279] A further embodiment of the present invention relates to a process for the production of valine, which comprises
[39280] (a) increasing or generating one or more activities selected from the group consisting of histone H2A in an organelle, preferably in plastids or mitochondria, especially in plastids, of a non-human organism or a part thereof, preferably a microorganism, a plant cell, a plant or a part thereof, as compared to a corresponding non-transformed wild type non-human organism or a part thereof; and
[39281] (b) growing the non-human organism or a part thereof under conditions which permit the production of valine or a composition comprising valine in said non-human organism or in the culture medium surrounding said non-human organism.

[39282] A further embodiment of the present invention relates to a process for the production of valine, which comprises
[39283] (a) increasing or generating one or more activities selected from the group consisting of vacuolar ATPase subunit in an organelle, preferably in plastids or mitochondria, especially in plastids, of a non-human organism or a part thereof, preferably a microorganism, a plant cell, a plant or a part thereof, as compared to a corresponding non-transformed wild type non-human organism or a part thereof; and
[39284] (b) growing the non-human organism or a part thereof under conditions which permit the production of valine or a composition comprising valine in said non-human organism or in the culture medium surrounding said non-human organism.

[39285] A further embodiment of the present invention relates to a process for the production of isoleucine, which comprises
[39286] (a) increasing or generating one or more activities selected from the group consisting of RNA binding protein in an organelle, preferably in plastids or mitochondria, especially in plastids, of a non-human organism or a part thereof, preferably a microorganism, a plant cell, a plant or a part thereof, as compared to a corresponding non-transformed wild type non-human organism or a part thereof; and
[39287] (b) growing the non-human organism or a part thereof under conditions which permit the production of isoleucine or a composition comprising isoleucine in said non-human organism or in the culture medium surrounding said non-human organism.

[39288] A further embodiment of the present invention relates to a process for the production of leucine, which comprises
[39289] (a) increasing or generating one or more activities selected from the group consisting of RNA binding protein in an organelle, preferably in plastids or mitochondria, especially in plastids, of a non-human organism or a part thereof, preferably a microorganism, a plant cell, a plant or a part thereof, as compared to a corresponding non-transformed wild type non-human organism or a part thereof; and
[39290] (b) growing the non-human organism or a part thereof under conditions which permit the production of leucine or a composition comprising leucine in said non-human organism or in the culture medium surrounding said non-human organism.

[39291] A further embodiment of the present invention relates to a process for the production of valine, which comprises
[39292] (a) increasing or generating one or more activities selected from the group consisting of RNA binding protein in an organelle, preferably in plastids or mitochondria, especially in plastids, of a non-human organism or a part thereof, preferably a microorganism, a plant cell, a plant or a part thereof, as compared to a corresponding non-transformed wild type non-human organism or a part thereof; and
[39293] (b) growing the non-human organism or a part thereof under conditions which permit the production of valine or a composition comprising valine in said non-human organism or in the culture medium surrounding said non-human organism.

[39294] A further embodiment of the present invention relates to a process for the production of isoleucine, which comprises
[39295] (a) increasing or generating one or more activities selected from the group consisting of transcription factor in an organelle, preferably in plastids or mitochondria, especially in plastids, of a non-human organism or a part thereof, preferably a microorganism, a plant cell, a plant or a part thereof, as compared to a corresponding non-transformed wild type non-human organism or a part thereof; and
[39296] (b) growing the non-human organism or a part thereof under conditions which permit the production of isoleucine or a composition comprising isoleucine in said non-human organism or in the culture medium surrounding said non-human organism.

[39297] A further embodiment of the present invention relates to a process for the production of leucine, which comprises
[39298] (a) increasing or generating one or more activities selected from the group consisting of transcription factor in an organelle, preferably in plastids or mitochondria, especially in plastids, of a non-human organism or a part thereof, preferably a microorganism, a plant cell, a plant or a part thereof, as compared to a corresponding non-transformed wild type non-human organism or a part thereof; and
[39299] (b) growing the non-human organism or a part thereof under conditions which permit the production of leucine or a composition comprising leucine in said non-human organism or in the culture medium surrounding said non-human organism.

[39300] A further embodiment of the present invention relates to a process for the production of valine, which comprises
[39301] (a) increasing or generating one or more activities selected from the group consisting of transcription factor in an organelle, preferably in plastids or mitochondria, especially in plastids, of a non-human organism or a part thereof, preferably a microorganism, a plant cell, a plant or a part thereof, as compared to a corresponding non-transformed wild type non-human organism or a part thereof; and
[39302] (b) growing the non-human organism or a part thereof under conditions which permit the production of valine or a composition comprising valine in said non-human organism or in the culture medium surrounding said non-human organism.

[39303] A further embodiment of the present invention relates to a process for the production of isoleucine, which comprises
[39304] (a) increasing or generating one or more activities selected from the group consisting of cyclin D in an organelle, preferably in plastids or mitochondria, especially in plastids, of a non-human organism or a part thereof, preferably a microorganism, a plant cell, a plant or a part thereof, as compared to a corresponding non-transformed wild type non-human organism or a part thereof; and
[39305] (b) growing the non-human organism or a part thereof under conditions which permit the production of isoleucine or a composition comprising isoleucine in said non-human organism or in the culture medium surrounding said non-human organism.

[39306] A further embodiment of the present invention relates to a process for the production of leucine, which comprises
[39307] (a) increasing or generating one or more activities selected from the group consisting of cyclin D in an organelle, preferably in plastids or mitochondria, especially in plastids, of a non-human organism or a part thereof, preferably a microorganism, a plant cell, a plant or a part thereof, as compared to a corresponding non-transformed wild type non-human organism or a part thereof; and
[39308] (b) growing the non-human organism or a part thereof under conditions which permit the production of leucine or a composition comprising leucine in said non-human organism or in the culture medium surrounding said non-human organism.

[39309] A further embodiment of the present invention relates to a process for the production of valine, which comprises
[39310] (a) increasing or generating one or more activities selected from the group consisting of cyclin D in an organelle, preferably in plastids or mitochondria, especially in plastids, of a non-human organism or a part thereof, preferably a microorganism, a plant cell, a plant or a part thereof, as compared to a corresponding non-transformed wild type non-human organism or a part thereof; and
[39311] (b) growing the non-human organism or a part thereof under conditions which permit the production of valine or a composition comprising valine in said non-human organism or in the culture medium surrounding said non-human organism.

[39312] A further embodiment of the present invention relates to a process for the production of leucine, which comprises
[39313] (a) increasing or generating one or more activities selected from the group consisting of GM02LC5744-protein in an organelle, preferably in plastids or mitochondria, especially in plastids, of a non-human organism or a part thereof, preferably a microorganism, a plant cell, a plant or a part thereof, as compared to a corresponding non-transformed wild type non-human organism or a part thereof; and
[39314] (b) growing the non-human organism or a part thereof under conditions which permit the production of leucine or a composition comprising leucine in said non-human organism or in the culture medium surrounding said non-human organism.

[39315] A further embodiment of the present invention relates to a process for the production of valine, which comprises
[39316] (a) increasing or generating one or more activities selected from the group consisting of agmatinase in an organelle, preferably in plastids or mitochondria, especially in plastids, of a non-human organism or a part thereof, preferably a microorganism, a plant cell, a plant or a part thereof, as compared to a corresponding non-transformed wild type non-human organism or a part thereof; and
[39317] (b) growing the non-human organism or a part thereof under conditions which permit the production of valine or a composition comprising valine in said non-human organism or in the culture medium surrounding said non-human organism.

[39318] A further embodiment of the present invention relates to a process for the production of valine, which comprises
[39319] (a) increasing or generating one or more activities selected from the group consisting of ABC transporter ATP binding component in an organelle, preferably in plastids or mitochondria, especially in plastids, of a non-human organism or a part thereof, preferably a microorganism, a plant cell, a plant or a part thereof, as compared to a corresponding non-transformed wild type non-human organism or a part thereof; and
[39320] (b) growing the non-human organism or a part thereof under conditions which permit the production of valine or a composition comprising valine in said non-human organism or in the culture medium surrounding said non-human organism.

[39321] A further embodiment of the present invention relates to a process for the production of isoleucine, which comprises
[39322] (a) increasing or generating one or more activities selected from the group consisting of flavodoxin in an organelle, preferably in plastids or mitochondria, especially in plastids, of a non-human organism or a part thereof, preferably a microorganism, a plant cell, a plant or a part thereof, as compared to a corresponding non-transformed wild type non-human organism or a part thereof; and
[39323] (b) growing the non-human organism or a part thereof under conditions which permit the production of isoleucine or a composition comprising isoleucine in said non-human organism or in the culture medium surrounding said non-human organism.

[39324] A further embodiment of the present invention relates to a process for the production of leucine, which comprises
[39325] (a) increasing or generating one or more activities selected from the group consisting of flavodoxin in an organelle, preferably in plastids or mitochondria, especially in plastids, of a non-human organism or a part thereof, preferably a microorganism, a plant cell, a plant or a part thereof, as compared to a corresponding non-transformed wild type non-human organism or a part thereof; and
[39326] (b) growing the non-human organism or a part thereof under conditions which permit the production of leucine or a composition comprising leucine in said non-human organism or in the culture medium surrounding said non-human organism.

[39327] A further embodiment of the present invention relates to a process for the production of isoleucine, which comprises
[39328] (a) increasing or generating one or more activities selected from the group consisting of polyphosphate kinase in an organelle, preferably in plastids or mitochondria, especially in plastids, of a non-human organism or a part thereof, preferably a microorganism, a plant cell, a plant or a part thereof, as compared to a corresponding non-transformed wild type non-human organism or a part thereof; and
[39329] (b) growing the non-human organism or a part thereof under conditions which permit the production of isoleucine or a composition comprising isoleucine in said non-human organism or in the culture medium surrounding said non-human organism.

[39330] A further embodiment of the present invention relates to a process for the production of leucine, which comprises
[39331] (a) increasing or generating one or more activities selected from the group consisting of polyphosphate kinase in an organelle, preferably in plastids or mitochondria, especially in plastids, of a non-human organism or a part thereof, preferably a microorganism, a plant cell, a plant or a part thereof, as compared to a corresponding non-transformed wild type non-human organism or a part thereof; and
[39332] (b) growing the non-human organism or a part thereof under conditions which permit the production of leucine or a composition comprising leucine in said non-human organism or in the culture medium surrounding said non-human organism.

[39333] A further embodiment of the present invention relates to a process for the production of valine, which comprises
[39334] (a) increasing or generating one or more activities selected from the group consisting of polyphosphate kinase in an organelle, preferably in plastids or mitochondria, especially in plastids, of a non-human organism or a part thereof, preferably a microorganism, a plant cell, a plant or a part thereof, as compared to a corresponding non-transformed wild type non-human organism or a part thereof; and
[39335] (b) growing the non-human organism or a part thereof under conditions which permit the production of valine or a composition comprising valine in said non-human organism or in the culture medium surrounding said non-human organism.

[39336] A further embodiment of the present invention relates to a process for the production of valine, which comprises
[39337] (a) increasing or generating one or more activities selected from the group consisting of bifunctional protein (phosphoribosyltransferase and regulatory protein) in an organelle, preferably in plastids or mitochondria, especially in plastids, of a non-human organism or a part thereof, preferably a microorganism, a plant cell, a plant or a part thereof, as compared to a corresponding non-transformed wild type non-human organism or a part thereof; and
[39338] (b) growing the non-human organism or a part thereof under conditions which permit the production of valine or a composition comprising valine in said non-human organism or in the culture medium surrounding said non-human organism.

[39339] A further embodiment of the present invention relates to a process for the production of isoleucine, which comprises
[39340] (a) increasing or generating one or more activities selected from the group consisting of urease subunit in an organelle, preferably in plastids or mitochondria, especially in plastids, of a non-human organism or a part thereof, preferably a microorganism, a plant cell, a plant or a part thereof, as compared to a corresponding non-transformed wild type non-human organism or a part thereof; and
[39341] (b) growing the non-human organism or a part thereof under conditions which permit the production of isoleucine or a composition comprising isoleucine in said non-human organism or in the culture medium surrounding said non-human organism.

[39342] A further embodiment of the present invention relates to a process for the production of valine, which comprises
[39343] (a) increasing or generating one or more activities selected from the group consisting of NAD(P)H-quinone oxidoreductase subunit in an organelle, preferably in plastids or mitochondria, especially in plastids, of a non-human organism or a part thereof, preferably a microorganism, a plant cell, a plant or a part thereof, as compared to a corresponding non-transformed wild type non-human organism or a part thereof; and
[39344] (b) growing the non-human organism or a part thereof under conditions which permit the production of valine or a composition comprising valine in said non-human organism or in the culture medium surrounding said non-human organism.

[39345] A further embodiment of the present invention relates to a process for the production of isoleucine, which comprises
[39346] (a) increasing or generating one or more activities selected from the group consisting of oxireductase in an organelle, preferably in plastids or mitochondria, especially in plastids, of a non-human organism or a part thereof, preferably a microorganism, a plant cell, a plant or a part thereof, as compared to a corresponding non-transformed wild type non-human organism or a part thereof; and
[39347] (b) growing the non-human organism or a part thereof under conditions which permit the production of isoleucine or a composition comprising isoleucine in said non-human organism or in the culture medium surrounding said non-human organism.

[39348] A further embodiment of the present invention relates to a process for the production of isoleucine, which comprises
[39349] (a) increasing or generating one or more activities selected from the group consisting of binding-protein-dependent transport systems inner membrane component in an organelle, preferably in plastids or mitochondria, especially in plastids, of a non-human organism or a part thereof, preferably a microorganism, a plant cell, a plant or a part thereof, as compared to a corresponding non-transformed wild type non-human organism or a part thereof; and
[39350] (b) growing the non-human organism or a part thereof under conditions which permit the production of isoleucine or a composition comprising isoleucine in said non-human organism or in the culture medium surrounding said non-human organism.

[39351] A further embodiment of the present invention relates to a process for the production of valine, which comprises
[39352] (a) increasing or generating one or more activities selected from the group consisting of sll1032-protein in an organelle, preferably in plastids or mitochondria, especially in plastids, of a non-human organism or a part thereof, preferably a microorganism, a plant cell, a plant or a part thereof, as compared to a corresponding non-transformed wild type non-human organism or a part thereof; and
[39353] (b) growing the non-human organism or a part thereof under conditions which permit the production of valine or a composition comprising valine in said non-human organism or in the culture medium surrounding said non-human organism.

[39354] A further embodiment of the present invention relates to a process for the production of isoleucine, which comprises
[39355] (a) increasing or generating one or more activities selected from the group consisting of glycogen (starch) synthase in an organelle, preferably in plastids or mitochondria, especially in plastids, of a non-human organism or a part thereof, preferably a microorganism, a plant cell, a plant or a part thereof, as compared to a corresponding non-transformed wild type non-human organism or a part thereof; and
[39356] (b) growing the non-human organism or a part thereof under conditions which permit the production of isoleucine or a composition comprising isoleucine in said non-human organism or in the culture medium surrounding said non-human organism.

[39357] A further embodiment of the present invention relates to a process for the production of leucine, which comprises
[39358] (a) increasing or generating one or more activities selected from the group consisting of glycogen (starch) synthase in an organelle, preferably in plastids or mitochondria, especially in plastids, of a non-human organism or a part thereof, preferably a microorganism, a plant cell, a plant or a part thereof, as compared to a corresponding non-transformed wild type non-human organism or a part thereof; and
[39359] (b) growing the non-human organism or a part thereof under conditions which permit the production of leucine or a composition comprising leucine in said non-human organism or in the culture medium surrounding said non-human organism.

[39360] A further embodiment of the present invention relates to a process for the production of valine, which comprises
[39361] (a) increasing or generating one or more activities selected from the group consisting of glycogen (starch) synthase in an organelle, preferably in plastids or mitochondria, especially in plastids, of a non-human organism or a part thereof, preferably a microorganism, a plant cell, a plant or a part thereof, as compared to a corresponding non-transformed wild type non-human organism or a part thereof; and
[39362] (b) growing the non-human organism or a part thereof under conditions which permit the production of valine or a composition comprising valine in said non-human organism or in the culture medium surrounding said non-human organism.

[39363] A further embodiment of the present invention relates to a process for the production of valine, which comprises
[39364] (a) increasing or generating one or more activities selected from the group consisting of sll1455-protein in an organelle, preferably in plastids or mitochondria, especially in plastids, of a non-human organism or a part thereof, preferably a microorganism, a plant cell, a plant or a part thereof, as compared to a corresponding non-transformed wild type non-human organism or a part thereof; and
[39365] (b) growing the non-human organism or a part thereof under conditions which permit the production of valine or a composition comprising valine in said non-human organism or in the culture medium surrounding said non-human organism.

[39366] A further embodiment of the present invention relates to a process for the production of isoleucine, which comprises
[39367] (a) increasing or generating one or more activities selected from the group consisting of carbamoyl-phosphate synthase subunit in an organelle, preferably in plastids or mitochondria, especially in plastids, of a non-human organism or a part thereof, preferably a microorganism, a plant cell, a plant or a part thereof, as compared to a corresponding non-transformed wild type non-human organism or a part thereof; and
[39368] (b) growing the non-human organism or a part thereof under conditions which permit the production of isoleucine or a composition comprising isoleucine in said non-human organism or in the culture medium surrounding said non-human organism.

[39369] A further embodiment of the present invention relates to a process for the production of leucine, which comprises
[39370] (a) increasing or generating one or more activities selected from the group consisting of carbamoyl-phosphate synthase subunit in an organelle, preferably in plastids or mitochondria, especially in plastids, of a non-human organism or a part thereof, preferably a microorganism, a plant cell, a plant or a part thereof, as compared to a corresponding non-transformed wild type non-human organism or a part thereof; and
[39371] (b) growing the non-human organism or a part thereof under conditions which permit the production of leucine or a composition comprising leucine in said non-human organism or in the culture medium surrounding said non-human organism.

[39372] A further embodiment of the present invention relates to a process for the production of isoleucine, which comprises
[39373] (a) increasing or generating one or more activities selected from the group consisting of sll1761-protein in an organelle, preferably in plastids or mitochondria, especially in plastids, of a non-human organism or a part thereof, preferably a microorganism, a plant cell, a plant or a part thereof, as compared to a corresponding non-transformed wild type non-human organism or a part thereof; and
[39374] (b) growing the non-human organism or a part thereof under conditions which permit the production of isoleucine or a composition comprising isoleucine in said non-human organism or in the culture medium surrounding said non-human organism.

[39375] A further embodiment of the present invention relates to a process for the production of leucine, which comprises
[39376] (a) increasing or generating one or more activities selected from the group consisting of sll1761-protein in an organelle, preferably in plastids or mitochondria, especially in plastids, of a non-human organism or a part thereof, preferably a microorganism, a plant cell, a plant or a part thereof, as compared to a corresponding non-transformed wild type non-human organism or a part thereof; and
[39377] (b) growing the non-human organism or a part thereof under conditions which permit the production of leucine or a composition comprising leucine in said non-human organism or in the culture medium surrounding said non-human organism.

[39378] A further embodiment of the present invention relates to a process for the production of isoleucine, which comprises
[39379] (a) increasing or generating one or more activities selected from the group consisting of adenylate kinase in an organelle, preferably in plastids or mitochondria, especially in plastids, of a non-human organism or a part thereof, preferably a microorganism, a plant cell, a plant or a part thereof, as compared to a corresponding non-transformed wild type non-human organism or a part thereof; and
[39380] (b) growing the non-human organism or a part thereof under conditions which permit the production of isoleucine or a composition comprising isoleucine in said non-human organism or in the culture medium surrounding said non-human organism.

[39381] A further embodiment of the present invention relates to a process for the production of leucine, which comprises
[39382] (a) increasing or generating one or more activities selected from the group consisting of adenylate kinase in an organelle, preferably in plastids or mitochondria, especially in plastids, of a non-human organism or a part thereof, preferably a microorganism, a plant cell, a plant or a part thereof, as compared to a corresponding non-transformed wild type non-human organism or a part thereof; and
[39383] (b) growing the non-human organism or a part thereof under conditions which permit the production of leucine or a composition comprising leucine in said non-human organism or in the culture medium surrounding said non-human organism.

[39384] A further embodiment of the present invention relates to a process for the production of valine, which comprises
[39385] (a) increasing or generating one or more activities selected from the group consisting of adenylate kinase in an organelle, preferably in plastids or mitochondria, especially in plastids, of a non-human organism or a part thereof, preferably a microorganism, a plant cell, a plant or a part thereof, as compared to a corresponding non-transformed wild type non-human organism or a part thereof; and
[39386] (b) growing the non-human organism or a part thereof under conditions which permit the production of valine or a composition comprising valine in said non-human organism or in the culture medium surrounding said non-human organism.

[39387] A further embodiment of the present invention relates to a process for the production of isoleucine, which comprises
[39388] (a) increasing or generating one or more activities selected from the group consisting of acyl transferase in an organelle, preferably in plastids or mitochondria, especially in plastids, of a non-human organism or a part thereof, preferably a microorganism, a plant cell, a plant or a part thereof, as compared to a corresponding non-transformed wild type non-human organism or a part thereof; and
[39389] (b) growing the non-human organism or a part thereof under conditions which permit the production of isoleucine or a composition comprising isoleucine in said non-human organism or in the culture medium surrounding said non-human organism.

[39390] A further embodiment of the present invention relates to a process for the production of valine, which comprises
[39391] (a) increasing or generating one or more activities selected from the group consisting of ferredoxin in an organelle, preferably in plastids or mitochondria, especially in plastids, of a non-human organism or a part thereof, preferably a microorganism, a plant cell, a plant or a part thereof, as compared to a corresponding non-transformed wild type non-human organism or a part thereof; and
[39392] (b) growing the non-human organism or a part thereof under conditions which permit the production of valine or a composition comprising valine in said non-human organism or in the culture medium surrounding said non-human organism.

[39393] A further embodiment of the present invention relates to a process for the production of isoleucine, which comprises
[39394] (a) increasing or generating one or more activities selected from the group consisting of precorrin methylase in an organelle, preferably in plastids or mitochondria, especially in plastids, of a non-human organism or a part thereof, preferably a microorganism, a plant cell, a plant or a part thereof, as compared to a corresponding non-transformed wild type non-human organism or a part thereof; and
[39395] (b) growing the non-human organism or a part thereof under conditions which permit the production of isoleucine or a composition comprising isoleucine in said non-human organism or in the culture medium surrounding said non-human organism.

[39396] A further embodiment of the present invention relates to a process for the production of leucine, which comprises
[39397] (a) increasing or generating one or more activities selected from the group consisting of precorrin methylase in an organelle, preferably in plastids or mitochondria, especially in plastids, of a non-human organism or a part thereof, preferably a microorganism, a plant cell, a plant or a part thereof, as compared to a corresponding non-transformed wild type non-human organism or a part thereof; and
[39398] (b) growing the non-human organism or a part thereof under conditions which permit the production of leucine or a composition comprising leucine in said non-human organism or in the culture medium surrounding said non-human organism.

[39399] A further embodiment of the present invention relates to a process for the production of valine, which comprises
[39400] (a) increasing or generating one or more activities selected from the group consisting of precorrin methylase in an organelle, preferably in plastids or mitochondria, especially in plastids, of a non-human organism or a part thereof, preferably a microorganism, a plant cell, a plant or a part thereof, as compared to a corresponding non-transformed wild type non-human organism or a part thereof; and
[39401] (b) growing the non-human organism or a part thereof under conditions which permit the production of valine or a composition comprising valine in said non-human organism or in the culture medium surrounding said non-human organism.

[39402] A further embodiment of the present invention relates to a process for the production of isoleucine, which comprises
[39403] (a) increasing or generating one or more activities selected from the group consisting of malate dehydrogenase in an organelle, preferably in plastids or mitochondria, especially in plastids, of a non-human organism or a part thereof, preferably a microorganism, a plant cell, a plant or a part thereof, as compared to a corresponding non-transformed wild type non-human organism or a part thereof; and
[39404] (b) growing the non-human organism or a part thereof under conditions which permit the production of isoleucine or a composition comprising isoleucine in said non-human organism or in the culture medium surrounding said non-human organism.

[39405] A further embodiment of the present invention relates to a process for the production of isoleucine, which comprises
[39406] (a) increasing or generating one or more activities selected from the group consisting of malate dehydrogenase in an organelle, preferably in plastids or mitochondria, especially in plastids, of a non-human organism or a part thereof, preferably a microorganism, a plant cell, a plant or a part thereof, as compared to a corresponding non-transformed wild type non-human organism or a part thereof; and
[39407] (b) growing the non-human organism or a part thereof under conditions which permit the production of isoleucine or a composition comprising isoleucine in said non-human organism or in the culture medium surrounding said non-human organism.

[39408] A further embodiment of the present invention relates to a process for the production of leucine, which comprises
[39409] (a) increasing or generating one or more activities selected from the group consisting of malate dehydrogenase in an organelle, preferably in plastids or mitochondria, especially in plastids, of a non-human organism or a part thereof, preferably a microorganism, a plant cell, a plant or a part thereof, as compared to a corresponding non-transformed wild type non-human organism or a part thereof; and
[39410] (b) growing the non-human organism or a part thereof under conditions which permit the production of leucine or a composition comprising leucine in said non-human organism or in the culture medium surrounding said non-human organism.

[39411] A further embodiment of the present invention relates to a process for the production of leucine, which comprises
[39412] (a) increasing or generating one or more activities selected from the group consisting of malate dehydrogenase in an organelle, preferably in plastids or mitochondria, especially in plastids, of a non-human organism or a part thereof, preferably a microorganism, a plant cell, a plant or a part thereof, as compared to a corresponding non-transformed wild type non-human organism or a part thereof; and
[39413] (b) growing the non-human organism or a part thereof under conditions which permit the production of leucine or a composition comprising leucine in said non-human organism or in the culture medium surrounding said non-human organism.

[39414] A further embodiment of the present invention relates to a process for the production of valine, which comprises
[39415] (a) increasing or generating one or more activities selected from the group consisting of malate dehydrogenase in an organelle, preferably in plastids or mitochondria, especially in plastids, of a non-human organism or a part thereof, preferably a microorganism, a plant cell, a plant or a part thereof, as compared to a corresponding non-transformed wild type non-human organism or a part thereof; and
[39416] (b) growing the non-human organism or a part thereof under conditions which permit the production of valine or a composition comprising valine in said non-human organism or in the culture medium surrounding said non-human organism.

[39417] A further embodiment of the present invention relates to a process for the production of valine, which comprises
[39418] (a) increasing or generating one or more activities selected from the group consisting of malate dehydrogenase in an organelle, preferably in plastids or mitochondria, especially in plastids, of a non-human organism or a part thereof, preferably a microorganism, a plant cell, a plant or a part thereof, as compared to a corresponding non-transformed wild type non-human organism or a part thereof; and
[39419] (b) growing the non-human organism or a part thereof under conditions which permit the production of valine or a composition comprising valine in said non-human organism or in the culture medium surrounding said non-human organism.

[39420] A further embodiment of the present invention relates to a process for the production of isoleucine, which comprises
[39421] (a) increasing or generating one or more activities selected from the group consisting of geranylgeranyl pyrophosphate synthase in an organelle, preferably in plastids or mitochondria, especially in plastids, of a non-human organism or a part thereof, preferably a microorganism, a plant cell, a plant or a part thereof, as compared to a corresponding non-transformed wild type non-human organism or a part thereof; and
[39422] (b) growing the non-human organism or a part thereof under conditions which permit the production of isoleucine or a composition comprising isoleucine in said non-human organism or in the culture medium surrounding said non-human organism.

[39423] A further embodiment of the present invention relates to a process for the production of leucine, which comprises
[39424] (a) increasing or generating one or more activities selected from the group consisting of geranylgeranyl pyrophosphate synthase in an organelle, preferably in plastids or mitochondria, especially in plastids, of a non-human organism or a part thereof, preferably a microorganism, a plant cell, a plant or a part thereof, as compared to a corresponding non-transformed wild type non-human organism or a part thereof; and
[39425] (b) growing the non-human organism or a part thereof under conditions which permit the production of leucine or a composition comprising leucine in said non-human organism or in the culture medium surrounding said non-human organism.

[39426] A further embodiment of the present invention relates to a process for the production of valine, which comprises
[39427] (a) increasing or generating one or more activities selected from the group consisting of geranylgeranyl pyrophosphate synthase in an organelle, preferably in plastids or mitochondria, especially in plastids, of a non-human organism or a part thereof, preferably a microorganism, a plant cell, a plant or a part thereof, as compared to a corresponding non-transformed wild type non-human organism or a part thereof; and
[39428] (b) growing the non-human organism or a part thereof under conditions which permit the production of valine or a composition comprising valine in said non-human organism or in the culture medium surrounding said non-human organism.

[39429] A further embodiment of the present invention relates to a process for the production of isoleucine, which comprises
[39430] (a) increasing or generating one or more activities selected from the group consisting of iron(III) dicitrate-binding protein in an organelle, preferably in plastids or mitochondria, especially in plastids, of a non-human organism or a part thereof, preferably a microorganism, a plant cell, a plant or a part thereof, as compared to a corresponding non-transformed wild type non-human organism or a part thereof; and
[39431] (b) growing the non-human organism or a part thereof under conditions which permit the production of isoleucine or a composition comprising isoleucine in said non-human organism or in the culture medium surrounding said non-human organism.

[39432] A further embodiment of the present invention relates to a process for the production of isoleucine, which comprises
[39433] (a) increasing or generating one or more activities selected from the group consisting of Na+/K+ transporter in an organelle, preferably in plastids or mitochondria, especially in plastids, of a non-human organism or a part thereof, preferably a microorganism, a plant cell, a plant or a part thereof, as compared to a corresponding non-transformed wild type non-human organism or a part thereof; and
[39434] (b) growing the non-human organism or a part thereof under conditions which permit the production of isoleucine or a composition comprising isoleucine in said non-human organism or in the culture medium surrounding said non-human organism.

[39435] A further embodiment of the present invention relates to a process for the production of leucine, which comprises
[39436] (a) increasing or generating one or more activities selected from the group consisting of Na+/K+ transporter in an organelle, preferably in plastids or mitochondria, especially in plastids, of a non-human organism or a part thereof, preferably a microorganism, a plant cell, a plant or a part thereof, as compared to a corresponding non-transformed wild type non-human organism or a part thereof; and
[39437] (b) growing the non-human organism or a part thereof under conditions which permit the production of leucine or a composition comprising leucine in said non-human organism or in the culture medium surrounding said non-human organism.

[39438] A further embodiment of the present invention relates to a process for the production of valine, which comprises
[39439] (a) increasing or generating one or more activities selected from the group consisting of 3-isopropylmalate dehydrogenase in an organelle, preferably in plastids or mitochondria, especially in plastids, of a non-human organism or a part thereof, preferably a microorganism, a plant cell, a plant or a part thereof, as compared to a corresponding non-transformed wild type non-human organism or a part thereof; and
[39440] (b) growing the non-human organism or a part thereof under conditions which permit the production of valine or a composition comprising valine in said non-human organism or in the culture medium surrounding said non-human organism.

[39441] A further embodiment of the present invention relates to a process for the production of isoleucine, which comprises
[39442] (a) increasing or generating one or more activities selected from the group consisting of photosystem II protein in an organelle, preferably in plastids or mitochondria, especially in plastids, of a non-human organism or a part thereof, preferably a microorganism, a plant cell, a plant or a part thereof, as compared to a corresponding non-transformed wild type non-human organism or a part thereof; and
[39443] (b) growing the non-human organism or a part thereof under conditions which permit the production of isoleucine or a composition comprising isoleucine in said non-human organism or in the culture medium surrounding said non-human organism.

[39444] A further embodiment of the present invention relates to a process for the production of leucine, which comprises
[39445] (a) increasing or generating one or more activities selected from the group consisting of photosystem II protein in an organelle, preferably in plastids or mitochondria, especially in plastids, of a non-human organism or a part thereof, preferably a microorganism, a plant cell, a plant or a part thereof, as compared to a corresponding non-transformed wild type non-human organism or a part thereof; and
[39446] (b) growing the non-human organism or a part thereof under conditions which permit the production of leucine or a composition comprising leucine in said non-human organism or in the culture medium surrounding said non-human organism.

[39447] A further embodiment of the present invention relates to a process for the production of valine, which comprises
[39448] (a) increasing or generating one or more activities selected from the group consisting of photosystem II protein in an organelle, preferably in plastids or mitochondria, especially in plastids, of a non-human organism or a part thereof, preferably a microorganism, a plant cell, a plant or a part thereof, as compared to a corresponding non-transformed wild type non-human organism or a part thereof; and
[39449] (b) growing the non-human organism or a part thereof under conditions which permit the production of valine or a composition comprising valine in said non-human organism or in the culture medium surrounding said non-human organism.

[39450] A further embodiment of the present invention relates to a process for the production of valine, which comprises
[39451] (a) increasing or generating one or more activities selected from the group consisting of phosphoadenosine phosphosulfate reductase in an organelle, preferably in plastids or mitochondria, especially in plastids, of a non-human organism or a part thereof, preferably a microorganism, a plant cell, a plant or a part thereof, as compared to a corresponding non-transformed wild type non-human organism or a part thereof; and
[39452] (b) growing the non-human organism or a part thereof under conditions which permit the production of valine or a composition comprising valine in said non-human organism or in the culture medium surrounding said non-human organism.

[39453] A further embodiment of the present invention relates to a process for the production of valine, which comprises
[39454] (a) increasing or generating one or more activities selected from the group consisting of riboflavin biosynthesis protein in an organelle, preferably in plastids or mitochondria, especially in plastids, of a non-human organism or a part thereof, preferably a microorganism, a plant cell, a plant or a part thereof, as compared to a corresponding non-transformed wild type non-human organism or a part thereof; and
[39455] (b) growing the non-human organism or a part thereof under conditions which permit the production of valine or a composition comprising valine in said non-human organism or in the culture medium surrounding said non-human organism.

[39456] A further embodiment of the present invention relates to a process for the production of isoleucine, which comprises
[39457] (a) increasing or generating one or more activities selected from the group consisting of threonine dehydratase in an organelle, preferably in plastids or mitochondria, especially in plastids, of a non-human organism or a part thereof, preferably a microorganism, a plant cell, a plant or a part thereof, as compared to a corresponding non-transformed wild type non-human organism or a part thereof; and
[39458] (b) growing the non-human organism or a part thereof under conditions which permit the production of isoleucine or a composition comprising isoleucine in said non-human organism or in the culture medium surrounding said non-human organism.

[39459] A further embodiment of the present invention relates to a process for the production of isoleucine, which comprises
[39460] (a) increasing or generating one or more activities selected from the group consisting of threonine dehydratase in an organelle, preferably in plastids or mitochondria, especially in plastids, of a non-human organism or a part thereof, preferably a microorganism, a plant cell, a plant or a part thereof, as compared to a corresponding non-transformed wild type non-human organism or a part thereof; and
[39461] (b) growing the non-human organism or a part thereof under conditions which permit the production of isoleucine or a composition comprising isoleucine in said non-human organism or in the culture medium surrounding said non-human organism.

[39462] A further embodiment of the present invention relates to a process for the production of leucine, which comprises
[39463] (a) increasing or generating one or more activities selected from the group consisting of threonine dehydratase in an organelle, preferably in plastids or mitochondria, especially in plastids, of a non-human organism or a part thereof, preferably a microorganism, a plant cell, a plant or a part thereof, as compared to a corresponding non-transformed wild type non-human organism or a part thereof; and
[39464] (b) growing the non-human organism or a part thereof under conditions which permit the production of leucine or a composition comprising leucine in said non-human organism or in the culture medium surrounding said non-human organism.

[39465] A further embodiment of the present invention relates to a process for the production of leucine, which comprises
[39466] (a) increasing or generating one or more activities selected from the group consisting of threonine dehydratase in an organelle, preferably in plastids or mitochondria, especially in plastids, of a non-human organism or a part thereof, preferably a microorganism, a plant cell, a plant or a part thereof, as compared to a corresponding non-transformed wild type non-human organism or a part thereof; and
[39467] (b) growing the non-human organism or a part thereof under conditions which permit the production of leucine or a composition comprising leucine in said non-human organism or in the culture medium surrounding said non-human organism.

[39468] A further embodiment of the present invention relates to a process for the production of valine, which comprises
[39469] (a) increasing or generating one or more activities selected from the group consisting of threonine dehydratase in an organelle, preferably in plastids or mitochondria, especially in plastids, of a non-human organism or a part thereof, preferably a microorganism, a plant cell, a plant or a part thereof, as compared to a corresponding non-transformed wild type non-human organism or a part thereof; and
[39470] (b) growing the non-human organism or a part thereof under conditions which permit the production of valine or a composition comprising valine in said non-human organism or in the culture medium surrounding said non-human organism.

[39471] A further embodiment of the present invention relates to a process for the production of valine, which comprises
[39472] (a) increasing or generating one or more activities selected from the group consisting of threonine dehydratase in an organelle, preferably in plastids or mitochondria, especially in plastids, of a non-human organism or a part thereof, preferably a microorganism, a plant cell, a plant or a part thereof, as compared to a corresponding non-transformed wild type non-human organism or a part thereof; and
[39473] (b) growing the non-human organism or a part thereof under conditions which permit the production of valine or a composition comprising valine in said non-human organism or in the culture medium surrounding said non-human organism.

[39474] A further embodiment of the present invention relates to a process for the production of valine, which comprises
[39475] (a) increasing or generating one or more activities selected from the group consisting of short-chain alcohol dehydrogenase family in an organelle, preferably in plastids or mitochondria, especially in plastids, of a non-human organism or a part thereof, preferably a microorganism, a plant cell, a plant or a part thereof, as compared to a corresponding non-transformed wild type non-human organism or a part thereof; and
[39476] (b) growing the non-human organism or a part thereof under conditions which permit the production of valine or a composition comprising valine in said non-human organism or in the culture medium surrounding said non-human organism.

[39477] A further embodiment of the present invention relates to a process for the production of isoleucine, which comprises
[39478] (a) increasing or generating one or more activities selected from the group consisting of Sec-independent protein translocase subunit in an organelle, preferably in plastids or mitochondria, especially in plastids, of a non-human organism or a part thereof, preferably a microorganism, a plant cell, a plant or a part thereof, as compared to a corresponding non-transformed wild type non-human organism or a part thereof; and
[39479] (b) growing the non-human organism or a part thereof under conditions which permit the production of isoleucine or a composition comprising isoleucine in said non-human organism or in the culture medium surrounding said non-human organism.

[39480] A further embodiment of the present invention relates to a process for the production of leucine, which comprises
[39481] (a) increasing or generating one or more activities selected from the group consisting of Sec-independent protein translocase subunit in an organelle, preferably in plastids or mitochondria, especially in plastids, of a non-human organism or a part thereof, preferably a microorganism, a plant cell, a plant or a part thereof, as compared to a corresponding non-transformed wild type non-human organism or a part thereof; and
[39482] (b) growing the non-human organism or a part thereof under conditions which permit the production of leucine or a composition comprising leucine in said non-human organism or in the culture medium surrounding said non-human organism.

[39483] A further embodiment of the present invention relates to a process for the production of valine, which comprises
[39484] (a) increasing or generating one or more activities selected from the group consisting of Sec-independent protein translocase subunit in an organelle, preferably in plastids or mitochondria, especially in plastids, of a non-human organism or a part thereof, preferably a microorganism, a plant cell, a plant or a part thereof, as compared to a corresponding non-transformed wild type non-human organism or a part thereof; and
[39485] (b) growing the non-human organism or a part thereof under conditions which permit the production of valine or a composition comprising valine in said non-human organism or in the culture medium surrounding said non-human organism.

[39486] A further embodiment of the present invention relates to a process for the production of isoleucine, which comprises
[39487] (a) increasing or generating one or more activities selected from the group consisting of 2-isopropylmalate synthase in an organelle, preferably in plastids or mitochondria, especially in plastids, of a non-human organism or a part thereof, preferably a microorganism, a plant cell, a plant or a part thereof, as compared to a corresponding non-transformed wild type non-human organism or a part thereof; and
[39488] (b) growing the non-human organism or a part thereof under conditions which permit the production of isoleucine or a composition comprising isoleucine in said non-human organism or in the culture medium surrounding said non-human organism.

[39489] A further embodiment of the present invention relates to a process for the production of leucine, which comprises
[39490] (a) increasing or generating one or more activities selected from the group consisting of 2-isopropylmalate synthase in an organelle, preferably in plastids or mitochondria, especially in plastids, of a non-human organism or a part thereof, preferably a microorganism, a plant cell, a plant or a part thereof, as compared to a corresponding non-transformed wild type non-human organism or a part thereof; and
[39491] (b) growing the non-human organism or a part thereof under conditions which permit the production of leucine or a composition comprising leucine in said non-human organism or in the culture medium surrounding said non-human organism.

[39492] A further embodiment of the present invention relates to a process for the production of isoleucine, which comprises
[39493] (a) increasing or generating one or more activities selected from the group consisting of TTC1386-protein in an organelle, preferably in plastids or mitochondria, especially in plastids, of a non-human organism or a part thereof, preferably a microorganism, a plant cell, a plant or a part thereof, as compared to a corresponding non-transformed wild type non-human organism or a part thereof; and
[39494] (b) growing the non-human organism or a part thereof under conditions which permit the production of isoleucine or a composition comprising isoleucine in said non-human organism or in the culture medium surrounding said non-human organism.

[39495] A further embodiment of the present invention relates to a process for the production of leucine, which comprises
[39496] (a) increasing or generating one or more activities selected from the group consisting of TTC1386-protein in an organelle, preferably in plastids or mitochondria, especially in plastids, of a non-human organism or a part thereof, preferably a microorganism, a plant cell, a plant or a part thereof, as compared to a corresponding non-transformed wild type non-human organism or a part thereof; and
[39497] (b) growing the non-human organism or a part thereof under conditions which permit the production of leucine or a composition comprising leucine in said non-human organism or in the culture medium surrounding said non-human organism.

[39498] A further embodiment of the present invention relates to a process for the production of valine, which comprises
[39499] (a) increasing or generating one or more activities selected from the group consisting of TTC1386-protein in an organelle, preferably in plastids or mitochondria, especially in plastids, of a non-human organism or a part thereof, preferably a microorganism, a plant cell, a plant or a part thereof, as compared to a corresponding non-transformed wild type non-human organism or a part thereof; and
[39500] (b) growing the non-human organism or a part thereof under conditions which permit the production of valine or a composition comprising valine in said non-human organism or in the culture medium surrounding said non-human organism.

[39501] A further embodiment of the present invention relates to a process for the production of isoleucine, which comprises
[39502] (a) increasing or generating one or more activities selected from the group consisting of homocitrate synthase in an organelle, preferably in plastids or mitochondria, especially in plastids, of a non-human organism or a part thereof, preferably a microorganism, a plant cell, a plant or a part thereof, as compared to a corresponding non-transformed wild type non-human organism or a part thereof; and
[39503] (b) growing the non-human organism or a part thereof under conditions which permit the production of isoleucine or a composition comprising isoleucine in said non-human organism or in the culture medium surrounding said non-human organism.

[39504] A further embodiment of the present invention relates to a process for the production of leucine, which comprises
[39505] (a) increasing or generating one or more activities selected from the group consisting of homocitrate synthase in an organelle, preferably in plastids or mitochondria, especially in plastids, of a non-human organism or a part thereof, preferably a microorganism, a plant cell, a plant or a part thereof, as compared to a corresponding non-transformed wild type non-human organism or a part thereof; and
[39506] (b) growing the non-human organism or a part thereof under conditions which permit the production of leucine or a composition comprising leucine in said non-human organism or in the culture medium surrounding said non-human organism.

[39507] A further embodiment of the present invention relates to a process for the production of valine, which comprises
[39508] (a) increasing or generating one or more activities selected from the group consisting of homocitrate synthase in an organelle, preferably in plastids or mitochondria, especially in plastids, of a non-human organism or a part thereof, preferably a microorganism, a plant cell, a plant or a part thereof, as compared to a corresponding non-transformed wild type non-human organism or a part thereof; and
[39509] (b) growing the non-human organism or a part thereof under conditions which permit the production of valine or a composition comprising valine in said non-human organism or in the culture medium surrounding said non-human organism.

[39510] A further embodiment of the present invention relates to a process for the production of leucine, which comprises
[39511] (a) increasing or generating one or more activities selected from the group consisting of YAL013W-protein in an organelle, preferably in plastids or mitochondria, especially in plastids, of a non-human organism or a part thereof, preferably a microorganism, a plant cell, a plant or a part thereof, as compared to a corresponding non-transformed wild type non-human organism or a part thereof; and
[39512] (b) growing the non-human organism or a part thereof under conditions which permit the production of leucine or a composition comprising leucine in said non-human organism or in the culture medium surrounding said non-human organism.

[39513] A further embodiment of the present invention relates to a process for the production of valine, which comprises
[39514] (a) increasing or generating one or more activities selected from the group consisting of cell division control protein in an organelle, preferably in plastids or mitochondria, especially in plastids, of a non-human organism or a part thereof, preferably a microorganism, a plant cell, a plant or a part thereof, as compared to a corresponding non-transformed wild type non-human organism or a part thereof; and
[39515] (b) growing the non-human organism or a part thereof under conditions which permit the production of valine or a composition comprising valine in said non-human organism or in the culture medium surrounding said non-human organism.

[39516] A further embodiment of the present invention relates to a process for the production of isoleucine, which comprises
[39517] (a) increasing or generating one or more activities selected from the group consisting of phosphoglycerate kinase in an organelle, preferably in plastids or mitochondria, especially in plastids, of a non-human organism or a part thereof, preferably a microorganism, a plant cell, a plant or a part thereof, as compared to a corresponding non-transformed wild type non-human organism or a part thereof; and
[39518] (b) growing the non-human organism or a part thereof under conditions which permit the production of isoleucine or a composition comprising isoleucine in said non-human organism or in the culture medium surrounding said non-human organism.

[39519] A further embodiment of the present invention relates to a process for the production of leucine, which comprises
[39520] (a) increasing or generating one or more activities selected from the group consisting of phosphoglycerate kinase in an organelle, preferably in plastids or mitochondria, especially in plastids, of a non-human organism or a part thereof, preferably a microorganism, a plant cell, a plant or a part thereof, as compared to a corresponding non-transformed wild type non-human organism or a part thereof; and
[39521] (b) growing the non-human organism or a part thereof under conditions which permit the production of leucine or a composition comprising leucine in said non-human organism or in the culture medium surrounding said non-human organism.

[39522] A further embodiment of the present invention relates to a process for the production of isoleucine, which comprises
[39523] (a) increasing or generating one or more activities selected from the group consisting of branched-chain amino acid permease in an organelle, preferably in plastids or mitochondria, especially in plastids, of a non-human organism or a part thereof, preferably a microorganism, a plant cell, a plant or a part thereof, as compared to a corresponding non-transformed wild type non-human organism or a part thereof; and
[39524] (b) growing the non-human organism or a part thereof under conditions which permit the production of isoleucine or a composition comprising isoleucine in said non-human organism or in the culture medium surrounding said non-human organism.

[39525] A further embodiment of the present invention relates to a process for the production of valine, which comprises
[39526] (a) increasing or generating one or more activities selected from the group consisting of branched-chain amino acid permease in an organelle, preferably in plastids or mitochondria, especially in plastids, of a non-human organism or a part thereof, preferably a microorganism, a plant cell, a plant or a part thereof, as compared to a corresponding non-transformed wild type non-human organism or a part thereof; and
[39527] (b) growing the non-human organism or a part thereof under conditions which permit the production of valine or a composition comprising valine in said non-human organism or in the culture medium surrounding said non-human organism.

[39528] A further embodiment of the present invention relates to a process for the production of valine, which comprises
[39529] (a) increasing or generating one or more activities selected from the group consisting of ydr183w-protein in an organelle, preferably in plastids or mitochondria, especially in plastids, of a non-human organism or a part thereof, preferably a microorganism, a plant cell, a plant or a part thereof, as compared to a corresponding non-transformed wild type non-human organism or a part thereof; and
[39530] (b) growing the non-human organism or a part thereof under conditions which permit the production of valine or a composition comprising valine in said non-human organism or in the culture medium surrounding said non-human organism.

[39531] A further embodiment of the present invention relates to a process for the production of isoleucine, which comprises
[39532] (a) increasing or generating one or more activities selected from the group consisting of hexose transporter in an organelle, preferably in plastids or mitochondria, especially in plastids, of a non-human organism or a part thereof, preferably a microorganism, a plant cell, a plant or a part thereof, as compared to a corresponding non-transformed wild type non-human organism or a part thereof; and
[39533] (b) growing the non-human organism or a part thereof under conditions which permit the production of isoleucine or a composition comprising isoleucine in said non-human organism or in the culture medium surrounding said non-human organism.

[39534] A further embodiment of the present invention relates to a process for the production of isoleucine, which comprises
[39535] (a) increasing or generating one or more activities selected from the group consisting of ygl237c-protein in an organelle, preferably in plastids or mitochondria, especially in plastids, of a non-human organism or a part thereof, preferably a microorganism, a plant cell, a plant or a part thereof, as compared to a corresponding non-transformed wild type non-human organism or a part thereof; and
[39536] (b) growing the non-human organism or a part thereof under conditions which permit the production of isoleucine or a composition comprising isoleucine in said non-human organism or in the culture medium surrounding said non-human organism.

[39537] A further embodiment of the present invention relates to a process for the production of leucine, which comprises
[39538] (a) increasing or generating one or more activities selected from the group consisting of ygl237c-protein in an organelle, preferably in plastids or mitochondria, especially in plastids, of a non-human organism or a part thereof, preferably a microorganism, a plant cell, a plant or a part thereof, as compared to a corresponding non-transformed wild type non-human organism or a part thereof; and
[39539] (b) growing the non-human organism or a part thereof under conditions which permit the production of leucine or a composition comprising leucine in said non-human organism or in the culture medium surrounding said non-human organism.

[39540] A further embodiment of the present invention relates to a process for the production of leucine, which comprises
[39541] (a) increasing or generating one or more activities selected from the group consisting of YGR193C-protein in an organelle, preferably in plastids or mitochondria, especially in plastids, of a non-human organism or a part thereof, preferably a microorganism, a plant cell, a plant or a part thereof, as compared to a corresponding non-transformed wild type non-human organism or a part thereof; and
[39542] (b) growing the non-human organism or a part thereof under conditions which permit the production of leucine or a composition comprising leucine in said non-human organism or in the culture medium surrounding said non-human organism.

[39543] A further embodiment of the present invention relates to a process for the production of isoleucine, which comprises
[39544] (a) increasing or generating one or more activities selected from the group consisting of yhr006w-protein in an organelle, preferably in plastids or mitochondria, especially in plastids, of a non-human organism or a part thereof, preferably a microorganism, a plant cell, a plant or a part thereof, as compared to a corresponding non-transformed wild type non-human organism or a part thereof; and
[39545] (b) growing the non-human organism or a part thereof under conditions which permit the production of isoleucine or a composition comprising isoleucine in said non-human organism or in the culture medium surrounding said non-human organism.

[39546] A further embodiment of the present invention relates to a process for the production of leucine, which comprises
[39547] (a) increasing or generating one or more activities selected from the group consisting of yhr006w-protein in an organelle, preferably in plastids or mitochondria, especially in plastids, of a non-human organism or a part thereof, preferably a microorganism, a plant cell, a plant or a part thereof, as compared to a corresponding non-transformed wild type non-human organism or a part thereof; and
[39548] (b) growing the non-human organism or a part thereof under conditions which permit the production of leucine or a composition comprising leucine in said non-human organism or in the culture medium surrounding said non-human organism.

[39549] A further embodiment of the present invention relates to a process for the production of isoleucine, which comprises
[39550] (a) increasing or generating one or more activities selected from the group consisting of H/ACA ribonucleoprotein complex subunit 3 in an organelle, preferably in plastids or mitochondria, especially in plastids, of a non-human organism or a part thereof, preferably a microorganism, a plant cell, a plant or a part thereof, as compared to a corresponding non-transformed wild type non-human organism or a part thereof; and
[39551] (b) growing the non-human organism or a part thereof under conditions which permit the production of isoleucine or a composition comprising isoleucine in said non-human organism or in the culture medium surrounding said non-human organism.

[39552] A further embodiment of the present invention relates to a process for the production of leucine, which comprises
[39553] (a) increasing or generating one or more activities selected from the group consisting of H/ACA ribonucleoprotein complex subunit 3 in an organelle, preferably in plastids or mitochondria, especially in plastids, of a non-human organism or a part thereof, preferably a microorganism, a plant cell, a plant or a part thereof, as compared to a corresponding non-transformed wild type non-human organism or a part thereof; and
[39554] (b) growing the non-human organism or a part thereof under conditions which permit the production of leucine or a composition comprising leucine in said non-human organism or in the culture medium surrounding said non-human organism.

[39555] A further embodiment of the present invention relates to a process for the production of isoleucine, which comprises
[39556] (a) increasing or generating one or more activities selected from the group consisting of glycerol-3-phosphate dehydrogenase in an organelle, preferably in plastids or mitochondria, especially in plastids, of a non-human organism or a part thereof, preferably a microor ganism, a plant cell, a plant or a part thereof, as compared to a corresponding non-transformed wild type non-human organism or a part thereof; and
[39557] (b) growing the non-human organism or a part thereof under conditions which permit the production of isoleucine or a composition comprising isoleucine in said non-human organism or in the culture medium surrounding said non-human organism.

[39558] A further embodiment of the present invention relates to a process for the production of leucine, which comprises
[39559] (a) increasing or generating one or more activities selected from the group consisting of glycerol-3-phosphate dehydrogenase in an organelle, preferably in plastids or mitochondria, especially in plastids, of a non-human organism or a part thereof, preferably a microorganism, a plant cell, a plant or a part thereof, as compared to a corresponding non-transformed wild type non-human organism or a part thereof; and
[39560] (b) growing the non-human organism or a part thereof under conditions which permit the production of leucine or a composition comprising leucine in said non-human organism or in the culture medium surrounding said non-human organism.

[39561] A further embodiment of the present invention relates to a process for the production of isoleucine, which comprises
[39562] (a) increasing or generating one or more activities selected from the group consisting of homoserine dehydrogenase in an organelle, preferably in plastids or mitochondria, especially in plastids, of a non-human organism or a part thereof, preferably a microorganism, a plant cell, a plant or a part thereof, as compared to a corresponding non-transformed wild type non-human organism or a part thereof; and
[39563] (b) growing the non-human organism or a part thereof under conditions which permit the production of isoleucine or a composition comprising isoleucine in said non-human organism or in the culture medium surrounding said non-human organism.

[39564] A further embodiment of the present invention relates to a process for the production of isoleucine, which comprises
[39565] (a) increasing or generating one or more activities selected from the group consisting of branched chain aminotransferase in an organelle, preferably in plastids or mitochondria, especially in plastids, of a non-human organism or a part thereof, preferably a microorganism, a plant cell, a plant or a part thereof, as compared to a corresponding non-transformed wild type non-human organism or a part thereof; and
[39566] (b) growing the non-human organism or a part thereof under conditions which permit the production of isoleucine or a composition comprising isoleucine in said non-human organism or in the culture medium surrounding said non-human organism.

[39567] A further embodiment of the present invention relates to a process for the production of valine, which comprises
[39568] (a) increasing or generating one or more activities selected from the group consisting of branched chain aminotransferase in an organelle, preferably in plastids or mitochondria, especially in plastids, of a non-human organism or a part thereof, preferably a microorganism, a plant cell, a plant or a part thereof, as compared to a corresponding non-transformed wild type non-human organism or a part thereof; and
[39569] (b) growing the non-human organism or a part thereof under conditions which permit the production of valine or a composition comprising valine in said non-human organism or in the culture medium surrounding said non-human organism.

[39570] A further embodiment of the present invention relates to a process for the production of isoleucine, which comprises
[39571] (a) increasing or generating one or more activities selected from the group consisting of polygalacturonase in an organelle, preferably in plastids or mitochondria, especially in plastids, of a non-human organism or a part thereof, preferably a microorganism, a plant cell, a plant or a part thereof, as compared to a corresponding non-transformed wild type non-human organism or a part thereof; and
[39572] (b) growing the non-human organism or a part thereof under conditions which permit the production of isoleucine or a composition comprising isoleucine in said non-human organism or in the culture medium surrounding said non-human organism.

[39573] A further embodiment of the present invention relates to a process for the production of leucine, which comprises
[39574] (a) increasing or generating one or more activities selected from the group consisting of polygalacturonase in an organelle, preferably in plastids or mitochondria, especially in plastids, of a non-human organism or a part thereof, preferably a microorganism, a plant cell, a plant or a part thereof, as compared to a corresponding non-transformed wild type non-human organism or a part thereof; and
[39575] (b) growing the non-human organism or a part thereof under conditions which permit the production of leucine or a composition comprising leucine in said non-human organism or in the culture medium surrounding said non-human organism.

[39576] A further embodiment of the present invention relates to a process for the production of valine, which comprises
[39577] (a) increasing or generating one or more activities selected from the group consisting of polygalacturonase in an organelle, preferably in plastids or mitochondria, especially in plastids, of a non-human organism or a part thereof, preferably a microorganism, a plant cell, a plant or a part thereof, as compared to a corresponding non-transformed wild type non-human organism or a part thereof; and
[39578] (b) growing the non-human organism or a part thereof under conditions which permit the production of valine or a composition comprising valine in said non-human organism or in the culture medium surrounding said non-human organism.

[39579] A further embodiment of the present invention relates to a process for the production of isoleucine, which comprises
[39580] (a) increasing or generating one or more activities selected from the group consisting of YKL038W-protein in an organelle, preferably in plastids or mitochondria, especially in plastids, of a non-human organism or a part thereof, preferably a microorganism, a plant cell, a plant or a part thereof, as compared to a corresponding non-transformed wild type non-human organism or a part thereof; and
[39581] (b) growing the non-human organism or a part thereof under conditions which permit the production of isoleucine or a composition comprising isoleucine in said non-human organism or in the culture medium surrounding said non-human organism.

[39582] A further embodiment of the present invention relates to a process for the production of leucine, which comprises
[39583] (a) increasing or generating one or more activities selected from the group consisting of YKL038W-protein in an organelle, preferably in plastids or mitochondria, especially in plastids, of a non-human organism or a part thereof, preferably a microorganism, a plant cell, a plant or a part thereof, as compared to a corresponding non-transformed wild type non-human organism or a part thereof; and
[39584] (b) growing the non-human organism or a part thereof under conditions which permit the production of leucine or a composition comprising leucine in said non-human organism or in the culture medium surrounding said non-human organism.

[39585] A further embodiment of the present invention relates to a process for the production of isoleucine, which comprises
[39586] (a) increasing or generating one or more activities selected from the group consisting of YLR224W-protein in an organelle, preferably in plastids or mitochondria, especially in plastids, of a non-human organism or a part thereof, preferably a microorganism, a plant cell, a plant or a part thereof, as compared to a corresponding non-transformed wild type non-human organism or a part thereof; and
[39587] (b) growing the non-human organism or a part thereof under conditions which permit the production of isoleucine or a composition comprising isoleucine in said non-human organism or in the culture medium surrounding said non-human organism.

[39588] A further embodiment of the present invention relates to a process for the production of isoleucine, which comprises
[39589] (a) increasing or generating one or more activities selected from the group consisting of mitochondrial dicarboxylate transporter in an organelle, preferably in plastids or mitochondria, especially in plastids, of a non-human organism or a part thereof, preferably a microorganism, a plant cell, a plant or a part thereof, as compared to a corresponding non-transformed wild type non-human organism or a part thereof; and
[39590] (b) growing the non-human organism or a part thereof under conditions which permit the production of isoleucine or a composition comprising isoleucine in said non-human organism or in the culture medium surrounding said non-human organism.

[39591] A further embodiment of the present invention relates to a process for the production of isoleucine, which comprises
[39592] (a) increasing or generating one or more activities selected from the group consisting of adenylosuccinate lyase in an organelle, preferably in plastids or mitochondria, especially in plastids, of a non-human organism or a part thereof, preferably a microorganism, a plant cell, a plant or a part thereof, as compared to a corresponding non-transformed wild type non-human organism or a part thereof; and
[39593] (b) growing the non-human organism or a part thereof under conditions which permit the production of isoleucine or a composition comprising isoleucine in said non-human organism or in the culture medium surrounding said non-human organism.

[39594] A further embodiment of the present invention relates to a process for the production of leucine, which comprises
[39595] (a) increasing or generating one or more activities selected from the group consisting of adenylosuccinate lyase in an organelle, preferably in plastids or mitochondria, especially in plastids, of a non-human organism or a part thereof, preferably a microorganism, a plant cell, a plant or a part thereof, as compared to a corresponding non-transformed wild type non-human organism or a part thereof; and
[39596] (b) growing the non-human organism or a part thereof under conditions which permit the production of leucine or a composition comprising leucine in said non-human organism or in the culture medium surrounding said non-human organism.

[39597] A further embodiment of the present invention relates to a process for the production of valine, which comprises
[39598] (a) increasing or generating one or more activities selected from the group consisting of adenylosuccinate lyase in an organelle, preferably in plastids or mitochondria, especially in plastids, of a non-human organism or a part thereof, preferably a microorganism, a plant cell, a plant or a part thereof, as compared to a corresponding non-transformed wild type non-human organism or a part thereof; and
[39599] (b) growing the non-human organism or a part thereof under conditions which permit the production of valine or a composition comprising valine in said non-human organism or in the culture medium surrounding said non-human organism.

[39600] A further embodiment of the present invention relates to a process for the production of leucine, which comprises
[39601] (a) increasing or generating one or more activities selected from the group consisting of phosphate transporter in an organelle, preferably in plastids or mitochondria, especially in plastids, of a non-human organism or a part thereof, preferably a microorganism, a plant cell, a plant or a part thereof, as compared to a corresponding non-transformed wild type non-human organism or a part thereof; and
[39602] (b) growing the non-human organism or a part thereof under conditions which permit the production of leucine or a composition comprising leucine in said non-human organism or in the culture medium surrounding said non-human organism.

[39603] A further embodiment of the present invention relates to a process for the production of isoleucine, which comprises
[39604] (a) increasing or generating one or more activities selected from the group consisting of acetyl-CoA acetyltransferase in an organelle, preferably in plastids or mitochondria, especially in plastids, of a non-human organism or a part thereof, preferably a microorganism, a plant cell, a plant or a part thereof, as compared to a corresponding non-transformed wild type non-human organism or a part thereof; and
[39605] (b) growing the non-human organism or a part thereof under conditions which permit the production of isoleucine or a composition comprising isoleucine in said non-human organism or in the culture medium surrounding said non-human organism.

[39606] A further embodiment of the present invention relates to a process for the production of leucine, which comprises
[39607] (a) increasing or generating one or more activities selected from the group consisting of acetyl-CoA acetyltransferase in an organelle, preferably in plastids or mitochondria, especially in plastids, of a non-human organism or a part thereof, preferably a microorganism, a plant cell, a plant or a part thereof, as compared to a corresponding non-transformed wild type non-human organism or a part thereof; and
[39608] (b) growing the non-human organism or a part thereof under conditions which permit the production of leucine or a composition comprising leucine in said non-human organism or in the culture medium surrounding said non-human organism.

[39609] A further embodiment of the present invention relates to a process for the production of isoleucine, which comprises
[39610] (a) increasing or generating one or more activities selected from the group consisting of cyclin in an organelle, preferably in plastids or mitochondria, especially in plastids, of a non-human organism or a part thereof, preferably a microorganism, a plant cell, a plant or a part thereof, as compared to a corresponding non-transformed wild type non-human organism or a part thereof; and
[39611] (b) growing the non-human organism or a part thereof under conditions which permit the production of isoleucine or a composition comprising isoleucine in said non-human organism or in the culture medium surrounding said non-human organism.

[39612] A further embodiment of the present invention relates to a process for the production of isoleucine, which comprises
[39613] (a) increasing or generating one or more activities selected from the group consisting of Zm_{—}4842_BE510522-protein in an organelle, preferably in plastids or mitochondria, especially in plastids, of a non-human organism or a part thereof, preferably a microorganism, a plant cell, a plant or a part thereof, as compared to a corresponding non-transformed wild type non-human organism or a part thereof; and
[39614] (b) growing the non-human organism or a part thereof under conditions which permit the production of isoleucine or a composition comprising isoleucine in said non-human organism or in the culture medium surrounding said non-human organism.

[39615] A further embodiment of the present invention relates to a process for the production of leucine, which comprises
[39616] (a) increasing or generating one or more activities selected from the group consisting of Zm_{—}4842_BE510522-protein in an organelle, preferably in plastids or mitochondria, especially in plastids, of a non-human organism or a part thereof, preferably a microorganism, a plant cell, a plant or a part thereof, as compared to a corresponding non-transformed wild type non-human organism or a part thereof; and
[39617] (b) growing the non-human organism or a part thereof under conditions which permit the production of leucine or a composition comprising leucine in said non-human organism or in the culture medium surrounding said non-human organism.

[39618] A further embodiment of the present invention relates to a process for the production of valine, which comprises
[39619] (a) increasing or generating one or more activities selected from the group consisting of Zm_{—}4842_BE510522-protein in an organelle, preferably in plastids or mitochondria, especially in plastids, of a non-human organism or a part thereof, preferably a microorganism, a plant cell, a plant or a part thereof, as compared to a corresponding non-transformed wild type non-human organism or a part thereof; and
[39620] (b) growing the non-human organism or a part thereof under conditions which permit the production of valine or a composition comprising valine in said non-human organism or in the culture medium surrounding said non-human organism.

[39621] A further embodiment of the present invention relates to a process for the production of isoleucine, which comprises
[39622] (a1) increasing or generating the activity of a polypeptide comprising a polypeptide as depicted in the respective line in column 5 or 8 of Table II, application no. 6, or a homolog or fragment thereof, a consensus sequence or at least one polypeptide motif as depicted in column 8 of Table IV, application no. 6, whereby the respective line discloses in column 7 the fine chemical isoleucine; or
[39623] increasing or generating the activity of an expression product of one or more nucleic acid molecule(s) comprising a polynucleotide as depicted in the respective line in column 5 or 8 of Table I, application no. 6, preferably the coding region thereof, or a homolog or a fragment thereof, whereby the respective line discloses in column 7 the fine chemical isoleucine;
[39624] in an organelle, preferably in plastids or mitochondria, especially in plastids, in a non-human organism or a part thereof; preferably a microorganism, a plant cell, a plant or a part thereof, as compared to a corresponding non-transformed wild type non-human organism or a part thereof; or
[39625] (a2) increasing or generating the activity of a polypeptide comprising a polypeptide as depicted in the respective line in column 5 or 8 of Table II, application no. 6, or a homolog or a fragment thereof, a consensus sequence or at least one polypeptide motif as depicted in the respective line in column 8 of Table IV, application no. 6, which is joined to a transit peptide, whereby the respective line discloses in column 7 the fine chemical isoleucine; or
[39626] increasing or generating the activity of an expression product of one or more nucleic acid molecule(s) comprising a polynucleotide as depicted in the respective line in column 5 or 8 of Table I, application no. 6, preferably the coding region thereof, or a homolog or a fragment thereof, which is joined to a nucleic acid sequence encoding an organelle localization sequence, preferably a plastid or a mitochondrion localization sequence, especially a plastid localization sequence, whereby the respective line discloses in column 7 the fine chemical isoleucine;
[39627] in a non-human organism or a part thereof; preferably a microorganism, a plant cell, a plant or a part thereof, as compared to a corresponding non-transformed wild type non-human organism or a part thereof; or
[39628] (a3) increasing or generating the activity of a polypeptide comprising a polypeptide as depicted in the respective line in column 5 or 8 of Table II, application no. 6, or a homolog or a fragment thereof, a consensus sequence or at least one polypeptide motif as depicted in the respective line in column 8 of Table IV, application no. 6, whereby the respective line discloses in column 7 the fine chemical isoleucine; or
[39629] increasing or generating the activity of an expression product of one or more nucleic acid molecule(s) comprising a polynucleotide as depicted in the respective line in column 5 or 8 of Table I, application no. 6, preferably the coding region thereof, or a homolog or a fragment thereof, whereby the respective line discloses in column 7 the fine chemical isoleucine;
[39630] in an organelle, preferably in plastids or mitochondria, especially in plastids, in a non-human organism or a part thereof; preferably a microorganism, a plant cell, a plant or a part thereof, through transformation of the organelle, as compared to a corresponding non-transformed wild type non-human organism or a part thereof;
[39631] and
[39632] (b) growing the non-human organism under conditions which permit the production of isoleucine, or a composition comprising isoleucine in said non-human organism or in the culture medium surrounding said non-human organism.

[39633] A further embodiment of the present invention relates to a process for the production of leucine, which comprises
[39634] (a1) increasing or generating the activity of a polypeptide comprising a polypeptide as depicted in the respective line in column 5 or 8 of Table II, application no. 6, or a homolog or fragment thereof, a consensus sequence or at least one polypeptide motif as depicted in column 8 of Table IV, application no. 6, whereby the respective line discloses in column 7 the fine chemical leucine; or
[39635] increasing or generating the activity of an expression product of one or more nucleic acid molecule(s) comprising a polynucleotide as depicted in the respective line in column 5 or 8 of Table I, application no. 6, preferably the coding region thereof, or a homolog or a fragment thereof, whereby the respective line discloses in column 7 the fine chemical leucine;
[39636] in an organelle, preferably in plastids or mitochondria, especially in plastids, in a non-human organism or a part thereof; preferably a microorganism, a plant cell, a plant or a part thereof, as compared to a corresponding non-transformed wild type non-human organism or a part thereof; or
[39637] (a2) increasing or generating the activity of a polypeptide comprising a polypeptide as depicted in the respective line in column 5 or 8 of Table II, application no. 6, or a homolog or a fragment thereof, a consensus sequence or at least one polypeptide motif as depicted in the respective line in column 8 of Table IV, application no. 6, which is joined to a transit peptide, whereby the respective line discloses in column 7 the fine chemical leucine; or
[39638] increasing or generating the activity of an expression product of one or more nucleic acid molecule(s) comprising a polynucleotide as depicted in the respective line in column 5 or 8 of Table I, application no. 6, preferably the coding region thereof, or a homolog or a fragment thereof, which is joined to a nucleic acid sequence encoding an organelle localization sequence, preferably a plastid or a mitochondrion localization sequence, especially a plastid localization sequence, whereby the respective line discloses in column 7 the fine chemical leucine;
[39639] in a non-human organism or a part thereof; preferably a microorganism, a plant cell, a plant or a part thereof, as compared to a corresponding non-transformed wild type non-human organism or a part thereof; or
[39640] (a3) increasing or generating the activity of a polypeptide comprising a polypeptide as depicted in the respective line in column 5 or 8 of Table II, application no. 6, or a homolog or a fragment thereof, a consensus sequence or at least one polypeptide motif as depicted in the respective line in column 8 of Table IV, application no. 6, whereby the respective line discloses in column 7 the fine chemical leucine; or
[39641] increasing or generating the activity of an expression product of one or more nucleic acid molecule(s) comprising a polynucleotide as depicted in the respective line in column 5 or 8 of Table I, application no. 6, preferably the coding region thereof, or a homolog or a fragment thereof, whereby the respective line discloses in column 7 the fine chemical leucine;
[39642] in an organelle, preferably in plastids or mitochondria, especially in plastids, in a non-human organism or a part thereof; preferably a microorganism, a plant cell, a plant or a part thereof, through transformation of the organelle, as compared to a corresponding non-transformed wild type non-human organism or a part thereof;
[39643] and
[39644] (b) growing the non-human organism under conditions which permit the production of leucine, or a composition comprising leucine in said non-human organism or in the culture medium surrounding said non-human organism.

[39645] A further embodiment of the present invention relates to a process for the production of valine, which comprises
[39646] (a1) increasing or generating the activity of a polypeptide comprising a polypeptide as depicted in the respective line in column 5 or 8 of Table II, application no. 6, or a homolog or fragment thereof, a consensus sequence or at least one polypeptide motif as depicted in column 8 of Table IV, application no. 6, whereby the respective line discloses in column 7 the fine chemical valine; or
[39647] increasing or generating the activity of an expression product of one or more nucleic acid molecule(s) comprising a polynucleotide as depicted in the respective line in column 5 or 8 of Table I, application no. 6, preferably the coding region thereof, or a homolog or a fragment thereof, whereby the respective line discloses in column 7 the fine chemical valine;
[39648] in an organelle, preferably in plastids or mitochondria, especially in plastids, in a non-human organism or a part thereof; preferably a microorganism, a plant cell, a plant or a part thereof, as compared to a corresponding non-transformed wild type non-human organism or a part thereof; or
[39649] (a2) increasing or generating the activity of a polypeptide comprising a polypeptide as depicted in the respective line in column 5 or 8 of Table II, application no. 6, or a homolog or a fragment thereof, a consensus sequence or at least one polypeptide motif as depicted in the respective line in column 8 of Table IV, application no. 6, which is joined to a transit peptide, whereby the respective line discloses in column 7 the fine chemical valine; or
[39650] increasing or generating the activity of an expression product of one or more nucleic acid molecule(s) comprising a polynucleotide as depicted in the respective line in column 5 or 8 of Table I, application no. 6, preferably the coding region thereof, or a homolog or a fragment thereof, which is joined to a nucleic acid sequence encoding an organelle localization sequence, preferably a plastid or a mitochondrion localization sequence, especially a plastid localization sequence, whereby the respective line discloses in column 7 the fine chemical valine;
[39651] in a non-human organism or a part thereof; preferably a microorganism, a plant cell, a plant or a part thereof, as compared to a corresponding non-transformed wild type non-human organism or a part thereof; or
[39652] (a3) increasing or generating the activity of a polypeptide comprising a polypeptide as depicted in the respective line in column 5 or 8 of Table II, application no. 6, or a homolog or a fragment thereof, a consensus sequence or at least one polypeptide motif as depicted in the respective line in column 8 of Table IV, application no. 6, whereby the respective line discloses in column 7 the fine chemical valine; or
[39653] increasing or generating the activity of an expression product of one or more nucleic acid molecule(s) comprising a polynucleotide as depicted in the respective line in column 5 or 8 of Table I, application no. 6, preferably the coding region thereof, or a homolog or a fragment thereof, whereby the respective line discloses in column 7 the fine chemical valine;
[39654] in an organelle, preferably in plastids or mitochondria, especially in plastids, in a non-human organism or a part thereof; preferably a microorganism, a plant cell, a plant or a part thereof, through transformation of the organelle, as compared to a corresponding non-transformed wild type non-human organism or a part thereof;
[39655] and
[39656] (b) growing the non-human organism under conditions which permit the production of valine, or a composition comprising valine in said non-human organism or in the culture medium surrounding said non-human organism.

[39657] Accordingly, the present invention relates to a process for the production of isoleucine, which comprises
[39658] (a) increasing or generating the activity of a 47266012-protein in the cytosol of a cell of a non-human organism or a part thereof, preferably a microorganism, a plant cell, a plant or a part thereof, as compared to a corresponding non-transformed wild type non-human organism or a part thereof; and
[39659] (b) growing the non-human organism or a part thereof under conditions which permit the production of isoleucine or a composition comprising isoleucine in said non-human organism or in the culture medium surrounding said non-human organism.

[39660] Accordingly, the present invention relates to a process for the production of leucine, which comprises
[39661] (a) increasing or generating the activity of a pyruvate kinase in the cytosol of a cell of a non-human organism or a part thereof, preferably a microorganism, a plant cell, a plant or a part thereof, as compared to a corresponding non-transformed wild type non-human organism or a part thereof; and
[39662] (b) growing the non-human organism or a part thereof under conditions which permit the production of leucine or a composition comprising leucine in said non-human organism or in the culture medium surrounding said non-human organism.

[39663] Accordingly, the present invention relates to a process for the production of valine, which comprises
[39664] (a) increasing or generating the activity of a pyruvate kinase in the cytosol of a cell of a non-human organism or a part thereof, preferably a microorganism, a plant cell, a plant or a part thereof, as compared to a corresponding non-transformed wild type non-human organism or a part thereof; and
[39665] (b) growing the non-human organism or a part thereof under conditions which permit the production of valine or a composition comprising valine in said non-human organism or in the culture medium surrounding said non-human organism.

[39666] Accordingly, the present invention relates to a process for the production of valine, which comprises
[39667] (a) increasing or generating the activity of a pyruvate kinase in the cytosol of a cell of a non-human organism or a part thereof, preferably a microorganism, a plant cell, a plant or a part thereof, as compared to a corresponding non-transformed wild type non-human organism or a part thereof; and
[39668] (b) growing the non-human organism or a part thereof under conditions which permit the production of valine or a composition comprising valine in said non-human organism or in the culture medium surrounding said non-human organism.

[39669] Accordingly, the present invention relates to a process for the production of isoleucine, which comprises
[39670] (a) increasing or generating the activity of a glucose-6-phosphate 1-dehydrogenase in the cytosol of a cell of a non-human organism or a part thereof, preferably a microorganism, a plant cell, a plant or a part thereof, as compared to a corresponding non-transformed wild type non-human organism or a part thereof; and
[39671] (b) growing the non-human organism or a part thereof under conditions which permit the production of isoleucine or a composition comprising isoleucine in said non-human organism or in the culture medium surrounding said non-human organism.

[39672] Accordingly, the present invention relates to a process for the production of leucine, which comprises
[39673] (a) increasing or generating the activity of a glucose-6-phosphate 1-dehydrogenase in the cytosol of a cell of a non-human organism or a part thereof, preferably a microorganism, a plant cell, a plant or a part thereof, as compared to a corresponding non-transformed wild type non-human organism or a part thereof; and
[39674] (b) growing the non-human organism or a part thereof under conditions which permit the production of leucine or a composition comprising leucine in said non-human organism or in the culture medium surrounding said non-human organism.

[39675] Accordingly, the present invention relates to a process for the production of valine, which comprises
[39676] (a) increasing or generating the activity of a glucose-6-phosphate 1-dehydrogenase in the cytosol of a cell of a non-human organism or a part thereof, preferably a microorganism, a plant cell, a plant or a part thereof, as compared to a corresponding non-transformed wild type non-human organism or a part thereof; and
[39677] (b) growing the non-human organism or a part thereof under conditions which permit the production of valine or a composition comprising valine in said non-human organism or in the culture medium surrounding said non-human organism.

[39678] Accordingly, the present invention relates to a process for the production of valine, which comprises
[39679] (a) increasing or generating the activity of a protein phosphatase in the cytosol of a cell of a non-human organism or a part thereof, preferably a microorganism, a plant cell, a plant or a part thereof, as compared to a corresponding non-transformed wild type non-human organism or a part thereof; and
[39680] (b) growing the non-human organism or a part thereof under conditions which permit the production of valine or a composition comprising valine in said non-human organism or in the culture medium surrounding said non-human organism.

[39681] Accordingly, the present invention relates to a process for the production of valine, which comprises
[39682] (a) increasing or generating the activity of a DNA-binding protein in the cytosol of a cell of a non-human organism or a part thereof, preferably a microorganism, a plant cell, a plant or a part thereof, as compared to a corresponding non-transformed wild type non-human organism or a part thereof; and
[39683] (b) growing the non-human organism or a part thereof under conditions which permit the production of valine or a composition comprising valine in said non-human organism or in the culture medium surrounding said non-human organism.

[39684] Accordingly, the present invention relates to a process for the production of isoleucine, which comprises
[39685] (a) increasing or generating the activity of a At1g19800-protein in the cytosol of a cell of a non-human organism or a part thereof, preferably a microorganism, a plant cell, a plant or a part thereof, as compared to a corresponding non-transformed wild type non-human organism or a part thereof; and
[39686] (b) growing the non-human organism or a part thereof under conditions which permit the production of isoleucine or a composition comprising isoleucine in said non-human organism or in the culture medium surrounding said non-human organism.

[39687] Accordingly, the present invention relates to a process for the production of leucine, which comprises
[39688] (a) increasing or generating the activity of a At1g19800-protein in the cytosol of a cell of a non-human organism or a part thereof, preferably a microorganism, a plant cell, a plant or a part thereof, as compared to a corresponding non-transformed wild type non-human organism or a part thereof; and
[39689] (b) growing the non-human organism or a part thereof under conditions which permit the production of leucine or a composition comprising leucine in said non-human organism or in the culture medium surrounding said non-human organism.

[39690] Accordingly, the present invention relates to a process for the production of valine, which comprises
[39691] (a) increasing or generating the activity of a At1g23110-protein in the cytosol of a cell of a non-human organism or a part thereof, preferably a microorganism, a plant cell, a plant or a part thereof, as compared to a corresponding non-transformed wild type non-human organism or a part thereof; and
[39692] (b) growing the non-human organism or a part thereof under conditions which permit the production of valine or a composition comprising valine in said non-human organism or in the culture medium surrounding said non-human organism.

[39693] Accordingly, the present invention relates to a process for the production of isoleucine, which comprises
[39694] (a) increasing or generating the activity of a cullin in the cytosol of a cell of a non-human organism or a part thereof, preferably a microorganism, a plant cell, a plant or a part thereof, as compared to a corresponding non-transformed wild type non-human organism or a part thereof; and
[39695] (b) growing the non-human organism or a part thereof under conditions which permit the production of isoleucine or a composition comprising isoleucine in said non-human organism or in the culture medium surrounding said non-human organism.

[39696] Accordingly, the present invention relates to a process for the production of leucine, which comprises
[39697] (a) increasing or generating the activity of a cullin in the cytosol of a cell of a non-human organism or a part thereof, preferably a microorganism, a plant cell, a plant or a part thereof, as compared to a corresponding non-transformed wild type non-human organism or a part thereof; and
[39698] (b) growing the non-human organism or a part thereof under conditions which permit the production of leucine or a composition comprising leucine in said non-human organism or in the culture medium surrounding said non-human organism.

[39699] Accordingly, the present invention relates to a process for the production of isoleucine, which comprises
[39700] (a) increasing or generating the activity of a eukaryotic translation initiation factor 5 in the cytosol of a cell of a non-human organism or a part thereof, preferably a microorganism, a plant cell, a plant or a part thereof, as compared to a corresponding non-transformed wild type non-human organism or a part thereof; and
[39701] (b) growing the non-human organism or a part thereof under conditions which permit the production of isoleucine or a composition comprising isoleucine in said non-human organism or in the culture medium surrounding said non-human organism.

[39702] Accordingly, the present invention relates to a process for the production of leucine, which comprises
[39703] (a) increasing or generating the activity of a eukaryotic translation initiation factor 5 in the cytosol of a cell of a non-human organism or a part thereof, preferably a microorganism, a plant cell, a plant or a part thereof, as compared to a corresponding non-transformed wild type non-human organism or a part thereof; and
[39704] (b) growing the non-human organism or a part thereof under conditions which permit the production of leucine or a composition comprising leucine in said non-human organism or in the culture medium surrounding said non-human organism.

[39705] Accordingly, the present invention relates to a process for the production of isoleucine, which comprises
[39706] (a) increasing or generating the activity of a transcriptional regulator in the cytosol of a cell of a non-human organism or a part thereof, preferably a microorganism, a plant cell, a plant or a part thereof, as compared to a corresponding non-transformed wild type non-human organism or a part thereof; and
[39707] (b) growing the non-human organism or a part thereof under conditions which permit the production of isoleucine or a composition comprising isoleucine in said non-human organism or in the culture medium surrounding said non-human organism.

[39708] Accordingly, the present invention relates to a process for the production of leucine, which comprises
[39709] (a) increasing or generating the activity of a transcriptional regulator in the cytosol of a cell of a non-human organism or a part thereof, preferably a microorganism, a plant cell, a plant or a part thereof, as compared to a corresponding non-transformed wild type non-human organism or a part thereof; and
[39710] (b) growing the non-human organism or a part thereof under conditions which permit the production of leucine or a composition comprising leucine in said non-human organism or in the culture medium surrounding said non-human organism.

[39711] Accordingly, the present invention relates to a process for the production of valine, which comprises
[39712] (a) increasing or generating the activity of a transcriptional regulator in the cytosol of a cell of a non-human organism or a part thereof, preferably a microorganism, a plant cell, a plant or a part thereof, as compared to a corresponding non-transformed wild type non-human organism or a part thereof; and
[39713] (b) growing the non-human organism or a part thereof under conditions which permit the production of valine or a composition comprising valine in said non-human organism or in the culture medium surrounding said non-human organism.

[39714] Accordingly, the present invention relates to a process for the production of leucine, which comprises
[39715] (a) increasing or generating the activity of a At1g47380-protein in the cytosol of a cell of a non-human organism or a part thereof, preferably a microorganism, a plant cell, a plant or a part thereof, as compared to a corresponding non-transformed wild type non-human organism or a part thereof; and
[39716] (b) growing the non-human organism or a part thereof under conditions which permit the production of leucine or a composition comprising leucine in said non-human organism or in the culture medium surrounding said non-human organism.

[39717] Accordingly, the present invention relates to a process for the production of valine, which comprises
[39718] (a) increasing or generating the activity of a At1g47380-protein in the cytosol of a cell of a non-human organism or a part thereof, preferably a microorganism, a plant cell, a plant or a part thereof, as compared to a corresponding non-transformed wild type non-human organism or a part thereof; and
[39719] (b) growing the non-human organism or a part thereof under conditions which permit the production of valine or a composition comprising valine in said non-human organism or in the culture medium surrounding said non-human organism.

[39720] Accordingly, the present invention relates to a process for the production of isoleucine, which comprises
[39721] (a) increasing or generating the activity of a protein kinase in the cytosol of a cell of a non-human organism or a part thereof, preferably a microorganism, a plant cell, a plant or a part thereof, as compared to a corresponding non-transformed wild type non-human organism or a part thereof; and
[39722] (b) growing the non-human organism or a part thereof under conditions which permit the production of isoleucine or a composition comprising isoleucine in said non-human organism or in the culture medium surrounding said non-human organism.

[39723] Accordingly, the present invention relates to a process for the production of leucine, which comprises
[39724] (a) increasing or generating the activity of a protein kinase in the cytosol of a cell of a non-human organism or a part thereof, preferably a microorganism, a plant cell, a plant or a part thereof, as compared to a corresponding non-transformed wild type non-human organism or a part thereof; and
[39725] (b) growing the non-human organism or a part thereof under conditions which permit the production of leucine or a composition comprising leucine in said non-human organism or in the culture medium surrounding said non-human organism.

[39726] Accordingly, the present invention relates to a process for the production of valine, which comprises
[39727] (a) increasing or generating the activity of a protein kinase in the cytosol of a cell of a non-human organism or a part thereof, preferably a microorganism, a plant cell, a plant or a part thereof, as compared to a corresponding non-transformed wild type non-human organism or a part thereof; and
[39728] (b) growing the non-human organism or a part thereof under conditions which permit the production of valine or a composition comprising valine in said non-human organism or in the culture medium surrounding said non-human organism.

[39729] Accordingly, the present invention relates to a process for the production of isoleucine, which comprises
[39730] (a) increasing or generating the activity of a calcium-dependent protein kinase in the cytosol of a cell of a non-human organism or a part thereof, preferably a microorganism, a plant cell, a plant or a part thereof, as compared to a corresponding non-transformed wild type non-human organism or a part thereof; and
[39731] (b) growing the non-human organism or a part thereof under conditions which permit the production of isoleucine or a composition comprising isoleucine in said non-human organism or in the culture medium surrounding said non-human organism.

[39732] Accordingly, the present invention relates to a process for the production of leucine, which comprises
[39733] (a) increasing or generating the activity of a calcium-dependent protein kinase in the cytosol of a cell of a non-human organism or a part thereof, preferably a microorganism, a plant cell, a plant or a part thereof, as compared to a corresponding non-transformed wild type non-human organism or a part thereof; and
[39734] (b) growing the non-human organism or a part thereof under conditions which permit the production of leucine or a composition comprising leucine in said non-human organism or in the culture medium surrounding said non-human organism.

[39735] Accordingly, the present invention relates to a process for the production of valine, which comprises
[39736] (a) increasing or generating the activity of a calcium-dependent protein kinase in the cytosol of a cell of a non-human organism or a part thereof, preferably a microorganism, a plant cell, a plant or a part thereof, as compared to a corresponding non-transformed wild type non-human organism or a part thereof; and
[39737] (b) growing the non-human organism or a part thereof under conditions which permit the production of valine or a composition comprising valine in said non-human organism or in the culture medium surrounding said non-human organism.

[39738] Accordingly, the present invention relates to a process for the production of isoleucine, which comprises
[39739] (a) increasing or generating the activity of a protein phosphatase in the cytosol of a cell of a non-human organism or a part thereof, preferably a microorganism, a plant cell, a plant or a part thereof, as compared to a corresponding non-transformed wild type non-human organism or a part thereof; and
[39740] (b) growing the non-human organism or a part thereof under conditions which permit the production of isoleucine or a composition comprising isoleucine in said non-human organism or in the culture medium surrounding said non-human organism.

[39741] Accordingly, the present invention relates to a process for the production of leucine, which comprises
[39742] (a) increasing or generating the activity of a protein phosphatase in the cytosol of a cell of a non-human organism or a part thereof, preferably a microorganism, a plant cell, a plant or a part thereof, as compared to a corresponding non-transformed wild type non-human organism or a part thereof; and
[39743] (b) growing the non-human organism or a part thereof under conditions which permit the production of leucine or a composition comprising leucine in said non-human organism or in the culture medium surrounding said non-human organism.

[39744] Accordingly, the present invention relates to a process for the production of valine, which comprises
[39745] (a) increasing or generating the activity of a protein phosphatase in the cytosol of a cell of a non-human organism or a part thereof, preferably a microorganism, a plant cell, a plant or a part thereof, as compared to a corresponding non-transformed wild type non-human organism or a part thereof; and
[39746] (b) growing the non-human organism or a part thereof under conditions which permit the production of valine or a composition comprising valine in said non-human organism or in the culture medium surrounding said non-human organism.

[39747] Accordingly, the present invention relates to a process for the production of valine, which comprises
[39748] (a) increasing or generating the activity of a transcription factor in the cytosol of a cell of a non-human organism or a part thereof, preferably a microorganism, a plant cell, a plant or a part thereof, as compared to a corresponding non-transformed wild type non-human organism or a part thereof; and
[39749] (b) growing the non-human organism or a part thereof under conditions which permit the production of valine or a composition comprising valine in said non-human organism or in the culture medium surrounding said non-human organism.

[39750] Accordingly, the present invention relates to a process for the production of isoleucine, which comprises
[39751] (a) increasing or generating the activity of a protein phosphatase in the cytosol of a cell of a non-human organism or a part thereof, preferably a microorganism, a plant cell, a plant or a part thereof, as compared to a corresponding non-transformed wild type non-human organism or a part thereof; and
[39752] (b) growing the non-human organism or a part thereof under conditions which permit the production of isoleucine or a composition comprising isoleucine in said non-human organism or in the culture medium surrounding said non-human organism.

[39753] Accordingly, the present invention relates to a process for the production of valine, which comprises
[39754] (a) increasing or generating the activity of a protein phosphatase in the cytosol of a cell of a non-human organism or a part thereof, preferably a microorganism, a plant cell, a plant or a part thereof, as compared to a corresponding non-transformed wild type non-human organism or a part thereof; and
[39755] (b) growing the non-human organism or a part thereof under conditions which permit the production of valine or a composition comprising valine in said non-human organism or in the culture medium surrounding said non-human organism.

[39756] Accordingly, the present invention relates to a process for the production of isoleucine, which comprises
[39757] (a) increasing or generating the activity of a CBL-interacting protein kinase in the cytosol of a cell of a non-human organism or a part thereof, preferably a microorganism, a plant cell, a plant or a part thereof, as compared to a corresponding non-transformed wild type non-human organism or a part thereof; and
[39758] (b) growing the non-human organism or a part thereof under conditions which permit the production of isoleucine or a composition comprising isoleucine in said non-human organism or in the culture medium surrounding said non-human organism.

[39759] Accordingly, the present invention relates to a process for the production of leucine, which comprises
[39760] (a) increasing or generating the activity of a CBL-interacting protein kinase in the cytosol of a cell of a non-human organism or a part thereof, preferably a microorganism, a plant cell, a plant or a part thereof, as compared to a corresponding non-transformed wild type non-human organism or a part thereof; and
[39761] (b) growing the non-human organism or a part thereof under conditions which permit the production of leucine or a composition comprising leucine in said non-human organism or in the culture medium surrounding said non-human organism.

[39762] Accordingly, the present invention relates to a process for the production of valine, which comprises
[39763] (a) increasing or generating the activity of a CBL-interacting protein kinase in the cytosol of a cell of a non-human organism or a part thereof, preferably a microorganism, a plant cell, a plant or a part thereof, as compared to a corresponding non-transformed wild type non-human organism or a part thereof; and
[39764] (b) growing the non-human organism or a part thereof under conditions which permit the production of valine or a composition comprising valine in said non-human organism or in the culture medium surrounding said non-human organism.

[39765] Accordingly, the present invention relates to a process for the production of isoleucine, which comprises
[39766] (a) increasing or generating the activity of a glutaredoxin in the cytosol of a cell of a non-human organism or a part thereof, preferably a microorganism, a plant cell, a plant or a part thereof, as compared to a corresponding non-transformed wild type non-human organism or a part thereof; and
[39767] (b) growing the non-human organism or a part thereof under conditions which permit the production of isoleucine or a composition comprising isoleucine in said non-human organism or in the culture medium surrounding said non-human organism.

[39768] Accordingly, the present invention relates to a process for the production of leucine, which comprises
[39769] (a) increasing or generating the activity of a glutaredoxin in the cytosol of a cell of a non-human organism or a part thereof, preferably a microorganism, a plant cell, a plant or a part thereof, as compared to a corresponding non-transformed wild type non-human organism or a part thereof; and
[39770] (b) growing the non-human organism or a part thereof under conditions which permit the production of leucine or a composition comprising leucine in said non-human organism or in the culture medium surrounding said non-human organism.

[39771] Accordingly, the present invention relates to a process for the production of valine, which comprises
[39772] (a) increasing or generating the activity of a glutaredoxin in the cytosol of a cell of a non-human organism or a part thereof, preferably a microorganism, a plant cell, a plant or a part thereof, as compared to a corresponding non-transformed wild type non-human organism or a part thereof; and
[39773] (b) growing the non-human organism or a part thereof under conditions which permit the production of valine or a composition comprising valine in said non-human organism or in the culture medium surrounding said non-human organism.

[39774] Accordingly, the present invention relates to a process for the production of valine, which comprises
[39775] (a) increasing or generating the activity of a glutaredoxin in the cytosol of a cell of a non-human organism or a part thereof, preferably a microorganism, a plant cell, a plant or a part thereof, as compared to a corresponding non-transformed wild type non-human organism or a part thereof; and
[39776] (b) growing the non-human organism or a part thereof under conditions which permit the production of valine or a composition comprising valine in said non-human organism or in the culture medium surrounding said non-human organism.

[39777] Accordingly, the present invention relates to a process for the production of isoleucine, which comprises
[39778] (a) increasing or generating the activity of a pyruvate kinase in the cytosol of a cell of a non-human organism or a part thereof, preferably a microorganism, a plant cell, a plant or a part thereof, as compared to a corresponding non-transformed wild type non-human organism or a part thereof; and
[39779] (b) growing the non-human organism or a part thereof under conditions which permit the production of isoleucine or a composition comprising isoleucine in said non-human organism or in the culture medium surrounding said non-human organism.

[39780] Accordingly, the present invention relates to a process for the production of leucine, which comprises
[39781] (a) increasing or generating the activity of a pyruvate kinase in the cytosol of a cell of a non-human organism or a part thereof, preferably a microorganism, a plant cell, a plant or a part thereof, as compared to a corresponding non-transformed wild type non-human organism or a part thereof; and
[39782] (b) growing the non-human organism or a part thereof under conditions which permit the production of leucine or a composition comprising leucine in said non-human organism or in the culture medium surrounding said non-human organism.

[39783] Accordingly, the present invention relates to a process for the production of valine, which comprises
[39784] (a) increasing or generating the activity of a pyruvate kinase in the cytosol of a cell of a non-human organism or a part thereof, preferably a microorganism, a plant cell, a plant or a part thereof, as compared to a corresponding non-transformed wild type non-human organism or a part thereof; and
[39785] (b) growing the non-human organism or a part thereof under conditions which permit the production of valine or a composition comprising valine in said non-human organism or in the culture medium surrounding said non-human organism.

[39786] Accordingly, the present invention relates to a process for the production of isoleucine, which comprises
[39787] (a) increasing or generating the activity of a thioredoxin family protein in the cytosol of a cell of a non-human organism or a part thereof, preferably a microorganism, a plant cell, a plant or a part thereof, as compared to a corresponding non-transformed wild type non-human organism or a part thereof; and
[39788] (b) growing the non-human organism or a part thereof under conditions which permit the production of isoleucine or a composition comprising isoleucine in said non-human organism or in the culture medium surrounding said non-human organism.

[39789] Accordingly, the present invention relates to a process for the production of leucine, which comprises
[39790] (a) increasing or generating the activity of a thioredoxin family protein in the cytosol of a cell of a non-human organism or a part thereof, preferably a microorganism, a plant cell, a plant or a part thereof, as compared to a corresponding non-transformed wild type non-human organism or a part thereof; and
[39791] (b) growing the non-human organism or a part thereof under conditions which permit the production of leucine or a composition comprising leucine in said non-human organism or in the culture medium surrounding said non-human organism.

[39792] Accordingly, the present invention relates to a process for the production of isoleucine, which comprises
[39793] (a) increasing or generating the activity of a harpin-induced family protein in the cytosol of a cell of a non-human organism or a part thereof, preferably a microorganism, a plant cell, a plant or a part thereof, as compared to a corresponding non-transformed wild type non-human organism or a part thereof; and
[39794] (b) growing the non-human organism or a part thereof under conditions which permit the production of isoleucine or a composition comprising isoleucine in said non-human organism or in the culture medium surrounding said non-human organism.

[39795] Accordingly, the present invention relates to a process for the production of leucine, which comprises
[39796] (a) increasing or generating the activity of a harpin-induced family protein in the cytosol of a cell of a non-human organism or a part thereof, preferably a microorganism, a plant cell, a plant or a part thereof, as compared to a corresponding non-transformed wild type non-human organism or a part thereof; and
[39797] (b) growing the non-human organism or a part thereof under conditions which permit the production of leucine or a composition comprising leucine in said non-human organism or in the culture medium surrounding said non-human organism.

[39798] Accordingly, the present invention relates to a process for the production of isoleucine, which comprises
[39799] (a) increasing or generating the activity of a DNA mismatch repair protein in the cytosol of a cell of a non-human organism or a part thereof, preferably a microorganism, a plant cell, a plant or a part thereof, as compared to a corresponding non-transformed wild type non-human organism or a part thereof; and
[39800] (b) growing the non-human organism or a part thereof under conditions which permit the production of isoleucine or a composition comprising isoleucine in said non-human organism or in the culture medium surrounding said non-human organism.

[39801] Accordingly, the present invention relates to a process for the production of leucine, which comprises
[39802] (a) increasing or generating the activity of a DNA mismatch repair protein in the cytosol of a cell of a non-human organism or a part thereof, preferably a microorganism, a plant cell, a plant or a part thereof, as compared to a corresponding non-transformed wild type non-human organism or a part thereof; and
[39803] (b) growing the non-human organism or a part thereof under conditions which permit the production of leucine or a composition comprising leucine in said non-human organism or in the culture medium surrounding said non-human organism.

[39804] Accordingly, the present invention relates to a process for the production of valine, which comprises
[39805] (a) increasing or generating the activity of a DNA mismatch repair protein in the cytosol of a cell of a non-human organism or a part thereof, preferably a microorganism, a plant cell, a plant or a part thereof, as compared to a corresponding non-transformed wild type non-human organism or a part thereof; and
[39806] (b) growing the non-human organism or a part thereof under conditions which permit the production of valine or a composition comprising valine in said non-human organism or in the culture medium surrounding said non-human organism.

[39807] Accordingly, the present invention relates to a process for the production of isoleucine, which comprises
[39808] (a) increasing or generating the activity of a protein kinase in the cytosol of a cell of a non-human organism or a part thereof, preferably a microorganism, a plant cell, a plant or a part thereof, as compared to a corresponding non-transformed wild type non-human organism or a part thereof; and
[39809] (b) growing the non-human organism or a part thereof under conditions which permit the production of isoleucine or a composition comprising isoleucine in said non-human organism or in the culture medium surrounding said non-human organism.

[39810] Accordingly, the present invention relates to a process for the production of leucine, which comprises
[39811] (a) increasing or generating the activity of a protein kinase in the cytosol of a cell of a non-human organism or a part thereof, preferably a microorganism, a plant cell, a plant or a part thereof, as compared to a corresponding non-transformed wild type non-human organism or a part thereof; and
[39812] (b) growing the non-human organism or a part thereof under conditions which permit the production of leucine or a composition comprising leucine in said non-human organism or in the culture medium surrounding said non-human organism.

[39813] Accordingly, the present invention relates to a process for the production of valine, which comprises
[39814] (a) increasing or generating the activity of a protein kinase in the cytosol of a cell of a non-human organism or a part thereof, preferably a microorganism, a plant cell, a plant or a part thereof, as compared to a corresponding non-transformed wild type non-human organism or a part thereof; and
[39815] (b) growing the non-human organism or a part thereof under conditions which permit the production of valine or a composition comprising valine in said non-human organism or in the culture medium surrounding said non-human organism.

[39816] Accordingly, the present invention relates to a process for the production of isoleucine, which comprises
[39817] (a) increasing or generating the activity of a eukaryotic translation initiation factor in the cytosol of a cell of a non-human organism or a part thereof, preferably a microorganism, a plant cell, a plant or a part thereof, as compared to a corresponding non-transformed wild type non-human organism or a part thereof; and
[39818] (b) growing the non-human organism or a part thereof under conditions which permit the production of isoleucine or a composition comprising isoleucine in said non-human organism or in the culture medium surrounding said non-human organism.

[39819] Accordingly, the present invention relates to a process for the production of leucine, which comprises
[39820] (a) increasing or generating the activity of a eukaryotic translation initiation factor in the cytosol of a cell of a non-human organism or a part thereof, preferably a microorganism, a plant cell, a plant or a part thereof, as compared to a corresponding non-transformed wild type non-human organism or a part thereof; and
[39821] (b) growing the non-human organism or a part thereof under conditions which permit the production of leucine or a composition comprising leucine in said non-human organism or in the culture medium surrounding said non-human organism.

[39822] Accordingly, the present invention relates to a process for the production of valine, which comprises
[39823] (a) increasing or generating the activity of a eukaryotic translation initiation factor in the cytosol of a cell of a non-human organism or a part thereof, preferably a microorganism, a plant cell, a plant or a part thereof, as compared to a corresponding non-transformed wild type non-human organism or a part thereof; and
[39824] (b) growing the non-human organism or a part thereof under conditions which permit the production of valine or a composition comprising valine in said non-human organism or in the culture medium surrounding said non-human organism.

[39825] Accordingly, the present invention relates to a process for the production of isoleucine, which comprises
[39826] (a) increasing or generating the activity of a glycosyl transferase in the cytosol of a cell of a non-human organism or a part thereof, preferably a microorganism, a plant cell, a plant or a part thereof, as compared to a corresponding non-transformed wild type non-human organism or a part thereof; and
[39827] (b) growing the non-human organism or a part thereof under conditions which permit the production of isoleucine or a composition comprising isoleucine in said non-human organism or in the culture medium surrounding said non-human organism.

[39828] Accordingly, the present invention relates to a process for the production of leucine, which comprises
[39829] (a) increasing or generating the activity of a glycosyl transferase in the cytosol of a cell of a non-human organism or a part thereof, preferably a microorganism, a plant cell, a plant or a part thereof, as compared to a corresponding non-transformed wild type non-human organism or a part thereof; and
[39830] (b) growing the non-human organism or a part thereof under conditions which permit the production of leucine or a composition comprising leucine in said non-human organism or in the culture medium surrounding said non-human organism.

[39831] Accordingly, the present invention relates to a process for the production of valine, which comprises
[39832] (a) increasing or generating the activity of a glycosyl transferase in the cytosol of a cell of a non-human organism or a part thereof, preferably a microorganism, a plant cell, a plant or a part thereof, as compared to a corresponding non-transformed wild type non-human organism or a part thereof; and
[39833] (b) growing the non-human organism or a part thereof under conditions which permit the production of valine or a composition comprising valine in said non-human organism or in the culture medium surrounding said non-human organism.

[39834] Accordingly, the present invention relates to a process for the production of isoleucine, which comprises
[39835] (a) increasing or generating the activity of a auxin response factor in the cytosol of a cell of a non-human organism or a part thereof, preferably a microorganism, a plant cell, a plant or a part thereof, as compared to a corresponding non-transformed wild type non-human organism or a part thereof; and
[39836] (b) growing the non-human organism or a part thereof under conditions which permit the production of isoleucine or a composition comprising isoleucine in said non-human organism or in the culture medium surrounding said non-human organism.

[39837] Accordingly, the present invention relates to a process for the production of leucine, which comprises
[39838] (a) increasing or generating the activity of a auxin response factor in the cytosol of a cell of a non-human organism or a part thereof, preferably a microorganism, a plant cell, a plant or a part thereof, as compared to a corresponding non-transformed wild type non-human organism or a part thereof; and
[39839] (b) growing the non-human organism or a part thereof under conditions which permit the production of leucine or a composition comprising leucine in said non-human organism or in the culture medium surrounding said non-human organism.

[39840] Accordingly, the present invention relates to a process for the production of valine, which comprises
[39841] (a) increasing or generating the activity of a auxin response factor in the cytosol of a cell of a non-human organism or a part thereof, preferably a microorganism, a plant cell, a plant or a part thereof, as compared to a corresponding non-transformed wild type non-human organism or a part thereof; and
[39842] (b) growing the non-human organism or a part thereof under conditions which permit the production of valine or a composition comprising valine in said non-human organism or in the culture medium surrounding said non-human organism.

[39843] Accordingly, the present invention relates to a process for the production of isoleucine, which comprises
[39844] (a) increasing or generating the activity of a glutaredoxin in the cytosol of a cell of a non-human organism or a part thereof, preferably a microorganism, a plant cell, a plant or a part thereof, as compared to a corresponding non-transformed wild type non-human organism or a part thereof; and
[39845] (b) growing the non-human organism or a part thereof under conditions which permit the production of isoleucine or a composition comprising isoleucine in said non-human organism or in the culture medium surrounding said non-human organism.

[39846] Accordingly, the present invention relates to a process for the production of leucine, which comprises
[39847] (a) increasing or generating the activity of a glutaredoxin in the cytosol of a cell of a non-human organism or a part thereof, preferably a microorganism, a plant cell, a plant or a part thereof, as compared to a corresponding non-transformed wild type non-human organism or a part thereof; and
[39848] (b) growing the non-human organism or a part thereof under conditions which permit the production of leucine or a composition comprising leucine in said non-human organism or in the culture medium surrounding said non-human organism.

[39849] Accordingly, the present invention relates to a process for the production of valine, which comprises
[39850] (a) increasing or generating the activity of a glutaredoxin in the cytosol of a cell of a non-human organism or a part thereof, preferably a microorganism, a plant cell, a plant or a part thereof, as compared to a corresponding non-transformed wild type non-human organism or a part thereof; and
[39851] (b) growing the non-human organism or a part thereof under conditions which permit the production of valine or a composition comprising valine in said non-human organism or in the culture medium surrounding said non-human organism.

[39852] Accordingly, the present invention relates to a process for the production of isoleucine, which comprises
[39853] (a) increasing or generating the activity of a heat shock transcription factor in the cytosol of a cell of a non-human organism or a part thereof, preferably a microorganism, a plant cell, a plant or a part thereof, as compared to a corresponding non-transformed wild type non-human organism or a part thereof; and
[39854] (b) growing the non-human organism or a part thereof under conditions which permit the production of isoleucine or a composition comprising isoleucine in said non-human organism or in the culture medium surrounding said non-human organism.

[39855] Accordingly, the present invention relates to a process for the production of valine, which comprises
[39856] (a) increasing or generating the activity of a protein phosphatase in the cytosol of a cell of a non-human organism or a part thereof, preferably a microorganism, a plant cell, a plant or a part thereof, as compared to a corresponding non-transformed wild type non-human organism or a part thereof; and
[39857] (b) growing the non-human organism or a part thereof under conditions which permit the production of valine or a composition comprising valine in said non-human organism or in the culture medium surrounding said non-human organism.

[39858] Accordingly, the present invention relates to a process for the production of isoleucine, which comprises
[39859] (a) increasing or generating the activity of a At4g32480-protein in the cytosol of a cell of a non-human organism or a part thereof, preferably a microorganism, a plant cell, a plant or a part thereof, as compared to a corresponding non-transformed wild type non-human organism or a part thereof; and
[39860] (b) growing the non-human organism or a part thereof under conditions which permit the production of isoleucine or a composition comprising isoleucine in said non-human organism or in the culture medium surrounding said non-human organism.

[39861] Accordingly, the present invention relates to a process for the production of leucine, which comprises
[39862] (a) increasing or generating the activity of a At4g32480-protein in the cytosol of a cell of a non-human organism or a part thereof, preferably a microorganism, a plant cell, a plant or a part thereof, as compared to a corresponding non-transformed wild type non-human organism or a part thereof; and
[39863] (b) growing the non-human organism or a part thereof under conditions which permit the production of leucine or a composition comprising leucine in said non-human organism or in the culture medium surrounding said non-human organism.

[39864] Accordingly, the present invention relates to a process for the production of valine, which comprises
[39865] (a) increasing or generating the activity of a At4g32480-protein in the cytosol of a cell of a non-human organism or a part thereof, preferably a microorganism, a plant cell, a plant or a part thereof, as compared to a corresponding non-transformed wild type non-human organism or a part thereof; and
[39866] (b) growing the non-human organism or a part thereof under conditions which permit the production of valine or a composition comprising valine in said non-human organism or in the culture medium surrounding said non-human organism.

[39867] Accordingly, the present invention relates to a process for the production of isoleucine, which comprises
[39868] (a) increasing or generating the activity of a cyclin D in the cytosol of a cell of a non-human organism or a part thereof, preferably a microorganism, a plant cell, a plant or a part thereof, as compared to a corresponding non-transformed wild type non-human organism or a part thereof; and
[39869] (b) growing the non-human organism or a part thereof under conditions which permit the production of isoleucine or a composition comprising isoleucine in said non-human organism or in the culture medium surrounding said non-human organism.

[39870] Accordingly, the present invention relates to a process for the production of leucine, which comprises
[39871] (a) increasing or generating the activity of a cyclin D in the cytosol of a cell of a non-human organism or a part thereof, preferably a microorganism, a plant cell, a plant or a part thereof, as compared to a corresponding non-transformed wild type non-human organism or a part thereof; and
[39872] (b) growing the non-human organism or a part thereof under conditions which permit the production of leucine or a composition comprising leucine in said non-human organism or in the culture medium surrounding said non-human organism.

[39873] Accordingly, the present invention relates to a process for the production of valine, which comprises
[39874] (a) increasing or generating the activity of a cyclin D in the cytosol of a cell of a non-human organism or a part thereof, preferably a microorganism, a plant cell, a plant or a part thereof, as compared to a corresponding non-transformed wild type non-human organism or a part thereof; and
[39875] (b) growing the non-human organism or a part thereof under conditions which permit the production of valine or a composition comprising valine in said non-human organism or in the culture medium surrounding said non-human organism.

[39876] Accordingly, the present invention relates to a process for the production of isoleucine, which comprises
[39877] (a) increasing or generating the activity of a calcium-dependent protein kinase in the cytosol of a cell of a non-human organism or a part thereof, preferably a microorganism, a plant cell, a plant or a part thereof, as compared to a corresponding non-transformed wild type non-human organism or a part thereof; and
[39878] (b) growing the non-human organism or a part thereof under conditions which permit the production of isoleucine or a composition comprising isoleucine in said non-human organism or in the culture medium surrounding said non-human organism.

[39879] Accordingly, the present invention relates to a process for the production of leucine, which comprises
[39880] (a) increasing or generating the activity of a calcium-dependent protein kinase in the cytosol of a cell of a non-human organism or a part thereof, preferably a microorganism, a plant cell, a plant or a part thereof, as compared to a corresponding non-transformed wild type non-human organism or a part thereof; and
[39881] (b) growing the non-human organism or a part thereof under conditions which permit the production of leucine or a composition comprising leucine in said non-human organism or in the culture medium surrounding said non-human organism.

[39882] Accordingly, the present invention relates to a process for the production of valine, which comprises
[39883] (a) increasing or generating the activity of a calcium-dependent protein kinase in the cytosol of a cell of a non-human organism or a part thereof, preferably a microorganism, a plant cell, a plant or a part thereof, as compared to a corresponding non-transformed wild type non-human organism or a part thereof; and
[39884] (b) growing the non-human organism or a part thereof under conditions which permit the production of valine or a composition comprising valine in said non-human organism or in the culture medium surrounding said non-human organism.

[39885] Accordingly, the present invention relates to a process for the production of isoleucine, which comprises
[39886] (a) increasing or generating the activity of a protein phosphatase in the cytosol of a cell of a non-human organism or a part thereof, preferably a microorganism, a plant cell, a plant or a part thereof, as compared to a corresponding non-transformed wild type non-human organism or a part thereof; and
[39887] (b) growing the non-human organism or a part thereof under conditions which permit the production of isoleucine or a composition comprising isoleucine in said non-human organism or in the culture medium surrounding said non-human organism.

[39888] Accordingly, the present invention relates to a process for the production of isoleucine, which comprises
[39889] (a) increasing or generating the activity of a At5g16650-protein in the cytosol of a cell of a non-human organism or a part thereof, preferably a microorganism, a plant cell, a plant or a part thereof, as compared to a corresponding non-transformed wild type non-human organism or a part thereof; and
[39890] (b) growing the non-human organism or a part thereof under conditions which permit the production of isoleucine or a composition comprising isoleucine in said non-human organism or in the culture medium surrounding said non-human organism.

[39891] Accordingly, the present invention relates to a process for the production of valine, which comprises
[39892] (a) increasing or generating the activity of a At5g16650-protein in the cytosol of a cell of a non-human organism or a part thereof, preferably a microorganism, a plant cell, a plant or a part thereof, as compared to a corresponding non-transformed wild type non-human organism or a part thereof; and
[39893] (b) growing the non-human organism or a part thereof under conditions which permit the production of valine or a composition comprising valine in said non-human organism or in the culture medium surrounding said non-human organism.

[39894] Accordingly, the present invention relates to a process for the production of valine, which comprises
[39895] (a) increasing or generating the activity of a monothiol glutaredoxin in the cytosol of a cell of a non-human organism or a part thereof, preferably a microorganism, a plant cell, a plant or a part thereof, as compared to a corresponding non-transformed wild type non-human organism or a part thereof; and
[39896] (b) growing the non-human organism or a part thereof under conditions which permit the production of valine or a composition comprising valine in said non-human organism or in the culture medium surrounding said non-human organism.

[39897] Accordingly, the present invention relates to a process for the production of leucine, which comprises
[39898] (a) increasing or generating the activity of a thioredoxin in the cytosol of a cell of a non-human organism or a part thereof, preferably a microorganism, a plant cell, a plant or a part thereof, as compared to a corresponding non-transformed wild type non-human organism or a part thereof; and
[39899] (b) growing the non-human organism or a part thereof under conditions which permit the production of leucine or a composition comprising leucine in said non-human organism or in the culture medium surrounding said non-human organism.

[39900] Accordingly, the present invention relates to a process for the production of valine, which comprises
[39901] (a) increasing or generating the activity of a thioredoxin in the cytosol of a cell of a non-human organism or a part thereof, preferably a microorganism, a plant cell, a plant or a part thereof, as compared to a corresponding non-transformed wild type non-human organism or a part thereof; and
[39902] (b) growing the non-human organism or a part thereof under conditions which permit the production of valine or a composition comprising valine in said non-human organism or in the culture medium surrounding said non-human organism.

[39903] Accordingly, the present invention relates to a process for the production of valine, which comprises
[39904] (a) increasing or generating the activity of a disease resistance protein in the cytosol of a cell of a non-human organism or a part thereof, preferably a microorganism, a plant cell, a plant or a part thereof, as compared to a corresponding non-transformed wild type non-human organism or a part thereof; and
[39905] (b) growing the non-human organism or a part thereof under conditions which permit the production of valine or a composition comprising valine in said non-human organism or in the culture medium surrounding said non-human organism.

[39906] Accordingly, the present invention relates to a process for the production of isoleucine, which comprises
[39907] (a) increasing or generating the activity of a pyruvate kinase in the cytosol of a cell of a non-human organism or a part thereof, preferably a microorganism, a plant cell, a plant or a part thereof, as compared to a corresponding non-transformed wild type non-human organism or a part thereof; and
[39908] (b) growing the non-human organism or a part thereof under conditions which permit the production of isoleucine or a composition comprising isoleucine in said non-human organism or in the culture medium surrounding said non-human organism.

[39909] Accordingly, the present invention relates to a process for the production of leucine, which comprises
[39910] (a) increasing or generating the activity of a pyruvate kinase in the cytosol of a cell of a non-human organism or a part thereof, preferably a microorganism, a plant cell, a plant or a part thereof, as compared to a corresponding non-transformed wild type non-human organism or a part thereof; and
[39911] (b) growing the non-human organism or a part thereof under conditions which permit the production of leucine or a composition comprising leucine in said non-human organism or in the culture medium surrounding said non-human organism.

[39912] Accordingly, the present invention relates to a process for the production of valine, which comprises
[39913] (a) increasing or generating the activity of a RNA-binding protein in the cytosol of a cell of a non-human organism or a part thereof, preferably a microorganism, a plant cell, a plant or a part thereof, as compared to a corresponding non-transformed wild type non-human organism or a part thereof; and
[39914] (b) growing the non-human organism or a part thereof under conditions which permit the production of valine or a composition comprising valine in said non-human organism or in the culture medium surrounding said non-human organism.

[39915] Accordingly, the present invention relates to a process for the production of isoleucine, which comprises
[39916] (a) increasing or generating the activity of a MADS-box transcription factor in the cytosol of a cell of a non-human organism or a part thereof, preferably a microorganism, a plant cell, a plant or a part thereof, as compared to a corresponding non-transformed wild type non-human organism or a part thereof; and
[39917] (b) growing the non-human organism or a part thereof under conditions which permit the production of isoleucine or a composition comprising isoleucine in said non-human organism or in the culture medium surrounding said non-human organism.

[39918] Accordingly, the present invention relates to a process for the production of leucine, which comprises
[39919] (a) increasing or generating the activity of a MADS-box transcription factor in the cytosol of a cell of a non-human organism or a part thereof, preferably a microorganism, a plant cell, a plant or a part thereof, as compared to a corresponding non-transformed wild type non-human organism or a part thereof; and
[39920] (b) growing the non-human organism or a part thereof under conditions which permit the production of leucine or a composition comprising leucine in said non-human organism or in the culture medium surrounding said non-human organism.

[39921] Accordingly, the present invention relates to a process for the production of isoleucine, which comprises
[39922] (a) increasing or generating the activity of a pyruvate kinase in the cytosol of a cell of a non-human organism or a part thereof, preferably a microorganism, a plant cell, a plant or a part thereof, as compared to a corresponding non-transformed wild type non-human organism or a part thereof; and
[39923] (b) growing the non-human organism or a part thereof under conditions which permit the production of isoleucine or a composition comprising isoleucine in said non-human organism or in the culture medium surrounding said non-human organism.

[39924] Accordingly, the present invention relates to a process for the production of leucine, which comprises
[39925] (a) increasing or generating the activity of a pyruvate kinase in the cytosol of a cell of a non-human organism or a part thereof, preferably a microorganism, a plant cell, a plant or a part thereof, as compared to a corresponding non-transformed wild type non-human organism or a part thereof; and
[39926] (b) growing the non-human organism or a part thereof under conditions which permit the production of leucine or a composition comprising leucine in said non-human organism or in the culture medium surrounding said non-human organism.

[39927] Accordingly, the present invention relates to a process for the production of valine, which comprises
[39928] (a) increasing or generating the activity of a pyruvate kinase in the cytosol of a cell of a non-human organism or a part thereof, preferably a microorganism, a plant cell, a plant or a part thereof, as compared to a corresponding non-transformed wild type non-human organism or a part thereof; and
[39929] (b) growing the non-human organism or a part thereof under conditions which permit the production of valine or a composition comprising valine in said non-human organism or in the culture medium surrounding said non-human organism.

[39930] Accordingly, the present invention relates to a process for the production of valine, which comprises
[39931] (a) increasing or generating the activity of a zinc finger protein in the cytosol of a cell of a non-human organism or a part thereof, preferably a microorganism, a plant cell, a plant or a part thereof, as compared to a corresponding non-transformed wild type non-human organism or a part thereof; and
[39932] (b) growing the non-human organism or a part thereof under conditions which permit the production of valine or a composition comprising valine in said non-human organism or in the culture medium surrounding said non-human organism.

[39933] Accordingly, the present invention relates to a process for the production of isoleucine, which comprises
[39934] (a) increasing or generating the activity of a malic enzyme in the cytosol of a cell of a non-human organism or a part thereof, preferably a microorganism, a plant cell, a plant or a part thereof, as compared to a corresponding non-transformed wild type non-human organism or a part thereof; and
[39935] (b) growing the non-human organism or a part thereof under conditions which permit the production of isoleucine or a composition comprising isoleucine in said non-human organism or in the culture medium surrounding said non-human organism.

[39936] Accordingly, the present invention relates to a process for the production of leucine, which comprises
[39937] (a) increasing or generating the activity of a malic enzyme in the cytosol of a cell of a non-human organism or a part thereof, preferably a microorganism, a plant cell, a plant or a part thereof, as compared to a corresponding non-transformed wild type non-human organism or a part thereof; and
[39938] (b) growing the non-human organism or a part thereof under conditions which permit the production of leucine or a composition comprising leucine in said non-human organism or in the culture medium surrounding said non-human organism.

[39939] Accordingly, the present invention relates to a process for the production of valine, which comprises
[39940] (a) increasing or generating the activity of a malic enzyme in the cytosol of a cell of a non-human organism or a part thereof, preferably a microorganism, a plant cell, a plant or a part thereof, as compared to a corresponding non-transformed wild type non-human organism or a part thereof; and
[39941] (b) growing the non-human organism or a part thereof under conditions which permit the production of valine or a composition comprising valine in said non-human organism or in the culture medium surrounding said non-human organism.

[39942] Accordingly, the present invention relates to a process for the production of valine, which comprises
[39943] (a) increasing or generating the activity of a pyruvate kinase in the cytosol of a cell of a non-human organism or a part thereof, preferably a microorganism, a plant cell, a plant or a part thereof, as compared to a corresponding non-transformed wild type non-human organism or a part thereof; and
[39944] (b) growing the non-human organism or a part thereof under conditions which permit the production of valine or a composition comprising valine in said non-human organism or in the culture medium surrounding said non-human organism.

[39945] Accordingly, the present invention relates to a process for the production of valine, which comprises
[39946] (a) increasing or generating the activity of a beta-hydroxylase in the cytosol of a cell of a non-human organism or a part thereof, preferably a microorganism, a plant cell, a plant or a part thereof, as compared to a corresponding non-transformed wild type non-human organism or a part thereof; and
[39947] (b) growing the non-human organism or a part thereof under conditions which permit the production of valine or a composition comprising valine in said non-human organism or in the culture medium surrounding said non-human organism.

[39948] Accordingly, the present invention relates to a process for the production of isoleucine, which comprises
[39949] (a) increasing or generating the activity of a elongation factor Tu in the cytosol of a cell of a non-human organism or a part thereof, preferably a microorganism, a plant cell, a plant or a part thereof, as compared to a corresponding non-transformed wild type non-human organism or a part thereof; and
[39950] (b) growing the non-human organism or a part thereof under conditions which permit the production of isoleucine or a composition comprising isoleucine in said non-human organism or in the culture medium surrounding said non-human organism.

[39951] Accordingly, the present invention relates to a process for the production of leucine, which comprises
[39952] (a) increasing or generating the activity of a elongation factor Tu in the cytosol of a cell of a non-human organism or a part thereof, preferably a microorganism, a plant cell, a plant or a part thereof, as compared to a corresponding non-transformed wild type non-human organism or a part thereof; and
[39953] (b) growing the non-human organism or a part thereof under conditions which permit the production of leucine or a composition comprising leucine in said non-human organism or in the culture medium surrounding said non-human organism.

[39954] Accordingly, the present invention relates to a process for the production of valine, which comprises
[39955] (a) increasing or generating the activity of a elongation factor Tu in the cytosol of a cell of a non-human organism or a part thereof, preferably a microorganism, a plant cell, a plant or a part thereof, as compared to a corresponding non-transformed wild type non-human organism or a part thereof; and
[39956] (b) growing the non-human organism or a part thereof under conditions which permit the production of valine or a composition comprising valine in said non-human organism or in the culture medium surrounding said non-human organism.

[39957] Accordingly, the present invention relates to a process for the production of valine, which comprises
[39958] (a) increasing or generating the activity of a 50S ribosomal protein L14 in the cytosol of a cell of a non-human organism or a part thereof, preferably a microorganism, a plant cell, a plant or a part thereof, as compared to a corresponding non-transformed wild type non-human organism or a part thereof; and
[39959] (b) growing the non-human organism or a part thereof under conditions which permit the production of valine or a composition comprising valine in said non-human organism or in the culture medium surrounding said non-human organism.

[39960] Accordingly, the present invention relates to a process for the production of valine, which comprises
[39961] (a) increasing or generating the activity of a ABC transporter permease protein in the cytosol of a cell of a non-human organism or a part thereof, preferably a microorganism, a plant cell, a plant or a part thereof, as compared to a corresponding non-transformed wild type non-human organism or a part thereof; and
[39962] (b) growing the non-human organism or a part thereof under conditions which permit the production of valine or a composition comprising valine in said non-human organism or in the culture medium surrounding said non-human organism.

[39963] Accordingly, the present invention relates to a process for the production of isoleucine, which comprises
[39964] (a) increasing or generating the activity of a enoyl-CoA hydratase in the cytosol of a cell of a non-human organism or a part thereof, preferably a microorganism, a plant cell, a plant or a part thereof, as compared to a corresponding non-transformed wild type non-human organism or a part thereof; and
[39965] (b) growing the non-human organism or a part thereof under conditions which permit the production of isoleucine or a composition comprising isoleucine in said non-human organism or in the culture medium surrounding said non-human organism.

[39966] Accordingly, the present invention relates to a process for the production of leucine, which comprises
[39967] (a) increasing or generating the activity of a enoyl-CoA hydratase in the cytosol of a cell of a non-human organism or a part thereof, preferably a microorganism, a plant cell, a plant or a part thereof, as compared to a corresponding non-transformed wild type non-human organism or a part thereof; and
[39968] (b) growing the non-human organism or a part thereof under conditions which permit the production of leucine or a composition comprising leucine in said non-human organism or in the culture medium surrounding said non-human organism.

[39969] Accordingly, the present invention relates to a process for the production of valine, which comprises
[39970] (a) increasing or generating the activity of a enoyl-CoA hydratase in the cytosol of a cell of a non-human organism or a part thereof, preferably a microorganism, a plant cell, a plant or a part thereof, as compared to a corresponding non-transformed wild type non-human organism or a part thereof; and
[39971] (b) growing the non-human organism or a part thereof under conditions which permit the production of valine or a composition comprising valine in said non-human organism or in the culture medium surrounding said non-human organism.

[39972] Accordingly, the present invention relates to a process for the production of isoleucine, which comprises
[39973] (a) increasing or generating the activity of a transcriptional regulator in the cytosol of a cell of a non-human organism or a part thereof, preferably a microorganism, a plant cell, a plant or a part thereof, as compared to a corresponding non-transformed wild type non-human organism or a part thereof; and
[39974] (b) growing the non-human organism or a part thereof under conditions which permit the production of isoleucine or a composition comprising isoleucine in said non-human organism or in the culture medium surrounding said non-human organism.

[39975] Accordingly, the present invention relates to a process for the production of leucine, which comprises
[39976] (a) increasing or generating the activity of a transcriptional regulator in the cytosol of a cell of a non-human organism or a part thereof, preferably a microorganism, a plant cell, a plant or a part thereof, as compared to a corresponding non-transformed wild type non-human organism or a part thereof; and
[39977] (b) growing the non-human organism or a part thereof under conditions which permit the production of leucine or a composition comprising leucine in said non-human organism or in the culture medium surrounding said non-human organism.

[39978] Accordingly, the present invention relates to a process for the production of valine, which comprises
[39979] (a) increasing or generating the activity of a transcriptional regulator in the cytosol of a cell of a non-human organism or a part thereof, preferably a microorganism, a plant cell, a plant or a part thereof, as compared to a corresponding non-transformed wild type non-human organism or a part thereof; and
[39980] (b) growing the non-human organism or a part thereof under conditions which permit the production of valine or a composition comprising valine in said non-human organism or in the culture medium surrounding said non-human organism.

[39981] Accordingly, the present invention relates to a process for the production of isoleucine, which comprises
[39982] (a) increasing or generating the activity of a acyltransferase in the cytosol of a cell of a non-human organism or a part thereof, preferably a microorganism, a plant cell, a plant or a part thereof, as compared to a corresponding non-transformed wild type non-human organism or a part thereof; and
[39983] (b) growing the non-human organism or a part thereof under conditions which permit the production of isoleucine or a composition comprising isoleucine in said non-human organism or in the culture medium surrounding said non-human organism.

[39984] Accordingly, the present invention relates to a process for the production of leucine, which comprises
[39985] (a) increasing or generating the activity of a acyltransferase in the cytosol of a cell of a non-human organism or a part thereof, preferably a microorganism, a plant cell, a plant or a part thereof, as compared to a corresponding non-transformed wild type non-human organism or a part thereof; and
[39986] (b) growing the non-human organism or a part thereof under conditions which permit the production of leucine or a composition comprising leucine in said non-human organism or in the culture medium surrounding said non-human organism.

[39987] Accordingly, the present invention relates to a process for the production of valine, which comprises
[39988] (a) increasing or generating the activity of a acyltransferase in the cytosol of a cell of a non-human organism or a part thereof, preferably a microorganism, a plant cell, a plant or a part thereof, as compared to a corresponding non-transformed wild type non-human organism or a part thereof; and
[39989] (b) growing the non-human organism or a part thereof under conditions which permit the production of valine or a composition comprising valine in said non-human organism or in the culture medium surrounding said non-human organism.

[39990] Accordingly, the present invention relates to a process for the production of isoleucine, which comprises
[39991] (a) increasing or generating the activity of a oxidoreductase in the cytosol of a cell of a non-human organism or a part thereof, preferably a microorganism, a plant cell, a plant or a part thereof, as compared to a corresponding non-transformed wild type non-human organism or a part thereof; and
[39992] (b) growing the non-human organism or a part thereof under conditions which permit the production of isoleucine or a composition comprising isoleucine in said non-human organism or in the culture medium surrounding said non-human organism.

[39993] Accordingly, the present invention relates to a process for the production of leucine, which comprises
[39994] (a) increasing or generating the activity of a oxidoreductase in the cytosol of a cell of a non-human organism or a part thereof, preferably a microorganism, a plant cell, a plant or a part thereof, as compared to a corresponding non-transformed wild type non-human organism or a part thereof; and
[39995] (b) growing the non-human organism or a part thereof under conditions which permit the production of leucine or a composition comprising leucine in said non-human organism or in the culture medium surrounding said non-human organism.

[39996] Accordingly, the present invention relates to a process for the production of valine, which comprises
[39997] (a) increasing or generating the activity of a oxidoreductase in the cytosol of a cell of a non-human organism or a part thereof, preferably a microorganism, a plant cell, a plant or a part thereof, as compared to a corresponding non-transformed wild type non-human organism or a part thereof; and
[39998] (b) growing the non-human organism or a part thereof under conditions which permit the production of valine or a composition comprising valine in said non-human organism or in the culture medium surrounding said non-human organism.

[39999] Accordingly, the present invention relates to a process for the production of valine, which comprises
[40000] (a) increasing or generating the activity of a ABC transporter component in the cytosol of a cell of a non-human organism or a part thereof, preferably a microorganism, a plant cell, a plant or a part thereof, as compared to a corresponding non-transformed wild type non-human organism or a part thereof; and
[40001] (b) growing the non-human organism or a part thereof under conditions which permit the production of valine or a composition comprising valine in said non-human organism or in the culture medium surrounding said non-human organism.

[40002] Accordingly, the present invention relates to a process for the production of valine, which comprises
[40003] (a) increasing or generating the activity of a glucose-1-phosphate cytidylyltransferase in the cytosol of a cell of a non-human organism or a part thereof, preferably a microorganism, a plant cell, a plant or a part thereof, as compared to a corresponding non-transformed wild type non-human organism or a part thereof; and
[40004] (b) growing the non-human organism or a part thereof under conditions which permit the production of valine or a composition comprising valine in said non-human organism or in the culture medium surrounding said non-human organism.

[40005] Accordingly, the present invention relates to a process for the production of isoleucine, which comprises
[40006] (a) increasing or generating the activity of a aminotransferase in the cytosol of a cell of a non-human organism or a part thereof, preferably a microorganism, a plant cell, a plant or a part thereof, as compared to a corresponding non-transformed wild type non-human organism or a part thereof; and
[40007] (b) growing the non-human organism or a part thereof under conditions which permit the production of isoleucine or a composition comprising isoleucine in said non-human organism or in the culture medium surrounding said non-human organism.

[40008] Accordingly, the present invention relates to a process for the production of valine, which comprises
[40009] (a) increasing or generating the activity of a aminotransferase in the cytosol of a cell of a non-human organism or a part thereof, preferably a microorganism, a plant cell, a plant or a part thereof, as compared to a corresponding non-transformed wild type non-human organism or a part thereof; and
[40010] (b) growing the non-human organism or a part thereof under conditions which permit the production of valine or a composition comprising valine in said non-human organism or in the culture medium surrounding said non-human organism.

[40011] Accordingly, the present invention relates to a process for the production of isoleucine, which comprises
[40012] (a) increasing or generating the activity of a NADH-quinone oxidoreductase subunit in the cytosol of a cell of a non-human organism or a part thereof, preferably a microorganism, a plant cell, a plant or a part thereof, as compared to a corresponding non-transformed wild type non-human organism or a part thereof; and
[40013] (b) growing the non-human organism or a part thereof under conditions which permit the production of isoleucine or a composition comprising isoleucine in said non-human organism or in the culture medium surrounding said non-human organism.

[40014] Accordingly, the present invention relates to a process for the production of leucine, which comprises
[40015] (a) increasing or generating the activity of a NADH-quinone oxidoreductase subunit in the cytosol of a cell of a non-human organism or a part thereof, preferably a microorganism, a plant cell, a plant or a part thereof, as compared to a corresponding non-transformed wild type non-human organism or a part thereof; and
[40016] (b) growing the non-human organism or a part thereof under conditions which permit the production of leucine or a composition comprising leucine in said non-human organism or in the culture medium surrounding said non-human organism.

[40017] Accordingly, the present invention relates to a process for the production of isoleucine, which comprises
[40018] (a) increasing or generating the activity of a glutamate-ammonia-ligase in the cytosol of a cell of a non-human organism or a part thereof, preferably a microorganism, a plant cell, a plant or a part thereof, as compared to a corresponding non-transformed wild type non-human organism or a part thereof; and
[40019] (b) growing the non-human organism or a part thereof under conditions which permit the production of isoleucine or a composition comprising isoleucine in said non-human organism or in the culture medium surrounding said non-human organism.

[40020] Accordingly, the present invention relates to a process for the production of leucine, which comprises
[40021] (a) increasing or generating the activity of a glutamate-ammonia-ligase in the cytosol of a cell of a non-human organism or a part thereof, preferably a microorganism, a plant cell, a plant or a part thereof, as compared to a corresponding non-transformed wild type non-human organism or a part thereof; and
[40022] (b) growing the non-human organism or a part thereof under conditions which permit the production of leucine or a composition comprising leucine in said non-human organism or in the culture medium surrounding said non-human organism.

[40023] Accordingly, the present invention relates to a process for the production of valine, which comprises
[40024] (a) increasing or generating the activity of a glutamate-ammonia-ligase in the cytosol of a cell of a non-human organism or a part thereof, preferably a microorganism, a plant cell, a plant or a part thereof, as compared to a corresponding non-transformed wild type non-human organism or a part thereof; and
[40025] (b) growing the non-human organism or a part thereof under conditions which permit the production of valine or a composition comprising valine in said non-human organism or in the culture medium surrounding said non-human organism.

[40026] Accordingly, the present invention relates to a process for the production of valine, which comprises
[40027] (a) increasing or generating the activity of a isopropylmalate isomerase large subunit in the cytosol of a cell of a non-human organism or a part thereof, preferably a microorganism, a plant cell, a plant or a part thereof, as compared to a corresponding non-transformed wild type non-human organism or a part thereof; and
[40028] (b) growing the non-human organism or a part thereof under conditions which permit the production of valine or a composition comprising valine in said non-human organism or in the culture medium surrounding said non-human organism.

[40029] Accordingly, the present invention relates to a process for the production of isoleucine, which comprises
[40030] (a) increasing or generating the activity of a hydrolase in the cytosol of a cell of a non-human organism or a part thereof, preferably a microorganism, a plant cell, a plant or a part thereof, as compared to a corresponding non-transformed wild type non-human organism or a part thereof; and
[40031] (b) growing the non-human organism or a part thereof under conditions which permit the production of isoleucine or a composition comprising isoleucine in said non-human organism or in the culture medium surrounding said non-human organism.

[40032] Accordingly, the present invention relates to a process for the production of leucine, which comprises
[40033] (a) increasing or generating the activity of a hydrolase in the cytosol of a cell of a non-human organism or a part thereof, preferably a microorganism, a plant cell, a plant or a part thereof, as compared to a corresponding non-transformed wild type non-human organism or a part thereof; and
[40034] (b) growing the non-human organism or a part thereof under conditions which permit the production of leucine or a composition comprising leucine in said non-human organism or in the culture medium surrounding said non-human organism.

[40035] Accordingly, the present invention relates to a process for the production of valine, which comprises
[40036] (a) increasing or generating the activity of a hydrolase in the cytosol of a cell of a non-human organism or a part thereof, preferably a microorganism, a plant cell, a plant or a part thereof, as compared to a corresponding non-transformed wild type non-human organism or a part thereof; and
[40037] (b) growing the non-human organism or a part thereof under conditions which permit the production of valine or a composition comprising valine in said non-human organism or in the culture medium surrounding said non-human organism.

[40038] Accordingly, the present invention relates to a process for the production of isoleucine, which comprises
[40039] (a) increasing or generating the activity of a fumarylacetoacetate hydrolase in the cytosol of a cell of a non-human organism or a part thereof, preferably a microorganism, a plant cell, a plant or a part thereof, as compared to a corresponding non-transformed wild type non-human organism or a part thereof; and
[40040] (b) growing the non-human organism or a part thereof under conditions which permit the production of isoleucine or a composition comprising isoleucine in said non-human organism or in the culture medium surrounding said non-human organism.

[40041] Accordingly, the present invention relates to a process for the production of leucine, which comprises
[40042] (a) increasing or generating the activity of a fumarylacetoacetate hydrolase in the cytosol of a cell of a non-human organism or a part thereof, preferably a microorganism, a plant cell, a plant or a part thereof, as compared to a corresponding non-transformed wild type non-human organism or a part thereof; and
[40043] (b) growing the non-human organism or a part thereof under conditions which permit the production of leucine or a composition comprising leucine in said non-human organism or in the culture medium surrounding said non-human organism.

[40044] Accordingly, the present invention relates to a process for the production of valine, which comprises
[40045] (a) increasing or generating the activity of a fumarylacetoacetate hydrolase in the cytosol of a cell of a non-human organism or a part thereof, preferably a microorganism, a plant cell, a plant or a part thereof, as compared to a corresponding non-transformed wild type non-human organism or a part thereof; and
[40046] (b) growing the non-human organism or a part thereof under conditions which permit the production of valine or a composition comprising valine in said non-human organism or in the culture medium surrounding said non-human organism.

[40047] Accordingly, the present invention relates to a process for the production of leucine, which comprises
[40048] (a) increasing or generating the activity of a peptidase in the cytosol of a cell of a non-human organism or a part thereof, preferably a microorganism, a plant cell, a plant or a part thereof, as compared to a corresponding non-transformed wild type non-human organism or a part thereof; and
[40049] (b) growing the non-human organism or a part thereof under conditions which permit the production of leucine or a composition comprising leucine in said non-human organism or in the culture medium surrounding said non-human organism.

[40050] Accordingly, the present invention relates to a process for the production of isoleucine, which comprises
[40051] (a) increasing or generating the activity of a chaperone protein CIpB in the cytosol of a cell of a non-human organism or a part thereof, preferably a microorganism, a plant cell, a plant or a part thereof, as compared to a corresponding non-transformed wild type non-human organism or a part thereof; and
[40052] (b) growing the non-human organism or a part thereof under conditions which permit the production of isoleucine or a composition comprising isoleucine in said non-human organism or in the culture medium surrounding said non-human organism.

[40053] Accordingly, the present invention relates to a process for the production of isoleucine, which comprises
[40054] (a) increasing or generating the activity of a purine nucleoside phosphorylase in the cytosol of a cell of a non-human organism or a part thereof, preferably a microorganism, a plant cell, a plant or a part thereof, as compared to a corresponding non-transformed wild type non-human organism or a part thereof; and
[40055] (b) growing the non-human organism or a part thereof under conditions which permit the production of isoleucine or a composition comprising isoleucine in said non-human organism or in the culture medium surrounding said non-human organism.

[40056] Accordingly, the present invention relates to a process for the production of leucine, which comprises
[40057] (a) increasing or generating the activity of a purine nucleoside phosphorylase in the cytosol of a cell of a non-human organism or a part thereof, preferably a microorganism, a plant cell, a plant or a part thereof, as compared to a corresponding non-transformed wild type non-human organism or a part thereof; and
[40058] (b) growing the non-human organism or a part thereof under conditions which permit the production of leucine or a composition comprising leucine in said non-human organism or in the culture medium surrounding said non-human organism.

[40059] Accordingly, the present invention relates to a process for the production of valine, which comprises
[40060] (a) increasing or generating the activity of a purine nucleoside phosphorylase in the cytosol of a cell of a non-human organism or a part thereof, preferably a microorganism, a plant cell, a plant or a part thereof, as compared to a corresponding non-transformed wild type non-human organism or a part thereof; and
[40061] (b) growing the non-human organism or a part thereof under conditions which permit the production of valine or a composition comprising valine in said non-human organism or in the culture medium surrounding said non-human organism.

[40062] Accordingly, the present invention relates to a process for the production of isoleucine, which comprises
[40063] (a) increasing or generating the activity of a pyruvate kinase in the cytosol of a cell of a non-human organism or a part thereof, preferably a microorganism, a plant cell, a plant or a part thereof, as compared to a corresponding non-transformed wild type non-human organism or a part thereof; and
[40064] (b) growing the non-human organism or a part thereof under conditions which permit the production of isoleucine or a composition comprising isoleucine in said non-human organism or in the culture medium surrounding said non-human organism.

[40065] Accordingly, the present invention relates to a process for the production of valine, which comprises
[40066] (a) increasing or generating the activity of a pyruvate kinase in the cytosol of a cell of a non-human organism or a part thereof, preferably a microorganism, a plant cell, a plant or a part thereof, as compared to a corresponding non-transformed wild type non-human organism or a part thereof; and
[40067] (b) growing the non-human organism or a part thereof under conditions which permit the production of valine or a composition comprising valine in said non-human organism or in the culture medium surrounding said non-human organism.

[40068] Accordingly, the present invention relates to a process for the production of isoleucine, which comprises
[40069] (a) increasing or generating the activity of a threonine synthase in the cytosol of a cell of a non-human organism or a part thereof, preferably a microorganism, a plant cell, a plant or a part thereof, as compared to a corresponding non-transformed wild type non-human organism or a part thereof; and
[40070] (b) growing the non-human organism or a part thereof under conditions which permit the production of isoleucine or a composition comprising isoleucine in said non-human organism or in the culture medium surrounding said non-human organism.

[40071] Accordingly, the present invention relates to a process for the production of leucine, which comprises
[40072] (a) increasing or generating the activity of a threonine synthase in the cytosol of a cell of a non-human organism or a part thereof, preferably a microorganism, a plant cell, a plant or a part thereof, as compared to a corresponding non-transformed wild type non-human organism or a part thereof; and
[40073] (b) growing the non-human organism or a part thereof under conditions which permit the production of leucine or a composition comprising leucine in said non-human organism or in the culture medium surrounding said non-human organism.

[40074] Accordingly, the present invention relates to a process for the production of valine, which comprises
[40075] (a) increasing or generating the activity of a threonine synthase in the cytosol of a cell of a non-human organism or a part thereof, preferably a microorganism, a plant cell, a plant or a part thereof, as compared to a corresponding non-transformed wild type non-human organism or a part thereof; and
[40076] (b) growing the non-human organism or a part thereof under conditions which permit the production of valine or a composition comprising valine in said non-human organism or in the culture medium surrounding said non-human organism.

[40077] Accordingly, the present invention relates to a process for the production of valine, which comprises
[40078] (a) increasing or generating the activity of a b0050-protein in the cytosol of a cell of a non-human organism or a part thereof, preferably a microorganism, a plant cell, a plant or a part thereof, as compared to a corresponding non-transformed wild type non-human organism or a part thereof; and
[40079] (b) growing the non-human organism or a part thereof under conditions which permit the production of valine or a composition comprising valine in said non-human organism or in the culture medium surrounding said non-human organism.

[40080] Accordingly, the present invention relates to a process for the production of leucine, which comprises
[40081] (a) increasing or generating the activity of a acetolactate synthase small subunit in the cytosol of a cell of a non-human organism or a part thereof, preferably a microorganism, a plant cell, a plant or a part thereof, as compared to a corresponding non-transformed wild type non-human organism or a part thereof; and
[40082] (b) growing the non-human organism or a part thereof under conditions which permit the production of leucine or a composition comprising leucine in said non-human organism or in the culture medium surrounding said non-human organism.

[40083] Accordingly, the present invention relates to a process for the production of leucine, which comprises
[40084] (a) increasing or generating the activity of a beta-galactosidase in the cytosol of a cell of a non-human organism or a part thereof, preferably a microorganism, a plant cell, a plant or a part thereof, as compared to a corresponding non-transformed wild type non-human organism or a part thereof; and
[40085] (b) growing the non-human organism or a part thereof under conditions which permit the production of leucine or a composition comprising leucine in said non-human organism or in the culture medium surrounding said non-human organism.

[40086] Accordingly, the present invention relates to a process for the production of isoleucine, which comprises
[40087] (a) increasing or generating the activity of a 2,3-dihydroxyphenylpropionate 1,2-dioxygenase in the cytosol of a cell of a non-human organism or a part thereof, preferably a microorganism, a plant cell, a plant or a part thereof, as compared to a corresponding non-transformed wild type non-human organism or a part thereof; and
[40088] (b) growing the non-human organism or a part thereof under conditions which permit the production of isoleucine or a composition comprising isoleucine in said non-human organism or in the culture medium surrounding said non-human organism.

[40089] Accordingly, the present invention relates to a process for the production of valine, which comprises
[40090] (a) increasing or generating the activity of a 2,3-dihydroxyphenylpropionate 1,2-dioxygenase in the cytosol of a cell of a non-human organism or a part thereof, preferably a microorganism, a plant cell, a plant or a part thereof, as compared to a corresponding non-transformed wild type non-human organism or a part thereof; and
[40091] (b) growing the non-human organism or a part thereof under conditions which permit the production of valine or a composition comprising valine in said non-human organism or in the culture medium surrounding said non-human organism.

[40092] Accordingly, the present invention relates to a process for the production of isoleucine, which comprises
[40093] (a) increasing or generating the activity of a ATP-binding component of a transport system in the cytosol of a cell of a non-human organism or a part thereof, preferably a microorganism, a plant cell, a plant or a part thereof, as compared to a corresponding non-transformed wild type non-human organism or a part thereof; and
[40094] (b) growing the non-human organism or a part thereof under conditions which permit the production of isoleucine or a composition comprising isoleucine in said non-human organism or in the culture medium surrounding said non-human organism.

[40095] Accordingly, the present invention relates to a process for the production of leucine, which comprises
[40096] (a) increasing or generating the activity of a ATP-binding component of a transport system in the cytosol of a cell of a non-human organism or a part thereof, preferably a microorganism, a plant cell, a plant or a part thereof, as compared to a corresponding non-transformed wild type non-human organism or a part thereof; and
[40097] (b) growing the non-human organism or a part thereof under conditions which permit the production of leucine or a composition comprising leucine in said non-human organism or in the culture medium surrounding said non-human organism.

[40098] Accordingly, the present invention relates to a process for the production of valine, which comprises
[40099] (a) increasing or generating the activity of a ATP-binding component of a transport system in the cytosol of a cell of a non-human organism or a part thereof, preferably a microorganism, a plant cell, a plant or a part thereof, as compared to a corresponding non-transformed wild type non-human organism or a part thereof; and
[40100] (b) growing the non-human organism or a part thereof under conditions which permit the production of valine or a composition comprising valine in said non-human organism or in the culture medium surrounding said non-human organism.

[40101] Accordingly, the present invention relates to a process for the production of isoleucine, which comprises
[40102] (a) increasing or generating the activity of a membrane transport protein in the cytosol of a cell of a non-human organism or a part thereof, preferably a microorganism, a plant cell, a plant or a part thereof, as compared to a corresponding non-transformed wild type non-human organism or a part thereof; and
[40103] (b) growing the non-human organism or a part thereof under conditions which permit the production of isoleucine or a composition comprising isoleucine in said non-human organism or in the culture medium surrounding said non-human organism.

[40104] Accordingly, the present invention relates to a process for the production of isoleucine, which comprises
[40105] (a) increasing or generating the activity of a isochorismate synthase in the cytosol of a cell of a non-human organism or a part thereof, preferably a microorganism, a plant cell, a plant or a part thereof, as compared to a corresponding non-transformed wild type non-human organism or a part thereof; and
[40106] (b) growing the non-human organism or a part thereof under conditions which permit the production of isoleucine or a composition comprising isoleucine in said non-human organism or in the culture medium surrounding said non-human organism.

[40107] Accordingly, the present invention relates to a process for the production of leucine, which comprises
[40108] (a) increasing or generating the activity of a isochorismate synthase in the cytosol of a cell of a non-human organism or a part thereof, preferably a microorganism, a plant cell, a plant or a part thereof, as compared to a corresponding non-transformed wild type non-human organism or a part thereof; and
[40109] (b) growing the non-human organism or a part thereof under conditions which permit the production of leucine or a composition comprising leucine in said non-human organism or in the culture medium surrounding said non-human organism.

[40110] Accordingly, the present invention relates to a process for the production of valine, which comprises
[40111] (a) increasing or generating the activity of a isochorismate synthase in the cytosol of a cell of a non-human organism or a part thereof, preferably a microorganism, a plant cell, a plant or a part thereof, as compared to a corresponding non-transformed wild type non-human organism or a part thereof; and
[40112] (b) growing the non-human organism or a part thereof under conditions which permit the production of valine or a composition comprising valine in said non-human organism or in the culture medium surrounding said non-human organism.

[40113] Accordingly, the present invention relates to a process for the production of isoleucine, which comprises
[40114] (a) increasing or generating the activity of a zinc transporter in the cytosol of a cell of a non-human organism or a part thereof, preferably a microorganism, a plant cell, a plant or a part thereof, as compared to a corresponding non-transformed wild type non-human organism or a part thereof; and
[40115] (b) growing the non-human organism or a part thereof under conditions which permit the production of isoleucine or a composition comprising isoleucine in said non-human organism or in the culture medium surrounding said non-human organism.

[40116] Accordingly, the present invention relates to a process for the production of leucine, which comprises
[40117] (a) increasing or generating the activity of a zinc transporter in the cytosol of a cell of a non-human organism or a part thereof, preferably a microorganism, a plant cell, a plant or a part thereof, as compared to a corresponding non-transformed wild type non-human organism or a part thereof; and
[40118] (b) growing the non-human organism or a part thereof under conditions which permit the production of leucine or a composition comprising leucine in said non-human organism or in the culture medium surrounding said non-human organism.

[40119] Accordingly, the present invention relates to a process for the production of isoleucine, which comprises
[40120] (a) increasing or generating the activity of a major facilitator superfamily transporter protein in the cytosol of a cell of a non-human organism or a part thereof, preferably a microorganism, a plant cell, a plant or a part thereof, as compared to a corresponding non-transformed wild type non-human organism or a part thereof; and
[40121] (b) growing the non-human organism or a part thereof under conditions which permit the production of isoleucine or a composition comprising isoleucine in said non-human organism or in the culture medium surrounding said non-human organism.

[40122] Accordingly, the present invention relates to a process for the production of leucine, which comprises
[40123] (a) increasing or generating the activity of a major facilitator superfamily transporter protein in the cytosol of a cell of a non-human organism or a part thereof, preferably a microorganism, a plant cell, a plant or a part thereof, as compared to a corresponding non-transformed wild type non-human organism or a part thereof; and
[40124] (b) growing the non-human organism or a part thereof under conditions which permit the production of leucine or a composition comprising leucine in said non-human organism or in the culture medium surrounding said non-human organism.

[40125] Accordingly, the present invention relates to a process for the production of valine, which comprises
[40126] (a) increasing or generating the activity of a major facilitator superfamily transporter protein in the cytosol of a cell of a non-human organism or a part thereof, preferably a microorganism, a plant cell, a plant or a part thereof, as compared to a corresponding non-transformed wild type non-human organism or a part thereof; and
[40127] (b) growing the non-human organism or a part thereof under conditions which permit the production of valine or a composition comprising valine in said non-human organism or in the culture medium surrounding said non-human organism.

[40128] Accordingly, the present invention relates to a process for the production of leucine, which comprises
[40129] (a) increasing or generating the activity of a DNA helicase IV in the cytosol of a cell of a non-human organism or a part thereof, preferably a microorganism, a plant cell, a plant or a part thereof, as compared to a corresponding non-transformed wild type non-human organism or a part thereof; and
[40130] (b) growing the non-human organism or a part thereof under conditions which permit the production of leucine or a composition comprising leucine in said non-human organism or in the culture medium surrounding said non-human organism.

[40131] Accordingly, the present invention relates to a process for the production of valine, which comprises
[40132] (a) increasing or generating the activity of a methylglyoxal synthase in the cytosol of a cell of a non-human organism or a part thereof, preferably a microorganism, a plant cell, a plant or a part thereof, as compared to a corresponding non-transformed wild type non-human organism or a part thereof; and
[40133] (b) growing the non-human organism or a part thereof under conditions which permit the production of valine or a composition comprising valine in said non-human organism or in the culture medium surrounding said non-human organism.

[40134] Accordingly, the present invention relates to a process for the production of valine, which comprises
[40135] (a) increasing or generating the activity of a phosphoanhydride phosphorylase in the cytosol of a cell of a non-human organism or a part thereof, preferably a microorganism, a plant cell, a plant or a part thereof, as compared to a corresponding non-transformed wild type non-human organism or a part thereof; and
[40136] (b) growing the non-human organism or a part thereof under conditions which permit the production of valine or a composition comprising valine in said non-human organism or in the culture medium surrounding said non-human organism.

[40137] Accordingly, the present invention relates to a process for the production of isoleucine, which comprises
[40138] (a) increasing or generating the activity of a b1003-protein in the cytosol of a cell of a non-human organism or a part thereof, preferably a microorganism, a plant cell, a plant or a part thereof, as compared to a corresponding non-transformed wild type non-human organism or a part thereof; and
[40139] (b) growing the non-human organism or a part thereof under conditions which permit the production of isoleucine or a composition comprising isoleucine in said non-human organism or in the culture medium surrounding said non-human organism.

[40140] Accordingly, the present invention relates to a process for the production of leucine, which comprises
[40141] (a) increasing or generating the activity of a b1003-protein in the cytosol of a cell of a non-human organism or a part thereof, preferably a microorganism, a plant cell, a plant or a part thereof, as compared to a corresponding non-transformed wild type non-human organism or a part thereof; and
[40142] (b) growing the non-human organism or a part thereof under conditions which permit the production of leucine or a composition comprising leucine in said non-human organism or in the culture medium surrounding said non-human organism.

[40143] Accordingly, the present invention relates to a process for the production of valine, which comprises
[40144] (a) increasing or generating the activity of a b1003-protein in the cytosol of a cell of a non-human organism or a part thereof, preferably a microorganism, a plant cell, a plant or a part thereof, as compared to a corresponding non-transformed wild type non-human organism or a part thereof; and
[40145] (b) growing the non-human organism or a part thereof under conditions which permit the production of valine or a composition comprising valine in said non-human organism or in the culture medium surrounding said non-human organism.

[40146] Accordingly, the present invention relates to a process for the production of isoleucine, which comprises
[40147] (a) increasing or generating the activity of a b1163-protein in the cytosol of a cell of a non-human organism or a part thereof, preferably a microorganism, a plant cell, a plant or a part thereof, as compared to a corresponding non-transformed wild type non-human organism or a part thereof; and
[40148] (b) growing the non-human organism or a part thereof under conditions which permit the production of isoleucine or a composition comprising isoleucine in said non-human organism or in the culture medium surrounding said non-human organism.

[40149] Accordingly, the present invention relates to a process for the production of leucine, which comprises
[40150] (a) increasing or generating the activity of a b1163-protein in the cytosol of a cell of a non-human organism or a part thereof, preferably a microorganism, a plant cell, a plant or a part thereof, as compared to a corresponding non-transformed wild type non-human organism or a part thereof; and
[40151] (b) growing the non-human organism or a part thereof under conditions which permit the production of leucine or a composition comprising leucine in said non-human organism or in the culture medium surrounding said non-human organism.

[40152] Accordingly, the present invention relates to a process for the production of valine, which comprises
[40153] (a) increasing or generating the activity of a b1163-protein in the cytosol of a cell of a non-human organism or a part thereof, preferably a microorganism, a plant cell, a plant or a part thereof, as compared to a corresponding non-transformed wild type non-human organism or a part thereof; and
[40154] (b) growing the non-human organism or a part thereof under conditions which permit the production of valine or a composition comprising valine in said non-human organism or in the culture medium surrounding said non-human organism.

[40155] Accordingly, the present invention relates to a process for the production of leucine, which comprises
[40156] (a) increasing or generating the activity of a DNA polymerase in the cytosol of a cell of a non-human organism or a part thereof, preferably a microorganism, a plant cell, a plant or a part thereof, as compared to a corresponding non-transformed wild type non-human organism or a part thereof; and
[40157] (b) growing the non-human organism or a part thereof under conditions which permit the production of leucine or a composition comprising leucine in said non-human organism or in the culture medium surrounding said non-human organism.

[40158] Accordingly, the present invention relates to a process for the production of valine, which comprises
[40159] (a) increasing or generating the activity of a DNA polymerase in the cytosol of a cell of a non-human organism or a part thereof, preferably a microorganism, a plant cell, a plant or a part thereof, as compared to a corresponding non-transformed wild type non-human organism or a part thereof; and
[40160] (b) growing the non-human organism or a part thereof under conditions which permit the production of valine or a composition comprising valine in said non-human organism or in the culture medium surrounding said non-human organism.

[40161] Accordingly, the present invention relates to a process for the production of isoleucine, which comprises
[40162] (a) increasing or generating the activity of a membrane protein in the cytosol of a cell of a non-human organism or a part thereof, preferably a microorganism, a plant cell, a plant or a part thereof, as compared to a corresponding non-transformed wild type non-human organism or a part thereof; and
[40163] (b) growing the non-human organism or a part thereof under conditions which permit the production of isoleucine or a composition comprising isoleucine in said non-human organism or in the culture medium surrounding said non-human organism.

[40164] Accordingly, the present invention relates to a process for the production of leucine, which comprises
[40165] (a) increasing or generating the activity of a membrane protein in the cytosol of a cell of a non-human organism or a part thereof, preferably a microorganism, a plant cell, a plant or a part thereof, as compared to a corresponding non-transformed wild type non-human organism or a part thereof; and
[40166] (b) growing the non-human organism or a part thereof under conditions which permit the production of leucine or a composition comprising leucine in said non-human organism or in the culture medium surrounding said non-human organism.

[40167] Accordingly, the present invention relates to a process for the production of valine, which comprises
[40168] (a) increasing or generating the activity of a membrane protein in the cytosol of a cell of a non-human organism or a part thereof, preferably a microorganism, a plant cell, a plant or a part thereof, as compared to a corresponding non-transformed wild type non-human organism or a part thereof; and
[40169] (b) growing the non-human organism or a part thereof under conditions which permit the production of valine or a composition comprising valine in said non-human organism or in the culture medium surrounding said non-human organism.

[40170] Accordingly, the present invention relates to a process for the production of isoleucine, which comprises
[40171] (a) increasing or generating the activity of a anthranilate synthase component II in the cytosol of a cell of a non-human organism or a part thereof, preferably a microorganism, a plant cell, a plant or a part thereof, as compared to a corresponding non-transformed wild type non-human organism or a part thereof; and
[40172] (b) growing the non-human organism or a part thereof under conditions which permit the production of isoleucine or a composition comprising isoleucine in said non-human organism or in the culture medium surrounding said non-human organism.

[40173] Accordingly, the present invention relates to a process for the production of leucine, which comprises
[40174] (a) increasing or generating the activity of a anthranilate synthase component II in the cytosol of a cell of a non-human organism or a part thereof, preferably a microorganism, a plant cell, a plant or a part thereof, as compared to a corresponding non-transformed wild type non-human organism or a part thereof; and
[40175] (b) growing the non-human organism or a part thereof under conditions which permit the production of leucine or a composition comprising leucine in said non-human organism or in the culture medium surrounding said non-human organism.

[40176] Accordingly, the present invention relates to a process for the production of valine, which comprises
[40177] (a) increasing or generating the activity of a anthranilate synthase component II in the cytosol of a cell of a non-human organism or a part thereof, preferably a microorganism, a plant cell, a plant or a part thereof, as compared to a corresponding non-transformed wild type non-human organism or a part thereof; and
[40178] (b) growing the non-human organism or a part thereof under conditions which permit the production of valine or a composition comprising valine in said non-human organism or in the culture medium surrounding said non-human organism.

[40179] Accordingly, the present invention relates to a process for the production of leucine, which comprises
[40180] (a) increasing or generating the activity of a glutamine synthetase in the cytosol of a cell of a non-human organism or a part thereof, preferably a microorganism, a plant cell, a plant or a part thereof, as compared to a corresponding non-transformed wild type non-human organism or a part thereof; and
[40181] (b) growing the non-human organism or a part thereof under conditions which permit the production of leucine or a composition comprising leucine in said non-human organism or in the culture medium surrounding said non-human organism.

[40182] Accordingly, the present invention relates to a process for the production of valine, which comprises
[40183] (a) increasing or generating the activity of a aldehyde dehydrogenase in the cytosol of a cell of a non-human organism or a part thereof, preferably a microorganism, a plant cell, a plant or a part thereof, as compared to a corresponding non-transformed wild type non-human organism or a part thereof; and
[40184] (b) growing the non-human organism or a part thereof under conditions which permit the production of valine or a composition comprising valine in said non-human organism or in the culture medium surrounding said non-human organism.

[40185] Accordingly, the present invention relates to a process for the production of valine, which comprises
[40186] (a) increasing or generating the activity of a b1445-protein in the cytosol of a cell of a non-human organism or a part thereof, preferably a microorganism, a plant cell, a plant or a part thereof, as compared to a corresponding non-transformed wild type non-human organism or a part thereof; and
[40187] (b) growing the non-human organism or a part thereof under conditions which permit the production of valine or a composition comprising valine in said non-human organism or in the culture medium surrounding said non-human organism.

[40188] Accordingly, the present invention relates to a process for the production of valine, which comprises
[40189] (a) increasing or generating the activity of a NADP-dependent malic enzyme in the cytosol of a cell of a non-human organism or a part thereof, preferably a microorganism, a plant cell, a plant or a part thereof, as compared to a corresponding non-transformed wild type non-human organism or a part thereof; and
[40190] (b) growing the non-human organism or a part thereof under conditions which permit the production of valine or a composition comprising valine in said non-human organism or in the culture medium surrounding said non-human organism.

[40191] Accordingly, the present invention relates to a process for the production of isoleucine, which comprises
[40192] (a) increasing or generating the activity of a b1522-protein in the cytosol of a cell of a non-human organism or a part thereof, preferably a microorganism, a plant cell, a plant or a part thereof, as compared to a corresponding non-transformed wild type non-human organism or a part thereof; and
[40193] (b) growing the non-human organism or a part thereof under conditions which permit the production of isoleucine or a composition comprising isoleucine in said non-human organism or in the culture medium surrounding said non-human organism.

[40194] Accordingly, the present invention relates to a process for the production of leucine, which comprises
[40195] (a) increasing or generating the activity of a b1522-protein in the cytosol of a cell of a non-human organism or a part thereof, preferably a microorganism, a plant cell, a plant or a part thereof, as compared to a corresponding non-transformed wild type non-human organism or a part thereof; and
[40196] (b) growing the non-human organism or a part thereof under conditions which permit the production of leucine or a composition comprising leucine in said non-human organism or in the culture medium surrounding said non-human organism.

[40197] Accordingly, the present invention relates to a process for the production of valine, which comprises
[40198] (a) increasing or generating the activity of a b1522-protein in the cytosol of a cell of a non-human organism or a part thereof, preferably a microorganism, a plant cell, a plant or a part thereof, as compared to a corresponding non-transformed wild type non-human organism or a part thereof; and
[40199] (b) growing the non-human organism or a part thereof under conditions which permit the production of valine or a composition comprising valine in said non-human organism or in the culture medium surrounding said non-human organism.

[40200] Accordingly, the present invention relates to a process for the production of isoleucine, which comprises
[40201] (a) increasing or generating the activity of a acid shock protein in the cytosol of a cell of a non-human organism or a part thereof, preferably a microorganism, a plant cell, a plant or a part thereof, as compared to a corresponding non-transformed wild type non-human organism or a part thereof; and
[40202] (b) growing the non-human organism or a part thereof under conditions which permit the production of isoleucine or a composition comprising isoleucine in said non-human organism or in the culture medium surrounding said non-human organism.

[40203] Accordingly, the present invention relates to a process for the production of leucine, which comprises
[40204] (a) increasing or generating the activity of a acid shock protein in the cytosol of a cell of a non-human organism or a part thereof, preferably a microorganism, a plant cell, a plant or a part thereof, as compared to a corresponding non-transformed wild type non-human organism or a part thereof; and
[40205] (b) growing the non-human organism or a part thereof under conditions which permit the production of leucine or a composition comprising leucine in said non-human organism or in the culture medium surrounding said non-human organism.

[40206] Accordingly, the present invention relates to a process for the production of valine, which comprises
[40207] (a) increasing or generating the activity of a acid shock protein in the cytosol of a cell of a non-human organism or a part thereof, preferably a microorganism, a plant cell, a plant or a part thereof, as compared to a corresponding non-transformed wild type non-human organism or a part thereof; and
[40208] (b) growing the non-human organism or a part thereof under conditions which permit the production of valine or a composition comprising valine in said non-human organism or in the culture medium surrounding said non-human organism.

[40209] Accordingly, the present invention relates to a process for the production of valine, which comprises
[40210] (a) increasing or generating the activity of a transport protein in the cytosol of a cell of a non-human organism or a part thereof, preferably a microorganism, a plant cell, a plant or a part thereof, as compared to a corresponding non-transformed wild type non-human organism or a part thereof; and
[40211] (b) growing the non-human organism or a part thereof under conditions which permit the production of valine or a composition comprising valine in said non-human organism or in the culture medium surrounding said non-human organism.

[40212] Accordingly, the present invention relates to a process for the production of valine, which comprises
[40213] (a) increasing or generating the activity of a b1670-protein in the cytosol of a cell of a non-human organism or a part thereof, preferably a microorganism, a plant cell, a plant or a part thereof, as compared to a corresponding non-transformed wild type non-human organism or a part thereof; and
[40214] (b) growing the non-human organism or a part thereof under conditions which permit the production of valine or a composition comprising valine in said non-human organism or in the culture medium surrounding said non-human organism.

[40215] Accordingly, the present invention relates to a process for the production of valine, which comprises
[40216] (a) increasing or generating the activity of a b1672-protein in the cytosol of a cell of a non-human organism or a part thereof, preferably a microorganism, a plant cell, a plant or a part thereof, as compared to a corresponding non-transformed wild type non-human organism or a part thereof; and
[40217] (b) growing the non-human organism or a part thereof under conditions which permit the production of valine or a composition comprising valine in said non-human organism or in the culture medium surrounding said non-human organism.

[40218] Accordingly, the present invention relates to a process for the production of leucine, which comprises
[40219] (a) increasing or generating the activity of a pyruvate kinase in the cytosol of a cell of a non-human organism or a part thereof, preferably a microorganism, a plant cell, a plant or a part thereof, as compared to a corresponding non-transformed wild type non-human organism or a part thereof; and
[40220] (b) growing the non-human organism or a part thereof under conditions which permit the production of leucine or a composition comprising leucine in said non-human organism or in the culture medium surrounding said non-human organism.

[40221] Accordingly, the present invention relates to a process for the production of valine, which comprises
[40222] (a) increasing or generating the activity of a cytochrome c-type protein in the cytosol of a cell of a non-human organism or a part thereof, preferably a microorganism, a plant cell, a plant or a part thereof, as compared to a corresponding non-transformed wild type non-human organism or a part thereof; and
[40223] (b) growing the non-human organism or a part thereof under conditions which permit the production of valine or a composition comprising valine in said non-human organism or in the culture medium surrounding said non-human organism.

[40224] Accordingly, the present invention relates to a process for the production of isoleucine, which comprises
[40225] (a) increasing or generating the activity of a trehalose-phosphatase in the cytosol of a cell of a non-human organism or a part thereof, preferably a microorganism, a plant cell, a plant or a part thereof, as compared to a corresponding non-transformed wild type non-human organism or a part thereof; and
[40226] (b) growing the non-human organism or a part thereof under conditions which permit the production of isoleucine or a composition comprising isoleucine in said non-human organism or in the culture medium surrounding said non-human organism.

[40227] Accordingly, the present invention relates to a process for the production of leucine, which comprises
[40228] (a) increasing or generating the activity of a trehalose-phosphatase in the cytosol of a cell of a non-human organism or a part thereof, preferably a microorganism, a plant cell, a plant or a part thereof, as compared to a corresponding non-transformed wild type non-human organism or a part thereof; and
[40229] (b) growing the non-human organism or a part thereof under conditions which permit the production of leucine or a composition comprising leucine in said non-human organism or in the culture medium surrounding said non-human organism.

[40230] Accordingly, the present invention relates to a process for the production of valine, which comprises
[40231] (a) increasing or generating the activity of a trehalose-phosphatase in the cytosol of a cell of a non-human organism or a part thereof, preferably a microorganism, a plant cell, a plant or a part thereof, as compared to a corresponding non-transformed wild type non-human organism or a part thereof; and
[40232] (b) growing the non-human organism or a part thereof under conditions which permit the production of valine or a composition comprising valine in said non-human organism or in the culture medium surrounding said non-human organism.

[40233] Accordingly, the present invention relates to a process for the production of isoleucine, which comprises
[40234] (a) increasing or generating the activity of a O-antigen chain length determinant in the cytosol of a cell of a non-human organism or a part thereof, preferably a microorganism, a plant cell, a plant or a part thereof, as compared to a corresponding non-transformed wild type non-human organism or a part thereof; and
[40235] (b) growing the non-human organism or a part thereof under conditions which permit the production of isoleucine or a composition comprising isoleucine in said non-human organism or in the culture medium surrounding said non-human organism.

[40236] Accordingly, the present invention relates to a process for the production of leucine, which comprises
[40237] (a) increasing or generating the activity of a O-antigen chain length determinant in the cytosol of a cell of a non-human organism or a part thereof, preferably a microorganism, a plant cell, a plant or a part thereof, as compared to a corresponding non-transformed wild type non-human organism or a part thereof; and
[40238] (b) growing the non-human organism or a part thereof under conditions which permit the production of leucine or a composition comprising leucine in said non-human organism or in the culture medium surrounding said non-human organism.

[40239] Accordingly, the present invention relates to a process for the production of valine, which comprises
[40240] (a) increasing or generating the activity of a GDP-mannose 4,6-dehydratase in the cytosol of a cell of a non-human organism or a part thereof, preferably a microorganism, a plant cell, a plant or a part thereof, as compared to a corresponding non-transformed wild type non-human organism or a part thereof; and
[40241] (b) growing the non-human organism or a part thereof under conditions which permit the production of valine or a composition comprising valine in said non-human organism or in the culture medium surrounding said non-human organism.

[40242] Accordingly, the present invention relates to a process for the production of isoleucine, which comprises
[40243] (a) increasing or generating the activity of a transport protein in the cytosol of a cell of a non-human organism or a part thereof, preferably a microorganism, a plant cell, a plant or a part thereof, as compared to a corresponding non-transformed wild type non-human organism or a part thereof; and
[40244] (b) growing the non-human organism or a part thereof under conditions which permit the production of isoleucine or a composition comprising isoleucine in said non-human organism or in the culture medium surrounding said non-human organism.

[40245] Accordingly, the present invention relates to a process for the production of leucine, which comprises
[40246] (a) increasing or generating the activity of a transport protein in the cytosol of a cell of a non-human organism or a part thereof, preferably a microorganism, a plant cell, a plant or a part thereof, as compared to a corresponding non-transformed wild type non-human organism or a part thereof; and
[40247] (b) growing the non-human organism or a part thereof under conditions which permit the production of leucine or a composition comprising leucine in said non-human organism or in the culture medium surrounding said non-human organism.

[40248] Accordingly, the present invention relates to a process for the production of valine, which comprises
[40249] (a) increasing or generating the activity of a Nucleoside monophosphate phosphohydrolase in the cytosol of a cell of a non-human organism or a part thereof, preferably a microorganism, a plant cell, a plant or a part thereof, as compared to a corresponding non-transformed wild type non-human organism or a part thereof; and
[40250] (b) growing the non-human organism or a part thereof under conditions which permit the production of valine or a composition comprising valine in said non-human organism or in the culture medium surrounding said non-human organism.

[40251] Accordingly, the present invention relates to a process for the production of isoleucine, which comprises
[40252] (a) increasing or generating the activity of a transcriptional regulator in the cytosol of a cell of a non-human organism or a part thereof, preferably a microorganism, a plant cell, a plant or a part thereof, as compared to a corresponding non-transformed wild type non-human organism or a part thereof; and
[40253] (b) growing the non-human organism or a part thereof under conditions which permit the production of isoleucine or a composition comprising isoleucine in said non-human organism or in the culture medium surrounding said non-human organism.

[40254] Accordingly, the present invention relates to a process for the production of valine, which comprises
[40255] (a) increasing or generating the activity of a transcriptional regulator in the cytosol of a cell of a non-human organism or a part thereof, preferably a microorganism, a plant cell, a plant or a part thereof, as compared to a corresponding non-transformed wild type non-human organism or a part thereof; and
[40256] (b) growing the non-human organism or a part thereof under conditions which permit the production of valine or a composition comprising valine in said non-human organism or in the culture medium surrounding said non-human organism.

[40257] Accordingly, the present invention relates to a process for the production of isoleucine, which comprises
[40258] (a) increasing or generating the activity of a b2513-protein in the cytosol of a cell of a non-human organism or a part thereof, preferably a microorganism, a plant cell, a plant or a part thereof, as compared to a corresponding non-transformed wild type non-human organism or a part thereof; and
[40259] (b) growing the non-human organism or a part thereof under conditions which permit the production of isoleucine or a composition comprising isoleucine in said non-human organism or in the culture medium surrounding said non-human organism.

[40260] Accordingly, the present invention relates to a process for the production of leucine, which comprises
[40261] (a) increasing or generating the activity of a b2513-protein in the cytosol of a cell of a non-human organism or a part thereof, preferably a microorganism, a plant cell, a plant or a part thereof, as compared to a corresponding non-transformed wild type non-human organism or a part thereof; and
[40262] (b) growing the non-human organism or a part thereof under conditions which permit the production of leucine or a composition comprising leucine in said non-human organism or in the culture medium surrounding said non-human organism.

[40263] Accordingly, the present invention relates to a process for the production of valine, which comprises
[40264] (a) increasing or generating the activity of a b2513-protein in the cytosol of a cell of a non-human organism or a part thereof, preferably a microorganism, a plant cell, a plant or a part thereof, as compared to a corresponding non-transformed wild type non-human organism or a part thereof; and
[40265] (b) growing the non-human organism or a part thereof under conditions which permit the production of valine or a composition comprising valine in said non-human organism or in the culture medium surrounding said non-human organism.

[40266] Accordingly, the present invention relates to a process for the production of isoleucine, which comprises
[40267] (a) increasing or generating the activity of a serine hydroxymethyltransferase in the cytosol of a cell of a non-human organism or a part thereof, preferably a microorganism, a plant cell, a plant or a part thereof, as compared to a corresponding non-transformed wild type non-human organism or a part thereof; and
[40268] (b) growing the non-human organism or a part thereof under conditions which permit the production of isoleucine or a composition comprising isoleucine in said non-human organism or in the culture medium surrounding said non-human organism.

[40269] Accordingly, the present invention relates to a process for the production of valine, which comprises
[40270] (a) increasing or generating the activity of a b2613-protein in the cytosol of a cell of a non-human organism or a part thereof, preferably a microorganism, a plant cell, a plant or a part thereof, as compared to a corresponding non-transformed wild type non-human organism or a part thereof; and
[40271] (b) growing the non-human organism or a part thereof under conditions which permit the production of valine or a composition comprising valine in said non-human organism or in the culture medium surrounding said non-human organism.

[40272] Accordingly, the present invention relates to a process for the production of isoleucine, which comprises
[40273] (a) increasing or generating the activity of a transcriptional regulator in the cytosol of a cell of a non-human organism or a part thereof, preferably a microorganism, a plant cell, a plant or a part thereof, as compared to a corresponding non-transformed wild type non-human organism or a part thereof; and
[40274] (b) growing the non-human organism or a part thereof under conditions which permit the production of isoleucine or a composition comprising isoleucine in said non-human organism or in the culture medium surrounding said non-human organism.

[40275] Accordingly, the present invention relates to a process for the production of leucine, which comprises
[40276] (a) increasing or generating the activity of a transcriptional regulator in the cytosol of a cell of a non-human organism or a part thereof, preferably a microorganism, a plant cell, a plant or a part thereof, as compared to a corresponding non-transformed wild type non-human organism or a part thereof; and
[40277] (b) growing the non-human organism or a part thereof under conditions which permit the production of leucine or a composition comprising leucine in said non-human organism or in the culture medium surrounding said non-human organism.

[40278] Accordingly, the present invention relates to a process for the production of isoleucine, which comprises
[40279] (a) increasing or generating the activity of a b2673-protein in the cytosol of a cell of a non-human organism or a part thereof, preferably a microorganism, a plant cell, a plant or a part thereof, as compared to a corresponding non-transformed wild type non-human organism or a part thereof; and
[40280] (b) growing the non-human organism or a part thereof under conditions which permit the production of isoleucine or a composition comprising isoleucine in said non-human organism or in the culture medium surrounding said non-human organism.

[40281] Accordingly, the present invention relates to a process for the production of isoleucine, which comprises
[40282] (a) increasing or generating the activity of a murein transglycosylase in the cytosol of a cell of a non-human organism or a part thereof, preferably a microorganism, a plant cell, a plant or a part thereof, as compared to a corresponding non-transformed wild type non-human organism or a part thereof; and
[40283] (b) growing the non-human organism or a part thereof under conditions which permit the production of isoleucine or a composition comprising isoleucine in said non-human organism or in the culture medium surrounding said non-human organism.

[40284] Accordingly, the present invention relates to a process for the production of leucine, which comprises
[40285] (a) increasing or generating the activity of a murein transglycosylase in the cytosol of a cell of a non-human organism or a part thereof, preferably a microorganism, a plant cell, a plant or a part thereof, as compared to a corresponding non-transformed wild type non-human organism or a part thereof; and
[40286] (b) growing the non-human organism or a part thereof under conditions which permit the production of leucine or a composition comprising leucine in said non-human organism or in the culture medium surrounding said non-human organism.

[40287] Accordingly, the present invention relates to a process for the production of valine, which comprises
[40288] (a) increasing or generating the activity of a murein transglycosylase in the cytosol of a cell of a non-human organism or a part thereof, preferably a microorganism, a plant cell, a plant or a part thereof, as compared to a corresponding non-transformed wild type non-human organism or a part thereof; and
[40289] (b) growing the non-human organism or a part thereof under conditions which permit the production of valine or a composition comprising valine in said non-human organism or in the culture medium surrounding said non-human organism.

[40290] Accordingly, the present invention relates to a process for the production of valine, which comprises
[40291] (a) increasing or generating the activity of a transcriptional regulator in the cytosol of a cell of a non-human organism or a part thereof, preferably a microorganism, a plant cell, a plant or a part thereof, as compared to a corresponding non-transformed wild type non-human organism or a part thereof; and
[40292] (b) growing the non-human organism or a part thereof under conditions which permit the production of valine or a composition comprising valine in said non-human organism or in the culture medium surrounding said non-human organism.

[40293] Accordingly, the present invention relates to a process for the production of isoleucine, which comprises
[40294] (a) increasing or generating the activity of a b2739-protein in the cytosol of a cell of a non-human organism or a part thereof, preferably a microorganism, a plant cell, a plant or a part thereof, as compared to a corresponding non-transformed wild type non-human organism or a part thereof; and
[40295] (b) growing the non-human organism or a part thereof under conditions which permit the production of isoleucine or a composition comprising isoleucine in said non-human organism or in the culture medium surrounding said non-human organism.

[40296] Accordingly, the present invention relates to a process for the production of leucine, which comprises
[40297] (a) increasing or generating the activity of a b2739-protein in the cytosol of a cell of a non-human organism or a part thereof, preferably a microorganism, a plant cell, a plant or a part thereof, as compared to a corresponding non-transformed wild type non-human organism or a part thereof; and
[40298] (b) growing the non-human organism or a part thereof under conditions which permit the production of leucine or a composition comprising leucine in said non-human organism or in the culture medium surrounding said non-human organism.

[40299] Accordingly, the present invention relates to a process for the production of valine, which comprises
[40300] (a) increasing or generating the activity of a b2739-protein in the cytosol of a cell of a non-human organism or a part thereof, preferably a microorganism, a plant cell, a plant or a part thereof, as compared to a corresponding non-transformed wild type non-human organism or a part thereof; and
[40301] (b) growing the non-human organism or a part thereof under conditions which permit the production of valine or a composition comprising valine in said non-human organism or in the culture medium surrounding said non-human organism.

[40302] Accordingly, the present invention relates to a process for the production of isoleucine, which comprises
[40303] (a) increasing or generating the activity of a b2812-protein in the cytosol of a cell of a non-human organism or a part thereof, preferably a microorganism, a plant cell, a plant or a part thereof, as compared to a corresponding non-transformed wild type non-human organism or a part thereof; and
[40304] (b) growing the non-human organism or a part thereof under conditions which permit the production of isoleucine or a composition comprising isoleucine in said non-human organism or in the culture medium surrounding said non-human organism.

[40305] Accordingly, the present invention relates to a process for the production of leucine, which comprises
[40306] (a) increasing or generating the activity of a b2812-protein in the cytosol of a cell of a non-human organism or a part thereof, preferably a microorganism, a plant cell, a plant or a part thereof, as compared to a corresponding non-transformed wild type non-human organism or a part thereof; and
[40307] (b) growing the non-human organism or a part thereof under conditions which permit the production of leucine or a composition comprising leucine in said non-human organism or in the culture medium surrounding said non-human organism.

[40308] Accordingly, the present invention relates to a process for the production of isoleucine, which comprises
[40309] (a) increasing or generating the activity of a transcriptional regulator in the cytosol of a cell of a non-human organism or a part thereof, preferably a microorganism, a plant cell, a plant or a part thereof, as compared to a corresponding non-transformed wild type non-human organism or a part thereof; and
[40310] (b) growing the non-human organism or a part thereof under conditions which permit the production of isoleucine or a composition comprising isoleucine in said non-human organism or in the culture medium surrounding said non-human organism.

[40311] Accordingly, the present invention relates to a process for the production of leucine, which comprises
[40312] (a) increasing or generating the activity of a transcriptional regulator in the cytosol of a cell of a non-human organism or a part thereof, preferably a microorganism, a plant cell, a plant or a part thereof, as compared to a corresponding non-transformed wild type non-human organism or a part thereof; and
[40313] (b) growing the non-human organism or a part thereof under conditions which permit the production of leucine or a composition comprising leucine in said non-human organism or in the culture medium surrounding said non-human organism.

[40314] Accordingly, the present invention relates to a process for the production of valine, which comprises
[40315] (a) increasing or generating the activity of a transcriptional regulator in the cytosol of a cell of a non-human organism or a part thereof, preferably a microorganism, a plant cell, a plant or a part thereof, as compared to a corresponding non-transformed wild type non-human organism or a part thereof; and
[40316] (b) growing the non-human organism or a part thereof under conditions which permit the production of valine or a composition comprising valine in said non-human organism or in the culture medium surrounding said non-human organism.

[40317] Accordingly, the present invention relates to a process for the production of isoleucine, which comprises
[40318] (a) increasing or generating the activity of a ribosephosphate isomerase, constitutive in the cytosol of a cell of a non-human organism or a part thereof, preferably a microorganism, a plant cell, a plant or a part thereof, as compared to a corresponding non-transformed wild type non-human organism or a part thereof; and
[40319] (b) growing the non-human organism or a part thereof under conditions which permit the production of isoleucine or a composition comprising isoleucine in said non-human organism or in the culture medium surrounding said non-human organism.

[40320] Accordingly, the present invention relates to a process for the production of valine, which comprises
[40321] (a) increasing or generating the activity of a arginine exporter protein in the cytosol of a cell of a non-human organism or a part thereof, preferably a microorganism, a plant cell, a plant or a part thereof, as compared to a corresponding non-transformed wild type non-human organism or a part thereof; and
[40322] (b) growing the non-human organism or a part thereof under conditions which permit the production of valine or a composition comprising valine in said non-human organism or in the culture medium surrounding said non-human organism.

[40323] Accordingly, the present invention relates to a process for the production of isoleucine, which comprises
[40324] (a) increasing or generating the activity of a glycoprotease in the cytosol of a cell of a non-human organism or a part thereof, preferably a microorganism, a plant cell, a plant or a part thereof, as compared to a corresponding non-transformed wild type non-human organism or a part thereof; and
[40325] (b) growing the non-human organism or a part thereof under conditions which permit the production of isoleucine or a composition comprising isoleucine in said non-human organism or in the culture medium surrounding said non-human organism.

[40326] Accordingly, the present invention relates to a process for the production of leucine, which comprises
[40327] (a) increasing or generating the activity of a glycoprotease in the cytosol of a cell of a non-human organism or a part thereof, preferably a microorganism, a plant cell, a plant or a part thereof, as compared to a corresponding non-transformed wild type non-human organism or a part thereof; and
[40328] (b) growing the non-human organism or a part thereof under conditions which permit the production of leucine or a composition comprising leucine in said non-human organism or in the culture medium surrounding said non-human organism.

[40329] Accordingly, the present invention relates to a process for the production of valine, which comprises
[40330] (a) increasing or generating the activity of a glycoprotease in the cytosol of a cell of a non-human organism or a part thereof, preferably a microorganism, a plant cell, a plant or a part thereof, as compared to a corresponding non-transformed wild type non-human organism or a part thereof; and
[40331] (b) growing the non-human organism or a part thereof under conditions which permit the production of valine or a composition comprising valine in said non-human organism or in the culture medium surrounding said non-human organism.

[40332] Accordingly, the present invention relates to a process for the production of isoleucine, which comprises
[40333] (a) increasing or generating the activity of a b3083-protein in the cytosol of a cell of a non-human organism or a part thereof, preferably a microorganism, a plant cell, a plant or a part thereof, as compared to a corresponding non-transformed wild type non-human organism or a part thereof; and
[40334] (b) growing the non-human organism or a part thereof under conditions which permit the production of isoleucine or a composition comprising isoleucine in said non-human organism or in the culture medium surrounding said non-human organism.

[40335] Accordingly, the present invention relates to a process for the production of valine, which comprises
[40336] (a) increasing or generating the activity of a b3083-protein in the cytosol of a cell of a non-human organism or a part thereof, preferably a microorganism, a plant cell, a plant or a part thereof, as compared to a corresponding non-transformed wild type non-human organism or a part thereof; and
[40337] (b) growing the non-human organism or a part thereof under conditions which permit the production of valine or a composition comprising valine in said non-human organism or in the culture medium surrounding said non-human organism.

[40338] Accordingly, the present invention relates to a process for the production of leucine, which comprises
[40339] (a) increasing or generating the activity of a L-serine dehydratase in the cytosol of a cell of a non-human organism or a part thereof, preferably a microorganism, a plant cell, a plant or a part thereof, as compared to a corresponding non-transformed wild type non-human organism or a part thereof; and
[40340] (b) growing the non-human organism or a part thereof under conditions which permit the production of leucine or a composition comprising leucine in said non-human organism or in the culture medium surrounding said non-human organism.

[40341] Accordingly, the present invention relates to a process for the production of valine, which comprises
[40342] (a) increasing or generating the activity of a threonine dehydratase in the cytosol of a cell of a non-human organism or a part thereof, preferably a microorganism, a plant cell, a plant or a part thereof, as compared to a corresponding non-transformed wild type non-human organism or a part thereof; and
[40343] (b) growing the non-human organism or a part thereof under conditions which permit the production of valine or a composition comprising valine in said non-human organism or in the culture medium surrounding said non-human organism.

[40344] Accordingly, the present invention relates to a process for the production of leucine, which comprises
[40345] (a) increasing or generating the activity of a acetyl CoA carboxylase in the cytosol of a cell of a non-human organism or a part thereof, preferably a microorganism, a plant cell, a plant or a part thereof, as compared to a corresponding non-transformed wild type non-human organism or a part thereof; and
[40346] (b) growing the non-human organism or a part thereof under conditions which permit the production of leucine or a composition comprising leucine in said non-human organism or in the culture medium surrounding said non-human organism.

[40347] Accordingly, the present invention relates to a process for the production of valine, which comprises
[40348] (a) increasing or generating the activity of a ABC transporter ATP-binding protein in the cytosol of a cell of a non-human organism or a part thereof, preferably a microorganism, a plant cell, a plant or a part thereof, as compared to a corresponding non-transformed wild type non-human organism or a part thereof; and
[40349] (b) growing the non-human organism or a part thereof under conditions which permit the production of valine or a composition comprising valine in said non-human organism or in the culture medium surrounding said non-human organism.

[40350] Accordingly, the present invention relates to a process for the production of isoleucine, which comprises
[40351] (a) increasing or generating the activity of a glycogen synthase in the cytosol of a cell of a non-human organism or a part thereof, preferably a microorganism, a plant cell, a plant or a part thereof, as compared to a corresponding non-transformed wild type non-human organism or a part thereof; and
[40352] (b) growing the non-human organism or a part thereof under conditions which permit the production of isoleucine or a composition comprising isoleucine in said non-human organism or in the culture medium surrounding said non-human organism.

[40353] Accordingly, the present invention relates to a process for the production of leucine, which comprises
[40354] (a) increasing or generating the activity of a glycogen synthase in the cytosol of a cell of a non-human organism or a part thereof, preferably a microorganism, a plant cell, a plant or a part thereof, as compared to a corresponding non-transformed wild type non-human organism or a part thereof; and
[40355] (b) growing the non-human organism or a part thereof under conditions which permit the production of leucine or a composition comprising leucine in said non-human organism or in the culture medium surrounding said non-human organism.

[40356] Accordingly, the present invention relates to a process for the production of valine, which comprises
[40357] (a) increasing or generating the activity of a b3490-protein in the cytosol of a cell of a non-human organism or a part thereof, preferably a microorganism, a plant cell, a plant or a part thereof, as compared to a corresponding non-transformed wild type non-human organism or a part thereof; and
[40358] (b) growing the non-human organism or a part thereof under conditions which permit the production of valine or a composition comprising valine in said non-human organism or in the culture medium surrounding said non-human organism.

[40359] Accordingly, the present invention relates to a process for the production of isoleucine, which comprises
[40360] (a) increasing or generating the activity of a valine-pyruvate transaminase in the cytosol of a cell of a non-human organism or a part thereof, preferably a microorganism, a plant cell, a plant or a part thereof, as compared to a corresponding non-transformed wild type non-human organism or a part thereof; and
[40361] (b) growing the non-human organism or a part thereof under conditions which permit the production of isoleucine or a composition comprising isoleucine in said non-human organism or in the culture medium surrounding said non-human organism.

[40362] Accordingly, the present invention relates to a process for the production of leucine, which comprises
[40363] (a) increasing or generating the activity of a valine-pyruvate transaminase in the cytosol of a cell of a non-human organism or a part thereof, preferably a microorganism, a plant cell, a plant or a part thereof, as compared to a corresponding non-transformed wild type non-human organism or a part thereof; and
[40364] (b) growing the non-human organism or a part thereof under conditions which permit the production of leucine or a composition comprising leucine in said non-human organism or in the culture medium surrounding said non-human organism.

[40365] Accordingly, the present invention relates to a process for the production of isoleucine, which comprises
[40366] (a) increasing or generating the activity of a phosphopantetheine adenylyltransferase in the cytosol of a cell of a non-human organism or a part thereof, preferably a microorganism, a plant cell, a plant or a part thereof, as compared to a corresponding non-transformed wild type non-human organism or a part thereof; and
[40367] (b) growing the non-human organism or a part thereof under conditions which permit the production of isoleucine or a composition comprising isoleucine in said non-human organism or in the culture medium surrounding said non-human organism.

[40368] Accordingly, the present invention relates to a process for the production of leucine, which comprises
[40369] (a) increasing or generating the activity of a phosphopantetheine adenylyltransferase in the cytosol of a cell of a non-human organism or a part thereof, preferably a microorganism, a plant cell, a plant or a part thereof, as compared to a corresponding non-transformed wild type non-human organism or a part thereof; and
[40370] (b) growing the non-human organism or a part thereof under conditions which permit the production of leucine or a composition comprising leucine in said non-human organism or in the culture medium surrounding said non-human organism.

[40371] Accordingly, the present invention relates to a process for the production of valine, which comprises
[40372] (a) increasing or generating the activity of a phosphopantetheine adenylyltransferase in the cytosol of a cell of a non-human organism or a part thereof, preferably a microorganism, a plant cell, a plant or a part thereof, as compared to a corresponding non-transformed wild type non-human organism or a part thereof; and
[40373] (b) growing the non-human organism or a part thereof under conditions which permit the production of valine or a composition comprising valine in said non-human organism or in the culture medium surrounding said non-human organism.

[40374] Accordingly, the present invention relates to a process for the production of leucine, which comprises
[40375] (a) increasing or generating the activity of a acetolactate synthase in the cytosol of a cell of a non-human organism or a part thereof, preferably a microorganism, a plant cell, a plant or a part thereof, as compared to a corresponding non-transformed wild type non-human organism or a part thereof; and
[40376] (b) growing the non-human organism or a part thereof under conditions which permit the production of leucine or a composition comprising leucine in said non-human organism or in the culture medium surrounding said non-human organism.

[40377] Accordingly, the present invention relates to a process for the production of isoleucine, which comprises
[40378] (a) increasing or generating the activity of a branched-chain amino-acid aminotransferase in the cytosol of a cell of a non-human organism or a part thereof, preferably a microorganism, a plant cell, a plant or a part thereof, as compared to a corresponding non-transformed wild type non-human organism or a part thereof; and
[40379] (b) growing the non-human organism or a part thereof under conditions which permit the production of isoleucine or a composition comprising isoleucine in said non-human organism or in the culture medium surrounding said non-human organism.

[40380] Accordingly, the present invention relates to a process for the production of isoleucine, which comprises
[40381] (a) increasing or generating the activity of a dihydroxyacid dehydratase in the cytosol of a cell of a non-human organism or a part thereof, preferably a microorganism, a plant cell, a plant or a part thereof, as compared to a corresponding non-transformed wild type non-human organism or a part thereof; and
[40382] (b) growing the non-human organism or a part thereof under conditions which permit the production of isoleucine or a composition comprising isoleucine in said non-human organism or in the culture medium surrounding said non-human organism.

[40383] Accordingly, the present invention relates to a process for the production of leucine, which comprises
[40384] (a) increasing or generating the activity of a dihydroxyacid dehydratase in the cytosol of a cell of a non-human organism or a part thereof, preferably a microorganism, a plant cell, a plant or a part thereof, as compared to a corresponding non-transformed wild type non-human organism or a part thereof; and
[40385] (b) growing the non-human organism or a part thereof under conditions which permit the production of leucine or a composition comprising leucine in said non-human organism or in the culture medium surrounding said non-human organism.

[40386] Accordingly, the present invention relates to a process for the production of leucine, which comprises
[40387] (a) increasing or generating the activity of a dihydroxyacid dehydratase in the cytosol of a cell of a non-human organism or a part thereof, preferably a microorganism, a plant cell, a plant or a part thereof, as compared to a corresponding non-transformed wild type non-human organism or a part thereof; and
[40388] (b) growing the non-human organism or a part thereof under conditions which permit the production of leucine or a composition comprising leucine in said non-human organism or in the culture medium surrounding said non-human organism.

[40389] Accordingly, the present invention relates to a process for the production of valine, which comprises
[40390] (a) increasing or generating the activity of a dihydroxyacid dehydratase in the cytosol of a cell of a non-human organism or a part thereof, preferably a microorganism, a plant cell, a plant or a part thereof, as compared to a corresponding non-transformed wild type non-human organism or a part thereof; and
[40391] (b) growing the non-human organism or a part thereof under conditions which permit the production of valine or a composition comprising valine in said non-human organism or in the culture medium surrounding said non-human organism.

[40392] Accordingly, the present invention relates to a process for the production of isoleucine, which comprises
[40393] (a) increasing or generating the activity of a ketol-acid reductoisomerase in the cytosol of a cell of a non-human organism or a part thereof, preferably a microorganism, a plant cell, a plant or a part thereof, as compared to a corresponding non-transformed wild type non-human organism or a part thereof; and
[40394] (b) growing the non-human organism or a part thereof under conditions which permit the production of isoleucine or a composition comprising isoleucine in said non-human organism or in the culture medium surrounding said non-human organism.

[40395] Accordingly, the present invention relates to a process for the production of leucine, which comprises
[40396] (a) increasing or generating the activity of a ketol-acid reductoisomerase in the cytosol of a cell of a non-human organism or a part thereof, preferably a microorganism, a plant cell, a plant or a part thereof, as compared to a corresponding non-transformed wild type non-human organism or a part thereof; and
[40397] (b) growing the non-human organism or a part thereof under conditions which permit the production of leucine or a composition comprising leucine in said non-human organism or in the culture medium surrounding said non-human organism.

[40398] Accordingly, the present invention relates to a process for the production of isoleucine, which comprises
[40399] (a) increasing or generating the activity of a DNA helicase II in the cytosol of a cell of a non-human organism or a part thereof, preferably a microorganism, a plant cell, a plant or a part thereof, as compared to a corresponding non-transformed wild type non-human organism or a part thereof; and
[40400] (b) growing the non-human organism or a part thereof under conditions which permit the production of isoleucine or a composition comprising isoleucine in said non-human organism or in the culture medium surrounding said non-human organism.

[40401] Accordingly, the present invention relates to a process for the production of leucine, which comprises
[40402] (a) increasing or generating the activity of a DNA helicase II in the cytosol of a cell of a non-human organism or a part thereof, preferably a microorganism, a plant cell, a plant or a part thereof, as compared to a corresponding non-transformed wild type non-human organism or a part thereof; and
[40403] (b) growing the non-human organism or a part thereof under conditions which permit the production of leucine or a composition comprising leucine in said non-human organism or in the culture medium surrounding said non-human organism.

[40404] Accordingly, the present invention relates to a process for the production of valine, which comprises
[40405] (a) increasing or generating the activity of a DNA helicase II in the cytosol of a cell of a non-human organism or a part thereof, preferably a microorganism, a plant cell, a plant or a part thereof, as compared to a corresponding non-transformed wild type non-human organism or a part thereof; and
[40406] (b) growing the non-human organism or a part thereof under conditions which permit the production of valine or a composition comprising valine in said non-human organism or in the culture medium surrounding said non-human organism.

[40407] Accordingly, the present invention relates to a process for the production of leucine, which comprises
[40408] (a) increasing or generating the activity of a protoporphyrin oxidase in the cytosol of a cell of a non-human organism or a part thereof, preferably a microorganism, a plant cell, a plant or a part thereof, as compared to a corresponding non-transformed wild type non-human organism or a part thereof; and
[40409] (b) growing the non-human organism or a part thereof under conditions which permit the production of leucine or a composition comprising leucine in said non-human organism or in the culture medium surrounding said non-human organism.

[40410] Accordingly, the present invention relates to a process for the production of leucine, which comprises
[40411] (a) increasing or generating the activity of a superoxide dismutase in the cytosol of a cell of a non-human organism or a part thereof, preferably a microorganism, a plant cell, a plant or a part thereof, as compared to a corresponding non-transformed wild type non-human organism or a part thereof; and
[40412] (b) growing the non-human organism or a part thereof under conditions which permit the production of leucine or a composition comprising leucine in said non-human organism or in the culture medium surrounding said non-human organism.

[40413] Accordingly, the present invention relates to a process for the production of isoleucine, which comprises
[40414] (a) increasing or generating the activity of a b3989-protein in the cytosol of a cell of a non-human organism or a part thereof, preferably a microorganism, a plant cell, a plant or a part thereof, as compared to a corresponding non-transformed wild type non-human organism or a part thereof; and
[40415] (b) growing the non-human organism or a part thereof under conditions which permit the production of isoleucine or a composition comprising isoleucine in said non-human organism or in the culture medium surrounding said non-human organism.

[40416] Accordingly, the present invention relates to a process for the production of leucine, which comprises
[40417] (a) increasing or generating the activity of a b3989-protein in the cytosol of a cell of a non-human organism or a part thereof, preferably a microorganism, a plant cell, a plant or a part thereof, as compared to a corresponding non-transformed wild type non-human organism or a part thereof; and
[40418] (b) growing the non-human organism or a part thereof under conditions which permit the production of leucine or a composition comprising leucine in said non-human organism or in the culture medium surrounding said non-human organism.

[40419] Accordingly, the present invention relates to a process for the production of valine, which comprises
[40420] (a) increasing or generating the activity of a b3989-protein in the cytosol of a cell of a non-human organism or a part thereof, preferably a microorganism, a plant cell, a plant or a part thereof, as compared to a corresponding non-transformed wild type non-human organism or a part thereof; and
[40421] (b) growing the non-human organism or a part thereof under conditions which permit the production of valine or a composition comprising valine in said non-human organism or in the culture medium surrounding said non-human organism.

[40422] Accordingly, the present invention relates to a process for the production of isoleucine, which comprises
[40423] (a) increasing or generating the activity of a b4029-protein in the cytosol of a cell of a non-human organism or a part thereof, preferably a microorganism, a plant cell, a plant or a part thereof, as compared to a corresponding non-transformed wild type non-human organism or a part thereof; and
[40424] (b) growing the non-human organism or a part thereof under conditions which permit the production of isoleucine or a composition comprising isoleucine in said non-human organism or in the culture medium surrounding said non-human organism.

[40425] Accordingly, the present invention relates to a process for the production of leucine, which comprises
[40426] (a) increasing or generating the activity of a b4029-protein in the cytosol of a cell of a non-human organism or a part thereof, preferably a microorganism, a plant cell, a plant or a part thereof, as compared to a corresponding non-transformed wild type non-human organism or a part thereof; and
[40427] (b) growing the non-human organism or a part thereof under conditions which permit the production of leucine or a composition comprising leucine in said non-human organism or in the culture medium surrounding said non-human organism.

[40428] Accordingly, the present invention relates to a process for the production of valine, which comprises
[40429] (a) increasing or generating the activity of a b4029-protein in the cytosol of a cell of a non-human organism or a part thereof, preferably a microorganism, a plant cell, a plant or a part thereof, as compared to a corresponding non-transformed wild type non-human organism or a part thereof; and
[40430] (b) growing the non-human organism or a part thereof under conditions which permit the production of valine or a composition comprising valine in said non-human organism or in the culture medium surrounding said non-human organism.

[40431] Accordingly, the present invention relates to a process for the production of isoleucine, which comprises
[40432] (a) increasing or generating the activity of a b4050-protein in the cytosol of a cell of a non-human organism or a part thereof, preferably a microorganism, a plant cell, a plant or a part thereof, as compared to a corresponding non-transformed wild type non-human organism or a part thereof; and
[40433] (b) growing the non-human organism or a part thereof under conditions which permit the production of isoleucine or a composition comprising isoleucine in said non-human organism or in the culture medium surrounding said non-human organism.

[40434] Accordingly, the present invention relates to a process for the production of isoleucine, which comprises
[40435] (a) increasing or generating the activity of a b4056-protein in the cytosol of a cell of a non-human organism or a part thereof, preferably a microorganism, a plant cell, a plant or a part thereof, as compared to a corresponding non-transformed wild type non-human organism or a part thereof; and
[40436] (b) growing the non-human organism or a part thereof under conditions which permit the production of isoleucine or a composition comprising isoleucine in said non-human organism or in the culture medium surrounding said non-human organism.

[40437] Accordingly, the present invention relates to a process for the production of leucine, which comprises
[40438] (a) increasing or generating the activity of a b4056-protein in the cytosol of a cell of a non-human organism or a part thereof, preferably a microorganism, a plant cell, a plant or a part thereof, as compared to a corresponding non-transformed wild type non-human organism or a part thereof; and
[40439] (b) growing the non-human organism or a part thereof under conditions which permit the production of leucine or a composition comprising leucine in said non-human organism or in the culture medium surrounding said non-human organism.

[40440] Accordingly, the present invention relates to a process for the production of isoleucine, which comprises
[40441] (a) increasing or generating the activity of a acetyltransferase in the cytosol of a cell of a non-human organism or a part thereof, preferably a microorganism, a plant cell, a plant or a part thereof, as compared to a corresponding non-transformed wild type non-human organism or a part thereof; and
[40442] (b) growing the non-human organism or a part thereof under conditions which permit the production of isoleucine or a composition comprising isoleucine in said non-human organism or in the culture medium surrounding said non-human organism.

[40443] Accordingly, the present invention relates to a process for the production of leucine, which comprises
[40444] (a) increasing or generating the activity of a acetyltransferase in the cytosol of a cell of a non-human organism or a part thereof, preferably a microorganism, a plant cell, a plant or a part thereof, as compared to a corresponding non-transformed wild type non-human organism or a part thereof; and
[40445] (b) growing the non-human organism or a part thereof under conditions which permit the production of leucine or a composition comprising leucine in said non-human organism or in the culture medium surrounding said non-human organism.

[40446] Accordingly, the present invention relates to a process for the production of valine, which comprises
[40447] (a) increasing or generating the activity of a acetyltransferase in the cytosol of a cell of a non-human organism or a part thereof, preferably a microorganism, a plant cell, a plant or a part thereof, as compared to a corresponding non-transformed wild type non-human organism or a part thereof; and
[40448] (b) growing the non-human organism or a part thereof under conditions which permit the production of valine or a composition comprising valine in said non-human organism or in the culture medium surrounding said non-human organism.

[40449] Accordingly, the present invention relates to a process for the production of valine, which comprises
[40450] (a) increasing or generating the activity of a b4263-protein in the cytosol of a cell of a non-human organism or a part thereof, preferably a microorganism, a plant cell, a plant or a part thereof, as compared to a corresponding non-transformed wild type non-human organism or a part thereof; and
[40451] (b) growing the non-human organism or a part thereof under conditions which permit the production of valine or a composition comprising valine in said non-human organism or in the culture medium surrounding said non-human organism.

[40452] Accordingly, the present invention relates to a process for the production of isoleucine, which comprises
[40453] (a) increasing or generating the activity of a gluconate transport system permease 3 in the cytosol of a cell of a non-human organism or a part thereof, preferably a microorganism, a plant cell, a plant or a part thereof, as compared to a corresponding non-transformed wild type non-human organism or a part thereof; and
[40454] (b) growing the non-human organism or a part thereof under conditions which permit the production of isoleucine or a composition comprising isoleucine in said non-human organism or in the culture medium surrounding said non-human organism.

[40455] Accordingly, the present invention relates to a process for the production of leucine, which comprises
[40456] (a) increasing or generating the activity of a gluconate transport system permease 3 in the cytosol of a cell of a non-human organism or a part thereof, preferably a microorganism, a plant cell, a plant or a part thereof, as compared to a corresponding non-transformed wild type non-human organism or a part thereof; and
[40457] (b) growing the non-human organism or a part thereof under conditions which permit the production of leucine or a composition comprising leucine in said non-human organism or in the culture medium surrounding said non-human organism.

[40458] Accordingly, the present invention relates to a process for the production of valine, which comprises
[40459] (a) increasing or generating the activity of a gluconate transport system permease 3 in the cytosol of a cell of a non-human organism or a part thereof, preferably a microorganism, a plant cell, a plant or a part thereof, as compared to a corresponding non-transformed wild type non-human organism or a part thereof; and
[40460] (b) growing the non-human organism or a part thereof under conditions which permit the production of valine or a composition comprising valine in said non-human organism or in the culture medium surrounding said non-human organism.

[40461] Accordingly, the present invention relates to a process for the production of isoleucine, which comprises
[40462] (a) increasing or generating the activity of a purine-nucleoside phosphorylase in the cytosol of a cell of a non-human organism or a part thereof, preferably a microorganism, a plant cell, a plant or a part thereof, as compared to a corresponding non-transformed wild type non-human organism or a part thereof; and
[40463] (b) growing the non-human organism or a part thereof under conditions which permit the production of isoleucine or a composition comprising isoleucine in said non-human organism or in the culture medium surrounding said non-human organism.

[40464] Accordingly, the present invention relates to a process for the production of isoleucine, which comprises
[40465] (a) increasing or generating the activity of a thioredoxin in the cytosol of a cell of a non-human organism or a part thereof, preferably a microorganism, a plant cell, a plant or a part thereof, as compared to a corresponding non-transformed wild type non-human organism or a part thereof; and
[40466] (b) growing the non-human organism or a part thereof under conditions which permit the production of isoleucine or a composition comprising isoleucine in said non-human organism or in the culture medium surrounding said non-human organism.

[40467] Accordingly, the present invention relates to a process for the production of leucine, which comprises
[40468] (a) increasing or generating the activity of a thioredoxin in the cytosol of a cell of a non-human organism or a part thereof, preferably a microorganism, a plant cell, a plant or a part thereof, as compared to a corresponding non-transformed wild type non-human organism or a part thereof; and
[40469] (b) growing the non-human organism or a part thereof under conditions which permit the production of leucine or a composition comprising leucine in said non-human organism or in the culture medium surrounding said non-human organism.

[40470] Accordingly, the present invention relates to a process for the production of valine, which comprises
[40471] (a) increasing or generating the activity of a thioredoxin in the cytosol of a cell of a non-human organism or a part thereof, preferably a microorganism, a plant cell, a plant or a part thereof, as compared to a corresponding non-transformed wild type non-human organism or a part thereof; and
[40472] (b) growing the non-human organism or a part thereof under conditions which permit the production of valine or a composition comprising valine in said non-human organism or in the culture medium surrounding said non-human organism.

[40473] Accordingly, the present invention relates to a process for the production of isoleucine, which comprises
[40474] (a) increasing or generating the activity of a GM02LC11114-protein in the cytosol of a cell of a non-human organism or a part thereof, preferably a microorganism, a plant cell, a plant or a part thereof, as compared to a corresponding non-transformed wild type non-human organism or a part thereof; and
[40475] (b) growing the non-human organism or a part thereof under conditions which permit the production of isoleucine or a composition comprising isoleucine in said non-human organism or in the culture medium surrounding said non-human organism.

[40476] Accordingly, the present invention relates to a process for the production of leucine, which comprises
[40477] (a) increasing or generating the activity of a GM02LC11114-protein in the cytosol of a cell of a non-human organism or a part thereof, preferably a microorganism, a plant cell, a plant or a part thereof, as compared to a corresponding non-transformed wild type non-human organism or a part thereof; and
[40478] (b) growing the non-human organism or a part thereof under conditions which permit the production of leucine or a composition comprising leucine in said non-human organism or in the culture medium surrounding said non-human organism.

[40479] Accordingly, the present invention relates to a process for the production of isoleucine, which comprises
[40480] (a) increasing or generating the activity of a glutaredoxin in the cytosol of a cell of a non-human organism or a part thereof, preferably a microorganism, a plant cell, a plant or a part thereof, as compared to a corresponding non-transformed wild type non-human organism or a part thereof; and
[40481] (b) growing the non-human organism or a part thereof under conditions which permit the production of isoleucine or a composition comprising isoleucine in said non-human organism or in the culture medium surrounding said non-human organism.

[40482] Accordingly, the present invention relates to a process for the production of leucine, which comprises
[40483] (a) increasing or generating the activity of a glutaredoxin in the cytosol of a cell of a non-human organism or a part thereof, preferably a microorganism, a plant cell, a plant or a part thereof, as compared to a corresponding non-transformed wild type non-human organism or a part thereof; and
[40484] (b) growing the non-human organism or a part thereof under conditions which permit the production of leucine or a composition comprising leucine in said non-human organism or in the culture medium surrounding said non-human organism.

[40485] Accordingly, the present invention relates to a process for the production of valine, which comprises
[40486] (a) increasing or generating the activity of a glutaredoxin in the cytosol of a cell of a non-human organism or a part thereof, preferably a microorganism, a plant cell, a plant or a part thereof, as compared to a corresponding non-transformed wild type non-human organism or a part thereof; and
[40487] (b) growing the non-human organism or a part thereof under conditions which permit the production of valine or a composition comprising valine in said non-human organism or in the culture medium surrounding said non-human organism.

[40488] Accordingly, the present invention relates to a process for the production of isoleucine, which comprises
[40489] (a) increasing or generating the activity of a histone H2A in the cytosol of a cell of a non-human organism or a part thereof, preferably a microorganism, a plant cell, a plant or a part thereof, as compared to a corresponding non-transformed wild type non-human organism or a part thereof; and
[40490] (b) growing the non-human organism or a part thereof under conditions which permit the production of isoleucine or a composition comprising isoleucine in said non-human organism or in the culture medium surrounding said non-human organism.

[40491] Accordingly, the present invention relates to a process for the production of leucine, which comprises
[40492] (a) increasing or generating the activity of a histone H2A in the cytosol of a cell of a non-human organism or a part thereof, preferably a microorganism, a plant cell, a plant or a part thereof, as compared to a corresponding non-transformed wild type non-human organism or a part thereof; and
[40493] (b) growing the non-human organism or a part thereof under conditions which permit the production of leucine or a composition comprising leucine in said non-human organism or in the culture medium surrounding said non-human organism.

[40494] Accordingly, the present invention relates to a process for the production of valine, which comprises
[40495] (a) increasing or generating the activity of a histone H2A in the cytosol of a cell of a non-human organism or a part thereof, preferably a microorganism, a plant cell, a plant or a part thereof, as compared to a corresponding non-transformed wild type non-human organism or a part thereof; and
[40496] (b) growing the non-human organism or a part thereof under conditions which permit the production of valine or a composition comprising valine in said non-human organism or in the culture medium surrounding said non-human organism.

[40497] Accordingly, the present invention relates to a process for the production of valine, which comprises
[40498] (a) increasing or generating the activity of a vacuolar ATPase subunit in the cytosol of a cell of a non-human organism or a part thereof, preferably a microorganism, a plant cell, a plant or a part thereof, as compared to a corresponding non-transformed wild type non-human organism or a part thereof; and
[40499] (b) growing the non-human organism or a part thereof under conditions which permit the production of valine or a composition comprising valine in said non-human organism or in the culture medium surrounding said non-human organism.

[40500] Accordingly, the present invention relates to a process for the production of isoleucine, which comprises
[40501] (a) increasing or generating the activity of a RNA binding protein in the cytosol of a cell of a non-human organism or a part thereof, preferably a microorganism, a plant cell, a plant or a part thereof, as compared to a corresponding non-transformed wild type non-human organism or a part thereof; and
[40502] (b) growing the non-human organism or a part thereof under conditions which permit the production of isoleucine or a composition comprising isoleucine in said non-human organism or in the culture medium surrounding said non-human organism.

[40503] Accordingly, the present invention relates to a process for the production of leucine, which comprises
[40504] (a) increasing or generating the activity of a RNA binding protein in the cytosol of a cell of a non-human organism or a part thereof, preferably a microorganism, a plant cell, a plant or a part thereof, as compared to a corresponding non-transformed wild type non-human organism or a part thereof; and
[40505] (b) growing the non-human organism or a part thereof under conditions which permit the production of leucine or a composition comprising leucine in said non-human organism or in the culture medium surrounding said non-human organism.

[40506] Accordingly, the present invention relates to a process for the production of valine, which comprises
[40507] (a) increasing or generating the activity of a RNA binding protein in the cytosol of a cell of a non-human organism or a part thereof, preferably a microorganism, a plant cell, a plant or a part thereof, as compared to a corresponding non-transformed wild type non-human organism or a part thereof; and
[40508] (b) growing the non-human organism or a part thereof under conditions which permit the production of valine or a composition comprising valine in said non-human organism or in the culture medium surrounding said non-human organism.

[40509] Accordingly, the present invention relates to a process for the production of isoleucine, which comprises
[40510] (a) increasing or generating the activity of a transcription factor in the cytosol of a cell of a non-human organism or a part thereof, preferably a microorganism, a plant cell, a plant or a part thereof, as compared to a corresponding non-transformed wild type non-human organism or a part thereof; and
[40511] (b) growing the non-human organism or a part thereof under conditions which permit the production of isoleucine or a composition comprising isoleucine in said non-human organism or in the culture medium surrounding said non-human organism.

[40512] Accordingly, the present invention relates to a process for the production of leucine, which comprises
[40513] (a) increasing or generating the activity of a transcription factor in the cytosol of a cell of a non-human organism or a part thereof, preferably a microorganism, a plant cell, a plant or a part thereof, as compared to a corresponding non-transformed wild type non-human organism or a part thereof; and
[40514] (b) growing the non-human organism or a part thereof under conditions which permit the production of leucine or a composition comprising leucine in said non-human organism or in the culture medium surrounding said non-human organism.

[40515] Accordingly, the present invention relates to a process for the production of valine, which comprises
[40516] (a) increasing or generating the activity of a transcription factor in the cytosol of a cell of a non-human organism or a part thereof, preferably a microorganism, a plant cell, a plant or a part thereof, as compared to a corresponding non-transformed wild type non-human organism or a part thereof; and
[40517] (b) growing the non-human organism or a part thereof under conditions which permit the production of valine or a composition comprising valine in said non-human organism or in the culture medium surrounding said non-human organism.

[40518] Accordingly, the present invention relates to a process for the production of isoleucine, which comprises
[40519] (a) increasing or generating the activity of a cyclin D in the cytosol of a cell of a non-human organism or a part thereof, preferably a microorganism, a plant cell, a plant or a part thereof, as compared to a corresponding non-transformed wild type non-human organism or a part thereof; and
[40520] (b) growing the non-human organism or a part thereof under conditions which permit the production of isoleucine or a composition comprising isoleucine in said non-human organism or in the culture medium surrounding said non-human organism.

[40521] Accordingly, the present invention relates to a process for the production of leucine, which comprises
[40522] (a) increasing or generating the activity of a cyclin D in the cytosol of a cell of a non-human organism or a part thereof, preferably a microorganism, a plant cell, a plant or a part thereof, as compared to a corresponding non-transformed wild type non-human organism or a part thereof; and
[40523] (b) growing the non-human organism or a part thereof under conditions which permit the production of leucine or a composition comprising leucine in said non-human organism or in the culture medium surrounding said non-human organism.

[40524] Accordingly, the present invention relates to a process for the production of valine, which comprises
[40525] (a) increasing or generating the activity of a cyclin D in the cytosol of a cell of a non-human organism or a part thereof, preferably a microorganism, a plant cell, a plant or a part thereof, as compared to a corresponding non-transformed wild type non-human organism or a part thereof; and
[40526] (b) growing the non-human organism or a part thereof under conditions which permit the production of valine or a composition comprising valine in said non-human organism or in the culture medium surrounding said non-human organism.

[40527] Accordingly, the present invention relates to a process for the production of leucine, which comprises
[40528] (a) increasing or generating the activity of a GM02LC5744-protein in the cytosol of a cell of a non-human organism or a part thereof, preferably a microorganism, a plant cell, a plant or a part thereof, as compared to a corresponding non-transformed wild type non-human organism or a part thereof; and
[40529] (b) growing the non-human organism or a part thereof under conditions which permit the production of leucine or a composition comprising leucine in said non-human organism or in the culture medium surrounding said non-human organism.

[40530] Accordingly, the present invention relates to a process for the production of valine, which comprises
[40531] (a) increasing or generating the activity of a agmatinase in the cytosol of a cell of a non-human organism or a part thereof, preferably a microorganism, a plant cell, a plant or a part thereof, as compared to a corresponding non-transformed wild type non-human organism or a part thereof; and
[40532] (b) growing the non-human organism or a part thereof under conditions which permit the production of valine or a composition comprising valine in said non-human organism or in the culture medium surrounding said non-human organism.

[40533] Accordingly, the present invention relates to a process for the production of valine, which comprises
[40534] (a) increasing or generating the activity of a ABC transporter ATP binding component in the cytosol of a cell of a non-human organism or a part thereof, preferably a microorganism, a plant cell, a plant or a part thereof, as compared to a corresponding non-transformed wild type non-human organism or a part thereof; and
[40535] (b) growing the non-human organism or a part thereof under conditions which permit the production of valine or a composition comprising valine in said non-human organism or in the culture medium surrounding said non-human organism.

[40536] Accordingly, the present invention relates to a process for the production of isoleucine, which comprises
[40537] (a) increasing or generating the activity of a flavodoxin in the cytosol of a cell of a non-human organism or a part thereof, preferably a microorganism, a plant cell, a plant or a part thereof, as compared to a corresponding non-transformed wild type non-human organism or a part thereof; and
[40538] (b) growing the non-human organism or a part thereof under conditions which permit the production of isoleucine or a composition comprising isoleucine in said non-human organism or in the culture medium surrounding said non-human organism.

[40539] Accordingly, the present invention relates to a process for the production of leucine, which comprises
[40540] (a) increasing or generating the activity of a flavodoxin in the cytosol of a cell of a non-human organism or a part thereof, preferably a microorganism, a plant cell, a plant or a part thereof, as compared to a corresponding non-transformed wild type non-human organism or a part thereof; and
[40541] (b) growing the non-human organism or a part thereof under conditions which permit the production of leucine or a composition comprising leucine in said non-human organism or in the culture medium surrounding said non-human organism.

[40542] Accordingly, the present invention relates to a process for the production of isoleucine, which comprises
[40543] (a) increasing or generating the activity of a polyphosphate kinase in the cytosol of a cell of a non-human organism or a part thereof, preferably a microorganism, a plant cell, a plant or a part thereof, as compared to a corresponding non-transformed wild type non-human organism or a part thereof; and
[40544] (b) growing the non-human organism or a part thereof under conditions which permit the production of isoleucine or a composition comprising isoleucine in said non-human organism or in the culture medium surrounding said non-human organism.

[40545] Accordingly, the present invention relates to a process for the production of leucine, which comprises
[40546] (a) increasing or generating the activity of a polyphosphate kinase in the cytosol of a cell of a non-human organism or a part thereof, preferably a microorganism, a plant cell, a plant or a part thereof, as compared to a corresponding non-transformed wild type non-human organism or a part thereof; and
[40547] (b) growing the non-human organism or a part thereof under conditions which permit the production of leucine or a composition comprising leucine in said non-human organism or in the culture medium surrounding said non-human organism.

[40548] Accordingly, the present invention relates to a process for the production of valine, which comprises
[40549] (a) increasing or generating the activity of a polyphosphate kinase in the cytosol of a cell of a non-human organism or a part thereof, preferably a microorganism, a plant cell, a plant or a part thereof, as compared to a corresponding non-transformed wild type non-human organism or a part thereof; and
[40550] (b) growing the non-human organism or a part thereof under conditions which permit the production of valine or a composition comprising valine in said non-human organism or in the culture medium surrounding said non-human organism.

[40551] Accordingly, the present invention relates to a process for the production of valine, which comprises
[40552] (a) increasing or generating the activity of a bifunctional protein (phosphoribosyltransferase and regulatory protein) in the cytosol of a cell of a non-human organism or a part thereof, preferably a microorganism, a plant cell, a plant or a part thereof, as compared to a corresponding non-transformed wild type non-human organism or a part thereof; and
[40553] (b) growing the non-human organism or a part thereof under conditions which permit the production of valine or a composition comprising valine in said non-human organism or in the culture medium surrounding said non-human organism.

[40554] Accordingly, the present invention relates to a process for the production of isoleucine, which comprises
[40555] (a) increasing or generating the activity of a urease subunit in the cytosol of a cell of a non-human organism or a part thereof, preferably a microorganism, a plant cell, a plant or a part thereof, as compared to a corresponding non-transformed wild type non-human organism or a part thereof; and
[40556] (b) growing the non-human organism or a part thereof under conditions which permit the production of isoleucine or a composition comprising isoleucine in said non-human organism or in the culture medium surrounding said non-human organism.

[40557] Accordingly, the present invention relates to a process for the production of valine, which comprises
[40558] (a) increasing or generating the activity of a NAD(P)H-quinone oxidoreductase subunit in the cytosol of a cell of a non-human organism or a part thereof, preferably a microorganism, a plant cell, a plant or a part thereof, as compared to a corresponding non-transformed wild type non-human organism or a part thereof; and
[40559] (b) growing the non-human organism or a part thereof under conditions which permit the production of valine or a composition comprising valine in said non-human organism or in the culture medium surrounding said non-human organism.

[40560] Accordingly, the present invention relates to a process for the production of isoleucine, which comprises
[40561] (a) increasing or generating the activity of a oxireductase in the cytosol of a cell of a non-human organism or a part thereof, preferably a microorganism, a plant cell, a plant or a part thereof, as compared to a corresponding non-transformed wild type non-human organism or a part thereof; and
[40562] (b) growing the non-human organism or a part thereof under conditions which permit the production of isoleucine or a composition comprising isoleucine in said non-human organism or in the culture medium surrounding said non-human organism.

[40563] Accordingly, the present invention relates to a process for the production of isoleucine, which comprises
[40564] (a) increasing or generating the activity of a binding-protein-dependent transport systems inner membrane component in the cytosol of a cell of a non-human organism or a part thereof, preferably a microorganism, a plant cell, a plant or a part thereof, as compared to a corresponding non-transformed wild type non-human organism or a part thereof; and
[40565] (b) growing the non-human organism or a part thereof under conditions which permit the production of isoleucine or a composition comprising isoleucine in said non-human organism or in the culture medium surrounding said non-human organism.

[40566] Accordingly, the present invention relates to a process for the production of valine, which comprises
[40567] (a) increasing or generating the activity of a sll1032-protein in the cytosol of a cell of a non-human organism or a part thereof, preferably a microorganism, a plant cell, a plant or a part thereof, as compared to a corresponding non-transformed wild type non-human organism or a part thereof; and
[40568] (b) growing the non-human organism or a part thereof under conditions which permit the production of valine or a composition comprising valine in said non-human organism or in the culture medium surrounding said non-human organism.

[40569] Accordingly, the present invention relates to a process for the production of isoleucine, which comprises
[40570] (a) increasing or generating the activity of a glycogen (starch) synthase in the cytosol of a cell of a non-human organism or a part thereof, preferably a microorganism, a plant cell, a plant or a part thereof, as compared to a corresponding non-transformed wild type non-human organism or a part thereof; and
[40571] (b) growing the non-human organism or a part thereof under conditions which permit the production of isoleucine or a composition comprising isoleucine in said non-human organism or in the culture medium surrounding said non-human organism.

[40572] Accordingly, the present invention relates to a process for the production of leucine, which comprises
[40573] (a) increasing or generating the activity of a glycogen (starch) synthase in the cytosol of a cell of a non-human organism or a part thereof, preferably a microorganism, a plant cell, a plant or a part thereof, as compared to a corresponding non-transformed wild type non-human organism or a part thereof; and
[40574] (b) growing the non-human organism or a part thereof under conditions which permit the production of leucine or a composition comprising leucine in said non-human organism or in the culture medium surrounding said non-human organism.

[40575] Accordingly, the present invention relates to a process for the production of valine, which comprises
[40576] (a) increasing or generating the activity of a glycogen (starch) synthase in the cytosol of a cell of a non-human organism or a part thereof, preferably a microorganism, a plant cell, a plant or a part thereof, as compared to a corresponding non-transformed wild type non-human organism or a part thereof; and
[40577] (b) growing the non-human organism or a part thereof under conditions which permit the production of valine or a composition comprising valine in said non-human organism or in the culture medium surrounding said non-human organism.

[40578] Accordingly, the present invention relates to a process for the production of valine, which comprises
[40579] (a) increasing or generating the activity of a sll1455-protein in the cytosol of a cell of a non-human organism or a part thereof, preferably a microorganism, a plant cell, a plant or a part thereof, as compared to a corresponding non-transformed wild type non-human organism or a part thereof; and
[40580] (b) growing the non-human organism or a part thereof under conditions which permit the production of valine or a composition comprising valine in said non-human organism or in the culture medium surrounding said non-human organism.

[40581] Accordingly, the present invention relates to a process for the production of isoleucine, which comprises
[40582] (a) increasing or generating the activity of a carbamoyl-phosphate synthase subunit in the cytosol of a cell of a non-human organism or a part thereof, preferably a microorganism, a plant cell, a plant or a part thereof, as compared to a corresponding non-transformed wild type non-human organism or a part thereof; and
[40583] (b) growing the non-human organism or a part thereof under conditions which permit the production of isoleucine or a composition comprising isoleucine in said non-human organism or in the culture medium surrounding said non-human organism.

[40584] Accordingly, the present invention relates to a process for the production of leucine, which comprises
[40585] (a) increasing or generating the activity of a carbamoyl-phosphate synthase subunit in the cytosol of a cell of a non-human organism or a part thereof, preferably a microorganism, a plant cell, a plant or a part thereof, as compared to a corresponding non-transformed wild type non-human organism or a part thereof; and
[40586] (b) growing the non-human organism or a part thereof under conditions which permit the production of leucine or a composition comprising leucine in said non-human organism or in the culture medium surrounding said non-human organism.

[40587] Accordingly, the present invention relates to a process for the production of isoleucine, which comprises
[40588] (a) increasing or generating the activity of a sll1761-protein in the cytosol of a cell of a non-human organism or a part thereof, preferably a microorganism, a plant cell, a plant or a part thereof, as compared to a corresponding non-transformed wild type non-human organism or a part thereof; and
[40589] (b) growing the non-human organism or a part thereof under conditions which permit the production of isoleucine or a composition comprising isoleucine in said non-human organism or in the culture medium surrounding said non-human organism.

[40590] Accordingly, the present invention relates to a process for the production of leucine, which comprises
[40591] (a) increasing or generating the activity of a sll1761-protein in the cytosol of a cell of a non-human organism or a part thereof, preferably a microorganism, a plant cell, a plant or a part thereof, as compared to a corresponding non-transformed wild type non-human organism or a part thereof; and
[40592] (b) growing the non-human organism or a part thereof under conditions which permit the production of leucine or a composition comprising leucine in said non-human organism or in the culture medium surrounding said non-human organism.

[40593] Accordingly, the present invention relates to a process for the production of isoleucine, which comprises
[40594] (a) increasing or generating the activity of a adenylate kinase in the cytosol of a cell of a non-human organism or a part thereof, preferably a microorganism, a plant cell, a plant or a part thereof, as compared to a corresponding non-transformed wild type non-human organism or a part thereof; and
[40595] (b) growing the non-human organism or a part thereof under conditions which permit the production of isoleucine or a composition comprising isoleucine in said non-human organism or in the culture medium surrounding said non-human organism.

[40596] Accordingly, the present invention relates to a process for the production of leucine, which comprises
[40597] (a) increasing or generating the activity of a adenylate kinase in the cytosol of a cell of a non-human organism or a part thereof, preferably a microorganism, a plant cell, a plant or a part thereof, as compared to a corresponding non-transformed wild type non-human organism or a part thereof; and
[40598] (b) growing the non-human organism or a part thereof under conditions which permit the production of leucine or a composition comprising leucine in said non-human organism or in the culture medium surrounding said non-human organism.

[40599] Accordingly, the present invention relates to a process for the production of valine, which comprises
[40600] (a) increasing or generating the activity of a adenylate kinase in the cytosol of a cell of a non-human organism or a part thereof, preferably a microorganism, a plant cell, a plant or a part thereof, as compared to a corresponding non-transformed wild type non-human organism or a part thereof; and
[40601] (b) growing the non-human organism or a part thereof under conditions which permit the production of valine or a composition comprising valine in said non-human organism or in the culture medium surrounding said non-human organism.

[40602] Accordingly, the present invention relates to a process for the production of isoleucine, which comprises
[40603] (a) increasing or generating the activity of a acyl transferase in the cytosol of a cell of a non-human organism or a part thereof, preferably a microorganism, a plant cell, a plant or a part thereof, as compared to a corresponding non-transformed wild type non-human organism or a part thereof; and
[40604] (b) growing the non-human organism or a part thereof under conditions which permit the production of isoleucine or a composition comprising isoleucine in said non-human organism or in the culture medium surrounding said non-human organism.

[40605] Accordingly, the present invention relates to a process for the production of valine, which comprises
[40606] (a) increasing or generating the activity of a ferredoxin in the cytosol of a cell of a non-human organism or a part thereof, preferably a microorganism, a plant cell, a plant or a part thereof, as compared to a corresponding non-transformed wild type non-human organism or a part thereof; and
[40607] (b) growing the non-human organism or a part thereof under conditions which permit the production of valine or a composition comprising valine in said non-human organism or in the culture medium surrounding said non-human organism.

[40608] Accordingly, the present invention relates to a process for the production of isoleucine, which comprises
[40609] (a) increasing or generating the activity of a precorrin methylase in the cytosol of a cell of a non-human organism or a part thereof, preferably a microorganism, a plant cell, a plant or a part thereof, as compared to a corresponding non-transformed wild type non-human organism or a part thereof; and
[40610] (b) growing the non-human organism or a part thereof under conditions which permit the production of isoleucine or a composition comprising isoleucine in said non-human organism or in the culture medium surrounding said non-human organism.

[40611] Accordingly, the present invention relates to a process for the production of leucine, which comprises
[40612] (a) increasing or generating the activity of a precorrin methylase in the cytosol of a cell of a non-human organism or a part thereof, preferably a microorganism, a plant cell, a plant or a part thereof, as compared to a corresponding non-transformed wild type non-human organism or a part thereof; and
[40613] (b) growing the non-human organism or a part thereof under conditions which permit the production of leucine or a composition comprising leucine in said non-human organism or in the culture medium surrounding said non-human organism.

[40614] Accordingly, the present invention relates to a process for the production of valine, which comprises
[40615] (a) increasing or generating the activity of a precorrin methylase in the cytosol of a cell of a non-human organism or a part thereof, preferably a microorganism, a plant cell, a plant or a part thereof, as compared to a corresponding non-transformed wild type non-human organism or a part thereof; and
[40616] (b) growing the non-human organism or a part thereof under conditions which permit the production of valine or a composition comprising valine in said non-human organism or in the culture medium surrounding said non-human organism.

[40617] Accordingly, the present invention relates to a process for the production of isoleucine, which comprises
[40618] (a) increasing or generating the activity of a malate dehydrogenase in the cytosol of a cell of a non-human organism or a part thereof, preferably a microorganism, a plant cell, a plant or a part thereof, as compared to a corresponding non-transformed wild type non-human organism or a part thereof; and
[40619] (b) growing the non-human organism or a part thereof under conditions which permit the production of isoleucine or a composition comprising isoleucine in said non-human organism or in the culture medium surrounding said non-human organism.

[40620] Accordingly, the present invention relates to a process for the production of isoleucine, which comprises
[40621] (a) increasing or generating the activity of a malate dehydrogenase in the cytosol of a cell of a non-human organism or a part thereof, preferably a microorganism, a plant cell, a plant or a part thereof, as compared to a corresponding non-transformed wild type non-human organism or a part thereof; and
[40622] (b) growing the non-human organism or a part thereof under conditions which permit the production of isoleucine or a composition comprising isoleucine in said non-human organism or in the culture medium surrounding said non-human organism.

[40623] Accordingly, the present invention relates to a process for the production of leucine, which comprises
[40624] (a) increasing or generating the activity of a malate dehydrogenase in the cytosol of a cell of a non-human organism or a part thereof, preferably a microorganism, a plant cell, a plant or a part thereof, as compared to a corresponding non-transformed wild type non-human organism or a part thereof; and
[40625] (b) growing the non-human organism or a part thereof under conditions which permit the production of leucine or a composition comprising leucine in said non-human organism or in the culture medium surrounding said non-human organism.

[40626] Accordingly, the present invention relates to a process for the production of leucine, which comprises
[40627] (a) increasing or generating the activity of a malate dehydrogenase in the cytosol of a cell of a non-human organism or a part thereof, preferably a microorganism, a plant cell, a plant or a part thereof, as compared to a corresponding non-transformed wild type non-human organism or a part thereof; and
[40628] (b) growing the non-human organism or a part thereof under conditions which permit the production of leucine or a composition comprising leucine in said non-human organism or in the culture medium surrounding said non-human organism.

[40629] Accordingly, the present invention relates to a process for the production of valine, which comprises
[40630] (a) increasing or generating the activity of a malate dehydrogenase in the cytosol of a cell of a non-human organism or a part thereof, preferably a microorganism, a plant cell, a plant or a part thereof, as compared to a corresponding non-transformed wild type non-human organism or a part thereof; and
[40631] (b) growing the non-human organism or a part thereof under conditions which permit the production of valine or a composition comprising valine in said non-human organism or in the culture medium surrounding said non-human organism.

[40632] Accordingly, the present invention relates to a process for the production of valine, which comprises
[40633] (a) increasing or generating the activity of a malate dehydrogenase in the cytosol of a cell of a non-human organism or a part thereof, preferably a microorganism, a plant cell, a plant or a part thereof, as compared to a corresponding non-transformed wild type non-human organism or a part thereof; and
[40634] (b) growing the non-human organism or a part thereof under conditions which permit the production of valine or a composition comprising valine in said non-human organism or in the culture medium surrounding said non-human organism.

[40635] Accordingly, the present invention relates to a process for the production of isoleucine, which comprises
[40636] (a) increasing or generating the activity of a geranylgeranyl pyrophosphate synthase in the cytosol of a cell of a non-human organism or a part thereof, preferably a microorganism, a plant cell, a plant or a part thereof, as compared to a corresponding non-transformed wild type non-human organism or a part thereof; and
[40637] (b) growing the non-human organism or a part thereof under conditions which permit the production of isoleucine or a composition comprising isoleucine in said non-human organism or in the culture medium surrounding said non-human organism.

[40638] Accordingly, the present invention relates to a process for the production of leucine, which comprises
[40639] (a) increasing or generating the activity of a geranylgeranyl pyrophosphate synthase in the cytosol of a cell of a non-human organism or a part thereof, preferably a microorganism, a plant cell, a plant or a part thereof, as compared to a corresponding non-transformed wild type non-human organism or a part thereof; and
[40640] (b) growing the non-human organism or a part thereof under conditions which permit the production of leucine or a composition comprising leucine in said non-human organism or in the culture medium surrounding said non-human organism.

[40641] Accordingly, the present invention relates to a process for the production of valine, which comprises
[40642] (a) increasing or generating the activity of a geranylgeranyl pyrophosphate synthase in the cytosol of a cell of a non-human organism or a part thereof, preferably a microorganism, a plant cell, a plant or a part thereof, as compared to a corresponding non-transformed wild type non-human organism or a part thereof; and
[40643] (b) growing the non-human organism or a part thereof under conditions which permit the production of valine or a composition comprising valine in said non-human organism or in the culture medium surrounding said non-human organism.

[40644] Accordingly, the present invention relates to a process for the production of isoleucine, which comprises
[40645] (a) increasing or generating the activity of a iron(III) dicitrate-binding protein in the cytosol of a cell of a non-human organism or a part thereof, preferably a microorganism, a plant cell, a plant or a part thereof, as compared to a corresponding non-transformed wild type non-human organism or a part thereof; and
[40646] (b) growing the non-human organism or a part thereof under conditions which permit the production of isoleucine or a composition comprising isoleucine in said non-human organism or in the culture medium surrounding said non-human organism.

[40647] Accordingly, the present invention relates to a process for the production of isoleucine, which comprises
[40648] (a) increasing or generating the activity of a Na+/K+ transporter in the cytosol of a cell of a non-human organism or a part thereof, preferably a microorganism, a plant cell, a plant or a part thereof, as compared to a corresponding non-transformed wild type non-human organism or a part thereof; and
[40649] (b) growing the non-human organism or a part thereof under conditions which permit the production of isoleucine or a composition comprising isoleucine in said non-human organism or in the culture medium surrounding said non-human organism.

[40650] Accordingly, the present invention relates to a process for the production of leucine, which comprises
[40651] (a) increasing or generating the activity of a Na+/K+ transporter in the cytosol of a cell of a non-human organism or a part thereof, preferably a microorganism, a plant cell, a plant or a part thereof, as compared to a corresponding non-transformed wild type non-human organism or a part thereof; and
[40652] (b) growing the non-human organism or a part thereof under conditions which permit the production of leucine or a composition comprising leucine in said non-human organism or in the culture medium surrounding said non-human organism.

[40653] Accordingly, the present invention relates to a process for the production of valine, which comprises
[40654] (a) increasing or generating the activity of a 3-isopropylmalate dehydrogenase in the cytosol of a cell of a non-human organism or a part thereof, preferably a microorganism, a plant cell, a plant or a part thereof, as compared to a corresponding non-transformed wild type non-human organism or a part thereof; and
[40655] (b) growing the non-human organism or a part thereof under conditions which permit the production of valine or a composition comprising valine in said non-human organism or in the culture medium surrounding said non-human organism.

[40656] Accordingly, the present invention relates to a process for the production of isoleucine, which comprises
[40657] (a) increasing or generating the activity of a photosystem II protein in the cytosol of a cell of a non-human organism or a part thereof, preferably a microorganism, a plant cell, a plant or a part thereof, as compared to a corresponding non-transformed wild type non-human organism or a part thereof; and
[40658] (b) growing the non-human organism or a part thereof under conditions which permit the production of isoleucine or a composition comprising isoleucine in said non-human organism or in the culture medium surrounding said non-human organism.

[40659] Accordingly, the present invention relates to a process for the production of leucine, which comprises
[40660] (a) increasing or generating the activity of a photosystem II protein in the cytosol of a cell of a non-human organism or a part thereof, preferably a microorganism, a plant cell, a plant or a part thereof, as compared to a corresponding non-transformed wild type non-human organism or a part thereof; and
[40661] (b) growing the non-human organism or a part thereof under conditions which permit the production of leucine or a composition comprising leucine in said non-human organism or in the culture medium surrounding said non-human organism.

[40662] Accordingly, the present invention relates to a process for the production of valine, which comprises
[40663] (a) increasing or generating the activity of a photosystem II protein in the cytosol of a cell of a non-human organism or a part thereof, preferably a microorganism, a plant cell, a plant or a part thereof, as compared to a corresponding non-transformed wild type non-human organism or a part thereof; and
[40664] (b) growing the non-human organism or a part thereof under conditions which permit the production of valine or a composition comprising valine in said non-human organism or in the culture medium surrounding said non-human organism.

[40665] Accordingly, the present invention relates to a process for the production of valine, which comprises
[40666] (a) increasing or generating the activity of a phosphoadenosine phosphosulfate reductase in the cytosol of a cell of a non-human organism or a part thereof, preferably a microorganism, a plant cell, a plant or a part thereof, as compared to a corresponding non-transformed wild type non-human organism or a part thereof; and
[40667] (b) growing the non-human organism or a part thereof under conditions which permit the production of valine or a composition comprising valine in said non-human organism or in the culture medium surrounding said non-human organism.

[40668] Accordingly, the present invention relates to a process for the production of valine, which comprises
[40669] (a) increasing or generating the activity of a riboflavin biosynthesis protein in the cytosol of a cell of a non-human organism or a part thereof, preferably a microorganism, a plant cell, a plant or a part thereof, as compared to a corresponding non-transformed wild type non-human organism or a part thereof; and
[40670] (b) growing the non-human organism or a part thereof under conditions which permit the production of valine or a composition comprising valine in said non-human organism or in the culture medium surrounding said non-human organism.

[40671] Accordingly, the present invention relates to a process for the production of isoleucine, which comprises
[40672] (a) increasing or generating the activity of a threonine dehydratase in the cytosol of a cell of a non-human organism or a part thereof, preferably a microorganism, a plant cell, a plant or a part thereof, as compared to a corresponding non-transformed wild type non-human organism or a part thereof; and
[40673] (b) growing the non-human organism or a part thereof under conditions which permit the production of isoleucine or a composition comprising isoleucine in said non-human organism or in the culture medium surrounding said non-human organism.

[40674] Accordingly, the present invention relates to a process for the production of isoleucine, which comprises
[40675] (a) increasing or generating the activity of a threonine dehydratase in the cytosol of a cell of a non-human organism or a part thereof, preferably a microorganism, a plant cell, a plant or a part thereof, as compared to a corresponding non-transformed wild type non-human organism or a part thereof; and
[40676] (b) growing the non-human organism or a part thereof under conditions which permit the production of isoleucine or a composition comprising isoleucine in said non-human organism or in the culture medium surrounding said non-human organism.

[40677] Accordingly, the present invention relates to a process for the production of leucine, which comprises
[40678] (a) increasing or generating the activity of a threonine dehydratase in the cytosol of a cell of a non-human organism or a part thereof, preferably a microorganism, a plant cell, a plant or a part thereof, as compared to a corresponding non-transformed wild type non-human organism or a part thereof; and
[40679] (b) growing the non-human organism or a part thereof under conditions which permit the production of leucine or a composition comprising leucine in said non-human organism or in the culture medium surrounding said non-human organism.

[40680] Accordingly, the present invention relates to a process for the production of leucine, which comprises
[40681] (a) increasing or generating the activity of a threonine dehydratase in the cytosol of a cell of a non-human organism or a part thereof, preferably a microorganism, a plant cell, a plant or a part thereof, as compared to a corresponding non-transformed wild type non-human organism or a part thereof; and
[40682] (b) growing the non-human organism or a part thereof under conditions which permit the production of leucine or a composition comprising leucine in said non-human organism or in the culture medium surrounding said non-human organism.

[40683] Accordingly, the present invention relates to a process for the production of valine, which comprises
[40684] (a) increasing or generating the activity of a threonine dehydratase in the cytosol of a cell of a non-human organism or a part thereof, preferably a microorganism, a plant cell, a plant or a part thereof, as compared to a corresponding non-transformed wild type non-human organism or a part thereof; and
[40685] (b) growing the non-human organism or a part thereof under conditions which permit the production of valine or a composition comprising valine in said non-human organism or in the culture medium surrounding said non-human organism.

[40686] Accordingly, the present invention relates to a process for the production of valine, which comprises
[40687] (a) increasing or generating the activity of a threonine dehydratase in the cytosol of a cell of a non-human organism or a part thereof, preferably a microorganism, a plant cell, a plant or a part thereof, as compared to a corresponding non-transformed wild type non-human organism or a part thereof; and
[40688] (b) growing the non-human organism or a part thereof under conditions which permit the production of valine or a composition comprising valine in said non-human organism or in the culture medium surrounding said non-human organism.

[40689] Accordingly, the present invention relates to a process for the production of valine, which comprises
[40690] (a) increasing or generating the activity of a short-chain alcohol dehydrogenase family in the cytosol of a cell of a non-human organism or a part thereof, preferably a microorganism, a plant cell, a plant or a part thereof, as compared to a corresponding non-transformed wild type non-human organism or a part thereof; and
[40691] (b) growing the non-human organism or a part thereof under conditions which permit the production of valine or a composition comprising valine in said non-human organism or in the culture medium surrounding said non-human organism.

[40692] Accordingly, the present invention relates to a process for the production of isoleucine, which comprises
[40693] (a) increasing or generating the activity of a Sec-independent protein translocase subunit in the cytosol of a cell of a non-human organism or a part thereof, preferably a microorganism, a plant cell, a plant or a part thereof, as compared to a corresponding non-transformed wild type non-human organism or a part thereof; and
[40694] (b) growing the non-human organism or a part thereof under conditions which permit the production of isoleucine or a composition comprising isoleucine in said non-human organism or in the culture medium surrounding said non-human organism.

[40695] Accordingly, the present invention relates to a process for the production of leucine, which comprises
[40696] (a) increasing or generating the activity of a Sec-independent protein translocase subunit in the cytosol of a cell of a non-human organism or a part thereof, preferably a microorganism, a plant cell, a plant or a part thereof, as compared to a corresponding non-transformed wild type non-human organism or a part thereof; and
[40697] (b) growing the non-human organism or a part thereof under conditions which permit the production of leucine or a composition comprising leucine in said non-human organism or in the culture medium surrounding said non-human organism.

[40698] Accordingly, the present invention relates to a process for the production of valine, which comprises
[40699] (a) increasing or generating the activity of a Sec-independent protein translocase subunit in the cytosol of a cell of a non-human organism or a part thereof, preferably a microorganism, a plant cell, a plant or a part thereof, as compared to a corresponding non-transformed wild type non-human organism or a part thereof; and
[40700] (b) growing the non-human organism or a part thereof under conditions which permit the production of valine or a composition comprising valine in said non-human organism or in the culture medium surrounding said non-human organism.

[40701] Accordingly, the present invention relates to a process for the production of isoleucine, which comprises
[40702] (a) increasing or generating the activity of a 2-isopropylmalate synthase in the cytosol of a cell of a non-human organism or a part thereof, preferably a microorganism, a plant cell, a plant or a part thereof, as compared to a corresponding non-transformed wild type non-human organism or a part thereof; and
[40703] (b) growing the non-human organism or a part thereof under conditions which permit the production of isoleucine or a composition comprising isoleucine in said non-human organism or in the culture medium surrounding said non-human organism.

[40704] Accordingly, the present invention relates to a process for the production of leucine, which comprises
[40705] (a) increasing or generating the activity of a 2-isopropylmalate synthase in the cytosol of a cell of a non-human organism or a part thereof, preferably a microorganism, a plant cell, a plant or a part thereof, as compared to a corresponding non-transformed wild type non-human organism or a part thereof; and
[40706] (b) growing the non-human organism or a part thereof under conditions which permit the production of leucine or a composition comprising leucine in said non-human organism or in the culture medium surrounding said non-human organism.

[40707] Accordingly, the present invention relates to a process for the production of isoleucine, which comprises
[40708] (a) increasing or generating the activity of a TTC1386-protein in the cytosol of a cell of a non-human organism or a part thereof, preferably a microorganism, a plant cell, a plant or a part thereof, as compared to a corresponding non-transformed wild type non-human organism or a part thereof; and
[40709] (b) growing the non-human organism or a part thereof under conditions which permit the production of isoleucine or a composition comprising isoleucine in said non-human organism or in the culture medium surrounding said non-human organism.

[40710] Accordingly, the present invention relates to a process for the production of leucine, which comprises
[40711] (a) increasing or generating the activity of a TTC1386-protein in the cytosol of a cell of a non-human organism or a part thereof, preferably a microorganism, a plant cell, a plant or a part thereof, as compared to a corresponding non-transformed wild type non-human organism or a part thereof; and
[40712] (b) growing the non-human organism or a part thereof under conditions which permit the production of leucine or a composition comprising leucine in said non-human organism or in the culture medium surrounding said non-human organism.

[40713] Accordingly, the present invention relates to a process for the production of valine, which comprises
[40714] (a) increasing or generating the activity of a TTC1386-protein in the cytosol of a cell of a non-human organism or a part thereof, preferably a microorganism, a plant cell, a plant or a part thereof, as compared to a corresponding non-transformed wild type non-human organism or a part thereof; and
[40715] (b) growing the non-human organism or a part thereof under conditions which permit the production of valine or a composition comprising valine in said non-human organism or in the culture medium surrounding said non-human organism.

[40716] Accordingly, the present invention relates to a process for the production of isoleucine, which comprises
[40717] (a) increasing or generating the activity of a homocitrate synthase in the cytosol of a cell of a non-human organism or a part thereof, preferably a microorganism, a plant cell, a plant or a part thereof, as compared to a corresponding non-transformed wild type non-human organism or a part thereof; and
[40718] (b) growing the non-human organism or a part thereof under conditions which permit the production of isoleucine or a composition comprising isoleucine in said non-human organism or in the culture medium surrounding said non-human organism.

[40719] Accordingly, the present invention relates to a process for the production of leucine, which comprises
[40720] (a) increasing or generating the activity of a homocitrate synthase in the cytosol of a cell of a non-human organism or a part thereof, preferably a microorganism, a plant cell, a plant or a part thereof, as compared to a corresponding non-transformed wild type non-human organism or a part thereof; and
[40721] (b) growing the non-human organism or a part thereof under conditions which permit the production of leucine or a composition comprising leucine in said non-human organism or in the culture medium surrounding said non-human organism.

[40722] Accordingly, the present invention relates to a process for the production of valine, which comprises
[40723] (a) increasing or generating the activity of a homocitrate synthase in the cytosol of a cell of a non-human organism or a part thereof, preferably a microorganism, a plant cell, a plant or a part thereof, as compared to a corresponding non-transformed wild type non-human organism or a part thereof; and
[40724] (b) growing the non-human organism or a part thereof under conditions which permit the production of valine or a composition comprising valine in said non-human organism or in the culture medium surrounding said non-human organism.

[40725] Accordingly, the present invention relates to a process for the production of leucine, which comprises
[40726] (a) increasing or generating the activity of a YAL013W-protein in the cytosol of a cell of a non-human organism or a part thereof, preferably a microorganism, a plant cell, a plant or a part thereof, as compared to a corresponding non-transformed wild type non-human organism or a part thereof; and
[40727] (b) growing the non-human organism or a part thereof under conditions which permit the production of leucine or a composition comprising leucine in said non-human organism or in the culture medium surrounding said non-human organism.

[40728] Accordingly, the present invention relates to a process for the production of valine, which comprises
[40729] (a) increasing or generating the activity of a cell division control protein in the cytosol of a cell of a non-human organism or a part thereof, preferably a microorganism, a plant cell, a plant or a part thereof, as compared to a corresponding non-transformed wild type non-human organism or a part thereof; and
[40730] (b) growing the non-human organism or a part thereof under conditions which permit the production of valine or a composition comprising valine in said non-human organism or in the culture medium surrounding said non-human organism.

[40731] Accordingly, the present invention relates to a process for the production of isoleucine, which comprises
[40732] (a) increasing or generating the activity of a phosphoglycerate kinase in the cytosol of a cell of a non-human organism or a part thereof, preferably a microorganism, a plant cell, a plant or a part thereof, as compared to a corresponding non-transformed wild type non-human organism or a part thereof; and
[40733] (b) growing the non-human organism or a part thereof under conditions which permit the production of isoleucine or a composition comprising isoleucine in said non-human organism or in the culture medium surrounding said non-human organism.

[40734] Accordingly, the present invention relates to a process for the production of leucine, which comprises
[40735] (a) increasing or generating the activity of a phosphoglycerate kinase in the cytosol of a cell of a non-human organism or a part thereof, preferably a microorganism, a plant cell, a plant or a part thereof, as compared to a corresponding non-transformed wild type non-human organism or a part thereof; and
[40736] (b) growing the non-human organism or a part thereof under conditions which permit the production of leucine or a composition comprising leucine in said non-human organism or in the culture medium surrounding said non-human organism.

[40737] Accordingly, the present invention relates to a process for the production of isoleucine, which comprises
[40738] (a) increasing or generating the activity of a branched-chain amino acid permease in the cytosol of a cell of a non-human organism or a part thereof, preferably a microorganism, a plant cell, a plant or a part thereof, as compared to a corresponding non-transformed wild type non-human organism or a part thereof; and
[40739] (b) growing the non-human organism or a part thereof under conditions which permit the production of isoleucine or a composition comprising isoleucine in said non-human organism or in the culture medium surrounding said non-human organism.

[40740] Accordingly, the present invention relates to a process for the production of valine, which comprises
[40741] (a) increasing or generating the activity of a branched-chain amino acid permease in the cytosol of a cell of a non-human organism or a part thereof, preferably a microorganism, a plant cell, a plant or a part thereof, as compared to a corresponding non-transformed wild type non-human organism or a part thereof; and
[40742] (b) growing the non-human organism or a part thereof under conditions which permit the production of valine or a composition comprising valine in said non-human organism or in the culture medium surrounding said non-human organism.

[40743] Accordingly, the present invention relates to a process for the production of valine, which comprises
[40744] (a) increasing or generating the activity of a ydr183w-protein in the cytosol of a cell of a non-human organism or a part thereof, preferably a microorganism, a plant cell, a plant or a part thereof, as compared to a corresponding non-transformed wild type non-human organism or a part thereof; and
[40745] (b) growing the non-human organism or a part thereof under conditions which permit the production of valine or a composition comprising valine in said non-human organism or in the culture medium surrounding said non-human organism.

[40746] Accordingly, the present invention relates to a process for the production of isoleucine, which comprises
[40747] (a) increasing or generating the activity of a hexose transporter in the cytosol of a cell of a non-human organism or a part thereof, preferably a microorganism, a plant cell, a plant or a part thereof, as compared to a corresponding non-transformed wild type non-human organism or a part thereof; and
[40748] (b) growing the non-human organism or a part thereof under conditions which permit the production of isoleucine or a composition comprising isoleucine in said non-human organism or in the culture medium surrounding said non-human organism.

[40749] Accordingly, the present invention relates to a process for the production of isoleucine, which comprises
[40750] (a) increasing or generating the activity of a ygl237c-protein in the cytosol of a cell of a non-human organism or a part thereof, preferably a microorganism, a plant cell, a plant or a part thereof, as compared to a corresponding non-transformed wild type non-human organism or a part thereof; and
[40751] (b) growing the non-human organism or a part thereof under conditions which permit the production of isoleucine or a composition comprising isoleucine in said non-human organism or in the culture medium surrounding said non-human organism.

[40752] Accordingly, the present invention relates to a process for the production of leucine, which comprises
[40753] (a) increasing or generating the activity of a ygl237c-protein in the cytosol of a cell of a non-human organism or a part thereof, preferably a microorganism, a plant cell, a plant or a part thereof, as compared to a corresponding non-transformed wild type non-human organism or a part thereof; and
[40754] (b) growing the non-human organism or a part thereof under conditions which permit the production of leucine or a composition comprising leucine in said non-human organism or in the culture medium surrounding said non-human organism.

[40755] Accordingly, the present invention relates to a process for the production of leucine, which comprises
[40756] (a) increasing or generating the activity of a YGR193C-protein in the cytosol of a cell of a non-human organism or a part thereof, preferably a microorganism, a plant cell, a plant or a part thereof, as compared to a corresponding non-transformed wild type non-human organism or a part thereof; and
[40757] (b) growing the non-human organism or a part thereof under conditions which permit the production of leucine or a composition comprising leucine in said non-human organism or in the culture medium surrounding said non-human organism.

[40758] Accordingly, the present invention relates to a process for the production of isoleucine, which comprises
[40759] (a) increasing or generating the activity of a yhr006w-protein in the cytosol of a cell of a non-human organism or a part thereof, preferably a microorganism, a plant cell, a plant or a part thereof, as compared to a corresponding non-transformed wild type non-human organism or a part thereof; and
[40760] (b) growing the non-human organism or a part thereof under conditions which permit the production of isoleucine or a composition comprising isoleucine in said non-human organism or in the culture medium surrounding said non-human organism.

[40761] Accordingly, the present invention relates to a process for the production of leucine, which comprises
[40762] (a) increasing or generating the activity of a yhr006w-protein in the cytosol of a cell of a non-human organism or a part thereof, preferably a microorganism, a plant cell, a plant or a part thereof, as compared to a corresponding non-transformed wild type non-human organism or a part thereof; and
[40763] (b) growing the non-human organism or a part thereof under conditions which permit the production of leucine or a composition comprising leucine in said non-human organism or in the culture medium surrounding said non-human organism.

[40764] Accordingly, the present invention relates to a process for the production of isoleucine, which comprises
[40765] (a) increasing or generating the activity of a H/ACA ribonucleoprotein complex subunit 3 in the cytosol of a cell of a non-human organism or a part thereof, preferably a microorganism, a plant cell, a plant or a part thereof, as compared to a corresponding non-transformed wild type non-human organism or a part thereof; and
[40766] (b) growing the non-human organism or a part thereof under conditions which permit the production of isoleucine or a composition comprising isoleucine in said non-human organism or in the culture medium surrounding said non-human organism.

[40767] Accordingly, the present invention relates to a process for the production of leucine, which comprises
[40768] (a) increasing or generating the activity of a H/ACA ribonucleoprotein complex subunit 3 in the cytosol of a cell of a non-human organism or a part thereof, preferably a microorganism, a plant cell, a plant or a part thereof, as compared to a corresponding non-transformed wild type non-human organism or a part thereof; and
[40769] (b) growing the non-human organism or a part thereof under conditions which permit the production of leucine or a composition comprising leucine in said non-human organism or in the culture medium surrounding said non-human organism.

[40770] Accordingly, the present invention relates to a process for the production of isoleucine, which comprises
[40771] (a) increasing or generating the activity of a glycerol-3-phosphate dehydrogenase in the cytosol of a cell of a non-human organism or a part thereof, preferably a microorganism, a plant cell, a plant or a part thereof, as compared to a corresponding non-transformed wild type non-human organism or a part thereof; and
[40772] (b) growing the non-human organism or a part thereof under conditions which permit the production of isoleucine or a composition comprising isoleucine in said non-human organism or in the culture medium surrounding said non-human organism.

[40773] Accordingly, the present invention relates to a process for the production of leucine, which comprises
[40774] (a) increasing or generating the activity of a glycerol-3-phosphate dehydrogenase in the cytosol of a cell of a non-human organism or a part thereof, preferably a microorganism, a plant cell, a plant or a part thereof, as compared to a corresponding non-transformed wild type non-human organism or a part thereof; and
[40775] (b) growing the non-human organism or a part thereof under conditions which permit the production of leucine or a composition comprising leucine in said non-human organism or in the culture medium surrounding said non-human organism.

[40776] Accordingly, the present invention relates to a process for the production of isoleucine, which comprises
[40777] (a) increasing or generating the activity of a homoserine dehydrogenase in the cytosol of a cell of a non-human organism or a part thereof, preferably a microorganism, a plant cell, a plant or a part thereof, as compared to a corresponding non-transformed wild type non-human organism or a part thereof; and
[40778] (b) growing the non-human organism or a part thereof under conditions which permit the production of isoleucine or a composition comprising isoleucine in said non-human organism or in the culture medium surrounding said non-human organism.

[40779] Accordingly, the present invention relates to a process for the production of isoleucine, which comprises
[40780] (a) increasing or generating the activity of a branched chain aminotransferase in the cytosol of a cell of a non-human organism or a part thereof, preferably a microorganism, a plant cell, a plant or a part thereof, as compared to a corresponding non-transformed wild type non-human organism or a part thereof; and
[40781] (b) growing the non-human organism or a part thereof under conditions which permit the production of isoleucine or a composition comprising isoleucine in said non-human organism or in the culture medium surrounding said non-human organism.

[40782] Accordingly, the present invention relates to a process for the production of valine, which comprises
[40783] (a) increasing or generating the activity of a branched chain aminotransferase in the cytosol of a cell of a non-human organism or a part thereof, preferably a microorganism, a plant cell, a plant or a part thereof, as compared to a corresponding non-transformed wild type non-human organism or a part thereof; and
[40784] (b) growing the non-human organism or a part thereof under conditions which permit the production of valine or a composition comprising valine in said non-human organism or in the culture medium surrounding said non-human organism.

[40785] Accordingly, the present invention relates to a process for the production of isoleucine, which comprises
[40786] (a) increasing or generating the activity of a polygalacturonase in the cytosol of a cell of a non-human organism or a part thereof, preferably a microorganism, a plant cell, a plant or a part thereof, as compared to a corresponding non-transformed wild type non-human organism or a part thereof; and
[40787] (b) growing the non-human organism or a part thereof under conditions which permit the production of isoleucine or a composition comprising isoleucine in said non-human organism or in the culture medium surrounding said non-human organism.

[40788] Accordingly, the present invention relates to a process for the production of leucine, which comprises
[40789] (a) increasing or generating the activity of a polygalacturonase in the cytosol of a cell of a non-human organism or a part thereof, preferably a microorganism, a plant cell, a plant or a part thereof, as compared to a corresponding non-transformed wild type non-human organism or a part thereof; and
[40790] (b) growing the non-human organism or a part thereof under conditions which permit the production of leucine or a composition comprising leucine in said non-human organism or in the culture medium surrounding said non-human organism.

[40791] Accordingly, the present invention relates to a process for the production of valine, which comprises
[40792] (a) increasing or generating the activity of a polygalacturonase in the cytosol of a cell of a non-human organism or a part thereof, preferably a microorganism, a plant cell, a plant or a part thereof, as compared to a corresponding non-transformed wild type non-human organism or a part thereof; and
[40793] (b) growing the non-human organism or a part thereof under conditions which permit the production of valine or a composition comprising valine in said non-human organism or in the culture medium surrounding said non-human organism.

[40794] Accordingly, the present invention relates to a process for the production of isoleucine, which comprises
[40795] (a) increasing or generating the activity of a YKL038W-protein in the cytosol of a cell of a non-human organism or a part thereof, preferably a microorganism, a plant cell, a plant or a part thereof, as compared to a corresponding non-transformed wild type non-human organism or a part thereof; and
[40796] (b) growing the non-human organism or a part thereof under conditions which permit the production of isoleucine or a composition comprising isoleucine in said non-human organism or in the culture medium surrounding said non-human organism.

[40797] Accordingly, the present invention relates to a process for the production of leucine, which comprises
[40798] (a) increasing or generating the activity of a YKL038W-protein in the cytosol of a cell of a non-human organism or a part thereof, preferably a microorganism, a plant cell, a plant or a part thereof, as compared to a corresponding non-transformed wild type non-human organism or a part thereof; and
[40799] (b) growing the non-human organism or a part thereof under conditions which permit the production of leucine or a composition comprising leucine in said non-human organism or in the culture medium surrounding said non-human organism.

[40800] Accordingly, the present invention relates to a process for the production of isoleucine, which comprises
[40801] (a) increasing or generating the activity of a YLR224W-protein in the cytosol of a cell of a non-human organism or a part thereof, preferably a microorganism, a plant cell, a plant or a part thereof, as compared to a corresponding non-transformed wild type non-human organism or a part thereof; and
[40802] (b) growing the non-human organism or a part thereof under conditions which permit the production of isoleucine or a composition comprising isoleucine in said non-human organism or in the culture medium surrounding said non-human organism.

[40803] Accordingly, the present invention relates to a process for the production of isoleucine, which comprises
[40804] (a) increasing or generating the activity of a mitochondrial dicarboxylate transporter in the cytosol of a cell of a non-human organism or a part thereof, preferably a microorganism, a plant cell, a plant or a part thereof, as compared to a corresponding non-transformed wild type non-human organism or a part thereof; and
[40805] (b) growing the non-human organism or a part thereof under conditions which permit the production of isoleucine or a composition comprising isoleucine in said non-human organism or in the culture medium surrounding said non-human organism.

[40806] Accordingly, the present invention relates to a process for the production of isoleucine, which comprises
[40807] (a) increasing or generating the activity of a adenylosuccinate lyase in the cytosol of a cell of a non-human organism or a part thereof, preferably a microorganism, a plant cell, a plant or a part thereof, as compared to a corresponding non-transformed wild type non-human organism or a part thereof; and
[40808] (b) growing the non-human organism or a part thereof under conditions which permit the production of isoleucine or a composition comprising isoleucine in said non-human organism or in the culture medium surrounding said non-human organism.

[40809] Accordingly, the present invention relates to a process for the production of leucine, which comprises
[40810] (a) increasing or generating the activity of a adenylosuccinate lyase in the cytosol of a cell of a non-human organism or a part thereof, preferably a microorganism, a plant cell, a plant or a part thereof, as compared to a corresponding non-transformed wild type non-human organism or a part thereof; and
[40811] (b) growing the non-human organism or a part thereof under conditions which permit the production of leucine or a composition comprising leucine in said non-human organism or in the culture medium surrounding said non-human organism.

[40812] Accordingly, the present invention relates to a process for the production of valine, which comprises
[40813] (a) increasing or generating the activity of a adenylosuccinate lyase in the cytosol of a cell of a non-human organism or a part thereof, preferably a microorganism, a plant cell, a plant or a part thereof, as compared to a corresponding non-transformed wild type non-human organism or a part thereof; and
[40814] (b) growing the non-human organism or a part thereof under conditions which permit the production of valine or a composition comprising valine in said non-human organism or in the culture medium surrounding said non-human organism.

[40815] Accordingly, the present invention relates to a process for the production of leucine, which comprises
[40816] (a) increasing or generating the activity of a phosphate transporter in the cytosol of a cell of a non-human organism or a part thereof, preferably a microorganism, a plant cell, a plant or a part thereof, as compared to a corresponding non-transformed wild type non-human organism or a part thereof; and
[40817] (b) growing the non-human organism or a part thereof under conditions which permit the production of leucine or a composition comprising leucine in said non-human organism or in the culture medium surrounding said non-human organism.

[40818] Accordingly, the present invention relates to a process for the production of isoleucine, which comprises
[40819] (a) increasing or generating the activity of a acetyl-CoA acetyltransferase in the cytosol of a cell of a non-human organism or a part thereof, preferably a microorganism, a plant cell, a plant or a part thereof, as compared to a corresponding non-transformed wild type non-human organism or a part thereof; and
[40820] (b) growing the non-human organism or a part thereof under conditions which permit the production of isoleucine or a composition comprising isoleucine in said non-human organism or in the culture medium surrounding said non-human organism.

[40821] Accordingly, the present invention relates to a process for the production of leucine, which comprises
[40822] (a) increasing or generating the activity of a acetyl-CoA acetyltransferase in the cytosol of a cell of a non-human organism or a part thereof, preferably a microorganism, a plant cell, a plant or a part thereof, as compared to a corresponding non-transformed wild type non-human organism or a part thereof; and
[40823] (b) growing the non-human organism or a part thereof under conditions which permit the production of leucine or a composition comprising leucine in said non-human organism or in the culture medium surrounding said non-human organism.

[40824] Accordingly, the present invention relates to a process for the production of isoleucine, which comprises
[40825] (a) increasing or generating the activity of a cyclin in the cytosol of a cell of a non-human organism or a part thereof, preferably a microorganism, a plant cell, a plant or a part thereof, as compared to a corresponding non-transformed wild type non-human organism or a part thereof; and
[40826] (b) growing the non-human organism or a part thereof under conditions which permit the production of isoleucine or a composition comprising isoleucine in said non-human organism or in the culture medium surrounding said non-human organism.

[40827] Accordingly, the present invention relates to a process for the production of isoleucine, which comprises
[40828] (a) increasing or generating the activity of a Zm_{—}4842_BE510522-protein in the cytosol of a cell of a non-human organism or a part thereof, preferably a microorganism, a plant cell, a plant or a part thereof, as compared to a corresponding non-transformed wild type non-human organism or a part thereof; and
[40829] (b) growing the non-human organism or a part thereof under conditions which permit the production of isoleucine or a composition comprising isoleucine in said non-human organism or in the culture medium surrounding said non-human organism.

[40830] Accordingly, the present invention relates to a process for the production of leucine, which comprises
[40831] (a) increasing or generating the activity of a Zm_{—}4842_BE510522-protein in the cytosol of a cell of a non-human organism or a part thereof, preferably a microorganism, a plant cell, a plant or a part thereof, as compared to a corresponding non-transformed wild type non-human organism or a part thereof; and
[40832] (b) growing the non-human organism or a part thereof under conditions which permit the production of leucine or a composition comprising leucine in said non-human organism or in the culture medium surrounding said non-human organism.

[40833] Accordingly, the present invention relates to a process for the production of valine, which comprises
[40834] (a) increasing or generating the activity of a Zm_{—}4842_BE510522-protein in the cytosol of a cell of a non-human organism or a part thereof, preferably a microorganism, a plant cell, a plant or a part thereof, as compared to a corresponding non-transformed wild type non-human organism or a part thereof; and
[40835] (b) growing the non-human organism or a part thereof under conditions which permit the production of valine or a composition comprising valine in said non-human organism or in the culture medium surrounding said non-human organism.

[40836] Accordingly, the present invention relates to a process for the production of isoleucine, which comprises
[40837] (a) increasing or generating the activity of a polypeptide comprising a polypeptide as depicted in the respective line in column 5 or 8 of Table II, application no. 6, or a homolog or a fragment thereof, a consensus sequence or at least one polypeptide motif as depicted in the respective line in column 8 of Table IV, application no. 6, whereby the respective line discloses in column 7 the fine chemical isoleucine; or
[40838] increasing or generating the activity of an expression product of one or more nucleic acid molecule(s) comprising a polynucleotide as depicted in the respective line in column 5 or 8 of Table I, application no. 6, preferably the coding region thereof, or a homolog or a fragment thereof, whereby the respective line discloses in column 7 the fine chemical isoleucine;
[40839] in the cytosol of a cell of a non-human organism or a part thereof; preferably a microorganism, a plant cell, a plant or a part thereof, as compared to a corresponding non-transformed wild type non-human organism or a part thereof; and
[40840] (b) growing the non-human organism under conditions which permit the production of isoleucine, or a composition comprising isoleucine in said non-human organism or in the culture medium surrounding said non-human organism.

[40841] Accordingly, the present invention relates to a process for the production of leucine, which comprises
[40842] (a) increasing or generating the activity of a polypeptide comprising a polypeptide as depicted in the respective line in column 5 or 8 of Table II, application no. 6, or a homolog or a fragment thereof, a consensus sequence or at least one polypeptide motif as depicted in the respective line in column 8 of Table IV, application no. 6, whereby the respective line discloses in column 7 the fine chemical leucine; or
[40843] increasing or generating the activity of an expression product of one or more nucleic acid molecule(s) comprising a polynucleotide as depicted in the respective line in column 5 or 8 of Table I, application no. 6, preferably the coding region thereof, or a homolog or a fragment thereof, whereby the respective line discloses in column 7 the fine chemical leucine;
[40844] in the cytosol of a cell of a non-human organism or a part thereof; preferably a microorganism, a plant cell, a plant or a part thereof, as compared to a corresponding non-transformed wild type non-human organism or a part thereof; and
[40845] (b) growing the non-human organism under conditions which permit the production of leucine, or a composition comprising leucine in said non-human organism or in the culture medium surrounding said non-human organism.

[40846] Accordingly, the present invention relates to a process for the production of valine, which comprises
[40847] (a) increasing or generating the activity of a polypeptide comprising a polypeptide as depicted in the respective line in column 5 or 8 of Table II, application no. 6, or a homolog or a fragment thereof, a consensus sequence or at least one polypeptide motif as depicted in the respective line in column 8 of Table IV, application no. 6, whereby the respective line discloses in column 7 the fine chemical valine; or
[40848] increasing or generating the activity of an expression product of one or more nucleic acid molecule(s) comprising a polynucleotide as depicted in the respective line in column 5 or 8 of Table I, application no. 6, preferably the coding region thereof, or a homolog or a fragment thereof, whereby the respective line discloses in column 7 the fine chemical valine;
[40849] in the cytosol of a cell of a non-human organism or a part thereof; preferably a microorganism, a plant cell, a plant or a part thereof, as compared to a corresponding non-transformed wild type non-human organism or a part thereof; and
[40850] (b) growing the non-human organism under conditions which permit the production of valine, or a composition comprising valine in said non-human organism or in the culture medium surrounding said non-human organism.

[40851] In a further embodiment the activity of the polypeptide comprising a polypeptide as depicted in the respective line in column 5 or 8 of Table II, application no. 6, or a homolog or a fragment thereof, a consensus sequence or at least one polypeptide motif as depicted in the respective line in column 8 of Table IV, application no. 6, is increased or generated non-targeted in the above-mentioned process in a microorganism or plant or a part thereof.

[40852] In a further embodiment said polypeptide has the activity of the respective polypeptide represented by a protein comprising a polypeptide as depicted in the respective line in column 5 of Table II, application no. 6.

[40853] In a further embodiment the activity of the expression product of one or more nucleic acid molecule(s) comprising a polynucleotide as depicted in the respective line in column 5 or 8 of Table I, application no. 6, preferably the coding region thereof, or a homolog or a fragment thereof, is increased or generated non-targeted in the above-mentioned process in a microorganism or plant or a part thereof.

[40854] In a further embodiment the activity of the polypeptide comprising a polypeptide as depicted in the respective line in column 5 or 8 of Table II, application no. 6, or a homolog or a fragment thereof, a consensus sequence or at least one polypeptide motif as depicted in the respective line in column 8 of Table IV, application no. 6, is increased or generated in the above-mentioned process in an organelle preferably in plastids or mitochondria, especially in plastids, of a microorganism or plant.

[40855] In a further embodiment said polypeptide has the activity of the respective polypeptide represented by a protein comprising a polypeptide as depicted in the respective line in column 5 of Table II, application no. 6.

[40856] In a further embodiment the activity of the expression product of one or more nucleic acid molecule(s) comprising a polynucleotide as depicted in the respective line in column 5 or 8 of Table I, application no. 6, preferably the coding region thereof, or a homolog or a fragment thereof, is increased or generated in the above-mentioned process in an organelle, preferably in plasids or mitochondria, especially in plastids, of a microorganism or plant.

[40857] In a further embodiment the activity of the polypeptide comprising a polypeptide as depicted in the respective line in column 5 or 8 of Table II, application no. 6, or a homolog or a fragment thereof, a consensus sequence or at least one polypeptide motif as depicted in the respective line in column 8 of Table IV, application no. 6, is increased or generated in the above-mentioned process in the cyctosol of a cell, of a microorganism or plant.

[40858] In a further embodiment said polypeptide has the activity of the respective polypeptide represented by a protein comprising a polypeptide as depicted in the respective line in column 5 of Table II, application no. 6.

[40859] In a further embodiment the activity of the expression product of one or more nucleic acid molecule(s) comprising a polynucleotide as depicted in the respective line in column 5 or 8 of Table I, application no. 6, preferably the coding region thereof, or a homolog or a fragment thereof, is increased or generated in the above-mentioned process in the cytosol of a cell, of a microorganism or plant.

[40860] [0039.1.1.6] to [0066.1.1.6] for the disclosure of these paragraphs see [0039.1.1.1] to [0066.1.1.1] above.

[40861] As mentioned above the nucleic acid sequences coding for the proteins as shown in Table II, application no. 6, column 5 or 8, or homologs or fragments thereof, are joined to a nucleic acid sequence encoding a plastidic transit peptide, e.g, if for the nucleic acid molecule in Table I, column 6 the term “plastidic” is indicated. This nucleic acid sequence encoding a transit peptide ensures transport of the protein to the organelle. The nucleic acid sequence of the gene to be expressed and the nucleic acid sequence encoding the transit peptide are operably linked. Therefore the transit peptide encoding sequenceis fused in frame to the nucleic acid sequence coding for proteins as shown in Table II, application no. 6, column 5 or 8, or homologs or fragments thereof, e.g., if for the nucleic acid molecule in Table I, column 6 the term “plastidic” is indicated.

[40862] [0068.1.1.6] to [0072.1.1.6] for the disclosure of these paragraphs see [0068.1.1.1] to [0072.1.1.1] above.

[40863] As mentioned above the nucleic acid sequences coding for the proteins as shown in the respective line in Table II, application no. 6, column 5 or 8, or homologs or fragments thereof, are joined to a nucleic acid sequence encoding a mitochondric transit peptide, e.g., if for the respective nucleic acid molecule in Table I, column 6 the term “mitochondrial” is indicated. This nucleic acid sequence encoding a transit peptide ensures transport of the protein to the organelle. The nucleic acid sequence of the gene to be expressed and the nucleic acid sequence encoding the transit peptide are operably linked. Therefore the transit peptide encoding sequence is fused in frame to the nucleic acid sequence coding for proteins as shown in the respective line in Table II, application no. 6, column 5 or 8, or homologs or fragments thereof, e.g., if for the nucleic acid molecule in the respective line in Table I, column 6 the term “mitochondrial” is indicated. (For the avoidance of doubt, the term “mitochondric” and “mitochondrial” are interchangeable.)

[40864] [0074.1.1.6] to [0075.1.1.6] for the disclosure of these paragraphs see [0074.1.1.1] to [0075.1.1.1] above. [0076.1.6.6] Nucleic acid sequences coding for the transit peptides may be chemically synthesized either in part or wholly according to structure of transit peptide sequences disclosed in the prior art. Said natural or chemically synthesized sequences can be directly linked to the sequences encoding the mature protein or via a linker nucleic acid sequence, which may be typically less than 500 base pairs, preferably less than 450, 400, 350, 300, 250 or 200 base pairs, more preferably less than 150, 100, 90, 80, 70, 60, 50, 40 or 30 base pairs and most preferably less than 25, 20, 15, 12, 9, 6 or 3 base pairs in length and are in frame to the coding sequence.

[40865] Furthermore favorable nucleic acid sequences encoding transit peptides may comprise sequences derived from more than one biological and/or chemical source and may include a nucleic acid sequence derived from the amino-terminal region of the mature protein, which in its native state is linked to the transit peptide. In a preferred embodiment of the invention said amino-terminal region of the mature protein is typically less than 150 amino acids, preferably less than 140, 130, 120, 110, 100 or 90 amino acids, more preferably less than 80, 70, 60, 50, 40, 35, 30, 25 or 20 amino acids and most preferably less than 19, 18, 17, 16, 15, 14, 13, 12, 11 or 10 amino acids in length. But even shorter or longer stretches are also possible. In addition target sequences, which facilitate the transport of proteins to other cell compartments such as the vacuole, endoplasmic reticulum, golgi complex, glyoxysomes, peroxisomes, mitochondria (in case of a plastidal transit peptide) or plastids, especially chloroplasts (in case of a mitochondric transit peptide) may be also part of the inventive nucleic acid sequence. The proteins translated from said inventive nucleic acid sequences are a kind of fusion proteins that means the nucleic acid sequences encoding the plastidal transit peptide for example the ones shown in Table a, preferably the last one of the Table a are joint to the respective nucleic acid sequences shown in Table I, application no. 6, columns 5 or 8, especially the coding region thereof, or homologs or fragments thereof, in case of nucleic acid sequences being expressed in plastids, and that means the nucleic acid sequences encoding the mitochondric transit peptide for example the ones shown in Table b, preferably the last one of the Table b are joint to the respective nucleic acid sequences shown in Table I, application no. 6, columns 5 or 8, especially the coding region thereof, or homologs or fragments thereof, in case of nucleic acid sequences being expressed in mitochondria. The person skilled in the art is able to join said sequences in a functional manner. Advantageously the transit peptide part is cleaved off from the protein part shown in Table II, application no. 6, columns 5 or 8, or a homolog or fragment thereof, during or after the transport into the organelles, preferably into the plastids or mitochondria, respectively.

[40866] All products of the cleavage of the preferred transit peptide shown in the last line of Table a have preferably the N-terminal amino acid sequences QIA CSS or QIA EFQLTT in front of the start methionine of the respective protein mentioned in Table II, application no. 6, column 5 or 8. or homologs or fragments thereof. Other short amino acid sequences of an range of 1 to 20 amino acids preferable 2 to 15 amino acids, more preferable 3 to 10 amino acids most preferably 4 to 8 amino acids are also possible in front of the start methionine of the protein mentioned in Table II, application no. 6, columns 5 or 8, or homologs or fragments thereof. In case of the amino acid sequence QIA CSS the three amino acids in front of the start methionine are stemming from the LIC (=ligatation independent cloning) cassette. Said short amino acid sequence is preferred in the case of the expression of E. coli genes. In case of the amino acid sequence QIA EFQLTT the six amino acids in front of the start methionine are stemming from the LIC cassette. Said short amino acid sequence is preferred in the case of the expression of S. cerevisiae genes. The skilled worker knowns that other short sequences are also useful in the expression of the respective nucleic acid molecule comprising a polynucleotide as depicted in Table I, application no. 6, column 5 or 8, preferably the coding region thereof, or a homolog or a fragment thereof. Furthermore the skilled worker is aware of the fact that there is not a need for such short sequences in the expression of the genes.

[40867] [0077.1.1.6] to [0078.1.1.6] for the disclosure of these paragraphs see [0077.1.1.1] to see [0078.1.1.1] above.

[40868] Alternatively to the targeting of the respective sequences shown in Table II, application no. 6, columns 5 or 8, or homologs or fragments thereof, preferably of sequences in general encoded in the nucleus with the aid of the targeting sequences mentioned for example in Table a alone, Table b alone, or in combination with other targeting sequences preferably into plastids or mitochondria, respectively, the nucleic acids of the invention can directly be introduced into the plastidal or mitochondrial genome. Therefore in a preferred embodiment the respective nucleic acid sequences shown in the respective line in Table I, application no. 6, columns 5 or 8, preferably the coding region thereof, or homologs or fragments thereof, are directly introduced and expressed in plastids e.g., if for the nucleic acid molecule in the respective line in Table I, column 6, the term “plastidic” is indicated, or are directly introduced and expressed in mitochondria e.g., if for the nucleic acid molecule in the respective line in Table I, column 6 the term “mitochondrial” is indicated.

[40869] The term “introduced” in the context of this specification shall mean the insertion of a nucleic acid sequence into the organism by means of a “transfection”, “transduction” or preferably by “transformation”.

[40870] A plastid, such as a chloroplast, or a mitochondrion, has been “transformed” by an exogenous (preferably foreign) nucleic acid sequence if a nucleic acid sequence has been introduced into the plastid or mitochondrion that means that this sequence has crossed the membrane or the membranes of the plastid or of the mitochondrion. The exogenous, preferably foreign, DNA may be integrated (covalently linked) into plastid or mitochondrial DNA making up the genome of the plastid or mitochondrion, or it may remain unintegrated (e.g., by including a chloroplast origin of replication). “Stably” integrated DNA sequences are those, which are inherited through plastid or mitochondrion replication, thereby transferring new plastids or mitochondria, with the features of the integrated DNA sequence to the progeny.

[40871] [0080.1.1.6] to [0083.1.1.6] for the disclosure of these paragraphs see [0080.1.1.1] to [0083.1.1.1] above.

[40872] For the process of the present invention it may be of great advantage that by transforming the plastids the intraspecies specific transgene flow is blocked, because a lot of species such as corn, cotton and rice have a strict maternal inheritance of plastids. By placing the respective genes specified in the respective line in Table I, application no. 6, columns 5 or 8, preferably the coding region, or homologs or fragments thereof, e.g. if for the nucleic acid molecule in the respective line in column 6 of Table I the term “plastidic” is indicated, in the plastids of plants, these genes will not be present in the pollen of said plants.

[40873] A further preferred embodiment of the invention relates to the use of so called “chloroplast localization sequences”, in which a first RNA sequence or molecule is capable of transporting or “chaperoning” a second RNA sequence, such as a RNA sequence transcribed from the sequences depicted in the respective line in Table I, application no. 6, columns 5 or 8, preferably the coding region thereof, or a homolog or a fragment thereof, or a sequence encoding a protein, as depicted in the respective line in Table II, application no. 6, columns 5 and 8, or a homolog or a fragment thereof, from an external environment inside a cell or outside a plastid into a chloroplast. In one embodiment the chloroplast localization signal is substantially similar or complementary to a complete or intact viroid sequence. The chloroplast localization signal may be encoded by a DNA sequence, which is transcribed into the chloroplast localization RNA. The term “viroid” refers to a naturally occurring single stranded RNA molecule (Flores, C. R. Acad. Sci. III. 324 (10), 943 (2001)). Viroids usually contain about 200-500 nucleotides and generally exist as circular molecules. Examples of viroids that contain chloroplast localization signals include but are not limited to ASBVd, PLMVd, CChMVd and ELVd. The viroid sequence or a functional part of it can be fused to the sequences depicted in the respective line in Table I, application no. 6, columns 5 or 8, preferably the coding region thereof, or a homolog or a fragment thereof, or a sequence encoding a protein, as depicted in the respective line in Table II, application no. 6, columns 5 or 8, or a homolog or a fragment thereof, in such a manner that the viroid sequence transports a sequence transcribed from a sequence as depicted in the respective line in Table I, application no. 6 columns 5 or 8, preferably the coding region thereof, or a homolog or a fragment thereof, or a sequence encoding a protein as depicted in the respective line in Table II, application no. 6 columns 5 or 8, or a homolog or a fragment thereof, into the chloroplasts, e.g. if for the nucleic acid molecule in column 6 of Table I the term “plastidic” is indicated. A preferred embodiment uses a modified ASBVd (Navarro et al., Virology. 268 (1), 218 (2000)).

[40874] In a further specific embodiment the protein to be expressed in the plastids such as the proteins depicted in the respective line in Table II, application no. 6, columns 5 or 8, or a homolog or a fragment thereof, e.g. if for the nucleic acid molecule in the respective line in column 6 of Table I the term “plastidic” is indicated, are encoded by different nucleic acids. Such a method is disclosed in WO 2004/040973, which shall be incorporated by reference. WO 2004/040973 teaches a method, which relates to the translocation of an RNA corresponding to a gene or gene fragment into the chloroplast by means of a chloroplast localization sequence. The genes, which should be expressed in the plant or plant cells, are split into nucleic acid fragments, which are introduced into different compartments in the plant e.g. the nucleus, the plastids and/or mitochondria. Additionally plant cells are described in which the chloroplast contains a ribozyme fused at one end to an RNA encoding a fragment of a protein used in the inventive process such that the ribozyme can trans-splice the translocated fusion RNA to the RNA encoding the gene fragment to form and as the case may be reunite the nucleic acid fragments to an intact mRNA encoding a functional protein for example as disclosed in the respective line in Table II, application no. 6, columns 5 or 8, or a homolog or a fragment thereof.

[40875] In a preferred embodiment of the invention the nucleic acid sequences as shown in the respective line in Table I, application no. 6, columns 5 or 8, preferably the coding region thereof, or homologs or fragments thereof, e.g. if for the nucleic acid molecule in the respective line in column 6 of Table I the term “plastidic” is indicated, used in the inventive process are transformed into plastids, which are metabolically active. Those plastids should preferably maintain at a high copy number in the plant or plant tissue of interest, most preferably the chloroplasts found in green plant tissues, such as leaves or cotyledons or in seeds.

[40876] For a good expression in the plastids the nucleic acid sequences as shown in the respective line in Table I, application no. 6, columns 5 or 8, preferably the coding region thereof, or homologs or fragments thereof, e.g. if for the nucleic acid molecule in the respective line in column 6 of Table I the term “plastidic” is indicated, are introduced into an expression cassette using preferably a promoter and terminater, which are active in plastids preferably a chloroplast promoter. Examples of such promoters include the psbA promoter from the gene from spinach or pea, the rbcL promoter, and the atpB promoter from corn.

[40877] [0089.1.1.6] to [0092.1.1.6] for the disclosure of these paragraphs see [0089.1.1.1] to [0092.1.1.1] above.

[40878] Advantageously the process for the production of the fine chemical isoleucine, leucine, and/or valine leads to an enhanced production of the respective fine chemical. The terms “enhanced” or “increase” mean at least a 10%, 20%, 30%, 40% or 50%, preferably at least 60%, 70%, 80%, 90% or 100%, more preferably 150%, 200%, 300%, 400% or 500% higher production of the respective fine chemical isoleucine, leucine, and/or valine in comparison to the wild-type as defined above, e.g. that means in comparison to a non-human organism without the aforementioned modification of the activity of a protein as shown in the respective line in Table II, application no. 6, column 5 or 8, or a fragment or a homolog thereof. The modification of the activity of a protein as shown in the respective line in Table II, application no. 6, column 5 or 8, or a homolog or a fragment thereof, or their combination can be achieved by joining the protein to a respective transit peptide, e.g. if for the respective encoding nucleic acid molecule in column 6 of Table I the term “plastidic” or “mitochondrial” is indicated.

[40879] Surprisingly it was found, that the transgenic expression of a protein as shown in the respective line in Table II, application no. 6, column 5, especially from the Saccaromyces cerevisiae, E. coli, Arabidopsis thaliana, Azotobacter vinelandii, Brassica napus, Glycine max, Oryza sativa, Physcomitrella patens, Synechocystis sp., Thermus thermophilus, Zea mays in a non-human organism, like a plant or a part thereof, such as Arabidopsis thaliana for example, or a microorganism, conferred a production of or an increase in isoleucine, leucine, and/or valine,respectively, to the transgenic non-human organism as compared to a corresponding non-transformed wild type.

[40880] In one embodiment the transgenic expression of a protein as shown in the respective line in Table II, application no. 4, column 5 or 8, or a homolog or a fragment thereof, especially from the Saccaromyces cerevisiae, E. coli, Arabidopsis thaliana, Azotobacter vinelandii, Brassica napus, Glycine max, Oryza sativa, Physcomitrella patens, Synechocystis sp., Thermus thermophilus, Zea mays in a non-human organism, like a plant or a part thereof, such as Arabidopsis thaliana for example, or a microorganism, conferred a production of or an increase in threonine,respectively, to the transgenic non-human organism as compared to a corresponding non-transformed wild type.

[40881] Accordingly, in one embodiment, an increase of isoleucine in a non-human organism, as compared to a corresponding non-transformed wild type non-human organism, is conferred in the process of the invention, if the activity of a polypeptide showing the activity of a 47266012-protein, or if the activity of the polypeptide 47266012_SOYBEAN, preferably represented by SEQ ID NO. 15188, or a homolog or fragment thereof, or if the activity of a polypeptide encoded by a nucleic acid molecule comprising the nucleic acid SEQ ID NO. 15187, preferably the coding region thereof, or a homolog or fragment thereof, e.g. derived from Glycine max, is increased or generated. For example the activity of a nucleic acid molecule or a polypeptide comprising the nucleic acid, preferably the coding region thereof, or polypeptide or the consensus sequence or the polypeptide motif, as depicted in Table I, II or IV, application No. 6, column 5 or 8 in the respective same line as the nucleic acid molecule SEQ ID NO. 15187 or polypeptide SEQ ID NO. 15188, respectively, or a homolog or a fragment thereof, is increased or generated, or if the activity 47266012-protein is increased or generated in a non-human organism, like a microorganism or a plant cell, plant or part thereof, especially with non-targeted localization, whereby the respective line discloses in column 7 the fine chemical isoleucine. For example, an increase of the isoleucine of at least 1 percent, particularly in a range of 36 to 43-percent is conferred as compared to a corresponding non-transformed wild type non-human organism.

[40882] Accordingly, in one embodiment, an increase of leucine in a non-human organism, as compared to a corresponding non-transformed wild type non-human organism, is conferred in the process of the invention, if the activity of a polypeptide showing the activity of a pyruvate kinase, or if the activity of the polypeptide 51340801_CANOLA, preferably represented by SEQ ID NO. 15533, or a homolog or fragment thereof, or if the activity of a polypeptide encoded by a nucleic acid molecule comprising the nucleic acid SEQ ID NO. 15532, preferably the coding region thereof, or a homolog or fragment thereof, e.g. derived from Brassica napus, is increased or generated. For example the activity of a nucleic acid molecule or a polypeptide comprising the nucleic acid, preferably the coding region thereof, or polypeptide or the consensus sequence or the polypeptide motif, as depicted in Table I, II or IV, application No. 6, column 5 or 8 in the respective same line as the nucleic acid molecule SEQ ID NO. 15532 or polypeptide SEQ ID NO. 15533, respectively, or a homolog or a fragment thereof, is increased or generated, or if the activity pyruvate kinase is increased or generated in a non-human organism, like a microorganism or a plant cell, plant or part thereof, especially with plastidic localization, whereby the respective line discloses in column 7 the fine chemical leucine. For example, an increase of the leucine of at least 1 percent, particularly in a range of 80 to 500-percent is conferred as compared to a corresponding non-transformed wild type non-human organism.

[40883] Accordingly, in one embodiment, an increase of valine in a non-human organism, as compared to a corresponding non-transformed wild type non-human organism, is conferred in the process of the invention, if the activity of a polypeptide showing the activity of a pyruvate kinase, or if the activity of the polypeptide 51340801_CANOLA, preferably represented by SEQ ID NO. 15533, or a homolog or fragment thereof, or if the activity of a polypeptide encoded by a nucleic acid molecule comprising the nucleic acid SEQ ID NO. 15532, preferably the coding region thereof, or a homolog or fragment thereof, e.g. derived from Brassica napus, is increased or generated. For example the activity of a nucleic acid molecule or a polypeptide comprising the nucleic acid, preferably the coding region thereof, or polypeptide or the consensus sequence or the polypeptide motif, as depicted in Table I, II or IV, application No. 6, column 5 or 8 in the respective same line as the nucleic acid molecule SEQ ID NO. 15532 or polypeptide SEQ ID NO. 15533, respectively, or a homolog or a fragment thereof, is increased or generated, or if the activity pyruvate kinase is increased or generated in a non-human organism, like a microorganism or a plant cell, plant or part thereof, especially with plastidic localization, whereby the respective line discloses in column 7 the fine chemical valine. For example, an increase of the valine of at least 1 percent, particularly in a range of 34 to 207-percent is conferred as compared to a corresponding non-transformed wild type non-human organism.

[40884] Accordingly, in one embodiment, an increase of valine in a non-human organism, as compared to a corresponding non-transformed wild type non-human organism, is conferred in the process of the invention, if the activity of a polypeptide showing the activity of a pyruvate kinase, or if the activity of the polypeptide 59554615_SOYBEAN, preferably represented by SEQ ID NO. 16264, or a homolog or fragment thereof, or if the activity of a polypeptide encoded by a nucleic acid molecule comprising the nucleic acid SEQ ID NO. 16263, preferably the coding region thereof, or a homolog or fragment thereof, e.g. derived from Glycine max, is increased or generated. For example the activity of a nucleic acid molecule or a polypeptide comprising the nucleic acid, preferably the coding region thereof, or polypeptide or the consensus sequence or the polypeptide motif, as depicted in Table I, II or IV, application No. 6, column 5 or 8 in the respective same line as the nucleic acid molecule SEQ ID NO. 16263 or polypeptide SEQ ID NO. 16264, respectively, or a homolog or a fragment thereof, is increased or generated, or if the activity pyruvate kinase is increased or generated in a non-human organism, like a microorganism or a plant cell, plant or part thereof, especially with plastidic localization, whereby the respective line discloses in column 7 the fine chemical valine. For example, an increase of the valine of at least 1 percent, particularly in a range of 22 to 74-percent is conferred as compared to a corresponding non-transformed wild type non-human organism.

[40885] Accordingly, in one embodiment, an increase of isoleucine in a non-human organism, as compared to a corresponding non-transformed wild type non-human organism, is conferred in the process of the invention, if the activity of a polypeptide showing the activity of a glucose-6phosphate 1-dehydrogenase, or if the activity of the polypeptide 59582753_SOYBEAN, preferably represented by SEQ ID NO. 16884, or a homolog or fragment thereof, or if the activity of a polypeptide encoded by a nucleic acid molecule comprising the nucleic acid SEQ ID NO. 16883, preferably the coding region thereof, or a homolog or fragment thereof, e.g. derived from Glycine max, is increased or generated. For example the activity of a nucleic acid molecule or a polypeptide comprising the nucleic acid, preferably the coding region thereof, or polypeptide or the consensus sequence or the polypeptide motif, as depicted in Table I, II or IV, application No. 6, column 5 or 8 in the respective same line as the nucleic acid molecule SEQ ID NO. 16883 or polypeptide SEQ ID NO. 16884, respectively, or a homolog or a fragment thereof, is increased or generated, or if the activity glucose-6-phosphate 1-dehydrogenase is increased or generated in a non-human organism, like a microorganism or a plant cell, plant or part thereof, especially with plastidic localization, whereby the respective line discloses in column 7 the fine chemical isoleucine. For example, an increase of the isoleucine of at least 1 percent, particularly in a range of 33 to 45-percent is conferred as compared to a corresponding non-transformed wild type non-human organism.

[40886] Accordingly, in one embodiment, an increase of leucine in a non-human organism, as compared to a corresponding non-transformed wild type non-human organism, is conferred in the process of the invention, if the activity of a polypeptide showing the activity of a glucose-6-phosphate 1-dehydrogenase, or if the activity of the polypeptide 59582753_SOYBEAN, preferably represented by SEQ ID NO. 16884, or a homolog or fragment thereof, or if the activity of a polypeptide encoded by a nucleic acid molecule comprising the nucleic acid SEQ ID NO. 16883, preferably the coding region thereof, or a homolog or fragment thereof, e.g. derived from Glycine max, is increased or generated. For example the activity of a nucleic acid molecule or a polypeptide comprising the nucleic acid, preferably the coding region thereof, or polypeptide or the consensus sequence or the polypeptide motif, as depicted in Table I, II or IV, application No. 6, column 5 or 8 in the respective same line as the nucleic acid molecule SEQ ID NO. 16883 or polypeptide SEQ ID NO. 16884, respectively, or a homolog or a fragment thereof, is increased or generated, or if the activity glucose-6-phosphate 1-dehydrogenase is increased or generated in a non-human organism, like a microorganism or a plant cell, plant or part thereof, especially with plastidic localization, whereby the respective line discloses in column 7 the fine chemical leucine. For example, an increase of the leucine of at least 1 percent, particularly in a range of 47 to 54-percent is conferred as compared to a corresponding non-transformed wild type non-human organism.

[40887] Accordingly, in one embodiment, an increase of valine in a non-human organism, as compared to a corresponding non-transformed wild type non-human organism, is conferred in the process of the invention, if the activity of a polypeptide showing the activity of a glucose-6-phosphate 1-dehydrogenase, or if the activity of the polypeptide 59582753_SOYBEAN, preferably represented by SEQ ID NO. 16884, or a homolog or fragment thereof, or if the activity of a polypeptide encoded by a nucleic acid molecule comprising the nucleic acid SEQ ID NO. 16883, preferably the coding region thereof, or a homolog or fragment thereof, e.g. derived from Glycine max, is increased or generated. For example the activity of a nucleic acid molecule or a polypeptide comprising the nucleic acid, preferably the coding region thereof, or polypeptide or the consensus sequence or the polypeptide motif, as depicted in Table I, II or IV, application No. 6, column 5 or 8 in the respective same line as the nucleic acid molecule SEQ ID NO. 16883 or polypeptide SEQ ID NO. 16884, respectively, or a homolog or a fragment thereof, is increased or generated, or if the activity glucose-6-phosphate 1-dehydrogenase is increased or generated in a non-human organism, like a microorganism or a plant cell, plant or part thereof, especially with plastidic localization, whereby the respective line discloses in column 7 the fine chemical valine. For example, an increase of the valine of at least 1 percent, particularly in a range of 45 to 97-percent is conferred as compared to a corresponding non-transformed wild type non-human organism.

[40888] Accordingly, in one embodiment, an increase of valine in a non-human organism, as compared to a corresponding non-transformed wild type non-human organism, is conferred in the process of the invention, if the activity of a polypeptide showing the activity of a protein phosphatase, or if the activity of the polypeptide At1 g07430, preferably represented by SEQ ID NO. 17452, or a homolog or fragment thereof, or if the activity of a polypeptide encoded by a nucleic acid molecule comprising the nucleic acid SEQ ID NO. 17451, preferably the coding region thereof, or a homolog or fragment thereof, e.g. derived from Arabidopsis thaliana, is increased or generated. For example the activity of a nucleic acid molecule or a polypeptide comprising the nucleic acid, preferably the coding region thereof, or polypeptide or the consensus sequence or the polypeptide motif, as depicted in Table I, II or IV, application No. 6, column 5 or 8 in the respective same line as the nucleic acid molecule SEQ ID NO. 17451 or polypeptide SEQ ID NO. 17452, respectively, or a homolog or a fragment thereof, is increased or generated, or if the activity protein phosphatase is increased or generated in a non-human organism, like a microorganism or a plant cell, plant or part thereof, especially with non-targeted localization, whereby the respective line discloses in column 7 the fine chemical valine. For example, an increase of the valine of at least 1 percent, particularly in a range of 24 to 39-percent is conferred as compared to a corresponding non-transformed wild type non-human organism.

[40889] Accordingly, in one embodiment, an increase of valine in a non-human organism, as compared to a corresponding non-transformed wild type non-human organism, is conferred in the process of the invention, if the activity of a polypeptide showing the activity of a DNA-binding protein, or if the activity of the polypeptide At1g14490, preferably represented by SEQ ID NO. 386, or a homolog or fragment thereof, or if the activity of a polypeptide encoded by a nucleic acid molecule comprising the nucleic acid SEQ ID NO. 385, preferably the coding region thereof, or a homolog or fragment thereof, e.g. derived from Arabidopsis thaliana, is increased or generated. For example the activity of a nucleic acid molecule or a polypeptide comprising the nucleic acid, preferably the coding region thereof, or polypeptide or the consensus sequence or the polypeptide motif, as depicted in Table I, II or IV, application No. 6, column 5 or 8 in the respective same line as the nucleic acid molecule SEQ ID NO. 385 or polypeptide SEQ ID NO. 386, respectively, or a homolog or a fragment thereof, is increased or generated, or if the activity DNA-binding protein is increased or generated in a non-human organism, like a microorganism or a plant cell, plant or part thereof, especially with non-targeted localization, whereby the respective line discloses in column 7 the fine chemical valine. For example, an increase of the valine of at least 1 percent, particularly in a range of 21 to 54-percent is conferred as compared to a corresponding non-transformed wild type non-human organism.

[40890] Accordingly, in one embodiment, an increase of isoleucine in a non-human organism, as compared to a corresponding non-transformed wild type non-human organism, is conferred in the process of the invention, if the activity of a polypeptide showing the activity of a At1g19800-protein, or if the activity of the polypeptide At1g19800, preferably represented by SEQ ID NO. 17638, or a homolog or fragment thereof, or if the activity of a polypeptide encoded by a nucleic acid molecule comprising the nucleic acid SEQ ID NO. 17637, preferably the coding region thereof, or a homolog or fragment thereof, e.g. derived from Arabidopsis thaliana, is increased or generated. For example the activity of a nucleic acid molecule or a polypeptide comprising the nucleic acid, preferably the coding region thereof, or polypeptide or the consensus sequence or the polypeptide motif, as depicted in Table I, II or IV, application No. 6, column 5 or 8 in the respective same line as the nucleic acid molecule SEQ ID NO. 17637 or polypeptide SEQ ID NO. 17638, respectively, or a homolog or a fragment thereof, is increased or generated, or if the activity At1g19800-protein is increased or generated in a non-human organism, like a microorganism or a plant cell, plant or part thereof, especially with non-targeted localization, whereby the respective line discloses in column 7 the fine chemical isoleucine. For example, an increase of the isoleucine of at least 1 percent, particularly in a range of 45 to 805-percent is conferred as compared to a corresponding non-transformed wild type non-human organism.

[40891] Accordingly, in one embodiment, an increase of leucine in a non-human organism, as compared to a corresponding non-transformed wild type non-human organism, is conferred in the process of the invention, if the activity of a polypeptide showing the activity of a At1g19800-protein, or if the activity of the polypeptide At1g19800, preferably represented by SEQ ID NO. 17638, or a homolog or fragment thereof, or if the activity of a polypeptide encoded by a nucleic acid molecule comprising the nucleic acid SEQ ID NO. 17637, preferably the coding region thereof, or a homolog or fragment thereof, e.g. derived from Arabidopsis thaliana, is increased or generated. For example the activity of a nucleic acid molecule or a polypeptide comprising the nucleic acid, preferably the coding region thereof, or polypeptide or the consensus sequence or the polypeptide motif, as depicted in Table I, II or IV, application No. 6, column 5 or 8 in the respective same line as the nucleic acid molecule SEQ ID NO. 17637 or polypeptide SEQ ID NO. 17638, respectively, or a homolog or a fragment thereof, is increased or generated, or if the activity At1g19800-protein is increased or generated in a non-human organism, like a microorganism or a plant cell, plant or part thereof, especially with non-targeted localization, whereby the respective line discloses in column 7 the fine chemical leucine. For example, an increase of the leucine of at least 1 percent, particularly in a range of 115 to 1238-percent is conferred as compared to a corresponding non-transformed wild type non-human organism.

[40892] Accordingly, in one embodiment, an increase of valine in a non-human organism, as compared to a corresponding non-transformed wild type non-human organism, is conferred in the process of the invention, if the activity of a polypeptide showing the activity of a At1g23110-protein, or if the activity of the polypeptide At1g23110, preferably represented by SEQ ID NO. 102087, or a homolog or fragment thereof, or if the activity of a polypeptide encoded by a nucleic acid molecule comprising the nucleic acid SEQ ID NO. 102086, preferably the coding region thereof, or a homolog or fragment thereof, e.g. derived from Arabidopsis thaliana, is increased or generated. For example the activity of a nucleic acid molecule or a polypeptide comprising the nucleic acid, preferably the coding region thereof, or polypeptide or the consensus sequence or the polypeptide motif, as depicted in Table I, II or IV, application No. 6, column 5 or 8 in the respective same line as the nucleic acid molecule SEQ ID NO. 102086 or polypeptide SEQ ID NO. 102087, respectively, or a homolog or a fragment thereof, is increased or generated, or if the activity At1g23110-protein is increased or generated in a non-human organism, like a microorganism or a plant cell, plant or part thereof, especially with non-targeted localization, whereby the respective line discloses in column 7 the fine chemical valine. For example, an increase of the valine of at least 1 percent, particularly in a range of 28 to 40-percent is conferred as compared to a corresponding non-transformed wild type non-human organism.

[40893] Accordingly, in one embodiment, an increase of isoleucine in a non-human organism, as compared to a corresponding non-transformed wild type non-human organism, is conferred in the process of the invention, if the activity of a polypeptide showing the activity of a cullin, or if the activity of the polypeptide At1g26830, preferably represented by SEQ ID NO. 17702, or a homolog or fragment thereof, or if the activity of a polypeptide encoded by a nucleic acid molecule comprising the nucleic acid SEQ ID NO. 17701, preferably the coding region thereof, or a homolog or fragment thereof, e.g. derived from Arabidopsis thaliana, is increased or generated. For example the activity of a nucleic acid molecule or a polypeptide comprising the nucleic acid, preferably the coding region thereof, or polypeptide or the consensus sequence or the polypeptide motif, as depicted in Table I, II or IV, application No. 6, column 5 or 8 in the respective same line as the nucleic acid molecule SEQ ID NO. 17701 or polypeptide SEQ ID NO. 17702, respectively, or a homolog or a fragment thereof, is increased or generated, or if the activity cullin is increased or generated in a non-human organism, like a microorganism or a plant cell, plant or part thereof, especially with non-targeted localization, whereby the respective line discloses in column 7 the fine chemical isoleucine. For example, an increase of the isoleucine of at least 1 percent, particularly in a range of 45 to 143-percent is conferred as compared to a corresponding non-transformed wild type non-human organism.

[40894] Accordingly, in one embodiment, an increase of leucine in a non-human organism, as compared to a corresponding non-transformed wild type non-human organism, is conferred in the process of the invention, if the activity of a polypeptide showing the activity of a cullin, or if the activity of the polypeptide At1g26830, preferably represented by SEQ ID NO. 17702, or a homolog or fragment thereof, or if the activity of a polypeptide encoded by a nucleic acid molecule comprising the nucleic acid SEQ ID NO. 17701, preferably the coding region thereof, or a homolog or fragment thereof, e.g. derived from Arabidopsis thaliana, is increased or generated. For example the activity of a nucleic acid molecule or a polypeptide comprising the nucleic acid, preferably the coding region thereof, or polypeptide or the consensus sequence or the polypeptide motif, as depicted in Table I, II or IV, application No. 6, column 5 or 8 in the respective same line as the nucleic acid molecule SEQ ID NO. 17701 or polypeptide SEQ ID NO. 17702, respectively, or a homolog or a fragment thereof, is increased or generated, or if the activity cullin is increased or generated in a non-human organism, like a microorganism or a plant cell, plant or part thereof, especially with non-targeted localization, whereby the respective line discloses in column 7 the fine chemical leucine. For example, an increase of the leucine of at least 1 percent, particularly in a range of 59 to 187-percent is conferred as compared to a corresponding non-transformed wild type non-human organism.

[40895] Accordingly, in one embodiment, an increase of isoleucine in a non-human organism, as compared to a corresponding non-transformed wild type non-human organism, is conferred in the process of the invention, if the activity of a polypeptide showing the activity of a eukaryotic translation initiation factor 5, or if the activity of the polypeptide At1g36730, preferably represented by SEQ ID NO. 17969, or a homolog or fragment thereof, or if the activity of a polypeptide encoded by a nucleic acid molecule comprising the nucleic acid SEQ ID NO. 17968, preferably the coding region thereof, or a homolog or fragment thereof, e.g. derived from Arabidopsis thaliana, is increased or generated. For example the activity of a nucleic acid molecule or a polypeptide comprising the nucleic acid, preferably the coding region thereof, or polypeptide or the consensus sequence or the polypeptide motif, as depicted in Table I, II or IV, application No. 6, column 5 or 8 in the respective same line as the nucleic acid molecule SEQ ID NO. 17968 or polypeptide SEQ ID NO. 17969, respectively, or a homolog or a fragment thereof, is increased or generated, or if the activity eukaryotic translation initiation factor 5 is increased or generated in a non-human organism, like a microorganism or a plant cell, plant or part thereof, especially with non-targeted localization, whereby the respective line discloses in column 7 the fine chemical isoleucine. For example, an increase of the isoleucine of at least 1 percent, particularly in a range of 49 to 162-percent is conferred as compared to a corresponding non-transformed wild type non-human organism.

[40896] Accordingly, in one embodiment, an increase of leucine in a non-human organism, as compared to a corresponding non-transformed wild type non-human organism, is conferred in the process of the invention, if the activity of a polypeptide showing the activity of a eukaryotic translation initiation factor 5, or if the activity of the polypeptide At1g36730, preferably represented by SEQ ID NO. 17969, or a homolog or fragment thereof, or if the activity of a polypeptide encoded by a nucleic acid molecule comprising the nucleic acid SEQ ID NO. 17968, preferably the coding region thereof, or a homolog or fragment thereof, e.g. derived from Arabidopsis thaliana, is increased or generated. For example the activity of a nucleic acid molecule or a polypeptide comprising the nucleic acid, preferably the coding region thereof, or polypeptide or the consensus sequence or the polypeptide motif, as depicted in Table I, II or IV, application No. 6, column 5 or 8 in the respective same line as the nucleic acid molecule SEQ ID NO. 17968 or polypeptide SEQ ID NO. 17969, respectively, or a homolog or a fragment thereof, is increased or generated, or if the activity eukaryotic translation initiation factor 5 is increased or generated in a non-human organism, like a microorganism or a plant cell, plant or part thereof, especially with non-targeted localization, whereby the respective line discloses in column 7 the fine chemical leucine. For example, an increase of the leucine of at least 1 percent, particularly in a range of 52 to 149-percent is conferred as compared to a corresponding non-transformed wild type non-human organism.

[40897] Accordingly, in one embodiment, an increase of isoleucine in a non-human organism, as compared to a corresponding non-transformed wild type non-human organism, is conferred in the process of the invention, if the activity of a polypeptide showing the activity of a transcriptional regulator, or if the activity of the polypeptide At1g43850, preferably represented by SEQ ID NO. 18071, or a homolog or fragment thereof, or if the activity of a polypeptide encoded by a nucleic acid molecule comprising the nucleic acid SEQ ID NO. 18070, preferably the coding region thereof, or a homolog or fragment thereof, e.g. derived from Arabidopsis thaliana, is increased or generated. For example the activity of a nucleic acid molecule or a polypeptide comprising the nucleic acid, preferably the coding region thereof, or polypeptide or the consensus sequence or the polypeptide motif, as depicted in Table I, II or IV, application No. 6, column 5 or 8 in the respective same line as the nucleic acid molecule SEQ ID NO. 18070 or polypeptide SEQ ID NO. 18071, respectively, or a homolog or a fragment thereof, is increased or generated, or if the activity transcriptional regulator is increased or generated in a non-human organism, like a microorganism or a plant cell, plant or part thereof, especially with non-targeted localization, whereby the respective line discloses in column 7 the fine chemical isoleucine. For example, an increase of the isoleucine of at least 1 percent, particularly in a range of 69 to 406-percent is conferred as compared to a corresponding non-transformed wild type non-human organism.

[40898] Accordingly, in one embodiment, an increase of leucine in a non-human organism, as compared to a corresponding non-transformed wild type non-human organism, is conferred in the process of the invention, if the activity of a polypeptide showing the activity of a transcriptional regulator, or if the activity of the polypeptide At1g43850, preferably represented by SEQ ID NO. 18071, or a homolog or fragment thereof, or if the activity of a polypeptide encoded by a nucleic acid molecule comprising the nucleic acid SEQ ID NO. 18070, preferably the coding region thereof, or a homolog or fragment thereof, e.g. derived from Arabidopsis thaliana, is increased or generated. For example the activity of a nucleic acid molecule or a polypeptide comprising the nucleic acid, preferably the coding region thereof, or polypeptide or the consensus sequence or the polypeptide motif, as depicted in Table I, II or IV, application No. 6, column 5 or 8 in the respective same line as the nucleic acid molecule SEQ ID NO. 18070 or polypeptide SEQ ID NO. 18071, respectively, or a homolog or a fragment thereof, is increased or generated, or if the activity transcriptional regulator is increased or generated in a non-human organism, like a microorganism or a plant cell, plant or part thereof, especially with non-targeted localization, whereby the respective line discloses in column 7 the fine chemical leucine. For example, an increase of the leucine of at least 1 percent, particularly in a range of 58 to 377-percent is conferred as compared to a corresponding non-transformed wild type non-human organism.

[40899] Accordingly, in one embodiment, an increase of valine in a non-human organism, as compared to a corresponding non-transformed wild type non-human organism, is conferred in the process of the invention, if the activity of a polypeptide showing the activity of a transcriptional regulator, or if the activity of the polypeptide At1g43850, preferably represented by SEQ ID NO. 18071, or a homolog or fragment thereof, or if the activity of a polypeptide encoded by a nucleic acid molecule comprising the nucleic acid SEQ ID NO. 18070, preferably the coding region thereof, or a homolog or fragment thereof, e.g. derived from Arabidopsis thaliana, is increased or generated. For example the activity of a nucleic acid molecule or a polypeptide comprising the nucleic acid, preferably the coding region thereof, or polypeptide or the consensus sequence or the polypeptide motif, as depicted in Table I, II or IV, application No. 6, column 5 or 8 in the respective same line as the nucleic acid molecule SEQ ID NO. 18070 or polypeptide SEQ ID NO. 18071, respectively, or a homolog or a fragment thereof, is increased or generated, or if the activity transcriptional regulator is increased or generated in a non-human organism, like a microorganism or a plant cell, plant or part thereof, especially with non-targeted localization, whereby the respective line discloses in column 7 the fine chemical valine. For example, an increase of the valine of at least 1 percent, particularly in a range of 58 to 173-percent is conferred as compared to a corresponding non-transformed wild type non-human organism.

[40900] Accordingly, in one embodiment, an increase of leucine in a non-human organism, as compared to a corresponding non-transformed wild type non-human organism, is conferred in the process of the invention, if the activity of a polypeptide showing the activity of a At1g47380-protein, or if the activity of the polypeptide At1g47380, preferably represented by SEQ ID NO. 18123, or a homolog or fragment thereof, or if the activity of a polypeptide encoded by a nucleic acid molecule comprising the nucleic acid SEQ ID NO. 18122, preferably the coding region thereof, or a homolog or fragment thereof, e.g. derived from Arabidopsis thaliana, is increased or generated. For example the activity of a nucleic acid molecule or a polypeptide comprising the nucleic acid, preferably the coding region thereof, or polypeptide or the consensus sequence or the polypeptide motif, as depicted in Table I, II or IV, application No. 6, column 5 or 8 in the respective same line as the nucleic acid molecule SEQ ID NO. 18122 or polypeptide SEQ ID NO. 18123, respectively, or a homolog or a fragment thereof, is increased or generated, or if the activity At1g47380-protein is increased or generated in a non-human organism, like a microorganism or a plant cell, plant or part thereof, especially with non-targeted localization, whereby the respective line discloses in column 7 the fine chemical leucine. For example, an increase of the leucine of at least 1 percent, particularly in a range of 51 to 134-percent is conferred as compared to a corresponding non-transformed wild type non-human organism.

[40901] Accordingly, in one embodiment, an increase of valine in a non-human organism, as compared to a corresponding non-transformed wild type non-human organism, is conferred in the process of the invention, if the activity of a polypeptide showing the activity of a At1g47380-protein, or if the activity of the polypeptide At1g47380, preferably represented by SEQ ID NO. 18123, or a homolog or fragment thereof, or if the activity of a polypeptide encoded by a nucleic acid molecule comprising the nucleic acid SEQ ID NO. 18122, preferably the coding region thereof, or a homolog or fragment thereof, e.g. derived from Arabidopsis thaliana, is increased or generated. For example the activity of a nucleic acid molecule or a polypeptide comprising the nucleic acid, preferably the coding region thereof, or polypeptide or the consensus sequence or the polypeptide motif, as depicted in Table I, II or IV, application No. 6, column 5 or 8 in the respective same line as the nucleic acid molecule SEQ ID NO. 18122 or polypeptide SEQ ID NO. 18123, respectively, or a homolog or a fragment thereof, is increased or generated, or if the activity At1g47380-protein is increased or generated in a non-human organism, like a microorganism or a plant cell, plant or part thereof, especially with non-targeted localization, whereby the respective line discloses in column 7 the fine chemical valine. For example, an increase of the valine of at least 1 percent, particularly in a range of 20 to 105-percent is conferred as compared to a corresponding non-transformed wild type non-human organism.

[40902] Accordingly, in one embodiment, an increase of isoleucine in a non-human organism, as compared to a corresponding non-transformed wild type non-human organism, is conferred in the process of the invention, if the activity of a polypeptide showing the activity of a protein kinase, or if the activity of the polypeptide At1g48260, preferably represented by SEQ ID NO. 18236, or a homolog or fragment thereof, or if the activity of a polypeptide encoded by a nucleic acid molecule comprising the nucleic acid SEQ ID NO. 18235, preferably the coding region thereof, or a homolog or fragment thereof, e.g. derived from Arabidopsis thaliana, is increased or generated. For example the activity of a nucleic acid molecule or a polypeptide comprising the nucleic acid, preferably the coding region thereof, or polypeptide or the consensus sequence or the polypeptide motif, as depicted in Table I, II or IV, application No. 6, column 5 or 8 in the respective same line as the nucleic acid molecule SEQ ID NO. 18235 or polypeptide SEQ ID NO. 18236, respectively, or a homolog or a fragment thereof, is increased or generated, or if the activity protein kinase is increased or generated in a non-human organism, like a microorganism or a plant cell, plant or part thereof, especially with non-targeted localization, whereby the respective line discloses in column 7 the fine chemical isoleucine. For example, an increase of the isoleucine of at least 1 percent, particularly in a range of 78 to 747-percent is conferred as compared to a corresponding non-transformed wild type non-human organism.

[40903] Accordingly, in one embodiment, an increase of leucine in a non-human organism, as compared to a corresponding non-transformed wild type non-human organism, is conferred in the process of the invention, if the activity of a polypeptide showing the activity of a protein kinase, or if the activity of the polypeptide At1g48260, preferably represented by SEQ ID NO. 18236, or a homolog or fragment thereof, or if the activity of a polypeptide encoded by a nucleic acid molecule comprising the nucleic acid SEQ ID NO. 18235, preferably the coding region thereof, or a homolog or fragment thereof, e.g. derived from Arabidopsis thaliana, is increased or generated. For example the activity of a nucleic acid molecule or a polypeptide comprising the nucleic acid, preferably the coding region thereof, or polypeptide or the consensus sequence or the polypeptide motif, as depicted in Table I, II or IV, application No. 6, column 5 or 8 in the respective same line as the nucleic acid molecule SEQ ID NO. 18235 or polypeptide SEQ ID NO. 18236, respectively, or a homolog or a fragment thereof, is increased or generated, or if the activity protein kinase is increased or generated in a non-human organism, like a microorganism or a plant cell, plant or part thereof, especially with non-targeted localization, whereby the respective line discloses in column 7 the fine chemical leucine. For example, an increase of the leucine of at least 1 percent, particularly in a range of 86 to 639-percent is conferred as compared to a corresponding non-transformed wild type non-human organism.

[40904] Accordingly, in one embodiment, an increase of valine in a non-human organism, as compared to a corresponding non-transformed wild type non-human organism, is conferred in the process of the invention, if the activity of a polypeptide showing the activity of a protein kinase, or if the activity of the polypeptide At1g48260, preferably represented by SEQ ID NO. 18236, or a homolog or fragment thereof, or if the activity of a polypeptide encoded by a nucleic acid molecule comprising the nucleic acid SEQ ID NO. 18235, preferably the coding region thereof, or a homolog or fragment thereof, e.g. derived from Arabidopsis thaliana, is increased or generated.

[40905] For example the activity of a nucleic acid molecule or a polypeptide comprising the nucleic acid, preferably the coding region thereof, or polypeptide or the consensus sequence or the polypeptide motif, as depicted in Table I, II or IV, application No. 6, column 5 or 8 in the respective same line as the nucleic acid molecule SEQ ID NO. 18235 or polypeptide SEQ ID NO. 18236, respectively, or a homolog or a fragment thereof, is increased or generated, or if the activity protein kinase is increased or generated in a non-human organism, like a microorganism or a plant cell, plant or part thereof, especially with non-targeted localization, whereby the respective line discloses in column 7 the fine chemical valine. For example, an increase of the valine of at least 1 percent, particularly in a range of 51 to 277-percent is conferred as compared to a corresponding non-transformed wild type non-human organism.

[40906] Accordingly, in one embodiment, an increase of isoleucine in a non-human organism, as compared to a corresponding non-transformed wild type non-human organism, is conferred in the process of the invention, if the activity of a polypeptide showing the activity of a calcium-dependent protein kinase, or if the activity of the polypeptide At1g61950, preferably represented by SEQ ID NO. 18870, or a homolog or fragment thereof, or if the activity of a polypeptide encoded by a nucleic acid molecule comprising the nucleic acid SEQ ID NO. 18869, preferably the coding region thereof, or a homolog or fragment thereof, e.g. derived from Arabidopsis thaliana, is increased or generated. For example the activity of a nucleic acid molecule or a polypeptide comprising the nucleic acid, preferably the coding region thereof, or polypeptide or the consensus sequence or the polypeptide motif, as depicted in Table I, II or IV, application No. 6, column 5 or 8 in the respective same line as the nucleic acid molecule SEQ ID NO. 18869 or polypeptide SEQ ID NO. 18870, respectively, or a homolog or a fragment thereof, is increased or generated, or if the activity calcium-dependent protein kinase is increased or generated in a non-human organism, like a microorganism or a plant cell, plant or part thereof, especially with non-targeted localization, whereby the respective line discloses in column 7 the fine chemical isoleucine. For example, an increase of the isoleucine of at least 1 percent, particularly in a range of 96 to 174-percent is conferred as compared to a corresponding non-transformed wild type non-human organism.

[40907] Accordingly, in one embodiment, an increase of leucine in a non-human organism, as compared to a corresponding non-transformed wild type non-human organism, is conferred in the process of the invention, if the activity of a polypeptide showing the activity of a calcium-dependent protein kinase, or if the activity of the polypeptide At1g61950, preferably represented by SEQ ID NO. 18870, or a homolog or fragment thereof, or if the activity of a polypeptide encoded by a nucleic acid molecule comprising the nucleic acid SEQ ID NO. 18869, preferably the coding region thereof, or a homolog or fragment thereof, e.g. derived from Arabidopsis thaliana, is increased or generated. For example the activity of a nucleic acid molecule or a polypeptide comprising the nucleic acid, preferably the coding region thereof, or polypeptide or the consensus sequence or the polypeptide motif, as depicted in Table I, II or IV, application No. 6, column 5 or 8 in the respective same line as the nucleic acid molecule SEQ ID NO. 18869 or polypeptide SEQ ID NO. 18870, respectively, or a homolog or a fragment thereof, is increased or generated, or if the activity calcium-dependent protein kinase is increased or generated in a non-human organism, like a microorganism or a plant cell, plant or part thereof, especially with non-targeted localization, whereby the respective line discloses in column 7 the fine chemical leucine. For example, an increase of the leucine of at least 1 percent, particularly in a range of 99 to 169-percent is conferred as compared to a corresponding non-transformed wild type non-human organism.

[40908] Accordingly, in one embodiment, an increase of valine in a non-human organism, as compared to a corresponding non-transformed wild type non-human organism, is conferred in the process of the invention, if the activity of a polypeptide showing the activity of a calcium-dependent protein kinase, or if the activity of the polypeptide At1g61950, preferably represented by SEQ ID NO. 18870, or a homolog or fragment thereof, or if the activity of a polypeptide encoded by a nucleic acid molecule comprising the nucleic acid SEQ ID NO. 18869, preferably the coding region thereof, or a homolog or fragment thereof, e.g. derived from Arabidopsis thaliana, is increased or generated. For example the activity of a nucleic acid molecule or a polypeptide comprising the nucleic acid, preferably the coding region thereof, or polypeptide or the consensus sequence or the polypeptide motif, as depicted in Table I, II or IV, application No. 6, column 5 or 8 in the respective same line as the nucleic acid molecule SEQ ID NO. 18869 or polypeptide SEQ ID NO. 18870, respectively, or a homolog or a fragment thereof, is increased or generated, or if the activity calcium-dependent protein kinase is increased or generated in a non-human organism, like a microorganism or a plant cell, plant or part thereof, especially with non-targeted localization, whereby the respective line discloses in column 7 the fine chemical valine. For example, an increase of the valine of at least 1 percent, particularly in a range of 43 to 84-percent is conferred as compared to a corresponding non-transformed wild type non-human organism.

[40909] Accordingly, in one embodiment, an increase of isoleucine in a non-human organism, as compared to a corresponding non-transformed wild type non-human organism, is conferred in the process of the invention, if the activity of a polypeptide showing the activity of a protein phosphatase, or if the activity of the polypeptide At1g68410, preferably represented by SEQ ID NO. 102120, or a homolog or fragment thereof, or if the activity of a polypeptide encoded by a nucleic acid molecule comprising the nucleic acid SEQ ID NO. 102119, preferably the coding region thereof, or a homolog or fragment thereof, e.g. derived from Arabidopsis thaliana, is increased or generated. For example the activity of a nucleic acid molecule or a polypeptide comprising the nucleic acid, preferably the coding region thereof, or polypeptide or the consensus sequence or the polypeptide motif, as depicted in Table I, II or IV, application No. 6, column 5 or 8 in the respective same line as the nucleic acid molecule SEQ ID NO. 102119 or polypeptide SEQ ID NO. 102120, respectively, or a homolog or a fragment thereof, is increased or generated, or if the activity protein phosphatase is increased or generated in a non-human organism, like a microorganism or a plant cell, plant or part thereof, especially with non-targeted localization, whereby the respective line discloses in column 7 the fine chemical isoleucine. For example, an increase of the isoleucine of at least 1 percent, particularly in a range of 41 to 140-percent is conferred as compared to a corresponding non-transformed wild type non-human organism.

[40910] Accordingly, in one embodiment, an increase of leucine in a non-human organism, as compared to a corresponding non-transformed wild type non-human organism, is conferred in the process of the invention, if the activity of a polypeptide showing the activity of a protein phosphatase, or if the activity of the polypeptide At1g68410, preferably represented by SEQ ID NO. 102120, or a homolog or fragment thereof, or if the activity of a polypeptide encoded by a nucleic acid molecule comprising the nucleic acid SEQ ID NO. 102119, preferably the coding region thereof, or a homolog or fragment thereof, e.g. derived from Arabidopsis thaliana, is increased or generated. For example the activity of a nucleic acid molecule or a polypeptide comprising the nucleic acid, preferably the coding region thereof, or polypeptide or the consensus sequence or the polypeptide motif, as depicted in Table I, II or IV, application No. 6, column 5 or 8 in the respective same line as the nucleic acid molecule SEQ ID NO. 102119 or polypeptide SEQ ID NO. 102120, respectively, or a homolog or a fragment thereof, is increased or generated, or if the activity protein phosphatase is increased or generated in a non-human organism, like a microorganism or a plant cell, plant or part thereof, especially with non-targeted localization, whereby the respective line discloses in column 7 the fine chemical leucine. For example, an increase of the leucine of at least 1 percent, particularly in a range of 50 to 137-percent is conferred as compared to a corresponding non-transformed wild type non-human organism.

[40911] Accordingly, in one embodiment, an increase of valine in a non-human organism, as compared to a corresponding non-transformed wild type non-human organism, is conferred in the process of the invention, if the activity of a polypeptide showing the activity of a protein phosphatase, or if the activity of the polypeptide At1g72770, preferably represented by SEQ ID NO. 19420, or a homolog or fragment thereof, or if the activity of a polypeptide encoded by a nucleic acid molecule comprising the nucleic acid SEQ ID NO. 19419, preferably the coding region thereof, or a homolog or fragment thereof, e.g. derived from Arabidopsis thaliana, is increased or generated. For example the activity of a nucleic acid molecule or a polypeptide comprising the nucleic acid, preferably the coding region thereof, or polypeptide or the consensus sequence or the polypeptide motif, as depicted in Table I, II or IV, application No. 6, column 5 or 8 in the respective same line as the nucleic acid molecule SEQ ID NO. 19419 or polypeptide SEQ ID NO. 19420, respectively, or a homolog or a fragment thereof, is increased or generated, or if the activity protein phosphatase is increased or generated in a non-human organism, like a microorganism or a plant cell, plant or part thereof, especially with non-targeted localization, whereby the respective line discloses in column 7 the fine chemical valine. For example, an increase of the valine of at least 1 percent, particularly in a range of 22 to 134-percent is conferred as compared to a corresponding non-transformed wild type non-human organism.

[40912] Accordingly, in one embodiment, an increase of valine in a non-human organism, as compared to a corresponding non-transformed wild type non-human organism, is conferred in the process of the invention, if the activity of a polypeptide showing the activity of a transcription factor, or if the activity of the polypeptide At2g17560, preferably represented by SEQ ID NO. 19503, or a homolog or fragment thereof, or if the activity of a polypeptide encoded by a nucleic acid molecule comprising the nucleic acid SEQ ID NO. 19502, preferably the coding region thereof, or a homolog or fragment thereof, e.g. derived from Arabidopsis thaliana, is increased or generated. For example the activity of a nucleic acid molecule or a polypeptide comprising the nucleic acid, preferably the coding region thereof, or polypeptide or the consensus sequence or the polypeptide motif, as depicted in Table I, II or IV, application No. 6, column 5 or 8 in the respective same line as the nucleic acid molecule SEQ ID NO. 19502 or polypeptide SEQ ID NO. 19503, respectively, or a homolog or a fragment thereof, is increased or generated, or if the activity transcription factor is increased or generated in a non-human organism, like a microorganism or a plant cell, plant or part thereof, especially with non-targeted localization, whereby the respective line discloses in column 7 the fine chemical valine. For example, an increase of the valine of at least 1 percent, particularly in a range of 25 to 108-percent is conferred as compared to a corresponding non-transformed wild type non-human organism.

[40913] Accordingly, in one embodiment, an increase of isoleucine in a non-human organism, as compared to a corresponding non-transformed wild type non-human organism, is conferred in the process of the invention, if the activity of a polypeptide showing the activity of a protein phosphatase, or if the activity of the polypeptide At2g28890, preferably represented by SEQ ID NO. 19875, or a homolog or fragment thereof, or if the activity of a polypeptide encoded by a nucleic acid molecule comprising the nucleic acid SEQ ID NO. 19874, preferably the coding region thereof, or a homolog or fragment thereof, e.g. derived from Arabidopsis thaliana, is increased or generated. For example the activity of a nucleic acid molecule or a polypeptide comprising the nucleic acid, preferably the coding region thereof, or polypeptide or the consensus sequence or the polypeptide motif, as depicted in Table I, II or IV, application No. 6, column 5 or 8 in the respective same line as the nucleic acid molecule SEQ ID NO. 19874 or polypeptide SEQ ID NO. 19875, respectively, or a homolog or a fragment thereof, is increased or generated, or if the activity protein phosphatase is increased or generated in a non-human organism, like a microorganism or a plant cell, plant or part thereof, especially with non-targeted localization, whereby the respective line discloses in column 7 the fine chemical isoleucine. For example, an increase of the isoleucine of at least 1 percent, particularly in a range of 33 to 738-percent is conferred as compared to a corresponding non-transformed wild type non-human organism.

[40914] Accordingly, in one embodiment, an increase of valine in a non-human organism, as compared to a corresponding non-transformed wild type non-human organism, is conferred in the process of the invention, if the activity of a polypeptide showing the activity of a protein phosphatase, or if the activity of the polypeptide At2g28890, preferably represented by SEQ ID NO. 19875, or a homolog or fragment thereof, or if the activity of a polypeptide encoded by a nucleic acid molecule comprising the nucleic acid SEQ ID NO. 19874, preferably the coding region thereof, or a homolog or fragment thereof, e.g. derived from Arabidopsis thaliana, is increased or generated. For example the activity of a nucleic acid molecule or a polypeptide comprising the nucleic acid, preferably the coding region thereof, or polypeptide or the consensus sequence or the polypeptide motif, as depicted in Table I, II or IV, application No. 6, column 5 or 8 in the respective same line as the nucleic acid molecule SEQ ID NO. 19874 or polypeptide SEQ ID NO. 19875, respectively, or a homolog or a fragment thereof, is increased or generated, or if the activity protein phosphatase is increased or generated in a non-human organism, like a microorganism or a plant cell, plant or part thereof, especially with non-targeted localization, whereby the respective line discloses in column 7 the fine chemical valine. For example, an increase of the valine of at least 1 percent, particularly in a range of 26 to 321 percent is conferred as compared to a corresponding non-transformed wild type non-human organism.

[40915] Accordingly, in one embodiment, an increase of isoleucine in a non-human organism, as compared to a corresponding non-transformed wild type non-human organism, is conferred in the process of the invention, if the activity of a polypeptide showing the activity of a CBL-interacting protein kinase, or if the activity of the polypeptide At2g30360, preferably represented by SEQ ID NO. 19920, or a homolog or fragment thereof, or if the activity of a polypeptide encoded by a nucleic acid molecule comprising the nucleic acid SEQ ID NO. 19919, preferably the coding region thereof, or a homolog or fragment thereof, e.g. derived from Arabidopsis thaliana, is increased or generated. For example the activity of a nucleic acid molecule or a polypeptide comprising the nucleic acid, preferably the coding region thereof, or polypeptide or the consensus sequence or the polypeptide motif, as depicted in Table I, II or IV, application No. 6, column 5 or 8 in the respective same line as the nucleic acid molecule SEQ ID NO. 19919 or polypeptide SEQ ID NO. 19920, respectively, or a homolog or a fragment thereof, is increased or generated, or if the activity CBL-interacting protein kinase is increased or generated in a non-human organism, like a microorganism or a plant cell, plant or part thereof, especially with non-targeted localization, whereby the respective line discloses in column 7 the fine chemical isoleucine. For example, an increase of the isoleucine of at least 1 percent, particularly in a range of 35 to 810-percent is conferred as compared to a corresponding non-transformed wild type non-human organism.

[40916] Accordingly, in one embodiment, an increase of leucine in a non-human organism, as compared to a corresponding non-transformed wild type non-human organism, is conferred in the process of the invention, if the activity of a polypeptide showing the activity of a CBL-interacting protein kinase, or if the activity of the polypeptide At2g30360, preferably represented by SEQ ID NO. 19920, or a homolog or fragment thereof, or if the activity of a polypeptide encoded by a nucleic acid molecule comprising the nucleic acid SEQ ID NO. 19919, preferably the coding region thereof, or a homolog or fragment thereof, e.g. derived from Arabidopsis thaliana, is increased or generated. For example the activity of a nucleic acid molecule or a polypeptide comprising the nucleic acid, preferably the coding region thereof, or polypeptide or the consensus sequence or the polypeptide motif, as depicted in Table I, II or IV, application No. 6, column 5 or 8 in the respective same line as the nucleic acid molecule SEQ ID NO. 19919 or polypeptide SEQ ID NO. 19920, respectively, or a homolog or a fragment thereof, is increased or generated, or if the activity CBL-interacting protein kinase is increased or generated in a non-human organism, like a microorganism or a plant cell, plant or part thereof, especially with non-targeted localization, whereby the respective line discloses in column 7 the fine chemical leucine. For example, an increase of the leucine of at least 1 percent, particularly in a range of 64 to 947-percent is conferred as compared to a corresponding non-transformed wild type non-human organism.

[40917] Accordingly, in one embodiment, an increase of valine in a non-human organism, as compared to a corresponding non-transformed wild type non-human organism, is conferred in the process of the invention, if the activity of a polypeptide showing the activity of a CBL-interacting protein kinase, or if the activity of the polypeptide At2g30360, preferably represented by SEQ ID NO. 19920, or a homolog or fragment thereof, or if the activity of a polypeptide encoded by a nucleic acid molecule comprising the nucleic acid SEQ ID NO. 19919, preferably the coding region thereof, or a homolog or fragment thereof, e.g. derived from Arabidopsis thaliana, is increased or generated. For example the activity of a nucleic acid molecule or a polypeptide comprising the nucleic acid, preferably the coding region thereof, or polypeptide or the consensus sequence or the polypeptide motif, as depicted in Table I, II or IV, application No. 6, column 5 or 8 in the respective same line as the nucleic acid molecule SEQ ID NO. 19919 or polypeptide SEQ ID NO. 19920, respectively, or a homolog or a fragment thereof, is increased or generated, or if the activity CBL-interacting protein kinase is increased or generated in a non-human organism, like a microorganism or a plant cell, plant or part thereof, especially with non-targeted localization, whereby the respective line discloses in column 7 the fine chemical valine. For example, an increase of the valine of at least 1 percent, particularly in a range of 137 to 277-percent is conferred as compared to a corresponding non-transformed wild type non-human organism.

[40918] Accordingly, in one embodiment, an increase of isoleucine in a non-human organism, as compared to a corresponding non-transformed wild type non-human organism, is conferred in the process of the invention, if the activity of a polypeptide showing the activity of a glutaredoxin, or if the activity of the polypeptide At2g30540, preferably represented by SEQ ID NO. 20347, or a homolog or fragment thereof, or if the activity of a polypeptide encoded by a nucleic acid molecule comprising the nucleic acid SEQ ID NO. 20346, preferably the coding region thereof, or a homolog or fragment thereof, e.g. derived from Arabidopsis thaliana, is increased or generated.

[40919] For example the activity of a nucleic acid molecule or a polypeptide comprising the nucleic acid, preferably the coding region thereof, or polypeptide or the consensus sequence or the polypeptide motif, as depicted in Table I, II or IV, application No. 6, column 5 or 8 in the respective same line as the nucleic acid molecule SEQ ID NO. 20346 or polypeptide SEQ ID NO. 20347, respectively, or a homolog or a fragment thereof, is increased or generated, or if the activity glutaredoxin is increased or generated in a non-human organism, like a microorganism or a plant cell, plant or part thereof, especially with non-targeted localization, whereby the respective line discloses in column 7 the fine chemical isoleucine. For example, an increase of the isoleucine of at least 1 percent, particularly in a range of 39 to 206-percent is conferred as compared to a corresponding non-transformed wild type non-human organism.

[40920] Accordingly, in one embodiment, an increase of leucine in a non-human organism, as compared to a corresponding non-transformed wild type non-human organism, is conferred in the process of the invention, if the activity of a polypeptide showing the activity of a glutaredoxin, or if the activity of the polypeptide At2g30540, preferably represented by SEQ ID NO. 20347, or a homolog or fragment thereof, or if the activity of a polypeptide encoded by a nucleic acid molecule comprising the nucleic acid SEQ ID NO. 20346, preferably the coding region thereof, or a homolog or fragment thereof, e.g. derived from Arabidopsis thaliana, is increased or generated. For example the activity of a nucleic acid molecule or a polypeptide comprising the nucleic acid, preferably the coding region thereof, or polypeptide or the consensus sequence or the polypeptide motif, as depicted in Table I, II or IV, application No. 6, column 5 or 8 in the respective same line as the nucleic acid molecule SEQ ID NO. 20346 or polypeptide SEQ ID NO. 20347, respectively, or a homolog or a fragment thereof, is increased or generated, or if the activity glutaredoxin is increased or generated in a non-human organism, like a microorganism or a plant cell, plant or part thereof, especially with non-targeted localization, whereby the respective line discloses in column 7 the fine chemical leucine. For example, an increase of the leucine of at least 1 percent, particularly in a range of 66 to 243-percent is conferred as compared to a corresponding non-transformed wild type non-human organism.

[40921] Accordingly, in one embodiment, an increase of valine in a non-human organism, as compared to a corresponding non-transformed wild type non-human organism, is conferred in the process of the invention, if the activity of a polypeptide showing the activity of a glutaredoxin, or if the activity of the polypeptide At2g30540, preferably represented by SEQ ID NO. 20347, or a homolog or fragment thereof, or if the activity of a polypeptide encoded by a nucleic acid molecule comprising the nucleic acid SEQ ID NO. 20346, preferably the coding region thereof, or a homolog or fragment thereof, e.g. derived from Arabidopsis thaliana, is increased or generated. For example the activity of a nucleic acid molecule or a polypeptide comprising the nucleic acid, preferably the coding region thereof, or polypeptide or the consensus sequence or the polypeptide motif, as depicted in Table I, II or IV, application No. 6, column 5 or 8 in the respective same line as the nucleic acid molecule SEQ ID NO. 20346 or polypeptide SEQ ID NO. 20347, respectively, or a homolog or a fragment thereof, is increased or generated, or if the activity glutaredoxin is increased or generated in a non-human organism, like a microorganism or a plant cell, plant or part thereof, especially with non-targeted localization, whereby the respective line discloses in column 7 the fine chemical valine. For example, an increase of the valine of at least 1 percent, particularly in a range of 24 to 183-percent is conferred as compared to a corresponding non-transformed wild type non-human organism.

[40922] Accordingly, in one embodiment, an increase of valine in a non-human organism, as compared to a corresponding non-transformed wild type non-human organism, is conferred in the process of the invention, if the activity of a polypeptide showing the activity of a glutaredoxin, or if the activity of the polypeptide At2g47880, preferably represented by SEQ ID NO. 21160, or a homolog or fragment thereof, or if the activity of a polypeptide encoded by a nucleic acid molecule comprising the nucleic acid SEQ ID NO. 21159, preferably the coding region thereof, or a homolog or fragment thereof, e.g. derived from Arabidopsis thaliana, is increased or generated. For example the activity of a nucleic acid molecule or a polypeptide comprising the nucleic acid, preferably the coding region thereof, or polypeptide or the consensus sequence or the polypeptide motif, as depicted in Table I, II or IV, application No. 6, column 5 or 8 in the respective same line as the nucleic acid molecule SEQ ID NO. 21159 or polypeptide SEQ ID NO. 21160, respectively, or a homolog or a fragment thereof, is increased or generated, or if the activity glutaredoxin is increased or generated in a non-human organism, like a microorganism or a plant cell, plant or part thereof, especially with non-targeted localization, whereby the respective line discloses in column 7 the fine chemical valine. For example, an increase of the valine of at least 1 percent, particularly in a range of 65 to 227-percent is conferred as compared to a corresponding non-transformed wild type non-human organism.

[40923] Accordingly, in one embodiment, an increase of isoleucine in a non-human organism, as compared to a corresponding non-transformed wild type non-human organism, is conferred in the process of the invention, if the activity of a polypeptide showing the activity of a pyruvate kinase, or if the activity of the polypeptide At3g04050, preferably represented by SEQ ID NO. 21498, or a homolog or fragment thereof, or if the activity of a polypeptide encoded by a nucleic acid molecule comprising the nucleic acid SEQ ID NO. 21497, preferably the coding region thereof, or a homolog or fragment thereof, e.g. derived from Arabidopsis thaliana, is increased or generated. For example the activity of a nucleic acid molecule or a polypeptide comprising the nucleic acid, preferably the coding region thereof, or polypeptide or the consensus sequence or the polypeptide motif, as depicted in Table I, II or IV, application No. 6, column 5 or 8 in the respective same line as the nucleic acid molecule SEQ ID NO. 21497 or polypeptide SEQ ID NO. 21498, respectively, or a homolog or a fragment thereof, is increased or generated, or if the activity pyruvate kinase is increased or generated in a non-human organism, like a microorganism or a plant cell, plant or part thereof, especially with plastidic localization, whereby the respective line discloses in column 7 the fine chemical isoleucine. For example, an increase of the isoleucine of at least 1 percent, particularly in a range of 39 to 470-percent is conferred as compared to a corresponding non-transformed wild type non-human organism.

[40924] Accordingly, in one embodiment, an increase of leucine in a non-human organism, as compared to a corresponding non-transformed wild type non-human organism, is conferred in the process of the invention, if the activity of a polypeptide showing the activity of a pyruvate kinase, or if the activity of the polypeptide At3g04050, preferably represented by SEQ ID NO. 21498, or a homolog or fragment thereof, or if the activity of a polypeptide encoded by a nucleic acid molecule comprising the nucleic acid SEQ ID NO. 21497, preferably the coding region thereof, or a homolog or fragment thereof, e.g. derived from Arabidopsis thaliana, is increased or generated. For example the activity of a nucleic acid molecule or a polypeptide comprising the nucleic acid, preferably the coding region thereof, or polypeptide or the consensus sequence or the polypeptide motif, as depicted in Table I, II or IV, application No. 6, column 5 or 8 in the respective same line as the nucleic acid molecule SEQ ID NO. 21497 or polypeptide SEQ ID NO. 21498, respectively, or a homolog or a fragment thereof, is increased or generated, or if the activity pyruvate kinase is increased or generated in a non-human organism, like a microorganism or a plant cell, plant or part thereof, especially with plastidic localization, whereby the respective line discloses in column 7 the fine chemical leucine. For example, an increase of the leucine of at least 1 percent, particularly in a range of 64 to 1234-percent is conferred as compared to a corresponding non-transformed wild type non-human organism.

[40925] Accordingly, in one embodiment, an increase of valine in a non-human organism, as compared to a corresponding non-transformed wild type non-human organism, is conferred in the process of the invention, if the activity of a polypeptide showing the activity of a pyruvate kinase, or if the activity of the polypeptide At3g04050, preferably represented by SEQ ID NO. 21498, or a homolog or fragment thereof, or if the activity of a polypeptide encoded by a nucleic acid molecule comprising the nucleic acid SEQ ID NO. 21497, preferably the coding region thereof, or a homolog or fragment thereof, e.g. derived from Arabidopsis thaliana, is increased or generated. For example the activity of a nucleic acid molecule or a polypeptide comprising the nucleic acid, preferably the coding region thereof, or polypeptide or the consensus sequence or the polypeptide motif, as depicted in Table I, II or IV, application No. 6, column 5 or 8 in the respective same line as the nucleic acid molecule SEQ ID NO. 21497 or polypeptide SEQ ID NO. 21498, respectively, or a homolog or a fragment thereof, is increased or generated, or if the activity pyruvate kinase is increased or generated in a non-human organism, like a microorganism or a plant cell, plant or part thereof, especially with plastidic localization, whereby the respective line discloses in column 7 the fine chemical valine. For example, an increase of the valine of at least 1-percent, particularly in a range of 35 to 681-percent is conferred as compared to a corresponding non-transformed wild type non-human organism.

[40926] Accordingly, in one embodiment, an increase of isoleucine in a non-human organism, as compared to a corresponding non-transformed wild type non-human organism, is conferred in the process of the invention, if the activity of a polypeptide showing the activity of a thioredoxin family protein, or if the activity of the polypeptide At3g08710, preferably represented by SEQ ID NO. 22250, or a homolog or fragment thereof, or if the activity of a polypeptide encoded by a nucleic acid molecule comprising the nucleic acid SEQ ID NO. 22249, preferably the coding region thereof, or a homolog or fragment thereof, e.g. derived from Arabidopsis thaliana, is increased or generated. For example the activity of a nucleic acid molecule or a polypeptide comprising the nucleic acid, preferably the coding region thereof, or polypeptide or the consensus sequence or the polypeptide motif, as depicted in Table I, II or IV, application No. 6, column 5 or 8 in the respective same line as the nucleic acid molecule SEQ ID NO. 22249 or polypeptide SEQ ID NO. 22250, respectively, or a homolog or a fragment thereof, is increased or generated, or if the activity thioredoxin family protein is increased or generated in a non-human organism, like a microorganism or a plant cell, plant or part thereof, especially with non-targeted localization, whereby the respective line discloses in column 7 the fine chemical isoleucine. For example, an increase of the isoleucine of at least 1 percent, particularly in a range of 34 to 264-percent is conferred as compared to a corresponding non-transformed wild type non-human organism.

[40927] Accordingly, in one embodiment, an increase of leucine in a non-human organism, as compared to a corresponding non-transformed wild type non-human organism, is conferred in the process of the invention, if the activity of a polypeptide showing the activity of a thioredoxin family protein, or if the activity of the polypeptide At3g08710, preferably represented by SEQ ID NO. 22250, or a homolog or fragment thereof, or if the activity of a polypeptide encoded by a nucleic acid molecule comprising the nucleic acid SEQ ID NO. 22249, preferably the coding region thereof, or a homolog or fragment thereof, e.g. derived from Arabidopsis thaliana, is increased or generated. For example the activity of a nucleic acid molecule or a polypeptide comprising the nucleic acid, preferably the coding region thereof, or polypeptide or the consensus sequence or the polypeptide motif, as depicted in Table I, II or IV, application No. 6, column 5 or 8 in the respective same line as the nucleic acid molecule SEQ ID NO. 22249 or polypeptide SEQ ID NO. 22250, respectively, or a homolog or a fragment thereof, is increased or generated, or if the activity thioredoxin family protein is increased or generated in a non-human organism, like a microorganism or a plant cell, plant or part thereof, especially with non-targeted localization, whereby the respective line discloses in column 7 the fine chemical leucine. For example, an increase of the leucine of at least 1 percent, particularly in a range of 53 to 221-percent is conferred as compared to a corresponding non-transformed wild type non-human organism.

[40928] Accordingly, in one embodiment, an increase of isoleucine in a non-human organism, as compared to a corresponding non-transformed wild type non-human organism, is conferred in the process of the invention, if the activity of a polypeptide showing the activity of a harpin-induced family protein, or if the activity of the polypeptide At3g11650, preferably represented by SEQ ID NO. 22612, or a homolog or fragment thereof, or if the activity of a polypeptide encoded by a nucleic acid molecule comprising the nucleic acid SEQ ID NO. 22611, preferably the coding region thereof, or a homolog or fragment thereof, e.g. derived from Arabidopsis thaliana, is increased or generated. For example the activity of a nucleic acid molecule or a polypeptide comprising the nucleic acid, preferably the coding region thereof, or polypeptide or the consensus sequence or the polypeptide motif, as depicted in Table I, II or IV, application No. 6, column 5 or 8 in the respective same line as the nucleic acid molecule SEQ ID NO. 22611 or polypeptide SEQ ID NO. 22612, respectively, or a homolog or a fragment thereof, is increased or generated, or if the activity harpin-induced family protein is increased or generated in a non-human organism, like a microorganism or a plant cell, plant or part thereof, especially with non-targeted localization, whereby the respective line discloses in column 7 the fine chemical isoleucine. For example, an increase of the isoleucine of at least 1 percent, particularly in a range of 50 to 191-percent is conferred as compared to a corresponding non-transformed wild type non-human organism.

[40929] Accordingly, in one embodiment, an increase of leucine in a non-human organism, as compared to a corresponding non-transformed wild type non-human organism, is conferred in the process of the invention, if the activity of a polypeptide showing the activity of a harpin-induced family protein, or if the activity of the polypeptide At3g11650, preferably represented by SEQ ID NO. 22612, or a homolog or fragment thereof, or if the activity of a polypeptide encoded by a nucleic acid molecule comprising the nucleic acid SEQ ID NO. 22611, preferably the coding region thereof, or a homolog or fragment thereof, e.g. derived from Arabidopsis thaliana, is increased or generated. For example the activity of a nucleic acid molecule or a polypeptide comprising the nucleic acid, preferably the coding region thereof, or polypeptide or the consensus sequence or the polypeptide motif, as depicted in Table I, II or IV, application No. 6, column 5 or 8 in the respective same line as the nucleic acid molecule SEQ ID NO. 22611 or polypeptide SEQ ID NO. 22612, respectively, or a homolog or a fragment thereof, is increased or generated, or if the activity harpin-induced family protein is increased or generated in a non-human organism, like a microorganism or a plant cell, plant or part thereof, especially with non-targeted localization, whereby the respective line discloses in column 7 the fine chemical leucine. For example, an increase of the leucine of at least 1 percent, particularly in a range of 52 to 216-percent is conferred as compared to a corresponding non-transformed wild type non-human organism.

[40930] Accordingly, in one embodiment, an increase of isoleucine in a non-human organism, as compared to a corresponding non-transformed wild type non-human organism, is conferred in the process of the invention, if the activity of a polypeptide showing the activity of a DNA mismatch repair protein, or if the activity of the polypeptide At3g18524, preferably represented by SEQ ID NO. 22833, or a homolog or fragment thereof, or if the activity of a polypeptide encoded by a nucleic acid molecule comprising the nucleic acid SEQ ID NO. 22832, preferably the coding region thereof, or a homolog or fragment thereof, e.g. derived from Arabidopsis thaliana, is increased or generated. For example the activity of a nucleic acid molecule or a polypeptide comprising the nucleic acid, preferably the coding region thereof, or polypeptide or the consensus sequence or the polypeptide motif, as depicted in Table I, II or IV, application No. 6, column 5 or 8 in the respective same line as the nucleic acid molecule SEQ ID NO. 22832 or polypeptide SEQ ID NO. 22833, respectively, or a homolog or a fragment thereof, is increased or generated, or if the activity DNA mismatch repair protein is increased or generated in a non-human organism, like a microorganism or a plant cell, plant or part thereof, especially with non-targeted localization, whereby the respective line discloses in column 7 the fine chemical isoleucine. For example, an increase of the isoleucine of at least 1 percent, particularly in a range of 34 to 61-percent is conferred as compared to a corresponding non-transformed wild type non-human organism.

[40931] Accordingly, in one embodiment, an increase of leucine in a non-human organism, as compared to a corresponding non-transformed wild type non-human organism, is conferred in the process of the invention, if the activity of a polypeptide showing the activity of a DNA mismatch repair protein, or if the activity of the polypeptide At3g18524, preferably represented by SEQ ID NO. 22833, or a homolog or fragment thereof, or if the activity of a polypeptide encoded by a nucleic acid molecule comprising the nucleic acid SEQ ID NO. 22832, preferably the coding region thereof, or a homolog or fragment thereof, e.g. derived from Arabidopsis thaliana, is increased or generated. For example the activity of a nucleic acid molecule or a polypeptide comprising the nucleic acid, preferably the coding region thereof, or polypeptide or the consensus sequence or the polypeptide motif, as depicted in Table I, II or IV, application No. 6, column 5 or 8 in the respective same line as the nucleic acid molecule SEQ ID NO. 22832 or polypeptide SEQ ID NO. 22833, respectively, or a homolog or a fragment thereof, is increased or generated, or if the activity DNA mismatch repair protein is increased or generated in a non-human organism, like a microorganism or a plant cell, plant or part thereof, especially with non-targeted localization, whereby the respective line discloses in column 7 the fine chemical leucine. For example, an increase of the leucine of at least 1 percent, particularly in a range of 61 to 87-percent is conferred as compared to a corresponding non-transformed wild type non-human organism.

[40932] Accordingly, in one embodiment, an increase of valine in a non-human organism, as compared to a corresponding non-transformed wild type non-human organism, is conferred in the process of the invention, if the activity of a polypeptide showing the activity of a DNA mismatch repair protein, or if the activity of the polypeptide At3g18524, preferably represented by SEQ ID NO. 22833, or a homolog or fragment thereof, or if the activity of a polypeptide encoded by a nucleic acid molecule comprising the nucleic acid SEQ ID NO. 22832, preferably the coding region thereof, or a homolog or fragment thereof, e.g. derived from Arabidopsis thaliana, is increased or generated. For example the activity of a nucleic acid molecule or a polypeptide comprising the nucleic acid, preferably the coding region thereof, or polypeptide or the consensus sequence or the polypeptide motif, as depicted in Table I, II or IV, application No. 6, column 5 or 8 in the respective same line as the nucleic acid molecule SEQ ID NO. 22832 or polypeptide SEQ ID NO. 22833, respectively, or a homolog or a fragment thereof, is increased or generated, or if the activity DNA mismatch repair protein is increased or generated in a non-human organism, like a microorganism or a plant cell, plant or part thereof, especially with non-targeted localization, whereby the respective line discloses in column 7 the fine chemical valine. For example, an increase of the valine of at least 1 percent, particularly in a range of 21 to 31-percent is conferred as compared to a corresponding non-transformed wild type non-human organism.

[40933] Accordingly, in one embodiment, an increase of isoleucine in a non-human organism, as compared to a corresponding non-transformed wild type non-human organism, is conferred in the process of the invention, if the activity of a polypeptide showing the activity of a protein kinase, or if the activity of the polypeptide At3g23000, preferably represented by SEQ ID NO. 1816, or a homolog or fragment thereof, or if the activity of a polypeptide encoded by a nucleic acid molecule comprising the nucleic acid SEQ ID NO. 1815, preferably the coding region thereof, or a homolog or fragment thereof, e.g. derived from Arabidopsis thaliana, is increased or generated. For example the activity of a nucleic acid molecule or a polypeptide comprising the nucleic acid, preferably the coding region thereof, or polypeptide or the consensus sequence or the polypeptide motif, as depicted in Table I, II or IV, application No. 6, column 5 or 8 in the respective same line as the nucleic acid molecule SEQ ID NO. 1815 or polypeptide SEQ ID NO. 1816, respectively, or a homolog or a fragment thereof, is increased or generated, or if the activity protein kinase is increased or generated in a non-human organism, like a microorganism or a plant cell, plant or part thereof, especially with non-targeted localization, whereby the respective line discloses in column 7 the fine chemical isoleucine. For example, an increase of the isoleucine of at least 1 percent, particularly in a range of 63 to 717-percent is conferred as compared to a corresponding non-transformed wild type non-human organism.

[40934] Accordingly, in one embodiment, an increase of leucine in a non-human organism, as compared to a corresponding non-transformed wild type non-human organism, is conferred in the process of the invention, if the activity of a polypeptide showing the activity of a protein kinase, or if the activity of the polypeptide At3g23000, preferably represented by SEQ ID NO. 1816, or a homolog or fragment thereof, or if the activity of a polypeptide encoded by a nucleic acid molecule comprising the nucleic acid SEQ ID NO. 1815, preferably the coding region thereof, or a homolog or fragment thereof, e.g. derived from Arabidopsis thaliana, is increased or generated. For example the activity of a nucleic acid molecule or a polypeptide comprising the nucleic acid, preferably the coding region thereof, or polypeptide or the consensus sequence or the polypeptide motif, as depicted in Table I, II or IV, application No. 6, column 5 or 8 in the respective same line as the nucleic acid molecule SEQ ID NO. 1815 or polypeptide SEQ ID NO. 1816, respectively, or a homolog or a fragment thereof, is increased or generated, or if the activity protein kinase is increased or generated in a non-human organism, like a microorganism or a plant cell, plant or part thereof, especially with non-targeted localization, whereby the respective line discloses in column 7 the fine chemical leucine. For example, an increase of the leucine of at least 1 percent, particularly in a range of 82 to 562-percent is conferred as compared to a corresponding non-transformed wild type non-human organism.

[40935] Accordingly, in one embodiment, an increase of valine in a non-human organism, as compared to a corresponding non-transformed wild type non-human organism, is conferred in the process of the invention, if the activity of a polypeptide showing the activity of a protein kinase, or if the activity of the polypeptide At3g23000, preferably represented by SEQ ID NO. 1816, or a homolog or fragment thereof, or if the activity of a polypeptide encoded by a nucleic acid molecule comprising the nucleic acid SEQ ID NO. 1815, preferably the coding region thereof, or a homolog or fragment thereof, e.g. derived from Arabidopsis thaliana, is increased or generated. For example the activity of a nucleic acid molecule or a polypeptide comprising the nucleic acid, preferably the coding region thereof, or polypeptide or the consensus sequence or the polypeptide motif, as depicted in Table I, II or IV, application No. 6, column 5 or 8 in the respective same line as the nucleic acid molecule SEQ ID NO. 1815 or polypeptide SEQ ID NO. 1816, respectively, or a homolog or a fragment thereof, is increased or generated, or if the activity protein kinase is increased or generated in a non-human organism, like a microorganism or a plant cell, plant or part thereof, especially with non-targeted localization, whereby the respective line discloses in column 7 the fine chemical valine. For example, an increase of the valine of at least 1 percent, particularly in a range of 42 to 249-percent is conferred as compared to a corresponding non-transformed wild type non-human organism.

[40936] Accordingly, in one embodiment, an increase of isoleucine in a non-human organism, as compared to a corresponding non-transformed wild type non-human organism, is conferred in the process of the invention, if the activity of a polypeptide showing the activity of a eukaryotic translation initiation factor, or if the activity of the polypeptide At3g26400, preferably represented by SEQ ID NO. 68728, or a homolog or fragment thereof, or if the activity of a polypeptide encoded by a nucleic acid molecule comprising the nucleic acid SEQ ID NO. 68727, preferably the coding region thereof, or a homolog or fragment thereof, e.g. derived from Arabidopsis thaliana, is increased or generated. For example the activity of a nucleic acid molecule or a polypeptide comprising the nucleic acid, preferably the coding region thereof, or polypeptide or the consensus sequence or the polypeptide motif, as depicted in Table I, II or IV, application No. 6, column 5 or 8 in the respective same line as the nucleic acid molecule SEQ ID NO. 68727 or polypeptide SEQ ID NO. 68728, respectively, or a homolog or a fragment thereof, is increased or generated, or if the activity eukaryotic translation initiation factor is increased or generated in a non-human organism, like a microorganism or a plant cell, plant or part thereof, especially with non-targeted localization, whereby the respective line discloses in column 7 the fine chemical isoleucine. For example, an increase of the isoleucine of at least 1 percent, particularly in a range of 46 to 133-percent is conferred as compared to a corresponding non-transformed wild type non-human organism.

[40937] Accordingly, in one embodiment, an increase of leucine in a non-human organism, as compared to a corresponding non-transformed wild type non-human organism, is conferred in the process of the invention, if the activity of a polypeptide showing the activity of a eukaryotic translation initiation factor, or if the activity of the polypeptide At3g26400, preferably represented by SEQ ID NO. 68728, or a homolog or fragment thereof, or if the activity of a polypeptide encoded by a nucleic acid molecule comprising the nucleic acid SEQ ID NO. 68727, preferably the coding region thereof, or a homolog or fragment thereof, e.g. derived from Arabidopsis thaliana, is increased or generated. For example the activity of a nucleic acid molecule or a polypeptide comprising the nucleic acid, preferably the coding region thereof, or polypeptide or the consensus sequence or the polypeptide motif, as depicted in Table I, II or IV, application No. 6, column 5 or 8 in the respective same line as the nucleic acid molecule SEQ ID NO. 68727 or polypeptide SEQ ID NO. 68728, respectively, or a homolog or a fragment thereof, is increased or generated, or if the activity eukaryotic translation initiation factor is increased or generated in a non-human organism, like a microorganism or a plant cell, plant or part thereof, especially with non-targeted localization, whereby the respective line discloses in column 7 the fine chemical leucine. For example, an increase of the leucine of at least 1 percent, particularly in a range of 51 to 129-percent is conferred as compared to a corresponding non-transformed wild type non-human organism.

[40938] Accordingly, in one embodiment, an increase of valine in a non-human organism, as compared to a corresponding non-transformed wild type non-human organism, is conferred in the process of the invention, if the activity of a polypeptide showing the activity of a eukaryotic translation initiation factor, or if the activity of the polypeptide At3g26400, preferably represented by SEQ ID NO. 68728, or a homolog or fragment thereof, or if the activity of a polypeptide encoded by a nucleic acid molecule comprising the nucleic acid SEQ ID NO. 68727, preferably the coding region thereof, or a homolog or fragment thereof, e.g. derived from Arabidopsis thaliana, is increased or generated. For example the activity of a nucleic acid molecule or a polypeptide comprising the nucleic acid, preferably the coding region thereof, or polypeptide or the consensus sequence or the polypeptide motif, as depicted in Table I, II or IV, application No. 6, column 5 or 8 in the respective same line as the nucleic acid molecule SEQ ID NO. 68727 or polypeptide SEQ ID NO. 68728, respectively, or a homolog or a fragment thereof, is increased or generated, or if the activity eukaryotic translation initiation factor is increased or generated in a non-human organism, like a microorganism or a plant cell, plant or part thereof, especially with non-targeted localization, whereby the respective line discloses in column 7 the fine chemical valine. For example, an increase of the valine of at least 1 percent, particularly in a range of 32 to 76-percent is conferred as compared to a corresponding non-transformed wild type non-human organism.

[40939] Accordingly, in one embodiment, an increase of isoleucine in a non-human organism, as compared to a corresponding non-transformed wild type non-human organism, is conferred in the process of the invention, if the activity of a polypeptide showing the activity of a glycosyl transferase, or if the activity of the polypeptide At3g27540, preferably represented by SEQ ID NO. 68778, or a homolog or fragment thereof, or if the activity of a polypeptide encoded by a nucleic acid molecule comprising the nucleic acid SEQ ID NO. 68777, preferably the coding region thereof, or a homolog or fragment thereof, e.g. derived from Arabidopsis thaliana, is increased or generated. For example the activity of a nucleic acid molecule or a polypeptide comprising the nucleic acid, preferably the coding region thereof, or polypeptide or the consensus sequence or the polypeptide motif, as depicted in Table I, II or IV, application No. 6, column 5 or 8 in the respective same line as the nucleic acid molecule SEQ ID NO. 68777 or polypeptide SEQ ID NO. 68778, respectively, or a homolog or a fragment thereof, is increased or generated, or if the activity glycosyl transferase is increased or generated in a non-human organism, like a microorganism or a plant cell, plant or part thereof, especially with non-targeted localization, whereby the respective line discloses in column 7 the fine chemical isoleucine. For example, an increase of the isoleucine of at least 1 percent, particularly in a range of 79 to 428-percent is conferred as compared to a corresponding non-transformed wild type non-human organism.

[40940] Accordingly, in one embodiment, an increase of leucine in a non-human organism, as compared to a corresponding non-transformed wild type non-human organism, is conferred in the process of the invention, if the activity of a polypeptide showing the activity of a glycosyl transferase, or if the activity of the polypeptide At3g27540, preferably represented by SEQ ID NO. 68778, or a homolog or fragment thereof, or if the activity of a polypeptide encoded by a nucleic acid molecule comprising the nucleic acid SEQ ID NO. 68777, preferably the coding region thereof, or a homolog or fragment thereof, e.g. derived from Arabidopsis thaliana, is increased or generated. For example the activity of a nucleic acid molecule or a polypeptide comprising the nucleic acid, preferably the coding region thereof, or polypeptide or the consensus sequence or the polypeptide motif, as depicted in Table I, II or IV, application No. 6, column 5 or 8 in the respective same line as the nucleic acid molecule SEQ ID NO. 68777 or polypeptide SEQ ID NO. 68778, respectively, or a homolog or a fragment thereof, is increased or generated, or if the activity glycosyl transferase is increased or generated in a non-human organism, like a microorganism or a plant cell, plant or part thereof, especially with non-targeted localization, whereby the respective line discloses in column 7 the fine chemical leucine. For example, an increase of the leucine of at least 1 percent, particularly in a range of 89 to 469-percent is conferred as compared to a corresponding non-transformed wild type non-human organism.

[40941] Accordingly, in one embodiment, an increase of valine in a non-human organism, as compared to a corresponding non-transformed wild type non-human organism, is conferred in the process of the invention, if the activity of a polypeptide showing the activity of a glycosyl transferase, or if the activity of the polypeptide At3g27540, preferably represented by SEQ ID NO. 68778, or a homolog or fragment thereof, or if the activity of a polypeptide encoded by a nucleic acid molecule comprising the nucleic acid SEQ ID NO. 68777, preferably the coding region thereof, or a homolog or fragment thereof, e.g. derived from Arabidopsis thaliana, is increased or generated. For example the activity of a nucleic acid molecule or a polypeptide comprising the nucleic acid, preferably the coding region thereof, or polypeptide or the consensus sequence or the polypeptide motif, as depicted in Table I, II or IV, application No. 6, column 5 or 8 in the respective same line as the nucleic acid molecule SEQ ID NO. 68777 or polypeptide SEQ ID NO. 68778, respectively, or a homolog or a fragment thereof, is increased or generated, or if the activity glycosyl transferase is increased or generated in a non-human organism, like a microorganism or a plant cell, plant or part thereof, especially with non-targeted localization, whereby the respective line discloses in column 7 the fine chemical valine. For example, an increase of the valine of at least 1 percent, particularly in a range of 26 to 161-percent is conferred as compared to a corresponding non-transformed wild type non-human organism.

[40942] Accordingly, in one embodiment, an increase of isoleucine in a non-human organism, as compared to a corresponding non-transformed wild type non-human organism, is conferred in the process of the invention, if the activity of a polypeptide showing the activity of a auxin response factor, or if the activity of the polypeptide At3g61830, preferably represented by SEQ ID NO. 2368, or a homolog or fragment thereof, or if the activity of a polypeptide encoded by a nucleic acid molecule comprising the nucleic acid SEQ ID NO. 2367, preferably the coding region thereof, or a homolog or fragment thereof, e.g. derived from Arabidopsis thaliana, is increased or generated. For example the activity of a nucleic acid molecule or a polypeptide comprising the nucleic acid, preferably the coding region thereof, or polypeptide or the consensus sequence or the polypeptide motif, as depicted in Table I, II or IV, application No. 6, column 5 or 8 in the respective same line as the nucleic acid molecule SEQ ID NO. 2367 or polypeptide SEQ ID NO. 2368, respectively, or a homolog or a fragment thereof, is increased or generated, or if the activity auxin response factor is increased or generated in a non-human organism, like a microorganism or a plant cell, plant or part thereof, especially with non-targeted localization, whereby the respective line discloses in column 7 the fine chemical isoleucine. For example, an increase of the isoleucine of at least 1 percent, particularly in a range of 39 to 965-percent is conferred as compared to a corresponding non-transformed wild type non-human organism.

[40943] Accordingly, in one embodiment, an increase of leucine in a non-human organism, as compared to a corresponding non-transformed wild type non-human organism, is conferred in the process of the invention, if the activity of a polypeptide showing the activity of a auxin response factor, or if the activity of the polypeptide At3g61830, preferably represented by SEQ ID NO. 2368, or a homolog or fragment thereof, or if the activity of a polypeptide encoded by a nucleic acid molecule comprising the nucleic acid SEQ ID NO. 2367, preferably the coding region thereof, or a homolog or fragment thereof, e.g. derived from Arabidopsis thaliana, is increased or generated. For example the activity of a nucleic acid molecule or a polypeptide comprising the nucleic acid, preferably the coding region thereof, or polypeptide or the consensus sequence or the polypeptide motif, as depicted in Table I, II or IV, application No. 6, column 5 or 8 in the respective same line as the nucleic acid molecule SEQ ID NO. 2367 or polypeptide SEQ ID NO. 2368, respectively, or a homolog or a fragment thereof, is increased or generated, or if the activity auxin response factor is increased or generated in a non-human organism, like a microorganism or a plant cell, plant or part thereof, especially with non-targeted localization, whereby the respective line discloses in column 7 the fine chemical leucine. For example, an increase of the leucine of at least 1 percent, particularly in a range of 67 to 1444-percent is conferred as compared to a corresponding non-transformed wild type non-human organism.

[40944] Accordingly, in one embodiment, an increase of valine in a non-human organism, as compared to a corresponding non-transformed wild type non-human organism, is conferred in the process of the invention, if the activity of a polypeptide showing the activity of a auxin response factor, or if the activity of the polypeptide At3g61830, preferably represented by SEQ ID NO. 2368, or a homolog or fragment thereof, or if the activity of a polypeptide encoded by a nucleic acid molecule comprising the nucleic acid SEQ ID NO. 2367, preferably the coding region thereof, or a homolog or fragment thereof, e.g. derived from Arabidopsis thaliana, is increased or generated. For example the activity of a nucleic acid molecule or a polypeptide comprising the nucleic acid, preferably the coding region thereof, or polypeptide or the consensus sequence or the polypeptide motif, as depicted in Table I, II or IV, application No. 6, column 5 or 8 in the respective same line as the nucleic acid molecule SEQ ID NO. 2367 or polypeptide SEQ ID NO. 2368, respectively, or a homolog or a fragment thereof, is increased or generated, or if the activity auxin response factor is increased or generated in a non-human organism, like a microorganism or a plant cell, plant or part thereof, especially with non-targeted localization, whereby the respective line discloses in column 7 the fine chemical valine. For example, an increase of the valine of at least 1 percent, particularly in a range of 27 to 397-percent is conferred as compared to a corresponding non-transformed wild type non-human organism.

[40945] Accordingly, in one embodiment, an increase of isoleucine in a non-human organism, as compared to a corresponding non-transformed wild type non-human organism, is conferred in the process of the invention, if the activity of a polypeptide showing the activity of a glutaredoxin, or if the activity of the polypeptide At3g62950, preferably represented by SEQ ID NO. 2936, or a homolog or fragment thereof, or if the activity of a polypeptide encoded by a nucleic acid molecule comprising the nucleic acid SEQ ID NO. 2935, preferably the coding region thereof, or a homolog or fragment thereof, e.g. derived from Arabidopsis thaliana, is increased or generated. For example the activity of a nucleic acid molecule or a polypeptide comprising the nucleic acid, preferably the coding region thereof, or polypeptide or the consensus sequence or the polypeptide motif, as depicted in Table I, II or IV, application No. 6, column 5 or 8 in the respective same line as the nucleic acid molecule SEQ ID NO. 2935 or polypeptide SEQ ID NO. 2936, respectively, or a homolog or a fragment thereof, is increased or generated, or if the activity glutaredoxin is increased or generated in a non-human organism, like a microorganism or a plant cell, plant or part thereof, especially with non-targeted localization, whereby the respective line discloses in column 7 the fine chemical isoleucine. For example, an increase of the isoleucine of at least 1 percent, particularly in a range of 60 to 274-percent is conferred as compared to a corresponding non-transformed wild type non-human organism.

[40946] Accordingly, in one embodiment, an increase of leucine in a non-human organism, as compared to a corresponding non-transformed wild type non-human organism, is conferred in the process of the invention, if the activity of a polypeptide showing the activity of a glutaredoxin, or if the activity of the polypeptide At3g62950, preferably represented by SEQ ID NO. 2936, or a homolog or fragment thereof, or if the activity of a polypeptide encoded by a nucleic acid molecule comprising the nucleic acid SEQ ID NO. 2935, preferably the coding region thereof, or a homolog or fragment thereof, e.g. derived from Arabidopsis thaliana, is increased or generated.

[40947] For example the activity of a nucleic acid molecule or a polypeptide comprising the nucleic acid, preferably the coding region thereof, or polypeptide or the consensus sequence or the polypeptide motif, as depicted in Table I, II or IV, application No. 6, column 5 or 8 in the respective same line as the nucleic acid molecule SEQ ID NO. 2935 or polypeptide SEQ ID NO. 2936, respectively, or a homolog or a fragment thereof, is increased or generated, or if the activity glutaredoxin is increased or generated in a non-human organism, like a microorganism or a plant cell, plant or part thereof, especially with non-targeted localization, whereby the respective line discloses in column 7 the fine chemical leucine. For example, an increase of the leucine of at least 1 percent, particularly in a range of 85 to 337-percent is conferred as compared to a corresponding non-transformed wild type non-human organism.

[40948] Accordingly, in one embodiment, an increase of valine in a non-human organism, as compared to a corresponding non-transformed wild type non-human organism, is conferred in the process of the invention, if the activity of a polypeptide showing the activity of a glutaredoxin, or if the activity of the polypeptide At3g62950, preferably represented by SEQ ID NO. 2936, or a homolog or fragment thereof, or if the activity of a polypeptide encoded by a nucleic acid molecule comprising the nucleic acid SEQ ID NO. 2935, preferably the coding region thereof, or a homolog or fragment thereof, e.g. derived from Arabidopsis thaliana, is increased or generated. For example the activity of a nucleic acid molecule or a polypeptide comprising the nucleic acid, preferably the coding region thereof, or polypeptide or the consensus sequence or the polypeptide motif, as depicted in Table I, II or IV, application No. 6, column 5 or 8 in the respective same line as the nucleic acid molecule SEQ ID NO. 2935 or polypeptide SEQ ID NO. 2936, respectively, or a homolog or a fragment thereof, is increased or generated, or if the activity glutaredoxin is increased or generated in a non-human organism, like a microorganism or a plant cell, plant or part thereof, especially with non-targeted localization, whereby the respective line discloses in column 7 the fine chemical valine. For example, an increase of the valine of at least 1 percent, particularly in a range of 37 to 118-percent is conferred as compared to a corresponding non-transformed wild type non-human organism.

[40949] Accordingly, in one embodiment, an increase of isoleucine in a non-human organism, as compared to a corresponding non-transformed wild type non-human organism, is conferred in the process of the invention, if the activity of a polypeptide showing the activity of a heat shock transcription factor, or if the activity of the polypeptide At4g18880, preferably represented by SEQ ID NO. 24233, or a homolog or fragment thereof, or if the activity of a polypeptide encoded by a nucleic acid molecule comprising the nucleic acid SEQ ID NO. 24232, preferably the coding region thereof, or a homolog or fragment thereof, e.g. derived from Arabidopsis thaliana, is increased or generated. For example the activity of a nucleic acid molecule or a polypeptide comprising the nucleic acid, preferably the coding region thereof, or polypeptide or the consensus sequence or the polypeptide motif, as depicted in Table I, II or IV, application No. 6, column 5 or 8 in the respective same line as the nucleic acid molecule SEQ ID NO. 24232 or polypeptide SEQ ID NO. 24233, respectively, or a homolog or a fragment thereof, is increased or generated, or if the activity heat shock transcription factor is increased or generated in a non-human organism, like a microorganism or a plant cell, plant or part thereof, especially with non-targeted localization, whereby the respective line discloses in column 7 the fine chemical isoleucine. For example, an increase of the isoleucine of at least 1 percent, particularly in a range of 52 to 136-percent is conferred as compared to a corresponding non-transformed wild type non-human organism.

[40950] Accordingly, in one embodiment, an increase of valine in a non-human organism, as compared to a corresponding non-transformed wild type non-human organism, is conferred in the process of the invention, if the activity of a polypeptide showing the activity of a protein phosphatase, or if the activity of the polypeptide At4g26080, preferably represented by SEQ ID NO. 68850, or a homolog or fragment thereof, or if the activity of a polypeptide encoded by a nucleic acid molecule comprising the nucleic acid SEQ ID NO. 68849, preferably the coding region thereof, or a homolog or fragment thereof, e.g. derived from Arabidopsis thaliana, is increased or generated. For example the activity of a nucleic acid molecule or a polypeptide comprising the nucleic acid, preferably the coding region thereof, or polypeptide or the consensus sequence or the polypeptide motif, as depicted in Table I, II or IV, application No. 6, column 5 or 8 in the respective same line as the nucleic acid molecule SEQ ID NO. 68849 or polypeptide SEQ ID NO. 68850, respectively, or a homolog or a fragment thereof, is increased or generated, or if the activity protein phosphatase is increased or generated in a non-human organism, like a microorganism or a plant cell, plant or part thereof, especially with non-targeted localization, whereby the respective line discloses in column 7 the fine chemical valine. For example, an increase of the valine of at least 1 percent, particularly in a range of 21 to 56-percent is conferred as compared to a corresponding non-transformed wild type non-human organism.

[40951] Accordingly, in one embodiment, an increase of isoleucine in a non-human organism, as compared to a corresponding non-transformed wild type non-human organism, is conferred in the process of the invention, if the activity of a polypeptide showing the activity of a At4g32480-protein, or if the activity of the polypeptide At4g32480, preferably represented by SEQ ID NO. 4041, or a homolog or fragment thereof, or if the activity of a polypeptide encoded by a nucleic acid molecule comprising the nucleic acid SEQ ID NO. 4040, preferably the coding region thereof, or a homolog or fragment thereof, e.g. derived from Arabidopsis thaliana, is increased or generated. For example the activity of a nucleic acid molecule or a polypeptide comprising the nucleic acid, preferably the coding region thereof, or polypeptide or the consensus sequence or the polypeptide motif, as depicted in Table I, II or IV, application No. 6, column 5 or 8 in the respective same line as the nucleic acid molecule SEQ ID NO. 4040 or polypeptide SEQ ID NO. 4041, respectively, or a homolog or a fragment thereof, is increased or generated, or if the activity At4g32480-protein is increased or generated in a non-human organism, like a microorganism or a plant cell, plant or part thereof, especially with non-targeted localization, whereby the respective line discloses in column 7 the fine chemical isoleucine. For example, an increase of the isoleucine of at least 1 percent, particularly in a range of 74 to 355-percent is conferred as compared to a corresponding non-transformed wild type non-human organism.

[40952] Accordingly, in one embodiment, an increase of leucine in a non-human organism, as compared to a corresponding non-transformed wild type non-human organism, is conferred in the process of the invention, if the activity of a polypeptide showing the activity of a At4g32480-protein, or if the activity of the polypeptide At4g32480, preferably represented by SEQ ID NO. 4041, or a homolog or fragment thereof, or if the activity of a polypeptide encoded by a nucleic acid molecule comprising the nucleic acid SEQ ID NO. 4040, preferably the coding region thereof, or a homolog or fragment thereof, e.g. derived from Arabidopsis thaliana, is increased or generated.

[40953] For example the activity of a nucleic acid molecule or a polypeptide comprising the nucleic acid, preferably the coding region thereof, or polypeptide or the consensus sequence or the polypeptide motif, as depicted in Table I, II or IV, application No. 6, column 5 or 8 in the respective same line as the nucleic acid molecule SEQ ID NO. 4040 or polypeptide SEQ ID NO. 4041, respectively, or a homolog or a fragment thereof, is increased or generated, or if the activity At4g32480-protein is increased or generated in a non-human organism, like a microorganism or a plant cell, plant or part thereof, especially with non-targeted localization, whereby the respective line discloses in column 7 the fine chemical leucine. For example, an increase of the leucine of at least 1 percent, particularly in a range of 53 to 320-percent is conferred as compared to a corresponding non-transformed wild type non-human organism.

[40954] Accordingly, in one embodiment, an increase of valine in a non-human organism, as compared to a corresponding non-transformed wild type non-human organism, is conferred in the process of the invention, if the activity of a polypeptide showing the activity of a At4g32480-protein, or if the activity of the polypeptide At4g32480, preferably represented by SEQ ID NO. 4041, or a homolog or fragment thereof, or if the activity of a polypeptide encoded by a nucleic acid molecule comprising the nucleic acid SEQ ID NO. 4040, preferably the coding region thereof, or a homolog or fragment thereof, e.g. derived from Arabidopsis thaliana, is increased or generated. For example the activity of a nucleic acid molecule or a polypeptide comprising the nucleic acid, preferably the coding region thereof, or polypeptide or the consensus sequence or the polypeptide motif, as depicted in Table I, II or IV, application No. 6, column 5 or 8 in the respective same line as the nucleic acid molecule SEQ ID NO. 4040 or polypeptide SEQ ID NO. 4041, respectively, or a homolog or a fragment thereof, is increased or generated, or if the activity At4g32480-protein is increased or generated in a non-human organism, like a microorganism or a plant cell, plant or part thereof, especially with non-targeted localization, whereby the respective line discloses in column 7 the fine chemical valine. For example, an increase of the valine of at least 1 percent, particularly in a range of 29 to 286-percent is conferred as compared to a corresponding non-transformed wild type non-human organism.

[40955] Accordingly, in one embodiment, an increase of isoleucine in a non-human organism, as compared to a corresponding non-transformed wild type non-human organism, is conferred in the process of the invention, if the activity of a polypeptide showing the activity of a cyclin D , or if the activity of the polypeptide At4g34160, preferably represented by SEQ ID NO. 24312, or a homolog or fragment thereof, or if the activity of a polypeptide encoded by a nucleic acid molecule comprising the nucleic acid SEQ ID NO. 24311, preferably the coding region thereof, or a homolog or fragment thereof, e.g. derived from Arabidopsis thaliana, is increased or generated. For example the activity of a nucleic acid molecule or a polypeptide comprising the nucleic acid, preferably the coding region thereof, or polypeptide or the consensus sequence or the polypeptide motif, as depicted in Table I, II or IV, application No. 6, column 5 or 8 in the respective same line as the nucleic acid molecule SEQ ID NO. 24311 or polypeptide SEQ ID NO. 24312, respectively, or a homolog or a fragment thereof, is increased or generated, or if the activity cyclin D is increased or generated in a non-human organism, like a microorganism or a plant cell, plant or part thereof, especially with non-targeted localization, whereby the respective line discloses in column 7 the fine chemical isoleucine. For example, an increase of the isoleucine of at least 1 percent, particularly in a range of 46 to 199-percent is conferred as compared to a corresponding non-transformed wild type non-human organism.

[40956] Accordingly, in one embodiment, an increase of leucine in a non-human organism, as compared to a corresponding non-transformed wild type non-human organism, is conferred in the process of the invention, if the activity of a polypeptide showing the activity of a cyclin D , or if the activity of the polypeptide At4g34160, preferably represented by SEQ ID NO. 24312, or a homolog or fragment thereof, or if the activity of a polypeptide encoded by a nucleic acid molecule comprising the nucleic acid SEQ ID NO. 24311, preferably the coding region thereof, or a homolog or fragment thereof, e.g. derived from Arabidopsis thaliana, is increased or generated. For example the activity of a nucleic acid molecule or a polypeptide comprising the nucleic acid, preferably the coding region thereof, or polypeptide or the consensus sequence or the polypeptide motif, as depicted in Table I, II or IV, application No. 6, column 5 or 8 in the respective same line as the nucleic acid molecule SEQ ID NO. 24311 or polypeptide SEQ ID NO. 24312, respectively, or a homolog or a fragment thereof, is increased or generated, or if the activity cyclin D is increased or generated in a non-human organism, like a microorganism or a plant cell, plant or part thereof, especially with non-targeted localization, whereby the respective line discloses in column 7 the fine chemical leucine. For example, an increase of the leucine of at least 1 percent, particularly in a range of 83 to 188-percent is conferred as compared to a corresponding non-transformed wild type non-human organism.

[40957] Accordingly, in one embodiment, an increase of valine in a non-human organism, as compared to a corresponding non-transformed wild type non-human organism, is conferred in the process of the invention, if the activity of a polypeptide showing the activity of a cyclin D , or if the activity of the polypeptide At4g34160, preferably represented by SEQ ID NO. 24312, or a homolog or fragment thereof, or if the activity of a polypeptide encoded by a nucleic acid molecule comprising the nucleic acid SEQ ID NO. 24311, preferably the coding region thereof, or a homolog or fragment thereof, e.g. derived from Arabidopsis thaliana, is increased or generated. For example the activity of a nucleic acid molecule or a polypeptide comprising the nucleic acid, preferably the coding region thereof, or polypeptide or the consensus sequence or the polypeptide motif, as depicted in Table I, II or IV, application No. 6, column 5 or 8 in the respective same line as the nucleic acid molecule SEQ ID NO. 24311 or polypeptide SEQ ID NO. 24312, respectively, or a homolog or a fragment thereof, is increased or generated, or if the activity cyclin D is increased or generated in a non-human organism, like a microorganism or a plant cell, plant or part thereof, especially with non-targeted localization, whereby the respective line discloses in column 7 the fine chemical valine. For example, an increase of the valine of at least 1 percent, particularly in a range of 23 to 115-percent is conferred as compared to a corresponding non-transformed wild type non-human organism.

[40958] Accordingly, in one embodiment, an increase of isoleucine in a non-human organism, as compared to a corresponding non-transformed wild type non-human organism, is conferred in the process of the invention, if the activity of a polypeptide showing the activity of a calcium-dependent protein kinase, or if the activity of the polypeptide At4g35310, preferably represented by SEQ ID NO. 4349, or a homolog or fragment thereof, or if the activity of a polypeptide encoded by a nucleic acid molecule comprising the nucleic acid SEQ ID NO. 4348, preferably the coding region thereof, or a homolog or fragment thereof, e.g. derived from Arabidopsis thaliana, is increased or generated. For example the activity of a nucleic acid molecule or a polypeptide comprising the nucleic acid, preferably the coding region thereof, or polypeptide or the consensus sequence or the polypeptide motif, as depicted in Table I, II or IV, application No. 6, column 5 or 8 in the respective same line as the nucleic acid molecule SEQ ID NO. 4348 or polypeptide SEQ ID NO. 4349, respectively, or a homolog or a fragment thereof, is increased or generated, or if the activity calcium-dependent protein kinase is increased or generated in a non-human organism, like a microorganism or a plant cell, plant or part thereof, especially with non-targeted localization, whereby the respective line discloses in column 7 the fine chemical isoleucine. For example, an increase of the isoleucine of at least 1 percent, particularly in a range of 35 to 645-percent is conferred as compared to a corresponding non-transformed wild type non-human organism.

[40959] Accordingly, in one embodiment, an increase of leucine in a non-human organism, as compared to a corresponding non-transformed wild type non-human organism, is conferred in the process of the invention, if the activity of a polypeptide showing the activity of a calcium-dependent protein kinase, or if the activity of the polypeptide At4g35310, preferably represented by SEQ ID NO. 4349, or a homolog or fragment thereof, or if the activity of a polypeptide encoded by a nucleic acid molecule comprising the nucleic acid SEQ ID NO. 4348, preferably the coding region thereof, or a homolog or fragment thereof, e.g. derived from Arabidopsis thaliana, is increased or generated. For example the activity of a nucleic acid molecule or a polypeptide comprising the nucleic acid, preferably the coding region thereof, or polypeptide or the consensus sequence or the polypeptide motif, as depicted in Table I, II or IV, application No. 6, column 5 or 8 in the respective same line as the nucleic acid molecule SEQ ID NO. 4348 or polypeptide SEQ ID NO. 4349, respectively, or a homolog or a fragment thereof, is increased or generated, or if the activity calcium-dependent protein kinase is increased or generated in a non-human organism, like a microorganism or a plant cell, plant or part thereof, especially with non-targeted localization, whereby the respective line discloses in column 7 the fine chemical leucine. For example, an increase of the leucine of at least 1 percent, particularly in a range of 164 to 698-percent is conferred as compared to a corresponding non-transformed wild type non-human organism.

[40960] Accordingly, in one embodiment, an increase of valine in a non-human organism, as compared to a corresponding non-transformed wild type non-human organism, is conferred in the process of the invention, if the activity of a polypeptide showing the activity of a calcium-dependent protein kinase, or if the activity of the polypeptide At4g35310, preferably represented by SEQ ID NO. 4349, or a homolog or fragment thereof, or if the activity of a polypeptide encoded by a nucleic acid molecule comprising the nucleic acid SEQ ID NO. 4348, preferably the coding region thereof, or a homolog or fragment thereof, e.g. derived from Arabidopsis thaliana, is increased or generated. For example the activity of a nucleic acid molecule or a polypeptide comprising the nucleic acid, preferably the coding region thereof, or polypeptide or the consensus sequence or the polypeptide motif, as depicted in Table I, II or IV, application No. 6, column 5 or 8 in the respective same line as the nucleic acid molecule SEQ ID NO. 4348 or polypeptide SEQ ID NO. 4349, respectively, or a homolog or a fragment thereof, is increased or generated, or if the activity calcium-dependent protein kinase is increased or generated in a non-human organism, like a microorganism or a plant cell, plant or part thereof, especially with non-targeted localization, whereby the respective line discloses in column 7 the fine chemical valine. For example, an increase of the valine of at least 1 percent, particularly in a range of 39 to 329-percent is conferred as compared to a corresponding non-transformed wild type non-human organism.

[40961] Accordingly, in one embodiment, an increase of isoleucine in a non-human organism, as compared to a corresponding non-transformed wild type non-human organism, is conferred in the process of the invention, if the activity of a polypeptide showing the activity of a protein phosphatase, or if the activity of the polypeptide At5g02760, preferably represented by SEQ ID NO. 68988, or a homolog or fragment thereof, or if the activity of a polypeptide encoded by a nucleic acid molecule comprising the nucleic acid SEQ ID NO. 68987, preferably the coding region thereof, or a homolog or fragment thereof, e.g. derived from Arabidopsis thaliana, is increased or generated. For example the activity of a nucleic acid molecule or a polypeptide comprising the nucleic acid, preferably the coding region thereof, or polypeptide or the consensus sequence or the polypeptide motif, as depicted in Table I, II or IV, application No. 6, column 5 or 8 in the respective same line as the nucleic acid molecule SEQ ID NO. 68987 or polypeptide SEQ ID NO. 68988, respectively, or a homolog or a fragment thereof, is increased or generated, or if the activity protein phosphatase is increased or generated in a non-human organism, like a microorganism or a plant cell, plant or part thereof, especially with non-targeted localization, whereby the respective line discloses in column 7 the fine chemical isoleucine. For example, an increase of the isoleucine of at least 1 percent, particularly in a range of 40 to 305-percent is conferred as compared to a corresponding non-transformed wild type non-human organism.

[40962] Accordingly, in one embodiment, an increase of isoleucine in a non-human organism, as compared to a corresponding non-transformed wild type non-human organism, is conferred in the process of the invention, if the activity of a polypeptide showing the activity of a At5g16650-protein, or if the activity of the polypeptide At5g16650, preferably represented by SEQ ID NO. 25284, or a homolog or fragment thereof, or if the activity of a polypeptide encoded by a nucleic acid molecule comprising the nucleic acid SEQ ID NO. 25283, preferably the coding region thereof, or a homolog or fragment thereof, e.g. derived from Arabidopsis thaliana, is increased or generated. For example the activity of a nucleic acid molecule or a polypeptide comprising the nucleic acid, preferably the coding region thereof, or polypeptide or the consensus sequence or the polypeptide motif, as depicted in Table I, II or IV, application No. 6, column 5 or 8 in the respective same line as the nucleic acid molecule SEQ ID NO. 25283 or polypeptide SEQ ID NO. 25284, respectively, or a homolog or a fragment thereof, is increased or generated, or if the activity At5g16650-protein is increased or generated in a non-human organism, like a microorganism or a plant cell, plant or part thereof, especially with non-targeted localization, whereby the respective line discloses in column 7 the fine chemical isoleucine. For example, an increase of the isoleucine of at least 1 percent, particularly in a range of 48 to 142-percent is conferred as compared to a corresponding non-transformed wild type non-human organism.

[40963] Accordingly, in one embodiment, an increase of valine in a non-human organism, as compared to a corresponding non-transformed wild type non-human organism, is conferred in the process of the invention, if the activity of a polypeptide showing the activity of a At5g16650-protein, or if the activity of the polypeptide At5g16650, preferably represented by SEQ ID NO. 25284, or a homolog or fragment thereof, or if the activity of a polypeptide encoded by a nucleic acid molecule comprising the nucleic acid SEQ ID NO. 25283, preferably the coding region thereof, or a homolog or fragment thereof, e.g. derived from Arabidopsis thaliana, is increased or generated.

[40964] For example the activity of a nucleic acid molecule or a polypeptide comprising the nucleic acid, preferably the coding region thereof, or polypeptide or the consensus sequence or the polypeptide motif, as depicted in Table I, II or IV, application No. 6, column 5 or 8 in the respective same line as the nucleic acid molecule SEQ ID NO. 25283 or polypeptide SEQ ID NO. 25284, respectively, or a homolog or a fragment thereof, is increased or generated, or if the activity At5g16650-protein is increased or generated in a non-human organism, like a microorganism or a plant cell, plant or part thereof, especially with non-targeted localization, whereby the respective line discloses in column 7 the fine chemical valine. For example, an increase of the valine of at least 1 percent, particularly in a range of 24 to 86-percent is conferred as compared to a corresponding non-transformed wild type non-human organism.

[40965] Accordingly, in one embodiment, an increase of valine in a non-human organism, as compared to a corresponding non-transformed wild type non-human organism, is conferred in the process of the invention, if the activity of a polypeptide showing the activity of a monothiol glutaredoxin, or if the activity of the polypeptide At5g18600, preferably represented by SEQ ID NO. 4905, or a homolog or fragment thereof, or if the activity of a polypeptide encoded by a nucleic acid molecule comprising the nucleic acid SEQ ID NO. 4904, preferably the coding region thereof, or a homolog or fragment thereof, e.g. derived from Arabidopsis thaliana, is increased or generated. For example the activity of a nucleic acid molecule or a polypeptide comprising the nucleic acid, preferably the coding region thereof, or polypeptide or the consensus sequence or the polypeptide motif, as depicted in Table I, II or IV, application No. 6, column 5 or 8 in the respective same line as the nucleic acid molecule SEQ ID NO. 4904 or polypeptide SEQ ID NO. 4905, respectively, or a homolog or a fragment thereof, is increased or generated, or if the activity monothiol glutaredoxin is increased or generated in a non-human organism, like a microorganism or a plant cell, plant or part thereof, especially with non-targeted localization, whereby the respective line discloses in column 7 the fine chemical valine. For example, an increase of the valine of at least 1 percent, particularly in a range of 31 to 59-percent is conferred as compared to a corresponding non-transformed wild type non-human organism.

[40966] Accordingly, in one embodiment, an increase of leucine in a non-human organism, as compared to a corresponding non-transformed wild type non-human organism, is conferred in the process of the invention, if the activity of a polypeptide showing the activity of a thioredoxin, or if the activity of the polypeptide At5g39950, preferably represented by SEQ ID NO. 69575, or a homolog or fragment thereof, or if the activity of a polypeptide encoded by a nucleic acid molecule comprising the nucleic acid SEQ ID NO. 69574, preferably the coding region thereof, or a homolog or fragment thereof, e.g. derived from Arabidopsis thaliana, is increased or generated. For example the activity of a nucleic acid molecule or a polypeptide comprising the nucleic acid, preferably the coding region thereof, or polypeptide or the consensus sequence or the polypeptide motif, as depicted in Table I, II or IV, application No. 6, column 5 or 8 in the respective same line as the nucleic acid molecule SEQ ID NO. 69574 or polypeptide SEQ ID NO. 69575, respectively, or a homolog or a fragment thereof, is increased or generated, or if the activity thioredoxin is increased or generated in a non-human organism, like a microorganism or a plant cell, plant or part thereof, especially with non-targeted localization, whereby the respective line discloses in column 7 the fine chemical leucine. For example, an increase of the leucine of at least 1 percent, particularly in a range of 53 to 145-percent is conferred as compared to a corresponding non-transformed wild type non-human organism.

[40967] Accordingly, in one embodiment, an increase of valine in a non-human organism, as compared to a corresponding non-transformed wild type non-human organism, is conferred in the process of the invention, if the activity of a polypeptide showing the activity of a thioredoxin, or if the activity of the polypeptide At5g39950, preferably represented by SEQ ID NO. 69575, or a homolog or fragment thereof, or if the activity of a polypeptide encoded by a nucleic acid molecule comprising the nucleic acid SEQ ID NO. 69574, preferably the coding region thereof, or a homolog or fragment thereof, e.g. derived from Arabidopsis thaliana, is increased or generated. For example the activity of a nucleic acid molecule or a polypeptide comprising the nucleic acid, preferably the coding region thereof, or polypeptide or the consensus sequence or the polypeptide motif, as depicted in Table I, II or IV, application No. 6, column 5 or 8 in the respective same line as the nucleic acid molecule SEQ ID NO. 69574 or polypeptide SEQ ID NO. 69575, respectively, or a homolog or a fragment thereof, is increased or generated, or if the activity thioredoxin is increased or generated in a non-human organism, like a microorganism or a plant cell, plant or part thereof, especially with non-targeted localization, whereby the respective line discloses in column 7 the fine chemical valine. For example, an increase of the valine of at least 1 percent, particularly in a range of 23 to 50-percent is conferred as compared to a corresponding non-transformed wild type non-human organism.

[40968] Accordingly, in one embodiment, an increase of valine in a non-human organism, as compared to a corresponding non-transformed wild type non-human organism, is conferred in the process of the invention, if the activity of a polypeptide showing the activity of a disease resistance protein, or if the activity of the polypeptide At5g45060, preferably represented by SEQ ID NO. 102224, or a homolog or fragment thereof, or if the activity of a polypeptide encoded by a nucleic acid molecule comprising the nucleic acid SEQ ID NO. 102223, preferably the coding region thereof, or a homolog or fragment thereof, e.g. derived from Arabidopsis thaliana, is increased or generated. For example the activity of a nucleic acid molecule or a polypeptide comprising the nucleic acid, preferably the coding region thereof, or polypeptide or the consensus sequence or the polypeptide motif, as depicted in Table I, II or IV, application No. 6, column 5 or 8 in the respective same line as the nucleic acid molecule SEQ ID NO. 102223 or polypeptide SEQ ID NO. 102224, respectively, or a homolog or a fragment thereof, is increased or generated, or if the activity disease resistance protein is increased or generated in a non-human organism, like a microorganism or a plant cell, plant or part thereof, especially with non-targeted localization, whereby the respective line discloses in column 7 the fine chemical valine. For example, an increase of the valine of at least 1 percent, particularly in a range of 24 to 70-percent is conferred as compared to a corresponding non-transformed wild type non-human organism.

[40969] Accordingly, in one embodiment, an increase of isoleucine in a non-human organism, as compared to a corresponding non-transformed wild type non-human organism, is conferred in the process of the invention, if the activity of a polypeptide showing the activity of a pyruvate kinase, or if the activity of the polypeptide At5g56350, preferably represented by SEQ ID NO. 102374, or a homolog or fragment thereof, or if the activity of a polypeptide encoded by a nucleic acid molecule comprising the nucleic acid SEQ ID NO. 102373, preferably the coding region thereof, or a homolog or fragment thereof, e.g. derived from Arabidopsis thaliana, is increased or generated. For example the activity of a nucleic acid molecule or a polypeptide comprising the nucleic acid, preferably the coding region thereof, or polypeptide or the consensus sequence or the polypeptide motif, as depicted in Table I, II or IV, application No. 6, column 5 or 8 in the respective same line as the nucleic acid molecule SEQ ID NO. 102373 or polypeptide SEQ ID NO. 102374, respectively, or a homolog or a fragment thereof, is increased or generated, or if the activity pyruvate kinase is increased or generated in a non-human organism, like a microorganism or a plant cell, plant or part thereof, especially with plastidic localization, whereby the respective line discloses in column 7 the fine chemical isoleucine. For example, an increase of the isoleucine of at least 1 percent, particularly in a range of 35 to 84-percent is conferred as compared to a corresponding non-transformed wild type non-human organism.

[40970] Accordingly, in one embodiment, an increase of leucine in a non-human organism, as compared to a corresponding non-transformed wild type non-human organism, is conferred in the process of the invention, if the activity of a polypeptide showing the activity of a pyruvate kinase, or if the activity of the polypeptide At5g56350, preferably represented by SEQ ID NO. 102374, or a homolog or fragment thereof, or if the activity of a polypeptide encoded by a nucleic acid molecule comprising the nucleic acid SEQ ID NO. 102373, preferably the coding region thereof, or a homolog or fragment thereof, e.g. derived from Arabidopsis thaliana, is increased or generated. For example the activity of a nucleic acid molecule or a polypeptide comprising the nucleic acid, preferably the coding region thereof, or polypeptide or the consensus sequence or the polypeptide motif, as depicted in Table I, II or IV, application No. 6, column 5 or 8 in the respective same line as the nucleic acid molecule SEQ ID NO. 102373 or polypeptide SEQ ID NO. 102374, respectively, or a homolog or a fragment thereof, is increased or generated, or if the activity pyruvate kinase is increased or generated in a non-human organism, like a microorganism or a plant cell, plant or part thereof, especially with plastidic localization, whereby the respective line discloses in column 7 the fine chemical leucine. For example, an increase of the leucine of at least 1 percent, particularly in a range of 56 to 69-percent is conferred as compared to a corresponding non-transformed wild type non-human organism.

[40971] Accordingly, in one embodiment, an increase of valine in a non-human organism, as compared to a corresponding non-transformed wild type non-human organism, is conferred in the process of the invention, if the activity of a polypeptide showing the activity of a RNA-binding protein, or if the activity of the polypeptide At5g60110, preferably represented by SEQ ID NO. 70007, or a homolog or fragment thereof, or if the activity of a polypeptide encoded by a nucleic acid molecule comprising the nucleic acid SEQ ID NO. 70006, preferably the coding region thereof, or a homolog or fragment thereof, e.g. derived from Arabidopsis thaliana, is increased or generated. For example the activity of a nucleic acid molecule or a polypeptide comprising the nucleic acid, preferably the coding region thereof, or polypeptide or the consensus sequence or the polypeptide motif, as depicted in Table I, II or IV, application No. 6, column 5 or 8 in the respective same line as the nucleic acid molecule SEQ ID NO. 70006 or polypeptide SEQ ID NO. 70007, respectively, or a homolog or a fragment thereof, is increased or generated, or if the activity

[40972] RNA-binding protein is increased or generated in a non-human organism, like a microorganism or a plant cell, plant or part thereof, especially with non-targeted localization, whereby the respective line discloses in column 7 the fine chemical valine. For example, an increase of the valine of at least 1 percent, particularly in a range of 21 to 41-percent is conferred as compared to a corresponding non-transformed wild type non-human organism.

[40973] Accordingly, in one embodiment, an increase of isoleucine in a non-human organism, as compared to a corresponding non-transformed wild type non-human organism, is conferred in the process of the invention, if the activity of a polypeptide showing the activity of a MADS-box transcription factor, or if the activity of the polypeptide At5g60440, preferably represented by SEQ ID NO. 102900, or a homolog or fragment thereof, or if the activity of a polypeptide encoded by a nucleic acid molecule comprising the nucleic acid SEQ ID NO. 102899, preferably the coding region thereof, or a homolog or fragment thereof, e.g. derived from Arabidopsis thaliana, is increased or generated. For example the activity of a nucleic acid molecule or a polypeptide comprising the nucleic acid, preferably the coding region thereof, or polypeptide or the consensus sequence or the polypeptide motif, as depicted in Table I, II or IV, application No. 6, column 5 or 8 in the respective same line as the nucleic acid molecule SEQ ID NO. 102899 or polypeptide SEQ ID NO. 102900, respectively, or a homolog or a fragment thereof, is increased or generated, or if the activity MADS-box transcription factor is increased or generated in a non-human organism, like a microorganism or a plant cell, plant or part thereof, especially with non-targeted localization, whereby the respective line discloses in column 7 the fine chemical isoleucine. For example, an increase of the isoleucine of at least 1 percent, particularly in a range of 33 to 474-percent is conferred as compared to a corresponding non-transformed wild type non-human organism.

[40974] Accordingly, in one embodiment, an increase of leucine in a non-human organism, as compared to a corresponding non-transformed wild type non-human organism, is conferred in the process of the invention, if the activity of a polypeptide showing the activity of a MADS-box transcription factor, or if the activity of the polypeptide At5g60440, preferably represented by SEQ ID NO. 102900, or a homolog or fragment thereof, or if the activity of a polypeptide encoded by a nucleic acid molecule comprising the nucleic acid SEQ ID NO. 102899, preferably the coding region thereof, or a homolog or fragment thereof, e.g. derived from Arabidopsis thaliana, is increased or generated. For example the activity of a nucleic acid molecule or a polypeptide comprising the nucleic acid, preferably the coding region thereof, or polypeptide or the consensus sequence or the polypeptide motif, as depicted in Table I, II or IV, application No. 6, column 5 or 8 in the respective same line as the nucleic acid molecule SEQ ID NO. 102899 or polypeptide SEQ ID NO. 102900, respectively, or a homolog or a fragment thereof, is increased or generated, or if the activity MADS-box transcription factor is increased or generated in a non-human organism, like a microorganism or a plant cell, plant or part thereof, especially with non-targeted localization, whereby the respective line discloses in column 7 the fine chemical leucine. For example, an increase of the leucine of at least 1 percent, particularly in a range of 51 to 643-percent is conferred as compared to a corresponding non-transformed wild type non-human organism.

[40975] Accordingly, in one embodiment, an increase of isoleucine in a non-human organism, as compared to a corresponding non-transformed wild type non-human organism, is conferred in the process of the invention, if the activity of a polypeptide showing the activity of a pyruvate kinase, or if the activity of the polypeptide At5g63680, preferably represented by SEQ ID NO. 70039, or a homolog or fragment thereof, or if the activity of a polypeptide encoded by a nucleic acid molecule comprising the nucleic acid SEQ ID NO. 70038, preferably the coding region thereof, or a homolog or fragment thereof, e.g. derived from Arabidopsis thaliana, is increased or generated. For example the activity of a nucleic acid molecule or a polypeptide comprising the nucleic acid, preferably the coding region thereof, or polypeptide or the consensus sequence or the polypeptide motif, as depicted in Table I, II or IV, application No. 6, column 5 or 8 in the respective same line as the nucleic acid molecule SEQ ID NO. 70038 or polypeptide SEQ ID NO. 70039, respectively, or a homolog or a fragment thereof, is increased or generated, or if the activity pyruvate kinase is increased or generated in a non-human organism, like a microorganism or a plant cell, plant or part thereof, especially with plastidic localization, whereby the respective line discloses in column 7 the fine chemical isoleucine. For example, an increase of the isoleucine of at least 1 percent, particularly in a range of 41 to 182-percent is conferred as compared to a corresponding non-transformed wild type non-human organism.

[40976] Accordingly, in one embodiment, an increase of leucine in a non-human organism, as compared to a corresponding non-transformed wild type non-human organism, is conferred in the process of the invention, if the activity of a polypeptide showing the activity of a pyruvate kinase, or if the activity of the polypeptide At5g63680, preferably represented by SEQ ID NO. 70039, or a homolog or fragment thereof, or if the activity of a polypeptide encoded by a nucleic acid molecule comprising the nucleic acid SEQ ID NO. 70038, preferably the coding region thereof, or a homolog or fragment thereof, e.g. derived from Arabidopsis thaliana, is increased or generated. For example the activity of a nucleic acid molecule or a polypeptide comprising the nucleic acid, preferably the coding region thereof, or polypeptide or the consensus sequence or the polypeptide motif, as depicted in Table I, II or IV, application No. 6, column 5 or 8 in the respective same line as the nucleic acid molecule SEQ ID NO. 70038 or polypeptide SEQ ID NO. 70039, respectively, or a homolog or a fragment thereof, is increased or generated, or if the activity pyruvate kinase is increased or generated in a non-human organism, like a microorganism or a plant cell, plant or part thereof, especially with plastidic localization, whereby the respective line discloses in column 7 the fine chemical leucine. For example, an increase of the leucine of at least 1 percent, particularly in a range of 55 to 358-percent is conferred as compared to a corresponding non-transformed wild type non-human organism.

[40977] Accordingly, in one embodiment, an increase of valine in a non-human organism, as compared to a corresponding non-transformed wild type non-human organism, is conferred in the process of the invention, if the activity of a polypeptide showing the activity of a pyruvate kinase, or if the activity of the polypeptide At5g63680, preferably represented by SEQ ID NO. 70039, or a homolog or fragment thereof, or if the activity of a polypeptide encoded by a nucleic acid molecule comprising the nucleic acid SEQ ID NO. 70038, preferably the coding region thereof, or a homolog or fragment thereof, e.g. derived from Arabidopsis thaliana, is increased or generated. For example the activity of a nucleic acid molecule or a polypeptide comprising the nucleic acid, preferably the coding region thereof, or polypeptide or the consensus sequence or the polypeptide motif, as depicted in Table I, II or IV, application No. 6, column 5 or 8 in the respective same line as the nucleic acid molecule SEQ ID NO. 70038 or polypeptide SEQ ID NO. 70039, respectively, or a homolog or a fragment thereof, is increased or generated, or if the activity pyruvate kinase is increased or generated in a non-human organism, like a microorganism or a plant cell, plant or part thereof, especially with plastidic localization, whereby the respective line discloses in column 7 the fine chemical valine. For example, an increase of the valine of at least 1-percent, particularly in a range of 31 to 254-percent is conferred as compared to a corresponding non-transformed wild type non-human organism.

[40978] Accordingly, in one embodiment, an increase of valine in a non-human organism, as compared to a corresponding non-transformed wild type non-human organism, is conferred in the process of the invention, if the activity of a polypeptide showing the activity of a zinc finger protein, or if the activity of the polypeptide At5g64920, preferably represented by SEQ ID NO. 5494, or a homolog or fragment thereof, or if the activity of a polypeptide encoded by a nucleic acid molecule comprising the nucleic acid SEQ ID NO. 5493, preferably the coding region thereof, or a homolog or fragment thereof, e.g. derived from Arabidopsis thaliana, is increased or generated. For example the activity of a nucleic acid molecule or a polypeptide comprising the nucleic acid, preferably the coding region thereof, or polypeptide or the consensus sequence or the polypeptide motif, as depicted in Table I, II or IV, application No. 6, column 5 or 8 in the respective same line as the nucleic acid molecule SEQ ID NO. 5493 or polypeptide SEQ ID NO. 5494, respectively, or a homolog or a fragment thereof, is increased or generated, or if the activity zinc finger protein is increased or generated in a non-human organism, like a microorganism or a plant cell, plant or part thereof, especially with non-targeted localization, whereby the respective line discloses in column 7 the fine chemical valine. For example, an increase of the valine of at least 1 percent, particularly in a range of 35 to 83-percent is conferred as compared to a corresponding non-transformed wild type non-human organism.

[40979] Accordingly, in one embodiment, an increase of isoleucine in a non-human organism, as compared to a corresponding non-transformed wild type non-human organism, is conferred in the process of the invention, if the activity of a polypeptide showing the activity of a malic enzyme, or if the activity of the polypeptide AvinDRAFT_{—}1495, preferably represented by SEQ ID NO. 5558, or a homolog or fragment thereof, or if the activity of a polypeptide encoded by a nucleic acid molecule comprising the nucleic acid SEQ ID NO. 5557, preferably the coding region thereof, or a homolog or fragment thereof, e.g. derived from Azotobacter vinelandii, is increased or generated. For example the activity of a nucleic acid molecule or a polypeptide comprising the nucleic acid, preferably the coding region thereof, or polypeptide or the consensus sequence or the polypeptide motif, as depicted in Table I, II or IV, application No. 6, column 5 or 8 in the respective same line as the nucleic acid molecule SEQ ID NO. 5557 or polypeptide SEQ ID NO. 5558, respectively, or a homolog or a fragment thereof, is increased or generated, or if the activity malic enzyme is increased or generated in a non-human organism, like a microorganism or a plant cell, plant or part thereof, especially with non-targeted localization, whereby the respective line discloses in column 7 the fine chemical isoleucine. For example, an increase of the isoleucine of at least 1 percent, particularly in a range of 85 to 297-percent is conferred as compared to a corresponding non-transformed wild type non-human organism.

[40980] Accordingly, in one embodiment, an increase of leucine in a non-human organism, as compared to a corresponding non-transformed wild type non-human organism, is conferred in the process of the invention, if the activity of a polypeptide showing the activity of a malic enzyme, or if the activity of the polypeptide AvinDRAFT_{—}1495, preferably represented by SEQ ID NO. 5558, or a homolog or fragment thereof, or if the activity of a polypeptide encoded by a nucleic acid molecule comprising the nucleic acid SEQ ID NO. 5557, preferably the coding region thereof, or a homolog or fragment thereof, e.g. derived from Azotobacter vinelandii, is increased or generated. For example the activity of a nucleic acid molecule or a polypeptide comprising the nucleic acid, preferably the coding region thereof, or polypeptide or the consensus sequence or the polypeptide motif, as depicted in Table I, II or IV, application No. 6, column 5 or 8 in the respective same line as the nucleic acid molecule SEQ ID NO. 5557 or polypeptide SEQ ID NO. 5558, respectively, or a homolog or a fragment thereof, is increased or generated, or if the activity malic enzyme is increased or generated in a non-human organism, like a microorganism or a plant cell, plant or part thereof, especially with non-targeted localization, whereby the respective line discloses in column 7 the fine chemical leucine. For example, an increase of the leucine of at least 1 percent, particularly in a range of 98 to 461-percent is conferred as compared to a corresponding non-transformed wild type non-human organism.

[40981] Accordingly, in one embodiment, an increase of valine in a non-human organism, as compared to a corresponding non-transformed wild type non-human organism, is conferred in the process of the invention, if the activity of a polypeptide showing the activity of a malic enzyme, or if the activity of the polypeptide AvinDRAFT_{—}1495, preferably represented by SEQ ID NO. 5558, or a homolog or fragment thereof, or if the activity of a polypeptide encoded by a nucleic acid molecule comprising the nucleic acid SEQ ID NO. 5557, preferably the coding region thereof, or a homolog or fragment thereof, e.g. derived from Azotobacter vinelandii, is increased or generated. For example the activity of a nucleic acid molecule or a polypeptide comprising the nucleic acid, preferably the coding region thereof, or polypeptide or the consensus sequence or the polypeptide motif, as depicted in Table I, II or IV, application No. 6, column 5 or 8 in the respective same line as the nucleic acid molecule SEQ ID NO. 5557 or polypeptide SEQ ID NO. 5558, respectively, or a homolog or a fragment thereof, is increased or generated, or if the activity malic enzyme is increased or generated in a non-human organism, like a microorganism or a plant cell, plant or part thereof, especially with non-targeted localization, whereby the respective line discloses in column 7 the fine chemical valine. For example, an increase of the valine of at least 1 percent, particularly in a range of 50 to 122-percent is conferred as compared to a corresponding non-transformed wild type non-human organism.

[40982] Accordingly, in one embodiment, an increase of valine in a non-human organism, as compared to a corresponding non-transformed wild type non-human organism, is conferred in the process of the invention, if the activity of a polypeptide showing the activity of a pyruvate kinase, or if the activity of the polypeptide AvinDRAFT_{—}1806, preferably represented by SEQ ID NO. 26435, or a homolog or fragment thereof, or if the activity of a polypeptide encoded by a nucleic acid molecule comprising the nucleic acid SEQ ID NO. 26434, preferably the coding region thereof, or a homolog or fragment thereof, e.g. derived from Azotobacter vinelandii, is increased or generated. For example the activity of a nucleic acid molecule or a polypeptide comprising the nucleic acid, preferably the coding region thereof, or polypeptide or the consensus sequence or the polypeptide motif, as depicted in Table I, II or IV, application No. 6, column 5 or 8 in the respective same line as the nucleic acid molecule SEQ ID NO. 26434 or polypeptide SEQ ID NO. 26435, respectively, or a homolog or a fragment thereof, is increased or generated, or if the activity pyruvate kinase is increased or generated in a non-human organism, like a microorganism or a plant cell, plant or part thereof, especially with non-targeted localization, whereby the respective line discloses in column 7 the fine chemical valine. For example, an increase of the valine of at least 1 percent, particularly in a range of 21 to 47-percent is conferred as compared to a corresponding non-transformed wild type non-human organism.

[40983] Accordingly, in one embodiment, an increase of valine in a non-human organism, as compared to a corresponding non-transformed wild type non-human organism, is conferred in the process of the invention, if the activity of a polypeptide showing the activity of a beta-hydroxylase, or if the activity of the polypeptide AvinDRAFT_{—}2091, preferably represented by SEQ ID NO. 6041, or a homolog or fragment thereof, or if the activity of a polypeptide encoded by a nucleic acid molecule comprising the nucleic acid SEQ ID NO. 6040, preferably the coding region thereof, or a homolog or fragment thereof, e.g. derived from Azotobacter vinelandii, is increased or generated. For example the activity of a nucleic acid molecule or a polypeptide comprising the nucleic acid, preferably the coding region thereof, or polypeptide or the consensus sequence or the polypeptide motif, as depicted in Table I, II or IV, application No. 6, column 5 or 8 in the respective same line as the nucleic acid molecule SEQ ID NO. 6040 or polypeptide SEQ ID NO. 6041, respectively, or a homolog or a fragment thereof, is increased or generated, or if the activity beta-hydroxylase is increased or generated in a non-human organism, like a microorganism or a plant cell, plant or part thereof, especially with non-targeted localization, whereby the respective line discloses in column 7 the fine chemical valine. For example, an increase of the valine of at least 1 percent, particularly in a range of 32 to 131-percent is conferred as compared to a corresponding non-transformed wild type non-human organism.

[40984] Accordingly, in one embodiment, an increase of isoleucine in a non-human organism, as compared to a corresponding non-transformed wild type non-human organism, is conferred in the process of the invention, if the activity of a polypeptide showing the activity of a elongation factor Tu, or if the activity of the polypeptide AvinDRAFT_{—}2344, preferably represented by SEQ ID NO. 27022, or a homolog or fragment thereof, or if the activity of a polypeptide encoded by a nucleic acid molecule comprising the nucleic acid SEQ ID NO. 27021, preferably the coding region thereof, or a homolog or fragment thereof, e.g. derived from Azotobacter vinelandii, is increased or generated. For example the activity of a nucleic acid molecule or a polypeptide comprising the nucleic acid, preferably the coding region thereof, or polypeptide or the consensus sequence or the polypeptide motif, as depicted in Table I, II or IV, application No. 6, column 5 or 8 in the respective same line as the nucleic acid molecule SEQ ID NO. 27021 or polypeptide SEQ ID NO. 27022, respectively, or a homolog or a fragment thereof, is increased or generated, or if the activity elongation factor Tu is increased or generated in a non-human organism, like a microorganism or a plant cell, plant or part thereof, especially with non-targeted localization, whereby the respective line discloses in column 7 the fine chemical isoleucine. For example, an increase of the isoleucine of at least 1 percent, particularly in a range of 43 to 379-percent is conferred as compared to a corresponding non-transformed wild type non-human organism.

[40985] Accordingly, in one embodiment, an increase of leucine in a non-human organism, as compared to a corresponding non-transformed wild type non-human organism, is conferred in the process of the invention, if the activity of a polypeptide showing the activity of a elongation factor Tu, or if the activity of the polypeptide AvinDRAFT_{—}2344, preferably represented by SEQ ID NO. 27022, or a homolog or fragment thereof, or if the activity of a polypeptide encoded by a nucleic acid molecule comprising the nucleic acid SEQ ID NO. 27021, preferably the coding region thereof, or a homolog or fragment thereof, e.g. derived from Azotobacter vinelandii, is increased or generated. For example the activity of a nucleic acid molecule or a polypeptide comprising the nucleic acid, preferably the coding region thereof, or polypeptide or the consensus sequence or the polypeptide motif, as depicted in Table I, II or IV, application No. 6, column 5 or 8 in the respective same line as the nucleic acid molecule SEQ ID NO. 27021 or polypeptide SEQ ID NO. 27022, respectively, or a homolog or a fragment thereof, is increased or generated, or if the activity elongation factor Tu is increased or generated in a non-human organism, like a microorganism or a plant cell, plant or part thereof, especially with non-targeted localization, whereby the respective line discloses in column 7 the fine chemical leucine. For example, an increase of the leucine of at least 1 percent, particularly in a range of 114 to 353-percent is conferred as compared to a corresponding non-transformed wild type non-human organism.

[40986] Accordingly, in one embodiment, an increase of valine in a non-human organism, as compared to a corresponding non-transformed wild type non-human organism, is conferred in the process of the invention, if the activity of a polypeptide showing the activity of a elongation factor Tu, or if the activity of the polypeptide AvinDRAFT_{—}2344, preferably represented by SEQ ID NO. 27022, or a homolog or fragment thereof, or if the activity of a polypeptide encoded by a nucleic acid molecule comprising the nucleic acid SEQ ID NO. 27021, preferably the coding region thereof, or a homolog or fragment thereof, e.g. derived from Azotobacter vinelandii, is increased or generated. For example the activity of a nucleic acid molecule or a polypeptide comprising the nucleic acid, preferably the coding region thereof, or polypeptide or the consensus sequence or the polypeptide motif, as depicted in Table I, II or IV, application No. 6, column 5 or 8 in the respective same line as the nucleic acid molecule SEQ ID NO. 27021 or polypeptide SEQ ID NO. 27022, respectively, or a homolog or a fragment thereof, is increased or generated, or if the activity elongation factor Tu is increased or generated in a non-human organism, like a microorganism or a plant cell, plant or part thereof, especially with non-targeted localization, whereby the respective line discloses in column 7 the fine chemical valine. For example, an increase of the valine of at least 1 percent, particularly in a range of 47 to 203-percent is conferred as compared to a corresponding non-transformed wild type non-human organism.

[40987] Accordingly, in one embodiment, an increase of valine in a non-human organism, as compared to a corresponding non-transformed wild type non-human organism, is conferred in the process of the invention, if the activity of a polypeptide showing the activity of a 50S ribosomal protein L14, or if the activity of the polypeptide AvinDRAFT_{—}2369, preferably represented by SEQ ID NO. 71764, or a homolog or fragment thereof, or if the activity of a polypeptide encoded by a nucleic acid molecule comprising the nucleic acid SEQ ID NO. 71763, preferably the coding region thereof, or a homolog or fragment thereof, e.g. derived from Azotobacter vinelandii, is increased or generated. For example the activity of a nucleic acid molecule or a polypeptide comprising the nucleic acid, preferably the coding region thereof, or polypeptide or the consensus sequence or the polypeptide motif, as depicted in Table I, II or IV, application No. 6, column 5 or 8 in the respective same line as the nucleic acid molecule SEQ ID NO. 71763 or polypeptide SEQ ID NO. 71764, respectively, or a homolog or a fragment thereof, is increased or generated, or if the activity 50S ribosomal protein L14 is increased or generated in a non-human organism, like a microorganism or a plant cell, plant or part thereof, especially with non-targeted localization, whereby the respective line discloses in column 7 the fine chemical valine. For example, an increase of the valine of at least 1 percent, particularly in a range of 22 to 62-percent is conferred as compared to a corresponding non-transformed wild type non-human organism.

[40988] Accordingly, in one embodiment, an increase of valine in a non-human organism, as compared to a corresponding non-transformed wild type non-human organism, is conferred in the process of the invention, if the activity of a polypeptide showing the activity of a ABC transporter permease protein, or if the activity of the polypeptide AvinDRAFT_{—}2521, preferably represented by SEQ ID NO. 27883, or a homolog or fragment thereof, or if the activity of a polypeptide encoded by a nucleic acid molecule comprising the nucleic acid SEQ ID NO. 27882, preferably the coding region thereof, or a homolog or fragment thereof, e.g. derived from Azotobacter vinelandii, is increased or generated. For example the activity of a nucleic acid molecule or a polypeptide comprising the nucleic acid, preferably the coding region thereof, or polypeptide or the consensus sequence or the polypeptide motif, as depicted in Table I, II or IV, application No. 6, column 5 or 8 in the respective same line as the nucleic acid molecule SEQ ID NO. 27882 or polypeptide SEQ ID NO. 27883, respectively, or a homolog or a fragment thereof, is increased or generated, or if the activity ABC transporter permease protein is increased or generated in a non-human organism, like a microorganism or a plant cell, plant or part thereof, especially with non-targeted localization, whereby the respective line discloses in column 7 the fine chemical valine.

[40989] For example, an increase of the valine of at least 1 percent, particularly in a range of 31 to 94-percent is conferred as compared to a corresponding non-transformed wild type non-human organism.

[40990] Accordingly, in one embodiment, an increase of isoleucine in a non-human organism, as compared to a corresponding non-transformed wild type non-human organism, is conferred in the process of the invention, if the activity of a polypeptide showing the activity of a enoyl-CoA hydratase, or if the activity of the polypeptide AvinDRAFT_{—}3159, preferably represented by SEQ ID NO. 28739, or a homolog or fragment thereof, or if the activity of a polypeptide encoded by a nucleic acid molecule comprising the nucleic acid SEQ ID NO. 28738, preferably the coding region thereof, or a homolog or fragment thereof, e.g. derived from Azotobacter vinelandii, is increased or generated. For example the activity of a nucleic acid molecule or a polypeptide comprising the nucleic acid, preferably the coding region thereof, or polypeptide or the consensus sequence or the polypeptide motif, as depicted in Table I, II or IV, application No. 6, column 5 or 8 in the respective same line as the nucleic acid molecule SEQ ID NO. 28738 or polypeptide SEQ ID NO. 28739, respectively, or a homolog or a fragment thereof, is increased or generated, or if the activity enoyl-CoA hydratase is increased or generated in a non-human organism, like a microorganism or a plant cell, plant or part thereof, especially with non-targeted localization, whereby the respective line discloses in column 7 the fine chemical isoleucine. For example, an increase of the isoleucine of at least 1 percent, particularly in a range of 114 to 177-percent is conferred as compared to a corresponding non-transformed wild type non-human organism.

[40991] Accordingly, in one embodiment, an increase of leucine in a non-human organism, as compared to a corresponding non-transformed wild type non-human organism, is conferred in the process of the invention, if the activity of a polypeptide showing the activity of a enoyl-CoA hydratase, or if the activity of the polypeptide AvinDRAFT_{—}3159, preferably represented by SEQ ID NO. 28739, or a homolog or fragment thereof, or if the activity of a polypeptide encoded by a nucleic acid molecule comprising the nucleic acid SEQ ID NO. 28738, preferably the coding region thereof, or a homolog or fragment thereof, e.g. derived from Azotobacter vinelandii, is increased or generated. For example the activity of a nucleic acid molecule or a polypeptide comprising the nucleic acid, preferably the coding region thereof, or polypeptide or the consensus sequence or the polypeptide motif, as depicted in Table I, II or IV, application No. 6, column 5 or 8 in the respective same line as the nucleic acid molecule SEQ ID NO. 28738 or polypeptide SEQ ID NO. 28739, respectively, or a homolog or a fragment thereof, is increased or generated, or if the activity enoyl-CoA hydratase is increased or generated in a non-human organism, like a microorganism or a plant cell, plant or part thereof, especially with non-targeted localization, whereby the respective line discloses in column 7 the fine chemical leucine. For example, an increase of the leucine of at least 1 percent, particularly in a range of 134 to 194-percent is conferred as compared to a corresponding non-transformed wild type non-human organism.

[40992] Accordingly, in one embodiment, an increase of valine in a non-human organism, as compared to a corresponding non-transformed wild type non-human organism, is conferred in the process of the invention, if the activity of a polypeptide showing the activity of a enoyl-CoA hydratase, or if the activity of the polypeptide AvinDRAFT_{—}3159, preferably represented by SEQ ID NO. 28739, or a homolog or fragment thereof, or if the activity of a polypeptide encoded by a nucleic acid molecule comprising the nucleic acid SEQ ID NO. 28738, preferably the coding region thereof, or a homolog or fragment thereof, e.g. derived from Azotobacter vinelandii, is increased or generated. For example the activity of a nucleic acid molecule or a polypeptide comprising the nucleic acid, preferably the coding region thereof, or polypeptide or the consensus sequence or the polypeptide motif, as depicted in Table I, II or IV, application No. 6, column 5 or 8 in the respective same line as the nucleic acid molecule SEQ ID NO. 28738 or polypeptide SEQ ID NO. 28739, respectively, or a homolog or a fragment thereof, is increased or generated, or if the activity enoyl-CoA hydratase is increased or generated in a non-human organism, like a microorganism or a plant cell, plant or part thereof, especially with non-targeted localization, whereby the respective line discloses in column 7 the fine chemical valine. For example, an increase of the valine of at least 1 percent, particularly in a range of 46 to 98-percent is conferred as compared to a corresponding non-transformed wild type non-human organism.

[40993] Accordingly, in one embodiment, an increase of isoleucine in a non-human organism, as compared to a corresponding non-transformed wild type non-human organism, is conferred in the process of the invention, if the activity of a polypeptide showing the activity of a transcriptional regulator, or if the activity of the polypeptide AvinDRAFT_{—}3209, preferably represented by SEQ ID NO. 29287, or a homolog or fragment thereof, or if the activity of a polypeptide encoded by a nucleic acid molecule comprising the nucleic acid SEQ ID NO. 29286, preferably the coding region thereof, or a homolog or fragment thereof, e.g. derived from Azotobacter vinelandii, is increased or generated. For example the activity of a nucleic acid molecule or a polypeptide comprising the nucleic acid, preferably the coding region thereof, or polypeptide or the consensus sequence or the polypeptide motif, as depicted in Table I, II or IV, application No. 6, column 5 or 8 in the respective same line as the nucleic acid molecule SEQ ID NO. 29286 or polypeptide SEQ ID NO. 29287, respectively, or a homolog or a fragment thereof, is increased or generated, or if the activity transcriptional regulator is increased or generated in a non-human organism, like a microorganism or a plant cell, plant or part thereof, especially with non-targeted localization, whereby the respective line discloses in column 7 the fine chemical isoleucine. For example, an increase of the isoleucine of at least 1 percent, particularly in a range of 41 to 207-percent is conferred as compared to a corresponding non-transformed wild type non-human organism.

[40994] Accordingly, in one embodiment, an increase of leucine in a non-human organism, as compared to a corresponding non-transformed wild type non-human organism, is conferred in the process of the invention, if the activity of a polypeptide showing the activity of a transcriptional regulator, or if the activity of the polypeptide AvinDRAFT_{—}3209, preferably represented by SEQ ID NO. 29287, or a homolog or fragment thereof, or if the activity of a polypeptide encoded by a nucleic acid molecule comprising the nucleic acid SEQ ID NO. 29286, preferably the coding region thereof, or a homolog or fragment thereof, e.g. derived from Azotobacter vinelandii, is increased or generated. For example the activity of a nucleic acid molecule or a polypeptide comprising the nucleic acid, preferably the coding region thereof, or polypeptide or the consensus sequence or the polypeptide motif, as depicted in Table I, II or IV, application No. 6, column 5 or 8 in the respective same line as the nucleic acid molecule SEQ ID NO. 29286 or polypeptide SEQ ID NO. 29287, respectively, or a homolog or a fragment thereof, is increased or generated, or if the activity transcriptional regulator is increased or generated in a non-human organism, like a microorganism or a plant cell, plant or part thereof, especially with non-targeted localization, whereby the respective line discloses in column 7 the fine chemical leucine. For example, an increase of the leucine of at least 1 percent, particularly in a range of 75 to 190-percent is conferred as compared to a corresponding non-transformed wild type non-human organism.

[40995] Accordingly, in one embodiment, an increase of valine in a non-human organism, as compared to a corresponding non-transformed wild type non-human organism, is conferred in the process of the invention, if the activity of a polypeptide showing the activity of a transcriptional regulator, or if the activity of the polypeptide AvinDRAFT_{—}3209, preferably represented by SEQ ID NO. 29287, or a homolog or fragment thereof, or if the activity of a polypeptide encoded by a nucleic acid molecule comprising the nucleic acid SEQ ID NO. 29286, preferably the coding region thereof, or a homolog or fragment thereof, e.g. derived from Azotobacter vinelandii, is increased or generated. For example the activity of a nucleic acid molecule or a polypeptide comprising the nucleic acid, preferably the coding region thereof, or polypeptide or the consensus sequence or the polypeptide motif, as depicted in Table I, II or IV, application No. 6, column 5 or 8 in the respective same line as the nucleic acid molecule SEQ ID NO. 29286 or polypeptide SEQ ID NO. 29287, respectively, or a homolog or a fragment thereof, is increased or generated, or if the activity transcriptional regulator is increased or generated in a non-human organism, like a microorganism or a plant cell, plant or part thereof, especially with non-targeted localization, whereby the respective line discloses in column 7 the fine chemical valine. For example, an increase of the valine of at least 1 percent, particularly in a range of 37 to 99-percent is conferred as compared to a corresponding non-transformed wild type non-human organism.

[40996] Accordingly, in one embodiment, an increase of isoleucine in a non-human organism, as compared to a corresponding non-transformed wild type non-human organism, is conferred in the process of the invention, if the activity of a polypeptide showing the activity of a acyltransferase, or if the activity of the polypeptide AvinDRAFT_{—}3250, preferably represented by SEQ ID NO. 29398, or a homolog or fragment thereof, or if the activity of a polypeptide encoded by a nucleic acid molecule comprising the nucleic acid SEQ ID NO. 29397, preferably the coding region thereof, or a homolog or fragment thereof, e.g. derived from Azotobacter vinelandii, is increased or generated. For example the activity of a nucleic acid molecule or a polypeptide comprising the nucleic acid, preferably the coding region thereof, or polypeptide or the consensus sequence or the polypeptide motif, as depicted in Table I, II or IV, application No. 6, column 5 or 8 in the respective same line as the nucleic acid molecule SEQ ID NO. 29397 or polypeptide SEQ ID NO. 29398, respectively, or a homolog or a fragment thereof, is increased or generated, or if the activity acyltransferase is increased or generated in a non-human organism, like a microorganism or a plant cell, plant or part thereof, especially with non-targeted localization, whereby the respective line discloses in column 7 the fine chemical isoleucine. For example, an increase of the isoleucine of at least 1 percent, particularly in a range of 120 to 251-percent is conferred as compared to a corresponding non-transformed wild type non-human organism.

[40997] Accordingly, in one embodiment, an increase of leucine in a non-human organism, as compared to a corresponding non-transformed wild type non-human organism, is conferred in the process of the invention, if the activity of a polypeptide showing the activity of a acyltransferase, or if the activity of the polypeptide AvinDRAFT_{—}3250, preferably represented by SEQ ID NO. 29398, or a homolog or fragment thereof, or if the activity of a polypeptide encoded by a nucleic acid molecule comprising the nucleic acid SEQ ID NO. 29397, preferably the coding region thereof, or a homolog or fragment thereof, e.g. derived from Azotobacter vinelandii, is increased or generated. For example the activity of a nucleic acid molecule or a polypeptide comprising the nucleic acid, preferably the coding region thereof, or polypeptide or the consensus sequence or the polypeptide motif, as depicted in Table I, II or IV, application No. 6, column 5 or 8 in the respective same line as the nucleic acid molecule SEQ ID NO. 29397 or polypeptide SEQ ID NO. 29398, respectively, or a homolog or a fragment thereof, is increased or generated, or if the activity acyltransferase is increased or generated in a non-human organism, like a microorganism or a plant cell, plant or part thereof, especially with non-targeted localization, whereby the respective line discloses in column 7 the fine chemical leucine. For example, an increase of the leucine of at least 1 percent, particularly in a range of 85 to 298-percent is conferred as compared to a corresponding non-transformed wild type non-human organism.

[40998] Accordingly, in one embodiment, an increase of valine in a non-human organism, as compared to a corresponding non-transformed wild type non-human organism, is conferred in the process of the invention, if the activity of a polypeptide showing the activity of a acyltransferase, or if the activity of the polypeptide AvinDRAFT_{—}3250, preferably represented by SEQ ID NO. 29398, or a homolog or fragment thereof, or if the activity of a polypeptide encoded by a nucleic acid molecule comprising the nucleic acid SEQ ID NO. 29397, preferably the coding region thereof, or a homolog or fragment thereof, e.g. derived from Azotobacter vinelandii, is increased or generated. For example the activity of a nucleic acid molecule or a polypeptide comprising the nucleic acid, preferably the coding region thereof, or polypeptide or the consensus sequence or the polypeptide motif, as depicted in Table I, II or IV, application No. 6, column 5 or 8 in the respective same line as the nucleic acid molecule SEQ ID NO. 29397 or polypeptide SEQ ID NO. 29398, respectively, or a homolog or a fragment thereof, is increased or generated, or if the activity acyltransferase is increased or generated in a non-human organism, like a microorganism or a plant cell, plant or part thereof, especially with non-targeted localization, whereby the respective line discloses in column 7 the fine chemical valine. For example, an increase of the valine of at least 1 percent, particularly in a range of 25 to 101-percent is conferred as compared to a corresponding non-transformed wild type non-human organism.

[40999] Accordingly, in one embodiment, an increase of isoleucine in a non-human organism, as compared to a corresponding non-transformed wild type non-human organism, is conferred in the process of the invention, if the activity of a polypeptide showing the activity of a oxidoreductase, or if the activity of the polypeptide AvinDRAFT_{—}3253, preferably represented by SEQ ID NO. 29501, or a homolog or fragment thereof, or if the activity of a polypeptide encoded by a nucleic acid molecule comprising the nucleic acid SEQ ID NO. 29500, preferably the coding region thereof, or a homolog or fragment thereof, e.g. derived from Azotobacter vinelandii, is increased or generated. For example the activity of a nucleic acid molecule or a polypeptide comprising the nucleic acid, preferably the coding region thereof, or polypeptide or the consensus sequence or the polypeptide motif, as depicted in Table I, II or IV, application No. 6, column 5 or 8 in the respective same line as the nucleic acid molecule SEQ ID NO. 29500 or polypeptide SEQ ID NO. 29501, respectively, or a homolog or a fragment thereof, is increased or generated, or if the activity oxidoreductase is increased or generated in a non-human organism, like a microorganism or a plant cell, plant or part thereof, especially with non-targeted localization, whereby the respective line discloses in column 7 the fine chemical isoleucine. For example, an increase of the isoleucine of at least 1 percent, particularly in a range of 35 to 67-percent is conferred as compared to a corresponding non-transformed wild type non-human organism.

[41000] Accordingly, in one embodiment, an increase of leucine in a non-human organism, as compared to a corresponding non-transformed wild type non-human organism, is conferred in the process of the invention, if the activity of a polypeptide showing the activity of a oxidoreductase, or if the activity of the polypeptide AvinDRAFT_{—}3253, preferably represented by SEQ ID NO. 29501, or a homolog or fragment thereof, or if the activity of a polypeptide encoded by a nucleic acid molecule comprising the nucleic acid SEQ ID NO. 29500, preferably the coding region thereof, or a homolog or fragment thereof, e.g. derived from Azotobacter vinelandii, is increased or generated. For example the activity of a nucleic acid molecule or a polypeptide comprising the nucleic acid, preferably the coding region thereof, or polypeptide or the consensus sequence or the polypeptide motif, as depicted in Table I, II or IV, application No. 6, column 5 or 8 in the respective same line as the nucleic acid molecule SEQ ID NO. 29500 or polypeptide SEQ ID NO. 29501, respectively, or a homolog or a fragment thereof, is increased or generated, or if the activity oxidoreductase is increased or generated in a non-human organism, like a microorganism or a plant cell, plant or part thereof, especially with non-targeted localization, whereby the respective line discloses in column 7 the fine chemical leucine. For example, an increase of the leucine of at least 1 percent, particularly in a range of 51 to 66-percent is conferred as compared to a corresponding non-transformed wild type non-human organism.

[41001] Accordingly, in one embodiment, an increase of valine in a non-human organism, as compared to a corresponding non-transformed wild type non-human organism, is conferred in the process of the invention, if the activity of a polypeptide showing the activity of a oxidoreductase, or if the activity of the polypeptide AvinDRAFT_{—}3253, preferably represented by SEQ ID NO. 29501, or a homolog or fragment thereof, or if the activity of a polypeptide encoded by a nucleic acid molecule comprising the nucleic acid SEQ ID NO. 29500, preferably the coding region thereof, or a homolog or fragment thereof, e.g. derived from Azotobacter vinelandii, is increased or generated. For example the activity of a nucleic acid molecule or a polypeptide comprising the nucleic acid, preferably the coding region thereof, or polypeptide or the consensus sequence or the polypeptide motif, as depicted in Table I, II or IV, application No. 6, column 5 or 8 in the respective same line as the nucleic acid molecule SEQ ID NO. 29500 or polypeptide SEQ ID NO. 29501, respectively, or a homolog or a fragment thereof, is increased or generated, or if the activity oxidoreductase is increased or generated in a non-human organism, like a microorganism or a plant cell, plant or part thereof, especially with non-targeted localization, whereby the respective line discloses in column 7 the fine chemical valine. For example, an increase of the valine of at least 1 percent, particularly in a range of 20 to 52-percent is conferred as compared to a corresponding non-transformed wild type non-human organism.

[41002] Accordingly, in one embodiment, an increase of valine in a non-human organism, as compared to a corresponding non-transformed wild type non-human organism, is conferred in the process of the invention, if the activity of a polypeptide showing the activity of a ABC transporter component, or if the activity of the polypeptide AVINDRAFT_{—}4128, preferably represented by SEQ ID NO. 72521, or a homolog or fragment thereof, or if the activity of a polypeptide encoded by a nucleic acid molecule comprising the nucleic acid SEQ ID NO. 72520, preferably the coding region thereof, or a homolog or fragment thereof, e.g. derived from Azotobacter vinelandii, is increased or generated. For example the activity of a nucleic acid molecule or a polypeptide comprising the nucleic acid, preferably the coding region thereof, or polypeptide or the consensus sequence or the polypeptide motif, as depicted in Table I, II or IV, application No. 6, column 5 or 8 in the respective same line as the nucleic acid molecule SEQ ID NO. 72520 or polypeptide SEQ ID NO. 72521, respectively, or a homolog or a fragment thereof, is increased or generated, or if the activity ABC transporter component is increased or generated in a non-human organism, like a microorganism or a plant cell, plant or part thereof, especially with non-targeted localization, whereby the respective line discloses in column 7 the fine chemical valine. For example, an increase of the valine of at least 1 percent, particularly in a range of 22 to 64-percent is conferred as compared to a corresponding non-transformed wild type non-human organism.

[41003] Accordingly, in one embodiment, an increase of valine in a non-human organism, as compared to a corresponding non-transformed wild type non-human organism, is conferred in the process of the invention, if the activity of a polypeptide showing the activity of a glucose-1-phosphate cytidylyltransferase, or if the activity of the polypeptide AvinDRAFT_{—}4384, preferably represented by SEQ ID NO. 31718, or a homolog or fragment thereof, or if the activity of a polypeptide encoded by a nucleic acid molecule comprising the nucleic acid SEQ ID NO. 31717, preferably the coding region thereof, or a homolog or fragment thereof, e.g. derived from Azotobacter vinelandii, is increased or generated. For example the activity of a nucleic acid molecule or a polypeptide comprising the nucleic acid, preferably the coding region thereof, or polypeptide or the consensus sequence or the polypeptide motif, as depicted in Table I, II or IV, application No. 6, column 5 or 8 in the respective same line as the nucleic acid molecule SEQ ID NO. 31717 or polypeptide SEQ ID NO. 31718, respectively, or a homolog or a fragment thereof, is increased or generated, or if the activity glucose-1-phosphate cytidylyltransferase is increased or generated in a non-human organism, like a microorganism or a plant cell, plant or part thereof, especially with non-targeted localization, whereby the respective line discloses in column 7 the fine chemical valine. For example, an increase of the valine of at least 1 percent, particularly in a range of 24 to 32-percent is conferred as compared to a corresponding non-transformed wild type non-human organism.

[41004] Accordingly, in one embodiment, an increase of isoleucine in a non-human organism, as compared to a corresponding non-transformed wild type non-human organism, is conferred in the process of the invention, if the activity of a polypeptide showing the activity of a aminotransferase, or if the activity of the polypeptide AvinDRAFT_{—}4562, preferably represented by SEQ ID NO. 31927, or a homolog or fragment thereof, or if the activity of a polypeptide encoded by a nucleic acid molecule comprising the nucleic acid SEQ ID NO. 31926, preferably the coding region thereof, or a homolog or fragment thereof, e.g. derived from Azotobacter vinelandii, is increased or generated. For example the activity of a nucleic acid molecule or a polypeptide comprising the nucleic acid, preferably the coding region thereof, or polypeptide or the consensus sequence or the polypeptide motif, as depicted in Table I, II or IV, application No. 6, column 5 or 8 in the respective same line as the nucleic acid molecule SEQ ID NO. 31926 or polypeptide SEQ ID NO. 31927, respectively, or a homolog or a fragment thereof, is increased or generated, or if the activity aminotransferase is increased or generated in a non-human organism, like a microorganism or a plant cell, plant or part thereof, especially with non-targeted localization, whereby the respective line discloses in column 7 the fine chemical isoleucine. For example, an increase of the isoleucine of at least 1 percent, particularly in a range of 59 to 77-percent is conferred as compared to a corresponding non-transformed wild type non-human organism.

[41005] Accordingly, in one embodiment, an increase of valine in a non-human organism, as compared to a corresponding non-transformed wild type non-human organism, is conferred in the process of the invention, if the activity of a polypeptide showing the activity of a aminotransferase, or if the activity of the polypeptide AvinDRAFT_{—}4562, preferably represented by SEQ ID NO. 31927, or a homolog or fragment thereof, or if the activity of a polypeptide encoded by a nucleic acid molecule comprising the nucleic acid SEQ ID NO. 31926, preferably the coding region thereof, or a homolog or fragment thereof, e.g. derived from Azotobacter vinelandii, is increased or generated. For example the activity of a nucleic acid molecule or a polypeptide comprising the nucleic acid, preferably the coding region thereof, or polypeptide or the consensus sequence or the polypeptide motif, as depicted in Table I, II or IV, application No. 6, column 5 or 8 in the respective same line as the nucleic acid molecule SEQ ID NO. 31926 or polypeptide SEQ ID NO. 31927, respectively, or a homolog or a fragment thereof, is increased or generated, or if the activity aminotransferase is increased or generated in a non-human organism, like a microorganism or a plant cell, plant or part thereof, especially with non-targeted localization, whereby the respective line discloses in column 7 the fine chemical valine. For example, an increase of the valine of at least 1 percent, particularly in a range of 26 to 56-percent is conferred as compared to a corresponding non-transformed wild type non-human organism.

[41006] Accordingly, in one embodiment, an increase of isoleucine in a non-human organism, as compared to a corresponding non-transformed wild type non-human organism, is conferred in the process of the invention, if the activity of a polypeptide showing the activity of a NADH-quinone oxidoreductase subunit, or if the activity of the polypeptide AvinDRAFT_{—}4606, preferably represented by SEQ ID NO. 73720, or a homolog or fragment thereof, or if the activity of a polypeptide encoded by a nucleic acid molecule comprising the nucleic acid SEQ ID NO. 73719, preferably the coding region thereof, or a homolog or fragment thereof, e.g. derived from Azotobacter vinelandii, is increased or generated. For example the activity of a nucleic acid molecule or a polypeptide comprising the nucleic acid, preferably the coding region thereof, or polypeptide or the consensus sequence or the polypeptide motif, as depicted in Table I, II or IV, application No. 6, column 5 or 8 in the respective same line as the nucleic acid molecule SEQ ID NO. 73719 or polypeptide SEQ ID NO. 73720, respectively, or a homolog or a fragment thereof, is increased or generated, or if the activity NADH-quinone oxidoreductase subunit is increased or generated in a non-human organism, like a microorganism or a plant cell, plant or part thereof, especially with non-targeted localization, whereby the respective line discloses in column 7 the fine chemical isoleucine. For example, an increase of the isoleucine of at least 1 percent, particularly in a range of 40 to 127-percent is conferred as compared to a corresponding non-transformed wild type non-human organism.

[41007] Accordingly, in one embodiment, an increase of leucine in a non-human organism, as compared to a corresponding non-transformed wild type non-human organism, is conferred in the process of the invention, if the activity of a polypeptide showing the activity of a NADH-quinone oxidoreductase subunit, or if the activity of the polypeptide AvinDRAFT_{—}4606, preferably represented by SEQ ID NO. 73720, or a homolog or fragment thereof, or if the activity of a polypeptide encoded by a nucleic acid molecule comprising the nucleic acid SEQ ID NO. 73719, preferably the coding region thereof, or a homolog or fragment thereof, e.g. derived from Azotobacter vinelandii, is increased or generated. For example the activity of a nucleic acid molecule or a polypeptide comprising the nucleic acid, preferably the coding region thereof, or polypeptide or the consensus sequence or the polypeptide motif, as depicted in Table I, II or IV, application No. 6, column 5 or 8 in the respective same line as the nucleic acid molecule SEQ ID NO. 73719 or polypeptide SEQ ID NO. 73720, respectively, or a homolog or a fragment thereof, is increased or generated, or if the activity NADH-quinone oxidoreductase subunit is increased or generated in a non-human organism, like a microorganism or a plant cell, plant or part thereof, especially with non-targeted localization, whereby the respective line discloses in column 7 the fine chemical leucine. For example, an increase of the leucine of at least 1 percent, particularly in a range of 58 to 85-percent is conferred as compared to a corresponding non-transformed wild type non-human organism.

[41008] Accordingly, in one embodiment, an increase of isoleucine in a non-human organism, as compared to a corresponding non-transformed wild type non-human organism, is conferred in the process of the invention, if the activity of a polypeptide showing the activity of a glutamate-ammonia-ligase, or if the activity of the polypeptide AvinDRAFT_{—}4836, preferably represented by SEQ ID NO. 74164, or a homolog or fragment thereof, or if the activity of a polypeptide encoded by a nucleic acid molecule comprising the nucleic acid SEQ ID NO. 74163, preferably the coding region thereof, or a homolog or fragment thereof, e.g. derived from Azotobacter vinelandii, is increased or generated. For example the activity of a nucleic acid molecule or a polypeptide comprising the nucleic acid, preferably the coding region thereof, or polypeptide or the consensus sequence or the polypeptide motif, as depicted in Table I, II or IV, application No. 6, column 5 or 8 in the respective same line as the nucleic acid molecule SEQ ID NO. 74163 or polypeptide SEQ ID NO. 74164, respectively, or a homolog or a fragment thereof, is increased or generated, or if the activity glutamate-ammonia-ligase is increased or generated in a non-human organism, like a microorganism or a plant cell, plant or part thereof, especially with non-targeted localization, whereby the respective line discloses in column 7 the fine chemical isoleucine. For example, an increase of the isoleucine of at least 1 percent, particularly in a range of 64 to 213-percent is conferred as compared to a corresponding non-transformed wild type non-human organism.

[41009] Accordingly, in one embodiment, an increase of leucine in a non-human organism, as compared to a corresponding non-transformed wild type non-human organism, is conferred in the process of the invention, if the activity of a polypeptide showing the activity of a glutamate-ammonialigase, or if the activity of the polypeptide AvinDRAFT_{—}4836, preferably represented by SEQ ID NO. 74164, or a homolog or fragment thereof, or if the activity of a polypeptide encoded by a nucleic acid molecule comprising the nucleic acid SEQ ID NO. 74163, preferably the coding region thereof, or a homolog or fragment thereof, e.g. derived from Azotobacter vinelandii, is increased or generated. For example the activity of a nucleic acid molecule or a polypeptide comprising the nucleic acid, preferably the coding region thereof, or polypeptide or the consensus sequence or the polypeptide motif, as depicted in Table I, II or IV, application No. 6, column 5 or 8 in the respective same line as the nucleic acid molecule SEQ ID NO. 74163 or polypeptide SEQ ID NO. 74164, respectively, or a homolog or a fragment thereof, is increased or generated, or if the activity glutamate-ammonia-ligase is increased or generated in a non-human organism, like a microorganism or a plant cell, plant or part thereof, especially with non-targeted localization, whereby the respective line discloses in column 7 the fine chemical leucine. For example, an increase of the leucine of at least 1 percent, particularly in a range of 68 to 176-percent is conferred as compared to a corresponding non-transformed wild type non-human organism.

[41010] Accordingly, in one embodiment, an increase of valine in a non-human organism, as compared to a corresponding non-transformed wild type non-human organism, is conferred in the process of the invention, if the activity of a polypeptide showing the activity of a glutamate-ammonia-ligase, or if the activity of the polypeptide AvinDRAFT_{—}4836, preferably represented by SEQ ID NO. 74164, or a homolog or fragment thereof, or if the activity of a polypeptide encoded by a nucleic acid molecule comprising the nucleic acid SEQ ID NO. 74163, preferably the coding region thereof, or a homolog or fragment thereof, e.g. derived from Azotobacter vinelandii, is increased or generated. For example the activity of a nucleic acid molecule or a polypeptide comprising the nucleic acid, preferably the coding region thereof, or polypeptide or the consensus sequence or the polypeptide motif, as depicted in Table I, II or IV, application No. 6, column 5 or 8 in the respective same line as the nucleic acid molecule SEQ ID NO. 74163 or polypeptide SEQ ID NO. 74164, respectively, or a homolog or a fragment thereof, is increased or generated, or if the activity glutamate-ammonia-ligase is increased or generated in a non-human organism, like a microorganism or a plant cell, plant or part thereof, especially with non-targeted localization, whereby the respective line discloses in column 7 the fine chemical valine. For example, an increase of the valine of at least 1 percent, particularly in a range of 24 to 135-percent is conferred as compared to a corresponding non-transformed wild type non-human organism.

[41011] Accordingly, in one embodiment, an increase of valine in a non-human organism, as compared to a corresponding non-transformed wild type non-human organism, is conferred in the process of the invention, if the activity of a polypeptide showing the activity of a isopropylmalate isomerase large subunit, or if the activity of the polypeptide AvinDRAFT_{—}4847, preferably represented by SEQ ID NO. 102942, or a homolog or fragment thereof, or if the activity of a polypeptide encoded by a nucleic acid molecule comprising the nucleic acid SEQ ID NO. 102941, preferably the coding region thereof, or a homolog or fragment thereof, e.g. derived from Azotobacter vinelandii, is increased or generated. For example the activity of a nucleic acid molecule or a polypeptide comprising the nucleic acid, preferably the coding region thereof, or polypeptide or the consensus sequence or the polypeptide motif, as depicted in Table I, II or IV, application No. 6, column 5 or 8 in the respective same line as the nucleic acid molecule SEQ ID NO. 102941 or polypeptide SEQ ID NO. 102942, respectively, or a homolog or a fragment thereof, is increased or generated, or if the activity isopropylmalate isomerase large subunit is increased or generated in a non-human organism, like a microorganism or a plant cell, plant or part thereof, especially with non-targeted localization, whereby the respective line discloses in column 7 the fine chemical valine. For example, an increase of the valine of at least 1 percent, particularly in a range of 26 to 31-percent is conferred as compared to a corresponding non-transformed wild type non-human organism.

[41012] Accordingly, in one embodiment, an increase of isoleucine in a non-human organism, as compared to a corresponding non-transformed wild type non-human organism, is conferred in the process of the invention, if the activity of a polypeptide showing the activity of a hydrolase, or if the activity of the polypeptide AvinDRAFT_{—}5103, preferably represented by SEQ ID NO. 6511, or a homolog or fragment thereof, or if the activity of a polypeptide encoded by a nucleic acid molecule comprising the nucleic acid SEQ ID NO. 6510, preferably the coding region thereof, or a homolog or fragment thereof, e.g. derived from Azotobacter vinelandii, is increased or generated. For example the activity of a nucleic acid molecule or a polypeptide comprising the nucleic acid, preferably the coding region thereof, or polypeptide or the consensus sequence or the polypeptide motif, as depicted in Table I, II or IV, application No. 6, column 5 or 8 in the respective same line as the nucleic acid molecule SEQ ID NO. 6510 or polypeptide SEQ ID NO. 6511, respectively, or a homolog or a fragment thereof, is increased or generated, or if the activity hydrolase is increased or generated in a non-human organism, like a microorganism or a plant cell, plant or part thereof, especially with non-targeted localization, whereby the respective line discloses in column 7 the fine chemical isoleucine. For example, an increase of the isoleucine of at least 1 percent, particularly in a range of 41 to 2397-percent is conferred as compared to a corresponding non-transformed wild type non-human organism.

[41013] Accordingly, in one embodiment, an increase of leucine in a non-human organism, as compared to a corresponding non-transformed wild type non-human organism, is conferred in the process of the invention, if the activity of a polypeptide showing the activity of a hydrolase, or if the activity of the polypeptide AvinDRAFT_{—}5103, preferably represented by SEQ ID NO. 6511, or a homolog or fragment thereof, or if the activity of a polypeptide encoded by a nucleic acid molecule comprising the nucleic acid SEQ ID NO. 6510, preferably the coding region thereof, or a homolog or fragment thereof, e.g. derived from Azotobacter vinelandii, is increased or generated. For example the activity of a nucleic acid molecule or a polypeptide comprising the nucleic acid, preferably the coding region thereof, or polypeptide or the consensus sequence or the polypeptide motif, as depicted in Table I, II or IV, application No. 6, column 5 or 8 in the respective same line as the nucleic acid molecule SEQ ID NO. 6510 or polypeptide SEQ ID NO. 6511, respectively, or a homolog or a fragment thereof, is increased or generated, or if the activity hydrolase is increased or generated in a non-human organism, like a microorganism or a plant cell, plant or part thereof, especially with non-targeted localization, whereby the respective line discloses in column 7 the fine chemical leucine. For example, an increase of the leucine of at least 1 percent, particularly in a range of 51 to 2753-percent is conferred as compared to a corresponding non-transformed wild type non-human organism.

[41014] Accordingly, in one embodiment, an increase of valine in a non-human organism, as compared to a corresponding non-transformed wild type non-human organism, is conferred in the process of the invention, if the activity of a polypeptide showing the activity of a hydrolase, or if the activity of the polypeptide AvinDRAFT_{—}5103, preferably represented by SEQ ID NO. 6511, or a homolog or fragment thereof, or if the activity of a polypeptide encoded by a nucleic acid molecule comprising the nucleic acid SEQ ID NO. 6510, preferably the coding region thereof, or a homolog or fragment thereof, e.g. derived from Azotobacter vinelandii, is increased or generated. For example the activity of a nucleic acid molecule or a polypeptide comprising the nucleic acid, preferably the coding region thereof, or polypeptide or the consensus sequence or the polypeptide motif, as depicted in Table I, II or IV, application No. 6, column 5 or 8 in the respective same line as the nucleic acid molecule SEQ ID NO. 6510 or polypeptide SEQ ID NO. 6511, respectively, or a homolog or a fragment thereof, is increased or generated, or if the activity hydrolase is increased or generated in a non-human organism, like a microorganism or a plant cell, plant or part thereof, especially with non-targeted localization, whereby the respective line discloses in column 7 the fine chemical valine. For example, an increase of the valine of at least 1-percent, particularly in a range of 24 to 951-percent is conferred as compared to a corresponding non-transformed wild type non-human organism.

[41015] Accordingly, in one embodiment, an increase of isoleucine in a non-human organism, as compared to a corresponding non-transformed wild type non-human organism, is conferred in the process of the invention, if the activity of a polypeptide showing the activity of a fumarylacetoacetate hydrolase, or if the activity of the polypeptide AvinDRAFT_{—}5292, preferably represented by SEQ ID NO. 32309, or a homolog or fragment thereof, or if the activity of a polypeptide encoded by a nucleic acid molecule comprising the nucleic acid SEQ ID NO. 32308, preferably the coding region thereof, or a homolog or fragment thereof, e.g. derived from Azotobacter vinelandii, is increased or generated. For example the activity of a nucleic acid molecule or a polypeptide comprising the nucleic acid, preferably the coding region thereof, or polypeptide or the consensus sequence or the polypeptide motif, as depicted in Table I, II or IV, application No. 6, column 5 or 8 in the respective same line as the nucleic acid molecule SEQ ID NO. 32308 or polypeptide SEQ ID NO. 32309, respectively, or a homolog or a fragment thereof, is increased or generated, or if the activity fumarylacetoacetate hydrolase is increased or generated in a non-human organism, like a microorganism or a plant cell, plant or part thereof, especially with non-targeted localization, whereby the respective line discloses in column 7 the fine chemical isoleucine. For example, an increase of the isoleucine of at least 1 percent, particularly in a range of 335 to 446-percent is conferred as compared to a corresponding non-transformed wild type non-human organism.

[41016] Accordingly, in one embodiment, an increase of leucine in a non-human organism, as compared to a corresponding non-transformed wild type non-human organism, is conferred in the process of the invention, if the activity of a polypeptide showing the activity of a fumarylacetoacetate hydrolase, or if the activity of the polypeptide AvinDRAFT_{—}5292, preferably represented by SEQ ID NO. 32309, or a homolog or fragment thereof, or if the activity of a polypeptide encoded by a nucleic acid molecule comprising the nucleic acid SEQ ID NO. 32308, preferably the coding region thereof, or a homolog or fragment thereof, e.g. derived from Azotobacter vinelandii, is increased or generated. For example the activity of a nucleic acid molecule or a polypeptide comprising the nucleic acid, preferably the coding region thereof, or polypeptide or the consensus sequence or the polypeptide motif, as depicted in Table I, II or IV, application No. 6, column 5 or 8 in the respective same line as the nucleic acid molecule SEQ ID NO. 32308 or polypeptide SEQ ID NO. 32309, respectively, or a homolog or a fragment thereof, is increased or generated, or if the activity fumarylacetoacetate hydrolase is increased or generated in a non-human organism, like a microorganism or a plant cell, plant or part thereof, especially with non-targeted localization, whereby the respective line discloses in column 7 the fine chemical leucine. For example, an increase of the leucine of at least 1 percent, particularly in a range of 469 to 550-percent is conferred as compared to a corresponding non-transformed wild type non-human organism.

[41017] Accordingly, in one embodiment, an increase of valine in a non-human organism, as compared to a corresponding non-transformed wild type non-human organism, is conferred in the process of the invention, if the activity of a polypeptide showing the activity of a fumarylacetoacetate hydrolase, or if the activity of the polypeptide AvinDRAFT_{—}5292, preferably represented by SEQ ID NO. 32309, or a homolog or fragment thereof, or if the activity of a polypeptide encoded by a nucleic acid molecule comprising the nucleic acid SEQ ID NO. 32308, preferably the coding region thereof, or a homolog or fragment thereof, e.g. derived from Azotobacter vinelandii, is increased or generated. For example the activity of a nucleic acid molecule or a polypeptide comprising the nucleic acid, preferably the coding region thereof, or polypeptide or the consensus sequence or the polypeptide motif, as depicted in Table I, II or IV, application No. 6, column 5 or 8 in the respective same line as the nucleic acid molecule SEQ ID NO. 32308 or polypeptide SEQ ID NO. 32309, respectively, or a homolog or a fragment thereof, is increased or generated, or if the activity fumarylacetoacetate hydrolase is increased or generated in a non-human organism, like a microorganism or a plant cell, plant or part thereof, especially with non-targeted localization, whereby the respective line discloses in column 7 the fine chemical valine. For example, an increase of the valine of at least 1 percent, particularly in a range of 132 to 187 -percent is conferred as compared to a corresponding non-transformed wild type non-human organism

[41018] Accordingly, in one embodiment, an increase of leucine in a non-human organism, as compared to a corresponding non-transformed wild type non-human organism, is conferred in the process of the invention, if the activity of a polypeptide showing the activity of a peptidase, or if the activity of the polypeptide AvinDRAFT_{—}5579, preferably represented by SEQ ID NO. 74663, or a homolog or fragment thereof, or if the activity of a polypeptide encoded by a nucleic acid molecule comprising the nucleic acid SEQ ID NO. 74662, preferably the coding region thereof, or a homolog or fragment thereof, e.g. derived from Azotobacter vinelandii, is increased or generated. For example the activity of a nucleic acid molecule or a polypeptide comprising the nucleic acid, preferably the coding region thereof, or polypeptide or the consensus sequence or the polypeptide motif, as depicted in Table I, II or IV, application No. 6, column 5 or 8 in the respective same line as the nucleic acid molecule SEQ ID NO. 74662 or polypeptide SEQ ID NO. 74663, respectively, or a homolog or a fragment thereof, is increased or generated, or if the activity peptidase is increased or generated in a non-human organism, like a microorganism or a plant cell, plant or part thereof, especially with non-targeted localization, whereby the respective line discloses in column 7 the fine chemical leucine. For example, an increase of the leucine of at least 1 percent, particularly in a range of 57 to 94-percent is conferred as compared to a corresponding non-transformed wild type non-human organism.

[41019] Accordingly, in one embodiment, an increase of isoleucine in a non-human organism, as compared to a corresponding non-transformed wild type non-human organism, is conferred in the process of the invention, if the activity of a polypeptide showing the activity of a chaperone protein CIpB, or if the activity of the polypeptide AvinDRAFT_{—}6093, preferably represented by SEQ ID NO. 33597, or a homolog or fragment thereof, or if the activity of a polypeptide encoded by a nucleic acid molecule comprising the nucleic acid SEQ ID NO. 33596, preferably the coding region thereof, or a homolog or fragment thereof, e.g. derived from Azotobacter vinelandii, is increased or generated. For example the activity of a nucleic acid molecule or a polypeptide comprising the nucleic acid, preferably the coding region thereof, or polypeptide or the consensus sequence or the polypeptide motif, as depicted in Table I, II or IV, application No. 6, column 5 or 8 in the respective same line as the nucleic acid molecule SEQ ID NO. 33596 or polypeptide SEQ ID NO. 33597, respectively, or a homolog or a fragment thereof, is increased or generated, or if the activity chaperone protein CIpB is increased or generated in a non-human organism, like a microorganism or a plant cell, plant or part thereof, especially with non-targeted localization, whereby the respective line discloses in column 7 the fine chemical isoleucine. For example, an increase of the isoleucine of at least 1 percent, particularly in a range of 44 to 134-percent is conferred as compared to a corresponding non-transformed wild type non-human organism.

[41020] Accordingly, in one embodiment, an increase of isoleucine in a non-human organism, as compared to a corresponding non-transformed wild type non-human organism, is conferred in the process of the invention, if the activity of a polypeptide showing the activity of a purine nucleoside phosphorylase, or if the activity of the polypeptide AvinDRAFT_{—}6700, preferably represented by SEQ ID NO. 34045, or a homolog or fragment thereof, or if the activity of a polypeptide encoded by a nucleic acid molecule comprising the nucleic acid SEQ ID NO. 34044, preferably the coding region thereof, or a homolog or fragment thereof, e.g. derived from Azotobacter vinelandii, is increased or generated. For example the activity of a nucleic acid molecule or a polypeptide comprising the nucleic acid, preferably the coding region thereof, or polypeptide or the consensus sequence or the polypeptide motif, as depicted in Table I, II or IV, application No. 6, column 5 or 8 in the respective same line as the nucleic acid molecule SEQ ID NO. 34044 or polypeptide SEQ ID NO. 34045, respectively, or a homolog or a fragment thereof, is increased or generated, or if the activity purine nucleoside phosphorylase is increased or generated in a non-human organism, like a microorganism or a plant cell, plant or part thereof, especially with non-targeted localization, whereby the respective line discloses in column 7 the fine chemical isoleucine. For example, an increase of the isoleucine of at least 1 percent, particularly in a range of 32 to 34-percent is conferred as compared to a corresponding non-transformed wild type non-human organism.

[41021] Accordingly, in one embodiment, an increase of leucine in a non-human organism, as compared to a corresponding non-transformed wild type non-human organism, is conferred in the process of the invention, if the activity of a polypeptide showing the activity of a purine nucleoside phosphorylase, or if the activity of the polypeptide AvinDRAFT_{—}6700, preferably represented by SEQ ID NO. 34045, or a homolog or fragment thereof, or if the activity of a polypeptide encoded by a nucleic acid molecule comprising the nucleic acid SEQ ID NO. 34044, preferably the coding region thereof, or a homolog or fragment thereof, e.g. derived from Azotobacter vinelandii, is increased or generated. For example the activity of a nucleic acid molecule or a polypeptide comprising the nucleic acid, preferably the coding region thereof, or polypeptide or the consensus sequence or the polypeptide motif, as depicted in Table I, II or IV, application No. 6, column 5 or 8 in the respective same line as the nucleic acid molecule SEQ ID NO. 34044 or polypeptide SEQ ID NO. 34045, respectively, or a homolog or a fragment thereof, is increased or generated, or if the activity purine nucleoside phosphorylase is increased or generated in a non-human organism, like a microorganism or a plant cell, plant or part thereof, especially with non-targeted localization, whereby the respective line discloses in column 7 the fine chemical leucine. For example, an increase of the leucine of at least 1 percent, particularly in a range of 31 to 53-percent is conferred as compared to a corresponding non-transformed wild type non-human organism.

[41022] Accordingly, in one embodiment, an increase of valine in a non-human organism, as compared to a corresponding non-transformed wild type non-human organism, is conferred in the process of the invention, if the activity of a polypeptide showing the activity of a purine nucleoside phosphorylase, or if the activity of the polypeptide AvinDRAFT_{—}6700, preferably represented by SEQ ID NO. 34045, or a homolog or fragment thereof, or if the activity of a polypeptide encoded by a nucleic acid molecule comprising the nucleic acid SEQ ID NO. 34044, preferably the coding region thereof, or a homolog or fragment thereof, e.g. derived from Azotobacter vinelandii, is increased or generated. For example the activity of a nucleic acid molecule or a polypeptide comprising the nucleic acid, preferably the coding region thereof, or polypeptide or the consensus sequence or the polypeptide motif, as depicted in Table I, II or IV, application No. 6, column 5 or 8 in the respective same line as the nucleic acid molecule SEQ ID NO. 34044 or polypeptide SEQ ID NO. 34045, respectively, or a homolog or a fragment thereof, is increased or generated, or if the activity purine nucleoside phosphorylase is increased or generated in a non-human organism, like a microorganism or a plant cell, plant or part thereof, especially with non-targeted localization, whereby the respective line discloses in column 7 the fine chemical valine. For example, an increase of the valine of at least 1 percent, particularly in a range of 22 to 29-percent is conferred as compared to a corresponding non-transformed wild type non-human organism.

[41023] Accordingly, in one embodiment, an increase of isoleucine in a non-human organism, as compared to a corresponding non-transformed wild type non-human organism, is conferred in the process of the invention, if the activity of a polypeptide showing the activity of a pyruvate kinase, or if the activity of the polypeptide AY623894, preferably represented by SEQ ID NO. 103434, or a homolog or fragment thereof, or if the activity of a polypeptide encoded by a nucleic acid molecule comprising the nucleic acid SEQ ID NO. 103433, preferably the coding region thereof, or a homolog or fragment thereof, e.g. derived from Zea mays, is increased or generated. For example the activity of a nucleic acid molecule or a polypeptide comprising the nucleic acid, preferably the coding region thereof, or polypeptide or the consensus sequence or the polypeptide motif, as depicted in Table I, II or IV, application No. 6, column 5 or 8 in the respective same line as the nucleic acid molecule SEQ ID NO. 103433 or polypeptide SEQ ID NO. 103434, respectively, or a homolog or a fragment thereof, is increased or generated, or if the activity pyruvate kinase is increased or generated in a non-human organism, like a microorganism or a plant cell, plant or part thereof, especially with non-targeted localization, whereby the respective line discloses in column 7 the fine chemical isoleucine. For example, an increase of the isoleucine of at least 1 percent, particularly in a range of 49 to 103-percent is conferred as compared to a corresponding non-transformed wild type non-human organism.

[41024] Accordingly, in one embodiment, an increase of valine in a non-human organism, as compared to a corresponding non-transformed wild type non-human organism, is conferred in the process of the invention, if the activity of a polypeptide showing the activity of a pyruvate kinase, or if the activity of the polypeptide AY623894, preferably represented by SEQ ID NO. 103434, or a homolog or fragment thereof, or if the activity of a polypeptide encoded by a nucleic acid molecule comprising the nucleic acid SEQ ID NO. 103433, preferably the coding region thereof, or a homolog or fragment thereof, e.g. derived from Zea mays, is increased or generated. For example the activity of a nucleic acid molecule or a polypeptide comprising the nucleic acid, preferably the coding region thereof, or polypeptide or the consensus sequence or the polypeptide motif, as depicted in Table I, II or IV, application No. 6, column 5 or 8 in the respective same line as the nucleic acid molecule SEQ ID NO. 103433 or polypeptide SEQ ID NO. 103434, respectively, or a homolog or a fragment thereof, is increased or generated, or if the activity pyruvate kinase is increased or generated in a non-human organism, like a microorganism or a plant cell, plant or part thereof, especially with non-targeted localization, whereby the respective line discloses in column 7 the fine chemical valine. For example, an increase of the valine of at least 1 percent, particularly in a range of 30 to 46-percent is conferred as compared to a corresponding non-transformed wild type non-human organism.

[41025] Accordingly, in one embodiment, an increase of isoleucine in a non-human organism, as compared to a corresponding non-transformed wild type non-human organism, is conferred in the process of the invention, if the activity of a polypeptide showing the activity of a threonine synthase, or if the activity of the polypeptide B0004, preferably represented by SEQ ID NO. 34890, or a homolog or fragment thereof, or if the activity of a polypeptide encoded by a nucleic acid molecule comprising the nucleic acid SEQ ID NO. 34889, preferably the coding region thereof, or a homolog or fragment thereof, e.g. derived from Escherichia coli, is increased or generated. For example the activity of a nucleic acid molecule or a polypeptide comprising the nucleic acid, preferably the coding region thereof, or polypeptide or the consensus sequence or the polypeptide motif, as depicted in Table I, II or IV, application No. 6, column 5 or 8 in the respective same line as the nucleic acid molecule SEQ ID NO. 34889 or polypeptide SEQ ID NO. 34890, respectively, or a homolog or a fragment thereof, is increased or generated, or if the activity threonine synthase is increased or generated in a non-human organism, like a microorganism or a plant cell, plant or part thereof, especially with plastidic localization, whereby the respective line discloses in column 7 the fine chemical isoleucine. For example, an increase of the isoleucine of at least 1 percent, particularly in a range of 40 to 468-percent is conferred as compared to a corresponding non-transformed wild type non-human organism.

[41026] Accordingly, in one embodiment, an increase of leucine in a non-human organism, as compared to a corresponding non-transformed wild type non-human organism, is conferred in the process of the invention, if the activity of a polypeptide showing the activity of a threonine synthase, or if the activity of the polypeptide B0004, preferably represented by SEQ ID NO. 34890, or a homolog or fragment thereof, or if the activity of a polypeptide encoded by a nucleic acid molecule comprising the nucleic acid SEQ ID NO. 34889, preferably the coding region thereof, or a homolog or fragment thereof, e.g. derived from Escherichia coli, is increased or generated. For example the activity of a nucleic acid molecule or a polypeptide comprising the nucleic acid, preferably the coding region thereof, or polypeptide or the consensus sequence or the polypeptide motif, as depicted in Table I, II or IV, application No. 6, column 5 or 8 in the respective same line as the nucleic acid molecule SEQ ID NO. 34889 or polypeptide SEQ ID NO. 34890, respectively, or a homolog or a fragment thereof, is increased or generated, or if the activity threonine synthase is increased or generated in a non-human organism, like a microorganism or a plant cell, plant or part thereof, especially with plastidic localization, whereby the respective line discloses in column 7 the fine chemical leucine. For example, an increase of the leucine of at least 1 percent, particularly in a range of 96 to 297-percent is conferred as compared to a corresponding non-transformed wild type non-human organism.

[41027] Accordingly, in one embodiment, an increase of valine in a non-human organism, as compared to a corresponding non-transformed wild type non-human organism, is conferred in the process of the invention, if the activity of a polypeptide showing the activity of a threonine synthase, or if the activity of the polypeptide B0004, preferably represented by SEQ ID NO. 34890, or a homolog or fragment thereof, or if the activity of a polypeptide encoded by a nucleic acid molecule comprising the nucleic acid SEQ ID NO. 34889, preferably the coding region thereof, or a homolog or fragment thereof, e.g. derived from Escherichia coli, is increased or generated. For example the activity of a nucleic acid molecule or a polypeptide comprising the nucleic acid, preferably the coding region thereof, or polypeptide or the consensus sequence or the polypeptide motif, as depicted in Table I, II or IV, application No. 6, column 5 or 8 in the respective same line as the nucleic acid molecule SEQ ID NO. 34889 or polypeptide SEQ ID NO. 34890, respectively, or a homolog or a fragment thereof, is increased or generated, or if the activity threonine synthase is increased or generated in a non-human organism, like a microorganism or a plant cell, plant or part thereof, especially with plastidic localization, whereby the respective line discloses in column 7 the fine chemical valine. For example, an increase of the valine of at least 1 percent, particularly in a range of 33 to 220-percent is conferred as compared to a corresponding non-transformed wild type non-human organism.

[41028] Accordingly, in one embodiment, an increase of valine in a non-human organism, as compared to a corresponding non-transformed wild type non-human organism, is conferred in the process of the invention, if the activity of a polypeptide showing the activity of a b0050-protein, or if the activity of the polypeptide B0050, preferably represented by SEQ ID NO. 103959, or a homolog or fragment thereof, or if the activity of a polypeptide encoded by a nucleic acid molecule comprising the nucleic acid SEQ ID NO. 103958, preferably the coding region thereof, or a homolog or fragment thereof, e.g. derived from Escherichia coli, is increased or generated. For example the activity of a nucleic acid molecule or a polypeptide comprising the nucleic acid, preferably the coding region thereof, or polypeptide or the consensus sequence or the polypeptide motif, as depicted in Table I, II or IV, application No. 6, column 5 or 8 in the respective same line as the nucleic acid molecule SEQ ID NO. 103958 or polypeptide SEQ ID NO. 103959, respectively, or a homolog or a fragment thereof, is increased or generated, or if the activity b0050-protein is increased or generated in a non-human organism, like a microorganism or a plant cell, plant or part thereof, especially with non-targeted localization, whereby the respective line discloses in column 7 the fine chemical valine. For example, an increase of the valine of at least 1 percent, particularly in a range of 24 to 122-percent is conferred as compared to a corresponding non-transformed wild type non-human organism.

[41029] Accordingly, in one embodiment, an increase of leucine in a non-human organism, as compared to a corresponding non-transformed wild type non-human organism, is conferred in the process of the invention, if the activity of a polypeptide showing the activity of a acetolactate synthase small subunit, or if the activity of the polypeptide B0078, preferably represented by SEQ ID NO. 6819, or a homolog or fragment thereof, or if the activity of a polypeptide encoded by a nucleic acid molecule comprising the nucleic acid SEQ ID NO. 6818, preferably the coding region thereof, or a homolog or fragment thereof, e.g. derived from Escherichia coli, is increased or generated. For example the activity of a nucleic acid molecule or a polypeptide comprising the nucleic acid, preferably the coding region thereof, or polypeptide or the consensus sequence or the polypeptide motif, as depicted in Table I, II or IV, application No. 6, column 5 or 8 in the respective same line as the nucleic acid molecule SEQ ID NO. 6818 or polypeptide SEQ ID NO. 6819, respectively, or a homolog or a fragment thereof, is increased or generated, or if the activity acetolactate synthase small subunit is increased or generated in a non-human organism, like a microorganism or a plant cell, plant or part thereof, especially with non-targeted localization, whereby the respective line discloses in column 7 the fine chemical leucine. For example, an increase of the leucine of at least 1 percent, particularly in a range of 44 to 73-percent is conferred as compared to a corresponding non-transformed wild type non-human organism.

[41030] Accordingly, in one embodiment, an increase of leucine in a non-human organism, as compared to a corresponding non-transformed wild type non-human organism, is conferred in the process of the invention, if the activity of a polypeptide showing the activity of a beta-galactosidase, or if the activity of the polypeptide B0344, preferably represented by SEQ ID NO. 35734, or a homolog or fragment thereof, or if the activity of a polypeptide encoded by a nucleic acid molecule comprising the nucleic acid SEQ ID NO. 35733, preferably the coding region thereof, or a homolog or fragment thereof, e.g. derived from Escherichia coli, is increased or generated. For example the activity of a nucleic acid molecule or a polypeptide comprising the nucleic acid, preferably the coding region thereof, or polypeptide or the consensus sequence or the polypeptide motif, as depicted in Table I, II or IV, application No. 6, column 5 or 8 in the respective same line as the nucleic acid molecule SEQ ID NO. 35733 or polypeptide SEQ ID NO. 35734, respectively, or a homolog or a fragment thereof, is increased or generated, or if the activity beta-galactosidase is increased or generated in a non-human organism, like a microorganism or a plant cell, plant or part thereof, especially with plastidic localization, whereby the respective line discloses in column 7 the fine chemical leucine. For example, an increase of the leucine of at least 1 percent, particularly in a range of 224 to 288-percent is conferred as compared to a corresponding non-transformed wild type non-human organism.

[41031] Accordingly, in one embodiment, an increase of isoleucine in a non-human organism, as compared to a corresponding non-transformed wild type non-human organism, is conferred in the process of the invention, if the activity of a polypeptide showing the activity of a 2,3-dihydroxyphenylpropionate 1,2-dioxygenase, or if the activity of the polypeptide B0348, preferably represented by SEQ ID NO. 7270, or a homolog or fragment thereof, or if the activity of a polypeptide encoded by a nucleic acid molecule comprising the nucleic acid SEQ ID NO. 7269, preferably the coding region thereof, or a homolog or fragment thereof, e.g. derived from Escherichia coli, is increased or generated. For example the activity of a nucleic acid molecule or a polypeptide comprising the nucleic acid, preferably the coding region thereof, or polypeptide or the consensus sequence or the polypeptide motif, as depicted in Table I, II or IV, application No. 6, column 5 or 8 in the respective same line as the nucleic acid molecule SEQ ID NO. 7269 or polypeptide SEQ ID NO. 7270, respectively, or a homolog or a fragment thereof, is increased or generated, or if the activity 2,3-dihydroxyphenylpropionate 1,2-dioxygenase is increased or generated in a non-human organism, like a microorganism or a plant cell, plant or part thereof, especially with plastidic localization, whereby the respective line discloses in column 7 the fine chemical isoleucine. For example, an increase of the isoleucine of at least 1 percent, particularly in a range of 64 to 316-percent is conferred as compared to a corresponding non-transformed wild type non-human organism.

[41032] Accordingly, in one embodiment, an increase of valine in a non-human organism, as compared to a corresponding non-transformed wild type non-human organism, is conferred in the process of the invention, if the activity of a polypeptide showing the activity of a 2,3-dihydroxyphenylpropionate 1,2-dioxygenase, or if the activity of the polypeptide B0348, preferably represented by SEQ ID NO. 7270, or a homolog or fragment thereof, or if the activity of a polypeptide encoded by a nucleic acid molecule comprising the nucleic acid SEQ ID NO. 7269, preferably the coding region thereof, or a homolog or fragment thereof, e.g. derived from Escherichia coli, is increased or generated. For example the activity of a nucleic acid molecule or a polypeptide comprising the nucleic acid, preferably the coding region thereof, or polypeptide or the consensus sequence or the polypeptide motif, as depicted in Table I, II or IV, application No. 6, column 5 or 8 in the respective same line as the nucleic acid molecule SEQ ID NO. 7269 or polypeptide SEQ ID NO. 7270, respectively, or a homolog or a fragment thereof, is increased or generated, or if the activity 2,3-dihydroxyphenylpropionate 1,2-dioxygenase is increased or generated in a non-human organism, like a microorganism or a plant cell, plant or part thereof, especially with plastidic localization, whereby the respective line discloses in column 7 the fine chemical valine. For example, an increase of the valine of at least 1 percent, particularly in a range of 35 to 236-percent is conferred as compared to a corresponding non-transformed wild type non-human organism.

[41033] Accordingly, in one embodiment, an increase of isoleucine in a non-human organism, as compared to a corresponding non-transformed wild type non-human organism, is conferred in the process of the invention, if the activity of a polypeptide showing the activity of a ATP-binding component of a transport system, or if the activity of the polypeptide B0449, preferably represented by SEQ ID NO. 7334, or a homolog or fragment thereof, or if the activity of a polypeptide encoded by a nucleic acid molecule comprising the nucleic acid SEQ ID NO. 7333, preferably the coding region thereof, or a homolog or fragment thereof, e.g. derived from Escherichia coli, is increased or generated. For example the activity of a nucleic acid molecule or a polypeptide comprising the nucleic acid, preferably the coding region thereof, or polypeptide or the consensus sequence or the polypeptide motif, as depicted in Table I, II or IV, application No. 6, column 5 or 8 in the respective same line as the nucleic acid molecule SEQ ID NO. 7333 or polypeptide SEQ ID NO. 7334, respectively, or a homolog or a fragment thereof, is increased or generated, or if the activity ATP-binding component of a transport system is increased or generated in a non-human organism, like a microorganism or a plant cell, plant or part thereof, especially with non-targeted localization, whereby the respective line discloses in column 7 the fine chemical isoleucine. For example, an increase of the isoleucine of at least 1 percent, particularly in a range of 75 to 2019-percent is conferred as compared to a corresponding non-transformed wild type non-human organism.

[41034] Accordingly, in one embodiment, an increase of leucine in a non-human organism, as compared to a corresponding non-transformed wild type non-human organism, is conferred in the process of the invention, if the activity of a polypeptide showing the activity of a ATP-binding component of a transport system, or if the activity of the polypeptide B0449, preferably represented by SEQ ID NO. 7334, or a homolog or fragment thereof, or if the activity of a polypeptide encoded by a nucleic acid molecule comprising the nucleic acid SEQ ID NO. 7333, preferably the coding region thereof, or a homolog or fragment thereof, e.g. derived from Escherichia coli, is increased or generated. For example the activity of a nucleic acid molecule or a polypeptide comprising the nucleic acid, preferably the coding region thereof, or polypeptide or the consensus sequence or the polypeptide motif, as depicted in Table I, II or IV, application No. 6, column 5 or 8 in the respective same line as the nucleic acid molecule SEQ ID NO. 7333 or polypeptide SEQ ID NO. 7334, respectively, or a homolog or a fragment thereof, is increased or generated, or if the activity ATP-binding component of a transport system is increased or generated in a non-human organism, like a microorganism or a plant cell, plant or part thereof, especially with non-targeted localization, whereby the respective line discloses in column 7 the fine chemical leucine. For example, an increase of the leucine of at least 1 percent, particularly in a range of 82 to 2204-percent is conferred as compared to a corresponding non-transformed wild type non-human organism.

[41035] Accordingly, in one embodiment, an increase of valine in a non-human organism, as compared to a corresponding non-transformed wild type non-human organism, is conferred in the process of the invention, if the activity of a polypeptide showing the activity of a ATP-binding component of a transport system, or if the activity of the polypeptide B0449, preferably represented by SEQ ID NO. 7334, or a homolog or fragment thereof, or if the activity of a polypeptide encoded by a nucleic acid molecule comprising the nucleic acid SEQ ID NO. 7333, preferably the coding region thereof, or a homolog or fragment thereof, e.g. derived from Escherichia coli, is increased or generated. For example the activity of a nucleic acid molecule or a polypeptide comprising the nucleic acid, preferably the coding region thereof, or polypeptide or the consensus sequence or the polypeptide motif, as depicted in Table I, II or IV, application No. 6, column 5 or 8 in the respective same line as the nucleic acid molecule SEQ ID NO. 7333 or polypeptide SEQ ID NO. 7334, respectively, or a homolog or a fragment thereof, is increased or generated, or if the activity ATP-binding component of a transport system is increased or generated in a non-human organism, like a microorganism or a plant cell, plant or part thereof, especially with non-targeted localization, whereby the respective line discloses in column 7 the fine chemical valine. For example, an increase of the valine of at least 1 percent, particularly in a range of 21 to 774-percent is conferred as compared to a corresponding non-transformed wild type non-human organism.

[41036] Accordingly, in one embodiment, an increase of isoleucine in a non-human organism, as compared to a corresponding non-transformed wild type non-human organism, is conferred in the process of the invention, if the activity of a polypeptide showing the activity of a membrane transport protein, or if the activity of the polypeptide B0486, preferably represented by SEQ ID NO. 7687, or a homolog or fragment thereof, or if the activity of a polypeptide encoded by a nucleic acid molecule comprising the nucleic acid SEQ ID NO. 7686, preferably the coding region thereof, or a homolog or fragment thereof, e.g. derived from Escherichia coli, is increased or generated. For example the activity of a nucleic acid molecule or a polypeptide comprising the nucleic acid, preferably the coding region thereof, or polypeptide or the consensus sequence or the polypeptide motif, as depicted in Table I, II or IV, application No. 6, column 5 or 8 in the respective same line as the nucleic acid molecule SEQ ID NO. 7686 or polypeptide SEQ ID NO. 7687, respectively, or a homolog or a fragment thereof, is increased or generated, or if the activity membrane transport protein is increased or generated in a non-human organism, like a microorganism or a plant cell, plant or part thereof, especially with non-targeted localization, whereby the respective line discloses in column 7 the fine chemical isoleucine. For example, an increase of the isoleucine of at least 1 percent, particularly in a range of 68 to 394-percent is conferred as compared to a corresponding non-transformed wild type non-human organism.

[41037] Accordingly, in one embodiment, an increase of isoleucine in a non-human organism, as compared to a corresponding non-transformed wild type non-human organism, is conferred in the process of the invention, if the activity of a polypeptide showing the activity of a isochorismate synthase, or if the activity of the polypeptide B0593, preferably represented by SEQ ID NO. 35968, or a homolog or fragment thereof, or if the activity of a polypeptide encoded by a nucleic acid molecule comprising the nucleic acid SEQ ID NO. 35967, preferably the coding region thereof, or a homolog or fragment thereof, e.g. derived from Escherichia coli, is increased or generated. For example the activity of a nucleic acid molecule or a polypeptide comprising the nucleic acid, preferably the coding region thereof, or polypeptide or the consensus sequence or the polypeptide motif, as depicted in Table I, II or IV, application No. 6, column 5 or 8 in the respective same line as the nucleic acid molecule SEQ ID NO. 35967 or polypeptide SEQ ID NO. 35968, respectively, or a homolog or a fragment thereof, is increased or generated, or if the activity isochorismate synthase is increased or generated in a non-human organism, like a microorganism or a plant cell, plant or part thereof, especially with plastidic localization, whereby the respective line discloses in column 7 the fine chemical isoleucine. For example, an increase of the isoleucine of at least 1 percent, particularly in a range of 77 to 474-percent is conferred as compared to a corresponding non-transformed wild type non-human organism.

[41038] Accordingly, in one embodiment, an increase of leucine in a non-human organism, as compared to a corresponding non-transformed wild type non-human organism, is conferred in the process of the invention, if the activity of a polypeptide showing the activity of a isochorismate synthase, or if the activity of the polypeptide B0593, preferably represented by SEQ ID NO. 35968, or a homolog or fragment thereof, or if the activity of a polypeptide encoded by a nucleic acid molecule comprising the nucleic acid SEQ ID NO. 35967, preferably the coding region thereof, or a homolog or fragment thereof, e.g. derived from Escherichia coli, is increased or generated. For example the activity of a nucleic acid molecule or a polypeptide comprising the nucleic acid, preferably the coding region thereof, or polypeptide or the consensus sequence or the polypeptide motif, as depicted in Table I, II or IV, application No. 6, column 5 or 8 in the respective same line as the nucleic acid molecule SEQ ID NO. 35967 or polypeptide SEQ ID NO. 35968, respectively, or a homolog or a fragment thereof, is increased or generated, or if the activity isochorismate synthase is increased or generated in a non-human organism, like a microorganism or a plant cell, plant or part thereof, especially with plastidic localization, whereby the respective line discloses in column 7 the fine chemical leucine. For example, an increase of the leucine of at least 1 percent, particularly in a range of 74 to 478-percent is conferred as compared to a corresponding non-transformed wild type non-human organism.

[41039] Accordingly, in one embodiment, an increase of valine in a non-human organism, as compared to a corresponding non-transformed wild type non-human organism, is conferred in the process of the invention, if the activity of a polypeptide showing the activity of a isochorismate synthase, or if the activity of the polypeptide B0593, preferably represented by SEQ ID NO. 35968, or a homolog or fragment thereof, or if the activity of a polypeptide encoded by a nucleic acid molecule comprising the nucleic acid SEQ ID NO. 35967, preferably the coding region thereof, or a homolog or fragment thereof, e.g. derived from Escherichia coli, is increased or generated. For example the activity of a nucleic acid molecule or a polypeptide comprising the nucleic acid, preferably the coding region thereof, or polypeptide or the consensus sequence or the polypeptide motif, as depicted in Table I, II or IV, application No. 6, column 5 or 8 in the respective same line as the nucleic acid molecule SEQ ID NO. 35967 or polypeptide SEQ ID NO. 35968, respectively, or a homolog or a fragment thereof, is increased or generated, or if the activity isochorismate synthase is increased or generated in a non-human organism, like a microorganism or a plant cell, plant or part thereof, especially with plastidic localization, whereby the respective line discloses in column 7 the fine chemical valine. For example, an increase of the valine of at least 1 percent, particularly in a range of 62 to 214-percent is conferred as compared to a corresponding non-transformed wild type non-human organism.

[41040] Accordingly, in one embodiment, an increase of isoleucine in a non-human organism, as compared to a corresponding non-transformed wild type non-human organism, is conferred in the process of the invention, if the activity of a polypeptide showing the activity of a zinc transporter, or if the activity of the polypeptide B0752, preferably represented by SEQ ID NO. 36115, or a homolog or fragment thereof, or if the activity of a polypeptide encoded by a nucleic acid molecule comprising the nucleic acid SEQ ID NO. 36114, preferably the coding region thereof, or a homolog or fragment thereof, e.g. derived from Escherichia coli, is increased or generated. For example the activity of a nucleic acid molecule or a polypeptide comprising the nucleic acid, preferably the coding region thereof, or polypeptide or the consensus sequence or the polypeptide motif, as depicted in Table I, II or IV, application No. 6, column 5 or 8 in the respective same line as the nucleic acid molecule SEQ ID NO. 36114 or polypeptide SEQ ID NO. 36115, respectively, or a homolog or a fragment thereof, is increased or generated, or if the activity zinc transporter is increased or generated in a non-human organism, like a microorganism or a plant cell, plant or part thereof, especially with non-targeted localization, whereby the respective line discloses in column 7 the fine chemical isoleucine. For example, an increase of the isoleucine of at least 1 percent, particularly in a range of 36 to 58-percent is conferred as compared to a corresponding non-transformed wild type non-human organism.

[41041] Accordingly, in one embodiment, an increase of leucine in a non-human organism, as compared to a corresponding non-transformed wild type non-human organism, is conferred in the process of the invention, if the activity of a polypeptide showing the activity of a zinc transporter, or if the activity of the polypeptide B0752, preferably represented by SEQ ID NO. 36115, or a homolog or fragment thereof, or if the activity of a polypeptide encoded by a nucleic acid molecule comprising the nucleic acid SEQ ID NO. 36114, preferably the coding region thereof, or a homolog or fragment thereof, e.g. derived from Escherichia coli, is increased or generated. For example the activity of a nucleic acid molecule or a polypeptide comprising the nucleic acid, preferably the coding region thereof, or polypeptide or the consensus sequence or the polypeptide motif, as depicted in Table I, II or IV, application No. 6, column 5 or 8 in the respective same line as the nucleic acid molecule SEQ ID NO. 36114 or polypeptide SEQ ID NO. 36115, respectively, or a homolog or a fragment thereof, is increased or generated, or if the activity zinc transporter is increased or generated in a non-human organism, like a microorganism or a plant cell, plant or part thereof, especially with non-targeted localization, whereby the respective line discloses in column 7 the fine chemical leucine. For example, an increase of the leucine of at least 1 percent, particularly in a range of 54 to 81-percent is conferred as compared to a corresponding non-transformed wild type non-human organism.

[41042] Accordingly, in one embodiment, an increase of isoleucine in a non-human organism, as compared to a corresponding non-transformed wild type non-human organism, is conferred in the process of the invention, if the activity of a polypeptide showing the activity of a major facilitator superfamily transporter protein, or if the activity of the polypeptide B0898, preferably represented by SEQ ID NO. 7918, or a homolog or fragment thereof, or if the activity of a polypeptide encoded by a nucleic acid molecule comprising the nucleic acid SEQ ID NO. 7917, preferably the coding region thereof, or a homolog or fragment thereof, e.g. derived from Escherichia coli, is increased or generated. For example the activity of a nucleic acid molecule or a polypeptide comprising the nucleic acid, preferably the coding region thereof, or polypeptide or the consensus sequence or the polypeptide motif, as depicted in Table I, II or IV, application No. 6, column 5 or 8 in the respective same line as the nucleic acid molecule SEQ ID NO. 7917 or polypeptide SEQ ID NO. 7918, respectively, or a homolog or a fragment thereof, is increased or generated, or if the activity major facilitator superfamily transporter protein is increased or generated in a non-human organism, like a microorganism or a plant cell, plant or part thereof, especially with non-targeted localization, whereby the respective line discloses in column 7 the fine chemical isoleucine. For example, an increase of the isoleucine of at least 1 percent, particularly in a range of 40 to 6183-percent is conferred as compared to a corresponding non-transformed wild type non-human organism.

[41043] Accordingly, in one embodiment, an increase of leucine in a non-human organism, as compared to a corresponding non-transformed wild type non-human organism, is conferred in the process of the invention, if the activity of a polypeptide showing the activity of a major facilitator superfamily transporter protein, or if the activity of the polypeptide B0898, preferably represented by SEQ ID NO. 7918, or a homolog or fragment thereof, or if the activity of a polypeptide encoded by a nucleic acid molecule comprising the nucleic acid SEQ ID NO. 7917, preferably the coding region thereof, or a homolog or fragment thereof, e.g. derived from Escherichia coli, is increased or generated. For example the activity of a nucleic acid molecule or a polypeptide comprising the nucleic acid, preferably the coding region thereof, or polypeptide or the consensus sequence or the polypeptide motif, as depicted in Table I, II or IV, application No. 6, column 5 or 8 in the respective same line as the nucleic acid molecule SEQ ID NO. 7917 or polypeptide SEQ ID NO. 7918, respectively, or a homolog or a fragment thereof, is increased or generated, or if the activity major facilitator superfamily transporter protein is increased or generated in a non-human organism, like a microorganism or a plant cell, plant or part thereof, especially with non-targeted localization, whereby the respective line discloses in column 7 the fine chemical leucine. For example, an increase of the leucine of at least 1 percent, particularly in a range of 59 to 5609-percent is conferred as compared to a corresponding non-transformed wild type non-human organism.

[41044] Accordingly, in one embodiment, an increase of valine in a non-human organism, as compared to a corresponding non-transformed wild type non-human organism, is conferred in the process of the invention, if the activity of a polypeptide showing the activity of a major facilitator superfamily transporter protein, or if the activity of the polypeptide B0898, preferably represented by SEQ ID NO. 7918, or a homolog or fragment thereof, or if the activity of a polypeptide encoded by a nucleic acid molecule comprising the nucleic acid SEQ ID NO. 7917, preferably the coding region thereof, or a homolog or fragment thereof, e.g. derived from Escherichia coli, is increased or generated. For example the activity of a nucleic acid molecule or a polypeptide comprising the nucleic acid, preferably the coding region thereof, or polypeptide or the consensus sequence or the polypeptide motif, as depicted in Table I, II or IV, application No. 6, column 5 or 8 in the respective same line as the nucleic acid molecule SEQ ID NO. 7917 or polypeptide SEQ ID NO. 7918, respectively, or a homolog or a fragment thereof, is increased or generated, or if the activity major facilitator superfamily transporter protein is increased or generated in a non-human organism, like a microorganism or a plant cell, plant or part thereof, especially with non-targeted localization, whereby the respective line discloses in column 7 the fine chemical valine. For example, an increase of the valine of at least 1 percent, particularly in a range of 23 to 2254-percent is conferred as compared to a corresponding non-transformed wild type non-human organism.

[41045] Accordingly, in one embodiment, an increase of leucine in a non-human organism, as compared to a corresponding non-transformed wild type non-human organism, is conferred in the process of the invention, if the activity of a polypeptide showing the activity of a DNA helicase IV, or if the activity of the polypeptide B0962, preferably represented by SEQ ID NO. 36624, or a homolog or fragment thereof, or if the activity of a polypeptide encoded by a nucleic acid molecule comprising the nucleic acid SEQ ID NO. 36623, preferably the coding region thereof, or a homolog or fragment thereof, e.g. derived from Escherichia coli, is increased or generated. For example the activity of a nucleic acid molecule or a polypeptide comprising the nucleic acid, preferably the coding region thereof, or polypeptide or the consensus sequence or the polypeptide motif, as depicted in Table I, II or IV, application No. 6, column 5 or 8 in the respective same line as the nucleic acid molecule SEQ ID NO. 36623 or polypeptide SEQ ID NO. 36624, respectively, or a homolog or a fragment thereof, is increased or generated, or if the activity DNA helicase IV is increased or generated in a non-human organism, like a microorganism or a plant cell, plant or part thereof, especially with non-targeted localization, whereby the respective line discloses in column 7 the fine chemical leucine. For example, an increase of the leucine of at least 1 percent, particularly in a range of 52 to 274-percent is conferred as compared to a corresponding non-transformed wild type non-human organism.

[41046] Accordingly, in one embodiment, an increase of valine in a non-human organism, as compared to a corresponding non-transformed wild type non-human organism, is conferred in the process of the invention, if the activity of a polypeptide showing the activity of a methylglyoxal synthase, or if the activity of the polypeptide B0963, preferably represented by SEQ ID NO. 36671, or a homolog or fragment thereof, or if the activity of a polypeptide encoded by a nucleic acid molecule comprising the nucleic acid SEQ ID NO. 36670, preferably the coding region thereof, or a homolog or fragment thereof, e.g. derived from Escherichia coli, is increased or generated. For example the activity of a nucleic acid molecule or a polypeptide comprising the nucleic acid, preferably the coding region thereof, or polypeptide or the consensus sequence or the polypeptide motif, as depicted in Table I, II or IV, application No. 6, column 5 or 8 in the respective same line as the nucleic acid molecule SEQ ID NO. 36670 or polypeptide SEQ ID NO. 36671, respectively, or a homolog or a fragment thereof, is increased or generated, or if the activity methylglyoxal synthase is increased or generated in a non-human organism, like a microorganism or a plant cell, plant or part thereof, especially with non-targeted localization, whereby the respective line discloses in column 7 the fine chemical valine. For example, an increase of the valine of at least 1 percent, particularly in a range of 34 to 127-percent is conferred as compared to a corresponding non-transformed wild type non-human organism.

[41047] Accordingly, in one embodiment, an increase of valine in a non-human organism, as compared to a corresponding non-transformed wild type non-human organism, is conferred in the process of the invention, if the activity of a polypeptide showing the activity of a phosphoanhydride phosphorylase, or if the activity of the polypeptide B0980, preferably represented by SEQ ID NO. 36810, or a homolog or fragment thereof, or if the activity of a polypeptide encoded by a nucleic acid molecule comprising the nucleic acid SEQ ID NO. 36809, preferably the coding region thereof, or a homolog or fragment thereof, e.g. derived from Escherichia coli, is increased or generated. For example the activity of a nucleic acid molecule or a polypeptide comprising the nucleic acid, preferably the coding region thereof, or polypeptide or the consensus sequence or the polypeptide motif, as depicted in Table I, II or IV, application No. 6, column 5 or 8 in the respective same line as the nucleic acid molecule SEQ ID NO. 36809 or polypeptide SEQ ID NO. 36810, respectively, or a homolog or a fragment thereof, is increased or generated, or if the activity phosphoanhydride phosphorylase is increased or generated in a non-human organism, like a microorganism or a plant cell, plant or part thereof, especially with non-targeted localization, whereby the respective line discloses in column 7 the fine chemical valine. For example, an increase of the valine of at least 1 percent, particularly in a range of 33 to 99-percent is conferred as compared to a corresponding non-transformed wild type non-human organism.

[41048] Accordingly, in one embodiment, an increase of isoleucine in a non-human organism, as compared to a corresponding non-transformed wild type non-human organism, is conferred in the process of the invention, if the activity of a polypeptide showing the activity of a b1003-protein, or if the activity of the polypeptide B1003, preferably represented by SEQ ID NO. 7942, or a homolog or fragment thereof, or if the activity of a polypeptide encoded by a nucleic acid molecule comprising the nucleic acid SEQ ID NO. 7941, preferably the coding region thereof, or a homolog or fragment thereof, e.g. derived from Escherichia coli, is increased or generated. For example the activity of a nucleic acid molecule or a polypeptide comprising the nucleic acid, preferably the coding region thereof, or polypeptide or the consensus sequence or the polypeptide motif, as depicted in Table I, II or IV, application No. 6, column 5 or 8 in the respective same line as the nucleic acid molecule SEQ ID NO. 7941 or polypeptide SEQ ID NO. 7942, respectively, or a homolog or a fragment thereof, is increased or generated, or if the activity b1003-protein is increased or generated in a non-human organism, like a microorganism or a plant cell, plant or part thereof, especially with non-targeted localization, whereby the respective line discloses in column 7 the fine chemical isoleucine. For example, an increase of the isoleucine of at least 1 percent, particularly in a range of 185 to 1202-percent is conferred as compared to a corresponding non-transformed wild type non-human organism.

[41049] Accordingly, in one embodiment, an increase of leucine in a non-human organism, as compared to a corresponding non-transformed wild type non-human organism, is conferred in the process of the invention, if the activity of a polypeptide showing the activity of a b1003-protein, or if the activity of the polypeptide B1003, preferably represented by SEQ ID NO. 7942, or a homolog or fragment thereof, or if the activity of a polypeptide encoded by a nucleic acid molecule comprising the nucleic acid SEQ ID NO. 7941, preferably the coding region thereof, or a homolog or fragment thereof, e.g. derived from Escherichia coli, is increased or generated. For example the activity of a nucleic acid molecule or a polypeptide comprising the nucleic acid, preferably the coding region thereof, or polypeptide or the consensus sequence or the polypeptide motif, as depicted in Table I, II or IV, application No. 6, column 5 or 8 in the respective same line as the nucleic acid molecule SEQ ID NO. 7941 or polypeptide SEQ ID NO. 7942, respectively, or a homolog or a fragment thereof, is increased or generated, or if the activity b1003-protein is increased or generated in a non-human organism, like a microorganism or a plant cell, plant or part thereof, especially with non-targeted localization, whereby the respective line discloses in column 7 the fine chemical leucine. For example, an increase of the leucine of at least 1 percent, particularly in a range of 183 to 1058-percent is conferred as compared to a corresponding non-transformed wild type non-human organism.

[41050] Accordingly, in one embodiment, an increase of valine in a non-human organism, as compared to a corresponding non-transformed wild type non-human organism, is conferred in the process of the invention, if the activity of a polypeptide showing the activity of a b1003-protein, or if the activity of the polypeptide B1003, preferably represented by SEQ ID NO. 7942, or a homolog or fragment thereof, or if the activity of a polypeptide encoded by a nucleic acid molecule comprising the nucleic acid SEQ ID NO. 7941, preferably the coding region thereof, or a homolog or fragment thereof, e.g. derived from Escherichia coli, is increased or generated. For example the activity of a nucleic acid molecule or a polypeptide comprising the nucleic acid, preferably the coding region thereof, or polypeptide or the consensus sequence or the polypeptide motif, as depicted in Table I, II or IV, application No. 6, column 5 or 8 in the respective same line as the nucleic acid molecule SEQ ID NO. 7941 or polypeptide SEQ ID NO. 7942, respectively, or a homolog or a fragment thereof, is increased or generated, or if the activity b1003-protein is increased or generated in a non-human organism, like a microorganism or a plant cell, plant or part thereof, especially with non-targeted localization, whereby the respective line discloses in column 7 the fine chemical valine. For example, an increase of the valine of at least 1 percent, particularly in a range of 71 to 549-percent is conferred as compared to a corresponding non-transformed wild type non-human organism.

[41051] Accordingly, in one embodiment, an increase of isoleucine in a non-human organism, as compared to a corresponding non-transformed wild type non-human organism, is conferred in the process of the invention, if the activity of a polypeptide showing the activity of a b1163-protein, or if the activity of the polypeptide B1163, preferably represented by SEQ ID NO. 37395, or a homolog or fragment thereof, or if the activity of a polypeptide encoded by a nucleic acid molecule comprising the nucleic acid SEQ ID NO. 37394, preferably the coding region thereof, or a homolog or fragment thereof, e.g. derived from Escherichia coli, is increased or generated. For example the activity of a nucleic acid molecule or a polypeptide comprising the nucleic acid, preferably the coding region thereof, or polypeptide or the consensus sequence or the polypeptide motif, as depicted in Table I, II or IV, application No. 6, column 5 or 8 in the respective same line as the nucleic acid molecule SEQ ID NO. 37394 or polypeptide SEQ ID NO. 37395, respectively, or a homolog or a fragment thereof, is increased or generated, or if the activity b1163-protein is increased or generated in a non-human organism, like a microorganism or a plant cell, plant or part thereof, especially with non-targeted localization, whereby the respective line discloses in column 7 the fine chemical isoleucine. For example, an increase of the isoleucine of at least 1 percent, particularly in a range of 33 to 107-percent is conferred as compared to a corresponding non-transformed wild type non-human organism.

[41052] Accordingly, in one embodiment, an increase of leucine in a non-human organism, as compared to a corresponding non-transformed wild type non-human organism, is conferred in the process of the invention, if the activity of a polypeptide showing the activity of a b1163-protein, or if the activity of the polypeptide B1163, preferably represented by SEQ ID NO. 37395, or a homolog or fragment thereof, or if the activity of a polypeptide encoded by a nucleic acid molecule comprising the nucleic acid SEQ ID NO. 37394, preferably the coding region thereof, or a homolog or fragment thereof, e.g. derived from Escherichia coli, is increased or generated. For example the activity of a nucleic acid molecule or a polypeptide comprising the nucleic acid, preferably the coding region thereof, or polypeptide or the consensus sequence or the polypeptide motif, as depicted in Table I, II or IV, application No. 6, column 5 or 8 in the respective same line as the nucleic acid molecule SEQ ID NO. 37394 or polypeptide SEQ ID NO. 37395, respectively, or a homolog or a fragment thereof, is increased or generated, or if the activity b1163-protein is increased or generated in a non-human organism, like a microorganism or a plant cell, plant or part thereof, especially with non-targeted localization, whereby the respective line discloses in column 7 the fine chemical leucine. For example, an increase of the leucine of at least 1 percent, particularly in a range of 53 to 134-percent is conferred as compared to a corresponding non-transformed wild type non-human organism.

[41053] Accordingly, in one embodiment, an increase of valine in a non-human organism, as compared to a corresponding non-transformed wild type non-human organism, is conferred in the process of the invention, if the activity of a polypeptide showing the activity of a b1163-protein, or if the activity of the polypeptide B1163, preferably represented by SEQ ID NO. 37395, or a homolog or fragment thereof, or if the activity of a polypeptide encoded by a nucleic acid molecule comprising the nucleic acid SEQ ID NO. 37394, preferably the coding region thereof, or a homolog or fragment thereof, e.g. derived from Escherichia coli, is increased or generated. For example the activity of a nucleic acid molecule or a polypeptide comprising the nucleic acid, preferably the coding region thereof, or polypeptide or the consensus sequence or the polypeptide motif, as depicted in Table I, II or IV, application No. 6, column 5 or 8 in the respective same line as the nucleic acid molecule SEQ ID NO. 37394 or polypeptide SEQ ID NO. 37395, respectively, or a homolog or a fragment thereof, is increased or generated, or if the activity b1163-protein is increased or generated in a non-human organism, like a microorganism or a plant cell, plant or part thereof, especially with non-targeted localization, whereby the respective line discloses in column 7 the fine chemical valine. For example, an increase of the valine of at least 1 percent, particularly in a range of 27 to 47-percent is conferred as compared to a corresponding non-transformed wild type non-human organism.

[41054] Accordingly, in one embodiment, an increase of leucine in a non-human organism, as compared to a corresponding non-transformed wild type non-human organism, is conferred in the process of the invention, if the activity of a polypeptide showing the activity of a DNA polymerase, or if the activity of the polypeptide B1184, preferably represented by SEQ ID NO. 104135, or a homolog or fragment thereof, or if the activity of a polypeptide encoded by a nucleic acid molecule comprising the nucleic acid SEQ ID NO. 104134, preferably the coding region thereof, or a homolog or fragment thereof, e.g. derived from Escherichia coli, is increased or generated. For example the activity of a nucleic acid molecule or a polypeptide comprising the nucleic acid, preferably the coding region thereof, or polypeptide or the consensus sequence or the polypeptide motif, as depicted in Table I, II or IV, application No. 6, column 5 or 8 in the respective same line as the nucleic acid molecule SEQ ID NO. 104134 or polypeptide SEQ ID NO. 104135, respectively, or a homolog or a fragment thereof, is increased or generated, or if the activity DNA polymerase is increased or generated in a non-human organism, like a microorganism or a plant cell, plant or part thereof, especially with plastidic localization, whereby the respective line discloses in column 7 the fine chemical leucine. For example, an increase of the leucine of at least 1 percent, particularly in a range of 31 to 169-percent is conferred as compared to a corresponding non-transformed wild type non-human organism.

[41055] Accordingly, in one embodiment, an increase of valine in a non-human organism, as compared to a corresponding non-transformed wild type non-human organism, is conferred in the process of the invention, if the activity of a polypeptide showing the activity of a DNA polymerase, or if the activity of the polypeptide B1184, preferably represented by SEQ ID NO. 104135, or a homolog or fragment thereof, or if the activity of a polypeptide encoded by a nucleic acid molecule comprising the nucleic acid SEQ ID NO. 104134, preferably the coding region thereof, or a homolog or fragment thereof, e.g. derived from Escherichia coli, is increased or generated. For example the activity of a nucleic acid molecule or a polypeptide comprising the nucleic acid, preferably the coding region thereof, or polypeptide or the consensus sequence or the polypeptide motif, as depicted in Table I, II or IV, application No. 6, column 5 or 8 in the respective same line as the nucleic acid molecule SEQ ID NO. 104134 or polypeptide SEQ ID NO. 104135, respectively, or a homolog or a fragment thereof, is increased or generated, or if the activity DNA polymerase is increased or generated in a non-human organism, like a microorganism or a plant cell, plant or part thereof, especially with plastidic localization, whereby the respective line discloses in column 7 the fine chemical valine. For example, an increase of the valine of at least 1 percent, particularly in a range of 30 to 30-percent is conferred as compared to a corresponding non-transformed wild type non-human organism.

[41056] Accordingly, in one embodiment, an increase of isoleucine in a non-human organism, as compared to a corresponding non-transformed wild type non-human organism, is conferred in the process of the invention, if the activity of a polypeptide showing the activity of a membrane protein, or if the activity of the polypeptide B1255, preferably represented by SEQ ID NO. 37484, or a homolog or fragment thereof, or if the activity of a polypeptide encoded by a nucleic acid molecule comprising the nucleic acid SEQ ID NO. 37483, preferably the coding region thereof, or a homolog or fragment thereof, e.g. derived from Escherichia coli, is increased or generated. For example the activity of a nucleic acid molecule or a polypeptide comprising the nucleic acid, preferably the coding region thereof, or polypeptide or the consensus sequence or the polypeptide motif, as depicted in Table I, II or IV, application No. 6, column 5 or 8 in the respective same line as the nucleic acid molecule SEQ ID NO. 37483 or polypeptide SEQ ID NO. 37484, respectively, or a homolog or a fragment thereof, is increased or generated, or if the activity membrane protein is increased or generated in a non-human organism, like a microorganism or a plant cell, plant or part thereof, especially with non-targeted localization, whereby the respective line discloses in column 7 the fine chemical isoleucine. For example, an increase of the isoleucine of at least 1 percent, particularly in a range of 45 to 155-percent is conferred as compared to a corresponding non-transformed wild type non-human organism.

[41057] Accordingly, in one embodiment, an increase of leucine in a non-human organism, as compared to a corresponding non-transformed wild type non-human organism, is conferred in the process of the invention, if the activity of a polypeptide showing the activity of a membrane protein, or if the activity of the polypeptide B1255, preferably represented by SEQ ID NO. 37484, or a homolog or fragment thereof, or if the activity of a polypeptide encoded by a nucleic acid molecule comprising the nucleic acid SEQ ID NO. 37483, preferably the coding region thereof, or a homolog or fragment thereof, e.g. derived from Escherichia coli, is increased or generated. For example the activity of a nucleic acid molecule or a polypeptide comprising the nucleic acid, preferably the coding region thereof, or polypeptide or the consensus sequence or the polypeptide motif, as depicted in Table I, II or IV, application No. 6, column 5 or 8 in the respective same line as the nucleic acid molecule SEQ ID NO. 37483 or polypeptide SEQ ID NO. 37484, respectively, or a homolog or a fragment thereof, is increased or generated, or if the activity membrane protein is increased or generated in a non-human organism, like a microorganism or a plant cell, plant or part thereof, especially with non-targeted localization, whereby the respective line discloses in column 7 the fine chemical leucine. For example, an increase of the leucine of at least 1 percent, particularly in a range of 54 to 178-percent is conferred as compared to a corresponding non-transformed wild type non-human organism.

[41058] Accordingly, in one embodiment, an increase of valine in a non-human organism, as compared to a corresponding non-transformed wild type non-human organism, is conferred in the process of the invention, if the activity of a polypeptide showing the activity of a membrane protein, or if the activity of the polypeptide B1255, preferably represented by SEQ ID NO. 37484, or a homolog or fragment thereof, or if the activity of a polypeptide encoded by a nucleic acid molecule comprising the nucleic acid SEQ ID NO. 37483, preferably the coding region thereof, or a homolog or fragment thereof, e.g. derived from Escherichia coli, is increased or generated. For example the activity of a nucleic acid molecule or a polypeptide comprising the nucleic acid, preferably the coding region thereof, or polypeptide or the consensus sequence or the polypeptide motif, as depicted in Table I, II or IV, application No. 6, column 5 or 8 in the respective same line as the nucleic acid molecule SEQ ID NO. 37483 or polypeptide SEQ ID NO. 37484, respectively, or a homolog or a fragment thereof, is increased or generated, or if the activity membrane protein is increased or generated in a non-human organism, like a microorganism or a plant cell, plant or part thereof, especially with non-targeted localization, whereby the respective line discloses in column 7 the fine chemical valine. For example, an increase of the valine of at least 1 percent, particularly in a range of 20 to 69-percent is conferred as compared to a corresponding non-transformed wild type non-human organism.

[41059] Accordingly, in one embodiment, an increase of isoleucine in a non-human organism, as compared to a corresponding non-transformed wild type non-human organism, is conferred in the process of the invention, if the activity of a polypeptide showing the activity of a anthranilate synthase component II, or if the activity of the polypeptide B1263, preferably represented by SEQ ID NO. 37540, or a homolog or fragment thereof, or if the activity of a polypeptide encoded by a nucleic acid molecule comprising the nucleic acid SEQ ID NO. 37539, preferably the coding region thereof, or a homolog or fragment thereof, e.g. derived from Escherichia coli, is increased or generated. For example the activity of a nucleic acid molecule or a polypeptide comprising the nucleic acid, preferably the coding region thereof, or polypeptide or the consensus sequence or the polypeptide motif, as depicted in Table I, II or IV, application No. 6, column 5 or 8 in the respective same line as the nucleic acid molecule SEQ ID NO. 37539 or polypeptide SEQ ID NO. 37540, respectively, or a homolog or a fragment thereof, is increased or generated, or if the activity anthranilate synthase component II is increased or generated in a non-human organism, like a microorganism or a plant cell, plant or part thereof, especially with plastidic localization, whereby the respective line discloses in column 7 the fine chemical isoleucine. For example, an increase of the isoleucine of at least 1 percent, particularly in a range of 22 to 106-percent is conferred as compared to a corresponding non-transformed wild type non-human organism.

[41060] Accordingly, in one embodiment, an increase of leucine in a non-human organism, as compared to a corresponding non-transformed wild type non-human organism, is conferred in the process of the invention, if the activity of a polypeptide showing the activity of a anthranilate synthase component II, or if the activity of the polypeptide B1263, preferably represented by SEQ ID NO. 37540, or a homolog or fragment thereof, or if the activity of a polypeptide encoded by a nucleic acid molecule comprising the nucleic acid SEQ ID NO. 37539, preferably the coding region thereof, or a homolog or fragment thereof, e.g. derived from Escherichia coli, is increased or generated. For example the activity of a nucleic acid molecule or a polypeptide comprising the nucleic acid, preferably the coding region thereof, or polypeptide or the consensus sequence or the polypeptide motif, as depicted in Table I, II or IV, application No. 6, column 5 or 8 in the respective same line as the nucleic acid molecule SEQ ID NO. 37539 or polypeptide SEQ ID NO. 37540, respectively, or a homolog or a fragment thereof, is increased or generated, or if the activity anthranilate synthase component II is increased or generated in a non-human organism, like a microorganism or a plant cell, plant or part thereof, especially with plastidic localization, whereby the respective line discloses in column 7 the fine chemical leucine. For example, an increase of the leucine of at least 1 percent, particularly in a range of 58 to 74-percent is conferred as compared to a corresponding non-transformed wild type non-human organism.

[41061] Accordingly, in one embodiment, an increase of valine in a non-human organism, as compared to a corresponding non-transformed wild type non-human organism, is conferred in the process of the invention, if the activity of a polypeptide showing the activity of a anthranilate synthase component II, or if the activity of the polypeptide B1263, preferably represented by SEQ ID NO. 37540, or a homolog or fragment thereof, or if the activity of a polypeptide encoded by a nucleic acid molecule comprising the nucleic acid SEQ ID NO. 37539, preferably the coding region thereof, or a homolog or fragment thereof, e.g. derived from Escherichia coli, is increased or generated. For example the activity of a nucleic acid molecule or a polypeptide comprising the nucleic acid, preferably the coding region thereof, or polypeptide or the consensus sequence or the polypeptide motif, as depicted in Table I, II or IV, application No. 6, column 5 or 8 in the respective same line as the nucleic acid molecule SEQ ID NO. 37539 or polypeptide SEQ ID NO. 37540, respectively, or a homolog or a fragment thereof, is increased or generated, or if the activity anthranilate synthase component II is increased or generated in a non-human organism, like a microorganism or a plant cell, plant or part thereof, especially with plastidic localization, whereby the respective line discloses in column 7 the fine chemical valine. For example, an increase of the valine of at least 1 percent, particularly in a range of 29 to 83-percent is conferred as compared to a corresponding non-transformed wild type non-human organism.

[41062] Accordingly, in one embodiment, an increase of leucine in a non-human organism, as compared to a corresponding non-transformed wild type non-human organism, is conferred in the process of the invention, if the activity of a polypeptide showing the activity of a glutamine synthetase, or if the activity of the polypeptide B1297, preferably represented by SEQ ID NO. 37659, or a homolog or fragment thereof, or if the activity of a polypeptide encoded by a nucleic acid molecule comprising the nucleic acid SEQ ID NO. 37658, preferably the coding region thereof, or a homolog or fragment thereof, e.g. derived from Escherichia coli, is increased or generated. For example the activity of a nucleic acid molecule or a polypeptide comprising the nucleic acid, preferably the coding region thereof, or polypeptide or the consensus sequence or the polypeptide motif, as depicted in Table I, II or IV, application No. 6, column 5 or 8 in the respective same line as the nucleic acid molecule SEQ ID NO. 37658 or polypeptide SEQ ID NO. 37659, respectively, or a homolog or a fragment thereof, is increased or generated, or if the activity glutamine synthetase is increased or generated in a non-human organism, like a microorganism or a plant cell, plant or part thereof, especially with plastidic localization, whereby the respective line discloses in column 7 the fine chemical leucine. For example, an increase of the leucine of at least 1 percent, particularly in a range of 195 to 355-percent is conferred as compared to a corresponding non-transformed wild type non-human organism.

[41063] Accordingly, in one embodiment, an increase of valine in a non-human organism, as compared to a corresponding non-transformed wild type non-human organism, is conferred in the process of the invention, if the activity of a polypeptide showing the activity of a aldehyde dehydrogenase, or if the activity of the polypeptide B1300, preferably represented by SEQ ID NO. 37808, or a homolog or fragment thereof, or if the activity of a polypeptide encoded by a nucleic acid molecule comprising the nucleic acid SEQ ID NO. 37807, preferably the coding region thereof, or a homolog or fragment thereof, e.g. derived from Escherichia coli, is increased or generated. For example the activity of a nucleic acid molecule or a polypeptide comprising the nucleic acid, preferably the coding region thereof, or polypeptide or the consensus sequence or the polypeptide motif, as depicted in Table I, II or IV, application No. 6, column 5 or 8 in the respective same line as the nucleic acid molecule SEQ ID NO. 37807 or polypeptide SEQ ID NO. 37808, respectively, or a homolog or a fragment thereof, is increased or generated, or if the activity aldehyde dehydrogenase is increased or generated in a non-human organism, like a microorganism or a plant cell, plant or part thereof, especially with non-targeted localization, whereby the respective line discloses in column 7 the fine chemical valine. For example, an increase of the valine of at least 1 percent, particularly in a range of 20 to 52-percent is conferred as compared to a corresponding non-transformed wild type non-human organism.

[41064] Accordingly, in one embodiment, an increase of valine in a non-human organism, as compared to a corresponding non-transformed wild type non-human organism, is conferred in the process of the invention, if the activity of a polypeptide showing the activity of a b1445-protein, or if the activity of the polypeptide B1445, preferably represented by SEQ ID NO. 38290, or a homolog or fragment thereof, or if the activity of a polypeptide encoded by a nucleic acid molecule comprising the nucleic acid SEQ ID NO. 38289, preferably the coding region thereof, or a homolog or fragment thereof, e.g. derived from Escherichia coli, is increased or generated. For example the activity of a nucleic acid molecule or a polypeptide comprising the nucleic acid, preferably the coding region thereof, or polypeptide or the consensus sequence or the polypeptide motif, as depicted in Table I, II or IV, application No. 6, column 5 or 8 in the respective same line as the nucleic acid molecule SEQ ID NO. 38289 or polypeptide SEQ ID NO. 38290, respectively, or a homolog or a fragment thereof, is increased or generated, or if the activity b1445-protein is increased or generated in a non-human organism, like a microorganism or a plant cell, plant or part thereof, especially with non-targeted localization, whereby the respective line discloses in column 7 the fine chemical valine. For example, an increase of the valine of at least 1 percent, particularly in a range of 20 to 49-percent is conferred as compared to a corresponding non-transformed wild type non-human organism.

[41065] Accordingly, in one embodiment, an increase of valine in a non-human organism, as compared to a corresponding non-transformed wild type non-human organism, is conferred in the process of the invention, if the activity of a polypeptide showing the activity of a NADP-dependent malic enzyme, or if the activity of the polypeptide B1479, preferably represented by SEQ ID NO. 77775, or a homolog or fragment thereof, or if the activity of a polypeptide encoded by a nucleic acid molecule comprising the nucleic acid SEQ ID NO. 77774, preferably the coding region thereof, or a homolog or fragment thereof, e.g. derived from Escherichia coli, is increased or generated. For example the activity of a nucleic acid molecule or a polypeptide comprising the nucleic acid, preferably the coding region thereof, or polypeptide or the consensus sequence or the polypeptide motif, as depicted in Table I, II or IV, application No. 6, column 5 or 8 in the respective same line as the nucleic acid molecule SEQ ID NO. 77774 or polypeptide SEQ ID NO. 77775, respectively, or a homolog or a fragment thereof, is increased or generated, or if the activity NADP-dependent malic enzyme is increased or generated in a non-human organism, like a microorganism or a plant cell, plant or part thereof, especially with non-targeted localization, whereby the respective line discloses in column 7 the fine chemical valine. For example, an increase of the valine of at least 1 percent, particularly in a range of 40 to 188-percent is conferred as compared to a corresponding non-transformed wild type non-human organism.

[41066] Accordingly, in one embodiment, an increase of isoleucine in a non-human organism, as compared to a corresponding non-transformed wild type non-human organism, is conferred in the process of the invention, if the activity of a polypeptide showing the activity of a b1522-protein, or if the activity of the polypeptide B1522, preferably represented by SEQ ID NO. 7948, or a homolog or fragment thereof, or if the activity of a polypeptide encoded by a nucleic acid molecule comprising the nucleic acid SEQ ID NO. 7947, preferably the coding region thereof, or a homolog or fragment thereof, e.g. derived from Escherichia coli, is increased or generated. For example the activity of a nucleic acid molecule or a polypeptide comprising the nucleic acid, preferably the coding region thereof, or polypeptide or the consensus sequence or the polypeptide motif, as depicted in Table I, II or IV, application No. 6, column 5 or 8 in the respective same line as the nucleic acid molecule SEQ ID NO. 7947 or polypeptide SEQ ID NO. 7948, respectively, or a homolog or a fragment thereof, is increased or generated, or if the activity b1522-protein is increased or generated in a non-human organism, like a microorganism or a plant cell, plant or part thereof, especially with non-targeted localization, whereby the respective line discloses in column 7 the fine chemical isoleucine. For example, an increase of the isoleucine of at least 1 percent, particularly in a range of 41 to 920-percent is conferred as compared to a corresponding non-transformed wild type non-human organism.

[41067] Accordingly, in one embodiment, an increase of leucine in a non-human organism, as compared to a corresponding non-transformed wild type non-human organism, is conferred in the process of the invention, if the activity of a polypeptide showing the activity of a b1522-protein, or if the activity of the polypeptide B1522, preferably represented by SEQ ID NO. 7948, or a homolog or fragment thereof, or if the activity of a polypeptide encoded by a nucleic acid molecule comprising the nucleic acid SEQ ID NO. 7947, preferably the coding region thereof, or a homolog or fragment thereof, e.g. derived from Escherichia coli, is increased or generated. For example the activity of a nucleic acid molecule or a polypeptide comprising the nucleic acid, preferably the coding region thereof, or polypeptide or the consensus sequence or the polypeptide motif, as depicted in Table I, II or IV, application No. 6, column 5 or 8 in the respective same line as the nucleic acid molecule SEQ ID NO. 7947 or polypeptide SEQ ID NO. 7948, respectively, or a homolog or a fragment thereof, is increased or generated, or if the activity b1522-protein is increased or generated in a non-human organism, like a microorganism or a plant cell, plant or part thereof, especially with non-targeted localization, whereby the respective line discloses in column 7 the fine chemical leucine. For example, an increase of the leucine of at least 1 percent, particularly in a range of 213 to 780-percent is conferred as compared to a corresponding non-transformed wild type non-human organism.

[41068] Accordingly, in one embodiment, an increase of valine in a non-human organism, as compared to a corresponding non-transformed wild type non-human organism, is conferred in the process of the invention, if the activity of a polypeptide showing the activity of a b1522-protein, or if the activity of the polypeptide B1522, preferably represented by SEQ ID NO. 7948, or a homolog or fragment thereof, or if the activity of a polypeptide encoded by a nucleic acid molecule comprising the nucleic acid SEQ ID NO. 7947, preferably the coding region thereof, or a homolog or fragment thereof, e.g. derived from Escherichia coli, is increased or generated. For example the activity of a nucleic acid molecule or a polypeptide comprising the nucleic acid, preferably the coding region thereof, or polypeptide or the consensus sequence or the polypeptide motif, as depicted in Table I, II or IV, application No. 6, column 5 or 8 in the respective same line as the nucleic acid molecule SEQ ID NO. 7947 or polypeptide SEQ ID NO. 7948, respectively, or a homolog or a fragment thereof, is increased or generated, or if the activity b1522-protein is increased or generated in a non-human organism, like a microorganism or a plant cell, plant or part thereof, especially with non-targeted localization, whereby the respective line discloses in column 7 the fine chemical valine. For example, an increase of the valine of at least 1 percent, particularly in a range of 20 to 336-percent is conferred as compared to a corresponding non-transformed wild type non-human organism.

[41069] Accordingly, in one embodiment, an increase of isoleucine in a non-human organism, as compared to a corresponding non-transformed wild type non-human organism, is conferred in the process of the invention, if the activity of a polypeptide showing the activity of a acid shock protein, or if the activity of the polypeptide B1597, preferably represented by SEQ ID NO. 38301, or a homolog or fragment thereof, or if the activity of a polypeptide encoded by a nucleic acid molecule comprising the nucleic acid SEQ ID NO. 38300, preferably the coding region thereof, or a homolog or fragment thereof, e.g. derived from Escherichia coli, is increased or generated. For example the activity of a nucleic acid molecule or a polypeptide comprising the nucleic acid, preferably the coding region thereof, or polypeptide or the consensus sequence or the polypeptide motif, as depicted in Table I, II or IV, application No. 6, column 5 or 8 in the respective same line as the nucleic acid molecule SEQ ID NO. 38300 or polypeptide SEQ ID NO. 38301, respectively, or a homolog or a fragment thereof, is increased or generated, or if the activity acid shock protein is increased or generated in a non-human organism, like a microorganism or a plant cell, plant or part thereof, especially with non-targeted localization, whereby the respective line discloses in column 7 the fine chemical isoleucine. For example, an increase of the isoleucine of at least 1 percent, particularly in a range of 69 to 218-percent is conferred as compared to a corresponding non-transformed wild type non-human organism.

[41070] Accordingly, in one embodiment, an increase of leucine in a non-human organism, as compared to a corresponding non-transformed wild type non-human organism, is conferred in the process of the invention, if the activity of a polypeptide showing the activity of a acid shock protein, or if the activity of the polypeptide B1597, preferably represented by SEQ ID NO. 38301, or a homolog or fragment thereof, or if the activity of a polypeptide encoded by a nucleic acid molecule comprising the nucleic acid SEQ ID NO. 38300, preferably the coding region thereof, or a homolog or fragment thereof, e.g. derived from Escherichia coli, is increased or generated. For example the activity of a nucleic acid molecule or a polypeptide comprising the nucleic acid, preferably the coding region thereof, or polypeptide or the consensus sequence or the polypeptide motif, as depicted in Table I, II or IV, application No. 6, column 5 or 8 in the respective same line as the nucleic acid molecule SEQ ID NO. 38300 or polypeptide SEQ ID NO. 38301, respectively, or a homolog or a fragment thereof, is increased or generated, or if the activity acid shock protein is increased or generated in a non-human organism, like a microorganism or a plant cell, plant or part thereof, especially with non-targeted localization, whereby the respective line discloses in column 7 the fine chemical leucine. For example, an increase of the leucine of at least 1 percent, particularly in a range of 75 to 252-percent is conferred as compared to a corresponding non-transformed wild type non-human organism.

[41071] Accordingly, in one embodiment, an increase of valine in a non-human organism, as compared to a corresponding non-transformed wild type non-human organism, is conferred in the process of the invention, if the activity of a polypeptide showing the activity of a acid shock protein, or if the activity of the polypeptide B1597, preferably represented by SEQ ID NO. 38301, or a homolog or fragment thereof, or if the activity of a polypeptide encoded by a nucleic acid molecule comprising the nucleic acid SEQ ID NO. 38300, preferably the coding region thereof, or a homolog or fragment thereof, e.g. derived from Escherichia coli, is increased or generated. For example the activity of a nucleic acid molecule or a polypeptide comprising the nucleic acid, preferably the coding region thereof, or polypeptide or the consensus sequence or the polypeptide motif, as depicted in Table I, II or IV, application No. 6, column 5 or 8 in the respective same line as the nucleic acid molecule SEQ ID NO. 38300 or polypeptide SEQ ID NO. 38301, respectively, or a homolog or a fragment thereof, is increased or generated, or if the activity acid shock protein is increased or generated in a non-human organism, like a microorganism or a plant cell, plant or part thereof, especially with non-targeted localization, whereby the respective line discloses in column 7 the fine chemical valine. For example, an increase of the valine of at least 1 percent, particularly in a range of 44 to 105-percent is conferred as compared to a corresponding non-transformed wild type non-human organism.

[41072] Accordingly, in one embodiment, an increase of valine in a non-human organism, as compared to a corresponding non-transformed wild type non-human organism, is conferred in the process of the invention, if the activity of a polypeptide showing the activity of a transport protein, or if the activity of the polypeptide B1601, preferably represented by SEQ ID NO. 7993, or a homolog or fragment thereof, or if the activity of a polypeptide encoded by a nucleic acid molecule comprising the nucleic acid SEQ ID NO. 7992, preferably the coding region thereof, or a homolog or fragment thereof, e.g. derived from Escherichia coli, is increased or generated. For example the activity of a nucleic acid molecule or a polypeptide comprising the nucleic acid, preferably the coding region thereof, or polypeptide or the consensus sequence or the polypeptide motif, as depicted in Table I, II or IV, application No. 6, column 5 or 8 in the respective same line as the nucleic acid molecule SEQ ID NO. 7992 or polypeptide SEQ ID NO. 7993, respectively, or a homolog or a fragment thereof, is increased or generated, or if the activity transport protein is increased or generated in a non-human organism, like a microorganism or a plant cell, plant or part thereof, especially with non-targeted localization, whereby the respective line discloses in column 7 the fine chemical valine. For example, an increase of the valine of at least 1 percent, particularly in a range of 21 to 42-percent is conferred as compared to a corresponding non-transformed wild type non-human organism.

[41073] Accordingly, in one embodiment, an increase of valine in a non-human organism, as compared to a corresponding non-transformed wild type non-human organism, is conferred in the process of the invention, if the activity of a polypeptide showing the activity of a b1670-protein, or if the activity of the polypeptide B1670, preferably represented by SEQ ID NO. 78754, or a homolog or fragment thereof, or if the activity of a polypeptide encoded by a nucleic acid molecule comprising the nucleic acid SEQ ID NO. 78753, preferably the coding region thereof, or a homolog or fragment thereof, e.g. derived from Escherichia coli, is increased or generated. For example the activity of a nucleic acid molecule or a polypeptide comprising the nucleic acid, preferably the coding region thereof, or polypeptide or the consensus sequence or the polypeptide motif, as depicted in Table I, II or IV, application No. 6, column 5 or 8 in the respective same line as the nucleic acid molecule SEQ ID NO. 78753 or polypeptide SEQ ID NO. 78754, respectively, or a homolog or a fragment thereof, is increased or generated, or if the activity b1670-protein is increased or generated in a non-human organism, like a microorganism or a plant cell, plant or part thereof, especially with non-targeted localization, whereby the respective line discloses in column 7 the fine chemical valine. For example, an increase of the valine of at least 1 percent, particularly in a range of 20 to 80-percent is conferred as compared to a corresponding non-transformed wild type non-human organism.

[41074] Accordingly, in one embodiment, an increase of valine in a non-human organism, as compared to a corresponding non-transformed wild type non-human organism, is conferred in the process of the invention, if the activity of a polypeptide showing the activity of a b1672-protein, or if the activity of the polypeptide B1672, preferably represented by SEQ ID NO. 78772, or a homolog or fragment thereof, or if the activity of a polypeptide encoded by a nucleic acid molecule comprising the nucleic acid SEQ ID NO. 78771, preferably the coding region thereof, or a homolog or fragment thereof, e.g. derived from Escherichia coli, is increased or generated. For example the activity of a nucleic acid molecule or a polypeptide comprising the nucleic acid, preferably the coding region thereof, or polypeptide or the consensus sequence or the polypeptide motif, as depicted in Table I, II or IV, application No. 6, column 5 or 8 in the respective same line as the nucleic acid molecule SEQ ID NO. 78771 or polypeptide SEQ ID NO. 78772, respectively, or a homolog or a fragment thereof, is increased or generated, or if the activity b1672-protein is increased or generated in a non-human organism, like a microorganism or a plant cell, plant or part thereof, especially with non-targeted localization, whereby the respective line discloses in column 7 the fine chemical valine. For example, an increase of the valine of at least 1 percent, particularly in a range of 23 to 90-percent is conferred as compared to a corresponding non-transformed wild type non-human organism.

[41075] Accordingly, in one embodiment, an increase of leucine in a non-human organism, as compared to a corresponding non-transformed wild type non-human organism, is conferred in the process of the invention, if the activity of a polypeptide showing the activity of a pyruvate kinase, or if the activity of the polypeptide B1854, preferably represented by SEQ ID NO. 8364, or a homolog or fragment thereof, or if the activity of a polypeptide encoded by a nucleic acid molecule comprising the nucleic acid SEQ ID NO. 8363, preferably the coding region thereof, or a homolog or fragment thereof, e.g. derived from Escherichia coli, is increased or generated. For example the activity of a nucleic acid molecule or a polypeptide comprising the nucleic acid, preferably the coding region thereof, or polypeptide or the consensus sequence or the polypeptide motif, as depicted in Table I, II or IV, application No. 6, column 5 or 8 in the respective same line as the nucleic acid molecule SEQ ID NO. 8363 or polypeptide SEQ ID NO. 8364, respectively, or a homolog or a fragment thereof, is increased or generated, or if the activity pyruvate kinase is increased or generated in a non-human organism, like a microorganism or a plant cell, plant or part thereof, especially with plastidic localization, whereby the respective line discloses in column 7 the fine chemical leucine. For example, an increase of the leucine of at least 1 percent, particularly in a range of 58 to 227-percent is conferred as compared to a corresponding non-transformed wild type non-human organism.

[41076] Accordingly, in one embodiment, an increase of valine in a non-human organism, as compared to a corresponding non-transformed wild type non-human organism, is conferred in the process of the invention, if the activity of a polypeptide showing the activity of a cytochrome c-type protein, or if the activity of the polypeptide B1873, preferably represented by SEQ ID NO. 78971, or a homolog or fragment thereof, or if the activity of a polypeptide encoded by a nucleic acid molecule comprising the nucleic acid SEQ ID NO. 78970, preferably the coding region thereof, or a homolog or fragment thereof, e.g. derived from Escherichia coli, is increased or generated. For example the activity of a nucleic acid molecule or a polypeptide comprising the nucleic acid, preferably the coding region thereof, or polypeptide or the consensus sequence or the polypeptide motif, as depicted in Table I, II or IV, application No. 6, column 5 or 8 in the respective same line as the nucleic acid molecule SEQ ID NO. 78970 or polypeptide SEQ ID NO. 78971, respectively, or a homolog or a fragment thereof, is increased or generated, or if the activity cytochrome c-type protein is increased or generated in a non-human organism, like a microorganism or a plant cell, plant or part thereof, especially with non-targeted localization, whereby the respective line discloses in column 7 the fine chemical valine. For example, an increase of the valine of at least 1 percent, particularly in a range of 24 to 49-percent is conferred as compared to a corresponding non-transformed wild type non-human organism.

[41077] Accordingly, in one embodiment, an increase of isoleucine in a non-human organism, as compared to a corresponding non-transformed wild type non-human organism, is conferred in the process of the invention, if the activity of a polypeptide showing the activity of a trehalosephosphatase, or if the activity of the polypeptide B1897, preferably represented by SEQ ID NO. 79057, or a homolog or fragment thereof, or if the activity of a polypeptide encoded by a nucleic acid molecule comprising the nucleic acid SEQ ID NO. 79056, preferably the coding region thereof, or a homolog or fragment thereof, e.g. derived from Escherichia coli, is increased or generated. For example the activity of a nucleic acid molecule or a polypeptide comprising the nucleic acid, preferably the coding region thereof, or polypeptide or the consensus sequence or the polypeptide motif, as depicted in Table I, II or IV, application No. 6, column 5 or 8 in the respective same line as the nucleic acid molecule SEQ ID NO. 79056 or polypeptide SEQ ID NO. 79057, respectively, or a homolog or a fragment thereof, is increased or generated, or if the activity trehalose-phosphatase is increased or generated in a non-human organism, like a microorganism or a plant cell, plant or part thereof, especially with non-targeted localization, whereby the respective line discloses in column 7 the fine chemical isoleucine. For example, an increase of the isoleucine of at least 1 percent, particularly in a range of 41 to 333-percent is conferred as compared to a corresponding non-transformed wild type non-human organism.

[41078] Accordingly, in one embodiment, an increase of leucine in a non-human organism, as compared to a corresponding non-transformed wild type non-human organism, is conferred in the process of the invention, if the activity of a polypeptide showing the activity of a trehalose-phosphatase, or if the activity of the polypeptide B1897, preferably represented by SEQ ID NO. 79057, or a homolog or fragment thereof, or if the activity of a polypeptide encoded by a nucleic acid molecule comprising the nucleic acid SEQ ID NO. 79056, preferably the coding region thereof, or a homolog or fragment thereof, e.g. derived from Escherichia coli, is increased or generated. For example the activity of a nucleic acid molecule or a polypeptide comprising the nucleic acid, preferably the coding region thereof, or polypeptide or the consensus sequence or the polypeptide motif, as depicted in Table I, II or IV, application No. 6, column 5 or 8 in the respective same line as the nucleic acid molecule SEQ ID NO. 79056 or polypeptide SEQ ID NO. 79057, respectively, or a homolog or a fragment thereof, is increased or generated, or if the activity trehalose-phosphatase is increased or generated in a non-human organism, like a microorganism or a plant cell, plant or part thereof, especially with non-targeted localization, whereby the respective line discloses in column 7 the fine chemical leucine. For example, an increase of the leucine of at least 1 percent, particularly in a range of 154 to 467-percent is conferred as compared to a corresponding non-transformed wild type non-human organism.

[41079] Accordingly, in one embodiment, an increase of valine in a non-human organism, as compared to a corresponding non-transformed wild type non-human organism, is conferred in the process of the invention, if the activity of a polypeptide showing the activity of a trehalose-phosphatase, or if the activity of the polypeptide B1897, preferably represented by SEQ ID NO. 79057, or a homolog or fragment thereof, or if the activity of a polypeptide encoded by a nucleic acid molecule comprising the nucleic acid SEQ ID NO. 79056, preferably the coding region thereof, or a homolog or fragment thereof, e.g. derived from Escherichia coli, is increased or generated. For example the activity of a nucleic acid molecule or a polypeptide comprising the nucleic acid, preferably the coding region thereof, or polypeptide or the consensus sequence or the polypeptide motif, as depicted in Table I, II or IV, application No. 6, column 5 or 8 in the respective same line as the nucleic acid molecule SEQ ID NO. 79056 or polypeptide SEQ ID NO. 79057, respectively, or a homolog or a fragment thereof, is increased or generated, or if the activity trehalose-phosphatase is increased or generated in a non-human organism, like a microorganism or a plant cell, plant or part thereof, especially with non-targeted localization, whereby the respective line discloses in column 7 the fine chemical valine. For example, an increase of the valine of at least 1 percent, particularly in a range of 38 to 159-percent is conferred as compared to a corresponding non-transformed wild type non-human organism.

[41080] Accordingly, in one embodiment, an increase of isoleucine in a non-human organism, as compared to a corresponding non-transformed wild type non-human organism, is conferred in the process of the invention, if the activity of a polypeptide showing the activity of a O-antigen chain length determinant, or if the activity of the polypeptide B2027, preferably represented by SEQ ID NO. 79218, or a homolog or fragment thereof, or if the activity of a polypeptide encoded by a nucleic acid molecule comprising the nucleic acid SEQ ID NO. 79217, preferably the coding region thereof, or a homolog or fragment thereof, e.g. derived from Escherichia coli, is increased or generated. For example the activity of a nucleic acid molecule or a polypeptide comprising the nucleic acid, preferably the coding region thereof, or polypeptide or the consensus sequence or the polypeptide motif, as depicted in Table I, II or IV, application No. 6, column 5 or 8 in the respective same line as the nucleic acid molecule SEQ ID NO. 79217 or polypeptide SEQ ID NO. 79218, respectively, or a homolog or a fragment thereof, is increased or generated, or if the activity O-antigen chain length determinant is increased or generated in a non-human organism, like a microorganism or a plant cell, plant or part thereof, especially with non-targeted localization, whereby the respective line discloses in column 7 the fine chemical isoleucine. For example, an increase of the isoleucine of at least 1 percent, particularly in a range of 40 to 1182-percent is conferred as compared to a corresponding non-transformed wild type non-human organism.

[41081] Accordingly, in one embodiment, an increase of leucine in a non-human organism, as compared to a corresponding non-transformed wild type non-human organism, is conferred in the process of the invention, if the activity of a polypeptide showing the activity of a O-antigen chain length determinant, or if the activity of the polypeptide B2027, preferably represented by SEQ ID NO. 79218, or a homolog or fragment thereof, or if the activity of a polypeptide encoded by a nucleic acid molecule comprising the nucleic acid SEQ ID NO. 79217, preferably the coding region thereof, or a homolog or fragment thereof, e.g. derived from Escherichia coli, is increased or generated. For example the activity of a nucleic acid molecule or a polypeptide comprising the nucleic acid, preferably the coding region thereof, or polypeptide or the consensus sequence or the polypeptide motif, as depicted in Table I, II or IV, application No. 6, column 5 or 8 in the respective same line as the nucleic acid molecule SEQ ID NO. 79217 or polypeptide SEQ ID NO. 79218, respectively, or a homolog or a fragment thereof, is increased or generated, or if the activity O-antigen chain length determinant is increased or generated in a non-human organism, like a microorganism or a plant cell, plant or part thereof, especially with non-targeted localization, whereby the respective line discloses in column 7 the fine chemical leucine. For example, an increase of the leucine of at least 1 percent, particularly in a range of 68 to 1185-percent is conferred as compared to a corresponding non-transformed wild type non-human organism.

[41082] Accordingly, in one embodiment, an increase of valine in a non-human organism, as compared to a corresponding non-transformed wild type non-human organism, is conferred in the process of the invention, if the activity of a polypeptide showing the activity of a GDP-mannose 4,6-dehydratase, or if the activity of the polypeptide B2053, preferably represented by SEQ ID NO. 104278, or a homolog or fragment thereof, or if the activity of a polypeptide encoded by a nucleic acid molecule comprising the nucleic acid SEQ ID NO. 104277, preferably the coding region thereof, or a homolog or fragment thereof, e.g. derived from Escherichia coli, is increased or generated. For example the activity of a nucleic acid molecule or a polypeptide comprising the nucleic acid, preferably the coding region thereof, or polypeptide or the consensus sequence or the polypeptide motif, as depicted in Table I, II or IV, application No. 6, column 5 or 8 in the respective same line as the nucleic acid molecule SEQ ID NO. 104277 or polypeptide SEQ ID NO. 104278, respectively, or a homolog or a fragment thereof, is increased or generated, or if the activity GDP-mannose 4,6-dehydratase is increased or generated in a non-human organism, like a microorganism or a plant cell, plant or part thereof, especially with non-targeted localization, whereby the respective line discloses in column 7 the fine chemical valine. For example, an increase of the valine of at least 1 percent, particularly in a range of 22 to 50-percent is conferred as compared to a corresponding non-transformed wild type non-human organism.

[41083] Accordingly, in one embodiment, an increase of isoleucine in a non-human organism, as compared to a corresponding non-transformed wild type non-human organism, is conferred in the process of the invention, if the activity of a polypeptide showing the activity of a transport protein, or if the activity of the polypeptide B2063, preferably represented by SEQ ID NO. 38948, or a homolog or fragment thereof, or if the activity of a polypeptide encoded by a nucleic acid molecule comprising the nucleic acid SEQ ID NO. 38947, preferably the coding region thereof, or a homolog or fragment thereof, e.g. derived from Escherichia coli, is increased or generated. For example the activity of a nucleic acid molecule or a polypeptide comprising the nucleic acid, preferably the coding region thereof, or polypeptide or the consensus sequence or the polypeptide motif, as depicted in Table I, II or IV, application No. 6, column 5 or 8 in the respective same line as the nucleic acid molecule SEQ ID NO. 38947 or polypeptide SEQ ID NO. 38948, respectively, or a homolog or a fragment thereof, is increased or generated, or if the activity transport protein is increased or generated in a non-human organism, like a microorganism or a plant cell, plant or part thereof, especially with non-targeted localization, whereby the respective line discloses in column 7 the fine chemical isoleucine. For example, an increase of the isoleucine of at least 1 percent, particularly in a range of 35 to 778-percent is conferred as compared to a corresponding non-transformed wild type non-human organism.

[41084] Accordingly, in one embodiment, an increase of leucine in a non-human organism, as compared to a corresponding non-transformed wild type non-human organism, is conferred in the process of the invention, if the activity of a polypeptide showing the activity of a transport protein, or if the activity of the polypeptide B2063, preferably represented by SEQ ID NO. 38948, or a homolog or fragment thereof, or if the activity of a polypeptide encoded by a nucleic acid molecule comprising the nucleic acid SEQ ID NO. 38947, preferably the coding region thereof, or a homolog or fragment thereof, e.g. derived from Escherichia coli, is increased or generated. For example the activity of a nucleic acid molecule or a polypeptide comprising the nucleic acid, preferably the coding region thereof, or polypeptide or the consensus sequence or the polypeptide motif, as depicted in Table I, II or IV, application No. 6, column 5 or 8 in the respective same line as the nucleic acid molecule SEQ ID NO. 38947 or polypeptide SEQ ID NO. 38948, respectively, or a homolog or a fragment thereof, is increased or generated, or if the activity transport protein is increased or generated in a non-human organism, like a microorganism or a plant cell, plant or part thereof, especially with non-targeted localization, whereby the respective line discloses in column 7 the fine chemical leucine. For example, an increase of the leucine of at least 1 percent, particularly in a range of 62 to 415-percent is conferred as compared to a corresponding non-transformed wild type non-human organism.

[41085] Accordingly, in one embodiment, an increase of valine in a non-human organism, as compared to a corresponding non-transformed wild type non-human organism, is conferred in the process of the invention, if the activity of a polypeptide showing the activity of a Nucleoside monophosphate phosphohydrolase, or if the activity of the polypeptide B2291, preferably represented by SEQ ID NO. 104617, or a homolog or fragment thereof, or if the activity of a polypeptide encoded by a nucleic acid molecule comprising the nucleic acid SEQ ID NO. 104616, preferably the coding region thereof, or a homolog or fragment thereof, e.g. derived from Escherichia coli, is increased or generated. For example the activity of a nucleic acid molecule or a polypeptide comprising the nucleic acid, preferably the coding region thereof, or polypeptide or the consensus sequence or the polypeptide motif, as depicted in Table I, II or IV, application No. 6, column 5 or 8 in the respective same line as the nucleic acid molecule SEQ ID NO. 104616 or polypeptide SEQ ID NO. 104617, respectively, or a homolog or a fragment thereof, is increased or generated, or if the activity Nucleoside monophosphate phosphohydrolase is increased or generated in a non-human organism, like a microorganism or a plant cell, plant or part thereof, especially with non-targeted localization, whereby the respective line discloses in column 7 the fine chemical valine. For example, an increase of the valine of at least 1 percent, particularly in a range of 21 to 41-percent is conferred as compared to a corresponding non-transformed wild type non-human organism.

[41086] Accordingly, in one embodiment, an increase of isoleucine in a non-human organism, as compared to a corresponding non-transformed wild type non-human organism, is conferred in the process of the invention, if the activity of a polypeptide showing the activity of a transcriptional regulator, or if the activity of the polypeptide B2405, preferably represented by SEQ ID NO. 39256, or a homolog or fragment thereof, or if the activity of a polypeptide encoded by a nucleic acid molecule comprising the nucleic acid SEQ ID NO. 39255, preferably the coding region thereof, or a homolog or fragment thereof, e.g. derived from Escherichia coli, is increased or generated. For example the activity of a nucleic acid molecule or a polypeptide comprising the nucleic acid, preferably the coding region thereof, or polypeptide or the consensus sequence or the polypeptide motif, as depicted in Table I, II or IV, application No. 6, column 5 or 8 in the respective same line as the nucleic acid molecule SEQ ID NO. 39255 or polypeptide SEQ ID NO. 39256, respectively, or a homolog or a fragment thereof, is increased or generated, or if the activity transcriptional regulator is increased or generated in a non-human organism, like a microorganism or a plant cell, plant or part thereof, especially with non-targeted localization, whereby the respective line discloses in column 7 the fine chemical isoleucine. For example, an increase of the isoleucine of at least 1 percent, particularly in a range of 54 to 74-percent is conferred as compared to a corresponding non-transformed wild type non-human organism.

[41087] Accordingly, in one embodiment, an increase of valine in a non-human organism, as compared to a corresponding non-transformed wild type non-human organism, is conferred in the process of the invention, if the activity of a polypeptide showing the activity of a transcriptional regulator, or if the activity of the polypeptide B2405, preferably represented by SEQ ID NO. 39256, or a homolog or fragment thereof, or if the activity of a polypeptide encoded by a nucleic acid molecule comprising the nucleic acid SEQ ID NO. 39255, preferably the coding region thereof, or a homolog or fragment thereof, e.g. derived from Escherichia coli, is increased or generated. For example the activity of a nucleic acid molecule or a polypeptide comprising the nucleic acid, preferably the coding region thereof, or polypeptide or the consensus sequence or the polypeptide motif, as depicted in Table I, II or IV, application No. 6, column 5 or 8 in the respective same line as the nucleic acid molecule SEQ ID NO. 39255 or polypeptide SEQ ID NO. 39256, respectively, or a homolog or a fragment thereof, is increased or generated, or if the activity transcriptional regulator is increased or generated in a non-human organism, like a microorganism or a plant cell, plant or part thereof, especially with non-targeted localization, whereby the respective line discloses in column 7 the fine chemical valine. For example, an increase of the valine of at least 1 percent, particularly in a range of 24 to 74-percent is conferred as compared to a corresponding non-transformed wild type non-human organism.

[41088] Accordingly, in one embodiment, an increase of isoleucine in a non-human organism, as compared to a corresponding non-transformed wild type non-human organism, is conferred in the process of the invention, if the activity of a polypeptide showing the activity of a b2513-protein, or if the activity of the polypeptide B2513, preferably represented by SEQ ID NO. 9168, or a homolog or fragment thereof, or if the activity of a polypeptide encoded by a nucleic acid molecule comprising the nucleic acid SEQ ID NO. 9167, preferably the coding region thereof, or a homolog or fragment thereof, e.g. derived from Escherichia coli, is increased or generated. For example the activity of a nucleic acid molecule or a polypeptide comprising the nucleic acid, preferably the coding region thereof, or polypeptide or the consensus sequence or the polypeptide motif, as depicted in Table I, II or IV, application No. 6, column 5 or 8 in the respective same line as the nucleic acid molecule SEQ ID NO. 9167 or polypeptide SEQ ID NO. 9168, respectively, or a homolog or a fragment thereof, is increased or generated, or if the activity b2513-protein is increased or generated in a non-human organism, like a microorganism or a plant cell, plant or part thereof, especially with non-targeted localization, whereby the respective line discloses in column 7 the fine chemical isoleucine. For example, an increase of the isoleucine of at least 1 percent, particularly in a range of 63 to 339-percent is conferred as compared to a corresponding non-transformed wild type non-human organism.

[41089] Accordingly, in one embodiment, an increase of leucine in a non-human organism, as compared to a corresponding non-transformed wild type non-human organism, is conferred in the process of the invention, if the activity of a polypeptide showing the activity of a b2513-protein, or if the activity of the polypeptide B2513, preferably represented by SEQ ID NO. 9168, or a homolog or fragment thereof, or if the activity of a polypeptide encoded by a nucleic acid molecule comprising the nucleic acid SEQ ID NO. 9167, preferably the coding region thereof, or a homolog or fragment thereof, e.g. derived from Escherichia coli, is increased or generated. For example the activity of a nucleic acid molecule or a polypeptide comprising the nucleic acid, preferably the coding region thereof, or polypeptide or the consensus sequence or the polypeptide motif, as depicted in Table I, II or IV, application No. 6, column 5 or 8 in the respective same line as the nucleic acid molecule SEQ ID NO. 9167 or polypeptide SEQ ID NO. 9168, respectively, or a homolog or a fragment thereof, is increased or generated, or if the activity b2513-protein is increased or generated in a non-human organism, like a microorganism or a plant cell, plant or part thereof, especially with non-targeted localization, whereby the respective line discloses in column 7 the fine chemical leucine. For example, an increase of the leucine of at least 1 percent, particularly in a range of 60 to 464-percent is conferred as compared to a corresponding non-transformed wild type non-human organism.

[41090] Accordingly, in one embodiment, an increase of valine in a non-human organism, as compared to a corresponding non-transformed wild type non-human organism, is conferred in the process of the invention, if the activity of a polypeptide showing the activity of a b2513-protein, or if the activity of the polypeptide B2513, preferably represented by SEQ ID NO. 9168, or a homolog or fragment thereof, or if the activity of a polypeptide encoded by a nucleic acid molecule comprising the nucleic acid SEQ ID NO. 9167, preferably the coding region thereof, or a homolog or fragment thereof, e.g. derived from Escherichia coli, is increased or generated. For example the activity of a nucleic acid molecule or a polypeptide comprising the nucleic acid, preferably the coding region thereof, or polypeptide or the consensus sequence or the polypeptide motif, as depicted in Table I, II or IV, application No. 6, column 5 or 8 in the respective same line as the nucleic acid molecule SEQ ID NO. 9167 or polypeptide SEQ ID NO. 9168, respectively, or a homolog or a fragment thereof, is increased or generated, or if the activity b2513-protein is increased or generated in a non-human organism, like a microorganism or a plant cell, plant or part thereof, especially with non-targeted localization, whereby the respective line discloses in column 7 the fine chemical valine. For example, an increase of the valine of at least 1 percent, particularly in a range of 23 to 140-percent is conferred as compared to a corresponding non-transformed wild type non-human organism.

[41091] Accordingly, in one embodiment, an increase of isoleucine in a non-human organism, as compared to a corresponding non-transformed wild type non-human organism, is conferred in the process of the invention, if the activity of a polypeptide showing the activity of a serine hydroxymethyltransferase, or if the activity of the polypeptide B2551, preferably represented by SEQ ID NO. 79628, or a homolog or fragment thereof, or if the activity of a polypeptide encoded by a nucleic acid molecule comprising the nucleic acid SEQ ID NO. 79627, preferably the coding region thereof, or a homolog or fragment thereof, e.g. derived from Escherichia coli, is increased or generated. For example the activity of a nucleic acid molecule or a polypeptide comprising the nucleic acid, preferably the coding region thereof, or polypeptide or the consensus sequence or the polypeptide motif, as depicted in Table I, II or IV, application No. 6, column 5 or 8 in the respective same line as the nucleic acid molecule SEQ ID NO. 79627 or polypeptide SEQ ID NO. 79628, respectively, or a homolog or a fragment thereof, is increased or generated, or if the activity serine hydroxymethyltransferase is increased or generated in a non-human organism, like a microorganism or a plant cell, plant or part thereof, especially with non-targeted localization, whereby the respective line discloses in column 7 the fine chemical isoleucine. For example, an increase of the isoleucine of at least 1 percent, particularly in a range of 24 to 481-percent is conferred as compared to a corresponding non-transformed wild type non-human organism.

[41092] Accordingly, in one embodiment, an increase of valine in a non-human organism, as compared to a corresponding non-transformed wild type non-human organism, is conferred in the process of the invention, if the activity of a polypeptide showing the activity of a b2613-protein, or if the activity of the polypeptide B2613, preferably represented by SEQ ID NO. 40666, or a homolog or fragment thereof, or if the activity of a polypeptide encoded by a nucleic acid molecule comprising the nucleic acid SEQ ID NO. 40665, preferably the coding region thereof, or a homolog or fragment thereof, e.g. derived from Escherichia coli, is increased or generated. For example the activity of a nucleic acid molecule or a polypeptide comprising the nucleic acid, preferably the coding region thereof, or polypeptide or the consensus sequence or the polypeptide motif, as depicted in Table I, II or IV, application No. 6, column 5 or 8 in the respective same line as the nucleic acid molecule SEQ ID NO. 40665 or polypeptide SEQ ID NO. 40666, respectively, or a homolog or a fragment thereof, is increased or generated, or if the activity b2613-protein is increased or generated in a non-human organism, like a microorganism or a plant cell, plant or part thereof, especially with non-targeted localization, whereby the respective line discloses in column 7 the fine chemical valine. For example, an increase of the valine of at least 1 percent, particularly in a range of 24 to 29-percent is conferred as compared to a corresponding non-transformed wild type non-human organism.

[41093] Accordingly, in one embodiment, an increase of isoleucine in a non-human organism, as compared to a corresponding non-transformed wild type non-human organism, is conferred in the process of the invention, if the activity of a polypeptide showing the activity of a transcriptional regulator, or if the activity of the polypeptide B2634, preferably represented by SEQ ID NO. 40727, or a homolog or fragment thereof, or if the activity of a polypeptide encoded by a nucleic acid molecule comprising the nucleic acid SEQ ID NO. 40726, preferably the coding region thereof, or a homolog or fragment thereof, e.g. derived from Escherichia coli, is increased or generated. For example the activity of a nucleic acid molecule or a polypeptide comprising the nucleic acid, preferably the coding region thereof, or polypeptide or the consensus sequence or the polypeptide motif, as depicted in Table I, II or IV, application No. 6, column 5 or 8 in the respective same line as the nucleic acid molecule SEQ ID NO. 40726 or polypeptide SEQ ID NO. 40727, respectively, or a homolog or a fragment thereof, is increased or generated, or if the activity transcriptional regulator is increased or generated in a non-human organism, like a microorganism or a plant cell, plant or part thereof, especially with non-targeted localization, whereby the respective line discloses in column 7 the fine chemical isoleucine. For example, an increase of the isoleucine of at least 1 percent, particularly in a range of 34 to 118-percent is conferred as compared to a corresponding non-transformed wild type non-human organism.

[41094] Accordingly, in one embodiment, an increase of leucine in a non-human organism, as compared to a corresponding non-transformed wild type non-human organism, is conferred in the process of the invention, if the activity of a polypeptide showing the activity of a transcriptional regulator, or if the activity of the polypeptide B2634, preferably represented by SEQ ID NO. 40727, or a homolog or fragment thereof, or if the activity of a polypeptide encoded by a nucleic acid molecule comprising the nucleic acid SEQ ID NO. 40726, preferably the coding region thereof, or a homolog or fragment thereof, e.g. derived from Escherichia coli, is increased or generated. For example the activity of a nucleic acid molecule or a polypeptide comprising the nucleic acid, preferably the coding region thereof, or polypeptide or the consensus sequence or the polypeptide motif, as depicted in Table I, II or IV, application No. 6, column 5 or 8 in the respective same line as the nucleic acid molecule SEQ ID NO. 40726 or polypeptide SEQ ID NO. 40727, respectively, or a homolog or a fragment thereof, is increased or generated, or if the activity transcriptional regulator is increased or generated in a non-human organism, like a microorganism or a plant cell, plant or part thereof, especially with non-targeted localization, whereby the respective line discloses in column 7 the fine chemical leucine. For example, an increase of the leucine of at least 1 percent, particularly in a range of 52 to 124-percent is conferred as compared to a corresponding non-transformed wild type non-human organism.

[41095] Accordingly, in one embodiment, an increase of isoleucine in a non-human organism, as compared to a corresponding non-transformed wild type non-human organism, is conferred in the process of the invention, if the activity of a polypeptide showing the activity of a b2673-protein, or if the activity of the polypeptide B2673, preferably represented by SEQ ID NO. 9245, or a homolog or fragment thereof, or if the activity of a polypeptide encoded by a nucleic acid molecule comprising the nucleic acid SEQ ID NO. 9244, preferably the coding region thereof, or a homolog or fragment thereof, e.g. derived from Escherichia coli, is increased or generated. For example the activity of a nucleic acid molecule or a polypeptide comprising the nucleic acid, preferably the coding region thereof, or polypeptide or the consensus sequence or the polypeptide motif, as depicted in Table I, II or IV, application No. 6, column 5 or 8 in the respective same line as the nucleic acid molecule SEQ ID NO. 9244 or polypeptide SEQ ID NO. 9245, respectively, or a homolog or a fragment thereof, is increased or generated, or if the activity b2673-protein is increased or generated in a non-human organism, like a microorganism or a plant cell, plant or part thereof, especially with non-targeted localization, whereby the respective line discloses in column 7 the fine chemical isoleucine. For example, an increase of the isoleucine of at least 1 percent, particularly in a range of 44 to 144-percent is conferred as compared to a corresponding non-transformed wild type non-human organism.

[41096] Accordingly, in one embodiment, an increase of isoleucine in a non-human organism, as compared to a corresponding non-transformed wild type non-human organism, is conferred in the process of the invention, if the activity of a polypeptide showing the activity of a murein transglycosylase, or if the activity of the polypeptide B2701, preferably represented by SEQ ID NO. 80757, or a homolog or fragment thereof, or if the activity of a polypeptide encoded by a nucleic acid molecule comprising the nucleic acid SEQ ID NO. 80756, preferably the coding region thereof, or a homolog or fragment thereof, e.g. derived from Escherichia coli, is increased or generated. For example the activity of a nucleic acid molecule or a polypeptide comprising the nucleic acid, preferably the coding region thereof, or polypeptide or the consensus sequence or the polypeptide motif, as depicted in Table I, II or IV, application No. 6, column 5 or 8 in the respective same line as the nucleic acid molecule SEQ ID NO. 80756 or polypeptide SEQ ID NO. 80757, respectively, or a homolog or a fragment thereof, is increased or generated, or if the activity murein transglycosylase is increased or generated in a non-human organism, like a microorganism or a plant cell, plant or part thereof, especially with non-targeted localization, whereby the respective line discloses in column 7 the fine chemical isoleucine. For example, an increase of the isoleucine of at least 1 percent, particularly in a range of 57 to 501-percent is conferred as compared to a corresponding non-transformed wild type non-human organism.

[41097] Accordingly, in one embodiment, an increase of leucine in a non-human organism, as compared to a corresponding non-transformed wild type non-human organism, is conferred in the process of the invention, if the activity of a polypeptide showing the activity of a murein transglycosylase, or if the activity of the polypeptide B2701, preferably represented by SEQ ID NO. 80757, or a homolog or fragment thereof, or if the activity of a polypeptide encoded by a nucleic acid molecule comprising the nucleic acid SEQ ID NO. 80756, preferably the coding region thereof, or a homolog or fragment thereof, e.g. derived from Escherichia coli, is increased or generated. For example the activity of a nucleic acid molecule or a polypeptide comprising the nucleic acid, preferably the coding region thereof, or polypeptide or the consensus sequence or the polypeptide motif, as depicted in Table I, II or IV, application No. 6, column 5 or 8 in the respective same line as the nucleic acid molecule SEQ ID NO. 80756 or polypeptide SEQ ID NO. 80757, respectively, or a homolog or a fragment thereof, is increased or generated, or if the activity murein transglycosylase is increased or generated in a non-human organism, like a microorganism or a plant cell, plant or part thereof, especially with non-targeted localization, whereby the respective line discloses in column 7 the fine chemical leucine. For example, an increase of the leucine of at least 1 percent, particularly in a range of 348 to 403-percent is conferred as compared to a corresponding non-transformed wild type non-human organism.

[41098] Accordingly, in one embodiment, an increase of valine in a non-human organism, as compared to a corresponding non-transformed wild type non-human organism, is conferred in the process of the invention, if the activity of a polypeptide showing the activity of a murein transglycosylase, or if the activity of the polypeptide B2701, preferably represented by SEQ ID NO. 80757, or a homolog or fragment thereof, or if the activity of a polypeptide encoded by a nucleic acid molecule comprising the nucleic acid SEQ ID NO. 80756, preferably the coding region thereof, or a homolog or fragment thereof, e.g. derived from Escherichia coli, is increased or generated. For example the activity of a nucleic acid molecule or a polypeptide comprising the nucleic acid, preferably the coding region thereof, or polypeptide or the consensus sequence or the polypeptide motif, as depicted in Table I, II or IV, application No. 6, column 5 or 8 in the respective same line as the nucleic acid molecule SEQ ID NO. 80756 or polypeptide SEQ ID NO. 80757, respectively, or a homolog or a fragment thereof, is increased or generated, or if the activity murein transglycosylase is increased or generated in a non-human organism, like a microorganism or a plant cell, plant or part thereof, especially with non-targeted localization, whereby the respective line discloses in column 7 the fine chemical valine. For example, an increase of the valine of at least 1 percent, particularly in a range of 26 to 218-percent is conferred as compared to a corresponding non-transformed wild type non-human organism.

[41099] Accordingly, in one embodiment, an increase of valine in a non-human organism, as compared to a corresponding non-transformed wild type non-human organism, is conferred in the process of the invention, if the activity of a polypeptide showing the activity of a transcriptional regulator, or if the activity of the polypeptide B2714, preferably represented by SEQ ID NO. 40742, or a homolog or fragment thereof, or if the activity of a polypeptide encoded by a nucleic acid molecule comprising the nucleic acid SEQ ID NO. 40741, preferably the coding region thereof, or a homolog or fragment thereof, e.g. derived from Escherichia coli, is increased or generated. For example the activity of a nucleic acid molecule or a polypeptide comprising the nucleic acid, preferably the coding region thereof, or polypeptide or the consensus sequence or the polypeptide motif, as depicted in Table I, II or IV, application No. 6, column 5 or 8 in the respective same line as the nucleic acid molecule SEQ ID NO. 40741 or polypeptide SEQ ID NO. 40742, respectively, or a homolog or a fragment thereof, is increased or generated, or if the activity transcriptional regulator is increased or generated in a non-human organism, like a microorganism or a plant cell, plant or part thereof, especially with non-targeted localization, whereby the respective line discloses in column 7 the fine chemical valine. For example, an increase of the valine of at least 1 percent, particularly in a range of 21 to 38-percent is conferred as compared to a corresponding non-transformed wild type non-human organism.

[41100] Accordingly, in one embodiment, an increase of isoleucine in a non-human organism, as compared to a corresponding non-transformed wild type non-human organism, is conferred in the process of the invention, if the activity of a polypeptide showing the activity of a b2739-protein, or if the activity of the polypeptide B2739, preferably represented by SEQ ID NO. 80907, or a homolog or fragment thereof, or if the activity of a polypeptide encoded by a nucleic acid molecule comprising the nucleic acid SEQ ID NO. 80906, preferably the coding region thereof, or a homolog or fragment thereof, e.g. derived from Escherichia coli, is increased or generated. For example the activity of a nucleic acid molecule or a polypeptide comprising the nucleic acid, preferably the coding region thereof, or polypeptide or the consensus sequence or the polypeptide motif, as depicted in Table I, II or IV, application No. 6, column 5 or 8 in the respective same line as the nucleic acid molecule SEQ ID NO. 80906 or polypeptide SEQ ID NO. 80907, respectively, or a homolog or a fragment thereof, is increased or generated, or if the activity b2739-protein is increased or generated in a non-human organism, like a microorganism or a plant cell, plant or part thereof, especially with non-targeted localization, whereby the respective line discloses in column 7 the fine chemical isoleucine. For example, an increase of the isoleucine of at least 1 percent, particularly in a range of 51 to 542-percent is conferred as compared to a corresponding non-transformed wild type non-human organism.

[41101] Accordingly, in one embodiment, an increase of leucine in a non-human organism, as compared to a corresponding non-transformed wild type non-human organism, is conferred in the process of the invention, if the activity of a polypeptide showing the activity of a b2739-protein, or if the activity of the polypeptide B2739, preferably represented by SEQ ID NO. 80907, or a homolog or fragment thereof, or if the activity of a polypeptide encoded by a nucleic acid molecule comprising the nucleic acid SEQ ID NO. 80906, preferably the coding region thereof, or a homolog or fragment thereof, e.g. derived from Escherichia coli, is increased or generated. For example the activity of a nucleic acid molecule or a polypeptide comprising the nucleic acid, preferably the coding region thereof, or polypeptide or the consensus sequence or the polypeptide motif, as depicted in Table I, II or IV, application No. 6, column 5 or 8 in the respective same line as the nucleic acid molecule SEQ ID NO. 80906 or polypeptide SEQ ID NO. 80907, respectively, or a homolog or a fragment thereof, is increased or generated, or if the activity b2739-protein is increased or generated in a non-human organism, like a microorganism or a plant cell, plant or part thereof, especially with non-targeted localization, whereby the respective line discloses in column 7 the fine chemical leucine. For example, an increase of the leucine of at least 1 percent, particularly in a range of 57 to 800-percent is conferred as compared to a corresponding non-transformed wild type non-human organism.

[41102] Accordingly, in one embodiment, an increase of valine in a non-human organism, as compared to a corresponding non-transformed wild type non-human organism, is conferred in the process of the invention, if the activity of a polypeptide showing the activity of a b2739-protein, or if the activity of the polypeptide B2739, preferably represented by SEQ ID NO. 80907, or a homolog or fragment thereof, or if the activity of a polypeptide encoded by a nucleic acid molecule comprising the nucleic acid SEQ ID NO. 80906, preferably the coding region thereof, or a homolog or fragment thereof, e.g. derived from Escherichia coli, is increased or generated. For example the activity of a nucleic acid molecule or a polypeptide comprising the nucleic acid, preferably the coding region thereof, or polypeptide or the consensus sequence or the polypeptide motif, as depicted in Table I, II or IV, application No. 6, column 5 or 8 in the respective same line as the nucleic acid molecule SEQ ID NO. 80906 or polypeptide SEQ ID NO. 80907, respectively, or a homolog or a fragment thereof, is increased or generated, or if the activity b2739-protein is increased or generated in a non-human organism, like a microorganism or a plant cell, plant or part thereof, especially with non-targeted localization, whereby the respective line discloses in column 7 the fine chemical valine. For example, an increase of the valine of at least 1 percent, particularly in a range of 70 to 169-percent is conferred as compared to a corresponding non-transformed wild type non-human organism.

[41103] Accordingly, in one embodiment, an increase of isoleucine in a non-human organism, as compared to a corresponding non-transformed wild type non-human organism, is conferred in the process of the invention, if the activity of a polypeptide showing the activity of a b2812-protein, or if the activity of the polypeptide B2812, preferably represented by SEQ ID NO. 40796, or a homolog or fragment thereof, or if the activity of a polypeptide encoded by a nucleic acid molecule comprising the nucleic acid SEQ ID NO. 40795, preferably the coding region thereof, or a homolog or fragment thereof, e.g. derived from Escherichia coli, is increased or generated. For example the activity of a nucleic acid molecule or a polypeptide comprising the nucleic acid, preferably the coding region thereof, or polypeptide or the consensus sequence or the polypeptide motif, as depicted in Table I, II or IV, application No. 6, column 5 or 8 in the respective same line as the nucleic acid molecule SEQ ID NO. 40795 or polypeptide SEQ ID NO. 40796, respectively, or a homolog or a fragment thereof, is increased or generated, or if the activity b2812-protein is increased or generated in a non-human organism, like a microorganism or a plant cell, plant or part thereof, especially with non-targeted localization, whereby the respective line discloses in column 7 the fine chemical isoleucine. For example, an increase of the isoleucine of at least 1 percent, particularly in a range of 50 to 171-percent is conferred as compared to a corresponding non-transformed wild type non-human organism.

[41104] Accordingly, in one embodiment, an increase of leucine in a non-human organism, as compared to a corresponding non-transformed wild type non-human organism, is conferred in the process of the invention, if the activity of a polypeptide showing the activity of a b2812-protein, or if the activity of the polypeptide B2812, preferably represented by SEQ ID NO. 40796, or a homolog or fragment thereof, or if the activity of a polypeptide encoded by a nucleic acid molecule comprising the nucleic acid SEQ ID NO. 40795, preferably the coding region thereof, or a homolog or fragment thereof, e.g. derived from Escherichia coli, is increased or generated. For example the activity of a nucleic acid molecule or a polypeptide comprising the nucleic acid, preferably the coding region thereof, or polypeptide or the consensus sequence or the polypeptide motif, as depicted in Table I, II or IV, application No. 6, column 5 or 8 in the respective same line as the nucleic acid molecule SEQ ID NO. 40795 or polypeptide SEQ ID NO. 40796, respectively, or a homolog or a fragment thereof, is increased or generated, or if the activity b2812-protein is increased or generated in a non-human organism, like a microorganism or a plant cell, plant or part thereof, especially with non-targeted localization, whereby the respective line discloses in column 7 the fine chemical leucine. For example, an increase of the leucine of at least 1 percent, particularly in a range of 59 to 203-percent is conferred as compared to a corresponding non-transformed wild type non-human organism.

[41105] Accordingly, in one embodiment, an increase of isoleucine in a non-human organism, as compared to a corresponding non-transformed wild type non-human organism, is conferred in the process of the invention, if the activity of a polypeptide showing the activity of a transcriptional regulator, or if the activity of the polypeptide B2839, preferably represented by SEQ ID NO. 81936, or a homolog or fragment thereof, or if the activity of a polypeptide encoded by a nucleic acid molecule comprising the nucleic acid SEQ ID NO. 81935, preferably the coding region thereof, or a homolog or fragment thereof, e.g. derived from Escherichia coli, is increased or generated. For example the activity of a nucleic acid molecule or a polypeptide comprising the nucleic acid, preferably the coding region thereof, or polypeptide or the consensus sequence or the polypeptide motif, as depicted in Table I, II or IV, application No. 6, column 5 or 8 in the respective same line as the nucleic acid molecule SEQ ID NO. 81935 or polypeptide SEQ ID NO. 81936, respectively, or a homolog or a fragment thereof, is increased or generated, or if the activity transcriptional regulator is increased or generated in a non-human organism, like a microorganism or a plant cell, plant or part thereof, especially with non-targeted localization, whereby the respective line discloses in column 7 the fine chemical isoleucine. For example, an increase of the isoleucine of at least 1 percent, particularly in a range of 35 to 190-percent is conferred as compared to a corresponding non-transformed wild type non-human organism.

[41106] Accordingly, in one embodiment, an increase of leucine in a non-human organism, as compared to a corresponding non-transformed wild type non-human organism, is conferred in the process of the invention, if the activity of a polypeptide showing the activity of a transcriptional regulator, or if the activity of the polypeptide B2839, preferably represented by SEQ ID NO. 81936, or a homolog or fragment thereof, or if the activity of a polypeptide encoded by a nucleic acid molecule comprising the nucleic acid SEQ ID NO. 81935, preferably the coding region thereof, or a homolog or fragment thereof, e.g. derived from Escherichia coli, is increased or generated. For example the activity of a nucleic acid molecule or a polypeptide comprising the nucleic acid, preferably the coding region thereof, or polypeptide or the consensus sequence or the polypeptide motif, as depicted in Table I, II or IV, application No. 6, column 5 or 8 in the respective same line as the nucleic acid molecule SEQ ID NO. 81935 or polypeptide SEQ ID NO. 81936, respectively, or a homolog or a fragment thereof, is increased or generated, or if the activity transcriptional regulator is increased or generated in a non-human organism, like a microorganism or a plant cell, plant or part thereof, especially with non-targeted localization, whereby the respective line discloses in column 7 the fine chemical leucine. For example, an increase of the leucine of at least 1 percent, particularly in a range of 118 to 154-percent is conferred as compared to a corresponding non-transformed wild type non-human organism.

[41107] Accordingly, in one embodiment, an increase of valine in a non-human organism, as compared to a corresponding non-transformed wild type non-human organism, is conferred in the process of the invention, if the activity of a polypeptide showing the activity of a transcriptional regulator, or if the activity of the polypeptide B2839, preferably represented by SEQ ID NO. 81936, or a homolog or fragment thereof, or if the activity of a polypeptide encoded by a nucleic acid molecule comprising the nucleic acid SEQ ID NO. 81935, preferably the coding region thereof, or a homolog or fragment thereof, e.g. derived from Escherichia coli, is increased or generated. For example the activity of a nucleic acid molecule or a polypeptide comprising the nucleic acid, preferably the coding region thereof, or polypeptide or the consensus sequence or the polypeptide motif, as depicted in Table I, II or IV, application No. 6, column 5 or 8 in the respective same line as the nucleic acid molecule SEQ ID NO. 81935 or polypeptide SEQ ID NO. 81936, respectively, or a homolog or a fragment thereof, is increased or generated, or if the activity transcriptional regulator is increased or generated in a non-human organism, like a microorganism or a plant cell, plant or part thereof, especially with non-targeted localization, whereby the respective line discloses in column 7 the fine chemical valine. For example, an increase of the valine of at least 1 percent, particularly in a range of 30 to 94-percent is conferred as compared to a corresponding non-transformed wild type non-human organism.

[41108] Accordingly, in one embodiment, an increase of isoleucine in a non-human organism, as compared to a corresponding non-transformed wild type non-human organism, is conferred in the process of the invention, if the activity of a polypeptide showing the activity of a ribosephosphate isomerase, constitutive, or if the activity of the polypeptide B2914, preferably represented by SEQ ID NO. 41074, or a homolog or fragment thereof, or if the activity of a polypeptide encoded by a nucleic acid molecule comprising the nucleic acid SEQ ID NO. 41073, preferably the coding region thereof, or a homolog or fragment thereof, e.g. derived from Escherichia coli, is increased or generated. For example the activity of a nucleic acid molecule or a polypeptide comprising the nucleic acid, preferably the coding region thereof, or polypeptide or the consensus sequence or the polypeptide motif, as depicted in Table I, II or IV, application No. 6, column 5 or 8 in the respective same line as the nucleic acid molecule SEQ ID NO. 41073 or polypeptide SEQ ID NO. 41074, respectively, or a homolog or a fragment thereof, is increased or generated, or if the activity ribosephosphate isomerase, constitutive is increased or generated in a non-human organism, like a microorganism or a plant cell, plant or part thereof, especially with non-targeted localization, whereby the respective line discloses in column 7 the fine chemical isoleucine. For example, an increase of the isoleucine of at least 1 percent, particularly in a range of 30 to 97-percent is conferred as compared to a corresponding non-transformed wild type non-human organism.

[41109] Accordingly, in one embodiment, an increase of valine in a non-human organism, as compared to a corresponding non-transformed wild type non-human organism, is conferred in the process of the invention, if the activity of a polypeptide showing the activity of a arginine exporter protein, or if the activity of the polypeptide B2923, preferably represented by SEQ ID NO. 9334, or a homolog or fragment thereof, or if the activity of a polypeptide encoded by a nucleic acid molecule comprising the nucleic acid SEQ ID NO. 9333, preferably the coding region thereof, or a homolog or fragment thereof, e.g. derived from Escherichia coli, is increased or generated. For example the activity of a nucleic acid molecule or a polypeptide comprising the nucleic acid, preferably the coding region thereof, or polypeptide or the consensus sequence or the polypeptide motif, as depicted in Table I, II or IV, application No. 6, column 5 or 8 in the respective same line as the nucleic acid molecule SEQ ID NO. 9333 or polypeptide SEQ ID NO. 9334, respectively, or a homolog or a fragment thereof, is increased or generated, or if the activity arginine exporter protein is increased or generated in a non-human organism, like a microorganism or a plant cell, plant or part thereof, especially with non-targeted localization, whereby the respective line discloses in column 7 the fine chemical valine. For example, an increase of the valine of at least 1 percent, particularly in a range of 23 to 27-percent is conferred as compared to a corresponding non-transformed wild type non-human organism.

[41110] Accordingly, in one embodiment, an increase of isoleucine in a non-human organism, as compared to a corresponding non-transformed wild type non-human organism, is conferred in the process of the invention, if the activity of a polypeptide showing the activity of a glycoprotease, or if the activity of the polypeptide B3064, preferably represented by SEQ ID NO. 42047, or a homolog or fragment thereof, or if the activity of a polypeptide encoded by a nucleic acid molecule comprising the nucleic acid SEQ ID NO. 42046, preferably the coding region thereof, or a homolog or fragment thereof, e.g. derived from Escherichia coli, is increased or generated. For example the activity of a nucleic acid molecule or a polypeptide comprising the nucleic acid, preferably the coding region thereof, or polypeptide or the consensus sequence or the polypeptide motif, as depicted in Table I, II or IV, application No. 6, column 5 or 8 in the respective same line as the nucleic acid molecule SEQ ID NO. 42046 or polypeptide SEQ ID NO. 42047, respectively, or a homolog or a fragment thereof, is increased or generated, or if the activity glycoprotease is increased or generated in a non-human organism, like a microorganism or a plant cell, plant or part thereof, especially with non-targeted localization, whereby the respective line discloses in column 7 the fine chemical isoleucine. For example, an increase of the isoleucine of at least 1 percent, particularly in a range of 25 to 100-percent is conferred as compared to a corresponding non-transformed wild type non-human organism.

[41111] Accordingly, in one embodiment, an increase of leucine in a non-human organism, as compared to a corresponding non-transformed wild type non-human organism, is conferred in the process of the invention, if the activity of a polypeptide showing the activity of a glycoprotease, or if the activity of the polypeptide B3064, preferably represented by SEQ ID NO. 42047, or a homolog or fragment thereof, or if the activity of a polypeptide encoded by a nucleic acid molecule comprising the nucleic acid SEQ ID NO. 42046, preferably the coding region thereof, or a homolog or fragment thereof, e.g. derived from Escherichia coli, is increased or generated. For example the activity of a nucleic acid molecule or a polypeptide comprising the nucleic acid, preferably the coding region thereof, or polypeptide or the consensus sequence or the polypeptide motif, as depicted in Table I, II or IV, application No. 6, column 5 or 8 in the respective same line as the nucleic acid molecule SEQ ID NO. 42046 or polypeptide SEQ ID NO. 42047, respectively, or a homolog or a fragment thereof, is increased or generated, or if the activity glycoprotease is increased or generated in a non-human organism, like a microorganism or a plant cell, plant or part thereof, especially with non-targeted localization, whereby the respective line discloses in column 7 the fine chemical leucine. For example, an increase of the leucine of at least 1 percent, particularly in a range of 32 to 127-percent is conferred as compared to a corresponding non-transformed wild type non-human organism.

[41112] Accordingly, in one embodiment, an increase of valine in a non-human organism, as compared to a corresponding non-transformed wild type non-human organism, is conferred in the process of the invention, if the activity of a polypeptide showing the activity of a glycoprotease, or if the activity of the polypeptide B3064, preferably represented by SEQ ID NO. 42047, or a homolog or fragment thereof, or if the activity of a polypeptide encoded by a nucleic acid molecule comprising the nucleic acid SEQ ID NO. 42046, preferably the coding region thereof, or a homolog or fragment thereof, e.g. derived from Escherichia coli, is increased or generated. For example the activity of a nucleic acid molecule or a polypeptide comprising the nucleic acid, preferably the coding region thereof, or polypeptide or the consensus sequence or the polypeptide motif, as depicted in Table I, II or IV, application No. 6, column 5 or 8 in the respective same line as the nucleic acid molecule SEQ ID NO. 42046 or polypeptide SEQ ID NO. 42047, respectively, or a homolog or a fragment thereof, is increased or generated, or if the activity glycoprotease is increased or generated in a non-human organism, like a microorganism or a plant cell, plant or part thereof, especially with non-targeted localization, whereby the respective line discloses in column 7 the fine chemical valine. For example, an increase of the valine of at least 1 percent, particularly in a range of 32 to 82-percent is conferred as compared to a corresponding non-transformed wild type non-human organism.

[41113] Accordingly, in one embodiment, an increase of isoleucine in a non-human organism, as compared to a corresponding non-transformed wild type non-human organism, is conferred in the process of the invention, if the activity of a polypeptide showing the activity of a b3083-protein, or if the activity of the polypeptide B3083, preferably represented by SEQ ID NO. 82425, or a homolog or fragment thereof, or if the activity of a polypeptide encoded by a nucleic acid molecule comprising the nucleic acid SEQ ID NO. 82424, preferably the coding region thereof, or a homolog or fragment thereof, e.g. derived from Escherichia coli, is increased or generated. For example the activity of a nucleic acid molecule or a polypeptide comprising the nucleic acid, preferably the coding region thereof, or polypeptide or the consensus sequence or the polypeptide motif, as depicted in Table I, II or IV, application No. 6, column 5 or 8 in the respective same line as the nucleic acid molecule SEQ ID NO. 82424 or polypeptide SEQ ID NO. 82425, respectively, or a homolog or a fragment thereof, is increased or generated, or if the activity b3083-protein is increased or generated in a non-human organism, like a microorganism or a plant cell, plant or part thereof, especially with non-targeted localization, whereby the respective line discloses in column 7 the fine chemical isoleucine. For example, an increase of the isoleucine of at least 1 percent, particularly in a range of 40 to 74-percent is conferred as compared to a corresponding non-transformed wild type non-human organism.

[41114] Accordingly, in one embodiment, an increase of valine in a non-human organism, as compared to a corresponding non-transformed wild type non-human organism, is conferred in the process of the invention, if the activity of a polypeptide showing the activity of a b3083-protein, or if the activity of the polypeptide B3083, preferably represented by SEQ ID NO. 82425, or a homolog or fragment thereof, or if the activity of a polypeptide encoded by a nucleic acid molecule comprising the nucleic acid SEQ ID NO. 82424, preferably the coding region thereof, or a homolog or fragment thereof, e.g. derived from Escherichia coli, is increased or generated. For example the activity of a nucleic acid molecule or a polypeptide comprising the nucleic acid, preferably the coding region thereof, or polypeptide or the consensus sequence or the polypeptide motif, as depicted in Table I, II or IV, application No. 6, column 5 or 8 in the respective same line as the nucleic acid molecule SEQ ID NO. 82424 or polypeptide SEQ ID NO. 82425, respectively, or a homolog or a fragment thereof, is increased or generated, or if the activity b3083-protein is increased or generated in a non-human organism, like a microorganism or a plant cell, plant or part thereof, especially with non-targeted localization, whereby the respective line discloses in column 7 the fine chemical valine. For example, an increase of the valine of at least 1 percent, particularly in a range of 22 to 48-percent is conferred as compared to a corresponding non-transformed wild type non-human organism.

[41115] Accordingly, in one embodiment, an increase of leucine in a non-human organism, as compared to a corresponding non-transformed wild type non-human organism, is conferred in the process of the invention, if the activity of a polypeptide showing the activity of a L-serine dehydratase, or if the activity of the polypeptide B3112, preferably represented by SEQ ID NO. 104661, or a homolog or fragment thereof, or if the activity of a polypeptide encoded by a nucleic acid molecule comprising the nucleic acid SEQ ID NO. 104660, preferably the coding region thereof, or a homolog or fragment thereof, e.g. derived from Escherichia coli, is increased or generated. For example the activity of a nucleic acid molecule or a polypeptide comprising the nucleic acid, preferably the coding region thereof, or polypeptide or the consensus sequence or the polypeptide motif, as depicted in Table I, II or IV, application No. 6, column 5 or 8 in the respective same line as the nucleic acid molecule SEQ ID NO. 104660 or polypeptide SEQ ID NO. 104661, respectively, or a homolog or a fragment thereof, is increased or generated, or if the activity L-serine dehydratase is increased or generated in a non-human organism, like a microorganism or a plant cell, plant or part thereof, especially with plastidic localization, whereby the respective line discloses in column 7 the fine chemical leucine. For example, an increase of the leucine of at least 1 percent, particularly in a range of 49 to 78-percent is conferred as compared to a corresponding non-transformed wild type non-human organism.

[41116] Accordingly, in one embodiment, an increase of valine in a non-human organism, as compared to a corresponding non-transformed wild type non-human organism, is conferred in the process of the invention, if the activity of a polypeptide showing the activity of a threonine dehydratase, or if the activity of the polypeptide B3117, preferably represented by SEQ ID NO. 104872, or a homolog or fragment thereof, or if the activity of a polypeptide encoded by a nucleic acid molecule comprising the nucleic acid SEQ ID NO. 104871, preferably the coding region thereof, or a homolog or fragment thereof, e.g. derived from Escherichia coli, is increased or generated. For example the activity of a nucleic acid molecule or a polypeptide comprising the nucleic acid, preferably the coding region thereof, or polypeptide or the consensus sequence or the polypeptide motif, as depicted in Table I, II or IV, application No. 6, column 5 or 8 in the respective same line as the nucleic acid molecule SEQ ID NO. 104871 or polypeptide SEQ ID NO. 104872, respectively, or a homolog or a fragment thereof, is increased or generated, or if the activity threonine dehydratase is increased or generated in a non-human organism, like a microorganism or a plant cell, plant or part thereof, especially with plastidic localization, whereby the respective line discloses in column 7 the fine chemical valine. For example, an increase of the valine of at least 1 percent, particularly in a range of 29 to 130-percent is conferred as compared to a corresponding non-transformed wild type non-human organism.

[41117] Accordingly, in one embodiment, an increase of leucine in a non-human organism, as compared to a corresponding non-transformed wild type non-human organism, is conferred in the process of the invention, if the activity of a polypeptide showing the activity of a acetyl CoA carboxylase, or if the activity of the polypeptide B3256, preferably represented by SEQ ID NO. 9493, or a homolog or fragment thereof, or if the activity of a polypeptide encoded by a nucleic acid molecule comprising the nucleic acid SEQ ID NO. 9492, preferably the coding region thereof, or a homolog or fragment thereof, e.g. derived from Escherichia coli, is increased or generated. For example the activity of a nucleic acid molecule or a polypeptide comprising the nucleic acid, preferably the coding region thereof, or polypeptide or the consensus sequence or the polypeptide motif, as depicted in Table I, II or IV, application No. 6, column 5 or 8 in the respective same line as the nucleic acid molecule SEQ ID NO. 9492 or polypeptide SEQ ID NO. 9493, respectively, or a homolog or a fragment thereof, is increased or generated, or if the activity acetyl CoA carboxylase is increased or generated in a non-human organism, like a microorganism or a plant cell, plant or part thereof, especially with non-targeted localization, whereby the respective line discloses in column 7 the fine chemical leucine. For example, an increase of the leucine of at least 1 percent, particularly in a range of 42 to 465-percent is conferred as compared to a corresponding non-transformed wild type non-human organism.

[41118] Accordingly, in one embodiment, an increase of valine in a non-human organism, as compared to a corresponding non-transformed wild type non-human organism, is conferred in the process of the invention, if the activity of a polypeptide showing the activity of a ABC transporter ATP-binding protein, or if the activity of the polypeptide B3352, preferably represented by SEQ ID NO. 82573, or a homolog or fragment thereof, or if the activity of a polypeptide encoded by a nucleic acid molecule comprising the nucleic acid SEQ ID NO. 82572, preferably the coding region thereof, or a homolog or fragment thereof, e.g. derived from Escherichia coli, is increased or generated. For example the activity of a nucleic acid molecule or a polypeptide comprising the nucleic acid, preferably the coding region thereof, or polypeptide or the consensus sequence or the polypeptide motif, as depicted in Table I, II or IV, application No. 6, column 5 or 8 in the respective same line as the nucleic acid molecule SEQ ID NO. 82572 or polypeptide SEQ ID NO. 82573, respectively, or a homolog or a fragment thereof, is increased or generated, or if the activity ABC transporter ATP-binding protein is increased or generated in a non-human organism, like a microorganism or a plant cell, plant or part thereof, especially with non-targeted localization, whereby the respective line discloses in column 7 the fine chemical valine. For example, an increase of the valine of at least 1 percent, particularly in a range of 21 to 44-percent is conferred as compared to a corresponding non-transformed wild type non-human organism.

[41119] Accordingly, in one embodiment, an increase of isoleucine in a non-human organism, as compared to a corresponding non-transformed wild type non-human organism, is conferred in the process of the invention, if the activity of a polypeptide showing the activity of a glycogen synthase, or if the activity of the polypeptide B3429, preferably represented by SEQ ID NO. 94052, or a homolog or fragment thereof, or if the activity of a polypeptide encoded by a nucleic acid molecule comprising the nucleic acid SEQ ID NO. 94051, preferably the coding region thereof, or a homolog or fragment thereof, e.g. derived from Escherichia coli, is increased or generated. For example the activity of a nucleic acid molecule or a polypeptide comprising the nucleic acid, preferably the coding region thereof, or polypeptide or the consensus sequence or the polypeptide motif, as depicted in Table I, II or IV, application No. 6, column 5 or 8 in the respective same line as the nucleic acid molecule SEQ ID NO. 94051 or polypeptide SEQ ID NO. 94052, respectively, or a homolog or a fragment thereof, is increased or generated, or if the activity glycogen synthase is increased or generated in a non-human organism, like a microorganism or a plant cell, plant or part thereof, especially with mitochondrial localization, whereby the respective line discloses in column 7 the fine chemical isoleucine. For example, an increase of the isoleucine of at least 1 percent, particularly in a range of 73 to 242-percent is conferred as compared to a corresponding non-transformed wild type non-human organism.

[41120] Accordingly, in one embodiment, an increase of leucine in a non-human organism, as compared to a corresponding non-transformed wild type non-human organism, is conferred in the process of the invention, if the activity of a polypeptide showing the activity of a glycogen synthase, or if the activity of the polypeptide B3429, preferably represented by SEQ ID NO. 94052, or a homolog or fragment thereof, or if the activity of a polypeptide encoded by a nucleic acid molecule comprising the nucleic acid SEQ ID NO. 94051, preferably the coding region thereof, or a homolog or fragment thereof, e.g. derived from Escherichia coli, is increased or generated. For example the activity of a nucleic acid molecule or a polypeptide comprising the nucleic acid, preferably the coding region thereof, or polypeptide or the consensus sequence or the polypeptide motif, as depicted in Table I, II or IV, application No. 6, column 5 or 8 in the respective same line as the nucleic acid molecule SEQ ID NO. 94051 or polypeptide SEQ ID NO. 94052, respectively, or a homolog or a fragment thereof, is increased or generated, or if the activity glycogen synthase is increased or generated in a non-human organism, like a microorganism or a plant cell, plant or part thereof, especially with mitochondrial localization, whereby the respective line discloses in column 7 the fine chemical leucine. For example, an increase of the leucine of at least 1 percent, particularly in a range of 53 to 292-percent is conferred as compared to a corresponding non-transformed wild type non-human organism.

[41121] Accordingly, in one embodiment, an increase of valine in a non-human organism, as compared to a corresponding non-transformed wild type non-human organism, is conferred in the process of the invention, if the activity of a polypeptide showing the activity of a b3490-protein, or if the activity of the polypeptide B3490, preferably represented by SEQ ID NO. 105333, or a homolog or fragment thereof, or if the activity of a polypeptide encoded by a nucleic acid molecule comprising the nucleic acid SEQ ID NO. 105332, preferably the coding region thereof, or a homolog or fragment thereof, e.g. derived from Escherichia coli, is increased or generated. For example the activity of a nucleic acid molecule or a polypeptide comprising the nucleic acid, preferably the coding region thereof, or polypeptide or the consensus sequence or the polypeptide motif, as depicted in Table I, II or IV, application No. 6, column 5 or 8 in the respective same line as the nucleic acid molecule SEQ ID NO. 105332 or polypeptide SEQ ID NO. 105333, respectively, or a homolog or a fragment thereof, is increased or generated, or if the activity b3490-protein is increased or generated in a non-human organism, like a microorganism or a plant cell, plant or part thereof, especially with non-targeted localization, whereby the respective line discloses in column 7 the fine chemical valine. For example, an increase of the valine of at least 1 percent, particularly in a range of 21 to 44-percent is conferred as compared to a corresponding non-transformed wild type non-human organism.

[41122] Accordingly, in one embodiment, an increase of isoleucine in a non-human organism, as compared to a corresponding non-transformed wild type non-human organism, is conferred in the process of the invention, if the activity of a polypeptide showing the activity of a valine-pyruvate transaminase, or if the activity of the polypeptide B3572, preferably represented by SEQ ID NO. 10173, or a homolog or fragment thereof, or if the activity of a polypeptide encoded by a nucleic acid molecule comprising the nucleic acid SEQ ID NO. 10172, preferably the coding region thereof, or a homolog or fragment thereof, e.g. derived from Escherichia coli, is increased or generated. For example the activity of a nucleic acid molecule or a polypeptide comprising the nucleic acid, preferably the coding region thereof, or polypeptide or the consensus sequence or the polypeptide motif, as depicted in Table I, II or IV, application No. 6, column 5 or 8 in the respective same line as the nucleic acid molecule SEQ ID NO. 10172 or polypeptide SEQ ID NO. 10173, respectively, or a homolog or a fragment thereof, is increased or generated, or if the activity valine-pyruvate transaminase is increased or generated in a non-human organism, like a microorganism or a plant cell, plant or part thereof, especially with plastidic localization, whereby the respective line discloses in column 7 the fine chemical isoleucine. For example, an increase of the isoleucine of at least 1 percent, particularly in a range of 23 to 132-percent is conferred as compared to a corresponding non-transformed wild type non-human organism.

[41123] Accordingly, in one embodiment, an increase of leucine in a non-human organism, as compared to a corresponding non-transformed wild type non-human organism, is conferred in the process of the invention, if the activity of a polypeptide showing the activity of a valine-pyruvate transaminase, or if the activity of the polypeptide B3572, preferably represented by SEQ ID NO. 10173, or a homolog or fragment thereof, or if the activity of a polypeptide encoded by a nucleic acid molecule comprising the nucleic acid SEQ ID NO. 10172, preferably the coding region thereof, or a homolog or fragment thereof, e.g. derived from Escherichia coli, is increased or generated. For example the activity of a nucleic acid molecule or a polypeptide comprising the nucleic acid, preferably the coding region thereof, or polypeptide or the consensus sequence or the polypeptide motif, as depicted in Table I, II or IV, application No. 6, column 5 or 8 in the respective same line as the nucleic acid molecule SEQ ID NO. 10172 or polypeptide SEQ ID NO. 10173, respectively, or a homolog or a fragment thereof, is increased or generated, or if the activity valine-pyruvate transaminase is increased or generated in a non-human organism, like a microorganism or a plant cell, plant or part thereof, especially with plastidic localization, whereby the respective line discloses in column 7 the fine chemical leucine. For example, an increase of the leucine of at least 1 percent, particularly in a range of 32 to 115-percent is conferred as compared to a corresponding non-transformed wild type non-human organism.

[41124] Accordingly, in one embodiment, an increase of isoleucine in a non-human organism, as compared to a corresponding non-transformed wild type non-human organism, is conferred in the process of the invention, if the activity of a polypeptide showing the activity of a phosphopantetheine adenylyltransferase, or if the activity of the polypeptide B3634, preferably represented by SEQ ID NO. 42932, or a homolog or fragment thereof, or if the activity of a polypeptide encoded by a nucleic acid molecule comprising the nucleic acid SEQ ID NO. 42931, preferably the coding region thereof, or a homolog or fragment thereof, e.g. derived from Escherichia coli, is increased or generated. For example the activity of a nucleic acid molecule or a polypeptide comprising the nucleic acid, preferably the coding region thereof, or polypeptide or the consensus sequence or the polypeptide motif, as depicted in Table I, II or IV, application No. 6, column 5 or 8 in the respective same line as the nucleic acid molecule SEQ ID NO. 42931 or polypeptide SEQ ID NO. 42932, respectively, or a homolog or a fragment thereof, is increased or generated, or if the activity phosphopantetheine adenylyltransferase is increased or generated in a non-human organism, like a microorganism or a plant cell, plant or part thereof, especially with non-targeted localization, whereby the respective line discloses in column 7 the fine chemical isoleucine. For example, an increase of the isoleucine of at least 1 percent, particularly in a range of 42 to 126-percent is conferred as compared to a corresponding non-transformed wild type non-human organism.

[41125] Accordingly, in one embodiment, an increase of leucine in a non-human organism, as compared to a corresponding non-transformed wild type non-human organism, is conferred in the process of the invention, if the activity of a polypeptide showing the activity of a phosphopantetheine adenylyltransferase, or if the activity of the polypeptide B3634, preferably represented by SEQ ID NO. 42932, or a homolog or fragment thereof, or if the activity of a polypeptide encoded by a nucleic acid molecule comprising the nucleic acid SEQ ID NO. 42931, preferably the coding region thereof, or a homolog or fragment thereof, e.g. derived from Escherichia coli, is increased or generated. For example the activity of a nucleic acid molecule or a polypeptide comprising the nucleic acid, preferably the coding region thereof, or polypeptide or the consensus sequence or the polypeptide motif, as depicted in Table I, II or IV, application No. 6, column 5 or 8 in the respective same line as the nucleic acid molecule SEQ ID NO. 42931 or polypeptide SEQ ID NO. 42932, respectively, or a homolog or a fragment thereof, is increased or generated, or if the activity phosphopantetheine adenylyltransferase is increased or generated in a non-human organism, like a microorganism or a plant cell, plant or part thereof, especially with non-targeted localization, whereby the respective line discloses in column 7 the fine chemical leucine. For example, an increase of the leucine of at least 1 percent, particularly in a range of 94 to 289-percent is conferred as compared to a corresponding non-transformed wild type non-human organism.

[41126] Accordingly, in one embodiment, an increase of valine in a non-human organism, as compared to a corresponding non-transformed wild type non-human organism, is conferred in the process of the invention, if the activity of a polypeptide showing the activity of a phosphopantetheine adenylyltransferase, or if the activity of the polypeptide B3634, preferably represented by SEQ ID NO. 42932, or a homolog or fragment thereof, or if the activity of a polypeptide encoded by a nucleic acid molecule comprising the nucleic acid SEQ ID NO. 42931, preferably the coding region thereof, or a homolog or fragment thereof, e.g. derived from Escherichia coli, is increased or generated. For example the activity of a nucleic acid molecule or a polypeptide comprising the nucleic acid, preferably the coding region thereof, or polypeptide or the consensus sequence or the polypeptide motif, as depicted in Table I, II or IV, application No. 6, column 5 or 8 in the respective same line as the nucleic acid molecule SEQ ID NO. 42931 or polypeptide SEQ ID NO. 42932, respectively, or a homolog or a fragment thereof, is increased or generated, or if the activity phosphopantetheine adenylyltransferase is increased or generated in a non-human organism, like a microorganism or a plant cell, plant or part thereof, especially with non-targeted localization, whereby the respective line discloses in column 7 the fine chemical valine. For example, an increase of the valine of at least 1 percent, particularly in a range of 20 to 99-percent is conferred as compared to a corresponding non-transformed wild type non-human organism.

[41127] Accordingly, in one embodiment, an increase of leucine in a non-human organism, as compared to a corresponding non-transformed wild type non-human organism, is conferred in the process of the invention, if the activity of a polypeptide showing the activity of a acetolactate synthase, or if the activity of the polypeptide B3670, preferably represented by SEQ ID NO. 83630, or a homolog or fragment thereof, or if the activity of a polypeptide encoded by a nucleic acid molecule comprising the nucleic acid SEQ ID NO. 83629, preferably the coding region thereof, or a homolog or fragment thereof, e.g. derived from Escherichia coli, is increased or generated. For example the activity of a nucleic acid molecule or a polypeptide comprising the nucleic acid, preferably the coding region thereof, or polypeptide or the consensus sequence or the polypeptide motif, as depicted in Table I, II or IV, application No. 6, column 5 or 8 in the respective same line as the nucleic acid molecule SEQ ID NO. 83629 or polypeptide SEQ ID NO. 83630, respectively, or a homolog or a fragment thereof, is increased or generated, or if the activity acetolactate synthase is increased or generated in a non-human organism, like a microorganism or a plant cell, plant or part thereof, especially with plastidic localization, whereby the respective line discloses in column 7 the fine chemical leucine. For example, an increase of the leucine of at least 1 percent, particularly in a range of 58 to 77-percent is conferred as compared to a corresponding non-transformed wild type non-human organism.

[41128] Accordingly, in one embodiment, an increase of isoleucine in a non-human organism, as compared to a corresponding non-transformed wild type non-human organism, is conferred in the process of the invention, if the activity of a polypeptide showing the activity of a branched-chain amino-acid aminotransferase, or if the activity of the polypeptide B3770, preferably represented by SEQ ID NO. 105355, or a homolog or fragment thereof, or if the activity of a polypeptide encoded by a nucleic acid molecule comprising the nucleic acid SEQ ID NO. 105354, preferably the coding region thereof, or a homolog or fragment thereof, e.g. derived from Escherichia coli, is increased or generated. For example the activity of a nucleic acid molecule or a polypeptide comprising the nucleic acid, preferably the coding region thereof, or polypeptide or the consensus sequence or the polypeptide motif, as depicted in Table I, II or IV, application No. 6, column 5 or 8 in the respective same line as the nucleic acid molecule SEQ ID NO. 105354 or polypeptide SEQ ID NO. 105355, respectively, or a homolog or a fragment thereof, is increased or generated, or if the activity branched-chain amino-acid aminotransferase is increased or generated in a non-human organism, like a microorganism or a plant cell, plant or part thereof, especially with plastidic localization, whereby the respective line discloses in column 7 the fine chemical isoleucine. For example, an increase of the isoleucine of at least 1 percent, particularly in a range of 39 to 57-percent is conferred as compared to a corresponding non-transformed wild type non-human organism.

[41129] Accordingly, in one embodiment, an increase of isoleucine in a non-human organism, as compared to a corresponding non-transformed wild type non-human organism, is conferred in the process of the invention, if the activity of a polypeptide showing the activity of a dihydroxyacid dehydratase, or if the activity of the polypeptide B3771, preferably represented by SEQ ID NO. 10253, or a homolog or fragment thereof, or if the activity of a polypeptide encoded by a nucleic acid molecule comprising the nucleic acid SEQ ID NO. 10252, preferably the coding region thereof, or a homolog or fragment thereof, e.g. derived from Escherichia coli, is increased or generated. For example the activity of a nucleic acid molecule or a polypeptide comprising the nucleic acid, preferably the coding region thereof, or polypeptide or the consensus sequence or the polypeptide motif, as depicted in Table I, II or IV, application No. 6, column 5 or 8 in the respective same line as the nucleic acid molecule SEQ ID NO. 10252 or polypeptide SEQ ID NO. 10253, respectively, or a homolog or a fragment thereof, is increased or generated, or if the activity dihydroxyacid dehydratase is increased or generated in a non-human organism, like a microorganism or a plant cell, plant or part thereof, especially with non-targeted localization, whereby the respective line discloses in column 7 the fine chemical isoleucine. For example, an increase of the isoleucine of at least 1 percent, particularly in a range of 23 to 173-percent is conferred as compared to a corresponding non-transformed wild type non-human organism.

[41130] Accordingly, in one embodiment, an increase of leucine in a non-human organism, as compared to a corresponding non-transformed wild type non-human organism, is conferred in the process of the invention, if the activity of a polypeptide showing the activity of a dihydroxyacid dehydratase, or if the activity of the polypeptide B3771, preferably represented by SEQ ID NO. 10253, or a homolog or fragment thereof, or if the activity of a polypeptide encoded by a nucleic acid molecule comprising the nucleic acid SEQ ID NO. 10252, preferably the coding region thereof, or a homolog or fragment thereof, e.g. derived from Escherichia coli, is increased or generated. For example the activity of a nucleic acid molecule or a polypeptide comprising the nucleic acid, preferably the coding region thereof, or polypeptide or the consensus sequence or the polypeptide motif, as depicted in Table I, II or IV, application No. 6, column 5 or 8 in the respective same line as the nucleic acid molecule SEQ ID NO. 10252 or polypeptide SEQ ID NO. 10253, respectively, or a homolog or a fragment thereof, is increased or generated, or if the activity dihydroxyacid dehydratase is increased or generated in a non-human organism, like a microorganism or a plant cell, plant or part thereof, especially with non-targeted localization, whereby the respective line discloses in column 7 the fine chemical leucine. For example, an increase of the leucine of at least 1 percent, particularly in a range of 43 to 176-percent is conferred as compared to a corresponding non-transformed wild type non-human organism.

[41131] Accordingly, in one embodiment, an increase of leucine in a non-human organism, as compared to a corresponding non-transformed wild type non-human organism, is conferred in the process of the invention, if the activity of a polypeptide showing the activity of a dihydroxyacid dehydratase, or if the activity of the polypeptide B3771, preferably represented by SEQ ID NO. 10253, or a homolog or fragment thereof, or if the activity of a polypeptide encoded by a nucleic acid molecule comprising the nucleic acid SEQ ID NO. 10252, preferably the coding region thereof, or a homolog or fragment thereof, e.g. derived from Escherichia coli, is increased or generated. For example the activity of a nucleic acid molecule or a polypeptide comprising the nucleic acid, preferably the coding region thereof, or polypeptide or the consensus sequence or the polypeptide motif, as depicted in Table I, II or IV, application No. 6, column 5 or 8 in the respective same line as the nucleic acid molecule SEQ ID NO. 10252 or polypeptide SEQ ID NO. 10253, respectively, or a homolog or a fragment thereof, is increased or generated, or if the activity dihydroxyacid dehydratase is increased or generated in a non-human organism, like a microorganism or a plant cell, plant or part thereof, especially with plastidic localization, whereby the respective line discloses in column 7 the fine chemical leucine. For example, an increase of the leucine of at least 1 percent, particularly in a range of 42 to 49-percent is conferred as compared to a corresponding non-transformed wild type non-human organism.

[41132] Accordingly, in one embodiment, an increase of valine in a non-human organism, as compared to a corresponding non-transformed wild type non-human organism, is conferred in the process of the invention, if the activity of a polypeptide showing the activity of a dihydroxyacid dehydratase, or if the activity of the polypeptide B3771, preferably represented by SEQ ID NO. 10253, or a homolog or fragment thereof, or if the activity of a polypeptide encoded by a nucleic acid molecule comprising the nucleic acid SEQ ID NO. 10252, preferably the coding region thereof, or a homolog or fragment thereof, e.g. derived from Escherichia coli, is increased or generated. For example the activity of a nucleic acid molecule or a polypeptide comprising the nucleic acid, preferably the coding region thereof, or polypeptide or the consensus sequence or the polypeptide motif, as depicted in Table I, II or IV, application No. 6, column 5 or 8 in the respective same line as the nucleic acid molecule SEQ ID NO. 10252 or polypeptide SEQ ID NO. 10253, respectively, or a homolog or a fragment thereof, is increased or generated, or if the activity dihydroxyacid dehydratase is increased or generated in a non-human organism, like a microorganism or a plant cell, plant or part thereof, especially with non-targeted localization, whereby the respective line discloses in column 7 the fine chemical valine. For example, an increase of the valine of at least 1 percent, particularly in a range of 37 to 128-percent is conferred as compared to a corresponding non-transformed wild type non-human organism.

[41133] Accordingly, in one embodiment, an increase of isoleucine in a non-human organism, as compared to a corresponding non-transformed wild type non-human organism, is conferred in the process of the invention, if the activity of a polypeptide showing the activity of a ketol-acid reductoisomerase, or if the activity of the polypeptide B3774, preferably represented by SEQ ID NO. 94387, or a homolog or fragment thereof, or if the activity of a polypeptide encoded by a nucleic acid molecule comprising the nucleic acid SEQ ID NO. 94386, preferably the coding region thereof, or a homolog or fragment thereof, e.g. derived from Escherichia coli, is increased or generated. For example the activity of a nucleic acid molecule or a polypeptide comprising the nucleic acid, preferably the coding region thereof, or polypeptide or the consensus sequence or the polypeptide motif, as depicted in Table I, II or IV, application No. 6, column 5 or 8 in the respective same line as the nucleic acid molecule SEQ ID NO. 94386 or polypeptide SEQ ID NO. 94387, respectively, or a homolog or a fragment thereof, is increased or generated, or if the activity ketol-acid reductoisomerase is increased or generated in a non-human organism, like a microorganism or a plant cell, plant or part thereof, especially with non-targeted localization, whereby the respective line discloses in column 7 the fine chemical isoleucine. For example, an increase of the isoleucine of at least 1 percent, particularly in a range of 55 to 61-percent is conferred as compared to a corresponding non-transformed wild type non-human organism.

[41134] Accordingly, in one embodiment, an increase of leucine in a non-human organism, as compared to a corresponding non-transformed wild type non-human organism, is conferred in the process of the invention, if the activity of a polypeptide showing the activity of a ketol-acid reductoisomerase, or if the activity of the polypeptide B3774, preferably represented by SEQ ID NO. 94387, or a homolog or fragment thereof, or if the activity of a polypeptide encoded by a nucleic acid molecule comprising the nucleic acid SEQ ID NO. 94386, preferably the coding region thereof, or a homolog or fragment thereof, e.g. derived from Escherichia coli, is increased or generated.

[41135] For example the activity of a nucleic acid molecule or a polypeptide comprising the nucleic acid, preferably the coding region thereof, or polypeptide or the consensus sequence or the polypeptide motif, as depicted in Table I, II or IV, application No. 6, column 5 or 8 in the respective same line as the nucleic acid molecule SEQ ID NO. 94386 or polypeptide SEQ ID NO. 94387, respectively, or a homolog or a fragment thereof, is increased or generated, or if the activity ketol-acid reductoisomerase is increased or generated in a non-human organism, like a microorganism or a plant cell, plant or part thereof, especially with plastidic localization, whereby the respective line discloses in column 7 the fine chemical leucine. For example, an increase of the leucine of at least 1 percent, particularly in a range of 38 to 127-percent is conferred as compared to a corresponding non-transformed wild type non-human organism.

[41136] Accordingly, in one embodiment, an increase of isoleucine in a non-human organism, as compared to a corresponding non-transformed wild type non-human organism, is conferred in the process of the invention, if the activity of a polypeptide showing the activity of a DNA helicase II, or if the activity of the polypeptide B3813, preferably represented by SEQ ID NO. 43840, or a homolog or fragment thereof, or if the activity of a polypeptide encoded by a nucleic acid molecule comprising the nucleic acid SEQ ID NO. 43839, preferably the coding region thereof, or a homolog or fragment thereof, e.g. derived from Escherichia coli, is increased or generated. For example the activity of a nucleic acid molecule or a polypeptide comprising the nucleic acid, preferably the coding region thereof, or polypeptide or the consensus sequence or the polypeptide motif, as depicted in Table I, II or IV, application No. 6, column 5 or 8 in the respective same line as the nucleic acid molecule SEQ ID NO. 43839 or polypeptide SEQ ID NO. 43840, respectively, or a homolog or a fragment thereof, is increased or generated, or if the activity DNA helicase II is increased or generated in a non-human organism, like a microorganism or a plant cell, plant or part thereof, especially with non-targeted localization, whereby the respective line discloses in column 7 the fine chemical isoleucine. For example, an increase of the isoleucine of at least 1 percent, particularly in a range of 33 to 137-percent is conferred as compared to a corresponding non-transformed wild type non-human organism.

[41137] Accordingly, in one embodiment, an increase of leucine in a non-human organism, as compared to a corresponding non-transformed wild type non-human organism, is conferred in the process of the invention, if the activity of a polypeptide showing the activity of a DNA helicase II, or if the activity of the polypeptide B3813, preferably represented by SEQ ID NO. 43840, or a homolog or fragment thereof, or if the activity of a polypeptide encoded by a nucleic acid molecule comprising the nucleic acid SEQ ID NO. 43839, preferably the coding region thereof, or a homolog or fragment thereof, e.g. derived from Escherichia coli, is increased or generated. For example the activity of a nucleic acid molecule or a polypeptide comprising the nucleic acid, preferably the coding region thereof, or polypeptide or the consensus sequence or the polypeptide motif, as depicted in Table I, II or IV, application No. 6, column 5 or 8 in the respective same line as the nucleic acid molecule SEQ ID NO. 43839 or polypeptide SEQ ID NO. 43840, respectively, or a homolog or a fragment thereof, is increased or generated, or if the activity DNA helicase II is increased or generated in a non-human organism, like a microorganism or a plant cell, plant or part thereof, especially with non-targeted localization, whereby the respective line discloses in column 7 the fine chemical leucine. For example, an increase of the leucine of at least 1 percent, particularly in a range of 40 to 118-percent is conferred as compared to a corresponding non-transformed wild type non-human organism.

[41138] Accordingly, in one embodiment, an increase of valine in a non-human organism, as compared to a corresponding non-transformed wild type non-human organism, is conferred in the process of the invention, if the activity of a polypeptide showing the activity of a DNA helicase II, or if the activity of the polypeptide B3813, preferably represented by SEQ ID NO. 43840, or a homolog or fragment thereof, or if the activity of a polypeptide encoded by a nucleic acid molecule comprising the nucleic acid SEQ ID NO. 43839, preferably the coding region thereof, or a homolog or fragment thereof, e.g. derived from Escherichia coli, is increased or generated. For example the activity of a nucleic acid molecule or a polypeptide comprising the nucleic acid, preferably the coding region thereof, or polypeptide or the consensus sequence or the polypeptide motif, as depicted in Table I, II or IV, application No. 6, column 5 or 8 in the respective same line as the nucleic acid molecule SEQ ID NO. 43839 or polypeptide SEQ ID NO. 43840, respectively, or a homolog or a fragment thereof, is increased or generated, or if the activity DNA helicase II is increased or generated in a non-human organism, like a microorganism or a plant cell, plant or part thereof, especially with non-targeted localization, whereby the respective line discloses in column 7 the fine chemical valine. For example, an increase of the valine of at least 1 percent, particularly in a range of 27 to 94-percent is conferred as compared to a corresponding non-transformed wild type non-human organism.

[41139] Accordingly, in one embodiment, an increase of leucine in a non-human organism, as compared to a corresponding non-transformed wild type non-human organism, is conferred in the process of the invention, if the activity of a polypeptide showing the activity of a protoporphyrin oxidase, or if the activity of the polypeptide B3850, preferably represented by SEQ ID NO. 105603, or a homolog or fragment thereof, or if the activity of a polypeptide encoded by a nucleic acid molecule comprising the nucleic acid SEQ ID NO. 105602, preferably the coding region thereof, or a homolog or fragment thereof, e.g. derived from Escherichia coli, is increased or generated. For example the activity of a nucleic acid molecule or a polypeptide comprising the nucleic acid, preferably the coding region thereof, or polypeptide or the consensus sequence or the polypeptide motif, as depicted in Table I, II or IV, application No. 6, column 5 or 8 in the respective same line as the nucleic acid molecule SEQ ID NO. 105602 or polypeptide SEQ ID NO. 105603, respectively, or a homolog or a fragment thereof, is increased or generated, or if the activity protoporphyrin oxidase is increased or generated in a non-human organism, like a microorganism or a plant cell, plant or part thereof, especially with plastidic localization, whereby the respective line discloses in column 7 the fine chemical leucine. For example, an increase of the leucine of at least 1 percent, particularly in a range of 181 to 667-percent is conferred as compared to a corresponding non-transformed wild type non-human organism.

[41140] Accordingly, in one embodiment, an increase of leucine in a non-human organism, as compared to a corresponding non-transformed wild type non-human organism, is conferred in the process of the invention, if the activity of a polypeptide showing the activity of a superoxide dismutase, or if the activity of the polypeptide B3908, preferably represented by SEQ ID NO. 105660, or a homolog or fragment thereof, or if the activity of a polypeptide encoded by a nucleic acid molecule comprising the nucleic acid SEQ ID NO. 105659, preferably the coding region thereof, or a homolog or fragment thereof, e.g. derived from Escherichia coli, is increased or generated. For example the activity of a nucleic acid molecule or a polypeptide comprising the nucleic acid, preferably the coding region thereof, or polypeptide or the consensus sequence or the polypeptide motif, as depicted in Table I, II or IV, application No. 6, column 5 or 8 in the respective same line as the nucleic acid molecule SEQ ID NO. 105659 or polypeptide SEQ ID NO. 105660, respectively, or a homolog or a fragment thereof, is increased or generated, or if the activity superoxide dismutase is increased or generated in a non-human organism, like a microorganism or a plant cell, plant or part thereof, especially with plastidic localization, whereby the respective line discloses in column 7 the fine chemical leucine. For example, an increase of the leucine of at least 1 percent, particularly in a range of 164 to 466-percent is conferred as compared to a corresponding non-transformed wild type non-human organism.

[41141] Accordingly, in one embodiment, an increase of isoleucine in a non-human organism, as compared to a corresponding non-transformed wild type non-human organism, is conferred in the process of the invention, if the activity of a polypeptide showing the activity of a b3989-protein, or if the activity of the polypeptide B3989, preferably represented by SEQ ID NO. 44373, or a homolog or fragment thereof, or if the activity of a polypeptide encoded by a nucleic acid molecule comprising the nucleic acid SEQ ID NO. 44372, preferably the coding region thereof, or a homolog or fragment thereof, e.g. derived from Escherichia coli, is increased or generated. For example the activity of a nucleic acid molecule or a polypeptide comprising the nucleic acid, preferably the coding region thereof, or polypeptide or the consensus sequence or the polypeptide motif, as depicted in Table I, II or IV, application No. 6, column 5 or 8 in the respective same line as the nucleic acid molecule SEQ ID NO. 44372 or polypeptide SEQ ID NO. 44373, respectively, or a homolog or a fragment thereof, is increased or generated, or if the activity b3989-protein is increased or generated in a non-human organism, like a microorganism or a plant cell, plant or part thereof, especially with non-targeted localization, whereby the respective line discloses in column 7 the fine chemical isoleucine. For example, an increase of the isoleucine of at least 1 percent, particularly in a range of 34 to 1033-percent is conferred as compared to a corresponding non-transformed wild type non-human organism.

[41142] Accordingly, in one embodiment, an increase of leucine in a non-human organism, as compared to a corresponding non-transformed wild type non-human organism, is conferred in the process of the invention, if the activity of a polypeptide showing the activity of a b3989-protein, or if the activity of the polypeptide B3989, preferably represented by SEQ ID NO. 44373, or a homolog or fragment thereof, or if the activity of a polypeptide encoded by a nucleic acid molecule comprising the nucleic acid SEQ ID NO. 44372, preferably the coding region thereof, or a homolog or fragment thereof, e.g. derived from Escherichia coli, is increased or generated. For example the activity of a nucleic acid molecule or a polypeptide comprising the nucleic acid, preferably the coding region thereof, or polypeptide or the consensus sequence or the polypeptide motif, as depicted in Table I, II or IV, application No. 6, column 5 or 8 in the respective same line as the nucleic acid molecule SEQ ID NO. 44372 or polypeptide SEQ ID NO. 44373, respectively, or a homolog or a fragment thereof, is increased or generated, or if the activity b3989-protein is increased or generated in a non-human organism, like a microorganism or a plant cell, plant or part thereof, especially with non-targeted localization, whereby the respective line discloses in column 7 the fine chemical leucine. For example, an increase of the leucine of at least 1 percent, particularly in a range of 53 to 1312-percent is conferred as compared to a corresponding non-transformed wild type non-human organism.

[41143] Accordingly, in one embodiment, an increase of valine in a non-human organism, as compared to a corresponding non-transformed wild type non-human organism, is conferred in the process of the invention, if the activity of a polypeptide showing the activity of a b3989-protein, or if the activity of the polypeptide B3989, preferably represented by SEQ ID NO. 44373, or a homolog or fragment thereof, or if the activity of a polypeptide encoded by a nucleic acid molecule comprising the nucleic acid SEQ ID NO. 44372, preferably the coding region thereof, or a homolog or fragment thereof, e.g. derived from Escherichia coli, is increased or generated. For example the activity of a nucleic acid molecule or a polypeptide comprising the nucleic acid, preferably the coding region thereof, or polypeptide or the consensus sequence or the polypeptide motif, as depicted in Table I, II or IV, application No. 6, column 5 or 8 in the respective same line as the nucleic acid molecule SEQ ID NO. 44372 or polypeptide SEQ ID NO. 44373, respectively, or a homolog or a fragment thereof, is increased or generated, or if the activity b3989-protein is increased or generated in a non-human organism, like a microorganism or a plant cell, plant or part thereof, especially with non-targeted localization, whereby the respective line discloses in column 7 the fine chemical valine. For example, an increase of the valine of at least 1 percent, particularly in a range of 23 to 332-percent is conferred as compared to a corresponding non-transformed wild type non-human organism.

[41144] Accordingly, in one embodiment, an increase of isoleucine in a non-human organism, as compared to a corresponding non-transformed wild type non-human organism, is conferred in the process of the invention, if the activity of a polypeptide showing the activity of a b4029-protein, or if the activity of the polypeptide B4029, preferably represented by SEQ ID NO. 10741, or a homolog or fragment thereof, or if the activity of a polypeptide encoded by a nucleic acid molecule comprising the nucleic acid SEQ ID NO. 10740, preferably the coding region thereof, or a homolog or fragment thereof, e.g. derived from Escherichia coli, is increased or generated. For example the activity of a nucleic acid molecule or a polypeptide comprising the nucleic acid, preferably the coding region thereof, or polypeptide or the consensus sequence or the polypeptide motif, as depicted in Table I, II or IV, application No. 6, column 5 or 8 in the respective same line as the nucleic acid molecule SEQ ID NO. 10740 or polypeptide SEQ ID NO. 10741, respectively, or a homolog or a fragment thereof, is increased or generated, or if the activity b4029-protein is increased or generated in a non-human organism, like a microorganism or a plant cell, plant or part thereof, especially with non-targeted localization, whereby the respective line discloses in column 7 the fine chemical isoleucine. For example, an increase of the isoleucine of at least 1 percent, particularly in a range of 39 to 2813-percent is conferred as compared to a corresponding non-transformed wild type non-human organism.

[41145] Accordingly, in one embodiment, an increase of leucine in a non-human organism, as compared to a corresponding non-transformed wild type non-human organism, is conferred in the process of the invention, if the activity of a polypeptide showing the activity of a b4029-protein, or if the activity of the polypeptide B4029, preferably represented by SEQ ID NO. 10741, or a homolog or fragment thereof, or if the activity of a polypeptide encoded by a nucleic acid molecule comprising the nucleic acid SEQ ID NO. 10740, preferably the coding region thereof, or a homolog or fragment thereof, e.g. derived from Escherichia coli, is increased or generated. For example the activity of a nucleic acid molecule or a polypeptide comprising the nucleic acid, preferably the coding region thereof, or polypeptide or the consensus sequence or the polypeptide motif, as depicted in Table I, II or IV, application No. 6, column 5 or 8 in the respective same line as the nucleic acid molecule SEQ ID NO. 10740 or polypeptide SEQ ID NO. 10741, respectively, or a homolog or a fragment thereof, is increased or generated, or if the activity b4029-protein is increased or generated in a non-human organism, like a microorganism or a plant cell, plant or part thereof, especially with non-targeted localization, whereby the respective line discloses in column 7 the fine chemical leucine. For example, an increase of the leucine of at least 1 percent, particularly in a range of 54 to 3551-percent is conferred as compared to a corresponding non-transformed wild type non-human organism.

[41146] Accordingly, in one embodiment, an increase of valine in a non-human organism, as compared to a corresponding non-transformed wild type non-human organism, is conferred in the process of the invention, if the activity of a polypeptide showing the activity of a b4029-protein, or if the activity of the polypeptide B4029, preferably represented by SEQ ID NO. 10741, or a homolog or fragment thereof, or if the activity of a polypeptide encoded by a nucleic acid molecule comprising the nucleic acid SEQ ID NO. 10740, preferably the coding region thereof, or a homolog or fragment thereof, e.g. derived from Escherichia coli, is increased or generated. For example the activity of a nucleic acid molecule or a polypeptide comprising the nucleic acid, preferably the coding region thereof, or polypeptide or the consensus sequence or the polypeptide motif, as depicted in Table I, II or IV, application No. 6, column 5 or 8 in the respective same line as the nucleic acid molecule SEQ ID NO. 10740 or polypeptide SEQ ID NO. 10741, respectively, or a homolog or a fragment thereof, is increased or generated, or if the activity b4029-protein is increased or generated in a non-human organism, like a microorganism or a plant cell, plant or part thereof, especially with non-targeted localization, whereby the respective line discloses in column 7 the fine chemical valine. For example, an increase of the valine of at least 1 percent, particularly in a range of 28 to 1098-percent is conferred as compared to a corresponding non-transformed wild type non-human organism.

[41147] Accordingly, in one embodiment, an increase of isoleucine in a non-human organism, as compared to a corresponding non-transformed wild type non-human organism, is conferred in the process of the invention, if the activity of a polypeptide showing the activity of a b4050-protein, or if the activity of the polypeptide B4050, preferably represented by SEQ ID NO. 106533, or a homolog or fragment thereof, or if the activity of a polypeptide encoded by a nucleic acid molecule comprising the nucleic acid SEQ ID NO. 106532, preferably the coding region thereof, or a homolog or fragment thereof, e.g. derived from Escherichia coli, is increased or generated. For example the activity of a nucleic acid molecule or a polypeptide comprising the nucleic acid, preferably the coding region thereof, or polypeptide or the consensus sequence or the polypeptide motif, as depicted in Table I, II or IV, application No. 6, column 5 or 8 in the respective same line as the nucleic acid molecule SEQ ID NO. 106532 or polypeptide SEQ ID NO. 106533, respectively, or a homolog or a fragment thereof, is increased or generated, or if the activity b4050-protein is increased or generated in a non-human organism, like a microorganism or a plant cell, plant or part thereof, especially with non-targeted localization, whereby the respective line discloses in column 7 the fine chemical isoleucine. For example, an increase of the isoleucine of at least 1 percent, particularly in a range of 105 to 106-percent is conferred as compared to a corresponding non-transformed wild type non-human organism.

[41148] Accordingly, in one embodiment, an increase of isoleucine in a non-human organism, as compared to a corresponding non-transformed wild type non-human organism, is conferred in the process of the invention, if the activity of a polypeptide showing the activity of a b4056-protein, or if the activity of the polypeptide B4056, preferably represented by SEQ ID NO. 94543, or a homolog or fragment thereof, or if the activity of a polypeptide encoded by a nucleic acid molecule comprising the nucleic acid SEQ ID NO. 94542, preferably the coding region thereof, or a homolog or fragment thereof, e.g. derived from Escherichia coli, is increased or generated. For example the activity of a nucleic acid molecule or a polypeptide comprising the nucleic acid, preferably the coding region thereof, or polypeptide or the consensus sequence or the polypeptide motif, as depicted in Table I, II or IV, application No. 6, column 5 or 8 in the respective same line as the nucleic acid molecule SEQ ID NO. 94542 or polypeptide SEQ ID NO. 94543, respectively, or a homolog or a fragment thereof, is increased or generated, or if the activity b4056-protein is increased or generated in a non-human organism, like a microorganism or a plant cell, plant or part thereof, especially with non-targeted localization, whereby the respective line discloses in column 7 the fine chemical isoleucine. For example, an increase of the isoleucine of at least 1 percent, particularly in a range of 39 to 51-percent is conferred as compared to a corresponding non-transformed wild type non-human organism.

[41149] Accordingly, in one embodiment, an increase of leucine in a non-human organism, as compared to a corresponding non-transformed wild type non-human organism, is conferred in the process of the invention, if the activity of a polypeptide showing the activity of a b4056-protein, or if the activity of the polypeptide B4056, preferably represented by SEQ ID NO. 94543, or a homolog or fragment thereof, or if the activity of a polypeptide encoded by a nucleic acid molecule comprising the nucleic acid SEQ ID NO. 94542, preferably the coding region thereof, or a homolog or fragment thereof, e.g. derived from Escherichia coli, is increased or generated. For example the activity of a nucleic acid molecule or a polypeptide comprising the nucleic acid, preferably the coding region thereof, or polypeptide or the consensus sequence or the polypeptide motif, as depicted in Table I, II or IV, application No. 6, column 5 or 8 in the respective same line as the nucleic acid molecule SEQ ID NO. 94542 or polypeptide SEQ ID NO. 94543, respectively, or a homolog or a fragment thereof, is increased or generated, or if the activity b4056-protein is increased or generated in a non-human organism, like a microorganism or a plant cell, plant or part thereof, especially with non-targeted localization, whereby the respective line discloses in column 7 the fine chemical leucine. For example, an increase of the leucine of at least 1 percent, particularly in a range of 44 to 52-percent is conferred as compared to a corresponding non-transformed wild type non-human organism.

[41150] Accordingly, in one embodiment, an increase of isoleucine in a non-human organism, as compared to a corresponding non-transformed wild type non-human organism, is conferred in the process of the invention, if the activity of a polypeptide showing the activity of a acetyltransferase, or if the activity of the polypeptide B4256, preferably represented by SEQ ID NO. 45322, or a homolog or fragment thereof, or if the activity of a polypeptide encoded by a nucleic acid molecule comprising the nucleic acid SEQ ID NO. 45321, preferably the coding region thereof, or a homolog or fragment thereof, e.g. derived from Escherichia coli, is increased or generated. For example the activity of a nucleic acid molecule or a polypeptide comprising the nucleic acid, preferably the coding region thereof, or polypeptide or the consensus sequence or the polypeptide motif, as depicted in Table I, II or IV, application No. 6, column 5 or 8 in the respective same line as the nucleic acid molecule SEQ ID NO. 45321 or polypeptide SEQ ID NO. 45322, respectively, or a homolog or a fragment thereof, is increased or generated, or if the activity acetyltransferase is increased or generated in a non-human organism, like a microorganism or a plant cell, plant or part thereof, especially with non-targeted localization, whereby the respective line discloses in column 7 the fine chemical isoleucine. For example, an increase of the isoleucine of at least 1 percent, particularly in a range of 51 to 240-percent is conferred as compared to a corresponding non-transformed wild type non-human organism.

[41151] Accordingly, in one embodiment, an increase of leucine in a non-human organism, as compared to a corresponding non-transformed wild type non-human organism, is conferred in the process of the invention, if the activity of a polypeptide showing the activity of a acetyltransferase, or if the activity of the polypeptide B4256, preferably represented by SEQ ID NO. 45322, or a homolog or fragment thereof, or if the activity of a polypeptide encoded by a nucleic acid molecule comprising the nucleic acid SEQ ID NO. 45321, preferably the coding region thereof, or a homolog or fragment thereof, e.g. derived from Escherichia coli, is increased or generated. For example the activity of a nucleic acid molecule or a polypeptide comprising the nucleic acid, preferably the coding region thereof, or polypeptide or the consensus sequence or the polypeptide motif, as depicted in Table I, II or IV, application No. 6, column 5 or 8 in the respective same line as the nucleic acid molecule SEQ ID NO. 45321 or polypeptide SEQ ID NO. 45322, respectively, or a homolog or a fragment thereof, is increased or generated, or if the activity acetyltransferase is increased or generated in a non-human organism, like a microorganism or a plant cell, plant or part thereof, especially with non-targeted localization, whereby the respective line discloses in column 7 the fine chemical leucine. For example, an increase of the leucine of at least 1 percent, particularly in a range of 194 to 267-percent is conferred as compared to a corresponding non-transformed wild type non-human organism.

[41152] Accordingly, in one embodiment, an increase of valine in a non-human organism, as compared to a corresponding non-transformed wild type non-human organism, is conferred in the process of the invention, if the activity of a polypeptide showing the activity of a acetyltransferase, or if the activity of the polypeptide B4256, preferably represented by SEQ ID NO. 45322, or a homolog or fragment thereof, or if the activity of a polypeptide encoded by a nucleic acid molecule comprising the nucleic acid SEQ ID NO. 45321, preferably the coding region thereof, or a homolog or fragment thereof, e.g. derived from Escherichia coli, is increased or generated. For example the activity of a nucleic acid molecule or a polypeptide comprising the nucleic acid, preferably the coding region thereof, or polypeptide or the consensus sequence or the polypeptide motif, as depicted in Table I, II or IV, application No. 6, column 5 or 8 in the respective same line as the nucleic acid molecule SEQ ID NO. 45321 or polypeptide SEQ ID NO. 45322, respectively, or a homolog or a fragment thereof, is increased or generated, or if the activity acetyltransferase is increased or generated in a non-human organism, like a microorganism or a plant cell, plant or part thereof, especially with non-targeted localization, whereby the respective line discloses in column 7 the fine chemical valine. For example, an increase of the valine of at least 1 percent, particularly in a range of 53 to 137-percent is conferred as compared to a corresponding non-transformed wild type non-human organism.

[41153] Accordingly, in one embodiment, an increase of valine in a non-human organism, as compared to a corresponding non-transformed wild type non-human organism, is conferred in the process of the invention, if the activity of a polypeptide showing the activity of a b4263-protein, or if the activity of the polypeptide B4263, preferably represented by SEQ ID NO. 106539, or a homolog or fragment thereof, or if the activity of a polypeptide encoded by a nucleic acid molecule comprising the nucleic acid SEQ ID NO. 106538, preferably the coding region thereof, or a homolog or fragment thereof, e.g. derived from Escherichia coli, is increased or generated. For example the activity of a nucleic acid molecule or a polypeptide comprising the nucleic acid, preferably the coding region thereof, or polypeptide or the consensus sequence or the polypeptide motif, as depicted in Table I, II or IV, application No. 6, column 5 or 8 in the respective same line as the nucleic acid molecule SEQ ID NO. 106538 or polypeptide SEQ ID NO. 106539, respectively, or a homolog or a fragment thereof, is increased or generated, or if the activity b4263-protein is increased or generated in a non-human organism, like a microorganism or a plant cell, plant or part thereof, especially with plastidic localization, whereby the respective line discloses in column 7 the fine chemical valine. For example, an increase of the valine of at least 1 percent, particularly in a range of 23 to 38-percent is conferred as compared to a corresponding non-transformed wild type non-human organism.

[41154] Accordingly, in one embodiment, an increase of isoleucine in a non-human organism, as compared to a corresponding non-transformed wild type non-human organism, is conferred in the process of the invention, if the activity of a polypeptide showing the activity of a gluconate transport system permease 3, or if the activity of the polypeptide B4321, preferably represented by SEQ ID NO. 45395, or a homolog or fragment thereof, or if the activity of a polypeptide encoded by a nucleic acid molecule comprising the nucleic acid SEQ ID NO. 45394, preferably the coding region thereof, or a homolog or fragment thereof, e.g. derived from Escherichia coli, is increased or generated. For example the activity of a nucleic acid molecule or a polypeptide comprising the nucleic acid, preferably the coding region thereof, or polypeptide or the consensus sequence or the polypeptide motif, as depicted in Table I, II or IV, application No. 6, column 5 or 8 in the respective same line as the nucleic acid molecule SEQ ID NO. 45394 or polypeptide SEQ ID NO. 45395, respectively, or a homolog or a fragment thereof, is increased or generated, or if the activity gluconate transport system permease 3 is increased or generated in a non-human organism, like a microorganism or a plant cell, plant or part thereof, especially with non-targeted localization, whereby the respective line discloses in column 7 the fine chemical isoleucine. For example, an increase of the isoleucine of at least 1 percent, particularly in a range of 43 to 228-percent is conferred as compared to a corresponding non-transformed wild type non-human organism.

[41155] Accordingly, in one embodiment, an increase of leucine in a non-human organism, as compared to a corresponding non-transformed wild type non-human organism, is conferred in the process of the invention, if the activity of a polypeptide showing the activity of a gluconate transport system permease 3, or if the activity of the polypeptide B4321, preferably represented by SEQ ID NO. 45395, or a homolog or fragment thereof, or if the activity of a polypeptide encoded by a nucleic acid molecule comprising the nucleic acid SEQ ID NO. 45394, preferably the coding region thereof, or a homolog or fragment thereof, e.g. derived from Escherichia coli, is increased or generated. For example the activity of a nucleic acid molecule or a polypeptide comprising the nucleic acid, preferably the coding region thereof, or polypeptide or the consensus sequence or the polypeptide motif, as depicted in Table I, II or IV, application No. 6, column 5 or 8 in the respective same line as the nucleic acid molecule SEQ ID NO. 45394 or polypeptide SEQ ID NO. 45395, respectively, or a homolog or a fragment thereof, is increased or generated, or if the activity gluconate transport system permease 3 is increased or generated in a non-human organism, like a microorganism or a plant cell, plant or part thereof, especially with non-targeted localization, whereby the respective line discloses in column 7 the fine chemical leucine. For example, an increase of the leucine of at least 1 percent, particularly in a range of 113 to 284-percent is conferred as compared to a corresponding non-transformed wild type non-human organism.

[41156] Accordingly, in one embodiment, an increase of valine in a non-human organism, as compared to a corresponding non-transformed wild type non-human organism, is conferred in the process of the invention, if the activity of a polypeptide showing the activity of a gluconate transport system permease 3, or if the activity of the polypeptide B4321, preferably represented by SEQ ID NO. 45395, or a homolog or fragment thereof, or if the activity of a polypeptide encoded by a nucleic acid molecule comprising the nucleic acid SEQ ID NO. 45394, preferably the coding region thereof, or a homolog or fragment thereof, e.g. derived from Escherichia coli, is increased or generated. For example the activity of a nucleic acid molecule or a polypeptide comprising the nucleic acid, preferably the coding region thereof, or polypeptide or the consensus sequence or the polypeptide motif, as depicted in Table I, II or IV, application No. 6, column 5 or 8 in the respective same line as the nucleic acid molecule SEQ ID NO. 45394 or polypeptide SEQ ID NO. 45395, respectively, or a homolog or a fragment thereof, is increased or generated, or if the activity gluconate transport system permease 3 is increased or generated in a non-human organism, like a microorganism or a plant cell, plant or part thereof, especially with non-targeted localization, whereby the respective line discloses in column 7 the fine chemical valine. For example, an increase of the valine of at least 1 percent, particularly in a range of 20 to 85-percent is conferred as compared to a corresponding non-transformed wild type non-human organism.

[41157] Accordingly, in one embodiment, an increase of isoleucine in a non-human organism, as compared to a corresponding non-transformed wild type non-human organism, is conferred in the process of the invention, if the activity of a polypeptide showing the activity of a purinenucleoside phosphorylase, or if the activity of the polypeptide B4384, preferably represented by SEQ ID NO. 45557, or a homolog or fragment thereof, or if the activity of a polypeptide encoded by a nucleic acid molecule comprising the nucleic acid SEQ ID NO. 45556, preferably the coding region thereof, or a homolog or fragment thereof, e.g. derived from Escherichia coli, is increased or generated. For example the activity of a nucleic acid molecule or a polypeptide comprising the nucleic acid, preferably the coding region thereof, or polypeptide or the consensus sequence or the polypeptide motif, as depicted in Table I, II or IV, application No. 6, column 5 or 8 in the respective same line as the nucleic acid molecule SEQ ID NO. 45556 or polypeptide SEQ ID NO. 45557, respectively, or a homolog or a fragment thereof, is increased or generated, or if the activity purine-nucleoside phosphorylase is increased or generated in a non-human organism, like a microorganism or a plant cell, plant or part thereof, especially with non-targeted localization, whereby the respective line discloses in column 7 the fine chemical isoleucine. For example, an increase of the isoleucine of at least 1 percent, particularly in a range of 64 to 169-percent is conferred as compared to a corresponding non-transformed wild type non-human organism.

[41158] Accordingly, in one embodiment, an increase of isoleucine in a non-human organism, as compared to a corresponding non-transformed wild type non-human organism, is conferred in the process of the invention, if the activity of a polypeptide showing the activity of a thioredoxin, or if the activity of the polypeptide C_pp004096192r, preferably represented by SEQ ID NO. 45758, or a homolog or fragment thereof, or if the activity of a polypeptide encoded by a nucleic acid molecule comprising the nucleic acid SEQ ID NO. 45757, preferably the coding region thereof, or a homolog or fragment thereof, e.g. derived from Physcomitrella patens, is increased or generated. For example the activity of a nucleic acid molecule or a polypeptide comprising the nucleic acid, preferably the coding region thereof, or polypeptide or the consensus sequence or the polypeptide motif, as depicted in Table I, II or IV, application No. 6, column 5 or 8 in the respective same line as the nucleic acid molecule SEQ ID NO. 45757 or polypeptide SEQ ID NO. 45758, respectively, or a homolog or a fragment thereof, is increased or generated, or if the activity thioredoxin is increased or generated in a non-human organism, like a microorganism or a plant cell, plant or part thereof, especially with non-targeted localization, whereby the respective line discloses in column 7 the fine chemical isoleucine. For example, an increase of the isoleucine of at least 1 percent, particularly in a range of 85 to 176-percent is conferred as compared to a corresponding non-transformed wild type non-human organism.

[41159] Accordingly, in one embodiment, an increase of leucine in a non-human organism, as compared to a corresponding non-transformed wild type non-human organism, is conferred in the process of the invention, if the activity of a polypeptide showing the activity of a thioredoxin, or if the activity of the polypeptide C_pp004096192r, preferably represented by SEQ ID NO. 45758, or a homolog or fragment thereof, or if the activity of a polypeptide encoded by a nucleic acid molecule comprising the nucleic acid SEQ ID NO. 45757, preferably the coding region thereof, or a homolog or fragment thereof, e.g. derived from Physcomitrella patens, is increased or generated. For example the activity of a nucleic acid molecule or a polypeptide comprising the nucleic acid, preferably the coding region thereof, or polypeptide or the consensus sequence or the polypeptide motif, as depicted in Table I, II or IV, application No. 6, column 5 or 8 in the respective same line as the nucleic acid molecule SEQ ID NO. 45757 or polypeptide SEQ ID NO. 45758, respectively, or a homolog or a fragment thereof, is increased or generated, or if the activity thioredoxin is increased or generated in a non-human organism, like a microorganism or a plant cell, plant or part thereof, especially with non-targeted localization, whereby the respective line discloses in column 7 the fine chemical leucine. For example, an increase of the leucine of at least 1 percent, particularly in a range of 65 to 147-percent is conferred as compared to a corresponding non-transformed wild type non-human organism.

[41160] Accordingly, in one embodiment, an increase of valine in a non-human organism, as compared to a corresponding non-transformed wild type non-human organism, is conferred in the process of the invention, if the activity of a polypeptide showing the activity of a thioredoxin, or if the activity of the polypeptide C_pp004096192r, preferably represented by SEQ ID NO. 45758, or a homolog or fragment thereof, or if the activity of a polypeptide encoded by a nucleic acid molecule comprising the nucleic acid SEQ ID NO. 45757, preferably the coding region thereof, or a homolog or fragment thereof, e.g. derived from Physcomitrella patens, is increased or generated. For example the activity of a nucleic acid molecule or a polypeptide comprising the nucleic acid, preferably the coding region thereof, or polypeptide or the consensus sequence or the polypeptide motif, as depicted in Table I, II or IV, application No. 6, column 5 or 8 in the respective same line as the nucleic acid molecule SEQ ID NO. 45757 or polypeptide SEQ ID NO. 45758, respectively, or a homolog or a fragment thereof, is increased or generated, or if the activity thioredoxin is increased or generated in a non-human organism, like a microorganism or a plant cell, plant or part thereof, especially with non-targeted localization, whereby the respective line discloses in column 7 the fine chemical valine. For example, an increase of the valine of at least 1 percent, particularly in a range of 21 to 74-percent is conferred as compared to a corresponding non-transformed wild type non-human organism.

[41161] Accordingly, in one embodiment, an increase of isoleucine in a non-human organism, as compared to a corresponding non-transformed wild type non-human organism, is conferred in the process of the invention, if the activity of a polypeptide showing the activity of a GM02LC11114-protein, or if the activity of the polypeptide GM02LC11114, preferably represented by SEQ ID NO. 45796, or a homolog or fragment thereof, or if the activity of a polypeptide encoded by a nucleic acid molecule comprising the nucleic acid SEQ ID NO. 45795, preferably the coding region thereof, or a homolog or fragment thereof, e.g. derived from Glycine max, is increased or generated. For example the activity of a nucleic acid molecule or a polypeptide comprising the nucleic acid, preferably the coding region thereof, or polypeptide or the consensus sequence or the polypeptide motif, as depicted in Table I, II or IV, application No. 6, column 5 or 8 in the respective same line as the nucleic acid molecule SEQ ID NO. 45795 or polypeptide SEQ ID NO. 45796, respectively, or a homolog or a fragment thereof, is increased or generated, or if the activity GM02LC11114-protein is increased or generated in a non-human organism, like a microorganism or a plant cell, plant or part thereof, especially with non-targeted localization, whereby the respective line discloses in column 7 the fine chemical isoleucine. For example, an increase of the isoleucine of at least 1 percent, particularly in a range of 64 to 105-percent is conferred as compared to a corresponding non-transformed wild type non-human organism.

[41162] Accordingly, in one embodiment, an increase of leucine in a non-human organism, as compared to a corresponding non-transformed wild type non-human organism, is conferred in the process of the invention, if the activity of a polypeptide showing the activity of a GM02LC11114-protein, or if the activity of the polypeptide GM02LC11114, preferably represented by SEQ ID NO. 45796, or a homolog or fragment thereof, or if the activity of a polypeptide encoded by a nucleic acid molecule comprising the nucleic acid SEQ ID NO. 45795, preferably the coding region thereof, or a homolog or fragment thereof, e.g. derived from Glycine max, is increased or generated. For example the activity of a nucleic acid molecule or a polypeptide comprising the nucleic acid, preferably the coding region thereof, or polypeptide or the consensus sequence or the polypeptide motif, as depicted in Table I, II or IV, application No. 6, column 5 or 8 in the respective same line as the nucleic acid molecule SEQ ID NO. 45795 or polypeptide SEQ ID NO. 45796, respectively, or a homolog or a fragment thereof, is increased or generated, or if the activity GM02LC11114-protein is increased or generated in a non-human organism, like a microorganism or a plant cell, plant or part thereof, especially with non-targeted localization, whereby the respective line discloses in column 7 the fine chemical leucine. For example, an increase of the leucine of at least 1 percent, particularly in a range of 62 to 113-percent is conferred as compared to a corresponding non-transformed wild type non-human organism.

[41163] Accordingly, in one embodiment, an increase of isoleucine in a non-human organism, as compared to a corresponding non-transformed wild type non-human organism, is conferred in the process of the invention, if the activity of a polypeptide showing the activity of a glutaredoxin, or if the activity of the polypeptide GM02LC12622, preferably represented by SEQ ID NO. 10812, or a homolog or fragment thereof, or if the activity of a polypeptide encoded by a nucleic acid molecule comprising the nucleic acid SEQ ID NO. 10811, preferably the coding region thereof, or a homolog or fragment thereof, e.g. derived from Glycine max, is increased or generated. For example the activity of a nucleic acid molecule or a polypeptide comprising the nucleic acid, preferably the coding region thereof, or polypeptide or the consensus sequence or the polypeptide motif, as depicted in Table I, II or IV, application No. 6, column 5 or 8 in the respective same line as the nucleic acid molecule SEQ ID NO. 10811 or polypeptide SEQ ID NO. 10812, respectively, or a homolog or a fragment thereof, is increased or generated, or if the activity glutaredoxin is increased or generated in a non-human organism, like a microorganism or a plant cell, plant or part thereof, especially with non-targeted localization, whereby the respective line discloses in column 7 the fine chemical isoleucine. For example, an increase of the isoleucine of at least 1 percent, particularly in a range of 43 to 472-percent is conferred as compared to a corresponding non-transformed wild type non-human organism.

[41164] Accordingly, in one embodiment, an increase of leucine in a non-human organism, as compared to a corresponding non-transformed wild type non-human organism, is conferred in the process of the invention, if the activity of a polypeptide showing the activity of a glutaredoxin, or if the activity of the polypeptide GM02LC12622, preferably represented by SEQ ID NO. 10812, or a homolog or fragment thereof, or if the activity of a polypeptide encoded by a nucleic acid molecule comprising the nucleic acid SEQ ID NO. 10811, preferably the coding region thereof, or a homolog or fragment thereof, e.g. derived from Glycine max, is increased or generated. For example the activity of a nucleic acid molecule or a polypeptide comprising the nucleic acid, preferably the coding region thereof, or polypeptide or the consensus sequence or the polypeptide motif, as depicted in Table I, II or IV, application No. 6, column 5 or 8 in the respective same line as the nucleic acid molecule SEQ ID NO. 10811 or polypeptide SEQ ID NO. 10812, respectively, or a homolog or a fragment thereof, is increased or generated, or if the activity glutaredoxin is increased or generated in a non-human organism, like a microorganism or a plant cell, plant or part thereof, especially with non-targeted localization, whereby the respective line discloses in column 7 the fine chemical leucine. For example, an increase of the leucine of at least 1 percent, particularly in a range of 63 to 562-percent is conferred as compared to a corresponding non-transformed wild type non-human organism.

[41165] Accordingly, in one embodiment, an increase of valine in a non-human organism, as compared to a corresponding non-transformed wild type non-human organism, is conferred in the process of the invention, if the activity of a polypeptide showing the activity of a glutaredoxin, or if the activity of the polypeptide GM02LC12622, preferably represented by SEQ ID NO. 10812, or a homolog or fragment thereof, or if the activity of a polypeptide encoded by a nucleic acid molecule comprising the nucleic acid SEQ ID NO. 10811, preferably the coding region thereof, or a homolog or fragment thereof, e.g. derived from Glycine max, is increased or generated. For example the activity of a nucleic acid molecule or a polypeptide comprising the nucleic acid, preferably the coding region thereof, or polypeptide or the consensus sequence or the polypeptide motif, as depicted in Table I, II or IV, application No. 6, column 5 or 8 in the respective same line as the nucleic acid molecule SEQ ID NO. 10811 or polypeptide SEQ ID NO. 10812, respectively, or a homolog or a fragment thereof, is increased or generated, or if the activity glutaredoxin is increased or generated in a non-human organism, like a microorganism or a plant cell, plant or part thereof, especially with non-targeted localization, whereby the respective line discloses in column 7 the fine chemical valine. For example, an increase of the valine of at least 1 percent, particularly in a range of 24 to 155-percent is conferred as compared to a corresponding non-transformed wild type non-human organism.

[41166] Accordingly, in one embodiment, an increase of isoleucine in a non-human organism, as compared to a corresponding non-transformed wild type non-human organism, is conferred in the process of the invention, if the activity of a polypeptide showing the activity of a histone H2A, or if the activity of the polypeptide GM02LC15313, preferably represented by SEQ ID NO. 45898, or a homolog or fragment thereof, or if the activity of a polypeptide encoded by a nucleic acid molecule comprising the nucleic acid SEQ ID NO. 45897, preferably the coding region thereof, or a homolog or fragment thereof, e.g. derived from Glycine max, is increased or generated. For example the activity of a nucleic acid molecule or a polypeptide comprising the nucleic acid, preferably the coding region thereof, or polypeptide or the consensus sequence or the polypeptide motif, as depicted in Table I, II or IV, application No. 6, column 5 or 8 in the respective same line as the nucleic acid molecule SEQ ID NO. 45897 or polypeptide SEQ ID NO. 45898, respectively, or a homolog or a fragment thereof, is increased or generated, or if the activity histone H2A is increased or generated in a non-human organism, like a microorganism or a plant cell, plant or part thereof, especially with non-targeted localization, whereby the respective line discloses in column 7 the fine chemical isoleucine. For example, an increase of the isoleucine of at least 1 percent, particularly in a range of 53 to 172-percent is conferred as compared to a corresponding non-transformed wild type non-human organism.

[41167] Accordingly, in one embodiment, an increase of leucine in a non-human organism, as compared to a corresponding non-transformed wild type non-human organism, is conferred in the process of the invention, if the activity of a polypeptide showing the activity of a histone H2A, or if the activity of the polypeptide GM02LC15313, preferably represented by SEQ ID NO. 45898, or a homolog or fragment thereof, or if the activity of a polypeptide encoded by a nucleic acid molecule comprising the nucleic acid SEQ ID NO. 45897, preferably the coding region thereof, or a homolog or fragment thereof, e.g. derived from Glycine max, is increased or generated. For example the activity of a nucleic acid molecule or a polypeptide comprising the nucleic acid, preferably the coding region thereof, or polypeptide or the consensus sequence or the polypeptide motif, as depicted in Table I, II or IV, application No. 6, column 5 or 8 in the respective same line as the nucleic acid molecule SEQ ID NO. 45897 or polypeptide SEQ ID NO. 45898, respectively, or a homolog or a fragment thereof, is increased or generated, or if the activity histone H2A is increased or generated in a non-human organism, like a microorganism or a plant cell, plant or part thereof, especially with non-targeted localization, whereby the respective line discloses in column 7 the fine chemical leucine. For example, an increase of the leucine of at least 1 percent, particularly in a range of 80 to 144-percent is conferred as compared to a corresponding non-transformed wild type non-human organism.

[41168] Accordingly, in one embodiment, an increase of valine in a non-human organism, as compared to a corresponding non-transformed wild type non-human organism, is conferred in the process of the invention, if the activity of a polypeptide showing the activity of a histone H2A, or if the activity of the polypeptide GM02LC15313, preferably represented by SEQ ID NO. 45898, or a homolog or fragment thereof, or if the activity of a polypeptide encoded by a nucleic acid molecule comprising the nucleic acid SEQ ID NO. 45897, preferably the coding region thereof, or a homolog or fragment thereof, e.g. derived from Glycine max, is increased or generated. For example the activity of a nucleic acid molecule or a polypeptide comprising the nucleic acid, preferably the coding region thereof, or polypeptide or the consensus sequence or the polypeptide motif, as depicted in Table I, II or IV, application No. 6, column 5 or 8 in the respective same line as the nucleic acid molecule SEQ ID NO. 45897 or polypeptide SEQ ID NO. 45898, respectively, or a homolog or a fragment thereof, is increased or generated, or if the activity histone H2A is increased or generated in a non-human organism, like a microorganism or a plant cell, plant or part thereof, especially with non-targeted localization, whereby the respective line discloses in column 7 the fine chemical valine. For example, an increase of the valine of at least 1 percent, particularly in a range of 30 to 99-percent is conferred as compared to a corresponding non-transformed wild type non-human organism.

[41169] Accordingly, in one embodiment, an increase of valine in a non-human organism, as compared to a corresponding non-transformed wild type non-human organism, is conferred in the process of the invention, if the activity of a polypeptide showing the activity of a vacuolar ATPase subunit, or if the activity of the polypeptide GM02LC17384, preferably represented by SEQ ID NO. 106689, or a homolog or fragment thereof, or if the activity of a polypeptide encoded by a nucleic acid molecule comprising the nucleic acid SEQ ID NO. 106688, preferably the coding region thereof, or a homolog or fragment thereof, e.g. derived from Glycine max, is increased or generated. For example the activity of a nucleic acid molecule or a polypeptide comprising the nucleic acid, preferably the coding region thereof, or polypeptide or the consensus sequence or the polypeptide motif, as depicted in Table I, II or IV, application No. 6, column 5 or 8 in the respective same line as the nucleic acid molecule SEQ ID NO. 106688 or polypeptide SEQ ID NO. 106689, respectively, or a homolog or a fragment thereof, is increased or generated, or if the activity vacuolar ATPase subunit is increased or generated in a non-human organism, like a microorganism or a plant cell, plant or part thereof, especially with non-targeted localization, whereby the respective line discloses in column 7 the fine chemical valine. For example, an increase of the valine of at least 1 percent, particularly in a range of 21 to 63-percent is conferred as compared to a corresponding non-transformed wild type non-human organism.

[41170] Accordingly, in one embodiment, an increase of isoleucine in a non-human organism, as compared to a corresponding non-transformed wild type non-human organism, is conferred in the process of the invention, if the activity of a polypeptide showing the activity of a RNA binding protein, or if the activity of the polypeptide GM02LC17556, preferably represented by SEQ ID NO. 46516, or a homolog or fragment thereof, or if the activity of a polypeptide encoded by a nucleic acid molecule comprising the nucleic acid SEQ ID NO. 46515, preferably the coding region thereof, or a homolog or fragment thereof, e.g. derived from Glycine max, is increased or generated. For example the activity of a nucleic acid molecule or a polypeptide comprising the nucleic acid, preferably the coding region thereof, or polypeptide or the consensus sequence or the polypeptide motif, as depicted in Table I, II or IV, application No. 6, column 5 or 8 in the respective same line as the nucleic acid molecule SEQ ID NO. 46515 or polypeptide SEQ ID NO. 46516, respectively, or a homolog or a fragment thereof, is increased or generated, or if the activity RNA binding protein is increased or generated in a non-human organism, like a microorganism or a plant cell, plant or part thereof, especially with non-targeted localization, whereby the respective line discloses in column 7 the fine chemical isoleucine. For example, an increase of the isoleucine of at least 1 percent, particularly in a range of 51 to 366-percent is conferred as compared to a corresponding non-transformed wild type non-human organism.

[41171] Accordingly, in one embodiment, an increase of leucine in a non-human organism, as compared to a corresponding non-transformed wild type non-human organism, is conferred in the process of the invention, if the activity of a polypeptide showing the activity of a RNA binding protein, or if the activity of the polypeptide GM02LC17556, preferably represented by SEQ ID NO. 46516, or a homolog or fragment thereof, or if the activity of a polypeptide encoded by a nucleic acid molecule comprising the nucleic acid SEQ ID NO. 46515, preferably the coding region thereof, or a homolog or fragment thereof, e.g. derived from Glycine max, is increased or generated. For example the activity of a nucleic acid molecule or a polypeptide comprising the nucleic acid, preferably the coding region thereof, or polypeptide or the consensus sequence or the polypeptide motif, as depicted in Table I, II or IV, application No. 6, column 5 or 8 in the respective same line as the nucleic acid molecule SEQ ID NO. 46515 or polypeptide SEQ ID NO. 46516, respectively, or a homolog or a fragment thereof, is increased or generated, or if the activity RNA binding protein is increased or generated in a non-human organism, like a microorganism or a plant cell, plant or part thereof, especially with non-targeted localization, whereby the respective line discloses in column 7 the fine chemical leucine. For example, an increase of the leucine of at least 1 percent, particularly in a range of 55 to 406-percent is conferred as compared to a corresponding non-transformed wild type non-human organism.

[41172] Accordingly, in one embodiment, an increase of valine in a non-human organism, as compared to a corresponding non-transformed wild type non-human organism, is conferred in the process of the invention, if the activity of a polypeptide showing the activity of a RNA binding protein, or if the activity of the polypeptide GM02LC17556, preferably represented by SEQ ID NO. 46516, or a homolog or fragment thereof, or if the activity of a polypeptide encoded by a nucleic acid molecule comprising the nucleic acid SEQ ID NO. 46515, preferably the coding region thereof, or a homolog or fragment thereof, e.g. derived from Glycine max, is increased or generated. For example the activity of a nucleic acid molecule or a polypeptide comprising the nucleic acid, preferably the coding region thereof, or polypeptide or the consensus sequence or the polypeptide motif, as depicted in Table I, II or IV, application No. 6, column 5 or 8 in the respective same line as the nucleic acid molecule SEQ ID NO. 46515 or polypeptide SEQ ID NO. 46516, respectively, or a homolog or a fragment thereof, is increased or generated, or if the activity RNA binding protein is increased or generated in a non-human organism, like a microorganism or a plant cell, plant or part thereof, especially with non-targeted localization, whereby the respective line discloses in column 7 the fine chemical valine. For example, an increase of the valine of at least 1 percent, particularly in a range of 21 to 90-percent is conferred as compared to a corresponding non-transformed wild type non-human organism.

[41173] Accordingly, in one embodiment, an increase of isoleucine in a non-human organism, as compared to a corresponding non-transformed wild type non-human organism, is conferred in the process of the invention, if the activity of a polypeptide showing the activity of a transcription factor, or if the activity of the polypeptide GM02LC21368, preferably represented by SEQ ID NO. 84199, or a homolog or fragment thereof, or if the activity of a polypeptide encoded by a nucleic acid molecule comprising the nucleic acid SEQ ID NO. 84198, preferably the coding region thereof, or a homolog or fragment thereof, e.g. derived from Glycine max, is increased or generated. For example the activity of a nucleic acid molecule or a polypeptide comprising the nucleic acid, preferably the coding region thereof, or polypeptide or the consensus sequence or the polypeptide motif, as depicted in Table I, II or IV, application No. 6, column 5 or 8 in the respective same line as the nucleic acid molecule SEQ ID NO. 84198 or polypeptide SEQ ID NO. 84199, respectively, or a homolog or a fragment thereof, is increased or generated, or if the activity transcription factor is increased or generated in a non-human organism, like a microorganism or a plant cell, plant or part thereof, especially with non-targeted localization, whereby the respective line discloses in column 7 the fine chemical isoleucine. For example, an increase of the isoleucine of at least 1 percent, particularly in a range of 54 to 890-percent is conferred as compared to a corresponding non-transformed wild type non-human organism.

[41174] Accordingly, in one embodiment, an increase of leucine in a non-human organism, as compared to a corresponding non-transformed wild type non-human organism, is conferred in the process of the invention, if the activity of a polypeptide showing the activity of a transcription factor, or if the activity of the polypeptide GM02LC21368, preferably represented by SEQ ID NO. 84199, or a homolog or fragment thereof, or if the activity of a polypeptide encoded by a nucleic acid molecule comprising the nucleic acid SEQ ID NO. 84198, preferably the coding region thereof, or a homolog or fragment thereof, e.g. derived from Glycine max, is increased or generated. For example the activity of a nucleic acid molecule or a polypeptide comprising the nucleic acid, preferably the coding region thereof, or polypeptide or the consensus sequence or the polypeptide motif, as depicted in Table I, II or IV, application No. 6, column 5 or 8 in the respective same line as the nucleic acid molecule SEQ ID NO. 84198 or polypeptide SEQ ID NO. 84199, respectively, or a homolog or a fragment thereof, is increased or generated, or if the activity transcription factor is increased or generated in a non-human organism, like a microorganism or a plant cell, plant or part thereof, especially with non-targeted localization, whereby the respective line discloses in column 7 the fine chemical leucine. For example, an increase of the leucine of at least 1 percent, particularly in a range of 100 to 811-percent is conferred as compared to a corresponding non-transformed wild type non-human organism.

[41175] Accordingly, in one embodiment, an increase of valine in a non-human organism, as compared to a corresponding non-transformed wild type non-human organism, is conferred in the process of the invention, if the activity of a polypeptide showing the activity of a transcription factor, or if the activity of the polypeptide GM02LC21368, preferably represented by SEQ ID NO. 84199, or a homolog or fragment thereof, or if the activity of a polypeptide encoded by a nucleic acid molecule comprising the nucleic acid SEQ ID NO. 84198, preferably the coding region thereof, or a homolog or fragment thereof, e.g. derived from Glycine max, is increased or generated. For example the activity of a nucleic acid molecule or a polypeptide comprising the nucleic acid, preferably the coding region thereof, or polypeptide or the consensus sequence or the polypeptide motif, as depicted in Table I, II or IV, application No. 6, column 5 or 8 in the respective same line as the nucleic acid molecule SEQ ID NO. 84198 or polypeptide SEQ ID NO. 84199, respectively, or a homolog or a fragment thereof, is increased or generated, or if the activity transcription factor is increased or generated in a non-human organism, like a microorganism or a plant cell, plant or part thereof, especially with non-targeted localization, whereby the respective line discloses in column 7 the fine chemical valine. For example, an increase of the valine of at least 1 percent, particularly in a range of 21 to 230-percent is conferred as compared to a corresponding non-transformed wild type non-human organism.

[41176] Accordingly, in one embodiment, an increase of isoleucine in a non-human organism, as compared to a corresponding non-transformed wild type non-human organism, is conferred in the process of the invention, if the activity of a polypeptide showing the activity of a cyclin D, or if the activity of the polypeptide GM02LC44512, preferably represented by SEQ ID NO. 46851, or a homolog or fragment thereof, or if the activity of a polypeptide encoded by a nucleic acid molecule comprising the nucleic acid SEQ ID NO. 46850, preferably the coding region thereof, or a homolog or fragment thereof, e.g. derived from Glycine max, is increased or generated. For example the activity of a nucleic acid molecule or a polypeptide comprising the nucleic acid, preferably the coding region thereof, or polypeptide or the consensus sequence or the polypeptide motif, as depicted in Table I, II or IV, application No. 6, column 5 or 8 in the respective same line as the nucleic acid molecule SEQ ID NO. 46850 or polypeptide SEQ ID NO. 46851, respectively, or a homolog or a fragment thereof, is increased or generated, or if the activity cyclin D is increased or generated in a non-human organism, like a microorganism or a plant cell, plant or part thereof, especially with non-targeted localization, whereby the respective line discloses in column 7 the fine chemical isoleucine. For example, an increase of the isoleucine of at least 1 percent, particularly in a range of 40 to 128-percent is conferred as compared to a corresponding non-transformed wild type non-human organism.

[41177] Accordingly, in one embodiment, an increase of leucine in a non-human organism, as compared to a corresponding non-transformed wild type non-human organism, is conferred in the process of the invention, if the activity of a polypeptide showing the activity of a cyclin D, or if the activity of the polypeptide GM02LC44512, preferably represented by SEQ ID NO. 46851, or a homolog or fragment thereof, or if the activity of a polypeptide encoded by a nucleic acid molecule comprising the nucleic acid SEQ ID NO. 46850, preferably the coding region thereof, or a homolog or fragment thereof, e.g. derived from Glycine max, is increased or generated. For example the activity of a nucleic acid molecule or a polypeptide comprising the nucleic acid, preferably the coding region thereof, or polypeptide or the consensus sequence or the polypeptide motif, as depicted in Table I, II or IV, application No. 6, column 5 or 8 in the respective same line as the nucleic acid molecule SEQ ID NO. 46850 or polypeptide SEQ ID NO. 46851, respectively, or a homolog or a fragment thereof, is increased or generated, or if the activity cyclin D is increased or generated in a non-human organism, like a microorganism or a plant cell, plant or part thereof, especially with non-targeted localization, whereby the respective line discloses in column 7 the fine chemical leucine. For example, an increase of the leucine of at least 1 percent, particularly in a range of 82 to 122-percent is conferred as compared to a corresponding non-transformed wild type non-human organism.

[41178] Accordingly, in one embodiment, an increase of valine in a non-human organism, as compared to a corresponding non-transformed wild type non-human organism, is conferred in the process of the invention, if the activity of a polypeptide showing the activity of a cyclin D, or if the activity of the polypeptide GM02LC44512, preferably represented by SEQ ID NO. 46851, or a homolog or fragment thereof, or if the activity of a polypeptide encoded by a nucleic acid molecule comprising the nucleic acid SEQ ID NO. 46850, preferably the coding region thereof, or a homolog or fragment thereof, e.g. derived from Glycine max, is increased or generated. For example the activity of a nucleic acid molecule or a polypeptide comprising the nucleic acid, preferably the coding region thereof, or polypeptide or the consensus sequence or the polypeptide motif, as depicted in Table I, II or IV, application No. 6, column 5 or 8 in the respective same line as the nucleic acid molecule SEQ ID NO. 46850 or polypeptide SEQ ID NO. 46851, respectively, or a homolog or a fragment thereof, is increased or generated, or if the activity cyclin D is increased or generated in a non-human organism, like a microorganism or a plant cell, plant or part thereof, especially with non-targeted localization, whereby the respective line discloses in column 7 the fine chemical valine. For example, an increase of the valine of at least 1 percent, particularly in a range of 22 to 86-percent is conferred as compared to a corresponding non-transformed wild type non-human organism.

[41179] Accordingly, in one embodiment, an increase of leucine in a non-human organism, as compared to a corresponding non-transformed wild type non-human organism, is conferred in the process of the invention, if the activity of a polypeptide showing the activity of a GM02LC5744-protein, or if the activity of the polypeptide GM02LC5744, preferably represented by SEQ ID NO. 47077, or a homolog or fragment thereof, or if the activity of a polypeptide encoded by a nucleic acid molecule comprising the nucleic acid SEQ ID NO. 47076, preferably the coding region thereof, or a homolog or fragment thereof, e.g. derived from Glycine max, is increased or generated. For example the activity of a nucleic acid molecule or a polypeptide comprising the nucleic acid, preferably the coding region thereof, or polypeptide or the consensus sequence or the polypeptide motif, as depicted in Table I, II or IV, application No. 6, column 5 or 8 in the respective same line as the nucleic acid molecule SEQ ID NO. 47076 or polypeptide SEQ ID NO. 47077, respectively, or a homolog or a fragment thereof, is increased or generated, or if the activity GM02LC5744-protein is increased or generated in a non-human organism, like a microorganism or a plant cell, plant or part thereof, especially with non-targeted localization, whereby the respective line discloses in column 7 the fine chemical leucine. For example, an increase of the leucine of at least 1 percent, particularly in a range of 53 to 754-percent is conferred as compared to a corresponding non-transformed wild type non-human organism.

[41180] Accordingly, in one embodiment, an increase of valine in a non-human organism, as compared to a corresponding non-transformed wild type non-human organism, is conferred in the process of the invention, if the activity of a polypeptide showing the activity of a agmatinase, or if the activity of the polypeptide Sll0228, preferably represented by SEQ ID NO. 84266, or a homolog or fragment thereof, or if the activity of a polypeptide encoded by a nucleic acid molecule comprising the nucleic acid SEQ ID NO. 84265, preferably the coding region thereof, or a homolog or fragment thereof, e.g. derived from Synechocystis sp., is increased or generated. For example the activity of a nucleic acid molecule or a polypeptide comprising the nucleic acid, preferably the coding region thereof, or polypeptide or the consensus sequence or the polypeptide motif, as depicted in Table I, II or IV, application No. 6, column 5 or 8 in the respective same line as the nucleic acid molecule SEQ ID NO. 84265 or polypeptide SEQ ID NO. 84266, respectively, or a homolog or a fragment thereof, is increased or generated, or if the activity agmatinase is increased or generated in a non-human organism, like a microorganism or a plant cell, plant or part thereof, especially with plastidic localization, whereby the respective line discloses in column 7 the fine chemical valine. For example, an increase of the valine of at least 1 percent, particularly in a range of 21 to 33-percent is conferred as compared to a corresponding non-transformed wild type non-human organism.

[41181] Accordingly, in one embodiment, an increase of valine in a non-human organism, as compared to a corresponding non-transformed wild type non-human organism, is conferred in the process of the invention, if the activity of a polypeptide showing the activity of a ABC transporter ATP binding component, or if the activity of the polypeptide Sll0240, preferably represented by SEQ ID NO. 84442, or a homolog or fragment thereof, or if the activity of a polypeptide encoded by a nucleic acid molecule comprising the nucleic acid SEQ ID NO. 84441, preferably the coding region thereof, or a homolog or fragment thereof, e.g. derived from Synechocystis sp., is increased or generated. For example the activity of a nucleic acid molecule or a polypeptide comprising the nucleic acid, preferably the coding region thereof, or polypeptide or the consensus sequence or the polypeptide motif, as depicted in Table I, II or IV, application No. 6, column 5 or 8 in the respective same line as the nucleic acid molecule SEQ ID NO. 84441 or polypeptide SEQ ID NO. 84442, respectively, or a homolog or a fragment thereof, is increased or generated, or if the activity ABC transporter ATP binding component is increased or generated in a non-human organism, like a microorganism or a plant cell, plant or part thereof, especially with plastidic localization, whereby the respective line discloses in column 7 the fine chemical valine. For example, an increase of the valine of at least 1 percent, particularly in a range of 24 to 32-percent is conferred as compared to a corresponding non-transformed wild type non-human organism.

[41182] Accordingly, in one embodiment, an increase of isoleucine in a non-human organism, as compared to a corresponding non-transformed wild type non-human organism, is conferred in the process of the invention, if the activity of a polypeptide showing the activity of a flavodoxin, or if the activity of the polypeptide Sll0248, preferably represented by SEQ ID NO. 49144, or a homolog or fragment thereof, or if the activity of a polypeptide encoded by a nucleic acid molecule comprising the nucleic acid SEQ ID NO. 49143, preferably the coding region thereof, or a homolog or fragment thereof, e.g. derived from Synechocystis sp., is increased or generated. For example the activity of a nucleic acid molecule or a polypeptide comprising the nucleic acid, preferably the coding region thereof, or polypeptide or the consensus sequence or the polypeptide motif, as depicted in Table I, II or IV, application No. 6, column 5 or 8 in the respective same line as the nucleic acid molecule SEQ ID NO. 49143 or polypeptide SEQ ID NO. 49144, respectively, or a homolog or a fragment thereof, is increased or generated, or if the activity flavodoxin is increased or generated in a non-human organism, like a microorganism or a plant cell, plant or part thereof, especially with plastidic localization, whereby the respective line discloses in column 7 the fine chemical isoleucine. For example, an increase of the isoleucine of at least 1 percent, particularly in a range of 53 to 313-percent is conferred as compared to a corresponding non-transformed wild type non-human organism.

[41183] Accordingly, in one embodiment, an increase of leucine in a non-human organism, as compared to a corresponding non-transformed wild type non-human organism, is conferred in the process of the invention, if the activity of a polypeptide showing the activity of a flavodoxin, or if the activity of the polypeptide Sll0248, preferably represented by SEQ ID NO. 49144, or a homolog or fragment thereof, or if the activity of a polypeptide encoded by a nucleic acid molecule comprising the nucleic acid SEQ ID NO. 49143, preferably the coding region thereof, or a homolog or fragment thereof, e.g. derived from Synechocystis sp., is increased or generated. For example the activity of a nucleic acid molecule or a polypeptide comprising the nucleic acid, preferably the coding region thereof, or polypeptide or the consensus sequence or the polypeptide motif, as depicted in Table I, II or IV, application No. 6, column 5 or 8 in the respective same line as the nucleic acid molecule SEQ ID NO. 49143 or polypeptide SEQ ID NO. 49144, respectively, or a homolog or a fragment thereof, is increased or generated, or if the activity flavodoxin is increased or generated in a non-human organism, like a microorganism or a plant cell, plant or part thereof, especially with plastidic localization, whereby the respective line discloses in column 7 the fine chemical leucine. For example, an increase of the leucine of at least 1 percent, particularly in a range of 70 to 203-percent is conferred as compared to a corresponding non-transformed wild type non-human organism.

[41184] Accordingly, in one embodiment, an increase of isoleucine in a non-human organism, as compared to a corresponding non-transformed wild type non-human organism, is conferred in the process of the invention, if the activity of a polypeptide showing the activity of a polyphosphate kinase, or if the activity of the polypeptide Sll0290, preferably represented by SEQ ID NO. 49829, or a homolog or fragment thereof, or if the activity of a polypeptide encoded by a nucleic acid molecule comprising the nucleic acid SEQ ID NO. 49828, preferably the coding region thereof, or a homolog or fragment thereof, e.g. derived from Synechocystis sp., is increased or generated. For example the activity of a nucleic acid molecule or a polypeptide comprising the nucleic acid, preferably the coding region thereof, or polypeptide or the consensus sequence or the polypeptide motif, as depicted in Table I, II or IV, application No. 6, column 5 or 8 in the respective same line as the nucleic acid molecule SEQ ID NO. 49828 or polypeptide SEQ ID NO. 49829, respectively, or a homolog or a fragment thereof, is increased or generated, or if the activity polyphosphate kinase is increased or generated in a non-human organism, like a microorganism or a plant cell, plant or part thereof, especially with non-targeted localization, whereby the respective line discloses in column 7 the fine chemical isoleucine. For example, an increase of the isoleucine of at least 1 percent, particularly in a range of 35 to 238-percent is conferred as compared to a corresponding non-transformed wild type non-human organism.

[41185] Accordingly, in one embodiment, an increase of leucine in a non-human organism, as compared to a corresponding non-transformed wild type non-human organism, is conferred in the process of the invention, if the activity of a polypeptide showing the activity of a polyphosphate kinase, or if the activity of the polypeptide Sll0290, preferably represented by SEQ ID NO. 49829, or a homolog or fragment thereof, or if the activity of a polypeptide encoded by a nucleic acid molecule comprising the nucleic acid SEQ ID NO. 49828, preferably the coding region thereof, or a homolog or fragment thereof, e.g. derived from Synechocystis sp., is increased or generated.

[41186] For example the activity of a nucleic acid molecule or a polypeptide comprising the nucleic acid, preferably the coding region thereof, or polypeptide or the consensus sequence or the polypeptide motif, as depicted in Table I, II or IV, application No. 6, column 5 or 8 in the respective same line as the nucleic acid molecule SEQ ID NO. 49828 or polypeptide SEQ ID NO. 49829, respectively, or a homolog or a fragment thereof, is increased or generated, or if the activity polyphosphate kinase is increased or generated in a non-human organism, like a microorganism or a plant cell, plant or part thereof, especially with non-targeted localization, whereby the respective line discloses in column 7 the fine chemical leucine. For example, an increase of the leucine of at least 1 percent, particularly in a range of 70 to 192-percent is conferred as compared to a corresponding non-transformed wild type non-human organism.

[41187] Accordingly, in one embodiment, an increase of valine in a non-human organism, as compared to a corresponding non-transformed wild type non-human organism, is conferred in the process of the invention, if the activity of a polypeptide showing the activity of a polyphosphate kinase, or if the activity of the polypeptide Sll0290, preferably represented by SEQ ID NO. 49829, or a homolog or fragment thereof, or if the activity of a polypeptide encoded by a nucleic acid molecule comprising the nucleic acid SEQ ID NO. 49828, preferably the coding region thereof, or a homolog or fragment thereof, e.g. derived from Synechocystis sp., is increased or generated. For example the activity of a nucleic acid molecule or a polypeptide comprising the nucleic acid, preferably the coding region thereof, or polypeptide or the consensus sequence or the polypeptide motif, as depicted in Table I, II or IV, application No. 6, column 5 or 8 in the respective same line as the nucleic acid molecule SEQ ID NO. 49828 or polypeptide SEQ ID NO. 49829, respectively, or a homolog or a fragment thereof, is increased or generated, or if the activity polyphosphate kinase is increased or generated in a non-human organism, like a microorganism or a plant cell, plant or part thereof, especially with non-targeted localization, whereby the respective line discloses in column 7 the fine chemical valine. For example, an increase of the valine of at least 1 percent, particularly in a range of 22 to 98-percent is conferred as compared to a corresponding non-transformed wild type non-human organism.

[41188] Accordingly, in one embodiment, an increase of valine in a non-human organism, as compared to a corresponding non-transformed wild type non-human organism, is conferred in the process of the invention, if the activity of a polypeptide showing the activity of a bifunctional protein (phosphoribosyltransferase and regulatory protein), or if the activity of the polypeptide Sll0368, preferably represented by SEQ ID NO. 106921, or a homolog or fragment thereof, or if the activity of a polypeptide encoded by a nucleic acid molecule comprising the nucleic acid SEQ ID NO. 106920, preferably the coding region thereof, or a homolog or fragment thereof, e.g. derived from Synechocystis sp., is increased or generated. For example the activity of a nucleic acid molecule or a polypeptide comprising the nucleic acid, preferably the coding region thereof, or polypeptide or the consensus sequence or the polypeptide motif, as depicted in Table I, II or IV, application No. 6, column 5 or 8 in the respective same line as the nucleic acid molecule SEQ ID NO. 106920 or polypeptide SEQ ID NO. 106921, respectively, or a homolog or a fragment thereof, is increased or generated, or if the activity bifunctional protein (phosphoribosyltransferase and regulatory protein) is increased or generated in a non-human organism, like a microorganism or a plant cell, plant or part thereof, especially with mitochondrial localization, whereby the respective line discloses in column 7 the fine chemical valine. For example, an increase of the valine of at least 1 percent, particularly in a range of 24 to 39-percent is conferred as compared to a corresponding non-transformed wild type non-human organism.

[41189] Accordingly, in one embodiment, an increase of isoleucine in a non-human organism, as compared to a corresponding non-transformed wild type non-human organism, is conferred in the process of the invention, if the activity of a polypeptide showing the activity of a urease subunit, or if the activity of the polypeptide Sll0420, preferably represented by SEQ ID NO. 50105, or a homolog or fragment thereof, or if the activity of a polypeptide encoded by a nucleic acid molecule comprising the nucleic acid SEQ ID NO. 50104, preferably the coding region thereof, or a homolog or fragment thereof, e.g. derived from Synechocystis sp., is increased or generated. For example the activity of a nucleic acid molecule or a polypeptide comprising the nucleic acid, preferably the coding region thereof, or polypeptide or the consensus sequence or the polypeptide motif, as depicted in Table I, II or IV, application No. 6, column 5 or 8 in the respective same line as the nucleic acid molecule SEQ ID NO. 50104 or polypeptide SEQ ID NO. 50105, respectively, or a homolog or a fragment thereof, is increased or generated, or if the activity urease subunit is increased or generated in a non-human organism, like a microorganism or a plant cell, plant or part thereof, especially with non-targeted localization, whereby the respective line discloses in column 7 the fine chemical isoleucine. For example, an increase of the isoleucine of at least 1 percent, particularly in a range of 41 to 69-percent is conferred as compared to a corresponding non-transformed wild type non-human organism.

[41190] Accordingly, in one embodiment, an increase of valine in a non-human organism, as compared to a corresponding non-transformed wild type non-human organism, is conferred in the process of the invention, if the activity of a polypeptide showing the activity of a NAD(P)H-quinone oxidoreductase subunit, or if the activity of the polypeptide Sll0521, preferably represented by SEQ ID NO. 50340, or a homolog or fragment thereof, or if the activity of a polypeptide encoded by a nucleic acid molecule comprising the nucleic acid SEQ ID NO. 50339, preferably the coding region thereof, or a homolog or fragment thereof, e.g. derived from Synechocystis sp., is increased or generated. For example the activity of a nucleic acid molecule or a polypeptide comprising the nucleic acid, preferably the coding region thereof, or polypeptide or the consensus sequence or the polypeptide motif, as depicted in Table I, II or IV, application No. 6, column 5 or 8 in the respective same line as the nucleic acid molecule SEQ ID NO. 50339 or polypeptide SEQ ID NO. 50340, respectively, or a homolog or a fragment thereof, is increased or generated, or if the activity NAD(P)H-quinone oxidoreductase subunit is increased or generated in a non-human organism, like a microorganism or a plant cell, plant or part thereof, especially with plastidic localization, whereby the respective line discloses in column 7 the fine chemical valine. For example, an increase of the valine of at least 1 percent, particularly in a range of 21 to 56-percent is conferred as compared to a corresponding non-transformed wild type non-human organism.

[41191] Accordingly, in one embodiment, an increase of isoleucine in a non-human organism, as compared to a corresponding non-transformed wild type non-human organism, is conferred in the process of the invention, if the activity of a polypeptide showing the activity of a oxireductase, or if the activity of the polypeptide Sll0816, preferably represented by SEQ ID NO. 51199, or a homolog or fragment thereof, or if the activity of a polypeptide encoded by a nucleic acid molecule comprising the nucleic acid SEQ ID NO. 51198, preferably the coding region thereof, or a homolog or fragment thereof, e.g. derived from Synechocystis sp., is increased or generated. For example the activity of a nucleic acid molecule or a polypeptide comprising the nucleic acid, preferably the coding region thereof, or polypeptide or the consensus sequence or the polypeptide motif, as depicted in Table I, II or IV, application No. 6, column 5 or 8 in the respective same line as the nucleic acid molecule SEQ ID NO. 51198 or polypeptide SEQ ID NO. 51199, respectively, or a homolog or a fragment thereof, is increased or generated, or if the activity oxireductase is increased or generated in a non-human organism, like a microorganism or a plant cell, plant or part thereof, especially with non-targeted localization, whereby the respective line discloses in column 7 the fine chemical isoleucine. For example, an increase of the isoleucine of at least 1 percent, particularly in a range of 34 to 55-percent is conferred as compared to a corresponding non-transformed wild type non-human organism.

[41192] Accordingly, in one embodiment, an increase of isoleucine in a non-human organism, as compared to a corresponding non-transformed wild type non-human organism, is conferred in the process of the invention, if the activity of a polypeptide showing the activity of a binding-protein-dependent transport systems inner membrane component, or if the activity of the polypeptide Sll0833, preferably represented by SEQ ID NO. 101708, or a homolog or fragment thereof, or if the activity of a polypeptide encoded by a nucleic acid molecule comprising the nucleic acid SEQ ID NO. 101707, preferably the coding region thereof, or a homolog or fragment thereof, e.g. derived from Synechocystis sp., is increased or generated. For example the activity of a nucleic acid molecule or a polypeptide comprising the nucleic acid, preferably the coding region thereof, or polypeptide or the consensus sequence or the polypeptide motif, as depicted in Table I, II or IV, application No. 6, column 5 or 8 in the respective same line as the nucleic acid molecule SEQ ID NO. 101707 or polypeptide SEQ ID NO. 101708, respectively, or a homolog or a fragment thereof, is increased or generated, or if the activity binding-protein-dependent transport systems inner membrane component is increased or generated in a non-human organism, like a microorganism or a plant cell, plant or part thereof, especially with non-targeted localization, whereby the respective line discloses in column 7 the fine chemical isoleucine. For example, an increase of the isoleucine of at least 1 percent, particularly in a range of 39 to 124-percent is conferred as compared to a corresponding non-transformed wild type non-human organism.

[41193] Accordingly, in one embodiment, an increase of valine in a non-human organism, as compared to a corresponding non-transformed wild type non-human organism, is conferred in the process of the invention, if the activity of a polypeptide showing the activity of a sll1032-protein, or if the activity of the polypeptide Sll1032, preferably represented by SEQ ID NO. 85724, or a homolog or fragment thereof, or if the activity of a polypeptide encoded by a nucleic acid molecule comprising the nucleic acid SEQ ID NO. 85723, preferably the coding region thereof, or a homolog or fragment thereof, e.g. derived from Synechocystis sp., is increased or generated. For example the activity of a nucleic acid molecule or a polypeptide comprising the nucleic acid, preferably the coding region thereof, or polypeptide or the consensus sequence or the polypeptide motif, as depicted in Table I, II or IV, application No. 6, column 5 or 8 in the respective same line as the nucleic acid molecule SEQ ID NO. 85723 or polypeptide SEQ ID NO. 85724, respectively, or a homolog or a fragment thereof, is increased or generated, or if the activity sll1032-protein is increased or generated in a non-human organism, like a microorganism or a plant cell, plant or part thereof, especially with mitochondrial localization, whereby the respective line discloses in column 7 the fine chemical valine. For example, an increase of the valine of at least 1 percent, particularly in a range of 19 to 29-percent is conferred as compared to a corresponding non-transformed wild type non-human organism.

[41194] Accordingly, in one embodiment, an increase of isoleucine in a non-human organism, as compared to a corresponding non-transformed wild type non-human organism, is conferred in the process of the invention, if the activity of a polypeptide showing the activity of a glycogen (starch) synthase, or if the activity of the polypeptide Sll1393, preferably represented by SEQ ID NO. 53457, or a homolog or fragment thereof, or if the activity of a polypeptide encoded by a nucleic acid molecule comprising the nucleic acid SEQ ID NO. 53456, preferably the coding region thereof, or a homolog or fragment thereof, e.g. derived from Synechocystis sp., is increased or generated. For example the activity of a nucleic acid molecule or a polypeptide comprising the nucleic acid, preferably the coding region thereof, or polypeptide or the consensus sequence or the polypeptide motif, as depicted in Table I, II or IV, application No. 6, column 5 or 8 in the respective same line as the nucleic acid molecule SEQ ID NO. 53456 or polypeptide SEQ ID NO. 53457, respectively, or a homolog or a fragment thereof, is increased or generated, or if the activity glycogen (starch) synthase is increased or generated in a non-human organism, like a microorganism or a plant cell, plant or part thereof, especially with non-targeted localization, whereby the respective line discloses in column 7 the fine chemical isoleucine. For example, an increase of the isoleucine of at least 1 percent, particularly in a range of 40 to 192-percent is conferred as compared to a corresponding non-transformed wild type non-human organism.

[41195] Accordingly, in one embodiment, an increase of leucine in a non-human organism, as compared to a corresponding non-transformed wild type non-human organism, is conferred in the process of the invention, if the activity of a polypeptide showing the activity of a glycogen (starch) synthase, or if the activity of the polypeptide Sll1393, preferably represented by SEQ ID NO. 53457, or a homolog or fragment thereof, or if the activity of a polypeptide encoded by a nucleic acid molecule comprising the nucleic acid SEQ ID NO. 53456, preferably the coding region thereof, or a homolog or fragment thereof, e.g. derived from Synechocystis sp., is increased or generated. For example the activity of a nucleic acid molecule or a polypeptide comprising the nucleic acid, preferably the coding region thereof, or polypeptide or the consensus sequence or the polypeptide motif, as depicted in Table I, II or IV, application No. 6, column 5 or 8 in the respective same line as the nucleic acid molecule SEQ ID NO. 53456 or polypeptide SEQ ID NO. 53457, respectively, or a homolog or a fragment thereof, is increased or generated, or if the activity glycogen (starch) synthase is increased or generated in a non-human organism, like a microorganism or a plant cell, plant or part thereof, especially with non-targeted localization, whereby the respective line discloses in column 7 the fine chemical leucine. For example, an increase of the leucine of at least 1 percent, particularly in a range of 99 to 132-percent is conferred as compared to a corresponding non-transformed wild type non-human organism.

[41196] Accordingly, in one embodiment, an increase of valine in a non-human organism, as compared to a corresponding non-transformed wild type non-human organism, is conferred in the process of the invention, if the activity of a polypeptide showing the activity of a glycogen (starch) synthase, or if the activity of the polypeptide Sll1393, preferably represented by SEQ ID NO. 53457, or a homolog or fragment thereof, or if the activity of a polypeptide encoded by a nucleic acid molecule comprising the nucleic acid SEQ ID NO. 53456, preferably the coding region thereof, or a homolog or fragment thereof, e.g. derived from Synechocystis sp., is increased or generated. For example the activity of a nucleic acid molecule or a polypeptide comprising the nucleic acid, preferably the coding region thereof, or polypeptide or the consensus sequence or the polypeptide motif, as depicted in Table I, II or IV, application No. 6, column 5 or 8 in the respective same line as the nucleic acid molecule SEQ ID NO. 53456 or polypeptide SEQ ID NO. 53457, respectively, or a homolog or a fragment thereof, is increased or generated, or if the activity glycogen (starch) synthase is increased or generated in a non-human organism, like a microorganism or a plant cell, plant or part thereof, especially with non-targeted localization, whereby the respective line discloses in column 7 the fine chemical valine. For example, an increase of the valine of at least 1 percent, particularly in a range of 19 to 121-percent is conferred as compared to a corresponding non-transformed wild type non-human organism.

[41197] Accordingly, in one embodiment, an increase of valine in a non-human organism, as compared to a corresponding non-transformed wild type non-human organism, is conferred in the process of the invention, if the activity of a polypeptide showing the activity of a sll1455-protein, or if the activity of the polypeptide Sll1455, preferably represented by SEQ ID NO. 107101, or a homolog or fragment thereof, or if the activity of a polypeptide encoded by a nucleic acid molecule comprising the nucleic acid SEQ ID NO. 107100, preferably the coding region thereof, or a homolog or fragment thereof, e.g. derived from Synechocystis sp., is increased or generated. For example the activity of a nucleic acid molecule or a polypeptide comprising the nucleic acid, preferably the coding region thereof, or polypeptide or the consensus sequence or the polypeptide motif, as depicted in Table I, II or IV, application No. 6, column 5 or 8 in the respective same line as the nucleic acid molecule SEQ ID NO. 107100 or polypeptide SEQ ID NO. 107101, respectively, or a homolog or a fragment thereof, is increased or generated, or if the activity sll1455-protein is increased or generated in a non-human organism, like a microorganism or a plant cell, plant or part thereof, especially with plastidic localization, whereby the respective line discloses in column 7 the fine chemical valine. For example, an increase of the valine of at least 1 percent, particularly in a range of 21 to 36-percent is conferred as compared to a corresponding non-transformed wild type non-human organism.

[41198] Accordingly, in one embodiment, an increase of isoleucine in a non-human organism, as compared to a corresponding non-transformed wild type non-human organism, is conferred in the process of the invention, if the activity of a polypeptide showing the activity of a carbamoylphosphate synthase subunit, or if the activity of the polypeptide Sll1498, preferably represented by SEQ ID NO. 95048, or a homolog or fragment thereof, or if the activity of a polypeptide encoded by a nucleic acid molecule comprising the nucleic acid SEQ ID NO. 95047, preferably the coding region thereof, or a homolog or fragment thereof, e.g. derived from Synechocystis sp., is increased or generated. For example the activity of a nucleic acid molecule or a polypeptide comprising the nucleic acid, preferably the coding region thereof, or polypeptide or the consensus sequence or the polypeptide motif, as depicted in Table I, II or IV, application No. 6, column 5 or 8 in the respective same line as the nucleic acid molecule SEQ ID NO. 95047 or polypeptide SEQ ID NO. 95048, respectively, or a homolog or a fragment thereof, is increased or generated, or if the activity carbamoyl-phosphate synthase subunit is increased or generated in a non-human organism, like a microorganism or a plant cell, plant or part thereof, especially with plastidic localization, whereby the respective line discloses in column 7 the fine chemical isoleucine. For example, an increase of the isoleucine of at least 1 percent, particularly in a range of 45 to 71-percent is conferred as compared to a corresponding non-transformed wild type non-human organism.

[41199] Accordingly, in one embodiment, an increase of leucine in a non-human organism, as compared to a corresponding non-transformed wild type non-human organism, is conferred in the process of the invention, if the activity of a polypeptide showing the activity of a carbamoyl-phosphate synthase subunit, or if the activity of the polypeptide Sll1498, preferably represented by SEQ ID NO. 95048, or a homolog or fragment thereof, or if the activity of a polypeptide encoded by a nucleic acid molecule comprising the nucleic acid SEQ ID NO. 95047, preferably the coding region thereof, or a homolog or fragment thereof, e.g. derived from Synechocystis sp., is increased or generated. For example the activity of a nucleic acid molecule or a polypeptide comprising the nucleic acid, preferably the coding region thereof, or polypeptide or the consensus sequence or the polypeptide motif, as depicted in Table I, II or IV, application No. 6, column 5 or 8 in the respective same line as the nucleic acid molecule SEQ ID NO. 95047 or polypeptide SEQ ID NO. 95048, respectively, or a homolog or a fragment thereof, is increased or generated, or if the activity carbamoyl-phosphate synthase subunit is increased or generated in a non-human organism, like a microorganism or a plant cell, plant or part thereof, especially with plastidic localization, whereby the respective line discloses in column 7 the fine chemical leucine. For example, an increase of the leucine of at least 1 percent, particularly in a range of 53 to 90-percent is conferred as compared to a corresponding non-transformed wild type non-human organism.

[41200] Accordingly, in one embodiment, an increase of isoleucine in a non-human organism, as compared to a corresponding non-transformed wild type non-human organism, is conferred in the process of the invention, if the activity of a polypeptide showing the activity of a sll1761-protein, or if the activity of the polypeptide Sll1761, preferably represented by SEQ ID NO. 55380, or a homolog or fragment thereof, or if the activity of a polypeptide encoded by a nucleic acid molecule comprising the nucleic acid SEQ ID NO. 55379, preferably the coding region thereof, or a homolog or fragment thereof, e.g. derived from Synechocystis sp., is increased or generated. For example the activity of a nucleic acid molecule or a polypeptide comprising the nucleic acid, preferably the coding region thereof, or polypeptide or the consensus sequence or the polypeptide motif, as depicted in Table I, II or IV, application No. 6, column 5 or 8 in the respective same line as the nucleic acid molecule SEQ ID NO. 55379 or polypeptide SEQ ID NO. 55380, respectively, or a homolog or a fragment thereof, is increased or generated, or if the activity sll1761-protein is increased or generated in a non-human organism, like a microorganism or a plant cell, plant or part thereof, especially with non-targeted localization, whereby the respective line discloses in column 7 the fine chemical isoleucine. For example, an increase of the isoleucine of at least 1 percent, particularly in a range of 56 to 276-percent is conferred as compared to a corresponding non-transformed wild type non-human organism.

[41201] Accordingly, in one embodiment, an increase of leucine in a non-human organism, as compared to a corresponding non-transformed wild type non-human organism, is conferred in the process of the invention, if the activity of a polypeptide showing the activity of a sll1761-protein, or if the activity of the polypeptide Sll1761, preferably represented by SEQ ID NO. 55380, or a homolog or fragment thereof, or if the activity of a polypeptide encoded by a nucleic acid molecule comprising the nucleic acid SEQ ID NO. 55379, preferably the coding region thereof, or a homolog or fragment thereof, e.g. derived from Synechocystis sp., is increased or generated. For example the activity of a nucleic acid molecule or a polypeptide comprising the nucleic acid, preferably the coding region thereof, or polypeptide or the consensus sequence or the polypeptide motif, as depicted in Table I, II or IV, application No. 6, column 5 or 8 in the respective same line as the nucleic acid molecule SEQ ID NO. 55379 or polypeptide SEQ ID NO. 55380, respectively, or a homolog or a fragment thereof, is increased or generated, or if the activity sll1761-protein is increased or generated in a non-human organism, like a microorganism or a plant cell, plant or part thereof, especially with non-targeted localization, whereby the respective line discloses in column 7 the fine chemical leucine. For example, an increase of the leucine of at least 1 percent, particularly in a range of 67 to 245-percent is conferred as compared to a corresponding non-transformed wild type non-human organism.

[41202] Accordingly, in one embodiment, an increase of isoleucine in a non-human organism, as compared to a corresponding non-transformed wild type non-human organism, is conferred in the process of the invention, if the activity of a polypeptide showing the activity of a adenylate kinase, or if the activity of the polypeptide Sll1815, preferably represented by SEQ ID NO. 85809, or a homolog or fragment thereof, or if the activity of a polypeptide encoded by a nucleic acid molecule comprising the nucleic acid SEQ ID NO. 85808, preferably the coding region thereof, or a homolog or fragment thereof, e.g. derived from Synechocystis sp., is increased or generated. For example the activity of a nucleic acid molecule or a polypeptide comprising the nucleic acid, preferably the coding region thereof, or polypeptide or the consensus sequence or the polypeptide motif, as depicted in Table I, II or IV, application No. 6, column 5 or 8 in the respective same line as the nucleic acid molecule SEQ ID NO. 85808 or polypeptide SEQ ID NO. 85809, respectively, or a homolog or a fragment thereof, is increased or generated, or if the activity adenylate kinase is increased or generated in a non-human organism, like a microorganism or a plant cell, plant or part thereof, especially with mitochondrial localization, whereby the respective line discloses in column 7 the fine chemical isoleucine. For example, an increase of the isoleucine of at least 1 percent, particularly in a range of 103 to 134-percent is conferred as compared to a corresponding non-transformed wild type non-human organism.

[41203] Accordingly, in one embodiment, an increase of leucine in a non-human organism, as compared to a corresponding non-transformed wild type non-human organism, is conferred in the process of the invention, if the activity of a polypeptide showing the activity of a adenylate kinase, or if the activity of the polypeptide Sll1815, preferably represented by SEQ ID NO. 85809, or a homolog or fragment thereof, or if the activity of a polypeptide encoded by a nucleic acid molecule comprising the nucleic acid SEQ ID NO. 85808, preferably the coding region thereof, or a homolog or fragment thereof, e.g. derived from Synechocystis sp., is increased or generated. For example the activity of a nucleic acid molecule or a polypeptide comprising the nucleic acid, preferably the coding region thereof, or polypeptide or the consensus sequence or the polypeptide motif, as depicted in Table I, II or IV, application No. 6, column 5 or 8 in the respective same line as the nucleic acid molecule SEQ ID NO. 85808 or polypeptide SEQ ID NO. 85809, respectively, or a homolog or a fragment thereof, is increased or generated, or if the activity adenylate kinase is increased or generated in a non-human organism, like a microorganism or a plant cell, plant or part thereof, especially with mitochondrial localization, whereby the respective line discloses in column 7 the fine chemical leucine. For example, an increase of the leucine of at least 1 percent, particularly in a range of 102 to 148-percent is conferred as compared to a corresponding non-transformed wild type non-human organism.

[41204] Accordingly, in one embodiment, an increase of valine in a non-human organism, as compared to a corresponding non-transformed wild type non-human organism, is conferred in the process of the invention, if the activity of a polypeptide showing the activity of a adenylate kinase, or if the activity of the polypeptide Sll1815, preferably represented by SEQ ID NO. 85809, or a homolog or fragment thereof, or if the activity of a polypeptide encoded by a nucleic acid molecule comprising the nucleic acid SEQ ID NO. 85808, preferably the coding region thereof, or a homolog or fragment thereof, e.g. derived from Synechocystis sp., is increased or generated. For example the activity of a nucleic acid molecule or a polypeptide comprising the nucleic acid, preferably the coding region thereof, or polypeptide or the consensus sequence or the polypeptide motif, as depicted in Table I, II or IV, application No. 6, column 5 or 8 in the respective same line as the nucleic acid molecule SEQ ID NO. 85808 or polypeptide SEQ ID NO. 85809, respectively, or a homolog or a fragment thereof, is increased or generated, or if the activity adenylate kinase is increased or generated in a non-human organism, like a microorganism or a plant cell, plant or part thereof, especially with mitochondrial localization, whereby the respective line discloses in column 7 the fine chemical valine. For example, an increase of the valine of at least 1 percent, particularly in a range of 21 to 138-percent is conferred as compared to a corresponding non-transformed wild type non-human organism.

[41205] Accordingly, in one embodiment, an increase of isoleucine in a non-human organism, as compared to a corresponding non-transformed wild type non-human organism, is conferred in the process of the invention, if the activity of a polypeptide showing the activity of a acyl transferase, or if the activity of the polypeptide Sll1848, preferably represented by SEQ ID NO. 86448, or a homolog or fragment thereof, or if the activity of a polypeptide encoded by a nucleic acid molecule comprising the nucleic acid SEQ ID NO. 86447, preferably the coding region thereof, or a homolog or fragment thereof, e.g. derived from Synechocystis sp., is increased or generated. For example the activity of a nucleic acid molecule or a polypeptide comprising the nucleic acid, preferably the coding region thereof, or polypeptide or the consensus sequence or the polypeptide motif, as depicted in Table I, II or IV, application No. 6, column 5 or 8 in the respective same line as the nucleic acid molecule SEQ ID NO. 86447 or polypeptide SEQ ID NO. 86448, respectively, or a homolog or a fragment thereof, is increased or generated, or if the activity acyl transferase is increased or generated in a non-human organism, like a microorganism or a plant cell, plant or part thereof, especially with plastidic localization, whereby the respective line discloses in column 7 the fine chemical isoleucine. For example, an increase of the isoleucine of at least 1 percent, particularly in a range of 140 to 570-percent is conferred as compared to a corresponding non-transformed wild type non-human organism.

[41206] Accordingly, in one embodiment, an increase of valine in a non-human organism, as compared to a corresponding non-transformed wild type non-human organism, is conferred in the process of the invention, if the activity of a polypeptide showing the activity of a ferredoxin, or if the activity of the polypeptide Slr0150, preferably represented by SEQ ID NO. 95528, or a homolog or fragment thereof, or if the activity of a polypeptide encoded by a nucleic acid molecule comprising the nucleic acid SEQ ID NO. 95527, preferably the coding region thereof, or a homolog or fragment thereof, e.g. derived from Synechocystis sp., is increased or generated. For example the activity of a nucleic acid molecule or a polypeptide comprising the nucleic acid, preferably the coding region thereof, or polypeptide or the consensus sequence or the polypeptide motif, as depicted in Table I, II or IV, application No. 6, column 5 or 8 in the respective same line as the nucleic acid molecule SEQ ID NO. 95527 or polypeptide SEQ ID NO. 95528, respectively, or a homolog or a fragment thereof, is increased or generated, or if the activity ferredoxin is increased or generated in a non-human organism, like a microorganism or a plant cell, plant or part thereof, especially with mitochondrial localization, whereby the respective line discloses in column 7 the fine chemical valine. For example, an increase of the valine of at least 1 percent, particularly in a range of 23 to 47-percent is conferred as compared to a corresponding non-transformed wild type non-human organism.

[41207] Accordingly, in one embodiment, an increase of isoleucine in a non-human organism, as compared to a corresponding non-transformed wild type non-human organism, is conferred in the process of the invention, if the activity of a polypeptide showing the activity of a precorrin methylase, or if the activity of the polypeptide Slr0239, preferably represented by SEQ ID NO. 86541, or a homolog or fragment thereof, or if the activity of a polypeptide encoded by a nucleic acid molecule comprising the nucleic acid SEQ ID NO. 86540, preferably the coding region thereof, or a homolog or fragment thereof, e.g. derived from Synechocystis sp., is increased or generated. For example the activity of a nucleic acid molecule or a polypeptide comprising the nucleic acid, preferably the coding region thereof, or polypeptide or the consensus sequence or the polypeptide motif, as depicted in Table I, II or IV, application No. 6, column 5 or 8 in the respective same line as the nucleic acid molecule SEQ ID NO. 86540 or polypeptide SEQ ID NO. 86541, respectively, or a homolog or a fragment thereof, is increased or generated, or if the activity precorrin methylase is increased or generated in a non-human organism, like a microorganism or a plant cell, plant or part thereof, especially with mitochondrial localization, whereby the respective line discloses in column 7 the fine chemical isoleucine. For example, an increase of the isoleucine of at least 1 percent, particularly in a range of 33 to 447-percent is conferred as compared to a corresponding non-transformed wild type non-human organism.

[41208] Accordingly, in one embodiment, an increase of leucine in a non-human organism, as compared to a corresponding non-transformed wild type non-human organism, is conferred in the process of the invention, if the activity of a polypeptide showing the activity of a precorrin methylase, or if the activity of the polypeptide Slr0239, preferably represented by SEQ ID NO. 86541, or a homolog or fragment thereof, or if the activity of a polypeptide encoded by a nucleic acid molecule comprising the nucleic acid SEQ ID NO. 86540, preferably the coding region thereof, or a homolog or fragment thereof, e.g. derived from Synechocystis sp., is increased or generated. For example the activity of a nucleic acid molecule or a polypeptide comprising the nucleic acid, preferably the coding region thereof, or polypeptide or the consensus sequence or the polypeptide motif, as depicted in Table I, II or IV, application No. 6, column 5 or 8 in the respective same line as the nucleic acid molecule SEQ ID NO. 86540 or polypeptide SEQ ID NO. 86541, respectively, or a homolog or a fragment thereof, is increased or generated, or if the activity precorrin methylase is increased or generated in a non-human organism, like a microorganism or a plant cell, plant or part thereof, especially with mitochondrial localization, whereby the respective line discloses in column 7 the fine chemical leucine. For example, an increase of the leucine of at least 1 percent, particularly in a range of 212 to 603-percent is conferred as compared to a corresponding non-transformed wild type non-human organism.

[41209] Accordingly, in one embodiment, an increase of valine in a non-human organism, as compared to a corresponding non-transformed wild type non-human organism, is conferred in the process of the invention, if the activity of a polypeptide showing the activity of a precorrin methylase, or if the activity of the polypeptide 51r0239, preferably represented by SEQ ID NO. 86541, or a homolog or fragment thereof, or if the activity of a polypeptide encoded by a nucleic acid molecule comprising the nucleic acid SEQ ID NO. 86540, preferably the coding region thereof, or a homolog or fragment thereof, e.g. derived from Synechocystis sp., is increased or generated. For example the activity of a nucleic acid molecule or a polypeptide comprising the nucleic acid, preferably the coding region thereof, or polypeptide or the consensus sequence or the polypeptide motif, as depicted in Table I, II or IV, application No. 6, column 5 or 8 in the respective same line as the nucleic acid molecule SEQ ID NO. 86540 or polypeptide SEQ ID NO. 86541, respectively, or a homolog or a fragment thereof, is increased or generated, or if the activity precorrin methylase is increased or generated in a non-human organism, like a microorganism or a plant cell, plant or part thereof, especially with mitochondrial localization, whereby the respective line discloses in column 7 the fine chemical valine. For example, an increase of the valine of at least 1 percent, particularly in a range of 25 to 185-percent is conferred as compared to a corresponding non-transformed wild type non-human organism.

[41210] Accordingly, in one embodiment, an increase of isoleucine in a non-human organism, as compared to a corresponding non-transformed wild type non-human organism, is conferred in the process of the invention, if the activity of a polypeptide showing the activity of a malate dehydrogenase, or if the activity of the polypeptide Slr0721, preferably represented by SEQ ID NO. 87398, or a homolog or fragment thereof, or if the activity of a polypeptide encoded by a nucleic acid molecule comprising the nucleic acid SEQ ID NO. 87397, preferably the coding region thereof, or a homolog or fragment thereof, e.g. derived from Synechocystis sp., is increased or generated. For example the activity of a nucleic acid molecule or a polypeptide comprising the nucleic acid, preferably the coding region thereof, or polypeptide or the consensus sequence or the polypeptide motif, as depicted in Table I, II or IV, application No. 6, column 5 or 8 in the respective same line as the nucleic acid molecule SEQ ID NO. 87397 or polypeptide SEQ ID NO. 87398, respectively, or a homolog or a fragment thereof, is increased or generated, or if the activity malate dehydrogenase is increased or generated in a non-human organism, like a microorganism or a plant cell, plant or part thereof, especially with non-targeted localization, whereby the respective line discloses in column 7 the fine chemical isoleucine. For example, an increase of the isoleucine of at least 1 percent, particularly in a range of 49 to 129-percent is conferred as compared to a corresponding non-transformed wild type non-human organism.

[41211] Accordingly, in one embodiment, an increase of isoleucine in a non-human organism, as compared to a corresponding non-transformed wild type non-human organism, is conferred in the process of the invention, if the activity of a polypeptide showing the activity of a malate dehydrogenase, or if the activity of the polypeptide Slr0721, preferably represented by SEQ ID NO. 87398, or a homolog or fragment thereof, or if the activity of a polypeptide encoded by a nucleic acid molecule comprising the nucleic acid SEQ ID NO. 87397, preferably the coding region thereof, or a homolog or fragment thereof, e.g. derived from Synechocystis sp., is increased or generated. For example the activity of a nucleic acid molecule or a polypeptide comprising the nucleic acid, preferably the coding region thereof, or polypeptide or the consensus sequence or the polypeptide motif, as depicted in Table I, II or IV, application No. 6, column 5 or 8 in the respective same line as the nucleic acid molecule SEQ ID NO. 87397 or polypeptide SEQ ID NO. 87398, respectively, or a homolog or a fragment thereof, is increased or generated, or if the activity malate dehydrogenase is increased or generated in a non-human organism, like a microorganism or a plant cell, plant or part thereof, especially with plastidic localization, whereby the respective line discloses in column 7 the fine chemical isoleucine. For example, an increase of the isoleucine of at least 1 percent, particularly in a range of 38 to 175-percent is conferred as compared to a corresponding non-transformed wild type non-human organism.

[41212] Accordingly, in one embodiment, an increase of leucine in a non-human organism, as compared to a corresponding non-transformed wild type non-human organism, is conferred in the process of the invention, if the activity of a polypeptide showing the activity of a malate dehydrogenase, or if the activity of the polypeptide Slr0721, preferably represented by SEQ ID NO. 87398, or a homolog or fragment thereof, or if the activity of a polypeptide encoded by a nucleic acid molecule comprising the nucleic acid SEQ ID NO. 87397, preferably the coding region thereof, or a homolog or fragment thereof, e.g. derived from Synechocystis sp., is increased or generated. For example the activity of a nucleic acid molecule or a polypeptide comprising the nucleic acid, preferably the coding region thereof, or polypeptide or the consensus sequence or the polypeptide motif, as depicted in Table I, II or IV, application No. 6, column 5 or 8 in the respective same line as the nucleic acid molecule SEQ ID NO. 87397 or polypeptide SEQ ID NO. 87398, respectively, or a homolog or a fragment thereof, is increased or generated, or if the activity malate dehydrogenase is increased or generated in a non-human organism, like a microorganism or a plant cell, plant or part thereof, especially with plastidic localization, whereby the respective line discloses in column 7 the fine chemical leucine. For example, an increase of the leucine of at least 1 percent, particularly in a range of 98 to 267-percent is conferred as compared to a corresponding non-transformed wild type non-human organism.

[41213] Accordingly, in one embodiment, an increase of leucine in a non-human organism, as compared to a corresponding non-transformed wild type non-human organism, is conferred in the process of the invention, if the activity of a polypeptide showing the activity of a malate dehydrogenase, or if the activity of the polypeptide Slr0721, preferably represented by SEQ ID NO. 87398, or a homolog or fragment thereof, or if the activity of a polypeptide encoded by a nucleic acid molecule comprising the nucleic acid SEQ ID NO. 87397, preferably the coding region thereof, or a homolog or fragment thereof, e.g. derived from Synechocystis sp., is increased or generated. For example the activity of a nucleic acid molecule or a polypeptide comprising the nucleic acid, preferably the coding region thereof, or polypeptide or the consensus sequence or the polypeptide motif, as depicted in Table I, II or IV, application No. 6, column 5 or 8 in the respective same line as the nucleic acid molecule SEQ ID NO. 87397 or polypeptide SEQ ID NO. 87398, respectively, or a homolog or a fragment thereof, is increased or generated, or if the activity malate dehydrogenase is increased or generated in a non-human organism, like a microorganism or a plant cell, plant or part thereof, especially with non-targeted localization, whereby the respective line discloses in column 7 the fine chemical leucine. For example, an increase of the leucine of at least 1 percent, particularly in a range of 79 to 191-percent is conferred as compared to a corresponding non-transformed wild type non-human organism.

[41214] Accordingly, in one embodiment, an increase of valine in a non-human organism, as compared to a corresponding non-transformed wild type non-human organism, is conferred in the process of the invention, if the activity of a polypeptide showing the activity of a malate dehydrogenase, or if the activity of the polypeptide Slr0721, preferably represented by SEQ ID NO. 87398, or a homolog or fragment thereof, or if the activity of a polypeptide encoded by a nucleic acid molecule comprising the nucleic acid SEQ ID NO. 87397, preferably the coding region thereof, or a homolog or fragment thereof, e.g. derived from Synechocystis sp., is increased or generated. For example the activity of a nucleic acid molecule or a polypeptide comprising the nucleic acid, preferably the coding region thereof, or polypeptide or the consensus sequence or the polypeptide motif, as depicted in Table I, II or IV, application No. 6, column 5 or 8 in the respective same line as the nucleic acid molecule SEQ ID NO. 87397 or polypeptide SEQ ID NO. 87398, respectively, or a homolog or a fragment thereof, is increased or generated, or if the activity malate dehydrogenase is increased or generated in a non-human organism, like a microorganism or a plant cell, plant or part thereof, especially with non-targeted localization, whereby the respective line discloses in column 7 the fine chemical valine. For example, an increase of the valine of at least 1 percent, particularly in a range of 20 to 60-percent is conferred as compared to a corresponding non-transformed wild type non-human organism.

[41215] Accordingly, in one embodiment, an increase of valine in a non-human organism, as compared to a corresponding non-transformed wild type non-human organism, is conferred in the process of the invention, if the activity of a polypeptide showing the activity of a malate dehydrogenase, or if the activity of the polypeptide Slr0721, preferably represented by SEQ ID NO. 87398, or a homolog or fragment thereof, or if the activity of a polypeptide encoded by a nucleic acid molecule comprising the nucleic acid SEQ ID NO. 87397, preferably the coding region thereof, or a homolog or fragment thereof, e.g. derived from Synechocystis sp., is increased or generated. For example the activity of a nucleic acid molecule or a polypeptide comprising the nucleic acid, preferably the coding region thereof, or polypeptide or the consensus sequence or the polypeptide motif, as depicted in Table I, II or IV, application No. 6, column 5 or 8 in the respective same line as the nucleic acid molecule SEQ ID NO. 87397 or polypeptide SEQ ID NO. 87398, respectively, or a homolog or a fragment thereof, is increased or generated, or if the activity malate dehydrogenase is increased or generated in a non-human organism, like a microorganism or a plant cell, plant or part thereof, especially with plastidic localization, whereby the respective line discloses in column 7 the fine chemical valine. For example, an increase of the valine of at least 1 percent, particularly in a range of 21 to 98-percent is conferred as compared to a corresponding non-transformed wild type non-human organism.

[41216] Accordingly, in one embodiment, an increase of isoleucine in a non-human organism, as compared to a corresponding non-transformed wild type non-human organism, is conferred in the process of the invention, if the activity of a polypeptide showing the activity of a geranylgeranyl pyrophosphate synthase, or if the activity of the polypeptide Slr0739, preferably represented by SEQ ID NO. 57236, or a homolog or fragment thereof, or if the activity of a polypeptide encoded by a nucleic acid molecule comprising the nucleic acid SEQ ID NO. 57235, preferably the coding region thereof, or a homolog or fragment thereof, e.g. derived from Synechocystis sp., is increased or generated. For example the activity of a nucleic acid molecule or a polypeptide comprising the nucleic acid, preferably the coding region thereof, or polypeptide or the consensus sequence or the polypeptide motif, as depicted in Table I, II or IV, application No. 6, column 5 or 8 in the respective same line as the nucleic acid molecule SEQ ID NO. 57235 or polypeptide SEQ ID NO. 57236, respectively, or a homolog or a fragment thereof, is increased or generated, or if the activity geranylgeranyl pyrophosphate synthase is increased or generated in a non-human organism, like a microorganism or a plant cell, plant or part thereof, especially with plastidic localization, whereby the respective line discloses in column 7 the fine chemical isoleucine. For example, an increase of the isoleucine of at least 1 percent, particularly in a range of 37 to 120-percent is conferred as compared to a corresponding non-transformed wild type non-human organism.

[41217] Accordingly, in one embodiment, an increase of leucine in a non-human organism, as compared to a corresponding non-transformed wild type non-human organism, is conferred in the process of the invention, if the activity of a polypeptide showing the activity of a geranylgeranyl pyrophosphate synthase, or if the activity of the polypeptide Slr0739, preferably represented by SEQ ID NO. 57236, or a homolog or fragment thereof, or if the activity of a polypeptide encoded by a nucleic acid molecule comprising the nucleic acid SEQ ID NO. 57235, preferably the coding region thereof, or a homolog or fragment thereof, e.g. derived from Synechocystis sp., is increased or generated. For example the activity of a nucleic acid molecule or a polypeptide comprising the nucleic acid, preferably the coding region thereof, or polypeptide or the consensus sequence or the polypeptide motif, as depicted in Table I, II or IV, application No. 6, column 5 or 8 in the respective same line as the nucleic acid molecule SEQ ID NO. 57235 or polypeptide SEQ ID NO. 57236, respectively, or a homolog or a fragment thereof, is increased or generated, or if the activity geranylgeranyl pyrophosphate synthase is increased or generated in a non-human organism, like a microorganism or a plant cell, plant or part thereof, especially with plastidic localization, whereby the respective line discloses in column 7 the fine chemical leucine. For example, an increase of the leucine of at least 1 percent, particularly in a range of 60 to 128 -percent is conferred as compared to a corresponding non-transformed wild type non-human organism.

[41218] Accordingly, in one embodiment, an increase of valine in a non-human organism, as compared to a corresponding non-transformed wild type non-human organism, is conferred in the process of the invention, if the activity of a polypeptide showing the activity of a geranylgeranyl pyrophosphate synthase, or if the activity of the polypeptide Slr0739, preferably represented by SEQ ID NO. 57236, or a homolog or fragment thereof, or if the activity of a polypeptide encoded by a nucleic acid molecule comprising the nucleic acid SEQ ID NO. 57235, preferably the coding region thereof, or a homolog or fragment thereof, e.g. derived from Synechocystis sp., is increased or generated. For example the activity of a nucleic acid molecule or a polypeptide comprising the nucleic acid, preferably the coding region thereof, or polypeptide or the consensus sequence or the polypeptide motif, as depicted in Table I, II or IV, application No. 6, column 5 or 8 in the respective same line as the nucleic acid molecule SEQ ID NO. 57235 or polypeptide SEQ ID NO. 57236, respectively, or a homolog or a fragment thereof, is increased or generated, or if the activity geranylgeranyl pyrophosphate synthase is increased or generated in a non-human organism, like a microorganism or a plant cell, plant or part thereof, especially with plastidic localization, whereby the respective line discloses in column 7 the fine chemical valine. For example, an increase of the valine of at least 1 percent, particularly in a range of 22 to 91-percent is conferred as compared to a corresponding non-transformed wild type non-human organism.

[41219] Accordingly, in one embodiment, an increase of isoleucine in a non-human organism, as compared to a corresponding non-transformed wild type non-human organism, is conferred in the process of the invention, if the activity of a polypeptide showing the activity of a iron(III) dicitrate-binding protein, or if the activity of the polypeptide Slr1492, preferably represented by SEQ ID NO. 58669, or a homolog or fragment thereof, or if the activity of a polypeptide encoded by a nucleic acid molecule comprising the nucleic acid SEQ ID NO. 58668, preferably the coding region thereof, or a homolog or fragment thereof, e.g. derived from Synechocystis sp., is increased or generated. For example the activity of a nucleic acid molecule or a polypeptide comprising the nucleic acid, preferably the coding region thereof, or polypeptide or the consensus sequence or the polypeptide motif, as depicted in Table I, II or IV, application No. 6, column 5 or 8 in the respective same line as the nucleic acid molecule SEQ ID NO. 58668 or polypeptide SEQ ID NO. 58669, respectively, or a homolog or a fragment thereof, is increased or generated, or if the activity iron(III) dicitrate-binding protein is increased or generated in a non-human organism, like a microorganism or a plant cell, plant or part thereof, especially with mitochondrial localization, whereby the respective line discloses in column 7 the fine chemical isoleucine. For example, an increase of the isoleucine of at least 1 percent, particularly in a range of 27 to 42-percent is conferred as compared to a corresponding non-transformed wild type non-human organism.

[41220] Accordingly, in one embodiment, an increase of isoleucine in a non-human organism, as compared to a corresponding non-transformed wild type non-human organism, is conferred in the process of the invention, if the activity of a polypeptide showing the activity of a Na+/K+ transporter, or if the activity of the polypeptide Slr1509, preferably represented by SEQ ID NO. 88159, or a homolog or fragment thereof, or if the activity of a polypeptide encoded by a nucleic acid molecule comprising the nucleic acid SEQ ID NO. 88158, preferably the coding region thereof, or a homolog or fragment thereof, e.g. derived from Synechocystis sp., is increased or generated. For example the activity of a nucleic acid molecule or a polypeptide comprising the nucleic acid, preferably the coding region thereof, or polypeptide or the consensus sequence or the polypeptide motif, as depicted in Table I, II or IV, application No. 6, column 5 or 8 in the respective same line as the nucleic acid molecule SEQ ID NO. 88158 or polypeptide SEQ ID NO. 88159, respectively, or a homolog or a fragment thereof, is increased or generated, or if the activity Na+/K+ transporter is increased or generated in a non-human organism, like a microorganism or a plant cell, plant or part thereof, especially with mitochondrial localization, whereby the respective line discloses in column 7 the fine chemical isoleucine. For example, an increase of the isoleucine of at least 1 percent, particularly in a range of 45 to 122-percent is conferred as compared to a corresponding non-transformed wild type non-human organism.

[41221] Accordingly, in one embodiment, an increase of leucine in a non-human organism, as compared to a corresponding non-transformed wild type non-human organism, is conferred in the process of the invention, if the activity of a polypeptide showing the activity of a Na+/K+ transporter, or if the activity of the polypeptide Slr1509, preferably represented by SEQ ID NO. 88159, or a homolog or fragment thereof, or if the activity of a polypeptide encoded by a nucleic acid molecule comprising the nucleic acid SEQ ID NO. 88158, preferably the coding region thereof, or a homolog or fragment thereof, e.g. derived from Synechocystis sp., is increased or generated. For example the activity of a nucleic acid molecule or a polypeptide comprising the nucleic acid, preferably the coding region thereof, or polypeptide or the consensus sequence or the polypeptide motif, as depicted in Table I, II or IV, application No. 6, column 5 or 8 in the respective same line as the nucleic acid molecule SEQ ID NO. 88158 or polypeptide SEQ ID NO. 88159, respectively, or a homolog or a fragment thereof, is increased or generated, or if the activity Na+/K+ transporter is increased or generated in a non-human organism, like a microorganism or a plant cell, plant or part thereof, especially with mitochondrial localization, whereby the respective line discloses in column 7 the fine chemical leucine. For example, an increase of the leucine of at least 1 percent, particularly in a range of 59 to 144-percent is conferred as compared to a corresponding non-transformed wild type non-human organism.

[41222] Accordingly, in one embodiment, an increase of valine in a non-human organism, as compared to a corresponding non-transformed wild type non-human organism, is conferred in the process of the invention, if the activity of a polypeptide showing the activity of a 3-isopropylmalate dehydrogenase, or if the activity of the polypeptide Slr1517, preferably represented by SEQ ID NO. 107146, or a homolog or fragment thereof, or if the activity of a polypeptide encoded by a nucleic acid molecule comprising the nucleic acid SEQ ID NO. 107145, preferably the coding region thereof, or a homolog or fragment thereof, e.g. derived from Synechocystis sp., is increased or generated. For example the activity of a nucleic acid molecule or a polypeptide comprising the nucleic acid, preferably the coding region thereof, or polypeptide or the consensus sequence or the polypeptide motif, as depicted in Table I, II or IV, application No. 6, column 5 or 8 in the respective same line as the nucleic acid molecule SEQ ID NO. 107145 or polypeptide SEQ ID NO. 107146, respectively, or a homolog or a fragment thereof, is increased or generated, or if the activity 3-isopropylmalate dehydrogenase is increased or generated in a non-human organism, like a microorganism or a plant cell, plant or part thereof, especially with mitochondrial localization, whereby the respective line discloses in column 7 the fine chemical valine. For example, an increase of the valine of at least 1 percent, particularly in a range of 27 to 33-percent is conferred as compared to a corresponding non-transformed wild type non-human organism.

[41223] Accordingly, in one embodiment, an increase of isoleucine in a non-human organism, as compared to a corresponding non-transformed wild type non-human organism, is conferred in the process of the invention, if the activity of a polypeptide showing the activity of a photosystem II protein, or if the activity of the polypeptide Slr1739, preferably represented by SEQ ID NO. 58732, or a homolog or fragment thereof, or if the activity of a polypeptide encoded by a nucleic acid molecule comprising the nucleic acid SEQ ID NO. 58731, preferably the coding region thereof, or a homolog or fragment thereof, e.g. derived from Synechocystis sp., is increased or generated. For example the activity of a nucleic acid molecule or a polypeptide comprising the nucleic acid, preferably the coding region thereof, or polypeptide or the consensus sequence or the polypeptide motif, as depicted in Table I, II or IV, application No. 6, column 5 or 8 in the respective same line as the nucleic acid molecule SEQ ID NO. 58731 or polypeptide SEQ ID NO. 58732, respectively, or a homolog or a fragment thereof, is increased or generated, or if the activity photosystem II protein is increased or generated in a non-human organism, like a microorganism or a plant cell, plant or part thereof, especially with plastidic localization, whereby the respective line discloses in column 7 the fine chemical isoleucine. For example, an increase of the isoleucine of at least 1 percent, particularly in a range of 54 to 308-percent is conferred as compared to a corresponding non-transformed wild type non-human organism.

[41224] Accordingly, in one embodiment, an increase of leucine in a non-human organism, as compared to a corresponding non-transformed wild type non-human organism, is conferred in the process of the invention, if the activity of a polypeptide showing the activity of a photosystem II protein, or if the activity of the polypeptide Slr1739, preferably represented by SEQ ID NO. 58732, or a homolog or fragment thereof, or if the activity of a polypeptide encoded by a nucleic acid molecule comprising the nucleic acid SEQ ID NO. 58731, preferably the coding region thereof, or a homolog or fragment thereof, e.g. derived from Synechocystis sp., is increased or generated.

[41225] For example the activity of a nucleic acid molecule or a polypeptide comprising the nucleic acid, preferably the coding region thereof, or polypeptide or the consensus sequence or the polypeptide motif, as depicted in Table I, II or IV, application No. 6, column 5 or 8 in the respective same line as the nucleic acid molecule SEQ ID NO. 58731 or polypeptide SEQ ID NO. 58732, respectively, or a homolog or a fragment thereof, is increased or generated, or if the activity photosystem II protein is increased or generated in a non-human organism, like a microorganism or a plant cell, plant or part thereof, especially with plastidic localization, whereby the respective line discloses in column 7 the fine chemical leucine. For example, an increase of the leucine of at least 1 percent, particularly in a range of 148 to 331-percent is conferred as compared to a corresponding non-transformed wild type non-human organism.

[41226] Accordingly, in one embodiment, an increase of valine in a non-human organism, as compared to a corresponding non-transformed wild type non-human organism, is conferred in the process of the invention, if the activity of a polypeptide showing the activity of a photosystem II protein, or if the activity of the polypeptide Slr1739, preferably represented by SEQ ID NO. 58732, or a homolog or fragment thereof, or if the activity of a polypeptide encoded by a nucleic acid molecule comprising the nucleic acid SEQ ID NO. 58731, preferably the coding region thereof, or a homolog or fragment thereof, e.g. derived from Synechocystis sp., is increased or generated. For example the activity of a nucleic acid molecule or a polypeptide comprising the nucleic acid, preferably the coding region thereof, or polypeptide or the consensus sequence or the polypeptide motif, as depicted in Table I, II or IV, application No. 6, column 5 or 8 in the respective same line as the nucleic acid molecule SEQ ID NO. 58731 or polypeptide SEQ ID NO. 58732, respectively, or a homolog or a fragment thereof, is increased or generated, or if the activity photosystem II protein is increased or generated in a non-human organism, like a microorganism or a plant cell, plant or part thereof, especially with plastidic localization, whereby the respective line discloses in column 7 the fine chemical valine. For example, an increase of the valine of at least 1 percent, particularly in a range of 37 to 107-percent is conferred as compared to a corresponding non-transformed wild type non-human organism.

[41227] Accordingly, in one embodiment, an increase of valine in a non-human organism, as compared to a corresponding non-transformed wild type non-human organism, is conferred in the process of the invention, if the activity of a polypeptide showing the activity of a phosphoadenosine phosphosulfate reductase , or if the activity of the polypeptide Slr1791, preferably represented by SEQ ID NO. 12141, or a homolog or fragment thereof, or if the activity of a polypeptide encoded by a nucleic acid molecule comprising the nucleic acid SEQ ID NO. 12140, preferably the coding region thereof, or a homolog or fragment thereof, e.g. derived from Synechocystis sp., is increased or generated. For example the activity of a nucleic acid molecule or a polypeptide comprising the nucleic acid, preferably the coding region thereof, or polypeptide or the consensus sequence or the polypeptide motif, as depicted in Table I, II or IV, application No. 6, column 5 or 8 in the respective same line as the nucleic acid molecule SEQ ID NO. 12140 or polypeptide SEQ ID NO. 12141, respectively, or a homolog or a fragment thereof, is increased or generated, or if the activity phosphoadenosine phosphosulfate reductase is increased or generated in a non-human organism, like a microorganism or a plant cell, plant or part thereof, especially with plastidic localization, whereby the respective line discloses in column 7 the fine chemical valine. For example, an increase of the valine of at least 1 percent, particularly in a range of 25 to 33-percent is conferred as compared to a corresponding non-transformed wild type non-human organism.

[41228] Accordingly, in one embodiment, an increase of valine in a non-human organism, as compared to a corresponding non-transformed wild type non-human organism, is conferred in the process of the invention, if the activity of a polypeptide showing the activity of a riboflavin biosynthesis protein, or if the activity of the polypeptide Slr1882, preferably represented by SEQ ID NO. 59042, or a homolog or fragment thereof, or if the activity of a polypeptide encoded by a nucleic acid molecule comprising the nucleic acid SEQ ID NO. 59041, preferably the coding region thereof, or a homolog or fragment thereof, e.g. derived from Synechocystis sp., is increased or generated. For example the activity of a nucleic acid molecule or a polypeptide comprising the nucleic acid, preferably the coding region thereof, or polypeptide or the consensus sequence or the polypeptide motif, as depicted in Table I, II or IV, application No. 6, column 5 or 8 in the respective same line as the nucleic acid molecule SEQ ID NO. 59041 or polypeptide SEQ ID NO. 59042, respectively, or a homolog or a fragment thereof, is increased or generated, or if the activity riboflavin biosynthesis protein is increased or generated in a non-human organism, like a microorganism or a plant cell, plant or part thereof, especially with non-targeted localization, whereby the respective line discloses in column 7 the fine chemical valine. For example, an increase of the valine of at least 1 percent, particularly in a range of 20 to 27-percent is conferred as compared to a corresponding non-transformed wild type non-human organism.

[41229] Accordingly, in one embodiment, an increase of isoleucine in a non-human organism, as compared to a corresponding non-transformed wild type non-human organism, is conferred in the process of the invention, if the activity of a polypeptide showing the activity of a threonine dehydratase, or if the activity of the polypeptide Slr2072, preferably represented by SEQ ID NO. 12342, or a homolog or fragment thereof, or if the activity of a polypeptide encoded by a nucleic acid molecule comprising the nucleic acid SEQ ID NO. 12341, preferably the coding region thereof, or a homolog or fragment thereof, e.g. derived from Synechocystis sp., is increased or generated. For example the activity of a nucleic acid molecule or a polypeptide comprising the nucleic acid, preferably the coding region thereof, or polypeptide or the consensus sequence or the polypeptide motif, as depicted in Table I, II or IV, application No. 6, column 5 or 8 in the respective same line as the nucleic acid molecule SEQ ID NO. 12341 or polypeptide SEQ ID NO. 12342, respectively, or a homolog or a fragment thereof, is increased or generated, or if the activity threonine dehydratase is increased or generated in a non-human organism, like a microorganism or a plant cell, plant or part thereof, especially with mitochondrial localization, whereby the respective line discloses in column 7 the fine chemical isoleucine. For example, an increase of the isoleucine of at least 1 percent, particularly in a range of 592 to 9865-percent is conferred as compared to a corresponding non-transformed wild type non-human organism.

[41230] Accordingly, in one embodiment, an increase of isoleucine in a non-human organism, as compared to a corresponding non-transformed wild type non-human organism, is conferred in the process of the invention, if the activity of a polypeptide showing the activity of a threonine dehydratase, or if the activity of the polypeptide Slr2072, preferably represented by SEQ ID NO. 12342, or a homolog or fragment thereof, or if the activity of a polypeptide encoded by a nucleic acid molecule comprising the nucleic acid SEQ ID NO. 12341, preferably the coding region thereof, or a homolog or fragment thereof, e.g. derived from Synechocystis sp., is increased or generated. For example the activity of a nucleic acid molecule or a polypeptide comprising the nucleic acid, preferably the coding region thereof, or polypeptide or the consensus sequence or the polypeptide motif, as depicted in Table I, II or IV, application No. 6, column 5 or 8 in the respective same line as the nucleic acid molecule SEQ ID NO. 12341 or polypeptide SEQ ID NO. 12342, respectively, or a homolog or a fragment thereof, is increased or generated, or if the activity threonine dehydratase is increased or generated in a non-human organism, like a microorganism or a plant cell, plant or part thereof, especially with plastidic localization, whereby the respective line discloses in column 7 the fine chemical isoleucine. For example, an increase of the isoleucine of at least 1 percent, particularly in a range of 1626 to 10965-percent is conferred as compared to a corresponding non-transformed wild type non-human organism.

[41231] Accordingly, in one embodiment, an increase of leucine in a non-human organism, as compared to a corresponding non-transformed wild type non-human organism, is conferred in the process of the invention, if the activity of a polypeptide showing the activity of a threonine dehydratase, or if the activity of the polypeptide Slr2072, preferably represented by SEQ ID NO. 12342, or a homolog or fragment thereof, or if the activity of a polypeptide encoded by a nucleic acid molecule comprising the nucleic acid SEQ ID NO. 12341, preferably the coding region thereof, or a homolog or fragment thereof, e.g. derived from Synechocystis sp., is increased or generated. For example the activity of a nucleic acid molecule or a polypeptide comprising the nucleic acid, preferably the coding region thereof, or polypeptide or the consensus sequence or the polypeptide motif, as depicted in Table I, II or IV, application No. 6, column 5 or 8 in the respective same line as the nucleic acid molecule SEQ ID NO. 12341 or polypeptide SEQ ID NO. 12342, respectively, or a homolog or a fragment thereof, is increased or generated, or if the activity threonine dehydratase is increased or generated in a non-human organism, like a microorganism or a plant cell, plant or part thereof, especially with plastidic localization, whereby the respective line discloses in column 7 the fine chemical leucine. For example, an increase of the leucine of at least 1 percent, particularly in a range of 50 to 250-percent is conferred as compared to a corresponding non-transformed wild type non-human organism.

[41232] Accordingly, in one embodiment, an increase of leucine in a non-human organism, as compared to a corresponding non-transformed wild type non-human organism, is conferred in the process of the invention, if the activity of a polypeptide showing the activity of a threonine dehydratase, or if the activity of the polypeptide Slr2072, preferably represented by SEQ ID NO. 12342, or a homolog or fragment thereof, or if the activity of a polypeptide encoded by a nucleic acid molecule comprising the nucleic acid SEQ ID NO. 12341, preferably the coding region thereof, or a homolog or fragment thereof, e.g. derived from Synechocystis sp., is increased or generated. For example the activity of a nucleic acid molecule or a polypeptide comprising the nucleic acid, preferably the coding region thereof, or polypeptide or the consensus sequence or the polypeptide motif, as depicted in Table I, II or IV, application No. 6, column 5 or 8 in the respective same line as the nucleic acid molecule SEQ ID NO. 12341 or polypeptide SEQ ID NO. 12342, respectively, or a homolog or a fragment thereof, is increased or generated, or if the activity threonine dehydratase is increased or generated in a non-human organism, like a microorganism or a plant cell, plant or part thereof, especially with mitochondrial localization, whereby the respective line discloses in column 7 the fine chemical leucine. For example, an increase of the leucine of at least 1 percent, particularly in a range of 60 to 214-percent is conferred as compared to a corresponding non-transformed wild type non-human organism.

[41233] Accordingly, in one embodiment, an increase of valine in a non-human organism, as compared to a corresponding non-transformed wild type non-human organism, is conferred in the process of the invention, if the activity of a polypeptide showing the activity of a threonine dehydratase, or if the activity of the polypeptide Slr2072, preferably represented by SEQ ID NO. 12342, or a homolog or fragment thereof, or if the activity of a polypeptide encoded by a nucleic acid molecule comprising the nucleic acid SEQ ID NO. 12341, preferably the coding region thereof, or a homolog or fragment thereof, e.g. derived from Synechocystis sp., is increased or generated. For example the activity of a nucleic acid molecule or a polypeptide comprising the nucleic acid, preferably the coding region thereof, or polypeptide or the consensus sequence or the polypeptide motif, as depicted in Table I, II or IV, application No. 6, column 5 or 8 in the respective same line as the nucleic acid molecule SEQ ID NO. 12341 or polypeptide SEQ ID NO. 12342, respectively, or a homolog or a fragment thereof, is increased or generated, or if the activity threonine dehydratase is increased or generated in a non-human organism, like a microorganism or a plant cell, plant or part thereof, especially with mitochondrial localization, whereby the respective line discloses in column 7 the fine chemical valine. For example, an increase of the valine of at least 1 percent, particularly in a range of 23 to 54-percent is conferred as compared to a corresponding non-transformed wild type non-human organism.

[41234] Accordingly, in one embodiment, an increase of valine in a non-human organism, as compared to a corresponding non-transformed wild type non-human organism, is conferred in the process of the invention, if the activity of a polypeptide showing the activity of a threonine dehydratase, or if the activity of the polypeptide Slr2072, preferably represented by SEQ ID NO. 12342, or a homolog or fragment thereof, or if the activity of a polypeptide encoded by a nucleic acid molecule comprising the nucleic acid SEQ ID NO. 12341, preferably the coding region thereof, or a homolog or fragment thereof, e.g. derived from Synechocystis sp., is increased or generated.

[41235] For example the activity of a nucleic acid molecule or a polypeptide comprising the nucleic acid, preferably the coding region thereof, or polypeptide or the consensus sequence or the polypeptide motif, as depicted in Table I, II or IV, application No. 6, column 5 or 8 in the respective same line as the nucleic acid molecule SEQ ID NO. 12341 or polypeptide SEQ ID NO. 12342, respectively, or a homolog or a fragment thereof, is increased or generated, or if the activity threonine dehydratase is increased or generated in a non-human organism, like a microorganism or a plant cell, plant or part thereof, especially with plastidic localization, whereby the respective line discloses in column 7 the fine chemical valine. For example, an increase of the valine of at least 1 percent, particularly in a range of 24 to 64-percent is conferred as compared to a corresponding non-transformed wild type non-human organism.

[41236] Accordingly, in one embodiment, an increase of valine in a non-human organism, as compared to a corresponding non-transformed wild type non-human organism, is conferred in the process of the invention, if the activity of a polypeptide showing the activity of a short-chain alcohol dehydrogenase family, or if the activity of the polypeptide Slr2124, preferably represented by SEQ ID NO. 59371, or a homolog or fragment thereof, or if the activity of a polypeptide encoded by a nucleic acid molecule comprising the nucleic acid SEQ ID NO. 59370, preferably the coding region thereof, or a homolog or fragment thereof, e.g. derived from Synechocystis sp., is increased or generated. For example the activity of a nucleic acid molecule or a polypeptide comprising the nucleic acid, preferably the coding region thereof, or polypeptide or the consensus sequence or the polypeptide motif, as depicted in Table I, II or IV, application No. 6, column 5 or 8 in the respective same line as the nucleic acid molecule SEQ ID NO. 59370 or polypeptide SEQ ID NO. 59371, respectively, or a homolog or a fragment thereof, is increased or generated, or if the activity short-chain alcohol dehydrogenase family is increased or generated in a non-human organism, like a microorganism or a plant cell, plant or part thereof, especially with plastidic localization, whereby the respective line discloses in column 7 the fine chemical valine. For example, an increase of the valine of at least 1 percent, particularly in a range of 34 to 73-percent is conferred as compared to a corresponding non-transformed wild type non-human organism.

[41237] Accordingly, in one embodiment, an increase of isoleucine in a non-human organism, as compared to a corresponding non-transformed wild type non-human organism, is conferred in the process of the invention, if the activity of a polypeptide showing the activity of a Sec-independent protein translocase subunit, or if the activity of the polypeptide TTC0019, preferably represented by SEQ ID NO. 12699, or a homolog or fragment thereof, or if the activity of a polypeptide encoded by a nucleic acid molecule comprising the nucleic acid SEQ ID NO. 12698, preferably the coding region thereof, or a homolog or fragment thereof, e.g. derived from Thermus thermophilus, is increased or generated. For example the activity of a nucleic acid molecule or a polypeptide comprising the nucleic acid, preferably the coding region thereof, or polypeptide or the consensus sequence or the polypeptide motif, as depicted in Table I, II or IV, application No. 6, column 5 or 8 in the respective same line as the nucleic acid molecule SEQ ID NO. 12698 or polypeptide SEQ ID NO. 12699, respectively, or a homolog or a fragment thereof, is increased or generated, or if the activity Sec-independent protein translocase subunit is increased or generated in a non-human organism, like a microorganism or a plant cell, plant or part thereof, especially with non-targeted localization, whereby the respective line discloses in column 7 the fine chemical isoleucine. For example, an increase of the isoleucine of at least 1 percent, particularly in a range of 43 to 847-percent is conferred as compared to a corresponding non-transformed wild type non-human organism.

[41238] Accordingly, in one embodiment, an increase of leucine in a non-human organism, as compared to a corresponding non-transformed wild type non-human organism, is conferred in the process of the invention, if the activity of a polypeptide showing the activity of a Sec-independent protein translocase subunit, or if the activity of the polypeptide TTC0019, preferably represented by SEQ ID NO. 12699, or a homolog or fragment thereof, or if the activity of a polypeptide encoded by a nucleic acid molecule comprising the nucleic acid SEQ ID NO. 12698, preferably the coding region thereof, or a homolog or fragment thereof, e.g. derived from Thermus thermophilus, is increased or generated. For example the activity of a nucleic acid molecule or a polypeptide comprising the nucleic acid, preferably the coding region thereof, or polypeptide or the consensus sequence or the polypeptide motif, as depicted in Table I, II or IV, application No. 6, column 5 or 8 in the respective same line as the nucleic acid molecule SEQ ID NO. 12698 or polypeptide SEQ ID NO. 12699, respectively, or a homolog or a fragment thereof, is increased or generated, or if the activity Sec-independent protein translocase subunit is increased or generated in a non-human organism, like a microorganism or a plant cell, plant or part thereof, especially with non-targeted localization, whereby the respective line discloses in column 7 the fine chemical leucine. For example, an increase of the leucine of at least 1 percent, particularly in a range of 60 to 889-percent is conferred as compared to a corresponding non-transformed wild type non-human organism.

[41239] Accordingly, in one embodiment, an increase of valine in a non-human organism, as compared to a corresponding non-transformed wild type non-human organism, is conferred in the process of the invention, if the activity of a polypeptide showing the activity of a Sec-independent protein translocase subunit, or if the activity of the polypeptide TTC0019, preferably represented by SEQ ID NO. 12699, or a homolog or fragment thereof, or if the activity of a polypeptide encoded by a nucleic acid molecule comprising the nucleic acid SEQ ID NO. 12698, preferably the coding region thereof, or a homolog or fragment thereof, e.g. derived from Thermus thermophilus, is increased or generated. For example the activity of a nucleic acid molecule or a polypeptide comprising the nucleic acid, preferably the coding region thereof, or polypeptide or the consensus sequence or the polypeptide motif, as depicted in Table I, II or IV, application No. 6, column 5 or 8 in the respective same line as the nucleic acid molecule SEQ ID NO. 12698 or polypeptide SEQ ID NO. 12699, respectively, or a homolog or a fragment thereof, is increased or generated, or if the activity Sec-independent protein translocase subunit is increased or generated in a non-human organism, like a microorganism or a plant cell, plant or part thereof, especially with non-targeted localization, whereby the respective line discloses in column 7 the fine chemical valine. For example, an increase of the valine of at least 1 percent, particularly in a range of 30 to 402-percent is conferred as compared to a corresponding non-transformed wild type non-human organism.

[41240] Accordingly, in one embodiment, an increase of isoleucine in a non-human organism, as compared to a corresponding non-transformed wild type non-human organism, is conferred in the process of the invention, if the activity of a polypeptide showing the activity of a 2-isopropylmalate synthase, or if the activity of the polypeptide TTC0849, preferably represented by SEQ ID NO. 107557, or a homolog or fragment thereof, or if the activity of a polypeptide encoded by a nucleic acid molecule comprising the nucleic acid SEQ ID NO. 107556, preferably the coding region thereof, or a homolog or fragment thereof, e.g. derived from Thermus thermophilus, is increased or generated. For example the activity of a nucleic acid molecule or a polypeptide comprising the nucleic acid, preferably the coding region thereof, or polypeptide or the consensus sequence or the polypeptide motif, as depicted in Table I, II or IV, application No. 6, column 5 or 8 in the respective same line as the nucleic acid molecule SEQ ID NO. 107556 or polypeptide SEQ ID NO. 107557, respectively, or a homolog or a fragment thereof, is increased or generated, or if the activity 2-isopropylmalate synthase is increased or generated in a non-human organism, like a microorganism or a plant cell, plant or part thereof, especially with non-targeted localization, whereby the respective line discloses in column 7 the fine chemical isoleucine. For example, an increase of the isoleucine of at least 1 percent, particularly in a range of 54 to 92-percent is conferred as compared to a corresponding non-transformed wild type non-human organism.

[41241] Accordingly, in one embodiment, an increase of leucine in a non-human organism, as compared to a corresponding non-transformed wild type non-human organism, is conferred in the process of the invention, if the activity of a polypeptide showing the activity of a 2-isopropylmalate synthase, or if the activity of the polypeptide TTC0849, preferably represented by SEQ ID NO. 107557, or a homolog or fragment thereof, or if the activity of a polypeptide encoded by a nucleic acid molecule comprising the nucleic acid SEQ ID NO. 107556, preferably the coding region thereof, or a homolog or fragment thereof, e.g. derived from Thermus thermophilus, is increased or generated. For example the activity of a nucleic acid molecule or a polypeptide comprising the nucleic acid, preferably the coding region thereof, or polypeptide or the consensus sequence or the polypeptide motif, as depicted in Table I, II or IV, application No. 6, column 5 or 8 in the respective same line as the nucleic acid molecule SEQ ID NO. 107556 or polypeptide SEQ ID NO. 107557, respectively, or a homolog or a fragment thereof, is increased or generated, or if the activity 2-isopropylmalate synthase is increased or generated in a non-human organism, like a microorganism or a plant cell, plant or part thereof, especially with non-targeted localization, whereby the respective line discloses in column 7 the fine chemical leucine. For example, an increase of the leucine of at least 1 percent, particularly in a range of 51 to 112-percent is conferred as compared to a corresponding non-transformed wild type non-human organism.

[41242] Accordingly, in one embodiment, an increase of isoleucine in a non-human organism, as compared to a corresponding non-transformed wild type non-human organism, is conferred in the process of the invention, if the activity of a polypeptide showing the activity of a TTC1386-protein, or if the activity of the polypeptide TTC1386, preferably represented by SEQ ID NO. 62080, or a homolog or fragment thereof, or if the activity of a polypeptide encoded by a nucleic acid molecule comprising the nucleic acid SEQ ID NO. 62079, preferably the coding region thereof, or a homolog or fragment thereof, e.g. derived from Thermus thermophilus, is increased or generated. For example the activity of a nucleic acid molecule or a polypeptide comprising the nucleic acid, preferably the coding region thereof, or polypeptide or the consensus sequence or the polypeptide motif, as depicted in Table I, II or IV, application No. 6, column 5 or 8 in the respective same line as the nucleic acid molecule SEQ ID NO. 62079 or polypeptide SEQ ID NO. 62080, respectively, or a homolog or a fragment thereof, is increased or generated, or if the activity TTC1386-protein is increased or generated in a non-human organism, like a microorganism or a plant cell, plant or part thereof, especially with non-targeted localization, whereby the respective line discloses in column 7 the fine chemical isoleucine. For example, an increase of the isoleucine of at least 1 percent, particularly in a range of 56 to 744-percent is conferred as compared to a corresponding non-transformed wild type non-human organism.

[41243] Accordingly, in one embodiment, an increase of leucine in a non-human organism, as compared to a corresponding non-transformed wild type non-human organism, is conferred in the process of the invention, if the activity of a polypeptide showing the activity of a TTC1386-protein, or if the activity of the polypeptide TTC1386, preferably represented by SEQ ID NO. 62080, or a homolog or fragment thereof, or if the activity of a polypeptide encoded by a nucleic acid molecule comprising the nucleic acid SEQ ID NO. 62079, preferably the coding region thereof, or a homolog or fragment thereof, e.g. derived from Thermus thermophilus, is increased or generated. For example the activity of a nucleic acid molecule or a polypeptide comprising the nucleic acid, preferably the coding region thereof, or polypeptide or the consensus sequence or the polypeptide motif, as depicted in Table I, II or IV, application No. 6, column 5 or 8 in the respective same line as the nucleic acid molecule SEQ ID NO. 62079 or polypeptide SEQ ID NO. 62080, respectively, or a homolog or a fragment thereof, is increased or generated, or if the activity TTC1386-protein is increased or generated in a non-human organism, like a microorganism or a plant cell, plant or part thereof, especially with non-targeted localization, whereby the respective line discloses in column 7 the fine chemical leucine. For example, an increase of the leucine of at least 1 percent, particularly in a range of 76 to 644-percent is conferred as compared to a corresponding non-transformed wild type non-human organism.

[41244] Accordingly, in one embodiment, an increase of valine in a non-human organism, as compared to a corresponding non-transformed wild type non-human organism, is conferred in the process of the invention, if the activity of a polypeptide showing the activity of a TTC1386-protein, or if the activity of the polypeptide TTC1386, preferably represented by SEQ ID NO. 62080, or a homolog or fragment thereof, or if the activity of a polypeptide encoded by a nucleic acid molecule comprising the nucleic acid SEQ ID NO. 62079, preferably the coding region thereof, or a homolog or fragment thereof, e.g. derived from Thermus thermophilus, is increased or generated. For example the activity of a nucleic acid molecule or a polypeptide comprising the nucleic acid, preferably the coding region thereof, or polypeptide or the consensus sequence or the polypeptide motif, as depicted in Table I, II or IV, application No. 6, column 5 or 8 in the respective same line as the nucleic acid molecule SEQ ID NO. 62079 or polypeptide SEQ ID NO. 62080, respectively, or a homolog or a fragment thereof, is increased or generated, or if the activity TTC1386-protein is increased or generated in a non-human organism, like a microorganism or a plant cell, plant or part thereof, especially with non-targeted localization, whereby the respective line discloses in column 7 the fine chemical valine. For example, an increase of the valine of at least 1 percent, particularly in a range of 38 to 334-percent is conferred as compared to a corresponding non-transformed wild type non-human organism.

[41245] Accordingly, in one embodiment, an increase of isoleucine in a non-human organism, as compared to a corresponding non-transformed wild type non-human organism, is conferred in the process of the invention, if the activity of a polypeptide showing the activity of a homocitrate synthase, or if the activity of the polypeptide TTC1550, preferably represented by SEQ ID NO. 12975, or a homolog or fragment thereof, or if the activity of a polypeptide encoded by a nucleic acid molecule comprising the nucleic acid SEQ ID NO. 12974, preferably the coding region thereof, or a homolog or fragment thereof, e.g. derived from Thermus thermophilus, is increased or generated. For example the activity of a nucleic acid molecule or a polypeptide comprising the nucleic acid, preferably the coding region thereof, or polypeptide or the consensus sequence or the polypeptide motif, as depicted in Table I, II or IV, application No. 6, column 5 or 8 in the respective same line as the nucleic acid molecule SEQ ID NO. 12974 or polypeptide SEQ ID NO. 12975, respectively, or a homolog or a fragment thereof, is increased or generated, or if the activity homocitrate synthase is increased or generated in a non-human organism, like a microorganism or a plant cell, plant or part thereof, especially with non-targeted localization, whereby the respective line discloses in column 7 the fine chemical isoleucine. For example, an increase of the isoleucine of at least 1 percent, particularly in a range of 70 to 355-percent is conferred as compared to a corresponding non-transformed wild type non-human organism.

[41246] Accordingly, in one embodiment, an increase of leucine in a non-human organism, as compared to a corresponding non-transformed wild type non-human organism, is conferred in the process of the invention, if the activity of a polypeptide showing the activity of a homocitrate synthase, or if the activity of the polypeptide TTC1550, preferably represented by SEQ ID NO. 12975, or a homolog or fragment thereof, or if the activity of a polypeptide encoded by a nucleic acid molecule comprising the nucleic acid SEQ ID NO. 12974, preferably the coding region thereof, or a homolog or fragment thereof, e.g. derived from Thermus thermophilus, is increased or generated. For example the activity of a nucleic acid molecule or a polypeptide comprising the nucleic acid, preferably the coding region thereof, or polypeptide or the consensus sequence or the polypeptide motif, as depicted in Table I, II or IV, application No. 6, column 5 or 8 in the respective same line as the nucleic acid molecule SEQ ID NO. 12974 or polypeptide SEQ ID NO. 12975, respectively, or a homolog or a fragment thereof, is increased or generated, or if the activity homocitrate synthase is increased or generated in a non-human organism, like a microorganism or a plant cell, plant or part thereof, especially with non-targeted localization, whereby the respective line discloses in column 7 the fine chemical leucine. For example, an increase of the leucine of at least 1 percent, particularly in a range of 66 to 340-percent is conferred as compared to a corresponding non-transformed wild type non-human organism.

[41247] Accordingly, in one embodiment, an increase of valine in a non-human organism, as compared to a corresponding non-transformed wild type non-human organism, is conferred in the process of the invention, if the activity of a polypeptide showing the activity of a homocitrate synthase, or if the activity of the polypeptide TTC1550, preferably represented by SEQ ID NO. 12975, or a homolog or fragment thereof, or if the activity of a polypeptide encoded by a nucleic acid molecule comprising the nucleic acid SEQ ID NO. 12974, preferably the coding region thereof, or a homolog or fragment thereof, e.g. derived from Thermus thermophilus, is increased or generated. For example the activity of a nucleic acid molecule or a polypeptide comprising the nucleic acid, preferably the coding region thereof, or polypeptide or the consensus sequence or the polypeptide motif, as depicted in Table I, II or IV, application No. 6, column 5 or 8 in the respective same line as the nucleic acid molecule SEQ ID NO. 12974 or polypeptide SEQ ID NO. 12975, respectively, or a homolog or a fragment thereof, is increased or generated, or if the activity homocitrate synthase is increased or generated in a non-human organism, like a microorganism or a plant cell, plant or part thereof, especially with non-targeted localization, whereby the respective line discloses in column 7 the fine chemical valine. For example, an increase of the valine of at least 1 percent, particularly in a range of 29 to 129-percent is conferred as compared to a corresponding non-transformed wild type non-human organism.

[41248] Accordingly, in one embodiment, an increase of leucine in a non-human organism, as compared to a corresponding non-transformed wild type non-human organism, is conferred in the process of the invention, if the activity of a polypeptide showing the activity of a YAL013W-protein, or if the activity of the polypeptide Yal013w, preferably represented by SEQ ID NO. 108093, or a homolog or fragment thereof, or if the activity of a polypeptide encoded by a nucleic acid molecule comprising the nucleic acid SEQ ID NO. 108092, preferably the coding region thereof, or a homolog or fragment thereof, e.g. derived from Saccharomyces cerevisiae, is increased or generated. For example the activity of a nucleic acid molecule or a polypeptide comprising the nucleic acid, preferably the coding region thereof, or polypeptide or the consensus sequence or the polypeptide motif, as depicted in Table I, II or IV, application No. 6, column 5 or 8 in the respective same line as the nucleic acid molecule SEQ ID NO. 108092 or polypeptide SEQ ID NO. 108093, respectively, or a homolog or a fragment thereof, is increased or generated, or if the activity YAL013W-protein is increased or generated in a non-human organism, like a microorganism or a plant cell, plant or part thereof, especially with non-targeted localization, whereby the respective line discloses in column 7 the fine chemical leucine. For example, an increase of the leucine of at least 1 percent, particularly in a range of 44 to 144-percent is conferred as compared to a corresponding non-transformed wild type non-human organism.

[41249] Accordingly, in one embodiment, an increase of valine in a non-human organism, as compared to a corresponding non-transformed wild type non-human organism, is conferred in the process of the invention, if the activity of a polypeptide showing the activity of a cell division control protein, or if the activity of the polypeptide Ybr160w, preferably represented by SEQ ID NO. 62718, or a homolog or fragment thereof, or if the activity of a polypeptide encoded by a nucleic acid molecule comprising the nucleic acid SEQ ID NO. 62717, preferably the coding region thereof, or a homolog or fragment thereof, e.g. derived from Saccharomyces cerevisiae, is increased or generated. For example the activity of a nucleic acid molecule or a polypeptide comprising the nucleic acid, preferably the coding region thereof, or polypeptide or the consensus sequence or the polypeptide motif, as depicted in Table I, II or IV, application No. 6, column 5 or 8 in the respective same line as the nucleic acid molecule SEQ ID NO. 62717 or polypeptide SEQ ID NO. 62718, respectively, or a homolog or a fragment thereof, is increased or generated, or if the activity cell division control protein is increased or generated in a non-human organism, like a microorganism or a plant cell, plant or part thereof, especially with non-targeted localization, whereby the respective line discloses in column 7 the fine chemical valine. For example, an increase of the valine of at least 1 percent, particularly in a range of 20 to 55-percent is conferred as compared to a corresponding non-transformed wild type non-human organism.

[41250] Accordingly, in one embodiment, an increase of isoleucine in a non-human organism, as compared to a corresponding non-transformed wild type non-human organism, is conferred in the process of the invention, if the activity of a polypeptide showing the activity of a phosphoglycerate kinase, or if the activity of the polypeptide Ycr012w, preferably represented by SEQ ID NO. 108114, or a homolog or fragment thereof, or if the activity of a polypeptide encoded by a nucleic acid molecule comprising the nucleic acid SEQ ID NO. 108113, preferably the coding region thereof, or a homolog or fragment thereof, e.g. derived from Saccharomyces cerevisiae, is increased or generated. For example the activity of a nucleic acid molecule or a polypeptide comprising the nucleic acid, preferably the coding region thereof, or polypeptide or the consensus sequence or the polypeptide motif, as depicted in Table I, II or IV, application No. 6, column 5 or 8 in the respective same line as the nucleic acid molecule SEQ ID NO. 108113 or polypeptide SEQ ID NO. 108114, respectively, or a homolog or a fragment thereof, is increased or generated, or if the activity phosphoglycerate kinase is increased or generated in a non-human organism, like a microorganism or a plant cell, plant or part thereof, especially with plastidic localization, whereby the respective line discloses in column 7 the fine chemical isoleucine. For example, an increase of the isoleucine of at least 1 percent, particularly in a range of 29 to 218 -percent is conferred as compared to a corresponding non-transformed wild type non-human organism.

[41251] Accordingly, in one embodiment, an increase of leucine in a non-human organism, as compared to a corresponding non-transformed wild type non-human organism, is conferred in the process of the invention, if the activity of a polypeptide showing the activity of a phosphoglycerate kinase, or if the activity of the polypeptide Ycr012w, preferably represented by SEQ ID NO. 108114, or a homolog or fragment thereof, or if the activity of a polypeptide encoded by a nucleic acid molecule comprising the nucleic acid SEQ ID NO. 108113, preferably the coding region thereof, or a homolog or fragment thereof, e.g. derived from Saccharomyces cerevisiae, is increased or generated. For example the activity of a nucleic acid molecule or a polypeptide comprising the nucleic acid, preferably the coding region thereof, or polypeptide or the consensus sequence or the polypeptide motif, as depicted in Table I, II or IV, application No. 6, column 5 or 8 in the respective same line as the nucleic acid molecule SEQ ID NO. 108113 or polypeptide SEQ ID NO. 108114, respectively, or a homolog or a fragment thereof, is increased or generated, or if the activity phosphoglycerate kinase is increased or generated in a non-human organism, like a microorganism or a plant cell, plant or part thereof, especially with plastidic localization, whereby the respective line discloses in column 7 the fine chemical leucine. For example, an increase of the leucine of at least 1 percent, particularly in a range of 33 to 136-percent is conferred as compared to a corresponding non-transformed wild type non-human organism.

[41252] Accordingly, in one embodiment, an increase of isoleucine in a non-human organism, as compared to a corresponding non-transformed wild type non-human organism, is conferred in the process of the invention, if the activity of a polypeptide showing the activity of a branched-chain amino acid permease, or if the activity of the polypeptide Ydr046c, preferably represented by SEQ ID NO. 63545, or a homolog or fragment thereof, or if the activity of a polypeptide encoded by a nucleic acid molecule comprising the nucleic acid SEQ ID NO. 63544, preferably the coding region thereof, or a homolog or fragment thereof, e.g. derived from Saccharomyces cerevisiae, is increased or generated. For example the activity of a nucleic acid molecule or a polypeptide comprising the nucleic acid, preferably the coding region thereof, or polypeptide or the consensus sequence or the polypeptide motif, as depicted in Table I, II or IV, application No. 6, column 5 or 8 in the respective same line as the nucleic acid molecule SEQ ID NO. 63544 or polypeptide SEQ ID NO. 63545, respectively, or a homolog or a fragment thereof, is increased or generated, or if the activity branched-chain amino acid permease is increased or generated in a non-human organism, like a microorganism or a plant cell, plant or part thereof, especially with plastidic localization, whereby the respective line discloses in column 7 the fine chemical isoleucine. For example, an increase of the isoleucine of at least 1 percent, particularly in a range of 50 to 70-percent is conferred as compared to a corresponding non-transformed wild type non-human organism.

[41253] Accordingly, in one embodiment, an increase of valine in a non-human organism, as compared to a corresponding non-transformed wild type non-human organism, is conferred in the process of the invention, if the activity of a polypeptide showing the activity of a branched-chain amino acid permease, or if the activity of the polypeptide Ydr046c, preferably represented by SEQ ID NO. 63545, or a homolog or fragment thereof, or if the activity of a polypeptide encoded by a nucleic acid molecule comprising the nucleic acid SEQ ID NO. 63544, preferably the coding region thereof, or a homolog or fragment thereof, e.g. derived from Saccharomyces cerevisiae, is increased or generated. For example the activity of a nucleic acid molecule or a polypeptide comprising the nucleic acid, preferably the coding region thereof, or polypeptide or the consensus sequence or the polypeptide motif, as depicted in Table I, II or IV, application No. 6, column 5 or 8 in the respective same line as the nucleic acid molecule SEQ ID NO. 63544 or polypeptide SEQ ID NO. 63545, respectively, or a homolog or a fragment thereof, is increased or generated, or if the activity branched-chain amino acid permease is increased or generated in a non-human organism, like a microorganism or a plant cell, plant or part thereof, especially with plastidic localization, whereby the respective line discloses in column 7 the fine chemical valine. For example, an increase of the valine of at least 1 percent, particularly in a range of 21 to 30-percent is conferred as compared to a corresponding non-transformed wild type non-human organism.

[41254] Accordingly, in one embodiment, an increase of valine in a non-human organism, as compared to a corresponding non-transformed wild type non-human organism, is conferred in the process of the invention, if the activity of a polypeptide showing the activity of a ydr183w-protein, or if the activity of the polypeptide Ydr183w, preferably represented by SEQ ID NO. 90104, or a homolog or fragment thereof, or if the activity of a polypeptide encoded by a nucleic acid molecule comprising the nucleic acid SEQ ID NO. 90103, preferably the coding region thereof, or a homolog or fragment thereof, e.g. derived from Saccharomyces cerevisiae, is increased or generated. For example the activity of a nucleic acid molecule or a polypeptide comprising the nucleic acid, preferably the coding region thereof, or polypeptide or the consensus sequence or the polypeptide motif, as depicted in Table I, II or IV, application No. 6, column 5 or 8 in the respective same line as the nucleic acid molecule SEQ ID NO. 90103 or polypeptide SEQ ID NO. 90104, respectively, or a homolog or a fragment thereof, is increased or generated, or if the activity ydr183w-protein is increased or generated in a non-human organism, like a microorganism or a plant cell, plant or part thereof, especially with plastidic localization, whereby the respective line discloses in column 7 the fine chemical valine. For example, an increase of the valine of at least 1 percent, particularly in a range of 30 to 48-percent is conferred as compared to a corresponding non-transformed wild type non-human organism.

[41255] Accordingly, in one embodiment, an increase of isoleucine in a non-human organism, as compared to a corresponding non-transformed wild type non-human organism, is conferred in the process of the invention, if the activity of a polypeptide showing the activity of a hexose transporter, or if the activity of the polypeptide Yel069c, preferably represented by SEQ ID NO. 97299, or a homolog or fragment thereof, or if the activity of a polypeptide encoded by a nucleic acid molecule comprising the nucleic acid SEQ ID NO. 97298, preferably the coding region thereof, or a homolog or fragment thereof, e.g. derived from Saccharomyces cerevisiae, is increased or generated. For example the activity of a nucleic acid molecule or a polypeptide comprising the nucleic acid, preferably the coding region thereof, or polypeptide or the consensus sequence or the polypeptide motif, as depicted in Table I, II or IV, application No. 6, column 5 or 8 in the respective same line as the nucleic acid molecule SEQ ID NO. 97298 or polypeptide SEQ ID NO. 97299, respectively, or a homolog or a fragment thereof, is increased or generated, or if the activity hexose transporter is increased or generated in a non-human organism, like a microorganism or a plant cell, plant or part thereof, especially with plastidic localization, whereby the respective line discloses in column 7 the fine chemical isoleucine. For example, an increase of the isoleucine of at least 1 percent, particularly in a range of 38 to 58-percent is conferred as compared to a corresponding non-transformed wild type non-human organism.

[41256] Accordingly, in one embodiment, an increase of isoleucine in a non-human organism, as compared to a corresponding non-transformed wild type non-human organism, is conferred in the process of the invention, if the activity of a polypeptide showing the activity of a ygl237c-protein, or if the activity of the polypeptide Ygl237c, preferably represented by SEQ ID NO. 64178, or a homolog or fragment thereof, or if the activity of a polypeptide encoded by a nucleic acid molecule comprising the nucleic acid SEQ ID NO. 64177, preferably the coding region thereof, or a homolog or fragment thereof, e.g. derived from Saccharomyces cerevisiae, is increased or generated. For example the activity of a nucleic acid molecule or a polypeptide comprising the nucleic acid, preferably the coding region thereof, or polypeptide or the consensus sequence or the polypeptide motif, as depicted in Table I, II or IV, application No. 6, column 5 or 8 in the respective same line as the nucleic acid molecule SEQ ID NO. 64177 or polypeptide SEQ ID NO. 64178, respectively, or a homolog or a fragment thereof, is increased or generated, or if the activity ygl237c-protein is increased or generated in a non-human organism, like a microorganism or a plant cell, plant or part thereof, especially with non-targeted localization, whereby the respective line discloses in column 7 the fine chemical isoleucine. For example, an increase of the isoleucine of at least 1 percent, particularly in a range of 39 to 294-percent is conferred as compared to a corresponding non-transformed wild type non-human organism.

[41257] Accordingly, in one embodiment, an increase of leucine in a non-human organism, as compared to a corresponding non-transformed wild type non-human organism, is conferred in the process of the invention, if the activity of a polypeptide showing the activity of a ygl237c-protein, or if the activity of the polypeptide Ygl237c, preferably represented by SEQ ID NO. 64178, or a homolog or fragment thereof, or if the activity of a polypeptide encoded by a nucleic acid molecule comprising the nucleic acid SEQ ID NO. 64177, preferably the coding region thereof, or a homolog or fragment thereof, e.g. derived from Saccharomyces cerevisiae, is increased or generated. For example the activity of a nucleic acid molecule or a polypeptide comprising the nucleic acid, preferably the coding region thereof, or polypeptide or the consensus sequence or the polypeptide motif, as depicted in Table I, II or IV, application No. 6, column 5 or 8 in the respective same line as the nucleic acid molecule SEQ ID NO. 64177 or polypeptide SEQ ID NO. 64178, respectively, or a homolog or a fragment thereof, is increased or generated, or if the activity ygl237c-protein is increased or generated in a non-human organism, like a microorganism or a plant cell, plant or part thereof, especially with non-targeted localization, whereby the respective line discloses in column 7 the fine chemical leucine. For example, an increase of the leucine of at least 1 percent, particularly in a range of 80 to 355-percent is conferred as compared to a corresponding non-transformed wild type non-human organism.

[41258] Accordingly, in one embodiment, an increase of leucine in a non-human organism, as compared to a corresponding non-transformed wild type non-human organism, is conferred in the process of the invention, if the activity of a polypeptide showing the activity of a YGR193C-protein, or if the activity of the polypeptide Ygr193c, preferably represented by SEQ ID NO. 108488, or a homolog or fragment thereof, or if the activity of a polypeptide encoded by a nucleic acid molecule comprising the nucleic acid SEQ ID NO. 108487, preferably the coding region thereof, or a homolog or fragment thereof, e.g. derived from Saccharomyces cerevisiae, is increased or generated. For example the activity of a nucleic acid molecule or a polypeptide comprising the nucleic acid, preferably the coding region thereof, or polypeptide or the consensus sequence or the polypeptide motif, as depicted in Table I, II or IV, application No. 6, column 5 or 8 in the respective same line as the nucleic acid molecule SEQ ID NO. 108487 or polypeptide SEQ ID NO. 108488, respectively, or a homolog or a fragment thereof, is increased or generated, or if the activity YGR193C-protein is increased or generated in a non-human organism, like a microorganism or a plant cell, plant or part thereof, especially with non-targeted localization, whereby the respective line discloses in column 7 the fine chemical leucine. For example, an increase of the leucine of at least 1 percent, particularly in a range of 54 to 294-percent is conferred as compared to a corresponding non-transformed wild type non-human organism.

[41259] Accordingly, in one embodiment, an increase of isoleucine in a non-human organism, as compared to a corresponding non-transformed wild type non-human organism, is conferred in the process of the invention, if the activity of a polypeptide showing the activity of a yhr006w-protein, or if the activity of the polypeptide Yhr006w, preferably represented by SEQ ID NO. 90285, or a homolog or fragment thereof, or if the activity of a polypeptide encoded by a nucleic acid molecule comprising the nucleic acid SEQ ID NO. 90284, preferably the coding region thereof, or a homolog or fragment thereof, e.g. derived from Saccharomyces cerevisiae, is increased or generated. For example the activity of a nucleic acid molecule or a polypeptide comprising the nucleic acid, preferably the coding region thereof, or polypeptide or the consensus sequence or the polypeptide motif, as depicted in Table I, II or IV, application No. 6, column 5 or 8 in the respective same line as the nucleic acid molecule SEQ ID NO. 90284 or polypeptide SEQ ID NO. 90285, respectively, or a homolog or a fragment thereof, is increased or generated, or if the activity yhr006w-protein is increased or generated in a non-human organism, like a microorganism or a plant cell, plant or part thereof, especially with non-targeted localization, whereby the respective line discloses in column 7 the fine chemical isoleucine. For example, an increase of the isoleucine of at least 1 percent, particularly in a range of 54 to 114-percent is conferred as compared to a corresponding non-transformed wild type non-human organism.

[41260] Accordingly, in one embodiment, an increase of leucine in a non-human organism, as compared to a corresponding non-transformed wild type non-human organism, is conferred in the process of the invention, if the activity of a polypeptide showing the activity of a yhr006w-protein, or if the activity of the polypeptide Yhr006w, preferably represented by SEQ ID NO. 90285, or a homolog or fragment thereof, or if the activity of a polypeptide encoded by a nucleic acid molecule comprising the nucleic acid SEQ ID NO. 90284, preferably the coding region thereof, or a homolog or fragment thereof, e.g. derived from Saccharomyces cerevisiae, is increased or generated. For example the activity of a nucleic acid molecule or a polypeptide comprising the nucleic acid, preferably the coding region thereof, or polypeptide or the consensus sequence or the polypeptide motif, as depicted in Table I, II or IV, application No. 6, column 5 or 8 in the respective same line as the nucleic acid molecule SEQ ID NO. 90284 or polypeptide SEQ ID NO. 90285, respectively, or a homolog or a fragment thereof, is increased or generated, or if the activity yhr006w-protein is increased or generated in a non-human organism, like a microorganism or a plant cell, plant or part thereof, especially with non-targeted localization, whereby the respective line discloses in column 7 the fine chemical leucine. For example, an increase of the leucine of at least 1 percent, particularly in a range of 71 to 161-percent is conferred as compared to a corresponding non-transformed wild type non-human organism.

[41261] Accordingly, in one embodiment, an increase of isoleucine in a non-human organism, as compared to a corresponding non-transformed wild type non-human organism, is conferred in the process of the invention, if the activity of a polypeptide showing the activity of a H/ACA ribonucleoprotein complex subunit 3, or if the activity of the polypeptide Yhr072w-a, preferably represented by SEQ ID NO. 64471, or a homolog or fragment thereof, or if the activity of a polypeptide encoded by a nucleic acid molecule comprising the nucleic acid SEQ ID NO. 64470, preferably the coding region thereof, or a homolog or fragment thereof, e.g. derived from Saccharomyces cerevisiae, is increased or generated. For example the activity of a nucleic acid molecule or a polypeptide comprising the nucleic acid, preferably the coding region thereof, or polypeptide or the consensus sequence or the polypeptide motif, as depicted in Table I, II or IV, application No. 6, column 5 or 8 in the respective same line as the nucleic acid molecule SEQ ID NO. 64470 or polypeptide SEQ ID NO. 64471, respectively, or a homolog or a fragment thereof, is increased or generated, or if the activity H/ACA ribonucleoprotein complex subunit 3 is increased or generated in a non-human organism, like a microorganism or a plant cell, plant or part thereof, especially with non-targeted localization, whereby the respective line discloses in column 7 the fine chemical isoleucine. For example, an increase of the isoleucine of at least 1 percent, particularly in a range of 24 to 181-percent is conferred as compared to a corresponding non-transformed wild type non-human organism.

[41262] Accordingly, in one embodiment, an increase of leucine in a non-human organism, as compared to a corresponding non-transformed wild type non-human organism, is conferred in the process of the invention, if the activity of a polypeptide showing the activity of a H/ACA ribonucleoprotein complex subunit 3, or if the activity of the polypeptide Yhr072w-a, preferably represented by SEQ ID NO. 64471, or a homolog or fragment thereof, or if the activity of a polypeptide encoded by a nucleic acid molecule comprising the nucleic acid SEQ ID NO. 64470, preferably the coding region thereof, or a homolog or fragment thereof, e.g. derived from Saccharomyces cerevisiae, is increased or generated. For example the activity of a nucleic acid molecule or a polypeptide comprising the nucleic acid, preferably the coding region thereof, or polypeptide or the consensus sequence or the polypeptide motif, as depicted in Table I, II or IV, application No. 6, column 5 or 8 in the respective same line as the nucleic acid molecule SEQ ID NO. 64470 or polypeptide SEQ ID NO. 64471, respectively, or a homolog or a fragment thereof, is increased or generated, or if the activity H/ACA ribonucleoprotein complex subunit 3 is increased or generated in a non-human organism, like a microorganism or a plant cell, plant or part thereof, especially with non-targeted localization, whereby the respective line discloses in column 7 the fine chemical leucine. For example, an increase of the leucine of at least 1 percent, particularly in a range of 40 to 188-percent is conferred as compared to a corresponding non-transformed wild type non-human organism.

[41263] Accordingly, in one embodiment, an increase of isoleucine in a non-human organism, as compared to a corresponding non-transformed wild type non-human organism, is conferred in the process of the invention, if the activity of a polypeptide showing the activity of a glycerol-3-phosphate dehydrogenase, or if the activity of the polypeptide Yi1155c, preferably represented by SEQ ID NO. 108515, or a homolog or fragment thereof, or if the activity of a polypeptide encoded by a nucleic acid molecule comprising the nucleic acid SEQ ID NO. 108514, preferably the coding region thereof, or a homolog or fragment thereof, e.g. derived from Saccharomyces cerevisiae, is increased or generated. For example the activity of a nucleic acid molecule or a polypeptide comprising the nucleic acid, preferably the coding region thereof, or polypeptide or the consensus sequence or the polypeptide motif, as depicted in Table I, II or IV, application No. 6, column 5 or 8 in the respective same line as the nucleic acid molecule SEQ ID NO. 108514 or polypeptide SEQ ID NO. 108515, respectively, or a homolog or a fragment thereof, is increased or generated, or if the activity glycerol-3-phosphate dehydrogenase is increased or generated in a non-human organism, like a microorganism or a plant cell, plant or part thereof, especially with non-targeted localization, whereby the respective line discloses in column 7 the fine chemical isoleucine. For example, an increase of the isoleucine of at least 1 percent, particularly in a range of 22 to 71-percent is conferred as compared to a corresponding non-transformed wild type non-human organism.

[41264] Accordingly, in one embodiment, an increase of leucine in a non-human organism, as compared to a corresponding non-transformed wild type non-human organism, is conferred in the process of the invention, if the activity of a polypeptide showing the activity of a glycerol-3-phosphate dehydrogenase, or if the activity of the polypeptide Yil155c, preferably represented by SEQ ID NO. 108515, or a homolog or fragment thereof, or if the activity of a polypeptide encoded by a nucleic acid molecule comprising the nucleic acid SEQ ID NO. 108514, preferably the coding region thereof, or a homolog or fragment thereof, e.g. derived from Saccharomyces cerevisiae, is increased or generated. For example the activity of a nucleic acid molecule or a polypeptide comprising the nucleic acid, preferably the coding region thereof, or polypeptide or the consensus sequence or the polypeptide motif, as depicted in Table I, II or IV, application No. 6, column 5 or 8 in the respective same line as the nucleic acid molecule SEQ ID NO. 108514 or polypeptide SEQ ID NO. 108515, respectively, or a homolog or a fragment thereof, is increased or generated, or if the activity glycerol-3-phosphate dehydrogenase is increased or generated in a non-human organism, like a microorganism or a plant cell, plant or part thereof, especially with non-targeted localization, whereby the respective line discloses in column 7 the fine chemical leucine. For example, an increase of the leucine of at least 1 percent, particularly in a range of 41 to 106-percent is conferred as compared to a corresponding non-transformed wild type non-human organism.

[41265] Accordingly, in one embodiment, an increase of isoleucine in a non-human organism, as compared to a corresponding non-transformed wild type non-human organism, is conferred in the process of the invention, if the activity of a polypeptide showing the activity of a homoserine dehydrogenase, or if the activity of the polypeptide Yjr139c, preferably represented by SEQ ID NO. 14886, or a homolog or fragment thereof, or if the activity of a polypeptide encoded by a nucleic acid molecule comprising the nucleic acid SEQ ID NO. 14885, preferably the coding region thereof, or a homolog or fragment thereof, e.g. derived from Saccharomyces cerevisiae, is increased or generated. For example the activity of a nucleic acid molecule or a polypeptide comprising the nucleic acid, preferably the coding region thereof, or polypeptide or the consensus sequence or the polypeptide motif, as depicted in Table I, II or IV, application No. 6, column 5 or 8 in the respective same line as the nucleic acid molecule SEQ ID NO. 14885 or polypeptide SEQ ID NO. 14886, respectively, or a homolog or a fragment thereof, is increased or generated, or if the activity homoserine dehydrogenase is increased or generated in a non-human organism, like a microorganism or a plant cell, plant or part thereof, especially with plastidic localization, whereby the respective line discloses in column 7 the fine chemical isoleucine. For example, an increase of the isoleucine of at least 1 percent, particularly in a range of 59 to 86-percent is conferred as compared to a corresponding non-transformed wild type non-human organism.

[41266] Accordingly, in one embodiment, an increase of isoleucine in a non-human organism, as compared to a corresponding non-transformed wild type non-human organism, is conferred in the process of the invention, if the activity of a polypeptide showing the activity of a branched chain aminotransferase, or if the activity of the polypeptide Yjr148w, preferably represented by SEQ ID NO. 90410, or a homolog or fragment thereof, or if the activity of a polypeptide encoded by a nucleic acid molecule comprising the nucleic acid SEQ ID NO. 90409, preferably the coding region thereof, or a homolog or fragment thereof, e.g. derived from Saccharomyces cerevisiae, is increased or generated. For example the activity of a nucleic acid molecule or a polypeptide comprising the nucleic acid, preferably the coding region thereof, or polypeptide or the consensus sequence or the polypeptide motif, as depicted in Table I, II or IV, application No. 6, column 5 or 8 in the respective same line as the nucleic acid molecule SEQ ID NO. 90409 or polypeptide SEQ ID NO. 90410, respectively, or a homolog or a fragment thereof, is increased or generated, or if the activity branched chain aminotransferase is increased or generated in a non-human organism, like a microorganism or a plant cell, plant or part thereof, especially with plastidic localization, whereby the respective line discloses in column 7 the fine chemical isoleucine. For example, an increase of the isoleucine of at least 1 percent, particularly in a range of 109 to 273-percent is conferred as compared to a corresponding non-transformed wild type non-human organism.

[41267] Accordingly, in one embodiment, an increase of valine in a non-human organism, as compared to a corresponding non-transformed wild type non-human organism, is conferred in the process of the invention, if the activity of a polypeptide showing the activity of a branched chain aminotransferase, or if the activity of the polypeptide Yjr148w, preferably represented by SEQ ID NO. 90410, or a homolog or fragment thereof, or if the activity of a polypeptide encoded by a nucleic acid molecule comprising the nucleic acid SEQ ID NO. 90409, preferably the coding region thereof, or a homolog or fragment thereof, e.g. derived from Saccharomyces cerevisiae, is increased or generated. For example the activity of a nucleic acid molecule or a polypeptide comprising the nucleic acid, preferably the coding region thereof, or polypeptide or the consensus sequence or the polypeptide motif, as depicted in Table I, II or IV, application No. 6, column 5 or 8 in the respective same line as the nucleic acid molecule SEQ ID NO. 90409 or polypeptide SEQ ID NO. 90410, respectively, or a homolog or a fragment thereof, is increased or generated, or if the activity branched chain aminotransferase is increased or generated in a non-human organism, like a microorganism or a plant cell, plant or part thereof, especially with plastidic localization, whereby the respective line discloses in column 7 the fine chemical valine. For example, an increase of the valine of at least 1 percent, particularly in a range of 74 to 170-percent is conferred as compared to a corresponding non-transformed wild type non-human organism.

[41268] Accordingly, in one embodiment, an increase of isoleucine in a non-human organism, as compared to a corresponding non-transformed wild type non-human organism, is conferred in the process of the invention, if the activity of a polypeptide showing the activity of a polygalacturonase, or if the activity of the polypeptide Yjr153w, preferably represented by SEQ ID NO. 66275, or a homolog or fragment thereof, or if the activity of a polypeptide encoded by a nucleic acid molecule comprising the nucleic acid SEQ ID NO. 66274, preferably the coding region thereof, or a homolog or fragment thereof, e.g. derived from Saccharomyces cerevisiae, is increased or generated. For example the activity of a nucleic acid molecule or a polypeptide comprising the nucleic acid, preferably the coding region thereof, or polypeptide or the consensus sequence or the polypeptide motif, as depicted in Table I, II or IV, application No. 6, column 5 or 8 in the respective same line as the nucleic acid molecule SEQ ID NO. 66274 or polypeptide SEQ ID NO. 66275, respectively, or a homolog or a fragment thereof, is increased or generated, or if the activity polygalacturonase is increased or generated in a non-human organism, like a microorganism or a plant cell, plant or part thereof, especially with non-targeted localization, whereby the respective line discloses in column 7 the fine chemical isoleucine. For example, an increase of the isoleucine of at least 1 percent, particularly in a range of 66 to 273-percent is conferred as compared to a corresponding non-transformed wild type non-human organism.

[41269] Accordingly, in one embodiment, an increase of leucine in a non-human organism, as compared to a corresponding non-transformed wild type non-human organism, is conferred in the process of the invention, if the activity of a polypeptide showing the activity of a polygalacturonase, or if the activity of the polypeptide Yjr153w, preferably represented by SEQ ID NO. 66275, or a homolog or fragment thereof, or if the activity of a polypeptide encoded by a nucleic acid molecule comprising the nucleic acid SEQ ID NO. 66274, preferably the coding region thereof, or a homolog or fragment thereof, e.g. derived from Saccharomyces cerevisiae, is increased or generated. For example the activity of a nucleic acid molecule or a polypeptide comprising the nucleic acid, preferably the coding region thereof, or polypeptide or the consensus sequence or the polypeptide motif, as depicted in Table I, II or IV, application No. 6, column 5 or 8 in the respective same line as the nucleic acid molecule SEQ ID NO. 66274 or polypeptide SEQ ID NO. 66275, respectively, or a homolog or a fragment thereof, is increased or generated, or if the activity polygalacturonase is increased or generated in a non-human organism, like a microorganism or a plant cell, plant or part thereof, especially with non-targeted localization, whereby the respective line discloses in column 7 the fine chemical leucine. For example, an increase of the leucine of at least 1 percent, particularly in a range of 64 to 364-percent is conferred as compared to a corresponding non-transformed wild type non-human organism.

[41270] Accordingly, in one embodiment, an increase of valine in a non-human organism, as compared to a corresponding non-transformed wild type non-human organism, is conferred in the process of the invention, if the activity of a polypeptide showing the activity of a polygalacturonase, or if the activity of the polypeptide Yjr153w, preferably represented by SEQ ID NO. 66275, or a homolog or fragment thereof, or if the activity of a polypeptide encoded by a nucleic acid molecule comprising the nucleic acid SEQ ID NO. 66274, preferably the coding region thereof, or a homolog or fragment thereof, e.g. derived from Saccharomyces cerevisiae, is increased or generated. For example the activity of a nucleic acid molecule or a polypeptide comprising the nucleic acid, preferably the coding region thereof, or polypeptide or the consensus sequence or the polypeptide motif, as depicted in Table I, II or IV, application No. 6, column 5 or 8 in the respective same line as the nucleic acid molecule SEQ ID NO. 66274 or polypeptide SEQ ID NO. 66275, respectively, or a homolog or a fragment thereof, is increased or generated, or if the activity polygalacturonase is increased or generated in a non-human organism, like a microorganism or a plant cell, plant or part thereof, especially with non-targeted localization, whereby the respective line discloses in column 7 the fine chemical valine. For example, an increase of the valine of at least 1 percent, particularly in a range of 28 to 110-percent is conferred as compared to a corresponding non-transformed wild type non-human organism.

[41271] Accordingly, in one embodiment, an increase of isoleucine in a non-human organism, as compared to a corresponding non-transformed wild type non-human organism, is conferred in the process of the invention, if the activity of a polypeptide showing the activity of a YKL038W-protein, or if the activity of the polypeptide YKL038W, preferably represented by SEQ ID NO. 90603, or a homolog or fragment thereof, or if the activity of a polypeptide encoded by a nucleic acid molecule comprising the nucleic acid SEQ ID NO. 90602, preferably the coding region thereof, or a homolog or fragment thereof, e.g. derived from Saccharomyces cerevisiae, is increased or generated. For example the activity of a nucleic acid molecule or a polypeptide comprising the nucleic acid, preferably the coding region thereof, or polypeptide or the consensus sequence or the polypeptide motif, as depicted in Table I, II or IV, application No. 6, column 5 or 8 in the respective same line as the nucleic acid molecule SEQ ID NO. 90602 or polypeptide SEQ ID NO. 90603, respectively, or a homolog or a fragment thereof, is increased or generated, or if the activity YKL038W-protein is increased or generated in a non-human organism, like a microorganism or a plant cell, plant or part thereof, especially with plastidic localization, whereby the respective line discloses in column 7 the fine chemical isoleucine. For example, an increase of the isoleucine of at least 1 percent, particularly in a range of 51 to 53-percent is conferred as compared to a corresponding non-transformed wild type non-human organism.

[41272] Accordingly, in one embodiment, an increase of leucine in a non-human organism, as compared to a corresponding non-transformed wild type non-human organism, is conferred in the process of the invention, if the activity of a polypeptide showing the activity of a YKL038W-protein, or if the activity of the polypeptide YKL038W, preferably represented by SEQ ID NO. 90603, or a homolog or fragment thereof, or if the activity of a polypeptide encoded by a nucleic acid molecule comprising the nucleic acid SEQ ID NO. 90602, preferably the coding region thereof, or a homolog or fragment thereof, e.g. derived from Saccharomyces cerevisiae, is increased or generated. For example the activity of a nucleic acid molecule or a polypeptide comprising the nucleic acid, preferably the coding region thereof, or polypeptide or the consensus sequence or the polypeptide motif, as depicted in Table I, II or IV, application No. 6, column 5 or 8 in the respective same line as the nucleic acid molecule SEQ ID NO. 90602 or polypeptide SEQ ID NO. 90603, respectively, or a homolog or a fragment thereof, is increased or generated, or if the activity YKL038W-protein is increased or generated in a non-human organism, like a microorganism or a plant cell, plant or part thereof, especially with plastidic localization, whereby the respective line discloses in column 7 the fine chemical leucine. For example, an increase of the leucine of at least 1 percent, particularly in a range of 50 to 59-percent is conferred as compared to a corresponding non-transformed wild type non-human organism.

[41273] Accordingly, in one embodiment, an increase of isoleucine in a non-human organism, as compared to a corresponding non-transformed wild type non-human organism, is conferred in the process of the invention, if the activity of a polypeptide showing the activity of a YLR224W-protein, or if the activity of the polypeptide Ylr224w, preferably represented by SEQ ID NO. 108724, or a homolog or fragment thereof, or if the activity of a polypeptide encoded by a nucleic acid molecule comprising the nucleic acid SEQ ID NO. 108723, preferably the coding region thereof, or a homolog or fragment thereof, e.g. derived from Saccharomyces cerevisiae, is increased or generated. For example the activity of a nucleic acid molecule or a polypeptide comprising the nucleic acid, preferably the coding region thereof, or polypeptide or the consensus sequence or the polypeptide motif, as depicted in Table I, II or IV, application No. 6, column 5 or 8 in the respective same line as the nucleic acid molecule SEQ ID NO. 108723 or polypeptide SEQ ID NO. 108724, respectively, or a homolog or a fragment thereof, is increased or generated, or if the activity YLR224W-protein is increased or generated in a non-human organism, like a microorganism or a plant cell, plant or part thereof, especially with non-targeted localization, whereby the respective line discloses in column 7 the fine chemical isoleucine. For example, an increase of the isoleucine of at least 1 percent, particularly in a range of 25 to 50-percent is conferred as compared to a corresponding non-transformed wild type non-human organism.

[41274] Accordingly, in one embodiment, an increase of isoleucine in a non-human organism, as compared to a corresponding non-transformed wild type non-human organism, is conferred in the process of the invention, if the activity of a polypeptide showing the activity of a mitochondrial dicarboxylate transporter, or if the activity of the polypeptide Ylr348c, preferably represented by SEQ ID NO. 98244, or a homolog or fragment thereof, or if the activity of a polypeptide encoded by a nucleic acid molecule comprising the nucleic acid SEQ ID NO. 98243, preferably the coding region thereof, or a homolog or fragment thereof, e.g. derived from Saccharomyces cerevisiae, is increased or generated. For example the activity of a nucleic acid molecule or a polypeptide comprising the nucleic acid, preferably the coding region thereof, or polypeptide or the consensus sequence or the polypeptide motif, as depicted in Table I, II or IV, application No. 6, column 5 or 8 in the respective same line as the nucleic acid molecule SEQ ID NO. 98243 or polypeptide SEQ ID NO. 98244, respectively, or a homolog or a fragment thereof, is increased or generated, or if the activity mitochondrial dicarboxylate transporter is increased or generated in a non-human organism, like a microorganism or a plant cell, plant or part thereof, especially with non-targeted localization, whereby the respective line discloses in column 7 the fine chemical isoleucine. For example, an increase of the isoleucine of at least 1 percent, particularly in a range of 55 to 83-percent is conferred as compared to a corresponding non-transformed wild type non-human organism.

[41275] Accordingly, in one embodiment, an increase of isoleucine in a non-human organism, as compared to a corresponding non-transformed wild type non-human organism, is conferred in the process of the invention, if the activity of a polypeptide showing the activity of a adenylosuccinate lyase, or if the activity of the polypeptide Ylr359w, preferably represented by SEQ ID NO. 67191, or a homolog or fragment thereof, or if the activity of a polypeptide encoded by a nucleic acid molecule comprising the nucleic acid SEQ ID NO. 67190, preferably the coding region thereof, or a homolog or fragment thereof, e.g. derived from Saccharomyces cerevisiae, is increased or generated. For example the activity of a nucleic acid molecule or a polypeptide comprising the nucleic acid, preferably the coding region thereof, or polypeptide or the consensus sequence or the polypeptide motif, as depicted in Table I, II or IV, application No. 6, column 5 or 8 in the respective same line as the nucleic acid molecule SEQ ID NO. 67190 or polypeptide SEQ ID NO. 67191, respectively, or a homolog or a fragment thereof, is increased or generated, or if the activity adenylosuccinate lyase is increased or generated in a non-human organism, like a microorganism or a plant cell, plant or part thereof, especially with plastidic localization, whereby the respective line discloses in column 7 the fine chemical isoleucine. For example, an increase of the isoleucine of at least 1 percent, particularly in a range of 59 to 451-percent is conferred as compared to a corresponding non-transformed wild type non-human organism.

[41276] Accordingly, in one embodiment, an increase of leucine in a non-human organism, as compared to a corresponding non-transformed wild type non-human organism, is conferred in the process of the invention, if the activity of a polypeptide showing the activity of a adenylosuccinate lyase, or if the activity of the polypeptide Ylr359w, preferably represented by SEQ ID NO. 67191, or a homolog or fragment thereof, or if the activity of a polypeptide encoded by a nucleic acid molecule comprising the nucleic acid SEQ ID NO. 67190, preferably the coding region thereof, or a homolog or fragment thereof, e.g. derived from Saccharomyces cerevisiae, is increased or generated. For example the activity of a nucleic acid molecule or a polypeptide comprising the nucleic acid, preferably the coding region thereof, or polypeptide or the consensus sequence or the polypeptide motif, as depicted in Table I, II or IV, application No. 6, column 5 or 8 in the respective same line as the nucleic acid molecule SEQ ID NO. 67190 or polypeptide SEQ ID NO. 67191, respectively, or a homolog or a fragment thereof, is increased or generated, or if the activity adenylosuccinate lyase is increased or generated in a non-human organism, like a microorganism or a plant cell, plant or part thereof, especially with plastidic localization, whereby the respective line discloses in column 7 the fine chemical leucine. For example, an increase of the leucine of at least 1 percent, particularly in a range of 83 to 685-percent is conferred as compared to a corresponding non-transformed wild type non-human organism.

[41277] Accordingly, in one embodiment, an increase of valine in a non-human organism, as compared to a corresponding non-transformed wild type non-human organism, is conferred in the process of the invention, if the activity of a polypeptide showing the activity of a adenylosuccinate lyase, or if the activity of the polypeptide Ylr359w, preferably represented by SEQ ID NO. 67191, or a homolog or fragment thereof, or if the activity of a polypeptide encoded by a nucleic acid molecule comprising the nucleic acid SEQ ID NO. 67190, preferably the coding region thereof, or a homolog or fragment thereof, e.g. derived from Saccharomyces cerevisiae, is increased or generated. For example the activity of a nucleic acid molecule or a polypeptide comprising the nucleic acid, preferably the coding region thereof, or polypeptide or the consensus sequence or the polypeptide motif, as depicted in Table I, II or IV, application No. 6, column 5 or 8 in the respective same line as the nucleic acid molecule SEQ ID NO. 67190 or polypeptide SEQ ID NO. 67191, respectively, or a homolog or a fragment thereof, is increased or generated, or if the activity adenylosuccinate lyase is increased or generated in a non-human organism, like a microorganism or a plant cell, plant or part thereof, especially with plastidic localization, whereby the respective line discloses in column 7 the fine chemical valine. For example, an increase of the valine of at least 1 percent, particularly in a range of 20 to 168-percent is conferred as compared to a corresponding non-transformed wild type non-human organism.

[41278] Accordingly, in one embodiment, an increase of leucine in a non-human organism, as compared to a corresponding non-transformed wild type non-human organism, is conferred in the process of the invention, if the activity of a polypeptide showing the activity of a phosphate transporter, or if the activity of the polypeptide Yml123c, preferably represented by SEQ ID NO. 91786, or a homolog or fragment thereof, or if the activity of a polypeptide encoded by a nucleic acid molecule comprising the nucleic acid SEQ ID NO. 91785, preferably the coding region thereof, or a homolog or fragment thereof, e.g. derived from Saccharomyces cerevisiae, is increased or generated. For example the activity of a nucleic acid molecule or a polypeptide comprising the nucleic acid, preferably the coding region thereof, or polypeptide or the consensus sequence or the polypeptide motif, as depicted in Table I, II or IV, application No. 6, column 5 or 8 in the respective same line as the nucleic acid molecule SEQ ID NO. 91785 or polypeptide SEQ ID NO. 91786, respectively, or a homolog or a fragment thereof, is increased or generated, or if the activity phosphate transporter is increased or generated in a non-human organism, like a microorganism or a plant cell, plant or part thereof, especially with plastidic localization, whereby the respective line discloses in column 7 the fine chemical leucine. For example, an increase of the leucine of at least 1 percent, particularly in a range of 65 to 96-percent is conferred as compared to a corresponding non-transformed wild type non-human organism.

[41279] Accordingly, in one embodiment, an increase of isoleucine in a non-human organism, as compared to a corresponding non-transformed wild type non-human organism, is conferred in the process of the invention, if the activity of a polypeptide showing the activity of a acetyl-CoA acetyltransferase, or if the activity of the polypeptide Ypl028w, preferably represented by SEQ ID NO. 92669, or a homolog or fragment thereof, or if the activity of a polypeptide encoded by a nucleic acid molecule comprising the nucleic acid SEQ ID NO. 92668, preferably the coding region thereof, or a homolog or fragment thereof, e.g. derived from Saccharomyces cerevisiae, is increased or generated. For example the activity of a nucleic acid molecule or a polypeptide comprising the nucleic acid, preferably the coding region thereof, or polypeptide or the consensus sequence or the polypeptide motif, as depicted in Table I, II or IV, application No. 6, column 5 or 8 in the respective same line as the nucleic acid molecule SEQ ID NO. 92668 or polypeptide SEQ ID NO. 92669, respectively, or a homolog or a fragment thereof, is increased or generated, or if the activity acetyl-CoA acetyltransferase is increased or generated in a non-human organism, like a microorganism or a plant cell, plant or part thereof, especially with non-targeted localization, whereby the respective line discloses in column 7 the fine chemical isoleucine. For example, an increase of the isoleucine of at least 1 percent, particularly in a range of 29 to 182-percent is conferred as compared to a corresponding non-transformed wild type non-human organism.

[41280] Accordingly, in one embodiment, an increase of leucine in a non-human organism, as compared to a corresponding non-transformed wild type non-human organism, is conferred in the process of the invention, if the activity of a polypeptide showing the activity of a acetyl-CoA acetyltransferase, or if the activity of the polypeptide Ypl028w, preferably represented by SEQ ID NO. 92669, or a homolog or fragment thereof, or if the activity of a polypeptide encoded by a nucleic acid molecule comprising the nucleic acid SEQ ID NO. 92668, preferably the coding region thereof, or a homolog or fragment thereof, e.g. derived from Saccharomyces cerevisiae, is increased or generated. For example the activity of a nucleic acid molecule or a polypeptide comprising the nucleic acid, preferably the coding region thereof, or polypeptide or the consensus sequence or the polypeptide motif, as depicted in Table I, II or IV, application No. 6, column 5 or 8 in the respective same line as the nucleic acid molecule SEQ ID NO. 92668 or polypeptide SEQ ID NO. 92669, respectively, or a homolog or a fragment thereof, is increased or generated, or if the activity acetyl-CoA acetyltransferase is increased or generated in a non-human organism, like a microorganism or a plant cell, plant or part thereof, especially with non-targeted localization, whereby the respective line discloses in column 7 the fine chemical leucine. For example, an increase of the leucine of at least 1 percent, particularly in a range of 32 to 142-percent is conferred as compared to a corresponding non-transformed wild type non-human organism.

[41281] Accordingly, in one embodiment, an increase of isoleucine in a non-human organism, as compared to a corresponding non-transformed wild type non-human organism, is conferred in the process of the invention, if the activity of a polypeptide showing the activity of a cyclin, or if the activity of the polypeptide Ypr119w, preferably represented by SEQ ID NO. 98446, or a homolog or fragment thereof, or if the activity of a polypeptide encoded by a nucleic acid molecule comprising the nucleic acid SEQ ID NO. 98445, preferably the coding region thereof, or a homolog or fragment thereof, e.g. derived from Saccharomyces cerevisiae, is increased or generated. For example the activity of a nucleic acid molecule or a polypeptide comprising the nucleic acid, preferably the coding region thereof, or polypeptide or the consensus sequence or the polypeptide motif, as depicted in Table I, II or IV, application No. 6, column 5 or 8 in the respective same line as the nucleic acid molecule SEQ ID NO. 98445 or polypeptide SEQ ID NO. 98446, respectively, or a homolog or a fragment thereof, is increased or generated, or if the activity cyclin is increased or generated in a non-human organism, like a microorganism or a plant cell, plant or part thereof, especially with non-targeted localization, whereby the respective line discloses in column 7 the fine chemical isoleucine. For example, an increase of the isoleucine of at least 1 percent, particularly in a range of 33 to 57-percent is conferred as compared to a corresponding non-transformed wild type non-human organism.

[41282] Accordingly, in one embodiment, an increase of isoleucine in a non-human organism, as compared to a corresponding non-transformed wild type non-human organism, is conferred in the process of the invention, if the activity of a polypeptide showing the activity of a Zm_{—}4842_BE510522-protein, or if the activity of the polypeptide Zm_{—}4842_BE510522, preferably represented by SEQ ID NO. 68414, or a homolog or fragment thereof, or if the activity of a polypeptide encoded by a nucleic acid molecule comprising the nucleic acid SEQ ID NO. 68413, preferably the coding region thereof, or a homolog or fragment thereof, e.g. derived from Zea mays, is increased or generated. For example the activity of a nucleic acid molecule or a polypeptide comprising the nucleic acid, preferably the coding region thereof, or polypeptide or the consensus sequence or the polypeptide motif, as depicted in Table I, II or IV, application No. 6, column 5 or 8 in the respective same line as the nucleic acid molecule SEQ ID NO. 68413 or polypeptide SEQ ID NO. 68414, respectively, or a homolog or a fragment thereof, is increased or generated, or if the activity Zm_{—}4842_BE510522-protein is increased or generated in a non-human organism, like a microorganism or a plant cell, plant or part thereof, especially with non-targeted localization, whereby the respective line discloses in column 7 the fine chemical isoleucine. For example, an increase of the isoleucine of at least 1 percent, particularly in a range of 42 to 313-percent is conferred as compared to a corresponding non-transformed wild type non-human organism.

[41283] Accordingly, in one embodiment, an increase of leucine in a non-human organism, as compared to a corresponding non-transformed wild type non-human organism, is conferred in the process of the invention, if the activity of a polypeptide showing the activity of a Zm_{—}4842_BE510522-protein, or if the activity of the polypeptide Zm_{—}4842_BE510522, preferably represented by SEQ ID NO. 68414, or a homolog or fragment thereof, or if the activity of a polypeptide encoded by a nucleic acid molecule comprising the nucleic acid SEQ ID NO. 68413, preferably the coding region thereof, or a homolog or fragment thereof, e.g. derived from Zea mays, is increased or generated. For example the activity of a nucleic acid molecule or a polypeptide comprising the nucleic acid, preferably the coding region thereof, or polypeptide or the consensus sequence or the polypeptide motif, as depicted in Table I, II or IV, application No. 6, column 5 or 8 in the respective same line as the nucleic acid molecule SEQ ID NO. 68413 or polypeptide SEQ ID NO. 68414, respectively, or a homolog or a fragment thereof, is increased or generated, or if the activity Zm_{—}4842_BE510522-protein is increased or generated in a non-human organism, like a microorganism or a plant cell, plant or part thereof, especially with non-targeted localization, whereby the respective line discloses in column 7 the fine chemical leucine. For example, an increase of the leucine of at least 1 percent, particularly in a range of 53 to 336-percent is conferred as compared to a corresponding non-transformed wild type non-human organism.

[41284] Accordingly, in one embodiment, an increase of valine in a non-human organism, as compared to a corresponding non-transformed wild type non-human organism, is conferred in the process of the invention, if the activity of a polypeptide showing the activity of a Zm_{—}4842_BE510522-protein, or if the activity of the polypeptide Zm_{—}4842_BE510522, preferably represented by SEQ ID NO. 68414, or a homolog or fragment thereof, or if the activity of a polypeptide encoded by a nucleic acid molecule comprising the nucleic acid SEQ ID NO. 68413, preferably the coding region thereof, or a homolog or fragment thereof, e.g. derived from Zea mays, is increased or generated. For example the activity of a nucleic acid molecule or a polypeptide comprising the nucleic acid, preferably the coding region thereof, or polypeptide or the consensus sequence or the polypeptide motif, as depicted in Table I, II or IV, application No. 6, column 5 or 8 in the respective same line as the nucleic acid molecule SEQ ID NO. 68413 or polypeptide SEQ ID NO. 68414, respectively, or a homolog or a fragment thereof, is increased or generated, or if the activity Zm_{—}4842_BE510522-protein is increased or generated in a non-human organism, like a microorganism or a plant cell, plant or part thereof, especially with non-targeted localization, whereby the respective line discloses in column 7 the fine chemical valine. For example, an increase of the valine of at least 1 percent, particularly in a range of 29 to 116-percent is conferred as compared to a corresponding non-transformed wild type non-human organism.

[41285] [0096.1.1.6] to [0103.1.1.6] for the disclosure of these paragraphs see [0096.1.1.1] to [0103.1.1.1] above.

[41286] In this paragraph “A” means “Goffeau et al., Science 274 (5287), 546 (1996)”, “B” means “Blattner et al., Science 277 (5331), 1453 (1997)”, “C” means “Nakamura et al., Nucleic Acids Res. 28(1), 72 (2000)”, “D” means “deposition of the sequences to the EMBL/GenBank/DDBJ databases under “Sequencing of the draft genome assembly of Azotobacter vinelandii AvOP”. in June 2005 by Copeland et al.”, “E” means “Henne et al., Nat. Biotechnol. 22 (5), 547 (2004)”, “F” means “Kaul et al., Nature 408 (6814), 796 (2000)”, and “G” means “Matsumoto et al., Nature 436 (7052), 793 (2005)”.

[41287] The nucleic acid sequence of 47266012_SOYBEAN from Glycine max, e.g. as shown in the respective line in column 5 of Table I, application no. 6, is unpublished. And the activity of the gene product thereof is the activity of 47266012-protein.

[41288] Accordingly, in one embodiment, the process of the present invention for producing isoleucine in a non-human organism, like a microorganism or a plant or a part thereof, comprises increasing or generating the activity of a gene product with the activity of a gene product conferring the activity of “47266012-protein”, especially from Glycine max or its functional equivalent or its homolog, e.g. the increase of
[41289] (a) a gene product of a gene comprising the nucleic acid molecule as shown in the respective line in column 5 of Table I (whereby the respective line discloses in column 7 the fine chemical isoleucine), application no. 6, preferably the coding region thereof, or a homolog or a fragment thereof, and being depicted in the same respective line as said 47266012_SOYBEAN, or a functional equivalent or a homolog thereof as shown in column 8 of Table I, application no. 6, preferably the coding region thereof, particularly a homolog or functional equivalent as shown in column 8 of Table I B, application no. 6, and being depicted in the same respective line as said 47266012_SOYBEAN, and preferably the activity is increased non-targeted, or
[41290] (b) a polypeptide comprising a polypeptide, a consensus sequence or at least a polypeptide motif as shown in the respective line in column 5 of Table II or in column 8 of Table IV, application no. 6, respectively, and being depicted in the same respective line as said 47266012_SOYBEAN, or a functional equivalent or a homolog thereof as depicted in column 8 of Table II, application no. 6, preferably a homolog or functional equivalent as depicted in column 8 of Table II B, application no. 6, and being depicted in the same respective line as said 47266012_SOYBEAN, and preferably the activity is increased non-targeted, whereby the respective line discloses in column 7 the fine chemical isoleucine.

[41291] Accordingly, in one embodiment, the molecule which activity is to be increased in the process of the invention is the gene product with an activity as a “47266012-protein”, preferably it is the molecule of section (a) or (b) of this paragraph.

[41292] In particular, it was observed that in plants, especially in Arabidopsis thaliana, increasing or generating the activity of a gene product non-targeted with the activity of a “47266012-protein”, preferably being encoded by a gene comprising the nucleic acid sequence SEQ ID NO. 15187, preferably the coding region thereof, conferred the production of or the increase in isoleucine compared with the wild type control.

[41293] The nucleic acid sequence of 51340801_CANOLA from Brassica napus, e.g. as shown in the respective line in column 5 of Table I, application no. 6, is unpublished. And the activity of the gene product thereof is the activity of pyruvate kinase.

[41294] Accordingly, in one embodiment, the process of the present invention for producing leucine in a non-human organism, like a microorganism or a plant or a part thereof, comprises increasing or generating the activity of a gene product with the activity of a gene product conferring the activity of “pyruvate kinase”, especially from Brassica napus or its functional equivalent or its homolog, e.g. the increase of
[41295] (a) a gene product of a gene comprising the nucleic acid molecule as shown in the respective line in column 5 of Table I (whereby the respective line discloses in column 7 the fine chemical leucine), application no. 6, preferably the coding region thereof, or a homolog or a fragment thereof, and being depicted in the same respective line as said 51340801_CANOLA, or a functional equivalent or a homolog thereof as shown in column 8 of Table I, application no. 6, preferably the coding region thereof, particularly a homolog or functional equivalent as shown in column 8 of Table I B, application no. 6, and being depicted in the same respective line as said 51340801_CANOLA, and preferably the activity is increased plastidic, or
[41296] (b) a polypeptide comprising a polypeptide, a consensus sequence or at least a polypeptide motif as shown in the respective line in column 5 of Table II or in column 8 of Table IV, application no. 6, respectively, and being depicted in the same respective line as said 51340801_CANOLA, or a functional equivalent or a homolog thereof as depicted in column 8 of Table II, application no. 6, preferably a homolog or functional equivalent as depicted in column 8 of Table II B, application no. 6, and being depicted in the same respective line as said 51340801_CANOLA, and preferably the activity is increased plastidic, whereby the respective line discloses in column 7 the fine chemical leucine.

[41297] Accordingly, in one embodiment, the molecule which activity is to be increased in the process of the invention is the gene product with an activity as a “pyruvate kinase”, preferably it is the molecule of section (a) or (b) of this paragraph.

[41298] In particular, it was observed that in plants, especially in Arabidopsis thaliana, increasing or generating the activity of a gene product plastidic with the activity of a “pyruvate kinase”, preferably being encoded by a gene comprising the nucleic acid sequence SEQ ID NO. 15532, preferably the coding region thereof, conferred the production of or the increase in leucine compared with the wild type control.

[41299] The nucleic acid sequence of 51340801_CANOLA from Brassica napus, e.g. as shown in the respective line in column 5 of Table I, application no. 6, is unpublished. And the activity of the gene product thereof is the activity of pyruvate kinase.

[41300] Accordingly, in one embodiment, the process of the present invention for producing valine in a non-human organism, like a microorganism or a plant or a part thereof, comprises increasing or generating the activity of a gene product with the activity of a gene product conferring the activity of “pyruvate kinase”, especially from Brassica napus or its functional equivalent or its homolog, e.g. the increase of
[41301] (a) a gene product of a gene comprising the nucleic acid molecule as shown in the respective line in column 5 of Table I (whereby the respective line discloses in column 7 the fine chemical valine), application no. 6, preferably the coding region thereof, or a homolog or a fragment thereof, and being depicted in the same respective line as said 51340801_CANOLA, or a functional equivalent or a homolog thereof as shown in column 8 of Table I, application no. 6, preferably the coding region thereof, particularly a homolog or functional equivalent as shown in column 8 of Table I B, application no. 6, and being depicted in the same respective line as said 51340801_CANOLA, and preferably the activity is increased plastidic, or
[41302] (b) a polypeptide comprising a polypeptide, a consensus sequence or at least a polypeptide motif as shown in the respective line in column 5 of Table II or in column 8 of Table IV, application no. 6, respectively, and being depicted in the same respective line as said 51340801_CANOLA, or a functional equivalent or a homolog thereof as depicted in column 8 of Table II, application no. 6, preferably a homolog or functional equivalent as depicted in column 8 of Table II B, application no. 6, and being depicted in the same respective line as said 51340801_CANOLA, and preferably the activity is increased plastidic, whereby the respective line discloses in column 7 the fine chemical valine.

[41303] Accordingly, in one embodiment, the molecule which activity is to be increased in the process of the invention is the gene product with an activity as a “pyruvate kinase”, preferably it is the molecule of section (a) or (b) of this paragraph.

[41304] In particular, it was observed that in plants, especially in Arabidopsis thaliana, increasing or generating the activity of a gene product plastidic with the activity of a “pyruvate kinase”, preferably being encoded by a gene comprising the nucleic acid sequence SEQ ID NO. 15532, preferably the coding region thereof, conferred the production of or the increase in valine compared with the wild type control.

[41305] The nucleic acid sequence of 59554615_SOYBEAN from Glycine max, e.g. as shown in the respective line in column 5 of Table I, application no. 6, is unpublished. And the activity of the gene product thereof is the activity of pyruvate kinase.

[41306] Accordingly, in one embodiment, the process of the present invention for producing valine in a non-human organism, like a microorganism or a plant or a part thereof, comprises increasing or generating the activity of a gene product with the activity of a gene product conferring the activity of “pyruvate kinase”, especially from Glycine max or its functional equivalent or its homolog, e.g. the increase of
[41307] (a) a gene product of a gene comprising the nucleic acid molecule as shown in the respective line in column 5 of Table I (whereby the respective line discloses in column 7 the fine chemical valine), application no. 6, preferably the coding region thereof, or a homolog or a fragment thereof, and being depicted in the same respective line as said 59554615_SOYBEAN, or a functional equivalent or a homolog thereof as shown in column 8 of Table I, application no. 6, preferably the coding region thereof, particularly a homolog or functional equivalent as shown in column 8 of Table I B, application no. 6, and being depicted in the same respective line as said 59554615_SOYBEAN, and preferably the activity is increased plastidic, or
[41308] (b) a polypeptide comprising a polypeptide, a consensus sequence or at least a polypeptide motif as shown in the respective line in column 5 of Table II or in column 8 of Table IV, application no. 6, respectively, and being depicted in the same respective line as said 59554615_SOYBEAN, or a functional equivalent or a homolog thereof as depicted in column 8 of Table II, application no. 6, preferably a homolog or functional equivalent as depicted in column 8 of Table II B, application no. 6, and being depicted in the same respective line as said 59554615_SOYBEAN, and preferably the activity is increased plastidic, whereby the respective line discloses in column 7 the fine chemical valine.

[41309] Accordingly, in one embodiment, the molecule which activity is to be increased in the process of the invention is the gene product with an activity as a “pyruvate kinase”, preferably it is the molecule of section (a) or (b) of this paragraph.

[41310] In particular, it was observed that in plants, especially in Arabidopsis thaliana, increasing or generating the activity of a gene product plastidic with the activity of a “pyruvate kinase”, preferably being encoded by a gene comprising the nucleic acid sequence SEQ ID NO. 16263, preferably the coding region thereof, conferred the production of or the increase in valine compared with the wild type control.

[41311] The nucleic acid sequence of 59582753_SOYBEAN from Glycine max, e.g. as shown in the respective line in column 5 of Table I, application no. 6, is unpublished. And the activity of the gene product thereof is the activity of glucose-6-phosphate 1-dehydrogenase.

[41312] Accordingly, in one embodiment, the process of the present invention for producing isoleucine in a non-human organism, like a microorganism or a plant or a part thereof, comprises increasing or generating the activity of a gene product with the activity of a gene product conferring the activity of “glucose-6-phosphate 1-dehydrogenase”, especially from Glycine max or its functional equivalent or its homolog, e.g. the increase of
[41313] (a) a gene product of a gene comprising the nucleic acid molecule as shown in the respective line in column 5 of Table I (whereby the respective line discloses in column 7 the fine chemical isoleucine), application no. 6, preferably the coding region thereof, or a homolog or a fragment thereof, and being depicted in the same respective line as said 59582753_SOYBEAN, or a functional equivalent or a homolog thereof as shown in column 8 of Table I, application no. 6, preferably the coding region thereof, particularly a homolog or functional equivalent as shown in column 8 of Table I B, application no. 6, and being depicted in the same respective line as said 59582753_SOYBEAN, and preferably the activity is increased plastidic, or
[41314] (b) a polypeptide comprising a polypeptide, a consensus sequence or at least a polypeptide motif as shown in the respective line in column 5 of Table II or in column 8 of Table IV, application no. 6, respectively, and being depicted in the same respective line as said 59582753_SOYBEAN, or a functional equivalent or a homolog thereof as depicted in column 8 of Table II, application no. 6, preferably a homolog or functional equivalent as depicted in column 8 of Table II B, application no. 6, and being depicted in the same respective line as said 59582753_SOYBEAN, and preferably the activity is increased plastidic, whereby the respective line discloses in column 7 the fine chemical isoleucine.

[41315] Accordingly, in one embodiment, the molecule which activity is to be increased in the process of the invention is the gene product with an activity as a “glucose-6-phosphate 1-dehydrogenase”, preferably it is the molecule of section (a) or (b) of this paragraph.

[41316] In particular, it was observed that in plants, especially in Arabidopsis thaliana, increasing or generating the activity of a gene product plastidic with the activity of a “glucose-6-phosphate 1-dehydrogenase”, preferably being encoded by a gene comprising the nucleic acid sequence SEQ ID NO. 16883, preferably the coding region thereof, conferred the production of or the increase in isoleucine compared with the wild type control.

[41317] The nucleic acid sequence of 59582753_SOYBEAN from Glycine max, e.g. as shown in the respective line in column 5 of Table I, application no. 6, is unpublished. And the activity of the gene product thereof is the activity of glucose-6-phosphate 1-dehydrogenase.

[41318] Accordingly, in one embodiment, the process of the present invention for producing leucine in a non-human organism, like a microorganism or a plant or a part thereof, comprises increasing or generating the activity of a gene product with the activity of a gene product conferring the activity of “glucose-6-phosphate 1-dehydrogenase”, especially from Glycine max or its functional equivalent or its homolog, e.g. the increase of
[41319] (a) a gene product of a gene comprising the nucleic acid molecule as shown in the respective line in column 5 of Table I (whereby the respective line discloses in column 7 the fine chemical leucine), application no. 6, preferably the coding region thereof, or a homolog or a fragment thereof, and being depicted in the same respective line as said 59582753_SOYBEAN, or a functional equivalent or a homolog thereof as shown in column 8 of Table I, application no. 6, preferably the coding region thereof, particularly a homolog or functional equivalent as shown in column 8 of Table I B, application no. 6, and being depicted in the same respective line as said 59582753_SOYBEAN, and preferably the activity is increased plastidic, or
[41320] (b) a polypeptide comprising a polypeptide, a consensus sequence or at least a polypeptide motif as shown in the respective line in column 5 of Table II or in column 8 of Table IV, application no. 6, respectively, and being depicted in the same respective line as said 59582753_SOYBEAN, or a functional equivalent or a homolog thereof as depicted in column 8 of Table II, application no. 6, preferably a homolog or functional equivalent as depicted in column 8 of Table II B, application no. 6, and being depicted in the same respective line as said 59582753_SOYBEAN, and preferably the activity is increased plastidic, whereby the respective line discloses in column 7 the fine chemical leucine.

[41321] Accordingly, in one embodiment, the molecule which activity is to be increased in the process of the invention is the gene product with an activity as a “glucose-6-phosphate 1-dehydrogenase”, preferably it is the molecule of section (a) or (b) of this paragraph.

[41322] In particular, it was observed that in plants, especially in Arabidopsis thaliana, increasing or generating the activity of a gene product plastidic with the activity of a “glucose-6-phosphate 1-dehydrogenase”, preferably being encoded by a gene comprising the nucleic acid sequence SEQ ID NO. 16883, preferably the coding region thereof, conferred the production of or the increase in leucine compared with the wild type control.

[41323] The nucleic acid sequence of 59582753_SOYBEAN from Glycine max, e.g. as shown in the respective line in column 5 of Table I, application no. 6, is unpublished. And the activity of the gene product thereof is the activity of glucose-6-phosphate 1-dehydrogenase.

[41324] Accordingly, in one embodiment, the process of the present invention for producing valine in a non-human organism, like a microorganism or a plant or a part thereof, comprises increasing or generating the activity of a gene product with the activity of a gene product conferring the activity of “glucose-6-phosphate 1-dehydrogenase”, especially from Glycine max or its functional equivalent or its homolog, e.g. the increase of
[41325] (a) a gene product of a gene comprising the nucleic acid molecule as shown in the respective line in column 5 of Table I (whereby the respective line discloses in column 7 the fine chemical valine), application no. 6, preferably the coding region thereof, or a homolog or a fragment thereof, and being depicted in the same respective line as said 59582753_SOYBEAN, or a functional equivalent or a homolog thereof as shown in column 8 of Table I, application no. 6, preferably the coding region thereof, particularly a homolog or functional equivalent as shown in column 8 of Table I B, application no. 6, and being depicted in the same respective line as said 59582753_SOYBEAN, and preferably the activity is increased plastidic, or
[41326] (b) a polypeptide comprising a polypeptide, a consensus sequence or at least a polypeptide motif as shown in the respective line in column 5 of Table II or in column 8 of Table IV, application no. 6, respectively, and being depicted in the same respective line as said 59582753_SOYBEAN, or a functional equivalent or a homolog thereof as depicted in column 8 of Table II, application no. 6, preferably a homolog or functional equivalent as depicted in column 8 of Table II B, application no. 6, and being depicted in the same respective line as said 59582753_SOYBEAN, and preferably the activity is increased plastidic, whereby the respective line discloses in column 7 the fine chemical valine.

[41327] Accordingly, in one embodiment, the molecule which activity is to be increased in the process of the invention is the gene product with an activity as a “glucose-6-phosphate 1-dehydrogenase”, preferably it is the molecule of section (a) or (b) of this paragraph.

[41328] In particular, it was observed that in plants, especially in Arabidopsis thaliana, increasing or generating the activity of a gene product plastidic with the activity of a “glucose-6-phosphate 1-dehydrogenase”, preferably being encoded by a gene comprising the nucleic acid sequence SEQ ID NO. 16883, preferably the coding region thereof, conferred the production of or the increase in valine compared with the wild type control.

[41329] The nucleic acid sequence of At1g07430 from Arabidopsis thaliana, e.g. as shown in the respective line in column 5 of Table I, application no. 6, has been published in F. And the activity of the gene product thereof is the activity of protein phosphatase.

[41330] Accordingly, in one embodiment, the process of the present invention for producing valine in a non-human organism, like a microorganism or a plant or a part thereof, comprises increasing or generating the activity of a gene product with the activity of a gene product conferring the activity of “protein phosphatase”, especially from Arabidopsis thaliana or its functional equivalent or its homolog, e.g. the increase of
[41331] (a) a gene product of a gene comprising the nucleic acid molecule as shown in the respective line in column 5 of Table I (whereby the respective line discloses in column 7 the fine chemical valine), application no. 6, preferably the coding region thereof, or a homolog or a fragment thereof, and being depicted in the same respective line as said At1g07430, or a functional equivalent or a homolog thereof as shown in column 8 of Table I, application no. 6, preferably the coding region thereof, particularly a homolog or functional equivalent as shown in column 8 of Table I B, application no. 6, and being depicted in the same respective line as said At1g07430, and preferably the activity is increased non-targeted, or
[41332] (b) a polypeptide comprising a polypeptide, a consensus sequence or at least a polypeptide motif as shown in the respective line in column 5 of Table II or in column 8 of Table IV, application no. 6, respectively, and being depicted in the same respective line as said At1g07430, or a functional equivalent or a homolog thereof as depicted in column 8 of Table II, application no. 6, preferably a homolog or functional equivalent as depicted in column 8 of Table II B, application no. 6, and being depicted in the same respective line as said At1g07430, and preferably the activity is increased non-targeted, whereby the respective line discloses in column 7 the fine chemical valine.

[41333] Accordingly, in one embodiment, the molecule which activity is to be increased in the process of the invention is the gene product with an activity as a “protein phosphatase”, preferably it is the molecule of section (a) or (b) of this paragraph.

[41334] In particular, it was observed that in plants, especially in Arabidopsis thaliana, increasing or generating the activity of a gene product non-targeted with the activity of a “protein phosphatase”, preferably being encoded by a gene comprising the nucleic acid sequence SEQ ID NO. 17451, preferably the coding region thereof, conferred the production of or the increase in valine compared with the wild type control.

[41335] The nucleic acid sequence of At1g14490 from Arabidopsis thaliana, e.g. as shown in the respective line in column 5 of Table I, application no. 6, has been published in F. And the activity of the gene product thereof is the activity of DNA-binding protein.

[41336] Accordingly, in one embodiment, the process of the present invention for producing valine in a non-human organism, like a microorganism or a plant or a part thereof, comprises increasing or generating the activity of a gene product with the activity of a gene product conferring the activity of “DNA-binding protein”, especially from Arabidopsis thaliana or its functional equivalent or its homolog, e.g. the increase of
[41337] (a) a gene product of a gene comprising the nucleic acid molecule as shown in the respective line in column 5 of Table I (whereby the respective line discloses in column 7 the fine chemical valine), application no. 6, preferably the coding region thereof, or a homolog or a fragment thereof, and being depicted in the same respective line as said At1g14490, or a functional equivalent or a homolog thereof as shown in column 8 of Table I, application no. 6, preferably the coding region thereof, particularly a homolog or functional equivalent as shown in column 8 of Table I B, application no. 6, and being depicted in the same respective line as said At1g14490, and preferably the activity is increased non-targeted, or
[41338] (b) a polypeptide comprising a polypeptide, a consensus sequence or at least a polypeptide motif as shown in the respective line in column 5 of Table II or in column 8 of Table IV, application no. 6, respectively, and being depicted in the same respective line as said At1g14490, or a functional equivalent or a homolog thereof as depicted in column 8 of Table II, application no. 6, preferably a homolog or functional equivalent as depicted in column 8 of Table II B, application no. 6, and being depicted in the same respective line as said At1g14490, and preferably the activity is increased non-targeted, whereby the respective line discloses in column 7 the fine chemical valine.

[41339] Accordingly, in one embodiment, the molecule which activity is to be increased in the process of the invention is the gene product with an activity as a “DNA-binding protein”, preferably it is the molecule of section (a) or (b) of this paragraph.

[41340] In particular, it was observed that in plants, especially in Arabidopsis thaliana, increasing or generating the activity of a gene product non-targeted with the activity of a “DNA-binding protein”, preferably being encoded by a gene comprising the nucleic acid sequence SEQ ID NO. 385, preferably the coding region thereof, conferred the production of or the increase in valine compared with the wild type control.

[41341] The nucleic acid sequence of At1g19800 from Arabidopsis thaliana, e.g. as shown in the respective line in column 5 of Table I, application no. 6, has been published in F. And the activity of the gene product thereof is the activity of At1g19800-protein.

[41342] Accordingly, in one embodiment, the process of the present invention for producing isoleucine in a non-human organism, like a microorganism or a plant or a part thereof, comprises increasing or generating the activity of a gene product with the activity of a gene product conferring the activity of “At1g19800-protein”, especially from Arabidopsis thaliana or its functional equivalent or its homolog, e.g. the increase of
[41343] (a) a gene product of a gene comprising the nucleic acid molecule as shown in the respective line in column 5 of Table I (whereby the respective line discloses in column 7 the fine chemical isoleucine), application no. 6, preferably the coding region thereof, or a homolog or a fragment thereof, and being depicted in the same respective line as said At1g19800, or a functional equivalent or a homolog thereof as shown in column 8 of Table I, application no. 6, preferably the coding region thereof, particularly a homolog or functional equivalent as shown in column 8 of Table I B, application no. 6, and being depicted in the same respective line as said At1g19800, and preferably the activity is increased non-targeted, or
[41344] (b) a polypeptide comprising a polypeptide, a consensus sequence or at least a polypeptide motif as shown in the respective line in column 5 of Table II or in column 8 of Table IV, application no. 6, respectively, and being depicted in the same respective line as said At1g19800, or a functional equivalent or a homolog thereof as depicted in column 8 of

[41345] Table II, application no. 6, preferably a homolog or functional equivalent as depicted in column 8 of Table II B, application no. 6, and being depicted in the same respective line as said At1g19800, and preferably the activity is increased non-targeted, whereby the respective line discloses in column 7 the fine chemical isoleucine.

[41346] Accordingly, in one embodiment, the molecule which activity is to be increased in the process of the invention is the gene product with an activity as a “At1g19800-protein”, preferably it is the molecule of section (a) or (b) of this paragraph.

[41347] In particular, it was observed that in plants, especially in Arabidopsis thaliana, increasing or generating the activity of a gene product non-targeted with the activity of a “At1g19800-protein”, preferably being encoded by a gene comprising the nucleic acid sequence SEQ ID NO. 17637, preferably the coding region thereof, conferred the production of or the increase in isoleucine compared with the wild type control.

[41348] The nucleic acid sequence of At1g19800 from Arabidopsis thaliana, e.g. as shown in the respective line in column 5 of Table I, application no. 6, has been published in F. And the activity of the gene product thereof is the activity of At1g19800-protein.

[41349] Accordingly, in one embodiment, the process of the present invention for producing leucine in a non-human organism, like a microorganism or a plant or a part thereof, comprises increasing or generating the activity of a gene product with the activity of a gene product conferring the activity of “At1g19800-protein”, especially from Arabidopsis thaliana or its functional equivalent or its homolog, e.g. the increase of
[41350] (a) a gene product of a gene comprising the nucleic acid molecule as shown in the respective line in column 5 of Table I (whereby the respective line discloses in column 7 the fine chemical leucine), application no. 6, preferably the coding region thereof, or a homolog or a fragment thereof, and being depicted in the same respective line as said At1g19800, or a functional equivalent or a homolog thereof as shown in column 8 of Table I, application no. 6, preferably the coding region thereof, particularly a homolog or functional equivalent as shown in column 8 of Table I B, application no. 6, and being depicted in the same respective line as said At1g19800, and preferably the activity is increased non-targeted, or
[41351] (b) a polypeptide comprising a polypeptide, a consensus sequence or at least a polypeptide motif as shown in the respective line in column 5 of Table II or in column 8 of Table IV, application no. 6, respectively, and being depicted in the same respective line as said At1g19800, or a functional equivalent or a homolog thereof as depicted in column 8 of Table II, application no. 6, preferably a homolog or functional equivalent as depicted in column 8 of Table II B, application no. 6, and being depicted in the same respective line as said At1g19800, and preferably the activity is increased non-targeted, whereby the respective line discloses in column 7 the fine chemical leucine.

[41352] Accordingly, in one embodiment, the molecule which activity is to be increased in the process of the invention is the gene product with an activity as a “At1g19800-protein”, preferably it is the molecule of section (a) or (b) of this paragraph.

[41353] In particular, it was observed that in plants, especially in Arabidopsis thaliana, increasing or generating the activity of a gene product non-targeted with the activity of a “At1g19800-protein”, preferably being encoded by a gene comprising the nucleic acid sequence SEQ ID NO. 17637, preferably the coding region thereof, conferred the production of or the increase in leucine compared with the wild type control.

[41354] The nucleic acid sequence of At1g23110 from Arabidopsis thaliana, e.g. as shown in the respective line in column 5 of Table I, application no. 6, has been published in F. And the activity of the gene product thereof is the activity of At1g23110-protein.

[41355] Accordingly, in one embodiment, the process of the present invention for producing valine in a non-human organism, like a microorganism or a plant or a part thereof, comprises increasing or generating the activity of a gene product with the activity of a gene product conferring the activity of “At1g23110-protein”, especially from Arabidopsis thaliana or its functional equivalent or its homolog, e.g. the increase of
[41356] (a) a gene product of a gene comprising the nucleic acid molecule as shown in the respective line in column 5 of Table I (whereby the respective line discloses in column 7 the fine chemical valine), application no. 6, preferably the coding region thereof, or a homolog or a fragment thereof, and being depicted in the same respective line as said At1g23110, or a functional equivalent or a homolog thereof as shown in column 8 of Table I, application no. 6, preferably the coding region thereof, particularly a homolog or functional equivalent as shown in column 8 of Table I B, application no. 6, and being depicted in the same respective line as said At1g23110, and preferably the activity is increased non-targeted, or
[41357] (b) a polypeptide comprising a polypeptide, a consensus sequence or at least a polypeptide motif as shown in the respective line in column 5 of Table II or in column 8 of Table IV, application no. 6, respectively, and being depicted in the same respective line as said At1g23110, or a functional equivalent or a homolog thereof as depicted in column 8 of Table II, application no. 6, preferably a homolog or functional equivalent as depicted in column 8 of Table II B, application no. 6, and being depicted in the same respective line as said At1g23110, and preferably the activity is increased non-targeted, whereby the respective line discloses in column 7 the fine chemical valine.

[41358] Accordingly, in one embodiment, the molecule which activity is to be increased in the process of the invention is the gene product with an activity as a “At1g23110-protein”, preferably it is the molecule of section (a) or (b) of this paragraph.

[41359] In particular, it was observed that in plants, especially in Arabidopsis thaliana, increasing or generating the activity of a gene product non-targeted with the activity of a “At1g23110-protein”, preferably being encoded by a gene comprising the nucleic acid sequence SEQ ID NO. 102086, preferably the coding region thereof, conferred the production of or the increase in valine compared with the wild type control.

[41360] The nucleic acid sequence of At1g26830 from Arabidopsis thaliana, e.g. as shown in the respective line in column 5 of Table I, application no. 6, has been published in F. And the activity of the gene product thereof is the activity of cullin.

[41361] Accordingly, in one embodiment, the process of the present invention for producing isoleucine in a non-human organism, like a microorganism or a plant or a part thereof, comprises increasing or generating the activity of a gene product with the activity of a gene product conferring the activity of “cullin”, especially from Arabidopsis thaliana or its functional equivalent or its homolog, e.g. the increase of
[41362] (a) a gene product of a gene comprising the nucleic acid molecule as shown in the respective line in column 5 of Table I (whereby the respective line discloses in column 7 the fine chemical isoleucine), application no. 6, preferably the coding region thereof, or a homolog or a fragment thereof, and being depicted in the same respective line as said At1g26830, or a functional equivalent or a homolog thereof as shown in column 8 of Table I, application no. 6, preferably the coding region thereof, particularly a homolog or functional equivalent as shown in column 8 of Table I B, application no. 6, and being depicted in the same respective line as said At1g26830, and preferably the activity is increased non-targeted, or
[41363] (b) a polypeptide comprising a polypeptide, a consensus sequence or at least a polypeptide motif as shown in the respective line in column 5 of Table II or in column 8 of Table IV, application no. 6, respectively, and being depicted in the same respective line as said At1g26830,or a functional equivalent or a homolog thereof as depicted in column 8 of Table II, application no. 6, preferably a homolog or functional equivalent as depicted in column 8 of Table II B, application no. 6, and being depicted in the same respective line as said At1g26830, and preferably the activity is increased non-targeted, whereby the respective line discloses in column 7 the fine chemical isoleucine.

[41364] Accordingly, in one embodiment, the molecule which activity is to be increased in the process of the invention is the gene product with an activity as a “cullin”, preferably it is the molecule of section (a) or (b) of this paragraph.

[41365] In particular, it was observed that in plants, especially in Arabidopsis thaliana, increasing or generating the activity of a gene product non-targeted with the activity of a “cullin”, preferably being encoded by a gene comprising the nucleic acid sequence SEQ ID NO. 17701, preferably the coding region thereof, conferred the production of or the increase in isoleucine compared with the wild type control.

[41366] The nucleic acid sequence of At1g26830 from Arabidopsis thaliana, e.g. as shown in the respective line in column 5 of Table I, application no. 6, has been published in F. And the activity of the gene product thereof is the activity of cullin.

[41367] Accordingly, in one embodiment, the process of the present invention for producing leucine in a non-human organism, like a microorganism or a plant or a part thereof, comprises increasing or generating the activity of a gene product with the activity of a gene product conferring the activity of “cullin”, especially from Arabidopsis thaliana or its functional equivalent or its homolog, e.g. the increase of
[41368] (a) a gene product of a gene comprising the nucleic acid molecule as shown in the respective line in column 5 of Table I (whereby the respective line discloses in column 7 the fine chemical leucine), application no. 6, preferably the coding region thereof, or a homolog or a fragment thereof, and being depicted in the same respective line as said At1g26830, or a functional equivalent or a homolog thereof as shown in column 8 of Table I, application no. 6, preferably the coding region thereof, particularly a homolog or functional equivalent as shown in column 8 of Table I B, application no. 6, and being depicted in the same respective line as said At1g26830, and preferably the activity is increased non-targeted, or
[41369] (b) a polypeptide comprising a polypeptide, a consensus sequence or at least a polypeptide motif as shown in the respective line in column 5 of Table II or in column 8 of Table IV, application no. 6, respectively, and being depicted in the same respective line as said At1g26830, or a functional equivalent or a homolog thereof as depicted in column 8 of Table II, application no. 6, preferably a homolog or functional equivalent as depicted in column 8 of Table II B, application no. 6, and being depicted in the same respective line as said At1g26830, and preferably the activity is increased non-targeted, whereby the respective line discloses in column 7 the fine chemical leucine.

[41370] Accordingly, in one embodiment, the molecule which activity is to be increased in the process of the invention is the gene product with an activity as a “cullin”, preferably it is the molecule of section (a) or (b) of this paragraph.

[41371] In particular, it was observed that in plants, especially in Arabidopsis thaliana, increasing or generating the activity of a gene product non-targeted with the activity of a “cullin”, preferably being encoded by a gene comprising the nucleic acid sequence SEQ ID NO. 17701, preferably the coding region thereof, conferred the production of or the increase in leucine compared with the wild type control.

[41372] The nucleic acid sequence of At1g36730 from Arabidopsis thaliana, e.g. as shown in the respective line in column 5 of Table I, application no. 6, has been published in F. And the activity of the gene product thereof is the activity of eukaryotic translation initiation factor 5.

[41373] Accordingly, in one embodiment, the process of the present invention for producing isoleucine in a non-human organism, like a microorganism or a plant or a part thereof, comprises increasing or generating the activity of a gene product with the activity of a gene product conferring the activity of “eukaryotic translation initiation factor 5”, especially from Arabidopsis thaliana or its functional equivalent or its homolog, e.g. the increase of
[41374] (a) a gene product of a gene comprising the nucleic acid molecule as shown in the respective line in column 5 of Table I (whereby the respective line discloses in column 7 the fine chemical isoleucine), application no. 6, preferably the coding region thereof, or a homolog or a fragment thereof, and being depicted in the same respective line as said At1g36730, or a functional equivalent or a homolog thereof as shown in column 8 of Table I, application no. 6, preferably the coding region thereof, particularly a homolog or functional equivalent as shown in column 8 of Table I B, application no. 6, and being depicted in the same respective line as said At1g36730, and preferably the activity is increased non-targeted, or
[41375] (b) a polypeptide comprising a polypeptide, a consensus sequence or at least a polypeptide motif as shown in the respective line in column 5 of Table II or in column 8 of Table IV, application no. 6, respectively, and being depicted in the same respective line as said At1g36730, or a functional equivalent or a homolog thereof as depicted in column 8 of Table II, application no. 6, preferably a homolog or functional equivalent as depicted in column 8 of Table II B, application no. 6, and being depicted in the same respective line as said At1g36730, and preferably the activity is increased non-targeted, whereby the respective line discloses in column 7 the fine chemical isoleucine.

[41376] Accordingly, in one embodiment, the molecule which activity is to be increased in the process of the invention is the gene product with an activity as a “eukaryotic translation initiation factor 5”, preferably it is the molecule of section (a) or (b) of this paragraph.

[41377] In particular, it was observed that in plants, especially in Arabidopsis thaliana, increasing or generating the activity of a gene product non-targeted with the activity of a “eukaryotic translation initiation factor 5”, preferably being encoded by a gene comprising the nucleic acid sequence SEQ ID NO. 17968, preferably the coding region thereof, conferred the production of or the increase in isoleucine compared with the wild type control.

[41378] The nucleic acid sequence of At1g36730 from Arabidopsis thaliana, e.g. as shown in the respective line in column 5 of Table I, application no. 6, has been published in F. And the activity of the gene product thereof is the activity of eukaryotic translation initiation factor 5.

[41379] Accordingly, in one embodiment, the process of the present invention for producing leucine in a non-human organism, like a microorganism or a plant or a part thereof, comprises increasing or generating the activity of a gene product with the activity of a gene product conferring the activity of “eukaryotic translation initiation factor 5”, especially from Arabidopsis thaliana or its functional equivalent or its homolog, e.g. the increase of
[41380] (a) a gene product of a gene comprising the nucleic acid molecule as shown in the respective line in column 5 of Table I (whereby the respective line discloses in column 7 the fine chemical leucine), application no. 6, preferably the coding region thereof, or a homolog or a fragment thereof, and being depicted in the same respective line as said At1g36730, or a functional equivalent or a homolog thereof as shown in column 8 of Table I, application no. 6, preferably the coding region thereof, particularly a homolog or functional equivalent as shown in column 8 of Table I B, application no. 6, and being depicted in the same respective line as said At1g36730, and preferably the activity is increased non-targeted, or
[41381] (b) a polypeptide comprising a polypeptide, a consensus sequence or at least a polypeptide motif as shown in the respective line in column 5 of Table II or in column 8 of Table IV, application no. 6, respectively, and being depicted in the same respective line as said At1g36730, or a functional equivalent or a homolog thereof as depicted in column 8 of Table II, application no. 6, preferably a homolog or functional equivalent as depicted in column 8 of Table II B, application no. 6, and being depicted in the same respective line as said At1g36730, and preferably the activity is increased non-targeted, whereby the respective line discloses in column 7 the fine chemical leucine.

[41382] Accordingly, in one embodiment, the molecule which activity is to be increased in the process of the invention is the gene product with an activity as a “eukaryotic translation initiation factor 5”, preferably it is the molecule of section (a) or (b) of this paragraph.

[41383] In particular, it was observed that in plants, especially in Arabidopsis thaliana, increasing or generating the activity of a gene product non-targeted with the activity of a “eukaryotic translation initiation factor 5”, preferably being encoded by a gene comprising the nucleic acid sequence SEQ ID NO. 17968, preferably the coding region thereof, conferred the production of or the increase in leucine compared with the wild type control.

[41384] The nucleic acid sequence of At1g43850 from Arabidopsis thaliana, e.g. as shown in the respective line in column 5 of Table I, application no. 6, has been published in F. And the activity of the gene product thereof is the activity of transcriptional regulator.

[41385] Accordingly, in one embodiment, the process of the present invention for producing isoleucine in a non-human organism, like a microorganism or a plant or a part thereof, comprises increasing or generating the activity of a gene product with the activity of a gene product conferring the activity of “transcriptional regulator”, especially from Arabidopsis thaliana or its functional equivalent or its homolog, e.g. the increase of
[41386] (a) a gene product of a gene comprising the nucleic acid molecule as shown in the respective line in column 5 of Table I (whereby the respective line discloses in column 7 the fine chemical isoleucine), application no. 6, preferably the coding region thereof, or a homolog or a fragment thereof, and being depicted in the same respective line as said At1g43850, or a functional equivalent or a homolog thereof as shown in column 8 of Table I, application no. 6, preferably the coding region thereof, particularly a homolog or functional equivalent as shown in column 8 of Table I B, application no. 6, and being depicted in the same respective line as said At1g43850, and preferably the activity is increased non-targeted, or
[41387] (b) a polypeptide comprising a polypeptide, a consensus sequence or at least a polypeptide motif as shown in the respective line in column 5 of Table II or in column 8 of Table IV, application no. 6, respectively, and being depicted in the same respective line as said At1g43850, or a functional equivalent or a homolog thereof as depicted in column 8 of Table II, application no. 6, preferably a homolog or functional equivalent as depicted in column 8 of Table II B, application no. 6, and being depicted in the same respective line as said At1g43850, and preferably the activity is increased non-targeted, whereby the respective line discloses in column 7 the fine chemical isoleucine.

[41388] Accordingly, in one embodiment, the molecule which activity is to be increased in the process of the invention is the gene product with an activity as a “transcriptional regulator”, preferably it is the molecule of section (a) or (b) of this paragraph.

[41389] In particular, it was observed that in plants, especially in Arabidopsis thaliana, increasing or generating the activity of a gene product non-targeted with the activity of a “transcriptional regulator”, preferably being encoded by a gene comprising the nucleic acid sequence SEQ ID NO. 18070, preferably the coding region thereof, conferred the production of or the increase in isoleucine compared with the wild type control.

[41390] The nucleic acid sequence of At1g43850 from Arabidopsis thaliana, e.g. as shown in the respective line in column 5 of Table I, application no. 6, has been published in F. And the activity of the gene product thereof is the activity of transcriptional regulator.

[41391] Accordingly, in one embodiment, the process of the present invention for producing leucine in a non-human organism, like a microorganism or a plant or a part thereof, comprises increasing or generating the activity of a gene product with the activity of a gene product conferring the activity of “transcriptional regulator”, especially from Arabidopsis thaliana or its functional equivalent or its homolog, e.g. the increase of
[41392] (a) a gene product of a gene comprising the nucleic acid molecule as shown in the respective line in column 5 of Table I (whereby the respective line discloses in column 7 the fine chemical leucine), application no. 6, preferably the coding region thereof, or a homolog or a fragment thereof, and being depicted in the same respective line as said At1g43850, or a functional equivalent or a homolog thereof as shown in column 8 of Table I, application no. 6, preferably the coding region thereof, particularly a homolog or functional equivalent as shown in column 8 of Table I B, application no. 6, and being depicted in the same respective line as said At1g43850, and preferably the activity is increased non-targeted, or
[41393] (b) a polypeptide comprising a polypeptide, a consensus sequence or at least a polypeptide motif as shown in the respective line in column 5 of Table II or in column 8 of Table IV, application no. 6, respectively, and being depicted in the same respective line as said At1g43850, or a functional equivalent or a homolog thereof as depicted in column 8 of Table II, application no. 6, preferably a homolog or functional equivalent as depicted in column 8 of Table II B, application no. 6, and being depicted in the same respective line as said At1g43850, and preferably the activity is increased non-targeted, whereby the respective line discloses in column 7 the fine chemical leucine.

[41394] Accordingly, in one embodiment, the molecule which activity is to be increased in the process of the invention is the gene product with an activity as a “transcriptional regulator”, preferably it is the molecule of section (a) or (b) of this paragraph.

[41395] In particular, it was observed that in plants, especially in Arabidopsis thaliana, increasing or generating the activity of a gene product non-targeted with the activity of a “transcriptional regulator”, preferably being encoded by a gene comprising the nucleic acid sequence SEQ ID NO. 18070, preferably the coding region thereof, conferred the production of or the increase in leucine compared with the wild type control.

[41396] The nucleic acid sequence of At1g43850 from Arabidopsis thaliana, e.g. as shown in the respective line in column 5 of Table I, application no. 6, has been published in F. And the activity of the gene product thereof is the activity of transcriptional regulator.

[41397] Accordingly, in one embodiment, the process of the present invention for producing valine in a non-human organism, like a microorganism or a plant or a part thereof, comprises increasing or generating the activity of a gene product with the activity of a gene product conferring the activity of “transcriptional regulator”, especially from Arabidopsis thaliana or its functional equivalent or its homolog, e.g. the increase of
[41398] (a) a gene product of a gene comprising the nucleic acid molecule as shown in the respective line in column 5 of Table I (whereby the respective line discloses in column 7 the fine chemical valine), application no. 6, preferably the coding region thereof, or a homolog or a fragment thereof, and being depicted in the same respective line as said At1g43850, or a functional equivalent or a homolog thereof as shown in column 8 of Table I, application no. 6, preferably the coding region thereof, particularly a homolog or functional equivalent as shown in column 8 of Table I B, application no. 6, and being depicted in the same respective line as said At1g43850, and preferably the activity is increased non-targeted, or
[41399] (b) a polypeptide comprising a polypeptide, a consensus sequence or at least a polypeptide motif as shown in the respective line in column 5 of Table II or in column 8 of Table IV, application no. 6, respectively, and being depicted in the same respective line as said At1g43850, or a functional equivalent or a homolog thereof as depicted in column 8 of Table II, application no. 6, preferably a homolog or functional equivalent as depicted in column 8 of Table II B, application no. 6, and being depicted in the same respective line as said At1g43850, and preferably the activity is increased non-targeted, whereby the respective line discloses in column 7 the fine chemical valine.

[41400] Accordingly, in one embodiment, the molecule which activity is to be increased in the process of the invention is the gene product with an activity as a “transcriptional regulator”, preferably it is the molecule of section (a) or (b) of this paragraph.

[41401] In particular, it was observed that in plants, especially in Arabidopsis thaliana, increasing or generating the activity of a gene product non-targeted with the activity of a “transcriptional regulator”, preferably being encoded by a gene comprising the nucleic acid sequence SEQ ID NO. 18070, preferably the coding region thereof, conferred the production of or the increase in valine compared with the wild type control.

[41402] The nucleic acid sequence of At1g47380 from Arabidopsis thaliana, e.g. as shown in the respective line in column 5 of Table I, application no. 6, has been published in F. And the activity of the gene product thereof is the activity of At1g47380-protein.

[41403] Accordingly, in one embodiment, the process of the present invention for producing leucine in a non-human organism, like a microorganism or a plant or a part thereof, comprises increasing or generating the activity of a gene product with the activity of a gene product conferring the activity of “At1g47380-protein”, especially from Arabidopsis thaliana or its functional equivalent or its homolog, e.g. the increase of
[41404] (a) a gene product of a gene comprising the nucleic acid molecule as shown in the respective line in column 5 of Table I (whereby the respective line discloses in column 7 the fine chemical leucine), application no. 6, preferably the coding region thereof, or a homolog or a fragment thereof, and being depicted in the same respective line as said At1g47380, or a functional equivalent or a homolog thereof as shown in column 8 of Table I, application no. 6, preferably the coding region thereof, particularly a homolog or functional equivalent as shown in column 8 of Table I B, application no. 6, and being depicted in the same respective line as said At1g47380, and preferably the activity is increased non-targeted, or
[41405] (b) a polypeptide comprising a polypeptide, a consensus sequence or at least a polypeptide motif as shown in the respective line in column 5 of Table II or in column 8 of Table IV, application no. 6, respectively, and being depicted in the same respective line as said At1g47380, or a functional equivalent or a homolog thereof as depicted in column 8 of Table II, application no. 6, preferably a homolog or functional equivalent as depicted in column 8 of Table II B, application no. 6, and being depicted in the same respective line as said At1g47380, and preferably the activity is increased non-targeted, whereby the respective line discloses in column 7 the fine chemical leucine.

[41406] Accordingly, in one embodiment, the molecule which activity is to be increased in the process of the invention is the gene product with an activity as a “At1g47380-protein”, preferably it is the molecule of section (a) or (b) of this paragraph.

[41407] In particular, it was observed that in plants, especially in Arabidopsis thaliana, increasing or generating the activity of a gene product non-targeted with the activity of a “At1g47380-protein”, preferably being encoded by a gene comprising the nucleic acid sequence SEQ ID NO. 18122, preferably the coding region thereof, conferred the production of or the increase in leucine compared with the wild type control.

[41408] The nucleic acid sequence of At1g47380 from Arabidopsis thaliana, e.g. as shown in the respective line in column 5 of Table I, application no. 6, has been published in F. And the activity of the gene product thereof is the activity of At1g47380-protein.

[41409] Accordingly, in one embodiment, the process of the present invention for producing valine in a non-human organism, like a microorganism or a plant or a part thereof, comprises increasing or generating the activity of a gene product with the activity of a gene product conferring the activity of “At1g47380-protein”, especially from Arabidopsis thaliana or its functional equivalent or its homolog, e.g. the increase of
[41410] (a) a gene product of a gene comprising the nucleic acid molecule as shown in the respective line in column 5 of Table I (whereby the respective line discloses in column 7 the fine chemical valine), application no. 6, preferably the coding region thereof, or a homolog or a fragment thereof, and being depicted in the same respective line as said At1g47380, or a functional equivalent or a homolog thereof as shown in column 8 of Table I, application no. 6, preferably the coding region thereof, particularly a homolog or functional equivalent as shown in column 8 of Table I B, application no. 6, and being depicted in the same respective line as said At1g47380, and preferably the activity is increased non-targeted, or
[41411] (b) a polypeptide comprising a polypeptide, a consensus sequence or at least a polypeptide motif as shown in the respective line in column 5 of Table II or in column 8 of Table IV, application no. 6, respectively, and being depicted in the same respective line as said At1g47380, or a functional equivalent or a homolog thereof as depicted in column 8 of Table II, application no. 6, preferably a homolog or functional equivalent as depicted in column 8 of Table II B, application no. 6, and being depicted in the same respective line as said At1g47380, and preferably the activity is increased non-targeted, whereby the respective line discloses in column 7 the fine chemical valine.

[41412] Accordingly, in one embodiment, the molecule which activity is to be increased in the process of the invention is the gene product with an activity as a “At1g47380-protein”, preferably it is the molecule of section (a) or (b) of this paragraph.

[41413] In particular, it was observed that in plants, especially in Arabidopsis thaliana, increasing or generating the activity of a gene product non-targeted with the activity of a “At1g47380-protein”, preferably being encoded by a gene comprising the nucleic acid sequence SEQ ID NO. 18122, preferably the coding region thereof, conferred the production of or the increase in valine compared with the wild type control.

[41414] The nucleic acid sequence of At1g48260 from Arabidopsis thaliana, e.g. as shown in the respective line in column 5 of Table I, application no. 6, has been published in F. And the activity of the gene product thereof is the activity of protein kinase.

[41415] Accordingly, in one embodiment, the process of the present invention for producing isoleucine in a non-human organism, like a microorganism or a plant or a part thereof, comprises increasing or generating the activity of a gene product with the activity of a gene product conferring the activity of “protein kinase”, especially from Arabidopsis thaliana or its functional equivalent or its homolog, e.g. the increase of
[41416] (a) a gene product of a gene comprising the nucleic acid molecule as shown in the respective line in column 5 of Table I (whereby the respective line discloses in column 7 the fine chemical isoleucine), application no. 6, preferably the coding region thereof, or a homolog or a fragment thereof, and being depicted in the same respective line as said At1g48260, or a functional equivalent or a homolog thereof as shown in column 8 of Table I, application no. 6, preferably the coding region thereof, particularly a homolog or functional equivalent as shown in column 8 of Table I B, application no. 6, and being depicted in the same respective line as said At1g48260, and preferably the activity is increased non-targeted, or
[41417] (b) a polypeptide comprising a polypeptide, a consensus sequence or at least a polypeptide motif as shown in the respective line in column 5 of Table II or in column 8 of Table IV, application no. 6, respectively, and being depicted in the same respective line as said At1g48260, or a functional equivalent or a homolog thereof as depicted in column 8 of Table II, application no. 6, preferably a homolog or functional equivalent as depicted in column 8 of Table II B, application no. 6, and being depicted in the same respective line as said At1g48260, and preferably the activity is increased non-targeted, whereby the respective line discloses in column 7 the fine chemical isoleucine.

[41418] Accordingly, in one embodiment, the molecule which activity is to be increased in the process of the invention is the gene product with an activity as a “protein kinase”, preferably it is the molecule of section (a) or (b) of this paragraph.

[41419] In particular, it was observed that in plants, especially in Arabidopsis thaliana, increasing or generating the activity of a gene product non-targeted with the activity of a “protein kinase”, preferably being encoded by a gene comprising the nucleic acid sequence SEQ ID NO. 18235, preferably the coding region thereof, conferred the production of or the increase in isoleucine compared with the wild type control.

[41420] The nucleic acid sequence of At1g48260 from Arabidopsis thaliana, e.g. as shown in the respective line in column 5 of Table I, application no. 6, has been published in F. And the activity of the gene product thereof is the activity of protein kinase.

[41421] Accordingly, in one embodiment, the process of the present invention for producing leucine in a non-human organism, like a microorganism or a plant or a part thereof, comprises increasing or generating the activity of a gene product with the activity of a gene product conferring the activity of “protein kinase”, especially from Arabidopsis thaliana or its functional equivalent or its homolog, e.g. the increase of
[41422] (a) a gene product of a gene comprising the nucleic acid molecule as shown in the respective line in column 5 of Table I (whereby the respective line discloses in column 7 the fine chemical leucine), application no. 6, preferably the coding region thereof, or a homolog or a fragment thereof, and being depicted in the same respective line as said At1g48260, or a functional equivalent or a homolog thereof as shown in column 8 of Table I, application no. 6, preferably the coding region thereof, particularly a homolog or functional equivalent as shown in column 8 of Table I B, application no. 6, and being depicted in the same respective line as said At1g48260, and preferably the activity is increased non-targeted, or
[41423] (b) a polypeptide comprising a polypeptide, a consensus sequence or at least a polypeptide motif as shown in the respective line in column 5 of Table II or in column 8 of Table IV, application no. 6, respectively, and being depicted in the same respective line as said At1g48260, or a functional equivalent or a homolog thereof as depicted in column 8 of Table II, application no. 6, preferably a homolog or functional equivalent as depicted in column 8 of Table II B, application no. 6, and being depicted in the same respective line as said At1g48260, and preferably the activity is increased non-targeted, whereby the respective line discloses in column 7 the fine chemical leucine.

[41424] Accordingly, in one embodiment, the molecule which activity is to be increased in the process of the invention is the gene product with an activity as a “protein kinase”, preferably it is the molecule of section (a) or (b) of this paragraph.

[41425] In particular, it was observed that in plants, especially in Arabidopsis thaliana, increasing or generating the activity of a gene product non-targeted with the activity of a “protein kinase”, preferably being encoded by a gene comprising the nucleic acid sequence SEQ ID NO. 18235, preferably the coding region thereof, conferred the production of or the increase in leucine compared with the wild type control.

[41426] The nucleic acid sequence of At1g48260 from Arabidopsis thaliana, e.g. as shown in the respective line in column 5 of Table I, application no. 6, has been published in F. And the activity of the gene product thereof is the activity of protein kinase.

[41427] Accordingly, in one embodiment, the process of the present invention for producing valine in a non-human organism, like a microorganism or a plant or a part thereof, comprises increasing or generating the activity of a gene product with the activity of a gene product conferring the activity of “protein kinase”, especially from Arabidopsis thaliana or its functional equivalent or its homolog, e.g. the increase of
[41428] (a) a gene product of a gene comprising the nucleic acid molecule as shown in the respective line in column 5 of Table I (whereby the respective line discloses in column 7 the fine chemical valine), application no. 6, preferably the coding region thereof, or a homolog or a fragment thereof, and being depicted in the same respective line as said At1g48260, or a functional equivalent or a homolog thereof as shown in column 8 of Table I, application no. 6, preferably the coding region thereof, particularly a homolog or functional equivalent as shown in column 8 of Table I B, application no. 6, and being depicted in the same respective line as said At1g48260, and preferably the activity is increased non-targeted, or
[41429] (b) a polypeptide comprising a polypeptide, a consensus sequence or at least a polypeptide motif as shown in the respective line in column 5 of Table II or in column 8 of Table IV, application no. 6, respectively, and being depicted in the same respective line as said At1g48260, or a functional equivalent or a homolog thereof as depicted in column 8 of Table II, application no. 6, preferably a homolog or functional equivalent as depicted in column 8 of Table II B, application no. 6, and being depicted in the same respective line as said At1g48260, and preferably the activity is increased non-targeted, whereby the respective line discloses in column 7 the fine chemical valine.

[41430] Accordingly, in one embodiment, the molecule which activity is to be increased in the process of the invention is the gene product with an activity as a “protein kinase”, preferably it is the molecule of section (a) or (b) of this paragraph.

[41431] In particular, it was observed that in plants, especially in Arabidopsis thaliana, increasing or generating the activity of a gene product non-targeted with the activity of a “protein kinase”, preferably being encoded by a gene comprising the nucleic acid sequence SEQ ID NO. 18235, preferably the coding region thereof, conferred the production of or the increase in valine compared with the wild type control.

[41432] The nucleic acid sequence of At1g61950 from Arabidopsis thaliana, e.g. as shown in the respective line in column 5 of Table I, application no. 6, has been published in F. And the activity of the gene product thereof is the activity of calcium-dependent protein kinase.

[41433] Accordingly, in one embodiment, the process of the present invention for producing isoleucine in a non-human organism, like a microorganism or a plant or a part thereof, comprises increasing or generating the activity of a gene product with the activity of a gene product conferring the activity of “calcium-dependent protein kinase”, especially from Arabidopsis thaliana or its functional equivalent or its homolog, e.g. the increase of
[41434] (a) a gene product of a gene comprising the nucleic acid molecule as shown in the respective line in column 5 of Table I (whereby the respective line discloses in column 7 the fine chemical isoleucine), application no. 6, preferably the coding region thereof, or a homolog or a fragment thereof, and being depicted in the same respective line as said At1g61950, or a functional equivalent or a homolog thereof as shown in column 8 of Table I, application no. 6, preferably the coding region thereof, particularly a homolog or functional equivalent as shown in column 8 of Table I B, application no. 6, and being depicted in the same respective line as said At1g61950, and preferably the activity is increased non-targeted, or
[41435] (b) a polypeptide comprising a polypeptide, a consensus sequence or at least a polypeptide motif as shown in the respective line in column 5 of Table II or in column 8 of Table IV, application no. 6, respectively, and being depicted in the same respective line as said At1g61950, or a functional equivalent or a homolog thereof as depicted in column 8 of Table II, application no. 6, preferably a homolog or functional equivalent as depicted in column 8 of Table II B, application no. 6, and being depicted in the same respective line as said At1g61950, and preferably the activity is increased non-targeted, whereby the respective line discloses in column 7 the fine chemical isoleucine.

[41436] Accordingly, in one embodiment, the molecule which activity is to be increased in the process of the invention is the gene product with an activity as a “calcium-dependent protein kinase”, preferably it is the molecule of section (a) or (b) of this paragraph.

[41437] In particular, it was observed that in plants, especially in Arabidopsis thaliana, increasing or generating the activity of a gene product non-targeted with the activity of a “calcium-dependent protein kinase”, preferably being encoded by a gene comprising the nucleic acid sequence SEQ ID NO. 18869, preferably the coding region thereof, conferred the production of or the increase in isoleucine compared with the wild type control.

[41438] The nucleic acid sequence of At1g61950 from Arabidopsis thaliana, e.g. as shown in the respective line in column 5 of Table I, application no. 6, has been published in F. And the activity of the gene product thereof is the activity of calcium-dependent protein kinase.

[41439] Accordingly, in one embodiment, the process of the present invention for producing leucine in a non-human organism, like a microorganism or a plant or a part thereof, comprises increasing or generating the activity of a gene product with the activity of a gene product conferring the activity of “calcium-dependent protein kinase”, especially from Arabidopsis thaliana or its functional equivalent or its homolog, e.g. the increase of
[41440] (a) a gene product of a gene comprising the nucleic acid molecule as shown in the respective line in column 5 of Table I (whereby the respective line discloses in column 7 the fine chemical leucine), application no. 6, preferably the coding region thereof, or a homolog or a fragment thereof, and being depicted in the same respective line as said At1g61950, or a functional equivalent or a homolog thereof as shown in column 8 of Table I, application no. 6, preferably the coding region thereof, particularly a homolog or functional equivalent as shown in column 8 of Table I B, application no. 6, and being depicted in the same respective line as said At1g61950, and preferably the activity is increased non-targeted, or
[41441] (b) a polypeptide comprising a polypeptide, a consensus sequence or at least a polypeptide motif as shown in the respective line in column 5 of Table II or in column 8 of Table IV, application no. 6, respectively, and being depicted in the same respective line as said At1g61950, or a functional equivalent or a homolog thereof as depicted in column 8 of Table II, application no. 6, preferably a homolog or functional equivalent as depicted in column 8 of Table II B, application no. 6, and being depicted in the same respective line as said At1g61950, and preferably the activity is increased non-targeted, whereby the respective line discloses in column 7 the fine chemical leucine.

[41442] Accordingly, in one embodiment, the molecule which activity is to be increased in the process of the invention is the gene product with an activity as a “calcium-dependent protein kinase”, preferably it is the molecule of section (a) or (b) of this paragraph.

[41443] In particular, it was observed that in plants, especially in Arabidopsis thaliana, increasing or generating the activity of a gene product non-targeted with the activity of a “calcium-dependent protein kinase”, preferably being encoded by a gene comprising the nucleic acid sequence SEQ ID NO. 18869, preferably the coding region thereof, conferred the production of or the increase in leucine compared with the wild type control.

[41444] The nucleic acid sequence of At1g61950 from Arabidopsis thaliana, e.g. as shown in the respective line in column 5 of Table I, application no. 6, has been published in F. And the activity of the gene product thereof is the activity of calcium-dependent protein kinase.

[41445] Accordingly, in one embodiment, the process of the present invention for producing valine in a non-human organism, like a microorganism or a plant or a part thereof, comprises increasing or generating the activity of a gene product with the activity of a gene product conferring the activity of “calcium-dependent protein kinase”, especially from Arabidopsis thaliana or its functional equivalent or its homolog, e.g. the increase of
[41446] (a) a gene product of a gene comprising the nucleic acid molecule as shown in the respective line in column 5 of Table I (whereby the respective line discloses in column 7 the fine chemical valine), application no. 6, preferably the coding region thereof, or a homolog or a fragment thereof, and being depicted in the same respective line as said At1g61950, or a functional equivalent or a homolog thereof as shown in column 8 of Table I, application no. 6, preferably the coding region thereof, particularly a homolog or functional equivalent as shown in column 8 of Table I B, application no. 6, and being depicted in the same respective line as said At1g61950, and preferably the activity is increased non-targeted, or
[41447] (b) a polypeptide comprising a polypeptide, a consensus sequence or at least a polypeptide motif as shown in the respective line in column 5 of Table II or in column 8 of Table IV, application no. 6, respectively, and being depicted in the same respective line as said At1g61950, or a functional equivalent or a homolog thereof as depicted in column 8 of Table II, application no. 6, preferably a homolog or functional equivalent as depicted in column 8 of Table II B, application no. 6, and being depicted in the same respective line as said At1g61950, and preferably the activity is increased non-targeted, whereby the respective line discloses in column 7 the fine chemical valine.

[41448] Accordingly, in one embodiment, the molecule which activity is to be increased in the process of the invention is the gene product with an activity as a “calcium-dependent protein kinase”, preferably it is the molecule of section (a) or (b) of this paragraph.

[41449] In particular, it was observed that in plants, especially in Arabidopsis thaliana, increasing or generating the activity of a gene product non-targeted with the activity of a “calcium-dependent protein kinase”, preferably being encoded by a gene comprising the nucleic acid sequence SEQ ID NO. 18869, preferably the coding region thereof, conferred the production of or the increase in valine compared with the wild type control.

[41450] The nucleic acid sequence of At1g68410 from Arabidopsis thaliana, e.g. as shown in the respective line in column 5 of Table I, application no. 6, has been published in F. And the activity of the gene product thereof is the activity of protein phosphatase.

[41451] Accordingly, in one embodiment, the process of the present invention for producing isoleucine in a non-human organism, like a microorganism or a plant or a part thereof, comprises increasing or generating the activity of a gene product with the activity of a gene product conferring the activity of “protein phosphatase”, especially from Arabidopsis thaliana or its functional equivalent or its homolog, e.g. the increase of
[41452] (a) a gene product of a gene comprising the nucleic acid molecule as shown in the respective line in column 5 of Table I (whereby the respective line discloses in column 7 the fine chemical isoleucine), application no. 6, preferably the coding region thereof, or a homolog or a fragment thereof, and being depicted in the same respective line as said At1g68410, or a functional equivalent or a homolog thereof as shown in column 8 of Table I, application no. 6, preferably the coding region thereof, particularly a homolog or functional equivalent as shown in column 8 of Table I B, application no. 6, and being depicted in the same respective line as said At1g68410, and preferably the activity is increased non-targeted, or
[41453] (b) a polypeptide comprising a polypeptide, a consensus sequence or at least a polypeptide motif as shown in the respective line in column 5 of Table II or in column 8 of Table IV, application no. 6, respectively, and being depicted in the same respective line as said At1g68410, or a functional equivalent or a homolog thereof as depicted in column 8 of Table II, application no. 6, preferably a homolog or functional equivalent as depicted in column 8 of Table II B, application no. 6, and being depicted in the same respective line as said At1g68410, and preferably the activity is increased non-targeted, whereby the respective line discloses in column 7 the fine chemical isoleucine.

[41454] Accordingly, in one embodiment, the molecule which activity is to be increased in the process of the invention is the gene product with an activity as a “protein phosphatase”, preferably it is the molecule of section (a) or (b) of this paragraph.

[41455] In particular, it was observed that in plants, especially in Arabidopsis thaliana, increasing or generating the activity of a gene product non-targeted with the activity of a “protein phosphatase”, preferably being encoded by a gene comprising the nucleic acid sequence SEQ ID NO. 102119, preferably the coding region thereof, conferred the production of or the increase in isoleucine compared with the wild type control.

[41456] The nucleic acid sequence of At1g68410 from Arabidopsis thaliana, e.g. as shown in the respective line in column 5 of Table I, application no. 6, has been published in F. And the activity of the gene product thereof is the activity of protein phosphatase.

[41457] Accordingly, in one embodiment, the process of the present invention for producing leucine in a non-human organism, like a microorganism or a plant or a part thereof, comprises increasing or generating the activity of a gene product with the activity of a gene product conferring the activity of “protein phosphatase”, especially from Arabidopsis thaliana or its functional equivalent or its homolog, e.g. the increase of
[41458] (a) a gene product of a gene comprising the nucleic acid molecule as shown in the respective line in column 5 of Table I (whereby the respective line discloses in column 7 the fine chemical leucine), application no. 6, preferably the coding region thereof, or a homolog or a fragment thereof, and being depicted in the same respective line as said At1g68410, or a functional equivalent or a homolog thereof as shown in column 8 of Table I, application no. 6, preferably the coding region thereof, particularly a homolog or functional equivalent as shown in column 8 of Table I B, application no. 6, and being depicted in the same respective line as said At1g68410, and preferably the activity is increased non-targeted, or
[41459] (b) a polypeptide comprising a polypeptide, a consensus sequence or at least a polypeptide motif as shown in the respective line in column 5 of Table II or in column 8 of Table IV, application no. 6, respectively, and being depicted in the same respective line as said At1g68410, or a functional equivalent or a homolog thereof as depicted in column 8 of Table II, application no. 6, preferably a homolog or functional equivalent as depicted in column 8 of Table II B, application no. 6, and being depicted in the same respective line as said At1g68410, and preferably the activity is increased non-targeted, whereby the respective line discloses in column 7 the fine chemical leucine.

[41460] Accordingly, in one embodiment, the molecule which activity is to be increased in the process of the invention is the gene product with an activity as a “protein phosphatase”, preferably it is the molecule of section (a) or (b) of this paragraph.

[41461] In particular, it was observed that in plants, especially in Arabidopsis thaliana, increasing or generating the activity of a gene product non-targeted with the activity of a “protein phosphatase”, preferably being encoded by a gene comprising the nucleic acid sequence SEQ ID NO. 102119, preferably the coding region thereof, conferred the production of or the increase in leucine compared with the wild type control.

[41462] The nucleic acid sequence of At1g72770 from Arabidopsis thaliana, e.g. as shown in the respective line in column 5 of Table I, application no. 6, has been published in F. And the activity of the gene product thereof is the activity of protein phosphatase.

[41463] Accordingly, in one embodiment, the process of the present invention for producing valine in a non-human organism, like a microorganism or a plant or a part thereof, comprises increasing or generating the activity of a gene product with the activity of a gene product conferring the activity of “protein phosphatase”, especially from Arabidopsis thaliana or its functional equivalent or its homolog, e.g. the increase of
[41464] (a) a gene product of a gene comprising the nucleic acid molecule as shown in the respective line in column 5 of Table I (whereby the respective line discloses in column 7 the fine chemical valine), application no. 6, preferably the coding region thereof, or a homolog or a fragment thereof, and being depicted in the same respective line as said At1g72770, or a functional equivalent or a homolog thereof as shown in column 8 of Table I, application no. 6, preferably the coding region thereof, particularly a homolog or functional equivalent as shown in column 8 of Table I B, application no. 6, and being depicted in the same respective line as said At1g72770, and preferably the activity is increased non-targeted, or
[41465] (b) a polypeptide comprising a polypeptide, a consensus sequence or at least a polypeptide motif as shown in the respective line in column 5 of Table II or in column 8 of Table IV, application no. 6, respectively, and being depicted in the same respective line as said At1g72770, or a functional equivalent or a homolog thereof as depicted in column 8 of Table II, application no. 6, preferably a homolog or functional equivalent as depicted in column 8 of Table II B, application no. 6, and being depicted in the same respective line as said At1g72770, and preferably the activity is increased non-targeted, whereby the respective line discloses in column 7 the fine chemical valine.

[41466] Accordingly, in one embodiment, the molecule which activity is to be increased in the process of the invention is the gene product with an activity as a “protein phosphatase”, preferably it is the molecule of section (a) or (b) of this paragraph.

[41467] In particular, it was observed that in plants, especially in Arabidopsis thaliana, increasing or generating the activity of a gene product non-targeted with the activity of a “protein phosphatase”, preferably being encoded by a gene comprising the nucleic acid sequence SEQ ID NO. 19419, preferably the coding region thereof, conferred the production of or the increase in valine compared with the wild type control.

[41468] The nucleic acid sequence of At2g17560 from Arabidopsis thaliana, e.g. as shown in the respective line in column 5 of Table I, application no. 6, has been published in F. And the activity of the gene product thereof is the activity of transcription factor.

[41469] Accordingly, in one embodiment, the process of the present invention for producing valine in a non-human organism, like a microorganism or a plant or a part thereof, comprises increasing or generating the activity of a gene product with the activity of a gene product conferring the activity of “transcription factor”, especially from Arabidopsis thaliana or its functional equivalent or its homolog, e.g. the increase of
[41470] (a) a gene product of a gene comprising the nucleic acid molecule as shown in the respective line in column 5 of Table I (whereby the respective line discloses in column 7 the fine chemical valine), application no. 6, preferably the coding region thereof, or a homolog or a fragment thereof, and being depicted in the same respective line as said At2g17560, or a functional equivalent or a homolog thereof as shown in column 8 of Table I, application no. 6, preferably the coding region thereof, particularly a homolog or functional equivalent as shown in column 8 of Table I B, application no. 6, and being depicted in the same respective line as said At2g17560, and preferably the activity is increased non-targeted, or
[41471] (b) a polypeptide comprising a polypeptide, a consensus sequence or at least a polypeptide motif as shown in the respective line in column 5 of Table II or in column 8 of Table IV, application no. 6, respectively, and being depicted in the same respective line as said At2g17560, or a functional equivalent or a homolog thereof as depicted in column 8 of Table II, application no. 6, preferably a homolog or functional equivalent as depicted in column 8 of Table II B, application no. 6, and being depicted in the same respective line as said At2g17560, and preferably the activity is increased non-targeted, whereby the respective line discloses in column 7 the fine chemical valine.

[41472] Accordingly, in one embodiment, the molecule which activity is to be increased in the process of the invention is the gene product with an activity as a “transcription factor”, preferably it is the molecule of section (a) or (b) of this paragraph.

[41473] In particular, it was observed that in plants, especially in Arabidopsis thaliana, increasing or generating the activity of a gene product non-targeted with the activity of a “transcription factor”, preferably being encoded by a gene comprising the nucleic acid sequence SEQ ID NO. 19502, preferably the coding region thereof, conferred the production of or the increase in valine compared with the wild type control.

[41474] The nucleic acid sequence of At2g28890 from Arabidopsis thaliana, e.g. as shown in the respective line in column 5 of Table I, application no. 6, has been published in F. And the activity of the gene product thereof is the activity of protein phosphatase.

[41475] Accordingly, in one embodiment, the process of the present invention for producing isoleucine in a non-human organism, like a microorganism or a plant or a part thereof, comprises increasing or generating the activity of a gene product with the activity of a gene product conferring the activity of “protein phosphatase”, especially from Arabidopsis thaliana or its functional equivalent or its homolog, e.g. the increase of
[41476] (a) a gene product of a gene comprising the nucleic acid molecule as shown in the respective line in column 5 of Table I (whereby the respective line discloses in column 7 the fine chemical isoleucine), application no. 6, preferably the coding region thereof, or a homolog or a fragment thereof, and being depicted in the same respective line as said At2g28890, or a functional equivalent or a homolog thereof as shown in column 8 of Table I, application no. 6, preferably the coding region thereof, particularly a homolog or functional equivalent as shown in column 8 of Table I B, application no. 6, and being depicted in the same respective line as said At2g28890, and preferably the activity is increased non-targeted, or
[41477] (b) a polypeptide comprising a polypeptide, a consensus sequence or at least a polypeptide motif as shown in the respective line in column 5 of Table II or in column 8 of Table IV, application no. 6, respectively, and being depicted in the same respective line as said At2g28890, or a functional equivalent or a homolog thereof as depicted in column 8 of Table II, application no. 6, preferably a homolog or functional equivalent as depicted in column 8 of Table II B, application no. 6, and being depicted in the same respective line as said At2g28890, and preferably the activity is increased non-targeted, whereby the respective line discloses in column 7 the fine chemical isoleucine.

[41478] Accordingly, in one embodiment, the molecule which activity is to be increased in the process of the invention is the gene product with an activity as a “protein phosphatase”, preferably it is the molecule of section (a) or (b) of this paragraph.

[41479] In particular, it was observed that in plants, especially in Arabidopsis thaliana, increasing or generating the activity of a gene product non-targeted with the activity of a “protein phosphatase”, preferably being encoded by a gene comprising the nucleic acid sequence SEQ ID NO. 19874, preferably the coding region thereof, conferred the production of or the increase in isoleucine compared with the wild type control.

[41480] The nucleic acid sequence of At2g28890 from Arabidopsis thaliana, e.g. as shown in the respective line in column 5 of Table I, application no. 6, has been published in F. And the activity of the gene product thereof is the activity of protein phosphatase.

[41481] Accordingly, in one embodiment, the process of the present invention for producing valine in a non-human organism, like a microorganism or a plant or a part thereof, comprises increasing or generating the activity of a gene product with the activity of a gene product conferring the activity of “protein phosphatase”, especially from Arabidopsis thaliana or its functional equivalent or its homolog, e.g. the increase of
[41482] (a) a gene product of a gene comprising the nucleic acid molecule as shown in the respective line in column 5 of Table I (whereby the respective line discloses in column 7 the fine chemical valine), application no. 6, preferably the coding region thereof, or a homolog or a fragment thereof, and being depicted in the same respective line as said At2g28890, or a functional equivalent or a homolog thereof as shown in column 8 of Table I, application no. 6, preferably the coding region thereof, particularly a homolog or functional equivalent as shown in column 8 of Table I B, application no. 6, and being depicted in the same respective line as said At2g28890, and preferably the activity is increased non-targeted, or
[41483] (b) a polypeptide comprising a polypeptide, a consensus sequence or at least a polypeptide motif as shown in the respective line in column 5 of Table II or in column 8 of Table IV, application no. 6, respectively, and being depicted in the same respective line as said At2g28890, or a functional equivalent or a homolog thereof as depicted in column 8 of Table II, application no. 6, preferably a homolog or functional equivalent as depicted in column 8 of Table II B, application no. 6, and being depicted in the same respective line as said At2g28890, and preferably the activity is increased non-targeted, whereby the respective line discloses in column 7 the fine chemical valine.

[41484] Accordingly, in one embodiment, the molecule which activity is to be increased in the process of the invention is the gene product with an activity as a “protein phosphatase”, preferably it is the molecule of section (a) or (b) of this paragraph.

[41485] In particular, it was observed that in plants, especially in Arabidopsis thaliana, increasing or generating the activity of a gene product non-targeted with the activity of a “protein phosphatase”, preferably being encoded by a gene comprising the nucleic acid sequence SEQ ID NO. 19874, preferably the coding region thereof, conferred the production of or the increase in valine compared with the wild type control.

[41486] The nucleic acid sequence of At2g30360 from Arabidopsis thaliana, e.g. as shown in the respective line in column 5 of Table I, application no. 6, has been published in F. And the activity of the gene product thereof is the activity of CBL-interacting protein kinase.

[41487] Accordingly, in one embodiment, the process of the present invention for producing isoleucine in a non-human organism, like a microorganism or a plant or a part thereof, comprises increasing or generating the activity of a gene product with the activity of a gene product conferring the activity of “CBL-interacting protein kinase”, especially from Arabidopsis thaliana or its functional equivalent or its homolog, e.g. the increase of
[41488] (a) a gene product of a gene comprising the nucleic acid molecule as shown in the respective line in column 5 of Table I (whereby the respective line discloses in column 7 the fine chemical isoleucine), application no. 6, preferably the coding region thereof, or a homolog or a fragment thereof, and being depicted in the same respective line as said At2g30360, or a functional equivalent or a homolog thereof as shown in column 8 of Table I, application no. 6, preferably the coding region thereof, particularly a homolog or functional equivalent as shown in column 8 of Table I B, application no. 6, and being depicted in the same respective line as said At2g30360, and preferably the activity is increased non-targeted, or
[41489] (b) a polypeptide comprising a polypeptide, a consensus sequence or at least a polypeptide motif as shown in the respective line in column 5 of Table II or in column 8 of Table IV, application no. 6, respectively, and being depicted in the same respective line as said At2g30360, or a functional equivalent or a homolog thereof as depicted in column 8 of Table II, application no. 6, preferably a homolog or functional equivalent as depicted in column 8 of Table II B, application no. 6, and being depicted in the same respective line as said At2g30360, and preferably the activity is increased non-targeted, whereby the respective line discloses in column 7 the fine chemical isoleucine.

[41490] Accordingly, in one embodiment, the molecule which activity is to be increased in the process of the invention is the gene product with an activity as a “CBL-interacting protein kinase”, preferably it is the molecule of section (a) or (b) of this paragraph.

[41491] In particular, it was observed that in plants, especially in Arabidopsis thaliana, increasing or generating the activity of a gene product non-targeted with the activity of a “CBL-interacting protein kinase”, preferably being encoded by a gene comprising the nucleic acid sequence SEQ ID NO. 19919, preferably the coding region thereof, conferred the production of or the increase in isoleucine compared with the wild type control.

[41492] The nucleic acid sequence of At2g30360 from Arabidopsis thaliana, e.g. as shown in the respective line in column 5 of Table I, application no. 6, has been published in F. And the activity of the gene product thereof is the activity of CBL-interacting protein kinase.

[41493] Accordingly, in one embodiment, the process of the present invention for producing leucine in a non-human organism, like a microorganism or a plant or a part thereof, comprises increasing or generating the activity of a gene product with the activity of a gene product conferring the activity of “CBL-interacting protein kinase”, especially from Arabidopsis thaliana or its functional equivalent or its homolog, e.g. the increase of
[41494] (a) a gene product of a gene comprising the nucleic acid molecule as shown in the respective line in column 5 of Table I (whereby the respective line discloses in column 7 the fine chemical leucine), application no. 6, preferably the coding region thereof, or a homolog or a fragment thereof, and being depicted in the same respective line as said At2g30360, or a functional equivalent or a homolog thereof as shown in column 8 of Table I, application no. 6, preferably the coding region thereof, particularly a homolog or functional equivalent as shown in column 8 of Table I B, application no. 6, and being depicted in the same respective line as said At2g30360, and preferably the activity is increased non-targeted, or
[41495] (b) a polypeptide comprising a polypeptide, a consensus sequence or at least a polypeptide motif as shown in the respective line in column 5 of Table II or in column 8 of Table IV, application no. 6, respectively, and being depicted in the same respective line as said

[41496] At2g30360, or a functional equivalent or a homolog thereof as depicted in column 8 of Table II, application no. 6, preferably a homolog or functional equivalent as depicted in column 8 of Table II B, application no. 6, and being depicted in the same respective line as said At2g30360, and preferably the activity is increased non-targeted, whereby the respective line discloses in column 7 the fine chemical leucine.

[41497] Accordingly, in one embodiment, the molecule which activity is to be increased in the process of the invention is the gene product with an activity as a “CBL-interacting protein kinase”, preferably it is the molecule of section (a) or (b) of this paragraph.

[41498] In particular, it was observed that in plants, especially in Arabidopsis thaliana, increasing or generating the activity of a gene product non-targeted with the activity of a “CBL-interacting protein kinase”, preferably being encoded by a gene comprising the nucleic acid sequence SEQ ID NO. 19919, preferably the coding region thereof, conferred the production of or the increase in leucine compared with the wild type control.

[41499] The nucleic acid sequence of At2g30360 from Arabidopsis thaliana, e.g. as shown in the respective line in column 5 of Table I, application no. 6, has been published in F. And the activity of the gene product thereof is the activity of CBL-interacting protein kinase.

[41500] Accordingly, in one embodiment, the process of the present invention for producing valine in a non-human organism, like a microorganism or a plant or a part thereof, comprises increasing or generating the activity of a gene product with the activity of a gene product conferring the activity of “CBL-interacting protein kinase”, especially from Arabidopsis thaliana or its functional equivalent or its homolog, e.g. the increase of
[41501] (a) a gene product of a gene comprising the nucleic acid molecule as shown in the respective line in column 5 of Table I (whereby the respective line discloses in column 7 the fine chemical valine), application no. 6, preferably the coding region thereof, or a homolog or a fragment thereof, and being depicted in the same respective line as said At2g30360, or a functional equivalent or a homolog thereof as shown in column 8 of Table I, application no. 6, preferably the coding region thereof, particularly a homolog or functional equivalent as shown in column 8 of Table I B, application no. 6, and being depicted in the same respective line as said At2g30360, and preferably the activity is increased non-targeted, or
[41502] (b) a polypeptide comprising a polypeptide, a consensus sequence or at least a polypeptide motif as shown in the respective line in column 5 of Table II or in column 8 of Table IV, application no. 6, respectively, and being depicted in the same respective line as said At2g30360, or a functional equivalent or a homolog thereof as depicted in column 8 of Table II, application no. 6, preferably a homolog or functional equivalent as depicted in column 8 of Table II B, application no. 6, and being depicted in the same respective line as said At2g30360, and preferably the activity is increased non-targeted, whereby the respective line discloses in column 7 the fine chemical valine.

[41503] Accordingly, in one embodiment, the molecule which activity is to be increased in the process of the invention is the gene product with an activity as a “CBL-interacting protein kinase”, preferably it is the molecule of section (a) or (b) of this paragraph.

[41504] In particular, it was observed that in plants, especially in Arabidopsis thaliana, increasing or generating the activity of a gene product non-targeted with the activity of a “CBL-interacting protein kinase”, preferably being encoded by a gene comprising the nucleic acid sequence SEQ ID NO. 19919, preferably the coding region thereof, conferred the production of or the increase in valine compared with the wild type control.

[41505] The nucleic acid sequence of At2g30540 from Arabidopsis thaliana, e.g. as shown in the respective line in column 5 of Table I, application no. 6, has been published in F. And the activity of the gene product thereof is the activity of glutaredoxin.

[41506] Accordingly, in one embodiment, the process of the present invention for producing isoleucine in a non-human organism, like a microorganism or a plant or a part thereof, comprises increasing or generating the activity of a gene product with the activity of a gene product conferring the activity of “glutaredoxin”, especially from Arabidopsis thaliana or its functional equivalent or its homolog, e.g. the increase of
[41507] (a) a gene product of a gene comprising the nucleic acid molecule as shown in the respective line in column 5 of Table I (whereby the respective line discloses in column 7 the fine chemical isoleucine), application no. 6, preferably the coding region thereof, or a homolog or a fragment thereof, and being depicted in the same respective line as said At2g30540, or a functional equivalent or a homolog thereof as shown in column 8 of Table I, application no. 6, preferably the coding region thereof, particularly a homolog or functional equivalent as shown in column 8 of Table I B, application no. 6, and being depicted in the same respective line as said At2g30540, and preferably the activity is increased non-targeted, or
[41508] (b) a polypeptide comprising a polypeptide, a consensus sequence or at least a polypeptide motif as shown in the respective line in column 5 of Table II or in column 8 of Table IV, application no. 6, respectively, and being depicted in the same respective line as said At2g30540, or a functional equivalent or a homolog thereof as depicted in column 8 of Table II, application no. 6, preferably a homolog or functional equivalent as depicted in column 8 of Table II B, application no. 6, and being depicted in the same respective line as said At2g30540, and preferably the activity is increased non-targeted, whereby the respective line discloses in column 7 the fine chemical isoleucine.

[41509] Accordingly, in one embodiment, the molecule which activity is to be increased in the process of the invention is the gene product with an activity as a “glutaredoxin”, preferably it is the molecule of section (a) or (b) of this paragraph.

[41510] In particular, it was observed that in plants, especially in Arabidopsis thaliana, increasing or generating the activity of a gene product non-targeted with the activity of a “glutaredoxin”, preferably being encoded by a gene comprising the nucleic acid sequence SEQ ID NO. 20346, preferably the coding region thereof, conferred the production of or the increase in isoleucine compared with the wild type control.

[41511] The nucleic acid sequence of At2g30540 from Arabidopsis thaliana, e.g. as shown in the respective line in column 5 of Table I, application no. 6, has been published in F. And the activity of the gene product thereof is the activity of glutaredoxin.

[41512] Accordingly, in one embodiment, the process of the present invention for producing leucine in a non-human organism, like a microorganism or a plant or a part thereof, comprises increasing or generating the activity of a gene product with the activity of a gene product conferring the activity of “glutaredoxin”, especially from Arabidopsis thaliana or its functional equivalent or its homolog, e.g. the increase of
[41513] (a) a gene product of a gene comprising the nucleic acid molecule as shown in the respective line in column 5 of Table I (whereby the respective line discloses in column 7 the fine chemical leucine), application no. 6, preferably the coding region thereof, or a homolog or a fragment thereof, and being depicted in the same respective line as said At2g30540, or a functional equivalent or a homolog thereof as shown in column 8 of Table I, application no. 6, preferably the coding region thereof, particularly a homolog or functional equivalent as shown in column 8 of Table I B, application no. 6, and being depicted in the same respective line as said At2g30540, and preferably the activity is increased non-targeted, or
[41514] (b) a polypeptide comprising a polypeptide, a consensus sequence or at least a polypeptide motif as shown in the respective line in column 5 of Table II or in column 8 of Table IV, application no. 6, respectively, and being depicted in the same respective line as said At2g30540, or a functional equivalent or a homolog thereof as depicted in column 8 of Table II, application no. 6, preferably a homolog or functional equivalent as depicted in column 8 of Table II B, application no. 6, and being depicted in the same respective line as said At2g30540, and preferably the activity is increased non-targeted, whereby the respective line discloses in column 7 the fine chemical leucine.

[41515] Accordingly, in one embodiment, the molecule which activity is to be increased in the process of the invention is the gene product with an activity as a “glutaredoxin”, preferably it is the molecule of section (a) or (b) of this paragraph.

[41516] In particular, it was observed that in plants, especially in Arabidopsis thaliana, increasing or generating the activity of a gene product non-targeted with the activity of a “glutaredoxin”, preferably being encoded by a gene comprising the nucleic acid sequence SEQ ID NO. 20346, preferably the coding region thereof, conferred the production of or the increase in leucine compared with the wild type control.

[41517] The nucleic acid sequence of At2g30540 from Arabidopsis thaliana, e.g. as shown in the respective line in column 5 of Table I, application no. 6, has been published in F. And the activity of the gene product thereof is the activity of glutaredoxin.

[41518] Accordingly, in one embodiment, the process of the present invention for producing valine in a non-human organism, like a microorganism or a plant or a part thereof, comprises increasing or generating the activity of a gene product with the activity of a gene product conferring the activity of “glutaredoxin”, especially from Arabidopsis thaliana or its functional equivalent or its homolog, e.g. the increase of
[41519] (a) a gene product of a gene comprising the nucleic acid molecule as shown in the respective line in column 5 of Table I (whereby the respective line discloses in column 7 the fine chemical valine), application no. 6, preferably the coding region thereof, or a homolog or a fragment thereof, and being depicted in the same respective line as said At2g30540, or a functional equivalent or a homolog thereof as shown in column 8 of Table I, application no. 6, preferably the coding region thereof, particularly a homolog or functional equivalent as shown in column 8 of Table I B, application no. 6, and being depicted in the same respective line as said At2g30540, and preferably the activity is increased non-targeted, or
[41520] (b) a polypeptide comprising a polypeptide, a consensus sequence or at least a polypeptide motif as shown in the respective line in column 5 of Table II or in column 8 of Table IV, application no. 6, respectively, and being depicted in the same respective line as said At2g30540, or a functional equivalent or a homolog thereof as depicted in column 8 of Table II, application no. 6, preferably a homolog or functional equivalent as depicted in column 8 of Table II B, application no. 6, and being depicted in the same respective line as said At2g30540, and preferably the activity is increased non-targeted, whereby the respective line discloses in column 7 the fine chemical valine.

[41521] Accordingly, in one embodiment, the molecule which activity is to be increased in the process of the invention is the gene product with an activity as a “glutaredoxin”, preferably it is the molecule of section (a) or (b) of this paragraph.

[41522] In particular, it was observed that in plants, especially in Arabidopsis thaliana, increasing or generating the activity of a gene product non-targeted with the activity of a “glutaredoxin”, preferably being encoded by a gene comprising the nucleic acid sequence SEQ ID NO. 20346, preferably the coding region thereof, conferred the production of or the increase in valine compared with the wild type control.

[41523] The nucleic acid sequence of At2g47880 from Arabidopsis thaliana, e.g. as shown in the respective line in column 5 of Table I, application no. 6, has been published in F. And the activity of the gene product thereof is the activity of glutaredoxin.

[41524] Accordingly, in one embodiment, the process of the present invention for producing valine in a non-human organism, like a microorganism or a plant or a part thereof, comprises increasing or generating the activity of a gene product with the activity of a gene product conferring the activity of “glutaredoxin”, especially from Arabidopsis thaliana or its functional equivalent or its homolog, e.g. the increase of
[41525] (a) a gene product of a gene comprising the nucleic acid molecule as shown in the respective line in column 5 of Table I (whereby the respective line discloses in column 7 the fine chemical valine), application no. 6, preferably the coding region thereof, or a homolog or a fragment thereof, and being depicted in the same respective line as said At2g47880, or a functional equivalent or a homolog thereof as shown in column 8 of Table I, application no. 6, preferably the coding region thereof, particularly a homolog or functional equivalent as shown in column 8 of Table I B, application no. 6, and being depicted in the same respective line as said At2g47880, and preferably the activity is increased non-targeted, or
[41526] (b) a polypeptide comprising a polypeptide, a consensus sequence or at least a polypeptide motif as shown in the respective line in column 5 of Table II or in column 8 of Table IV, application no. 6, respectively, and being depicted in the same respective line as said At2g47880, or a functional equivalent or a homolog thereof as depicted in column 8 of Table II, application no. 6, preferably a homolog or functional equivalent as depicted in column 8 of Table II B, application no. 6, and being depicted in the same respective line as said At2g47880, and preferably the activity is increased non-targeted, whereby the respective line discloses in column 7 the fine chemical valine.

[41527] Accordingly, in one embodiment, the molecule which activity is to be increased in the process of the invention is the gene product with an activity as a “glutaredoxin”, preferably it is the molecule of section (a) or (b) of this paragraph.

[41528] In particular, it was observed that in plants, especially in Arabidopsis thaliana, increasing or generating the activity of a gene product non-targeted with the activity of a “glutaredoxin”, preferably being encoded by a gene comprising the nucleic acid sequence SEQ ID NO. 21159, preferably the coding region thereof, conferred the production of or the increase in valine compared with the wild type control.

[41529] The nucleic acid sequence of At3g04050 from Arabidopsis thaliana, e.g. as shown in the respective line in column 5 of Table I, application no. 6, has been published in F. And the activity of the gene product thereof is the activity of pyruvate kinase.

[41530] Accordingly, in one embodiment, the process of the present invention for producing isoleucine in a non-human organism, like a microorganism or a plant or a part thereof, comprises increasing or generating the activity of a gene product with the activity of a gene product conferring the activity of “pyruvate kinase”, especially from Arabidopsis thaliana or its functional equivalent or its homolog, e.g. the increase of
[41531] (a) a gene product of a gene comprising the nucleic acid molecule as shown in the respective line in column 5 of Table I (whereby the respective line discloses in column 7 the fine chemical isoleucine), application no. 6, preferably the coding region thereof, or a homolog or a fragment thereof, and being depicted in the same respective line as said At3g04050, or a functional equivalent or a homolog thereof as shown in column 8 of Table I, application no. 6, preferably the coding region thereof, particularly a homolog or functional equivalent as shown in column 8 of Table I B, application no. 6, and being depicted in the same respective line as said At3g04050, and preferably the activity is increased plastidic, or
[41532] (b) a polypeptide comprising a polypeptide, a consensus sequence or at least a polypeptide motif as shown in the respective line in column 5 of Table II or in column 8 of Table IV, application no. 6, respectively, and being depicted in the same respective line as said At3g04050, or a functional equivalent or a homolog thereof as depicted in column 8 of Table II, application no. 6, preferably a homolog or functional equivalent as depicted in column 8 of Table II B, application no. 6, and being depicted in the same respective line as said At3g04050, and preferably the activity is increased plastidic, whereby the respective line discloses in column 7 the fine chemical isoleucine.

[41533] Accordingly, in one embodiment, the molecule which activity is to be increased in the process of the invention is the gene product with an activity as a “pyruvate kinase”, preferably it is the molecule of section (a) or (b) of this paragraph.

[41534] In particular, it was observed that in plants, especially in Arabidopsis thaliana, increasing or generating the activity of a gene product plastidic with the activity of a “pyruvate kinase”, preferably being encoded by a gene comprising the nucleic acid sequence SEQ ID NO. 21497, preferably the coding region thereof, conferred the production of or the increase in isoleucine compared with the wild type control.

[41535] The nucleic acid sequence of At3g04050 from Arabidopsis thaliana, e.g. as shown in the respective line in column 5 of Table I, application no. 6, has been published in F. And the activity of the gene product thereof is the activity of pyruvate kinase.

[41536] Accordingly, in one embodiment, the process of the present invention for producing leucine in a non-human organism, like a microorganism or a plant or a part thereof, comprises increasing or generating the activity of a gene product with the activity of a gene product conferring the activity of “pyruvate kinase”, especially from Arabidopsis thaliana or its functional equivalent or its homolog, e.g. the increase of
[41537] (a) a gene product of a gene comprising the nucleic acid molecule as shown in the respective line in column 5 of Table I (whereby the respective line discloses in column 7 the fine chemical leucine), application no. 6, preferably the coding region thereof, or a homolog or a fragment thereof, and being depicted in the same respective line as said At3g04050, or a functional equivalent or a homolog thereof as shown in column 8 of Table I, application no. 6, preferably the coding region thereof, particularly a homolog or functional equivalent as shown in column 8 of Table I B, application no. 6, and being depicted in the same respective line as said At3g04050, and preferably the activity is increased plastidic, or
[41538] (b) a polypeptide comprising a polypeptide, a consensus sequence or at least a polypeptide motif as shown in the respective line in column 5 of Table II or in column 8 of Table IV, application no. 6, respectively, and being depicted in the same respective line as said At3g04050, or a functional equivalent or a homolog thereof as depicted in column 8 of Table II, application no. 6, preferably a homolog or functional equivalent as depicted in column 8 of Table II B, application no. 6, and being depicted in the same respective line as said At3g04050, and preferably the activity is increased plastidic, whereby the respective line discloses in column 7 the fine chemical leucine.

[41539] Accordingly, in one embodiment, the molecule which activity is to be increased in the process of the invention is the gene product with an activity as a “pyruvate kinase”, preferably it is the molecule of section (a) or (b) of this paragraph.

[41540] In particular, it was observed that in plants, especially in Arabidopsis thaliana, increasing or generating the activity of a gene product plastidic with the activity of a “pyruvate kinase”, preferably being encoded by a gene comprising the nucleic acid sequence SEQ ID NO. 21497, preferably the coding region thereof, conferred the production of or the increase in leucine compared with the wild type control.

[41541] The nucleic acid sequence of At3g04050 from Arabidopsis thaliana, e.g. as shown in the respective line in column 5 of Table I, application no. 6, has been published in F. And the activity of the gene product thereof is the activity of pyruvate kinase.

[41542] Accordingly, in one embodiment, the process of the present invention for producing valine in a non-human organism, like a microorganism or a plant or a part thereof, comprises increasing or generating the activity of a gene product with the activity of a gene product conferring the activity of “pyruvate kinase”, especially from Arabidopsis thaliana or its functional equivalent or its homolog, e.g. the increase of
[41543] (a) a gene product of a gene comprising the nucleic acid molecule as shown in the respective line in column 5 of Table I (whereby the respective line discloses in column 7 the fine chemical valine), application no. 6, preferably the coding region thereof, or a homolog or a fragment thereof, and being depicted in the same respective line as said At3g04050, or a functional equivalent or a homolog thereof as shown in column 8 of Table I, application no. 6, preferably the coding region thereof, particularly a homolog or functional equivalent as shown in column 8 of Table I B, application no. 6, and being depicted in the same respective line as said At3g04050, and preferably the activity is increased plastidic, or
[41544] (b) a polypeptide comprising a polypeptide, a consensus sequence or at least a polypeptide motif as shown in the respective line in column 5 of Table II or in column 8 of Table IV, application no. 6, respectively, and being depicted in the same respective line as said At3g04050, or a functional equivalent or a homolog thereof as depicted in column 8 of Table II, application no. 6, preferably a homolog or functional equivalent as depicted in column 8 of Table II B, application no. 6, and being depicted in the same respective line as said At3g04050, and preferably the activity is increased plastidic, whereby the respective line discloses in column 7 the fine chemical valine.

[41545] Accordingly, in one embodiment, the molecule which activity is to be increased in the process of the invention is the gene product with an activity as a “pyruvate kinase”, preferably it is the molecule of section (a) or (b) of this paragraph.

[41546] In particular, it was observed that in plants, especially in Arabidopsis thaliana, increasing or generating the activity of a gene product plastidic with the activity of a “pyruvate kinase”, preferably being encoded by a gene comprising the nucleic acid sequence SEQ ID NO. 21497, preferably the coding region thereof, conferred the production of or the increase in valine compared with the wild type control.

[41547] The nucleic acid sequence of At3g08710 from Arabidopsis thaliana, e.g. as shown in the respective line in column 5 of Table I, application no. 6, has been published in F. And the activity of the gene product thereof is the activity of thioredoxin family protein.

[41548] Accordingly, in one embodiment, the process of the present invention for producing isoleucine in a non-human organism, like a microorganism or a plant or a part thereof, comprises increasing or generating the activity of a gene product with the activity of a gene product conferring the activity of “thioredoxin family protein”, especially from Arabidopsis thaliana or its functional equivalent or its homolog, e.g. the increase of
[41549] (a) a gene product of a gene comprising the nucleic acid molecule as shown in the respective line in column 5 of Table I (whereby the respective line discloses in column 7 the fine chemical isoleucine), application no. 6, preferably the coding region thereof, or a homolog or a fragment thereof, and being depicted in the same respective line as said At3g08710, or a functional equivalent or a homolog thereof as shown in column 8 of Table I, application no. 6, preferably the coding region thereof, particularly a homolog or functional equivalent as shown in column 8 of Table I B, application no. 6, and being depicted in the same respective line as said At3g08710, and preferably the activity is increased non-targeted, or
[41550] (b) a polypeptide comprising a polypeptide, a consensus sequence or at least a polypeptide motif as shown in the respective line in column 5 of Table II or in column 8 of Table IV, application no. 6, respectively, and being depicted in the same respective line as said

[41551] At3g08710, or a functional equivalent or a homolog thereof as depicted in column 8 of Table II, application no. 6, preferably a homolog or functional equivalent as depicted in column 8 of Table II B, application no. 6, and being depicted in the same respective line as said At3g08710, and preferably the activity is increased non-targeted, whereby the respective line discloses in column 7 the fine chemical isoleucine.

[41552] Accordingly, in one embodiment, the molecule which activity is to be increased in the process of the invention is the gene product with an activity as a “thioredoxin family protein”, preferably it is the molecule of section (a) or (b) of this paragraph.

[41553] In particular, it was observed that in plants, especially in Arabidopsis thaliana, increasing or generating the activity of a gene product non-targeted with the activity of a “thioredoxin family protein”, preferably being encoded by a gene comprising the nucleic acid sequence SEQ ID NO. 22249, preferably the coding region thereof, conferred the production of or the increase in isoleucine compared with the wild type control.

[41554] The nucleic acid sequence of At3g08710 from Arabidopsis thaliana, e.g. as shown in the respective line in column 5 of Table I, application no. 6, has been published in F. And the activity of the gene product thereof is the activity of thioredoxin family protein.

[41555] Accordingly, in one embodiment, the process of the present invention for producing leucine in a non-human organism, like a microorganism or a plant or a part thereof, comprises increasing or generating the activity of a gene product with the activity of a gene product conferring the activity of “thioredoxin family protein”, especially from Arabidopsis thaliana or its functional equivalent or its homolog, e.g. the increase of
[41556] (a) a gene product of a gene comprising the nucleic acid molecule as shown in the respective line in column 5 of Table I (whereby the respective line discloses in column 7 the fine chemical leucine), application no. 6, preferably the coding region thereof, or a homolog or a fragment thereof, and being depicted in the same respective line as said At3g08710, or a functional equivalent or a homolog thereof as shown in column 8 of Table I, application no. 6, preferably the coding region thereof, particularly a homolog or functional equivalent as shown in column 8 of Table I B, application no. 6, and being depicted in the same respective line as said At3g08710, and preferably the activity is increased non-targeted, or
[41557] (b) a polypeptide comprising a polypeptide, a consensus sequence or at least a polypeptide motif as shown in the respective line in column 5 of Table II or in column 8 of Table IV, application no. 6, respectively, and being depicted in the same respective line as said At3g08710, or a functional equivalent or a homolog thereof as depicted in column 8 of Table II, application no. 6, preferably a homolog or functional equivalent as depicted in column 8 of Table II B, application no. 6, and being depicted in the same respective line as said At3g08710, and preferably the activity is increased non-targeted, whereby the respective line discloses in column 7 the fine chemical leucine.

[41558] Accordingly, in one embodiment, the molecule which activity is to be increased in the process of the invention is the gene product with an activity as a “thioredoxin family protein”, preferably it is the molecule of section (a) or (b) of this paragraph.

[41559] In particular, it was observed that in plants, especially in Arabidopsis thaliana, increasing or generating the activity of a gene product non-targeted with the activity of a “thioredoxin family protein”, preferably being encoded by a gene comprising the nucleic acid sequence SEQ ID NO. 22249, preferably the coding region thereof, conferred the production of or the increase in leucine compared with the wild type control.

[41560] The nucleic acid sequence of At3g11650 from Arabidopsis thaliana, e.g. as shown in the respective line in column 5 of Table I, application no. 6, has been published in F. And the activity of the gene product thereof is the activity of harpin-induced family protein.

[41561] Accordingly, in one embodiment, the process of the present invention for producing isoleucine in a non-human organism, like a microorganism or a plant or a part thereof, comprises increasing or generating the activity of a gene product with the activity of a gene product conferring the activity of “harpin-induced family protein”, especially from Arabidopsis thaliana or its functional equivalent or its homolog, e.g. the increase of
[41562] (a) a gene product of a gene comprising the nucleic acid molecule as shown in the respective line in column 5 of Table I (whereby the respective line discloses in column 7 the fine chemical isoleucine), application no. 6, preferably the coding region thereof, or a homolog or a fragment thereof, and being depicted in the same respective line as said At3g11650, or a functional equivalent or a homolog thereof as shown in column 8 of Table I, application no. 6, preferably the coding region thereof, particularly a homolog or functional equivalent as shown in column 8 of Table I B, application no. 6, and being depicted in the same respective line as said At3g11650, and preferably the activity is increased non-targeted, or
[41563] (b) a polypeptide comprising a polypeptide, a consensus sequence or at least a polypeptide motif as shown in the respective line in column 5 of Table II or in column 8 of Table IV, application no. 6, respectively, and being depicted in the same respective line as said At3g11650, or a functional equivalent or a homolog thereof as depicted in column 8 of Table II, application no. 6, preferably a homolog or functional equivalent as depicted in column 8 of Table II B, application no. 6, and being depicted in the same respective line as said At3g11650, and preferably the activity is increased non-targeted, whereby the respective line discloses in column 7 the fine chemical isoleucine.

[41564] Accordingly, in one embodiment, the molecule which activity is to be increased in the process of the invention is the gene product with an activity as a “harpin-induced family protein”, preferably it is the molecule of section (a) or (b) of this paragraph.

[41565] In particular, it was observed that in plants, especially in Arabidopsis thaliana, increasing or generating the activity of a gene product non-targeted with the activity of a “harpin-induced family protein”, preferably being encoded by a gene comprising the nucleic acid sequence SEQ ID NO. 22611, preferably the coding region thereof, conferred the production of or the increase in isoleucine compared with the wild type control.

[41566] The nucleic acid sequence of At3g11650 from Arabidopsis thaliana, e.g. as shown in the respective line in column 5 of Table I, application no. 6, has been published in F. And the activity of the gene product thereof is the activity of harpin-induced family protein.

[41567] Accordingly, in one embodiment, the process of the present invention for producing leucine in a non-human organism, like a microorganism or a plant or a part thereof, comprises increasing or generating the activity of a gene product with the activity of a gene product conferring the activity of “harpin-induced family protein”, especially from Arabidopsis thaliana or its functional equivalent or its homolog, e.g. the increase of
[41568] (a) a gene product of a gene comprising the nucleic acid molecule as shown in the respective line in column 5 of Table I (whereby the respective line discloses in column 7 the fine chemical leucine), application no. 6, preferably the coding region thereof, or a homolog or a fragment thereof, and being depicted in the same respective line as said At3g11650, or a functional equivalent or a homolog thereof as shown in column 8 of Table I, application no. 6, preferably the coding region thereof, particularly a homolog or functional equivalent as shown in column 8 of Table I B, application no. 6, and being depicted in the same respective line as said At3g11650, and preferably the activity is increased non-targeted, or
[41569] (b) a polypeptide comprising a polypeptide, a consensus sequence or at least a polypeptide motif as shown in the respective line in column 5 of Table II or in column 8 of Table IV, application no. 6, respectively, and being depicted in the same respective line as said At3g11650, or a functional equivalent or a homolog thereof as depicted in column 8 of Table II, application no. 6, preferably a homolog or functional equivalent as depicted in column 8 of Table II B, application no. 6, and being depicted in the same respective line as said At3g11650, and preferably the activity is increased non-targeted, whereby the respective line discloses in column 7 the fine chemical leucine.

[41570] Accordingly, in one embodiment, the molecule which activity is to be increased in the process of the invention is the gene product with an activity as a “harpin-induced family protein”, preferably it is the molecule of section (a) or (b) of this paragraph.

[41571] In particular, it was observed that in plants, especially in Arabidopsis thaliana, increasing or generating the activity of a gene product non-targeted with the activity of a “harpin-induced family protein”, preferably being encoded by a gene comprising the nucleic acid sequence SEQ ID NO. 22611, preferably the coding region thereof, conferred the production of or the increase in leucine compared with the wild type control.

[41572] The nucleic acid sequence of At3g18524 from Arabidopsis thaliana, e.g. as shown in the respective line in column 5 of Table I, application no. 6, has been published in F. And the activity of the gene product thereof is the activity of DNA mismatch repair protein.

[41573] Accordingly, in one embodiment, the process of the present invention for producing isoleucine in a non-human organism, like a microorganism or a plant or a part thereof, comprises increasing or generating the activity of a gene product with the activity of a gene product conferring the activity of “DNA mismatch repair protein”, especially from Arabidopsis thaliana or its functional equivalent or its homolog, e.g. the increase of
[41574] (a) a gene product of a gene comprising the nucleic acid molecule as shown in the respective line in column 5 of Table I (whereby the respective line discloses in column 7 the fine chemical isoleucine), application no. 6, preferably the coding region thereof, or a homolog or a fragment thereof, and being depicted in the same respective line as said At3g18524, or a functional equivalent or a homolog thereof as shown in column 8 of Table I, application no. 6, preferably the coding region thereof, particularly a homolog or functional equivalent as shown in column 8 of Table I B, application no. 6, and being depicted in the same respective line as said At3g18524, and preferably the activity is increased non-targeted, or
[41575] (b) a polypeptide comprising a polypeptide, a consensus sequence or at least a polypeptide motif as shown in the respective line in column 5 of Table II or in column 8 of Table IV, application no. 6, respectively, and being depicted in the same respective line as said At3g18524, or a functional equivalent or a homolog thereof as depicted in column 8 of Table II, application no. 6, preferably a homolog or functional equivalent as depicted in column 8 of Table II B, application no. 6, and being depicted in the same respective line as said At3g18524, and preferably the activity is increased non-targeted, whereby the respective line discloses in column 7 the fine chemical isoleucine.

[41576] Accordingly, in one embodiment, the molecule which activity is to be increased in the process of the invention is the gene product with an activity as a “DNA mismatch repair protein”, preferably it is the molecule of section (a) or (b) of this paragraph.

[41577] In particular, it was observed that in plants, especially in Arabidopsis thaliana, increasing or generating the activity of a gene product non-targeted with the activity of a “DNA mismatch repair protein”, preferably being encoded by a gene comprising the nucleic acid sequence SEQ ID NO. 22832, preferably the coding region thereof, conferred the production of or the increase in isoleucine compared with the wild type control.

[41578] The nucleic acid sequence of At3g18524 from Arabidopsis thaliana, e.g. as shown in the respective line in column 5 of Table I, application no. 6, has been published in F. And the activity of the gene product thereof is the activity of DNA mismatch repair protein.

[41579] Accordingly, in one embodiment, the process of the present invention for producing leucine in a non-human organism, like a microorganism or a plant or a part thereof, comprises increasing or generating the activity of a gene product with the activity of a gene product conferring the activity of “DNA mismatch repair protein”, especially from Arabidopsis thaliana or its functional equivalent or its homolog, e.g. the increase of
[41580] (a) a gene product of a gene comprising the nucleic acid molecule as shown in the respective line in column 5 of Table I (whereby the respective line discloses in column 7 the fine chemical leucine), application no. 6, preferably the coding region thereof, or a homolog or a fragment thereof, and being depicted in the same respective line as said At3g18524, or a functional equivalent or a homolog thereof as shown in column 8 of Table I, application no. 6, preferably the coding region thereof, particularly a homolog or functional equivalent as shown in column 8 of Table I B, application no. 6, and being depicted in the same respective line as said At3g18524, and preferably the activity is increased non-targeted, or
[41581] (b) a polypeptide comprising a polypeptide, a consensus sequence or at least a polypeptide motif as shown in the respective line in column 5 of Table II or in column 8 of Table IV, application no. 6, respectively, and being depicted in the same respective line as said At3g18524, or a functional equivalent or a homolog thereof as depicted in column 8 of Table II, application no. 6, preferably a homolog or functional equivalent as depicted in column 8 of Table II B, application no. 6, and being depicted in the same respective line as said At3g18524, and preferably the activity is increased non-targeted, whereby the respective line discloses in column 7 the fine chemical leucine.

[41582] Accordingly, in one embodiment, the molecule which activity is to be increased in the process of the invention is the gene product with an activity as a “DNA mismatch repair protein”, preferably it is the molecule of section (a) or (b) of this paragraph.

[41583] In particular, it was observed that in plants, especially in Arabidopsis thaliana, increasing or generating the activity of a gene product non-targeted with the activity of a “DNA mismatch repair protein”, preferably being encoded by a gene comprising the nucleic acid sequence SEQ ID NO. 22832, preferably the coding region thereof, conferred the production of or the increase in leucine compared with the wild type control.

[41584] The nucleic acid sequence of At3g18524 from Arabidopsis thaliana, e.g. as shown in the respective line in column 5 of Table I, application no. 6, has been published in F. And the activity of the gene product thereof is the activity of DNA mismatch repair protein.

[41585] Accordingly, in one embodiment, the process of the present invention for producing valine in a non-human organism, like a microorganism or a plant or a part thereof, comprises increasing or generating the activity of a gene product with the activity of a gene product conferring the activity of “DNA mismatch repair protein”, especially from Arabidopsis thaliana or its functional equivalent or its homolog, e.g. the increase of
[41586] (a) a gene product of a gene comprising the nucleic acid molecule as shown in the respective line in column 5 of Table I (whereby the respective line discloses in column 7 the fine chemical valine), application no. 6, preferably the coding region thereof, or a homolog or a fragment thereof, and being depicted in the same respective line as said At3g18524, or a functional equivalent or a homolog thereof as shown in column 8 of Table I, application no. 6, preferably the coding region thereof, particularly a homolog or functional equivalent as shown in column 8 of Table I B, application no. 6, and being depicted in the same respective line as said At3g18524, and preferably the activity is increased non-targeted, or
[41587] (b) a polypeptide comprising a polypeptide, a consensus sequence or at least a polypeptide motif as shown in the respective line in column 5 of Table II or in column 8 of Table IV, application no. 6, respectively, and being depicted in the same respective line as said At3g18524, or a functional equivalent or a homolog thereof as depicted in column 8 of Table II, application no. 6, preferably a homolog or functional equivalent as depicted in column 8 of Table II B, application no. 6, and being depicted in the same respective line as said At3g18524, and preferably the activity is increased non-targeted, whereby the respective line discloses in column 7 the fine chemical valine.

[41588] Accordingly, in one embodiment, the molecule which activity is to be increased in the process of the invention is the gene product with an activity as a “DNA mismatch repair protein”, preferably it is the molecule of section (a) or (b) of this paragraph.

[41589] In particular, it was observed that in plants, especially in Arabidopsis thaliana, increasing or generating the activity of a gene product non-targeted with the activity of a “DNA mismatch repair protein”, preferably being encoded by a gene comprising the nucleic acid sequence SEQ ID NO. 22832, preferably the coding region thereof, conferred the production of or the increase in valine compared with the wild type control.

[41590] The nucleic acid sequence of At3g23000 from Arabidopsis thaliana, e.g. as shown in the respective line in column 5 of Table I, application no. 6, has been published in F. And the activity of the gene product thereof is the activity of protein kinase.

[41591] Accordingly, in one embodiment, the process of the present invention for producing isoleucine in a non-human organism, like a microorganism or a plant or a part thereof, comprises increasing or generating the activity of a gene product with the activity of a gene product conferring the activity of “protein kinase”, especially from Arabidopsis thaliana or its functional equivalent or its homolog, e.g. the increase of
[41592] (a) a gene product of a gene comprising the nucleic acid molecule as shown in the respective line in column 5 of Table I (whereby the respective line discloses in column 7 the fine chemical isoleucine), application no. 6, preferably the coding region thereof, or a homolog or a fragment thereof, and being depicted in the same respective line as said At3g23000, or a functional equivalent or a homolog thereof as shown in column 8 of Table I, application no. 6, preferably the coding region thereof, particularly a homolog or functional equivalent as shown in column 8 of Table I B, application no. 6, and being depicted in the same respective line as said At3g23000, and preferably the activity is increased non-targeted, or
[41593] (b) a polypeptide comprising a polypeptide, a consensus sequence or at least a polypeptide motif as shown in the respective line in column 5 of Table II or in column 8 of Table IV, application no. 6, respectively, and being depicted in the same respective line as said At3g23000, or a functional equivalent or a homolog thereof as depicted in column 8 of Table II, application no. 6, preferably a homolog or functional equivalent as depicted in column 8 of Table II B, application no. 6, and being depicted in the same respective line as said At3g23000, and preferably the activity is increased non-targeted, whereby the respective line discloses in column 7 the fine chemical isoleucine.

[41594] Accordingly, in one embodiment, the molecule which activity is to be increased in the process of the invention is the gene product with an activity as a “protein kinase”, preferably it is the molecule of section (a) or (b) of this paragraph.

[41595] In particular, it was observed that in plants, especially in Arabidopsis thaliana, increasing or generating the activity of a gene product non-targeted with the activity of a “protein kinase”, preferably being encoded by a gene comprising the nucleic acid sequence SEQ ID NO. 1815, preferably the coding region thereof, conferred the production of or the increase in isoleucine compared with the wild type control.

[41596] The nucleic acid sequence of At3g23000 from Arabidopsis thaliana, e.g. as shown in the respective line in column 5 of Table I, application no. 6, has been published in F. And the activity of the gene product thereof is the activity of protein kinase.

[41597] Accordingly, in one embodiment, the process of the present invention for producing leucine in a non-human organism, like a microorganism or a plant or a part thereof, comprises increasing or generating the activity of a gene product with the activity of a gene product conferring the activity of “protein kinase”, especially from Arabidopsis thaliana or its functional equivalent or its homolog, e.g. the increase of
[41598] (a) a gene product of a gene comprising the nucleic acid molecule as shown in the respective line in column 5 of Table I (whereby the respective line discloses in column 7 the fine chemical leucine), application no. 6, preferably the coding region thereof, or a homolog or a fragment thereof, and being depicted in the same respective line as said At3g23000, or a functional equivalent or a homolog thereof as shown in column 8 of Table I, application no. 6, preferably the coding region thereof, particularly a homolog or functional equivalent as shown in column 8 of Table I B, application no. 6, and being depicted in the same respective line as said At3g23000, and preferably the activity is increased non-targeted, or
[41599] (b) a polypeptide comprising a polypeptide, a consensus sequence or at least a polypeptide motif as shown in the respective line in column 5 of Table II or in column 8 of Table IV, application no. 6, respectively, and being depicted in the same respective line as said At3g23000, or a functional equivalent or a homolog thereof as depicted in column 8 of Table II, application no. 6, preferably a homolog or functional equivalent as depicted in column 8 of Table II B, application no. 6, and being depicted in the same respective line as said At3g23000, and preferably the activity is increased non-targeted, whereby the respective line discloses in column 7 the fine chemical leucine.

[41600] Accordingly, in one embodiment, the molecule which activity is to be increased in the process of the invention is the gene product with an activity as a “protein kinase”, preferably it is the molecule of section (a) or (b) of this paragraph.

[41601] In particular, it was observed that in plants, especially in Arabidopsis thaliana, increasing or generating the activity of a gene product non-targeted with the activity of a “protein kinase”, preferably being encoded by a gene comprising the nucleic acid sequence SEQ ID NO. 1815, preferably the coding region thereof, conferred the production of or the increase in leucine compared with the wild type control.

[41602] The nucleic acid sequence of At3g23000 from Arabidopsis thaliana, e.g. as shown in the respective line in column 5 of Table I, application no. 6, has been published in F. And the activity of the gene product thereof is the activity of protein kinase.

[41603] Accordingly, in one embodiment, the process of the present invention for producing valine in a non-human organism, like a microorganism or a plant or a part thereof, comprises increasing or generating the activity of a gene product with the activity of a gene product conferring the activity of “protein kinase”, especially from Arabidopsis thaliana or its functional equivalent or its homolog, e.g. the increase of
[41604] (a) a gene product of a gene comprising the nucleic acid molecule as shown in the respective line in column 5 of Table I (whereby the respective line discloses in column 7 the fine chemical valine), application no. 6, preferably the coding region thereof, or a homolog or a fragment thereof, and being depicted in the same respective line as said At3g23000, or a functional equivalent or a homolog thereof as shown in column 8 of Table I, application no. 6, preferably the coding region thereof, particularly a homolog or functional equivalent as shown in column 8 of Table I B, application no. 6, and being depicted in the same respective line as said At3g23000, and preferably the activity is increased non-targeted, or
[41605] (b) a polypeptide comprising a polypeptide, a consensus sequence or at least a polypeptide motif as shown in the respective line in column 5 of Table II or in column 8 of Table IV, application no. 6, respectively, and being depicted in the same respective line as said

[41606] At3g23000, or a functional equivalent or a homolog thereof as depicted in column 8 of Table II, application no. 6, preferably a homolog or functional equivalent as depicted in column 8 of Table II B, application no. 6, and being depicted in the same respective line as said At3g23000, and preferably the activity is increased non-targeted, whereby the respective line discloses in column 7 the fine chemical valine.

[41607] Accordingly, in one embodiment, the molecule which activity is to be increased in the process of the invention is the gene product with an activity as a “protein kinase”, preferably it is the molecule of section (a) or (b) of this paragraph.

[41608] In particular, it was observed that in plants, especially in Arabidopsis thaliana, increasing or generating the activity of a gene product non-targeted with the activity of a “protein kinase”, preferably being encoded by a gene comprising the nucleic acid sequence SEQ ID NO. 1815, preferably the coding region thereof, conferred the production of or the increase in valine compared with the wild type control.

[41609] The nucleic acid sequence of At3g26400 from Arabidopsis thaliana, e.g. as shown in the respective line in column 5 of Table I, application no. 6, has been published in F. And the activity of the gene product thereof is the activity of eukaryotic translation initiation factor.

[41610] Accordingly, in one embodiment, the process of the present invention for producing isoleucine in a non-human organism, like a microorganism or a plant or a part thereof, comprises increasing or generating the activity of a gene product with the activity of a gene product conferring the activity of “eukaryotic translation initiation factor”, especially from Arabidopsis thaliana or its functional equivalent or its homolog, e.g. the increase of
[41611] (a) a gene product of a gene comprising the nucleic acid molecule as shown in the respective line in column 5 of Table I (whereby the respective line discloses in column 7 the fine chemical isoleucine), application no. 6, preferably the coding region thereof, or a homolog or a fragment thereof, and being depicted in the same respective line as said At3g26400, or a functional equivalent or a homolog thereof as shown in column 8 of Table I, application no. 6, preferably the coding region thereof, particularly a homolog or functional equivalent as shown in column 8 of Table I B, application no. 6, and being depicted in the same respective line as said At3g26400, and preferably the activity is increased non-targeted, or
[41612] (b) a polypeptide comprising a polypeptide, a consensus sequence or at least a polypeptide motif as shown in the respective line in column 5 of Table II or in column 8 of Table IV, application no. 6, respectively, and being depicted in the same respective line as said At3g26400, or a functional equivalent or a homolog thereof as depicted in column 8 of Table II, application no. 6, preferably a homolog or functional equivalent as depicted in column 8 of Table II B, application no. 6, and being depicted in the same respective line as said At3g26400, and preferably the activity is increased non-targeted, whereby the respective line discloses in column 7 the fine chemical isoleucine.

[41613] Accordingly, in one embodiment, the molecule which activity is to be increased in the process of the invention is the gene product with an activity as a “eukaryotic translation initiation factor”, preferably it is the molecule of section (a) or (b) of this paragraph.

[41614] In particular, it was observed that in plants, especially in Arabidopsis thaliana, increasing or generating the activity of a gene product non-targeted with the activity of a “eukaryotic translation initiation factor”, preferably being encoded by a gene comprising the nucleic acid sequence SEQ ID NO. 68727, preferably the coding region thereof, conferred the production of or the increase in isoleucine compared with the wild type control.

[41615] The nucleic acid sequence of At3g26400 from Arabidopsis thaliana, e.g. as shown in the respective line in column 5 of Table I, application no. 6, has been published in F. And the activity of the gene product thereof is the activity of eukaryotic translation initiation factor.

[41616] Accordingly, in one embodiment, the process of the present invention for producing leucine in a non-human organism, like a microorganism or a plant or a part thereof, comprises increasing or generating the activity of a gene product with the activity of a gene product conferring the activity of “eukaryotic translation initiation factor”, especially from Arabidopsis thaliana or its functional equivalent or its homolog, e.g. the increase of
[41617] (a) a gene product of a gene comprising the nucleic acid molecule as shown in the respective line in column 5 of Table I (whereby the respective line discloses in column 7 the fine chemical leucine), application no. 6, preferably the coding region thereof, or a homolog or a fragment thereof, and being depicted in the same respective line as said At3g26400, or a functional equivalent or a homolog thereof as shown in column 8 of Table I, application no. 6, preferably the coding region thereof, particularly a homolog or functional equivalent as shown in column 8 of Table I B, application no. 6, and being depicted in the same respective line as said At3g26400, and preferably the activity is increased non-targeted, or
[41618] (b) a polypeptide comprising a polypeptide, a consensus sequence or at least a polypeptide motif as shown in the respective line in column 5 of Table II or in column 8 of Table IV, application no. 6, respectively, and being depicted in the same respective line as said At3g26400, or a functional equivalent or a homolog thereof as depicted in column 8 of Table II, application no. 6, preferably a homolog or functional equivalent as depicted in column 8 of Table II B, application no. 6, and being depicted in the same respective line as said At3g26400, and preferably the activity is increased non-targeted, whereby the respective line discloses in column 7 the fine chemical leucine.

[41619] Accordingly, in one embodiment, the molecule which activity is to be increased in the process of the invention is the gene product with an activity as a “eukaryotic translation initiation factor”, preferably it is the molecule of section (a) or (b) of this paragraph.

[41620] In particular, it was observed that in plants, especially in Arabidopsis thaliana, increasing or generating the activity of a gene product non-targeted with the activity of a “eukaryotic translation initiation factor”, preferably being encoded by a gene comprising the nucleic acid sequence SEQ ID NO. 68727, preferably the coding region thereof, conferred the production of or the increase in leucine compared with the wild type control.

[41621] The nucleic acid sequence of At3g26400 from Arabidopsis thaliana, e.g. as shown in the respective line in column 5 of Table I, application no. 6, has been published in F. And the activity of the gene product thereof is the activity of eukaryotic translation initiation factor.

[41622] Accordingly, in one embodiment, the process of the present invention for producing valine in a non-human organism, like a microorganism or a plant or a part thereof, comprises increasing or generating the activity of a gene product with the activity of a gene product conferring the activity of “eukaryotic translation initiation factor”, especially from Arabidopsis thaliana or its functional equivalent or its homolog, e.g. the increase of
[41623] (a) a gene product of a gene comprising the nucleic acid molecule as shown in the respective line in column 5 of Table I (whereby the respective line discloses in column 7 the fine chemical valine), application no. 6, preferably the coding region thereof, or a homolog or a fragment thereof, and being depicted in the same respective line as said At3g26400, or a functional equivalent or a homolog thereof as shown in column 8 of Table I, application no. 6, preferably the coding region thereof, particularly a homolog or functional equivalent as shown in column 8 of Table I B, application no. 6, and being depicted in the same respective line as said At3g26400, and preferably the activity is increased non-targeted, or
[41624] (b) a polypeptide comprising a polypeptide, a consensus sequence or at least a polypeptide motif as shown in the respective line in column 5 of Table II or in column 8 of Table IV, application no. 6, respectively, and being depicted in the same respective line as said At3g26400, or a functional equivalent or a homolog thereof as depicted in column 8 of Table II, application no. 6, preferably a homolog or functional equivalent as depicted in column 8 of Table II B, application no. 6, and being depicted in the same respective line as said At3g26400, and preferably the activity is increased non-targeted, whereby the respective line discloses in column 7 the fine chemical valine.

[41625] Accordingly, in one embodiment, the molecule which activity is to be increased in the process of the invention is the gene product with an activity as a “eukaryotic translation initiation factor”, preferably it is the molecule of section (a) or (b) of this paragraph.

[41626] In particular, it was observed that in plants, especially in Arabidopsis thaliana, increasing or generating the activity of a gene product non-targeted with the activity of a “eukaryotic translation initiation factor”, preferably being encoded by a gene comprising the nucleic acid sequence SEQ ID NO. 68727, preferably the coding region thereof, conferred the production of or the increase in valine compared with the wild type control.

[41627] The nucleic acid sequence of At3g27540 from Arabidopsis thaliana, e.g. as shown in the respective line in column 5 of Table I, application no. 6, has been published in F. And the activity of the gene product thereof is the activity of glycosyl transferase.

[41628] Accordingly, in one embodiment, the process of the present invention for producing isoleucine in a non-human organism, like a microorganism or a plant or a part thereof, comprises increasing or generating the activity of a gene product with the activity of a gene product conferring the activity of “glycosyl transferase”, especially from Arabidopsis thaliana or its functional equivalent or its homolog, e.g. the increase of
[41629] (a) a gene product of a gene comprising the nucleic acid molecule as shown in the respective line in column 5 of Table I (whereby the respective line discloses in column 7 the fine chemical isoleucine), application no. 6, preferably the coding region thereof, or a homolog or a fragment thereof, and being depicted in the same respective line as said At3g27540, or a functional equivalent or a homolog thereof as shown in column 8 of Table I, application no. 6, preferably the coding region thereof, particularly a homolog or functional equivalent as shown in column 8 of Table I B, application no. 6, and being depicted in the same respective line as said At3g27540, and preferably the activity is increased non-targeted, or
[41630] (b) a polypeptide comprising a polypeptide, a consensus sequence or at least a polypeptide motif as shown in the respective line in column 5 of Table II or in column 8 of Table IV, application no. 6, respectively, and being depicted in the same respective line as said At3g27540, or a functional equivalent or a homolog thereof as depicted in column 8 of Table II, application no. 6, preferably a homolog or functional equivalent as depicted in column 8 of Table II B, application no. 6, and being depicted in the same respective line as said At3g27540, and preferably the activity is increased non-targeted, whereby the respective line discloses in column 7 the fine chemical isoleucine.

[41631] Accordingly, in one embodiment, the molecule which activity is to be increased in the process of the invention is the gene product with an activity as a “glycosyl transferase”, preferably it is the molecule of section (a) or (b) of this paragraph.

[41632] In particular, it was observed that in plants, especially in Arabidopsis thaliana, increasing or generating the activity of a gene product non-targeted with the activity of a “glycosyl transferase”, preferably being encoded by a gene comprising the nucleic acid sequence SEQ ID NO. 68777, preferably the coding region thereof, conferred the production of or the increase in isoleucine compared with the wild type control.

[41633] The nucleic acid sequence of At3g27540 from Arabidopsis thaliana, e.g. as shown in the respective line in column 5 of Table I, application no. 6, has been published in F. And the activity of the gene product thereof is the activity of glycosyl transferase.

[41634] Accordingly, in one embodiment, the process of the present invention for producing leucine in a non-human organism, like a microorganism or a plant or a part thereof, comprises increasing or generating the activity of a gene product with the activity of a gene product conferring the activity of “glycosyl transferase”, especially from Arabidopsis thaliana or its functional equivalent or its homolog, e.g. the increase of
[41635] (a) a gene product of a gene comprising the nucleic acid molecule as shown in the respective line in column 5 of Table I (whereby the respective line discloses in column 7 the fine chemical leucine), application no. 6, preferably the coding region thereof, or a homolog or a fragment thereof, and being depicted in the same respective line as said At3g27540, or a functional equivalent or a homolog thereof as shown in column 8 of Table I, application no. 6, preferably the coding region thereof, particularly a homolog or functional equivalent as shown in column 8 of Table I B, application no. 6, and being depicted in the same respective line as said At3g27540, and preferably the activity is increased non-targeted, or
[41636] (b) a polypeptide comprising a polypeptide, a consensus sequence or at least a polypeptide motif as shown in the respective line in column 5 of Table II or in column 8 of Table IV, application no. 6, respectively, and being depicted in the same respective line as said At3g27540, or a functional equivalent or a homolog thereof as depicted in column 8 of Table II, application no. 6, preferably a homolog or functional equivalent as depicted in column 8 of Table II B, application no. 6, and being depicted in the same respective line as said At3g27540, and preferably the activity is increased non-targeted, whereby the respective line discloses in column 7 the fine chemical leucine.

[41637] Accordingly, in one embodiment, the molecule which activity is to be increased in the process of the invention is the gene product with an activity as a “glycosyl transferase”, preferably it is the molecule of section (a) or (b) of this paragraph.

[41638] In particular, it was observed that in plants, especially in Arabidopsis thaliana, increasing or generating the activity of a gene product non-targeted with the activity of a “glycosyl transferase”, preferably being encoded by a gene comprising the nucleic acid sequence SEQ ID NO. 68777, preferably the coding region thereof, conferred the production of or the increase in leucine compared with the wild type control.

[41639] The nucleic acid sequence of At3g27540 from Arabidopsis thaliana, e.g. as shown in the respective line in column 5 of Table I, application no. 6, has been published in F. And the activity of the gene product thereof is the activity of glycosyl transferase.

[41640] Accordingly, in one embodiment, the process of the present invention for producing valine in a non-human organism, like a microorganism or a plant or a part thereof, comprises increasing or generating the activity of a gene product with the activity of a gene product conferring the activity of “glycosyl transferase”, especially from Arabidopsis thaliana or its functional equivalent or its homolog, e.g. the increase of
[41641] (a) a gene product of a gene comprising the nucleic acid molecule as shown in the respective line in column 5 of Table I (whereby the respective line discloses in column 7 the fine chemical valine), application no. 6, preferably the coding region thereof, or a homolog or a fragment thereof, and being depicted in the same respective line as said At3g27540, or a functional equivalent or a homolog thereof as shown in column 8 of Table I, application no. 6, preferably the coding region thereof, particularly a homolog or functional equivalent as shown in column 8 of Table I B, application no. 6, and being depicted in the same respective line as said At3g27540, and preferably the activity is increased non-targeted, or
[41642] (b) a polypeptide comprising a polypeptide, a consensus sequence or at least a polypeptide motif as shown in the respective line in column 5 of Table II or in column 8 of Table IV, application no. 6, respectively, and being depicted in the same respective line as said At3g27540, or a functional equivalent or a homolog thereof as depicted in column 8 of Table II, application no. 6, preferably a homolog or functional equivalent as depicted in column 8 of Table II B, application no. 6, and being depicted in the same respective line as said At3g27540, and preferably the activity is increased non-targeted, whereby the respective line discloses in column 7 the fine chemical valine.

[41643] Accordingly, in one embodiment, the molecule which activity is to be increased in the process of the invention is the gene product with an activity as a “glycosyl transferase”, preferably it is the molecule of section (a) or (b) of this paragraph.

[41644] In particular, it was observed that in plants, especially in Arabidopsis thaliana, increasing or generating the activity of a gene product non-targeted with the activity of a “glycosyl transferase”, preferably being encoded by a gene comprising the nucleic acid sequence SEQ ID NO. 68777, preferably the coding region thereof, conferred the production of or the increase in valine compared with the wild type control.

[41645] The nucleic acid sequence of At3g61830 from Arabidopsis thaliana, e.g. as shown in the respective line in column 5 of Table I, application no. 6, has been published in F. And the activity of the gene product thereof is the activity of auxin response factor.

[41646] Accordingly, in one embodiment, the process of the present invention for producing isoleucine in a non-human organism, like a microorganism or a plant or a part thereof, comprises increasing or generating the activity of a gene product with the activity of a gene product conferring the activity of “auxin response factor”, especially from Arabidopsis thaliana or its functional equivalent or its homolog, e.g. the increase of
[41647] (a) a gene product of a gene comprising the nucleic acid molecule as shown in the respective line in column 5 of Table I (whereby the respective line discloses in column 7 the fine chemical isoleucine), application no. 6, preferably the coding region thereof, or a homolog or a fragment thereof, and being depicted in the same respective line as said At3g61830, or a functional equivalent or a homolog thereof as shown in column 8 of Table I, application no. 6, preferably the coding region thereof, particularly a homolog or functional equivalent as shown in column 8 of Table I B, application no. 6, and being depicted in the same respective line as said At3g61830, and preferably the activity is increased non-targeted, or
[41648] (b) a polypeptide comprising a polypeptide, a consensus sequence or at least a polypeptide motif as shown in the respective line in column 5 of Table II or in column 8 of Table IV, application no. 6, respectively, and being depicted in the same respective line as said At3g61830, or a functional equivalent or a homolog thereof as depicted in column 8 of Table II, application no. 6, preferably a homolog or functional equivalent as depicted in column 8 of Table II B, application no. 6, and being depicted in the same respective line as said At3g61830, and preferably the activity is increased non-targeted, whereby the respective line discloses in column 7 the fine chemical isoleucine.

[41649] Accordingly, in one embodiment, the molecule which activity is to be increased in the process of the invention is the gene product with an activity as a “auxin response factor”, preferably it is the molecule of section (a) or (b) of this paragraph.

[41650] In particular, it was observed that in plants, especially in Arabidopsis thaliana, increasing or generating the activity of a gene product non-targeted with the activity of a “auxin response factor”, preferably being encoded by a gene comprising the nucleic acid sequence SEQ ID NO. 2367, preferably the coding region thereof, conferred the production of or the increase in isoleucine compared with the wild type control.

[41651] The nucleic acid sequence of At3g61830 from Arabidopsis thaliana, e.g. as shown in the respective line in column 5 of Table I, application no. 6, has been published in F. And the activity of the gene product thereof is the activity of auxin response factor.

[41652] Accordingly, in one embodiment, the process of the present invention for producing leucine in a non-human organism, like a microorganism or a plant or a part thereof, comprises increasing or generating the activity of a gene product with the activity of a gene product conferring the activity of “auxin response factor”, especially from Arabidopsis thaliana or its functional equivalent or its homolog, e.g. the increase of
[41653] (a) a gene product of a gene comprising the nucleic acid molecule as shown in the respective line in column 5 of Table I (whereby the respective line discloses in column 7 the fine chemical leucine), application no. 6, preferably the coding region thereof, or a homolog or a fragment thereof, and being depicted in the same respective line as said At3g61830, or a functional equivalent or a homolog thereof as shown in column 8 of Table I, application no. 6, preferably the coding region thereof, particularly a homolog or functional equivalent as shown in column 8 of Table I B, application no. 6, and being depicted in the same respective line as said At3g61830, and preferably the activity is increased non-targeted, or
[41654] (b) a polypeptide comprising a polypeptide, a consensus sequence or at least a polypeptide motif as shown in the respective line in column 5 of Table II or in column 8 of Table IV, application no. 6, respectively, and being depicted in the same respective line as said At3g61830, or a functional equivalent or a homolog thereof as depicted in column 8 of Table II, application no. 6, preferably a homolog or functional equivalent as depicted in column 8 of Table II B, application no. 6, and being depicted in the same respective line as said At3g61830, and preferably the activity is increased non-targeted, whereby the respective line discloses in column 7 the fine chemical leucine.

[41655] Accordingly, in one embodiment, the molecule which activity is to be increased in the process of the invention is the gene product with an activity as a “auxin response factor”, preferably it is the molecule of section (a) or (b) of this paragraph.

[41656] In particular, it was observed that in plants, especially in Arabidopsis thaliana, increasing or generating the activity of a gene product non-targeted with the activity of a “auxin response factor”, preferably being encoded by a gene comprising the nucleic acid sequence SEQ ID NO. 2367, preferably the coding region thereof, conferred the production of or the increase in leucine compared with the wild type control.

[41657] The nucleic acid sequence of At3g61830 from Arabidopsis thaliana, e.g. as shown in the respective line in column 5 of Table I, application no. 6, has been published in F. And the activity of the gene product thereof is the activity of auxin response factor.

[41658] Accordingly, in one embodiment, the process of the present invention for producing valine in a non-human organism, like a microorganism or a plant or a part thereof, comprises increasing or generating the activity of a gene product with the activity of a gene product conferring the activity of “auxin response factor”, especially from Arabidopsis thaliana or its functional equivalent or its homolog, e.g. the increase of
[41659] (a) a gene product of a gene comprising the nucleic acid molecule as shown in the respective line in column 5 of Table I (whereby the respective line discloses in column 7 the fine chemical valine), application no. 6, preferably the coding region thereof, or a homolog or a fragment thereof, and being depicted in the same respective line as said At3g61830, or a functional equivalent or a homolog thereof as shown in column 8 of Table I, application no. 6, preferably the coding region thereof, particularly a homolog or functional equivalent as shown in column 8 of Table I B, application no. 6, and being depicted in the same respective line as said At3g61830, and preferably the activity is increased non-targeted, or
[41660] (b) a polypeptide comprising a polypeptide, a consensus sequence or at least a polypeptide motif as shown in the respective line in column 5 of Table II or in column 8 of Table IV, application no. 6, respectively, and being depicted in the same respective line as said At3g61830, or a functional equivalent or a homolog thereof as depicted in column 8 of Table II, application no. 6, preferably a homolog or functional equivalent as depicted in column 8 of Table II B, application no. 6, and being depicted in the same respective line as said At3g61830, and preferably the activity is increased non-targeted, whereby the respective line discloses in column 7 the fine chemical valine.

[41661] Accordingly, in one embodiment, the molecule which activity is to be increased in the process of the invention is the gene product with an activity as a “auxin response factor”, preferably it is the molecule of section (a) or (b) of this paragraph.

[41662] In particular, it was observed that in plants, especially in Arabidopsis thaliana, increasing or generating the activity of a gene product non-targeted with the activity of a “auxin response factor”, preferably being encoded by a gene comprising the nucleic acid sequence SEQ ID NO. 2367, preferably the coding region thereof, conferred the production of or the increase in valine compared with the wild type control.

[41663] The nucleic acid sequence of At3g62950 from Arabidopsis thaliana, e.g. as shown in the respective line in column 5 of Table I, application no. 6, has been published in F. And the activity of the gene product thereof is the activity of glutaredoxin.

[41664] Accordingly, in one embodiment, the process of the present invention for producing isoleucine in a non-human organism, like a microorganism or a plant or a part thereof, comprises increasing or generating the activity of a gene product with the activity of a gene product conferring the activity of “glutaredoxin”, especially from Arabidopsis thaliana or its functional equivalent or its homolog, e.g. the increase of
[41665] (a) a gene product of a gene comprising the nucleic acid molecule as shown in the respective line in column 5 of Table I (whereby the respective line discloses in column 7 the fine chemical isoleucine), application no. 6, preferably the coding region thereof, or a homolog or a fragment thereof, and being depicted in the same respective line as said At3g62950, or a functional equivalent or a homolog thereof as shown in column 8 of Table I, application no. 6, preferably the coding region thereof, particularly a homolog or functional equivalent as shown in column 8 of Table I B, application no. 6, and being depicted in the same respective line as said At3g62950, and preferably the activity is increased non-targeted, or
[41666] (b) a polypeptide comprising a polypeptide, a consensus sequence or at least a polypeptide motif as shown in the respective line in column 5 of Table II or in column 8 of Table IV, application no. 6, respectively, and being depicted in the same respective line as said At3g62950, or a functional equivalent or a homolog thereof as depicted in column 8 of Table II, application no. 6, preferably a homolog or functional equivalent as depicted in column 8 of Table II B, application no. 6, and being depicted in the same respective line as said At3g62950, and preferably the activity is increased non-targeted, whereby the respective line discloses in column 7 the fine chemical isoleucine.

[41667] Accordingly, in one embodiment, the molecule which activity is to be increased in the process of the invention is the gene product with an activity as a “glutaredoxin”, preferably it is the molecule of section (a) or (b) of this paragraph.

[41668] In particular, it was observed that in plants, especially in Arabidopsis thaliana, increasing or generating the activity of a gene product non-targeted with the activity of a “glutaredoxin”, preferably being encoded by a gene comprising the nucleic acid sequence SEQ ID NO. 2935, preferably the coding region thereof, conferred the production of or the increase in isoleucine compared with the wild type control.

[41669] The nucleic acid sequence of At3g62950 from Arabidopsis thaliana, e.g. as shown in the respective line in column 5 of Table I, application no. 6, has been published in F. And the activity of the gene product thereof is the activity of glutaredoxin.

[41670] Accordingly, in one embodiment, the process of the present invention for producing leucine in a non-human organism, like a microorganism or a plant or a part thereof, comprises increasing or generating the activity of a gene product with the activity of a gene product conferring the activity of “glutaredoxin”, especially from Arabidopsis thaliana or its functional equivalent or its homolog, e.g. the increase of
[41671] (a) a gene product of a gene comprising the nucleic acid molecule as shown in the respective line in column 5 of Table I (whereby the respective line discloses in column 7 the fine chemical leucine), application no. 6, preferably the coding region thereof, or a homolog or a fragment thereof, and being depicted in the same respective line as said At3g62950, or a functional equivalent or a homolog thereof as shown in column 8 of Table I, application no. 6, preferably the coding region thereof, particularly a homolog or functional equivalent as shown in column 8 of Table I B, application no. 6, and being depicted in the same respective line as said At3g62950, and preferably the activity is increased non-targeted, or
[41672] (b) a polypeptide comprising a polypeptide, a consensus sequence or at least a polypeptide motif as shown in the respective line in column 5 of Table II or in column 8 of Table IV, application no. 6, respectively, and being depicted in the same respective line as said At3g62950, or a functional equivalent or a homolog thereof as depicted in column 8 of Table II, application no. 6, preferably a homolog or functional equivalent as depicted in column 8 of Table II B, application no. 6, and being depicted in the same respective line as said At3g62950, and preferably the activity is increased non-targeted, whereby the respective line discloses in column 7 the fine chemical leucine.

[41673] Accordingly, in one embodiment, the molecule which activity is to be increased in the process of the invention is the gene product with an activity as a “glutaredoxin”, preferably it is the molecule of section (a) or (b) of this paragraph.

[41674] In particular, it was observed that in plants, especially in Arabidopsis thaliana, increasing or generating the activity of a gene product non-targeted with the activity of a “glutaredoxin”, preferably being encoded by a gene comprising the nucleic acid sequence SEQ ID NO. 2935, preferably the coding region thereof, conferred the production of or the increase in leucine compared with the wild type control.

[41675] The nucleic acid sequence of At3g62950 from Arabidopsis thaliana, e.g. as shown in the respective line in column 5 of Table I, application no. 6, has been published in F. And the activity of the gene product thereof is the activity of glutaredoxin.

[41676] Accordingly, in one embodiment, the process of the present invention for producing valine in a non-human organism, like a microorganism or a plant or a part thereof, comprises increasing or generating the activity of a gene product with the activity of a gene product conferring the activity of “glutaredoxin”, especially from Arabidopsis thaliana or its functional equivalent or its homolog, e.g. the increase of
[41677] (a) a gene product of a gene comprising the nucleic acid molecule as shown in the respective line in column 5 of Table I (whereby the respective line discloses in column 7 the fine chemical valine), application no. 6, preferably the coding region thereof, or a homolog or a fragment thereof, and being depicted in the same respective line as said At3g62950, or a functional equivalent or a homolog thereof as shown in column 8 of Table I, application no. 6, preferably the coding region thereof, particularly a homolog or functional equivalent as shown in column 8 of Table I B, application no. 6, and being depicted in the same respective line as said At3g62950, and preferably the activity is increased non-targeted, or
[41678] (b) a polypeptide comprising a polypeptide, a consensus sequence or at least a polypeptide motif as shown in the respective line in column 5 of Table II or in column 8 of Table IV, application no. 6, respectively, and being depicted in the same respective line as said At3g62950, or a functional equivalent or a homolog thereof as depicted in column 8 of Table II, application no. 6, preferably a homolog or functional equivalent as depicted in column 8 of Table II B, application no. 6, and being depicted in the same respective line as said At3g62950, and preferably the activity is increased non-targeted, whereby the respective line discloses in column 7 the fine chemical valine.

[41679] Accordingly, in one embodiment, the molecule which activity is to be increased in the process of the invention is the gene product with an activity as a “glutaredoxin”, preferably it is the molecule of section (a) or (b) of this paragraph.

[41680] In particular, it was observed that in plants, especially in Arabidopsis thaliana, increasing or generating the activity of a gene product non-targeted with the activity of a “glutaredoxin”, preferably being encoded by a gene comprising the nucleic acid sequence SEQ ID NO. 2935, preferably the coding region thereof, conferred the production of or the increase in valine compared with the wild type control.

[41681] The nucleic acid sequence of At4g18880 from Arabidopsis thaliana, e.g. as shown in the respective line in column 5 of Table I, application no. 6, has been published in F. And the activity of the gene product thereof is the activity of heat shock transcription factor.

[41682] Accordingly, in one embodiment, the process of the present invention for producing isoleucine in a non-human organism, like a microorganism or a plant or a part thereof, comprises increasing or generating the activity of a gene product with the activity of a gene product conferring the activity of “heat shock transcription factor”, especially from Arabidopsis thaliana or its functional equivalent or its homolog, e.g. the increase of
[41683] (a) a gene product of a gene comprising the nucleic acid molecule as shown in the respective line in column 5 of Table I (whereby the respective line discloses in column 7 the fine chemical isoleucine), application no. 6, preferably the coding region thereof, or a homolog or a fragment thereof, and being depicted in the same respective line as said At4g18880, or a functional equivalent or a homolog thereof as shown in column 8 of Table I, application no. 6, preferably the coding region thereof, particularly a homolog or functional equivalent as shown in column 8 of Table I B, application no. 6, and being depicted in the same respective line as said At4g18880, and preferably the activity is increased non-targeted, or
[41684] (b) a polypeptide comprising a polypeptide, a consensus sequence or at least a polypeptide motif as shown in the respective line in column 5 of Table II or in column 8 of Table IV, application no. 6, respectively, and being depicted in the same respective line as said At4g18880, or a functional equivalent or a homolog thereof as depicted in column 8 of Table II, application no. 6, preferably a homolog or functional equivalent as depicted in column 8 of Table II B, application no. 6, and being depicted in the same respective line as said At4g18880, and preferably the activity is increased non-targeted, whereby the respective line discloses in column 7 the fine chemical isoleucine.

[41685] Accordingly, in one embodiment, the molecule which activity is to be increased in the process of the invention is the gene product with an activity as a “heat shock transcription factor”, preferably it is the molecule of section (a) or (b) of this paragraph.

[41686] In particular, it was observed that in plants, especially in Arabidopsis thaliana, increasing or generating the activity of a gene product non-targeted with the activity of a “heat shock transcription factor”, preferably being encoded by a gene comprising the nucleic acid sequence SEQ ID NO. 24232, preferably the coding region thereof, conferred the production of or the increase in isoleucine compared with the wild type control.

[41687] The nucleic acid sequence of At4g26080 from Arabidopsis thaliana, e.g. as shown in the respective line in column 5 of Table I, application no. 6, has been published in F. And the activity of the gene product thereof is the activity of protein phosphatase.

[41688] Accordingly, in one embodiment, the process of the present invention for producing valine in a non-human organism, like a microorganism or a plant or a part thereof, comprises increasing or generating the activity of a gene product with the activity of a gene product conferring the activity of “protein phosphatase”, especially from Arabidopsis thaliana or its functional equivalent or its homolog, e.g. the increase of
[41689] (a) a gene product of a gene comprising the nucleic acid molecule as shown in the respective line in column 5 of Table I (whereby the respective line discloses in column 7 the fine chemical valine), application no. 6, preferably the coding region thereof, or a homolog or a fragment thereof, and being depicted in the same respective line as said At4g26080, or a functional equivalent or a homolog thereof as shown in column 8 of Table I, application no. 6, preferably the coding region thereof, particularly a homolog or functional equivalent as shown in column 8 of Table I B, application no. 6, and being depicted in the same respective line as said At4g26080, and preferably the activity is increased non-targeted, or
[41690] (b) a polypeptide comprising a polypeptide, a consensus sequence or at least a polypeptide motif as shown in the respective line in column 5 of Table II or in column 8 of Table IV, application no. 6, respectively, and being depicted in the same respective line as said At4g26080, or a functional equivalent or a homolog thereof as depicted in column 8 of Table II, application no. 6, preferably a homolog or functional equivalent as depicted in column 8 of Table II B, application no. 6, and being depicted in the same respective line as said At4g26080, and preferably the activity is increased non-targeted, whereby the respective line discloses in column 7 the fine chemical valine.

[41691] Accordingly, in one embodiment, the molecule which activity is to be increased in the process of the invention is the gene product with an activity as a “protein phosphatase”, preferably it is the molecule of section (a) or (b) of this paragraph.

[41692] In particular, it was observed that in plants, especially in Arabidopsis thaliana, increasing or generating the activity of a gene product non-targeted with the activity of a “protein phosphatase”, preferably being encoded by a gene comprising the nucleic acid sequence SEQ ID NO. 68849, preferably the coding region thereof, conferred the production of or the increase in valine compared with the wild type control.

[41693] The nucleic acid sequence of At4g32480 from Arabidopsis thaliana, e.g. as shown in the respective line in column 5 of Table I, application no. 6, has been published in F. And the activity of the gene product thereof is the activity of At4g32480-protein.

[41694] Accordingly, in one embodiment, the process of the present invention for producing isoleucine in a non-human organism, like a microorganism or a plant or a part thereof, comprises increasing or generating the activity of a gene product with the activity of a gene product conferring the activity of “At4g32480-protein”, especially from Arabidopsis thaliana or its functional equivalent or its homolog, e.g. the increase of
[41695] (a) a gene product of a gene comprising the nucleic acid molecule as shown in the respective line in column 5 of Table I (whereby the respective line discloses in column 7 the fine chemical isoleucine), application no. 6, preferably the coding region thereof, or a homolog or a fragment thereof, and being depicted in the same respective line as said At4g32480, or a functional equivalent or a homolog thereof as shown in column 8 of Table I, application no. 6, preferably the coding region thereof, particularly a homolog or functional equivalent as shown in column 8 of Table I B, application no. 6, and being depicted in the same respective line as said At4g32480, and preferably the activity is increased non-targeted, or
[41696] (b) a polypeptide comprising a polypeptide, a consensus sequence or at least a polypeptide motif as shown in the respective line in column 5 of Table II or in column 8 of Table IV, application no. 6, respectively, and being depicted in the same respective line as said At4g32480, or a functional equivalent or a homolog thereof as depicted in column 8 of Table II, application no. 6, preferably a homolog or functional equivalent as depicted in column 8 of Table II B, application no. 6, and being depicted in the same respective line as said At4g32480, and preferably the activity is increased non-targeted, whereby the respective line discloses in column 7 the fine chemical isoleucine.

[41697] Accordingly, in one embodiment, the molecule which activity is to be increased in the process of the invention is the gene product with an activity as a “At4g32480-protein”, preferably it is the molecule of section (a) or (b) of this paragraph.

[41698] In particular, it was observed that in plants, especially in Arabidopsis thaliana, increasing or generating the activity of a gene product non-targeted with the activity of a “At4g32480-protein”, preferably being encoded by a gene comprising the nucleic acid sequence SEQ ID NO. 4040, preferably the coding region thereof, conferred the production of or the increase in isoleucine compared with the wild type control.

[41699] The nucleic acid sequence of At4g32480 from Arabidopsis thaliana, e.g. as shown in the respective line in column 5 of Table I, application no. 6, has been published in F. And the activity of the gene product thereof is the activity of At4g32480-protein.

[41700] Accordingly, in one embodiment, the process of the present invention for producing leucine in a non-human organism, like a microorganism or a plant or a part thereof, comprises increasing or generating the activity of a gene product with the activity of a gene product conferring the activity of “At4g32480-protein”, especially from Arabidopsis thaliana or its functional equivalent or its homolog, e.g. the increase of
[41701] (a) a gene product of a gene comprising the nucleic acid molecule as shown in the respective line in column 5 of Table I (whereby the respective line discloses in column 7 the fine chemical leucine), application no. 6, preferably the coding region thereof, or a homolog or a fragment thereof, and being depicted in the same respective line as said At4g32480, or a functional equivalent or a homolog thereof as shown in column 8 of Table I, application no. 6, preferably the coding region thereof, particularly a homolog or functional equivalent as shown in column 8 of Table I B, application no. 6, and being depicted in the same respective line as said At4g32480, and preferably the activity is increased non-targeted, or
[41702] (b) a polypeptide comprising a polypeptide, a consensus sequence or at least a polypeptide motif as shown in the respective line in column 5 of Table II or in column 8 of Table IV, application no. 6, respectively, and being depicted in the same respective line as said At4g32480, or a functional equivalent or a homolog thereof as depicted in column 8 of Table II, application no. 6, preferably a homolog or functional equivalent as depicted in column 8 of Table II B, application no. 6, and being depicted in the same respective line as said At4g32480, and preferably the activity is increased non-targeted, whereby the respective line discloses in column 7 the fine chemical leucine.

[41703] Accordingly, in one embodiment, the molecule which activity is to be increased in the process of the invention is the gene product with an activity as a “At4g32480-protein”, preferably it is the molecule of section (a) or (b) of this paragraph.

[41704] In particular, it was observed that in plants, especially in Arabidopsis thaliana, increasing or generating the activity of a gene product non-targeted with the activity of a “At4g32480-protein”, preferably being encoded by a gene comprising the nucleic acid sequence SEQ ID NO. 4040, preferably the coding region thereof, conferred the production of or the increase in leucine compared with the wild type control.

[41705] The nucleic acid sequence of At4g32480 from Arabidopsis thaliana, e.g. as shown in the respective line in column 5 of Table I, application no. 6, has been published in F. And the activity of the gene product thereof is the activity of At4g32480-protein.

[41706] Accordingly, in one embodiment, the process of the present invention for producing valine in a non-human organism, like a microorganism or a plant or a part thereof, comprises increasing or generating the activity of a gene product with the activity of a gene product conferring the activity of “At4g32480-protein”, especially from Arabidopsis thaliana or its functional equivalent or its homolog, e.g. the increase of
[41707] (a) a gene product of a gene comprising the nucleic acid molecule as shown in the respective line in column 5 of Table I (whereby the respective line discloses in column 7 the fine chemical valine), application no. 6, preferably the coding region thereof, or a homolog or a fragment thereof, and being depicted in the same respective line as said At4g32480, or a functional equivalent or a homolog thereof as shown in column 8 of Table I, application no. 6, preferably the coding region thereof, particularly a homolog or functional equivalent as shown in column 8 of Table I B, application no. 6, and being depicted in the same respective line as said At4g32480, and preferably the activity is increased non-targeted, or
[41708] (b) a polypeptide comprising a polypeptide, a consensus sequence or at least a polypeptide motif as shown in the respective line in column 5 of Table II or in column 8 of Table IV, application no. 6, respectively, and being depicted in the same respective line as said At4g32480, or a functional equivalent or a homolog thereof as depicted in column 8 of Table II, application no. 6, preferably a homolog or functional equivalent as depicted in column 8 of Table II B, application no. 6, and being depicted in the same respective line as said At4g32480, and preferably the activity is increased non-targeted, whereby the respective line discloses in column 7 the fine chemical valine.

[41709] Accordingly, in one embodiment, the molecule which activity is to be increased in the process of the invention is the gene product with an activity as a “At4g32480-protein”, preferably it is the molecule of section (a) or (b) of this paragraph.

[41710] In particular, it was observed that in plants, especially in Arabidopsis thaliana, increasing or generating the activity of a gene product non-targeted with the activity of a “At4g32480-protein”, preferably being encoded by a gene comprising the nucleic acid sequence SEQ ID NO. 4040, preferably the coding region thereof, conferred the production of or the increase in valine compared with the wild type control.

[41711] The nucleic acid sequence of At4g34160 from Arabidopsis thaliana, e.g. as shown in the respective line in column 5 of Table I, application no. 6, has been published in F. And the activity of the gene product thereof is the activity of cyclin D.

[41712] Accordingly, in one embodiment, the process of the present invention for producing isoleucine in a non-human organism, like a microorganism or a plant or a part thereof, comprises increasing or generating the activity of a gene product with the activity of a gene product conferring the activity of “cyclin D”, especially from Arabidopsis thaliana or its functional equivalent or its homolog, e.g. the increase of
[41713] (a) a gene product of a gene comprising the nucleic acid molecule as shown in the respective line in column 5 of Table I (whereby the respective line discloses in column 7 the fine chemical isoleucine), application no. 6, preferably the coding region thereof, or a homolog or a fragment thereof, and being depicted in the same respective line as said At4g34160, or a functional equivalent or a homolog thereof as shown in column 8 of Table I, application no. 6, preferably the coding region thereof, particularly a homolog or functional equivalent as shown in column 8 of Table I B, application no. 6, and being depicted in the same respective line as said At4g34160, and preferably the activity is increased non-targeted, or
[41714] (b) a polypeptide comprising a polypeptide, a consensus sequence or at least a polypeptide motif as shown in the respective line in column 5 of Table II or in column 8 of Table IV, application no. 6, respectively, and being depicted in the same respective line as said At4g34160, or a functional equivalent or a homolog thereof as depicted in column 8 of Table II, application no. 6, preferably a homolog or functional equivalent as depicted in column 8 of Table II B, application no. 6, and being depicted in the same respective line as said At4g34160, and preferably the activity is increased non-targeted, whereby the respective line discloses in column 7 the fine chemical isoleucine.

[41715] Accordingly, in one embodiment, the molecule which activity is to be increased in the process of the invention is the gene product with an activity as a “cyclin D”, preferably it is the molecule of section (a) or (b) of this paragraph.

[41716] In particular, it was observed that in plants, especially in Arabidopsis thaliana, increasing or generating the activity of a gene product non-targeted with the activity of a “cyclin D”, preferably being encoded by a gene comprising the nucleic acid sequence SEQ ID NO. 24311, preferably the coding region thereof, conferred the production of or the increase in isoleucine compared with the wild type control.

[41717] The nucleic acid sequence of At4g34160 from Arabidopsis thaliana, e.g. as shown in the respective line in column 5 of Table I, application no. 6, has been published in F. And the activity of the gene product thereof is the activity of cyclin D .

[41718] Accordingly, in one embodiment, the process of the present invention for producing leucine in a non-human organism, like a microorganism or a plant or a part thereof, comprises increasing or generating the activity of a gene product with the activity of a gene product conferring the activity of “cyclin D”, especially from Arabidopsis thaliana or its functional equivalent or its homolog, e.g. the increase of
[41719] (a) a gene product of a gene comprising the nucleic acid molecule as shown in the respective line in column 5 of Table I (whereby the respective line discloses in column 7 the fine chemical leucine), application no. 6, preferably the coding region thereof, or a homolog or a fragment thereof, and being depicted in the same respective line as said At4g34160, or a functional equivalent or a homolog thereof as shown in column 8 of Table I, application no. 6, preferably the coding region thereof, particularly a homolog or functional equivalent as shown in column 8 of Table I B, application no. 6, and being depicted in the same respective line as said At4g34160, and preferably the activity is increased non-targeted, or
[41720] (b) a polypeptide comprising a polypeptide, a consensus sequence or at least a polypeptide motif as shown in the respective line in column 5 of Table II or in column 8 of Table IV, application no. 6, respectively, and being depicted in the same respective line as said At4g34160, or a functional equivalent or a homolog thereof as depicted in column 8 of Table II, application no. 6, preferably a homolog or functional equivalent as depicted in column 8 of Table II B, application no. 6, and being depicted in the same respective line as said At4g34160, and preferably the activity is increased non-targeted, whereby the respective line discloses in column 7 the fine chemical leucine.

[41721] Accordingly, in one embodiment, the molecule which activity is to be increased in the process of the invention is the gene product with an activity as a “cyclin D”, preferably it is the molecule of section (a) or (b) of this paragraph.

[41722] In particular, it was observed that in plants, especially in Arabidopsis thaliana, increasing or generating the activity of a gene product non-targeted with the activity of a “cyclin D”, preferably being encoded by a gene comprising the nucleic acid sequence SEQ ID NO. 24311, preferably the coding region thereof, conferred the production of or the increase in leucine compared with the wild type control.

[41723] The nucleic acid sequence of At4g34160 from Arabidopsis thaliana, e.g. as shown in the respective line in column 5 of Table I, application no. 6, has been published in F. And the activity of the gene product thereof is the activity of cyclin D .

[41724] Accordingly, in one embodiment, the process of the present invention for producing valine in a non-human organism, like a microorganism or a plant or a part thereof, comprises increasing or generating the activity of a gene product with the activity of a gene product conferring the activity of “cyclin D”, especially from Arabidopsis thaliana or its functional equivalent or its homolog, e.g. the increase of
[41725] (a) a gene product of a gene comprising the nucleic acid molecule as shown in the respective line in column 5 of Table I (whereby the respective line discloses in column 7 the fine chemical valine), application no. 6, preferably the coding region thereof, or a homolog or a fragment thereof, and being depicted in the same respective line as said At4g34160, or a functional equivalent or a homolog thereof as shown in column 8 of Table I, application no. 6, preferably the coding region thereof, particularly a homolog or functional equivalent as shown in column 8 of Table I B, application no. 6, and being depicted in the same respective line as said At4g34160, and preferably the activity is increased non-targeted, or
[41726] (b) a polypeptide comprising a polypeptide, a consensus sequence or at least a polypeptide motif as shown in the respective line in column 5 of Table II or in column 8 of Table IV, application no. 6, respectively, and being depicted in the same respective line as said At4g34160, or a functional equivalent or a homolog thereof as depicted in column 8 of Table II, application no. 6, preferably a homolog or functional equivalent as depicted in column 8 of Table II B, application no. 6, and being depicted in the same respective line as said At4g34160, and preferably the activity is increased non-targeted, whereby the respective line discloses in column 7 the fine chemical valine.

[41727] Accordingly, in one embodiment, the molecule which activity is to be increased in the process of the invention is the gene product with an activity as a “cyclin D”, preferably it is the molecule of section (a) or (b) of this paragraph.

[41728] In particular, it was observed that in plants, especially in Arabidopsis thaliana, increasing or generating the activity of a gene product non-targeted with the activity of a “cyclin D”, preferably being encoded by a gene comprising the nucleic acid sequence SEQ ID NO. 24311, preferably the coding region thereof, conferred the production of or the increase in valine compared with the wild type control.

[41729] The nucleic acid sequence of At4g35310 from Arabidopsis thaliana, e.g. as shown in the respective line in column 5 of Table I, application no. 6, has been published in F. And the activity of the gene product thereof is the activity of calcium-dependent protein kinase.

[41730] Accordingly, in one embodiment, the process of the present invention for producing isoleucine in a non-human organism, like a microorganism or a plant or a part thereof, comprises increasing or generating the activity of a gene product with the activity of a gene product conferring the activity of “calcium-dependent protein kinase”, especially from Arabidopsis thaliana or its functional equivalent or its homolog, e.g. the increase of
[41731] (a) a gene product of a gene comprising the nucleic acid molecule as shown in the respective line in column 5 of Table I (whereby the respective line discloses in column 7 the fine chemical isoleucine), application no. 6, preferably the coding region thereof, or a homolog or a fragment thereof, and being depicted in the same respective line as said At4g35310, or a functional equivalent or a homolog thereof as shown in column 8 of Table I, application no. 6, preferably the coding region thereof, particularly a homolog or functional equivalent as shown in column 8 of Table I B, application no. 6, and being depicted in the same respective line as said At4g35310, and preferably the activity is increased non-targeted, or
[41732] (b) a polypeptide comprising a polypeptide, a consensus sequence or at least a polypeptide motif as shown in the respective line in column 5 of Table II or in column 8 of Table IV, application no. 6, respectively, and being depicted in the same respective line as said At4g35310, or a functional equivalent or a homolog thereof as depicted in column 8 of Table II, application no. 6, preferably a homolog or functional equivalent as depicted in column 8 of Table II B, application no. 6, and being depicted in the same respective line as said At4g35310, and preferably the activity is increased non-targeted, whereby the respective line discloses in column 7 the fine chemical isoleucine.

[41733] Accordingly, in one embodiment, the molecule which activity is to be increased in the process of the invention is the gene product with an activity as a “calcium-dependent protein kinase”, preferably it is the molecule of section (a) or (b) of this paragraph.

[41734] In particular, it was observed that in plants, especially in Arabidopsis thaliana, increasing or generating the activity of a gene product non-targeted with the activity of a “calcium-dependent protein kinase”, preferably being encoded by a gene comprising the nucleic acid sequence SEQ ID NO. 4348, preferably the coding region thereof, conferred the production of or the increase in isoleucine compared with the wild type control.

[41735] The nucleic acid sequence of At4g35310 from Arabidopsis thaliana, e.g. as shown in the respective line in column 5 of Table I, application no. 6, has been published in F. And the activity of the gene product thereof is the activity of calcium-dependent protein kinase.

[41736] Accordingly, in one embodiment, the process of the present invention for producing leucine in a non-human organism, like a microorganism or a plant or a part thereof, comprises increasing or generating the activity of a gene product with the activity of a gene product conferring the activity of “calcium-dependent protein kinase”, especially from Arabidopsis thaliana or its functional equivalent or its homolog, e.g. the increase of
[41737] (a) a gene product of a gene comprising the nucleic acid molecule as shown in the respective line in column 5 of Table I (whereby the respective line discloses in column 7 the fine chemical leucine), application no. 6, preferably the coding region thereof, or a homolog or a fragment thereof, and being depicted in the same respective line as said At4g35310, or a functional equivalent or a homolog thereof as shown in column 8 of Table I, application no. 6, preferably the coding region thereof, particularly a homolog or functional equivalent as shown in column 8 of Table I B, application no. 6, and being depicted in the same respective line as said At4g35310, and preferably the activity is increased non-targeted, or
[41738] (b) a polypeptide comprising a polypeptide, a consensus sequence or at least a polypeptide motif as shown in the respective line in column 5 of Table II or in column 8 of Table IV, application no. 6, respectively, and being depicted in the same respective line as said At4g35310, or a functional equivalent or a homolog thereof as depicted in column 8 of Table II, application no. 6, preferably a homolog or functional equivalent as depicted in column 8 of Table II B, application no. 6, and being depicted in the same respective line as said At4g35310, and preferably the activity is increased non-targeted, whereby the respective line discloses in column 7 the fine chemical leucine.

[41739] Accordingly, in one embodiment, the molecule which activity is to be increased in the process of the invention is the gene product with an activity as a “calcium-dependent protein kinase”, preferably it is the molecule of section (a) or (b) of this paragraph.

[41740] In particular, it was observed that in plants, especially in Arabidopsis thaliana, increasing or generating the activity of a gene product non-targeted with the activity of a “calcium-dependent protein kinase”, preferably being encoded by a gene comprising the nucleic acid sequence SEQ ID NO. 4348, preferably the coding region thereof, conferred the production of or the increase in leucine compared with the wild type control.

[41741] The nucleic acid sequence of At4g35310 from Arabidopsis thaliana, e.g. as shown in the respective line in column 5 of Table I, application no. 6, has been published in F. And the activity of the gene product thereof is the activity of calcium-dependent protein kinase.

[41742] Accordingly, in one embodiment, the process of the present invention for producing valine in a non-human organism, like a microorganism or a plant or a part thereof, comprises increasing or generating the activity of a gene product with the activity of a gene product conferring the activity of “calcium-dependent protein kinase”, especially from Arabidopsis thaliana or its functional equivalent or its homolog, e.g. the increase of
[41743] (a) a gene product of a gene comprising the nucleic acid molecule as shown in the respective line in column 5 of Table I (whereby the respective line discloses in column 7 the fine chemical valine), application no. 6, preferably the coding region thereof, or a homolog or a fragment thereof, and being depicted in the same respective line as said At4g35310, or a functional equivalent or a homolog thereof as shown in column 8 of Table I, application no. 6, preferably the coding region thereof, particularly a homolog or functional equivalent as shown in column 8 of Table I B, application no. 6, and being depicted in the same respective line as said At4g35310, and preferably the activity is increased non-targeted, or
[41744] (b) a polypeptide comprising a polypeptide, a consensus sequence or at least a polypeptide motif as shown in the respective line in column 5 of Table II or in column 8 of Table IV, application no. 6, respectively, and being depicted in the same respective line as said At4g35310, or a functional equivalent or a homolog thereof as depicted in column 8 of Table II, application no. 6, preferably a homolog or functional equivalent as depicted in column 8 of Table II B, application no. 6, and being depicted in the same respective line as said At4g35310, and preferably the activity is increased non-targeted, whereby the respective line discloses in column 7 the fine chemical valine.

[41745] Accordingly, in one embodiment, the molecule which activity is to be increased in the process of the invention is the gene product with an activity as a “calcium-dependent protein kinase”, preferably it is the molecule of section (a) or (b) of this paragraph.

[41746] In particular, it was observed that in plants, especially in Arabidopsis thaliana, increasing or generating the activity of a gene product non-targeted with the activity of a “calcium-dependent protein kinase”, preferably being encoded by a gene comprising the nucleic acid sequence SEQ ID NO. 4348, preferably the coding region thereof, conferred the production of or the increase in valine compared with the wild type control.

[41747] The nucleic acid sequence of At5g02760 from Arabidopsis thaliana, e.g. as shown in the respective line in column 5 of Table I, application no. 6, has been published in F. And the activity of the gene product thereof is the activity of protein phosphatase.

[41748] Accordingly, in one embodiment, the process of the present invention for producing isoleucine in a non-human organism, like a microorganism or a plant or a part thereof, comprises increasing or generating the activity of a gene product with the activity of a gene product conferring the activity of “protein phosphatase”, especially from Arabidopsis thaliana or its functional equivalent or its homolog, e.g. the increase of
[41749] (a) a gene product of a gene comprising the nucleic acid molecule as shown in the respective line in column 5 of Table I (whereby the respective line discloses in column 7 the fine chemical isoleucine), application no. 6, preferably the coding region thereof, or a homolog or a fragment thereof, and being depicted in the same respective line as said At5g02760, or a functional equivalent or a homolog thereof as shown in column 8 of Table I, application no. 6, preferably the coding region thereof, particularly a homolog or functional equivalent as shown in column 8 of Table I B, application no. 6, and being depicted in the same respective line as said At5g02760, and preferably the activity is increased non-targeted, or
[41750] (b) a polypeptide comprising a polypeptide, a consensus sequence or at least a polypeptide motif as shown in the respective line in column 5 of Table II or in column 8 of Table IV, application no. 6, respectively, and being depicted in the same respective line as said At5g02760, or a functional equivalent or a homolog thereof as depicted in column 8 of Table II, application no. 6, preferably a homolog or functional equivalent as depicted in column 8 of Table II B, application no. 6, and being depicted in the same respective line as said At5g02760, and preferably the activity is increased non-targeted, whereby the respective line discloses in column 7 the fine chemical isoleucine.

[41751] Accordingly, in one embodiment, the molecule which activity is to be increased in the process of the invention is the gene product with an activity as a “protein phosphatase”, preferably it is the molecule of section (a) or (b) of this paragraph.

[41752] In particular, it was observed that in plants, especially in Arabidopsis thaliana, increasing or generating the activity of a gene product non-targeted with the activity of a “protein phosphatase”, preferably being encoded by a gene comprising the nucleic acid sequence SEQ ID NO. 68987, preferably the coding region thereof, conferred the production of or the increase in isoleucine compared with the wild type control.

[41753] The nucleic acid sequence of At5g16650 from Arabidopsis thaliana, e.g. as shown in the respective line in column 5 of Table I, application no. 6, has been published in F. And the activity of the gene product thereof is the activity of At5g16650-protein.

[41754] Accordingly, in one embodiment, the process of the present invention for producing isoleucine in a non-human organism, like a microorganism or a plant or a part thereof, comprises increasing or generating the activity of a gene product with the activity of a gene product conferring the activity of “At5g16650-protein”, especially from Arabidopsis thaliana or its functional equivalent or its homolog, e.g. the increase of
[41755] (a) a gene product of a gene comprising the nucleic acid molecule as shown in the respective line in column 5 of Table I (whereby the respective line discloses in column 7 the fine chemical isoleucine), application no. 6, preferably the coding region thereof, or a homolog or a fragment thereof, and being depicted in the same respective line as said At5g16650, or a functional equivalent or a homolog thereof as shown in column 8 of Table I, application no. 6, preferably the coding region thereof, particularly a homolog or functional equivalent as shown in column 8 of Table I B, application no. 6, and being depicted in the same respective line as said At5g16650, and preferably the activity is increased non-targeted, or
[41756] (b) a polypeptide comprising a polypeptide, a consensus sequence or at least a polypeptide motif as shown in the respective line in column 5 of Table II or in column 8 of Table IV, application no. 6, respectively, and being depicted in the same respective line as said At5g16650, or a functional equivalent or a homolog thereof as depicted in column 8 of Table II, application no. 6, preferably a homolog or functional equivalent as depicted in column 8 of Table II B, application no. 6, and being depicted in the same respective line as said At5g16650, and preferably the activity is increased non-targeted, whereby the respective line discloses in column 7 the fine chemical isoleucine.

[41757] Accordingly, in one embodiment, the molecule which activity is to be increased in the process of the invention is the gene product with an activity as a “At5g16650-protein”, preferably it is the molecule of section (a) or (b) of this paragraph.

[41758] In particular, it was observed that in plants, especially in Arabidopsis thaliana, increasing or generating the activity of a gene product non-targeted with the activity of a “At5g16650-protein”, preferably being encoded by a gene comprising the nucleic acid sequence SEQ ID NO. 25283, preferably the coding region thereof, conferred the production of or the increase in isoleucine compared with the wild type control.

[41759] The nucleic acid sequence of At5g16650 from Arabidopsis thaliana, e.g. as shown in the respective line in column 5 of Table I, application no. 6, has been published in F. And the activity of the gene product thereof is the activity of At5g16650-protein.

[41760] Accordingly, in one embodiment, the process of the present invention for producing valine in a non-human organism, like a microorganism or a plant or a part thereof, comprises increasing or generating the activity of a gene product with the activity of a gene product conferring the activity of “At5g16650-protein”, especially from Arabidopsis thaliana or its functional equivalent or its homolog, e.g. the increase of
[41761] (a) a gene product of a gene comprising the nucleic acid molecule as shown in the respective line in column 5 of Table I (whereby the respective line discloses in column 7 the fine chemical valine), application no. 6, preferably the coding region thereof, or a homolog or a fragment thereof, and being depicted in the same respective line as said At5g16650, or a functional equivalent or a homolog thereof as shown in column 8 of Table I, application no. 6, preferably the coding region thereof, particularly a homolog or functional equivalent as shown in column 8 of Table I B, application no. 6, and being depicted in the same respective line as said At5g16650, and preferably the activity is increased non-targeted, or
[41762] (b) a polypeptide comprising a polypeptide, a consensus sequence or at least a polypeptide motif as shown in the respective line in column 5 of Table II or in column 8 of Table IV, application no. 6, respectively, and being depicted in the same respective line as said At5g16650, or a functional equivalent or a homolog thereof as depicted in column 8 of Table II, application no. 6, preferably a homolog or functional equivalent as depicted in column 8 of Table II B, application no. 6, and being depicted in the same respective line as said At5g16650, and preferably the activity is increased non-targeted, whereby the respective line discloses in column 7 the fine chemical valine.

[41763] Accordingly, in one embodiment, the molecule which activity is to be increased in the process of the invention is the gene product with an activity as a “At5g16650-protein”, preferably it is the molecule of section (a) or (b) of this paragraph.

[41764] In particular, it was observed that in plants, especially in Arabidopsis thaliana, increasing or generating the activity of a gene product non-targeted with the activity of a “At5g16650-protein”, preferably being encoded by a gene comprising the nucleic acid sequence SEQ ID NO. 25283, preferably the coding region thereof, conferred the production of or the increase in valine compared with the wild type control.

[41765] The nucleic acid sequence of At5g18600 from Arabidopsis thaliana, e.g. as shown in the respective line in column 5 of Table I, application no. 6, has been published in F. And the activity of the gene product thereof is the activity of monothiol glutaredoxin.

[41766] Accordingly, in one embodiment, the process of the present invention for producing valine in a non-human organism, like a microorganism or a plant or a part thereof, comprises increasing or generating the activity of a gene product with the activity of a gene product conferring the activity of “monothiol glutaredoxin”, especially from Arabidopsis thaliana or its functional equivalent or its homolog, e.g. the increase of
[41767] (a) a gene product of a gene comprising the nucleic acid molecule as shown in the respective line in column 5 of Table I (whereby the respective line discloses in column 7 the fine chemical valine), application no. 6, preferably the coding region thereof, or a homolog or a fragment thereof, and being depicted in the same respective line as said At5g18600, or a functional equivalent or a homolog thereof as shown in column 8 of Table I, application no. 6, preferably the coding region thereof, particularly a homolog or functional equivalent as shown in column 8 of Table I B, application no. 6, and being depicted in the same respective line as said At5g18600, and preferably the activity is increased non-targeted, or
[41768] (b) a polypeptide comprising a polypeptide, a consensus sequence or at least a polypeptide motif as shown in the respective line in column 5 of Table II or in column 8 of Table IV, application no. 6, respectively, and being depicted in the same respective line as said At5g18600, or a functional equivalent or a homolog thereof as depicted in column 8 of Table II, application no. 6, preferably a homolog or functional equivalent as depicted in column 8 of Table II B, application no. 6, and being depicted in the same respective line as said At5g18600, and preferably the activity is increased non-targeted, whereby the respective line discloses in column 7 the fine chemical valine.

[41769] Accordingly, in one embodiment, the molecule which activity is to be increased in the process of the invention is the gene product with an activity as a “monothiol glutaredoxin”, preferably it is the molecule of section (a) or (b) of this paragraph.

[41770] In particular, it was observed that in plants, especially in Arabidopsis thaliana, increasing or generating the activity of a gene product non-targeted with the activity of a “monothiol glutaredoxin”, preferably being encoded by a gene comprising the nucleic acid sequence SEQ ID NO. 4904, preferably the coding region thereof, conferred the production of or the increase in valine compared with the wild type control.

[41771] The nucleic acid sequence of At5g39950 from Arabidopsis thaliana, e.g. as shown in the respective line in column 5 of Table I, application no. 6, has been published in F. And the activity of the gene product thereof is the activity of thioredoxin.

[41772] Accordingly, in one embodiment, the process of the present invention for producing leucine in a non-human organism, like a microorganism or a plant or a part thereof, comprises increasing or generating the activity of a gene product with the activity of a gene product conferring the activity of “thioredoxin”, especially from Arabidopsis thaliana or its functional equivalent or its homolog, e.g. the increase of
[41773] (a) a gene product of a gene comprising the nucleic acid molecule as shown in the respective line in column 5 of Table I (whereby the respective line discloses in column 7 the fine chemical leucine), application no. 6, preferably the coding region thereof, or a homolog or a fragment thereof, and being depicted in the same respective line as said At5g39950, or a functional equivalent or a homolog thereof as shown in column 8 of Table I, application no. 6, preferably the coding region thereof, particularly a homolog or functional equivalent as shown in column 8 of Table I B, application no. 6, and being depicted in the same respective line as said At5g39950, and preferably the activity is increased non-targeted, or
[41774] (b) a polypeptide comprising a polypeptide, a consensus sequence or at least a polypeptide motif as shown in the respective line in column 5 of Table II or in column 8 of Table IV, application no. 6, respectively, and being depicted in the same respective line as said At5g39950, or a functional equivalent or a homolog thereof as depicted in column 8 of Table II, application no. 6, preferably a homolog or functional equivalent as depicted in column 8 of Table II B, application no. 6, and being depicted in the same respective line as said At5g39950, and preferably the activity is increased non-targeted, whereby the respective line discloses in column 7 the fine chemical leucine.

[41775] Accordingly, in one embodiment, the molecule which activity is to be increased in the process of the invention is the gene product with an activity as a “thioredoxin”, preferably it is the molecule of section (a) or (b) of this paragraph.

[41776] In particular, it was observed that in plants, especially in Arabidopsis thaliana, increasing or generating the activity of a gene product non-targeted with the activity of a “thioredoxin”, preferably being encoded by a gene comprising the nucleic acid sequence SEQ ID NO. 69574, preferably the coding region thereof, conferred the production of or the increase in leucine compared with the wild type control.

[41777] The nucleic acid sequence of At5g39950 from Arabidopsis thaliana, e.g. as shown in the respective line in column 5 of Table I, application no. 6, has been published in F. And the activity of the gene product thereof is the activity of thioredoxin.

[41778] Accordingly, in one embodiment, the process of the present invention for producing valine in a non-human organism, like a microorganism or a plant or a part thereof, comprises increasing or generating the activity of a gene product with the activity of a gene product conferring the activity of “thioredoxin”, especially from Arabidopsis thaliana or its functional equivalent or its homolog, e.g. the increase of
[41779] (a) a gene product of a gene comprising the nucleic acid molecule as shown in the respective line in column 5 of Table I (whereby the respective line discloses in column 7 the fine chemical valine), application no. 6, preferably the coding region thereof, or a homolog or a fragment thereof, and being depicted in the same respective line as said At5g39950, or a functional equivalent or a homolog thereof as shown in column 8 of Table I, application no. 6, preferably the coding region thereof, particularly a homolog or functional equivalent as shown in column 8 of Table I B, application no. 6, and being depicted in the same respective line as said At5g39950, and preferably the activity is increased non-targeted, or
[41780] (b) a polypeptide comprising a polypeptide, a consensus sequence or at least a polypeptide motif as shown in the respective line in column 5 of Table II or in column 8 of Table IV, application no. 6, respectively, and being depicted in the same respective line as said At5g39950, or a functional equivalent or a homolog thereof as depicted in column 8 of Table II, application no. 6, preferably a homolog or functional equivalent as depicted in column 8 of Table II B, application no. 6, and being depicted in the same respective line as said At5g39950, and preferably the activity is increased non-targeted, whereby the respective line discloses in column 7 the fine chemical valine.

[41781] Accordingly, in one embodiment, the molecule which activity is to be increased in the process of the invention is the gene product with an activity as a “thioredoxin”, preferably it is the molecule of section (a) or (b) of this paragraph.

[41782] In particular, it was observed that in plants, especially in Arabidopsis thaliana, increasing or generating the activity of a gene product non-targeted with the activity of a “thioredoxin”, preferably being encoded by a gene comprising the nucleic acid sequence SEQ ID NO. 69574, preferably the coding region thereof, conferred the production of or the increase in valine compared with the wild type control.

[41783] The nucleic acid sequence of At5g45060 from Arabidopsis thaliana, e.g. as shown in the respective line in column 5 of Table I, application no. 6, has been published in F. And the activity of the gene product thereof is the activity of disease resistance protein.

[41784] Accordingly, in one embodiment, the process of the present invention for producing valine in a non-human organism, like a microorganism or a plant or a part thereof, comprises increasing or generating the activity of a gene product with the activity of a gene product conferring the activity of “disease resistance protein”, especially from Arabidopsis thaliana or its functional equivalent or its homolog, e.g. the increase of
[41785] (a) a gene product of a gene comprising the nucleic acid molecule as shown in the respective line in column 5 of Table I (whereby the respective line discloses in column 7 the fine chemical valine), application no. 6, preferably the coding region thereof, or a homolog or a fragment thereof, and being depicted in the same respective line as said At5g45060, or a functional equivalent or a homolog thereof as shown in column 8 of Table I, application no. 6, preferably the coding region thereof, particularly a homolog or functional equivalent as shown in column 8 of Table I B, application no. 6, and being depicted in the same respective line as said At5g45060, and preferably the activity is increased non-targeted, or
[41786] (b) a polypeptide comprising a polypeptide, a consensus sequence or at least a polypeptide motif as shown in the respective line in column 5 of Table II or in column 8 of Table IV, application no. 6, respectively, and being depicted in the same respective line as said At5g45060, or a functional equivalent or a homolog thereof as depicted in column 8 of Table II, application no. 6, preferably a homolog or functional equivalent as depicted in column 8 of Table II B, application no. 6, and being depicted in the same respective line as said At5g45060, and preferably the activity is increased non-targeted, whereby the respective line discloses in column 7 the fine chemical valine.

[41787] Accordingly, in one embodiment, the molecule which activity is to be increased in the process of the invention is the gene product with an activity as a “disease resistance protein”, preferably it is the molecule of section (a) or (b) of this paragraph.

[41788] In particular, it was observed that in plants, especially in Arabidopsis thaliana, increasing or generating the activity of a gene product non-targeted with the activity of a “disease resistance protein”, preferably being encoded by a gene comprising the nucleic acid sequence SEQ ID NO. 102223, preferably the coding region thereof, conferred the production of or the increase in valine compared with the wild type control.

[41789] The nucleic acid sequence of At5g56350 from Arabidopsis thaliana, e.g. as shown in the respective line in column 5 of Table I, application no. 6, has been published in F. And the activity of the gene product thereof is the activity of pyruvate kinase.

[41790] Accordingly, in one embodiment, the process of the present invention for producing isoleucine in a non-human organism, like a microorganism or a plant or a part thereof, comprises increasing or generating the activity of a gene product with the activity of a gene product conferring the activity of “pyruvate kinase”, especially from Arabidopsis thaliana or its functional equivalent or its homolog, e.g. the increase of
[41791] (a) a gene product of a gene comprising the nucleic acid molecule as shown in the respective line in column 5 of Table I (whereby the respective line discloses in column 7 the fine chemical isoleucine), application no. 6, preferably the coding region thereof, or a homolog or a fragment thereof, and being depicted in the same respective line as said At5g56350, or a functional equivalent or a homolog thereof as shown in column 8 of Table I, application no. 6, preferably the coding region thereof, particularly a homolog or functional equivalent as shown in column 8 of Table I B, application no. 6, and being depicted in the same respective line as said At5g56350, and preferably the activity is increased plastidic, or
[41792] (b) a polypeptide comprising a polypeptide, a consensus sequence or at least a polypeptide motif as shown in the respective line in column 5 of Table II or in column 8 of Table IV, application no. 6, respectively, and being depicted in the same respective line as said At5g56350, or a functional equivalent or a homolog thereof as depicted in column 8 of Table II, application no. 6, preferably a homolog or functional equivalent as depicted in column 8 of Table II B, application no. 6, and being depicted in the same respective line as said At5g56350, and preferably the activity is increased plastidic, whereby the respective line discloses in column 7 the fine chemical isoleucine.

[41793] Accordingly, in one embodiment, the molecule which activity is to be increased in the process of the invention is the gene product with an activity as a “pyruvate kinase”, preferably it is the molecule of section (a) or (b) of this paragraph.

[41794] In particular, it was observed that in plants, especially in Arabidopsis thaliana, increasing or generating the activity of a gene product plastidic with the activity of a “pyruvate kinase”, preferably being encoded by a gene comprising the nucleic acid sequence SEQ ID NO. 102373, preferably the coding region thereof, conferred the production of or the increase in isoleucine compared with the wild type control.

[41795] The nucleic acid sequence of At5g56350 from Arabidopsis thaliana, e.g. as shown in the respective line in column 5 of Table I, application no. 6, has been published in F. And the activity of the gene product thereof is the activity of pyruvate kinase.

[41796] Accordingly, in one embodiment, the process of the present invention for producing leucine in a non-human organism, like a microorganism or a plant or a part thereof, comprises increasing or generating the activity of a gene product with the activity of a gene product conferring the activity of “pyruvate kinase”, especially from Arabidopsis thaliana or its functional equivalent or its homolog, e.g. the increase of
[41797] (a) a gene product of a gene comprising the nucleic acid molecule as shown in the respective line in column 5 of Table I (whereby the respective line discloses in column 7 the fine chemical leucine), application no. 6, preferably the coding region thereof, or a homolog or a fragment thereof, and being depicted in the same respective line as said At5g56350, or a functional equivalent or a homolog thereof as shown in column 8 of Table I, application no. 6, preferably the coding region thereof, particularly a homolog or functional equivalent as shown in column 8 of Table I B, application no. 6, and being depicted in the same respective line as said At5g56350, and preferably the activity is increased plastidic, or
[41798] (b) a polypeptide comprising a polypeptide, a consensus sequence or at least a polypeptide motif as shown in the respective line in column 5 of Table II or in column 8 of Table IV, application no. 6, respectively, and being depicted in the same respective line as said At5g56350, or a functional equivalent or a homolog thereof as depicted in column 8 of Table II, application no. 6, preferably a homolog or functional equivalent as depicted in column 8 of Table II B, application no. 6, and being depicted in the same respective line as said At5g56350, and preferably the activity is increased plastidic, whereby the respective line discloses in column 7 the fine chemical leucine.

[41799] Accordingly, in one embodiment, the molecule which activity is to be increased in the process of the invention is the gene product with an activity as a “pyruvate kinase”, preferably it is the molecule of section (a) or (b) of this paragraph.

[41800] In particular, it was observed that in plants, especially in Arabidopsis thaliana, increasing or generating the activity of a gene product plastidic with the activity of a “pyruvate kinase”, preferably being encoded by a gene comprising the nucleic acid sequence SEQ ID NO. 102373, preferably the coding region thereof, conferred the production of or the increase in leucine compared with the wild type control.

[41801] The nucleic acid sequence of At5g60110 from Arabidopsis thaliana, e.g. as shown in the respective line in column 5 of Table I, application no. 6, has been published in F. And the activity of the gene product thereof is the activity of RNA-binding protein.

[41802] Accordingly, in one embodiment, the process of the present invention for producing valine in a non-human organism, like a microorganism or a plant or a part thereof, comprises increasing or generating the activity of a gene product with the activity of a gene product conferring the activity of “RNA-binding protein”, especially from Arabidopsis thaliana or its functional equivalent or its homolog, e.g. the increase of
[41803] (a) a gene product of a gene comprising the nucleic acid molecule as shown in the respective line in column 5 of Table I (whereby the respective line discloses in column 7 the fine chemical valine), application no. 6, preferably the coding region thereof, or a homolog or a fragment thereof, and being depicted in the same respective line as said At5g60110, or a functional equivalent or a homolog thereof as shown in column 8 of Table I, application no. 6, preferably the coding region thereof, particularly a homolog or functional equivalent as shown in column 8 of Table I B, application no. 6, and being depicted in the same respective line as said At5g60110, and preferably the activity is increased non-targeted, or
[41804] (b) a polypeptide comprising a polypeptide, a consensus sequence or at least a polypeptide motif as shown in the respective line in column 5 of Table II or in column 8 of Table IV, application no. 6, respectively, and being depicted in the same respective line as said At5g60110, or a functional equivalent or a homolog thereof as depicted in column 8 of Table II, application no. 6, preferably a homolog or functional equivalent as depicted in column 8 of Table II B, application no. 6, and being depicted in the same respective line as said At5g60110, and preferably the activity is increased non-targeted, whereby the respective line discloses in column 7 the fine chemical valine.

[41805] Accordingly, in one embodiment, the molecule which activity is to be increased in the process of the invention is the gene product with an activity as a “RNA-binding protein”, preferably it is the molecule of section (a) or (b) of this paragraph.

[41806] In particular, it was observed that in plants, especially in Arabidopsis thaliana, increasing or generating the activity of a gene product non-targeted with the activity of a “RNA-binding protein”, preferably being encoded by a gene comprising the nucleic acid sequence SEQ ID NO. 70006, preferably the coding region thereof, conferred the production of or the increase in valine compared with the wild type control.

[41807] The nucleic acid sequence of At5g60440 from Arabidopsis thaliana, e.g. as shown in the respective line in column 5 of Table I, application no. 6, has been published in F. And the activity of the gene product thereof is the activity of MADS-box transcription factor.

[41808] Accordingly, in one embodiment, the process of the present invention for producing isoleucine in a non-human organism, like a microorganism or a plant or a part thereof, comprises increasing or generating the activity of a gene product with the activity of a gene product conferring the activity of “MADS-box transcription factor”, especially from Arabidopsis thaliana or its functional equivalent or its homolog, e.g. the increase of
[41809] (a) a gene product of a gene comprising the nucleic acid molecule as shown in the respective line in column 5 of Table I (whereby the respective line discloses in column 7 the fine chemical isoleucine), application no. 6, preferably the coding region thereof, or a homolog or a fragment thereof, and being depicted in the same respective line as said At5g60440, or a functional equivalent or a homolog thereof as shown in column 8 of Table I, application no. 6, preferably the coding region thereof, particularly a homolog or functional equivalent as shown in column 8 of Table I B, application no. 6, and being depicted in the same respective line as said At5g60440, and preferably the activity is increased non-targeted, or
[41810] (b) a polypeptide comprising a polypeptide, a consensus sequence or at least a polypeptide motif as shown in the respective line in column 5 of Table II or in column 8 of Table IV, application no. 6, respectively, and being depicted in the same respective line as said At5g60440, or a functional equivalent or a homolog thereof as depicted in column 8 of Table II, application no. 6, preferably a homolog or functional equivalent as depicted in column 8 of Table II B, application no. 6, and being depicted in the same respective line as said At5g60440, and preferably the activity is increased non-targeted, whereby the respective line discloses in column 7 the fine chemical isoleucine.

[41811] Accordingly, in one embodiment, the molecule which activity is to be increased in the process of the invention is the gene product with an activity as a “MADS-box transcription factor”, preferably it is the molecule of section (a) or (b) of this paragraph.

[41812] In particular, it was observed that in plants, especially in Arabidopsis thaliana, increasing or generating the activity of a gene product non-targeted with the activity of a “MADS-box transcription factor”, preferably being encoded by a gene comprising the nucleic acid sequence SEQ ID NO. 102899, preferably the coding region thereof, conferred the production of or the increase in isoleucine compared with the wild type control.

[41813] The nucleic acid sequence of At5g60440 from Arabidopsis thaliana, e.g. as shown in the respective line in column 5 of Table I, application no. 6, has been published in F. And the activity of the gene product thereof is the activity of MADS-box transcription factor.

[41814] Accordingly, in one embodiment, the process of the present invention for producing leucine in a non-human organism, like a microorganism or a plant or a part thereof, comprises increasing or generating the activity of a gene product with the activity of a gene product conferring the activity of “MADS-box transcription factor”, especially from Arabidopsis thaliana or its functional equivalent or its homolog, e.g. the increase of
[41815] (a) a gene product of a gene comprising the nucleic acid molecule as shown in the respective line in column 5 of Table I (whereby the respective line discloses in column 7 the fine chemical leucine), application no. 6, preferably the coding region thereof, or a homolog or a fragment thereof, and being depicted in the same respective line as said At5g60440, or a functional equivalent or a homolog thereof as shown in column 8 of Table I, application no. 6, preferably the coding region thereof, particularly a homolog or functional equivalent as shown in column 8 of Table I B, application no. 6, and being depicted in the same respective line as said At5g60440, and preferably the activity is increased non-targeted, or
[41816] (b) a polypeptide comprising a polypeptide, a consensus sequence or at least a polypeptide motif as shown in the respective line in column 5 of Table II or in column 8 of Table IV, application no. 6, respectively, and being depicted in the same respective line as said At5g60440, or a functional equivalent or a homolog thereof as depicted in column 8 of Table II, application no. 6, preferably a homolog or functional equivalent as depicted in column 8 of Table II B, application no. 6, and being depicted in the same respective line as said At5g60440, and preferably the activity is increased non-targeted, whereby the respective line discloses in column 7 the fine chemical leucine.

[41817] Accordingly, in one embodiment, the molecule which activity is to be increased in the process of the invention is the gene product with an activity as a “MADS-box transcription factor”, preferably it is the molecule of section (a) or (b) of this paragraph.

[41818] In particular, it was observed that in plants, especially in Arabidopsis thaliana, increasing or generating the activity of a gene product non-targeted with the activity of a “MADS-box transcription factor”, preferably being encoded by a gene comprising the nucleic acid sequence SEQ ID NO. 102899, preferably the coding region thereof, conferred the production of or the increase in leucine compared with the wild type control.

[41819] The nucleic acid sequence of At5g63680 from Arabidopsis thaliana, e.g. as shown in the respective line in column 5 of Table I, application no. 6, has been published in F. And the activity of the gene product thereof is the activity of pyruvate kinase.

[41820] Accordingly, in one embodiment, the process of the present invention for producing isoleucine in a non-human organism, like a microorganism or a plant or a part thereof, comprises increasing or generating the activity of a gene product with the activity of a gene product conferring the activity of “pyruvate kinase”, especially from Arabidopsis thaliana or its functional equivalent or its homolog, e.g. the increase of
[41821] (a) a gene product of a gene comprising the nucleic acid molecule as shown in the respective line in column 5 of Table I (whereby the respective line discloses in column 7 the fine chemical isoleucine), application no. 6, preferably the coding region thereof, or a homolog or a fragment thereof, and being depicted in the same respective line as said At5g63680, or a functional equivalent or a homolog thereof as shown in column 8 of Table I, application no. 6, preferably the coding region thereof, particularly a homolog or functional equivalent as shown in column 8 of Table I B, application no. 6, and being depicted in the same respective line as said At5g63680, and preferably the activity is increased plastidic, or
[41822] (b) a polypeptide comprising a polypeptide, a consensus sequence or at least a polypeptide motif as shown in the respective line in column 5 of Table II or in column 8 of Table IV, application no. 6, respectively, and being depicted in the same respective line as said At5g63680, or a functional equivalent or a homolog thereof as depicted in column 8 of Table II, application no. 6, preferably a homolog or functional equivalent as depicted in column 8 of Table II B, application no. 6, and being depicted in the same respective line as said At5g63680, and preferably the activity is increased plastidic, whereby the respective line discloses in column 7 the fine chemical isoleucine.

[41823] Accordingly, in one embodiment, the molecule which activity is to be increased in the process of the invention is the gene product with an activity as a “pyruvate kinase”, preferably it is the molecule of section (a) or (b) of this paragraph.

[41824] In particular, it was observed that in plants, especially in Arabidopsis thaliana, increasing or generating the activity of a gene product plastidic with the activity of a “pyruvate kinase”, preferably being encoded by a gene comprising the nucleic acid sequence SEQ ID NO. 70038, preferably the coding region thereof, conferred the production of or the increase in isoleucine compared with the wild type control.

[41825] The nucleic acid sequence of At5g63680 from Arabidopsis thaliana, e.g. as shown in the respective line in column 5 of Table I, application no. 6, has been published in F. And the activity of the gene product thereof is the activity of pyruvate kinase.

[41826] Accordingly, in one embodiment, the process of the present invention for producing leucine in a non-human organism, like a microorganism or a plant or a part thereof, comprises increasing or generating the activity of a gene product with the activity of a gene product conferring the activity of “pyruvate kinase”, especially from Arabidopsis thaliana or its functional equivalent or its homolog, e.g. the increase of
[41827] (a) a gene product of a gene comprising the nucleic acid molecule as shown in the respective line in column 5 of Table I (whereby the respective line discloses in column 7 the fine chemical leucine), application no. 6, preferably the coding region thereof, or a homolog or a fragment thereof, and being depicted in the same respective line as said At5g63680, or a functional equivalent or a homolog thereof as shown in column 8 of Table I, application no. 6, preferably the coding region thereof, particularly a homolog or functional equivalent as shown in column 8 of Table I B, application no. 6, and being depicted in the same respective line as said At5g63680, and preferably the activity is increased plastidic, or
[41828] (b) a polypeptide comprising a polypeptide, a consensus sequence or at least a polypeptide motif as shown in the respective line in column 5 of Table II or in column 8 of Table IV, application no. 6, respectively, and being depicted in the same respective line as said At5g63680, or a functional equivalent or a homolog thereof as depicted in column 8 of Table II, application no. 6, preferably a homolog or functional equivalent as depicted in column 8 of Table II B, application no. 6, and being depicted in the same respective line as said At5g63680, and preferably the activity is increased plastidic, whereby the respective line discloses in column 7 the fine chemical leucine.

[41829] Accordingly, in one embodiment, the molecule which activity is to be increased in the process of the invention is the gene product with an activity as a “pyruvate kinase”, preferably it is the molecule of section (a) or (b) of this paragraph.

[41830] In particular, it was observed that in plants, especially in Arabidopsis thaliana, increasing or generating the activity of a gene product plastidic with the activity of a “pyruvate kinase”, preferably being encoded by a gene comprising the nucleic acid sequence SEQ ID NO. 70038, preferably the coding region thereof, conferred the production of or the increase in leucine compared with the wild type control.

[41831] The nucleic acid sequence of At5g63680 from Arabidopsis thaliana, e.g. as shown in the respective line in column 5 of Table I, application no. 6, has been published in F. And the activity of the gene product thereof is the activity of pyruvate kinase.

[41832] Accordingly, in one embodiment, the process of the present invention for producing valine in a non-human organism, like a microorganism or a plant or a part thereof, comprises increasing or generating the activity of a gene product with the activity of a gene product conferring the activity of “pyruvate kinase”, especially from Arabidopsis thaliana or its functional equivalent or its homolog, e.g. the increase of
[41833] (a) a gene product of a gene comprising the nucleic acid molecule as shown in the respective line in column 5 of Table I (whereby the respective line discloses in column 7 the fine chemical valine), application no. 6, preferably the coding region thereof, or a homolog or a fragment thereof, and being depicted in the same respective line as said At5g63680, or a functional equivalent or a homolog thereof as shown in column 8 of Table I, application no. 6, preferably the coding region thereof, particularly a homolog or functional equivalent as shown in column 8 of Table I B, application no. 6, and being depicted in the same respective line as said At5g63680, and preferably the activity is increased plastidic, or
[41834] (b) a polypeptide comprising a polypeptide, a consensus sequence or at least a polypeptide motif as shown in the respective line in column 5 of Table II or in column 8 of Table IV, application no. 6, respectively, and being depicted in the same respective line as said At5g63680, or a functional equivalent or a homolog thereof as depicted in column 8 of Table II, application no. 6, preferably a homolog or functional equivalent as depicted in column 8 of Table II B, application no. 6, and being depicted in the same respective line as said At5g63680, and preferably the activity is increased plastidic, whereby the respective line discloses in column 7 the fine chemical valine.

[41835] Accordingly, in one embodiment, the molecule which activity is to be increased in the process of the invention is the gene product with an activity as a “pyruvate kinase”, preferably it is the molecule of section (a) or (b) of this paragraph.

[41836] In particular, it was observed that in plants, especially in Arabidopsis thaliana, increasing or generating the activity of a gene product plastidic with the activity of a “pyruvate kinase”, preferably being encoded by a gene comprising the nucleic acid sequence SEQ ID NO. 70038, preferably the coding region thereof, conferred the production of or the increase in valine compared with the wild type control.

[41837] The nucleic acid sequence of At5g64920 from Arabidopsis thaliana, e.g. as shown in the respective line in column 5 of Table I, application no. 6, has been published in F. And the activity of the gene product thereof is the activity of zinc finger protein.

[41838] Accordingly, in one embodiment, the process of the present invention for producing valine in a non-human organism, like a microorganism or a plant or a part thereof, comprises increasing or generating the activity of a gene product with the activity of a gene product conferring the activity of “zinc finger protein”, especially from Arabidopsis thaliana or its functional equivalent or its homolog, e.g. the increase of
[41839] (a) a gene product of a gene comprising the nucleic acid molecule as shown in the respective line in column 5 of Table I (whereby the respective line discloses in column 7 the fine chemical valine), application no. 6, preferably the coding region thereof, or a homolog or a fragment thereof, and being depicted in the same respective line as said At5g64920, or a functional equivalent or a homolog thereof as shown in column 8 of Table I, application no. 6, preferably the coding region thereof, particularly a homolog or functional equivalent as shown in column 8 of Table I B, application no. 6, and being depicted in the same respective line as said At5g64920, and preferably the activity is increased non-targeted, or
[41840] (b) a polypeptide comprising a polypeptide, a consensus sequence or at least a polypeptide motif as shown in the respective line in column 5 of Table II or in column 8 of Table IV, application no. 6, respectively, and being depicted in the same respective line as said At5g64920, or a functional equivalent or a homolog thereof as depicted in column 8 of Table II, application no. 6, preferably a homolog or functional equivalent as depicted in column 8 of Table II B, application no. 6, and being depicted in the same respective line as said At5g64920, and preferably the activity is increased non-targeted, whereby the respective line discloses in column 7 the fine chemical valine.

[41841] Accordingly, in one embodiment, the molecule which activity is to be increased in the process of the invention is the gene product with an activity as a “zinc finger protein”, preferably it is the molecule of section (a) or (b) of this paragraph.

[41842] In particular, it was observed that in plants, especially in Arabidopsis thaliana, increasing or generating the activity of a gene product non-targeted with the activity of a “zinc finger protein”, preferably being encoded by a gene comprising the nucleic acid sequence SEQ ID NO. 5493, preferably the coding region thereof, conferred the production of or the increase in valine compared with the wild type control.

[41843] The nucleic acid sequence of AvinDRAFT_{—}1495 from Azotobacter vinelandii, e.g. as shown in the respective line in column 5 of Table I, application no. 6, has been published in D. And the activity of the gene product thereof is the activity of malic enzyme.

[41844] Accordingly, in one embodiment, the process of the present invention for producing isoleucine in a non-human organism, like a microorganism or a plant or a part thereof, comprises increasing or generating the activity of a gene product with the activity of a gene product conferring the activity of “malic enzyme”, especially from Azotobacter vinelandii or its functional equivalent or its homolog, e.g. the increase of
[41845] (a) a gene product of a gene comprising the nucleic acid molecule as shown in the respective line in column 5 of Table I (whereby the respective line discloses in column 7 the fine chemical isoleucine), application no. 6, preferably the coding region thereof, or a homolog or a fragment thereof, and being depicted in the same respective line as said AvinDRAFT_{—}1495, or a functional equivalent or a homolog thereof as shown in column 8 of Table I, application no. 6, preferably the coding region thereof, particularly a homolog or functional equivalent as shown in column 8 of Table I B, application no. 6, and being depicted in the same respective line as said AvinDRAFT_{—}1495, and preferably the activity is increased non-targeted, or
[41846] (b) a polypeptide comprising a polypeptide, a consensus sequence or at least a polypeptide motif as shown in the respective line in column 5 of Table II or in column 8 of Table IV, application no. 6, respectively, and being depicted in the same respective line as said AvinDRAFT_{—}1495, or a functional equivalent or a homolog thereof as depicted in column 8 of Table II, application no. 6, preferably a homolog or functional equivalent as depicted in column 8 of Table II B, application no. 6, and being depicted in the same respective line as said AvinDRAFT_{—}1495, and preferably the activity is increased non-targeted, whereby the respective line discloses in column 7 the fine chemical isoleucine.

[41847] Accordingly, in one embodiment, the molecule which activity is to be increased in the process of the invention is the gene product with an activity as a “malic enzyme”, preferably it is the molecule of section (a) or (b) of this paragraph.

[41848] In particular, it was observed that in plants, especially in Arabidopsis thaliana, increasing or generating the activity of a gene product non-targeted with the activity of a “malic enzyme”, preferably being encoded by a gene comprising the nucleic acid sequence SEQ ID NO. 5557, preferably the coding region thereof, conferred the production of or the increase in isoleucine compared with the wild type control.

[41849] The nucleic acid sequence of AvinDRAFT_{—}1495 from Azotobacter vinelandii, e.g. as shown in the respective line in column 5 of Table I, application no. 6, has been published in D. And the activity of the gene product thereof is the activity of malic enzyme.

[41850] Accordingly, in one embodiment, the process of the present invention for producing leucine in a non-human organism, like a microorganism or a plant or a part thereof, comprises increasing or generating the activity of a gene product with the activity of a gene product conferring the activity of “malic enzyme”, especially from Azotobacter vinelandii or its functional equivalent or its homolog, e.g. the increase of
[41851] (a) a gene product of a gene comprising the nucleic acid molecule as shown in the respective line in column 5 of Table I (whereby the respective line discloses in column 7 the fine chemical leucine), application no. 6, preferably the coding region thereof, or a homolog or a fragment thereof, and being depicted in the same respective line as said AvinDRAFT_{—}1495, or a functional equivalent or a homolog thereof as shown in column 8 of Table I, application no. 6, preferably the coding region thereof, particularly a homolog or functional equivalent as shown in column 8 of Table I B, application no. 6, and being depicted in the same respective line as said AvinDRAFT_{—}1495, and preferably the activity is increased non-targeted, or
[41852] (b) a polypeptide comprising a polypeptide, a consensus sequence or at least a polypeptide motif as shown in the respective line in column 5 of Table II or in column 8 of Table IV, application no. 6, respectively, and being depicted in the same respective line as said AvinDRAFT_{—}1495, or a functional equivalent or a homolog thereof as depicted in column 8 of Table II, application no. 6, preferably a homolog or functional equivalent as depicted in column 8 of Table II B, application no. 6, and being depicted in the same respective line as said AvinDRAFT_{—}1495, and preferably the activity is increased non-targeted, whereby the respective line discloses in column 7 the fine chemical leucine.

[41853] Accordingly, in one embodiment, the molecule which activity is to be increased in the process of the invention is the gene product with an activity as a “malic enzyme”, preferably it is the molecule of section (a) or (b) of this paragraph.

[41854] In particular, it was observed that in plants, especially in Arabidopsis thaliana, increasing or generating the activity of a gene product non-targeted with the activity of a “malic enzyme”, preferably being encoded by a gene comprising the nucleic acid sequence SEQ ID NO. 5557, preferably the coding region thereof, conferred the production of or the increase in leucine compared with the wild type control.

[41855] The nucleic acid sequence of AvinDRAFT_{—}1495 from Azotobacter vinelandii, e.g. as shown in the respective line in column 5 of Table I, application no. 6, has been published in D. And the activity of the gene product thereof is the activity of malic enzyme.

[41856] Accordingly, in one embodiment, the process of the present invention for producing valine in a non-human organism, like a microorganism or a plant or a part thereof, comprises increasing or generating the activity of a gene product with the activity of a gene product conferring the activity of “malic enzyme”, especially from Azotobacter vinelandii or its functional equivalent or its homolog, e.g. the increase of
[41857] (a) a gene product of a gene comprising the nucleic acid molecule as shown in the respective line in column 5 of Table I (whereby the respective line discloses in column 7 the fine chemical valine), application no. 6, preferably the coding region thereof, or a homolog or a fragment thereof, and being depicted in the same respective line as said AvinDRAFT_{—}1495, or a functional equivalent or a homolog thereof as shown in column 8 of Table I, application no. 6, preferably the coding region thereof, particularly a homolog or functional equivalent as shown in column 8 of Table I B, application no. 6, and being depicted in the same respective line as said AvinDRAFT_{—}1495, and preferably the activity is increased non-targeted, or
[41858] (b) a polypeptide comprising a polypeptide, a consensus sequence or at least a polypeptide motif as shown in the respective line in column 5 of Table II or in column 8 of Table IV, application no. 6, respectively, and being depicted in the same respective line as said AvinDRAFT_{—}1495, or a functional equivalent or a homolog thereof as depicted in column 8 of Table II, application no. 6, preferably a homolog or functional equivalent as depicted in column 8 of Table II B, application no. 6, and being depicted in the same respective line as said AvinDRAFT_{—}1495, and preferably the activity is increased non-targeted, whereby the respective line discloses in column 7 the fine chemical valine.

[41859] Accordingly, in one embodiment, the molecule which activity is to be increased in the process of the invention is the gene product with an activity as a “malic enzyme”, preferably it is the molecule of section (a) or (b) of this paragraph.

[41860] In particular, it was observed that in plants, especially in Arabidopsis thaliana, increasing or generating the activity of a gene product non-targeted with the activity of a “malic enzyme”, preferably being encoded by a gene comprising the nucleic acid sequence SEQ ID NO. 5557, preferably the coding region thereof, conferred the production of or the increase in valine compared with the wild type control.

[41861] The nucleic acid sequence of AvinDRAFT_{—}1806 from Azotobacter vinelandii, e.g. as shown in the respective line in column 5 of Table I, application no. 6, has been published in D. And the activity of the gene product thereof is the activity of pyruvate kinase.

[41862] Accordingly, in one embodiment, the process of the present invention for producing valine in a non-human organism, like a microorganism or a plant or a part thereof, comprises increasing or generating the activity of a gene product with the activity of a gene product conferring the activity of “pyruvate kinase”, especially from Azotobacter vinelandii or its functional equivalent or its homolog, e.g. the increase of
[41863] (a) a gene product of a gene comprising the nucleic acid molecule as shown in the respective line in column 5 of Table I (whereby the respective line discloses in column 7 the fine chemical valine), application no. 6, preferably the coding region thereof, or a homolog or a fragment thereof, and being depicted in the same respective line as said AvinDRAFT_{—}1806, or a functional equivalent or a homolog thereof as shown in column 8 of Table I, application no. 6, preferably the coding region thereof, particularly a homolog or functional equivalent as shown in column 8 of Table I B, application no. 6, and being depicted in the same respective line as said AvinDRAFT_{—}1806, and preferably the activity is increased non-targeted, or
[41864] (b) a polypeptide comprising a polypeptide, a consensus sequence or at least a polypeptide motif as shown in the respective line in column 5 of Table II or in column 8 of Table IV, application no. 6, respectively, and being depicted in the same respective line as said AvinDRAFT_{—}1806, or a functional equivalent or a homolog thereof as depicted in column 8 of Table II, application no. 6, preferably a homolog or functional equivalent as depicted in column 8 of Table II B, application no. 6, and being depicted in the same respective line as said AvinDRAFT_{—}1806, and preferably the activity is increased non-targeted, whereby the respective line discloses in column 7 the fine chemical valine.

[41865] Accordingly, in one embodiment, the molecule which activity is to be increased in the process of the invention is the gene product with an activity as a “pyruvate kinase”, preferably it is the molecule of section (a) or (b) of this paragraph.

[41866] In particular, it was observed that in plants, especially in Arabidopsis thaliana, increasing or generating the activity of a gene product non-targeted with the activity of a “pyruvate kinase”, preferably being encoded by a gene comprising the nucleic acid sequence SEQ ID NO. 26434, preferably the coding region thereof, conferred the production of or the increase in valine compared with the wild type control.

[41867] The nucleic acid sequence of AvinDRAFT_{—}2091 from Azotobacter vinelandii, e.g. as shown in the respective line in column 5 of Table I, application no. 6, has been published in D. And the activity of the gene product thereof is the activity of beta-hydroxylase.

[41868] Accordingly, in one embodiment, the process of the present invention for producing valine in a non-human organism, like a microorganism or a plant or a part thereof, comprises increasing or generating the activity of a gene product with the activity of a gene product conferring the activity of “beta-hydroxylase”, especially from Azotobacter vinelandii or its functional equivalent or its homolog, e.g. the increase of
[41869] (a) a gene product of a gene comprising the nucleic acid molecule as shown in the respective line in column 5 of Table I (whereby the respective line discloses in column 7 the fine chemical valine), application no. 6, preferably the coding region thereof, or a homolog or a fragment thereof, and being depicted in the same respective line as said AvinDRAFT_{—}2091, or a functional equivalent or a homolog thereof as shown in column 8 of Table I, application no. 6, preferably the coding region thereof, particularly a homolog or functional equivalent as shown in column 8 of Table I B, application no. 6, and being depicted in the same respective line as said AvinDRAFT_{—}2091, and preferably the activity is increased non-targeted, or
[41870] (b) a polypeptide comprising a polypeptide, a consensus sequence or at least a polypeptide motif as shown in the respective line in column 5 of Table II or in column 8 of Table IV, application no. 6, respectively, and being depicted in the same respective line as said AvinDRAFT_{—}2091, or a functional equivalent or a homolog thereof as depicted in column 8 of Table II, application no. 6, preferably a homolog or functional equivalent as depicted in column 8 of Table II B, application no. 6, and being depicted in the same respective line as said AvinDRAFT_{—}2091, and preferably the activity is increased non-targeted, whereby the respective line discloses in column 7 the fine chemical valine.

[41871] Accordingly, in one embodiment, the molecule which activity is to be increased in the process of the invention is the gene product with an activity as a “beta-hydroxylase”, preferably it is the molecule of section (a) or (b) of this paragraph.

[41872] In particular, it was observed that in plants, especially in Arabidopsis thaliana, increasing or generating the activity of a gene product non-targeted with the activity of a “beta-hydroxylase”, preferably being encoded by a gene comprising the nucleic acid sequence SEQ ID NO. 6040, preferably the coding region thereof, conferred the production of or the increase in valine compared with the wild type control.

[41873] The nucleic acid sequence of AvinDRAFT_{—}2344 from Azotobacter vinelandii, e.g. as shown in the respective line in column 5 of Table I, application no. 6, has been published in D. And the activity of the gene product thereof is the activity of elongation factor Tu.

[41874] Accordingly, in one embodiment, the process of the present invention for producing isoleucine in a non-human organism, like a microorganism or a plant or a part thereof, comprises increasing or generating the activity of a gene product with the activity of a gene product conferring the activity of “elongation factor Tu”, especially from Azotobacter vinelandii or its functional equivalent or its homolog, e.g. the increase of
[41875] (a) a gene product of a gene comprising the nucleic acid molecule as shown in the respective line in column 5 of Table I (whereby the respective line discloses in column 7 the fine chemical isoleucine), application no. 6, preferably the coding region thereof, or a homolog or a fragment thereof, and being depicted in the same respective line as said AvinDRAFT_{—}2344, or a functional equivalent or a homolog thereof as shown in column 8 of Table I, application no. 6, preferably the coding region thereof, particularly a homolog or functional equivalent as shown in column 8 of Table I B, application no. 6, and being depicted in the same respective line as said AvinDRAFT_{—}2344, and preferably the activity is increased non-targeted, or
[41876] (b) a polypeptide comprising a polypeptide, a consensus sequence or at least a polypeptide motif as shown in the respective line in column 5 of Table II or in column 8 of Table IV, application no. 6, respectively, and being depicted in the same respective line as said AvinDRAF_{—}2344, T or a functional equivalent or a homolog thereof as depicted in column 8 of Table II, application no. 6, preferably a homolog or functional equivalent as depicted in column 8 of Table II B, application no. 6, and being depicted in the same respective line as said AvinDRAFT_{—}2344, and preferably the activity is increased non-targeted, whereby the respective line discloses in column 7 the fine chemical isoleucine.

[41877] Accordingly, in one embodiment, the molecule which activity is to be increased in the process of the invention is the gene product with an activity as a “elongation factor Tu”, preferably it is the molecule of section (a) or (b) of this paragraph.

[41878] In particular, it was observed that in plants, especially in Arabidopsis thaliana, increasing or generating the activity of a gene product non-targeted with the activity of a “elongation factor Tu”, preferably being encoded by a gene comprising the nucleic acid sequence SEQ ID NO. 27021, preferably the coding region thereof, conferred the production of or the increase in isoleucine compared with the wild type control.

[41879] The nucleic acid sequence of AvinDRAFT_{—}2344 from Azotobacter vinelandii, e.g. as shown in the respective line in column 5 of Table I, application no. 6, has been published in D. And the activity of the gene product thereof is the activity of elongation factor Tu.

[41880] Accordingly, in one embodiment, the process of the present invention for producing leucine in a non-human organism, like a microorganism or a plant or a part thereof, comprises increasing or generating the activity of a gene product with the activity of a gene product conferring the activity of “elongation factor Tu”, especially from Azotobacter vinelandii or its functional equivalent or its homolog, e.g. the increase of
[41881] (a) a gene product of a gene comprising the nucleic acid molecule as shown in the respective line in column 5 of Table I (whereby the respective line discloses in column 7 the fine chemical leucine), application no. 6, preferably the coding region thereof, or a homolog or a fragment thereof, and being depicted in the same respective line as said AvinDRAFT_{—}2344, or a functional equivalent or a homolog thereof as shown in column 8 of Table I, application no. 6, preferably the coding region thereof, particularly a homolog or functional equivalent as shown in column 8 of Table I B, application no. 6, and being depicted in the same respective line as said AvinDRAFT_{—}2344, and preferably the activity is increased non-targeted, or
[41882] (b) a polypeptide comprising a polypeptide, a consensus sequence or at least a polypeptide motif as shown in the respective line in column 5 of Table II or in column 8 of Table IV, application no. 6, respectively, and being depicted in the same respective line as said AvinDRAFT_{—}2344, or a functional equivalent or a homolog thereof as depicted in column 8 of Table II, application no. 6, preferably a homolog or functional equivalent as depicted in column 8 of Table II B, application no. 6, and being depicted in the same respective line as said AvinDRAFT_{—}2344, and preferably the activity is increased non-targeted, whereby the respective line discloses in column 7 the fine chemical leucine.

[41883] Accordingly, in one embodiment, the molecule which activity is to be increased in the process of the invention is the gene product with an activity as a “elongation factor Tu”, preferably it is the molecule of section (a) or (b) of this paragraph.

[41884] In particular, it was observed that in plants, especially in Arabidopsis thaliana, increasing or generating the activity of a gene product non-targeted with the activity of a “elongation factor Tu”, preferably being encoded by a gene comprising the nucleic acid sequence SEQ ID NO. 27021, preferably the coding region thereof, conferred the production of or the increase in leucine compared with the wild type control.

[41885] The nucleic acid sequence of AvinDRAFT_{—}2344 from Azotobacter vinelandii, e.g. as shown in the respective line in column 5 of Table I, application no. 6, has been published in D. And the activity of the gene product thereof is the activity of elongation factor Tu.

[41886] Accordingly, in one embodiment, the process of the present invention for producing valine in a non-human organism, like a microorganism or a plant or a part thereof, comprises increasing or generating the activity of a gene product with the activity of a gene product conferring the activity of “elongation factor Tu”, especially from Azotobacter vinelandii or its functional equivalent or its homolog, e.g. the increase of
[41887] (a) a gene product of a gene comprising the nucleic acid molecule as shown in the respective line in column 5 of Table I (whereby the respective line discloses in column 7 the fine chemical valine), application no. 6, preferably the coding region thereof, or a homolog or a fragment thereof, and being depicted in the same respective line as said AvinDRAFT_{—}2344, or a functional equivalent or a homolog thereof as shown in column 8 of Table I, application no. 6, preferably the coding region thereof, particularly a homolog or functional equivalent as shown in column 8 of Table I B, application no. 6, and being depicted in the same respective line as said AvinDRAFT_{—}2344, and preferably the activity is increased non-targeted, or
[41888] (b) a polypeptide comprising a polypeptide, a consensus sequence or at least a polypeptide motif as shown in the respective line in column 5 of Table II or in column 8 of Table IV, application no. 6, respectively, and being depicted in the same respective line as said AvinDRAFT_{—}2344, or a functional equivalent or a homolog thereof as depicted in column 8 of Table II, application no. 6, preferably a homolog or functional equivalent as depicted in column 8 of Table II B, application no. 6, and being depicted in the same respective line as said AvinDRAFT_{—}2344, and preferably the activity is increased non-targeted, whereby the respective line discloses in column 7 the fine chemical valine.

[41889] Accordingly, in one embodiment, the molecule which activity is to be increased in the process of the invention is the gene product with an activity as a “elongation factor Tu”, preferably it is the molecule of section (a) or (b) of this paragraph.

[41890] In particular, it was observed that in plants, especially in Arabidopsis thaliana, increasing or generating the activity of a gene product non-targeted with the activity of a “elongation factor Tu”, preferably being encoded by a gene comprising the nucleic acid sequence SEQ ID NO. 27021, preferably the coding region thereof, conferred the production of or the increase in valine compared with the wild type control.

[41891] The nucleic acid sequence of AvinDRAFT_{—}2369 from Azotobacter vinelandii, e.g. as shown in the respective line in column 5 of Table I, application no. 6, has been published in D. And the activity of the gene product thereof is the activity of 50S ribosomal protein L14.

[41892] Accordingly, in one embodiment, the process of the present invention for producing valine in a non-human organism, like a microorganism or a plant or a part thereof, comprises increasing or generating the activity of a gene product with the activity of a gene product conferring the activity of “505 ribosomal protein L14”, especially from Azotobacter vinelandii or its functional equivalent or its homolog, e.g. the increase of
[41893] (a) a gene product of a gene comprising the nucleic acid molecule as shown in the respective line in column 5 of Table I (whereby the respective line discloses in column 7 the fine chemical valine), application no. 6, preferably the coding region thereof, or a homolog or a fragment thereof, and being depicted in the same respective line as said AvinDRAFT_{—}2369, or a functional equivalent or a homolog thereof as shown in column 8 of Table I, application no. 6, preferably the coding region thereof, particularly a homolog or functional equivalent as shown in column 8 of Table I B, application no. 6, and being depicted in the same respective line as said AvinDRAFT_{—}2369, and preferably the activity is increased non-targeted, or
[41894] (b) a polypeptide comprising a polypeptide, a consensus sequence or at least a polypeptide motif as shown in the respective line in column 5 of Table II or in column 8 of Table IV, application no. 6, respectively, and being depicted in the same respective line as said AvinDRAFT_{—}2369, or a functional equivalent or a homolog thereof as depicted in column 8 of Table II, application no. 6, preferably a homolog or functional equivalent as depicted in column 8 of Table II B, application no. 6, and being depicted in the same respective line as said AvinDRAFT_{—}2369, and preferably the activity is increased non-targeted, whereby the respective line discloses in column 7 the fine chemical valine.

[41895] Accordingly, in one embodiment, the molecule which activity is to be increased in the process of the invention is the gene product with an activity as a “505 ribosomal protein L14”, preferably it is the molecule of section (a) or (b) of this paragraph.

[41896] In particular, it was observed that in plants, especially in Arabidopsis thaliana, increasing or generating the activity of a gene product non-targeted with the activity of a “505 ribosomal protein L14”, preferably being encoded by a gene comprising the nucleic acid sequence SEQ ID NO. 71763, preferably the coding region thereof, conferred the production of or the increase in valine compared with the wild type control.

[41897] The nucleic acid sequence of AvinDRAFT_{—}2521 from Azotobacter vinelandii, e.g. as shown in the respective line in column 5 of Table I, application no. 6, has been published in D. And the activity of the gene product thereof is the activity of ABC transporter permease protein.

[41898] Accordingly, in one embodiment, the process of the present invention for producing valine in a non-human organism, like a microorganism or a plant or a part thereof, comprises increasing or generating the activity of a gene product with the activity of a gene product conferring the activity of “ABC transporter permease protein”, especially from Azotobacter vinelandii or its functional equivalent or its homolog, e.g. the increase of
[41899] (a) a gene product of a gene comprising the nucleic acid molecule as shown in the respective line in column 5 of Table I (whereby the respective line discloses in column 7 the fine chemical valine), application no. 6, preferably the coding region thereof, or a homolog or a fragment thereof, and being depicted in the same respective line as said AvinDRAFT_{—}2521, or a functional equivalent or a homolog thereof as shown in column 8 of Table I, application no. 6, preferably the coding region thereof, particularly a homolog or functional equivalent as shown in column 8 of Table I B, application no. 6, and being depicted in the same respective line as said AvinDRAFT_{—}2521, and preferably the activity is increased non-targeted, or
[41900] (b) a polypeptide comprising a polypeptide, a consensus sequence or at least a polypeptide motif as shown in the respective line in column 5 of Table II or in column 8 of Table IV, application no. 6, respectively, and being depicted in the same respective line as said AvinDRAFT_{—}2521, or a functional equivalent or a homolog thereof as depicted in column 8 of Table II, application no. 6, preferably a homolog or functional equivalent as depicted in column 8 of Table II B, application no. 6, and being depicted in the same respective line as said AvinDRAFT_{—}2521, and preferably the activity is increased non-targeted, whereby the respective line discloses in column 7 the fine chemical valine.

[41901] Accordingly, in one embodiment, the molecule which activity is to be increased in the process of the invention is the gene product with an activity as a “ABC transporter permease protein”, preferably it is the molecule of section (a) or (b) of this paragraph.

[41902] In particular, it was observed that in plants, especially in Arabidopsis thaliana, increasing or generating the activity of a gene product non-targeted with the activity of a “ABC transporter permease protein”, preferably being encoded by a gene comprising the nucleic acid sequence SEQ ID NO. 27882, preferably the coding region thereof, conferred the production of or the increase in valine compared with the wild type control.

[41903] The nucleic acid sequence of AvinDRAFT_{—}3159 from Azotobacter vinelandii, e.g. as shown in the respective line in column 5 of Table I, application no. 6, has been published in D. And the activity of the gene product thereof is the activity of enoyl-CoA hydratase.

[41904] Accordingly, in one embodiment, the process of the present invention for producing isoleucine in a non-human organism, like a microorganism or a plant or a part thereof, comprises increasing or generating the activity of a gene product with the activity of a gene product conferring the activity of “enoyl-CoA hydratase”, especially from Azotobacter vinelandii or its functional equivalent or its homolog, e.g. the increase of
[41905] (a) a gene product of a gene comprising the nucleic acid molecule as shown in the respective line in column 5 of Table I (whereby the respective line discloses in column 7 the fine chemical isoleucine), application no. 6, preferably the coding region thereof, or a homolog or a fragment thereof, and being depicted in the same respective line as said AvinDRAFT_{—}3159, or a functional equivalent or a homolog thereof as shown in column 8 of Table I, application no. 6, preferably the coding region thereof, particularly a homolog or functional equivalent as shown in column 8 of Table I B, application no. 6, and being depicted in the same respective line as said AvinDRAFT_{—}3159, and preferably the activity is increased non-targeted, or
[41906] (b) a polypeptide comprising a polypeptide, a consensus sequence or at least a polypeptide motif as shown in the respective line in column 5 of Table II or in column 8 of Table IV, application no. 6, respectively, and being depicted in the same respective line as said AvinDRAFT_{—}3159, or a functional equivalent or a homolog thereof as depicted in column 8 of Table II, application no. 6, preferably a homolog or functional equivalent as depicted in column 8 of Table II B, application no. 6, and being depicted in the same respective line as said AvinDRAFT_{—}3159, and preferably the activity is increased non-targeted, whereby the respective line discloses in column 7 the fine chemical isoleucine.

[41907] Accordingly, in one embodiment, the molecule which activity is to be increased in the process of the invention is the gene product with an activity as a “enoyl-CoA hydratase”, preferably it is the molecule of section (a) or (b) of this paragraph.

[41908] In particular, it was observed that in plants, especially in Arabidopsis thaliana, increasing or generating the activity of a gene product non-targeted with the activity of a “enoyl-CoA hydratase”, preferably being encoded by a gene comprising the nucleic acid sequence SEQ ID NO. 28738, preferably the coding region thereof, conferred the production of or the increase in isoleucine compared with the wild type control.

[41909] The nucleic acid sequence of AvinDRAFT_{—}3159 from Azotobacter vinelandii, e.g. as shown in the respective line in column 5 of Table I, application no. 6, has been published in D. And the activity of the gene product thereof is the activity of enoyl-CoA hydratase.

[41910] Accordingly, in one embodiment, the process of the present invention for producing leucine in a non-human organism, like a microorganism or a plant or a part thereof, comprises increasing or generating the activity of a gene product with the activity of a gene product conferring the activity of “enoyl-CoA hydratase”, especially from Azotobacter vinelandii or its functional equivalent or its homolog, e.g. the increase of
[41911] (a) a gene product of a gene comprising the nucleic acid molecule as shown in the respective line in column 5 of Table I (whereby the respective line discloses in column 7 the fine chemical leucine), application no. 6, preferably the coding region thereof, or a homolog or a fragment thereof, and being depicted in the same respective line as said AvinDRAFT_{—}3159, or a functional equivalent or a homolog thereof as shown in column 8 of Table I, application no. 6, preferably the coding region thereof, particularly a homolog or functional equivalent as shown in column 8 of Table I B, application no. 6, and being depicted in the same respective line as said AvinDRAFT_{—}3159, and preferably the activity is increased non-targeted, or
[41912] (b) a polypeptide comprising a polypeptide, a consensus sequence or at least a polypeptide motif as shown in the respective line in column 5 of Table II or in column 8 of Table IV, application no. 6, respectively, and being depicted in the same respective line as said AvinDRAFT_{—}3159, or a functional equivalent or a homolog thereof as depicted in column 8 of Table II, application no. 6, preferably a homolog or functional equivalent as depicted in column 8 of Table II B, application no. 6, and being depicted in the same respective line as said AvinDRAFT_{—}3159, and preferably the activity is increased non-targeted, whereby the respective line discloses in column 7 the fine chemical leucine.

[41913] Accordingly, in one embodiment, the molecule which activity is to be increased in the process of the invention is the gene product with an activity as a “enoyl-CoA hydratase”, preferably it is the molecule of section (a) or (b) of this paragraph.

[41914] In particular, it was observed that in plants, especially in Arabidopsis thaliana, increasing or generating the activity of a gene product non-targeted with the activity of a “enoyl-CoA hydratase”, preferably being encoded by a gene comprising the nucleic acid sequence SEQ ID NO. 28738, preferably the coding region thereof, conferred the production of or the increase in leucine compared with the wild type control.

[41915] The nucleic acid sequence of AvinDRAFT_{—}3159 from Azotobacter vinelandii, e.g. as shown in the respective line in column 5 of Table I, application no. 6, has been published in D. And the activity of the gene product thereof is the activity of enoyl-CoA hydratase.

[41916] Accordingly, in one embodiment, the process of the present invention for producing valine in a non-human organism, like a microorganism or a plant or a part thereof, comprises increasing or generating the activity of a gene product with the activity of a gene product conferring the activity of “enoyl-CoA hydratase”, especially from Azotobacter vinelandii or its functional equivalent or its homolog, e.g. the increase of
[41917] (a) a gene product of a gene comprising the nucleic acid molecule as shown in the respective line in column 5 of Table I (whereby the respective line discloses in column 7 the fine chemical valine), application no. 6, preferably the coding region thereof, or a homolog or a fragment thereof, and being depicted in the same respective line as said AvinDRAFT_{—}3159, or a functional equivalent or a homolog thereof as shown in column 8 of Table I, application no. 6, preferably the coding region thereof, particularly a homolog or functional equivalent as shown in column 8 of Table I B, application no. 6, and being depicted in the same respective line as said AvinDRAFT_{—}3159, and preferably the activity is increased non-targeted, or
[41918] (b) a polypeptide comprising a polypeptide, a consensus sequence or at least a polypeptide motif as shown in the respective line in column 5 of Table II or in column 8 of Table IV, application no. 6, respectively, and being depicted in the same respective line as said AvinDRAFT_{—}3159, or a functional equivalent or a homolog thereof as depicted in column 8 of Table II, application no. 6, preferably a homolog or functional equivalent as depicted in column 8 of Table II B, application no. 6, and being depicted in the same respective line as said AvinDRAFT_{—}3159, and preferably the activity is increased non-targeted, whereby the respective line discloses in column 7 the fine chemical valine.

[41919] Accordingly, in one embodiment, the molecule which activity is to be increased in the process of the invention is the gene product with an activity as a “enoyl-CoA hydratase”, preferably it is the molecule of section (a) or (b) of this paragraph.

[41920] In particular, it was observed that in plants, especially in Arabidopsis thaliana, increasing or generating the activity of a gene product non-targeted with the activity of a “enoyl-CoA hydratase”, preferably being encoded by a gene comprising the nucleic acid sequence SEQ ID NO. 28738, preferably the coding region thereof, conferred the production of or the increase in valine compared with the wild type control.

[41921] The nucleic acid sequence of AvinDRAFT_{—}3209 from Azotobacter vinelandii, e.g. as shown in the respective line in column 5 of Table I, application no. 6, has been published in D. And the activity of the gene product thereof is the activity of transcriptional regulator.

[41922] Accordingly, in one embodiment, the process of the present invention for producing isoleucine in a non-human organism, like a microorganism or a plant or a part thereof, comprises increasing or generating the activity of a gene product with the activity of a gene product conferring the activity of “transcriptional regulator”, especially from Azotobacter vinelandii or its functional equivalent or its homolog, e.g. the increase of
[41923] (a) a gene product of a gene comprising the nucleic acid molecule as shown in the respective line in column 5 of Table I (whereby the respective line discloses in column 7 the fine chemical isoleucine), application no. 6, preferably the coding region thereof, or a homolog or a fragment thereof, and being depicted in the same respective line as said AvinDRAFT_{—}3209, or a functional equivalent or a homolog thereof as shown in column 8 of Table I, application no. 6, preferably the coding region thereof, particularly a homolog or functional equivalent as shown in column 8 of Table I B, application no. 6, and being depicted in the same respective line as said AvinDRAFT_{—}3209, and preferably the activity is increased non-targeted, or
[41924] (b) a polypeptide comprising a polypeptide, a consensus sequence or at least a polypeptide motif as shown in the respective line in column 5 of Table II or in column 8 of Table IV, application no. 6, respectively, and being depicted in the same respective line as said AvinDRAFT_{—}3209, or a functional equivalent or a homolog thereof as depicted in column 8 of Table II, application no. 6, preferably a homolog or functional equivalent as depicted in column 8 of Table II B, application no. 6, and being depicted in the same respective line as said AvinDRAFT_{—}3209, and preferably the activity is increased non-targeted, whereby the respective line discloses in column 7 the fine chemical isoleucine.

[41925] Accordingly, in one embodiment, the molecule which activity is to be increased in the process of the invention is the gene product with an activity as a “transcriptional regulator”, preferably it is the molecule of section (a) or (b) of this paragraph.

[41926] In particular, it was observed that in plants, especially in Arabidopsis thaliana, increasing or generating the activity of a gene product non-targeted with the activity of a “transcriptional regulator”, preferably being encoded by a gene comprising the nucleic acid sequence SEQ ID NO. 29286, preferably the coding region thereof, conferred the production of or the increase in isoleucine compared with the wild type control.

[41927] The nucleic acid sequence of AvinDRAFT_{—}3209 from Azotobacter vinelandii, e.g. as shown in the respective line in column 5 of Table I, application no. 6, has been published in D. And the activity of the gene product thereof is the activity of transcriptional regulator.

[41928] Accordingly, in one embodiment, the process of the present invention for producing leucine in a non-human organism, like a microorganism or a plant or a part thereof, comprises increasing or generating the activity of a gene product with the activity of a gene product conferring the activity of “transcriptional regulator”, especially from Azotobacter vinelandii or its functional equivalent or its homolog, e.g. the increase of
[41929] (a) a gene product of a gene comprising the nucleic acid molecule as shown in the respective line in column 5 of Table I (whereby the respective line discloses in column 7 the fine chemical leucine), application no. 6, preferably the coding region thereof, or a homolog or a fragment thereof, and being depicted in the same respective line as said AvinDRAFT_{—}3209, or a functional equivalent or a homolog thereof as shown in column 8 of Table I, application no. 6, preferably the coding region thereof, particularly a homolog or functional equivalent as shown in column 8 of Table I B, application no. 6, and being depicted in the same respective line as said AvinDRAFT_{—}3209, and preferably the activity is increased non-targeted, or
[41930] (b) a polypeptide comprising a polypeptide, a consensus sequence or at least a polypeptide motif as shown in the respective line in column 5 of Table II or in column 8 of Table IV, application no. 6, respectively, and being depicted in the same respective line as said AvinDRAFT_{—}3209, or a functional equivalent or a homolog thereof as depicted in column 8 of Table II, application no. 6, preferably a homolog or functional equivalent as depicted in column 8 of Table II B, application no. 6, and being depicted in the same respective line as said AvinDRAFT_{—}3209, and preferably the activity is increased non-targeted, whereby the respective line discloses in column 7 the fine chemical leucine.

[41931] Accordingly, in one embodiment, the molecule which activity is to be increased in the process of the invention is the gene product with an activity as a “transcriptional regulator”, preferably it is the molecule of section (a) or (b) of this paragraph.

[41932] In particular, it was observed that in plants, especially in Arabidopsis thaliana, increasing or generating the activity of a gene product non-targeted with the activity of a “transcriptional regulator”, preferably being encoded by a gene comprising the nucleic acid sequence SEQ ID NO. 29286, preferably the coding region thereof, conferred the production of or the increase in leucine compared with the wild type control.

[41933] The nucleic acid sequence of AvinDRAFT_{—}3209 from Azotobacter vinelandii, e.g. as shown in the respective line in column 5 of Table I, application no. 6, has been published in D. And the activity of the gene product thereof is the activity of transcriptional regulator.

[41934] Accordingly, in one embodiment, the process of the present invention for producing valine in a non-human organism, like a microorganism or a plant or a part thereof, comprises increasing or generating the activity of a gene product with the activity of a gene product conferring the activity of “transcriptional regulator”, especially from Azotobacter vinelandii or its functional equivalent or its homolog, e.g. the increase of
[41935] (a) a gene product of a gene comprising the nucleic acid molecule as shown in the respective line in column 5 of Table I (whereby the respective line discloses in column 7 the fine chemical valine), application no. 6, preferably the coding region thereof, or a homolog or a fragment thereof, and being depicted in the same respective line as said AvinDRAFT_{—}3209, or a functional equivalent or a homolog thereof as shown in column 8 of Table I, application no. 6, preferably the coding region thereof, particularly a homolog or functional equivalent as shown in column 8 of Table I B, application no. 6, and being depicted in the same respective line as said AvinDRAFT_{—}3209, and preferably the activity is increased non-targeted, or
[41936] (b) a polypeptide comprising a polypeptide, a consensus sequence or at least a polypeptide motif as shown in the respective line in column 5 of Table II or in column 8 of Table IV, application no. 6, respectively, and being depicted in the same respective line as said AvinDRAFT_{—}3209, or a functional equivalent or a homolog thereof as depicted in column 8 of Table II, application no. 6, preferably a homolog or functional equivalent as depicted in column 8 of Table II B, application no. 6, and being depicted in the same respective line as said AvinDRAFT_{—}3209, and preferably the activity is increased non-targeted, whereby the respective line discloses in column 7 the fine chemical valine.

[41937] Accordingly, in one embodiment, the molecule which activity is to be increased in the process of the invention is the gene product with an activity as a “transcriptional regulator”, preferably it is the molecule of section (a) or (b) of this paragraph.

[41938] In particular, it was observed that in plants, especially in Arabidopsis thaliana, increasing or generating the activity of a gene product non-targeted with the activity of a “transcriptional regulator”, preferably being encoded by a gene comprising the nucleic acid sequence SEQ ID NO. 29286, preferably the coding region thereof, conferred the production of or the increase in valine compared with the wild type control.

[41939] The nucleic acid sequence of AvinDRAFT_{—}3250 from Azotobacter vinelandii, e.g. as shown in the respective line in column 5 of Table I, application no. 6, has been published in D. And the activity of the gene product thereof is the activity of acyltransferase.

[41940] Accordingly, in one embodiment, the process of the present invention for producing isoleucine in a non-human organism, like a microorganism or a plant or a part thereof, comprises increasing or generating the activity of a gene product with the activity of a gene product conferring the activity of “acyltransferase”, especially from Azotobacter vinelandii or its functional equivalent or its homolog, e.g. the increase of
[41941] (a) a gene product of a gene comprising the nucleic acid molecule as shown in the respective line in column 5 of Table I (whereby the respective line discloses in column 7 the fine chemical isoleucine), application no. 6, preferably the coding region thereof, or a homolog or a fragment thereof, and being depicted in the same respective line as said AvinDRAFT_{—}3250, or a functional equivalent or a homolog thereof as shown in column 8 of Table I, application no. 6, preferably the coding region thereof, particularly a homolog or functional equivalent as shown in column 8 of Table I B, application no. 6, and being depicted in the same respective line as said AvinDRAFT_{—}3250, and preferably the activity is increased non-targeted, or
[41942] (b) a polypeptide comprising a polypeptide, a consensus sequence or at least a polypeptide motif as shown in the respective line in column 5 of Table II or in column 8 of Table IV, application no. 6, respectively, and being depicted in the same respective line as said AvinDRAFT_{—}3250, or a functional equivalent or a homolog thereof as depicted in column 8 of Table II, application no. 6, preferably a homolog or functional equivalent as depicted in column 8 of Table II B, application no. 6, and being depicted in the same respective line as said AvinDRAFT_{—}3250, and preferably the activity is increased non-targeted, whereby the respective line discloses in column 7 the fine chemical isoleucine.

[41943] Accordingly, in one embodiment, the molecule which activity is to be increased in the process of the invention is the gene product with an activity as a “acyltransferase”, preferably it is the molecule of section (a) or (b) of this paragraph.

[41944] In particular, it was observed that in plants, especially in Arabidopsis thaliana, increasing or generating the activity of a gene product non-targeted with the activity of a “acyltransferase”, preferably being encoded by a gene comprising the nucleic acid sequence SEQ ID NO. 29397, preferably the coding region thereof, conferred the production of or the increase in isoleucine compared with the wild type control.

[41945] The nucleic acid sequence of AvinDRAFT_{—}3250 from Azotobacter vinelandii, e.g. as shown in the respective line in column 5 of Table I, application no. 6, has been published in D. And the activity of the gene product thereof is the activity of acyltransferase.

[41946] Accordingly, in one embodiment, the process of the present invention for producing leucine in a non-human organism, like a microorganism or a plant or a part thereof, comprises increasing or generating the activity of a gene product with the activity of a gene product conferring the activity of “acyltransferase”, especially from Azotobacter vinelandii or its functional equivalent or its homolog, e.g. the increase of
[41947] (a) a gene product of a gene comprising the nucleic acid molecule as shown in the respective line in column 5 of Table I (whereby the respective line discloses in column 7 the fine chemical leucine), application no. 6, preferably the coding region thereof, or a homolog or a fragment thereof, and being depicted in the same respective line as said AvinDRAFT_{—}3250, or a functional equivalent or a homolog thereof as shown in column 8 of Table I, application no. 6, preferably the coding region thereof, particularly a homolog or functional equivalent as shown in column 8 of Table I B, application no. 6, and being depicted in the same respective line as said AvinDRAFT_{—}3250, and preferably the activity is increased non-targeted, or
[41948] (b) a polypeptide comprising a polypeptide, a consensus sequence or at least a polypeptide motif as shown in the respective line in column 5 of Table II or in column 8 of Table IV, application no. 6, respectively, and being depicted in the same respective line as said AvinDRAFT_{—}3250, or a functional equivalent or a homolog thereof as depicted in column 8 of Table II, application no. 6, preferably a homolog or functional equivalent as depicted in column 8 of Table II B, application no. 6, and being depicted in the same respective line as said AvinDRAFT_{—}3250, and preferably the activity is increased non-targeted, whereby the respective line discloses in column 7 the fine chemical leucine.

[41949] Accordingly, in one embodiment, the molecule which activity is to be increased in the process of the invention is the gene product with an activity as a “acyltransferase”, preferably it is the molecule of section (a) or (b) of this paragraph.

[41950] In particular, it was observed that in plants, especially in Arabidopsis thaliana, increasing or generating the activity of a gene product non-targeted with the activity of a “acyltransferase”, preferably being encoded by a gene comprising the nucleic acid sequence SEQ ID NO. 29397, preferably the coding region thereof, conferred the production of or the increase in leucine compared with the wild type control.

[41951] The nucleic acid sequence of AvinDRAFT_{—}3250 from Azotobacter vinelandii, e.g. as shown in the respective line in column 5 of Table I, application no. 6, has been published in D. And the activity of the gene product thereof is the activity of acyltransferase.

[41952] Accordingly, in one embodiment, the process of the present invention for producing valine in a non-human organism, like a microorganism or a plant or a part thereof, comprises increasing or generating the activity of a gene product with the activity of a gene product conferring the activity of “acyltransferase”, especially from Azotobacter vinelandii or its functional equivalent or its homolog, e.g. the increase of
[41953] (a) a gene product of a gene comprising the nucleic acid molecule as shown in the respective line in column 5 of Table I (whereby the respective line discloses in column 7 the fine chemical valine), application no. 6, preferably the coding region thereof, or a homolog or a fragment thereof, and being depicted in the same respective line as said AvinDRAFT_{—}3250, or a functional equivalent or a homolog thereof as shown in column 8 of Table I, application no. 6, preferably the coding region thereof, particularly a homolog or functional equivalent as shown in column 8 of Table I B, application no. 6, and being depicted in the same respective line as said AvinDRAFT_{—}3250, and preferably the activity is increased non-targeted, or
[41954] (b) a polypeptide comprising a polypeptide, a consensus sequence or at least a polypeptide motif as shown in the respective line in column 5 of Table II or in column 8 of Table IV, application no. 6, respectively, and being depicted in the same respective line as said AvinDRAFT_{—}3250, or a functional equivalent or a homolog thereof as depicted in column 8 of Table II, application no. 6, preferably a homolog or functional equivalent as depicted in column 8 of Table II B, application no. 6, and being depicted in the same respective line as said AvinDRAFT_{—}3250, and preferably the activity is increased non-targeted, whereby the respective line discloses in column 7 the fine chemical valine.

[41955] Accordingly, in one embodiment, the molecule which activity is to be increased in the process of the invention is the gene product with an activity as a “acyltransferase”, preferably it is the molecule of section (a) or (b) of this paragraph.

[41956] In particular, it was observed that in plants, especially in Arabidopsis thaliana, increasing or generating the activity of a gene product non-targeted with the activity of a “acyltransferase”, preferably being encoded by a gene comprising the nucleic acid sequence SEQ ID NO. 29397, preferably the coding region thereof, conferred the production of or the increase in valine compared with the wild type control.

[41957] The nucleic acid sequence of AvinDRAFT_{—}3253 from Azotobacter vinelandii, e.g. as shown in the respective line in column 5 of Table I, application no. 6, has been published in D. And the activity of the gene product thereof is the activity of oxidoreductase.

[41958] Accordingly, in one embodiment, the process of the present invention for producing isoleucine in a non-human organism, like a microorganism or a plant or a part thereof, comprises increasing or generating the activity of a gene product with the activity of a gene product conferring the activity of “oxidoreductase”, especially from Azotobacter vinelandii or its functional equivalent or its homolog, e.g. the increase of
[41959] (a) a gene product of a gene comprising the nucleic acid molecule as shown in the respective line in column 5 of Table I (whereby the respective line discloses in column 7 the fine chemical isoleucine), application no. 6, preferably the coding region thereof, or a homolog or a fragment thereof, and being depicted in the same respective line as said AvinDRAFT_{—}3253, or a functional equivalent or a homolog thereof as shown in column 8 of Table I, application no. 6, preferably the coding region thereof, particularly a homolog or functional equivalent as shown in column 8 of Table I B, application no. 6, and being depicted in the same respective line as said AvinDRAFT_{—}3253, and preferably the activity is increased non-targeted, or
[41960] (b) a polypeptide comprising a polypeptide, a consensus sequence or at least a polypeptide motif as shown in the respective line in column 5 of Table II or in column 8 of Table IV, application no. 6, respectively, and being depicted in the same respective line as said AvinDRAFT_{—}3253, or a functional equivalent or a homolog thereof as depicted in column 8 of Table II, application no. 6, preferably a homolog or functional equivalent as depicted in column 8 of Table II B, application no. 6, and being depicted in the same respective line as said AvinDRAFT_{—}3253, and preferably the activity is increased non-targeted, whereby the respective line discloses in column 7 the fine chemical isoleucine.

[41961] Accordingly, in one embodiment, the molecule which activity is to be increased in the process of the invention is the gene product with an activity as a “oxidoreductase”, preferably it is the molecule of section (a) or (b) of this paragraph.

[41962] In particular, it was observed that in plants, especially in Arabidopsis thaliana, increasing or generating the activity of a gene product non-targeted with the activity of a “oxidoreductase”, preferably being encoded by a gene comprising the nucleic acid sequence SEQ ID NO. 29500, preferably the coding region thereof, conferred the production of or the increase in isoleucine compared with the wild type control.

[41963] The nucleic acid sequence of AvinDRAFT_{—}3253 from Azotobacter vinelandii, e.g. as shown in the respective line in column 5 of Table I, application no. 6, has been published in D. And the activity of the gene product thereof is the activity of oxidoreductase.

[41964] Accordingly, in one embodiment, the process of the present invention for producing leucine in a non-human organism, like a microorganism or a plant or a part thereof, comprises increasing or generating the activity of a gene product with the activity of a gene product conferring the activity of “oxidoreductase”, especially from Azotobacter vinelandii or its functional equivalent or its homolog, e.g. the increase of
[41965] (a) a gene product of a gene comprising the nucleic acid molecule as shown in the respective line in column 5 of Table I (whereby the respective line discloses in column 7 the fine chemical leucine), application no. 6, preferably the coding region thereof, or a homolog or a fragment thereof, and being depicted in the same respective line as said AvinDRAFT_{—}3253, or a functional equivalent or a homolog thereof as shown in column 8 of Table I, application no. 6, preferably the coding region thereof, particularly a homolog or functional equivalent as shown in column 8 of Table I B, application no. 6, and being depicted in the same respective line as said AvinDRAFT_{—}3253, and preferably the activity is increased non-targeted, or
[41966] (b) a polypeptide comprising a polypeptide, a consensus sequence or at least a polypeptide motif as shown in the respective line in column 5 of Table II or in column 8 of Table IV, application no. 6, respectively, and being depicted in the same respective line as said AvinDRAFT_{—}3253, or a functional equivalent or a homolog thereof as depicted in column 8 of Table II, application no. 6, preferably a homolog or functional equivalent as depicted in column 8 of Table II B, application no. 6, and being depicted in the same respective line as said AvinDRAFT_{—}3253, and preferably the activity is increased non-targeted, whereby the respective line discloses in column 7 the fine chemical leucine.

[41967] Accordingly, in one embodiment, the molecule which activity is to be increased in the process of the invention is the gene product with an activity as a “oxidoreductase”, preferably it is the molecule of section (a) or (b) of this paragraph.

[41968] In particular, it was observed that in plants, especially in Arabidopsis thaliana, increasing or generating the activity of a gene product non-targeted with the activity of a “oxidoreductase”, preferably being encoded by a gene comprising the nucleic acid sequence SEQ ID NO. 29500, preferably the coding region thereof, conferred the production of or the increase in leucine compared with the wild type control.

[41969] The nucleic acid sequence of AvinDRAFT_{—}3253 from Azotobacter vinelandii, e.g. as shown in the respective line in column 5 of Table I, application no. 6, has been published in D. And the activity of the gene product thereof is the activity of oxidoreductase.

[41970] Accordingly, in one embodiment, the process of the present invention for producing valine in a non-human organism, like a microorganism or a plant or a part thereof, comprises increasing or generating the activity of a gene product with the activity of a gene product conferring the activity of “oxidoreductase”, especially from Azotobacter vinelandii or its functional equivalent or its homolog, e.g. the increase of
[41971] (a) a gene product of a gene comprising the nucleic acid molecule as shown in the respective line in column 5 of Table I (whereby the respective line discloses in column 7 the fine chemical valine), application no. 6, preferably the coding region thereof, or a homolog or a fragment thereof, and being depicted in the same respective line as said AvinDRAFT_{—}3253, or a functional equivalent or a homolog thereof as shown in column 8 of Table I, application no. 6, preferably the coding region thereof, particularly a homolog or functional equivalent as shown in column 8 of Table I B, application no. 6, and being depicted in the same respective line as said AvinDRAFT_{—}3253, and preferably the activity is increased non-targeted, or
[41972] (b) a polypeptide comprising a polypeptide, a consensus sequence or at least a polypeptide motif as shown in the respective line in column 5 of Table II or in column 8 of Table IV, application no. 6, respectively, and being depicted in the same respective line as said AvinDRAFT_{—}3253, or a functional equivalent or a homolog thereof as depicted in column 8 of Table II, application no. 6, preferably a homolog or functional equivalent as depicted in column 8 of Table II B, application no. 6, and being depicted in the same respective line as said AvinDRAFT_{—}3253, and preferably the activity is increased non-targeted, whereby the respective line discloses in column 7 the fine chemical valine.

[41973] Accordingly, in one embodiment, the molecule which activity is to be increased in the process of the invention is the gene product with an activity as a “oxidoreductase”, preferably it is the molecule of section (a) or (b) of this paragraph.

[41974] In particular, it was observed that in plants, especially in Arabidopsis thaliana, increasing or generating the activity of a gene product non-targeted with the activity of a “oxidoreductase”, preferably being encoded by a gene comprising the nucleic acid sequence SEQ ID NO. 29500, preferably the coding region thereof, conferred the production of or the increase in valine compared with the wild type control.

[41975] The nucleic acid sequence of AVINDRAFT_{—}4128 from Azotobacter vinelandii, e.g. as shown in the respective line in column 5 of Table I, application no. 6, has been published in D. And the activity of the gene product thereof is the activity of ABC transporter component.

[41976] Accordingly, in one embodiment, the process of the present invention for producing valine in a non-human organism, like a microorganism or a plant or a part thereof, comprises increasing or generating the activity of a gene product with the activity of a gene product conferring the activity of “ABC transporter component”, especially from Azotobacter vinelandii or its functional equivalent or its homolog, e.g. the increase of
[41977] (a) a gene product of a gene comprising the nucleic acid molecule as shown in the respective line in column 5 of Table I (whereby the respective line discloses in column 7 the fine chemical valine), application no. 6, preferably the coding region thereof, or a homolog or a fragment thereof, and being depicted in the same respective line as said AVINDRAFT_{—}4128, or a functional equivalent or a homolog thereof as shown in column 8 of Table I, application no. 6, preferably the coding region thereof, particularly a homolog or functional equivalent as shown in column 8 of Table I B, application no. 6, and being depicted in the same respective line as said AVINDRAFT_{—}4128, and preferably the activity is increased non-targeted, or
[41978] (b) a polypeptide comprising a polypeptide, a consensus sequence or at least a polypeptide motif as shown in the respective line in column 5 of Table II or in column 8 of Table IV, application no. 6, respectively, and being depicted in the same respective line as said AVINDRAFT_{—}4128, or a functional equivalent or a homolog thereof as depicted in column 8 of Table II, application no. 6, preferably a homolog or functional equivalent as depicted in column 8 of Table II B, application no. 6, and being depicted in the same respective line as said AVINDRAFT_{—}4128, and preferably the activity is increased non-targeted, whereby the respective line discloses in column 7 the fine chemical valine.

[41979] Accordingly, in one embodiment, the molecule which activity is to be increased in the process of the invention is the gene product with an activity as a “ABC transporter component”, preferably it is the molecule of section (a) or (b) of this paragraph.

[41980] In particular, it was observed that in plants, especially in Arabidopsis thaliana, increasing or generating the activity of a gene product non-targeted with the activity of a “ABC transporter component”, preferably being encoded by a gene comprising the nucleic acid sequence SEQ ID NO. 72520, preferably the coding region thereof, conferred the production of or the increase in valine compared with the wild type control.

[41981] The nucleic acid sequence of AvinDRAFT_{—}4384 from Azotobacter vinelandii, e.g. as shown in the respective line in column 5 of Table I, application no. 6, has been published in D. And the activity of the gene product thereof is the activity of glucose-1-phosphate cytidylyltransferase.

[41982] Accordingly, in one embodiment, the process of the present invention for producing valine in a non-human organism, like a microorganism or a plant or a part thereof, comprises increasing or generating the activity of a gene product with the activity of a gene product conferring the activity of “glucose-1-phosphate cytidylyltransferase”, especially from Azotobacter vinelandii or its functional equivalent or its homolog, e.g. the increase of
[41983] (a) a gene product of a gene comprising the nucleic acid molecule as shown in the respective line in column 5 of Table I (whereby the respective line discloses in column 7 the fine chemical valine), application no. 6, preferably the coding region thereof, or a homolog or a fragment thereof, and being depicted in the same respective line as said AvinDRAFT_{—}4384, or a functional equivalent or a homolog thereof as shown in column 8 of Table I, application no. 6, preferably the coding region thereof, particularly a homolog or functional equivalent as shown in column 8 of Table I B, application no. 6, and being depicted in the same respective line as said AvinDRAFT_{—}4384, and preferably the activity is increased non-targeted, or
[41984] (b) a polypeptide comprising a polypeptide, a consensus sequence or at least a polypeptide motif as shown in the respective line in column 5 of Table II or in column 8 of Table IV, application no. 6, respectively, and being depicted in the same respective line as said AvinDRAFT_{—}4384, or a functional equivalent or a homolog thereof as depicted in column 8 of Table II, application no. 6, preferably a homolog or functional equivalent as depicted in column 8 of Table II B, application no. 6, and being depicted in the same respective line as said AvinDRAFT_{—}4384, and preferably the activity is increased non-targeted, whereby the respective line discloses in column 7 the fine chemical valine.

[41985] Accordingly, in one embodiment, the molecule which activity is to be increased in the process of the invention is the gene product with an activity as a “glucose-1-phosphate cytidylyltransferase”, preferably it is the molecule of section (a) or (b) of this paragraph.

[41986] In particular, it was observed that in plants, especially in Arabidopsis thaliana, increasing or generating the activity of a gene product non-targeted with the activity of a “glucose-1-phosphate cytidylyltransferase”, preferably being encoded by a gene comprising the nucleic acid sequence SEQ ID NO. 31717, preferably the coding region thereof, conferred the production of or the increase in valine compared with the wild type control.

[41987] The nucleic acid sequence of AvinDRAFT_{—}4562 from Azotobacter vinelandii, e.g. as shown in the respective line in column 5 of Table I, application no. 6, has been published in D. And the activity of the gene product thereof is the activity of aminotransferase.

[41988] Accordingly, in one embodiment, the process of the present invention for producing isoleucine in a non-human organism, like a microorganism or a plant or a part thereof, comprises increasing or generating the activity of a gene product with the activity of a gene product conferring the activity of “aminotransferase”, especially from Azotobacter vinelandii or its functional equivalent or its homolog, e.g. the increase of
[41989] (a) a gene product of a gene comprising the nucleic acid molecule as shown in the respective line in column 5 of Table I (whereby the respective line discloses in column 7 the fine chemical isoleucine), application no. 6, preferably the coding region thereof, or a homolog or a fragment thereof, and being depicted in the same respective line as said AvinDRAFT_{—}4562, or a functional equivalent or a homolog thereof as shown in column 8 of Table I, application no. 6, preferably the coding region thereof, particularly a homolog or functional equivalent as shown in column 8 of Table I B, application no. 6, and being depicted in the same respective line as said AvinDRAFT_{—}4562, and preferably the activity is increased non-targeted, or
[41990] (b) a polypeptide comprising a polypeptide, a consensus sequence or at least a polypeptide motif as shown in the respective line in column 5 of Table II or in column 8 of Table IV, application no. 6, respectively, and being depicted in the same respective line as said AvinDRAFT_{—}4562, or a functional equivalent or a homolog thereof as depicted in column 8 of Table II, application no. 6, preferably a homolog or functional equivalent as depicted in column 8 of Table II B, application no. 6, and being depicted in the same respective line as said AvinDRAFT_{—}4562, and preferably the activity is increased non-targeted, whereby the respective line discloses in column 7 the fine chemical isoleucine.

[41991] Accordingly, in one embodiment, the molecule which activity is to be increased in the process of the invention is the gene product with an activity as a “aminotransferase”, preferably it is the molecule of section (a) or (b) of this paragraph.

[41992] In particular, it was observed that in plants, especially in Arabidopsis thaliana, increasing or generating the activity of a gene product non-targeted with the activity of a “aminotransferase”, preferably being encoded by a gene comprising the nucleic acid sequence SEQ ID NO. 31926, preferably the coding region thereof, conferred the production of or the increase in isoleucine compared with the wild type control.

[41993] The nucleic acid sequence of AvinDRAFT_{—}4562 from Azotobacter vinelandii, e.g. as shown in the respective line in column 5 of Table I, application no. 6, has been published in D. And the activity of the gene product thereof is the activity of aminotransferase.

[41994] Accordingly, in one embodiment, the process of the present invention for producing valine in a non-human organism, like a microorganism or a plant or a part thereof, comprises increasing or generating the activity of a gene product with the activity of a gene product conferring the activity of “aminotransferase”, especially from Azotobacter vinelandii or its functional equivalent or its homolog, e.g. the increase of
[41995] (a) a gene product of a gene comprising the nucleic acid molecule as shown in the respective line in column 5 of Table I (whereby the respective line discloses in column 7 the fine chemical valine), application no. 6, preferably the coding region thereof, or a homolog or a fragment thereof, and being depicted in the same respective line as said AvinDRAFT_{—}4562, or a functional equivalent or a homolog thereof as shown in column 8 of Table I, application no. 6, preferably the coding region thereof, particularly a homolog or functional equivalent as shown in column 8 of Table I B, application no. 6, and being depicted in the same respective line as said AvinDRAFT_{—}4562, and preferably the activity is increased non-targeted, or
[41996] (b) a polypeptide comprising a polypeptide, a consensus sequence or at least a polypeptide motif as shown in the respective line in column 5 of Table II or in column 8 of Table IV, application no. 6, respectively, and being depicted in the same respective line as said AvinDRAFT _{—}4562, or a functional equivalent or a homolog thereof as depicted in column 8 of Table II, application no. 6, preferably a homolog or functional equivalent as depicted in column 8 of Table II B, application no. 6, and being depicted in the same respective line as said AvinDRAFT_{—}4562, and preferably the activity is increased non-targeted, whereby the respective line discloses in column 7 the fine chemical valine.

[41997] Accordingly, in one embodiment, the molecule which activity is to be increased in the process of the invention is the gene product with an activity as a “aminotransferase”, preferably it is the molecule of section (a) or (b) of this paragraph.

[41998] In particular, it was observed that in plants, especially in Arabidopsis thaliana, increasing or generating the activity of a gene product non-targeted with the activity of a “aminotransferase”, preferably being encoded by a gene comprising the nucleic acid sequence SEQ ID NO. 31926, preferably the coding region thereof, conferred the production of or the increase in valine compared with the wild type control.

[41999] The nucleic acid sequence of AvinDRAFT_{—}4606 from Azotobacter vinelandii, e.g. as shown in the respective line in column 5 of Table I, application no. 6, has been published in D. And the activity of the gene product thereof is the activity of NADH-quinone oxidoreductase subunit.

[42000] Accordingly, in one embodiment, the process of the present invention for producing isoleucine in a non-human organism, like a microorganism or a plant or a part thereof, comprises increasing or generating the activity of a gene product with the activity of a gene product conferring the activity of “NADH-quinone oxidoreductase subunit”, especially from Azotobacter vinelandii or its functional equivalent or its homolog, e.g. the increase of
[42001] (a) a gene product of a gene comprising the nucleic acid molecule as shown in the respective line in column 5 of Table I (whereby the respective line discloses in column 7 the fine chemical isoleucine), application no. 6, preferably the coding region thereof, or a homolog or a fragment thereof, and being depicted in the same respective line as said AvinDRAFT_{—}4606, or a functional equivalent or a homolog thereof as shown in column 8 of Table I, application no. 6, preferably the coding region thereof, particularly a homolog or functional equivalent as shown in column 8 of Table I B, application no. 6, and being depicted in the same respective line as said AvinDRAFT_{—}4606, and preferably the activity is increased non-targeted, or
[42002] (b) a polypeptide comprising a polypeptide, a consensus sequence or at least a polypeptide motif as shown in the respective line in column 5 of Table II or in column 8 of Table IV, application no. 6, respectively, and being depicted in the same respective line as said AvinDRAFT_{—}4606, or a functional equivalent or a homolog thereof as depicted in column 8 of Table II, application no. 6, preferably a homolog or functional equivalent as depicted in column 8 of Table II B, application no. 6, and being depicted in the same respective line as said AvinDRAFT_{—}4606, and preferably the activity is increased non-targeted, whereby the respective line discloses in column 7 the fine chemical isoleucine.

[42003] Accordingly, in one embodiment, the molecule which activity is to be increased in the process of the invention is the gene product with an activity as a “NADH-quinone oxidoreductase subunit”, preferably it is the molecule of section (a) or (b) of this paragraph.

[42004] In particular, it was observed that in plants, especially in Arabidopsis thaliana, increasing or generating the activity of a gene product non-targeted with the activity of a “NADH-quinone oxidoreductase subunit”, preferably being encoded by a gene comprising the nucleic acid sequence SEQ ID NO. 73719, preferably the coding region thereof, conferred the production of or the increase in isoleucine compared with the wild type control.

[42005] The nucleic acid sequence of AvinDRAFT_{—}4606 from Azotobacter vinelandii, e.g. as shown in the respective line in column 5 of Table I, application no. 6, has been published in D. And the activity of the gene product thereof is the activity of NADH-quinone oxidoreductase subunit.

[42006] Accordingly, in one embodiment, the process of the present invention for producing leucine in a non-human organism, like a microorganism or a plant or a part thereof, comprises increasing or generating the activity of a gene product with the activity of a gene product conferring the activity of “NADH-quinone oxidoreductase subunit”, especially from Azotobacter vinelandii or its functional equivalent or its homolog, e.g. the increase of
[42007] (a) a gene product of a gene comprising the nucleic acid molecule as shown in the respective line in column 5 of Table I (whereby the respective line discloses in column 7 the fine chemical leucine), application no. 6, preferably the coding region thereof, or a homolog or a fragment thereof, and being depicted in the same respective line as said AvinDRAFT_{—}4606, or a functional equivalent or a homolog thereof as shown in column 8 of Table I, application no. 6, preferably the coding region thereof, particularly a homolog or functional equivalent as shown in column 8 of Table I B, application no. 6, and being depicted in the same respective line as said AvinDRAFT_{—}4606, and preferably the activity is increased non-targeted, or
[42008] (b) a polypeptide comprising a polypeptide, a consensus sequence or at least a polypeptide motif as shown in the respective line in column 5 of Table II or in column 8 of Table IV, application no. 6, respectively, and being depicted in the same respective line as said AvinDRAFT_{—}4606, or a functional equivalent or a homolog thereof as depicted in column 8 of Table II, application no. 6, preferably a homolog or functional equivalent as depicted in column 8 of Table II B, application no. 6, and being depicted in the same respective line as said AvinDRAFT_{—}4606, and preferably the activity is increased non-targeted, whereby the respective line discloses in column 7 the fine chemical leucine.

[42009] Accordingly, in one embodiment, the molecule which activity is to be increased in the process of the invention is the gene product with an activity as a “NADH-quinone oxidoreductase subunit”, preferably it is the molecule of section (a) or (b) of this paragraph.

[42010] In particular, it was observed that in plants, especially in Arabidopsis thaliana, increasing or generating the activity of a gene product non-targeted with the activity of a “NADH-quinone oxidoreductase subunit”, preferably being encoded by a gene comprising the nucleic acid sequence SEQ ID NO. 73719, preferably the coding region thereof, conferred the production of or the increase in leucine compared with the wild type control.

[42011] The nucleic acid sequence of AvinDRAFT_{—}4836 from Azotobacter vinelandii, e.g. as shown in the respective line in column 5 of Table I, application no. 6, has been published in D. And the activity of the gene product thereof is the activity of glutamate-ammonia-ligase.

[42012] Accordingly, in one embodiment, the process of the present invention for producing isoleucine in a non-human organism, like a microorganism or a plant or a part thereof, comprises increasing or generating the activity of a gene product with the activity of a gene product conferring the activity of “glutamate-ammonia-ligase”, especially from Azotobacter vinelandii or its functional equivalent or its homolog, e.g. the increase of
[42013] (a) a gene product of a gene comprising the nucleic acid molecule as shown in the respective line in column 5 of Table I (whereby the respective line discloses in column 7 the fine chemical isoleucine), application no. 6, preferably the coding region thereof, or a homolog or a fragment thereof, and being depicted in the same respective line as said AvinDRAFT_{—}4836, or a functional equivalent or a homolog thereof as shown in column 8 of Table I, application no. 6, preferably the coding region thereof, particularly a homolog or functional equivalent as shown in column 8 of Table I B, application no. 6, and being depicted in the same respective line as said AvinDRAFT_{—}4836, and preferably the activity is increased non-targeted, or
[42014] (b) a polypeptide comprising a polypeptide, a consensus sequence or at least a polypeptide motif as shown in the respective line in column 5 of Table II or in column 8 of Table IV, application no. 6, respectively, and being depicted in the same respective line as said AvinDRAFT_{—}4836, or a functional equivalent or a homolog thereof as depicted in column 8 of Table II, application no. 6, preferably a homolog or functional equivalent as depicted in column 8 of Table II B, application no. 6, and being depicted in the same respective line as said AvinDRAFT_{—}4836, and preferably the activity is increased non-targeted, whereby the respective line discloses in column 7 the fine chemical isoleucine.

[42015] Accordingly, in one embodiment, the molecule which activity is to be increased in the process of the invention is the gene product with an activity as a “glutamate-ammonia-ligase”, preferably it is the molecule of section (a) or (b) of this paragraph.

[42016] In particular, it was observed that in plants, especially in Arabidopsis thaliana, increasing or generating the activity of a gene product non-targeted with the activity of a “glutamate-ammonia-ligase”, preferably being encoded by a gene comprising the nucleic acid sequence SEQ ID NO. 74163, preferably the coding region thereof, conferred the production of or the increase in isoleucine compared with the wild type control.

[42017] The nucleic acid sequence of AvinDRAFT_{—}4836 from Azotobacter vinelandii, e.g. as shown in the respective line in column 5 of Table I, application no. 6, has been published in D. And the activity of the gene product thereof is the activity of glutamate-ammonia-ligase.

[42018] Accordingly, in one embodiment, the process of the present invention for producing leucine in a non-human organism, like a microorganism or a plant or a part thereof, comprises increasing or generating the activity of a gene product with the activity of a gene product conferring the activity of “glutamate-ammonia-ligase”, especially from Azotobacter vinelandii or its functional equivalent or its homolog, e.g. the increase of
[42019] (a) a gene product of a gene comprising the nucleic acid molecule as shown in the respective line in column 5 of Table I (whereby the respective line discloses in column 7 the fine chemical leucine), application no. 6, preferably the coding region thereof, or a homolog or a fragment thereof, and being depicted in the same respective line as said AvinDRAFT_{—}4836, or a functional equivalent or a homolog thereof as shown in column 8 of Table I, application no. 6, preferably the coding region thereof, particularly a homolog or functional equivalent as shown in column 8 of Table I B, application no. 6, and being depicted in the same respective line as said AvinDRAFT_{—}4836, and preferably the activity is increased non-targeted, or
[42020] (b) a polypeptide comprising a polypeptide, a consensus sequence or at least a polypeptide motif as shown in the respective line in column 5 of Table II or in column 8 of Table IV, application no. 6, respectively, and being depicted in the same respective line as said AvinDRAFT_{—}4836, or a functional equivalent or a homolog thereof as depicted in column 8 of Table II, application no. 6, preferably a homolog or functional equivalent as depicted in column 8 of Table II B, application no. 6, and being depicted in the same respective line as said AvinDRAFT_{—}4836, and preferably the activity is increased non-targeted, whereby the respective line discloses in column 7 the fine chemical leucine.

[42021] Accordingly, in one embodiment, the molecule which activity is to be increased in the process of the invention is the gene product with an activity as a “glutamate-ammonia-ligase”, preferably it is the molecule of section (a) or (b) of this paragraph.

[42022] In particular, it was observed that in plants, especially in Arabidopsis thaliana, increasing or generating the activity of a gene product non-targeted with the activity of a “glutamate-ammonia-ligase”, preferably being encoded by a gene comprising the nucleic acid sequence SEQ ID NO. 74163, preferably the coding region thereof, conferred the production of or the increase in leucine compared with the wild type control.

[42023] The nucleic acid sequence of AvinDRAFT_{—}4836 from Azotobacter vinelandii, e.g. as shown in the respective line in column 5 of Table I, application no. 6, has been published in D. And the activity of the gene product thereof is the activity of glutamate-ammonia-ligase.

[42024] Accordingly, in one embodiment, the process of the present invention for producing valine in a non-human organism, like a microorganism or a plant or a part thereof, comprises increasing or generating the activity of a gene product with the activity of a gene product conferring the activity of “glutamate-ammonia-ligase”, especially from Azotobacter vinelandii or its functional equivalent or its homolog, e.g. the increase of
[42025] (a) a gene product of a gene comprising the nucleic acid molecule as shown in the respective line in column 5 of Table I (whereby the respective line discloses in column 7 the fine chemical valine), application no. 6, preferably the coding region thereof, or a homolog or a fragment thereof, and being depicted in the same respective line as said AvinDRAFT_{—}4836, or a functional equivalent or a homolog thereof as shown in column 8 of Table I, application no. 6, preferably the coding region thereof, particularly a homolog or functional equivalent as shown in column 8 of Table I B, application no. 6, and being depicted in the same respective line as said AvinDRAFT_{—}4836, and preferably the activity is increased non-targeted, or
[42026] (b) a polypeptide comprising a polypeptide, a consensus sequence or at least a polypeptide motif as shown in the respective line in column 5 of Table II or in column 8 of Table IV, application no. 6, respectively, and being depicted in the same respective line as said AvinDRAFT_{—}4836, or a functional equivalent or a homolog thereof as depicted in column 8 of Table II, application no. 6, preferably a homolog or functional equivalent as depicted in column 8 of Table II B, application no. 6, and being depicted in the same respective line as said AvinDRAFT_{—}4836, and preferably the activity is increased non-targeted, whereby the respective line discloses in column 7 the fine chemical valine.

[42027] Accordingly, in one embodiment, the molecule which activity is to be increased in the process of the invention is the gene product with an activity as a “glutamate-ammonia-ligase”, preferably it is the molecule of section (a) or (b) of this paragraph.

[42028] In particular, it was observed that in plants, especially in Arabidopsis thaliana, increasing or generating the activity of a gene product non-targeted with the activity of a “glutamate-ammonia-ligase”, preferably being encoded by a gene comprising the nucleic acid sequence SEQ ID NO. 74163, preferably the coding region thereof, conferred the production of or the increase in valine compared with the wild type control.

[42029] The nucleic acid sequence of AvinDRAFT_{—}4847 from Azotobacter vinelandii, e.g. as shown in the respective line in column 5 of Table I, application no. 6, has been published in D. And the activity of the gene product thereof is the activity of isopropylmalate isomerase large subunit.

[42030] Accordingly, in one embodiment, the process of the present invention for producing valine in a non-human organism, like a microorganism or a plant or a part thereof, comprises increasing or generating the activity of a gene product with the activity of a gene product conferring the activity of “isopropylmalate isomerase large subunit”, especially from Azotobacter vinelandii or its functional equivalent or its homolog, e.g. the increase of
[42031] (a) a gene product of a gene comprising the nucleic acid molecule as shown in the respective line in column 5 of Table I (whereby the respective line discloses in column 7 the fine chemical valine), application no. 6, preferably the coding region thereof, or a homolog or a fragment thereof, and being depicted in the same respective line as said AvinDRAFT_{—}4847, or a functional equivalent or a homolog thereof as shown in column 8 of Table I, application no. 6, preferably the coding region thereof, particularly a homolog or functional equivalent as shown in column 8 of Table I B, application no. 6, and being depicted in the same respective line as said AvinDRAFT_{—}4847, and preferably the activity is increased non-targeted, or
[42032] (b) a polypeptide comprising a polypeptide, a consensus sequence or at least a polypeptide motif as shown in the respective line in column 5 of Table II or in column 8 of Table IV, application no. 6, respectively, and being depicted in the same respective line as said AvinDRAFT_{—}4847, or a functional equivalent or a homolog thereof as depicted in column 8 of Table II, application no. 6, preferably a homolog or functional equivalent as depicted in column 8 of Table II B, application no. 6, and being depicted in the same respective line as said AvinDRAFT_{—}4847, and preferably the activity is increased non-targeted, whereby the respective line discloses in column 7 the fine chemical valine.

[42033] Accordingly, in one embodiment, the molecule which activity is to be increased in the process of the invention is the gene product with an activity as a “isopropylmalate isomerase large subunit”, preferably it is the molecule of section (a) or (b) of this paragraph.

[42034] In particular, it was observed that in plants, especially in Arabidopsis thaliana, increasing or generating the activity of a gene product non-targeted with the activity of a “isopropylmalate isomerase large subunit”, preferably being encoded by a gene comprising the nucleic acid sequence SEQ ID NO. 102941, preferably the coding region thereof, conferred the production of or the increase in valine compared with the wild type control.

[42035] The nucleic acid sequence of AvinDRAFT_{—}5103 from Azotobacter vinelandii, e.g. as shown in the respective line in column 5 of Table I, application no. 6, has been published in D. And the activity of the gene product thereof is the activity of hydrolase.

[42036] Accordingly, in one embodiment, the process of the present invention for producing isoleucine in a non-human organism, like a microorganism or a plant or a part thereof, comprises increasing or generating the activity of a gene product with the activity of a gene product conferring the activity of “hydrolase”, especially from Azotobacter vinelandii or its functional equivalent or its homolog, e.g. the increase of
[42037] (a) a gene product of a gene comprising the nucleic acid molecule as shown in the respective line in column 5 of Table I (whereby the respective line discloses in column 7 the fine chemical isoleucine), application no. 6, preferably the coding region thereof, or a homolog or a fragment thereof, and being depicted in the same respective line as said AvinDRAFT_{—}5103, or a functional equivalent or a homolog thereof as shown in column 8 of Table I, application no. 6, preferably the coding region thereof, particularly a homolog or functional equivalent as shown in column 8 of Table I B, application no. 6, and being depicted in the same respective line as said AvinDRAFT_{—}5103, and preferably the activity is increased non-targeted, or
[42038] (b) a polypeptide comprising a polypeptide, a consensus sequence or at least a polypeptide motif as shown in the respective line in column 5 of Table II or in column 8 of Table IV, application no. 6, respectively, and being depicted in the same respective line as said AvinDRAF_{—}5103, T or a functional equivalent or a homolog thereof as depicted in column 8 of Table II, application no. 6, preferably a homolog or functional equivalent as depicted in column 8 of Table II B, application no. 6, and being depicted in the same respective line as said AvinDRAFT_{—}5103, and preferably the activity is increased non-targeted, whereby the respective line discloses in column 7 the fine chemical isoleucine.

[42039] Accordingly, in one embodiment, the molecule which activity is to be increased in the process of the invention is the gene product with an activity as a “hydrolase”, preferably it is the molecule of section (a) or (b) of this paragraph.

[42040] In particular, it was observed that in plants, especially in Arabidopsis thaliana, increasing or generating the activity of a gene product non-targeted with the activity of a “hydrolase”, preferably being encoded by a gene comprising the nucleic acid sequence SEQ ID NO. 6510, preferably the coding region thereof, conferred the production of or the increase in isoleucine compared with the wild type control.

[42041] The nucleic acid sequence of AvinDRAFT_{—}5103 from Azotobacter vinelandii, e.g. as shown in the respective line in column 5 of Table I, application no. 6, has been published in D. And the activity of the gene product thereof is the activity of hydrolase.

[42042] Accordingly, in one embodiment, the process of the present invention for producing leucine in a non-human organism, like a microorganism or a plant or a part thereof, comprises increasing or generating the activity of a gene product with the activity of a gene product conferring the activity of “hydrolase”, especially from Azotobacter vinelandii or its functional equivalent or its homolog, e.g. the increase of
[42043] (a) a gene product of a gene comprising the nucleic acid molecule as shown in the respective line in column 5 of Table I (whereby the respective line discloses in column 7 the fine chemical leucine), application no. 6, preferably the coding region thereof, or a homolog or a fragment thereof, and being depicted in the same respective line as said AvinDRAFT_{—}5103, or a functional equivalent or a homolog thereof as shown in column 8 of Table I, application no. 6, preferably the coding region thereof, particularly a homolog or functional equivalent as shown in column 8 of Table I B, application no. 6, and being depicted in the same respective line as said AvinDRAFT_{—}5103, and preferably the activity is increased non-targeted, or
[42044] (b) a polypeptide comprising a polypeptide, a consensus sequence or at least a polypeptide motif as shown in the respective line in column 5 of Table II or in column 8 of Table IV, application no. 6, respectively, and being depicted in the same respective line as said AvinDRAF_{—}5103, T or a functional equivalent or a homolog thereof as depicted in column 8 of Table II, application no. 6, preferably a homolog or functional equivalent as depicted in column 8 of Table II B, application no. 6, and being depicted in the same respective line as said AvinDRAFT_{—}5103, and preferably the activity is increased non-targeted, whereby the respective line discloses in column 7 the fine chemical leucine.

[42045] Accordingly, in one embodiment, the molecule which activity is to be increased in the process of the invention is the gene product with an activity as a “hydrolase”, preferably it is the molecule of section (a) or (b) of this paragraph.

[42046] In particular, it was observed that in plants, especially in Arabidopsis thaliana, increasing or generating the activity of a gene product non-targeted with the activity of a “hydrolase”, preferably being encoded by a gene comprising the nucleic acid sequence SEQ ID NO. 6510, preferably the coding region thereof, conferred the production of or the increase in leucine compared with the wild type control.

[42047] The nucleic acid sequence of AvinDRAFT_{—}5103 from Azotobacter vinelandii, e.g. as shown in the respective line in column 5 of Table I, application no. 6, has been published in D. And the activity of the gene product thereof is the activity of hydrolase.

[42048] Accordingly, in one embodiment, the process of the present invention for producing valine in a non-human organism, like a microorganism or a plant or a part thereof, comprises increasing or generating the activity of a gene product with the activity of a gene product conferring the activity of “hydrolase”, especially from Azotobacter vinelandii or its functional equivalent or its homolog, e.g. the increase of
[42049] (a) a gene product of a gene comprising the nucleic acid molecule as shown in the respective line in column 5 of Table I (whereby the respective line discloses in column 7 the fine chemical valine), application no. 6, preferably the coding region thereof, or a homolog or a fragment thereof, and being depicted in the same respective line as said AvinDRAFT_{—}5103, or a functional equivalent or a homolog thereof as shown in column 8 of Table I, application no. 6, preferably the coding region thereof, particularly a homolog or functional equivalent as shown in column 8 of Table I B, application no. 6, and being depicted in the same respective line as said AvinDRAFT_{—}5103, and preferably the activity is increased non-targeted, or
[42050] (b) a polypeptide comprising a polypeptide, a consensus sequence or at least a polypeptide motif as shown in the respective line in column 5 of Table II or in column 8 of Table IV, application no. 6, respectively, and being depicted in the same respective line as said AvinDRAFT_{—}5103, or a functional equivalent or a homolog thereof as depicted in column 8 of Table II, application no. 6, preferably a homolog or functional equivalent as depicted in column 8 of Table II B, application no. 6, and being depicted in the same respective line as said AvinDRAFT_{—}5103, and preferably the activity is increased non-targeted, whereby the respective line discloses in column 7 the fine chemical valine.

[42051] Accordingly, in one embodiment, the molecule which activity is to be increased in the process of the invention is the gene product with an activity as a “hydrolase”, preferably it is the molecule of section (a) or (b) of this paragraph.

[42052] In particular, it was observed that in plants, especially in Arabidopsis thaliana, increasing or generating the activity of a gene product non-targeted with the activity of a “hydrolase”, preferably being encoded by a gene comprising the nucleic acid sequence SEQ ID NO. 6510, preferably the coding region thereof, conferred the production of or the increase in valine compared with the wild type control.

[42053] The nucleic acid sequence of AvinDRAFT_{—}5292 from Azotobacter vinelandii, e.g. as shown in the respective line in column 5 of Table I, application no. 6, has been published in D. And the activity of the gene product thereof is the activity of fumarylacetoacetate hydrolase.

[42054] Accordingly, in one embodiment, the process of the present invention for producing isoleucine in a non-human organism, like a microorganism or a plant or a part thereof, comprises increasing or generating the activity of a gene product with the activity of a gene product conferring the activity of “fumarylacetoacetate hydrolase”, especially from Azotobacter vinelandii or its functional equivalent or its homolog, e.g. the increase of
[42055] (a) a gene product of a gene comprising the nucleic acid molecule as shown in the respective line in column 5 of Table I (whereby the respective line discloses in column 7 the fine chemical isoleucine), application no. 6, preferably the coding region thereof, or a homolog or a fragment thereof, and being depicted in the same respective line as said AvinDRAFT_{—}5292, or a functional equivalent or a homolog thereof as shown in column 8 of Table I, application no. 6, preferably the coding region thereof, particularly a homolog or functional equivalent as shown in column 8 of Table I B, application no. 6, and being depicted in the same respective line as said AvinDRAFT_{—}5292, and preferably the activity is increased non-targeted, or
[42056] (b) a polypeptide comprising a polypeptide, a consensus sequence or at least a polypeptide motif as shown in the respective line in column 5 of Table II or in column 8 of Table IV, application no. 6, respectively, and being depicted in the same respective line as said AvinDRAFT_{—}5292, or a functional equivalent or a homolog thereof as depicted in column 8 of Table II, application no. 6, preferably a homolog or functional equivalent as depicted in column 8 of Table II B, application no. 6, and being depicted in the same respective line as said AvinDRAFT_{—}5292, and preferably the activity is increased non-targeted, whereby the respective line discloses in column 7 the fine chemical isoleucine.

[42057] Accordingly, in one embodiment, the molecule which activity is to be increased in the process of the invention is the gene product with an activity as a “fumarylacetoacetate hydrolase”, preferably it is the molecule of section (a) or (b) of this paragraph.

[42058] In particular, it was observed that in plants, especially in Arabidopsis thaliana, increasing or generating the activity of a gene product non-targeted with the activity of a “fumarylacetoacetate hydrolase”, preferably being encoded by a gene comprising the nucleic acid sequence SEQ ID NO. 32308, preferably the coding region thereof, conferred the production of or the increase in isoleucine compared with the wild type control.

[42059] The nucleic acid sequence of AvinDRAFT_{—}5292 from Azotobacter vinelandii, e.g. as shown in the respective line in column 5 of Table I, application no. 6, has been published in D. And the activity of the gene product thereof is the activity of fumarylacetoacetate hydrolase.

[42060] Accordingly, in one embodiment, the process of the present invention for producing leucine in a non-human organism, like a microorganism or a plant or a part thereof, comprises increasing or generating the activity of a gene product with the activity of a gene product conferring the activity of “fumarylacetoacetate hydrolase”, especially from Azotobacter vinelandii or its functional equivalent or its homolog, e.g. the increase of
[42061] (a) a gene product of a gene comprising the nucleic acid molecule as shown in the respective line in column 5 of Table I (whereby the respective line discloses in column 7 the fine chemical leucine), application no. 6, preferably the coding region thereof, or a homolog or a fragment thereof, and being depicted in the same respective line as said AvinDRAFT_{—}5292, or a functional equivalent or a homolog thereof as shown in column 8 of Table I, application no. 6, preferably the coding region thereof, particularly a homolog or functional equivalent as shown in column 8 of Table I B, application no. 6, and being depicted in the same respective line as said AvinDRAFT_{—}5292, and preferably the activity is increased non-targeted, or
[42062] (b) a polypeptide comprising a polypeptide, a consensus sequence or at least a polypeptide motif as shown in the respective line in column 5 of Table II or in column 8 of Table IV, application no. 6, respectively, and being depicted in the same respective line as said AvinDRAFT_{—}5292, or a functional equivalent or a homolog thereof as depicted in column 8 of Table II, application no. 6, preferably a homolog or functional equivalent as depicted in column 8 of Table II B, application no. 6, and being depicted in the same respective line as said AvinDRAFT_{—}5292, and preferably the activity is increased non-targeted, whereby the respective line discloses in column 7 the fine chemical leucine.

[42063] Accordingly, in one embodiment, the molecule which activity is to be increased in the process of the invention is the gene product with an activity as a “fumarylacetoacetate hydrolase”, preferably it is the molecule of section (a) or (b) of this paragraph.

[42064] In particular, it was observed that in plants, especially in Arabidopsis thaliana, increasing or generating the activity of a gene product non-targeted with the activity of a “fumarylacetoacetate hydrolase”, preferably being encoded by a gene comprising the nucleic acid sequence SEQ ID NO. 32308, preferably the coding region thereof, conferred the production of or the increase in leucine compared with the wild type control.

[42065] The nucleic acid sequence of AvinDRAFT_{—}5292 from Azotobacter vinelandii, e.g. as shown in the respective line in column 5 of Table I, application no. 6, has been published in D. And the activity of the gene product thereof is the activity of fumarylacetoacetate hydrolase.

[42066] Accordingly, in one embodiment, the process of the present invention for producing valine in a non-human organism, like a microorganism or a plant or a part thereof, comprises increasing or generating the activity of a gene product with the activity of a gene product conferring the activity of “fumarylacetoacetate hydrolase”, especially from Azotobacter vinelandii or its functional equivalent or its homolog, e.g. the increase of
[42067] (a) a gene product of a gene comprising the nucleic acid molecule as shown in the respective line in column 5 of Table I (whereby the respective line discloses in column 7 the fine chemical valine), application no. 6, preferably the coding region thereof, or a homolog or a fragment thereof, and being depicted in the same respective line as said AvinDRAFT_{—}5292, or a functional equivalent or a homolog thereof as shown in column 8 of Table I, application no. 6, preferably the coding region thereof, particularly a homolog or functional equivalent as shown in column 8 of Table I B, application no. 6, and being depicted in the same respective line as said AvinDRAFT_{—}5292, and preferably the activity is increased non-targeted, or
[42068] (b) a polypeptide comprising a polypeptide, a consensus sequence or at least a polypeptide motif as shown in the respective line in column 5 of Table II or in column 8 of Table IV, application no. 6, respectively, and being depicted in the same respective line as said AvinDRAFT_{—}5292, or a functional equivalent or a homolog thereof as depicted in column 8 of Table II, application no. 6, preferably a homolog or functional equivalent as depicted in column 8 of Table II B, application no. 6, and being depicted in the same respective line as said AvinDRAFT_{—}5292, and preferably the activity is increased non-targeted, whereby the respective line discloses in column 7 the fine chemical valine.

[42069] Accordingly, in one embodiment, the molecule which activity is to be increased in the process of the invention is the gene product with an activity as a “fumarylacetoacetate hydrolase”, preferably it is the molecule of section (a) or (b) of this paragraph.

[42070] In particular, it was observed that in plants, especially in Arabidopsis thaliana, increasing or generating the activity of a gene product non-targeted with the activity of a “fumarylacetoacetate hydrolase”, preferably being encoded by a gene comprising the nucleic acid sequence SEQ ID NO. 32308, preferably the coding region thereof, conferred the production of or the increase in valine compared with the wild type control.

[42071] The nucleic acid sequence of AvinDRAFT_{—}5579 from Azotobacter vinelandii, e.g. as shown in the respective line in column 5 of Table I, application no. 6, has been published in D. And the activity of the gene product thereof is the activity of peptidase.

[42072] Accordingly, in one embodiment, the process of the present invention for producing leucine in a non-human organism, like a microorganism or a plant or a part thereof, comprises increasing or generating the activity of a gene product with the activity of a gene product conferring the activity of “peptidase”, especially from Azotobacter vinelandii or its functional equivalent or its homolog, e.g. the increase of
[42073] (a) a gene product of a gene comprising the nucleic acid molecule as shown in the respective line in column 5 of Table I (whereby the respective line discloses in column 7 the fine chemical leucine), application no. 6, preferably the coding region thereof, or a homolog or a fragment thereof, and being depicted in the same respective line as said AvinDRAFT_{—}5579, or a functional equivalent or a homolog thereof as shown in column 8 of Table I, application no. 6, preferably the coding region thereof, particularly a homolog or functional equivalent as shown in column 8 of Table I B, application no. 6, and being depicted in the same respective line as said AvinDRAFT_{—}5579, and preferably the activity is increased non-targeted, or
[42074] (b) a polypeptide comprising a polypeptide, a consensus sequence or at least a polypeptide motif as shown in the respective line in column 5 of Table II or in column 8 of Table IV, application no. 6, respectively, and being depicted in the same respective line as said AvinDRAFT_{—}5579, or a functional equivalent or a homolog thereof as depicted in column 8 of Table II, application no. 6, preferably a homolog or functional equivalent as depicted in column 8 of Table II B, application no. 6, and being depicted in the same respective line as said AvinDRAFT_{—}5579, and preferably the activity is increased non-targeted, whereby the respective line discloses in column 7 the fine chemical leucine.

[42075] Accordingly, in one embodiment, the molecule which activity is to be increased in the process of the invention is the gene product with an activity as a “peptidase”, preferably it is the molecule of section (a) or (b) of this paragraph.

[42076] In particular, it was observed that in plants, especially in Arabidopsis thaliana, increasing or generating the activity of a gene product non-targeted with the activity of a “peptidase”, preferably being encoded by a gene comprising the nucleic acid sequence SEQ ID NO. 74662, preferably the coding region thereof, conferred the production of or the increase in leucine compared with the wild type control.

[42077] The nucleic acid sequence of AvinDRAFT_{—}6093 from Azotobacter vinelandii, e.g. as shown in the respective line in column 5 of Table I, application no. 6, has been published in D. And the activity of the gene product thereof is the activity of chaperone protein CIpB.

[42078] Accordingly, in one embodiment, the process of the present invention for producing isoleucine in a non-human organism, like a microorganism or a plant or a part thereof, comprises increasing or generating the activity of a gene product with the activity of a gene product conferring the activity of “chaperone protein CIpB”, especially from Azotobacter vinelandii or its functional equivalent or its homolog, e.g. the increase of
[42079] (a) a gene product of a gene comprising the nucleic acid molecule as shown in the respective line in column 5 of Table I (whereby the respective line discloses in column 7 the fine chemical isoleucine), application no. 6, preferably the coding region thereof, or a homolog or a fragment thereof, and being depicted in the same respective line as said AvinDRAFT_{—}6093, or a functional equivalent or a homolog thereof as shown in column 8 of Table I, application no. 6, preferably the coding region thereof, particularly a homolog or functional equivalent as shown in column 8 of Table I B, application no. 6, and being depicted in the same respective line as said AvinDRAFT_{—}6093, and preferably the activity is increased non-targeted, or
[42080] (b) a polypeptide comprising a polypeptide, a consensus sequence or at least a polypeptide motif as shown in the respective line in column 5 of Table II or in column 8 of Table IV, application no. 6, respectively, and being depicted in the same respective line as said AvinDRAFT_{—}6093, or a functional equivalent or a homolog thereof as depicted in column 8 of Table II, application no. 6, preferably a homolog or functional equivalent as depicted in column 8 of Table II B, application no. 6, and being depicted in the same respective line as said AvinDRAFT_{—}6093, and preferably the activity is increased non-targeted, whereby the respective line discloses in column 7 the fine chemical isoleucine.

[42081] Accordingly, in one embodiment, the molecule which activity is to be increased in the process of the invention is the gene product with an activity as a “chaperone protein CIpB”, preferably it is the molecule of section (a) or (b) of this paragraph.

[42082] In particular, it was observed that in plants, especially in Arabidopsis thaliana, increasing or generating the activity of a gene product non-targeted with the activity of a “chaperone protein CIpB”, preferably being encoded by a gene comprising the nucleic acid sequence SEQ ID NO. 33596, preferably the coding region thereof, conferred the production of or the increase in isoleucine compared with the wild type control.

[42083] The nucleic acid sequence of AvinDRAFT_{—}6700 from Azotobacter vinelandii, e.g. as shown in the respective line in column 5 of Table I, application no. 6, has been published in D. And the activity of the gene product thereof is the activity of purine nucleoside phosphorylase.

[42084] Accordingly, in one embodiment, the process of the present invention for producing isoleucine in a non-human organism, like a microorganism or a plant or a part thereof, comprises increasing or generating the activity of a gene product with the activity of a gene product conferring the activity of “purine nucleoside phosphorylase”, especially from Azotobacter vinelandii or its functional equivalent or its homolog, e.g. the increase of
[42085] (a) a gene product of a gene comprising the nucleic acid molecule as shown in the respective line in column 5 of Table I (whereby the respective line discloses in column 7 the fine chemical isoleucine), application no. 6, preferably the coding region thereof, or a homolog or a fragment thereof, and being depicted in the same respective line as said AvinDRAFT_{—}6700, or a functional equivalent or a homolog thereof as shown in column 8 of Table I, application no. 6, preferably the coding region thereof, particularly a homolog or functional equivalent as shown in column 8 of Table I B, application no. 6, and being depicted in the same respective line as said AvinDRAFT_{—}6700, and preferably the activity is increased non-targeted, or
[42086] (b) a polypeptide comprising a polypeptide, a consensus sequence or at least a polypeptide motif as shown in the respective line in column 5 of Table II or in column 8 of Table IV, application no. 6, respectively, and being depicted in the same respective line as said AvinDRAFT_{—}6700, or a functional equivalent or a homolog thereof as depicted in column 8 of Table II, application no. 6, preferably a homolog or functional equivalent as depicted in column 8 of Table II B, application no. 6, and being depicted in the same respective line as said AvinDRAFT_{—}6700, and preferably the activity is increased non-targeted, whereby the respective line discloses in column 7 the fine chemical isoleucine.

[42087] Accordingly, in one embodiment, the molecule which activity is to be increased in the process of the invention is the gene product with an activity as a “purine nucleoside phosphorylase”, preferably it is the molecule of section (a) or (b) of this paragraph.

[42088] In particular, it was observed that in plants, especially in Arabidopsis thaliana, increasing or generating the activity of a gene product non-targeted with the activity of a “purine nucleoside phosphorylase”, preferably being encoded by a gene comprising the nucleic acid sequence SEQ ID NO. 34044, preferably the coding region thereof, conferred the production of or the increase in isoleucine compared with the wild type control.

[42089] The nucleic acid sequence of AvinDRAFT_{—}6700 from Azotobacter vinelandii, e.g. as shown in the respective line in column 5 of Table I, application no. 6, has been published in D. And the activity of the gene product thereof is the activity of purine nucleoside phosphorylase.

[42090] Accordingly, in one embodiment, the process of the present invention for producing leucine in a non-human organism, like a microorganism or a plant or a part thereof, comprises increasing or generating the activity of a gene product with the activity of a gene product conferring the activity of “purine nucleoside phosphorylase”, especially from Azotobacter vinelandii or its functional equivalent or its homolog, e.g. the increase of
[42091] (a) a gene product of a gene comprising the nucleic acid molecule as shown in the respective line in column 5 of Table I (whereby the respective line discloses in column 7 the fine chemical leucine), application no. 6, preferably the coding region thereof, or a homolog or a fragment thereof, and being depicted in the same respective line as said AvinDRAFT_{—}6700, or a functional equivalent or a homolog thereof as shown in column 8 of Table I, application no. 6, preferably the coding region thereof, particularly a homolog or functional equivalent as shown in column 8 of Table I B, application no. 6, and being depicted in the same respective line as said AvinDRAFT_{—}6700, and preferably the activity is increased non-targeted, or
[42092] (b) a polypeptide comprising a polypeptide, a consensus sequence or at least a polypeptide motif as shown in the respective line in column 5 of Table II or in column 8 of Table IV, application no. 6, respectively, and being depicted in the same respective line as said AvinDRAFT_{—}6700, or a functional equivalent or a homolog thereof as depicted in column 8 of Table II, application no. 6, preferably a homolog or functional equivalent as depicted in column 8 of Table II B, application no. 6, and being depicted in the same respective line as said AvinDRAFT_{—}6700, and preferably the activity is increased non-targeted, whereby the respective line discloses in column 7 the fine chemical leucine.

[42093] Accordingly, in one embodiment, the molecule which activity is to be increased in the process of the invention is the gene product with an activity as a “purine nucleoside phosphorylase”, preferably it is the molecule of section (a) or (b) of this paragraph.

[42094] In particular, it was observed that in plants, especially in Arabidopsis thaliana, increasing or generating the activity of a gene product non-targeted with the activity of a “purine nucleoside phosphorylase”, preferably being encoded by a gene comprising the nucleic acid sequence SEQ ID NO. 34044, preferably the coding region thereof, conferred the production of or the increase in leucine compared with the wild type control.

[42095] The nucleic acid sequence of AvinDRAFT_{—}6700 from Azotobacter vinelandii, e.g. as shown in the respective line in column 5 of Table I, application no. 6, has been published in D. And the activity of the gene product thereof is the activity of purine nucleoside phosphorylase.

[42096] Accordingly, in one embodiment, the process of the present invention for producing valine in a non-human organism, like a microorganism or a plant or a part thereof, comprises increasing or generating the activity of a gene product with the activity of a gene product conferring the activity of “purine nucleoside phosphorylase”, especially from Azotobacter vinelandii or its functional equivalent or its homolog, e.g. the increase of
[42097] (a) a gene product of a gene comprising the nucleic acid molecule as shown in the respective line in column 5 of Table I (whereby the respective line discloses in column 7 the fine chemical valine), application no. 6, preferably the coding region thereof, or a homolog or a fragment thereof, and being depicted in the same respective line as said AvinDRAFT_{—}6700, or a functional equivalent or a homolog thereof as shown in column 8 of Table I, application no. 6, preferably the coding region thereof, particularly a homolog or functional equivalent as shown in column 8 of Table I B, application no. 6, and being depicted in the same respective line as said AvinDRAFT_{—}6700, and preferably the activity is increased non-targeted, or
[42098] (b) a polypeptide comprising a polypeptide, a consensus sequence or at least a polypeptide motif as shown in the respective line in column 5 of Table II or in column 8 of Table IV, application no. 6, respectively, and being depicted in the same respective line as said AvinDRAFT_{—}6700, or a functional equivalent or a homolog thereof as depicted in column 8 of Table II, application no. 6, preferably a homolog or functional equivalent as depicted in column 8 of Table II B, application no. 6, and being depicted in the same respective line as said AvinDRAFT_{—}6700, and preferably the activity is increased non-targeted, whereby the respective line discloses in column 7 the fine chemical valine.

[42099] Accordingly, in one embodiment, the molecule which activity is to be increased in the process of the invention is the gene product with an activity as a “purine nucleoside phosphorylase”, preferably it is the molecule of section (a) or (b) of this paragraph.

[42100] In particular, it was observed that in plants, especially in Arabidopsis thaliana, increasing or generating the activity of a gene product non-targeted with the activity of a “purine nucleoside phosphorylase”, preferably being encoded by a gene comprising the nucleic acid sequence SEQ ID NO. 34044, preferably the coding region thereof, conferred the production of or the increase in valine compared with the wild type control.

[42101] The nucleic acid sequence of AY623894 from Zea mays, e.g. as shown in the respective line in column 5 of Table I, application no. 6, is unpublished. And the activity of the gene product thereof is the activity of pyruvate kinase.

[42102] Accordingly, in one embodiment, the process of the present invention for producing isoleucine in a non-human organism, like a microorganism or a plant or a part thereof, comprises increasing or generating the activity of a gene product with the activity of a gene product conferring the activity of “pyruvate kinase”, especially from Zea mays or its functional equivalent or its homolog, e.g. the increase of
[42103] (a) a gene product of a gene comprising the nucleic acid molecule as shown in the respective line in column 5 of Table I (whereby the respective line discloses in column 7 the fine chemical isoleucine), application no. 6, preferably the coding region thereof, or a homolog or a fragment thereof, and being depicted in the same respective line as said AY623894, or a functional equivalent or a homolog thereof as shown in column 8 of Table I, application no. 6, preferably the coding region thereof, particularly a homolog or functional equivalent as shown in column 8 of Table I B, application no. 6, and being depicted in the same respective line as said AY623894, and preferably the activity is increased non-targeted, or
[42104] (b) a polypeptide comprising a polypeptide, a consensus sequence or at least a polypeptide motif as shown in the respective line in column 5 of Table II or in column 8 of Table IV, application no. 6, respectively, and being depicted in the same respective line as said AY623894, or a functional equivalent or a homolog thereof as depicted in column 8 of Table II, application no. 6, preferably a homolog or functional equivalent as depicted in column 8 of Table II B, application no. 6, and being depicted in the same respective line as said AY623894, and preferably the activity is increased non-targeted, whereby the respective line discloses in column 7 the fine chemical isoleucine.

[42105] Accordingly, in one embodiment, the molecule which activity is to be increased in the process of the invention is the gene product with an activity as a “pyruvate kinase”, preferably it is the molecule of section (a) or (b) of this paragraph.

[42106] In particular, it was observed that in plants, especially in Arabidopsis thaliana, increasing or generating the activity of a gene product non-targeted with the activity of a “pyruvate kinase”, preferably being encoded by a gene comprising the nucleic acid sequence SEQ ID NO. 103433, preferably the coding region thereof, conferred the production of or the increase in isoleucine compared with the wild type control.

[42107] The nucleic acid sequence of AY623894 from Zea mays, e.g. as shown in the respective line in column 5 of Table I, application no. 6, is unpublished. And the activity of the gene product thereof is the activity of pyruvate kinase.

[42108] Accordingly, in one embodiment, the process of the present invention for producing valine in a non-human organism, like a microorganism or a plant or a part thereof, comprises increasing or generating the activity of a gene product with the activity of a gene product conferring the activity of “pyruvate kinase”, especially from Zea mays or its functional equivalent or its homolog, e.g. the increase of
[42109] (a) a gene product of a gene comprising the nucleic acid molecule as shown in the respective line in column 5 of Table I (whereby the respective line discloses in column 7 the fine chemical valine), application no. 6, preferably the coding region thereof, or a homolog or a fragment thereof, and being depicted in the same respective line as said AY623894, or a functional equivalent or a homolog thereof as shown in column 8 of Table I, application no. 6, preferably the coding region thereof, particularly a homolog or functional equivalent as shown in column 8 of Table I B, application no. 6, and being depicted in the same respective line as said AY623894, and preferably the activity is increased non-targeted, or
[42110] (b) a polypeptide comprising a polypeptide, a consensus sequence or at least a polypeptide motif as shown in the respective line in column 5 of Table II or in column 8 of Table IV, application no. 6, respectively, and being depicted in the same respective line as said AY623894, or a functional equivalent or a homolog thereof as depicted in column 8 of Table II, application no. 6, preferably a homolog or functional equivalent as depicted in column 8 of Table II B, application no. 6, and being depicted in the same respective line as said AY623894, and preferably the activity is increased non-targeted, whereby the respective line discloses in column 7 the fine chemical valine.

[42111] Accordingly, in one embodiment, the molecule which activity is to be increased in the process of the invention is the gene product with an activity as a “pyruvate kinase”, preferably it is the molecule of section (a) or (b) of this paragraph.

[42112] In particular, it was observed that in plants, especially in Arabidopsis thaliana, increasing or generating the activity of a gene product non-targeted with the activity of a “pyruvate kinase”, preferably being encoded by a gene comprising the nucleic acid sequence SEQ ID NO. 103433, preferably the coding region thereof, conferred the production of or the increase in valine compared with the wild type control.

[42113] The nucleic acid sequence of B0004 from Escherichia coli, e.g. as shown in the respective line in column 5 of Table I, application no. 6, has been published in B. And the activity of the gene product thereof is the activity of threonine synthase.

[42114] Accordingly, in one embodiment, the process of the present invention for producing isoleucine in a non-human organism, like a microorganism or a plant or a part thereof, comprises increasing or generating the activity of a gene product with the activity of a gene product conferring the activity of “threonine synthase”, especially from Escherichia coli or its functional equivalent or its homolog, e.g. the increase of
[42115] (a) a gene product of a gene comprising the nucleic acid molecule as shown in the respective line in column 5 of Table I (whereby the respective line discloses in column 7 the fine chemical isoleucine), application no. 6, preferably the coding region thereof, or a homolog or a fragment thereof, and being depicted in the same respective line as said B0004, or a functional equivalent or a homolog thereof as shown in column 8 of Table I, application no. 6, preferably the coding region thereof, particularly a homolog or functional equivalent as shown in column 8 of Table I B, application no. 6, and being depicted in the same respective line as said B0004, and preferably the activity is increased plastidic, or
[42116] (b) a polypeptide comprising a polypeptide, a consensus sequence or at least a polypeptide motif as shown in the respective line in column 5 of Table II or in column 8 of Table IV, application no. 6, respectively, and being depicted in the same respective line as said B0004, or a functional equivalent or a homolog thereof as depicted in column 8 of Table II, application no. 6, preferably a homolog or functional equivalent as depicted in column 8 of Table II B, application no. 6, and being depicted in the same respective line as said B0004, and preferably the activity is increased plastidic, whereby the respective line discloses in column 7 the fine chemical isoleucine.

[42117] Accordingly, in one embodiment, the molecule which activity is to be increased in the process of the invention is the gene product with an activity as a “threonine synthase”, preferably it is the molecule of section (a) or (b) of this paragraph.

[42118] In particular, it was observed that in plants, especially in Arabidopsis thaliana, increasing or generating the activity of a gene product plastidic with the activity of a “threonine synthase”, preferably being encoded by a gene comprising the nucleic acid sequence SEQ ID NO. 34889, preferably the coding region thereof, conferred the production of or the increase in isoleucine compared with the wild type control.

[42119] The nucleic acid sequence of B0004 from Escherichia coli, e.g. as shown in the respective line in column 5 of Table I, application no. 6, has been published in B. And the activity of the gene product thereof is the activity of threonine synthase.

[42120] Accordingly, in one embodiment, the process of the present invention for producing leucine in a non-human organism, like a microorganism or a plant or a part thereof, comprises increasing or generating the activity of a gene product with the activity of a gene product conferring the activity of “threonine synthase”, especially from Escherichia coli or its functional equivalent or its homolog, e.g. the increase of
[42121] (a) a gene product of a gene comprising the nucleic acid molecule as shown in the respective line in column 5 of Table I (whereby the respective line discloses in column 7 the fine chemical leucine), application no. 6, preferably the coding region thereof, or a homolog or a fragment thereof, and being depicted in the same respective line as said B0004, or a functional equivalent or a homolog thereof as shown in column 8 of Table I, application no. 6, preferably the coding region thereof, particularly a homolog or functional equivalent as shown in column 8 of Table I B, application no. 6, and being depicted in the same respective line as said B0004, and preferably the activity is increased plastidic, or
[42122] (b) a polypeptide comprising a polypeptide, a consensus sequence or at least a polypeptide motif as shown in the respective line in column 5 of Table II or in column 8 of Table IV, application no. 6, respectively, and being depicted in the same respective line as said B0004, or a functional equivalent or a homolog thereof as depicted in column 8 of Table II, application no. 6, preferably a homolog or functional equivalent as depicted in column 8 of Table II B, application no. 6, and being depicted in the same respective line as said B0004, and preferably the activity is increased plastidic, whereby the respective line discloses in column 7 the fine chemical leucine.

[42123] Accordingly, in one embodiment, the molecule which activity is to be increased in the process of the invention is the gene product with an activity as a “threonine synthase”, preferably it is the molecule of section (a) or (b) of this paragraph.

[42124] In particular, it was observed that in plants, especially in Arabidopsis thaliana, increasing or generating the activity of a gene product plastidic with the activity of a “threonine synthase”, preferably being encoded by a gene comprising the nucleic acid sequence SEQ ID NO. 34889, preferably the coding region thereof, conferred the production of or the increase in leucine compared with the wild type control.

[42125] The nucleic acid sequence of B0004 from Escherichia coli, e.g. as shown in the respective line in column 5 of Table I, application no. 6, has been published in B. And the activity of the gene product thereof is the activity of threonine synthase.

[42126] Accordingly, in one embodiment, the process of the present invention for producing valine in a non-human organism, like a microorganism or a plant or a part thereof, comprises increasing or generating the activity of a gene product with the activity of a gene product conferring the activity of “threonine synthase”, especially from Escherichia coli or its functional equivalent or its homolog, e.g. the increase of
[42127] (a) a gene product of a gene comprising the nucleic acid molecule as shown in the respective line in column 5 of Table I (whereby the respective line discloses in column 7 the fine chemical valine), application no. 6, preferably the coding region thereof, or a homolog or a fragment thereof, and being depicted in the same respective line as said B0004, or a functional equivalent or a homolog thereof as shown in column 8 of Table I, application no. 6, preferably the coding region thereof, particularly a homolog or functional equivalent as shown in column 8 of Table I B, application no. 6, and being depicted in the same respective line as said B0004, and preferably the activity is increased plastidic, or
[42128] (b) a polypeptide comprising a polypeptide, a consensus sequence or at least a polypeptide motif as shown in the respective line in column 5 of Table II or in column 8 of Table IV, application no. 6, respectively, and being depicted in the same respective line as said B0004, or a functional equivalent or a homolog thereof as depicted in column 8 of Table II, application no. 6, preferably a homolog or functional equivalent as depicted in column 8 of Table II B, application no. 6, and being depicted in the same respective line as said B0004, and preferably the activity is increased plastidic, whereby the respective line discloses in column 7 the fine chemical valine.

[42129] Accordingly, in one embodiment, the molecule which activity is to be increased in the process of the invention is the gene product with an activity as a “threonine synthase”, preferably it is the molecule of section (a) or (b) of this paragraph.

[42130] In particular, it was observed that in plants, especially in Arabidopsis thaliana, increasing or generating the activity of a gene product plastidic with the activity of a “threonine synthase”, preferably being encoded by a gene comprising the nucleic acid sequence SEQ ID NO. 34889, preferably the coding region thereof, conferred the production of or the increase in valine compared with the wild type control.

[42131] The nucleic acid sequence of B0050 from Escherichia coli, e.g. as shown in the respective line in column 5 of Table I, application no. 6, has been published in B. And the activity of the gene product thereof is the activity of b0050-protein.

[42132] Accordingly, in one embodiment, the process of the present invention for producing valine in a non-human organism, like a microorganism or a plant or a part thereof, comprises increasing or generating the activity of a gene product with the activity of a gene product conferring the activity of “b0050-protein”, especially from Escherichia coli or its functional equivalent or its homolog, e.g. the increase of
[42133] (a) a gene product of a gene comprising the nucleic acid molecule as shown in the respective line in column 5 of Table I (whereby the respective line discloses in column 7 the fine chemical valine), application no. 6, preferably the coding region thereof, or a homolog or a fragment thereof, and being depicted in the same respective line as said B0050, or a functional equivalent or a homolog thereof as shown in column 8 of Table I, application no. 6, preferably the coding region thereof, particularly a homolog or functional equivalent as shown in column 8 of Table I B, application no. 6, and being depicted in the same respective line as said B0050, and preferably the activity is increased non-targeted, or
[42134] (b) a polypeptide comprising a polypeptide, a consensus sequence or at least a polypeptide motif as shown in the respective line in column 5 of Table II or in column 8 of Table IV, application no. 6, respectively, and being depicted in the same respective line as said B0050, or a functional equivalent or a homolog thereof as depicted in column 8 of Table II, application no. 6, preferably a homolog or functional equivalent as depicted in column 8 of Table II B, application no. 6, and being depicted in the same respective line as said B0050, and preferably the activity is increased non-targeted, whereby the respective line discloses in column 7 the fine chemical valine.

[42135] Accordingly, in one embodiment, the molecule which activity is to be increased in the process of the invention is the gene product with an activity as a “b0050-protein”, preferably it is the molecule of section (a) or (b) of this paragraph.

[42136] In particular, it was observed that in plants, especially in Arabidopsis thaliana, increasing or generating the activity of a gene product non-targeted with the activity of a “b0050-protein”, preferably being encoded by a gene comprising the nucleic acid sequence SEQ ID NO. 103958, preferably the coding region thereof, conferred the production of or the increase in valine compared with the wild type control.

[42137] The nucleic acid sequence of B0078 from Escherichia coli, e.g. as shown in the respective line in column 5 of Table I, application no. 6, has been published in B. And the activity of the gene product thereof is the activity of acetolactate synthase small subunit.

[42138] Accordingly, in one embodiment, the process of the present invention for producing leucine in a non-human organism, like a microorganism or a plant or a part thereof, comprises increasing or generating the activity of a gene product with the activity of a gene product conferring the activity of “acetolactate synthase small subunit”, especially from Escherichia coli or its functional equivalent or its homolog, e.g. the increase of
[42139] (a) a gene product of a gene comprising the nucleic acid molecule as shown in the respective line in column 5 of Table I (whereby the respective line discloses in column 7 the fine chemical leucine), application no. 6, preferably the coding region thereof, or a homolog or a fragment thereof, and being depicted in the same respective line as said B0078, or a functional equivalent or a homolog thereof as shown in column 8 of Table I, application no. 6, preferably the coding region thereof, particularly a homolog or functional equivalent as shown in column 8 of Table I B, application no. 6, and being depicted in the same respective line as said B0078, and preferably the activity is increased non-targeted, or
[42140] (b) a polypeptide comprising a polypeptide, a consensus sequence or at least a polypeptide motif as shown in the respective line in column 5 of Table II or in column 8 of Table IV, application no. 6, respectively, and being depicted in the same respective line as said B0078, or a functional equivalent or a homolog thereof as depicted in column 8 of Table II, application no. 6, preferably a homolog or functional equivalent as depicted in column 8 of Table II B, application no. 6, and being depicted in the same respective line as said B0078, and preferably the activity is increased non-targeted, whereby the respective line discloses in column 7 the fine chemical leucine.

[42141] Accordingly, in one embodiment, the molecule which activity is to be increased in the process of the invention is the gene product with an activity as a “acetolactate synthase small subunit”, preferably it is the molecule of section (a) or (b) of this paragraph.

[42142] In particular, it was observed that in plants, especially in Arabidopsis thaliana, increasing or generating the activity of a gene product non-targeted with the activity of a “acetolactate synthase small subunit”, preferably being encoded by a gene comprising the nucleic acid sequence SEQ ID NO. 6818, preferably the coding region thereof, conferred the production of or the increase in leucine compared with the wild type control.

[42143] The nucleic acid sequence of B0344 from Escherichia coli, e.g. as shown in the respective line in column 5 of Table I, application no. 6, has been published in B. And the activity of the gene product thereof is the activity of beta-galactosidase.

[42144] Accordingly, in one embodiment, the process of the present invention for producing leucine in a non-human organism, like a microorganism or a plant or a part thereof, comprises increasing or generating the activity of a gene product with the activity of a gene product conferring the activity of “beta-galactosidase”, especially from Escherichia coli or its functional equivalent or its homolog, e.g. the increase of
[42145] (a) a gene product of a gene comprising the nucleic acid molecule as shown in the respective line in column 5 of Table I (whereby the respective line discloses in column 7 the fine chemical leucine), application no. 6, preferably the coding region thereof, or a homolog or a fragment thereof, and being depicted in the same respective line as said B0344, or a functional equivalent or a homolog thereof as shown in column 8 of Table I, application no. 6, preferably the coding region thereof, particularly a homolog or functional equivalent as shown in column 8 of Table I B, application no. 6, and being depicted in the same respective line as said B0344, and preferably the activity is increased plastidic, or
[42146] (b) a polypeptide comprising a polypeptide, a consensus sequence or at least a polypeptide motif as shown in the respective line in column 5 of Table II or in column 8 of Table IV, application no. 6, respectively, and being depicted in the same respective line as said B0344, or a functional equivalent or a homolog thereof as depicted in column 8 of Table II, application no. 6, preferably a homolog or functional equivalent as depicted in column 8 of Table II B, application no. 6, and being depicted in the same respective line as said B0344, and preferably the activity is increased plastidic, whereby the respective line discloses in column 7 the fine chemical leucine.

[42147] Accordingly, in one embodiment, the molecule which activity is to be increased in the process of the invention is the gene product with an activity as a “beta-galactosidase”, preferably it is the molecule of section (a) or (b) of this paragraph.

[42148] In particular, it was observed that in plants, especially in Arabidopsis thaliana, increasing or generating the activity of a gene product plastidic with the activity of a “beta-galactosidase”, preferably being encoded by a gene comprising the nucleic acid sequence SEQ ID NO. 35733, preferably the coding region thereof, conferred the production of or the increase in leucine compared with the wild type control.

[42149] The nucleic acid sequence of B0348 from Escherichia coli, e.g. as shown in the respective line in column 5 of Table I, application no. 6, has been published in B. And the activity of the gene product thereof is the activity of 2,3-dihydroxyphenylpropionate 1,2-dioxygenase.

[42150] Accordingly, in one embodiment, the process of the present invention for producing isoleucine in a non-human organism, like a microorganism or a plant or a part thereof, comprises increasing or generating the activity of a gene product with the activity of a gene product conferring the activity of “2,3-dihydroxyphenylpropionate 1,2-dioxygenase”, especially from Escherichia coli or its functional equivalent or its homolog, e.g. the increase of
[42151] (a) a gene product of a gene comprising the nucleic acid molecule as shown in the respective line in column 5 of Table I (whereby the respective line discloses in column 7 the fine chemical isoleucine), application no. 6, preferably the coding region thereof, or a homolog or a fragment thereof, and being depicted in the same respective line as said B0348, or a functional equivalent or a homolog thereof as shown in column 8 of Table I, application no. 6, preferably the coding region thereof, particularly a homolog or functional equivalent as shown in column 8 of Table I B, application no. 6, and being depicted in the same respective line as said B0348, and preferably the activity is increased plastidic, or
[42152] (b) a polypeptide comprising a polypeptide, a consensus sequence or at least a polypeptide motif as shown in the respective line in column 5 of Table II or in column 8 of Table IV, application no. 6, respectively, and being depicted in the same respective line as said B0348, or a functional equivalent or a homolog thereof as depicted in column 8 of Table II, application no. 6, preferably a homolog or functional equivalent as depicted in column 8 of Table II B, application no. 6, and being depicted in the same respective line as said B0348, and preferably the activity is increased plastidic, whereby the respective line discloses in column 7 the fine chemical isoleucine.

[42153] Accordingly, in one embodiment, the molecule which activity is to be increased in the process of the invention is the gene product with an activity as a “2,3-dihydroxyphenylpropionate 1,2-dioxygenase”, preferably it is the molecule of section (a) or (b) of this paragraph.

[42154] In particular, it was observed that in plants, especially in Arabidopsis thaliana, increasing or generating the activity of a gene product plastidic with the activity of a “2,3-dihydroxyphenylpropionate 1,2-dioxygenase”, preferably being encoded by a gene comprising the nucleic acid sequence SEQ ID NO. 7269, preferably the coding region thereof, conferred the production of or the increase in isoleucine compared with the wild type control.

[42155] The nucleic acid sequence of B0348 from Escherichia coli, e.g. as shown in the respective line in column 5 of Table I, application no. 6, has been published in B. And the activity of the gene product thereof is the activity of 2,3-dihydroxyphenylpropionate 1,2-dioxygenase.

[42156] Accordingly, in one embodiment, the process of the present invention for producing valine in a non-human organism, like a microorganism or a plant or a part thereof, comprises increasing or generating the activity of a gene product with the activity of a gene product conferring the activity of “2,3-dihydroxyphenylpropionate 1,2-dioxygenase”, especially from Escherichia coli or its functional equivalent or its homolog, e.g. the increase of
[42157] (a) a gene product of a gene comprising the nucleic acid molecule as shown in the respective line in column 5 of Table I (whereby the respective line discloses in column 7 the fine chemical valine), application no. 6, preferably the coding region thereof, or a homolog or a fragment thereof, and being depicted in the same respective line as said B0348, or a functional equivalent or a homolog thereof as shown in column 8 of Table I, application no. 6, preferably the coding region thereof, particularly a homolog or functional equivalent as shown in column 8 of Table I B, application no. 6, and being depicted in the same respective line as said B0348, and preferably the activity is increased plastidic, or
[42158] (b) a polypeptide comprising a polypeptide, a consensus sequence or at least a polypeptide motif as shown in the respective line in column 5 of Table II or in column 8 of Table IV, application no. 6, respectively, and being depicted in the same respective line as said B0348, or a functional equivalent or a homolog thereof as depicted in column 8 of Table II, application no. 6, preferably a homolog or functional equivalent as depicted in column 8 of Table II B, application no. 6, and being depicted in the same respective line as said B0348, and preferably the activity is increased plastidic, whereby the respective line discloses in column 7 the fine chemical valine.

[42159] Accordingly, in one embodiment, the molecule which activity is to be increased in the process of the invention is the gene product with an activity as a “2,3-dihydroxyphenylpropionate 1,2-dioxygenase”, preferably it is the molecule of section (a) or (b) of this paragraph.

[42160] In particular, it was observed that in plants, especially in Arabidopsis thaliana, increasing or generating the activity of a gene product plastidic with the activity of a “2,3-dihydroxyphenylpropionate 1,2-dioxygenase”, preferably being encoded by a gene comprising the nucleic acid sequence SEQ ID NO. 7269, preferably the coding region thereof, conferred the production of or the increase in valine compared with the wild type control.

[42161] The nucleic acid sequence of B0449 from Escherichia coli, e.g. as shown in the respective line in column 5 of Table I, application no. 6, has been published in B. And the activity of the gene product thereof is the activity of ATP-binding component of a transport system.

[42162] Accordingly, in one embodiment, the process of the present invention for producing isoleucine in a non-human organism, like a microorganism or a plant or a part thereof, comprises increasing or generating the activity of a gene product with the activity of a gene product conferring the activity of “ATP-binding component of a transport system”, especially from Escherichia coli or its functional equivalent or its homolog, e.g. the increase of
[42163] (a) a gene product of a gene comprising the nucleic acid molecule as shown in the respective line in column 5 of Table I (whereby the respective line discloses in column 7 the fine chemical isoleucine), application no. 6, preferably the coding region thereof, or a homolog or a fragment thereof, and being depicted in the same respective line as said B0449, or a functional equivalent or a homolog thereof as shown in column 8 of Table I, application no. 6, preferably the coding region thereof, particularly a homolog or functional equivalent as shown in column 8 of Table I B, application no. 6, and being depicted in the same respective line as said B0449, and preferably the activity is increased non-targeted, or
[42164] (b) a polypeptide comprising a polypeptide, a consensus sequence or at least a polypeptide motif as shown in the respective line in column 5 of Table II or in column 8 of Table IV, application no. 6, respectively, and being depicted in the same respective line as said B0449, or a functional equivalent or a homolog thereof as depicted in column 8 of Table II, application no. 6, preferably a homolog or functional equivalent as depicted in column 8 of Table II B, application no. 6, and being depicted in the same respective line as said B0449, and preferably the activity is increased non-targeted, whereby the respective line discloses in column 7 the fine chemical isoleucine.

[42165] Accordingly, in one embodiment, the molecule which activity is to be increased in the process of the invention is the gene product with an activity as a “ATP-binding component of a transport system”, preferably it is the molecule of section (a) or (b) of this paragraph.

[42166] In particular, it was observed that in plants, especially in Arabidopsis thaliana, increasing or generating the activity of a gene product non-targeted with the activity of a “ATP-binding component of a transport system”, preferably being encoded by a gene comprising the nucleic acid sequence SEQ ID NO. 7333, preferably the coding region thereof, conferred the production of or the increase in isoleucine compared with the wild type control.

[42167] The nucleic acid sequence of B0449 from Escherichia coli, e.g. as shown in the respective line in column 5 of Table I, application no. 6, has been published in B. And the activity of the gene product thereof is the activity of ATP-binding component of a transport system.

[42168] Accordingly, in one embodiment, the process of the present invention for producing leucine in a non-human organism, like a microorganism or a plant or a part thereof, comprises increasing or generating the activity of a gene product with the activity of a gene product conferring the activity of “ATP-binding component of a transport system”, especially from Escherichia coli or its functional equivalent or its homolog, e.g. the increase of
[42169] (a) a gene product of a gene comprising the nucleic acid molecule as shown in the respective line in column 5 of Table I (whereby the respective line discloses in column 7 the fine chemical leucine), application no. 6, preferably the coding region thereof, or a homolog or a fragment thereof, and being depicted in the same respective line as said B0449, or a functional equivalent or a homolog thereof as shown in column 8 of Table I, application no. 6, preferably the coding region thereof, particularly a homolog or functional equivalent as shown in column 8 of Table I B, application no. 6, and being depicted in the same respective line as said B0449, and preferably the activity is increased non-targeted, or
[42170] (b) a polypeptide comprising a polypeptide, a consensus sequence or at least a polypeptide motif as shown in the respective line in column 5 of Table II or in column 8 of Table IV, application no. 6, respectively, and being depicted in the same respective line as said B0449, or a functional equivalent or a homolog thereof as depicted in column 8 of Table II, application no. 6, preferably a homolog or functional equivalent as depicted in column 8 of Table II B, application no. 6, and being depicted in the same respective line as said B0449, and preferably the activity is increased non-targeted, whereby the respective line discloses in column 7 the fine chemical leucine.

[42171] Accordingly, in one embodiment, the molecule which activity is to be increased in the process of the invention is the gene product with an activity as a “ATP-binding component of a transport system”, preferably it is the molecule of section (a) or (b) of this paragraph.

[42172] In particular, it was observed that in plants, especially in Arabidopsis thaliana, increasing or generating the activity of a gene product non-targeted with the activity of a “ATP-binding component of a transport system”, preferably being encoded by a gene comprising the nucleic acid sequence SEQ ID NO. 7333, preferably the coding region thereof, conferred the production of or the increase in leucine compared with the wild type control.

[42173] The nucleic acid sequence of B0449 from Escherichia coli, e.g. as shown in the respective line in column 5 of Table I, application no. 6, has been published in B. And the activity of the gene product thereof is the activity of ATP-binding component of a transport system.

[42174] Accordingly, in one embodiment, the process of the present invention for producing valine in a non-human organism, like a microorganism or a plant or a part thereof, comprises increasing or generating the activity of a gene product with the activity of a gene product conferring the activity of “ATP-binding component of a transport system”, especially from Escherichia coli or its functional equivalent or its homolog, e.g. the increase of
[42175] (a) a gene product of a gene comprising the nucleic acid molecule as shown in the respective line in column 5 of Table I (whereby the respective line discloses in column 7 the fine chemical valine), application no. 6, preferably the coding region thereof, or a homolog or a fragment thereof, and being depicted in the same respective line as said B0449, or a functional equivalent or a homolog thereof as shown in column 8 of Table I, application no. 6, preferably the coding region thereof, particularly a homolog or functional equivalent as shown in column 8 of Table I B, application no. 6, and being depicted in the same respective line as said B0449, and preferably the activity is increased non-targeted, or
[42176] (b) a polypeptide comprising a polypeptide, a consensus sequence or at least a polypeptide motif as shown in the respective line in column 5 of Table II or in column 8 of Table IV, application no. 6, respectively, and being depicted in the same respective line as said B0449, or a functional equivalent or a homolog thereof as depicted in column 8 of Table II, application no. 6, preferably a homolog or functional equivalent as depicted in column 8 of Table II B, application no. 6, and being depicted in the same respective line as said B0449, and preferably the activity is increased non-targeted, whereby the respective line discloses in column 7 the fine chemical valine.

[42177] Accordingly, in one embodiment, the molecule which activity is to be increased in the process of the invention is the gene product with an activity as a “ATP-binding component of a transport system”, preferably it is the molecule of section (a) or (b) of this paragraph.

[42178] In particular, it was observed that in plants, especially in Arabidopsis thaliana, increasing or generating the activity of a gene product non-targeted with the activity of a “ATP-binding component of a transport system”, preferably being encoded by a gene comprising the nucleic acid sequence SEQ ID NO. 7333, preferably the coding region thereof, conferred the production of or the increase in valine compared with the wild type control.

[42179] The nucleic acid sequence of B0486 from Escherichia coli, e.g. as shown in the respective line in column 5 of Table I, application no. 6, has been published in B. And the activity of the gene product thereof is the activity of membrane transport protein.

[42180] Accordingly, in one embodiment, the process of the present invention for producing isoleucine in a non-human organism, like a microorganism or a plant or a part thereof, comprises increasing or generating the activity of a gene product with the activity of a gene product conferring the activity of “membrane transport protein”, especially from Escherichia coli or its functional equivalent or its homolog, e.g. the increase of
[42181] (a) a gene product of a gene comprising the nucleic acid molecule as shown in the respective line in column 5 of Table I (whereby the respective line discloses in column 7 the fine chemical isoleucine), application no. 6, preferably the coding region thereof, or a homolog or a fragment thereof, and being depicted in the same respective line as said B0486, or a functional equivalent or a homolog thereof as shown in column 8 of Table I, application no. 6, preferably the coding region thereof, particularly a homolog or functional equivalent as shown in column 8 of Table I B, application no. 6, and being depicted in the same respective line as said B0486, and preferably the activity is increased non-targeted, or
[42182] (b) a polypeptide comprising a polypeptide, a consensus sequence or at least a polypeptide motif as shown in the respective line in column 5 of Table II or in column 8 of Table IV, application no. 6, respectively, and being depicted in the same respective line as said B0486, or a functional equivalent or a homolog thereof as depicted in column 8 of Table II, application no. 6, preferably a homolog or functional equivalent as depicted in column 8 of Table II B, application no. 6, and being depicted in the same respective line as said B0486, and preferably the activity is increased non-targeted, whereby the respective line discloses in column 7 the fine chemical isoleucine.

[42183] Accordingly, in one embodiment, the molecule which activity is to be increased in the process of the invention is the gene product with an activity as a “membrane transport protein”, preferably it is the molecule of section (a) or (b) of this paragraph.

[42184] In particular, it was observed that in plants, especially in Arabidopsis thaliana, increasing or generating the activity of a gene product non-targeted with the activity of a “membrane transport protein”, preferably being encoded by a gene comprising the nucleic acid sequence SEQ ID NO. 7686, preferably the coding region thereof, conferred the production of or the increase in isoleucine compared with the wild type control.

[42185] The nucleic acid sequence of B0593 from Escherichia coli, e.g. as shown in the respective line in column 5 of Table I, application no. 6, has been published in B. And the activity of the gene product thereof is the activity of isochorismate synthase.

[42186] Accordingly, in one embodiment, the process of the present invention for producing isoleucine in a non-human organism, like a microorganism or a plant or a part thereof, comprises increasing or generating the activity of a gene product with the activity of a gene product conferring the activity of “isochorismate synthase”, especially from Escherichia coli or its functional equivalent or its homolog, e.g. the increase of
[42187] (a) a gene product of a gene comprising the nucleic acid molecule as shown in the respective line in column 5 of Table I (whereby the respective line discloses in column 7 the fine chemical isoleucine), application no. 6, preferably the coding region thereof, or a homolog or a fragment thereof, and being depicted in the same respective line as said B0593, or a functional equivalent or a homolog thereof as shown in column 8 of Table I, application no. 6, preferably the coding region thereof, particularly a homolog or functional equivalent as shown in column 8 of Table I B, application no. 6, and being depicted in the same respective line as said B0593, and preferably the activity is increased plastidic, or
[42188] (b) a polypeptide comprising a polypeptide, a consensus sequence or at least a polypeptide motif as shown in the respective line in column 5 of Table II or in column 8 of Table IV, application no. 6, respectively, and being depicted in the same respective line as said B0593, or a functional equivalent or a homolog thereof as depicted in column 8 of Table II, application no. 6, preferably a homolog or functional equivalent as depicted in column 8 of Table II B, application no. 6, and being depicted in the same respective line as said B0593, and preferably the activity is increased plastidic, whereby the respective line discloses in column 7 the fine chemical isoleucine.

[42189] Accordingly, in one embodiment, the molecule which activity is to be increased in the process of the invention is the gene product with an activity as a “isochorismate synthase”, preferably it is the molecule of section (a) or (b) of this paragraph.

[42190] In particular, it was observed that in plants, especially in Arabidopsis thaliana, increasing or generating the activity of a gene product plastidic with the activity of a “isochorismate synthase”, preferably being encoded by a gene comprising the nucleic acid sequence SEQ ID NO. 35967, preferably the coding region thereof, conferred the production of or the increase in isoleucine compared with the wild type control.

[42191] The nucleic acid sequence of B0593 from Escherichia coli, e.g. as shown in the respective line in column 5 of Table I, application no. 6, has been published in B. And the activity of the gene product thereof is the activity of isochorismate synthase.

[42192] Accordingly, in one embodiment, the process of the present invention for producing leucine in a non-human organism, like a microorganism or a plant or a part thereof, comprises increasing or generating the activity of a gene product with the activity of a gene product conferring the activity of “isochorismate synthase”, especially from Escherichia coli or its functional equivalent or its homolog, e.g. the increase of
[42193] (a) a gene product of a gene comprising the nucleic acid molecule as shown in the respective line in column 5 of Table I (whereby the respective line discloses in column 7 the fine chemical leucine), application no. 6, preferably the coding region thereof, or a homolog or a fragment thereof, and being depicted in the same respective line as said B0593, or a functional equivalent or a homolog thereof as shown in column 8 of Table I, application no. 6, preferably the coding region thereof, particularly a homolog or functional equivalent as shown in column 8 of Table I B, application no. 6, and being depicted in the same respective line as said B0593, and preferably the activity is increased plastidic, or
[42194] (b) a polypeptide comprising a polypeptide, a consensus sequence or at least a polypeptide motif as shown in the respective line in column 5 of Table II or in column 8 of Table IV, application no. 6, respectively, and being depicted in the same respective line as said B0593, or a functional equivalent or a homolog thereof as depicted in column 8 of Table II, application no. 6, preferably a homolog or functional equivalent as depicted in column 8 of Table II B, application no. 6, and being depicted in the same respective line as said B0593, and preferably the activity is increased plastidic, whereby the respective line discloses in column 7 the fine chemical leucine.

[42195] Accordingly, in one embodiment, the molecule which activity is to be increased in the process of the invention is the gene product with an activity as a “isochorismate synthase”, preferably it is the molecule of section (a) or (b) of this paragraph.

[42196] In particular, it was observed that in plants, especially in Arabidopsis thaliana, increasing or generating the activity of a gene product plastidic with the activity of a “isochorismate synthase”, preferably being encoded by a gene comprising the nucleic acid sequence SEQ ID NO. 35967, preferably the coding region thereof, conferred the production of or the increase in leucine compared with the wild type control.

[42197] The nucleic acid sequence of B0593 from Escherichia coli, e.g. as shown in the respective line in column 5 of Table I, application no. 6, has been published in B. And the activity of the gene product thereof is the activity of isochorismate synthase.

[42198] Accordingly, in one embodiment, the process of the present invention for producing valine in a non-human organism, like a microorganism or a plant or a part thereof, comprises increasing or generating the activity of a gene product with the activity of a gene product conferring the activity of “isochorismate synthase”, especially from Escherichia coli or its functional equivalent or its homolog, e.g. the increase of
[42199] (a) a gene product of a gene comprising the nucleic acid molecule as shown in the respective line in column 5 of Table I (whereby the respective line discloses in column 7 the fine chemical valine), application no. 6, preferably the coding region thereof, or a homolog or a fragment thereof, and being depicted in the same respective line as said B0593, or a functional equivalent or a homolog thereof as shown in column 8 of Table I, application no. 6, preferably the coding region thereof, particularly a homolog or functional equivalent as shown in column 8 of Table I B, application no. 6, and being depicted in the same respective line as said B0593, and preferably the activity is increased plastidic, or
[42200] (b) a polypeptide comprising a polypeptide, a consensus sequence or at least a polypeptide motif as shown in the respective line in column 5 of Table II or in column 8 of Table IV, application no. 6, respectively, and being depicted in the same respective line as said B0593, or a functional equivalent or a homolog thereof as depicted in column 8 of Table II, application no. 6, preferably a homolog or functional equivalent as depicted in column 8 of Table II B, application no. 6, and being depicted in the same respective line as said B0593, and preferably the activity is increased plastidic, whereby the respective line discloses in column 7 the fine chemical valine.

[42201] Accordingly, in one embodiment, the molecule which activity is to be increased in the process of the invention is the gene product with an activity as a “isochorismate synthase”, preferably it is the molecule of section (a) or (b) of this paragraph.

[42202] In particular, it was observed that in plants, especially in Arabidopsis thaliana, increasing or generating the activity of a gene product plastidic with the activity of a “isochorismate synthase”, preferably being encoded by a gene comprising the nucleic acid sequence SEQ ID NO. 35967, preferably the coding region thereof, conferred the production of or the increase in valine compared with the wild type control.

[42203] The nucleic acid sequence of B0752 from Escherichia coli, e.g. as shown in the respective line in column 5 of Table I, application no. 6, has been published in B. And the activity of the gene product thereof is the activity of zinc transporter.

[42204] Accordingly, in one embodiment, the process of the present invention for producing isoleucine in a non-human organism, like a microorganism or a plant or a part thereof, comprises increasing or generating the activity of a gene product with the activity of a gene product conferring the activity of “zinc transporter”, especially from Escherichia coli or its functional equivalent or its homolog, e.g. the increase of
[42205] (a) a gene product of a gene comprising the nucleic acid molecule as shown in the respective line in column 5 of Table I (whereby the respective line discloses in column 7 the fine chemical isoleucine), application no. 6, preferably the coding region thereof, or a homolog or a fragment thereof, and being depicted in the same respective line as said B0752, or a functional equivalent or a homolog thereof as shown in column 8 of Table I, application no. 6, preferably the coding region thereof, particularly a homolog or functional equivalent as shown in column 8 of Table I B, application no. 6, and being depicted in the same respective line as said B0752, and preferably the activity is increased non-targeted, or
[42206] (b) a polypeptide comprising a polypeptide, a consensus sequence or at least a polypeptide motif as shown in the respective line in column 5 of Table II or in column 8 of Table IV, application no. 6, respectively, and being depicted in the same respective line as said B0752, or a functional equivalent or a homolog thereof as depicted in column 8 of Table II, application no. 6, preferably a homolog or functional equivalent as depicted in column 8 of Table II B, application no. 6, and being depicted in the same respective line as said B0752, and preferably the activity is increased non-targeted, whereby the respective line discloses in column 7 the fine chemical isoleucine.

[42207] Accordingly, in one embodiment, the molecule which activity is to be increased in the process of the invention is the gene product with an activity as a “zinc transporter”, preferably it is the molecule of section (a) or (b) of this paragraph.

[42208] In particular, it was observed that in plants, especially in Arabidopsis thaliana, increasing or generating the activity of a gene product non-targeted with the activity of a “zinc transporter”, preferably being encoded by a gene comprising the nucleic acid sequence SEQ ID NO. 36114, preferably the coding region thereof, conferred the production of or the increase in isoleucine compared with the wild type control.

[42209] The nucleic acid sequence of B0752 from Escherichia coli, e.g. as shown in the respective line in column 5 of Table I, application no. 6, has been published in B. And the activity of the gene product thereof is the activity of zinc transporter.

[42210] Accordingly, in one embodiment, the process of the present invention for producing leucine in a non-human organism, like a microorganism or a plant or a part thereof, comprises increasing or generating the activity of a gene product with the activity of a gene product conferring the activity of “zinc transporter”, especially from Escherichia coli or its functional equivalent or its homolog, e.g. the increase of
[42211] (a) a gene product of a gene comprising the nucleic acid molecule as shown in the respective line in column 5 of Table I (whereby the respective line discloses in column 7 the fine chemical leucine), application no. 6, preferably the coding region thereof, or a homolog or a fragment thereof, and being depicted in the same respective line as said B0752, or a functional equivalent or a homolog thereof as shown in column 8 of Table I, application no. 6, preferably the coding region thereof, particularly a homolog or functional equivalent as shown in column 8 of Table I B, application no. 6, and being depicted in the same respective line as said B0752, and preferably the activity is increased non-targeted, or
[42212] (b) a polypeptide comprising a polypeptide, a consensus sequence or at least a polypeptide motif as shown in the respective line in column 5 of Table II or in column 8 of Table IV, application no. 6, respectively, and being depicted in the same respective line as said B0752, or a functional equivalent or a homolog thereof as depicted in column 8 of Table II, application no. 6, preferably a homolog or functional equivalent as depicted in column 8 of Table II B, application no. 6, and being depicted in the same respective line as said B0752, and preferably the activity is increased non-targeted, whereby the respective line discloses in column 7 the fine chemical leucine.

[42213] Accordingly, in one embodiment, the molecule which activity is to be increased in the process of the invention is the gene product with an activity as a “zinc transporter”, preferably it is the molecule of section (a) or (b) of this paragraph.

[42214] In particular, it was observed that in plants, especially in Arabidopsis thaliana, increasing or generating the activity of a gene product non-targeted with the activity of a “zinc transporter”, preferably being encoded by a gene comprising the nucleic acid sequence SEQ ID NO. 36114, preferably the coding region thereof, conferred the production of or the increase in leucine compared with the wild type control.

[42215] The nucleic acid sequence of B0898 from Escherichia coli, e.g. as shown in the respective line in column 5 of Table I, application no. 6, has been published in B. And the activity of the gene product thereof is the activity of major facilitator superfamily transporter protein.

[42216] Accordingly, in one embodiment, the process of the present invention for producing isoleucine in a non-human organism, like a microorganism or a plant or a part thereof, comprises increasing or generating the activity of a gene product with the activity of a gene product conferring the activity of “major facilitator superfamily transporter protein”, especially from Escherichia coli or its functional equivalent or its homolog, e.g. the increase of
[42217] (a) a gene product of a gene comprising the nucleic acid molecule as shown in the respective line in column 5 of Table I (whereby the respective line discloses in column 7 the fine chemical isoleucine), application no. 6, preferably the coding region thereof, or a homolog or a fragment thereof, and being depicted in the same respective line as said B0898, or a functional equivalent or a homolog thereof as shown in column 8 of Table I, application no. 6, preferably the coding region thereof, particularly a homolog or functional equivalent as shown in column 8 of Table I B, application no. 6, and being depicted in the same respective line as said B0898, and preferably the activity is increased non-targeted, or
[42218] (b) a polypeptide comprising a polypeptide, a consensus sequence or at least a polypeptide motif as shown in the respective line in column 5 of Table II or in column 8 of Table IV, application no. 6, respectively, and being depicted in the same respective line as said B0898, or a functional equivalent or a homolog thereof as depicted in column 8 of Table II, application no. 6, preferably a homolog or functional equivalent as depicted in column 8 of Table II B, application no. 6, and being depicted in the same respective line as said B0898, and preferably the activity is increased non-targeted, whereby the respective line discloses in column 7 the fine chemical isoleucine.

[42219] Accordingly, in one embodiment, the molecule which activity is to be increased in the process of the invention is the gene product with an activity as a “major facilitator superfamily transporter protein”, preferably it is the molecule of section (a) or (b) of this paragraph.

[42220] In particular, it was observed that in plants, especially in Arabidopsis thaliana, increasing or generating the activity of a gene product non-targeted with the activity of a “major facilitator superfamily transporter protein”, preferably being encoded by a gene comprising the nucleic acid sequence SEQ ID NO. 7917, preferably the coding region thereof, conferred the production of or the increase in isoleucine compared with the wild type control.

[42221] The nucleic acid sequence of B0898 from Escherichia coli, e.g. as shown in the respective line in column 5 of Table I, application no. 6, has been published in B. And the activity of the gene product thereof is the activity of major facilitator superfamily transporter protein.

[42222] Accordingly, in one embodiment, the process of the present invention for producing leucine in a non-human organism, like a microorganism or a plant or a part thereof, comprises increasing or generating the activity of a gene product with the activity of a gene product conferring the activity of “major facilitator superfamily transporter protein”, especially from Escherichia coli or its functional equivalent or its homolog, e.g. the increase of
[42223] (a) a gene product of a gene comprising the nucleic acid molecule as shown in the respective line in column 5 of Table I (whereby the respective line discloses in column 7 the fine chemical leucine), application no. 6, preferably the coding region thereof, or a homolog or a fragment thereof, and being depicted in the same respective line as said B0898, or a functional equivalent or a homolog thereof as shown in column 8 of Table I, application no. 6, preferably the coding region thereof, particularly a homolog or functional equivalent as shown in column 8 of Table I B, application no. 6, and being depicted in the same respective line as said B0898, and preferably the activity is increased non-targeted, or
[42224] (b) a polypeptide comprising a polypeptide, a consensus sequence or at least a polypeptide motif as shown in the respective line in column 5 of Table II or in column 8 of Table IV, application no. 6, respectively, and being depicted in the same respective line as said B0898, or a functional equivalent or a homolog thereof as depicted in column 8 of Table II, application no. 6, preferably a homolog or functional equivalent as depicted in column 8 of Table II B, application no. 6, and being depicted in the same respective line as said B0898, and preferably the activity is increased non-targeted, whereby the respective line discloses in column 7 the fine chemical leucine.

[42225] Accordingly, in one embodiment, the molecule which activity is to be increased in the process of the invention is the gene product with an activity as a “major facilitator superfamily transporter protein”, preferably it is the molecule of section (a) or (b) of this paragraph.

[42226] In particular, it was observed that in plants, especially in Arabidopsis thaliana, increasing or generating the activity of a gene product non-targeted with the activity of a “major facilitator superfamily transporter protein”, preferably being encoded by a gene comprising the nucleic acid sequence SEQ ID NO. 7917, preferably the coding region thereof, conferred the production of or the increase in leucine compared with the wild type control.

[42227] The nucleic acid sequence of B0898 from Escherichia coli, e.g. as shown in the respective line in column 5 of Table I, application no. 6, has been published in B. And the activity of the gene product thereof is the activity of major facilitator superfamily transporter protein.

[42228] Accordingly, in one embodiment, the process of the present invention for producing valine in a non-human organism, like a microorganism or a plant or a part thereof, comprises increasing or generating the activity of a gene product with the activity of a gene product conferring the activity of “major facilitator superfamily transporter protein”, especially from Escherichia coli or its functional equivalent or its homolog, e.g. the increase of
[42229] (a) a gene product of a gene comprising the nucleic acid molecule as shown in the respective line in column 5 of Table I (whereby the respective line discloses in column 7 the fine chemical valine), application no. 6, preferably the coding region thereof, or a homolog or a fragment thereof, and being depicted in the same respective line as said B0898, or a functional equivalent or a homolog thereof as shown in column 8 of Table I, application no. 6, preferably the coding region thereof, particularly a homolog or functional equivalent as shown in column 8 of Table I B, application no. 6, and being depicted in the same respective line as said B0898, and preferably the activity is increased non-targeted, or
[42230] (b) a polypeptide comprising a polypeptide, a consensus sequence or at least a polypeptide motif as shown in the respective line in column 5 of Table II or in column 8 of Table IV, application no. 6, respectively, and being depicted in the same respective line as said B0898, or a functional equivalent or a homolog thereof as depicted in column 8 of Table II, application no. 6, preferably a homolog or functional equivalent as depicted in column 8 of Table II B, application no. 6, and being depicted in the same respective line as said B0898, and preferably the activity is increased non-targeted, whereby the respective line discloses in column 7 the fine chemical valine.

[42231] Accordingly, in one embodiment, the molecule which activity is to be increased in the process of the invention is the gene product with an activity as a “major facilitator superfamily transporter protein”, preferably it is the molecule of section (a) or (b) of this paragraph.

[42232] In particular, it was observed that in plants, especially in Arabidopsis thaliana, increasing or generating the activity of a gene product non-targeted with the activity of a “major facilitator superfamily transporter protein”, preferably being encoded by a gene comprising the nucleic acid sequence SEQ ID NO. 7917, preferably the coding region thereof, conferred the production of or the increase in valine compared with the wild type control.

[42233] The nucleic acid sequence of B0962 from Escherichia coli, e.g. as shown in the respective line in column 5 of Table I, application no. 6, has been published in B. And the activity of the gene product thereof is the activity of DNA helicase IV.

[42234] Accordingly, in one embodiment, the process of the present invention for producing leucine in a non-human organism, like a microorganism or a plant or a part thereof, comprises increasing or generating the activity of a gene product with the activity of a gene product conferring the activity of “DNA helicase IV”, especially from Escherichia coli or its functional equivalent or its homolog, e.g. the increase of
[42235] (a) a gene product of a gene comprising the nucleic acid molecule as shown in the respective line in column 5 of Table I (whereby the respective line discloses in column 7 the fine chemical leucine), application no. 6, preferably the coding region thereof, or a homolog or a fragment thereof, and being depicted in the same respective line as said B0962, or a functional equivalent or a homolog thereof as shown in column 8 of Table I, application no. 6, preferably the coding region thereof, particularly a homolog or functional equivalent as shown in column 8 of Table I B, application no. 6, and being depicted in the same respective line as said B0962, and preferably the activity is increased non-targeted, or
[42236] (b) a polypeptide comprising a polypeptide, a consensus sequence or at least a polypeptide motif as shown in the respective line in column 5 of Table II or in column 8 of Table IV, application no. 6, respectively, and being depicted in the same respective line as said B0962, or a functional equivalent or a homolog thereof as depicted in column 8 of Table II, application no. 6, preferably a homolog or functional equivalent as depicted in column 8 of Table II B, application no. 6, and being depicted in the same respective line as said B0962, and preferably the activity is increased non-targeted, whereby the respective line discloses in column 7 the fine chemical leucine.

[42237] Accordingly, in one embodiment, the molecule which activity is to be increased in the process of the invention is the gene product with an activity as a “DNA helicase IV”, preferably it is the molecule of section (a) or (b) of this paragraph.

[42238] In particular, it was observed that in plants, especially in Arabidopsis thaliana, increasing or generating the activity of a gene product non-targeted with the activity of a “DNA helicase IV”, preferably being encoded by a gene comprising the nucleic acid sequence SEQ ID NO. 36623, preferably the coding region thereof, conferred the production of or the increase in leucine compared with the wild type control.

[42239] The nucleic acid sequence of B0963 from Escherichia coli, e.g. as shown in the respective line in column 5 of Table I, application no. 6, has been published in B. And the activity of the gene product thereof is the activity of methylglyoxal synthase.

[42240] Accordingly, in one embodiment, the process of the present invention for producing valine in a non-human organism, like a microorganism or a plant or a part thereof, comprises increasing or generating the activity of a gene product with the activity of a gene product conferring the activity of “methylglyoxal synthase”, especially from Escherichia coli or its functional equivalent or its homolog, e.g. the increase of
[42241] (a) a gene product of a gene comprising the nucleic acid molecule as shown in the respective line in column 5 of Table I (whereby the respective line discloses in column 7 the fine chemical valine), application no. 6, preferably the coding region thereof, or a homolog or a fragment thereof, and being depicted in the same respective line as said B0963, or a functional equivalent or a homolog thereof as shown in column 8 of Table I, application no. 6, preferably the coding region thereof, particularly a homolog or functional equivalent as shown in column 8 of Table I B, application no. 6, and being depicted in the same respective line as said B0963, and preferably the activity is increased non-targeted, or
[42242] (b) a polypeptide comprising a polypeptide, a consensus sequence or at least a polypeptide motif as shown in the respective line in column 5 of Table II or in column 8 of Table IV, application no. 6, respectively, and being depicted in the same respective line as said B0963, or a functional equivalent or a homolog thereof as depicted in column 8 of Table II, application no. 6, preferably a homolog or functional equivalent as depicted in column 8 of Table II B, application no. 6, and being depicted in the same respective line as said B0963, and preferably the activity is increased non-targeted, whereby the respective line discloses in column 7 the fine chemical valine.

[42243] Accordingly, in one embodiment, the molecule which activity is to be increased in the process of the invention is the gene product with an activity as a “methylglyoxal synthase”, preferably it is the molecule of section (a) or (b) of this paragraph.

[42244] In particular, it was observed that in plants, especially in Arabidopsis thaliana, increasing or generating the activity of a gene product non-targeted with the activity of a “methylglyoxal synthase”, preferably being encoded by a gene comprising the nucleic acid sequence SEQ ID NO. 36670, preferably the coding region thereof, conferred the production of or the increase in valine compared with the wild type control.

[42245] The nucleic acid sequence of B0980 from Escherichia coli, e.g. as shown in the respective line in column 5 of Table I, application no. 6, has been published in B. And the activity of the gene product thereof is the activity of phosphoanhydride phosphorylase.

[42246] Accordingly, in one embodiment, the process of the present invention for producing valine in a non-human organism, like a microorganism or a plant or a part thereof, comprises increasing or generating the activity of a gene product with the activity of a gene product conferring the activity of “phosphoanhydride phosphorylase”, especially from Escherichia coli or its functional equivalent or its homolog, e.g. the increase of
[42247] (a) a gene product of a gene comprising the nucleic acid molecule as shown in the respective line in column 5 of Table I (whereby the respective line discloses in column 7 the fine chemical valine), application no. 6, preferably the coding region thereof, or a homolog or a fragment thereof, and being depicted in the same respective line as said B0980, or a functional equivalent or a homolog thereof as shown in column 8 of Table I, application no. 6, preferably the coding region thereof, particularly a homolog or functional equivalent as shown in column 8 of Table I B, application no. 6, and being depicted in the same respective line as said B0980, and preferably the activity is increased non-targeted, or
[42248] (b) a polypeptide comprising a polypeptide, a consensus sequence or at least a polypeptide motif as shown in the respective line in column 5 of Table II or in column 8 of Table IV, application no. 6, respectively, and being depicted in the same respective line as said B0980, or a functional equivalent or a homolog thereof as depicted in column 8 of Table II, application no. 6, preferably a homolog or functional equivalent as depicted in column 8 of Table II B, application no. 6, and being depicted in the same respective line as said B0980, and preferably the activity is increased non-targeted, whereby the respective line discloses in column 7 the fine chemical valine.

[42249] Accordingly, in one embodiment, the molecule which activity is to be increased in the process of the invention is the gene product with an activity as a “phosphoanhydride phosphorylase”, preferably it is the molecule of section (a) or (b) of this paragraph.

[42250] In particular, it was observed that in plants, especially in Arabidopsis thaliana, increasing or generating the activity of a gene product non-targeted with the activity of a “phosphoanhydride phosphorylase”, preferably being encoded by a gene comprising the nucleic acid sequence SEQ ID NO. 36809, preferably the coding region thereof, conferred the production of or the increase in valine compared with the wild type control.

[42251] The nucleic acid sequence of B1003 from Escherichia coli, e.g. as shown in the respective line in column 5 of Table I, application no. 6, has been published in B. And the activity of the gene product thereof is the activity of b1003-protein.

[42252] Accordingly, in one embodiment, the process of the present invention for producing isoleucine in a non-human organism, like a microorganism or a plant or a part thereof, comprises increasing or generating the activity of a gene product with the activity of a gene product conferring the activity of “b1003-protein”, especially from Escherichia coli or its functional equivalent or its homolog, e.g. the increase of
[42253] (a) a gene product of a gene comprising the nucleic acid molecule as shown in the respective line in column 5 of Table I (whereby the respective line discloses in column 7 the fine chemical isoleucine), application no. 6, preferably the coding region thereof, or a homolog or a fragment thereof, and being depicted in the same respective line as said B1003, or a functional equivalent or a homolog thereof as shown in column 8 of Table I, application no. 6, preferably the coding region thereof, particularly a homolog or functional equivalent as shown in column 8 of Table I B, application no. 6, and being depicted in the same respective line as said B1003, and preferably the activity is increased non-targeted, or
[42254] (b) a polypeptide comprising a polypeptide, a consensus sequence or at least a polypeptide motif as shown in the respective line in column 5 of Table II or in column 8 of Table IV, application no. 6, respectively, and being depicted in the same respective line as said B1003, or a functional equivalent or a homolog thereof as depicted in column 8 of Table II, application no. 6, preferably a homolog or functional equivalent as depicted in column 8 of Table II B, application no. 6, and being depicted in the same respective line as said B1003, and preferably the activity is increased non-targeted, whereby the respective line discloses in column 7 the fine chemical isoleucine.

[42255] Accordingly, in one embodiment, the molecule which activity is to be increased in the process of the invention is the gene product with an activity as a “b1003-protein”, preferably it is the molecule of section (a) or (b) of this paragraph.

[42256] In particular, it was observed that in plants, especially in Arabidopsis thaliana, increasing or generating the activity of a gene product non-targeted with the activity of a “b1003-protein”, preferably being encoded by a gene comprising the nucleic acid sequence SEQ ID NO. 7941, preferably the coding region thereof, conferred the production of or the increase in isoleucine compared with the wild type control.

[42257] The nucleic acid sequence of B1003 from Escherichia coli, e.g. as shown in the respective line in column 5 of Table I, application no. 6, has been published in B. And the activity of the gene product thereof is the activity of b1003-protein.

[42258] Accordingly, in one embodiment, the process of the present invention for producing leucine in a non-human organism, like a microorganism or a plant or a part thereof, comprises increasing or generating the activity of a gene product with the activity of a gene product conferring the activity of “b1003-protein”, especially from Escherichia coli or its functional equivalent or its homolog, e.g. the increase of
[42259] (a) a gene product of a gene comprising the nucleic acid molecule as shown in the respective line in column 5 of Table I (whereby the respective line discloses in column 7 the fine chemical leucine), application no. 6, preferably the coding region thereof, or a homolog or a fragment thereof, and being depicted in the same respective line as said B1003, or a functional equivalent or a homolog thereof as shown in column 8 of Table I, application no. 6, preferably the coding region thereof, particularly a homolog or functional equivalent as shown in column 8 of Table I B, application no. 6, and being depicted in the same respective line as said B1003, and preferably the activity is increased non-targeted, or
[42260] (b) a polypeptide comprising a polypeptide, a consensus sequence or at least a polypeptide motif as shown in the respective line in column 5 of Table II or in column 8 of Table IV, application no. 6, respectively, and being depicted in the same respective line as said B1003, or a functional equivalent or a homolog thereof as depicted in column 8 of Table II, application no. 6, preferably a homolog or functional equivalent as depicted in column 8 of Table II B, application no. 6, and being depicted in the same respective line as said B1003, and preferably the activity is increased non-targeted, whereby the respective line discloses in column 7 the fine chemical leucine.

[42261] Accordingly, in one embodiment, the molecule which activity is to be increased in the process of the invention is the gene product with an activity as a “b1003-protein”, preferably it is the molecule of section (a) or (b) of this paragraph.

[42262] In particular, it was observed that in plants, especially in Arabidopsis thaliana, increasing or generating the activity of a gene product non-targeted with the activity of a “b1003-protein”, preferably being encoded by a gene comprising the nucleic acid sequence SEQ ID NO. 7941, preferably the coding region thereof, conferred the production of or the increase in leucine compared with the wild type control.

[42263] The nucleic acid sequence of B1003 from Escherichia coli, e.g. as shown in the respective line in column 5 of Table I, application no. 6, has been published in B. And the activity of the gene product thereof is the activity of b1003-protein.

[42264] Accordingly, in one embodiment, the process of the present invention for producing valine in a non-human organism, like a microorganism or a plant or a part thereof, comprises increasing or generating the activity of a gene product with the activity of a gene product conferring the activity of “b1003-protein”, especially from Escherichia coli or its functional equivalent or its homolog, e.g. the increase of
[42265] (a) a gene product of a gene comprising the nucleic acid molecule as shown in the respective line in column 5 of Table I (whereby the respective line discloses in column 7 the fine chemical valine), application no. 6, preferably the coding region thereof, or a homolog or a fragment thereof, and being depicted in the same respective line as said B1003, or a functional equivalent or a homolog thereof as shown in column 8 of Table I, application no. 6, preferably the coding region thereof, particularly a homolog or functional equivalent as shown in column 8 of Table I B, application no. 6, and being depicted in the same respective line as said B1003, and preferably the activity is increased non-targeted, or
[42266] (b) a polypeptide comprising a polypeptide, a consensus sequence or at least a polypeptide motif as shown in the respective line in column 5 of Table II or in column 8 of Table IV, application no. 6, respectively, and being depicted in the same respective line as said B1003, or a functional equivalent or a homolog thereof as depicted in column 8 of Table II, application no. 6, preferably a homolog or functional equivalent as depicted in column 8 of Table II B, application no. 6, and being depicted in the same respective line as said B1003, and preferably the activity is increased non-targeted, whereby the respective line discloses in column 7 the fine chemical valine.

[42267] Accordingly, in one embodiment, the molecule which activity is to be increased in the process of the invention is the gene product with an activity as a “b1003-protein”, preferably it is the molecule of section (a) or (b) of this paragraph.

[42268] In particular, it was observed that in plants, especially in Arabidopsis thaliana, increasing or generating the activity of a gene product non-targeted with the activity of a “b1003-protein”, preferably being encoded by a gene comprising the nucleic acid sequence SEQ ID NO. 7941, preferably the coding region thereof, conferred the production of or the increase in valine compared with the wild type control.

[42269] The nucleic acid sequence of B1163 from Escherichia coli, e.g. as shown in the respective line in column 5 of Table I, application no. 6, has been published in B. And the activity of the gene product thereof is the activity of b1163-protein.

[42270] Accordingly, in one embodiment, the process of the present invention for producing isoleucine in a non-human organism, like a microorganism or a plant or a part thereof, comprises increasing or generating the activity of a gene product with the activity of a gene product conferring the activity of “b1163-protein”, especially from Escherichia coli or its functional equivalent or its homolog, e.g. the increase of
[42271] (a) a gene product of a gene comprising the nucleic acid molecule as shown in the respective line in column 5 of Table I (whereby the respective line discloses in column 7 the fine chemical isoleucine), application no. 6, preferably the coding region thereof, or a homolog or a fragment thereof, and being depicted in the same respective line as said B1163, or a functional equivalent or a homolog thereof as shown in column 8 of Table I, application no. 6, preferably the coding region thereof, particularly a homolog or functional equivalent as shown in column 8 of Table I B, application no. 6, and being depicted in the same respective line as said B1163, and preferably the activity is increased non-targeted, or
[42272] (b) a polypeptide comprising a polypeptide, a consensus sequence or at least a polypeptide motif as shown in the respective line in column 5 of Table II or in column 8 of Table IV, application no. 6, respectively, and being depicted in the same respective line as said B1163, or a functional equivalent or a homolog thereof as depicted in column 8 of Table II, application no. 6, preferably a homolog or functional equivalent as depicted in column 8 of Table II B, application no. 6, and being depicted in the same respective line as said B1163, and preferably the activity is increased non-targeted, whereby the respective line discloses in column 7 the fine chemical isoleucine.

[42273] Accordingly, in one embodiment, the molecule which activity is to be increased in the process of the invention is the gene product with an activity as a “b1163-protein”, preferably it is the molecule of section (a) or (b) of this paragraph.

[42274] In particular, it was observed that in plants, especially in Arabidopsis thaliana, increasing or generating the activity of a gene product non-targeted with the activity of a “b1163-protein”, preferably being encoded by a gene comprising the nucleic acid sequence SEQ ID NO. 37394, preferably the coding region thereof, conferred the production of or the increase in isoleucine compared with the wild type control.

[42275] The nucleic acid sequence of B1163 from Escherichia coli, e.g. as shown in the respective line in column 5 of Table I, application no. 6, has been published in B. And the activity of the gene product thereof is the activity of b1163-protein.

[42276] Accordingly, in one embodiment, the process of the present invention for producing leucine in a non-human organism, like a microorganism or a plant or a part thereof, comprises increasing or generating the activity of a gene product with the activity of a gene product conferring the activity of “b1163-protein”, especially from Escherichia coli or its functional equivalent or its homolog, e.g. the increase of
[42277] (a) a gene product of a gene comprising the nucleic acid molecule as shown in the respective line in column 5 of Table I (whereby the respective line discloses in column 7 the fine chemical leucine), application no. 6, preferably the coding region thereof, or a homolog or a fragment thereof, and being depicted in the same respective line as said B1163, or a functional equivalent or a homolog thereof as shown in column 8 of Table I, application no. 6, preferably the coding region thereof, particularly a homolog or functional equivalent as shown in column 8 of Table I B, application no. 6, and being depicted in the same respective line as said B1163, and preferably the activity is increased non-targeted, or
[42278] (b) a polypeptide comprising a polypeptide, a consensus sequence or at least a polypeptide motif as shown in the respective line in column 5 of Table II or in column 8 of Table IV, application no. 6, respectively, and being depicted in the same respective line as said B1163, or a functional equivalent or a homolog thereof as depicted in column 8 of Table II, application no. 6, preferably a homolog or functional equivalent as depicted in column 8 of Table II B, application no. 6, and being depicted in the same respective line as said B1163, and preferably the activity is increased non-targeted, whereby the respective line discloses in column 7 the fine chemical leucine.

[42279] Accordingly, in one embodiment, the molecule which activity is to be increased in the process of the invention is the gene product with an activity as a “b1163-protein”, preferably it is the molecule of section (a) or (b) of this paragraph.

[42280] In particular, it was observed that in plants, especially in Arabidopsis thaliana, increasing or generating the activity of a gene product non-targeted with the activity of a “b1163-protein”, preferably being encoded by a gene comprising the nucleic acid sequence SEQ ID NO. 37394, preferably the coding region thereof, conferred the production of or the increase in leucine compared with the wild type control.

[42281] The nucleic acid sequence of B1163 from Escherichia coli, e.g. as shown in the respective line in column 5 of Table I, application no. 6, has been published in B. And the activity of the gene product thereof is the activity of b1163-protein.

[42282] Accordingly, in one embodiment, the process of the present invention for producing valine in a non-human organism, like a microorganism or a plant or a part thereof, comprises increasing or generating the activity of a gene product with the activity of a gene product conferring the activity of “b1163-protein”, especially from Escherichia coli or its functional equivalent or its homolog, e.g. the increase of
[42283] (a) a gene product of a gene comprising the nucleic acid molecule as shown in the respective line in column 5 of Table I (whereby the respective line discloses in column 7 the fine chemical valine), application no. 6, preferably the coding region thereof, or a homolog or a fragment thereof, and being depicted in the same respective line as said B1163, or a functional equivalent or a homolog thereof as shown in column 8 of Table I, application no. 6, preferably the coding region thereof, particularly a homolog or functional equivalent as shown in column 8 of Table I B, application no. 6, and being depicted in the same respective line as said B1163, and preferably the activity is increased non-targeted, or
[42284] (b) a polypeptide comprising a polypeptide, a consensus sequence or at least a polypeptide motif as shown in the respective line in column 5 of Table II or in column 8 of Table IV, application no. 6, respectively, and being depicted in the same respective line as said B1163, or a functional equivalent or a homolog thereof as depicted in column 8 of Table II, application no. 6, preferably a homolog or functional equivalent as depicted in column 8 of Table II B, application no. 6, and being depicted in the same respective line as said B1163, and preferably the activity is increased non-targeted, whereby the respective line discloses in column 7 the fine chemical valine.

[42285] Accordingly, in one embodiment, the molecule which activity is to be increased in the process of the invention is the gene product with an activity as a “b1163-protein”, preferably it is the molecule of section (a) or (b) of this paragraph.

[42286] In particular, it was observed that in plants, especially in Arabidopsis thaliana, increasing or generating the activity of a gene product non-targeted with the activity of a “b1163-protein”, preferably being encoded by a gene comprising the nucleic acid sequence SEQ ID NO. 37394, preferably the coding region thereof, conferred the production of or the increase in valine compared with the wild type control.

[42287] The nucleic acid sequence of B1184 from Escherichia coli, e.g. as shown in the respective line in column 5 of Table I, application no. 6, has been published in B. And the activity of the gene product thereof is the activity of DNA polymerase.

[42288] Accordingly, in one embodiment, the process of the present invention for producing leucine in a non-human organism, like a microorganism or a plant or a part thereof, comprises increasing or generating the activity of a gene product with the activity of a gene product conferring the activity of “DNA polymerase”, especially from Escherichia coli or its functional equivalent or its homolog, e.g. the increase of
[42289] (a) a gene product of a gene comprising the nucleic acid molecule as shown in the respective line in column 5 of Table I (whereby the respective line discloses in column 7 the fine chemical leucine), application no. 6, preferably the coding region thereof, or a homolog or a fragment thereof, and being depicted in the same respective line as said B1184, or a functional equivalent or a homolog thereof as shown in column 8 of Table I, application no. 6, preferably the coding region thereof, particularly a homolog or functional equivalent as shown in column 8 of Table I B, application no. 6, and being depicted in the same respective line as said B1184, and preferably the activity is increased plastidic, or
[42290] (b) a polypeptide comprising a polypeptide, a consensus sequence or at least a polypeptide motif as shown in the respective line in column 5 of Table II or in column 8 of Table IV, application no. 6, respectively, and being depicted in the same respective line as said B1184, or a functional equivalent or a homolog thereof as depicted in column 8 of Table II, application no. 6, preferably a homolog or functional equivalent as depicted in column 8 of Table II B, application no. 6, and being depicted in the same respective line as said B1184, and preferably the activity is increased plastidic, whereby the respective line discloses in column 7 the fine chemical leucine.

[42291] Accordingly, in one embodiment, the molecule which activity is to be increased in the process of the invention is the gene product with an activity as a “DNA polymerase”, preferably it is the molecule of section (a) or (b) of this paragraph.

[42292] In particular, it was observed that in plants, especially in Arabidopsis thaliana, increasing or generating the activity of a gene product plastidic with the activity of a “DNA polymerase”, preferably being encoded by a gene comprising the nucleic acid sequence SEQ ID NO. 104134, preferably the coding region thereof, conferred the production of or the increase in leucine compared with the wild type control.

[42293] The nucleic acid sequence of B1184 from Escherichia coli, e.g. as shown in the respective line in column 5 of Table I, application no. 6, has been published in B. And the activity of the gene product thereof is the activity of DNA polymerase.

[42294] Accordingly, in one embodiment, the process of the present invention for producing valine in a non-human organism, like a microorganism or a plant or a part thereof, comprises increasing or generating the activity of a gene product with the activity of a gene product conferring the activity of “DNA polymerase”, especially from Escherichia coli or its functional equivalent or its homolog, e.g. the increase of
[42295] (a) a gene product of a gene comprising the nucleic acid molecule as shown in the respective line in column 5 of Table I (whereby the respective line discloses in column 7 the fine chemical valine), application no. 6, preferably the coding region thereof, or a homolog or a fragment thereof, and being depicted in the same respective line as said B1184, or a functional equivalent or a homolog thereof as shown in column 8 of Table I, application no. 6, preferably the coding region thereof, particularly a homolog or functional equivalent as shown in column 8 of Table I B, application no. 6, and being depicted in the same respective line as said B1184, and preferably the activity is increased plastidic, or
[42296] (b) a polypeptide comprising a polypeptide, a consensus sequence or at least a polypeptide motif as shown in the respective line in column 5 of Table II or in column 8 of Table IV, application no. 6, respectively, and being depicted in the same respective line as said B1184, or a functional equivalent or a homolog thereof as depicted in column 8 of Table II, application no. 6, preferably a homolog or functional equivalent as depicted in column 8 of Table II B, application no. 6, and being depicted in the same respective line as said B1184, and preferably the activity is increased plastidic, whereby the respective line discloses in column 7 the fine chemical valine.

[42297] Accordingly, in one embodiment, the molecule which activity is to be increased in the process of the invention is the gene product with an activity as a “DNA polymerase”, preferably it is the molecule of section (a) or (b) of this paragraph.

[42298] In particular, it was observed that in plants, especially in Arabidopsis thaliana, increasing or generating the activity of a gene product plastidic with the activity of a “DNA polymerase”, preferably being encoded by a gene comprising the nucleic acid sequence SEQ ID NO. 104134, preferably the coding region thereof, conferred the production of or the increase in valine compared with the wild type control.

[42299] The nucleic acid sequence of B1255 from Escherichia coli, e.g. as shown in the respective line in column 5 of Table I, application no. 6, has been published in B. And the activity of the gene product thereof is the activity of membrane protein.

[42300] Accordingly, in one embodiment, the process of the present invention for producing isoleucine in a non-human organism, like a microorganism or a plant or a part thereof, comprises increasing or generating the activity of a gene product with the activity of a gene product conferring the activity of “membrane protein”, especially from Escherichia coli or its functional equivalent or its homolog, e.g. the increase of
[42301] (a) a gene product of a gene comprising the nucleic acid molecule as shown in the respective line in column 5 of Table I (whereby the respective line discloses in column 7 the fine chemical isoleucine), application no. 6, preferably the coding region thereof, or a homolog or a fragment thereof, and being depicted in the same respective line as said B1255, or a functional equivalent or a homolog thereof as shown in column 8 of Table I, application no. 6, preferably the coding region thereof, particularly a homolog or functional equivalent as shown in column 8 of Table I B, application no. 6, and being depicted in the same respective line as said B1255, and preferably the activity is increased non-targeted, or
[42302] (b) a polypeptide comprising a polypeptide, a consensus sequence or at least a polypeptide motif as shown in the respective line in column 5 of Table II or in column 8 of Table IV, application no. 6, respectively, and being depicted in the same respective line as said B1255, or a functional equivalent or a homolog thereof as depicted in column 8 of Table II, application no. 6, preferably a homolog or functional equivalent as depicted in column 8 of Table II B, application no. 6, and being depicted in the same respective line as said B1255, and preferably the activity is increased non-targeted, whereby the respective line discloses in column 7 the fine chemical isoleucine.

[42303] Accordingly, in one embodiment, the molecule which activity is to be increased in the process of the invention is the gene product with an activity as a “membrane protein”, preferably it is the molecule of section (a) or (b) of this paragraph.

[42304] In particular, it was observed that in plants, especially in Arabidopsis thaliana, increasing or generating the activity of a gene product non-targeted with the activity of a “membrane protein”, preferably being encoded by a gene comprising the nucleic acid sequence SEQ ID NO. 37483, preferably the coding region thereof, conferred the production of or the increase in isoleucine compared with the wild type control.

[42305] The nucleic acid sequence of B1255 from Escherichia coli, e.g. as shown in the respective line in column 5 of Table I, application no. 6, has been published in B. And the activity of the gene product thereof is the activity of membrane protein.

[42306] Accordingly, in one embodiment, the process of the present invention for producing leucine in a non-human organism, like a microorganism or a plant or a part thereof, comprises increasing or generating the activity of a gene product with the activity of a gene product conferring the activity of “membrane protein”, especially from Escherichia coli or its functional equivalent or its homolog, e.g. the increase of
[42307] (a) a gene product of a gene comprising the nucleic acid molecule as shown in the respective line in column 5 of Table I (whereby the respective line discloses in column 7 the fine chemical leucine), application no. 6, preferably the coding region thereof, or a homolog or a fragment thereof, and being depicted in the same respective line as said B1255, or a functional equivalent or a homolog thereof as shown in column 8 of Table I, application no. 6, preferably the coding region thereof, particularly a homolog or functional equivalent as shown in column 8 of Table I B, application no. 6, and being depicted in the same respective line as said B1255, and preferably the activity is increased non-targeted, or
[42308] (b) a polypeptide comprising a polypeptide, a consensus sequence or at least a polypeptide motif as shown in the respective line in column 5 of Table II or in column 8 of Table IV, application no. 6, respectively, and being depicted in the same respective line as said B1255, or a functional equivalent or a homolog thereof as depicted in column 8 of Table II, application no. 6, preferably a homolog or functional equivalent as depicted in column 8 of Table II B, application no. 6, and being depicted in the same respective line as said B1255, and preferably the activity is increased non-targeted, whereby the respective line discloses in column 7 the fine chemical leucine.

[42309] Accordingly, in one embodiment, the molecule which activity is to be increased in the process of the invention is the gene product with an activity as a “membrane protein”, preferably it is the molecule of section (a) or (b) of this paragraph.

[42310] In particular, it was observed that in plants, especially in Arabidopsis thaliana, increasing or generating the activity of a gene product non-targeted with the activity of a “membrane protein”, preferably being encoded by a gene comprising the nucleic acid sequence SEQ ID NO. 37483, preferably the coding region thereof, conferred the production of or the increase in leucine compared with the wild type control.

[42311] The nucleic acid sequence of B1255 from Escherichia coli, e.g. as shown in the respective line in column 5 of Table I, application no. 6, has been published in B. And the activity of the gene product thereof is the activity of membrane protein.

[42312] Accordingly, in one embodiment, the process of the present invention for producing valine in a non-human organism, like a microorganism or a plant or a part thereof, comprises increasing or generating the activity of a gene product with the activity of a gene product conferring the activity of “membrane protein”, especially from Escherichia coli or its functional equivalent or its homolog, e.g. the increase of
[42313] (a) a gene product of a gene comprising the nucleic acid molecule as shown in the respective line in column 5 of Table I (whereby the respective line discloses in column 7 the fine chemical valine), application no. 6, preferably the coding region thereof, or a homolog or a fragment thereof, and being depicted in the same respective line as said B1255, or a functional equivalent or a homolog thereof as shown in column 8 of Table I, application no. 6, preferably the coding region thereof, particularly a homolog or functional equivalent as shown in column 8 of Table I B, application no. 6, and being depicted in the same respective line as said B1255, and preferably the activity is increased non-targeted, or
[42314] (b) a polypeptide comprising a polypeptide, a consensus sequence or at least a polypeptide motif as shown in the respective line in column 5 of Table II or in column 8 of Table IV, application no. 6, respectively, and being depicted in the same respective line as said B1255, or a functional equivalent or a homolog thereof as depicted in column 8 of Table II, application no. 6, preferably a homolog or functional equivalent as depicted in column 8 of Table II B, application no. 6, and being depicted in the same respective line as said B1255, and preferably the activity is increased non-targeted, whereby the respective line discloses in column 7 the fine chemical valine.

[42315] Accordingly, in one embodiment, the molecule which activity is to be increased in the process of the invention is the gene product with an activity as a “membrane protein”, preferably it is the molecule of section (a) or (b) of this paragraph.

[42316] In particular, it was observed that in plants, especially in Arabidopsis thaliana, increasing or generating the activity of a gene product non-targeted with the activity of a “membrane protein”, preferably being encoded by a gene comprising the nucleic acid sequence SEQ ID NO. 37483, preferably the coding region thereof, conferred the production of or the increase in valine compared with the wild type control.

[42317] The nucleic acid sequence of B1263 from Escherichia coli, e.g. as shown in the respective line in column 5 of Table I, application no. 6, has been published in B. And the activity of the gene product thereof is the activity of anthranilate synthase component II.

[42318] Accordingly, in one embodiment, the process of the present invention for producing isoleucine in a non-human organism, like a microorganism or a plant or a part thereof, comprises increasing or generating the activity of a gene product with the activity of a gene product conferring the activity of “anthranilate synthase component II”, especially from Escherichia coli or its functional equivalent or its homolog, e.g. the increase of
[42319] (a) a gene product of a gene comprising the nucleic acid molecule as shown in the respective line in column 5 of Table I (whereby the respective line discloses in column 7 the fine chemical isoleucine), application no. 6, preferably the coding region thereof, or a homolog or a fragment thereof, and being depicted in the same respective line as said B1263, or a functional equivalent or a homolog thereof as shown in column 8 of Table I, application no. 6, preferably the coding region thereof, particularly a homolog or functional equivalent as shown in column 8 of Table I B, application no. 6, and being depicted in the same respective line as said B1263, and preferably the activity is increased plastidic, or
[42320] (b) a polypeptide comprising a polypeptide, a consensus sequence or at least a polypeptide motif as shown in the respective line in column 5 of Table II or in column 8 of Table IV, application no. 6, respectively, and being depicted in the same respective line as said B1263, or a functional equivalent or a homolog thereof as depicted in column 8 of Table II, application no. 6, preferably a homolog or functional equivalent as depicted in column 8 of Table II B, application no. 6, and being depicted in the same respective line as said B1263, and preferably the activity is increased plastidic, whereby the respective line discloses in column 7 the fine chemical isoleucine.

[42321] Accordingly, in one embodiment, the molecule which activity is to be increased in the process of the invention is the gene product with an activity as a “anthranilate synthase component II”, preferably it is the molecule of section (a) or (b) of this paragraph.

[42322] In particular, it was observed that in plants, especially in Arabidopsis thaliana, increasing or generating the activity of a gene product plastidic with the activity of a “anthranilate synthase component II”, preferably being encoded by a gene comprising the nucleic acid sequence SEQ ID NO. 37539, preferably the coding region thereof, conferred the production of or the increase in isoleucine compared with the wild type control.

[42323] The nucleic acid sequence of B1263 from Escherichia coli, e.g. as shown in the respective line in column 5 of Table I, application no. 6, has been published in B. And the activity of the gene product thereof is the activity of anthranilate synthase component II.

[42324] Accordingly, in one embodiment, the process of the present invention for producing leucine in a non-human organism, like a microorganism or a plant or a part thereof, comprises increasing or generating the activity of a gene product with the activity of a gene product conferring the activity of “anthranilate synthase component II”, especially from Escherichia coli or its functional equivalent or its homolog, e.g. the increase of
[42325] (a) a gene product of a gene comprising the nucleic acid molecule as shown in the respective line in column 5 of Table I (whereby the respective line discloses in column 7 the fine chemical leucine), application no. 6, preferably the coding region thereof, or a homolog or a fragment thereof, and being depicted in the same respective line as said B1263, or a functional equivalent or a homolog thereof as shown in column 8 of Table I, application no. 6, preferably the coding region thereof, particularly a homolog or functional equivalent as shown in column 8 of Table I B, application no. 6, and being depicted in the same respective line as said B1263, and preferably the activity is increased plastidic, or
[42326] (b) a polypeptide comprising a polypeptide, a consensus sequence or at least a polypeptide motif as shown in the respective line in column 5 of Table II or in column 8 of Table IV, application no. 6, respectively, and being depicted in the same respective line as said B1263, or a functional equivalent or a homolog thereof as depicted in column 8 of Table II, application no. 6, preferably a homolog or functional equivalent as depicted in column 8 of Table II B, application no. 6, and being depicted in the same respective line as said B1263, and preferably the activity is increased plastidic, whereby the respective line discloses in column 7 the fine chemical leucine.

[42327] Accordingly, in one embodiment, the molecule which activity is to be increased in the process of the invention is the gene product with an activity as a “anthranilate synthase component II”, preferably it is the molecule of section (a) or (b) of this paragraph.

[42328] In particular, it was observed that in plants, especially in Arabidopsis thaliana, increasing or generating the activity of a gene product plastidic with the activity of a “anthranilate synthase component II”, preferably being encoded by a gene comprising the nucleic acid sequence SEQ ID NO. 37539, preferably the coding region thereof, conferred the production of or the increase in leucine compared with the wild type control.

[42329] The nucleic acid sequence of B1263 from Escherichia coli, e.g. as shown in the respective line in column 5 of Table I, application no. 6, has been published in B. And the activity of the gene product thereof is the activity of anthranilate synthase component II.

[42330] Accordingly, in one embodiment, the process of the present invention for producing valine in a non-human organism, like a microorganism or a plant or a part thereof, comprises increasing or generating the activity of a gene product with the activity of a gene product conferring the activity of “anthranilate synthase component II”, especially from Escherichia coli or its functional equivalent or its homolog, e.g. the increase of
[42331] (a) a gene product of a gene comprising the nucleic acid molecule as shown in the respective line in column 5 of Table I (whereby the respective line discloses in column 7 the fine chemical valine), application no. 6, preferably the coding region thereof, or a homolog or a fragment thereof, and being depicted in the same respective line as said B1263, or a functional equivalent or a homolog thereof as shown in column 8 of Table I, application no. 6, preferably the coding region thereof, particularly a homolog or functional equivalent as shown in column 8 of Table I B, application no. 6, and being depicted in the same respective line as said B1263, and preferably the activity is increased plastidic, or
[42332] (b) a polypeptide comprising a polypeptide, a consensus sequence or at least a polypeptide motif as shown in the respective line in column 5 of Table II or in column 8 of Table IV, application no. 6, respectively, and being depicted in the same respective line as said B1263, or a functional equivalent or a homolog thereof as depicted in column 8 of Table II, application no. 6, preferably a homolog or functional equivalent as depicted in column 8 of Table II B, application no. 6, and being depicted in the same respective line as said B1263, and preferably the activity is increased plastidic, whereby the respective line discloses in column 7 the fine chemical valine.

[42333] Accordingly, in one embodiment, the molecule which activity is to be increased in the process of the invention is the gene product with an activity as a “anthranilate synthase component II”, preferably it is the molecule of section (a) or (b) of this paragraph.

[42334] In particular, it was observed that in plants, especially in Arabidopsis thaliana, increasing or generating the activity of a gene product plastidic with the activity of a “anthranilate synthase component II”, preferably being encoded by a gene comprising the nucleic acid sequence SEQ ID NO. 37539, preferably the coding region thereof, conferred the production of or the increase in valine compared with the wild type control.

[42335] The nucleic acid sequence of B1297 from Escherichia coli, e.g. as shown in the respective line in column 5 of Table I, application no. 6, has been published in B. And the activity of the gene product thereof is the activity of glutamine synthetase.

[42336] Accordingly, in one embodiment, the process of the present invention for producing leucine in a non-human organism, like a microorganism or a plant or a part thereof, comprises increasing or generating the activity of a gene product with the activity of a gene product conferring the activity of “glutamine synthetase”, especially from Escherichia coli or its functional equivalent or its homolog, e.g. the increase of
[42337] (a) a gene product of a gene comprising the nucleic acid molecule as shown in the respective line in column 5 of Table I (whereby the respective line discloses in column 7 the fine chemical leucine), application no. 6, preferably the coding region thereof, or a homolog or a fragment thereof, and being depicted in the same respective line as said B1297, or a functional equivalent or a homolog thereof as shown in column 8 of Table I, application no. 6, preferably the coding region thereof, particularly a homolog or functional equivalent as shown in column 8 of Table I B, application no. 6, and being depicted in the same respective line as said B1297, and preferably the activity is increased plastidic, or
[42338] (b) a polypeptide comprising a polypeptide, a consensus sequence or at least a polypeptide motif as shown in the respective line in column 5 of Table II or in column 8 of Table IV, application no. 6, respectively, and being depicted in the same respective line as said B1297, or a functional equivalent or a homolog thereof as depicted in column 8 of Table II, application no. 6, preferably a homolog or functional equivalent as depicted in column 8 of Table II B, application no. 6, and being depicted in the same respective line as said B1297, and preferably the activity is increased plastidic, whereby the respective line discloses in column 7 the fine chemical leucine.

[42339] Accordingly, in one embodiment, the molecule which activity is to be increased in the process of the invention is the gene product with an activity as a “glutamine synthetase”, preferably it is the molecule of section (a) or (b) of this paragraph.

[42340] In particular, it was observed that in plants, especially in Arabidopsis thaliana, increasing or generating the activity of a gene product plastidic with the activity of a “glutamine synthetase”, preferably being encoded by a gene comprising the nucleic acid sequence SEQ ID NO. 37658, preferably the coding region thereof, conferred the production of or the increase in leucine compared with the wild type control.

[42341] The nucleic acid sequence of B1300 from Escherichia coli, e.g. as shown in the respective line in column 5 of Table I, application no. 6, has been published in B. And the activity of the gene product thereof is the activity of aldehyde dehydrogenase.

[42342] Accordingly, in one embodiment, the process of the present invention for producing valine in a non-human organism, like a microorganism or a plant or a part thereof, comprises increasing or generating the activity of a gene product with the activity of a gene product conferring the activity of “aldehyde dehydrogenase”, especially from Escherichia coli or its functional equivalent or its homolog, e.g. the increase of
[42343] (a) a gene product of a gene comprising the nucleic acid molecule as shown in the respective line in column 5 of Table I (whereby the respective line discloses in column 7 the fine chemical valine), application no. 6, preferably the coding region thereof, or a homolog or a fragment thereof, and being depicted in the same respective line as said B1300, or a functional equivalent or a homolog thereof as shown in column 8 of Table I, application no. 6, preferably the coding region thereof, particularly a homolog or functional equivalent as shown in column 8 of Table I B, application no. 6, and being depicted in the same respective line as said B1300, and preferably the activity is increased non-targeted, or
[42344] (b) a polypeptide comprising a polypeptide, a consensus sequence or at least a polypeptide motif as shown in the respective line in column 5 of Table II or in column 8 of Table IV, application no. 6, respectively, and being depicted in the same respective line as said B1300, or a functional equivalent or a homolog thereof as depicted in column 8 of Table II, application no. 6, preferably a homolog or functional equivalent as depicted in column 8 of Table II B, application no. 6, and being depicted in the same respective line as said B1300, and preferably the activity is increased non-targeted, whereby the respective line discloses in column 7 the fine chemical valine.

[42345] Accordingly, in one embodiment, the molecule which activity is to be increased in the process of the invention is the gene product with an activity as a “aldehyde dehydrogenase”, preferably it is the molecule of section (a) or (b) of this paragraph.

[42346] In particular, it was observed that in plants, especially in Arabidopsis thaliana, increasing or generating the activity of a gene product non-targeted with the activity of a “aldehyde dehydrogenase”, preferably being encoded by a gene comprising the nucleic acid sequence SEQ ID NO. 37807, preferably the coding region thereof, conferred the production of or the increase in valine compared with the wild type control.

[42347] The nucleic acid sequence of B1445 from Escherichia coli, e.g. as shown in the respective line in column 5 of Table I, application no. 6, has been published in B. And the activity of the gene product thereof is the activity of b1445-protein.

[42348] Accordingly, in one embodiment, the process of the present invention for producing valine in a non-human organism, like a microorganism or a plant or a part thereof, comprises increasing or generating the activity of a gene product with the activity of a gene product conferring the activity of “b1445-protein”, especially from Escherichia coli or its functional equivalent or its homolog, e.g. the increase of
[42349] (a) a gene product of a gene comprising the nucleic acid molecule as shown in the respective line in column 5 of Table I (whereby the respective line discloses in column 7 the fine chemical valine), application no. 6, preferably the coding region thereof, or a homolog or a fragment thereof, and being depicted in the same respective line as said B1445, or a functional equivalent or a homolog thereof as shown in column 8 of Table I, application no. 6, preferably the coding region thereof, particularly a homolog or functional equivalent as shown in column 8 of Table I B, application no. 6, and being depicted in the same respective line as said B1445, and preferably the activity is increased non-targeted, or
[42350] (b) a polypeptide comprising a polypeptide, a consensus sequence or at least a polypeptide motif as shown in the respective line in column 5 of Table II or in column 8 of Table IV, application no. 6, respectively, and being depicted in the same respective line as said B1445, or a functional equivalent or a homolog thereof as depicted in column 8 of Table II, application no. 6, preferably a homolog or functional equivalent as depicted in column 8 of Table II B, application no. 6, and being depicted in the same respective line as said B1445, and preferably the activity is increased non-targeted, whereby the respective line discloses in column 7 the fine chemical valine.

[42351] Accordingly, in one embodiment, the molecule which activity is to be increased in the process of the invention is the gene product with an activity as a “b1445-protein”, preferably it is the molecule of section (a) or (b) of this paragraph.

[42352] In particular, it was observed that in plants, especially in Arabidopsis thaliana, increasing or generating the activity of a gene product non-targeted with the activity of a “b1445-protein”, preferably being encoded by a gene comprising the nucleic acid sequence SEQ ID NO. 38289, preferably the coding region thereof, conferred the production of or the increase in valine compared with the wild type control.

[42353] The nucleic acid sequence of B1479 from Escherichia coli, e.g. as shown in the respective line in column 5 of Table I, application no. 6, has been published in B. And the activity of the gene product thereof is the activity of NADP-dependent malic enzyme.

[42354] Accordingly, in one embodiment, the process of the present invention for producing valine in a non-human organism, like a microorganism or a plant or a part thereof, comprises increasing or generating the activity of a gene product with the activity of a gene product conferring the activity of “NADP-dependent malic enzyme”, especially from Escherichia coli or its functional equivalent or its homolog, e.g. the increase of
[42355] (a) a gene product of a gene comprising the nucleic acid molecule as shown in the respective line in column 5 of Table I (whereby the respective line discloses in column 7 the fine chemical valine), application no. 6, preferably the coding region thereof, or a homolog or a fragment thereof, and being depicted in the same respective line as said B1479, or a functional equivalent or a homolog thereof as shown in column 8 of Table I, application no. 6, preferably the coding region thereof, particularly a homolog or functional equivalent as shown in column 8 of Table I B, application no. 6, and being depicted in the same respective line as said B1479, and preferably the activity is increased non-targeted, or
[42356] (b) a polypeptide comprising a polypeptide, a consensus sequence or at least a polypeptide motif as shown in the respective line in column 5 of Table II or in column 8 of Table IV, application no. 6, respectively, and being depicted in the same respective line as said B1479, or a functional equivalent or a homolog thereof as depicted in column 8 of Table II, application no. 6, preferably a homolog or functional equivalent as depicted in column 8 of Table II B, application no. 6, and being depicted in the same respective line as said B1479, and preferably the activity is increased non-targeted, whereby the respective line discloses in column 7 the fine chemical valine.

[42357] Accordingly, in one embodiment, the molecule which activity is to be increased in the process of the invention is the gene product with an activity as a “NADP-dependent malic enzyme”, preferably it is the molecule of section (a) or (b) of this paragraph.

[42358] In particular, it was observed that in plants, especially in Arabidopsis thaliana, increasing or generating the activity of a gene product non-targeted with the activity of a “NADP-dependent malic enzyme”, preferably being encoded by a gene comprising the nucleic acid sequence SEQ ID NO. 77774, preferably the coding region thereof, conferred the production of or the increase in valine compared with the wild type control.

[42359] The nucleic acid sequence of B1522 from Escherichia coli, e.g. as shown in the respective line in column 5 of Table I, application no. 6, has been published in B. And the activity of the gene product thereof is the activity of b1522-protein.

[42360] Accordingly, in one embodiment, the process of the present invention for producing isoleucine in a non-human organism, like a microorganism or a plant or a part thereof, comprises increasing or generating the activity of a gene product with the activity of a gene product conferring the activity of “b1522-protein”, especially from Escherichia coli or its functional equivalent or its homolog, e.g. the increase of
[42361] (a) a gene product of a gene comprising the nucleic acid molecule as shown in the respective line in column 5 of Table I (whereby the respective line discloses in column 7 the fine chemical isoleucine), application no. 6, preferably the coding region thereof, or a homolog or a fragment thereof, and being depicted in the same respective line as said B1522, or a functional equivalent or a homolog thereof as shown in column 8 of Table I, application no. 6, preferably the coding region thereof, particularly a homolog or functional equivalent as shown in column 8 of Table I B, application no. 6, and being depicted in the same respective line as said B1522, and preferably the activity is increased non-targeted, or
[42362] (b) a polypeptide comprising a polypeptide, a consensus sequence or at least a polypeptide motif as shown in the respective line in column 5 of Table II or in column 8 of Table IV, application no. 6, respectively, and being depicted in the same respective line as said B1522, or a functional equivalent or a homolog thereof as depicted in column 8 of Table II, application no. 6, preferably a homolog or functional equivalent as depicted in column 8 of Table II B, application no. 6, and being depicted in the same respective line as said B1522, and preferably the activity is increased non-targeted, whereby the respective line discloses in column 7 the fine chemical isoleucine.

[42363] Accordingly, in one embodiment, the molecule which activity is to be increased in the process of the invention is the gene product with an activity as a “b1522-protein”, preferably it is the molecule of section (a) or (b) of this paragraph.

[42364] In particular, it was observed that in plants, especially in Arabidopsis thaliana, increasing or generating the activity of a gene product non-targeted with the activity of a “b1522-protein”, preferably being encoded by a gene comprising the nucleic acid sequence SEQ ID NO. 7947, preferably the coding region thereof, conferred the production of or the increase in isoleucine compared with the wild type control.

[42365] The nucleic acid sequence of B1522 from Escherichia coli, e.g. as shown in the respective line in column 5 of Table I, application no. 6, has been published in B. And the activity of the gene product thereof is the activity of b1522-protein.

[42366] Accordingly, in one embodiment, the process of the present invention for producing leucine in a non-human organism, like a microorganism or a plant or a part thereof, comprises increasing or generating the activity of a gene product with the activity of a gene product conferring the activity of “b1522-protein”, especially from Escherichia coli or its functional equivalent or its homolog, e.g. the increase of
[42367] (a) a gene product of a gene comprising the nucleic acid molecule as shown in the respective line in column 5 of Table I (whereby the respective line discloses in column 7 the fine chemical leucine), application no. 6, preferably the coding region thereof, or a homolog or a fragment thereof, and being depicted in the same respective line as said B1522, or a functional equivalent or a homolog thereof as shown in column 8 of Table I, application no. 6, preferably the coding region thereof, particularly a homolog or functional equivalent as shown in column 8 of Table I B, application no. 6, and being depicted in the same respective line as said B1522, and preferably the activity is increased non-targeted, or
[42368] (b) a polypeptide comprising a polypeptide, a consensus sequence or at least a polypeptide motif as shown in the respective line in column 5 of Table II or in column 8 of Table IV, application no. 6, respectively, and being depicted in the same respective line as said B1522, or a functional equivalent or a homolog thereof as depicted in column 8 of Table II, application no. 6, preferably a homolog or functional equivalent as depicted in column 8 of Table II B, application no. 6, and being depicted in the same respective line as said B1522, and preferably the activity is increased non-targeted, whereby the respective line discloses in column 7 the fine chemical leucine.

[42369] Accordingly, in one embodiment, the molecule which activity is to be increased in the process of the invention is the gene product with an activity as a “b1522-protein”, preferably it is the molecule of section (a) or (b) of this paragraph.

[42370] In particular, it was observed that in plants, especially in Arabidopsis thaliana, increasing or generating the activity of a gene product non-targeted with the activity of a “b1522-protein”, preferably being encoded by a gene comprising the nucleic acid sequence SEQ ID NO. 7947, preferably the coding region thereof, conferred the production of or the increase in leucine compared with the wild type control.

[42371] The nucleic acid sequence of B1522 from Escherichia coli, e.g. as shown in the respective line in column 5 of Table I, application no. 6, has been published in B. And the activity of the gene product thereof is the activity of b1522-protein.

[42372] Accordingly, in one embodiment, the process of the present invention for producing valine in a non-human organism, like a microorganism or a plant or a part thereof, comprises increasing or generating the activity of a gene product with the activity of a gene product conferring the activity of “b1522-protein”, especially from Escherichia coli or its functional equivalent or its homolog, e.g. the increase of
[42373] (a) a gene product of a gene comprising the nucleic acid molecule as shown in the respective line in column 5 of Table I (whereby the respective line discloses in column 7 the fine chemical valine), application no. 6, preferably the coding region thereof, or a homolog or a fragment thereof, and being depicted in the same respective line as said B1522, or a functional equivalent or a homolog thereof as shown in column 8 of Table I, application no. 6, preferably the coding region thereof, particularly a homolog or functional equivalent as shown in column 8 of Table I B, application no. 6, and being depicted in the same respective line as said B1522, and preferably the activity is increased non-targeted, or
[42374] (b) a polypeptide comprising a polypeptide, a consensus sequence or at least a polypeptide motif as shown in the respective line in column 5 of Table II or in column 8 of Table IV, application no. 6, respectively, and being depicted in the same respective line as said B1522, or a functional equivalent or a homolog thereof as depicted in column 8 of Table II, application no. 6, preferably a homolog or functional equivalent as depicted in column 8 of Table II B, application no. 6, and being depicted in the same respective line as said B1522, and preferably the activity is increased non-targeted, whereby the respective line discloses in column 7 the fine chemical valine.

[42375] Accordingly, in one embodiment, the molecule which activity is to be increased in the process of the invention is the gene product with an activity as a “b1522-protein”, preferably it is the molecule of section (a) or (b) of this paragraph.

[42376] In particular, it was observed that in plants, especially in Arabidopsis thaliana, increasing or generating the activity of a gene product non-targeted with the activity of a “b1522-protein”, preferably being encoded by a gene comprising the nucleic acid sequence SEQ ID NO. 7947, preferably the coding region thereof, conferred the production of or the increase in valine compared with the wild type control.

[42377] The nucleic acid sequence of B1597 from Escherichia coli, e.g. as shown in the respective line in column 5 of Table I, application no. 6, has been published in B. And the activity of the gene product thereof is the activity of acid shock protein.

[42378] Accordingly, in one embodiment, the process of the present invention for producing isoleucine in a non-human organism, like a microorganism or a plant or a part thereof, comprises increasing or generating the activity of a gene product with the activity of a gene product conferring the activity of “acid shock protein”, especially from Escherichia coli or its functional equivalent or its homolog, e.g. the increase of
[42379] (a) a gene product of a gene comprising the nucleic acid molecule as shown in the respective line in column 5 of Table I (whereby the respective line discloses in column 7 the fine chemical isoleucine), application no. 6, preferably the coding region thereof, or a homolog or a fragment thereof, and being depicted in the same respective line as said B1597, or a functional equivalent or a homolog thereof as shown in column 8 of Table I, application no. 6, preferably the coding region thereof, particularly a homolog or functional equivalent as shown in column 8 of Table I B, application no. 6, and being depicted in the same respective line as said B1597, and preferably the activity is increased non-targeted, or
[42380] (b) a polypeptide comprising a polypeptide, a consensus sequence or at least a polypeptide motif as shown in the respective line in column 5 of Table II or in column 8 of Table IV, application no. 6, respectively, and being depicted in the same respective line as said B1597, or a functional equivalent or a homolog thereof as depicted in column 8 of Table II, application no. 6, preferably a homolog or functional equivalent as depicted in column 8 of Table II B, application no. 6, and being depicted in the same respective line as said B1597, and preferably the activity is increased non-targeted, whereby the respective line discloses in column 7 the fine chemical isoleucine.

[42381] Accordingly, in one embodiment, the molecule which activity is to be increased in the process of the invention is the gene product with an activity as a “acid shock protein”, preferably it is the molecule of section (a) or (b) of this paragraph.

[42382] In particular, it was observed that in plants, especially in Arabidopsis thaliana, increasing or generating the activity of a gene product non-targeted with the activity of a “acid shock protein”, preferably being encoded by a gene comprising the nucleic acid sequence SEQ ID NO. 38300, preferably the coding region thereof, conferred the production of or the increase in isoleucine compared with the wild type control.

[42383] The nucleic acid sequence of B1597 from Escherichia coli, e.g. as shown in the respective line in column 5 of Table I, application no. 6, has been published in B. And the activity of the gene product thereof is the activity of acid shock protein.

[42384] Accordingly, in one embodiment, the process of the present invention for producing leucine in a non-human organism, like a microorganism or a plant or a part thereof, comprises increasing or generating the activity of a gene product with the activity of a gene product conferring the activity of “acid shock protein”, especially from Escherichia coli or its functional equivalent or its homolog, e.g. the increase of
[42385] (a) a gene product of a gene comprising the nucleic acid molecule as shown in the respective line in column 5 of Table I (whereby the respective line discloses in column 7 the fine chemical leucine), application no. 6, preferably the coding region thereof, or a homolog or a fragment thereof, and being depicted in the same respective line as said B1597, or a functional equivalent or a homolog thereof as shown in column 8 of Table I, application no. 6, preferably the coding region thereof, particularly a homolog or functional equivalent as shown in column 8 of Table I B, application no. 6, and being depicted in the same respective line as said B1597, and preferably the activity is increased non-targeted, or
[42386] (b) a polypeptide comprising a polypeptide, a consensus sequence or at least a polypeptide motif as shown in the respective line in column 5 of Table II or in column 8 of Table IV, application no. 6, respectively, and being depicted in the same respective line as said B1597, or a functional equivalent or a homolog thereof as depicted in column 8 of Table II, application no. 6, preferably a homolog or functional equivalent as depicted in column 8 of Table II B, application no. 6, and being depicted in the same respective line as said B1597, and preferably the activity is increased non-targeted, whereby the respective line discloses in column 7 the fine chemical leucine.

[42387] Accordingly, in one embodiment, the molecule which activity is to be increased in the process of the invention is the gene product with an activity as a “acid shock protein”, preferably it is the molecule of section (a) or (b) of this paragraph.

[42388] In particular, it was observed that in plants, especially in Arabidopsis thaliana, increasing or generating the activity of a gene product non-targeted with the activity of a “acid shock protein”, preferably being encoded by a gene comprising the nucleic acid sequence SEQ ID NO. 38300, preferably the coding region thereof, conferred the production of or the increase in leucine compared with the wild type control.

[42389] The nucleic acid sequence of B1597 from Escherichia coli, e.g. as shown in the respective line in column 5 of Table I, application no. 6, has been published in B. And the activity of the gene product thereof is the activity of acid shock protein.

[42390] Accordingly, in one embodiment, the process of the present invention for producing valine in a non-human organism, like a microorganism or a plant or a part thereof, comprises increasing or generating the activity of a gene product with the activity of a gene product conferring the activity of “acid shock protein”, especially from Escherichia coli or its functional equivalent or its homolog, e.g. the increase of
[42391] (a) a gene product of a gene comprising the nucleic acid molecule as shown in the respective line in column 5 of Table I (whereby the respective line discloses in column 7 the fine chemical valine), application no. 6, preferably the coding region thereof, or a homolog or a fragment thereof, and being depicted in the same respective line as said B1597, or a functional equivalent or a homolog thereof as shown in column 8 of Table I, application no. 6, preferably the coding region thereof, particularly a homolog or functional equivalent as shown in column 8 of Table I B, application no. 6, and being depicted in the same respective line as said B1597, and preferably the activity is increased non-targeted, or
[42392] (b) a polypeptide comprising a polypeptide, a consensus sequence or at least a polypeptide motif as shown in the respective line in column 5 of Table II or in column 8 of Table IV, application no. 6, respectively, and being depicted in the same respective line as said B1597, or a functional equivalent or a homolog thereof as depicted in column 8 of Table II, application no. 6, preferably a homolog or functional equivalent as depicted in column 8 of Table II B, application no. 6, and being depicted in the same respective line as said B1597, and preferably the activity is increased non-targeted, whereby the respective line discloses in column 7 the fine chemical valine.

[42393] Accordingly, in one embodiment, the molecule which activity is to be increased in the process of the invention is the gene product with an activity as a “acid shock protein”, preferably it is the molecule of section (a) or (b) of this paragraph.

[42394] In particular, it was observed that in plants, especially in Arabidopsis thaliana, increasing or generating the activity of a gene product non-targeted with the activity of a “acid shock protein”, preferably being encoded by a gene comprising the nucleic acid sequence SEQ ID NO. 38300, preferably the coding region thereof, conferred the production of or the increase in valine compared with the wild type control.

[42395] The nucleic acid sequence of B1601 from Escherichia coli, e.g. as shown in the respective line in column 5 of Table I, application no. 6, has been published in B. And the activity of the gene product thereof is the activity of transport protein.

[42396] Accordingly, in one embodiment, the process of the present invention for producing valine in a non-human organism, like a microorganism or a plant or a part thereof, comprises increasing or generating the activity of a gene product with the activity of a gene product conferring the activity of “transport protein”, especially from Escherichia coli or its functional equivalent or its homolog, e.g. the increase of
[42397] (a) a gene product of a gene comprising the nucleic acid molecule as shown in the respective line in column 5 of Table I (whereby the respective line discloses in column 7 the fine chemical valine), application no. 6, preferably the coding region thereof, or a homolog or a fragment thereof, and being depicted in the same respective line as said B1601, or a functional equivalent or a homolog thereof as shown in column 8 of Table I, application no. 6, preferably the coding region thereof, particularly a homolog or functional equivalent as shown in column 8 of Table I B, application no. 6, and being depicted in the same respective line as said B1601, and preferably the activity is increased non-targeted, or
[42398] (b) a polypeptide comprising a polypeptide, a consensus sequence or at least a polypeptide motif as shown in the respective line in column 5 of Table II or in column 8 of Table IV, application no. 6, respectively, and being depicted in the same respective line as said B1601, or a functional equivalent or a homolog thereof as depicted in column 8 of Table II, application no. 6, preferably a homolog or functional equivalent as depicted in column 8 of Table II B, application no. 6, and being depicted in the same respective line as said B1601, and preferably the activity is increased non-targeted, whereby the respective line discloses in column 7 the fine chemical valine.

[42399] Accordingly, in one embodiment, the molecule which activity is to be increased in the process of the invention is the gene product with an activity as a “transport protein”, preferably it is the molecule of section (a) or (b) of this paragraph.

[42400] In particular, it was observed that in plants, especially in Arabidopsis thaliana, increasing or generating the activity of a gene product non-targeted with the activity of a “transport protein”, preferably being encoded by a gene comprising the nucleic acid sequence SEQ ID NO. 7992, preferably the coding region thereof, conferred the production of or the increase in valine compared with the wild type control.

[42401] The nucleic acid sequence of B1670 from Escherichia coli, e.g. as shown in the respective line in column 5 of Table I, application no. 6, has been published in B. And the activity of the gene product thereof is the activity of b1670-protein.

[42402] Accordingly, in one embodiment, the process of the present invention for producing valine in a non-human organism, like a microorganism or a plant or a part thereof, comprises increasing or generating the activity of a gene product with the activity of a gene product conferring the activity of “b1670-protein”, especially from Escherichia coli or its functional equivalent or its homolog, e.g. the increase of
[42403] (a) a gene product of a gene comprising the nucleic acid molecule as shown in the respective line in column 5 of Table I (whereby the respective line discloses in column 7 the fine chemical valine), application no. 6, preferably the coding region thereof, or a homolog or a fragment thereof, and being depicted in the same respective line as said B1670, or a functional equivalent or a homolog thereof as shown in column 8 of Table I, application no. 6, preferably the coding region thereof, particularly a homolog or functional equivalent as shown in column 8 of Table I B, application no. 6, and being depicted in the same respective line as said B1670, and preferably the activity is increased non-targeted, or
[42404] (b) a polypeptide comprising a polypeptide, a consensus sequence or at least a polypeptide motif as shown in the respective line in column 5 of Table II or in column 8 of Table IV, application no. 6, respectively, and being depicted in the same respective line as said B1670, or a functional equivalent or a homolog thereof as depicted in column 8 of Table II, application no. 6, preferably a homolog or functional equivalent as depicted in column 8 of Table II B, application no. 6, and being depicted in the same respective line as said B1670, and preferably the activity is increased non-targeted, whereby the respective line discloses in column 7 the fine chemical valine.

[42405] Accordingly, in one embodiment, the molecule which activity is to be increased in the process of the invention is the gene product with an activity as a “b1670-protein”, preferably it is the molecule of section (a) or (b) of this paragraph.

[42406] In particular, it was observed that in plants, especially in Arabidopsis thaliana, increasing or generating the activity of a gene product non-targeted with the activity of a “b1670-protein”, preferably being encoded by a gene comprising the nucleic acid sequence SEQ ID NO. 78753, preferably the coding region thereof, conferred the production of or the increase in valine compared with the wild type control.

[42407] The nucleic acid sequence of B1672 from Escherichia coli, e.g. as shown in the respective line in column 5 of Table I, application no. 6, has been published in B. And the activity of the gene product thereof is the activity of b1672-protein.

[42408] Accordingly, in one embodiment, the process of the present invention for producing valine in a non-human organism, like a microorganism or a plant or a part thereof, comprises increasing or generating the activity of a gene product with the activity of a gene product conferring the activity of “b1672-protein”, especially from Escherichia coli or its functional equivalent or its homolog, e.g. the increase of
[42409] (a) a gene product of a gene comprising the nucleic acid molecule as shown in the respective line in column 5 of Table I (whereby the respective line discloses in column 7 the fine chemical valine), application no. 6, preferably the coding region thereof, or a homolog or a fragment thereof, and being depicted in the same respective line as said B1672, or a functional equivalent or a homolog thereof as shown in column 8 of Table I, application no. 6, preferably the coding region thereof, particularly a homolog or functional equivalent as shown in column 8 of Table I B, application no. 6, and being depicted in the same respective line as said B1672, and preferably the activity is increased non-targeted, or
[42410] (b) a polypeptide comprising a polypeptide, a consensus sequence or at least a polypeptide motif as shown in the respective line in column 5 of Table II or in column 8 of Table IV, application no. 6, respectively, and being depicted in the same respective line as said B1672, or a functional equivalent or a homolog thereof as depicted in column 8 of Table II, application no. 6, preferably a homolog or functional equivalent as depicted in column 8 of Table II B, application no. 6, and being depicted in the same respective line as said B1672, and preferably the activity is increased non-targeted, whereby the respective line discloses in column 7 the fine chemical valine.

[42411] Accordingly, in one embodiment, the molecule which activity is to be increased in the process of the invention is the gene product with an activity as a “b1672-protein”, preferably it is the molecule of section (a) or (b) of this paragraph.

[42412] In particular, it was observed that in plants, especially in Arabidopsis thaliana, increasing or generating the activity of a gene product non-targeted with the activity of a “b1672-protein”, preferably being encoded by a gene comprising the nucleic acid sequence SEQ ID NO. 78771, preferably the coding region thereof, conferred the production of or the increase in valine compared with the wild type control.

[42413] The nucleic acid sequence of B1854 from Escherichia coli, e.g. as shown in the respective line in column 5 of Table I, application no. 6, has been published in B. And the activity of the gene product thereof is the activity of pyruvate kinase.

[42414] Accordingly, in one embodiment, the process of the present invention for producing leucine in a non-human organism, like a microorganism or a plant or a part thereof, comprises increasing or generating the activity of a gene product with the activity of a gene product conferring the activity of “pyruvate kinase”, especially from Escherichia coli or its functional equivalent or its homolog, e.g. the increase of
[42415] (a) a gene product of a gene comprising the nucleic acid molecule as shown in the respective line in column 5 of Table I (whereby the respective line discloses in column 7 the fine chemical leucine), application no. 6, preferably the coding region thereof, or a homolog or a fragment thereof, and being depicted in the same respective line as said B1854, or a functional equivalent or a homolog thereof as shown in column 8 of Table I, application no. 6, preferably the coding region thereof, particularly a homolog or functional equivalent as shown in column 8 of Table I B, application no. 6, and being depicted in the same respective line as said B1854, and preferably the activity is increased plastidic, or
[42416] (b) a polypeptide comprising a polypeptide, a consensus sequence or at least a polypeptide motif as shown in the respective line in column 5 of Table II or in column 8 of Table IV, application no. 6, respectively, and being depicted in the same respective line as said B1854, or a functional equivalent or a homolog thereof as depicted in column 8 of Table II, application no. 6, preferably a homolog or functional equivalent as depicted in column 8 of Table II B, application no. 6, and being depicted in the same respective line as said B1854, and preferably the activity is increased plastidic, whereby the respective line discloses in column 7 the fine chemical leucine.

[42417] Accordingly, in one embodiment, the molecule which activity is to be increased in the process of the invention is the gene product with an activity as a “pyruvate kinase”, preferably it is the molecule of section (a) or (b) of this paragraph.

[42418] In particular, it was observed that in plants, especially in Arabidopsis thaliana, increasing or generating the activity of a gene product plastidic with the activity of a “pyruvate kinase”, preferably being encoded by a gene comprising the nucleic acid sequence SEQ ID NO. 8363, preferably the coding region thereof, conferred the production of or the increase in leucine compared with the wild type control.

[42419] The nucleic acid sequence of B1873 from Escherichia coli, e.g. as shown in the respective line in column 5 of Table I, application no. 6, has been published in B. And the activity of the gene product thereof is the activity of cytochrome c-type protein.

[42420] Accordingly, in one embodiment, the process of the present invention for producing valine in a non-human organism, like a microorganism or a plant or a part thereof, comprises increasing or generating the activity of a gene product with the activity of a gene product conferring the activity of “cytochrome c-type protein”, especially from Escherichia coli or its functional equivalent or its homolog, e.g. the increase of
[42421] (a) a gene product of a gene comprising the nucleic acid molecule as shown in the respective line in column 5 of Table I (whereby the respective line discloses in column 7 the fine chemical valine), application no. 6, preferably the coding region thereof, or a homolog or a fragment thereof, and being depicted in the same respective line as said B1873, or a functional equivalent or a homolog thereof as shown in column 8 of Table I, application no. 6, preferably the coding region thereof, particularly a homolog or functional equivalent as shown in column 8 of Table I B, application no. 6, and being depicted in the same respective line as said B1873, and preferably the activity is increased non-targeted, or
[42422] (b) a polypeptide comprising a polypeptide, a consensus sequence or at least a polypeptide motif as shown in the respective line in column 5 of Table II or in column 8 of Table IV, application no. 6, respectively, and being depicted in the same respective line as said B1873, or a functional equivalent or a homolog thereof as depicted in column 8 of Table II, application no. 6, preferably a homolog or functional equivalent as depicted in column 8 of Table II B, application no. 6, and being depicted in the same respective line as said B1873, and preferably the activity is increased non-targeted, whereby the respective line discloses in column 7 the fine chemical valine.

[42423] Accordingly, in one embodiment, the molecule which activity is to be increased in the process of the invention is the gene product with an activity as a “cytochrome c-type protein”, preferably it is the molecule of section (a) or (b) of this paragraph.

[42424] In particular, it was observed that in plants, especially in Arabidopsis thaliana, increasing or generating the activity of a gene product non-targeted with the activity of a “cytochrome c-type protein”, preferably being encoded by a gene comprising the nucleic acid sequence SEQ ID NO. 78970, preferably the coding region thereof, conferred the production of or the increase in valine compared with the wild type control.

[42425] The nucleic acid sequence of B1897 from Escherichia coli, e.g. as shown in the respective line in column 5 of Table I, application no. 6, has been published in B. And the activity of the gene product thereof is the activity of trehalose-phosphatase.

[42426] Accordingly, in one embodiment, the process of the present invention for producing isoleucine in a non-human organism, like a microorganism or a plant or a part thereof, comprises increasing or generating the activity of a gene product with the activity of a gene product conferring the activity of “trehalose-phosphatase”, especially from Escherichia coli or its functional equivalent or its homolog, e.g. the increase of
[42427] (a) a gene product of a gene comprising the nucleic acid molecule as shown in the respective line in column 5 of Table I (whereby the respective line discloses in column 7 the fine chemical isoleucine), application no. 6, preferably the coding region thereof, or a homolog or a fragment thereof, and being depicted in the same respective line as said B1897, or a functional equivalent or a homolog thereof as shown in column 8 of Table I, application no. 6, preferably the coding region thereof, particularly a homolog or functional equivalent as shown in column 8 of Table I B, application no. 6, and being depicted in the same respective line as said B1897, and preferably the activity is increased non-targeted, or
[42428] (b) a polypeptide comprising a polypeptide, a consensus sequence or at least a polypeptide motif as shown in the respective line in column 5 of Table II or in column 8 of Table IV, application no. 6, respectively, and being depicted in the same respective line as said B1897, or a functional equivalent or a homolog thereof as depicted in column 8 of Table II, application no. 6, preferably a homolog or functional equivalent as depicted in column 8 of Table II B, application no. 6, and being depicted in the same respective line as said B1897, and preferably the activity is increased non-targeted, whereby the respective line discloses in column 7 the fine chemical isoleucine.

[42429] Accordingly, in one embodiment, the molecule which activity is to be increased in the process of the invention is the gene product with an activity as a “trehalose-phosphatase”, preferably it is the molecule of section (a) or (b) of this paragraph.

[42430] In particular, it was observed that in plants, especially in Arabidopsis thaliana, increasing or generating the activity of a gene product non-targeted with the activity of a “trehalosephosphatase”, preferably being encoded by a gene comprising the nucleic acid sequence SEQ ID NO. 79056, preferably the coding region thereof, conferred the production of or the increase in isoleucine compared with the wild type control.

[42431] The nucleic acid sequence of B1897 from Escherichia coli, e.g. as shown in the respective line in column 5 of Table I, application no. 6, has been published in B. And the activity of the gene product thereof is the activity of trehalose-phosphatase.

[42432] Accordingly, in one embodiment, the process of the present invention for producing leucine in a non-human organism, like a microorganism or a plant or a part thereof, comprises increasing or generating the activity of a gene product with the activity of a gene product conferring the activity of “trehalose-phosphatase”, especially from Escherichia coli or its functional equivalent or its homolog, e.g. the increase of
[42433] (a) a gene product of a gene comprising the nucleic acid molecule as shown in the respective line in column 5 of Table I (whereby the respective line discloses in column 7 the fine chemical leucine), application no. 6, preferably the coding region thereof, or a homolog or a fragment thereof, and being depicted in the same respective line as said B1897, or a functional equivalent or a homolog thereof as shown in column 8 of Table I, application no. 6, preferably the coding region thereof, particularly a homolog or functional equivalent as shown in column 8 of Table I B, application no. 6, and being depicted in the same respective line as said B1897, and preferably the activity is increased non-targeted, or
[42434] (b) a polypeptide comprising a polypeptide, a consensus sequence or at least a polypeptide motif as shown in the respective line in column 5 of Table II or in column 8 of Table IV, application no. 6, respectively, and being depicted in the same respective line as said B1897, or a functional equivalent or a homolog thereof as depicted in column 8 of Table II, application no. 6, preferably a homolog or functional equivalent as depicted in column 8 of Table II B, application no. 6, and being depicted in the same respective line as said B1897, and preferably the activity is increased non-targeted, whereby the respective line discloses in column 7 the fine chemical leucine.

[42435] Accordingly, in one embodiment, the molecule which activity is to be increased in the process of the invention is the gene product with an activity as a “trehalose-phosphatase”, preferably it is the molecule of section (a) or (b) of this paragraph.

[42436] In particular, it was observed that in plants, especially in Arabidopsis thaliana, increasing or generating the activity of a gene product non-targeted with the activity of a “trehalosephosphatase”, preferably being encoded by a gene comprising the nucleic acid sequence SEQ ID NO. 79056, preferably the coding region thereof, conferred the production of or the increase in leucine compared with the wild type control.

[42437] The nucleic acid sequence of B1897 from Escherichia coli, e.g. as shown in the respective line in column 5 of Table I, application no. 6, has been published in B. And the activity of the gene product thereof is the activity of trehalose-phosphatase.

[42438] Accordingly, in one embodiment, the process of the present invention for producing valine in a non-human organism, like a microorganism or a plant or a part thereof, comprises increasing or generating the activity of a gene product with the activity of a gene product conferring the activity of “trehalose-phosphatase”, especially from Escherichia coli or its functional equivalent or its homolog, e.g. the increase of
[42439] (a) a gene product of a gene comprising the nucleic acid molecule as shown in the respective line in column 5 of Table I (whereby the respective line discloses in column 7 the fine chemical valine), application no. 6, preferably the coding region thereof, or a homolog or a fragment thereof, and being depicted in the same respective line as said B1897, or a functional equivalent or a homolog thereof as shown in column 8 of Table I, application no. 6, preferably the coding region thereof, particularly a homolog or functional equivalent as shown in column 8 of Table I B, application no. 6, and being depicted in the same respective line as said B1897, and preferably the activity is increased non-targeted, or
[42440] (b) a polypeptide comprising a polypeptide, a consensus sequence or at least a polypeptide motif as shown in the respective line in column 5 of Table II or in column 8 of Table IV, application no. 6, respectively, and being depicted in the same respective line as said B1897, or a functional equivalent or a homolog thereof as depicted in column 8 of Table II, application no. 6, preferably a homolog or functional equivalent as depicted in column 8 of Table II B, application no. 6, and being depicted in the same respective line as said B1897, and preferably the activity is increased non-targeted, whereby the respective line discloses in column 7 the fine chemical valine.

[42441] Accordingly, in one embodiment, the molecule which activity is to be increased in the process of the invention is the gene product with an activity as a “trehalose-phosphatase”, preferably it is the molecule of section (a) or (b) of this paragraph.

[42442] In particular, it was observed that in plants, especially in Arabidopsis thaliana, increasing or generating the activity of a gene product non-targeted with the activity of a “trehalosephosphatase”, preferably being encoded by a gene comprising the nucleic acid sequence SEQ ID NO. 79056, preferably the coding region thereof, conferred the production of or the increase in valine compared with the wild type control.

[42443] The nucleic acid sequence of B2027 from Escherichia coli, e.g. as shown in the respective line in column 5 of Table I, application no. 6, has been published in B. And the activity of the gene product thereof is the activity of O-antigen chain length determinant.

[42444] Accordingly, in one embodiment, the process of the present invention for producing isoleucine in a non-human organism, like a microorganism or a plant or a part thereof, comprises increasing or generating the activity of a gene product with the activity of a gene product conferring the activity of “O-antigen chain length determinant”, especially from Escherichia coli or its functional equivalent or its homolog, e.g. the increase of
[42445] (a) a gene product of a gene comprising the nucleic acid molecule as shown in the respective line in column 5 of Table I (whereby the respective line discloses in column 7 the fine chemical isoleucine), application no. 6, preferably the coding region thereof, or a homolog or a fragment thereof, and being depicted in the same respective line as said B2027, or a functional equivalent or a homolog thereof as shown in column 8 of Table I, application no. 6, preferably the coding region thereof, particularly a homolog or functional equivalent as shown in column 8 of Table I B, application no. 6, and being depicted in the same respective line as said B2027, and preferably the activity is increased non-targeted, or
[42446] (b) a polypeptide comprising a polypeptide, a consensus sequence or at least a polypeptide motif as shown in the respective line in column 5 of Table II or in column 8 of Table IV, application no. 6, respectively, and being depicted in the same respective line as said B2027, or a functional equivalent or a homolog thereof as depicted in column 8 of Table II, application no. 6, preferably a homolog or functional equivalent as depicted in column 8 of Table II B, application no. 6, and being depicted in the same respective line as said B2027, and preferably the activity is increased non-targeted, whereby the respective line discloses in column 7 the fine chemical isoleucine.

[42447] Accordingly, in one embodiment, the molecule which activity is to be increased in the process of the invention is the gene product with an activity as a “O-antigen chain length determinant”, preferably it is the molecule of section (a) or (b) of this paragraph.

[42448] In particular, it was observed that in plants, especially in Arabidopsis thaliana, increasing or generating the activity of a gene product non-targeted with the activity of a “O-antigen chain length determinant”, preferably being encoded by a gene comprising the nucleic acid sequence SEQ ID NO. 79217, preferably the coding region thereof, conferred the production of or the increase in isoleucine compared with the wild type control.

[42449] The nucleic acid sequence of B2027 from Escherichia coli, e.g. as shown in the respective line in column 5 of Table I, application no. 6, has been published in B. And the activity of the gene product thereof is the activity of O-antigen chain length determinant.

[42450] Accordingly, in one embodiment, the process of the present invention for producing leucine in a non-human organism, like a microorganism or a plant or a part thereof, comprises increasing or generating the activity of a gene product with the activity of a gene product conferring the activity of “O-antigen chain length determinant”, especially from Escherichia coli or its functional equivalent or its homolog, e.g. the increase of
[42451] (a) a gene product of a gene comprising the nucleic acid molecule as shown in the respective line in column 5 of Table I (whereby the respective line discloses in column 7 the fine chemical leucine), application no. 6, preferably the coding region thereof, or a homolog or a fragment thereof, and being depicted in the same respective line as said B2027, or a functional equivalent or a homolog thereof as shown in column 8 of Table I, application no. 6, preferably the coding region thereof, particularly a homolog or functional equivalent as shown in column 8 of Table I B, application no. 6, and being depicted in the same respective line as said B2027, and preferably the activity is increased non-targeted, or
[42452] (b) a polypeptide comprising a polypeptide, a consensus sequence or at least a polypeptide motif as shown in the respective line in column 5 of Table II or in column 8 of Table IV, application no. 6, respectively, and being depicted in the same respective line as said B2027, or a functional equivalent or a homolog thereof as depicted in column 8 of Table II, application no. 6, preferably a homolog or functional equivalent as depicted in column 8 of Table II B, application no. 6, and being depicted in the same respective line as said B2027, and preferably the activity is increased non-targeted, whereby the respective line discloses in column 7 the fine chemical leucine.

[42453] Accordingly, in one embodiment, the molecule which activity is to be increased in the process of the invention is the gene product with an activity as a “O-antigen chain length determinant”, preferably it is the molecule of section (a) or (b) of this paragraph.

[42454] In particular, it was observed that in plants, especially in Arabidopsis thaliana, increasing or generating the activity of a gene product non-targeted with the activity of a “O-antigen chain length determinant”, preferably being encoded by a gene comprising the nucleic acid sequence SEQ ID NO. 79217, preferably the coding region thereof, conferred the production of or the increase in leucine compared with the wild type control.

[42455] The nucleic acid sequence of B2053 from Escherichia coli, e.g. as shown in the respective line in column 5 of Table I, application no. 6, has been published in B. And the activity of the gene product thereof is the activity of GDP-mannose 4,6-dehydratase.

[42456] Accordingly, in one embodiment, the process of the present invention for producing valine in a non-human organism, like a microorganism or a plant or a part thereof, comprises increasing or generating the activity of a gene product with the activity of a gene product conferring the activity of “GDP-mannose 4,6-dehydratase”, especially from Escherichia coli or its functional equivalent or its homolog, e.g. the increase of
[42457] (a) a gene product of a gene comprising the nucleic acid molecule as shown in the respective line in column 5 of Table I (whereby the respective line discloses in column 7 the fine chemical valine), application no. 6, preferably the coding region thereof, or a homolog or a fragment thereof, and being depicted in the same respective line as said B2053, or a functional equivalent or a homolog thereof as shown in column 8 of Table I, application no. 6, preferably the coding region thereof, particularly a homolog or functional equivalent as shown in column 8 of Table I B, application no. 6, and being depicted in the same respective line as said B2053, and preferably the activity is increased non-targeted, or
[42458] (b) a polypeptide comprising a polypeptide, a consensus sequence or at least a polypeptide motif as shown in the respective line in column 5 of Table II or in column 8 of Table IV, application no. 6, respectively, and being depicted in the same respective line as said B2053, or a functional equivalent or a homolog thereof as depicted in column 8 of Table II, application no. 6, preferably a homolog or functional equivalent as depicted in column 8 of Table II B, application no. 6, and being depicted in the same respective line as said B2053, and preferably the activity is increased non-targeted, whereby the respective line discloses in column 7 the fine chemical valine.

[42459] Accordingly, in one embodiment, the molecule which activity is to be increased in the process of the invention is the gene product with an activity as a “GDP-mannose 4,6-dehydratase”, preferably it is the molecule of section (a) or (b) of this paragraph.

[42460] In particular, it was observed that in plants, especially in Arabidopsis thaliana, increasing or generating the activity of a gene product non-targeted with the activity of a “GDP-mannose 4,6-dehydratase”, preferably being encoded by a gene comprising the nucleic acid sequence SEQ ID NO. 104277, preferably the coding region thereof, conferred the production of or the increase in valine compared with the wild type control.

[42461] The nucleic acid sequence of B2063 from Escherichia coli, e.g. as shown in the respective line in column 5 of Table I, application no. 6, has been published in B. And the activity of the gene product thereof is the activity of transport protein.

[42462] Accordingly, in one embodiment, the process of the present invention for producing isoleucine in a non-human organism, like a microorganism or a plant or a part thereof, comprises increasing or generating the activity of a gene product with the activity of a gene product conferring the activity of “transport protein”, especially from Escherichia coli or its functional equivalent or its homolog, e.g. the increase of
[42463] (a) a gene product of a gene comprising the nucleic acid molecule as shown in the respective line in column 5 of Table I (whereby the respective line discloses in column 7 the fine chemical isoleucine), application no. 6, preferably the coding region thereof, or a homolog or a fragment thereof, and being depicted in the same respective line as said B2063, or a functional equivalent or a homolog thereof as shown in column 8 of Table I, application no. 6, preferably the coding region thereof, particularly a homolog or functional equivalent as shown in column 8 of Table I B, application no. 6, and being depicted in the same respective line as said B2063, and preferably the activity is increased non-targeted, or
[42464] (b) a polypeptide comprising a polypeptide, a consensus sequence or at least a polypeptide motif as shown in the respective line in column 5 of Table II or in column 8 of Table IV, application no. 6, respectively, and being depicted in the same respective line as said B2063, or a functional equivalent or a homolog thereof as depicted in column 8 of Table II, application no. 6, preferably a homolog or functional equivalent as depicted in column 8 of Table II B, application no. 6, and being depicted in the same respective line as said B2063, and preferably the activity is increased non-targeted, whereby the respective line discloses in column 7 the fine chemical isoleucine.

[42465] Accordingly, in one embodiment, the molecule which activity is to be increased in the process of the invention is the gene product with an activity as a “transport protein”, preferably it is the molecule of section (a) or (b) of this paragraph.

[42466] In particular, it was observed that in plants, especially in Arabidopsis thaliana, increasing or generating the activity of a gene product non-targeted with the activity of a “transport protein”, preferably being encoded by a gene comprising the nucleic acid sequence SEQ ID NO. 38947, preferably the coding region thereof, conferred the production of or the increase in isoleucine compared with the wild type control.

[42467] The nucleic acid sequence of B2063 from Escherichia coli, e.g. as shown in the respective line in column 5 of Table I, application no. 6, has been published in B. And the activity of the gene product thereof is the activity of transport protein.

[42468] Accordingly, in one embodiment, the process of the present invention for producing leucine in a non-human organism, like a microorganism or a plant or a part thereof, comprises increasing or generating the activity of a gene product with the activity of a gene product conferring the activity of “transport protein”, especially from Escherichia coli or its functional equivalent or its homolog, e.g. the increase of
[42469] (a) a gene product of a gene comprising the nucleic acid molecule as shown in the respective line in column 5 of Table I (whereby the respective line discloses in column 7 the fine chemical leucine), application no. 6, preferably the coding region thereof, or a homolog or a fragment thereof, and being depicted in the same respective line as said B2063, or a functional equivalent or a homolog thereof as shown in column 8 of Table I, application no. 6, preferably the coding region thereof, particularly a homolog or functional equivalent as shown in column 8 of Table I B, application no. 6, and being depicted in the same respective line as said B2063, and preferably the activity is increased non-targeted, or
[42470] (b) a polypeptide comprising a polypeptide, a consensus sequence or at least a polypeptide motif as shown in the respective line in column 5 of Table II or in column 8 of Table IV, application no. 6, respectively, and being depicted in the same respective line as said B2063, or a functional equivalent or a homolog thereof as depicted in column 8 of Table II, application no. 6, preferably a homolog or functional equivalent as depicted in column 8 of Table II B, application no. 6, and being depicted in the same respective line as said B2063, and preferably the activity is increased non-targeted, whereby the respective line discloses in column 7 the fine chemical leucine.

[42471] Accordingly, in one embodiment, the molecule which activity is to be increased in the process of the invention is the gene product with an activity as a “transport protein”, preferably it is the molecule of section (a) or (b) of this paragraph.

[42472] In particular, it was observed that in plants, especially in Arabidopsis thaliana, increasing or generating the activity of a gene product non-targeted with the activity of a “transport protein”, preferably being encoded by a gene comprising the nucleic acid sequence SEQ ID NO. 38947, preferably the coding region thereof, conferred the production of or the increase in leucine compared with the wild type control.

[42473] The nucleic acid sequence of B2291 from Escherichia coli, e.g. as shown in the respective line in column 5 of Table I, application no. 6, has been published in B. And the activity of the gene product thereof is the activity of Nucleoside monophosphate phosphohydrolase.

[42474] Accordingly, in one embodiment, the process of the present invention for producing valine in a non-human organism, like a microorganism or a plant or a part thereof, comprises increasing or generating the activity of a gene product with the activity of a gene product conferring the activity of “Nucleoside monophosphate phosphohydrolase”, especially from Escherichia coli or its functional equivalent or its homolog, e.g. the increase of
[42475] (a) a gene product of a gene comprising the nucleic acid molecule as shown in the respective line in column 5 of Table I (whereby the respective line discloses in column 7 the fine chemical valine), application no. 6, preferably the coding region thereof, or a homolog or a fragment thereof, and being depicted in the same respective line as said B2291, or a functional equivalent or a homolog thereof as shown in column 8 of Table I, application no. 6, preferably the coding region thereof, particularly a homolog or functional equivalent as shown in column 8 of Table I B, application no. 6, and being depicted in the same respective line as said B2291, and preferably the activity is increased non-targeted, or
[42476] (b) a polypeptide comprising a polypeptide, a consensus sequence or at least a polypeptide motif as shown in the respective line in column 5 of Table II or in column 8 of Table IV, application no. 6, respectively, and being depicted in the same respective line as said B2291, or a functional equivalent or a homolog thereof as depicted in column 8 of Table II, application no. 6, preferably a homolog or functional equivalent as depicted in column 8 of Table II B, application no. 6, and being depicted in the same respective line as said B2291, and preferably the activity is increased non-targeted, whereby the respective line discloses in column 7 the fine chemical valine.

[42477] Accordingly, in one embodiment, the molecule which activity is to be increased in the process of the invention is the gene product with an activity as a “Nucleoside monophosphate phosphohydrolase”, preferably it is the molecule of section (a) or (b) of this paragraph.

[42478] In particular, it was observed that in plants, especially in Arabidopsis thaliana, increasing or generating the activity of a gene product non-targeted with the activity of a “Nucleoside monophosphate phosphohydrolase”, preferably being encoded by a gene comprising the nucleic acid sequence SEQ ID NO. 104616, preferably the coding region thereof, conferred the production of or the increase in valine compared with the wild type control.

[42479] The nucleic acid sequence of B2405 from Escherichia coli, e.g. as shown in the respective line in column 5 of Table I, application no. 6, has been published in B. And the activity of the gene product thereof is the activity of transcriptional regulator.

[42480] Accordingly, in one embodiment, the process of the present invention for producing isoleucine in a non-human organism, like a microorganism or a plant or a part thereof, comprises increasing or generating the activity of a gene product with the activity of a gene product conferring the activity of “transcriptional regulator”, especially from Escherichia coli or its functional equivalent or its homolog, e.g. the increase of
[42481] (a) a gene product of a gene comprising the nucleic acid molecule as shown in the respective line in column 5 of Table I (whereby the respective line discloses in column 7 the fine chemical isoleucine), application no. 6, preferably the coding region thereof, or a homolog or a fragment thereof, and being depicted in the same respective line as said B2405, or a functional equivalent or a homolog thereof as shown in column 8 of Table I, application no. 6, preferably the coding region thereof, particularly a homolog or functional equivalent as shown in column 8 of Table I B, application no. 6, and being depicted in the same respective line as said B2405, and preferably the activity is increased non-targeted, or
[42482] (b) a polypeptide comprising a polypeptide, a consensus sequence or at least a polypeptide motif as shown in the respective line in column 5 of Table II or in column 8 of Table IV, application no. 6, respectively, and being depicted in the same respective line as said B2405, or a functional equivalent or a homolog thereof as depicted in column 8 of Table II, application no. 6, preferably a homolog or functional equivalent as depicted in column 8 of Table II B, application no. 6, and being depicted in the same respective line as said B2405, and preferably the activity is increased non-targeted, whereby the respective line discloses in column 7 the fine chemical isoleucine.

[42483] Accordingly, in one embodiment, the molecule which activity is to be increased in the process of the invention is the gene product with an activity as a “transcriptional regulator”, preferably it is the molecule of section (a) or (b) of this paragraph.

[42484] In particular, it was observed that in plants, especially in Arabidopsis thaliana, increasing or generating the activity of a gene product non-targeted with the activity of a “transcriptional regulator”, preferably being encoded by a gene comprising the nucleic acid sequence SEQ ID NO. 39255, preferably the coding region thereof, conferred the production of or the increase in isoleucine compared with the wild type control.

[42485] The nucleic acid sequence of B2405 from Escherichia coli, e.g. as shown in the respective line in column 5 of Table I, application no. 6, has been published in B. And the activity of the gene product thereof is the activity of transcriptional regulator.

[42486] Accordingly, in one embodiment, the process of the present invention for producing valine in a non-human organism, like a microorganism or a plant or a part thereof, comprises increasing or generating the activity of a gene product with the activity of a gene product conferring the activity of “transcriptional regulator”, especially from Escherichia coli or its functional equivalent or its homolog, e.g. the increase of
[42487] (a) a gene product of a gene comprising the nucleic acid molecule as shown in the respective line in column 5 of Table I (whereby the respective line discloses in column 7 the fine chemical valine), application no. 6, preferably the coding region thereof, or a homolog or a fragment thereof, and being depicted in the same respective line as said B2405, or a functional equivalent or a homolog thereof as shown in column 8 of Table I, application no. 6, preferably the coding region thereof, particularly a homolog or functional equivalent as shown in column 8 of Table I B, application no. 6, and being depicted in the same respective line as said B2405, and preferably the activity is increased non-targeted, or
[42488] (b) a polypeptide comprising a polypeptide, a consensus sequence or at least a polypeptide motif as shown in the respective line in column 5 of Table II or in column 8 of Table IV, application no. 6, respectively, and being depicted in the same respective line as said B2405, or a functional equivalent or a homolog thereof as depicted in column 8 of Table II, application no. 6, preferably a homolog or functional equivalent as depicted in column 8 of Table II B, application no. 6, and being depicted in the same respective line as said B2405, and preferably the activity is increased non-targeted, whereby the respective line discloses in column 7 the fine chemical valine.

[42489] Accordingly, in one embodiment, the molecule which activity is to be increased in the process of the invention is the gene product with an activity as a “transcriptional regulator”, preferably it is the molecule of section (a) or (b) of this paragraph.

[42490] In particular, it was observed that in plants, especially in Arabidopsis thaliana, increasing or generating the activity of a gene product non-targeted with the activity of a “transcriptional regulator”, preferably being encoded by a gene comprising the nucleic acid sequence SEQ ID NO. 39255, preferably the coding region thereof, conferred the production of or the increase in valine compared with the wild type control.

[42491] The nucleic acid sequence of B2513 from Escherichia coli, e.g. as shown in the respective line in column 5 of Table I, application no. 6, has been published in B. And the activity of the gene product thereof is the activity of b2513-protein.

[42492] Accordingly, in one embodiment, the process of the present invention for producing isoleucine in a non-human organism, like a microorganism or a plant or a part thereof, comprises increasing or generating the activity of a gene product with the activity of a gene product conferring the activity of “b2513-protein”, especially from Escherichia coli or its functional equivalent or its homolog, e.g. the increase of
[42493] (a) a gene product of a gene comprising the nucleic acid molecule as shown in the respective line in column 5 of Table I (whereby the respective line discloses in column 7 the fine chemical isoleucine), application no. 6, preferably the coding region thereof, or a homolog or a fragment thereof, and being depicted in the same respective line as said B2513, or a functional equivalent or a homolog thereof as shown in column 8 of Table I, application no. 6, preferably the coding region thereof, particularly a homolog or functional equivalent as shown in column 8 of Table I B, application no. 6, and being depicted in the same respective line as said B2513, and preferably the activity is increased non-targeted, or
[42494] (b) a polypeptide comprising a polypeptide, a consensus sequence or at least a polypeptide motif as shown in the respective line in column 5 of Table II or in column 8 of Table IV, application no. 6, respectively, and being depicted in the same respective line as said B2513, or a functional equivalent or a homolog thereof as depicted in column 8 of Table II, application no. 6, preferably a homolog or functional equivalent as depicted in column 8 of Table II B, application no. 6, and being depicted in the same respective line as said B2513, and preferably the activity is increased non-targeted, whereby the respective line discloses in column 7 the fine chemical isoleucine.

[42495] Accordingly, in one embodiment, the molecule which activity is to be increased in the process of the invention is the gene product with an activity as a “b2513-protein”, preferably it is the molecule of section (a) or (b) of this paragraph.

[42496] In particular, it was observed that in plants, especially in Arabidopsis thaliana, increasing or generating the activity of a gene product non-targeted with the activity of a “b2513-protein”, preferably being encoded by a gene comprising the nucleic acid sequence SEQ ID NO. 9167, preferably the coding region thereof, conferred the production of or the increase in isoleucine compared with the wild type control.

[42497] The nucleic acid sequence of B2513 from Escherichia coli, e.g. as shown in the respective line in column 5 of Table I, application no. 6, has been published in B. And the activity of the gene product thereof is the activity of b2513-protein.

[42498] Accordingly, in one embodiment, the process of the present invention for producing leucine in a non-human organism, like a microorganism or a plant or a part thereof, comprises increasing or generating the activity of a gene product with the activity of a gene product conferring the activity of “b2513-protein”, especially from Escherichia coli or its functional equivalent or its homolog, e.g. the increase of
[42499] (a) a gene product of a gene comprising the nucleic acid molecule as shown in the respective line in column 5 of Table I (whereby the respective line discloses in column 7 the fine chemical leucine), application no. 6, preferably the coding region thereof, or a homolog or a fragment thereof, and being depicted in the same respective line as said B2513, or a functional equivalent or a homolog thereof as shown in column 8 of Table I, application no. 6, preferably the coding region thereof, particularly a homolog or functional equivalent as shown in column 8 of Table I B, application no. 6, and being depicted in the same respective line as said B2513, and preferably the activity is increased non-targeted, or
[42500] (b) a polypeptide comprising a polypeptide, a consensus sequence or at least a polypeptide motif as shown in the respective line in column 5 of Table II or in column 8 of Table IV, application no. 6, respectively, and being depicted in the same respective line as said B2513, or a functional equivalent or a homolog thereof as depicted in column 8 of Table II, application no. 6, preferably a homolog or functional equivalent as depicted in column 8 of Table II B, application no. 6, and being depicted in the same respective line as said B2513, and preferably the activity is increased non-targeted, whereby the respective line discloses in column 7 the fine chemical leucine.

[42501] Accordingly, in one embodiment, the molecule which activity is to be increased in the process of the invention is the gene product with an activity as a “b2513-protein”, preferably it is the molecule of section (a) or (b) of this paragraph.

[42502] In particular, it was observed that in plants, especially in Arabidopsis thaliana, increasing or generating the activity of a gene product non-targeted with the activity of a “b2513-protein”, preferably being encoded by a gene comprising the nucleic acid sequence SEQ ID NO. 9167, preferably the coding region thereof, conferred the production of or the increase in leucine compared with the wild type control.

[42503] The nucleic acid sequence of B2513 from Escherichia coli, e.g. as shown in the respective line in column 5 of Table I, application no. 6, has been published in B. And the activity of the gene product thereof is the activity of b2513-protein.

[42504] Accordingly, in one embodiment, the process of the present invention for producing valine in a non-human organism, like a microorganism or a plant or a part thereof, comprises increasing or generating the activity of a gene product with the activity of a gene product conferring the activity of “b2513-protein”, especially from Escherichia coli or its functional equivalent or its homolog, e.g. the increase of
[42505] (a) a gene product of a gene comprising the nucleic acid molecule as shown in the respective line in column 5 of Table I (whereby the respective line discloses in column 7 the fine chemical valine), application no. 6, preferably the coding region thereof, or a homolog or a fragment thereof, and being depicted in the same respective line as said B2513, or a functional equivalent or a homolog thereof as shown in column 8 of Table I, application no. 6, preferably the coding region thereof, particularly a homolog or functional equivalent as shown in column 8 of Table I B, application no. 6, and being depicted in the same respective line as said B2513, and preferably the activity is increased non-targeted, or
[42506] (b) a polypeptide comprising a polypeptide, a consensus sequence or at least a polypeptide motif as shown in the respective line in column 5 of Table II or in column 8 of Table IV, application no. 6, respectively, and being depicted in the same respective line as said B2513, or a functional equivalent or a homolog thereof as depicted in column 8 of Table II, application no. 6, preferably a homolog or functional equivalent as depicted in column 8 of Table II B, application no. 6, and being depicted in the same respective line as said B2513, and preferably the activity is increased non-targeted, whereby the respective line discloses in column 7 the fine chemical valine.

[42507] Accordingly, in one embodiment, the molecule which activity is to be increased in the process of the invention is the gene product with an activity as a “b2513-protein”, preferably it is the molecule of section (a) or (b) of this paragraph.

[42508] In particular, it was observed that in plants, especially in Arabidopsis thaliana, increasing or generating the activity of a gene product non-targeted with the activity of a “b2513-protein”, preferably being encoded by a gene comprising the nucleic acid sequence SEQ ID NO. 9167, preferably the coding region thereof, conferred the production of or the increase in valine compared with the wild type control.

[42509] The nucleic acid sequence of B2551 from Escherichia coli, e.g. as shown in the respective line in column 5 of Table I, application no. 6, has been published in B. And the activity of the gene product thereof is the activity of serine hydroxymethyltransferase.

[42510] Accordingly, in one embodiment, the process of the present invention for producing isoleucine in a non-human organism, like a microorganism or a plant or a part thereof, comprises increasing or generating the activity of a gene product with the activity of a gene product conferring the activity of “serine hydroxymethyltransferase”, especially from Escherichia coli or its functional equivalent or its homolog, e.g. the increase of
[42511] (a) a gene product of a gene comprising the nucleic acid molecule as shown in the respective line in column 5 of Table I (whereby the respective line discloses in column 7 the fine chemical isoleucine), application no. 6, preferably the coding region thereof, or a homolog or a fragment thereof, and being depicted in the same respective line as said B2551, or a functional equivalent or a homolog thereof as shown in column 8 of Table I, application no. 6, preferably the coding region thereof, particularly a homolog or functional equivalent as shown in column 8 of Table I B, application no. 6, and being depicted in the same respective line as said B2551, and preferably the activity is increased non-targeted, or
[42512] (b) a polypeptide comprising a polypeptide, a consensus sequence or at least a polypeptide motif as shown in the respective line in column 5 of Table II or in column 8 of Table IV, application no. 6, respectively, and being depicted in the same respective line as said B2551, or a functional equivalent or a homolog thereof as depicted in column 8 of Table II, application no. 6, preferably a homolog or functional equivalent as depicted in column 8 of Table II B, application no. 6, and being depicted in the same respective line as said B2551, and preferably the activity is increased non-targeted, whereby the respective line discloses in column 7 the fine chemical isoleucine.

[42513] Accordingly, in one embodiment, the molecule which activity is to be increased in the process of the invention is the gene product with an activity as a “serine hydroxymethyltransferase”, preferably it is the molecule of section (a) or (b) of this paragraph.

[42514] In particular, it was observed that in plants, especially in Arabidopsis thaliana, increasing or generating the activity of a gene product non-targeted with the activity of a “serine hydroxymethyltransferase”, preferably being encoded by a gene comprising the nucleic acid sequence SEQ ID NO. 79627, preferably the coding region thereof, conferred the production of or the increase in isoleucine compared with the wild type control.

[42515] The nucleic acid sequence of B2613 from Escherichia coli, e.g. as shown in the respective line in column 5 of Table I, application no. 6, has been published in B. And the activity of the gene product thereof is the activity of b2613-protein.

[42516] Accordingly, in one embodiment, the process of the present invention for producing valine in a non-human organism, like a microorganism or a plant or a part thereof, comprises increasing or generating the activity of a gene product with the activity of a gene product conferring the activity of “b2613-protein”, especially from Escherichia coli or its functional equivalent or its homolog, e.g. the increase of
[42517] (a) a gene product of a gene comprising the nucleic acid molecule as shown in the respective line in column 5 of Table I (whereby the respective line discloses in column 7 the fine chemical valine), application no. 6, preferably the coding region thereof, or a homolog or a fragment thereof, and being depicted in the same respective line as said B2613, or a functional equivalent or a homolog thereof as shown in column 8 of Table I, application no. 6, preferably the coding region thereof, particularly a homolog or functional equivalent as shown in column 8 of Table I B, application no. 6, and being depicted in the same respective line as said B2613, and preferably the activity is increased non-targeted, or
[42518] (b) a polypeptide comprising a polypeptide, a consensus sequence or at least a polypeptide motif as shown in the respective line in column 5 of Table II or in column 8 of Table IV, application no. 6, respectively, and being depicted in the same respective line as said B2613, or a functional equivalent or a homolog thereof as depicted in column 8 of Table II, application no. 6, preferably a homolog or functional equivalent as depicted in column 8 of Table II B, application no. 6, and being depicted in the same respective line as said B2613, and preferably the activity is increased non-targeted, whereby the respective line discloses in column 7 the fine chemical valine.

[42519] Accordingly, in one embodiment, the molecule which activity is to be increased in the process of the invention is the gene product with an activity as a “b2613-protein”, preferably it is the molecule of section (a) or (b) of this paragraph.

[42520] In particular, it was observed that in plants, especially in Arabidopsis thaliana, increasing or generating the activity of a gene product non-targeted with the activity of a “b2613-protein”, preferably being encoded by a gene comprising the nucleic acid sequence SEQ ID NO. 40665, preferably the coding region thereof, conferred the production of or the increase in valine compared with the wild type control.

[42521] The nucleic acid sequence of B2634 from Escherichia coli, e.g. as shown in the respective line in column 5 of Table I, application no. 6, has been published in B. And the activity of the gene product thereof is the activity of transcriptional regulator.

[42522] Accordingly, in one embodiment, the process of the present invention for producing isoleucine in a non-human organism, like a microorganism or a plant or a part thereof, comprises increasing or generating the activity of a gene product with the activity of a gene product conferring the activity of “transcriptional regulator”, especially from Escherichia coli or its functional equivalent or its homolog, e.g. the increase of
[42523] (a) a gene product of a gene comprising the nucleic acid molecule as shown in the respective line in column 5 of Table I (whereby the respective line discloses in column 7 the fine chemical isoleucine), application no. 6, preferably the coding region thereof, or a homolog or a fragment thereof, and being depicted in the same respective line as said B2634, or a functional equivalent or a homolog thereof as shown in column 8 of Table I, application no. 6, preferably the coding region thereof, particularly a homolog or functional equivalent as shown in column 8 of Table I B, application no. 6, and being depicted in the same respective line as said B2634, and preferably the activity is increased non-targeted, or
[42524] (b) a polypeptide comprising a polypeptide, a consensus sequence or at least a polypeptide motif as shown in the respective line in column 5 of Table II or in column 8 of Table IV, application no. 6, respectively, and being depicted in the same respective line as said B2634, or a functional equivalent or a homolog thereof as depicted in column 8 of Table II, application no. 6, preferably a homolog or functional equivalent as depicted in column 8 of Table II B, application no. 6, and being depicted in the same respective line as said B2634, and preferably the activity is increased non-targeted, whereby the respective line discloses in column 7 the fine chemical isoleucine.

[42525] Accordingly, in one embodiment, the molecule which activity is to be increased in the process of the invention is the gene product with an activity as a “transcriptional regulator”, preferably it is the molecule of section (a) or (b) of this paragraph.

[42526] In particular, it was observed that in plants, especially in Arabidopsis thaliana, increasing or generating the activity of a gene product non-targeted with the activity of a “transcriptional regulator”, preferably being encoded by a gene comprising the nucleic acid sequence SEQ ID NO. 40726, preferably the coding region thereof, conferred the production of or the increase in isoleucine compared with the wild type control.

[42527] The nucleic acid sequence of B2634 from Escherichia coli, e.g. as shown in the respective line in column 5 of Table I, application no. 6, has been published in B. And the activity of the gene product thereof is the activity of transcriptional regulator.

[42528] Accordingly, in one embodiment, the process of the present invention for producing leucine in a non-human organism, like a microorganism or a plant or a part thereof, comprises increasing or generating the activity of a gene product with the activity of a gene product conferring the activity of “transcriptional regulator”, especially from Escherichia coli or its functional equivalent or its homolog, e.g. the increase of
[42529] (a) a gene product of a gene comprising the nucleic acid molecule as shown in the respective line in column 5 of Table I (whereby the respective line discloses in column 7 the fine chemical leucine), application no. 6, preferably the coding region thereof, or a homolog or a fragment thereof, and being depicted in the same respective line as said B2634, or a functional equivalent or a homolog thereof as shown in column 8 of Table I, application no. 6, preferably the coding region thereof, particularly a homolog or functional equivalent as shown in column 8 of Table I B, application no. 6, and being depicted in the same respective line as said B2634, and preferably the activity is increased non-targeted, or
[42530] (b) a polypeptide comprising a polypeptide, a consensus sequence or at least a polypeptide motif as shown in the respective line in column 5 of Table II or in column 8 of Table IV, application no. 6, respectively, and being depicted in the same respective line as said B2634, or a functional equivalent or a homolog thereof as depicted in column 8 of Table II, application no. 6, preferably a homolog or functional equivalent as depicted in column 8 of Table II B, application no. 6, and being depicted in the same respective line as said B2634, and preferably the activity is increased non-targeted, whereby the respective line discloses in column 7 the fine chemical leucine.

[42531] Accordingly, in one embodiment, the molecule which activity is to be increased in the process of the invention is the gene product with an activity as a “transcriptional regulator”, preferably it is the molecule of section (a) or (b) of this paragraph.

[42532] In particular, it was observed that in plants, especially in Arabidopsis thaliana, increasing or generating the activity of a gene product non-targeted with the activity of a “transcriptional regulator”, preferably being encoded by a gene comprising the nucleic acid sequence SEQ ID NO. 40726, preferably the coding region thereof, conferred the production of or the increase in leucine compared with the wild type control.

[42533] The nucleic acid sequence of B2673 from Escherichia coli, e.g. as shown in the respective line in column 5 of Table I, application no. 6, has been published in B. And the activity of the gene product thereof is the activity of b2673-protein.

[42534] Accordingly, in one embodiment, the process of the present invention for producing isoleucine in a non-human organism, like a microorganism or a plant or a part thereof, comprises increasing or generating the activity of a gene product with the activity of a gene product conferring the activity of “b2673-protein”, especially from Escherichia coli or its functional equivalent or its homolog, e.g. the increase of
[42535] (a) a gene product of a gene comprising the nucleic acid molecule as shown in the respective line in column 5 of Table I (whereby the respective line discloses in column 7 the fine chemical isoleucine), application no. 6, preferably the coding region thereof, or a homolog or a fragment thereof, and being depicted in the same respective line as said B2673, or a functional equivalent or a homolog thereof as shown in column 8 of Table I, application no. 6, preferably the coding region thereof, particularly a homolog or functional equivalent as shown in column 8 of Table I B, application no. 6, and being depicted in the same respective line as said B2673, and preferably the activity is increased non-targeted, or
[42536] (b) a polypeptide comprising a polypeptide, a consensus sequence or at least a polypeptide motif as shown in the respective line in column 5 of Table II or in column 8 of Table IV, application no. 6, respectively, and being depicted in the same respective line as said B2673, or a functional equivalent or a homolog thereof as depicted in column 8 of Table II, application no. 6, preferably a homolog or functional equivalent as depicted in column 8 of Table II B, application no. 6, and being depicted in the same respective line as said B2673, and preferably the activity is increased non-targeted, whereby the respective line discloses in column 7 the fine chemical isoleucine.

[42537] Accordingly, in one embodiment, the molecule which activity is to be increased in the process of the invention is the gene product with an activity as a “b2673-protein”, preferably it is the molecule of section (a) or (b) of this paragraph.

[42538] In particular, it was observed that in plants, especially in Arabidopsis thaliana, increasing or generating the activity of a gene product non-targeted with the activity of a “b2673-protein”, preferably being encoded by a gene comprising the nucleic acid sequence SEQ ID NO. 9244, preferably the coding region thereof, conferred the production of or the increase in isoleucine compared with the wild type control.

[42539] The nucleic acid sequence of B2701 from Escherichia coli, e.g. as shown in the respective line in column 5 of Table I, application no. 6, has been published in B. And the activity of the gene product thereof is the activity of murein transglycosylase.

[42540] Accordingly, in one embodiment, the process of the present invention for producing isoleucine in a non-human organism, like a microorganism or a plant or a part thereof, comprises increasing or generating the activity of a gene product with the activity of a gene product conferring the activity of “murein transglycosylase”, especially from Escherichia coli or its functional equivalent or its homolog, e.g. the increase of
[42541] (a) a gene product of a gene comprising the nucleic acid molecule as shown in the respective line in column 5 of Table I (whereby the respective line discloses in column 7 the fine chemical isoleucine), application no. 6, preferably the coding region thereof, or a homolog or a fragment thereof, and being depicted in the same respective line as said B2701, or a functional equivalent or a homolog thereof as shown in column 8 of Table I, application no. 6, preferably the coding region thereof, particularly a homolog or functional equivalent as shown in column 8 of Table I B, application no. 6, and being depicted in the same respective line as said B2701, and preferably the activity is increased non-targeted, or
[42542] (b) a polypeptide comprising a polypeptide, a consensus sequence or at least a polypeptide motif as shown in the respective line in column 5 of Table II or in column 8 of Table IV, application no. 6, respectively, and being depicted in the same respective line as said B2701, or a functional equivalent or a homolog thereof as depicted in column 8 of Table II, application no. 6, preferably a homolog or functional equivalent as depicted in column 8 of Table II B, application no. 6, and being depicted in the same respective line as said B2701, and preferably the activity is increased non-targeted, whereby the respective line discloses in column 7 the fine chemical isoleucine.

[42543] Accordingly, in one embodiment, the molecule which activity is to be increased in the process of the invention is the gene product with an activity as a “murein transglycosylase”, preferably it is the molecule of section (a) or (b) of this paragraph.

[42544] In particular, it was observed that in plants, especially in Arabidopsis thaliana, increasing or generating the activity of a gene product non-targeted with the activity of a “murein transglycosylase”, preferably being encoded by a gene comprising the nucleic acid sequence SEQ ID NO. 80756, preferably the coding region thereof, conferred the production of or the increase in isoleucine compared with the wild type control.

[42545] The nucleic acid sequence of B2701 from Escherichia coli, e.g. as shown in the respective line in column 5 of Table I, application no. 6, has been published in B. And the activity of the gene product thereof is the activity of murein transglycosylase.

[42546] Accordingly, in one embodiment, the process of the present invention for producing leucine in a non-human organism, like a microorganism or a plant or a part thereof, comprises increasing or generating the activity of a gene product with the activity of a gene product conferring the activity of “murein transglycosylase”, especially from Escherichia coli or its functional equivalent or its homolog, e.g. the increase of
[42547] (a) a gene product of a gene comprising the nucleic acid molecule as shown in the respective line in column 5 of Table I (whereby the respective line discloses in column 7 the fine chemical leucine), application no. 6, preferably the coding region thereof, or a homolog or a fragment thereof, and being depicted in the same respective line as said B2701, or a functional equivalent or a homolog thereof as shown in column 8 of Table I, application no. 6, preferably the coding region thereof, particularly a homolog or functional equivalent as shown in column 8 of Table I B, application no. 6, and being depicted in the same respective line as said B2701, and preferably the activity is increased non-targeted, or
[42548] (b) a polypeptide comprising a polypeptide, a consensus sequence or at least a polypeptide motif as shown in the respective line in column 5 of Table II or in column 8 of Table IV, application no. 6, respectively, and being depicted in the same respective line as said B2701, or a functional equivalent or a homolog thereof as depicted in column 8 of Table II, application no. 6, preferably a homolog or functional equivalent as depicted in column 8 of Table II B, application no. 6, and being depicted in the same respective line as said B2701, and preferably the activity is increased non-targeted, whereby the respective line discloses in column 7 the fine chemical leucine.

[42549] Accordingly, in one embodiment, the molecule which activity is to be increased in the process of the invention is the gene product with an activity as a “murein transglycosylase”, preferably it is the molecule of section (a) or (b) of this paragraph.

[42550] In particular, it was observed that in plants, especially in Arabidopsis thaliana, increasing or generating the activity of a gene product non-targeted with the activity of a “murein transglycosylase”, preferably being encoded by a gene comprising the nucleic acid sequence SEQ ID NO. 80756, preferably the coding region thereof, conferred the production of or the increase in leucine compared with the wild type control.

[42551] The nucleic acid sequence of B2701 from Escherichia coli, e.g. as shown in the respective line in column 5 of Table I, application no. 6, has been published in B. And the activity of the gene product thereof is the activity of murein transglycosylase.

[42552] Accordingly, in one embodiment, the process of the present invention for producing valine in a non-human organism, like a microorganism or a plant or a part thereof, comprises increasing or generating the activity of a gene product with the activity of a gene product conferring the activity of “murein transglycosylase”, especially from Escherichia coli or its functional equivalent or its homolog, e.g. the increase of
[42553] (a) a gene product of a gene comprising the nucleic acid molecule as shown in the respective line in column 5 of Table I (whereby the respective line discloses in column 7 the fine chemical valine), application no. 6, preferably the coding region thereof, or a homolog or a fragment thereof, and being depicted in the same respective line as said B2701, or a functional equivalent or a homolog thereof as shown in column 8 of Table I, application no. 6, preferably the coding region thereof, particularly a homolog or functional equivalent as shown in column 8 of Table I B, application no. 6, and being depicted in the same respective line as said B2701, and preferably the activity is increased non-targeted, or
[42554] (b) a polypeptide comprising a polypeptide, a consensus sequence or at least a polypeptide motif as shown in the respective line in column 5 of Table II or in column 8 of Table IV, application no. 6, respectively, and being depicted in the same respective line as said B2701, or a functional equivalent or a homolog thereof as depicted in column 8 of Table II, application no. 6, preferably a homolog or functional equivalent as depicted in column 8 of Table II B, application no. 6, and being depicted in the same respective line as said B2701, and preferably the activity is increased non-targeted, whereby the respective line discloses in column 7 the fine chemical valine.

[42555] Accordingly, in one embodiment, the molecule which activity is to be increased in the process of the invention is the gene product with an activity as a “murein transglycosylase”, preferably it is the molecule of section (a) or (b) of this paragraph.

[42556] In particular, it was observed that in plants, especially in Arabidopsis thaliana, increasing or generating the activity of a gene product non-targeted with the activity of a “murein transglycosylase”, preferably being encoded by a gene comprising the nucleic acid sequence SEQ ID NO. 80756, preferably the coding region thereof, conferred the production of or the increase in valine compared with the wild type control.

[42557] The nucleic acid sequence of B2714 from Escherichia coli, e.g. as shown in the respective line in column 5 of Table I, application no. 6, has been published in B. And the activity of the gene product thereof is the activity of transcriptional regulator.

[42558] Accordingly, in one embodiment, the process of the present invention for producing valine in a non-human organism, like a microorganism or a plant or a part thereof, comprises increasing or generating the activity of a gene product with the activity of a gene product conferring the activity of “transcriptional regulator”, especially from Escherichia coli or its functional equivalent or its homolog, e.g. the increase of
[42559] (a) a gene product of a gene comprising the nucleic acid molecule as shown in the respective line in column 5 of Table I (whereby the respective line discloses in column 7 the fine chemical valine), application no. 6, preferably the coding region thereof, or a homolog or a fragment thereof, and being depicted in the same respective line as said B2714, or a functional equivalent or a homolog thereof as shown in column 8 of Table I, application no. 6, preferably the coding region thereof, particularly a homolog or functional equivalent as shown in column 8 of Table I B, application no. 6, and being depicted in the same respective line as said B2714, and preferably the activity is increased non-targeted, or
[42560] (b) a polypeptide comprising a polypeptide, a consensus sequence or at least a polypeptide motif as shown in the respective line in column 5 of Table II or in column 8 of Table IV, application no. 6, respectively, and being depicted in the same respective line as said B2714, or a functional equivalent or a homolog thereof as depicted in column 8 of Table II, application no. 6, preferably a homolog or functional equivalent as depicted in column 8 of Table II B, application no. 6, and being depicted in the same respective line as said B2714, and preferably the activity is increased non-targeted, whereby the respective line discloses in column 7 the fine chemical valine.

[42561] Accordingly, in one embodiment, the molecule which activity is to be increased in the process of the invention is the gene product with an activity as a “transcriptional regulator”, preferably it is the molecule of section (a) or (b) of this paragraph.

[42562] In particular, it was observed that in plants, especially in Arabidopsis thaliana, increasing or generating the activity of a gene product non-targeted with the activity of a “transcriptional regulator”, preferably being encoded by a gene comprising the nucleic acid sequence SEQ ID NO. 40741, preferably the coding region thereof, conferred the production of or the increase in valine compared with the wild type control.

[42563] The nucleic acid sequence of B2739 from Escherichia coli, e.g. as shown in the respective line in column 5 of Table I, application no. 6, has been published in B. And the activity of the gene product thereof is the activity of b2739-protein.

[42564] Accordingly, in one embodiment, the process of the present invention for producing isoleucine in a non-human organism, like a microorganism or a plant or a part thereof, comprises increasing or generating the activity of a gene product with the activity of a gene product conferring the activity of “b2739-protein”, especially from Escherichia coli or its functional equivalent or its homolog, e.g. the increase of
[42565] (a) a gene product of a gene comprising the nucleic acid molecule as shown in the respective line in column 5 of Table I (whereby the respective line discloses in column 7 the fine chemical isoleucine), application no. 6, preferably the coding region thereof, or a homolog or a fragment thereof, and being depicted in the same respective line as said B2739, or a functional equivalent or a homolog thereof as shown in column 8 of Table I, application no. 6, preferably the coding region thereof, particularly a homolog or functional equivalent as shown in column 8 of Table I B, application no. 6, and being depicted in the same respective line as said B2739, and preferably the activity is increased non-targeted, or
[42566] (b) a polypeptide comprising a polypeptide, a consensus sequence or at least a polypeptide motif as shown in the respective line in column 5 of Table II or in column 8 of Table IV, application no. 6, respectively, and being depicted in the same respective line as said B2739, or a functional equivalent or a homolog thereof as depicted in column 8 of Table II, application no. 6, preferably a homolog or functional equivalent as depicted in column 8 of Table II B, application no. 6, and being depicted in the same respective line as said B2739, and preferably the activity is increased non-targeted, whereby the respective line discloses in column 7 the fine chemical isoleucine.

[42567] Accordingly, in one embodiment, the molecule which activity is to be increased in the process of the invention is the gene product with an activity as a “b2739-protein”, preferably it is the molecule of section (a) or (b) of this paragraph.

[42568] In particular, it was observed that in plants, especially in Arabidopsis thaliana, increasing or generating the activity of a gene product non-targeted with the activity of a “b2739-protein”, preferably being encoded by a gene comprising the nucleic acid sequence SEQ ID NO. 80906, preferably the coding region thereof, conferred the production of or the increase in isoleucine compared with the wild type control.

[42569] The nucleic acid sequence of B2739 from Escherichia coli, e.g. as shown in the respective line in column 5 of Table I, application no. 6, has been published in B. And the activity of the gene product thereof is the activity of b2739-protein.

[42570] Accordingly, in one embodiment, the process of the present invention for producing leucine in a non-human organism, like a microorganism or a plant or a part thereof, comprises increasing or generating the activity of a gene product with the activity of a gene product conferring the activity of “b2739-protein”, especially from Escherichia coli or its functional equivalent or its homolog, e.g. the increase of
[42571] (a) a gene product of a gene comprising the nucleic acid molecule as shown in the respective line in column 5 of Table I (whereby the respective line discloses in column 7 the fine chemical leucine), application no. 6, preferably the coding region thereof, or a homolog or a fragment thereof, and being depicted in the same respective line as said B2739, or a functional equivalent or a homolog thereof as shown in column 8 of Table I, application no. 6, preferably the coding region thereof, particularly a homolog or functional equivalent as shown in column 8 of Table I B, application no. 6, and being depicted in the same respective line as said B2739, and preferably the activity is increased non-targeted, or
[42572] (b) a polypeptide comprising a polypeptide, a consensus sequence or at least a polypeptide motif as shown in the respective line in column 5 of Table II or in column 8 of Table IV, application no. 6, respectively, and being depicted in the same respective line as said B2739, or a functional equivalent or a homolog thereof as depicted in column 8 of Table II, application no. 6, preferably a homolog or functional equivalent as depicted in column 8 of Table II B, application no. 6, and being depicted in the same respective line as said B2739, and preferably the activity is increased non-targeted, whereby the respective line discloses in column 7 the fine chemical leucine.

[42573] Accordingly, in one embodiment, the molecule which activity is to be increased in the process of the invention is the gene product with an activity as a “b2739-protein”, preferably it is the molecule of section (a) or (b) of this paragraph.

[42574] In particular, it was observed that in plants, especially in Arabidopsis thaliana, increasing or generating the activity of a gene product non-targeted with the activity of a “b2739-protein”, preferably being encoded by a gene comprising the nucleic acid sequence SEQ ID NO. 80906, preferably the coding region thereof, conferred the production of or the increase in leucine compared with the wild type control.

[42575] The nucleic acid sequence of B2739 from Escherichia coli, e.g. as shown in the respective line in column 5 of Table I, application no. 6, has been published in B. And the activity of the gene product thereof is the activity of b2739-protein.

[42576] Accordingly, in one embodiment, the process of the present invention for producing valine in a non-human organism, like a microorganism or a plant or a part thereof, comprises increasing or generating the activity of a gene product with the activity of a gene product conferring the activity of “b2739-protein”, especially from Escherichia coli or its functional equivalent or its homolog, e.g. the increase of
[42577] (a) a gene product of a gene comprising the nucleic acid molecule as shown in the respective line in column 5 of Table I (whereby the respective line discloses in column 7 the fine chemical valine), application no. 6, preferably the coding region thereof, or a homolog or a fragment thereof, and being depicted in the same respective line as said B2739, or a functional equivalent or a homolog thereof as shown in column 8 of Table I, application no. 6, preferably the coding region thereof, particularly a homolog or functional equivalent as shown in column 8 of Table I B, application no. 6, and being depicted in the same respective line as said B2739, and preferably the activity is increased non-targeted, or
[42578] (b) a polypeptide comprising a polypeptide, a consensus sequence or at least a polypeptide motif as shown in the respective line in column 5 of Table II or in column 8 of Table IV, application no. 6, respectively, and being depicted in the same respective line as said B2739, or a functional equivalent or a homolog thereof as depicted in column 8 of Table II, application no. 6, preferably a homolog or functional equivalent as depicted in column 8 of Table II B, application no. 6, and being depicted in the same respective line as said B2739, and preferably the activity is increased non-targeted, whereby the respective line discloses in column 7 the fine chemical valine.

[42579] Accordingly, in one embodiment, the molecule which activity is to be increased in the process of the invention is the gene product with an activity as a “b2739-protein”, preferably it is the molecule of section (a) or (b) of this paragraph.

[42580] In particular, it was observed that in plants, especially in Arabidopsis thaliana, increasing or generating the activity of a gene product non-targeted with the activity of a “b2739-protein”, preferably being encoded by a gene comprising the nucleic acid sequence SEQ ID NO. 80906, preferably the coding region thereof, conferred the production of or the increase in valine compared with the wild type control.

[42581] The nucleic acid sequence of B2812 from Escherichia coli, e.g. as shown in the respective line in column 5 of Table I, application no. 6, has been published in B. And the activity of the gene product thereof is the activity of b2812-protein.

[42582] Accordingly, in one embodiment, the process of the present invention for producing isoleucine in a non-human organism, like a microorganism or a plant or a part thereof, comprises increasing or generating the activity of a gene product with the activity of a gene product conferring the activity of “b2812-protein”, especially from Escherichia coli or its functional equivalent or its homolog, e.g. the increase of
[42583] (a) a gene product of a gene comprising the nucleic acid molecule as shown in the respective line in column 5 of Table I (whereby the respective line discloses in column 7 the fine chemical isoleucine), application no. 6, preferably the coding region thereof, or a homolog or a fragment thereof, and being depicted in the same respective line as said B2812, or a functional equivalent or a homolog thereof as shown in column 8 of Table I, application no. 6, preferably the coding region thereof, particularly a homolog or functional equivalent as shown in column 8 of Table I B, application no. 6, and being depicted in the same respective line as said B2812, and preferably the activity is increased non-targeted, or
[42584] (b) a polypeptide comprising a polypeptide, a consensus sequence or at least a polypeptide motif as shown in the respective line in column 5 of Table II or in column 8 of Table IV, application no. 6, respectively, and being depicted in the same respective line as said B2812, or a functional equivalent or a homolog thereof as depicted in column 8 of Table II, application no. 6, preferably a homolog or functional equivalent as depicted in column 8 of Table II B, application no. 6, and being depicted in the same respective line as said B2812, and preferably the activity is increased non-targeted, whereby the respective line discloses in column 7 the fine chemical isoleucine.

[42585] Accordingly, in one embodiment, the molecule which activity is to be increased in the process of the invention is the gene product with an activity as a “b2812-protein”, preferably it is the molecule of section (a) or (b) of this paragraph.

[42586] In particular, it was observed that in plants, especially in Arabidopsis thaliana, increasing or generating the activity of a gene product non-targeted with the activity of a “b2812-protein”, preferably being encoded by a gene comprising the nucleic acid sequence SEQ ID NO. 40795, preferably the coding region thereof, conferred the production of or the increase in isoleucine compared with the wild type control.

[42587] The nucleic acid sequence of B2812 from Escherichia coli, e.g. as shown in the respective line in column 5 of Table I, application no. 6, has been published in B. And the activity of the gene product thereof is the activity of b2812-protein.

[42588] Accordingly, in one embodiment, the process of the present invention for producing leucine in a non-human organism, like a microorganism or a plant or a part thereof, comprises increasing or generating the activity of a gene product with the activity of a gene product conferring the activity of “b2812-protein”, especially from Escherichia coli or its functional equivalent or its homolog, e.g. the increase of
[42589] (a) a gene product of a gene comprising the nucleic acid molecule as shown in the respective line in column 5 of Table I (whereby the respective line discloses in column 7 the fine chemical leucine), application no. 6, preferably the coding region thereof, or a homolog or a fragment thereof, and being depicted in the same respective line as said B2812, or a functional equivalent or a homolog thereof as shown in column 8 of Table I, application no. 6, preferably the coding region thereof, particularly a homolog or functional equivalent as shown in column 8 of Table I B, application no. 6, and being depicted in the same respective line as said B2812, and preferably the activity is increased non-targeted, or
[42590] (b) a polypeptide comprising a polypeptide, a consensus sequence or at least a polypeptide motif as shown in the respective line in column 5 of Table II or in column 8 of Table IV, application no. 6, respectively, and being depicted in the same respective line as said B2812, or a functional equivalent or a homolog thereof as depicted in column 8 of Table II, application no. 6, preferably a homolog or functional equivalent as depicted in column 8 of Table II B, application no. 6, and being depicted in the same respective line as said B2812, and preferably the activity is increased non-targeted, whereby the respective line discloses in column 7 the fine chemical leucine.

[42591] Accordingly, in one embodiment, the molecule which activity is to be increased in the process of the invention is the gene product with an activity as a “b2812-protein”, preferably it is the molecule of section (a) or (b) of this paragraph.

[42592] In particular, it was observed that in plants, especially in Arabidopsis thaliana, increasing or generating the activity of a gene product non-targeted with the activity of a “b2812-protein”, preferably being encoded by a gene comprising the nucleic acid sequence SEQ ID NO. 40795, preferably the coding region thereof, conferred the production of or the increase in leucine compared with the wild type control.

[42593] The nucleic acid sequence of B2839 from Escherichia coli, e.g. as shown in the respective line in column 5 of Table I, application no. 6, has been published in B. And the activity of the gene product thereof is the activity of transcriptional regulator.

[42594] Accordingly, in one embodiment, the process of the present invention for producing isoleucine in a non-human organism, like a microorganism or a plant or a part thereof, comprises increasing or generating the activity of a gene product with the activity of a gene product conferring the activity of “transcriptional regulator”, especially from Escherichia coli or its functional equivalent or its homolog, e.g. the increase of
[42595] (a) a gene product of a gene comprising the nucleic acid molecule as shown in the respective line in column 5 of Table I (whereby the respective line discloses in column 7 the fine chemical isoleucine), application no. 6, preferably the coding region thereof, or a homolog or a fragment thereof, and being depicted in the same respective line as said B2839, or a functional equivalent or a homolog thereof as shown in column 8 of Table I, application no. 6, preferably the coding region thereof, particularly a homolog or functional equivalent as shown in column 8 of Table I B, application no. 6, and being depicted in the same respective line as said B2839, and preferably the activity is increased non-targeted, or
[42596] (b) a polypeptide comprising a polypeptide, a consensus sequence or at least a polypeptide motif as shown in the respective line in column 5 of Table II or in column 8 of Table IV, application no. 6, respectively, and being depicted in the same respective line as said B2839, or a functional equivalent or a homolog thereof as depicted in column 8 of Table II, application no. 6, preferably a homolog or functional equivalent as depicted in column 8 of Table II B, application no. 6, and being depicted in the same respective line as said B2839, and preferably the activity is increased non-targeted, whereby the respective line discloses in column 7 the fine chemical isoleucine.

[42597] Accordingly, in one embodiment, the molecule which activity is to be increased in the process of the invention is the gene product with an activity as a “transcriptional regulator”, preferably it is the molecule of section (a) or (b) of this paragraph.

[42598] In particular, it was observed that in plants, especially in Arabidopsis thaliana, increasing or generating the activity of a gene product non-targeted with the activity of a “transcriptional regulator”, preferably being encoded by a gene comprising the nucleic acid sequence SEQ ID NO. 81935, preferably the coding region thereof, conferred the production of or the increase in isoleucine compared with the wild type control.

[42599] The nucleic acid sequence of B2839 from Escherichia coli, e.g. as shown in the respective line in column 5 of Table I, application no. 6, has been published in B. And the activity of the gene product thereof is the activity of transcriptional regulator.

[42600] Accordingly, in one embodiment, the process of the present invention for producing leucine in a non-human organism, like a microorganism or a plant or a part thereof, comprises increasing or generating the activity of a gene product with the activity of a gene product conferring the activity of “transcriptional regulator”, especially from Escherichia coli or its functional equivalent or its homolog, e.g. the increase of
[42601] (a) a gene product of a gene comprising the nucleic acid molecule as shown in the respective line in column 5 of Table I (whereby the respective line discloses in column 7 the fine chemical leucine), application no. 6, preferably the coding region thereof, or a homolog or a fragment thereof, and being depicted in the same respective line as said B2839, or a functional equivalent or a homolog thereof as shown in column 8 of Table I, application no. 6, preferably the coding region thereof, particularly a homolog or functional equivalent as shown in column 8 of Table I B, application no. 6, and being depicted in the same respective line as said B2839, and preferably the activity is increased non-targeted, or
[42602] (b) a polypeptide comprising a polypeptide, a consensus sequence or at least a polypeptide motif as shown in the respective line in column 5 of Table II or in column 8 of Table IV, application no. 6, respectively, and being depicted in the same respective line as said B2839, or a functional equivalent or a homolog thereof as depicted in column 8 of Table II, application no. 6, preferably a homolog or functional equivalent as depicted in column 8 of Table II B, application no. 6, and being depicted in the same respective line as said B2839, and preferably the activity is increased non-targeted, whereby the respective line discloses in column 7 the fine chemical leucine.

[42603] Accordingly, in one embodiment, the molecule which activity is to be increased in the process of the invention is the gene product with an activity as a “transcriptional regulator”, preferably it is the molecule of section (a) or (b) of this paragraph.

[42604] In particular, it was observed that in plants, especially in Arabidopsis thaliana, increasing or generating the activity of a gene product non-targeted with the activity of a “transcriptional regulator”, preferably being encoded by a gene comprising the nucleic acid sequence SEQ ID NO. 81935, preferably the coding region thereof, conferred the production of or the increase in leucine compared with the wild type control.

[42605] The nucleic acid sequence of B2839 from Escherichia coli, e.g. as shown in the respective line in column 5 of Table I, application no. 6, has been published in B. And the activity of the gene product thereof is the activity of transcriptional regulator.

[42606] Accordingly, in one embodiment, the process of the present invention for producing valine in a non-human organism, like a microorganism or a plant or a part thereof, comprises increasing or generating the activity of a gene product with the activity of a gene product conferring the activity of “transcriptional regulator”, especially from Escherichia coli or its functional equivalent or its homolog, e.g. the increase of
[42607] (a) a gene product of a gene comprising the nucleic acid molecule as shown in the respective line in column 5 of Table I (whereby the respective line discloses in column 7 the fine chemical valine), application no. 6, preferably the coding region thereof, or a homolog or a fragment thereof, and being depicted in the same respective line as said B2839, or a functional equivalent or a homolog thereof as shown in column 8 of Table I, application no. 6, preferably the coding region thereof, particularly a homolog or functional equivalent as shown in column 8 of Table I B, application no. 6, and being depicted in the same respective line as said B2839, and preferably the activity is increased non-targeted, or
[42608] (b) a polypeptide comprising a polypeptide, a consensus sequence or at least a polypeptide motif as shown in the respective line in column 5 of Table II or in column 8 of Table IV, application no. 6, respectively, and being depicted in the same respective line as said B2839, or a functional equivalent or a homolog thereof as depicted in column 8 of Table II, application no. 6, preferably a homolog or functional equivalent as depicted in column 8 of Table II B, application no. 6, and being depicted in the same respective line as said B2839, and preferably the activity is increased non-targeted, whereby the respective line discloses in column 7 the fine chemical valine.

[42609] Accordingly, in one embodiment, the molecule which activity is to be increased in the process of the invention is the gene product with an activity as a “transcriptional regulator”, preferably it is the molecule of section (a) or (b) of this paragraph.

[42610] In particular, it was observed that in plants, especially in Arabidopsis thaliana, increasing or generating the activity of a gene product non-targeted with the activity of a “transcriptional regulator”, preferably being encoded by a gene comprising the nucleic acid sequence SEQ ID NO. 81935, preferably the coding region thereof, conferred the production of or the increase in valine compared with the wild type control.

[42611] The nucleic acid sequence of B2914 from Escherichia coli, e.g. as shown in the respective line in column 5 of Table I, application no. 6, has been published in B. And the activity of the gene product thereof is the activity of ribosephosphate isomerase, constitutive.

[42612] Accordingly, in one embodiment, the process of the present invention for producing isoleucine in a non-human organism, like a microorganism or a plant or a part thereof, comprises increasing or generating the activity of a gene product with the activity of a gene product conferring the activity of “ribosephosphate isomerase, constitutive”, especially from Escherichia coli or its functional equivalent or its homolog, e.g. the increase of
[42613] (a) a gene product of a gene comprising the nucleic acid molecule as shown in the respective line in column 5 of Table I (whereby the respective line discloses in column 7 the fine chemical isoleucine), application no. 6, preferably the coding region thereof, or a homolog or a fragment thereof, and being depicted in the same respective line as said B2914, or a functional equivalent or a homolog thereof as shown in column 8 of Table I, application no. 6, preferably the coding region thereof, particularly a homolog or functional equivalent as shown in column 8 of Table I B, application no. 6, and being depicted in the same respective line as said B2914, and preferably the activity is increased non-targeted, or
[42614] (b) a polypeptide comprising a polypeptide, a consensus sequence or at least a polypeptide motif as shown in the respective line in column 5 of Table II or in column 8 of Table IV, application no. 6, respectively, and being depicted in the same respective line as said B2914, or a functional equivalent or a homolog thereof as depicted in column 8 of Table II, application no. 6, preferably a homolog or functional equivalent as depicted in column 8 of Table II B, application no. 6, and being depicted in the same respective line as said B2914, and preferably the activity is increased non-targeted, whereby the respective line discloses in column 7 the fine chemical isoleucine.

[42615] Accordingly, in one embodiment, the molecule which activity is to be increased in the process of the invention is the gene product with an activity as a “ribosephosphate isomerase, constitutive”, preferably it is the molecule of section (a) or (b) of this paragraph.

[42616] In particular, it was observed that in plants, especially in Arabidopsis thaliana, increasing or generating the activity of a gene product non-targeted with the activity of a “ribosephosphate isomerase, constitutive”, preferably being encoded by a gene comprising the nucleic acid sequence SEQ ID NO. 41073, preferably the coding region thereof, conferred the production of or the increase in isoleucine compared with the wild type control.

[42617] The nucleic acid sequence of B2923 from Escherichia coli, e.g. as shown in the respective line in column 5 of Table I, application no. 6, has been published in B. And the activity of the gene product thereof is the activity of arginine exporter protein.

[42618] Accordingly, in one embodiment, the process of the present invention for producing valine in a non-human organism, like a microorganism or a plant or a part thereof, comprises increasing or generating the activity of a gene product with the activity of a gene product conferring the activity of “arginine exporter protein”, especially from Escherichia coli or its functional equivalent or its homolog, e.g. the increase of
[42619] (a) a gene product of a gene comprising the nucleic acid molecule as shown in the respective line in column 5 of Table I (whereby the respective line discloses in column 7 the fine chemical valine), application no. 6, preferably the coding region thereof, or a homolog or a fragment thereof, and being depicted in the same respective line as said B2923, or a functional equivalent or a homolog thereof as shown in column 8 of Table I, application no. 6, preferably the coding region thereof, particularly a homolog or functional equivalent as shown in column 8 of Table I B, application no. 6, and being depicted in the same respective line as said B2923, and preferably the activity is increased non-targeted, or
[42620] (b) a polypeptide comprising a polypeptide, a consensus sequence or at least a polypeptide motif as shown in the respective line in column 5 of Table II or in column 8 of Table IV, application no. 6, respectively, and being depicted in the same respective line as said B2923, or a functional equivalent or a homolog thereof as depicted in column 8 of Table II, application no. 6, preferably a homolog or functional equivalent as depicted in column 8 of Table II B, application no. 6, and being depicted in the same respective line as said B2923, and preferably the activity is increased non-targeted, whereby the respective line discloses in column 7 the fine chemical valine.

[42621] Accordingly, in one embodiment, the molecule which activity is to be increased in the process of the invention is the gene product with an activity as a “arginine exporter protein”, preferably it is the molecule of section (a) or (b) of this paragraph.

[42622] In particular, it was observed that in plants, especially in Arabidopsis thaliana, increasing or generating the activity of a gene product non-targeted with the activity of a “arginine exporter protein”, preferably being encoded by a gene comprising the nucleic acid sequence SEQ ID NO. 9333, preferably the coding region thereof, conferred the production of or the increase in valine compared with the wild type control.

[42623] The nucleic acid sequence of B3064 from Escherichia coli, e.g. as shown in the respective line in column 5 of Table I, application no. 6, has been published in B. And the activity of the gene product thereof is the activity of glycoprotease.

[42624] Accordingly, in one embodiment, the process of the present invention for producing isoleucine in a non-human organism, like a microorganism or a plant or a part thereof, comprises increasing or generating the activity of a gene product with the activity of a gene product conferring the activity of “glycoprotease”, especially from Escherichia coli or its functional equivalent or its homolog, e.g. the increase of
[42625] (a) a gene product of a gene comprising the nucleic acid molecule as shown in the respective line in column 5 of Table I (whereby the respective line discloses in column 7 the fine chemical isoleucine), application no. 6, preferably the coding region thereof, or a homolog or a fragment thereof, and being depicted in the same respective line as said B3064, or a functional equivalent or a homolog thereof as shown in column 8 of Table I, application no. 6, preferably the coding region thereof, particularly a homolog or functional equivalent as shown in column 8 of Table I B, application no. 6, and being depicted in the same respective line as said B3064, and preferably the activity is increased non-targeted, or
[42626] (b) a polypeptide comprising a polypeptide, a consensus sequence or at least a polypeptide motif as shown in the respective line in column 5 of Table II or in column 8 of Table IV, application no. 6, respectively, and being depicted in the same respective line as said B3064, or a functional equivalent or a homolog thereof as depicted in column 8 of Table II, application no. 6, preferably a homolog or functional equivalent as depicted in column 8 of Table II B, application no. 6, and being depicted in the same respective line as said B3064, and preferably the activity is increased non-targeted, whereby the respective line discloses in column 7 the fine chemical isoleucine.

[42627] Accordingly, in one embodiment, the molecule which activity is to be increased in the process of the invention is the gene product with an activity as a “glycoprotease”, preferably it is the molecule of section (a) or (b) of this paragraph.

[42628] In particular, it was observed that in plants, especially in Arabidopsis thaliana, increasing or generating the activity of a gene product non-targeted with the activity of a “glycoprotease”, preferably being encoded by a gene comprising the nucleic acid sequence SEQ ID NO. 42046, preferably the coding region thereof, conferred the production of or the increase in isoleucine compared with the wild type control.

[42629] The nucleic acid sequence of B3064 from Escherichia coli, e.g. as shown in the respective line in column 5 of Table I, application no. 6, has been published in B. And the activity of the gene product thereof is the activity of glycoprotease.

[42630] Accordingly, in one embodiment, the process of the present invention for producing leucine in a non-human organism, like a microorganism or a plant or a part thereof, comprises increasing or generating the activity of a gene product with the activity of a gene product conferring the activity of “glycoprotease”, especially from Escherichia coli or its functional equivalent or its homolog, e.g. the increase of
[42631] (a) a gene product of a gene comprising the nucleic acid molecule as shown in the respective line in column 5 of Table I (whereby the respective line discloses in column 7 the fine chemical leucine), application no. 6, preferably the coding region thereof, or a homolog or a fragment thereof, and being depicted in the same respective line as said B3064, or a functional equivalent or a homolog thereof as shown in column 8 of Table I, application no. 6, preferably the coding region thereof, particularly a homolog or functional equivalent as shown in column 8 of Table I B, application no. 6, and being depicted in the same respective line as said B3064, and preferably the activity is increased non-targeted, or
[42632] (b) a polypeptide comprising a polypeptide, a consensus sequence or at least a polypeptide motif as shown in the respective line in column 5 of Table II or in column 8 of Table IV, application no. 6, respectively, and being depicted in the same respective line as said B3064, or a functional equivalent or a homolog thereof as depicted in column 8 of Table II, application no. 6, preferably a homolog or functional equivalent as depicted in column 8 of Table II B, application no. 6, and being depicted in the same respective line as said B3064, and preferably the activity is increased non-targeted, whereby the respective line discloses in column 7 the fine chemical leucine.

[42633] Accordingly, in one embodiment, the molecule which activity is to be increased in the process of the invention is the gene product with an activity as a “glycoprotease”, preferably it is the molecule of section (a) or (b) of this paragraph.

[42634] In particular, it was observed that in plants, especially in Arabidopsis thaliana, increasing or generating the activity of a gene product non-targeted with the activity of a “glycoprotease”, preferably being encoded by a gene comprising the nucleic acid sequence SEQ ID NO. 42046, preferably the coding region thereof, conferred the production of or the increase in leucine compared with the wild type control.

[42635] The nucleic acid sequence of B3064 from Escherichia coli, e.g. as shown in the respective line in column 5 of Table I, application no. 6, has been published in B. And the activity of the gene product thereof is the activity of glycoprotease.

[42636] Accordingly, in one embodiment, the process of the present invention for producing valine in a non-human organism, like a microorganism or a plant or a part thereof, comprises increasing or generating the activity of a gene product with the activity of a gene product conferring the activity of “glycoprotease”, especially from Escherichia coli or its functional equivalent or its homolog, e.g. the increase of
[42637] (a) a gene product of a gene comprising the nucleic acid molecule as shown in the respective line in column 5 of Table I (whereby the respective line discloses in column 7 the fine chemical valine), application no. 6, preferably the coding region thereof, or a homolog or a fragment thereof, and being depicted in the same respective line as said B3064, or a functional equivalent or a homolog thereof as shown in column 8 of Table I, application no. 6, preferably the coding region thereof, particularly a homolog or functional equivalent as shown in column 8 of Table I B, application no. 6, and being depicted in the same respective line as said B3064, and preferably the activity is increased non-targeted, or
[42638] (b) a polypeptide comprising a polypeptide, a consensus sequence or at least a polypeptide motif as shown in the respective line in column 5 of Table II or in column 8 of Table IV, application no. 6, respectively, and being depicted in the same respective line as said B3064, or a functional equivalent or a homolog thereof as depicted in column 8 of Table II, application no. 6, preferably a homolog or functional equivalent as depicted in column 8 of Table II B, application no. 6, and being depicted in the same respective line as said B3064, and preferably the activity is increased non-targeted, whereby the respective line discloses in column 7 the fine chemical valine.

[42639] Accordingly, in one embodiment, the molecule which activity is to be increased in the process of the invention is the gene product with an activity as a “glycoprotease”, preferably it is the molecule of section (a) or (b) of this paragraph.

[42640] In particular, it was observed that in plants, especially in Arabidopsis thaliana, increasing or generating the activity of a gene product non-targeted with the activity of a “glycoprotease”, preferably being encoded by a gene comprising the nucleic acid sequence SEQ ID NO. 42046, preferably the coding region thereof, conferred the production of or the increase in valine compared with the wild type control.

[42641] The nucleic acid sequence of B3083 from Escherichia coli, e.g. as shown in the respective line in column 5 of Table I, application no. 6, has been published in B. And the activity of the gene product thereof is the activity of b3083-protein.

[42642] Accordingly, in one embodiment, the process of the present invention for producing isoleucine in a non-human organism, like a microorganism or a plant or a part thereof, comprises increasing or generating the activity of a gene product with the activity of a gene product conferring the activity of “b3083-protein”, especially from Escherichia coli or its functional equivalent or its homolog, e.g. the increase of
[42643] (a) a gene product of a gene comprising the nucleic acid molecule as shown in the respective line in column 5 of Table I (whereby the respective line discloses in column 7 the fine chemical isoleucine), application no. 6, preferably the coding region thereof, or a homolog or a fragment thereof, and being depicted in the same respective line as said B3083, or a functional equivalent or a homolog thereof as shown in column 8 of Table I, application no. 6, preferably the coding region thereof, particularly a homolog or functional equivalent as shown in column 8 of Table I B, application no. 6, and being depicted in the same respective line as said B3083, and preferably the activity is increased non-targeted, or
[42644] (b) a polypeptide comprising a polypeptide, a consensus sequence or at least a polypeptide motif as shown in the respective line in column 5 of Table II or in column 8 of Table IV, application no. 6, respectively, and being depicted in the same respective line as said B3083, or a functional equivalent or a homolog thereof as depicted in column 8 of Table II, application no. 6, preferably a homolog or functional equivalent as depicted in column 8 of Table II B, application no. 6, and being depicted in the same respective line as said B3083, and preferably the activity is increased non-targeted, whereby the respective line discloses in column 7 the fine chemical isoleucine.

[42645] Accordingly, in one embodiment, the molecule which activity is to be increased in the process of the invention is the gene product with an activity as a “b3083-protein”, preferably it is the molecule of section (a) or (b) of this paragraph.

[42646] In particular, it was observed that in plants, especially in Arabidopsis thaliana, increasing or generating the activity of a gene product non-targeted with the activity of a “b3083-protein”, preferably being encoded by a gene comprising the nucleic acid sequence SEQ ID NO. 82424, preferably the coding region thereof, conferred the production of or the increase in isoleucine compared with the wild type control.

[42647] The nucleic acid sequence of B3083 from Escherichia coli, e.g. as shown in the respective line in column 5 of Table I, application no. 6, has been published in B. And the activity of the gene product thereof is the activity of b3083-protein.

[42648] Accordingly, in one embodiment, the process of the present invention for producing valine in a non-human organism, like a microorganism or a plant or a part thereof, comprises increasing or generating the activity of a gene product with the activity of a gene product conferring the activity of “b3083-protein”, especially from Escherichia coli or its functional equivalent or its homolog, e.g. the increase of
[42649] (a) a gene product of a gene comprising the nucleic acid molecule as shown in the respective line in column 5 of Table I (whereby the respective line discloses in column 7 the fine chemical valine), application no. 6, preferably the coding region thereof, or a homolog or a fragment thereof, and being depicted in the same respective line as said B3083, or a functional equivalent or a homolog thereof as shown in column 8 of Table I, application no. 6, preferably the coding region thereof, particularly a homolog or functional equivalent as shown in column 8 of Table I B, application no. 6, and being depicted in the same respective line as said B3083, and preferably the activity is increased non-targeted, or
[42650] (b) a polypeptide comprising a polypeptide, a consensus sequence or at least a polypeptide motif as shown in the respective line in column 5 of Table II or in column 8 of Table IV, application no. 6, respectively, and being depicted in the same respective line as said B3083, or a functional equivalent or a homolog thereof as depicted in column 8 of Table II, application no. 6, preferably a homolog or functional equivalent as depicted in column 8 of Table II B, application no. 6, and being depicted in the same respective line as said B3083, and preferably the activity is increased non-targeted, whereby the respective line discloses in column 7 the fine chemical valine.

[42651] Accordingly, in one embodiment, the molecule which activity is to be increased in the process of the invention is the gene product with an activity as a “b3083-protein”, preferably it is the molecule of section (a) or (b) of this paragraph.

[42652] In particular, it was observed that in plants, especially in Arabidopsis thaliana, increasing or generating the activity of a gene product non-targeted with the activity of a “b3083-protein”, preferably being encoded by a gene comprising the nucleic acid sequence SEQ ID NO. 82424, preferably the coding region thereof, conferred the production of or the increase in valine compared with the wild type control.

[42653] The nucleic acid sequence of B3112 from Escherichia coli, e.g. as shown in the respective line in column 5 of Table I, application no. 6, has been published in B. And the activity of the gene product thereof is the activity of L-serine dehydratase.

[42654] Accordingly, in one embodiment, the process of the present invention for producing leucine in a non-human organism, like a microorganism or a plant or a part thereof, comprises increasing or generating the activity of a gene product with the activity of a gene product conferring the activity of “L-serine dehydratase”, especially from Escherichia coli or its functional equivalent or its homolog, e.g. the increase of
[42655] (a) a gene product of a gene comprising the nucleic acid molecule as shown in the respective line in column 5 of Table I (whereby the respective line discloses in column 7 the fine chemical leucine), application no. 6, preferably the coding region thereof, or a homolog or a fragment thereof, and being depicted in the same respective line as said B3112, or a functional equivalent or a homolog thereof as shown in column 8 of Table I, application no. 6, preferably the coding region thereof, particularly a homolog or functional equivalent as shown in column 8 of Table I B, application no. 6, and being depicted in the same respective line as said B3112, and preferably the activity is increased plastidic, or
[42656] (b) a polypeptide comprising a polypeptide, a consensus sequence or at least a polypeptide motif as shown in the respective line in column 5 of Table II or in column 8 of Table IV, application no. 6, respectively, and being depicted in the same respective line as said B3112, or a functional equivalent or a homolog thereof as depicted in column 8 of Table II, application no. 6, preferably a homolog or functional equivalent as depicted in column 8 of Table II B, application no. 6, and being depicted in the same respective line as said B3112, and preferably the activity is increased plastidic, whereby the respective line discloses in column 7 the fine chemical leucine.

[42657] Accordingly, in one embodiment, the molecule which activity is to be increased in the process of the invention is the gene product with an activity as a “L-serine dehydratase”, preferably it is the molecule of section (a) or (b) of this paragraph.

[42658] In particular, it was observed that in plants, especially in Arabidopsis thaliana, increasing or generating the activity of a gene product plastidic with the activity of a “L-serine dehydratase”, preferably being encoded by a gene comprising the nucleic acid sequence SEQ ID NO. 104660, preferably the coding region thereof, conferred the production of or the increase in leucine compared with the wild type control.

[42659] The nucleic acid sequence of B3117 from Escherichia coli, e.g. as shown in the respective line in column 5 of Table I, application no. 6, has been published in B. And the activity of the gene product thereof is the activity of threonine dehydratase.

[42660] Accordingly, in one embodiment, the process of the present invention for producing valine in a non-human organism, like a microorganism or a plant or a part thereof, comprises increasing or generating the activity of a gene product with the activity of a gene product conferring the activity of “threonine dehydratase”, especially from Escherichia coli or its functional equivalent or its homolog, e.g. the increase of
[42661] (a) a gene product of a gene comprising the nucleic acid molecule as shown in the respective line in column 5 of Table I (whereby the respective line discloses in column 7 the fine chemical valine), application no. 6, preferably the coding region thereof, or a homolog or a fragment thereof, and being depicted in the same respective line as said B3117, or a functional equivalent or a homolog thereof as shown in column 8 of Table I, application no. 6, preferably the coding region thereof, particularly a homolog or functional equivalent as shown in column 8 of Table I B, application no. 6, and being depicted in the same respective line as said B3117, and preferably the activity is increased plastidic, or
[42662] (b) a polypeptide comprising a polypeptide, a consensus sequence or at least a polypeptide motif as shown in the respective line in column 5 of Table II or in column 8 of Table IV, application no. 6, respectively, and being depicted in the same respective line as said B3117, or a functional equivalent or a homolog thereof as depicted in column 8 of Table II, application no. 6, preferably a homolog or functional equivalent as depicted in column 8 of Table II B, application no. 6, and being depicted in the same respective line as said B3117, and preferably the activity is increased plastidic, whereby the respective line discloses in column 7 the fine chemical valine.

[42663] Accordingly, in one embodiment, the molecule which activity is to be increased in the process of the invention is the gene product with an activity as a “threonine dehydratase”, preferably it is the molecule of section (a) or (b) of this paragraph.

[42664] In particular, it was observed that in plants, especially in Arabidopsis thaliana, increasing or generating the activity of a gene product plastidic with the activity of a “threonine dehydratase”, preferably being encoded by a gene comprising the nucleic acid sequence SEQ ID NO. 104871, preferably the coding region thereof, conferred the production of or the increase in valine compared with the wild type control.

[42665] The nucleic acid sequence of B3256 from Escherichia coli, e.g. as shown in the respective line in column 5 of Table I, application no. 6, has been published in B. And the activity of the gene product thereof is the activity of acetyl CoA carboxylase.

[42666] Accordingly, in one embodiment, the process of the present invention for producing leucine in a non-human organism, like a microorganism or a plant or a part thereof, comprises increasing or generating the activity of a gene product with the activity of a gene product conferring the activity of “acetyl CoA carboxylase”, especially from Escherichia coli or its functional equivalent or its homolog, e.g. the increase of
[42667] (a) a gene product of a gene comprising the nucleic acid molecule as shown in the respective line in column 5 of Table I (whereby the respective line discloses in column 7 the fine chemical leucine), application no. 6, preferably the coding region thereof, or a homolog or a fragment thereof, and being depicted in the same respective line as said B3256, or a functional equivalent or a homolog thereof as shown in column 8 of Table I, application no. 6, preferably the coding region thereof, particularly a homolog or functional equivalent as shown in column 8 of Table I B, application no. 6, and being depicted in the same respective line as said B3256, and preferably the activity is increased non-targeted, or
[42668] (b) a polypeptide comprising a polypeptide, a consensus sequence or at least a polypeptide motif as shown in the respective line in column 5 of Table II or in column 8 of Table IV, application no. 6, respectively, and being depicted in the same respective line as said B3256, or a functional equivalent or a homolog thereof as depicted in column 8 of Table II, application no. 6, preferably a homolog or functional equivalent as depicted in column 8 of Table II B, application no. 6, and being depicted in the same respective line as said B3256, and preferably the activity is increased non-targeted, whereby the respective line discloses in column 7 the fine chemical leucine.

[42669] Accordingly, in one embodiment, the molecule which activity is to be increased in the process of the invention is the gene product with an activity as a “acetyl CoA carboxylase”, preferably it is the molecule of section (a) or (b) of this paragraph.

[42670] In particular, it was observed that in plants, especially in Arabidopsis thaliana, increasing or generating the activity of a gene product non-targeted with the activity of a “acetyl CoA carboxylase”, preferably being encoded by a gene comprising the nucleic acid sequence SEQ ID NO. 9492, preferably the coding region thereof, conferred the production of or the increase in leucine compared with the wild type control.

[42671] The nucleic acid sequence of B3352 from Escherichia coli, e.g. as shown in the respective line in column 5 of Table I, application no. 6, has been published in B. And the activity of the gene product thereof is the activity of ABC transporter ATP-binding protein.

[42672] Accordingly, in one embodiment, the process of the present invention for producing valine in a non-human organism, like a microorganism or a plant or a part thereof, comprises increasing or generating the activity of a gene product with the activity of a gene product conferring the activity of “ABC transporter ATP-binding protein”, especially from Escherichia coli or its functional equivalent or its homolog, e.g. the increase of
[42673] (a) a gene product of a gene comprising the nucleic acid molecule as shown in the respective line in column 5 of Table I (whereby the respective line discloses in column 7 the fine chemical valine), application no. 6, preferably the coding region thereof, or a homolog or a fragment thereof, and being depicted in the same respective line as said B3352, or a functional equivalent or a homolog thereof as shown in column 8 of Table I, application no. 6, preferably the coding region thereof, particularly a homolog or functional equivalent as shown in column 8 of Table I B, application no. 6, and being depicted in the same respective line as said B3352, and preferably the activity is increased non-targeted, or
[42674] (b) a polypeptide comprising a polypeptide, a consensus sequence or at least a polypeptide motif as shown in the respective line in column 5 of Table II or in column 8 of Table IV, application no. 6, respectively, and being depicted in the same respective line as said B3352, or a functional equivalent or a homolog thereof as depicted in column 8 of Table II, application no. 6, preferably a homolog or functional equivalent as depicted in column 8 of Table II B, application no. 6, and being depicted in the same respective line as said B3352, and preferably the activity is increased non-targeted, whereby the respective line discloses in column 7 the fine chemical valine.

[42675] Accordingly, in one embodiment, the molecule which activity is to be increased in the process of the invention is the gene product with an activity as a “ABC transporter ATP-binding protein”, preferably it is the molecule of section (a) or (b) of this paragraph.

[42676] In particular, it was observed that in plants, especially in Arabidopsis thaliana, increasing or generating the activity of a gene product non-targeted with the activity of a “ABC transporter ATP-binding protein”, preferably being encoded by a gene comprising the nucleic acid sequence SEQ ID NO. 82572, preferably the coding region thereof, conferred the production of or the increase in valine compared with the wild type control.

[42677] The nucleic acid sequence of B3429 from Escherichia coli, e.g. as shown in the respective line in column 5 of Table I, application no. 6, has been published in B. And the activity of the gene product thereof is the activity of glycogen synthase.

[42678] Accordingly, in one embodiment, the process of the present invention for producing isoleucine in a non-human organism, like a microorganism or a plant or a part thereof, comprises increasing or generating the activity of a gene product with the activity of a gene product conferring the activity of “glycogen synthase”, especially from Escherichia coli or its functional equivalent or its homolog, e.g. the increase of
[42679] (a) a gene product of a gene comprising the nucleic acid molecule as shown in the respective line in column 5 of Table I (whereby the respective line discloses in column 7 the fine chemical isoleucine), application no. 6, preferably the coding region thereof, or a homolog or a fragment thereof, and being depicted in the same respective line as said B3429, or a functional equivalent or a homolog thereof as shown in column 8 of Table I, application no. 6, preferably the coding region thereof, particularly a homolog or functional equivalent as shown in column 8 of Table I B, application no. 6, and being depicted in the same respective line as said B3429, and preferably the activity is increased mitochondrial, or
[42680] (b) a polypeptide comprising a polypeptide, a consensus sequence or at least a polypeptide motif as shown in the respective line in column 5 of Table II or in column 8 of Table IV, application no. 6, respectively, and being depicted in the same respective line as said B3429, or a functional equivalent or a homolog thereof as depicted in column 8 of Table II, application no. 6, preferably a homolog or functional equivalent as depicted in column 8 of Table II B, application no. 6, and being depicted in the same respective line as said B3429, and preferably the activity is increased mitochondrial, whereby the respective line discloses in column 7 the fine chemical isoleucine.

[42681] Accordingly, in one embodiment, the molecule which activity is to be increased in the process of the invention is the gene product with an activity as a “glycogen synthase”, preferably it is the molecule of section (a) or (b) of this paragraph.

[42682] In particular, it was observed that in plants, especially in Arabidopsis thaliana, increasing or generating the activity of a gene product mitochondrial with the activity of a “glycogen synthase”, preferably being encoded by a gene comprising the nucleic acid sequence SEQ ID NO. 94051, preferably the coding region thereof, conferred the production of or the increase in isoleucine compared with the wild type control.

[42683] The nucleic acid sequence of B3429 from Escherichia coli, e.g. as shown in the respective line in column 5 of Table I, application no. 6, has been published in B. And the activity of the gene product thereof is the activity of glycogen synthase.

[42684] Accordingly, in one embodiment, the process of the present invention for producing leucine in a non-human organism, like a microorganism or a plant or a part thereof, comprises increasing or generating the activity of a gene product with the activity of a gene product conferring the activity of “glycogen synthase”, especially from Escherichia coli or its functional equivalent or its homolog, e.g. the increase of
[42685] (a) a gene product of a gene comprising the nucleic acid molecule as shown in the respective line in column 5 of Table I (whereby the respective line discloses in column 7 the fine chemical leucine), application no. 6, preferably the coding region thereof, or a homolog or a fragment thereof, and being depicted in the same respective line as said B3429, or a functional equivalent or a homolog thereof as shown in column 8 of Table I, application no. 6, preferably the coding region thereof, particularly a homolog or functional equivalent as shown in column 8 of Table I B, application no. 6, and being depicted in the same respective line as said B3429, and preferably the activity is increased mitochondrial, or
[42686] (b) a polypeptide comprising a polypeptide, a consensus sequence or at least a polypeptide motif as shown in the respective line in column 5 of Table II or in column 8 of Table IV, application no. 6, respectively, and being depicted in the same respective line as said B3429, or a functional equivalent or a homolog thereof as depicted in column 8 of Table II, application no. 6, preferably a homolog or functional equivalent as depicted in column 8 of Table II B, application no. 6, and being depicted in the same respective line as said B3429, and preferably the activity is increased mitochondrial, whereby the respective line discloses in column 7 the fine chemical leucine.

[42687] Accordingly, in one embodiment, the molecule which activity is to be increased in the process of the invention is the gene product with an activity as a “glycogen synthase”, preferably it is the molecule of section (a) or (b) of this paragraph.

[42688] In particular, it was observed that in plants, especially in Arabidopsis thaliana, increasing or generating the activity of a gene product mitochondrial with the activity of a “glycogen synthase”, preferably being encoded by a gene comprising the nucleic acid sequence SEQ ID NO. 94051, preferably the coding region thereof, conferred the production of or the increase in leucine compared with the wild type control.

[42689] The nucleic acid sequence of B3490 from Escherichia coli, e.g. as shown in the respective line in column 5 of Table I, application no. 6, has been published in B. And the activity of the gene product thereof is the activity of b3490-protein.

[42690] Accordingly, in one embodiment, the process of the present invention for producing valine in a non-human organism, like a microorganism or a plant or a part thereof, comprises increasing or generating the activity of a gene product with the activity of a gene product conferring the activity of “b3490-protein”, especially from Escherichia coli or its functional equivalent or its homolog, e.g. the increase of
[42691] (a) a gene product of a gene comprising the nucleic acid molecule as shown in the respective line in column 5 of Table I (whereby the respective line discloses in column 7 the fine chemical valine), application no. 6, preferably the coding region thereof, or a homolog or a fragment thereof, and being depicted in the same respective line as said B3490, or a functional equivalent or a homolog thereof as shown in column 8 of Table I, application no. 6, preferably the coding region thereof, particularly a homolog or functional equivalent as shown in column 8 of Table I B, application no. 6, and being depicted in the same respective line as said B3490, and preferably the activity is increased non-targeted, or
[42692] (b) a polypeptide comprising a polypeptide, a consensus sequence or at least a polypeptide motif as shown in the respective line in column 5 of Table II or in column 8 of Table IV, application no. 6, respectively, and being depicted in the same respective line as said B3490, or a functional equivalent or a homolog thereof as depicted in column 8 of Table II, application no. 6, preferably a homolog or functional equivalent as depicted in column 8 of Table II B, application no. 6, and being depicted in the same respective line as said B3490, and preferably the activity is increased non-targeted, whereby the respective line discloses in column 7 the fine chemical valine.

[42693] Accordingly, in one embodiment, the molecule which activity is to be increased in the process of the invention is the gene product with an activity as a “b3490-protein”, preferably it is the molecule of section (a) or (b) of this paragraph.

[42694] In particular, it was observed that in plants, especially in Arabidopsis thaliana, increasing or generating the activity of a gene product non-targeted with the activity of a “b3490-protein”, preferably being encoded by a gene comprising the nucleic acid sequence SEQ ID NO. 105332, preferably the coding region thereof, conferred the production of or the increase in valine compared with the wild type control.

[42695] The nucleic acid sequence of B3572 from Escherichia coli, e.g. as shown in the respective line in column 5 of Table I, application no. 6, has been published in B. And the activity of the gene product thereof is the activity of valine-pyruvate transaminase.

[42696] Accordingly, in one embodiment, the process of the present invention for producing isoleucine in a non-human organism, like a microorganism or a plant or a part thereof, comprises increasing or generating the activity of a gene product with the activity of a gene product conferring the activity of “valine-pyruvate transaminase”, especially from Escherichia coli or its functional equivalent or its homolog, e.g. the increase of
[42697] (a) a gene product of a gene comprising the nucleic acid molecule as shown in the respective line in column 5 of Table I (whereby the respective line discloses in column 7 the fine chemical isoleucine), application no. 6, preferably the coding region thereof, or a homolog or a fragment thereof, and being depicted in the same respective line as said B3572, or a functional equivalent or a homolog thereof as shown in column 8 of Table I, application no. 6, preferably the coding region thereof, particularly a homolog or functional equivalent as shown in column 8 of Table I B, application no. 6, and being depicted in the same respective line as said B3572, and preferably the activity is increased plastidic, or
[42698] (b) a polypeptide comprising a polypeptide, a consensus sequence or at least a polypeptide motif as shown in the respective line in column 5 of Table II or in column 8 of Table IV, application no. 6, respectively, and being depicted in the same respective line as said B3572, or a functional equivalent or a homolog thereof as depicted in column 8 of Table II, application no. 6, preferably a homolog or functional equivalent as depicted in column 8 of Table II B, application no. 6, and being depicted in the same respective line as said B3572, and preferably the activity is increased plastidic, whereby the respective line discloses in column 7 the fine chemical isoleucine.

[42699] Accordingly, in one embodiment, the molecule which activity is to be increased in the process of the invention is the gene product with an activity as a “valine-pyruvate transaminase”, preferably it is the molecule of section (a) or (b) of this paragraph.

[42700] In particular, it was observed that in plants, especially in Arabidopsis thaliana, increasing or generating the activity of a gene product plastidic with the activity of a “valine-pyruvate transaminase”, preferably being encoded by a gene comprising the nucleic acid sequence SEQ ID NO. 10172, preferably the coding region thereof, conferred the production of or the increase in isoleucine compared with the wild type control.

[42701] The nucleic acid sequence of B3572 from Escherichia coli, e.g. as shown in the respective line in column 5 of Table I, application no. 6, has been published in B. And the activity of the gene product thereof is the activity of valine-pyruvate transaminase.

[42702] Accordingly, in one embodiment, the process of the present invention for producing leucine in a non-human organism, like a microorganism or a plant or a part thereof, comprises increasing or generating the activity of a gene product with the activity of a gene product conferring the activity of “valine-pyruvate transaminase”, especially from Escherichia coli or its functional equivalent or its homolog, e.g. the increase of
[42703] (a) a gene product of a gene comprising the nucleic acid molecule as shown in the respective line in column 5 of Table I (whereby the respective line discloses in column 7 the fine chemical leucine), application no. 6, preferably the coding region thereof, or a homolog or a fragment thereof, and being depicted in the same respective line as said B3572, or a functional equivalent or a homolog thereof as shown in column 8 of Table I, application no. 6, preferably the coding region thereof, particularly a homolog or functional equivalent as shown in column 8 of Table I B, application no. 6, and being depicted in the same respective line as said B3572, and preferably the activity is increased plastidic, or
[42704] (b) a polypeptide comprising a polypeptide, a consensus sequence or at least a polypeptide motif as shown in the respective line in column 5 of Table II or in column 8 of Table IV, application no. 6, respectively, and being depicted in the same respective line as said B3572, or a functional equivalent or a homolog thereof as depicted in column 8 of Table II, application no. 6, preferably a homolog or functional equivalent as depicted in column 8 of Table II B, application no. 6, and being depicted in the same respective line as said B3572, and preferably the activity is increased plastidic, whereby the respective line discloses in column 7 the fine chemical leucine.

[42705] Accordingly, in one embodiment, the molecule which activity is to be increased in the process of the invention is the gene product with an activity as a “valine-pyruvate transaminase”, preferably it is the molecule of section (a) or (b) of this paragraph.

[42706] In particular, it was observed that in plants, especially in Arabidopsis thaliana, increasing or generating the activity of a gene product plastidic with the activity of a “valine-pyruvate transaminase”, preferably being encoded by a gene comprising the nucleic acid sequence SEQ ID NO. 10172, preferably the coding region thereof, conferred the production of or the increase in leucine compared with the wild type control.

[42707] The nucleic acid sequence of B3634 from Escherichia coli, e.g. as shown in the respective line in column 5 of Table I, application no. 6, has been published in B. And the activity of the gene product thereof is the activity of phosphopantetheine adenylyltransferase.

[42708] Accordingly, in one embodiment, the process of the present invention for producing isoleucine in a non-human organism, like a microorganism or a plant or a part thereof, comprises increasing or generating the activity of a gene product with the activity of a gene product conferring the activity of “phosphopantetheine adenylyltransferase”, especially from Escherichia coli or its functional equivalent or its homolog, e.g. the increase of
[42709] (a) a gene product of a gene comprising the nucleic acid molecule as shown in the respective line in column 5 of Table I (whereby the respective line discloses in column 7 the fine chemical isoleucine), application no. 6, preferably the coding region thereof, or a homolog or a fragment thereof, and being depicted in the same respective line as said B3634, or a functional equivalent or a homolog thereof as shown in column 8 of Table I, application no. 6, preferably the coding region thereof, particularly a homolog or functional equivalent as shown in column 8 of Table I B, application no. 6, and being depicted in the same respective line as said B3634, and preferably the activity is increased non-targeted, or
[42710] (b) a polypeptide comprising a polypeptide, a consensus sequence or at least a polypeptide motif as shown in the respective line in column 5 of Table II or in column 8 of Table IV, application no. 6, respectively, and being depicted in the same respective line as said B3634, or a functional equivalent or a homolog thereof as depicted in column 8 of Table II, application no. 6, preferably a homolog or functional equivalent as depicted in column 8 of Table II B, application no. 6, and being depicted in the same respective line as said B3634, and preferably the activity is increased non-targeted, whereby the respective line discloses in column 7 the fine chemical isoleucine.

[42711] Accordingly, in one embodiment, the molecule which activity is to be increased in the process of the invention is the gene product with an activity as a “phosphopantetheine adenylyltransferase”, preferably it is the molecule of section (a) or (b) of this paragraph.

[42712] In particular, it was observed that in plants, especially in Arabidopsis thaliana, increasing or generating the activity of a gene product non-targeted with the activity of a “phosphopantetheine adenylyltransferase”, preferably being encoded by a gene comprising the nucleic acid sequence SEQ ID NO. 42931, preferably the coding region thereof, conferred the production of or the increase in isoleucine compared with the wild type control.

[42713] The nucleic acid sequence of B3634 from Escherichia coli, e.g. as shown in the respective line in column 5 of Table I, application no. 6, has been published in B. And the activity of the gene product thereof is the activity of phosphopantetheine adenylyltransferase.

[42714] Accordingly, in one embodiment, the process of the present invention for producing leucine in a non-human organism, like a microorganism or a plant or a part thereof, comprises increasing or generating the activity of a gene product with the activity of a gene product conferring the activity of “phosphopantetheine adenylyltransferase”, especially from Escherichia coli or its functional equivalent or its homolog, e.g. the increase of
[42715] (a) a gene product of a gene comprising the nucleic acid molecule as shown in the respective line in column 5 of Table I (whereby the respective line discloses in column 7 the fine chemical leucine), application no. 6, preferably the coding region thereof, or a homolog or a fragment thereof, and being depicted in the same respective line as said B3634, or a functional equivalent or a homolog thereof as shown in column 8 of Table I, application no. 6, preferably the coding region thereof, particularly a homolog or functional equivalent as shown in column 8 of Table I B, application no. 6, and being depicted in the same respective line as said B3634, and preferably the activity is increased non-targeted, or
[42716] (b) a polypeptide comprising a polypeptide, a consensus sequence or at least a polypeptide motif as shown in the respective line in column 5 of Table II or in column 8 of Table IV, application no. 6, respectively, and being depicted in the same respective line as said B3634, or a functional equivalent or a homolog thereof as depicted in column 8 of Table II, application no. 6, preferably a homolog or functional equivalent as depicted in column 8 of Table II B, application no. 6, and being depicted in the same respective line as said B3634, and preferably the activity is increased non-targeted, whereby the respective line discloses in column 7 the fine chemical leucine.

[42717] Accordingly, in one embodiment, the molecule which activity is to be increased in the process of the invention is the gene product with an activity as a “phosphopantetheine adenylyltransferase”, preferably it is the molecule of section (a) or (b) of this paragraph.

[42718] In particular, it was observed that in plants, especially in Arabidopsis thaliana, increasing or generating the activity of a gene product non-targeted with the activity of a “phosphopantetheine adenylyltransferase”, preferably being encoded by a gene comprising the nucleic acid sequence SEQ ID NO. 42931, preferably the coding region thereof, conferred the production of or the increase in leucine compared with the wild type control.

[42719] The nucleic acid sequence of B3634 from Escherichia coli, e.g. as shown in the respective line in column 5 of Table I, application no. 6, has been published in B. And the activity of the gene product thereof is the activity of phosphopantetheine adenylyltransferase.

[42720] Accordingly, in one embodiment, the process of the present invention for producing valine in a non-human organism, like a microorganism or a plant or a part thereof, comprises increasing or generating the activity of a gene product with the activity of a gene product conferring the activity of “phosphopantetheine adenylyltransferase”, especially from Escherichia coli or its functional equivalent or its homolog, e.g. the increase of
[42721] (a) a gene product of a gene comprising the nucleic acid molecule as shown in the respective line in column 5 of Table I (whereby the respective line discloses in column 7 the fine chemical valine), application no. 6, preferably the coding region thereof, or a homolog or a fragment thereof, and being depicted in the same respective line as said B3634, or a functional equivalent or a homolog thereof as shown in column 8 of Table I, application no. 6, preferably the coding region thereof, particularly a homolog or functional equivalent as shown in column 8 of Table I B, application no. 6, and being depicted in the same respective line as said B3634, and preferably the activity is increased non-targeted, or
[42722] (b) a polypeptide comprising a polypeptide, a consensus sequence or at least a polypeptide motif as shown in the respective line in column 5 of Table II or in column 8 of Table IV, application no. 6, respectively, and being depicted in the same respective line as said B3634, or a functional equivalent or a homolog thereof as depicted in column 8 of Table II, application no. 6, preferably a homolog or functional equivalent as depicted in column 8 of Table II B, application no. 6, and being depicted in the same respective line as said B3634, and preferably the activity is increased non-targeted, whereby the respective line discloses in column 7 the fine chemical valine.

[42723] Accordingly, in one embodiment, the molecule which activity is to be increased in the process of the invention is the gene product with an activity as a “phosphopantetheine adenylyltransferase”, preferably it is the molecule of section (a) or (b) of this paragraph.

[42724] In particular, it was observed that in plants, especially in Arabidopsis thaliana, increasing or generating the activity of a gene product non-targeted with the activity of a “phosphopantetheine adenylyltransferase”, preferably being encoded by a gene comprising the nucleic acid sequence SEQ ID NO. 42931, preferably the coding region thereof, conferred the production of or the increase in valine compared with the wild type control.

[42725] The nucleic acid sequence of B3670 from Escherichia coli, e.g. as shown in the respective line in column 5 of Table I, application no. 6, has been published in B. And the activity of the gene product thereof is the activity of acetolactate synthase.

[42726] Accordingly, in one embodiment, the process of the present invention for producing leucine in a non-human organism, like a microorganism or a plant or a part thereof, comprises increasing or generating the activity of a gene product with the activity of a gene product conferring the activity of “acetolactate synthase”, especially from Escherichia coli or its functional equivalent or its homolog, e.g. the increase of
[42727] (a) a gene product of a gene comprising the nucleic acid molecule as shown in the respective line in column 5 of Table I (whereby the respective line discloses in column 7 the fine chemical leucine), application no. 6, preferably the coding region thereof, or a homolog or a fragment thereof, and being depicted in the same respective line as said B3670, or a functional equivalent or a homolog thereof as shown in column 8 of Table I, application no. 6, preferably the coding region thereof, particularly a homolog or functional equivalent as shown in column 8 of Table I B, application no. 6, and being depicted in the same respective line as said B3670, and preferably the activity is increased plastidic, or
[42728] (b) a polypeptide comprising a polypeptide, a consensus sequence or at least a polypeptide motif as shown in the respective line in column 5 of Table II or in column 8 of Table IV, application no. 6, respectively, and being depicted in the same respective line as said B3670, or a functional equivalent or a homolog thereof as depicted in column 8 of Table II, application no. 6, preferably a homolog or functional equivalent as depicted in column 8 of Table II B, application no. 6, and being depicted in the same respective line as said B3670, and preferably the activity is increased plastidic, whereby the respective line discloses in column 7 the fine chemical leucine.

[42729] Accordingly, in one embodiment, the molecule which activity is to be increased in the process of the invention is the gene product with an activity as a “acetolactate synthase”, preferably it is the molecule of section (a) or (b) of this paragraph.

[42730] In particular, it was observed that in plants, especially in Arabidopsis thaliana, increasing or generating the activity of a gene product plastidic with the activity of a “acetolactate synthase”, preferably being encoded by a gene comprising the nucleic acid sequence SEQ ID NO. 83629, preferably the coding region thereof, conferred the production of or the increase in leucine compared with the wild type control.

[42731] The nucleic acid sequence of B3770 from Escherichia coli, e.g. as shown in the respective line in column 5 of Table I, application no. 6, has been published in B. And the activity of the gene product thereof is the activity of branched-chain amino-acid aminotransferase.

[42732] Accordingly, in one embodiment, the process of the present invention for producing isoleucine in a non-human organism, like a microorganism or a plant or a part thereof, comprises increasing or generating the activity of a gene product with the activity of a gene product conferring the activity of “branched-chain amino-acid aminotransferase”, especially from Escherichia coli or its functional equivalent or its homolog, e.g. the increase of
[42733] (a) a gene product of a gene comprising the nucleic acid molecule as shown in the respective line in column 5 of Table I (whereby the respective line discloses in column 7 the fine chemical isoleucine), application no. 6, preferably the coding region thereof, or a homolog or a fragment thereof, and being depicted in the same respective line as said B3770, or a functional equivalent or a homolog thereof as shown in column 8 of Table I, application no. 6, preferably the coding region thereof, particularly a homolog or functional equivalent as shown in column 8 of Table I B, application no. 6, and being depicted in the same respective line as said B3770, and preferably the activity is increased plastidic, or
[42734] (b) a polypeptide comprising a polypeptide, a consensus sequence or at least a polypeptide motif as shown in the respective line in column 5 of Table II or in column 8 of Table IV, application no. 6, respectively, and being depicted in the same respective line as said B3770, or a functional equivalent or a homolog thereof as depicted in column 8 of Table II, application no. 6, preferably a homolog or functional equivalent as depicted in column 8 of Table II B, application no. 6, and being depicted in the same respective line as said B3770, and preferably the activity is increased plastidic, whereby the respective line discloses in column 7 the fine chemical isoleucine.

[42735] Accordingly, in one embodiment, the molecule which activity is to be increased in the process of the invention is the gene product with an activity as a “branched-chain amino-acid aminotransferase”, preferably it is the molecule of section (a) or (b) of this paragraph.

[42736] In particular, it was observed that in plants, especially in Arabidopsis thaliana, increasing or generating the activity of a gene product plastidic with the activity of a “branched-chain aminoacid aminotransferase”, preferably being encoded by a gene comprising the nucleic acid sequence SEQ ID NO. 105354, preferably the coding region thereof, conferred the production of or the increase in isoleucine compared with the wild type control.

[42737] The nucleic acid sequence of B3771 from Escherichia coli, e.g. as shown in the respective line in column 5 of Table I, application no. 6, has been published in B. And the activity of the gene product thereof is the activity of dihydroxyacid dehydratase.

[42738] Accordingly, in one embodiment, the process of the present invention for producing isoleucine in a non-human organism, like a microorganism or a plant or a part thereof, comprises increasing or generating the activity of a gene product with the activity of a gene product conferring the activity of “dihydroxyacid dehydratase”, especially from Escherichia coli or its functional equivalent or its homolog, e.g. the increase of
[42739] (a) a gene product of a gene comprising the nucleic acid molecule as shown in the respective line in column 5 of Table I (whereby the respective line discloses in column 7 the fine chemical isoleucine), application no. 6, preferably the coding region thereof, or a homolog or a fragment thereof, and being depicted in the same respective line as said B3771, or a functional equivalent or a homolog thereof as shown in column 8 of Table I, application no. 6, preferably the coding region thereof, particularly a homolog or functional equivalent as shown in column 8 of Table I B, application no. 6, and being depicted in the same respective line as said B3771, and preferably the activity is increased non-targeted, or
[42740] (b) a polypeptide comprising a polypeptide, a consensus sequence or at least a polypeptide motif as shown in the respective line in column 5 of Table II or in column 8 of Table IV, application no. 6, respectively, and being depicted in the same respective line as said B3771, or a functional equivalent or a homolog thereof as depicted in column 8 of Table II, application no. 6, preferably a homolog or functional equivalent as depicted in column 8 of Table II B, application no. 6, and being depicted in the same respective line as said B3771, and preferably the activity is increased non-targeted, whereby the respective line discloses in column 7 the fine chemical isoleucine.

[42741] Accordingly, in one embodiment, the molecule which activity is to be increased in the process of the invention is the gene product with an activity as a “dihydroxyacid dehydratase”, preferably it is the molecule of section (a) or (b) of this paragraph.

[42742] In particular, it was observed that in plants, especially in Arabidopsis thaliana, increasing or generating the activity of a gene product non-targeted with the activity of a “dihydroxyacid dehydratase”, preferably being encoded by a gene comprising the nucleic acid sequence SEQ ID NO. 10252, preferably the coding region thereof, conferred the production of or the increase in isoleucine compared with the wild type control.

[42743] The nucleic acid sequence of B3771 from Escherichia coli, e.g. as shown in the respective line in column 5 of Table I, application no. 6, has been published in B. And the activity of the gene product thereof is the activity of dihydroxyacid dehydratase.

[42744] Accordingly, in one embodiment, the process of the present invention for producing leucine in a non-human organism, like a microorganism or a plant or a part thereof, comprises increasing or generating the activity of a gene product with the activity of a gene product conferring the activity of “dihydroxyacid dehydratase”, especially from Escherichia coli or its functional equivalent or its homolog, e.g. the increase of
[42745] (a) a gene product of a gene comprising the nucleic acid molecule as shown in the respective line in column 5 of Table I (whereby the respective line discloses in column 7 the fine chemical leucine), application no. 6, preferably the coding region thereof, or a homolog or a fragment thereof, and being depicted in the same respective line as said B3771, or a functional equivalent or a homolog thereof as shown in column 8 of Table I, application no. 6, preferably the coding region thereof, particularly a homolog or functional equivalent as shown in column 8 of Table I B, application no. 6, and being depicted in the same respective line as said B3771, and preferably the activity is increased non-targeted, or
[42746] (b) a polypeptide comprising a polypeptide, a consensus sequence or at least a polypeptide motif as shown in the respective line in column 5 of Table II or in column 8 of Table IV, application no. 6, respectively, and being depicted in the same respective line as said B3771, or a functional equivalent or a homolog thereof as depicted in column 8 of Table II, application no. 6, preferably a homolog or functional equivalent as depicted in column 8 of Table II B, application no. 6, and being depicted in the same respective line as said B3771, and preferably the activity is increased non-targeted, whereby the respective line discloses in column 7 the fine chemical leucine.

[42747] Accordingly, in one embodiment, the molecule which activity is to be increased in the process of the invention is the gene product with an activity as a “dihydroxyacid dehydratase”, preferably it is the molecule of section (a) or (b) of this paragraph.

[42748] In particular, it was observed that in plants, especially in Arabidopsis thaliana, increasing or generating the activity of a gene product non-targeted with the activity of a “dihydroxyacid dehydratase”, preferably being encoded by a gene comprising the nucleic acid sequence SEQ ID NO. 10252, preferably the coding region thereof, conferred the production of or the increase in leucine compared with the wild type control.

[42749] The nucleic acid sequence of B3771 from Escherichia coli, e.g. as shown in the respective line in column 5 of Table I, application no. 6, has been published in B. And the activity of the gene product thereof is the activity of dihydroxyacid dehydratase.

[42750] Accordingly, in one embodiment, the process of the present invention for producing leucine in a non-human organism, like a microorganism or a plant or a part thereof, comprises increasing or generating the activity of a gene product with the activity of a gene product conferring the activity of “dihydroxyacid dehydratase”, especially from Escherichia coli or its functional equivalent or its homolog, e.g. the increase of
[42751] (a) a gene product of a gene comprising the nucleic acid molecule as shown in the respective line in column 5 of Table I (whereby the respective line discloses in column 7 the fine chemical leucine), application no. 6, preferably the coding region thereof, or a homolog or a fragment thereof, and being depicted in the same respective line as said B3771, or a functional equivalent or a homolog thereof as shown in column 8 of Table I, application no. 6, preferably the coding region thereof, particularly a homolog or functional equivalent as shown in column 8 of Table I B, application no. 6, and being depicted in the same respective line as said B3771, and preferably the activity is increased plastidic, or
[42752] (b) a polypeptide comprising a polypeptide, a consensus sequence or at least a polypeptide motif as shown in the respective line in column 5 of Table II or in column 8 of Table IV, application no. 6, respectively, and being depicted in the same respective line as said B3771, or a functional equivalent or a homolog thereof as depicted in column 8 of Table II, application no. 6, preferably a homolog or functional equivalent as depicted in column 8 of Table II B, application no. 6, and being depicted in the same respective line as said B3771, and preferably the activity is increased plastidic, whereby the respective line discloses in column 7 the fine chemical leucine.

[42753] Accordingly, in one embodiment, the molecule which activity is to be increased in the process of the invention is the gene product with an activity as a “dihydroxyacid dehydratase”, preferably it is the molecule of section (a) or (b) of this paragraph.

[42754] In particular, it was observed that in plants, especially in Arabidopsis thaliana, increasing or generating the activity of a gene product plastidic with the activity of a “dihydroxyacid dehydratase”, preferably being encoded by a gene comprising the nucleic acid sequence SEQ ID NO. 10252, preferably the coding region thereof, conferred the production of or the increase in leucine compared with the wild type control.

[42755] The nucleic acid sequence of B3771 from Escherichia coli, e.g. as shown in the respective line in column 5 of Table I, application no. 6, has been published in B. And the activity of the gene product thereof is the activity of dihydroxyacid dehydratase.

[42756] Accordingly, in one embodiment, the process of the present invention for producing valine in a non-human organism, like a microorganism or a plant or a part thereof, comprises increasing or generating the activity of a gene product with the activity of a gene product conferring the activity of “dihydroxyacid dehydratase”, especially from Escherichia coli or its functional equivalent or its homolog, e.g. the increase of
[42757] (a) a gene product of a gene comprising the nucleic acid molecule as shown in the respective line in column 5 of Table I (whereby the respective line discloses in column 7 the fine chemical valine), application no. 6, preferably the coding region thereof, or a homolog or a fragment thereof, and being depicted in the same respective line as said B3771, or a functional equivalent or a homolog thereof as shown in column 8 of Table I, application no. 6, preferably the coding region thereof, particularly a homolog or functional equivalent as shown in column 8 of Table I B, application no. 6, and being depicted in the same respective line as said B3771, and preferably the activity is increased non-targeted, or
[42758] (b) a polypeptide comprising a polypeptide, a consensus sequence or at least a polypeptide motif as shown in the respective line in column 5 of Table II or in column 8 of Table IV, application no. 6, respectively, and being depicted in the same respective line as said B3771, or a functional equivalent or a homolog thereof as depicted in column 8 of Table II, application no. 6, preferably a homolog or functional equivalent as depicted in column 8 of Table II B, application no. 6, and being depicted in the same respective line as said B3771, and preferably the activity is increased non-targeted, whereby the respective line discloses in column 7 the fine chemical valine.

[42759] Accordingly, in one embodiment, the molecule which activity is to be increased in the process of the invention is the gene product with an activity as a “dihydroxyacid dehydratase”, preferably it is the molecule of section (a) or (b) of this paragraph.

[42760] In particular, it was observed that in plants, especially in Arabidopsis thaliana, increasing or generating the activity of a gene product non-targeted with the activity of a “dihydroxyacid dehydratase”, preferably being encoded by a gene comprising the nucleic acid sequence SEQ ID NO. 10252, preferably the coding region thereof, conferred the production of or the increase in valine compared with the wild type control.

[42761] The nucleic acid sequence of B3774 from Escherichia coli, e.g. as shown in the respective line in column 5 of Table I, application no. 6, has been published in B. And the activity of the gene product thereof is the activity of ketol-acid reductoisomerase.

[42762] Accordingly, in one embodiment, the process of the present invention for producing isoleucine in a non-human organism, like a microorganism or a plant or a part thereof, comprises increasing or generating the activity of a gene product with the activity of a gene product conferring the activity of “ketol-acid reductoisomerase”, especially from Escherichia coli or its functional equivalent or its homolog, e.g. the increase of
[42763] (a) a gene product of a gene comprising the nucleic acid molecule as shown in the respective line in column 5 of Table I (whereby the respective line discloses in column 7 the fine chemical isoleucine), application no. 6, preferably the coding region thereof, or a homolog or a fragment thereof, and being depicted in the same respective line as said B3774, or a functional equivalent or a homolog thereof as shown in column 8 of Table I, application no. 6, preferably the coding region thereof, particularly a homolog or functional equivalent as shown in column 8 of Table I B, application no. 6, and being depicted in the same respective line as said B3774, and preferably the activity is increased non-targeted, or
[42764] (b) a polypeptide comprising a polypeptide, a consensus sequence or at least a polypeptide motif as shown in the respective line in column 5 of Table II or in column 8 of Table IV, application no. 6, respectively, and being depicted in the same respective line as said B3774, or a functional equivalent or a homolog thereof as depicted in column 8 of Table II, application no. 6, preferably a homolog or functional equivalent as depicted in column 8 of Table II B, application no. 6, and being depicted in the same respective line as said B3774, and preferably the activity is increased non-targeted, whereby the respective line discloses in column 7 the fine chemical isoleucine.

[42765] Accordingly, in one embodiment, the molecule which activity is to be increased in the process of the invention is the gene product with an activity as a “ketol-acid reductoisomerase”, preferably it is the molecule of section (a) or (b) of this paragraph.

[42766] In particular, it was observed that in plants, especially in Arabidopsis thaliana, increasing or generating the activity of a gene product non-targeted with the activity of a “ketol-acid reductoisomerase”, preferably being encoded by a gene comprising the nucleic acid sequence SEQ ID NO. 94386, preferably the coding region thereof, conferred the production of or the increase in isoleucine compared with the wild type control.

[42767] The nucleic acid sequence of B3774 from Escherichia coli, e.g. as shown in the respective line in column 5 of Table I, application no. 6, has been published in B. And the activity of the gene product thereof is the activity of ketol-acid reductoisomerase.

[42768] Accordingly, in one embodiment, the process of the present invention for producing leucine in a non-human organism, like a microorganism or a plant or a part thereof, comprises increasing or generating the activity of a gene product with the activity of a gene product conferring the activity of “ketol-acid reductoisomerase”, especially from Escherichia coli or its functional equivalent or its homolog, e.g. the increase of
[42769] (a) a gene product of a gene comprising the nucleic acid molecule as shown in the respective line in column 5 of Table I (whereby the respective line discloses in column 7 the fine chemical leucine), application no. 6, preferably the coding region thereof, or a homolog or a fragment thereof, and being depicted in the same respective line as said B3774, or a functional equivalent or a homolog thereof as shown in column 8 of Table I, application no. 6, preferably the coding region thereof, particularly a homolog or functional equivalent as shown in column 8 of Table I B, application no. 6, and being depicted in the same respective line as said B3774, and preferably the activity is increased plastidic, or
[42770] (b) a polypeptide comprising a polypeptide, a consensus sequence or at least a polypeptide motif as shown in the respective line in column 5 of Table II or in column 8 of Table IV, application no. 6, respectively, and being depicted in the same respective line as said B3774, or a functional equivalent or a homolog thereof as depicted in column 8 of Table II, application no. 6, preferably a homolog or functional equivalent as depicted in column 8 of Table II B, application no. 6, and being depicted in the same respective line as said B3774, and preferably the activity is increased plastidic, whereby the respective line discloses in column 7 the fine chemical leucine.

[42771] Accordingly, in one embodiment, the molecule which activity is to be increased in the process of the invention is the gene product with an activity as a “ketol-acid reductoisomerase”, preferably it is the molecule of section (a) or (b) of this paragraph.

[42772] In particular, it was observed that in plants, especially in Arabidopsis thaliana, increasing or generating the activity of a gene product plastidic with the activity of a “ketol-acid reductoisomerase”, preferably being encoded by a gene comprising the nucleic acid sequence SEQ ID NO. 94386, preferably the coding region thereof, conferred the production of or the increase in leucine compared with the wild type control.

[42773] The nucleic acid sequence of B3813 from Escherichia coli, e.g. as shown in the respective line in column 5 of Table I, application no. 6, has been published in B. And the activity of the gene product thereof is the activity of DNA helicase II.

[42774] Accordingly, in one embodiment, the process of the present invention for producing isoleucine in a non-human organism, like a microorganism or a plant or a part thereof, comprises increasing or generating the activity of a gene product with the activity of a gene product conferring the activity of “DNA helicase II”, especially from Escherichia coli or its functional equivalent or its homolog, e.g. the increase of
[42775] (a) a gene product of a gene comprising the nucleic acid molecule as shown in the respective line in column 5 of Table I (whereby the respective line discloses in column 7 the fine chemical isoleucine), application no. 6, preferably the coding region thereof, or a homolog or a fragment thereof, and being depicted in the same respective line as said B3813, or a functional equivalent or a homolog thereof as shown in column 8 of Table I, application no. 6, preferably the coding region thereof, particularly a homolog or functional equivalent as shown in column 8 of Table I B, application no. 6, and being depicted in the same respective line as said B3813, and preferably the activity is increased non-targeted, or
[42776] (b) a polypeptide comprising a polypeptide, a consensus sequence or at least a polypeptide motif as shown in the respective line in column 5 of Table II or in column 8 of Table IV, application no. 6, respectively, and being depicted in the same respective line as said B3813, or a functional equivalent or a homolog thereof as depicted in column 8 of Table II, application no. 6, preferably a homolog or functional equivalent as depicted in column 8 of Table II B, application no. 6, and being depicted in the same respective line as said B3813, and preferably the activity is increased non-targeted, whereby the respective line discloses in column 7 the fine chemical isoleucine.

[42777] Accordingly, in one embodiment, the molecule which activity is to be increased in the process of the invention is the gene product with an activity as a “DNA helicase II”, preferably it is the molecule of section (a) or (b) of this paragraph.

[42778] In particular, it was observed that in plants, especially in Arabidopsis thaliana, increasing or generating the activity of a gene product non-targeted with the activity of a “DNA helicase II”, preferably being encoded by a gene comprising the nucleic acid sequence SEQ ID NO. 43839, preferably the coding region thereof, conferred the production of or the increase in isoleucine compared with the wild type control.

[42779] The nucleic acid sequence of B3813 from Escherichia coli, e.g. as shown in the respective line in column 5 of Table I, application no. 6, has been published in B. And the activity of the gene product thereof is the activity of DNA helicase II.

[42780] Accordingly, in one embodiment, the process of the present invention for producing leucine in a non-human organism, like a microorganism or a plant or a part thereof, comprises increasing or generating the activity of a gene product with the activity of a gene product conferring the activity of “DNA helicase II”, especially from Escherichia coli or its functional equivalent or its homolog, e.g. the increase of
[42781] (a) a gene product of a gene comprising the nucleic acid molecule as shown in the respective line in column 5 of Table I (whereby the respective line discloses in column 7 the fine chemical leucine), application no. 6, preferably the coding region thereof, or a homolog or a fragment thereof, and being depicted in the same respective line as said B3813, or a functional equivalent or a homolog thereof as shown in column 8 of Table I, application no. 6, preferably the coding region thereof, particularly a homolog or functional equivalent as shown in column 8 of Table I B, application no. 6, and being depicted in the same respective line as said B3813, and preferably the activity is increased non-targeted, or
[42782] (b) a polypeptide comprising a polypeptide, a consensus sequence or at least a polypeptide motif as shown in the respective line in column 5 of Table II or in column 8 of Table IV, application no. 6, respectively, and being depicted in the same respective line as said B3813, or a functional equivalent or a homolog thereof as depicted in column 8 of Table II, application no. 6, preferably a homolog or functional equivalent as depicted in column 8 of Table II B, application no. 6, and being depicted in the same respective line as said B3813, and preferably the activity is increased non-targeted, whereby the respective line discloses in column 7 the fine chemical leucine.

[42783] Accordingly, in one embodiment, the molecule which activity is to be increased in the process of the invention is the gene product with an activity as a “DNA helicase II”, preferably it is the molecule of section (a) or (b) of this paragraph.

[42784] In particular, it was observed that in plants, especially in Arabidopsis thaliana, increasing or generating the activity of a gene product non-targeted with the activity of a “DNA helicase II”, preferably being encoded by a gene comprising the nucleic acid sequence SEQ ID NO. 43839, preferably the coding region thereof, conferred the production of or the increase in leucine compared with the wild type control.

[42785] The nucleic acid sequence of B3813 from Escherichia coli, e.g. as shown in the respective line in column 5 of Table I, application no. 6, has been published in B. And the activity of the gene product thereof is the activity of DNA helicase II.

[42786] Accordingly, in one embodiment, the process of the present invention for producing valine in a non-human organism, like a microorganism or a plant or a part thereof, comprises increasing or generating the activity of a gene product with the activity of a gene product conferring the activity of “DNA helicase II”, especially from Escherichia coli or its functional equivalent or its homolog, e.g. the increase of
[42787] (a) a gene product of a gene comprising the nucleic acid molecule as shown in the respective line in column 5 of Table I (whereby the respective line discloses in column 7 the fine chemical valine), application no. 6, preferably the coding region thereof, or a homolog or a fragment thereof, and being depicted in the same respective line as said B3813, or a functional equivalent or a homolog thereof as shown in column 8 of Table I, application no. 6, preferably the coding region thereof, particularly a homolog or functional equivalent as shown in column 8 of Table I B, application no. 6, and being depicted in the same respective line as said B3813, and preferably the activity is increased non-targeted, or
[42788] (b) a polypeptide comprising a polypeptide, a consensus sequence or at least a polypeptide motif as shown in the respective line in column 5 of Table II or in column 8 of Table IV, application no. 6, respectively, and being depicted in the same respective line as said B3813, or a functional equivalent or a homolog thereof as depicted in column 8 of Table II, application no. 6, preferably a homolog or functional equivalent as depicted in column 8 of Table II B, application no. 6, and being depicted in the same respective line as said B3813, and preferably the activity is increased non-targeted, whereby the respective line discloses in column 7 the fine chemical valine.

[42789] Accordingly, in one embodiment, the molecule which activity is to be increased in the process of the invention is the gene product with an activity as a “DNA helicase II”, preferably it is the molecule of section (a) or (b) of this paragraph.

[42790] In particular, it was observed that in plants, especially in Arabidopsis thaliana, increasing or generating the activity of a gene product non-targeted with the activity of a “DNA helicase II”, preferably being encoded by a gene comprising the nucleic acid sequence SEQ ID NO. 43839, preferably the coding region thereof, conferred the production of or the increase in valine compared with the wild type control.

[42791] The nucleic acid sequence of B3850 from Escherichia coli, e.g. as shown in the respective line in column 5 of Table I, application no. 6, has been published in B. And the activity of the gene product thereof is the activity of protoporphyrin oxidase.

[42792] Accordingly, in one embodiment, the process of the present invention for producing leucine in a non-human organism, like a microorganism or a plant or a part thereof, comprises increasing or generating the activity of a gene product with the activity of a gene product conferring the activity of “protoporphyrin oxidase”, especially from Escherichia coli or its functional equivalent or its homolog, e.g. the increase of
[42793] (a) a gene product of a gene comprising the nucleic acid molecule as shown in the respective line in column 5 of Table I (whereby the respective line discloses in column 7 the fine chemical leucine), application no. 6, preferably the coding region thereof, or a homolog or a fragment thereof, and being depicted in the same respective line as said B3850, or a functional equivalent or a homolog thereof as shown in column 8 of Table I, application no. 6, preferably the coding region thereof, particularly a homolog or functional equivalent as shown in column 8 of Table I B, application no. 6, and being depicted in the same respective line as said B3850, and preferably the activity is increased plastidic, or
[42794] (b) a polypeptide comprising a polypeptide, a consensus sequence or at least a polypeptide motif as shown in the respective line in column 5 of Table II or in column 8 of Table IV, application no. 6, respectively, and being depicted in the same respective line as said B3850, or a functional equivalent or a homolog thereof as depicted in column 8 of Table II, application no. 6, preferably a homolog or functional equivalent as depicted in column 8 of Table II B, application no. 6, and being depicted in the same respective line as said B3850, and preferably the activity is increased plastidic, whereby the respective line discloses in column 7 the fine chemical leucine.

[42795] Accordingly, in one embodiment, the molecule which activity is to be increased in the process of the invention is the gene product with an activity as a “protoporphyrin oxidase”, preferably it is the molecule of section (a) or (b) of this paragraph.

[42796] In particular, it was observed that in plants, especially in Arabidopsis thaliana, increasing or generating the activity of a gene product plastidic with the activity of a “protoporphyrin oxidase”, preferably being encoded by a gene comprising the nucleic acid sequence SEQ ID NO. 105602, preferably the coding region thereof, conferred the production of or the increase in leucine compared with the wild type control.

[42797] The nucleic acid sequence of B3908 from Escherichia coli, e.g. as shown in the respective line in column 5 of Table I, application no. 6, has been published in B. And the activity of the gene product thereof is the activity of superoxide dismutase.

[42798] Accordingly, in one embodiment, the process of the present invention for producing leucine in a non-human organism, like a microorganism or a plant or a part thereof, comprises increasing or generating the activity of a gene product with the activity of a gene product conferring the activity of “superoxide dismutase”, especially from Escherichia coli or its functional equivalent or its homolog, e.g. the increase of
[42799] (a) a gene product of a gene comprising the nucleic acid molecule as shown in the respective line in column 5 of Table I (whereby the respective line discloses in column 7 the fine chemical leucine), application no. 6, preferably the coding region thereof, or a homolog or a fragment thereof, and being depicted in the same respective line as said B3908, or a functional equivalent or a homolog thereof as shown in column 8 of Table I, application no. 6, preferably the coding region thereof, particularly a homolog or functional equivalent as shown in column 8 of Table I B, application no. 6, and being depicted in the same respective line as said B3908, and preferably the activity is increased plastidic, or
[42800] (b) a polypeptide comprising a polypeptide, a consensus sequence or at least a polypeptide motif as shown in the respective line in column 5 of Table II or in column 8 of Table IV, application no. 6, respectively, and being depicted in the same respective line as said B3908, or a functional equivalent or a homolog thereof as depicted in column 8 of Table II, application no. 6, preferably a homolog or functional equivalent as depicted in column 8 of Table II B, application no. 6, and being depicted in the same respective line as said B3908, and preferably the activity is increased plastidic, whereby the respective line discloses in column 7 the fine chemical leucine.

[42801] Accordingly, in one embodiment, the molecule which activity is to be increased in the process of the invention is the gene product with an activity as a “superoxide dismutase”, preferably it is the molecule of section (a) or (b) of this paragraph.

[42802] In particular, it was observed that in plants, especially in Arabidopsis thaliana, increasing or generating the activity of a gene product plastidic with the activity of a “superoxide dismutase”, preferably being encoded by a gene comprising the nucleic acid sequence SEQ ID NO. 105659, preferably the coding region thereof, conferred the production of or the increase in leucine compared with the wild type control.

[42803] The nucleic acid sequence of B3989 from Escherichia coli, e.g. as shown in the respective line in column 5 of Table I, application no. 6, has been published in B. And the activity of the gene product thereof is the activity of b3989-protein.

[42804] Accordingly, in one embodiment, the process of the present invention for producing isoleucine in a non-human organism, like a microorganism or a plant or a part thereof, comprises increasing or generating the activity of a gene product with the activity of a gene product conferring the activity of “b3989-protein”, especially from Escherichia coli or its functional equivalent or its homolog, e.g. the increase of
[42805] (a) a gene product of a gene comprising the nucleic acid molecule as shown in the respective line in column 5 of Table I (whereby the respective line discloses in column 7 the fine chemical isoleucine), application no. 6, preferably the coding region thereof, or a homolog or a fragment thereof, and being depicted in the same respective line as said B3989, or a functional equivalent or a homolog thereof as shown in column 8 of Table I, application no. 6, preferably the coding region thereof, particularly a homolog or functional equivalent as shown in column 8 of Table I B, application no. 6, and being depicted in the same respective line as said B3989, and preferably the activity is increased non-targeted, or
[42806] (b) a polypeptide comprising a polypeptide, a consensus sequence or at least a polypeptide motif as shown in the respective line in column 5 of Table II or in column 8 of Table IV, application no. 6, respectively, and being depicted in the same respective line as said B3989, or a functional equivalent or a homolog thereof as depicted in column 8 of Table II, application no. 6, preferably a homolog or functional equivalent as depicted in column 8 of Table II B, application no. 6, and being depicted in the same respective line as said B3989, and preferably the activity is increased non-targeted, whereby the respective line discloses in column 7 the fine chemical isoleucine.

[42807] Accordingly, in one embodiment, the molecule which activity is to be increased in the process of the invention is the gene product with an activity as a “b3989-protein”, preferably it is the molecule of section (a) or (b) of this paragraph.

[42808] In particular, it was observed that in plants, especially in Arabidopsis thaliana, increasing or generating the activity of a gene product non-targeted with the activity of a “b3989-protein”, preferably being encoded by a gene comprising the nucleic acid sequence SEQ ID NO. 44372, preferably the coding region thereof, conferred the production of or the increase in isoleucine compared with the wild type control.

[42809] The nucleic acid sequence of B3989 from Escherichia coli, e.g. as shown in the respective line in column 5 of Table I, application no. 6, has been published in B. And the activity of the gene product thereof is the activity of b3989-protein.

[42810] Accordingly, in one embodiment, the process of the present invention for producing leucine in a non-human organism, like a microorganism or a plant or a part thereof, comprises increasing or generating the activity of a gene product with the activity of a gene product conferring the activity of “b3989-protein”, especially from Escherichia coli or its functional equivalent or its homolog, e.g. the increase of
[42811] (a) a gene product of a gene comprising the nucleic acid molecule as shown in the respective line in column 5 of Table I (whereby the respective line discloses in column 7 the fine chemical leucine), application no. 6, preferably the coding region thereof, or a homolog or a fragment thereof, and being depicted in the same respective line as said B3989, or a functional equivalent or a homolog thereof as shown in column 8 of Table I, application no. 6, preferably the coding region thereof, particularly a homolog or functional equivalent as shown in column 8 of Table I B, application no. 6, and being depicted in the same respective line as said B3989, and preferably the activity is increased non-targeted, or
[42812] (b) a polypeptide comprising a polypeptide, a consensus sequence or at least a polypeptide motif as shown in the respective line in column 5 of Table II or in column 8 of Table IV, application no. 6, respectively, and being depicted in the same respective line as said B3989, or a functional equivalent or a homolog thereof as depicted in column 8 of Table II, application no. 6, preferably a homolog or functional equivalent as depicted in column 8 of Table II B, application no. 6, and being depicted in the same respective line as said B3989, and preferably the activity is increased non-targeted, whereby the respective line discloses in column 7 the fine chemical leucine.

[42813] Accordingly, in one embodiment, the molecule which activity is to be increased in the process of the invention is the gene product with an activity as a “b3989-protein”, preferably it is the molecule of section (a) or (b) of this paragraph.

[42814] In particular, it was observed that in plants, especially in Arabidopsis thaliana, increasing or generating the activity of a gene product non-targeted with the activity of a “b3989-protein”, preferably being encoded by a gene comprising the nucleic acid sequence SEQ ID NO. 44372, preferably the coding region thereof, conferred the production of or the increase in leucine compared with the wild type control.

[42815] The nucleic acid sequence of B3989 from Escherichia coli, e.g. as shown in the respective line in column 5 of Table I, application no. 6, has been published in B. And the activity of the gene product thereof is the activity of b3989-protein.

[42816] Accordingly, in one embodiment, the process of the present invention for producing valine in a non-human organism, like a microorganism or a plant or a part thereof, comprises increasing or generating the activity of a gene product with the activity of a gene product conferring the activity of “b3989-protein”, especially from Escherichia coli or its functional equivalent or its homolog, e.g. the increase of
[42817] (a) a gene product of a gene comprising the nucleic acid molecule as shown in the respective line in column 5 of Table I (whereby the respective line discloses in column 7 the fine chemical valine), application no. 6, preferably the coding region thereof, or a homolog or a fragment thereof, and being depicted in the same respective line as said B3989, or a functional equivalent or a homolog thereof as shown in column 8 of Table I, application no. 6, preferably the coding region thereof, particularly a homolog or functional equivalent as shown in column 8 of Table I B, application no. 6, and being depicted in the same respective line as said B3989, and preferably the activity is increased non-targeted, or
[42818] (b) a polypeptide comprising a polypeptide, a consensus sequence or at least a polypeptide motif as shown in the respective line in column 5 of Table II or in column 8 of Table IV, application no. 6, respectively, and being depicted in the same respective line as said B3989, or a functional equivalent or a homolog thereof as depicted in column 8 of Table II, application no. 6, preferably a homolog or functional equivalent as depicted in column 8 of Table II B, application no. 6, and being depicted in the same respective line as said B3989, and preferably the activity is increased non-targeted, whereby the respective line discloses in column 7 the fine chemical valine.

[42819] Accordingly, in one embodiment, the molecule which activity is to be increased in the process of the invention is the gene product with an activity as a “b3989-protein”, preferably it is the molecule of section (a) or (b) of this paragraph.

[42820] In particular, it was observed that in plants, especially in Arabidopsis thaliana, increasing or generating the activity of a gene product non-targeted with the activity of a “b3989-protein”, preferably being encoded by a gene comprising the nucleic acid sequence SEQ ID NO. 44372, preferably the coding region thereof, conferred the production of or the increase in valine compared with the wild type control.

[42821] The nucleic acid sequence of B4029 from Escherichia coli, e.g. as shown in the respective line in column 5 of Table I, application no. 6, has been published in B. And the activity of the gene product thereof is the activity of b4029-protein.

[42822] Accordingly, in one embodiment, the process of the present invention for producing isoleucine in a non-human organism, like a microorganism or a plant or a part thereof, comprises increasing or generating the activity of a gene product with the activity of a gene product conferring the activity of “b4029-protein”, especially from Escherichia coli or its functional equivalent or its homolog, e.g. the increase of
[42823] (a) a gene product of a gene comprising the nucleic acid molecule as shown in the respective line in column 5 of Table I (whereby the respective line discloses in column 7 the fine chemical isoleucine), application no. 6, preferably the coding region thereof, or a homolog or a fragment thereof, and being depicted in the same respective line as said B4029, or a functional equivalent or a homolog thereof as shown in column 8 of Table I, application no. 6, preferably the coding region thereof, particularly a homolog or functional equivalent as shown in column 8 of Table I B, application no. 6, and being depicted in the same respective line as said B4029, and preferably the activity is increased non-targeted, or
[42824] (b) a polypeptide comprising a polypeptide, a consensus sequence or at least a polypeptide motif as shown in the respective line in column 5 of Table II or in column 8 of Table IV, application no. 6, respectively, and being depicted in the same respective line as said B4029, or a functional equivalent or a homolog thereof as depicted in column 8 of Table II, application no. 6, preferably a homolog or functional equivalent as depicted in column 8 of Table II B, application no. 6, and being depicted in the same respective line as said B4029, and preferably the activity is increased non-targeted, whereby the respective line discloses in column 7 the fine chemical isoleucine.

[42825] Accordingly, in one embodiment, the molecule which activity is to be increased in the process of the invention is the gene product with an activity as a “b4029-protein”, preferably it is the molecule of section (a) or (b) of this paragraph.

[42826] In particular, it was observed that in plants, especially in Arabidopsis thaliana, increasing or generating the activity of a gene product non-targeted with the activity of a “b4029-protein”, preferably being encoded by a gene comprising the nucleic acid sequence SEQ ID NO. 10740, preferably the coding region thereof, conferred the production of or the increase in isoleucine compared with the wild type control.

[42827] The nucleic acid sequence of B4029 from Escherichia coli, e.g. as shown in the respective line in column 5 of Table I, application no. 6, has been published in B. And the activity of the gene product thereof is the activity of b4029-protein.

[42828] Accordingly, in one embodiment, the process of the present invention for producing leucine in a non-human organism, like a microorganism or a plant or a part thereof, comprises increasing or generating the activity of a gene product with the activity of a gene product conferring the activity of “b4029-protein”, especially from Escherichia coli or its functional equivalent or its homolog, e.g. the increase of
[42829] (a) a gene product of a gene comprising the nucleic acid molecule as shown in the respective line in column 5 of Table I (whereby the respective line discloses in column 7 the fine chemical leucine), application no. 6, preferably the coding region thereof, or a homolog or a fragment thereof, and being depicted in the same respective line as said B4029, or a functional equivalent or a homolog thereof as shown in column 8 of Table I, application no. 6, preferably the coding region thereof, particularly a homolog or functional equivalent as shown in column 8 of Table I B, application no. 6, and being depicted in the same respective line as said B4029, and preferably the activity is increased non-targeted, or
[42830] (b) a polypeptide comprising a polypeptide, a consensus sequence or at least a polypeptide motif as shown in the respective line in column 5 of Table II or in column 8 of Table IV, application no. 6, respectively, and being depicted in the same respective line as said B4029, or a functional equivalent or a homolog thereof as depicted in column 8 of Table II, application no. 6, preferably a homolog or functional equivalent as depicted in column 8 of Table II B, application no. 6, and being depicted in the same respective line as said B4029, and preferably the activity is increased non-targeted, whereby the respective line discloses in column 7 the fine chemical leucine.

[42831] Accordingly, in one embodiment, the molecule which activity is to be increased in the process of the invention is the gene product with an activity as a “b4029-protein”, preferably it is the molecule of section (a) or (b) of this paragraph.

[42832] In particular, it was observed that in plants, especially in Arabidopsis thaliana, increasing or generating the activity of a gene product non-targeted with the activity of a “b4029-protein”, preferably being encoded by a gene comprising the nucleic acid sequence SEQ ID NO. 10740, preferably the coding region thereof, conferred the production of or the increase in leucine compared with the wild type control.

[42833] The nucleic acid sequence of B4029 from Escherichia coli, e.g. as shown in the respective line in column 5 of Table I, application no. 6, has been published in B. And the activity of the gene product thereof is the activity of b4029-protein.

[42834] Accordingly, in one embodiment, the process of the present invention for producing valine in a non-human organism, like a microorganism or a plant or a part thereof, comprises increasing or generating the activity of a gene product with the activity of a gene product conferring the activity of “b4029-protein”, especially from Escherichia coli or its functional equivalent or its homolog, e.g. the increase of
[42835] (a) a gene product of a gene comprising the nucleic acid molecule as shown in the respective line in column 5 of Table I (whereby the respective line discloses in column 7 the fine chemical valine), application no. 6, preferably the coding region thereof, or a homolog or a fragment thereof, and being depicted in the same respective line as said B4029, or a functional equivalent or a homolog thereof as shown in column 8 of Table I, application no. 6, preferably the coding region thereof, particularly a homolog or functional equivalent as shown in column 8 of Table I B, application no. 6, and being depicted in the same respective line as said B4029, and preferably the activity is increased non-targeted, or
[42836] (b) a polypeptide comprising a polypeptide, a consensus sequence or at least a polypeptide motif as shown in the respective line in column 5 of Table II or in column 8 of Table IV, application no. 6, respectively, and being depicted in the same respective line as said B4029, or a functional equivalent or a homolog thereof as depicted in column 8 of Table II, application no. 6, preferably a homolog or functional equivalent as depicted in column 8 of Table II B, application no. 6, and being depicted in the same respective line as said B4029, and preferably the activity is increased non-targeted, whereby the respective line discloses in column 7 the fine chemical valine.

[42837] Accordingly, in one embodiment, the molecule which activity is to be increased in the process of the invention is the gene product with an activity as a “b4029-protein”, preferably it is the molecule of section (a) or (b) of this paragraph.

[42838] In particular, it was observed that in plants, especially in Arabidopsis thaliana, increasing or generating the activity of a gene product non-targeted with the activity of a “b4029-protein”, preferably being encoded by a gene comprising the nucleic acid sequence SEQ ID NO. 10740, preferably the coding region thereof, conferred the production of or the increase in valine compared with the wild type control.

[42839] The nucleic acid sequence of B4050 from Escherichia coli, e.g. as shown in the respective line in column 5 of Table I, application no. 6, has been published in B. And the activity of the gene product thereof is the activity of b4050-protein.

[42840] Accordingly, in one embodiment, the process of the present invention for producing isoleucine in a non-human organism, like a microorganism or a plant or a part thereof, comprises increasing or generating the activity of a gene product with the activity of a gene product conferring the activity of “b4050-protein”, especially from Escherichia coli or its functional equivalent or its homolog, e.g. the increase of
[42841] (a) a gene product of a gene comprising the nucleic acid molecule as shown in the respective line in column 5 of Table I (whereby the respective line discloses in column 7 the fine chemical isoleucine), application no. 6, preferably the coding region thereof, or a homolog or a fragment thereof, and being depicted in the same respective line as said B4050, or a functional equivalent or a homolog thereof as shown in column 8 of Table I, application no. 6, preferably the coding region thereof, particularly a homolog or functional equivalent as shown in column 8 of Table I B, application no. 6, and being depicted in the same respective line as said B4050, and preferably the activity is increased non-targeted, or
[42842] (b) a polypeptide comprising a polypeptide, a consensus sequence or at least a polypeptide motif as shown in the respective line in column 5 of Table II or in column 8 of Table IV, application no. 6, respectively, and being depicted in the same respective line as said B4050, or a functional equivalent or a homolog thereof as depicted in column 8 of Table II, application no. 6, preferably a homolog or functional equivalent as depicted in column 8 of Table II B, application no. 6, and being depicted in the same respective line as said B4050, and preferably the activity is increased non-targeted, whereby the respective line discloses in column 7 the fine chemical isoleucine.

[42843] Accordingly, in one embodiment, the molecule which activity is to be increased in the process of the invention is the gene product with an activity as a “b4050-protein”, preferably it is the molecule of section (a) or (b) of this paragraph.

[42844] In particular, it was observed that in plants, especially in Arabidopsis thaliana, increasing or generating the activity of a gene product non-targeted with the activity of a “b4050-protein”, preferably being encoded by a gene comprising the nucleic acid sequence SEQ ID NO. 106532, preferably the coding region thereof, conferred the production of or the increase in isoleucine compared with the wild type control.

[42845] The nucleic acid sequence of B4056 from Escherichia coli, e.g. as shown in the respective line in column 5 of Table I, application no. 6, has been published in B. And the activity of the gene product thereof is the activity of b4056-protein.

[42846] Accordingly, in one embodiment, the process of the present invention for producing isoleucine in a non-human organism, like a microorganism or a plant or a part thereof, comprises increasing or generating the activity of a gene product with the activity of a gene product conferring the activity of “b4056-protein”, especially from Escherichia coli or its functional equivalent or its homolog, e.g. the increase of
[42847] (a) a gene product of a gene comprising the nucleic acid molecule as shown in the respective line in column 5 of Table I (whereby the respective line discloses in column 7 the fine chemical isoleucine), application no. 6, preferably the coding region thereof, or a homolog or a fragment thereof, and being depicted in the same respective line as said B4056, or a functional equivalent or a homolog thereof as shown in column 8 of Table I, application no. 6, preferably the coding region thereof, particularly a homolog or functional equivalent as shown in column 8 of Table I B, application no. 6, and being depicted in the same respective line as said B4056, and preferably the activity is increased non-targeted, or
[42848] (b) a polypeptide comprising a polypeptide, a consensus sequence or at least a polypeptide motif as shown in the respective line in column 5 of Table II or in column 8 of Table IV, application no. 6, respectively, and being depicted in the same respective line as said B4056, or a functional equivalent or a homolog thereof as depicted in column 8 of Table II, application no. 6, preferably a homolog or functional equivalent as depicted in column 8 of Table II B, application no. 6, and being depicted in the same respective line as said B4056, and preferably the activity is increased non-targeted, whereby the respective line discloses in column 7 the fine chemical isoleucine.

[42849] Accordingly, in one embodiment, the molecule which activity is to be increased in the process of the invention is the gene product with an activity as a “b4056-protein”, preferably it is the molecule of section (a) or (b) of this paragraph.

[42850] In particular, it was observed that in plants, especially in Arabidopsis thaliana, increasing or generating the activity of a gene product non-targeted with the activity of a “b4056-protein”, preferably being encoded by a gene comprising the nucleic acid sequence SEQ ID NO. 94542, preferably the coding region thereof, conferred the production of or the increase in isoleucine compared with the wild type control.

[42851] The nucleic acid sequence of B4056 from Escherichia coli, e.g. as shown in the respective line in column 5 of Table I, application no. 6, has been published in B. And the activity of the gene product thereof is the activity of b4056-protein.

[42852] Accordingly, in one embodiment, the process of the present invention for producing leucine in a non-human organism, like a microorganism or a plant or a part thereof, comprises increasing or generating the activity of a gene product with the activity of a gene product conferring the activity of “b4056-protein”, especially from Escherichia coli or its functional equivalent or its homolog, e.g. the increase of
[42853] (a) a gene product of a gene comprising the nucleic acid molecule as shown in the respective line in column 5 of Table I (whereby the respective line discloses in column 7 the fine chemical leucine), application no. 6, preferably the coding region thereof, or a homolog or a fragment thereof, and being depicted in the same respective line as said B4056, or a functional equivalent or a homolog thereof as shown in column 8 of Table I, application no. 6, preferably the coding region thereof, particularly a homolog or functional equivalent as shown in column 8 of Table I B, application no. 6, and being depicted in the same respective line as said B4056, and preferably the activity is increased non-targeted, or
[42854] (b) a polypeptide comprising a polypeptide, a consensus sequence or at least a polypeptide motif as shown in the respective line in column 5 of Table II or in column 8 of Table IV, application no. 6, respectively, and being depicted in the same respective line as said B4056, or a functional equivalent or a homolog thereof as depicted in column 8 of Table II, application no. 6, preferably a homolog or functional equivalent as depicted in column 8 of Table II B, application no. 6, and being depicted in the same respective line as said B4056, and preferably the activity is increased non-targeted, whereby the respective line discloses in column 7 the fine chemical leucine.

[42855] Accordingly, in one embodiment, the molecule which activity is to be increased in the process of the invention is the gene product with an activity as a “b4056-protein”, preferably it is the molecule of section (a) or (b) of this paragraph.

[42856] In particular, it was observed that in plants, especially in Arabidopsis thaliana, increasing or generating the activity of a gene product non-targeted with the activity of a “b4056-protein”, preferably being encoded by a gene comprising the nucleic acid sequence SEQ ID NO. 94542, preferably the coding region thereof, conferred the production of or the increase in leucine compared with the wild type control.

[42857] The nucleic acid sequence of B4256 from Escherichia coli, e.g. as shown in the respective line in column 5 of Table I, application no. 6, has been published in B. And the activity of the gene product thereof is the activity of acetyltransferase.

[42858] Accordingly, in one embodiment, the process of the present invention for producing isoleucine in a non-human organism, like a microorganism or a plant or a part thereof, comprises increasing or generating the activity of a gene product with the activity of a gene product conferring the activity of “acetyltransferase”, especially from Escherichia coli or its functional equivalent or its homolog, e.g. the increase of
[42859] (a) a gene product of a gene comprising the nucleic acid molecule as shown in the respective line in column 5 of Table I (whereby the respective line discloses in column 7 the fine chemical isoleucine), application no. 6, preferably the coding region thereof, or a homolog or a fragment thereof, and being depicted in the same respective line as said B4256, or a functional equivalent or a homolog thereof as shown in column 8 of Table I, application no. 6, preferably the coding region thereof, particularly a homolog or functional equivalent as shown in column 8 of Table I B, application no. 6, and being depicted in the same respective line as said B4256, and preferably the activity is increased non-targeted, or
[42860] (b) a polypeptide comprising a polypeptide, a consensus sequence or at least a polypeptide motif as shown in the respective line in column 5 of Table II or in column 8 of Table IV, application no. 6, respectively, and being depicted in the same respective line as said B4256, or a functional equivalent or a homolog thereof as depicted in column 8 of Table II, application no. 6, preferably a homolog or functional equivalent as depicted in column 8 of Table II B, application no. 6, and being depicted in the same respective line as said B4256, and preferably the activity is increased non-targeted, whereby the respective line discloses in column 7 the fine chemical isoleucine.

[42861] Accordingly, in one embodiment, the molecule which activity is to be increased in the process of the invention is the gene product with an activity as a “acetyltransferase”, preferably it is the molecule of section (a) or (b) of this paragraph.

[42862] In particular, it was observed that in plants, especially in Arabidopsis thaliana, increasing or generating the activity of a gene product non-targeted with the activity of a “acetyltransferase”, preferably being encoded by a gene comprising the nucleic acid sequence SEQ ID NO. 45321, preferably the coding region thereof, conferred the production of or the increase in isoleucine compared with the wild type control.

[42863] The nucleic acid sequence of B4256 from Escherichia coli, e.g. as shown in the respective line in column 5 of Table I, application no. 6, has been published in B. And the activity of the gene product thereof is the activity of acetyltransferase.

[42864] Accordingly, in one embodiment, the process of the present invention for producing leucine in a non-human organism, like a microorganism or a plant or a part thereof, comprises increasing or generating the activity of a gene product with the activity of a gene product conferring the activity of “acetyltransferase”, especially from Escherichia coli or its functional equivalent or its homolog, e.g. the increase of
[42865] (a) a gene product of a gene comprising the nucleic acid molecule as shown in the respective line in column 5 of Table I (whereby the respective line discloses in column 7 the fine chemical leucine), application no. 6, preferably the coding region thereof, or a homolog or a fragment thereof, and being depicted in the same respective line as said B4256, or a functional equivalent or a homolog thereof as shown in column 8 of Table I, application no. 6, preferably the coding region thereof, particularly a homolog or functional equivalent as shown in column 8 of Table I B, application no. 6, and being depicted in the same respective line as said B4256, and preferably the activity is increased non-targeted, or
[42866] (b) a polypeptide comprising a polypeptide, a consensus sequence or at least a polypeptide motif as shown in the respective line in column 5 of Table II or in column 8 of Table IV, application no. 6, respectively, and being depicted in the same respective line as said B4256, or a functional equivalent or a homolog thereof as depicted in column 8 of Table II, application no. 6, preferably a homolog or functional equivalent as depicted in column 8 of Table II B, application no. 6, and being depicted in the same respective line as said B4256, and preferably the activity is increased non-targeted, whereby the respective line discloses in column 7 the fine chemical leucine.

[42867] Accordingly, in one embodiment, the molecule which activity is to be increased in the process of the invention is the gene product with an activity as a “acetyltransferase”, preferably it is the molecule of section (a) or (b) of this paragraph.

[42868] In particular, it was observed that in plants, especially in Arabidopsis thaliana, increasing or generating the activity of a gene product non-targeted with the activity of a “acetyltransferase”, preferably being encoded by a gene comprising the nucleic acid sequence SEQ ID NO. 45321, preferably the coding region thereof, conferred the production of or the increase in leucine compared with the wild type control.

[42869] The nucleic acid sequence of B4256 from Escherichia coli, e.g. as shown in the respective line in column 5 of Table I, application no. 6, has been published in B. And the activity of the gene product thereof is the activity of acetyltransferase.

[42870] Accordingly, in one embodiment, the process of the present invention for producing valine in a non-human organism, like a microorganism or a plant or a part thereof, comprises increasing or generating the activity of a gene product with the activity of a gene product conferring the activity of “acetyltransferase”, especially from Escherichia coli or its functional equivalent or its homolog, e.g. the increase of
[42871] (a) a gene product of a gene comprising the nucleic acid molecule as shown in the respective line in column 5 of Table I (whereby the respective line discloses in column 7 the fine chemical valine), application no. 6, preferably the coding region thereof, or a homolog or a fragment thereof, and being depicted in the same respective line as said B4256, or a functional equivalent or a homolog thereof as shown in column 8 of Table I, application no. 6, preferably the coding region thereof, particularly a homolog or functional equivalent as shown in column 8 of Table I B, application no. 6, and being depicted in the same respective line as said B4256, and preferably the activity is increased non-targeted, or
[42872] (b) a polypeptide comprising a polypeptide, a consensus sequence or at least a polypeptide motif as shown in the respective line in column 5 of Table II or in column 8 of Table IV, application no. 6, respectively, and being depicted in the same respective line as said B4256, or a functional equivalent or a homolog thereof as depicted in column 8 of Table II, application no. 6, preferably a homolog or functional equivalent as depicted in column 8 of Table II B, application no. 6, and being depicted in the same respective line as said B4256, and preferably the activity is increased non-targeted, whereby the respective line discloses in column 7 the fine chemical valine.

[42873] Accordingly, in one embodiment, the molecule which activity is to be increased in the process of the invention is the gene product with an activity as a “acetyltransferase”, preferably it is the molecule of section (a) or (b) of this paragraph.

[42874] In particular, it was observed that in plants, especially in Arabidopsis thaliana, increasing or generating the activity of a gene product non-targeted with the activity of a “acetyltransferase”, preferably being encoded by a gene comprising the nucleic acid sequence SEQ ID NO. 45321, preferably the coding region thereof, conferred the production of or the increase in valine compared with the wild type control.

[42875] The nucleic acid sequence of B4263 from Escherichia coli, e.g. as shown in the respective line in column 5 of Table I, application no. 6, has been published in B. And the activity of the gene product thereof is the activity of b4263-protein.

[42876] Accordingly, in one embodiment, the process of the present invention for producing valine in a non-human organism, like a microorganism or a plant or a part thereof, comprises increasing or generating the activity of a gene product with the activity of a gene product conferring the activity of “b4263-protein”, especially from Escherichia coli or its functional equivalent or its homolog, e.g. the increase of
[42877] (a) a gene product of a gene comprising the nucleic acid molecule as shown in the respective line in column 5 of Table I (whereby the respective line discloses in column 7 the fine chemical valine), application no. 6, preferably the coding region thereof, or a homolog or a fragment thereof, and being depicted in the same respective line as said B4263, or a functional equivalent or a homolog thereof as shown in column 8 of Table I, application no. 6, preferably the coding region thereof, particularly a homolog or functional equivalent as shown in column 8 of Table I B, application no. 6, and being depicted in the same respective line as said B4263, and preferably the activity is increased plastidic, or
[42878] (b) a polypeptide comprising a polypeptide, a consensus sequence or at least a polypeptide motif as shown in the respective line in column 5 of Table II or in column 8 of Table IV, application no. 6, respectively, and being depicted in the same respective line as said B4263, or a functional equivalent or a homolog thereof as depicted in column 8 of Table II, application no. 6, preferably a homolog or functional equivalent as depicted in column 8 of Table II B, application no. 6, and being depicted in the same respective line as said B4263, and preferably the activity is increased plastidic, whereby the respective line discloses in column 7 the fine chemical valine.

[42879] Accordingly, in one embodiment, the molecule which activity is to be increased in the process of the invention is the gene product with an activity as a “b4263-protein”, preferably it is the molecule of section (a) or (b) of this paragraph.

[42880] In particular, it was observed that in plants, especially in Arabidopsis thaliana, increasing or generating the activity of a gene product plastidic with the activity of a “b4263-protein”, preferably being encoded by a gene comprising the nucleic acid sequence SEQ ID NO. 106538, preferably the coding region thereof, conferred the production of or the increase in valine compared with the wild type control.

[42881] The nucleic acid sequence of B4321 from Escherichia coli, e.g. as shown in the respective line in column 5 of Table I, application no. 6, has been published in B. And the activity of the gene product thereof is the activity of gluconate transport system permease 3.

[42882] Accordingly, in one embodiment, the process of the present invention for producing isoleucine in a non-human organism, like a microorganism or a plant or a part thereof, comprises increasing or generating the activity of a gene product with the activity of a gene product conferring the activity of “gluconate transport system permease 3”, especially from Escherichia coli or its functional equivalent or its homolog, e.g. the increase of
[42883] (a) a gene product of a gene comprising the nucleic acid molecule as shown in the respective line in column 5 of Table I (whereby the respective line discloses in column 7 the fine chemical isoleucine), application no. 6, preferably the coding region thereof, or a homolog or a fragment thereof, and being depicted in the same respective line as said B4321, or a functional equivalent or a homolog thereof as shown in column 8 of Table I, application no. 6, preferably the coding region thereof, particularly a homolog or functional equivalent as shown in column 8 of Table I B, application no. 6, and being depicted in the same respective line as said B4321, and preferably the activity is increased non-targeted, or
[42884] (b) a polypeptide comprising a polypeptide, a consensus sequence or at least a polypeptide motif as shown in the respective line in column 5 of Table II or in column 8 of Table IV, application no. 6, respectively, and being depicted in the same respective line as said B4321, or a functional equivalent or a homolog thereof as depicted in column 8 of Table II, application no. 6, preferably a homolog or functional equivalent as depicted in column 8 of Table II B, application no. 6, and being depicted in the same respective line as said B4321, and preferably the activity is increased non-targeted, whereby the respective line discloses in column 7 the fine chemical isoleucine.

[42885] Accordingly, in one embodiment, the molecule which activity is to be increased in the process of the invention is the gene product with an activity as a “gluconate transport system permease 3”, preferably it is the molecule of section (a) or (b) of this paragraph.

[42886] In particular, it was observed that in plants, especially in Arabidopsis thaliana, increasing or generating the activity of a gene product non-targeted with the activity of a “gluconate transport system permease 3”, preferably being encoded by a gene comprising the nucleic acid sequence SEQ ID NO. 45394, preferably the coding region thereof, conferred the production of or the increase in isoleucine compared with the wild type control.

[42887] The nucleic acid sequence of B4321 from Escherichia coli, e.g. as shown in the respective line in column 5 of Table I, application no. 6, has been published in B. And the activity of the gene product thereof is the activity of gluconate transport system permease 3.

[42888] Accordingly, in one embodiment, the process of the present invention for producing leucine in a non-human organism, like a microorganism or a plant or a part thereof, comprises increasing or generating the activity of a gene product with the activity of a gene product conferring the activity of “gluconate transport system permease 3”, especially from Escherichia coli or its functional equivalent or its homolog, e.g. the increase of
[42889] (a) a gene product of a gene comprising the nucleic acid molecule as shown in the respective line in column 5 of Table I (whereby the respective line discloses in column 7 the fine chemical leucine), application no. 6, preferably the coding region thereof, or a homolog or a fragment thereof, and being depicted in the same respective line as said B4321, or a functional equivalent or a homolog thereof as shown in column 8 of Table I, application no. 6, preferably the coding region thereof, particularly a homolog or functional equivalent as shown in column 8 of Table I B, application no. 6, and being depicted in the same respective line as said B4321, and preferably the activity is increased non-targeted, or
[42890] (b) a polypeptide comprising a polypeptide, a consensus sequence or at least a polypeptide motif as shown in the respective line in column 5 of Table II or in column 8 of Table IV, application no. 6, respectively, and being depicted in the same respective line as said B4321, or a functional equivalent or a homolog thereof as depicted in column 8 of Table II, application no. 6, preferably a homolog or functional equivalent as depicted in column 8 of Table II B, application no. 6, and being depicted in the same respective line as said B4321, and preferably the activity is increased non-targeted, whereby the respective line discloses in column 7 the fine chemical leucine.

[42891] Accordingly, in one embodiment, the molecule which activity is to be increased in the process of the invention is the gene product with an activity as a “gluconate transport system permease 3”, preferably it is the molecule of section (a) or (b) of this paragraph.

[42892] In particular, it was observed that in plants, especially in Arabidopsis thaliana, increasing or generating the activity of a gene product non-targeted with the activity of a “gluconate transport system permease 3”, preferably being encoded by a gene comprising the nucleic acid sequence SEQ ID NO. 45394, preferably the coding region thereof, conferred the production of or the increase in leucine compared with the wild type control.

[42893] The nucleic acid sequence of B4321 from Escherichia coli, e.g. as shown in the respective line in column 5 of Table I, application no. 6, has been published in B. And the activity of the gene product thereof is the activity of gluconate transport system permease 3.

[42894] Accordingly, in one embodiment, the process of the present invention for producing valine in a non-human organism, like a microorganism or a plant or a part thereof, comprises increasing or generating the activity of a gene product with the activity of a gene product conferring the activity of “gluconate transport system permease 3”, especially from Escherichia coli or its functional equivalent or its homolog, e.g. the increase of
[42895] (a) a gene product of a gene comprising the nucleic acid molecule as shown in the respective line in column 5 of Table I (whereby the respective line discloses in column 7 the fine chemical valine), application no. 6, preferably the coding region thereof, or a homolog or a fragment thereof, and being depicted in the same respective line as said B4321, or a functional equivalent or a homolog thereof as shown in column 8 of Table I, application no. 6, preferably the coding region thereof, particularly a homolog or functional equivalent as shown in column 8 of Table I B, application no. 6, and being depicted in the same respective line as said B4321, and preferably the activity is increased non-targeted, or
[42896] (b) a polypeptide comprising a polypeptide, a consensus sequence or at least a polypeptide motif as shown in the respective line in column 5 of Table II or in column 8 of Table IV, application no. 6, respectively, and being depicted in the same respective line as said B4321, or a functional equivalent or a homolog thereof as depicted in column 8 of Table II, application no. 6, preferably a homolog or functional equivalent as depicted in column 8 of Table II B, application no. 6, and being depicted in the same respective line as said B4321, and preferably the activity is increased non-targeted, whereby the respective line discloses in column 7 the fine chemical valine.

[42897] Accordingly, in one embodiment, the molecule which activity is to be increased in the process of the invention is the gene product with an activity as a “gluconate transport system permease 3”, preferably it is the molecule of section (a) or (b) of this paragraph.

[42898] In particular, it was observed that in plants, especially in Arabidopsis thaliana, increasing or generating the activity of a gene product non-targeted with the activity of a “gluconate transport system permease 3”, preferably being encoded by a gene comprising the nucleic acid sequence SEQ ID NO. 45394, preferably the coding region thereof, conferred the production of or the increase in valine compared with the wild type control.

[42899] The nucleic acid sequence of B4384 from Escherichia coli, e.g. as shown in the respective line in column 5 of Table I, application no. 6, has been published in B. And the activity of the gene product thereof is the activity of purine-nucleoside phosphorylase.

[42900] Accordingly, in one embodiment, the process of the present invention for producing isoleucine in a non-human organism, like a microorganism or a plant or a part thereof, comprises increasing or generating the activity of a gene product with the activity of a gene product conferring the activity of “purine-nucleoside phosphorylase”, especially from Escherichia coli or its functional equivalent or its homolog, e.g. the increase of
[42901] (a) a gene product of a gene comprising the nucleic acid molecule as shown in the respective line in column 5 of Table I (whereby the respective line discloses in column 7 the fine chemical isoleucine), application no. 6, preferably the coding region thereof, or a homolog or a fragment thereof, and being depicted in the same respective line as said B4384, or a functional equivalent or a homolog thereof as shown in column 8 of Table I, application no. 6, preferably the coding region thereof, particularly a homolog or functional equivalent as shown in column 8 of Table I B, application no. 6, and being depicted in the same respective line as said B4384, and preferably the activity is increased non-targeted, or
[42902] (b) a polypeptide comprising a polypeptide, a consensus sequence or at least a polypeptide motif as shown in the respective line in column 5 of Table II or in column 8 of Table IV, application no. 6, respectively, and being depicted in the same respective line as said B4384, or a functional equivalent or a homolog thereof as depicted in column 8 of Table II, application no. 6, preferably a homolog or functional equivalent as depicted in column 8 of Table II B, application no. 6, and being depicted in the same respective line as said B4384, and preferably the activity is increased non-targeted, whereby the respective line discloses in column 7 the fine chemical isoleucine.

[42903] Accordingly, in one embodiment, the molecule which activity is to be increased in the process of the invention is the gene product with an activity as a “purine-nucleoside phosphorylase”, preferably it is the molecule of section (a) or (b) of this paragraph.

[42904] In particular, it was observed that in plants, especially in Arabidopsis thaliana, increasing or generating the activity of a gene product non-targeted with the activity of a “purine-nucleoside phosphorylase”, preferably being encoded by a gene comprising the nucleic acid sequence SEQ ID NO. 45556, preferably the coding region thereof, conferred the production of or the increase in isoleucine compared with the wild type control.

[42905] The nucleic acid sequence of C_pp004096192r from Physcomitrella patens, e.g. as shown in the respective line in column 5 of Table I, application no. 6, is unpublished. And the activity of the gene product thereof is the activity of thioredoxin.

[42906] Accordingly, in one embodiment, the process of the present invention for producing isoleucine in a non-human organism, like a microorganism or a plant or a part thereof, comprises increasing or generating the activity of a gene product with the activity of a gene product conferring the activity of “thioredoxin”, especially from Physcomitrella patens or its functional equivalent or its homolog, e.g. the increase of
[42907] (a) a gene product of a gene comprising the nucleic acid molecule as shown in the respective line in column 5 of Table I (whereby the respective line discloses in column 7 the fine chemical isoleucine), application no. 6, preferably the coding region thereof, or a homolog or a fragment thereof, and being depicted in the same respective line as said C_pp004096192r, or a functional equivalent or a homolog thereof as shown in column 8 of Table I, application no. 6, preferably the coding region thereof, particularly a homolog or functional equivalent as shown in column 8 of Table I B, application no. 6, and being depicted in the same respective line as said C_pp004096192r, and preferably the activity is increased non-targeted, or
[42908] (b) a polypeptide comprising a polypeptide, a consensus sequence or at least a polypeptide motif as shown in the respective line in column 5 of Table II or in column 8 of Table IV, application no. 6, respectively, and being depicted in the same respective line as said

[42909] C_pp004096192r, or a functional equivalent or a homolog thereof as depicted in column 8 of Table II, application no. 6, preferably a homolog or functional equivalent as depicted in column 8 of Table II B, application no. 6, and being depicted in the same respective line as said C_pp004096192r, and preferably the activity is increased non-targeted, whereby the respective line discloses in column 7 the fine chemical isoleucine.

[42910] Accordingly, in one embodiment, the molecule which activity is to be increased in the process of the invention is the gene product with an activity as a “thioredoxin”, preferably it is the molecule of section (a) or (b) of this paragraph.

[42911] In particular, it was observed that in plants, especially in Arabidopsis thaliana, increasing or generating the activity of a gene product non-targeted with the activity of a “thioredoxin”, preferably being encoded by a gene comprising the nucleic acid sequence SEQ ID NO. 45757, preferably the coding region thereof, conferred the production of or the increase in isoleucine compared with the wild type control.

[42912] The nucleic acid sequence of C_pp004096192r from Physcomitrella patens, e.g. as shown in the respective line in column 5 of Table I, application no. 6, is unpublished. And the activity of the gene product thereof is the activity of thioredoxin.

[42913] Accordingly, in one embodiment, the process of the present invention for producing leucine in a non-human organism, like a microorganism or a plant or a part thereof, comprises increasing or generating the activity of a gene product with the activity of a gene product conferring the activity of “thioredoxin”, especially from Physcomitrella patens or its functional equivalent or its homolog, e.g. the increase of
[42914] (a) a gene product of a gene comprising the nucleic acid molecule as shown in the respective line in column 5 of Table I (whereby the respective line discloses in column 7 the fine chemical leucine), application no. 6, preferably the coding region thereof, or a homolog or a fragment thereof, and being depicted in the same respective line as said C_pp004096192r, or a functional equivalent or a homolog thereof as shown in column 8 of Table I, application no. 6, preferably the coding region thereof, particularly a homolog or functional equivalent as shown in column 8 of Table I B, application no. 6, and being depicted in the same respective line as said C_pp004096192r, and preferably the activity is increased non-targeted, or
[42915] (b) a polypeptide comprising a polypeptide, a consensus sequence or at least a polypeptide motif as shown in the respective line in column 5 of Table II or in column 8 of Table IV, application no. 6, respectively, and being depicted in the same respective line as said C_pp004096192r, or a functional equivalent or a homolog thereof as depicted in column 8 of Table II, application no. 6, preferably a homolog or functional equivalent as depicted in column 8 of Table II B, application no. 6, and being depicted in the same respective line as said C_pp004096192r, and preferably the activity is increased non-targeted, whereby the respective line discloses in column 7 the fine chemical leucine.

[42916] Accordingly, in one embodiment, the molecule which activity is to be increased in the process of the invention is the gene product with an activity as a “thioredoxin”, preferably it is the molecule of section (a) or (b) of this paragraph.

[42917] In particular, it was observed that in plants, especially in Arabidopsis thaliana, increasing or generating the activity of a gene product non-targeted with the activity of a “thioredoxin”, preferably being encoded by a gene comprising the nucleic acid sequence SEQ ID NO. 45757, preferably the coding region thereof, conferred the production of or the increase in leucine compared with the wild type control.

[42918] The nucleic acid sequence of C_pp004096192r from Physcomitrella patens, e.g. as shown in the respective line in column 5 of Table I, application no. 6, is unpublished. And the activity of the gene product thereof is the activity of thioredoxin.

[42919] Accordingly, in one embodiment, the process of the present invention for producing valine in a non-human organism, like a microorganism or a plant or a part thereof, comprises increasing or generating the activity of a gene product with the activity of a gene product conferring the activity of “thioredoxin”, especially from Physcomitrella patens or its functional equivalent or its homolog, e.g. the increase of
[42920] (a) a gene product of a gene comprising the nucleic acid molecule as shown in the respective line in column 5 of Table I (whereby the respective line discloses in column 7 the fine chemical valine), application no. 6, preferably the coding region thereof, or a homolog or a fragment thereof, and being depicted in the same respective line as said C_pp004096192r, or a functional equivalent or a homolog thereof as shown in column 8 of Table I, application no. 6, preferably the coding region thereof, particularly a homolog or functional equivalent as shown in column 8 of Table I B, application no. 6, and being depicted in the same respective line as said C_pp004096192r, and preferably the activity is increased non-targeted, or
[42921] (b) a polypeptide comprising a polypeptide, a consensus sequence or at least a polypeptide motif as shown in the respective line in column 5 of Table II or in column 8 of Table IV, application no. 6, respectively, and being depicted in the same respective line as said C_pp004096192r, or a functional equivalent or a homolog thereof as depicted in column 8 of Table II, application no. 6, preferably a homolog or functional equivalent as depicted in column 8 of Table II B, application no. 6, and being depicted in the same respective line as said C_pp004096192r, and preferably the activity is increased non-targeted, whereby the respective line discloses in column 7 the fine chemical valine.

[42922] Accordingly, in one embodiment, the molecule which activity is to be increased in the process of the invention is the gene product with an activity as a “thioredoxin”, preferably it is the molecule of section (a) or (b) of this paragraph.

[42923] In particular, it was observed that in plants, especially in Arabidopsis thaliana, increasing or generating the activity of a gene product non-targeted with the activity of a “thioredoxin”, preferably being encoded by a gene comprising the nucleic acid sequence SEQ ID NO. 45757, preferably the coding region thereof, conferred the production of or the increase in valine compared with the wild type control.

[42924] The nucleic acid sequence of GM02LC11114 from Glycine max, e.g. as shown in the respective line in column 5 of Table I, application no. 6, is unpublished. And the activity of the gene product thereof is the activity of GM02LC11114-protein.

[42925] Accordingly, in one embodiment, the process of the present invention for producing isoleucine in a non-human organism, like a microorganism or a plant or a part thereof, comprises increasing or generating the activity of a gene product with the activity of a gene product conferring the activity of “GM02LC11114-protein”, especially from Glycine max or its functional equivalent or its homolog, e.g. the increase of
[42926] (a) a gene product of a gene comprising the nucleic acid molecule as shown in the respective line in column 5 of Table I (whereby the respective line discloses in column 7 the fine chemical isoleucine), application no. 6, preferably the coding region thereof, or a homolog or a fragment thereof, and being depicted in the same respective line as said GM02LC11114, or a functional equivalent or a homolog thereof as shown in column 8 of Table I, application no. 6, preferably the coding region thereof, particularly a homolog or functional equivalent as shown in column 8 of Table I B, application no. 6, and being depicted in the same respective line as said GM02LC11114, and preferably the activity is increased non-targeted, or
[42927] (b) a polypeptide comprising a polypeptide, a consensus sequence or at least a polypeptide motif as shown in the respective line in column 5 of Table II or in column 8 of Table IV, application no. 6, respectively, and being depicted in the same respective line as said GM02LC11114, or a functional equivalent or a homolog thereof as depicted in column 8 of Table II, application no. 6, preferably a homolog or functional equivalent as depicted in column 8 of Table II B, application no. 6, and being depicted in the same respective line as said GM02LC11114, and preferably the activity is increased non-targeted, whereby the respective line discloses in column 7 the fine chemical isoleucine.

[42928] Accordingly, in one embodiment, the molecule which activity is to be increased in the process of the invention is the gene product with an activity as a “GM02LC11114-protein”, preferably it is the molecule of section (a) or (b) of this paragraph.

[42929] In particular, it was observed that in plants, especially in Arabidopsis thaliana, increasing or generating the activity of a gene product non-targeted with the activity of a “GM02LC11114-protein”, preferably being encoded by a gene comprising the nucleic acid sequence SEQ ID NO. 45795, preferably the coding region thereof, conferred the production of or the increase in isoleucine compared with the wild type control.

[42930] The nucleic acid sequence of GM02LC11114 from Glycine max, e.g. as shown in the respective line in column 5 of Table I, application no. 6, is unpublished. And the activity of the gene product thereof is the activity of GM02LC11114-protein.

[42931] Accordingly, in one embodiment, the process of the present invention for producing leucine in a non-human organism, like a microorganism or a plant or a part thereof, comprises increasing or generating the activity of a gene product with the activity of a gene product conferring the activity of “GM02LC11114-protein”, especially from Glycine max or its functional equivalent or its homolog, e.g. the increase of
[42932] (a) a gene product of a gene comprising the nucleic acid molecule as shown in the respective line in column 5 of Table I (whereby the respective line discloses in column 7 the fine chemical leucine), application no. 6, preferably the coding region thereof, or a homolog or a fragment thereof, and being depicted in the same respective line as said GM02LC11114, or a functional equivalent or a homolog thereof as shown in column 8 of Table I, application no. 6, preferably the coding region thereof, particularly a homolog or functional equivalent as shown in column 8 of Table I B, application no. 6, and being depicted in the same respective line as said GM02LC11114, and preferably the activity is increased non-targeted, or
[42933] (b) a polypeptide comprising a polypeptide, a consensus sequence or at least a polypeptide motif as shown in the respective line in column 5 of Table II or in column 8 of Table IV, application no. 6, respectively, and being depicted in the same respective line as said GM02LC11114, or a functional equivalent or a homolog thereof as depicted in column 8 of Table II, application no. 6, preferably a homolog or functional equivalent as depicted in column 8 of Table II B, application no. 6, and being depicted in the same respective line as said GM02LC11114, and preferably the activity is increased non-targeted, whereby the respective line discloses in column 7 the fine chemical leucine.

[42934] Accordingly, in one embodiment, the molecule which activity is to be increased in the process of the invention is the gene product with an activity as a “GM02LC11114-protein”, preferably it is the molecule of section (a) or (b) of this paragraph.

[42935] In particular, it was observed that in plants, especially in Arabidopsis thaliana, increasing or generating the activity of a gene product non-targeted with the activity of a “GM02LC11114-protein”, preferably being encoded by a gene comprising the nucleic acid sequence SEQ ID NO. 45795, preferably the coding region thereof, conferred the production of or the increase in leucine compared with the wild type control.

[42936] The nucleic acid sequence of GM02LC12622 from Glycine max, e.g. as shown in the respective line in column 5 of Table I, application no. 6, is unpublished. And the activity of the gene product thereof is the activity of glutaredoxin.

[42937] Accordingly, in one embodiment, the process of the present invention for producing isoleucine in a non-human organism, like a microorganism or a plant or a part thereof, comprises increasing or generating the activity of a gene product with the activity of a gene product conferring the activity of “glutaredoxin”, especially from Glycine max or its functional equivalent or its homolog, e.g. the increase of
[42938] (a) a gene product of a gene comprising the nucleic acid molecule as shown in the respective line in column 5 of Table I (whereby the respective line discloses in column 7 the fine chemical isoleucine), application no. 6, preferably the coding region thereof, or a homolog or a fragment thereof, and being depicted in the same respective line as said GM02LC12622, or a functional equivalent or a homolog thereof as shown in column 8 of Table I, application no. 6, preferably the coding region thereof, particularly a homolog or functional equivalent as shown in column 8 of Table I B, application no. 6, and being depicted in the same respective line as said GM02LC12622, and preferably the activity is increased non-targeted, or
[42939] (b) a polypeptide comprising a polypeptide, a consensus sequence or at least a polypeptide motif as shown in the respective line in column 5 of Table II or in column 8 of Table IV, application no. 6, respectively, and being depicted in the same respective line as said GM02LC12622, or a functional equivalent or a homolog thereof as depicted in column 8 of Table II, application no. 6, preferably a homolog or functional equivalent as depicted in column 8 of Table II B, application no. 6, and being depicted in the same respective line as said GM02LC12622, and preferably the activity is increased non-targeted, whereby the respective line discloses in column 7 the fine chemical isoleucine.

[42940] Accordingly, in one embodiment, the molecule which activity is to be increased in the process of the invention is the gene product with an activity as a “glutaredoxin”, preferably it is the molecule of section (a) or (b) of this paragraph.

[42941] In particular, it was observed that in plants, especially in Arabidopsis thaliana, increasing or generating the activity of a gene product non-targeted with the activity of a “glutaredoxin”, preferably being encoded by a gene comprising the nucleic acid sequence SEQ ID NO. 10811, preferably the coding region thereof, conferred the production of or the increase in isoleucine compared with the wild type control.

[42942] The nucleic acid sequence of GM02LC12622 from Glycine max, e.g. as shown in the respective line in column 5 of Table I, application no. 6, is unpublished. And the activity of the gene product thereof is the activity of glutaredoxin.

[42943] Accordingly, in one embodiment, the process of the present invention for producing leucine in a non-human organism, like a microorganism or a plant or a part thereof, comprises increasing or generating the activity of a gene product with the activity of a gene product conferring the activity of “glutaredoxin”, especially from Glycine max or its functional equivalent or its homolog, e.g. the increase of
[42944] (a) a gene product of a gene comprising the nucleic acid molecule as shown in the respective line in column 5 of Table I (whereby the respective line discloses in column 7 the fine chemical leucine), application no. 6, preferably the coding region thereof, or a homolog or a fragment thereof, and being depicted in the same respective line as said GM02LC12622, or a functional equivalent or a homolog thereof as shown in column 8 of Table I, application no. 6, preferably the coding region thereof, particularly a homolog or functional equivalent as shown in column 8 of Table I B, application no. 6, and being depicted in the same respective line as said GM02LC12622, and preferably the activity is increased non-targeted, or
[42945] (b) a polypeptide comprising a polypeptide, a consensus sequence or at least a polypeptide motif as shown in the respective line in column 5 of Table II or in column 8 of Table IV, application no. 6, respectively, and being depicted in the same respective line as said GM02LC12622, or a functional equivalent or a homolog thereof as depicted in column 8 of Table II, application no. 6, preferably a homolog or functional equivalent as depicted in column 8 of Table II B, application no. 6, and being depicted in the same respective line as said GM02LC12622, and preferably the activity is increased non-targeted, whereby the respective line discloses in column 7 the fine chemical leucine.

[42946] Accordingly, in one embodiment, the molecule which activity is to be increased in the process of the invention is the gene product with an activity as a “glutaredoxin”, preferably it is the molecule of section (a) or (b) of this paragraph.

[42947] In particular, it was observed that in plants, especially in Arabidopsis thaliana, increasing or generating the activity of a gene product non-targeted with the activity of a “glutaredoxin”, preferably being encoded by a gene comprising the nucleic acid sequence SEQ ID NO. 10811, preferably the coding region thereof, conferred the production of or the increase in leucine compared with the wild type control.

[42948] The nucleic acid sequence of GM02LC12622 from Glycine max, e.g. as shown in the respective line in column 5 of Table I, application no. 6, is unpublished. And the activity of the gene product thereof is the activity of glutaredoxin.

[42949] Accordingly, in one embodiment, the process of the present invention for producing valine in a non-human organism, like a microorganism or a plant or a part thereof, comprises increasing or generating the activity of a gene product with the activity of a gene product conferring the activity of “glutaredoxin”, especially from Glycine max or its functional equivalent or its homolog, e.g. the increase of
[42950] (a) a gene product of a gene comprising the nucleic acid molecule as shown in the respective line in column 5 of Table I (whereby the respective line discloses in column 7 the fine chemical valine), application no. 6, preferably the coding region thereof, or a homolog or a fragment thereof, and being depicted in the same respective line as said GM02LC12622, or a functional equivalent or a homolog thereof as shown in column 8 of Table I, application no. 6, preferably the coding region thereof, particularly a homolog or functional equivalent as shown in column 8 of Table I B, application no. 6, and being depicted in the same respective line as said GM02LC12622, and preferably the activity is increased non-targeted, or
[42951] (b) a polypeptide comprising a polypeptide, a consensus sequence or at least a polypeptide motif as shown in the respective line in column 5 of Table II or in column 8 of Table IV, application no. 6, respectively, and being depicted in the same respective line as said GM02LC12622, or a functional equivalent or a homolog thereof as depicted in column 8 of Table II, application no. 6, preferably a homolog or functional equivalent as depicted in column 8 of Table II B, application no. 6, and being depicted in the same respective line as said GM02LC12622, and preferably the activity is increased non-targeted, whereby the respective line discloses in column 7 the fine chemical valine.

[42952] Accordingly, in one embodiment, the molecule which activity is to be increased in the process of the invention is the gene product with an activity as a “glutaredoxin”, preferably it is the molecule of section (a) or (b) of this paragraph.

[42953] In particular, it was observed that in plants, especially in Arabidopsis thaliana, increasing or generating the activity of a gene product non-targeted with the activity of a “glutaredoxin”, preferably being encoded by a gene comprising the nucleic acid sequence SEQ ID NO. 10811, preferably the coding region thereof, conferred the production of or the increase in valine compared with the wild type control.

[42954] The nucleic acid sequence of GM02LC15313 from Glycine max, e.g. as shown in the respective line in column 5 of Table I, application no. 6, is unpublished. And the activity of the gene product thereof is the activity of histone H2A.

[42955] Accordingly, in one embodiment, the process of the present invention for producing isoleucine in a non-human organism, like a microorganism or a plant or a part thereof, comprises increasing or generating the activity of a gene product with the activity of a gene product conferring the activity of “histone H2A”, especially from Glycine max or its functional equivalent or its homolog, e.g. the increase of
[42956] (a) a gene product of a gene comprising the nucleic acid molecule as shown in the respective line in column 5 of Table I (whereby the respective line discloses in column 7 the fine chemical isoleucine), application no. 6, preferably the coding region thereof, or a homolog or a fragment thereof, and being depicted in the same respective line as said GM02LC15313, or a functional equivalent or a homolog thereof as shown in column 8 of Table I, application no. 6, preferably the coding region thereof, particularly a homolog or functional equivalent as shown in column 8 of Table I B, application no. 6, and being depicted in the same respective line as said GM02LC15313, and preferably the activity is increased non-targeted, or
[42957] (b) a polypeptide comprising a polypeptide, a consensus sequence or at least a polypeptide motif as shown in the respective line in column 5 of Table II or in column 8 of Table IV, application no. 6, respectively, and being depicted in the same respective line as said GM02LC15313, or a functional equivalent or a homolog thereof as depicted in column 8 of Table II, application no. 6, preferably a homolog or functional equivalent as depicted in column 8 of Table II B, application no. 6, and being depicted in the same respective line as said GM02LC15313, and preferably the activity is increased non-targeted, whereby the respective line discloses in column 7 the fine chemical isoleucine.

[42958] Accordingly, in one embodiment, the molecule which activity is to be increased in the process of the invention is the gene product with an activity as a “histone H2A”, preferably it is the molecule of section (a) or (b) of this paragraph.

[42959] In particular, it was observed that in plants, especially in Arabidopsis thaliana, increasing or generating the activity of a gene product non-targeted with the activity of a “histone H2A”, preferably being encoded by a gene comprising the nucleic acid sequence SEQ ID NO. 45897, preferably the coding region thereof, conferred the production of or the increase in isoleucine compared with the wild type control.

[42960] The nucleic acid sequence of GM02LC15313 from Glycine max, e.g. as shown in the respective line in column 5 of Table I, application no. 6, is unpublished. And the activity of the gene product thereof is the activity of histone H2A.

[42961] Accordingly, in one embodiment, the process of the present invention for producing leucine in a non-human organism, like a microorganism or a plant or a part thereof, comprises increasing or generating the activity of a gene product with the activity of a gene product conferring the activity of “histone H2A”, especially from Glycine max or its functional equivalent or its homolog, e.g. the increase of
[42962] (a) a gene product of a gene comprising the nucleic acid molecule as shown in the respective line in column 5 of Table I (whereby the respective line discloses in column 7 the fine chemical leucine), application no. 6, preferably the coding region thereof, or a homolog or a fragment thereof, and being depicted in the same respective line as said GM02LC15313, or a functional equivalent or a homolog thereof as shown in column 8 of Table I, application no. 6, preferably the coding region thereof, particularly a homolog or functional equivalent as shown in column 8 of Table I B, application no. 6, and being depicted in the same respective line as said GM02LC15313, and preferably the activity is increased non-targeted, or
[42963] (b) a polypeptide comprising a polypeptide, a consensus sequence or at least a polypeptide motif as shown in the respective line in column 5 of Table II or in column 8 of Table IV, application no. 6, respectively, and being depicted in the same respective line as said GM02LC15313, or a functional equivalent or a homolog thereof as depicted in column 8 of Table II, application no. 6, preferably a homolog or functional equivalent as depicted in column 8 of Table II B, application no. 6, and being depicted in the same respective line as said GM02LC15313, and preferably the activity is increased non-targeted, whereby the respective line discloses in column 7 the fine chemical leucine.

[42964] Accordingly, in one embodiment, the molecule which activity is to be increased in the process of the invention is the gene product with an activity as a “histone H2A”, preferably it is the molecule of section (a) or (b) of this paragraph.

[42965] In particular, it was observed that in plants, especially in Arabidopsis thaliana, increasing or generating the activity of a gene product non-targeted with the activity of a “histone H2A”, preferably being encoded by a gene comprising the nucleic acid sequence SEQ ID NO. 45897, preferably the coding region thereof, conferred the production of or the increase in leucine compared with the wild type control.

[42966] The nucleic acid sequence of GM02LC15313 from Glycine max, e.g. as shown in the respective line in column 5 of Table I, application no. 6, is unpublished. And the activity of the gene product thereof is the activity of histone H2A.

[42967] Accordingly, in one embodiment, the process of the present invention for producing valine in a non-human organism, like a microorganism or a plant or a part thereof, comprises increasing or generating the activity of a gene product with the activity of a gene product conferring the activity of “histone H2A”, especially from Glycine max or its functional equivalent or its homolog, e.g.

[42968] the increase of
[42969] (a) a gene product of a gene comprising the nucleic acid molecule as shown in the respective line in column 5 of Table I (whereby the respective line discloses in column 7 the fine chemical valine), application no. 6, preferably the coding region thereof, or a homolog or a fragment thereof, and being depicted in the same respective line as said GM02LC15313, or a functional equivalent or a homolog thereof as shown in column 8 of Table I, application no. 6, preferably the coding region thereof, particularly a homolog or functional equivalent as shown in column 8 of Table I B, application no. 6, and being depicted in the same respective line as said GM02LC15313, and preferably the activity is increased non-targeted, or
[42970] (b) a polypeptide comprising a polypeptide, a consensus sequence or at least a polypeptide motif as shown in the respective line in column 5 of Table II or in column 8 of Table IV, application no. 6, respectively, and being depicted in the same respective line as said GM02LC15313, or a functional equivalent or a homolog thereof as depicted in column 8 of Table II, application no. 6, preferably a homolog or functional equivalent as depicted in column 8 of Table II B, application no. 6, and being depicted in the same respective line as said GM02LC15313, and preferably the activity is increased non-targeted, whereby the respective line discloses in column 7 the fine chemical valine.

[42971] Accordingly, in one embodiment, the molecule which activity is to be increased in the process of the invention is the gene product with an activity as a “histone H2A”, preferably it is the molecule of section (a) or (b) of this paragraph.

[42972] In particular, it was observed that in plants, especially in Arabidopsis thaliana, increasing or generating the activity of a gene product non-targeted with the activity of a “histone H2A”, preferably being encoded by a gene comprising the nucleic acid sequence SEQ ID NO. 45897, preferably the coding region thereof, conferred the production of or the increase in valine compared with the wild type control.

[42973] The nucleic acid sequence of GM02LC17384 from Glycine max, e.g. as shown in the respective line in column 5 of Table I, application no. 6, is unpublished. And the activity of the gene product thereof is the activity of vacuolar ATPase subunit.

[42974] Accordingly, in one embodiment, the process of the present invention for producing valine in a non-human organism, like a microorganism or a plant or a part thereof, comprises increasing or generating the activity of a gene product with the activity of a gene product conferring the activity of “vacuolar ATPase subunit”, especially from Glycine max or its functional equivalent or its homolog, e.g. the increase of
[42975] (a) a gene product of a gene comprising the nucleic acid molecule as shown in the respective line in column 5 of Table I (whereby the respective line discloses in column 7 the fine chemical valine), application no. 6, preferably the coding region thereof, or a homolog or a fragment thereof, and being depicted in the same respective line as said GM02LC17384, or a functional equivalent or a homolog thereof as shown in column 8 of Table I, application no. 6, preferably the coding region thereof, particularly a homolog or functional equivalent as shown in column 8 of Table I B, application no. 6, and being depicted in the same respective line as said GM02LC17384, and preferably the activity is increased non-targeted, or
[42976] (b) a polypeptide comprising a polypeptide, a consensus sequence or at least a polypeptide motif as shown in the respective line in column 5 of Table II or in column 8 of Table IV, application no. 6, respectively, and being depicted in the same respective line as said GM02LC17384, or a functional equivalent or a homolog thereof as depicted in column 8 of Table II, application no. 6, preferably a homolog or functional equivalent as depicted in column 8 of Table II B, application no. 6, and being depicted in the same respective line as said GM02LC17384, and preferably the activity is increased non-targeted, whereby the respective line discloses in column 7 the fine chemical valine.

[42977] Accordingly, in one embodiment, the molecule which activity is to be increased in the process of the invention is the gene product with an activity as a “vacuolar ATPase subunit”, preferably it is the molecule of section (a) or (b) of this paragraph.

[42978] In particular, it was observed that in plants, especially in Arabidopsis thaliana, increasing or generating the activity of a gene product non-targeted with the activity of a “vacuolar ATPase subunit”, preferably being encoded by a gene comprising the nucleic acid sequence SEQ ID NO. 106688, preferably the coding region thereof, conferred the production of or the increase in valine compared with the wild type control.

[42979] The nucleic acid sequence of GM02LC17556 from Glycine max, e.g. as shown in the respective line in column 5 of Table I, application no. 6, is unpublished. And the activity of the gene product thereof is the activity of RNA binding protein.

[42980] Accordingly, in one embodiment, the process of the present invention for producing isoleucine in a non-human organism, like a microorganism or a plant or a part thereof, comprises increasing or generating the activity of a gene product with the activity of a gene product conferring the activity of “RNA binding protein”, especially from Glycine max or its functional equivalent or its homolog, e.g. the increase of
[42981] (a) a gene product of a gene comprising the nucleic acid molecule as shown in the respective line in column 5 of Table I (whereby the respective line discloses in column 7 the fine chemical isoleucine), application no. 6, preferably the coding region thereof, or a homolog or a fragment thereof, and being depicted in the same respective line as said GM02LC17556, or a functional equivalent or a homolog thereof as shown in column 8 of Table I, application no. 6, preferably the coding region thereof, particularly a homolog or functional equivalent as shown in column 8 of Table I B, application no. 6, and being depicted in the same respective line as said GM02LC17556, and preferably the activity is increased non-targeted, or
[42982] (b) a polypeptide comprising a polypeptide, a consensus sequence or at least a polypeptide motif as shown in the respective line in column 5 of Table II or in column 8 of Table IV, application no. 6, respectively, and being depicted in the same respective line as said GM02LC17556, or a functional equivalent or a homolog thereof as depicted in column 8 of Table II, application no. 6, preferably a homolog or functional equivalent as depicted in column 8 of Table II B, application no. 6, and being depicted in the same respective line as said GM02LC17556, and preferably the activity is increased non-targeted, whereby the respective line discloses in column 7 the fine chemical isoleucine.

[42983] Accordingly, in one embodiment, the molecule which activity is to be increased in the process of the invention is the gene product with an activity as a “RNA binding protein”, preferably it is the molecule of section (a) or (b) of this paragraph.

[42984] In particular, it was observed that in plants, especially in Arabidopsis thaliana, increasing or generating the activity of a gene product non-targeted with the activity of a “RNA binding protein”, preferably being encoded by a gene comprising the nucleic acid sequence SEQ ID NO. 46515, preferably the coding region thereof, conferred the production of or the increase in isoleucine compared with the wild type control.

[42985] The nucleic acid sequence of GM02LC17556 from Glycine max, e.g. as shown in the respective line in column 5 of Table I, application no. 6, is unpublished. And the activity of the gene product thereof is the activity of RNA binding protein.

[42986] Accordingly, in one embodiment, the process of the present invention for producing leucine in a non-human organism, like a microorganism or a plant or a part thereof, comprises increasing or generating the activity of a gene product with the activity of a gene product conferring the activity of “RNA binding protein”, especially from Glycine max or its functional equivalent or its homolog, e.g. the increase of
[42987] (a) a gene product of a gene comprising the nucleic acid molecule as shown in the respective line in column 5 of Table I (whereby the respective line discloses in column 7 the fine chemical leucine), application no. 6, preferably the coding region thereof, or a homolog or a fragment thereof, and being depicted in the same respective line as said GM02LC17556, or a functional equivalent or a homolog thereof as shown in column 8 of Table I, application no. 6, preferably the coding region thereof, particularly a homolog or functional equivalent as shown in column 8 of Table I B, application no. 6, and being depicted in the same respective line as said GM02LC17556, and preferably the activity is increased non-targeted, or
[42988] (b) a polypeptide comprising a polypeptide, a consensus sequence or at least a polypeptide motif as shown in the respective line in column 5 of Table II or in column 8 of Table IV, application no. 6, respectively, and being depicted in the same respective line as said GM02LC17556, or a functional equivalent or a homolog thereof as depicted in column 8 of Table II, application no. 6, preferably a homolog or functional equivalent as depicted in column 8 of Table II B, application no. 6, and being depicted in the same respective line as said GM02LC17556, and preferably the activity is increased non-targeted, whereby the respective line discloses in column 7 the fine chemical leucine.

[42989] Accordingly, in one embodiment, the molecule which activity is to be increased in the process of the invention is the gene product with an activity as a “RNA binding protein”, preferably it is the molecule of section (a) or (b) of this paragraph.

[42990] In particular, it was observed that in plants, especially in Arabidopsis thaliana, increasing or generating the activity of a gene product non-targeted with the activity of a “RNA binding protein”, preferably being encoded by a gene comprising the nucleic acid sequence SEQ ID NO. 46515, preferably the coding region thereof, conferred the production of or the increase in leucine compared with the wild type control.

[42991] The nucleic acid sequence of GM02LC17556 from Glycine max, e.g. as shown in the respective line in column 5 of Table I, application no. 6, is unpublished. And the activity of the gene product thereof is the activity of RNA binding protein.

[42992] Accordingly, in one embodiment, the process of the present invention for producing valine in a non-human organism, like a microorganism or a plant or a part thereof, comprises increasing or generating the activity of a gene product with the activity of a gene product conferring the activity of “RNA binding protein”, especially from Glycine max or its functional equivalent or its homolog, e.g. the increase of
[42993] (a) a gene product of a gene comprising the nucleic acid molecule as shown in the respective line in column 5 of Table I (whereby the respective line discloses in column 7 the fine chemical valine), application no. 6, preferably the coding region thereof, or a homolog or a fragment thereof, and being depicted in the same respective line as said GM02LC17556, or a functional equivalent or a homolog thereof as shown in column 8 of Table I, application no. 6, preferably the coding region thereof, particularly a homolog or functional equivalent as shown in column 8 of Table I B, application no. 6, and being depicted in the same respective line as said GM02LC17556, and preferably the activity is increased non-targeted, or
[42994] (b) a polypeptide comprising a polypeptide, a consensus sequence or at least a polypeptide motif as shown in the respective line in column 5 of Table II or in column 8 of Table IV, application no. 6, respectively, and being depicted in the same respective line as said GM02LC17556, or a functional equivalent or a homolog thereof as depicted in column 8 of Table II, application no. 6, preferably a homolog or functional equivalent as depicted in column 8 of Table II B, application no. 6, and being depicted in the same respective line as said GM02LC17556, and preferably the activity is increased non-targeted, whereby the respective line discloses in column 7 the fine chemical valine.

[42995] Accordingly, in one embodiment, the molecule which activity is to be increased in the process of the invention is the gene product with an activity as a “RNA binding protein”, preferably it is the molecule of section (a) or (b) of this paragraph.

[42996] In particular, it was observed that in plants, especially in Arabidopsis thaliana, increasing or generating the activity of a gene product non-targeted with the activity of a “RNA binding protein”, preferably being encoded by a gene comprising the nucleic acid sequence SEQ ID NO. 46515, preferably the coding region thereof, conferred the production of or the increase in valine compared with the wild type control.

[42997] The nucleic acid sequence of GM02LC21368 from Glycine max, e.g. as shown in the respective line in column 5 of Table I, application no. 6, is unpublished. And the activity of the gene product thereof is the activity of transcription factor.

[42998] Accordingly, in one embodiment, the process of the present invention for producing isoleucine in a non-human organism, like a microorganism or a plant or a part thereof, comprises increasing or generating the activity of a gene product with the activity of a gene product conferring the activity of “transcription factor”, especially from Glycine max or its functional equivalent or its homolog, e.g. the increase of
[42999] (a) a gene product of a gene comprising the nucleic acid molecule as shown in the respective line in column 5 of Table I (whereby the respective line discloses in column 7 the fine chemical isoleucine), application no. 6, preferably the coding region thereof, or a homolog or a fragment thereof, and being depicted in the same respective line as said GM02LC21368, or a functional equivalent or a homolog thereof as shown in column 8 of Table I, application no. 6, preferably the coding region thereof, particularly a homolog or functional equivalent as shown in column 8 of Table I B, application no. 6, and being depicted in the same respective line as said GM02LC21368, and preferably the activity is increased non-targeted, or
[43000] (b) a polypeptide comprising a polypeptide, a consensus sequence or at least a polypeptide motif as shown in the respective line in column 5 of Table II or in column 8 of Table IV, application no. 6, respectively, and being depicted in the same respective line as said GM02LC21368, or a functional equivalent or a homolog thereof as depicted in column 8 of Table II, application no. 6, preferably a homolog or functional equivalent as depicted in column 8 of Table II B, application no. 6, and being depicted in the same respective line as said GM02LC21368, and preferably the activity is increased non-targeted, whereby the respective line discloses in column 7 the fine chemical isoleucine.

[43001] Accordingly, in one embodiment, the molecule which activity is to be increased in the process of the invention is the gene product with an activity as a “transcription factor”, preferably it is the molecule of section (a) or (b) of this paragraph.

[43002] In particular, it was observed that in plants, especially in Arabidopsis thaliana, increasing or generating the activity of a gene product non-targeted with the activity of a “transcription factor”, preferably being encoded by a gene comprising the nucleic acid sequence SEQ ID NO. 84198, preferably the coding region thereof, conferred the production of or the increase in isoleucine compared with the wild type control.

[43003] The nucleic acid sequence of GM02LC21368 from Glycine max, e.g. as shown in the respective line in column 5 of Table I, application no. 6, is unpublished. And the activity of the gene product thereof is the activity of transcription factor.

[43004] Accordingly, in one embodiment, the process of the present invention for producing leucine in a non-human organism, like a microorganism or a plant or a part thereof, comprises increasing or generating the activity of a gene product with the activity of a gene product conferring the activity of “transcription factor”, especially from Glycine max or its functional equivalent or its homolog, e.g. the increase of
[43005] (a) a gene product of a gene comprising the nucleic acid molecule as shown in the respective line in column 5 of Table I (whereby the respective line discloses in column 7 the fine chemical leucine), application no. 6, preferably the coding region thereof, or a homolog or a fragment thereof, and being depicted in the same respective line as said GM02LC21368, or a functional equivalent or a homolog thereof as shown in column 8 of Table I, application no. 6, preferably the coding region thereof, particularly a homolog or functional equivalent as shown in column 8 of Table I B, application no. 6, and being depicted in the same respective line as said GM02LC21368, and preferably the activity is increased non-targeted, or
[43006] (b) a polypeptide comprising a polypeptide, a consensus sequence or at least a polypeptide motif as shown in the respective line in column 5 of Table II or in column 8 of Table IV, application no. 6, respectively, and being depicted in the same respective line as said GM02LC21368, or a functional equivalent or a homolog thereof as depicted in column 8 of Table II, application no. 6, preferably a homolog or functional equivalent as depicted in column 8 of Table II B, application no. 6, and being depicted in the same respective line as said GM02LC21368, and preferably the activity is increased non-targeted, whereby the respective line discloses in column 7 the fine chemical leucine.

[43007] Accordingly, in one embodiment, the molecule which activity is to be increased in the process of the invention is the gene product with an activity as a “transcription factor”, preferably it is the molecule of section (a) or (b) of this paragraph.

[43008] In particular, it was observed that in plants, especially in Arabidopsis thaliana, increasing or generating the activity of a gene product non-targeted with the activity of a “transcription factor”, preferably being encoded by a gene comprising the nucleic acid sequence SEQ ID NO. 84198, preferably the coding region thereof, conferred the production of or the increase in leucine compared with the wild type control.

[43009] The nucleic acid sequence of GM02LC21368 from Glycine max, e.g. as shown in the respective line in column 5 of Table I, application no. 6, is unpublished. And the activity of the gene product thereof is the activity of transcription factor.

[43010] Accordingly, in one embodiment, the process of the present invention for producing valine in a non-human organism, like a microorganism or a plant or a part thereof, comprises increasing or generating the activity of a gene product with the activity of a gene product conferring the activity of “transcription factor”, especially from Glycine max or its functional equivalent or its homolog, e.g. the increase of
[43011] (a) a gene product of a gene comprising the nucleic acid molecule as shown in the respective line in column 5 of Table I (whereby the respective line discloses in column 7 the fine chemical valine), application no. 6, preferably the coding region thereof, or a homolog or a fragment thereof, and being depicted in the same respective line as said GM02LC21368, or a functional equivalent or a homolog thereof as shown in column 8 of Table I, application no. 6, preferably the coding region thereof, particularly a homolog or functional equivalent as shown in column 8 of Table I B, application no. 6, and being depicted in the same respective line as said GM02LC21368, and preferably the activity is increased non-targeted, or
[43012] (b) a polypeptide comprising a polypeptide, a consensus sequence or at least a polypeptide motif as shown in the respective line in column 5 of Table II or in column 8 of Table IV, application no. 6, respectively, and being depicted in the same respective line as said GM02LC21368, or a functional equivalent or a homolog thereof as depicted in column 8 of Table II, application no. 6, preferably a homolog or functional equivalent as depicted in column 8 of Table II B, application no. 6, and being depicted in the same respective line as said GM02LC21368, and preferably the activity is increased non-targeted, whereby the respective line discloses in column 7 the fine chemical valine.

[43013] Accordingly, in one embodiment, the molecule which activity is to be increased in the process of the invention is the gene product with an activity as a “transcription factor”, preferably it is the molecule of section (a) or (b) of this paragraph.

[43014] In particular, it was observed that in plants, especially in Arabidopsis thaliana, increasing or generating the activity of a gene product non-targeted with the activity of a “transcription factor”, preferably being encoded by a gene comprising the nucleic acid sequence SEQ ID NO. 84198, preferably the coding region thereof, conferred the production of or the increase in valine compared with the wild type control.

[43015] The nucleic acid sequence of GM02LC44512 from Glycine max, e.g. as shown in the respective line in column 5 of Table I, application no. 6, is unpublished. And the activity of the gene product thereof is the activity of cyclin D.

[43016] Accordingly, in one embodiment, the process of the present invention for producing isoleucine in a non-human organism, like a microorganism or a plant or a part thereof, comprises increasing or generating the activity of a gene product with the activity of a gene product conferring the activity of “cyclin D”, especially from Glycine max or its functional equivalent or its homolog, e.g.

[43017] the increase of
[43018] (a) a gene product of a gene comprising the nucleic acid molecule as shown in the respective line in column 5 of Table I (whereby the respective line discloses in column 7 the fine chemical isoleucine), application no. 6, preferably the coding region thereof, or a homolog or a fragment thereof, and being depicted in the same respective line as said GM02LC44512, or a functional equivalent or a homolog thereof as shown in column 8 of Table I, application no. 6, preferably the coding region thereof, particularly a homolog or functional equivalent as shown in column 8 of Table I B, application no. 6, and being depicted in the same respective line as said GM02LC44512, and preferably the activity is increased non-targeted, or
[43019] (b) a polypeptide comprising a polypeptide, a consensus sequence or at least a polypeptide motif as shown in the respective line in column 5 of Table II or in column 8 of Table IV, application no. 6, respectively, and being depicted in the same respective line as said GM02LC44512, or a functional equivalent or a homolog thereof as depicted in column 8 of Table II, application no. 6, preferably a homolog or functional equivalent as depicted in column 8 of Table II B, application no. 6, and being depicted in the same respective line as said GM02LC44512, and preferably the activity is increased non-targeted, whereby the respective line discloses in column 7 the fine chemical isoleucine.

[43020] Accordingly, in one embodiment, the molecule which activity is to be increased in the process of the invention is the gene product with an activity as a “cyclin D”, preferably it is the molecule of section (a) or (b) of this paragraph.

[43021] In particular, it was observed that in plants, especially in Arabidopsis thaliana, increasing or generating the activity of a gene product non-targeted with the activity of a “cyclin D”, preferably being encoded by a gene comprising the nucleic acid sequence SEQ ID NO. 46850, preferably the coding region thereof, conferred the production of or the increase in isoleucine compared with the wild type control.

[43022] The nucleic acid sequence of GM02LC44512 from Glycine max, e.g. as shown in the respective line in column 5 of Table I, application no. 6, is unpublished. And the activity of the gene product thereof is the activity of cyclin D.

[43023] Accordingly, in one embodiment, the process of the present invention for producing leucine in a non-human organism, like a microorganism or a plant or a part thereof, comprises increasing or generating the activity of a gene product with the activity of a gene product conferring the activity of “cyclin D”, especially from Glycine max or its functional equivalent or its homolog, e.g. the increase of
[43024] (a) a gene product of a gene comprising the nucleic acid molecule as shown in the respective line in column 5 of Table I (whereby the respective line discloses in column 7 the fine chemical leucine), application no. 6, preferably the coding region thereof, or a homolog or a fragment thereof, and being depicted in the same respective line as said GM02LC44512, or a functional equivalent or a homolog thereof as shown in column 8 of Table I, application no. 6, preferably the coding region thereof, particularly a homolog or functional equivalent as shown in column 8 of Table I B, application no. 6, and being depicted in the same respective line as said GM02LC44512, and preferably the activity is increased non-targeted, or
[43025] (b) a polypeptide comprising a polypeptide, a consensus sequence or at least a polypeptide motif as shown in the respective line in column 5 of Table II or in column 8 of Table IV, application no. 6, respectively, and being depicted in the same respective line as said GM02LC44512, or a functional equivalent or a homolog thereof as depicted in column 8 of Table II, application no. 6, preferably a homolog or functional equivalent as depicted in column 8 of Table II B, application no. 6, and being depicted in the same respective line as said GM02LC44512, and preferably the activity is increased non-targeted, whereby the respective line discloses in column 7 the fine chemical leucine.

[43026] Accordingly, in one embodiment, the molecule which activity is to be increased in the process of the invention is the gene product with an activity as a “cyclin D”, preferably it is the molecule of section (a) or (b) of this paragraph.

[43027] In particular, it was observed that in plants, especially in Arabidopsis thaliana, increasing or generating the activity of a gene product non-targeted with the activity of a “cyclin D”, preferably being encoded by a gene comprising the nucleic acid sequence SEQ ID NO. 46850, preferably the coding region thereof, conferred the production of or the increase in leucine compared with the wild type control.

[43028] The nucleic acid sequence of GM02LC44512 from Glycine max, e.g. as shown in the respective line in column 5 of Table I, application no. 6, is unpublished. And the activity of the gene product thereof is the activity of cyclin D.

[43029] Accordingly, in one embodiment, the process of the present invention for producing valine in a non-human organism, like a microorganism or a plant or a part thereof, comprises increasing or generating the activity of a gene product with the activity of a gene product conferring the activity of “cyclin D”, especially from Glycine max or its functional equivalent or its homolog, e.g. the increase of
[43030] (a) a gene product of a gene comprising the nucleic acid molecule as shown in the respective line in column 5 of Table I (whereby the respective line discloses in column 7 the fine chemical valine), application no. 6, preferably the coding region thereof, or a homolog or a fragment thereof, and being depicted in the same respective line as said GM02LC44512, or a functional equivalent or a homolog thereof as shown in column 8 of Table I, application no. 6, preferably the coding region thereof, particularly a homolog or functional equivalent as shown in column 8 of Table I B, application no. 6, and being depicted in the same respective line as said GM02LC44512, and preferably the activity is increased non-targeted, or
[43031] (b) a polypeptide comprising a polypeptide, a consensus sequence or at least a polypeptide motif as shown in the respective line in column 5 of Table II or in column 8 of Table IV, application no. 6, respectively, and being depicted in the same respective line as said GM02LC44512, or a functional equivalent or a homolog thereof as depicted in column 8 of Table II, application no. 6, preferably a homolog or functional equivalent as depicted in column 8 of Table II B, application no. 6, and being depicted in the same respective line as said GM02LC44512, and preferably the activity is increased non-targeted, whereby the respective line discloses in column 7 the fine chemical valine.

[43032] Accordingly, in one embodiment, the molecule which activity is to be increased in the process of the invention is the gene product with an activity as a “cyclin D”, preferably it is the molecule of section (a) or (b) of this paragraph.

[43033] In particular, it was observed that in plants, especially in Arabidopsis thaliana, increasing or generating the activity of a gene product non-targeted with the activity of a “cyclin D”, preferably being encoded by a gene comprising the nucleic acid sequence SEQ ID NO. 46850, preferably the coding region thereof, conferred the production of or the increase in valine compared with the wild type control.

[43034] The nucleic acid sequence of GM02LC5744 from Glycine max, e.g. as shown in the respective line in column 5 of Table I, application no. 6, is unpublished. And the activity of the gene product thereof is the activity of GM02LC5744-protein.

[43035] Accordingly, in one embodiment, the process of the present invention for producing leucine in a non-human organism, like a microorganism or a plant or a part thereof, comprises increasing or generating the activity of a gene product with the activity of a gene product conferring the activity of “GM02LC5744-protein”, especially from Glycine max or its functional equivalent or its homolog, e.g. the increase of
[43036] (a) a gene product of a gene comprising the nucleic acid molecule as shown in the respective line in column 5 of Table I (whereby the respective line discloses in column 7 the fine chemical leucine), application no. 6, preferably the coding region thereof, or a homolog or a fragment thereof, and being depicted in the same respective line as said GM02LC5744, or a functional equivalent or a homolog thereof as shown in column 8 of Table I, application no. 6, preferably the coding region thereof, particularly a homolog or functional equivalent as shown in column 8 of Table I B, application no. 6, and being depicted in the same respective line as said GM02LC5744, and preferably the activity is increased non-targeted, or
[43037] (b) a polypeptide comprising a polypeptide, a consensus sequence or at least a polypeptide motif as shown in the respective line in column 5 of Table II or in column 8 of Table IV, application no. 6, respectively, and being depicted in the same respective line as said GM02LC5744, or a functional equivalent or a homolog thereof as depicted in column 8 of Table II, application no. 6, preferably a homolog or functional equivalent as depicted in column 8 of Table II B, application no. 6, and being depicted in the same respective line as said GM02LC5744, and preferably the activity is increased non-targeted, whereby the respective line discloses in column 7 the fine chemical leucine.

[43038] Accordingly, in one embodiment, the molecule which activity is to be increased in the process of the invention is the gene product with an activity as a “GM02LC5744-protein”, preferably it is the molecule of section (a) or (b) of this paragraph.

[43039] In particular, it was observed that in plants, especially in Arabidopsis thaliana, increasing or generating the activity of a gene product non-targeted with the activity of a “GM02LC5744-protein”, preferably being encoded by a gene comprising the nucleic acid sequence SEQ ID NO. 47076, preferably the coding region thereof, conferred the production of or the increase in leucine compared with the wild type control.

[43040] The nucleic acid sequence of Sll0228 from Synechocystis sp., e.g. as shown in the respective line in column 5 of Table I, application no. 6, has been published in C. And the activity of the gene product thereof is the activity of agmatinase.

[43041] Accordingly, in one embodiment, the process of the present invention for producing valine in a non-human organism, like a microorganism or a plant or a part thereof, comprises increasing or generating the activity of a gene product with the activity of a gene product conferring the activity of “agmatinase”, especially from Synechocystis sp. or its functional equivalent or its homolog, e.g. the increase of
[43042] (a) a gene product of a gene comprising the nucleic acid molecule as shown in the respective line in column 5 of Table I (whereby the respective line discloses in column 7 the fine chemical valine), application no. 6, preferably the coding region thereof, or a homolog or a fragment thereof, and being depicted in the same respective line as said Sll0228, or a functional equivalent or a homolog thereof as shown in column 8 of Table I, application no. 6, preferably the coding region thereof, particularly a homolog or functional equivalent as shown in column 8 of Table I B, application no. 6, and being depicted in the same respective line as said Sll0228, and preferably the activity is increased plastidic, or
[43043] (b) a polypeptide comprising a polypeptide, a consensus sequence or at least a polypeptide motif as shown in the respective line in column 5 of Table II or in column 8 of Table IV, application no. 6, respectively, and being depicted in the same respective line as said Sll0228, or a functional equivalent or a homolog thereof as depicted in column 8 of Table II, application no. 6, preferably a homolog or functional equivalent as depicted in column 8 of Table II B, application no. 6, and being depicted in the same respective line as said Sll0228, and preferably the activity is increased plastidic, whereby the respective line discloses in column 7 the fine chemical valine.

[43044] Accordingly, in one embodiment, the molecule which activity is to be increased in the process of the invention is the gene product with an activity as a “agmatinase”, preferably it is the molecule of section (a) or (b) of this paragraph.

[43045] In particular, it was observed that in plants, especially in Arabidopsis thaliana, increasing or generating the activity of a gene product plastidic with the activity of a “agmatinase”, preferably being encoded by a gene comprising the nucleic acid sequence SEQ ID NO. 84265, preferably the coding region thereof, conferred the production of or the increase in valine compared with the wild type control.

[43046] The nucleic acid sequence of Sll0240 from Synechocystis sp., e.g. as shown in the respective line in column 5 of Table I, application no. 6, has been published in C. And the activity of the gene product thereof is the activity of ABC transporter ATP binding component.

[43047] Accordingly, in one embodiment, the process of the present invention for producing valine in a non-human organism, like a microorganism or a plant or a part thereof, comprises increasing or generating the activity of a gene product with the activity of a gene product conferring the activity of “ABC transporter ATP binding component”, especially from Synechocystis sp. or its functional equivalent or its homolog, e.g. the increase of
[43048] (a) a gene product of a gene comprising the nucleic acid molecule as shown in the respective line in column 5 of Table I (whereby the respective line discloses in column 7 the fine chemical valine), application no. 6, preferably the coding region thereof, or a homolog or a fragment thereof, and being depicted in the same respective line as said Sll0240, or a functional equivalent or a homolog thereof as shown in column 8 of Table I, application no. 6, preferably the coding region thereof, particularly a homolog or functional equivalent as shown in column 8 of Table I B, application no. 6, and being depicted in the same respective line as said Sll0240, and preferably the activity is increased plastidic, or
[43049] (b) a polypeptide comprising a polypeptide, a consensus sequence or at least a polypeptide motif as shown in the respective line in column 5 of Table II or in column 8 of Table IV, application no. 6, respectively, and being depicted in the same respective line as said Sll0240, or a functional equivalent or a homolog thereof as depicted in column 8 of Table II, application no. 6, preferably a homolog or functional equivalent as depicted in column 8 of Table II B, application no. 6, and being depicted in the same respective line as said Sll0240, and preferably the activity is increased plastidic, whereby the respective line discloses in column 7 the fine chemical valine.

[43050] Accordingly, in one embodiment, the molecule which activity is to be increased in the process of the invention is the gene product with an activity as a “ABC transporter ATP binding component”, preferably it is the molecule of section (a) or (b) of this paragraph.

[43051] In particular, it was observed that in plants, especially in Arabidopsis thaliana, increasing or generating the activity of a gene product plastidic with the activity of a “ABC transporter ATP binding component”, preferably being encoded by a gene comprising the nucleic acid sequence SEQ ID NO. 84441, preferably the coding region thereof, conferred the production of or the increase in valine compared with the wild type control.

[43052] The nucleic acid sequence of Sll0248 from Synechocystis sp., e.g. as shown in the respective line in column 5 of Table I, application no. 6, has been published in C. And the activity of the gene product thereof is the activity of flavodoxin.

[43053] Accordingly, in one embodiment, the process of the present invention for producing isoleucine in a non-human organism, like a microorganism or a plant or a part thereof, comprises increasing or generating the activity of a gene product with the activity of a gene product conferring the activity of “flavodoxin”, especially from Synechocystis sp. or its functional equivalent or its homolog, e.g. the increase of
[43054] (a) a gene product of a gene comprising the nucleic acid molecule as shown in the respective line in column 5 of Table I (whereby the respective line discloses in column 7 the fine chemical isoleucine), application no. 6, preferably the coding region thereof, or a homolog or a fragment thereof, and being depicted in the same respective line as said Sll0248, or a functional equivalent or a homolog thereof as shown in column 8 of Table I, application no. 6, preferably the coding region thereof, particularly a homolog or functional equivalent as shown in column 8 of Table I B, application no. 6, and being depicted in the same respective line as said Sll0248, and preferably the activity is increased plastidic, or
[43055] (b) a polypeptide comprising a polypeptide, a consensus sequence or at least a polypeptide motif as shown in the respective line in column 5 of Table II or in column 8 of Table IV, application no. 6, respectively, and being depicted in the same respective line as said Sll0248, or a functional equivalent or a homolog thereof as depicted in column 8 of Table II, application no. 6, preferably a homolog or functional equivalent as depicted in column 8 of Table II B, application no. 6, and being depicted in the same respective line as said Sll0248, and preferably the activity is increased plastidic, whereby the respective line discloses in column 7 the fine chemical isoleucine.

[43056] Accordingly, in one embodiment, the molecule which activity is to be increased in the process of the invention is the gene product with an activity as a “flavodoxin”, preferably it is the molecule of section (a) or (b) of this paragraph.

[43057] In particular, it was observed that in plants, especially in Arabidopsis thaliana, increasing or generating the activity of a gene product plastidic with the activity of a “flavodoxin”, preferably being encoded by a gene comprising the nucleic acid sequence SEQ ID NO. 49143, preferably the coding region thereof, conferred the production of or the increase in isoleucine compared with the wild type control.

[43058] The nucleic acid sequence of Sll0248 from Synechocystis sp., e.g. as shown in the respective line in column 5 of Table I, application no. 6, has been published in C. And the activity of the gene product thereof is the activity of flavodoxin.

[43059] Accordingly, in one embodiment, the process of the present invention for producing leucine in a non-human organism, like a microorganism or a plant or a part thereof, comprises increasing or generating the activity of a gene product with the activity of a gene product conferring the activity of “flavodoxin”, especially from Synechocystis sp. or its functional equivalent or its homolog, e.g. the increase of
[43060] (a) a gene product of a gene comprising the nucleic acid molecule as shown in the respective line in column 5 of Table I (whereby the respective line discloses in column 7 the fine chemical leucine), application no. 6, preferably the coding region thereof, or a homolog or a fragment thereof, and being depicted in the same respective line as said Sll0248, or a functional equivalent or a homolog thereof as shown in column 8 of Table I, application no. 6, preferably the coding region thereof, particularly a homolog or functional equivalent as shown in column 8 of Table I B, application no. 6, and being depicted in the same respective line as said Sll0248, and preferably the activity is increased plastidic, or
[43061] (b) a polypeptide comprising a polypeptide, a consensus sequence or at least a polypeptide motif as shown in the respective line in column 5 of Table II or in column 8 of Table IV, application no. 6, respectively, and being depicted in the same respective line as said Sll0248, or a functional equivalent or a homolog thereof as depicted in column 8 of Table II, application no. 6, preferably a homolog or functional equivalent as depicted in column 8 of Table II B, application no. 6, and being depicted in the same respective line as said Sll0248, and preferably the activity is increased plastidic, whereby the respective line discloses in column 7 the fine chemical leucine.

[43062] Accordingly, in one embodiment, the molecule which activity is to be increased in the process of the invention is the gene product with an activity as a “flavodoxin”, preferably it is the molecule of section (a) or (b) of this paragraph.

[43063] In particular, it was observed that in plants, especially in Arabidopsis thaliana, increasing or generating the activity of a gene product plastidic with the activity of a “flavodoxin”, preferably being encoded by a gene comprising the nucleic acid sequence SEQ ID NO. 49143, preferably the coding region thereof, conferred the production of or the increase in leucine compared with the wild type control.

[43064] The nucleic acid sequence of Sll0290 from Synechocystis sp., e.g. as shown in the respective line in column 5 of Table I, application no. 6, has been published in C. And the activity of the gene product thereof is the activity of polyphosphate kinase.

[43065] Accordingly, in one embodiment, the process of the present invention for producing isoleucine in a non-human organism, like a microorganism or a plant or a part thereof, comprises increasing or generating the activity of a gene product with the activity of a gene product conferring the activity of “polyphosphate kinase”, especially from Synechocystis sp. or its functional equivalent or its homolog, e.g. the increase of
[43066] (a) a gene product of a gene comprising the nucleic acid molecule as shown in the respective line in column 5 of Table I (whereby the respective line discloses in column 7 the fine chemical isoleucine), application no. 6, preferably the coding region thereof, or a homolog or a fragment thereof, and being depicted in the same respective line as said Sll0290, or a functional equivalent or a homolog thereof as shown in column 8 of Table I, application no. 6, preferably the coding region thereof, particularly a homolog or functional equivalent as shown in column 8 of Table I B, application no. 6, and being depicted in the same respective line as said Sll0290, and preferably the activity is increased non-targeted, or
[43067] (b) a polypeptide comprising a polypeptide, a consensus sequence or at least a polypeptide motif as shown in the respective line in column 5 of Table II or in column 8 of Table IV, application no. 6, respectively, and being depicted in the same respective line as said Sll0290, or a functional equivalent or a homolog thereof as depicted in column 8 of Table II, application no. 6, preferably a homolog or functional equivalent as depicted in column 8 of Table II B, application no. 6, and being depicted in the same respective line as said Sll0290, and preferably the activity is increased non-targeted, whereby the respective line discloses in column 7 the fine chemical isoleucine.

[43068] Accordingly, in one embodiment, the molecule which activity is to be increased in the process of the invention is the gene product with an activity as a “polyphosphate kinase”, preferably it is the molecule of section (a) or (b) of this paragraph.

[43069] In particular, it was observed that in plants, especially in Arabidopsis thaliana, increasing or generating the activity of a gene product non-targeted with the activity of a “polyphosphate kinase”, preferably being encoded by a gene comprising the nucleic acid sequence SEQ ID NO. 49828, preferably the coding region thereof, conferred the production of or the increase in isoleucine compared with the wild type control.

[43070] The nucleic acid sequence of Sll0290 from Synechocystis sp., e.g. as shown in the respective line in column 5 of Table I, application no. 6, has been published in C. And the activity of the gene product thereof is the activity of polyphosphate kinase.

[43071] Accordingly, in one embodiment, the process of the present invention for producing leucine in a non-human organism, like a microorganism or a plant or a part thereof, comprises increasing or generating the activity of a gene product with the activity of a gene product conferring the activity of “polyphosphate kinase”, especially from Synechocystis sp. or its functional equivalent or its homolog, e.g. the increase of
[43072] (a) a gene product of a gene comprising the nucleic acid molecule as shown in the respective line in column 5 of Table I (whereby the respective line discloses in column 7 the fine chemical leucine), application no. 6, preferably the coding region thereof, or a homolog or a fragment thereof, and being depicted in the same respective line as said Sll0290, or a functional equivalent or a homolog thereof as shown in column 8 of Table I, application no. 6, preferably the coding region thereof, particularly a homolog or functional equivalent as shown in column 8 of Table I B, application no. 6, and being depicted in the same respective line as said Sll0290, and preferably the activity is increased non-targeted, or
[43073] (b) a polypeptide comprising a polypeptide, a consensus sequence or at least a polypeptide motif as shown in the respective line in column 5 of Table II or in column 8 of Table IV, application no. 6, respectively, and being depicted in the same respective line as said Sll0290, or a functional equivalent or a homolog thereof as depicted in column 8 of Table II, application no. 6, preferably a homolog or functional equivalent as depicted in column 8 of Table II B, application no. 6, and being depicted in the same respective line as said Sll0290, and preferably the activity is increased non-targeted, whereby the respective line discloses in column 7 the fine chemical leucine.

[43074] Accordingly, in one embodiment, the molecule which activity is to be increased in the process of the invention is the gene product with an activity as a “polyphosphate kinase”, preferably it is the molecule of section (a) or (b) of this paragraph.

[43075] In particular, it was observed that in plants, especially in Arabidopsis thaliana, increasing or generating the activity of a gene product non-targeted with the activity of a “polyphosphate kinase”, preferably being encoded by a gene comprising the nucleic acid sequence SEQ ID NO. 49828, preferably the coding region thereof, conferred the production of or the increase in leucine compared with the wild type control.

[43076] The nucleic acid sequence of Sll0290 from Synechocystis sp., e.g. as shown in the respective line in column 5 of Table I, application no. 6, has been published in C. And the activity of the gene product thereof is the activity of polyphosphate kinase.

[43077] Accordingly, in one embodiment, the process of the present invention for producing valine in a non-human organism, like a microorganism or a plant or a part thereof, comprises increasing or generating the activity of a gene product with the activity of a gene product conferring the activity of “polyphosphate kinase”, especially from Synechocystis sp. or its functional equivalent or its homolog, e.g. the increase of
[43078] (a) a gene product of a gene comprising the nucleic acid molecule as shown in the respective line in column 5 of Table I (whereby the respective line discloses in column 7 the fine chemical valine), application no. 6, preferably the coding region thereof, or a homolog or a fragment thereof, and being depicted in the same respective line as said Sll0290, or a functional equivalent or a homolog thereof as shown in column 8 of Table I, application no. 6, preferably the coding region thereof, particularly a homolog or functional equivalent as shown in column 8 of Table I B, application no. 6, and being depicted in the same respective line as said Sll0290, and preferably the activity is increased non-targeted, or
[43079] (b) a polypeptide comprising a polypeptide, a consensus sequence or at least a polypeptide motif as shown in the respective line in column 5 of Table II or in column 8 of Table IV, application no. 6, respectively, and being depicted in the same respective line as said Sll0290, or a functional equivalent or a homolog thereof as depicted in column 8 of Table II, application no. 6, preferably a homolog or functional equivalent as depicted in column 8 of Table II B, application no. 6, and being depicted in the same respective line as said Sll0290, and preferably the activity is increased non-targeted, whereby the respective line discloses in column 7 the fine chemical valine.

[43080] Accordingly, in one embodiment, the molecule which activity is to be increased in the process of the invention is the gene product with an activity as a “polyphosphate kinase”, preferably it is the molecule of section (a) or (b) of this paragraph.

[43081] In particular, it was observed that in plants, especially in Arabidopsis thaliana, increasing or generating the activity of a gene product non-targeted with the activity of a “polyphosphate kinase”, preferably being encoded by a gene comprising the nucleic acid sequence SEQ ID NO. 49828, preferably the coding region thereof, conferred the production of or the increase in valine compared with the wild type control.

[43082] The nucleic acid sequence of Sll0368 from Synechocystis sp., e.g. as shown in the respective line in column 5 of Table I, application no. 6, has been published in C. And the activity of the gene product thereof is the activity of bifunctional protein (phosphoribosyltransferase and regulatory protein).

[43083] Accordingly, in one embodiment, the process of the present invention for producing valine in a non-human organism, like a microorganism or a plant or a part thereof, comprises increasing or generating the activity of a gene product with the activity of a gene product conferring the activity of “bifunctional protein (phosphoribosyltransferase and regulatory protein)”, especially from Synechocystis sp. or its functional equivalent or its homolog, e.g. the increase of
[43084] (a) a gene product of a gene comprising the nucleic acid molecule as shown in the respective line in column 5 of Table I (whereby the respective line discloses in column 7 the fine chemical valine), application no. 6, preferably the coding region thereof, or a homolog or a fragment thereof, and being depicted in the same respective line as said Sll0368, or a functional equivalent or a homolog thereof as shown in column 8 of Table I, application no. 6, preferably the coding region thereof, particularly a homolog or functional equivalent as shown in column 8 of Table I B, application no. 6, and being depicted in the same respective line as said Sll0368, and preferably the activity is increased mitochondrial, or
[43085] (b) a polypeptide comprising a polypeptide, a consensus sequence or at least a polypeptide motif as shown in the respective line in column 5 of Table II or in column 8 of Table IV, application no. 6, respectively, and being depicted in the same respective line as said Sll0368, or a functional equivalent or a homolog thereof as depicted in column 8 of Table II, application no. 6, preferably a homolog or functional equivalent as depicted in column 8 of Table II B, application no. 6, and being depicted in the same respective line as said Sll0368, and preferably the activity is increased mitochondrial, whereby the respective line discloses in column 7 the fine chemical valine.

[43086] Accordingly, in one embodiment, the molecule which activity is to be increased in the process of the invention is the gene product with an activity as a “bifunctional protein (phosphoribosyltransferase and regulatory protein)”, preferably it is the molecule of section (a) or (b) of this paragraph.

[43087] In particular, it was observed that in plants, especially in Arabidopsis thaliana, increasing or generating the activity of a gene product mitochondrial with the activity of a “bifunctional protein (phosphoribosyltransferase and regulatory protein)”, preferably being encoded by a gene comprising the nucleic acid sequence SEQ ID NO. 106920, preferably the coding region thereof, conferred the production of or the increase in valine compared with the wild type control.

[43088] The nucleic acid sequence of Sll0420 from Synechocystis sp., e.g. as shown in the respective line in column 5 of Table I, application no. 6, has been published in C. And the activity of the gene product thereof is the activity of urease subunit.

[43089] Accordingly, in one embodiment, the process of the present invention for producing isoleucine in a non-human organism, like a microorganism or a plant or a part thereof, comprises increasing or generating the activity of a gene product with the activity of a gene product conferring the activity of “urease subunit”, especially from Synechocystis sp. or its functional equivalent or its homolog, e.g. the increase of
[43090] (a) a gene product of a gene comprising the nucleic acid molecule as shown in the respective line in column 5 of Table I (whereby the respective line discloses in column 7 the fine chemical isoleucine), application no. 6, preferably the coding region thereof, or a homolog or a fragment thereof, and being depicted in the same respective line as said Sll0420, or a functional equivalent or a homolog thereof as shown in column 8 of Table I, application no. 6, preferably the coding region thereof, particularly a homolog or functional equivalent as shown in column 8 of Table I B, application no. 6, and being depicted in the same respective line as said Sll0420, and preferably the activity is increased non-targeted, or
[43091] (b) a polypeptide comprising a polypeptide, a consensus sequence or at least a polypeptide motif as shown in the respective line in column 5 of Table II or in column 8 of Table IV, application no. 6, respectively, and being depicted in the same respective line as said Sll0420, or a functional equivalent or a homolog thereof as depicted in column 8 of Table II, application no. 6, preferably a homolog or functional equivalent as depicted in column 8 of Table II B, application no. 6, and being depicted in the same respective line as said Sll0420, and preferably the activity is increased non-targeted, whereby the respective line discloses in column 7 the fine chemical isoleucine.

[43092] Accordingly, in one embodiment, the molecule which activity is to be increased in the process of the invention is the gene product with an activity as a “urease subunit”, preferably it is the molecule of section (a) or (b) of this paragraph.

[43093] In particular, it was observed that in plants, especially in Arabidopsis thaliana, increasing or generating the activity of a gene product non-targeted with the activity of a “urease subunit”, preferably being encoded by a gene comprising the nucleic acid sequence SEQ ID NO. 50104, preferably the coding region thereof, conferred the production of or the increase in isoleucine compared with the wild type control.

[43094] The nucleic acid sequence of Sll0521 from Synechocystis sp., e.g. as shown in the respective line in column 5 of Table I, application no. 6, has been published in C. And the activity of the gene product thereof is the activity of NAD(P)H-quinone oxidoreductase subunit.

[43095] Accordingly, in one embodiment, the process of the present invention for producing valine in a non-human organism, like a microorganism or a plant or a part thereof, comprises increasing or generating the activity of a gene product with the activity of a gene product conferring the activity of “NAD(P)H-quinone oxidoreductase subunit”, especially from Synechocystis sp. or its functional equivalent or its homolog, e.g. the increase of
[43096] (a) a gene product of a gene comprising the nucleic acid molecule as shown in the respective line in column 5 of Table I (whereby the respective line discloses in column 7 the fine chemical valine), application no. 6, preferably the coding region thereof, or a homolog or a fragment thereof, and being depicted in the same respective line as said Sll0521, or a functional equivalent or a homolog thereof as shown in column 8 of Table I, application no. 6, preferably the coding region thereof, particularly a homolog or functional equivalent as shown in column 8 of Table I B, application no. 6, and being depicted in the same respective line as said Sll0521, and preferably the activity is increased plastidic, or
[43097] (b) a polypeptide comprising a polypeptide, a consensus sequence or at least a polypeptide motif as shown in the respective line in column 5 of Table II or in column 8 of Table IV, application no. 6, respectively, and being depicted in the same respective line as said Sll0521, or a functional equivalent or a homolog thereof as depicted in column 8 of Table II, application no. 6, preferably a homolog or functional equivalent as depicted in column 8 of Table II B, application no. 6, and being depicted in the same respective line as said Sll0521, and preferably the activity is increased plastidic, whereby the respective line discloses in column 7 the fine chemical valine.

[43098] Accordingly, in one embodiment, the molecule which activity is to be increased in the process of the invention is the gene product with an activity as a “NAD(P)H-quinone oxidoreductase subunit”, preferably it is the molecule of section (a) or (b) of this paragraph.

[43099] In particular, it was observed that in plants, especially in Arabidopsis thaliana, increasing or generating the activity of a gene product plastidic with the activity of a “NAD(P)H-quinone oxidoreductase subunit”, preferably being encoded by a gene comprising the nucleic acid sequence SEQ ID NO. 50339, preferably the coding region thereof, conferred the production of or the increase in valine compared with the wild type control.

[43100] The nucleic acid sequence of Sll0816 from Synechocystis sp., e.g. as shown in the respective line in column 5 of Table I, application no. 6, has been published in C. And the activity of the gene product thereof is the activity of oxireductase.

[43101] Accordingly, in one embodiment, the process of the present invention for producing isoleucine in a non-human organism, like a microorganism or a plant or a part thereof, comprises increasing or generating the activity of a gene product with the activity of a gene product conferring the activity of “oxireductase”, especially from Synechocystis sp. or its functional equivalent or its homolog, e.g. the increase of
[43102] (a) a gene product of a gene comprising the nucleic acid molecule as shown in the respective line in column 5 of Table I (whereby the respective line discloses in column 7 the fine chemical isoleucine), application no. 6, preferably the coding region thereof, or a homolog or a fragment thereof, and being depicted in the same respective line as said Sll0816, or a functional equivalent or a homolog thereof as shown in column 8 of Table I, application no. 6, preferably the coding region thereof, particularly a homolog or functional equivalent as shown in column 8 of Table I B, application no. 6, and being depicted in the same respective line as said Sll0816, and preferably the activity is increased non-targeted, or
[43103] (b) a polypeptide comprising a polypeptide, a consensus sequence or at least a polypeptide motif as shown in the respective line in column 5 of Table II or in column 8 of Table IV, application no. 6, respectively, and being depicted in the same respective line as said Sll0816, or a functional equivalent or a homolog thereof as depicted in column 8 of Table II, application no. 6, preferably a homolog or functional equivalent as depicted in column 8 of Table II B, application no. 6, and being depicted in the same respective line as said Sll0816, and preferably the activity is increased non-targeted, whereby the respective line discloses in column 7 the fine chemical isoleucine.

[43104] Accordingly, in one embodiment, the molecule which activity is to be increased in the process of the invention is the gene product with an activity as a “oxireductase”, preferably it is the molecule of section (a) or (b) of this paragraph.

[43105] In particular, it was observed that in plants, especially in Arabidopsis thaliana, increasing or generating the activity of a gene product non-targeted with the activity of a “oxireductase”, preferably being encoded by a gene comprising the nucleic acid sequence SEQ ID NO. 51198, preferably the coding region thereof, conferred the production of or the increase in isoleucine compared with the wild type control.

[43106] The nucleic acid sequence of Sll0833 from Synechocystis sp., e.g. as shown in the respective line in column 5 of Table I, application no. 6, has been published in C. And the activity of the gene product thereof is the activity of binding-protein-dependent transport systems inner membrane component.

[43107] Accordingly, in one embodiment, the process of the present invention for producing isoleucine in a non-human organism, like a microorganism or a plant or a part thereof, comprises increasing or generating the activity of a gene product with the activity of a gene product conferring the activity of “binding-protein-dependent transport systems inner membrane component”, especially from Synechocystis sp. or its functional equivalent or its homolog, e.g. the increase of
[43108] (a) a gene product of a gene comprising the nucleic acid molecule as shown in the respective line in column 5 of Table I (whereby the respective line discloses in column 7 the fine chemical isoleucine), application no. 6, preferably the coding region thereof, or a homolog or a fragment thereof, and being depicted in the same respective line as said Sll0833, or a functional equivalent or a homolog thereof as shown in column 8 of Table I, application no. 6, preferably the coding region thereof, particularly a homolog or functional equivalent as shown in column 8 of Table I B, application no. 6, and being depicted in the same respective line as said Sll0833, and preferably the activity is increased non-targeted, or
[43109] (b) a polypeptide comprising a polypeptide, a consensus sequence or at least a polypeptide motif as shown in the respective line in column 5 of Table II or in column 8 of Table IV, application no. 6, respectively, and being depicted in the same respective line as said Sll0833, or a functional equivalent or a homolog thereof as depicted in column 8 of Table II, application no. 6, preferably a homolog or functional equivalent as depicted in column 8 of Table II B, application no. 6, and being depicted in the same respective line as said Sll0833, and preferably the activity is increased non-targeted, whereby the respective line discloses in column 7 the fine chemical isoleucine.

[43110] Accordingly, in one embodiment, the molecule which activity is to be increased in the process of the invention is the gene product with an activity as a “binding-protein-dependent transport systems inner membrane component”, preferably it is the molecule of section (a) or (b) of this paragraph.

[43111] In particular, it was observed that in plants, especially in Arabidopsis thaliana, increasing or generating the activity of a gene product non-targeted with the activity of a “binding-protein-dependent transport systems inner membrane component”, preferably being encoded by a gene comprising the nucleic acid sequence SEQ ID NO. 101707, preferably the coding region thereof, conferred the production of or the increase in isoleucine compared with the wild type control.

[43112] The nucleic acid sequence of Sll1032 from Synechocystis sp., e.g. as shown in the respective line in column 5 of Table I, application no. 6, has been published in C. And the activity of the gene product thereof is the activity of sll1032-protein.

[43113] Accordingly, in one embodiment, the process of the present invention for producing valine in a non-human organism, like a microorganism or a plant or a part thereof, comprises increasing or generating the activity of a gene product with the activity of a gene product conferring the activity of “sll1032-protein”, especially from Synechocystis sp. or its functional equivalent or its homolog, e.g. the increase of
[43114] (a) a gene product of a gene comprising the nucleic acid molecule as shown in the respective line in column 5 of Table I (whereby the respective line discloses in column 7 the fine chemical valine), application no. 6, preferably the coding region thereof, or a homolog or a fragment thereof, and being depicted in the same respective line as said Sll1032, or a functional equivalent or a homolog thereof as shown in column 8 of Table I, application no. 6, preferably the coding region thereof, particularly a homolog or functional equivalent as shown in column 8 of Table I B, application no. 6, and being depicted in the same respective line as said Sll1032, and preferably the activity is increased mitochondrial, or
[43115] (b) a polypeptide comprising a polypeptide, a consensus sequence or at least a polypeptide motif as shown in the respective line in column 5 of Table II or in column 8 of Table IV, application no. 6, respectively, and being depicted in the same respective line as said Sll1032, or a functional equivalent or a homolog thereof as depicted in column 8 of Table II, application no. 6, preferably a homolog or functional equivalent as depicted in column 8 of Table II B, application no. 6, and being depicted in the same respective line as said Sll1032, and preferably the activity is increased mitochondrial, whereby the respective line discloses in column 7 the fine chemical valine.

[43116] Accordingly, in one embodiment, the molecule which activity is to be increased in the process of the invention is the gene product with an activity as a “sll1032-protein”, preferably it is the molecule of section (a) or (b) of this paragraph.

[43117] In particular, it was observed that in plants, especially in Arabidopsis thaliana, increasing or generating the activity of a gene product mitochondrial with the activity of a “sll1032-protein”, preferably being encoded by a gene comprising the nucleic acid sequence SEQ ID NO. 85723, preferably the coding region thereof, conferred the production of or the increase in valine compared with the wild type control.

[43118] The nucleic acid sequence of Sll1393 from Synechocystis sp., e.g. as shown in the respective line in column 5 of Table I, application no. 6, has been published in C. And the activity of the gene product thereof is the activity of glycogen (starch) synthase.

[43119] Accordingly, in one embodiment, the process of the present invention for producing isoleucine in a non-human organism, like a microorganism or a plant or a part thereof, comprises increasing or generating the activity of a gene product with the activity of a gene product conferring the activity of “glycogen (starch) synthase”, especially from Synechocystis sp. or its functional equivalent or its homolog, e.g. the increase of
[43120] (a) a gene product of a gene comprising the nucleic acid molecule as shown in the respective line in column 5 of Table I (whereby the respective line discloses in column 7 the fine chemical isoleucine), application no. 6, preferably the coding region thereof, or a homolog or a fragment thereof, and being depicted in the same respective line as said Sll1393, or a functional equivalent or a homolog thereof as shown in column 8 of Table I, application no. 6, preferably the coding region thereof, particularly a homolog or functional equivalent as shown in column 8 of Table I B, application no. 6, and being depicted in the same respective line as said Sll1393, and preferably the activity is increased non-targeted, or
[43121] (b) a polypeptide comprising a polypeptide, a consensus sequence or at least a polypeptide motif as shown in the respective line in column 5 of Table II or in column 8 of Table IV, application no. 6, respectively, and being depicted in the same respective line as said Sll1393, or a functional equivalent or a homolog thereof as depicted in column 8 of Table II, application no. 6, preferably a homolog or functional equivalent as depicted in column 8 of Table II B, application no. 6, and being depicted in the same respective line as said Sll1393, and preferably the activity is increased non-targeted, whereby the respective line discloses in column 7 the fine chemical isoleucine.

[43122] Accordingly, in one embodiment, the molecule which activity is to be increased in the process of the invention is the gene product with an activity as a “glycogen (starch) synthase”, preferably it is the molecule of section (a) or (b) of this paragraph.

[43123] In particular, it was observed that in plants, especially in Arabidopsis thaliana, increasing or generating the activity of a gene product non-targeted with the activity of a “glycogen (starch) synthase”, preferably being encoded by a gene comprising the nucleic acid sequence SEQ ID NO. 53456, preferably the coding region thereof, conferred the production of or the increase in isoleucine compared with the wild type control.

[43124] The nucleic acid sequence of Sll1393 from Synechocystis sp., e.g. as shown in the respective line in column 5 of Table I, application no. 6, has been published in C. And the activity of the gene product thereof is the activity of glycogen (starch) synthase.

[43125] Accordingly, in one embodiment, the process of the present invention for producing leucine in a non-human organism, like a microorganism or a plant or a part thereof, comprises increasing or generating the activity of a gene product with the activity of a gene product conferring the activity of “glycogen (starch) synthase”, especially from Synechocystis sp. or its functional equivalent or its homolog, e.g. the increase of
[43126] (a) a gene product of a gene comprising the nucleic acid molecule as shown in the respective line in column 5 of Table I (whereby the respective line discloses in column 7 the fine chemical leucine), application no. 6, preferably the coding region thereof, or a homolog or a fragment thereof, and being depicted in the same respective line as said Sll1393, or a functional equivalent or a homolog thereof as shown in column 8 of Table I, application no. 6, preferably the coding region thereof, particularly a homolog or functional equivalent as shown in column 8 of Table I B, application no. 6, and being depicted in the same respective line as said Sll1393, and preferably the activity is increased non-targeted, or
[43127] (b) a polypeptide comprising a polypeptide, a consensus sequence or at least a polypeptide motif as shown in the respective line in column 5 of Table II or in column 8 of Table IV, application no. 6, respectively, and being depicted in the same respective line as said Sll1393, or a functional equivalent or a homolog thereof as depicted in column 8 of Table II, application no. 6, preferably a homolog or functional equivalent as depicted in column 8 of Table II B, application no. 6, and being depicted in the same respective line as said Sll1393, and preferably the activity is increased non-targeted, whereby the respective line discloses in column 7 the fine chemical leucine.

[43128] Accordingly, in one embodiment, the molecule which activity is to be increased in the process of the invention is the gene product with an activity as a “glycogen (starch) synthase”, preferably it is the molecule of section (a) or (b) of this paragraph.

[43129] In particular, it was observed that in plants, especially in Arabidopsis thaliana, increasing or generating the activity of a gene product non-targeted with the activity of a “glycogen (starch) synthase”, preferably being encoded by a gene comprising the nucleic acid sequence SEQ ID NO. 53456, preferably the coding region thereof, conferred the production of or the increase in leucine compared with the wild type control.

[43130] The nucleic acid sequence of Sll1393 from Synechocystis sp., e.g. as shown in the respective line in column 5 of Table I, application no. 6, has been published in C. And the activity of the gene product thereof is the activity of glycogen (starch) synthase.

[43131] Accordingly, in one embodiment, the process of the present invention for producing valine in a non-human organism, like a microorganism or a plant or a part thereof, comprises increasing or generating the activity of a gene product with the activity of a gene product conferring the activity of “glycogen (starch) synthase”, especially from Synechocystis sp. or its functional equivalent or its homolog, e.g. the increase of
[43132] (a) a gene product of a gene comprising the nucleic acid molecule as shown in the respective line in column 5 of Table I (whereby the respective line discloses in column 7 the fine chemical valine), application no. 6, preferably the coding region thereof, or a homolog or a fragment thereof, and being depicted in the same respective line as said Sll1393, or a functional equivalent or a homolog thereof as shown in column 8 of Table I, application no. 6, preferably the coding region thereof, particularly a homolog or functional equivalent as shown in column 8 of Table I B, application no. 6, and being depicted in the same respective line as said Sll1393, and preferably the activity is increased non-targeted, or
[43133] (b) a polypeptide comprising a polypeptide, a consensus sequence or at least a polypeptide motif as shown in the respective line in column 5 of Table II or in column 8 of Table IV, application no. 6, respectively, and being depicted in the same respective line as said Sll1393, or a functional equivalent or a homolog thereof as depicted in column 8 of Table II, application no. 6, preferably a homolog or functional equivalent as depicted in column 8 of Table II B, application no. 6, and being depicted in the same respective line as said Sll1393, and preferably the activity is increased non-targeted, whereby the respective line discloses in column 7 the fine chemical valine.

[43134] Accordingly, in one embodiment, the molecule which activity is to be increased in the process of the invention is the gene product with an activity as a “glycogen (starch) synthase”, preferably it is the molecule of section (a) or (b) of this paragraph.

[43135] In particular, it was observed that in plants, especially in Arabidopsis thaliana, increasing or generating the activity of a gene product non-targeted with the activity of a “glycogen (starch) synthase”, preferably being encoded by a gene comprising the nucleic acid sequence SEQ ID NO. 53456, preferably the coding region thereof, conferred the production of or the increase in valine compared with the wild type control.

[43136] The nucleic acid sequence of Sll1455 from Synechocystis sp., e.g. as shown in the respective line in column 5 of Table I, application no. 6, has been published in C. And the activity of the gene product thereof is the activity of sll1455-protein.

[43137] Accordingly, in one embodiment, the process of the present invention for producing valine in a non-human organism, like a microorganism or a plant or a part thereof, comprises increasing or generating the activity of a gene product with the activity of a gene product conferring the activity of “sll1455-protein”, especially from Synechocystis sp. or its functional equivalent or its homolog, e.g. the increase of
[43138] (a) a gene product of a gene comprising the nucleic acid molecule as shown in the respective line in column 5 of Table I (whereby the respective line discloses in column 7 the fine chemical valine), application no. 6, preferably the coding region thereof, or a homolog or a fragment thereof, and being depicted in the same respective line as said Sll1455, or a functional equivalent or a homolog thereof as shown in column 8 of Table I, application no. 6, preferably the coding region thereof, particularly a homolog or functional equivalent as shown in column 8 of Table I B, application no. 6, and being depicted in the same respective line as said Sll1455, and preferably the activity is increased plastidic, or
[43139] (b) a polypeptide comprising a polypeptide, a consensus sequence or at least a polypeptide motif as shown in the respective line in column 5 of Table II or in column 8 of Table IV, application no. 6, respectively, and being depicted in the same respective line as said Sll1455, or a functional equivalent or a homolog thereof as depicted in column 8 of Table II, application no. 6, preferably a homolog or functional equivalent as depicted in column 8 of Table II B, application no. 6, and being depicted in the same respective line as said Sll1455, and preferably the activity is increased plastidic, whereby the respective line discloses in column 7 the fine chemical valine.

[43140] Accordingly, in one embodiment, the molecule which activity is to be increased in the process of the invention is the gene product with an activity as a “sll1455-protein”, preferably it is the molecule of section (a) or (b) of this paragraph.

[43141] In particular, it was observed that in plants, especially in Arabidopsis thaliana, increasing or generating the activity of a gene product plastidic with the activity of a “sll1455-protein”, preferably being encoded by a gene comprising the nucleic acid sequence SEQ ID NO. 107100, preferably the coding region thereof, conferred the production of or the increase in valine compared with the wild type control.

[43142] The nucleic acid sequence of Sll1498 from Synechocystis sp., e.g. as shown in the respective line in column 5 of Table I, application no. 6, has been published in C. And the activity of the gene product thereof is the activity of carbamoyl-phosphate synthase subunit.

[43143] Accordingly, in one embodiment, the process of the present invention for producing isoleucine in a non-human organism, like a microorganism or a plant or a part thereof, comprises increasing or generating the activity of a gene product with the activity of a gene product conferring the activity of “carbamoyl-phosphate synthase subunit”, especially from Synechocystis sp. or its functional equivalent or its homolog, e.g. the increase of
[43144] (a) a gene product of a gene comprising the nucleic acid molecule as shown in the respective line in column 5 of Table I (whereby the respective line discloses in column 7 the fine chemical isoleucine), application no. 6, preferably the coding region thereof, or a homolog or a fragment thereof, and being depicted in the same respective line as said Sll1498, or a functional equivalent or a homolog thereof as shown in column 8 of Table I, application no. 6, preferably the coding region thereof, particularly a homolog or functional equivalent as shown in column 8 of Table I B, application no. 6, and being depicted in the same respective line as said Sll1498, and preferably the activity is increased plastidic, or
[43145] (b) a polypeptide comprising a polypeptide, a consensus sequence or at least a polypeptide motif as shown in the respective line in column 5 of Table II or in column 8 of Table IV, application no. 6, respectively, and being depicted in the same respective line as said Sll1498, or a functional equivalent or a homolog thereof as depicted in column 8 of Table II, application no. 6, preferably a homolog or functional equivalent as depicted in column 8 of Table II B, application no. 6, and being depicted in the same respective line as said Sll1498, and preferably the activity is increased plastidic, whereby the respective line discloses in column 7 the fine chemical isoleucine.

[43146] Accordingly, in one embodiment, the molecule which activity is to be increased in the process of the invention is the gene product with an activity as a “carbamoyl-phosphate synthase subunit”, preferably it is the molecule of section (a) or (b) of this paragraph.

[43147] In particular, it was observed that in plants, especially in Arabidopsis thaliana, increasing or generating the activity of a gene product plastidic with the activity of a “carbamoyl-phosphate synthase subunit”, preferably being encoded by a gene comprising the nucleic acid sequence SEQ ID NO. 95047, preferably the coding region thereof, conferred the production of or the increase in isoleucine compared with the wild type control.

[43148] The nucleic acid sequence of Sll1498 from Synechocystis sp., e.g. as shown in the respective line in column 5 of Table I, application no. 6, has been published in C. And the activity of the gene product thereof is the activity of carbamoyl-phosphate synthase subunit.

[43149] Accordingly, in one embodiment, the process of the present invention for producing leucine in a non-human organism, like a microorganism or a plant or a part thereof, comprises increasing or generating the activity of a gene product with the activity of a gene product conferring the activity of “carbamoyl-phosphate synthase subunit”, especially from Synechocystis sp. or its functional equivalent or its homolog, e.g. the increase of
[43150] (a) a gene product of a gene comprising the nucleic acid molecule as shown in the respective line in column 5 of Table I (whereby the respective line discloses in column 7 the fine chemical leucine), application no. 6, preferably the coding region thereof, or a homolog or a fragment thereof, and being depicted in the same respective line as said Sll1498, or a functional equivalent or a homolog thereof as shown in column 8 of Table I, application no. 6, preferably the coding region thereof, particularly a homolog or functional equivalent as shown in column 8 of Table I B, application no. 6, and being depicted in the same respective line as said Sll1498, and preferably the activity is increased plastidic, or
[43151] (b) a polypeptide comprising a polypeptide, a consensus sequence or at least a polypeptide motif as shown in the respective line in column 5 of Table II or in column 8 of Table IV, application no. 6, respectively, and being depicted in the same respective line as said Sll1498, or a functional equivalent or a homolog thereof as depicted in column 8 of Table II, application no. 6, preferably a homolog or functional equivalent as depicted in column 8 of Table II B, application no. 6, and being depicted in the same respective line as said Sll1498, and preferably the activity is increased plastidic, whereby the respective line discloses in column 7 the fine chemical leucine.

[43152] Accordingly, in one embodiment, the molecule which activity is to be increased in the process of the invention is the gene product with an activity as a “carbamoyl-phosphate synthase subunit”, preferably it is the molecule of section (a) or (b) of this paragraph.

[43153] In particular, it was observed that in plants, especially in Arabidopsis thaliana, increasing or generating the activity of a gene product plastidic with the activity of a “carbamoyl-phosphate synthase subunit”, preferably being encoded by a gene comprising the nucleic acid sequence SEQ ID NO. 95047, preferably the coding region thereof, conferred the production of or the increase in leucine compared with the wild type control.

[43154] The nucleic acid sequence of Sll1761 from Synechocystis sp., e.g. as shown in the respective line in column 5 of Table I, application no. 6, has been published in C. And the activity of the gene product thereof is the activity of sll1761-protein.

[43155] Accordingly, in one embodiment, the process of the present invention for producing isoleucine in a non-human organism, like a microorganism or a plant or a part thereof, comprises increasing or generating the activity of a gene product with the activity of a gene product conferring the activity of “sll1761-protein”, especially from Synechocystis sp. or its functional equivalent or its homolog, e.g. the increase of
[43156] (a) a gene product of a gene comprising the nucleic acid molecule as shown in the respective line in column 5 of Table I (whereby the respective line discloses in column 7 the fine chemical isoleucine), application no. 6, preferably the coding region thereof, or a homolog or a fragment thereof, and being depicted in the same respective line as said Sll1761, or a functional equivalent or a homolog thereof as shown in column 8 of Table I, application no. 6, preferably the coding region thereof, particularly a homolog or functional equivalent as shown in column 8 of Table I B, application no. 6, and being depicted in the same respective line as said Sll1761, and preferably the activity is increased non-targeted, or
[43157] (b) a polypeptide comprising a polypeptide, a consensus sequence or at least a polypeptide motif as shown in the respective line in column 5 of Table II or in column 8 of Table IV, application no. 6, respectively, and being depicted in the same respective line as said Sll1761, or a functional equivalent or a homolog thereof as depicted in column 8 of Table II, application no. 6, preferably a homolog or functional equivalent as depicted in column 8 of Table II B, application no. 6, and being depicted in the same respective line as said Sll1761, and preferably the activity is increased non-targeted, whereby the respective line discloses in column 7 the fine chemical isoleucine.

[43158] Accordingly, in one embodiment, the molecule which activity is to be increased in the process of the invention is the gene product with an activity as a “sll1761-protein”, preferably it is the molecule of section (a) or (b) of this paragraph.

[43159] In particular, it was observed that in plants, especially in Arabidopsis thaliana, increasing or generating the activity of a gene product non-targeted with the activity of a “sll1761-protein”, preferably being encoded by a gene comprising the nucleic acid sequence SEQ ID NO. 55379, preferably the coding region thereof, conferred the production of or the increase in isoleucine compared with the wild type control.

[43160] The nucleic acid sequence of Sll1761 from Synechocystis sp., e.g. as shown in the respective line in column 5 of Table I, application no. 6, has been published in C. And the activity of the gene product thereof is the activity of sll1761-protein.

[43161] Accordingly, in one embodiment, the process of the present invention for producing leucine in a non-human organism, like a microorganism or a plant or a part thereof, comprises increasing or generating the activity of a gene product with the activity of a gene product conferring the activity of “sll1761-protein”, especially from Synechocystis sp. or its functional equivalent or its homolog, e.g. the increase of
[43162] (a) a gene product of a gene comprising the nucleic acid molecule as shown in the respective line in column 5 of Table I (whereby the respective line discloses in column 7 the fine chemical leucine), application no. 6, preferably the coding region thereof, or a homolog or a fragment thereof, and being depicted in the same respective line as said Sll1761, or a functional equivalent or a homolog thereof as shown in column 8 of Table I, application no. 6, preferably the coding region thereof, particularly a homolog or functional equivalent as shown in column 8 of Table I B, application no. 6, and being depicted in the same respective line as said Sll1761, and preferably the activity is increased non-targeted, or
[43163] (b) a polypeptide comprising a polypeptide, a consensus sequence or at least a polypeptide motif as shown in the respective line in column 5 of Table II or in column 8 of Table IV, application no. 6, respectively, and being depicted in the same respective line as said Sll1761, or a functional equivalent or a homolog thereof as depicted in column 8 of Table II, application no. 6, preferably a homolog or functional equivalent as depicted in column 8 of Table II B, application no. 6, and being depicted in the same respective line as said Sll1761, and preferably the activity is increased non-targeted, whereby the respective line discloses in column 7 the fine chemical leucine.

[43164] Accordingly, in one embodiment, the molecule which activity is to be increased in the process of the invention is the gene product with an activity as a “sll1761-protein”, preferably it is the molecule of section (a) or (b) of this paragraph.

[43165] In particular, it was observed that in plants, especially in Arabidopsis thaliana, increasing or generating the activity of a gene product non-targeted with the activity of a “sll1761-protein”, preferably being encoded by a gene comprising the nucleic acid sequence SEQ ID NO. 55379, preferably the coding region thereof, conferred the production of or the increase in leucine compared with the wild type control.

[43166] The nucleic acid sequence of Sll1815 from Synechocystis sp., e.g. as shown in the respective line in column 5 of Table I, application no. 6, has been published in C. And the activity of the gene product thereof is the activity of adenylate kinase.

[43167] Accordingly, in one embodiment, the process of the present invention for producing isoleucine in a non-human organism, like a microorganism or a plant or a part thereof, comprises increasing or generating the activity of a gene product with the activity of a gene product conferring the activity of “adenylate kinase”, especially from Synechocystis sp. or its functional equivalent or its homolog, e.g. the increase of
[43168] (a) a gene product of a gene comprising the nucleic acid molecule as shown in the respective line in column 5 of Table I (whereby the respective line discloses in column 7 the fine chemical isoleucine), application no. 6, preferably the coding region thereof, or a homolog or a fragment thereof, and being depicted in the same respective line as said Sll1815, or a functional equivalent or a homolog thereof as shown in column 8 of Table I, application no. 6, preferably the coding region thereof, particularly a homolog or functional equivalent as shown in column 8 of Table I B, application no. 6, and being depicted in the same respective line as said Sll1815, and preferably the activity is increased mitochondrial, or
[43169] (b) a polypeptide comprising a polypeptide, a consensus sequence or at least a polypeptide motif as shown in the respective line in column 5 of Table II or in column 8 of Table IV, application no. 6, respectively, and being depicted in the same respective line as said Sll1815, or a functional equivalent or a homolog thereof as depicted in column 8 of Table II, application no. 6, preferably a homolog or functional equivalent as depicted in column 8 of Table II B, application no. 6, and being depicted in the same respective line as said Sll1815, and preferably the activity is increased mitochondrial, whereby the respective line discloses in column 7 the fine chemical isoleucine.

[43170] Accordingly, in one embodiment, the molecule which activity is to be increased in the process of the invention is the gene product with an activity as a “adenylate kinase”, preferably it is the molecule of section (a) or (b) of this paragraph.

[43171] In particular, it was observed that in plants, especially in Arabidopsis thaliana, increasing or generating the activity of a gene product mitochondrial with the activity of a “adenylate kinase”, preferably being encoded by a gene comprising the nucleic acid sequence SEQ ID NO. 85808, preferably the coding region thereof, conferred the production of or the increase in isoleucine compared with the wild type control.

[43172] The nucleic acid sequence of Sll1815 from Synechocystis sp., e.g. as shown in the respective line in column 5 of Table I, application no. 6, has been published in C. And the activity of the gene product thereof is the activity of adenylate kinase.

[43173] Accordingly, in one embodiment, the process of the present invention for producing leucine in a non-human organism, like a microorganism or a plant or a part thereof, comprises increasing or generating the activity of a gene product with the activity of a gene product conferring the activity of “adenylate kinase”, especially from Synechocystis sp. or its functional equivalent or its homolog, e.g. the increase of
[43174] (a) a gene product of a gene comprising the nucleic acid molecule as shown in the respective line in column 5 of Table I (whereby the respective line discloses in column 7 the fine chemical leucine), application no. 6, preferably the coding region thereof, or a homolog or a fragment thereof, and being depicted in the same respective line as said Sll1815, or a functional equivalent or a homolog thereof as shown in column 8 of Table I, application no. 6, preferably the coding region thereof, particularly a homolog or functional equivalent as shown in column 8 of Table I B, application no. 6, and being depicted in the same respective line as said Sll1815, and preferably the activity is increased mitochondrial, or
[43175] (b) a polypeptide comprising a polypeptide, a consensus sequence or at least a polypeptide motif as shown in the respective line in column 5 of Table II or in column 8 of Table IV, application no. 6, respectively, and being depicted in the same respective line as said Sll1815, or a functional equivalent or a homolog thereof as depicted in column 8 of Table II, application no. 6, preferably a homolog or functional equivalent as depicted in column 8 of Table II B, application no. 6, and being depicted in the same respective line as said Sll1815, and preferably the activity is increased mitochondrial, whereby the respective line discloses in column 7 the fine chemical leucine.

[43176] Accordingly, in one embodiment, the molecule which activity is to be increased in the process of the invention is the gene product with an activity as a “adenylate kinase”, preferably it is the molecule of section (a) or (b) of this paragraph.

[43177] In particular, it was observed that in plants, especially in Arabidopsis thaliana, increasing or generating the activity of a gene product mitochondrial with the activity of a “adenylate kinase”, preferably being encoded by a gene comprising the nucleic acid sequence SEQ ID NO. 85808, preferably the coding region thereof, conferred the production of or the increase in leucine compared with the wild type control.

[43178] The nucleic acid sequence of Sll1815 from Synechocystis sp., e.g. as shown in the respective line in column 5 of Table I, application no. 6, has been published in C. And the activity of the gene product thereof is the activity of adenylate kinase.

[43179] Accordingly, in one embodiment, the process of the present invention for producing valine in a non-human organism, like a microorganism or a plant or a part thereof, comprises increasing or generating the activity of a gene product with the activity of a gene product conferring the activity of “adenylate kinase”, especially from Synechocystis sp. or its functional equivalent or its homolog, e.g. the increase of
[43180] (a) a gene product of a gene comprising the nucleic acid molecule as shown in the respective line in column 5 of Table I (whereby the respective line discloses in column 7 the fine chemical valine), application no. 6, preferably the coding region thereof, or a homolog or a fragment thereof, and being depicted in the same respective line as said Sll1815, or a functional equivalent or a homolog thereof as shown in column 8 of Table I, application no. 6, preferably the coding region thereof, particularly a homolog or functional equivalent as shown in column 8 of Table I B, application no. 6, and being depicted in the same respective line as said Sll1815, and preferably the activity is increased mitochondrial, or
[43181] (b) a polypeptide comprising a polypeptide, a consensus sequence or at least a polypeptide motif as shown in the respective line in column 5 of Table II or in column 8 of Table IV, application no. 6, respectively, and being depicted in the same respective line as said Sll1815, or a functional equivalent or a homolog thereof as depicted in column 8 of Table II, application no. 6, preferably a homolog or functional equivalent as depicted in column 8 of Table II B, application no. 6, and being depicted in the same respective line as said Sll1815, and preferably the activity is increased mitochondrial, whereby the respective line discloses in column 7 the fine chemical valine.

[43182] Accordingly, in one embodiment, the molecule which activity is to be increased in the process of the invention is the gene product with an activity as a “adenylate kinase”, preferably it is the molecule of section (a) or (b) of this paragraph.

[43183] In particular, it was observed that in plants, especially in Arabidopsis thaliana, increasing or generating the activity of a gene product mitochondrial with the activity of a “adenylate kinase”, preferably being encoded by a gene comprising the nucleic acid sequence SEQ ID NO. 85808, preferably the coding region thereof, conferred the production of or the increase in valine compared with the wild type control.

[43184] The nucleic acid sequence of Sll1848 from Synechocystis sp., e.g. as shown in the respective line in column 5 of Table I, application no. 6, has been published in C. And the activity of the gene product thereof is the activity of acyl transferase.

[43185] Accordingly, in one embodiment, the process of the present invention for producing isoleucine in a non-human organism, like a microorganism or a plant or a part thereof, comprises increasing or generating the activity of a gene product with the activity of a gene product conferring the activity of “acyl transferase”, especially from Synechocystis sp. or its functional equivalent or its homolog, e.g. the increase of
[43186] (a) a gene product of a gene comprising the nucleic acid molecule as shown in the respective line in column 5 of Table I (whereby the respective line discloses in column 7 the fine chemical isoleucine), application no. 6, preferably the coding region thereof, or a homolog or a fragment thereof, and being depicted in the same respective line as said Sll1848, or a functional equivalent or a homolog thereof as shown in column 8 of Table I, application no. 6, preferably the coding region thereof, particularly a homolog or functional equivalent as shown in column 8 of Table I B, application no. 6, and being depicted in the same respective line as said Sll1848, and preferably the activity is increased plastidic, or
[43187] (b) a polypeptide comprising a polypeptide, a consensus sequence or at least a polypeptide motif as shown in the respective line in column 5 of Table II or in column 8 of Table IV, application no. 6, respectively, and being depicted in the same respective line as said Sll1848, or a functional equivalent or a homolog thereof as depicted in column 8 of Table II, application no. 6, preferably a homolog or functional equivalent as depicted in column 8 of Table II B, application no. 6, and being depicted in the same respective line as said Sll1848, and preferably the activity is increased plastidic, whereby the respective line discloses in column 7 the fine chemical isoleucine.

[43188] Accordingly, in one embodiment, the molecule which activity is to be increased in the process of the invention is the gene product with an activity as a “acyl transferase”, preferably it is the molecule of section (a) or (b) of this paragraph.

[43189] In particular, it was observed that in plants, especially in Arabidopsis thaliana, increasing or generating the activity of a gene product plastidic with the activity of a “acyl transferase”, preferably being encoded by a gene comprising the nucleic acid sequence SEQ ID NO. 86447, preferably the coding region thereof, conferred the production of or the increase in isoleucine compared with the wild type control.

[43190] The nucleic acid sequence of Slr0150 from Synechocystis sp., e.g. as shown in the respective line in column 5 of Table I, application no. 6, has been published in C. And the activity of the gene product thereof is the activity of ferredoxin.

[43191] Accordingly, in one embodiment, the process of the present invention for producing valine in a non-human organism, like a microorganism or a plant or a part thereof, comprises increasing or generating the activity of a gene product with the activity of a gene product conferring the activity of “ferredoxin”, especially from Synechocystis sp. or its functional equivalent or its homolog, e.g. the increase of
[43192] (a) a gene product of a gene comprising the nucleic acid molecule as shown in the respective line in column 5 of Table I (whereby the respective line discloses in column 7 the fine chemical valine), application no. 6, preferably the coding region thereof, or a homolog or a fragment thereof, and being depicted in the same respective line as said Slr0150, or a functional equivalent or a homolog thereof as shown in column 8 of Table I, application no. 6, preferably the coding region thereof, particularly a homolog or functional equivalent as shown in column 8 of Table I B, application no. 6, and being depicted in the same respective line as said Slr0150, and preferably the activity is increased mitochondrial, or
[43193] (b) a polypeptide comprising a polypeptide, a consensus sequence or at least a polypeptide motif as shown in the respective line in column 5 of Table II or in column 8 of Table IV, application no. 6, respectively, and being depicted in the same respective line as said Slr0150, or a functional equivalent or a homolog thereof as depicted in column 8 of Table II, application no. 6, preferably a homolog or functional equivalent as depicted in column 8 of Table II B, application no. 6, and being depicted in the same respective line as said Slr0150, and preferably the activity is increased mitochondrial, whereby the respective line discloses in column 7 the fine chemical valine.

[43194] Accordingly, in one embodiment, the molecule which activity is to be increased in the process of the invention is the gene product with an activity as a “ferredoxin”, preferably it is the molecule of section (a) or (b) of this paragraph.

[43195] In particular, it was observed that in plants, especially in Arabidopsis thaliana, increasing or generating the activity of a gene product mitochondrial with the activity of a “ferredoxin”, preferably being encoded by a gene comprising the nucleic acid sequence SEQ ID NO. 95527, preferably the coding region thereof, conferred the production of or the increase in valine compared with the wild type control.

[43196] The nucleic acid sequence of Slr0239 from Synechocystis sp., e.g. as shown in the respective line in column 5 of Table I, application no. 6, has been published in C. And the activity of the gene product thereof is the activity of precorrin methylase.

[43197] Accordingly, in one embodiment, the process of the present invention for producing isoleucine in a non-human organism, like a microorganism or a plant or a part thereof, comprises increasing or generating the activity of a gene product with the activity of a gene product conferring the activity of “precorrin methylase”, especially from Synechocystis sp. or its functional equivalent or its homolog, e.g. the increase of
[43198] (a) a gene product of a gene comprising the nucleic acid molecule as shown in the respective line in column 5 of Table I (whereby the respective line discloses in column 7 the fine chemical isoleucine), application no. 6, preferably the coding region thereof, or a homolog or a fragment thereof, and being depicted in the same respective line as said Slr0239, or a functional equivalent or a homolog thereof as shown in column 8 of Table I, application no. 6, preferably the coding region thereof, particularly a homolog or functional equivalent as shown in column 8 of Table I B, application no. 6, and being depicted in the same respective line as said Slr0239, and preferably the activity is increased mitochondrial, or
[43199] (b) a polypeptide comprising a polypeptide, a consensus sequence or at least a polypeptide motif as shown in the respective line in column 5 of Table II or in column 8 of Table IV, application no. 6, respectively, and being depicted in the same respective line as said Slr0239, or a functional equivalent or a homolog thereof as depicted in column 8 of Table II, application no. 6, preferably a homolog or functional equivalent as depicted in column 8 of Table II B, application no. 6, and being depicted in the same respective line as said Slr0239, and preferably the activity is increased mitochondrial, whereby the respective line discloses in column 7 the fine chemical isoleucine.

[43200] Accordingly, in one embodiment, the molecule which activity is to be increased in the process of the invention is the gene product with an activity as a “precorrin methylase”, preferably it is the molecule of section (a) or (b) of this paragraph.

[43201] In particular, it was observed that in plants, especially in Arabidopsis thaliana, increasing or generating the activity of a gene product mitochondrial with the activity of a “precorrin methylase”, preferably being encoded by a gene comprising the nucleic acid sequence SEQ ID NO. 86540, preferably the coding region thereof, conferred the production of or the increase in isoleucine compared with the wild type control.

[43202] The nucleic acid sequence of Slr0239 from Synechocystis sp., e.g. as shown in the respective line in column 5 of Table I, application no. 6, has been published in C. And the activity of the gene product thereof is the activity of precorrin methylase.

[43203] Accordingly, in one embodiment, the process of the present invention for producing leucine in a non-human organism, like a microorganism or a plant or a part thereof, comprises increasing or generating the activity of a gene product with the activity of a gene product conferring the activity of “precorrin methylase”, especially from Synechocystis sp. or its functional equivalent or its homolog, e.g. the increase of
[43204] (a) a gene product of a gene comprising the nucleic acid molecule as shown in the respective line in column 5 of Table I (whereby the respective line discloses in column 7 the fine chemical leucine), application no. 6, preferably the coding region thereof, or a homolog or a fragment thereof, and being depicted in the same respective line as said Slr0239, or a functional equivalent or a homolog thereof as shown in column 8 of Table I, application no. 6, preferably the coding region thereof, particularly a homolog or functional equivalent as shown in column 8 of Table I B, application no. 6, and being depicted in the same respective line as said Slr0239, and preferably the activity is increased mitochondrial, or
[43205] (b) a polypeptide comprising a polypeptide, a consensus sequence or at least a polypeptide motif as shown in the respective line in column 5 of Table II or in column 8 of Table IV, application no. 6, respectively, and being depicted in the same respective line as said Slr0239, or a functional equivalent or a homolog thereof as depicted in column 8 of Table II, application no. 6, preferably a homolog or functional equivalent as depicted in column 8 of Table II B, application no. 6, and being depicted in the same respective line as said Slr0239, and preferably the activity is increased mitochondrial, whereby the respective line discloses in column 7 the fine chemical leucine.

[43206] Accordingly, in one embodiment, the molecule which activity is to be increased in the process of the invention is the gene product with an activity as a “precorrin methylase”, preferably it is the molecule of section (a) or (b) of this paragraph.

[43207] In particular, it was observed that in plants, especially in Arabidopsis thaliana, increasing or generating the activity of a gene product mitochondrial with the activity of a “precorrin methylase”, preferably being encoded by a gene comprising the nucleic acid sequence SEQ ID NO. 86540, preferably the coding region thereof, conferred the production of or the increase in leucine compared with the wild type control.

[43208] The nucleic acid sequence of Slr0239 from Synechocystis sp., e.g. as shown in the respective line in column 5 of Table I, application no. 6, has been published in C. And the activity of the gene product thereof is the activity of precorrin methylase.

[43209] Accordingly, in one embodiment, the process of the present invention for producing valine in a non-human organism, like a microorganism or a plant or a part thereof, comprises increasing or generating the activity of a gene product with the activity of a gene product conferring the activity of “precorrin methylase”, especially from Synechocystis sp. or its functional equivalent or its homolog, e.g. the increase of
[43210] (a) a gene product of a gene comprising the nucleic acid molecule as shown in the respective line in column 5 of Table I (whereby the respective line discloses in column 7 the fine chemical valine), application no. 6, preferably the coding region thereof, or a homolog or a fragment thereof, and being depicted in the same respective line as said Slr0239, or a functional equivalent or a homolog thereof as shown in column 8 of Table I, application no. 6, preferably the coding region thereof, particularly a homolog or functional equivalent as shown in column 8 of Table I B, application no. 6, and being depicted in the same respective line as said Slr0239, and preferably the activity is increased mitochondrial, or
[43211] (b) a polypeptide comprising a polypeptide, a consensus sequence or at least a polypeptide motif as shown in the respective line in column 5 of Table II or in column 8 of Table IV, application no. 6, respectively, and being depicted in the same respective line as said Slr0239, or a functional equivalent or a homolog thereof as depicted in column 8 of Table II, application no. 6, preferably a homolog or functional equivalent as depicted in column 8 of Table II B, application no. 6, and being depicted in the same respective line as said Slr0239, and preferably the activity is increased mitochondrial, whereby the respective line discloses in column 7 the fine chemical valine.

[43212] Accordingly, in one embodiment, the molecule which activity is to be increased in the process of the invention is the gene product with an activity as a “precorrin methylase”, preferably it is the molecule of section (a) or (b) of this paragraph.

[43213] In particular, it was observed that in plants, especially in Arabidopsis thaliana, increasing or generating the activity of a gene product mitochondrial with the activity of a “precorrin methylase”, preferably being encoded by a gene comprising the nucleic acid sequence SEQ ID NO. 86540, preferably the coding region thereof, conferred the production of or the increase in valine compared with the wild type control.

[43214] The nucleic acid sequence of Slr0721 from Synechocystis sp., e.g. as shown in the respective line in column 5 of Table I, application no. 6, has been published in C. And the activity of the gene product thereof is the activity of malate dehydrogenase.

[43215] Accordingly, in one embodiment, the process of the present invention for producing isoleucine in a non-human organism, like a microorganism or a plant or a part thereof, comprises increasing or generating the activity of a gene product with the activity of a gene product conferring the activity of “malate dehydrogenase”, especially from Synechocystis sp. or its functional equivalent or its homolog, e.g. the increase of
[43216] (a) a gene product of a gene comprising the nucleic acid molecule as shown in the respective line in column 5 of Table I (whereby the respective line discloses in column 7 the fine chemical isoleucine), application no. 6, preferably the coding region thereof, or a homolog or a fragment thereof, and being depicted in the same respective line as said Slr0721, or a functional equivalent or a homolog thereof as shown in column 8 of Table I, application no. 6, preferably the coding region thereof, particularly a homolog or functional equivalent as shown in column 8 of Table I B, application no. 6, and being depicted in the same respective line as said Slr0721, and preferably the activity is increased non-targeted, or
[43217] (b) a polypeptide comprising a polypeptide, a consensus sequence or at least a polypeptide motif as shown in the respective line in column 5 of Table II or in column 8 of Table IV, application no. 6, respectively, and being depicted in the same respective line as said Slr0721, or a functional equivalent or a homolog thereof as depicted in column 8 of Table II, application no. 6, preferably a homolog or functional equivalent as depicted in column 8 of Table II B, application no. 6, and being depicted in the same respective line as said Slr0721, and preferably the activity is increased non-targeted, whereby the respective line discloses in column 7 the fine chemical isoleucine.

[43218] Accordingly, in one embodiment, the molecule which activity is to be increased in the process of the invention is the gene product with an activity as a “malate dehydrogenase”, preferably it is the molecule of section (a) or (b) of this paragraph.

[43219] In particular, it was observed that in plants, especially in Arabidopsis thaliana, increasing or generating the activity of a gene product non-targeted with the activity of a “malate dehydrogenase”, preferably being encoded by a gene comprising the nucleic acid sequence SEQ ID NO. 87397, preferably the coding region thereof, conferred the production of or the increase in isoleucine compared with the wild type control.

[43220] The nucleic acid sequence of Slr0721 from Synechocystis sp., e.g. as shown in the respective line in column 5 of Table I, application no. 6, has been published in C. And the activity of the gene product thereof is the activity of malate dehydrogenase.

[43221] Accordingly, in one embodiment, the process of the present invention for producing isoleucine in a non-human organism, like a microorganism or a plant or a part thereof, comprises increasing or generating the activity of a gene product with the activity of a gene product conferring the activity of “malate dehydrogenase”, especially from Synechocystis sp. or its functional equivalent or its homolog, e.g. the increase of
[43222] (a) a gene product of a gene comprising the nucleic acid molecule as shown in the respective line in column 5 of Table I (whereby the respective line discloses in column 7 the fine chemical isoleucine), application no. 6, preferably the coding region thereof, or a homolog or a fragment thereof, and being depicted in the same respective line as said Slr0721, or a functional equivalent or a homolog thereof as shown in column 8 of Table I, application no. 6, preferably the coding region thereof, particularly a homolog or functional equivalent as shown in column 8 of Table I B, application no. 6, and being depicted in the same respective line as said Slr0721, and preferably the activity is increased plastidic, or
[43223] (b) a polypeptide comprising a polypeptide, a consensus sequence or at least a polypeptide motif as shown in the respective line in column 5 of Table II or in column 8 of Table IV, application no. 6, respectively, and being depicted in the same respective line as said Slr0721, or a functional equivalent or a homolog thereof as depicted in column 8 of Table II, application no. 6, preferably a homolog or functional equivalent as depicted in column 8 of Table II B, application no. 6, and being depicted in the same respective line as said Slr0721, and preferably the activity is increased plastidic, whereby the respective line discloses in column 7 the fine chemical isoleucine.

[43224] Accordingly, in one embodiment, the molecule which activity is to be increased in the process of the invention is the gene product with an activity as a “malate dehydrogenase”, preferably it is the molecule of section (a) or (b) of this paragraph.

[43225] In particular, it was observed that in plants, especially in Arabidopsis thaliana, increasing or generating the activity of a gene product plastidic with the activity of a “malate dehydrogenase”, preferably being encoded by a gene comprising the nucleic acid sequence SEQ ID NO. 87397, preferably the coding region thereof, conferred the production of or the increase in isoleucine compared with the wild type control.

[43226] The nucleic acid sequence of Slr0721 from Synechocystis sp., e.g. as shown in the respective line in column 5 of Table I, application no. 6, has been published in C. And the activity of the gene product thereof is the activity of malate dehydrogenase.

[43227] Accordingly, in one embodiment, the process of the present invention for producing leucine in a non-human organism, like a microorganism or a plant or a part thereof, comprises increasing or generating the activity of a gene product with the activity of a gene product conferring the activity of “malate dehydrogenase”, especially from Synechocystis sp. or its functional equivalent or its homolog, e.g. the increase of
[43228] (a) a gene product of a gene comprising the nucleic acid molecule as shown in the respective line in column 5 of Table I (whereby the respective line discloses in column 7 the fine chemical leucine), application no. 6, preferably the coding region thereof, or a homolog or a fragment thereof, and being depicted in the same respective line as said Slr0721, or a functional equivalent or a homolog thereof as shown in column 8 of Table I, application no. 6, preferably the coding region thereof, particularly a homolog or functional equivalent as shown in column 8 of Table I B, application no. 6, and being depicted in the same respective line as said Slr0721, and preferably the activity is increased plastidic, or
[43229] (b) a polypeptide comprising a polypeptide, a consensus sequence or at least a polypeptide motif as shown in the respective line in column 5 of Table II or in column 8 of Table IV, application no. 6, respectively, and being depicted in the same respective line as said Slr0721, or a functional equivalent or a homolog thereof as depicted in column 8 of Table II, application no. 6, preferably a homolog or functional equivalent as depicted in column 8 of Table II B, application no. 6, and being depicted in the same respective line as said Slr0721, and preferably the activity is increased plastidic, whereby the respective line discloses in column 7 the fine chemical leucine.

[43230] Accordingly, in one embodiment, the molecule which activity is to be increased in the process of the invention is the gene product with an activity as a “malate dehydrogenase”, preferably it is the molecule of section (a) or (b) of this paragraph.

[43231] In particular, it was observed that in plants, especially in Arabidopsis thaliana, increasing or generating the activity of a gene product plastidic with the activity of a “malate dehydrogenase”, preferably being encoded by a gene comprising the nucleic acid sequence SEQ ID NO. 87397, preferably the coding region thereof, conferred the production of or the increase in leucine compared with the wild type control.

[43232] The nucleic acid sequence of Slr0721 from Synechocystis sp., e.g. as shown in the respective line in column 5 of Table I, application no. 6, has been published in C. And the activity of the gene product thereof is the activity of malate dehydrogenase.

[43233] Accordingly, in one embodiment, the process of the present invention for producing leucine in a non-human organism, like a microorganism or a plant or a part thereof, comprises increasing or generating the activity of a gene product with the activity of a gene product conferring the activity of “malate dehydrogenase”, especially from Synechocystis sp. or its functional equivalent or its homolog, e.g. the increase of
[43234] (a) a gene product of a gene comprising the nucleic acid molecule as shown in the respective line in column 5 of Table I (whereby the respective line discloses in column 7 the fine chemical leucine), application no. 6, preferably the coding region thereof, or a homolog or a fragment thereof, and being depicted in the same respective line as said Slr0721, or a functional equivalent or a homolog thereof as shown in column 8 of Table I, application no. 6, preferably the coding region thereof, particularly a homolog or functional equivalent as shown in column 8 of Table I B, application no. 6, and being depicted in the same respective line as said Slr0721, and preferably the activity is increased non-targeted, or
[43235] (b) a polypeptide comprising a polypeptide, a consensus sequence or at least a polypeptide motif as shown in the respective line in column 5 of Table II or in column 8 of Table IV, application no. 6, respectively, and being depicted in the same respective line as said Slr0721, or a functional equivalent or a homolog thereof as depicted in column 8 of Table II, application no. 6, preferably a homolog or functional equivalent as depicted in column 8 of Table II B, application no. 6, and being depicted in the same respective line as said Slr0721, and preferably the activity is increased non-targeted, whereby the respective line discloses in column 7 the fine chemical leucine.

[43236] Accordingly, in one embodiment, the molecule which activity is to be increased in the process of the invention is the gene product with an activity as a “malate dehydrogenase”, preferably it is the molecule of section (a) or (b) of this paragraph.

[43237] In particular, it was observed that in plants, especially in Arabidopsis thaliana, increasing or generating the activity of a gene product non-targeted with the activity of a “malate dehydrogenase”, preferably being encoded by a gene comprising the nucleic acid sequence SEQ ID NO. 87397, preferably the coding region thereof, conferred the production of or the increase in leucine compared with the wild type control.

[43238] The nucleic acid sequence of Slr0721 from Synechocystis sp., e.g. as shown in the respective line in column 5 of Table I, application no. 6, has been published in C. And the activity of the gene product thereof is the activity of malate dehydrogenase.

[43239] Accordingly, in one embodiment, the process of the present invention for producing valine in a non-human organism, like a microorganism or a plant or a part thereof, comprises increasing or generating the activity of a gene product with the activity of a gene product conferring the activity of “malate dehydrogenase”, especially from Synechocystis sp. or its functional equivalent or its homolog, e.g. the increase of
[43240] (a) a gene product of a gene comprising the nucleic acid molecule as shown in the respective line in column 5 of Table I (whereby the respective line discloses in column 7 the fine chemical valine), application no. 6, preferably the coding region thereof, or a homolog or a fragment thereof, and being depicted in the same respective line as said Slr0721, or a functional equivalent or a homolog thereof as shown in column 8 of Table I, application no. 6, preferably the coding region thereof, particularly a homolog or functional equivalent as shown in column 8 of Table I B, application no. 6, and being depicted in the same respective line as said Slr0721, and preferably the activity is increased non-targeted, or
[43241] (b) a polypeptide comprising a polypeptide, a consensus sequence or at least a polypeptide motif as shown in the respective line in column 5 of Table II or in column 8 of Table IV, application no. 6, respectively, and being depicted in the same respective line as said Slr0721, or a functional equivalent or a homolog thereof as depicted in column 8 of Table II, application no. 6, preferably a homolog or functional equivalent as depicted in column 8 of Table II B, application no. 6, and being depicted in the same respective line as said Slr0721, and preferably the activity is increased non-targeted, whereby the respective line discloses in column 7 the fine chemical valine.

[43242] Accordingly, in one embodiment, the molecule which activity is to be increased in the process of the invention is the gene product with an activity as a “malate dehydrogenase”, preferably it is the molecule of section (a) or (b) of this paragraph.

[43243] In particular, it was observed that in plants, especially in Arabidopsis thaliana, increasing or generating the activity of a gene product non-targeted with the activity of a “malate dehydrogenase”, preferably being encoded by a gene comprising the nucleic acid sequence SEQ ID NO. 87397, preferably the coding region thereof, conferred the production of or the increase in valine compared with the wild type control.

[43244] The nucleic acid sequence of Slr0721 from Synechocystis sp., e.g. as shown in the respective line in column 5 of Table I, application no. 6, has been published in C. And the activity of the gene product thereof is the activity of malate dehydrogenase.

[43245] Accordingly, in one embodiment, the process of the present invention for producing valine in a non-human organism, like a microorganism or a plant or a part thereof, comprises increasing or generating the activity of a gene product with the activity of a gene product conferring the activity of “malate dehydrogenase”, especially from Synechocystis sp. or its functional equivalent or its homolog, e.g. the increase of
[43246] (a) a gene product of a gene comprising the nucleic acid molecule as shown in the respective line in column 5 of Table I (whereby the respective line discloses in column 7 the fine chemical valine), application no. 6, preferably the coding region thereof, or a homolog or a fragment thereof, and being depicted in the same respective line as said Slr0721, or a functional equivalent or a homolog thereof as shown in column 8 of Table I, application no. 6, preferably the coding region thereof, particularly a homolog or functional equivalent as shown in column 8 of Table I B, application no. 6, and being depicted in the same respective line as said Slr0721, and preferably the activity is increased plastidic, or
[43247] (b) a polypeptide comprising a polypeptide, a consensus sequence or at least a polypeptide motif as shown in the respective line in column 5 of Table II or in column 8 of Table IV, application no. 6, respectively, and being depicted in the same respective line as said Slr0721, or a functional equivalent or a homolog thereof as depicted in column 8 of Table II, application no. 6, preferably a homolog or functional equivalent as depicted in column 8 of Table II B, application no. 6, and being depicted in the same respective line as said Slr0721, and preferably the activity is increased plastidic, whereby the respective line discloses in column 7 the fine chemical valine.

[43248] Accordingly, in one embodiment, the molecule which activity is to be increased in the process of the invention is the gene product with an activity as a “malate dehydrogenase”, preferably it is the molecule of section (a) or (b) of this paragraph.

[43249] In particular, it was observed that in plants, especially in Arabidopsis thaliana, increasing or generating the activity of a gene product plastidic with the activity of a “malate dehydrogenase”, preferably being encoded by a gene comprising the nucleic acid sequence SEQ ID NO. 87397, preferably the coding region thereof, conferred the production of or the increase in valine compared with the wild type control.

[43250] The nucleic acid sequence of Slr0739 from Synechocystis sp., e.g. as shown in the respective line in column 5 of Table I, application no. 6, has been published in C. And the activity of the gene product thereof is the activity of geranylgeranyl pyrophosphate synthase.

[43251] Accordingly, in one embodiment, the process of the present invention for producing isoleucine in a non-human organism, like a microorganism or a plant or a part thereof, comprises increasing or generating the activity of a gene product with the activity of a gene product conferring the activity of “geranylgeranyl pyrophosphate synthase”, especially from Synechocystis sp. or its functional equivalent or its homolog, e.g. the increase of
[43252] (a) a gene product of a gene comprising the nucleic acid molecule as shown in the respective line in column 5 of Table I (whereby the respective line discloses in column 7 the fine chemical isoleucine), application no. 6, preferably the coding region thereof, or a homolog or a fragment thereof, and being depicted in the same respective line as said Slr0739, or a functional equivalent or a homolog thereof as shown in column 8 of Table I, application no. 6, preferably the coding region thereof, particularly a homolog or functional equivalent as shown in column 8 of Table I B, application no. 6, and being depicted in the same respective line as said Slr0739, and preferably the activity is increased plastidic, or
[43253] (b) a polypeptide comprising a polypeptide, a consensus sequence or at least a polypeptide motif as shown in the respective line in column 5 of Table II or in column 8 of Table IV, application no. 6, respectively, and being depicted in the same respective line as said Slr0739, or a functional equivalent or a homolog thereof as depicted in column 8 of Table II, application no. 6, preferably a homolog or functional equivalent as depicted in column 8 of Table II B, application no. 6, and being depicted in the same respective line as said Slr0739, and preferably the activity is increased plastidic, whereby the respective line discloses in column 7 the fine chemical isoleucine.

[43254] Accordingly, in one embodiment, the molecule which activity is to be increased in the process of the invention is the gene product with an activity as a “geranylgeranyl pyrophosphate synthase”, preferably it is the molecule of section (a) or (b) of this paragraph.

[43255] In particular, it was observed that in plants, especially in Arabidopsis thaliana, increasing or generating the activity of a gene product plastidic with the activity of a “geranylgeranyl pyrophosphate synthase”, preferably being encoded by a gene comprising the nucleic acid sequence SEQ ID NO. 57235, preferably the coding region thereof, conferred the production of or the increase in isoleucine compared with the wild type control.

[43256] The nucleic acid sequence of Slr0739 from Synechocystis sp., e.g. as shown in the respective line in column 5 of Table I, application no. 6, has been published in C. And the activity of the gene product thereof is the activity of geranylgeranyl pyrophosphate synthase.

[43257] Accordingly, in one embodiment, the process of the present invention for producing leucine in a non-human organism, like a microorganism or a plant or a part thereof, comprises increasing or generating the activity of a gene product with the activity of a gene product conferring the activity of “geranylgeranyl pyrophosphate synthase”, especially from Synechocystis sp. or its functional equivalent or its homolog, e.g. the increase of
[43258] (a) a gene product of a gene comprising the nucleic acid molecule as shown in the respective line in column 5 of Table I (whereby the respective line discloses in column 7 the fine chemical leucine), application no. 6, preferably the coding region thereof, or a homolog or a fragment thereof, and being depicted in the same respective line as said Slr0739, or a functional equivalent or a homolog thereof as shown in column 8 of Table I, application no. 6, preferably the coding region thereof, particularly a homolog or functional equivalent as shown in column 8 of Table I B, application no. 6, and being depicted in the same respective line as said Slr0739, and preferably the activity is increased plastidic, or
[43259] (b) a polypeptide comprising a polypeptide, a consensus sequence or at least a polypeptide motif as shown in the respective line in column 5 of Table II or in column 8 of Table IV, application no. 6, respectively, and being depicted in the same respective line as said Slr0739, or a functional equivalent or a homolog thereof as depicted in column 8 of Table II, application no. 6, preferably a homolog or functional equivalent as depicted in column 8 of Table II B, application no. 6, and being depicted in the same respective line as said Slr0739, and preferably the activity is increased plastidic, whereby the respective line discloses in column 7 the fine chemical leucine.

[43260] Accordingly, in one embodiment, the molecule which activity is to be increased in the process of the invention is the gene product with an activity as a “geranylgeranyl pyrophosphate synthase”, preferably it is the molecule of section (a) or (b) of this paragraph.

[43261] In particular, it was observed that in plants, especially in Arabidopsis thaliana, increasing or generating the activity of a gene product plastidic with the activity of a “geranylgeranyl pyrophosphate synthase”, preferably being encoded by a gene comprising the nucleic acid sequence SEQ ID NO. 57235, preferably the coding region thereof, conferred the production of or the increase in leucine compared with the wild type control.

[43262] The nucleic acid sequence of Slr0739 from Synechocystis sp., e.g. as shown in the respective line in column 5 of Table I, application no. 6, has been published in C. And the activity of the gene product thereof is the activity of geranylgeranyl pyrophosphate synthase.

[43263] Accordingly, in one embodiment, the process of the present invention for producing valine in a non-human organism, like a microorganism or a plant or a part thereof, comprises increasing or generating the activity of a gene product with the activity of a gene product conferring the activity of “geranylgeranyl pyrophosphate synthase”, especially from Synechocystis sp. or its functional equivalent or its homolog, e.g. the increase of
[43264] (a) a gene product of a gene comprising the nucleic acid molecule as shown in the respective line in column 5 of Table I (whereby the respective line discloses in column 7 the fine chemical valine), application no. 6, preferably the coding region thereof, or a homolog or a fragment thereof, and being depicted in the same respective line as said Slr0739, or a functional equivalent or a homolog thereof as shown in column 8 of Table I, application no. 6, preferably the coding region thereof, particularly a homolog or functional equivalent as shown in column 8 of Table I B, application no. 6, and being depicted in the same respective line as said Slr0739, and preferably the activity is increased plastidic, or
[43265] (b) a polypeptide comprising a polypeptide, a consensus sequence or at least a polypeptide motif as shown in the respective line in column 5 of Table II or in column 8 of Table IV, application no. 6, respectively, and being depicted in the same respective line as said Slr0739, or a functional equivalent or a homolog thereof as depicted in column 8 of Table II, application no. 6, preferably a homolog or functional equivalent as depicted in column 8 of Table II B, application no. 6, and being depicted in the same respective line as said Slr0739, and preferably the activity is increased plastidic, whereby the respective line discloses in column 7 the fine chemical valine.

[43266] Accordingly, in one embodiment, the molecule which activity is to be increased in the process of the invention is the gene product with an activity as a “geranylgeranyl pyrophosphate synthase”, preferably it is the molecule of section (a) or (b) of this paragraph.

[43267] In particular, it was observed that in plants, especially in Arabidopsis thaliana, increasing or generating the activity of a gene product plastidic with the activity of a “geranylgeranyl pyrophosphate synthase”, preferably being encoded by a gene comprising the nucleic acid sequence SEQ ID NO. 57235, preferably the coding region thereof, conferred the production of or the increase in valine compared with the wild type control.

[43268] The nucleic acid sequence of Slr1492 from Synechocystis sp., e.g. as shown in the respective line in column 5 of Table I, application no. 6, has been published in C. And the activity of the gene product thereof is the activity of iron(III) dicitrate-binding protein.

[43269] Accordingly, in one embodiment, the process of the present invention for producing isoleucine in a non-human organism, like a microorganism or a plant or a part thereof, comprises increasing or generating the activity of a gene product with the activity of a gene product conferring the activity of “iron(III) dicitrate-binding protein”, especially from Synechocystis sp. or its functional equivalent or its homolog, e.g. the increase of
[43270] (a) a gene product of a gene comprising the nucleic acid molecule as shown in the respective line in column 5 of Table I (whereby the respective line discloses in column 7 the fine chemical isoleucine), application no. 6, preferably the coding region thereof, or a homolog or a fragment thereof, and being depicted in the same respective line as said Slr1492, or a functional equivalent or a homolog thereof as shown in column 8 of Table I, application no. 6, preferably the coding region thereof, particularly a homolog or functional equivalent as shown in column 8 of Table I B, application no. 6, and being depicted in the same respective line as said Slr1492, and preferably the activity is increased mitochondrial, or
[43271] (b) a polypeptide comprising a polypeptide, a consensus sequence or at least a polypeptide motif as shown in the respective line in column 5 of Table II or in column 8 of Table IV, application no. 6, respectively, and being depicted in the same respective line as said Slr1492, or a functional equivalent or a homolog thereof as depicted in column 8 of Table II, application no. 6, preferably a homolog or functional equivalent as depicted in column 8 of Table II B, application no. 6, and being depicted in the same respective line as said Slr1492, and preferably the activity is increased mitochondrial, whereby the respective line discloses in column 7 the fine chemical isoleucine.

[43272] Accordingly, in one embodiment, the molecule which activity is to be increased in the process of the invention is the gene product with an activity as a “iron(III) dicitrate-binding protein”, preferably it is the molecule of section (a) or (b) of this paragraph.

[43273] In particular, it was observed that in plants, especially in Arabidopsis thaliana, increasing or generating the activity of a gene product mitochondrial with the activity of a “iron(III) dicitratebinding protein”, preferably being encoded by a gene comprising the nucleic acid sequence SEQ ID NO. 58668, preferably the coding region thereof, conferred the production of or the increase in isoleucine compared with the wild type control.

[43274] The nucleic acid sequence of Slr1509 from Synechocystis sp., e.g. as shown in the respective line in column 5 of Table I, application no. 6, has been published in C. And the activity of the gene product thereof is the activity of Na+/K+ transporter.

[43275] Accordingly, in one embodiment, the process of the present invention for producing isoleucine in a non-human organism, like a microorganism or a plant or a part thereof, comprises increasing or generating the activity of a gene product with the activity of a gene product conferring the activity of “Na+/K+ transporter”, especially from Synechocystis sp. or its functional equivalent or its homolog, e.g. the increase of
[43276] (a) a gene product of a gene comprising the nucleic acid molecule as shown in the respective line in column 5 of Table I (whereby the respective line discloses in column 7 the fine chemical isoleucine), application no. 6, preferably the coding region thereof, or a homolog or a fragment thereof, and being depicted in the same respective line as said Slr1509, or a functional equivalent or a homolog thereof as shown in column 8 of Table I, application no. 6, preferably the coding region thereof, particularly a homolog or functional equivalent as shown in column 8 of Table I B, application no. 6, and being depicted in the same respective line as said Slr1509, and preferably the activity is increased mitochondrial, or
[43277] (b) a polypeptide comprising a polypeptide, a consensus sequence or at least a polypeptide motif as shown in the respective line in column 5 of Table II or in column 8 of Table IV, application no. 6, respectively, and being depicted in the same respective line as said Slr1509, or a functional equivalent or a homolog thereof as depicted in column 8 of Table II, application no. 6, preferably a homolog or functional equivalent as depicted in column 8 of Table II B, application no. 6, and being depicted in the same respective line as said Slr1509, and preferably the activity is increased mitochondrial, whereby the respective line discloses in column 7 the fine chemical isoleucine.

[43278] Accordingly, in one embodiment, the molecule which activity is to be increased in the process of the invention is the gene product with an activity as a “Na+/K+ transporter”, preferably it is the molecule of section (a) or (b) of this paragraph.

[43279] In particular, it was observed that in plants, especially in Arabidopsis thaliana, increasing or generating the activity of a gene product mitochondrial with the activity of a “Na+/K+ transporter”, preferably being encoded by a gene comprising the nucleic acid sequence SEQ ID NO. 88158, preferably the coding region thereof, conferred the production of or the increase in isoleucine compared with the wild type control.

[43280] The nucleic acid sequence of Slr1509 from Synechocystis sp., e.g. as shown in the respective line in column 5 of Table I, application no. 6, has been published in C. And the activity of the gene product thereof is the activity of Na+/K+ transporter.

[43281] Accordingly, in one embodiment, the process of the present invention for producing leucine in a non-human organism, like a microorganism or a plant or a part thereof, comprises increasing or generating the activity of a gene product with the activity of a gene product conferring the activity of “Na+/K+ transporter”, especially from Synechocystis sp. or its functional equivalent or its homolog, e.g. the increase of
[43282] (a) a gene product of a gene comprising the nucleic acid molecule as shown in the respective line in column 5 of Table I (whereby the respective line discloses in column 7 the fine chemical leucine), application no. 6, preferably the coding region thereof, or a homolog or a fragment thereof, and being depicted in the same respective line as said Slr1509, or a functional equivalent or a homolog thereof as shown in column 8 of Table I, application no. 6, preferably the coding region thereof, particularly a homolog or functional equivalent as shown in column 8 of Table I B, application no. 6, and being depicted in the same respective line as said Slr1509, and preferably the activity is increased mitochondrial, or
[43283] (b) a polypeptide comprising a polypeptide, a consensus sequence or at least a polypeptide motif as shown in the respective line in column 5 of Table II or in column 8 of Table IV, application no. 6, respectively, and being depicted in the same respective line as said Slr1509, or a functional equivalent or a homolog thereof as depicted in column 8 of Table II, application no. 6, preferably a homolog or functional equivalent as depicted in column 8 of Table II B, application no. 6, and being depicted in the same respective line as said Slr1509, and preferably the activity is increased mitochondrial, whereby the respective line discloses in column 7 the fine chemical leucine.

[43284] Accordingly, in one embodiment, the molecule which activity is to be increased in the process of the invention is the gene product with an activity as a “Na+/K+ transporter”, preferably it is the molecule of section (a) or (b) of this paragraph.

[43285] In particular, it was observed that in plants, especially in Arabidopsis thaliana, increasing or generating the activity of a gene product mitochondrial with the activity of a “Na+/K+ transporter”, preferably being encoded by a gene comprising the nucleic acid sequence SEQ ID NO. 88158, preferably the coding region thereof, conferred the production of or the increase in leucine compared with the wild type control.

[43286] The nucleic acid sequence of Slr1517 from Synechocystis sp., e.g. as shown in the respective line in column 5 of Table I, application no. 6, has been published in C. And the activity of the gene product thereof is the activity of 3-isopropylmalate dehydrogenase.

[43287] Accordingly, in one embodiment, the process of the present invention for producing valine in a non-human organism, like a microorganism or a plant or a part thereof, comprises increasing or generating the activity of a gene product with the activity of a gene product conferring the activity of “3-isopropylmalate dehydrogenase”, especially from Synechocystis sp. or its functional equivalent or its homolog, e.g. the increase of
[43288] (a) a gene product of a gene comprising the nucleic acid molecule as shown in the respective line in column 5 of Table I (whereby the respective line discloses in column 7 the fine chemical valine), application no. 6, preferably the coding region thereof, or a homolog or a fragment thereof, and being depicted in the same respective line as said Slr1517, or a functional equivalent or a homolog thereof as shown in column 8 of Table I, application no. 6, preferably the coding region thereof, particularly a homolog or functional equivalent as shown in column 8 of Table I B, application no. 6, and being depicted in the same respective line as said Slr1517, and preferably the activity is increased mitochondrial, or
[43289] (b) a polypeptide comprising a polypeptide, a consensus sequence or at least a polypeptide motif as shown in the respective line in column 5 of Table II or in column 8 of Table IV, application no. 6, respectively, and being depicted in the same respective line as said Slr1517, or a functional equivalent or a homolog thereof as depicted in column 8 of Table II, application no. 6, preferably a homolog or functional equivalent as depicted in column 8 of Table II B, application no. 6, and being depicted in the same respective line as said Slr1517, and preferably the activity is increased mitochondrial, whereby the respective line discloses in column 7 the fine chemical valine.

[43290] Accordingly, in one embodiment, the molecule which activity is to be increased in the process of the invention is the gene product with an activity as a “3-isopropylmalate dehydrogenase”, preferably it is the molecule of section (a) or (b) of this paragraph.

[43291] In particular, it was observed that in plants, especially in Arabidopsis thaliana, increasing or generating the activity of a gene product mitochondrial with the activity of a “3-isopropylmalate dehydrogenase”, preferably being encoded by a gene comprising the nucleic acid sequence SEQ ID NO. 107145, preferably the coding region thereof, conferred the production of or the increase in valine compared with the wild type control.

[43292] The nucleic acid sequence of Slr1739 from Synechocystis sp., e.g. as shown in the respective line in column 5 of Table I, application no. 6, has been published in C. And the activity of the gene product thereof is the activity of photosystem II protein.

[43293] Accordingly, in one embodiment, the process of the present invention for producing isoleucine in a non-human organism, like a microorganism or a plant or a part thereof, comprises increasing or generating the activity of a gene product with the activity of a gene product conferring the activity of “photosystem II protein”, especially from Synechocystis sp. or its functional equivalent or its homolog, e.g. the increase of
[43294] (a) a gene product of a gene comprising the nucleic acid molecule as shown in the respective line in column 5 of Table I (whereby the respective line discloses in column 7 the fine chemical isoleucine), application no. 6, preferably the coding region thereof, or a homolog or a fragment thereof, and being depicted in the same respective line as said Slr1739, or a functional equivalent or a homolog thereof as shown in column 8 of Table I, application no. 6, preferably the coding region thereof, particularly a homolog or functional equivalent as shown in column 8 of Table I B, application no. 6, and being depicted in the same respective line as said Slr1739, and preferably the activity is increased plastidic, or
[43295] (b) a polypeptide comprising a polypeptide, a consensus sequence or at least a polypeptide motif as shown in the respective line in column 5 of Table II or in column 8 of Table IV, application no. 6, respectively, and being depicted in the same respective line as said Slr1739, or a functional equivalent or a homolog thereof as depicted in column 8 of Table II, application no. 6, preferably a homolog or functional equivalent as depicted in column 8 of Table II B, application no. 6, and being depicted in the same respective line as said Slr1739, and preferably the activity is increased plastidic, whereby the respective line discloses in column 7 the fine chemical isoleucine.

[43296] Accordingly, in one embodiment, the molecule which activity is to be increased in the process of the invention is the gene product with an activity as a “photosystem II protein”, preferably it is the molecule of section (a) or (b) of this paragraph.

[43297] In particular, it was observed that in plants, especially in Arabidopsis thaliana, increasing or generating the activity of a gene product plastidic with the activity of a “photosystem II protein”, preferably being encoded by a gene comprising the nucleic acid sequence SEQ ID NO. 58731, preferably the coding region thereof, conferred the production of or the increase in isoleucine compared with the wild type control.

[43298] The nucleic acid sequence of Slr1739 from Synechocystis sp., e.g. as shown in the respective line in column 5 of Table I, application no. 6, has been published in C. And the activity of the gene product thereof is the activity of photosystem II protein.

[43299] Accordingly, in one embodiment, the process of the present invention for producing leucine in a non-human organism, like a microorganism or a plant or a part thereof, comprises increasing or generating the activity of a gene product with the activity of a gene product conferring the activity of “photosystem II protein”, especially from Synechocystis sp. or its functional equivalent or its homolog, e.g. the increase of
[43300] (a) a gene product of a gene comprising the nucleic acid molecule as shown in the respective line in column 5 of Table I (whereby the respective line discloses in column 7 the fine chemical leucine), application no. 6, preferably the coding region thereof, or a homolog or a fragment thereof, and being depicted in the same respective line as said Slr1739, or a functional equivalent or a homolog thereof as shown in column 8 of Table I, application no. 6, preferably the coding region thereof, particularly a homolog or functional equivalent as shown in column 8 of Table I B, application no. 6, and being depicted in the same respective line as said Slr1739, and preferably the activity is increased plastidic, or
[43301] (b) a polypeptide comprising a polypeptide, a consensus sequence or at least a polypeptide motif as shown in the respective line in column 5 of Table II or in column 8 of Table IV, application no. 6, respectively, and being depicted in the same respective line as said Slr1739, or a functional equivalent or a homolog thereof as depicted in column 8 of Table II, application no. 6, preferably a homolog or functional equivalent as depicted in column 8 of Table II B, application no. 6, and being depicted in the same respective line as said Slr1739, and preferably the activity is increased plastidic, whereby the respective line discloses in column 7 the fine chemical leucine.

[43302] Accordingly, in one embodiment, the molecule which activity is to be increased in the process of the invention is the gene product with an activity as a “photosystem II protein”, preferably it is the molecule of section (a) or (b) of this paragraph.

[43303] In particular, it was observed that in plants, especially in Arabidopsis thaliana, increasing or generating the activity of a gene product plastidic with the activity of a “photosystem II protein”, preferably being encoded by a gene comprising the nucleic acid sequence SEQ ID NO. 58731, preferably the coding region thereof, conferred the production of or the increase in leucine compared with the wild type control.

[43304] The nucleic acid sequence of Slr1739 from Synechocystis sp., e.g. as shown in the respective line in column 5 of Table I, application no. 6, has been published in C. And the activity of the gene product thereof is the activity of photosystem II protein.

[43305] Accordingly, in one embodiment, the process of the present invention for producing valine in a non-human organism, like a microorganism or a plant or a part thereof, comprises increasing or generating the activity of a gene product with the activity of a gene product conferring the activity of “photosystem II protein”, especially from Synechocystis sp. or its functional equivalent or its homolog, e.g. the increase of
[43306] (a) a gene product of a gene comprising the nucleic acid molecule as shown in the respective line in column 5 of Table I (whereby the respective line discloses in column 7 the fine chemical valine), application no. 6, preferably the coding region thereof, or a homolog or a fragment thereof, and being depicted in the same respective line as said Slr1739, or a functional equivalent or a homolog thereof as shown in column 8 of Table I, application no. 6, preferably the coding region thereof, particularly a homolog or functional equivalent as shown in column 8 of Table I B, application no. 6, and being depicted in the same respective line as said Slr1739, and preferably the activity is increased plastidic, or
[43307] (b) a polypeptide comprising a polypeptide, a consensus sequence or at least a polypeptide motif as shown in the respective line in column 5 of Table II or in column 8 of Table IV, application no. 6, respectively, and being depicted in the same respective line as said Slr1739, or a functional equivalent or a homolog thereof as depicted in column 8 of Table II, application no. 6, preferably a homolog or functional equivalent as depicted in column 8 of Table II B, application no. 6, and being depicted in the same respective line as said Slr1739, and preferably the activity is increased plastidic, whereby the respective line discloses in column 7 the fine chemical valine.

[43308] Accordingly, in one embodiment, the molecule which activity is to be increased in the process of the invention is the gene product with an activity as a “photosystem II protein”, preferably it is the molecule of section (a) or (b) of this paragraph.

[43309] In particular, it was observed that in plants, especially in Arabidopsis thaliana, increasing or generating the activity of a gene product plastidic with the activity of a “photosystem II protein”, preferably being encoded by a gene comprising the nucleic acid sequence SEQ ID NO. 58731, preferably the coding region thereof, conferred the production of or the increase in valine compared with the wild type control.

[43310] The nucleic acid sequence of Slr1791 from Synechocystis sp., e.g. as shown in the respective line in column 5 of Table I, application no. 6, has been published in C. And the activity of the gene product thereof is the activity of phosphoadenosine phosphosulfate reductase .

[43311] Accordingly, in one embodiment, the process of the present invention for producing valine in a non-human organism, like a microorganism or a plant or a part thereof, comprises increasing or generating the activity of a gene product with the activity of a gene product conferring the activity of “phosphoadenosine phosphosulfate reductase”, especially from Synechocystis sp. or its functional equivalent or its homolog, e.g. the increase of
[43312] (a) a gene product of a gene comprising the nucleic acid molecule as shown in the respective line in column 5 of Table I (whereby the respective line discloses in column 7 the fine chemical valine), application no. 6, preferably the coding region thereof, or a homolog or a fragment thereof, and being depicted in the same respective line as said Slr1791, or a functional equivalent or a homolog thereof as shown in column 8 of Table I, application no. 6, preferably the coding region thereof, particularly a homolog or functional equivalent as shown in column 8 of Table I B, application no. 6, and being depicted in the same respective line as said Slr1791, and preferably the activity is increased plastidic, or
[43313] (b) a polypeptide comprising a polypeptide, a consensus sequence or at least a polypeptide motif as shown in the respective line in column 5 of Table II or in column 8 of Table IV, application no. 6, respectively, and being depicted in the same respective line as said Slr1791, or a functional equivalent or a homolog thereof as depicted in column 8 of Table II, application no. 6, preferably a homolog or functional equivalent as depicted in column 8 of Table II B, application no. 6, and being depicted in the same respective line as said Slr1791, and preferably the activity is increased plastidic, whereby the respective line discloses in column 7 the fine chemical valine.

[43314] Accordingly, in one embodiment, the molecule which activity is to be increased in the process of the invention is the gene product with an activity as a “phosphoadenosine phosphosulfate reductase”, preferably it is the molecule of section (a) or (b) of this paragraph.

[43315] In particular, it was observed that in plants, especially in Arabidopsis thaliana, increasing or generating the activity of a gene product plastidic with the activity of a “phosphoadenosine phosphosulfate reductase”, preferably being encoded by a gene comprising the nucleic acid sequence SEQ ID NO. 12140, preferably the coding region thereof, conferred the production of or the increase in valine compared with the wild type control.

[43316] The nucleic acid sequence of Slr1882 from Synechocystis sp., e.g. as shown in the respective line in column 5 of Table I, application no. 6, has been published in C. And the activity of the gene product thereof is the activity of riboflavin biosynthesis protein.

[43317] Accordingly, in one embodiment, the process of the present invention for producing valine in a non-human organism, like a microorganism or a plant or a part thereof, comprises increasing or generating the activity of a gene product with the activity of a gene product conferring the activity of “riboflavin biosynthesis protein”, especially from Synechocystis sp. or its functional equivalent or its homolog, e.g. the increase of
[43318] (a) a gene product of a gene comprising the nucleic acid molecule as shown in the respective line in column 5 of Table I (whereby the respective line discloses in column 7 the fine chemical valine), application no. 6, preferably the coding region thereof, or a homolog or a fragment thereof, and being depicted in the same respective line as said Slr1882, or a functional equivalent or a homolog thereof as shown in column 8 of Table I, application no. 6, preferably the coding region thereof, particularly a homolog or functional equivalent as shown in column 8 of Table I B, application no. 6, and being depicted in the same respective line as said Slr1882, and preferably the activity is increased non-targeted, or
[43319] (b) a polypeptide comprising a polypeptide, a consensus sequence or at least a polypeptide motif as shown in the respective line in column 5 of Table II or in column 8 of Table IV, application no. 6, respectively, and being depicted in the same respective line as said Slr1882, or a functional equivalent or a homolog thereof as depicted in column 8 of Table II, application no. 6, preferably a homolog or functional equivalent as depicted in column 8 of Table II B, application no. 6, and being depicted in the same respective line as said Slr1882, and preferably the activity is increased non-targeted, whereby the respective line discloses in column 7 the fine chemical valine.

[43320] Accordingly, in one embodiment, the molecule which activity is to be increased in the process of the invention is the gene product with an activity as a “riboflavin biosynthesis protein”, preferably it is the molecule of section (a) or (b) of this paragraph.

[43321] In particular, it was observed that in plants, especially in Arabidopsis thaliana, increasing or generating the activity of a gene product non-targeted with the activity of a “riboflavin biosynthesis protein”, preferably being encoded by a gene comprising the nucleic acid sequence SEQ ID NO. 59041, preferably the coding region thereof, conferred the production of or the increase in valine compared with the wild type control.

[43322] The nucleic acid sequence of Slr2072 from Synechocystis sp., e.g. as shown in the respective line in column 5 of Table I, application no. 6, has been published in C. And the activity of the gene product thereof is the activity of threonine dehydratase.

[43323] Accordingly, in one embodiment, the process of the present invention for producing isoleucine in a non-human organism, like a microorganism or a plant or a part thereof, comprises increasing or generating the activity of a gene product with the activity of a gene product conferring the activity of “threonine dehydratase”, especially from Synechocystis sp. or its functional equivalent or its homolog, e.g. the increase of
[43324] (a) a gene product of a gene comprising the nucleic acid molecule as shown in the respective line in column 5 of Table I (whereby the respective line discloses in column 7 the fine chemical isoleucine), application no. 6, preferably the coding region thereof, or a homolog or a fragment thereof, and being depicted in the same respective line as said Slr2072, or a functional equivalent or a homolog thereof as shown in column 8 of Table I, application no. 6, preferably the coding region thereof, particularly a homolog or functional equivalent as shown in column 8 of Table I B, application no. 6, and being depicted in the same respective line as said Slr2072, and preferably the activity is increased mitochondrial, or
[43325] (b) a polypeptide comprising a polypeptide, a consensus sequence or at least a polypeptide motif as shown in the respective line in column 5 of Table II or in column 8 of Table IV, application no. 6, respectively, and being depicted in the same respective line as said Slr2072, or a functional equivalent or a homolog thereof as depicted in column 8 of Table II, application no. 6, preferably a homolog or functional equivalent as depicted in column 8 of Table II B, application no. 6, and being depicted in the same respective line as said Slr2072, and preferably the activity is increased mitochondrial, whereby the respective line discloses in column 7 the fine chemical isoleucine.

[43326] Accordingly, in one embodiment, the molecule which activity is to be increased in the process of the invention is the gene product with an activity as a “threonine dehydratase”, preferably it is the molecule of section (a) or (b) of this paragraph.

[43327] In particular, it was observed that in plants, especially in Arabidopsis thaliana, increasing or generating the activity of a gene product mitochondrial with the activity of a “threonine dehydratase”, preferably being encoded by a gene comprising the nucleic acid sequence SEQ ID NO. 12341, preferably the coding region thereof, conferred the production of or the increase in isoleucine compared with the wild type control.

[43328] The nucleic acid sequence of Slr2072 from Synechocystis sp., e.g. as shown in the respective line in column 5 of Table I, application no. 6, has been published in C. And the activity of the gene product thereof is the activity of threonine dehydratase.

[43329] Accordingly, in one embodiment, the process of the present invention for producing isoleucine in a non-human organism, like a microorganism or a plant or a part thereof, comprises increasing or generating the activity of a gene product with the activity of a gene product conferring the activity of “threonine dehydratase”, especially from Synechocystis sp. or its functional equivalent or its homolog, e.g. the increase of
[43330] (a) a gene product of a gene comprising the nucleic acid molecule as shown in the respective line in column 5 of Table I (whereby the respective line discloses in column 7 the fine chemical isoleucine), application no. 6, preferably the coding region thereof, or a homolog or a fragment thereof, and being depicted in the same respective line as said Slr2072, or a functional equivalent or a homolog thereof as shown in column 8 of Table I, application no. 6, preferably the coding region thereof, particularly a homolog or functional equivalent as shown in column 8 of Table I B, application no. 6, and being depicted in the same respective line as said Slr2072, and preferably the activity is increased plastidic, or
[43331] (b) a polypeptide comprising a polypeptide, a consensus sequence or at least a polypeptide motif as shown in the respective line in column 5 of Table II or in column 8 of Table IV, application no. 6, respectively, and being depicted in the same respective line as said Slr2072, or a functional equivalent or a homolog thereof as depicted in column 8 of Table II, application no. 6, preferably a homolog or functional equivalent as depicted in column 8 of Table II B, application no. 6, and being depicted in the same respective line as said Slr2072, and preferably the activity is increased plastidic, whereby the respective line discloses in column 7 the fine chemical isoleucine.

[43332] Accordingly, in one embodiment, the molecule which activity is to be increased in the process of the invention is the gene product with an activity as a “threonine dehydratase”, preferably it is the molecule of section (a) or (b) of this paragraph.

[43333] In particular, it was observed that in plants, especially in Arabidopsis thaliana, increasing or generating the activity of a gene product plastidic with the activity of a “threonine dehydratase”, preferably being encoded by a gene comprising the nucleic acid sequence SEQ ID NO. 12341, preferably the coding region thereof, conferred the production of or the increase in isoleucine compared with the wild type control.

[43334] The nucleic acid sequence of Slr2072 from Synechocystis sp., e.g. as shown in the respective line in column 5 of Table I, application no. 6, has been published in C. And the activity of the gene product thereof is the activity of threonine dehydratase.

[43335] Accordingly, in one embodiment, the process of the present invention for producing leucine in a non-human organism, like a microorganism or a plant or a part thereof, comprises increasing or generating the activity of a gene product with the activity of a gene product conferring the activity of “threonine dehydratase”, especially from Synechocystis sp. or its functional equivalent or its homolog, e.g. the increase of
[43336] (a) a gene product of a gene comprising the nucleic acid molecule as shown in the respective line in column 5 of Table I (whereby the respective line discloses in column 7 the fine chemical leucine), application no. 6, preferably the coding region thereof, or a homolog or a fragment thereof, and being depicted in the same respective line as said Slr2072, or a functional equivalent or a homolog thereof as shown in column 8 of Table I, application no. 6, preferably the coding region thereof, particularly a homolog or functional equivalent as shown in column 8 of Table I B, application no. 6, and being depicted in the same respective line as said Slr2072, and preferably the activity is increased plastidic, or
[43337] (b) a polypeptide comprising a polypeptide, a consensus sequence or at least a polypeptide motif as shown in the respective line in column 5 of Table II or in column 8 of Table IV, application no. 6, respectively, and being depicted in the same respective line as said Slr2072, or a functional equivalent or a homolog thereof as depicted in column 8 of Table II, application no. 6, preferably a homolog or functional equivalent as depicted in column 8 of Table II B, application no. 6, and being depicted in the same respective line as said Slr2072, and preferably the activity is increased plastidic, whereby the respective line discloses in column 7 the fine chemical leucine.

[43338] Accordingly, in one embodiment, the molecule which activity is to be increased in the process of the invention is the gene product with an activity as a “threonine dehydratase”, preferably it is the molecule of section (a) or (b) of this paragraph.

[43339] In particular, it was observed that in plants, especially in Arabidopsis thaliana, increasing or generating the activity of a gene product plastidic with the activity of a “threonine dehydratase”, preferably being encoded by a gene comprising the nucleic acid sequence SEQ ID NO. 12341, preferably the coding region thereof, conferred the production of or the increase in leucine compared with the wild type control.

[43340] The nucleic acid sequence of Slr2072 from Synechocystis sp., e.g. as shown in the respective line in column 5 of Table I, application no. 6, has been published in C. And the activity of the gene product thereof is the activity of threonine dehydratase.

[43341] Accordingly, in one embodiment, the process of the present invention for producing leucine in a non-human organism, like a microorganism or a plant or a part thereof, comprises increasing or generating the activity of a gene product with the activity of a gene product conferring the activity of “threonine dehydratase”, especially from Synechocystis sp. or its functional equivalent or its homolog, e.g. the increase of
[43342] (a) a gene product of a gene comprising the nucleic acid molecule as shown in the respective line in column 5 of Table I (whereby the respective line discloses in column 7 the fine chemical leucine), application no. 6, preferably the coding region thereof, or a homolog or a fragment thereof, and being depicted in the same respective line as said Slr2072, or a functional equivalent or a homolog thereof as shown in column 8 of Table I, application no. 6, preferably the coding region thereof, particularly a homolog or functional equivalent as shown in column 8 of Table I B, application no. 6, and being depicted in the same respective line as said Slr2072, and preferably the activity is increased mitochondrial, or
[43343] (b) a polypeptide comprising a polypeptide, a consensus sequence or at least a polypeptide motif as shown in the respective line in column 5 of Table II or in column 8 of Table IV, application no. 6, respectively, and being depicted in the same respective line as said Slr2072, or a functional equivalent or a homolog thereof as depicted in column 8 of Table II, application no. 6, preferably a homolog or functional equivalent as depicted in column 8 of Table II B, application no. 6, and being depicted in the same respective line as said Slr2072, and preferably the activity is increased mitochondrial, whereby the respective line discloses in column 7 the fine chemical leucine.

[43344] Accordingly, in one embodiment, the molecule which activity is to be increased in the process of the invention is the gene product with an activity as a “threonine dehydratase”, preferably it is the molecule of section (a) or (b) of this paragraph.

[43345] In particular, it was observed that in plants, especially in Arabidopsis thaliana, increasing or generating the activity of a gene product mitochondrial with the activity of a “threonine dehydratase”, preferably being encoded by a gene comprising the nucleic acid sequence SEQ ID NO. 12341, preferably the coding region thereof, conferred the production of or the increase in leucine compared with the wild type control.

[43346] The nucleic acid sequence of Slr2072 from Synechocystis sp., e.g. as shown in the respective line in column 5 of Table I, application no. 6, has been published in C. And the activity of the gene product thereof is the activity of threonine dehydratase.

[43347] Accordingly, in one embodiment, the process of the present invention for producing valine in a non-human organism, like a microorganism or a plant or a part thereof, comprises increasing or generating the activity of a gene product with the activity of a gene product conferring the activity of “threonine dehydratase”, especially from Synechocystis sp. or its functional equivalent or its homolog, e.g. the increase of
[43348] (a) a gene product of a gene comprising the nucleic acid molecule as shown in the respective line in column 5 of Table I (whereby the respective line discloses in column 7 the fine chemical valine), application no. 6, preferably the coding region thereof, or a homolog or a fragment thereof, and being depicted in the same respective line as said Slr2072, or a functional equivalent or a homolog thereof as shown in column 8 of Table I, application no. 6, preferably the coding region thereof, particularly a homolog or functional equivalent as shown in column 8 of Table I B, application no. 6, and being depicted in the same respective line as said Slr2072, and preferably the activity is increased mitochondrial, or
[43349] (b) a polypeptide comprising a polypeptide, a consensus sequence or at least a polypeptide motif as shown in the respective line in column 5 of Table II or in column 8 of Table IV, application no. 6, respectively, and being depicted in the same respective line as said Slr2072, or a functional equivalent or a homolog thereof as depicted in column 8 of Table II, application no. 6, preferably a homolog or functional equivalent as depicted in column 8 of Table II B, application no. 6, and being depicted in the same respective line as said Slr2072, and preferably the activity is increased mitochondrial, whereby the respective line discloses in column 7 the fine chemical valine.

[43350] Accordingly, in one embodiment, the molecule which activity is to be increased in the process of the invention is the gene product with an activity as a “threonine dehydratase”, preferably it is the molecule of section (a) or (b) of this paragraph.

[43351] In particular, it was observed that in plants, especially in Arabidopsis thaliana, increasing or generating the activity of a gene product mitochondrial with the activity of a “threonine dehydratase”, preferably being encoded by a gene comprising the nucleic acid sequence SEQ ID NO. 12341, preferably the coding region thereof, conferred the production of or the increase in valine compared with the wild type control.

[43352] The nucleic acid sequence of Slr2072 from Synechocystis sp., e.g. as shown in the respective line in column 5 of Table I, application no. 6, has been published in C. And the activity of the gene product thereof is the activity of threonine dehydratase.

[43353] Accordingly, in one embodiment, the process of the present invention for producing valine in a non-human organism, like a microorganism or a plant or a part thereof, comprises increasing or generating the activity of a gene product with the activity of a gene product conferring the activity of “threonine dehydratase”, especially from Synechocystis sp. or its functional equivalent or its homolog, e.g. the increase of
[43354] (a) a gene product of a gene comprising the nucleic acid molecule as shown in the respective line in column 5 of Table I (whereby the respective line discloses in column 7 the fine chemical valine), application no. 6, preferably the coding region thereof, or a homolog or a fragment thereof, and being depicted in the same respective line as said Slr2072, or a functional equivalent or a homolog thereof as shown in column 8 of Table I, application no. 6, preferably the coding region thereof, particularly a homolog or functional equivalent as shown in column 8 of Table I B, application no. 6, and being depicted in the same respective line as said Slr2072, and preferably the activity is increased plastidic, or
[43355] (b) a polypeptide comprising a polypeptide, a consensus sequence or at least a polypeptide motif as shown in the respective line in column 5 of Table II or in column 8 of Table IV, application no. 6, respectively, and being depicted in the same respective line as said Slr2072, or a functional equivalent or a homolog thereof as depicted in column 8 of Table II, application no. 6, preferably a homolog or functional equivalent as depicted in column 8 of Table II B, application no. 6, and being depicted in the same respective line as said Slr2072, and preferably the activity is increased plastidic, whereby the respective line discloses in column 7 the fine chemical valine.

[43356] Accordingly, in one embodiment, the molecule which activity is to be increased in the process of the invention is the gene product with an activity as a “threonine dehydratase”, preferably it is the molecule of section (a) or (b) of this paragraph.

[43357] In particular, it was observed that in plants, especially in Arabidopsis thaliana, increasing or generating the activity of a gene product plastidic with the activity of a “threonine dehydratase”, preferably being encoded by a gene comprising the nucleic acid sequence SEQ ID NO. 12341, preferably the coding region thereof, conferred the production of or the increase in valine compared with the wild type control.

[43358] The nucleic acid sequence of Slr2124 from Synechocystis sp., e.g. as shown in the respective line in column 5 of Table I, application no. 6, has been published in C. And the activity of the gene product thereof is the activity of short-chain alcohol dehydrogenase family.

[43359] Accordingly, in one embodiment, the process of the present invention for producing valine in a non-human organism, like a microorganism or a plant or a part thereof, comprises increasing or generating the activity of a gene product with the activity of a gene product conferring the activity of “short-chain alcohol dehydrogenase family”, especially from Synechocystis sp. or its functional equivalent or its homolog, e.g. the increase of
[43360] (a) a gene product of a gene comprising the nucleic acid molecule as shown in the respective line in column 5 of Table I (whereby the respective line discloses in column 7 the fine chemical valine), application no. 6, preferably the coding region thereof, or a homolog or a fragment thereof, and being depicted in the same respective line as said Slr2124, or a functional equivalent or a homolog thereof as shown in column 8 of Table I, application no. 6, preferably the coding region thereof, particularly a homolog or functional equivalent as shown in column 8 of Table I B, application no. 6, and being depicted in the same respective line as said Slr2124, and preferably the activity is increased plastidic, or
[43361] (b) a polypeptide comprising a polypeptide, a consensus sequence or at least a polypeptide motif as shown in the respective line in column 5 of Table II or in column 8 of Table IV, application no. 6, respectively, and being depicted in the same respective line as said Slr2124, or a functional equivalent or a homolog thereof as depicted in column 8 of Table II, application no. 6, preferably a homolog or functional equivalent as depicted in column 8 of Table II B, application no. 6, and being depicted in the same respective line as said Slr2124, and preferably the activity is increased plastidic, whereby the respective line discloses in column 7 the fine chemical valine.

[43362] Accordingly, in one embodiment, the molecule which activity is to be increased in the process of the invention is the gene product with an activity as a “short-chain alcohol dehydrogenase family”, preferably it is the molecule of section (a) or (b) of this paragraph.

[43363] In particular, it was observed that in plants, especially in Arabidopsis thaliana, increasing or generating the activity of a gene product plastidic with the activity of a “short-chain alcohol dehydrogenase family”, preferably being encoded by a gene comprising the nucleic acid sequence SEQ ID NO. 59370, preferably the coding region thereof, conferred the production of or the increase in valine compared with the wild type control.

[43364] The nucleic acid sequence of TTC0019 from Thermus thermophilus, e.g. as shown in the respective line in column 5 of Table I, application no. 6, has been published in E. And the activity of the gene product thereof is the activity of Sec-independent protein translocase subunit.

[43365] Accordingly, in one embodiment, the process of the present invention for producing isoleucine in a non-human organism, like a microorganism or a plant or a part thereof, comprises increasing or generating the activity of a gene product with the activity of a gene product conferring the activity of “Sec-independent protein translocase subunit”, especially from Thermus thermophilus or its functional equivalent or its homolog, e.g. the increase of
[43366] (a) a gene product of a gene comprising the nucleic acid molecule as shown in the respective line in column 5 of Table I (whereby the respective line discloses in column 7 the fine chemical isoleucine), application no. 6, preferably the coding region thereof, or a homolog or a fragment thereof, and being depicted in the same respective line as said TTC0019, or a functional equivalent or a homolog thereof as shown in column 8 of Table I, application no. 6, preferably the coding region thereof, particularly a homolog or functional equivalent as shown in column 8 of Table I B, application no. 6, and being depicted in the same respective line as said TTC0019, and preferably the activity is increased non-targeted, or
[43367] (b) a polypeptide comprising a polypeptide, a consensus sequence or at least a polypeptide motif as shown in the respective line in column 5 of Table II or in column 8 of Table IV, application no. 6, respectively, and being depicted in the same respective line as said TTC0019, or a functional equivalent or a homolog thereof as depicted in column 8 of Table II, application no. 6, preferably a homolog or functional equivalent as depicted in column 8 of Table II B, application no. 6, and being depicted in the same respective line as said TTC0019, and preferably the activity is increased non-targeted, whereby the respective line discloses in column 7 the fine chemical isoleucine.

[43368] Accordingly, in one embodiment, the molecule which activity is to be increased in the process of the invention is the gene product with an activity as a “Sec-independent protein translocase subunit”, preferably it is the molecule of section (a) or (b) of this paragraph.

[43369] In particular, it was observed that in plants, especially in Arabidopsis thaliana, increasing or generating the activity of a gene product non-targeted with the activity of a “Sec-independent protein translocase subunit”, preferably being encoded by a gene comprising the nucleic acid sequence SEQ ID NO. 12698, preferably the coding region thereof, conferred the production of or the increase in isoleucine compared with the wild type control.

[43370] The nucleic acid sequence of TTC0019 from Thermus thermophilus, e.g. as shown in the respective line in column 5 of Table I, application no. 6, has been published in E. And the activity of the gene product thereof is the activity of Sec-independent protein translocase subunit.

[43371] Accordingly, in one embodiment, the process of the present invention for producing leucine in a non-human organism, like a microorganism or a plant or a part thereof, comprises increasing or generating the activity of a gene product with the activity of a gene product conferring the activity of “Sec-independent protein translocase subunit”, especially from Thermus thermophilus or its functional equivalent or its homolog, e.g. the increase of
[43372] (a) a gene product of a gene comprising the nucleic acid molecule as shown in the respective line in column 5 of Table I (whereby the respective line discloses in column 7 the fine chemical leucine), application no. 6, preferably the coding region thereof, or a homolog or a fragment thereof, and being depicted in the same respective line as said TTC0019, or a functional equivalent or a homolog thereof as shown in column 8 of Table I, application no. 6, preferably the coding region thereof, particularly a homolog or functional equivalent as shown in column 8 of Table I B, application no. 6, and being depicted in the same respective line as said TTC0019, and preferably the activity is increased non-targeted, or
[43373] (b) a polypeptide comprising a polypeptide, a consensus sequence or at least a polypeptide motif as shown in the respective line in column 5 of Table II or in column 8 of Table IV, application no. 6, respectively, and being depicted in the same respective line as said TTC0019, or a functional equivalent or a homolog thereof as depicted in column 8 of Table II, application no. 6, preferably a homolog or functional equivalent as depicted in column 8 of Table II B, application no. 6, and being depicted in the same respective line as said TTC0019, and preferably the activity is increased non-targeted, whereby the respective line discloses in column 7 the fine chemical leucine.

[43374] Accordingly, in one embodiment, the molecule which activity is to be increased in the process of the invention is the gene product with an activity as a “Sec-independent protein translocase subunit”, preferably it is the molecule of section (a) or (b) of this paragraph.

[43375] In particular, it was observed that in plants, especially in Arabidopsis thaliana, increasing or generating the activity of a gene product non-targeted with the activity of a “Sec-independent protein translocase subunit”, preferably being encoded by a gene comprising the nucleic acid sequence SEQ ID NO. 12698, preferably the coding region thereof, conferred the production of or the increase in leucine compared with the wild type control.

[43376] The nucleic acid sequence of TTC0019 from Thermus thermophilus, e.g. as shown in the respective line in column 5 of Table I, application no. 6, has been published in E. And the activity of the gene product thereof is the activity of Sec-independent protein translocase subunit.

[43377] Accordingly, in one embodiment, the process of the present invention for producing valine in a non-human organism, like a microorganism or a plant or a part thereof, comprises increasing or generating the activity of a gene product with the activity of a gene product conferring the activity of “Sec-independent protein translocase subunit”, especially from Thermus thermophilus or its functional equivalent or its homolog, e.g. the increase of
[43378] (a) a gene product of a gene comprising the nucleic acid molecule as shown in the respective line in column 5 of Table I (whereby the respective line discloses in column 7 the fine chemical valine), application no. 6, preferably the coding region thereof, or a homolog or a fragment thereof, and being depicted in the same respective line as said TTC0019, or a functional equivalent or a homolog thereof as shown in column 8 of Table I, application no. 6, preferably the coding region thereof, particularly a homolog or functional equivalent as shown in column 8 of Table I B, application no. 6, and being depicted in the same respective line as said TTC0019, and preferably the activity is increased non-targeted, or
[43379] (b) a polypeptide comprising a polypeptide, a consensus sequence or at least a polypeptide motif as shown in the respective line in column 5 of Table II or in column 8 of Table IV, application no. 6, respectively, and being depicted in the same respective line as said TTC0019, or a functional equivalent or a homolog thereof as depicted in column 8 of Table II, application no. 6, preferably a homolog or functional equivalent as depicted in column 8 of Table II B, application no. 6, and being depicted in the same respective line as said TTC0019, and preferably the activity is increased non-targeted, whereby the respective line discloses in column 7 the fine chemical valine.

[43380] Accordingly, in one embodiment, the molecule which activity is to be increased in the process of the invention is the gene product with an activity as a “Sec-independent protein translocase subunit”, preferably it is the molecule of section (a) or (b) of this paragraph.

[43381] In particular, it was observed that in plants, especially in Arabidopsis thaliana, increasing or generating the activity of a gene product non-targeted with the activity of a “Sec-independent protein translocase subunit”, preferably being encoded by a gene comprising the nucleic acid sequence SEQ ID NO. 12698, preferably the coding region thereof, conferred the production of or the increase in valine compared with the wild type control.

[43382] The nucleic acid sequence of TTC0849 from Thermus thermophilus, e.g. as shown in the respective line in column 5 of Table I, application no. 6, has been published in E. And the activity of the gene product thereof is the activity of 2-isopropylmalate synthase.

[43383] Accordingly, in one embodiment, the process of the present invention for producing isoleucine in a non-human organism, like a microorganism or a plant or a part thereof, comprises increasing or generating the activity of a gene product with the activity of a gene product conferring the activity of “2-isopropylmalate synthase”, especially from Thermus thermophilus or its functional equivalent or its homolog, e.g. the increase of
[43384] (a) a gene product of a gene comprising the nucleic acid molecule as shown in the respective line in column 5 of Table I (whereby the respective line discloses in column 7 the fine chemical isoleucine), application no. 6, preferably the coding region thereof, or a homolog or a fragment thereof, and being depicted in the same respective line as said TTC0849, or a functional equivalent or a homolog thereof as shown in column 8 of Table I, application no. 6, preferably the coding region thereof, particularly a homolog or functional equivalent as shown in column 8 of Table I B, application no. 6, and being depicted in the same respective line as said TTC0849, and preferably the activity is increased non-targeted, or
[43385] (b) a polypeptide comprising a polypeptide, a consensus sequence or at least a polypeptide motif as shown in the respective line in column 5 of Table II or in column 8 of Table IV, application no. 6, respectively, and being depicted in the same respective line as said TTC0849, or a functional equivalent or a homolog thereof as depicted in column 8 of Table II, application no. 6, preferably a homolog or functional equivalent as depicted in column 8 of Table II B, application no. 6, and being depicted in the same respective line as said TTC0849, and preferably the activity is increased non-targeted, whereby the respective line discloses in column 7 the fine chemical isoleucine.

[43386] Accordingly, in one embodiment, the molecule which activity is to be increased in the process of the invention is the gene product with an activity as a “2-isopropylmalate synthase”, preferably it is the molecule of section (a) or (b) of this paragraph.

[43387] In particular, it was observed that in plants, especially in Arabidopsis thaliana, increasing or generating the activity of a gene product non-targeted with the activity of a “2-isopropylmalate synthase”, preferably being encoded by a gene comprising the nucleic acid sequence SEQ ID NO. 107556, preferably the coding region thereof, conferred the production of or the increase in isoleucine compared with the wild type control.

[43388] The nucleic acid sequence of TTC0849 from Thermus thermophilus, e.g. as shown in the respective line in column 5 of Table I, application no. 6, has been published in E. And the activity of the gene product thereof is the activity of 2-isopropylmalate synthase.

[43389] Accordingly, in one embodiment, the process of the present invention for producing leucine in a non-human organism, like a microorganism or a plant or a part thereof, comprises increasing or generating the activity of a gene product with the activity of a gene product conferring the activity of “2-isopropylmalate synthase”, especially from Thermus thermophilus or its functional equivalent or its homolog, e.g. the increase of
[43390] (a) a gene product of a gene comprising the nucleic acid molecule as shown in the respective line in column 5 of Table I (whereby the respective line discloses in column 7 the fine chemical leucine), application no. 6, preferably the coding region thereof, or a homolog or a fragment thereof, and being depicted in the same respective line as said TTC0849, or a functional equivalent or a homolog thereof as shown in column 8 of Table I, application no. 6, preferably the coding region thereof, particularly a homolog or functional equivalent as shown in column 8 of Table I B, application no. 6, and being depicted in the same respective line as said TTC0849, and preferably the activity is increased non-targeted, or
[43391] (b) a polypeptide comprising a polypeptide, a consensus sequence or at least a polypeptide motif as shown in the respective line in column 5 of Table II or in column 8 of Table IV, application no. 6, respectively, and being depicted in the same respective line as said TTC0849, or a functional equivalent or a homolog thereof as depicted in column 8 of Table II, application no. 6, preferably a homolog or functional equivalent as depicted in column 8 of Table II B, application no. 6, and being depicted in the same respective line as said TTC0849, and preferably the activity is increased non-targeted, whereby the respective line discloses in column 7 the fine chemical leucine.

[43392] Accordingly, in one embodiment, the molecule which activity is to be increased in the process of the invention is the gene product with an activity as a “2-isopropylmalate synthase”, preferably it is the molecule of section (a) or (b) of this paragraph.

[43393] In particular, it was observed that in plants, especially in Arabidopsis thaliana, increasing or generating the activity of a gene product non-targeted with the activity of a “2-isopropylmalate synthase”, preferably being encoded by a gene comprising the nucleic acid sequence SEQ ID NO. 107556, preferably the coding region thereof, conferred the production of or the increase in leucine compared with the wild type control.

[43394] The nucleic acid sequence of TTC1386 from Thermus thermophilus, e.g. as shown in the respective line in column 5 of Table I, application no. 6, has been published in E. And the activity of the gene product thereof is the activity of TTC1386-protein.

[43395] Accordingly, in one embodiment, the process of the present invention for producing isoleucine in a non-human organism, like a microorganism or a plant or a part thereof, comprises increasing or generating the activity of a gene product with the activity of a gene product conferring the activity of “TTC1386-protein”, especially from Thermus thermophilus or its functional equivalent or its homolog, e.g. the increase of
[43396] (a) a gene product of a gene comprising the nucleic acid molecule as shown in the respective line in column 5 of Table I (whereby the respective line discloses in column 7 the fine chemical isoleucine), application no. 6, preferably the coding region thereof, or a homolog or a fragment thereof, and being depicted in the same respective line as said TTC1386, or a functional equivalent or a homolog thereof as shown in column 8 of Table I, application no. 6, preferably the coding region thereof, particularly a homolog or functional equivalent as shown in column 8 of Table I B, application no. 6, and being depicted in the same respective line as said TTC1386, and preferably the activity is increased non-targeted, or
[43397] (b) a polypeptide comprising a polypeptide, a consensus sequence or at least a polypeptide motif as shown in the respective line in column 5 of Table II or in column 8 of Table IV, application no. 6, respectively, and being depicted in the same respective line as said TTC1386, or a functional equivalent or a homolog thereof as depicted in column 8 of Table II, application no. 6, preferably a homolog or functional equivalent as depicted in column 8 of Table II B, application no. 6, and being depicted in the same respective line as said TTC1386, and preferably the activity is increased non-targeted, whereby the respective line discloses in column 7 the fine chemical isoleucine.

[43398] Accordingly, in one embodiment, the molecule which activity is to be increased in the process of the invention is the gene product with an activity as a “TTC1386-protein”, preferably it is the molecule of section (a) or (b) of this paragraph.

[43399] In particular, it was observed that in plants, especially in Arabidopsis thaliana, increasing or generating the activity of a gene product non-targeted with the activity of a “TTC1386-protein”, preferably being encoded by a gene comprising the nucleic acid sequence SEQ ID NO. 62079, preferably the coding region thereof, conferred the production of or the increase in isoleucine compared with the wild type control.

[43400] The nucleic acid sequence of TTC1386 from Thermus thermophilus, e.g. as shown in the respective line in column 5 of Table I, application no. 6, has been published in E. And the activity of the gene product thereof is the activity of TTC1386-protein.

[43401] Accordingly, in one embodiment, the process of the present invention for producing leucine in a non-human organism, like a microorganism or a plant or a part thereof, comprises increasing or generating the activity of a gene product with the activity of a gene product conferring the activity of “TTC1386-protein”, especially from Thermus thermophilus or its functional equivalent or its homolog, e.g. the increase of
[43402] (a) a gene product of a gene comprising the nucleic acid molecule as shown in the respective line in column 5 of Table I (whereby the respective line discloses in column 7 the fine chemical leucine), application no. 6, preferably the coding region thereof, or a homolog or a fragment thereof, and being depicted in the same respective line as said TTC1386, or a functional equivalent or a homolog thereof as shown in column 8 of Table I, application no. 6, preferably the coding region thereof, particularly a homolog or functional equivalent as shown in column 8 of Table I B, application no. 6, and being depicted in the same respective line as said TTC1386, and preferably the activity is increased non-targeted, or
[43403] (b) a polypeptide comprising a polypeptide, a consensus sequence or at least a polypeptide motif as shown in the respective line in column 5 of Table II or in column 8 of Table IV, application no. 6, respectively, and being depicted in the same respective line as said TTC1386, or a functional equivalent or a homolog thereof as depicted in column 8 of Table II, application no. 6, preferably a homolog or functional equivalent as depicted in column 8 of Table II B, application no. 6, and being depicted in the same respective line as said TTC1386, and preferably the activity is increased non-targeted, whereby the respective line discloses in column 7 the fine chemical leucine.

[43404] Accordingly, in one embodiment, the molecule which activity is to be increased in the process of the invention is the gene product with an activity as a “TTC1386-protein”, preferably it is the molecule of section (a) or (b) of this paragraph.

[43405] In particular, it was observed that in plants, especially in Arabidopsis thaliana, increasing or generating the activity of a gene product non-targeted with the activity of a “TTC1386-protein”, preferably being encoded by a gene comprising the nucleic acid sequence SEQ ID NO. 62079, preferably the coding region thereof, conferred the production of or the increase in leucine compared with the wild type control.

[43406] The nucleic acid sequence of TTC1386 from Thermus thermophilus, e.g. as shown in the respective line in column 5 of Table I, application no. 6, has been published in E. And the activity of the gene product thereof is the activity of TTC1386-protein.

[43407] Accordingly, in one embodiment, the process of the present invention for producing valine in a non-human organism, like a microorganism or a plant or a part thereof, comprises increasing or generating the activity of a gene product with the activity of a gene product conferring the activity of “TTC1386-protein”, especially from Thermus thermophilus or its functional equivalent or its homolog, e.g. the increase of
[43408] (a) a gene product of a gene comprising the nucleic acid molecule as shown in the respective line in column 5 of Table I (whereby the respective line discloses in column 7 the fine chemical valine), application no. 6, preferably the coding region thereof, or a homolog or a fragment thereof, and being depicted in the same respective line as said TTC1386, or a functional equivalent or a homolog thereof as shown in column 8 of Table I, application no. 6, preferably the coding region thereof, particularly a homolog or functional equivalent as shown in column 8 of Table I B, application no. 6, and being depicted in the same respective line as said TTC1386, and preferably the activity is increased non-targeted, or
[43409] (b) a polypeptide comprising a polypeptide, a consensus sequence or at least a polypeptide motif as shown in the respective line in column 5 of Table II or in column 8 of Table IV, application no. 6, respectively, and being depicted in the same respective line as said TTC1386, or a functional equivalent or a homolog thereof as depicted in column 8 of Table II, application no. 6, preferably a homolog or functional equivalent as depicted in column 8 of Table II B, application no. 6, and being depicted in the same respective line as said TTC1386, and preferably the activity is increased non-targeted, whereby the respective line discloses in column 7 the fine chemical valine.

[43410] Accordingly, in one embodiment, the molecule which activity is to be increased in the process of the invention is the gene product with an activity as a “TTC1386-protein”, preferably it is the molecule of section (a) or (b) of this paragraph.

[43411] In particular, it was observed that in plants, especially in Arabidopsis thaliana, increasing or generating the activity of a gene product non-targeted with the activity of a “TTC1386-protein”, preferably being encoded by a gene comprising the nucleic acid sequence SEQ ID NO. 62079, preferably the coding region thereof, conferred the production of or the increase in valine compared with the wild type control.

[43412] The nucleic acid sequence of TTC1550 from Thermus thermophilus, e.g. as shown in the respective line in column 5 of Table I, application no. 6, has been published in E. And the activity of the gene product thereof is the activity of homocitrate synthase.

[43413] Accordingly, in one embodiment, the process of the present invention for producing isoleucine in a non-human organism, like a microorganism or a plant or a part thereof, comprises increasing or generating the activity of a gene product with the activity of a gene product conferring the activity of “homocitrate synthase”, especially from Thermus thermophilus or its functional equivalent or its homolog, e.g. the increase of
[43414] (a) a gene product of a gene comprising the nucleic acid molecule as shown in the respective line in column 5 of Table I (whereby the respective line discloses in column 7 the fine chemical isoleucine), application no. 6, preferably the coding region thereof, or a homolog or a fragment thereof, and being depicted in the same respective line as said TTC1550, or a functional equivalent or a homolog thereof as shown in column 8 of Table I, application no. 6, preferably the coding region thereof, particularly a homolog or functional equivalent as shown in column 8 of Table I B, application no. 6, and being depicted in the same respective line as said TTC1550, and preferably the activity is increased non-targeted, or
[43415] (b) a polypeptide comprising a polypeptide, a consensus sequence or at least a polypeptide motif as shown in the respective line in column 5 of Table II or in column 8 of Table IV, application no. 6, respectively, and being depicted in the same respective line as said TTC1550, or a functional equivalent or a homolog thereof as depicted in column 8 of Table II, application no. 6, preferably a homolog or functional equivalent as depicted in column 8 of Table II B, application no. 6, and being depicted in the same respective line as said TTC1550, and preferably the activity is increased non-targeted, whereby the respective line discloses in column 7 the fine chemical isoleucine.

[43416] Accordingly, in one embodiment, the molecule which activity is to be increased in the process of the invention is the gene product with an activity as a “homocitrate synthase”, preferably it is the molecule of section (a) or (b) of this paragraph.

[43417] In particular, it was observed that in plants, especially in Arabidopsis thaliana, increasing or generating the activity of a gene product non-targeted with the activity of a “homocitrate synthase”, preferably being encoded by a gene comprising the nucleic acid sequence SEQ ID NO. 12974, preferably the coding region thereof, conferred the production of or the increase in isoleucine compared with the wild type control.

[43418] The nucleic acid sequence of TTC1550 from Thermus thermophilus, e.g. as shown in the respective line in column 5 of Table I, application no. 6, has been published in E. And the activity of the gene product thereof is the activity of homocitrate synthase.

[43419] Accordingly, in one embodiment, the process of the present invention for producing leucine in a non-human organism, like a microorganism or a plant or a part thereof, comprises increasing or generating the activity of a gene product with the activity of a gene product conferring the activity of “homocitrate synthase”, especially from Thermus thermophilus or its functional equivalent or its homolog, e.g. the increase of
[43420] (a) a gene product of a gene comprising the nucleic acid molecule as shown in the respective line in column 5 of Table I (whereby the respective line discloses in column 7 the fine chemical leucine), application no. 6, preferably the coding region thereof, or a homolog or a fragment thereof, and being depicted in the same respective line as said TTC1550, or a functional equivalent or a homolog thereof as shown in column 8 of Table I, application no. 6, preferably the coding region thereof, particularly a homolog or functional equivalent as shown in column 8 of Table I B, application no. 6, and being depicted in the same respective line as said TTC1550, and preferably the activity is increased non-targeted, or
[43421] (b) a polypeptide comprising a polypeptide, a consensus sequence or at least a polypeptide motif as shown in the respective line in column 5 of Table II or in column 8 of Table IV, application no. 6, respectively, and being depicted in the same respective line as said TTC1550, or a functional equivalent or a homolog thereof as depicted in column 8 of Table II, application no. 6, preferably a homolog or functional equivalent as depicted in column 8 of Table II B, application no. 6, and being depicted in the same respective line as said TTC1550, and preferably the activity is increased non-targeted, whereby the respective line discloses in column 7 the fine chemical leucine.

[43422] Accordingly, in one embodiment, the molecule which activity is to be increased in the process of the invention is the gene product with an activity as a “homocitrate synthase”, preferably it is the molecule of section (a) or (b) of this paragraph.

[43423] In particular, it was observed that in plants, especially in Arabidopsis thaliana, increasing or generating the activity of a gene product non-targeted with the activity of a “homocitrate synthase”, preferably being encoded by a gene comprising the nucleic acid sequence SEQ ID NO. 12974, preferably the coding region thereof, conferred the production of or the increase in leucine compared with the wild type control.

[43424] The nucleic acid sequence of TTC1550 from Thermus thermophilus, e.g. as shown in the respective line in column 5 of Table I, application no. 6, has been published in E. And the activity of the gene product thereof is the activity of homocitrate synthase.

[43425] Accordingly, in one embodiment, the process of the present invention for producing valine in a non-human organism, like a microorganism or a plant or a part thereof, comprises increasing or generating the activity of a gene product with the activity of a gene product conferring the activity of “homocitrate synthase”, especially from Thermus thermophilus or its functional equivalent or its homolog, e.g. the increase of
[43426] (a) a gene product of a gene comprising the nucleic acid molecule as shown in the respective line in column 5 of Table I (whereby the respective line discloses in column 7 the fine chemical valine), application no. 6, preferably the coding region thereof, or a homolog or a fragment thereof, and being depicted in the same respective line as said TTC1550, or a functional equivalent or a homolog thereof as shown in column 8 of Table I, application no. 6, preferably the coding region thereof, particularly a homolog or functional equivalent as shown in column 8 of Table I B, application no. 6, and being depicted in the same respective line as said TTC1550, and preferably the activity is increased non-targeted, or
[43427] (b) a polypeptide comprising a polypeptide, a consensus sequence or at least a polypeptide motif as shown in the respective line in column 5 of Table II or in column 8 of Table IV, application no. 6, respectively, and being depicted in the same respective line as said TTC1550, or a functional equivalent or a homolog thereof as depicted in column 8 of Table II, application no. 6, preferably a homolog or functional equivalent as depicted in column 8 of Table II B, application no. 6, and being depicted in the same respective line as said TTC1550, and preferably the activity is increased non-targeted, whereby the respective line discloses in column 7 the fine chemical valine.

[43428] Accordingly, in one embodiment, the molecule which activity is to be increased in the process of the invention is the gene product with an activity as a “homocitrate synthase”, preferably it is the molecule of section (a) or (b) of this paragraph.

[43429] In particular, it was observed that in plants, especially in Arabidopsis thaliana, increasing or generating the activity of a gene product non-targeted with the activity of a “homocitrate synthase”, preferably being encoded by a gene comprising the nucleic acid sequence SEQ ID NO. 12974, preferably the coding region thereof, conferred the production of or the increase in valine compared with the wild type control.

[43430] The nucleic acid sequence of Yal013w from Saccharomyces cerevisiae, e.g. as shown in the respective line in column 5 of Table I, application no. 6, has been published in A. And the activity of the gene product thereof is the activity of YAL013W-protein.

[43431] Accordingly, in one embodiment, the process of the present invention for producing leucine in a non-human organism, like a microorganism or a plant or a part thereof, comprises increasing or generating the activity of a gene product with the activity of a gene product conferring the activity of “YAL013W-protein”, especially from Saccharomyces cerevisiae or its functional equivalent or its homolog, e.g. the increase of
[43432] (a) a gene product of a gene comprising the nucleic acid molecule as shown in the respective line in column 5 of Table I (whereby the respective line discloses in column 7 the fine chemical leucine), application no. 6, preferably the coding region thereof, or a homolog or a fragment thereof, and being depicted in the same respective line as said Yal013w, or a functional equivalent or a homolog thereof as shown in column 8 of Table I, application no. 6, preferably the coding region thereof, particularly a homolog or functional equivalent as shown in column 8 of Table I B, application no. 6, and being depicted in the same respective line as said Yal013w, and preferably the activity is increased non-targeted, or
[43433] (b) a polypeptide comprising a polypeptide, a consensus sequence or at least a polypeptide motif as shown in the respective line in column 5 of Table II or in column 8 of Table IV, application no. 6, respectively, and being depicted in the same respective line as said Yal013w, or a functional equivalent or a homolog thereof as depicted in column 8 of Table II, application no. 6, preferably a homolog or functional equivalent as depicted in column 8 of Table II B, application no. 6, and being depicted in the same respective line as said Yal013w, and preferably the activity is increased non-targeted, whereby the respective line discloses in column 7 the fine chemical leucine.

[43434] Accordingly, in one embodiment, the molecule which activity is to be increased in the process of the invention is the gene product with an activity as a “YAL013W-protein”, preferably it is the molecule of section (a) or (b) of this paragraph.

[43435] In particular, it was observed that in plants, especially in Arabidopsis thaliana, increasing or generating the activity of a gene product non-targeted with the activity of a “YAL013W-protein”, preferably being encoded by a gene comprising the nucleic acid sequence SEQ ID NO. 108092, preferably the coding region thereof, conferred the production of or the increase in leucine compared with the wild type control.

[43436] The nucleic acid sequence of Ybr160w from Saccharomyces cerevisiae, e.g. as shown in the respective line in column 5 of Table I, application no. 6, has been published in A. And the activity of the gene product thereof is the activity of cell division control protein.

[43437] Accordingly, in one embodiment, the process of the present invention for producing valine in a non-human organism, like a microorganism or a plant or a part thereof, comprises increasing or generating the activity of a gene product with the activity of a gene product conferring the activity of “cell division control protein”, especially from Saccharomyces cerevisiae or its functional equivalent or its homolog, e.g. the increase of
[43438] (a) a gene product of a gene comprising the nucleic acid molecule as shown in the respective line in column 5 of Table I (whereby the respective line discloses in column 7 the fine chemical valine), application no. 6, preferably the coding region thereof, or a homolog or a fragment thereof, and being depicted in the same respective line as said Ybr160w, or a functional equivalent or a homolog thereof as shown in column 8 of Table I, application no. 6, preferably the coding region thereof, particularly a homolog or functional equivalent as shown in column 8 of Table I B, application no. 6, and being depicted in the same respective line as said Ybr160w, and preferably the activity is increased non-targeted, or
[43439] (b) a polypeptide comprising a polypeptide, a consensus sequence or at least a polypeptide motif as shown in the respective line in column 5 of Table II or in column 8 of Table IV, application no. 6, respectively, and being depicted in the same respective line as said Ybr160w, or a functional equivalent or a homolog thereof as depicted in column 8 of Table II, application no. 6, preferably a homolog or functional equivalent as depicted in column 8 of Table II B, application no. 6, and being depicted in the same respective line as said Ybr160w, and preferably the activity is increased non-targeted, whereby the respective line discloses in column 7 the fine chemical valine.

[43440] Accordingly, in one embodiment, the molecule which activity is to be increased in the process of the invention is the gene product with an activity as a “cell division control protein”, preferably it is the molecule of section (a) or (b) of this paragraph.

[43441] In particular, it was observed that in plants, especially in Arabidopsis thaliana, increasing or generating the activity of a gene product non-targeted with the activity of a “cell division control protein”, preferably being encoded by a gene comprising the nucleic acid sequence SEQ ID NO. 62717, preferably the coding region thereof, conferred the production of or the increase in valine compared with the wild type control.

[43442] The nucleic acid sequence of Ycr012w from Saccharomyces cerevisiae, e.g. as shown in the respective line in column 5 of Table I, application no. 6, has been published in A. And the activity of the gene product thereof is the activity of phosphoglycerate kinase.

[43443] Accordingly, in one embodiment, the process of the present invention for producing isoleucine in a non-human organism, like a microorganism or a plant or a part thereof, comprises increasing or generating the activity of a gene product with the activity of a gene product conferring the activity of “phosphoglycerate kinase”, especially from Saccharomyces cerevisiae or its functional equivalent or its homolog, e.g. the increase of
[43444] (a) a gene product of a gene comprising the nucleic acid molecule as shown in the respective line in column 5 of Table I (whereby the respective line discloses in column 7 the fine chemical isoleucine), application no. 6, preferably the coding region thereof, or a homolog or a fragment thereof, and being depicted in the same respective line as said Ycr012w, or a functional equivalent or a homolog thereof as shown in column 8 of Table I, application no. 6, preferably the coding region thereof, particularly a homolog or functional equivalent as shown in column 8 of Table I B, application no. 6, and being depicted in the same respective line as said Ycr012w, and preferably the activity is increased plastidic, or
[43445] (b) a polypeptide comprising a polypeptide, a consensus sequence or at least a polypeptide motif as shown in the respective line in column 5 of Table II or in column 8 of Table IV, application no. 6, respectively, and being depicted in the same respective line as said Ycr012w, or a functional equivalent or a homolog thereof as depicted in column 8 of Table II, application no. 6, preferably a homolog or functional equivalent as depicted in column 8 of Table II B, application no. 6, and being depicted in the same respective line as said Ycr012w, and preferably the activity is increased plastidic, whereby the respective line discloses in column 7 the fine chemical isoleucine.

[43446] Accordingly, in one embodiment, the molecule which activity is to be increased in the process of the invention is the gene product with an activity as a “phosphoglycerate kinase”, preferably it is the molecule of section (a) or (b) of this paragraph.

[43447] In particular, it was observed that in plants, especially in Arabidopsis thaliana, increasing or generating the activity of a gene product plastidic with the activity of a “phosphoglycerate kinase”, preferably being encoded by a gene comprising the nucleic acid sequence SEQ ID NO. 108113, preferably the coding region thereof, conferred the production of or the increase in isoleucine compared with the wild type control.

[43448] The nucleic acid sequence of Ycr012w from Saccharomyces cerevisiae, e.g. as shown in the respective line in column 5 of Table I, application no. 6, has been published in A. And the activity of the gene product thereof is the activity of phosphoglycerate kinase.

[43449] Accordingly, in one embodiment, the process of the present invention for producing leucine in a non-human organism, like a microorganism or a plant or a part thereof, comprises increasing or generating the activity of a gene product with the activity of a gene product conferring the activity of “phosphoglycerate kinase”, especially from Saccharomyces cerevisiae or its functional equivalent or its homolog, e.g. the increase of
[43450] (a) a gene product of a gene comprising the nucleic acid molecule as shown in the respective line in column 5 of Table I (whereby the respective line discloses in column 7 the fine chemical leucine), application no. 6, preferably the coding region thereof, or a homolog or a fragment thereof, and being depicted in the same respective line as said Ycr012w, or a functional equivalent or a homolog thereof as shown in column 8 of Table I, application no. 6, preferably the coding region thereof, particularly a homolog or functional equivalent as shown in column 8 of Table I B, application no. 6, and being depicted in the same respective line as said Ycr012w, and preferably the activity is increased plastidic, or
[43451] (b) a polypeptide comprising a polypeptide, a consensus sequence or at least a polypeptide motif as shown in the respective line in column 5 of Table II or in column 8 of Table IV, application no. 6, respectively, and being depicted in the same respective line as said Ycr012w, or a functional equivalent or a homolog thereof as depicted in column 8 of Table II, application no. 6, preferably a homolog or functional equivalent as depicted in column 8 of Table II B, application no. 6, and being depicted in the same respective line as said Ycr012w, and preferably the activity is increased plastidic, whereby the respective line discloses in column 7 the fine chemical leucine.

[43452] Accordingly, in one embodiment, the molecule which activity is to be increased in the process of the invention is the gene product with an activity as a “phosphoglycerate kinase”, preferably it is the molecule of section (a) or (b) of this paragraph.

[43453] In particular, it was observed that in plants, especially in Arabidopsis thaliana, increasing or generating the activity of a gene product plastidic with the activity of a “phosphoglycerate kinase”, preferably being encoded by a gene comprising the nucleic acid sequence SEQ ID NO. 108113, preferably the coding region thereof, conferred the production of or the increase in leucine compared with the wild type control.

[43454] The nucleic acid sequence of Ydr046c from Saccharomyces cerevisiae, e.g. as shown in the respective line in column 5 of Table I, application no. 6, has been published in A. And the activity of the gene product thereof is the activity of branched-chain amino acid permease.

[43455] Accordingly, in one embodiment, the process of the present invention for producing isoleucine in a non-human organism, like a microorganism or a plant or a part thereof, comprises increasing or generating the activity of a gene product with the activity of a gene product conferring the activity of “branched-chain amino acid permease”, especially from Saccharomyces cerevisiae or its functional equivalent or its homolog, e.g. the increase of
[43456] (a) a gene product of a gene comprising the nucleic acid molecule as shown in the respective line in column 5 of Table I (whereby the respective line discloses in column 7 the fine chemical isoleucine), application no. 6, preferably the coding region thereof, or a homolog or a fragment thereof, and being depicted in the same respective line as said Ydr046c, or a functional equivalent or a homolog thereof as shown in column 8 of Table I, application no. 6, preferably the coding region thereof, particularly a homolog or functional equivalent as shown in column 8 of Table I B, application no. 6, and being depicted in the same respective line as said Ydr046c, and preferably the activity is increased plastidic, or
[43457] (b) a polypeptide comprising a polypeptide, a consensus sequence or at least a polypeptide motif as shown in the respective line in column 5 of Table II or in column 8 of Table IV, application no. 6, respectively, and being depicted in the same respective line as said Ydr046c, or a functional equivalent or a homolog thereof as depicted in column 8 of Table II, application no. 6, preferably a homolog or functional equivalent as depicted in column 8 of Table II B, application no. 6, and being depicted in the same respective line as said Ydr046c, and preferably the activity is increased plastidic, whereby the respective line discloses in column 7 the fine chemical isoleucine.

[43458] Accordingly, in one embodiment, the molecule which activity is to be increased in the process of the invention is the gene product with an activity as a “branched-chain amino acid permease”, preferably it is the molecule of section (a) or (b) of this paragraph.

[43459] In particular, it was observed that in plants, especially in Arabidopsis thaliana, increasing or generating the activity of a gene product plastidic with the activity of a “branched-chain amino acid permease”, preferably being encoded by a gene comprising the nucleic acid sequence SEQ ID NO. 63544, preferably the coding region thereof, conferred the production of or the increase in isoleucine compared with the wild type control.

[43460] The nucleic acid sequence of Ydr046c from Saccharomyces cerevisiae, e.g. as shown in the respective line in column 5 of Table I, application no. 6, has been published in A. And the activity of the gene product thereof is the activity of branched-chain amino acid permease.

[43461] Accordingly, in one embodiment, the process of the present invention for producing valine in a non-human organism, like a microorganism or a plant or a part thereof, comprises increasing or generating the activity of a gene product with the activity of a gene product conferring the activity of “branched-chain amino acid permease”, especially from Saccharomyces cerevisiae or its functional equivalent or its homolog, e.g. the increase of
[43462] (a) a gene product of a gene comprising the nucleic acid molecule as shown in the respective line in column 5 of Table I (whereby the respective line discloses in column 7 the fine chemical valine), application no. 6, preferably the coding region thereof, or a homolog or a fragment thereof, and being depicted in the same respective line as said Ydr046c, or a functional equivalent or a homolog thereof as shown in column 8 of Table I, application no. 6, preferably the coding region thereof, particularly a homolog or functional equivalent as shown in column 8 of Table I B, application no. 6, and being depicted in the same respective line as said Ydr046c, and preferably the activity is increased plastidic, or
[43463] (b) a polypeptide comprising a polypeptide, a consensus sequence or at least a polypeptide motif as shown in the respective line in column 5 of Table II or in column 8 of Table IV, application no. 6, respectively, and being depicted in the same respective line as said Ydr046c, or a functional equivalent or a homolog thereof as depicted in column 8 of Table II, application no. 6, preferably a homolog or functional equivalent as depicted in column 8 of Table II B, application no. 6, and being depicted in the same respective line as said Ydr046c, and preferably the activity is increased plastidic, whereby the respective line discloses in column 7 the fine chemical valine.

[43464] Accordingly, in one embodiment, the molecule which activity is to be increased in the process of the invention is the gene product with an activity as a “branched-chain amino acid permease”, preferably it is the molecule of section (a) or (b) of this paragraph.

[43465] In particular, it was observed that in plants, especially in Arabidopsis thaliana, increasing or generating the activity of a gene product plastidic with the activity of a “branched-chain amino acid permease”, preferably being encoded by a gene comprising the nucleic acid sequence SEQ ID NO. 63544, preferably the coding region thereof, conferred the production of or the increase in valine compared with the wild type control.

[43466] The nucleic acid sequence of Ydr183w from Saccharomyces cerevisiae, e.g. as shown in the respective line in column 5 of Table I, application no. 6, has been published in A. And the activity of the gene product thereof is the activity of ydr183w-protein.

[43467] Accordingly, in one embodiment, the process of the present invention for producing valine in a non-human organism, like a microorganism or a plant or a part thereof, comprises increasing or generating the activity of a gene product with the activity of a gene product conferring the activity of “ydr183w-protein”, especially from Saccharomyces cerevisiae or its functional equivalent or its homolog, e.g. the increase of
[43468] (a) a gene product of a gene comprising the nucleic acid molecule as shown in the respective line in column 5 of Table I (whereby the respective line discloses in column 7 the fine chemical valine), application no. 6, preferably the coding region thereof, or a homolog or a fragment thereof, and being depicted in the same respective line as said Ydr183w, or a functional equivalent or a homolog thereof as shown in column 8 of Table I, application no. 6, preferably the coding region thereof, particularly a homolog or functional equivalent as shown in column 8 of Table I B, application no. 6, and being depicted in the same respective line as said Ydr183w, and preferably the activity is increased plastidic, or
[43469] (b) a polypeptide comprising a polypeptide, a consensus sequence or at least a polypeptide motif as shown in the respective line in column 5 of Table II or in column 8 of Table IV, application no. 6, respectively, and being depicted in the same respective line as said Ydr183w, or a functional equivalent or a homolog thereof as depicted in column 8 of Table II, application no. 6, preferably a homolog or functional equivalent as depicted in column 8 of Table II B, application no. 6, and being depicted in the same respective line as said Ydr183w, and preferably the activity is increased plastidic, whereby the respective line discloses in column 7 the fine chemical valine.

[43470] Accordingly, in one embodiment, the molecule which activity is to be increased in the process of the invention is the gene product with an activity as a “ydr183w-protein”, preferably it is the molecule of section (a) or (b) of this paragraph.

[43471] In particular, it was observed that in plants, especially in Arabidopsis thaliana, increasing or generating the activity of a gene product plastidic with the activity of a “ydr183w-protein”, preferably being encoded by a gene comprising the nucleic acid sequence SEQ ID NO. 90103, preferably the coding region thereof, conferred the production of or the increase in valine compared with the wild type control.

[43472] The nucleic acid sequence of Yel069c from Saccharomyces cerevisiae, e.g. as shown in the respective line in column 5 of Table I, application no. 6, has been published in A. And the activity of the gene product thereof is the activity of hexose transporter.

[43473] Accordingly, in one embodiment, the process of the present invention for producing isoleucine in a non-human organism, like a microorganism or a plant or a part thereof, comprises increasing or generating the activity of a gene product with the activity of a gene product conferring the activity of “hexose transporter”, especially from Saccharomyces cerevisiae or its functional equivalent or its homolog, e.g. the increase of
[43474] (a) a gene product of a gene comprising the nucleic acid molecule as shown in the respective line in column 5 of Table I (whereby the respective line discloses in column 7 the fine chemical isoleucine), application no. 6, preferably the coding region thereof, or a homolog or a fragment thereof, and being depicted in the same respective line as said Yel069c, or a functional equivalent or a homolog thereof as shown in column 8 of Table I, application no. 6, preferably the coding region thereof, particularly a homolog or functional equivalent as shown in column 8 of Table I B, application no. 6, and being depicted in the same respective line as said Yel069c, and preferably the activity is increased plastidic, or
[43475] (b) a polypeptide comprising a polypeptide, a consensus sequence or at least a polypeptide motif as shown in the respective line in column 5 of Table II or in column 8 of Table IV, application no. 6, respectively, and being depicted in the same respective line as said Yel069c, or a functional equivalent or a homolog thereof as depicted in column 8 of Table II, application no. 6, preferably a homolog or functional equivalent as depicted in column 8 of Table II B, application no. 6, and being depicted in the same respective line as said Yel069c, and preferably the activity is increased plastidic, whereby the respective line discloses in column 7 the fine chemical isoleucine.

[43476] Accordingly, in one embodiment, the molecule which activity is to be increased in the process of the invention is the gene product with an activity as a “hexose transporter”, preferably it is the molecule of section (a) or (b) of this paragraph.

[43477] In particular, it was observed that in plants, especially in Arabidopsis thaliana, increasing or generating the activity of a gene product plastidic with the activity of a “hexose transporter”, preferably being encoded by a gene comprising the nucleic acid sequence SEQ ID NO. 97298, preferably the coding region thereof, conferred the production of or the increase in isoleucine compared with the wild type control.

[43478] The nucleic acid sequence of Ygl237c from Saccharomyces cerevisiae, e.g. as shown in the respective line in column 5 of Table I, application no. 6, has been published in A. And the activity of the gene product thereof is the activity of ygl237c-protein.

[43479] Accordingly, in one embodiment, the process of the present invention for producing isoleucine in a non-human organism, like a microorganism or a plant or a part thereof, comprises increasing or generating the activity of a gene product with the activity of a gene product conferring the activity of “ygl237c-protein”, especially from Saccharomyces cerevisiae or its functional equivalent or its homolog, e.g. the increase of
[43480] (a) a gene product of a gene comprising the nucleic acid molecule as shown in the respective line in column 5 of Table I (whereby the respective line discloses in column 7 the fine chemical isoleucine), application no. 6, preferably the coding region thereof, or a homolog or a fragment thereof, and being depicted in the same respective line as said Ygl237c, or a functional equivalent or a homolog thereof as shown in column 8 of Table I, application no. 6, preferably the coding region thereof, particularly a homolog or functional equivalent as shown in column 8 of Table I B, application no. 6, and being depicted in the same respective line as said Ygl237c, and preferably the activity is increased non-targeted, or
[43481] (b) a polypeptide comprising a polypeptide, a consensus sequence or at least a polypeptide motif as shown in the respective line in column 5 of Table II or in column 8 of Table IV, application no. 6, respectively, and being depicted in the same respective line as said Ygl237c, or a functional equivalent or a homolog thereof as depicted in column 8 of Table II, application no. 6, preferably a homolog or functional equivalent as depicted in column 8 of Table II B, application no. 6, and being depicted in the same respective line as said Ygl237c, and preferably the activity is increased non-targeted, whereby the respective line discloses in column 7 the fine chemical isoleucine.

[43482] Accordingly, in one embodiment, the molecule which activity is to be increased in the process of the invention is the gene product with an activity as a “ygl237c-protein”, preferably it is the molecule of section (a) or (b) of this paragraph.

[43483] In particular, it was observed that in plants, especially in Arabidopsis thaliana, increasing or generating the activity of a gene product non-targeted with the activity of a “ygl237c-protein”, preferably being encoded by a gene comprising the nucleic acid sequence SEQ ID NO. 64177, preferably the coding region thereof, conferred the production of or the increase in isoleucine compared with the wild type control.

[43484] The nucleic acid sequence of Ygl237c from Saccharomyces cerevisiae, e.g. as shown in the respective line in column 5 of Table I, application no. 6, has been published in A. And the activity of the gene product thereof is the activity of ygl237c-protein.

[43485] Accordingly, in one embodiment, the process of the present invention for producing leucine in a non-human organism, like a microorganism or a plant or a part thereof, comprises increasing or generating the activity of a gene product with the activity of a gene product conferring the activity of “ygl237c-protein”, especially from Saccharomyces cerevisiae or its functional equivalent or its homolog, e.g. the increase of
[43486] (a) a gene product of a gene comprising the nucleic acid molecule as shown in the respective line in column 5 of Table I (whereby the respective line discloses in column 7 the fine chemical leucine), application no. 6, preferably the coding region thereof, or a homolog or a fragment thereof, and being depicted in the same respective line as said Ygl237c, or a functional equivalent or a homolog thereof as shown in column 8 of Table I, application no. 6, preferably the coding region thereof, particularly a homolog or functional equivalent as shown in column 8 of Table I B, application no. 6, and being depicted in the same respective line as said Ygl237c, and preferably the activity is increased non-targeted, or
[43487] (b) a polypeptide comprising a polypeptide, a consensus sequence or at least a polypeptide motif as shown in the respective line in column 5 of Table II or in column 8 of Table IV, application no. 6, respectively, and being depicted in the same respective line as said Ygl237c, or a functional equivalent or a homolog thereof as depicted in column 8 of Table II, application no. 6, preferably a homolog or functional equivalent as depicted in column 8 of Table II B, application no. 6, and being depicted in the same respective line as said Ygl237c, and preferably the activity is increased non-targeted, whereby the respective line discloses in column 7 the fine chemical leucine.

[43488] Accordingly, in one embodiment, the molecule which activity is to be increased in the process of the invention is the gene product with an activity as a “ygl237c-protein”, preferably it is the molecule of section (a) or (b) of this paragraph.

[43489] In particular, it was observed that in plants, especially in Arabidopsis thaliana, increasing or generating the activity of a gene product non-targeted with the activity of a “ygl237c-protein”, preferably being encoded by a gene comprising the nucleic acid sequence SEQ ID NO. 64177, preferably the coding region thereof, conferred the production of or the increase in leucine compared with the wild type control.

[43490] The nucleic acid sequence of Ygr193c from Saccharomyces cerevisiae, e.g. as shown in the respective line in column 5 of Table I, application no. 6, has been published in A. And the activity of the gene product thereof is the activity of YGR193C-protein.

[43491] Accordingly, in one embodiment, the process of the present invention for producing leucine in a non-human organism, like a microorganism or a plant or a part thereof, comprises increasing or generating the activity of a gene product with the activity of a gene product conferring the activity of “YGR193C-protein”, especially from Saccharomyces cerevisiae or its functional equivalent or its homolog, e.g. the increase of
[43492] (a) a gene product of a gene comprising the nucleic acid molecule as shown in the respective line in column 5 of Table I (whereby the respective line discloses in column 7 the fine chemical leucine), application no. 6, preferably the coding region thereof, or a homolog or a fragment thereof, and being depicted in the same respective line as said Ygr193c, or a functional equivalent or a homolog thereof as shown in column 8 of Table I, application no. 6, preferably the coding region thereof, particularly a homolog or functional equivalent as shown in column 8 of Table I B, application no. 6, and being depicted in the same respective line as said Ygr193c, and preferably the activity is increased non-targeted, or
[43493] (b) a polypeptide comprising a polypeptide, a consensus sequence or at least a polypeptide motif as shown in the respective line in column 5 of Table II or in column 8 of Table IV, application no. 6, respectively, and being depicted in the same respective line as said Ygr193c, or a functional equivalent or a homolog thereof as depicted in column 8 of Table II, application no. 6, preferably a homolog or functional equivalent as depicted in column 8 of Table II B, application no. 6, and being depicted in the same respective line as said Ygr193c, and preferably the activity is increased non-targeted, whereby the respective line discloses in column 7 the fine chemical leucine.

[43494] Accordingly, in one embodiment, the molecule which activity is to be increased in the process of the invention is the gene product with an activity as a “YGR193C-protein”, preferably it is the molecule of section (a) or (b) of this paragraph.

[43495] In particular, it was observed that in plants, especially in Arabidopsis thaliana, increasing or generating the activity of a gene product non-targeted with the activity of a “YGR193C-protein”, preferably being encoded by a gene comprising the nucleic acid sequence SEQ ID NO. 108487, preferably the coding region thereof, conferred the production of or the increase in leucine compared with the wild type control.

[43496] The nucleic acid sequence of Yhr006w from Saccharomyces cerevisiae, e.g. as shown in the respective line in column 5 of Table I, application no. 6, has been published in A. And the activity of the gene product thereof is the activity of yhr006w-protein.

[43497] Accordingly, in one embodiment, the process of the present invention for producing isoleucine in a non-human organism, like a microorganism or a plant or a part thereof, comprises increasing or generating the activity of a gene product with the activity of a gene product conferring the activity of “yhr006w-protein”, especially from Saccharomyces cerevisiae or its functional equivalent or its homolog, e.g. the increase of
[43498] (a) a gene product of a gene comprising the nucleic acid molecule as shown in the respective line in column 5 of Table I (whereby the respective line discloses in column 7 the fine chemical isoleucine), application no. 6, preferably the coding region thereof, or a homolog or a fragment thereof, and being depicted in the same respective line as said Yhr006w, or a functional equivalent or a homolog thereof as shown in column 8 of Table I, application no. 6, preferably the coding region thereof, particularly a homolog or functional equivalent as shown in column 8 of Table I B, application no. 6, and being depicted in the same respective line as said Yhr006w, and preferably the activity is increased non-targeted, or
[43499] (b) a polypeptide comprising a polypeptide, a consensus sequence or at least a polypeptide motif as shown in the respective line in column 5 of Table II or in column 8 of Table IV, application no. 6, respectively, and being depicted in the same respective line as said Yhr006w, or a functional equivalent or a homolog thereof as depicted in column 8 of Table II, application no. 6, preferably a homolog or functional equivalent as depicted in column 8 of Table II B, application no. 6, and being depicted in the same respective line as said Yhr006w, and preferably the activity is increased non-targeted, whereby the respective line discloses in column 7 the fine chemical isoleucine.

[43500] Accordingly, in one embodiment, the molecule which activity is to be increased in the process of the invention is the gene product with an activity as a “yhr006w-protein”, preferably it is the molecule of section (a) or (b) of this paragraph.

[43501] In particular, it was observed that in plants, especially in Arabidopsis thaliana, increasing or generating the activity of a gene product non-targeted with the activity of a “yhr006w-protein”, preferably being encoded by a gene comprising the nucleic acid sequence SEQ ID NO. 90284, preferably the coding region thereof, conferred the production of or the increase in isoleucine compared with the wild type control.

[43502] The nucleic acid sequence of Yhr006w from Saccharomyces cerevisiae, e.g. as shown in the respective line in column 5 of Table I, application no. 6, has been published in A. And the activity of the gene product thereof is the activity of yhr006w-protein.

[43503] Accordingly, in one embodiment, the process of the present invention for producing leucine in a non-human organism, like a microorganism or a plant or a part thereof, comprises increasing or generating the activity of a gene product with the activity of a gene product conferring the activity of “yhr006w-protein”, especially from Saccharomyces cerevisiae or its functional equivalent or its homolog, e.g. the increase of
[43504] (a) a gene product of a gene comprising the nucleic acid molecule as shown in the respective line in column 5 of Table I (whereby the respective line discloses in column 7 the fine chemical leucine), application no. 6, preferably the coding region thereof, or a homolog or a fragment thereof, and being depicted in the same respective line as said Yhr006w, or a functional equivalent or a homolog thereof as shown in column 8 of Table I, application no. 6, preferably the coding region thereof, particularly a homolog or functional equivalent as shown in column 8 of Table I B, application no. 6, and being depicted in the same respective line as said Yhr006w, and preferably the activity is increased non-targeted, or
[43505] (b) a polypeptide comprising a polypeptide, a consensus sequence or at least a polypeptide motif as shown in the respective line in column 5 of Table II or in column 8 of Table IV, application no. 6, respectively, and being depicted in the same respective line as said Yhr006w, or a functional equivalent or a homolog thereof as depicted in column 8 of Table II, application no. 6, preferably a homolog or functional equivalent as depicted in column 8 of Table II B, application no. 6, and being depicted in the same respective line as said Yhr006w, and preferably the activity is increased non-targeted, whereby the respective line discloses in column 7 the fine chemical leucine.

[43506] Accordingly, in one embodiment, the molecule which activity is to be increased in the process of the invention is the gene product with an activity as a “yhr006w-protein”, preferably it is the molecule of section (a) or (b) of this paragraph.

[43507] In particular, it was observed that in plants, especially in Arabidopsis thaliana, increasing or generating the activity of a gene product non-targeted with the activity of a “yhr006w-protein”, preferably being encoded by a gene comprising the nucleic acid sequence SEQ ID NO. 90284, preferably the coding region thereof, conferred the production of or the increase in leucine compared with the wild type control.

[43508] The nucleic acid sequence of Yhr072w-a from Saccharomyces cerevisiae, e.g. as shown in the respective line in column 5 of Table I, application no. 6, has been published in A. And the activity of the gene product thereof is the activity of H/ACA ribonucleoprotein complex subunit 3.

[43509] Accordingly, in one embodiment, the process of the present invention for producing isoleucine in a non-human organism, like a microorganism or a plant or a part thereof, comprises increasing or generating the activity of a gene product with the activity of a gene product conferring the activity of “H/ACA ribonucleoprotein complex subunit 3”, especially from Saccharomyces cerevisiae or its functional equivalent or its homolog, e.g. the increase of
[43510] (a) a gene product of a gene comprising the nucleic acid molecule as shown in the respective line in column 5 of Table I (whereby the respective line discloses in column 7 the fine chemical isoleucine), application no. 6, preferably the coding region thereof, or a homolog or a fragment thereof, and being depicted in the same respective line as said Yhr072w-a, or a functional equivalent or a homolog thereof as shown in column 8 of Table I, application no. 6, preferably the coding region thereof, particularly a homolog or functional equivalent as shown in column 8 of Table I B, application no. 6, and being depicted in the same respective line as said Yhr072w-a, and preferably the activity is increased non-targeted, or
[43511] (b) a polypeptide comprising a polypeptide, a consensus sequence or at least a polypeptide motif as shown in the respective line in column 5 of Table II or in column 8 of Table IV, application no. 6, respectively, and being depicted in the same respective line as said Yhr072w-a, or a functional equivalent or a homolog thereof as depicted in column 8 of Table II, application no. 6, preferably a homolog or functional equivalent as depicted in column 8 of Table II B, application no. 6, and being depicted in the same respective line as said Yhr072w-a, and preferably the activity is increased non-targeted, whereby the respective line discloses in column 7 the fine chemical isoleucine.

[43512] Accordingly, in one embodiment, the molecule which activity is to be increased in the process of the invention is the gene product with an activity as a “H/ACA ribonucleoprotein complex subunit 3”, preferably it is the molecule of section (a) or (b) of this paragraph.

[43513] In particular, it was observed that in plants, especially in Arabidopsis thaliana, increasing or generating the activity of a gene product non-targeted with the activity of a “H/ACA ribonucleoprotein complex subunit 3”, preferably being encoded by a gene comprising the nucleic acid sequence SEQ ID NO. 64470, preferably the coding region thereof, conferred the production of or the increase in isoleucine compared with the wild type control.

[43514] The nucleic acid sequence of Yhr072w-a from Saccharomyces cerevisiae, e.g. as shown in the respective line in column 5 of Table I, application no. 6, has been published in A. And the activity of the gene product thereof is the activity of H/ACA ribonucleoprotein complex subunit 3.

[43515] Accordingly, in one embodiment, the process of the present invention for producing leucine in a non-human organism, like a microorganism or a plant or a part thereof, comprises increasing or generating the activity of a gene product with the activity of a gene product conferring the activity of “H/ACA ribonucleoprotein complex subunit 3”, especially from Saccharomyces cerevisiae or its functional equivalent or its homolog, e.g. the increase of
[43516] (a) a gene product of a gene comprising the nucleic acid molecule as shown in the respective line in column 5 of Table I (whereby the respective line discloses in column 7 the fine chemical leucine), application no. 6, preferably the coding region thereof, or a homolog or a fragment thereof, and being depicted in the same respective line as said Yhr072w-a, or a functional equivalent or a homolog thereof as shown in column 8 of Table I, application no. 6, preferably the coding region thereof, particularly a homolog or functional equivalent as shown in column 8 of Table I B, application no. 6, and being depicted in the same respective line as said Yhr072w-a, and preferably the activity is increased non-targeted, or
[43517] (b) a polypeptide comprising a polypeptide, a consensus sequence or at least a polypeptide motif as shown in the respective line in column 5 of Table II or in column 8 of Table IV, application no. 6, respectively, and being depicted in the same respective line as said Yhr072w-a, or a functional equivalent or a homolog thereof as depicted in column 8 of Table II, application no. 6, preferably a homolog or functional equivalent as depicted in column 8 of Table II B, application no. 6, and being depicted in the same respective line as said Yhr072w-a, and preferably the activity is increased non-targeted, whereby the respective line discloses in column 7 the fine chemical leucine.

[43518] Accordingly, in one embodiment, the molecule which activity is to be increased in the process of the invention is the gene product with an activity as a “H/ACA ribonucleoprotein complex subunit 3”, preferably it is the molecule of section (a) or (b) of this paragraph.

[43519] In particular, it was observed that in plants, especially in Arabidopsis thaliana, increasing or generating the activity of a gene product non-targeted with the activity of a “H/ACA ribonucleoprotein complex subunit 3”, preferably being encoded by a gene comprising the nucleic acid sequence SEQ ID NO. 64470, preferably the coding region thereof, conferred the production of or the increase in leucine compared with the wild type control.

[43520] The nucleic acid sequence of Yil155c from Saccharomyces cerevisiae, e.g. as shown in the respective line in column 5 of Table I, application no. 6, has been published in A. And the activity of the gene product thereof is the activity of glycerol-3-phosphate dehydrogenase.

[43521] Accordingly, in one embodiment, the process of the present invention for producing isoleucine in a non-human organism, like a microorganism or a plant or a part thereof, comprises increasing or generating the activity of a gene product with the activity of a gene product conferring the activity of “glycerol-3-phosphate dehydrogenase”, especially from Saccharomyces cerevisiae or its functional equivalent or its homolog, e.g. the increase of
[43522] (a) a gene product of a gene comprising the nucleic acid molecule as shown in the respective line in column 5 of Table I (whereby the respective line discloses in column 7 the fine chemical isoleucine), application no. 6, preferably the coding region thereof, or a homolog or a fragment thereof, and being depicted in the same respective line as said Yil155c, or a functional equivalent or a homolog thereof as shown in column 8 of Table I, application no. 6, preferably the coding region thereof, particularly a homolog or functional equivalent as shown in column 8 of Table I B, application no. 6, and being depicted in the same respective line as said Yil155c, and preferably the activity is increased non-targeted, or
[43523] (b) a polypeptide comprising a polypeptide, a consensus sequence or at least a polypeptide motif as shown in the respective line in column 5 of Table II or in column 8 of Table IV, application no. 6, respectively, and being depicted in the same respective line as said Yil155c, or a functional equivalent or a homolog thereof as depicted in column 8 of Table II, application no. 6, preferably a homolog or functional equivalent as depicted in column 8 of Table II B, application no. 6, and being depicted in the same respective line as said Yil155c, and preferably the activity is increased non-targeted, whereby the respective line discloses in column 7 the fine chemical isoleucine.

[43524] Accordingly, in one embodiment, the molecule which activity is to be increased in the process of the invention is the gene product with an activity as a “glycerol-3-phosphate dehydrogenase”, preferably it is the molecule of section (a) or (b) of this paragraph.

[43525] In particular, it was observed that in plants, especially in Arabidopsis thaliana, increasing or generating the activity of a gene product non-targeted with the activity of a “glycerol-3-phosphate dehydrogenase”, preferably being encoded by a gene comprising the nucleic acid sequence SEQ ID NO. 108514, preferably the coding region thereof, conferred the production of or the increase in isoleucine compared with the wild type control.

[43526] The nucleic acid sequence of Yil155c from Saccharomyces cerevisiae, e.g. as shown in the respective line in column 5 of Table I, application no. 6, has been published in A. And the activity of the gene product thereof is the activity of glycerol-3-phosphate dehydrogenase.

[43527] Accordingly, in one embodiment, the process of the present invention for producing leucine in a non-human organism, like a microorganism or a plant or a part thereof, comprises increasing or generating the activity of a gene product with the activity of a gene product conferring the activity of “glycerol-3-phosphate dehydrogenase”, especially from Saccharomyces cerevisiae or its functional equivalent or its homolog, e.g. the increase of
[43528] (a) a gene product of a gene comprising the nucleic acid molecule as shown in the respective line in column 5 of Table I (whereby the respective line discloses in column 7 the fine chemical leucine), application no. 6, preferably the coding region thereof, or a homolog or a fragment thereof, and being depicted in the same respective line as said Yil155c, or a functional equivalent or a homolog thereof as shown in column 8 of Table I, application no. 6, preferably the coding region thereof, particularly a homolog or functional equivalent as shown in column 8 of Table I B, application no. 6, and being depicted in the same respective line as said Yil155c, and preferably the activity is increased non-targeted, or
[43529] (b) a polypeptide comprising a polypeptide, a consensus sequence or at least a polypeptide motif as shown in the respective line in column 5 of Table II or in column 8 of Table IV, application no. 6, respectively, and being depicted in the same respective line as said Yil155c, or a functional equivalent or a homolog thereof as depicted in column 8 of Table II, application no. 6, preferably a homolog or functional equivalent as depicted in column 8 of Table II B, application no. 6, and being depicted in the same respective line as said Yil155c, and preferably the activity is increased non-targeted, whereby the respective line discloses in column 7 the fine chemical leucine.

[43530] Accordingly, in one embodiment, the molecule which activity is to be increased in the process of the invention is the gene product with an activity as a “glycerol-3-phosphate dehydrogenase”, preferably it is the molecule of section (a) or (b) of this paragraph.

[43531] In particular, it was observed that in plants, especially in Arabidopsis thaliana, increasing or generating the activity of a gene product non-targeted with the activity of a “glycerol-3-phosphate dehydrogenase”, preferably being encoded by a gene comprising the nucleic acid sequence SEQ ID NO. 108514, preferably the coding region thereof, conferred the production of or the increase in leucine compared with the wild type control.

[43532] The nucleic acid sequence of Yjr139c from Saccharomyces cerevisiae, e.g. as shown in the respective line in column 5 of Table I, application no. 6, has been published in A. And the activity of the gene product thereof is the activity of homoserine dehydrogenase.

[43533] Accordingly, in one embodiment, the process of the present invention for producing isoleucine in a non-human organism, like a microorganism or a plant or a part thereof, comprises increasing or generating the activity of a gene product with the activity of a gene product conferring the activity of “homoserine dehydrogenase”, especially from Saccharomyces cerevisiae or its functional equivalent or its homolog, e.g. the increase of
[43534] (a) a gene product of a gene comprising the nucleic acid molecule as shown in the respective line in column 5 of Table I (whereby the respective line discloses in column 7 the fine chemical isoleucine), application no. 6, preferably the coding region thereof, or a homolog or a fragment thereof, and being depicted in the same respective line as said Yjr139c, or a functional equivalent or a homolog thereof as shown in column 8 of Table I, application no. 6, preferably the coding region thereof, particularly a homolog or functional equivalent as shown in column 8 of Table I B, application no. 6, and being depicted in the same respective line as said Yjr139c, and preferably the activity is increased plastidic, or
[43535] (b) a polypeptide comprising a polypeptide, a consensus sequence or at least a polypeptide motif as shown in the respective line in column 5 of Table II or in column 8 of Table IV, application no. 6, respectively, and being depicted in the same respective line as said Yjr139c, or a functional equivalent or a homolog thereof as depicted in column 8 of Table II, application no. 6, preferably a homolog or functional equivalent as depicted in column 8 of Table II B, application no. 6, and being depicted in the same respective line as said Yjr139c, and preferably the activity is increased plastidic, whereby the respective line discloses in column 7 the fine chemical isoleucine.

[43536] Accordingly, in one embodiment, the molecule which activity is to be increased in the process of the invention is the gene product with an activity as a “homoserine dehydrogenase”, preferably it is the molecule of section (a) or (b) of this paragraph.

[43537] In particular, it was observed that in plants, especially in Arabidopsis thaliana, increasing or generating the activity of a gene product plastidic with the activity of a “homoserine dehydrogenase”, preferably being encoded by a gene comprising the nucleic acid sequence SEQ ID NO. 14885, preferably the coding region thereof, conferred the production of or the increase in isoleucine compared with the wild type control.

[43538] The nucleic acid sequence of Yjr148w from Saccharomyces cerevisiae, e.g. as shown in the respective line in column 5 of Table I, application no. 6, has been published in A. And the activity of the gene product thereof is the activity of branched chain aminotransferase.

[43539] Accordingly, in one embodiment, the process of the present invention for producing isoleucine in a non-human organism, like a microorganism or a plant or a part thereof, comprises increasing or generating the activity of a gene product with the activity of a gene product conferring the activity of “branched chain aminotransferase”, especially from Saccharomyces cerevisiae or its functional equivalent or its homolog, e.g. the increase of
[43540] (a) a gene product of a gene comprising the nucleic acid molecule as shown in the respective line in column 5 of Table I (whereby the respective line discloses in column 7 the fine chemical isoleucine), application no. 6, preferably the coding region thereof, or a homolog or a fragment thereof, and being depicted in the same respective line as said Yjr148w, or a functional equivalent or a homolog thereof as shown in column 8 of Table I, application no. 6, preferably the coding region thereof, particularly a homolog or functional equivalent as shown in column 8 of Table I B, application no. 6, and being depicted in the same respective line as said Yjr148w, and preferably the activity is increased plastidic, or
[43541] (b) a polypeptide comprising a polypeptide, a consensus sequence or at least a polypeptide motif as shown in the respective line in column 5 of Table II or in column 8 of Table IV, application no. 6, respectively, and being depicted in the same respective line as said Yjr148w, or a functional equivalent or a homolog thereof as depicted in column 8 of Table II, application no. 6, preferably a homolog or functional equivalent as depicted in column 8 of Table II B, application no. 6, and being depicted in the same respective line as said Yjr148w, and preferably the activity is increased plastidic, whereby the respective line discloses in column 7 the fine chemical isoleucine.

[43542] Accordingly, in one embodiment, the molecule which activity is to be increased in the process of the invention is the gene product with an activity as a “branched chain aminotransferase”, preferably it is the molecule of section (a) or (b) of this paragraph.

[43543] In particular, it was observed that in plants, especially in Arabidopsis thaliana, increasing or generating the activity of a gene product plastidic with the activity of a “branched chain aminotransferase”, preferably being encoded by a gene comprising the nucleic acid sequence SEQ ID NO. 90409, preferably the coding region thereof, conferred the production of or the increase in isoleucine compared with the wild type control.

[43544] The nucleic acid sequence of Yjr148w from Saccharomyces cerevisiae, e.g. as shown in the respective line in column 5 of Table I, application no. 6, has been published in A. And the activity of the gene product thereof is the activity of branched chain aminotransferase.

[43545] Accordingly, in one embodiment, the process of the present invention for producing valine in a non-human organism, like a microorganism or a plant or a part thereof, comprises increasing or generating the activity of a gene product with the activity of a gene product conferring the activity of “branched chain aminotransferase”, especially from Saccharomyces cerevisiae or its functional equivalent or its homolog, e.g. the increase of
[43546] (a) a gene product of a gene comprising the nucleic acid molecule as shown in the respective line in column 5 of Table I (whereby the respective line discloses in column 7 the fine chemical valine), application no. 6, preferably the coding region thereof, or a homolog or a fragment thereof, and being depicted in the same respective line as said Yjr148w, or a functional equivalent or a homolog thereof as shown in column 8 of Table I, application no. 6, preferably the coding region thereof, particularly a homolog or functional equivalent as shown in column 8 of Table I B, application no. 6, and being depicted in the same respective line as said Yjr148w, and preferably the activity is increased plastidic, or
[43547] (b) a polypeptide comprising a polypeptide, a consensus sequence or at least a polypeptide motif as shown in the respective line in column 5 of Table II or in column 8 of Table IV, application no. 6, respectively, and being depicted in the same respective line as said Yjr148w, or a functional equivalent or a homolog thereof as depicted in column 8 of Table II, application no. 6, preferably a homolog or functional equivalent as depicted in column 8 of Table II B, application no. 6, and being depicted in the same respective line as said Yjr148w, and preferably the activity is increased plastidic, whereby the respective line discloses in column 7 the fine chemical valine.

[43548] Accordingly, in one embodiment, the molecule which activity is to be increased in the process of the invention is the gene product with an activity as a “branched chain aminotransferase”, preferably it is the molecule of section (a) or (b) of this paragraph.

[43549] In particular, it was observed that in plants, especially in Arabidopsis thaliana, increasing or generating the activity of a gene product plastidic with the activity of a “branched chain aminotransferase”, preferably being encoded by a gene comprising the nucleic acid sequence SEQ ID NO. 90409, preferably the coding region thereof, conferred the production of or the increase in valine compared with the wild type control.

[43550] The nucleic acid sequence of Yjr153w from Saccharomyces cerevisiae, e.g. as shown in the respective line in column 5 of Table I, application no. 6, has been published in A. And the activity of the gene product thereof is the activity of polygalacturonase.

[43551] Accordingly, in one embodiment, the process of the present invention for producing isoleucine in a non-human organism, like a microorganism or a plant or a part thereof, comprises increasing or generating the activity of a gene product with the activity of a gene product conferring the activity of “polygalacturonase”, especially from Saccharomyces cerevisiae or its functional equivalent or its homolog, e.g. the increase of
[43552] (a) a gene product of a gene comprising the nucleic acid molecule as shown in the respective line in column 5 of Table I (whereby the respective line discloses in column 7 the fine chemical isoleucine), application no. 6, preferably the coding region thereof, or a homolog or a fragment thereof, and being depicted in the same respective line as said Yjr153w, or a functional equivalent or a homolog thereof as shown in column 8 of Table I, application no. 6, preferably the coding region thereof, particularly a homolog or functional equivalent as shown in column 8 of Table I B, application no. 6, and being depicted in the same respective line as said Yjr153w, and preferably the activity is increased non-targeted, or
[43553] (b) a polypeptide comprising a polypeptide, a consensus sequence or at least a polypeptide motif as shown in the respective line in column 5 of Table II or in column 8 of Table IV, application no. 6, respectively, and being depicted in the same respective line as said Yjr153w, or a functional equivalent or a homolog thereof as depicted in column 8 of Table II, application no. 6, preferably a homolog or functional equivalent as depicted in column 8 of Table II B, application no. 6, and being depicted in the same respective line as said Yjr153w, and preferably the activity is increased non-targeted, whereby the respective line discloses in column 7 the fine chemical isoleucine.

[43554] Accordingly, in one embodiment, the molecule which activity is to be increased in the process of the invention is the gene product with an activity as a “polygalacturonase”, preferably it is the molecule of section (a) or (b) of this paragraph.

[43555] In particular, it was observed that in plants, especially in Arabidopsis thaliana, increasing or generating the activity of a gene product non-targeted with the activity of a “polygalacturonase”, preferably being encoded by a gene comprising the nucleic acid sequence SEQ ID NO. 66274, preferably the coding region thereof, conferred the production of or the increase in isoleucine compared with the wild type control.

[43556] The nucleic acid sequence of Yjr153w from Saccharomyces cerevisiae, e.g. as shown in the respective line in column 5 of Table I, application no. 6, has been published in A. And the activity of the gene product thereof is the activity of polygalacturonase.

[43557] Accordingly, in one embodiment, the process of the present invention for producing leucine in a non-human organism, like a microorganism or a plant or a part thereof, comprises increasing or generating the activity of a gene product with the activity of a gene product conferring the activity of “polygalacturonase”, especially from Saccharomyces cerevisiae or its functional equivalent or its homolog, e.g. the increase of
[43558] (a) a gene product of a gene comprising the nucleic acid molecule as shown in the respective line in column 5 of Table I (whereby the respective line discloses in column 7 the fine chemical leucine), application no. 6, preferably the coding region thereof, or a homolog or a fragment thereof, and being depicted in the same respective line as said Yjr153w, or a functional equivalent or a homolog thereof as shown in column 8 of Table I, application no. 6, preferably the coding region thereof, particularly a homolog or functional equivalent as shown in column 8 of Table I B, application no. 6, and being depicted in the same respective line as said Yjr153w, and preferably the activity is increased non-targeted, or
[43559] (b) a polypeptide comprising a polypeptide, a consensus sequence or at least a polypeptide motif as shown in the respective line in column 5 of Table II or in column 8 of Table IV, application no. 6, respectively, and being depicted in the same respective line as said Yjr153w, or a functional equivalent or a homolog thereof as depicted in column 8 of Table II, application no. 6, preferably a homolog or functional equivalent as depicted in column 8 of Table II B, application no. 6, and being depicted in the same respective line as said Yjr153w, and preferably the activity is increased non-targeted, whereby the respective line discloses in column 7 the fine chemical leucine.

[43560] Accordingly, in one embodiment, the molecule which activity is to be increased in the process of the invention is the gene product with an activity as a “polygalacturonase”, preferably it is the molecule of section (a) or (b) of this paragraph.

[43561] In particular, it was observed that in plants, especially in Arabidopsis thaliana, increasing or generating the activity of a gene product non-targeted with the activity of a “polygalacturonase”, preferably being encoded by a gene comprising the nucleic acid sequence SEQ ID NO. 66274, preferably the coding region thereof, conferred the production of or the increase in leucine compared with the wild type control.

[43562] The nucleic acid sequence of Yjr153w from Saccharomyces cerevisiae, e.g. as shown in the respective line in column 5 of Table I, application no. 6, has been published in A. And the activity of the gene product thereof is the activity of polygalacturonase.

[43563] Accordingly, in one embodiment, the process of the present invention for producing valine in a non-human organism, like a microorganism or a plant or a part thereof, comprises increasing or generating the activity of a gene product with the activity of a gene product conferring the activity of “polygalacturonase”, especially from Saccharomyces cerevisiae or its functional equivalent or its homolog, e.g. the increase of
[43564] (a) a gene product of a gene comprising the nucleic acid molecule as shown in the respective line in column 5 of Table I (whereby the respective line discloses in column 7 the fine chemical valine), application no. 6, preferably the coding region thereof, or a homolog or a fragment thereof, and being depicted in the same respective line as said Yjr153w, or a functional equivalent or a homolog thereof as shown in column 8 of Table I, application no. 6, preferably the coding region thereof, particularly a homolog or functional equivalent as shown in column 8 of Table I B, application no. 6, and being depicted in the same respective line as said Yjr153w, and preferably the activity is increased non-targeted, or
[43565] (b) a polypeptide comprising a polypeptide, a consensus sequence or at least a polypeptide motif as shown in the respective line in column 5 of Table II or in column 8 of Table IV, application no. 6, respectively, and being depicted in the same respective line as said Yjr153w, or a functional equivalent or a homolog thereof as depicted in column 8 of Table II, application no. 6, preferably a homolog or functional equivalent as depicted in column 8 of Table II B, application no. 6, and being depicted in the same respective line as said Yjr153w, and preferably the activity is increased non-targeted, whereby the respective line discloses in column 7 the fine chemical valine.

[43566] Accordingly, in one embodiment, the molecule which activity is to be increased in the process of the invention is the gene product with an activity as a “polygalacturonase”, preferably it is the molecule of section (a) or (b) of this paragraph.

[43567] In particular, it was observed that in plants, especially in Arabidopsis thaliana, increasing or generating the activity of a gene product non-targeted with the activity of a “polygalacturonase”, preferably being encoded by a gene comprising the nucleic acid sequence SEQ ID NO. 66274, preferably the coding region thereof, conferred the production of or the increase in valine compared with the wild type control.

[43568] The nucleic acid sequence of YKL038W from Saccharomyces cerevisiae, e.g. as shown in the respective line in column 5 of Table I, application no. 6, has been published in A. And the activity of the gene product thereof is the activity of YKL038W-protein.

[43569] Accordingly, in one embodiment, the process of the present invention for producing isoleucine in a non-human organism, like a microorganism or a plant or a part thereof, comprises increasing or generating the activity of a gene product with the activity of a gene product conferring the activity of “YKL038W-protein”, especially from Saccharomyces cerevisiae or its functional equivalent or its homolog, e.g. the increase of
[43570] (a) a gene product of a gene comprising the nucleic acid molecule as shown in the respective line in column 5 of Table I (whereby the respective line discloses in column 7 the fine chemical isoleucine), application no. 6, preferably the coding region thereof, or a homolog or a fragment thereof, and being depicted in the same respective line as said YKL038W, or a functional equivalent or a homolog thereof as shown in column 8 of Table I, application no. 6, preferably the coding region thereof, particularly a homolog or functional equivalent as shown in column 8 of Table I B, application no. 6, and being depicted in the same respective line as said YKL038W, and preferably the activity is increased plastidic, or
[43571] (b) a polypeptide comprising a polypeptide, a consensus sequence or at least a polypeptide motif as shown in the respective line in column 5 of Table II or in column 8 of Table IV, application no. 6, respectively, and being depicted in the same respective line as said YKL038W, or a functional equivalent or a homolog thereof as depicted in column 8 of Table II, application no. 6, preferably a homolog or functional equivalent as depicted in column 8 of Table II B, application no. 6, and being depicted in the same respective line as said YKL038W, and preferably the activity is increased plastidic, whereby the respective line discloses in column 7 the fine chemical isoleucine.

[43572] Accordingly, in one embodiment, the molecule which activity is to be increased in the process of the invention is the gene product with an activity as a “YKL038W-protein”, preferably it is the molecule of section (a) or (b) of this paragraph.

[43573] In particular, it was observed that in plants, especially in Arabidopsis thaliana, increasing or generating the activity of a gene product plastidic with the activity of a “YKL038W-protein”, preferably being encoded by a gene comprising the nucleic acid sequence SEQ ID NO. 90602, preferably the coding region thereof, conferred the production of or the increase in isoleucine compared with the wild type control.

[43574] The nucleic acid sequence of YKL038W from Saccharomyces cerevisiae, e.g. as shown in the respective line in column 5 of Table I, application no. 6, has been published in A. And the activity of the gene product thereof is the activity of YKL038W-protein.

[43575] Accordingly, in one embodiment, the process of the present invention for producing leucine in a non-human organism, like a microorganism or a plant or a part thereof, comprises increasing or generating the activity of a gene product with the activity of a gene product conferring the activity of “YKL038W-protein”, especially from Saccharomyces cerevisiae or its functional equivalent or its homolog, e.g. the increase of
[43576] (a) a gene product of a gene comprising the nucleic acid molecule as shown in the respective line in column 5 of Table I (whereby the respective line discloses in column 7 the fine chemical leucine), application no. 6, preferably the coding region thereof, or a homolog or a fragment thereof, and being depicted in the same respective line as said YKL038W, or a functional equivalent or a homolog thereof as shown in column 8 of Table I, application no. 6, preferably the coding region thereof, particularly a homolog or functional equivalent as shown in column 8 of Table I B, application no. 6, and being depicted in the same respective line as said YKL038W, and preferably the activity is increased plastidic, or
[43577] (b) a polypeptide comprising a polypeptide, a consensus sequence or at least a polypeptide motif as shown in the respective line in column 5 of Table II or in column 8 of Table IV, application no. 6, respectively, and being depicted in the same respective line as said YKL038W, or a functional equivalent or a homolog thereof as depicted in column 8 of Table II, application no. 6, preferably a homolog or functional equivalent as depicted in column 8 of Table II B, application no. 6, and being depicted in the same respective line as said YKL038W, and preferably the activity is increased plastidic, whereby the respective line discloses in column 7 the fine chemical leucine.

[43578] Accordingly, in one embodiment, the molecule which activity is to be increased in the process of the invention is the gene product with an activity as a “YKL038W-protein”, preferably it is the molecule of section (a) or (b) of this paragraph.

[43579] In particular, it was observed that in plants, especially in Arabidopsis thaliana, increasing or generating the activity of a gene product plastidic with the activity of a “YKL038W-protein”, preferably being encoded by a gene comprising the nucleic acid sequence SEQ ID NO. 90602, preferably the coding region thereof, conferred the production of or the increase in leucine compared with the wild type control.

[43580] The nucleic acid sequence of Ylr224w from Saccharomyces cerevisiae, e.g. as shown in the respective line in column 5 of Table I, application no. 6, has been published in A. And the activity of the gene product thereof is the activity of YLR224W-protein.

[43581] Accordingly, in one embodiment, the process of the present invention for producing isoleucine in a non-human organism, like a microorganism or a plant or a part thereof, comprises increasing or generating the activity of a gene product with the activity of a gene product conferring the activity of “YLR224W-protein”, especially from Saccharomyces cerevisiae or its functional equivalent or its homolog, e.g. the increase of
[43582] (a) a gene product of a gene comprising the nucleic acid molecule as shown in the respective line in column 5 of Table I (whereby the respective line discloses in column 7 the fine chemical isoleucine), application no. 6, preferably the coding region thereof, or a homolog or a fragment thereof, and being depicted in the same respective line as said Ylr224w, or a functional equivalent or a homolog thereof as shown in column 8 of Table I, application no. 6, preferably the coding region thereof, particularly a homolog or functional equivalent as shown in column 8 of Table I B, application no. 6, and being depicted in the same respective line as said Ylr224w, and preferably the activity is increased non-targeted, or
[43583] (b) a polypeptide comprising a polypeptide, a consensus sequence or at least a polypeptide motif as shown in the respective line in column 5 of Table II or in column 8 of Table IV, application no. 6, respectively, and being depicted in the same respective line as said Ylr224w, or a functional equivalent or a homolog thereof as depicted in column 8 of Table II, application no. 6, preferably a homolog or functional equivalent as depicted in column 8 of Table II B, application no. 6, and being depicted in the same respective line as said Ylr224w, and preferably the activity is increased non-targeted, whereby the respective line discloses in column 7 the fine chemical isoleucine.

[43584] Accordingly, in one embodiment, the molecule which activity is to be increased in the process of the invention is the gene product with an activity as a “YLR224W-protein”, preferably it is the molecule of section (a) or (b) of this paragraph.

[43585] In particular, it was observed that in plants, especially in Arabidopsis thaliana, increasing or generating the activity of a gene product non-targeted with the activity of a “YLR224W-protein”, preferably being encoded by a gene comprising the nucleic acid sequence SEQ ID NO. 108723, preferably the coding region thereof, conferred the production of or the increase in isoleucine compared with the wild type control.

[43586] The nucleic acid sequence of Ylr348c from Saccharomyces cerevisiae, e.g. as shown in the respective line in column 5 of Table I, application no. 6, has been published in A. And the activity of the gene product thereof is the activity of mitochondrial dicarboxylate transporter.

[43587] Accordingly, in one embodiment, the process of the present invention for producing isoleucine in a non-human organism, like a microorganism or a plant or a part thereof, comprises increasing or generating the activity of a gene product with the activity of a gene product conferring the activity of “mitochondrial dicarboxylate transporter”, especially from Saccharomyces cerevisiae or its functional equivalent or its homolog, e.g. the increase of
[43588] (a) a gene product of a gene comprising the nucleic acid molecule as shown in the respective line in column 5 of Table I (whereby the respective line discloses in column 7 the fine chemical isoleucine), application no. 6, preferably the coding region thereof, or a homolog or a fragment thereof, and being depicted in the same respective line as said Ylr348c, or a functional equivalent or a homolog thereof as shown in column 8 of Table I, application no. 6, preferably the coding region thereof, particularly a homolog or functional equivalent as shown in column 8 of Table I B, application no. 6, and being depicted in the same respective line as said Ylr348c, and preferably the activity is increased non-targeted, or
[43589] (b) a polypeptide comprising a polypeptide, a consensus sequence or at least a polypeptide motif as shown in the respective line in column 5 of Table II or in column 8 of Table IV, application no. 6, respectively, and being depicted in the same respective line as said Ylr348c, or a functional equivalent or a homolog thereof as depicted in column 8 of Table II, application no. 6, preferably a homolog or functional equivalent as depicted in column 8 of Table II B, application no. 6, and being depicted in the same respective line as said Ylr348c, and preferably the activity is increased non-targeted, whereby the respective line discloses in column 7 the fine chemical isoleucine.

[43590] Accordingly, in one embodiment, the molecule which activity is to be increased in the process of the invention is the gene product with an activity as a “mitochondrial dicarboxylate transporter”, preferably it is the molecule of section (a) or (b) of this paragraph.

[43591] In particular, it was observed that in plants, especially in Arabidopsis thaliana, increasing or generating the activity of a gene product non-targeted with the activity of a “mitochondrial dicarboxylate transporter”, preferably being encoded by a gene comprising the nucleic acid sequence SEQ ID NO. 98243, preferably the coding region thereof, conferred the production of or the increase in isoleucine compared with the wild type control.

[43592] The nucleic acid sequence of Ylr359w from Saccharomyces cerevisiae, e.g. as shown in the respective line in column 5 of Table I, application no. 6, has been published in A. And the activity of the gene product thereof is the activity of adenylosuccinate lyase.

[43593] Accordingly, in one embodiment, the process of the present invention for producing isoleucine in a non-human organism, like a microorganism or a plant or a part thereof, comprises increasing or generating the activity of a gene product with the activity of a gene product conferring the activity of “adenylosuccinate lyase”, especially from Saccharomyces cerevisiae or its functional equivalent or its homolog, e.g. the increase of
[43594] (a) a gene product of a gene comprising the nucleic acid molecule as shown in the respective line in column 5 of Table I (whereby the respective line discloses in column 7 the fine chemical isoleucine), application no. 6, preferably the coding region thereof, or a homolog or a fragment thereof, and being depicted in the same respective line as said Ylr359w, or a functional equivalent or a homolog thereof as shown in column 8 of Table I, application no. 6, preferably the coding region thereof, particularly a homolog or functional equivalent as shown in column 8 of Table I B, application no. 6, and being depicted in the same respective line as said Ylr359w, and preferably the activity is increased plastidic, or
[43595] (b) a polypeptide comprising a polypeptide, a consensus sequence or at least a polypeptide motif as shown in the respective line in column 5 of Table II or in column 8 of Table IV, application no. 6, respectively, and being depicted in the same respective line as said Ylr359w, or a functional equivalent or a homolog thereof as depicted in column 8 of Table II, application no. 6, preferably a homolog or functional equivalent as depicted in column 8 of Table II B, application no. 6, and being depicted in the same respective line as said Ylr359w, and preferably the activity is increased plastidic, whereby the respective line discloses in column 7 the fine chemical isoleucine.

[43596] Accordingly, in one embodiment, the molecule which activity is to be increased in the process of the invention is the gene product with an activity as a “adenylosuccinate lyase”, preferably it is the molecule of section (a) or (b) of this paragraph.

[43597] In particular, it was observed that in plants, especially in Arabidopsis thaliana, increasing or generating the activity of a gene product plastidic with the activity of a “adenylosuccinate lyase”, preferably being encoded by a gene comprising the nucleic acid sequence SEQ ID NO. 67190, preferably the coding region thereof, conferred the production of or the increase in isoleucine compared with the wild type control.

[43598] The nucleic acid sequence of Ylr359w from Saccharomyces cerevisiae, e.g. as shown in the respective line in column 5 of Table I, application no. 6, has been published in A. And the activity of the gene product thereof is the activity of adenylosuccinate lyase.

[43599] Accordingly, in one embodiment, the process of the present invention for producing leucine in a non-human organism, like a microorganism or a plant or a part thereof, comprises increasing or generating the activity of a gene product with the activity of a gene product conferring the activity of “adenylosuccinate lyase”, especially from Saccharomyces cerevisiae or its functional equivalent or its homolog, e.g. the increase of
[43600] (a) a gene product of a gene comprising the nucleic acid molecule as shown in the respective line in column 5 of Table I (whereby the respective line discloses in column 7 the fine chemical leucine), application no. 6, preferably the coding region thereof, or a homolog or a fragment thereof, and being depicted in the same respective line as said Ylr359w, or a functional equivalent or a homolog thereof as shown in column 8 of Table I, application no. 6, preferably the coding region thereof, particularly a homolog or functional equivalent as shown in column 8 of Table I B, application no. 6, and being depicted in the same respective line as said Ylr359w, and preferably the activity is increased plastidic, or
[43601] (b) a polypeptide comprising a polypeptide, a consensus sequence or at least a polypeptide motif as shown in the respective line in column 5 of Table II or in column 8 of Table IV, application no. 6, respectively, and being depicted in the same respective line as said Ylr359w, or a functional equivalent or a homolog thereof as depicted in column 8 of Table II, application no. 6, preferably a homolog or functional equivalent as depicted in column 8 of Table II B, application no. 6, and being depicted in the same respective line as said Ylr359w, and preferably the activity is increased plastidic, whereby the respective line discloses in column 7 the fine chemical leucine.

[43602] Accordingly, in one embodiment, the molecule which activity is to be increased in the process of the invention is the gene product with an activity as a “adenylosuccinate lyase”, preferably it is the molecule of section (a) or (b) of this paragraph.

[43603] In particular, it was observed that in plants, especially in Arabidopsis thaliana, increasing or generating the activity of a gene product plastidic with the activity of a “adenylosuccinate lyase”, preferably being encoded by a gene comprising the nucleic acid sequence SEQ ID NO. 67190, preferably the coding region thereof, conferred the production of or the increase in leucine compared with the wild type control.

[43604] The nucleic acid sequence of Ylr359w from Saccharomyces cerevisiae, e.g. as shown in the respective line in column 5 of Table I, application no. 6, has been published in A. And the activity of the gene product thereof is the activity of adenylosuccinate lyase.

[43605] Accordingly, in one embodiment, the process of the present invention for producing valine in a non-human organism, like a microorganism or a plant or a part thereof, comprises increasing or generating the activity of a gene product with the activity of a gene product conferring the activity of “adenylosuccinate lyase”, especially from Saccharomyces cerevisiae or its functional equivalent or its homolog, e.g. the increase of
[43606] (a) a gene product of a gene comprising the nucleic acid molecule as shown in the respective line in column 5 of Table I (whereby the respective line discloses in column 7 the fine chemical valine), application no. 6, preferably the coding region thereof, or a homolog or a fragment thereof, and being depicted in the same respective line as said Ylr359w, or a functional equivalent or a homolog thereof as shown in column 8 of Table I, application no. 6, preferably the coding region thereof, particularly a homolog or functional equivalent as shown in column 8 of Table I B, application no. 6, and being depicted in the same respective line as said Ylr359w, and preferably the activity is increased plastidic, or
[43607] (b) a polypeptide comprising a polypeptide, a consensus sequence or at least a polypeptide motif as shown in the respective line in column 5 of Table II or in column 8 of Table IV, application no. 6, respectively, and being depicted in the same respective line as said Ylr359w, or a functional equivalent or a homolog thereof as depicted in column 8 of Table II, application no. 6, preferably a homolog or functional equivalent as depicted in column 8 of Table II B, application no. 6, and being depicted in the same respective line as said Ylr359w, and preferably the activity is increased plastidic, whereby the respective line discloses in column 7 the fine chemical valine.

[43608] Accordingly, in one embodiment, the molecule which activity is to be increased in the process of the invention is the gene product with an activity as a “adenylosuccinate lyase”, preferably it is the molecule of section (a) or (b) of this paragraph.

[43609] In particular, it was observed that in plants, especially in Arabidopsis thaliana, increasing or generating the activity of a gene product plastidic with the activity of a “adenylosuccinate lyase”, preferably being encoded by a gene comprising the nucleic acid sequence SEQ ID NO. 67190, preferably the coding region thereof, conferred the production of or the increase in valine compared with the wild type control.

[43610] The nucleic acid sequence of Yml123c from Saccharomyces cerevisiae, e.g. as shown in the respective line in column 5 of Table I, application no. 6, has been published in A. And the activity of the gene product thereof is the activity of phosphate transporter.

[43611] Accordingly, in one embodiment, the process of the present invention for producing leucine in a non-human organism, like a microorganism or a plant or a part thereof, comprises increasing or generating the activity of a gene product with the activity of a gene product conferring the activity of “phosphate transporter”, especially from Saccharomyces cerevisiae or its functional equivalent or its homolog, e.g. the increase of
[43612] (a) a gene product of a gene comprising the nucleic acid molecule as shown in the respective line in column 5 of Table I (whereby the respective line discloses in column 7 the fine chemical leucine), application no. 6, preferably the coding region thereof, or a homolog or a fragment thereof, and being depicted in the same respective line as said Yml123c, or a functional equivalent or a homolog thereof as shown in column 8 of Table I, application no. 6, preferably the coding region thereof, particularly a homolog or functional equivalent as shown in column 8 of Table I B, application no. 6, and being depicted in the same respective line as said Yml123c, and preferably the activity is increased plastidic, or
[43613] (b) a polypeptide comprising a polypeptide, a consensus sequence or at least a polypeptide motif as shown in the respective line in column 5 of Table II or in column 8 of Table IV, application no. 6, respectively, and being depicted in the same respective line as said Yml123c, or a functional equivalent or a homolog thereof as depicted in column 8 of Table II, application no. 6, preferably a homolog or functional equivalent as depicted in column 8 of Table II B, application no. 6, and being depicted in the same respective line as said Yml123c, and preferably the activity is increased plastidic, whereby the respective line discloses in column 7 the fine chemical leucine.

[43614] Accordingly, in one embodiment, the molecule which activity is to be increased in the process of the invention is the gene product with an activity as a “phosphate transporter”, preferably it is the molecule of section (a) or (b) of this paragraph.

[43615] In particular, it was observed that in plants, especially in Arabidopsis thaliana, increasing or generating the activity of a gene product plastidic with the activity of a “phosphate transporter”, preferably being encoded by a gene comprising the nucleic acid sequence SEQ ID NO. 91785, preferably the coding region thereof, conferred the production of or the increase in leucine compared with the wild type control.

[43616] The nucleic acid sequence of Ypl028w from Saccharomyces cerevisiae, e.g. as shown in the respective line in column 5 of Table I, application no. 6, has been published in A. And the activity of the gene product thereof is the activity of acetyl-CoA acetyltransferase.

[43617] Accordingly, in one embodiment, the process of the present invention for producing isoleucine in a non-human organism, like a microorganism or a plant or a part thereof, comprises increasing or generating the activity of a gene product with the activity of a gene product conferring the activity of “acetyl-CoA acetyltransferase”, especially from Saccharomyces cerevisiae or its functional equivalent or its homolog, e.g. the increase of
[43618] (a) a gene product of a gene comprising the nucleic acid molecule as shown in the respective line in column 5 of Table I (whereby the respective line discloses in column 7 the fine chemical isoleucine), application no. 6, preferably the coding region thereof, or a homolog or a fragment thereof, and being depicted in the same respective line as said Ypl028w, or a functional equivalent or a homolog thereof as shown in column 8 of Table I, application no. 6, preferably the coding region thereof, particularly a homolog or functional equivalent as shown in column 8 of Table I B, application no. 6, and being depicted in the same respective line as said Ypl028w, and preferably the activity is increased non-targeted, or
[43619] (b) a polypeptide comprising a polypeptide, a consensus sequence or at least a polypeptide motif as shown in the respective line in column 5 of Table II or in column 8 of Table IV, application no. 6, respectively, and being depicted in the same respective line as said Ypl028w, or a functional equivalent or a homolog thereof as depicted in column 8 of Table II, application no. 6, preferably a homolog or functional equivalent as depicted in column 8 of Table II B, application no. 6, and being depicted in the same respective line as said Ypl028w, and preferably the activity is increased non-targeted, whereby the respective line discloses in column 7 the fine chemical isoleucine.

[43620] Accordingly, in one embodiment, the molecule which activity is to be increased in the process of the invention is the gene product with an activity as a “acetyl-CoA acetyltransferase”, preferably it is the molecule of section (a) or (b) of this paragraph.

[43621] In particular, it was observed that in plants, especially in Arabidopsis thaliana, increasing or generating the activity of a gene product non-targeted with the activity of a “acetyl-CoA acetyltransferase”, preferably being encoded by a gene comprising the nucleic acid sequence SEQ ID NO. 92668, preferably the coding region thereof, conferred the production of or the increase in isoleucine compared with the wild type control.

[43622] The nucleic acid sequence of Ypl028w from Saccharomyces cerevisiae, e.g. as shown in the respective line in column 5 of Table I, application no. 6, has been published in A. And the activity of the gene product thereof is the activity of acetyl-CoA acetyltransferase.

[43623] Accordingly, in one embodiment, the process of the present invention for producing leucine in a non-human organism, like a microorganism or a plant or a part thereof, comprises increasing or generating the activity of a gene product with the activity of a gene product conferring the activity of “acetyl-CoA acetyltransferase”, especially from Saccharomyces cerevisiae or its functional equivalent or its homolog, e.g. the increase of
[43624] (a) a gene product of a gene comprising the nucleic acid molecule as shown in the respective line in column 5 of Table I (whereby the respective line discloses in column 7 the fine chemical leucine), application no. 6, preferably the coding region thereof, or a homolog or a fragment thereof, and being depicted in the same respective line as said Ypl028w, or a functional equivalent or a homolog thereof as shown in column 8 of Table I, application no. 6, preferably the coding region thereof, particularly a homolog or functional equivalent as shown in column 8 of Table I B, application no. 6, and being depicted in the same respective line as said Ypl028w, and preferably the activity is increased non-targeted, or
[43625] (b) a polypeptide comprising a polypeptide, a consensus sequence or at least a polypeptide motif as shown in the respective line in column 5 of Table II or in column 8 of Table IV, application no. 6, respectively, and being depicted in the same respective line as said Ypl028w, or a functional equivalent or a homolog thereof as depicted in column 8 of Table II, application no. 6, preferably a homolog or functional equivalent as depicted in column 8 of Table II B, application no. 6, and being depicted in the same respective line as said Ypl028w, and preferably the activity is increased non-targeted, whereby the respective line discloses in column 7 the fine chemical leucine.

[43626] Accordingly, in one embodiment, the molecule which activity is to be increased in the process of the invention is the gene product with an activity as a “acetyl-CoA acetyltransferase”, preferably it is the molecule of section (a) or (b) of this paragraph.

[43627] In particular, it was observed that in plants, especially in Arabidopsis thaliana, increasing or generating the activity of a gene product non-targeted with the activity of a “acetyl-CoA acetyltransferase”, preferably being encoded by a gene comprising the nucleic acid sequence SEQ ID NO. 92668, preferably the coding region thereof, conferred the production of or the increase in leucine compared with the wild type control.

[43628] The nucleic acid sequence of Ypr119w from Saccharomyces cerevisiae, e.g. as shown in the respective line in column 5 of Table I, application no. 6, has been published in A. And the activity of the gene product thereof is the activity of cyclin.

[43629] Accordingly, in one embodiment, the process of the present invention for producing isoleucine in a non-human organism, like a microorganism or a plant or a part thereof, comprises increasing or generating the activity of a gene product with the activity of a gene product conferring the activity of “cyclin”, especially from Saccharomyces cerevisiae or its functional equivalent or its homolog, e.g. the increase of
[43630] (a) a gene product of a gene comprising the nucleic acid molecule as shown in the respective line in column 5 of Table I (whereby the respective line discloses in column 7 the fine chemical isoleucine), application no. 6, preferably the coding region thereof, or a homolog or a fragment thereof, and being depicted in the same respective line as said Ypr119w, or a functional equivalent or a homolog thereof as shown in column 8 of Table I, application no. 6, preferably the coding region thereof, particularly a homolog or functional equivalent as shown in column 8 of Table I B, application no. 6, and being depicted in the same respective line as said Ypr119w, and preferably the activity is increased non-targeted, or
[43631] (b) a polypeptide comprising a polypeptide, a consensus sequence or at least a polypeptide motif as shown in the respective line in column 5 of Table II or in column 8 of Table IV, application no. 6, respectively, and being depicted in the same respective line as said Ypr119w, or a functional equivalent or a homolog thereof as depicted in column 8 of Table II, application no. 6, preferably a homolog or functional equivalent as depicted in column 8 of Table II B, application no. 6, and being depicted in the same respective line as said Ypr119w, and preferably the activity is increased non-targeted, whereby the respective line discloses in column 7 the fine chemical isoleucine.

[43632] Accordingly, in one embodiment, the molecule which activity is to be increased in the process of the invention is the gene product with an activity as a “cyclin”, preferably it is the molecule of section (a) or (b) of this paragraph.

[43633] In particular, it was observed that in plants, especially in Arabidopsis thaliana, increasing or generating the activity of a gene product non-targeted with the activity of a “cyclin”, preferably being encoded by a gene comprising the nucleic acid sequence SEQ ID NO. 98445, preferably the coding region thereof, conferred the production of or the increase in isoleucine compared with the wild type control.

[43634] The nucleic acid sequence of Zm_{—}4842_BE510522 from Zea mays, e.g. as shown in the respective line in column 5 of Table I, application no. 6, is unpublished. And the activity of the gene product thereof is the activity of Zm_{—}4842_BE510522-protein.

[43635] Accordingly, in one embodiment, the process of the present invention for producing isoleucine in a non-human organism, like a microorganism or a plant or a part thereof, comprises increasing or generating the activity of a gene product with the activity of a gene product conferring the activity of “Zm_{—}4842_BE510522-protein”, especially from Zea mays or its functional equivalent or its homolog, e.g. the increase of
[43636] (a) a gene product of a gene comprising the nucleic acid molecule as shown in the respective line in column 5 of Table I (whereby the respective line discloses in column 7 the fine chemical isoleucine), application no. 6, preferably the coding region thereof, or a homolog or a fragment thereof, and being depicted in the same respective line as said Zm_{—}4842_BE510522, or a functional equivalent or a homolog thereof as shown in column 8 of Table I, application no. 6, preferably the coding region thereof, particularly a homolog or functional equivalent as shown in column 8 of Table I B, application no. 6, and being depicted in the same respective line as said Zm_{—}4842_BE510522, and preferably the activity is increased non-targeted, or
[43637] (b) a polypeptide comprising a polypeptide, a consensus sequence or at least a polypeptide motif as shown in the respective line in column 5 of Table II or in column 8 of Table IV, application no. 6, respectively, and being depicted in the same respective line as said Zm_{—}4842_BE510522, or a functional equivalent or a homolog thereof as depicted in column 8 of Table II, application no. 6, preferably a homolog or functional equivalent as depicted in column 8 of Table II B, application no. 6, and being depicted in the same respective line as said Zm_{—}4842_BE510522, and preferably the activity is increased non-targeted, whereby the respective line discloses in column 7 the fine chemical isoleucine.

[43638] Accordingly, in one embodiment, the molecule which activity is to be increased in the process of the invention is the gene product with an activity as a “Zm_{—}4842_BE510522-protein”, preferably it is the molecule of section (a) or (b) of this paragraph.

[43639] In particular, it was observed that in plants, especially in Arabidopsis thaliana, increasing or generating the activity of a gene product non-targeted with the activity of a

[43640] “Zm_{—}4842_BE510522-protein”, preferably being encoded by a gene comprising the nucleic acid sequence SEQ ID NO. 68413, preferably the coding region thereof, conferred the production of or the increase in isoleucine compared with the wild type control.

[43641] The nucleic acid sequence of Zm_{—}4842_BE510522 from Zea mays, e.g. as shown in the respective line in column 5 of Table I, application no. 6, is unpublished. And the activity of the gene product thereof is the activity of Zm_{—}4842_BE510522-protein.

[43642] Accordingly, in one embodiment, the process of the present invention for producing leucine in a non-human organism, like a microorganism or a plant or a part thereof, comprises increasing or generating the activity of a gene product with the activity of a gene product conferring the activity of “Zm_{—}4842_BE510522-protein”, especially from Zea mays or its functional equivalent or its homolog, e.g. the increase of
[43643] (a) a gene product of a gene comprising the nucleic acid molecule as shown in the respective line in column 5 of Table I (whereby the respective line discloses in column 7 the fine chemical leucine), application no. 6, preferably the coding region thereof, or a homolog or a fragment thereof, and being depicted in the same respective line as said Zm_{—}4842_BE510522, or a functional equivalent or a homolog thereof as shown in column 8 of Table I, application no. 6, preferably the coding region thereof, particularly a homolog or functional equivalent as shown in column 8 of Table I B, application no. 6, and being depicted in the same respective line as said Zm_{—}4842_BE510522, and preferably the activity is increased non-targeted, or
[43644] (b) a polypeptide comprising a polypeptide, a consensus sequence or at least a polypeptide motif as shown in the respective line in column 5 of Table II or in column 8 of Table IV, application no. 6, respectively, and being depicted in the same respective line as said Zm_{—}4842_BE510522, or a functional equivalent or a homolog thereof as depicted in column 8 of Table II, application no. 6, preferably a homolog or functional equivalent as depicted in column 8 of Table II B, application no. 6, and being depicted in the same respective line as said Zm_{—}4842_BE510522, and preferably the activity is increased non-targeted, whereby the respective line discloses in column 7 the fine chemical leucine.

[43645] Accordingly, in one embodiment, the molecule which activity is to be increased in the process of the invention is the gene product with an activity as a “Zm_{—}4842_BE510522-protein”, preferably it is the molecule of section (a) or (b) of this paragraph.

[43646] In particular, it was observed that in plants, especially in Arabidopsis thaliana, increasing or generating the activity of a gene product non-targeted with the activity of a “Zm_{—}4842_BE510522-protein”, preferably being encoded by a gene comprising the nucleic acid sequence SEQ ID NO. 68413, preferably the coding region thereof, conferred the production of or the increase in leucine compared with the wild type control.

[43647] The nucleic acid sequence of Zm_{—}4842_BE510522 from Zea mays, e.g. as shown in the respective line in column 5 of Table I, application no. 6, is unpublished. And the activity of the gene product thereof is the activity of Zm_{—}4842_BE510522-protein.

[43648] Accordingly, in one embodiment, the process of the present invention for producing valine in a non-human organism, like a microorganism or a plant or a part thereof, comprises increasing or generating the activity of a gene product with the activity of a gene product conferring the activity of “Zm_{—}4842_BE510522-protein”, especially from Zea mays or its functional equivalent or its homolog, e.g. the increase of
[43649] (a) a gene product of a gene comprising the nucleic acid molecule as shown in the respective line in column 5 of Table I (whereby the respective line discloses in column 7 the fine chemical valine), application no. 6, preferably the coding region thereof, or a homolog or a fragment thereof, and being depicted in the same respective line as said Zm_{—}4842_BE510522, or a functional equivalent or a homolog thereof as shown in column 8 of Table I, application no. 6, preferably the coding region thereof, particularly a homolog or functional equivalent as shown in column 8 of Table I B, application no. 6, and being depicted in the same respective line as said Zm_{—}4842_BE510522, and preferably the activity is increased non-targeted, or
[43650] (b) a polypeptide comprising a polypeptide, a consensus sequence or at least a polypeptide motif as shown in the respective line in column 5 of Table II or in column 8 of Table IV, application no. 6, respectively, and being depicted in the same respective line as said Zm_{—}4842_BE510522, or a functional equivalent or a homolog thereof as depicted in column 8 of Table II, application no. 6, preferably a homolog or functional equivalent as depicted in column 8 of Table II B, application no. 6, and being depicted in the same respective line as said Zm_{—}4842_BE510522, and preferably the activity is increased non-targeted, whereby the respective line discloses in column 7 the fine chemical valine.

[43651] Accordingly, in one embodiment, the molecule which activity is to be increased in the process of the invention is the gene product with an activity as a “Zm_{—}4842_BE510522-protein”, preferably it is the molecule of section (a) or (b) of this paragraph.

[43652] In particular, it was observed that in plants, especially in Arabidopsis thaliana, increasing or generating the activity of a gene product non-targeted with the activity of a “Zm_{—}4842_BE510522-protein”, preferably being encoded by a gene comprising the nucleic acid sequence SEQ ID NO. 68413, preferably the coding region thereof, conferred the production of or the increase in valine compared with the wild type control.

[43653] [0105.1.1.6] to [0107.1.1.6] for the disclosure of these paragraphs see [0105.1.1.1] to [0107.1.1.1] above.

[43654] A protein having an activity conferring an increase in the amount or level of the fine chemical isoleucine, leucine, or valine, upon targeting to the plastids or mitochondria or upon non-targeting, preferably has the structure of the respective polypeptide described herein, in particular of the polypeptides comprising the consensus sequence or at least one polypeptide motifs as shown in the respective line in Table IV, application no. 6, column 8 or of the polypeptide comprising an amino acid sequence as disclosed in the respective line in Table II, application no. 6, columns 5 or 8, or homologs or fragments thereof as described herein, or is encoded by the nucleic acid molecule characterized herein or the nucleic acid molecule according to the invention, for example by the nucleic acid molecule as shown in the respective line in Table I, application no. 6, columns 5 or 8, preferably the coding region thereof, or homologs or fragments thereof and has the herein mentioned activity.

[43655] [0109.1.1.6] to [0110.1.1.6] for the disclosure of these paragraphs see [0109.1.1.1] to [0110.1.1.1] above.

[43656] In one embodiment, the process of the present invention comprises one or more of the following steps
[43657] (a) stabilizing a protein conferring the generation or increased expression of a protein encoded by the nucleic acid molecule of the invention or of the polypeptide of the invention, e.g. of a polypeptide having the activity selected from the group consisting of 2,3-dihydroxyphenylpropionate 1,2-dioxygenase, 2-isopropylmalate synthase, 3-isopropylmalate dehydrogenase, 47266012-protein, 50S ribosomal protein L14, ABC transporter ATP binding component, ABC transporter ATP-binding protein, ABC transporter component, ABC transporter permease protein, acetolactate synthase, acetolactate synthase small subunit, acetyl CoA carboxylase, acetyl-CoA acetyltransferase, acetyltransferase, acid shock protein, acyl transferase, acyltransferase, adenylate kinase, adenylosuccinate lyase, agmatinase, aldehyde dehydrogenase, aminotransferase, anthranilate synthase component II, arginine exporter protein, At1g19800-protein, At1g23110-protein, At1g47380-protein, At4g32480-protein, At5g16650-protein, ATP-binding component of a transport system, auxin response factor, b0050-protein, b1003-protein, b1163-protein, b1445-protein, b1522-protein, b1670-protein, b1672-protein, b2513-protein, b2613-protein, b2673-protein, b2739-protein, b2812-protein, b3083-protein, b3490-protein, b3989-protein, b4029-protein, b4050-protein, b4056-protein, b4263-protein, betagalactosidase, beta-hydroxylase, bifunctional protein (phosphoribosyltransferase and regulatory protein), binding-protein-dependent transport systems inner membrane component, branched chain aminotransferase, branched-chain amino acid permease, branched-chain amino-acid aminotransferase, calcium-dependent protein kinase, carbamoyl-phosphate synthase subunit, CBL-interacting protein kinase, cell division control protein, chaperone protein CIpB, cullin, cyclin, cyclin D, cytochrome c-type protein, dihydroxyacid dehydratase, disease resistance protein, DNA helicase II, DNA helicase IV, DNA mismatch repair protein, DNA polymerase, DNA-binding protein, elongation factor Tu, enoyl-CoA hydratase, eukaryotic translation initiation factor, eukaryotic translation initiation factor 5, ferredoxin, flavodoxin, fumarylacetoacetate hydrolase, GDP-mannose 4,6-dehydratase, geranylgeranyl pyrophosphate synthase, gluconate transport system permease 3, glucose-1-phosphate cytidylyltransferase, glucose-6-phosphate 1-dehydrogenase, glutamate-ammonia-ligase, glutamine synthetase, glutaredoxin, glycerol 3-phosphate dehydrogenase, glycogen (starch) synthase, glycogen synthase, glycoprotease, glycosyl transferase, GM02LC11114-protein, GM02LC5744-protein, H/ACA ribonucleoprotein complex subunit 3, harpin-induced family protein, heat shock transcription factor, hexose transporter, histone H2A, homocitrate synthase, homoserine dehydrogenase, hydrolase, iron(III) dicitrate-binding protein, isochorismate synthase, isopropylmalate isomerase large subunit, ketol-acid reductoisomerase, L-serine dehydratase, MADS-box transcription factor, major facilitator superfamily transporter protein, malate dehydrogenase, malic enzyme, membrane protein, membrane transport protein, methylglyoxal synthase, mitochondrial dicarboxylate transporter, monothiol glutaredoxin, murein transglycosylase, Na+/K+ transporter, NAD(P)H-quinone oxidoreductase subunit, NADH-quinone oxidoreductase subunit, NADP-dependent malic enzyme, Nucleoside monophosphate phosphohydrolase, O-antigen chain length determinant, oxidoreductase, oxireductase, peptidase, phosphate transporter, phosphoadenosine phosphosulfate reductase, phosphoanhydride phosphorylase, phosphoglycerate kinase, phosphopantetheine adenylyltransferase, photosystem II protein, polygalacturonase, polyphosphate kinase, precorrin methylase, protein kinase, protein phosphatase, protoporphyrin oxidase, purine nucleoside phosphorylase, purine-nucleoside phosphorylase, pyruvate kinase, riboflavin biosynthesis protein, ribosephosphate isomerase, constitutive, RNA binding protein, RNA-binding protein, Sec-independent protein translocase subunit, serine hydroxymethyltransferase, short-chain alcohol dehydrogenase family, sll1032-protein, sll1455-protein, sll1761-protein, superoxide dismutase, thioredoxin, thioredoxin family protein, threonine dehydratase, threonine synthase, transcription factor, transcriptional regulator, transport protein, trehalose-phosphatase, TTC1386-protein, urease subunit, vacuolar ATPase subunit, valine-pyruvate transaminase, YAL013W-protein, ydr183w-protein, ygl237c-protein, YGR193C-protein, yhr006w-protein, YKL038W-protein, YLR224W-protein, zinc finger protein, zinc transporter, and Zm_{—}4842_BE510522-protein, or of a polypeptide as indicated in the respective line in Table II, application no. 6, columns 5 or 8, or its homologs or fragments, and conferring the production of or an increase in isoleucine, leucine, or valine, respectively; and/or
[43658] (b) stabilizing a mRNA conferring the generation or increased expression of a FCRP, e.g. protein encoded by the nucleic acid molecule of the invention or its homologs or fragments, or of a mRNA encoding the polypeptide of the present invention having the hereinmentioned activity selected from the group consisting of said activities mentioned in (a) and conferring the production of or an increase in isoleucine, leucine, or valine, respectively; and/or
[43659] (c) increasing the specific activity of a protein conferring the increased expression of a FCRP, e.g. a protein encoded by the nucleic acid molecule of the invention or of the polypeptide of the present invention having herein-mentioned isoleucine, leucine, or valine generating or increasing activity, respectively, e.g. of a polypeptide having the activity of a protein as indicated in the respective line in Table 11, application no. 6, columns 5 or 8, or its homologs or fragments, or decreasing the inhibitory regulation of the polypeptide of the invention; and/or
[43660] (d) generating or increasing the expression of an endogenous or artificial transcription factor mediating the expression of a protein conferring the generation or increased expression of a FCRP, e.g. a protein encoded by the nucleic acid molecule of the invention or of the polypeptide of the invention having herein-mentioned activity selected from the group consisting of said activities mentioned in (a) and conferring a isoleucine, leucine, or valine increasing activity, respectively, e.g. of a polypeptide having the activity of a protein as indicated in the respective line in Table II, application no. 6, columns 5 or 8 or its homologs; and/or
[43661] (e) stimulating activity of a protein conferring the increased expression of a FCRP, e.g. a protein encoded by the nucleic acid molecule of the present invention or a polypeptide of the present invention having herein-mentioned activity selected from the group consisting of said activities mentioned in (a) and conferring a isoleucine, leucine, or valine increasing activity, respectively, e.g. of a polypeptide having the activity of a protein as indicated in the respective line in Table II, application no. 6, columns 5 or 8, or its homologs or fragments, by adding one or more exogenous inducing factors to the non-human organism or parts thereof; and/or
[43662] (f) expressing a transgenic gene encoding a protein conferring the increased expression of a FCRP, e.g. a polypeptide encoded by the nucleic acid molecule of the present invention or a polypeptide of the present invention, having herein-mentioned activity selected from the group consisting of said activities mentioned in (a) and conferring a isoleucine, leucine, or valine increasing activity, respectively, e.g. of a polypeptide having the activity of a protein as indicated in the respective line in Table II, application no. 6, columns 5 or 8, or its homologs or fragments, and/or
[43663] (g) increasing the copy number of a gene conferring the increased expression of a nucleic acid molecule encoding a FCRP, e.g. a polypeptide encoded by the nucleic acid molecule of the invention or the polypeptide of the invention having herein-mentioned activity selected from the group consisting of said activities mentioned in (a) and conferring a isoleucine, leucine, or valine increasing activity, respectively, e.g. of a polypeptide having the activity of a protein as indicated in the respective line in Table II, application no. 6, columns 5 or 8, or its homologs or fragments; and/or
[43664] (h) increasing the expression of the endogenous gene encoding the FCRP, polypeptide of the invention, e.g. a polypeptide encoded by the nucleic acid molecule of the invention or the polypeptide of the invention having herein-mentioned activity selected from the group consisting of said activities mentioned in (a) and conferring a isoleucine, leucine, or valine; increasing activity, respectively, e.g. of a polypeptide having the activity of a protein as indicated in the respective line in Table II, application no. 6, columns 5 or 8, or its homologs or fragments, by adding positive expression or removing negative expression elements, e.g. homologous recombination can be used to either introduce positive regulatory elements like for plants the 35S enhancer into the promoter or to remove repressor elements form regulatory regions. Further gene conversion methods can be used to disrupt repressor elements or to enhance to activity of positive elements. Positive elements can be randomly introduced in plants by T-DNA or transposon mutagenesis and lines can be identified in which the positive elements have be integrated near to a gene of the invention, the expression of which is thereby enhanced; and/or
[43665] (i) modulating growth conditions of the non-human organism in such a manner, that the expression or activity of the gene encoding the FCRP, e.g. a protein of the invention or the protein itself is enhanced, for example microorganisms or plants can be grown for example under a higher temperature regime leading to an enhanced expression of heat shock proteins, which can lead to an enhanced isoleucine, leucine, or valine production, respectively; and/or
[43666] (j) selecting of non-human organisms with especially high activity of the proteins of the invention from natural or from mutagenized resources and breeding them into the target organisms, e.g. the elite crops; and/or
[43667] (k) directing a protein encoded by the nucleic acid molecule of the invention or of the polypeptide of the present invention having herein-mentioned activity selected from the group consisting of said activities mentioned in (a) and conferring a isoleucine, leucine, or valine increasing activity, respectively, e.g. of a polypeptide having the activity of a protein as indicated in the respective line in Table II, application no. 6, columns 5 or 8, or its homologs or fragments, if for the corresponding nucleic acid molecule in the respective line in column 6 of Table I the term “plastidic” is indicated, to the plastids by the addition of a plastidial targeting sequence or if for the corresponding nucleic acid molecule in the respective line in column 6 of Table I the term “mitochondria!” is indicated, to the mitochondria by the addition of a mitochondrial targeting sequence; and/or
[43668] (l) generating the expression of a protein encoded by the nucleic acid molecule of the invention or of the polypeptide of the present invention having herein-mentioned activity selected from the group consisting of said activities mentioned in (a) and conferring a isoleucine, leucine, or valine increasing activity, respectively, e.g. of a polypeptide having the activity of a protein as indicated in the respective line in Table II, application no. 6, columns 5 or 8, or its homologs or fragments, if for the corresponding nucleic acid molecule in the respective line in column 6 of Table I the term “plastidic” or “mitochondria!” is indicated, in these organelles by the stable or transient transformation, advantageously stable transformation, of organelles, preferably plastids or mitochondria, with an inventive nucleic acid sequence preferably in form of an expression cassette containing said sequence leading to the expression of the nucleic acids or polypeptides of the invention in the respective organelle; and/or
[43669] (m) generating the expression of a protein encoded by the nucleic acid molecule of the invention or of the polypeptide of the present invention having herein-mentioned activity selected from the group consisting of said activities mentioned in (a) and conferring a isoleucine, leucine, and/or valine increasing activity, respectively, e.g. of a polypeptide having the activity of a protein as indicated in the respective line in Table II, application no. 6, columns 5 or 8, or its homologs or fragments, if for the corresponding nucleic acid molecu te in the respective line in column 6 of Table I the term “plastidic” or “mitochondria!” is indicated, in these organelles by integration of a nucleic acid of the invention into the genome of the respective organelle under control of preferable a promoter selective for the respective organelle.

[43670] Preferably, said mRNA is the coding region of the nucleic acid molecule of the present invention and/or the protein conferring the increased expression of a protein encoded by the coding region of the nucleic acid molecule of the present invention alone or linked to a transit nucleic acid sequence or transit peptide encoding nucleic acid sequence or the polypeptide having the herein mentioned activity, e.g. conferring the generation of or increase of isoleucine, leucine, or valine, respectively, after increasing the expression or activity of the encoded polypeptide, non-targeted or in organelles such as plastids and/or mitochondria, preferably plastids, or having the activity of a polypeptide having an activity as the protein as shown in the respective line in Table II, application no. 6, column 3, or its homologs. Preferably the increase of isoleucine, leucine, or valine, respectively, takes place non-targeted or in plastids and/or mitochondria, preferably non-targeted or in plastids.

[43671] [0113.1.1.6] to [0122.1.1.6] for the disclosure of these paragraphs see [0113.1.1.1] to [0122.1.1.1] above.

[43672] The activation of an endogenous polypeptide having above-mentioned activity, e.g. having the activity of a protein as shown in the respective line in Table II, application no. 6, column 3 or of the polypeptide of the invention, e.g. conferring the increase of the fine chemical isoleucine, leucine, or valine, respectively, by increase of expression or activity in the cytoplasm, and/or in the cytosol, and/or in an organelle, such as plastids or mitochondria, can also be increased by introducing a synthetic transcription factor, which binds close to the coding region of the gene encoding the protein as shown in the respective line in Table II, application no. 6, column 5 or 8, or homologs or fragments thereof, and activates its transcription. A chimeric zinc finger protein can be constructed, which comprises a specific DNA-binding domain and an activation domain as e.g. the VP16 domain of Herpes Simplex virus. The specific binding domain can bind to the regulatory region of the gene encoding the protein as shown in the respective line in Table II, application no. 6, column 5 or 8, or homologs or fragments thereof. The expression of the chimeric transcription factor in a non-human organism, in particular in a plant, leads to a specific expression of the protein as shown in the respective line in Table II, application no. 6, column 5 or 8, or homologs or fragments thereof, see e.g. in WO01/52620, Oriz, Proc. Natl. Acad. Sci. USA 99, 13290 (2002), or Guan, Proc. Natl. Acad. Sci. USA 99, 13296 (2002).

[43673] [0124.1.1.6] to [0127.1.1.6] for the disclosure of these paragraphs see [0124.1.1.1] to [0127.1.1.1] above.

[43674] Owing to the introduction of a gene or a plurality of genes conferring the expression of the nucleic acid molecule of the invention or the polypeptide of the invention, for example the nucleic acid construct mentioned below, or encoding the protein as shown in the respective line in Table II, application no. 6, column 5 or 8, or homologs or fragments thereof, into a non-human organism alone or in combination with other genes, it is possible not only to increase the biosynthetic flux towards the end product, but also to increase, modify or create de novo an advantageous, preferably novel metabolites composition in the non-human organism, e.g. an advantageous composition comprising a higher content of (from a viewpoint of nutritional physiology limited) isoleucine, leucine, or valine, respectively, and if desired other amino acids, and/or other metabolites, in free or bound form.

[43675] for the disclosure of this paragraph see [0129.1.1.1] above

[43676] Accordingly, in one embodiment, the process according to the invention relates to a process, which comprises:
[43677] (a) providing a non-human organism, preferably a microorganism, a plant cell, a plant tissue, a plant or a part thereof, more preferably a microorganism, a plant tissue, a plant or a part thereof;
[43678] (b) increasing the activity of a protein as shown in the respective line in Table II, application no. 6, column 3 or of a polypeptide being encoded by the respective nucleic acid molecule of the present invention and described below, e.g. conferring an increase of the fine chemical isoleucine, leucine, or valine, respectively, in the non-human organism, preferably in the microorganism, the plant cell, the plant tissue, the plant or a part thereof, more preferably a microorganism, a plant tissue, a plant or a part thereof, especially cytoplasmic or in an organelle, like plastids or mitochondria,
[43679] (c) growing the non-human organism, preferably the microorganism, the plant cell, the plant tissue, the plant or a part thereof, under conditions which permit the production of said fine chemical in the non-human organism, preferably the microorganism, the plant cell, the plant tissue, the plant or a part thereof; and
[43680] (d) if desired, recovering, optionally isolating, said fine chemical, in free and/or bound form, and, optionally further free and/or bound amino acids, and/or other metabolites synthesized by the non-human organism, the microorganism, the plant cell, the plant tissue, the plant or a part thereof.

[43681] [0131.1.1.6] to [0139.1.1.6] for the disclosure of these paragraphs see [0131.1.1.1] to [0139.1.1.6] above.

[43682] In another embodiment, the invention relates to a (isolated) nucleic acid molecule, which comprises a nucleic acid molecule selected from the group consisting of:
[43683] (a) a nucleic acid molecule encoding a polypeptide shown in Table II, application no. 6, column 5 or 8, preferably shown in Table II B, application no. 6, column 8, or a homolog or a fragment thereof;
[43684] (b) a nucleic acid molecule shown in Table I, application no. 6, column 5 or 8, preferably shown in Table I B, application no. 6, column 8, preferably the coding region thereof, or a homolog or a fragment thereof;
[43685] (c) a nucleic acid molecule, which, as a result of the degeneracy of the genetic code, can be derived from a polypeptide sequence depicted in column 5 or 8 of Table II, application no. 6, preferably in column 8 of Table II B, application no. 6;
[43686] (d) a nucleic acid molecule having at least 30% identity, preferably at least 40%, 50%, 60%, 70%, 75%, 80%, 85%, 90%, 95%, 96%, 97%, 98%, 99%, 99,5%, with the nucleic acid molecule sequence of a polynucleotide comprising the nucleic acid molecule shown in column 5 or 8 of Table I, application no. 6, preferably shown in column 8 of Table I B, application no. 6, preferably the coding region thereof;
[43687] (e) a nucleic acid molecule encoding a polypeptide having at least 30% identity, preferably at least 40%, 50% 60%, 70%, 75%, 80%, 85%, 90%, 95%, 96%, 97%, 98%, 99%, 99,5%, identity with the amino acid sequence of the polypeptide encoded by the nucleic acid molecule of (a), (b), (c) or (d);
[43688] (f) a nucleic acid molecule which hybridizes with a nucleic acid molecule of (a), (b), (c), (d) or (e) under stringent hybridization conditions;
[43689] (g) a nucleic acid molecule encoding a polypeptide which can be isolated with the aid of monoclonal or polyclonal antibodies made against a polypeptide encoded by one of the nucleic acid molecules of (a), (b), (c), (d), (e) or (f);
[43690] (h) a nucleic acid molecule encoding a polypeptide comprising the consensus sequence or one or more polypeptide motifs as shown in column 8 of Table IV, application no. 6;
[43691] (i) a nucleic acid molecule encoding a polypeptide having the activity represented by a respective protein as depicted in column 5 of Table II, application no. 6;
[43692] (j) a nucleic acid molecule comprising a polynucleotide which is obtained by amplifying a cDNA library or a genomic library using the primers in Table III, application no. 6, column 8;
[43693] and
[43694] (k) nucleic acid molecule which is obtainable by screening a suitable nucleic acid library, especially a cDNA library and/or a genomic library, under stringent hybridization conditions with a probe comprising one of the sequences of the nucleic acid molecule of (a), (b), (c), (d), (e), (f), (g), (h), (i) or (j) or with a fragment of at least 15 nt, preferably 20 nt, 30 nt, 50 nt, 100 nt, 200 nt,500 nt, 1000 nt, 1500 nt, 2000 nt or 3000 nt of the nucleic acid molecule characterized in (a), (b), (c), (d), (e), (f), (g), (h), (i) or (j) ;
[43695] or a nucleic acid molecule comprising a sequence which is complementary thereto.
   (All the references to Tables I to IV are references to the corresponding lines of Tables I to IV.)

[43696] In a preferred embodiment thereof said nucleic acid molecule according to (a), (b), (c), (d), (e), (f), (g), (h), (i), (j) or (k) encodes a polypeptide which has the activity of the respective polypeptide represented by a protein comprising a polypeptide as depicted in the respective line in column 5 of Table II, application no. 6.

[43697] In another preferred embodiment thereof said nucleic acid molecule according to (a), (b), (c), (d), (e), (f), (g), (h), (i), (j) or (k) confers a generation or an increase of the respective fine chemical in a non-human organism or a part thereof as compared to a corresponding wild-type non-human organism or part thereof.

[43698] In another preferred embodiment thereof said nucleic acid molecule according to (a), (b), (c), (d), (e), (f), (g), (h), (i), (j) or (k) encodes a polypeptide which has the activity of the respective polypeptide represented by a protein as depicted in the respective line in column 5 of Table II application no. 6 and confers a generation or an increase of the respective fine chemical in a non-human organism or a part thereof as compared to a corresponding wild-type non-human organism or part thereof.

[43699] In another embodiment, the invention relates to a (isolated) nucleic acid molecule, which comprises a nucleic acid molecule selected from the group consisting of:
[43700] (a) a nucleic acid molecule encoding a polypeptide shown in Table II, column 5 or 8, application no. 6, preferably shown in Table II A, application no. 6, in column 5 or in Table II A, application no. 6, column 8 or in Table II B, application no. 6, column 8, or a homolog or a fragment thereof;
[43701] (b) a nucleic acid molecule shown in Table I, application no. 6, column 5 or 8, preferably shown in Table I A, application no. 6, in column 5 or in Table I A, application no. 6, column 8 or in Table I B, application no. 6, column 8, preferably the coding region thereof, or a homolog or a fragment thereof;
[43702] (c) a nucleic acid molecule, which, as a result of the degeneracy of the genetic code, can be derived from a polypeptide sequence depicted in column 5 or 8 of Table II, application no. 6, preferably shown in Table II A, application no. 6, in column 5 or in Table II A, application no. 6, column 8 or in Table II B, application no. 6, column 8;
[43703] (d) a nucleic acid molecule having at least 30% identity, preferably at least 40%, 50%, 60%, 70%, 75%, 80%, 85%, 90%, 95%, 96%, 97%, 98%, 99%, 99,5%, with the nucleic acid molecule sequence of a polynucleotide comprising the nucleic acid molecule shown in column 5 or 8 of Table I, application no. 6, preferably shown in Table I A, application no. 6, in column 5 or in Table I A, application no. 6, column 8 or in Table I B column 8, preferably the coding region thereof;
[43704] (e) a nucleic acid molecule encoding a polypeptide having at least 30% identity, preferably at least 40%, 50% 60%, 70%, 75%, 80%, 85%, 90%, 95%, 96%, 97%, 98%, 99%, 99,5%, identity with the amino acid sequence of the polypeptide encoded by the nucleic acid molecule of (a), (b), (c) or (d);
[43705] (f) a nucleic acid molecule which hybridizes with a nucleic acid molecule of (a), (b), (c), (d) or (e) under stringent hybridization conditions;
[43706] (g) a nucleic acid molecule encoding a polypeptide which can be isolated with the aid of monoclonal or polyclonal antibodies made against a polypeptide encoded by one of the nucleic acid molecules of (a), (b), (c), (d), (e) or (f);
[43707] (h) a nucleic acid molecule encoding a polypeptide comprising the consensus sequence or one or more polypeptide motifs as shown in column 8 of Table IV, application no. 6;
[43708] (i) a nucleic acid molecule encoding a polypeptide having the activity represented by a respective protein as depicted in column 5 of Table II, application no. 6;
[43709] (j) a nucleic acid molecule comprising a polynucleotide which is obtained by amplifying a cDNA library or a genomic library using the primers in Table III, application no. 6, column 8;
[43710] and
[43711] (k) nucleic acid molecule which is obtainable by screening a suitable nucleic acid library, especially a cDNA library and/or a genomic library, under stringent hybridization conditions with a probe comprising one of the sequences of the nucleic acid molecule of (a), (b), (c), (d), (e), (f), (g), (h), (i) or (j) or with a fragment thereof having at least 15 nt, preferably 20 nt, 30 nt, 50 nt, 100 nt, 200 nt,500 nt, 1000 nt, 1500 nt, 2000 nt or 3000 nt of the nucleic acid molecule complementary to a nucleic acid sequence characterized in (a), (b), (c), (d), (e), (f), (g), (h), (i) or (j);
[43712] or a nucleic acid molecule comprising a sequence which is complementary thereto;
   whereby, preferably, the nucleic acid molecule according to (a), (b), (c), (d), (e), (f), (g), (h), (i), (j) or (k) distinguishes over the sequence depicted in Table I A and/or I B, application no. 6, column 5 or 8, or the coding regions thereof, by one or more nucleotides (especially but not exceeding 5%, preferably 4%, 3%, 2%, 1%, 0.5%, 0.2% or 0.1%). In an embodiment, the nucleic acid molecule of the invention does not consist of the sequence shown in Table I A and/or I B, application no. 6, column 5 or 8, or the coding region thereof. In another embodiment, the nucleic acid molecule of the present invention, preferably the coding region thereof, is at least 30%, 40%, 50%, 60%, 70%, 80%, 90%, 95% identical but less than 100%, 99.999%, 99.99%, 99.9%, 99%, 98%, 97%, 96% or 95% identical to the sequence shown in Table I A and/or I B, application no. 6, column 5 or 8, or the coding region thereof, respectively. In a further embodiment the nucleic acid molecule does not encode the polypeptide sequence shown in Table II A and/or II B, application no. 6, column 5 or 8 but homologs thereof. Accordingly, in one embodiment, the nucleic acid molecule of the present invention encodes in one embodiment a polypeptide which differs at least in one or more amino acids (especially but not exceeding 5%, preferably 4%, 3%, 2%, 1%, 0.5%, 0.2% or 0.1%) from the polypeptide shown in Table II, application no. 6, column 5 or 8 and does not encode a protein of the sequence shown in Table II A and/or II B, application no. 6, column 5 or 8.Accordingly, in one embodiment, the protein encoded by a sequence of a nucleic acid according to (a), (b), (c), (d), (e), (f), (g), (h), (i), (j) or (k) does not consist of the sequence shown in Table I A and/or I B, application no. 6, column 5 or 8, or the coding region thereof. In a further embodiment, the protein of the present invention is at least 30%, 40%, 50%, 60%, 70%, 80%, 90%, 95% identical to protein sequence depicted in Table II A and/or II B, application no. 6, column 5 or 8 but less than 100%, preferably less than 99.999%, 99.99%, 99.9%, 99%, 98%, 97%, 96% or 95% identical to the sequence shown in Table II A and/or II B, application no. 6, column 5 or 8.
   (All the references to Tables I to IV are references to the corresponding lines of Tables I to IV.)

[43713] In a preferred embodiment thereof said nucleic acid molecule according to (a), (b), (c), (d), (e), (f), (g), (h), (i), (j) or (k) encodes a polypeptide which has the activity of the respective polypeptide represented by a protein comprising a polypeptide as depicted in the respective line in column 5 of Table II, application no. 6.

[43714] In another preferred embodiment thereof said nucleic acid molecule according to (a), (b), (c), (d), (e), (f), (g), (h), (i), (j) or (k) confers a generation or an increase of the respective fine chemical in a non-human organism or a part thereof as compared to a corresponding wild-type non-human organism or part thereof.

[43715] In another preferred embodiment thereof said nucleic acid molecule according to (a), (b), (c), (d), (e), (f), (g), (h), (i), (j) or (k) encodes a polypeptide which has the activity of the respective polypeptide represented by a protein as depicted in the respective line in column 5 of Table II, application no. 6, and confers a generation or an increase of the respective fine chemical in a non-human organism or a part thereof as compared to a corresponding wild-type non-human organism or part thereof.

[43716] [0144.1.1.6] to [0155.1.1.6] for the disclosure of these paragraphs see [0144.1.1.1] to [0155.1.1.1] above.

[43717] In a preferred embodiment a nucleic acid construct, for example an expression cassette, comprises upstream, i.e. at the 5′ end of the encoding sequence, a promoter and downstream, i.e. at the 3′ end, a polyadenylation signal and optionally other regulatory elements which are operably linked to the intervening encoding sequence with one of the nucleic acids as depicted in the respective line in Table I, application no. 6, column 5 or 8, preferably the coding region thereof, or a homolog or a fragment thereof. By an operable linkage is meant the sequential arrangement of promoter, encoding sequence, terminator, optionally other regulatory elements and optionally targeting sequences in such a way that each of the regulatory elements/targeting sequence can fulfill its function in the expression of the encoding sequence in due manner. In one embodiment the sequences preferred for operable linkage are targeting sequences for ensuring subcellular localization in organelles, like plastids or mitochondria. However, targeting sequences for ensuring subcellular localization in the endoplasmic reticulum (=ER), in the nucleus, in oil corpuscles or other compartments may also be employed as well as translation promoters such as the 5′ lead sequence in tobacco mosaic virus (Gallie et al., Nucl. Acids Res. 15, 8693 (1987)).

[43718] for the disclosure of this paragraph see [0157.1.1.1] above [0158.1.6.6] In an embodiment, the invention relates to an expression cassette, comprising
[43719] 1) a promoter, preferably a promoter selected from the group consisting of Big35S, PCUbi, Super and USP;
[43720] 2) a nucleic acid molecule selected from the group consisting of
   [43721] (a) a nucleic acid molecule encoding a polypeptide shown in Table II, application no. 6, column 5 or 8, preferably shown in Table II A, application no. 6, column 5, or in Table II A, application no. 6, column 8, or in Table II B, application no. 6, column 8, or a homolog or a fragment thereof;
   [43722] (b) a nucleic acid molecule shown in Table I, application no. 6, column 5 or 8, preferably shown in Table I A, application no. 6, column 5, or in Table I A, application no. 6, column 8, or in Table I B, application no. 6, column 8, preferably the coding region thereof, or a homolog or a fragment thereof;
   [43723] (c) a nucleic acid molecule, which, as a result of the degeneracy of the genetic code, can be derived from a polypeptide sequence depicted in column 5 or 8 of Table II, application no. 6, preferably shown in Table II A, application no. 6, column 5, or in Table II A, application no. 6, column 8, or in Table II B, application no. 6, column 8;
   [43724] (d) a nucleic acid molecule having at least 30% identity, preferably at least 40%, 50%, 60%, 70%, 75%, 80%, 85%, 90%, 95%, 96%, 97%, 98%, 99%, 99,5%, with the nucleic acid molecule sequence of a polynucleotide comprising the nucleic acid molecule shown in column 5 or 8 of Table I, application no. 6, preferably shown in Table I A, application no. 6, column 5, or in Table I A, application no. 6, column 8, or in Table I B, application no. 6, column 8, preferably the coding region thereof;
   [43725] (e) a nucleic acid molecule encoding a polypeptide having at least 30% identity, preferably at least 40%, 50% 60%, 70%, 75%, 80%, 85%, 90%, 95%, 96%, 97%, 98%, 99%, 99,5%, identity with the amino acid sequence of the polypeptide encoded by the nucleic acid molecule of (a), (b), (c) or (d);
   [43726] (f) a nucleic acid molecule which hybridizes with a nucleic acid molecule of (a), (b), (c), (d) or (e) under stringent hybridization conditions;
   [43727] (g) a nucleic acid molecule encoding a polypeptide which can be isolated with the aid of monoclonal or polyclonal antibodies made against a polypeptide encoded by one of the nucleic acid molecules of (a), (b), (c), (d), (e) or (f);
   [43728] (h) a nucleic acid molecule encoding a polypeptide comprising the consensus sequence or one or more polypeptide motifs as shown in column 8 of Table IV, application no. 6;
   [43729] (i) a nucleic acid molecule encoding a polypeptide having the activity represented by a respective protein as depicted in column 5 of Table II, application no. 6;
   [43730] (j) a nucleic acid molecule comprising a polynucleotide which is obtained by amplifying a cDNA library or a genomic library using the primers in Table III, application no. 6, column 8;
   [43731] and
   [43732] (k) nucleic acid molecule which is obtainable by screening a suitable nucleic acid library, especially a cDNA library and/or a genomic library, under stringent hybridization conditions with a probe comprising one of the sequences of the nucleic acid molecule of (a), (b), (c), (d), (e), (f), (g), (h), (i) or (j) or with a fragment of at least 15 nt, preferably 20 nt, 30 nt, 50 nt, 100 nt, 200 nt,500 nt, 1000 nt, 1500 nt, 2000 nt or 3000 nt of the nucleic acid molecule characterized in (a), (b), (c), (d), (e), (f), (g), (h), (i) or (j);
   [43733] or a nucleic acid molecule comprising a sequence which is complementary thereto. and, optionally
[43734] 3) nucleic acid molecule encoding a transit peptide, preferably encoding a plastidal transit peptide or a mitochondrial transit peptide; which are operable linked.
   (All the references to Tables I to IV are references to the corresponding lines of Tables I to IV.)

[43735] In a preferred embodiment thereof said nucleic acid molecule according to 2 (a), (b), (c), (d), (e), (f), (g), (h), (i), (j) or (k) encodes a polypeptide which has the activity of the respective polypeptide represented by a protein comprising a polypeptide as depicted in the respective line in column 5 of Table II, application no. 6.

[43736] In another preferred embodiment thereof said nucleic acid molecule according to 2 (a), (b), (c), (d), (e), (f), (g), (h), (i), (j) or (k) confers a generation or an increase of the respective fine chemical in a non-human organism or a part thereof as compared to a corresponding wild-type non-human organism or part thereof.

[43737] In another preferred embodiment thereof said nucleic acid molecule according to 2 (a), (b), (c), (d), (e), (f), (g), (h), (i), (j) or (k) encodes a polypeptide which has the activity of the respective polypeptide represented by a protein as depicted in the respective line in column 5 of Table II application no. 6 and confers a generation or an increase of the respective fine chemical in a non-human organism or a part thereof as compared to a corresponding wild-type non-human organism or part thereof.

[43738] In another embodiment thereof the expression cassette comprises 3) a nucleic acid molecule encoding a transit peptide, preferably encoding a plastidal transit peptide, especially in case in column 6 of Table I, application no. 6, in the same line as of the respective nucleic acid molecule according to 2) “plastidic” is depicted, or encoding a mitochondrial transit peptide, especially in case in column 6 of Table I, application no. 6, in the same line as of the respective nucleic acid molecule according to 2) “mitochondrial” is depicted.

[43739] In another embodiment thereof the expression cassette does not comprise 3) a nucleic acid molecule encoding a transit peptide, especially in case in column 6 of Table I, application no. 6, in the same line as of the respective nucleic acid molecule according to 2) “non-targeted” is depicted.

[43740] In a further embodiment, the invention relates to an expression cassette, comprising 1) a promoter, preferably a promoter selected from the group consisting of Big35S, PCUbi, Super and USP; 2) a nucleic acid molecule selected from the group consisting of
[43741] (a) a nucleic acid molecule encoding a polypeptide shown in Table II, application no. 6, column 5 or 8, preferably shown in Table II A, application no. 6, column 5, or in Table II A, application no. 6, column 8, or in Table II B, application no. 6, column 8, or a homolog or a fragment thereof;
[43742] (b) a nucleic acid molecule shown in Table I, application no. 6, column 5 or 8, preferably shown in Table I A, application no. 6, column 5, or in Table I A, application no. 6, column 8, or in Table I B, application no. 6, column 8, preferably the coding region thereof, or a homolog or a fragment thereof;
[43743] (c) a nucleic acid molecule, which, as a result of the degeneracy of the genetic code, can be derived from a polypeptide sequence depicted in column 5 or 8 of Table II, application no. 6, preferably shown in Table II A, application no. 6, column 5, or in Table II A, application no. 6, column 8, or in Table II B, application no. 6, column 8;
[43744] (d) a nucleic acid molecule having at least 30% identity, preferably at least 40%, 50%, 60%, 70%, 75%, 80%, 85%, 90%, 95%, 96%, 97%, 98%, 99%, 99,5%, with the nucleic acid molecule sequence of a polynucleotide comprising the nucleic acid molecule shown in column 5 or 8 of Table I, application no. 6, preferably shown in Table I A, application no. 6, column 5, or in Table I A, application no. 6, column 8,or in Table I B, application no. 6, column 8, preferably the coding region thereof;
[43745] (e) a nucleic acid molecule encoding a polypeptide having at least 30% identity, preferably at least 40%, 50% 60%, 70%, 75%, 80%, 85%, 90%, 95%, 96%, 97%, 98%, 99%, 99,5%, identity with the amino acid sequence of the polypeptide encoded by the nucleic acid molecule of (a), (b), (c) or (d);
[43746] (f) a nucleic acid molecule which hybridizes with a nucleic acid molecule of (a), (b), (c), (d) or (e) under stringent hybridization conditions;
[43747] (g) a nucleic acid molecule encoding a polypeptide which can be isolated with the aid of monoclonal or polyclonal antibodies made against a polypeptide encoded by one of the nucleic acid molecules of (a), (b), (c), (d), (e) or (f);
[43748] (h) a nucleic acid molecule encoding a polypeptide comprising the consensus sequence or one or more polypeptide motifs as shown in column 8 of Table IV, application no. 6;
[43749] (i) a nucleic acid molecule encoding a polypeptide having the activity represented by a respective protein as depicted in column 5 of Table II, application no. 6;
[43750] (j) a nucleic acid molecule comprising a polynucleotide which is obtained by amplifying a cDNA library or a genomic library using the primers in Table III, application no. 6, column 8;
[43751] and
[43752] (k) nucleic acid molecule which is obtainable by screening a suitable nucleic acid library, especially a cDNA library and/or a genomic library, under stringent hybridization conditions with a probe comprising one of the sequences of the nucleic acid molecule of (a), (b), (c), (d), (e), (f), (g), (h), (i) or (j) or with a fragment of at least 15 nt, preferably 20 nt, 30 nt, 50 nt, 100 nt, 200 nt,500 nt, 1000 nt, 1500 nt, 2000 nt or 3000 nt of the nucleic acid molecule characterized in (a), (b), (c), (d), (e), (f), (g), (h), (i) or (j);
[43753] or a nucleic acid molecule comprising a sequence which is complementary thereto; and, optionally
[43754] 3) nucleic acid molecule encoding a transit peptide, preferably encoding a plastidal transit peptide or a mitochondrial transit peptide;
   which are operable linked and
   whereby, preferably, the nucleic acid molecule according to 2 (a), (b), (c), (d), (e), (f), (g), (h), (i), (j) or (k) distinguishes over the sequence depicted in Table I A and/or I B, application no. 6, column 5 or 8, or the coding region thereof, by one or more nucleotides (especially but not exceeding 5%, preferably 4%, 3%, 2%, 1%, 0.5%, 0.2% or 0.1%). In an embodiment, the nucleic acid molecule of the invention according to 2) does not consist of the sequence shown in Table I A and/or I B, application no. 6, column 5 or 8, or the coding region thereof. In another embodiment, the nucleic acid molecule of the present invention, preferably the coding region thereof, is at least 30%, 40%, 50%, 60%, 70%, 80%, 90%, 95% identical but less than 100%, 99.999%, 99.99%, 99.9%, 99%, 98%, 97%, 96% or 95% identical to the sequence shown in Table I A and/or I B, application no. 6, column 5 or 8, or the coding region thereof, respectively. In a further embodiment the nucleic acid molecule does not encode the polypeptide sequence shown in Table II A and/or II B, application no. 6, column 5 or 8 but homologs thereof. Accordingly, in one embodiment, the nucleic acid molecule of the present invention encodes in one embodiment a polypeptide which differs at least in one or more amino acids (especially but not exceeding 5%, preferably 4%, 3%, 2%, 1%, 0.5%, 0.2% or 0.1%) from the polypeptide shown in Table II, application no. 6, column 5 or 8 and does not encode a protein of the sequence shown in Table II A and/or II B, application no. 6, column 5 or 8.Accordingly, in one embodiment, the protein encoded by a sequence of a nucleic acid according to 2(a), (b), (c), (d), (e), (f), (g), (h), (i), (j) or (k) does not consist of the sequence shown in Table I A and/or I B, application no. 6, column 5 or 8, or the coding region thereof. In a further embodiment, the protein of the present invention is at least 30%, 40%, 50%, 60%, 70%, 80%, 90%, 95% identical to protein sequence depicted in Table II A and/or II B, application no. 6, column 5 or 8 but less than 100%, 99.999%, 99.99%, 99.9%, 99%, 98%, 97%, 96% or 95% identical to the sequence shown in Table II A and/or II B, application no. 6, column 5 or 8.
   (All the references to Tables I to IV are references to the corresponding lines of Tables I to IV.)

[43755] In a preferred embodiment thereof said nucleic acid molecule according to 2 (a), (b), (c), (d), (e), (f), (g), (h), (i), (j) or (k) encodes a polypeptide which has the activity of the respective polypeptide represented by a protein comprising a polypeptide as depicted in the respective line in column 5 of Table II, application no. 6.

[43756] In another preferred embodiment thereof said nucleic acid molecule according to 2 (a), (b), (c), (d), (e), (f), (g), (h), (i), (j) or (k) confers a generation or an increase of the respective fine chemical in a non-human organism or a part thereof as compared to a corresponding wild-type non-human organism or part thereof.

[43757] In another preferred embodiment thereof said nucleic acid molecule according to 2 (a), (b), (c), (d), (e), (f), (g), (h), (i), (j) or (k) encodes a polypeptide which has the activity of the respective polypeptide represented by a protein as depicted in the respective line in column 5 of Table II application no. 6 and confers a generation or an increase of the respective fine chemical in a non-human organism or a part thereof as compared to a corresponding wild-type non-human organism or part thereof.

[43758] In another embodiment thereof the expression cassette comprises 3) a nucleic acid molecule encoding a transit peptide, preferably encoding a plastidal transit peptide, especially in case in column 6 of Table I, application no. 6, in the same line as of the respective nucleic acid molecule according to 2) “plastidic” is depicted, or encoding a mitochondrial transit peptide, especially in case in column 6 of Table I, application no. 6, in the same line as of the respective nucleic acid molecule according to 2) “mitochondrial” is depicted.

[43759] In another embodiment thereof the expression cassette does not comprise 3) a nucleic acid molecule encoding a transit peptide, especially in case in column 6 of Table I, application no. 6, in the same line as of the respective nucleic acid molecule according to 2) “non-targeted” is depicted.

[43760] In an embodiment the present invention relates to an expresssion cassette comprising a) a promoter, preferably a promoter selected from the group consisting of Big35S, PCUbi, Super and USP, in particular p-PcUBI; and b) the nucleic acid SEQ ID NO. 15187, or a homolog or fragment thereof, or a homolog thereof being depicted in Table I, application no. 6, column 8, in the same line as SEQ ID NO. 15187, preferably the coding region thereof, a homolog or a fragment thereof; which are operable linked.

[43761] In an embodiment thereof the expression cassette comprises in addition c) a nucleic acid molecule encoding a transit peptide, especially a plastidal transit petide in case in Table I, application no. 6, in column 6 in the same line as SEQ ID NO. 15187 is depicted, plastidic is mentioned, or a mitochondrial transit peptide in case in Table I, application no. 6, in column 6 in the same line as SEQ ID NO. 15187 is depicted, mitochondrial is mentioned; which is operable linked, too.

[43762] In another embodiment thereof the expression cassette does not comprise an additional transit peptide in case in Table I, application no. 6, in column 6 in the same line as SEQ ID NO. 15187 is depicted, non-targeted is mentioned.

[43763] In an embodiment the present invention relates to an expresssion cassette comprising a) a promoter, preferably a promoter selected from the group consisting of Big35S, PCUbi, Super and USP, in particular p-PcUBI; and b) the nucleic acid SEQ ID NO. 15532, or a homolog or fragment thereof, or a homolog thereof being depicted in Table I, application no. 6, column 8, in the same line as SEQ ID NO. 15532, preferably the coding region thereof, a homolog or a fragment thereof; which are operable linked.

[43764] In an embodiment thereof the expression cassette comprises in addition c) a nucleic acid molecule encoding a transit peptide, especially a plastidal transit petide in case in Table I, application no. 6, in column 6 in the same line as SEQ ID NO. 15532 is depicted, plastidic is mentioned, or a mitochondrial transit peptide in case in Table I, application no. 6, in column 6 in the same line as SEQ ID NO. 15532 is depicted, mitochondrial is mentioned; which is operable linked, too.

[43765] In another embodiment thereof the expression cassette does not comprise an additional transit peptide in case in Table I, application no. 6, in column 6 in the same line as SEQ ID NO. 15532 is depicted, non-targeted is mentioned.

[43766] In an embodiment the present invention relates to an expresssion cassette comprising a) a promoter, preferably a promoter selected from the group consisting of Big35S, PCUbi, Super and USP, in particular p-PcUBI; and b) the nucleic acid SEQ ID NO. 16263, or a homolog or fragment thereof, or a homolog thereof being depicted in Table I, application no. 6, column 8, in the same line as SEQ ID NO. 16263, preferably the coding region thereof, a homolog or a fragment thereof; which are operable linked. In an embodiment thereof the expression cassette comprises in addition c) a nucleic acid molecule encoding a transit peptide, especially a plastidal transit petide in case in Table I, application no. 6, in column 6 in the same line as SEQ ID NO. 16263 is depicted, plastidic is mentioned, or a mitochondrial transit peptide in case in Table I, application no. 6, in column 6 in the same line as SEQ ID NO. 16263 is depicted, mitochondrial is mentioned; which is operable linked, too.

[43767] In another embodiment thereof the expression cassette does not comprise an additional transit peptide in case in Table I, application no. 6, in column 6 in the same line as SEQ ID NO. 16263 is depicted, non-targeted is mentioned.

[43768] In an embodiment the present invention relates to an expresssion cassette comprising a) a promoter, preferably a promoter selected from the group consisting of Big35S, PCUbi, Super and USP, in particular p-PcUBI; and b) the nucleic acid SEQ ID NO. 16883, or a homolog or fragment thereof, or a homolog thereof being depicted in Table I, application no. 6, column 8, in the same line as SEQ ID NO. 16883, preferably the coding region thereof, a homolog or a fragment thereof; which are operable linked.

[43769] In an embodiment thereof the expression cassette comprises in addition c) a nucleic acid molecule encoding a transit peptide, especially a plastidal transit petide in case in Table I, application no. 6, in column 6 in the same line as SEQ ID NO. 16883 is depicted, plastidic is mentioned, or a mitochondrial transit peptide in case in Table I, application no. 6, in column 6 in the same line as SEQ ID NO. 16883 is depicted, mitochondrial is mentioned; which is operable linked, too.

[43770] In another embodiment thereof the expression cassette does not comprise an additional transit peptide in case in Table I, application no. 6, in column 6 in the same line as SEQ ID NO. 16883 is depicted, non-targeted is mentioned.

[43771] In an embodiment the present invention relates to an expresssion cassette comprising a) a promoter, preferably a promoter selected from the group consisting of Big35S, PCUbi, Super and USP, in particular p-PcUBI; and b) the nucleic acid SEQ ID NO. 17451, or a homolog or fragment thereof, or a homolog thereof being depicted in Table I, application no. 6, column 8, in the same line as SEQ ID NO. 17451, preferably the coding region thereof, a homolog or a fragment thereof; which are operable linked.

[43772] In an embodiment thereof the expression cassette comprises in addition c) a nucleic acid molecule encoding a transit peptide, especially a plastidal transit petide in case in Table I, application no. 6, in column 6 in the same line as SEQ ID NO. 17451 is depicted, plastidic is mentioned, or a mitochondrial transit peptide in case in Table I, application no. 6, in column 6 in the same line as SEQ ID NO. 17451 is depicted, mitochondrial is mentioned; which is operable linked, too.

[43773] In another embodiment thereof the expression cassette does not comprise an additional transit peptide in case in Table I, application no. 6, in column 6 in the same line as SEQ ID NO. 17451 is depicted, non-targeted is mentioned.

[43774] In an embodiment the present invention relates to an expresssion cassette comprising a) a promoter, preferably a promoter selected from the group consisting of Big35S, PCUbi, Super and USP, in particular p-PcUBI; and b) the nucleic acid SEQ ID NO. 385, or a homolog or fragment thereof, or a homolog thereof being depicted in Table I, application no. 6, column 8, in the same line as SEQ ID NO. 385, preferably the coding region thereof, a homolog or a fragment thereof; which are operable linked.

[43775] In an embodiment thereof the expression cassette comprises in addition c) a nucleic acid molecule encoding a transit peptide, especially a plastidal transit petide in case in Table I, application no. 6, in column 6 in the same line as SEQ ID NO. 385 is depicted, plastidic is mentioned, or a mitochondrial transit peptide in case in Table I, application no. 6, in column 6 in the same line as SEQ ID NO. 385 is depicted, mitochondrial is mentioned; which is operable linked, too.

[43776] In another embodiment thereof the expression cassette does not comprise an additional transit peptide in case in Table I, application no. 6, in column 6 in the same line as SEQ ID NO. 385 is depicted, non-targeted is mentioned.

[43777] In an embodiment the present invention relates to an expresssion cassette comprising a) a promoter, preferably a promoter selected from the group consisting of Big35S, PCUbi, Super and USP, in particular p-PcUBI; and b) the nucleic acid SEQ ID NO. 17637, or a homolog or fragment thereof, or a homolog thereof being depicted in Table I, application no. 6, column 8, in the same line as SEQ ID NO. 17637, preferably the coding region thereof, a homolog or a fragment thereof; which are operable linked.

[43778] In an embodiment thereof the expression cassette comprises in addition c) a nucleic acid molecule encoding a transit peptide, especially a plastidal transit petide in case in Table I, application no. 6, in column 6 in the same line as SEQ ID NO. 17637 is depicted, plastidic is mentioned, or a mitochondrial transit peptide in case in Table I, application no. 6, in column 6 in the same line as SEQ ID NO. 17637 is depicted, mitochondrial is mentioned; which is operable linked, too.

[43779] In another embodiment thereof the expression cassette does not comprise an additional transit peptide in case in Table I, application no. 6, in column 6 in the same line as SEQ ID NO. 17637 is depicted, non-targeted is mentioned.

[43780] In an embodiment the present invention relates to an expresssion cassette comprising a) a promoter, preferably a promoter selected from the group consisting of Big35S, PCUbi, Super and USP, in particular p-PcUBI; and b) the nucleic acid SEQ ID NO. 102086, or a homolog or fragment thereof, or a homolog thereof being depicted in Table I, application no. 6, column 8, in the same line as SEQ ID NO. 102086, preferably the coding region thereof, a homolog or a fragment thereof; which are operable linked.

[43781] In an embodiment thereof the expression cassette comprises in addition c) a nucleic acid molecule encoding a transit peptide, especially a plastidal transit petide in case in Table I, application no. 6, in column 6 in the same line as SEQ ID NO. 102086 is depicted, plastidic is mentioned, or a mitochondrial transit peptide in case in Table I, application no. 6, in column 6 in the same line as SEQ ID NO. 102086 is depicted, mitochondrial is mentioned; which is operable linked, too.

[43782] In another embodiment thereof the expression cassette does not comprise an additional transit peptide in case in Table I, application no. 6, in column 6 in the same line as SEQ ID NO. 102086 is depicted, non-targeted is mentioned.

[43783] In an embodiment the present invention relates to an expresssion cassette comprising a) a promoter, preferably a promoter selected from the group consisting of Big35S, PCUbi, Super and USP, in particular p-PcUBI; and b) the nucleic acid SEQ ID NO. 17701, or a homolog or fragment thereof, or a homolog thereof being depicted in Table I, application no. 6, column 8, in the same line as SEQ ID NO. 17701, preferably the coding region thereof, a homolog or a fragment thereof; which are operable linked.

[43784] In an embodiment thereof the expression cassette comprises in addition c) a nucleic acid molecule encoding a transit peptide, especially a plastidal transit petide in case in Table I, application no. 6, in column 6 in the same line as SEQ ID NO. 17701 is depicted, plastidic is mentioned, or a mitochondrial transit peptide in case in Table I, application no. 6, in column 6 in the same line as SEQ ID NO. 17701 is depicted, mitochondrial is mentioned; which is operable linked, too.

[43785] In another embodiment thereof the expression cassette does not comprise an additional transit peptide in case in Table I, application no. 6, in column 6 in the same line as SEQ ID NO. 17701 is depicted, non-targeted is mentioned.

[43786] In an embodiment the present invention relates to an expresssion cassette comprising a) a promoter, preferably a promoter selected from the group consisting of Big35S, PCUbi, Super and USP, in particular p-PcUBI; and b) the nucleic acid SEQ ID NO. 17968, or a homolog or fragment thereof, or a homolog thereof being depicted in Table I, application no. 6, column 8, in the same line as SEQ ID NO. 17968, preferably the coding region thereof, a homolog or a fragment thereof; which are operable linked.

[43787] In an embodiment thereof the expression cassette comprises in addition c) a nucleic acid molecule encoding a transit peptide, especially a plastidal transit petide in case in Table I, application no. 6, in column 6 in the same line as SEQ ID NO. 17968 is depicted, plastidic is mentioned, or a mitochondrial transit peptide in case in Table I, application no. 6, in column 6 in the same line as SEQ ID NO. 17968 is depicted, mitochondrial is mentioned; which is operable linked, too.

[43788] In another embodiment thereof the expression cassette does not comprise an additional transit peptide in case in Table I, application no. 6, in column 6 in the same line as SEQ ID NO. 17968 is depicted, non-targeted is mentioned.

[43789] In an embodiment the present invention relates to an expresssion cassette comprising a) a promoter, preferably a promoter selected from the group consisting of Big35S, PCUbi, Super and USP, in particular p-PcUBI; and b) the nucleic acid SEQ ID NO. 18070, or a homolog or fragment thereof, or a homolog thereof being depicted in Table I, application no. 6, column 8, in the same line as SEQ ID NO. 18070, preferably the coding region thereof, a homolog or a fragment thereof; which are operable linked.

[43790] In an embodiment thereof the expression cassette comprises in addition c) a nucleic acid molecule encoding a transit peptide, especially a plastidal transit petide in case in Table I, application no. 6, in column 6 in the same line as SEQ ID NO. 18070 is depicted, plastidic is mentioned, or a mitochondrial transit peptide in case in Table I, application no. 6, in column 6 in the same line as SEQ ID NO. 18070 is depicted, mitochondrial is mentioned; which is operable linked, too.

[43791] In another embodiment thereof the expression cassette does not comprise an additional transit peptide in case in Table I, application no. 6, in column 6 in the same line as SEQ ID NO. 18070 is depicted, non-targeted is mentioned.

[43792] In an embodiment the present invention relates to an expresssion cassette comprising a) a promoter, preferably a promoter selected from the group consisting of Big35S, PCUbi, Super and USP, in particular p-PcUBI; and b) the nucleic acid SEQ ID NO. 18122, or a homolog or fragment thereof, or a homolog thereof being depicted in Table I, application no. 6, column 8, in the same line as SEQ ID NO. 18122, preferably the coding region thereof, a homolog or a fragment thereof; which are operable linked.

[43793] In an embodiment thereof the expression cassette comprises in addition c) a nucleic acid molecule encoding a transit peptide, especially a plastidal transit petide in case in Table I, application no. 6, in column 6 in the same line as SEQ ID NO. 18122 is depicted, plastidic is mentioned, or a mitochondrial transit peptide in case in Table I, application no. 6, in column 6 in the same line as SEQ ID NO. 18122 is depicted, mitochondrial is mentioned; which is operable linked, too.

[43794] In another embodiment thereof the expression cassette does not comprise an additional transit peptide in case in Table I, application no. 6, in column 6 in the same line as SEQ ID NO. 18122 is depicted, non-targeted is mentioned.

[43795] In an embodiment the present invention relates to an expresssion cassette comprising a) a promoter, preferably a promoter selected from the group consisting of Big35S, PCUbi, Super and USP, in particular p-PcUBI; and b) the nucleic acid SEQ ID NO. 18235, or a homolog or fragment thereof, or a homolog thereof being depicted in Table I, application no. 6, column 8, in the same line as SEQ ID NO. 18235, preferably the coding region thereof, a homolog or a fragment thereof; which are operable linked.

[43796] In an embodiment thereof the expression cassette comprises in addition c) a nucleic acid molecule encoding a transit peptide, especially a plastidal transit petide in case in Table I, application no. 6, in column 6 in the same line as SEQ ID NO. 18235 is depicted, plastidic is mentioned, or a mitochondrial transit peptide in case in Table I, application no. 6, in column 6 in the same line as SEQ ID NO. 18235 is depicted, mitochondrial is mentioned; which is operable linked, too.

[43797] In another embodiment thereof the expression cassette does not comprise an additional transit peptide in case in Table I, application no. 6, in column 6 in the same line as SEQ ID NO. 18235 is depicted, non-targeted is mentioned.

[43798] In an embodiment the present invention relates to an expresssion cassette comprising a) a promoter, preferably a promoter selected from the group consisting of Big35S, PCUbi, Super and USP, in particular p-PcUBI; and b) the nucleic acid SEQ ID NO. 18869, or a homolog or fragment thereof, or a homolog thereof being depicted in Table I, application no. 6, column 8, in the same line as SEQ ID NO. 18869, preferably the coding region thereof, a homolog or a fragment thereof; which are operable linked.

[43799] In an embodiment thereof the expression cassette comprises in addition c) a nucleic acid molecule encoding a transit peptide, especially a plastidal transit petide in case in Table I, application no. 6, in column 6 in the same line as SEQ ID NO. 18869 is depicted, plastidic is mentioned, or a mitochondrial transit peptide in case in Table I, application no. 6, in column 6 in the same line as SEQ ID NO. 18869 is depicted, mitochondrial is mentioned; which is operable linked, too.

[43800] In another embodiment thereof the expression cassette does not comprise an additional transit peptide in case in Table I, application no. 6, in column 6 in the same line as SEQ ID NO. 18869 is depicted, non-targeted is mentioned.

[43801] In an embodiment the present invention relates to an expresssion cassette comprising a) a promoter, preferably a promoter selected from the group consisting of Big35S, PCUbi, Super and USP, in particular p-PcUBI; and b) the nucleic acid SEQ ID NO. 102119, or a homolog or fragment thereof, or a homolog thereof being depicted in Table I, application no. 6, column 8, in the same line as SEQ ID NO. 102119, preferably the coding region thereof, a homolog or a fragment thereof; which are operable linked.

[43802] In an embodiment thereof the expression cassette comprises in addition c) a nucleic acid molecule encoding a transit peptide, especially a plastidal transit petide in case in Table I, application no. 6, in column 6 in the same line as SEQ ID NO. 102119 is depicted, plastidic is mentioned, or a mitochondrial transit peptide in case in Table I, application no. 6, in column 6 in the same line as SEQ ID NO. 102119 is depicted, mitochondrial is mentioned; which is operable linked, too.

[43803] In another embodiment thereof the expression cassette does not comprise an additional transit peptide in case in Table I, application no. 6, in column 6 in the same line as SEQ ID NO. 102119 is depicted, non-targeted is mentioned.

[43804] In an embodiment the present invention relates to an expresssion cassette comprising a) a promoter, preferably a promoter selected from the group consisting of Big35S, PCUbi, Super and USP, in particular p-PcUBI; and b) the nucleic acid SEQ ID NO. 19419, or a homolog or fragment thereof, or a homolog thereof being depicted in Table I, application no. 6, column 8, in the same line as SEQ ID NO. 19419, preferably the coding region thereof, a homolog or a fragment thereof; which are operable linked.

[43805] In an embodiment thereof the expression cassette comprises in addition c) a nucleic acid molecule encoding a transit peptide, especially a plastidal transit petide in case in Table I, application no. 6, in column 6 in the same line as SEQ ID NO. 19419 is depicted, plastidic is mentioned, or a mitochondrial transit peptide in case in Table I, application no. 6, in column 6 in the same line as SEQ ID NO. 19419 is depicted, mitochondrial is mentioned; which is operable linked, too.

[43806] In another embodiment thereof the expression cassette does not comprise an additional transit peptide in case in Table I, application no. 6, in column 6 in the same line as SEQ ID NO. 19419 is depicted, non-targeted is mentioned.

[43807] In an embodiment the present invention relates to an expresssion cassette comprising a) a promoter, preferably a promoter selected from the group consisting of Big35S, PCUbi, Super and USP, in particular p-PcUBI; and b) the nucleic acid SEQ ID NO. 19502, or a homolog or fragment thereof, or a homolog thereof being depicted in Table I, application no. 6, column 8, in the same line as SEQ ID NO. 19502, preferably the coding region thereof, a homolog or a fragment thereof; which are operable linked.

[43808] In an embodiment thereof the expression cassette comprises in addition c) a nucleic acid molecule encoding a transit peptide, especially a plastidal transit petide in case in Table I, application no. 6, in column 6 in the same line as SEQ ID NO. 19502 is depicted, plastidic is mentioned, or a mitochondrial transit peptide in case in Table I, application no. 6, in column 6 in the same line as SEQ ID NO. 19502 is depicted, mitochondrial is mentioned; which is operable linked, too.

[43809] In another embodiment thereof the expression cassette does not comprise an additional transit peptide in case in Table I, application no. 6, in column 6 in the same line as SEQ ID NO. 19502 is depicted, non-targeted is mentioned.

[43810] In an embodiment the present invention relates to an expresssion cassette comprising a) a promoter, preferably a promoter selected from the group consisting of Big35S, PCUbi, Super and USP, in particular p-PcUBI; and b) the nucleic acid SEQ ID NO. 19874, or a homolog or fragment thereof, or a homolog thereof being depicted in Table I, application no. 6, column 8, in the same line as SEQ ID NO. 19874, preferably the coding region thereof, a homolog or a fragment thereof; which are operable linked.

[43811] In an embodiment thereof the expression cassette comprises in addition c) a nucleic acid molecule encoding a transit peptide, especially a plastidal transit petide in case in Table I, application no. 6, in column 6 in the same line as SEQ ID NO. 19874 is depicted, plastidic is mentioned, or a mitochondrial transit peptide in case in Table I, application no. 6, in column 6 in the same line as SEQ ID NO. 19874 is depicted, mitochondrial is mentioned; which is operable linked, too.

[43812] In another embodiment thereof the expression cassette does not comprise an additional transit peptide in case in Table I, application no. 6, in column 6 in the same line as SEQ ID NO. 19874 is depicted, non-targeted is mentioned.

[43813] In an embodiment the present invention relates to an expresssion cassette comprising a) a promoter, preferably a promoter selected from the group consisting of Big35S, PCUbi, Super and USP, in particular p-PcUBI; and b) the nucleic acid SEQ ID NO. 19919, or a homolog or fragment thereof, or a homolog thereof being depicted in Table I, application no. 6, column 8, in the same line as SEQ ID NO. 19919, preferably the coding region thereof, a homolog or a fragment thereof; which are operable linked.

[43814] In an embodiment thereof the expression cassette comprises in addition c) a nucleic acid molecule encoding a transit peptide, especially a plastidal transit petide in case in Table I, application no. 6, in column 6 in the same line as SEQ ID NO. 19919 is depicted, plastidic is mentioned, or a mitochondrial transit peptide in case in Table I, application no. 6, in column 6 in the same line as SEQ ID NO. 19919 is depicted, mitochondrial is mentioned; which is operable linked, too.

[43815] In another embodiment thereof the expression cassette does not comprise an additional transit peptide in case in Table I, application no. 6, in column 6 in the same line as SEQ ID NO. 19919 is depicted, non-targeted is mentioned.

[43816] In an embodiment the present invention relates to an expresssion cassette comprising a) a promoter, preferably a promoter selected from the group consisting of Big35S, PCUbi, Super and USP, in particular p-PcUBI; and b) the nucleic acid SEQ ID NO. 20346, or a homolog or fragment thereof, or a homolog thereof being depicted in Table I, application no. 6, column 8, in the same line as SEQ ID NO. 20346, preferably the coding region thereof, a homolog or a fragment thereof; which are operable linked.

[43817] In an embodiment thereof the expression cassette comprises in addition c) a nucleic acid molecule encoding a transit peptide, especially a plastidal transit petide in case in Table I, application no. 6, in column 6 in the same line as SEQ ID NO. 20346 is depicted, plastidic is mentioned, or a mitochondrial transit peptide in case in Table I, application no. 6, in column 6 in the same line as SEQ ID NO. 20346 is depicted, mitochondrial is mentioned; which is operable linked, too.

[43818] In another embodiment thereof the expression cassette does not comprise an additional transit peptide in case in Table I, application no. 6, in column 6 in the same line as SEQ ID NO. 20346 is depicted, non-targeted is mentioned.

[43819] In an embodiment the present invention relates to an expresssion cassette comprising a) a promoter, preferably a promoter selected from the group consisting of Big35S, PCUbi, Super and USP, in particular p-PcUBI; and b) the nucleic acid SEQ ID NO. 21159, or a homolog or fragment thereof, or a homolog thereof being depicted in Table I, application no. 6, column 8, in the same line as SEQ ID NO. 21159, preferably the coding region thereof, a homolog or a fragment thereof; which are operable linked.

[43820] In an embodiment thereof the expression cassette comprises in addition c) a nucleic acid molecule encoding a transit peptide, especially a plastidal transit petide in case in Table I, application no. 6, in column 6 in the same line as SEQ ID NO. 21159 is depicted, plastidic is mentioned, or a mitochondrial transit peptide in case in Table I, application no. 6, in column 6 in the same line as SEQ ID NO. 21159 is depicted, mitochondrial is mentioned; which is operable linked, too.

[43821] In another embodiment thereof the expression cassette does not comprise an additional transit peptide in case in Table I, application no. 6, in column 6 in the same line as SEQ ID NO. 21159 is depicted, non-targeted is mentioned.

[43822] In an embodiment the present invention relates to an expresssion cassette comprising a) a promoter, preferably a promoter selected from the group consisting of Big35S, PCUbi, Super and USP, in particular p-PcUBI; and b) the nucleic acid SEQ ID NO. 21497, or a homolog or fragment thereof, or a homolog thereof being depicted in Table I, application no. 6, column 8, in the same line as SEQ ID NO. 21497, preferably the coding region thereof, a homolog or a fragment thereof; which are operable linked.

[43823] In an embodiment thereof the expression cassette comprises in addition c) a nucleic acid molecule encoding a transit peptide, especially a plastidal transit petide in case in Table I, application no. 6, in column 6 in the same line as SEQ ID NO. 21497 is depicted, plastidic is mentioned, or a mitochondrial transit peptide in case in Table I, application no. 6, in column 6 in the same line as SEQ ID NO. 21497 is depicted, mitochondrial is mentioned; which is operable linked, too.

[43824] In another embodiment thereof the expression cassette does not comprise an additional transit peptide in case in Table I, application no. 6, in column 6 in the same line as SEQ ID NO. 21497 is depicted, non-targeted is mentioned.

[43825] In an embodiment the present invention relates to an expresssion cassette comprising a) a promoter, preferably a promoter selected from the group consisting of Big35S, PCUbi, Super and USP, in particular p-PcUBI; and b) the nucleic acid SEQ ID NO. 22249, or a homolog or fragment thereof, or a homolog thereof being depicted in Table I, application no. 6, column 8, in the same line as SEQ ID NO. 22249, preferably the coding region thereof, a homolog or a fragment thereof; which are operable linked.

[43826] In an embodiment thereof the expression cassette comprises in addition c) a nucleic acid molecule encoding a transit peptide, especially a plastidal transit petide in case in Table I, application no. 6, in column 6 in the same line as SEQ ID NO. 22249 is depicted, plastidic is mentioned, or a mitochondrial transit peptide in case in Table I, application no. 6, in column 6 in the same line as SEQ ID NO. 22249 is depicted, mitochondrial is mentioned; which is operable linked, too.

[43827] In another embodiment thereof the expression cassette does not comprise an additional transit peptide in case in Table I, application no. 6, in column 6 in the same line as SEQ ID NO. 22249 is depicted, non-targeted is mentioned.

[43828] In an embodiment the present invention relates to an expresssion cassette comprising a) a promoter, preferably a promoter selected from the group consisting of Big35S, PCUbi, Super and USP, in particular p-PcUBI; and b) the nucleic acid SEQ ID NO. 22611, or a homolog or fragment thereof, or a homolog thereof being depicted in Table I, application no. 6, column 8, in the same line as SEQ ID NO. 22611, preferably the coding region thereof, a homolog or a fragment thereof; which are operable linked.

[43829] In an embodiment thereof the expression cassette comprises in addition c) a nucleic acid molecule encoding a transit peptide, especially a plastidal transit petide in case in Table I, application no. 6, in column 6 in the same line as SEQ ID NO. 22611 is depicted, plastidic is mentioned, or a mitochondrial transit peptide in case in Table I, application no. 6, in column 6 in the same line as SEQ ID NO. 22611 is depicted, mitochondrial is mentioned; which is operable linked, too.

[43830] In another embodiment thereof the expression cassette does not comprise an additional transit peptide in case in Table I, application no. 6, in column 6 in the same line as SEQ ID NO. 22611 is depicted, non-targeted is mentioned.

[43831] In an embodiment the present invention relates to an expresssion cassette comprising a) a promoter, preferably a promoter selected from the group consisting of Big35S, PCUbi, Super and USP, in particular p-PcUBI; and b) the nucleic acid SEQ ID NO. 22832, or a homolog or fragment thereof, or a homolog thereof being depicted in Table I, application no. 6, column 8, in the same line as SEQ ID NO. 22832, preferably the coding region thereof, a homolog or a fragment thereof; which are operable linked.

[43832] In an embodiment thereof the expression cassette comprises in addition c) a nucleic acid molecule encoding a transit peptide, especially a plastidal transit petide in case in Table I, application no. 6, in column 6 in the same line as SEQ ID NO. 22832 is depicted, plastidic is mentioned, or a mitochondrial transit peptide in case in Table I, application no. 6, in column 6 in the same line as SEQ ID NO. 22832 is depicted, mitochondrial is mentioned; which is operable linked, too.

[43833] In another embodiment thereof the expression cassette does not comprise an additional transit peptide in case in Table I, application no. 6, in column 6 in the same line as SEQ ID NO. 22832 is depicted, non-targeted is mentioned.

[43834] In an embodiment the present invention relates to an expresssion cassette comprising a) a promoter, preferably a promoter selected from the group consisting of Big35S, PCUbi, Super and USP, in particular p-PcUBI; and b) the nucleic acid SEQ ID NO. 1815, or a homolog or fragment thereof, or a homolog thereof being depicted in Table I, application no. 6, column 8, in the same line as SEQ ID NO. 1815, preferably the coding region thereof, a homolog or a fragment thereof; which are operable linked.

[43835] In an embodiment thereof the expression cassette comprises in addition c) a nucleic acid molecule encoding a transit peptide, especially a plastidal transit petide in case in Table I, application no. 6, in column 6 in the same line as SEQ ID NO. 1815 is depicted, plastidic is mentioned, or a mitochondrial transit peptide in case in Table I, application no. 6, in column 6 in the same line as SEQ ID NO. 1815 is depicted, mitochondrial is mentioned; which is operable linked, too.

[43836] In another embodiment thereof the expression cassette does not comprise an additional transit peptide in case in Table I, application no. 6, in column 6 in the same line as SEQ ID NO. 1815 is depicted, non-targeted is mentioned.

[43837] In an embodiment the present invention relates to an expresssion cassette comprising a) a promoter, preferably a promoter selected from the group consisting of Big35S, PCUbi, Super and USP, in particular p-PcUBI; and b) the nucleic acid SEQ ID NO. 68727, or a homolog or fragment thereof, or a homolog thereof being depicted in Table I, application no. 6, column 8, in the same line as SEQ ID NO. 68727, preferably the coding region thereof, a homolog or a fragment thereof; which are operable linked.

[43838] In an embodiment thereof the expression cassette comprises in addition c) a nucleic acid molecule encoding a transit peptide, especially a plastidal transit petide in case in Table I, application no. 6, in column 6 in the same line as SEQ ID NO. 68727 is depicted, plastidic is mentioned, or a mitochondrial transit peptide in case in Table I, application no. 6, in column 6 in the same line as SEQ ID NO. 68727 is depicted, mitochondrial is mentioned; which is operable linked, too.

[43839] In another embodiment thereof the expression cassette does not comprise an additional transit peptide in case in Table I, application no. 6, in column 6 in the same line as SEQ ID NO. 68727 is depicted, non-targeted is mentioned.

[43840] In an embodiment the present invention relates to an expresssion cassette comprising a) a promoter, preferably a promoter selected from the group consisting of Big35S, PCUbi, Super and USP, in particular p-PcUBI; and b) the nucleic acid SEQ ID NO. 68777, or a homolog or fragment thereof, or a homolog thereof being depicted in Table I, application no. 6, column 8, in the same line as SEQ ID NO. 68777, preferably the coding region thereof, a homolog or a fragment thereof; which are operable linked.

[43841] In an embodiment thereof the expression cassette comprises in addition c) a nucleic acid molecule encoding a transit peptide, especially a plastidal transit petide in case in Table I, application no. 6, in column 6 in the same line as SEQ ID NO. 68777 is depicted, plastidic is mentioned, or a mitochondrial transit peptide in case in Table I, application no. 6, in column 6 in the same line as SEQ ID NO. 68777 is depicted, mitochondrial is mentioned; which is operable linked, too.

[43842] In another embodiment thereof the expression cassette does not comprise an additional transit peptide in case in Table I, application no. 6, in column 6 in the same line as SEQ ID NO. 68777 is depicted, non-targeted is mentioned.

[43843] In an embodiment the present invention relates to an expresssion cassette comprising a) a promoter, preferably a promoter selected from the group consisting of Big35S, PCUbi, Super and USP, in particular p-PcUBI; and b) the nucleic acid SEQ ID NO. 2367, or a homolog or fragment thereof, or a homolog thereof being depicted in Table I, application no. 6, column 8, in the same line as SEQ ID NO. 2367, preferably the coding region thereof, a homolog or a fragment thereof; which are operable linked.

[43844] In an embodiment thereof the expression cassette comprises in addition c) a nucleic acid molecule encoding a transit peptide, especially a plastidal transit petide in case in Table I, application no. 6, in column 6 in the same line as SEQ ID NO. 2367 is depicted, plastidic is mentioned, or a mitochondrial transit peptide in case in Table I, application no. 6, in column 6 in the same line as SEQ ID NO. 2367 is depicted, mitochondrial is mentioned; which is operable linked, too.

[43845] In another embodiment thereof the expression cassette does not comprise an additional transit peptide in case in Table I, application no. 6, in column 6 in the same line as SEQ ID NO. 2367 is depicted, non-targeted is mentioned.

[43846] In an embodiment the present invention relates to an expresssion cassette comprising a) a promoter, preferably a promoter selected from the group consisting of Big35S, PCUbi, Super and USP, in particular p-PcUBI; and b) the nucleic acid SEQ ID NO. 2935, or a homolog or fragment thereof, or a homolog thereof being depicted in Table I, application no. 6, column 8, in the same line as SEQ ID NO. 2935, preferably the coding region thereof, a homolog or a fragment thereof; which are operable linked.

[43847] In an embodiment thereof the expression cassette comprises in addition c) a nucleic acid molecule encoding a transit peptide, especially a plastidal transit petide in case in Table I, application no. 6, in column 6 in the same line as SEQ ID NO. 2935 is depicted, plastidic is mentioned, or a mitochondrial transit peptide in case in Table I, application no. 6, in column 6 in the same line as SEQ ID NO. 2935 is depicted, mitochondrial is mentioned; which is operable linked, too.

[43848] In another embodiment thereof the expression cassette does not comprise an additional transit peptide in case in Table I, application no. 6, in column 6 in the same line as SEQ ID NO. 2935 is depicted, non-targeted is mentioned.

[43849] In an embodiment the present invention relates to an expresssion cassette comprising a) a promoter, preferably a promoter selected from the group consisting of Big35S, PCUbi, Super and USP, in particular p-PcUBI; and b) the nucleic acid SEQ ID NO. 24232, or a homolog or fragment thereof, or a homolog thereof being depicted in Table I, application no. 6, column 8, in the same line as SEQ ID NO. 24232, preferably the coding region thereof, a homolog or a fragment thereof; which are operable linked.

[43850] In an embodiment thereof the expression cassette comprises in addition c) a nucleic acid molecule encoding a transit peptide, especially a plastidal transit petide in case in Table I, application no. 6, in column 6 in the same line as SEQ ID NO. 24232 is depicted, plastidic is mentioned, or a mitochondrial transit peptide in case in Table I, application no. 6, in column 6 in the same line as SEQ ID NO. 24232 is depicted, mitochondrial is mentioned; which is operable linked, too.

[43851] In another embodiment thereof the expression cassette does not comprise an additional transit peptide in case in Table I, application no. 6, in column 6 in the same line as SEQ ID NO. 24232 is depicted, non-targeted is mentioned.

[43852] In an embodiment the present invention relates to an expresssion cassette comprising a) a promoter, preferably a promoter selected from the group consisting of Big35S, PCUbi, Super and USP, in particular p-PcUBI; and b) the nucleic acid SEQ ID NO. 68849, or a homolog or fragment thereof, or a homolog thereof being depicted in Table I, application no. 6, column 8, in the same line as SEQ ID NO. 68849, preferably the coding region thereof, a homolog or a fragment thereof; which are operable linked.

[43853] In an embodiment thereof the expression cassette comprises in addition c) a nucleic acid molecule encoding a transit peptide, especially a plastidal transit petide in case in Table I, application no. 6, in column 6 in the same line as SEQ ID NO. 68849 is depicted, plastidic is mentioned, or a mitochondrial transit peptide in case in Table I, application no. 6, in column 6 in the same line as SEQ ID NO. 68849 is depicted, mitochondrial is mentioned; which is operable linked, too.

[43854] In another embodiment thereof the expression cassette does not comprise an additional transit peptide in case in Table I, application no. 6, in column 6 in the same line as SEQ ID NO. 68849 is depicted, non-targeted is mentioned.

[43855] In an embodiment the present invention relates to an expresssion cassette comprising a) a promoter, preferably a promoter selected from the group consisting of Big35S, PCUbi, Super and USP, in particular p-PcUBI; and b) the nucleic acid SEQ ID NO. 4040, or a homolog or fragment thereof, or a homolog thereof being depicted in Table I, application no. 6, column 8, in the same line as SEQ ID NO. 4040, preferably the coding region thereof, a homolog or a fragment thereof; which are operable linked.

[43856] In an embodiment thereof the expression cassette comprises in addition c) a nucleic acid molecule encoding a transit peptide, especially a plastidal transit petide in case in Table I, application no. 6, in column 6 in the same line as SEQ ID NO. 4040 is depicted, plastidic is mentioned, or a mitochondrial transit peptide in case in Table I, application no. 6, in column 6 in the same line as SEQ ID NO. 4040 is depicted, mitochondrial is mentioned; which is operable linked, too.

[43857] In another embodiment thereof the expression cassette does not comprise an additional transit peptide in case in Table I, application no. 6, in column 6 in the same line as SEQ ID NO. 4040 is depicted, non-targeted is mentioned.

[43858] In an embodiment the present invention relates to an expresssion cassette comprising a) a promoter, preferably a promoter selected from the group consisting of Big35S, PCUbi, Super and USP, in particular p-PcUBI; and b) the nucleic acid SEQ ID NO. 24311, or a homolog or fragment thereof, or a homolog thereof being depicted in Table I, application no. 6, column 8, in the same line as SEQ ID NO. 24311, preferably the coding region thereof, a homolog or a fragment thereof; which are operable linked.

[43859] In an embodiment thereof the expression cassette comprises in addition c) a nucleic acid molecule encoding a transit peptide, especially a plastidal transit petide in case in Table I, application no. 6, in column 6 in the same line as SEQ ID NO. 24311 is depicted, plastidic is mentioned, or a mitochondrial transit peptide in case in Table I, application no. 6, in column 6 in the same line as SEQ ID NO. 24311 is depicted, mitochondrial is mentioned; which is operable linked, too.

[43860] In another embodiment thereof the expression cassette does not comprise an additional transit peptide in case in Table I, application no. 6, in column 6 in the same line as SEQ ID NO. 24311 is depicted, non-targeted is mentioned.

[43861] In an embodiment the present invention relates to an expresssion cassette comprising a) a promoter, preferably a promoter selected from the group consisting of Big35S, PCUbi, Super and USP, in particular p-PcUBI; and b) the nucleic acid SEQ ID NO. 4348, or a homolog or fragment thereof, or a homolog thereof being depicted in Table I, application no. 6, column 8, in the same line as SEQ ID NO. 4348, preferably the coding region thereof, a homolog or a fragment thereof; which are operable linked.

[43862] In an embodiment thereof the expression cassette comprises in addition c) a nucleic acid molecule encoding a transit peptide, especially a plastidal transit petide in case in Table I, application no. 6, in column 6 in the same line as SEQ ID NO. 4348 is depicted, plastidic is mentioned, or a mitochondrial transit peptide in case in Table I, application no. 6, in column 6 in the same line as SEQ ID NO. 4348 is depicted, mitochondrial is mentioned; which is operable linked, too.

[43863] In another embodiment thereof the expression cassette does not comprise an additional transit peptide in case in Table I, application no. 6, in column 6 in the same line as SEQ ID NO. 4348 is depicted, non-targeted is mentioned.

[43864] In an embodiment the present invention relates to an expresssion cassette comprising a) a promoter, preferably a promoter selected from the group consisting of Big35S, PCUbi, Super and USP, in particular p-PcUBI; and b) the nucleic acid SEQ ID NO. 68987, or a homolog or fragment thereof, or a homolog thereof being depicted in Table I, application no. 6, column 8, in the same line as SEQ ID NO. 68987, preferably the coding region thereof, a homolog or a fragment thereof; which are operable linked.

[43865] In an embodiment thereof the expression cassette comprises in addition c) a nucleic acid molecule encoding a transit peptide, especially a plastidal transit petide in case in Table I, application no. 6, in column 6 in the same line as SEQ ID NO. 68987 is depicted, plastidic is mentioned, or a mitochondrial transit peptide in case in Table I, application no. 6, in column 6 in the same line as SEQ ID NO. 68987 is depicted, mitochondrial is mentioned; which is operable linked, too.

[43866] In another embodiment thereof the expression cassette does not comprise an additional transit peptide in case in Table I, application no. 6, in column 6 in the same line as SEQ ID NO. 68987 is depicted, non-targeted is mentioned.

[43867] In an embodiment the present invention relates to an expresssion cassette comprising a) a promoter, preferably a promoter selected from the group consisting of Big35S, PCUbi, Super and USP, in particular p-PcUBI; and b) the nucleic acid SEQ ID NO. 25283, or a homolog or fragment thereof, or a homolog thereof being depicted in Table I, application no. 6, column 8, in the same line as SEQ ID NO. 25283, preferably the coding region thereof, a homolog or a fragment thereof; which are operable linked.

[43868] In an embodiment thereof the expression cassette comprises in addition c) a nucleic acid molecule encoding a transit peptide, especially a plastidal transit petide in case in Table I, application no. 6, in column 6 in the same line as SEQ ID NO. 25283 is depicted, plastidic is mentioned, or a mitochondrial transit peptide in case in Table I, application no. 6, in column 6 in the same line as SEQ ID NO. 25283 is depicted, mitochondrial is mentioned; which is operable linked, too.

[43869] In another embodiment thereof the expression cassette does not comprise an additional transit peptide in case in Table I, application no. 6, in column 6 in the same line as SEQ ID NO. 25283 is depicted, non-targeted is mentioned.

[43870] In an embodiment the present invention relates to an expresssion cassette comprising a) a promoter, preferably a promoter selected from the group consisting of Big35S, PCUbi, Super and USP, in particular p-PcUBI; and b) the nucleic acid SEQ ID NO. 4904, or a homolog or fragment thereof, or a homolog thereof being depicted in Table I, application no. 6, column 8, in the same line as SEQ ID NO. 4904, preferably the coding region thereof, a homolog or a fragment thereof; which are operable linked.

[43871] In an embodiment thereof the expression cassette comprises in addition c) a nucleic acid molecule encoding a transit peptide, especially a plastidal transit petide in case in Table I, application no. 6, in column 6 in the same line as SEQ ID NO. 4904 is depicted, plastidic is mentioned, or a mitochondrial transit peptide in case in Table I, application no. 6, in column 6 in the same line as SEQ ID NO. 4904 is depicted, mitochondrial is mentioned; which is operable linked, too.

[43872] In another embodiment thereof the expression cassette does not comprise an additional transit peptide in case in Table I, application no. 6, in column 6 in the same line as SEQ ID NO. 4904 is depicted, non-targeted is mentioned.

[43873] In an embodiment the present invention relates to an expresssion cassette comprising a) a promoter, preferably a promoter selected from the group consisting of Big35S, PCUbi, Super and USP, in particular p-PcUBI; and b) the nucleic acid SEQ ID NO. 69574, or a homolog or fragment thereof, or a homolog thereof being depicted in Table I, application no. 6, column 8, in the same line as SEQ ID NO. 69574, preferably the coding region thereof, a homolog or a fragment thereof; which are operable linked.

[43874] In an embodiment thereof the expression cassette comprises in addition c) a nucleic acid molecule encoding a transit peptide, especially a plastidal transit petide in case in Table I, application no. 6, in column 6 in the same line as SEQ ID NO. 69574 is depicted, plastidic is mentioned, or a mitochondrial transit peptide in case in Table I, application no. 6, in column 6 in the same line as SEQ ID NO. 69574 is depicted, mitochondrial is mentioned; which is operable linked, too.

[43875] In another embodiment thereof the expression cassette does not comprise an additional transit peptide in case in Table I, application no. 6, in column 6 in the same line as SEQ ID NO. 69574 is depicted, non-targeted is mentioned.

[43876] In an embodiment the present invention relates to an expresssion cassette comprising a) a promoter, preferably a promoter selected from the group consisting of Big35S, PCUbi, Super and USP, in particular p-PcUBI; and b) the nucleic acid SEQ ID NO. 102223, or a homolog or fragment thereof, or a homolog thereof being depicted in Table I, application no. 6, column 8, in the same line as SEQ ID NO. 102223, preferably the coding region thereof, a homolog or a fragment thereof; which are operable linked.

[43877] In an embodiment thereof the expression cassette comprises in addition c) a nucleic acid molecule encoding a transit peptide, especially a plastidal transit petide in case in Table I, application no. 6, in column 6 in the same line as SEQ ID NO. 102223 is depicted, plastidic is mentioned, or a mitochondrial transit peptide in case in Table I, application no. 6, in column 6 in the same line as SEQ ID NO. 102223 is depicted, mitochondrial is mentioned; which is operable linked, too.

[43878] In another embodiment thereof the expression cassette does not comprise an additional transit peptide in case in Table I, application no. 6, in column 6 in the same line as SEQ ID NO. 102223 is depicted, non-targeted is mentioned.

[43879] In an embodiment the present invention relates to an expresssion cassette comprising a) a promoter, preferably a promoter selected from the group consisting of Big35S, PCUbi, Super and USP, in particular p-PcUBI; and b) the nucleic acid SEQ ID NO. 102373, or a homolog or fragment thereof, or a homolog thereof being depicted in Table I, application no. 6, column 8, in the same line as SEQ ID NO. 102373, preferably the coding region thereof, a homolog or a fragment thereof; which are operable linked.

[43880] In an embodiment thereof the expression cassette comprises in addition c) a nucleic acid molecule encoding a transit peptide, especially a plastidal transit petide in case in Table I, application no. 6, in column 6 in the same line as SEQ ID NO. 102373 is depicted, plastidic is mentioned, or a mitochondrial transit peptide in case in Table I, application no. 6, in column 6 in the same line as SEQ ID NO. 102373 is depicted, mitochondrial is mentioned; which is operable linked, too.

[43881] In another embodiment thereof the expression cassette does not comprise an additional transit peptide in case in Table I, application no. 6, in column 6 in the same line as SEQ ID NO. 102373 is depicted, non-targeted is mentioned.

[43882] In an embodiment the present invention relates to an expresssion cassette comprising a) a promoter, preferably a promoter selected from the group consisting of Big35S, PCUbi, Super and USP, in particular p-PcUBI; and b) the nucleic acid SEQ ID NO. 70006, or a homolog or fragment thereof, or a homolog thereof being depicted in Table I, application no. 6, column 8, in the same line as SEQ ID NO. 70006, preferably the coding region thereof, a homolog or a fragment thereof; which are operable linked.

[43883] In an embodiment thereof the expression cassette comprises in addition c) a nucleic acid molecule encoding a transit peptide, especially a plastidal transit petide in case in Table I, application no. 6, in column 6 in the same line as SEQ ID NO. 70006 is depicted, plastidic is mentioned, or a mitochondrial transit peptide in case in Table I, application no. 6, in column 6 in the same line as SEQ ID NO. 70006 is depicted, mitochondrial is mentioned; which is operable linked, too.

[43884] In another embodiment thereof the expression cassette does not comprise an additional transit peptide in case in Table I, application no. 6, in column 6 in the same line as SEQ ID NO. 70006 is depicted, non-targeted is mentioned.

[43885] In an embodiment the present invention relates to an expresssion cassette comprising a) a promoter, preferably a promoter selected from the group consisting of Big35S, PCUbi, Super and USP, in particular p-PcUBI; and b) the nucleic acid SEQ ID NO. 102899, or a homolog or fragment thereof, or a homolog thereof being depicted in Table I, application no. 6, column 8, in the same line as SEQ ID NO. 102899, preferably the coding region thereof, a homolog or a fragment thereof; which are operable linked.

[43886] In an embodiment thereof the expression cassette comprises in addition c) a nucleic acid molecule encoding a transit peptide, especially a plastidal transit petide in case in Table I, application no. 6, in column 6 in the same line as SEQ ID NO. 102899 is depicted, plastidic is mentioned, or a mitochondrial transit peptide in case in Table I, application no. 6, in column 6 in the same line as SEQ ID NO. 102899 is depicted, mitochondrial is mentioned; which is operable linked, too.

[43887] In another embodiment thereof the expression cassette does not comprise an additional transit peptide in case in Table I, application no. 6, in column 6 in the same line as SEQ ID NO. 102899 is depicted, non-targeted is mentioned.

[43888] In an embodiment the present invention relates to an expresssion cassette comprising a) a promoter, preferably a promoter selected from the group consisting of Big35S, PCUbi, Super and USP, in particular p-PcUBI; and b) the nucleic acid SEQ ID NO. 70038, or a homolog or fragment thereof, or a homolog thereof being depicted in Table I, application no. 6, column 8, in the same line as SEQ ID NO. 70038, preferably the coding region thereof, a homolog or a fragment thereof; which are operable linked.

[43889] In an embodiment thereof the expression cassette comprises in addition c) a nucleic acid molecule encoding a transit peptide, especially a plastidal transit petide in case in Table I, application no. 6, in column 6 in the same line as SEQ ID NO. 70038 is depicted, plastidic is mentioned, or a mitochondrial transit peptide in case in Table I, application no. 6, in column 6 in the same line as SEQ ID NO. 70038 is depicted, mitochondrial is mentioned; which is operable linked, too.

[43890] In another embodiment thereof the expression cassette does not comprise an additional transit peptide in case in Table I, application no. 6, in column 6 in the same line as SEQ ID NO. 70038 is depicted, non-targeted is mentioned.

[43891] In an embodiment the present invention relates to an expresssion cassette comprising a) a promoter, preferably a promoter selected from the group consisting of Big35S, PCUbi, Super and USP, in particular p-PcUBI; and b) the nucleic acid SEQ ID NO. 5493, or a homolog or fragment thereof, or a homolog thereof being depicted in Table I, application no. 6, column 8, in the same line as SEQ ID NO. 5493, preferably the coding region thereof, a homolog or a fragment thereof; which are operable linked.

[43892] In an embodiment thereof the expression cassette comprises in addition c) a nucleic acid molecule encoding a transit peptide, especially a plastidal transit petide in case in Table I, application no. 6, in column 6 in the same line as SEQ ID NO. 5493 is depicted, plastidic is mentioned, or a mitochondrial transit peptide in case in Table I, application no. 6, in column 6 in the same line as SEQ ID NO. 5493 is depicted, mitochondrial is mentioned; which is operable linked, too.

[43893] In another embodiment thereof the expression cassette does not comprise an additional transit peptide in case in Table I, application no. 6, in column 6 in the same line as SEQ ID NO. 5493 is depicted, non-targeted is mentioned.

[43894] In an embodiment the present invention relates to an expresssion cassette comprising a) a promoter, preferably a promoter selected from the group consisting of Big35S, PCUbi, Super and USP, in particular p-PcUBI; and b) the nucleic acid SEQ ID NO. 5557, or a homolog or fragment thereof, or a homolog thereof being depicted in Table I, application no. 6, column 8, in the same line as SEQ ID NO. 5557, preferably the coding region thereof, a homolog or a fragment thereof; which are operable linked.

[43895] In an embodiment thereof the expression cassette comprises in addition c) a nucleic acid molecule encoding a transit peptide, especially a plastidal transit petide in case in Table I, application no. 6, in column 6 in the same line as SEQ ID NO. 5557 is depicted, plastidic is mentioned, or a mitochondrial transit peptide in case in Table I, application no. 6, in column 6 in the same line as SEQ ID NO. 5557 is depicted, mitochondrial is mentioned; which is operable linked, too.

[43896] In another embodiment thereof the expression cassette does not comprise an additional transit peptide in case in Table I, application no. 6, in column 6 in the same line as SEQ ID NO. 5557 is depicted, non-targeted is mentioned.

[43897] In an embodiment the present invention relates to an expresssion cassette comprising a) a promoter, preferably a promoter selected from the group consisting of Big35S, PCUbi, Super and USP, in particular p-PcUBI; and b) the nucleic acid SEQ ID NO. 26434, or a homolog or fragment thereof, or a homolog thereof being depicted in Table I, application no. 6, column 8, in the same line as SEQ ID NO. 26434, preferably the coding region thereof, a homolog or a fragment thereof; which are operable linked.

[43898] In an embodiment thereof the expression cassette comprises in addition c) a nucleic acid molecule encoding a transit peptide, especially a plastidal transit petide in case in Table I, application no. 6, in column 6 in the same line as SEQ ID NO. 26434 is depicted, plastidic is mentioned, or a mitochondrial transit peptide in case in Table I, application no. 6, in column 6 in the same line as SEQ ID NO. 26434 is depicted, mitochondrial is mentioned; which is operable linked, too.

[43899] In another embodiment thereof the expression cassette does not comprise an additional transit peptide in case in Table I, application no. 6, in column 6 in the same line as SEQ ID NO. 26434 is depicted, non-targeted is mentioned.

[43900] In an embodiment the present invention relates to an expresssion cassette comprising a) a promoter, preferably a promoter selected from the group consisting of Big35S, PCUbi, Super and USP, in particular p-PcUBI; and b) the nucleic acid SEQ ID NO. 6040, or a homolog or fragment thereof, or a homolog thereof being depicted in Table I, application no. 6, column 8, in the same line as SEQ ID NO. 6040, preferably the coding region thereof, a homolog or a fragment thereof; which are operable linked.

[43901] In an embodiment thereof the expression cassette comprises in addition c) a nucleic acid molecule encoding a transit peptide, especially a plastidal transit petide in case in Table I, application no. 6, in column 6 in the same line as SEQ ID NO. 6040 is depicted, plastidic is mentioned, or a mitochondrial transit peptide in case in Table I, application no. 6, in column 6 in the same line as SEQ ID NO. 6040 is depicted, mitochondrial is mentioned; which is operable linked, too.

[43902] In another embodiment thereof the expression cassette does not comprise an additional transit peptide in case in Table I, application no. 6, in column 6 in the same line as SEQ ID NO. 6040 is depicted, non-targeted is mentioned.

[43903] In an embodiment the present invention relates to an expresssion cassette comprising a) a promoter, preferably a promoter selected from the group consisting of Big35S, PCUbi, Super and USP, in particular p-PcUBI; and b) the nucleic acid SEQ ID NO. 27021, or a homolog or fragment thereof, or a homolog thereof being depicted in Table I, application no. 6, column 8, in the same line as SEQ ID NO. 27021, preferably the coding region thereof, a homolog or a fragment thereof; which are operable linked.

[43904] In an embodiment thereof the expression cassette comprises in addition c) a nucleic acid molecule encoding a transit peptide, especially a plastidal transit petide in case in Table I, application no. 6, in column 6 in the same line as SEQ ID NO. 27021 is depicted, plastidic is mentioned, or a mitochondrial transit peptide in case in Table I, application no. 6, in column 6 in the same line as SEQ ID NO. 27021 is depicted, mitochondrial is mentioned; which is operable linked, too.

[43905] In another embodiment thereof the expression cassette does not comprise an additional transit peptide in case in Table I, application no. 6, in column 6 in the same line as SEQ ID NO. 27021 is depicted, non-targeted is mentioned.

[43906] In an embodiment the present invention relates to an expresssion cassette comprising a) a promoter, preferably a promoter selected from the group consisting of Big35S, PCUbi, Super and USP, in particular p-PcUBI; and b) the nucleic acid SEQ ID NO. 71763, or a homolog or fragment thereof, or a homolog thereof being depicted in Table I, application no. 6, column 8, in the same line as SEQ ID NO. 71763, preferably the coding region thereof, a homolog or a fragment thereof; which are operable linked.

[43907] In an embodiment thereof the expression cassette comprises in addition c) a nucleic acid molecule encoding a transit peptide, especially a plastidal transit petide in case in Table I, application no. 6, in column 6 in the same line as SEQ ID NO. 71763 is depicted, plastidic is mentioned, or a mitochondrial transit peptide in case in Table I, application no. 6, in column 6 in the same line as SEQ ID NO. 71763 is depicted, mitochondrial is mentioned; which is operable linked, too.

[43908] In another embodiment thereof the expression cassette does not comprise an additional transit peptide in case in Table I, application no. 6, in column 6 in the same line as SEQ ID NO. 71763 is depicted, non-targeted is mentioned.

[43909] In an embodiment the present invention relates to an expresssion cassette comprising a) a promoter, preferably a promoter selected from the group consisting of Big35S, PCUbi, Super and USP, in particular p-PcUBI; and b) the nucleic acid SEQ ID NO. 27882, or a homolog or fragment thereof, or a homolog thereof being depicted in Table I, application no. 6, column 8, in the same line as SEQ ID NO. 27882, preferably the coding region thereof, a homolog or a fragment thereof; which are operable linked.

[43910] In an embodiment thereof the expression cassette comprises in addition c) a nucleic acid molecule encoding a transit peptide, especially a plastidal transit petide in case in Table I, application no. 6, in column 6 in the same line as SEQ ID NO. 27882 is depicted, plastidic is mentioned, or a mitochondrial transit peptide in case in Table I, application no. 6, in column 6 in the same line as SEQ ID NO. 27882 is depicted, mitochondrial is mentioned; which is operable linked, too.

[43911] In another embodiment thereof the expression cassette does not comprise an additional transit peptide in case in Table I, application no. 6, in column 6 in the same line as SEQ ID NO. 27882 is depicted, non-targeted is mentioned.

[43912] In an embodiment the present invention relates to an expresssion cassette comprising a) a promoter, preferably a promoter selected from the group consisting of Big35S, PCUbi, Super and USP, in particular p-PcUBI; and b) the nucleic acid SEQ ID NO. 28738, or a homolog or fragment thereof, or a homolog thereof being depicted in Table I, application no. 6, column 8, in the same line as SEQ ID NO. 28738, preferably the coding region thereof, a homolog or a fragment thereof; which are operable linked.

[43913] In an embodiment thereof the expression cassette comprises in addition c) a nucleic acid molecule encoding a transit peptide, especially a plastidal transit petide in case in Table I, application no. 6, in column 6 in the same line as SEQ ID NO. 28738 is depicted, plastidic is mentioned, or a mitochondrial transit peptide in case in Table I, application no. 6, in column 6 in the same line as SEQ ID NO. 28738 is depicted, mitochondrial is mentioned; which is operable linked, too.

[43914] In another embodiment thereof the expression cassette does not comprise an additional transit peptide in case in Table I, application no. 6, in column 6 in the same line as SEQ ID NO. 28738 is depicted, non-targeted is mentioned.

[43915] In an embodiment the present invention relates to an expresssion cassette comprising a) a promoter, preferably a promoter selected from the group consisting of Big35S, PCUbi, Super and USP, in particular p-PcUBI; and b) the nucleic acid SEQ ID NO. 29286, or a homolog or fragment thereof, or a homolog thereof being depicted in Table I, application no. 6, column 8, in the same line as SEQ ID NO. 29286, preferably the coding region thereof, a homolog or a fragment thereof; which are operable linked.

[43916] In an embodiment thereof the expression cassette comprises in addition c) a nucleic acid molecule encoding a transit peptide, especially a plastidal transit petide in case in Table I, application no. 6, in column 6 in the same line as SEQ ID NO. 29286 is depicted, plastidic is mentioned, or a mitochondrial transit peptide in case in Table I, application no. 6, in column 6 in the same line as SEQ ID NO. 29286 is depicted, mitochondrial is mentioned; which is operable linked, too.

[43917] In another embodiment thereof the expression cassette does not comprise an additional transit peptide in case in Table I, application no. 6, in column 6 in the same line as SEQ ID NO. 29286 is depicted, non-targeted is mentioned.

[43918] In an embodiment the present invention relates to an expresssion cassette comprising a) a promoter, preferably a promoter selected from the group consisting of Big35S, PCUbi, Super and USP, in particular p-PcUBI; and b) the nucleic acid SEQ ID NO. 29397, or a homolog or fragment thereof, or a homolog thereof being depicted in Table I, application no. 6, column 8, in the same line as SEQ ID NO. 29397, preferably the coding region thereof, a homolog or a fragment thereof; which are operable linked.

[43919] In an embodiment thereof the expression cassette comprises in addition c) a nucleic acid molecule encoding a transit peptide, especially a plastidal transit petide in case in Table I, application no. 6, in column 6 in the same line as SEQ ID NO. 29397 is depicted, plastidic is mentioned, or a mitochondrial transit peptide in case in Table I, application no. 6, in column 6 in the same line as SEQ ID NO. 29397 is depicted, mitochondrial is mentioned; which is operable linked, too.

[43920] In another embodiment thereof the expression cassette does not comprise an additional transit peptide in case in Table I, application no. 6, in column 6 in the same line as SEQ ID NO. 29397 is depicted, non-targeted is mentioned.

[43921] In an embodiment the present invention relates to an expresssion cassette comprising a) a promoter, preferably a promoter selected from the group consisting of Big35S, PCUbi, Super and USP, in particular p-PcUBI; and b) the nucleic acid SEQ ID NO. 29500, or a homolog or fragment thereof, or a homolog thereof being depicted in Table I, application no. 6, column 8, in the same line as SEQ ID NO. 29500, preferably the coding region thereof, a homolog or a fragment thereof; which are operable linked.

[43922] In an embodiment thereof the expression cassette comprises in addition c) a nucleic acid molecule encoding a transit peptide, especially a plastidal transit petide in case in Table I, application no. 6, in column 6 in the same line as SEQ ID NO. 29500 is depicted, plastidic is mentioned, or a mitochondrial transit peptide in case in Table I, application no. 6, in column 6 in the same line as SEQ ID NO. 29500 is depicted, mitochondrial is mentioned; which is operable linked, too.

[43923] In another embodiment thereof the expression cassette does not comprise an additional transit peptide in case in Table I, application no. 6, in column 6 in the same line as SEQ ID NO. 29500 is depicted, non-targeted is mentioned.

[43924] In an embodiment the present invention relates to an expresssion cassette comprising a) a promoter, preferably a promoter selected from the group consisting of Big35S, PCUbi, Super and USP, in particular p-PcUBI; and b) the nucleic acid SEQ ID NO. 72520, or a homolog or fragment thereof, or a homolog thereof being depicted in Table I, application no. 6, column 8, in the same line as SEQ ID NO. 72520, preferably the coding region thereof, a homolog or a fragment thereof; which are operable linked.

[43925] In an embodiment thereof the expression cassette comprises in addition c) a nucleic acid molecule encoding a transit peptide, especially a plastidal transit petide in case in Table I, application no. 6, in column 6 in the same line as SEQ ID NO. 72520 is depicted, plastidic is mentioned, or a mitochondrial transit peptide in case in Table I, application no. 6, in column 6 in the same line as SEQ ID NO. 72520 is depicted, mitochondrial is mentioned; which is operable linked, too.

[43926] In another embodiment thereof the expression cassette does not comprise an additional transit peptide in case in Table I, application no. 6, in column 6 in the same line as SEQ ID NO. 72520 is depicted, non-targeted is mentioned.

[43927] In an embodiment the present invention relates to an expresssion cassette comprising a) a promoter, preferably a promoter selected from the group consisting of Big35S, PCUbi, Super and USP, in particular p-PcUBI; and b) the nucleic acid SEQ ID NO. 31717, or a homolog or fragment thereof, or a homolog thereof being depicted in Table I, application no. 6, column 8, in the same line as SEQ ID NO. 31717, preferably the coding region thereof, a homolog or a fragment thereof; which are operable linked.

[43928] In an embodiment thereof the expression cassette comprises in addition c) a nucleic acid molecule encoding a transit peptide, especially a plastidal transit petide in case in Table I, application no. 6, in column 6 in the same line as SEQ ID NO. 31717 is depicted, plastidic is mentioned, or a mitochondrial transit peptide in case in Table I, application no. 6, in column 6 in the same line as SEQ ID NO. 31717 is depicted, mitochondrial is mentioned; which is operable linked, too.

[43929] In another embodiment thereof the expression cassette does not comprise an additional transit peptide in case in Table I, application no. 6, in column 6 in the same line as SEQ ID NO. 31717 is depicted, non-targeted is mentioned.

[43930] In an embodiment the present invention relates to an expresssion cassette comprising a) a promoter, preferably a promoter selected from the group consisting of Big35S, PCUbi, Super and USP, in particular p-PcUBI; and b) the nucleic acid SEQ ID NO. 31926, or a homolog or fragment thereof, or a homolog thereof being depicted in Table I, application no. 6, column 8, in the same line as SEQ ID NO. 31926, preferably the coding region thereof, a homolog or a fragment thereof; which are operable linked.

[43931] In an embodiment thereof the expression cassette comprises in addition c) a nucleic acid molecule encoding a transit peptide, especially a plastidal transit petide in case in Table I, application no. 6, in column 6 in the same line as SEQ ID NO. 31926 is depicted, plastidic is mentioned, or a mitochondrial transit peptide in case in Table I, application no. 6, in column 6 in the same line as SEQ ID NO. 31926 is depicted, mitochondrial is mentioned; which is operable linked, too.

[43932] In another embodiment thereof the expression cassette does not comprise an additional transit peptide in case in Table I, application no. 6, in column 6 in the same line as SEQ ID NO. 31926 is depicted, non-targeted is mentioned.

[43933] In an embodiment the present invention relates to an expresssion cassette comprising a) a promoter, preferably a promoter selected from the group consisting of Big35S, PCUbi, Super and USP, in particular p-PcUBI; and b) the nucleic acid SEQ ID NO. 73719, or a homolog or fragment thereof, or a homolog thereof being depicted in Table I, application no. 6, column 8, in the same line as SEQ ID NO. 73719, preferably the coding region thereof, a homolog or a fragment thereof; which are operable linked.

[43934] In an embodiment thereof the expression cassette comprises in addition c) a nucleic acid molecule encoding a transit peptide, especially a plastidal transit petide in case in Table I, application no. 6, in column 6 in the same line as SEQ ID NO. 73719 is depicted, plastidic is mentioned, or a mitochondrial transit peptide in case in Table I, application no. 6, in column 6 in the same line as SEQ ID NO. 73719 is depicted, mitochondrial is mentioned; which is operable linked, too.

[43935] In another embodiment thereof the expression cassette does not comprise an additional transit peptide in case in Table I, application no. 6, in column 6 in the same line as SEQ ID NO. 73719 is depicted, non-targeted is mentioned.

[43936] In an embodiment the present invention relates to an expresssion cassette comprising a) a promoter, preferably a promoter selected from the group consisting of Big35S, PCUbi, Super and USP, in particular p-PcUBI; and b) the nucleic acid SEQ ID NO. 74163, or a homolog or fragment thereof, or a homolog thereof being depicted in Table I, application no. 6, column 8, in the same line as SEQ ID NO. 74163, preferably the coding region thereof, a homolog or a fragment thereof; which are operable linked.

[43937] In an embodiment thereof the expression cassette comprises in addition c) a nucleic acid molecule encoding a transit peptide, especially a plastidal transit petide in case in Table I, application no. 6, in column 6 in the same line as SEQ ID NO. 74163 is depicted, plastidic is mentioned, or a mitochondrial transit peptide in case in Table I, application no. 6, in column 6 in the same line as SEQ ID NO. 74163 is depicted, mitochondrial is mentioned; which is operable linked, too.

[43938] In another embodiment thereof the expression cassette does not comprise an additional transit peptide in case in Table I, application no. 6, in column 6 in the same line as SEQ ID NO. 74163 is depicted, non-targeted is mentioned.

[43939] In an embodiment the present invention relates to an expresssion cassette comprising a) a promoter, preferably a promoter selected from the group consisting of Big35S, PCUbi, Super and USP, in particular p-PcUBI; and b) the nucleic acid SEQ ID NO. 102941, or a homolog or fragment thereof, or a homolog thereof being depicted in Table I, application no. 6, column 8, in the same line as SEQ ID NO. 102941, preferably the coding region thereof, a homolog or a fragment thereof; which are operable linked.

[43940] In an embodiment thereof the expression cassette comprises in addition c) a nucleic acid molecule encoding a transit peptide, especially a plastidal transit petide in case in Table I, application no. 6, in column 6 in the same line as SEQ ID NO. 102941 is depicted, plastidic is mentioned, or a mitochondrial transit peptide in case in Table I, application no. 6, in column 6 in the same line as SEQ ID NO. 102941 is depicted, mitochondrial is mentioned; which is operable linked, too.

[43941] In another embodiment thereof the expression cassette does not comprise an additional transit peptide in case in Table I, application no. 6, in column 6 in the same line as SEQ ID NO. 102941 is depicted, non-targeted is mentioned.

[43942] In an embodiment the present invention relates to an expresssion cassette comprising a) a promoter, preferably a promoter selected from the group consisting of Big35S, PCUbi, Super and USP, in particular p-PcUBI; and b) the nucleic acid SEQ ID NO. 6510, or a homolog or fragment thereof, or a homolog thereof being depicted in Table I, application no. 6, column 8, in the same line as SEQ ID NO. 6510, preferably the coding region thereof, a homolog or a fragment thereof; which are operable linked.

[43943] In an embodiment thereof the expression cassette comprises in addition c) a nucleic acid molecule encoding a transit peptide, especially a plastidal transit petide in case in Table I, application no. 6, in column 6 in the same line as SEQ ID NO. 6510 is depicted, plastidic is mentioned, or a mitochondrial transit peptide in case in Table I, application no. 6, in column 6 in the same line as SEQ ID NO. 6510 is depicted, mitochondrial is mentioned; which is operable linked, too.

[43944] In another embodiment thereof the expression cassette does not comprise an additional transit peptide in case in Table I, application no. 6, in column 6 in the same line as SEQ ID NO. 6510 is depicted, non-targeted is mentioned.

[43945] In an embodiment the present invention relates to an expresssion cassette comprising a) a promoter, preferably a promoter selected from the group consisting of Big35S, PCUbi, Super and USP, in particular p-PcUBI; and b) the nucleic acid SEQ ID NO. 32308, or a homolog or fragment thereof, or a homolog thereof being depicted in Table I, application no. 6, column 8, in the same line as SEQ ID NO. 32308, preferably the coding region thereof, a homolog or a fragment thereof; which are operable linked.

[43946] In an embodiment thereof the expression cassette comprises in addition c) a nucleic acid molecule encoding a transit peptide, especially a plastidal transit petide in case in Table I, application no. 6, in column 6 in the same line as SEQ ID NO. 32308 is depicted, plastidic is mentioned, or a mitochondrial transit peptide in case in Table I, application no. 6, in column 6 in the same line as SEQ ID NO. 32308 is depicted, mitochondrial is mentioned; which is operable linked, too.

[43947] In another embodiment thereof the expression cassette does not comprise an additional transit peptide in case in Table I, application no. 6, in column 6 in the same line as SEQ ID NO. 32308 is depicted, non-targeted is mentioned.

[43948] In an embodiment the present invention relates to an expresssion cassette comprising a) a promoter, preferably a promoter selected from the group consisting of Big35S, PCUbi, Super and USP, in particular p-PcUBI; and b) the nucleic acid SEQ ID NO. 74662, or a homolog or fragment thereof, or a homolog thereof being depicted in Table I, application no. 6, column 8, in the same line as SEQ ID NO. 74662, preferably the coding region thereof, a homolog or a fragment thereof; which are operable linked.

[43949] In an embodiment thereof the expression cassette comprises in addition c) a nucleic acid molecule encoding a transit peptide, especially a plastidal transit petide in case in Table I, application no. 6, in column 6 in the same line as SEQ ID NO. 74662 is depicted, plastidic is mentioned, or a mitochondrial transit peptide in case in Table I, application no. 6, in column 6 in the same line as SEQ ID NO. 74662 is depicted, mitochondrial is mentioned; which is operable linked, too.

[43950] In another embodiment thereof the expression cassette does not comprise an additional transit peptide in case in Table I, application no. 6, in column 6 in the same line as SEQ ID NO. 74662 is depicted, non-targeted is mentioned.

[43951] In an embodiment the present invention relates to an expresssion cassette comprising a) a promoter, preferably a promoter selected from the group consisting of Big35S, PCUbi, Super and USP, in particular p-PcUBI; and b) the nucleic acid SEQ ID NO. 33596, or a homolog or fragment thereof, or a homolog thereof being depicted in Table I, application no. 6, column 8, in the same line as SEQ ID NO. 33596, preferably the coding region thereof, a homolog or a fragment thereof; which are operable linked.

[43952] In an embodiment thereof the expression cassette comprises in addition c) a nucleic acid molecule encoding a transit peptide, especially a plastidal transit petide in case in Table I, application no. 6, in column 6 in the same line as SEQ ID NO. 33596 is depicted, plastidic is mentioned, or a mitochondrial transit peptide in case in Table I, application no. 6, in column 6 in the same line as SEQ ID NO. 33596 is depicted, mitochondrial is mentioned; which is operable linked, too.

[43953] In another embodiment thereof the expression cassette does not comprise an additional transit peptide in case in Table I, application no. 6, in column 6 in the same line as SEQ ID NO. 33596 is depicted, non-targeted is mentioned.

[43954] In an embodiment the present invention relates to an expresssion cassette comprising a) a promoter, preferably a promoter selected from the group consisting of Big35S, PCUbi, Super and USP, in particular p-PcUBI; and b) the nucleic acid SEQ ID NO. 34044, or a homolog or fragment thereof, or a homolog thereof being depicted in Table I, application no. 6, column 8, in the same line as SEQ ID NO. 34044, preferably the coding region thereof, a homolog or a fragment thereof; which are operable linked.

[43955] In an embodiment thereof the expression cassette comprises in addition c) a nucleic acid molecule encoding a transit peptide, especially a plastidal transit petide in case in Table I, application no. 6, in column 6 in the same line as SEQ ID NO. 34044 is depicted, plastidic is mentioned, or a mitochondrial transit peptide in case in Table I, application no. 6, in column 6 in the same line as SEQ ID NO. 34044 is depicted, mitochondrial is mentioned; which is operable linked, too.

[43956] In another embodiment thereof the expression cassette does not comprise an additional transit peptide in case in Table I, application no. 6, in column 6 in the same line as SEQ ID NO. 34044 is depicted, non-targeted is mentioned.

[43957] In an embodiment the present invention relates to an expresssion cassette comprising a) a promoter, preferably a promoter selected from the group consisting of Big35S, PCUbi, Super and USP, in particular p-PcUBI; and b) the nucleic acid SEQ ID NO. 103433, or a homolog or fragment thereof, or a homolog thereof being depicted in Table I, application no. 6, column 8, in the same line as SEQ ID NO. 103433, preferably the coding region thereof, a homolog or a fragment thereof; which are operable linked.

[43958] In an embodiment thereof the expression cassette comprises in addition c) a nucleic acid molecule encoding a transit peptide, especially a plastidal transit petide in case in Table I, application no. 6, in column 6 in the same line as SEQ ID NO. 103433 is depicted, plastidic is mentioned, or a mitochondrial transit peptide in case in Table I, application no. 6, in column 6 in the same line as SEQ ID NO. 103433 is depicted, mitochondrial is mentioned; which is operable linked, too.

[43959] In another embodiment thereof the expression cassette does not comprise an additional transit peptide in case in Table I, application no. 6, in column 6 in the same line as SEQ ID NO. 103433 is depicted, non-targeted is mentioned.

[43960] In an embodiment the present invention relates to an expresssion cassette comprising a) a promoter, preferably a promoter selected from the group consisting of Big35S, PCUbi, Super and USP, in particular p-Super; and b) the nucleic acid SEQ ID NO. 34889, or a homolog or fragment thereof, or a homolog thereof being depicted in Table I, application no. 6, column 8, in the same line as SEQ ID NO. 34889, preferably the coding region thereof, a homolog or a fragment thereof; which are operable linked.

[43961] In an embodiment thereof the expression cassette comprises in addition c) a nucleic acid molecule encoding a transit peptide, especially a plastidal transit petide in case in Table I, application no. 6, in column 6 in the same line as SEQ ID NO. 34889 is depicted, plastidic is mentioned, or a mitochondrial transit peptide in case in Table I, application no. 6, in column 6 in the same line as SEQ ID NO. 34889 is depicted, mitochondrial is mentioned; which is operable linked, too.

[43962] In another embodiment thereof the expression cassette does not comprise an additional transit peptide in case in Table I, application no. 6, in column 6 in the same line as SEQ ID NO. 34889 is depicted, non-targeted is mentioned.

[43963] In an embodiment the present invention relates to an expresssion cassette comprising a) a promoter, preferably a promoter selected from the group consisting of Big35S, PCUbi, Super and USP, in particular p-Super; and b) the nucleic acid SEQ ID NO. 103958, or a homolog or fragment thereof, or a homolog thereof being depicted in Table I, application no. 6, column 8, in the same line as SEQ ID NO. 103958, preferably the coding region thereof, a homolog or a fragment thereof; which are operable linked.

[43964] In an embodiment thereof the expression cassette comprises in addition c) a nucleic acid molecule encoding a transit peptide, especially a plastidal transit petide in case in Table I, application no. 6, in column 6 in the same line as SEQ ID NO. 103958 is depicted, plastidic is mentioned, or a mitochondrial transit peptide in case in Table I, application no. 6, in column 6 in the same line as SEQ ID NO. 103958 is depicted, mitochondrial is mentioned; which is operable linked, too.

[43965] In another embodiment thereof the expression cassette does not comprise an additional transit peptide in case in Table I, application no. 6, in column 6 in the same line as SEQ ID NO. 103958 is depicted, non-targeted is mentioned.

[43966] In an embodiment the present invention relates to an expresssion cassette comprising a) a promoter, preferably a promoter selected from the group consisting of Big35S, PCUbi, Super and USP, in particular p-USP; and b) the nucleic acid SEQ ID NO. 6818, or a homolog or fragment thereof, or a homolog thereof being depicted in Table I, application no. 6, column 8, in the same line as SEQ ID NO. 6818, preferably the coding region thereof, a homolog or a fragment thereof; which are operable linked.

[43967] In an embodiment thereof the expression cassette comprises in addition c) a nucleic acid molecule encoding a transit peptide, especially a plastidal transit petide in case in Table I, application no. 6, in column 6 in the same line as SEQ ID NO. 6818 is depicted, plastidic is mentioned, or a mitochondrial transit peptide in case in Table I, application no. 6, in column 6 in the same line as SEQ ID NO. 6818 is depicted, mitochondrial is mentioned; which is operable linked, too.

[43968] In another embodiment thereof the expression cassette does not comprise an additional transit peptide in case in Table I, application no. 6, in column 6 in the same line as SEQ ID NO. 6818 is depicted, non-targeted is mentioned.

[43969] In an embodiment the present invention relates to an expresssion cassette comprising a) a promoter, preferably a promoter selected from the group consisting of Big35S, PCUbi, Super and USP, in particular p-USP; and b) the nucleic acid SEQ ID NO. 35733, or a homolog or fragment thereof, or a homolog thereof being depicted in Table I, application no. 6, column 8, in the same line as SEQ ID NO. 35733, preferably the coding region thereof, a homolog or a fragment thereof; which are operable linked.

[43970] In an embodiment thereof the expression cassette comprises in addition c) a nucleic acid molecule encoding a transit peptide, especially a plastidal transit petide in case in Table I, application no. 6, in column 6 in the same line as SEQ ID NO. 35733 is depicted, plastidic is mentioned, or a mitochondrial transit peptide in case in Table I, application no. 6, in column 6 in the same line as SEQ ID NO. 35733 is depicted, mitochondrial is mentioned; which is operable linked, too.

[43971] In another embodiment thereof the expression cassette does not comprise an additional transit peptide in case in Table I, application no. 6, in column 6 in the same line as SEQ ID NO. 35733 is depicted, non-targeted is mentioned.

[43972] In an embodiment the present invention relates to an expresssion cassette comprising a) a promoter, preferably a promoter selected from the group consisting of Big35S, PCUbi, Super and USP, in particular p-USP; and b) the nucleic acid SEQ ID NO. 7269, or a homolog or fragment thereof, or a homolog thereof being depicted in Table I, application no. 6, column 8, in the same line as SEQ ID NO. 7269, preferably the coding region thereof, a homolog or a fragment thereof; which are operable linked.

[43973] In an embodiment thereof the expression cassette comprises in addition c) a nucleic acid molecule encoding a transit peptide, especially a plastidal transit petide in case in Table I, application no. 6, in column 6 in the same line as SEQ ID NO. 7269 is depicted, plastidic is mentioned, or a mitochondrial transit peptide in case in Table I, application no. 6, in column 6 in the same line as SEQ ID NO. 7269 is depicted, mitochondrial is mentioned; which is operable linked, too.

[43974] In another embodiment thereof the expression cassette does not comprise an additional transit peptide in case in Table I, application no. 6, in column 6 in the same line as SEQ ID NO. 7269 is depicted, non-targeted is mentioned.

[43975] In an embodiment the present invention relates to an expresssion cassette comprising a) a promoter, preferably a promoter selected from the group consisting of Big35S, PCUbi, Super and USP, in particular p-Super; and b) the nucleic acid SEQ ID NO. 7333, or a homolog or fragment thereof, or a homolog thereof being depicted in Table I, application no. 6, column 8, in the same line as SEQ ID NO. 7333, preferably the coding region thereof, a homolog or a fragment thereof; which are operable linked.

[43976] In an embodiment thereof the expression cassette comprises in addition c) a nucleic acid molecule encoding a transit peptide, especially a plastidal transit petide in case in Table I, application no. 6, in column 6 in the same line as SEQ ID NO. 7333 is depicted, plastidic is mentioned, or a mitochondrial transit peptide in case in Table I, application no. 6, in column 6 in the same line as SEQ ID NO. 7333 is depicted, mitochondrial is mentioned; which is operable linked, too.

[43977] In another embodiment thereof the expression cassette does not comprise an additional transit peptide in case in Table I, application no. 6, in column 6 in the same line as SEQ ID NO. 7333 is depicted, non-targeted is mentioned.

[43978] In an embodiment the present invention relates to an expresssion cassette comprising a) a promoter, preferably a promoter selected from the group consisting of Big35S, PCUbi, Super and USP, in particular p-Super; and b) the nucleic acid SEQ ID NO. 7686, or a homolog or fragment thereof, or a homolog thereof being depicted in Table I, application no. 6, column 8, in the same line as SEQ ID NO. 7686, preferably the coding region thereof, a homolog or a fragment thereof; which are operable linked.

[43979] In an embodiment thereof the expression cassette comprises in addition c) a nucleic acid molecule encoding a transit peptide, especially a plastidal transit petide in case in Table I, application no. 6, in column 6 in the same line as SEQ ID NO. 7686 is depicted, plastidic is mentioned, or a mitochondrial transit peptide in case in Table I, application no. 6, in column 6 in the same line as SEQ ID NO. 7686 is depicted, mitochondrial is mentioned; which is operable linked, too.

[43980] In another embodiment thereof the expression cassette does not comprise an additional transit peptide in case in Table I, application no. 6, in column 6 in the same line as SEQ ID NO. 7686 is depicted, non-targeted is mentioned.

[43981] In an embodiment the present invention relates to an expresssion cassette comprising a) a promoter, preferably a promoter selected from the group consisting of Big35S, PCUbi, Super and USP, in particular p-Super; and b) the nucleic acid SEQ ID NO. 35967, or a homolog or fragment thereof, or a homolog thereof being depicted in Table I, application no. 6, column 8, in the same line as SEQ ID NO. 35967, preferably the coding region thereof, a homolog or a fragment thereof; which are operable linked.

[43982] In an embodiment thereof the expression cassette comprises in addition c) a nucleic acid molecule encoding a transit peptide, especially a plastidal transit petide in case in Table I, application no. 6, in column 6 in the same line as SEQ ID NO. 35967 is depicted, plastidic is mentioned, or a mitochondrial transit peptide in case in Table I, application no. 6, in column 6 in the same line as SEQ ID NO. 35967 is depicted, mitochondrial is mentioned; which is operable linked, too.

[43983] In another embodiment thereof the expression cassette does not comprise an additional transit peptide in case in Table I, application no. 6, in column 6 in the same line as SEQ ID NO. 35967 is depicted, non-targeted is mentioned.

[43984] In an embodiment the present invention relates to an expresssion cassette comprising a) a promoter, preferably a promoter selected from the group consisting of Big35S, PCUbi, Super and USP, in particular p-Super; and b) the nucleic acid SEQ ID NO. 36114, or a homolog or fragment thereof, or a homolog thereof being depicted in Table I, application no. 6, column 8, in the same line as SEQ ID NO. 36114, preferably the coding region thereof, a homolog or a fragment thereof; which are operable linked.

[43985] In an embodiment thereof the expression cassette comprises in addition c) a nucleic acid molecule encoding a transit peptide, especially a plastidal transit petide in case in Table I, application no. 6, in column 6 in the same line as SEQ ID NO. 36114 is depicted, plastidic is mentioned, or a mitochondrial transit peptide in case in Table I, application no. 6, in column 6 in the same line as SEQ ID NO. 36114 is depicted, mitochondrial is mentioned; which is operable linked, too.

[43986] In another embodiment thereof the expression cassette does not comprise an additional transit peptide in case in Table I, application no. 6, in column 6 in the same line as SEQ ID NO. 36114 is depicted, non-targeted is mentioned.

[43987] In an embodiment the present invention relates to an expresssion cassette comprising a) a promoter, preferably a promoter selected from the group consisting of Big35S, PCUbi, Super and USP, in particular p-Super; and b) the nucleic acid SEQ ID NO. 7917, or a homolog or fragment thereof, or a homolog thereof being depicted in Table I, application no. 6, column 8, in the same line as SEQ ID NO. 7917, preferably the coding region thereof, a homolog or a fragment thereof; which are operable linked.

[43988] In an embodiment thereof the expression cassette comprises in addition c) a nucleic acid molecule encoding a transit peptide, especially a plastidal transit petide in case in Table I, application no. 6, in column 6 in the same line as SEQ ID NO. 7917 is depicted, plastidic is mentioned, or a mitochondrial transit peptide in case in Table I, application no. 6, in column 6 in the same line as SEQ ID NO. 7917 is depicted, mitochondrial is mentioned; which is operable linked, too.

[43989] In another embodiment thereof the expression cassette does not comprise an additional transit peptide in case in Table I, application no. 6, in column 6 in the same line as SEQ ID NO. 7917 is depicted, non-targeted is mentioned.

[43990] In an embodiment the present invention relates to an expresssion cassette comprising a) a promoter, preferably a promoter selected from the group consisting of Big35S, PCUbi, Super and USP, in particular p-USP; and b) the nucleic acid SEQ ID NO. 36623, or a homolog or fragment thereof, or a homolog thereof being depicted in Table I, application no. 6, column 8, in the same line as SEQ ID NO. 36623, preferably the coding region thereof, a homolog or a fragment thereof; which are operable linked.

[43991] In an embodiment thereof the expression cassette comprises in addition c) a nucleic acid molecule encoding a transit peptide, especially a plastidal transit petide in case in Table I, application no. 6, in column 6 in the same line as SEQ ID NO. 36623 is depicted, plastidic is mentioned, or a mitochondrial transit peptide in case in Table I, application no. 6, in column 6 in the same line as SEQ ID NO. 36623 is depicted, mitochondrial is mentioned; which is operable linked, too.

[43992] In another embodiment thereof the expression cassette does not comprise an additional transit peptide in case in Table I, application no. 6, in column 6 in the same line as SEQ ID NO. 36623 is depicted, non-targeted is mentioned.

[43993] In an embodiment the present invention relates to an expresssion cassette comprising a) a promoter, preferably a promoter selected from the group consisting of Big35S, PCUbi, Super and USP, in particular p-Super; and b) the nucleic acid SEQ ID NO. 36670, or a homolog or fragment thereof, or a homolog thereof being depicted in Table I, application no. 6, column 8, in the same line as SEQ ID NO. 36670, preferably the coding region thereof, a homolog or a fragment thereof; which are operable linked.

[43994] In an embodiment thereof the expression cassette comprises in addition c) a nucleic acid molecule encoding a transit peptide, especially a plastidal transit petide in case in Table I, application no. 6, in column 6 in the same line as SEQ ID NO. 36670 is depicted, plastidic is mentioned, or a mitochondrial transit peptide in case in Table I, application no. 6, in column 6 in the same line as SEQ ID NO. 36670 is depicted, mitochondrial is mentioned; which is operable linked, too.

[43995] In another embodiment thereof the expression cassette does not comprise an additional transit peptide in case in Table I, application no. 6, in column 6 in the same line as SEQ ID NO. 36670 is depicted, non-targeted is mentioned.

[43996] In an embodiment the present invention relates to an expresssion cassette comprising a) a promoter, preferably a promoter selected from the group consisting of Big35S, PCUbi, Super and USP, in particular p-USP; and b) the nucleic acid SEQ ID NO. 36809, or a homolog or fragment thereof, or a homolog thereof being depicted in Table I, application no. 6, column 8, in the same line as SEQ ID NO. 36809, preferably the coding region thereof, a homolog or a fragment thereof; which are operable linked.

[43997] In an embodiment thereof the expression cassette comprises in addition c) a nucleic acid molecule encoding a transit peptide, especially a plastidal transit petide in case in Table I, application no. 6, in column 6 in the same line as SEQ ID NO. 36809 is depicted, plastidic is mentioned, or a mitochondrial transit peptide in case in Table I, application no. 6, in column 6 in the same line as SEQ ID NO. 36809 is depicted, mitochondrial is mentioned; which is operable linked, too.

[43998] In another embodiment thereof the expression cassette does not comprise an additional transit peptide in case in Table I, application no. 6, in column 6 in the same line as SEQ ID NO. 36809 is depicted, non-targeted is mentioned.

[43999] In an embodiment the present invention relates to an expresssion cassette comprising a) a promoter, preferably a promoter selected from the group consisting of Big35S, PCUbi, Super and USP, in particular p-Super; and b) the nucleic acid SEQ ID NO. 7941, or a homolog or fragment thereof, or a homolog thereof being depicted in Table I, application no. 6, column 8, in the same line as SEQ ID NO. 7941, preferably the coding region thereof, a homolog or a fragment thereof; which are operable linked.

[44000] In an embodiment thereof the expression cassette comprises in addition c) a nucleic acid molecule encoding a transit peptide, especially a plastidal transit petide in case in Table I, application no. 6, in column 6 in the same line as SEQ ID NO. 7941 is depicted, plastidic is mentioned, or a mitochondrial transit peptide in case in Table I, application no. 6, in column 6 in the same line as SEQ ID NO. 7941 is depicted, mitochondrial is mentioned; which is operable linked, too.

[44001] In another embodiment thereof the expression cassette does not comprise an additional transit peptide in case in Table I, application no. 6, in column 6 in the same line as SEQ ID NO. 7941 is depicted, non-targeted is mentioned.

[44002] In an embodiment the present invention relates to an expresssion cassette comprising a) a promoter, preferably a promoter selected from the group consisting of Big35S, PCUbi, Super and USP, in particular p-Super; and b) the nucleic acid SEQ ID NO. 37394, or a homolog or fragment thereof, or a homolog thereof being depicted in Table I, application no. 6, column 8, in the same line as SEQ ID NO. 37394, preferably the coding region thereof, a homolog or a fragment thereof; which are operable linked.

[44003] In an embodiment thereof the expression cassette comprises in addition c) a nucleic acid molecule encoding a transit peptide, especially a plastidal transit petide in case in Table I, application no. 6, in column 6 in the same line as SEQ ID NO. 37394 is depicted, plastidic is mentioned, or a mitochondrial transit peptide in case in Table I, application no. 6, in column 6 in the same line as SEQ ID NO. 37394 is depicted, mitochondrial is mentioned; which is operable linked, too.

[44004] In another embodiment thereof the expression cassette does not comprise an additional transit peptide in case in Table I, application no. 6, in column 6 in the same line as SEQ ID NO. 37394 is depicted, non-targeted is mentioned.

[44005] In an embodiment the present invention relates to an expresssion cassette comprising a) a promoter, preferably a promoter selected from the group consisting of Big35S, PCUbi, Super and USP, in particular p-Super; and b) the nucleic acid SEQ ID NO. 104134, or a homolog or fragment thereof, or a homolog thereof being depicted in Table I, application no. 6, column 8, in the same line as SEQ ID NO. 104134, preferably the coding region thereof, a homolog or a fragment thereof; which are operable linked.

[44006] In an embodiment thereof the expression cassette comprises in addition c) a nucleic acid molecule encoding a transit peptide, especially a plastidal transit petide in case in Table I, application no. 6, in column 6 in the same line as SEQ ID NO. 104134 is depicted, plastidic is mentioned, or a mitochondrial transit peptide in case in Table I, application no. 6, in column 6 in the same line as SEQ ID NO. 104134 is depicted, mitochondrial is mentioned; which is operable linked, too.

[44007] In another embodiment thereof the expression cassette does not comprise an additional transit peptide in case in Table I, application no. 6, in column 6 in the same line as SEQ ID NO. 104134 is depicted, non-targeted is mentioned.

[44008] In an embodiment the present invention relates to an expresssion cassette comprising a) a promoter, preferably a promoter selected from the group consisting of Big35S, PCUbi, Super and USP, in particular p-Super; and b) the nucleic acid SEQ ID NO. 37483, or a homolog or fragment thereof, or a homolog thereof being depicted in Table I, application no. 6, column 8, in the same line as SEQ ID NO. 37483, preferably the coding region thereof, a homolog or a fragment thereof; which are operable linked.

[44009] In an embodiment thereof the expression cassette comprises in addition c) a nucleic acid molecule encoding a transit peptide, especially a plastidal transit petide in case in Table I, application no. 6, in column 6 in the same line as SEQ ID NO. 37483 is depicted, plastidic is mentioned, or a mitochondrial transit peptide in case in Table I, application no. 6, in column 6 in the same line as SEQ ID NO. 37483 is depicted, mitochondrial is mentioned; which is operable linked, too.

[44010] In another embodiment thereof the expression cassette does not comprise an additional transit peptide in case in Table I, application no. 6, in column 6 in the same line as SEQ ID NO. 37483 is depicted, non-targeted is mentioned.

[44011] In an embodiment the present invention relates to an expresssion cassette comprising a) a promoter, preferably a promoter selected from the group consisting of Big35S, PCUbi, Super and USP, in particular p-USP; and b) the nucleic acid SEQ ID NO. 37539, or a homolog or fragment thereof, or a homolog thereof being depicted in Table I, application no. 6, column 8, in the same line as SEQ ID NO. 37539, preferably the coding region thereof, a homolog or a fragment thereof; which are operable linked.

[44012] In an embodiment thereof the expression cassette comprises in addition c) a nucleic acid molecule encoding a transit peptide, especially a plastidal transit petide in case in Table I, application no. 6, in column 6 in the same line as SEQ ID NO. 37539 is depicted, plastidic is mentioned, or a mitochondrial transit peptide in case in Table I, application no. 6, in column 6 in the same line as SEQ ID NO. 37539 is depicted, mitochondrial is mentioned; which is operable linked, too.

[44013] In another embodiment thereof the expression cassette does not comprise an additional transit peptide in case in Table I, application no. 6, in column 6 in the same line as SEQ ID NO. 37539 is depicted, non-targeted is mentioned.

[44014] In an embodiment the present invention relates to an expresssion cassette comprising a) a promoter, preferably a promoter selected from the group consisting of Big35S, PCUbi, Super and USP, in particular p-USP; and b) the nucleic acid SEQ ID NO. 37658, or a homolog or fragment thereof, or a homolog thereof being depicted in Table I, application no. 6, column 8, in the same line as SEQ ID NO. 37658, preferably the coding region thereof, a homolog or a fragment thereof; which are operable linked.

[44015] In an embodiment thereof the expression cassette comprises in addition c) a nucleic acid molecule encoding a transit peptide, especially a plastidal transit petide in case in Table I, application no. 6, in column 6 in the same line as SEQ ID NO. 37658 is depicted, plastidic is mentioned, or a mitochondrial transit peptide in case in Table I, application no. 6, in column 6 in the same line as SEQ ID NO. 37658 is depicted, mitochondrial is mentioned; which is operable linked, too.

[44016] In another embodiment thereof the expression cassette does not comprise an additional transit peptide in case in Table I, application no. 6, in column 6 in the same line as SEQ ID NO. 37658 is depicted, non-targeted is mentioned.

[44017] In an embodiment the present invention relates to an expresssion cassette comprising a) a promoter, preferably a promoter selected from the group consisting of Big35S, PCUbi, Super and USP, in particular p-Super; and b) the nucleic acid SEQ ID NO. 37807, or a homolog or fragment thereof, or a homolog thereof being depicted in Table I, application no. 6, column 8, in the same line as SEQ ID NO. 37807, preferably the coding region thereof, a homolog or a fragment thereof; which are operable linked.

[44018] In an embodiment thereof the expression cassette comprises in addition c) a nucleic acid molecule encoding a transit peptide, especially a plastidal transit petide in case in Table I, application no. 6, in column 6 in the same line as SEQ ID NO. 37807 is depicted, plastidic is mentioned, or a mitochondrial transit peptide in case in Table I, application no. 6, in column 6 in the same line as SEQ ID NO. 37807 is depicted, mitochondrial is mentioned; which is operable linked, too.

[44019] In another embodiment thereof the expression cassette does not comprise an additional transit peptide in case in Table I, application no. 6, in column 6 in the same line as SEQ ID NO. 37807 is depicted, non-targeted is mentioned.

[44020] In an embodiment the present invention relates to an expresssion cassette comprising a) a promoter, preferably a promoter selected from the group consisting of Big35S, PCUbi, Super and USP, in particular p-Super; and b) the nucleic acid SEQ ID NO. 38289, or a homolog or fragment thereof, or a homolog thereof being depicted in Table I, application no. 6, column 8, in the same line as SEQ ID NO. 38289, preferably the coding region thereof, a homolog or a fragment thereof; which are operable linked.

[44021] In an embodiment thereof the expression cassette comprises in addition c) a nucleic acid molecule encoding a transit peptide, especially a plastidal transit petide in case in Table I, application no. 6, in column 6 in the same line as SEQ ID NO. 38289 is depicted, plastidic is mentioned, or a mitochondrial transit peptide in case in Table I, application no. 6, in column 6 in the same line as SEQ ID NO. 38289 is depicted, mitochondrial is mentioned; which is operable linked, too.

[44022] In another embodiment thereof the expression cassette does not comprise an additional transit peptide in case in Table I, application no. 6, in column 6 in the same line as SEQ ID NO. 38289 is depicted, non-targeted is mentioned.

[44023] In an embodiment the present invention relates to an expresssion cassette comprising a) a promoter, preferably a promoter selected from the group consisting of Big35S, PCUbi, Super and USP, in particular p-USP; and b) the nucleic acid SEQ ID NO. 77774, or a homolog or fragment thereof, or a homolog thereof being depicted in Table I, application no. 6, column 8, in the same line as SEQ ID NO. 77774, preferably the coding region thereof, a homolog or a fragment thereof; which are operable linked.

[44024] In an embodiment thereof the expression cassette comprises in addition c) a nucleic acid molecule encoding a transit peptide, especially a plastidal transit petide in case in Table I, application no. 6, in column 6 in the same line as SEQ ID NO. 77774 is depicted, plastidic is mentioned, or a mitochondrial transit peptide in case in Table I, application no. 6, in column 6 in the same line as SEQ ID NO. 77774 is depicted, mitochondrial is mentioned; which is operable linked, too.

[44025] In another embodiment thereof the expression cassette does not comprise an additional transit peptide in case in Table I, application no. 6, in column 6 in the same line as SEQ ID NO. 77774 is depicted, non-targeted is mentioned.

[44026] In an embodiment the present invention relates to an expresssion cassette comprising a) a promoter, preferably a promoter selected from the group consisting of Big35S, PCUbi, Super and USP, in particular p-Super; and b) the nucleic acid SEQ ID NO. 7947, or a homolog or fragment thereof, or a homolog thereof being depicted in Table I, application no. 6, column 8, in the same line as SEQ ID NO. 7947, preferably the coding region thereof, a homolog or a fragment thereof; which are operable linked.

[44027] In an embodiment thereof the expression cassette comprises in addition c) a nucleic acid molecule encoding a transit peptide, especially a plastidal transit petide in case in Table I, application no. 6, in column 6 in the same line as SEQ ID NO. 7947 is depicted, plastidic is mentioned, or a mitochondrial transit peptide in case in Table I, application no. 6, in column 6 in the same line as SEQ ID NO. 7947 is depicted, mitochondrial is mentioned; which is operable linked, too.

[44028] In another embodiment thereof the expression cassette does not comprise an additional transit peptide in case in Table I, application no. 6, in column 6 in the same line as SEQ ID NO. 7947 is depicted, non-targeted is mentioned.

[44029] In an embodiment the present invention relates to an expresssion cassette comprising a) a promoter, preferably a promoter selected from the group consisting of Big35S, PCUbi, Super and USP, in particular p-Super; and b) the nucleic acid SEQ ID NO. 38300, or a homolog or fragment thereof, or a homolog thereof being depicted in Table I, application no. 6, column 8, in the same line as SEQ ID NO. 38300, preferably the coding region thereof, a homolog or a fragment thereof; which are operable linked.

[44030] In an embodiment thereof the expression cassette comprises in addition c) a nucleic acid molecule encoding a transit peptide, especially a plastidal transit petide in case in Table I, application no. 6, in column 6 in the same line as SEQ ID NO. 38300 is depicted, plastidic is mentioned, or a mitochondrial transit peptide in case in Table I, application no. 6, in column 6 in the same line as SEQ ID NO. 38300 is depicted, mitochondrial is mentioned; which is operable linked, too.

[44031] In another embodiment thereof the expression cassette does not comprise an additional transit peptide in case in Table I, application no. 6, in column 6 in the same line as SEQ ID NO. 38300 is depicted, non-targeted is mentioned.

[44032] In an embodiment the present invention relates to an expresssion cassette comprising a) a promoter, preferably a promoter selected from the group consisting of Big35S, PCUbi, Super and USP, in particular p-Super; and b) the nucleic acid SEQ ID NO. 7992, or a homolog or fragment thereof, or a homolog thereof being depicted in Table I, application no. 6, column 8, in the same line as SEQ ID NO. 7992, preferably the coding region thereof, a homolog or a fragment thereof; which are operable linked.

[44033] In an embodiment thereof the expression cassette comprises in addition c) a nucleic acid molecule encoding a transit peptide, especially a plastidal transit petide in case in Table I, application no. 6, in column 6 in the same line as SEQ ID NO. 7992 is depicted, plastidic is mentioned, or a mitochondrial transit peptide in case in Table I, application no. 6, in column 6 in the same line as SEQ ID NO. 7992 is depicted, mitochondrial is mentioned; which is operable linked, too.

[44034] In another embodiment thereof the expression cassette does not comprise an additional transit peptide in case in Table I, application no. 6, in column 6 in the same line as SEQ ID NO. 7992 is depicted, non-targeted is mentioned.

[44035] In an embodiment the present invention relates to an expresssion cassette comprising a) a promoter, preferably a promoter selected from the group consisting of Big35S, PCUbi, Super and USP, in particular p-Super; and b) the nucleic acid SEQ ID NO. 78753, or a homolog or fragment thereof, or a homolog thereof being depicted in Table I, application no. 6, column 8, in the same line as SEQ ID NO. 78753, preferably the coding region thereof, a homolog or a fragment thereof; which are operable linked.

[44036] In an embodiment thereof the expression cassette comprises in addition c) a nucleic acid molecule encoding a transit peptide, especially a plastidal transit petide in case in Table I, application no. 6, in column 6 in the same line as SEQ ID NO. 78753 is depicted, plastidic is mentioned, or a mitochondrial transit peptide in case in Table I, application no. 6, in column 6 in the same line as SEQ ID NO. 78753 is depicted, mitochondrial is mentioned; which is operable linked, too.

[44037] In another embodiment thereof the expression cassette does not comprise an additional transit peptide in case in Table I, application no. 6, in column 6 in the same line as SEQ ID NO. 78753 is depicted, non-targeted is mentioned.

[44038] In an embodiment the present invention relates to an expresssion cassette comprising a) a promoter, preferably a promoter selected from the group consisting of Big35S, PCUbi, Super and USP, in particular p-Super; and b) the nucleic acid SEQ ID NO. 78771, or a homolog or fragment thereof, or a homolog thereof being depicted in Table I, application no. 6, column 8, in the same line as SEQ ID NO. 78771, preferably the coding region thereof, a homolog or a fragment thereof; which are operable linked.

[44039] In an embodiment thereof the expression cassette comprises in addition c) a nucleic acid molecule encoding a transit peptide, especially a plastidal transit petide in case in Table I, application no. 6, in column 6 in the same line as SEQ ID NO. 78771 is depicted, plastidic is mentioned, or a mitochondrial transit peptide in case in Table I, application no. 6, in column 6 in the same line as SEQ ID NO. 78771 is depicted, mitochondrial is mentioned; which is operable linked, too.

[44040] In another embodiment thereof the expression cassette does not comprise an additional transit peptide in case in Table I, application no. 6, in column 6 in the same line as SEQ ID NO. 78771 is depicted, non-targeted is mentioned.

[44041] In an embodiment the present invention relates to an expresssion cassette comprising a) a promoter, preferably a promoter selected from the group consisting of Big35S, PCUbi, Super and USP, in particular p-USP; and b) the nucleic acid SEQ ID NO. 8363, or a homolog or fragment thereof, or a homolog thereof being depicted in Table I, application no. 6, column 8, in the same line as SEQ ID NO. 8363, preferably the coding region thereof, a homolog or a fragment thereof; which are operable linked.

[44042] In an embodiment thereof the expression cassette comprises in addition c) a nucleic acid molecule encoding a transit peptide, especially a plastidal transit petide in case in Table I, application no. 6, in column 6 in the same line as SEQ ID NO. 8363 is depicted, plastidic is mentioned, or a mitochondrial transit peptide in case in Table I, application no. 6, in column 6 in the same line as SEQ ID NO. 8363 is depicted, mitochondrial is mentioned; which is operable linked, too.

[44043] In another embodiment thereof the expression cassette does not comprise an additional transit peptide in case in Table I, application no. 6, in column 6 in the same line as SEQ ID NO. 8363 is depicted, non-targeted is mentioned.

[44044] In an embodiment the present invention relates to an expresssion cassette comprising a) a promoter, preferably a promoter selected from the group consisting of Big35S, PCUbi, Super and USP, in particular p-Super; and b) the nucleic acid SEQ ID NO. 78970, or a homolog or fragment thereof, or a homolog thereof being depicted in Table I, application no. 6, column 8, in the same line as SEQ ID NO. 78970, preferably the coding region thereof, a homolog or a fragment thereof; which are operable linked.

[44045] In an embodiment thereof the expression cassette comprises in addition c) a nucleic acid molecule encoding a transit peptide, especially a plastidal transit petide in case in Table I, application no. 6, in column 6 in the same line as SEQ ID NO. 78970 is depicted, plastidic is mentioned, or a mitochondrial transit peptide in case in Table I, application no. 6, in column 6 in the same line as SEQ ID NO. 78970 is depicted, mitochondrial is mentioned; which is operable linked, too.

[44046] In another embodiment thereof the expression cassette does not comprise an additional transit peptide in case in Table I, application no. 6, in column 6 in the same line as SEQ ID NO. 78970 is depicted, non-targeted is mentioned.

[44047] In an embodiment the present invention relates to an expresssion cassette comprising a) a promoter, preferably a promoter selected from the group consisting of Big35S, PCUbi, Super and USP, in particular p-Super; and b) the nucleic acid SEQ ID NO. 79056, or a homolog or fragment thereof, or a homolog thereof being depicted in Table I, application no. 6, column 8, in the same line as SEQ ID NO. 79056, preferably the coding region thereof, a homolog or a fragment thereof; which are operable linked.

[44048] In an embodiment thereof the expression cassette comprises in addition c) a nucleic acid molecule encoding a transit peptide, especially a plastidal transit petide in case in Table I, application no. 6, in column 6 in the same line as SEQ ID NO. 79056 is depicted, plastidic is mentioned, or a mitochondrial transit peptide in case in Table I, application no. 6, in column 6 in the same line as SEQ ID NO. 79056 is depicted, mitochondrial is mentioned; which is operable linked, too.

[44049] In another embodiment thereof the expression cassette does not comprise an additional transit peptide in case in Table I, application no. 6, in column 6 in the same line as SEQ ID NO. 79056 is depicted, non-targeted is mentioned.

[44050] In an embodiment the present invention relates to an expresssion cassette comprising a) a promoter, preferably a promoter selected from the group consisting of Big35S, PCUbi, Super and USP, in particular p-Super; and b) the nucleic acid SEQ ID NO. 79217, or a homolog or fragment thereof, or a homolog thereof being depicted in Table I, application no. 6, column 8, in the same line as SEQ ID NO. 79217, preferably the coding region thereof, a homolog or a fragment thereof; which are operable linked.

[44051] In an embodiment thereof the expression cassette comprises in addition c) a nucleic acid molecule encoding a transit peptide, especially a plastidal transit petide in case in Table I, application no. 6, in column 6 in the same line as SEQ ID NO. 79217 is depicted, plastidic is mentioned, or a mitochondrial transit peptide in case in Table I, application no. 6, in column 6 in the same line as SEQ ID NO. 79217 is depicted, mitochondrial is mentioned; which is operable linked, too.

[44052] In another embodiment thereof the expression cassette does not comprise an additional transit peptide in case in Table I, application no. 6, in column 6 in the same line as SEQ ID NO. 79217 is depicted, non-targeted is mentioned.

[44053] In an embodiment the present invention relates to an expresssion cassette comprising a) a promoter, preferably a promoter selected from the group consisting of Big35S, PCUbi, Super and USP, in particular p-Super; and b) the nucleic acid SEQ ID NO. 104277, or a homolog or fragment thereof, or a homolog thereof being depicted in Table I, application no. 6, column 8, in the same line as SEQ ID NO. 104277, preferably the coding region thereof, a homolog or a fragment thereof; which are operable linked.

[44054] In an embodiment thereof the expression cassette comprises in addition c) a nucleic acid molecule encoding a transit peptide, especially a plastidal transit petide in case in Table I, application no. 6, in column 6 in the same line as SEQ ID NO. 104277 is depicted, plastidic is mentioned, or a mitochondrial transit peptide in case in Table I, application no. 6, in column 6 in the same line as SEQ ID NO. 104277 is depicted, mitochondrial is mentioned; which is operable linked, too.

[44055] In another embodiment thereof the expression cassette does not comprise an additional transit peptide in case in Table I, application no. 6, in column 6 in the same line as SEQ ID NO. 104277 is depicted, non-targeted is mentioned.

[44056] In an embodiment the present invention relates to an expresssion cassette comprising a) a promoter, preferably a promoter selected from the group consisting of Big35S, PCUbi, Super and USP, in particular p-Super; and b) the nucleic acid SEQ ID NO. 38947, or a homolog or fragment thereof, or a homolog thereof being depicted in Table I, application no. 6, column 8, in the same line as SEQ ID NO. 38947, preferably the coding region thereof, a homolog or a fragment thereof; which are operable linked.

[44057] In an embodiment thereof the expression cassette comprises in addition c) a nucleic acid molecule encoding a transit peptide, especially a plastidal transit petide in case in Table I, application no. 6, in column 6 in the same line as SEQ ID NO. 38947 is depicted, plastidic is mentioned, or a mitochondrial transit peptide in case in Table I, application no. 6, in column 6 in the same line as SEQ ID NO. 38947 is depicted, mitochondrial is mentioned; which is operable linked, too.

[44058] In another embodiment thereof the expression cassette does not comprise an additional transit peptide in case in Table I, application no. 6, in column 6 in the same line as SEQ ID NO. 38947 is depicted, non-targeted is mentioned.

[44059] In an embodiment the present invention relates to an expresssion cassette comprising a) a promoter, preferably a promoter selected from the group consisting of Big35S, PCUbi, Super and USP, in particular p-Super; and b) the nucleic acid SEQ ID NO. 104616, or a homolog or fragment thereof, or a homolog thereof being depicted in Table I, application no. 6, column 8, in the same line as SEQ ID NO. 104616, preferably the coding region thereof, a homolog or a fragment thereof; which are operable linked.

[44060] In an embodiment thereof the expression cassette comprises in addition c) a nucleic acid molecule encoding a transit peptide, especially a plastidal transit petide in case in Table I, application no. 6, in column 6 in the same line as SEQ ID NO. 104616 is depicted, plastidic is mentioned, or a mitochondrial transit peptide in case in Table I, application no. 6, in column 6 in the same line as SEQ ID NO. 104616 is depicted, mitochondrial is mentioned; which is operable linked, too.

[44061] In another embodiment thereof the expression cassette does not comprise an additional transit peptide in case in Table I, application no. 6, in column 6 in the same line as SEQ ID NO. 104616 is depicted, non-targeted is mentioned.

[44062] In an embodiment the present invention relates to an expresssion cassette comprising a) a promoter, preferably a promoter selected from the group consisting of Big35S, PCUbi, Super and USP, in particular p-Super; and b) the nucleic acid SEQ ID NO. 39255, or a homolog or fragment thereof, or a homolog thereof being depicted in Table I, application no. 6, column 8, in the same line as SEQ ID NO. 39255, preferably the coding region thereof, a homolog or a fragment thereof; which are operable linked.

[44063] In an embodiment thereof the expression cassette comprises in addition c) a nucleic acid molecule encoding a transit peptide, especially a plastidal transit petide in case in Table I, application no. 6, in column 6 in the same line as SEQ ID NO. 39255 is depicted, plastidic is mentioned, or a mitochondrial transit peptide in case in Table I, application no. 6, in column 6 in the same line as SEQ ID NO. 39255 is depicted, mitochondrial is mentioned; which is operable linked, too.

[44064] In another embodiment thereof the expression cassette does not comprise an additional transit peptide in case in Table I, application no. 6, in column 6 in the same line as SEQ ID NO. 39255 is depicted, non-targeted is mentioned.

[44065] In an embodiment the present invention relates to an expresssion cassette comprising a) a promoter, preferably a promoter selected from the group consisting of Big35S, PCUbi, Super and USP, in particular p-Super; and b) the nucleic acid SEQ ID NO. 9167, or a homolog or fragment thereof, or a homolog thereof being depicted in Table I, application no. 6, column 8, in the same line as SEQ ID NO. 9167, preferably the coding region thereof, a homolog or a fragment thereof; which are operable linked.

[44066] In an embodiment thereof the expression cassette comprises in addition c) a nucleic acid molecule encoding a transit peptide, especially a plastidal transit petide in case in Table I, application no. 6, in column 6 in the same line as SEQ ID NO. 9167 is depicted, plastidic is mentioned, or a mitochondrial transit peptide in case in Table I, application no. 6, in column 6 in the same line as SEQ ID NO. 9167 is depicted, mitochondrial is mentioned; which is operable linked, too.

[44067] In another embodiment thereof the expression cassette does not comprise an additional transit peptide in case in Table I, application no. 6, in column 6 in the same line as SEQ ID NO. 9167 is depicted, non-targeted is mentioned.

[44068] In an embodiment the present invention relates to an expresssion cassette comprising a) a promoter, preferably a promoter selected from the group consisting of Big35S, PCUbi, Super and USP, in particular p-USP; and b) the nucleic acid SEQ ID NO. 79627, or a homolog or fragment thereof, or a homolog thereof being depicted in Table I, application no. 6, column 8, in the same line as SEQ ID NO. 79627, preferably the coding region thereof, a homolog or a fragment thereof; which are operable linked.

[44069] In an embodiment thereof the expression cassette comprises in addition c) a nucleic acid molecule encoding a transit peptide, especially a plastidal transit petide in case in Table I, application no. 6, in column 6 in the same line as SEQ ID NO. 79627 is depicted, plastidic is mentioned, or a mitochondrial transit peptide in case in Table I, application no. 6, in column 6 in the same line as SEQ ID NO. 79627 is depicted, mitochondrial is mentioned; which is operable linked, too.

[44070] In another embodiment thereof the expression cassette does not comprise an additional transit peptide in case in Table I, application no. 6, in column 6 in the same line as SEQ ID NO. 79627 is depicted, non-targeted is mentioned.

[44071] In an embodiment the present invention relates to an expresssion cassette comprising a) a promoter, preferably a promoter selected from the group consisting of Big35S, PCUbi, Super and USP, in particular p-Super; and b) the nucleic acid SEQ ID NO. 40665, or a homolog or fragment thereof, or a homolog thereof being depicted in Table I, application no. 6, column 8, in the same line as SEQ ID NO. 40665, preferably the coding region thereof, a homolog or a fragment thereof; which are operable linked.

[44072] In an embodiment thereof the expression cassette comprises in addition c) a nucleic acid molecule encoding a transit peptide, especially a plastidal transit petide in case in Table I, application no. 6, in column 6 in the same line as SEQ ID NO. 40665 is depicted, plastidic is mentioned, or a mitochondrial transit peptide in case in Table I, application no. 6, in column 6 in the same line as SEQ ID NO. 40665 is depicted, mitochondrial is mentioned; which is operable linked, too.

[44073] In another embodiment thereof the expression cassette does not comprise an additional transit peptide in case in Table I, application no. 6, in column 6 in the same line as SEQ ID NO. 40665 is depicted, non-targeted is mentioned.

[44074] In an embodiment the present invention relates to an expresssion cassette comprising a) a promoter, preferably a promoter selected from the group consisting of Big35S, PCUbi, Super and USP, in particular p-Super; and b) the nucleic acid SEQ ID NO. 40726, or a homolog or fragment thereof, or a homolog thereof being depicted in Table I, application no. 6, column 8, in the same line as SEQ ID NO. 40726, preferably the coding region thereof, a homolog or a fragment thereof; which are operable linked.

[44075] In an embodiment thereof the expression cassette comprises in addition c) a nucleic acid molecule encoding a transit peptide, especially a plastidal transit petide in case in Table I, application no. 6, in column 6 in the same line as SEQ ID NO. 40726 is depicted, plastidic is mentioned, or a mitochondrial transit peptide in case in Table I, application no. 6, in column 6 in the same line as SEQ ID NO. 40726 is depicted, mitochondrial is mentioned; which is operable linked, too.

[44076] In another embodiment thereof the expression cassette does not comprise an additional transit peptide in case in Table I, application no. 6, in column 6 in the same line as SEQ ID NO. 40726 is depicted, non-targeted is mentioned.

[44077] In an embodiment the present invention relates to an expresssion cassette comprising a) a promoter, preferably a promoter selected from the group consisting of Big35S, PCUbi, Super and USP, in particular p-Super; and b) the nucleic acid SEQ ID NO. 9244, or a homolog or fragment thereof, or a homolog thereof being depicted in Table I, application no. 6, column 8, in the same line as SEQ ID NO. 9244, preferably the coding region thereof, a homolog or a fragment thereof; which are operable linked.

[44078] In an embodiment thereof the expression cassette comprises in addition c) a nucleic acid molecule encoding a transit peptide, especially a plastidal transit petide in case in Table I, application no. 6, in column 6 in the same line as SEQ ID NO. 9244 is depicted, plastidic is mentioned, or a mitochondrial transit peptide in case in Table I, application no. 6, in column 6 in the same line as SEQ ID NO. 9244 is depicted, mitochondrial is mentioned; which is operable linked, too.

[44079] In another embodiment thereof the expression cassette does not comprise an additional transit peptide in case in Table I, application no. 6, in column 6 in the same line as SEQ ID NO. 9244 is depicted, non-targeted is mentioned.

[44080] In an embodiment the present invention relates to an expresssion cassette comprising a) a promoter, preferably a promoter selected from the group consisting of Big35S, PCUbi, Super and USP, in particular p-Super; and b) the nucleic acid SEQ ID NO. 80756, or a homolog or fragment thereof, or a homolog thereof being depicted in Table I, application no. 6, column 8, in the same line as SEQ ID NO. 80756, preferably the coding region thereof, a homolog or a fragment thereof; which are operable linked.

[44081] In an embodiment thereof the expression cassette comprises in addition c) a nucleic acid molecule encoding a transit peptide, especially a plastidal transit petide in case in Table I, application no. 6, in column 6 in the same line as SEQ ID NO. 80756 is depicted, plastidic is mentioned, or a mitochondrial transit peptide in case in Table I, application no. 6, in column 6 in the same line as SEQ ID NO. 80756 is depicted, mitochondrial is mentioned; which is operable linked, too.

[44082] In another embodiment thereof the expression cassette does not comprise an additional transit peptide in case in Table I, application no. 6, in column 6 in the same line as SEQ ID NO. 80756 is depicted, non-targeted is mentioned.

[44083] In an embodiment the present invention relates to an expresssion cassette comprising a) a promoter, preferably a promoter selected from the group consisting of Big35S, PCUbi, Super and USP, in particular p-Super; and b) the nucleic acid SEQ ID NO. 40741, or a homolog or fragment thereof, or a homolog thereof being depicted in Table I, application no. 6, column 8, in the same line as SEQ ID NO. 40741, preferably the coding region thereof, a homolog or a fragment thereof; which are operable linked.

[44084] In an embodiment thereof the expression cassette comprises in addition c) a nucleic acid molecule encoding a transit peptide, especially a plastidal transit petide in case in Table I, application no. 6, in column 6 in the same line as SEQ ID NO. 40741 is depicted, plastidic is mentioned, or a mitochondrial transit peptide in case in Table I, application no. 6, in column 6 in the same line as SEQ ID NO. 40741 is depicted, mitochondrial is mentioned; which is operable linked, too.

[44085] In another embodiment thereof the expression cassette does not comprise an additional transit peptide in case in Table I, application no. 6, in column 6 in the same line as SEQ ID NO. 40741 is depicted, non-targeted is mentioned.

[44086] In an embodiment the present invention relates to an expresssion cassette comprising a) a promoter, preferably a promoter selected from the group consisting of Big35S, PCUbi, Super and USP, in particular p-Super; and b) the nucleic acid SEQ ID NO. 80906, or a homolog or fragment thereof, or a homolog thereof being depicted in Table I, application no. 6, column 8, in the same line as SEQ ID NO. 80906, preferably the coding region thereof, a homolog or a fragment thereof; which are operable linked.

[44087] In an embodiment thereof the expression cassette comprises in addition c) a nucleic acid molecule encoding a transit peptide, especially a plastidal transit petide in case in Table I, application no. 6, in column 6 in the same line as SEQ ID NO. 80906 is depicted, plastidic is mentioned, or a mitochondrial transit peptide in case in Table I, application no. 6, in column 6 in the same line as SEQ ID NO. 80906 is depicted, mitochondrial is mentioned; which is operable linked, too.

[44088] In another embodiment thereof the expression cassette does not comprise an additional transit peptide in case in Table I, application no. 6, in column 6 in the same line as SEQ ID NO. 80906 is depicted, non-targeted is mentioned.

[44089] In an embodiment the present invention relates to an expresssion cassette comprising a) a promoter, preferably a promoter selected from the group consisting of Big35S, PCUbi, Super and USP, in particular p-Super; and b) the nucleic acid SEQ ID NO. 40795, or a homolog or fragment thereof, or a homolog thereof being depicted in Table I, application no. 6, column 8, in the same line as SEQ ID NO. 40795, preferably the coding region thereof, a homolog or a fragment thereof; which are operable linked.

[44090] In an embodiment thereof the expression cassette comprises in addition c) a nucleic acid molecule encoding a transit peptide, especially a plastidal transit petide in case in Table I, application no. 6, in column 6 in the same line as SEQ ID NO. 40795 is depicted, plastidic is mentioned, or a mitochondrial transit peptide in case in Table I, application no. 6, in column 6 in the same line as SEQ ID NO. 40795 is depicted, mitochondrial is mentioned; which is operable linked, too.

[44091] In another embodiment thereof the expression cassette does not comprise an additional transit peptide in case in Table I, application no. 6, in column 6 in the same line as SEQ ID NO. 40795 is depicted, non-targeted is mentioned.

[44092] In an embodiment the present invention relates to an expresssion cassette comprising a) a promoter, preferably a promoter selected from the group consisting of Big35S, PCUbi, Super and USP, in particular p-Super; and b) the nucleic acid SEQ ID NO. 81935, or a homolog or fragment thereof, or a homolog thereof being depicted in Table I, application no. 6, column 8, in the same line as SEQ ID NO. 81935, preferably the coding region thereof, a homolog or a fragment thereof; which are operable linked.

[44093] In an embodiment thereof the expression cassette comprises in addition c) a nucleic acid molecule encoding a transit peptide, especially a plastidal transit petide in case in Table I, application no. 6, in column 6 in the same line as SEQ ID NO. 81935 is depicted, plastidic is mentioned, or a mitochondrial transit peptide in case in Table I, application no. 6, in column 6 in the same line as SEQ ID NO. 81935 is depicted, mitochondrial is mentioned; which is operable linked, too.

[44094] In another embodiment thereof the expression cassette does not comprise an additional transit peptide in case in Table I, application no. 6, in column 6 in the same line as SEQ ID NO. 81935 is depicted, non-targeted is mentioned.

[44095] In an embodiment the present invention relates to an expresssion cassette comprising a) a promoter, preferably a promoter selected from the group consisting of Big35S, PCUbi, Super and USP, in particular p-USP; and b) the nucleic acid SEQ ID NO. 41073, or a homolog or fragment thereof, or a homolog thereof being depicted in Table I, application no. 6, column 8, in the same line as SEQ ID NO. 41073, preferably the coding region thereof, a homolog or a fragment thereof; which are operable linked.

[44096] In an embodiment thereof the expression cassette comprises in addition c) a nucleic acid molecule encoding a transit peptide, especially a plastidal transit petide in case in Table I, application no. 6, in column 6 in the same line as SEQ ID NO. 41073 is depicted, plastidic is mentioned, or a mitochondrial transit peptide in case in Table I, application no. 6, in column 6 in the same line as SEQ ID NO. 41073 is depicted, mitochondrial is mentioned; which is operable linked, too.

[44097] In another embodiment thereof the expression cassette does not comprise an additional transit peptide in case in Table I, application no. 6, in column 6 in the same line as SEQ ID NO. 41073 is depicted, non-targeted is mentioned.

[44098] In an embodiment the present invention relates to an expresssion cassette comprising a) a promoter, preferably a promoter selected from the group consisting of Big35S, PCUbi, Super and USP, in particular p-Super; and b) the nucleic acid SEQ ID NO. 9333, or a homolog or fragment thereof, or a homolog thereof being depicted in Table I, application no. 6, column 8, in the same line as SEQ ID NO. 9333, preferably the coding region thereof, a homolog or a fragment thereof; which are operable linked.

[44099] In an embodiment thereof the expression cassette comprises in addition c) a nucleic acid molecule encoding a transit peptide, especially a plastidal transit petide in case in Table I, application no. 6, in column 6 in the same line as SEQ ID NO. 9333 is depicted, plastidic is mentioned, or a mitochondrial transit peptide in case in Table I, application no. 6, in column 6 in the same line as SEQ ID NO. 9333 is depicted, mitochondrial is mentioned; which is operable linked, too.

[44100] In another embodiment thereof the expression cassette does not comprise an additional transit peptide in case in Table I, application no. 6, in column 6 in the same line as SEQ ID NO. 9333 is depicted, non-targeted is mentioned.

[44101] In an embodiment the present invention relates to an expresssion cassette comprising a) a promoter, preferably a promoter selected from the group consisting of Big35S, PCUbi, Super and USP, in particular p-Super; and b) the nucleic acid SEQ ID NO. 42046, or a homolog or fragment thereof, or a homolog thereof being depicted in Table I, application no. 6, column 8, in the same line as SEQ ID NO. 42046, preferably the coding region thereof, a homolog or a fragment thereof; which are operable linked.

[44102] In an embodiment thereof the expression cassette comprises in addition c) a nucleic acid molecule encoding a transit peptide, especially a plastidal transit petide in case in Table I, application no. 6, in column 6 in the same line as SEQ ID NO. 42046 is depicted, plastidic is mentioned, or a mitochondrial transit peptide in case in Table I, application no. 6, in column 6 in the same line as SEQ ID NO. 42046 is depicted, mitochondrial is mentioned; which is operable linked, too.

[44103] In another embodiment thereof the expression cassette does not comprise an additional transit peptide in case in Table I, application no. 6, in column 6 in the same line as SEQ ID NO. 42046 is depicted, non-targeted is mentioned.

[44104] In an embodiment the present invention relates to an expresssion cassette comprising a) a promoter, preferably a promoter selected from the group consisting of Big35S, PCUbi, Super and USP, in particular p-Super; and b) the nucleic acid SEQ ID NO. 82424, or a homolog or fragment thereof, or a homolog thereof being depicted in Table I, application no. 6, column 8, in the same line as SEQ ID NO. 82424, preferably the coding region thereof, a homolog or a fragment thereof; which are operable linked.

[44105] In an embodiment thereof the expression cassette comprises in addition c) a nucleic acid molecule encoding a transit peptide, especially a plastidal transit petide in case in Table I, application no. 6, in column 6 in the same line as SEQ ID NO. 82424 is depicted, plastidic is mentioned, or a mitochondrial transit peptide in case in Table I, application no. 6, in column 6 in the same line as SEQ ID NO. 82424 is depicted, mitochondrial is mentioned; which is operable linked, too.

[44106] In another embodiment thereof the expression cassette does not comprise an additional transit peptide in case in Table I, application no. 6, in column 6 in the same line as SEQ ID NO. 82424 is depicted, non-targeted is mentioned.

[44107] In an embodiment the present invention relates to an expresssion cassette comprising a) a promoter, preferably a promoter selected from the group consisting of Big35S, PCUbi, Super and USP, in particular p-USP; and b) the nucleic acid SEQ ID NO. 104660, or a homolog or fragment thereof, or a homolog thereof being depicted in Table I, application no. 6, column 8, in the same line as SEQ ID NO. 104660, preferably the coding region thereof, a homolog or a fragment thereof; which are operable linked.

[44108] In an embodiment thereof the expression cassette comprises in addition c) a nucleic acid molecule encoding a transit peptide, especially a plastidal transit petide in case in Table I, application no. 6, in column 6 in the same line as SEQ ID NO. 104660 is depicted, plastidic is mentioned, or a mitochondrial transit peptide in case in Table I, application no. 6, in column 6 in the same line as SEQ ID NO. 104660 is depicted, mitochondrial is mentioned; which is operable linked, too.

[44109] In another embodiment thereof the expression cassette does not comprise an additional transit peptide in case in Table I, application no. 6, in column 6 in the same line as SEQ ID NO. 104660 is depicted, non-targeted is mentioned.

[44110] In an embodiment the present invention relates to an expresssion cassette comprising a) a promoter, preferably a promoter selected from the group consisting of Big35S, PCUbi, Super and USP, in particular p-USP; and b) the nucleic acid SEQ ID NO. 104871, or a homolog or fragment thereof, or a homolog thereof being depicted in Table I, application no. 6, column 8, in the same line as SEQ ID NO. 104871, preferably the coding region thereof, a homolog or a fragment thereof; which are operable linked.

[44111] In an embodiment thereof the expression cassette comprises in addition c) a nucleic acid molecule encoding a transit peptide, especially a plastidal transit petide in case in Table I, application no. 6, in column 6 in the same line as SEQ ID NO. 104871 is depicted, plastidic is mentioned, or a mitochondrial transit peptide in case in Table I, application no. 6, in column 6 in the same line as SEQ ID NO. 104871 is depicted, mitochondrial is mentioned; which is operable linked, too.

[44112] In another embodiment thereof the expression cassette does not comprise an additional transit peptide in case in Table I, application no. 6, in column 6 in the same line as SEQ ID NO. 104871 is depicted, non-targeted is mentioned.

[44113] In an embodiment the present invention relates to an expresssion cassette comprising a) a promoter, preferably a promoter selected from the group consisting of Big35S, PCUbi, Super and USP, in particular p-USP; and b) the nucleic acid SEQ ID NO. 9492, or a homolog or fragment thereof, or a homolog thereof being depicted in Table I, application no. 6, column 8, in the same line as SEQ ID NO. 9492, preferably the coding region thereof, a homolog or a fragment thereof; which are operable linked.

[44114] In an embodiment thereof the expression cassette comprises in addition c) a nucleic acid molecule encoding a transit peptide, especially a plastidal transit petide in case in Table I, application no. 6, in column 6 in the same line as SEQ ID NO. 9492 is depicted, plastidic is mentioned, or a mitochondrial transit peptide in case in Table I, application no. 6, in column 6 in the same line as SEQ ID NO. 9492 is depicted, mitochondrial is mentioned; which is operable linked, too.

[44115] In another embodiment thereof the expression cassette does not comprise an additional transit peptide in case in Table I, application no. 6, in column 6 in the same line as SEQ ID NO. 9492 is depicted, non-targeted is mentioned.

[44116] In an embodiment the present invention relates to an expresssion cassette comprising a) a promoter, preferably a promoter selected from the group consisting of Big35S, PCUbi, Super and USP, in particular p-Super; and b) the nucleic acid SEQ ID NO. 82572, or a homolog or fragment thereof, or a homolog thereof being depicted in Table I, application no. 6, column 8, in the same line as SEQ ID NO. 82572, preferably the coding region thereof, a homolog or a fragment thereof; which are operable linked.

[44117] In an embodiment thereof the expression cassette comprises in addition c) a nucleic acid molecule encoding a transit peptide, especially a plastidal transit petide in case in Table I, application no. 6, in column 6 in the same line as SEQ ID NO. 82572 is depicted, plastidic is mentioned, or a mitochondrial transit peptide in case in Table I, application no. 6, in column 6 in the same line as SEQ ID NO. 82572 is depicted, mitochondrial is mentioned; which is operable linked, too.

[44118] In another embodiment thereof the expression cassette does not comprise an additional transit peptide in case in Table I, application no. 6, in column 6 in the same line as SEQ ID NO. 82572 is depicted, non-targeted is mentioned.

[44119] In an embodiment the present invention relates to an expresssion cassette comprising a) a promoter, preferably a promoter selected from the group consisting of Big35S, PCUbi, Super and USP, in particular p-Super; and b) the nucleic acid SEQ ID NO. 94051, or a homolog or fragment thereof, or a homolog thereof being depicted in Table I, application no. 6, column 8, in the same line as SEQ ID NO. 94051, preferably the coding region thereof, a homolog or a fragment thereof; which are operable linked.

[44120] In an embodiment thereof the expression cassette comprises in addition c) a nucleic acid molecule encoding a transit peptide, especially a plastidal transit petide in case in Table I, application no. 6, in column 6 in the same line as SEQ ID NO. 94051 is depicted, plastidic is mentioned, or a mitochondrial transit peptide in case in Table I, application no. 6, in column 6 in the same line as SEQ ID NO. 94051 is depicted, mitochondrial is mentioned; which is operable linked, too.

[44121] In another embodiment thereof the expression cassette does not comprise an additional transit peptide in case in Table I, application no. 6, in column 6 in the same line as SEQ ID NO. 94051 is depicted, non-targeted is mentioned.

[44122] In an embodiment the present invention relates to an expresssion cassette comprising a) a promoter, preferably a promoter selected from the group consisting of Big35S, PCUbi, Super and USP, in particular p-Super; and b) the nucleic acid SEQ ID NO. 105332, or a homolog or fragment thereof, or a homolog thereof being depicted in Table I, application no. 6, column 8, in the same line as SEQ ID NO. 105332, preferably the coding region thereof, a homolog or a fragment thereof; which are operable linked.

[44123] In an embodiment thereof the expression cassette comprises in addition c) a nucleic acid molecule encoding a transit peptide, especially a plastidal transit petide in case in Table I, application no. 6, in column 6 in the same line as SEQ ID NO. 105332 is depicted, plastidic is mentioned, or a mitochondrial transit peptide in case in Table I, application no. 6, in column 6 in the same line as SEQ ID NO. 105332 is depicted, mitochondrial is mentioned; which is operable linked, too.

[44124] In another embodiment thereof the expression cassette does not comprise an additional transit peptide in case in Table I, application no. 6, in column 6 in the same line as SEQ ID NO. 105332 is depicted, non-targeted is mentioned.

[44125] In an embodiment the present invention relates to an expresssion cassette comprising a) a promoter, preferably a promoter selected from the group consisting of Big35S, PCUbi, Super and USP, in particular p-USP; and b) the nucleic acid SEQ ID NO. 10172, or a homolog or fragment thereof, or a homolog thereof being depicted in Table I, application no. 6, column 8, in the same line as SEQ ID NO. 10172, preferably the coding region thereof, a homolog or a fragment thereof; which are operable linked.

[44126] In an embodiment thereof the expression cassette comprises in addition c) a nucleic acid molecule encoding a transit peptide, especially a plastidal transit petide in case in Table I, application no. 6, in column 6 in the same line as SEQ ID NO. 10172 is depicted, plastidic is mentioned, or a mitochondrial transit peptide in case in Table I, application no. 6, in column 6 in the same line as SEQ ID NO. 10172 is depicted, mitochondrial is mentioned; which is operable linked, too.

[44127] In another embodiment thereof the expression cassette does not comprise an additional transit peptide in case in Table I, application no. 6, in column 6 in the same line as SEQ ID NO. 10172 is depicted, non-targeted is mentioned.

[44128] In an embodiment the present invention relates to an expresssion cassette comprising a) a promoter, preferably a promoter selected from the group consisting of Big35S, PCUbi, Super and USP, in particular p-Super; and b) the nucleic acid SEQ ID NO. 42931, or a homolog or fragment thereof, or a homolog thereof being depicted in Table I, application no. 6, column 8, in the same line as SEQ ID NO. 42931, preferably the coding region thereof, a homolog or a fragment thereof; which are operable linked.

[44129] In an embodiment thereof the expression cassette comprises in addition c) a nucleic acid molecule encoding a transit peptide, especially a plastidal transit petide in case in Table I, application no. 6, in column 6 in the same line as SEQ ID NO. 42931 is depicted, plastidic is mentioned, or a mitochondrial transit peptide in case in Table I, application no. 6, in column 6 in the same line as SEQ ID NO. 42931 is depicted, mitochondrial is mentioned; which is operable linked, too.

[44130] In another embodiment thereof the expression cassette does not comprise an additional transit peptide in case in Table I, application no. 6, in column 6 in the same line as SEQ ID NO. 42931 is depicted, non-targeted is mentioned.

[44131] In an embodiment the present invention relates to an expresssion cassette comprising a) a promoter, preferably a promoter selected from the group consisting of Big35S, PCUbi, Super and USP, in particular p-USP; and b) the nucleic acid SEQ ID NO. 83629, or a homolog or fragment thereof, or a homolog thereof being depicted in Table I, application no. 6, column 8, in the same line as SEQ ID NO. 83629, preferably the coding region thereof, a homolog or a fragment thereof; which are operable linked.

[44132] In an embodiment thereof the expression cassette comprises in addition c) a nucleic acid molecule encoding a transit peptide, especially a plastidal transit petide in case in Table I, application no. 6, in column 6 in the same line as SEQ ID NO. 83629 is depicted, plastidic is mentioned, or a mitochondrial transit peptide in case in Table I, application no. 6, in column 6 in the same line as SEQ ID NO. 83629 is depicted, mitochondrial is mentioned; which is operable linked, too.

[44133] In another embodiment thereof the expression cassette does not comprise an additional transit peptide in case in Table I, application no. 6, in column 6 in the same line as SEQ ID NO. 83629 is depicted, non-targeted is mentioned.

[44134] In an embodiment the present invention relates to an expresssion cassette comprising a) a promoter, preferably a promoter selected from the group consisting of Big35S, PCUbi, Super and USP, in particular p-Super; and b) the nucleic acid SEQ ID NO. 105354, or a homolog or fragment thereof, or a homolog thereof being depicted in Table I, application no. 6, column 8, in the same line as SEQ ID NO. 105354, preferably the coding region thereof, a homolog or a fragment thereof; which are operable linked.

[44135] In an embodiment thereof the expression cassette comprises in addition c) a nucleic acid molecule encoding a transit peptide, especially a plastidal transit petide in case in Table I, application no. 6, in column 6 in the same line as SEQ ID NO. 105354 is depicted, plastidic is mentioned, or a mitochondrial transit peptide in case in Table I, application no. 6, in column 6 in the same line as SEQ ID NO. 105354 is depicted, mitochondrial is mentioned; which is operable linked, too.

[44136] In another embodiment thereof the expression cassette does not comprise an additional transit peptide in case in Table I, application no. 6, in column 6 in the same line as SEQ ID NO. 105354 is depicted, non-targeted is mentioned.

[44137] In an embodiment the present invention relates to an expresssion cassette comprising a) a promoter, preferably a promoter selected from the group consisting of Big35S, PCUbi, Super and USP, in particular p-USP; and b) the nucleic acid SEQ ID NO. 10252, or a homolog or fragment thereof, or a homolog thereof being depicted in Table I, application no. 6, column 8, in the same line as SEQ ID NO. 10252, preferably the coding region thereof, a homolog or a fragment thereof; which are operable linked.

[44138] In an embodiment thereof the expression cassette comprises in addition c) a nucleic acid molecule encoding a transit peptide, especially a plastidal transit petide in case in Table I, application no. 6, in column 6 in the same line as SEQ ID NO. 10252 is depicted, plastidic is mentioned, or a mitochondrial transit peptide in case in Table I, application no. 6, in column 6 in the same line as SEQ ID NO. 10252 is depicted, mitochondrial is mentioned; which is operable linked, too.

[44139] In another embodiment thereof the expression cassette does not comprise an additional transit peptide in case in Table I, application no. 6, in column 6 in the same line as SEQ ID NO. 10252 is depicted, non-targeted is mentioned.

[44140] In an embodiment the present invention relates to an expresssion cassette comprising a) a promoter, preferably a promoter selected from the group consisting of Big35S, PCUbi, Super and USP, in particular p-Super; and b) the nucleic acid SEQ ID NO. 94386, or a homolog or fragment thereof, or a homolog thereof being depicted in Table I, application no. 6, column 8, in the same line as SEQ ID NO. 94386, preferably the coding region thereof, a homolog or a fragment thereof; which are operable linked.

[44141] In an embodiment thereof the expression cassette comprises in addition c) a nucleic acid molecule encoding a transit peptide, especially a plastidal transit petide in case in Table I, application no. 6, in column 6 in the same line as SEQ ID NO. 94386 is depicted, plastidic is mentioned, or a mitochondrial transit peptide in case in Table I, application no. 6, in column 6 in the same line as SEQ ID NO. 94386 is depicted, mitochondrial is mentioned; which is operable linked, too.

[44142] In another embodiment thereof the expression cassette does not comprise an additional transit peptide in case in Table I, application no. 6, in column 6 in the same line as SEQ ID NO. 94386 is depicted, non-targeted is mentioned.

[44143] In an embodiment the present invention relates to an expresssion cassette comprising a) a promoter, preferably a promoter selected from the group consisting of Big35S, PCUbi, Super and USP, in particular p-USP; and b) the nucleic acid SEQ ID NO. 94386, or a homolog or fragment thereof, or a homolog thereof being depicted in Table I, application no. 6, column 8, in the same line as SEQ ID NO. 94386, preferably the coding region thereof, a homolog or a fragment thereof; which are operable linked.

[44144] In an embodiment thereof the expression cassette comprises in addition c) a nucleic acid molecule encoding a transit peptide, especially a plastidal transit petide in case in Table I, application no. 6, in column 6 in the same line as SEQ ID NO. 94386 is depicted, plastidic is mentioned, or a mitochondrial transit peptide in case in Table I, application no. 6, in column 6 in the same line as SEQ ID NO. 94386 is depicted, mitochondrial is mentioned; which is operable linked, too.

[44145] In another embodiment thereof the expression cassette does not comprise an additional transit peptide in case in Table I, application no. 6, in column 6 in the same line as SEQ ID NO. 94386 is depicted, non-targeted is mentioned.

[44146] In an embodiment the present invention relates to an expresssion cassette comprising a) a promoter, preferably a promoter selected from the group consisting of Big35S, PCUbi, Super and USP, in particular p-USP; and b) the nucleic acid SEQ ID NO. 43839, or a homolog or fragment thereof, or a homolog thereof being depicted in Table I, application no. 6, column 8, in the same line as SEQ ID NO. 43839, preferably the coding region thereof, a homolog or a fragment thereof; which are operable linked.

[44147] In an embodiment thereof the expression cassette comprises in addition c) a nucleic acid molecule encoding a transit peptide, especially a plastidal transit petide in case in Table I, application no. 6, in column 6 in the same line as SEQ ID NO. 43839 is depicted, plastidic is mentioned, or a mitochondrial transit peptide in case in Table I, application no. 6, in column 6 in the same line as SEQ ID NO. 43839 is depicted, mitochondrial is mentioned; which is operable linked, too.

[44148] In another embodiment thereof the expression cassette does not comprise an additional transit peptide in case in Table I, application no. 6, in column 6 in the same line as SEQ ID NO. 43839 is depicted, non-targeted is mentioned.

[44149] In an embodiment the present invention relates to an expresssion cassette comprising a) a promoter, preferably a promoter selected from the group consisting of Big35S, PCUbi, Super and USP, in particular p-USP; and b) the nucleic acid SEQ ID NO. 105602, or a homolog or fragment thereof, or a homolog thereof being depicted in Table I, application no. 6, column 8, in the same line as SEQ ID NO. 105602, preferably the coding region thereof, a homolog or a fragment thereof; which are operable linked.

[44150] In an embodiment thereof the expression cassette comprises in addition c) a nucleic acid molecule encoding a transit peptide, especially a plastidal transit petide in case in Table I, application no. 6, in column 6 in the same line as SEQ ID NO. 105602 is depicted, plastidic is mentioned, or a mitochondrial transit peptide in case in Table I, application no. 6, in column 6 in the same line as SEQ ID NO. 105602 is depicted, mitochondrial is mentioned; which is operable linked, too.

[44151] In another embodiment thereof the expression cassette does not comprise an additional transit peptide in case in Table I, application no. 6, in column 6 in the same line as SEQ ID NO. 105602 is depicted, non-targeted is mentioned.

[44152] In an embodiment the present invention relates to an expresssion cassette comprising a) a promoter, preferably a promoter selected from the group consisting of Big35S, PCUbi, Super and USP, in particular p-USP; and b) the nucleic acid SEQ ID NO. 105659, or a homolog or fragment thereof, or a homolog thereof being depicted in Table I, application no. 6, column 8, in the same line as SEQ ID NO. 105659, preferably the coding region thereof, a homolog or a fragment thereof; which are operable linked.

[44153] In an embodiment thereof the expression cassette comprises in addition c) a nucleic acid molecule encoding a transit peptide, especially a plastidal transit petide in case in Table I, application no. 6, in column 6 in the same line as SEQ ID NO. 105659 is depicted, plastidic is mentioned, or a mitochondrial transit peptide in case in Table I, application no. 6, in column 6 in the same line as SEQ ID NO. 105659 is depicted, mitochondrial is mentioned; which is operable linked, too.

[44154] In another embodiment thereof the expression cassette does not comprise an additional transit peptide in case in Table I, application no. 6, in column 6 in the same line as SEQ ID NO. 105659 is depicted, non-targeted is mentioned.

[44155] In an embodiment the present invention relates to an expresssion cassette comprising a) a promoter, preferably a promoter selected from the group consisting of Big35S, PCUbi, Super and USP, in particular p-Super; and b) the nucleic acid SEQ ID NO. 44372, or a homolog or fragment thereof, or a homolog thereof being depicted in Table I, application no. 6, column 8, in the same line as SEQ ID NO. 44372, preferably the coding region thereof, a homolog or a fragment thereof; which are operable linked.

[44156] In an embodiment thereof the expression cassette comprises in addition c) a nucleic acid molecule encoding a transit peptide, especially a plastidal transit petide in case in Table I, application no. 6, in column 6 in the same line as SEQ ID NO. 44372 is depicted, plastidic is mentioned, or a mitochondrial transit peptide in case in Table I, application no. 6, in column 6 in the same line as SEQ ID NO. 44372 is depicted, mitochondrial is mentioned; which is operable linked, too.

[44157] In another embodiment thereof the expression cassette does not comprise an additional transit peptide in case in Table I, application no. 6, in column 6 in the same line as SEQ ID NO. 44372 is depicted, non-targeted is mentioned.

[44158] In an embodiment the present invention relates to an expresssion cassette comprising a) a promoter, preferably a promoter selected from the group consisting of Big35S, PCUbi, Super and USP, in particular p-Super; and b) the nucleic acid SEQ ID NO. 10740, or a homolog or fragment thereof, or a homolog thereof being depicted in Table I, application no. 6, column 8, in the same line as SEQ ID NO. 10740, preferably the coding region thereof, a homolog or a fragment thereof; which are operable linked.

[44159] In an embodiment thereof the expression cassette comprises in addition c) a nucleic acid molecule encoding a transit peptide, especially a plastidal transit petide in case in Table I, application no. 6, in column 6 in the same line as SEQ ID NO. 10740 is depicted, plastidic is mentioned, or a mitochondrial transit peptide in case in Table I, application no. 6, in column 6 in the same line as SEQ ID NO. 10740 is depicted, mitochondrial is mentioned; which is operable linked, too.

[44160] In another embodiment thereof the expression cassette does not comprise an additional transit peptide in case in Table I, application no. 6, in column 6 in the same line as SEQ ID NO. 10740 is depicted, non-targeted is mentioned.

[44161] In an embodiment the present invention relates to an expresssion cassette comprising a) a promoter, preferably a promoter selected from the group consisting of Big35S, PCUbi, Super and USP, in particular p-Super; and b) the nucleic acid SEQ ID NO. 106532, or a homolog or fragment thereof, or a homolog thereof being depicted in Table I, application no. 6, column 8, in the same line as SEQ ID NO. 106532, preferably the coding region thereof, a homolog or a fragment thereof; which are operable linked.

[44162] In an embodiment thereof the expression cassette comprises in addition c) a nucleic acid molecule encoding a transit peptide, especially a plastidal transit petide in case in Table I, application no. 6, in column 6 in the same line as SEQ ID NO. 106532 is depicted, plastidic is mentioned, or a mitochondrial transit peptide in case in Table I, application no. 6, in column 6 in the same line as SEQ ID NO. 106532 is depicted, mitochondrial is mentioned; which is operable linked, too.

[44163] In another embodiment thereof the expression cassette does not comprise an additional transit peptide in case in Table I, application no. 6, in column 6 in the same line as SEQ ID NO. 106532 is depicted, non-targeted is mentioned.

[44164] In an embodiment the present invention relates to an expresssion cassette comprising a) a promoter, preferably a promoter selected from the group consisting of Big35S, PCUbi, Super and USP, in particular p-Super; and b) the nucleic acid SEQ ID NO. 94542, or a homolog or fragment thereof, or a homolog thereof being depicted in Table I, application no. 6, column 8, in the same line as SEQ ID NO. 94542, preferably the coding region thereof, a homolog or a fragment thereof; which are operable linked.

[44165] In an embodiment thereof the expression cassette comprises in addition c) a nucleic acid molecule encoding a transit peptide, especially a plastidal transit petide in case in Table I, application no. 6, in column 6 in the same line as SEQ ID NO. 94542 is depicted, plastidic is mentioned, or a mitochondrial transit peptide in case in Table I, application no. 6, in column 6 in the same line as SEQ ID NO. 94542 is depicted, mitochondrial is mentioned; which is operable linked, too.

[44166] In another embodiment thereof the expression cassette does not comprise an additional transit peptide in case in Table I, application no. 6, in column 6 in the same line as SEQ ID NO. 94542 is depicted, non-targeted is mentioned.

[44167] In an embodiment the present invention relates to an expresssion cassette comprising a) a promoter, preferably a promoter selected from the group consisting of Big35S, PCUbi, Super and USP, in particular p-Super; and b) the nucleic acid SEQ ID NO. 45321, or a homolog or fragment thereof, or a homolog thereof being depicted in Table I, application no. 6, column 8, in the same line as SEQ ID NO. 45321, preferably the coding region thereof, a homolog or a fragment thereof; which are operable linked.

[44168] In an embodiment thereof the expression cassette comprises in addition c) a nucleic acid molecule encoding a transit peptide, especially a plastidal transit petide in case in Table I, application no. 6, in column 6 in the same line as SEQ ID NO. 45321 is depicted, plastidic is mentioned, or a mitochondrial transit peptide in case in Table I, application no. 6, in column 6 in the same line as SEQ ID NO. 45321 is depicted, mitochondrial is mentioned; which is operable linked, too.

[44169] In another embodiment thereof the expression cassette does not comprise an additional transit peptide in case in Table I, application no. 6, in column 6 in the same line as SEQ ID NO. 45321 is depicted, non-targeted is mentioned.

[44170] In an embodiment the present invention relates to an expresssion cassette comprising a) a promoter, preferably a promoter selected from the group consisting of Big35S, PCUbi, Super and USP, in particular p-Super; and b) the nucleic acid SEQ ID NO. 106538, or a homolog or fragment thereof, or a homolog thereof being depicted in Table I, application no. 6, column 8, in the same line as SEQ ID NO. 106538, preferably the coding region thereof, a homolog or a fragment thereof; which are operable linked.

[44171] In an embodiment thereof the expression cassette comprises in addition c) a nucleic acid molecule encoding a transit peptide, especially a plastidal transit petide in case in Table I, application no. 6, in column 6 in the same line as SEQ ID NO. 106538 is depicted, plastidic is mentioned, or a mitochondrial transit peptide in case in Table I, application no. 6, in column 6 in the same line as SEQ ID NO. 106538 is depicted, mitochondrial is mentioned; which is operable linked, too.

[44172] In another embodiment thereof the expression cassette does not comprise an additional transit peptide in case in Table I, application no. 6, in column 6 in the same line as SEQ ID NO. 106538 is depicted, non-targeted is mentioned.

[44173] In an embodiment the present invention relates to an expresssion cassette comprising a) a promoter, preferably a promoter selected from the group consisting of Big35S, PCUbi, Super and USP, in particular p-Super; and b) the nucleic acid SEQ ID NO. 45394, or a homolog or fragment thereof, or a homolog thereof being depicted in Table I, application no. 6, column 8, in the same line as SEQ ID NO. 45394, preferably the coding region thereof, a homolog or a fragment thereof; which are operable linked.

[44174] In an embodiment thereof the expression cassette comprises in addition c) a nucleic acid molecule encoding a transit peptide, especially a plastidal transit petide in case in Table I, application no. 6, in column 6 in the same line as SEQ ID NO. 45394 is depicted, plastidic is mentioned, or a mitochondrial transit peptide in case in Table I, application no. 6, in column 6 in the same line as SEQ ID NO. 45394 is depicted, mitochondrial is mentioned; which is operable linked, too.

[44175] In another embodiment thereof the expression cassette does not comprise an additional transit peptide in case in Table I, application no. 6, in column 6 in the same line as SEQ ID NO. 45394 is depicted, non-targeted is mentioned.

[44176] In an embodiment the present invention relates to an expresssion cassette comprising a) a promoter, preferably a promoter selected from the group consisting of Big35S, PCUbi, Super and USP, in particular p-USP; and b) the nucleic acid SEQ ID NO. 45556, or a homolog or fragment thereof, or a homolog thereof being depicted in Table I, application no. 6, column 8, in the same line as SEQ ID NO. 45556, preferably the coding region thereof, a homolog or a fragment thereof; which are operable linked.

[44177] In an embodiment thereof the expression cassette comprises in addition c) a nucleic acid molecule encoding a transit peptide, especially a plastidal transit petide in case in Table I, application no. 6, in column 6 in the same line as SEQ ID NO. 45556 is depicted, plastidic is mentioned, or a mitochondrial transit peptide in case in Table I, application no. 6, in column 6 in the same line as SEQ ID NO. 45556 is depicted, mitochondrial is mentioned; which is operable linked, too.

[44178] In another embodiment thereof the expression cassette does not comprise an additional transit peptide in case in Table I, application no. 6, in column 6 in the same line as SEQ ID NO. 45556 is depicted, non-targeted is mentioned.

[44179] In an embodiment the present invention relates to an expresssion cassette comprising a) a promoter, preferably a promoter selected from the group consisting of Big35S, PCUbi, Super and USP, in particular p-Super; and b) the nucleic acid SEQ ID NO. 45757, or a homolog or fragment thereof, or a homolog thereof being depicted in Table I, application no. 6, column 8, in the same line as SEQ ID NO. 45757, preferably the coding region thereof, a homolog or a fragment thereof; which are operable linked.

[44180] In an embodiment thereof the expression cassette comprises in addition c) a nucleic acid molecule encoding a transit peptide, especially a plastidal transit petide in case in Table I, application no. 6, in column 6 in the same line as SEQ ID NO. 45757 is depicted, plastidic is mentioned, or a mitochondrial transit peptide in case in Table I, application no. 6, in column 6 in the same line as SEQ ID NO. 45757 is depicted, mitochondrial is mentioned; which is operable linked, too.

[44181] In another embodiment thereof the expression cassette does not comprise an additional transit peptide in case in Table I, application no. 6, in column 6 in the same line as SEQ ID NO. 45757 is depicted, non-targeted is mentioned.

[44182] In an embodiment the present invention relates to an expresssion cassette comprising a) a promoter, preferably a promoter selected from the group consisting of Big35S, PCUbi, Super and USP, in particular p-PcUBI; and b) the nucleic acid SEQ ID NO. 45795, or a homolog or fragment thereof, or a homolog thereof being depicted in Table I, application no. 6, column 8, in the same line as SEQ ID NO. 45795, preferably the coding region thereof, a homolog or a fragment thereof; which are operable linked.

[44183] In an embodiment thereof the expression cassette comprises in addition c) a nucleic acid molecule encoding a transit peptide, especially a plastidal transit petide in case in Table I, application no. 6, in column 6 in the same line as SEQ ID NO. 45795 is depicted, plastidic is mentioned, or a mitochondrial transit peptide in case in Table I, application no. 6, in column 6 in the same line as SEQ ID NO. 45795 is depicted, mitochondrial is mentioned; which is operable linked, too.

[44184] In another embodiment thereof the expression cassette does not comprise an additional transit peptide in case in Table I, application no. 6, in column 6 in the same line as SEQ ID NO. 45795 is depicted, non-targeted is mentioned.

[44185] In an embodiment the present invention relates to an expresssion cassette comprising a) a promoter, preferably a promoter selected from the group consisting of Big35S, PCUbi, Super and USP, in particular p-PcUBI; and b) the nucleic acid SEQ ID NO. 10811, or a homolog or fragment thereof, or a homolog thereof being depicted in Table I, application no. 6, column 8, in the same line as SEQ ID NO. 10811, preferably the coding region thereof, a homolog or a fragment thereof; which are operable linked.

[44186] In an embodiment thereof the expression cassette comprises in addition c) a nucleic acid molecule encoding a transit peptide, especially a plastidal transit petide in case in Table I, application no. 6, in column 6 in the same line as SEQ ID NO. 10811 is depicted, plastidic is mentioned, or a mitochondrial transit peptide in case in Table I, application no. 6, in column 6 in the same line as SEQ ID NO. 10811 is depicted, mitochondrial is mentioned; which is operable linked, too.

[44187] In another embodiment thereof the expression cassette does not comprise an additional transit peptide in case in Table I, application no. 6, in column 6 in the same line as SEQ ID NO. 10811 is depicted, non-targeted is mentioned.

[44188] In an embodiment the present invention relates to an expresssion cassette comprising a) a promoter, preferably a promoter selected from the group consisting of Big35S, PCUbi, Super and USP, in particular p-PcUBI; and b) the nucleic acid SEQ ID NO. 45897, or a homolog or fragment thereof, or a homolog thereof being depicted in Table I, application no. 6, column 8, in the same line as SEQ ID NO. 45897, preferably the coding region thereof, a homolog or a fragment thereof; which are operable linked.

[44189] In an embodiment thereof the expression cassette comprises in addition c) a nucleic acid molecule encoding a transit peptide, especially a plastidal transit petide in case in Table I, application no. 6, in column 6 in the same line as SEQ ID NO. 45897 is depicted, plastidic is mentioned, or a mitochondrial transit peptide in case in Table I, application no. 6, in column 6 in the same line as SEQ ID NO. 45897 is depicted, mitochondrial is mentioned; which is operable linked, too.

[44190] In another embodiment thereof the expression cassette does not comprise an additional transit peptide in case in Table I, application no. 6, in column 6 in the same line as SEQ ID NO. 45897 is depicted, non-targeted is mentioned.

[44191] In an embodiment the present invention relates to an expresssion cassette comprising a) a promoter, preferably a promoter selected from the group consisting of Big35S, PCUbi, Super and USP, in particular p-PcUBI; and b) the nucleic acid SEQ ID NO. 106688, or a homolog or fragment thereof, or a homolog thereof being depicted in Table I, application no. 6, column 8, in the same line as SEQ ID NO. 106688, preferably the coding region thereof, a homolog or a fragment thereof; which are operable linked.

[44192] In an embodiment thereof the expression cassette comprises in addition c) a nucleic acid molecule encoding a transit peptide, especially a plastidal transit petide in case in Table I, application no. 6, in column 6 in the same line as SEQ ID NO. 106688 is depicted, plastidic is mentioned, or a mitochondrial transit peptide in case in Table I, application no. 6, in column 6 in the same line as SEQ ID NO. 106688 is depicted, mitochondrial is mentioned; which is operable linked, too.

[44193] In another embodiment thereof the expression cassette does not comprise an additional transit peptide in case in Table I, application no. 6, in column 6 in the same line as SEQ ID NO. 106688 is depicted, non-targeted is mentioned.

[44194] In an embodiment the present invention relates to an expresssion cassette comprising a) a promoter, preferably a promoter selected from the group consisting of Big35S, PCUbi, Super and USP, in particular p-PcUBI; and b) the nucleic acid SEQ ID NO. 46515, or a homolog or fragment thereof, or a homolog thereof being depicted in Table I, application no. 6, column 8, in the same line as SEQ ID NO. 46515, preferably the coding region thereof, a homolog or a fragment thereof; which are operable linked.

[44195] In an embodiment thereof the expression cassette comprises in addition c) a nucleic acid molecule encoding a transit peptide, especially a plastidal transit petide in case in Table I, application no. 6, in column 6 in the same line as SEQ ID NO. 46515 is depicted, plastidic is mentioned, or a mitochondrial transit peptide in case in Table I, application no. 6, in column 6 in the same line as SEQ ID NO. 46515 is depicted, mitochondrial is mentioned; which is operable linked, too.

[44196] In another embodiment thereof the expression cassette does not comprise an additional transit peptide in case in Table I, application no. 6, in column 6 in the same line as SEQ ID NO. 46515 is depicted, non-targeted is mentioned.

[44197] In an embodiment the present invention relates to an expresssion cassette comprising a) a promoter, preferably a promoter selected from the group consisting of Big35S, PCUbi, Super and USP, in particular p-PcUBI; and b) the nucleic acid SEQ ID NO. 84198, or a homolog or fragment thereof, or a homolog thereof being depicted in Table I, application no. 6, column 8, in the same line as SEQ ID NO. 84198, preferably the coding region thereof, a homolog or a fragment thereof; which are operable linked.

[44198] In an embodiment thereof the expression cassette comprises in addition c) a nucleic acid molecule encoding a transit peptide, especially a plastidal transit petide in case in Table I, application no. 6, in column 6 in the same line as SEQ ID NO. 84198 is depicted, plastidic is mentioned, or a mitochondrial transit peptide in case in Table I, application no. 6, in column 6 in the same line as SEQ ID NO. 84198 is depicted, mitochondrial is mentioned; which is operable linked, too.

[44199] In another embodiment thereof the expression cassette does not comprise an additional transit peptide in case in Table I, application no. 6, in column 6 in the same line as SEQ ID NO. 84198 is depicted, non-targeted is mentioned.

[44200] In an embodiment the present invention relates to an expresssion cassette comprising a) a promoter, preferably a promoter selected from the group consisting of Big35S, PCUbi, Super and USP, in particular p-PcUBI; and b) the nucleic acid SEQ ID NO. 46850, or a homolog or fragment thereof, or a homolog thereof being depicted in Table I, application no. 6, column 8, in the same line as SEQ ID NO. 46850, preferably the coding region thereof, a homolog or a fragment thereof; which are operable linked.

[44201] In an embodiment thereof the expression cassette comprises in addition c) a nucleic acid molecule encoding a transit peptide, especially a plastidal transit petide in case in Table I, application no. 6, in column 6 in the same line as SEQ ID NO. 46850 is depicted, plastidic is mentioned, or a mitochondrial transit peptide in case in Table I, application no. 6, in column 6 in the same line as SEQ ID NO. 46850 is depicted, mitochondrial is mentioned; which is operable linked, too.

[44202] In another embodiment thereof the expression cassette does not comprise an additional transit peptide in case in Table I, application no. 6, in column 6 in the same line as SEQ ID NO. 46850 is depicted, non-targeted is mentioned.

[44203] In an embodiment the present invention relates to an expresssion cassette comprising a) a promoter, preferably a promoter selected from the group consisting of Big35S, PCUbi, Super and USP, in particular p-PcUBI; and b) the nucleic acid SEQ ID NO. 47076, or a homolog or fragment thereof, or a homolog thereof being depicted in Table I, application no. 6, column 8, in the same line as SEQ ID NO. 47076, preferably the coding region thereof, a homolog or a fragment thereof; which are operable linked.

[44204] In an embodiment thereof the expression cassette comprises in addition c) a nucleic acid molecule encoding a transit peptide, especially a plastidal transit petide in case in Table I, application no. 6, in column 6 in the same line as SEQ ID NO. 47076 is depicted, plastidic is mentioned, or a mitochondrial transit peptide in case in Table I, application no. 6, in column 6 in the same line as SEQ ID NO. 47076 is depicted, mitochondrial is mentioned; which is operable linked, too.

[44205] In another embodiment thereof the expression cassette does not comprise an additional transit peptide in case in Table I, application no. 6, in column 6 in the same line as SEQ ID NO. 47076 is depicted, non-targeted is mentioned.

[44206] In an embodiment the present invention relates to an expresssion cassette comprising a) a promoter, preferably a promoter selected from the group consisting of Big35S, PCUbi, Super and USP, in particular p-PcUBI; and b) the nucleic acid SEQ ID NO. 84265, or a homolog or fragment thereof, or a homolog thereof being depicted in Table I, application no. 6, column 8, in the same line as SEQ ID NO. 84265, preferably the coding region thereof, a homolog or a fragment thereof; which are operable linked.

[44207] In an embodiment thereof the expression cassette comprises in addition c) a nucleic acid molecule encoding a transit peptide, especially a plastidal transit petide in case in Table I, application no. 6, in column 6 in the same line as SEQ ID NO. 84265 is depicted, plastidic is mentioned, or a mitochondrial transit peptide in case in Table I, application no. 6, in column 6 in the same line as SEQ ID NO. 84265 is depicted, mitochondrial is mentioned; which is operable linked, too.

[44208] In another embodiment thereof the expression cassette does not comprise an additional transit peptide in case in Table I, application no. 6, in column 6 in the same line as SEQ ID NO. 84265 is depicted, non-targeted is mentioned.

[44209] In an embodiment the present invention relates to an expresssion cassette comprising a) a promoter, preferably a promoter selected from the group consisting of Big35S, PCUbi, Super and USP, in particular p-PcUBI; and b) the nucleic acid SEQ ID NO. 84441, or a homolog or fragment thereof, or a homolog thereof being depicted in Table I, application no. 6, column 8, in the same line as SEQ ID NO. 84441, preferably the coding region thereof, a homolog or a fragment thereof; which are operable linked.

[44210] In an embodiment thereof the expression cassette comprises in addition c) a nucleic acid molecule encoding a transit peptide, especially a plastidal transit petide in case in Table I, application no. 6, in column 6 in the same line as SEQ ID NO. 84441 is depicted, plastidic is mentioned, or a mitochondrial transit peptide in case in Table I, application no. 6, in column 6 in the same line as SEQ ID NO. 84441 is depicted, mitochondrial is mentioned; which is operable linked, too.

[44211] In another embodiment thereof the expression cassette does not comprise an additional transit peptide in case in Table I, application no. 6, in column 6 in the same line as SEQ ID NO. 84441 is depicted, non-targeted is mentioned.

[44212] In an embodiment the present invention relates to an expresssion cassette comprising a) a promoter, preferably a promoter selected from the group consisting of Big35S, PCUbi, Super and USP, in particular p-PcUBI; and b) the nucleic acid SEQ ID NO. 49143, or a homolog or fragment thereof, or a homolog thereof being depicted in Table I, application no. 6, column 8, in the same line as SEQ ID NO. 49143, preferably the coding region thereof, a homolog or a fragment thereof; which are operable linked.

[44213] In an embodiment thereof the expression cassette comprises in addition c) a nucleic acid molecule encoding a transit peptide, especially a plastidal transit petide in case in Table I, application no. 6, in column 6 in the same line as SEQ ID NO. 49143 is depicted, plastidic is mentioned, or a mitochondrial transit peptide in case in Table I, application no. 6, in column 6 in the same line as SEQ ID NO. 49143 is depicted, mitochondrial is mentioned; which is operable linked, too.

[44214] In another embodiment thereof the expression cassette does not comprise an additional transit peptide in case in Table I, application no. 6, in column 6 in the same line as SEQ ID NO. 49143 is depicted, non-targeted is mentioned.

[44215] In an embodiment the present invention relates to an expresssion cassette comprising a) a promoter, preferably a promoter selected from the group consisting of Big35S, PCUbi, Super and USP, in particular p-PcUBI; and b) the nucleic acid SEQ ID NO. 49828, or a homolog or fragment thereof, or a homolog thereof being depicted in Table I, application no. 6, column 8, in the same line as SEQ ID NO. 49828, preferably the coding region thereof, a homolog or a fragment thereof; which are operable linked.

[44216] In an embodiment thereof the expression cassette comprises in addition c) a nucleic acid molecule encoding a transit peptide, especially a plastidal transit petide in case in Table I, application no. 6, in column 6 in the same line as SEQ ID NO. 49828 is depicted, plastidic is mentioned, or a mitochondrial transit peptide in case in Table I, application no. 6, in column 6 in the same line as SEQ ID NO. 49828 is depicted, mitochondrial is mentioned; which is operable linked, too.

[44217] In another embodiment thereof the expression cassette does not comprise an additional transit peptide in case in Table I, application no. 6, in column 6 in the same line as SEQ ID NO. 49828 is depicted, non-targeted is mentioned.

[44218] In an embodiment the present invention relates to an expresssion cassette comprising a) a promoter, preferably a promoter selected from the group consisting of Big35S, PCUbi, Super and USP, in particular p-PcUBI; and b) the nucleic acid SEQ ID NO. 106920, or a homolog or fragment thereof, or a homolog thereof being depicted in Table I, application no. 6, column 8, in the same line as SEQ ID NO. 106920, preferably the coding region thereof, a homolog or a fragment thereof; which are operable linked.

[44219] In an embodiment thereof the expression cassette comprises in addition c) a nucleic acid molecule encoding a transit peptide, especially a plastidal transit petide in case in Table I, application no. 6, in column 6 in the same line as SEQ ID NO. 106920 is depicted, plastidic is mentioned, or a mitochondrial transit peptide in case in Table I, application no. 6, in column 6 in the same line as SEQ ID NO. 106920 is depicted, mitochondrial is mentioned; which is operable linked, too.

[44220] In another embodiment thereof the expression cassette does not comprise an additional transit peptide in case in Table I, application no. 6, in column 6 in the same line as SEQ ID NO. 106920 is depicted, non-targeted is mentioned.

[44221] In an embodiment the present invention relates to an expresssion cassette comprising a) a promoter, preferably a promoter selected from the group consisting of Big35S, PCUbi, Super and USP, in particular p-PcUBI; and b) the nucleic acid SEQ ID NO. 50104, or a homolog or fragment thereof, or a homolog thereof being depicted in Table I, application no. 6, column 8, in the same line as SEQ ID NO. 50104, preferably the coding region thereof, a homolog or a fragment thereof; which are operable linked.

[44222] In an embodiment thereof the expression cassette comprises in addition c) a nucleic acid molecule encoding a transit peptide, especially a plastidal transit petide in case in Table I, application no. 6, in column 6 in the same line as SEQ ID NO. 50104 is depicted, plastidic is mentioned, or a mitochondrial transit peptide in case in Table I, application no. 6, in column 6 in the same line as SEQ ID NO. 50104 is depicted, mitochondrial is mentioned; which is operable linked, too.

[44223] In another embodiment thereof the expression cassette does not comprise an additional transit peptide in case in Table I, application no. 6, in column 6 in the same line as SEQ ID NO. 50104 is depicted, non-targeted is mentioned.

[44224] In an embodiment the present invention relates to an expresssion cassette comprising a) a promoter, preferably a promoter selected from the group consisting of Big35S, PCUbi, Super and USP, in particular p-PcUBI; and b) the nucleic acid SEQ ID NO. 50339, or a homolog or fragment thereof, or a homolog thereof being depicted in Table I, application no. 6, column 8, in the same line as SEQ ID NO. 50339, preferably the coding region thereof, a homolog or a fragment thereof; which are operable linked.

[44225] In an embodiment thereof the expression cassette comprises in addition c) a nucleic acid molecule encoding a transit peptide, especially a plastidal transit petide in case in Table I, application no. 6, in column 6 in the same line as SEQ ID NO. 50339 is depicted, plastidic is mentioned, or a mitochondrial transit peptide in case in Table I, application no. 6, in column 6 in the same line as SEQ ID NO. 50339 is depicted, mitochondrial is mentioned; which is operable linked, too.

[44226] In another embodiment thereof the expression cassette does not comprise an additional transit peptide in case in Table I, application no. 6, in column 6 in the same line as SEQ ID NO. 50339 is depicted, non-targeted is mentioned.

[44227] In an embodiment the present invention relates to an expresssion cassette comprising a) a promoter, preferably a promoter selected from the group consisting of Big35S, PCUbi, Super and USP, in particular p-PcUBI; and b) the nucleic acid SEQ ID NO. 51198, or a homolog or fragment thereof, or a homolog thereof being depicted in Table I, application no. 6, column 8, in the same line as SEQ ID NO. 51198, preferably the coding region thereof, a homolog or a fragment thereof; which are operable linked.

[44228] In an embodiment thereof the expression cassette comprises in addition c) a nucleic acid molecule encoding a transit peptide, especially a plastidal transit petide in case in Table I, application no. 6, in column 6 in the same line as SEQ ID NO. 51198 is depicted, plastidic is mentioned, or a mitochondrial transit peptide in case in Table I, application no. 6, in column 6 in the same line as SEQ ID NO. 51198 is depicted, mitochondrial is mentioned; which is operable linked, too.

[44229] In another embodiment thereof the expression cassette does not comprise an additional transit peptide in case in Table I, application no. 6, in column 6 in the same line as SEQ ID NO. 51198 is depicted, non-targeted is mentioned.

[44230] In an embodiment the present invention relates to an expresssion cassette comprising a) a promoter, preferably a promoter selected from the group consisting of Big35S, PCUbi, Super and USP, in particular p-PcUBI; and b) the nucleic acid SEQ ID NO. 101707, or a homolog or fragment thereof, or a homolog thereof being depicted in Table I, application no. 6, column 8, in the same line as SEQ ID NO. 101707, preferably the coding region thereof, a homolog or a fragment thereof; which are operable linked.

[44231] In an embodiment thereof the expression cassette comprises in addition c) a nucleic acid molecule encoding a transit peptide, especially a plastidal transit petide in case in Table I, application no. 6, in column 6 in the same line as SEQ ID NO. 101707 is depicted, plastidic is mentioned, or a mitochondrial transit peptide in case in Table I, application no. 6, in column 6 in the same line as SEQ ID NO. 101707 is depicted, mitochondrial is mentioned; which is operable linked, too.

[44232] In another embodiment thereof the expression cassette does not comprise an additional transit peptide in case in Table I, application no. 6, in column 6 in the same line as SEQ ID NO. 101707 is depicted, non-targeted is mentioned.

[44233] In an embodiment the present invention relates to an expresssion cassette comprising a) a promoter, preferably a promoter selected from the group consisting of Big35S, PCUbi, Super and USP, in particular p-PcUBI; and b) the nucleic acid SEQ ID NO. 85723, or a homolog or fragment thereof, or a homolog thereof being depicted in Table I, application no. 6, column 8, in the same line as SEQ ID NO. 85723, preferably the coding region thereof, a homolog or a fragment thereof; which are operable linked.

[44234] In an embodiment thereof the expression cassette comprises in addition c) a nucleic acid molecule encoding a transit peptide, especially a plastidal transit petide in case in Table I, application no. 6, in column 6 in the same line as SEQ ID NO. 85723 is depicted, plastidic is mentioned, or a mitochondrial transit peptide in case in Table I, application no. 6, in column 6 in the same line as SEQ ID NO. 85723 is depicted, mitochondrial is mentioned; which is operable linked, too.

[44235] In another embodiment thereof the expression cassette does not comprise an additional transit peptide in case in Table I, application no. 6, in column 6 in the same line as SEQ ID NO. 85723 is depicted, non-targeted is mentioned.

[44236] In an embodiment the present invention relates to an expresssion cassette comprising a) a promoter, preferably a promoter selected from the group consisting of Big35S, PCUbi, Super and USP, in particular p-PcUBI; and b) the nucleic acid SEQ ID NO. 53456, or a homolog or fragment thereof, or a homolog thereof being depicted in Table I, application no. 6, column 8, in the same line as SEQ ID NO. 53456, preferably the coding region thereof, a homolog or a fragment thereof; which are operable linked.

[44237] In an embodiment thereof the expression cassette comprises in addition c) a nucleic acid molecule encoding a transit peptide, especially a plastidal transit petide in case in Table I, application no. 6, in column 6 in the same line as SEQ ID NO. 53456 is depicted, plastidic is mentioned, or a mitochondrial transit peptide in case in Table I, application no. 6, in column 6 in the same line as SEQ ID NO. 53456 is depicted, mitochondrial is mentioned; which is operable linked, too.

[44238] In another embodiment thereof the expression cassette does not comprise an additional transit peptide in case in Table I, application no. 6, in column 6 in the same line as SEQ ID NO. 53456 is depicted, non-targeted is mentioned.

[44239] In an embodiment the present invention relates to an expresssion cassette comprising a) a promoter, preferably a promoter selected from the group consisting of Big35S, PCUbi, Super and USP, in particular p-PcUBI; and b) the nucleic acid SEQ ID NO. 107100, or a homolog or fragment thereof, or a homolog thereof being depicted in Table I, application no. 6, column 8, in the same line as SEQ ID NO. 107100, preferably the coding region thereof, a homolog or a fragment thereof; which are operable linked.

[44240] In an embodiment thereof the expression cassette comprises in addition c) a nucleic acid molecule encoding a transit peptide, especially a plastidal transit petide in case in Table I, application no. 6, in column 6 in the same line as SEQ ID NO. 107100 is depicted, plastidic is mentioned, or a mitochondrial transit peptide in case in Table I, application no. 6, in column 6 in the same line as SEQ ID NO. 107100 is depicted, mitochondrial is mentioned; which is operable linked, too.

[44241] In another embodiment thereof the expression cassette does not comprise an additional transit peptide in case in Table I, application no. 6, in column 6 in the same line as SEQ ID NO. 107100 is depicted, non-targeted is mentioned.

[44242] In an embodiment the present invention relates to an expresssion cassette comprising a) a promoter, preferably a promoter selected from the group consisting of Big35S, PCUbi, Super and USP, in particular p-PcUBI; and b) the nucleic acid SEQ ID NO. 95047, or a homolog or fragment thereof, or a homolog thereof being depicted in Table I, application no. 6, column 8, in the same line as SEQ ID NO. 95047, preferably the coding region thereof, a homolog or a fragment thereof; which are operable linked.

[44243] In an embodiment thereof the expression cassette comprises in addition c) a nucleic acid molecule encoding a transit peptide, especially a plastidal transit petide in case in Table I, application no. 6, in column 6 in the same line as SEQ ID NO. 95047 is depicted, plastidic is mentioned, or a mitochondrial transit peptide in case in Table I, application no. 6, in column 6 in the same line as SEQ ID NO. 95047 is depicted, mitochondrial is mentioned; which is operable linked, too.

[44244] In another embodiment thereof the expression cassette does not comprise an additional transit peptide in case in Table I, application no. 6, in column 6 in the same line as SEQ ID NO. 95047 is depicted, non-targeted is mentioned.

[44245] In an embodiment the present invention relates to an expresssion cassette comprising a) a promoter, preferably a promoter selected from the group consisting of Big35S, PCUbi, Super and USP, in particular p-PcUBI; and b) the nucleic acid SEQ ID NO. 55379, or a homolog or fragment thereof, or a homolog thereof being depicted in Table I, application no. 6, column 8, in the same line as SEQ ID NO. 55379, preferably the coding region thereof, a homolog or a fragment thereof; which are operable linked.

[44246] In an embodiment thereof the expression cassette comprises in addition c) a nucleic acid molecule encoding a transit peptide, especially a plastidal transit petide in case in Table I, application no. 6, in column 6 in the same line as SEQ ID NO. 55379 is depicted, plastidic is mentioned, or a mitochondrial transit peptide in case in Table I, application no. 6, in column 6 in the same line as SEQ ID NO. 55379 is depicted, mitochondrial is mentioned; which is operable linked, too.

[44247] In another embodiment thereof the expression cassette does not comprise an additional transit peptide in case in Table I, application no. 6, in column 6 in the same line as SEQ ID NO. 55379 is depicted, non-targeted is mentioned.

[44248] In an embodiment the present invention relates to an expresssion cassette comprising a) a promoter, preferably a promoter selected from the group consisting of Big35S, PCUbi, Super and USP, in particular p-PcUBI; and b) the nucleic acid SEQ ID NO. 85808, or a homolog or fragment thereof, or a homolog thereof being depicted in Table I, application no. 6, column 8, in the same line as SEQ ID NO. 85808, preferably the coding region thereof, a homolog or a fragment thereof; which are operable linked.

[44249] In an embodiment thereof the expression cassette comprises in addition c) a nucleic acid molecule encoding a transit peptide, especially a plastidal transit petide in case in Table I, application no. 6, in column 6 in the same line as SEQ ID NO. 85808 is depicted, plastidic is mentioned, or a mitochondrial transit peptide in case in Table I, application no. 6, in column 6 in the same line as SEQ ID NO. 85808 is depicted, mitochondrial is mentioned; which is operable linked, too.

[44250] In another embodiment thereof the expression cassette does not comprise an additional transit peptide in case in Table I, application no. 6, in column 6 in the same line as SEQ ID NO. 85808 is depicted, non-targeted is mentioned.

[44251] In an embodiment the present invention relates to an expresssion cassette comprising a) a promoter, preferably a promoter selected from the group consisting of Big35S, PCUbi, Super and USP, in particular p-PcUBI; and b) the nucleic acid SEQ ID NO. 86447, or a homolog or fragment thereof, or a homolog thereof being depicted in Table I, application no. 6, column 8, in the same line as SEQ ID NO. 86447, preferably the coding region thereof, a homolog or a fragment thereof; which are operable linked.

[44252] In an embodiment thereof the expression cassette comprises in addition c) a nucleic acid molecule encoding a transit peptide, especially a plastidal transit petide in case in Table I, application no. 6, in column 6 in the same line as SEQ ID NO. 86447 is depicted, plastidic is mentioned, or a mitochondrial transit peptide in case in Table I, application no. 6, in column 6 in the same line as SEQ ID NO. 86447 is depicted, mitochondrial is mentioned; which is operable linked, too.

[44253] In another embodiment thereof the expression cassette does not comprise an additional transit peptide in case in Table I, application no. 6, in column 6 in the same line as SEQ ID NO. 86447 is depicted, non-targeted is mentioned.

[44254] In an embodiment the present invention relates to an expresssion cassette comprising a) a promoter, preferably a promoter selected from the group consisting of Big35S, PCUbi, Super and USP, in particular p-PcUBI; and b) the nucleic acid SEQ ID NO. 95527, or a homolog or fragment thereof, or a homolog thereof being depicted in Table I, application no. 6, column 8, in the same line as SEQ ID NO. 95527, preferably the coding region thereof, a homolog or a fragment thereof; which are operable linked.

[44255] In an embodiment thereof the expression cassette comprises in addition c) a nucleic acid molecule encoding a transit peptide, especially a plastidal transit petide in case in Table I, application no. 6, in column 6 in the same line as SEQ ID NO. 95527 is depicted, plastidic is mentioned, or a mitochondrial transit peptide in case in Table I, application no. 6, in column 6 in the same line as SEQ ID NO. 95527 is depicted, mitochondrial is mentioned; which is operable linked, too.

[44256] In another embodiment thereof the expression cassette does not comprise an additional transit peptide in case in Table I, application no. 6, in column 6 in the same line as SEQ ID NO. 95527 is depicted, non-targeted is mentioned.

[44257] In an embodiment the present invention relates to an expresssion cassette comprising a) a promoter, preferably a promoter selected from the group consisting of Big35S, PCUbi, Super and USP, in particular p-PcUBI; and b) the nucleic acid SEQ ID NO. 86540, or a homolog or fragment thereof, or a homolog thereof being depicted in Table I, application no. 6, column 8, in the same line as SEQ ID NO. 86540, preferably the coding region thereof, a homolog or a fragment thereof; which are operable linked.

[44258] In an embodiment thereof the expression cassette comprises in addition c) a nucleic acid molecule encoding a transit peptide, especially a plastidal transit petide in case in Table I, application no. 6, in column 6 in the same line as SEQ ID NO. 86540 is depicted, plastidic is mentioned, or a mitochondrial transit peptide in case in Table I, application no. 6, in column 6 in the same line as SEQ ID NO. 86540 is depicted, mitochondrial is mentioned; which is operable linked, too.

[44259] In another embodiment thereof the expression cassette does not comprise an additional transit peptide in case in Table I, application no. 6, in column 6 in the same line as SEQ ID NO. 86540 is depicted, non-targeted is mentioned.

[44260] In an embodiment the present invention relates to an expresssion cassette comprising a) a promoter, preferably a promoter selected from the group consisting of Big35S, PCUbi, Super and USP, in particular p-PcUBI; and b) the nucleic acid SEQ ID NO. 87397, or a homolog or fragment thereof, or a homolog thereof being depicted in Table I, application no. 6, column 8, in the same line as SEQ ID NO. 87397, preferably the coding region thereof, a homolog or a fragment thereof; which are operable linked.

[44261] In an embodiment thereof the expression cassette comprises in addition c) a nucleic acid molecule encoding a transit peptide, especially a plastidal transit petide in case in Table I, application no. 6, in column 6 in the same line as SEQ ID NO. 87397 is depicted, plastidic is mentioned, or a mitochondrial transit peptide in case in Table I, application no. 6, in column 6 in the same line as SEQ ID NO. 87397 is depicted, mitochondrial is mentioned; which is operable linked, too.

[44262] In another embodiment thereof the expression cassette does not comprise an additional transit peptide in case in Table I, application no. 6, in column 6 in the same line as SEQ ID NO. 87397 is depicted, non-targeted is mentioned.

[44263] In an embodiment the present invention relates to an expresssion cassette comprising a) a promoter, preferably a promoter selected from the group consisting of Big35S, PCUbi, Super and USP, in particular p-PcUBI; and b) the nucleic acid SEQ ID NO. 57235, or a homolog or fragment thereof, or a homolog thereof being depicted in Table I, application no. 6, column 8, in the same line as SEQ ID NO. 57235, preferably the coding region thereof, a homolog or a fragment thereof; which are operable linked.

[44264] In an embodiment thereof the expression cassette comprises in addition c) a nucleic acid molecule encoding a transit peptide, especially a plastidal transit petide in case in Table I, application no. 6, in column 6 in the same line as SEQ ID NO. 57235 is depicted, plastidic is mentioned, or a mitochondrial transit peptide in case in Table I, application no. 6, in column 6 in the same line as SEQ ID NO. 57235 is depicted, mitochondrial is mentioned; which is operable linked, too.

[44265] In another embodiment thereof the expression cassette does not comprise an additional transit peptide in case in Table I, application no. 6, in column 6 in the same line as SEQ ID NO. 57235 is depicted, non-targeted is mentioned.

[44266] In an embodiment the present invention relates to an expresssion cassette comprising a) a promoter, preferably a promoter selected from the group consisting of Big35S, PCUbi, Super and USP, in particular p-PcUBI; and b) the nucleic acid SEQ ID NO. 58668, or a homolog or fragment thereof, or a homolog thereof being depicted in Table I, application no. 6, column 8, in the same line as SEQ ID NO. 58668, preferably the coding region thereof, a homolog or a fragment thereof; which are operable linked.

[44267] In an embodiment thereof the expression cassette comprises in addition c) a nucleic acid molecule encoding a transit peptide, especially a plastidal transit petide in case in Table I, application no. 6, in column 6 in the same line as SEQ ID NO. 58668 is depicted, plastidic is mentioned, or a mitochondrial transit peptide in case in Table I, application no. 6, in column 6 in the same line as SEQ ID NO. 58668 is depicted, mitochondrial is mentioned; which is operable linked, too.

[44268] In another embodiment thereof the expression cassette does not comprise an additional transit peptide in case in Table I, application no. 6, in column 6 in the same line as SEQ ID NO. 58668 is depicted, non-targeted is mentioned.

[44269] In an embodiment the present invention relates to an expresssion cassette comprising a) a promoter, preferably a promoter selected from the group consisting of Big35S, PCUbi, Super and USP, in particular p-PcUBI; and b) the nucleic acid SEQ ID NO. 88158, or a homolog or fragment thereof, or a homolog thereof being depicted in Table I, application no. 6, column 8, in the same line as SEQ ID NO. 88158, preferably the coding region thereof, a homolog or a fragment thereof; which are operable linked.

[44270] In an embodiment thereof the expression cassette comprises in addition c) a nucleic acid molecule encoding a transit peptide, especially a plastidal transit petide in case in Table I, application no. 6, in column 6 in the same line as SEQ ID NO. 88158 is depicted, plastidic is mentioned, or a mitochondrial transit peptide in case in Table I, application no. 6, in column 6 in the same line as SEQ ID NO. 88158 is depicted, mitochondrial is mentioned; which is operable linked, too.

[44271] In another embodiment thereof the expression cassette does not comprise an additional transit peptide in case in Table I, application no. 6, in column 6 in the same line as SEQ ID NO. 88158 is depicted, non-targeted is mentioned.

[44272] In an embodiment the present invention relates to an expresssion cassette comprising a) a promoter, preferably a promoter selected from the group consisting of Big35S, PCUbi, Super and USP, in particular p-PcUBI; and b) the nucleic acid SEQ ID NO. 107145, or a homolog or fragment thereof, or a homolog thereof being depicted in Table I, application no. 6, column 8, in the same line as SEQ ID NO. 107145, preferably the coding region thereof, a homolog or a fragment thereof; which are operable linked.

[44273] In an embodiment thereof the expression cassette comprises in addition c) a nucleic acid molecule encoding a transit peptide, especially a plastidal transit petide in case in Table I, application no. 6, in column 6 in the same line as SEQ ID NO. 107145 is depicted, plastidic is mentioned, or a mitochondrial transit peptide in case in Table I, application no. 6, in column 6 in the same line as SEQ ID NO. 107145 is depicted, mitochondrial is mentioned; which is operable linked, too.

[44274] In another embodiment thereof the expression cassette does not comprise an additional transit peptide in case in Table I, application no. 6, in column 6 in the same line as SEQ ID NO. 107145 is depicted, non-targeted is mentioned.

[44275] In an embodiment the present invention relates to an expresssion cassette comprising a) a promoter, preferably a promoter selected from the group consisting of Big35S, PCUbi, Super and USP, in particular p-PcUBI; and b) the nucleic acid SEQ ID NO. 58731, or a homolog or fragment thereof, or a homolog thereof being depicted in Table I, application no. 6, column 8, in the same line as SEQ ID NO. 58731, preferably the coding region thereof, a homolog or a fragment thereof; which are operable linked.

[44276] In an embodiment thereof the expression cassette comprises in addition c) a nucleic acid molecule encoding a transit peptide, especially a plastidal transit petide in case in Table I, application no. 6, in column 6 in the same line as SEQ ID NO. 58731 is depicted, plastidic is mentioned, or a mitochondrial transit peptide in case in Table I, application no. 6, in column 6 in the same line as SEQ ID NO. 58731 is depicted, mitochondrial is mentioned; which is operable linked, too.

[44277] In another embodiment thereof the expression cassette does not comprise an additional transit peptide in case in Table I, application no. 6, in column 6 in the same line as SEQ ID NO. 58731 is depicted, non-targeted is mentioned.

[44278] In an embodiment the present invention relates to an expresssion cassette comprising a) a promoter, preferably a promoter selected from the group consisting of Big35S, PCUbi, Super and USP, in particular p-PcUBI; and b) the nucleic acid SEQ ID NO. 12140, or a homolog or fragment thereof, or a homolog thereof being depicted in Table I, application no. 6, column 8, in the same line as SEQ ID NO. 12140, preferably the coding region thereof, a homolog or a fragment thereof; which are operable linked.

[44279] In an embodiment thereof the expression cassette comprises in addition c) a nucleic acid molecule encoding a transit peptide, especially a plastidal transit petide in case in Table I, application no. 6, in column 6 in the same line as SEQ ID NO. 12140 is depicted, plastidic is mentioned, or a mitochondrial transit peptide in case in Table I, application no. 6, in column 6 in the same line as SEQ ID NO. 12140 is depicted, mitochondrial is mentioned; which is operable linked, too.

[44280] In another embodiment thereof the expression cassette does not comprise an additional transit peptide in case in Table I, application no. 6, in column 6 in the same line as SEQ ID NO. 12140 is depicted, non-targeted is mentioned.

[44281] In an embodiment the present invention relates to an expresssion cassette comprising a) a promoter, preferably a promoter selected from the group consisting of Big35S, PCUbi, Super and USP, in particular p-PcUBI; and b) the nucleic acid SEQ ID NO. 59041, or a homolog or fragment thereof, or a homolog thereof being depicted in Table I, application no. 6, column 8, in the same line as SEQ ID NO. 59041, preferably the coding region thereof, a homolog or a fragment thereof; which are operable linked.

[44282] In an embodiment thereof the expression cassette comprises in addition c) a nucleic acid molecule encoding a transit peptide, especially a plastidal transit petide in case in Table I, application no. 6, in column 6 in the same line as SEQ ID NO. 59041 is depicted, plastidic is mentioned, or a mitochondrial transit peptide in case in Table I, application no. 6, in column 6 in the same line as SEQ ID NO. 59041 is depicted, mitochondrial is mentioned; which is operable linked, too.

[44283] In another embodiment thereof the expression cassette does not comprise an additional transit peptide in case in Table I, application no. 6, in column 6 in the same line as SEQ ID NO. 59041 is depicted, non-targeted is mentioned.

[44284] In an embodiment the present invention relates to an expresssion cassette comprising a) a promoter, preferably a promoter selected from the group consisting of Big35S, PCUbi, Super and USP, in particular p-PcUBI; and b) the nucleic acid SEQ ID NO. 12341, or a homolog or fragment thereof, or a homolog thereof being depicted in Table I, application no. 6, column 8, in the same line as SEQ ID NO. 12341, preferably the coding region thereof, a homolog or a fragment thereof; which are operable linked.

[44285] In an embodiment thereof the expression cassette comprises in addition c) a nucleic acid molecule encoding a transit peptide, especially a plastidal transit petide in case in Table I, application no. 6, in column 6 in the same line as SEQ ID NO. 12341 is depicted, plastidic is mentioned, or a mitochondrial transit peptide in case in Table I, application no. 6, in column 6 in the same line as SEQ ID NO. 12341 is depicted, mitochondrial is mentioned; which is operable linked, too.

[44286] In another embodiment thereof the expression cassette does not comprise an additional transit peptide in case in Table I, application no. 6, in column 6 in the same line as SEQ ID NO. 12341 is depicted, non-targeted is mentioned.

[44287] In an embodiment the present invention relates to an expresssion cassette comprising a) a promoter, preferably a promoter selected from the group consisting of Big35S, PCUbi, Super and USP, in particular p-PcUBI; and b) the nucleic acid SEQ ID NO. 59370, or a homolog or fragment thereof, or a homolog thereof being depicted in Table I, application no. 6, column 8, in the same line as SEQ ID NO. 59370, preferably the coding region thereof, a homolog or a fragment thereof; which are operable linked.

[44288] In an embodiment thereof the expression cassette comprises in addition c) a nucleic acid molecule encoding a transit peptide, especially a plastidal transit petide in case in Table I, application no. 6, in column 6 in the same line as SEQ ID NO. 59370 is depicted, plastidic is mentioned, or a mitochondrial transit peptide in case in Table I, application no. 6, in column 6 in the same line as SEQ ID NO. 59370 is depicted, mitochondrial is mentioned; which is operable linked, too.

[44289] In another embodiment thereof the expression cassette does not comprise an additional transit peptide in case in Table I, application no. 6, in column 6 in the same line as SEQ ID NO. 59370 is depicted, non-targeted is mentioned.

[44290] In an embodiment the present invention relates to an expresssion cassette comprising a) a promoter, preferably a promoter selected from the group consisting of Big35S, PCUbi, Super and USP, in particular p-PcUBI; and b) the nucleic acid SEQ ID NO. 12698, or a homolog or fragment thereof, or a homolog thereof being depicted in Table I, application no. 6, column 8, in the same line as SEQ ID NO. 12698, preferably the coding region thereof, a homolog or a fragment thereof; which are operable linked.

[44291] In an embodiment thereof the expression cassette comprises in addition c) a nucleic acid molecule encoding a transit peptide, especially a plastidal transit petide in case in Table I, application no. 6, in column 6 in the same line as SEQ ID NO. 12698 is depicted, plastidic is mentioned, or a mitochondrial transit peptide in case in Table I, application no. 6, in column 6 in the same line as SEQ ID NO. 12698 is depicted, mitochondrial is mentioned; which is operable linked, too.

[44292] In another embodiment thereof the expression cassette does not comprise an additional transit peptide in case in Table I, application no. 6, in column 6 in the same line as SEQ ID NO. 12698 is depicted, non-targeted is mentioned.

[44293] In an embodiment the present invention relates to an expresssion cassette comprising a) a promoter, preferably a promoter selected from the group consisting of Big35S, PCUbi, Super and USP, in particular p-PcUBI; and b) the nucleic acid SEQ ID NO. 107556, or a homolog or fragment thereof, or a homolog thereof being depicted in Table I, application no. 6, column 8, in the same line as SEQ ID NO. 107556, preferably the coding region thereof, a homolog or a fragment thereof; which are operable linked.

[44294] In an embodiment thereof the expression cassette comprises in addition c) a nucleic acid molecule encoding a transit peptide, especially a plastidal transit petide in case in Table I, application no. 6, in column 6 in the same line as SEQ ID NO. 107556 is depicted, plastidic is mentioned, or a mitochondrial transit peptide in case in Table I, application no. 6, in column 6 in the same line as SEQ ID NO. 107556 is depicted, mitochondrial is mentioned; which is operable linked, too.

[44295] In another embodiment thereof the expression cassette does not comprise an additional transit peptide in case in Table I, application no. 6, in column 6 in the same line as SEQ ID NO. 107556 is depicted, non-targeted is mentioned.

[44296] In an embodiment the present invention relates to an expresssion cassette comprising a) a promoter, preferably a promoter selected from the group consisting of Big35S, PCUbi, Super and USP, in particular p-PcUBI; and b) the nucleic acid SEQ ID NO. 62079, or a homolog or fragment thereof, or a homolog thereof being depicted in Table I, application no. 6, column 8, in the same line as SEQ ID NO. 62079, preferably the coding region thereof, a homolog or a fragment thereof; which are operable linked.

[44297] In an embodiment thereof the expression cassette comprises in addition c) a nucleic acid molecule encoding a transit peptide, especially a plastidal transit petide in case in Table I, application no. 6, in column 6 in the same line as SEQ ID NO. 62079 is depicted, plastidic is mentioned, or a mitochondrial transit peptide in case in Table I, application no. 6, in column 6 in the same line as SEQ ID NO. 62079 is depicted, mitochondrial is mentioned; which is operable linked, too.

[44298] In another embodiment thereof the expression cassette does not comprise an additional transit peptide in case in Table I, application no. 6, in column 6 in the same line as SEQ ID NO. 62079 is depicted, non-targeted is mentioned.

[44299] In an embodiment the present invention relates to an expresssion cassette comprising a) a promoter, preferably a promoter selected from the group consisting of Big35S, PCUbi, Super and USP, in particular p-PcUBI; and b) the nucleic acid SEQ ID NO. 12974, or a homolog or fragment thereof, or a homolog thereof being depicted in Table I, application no. 6, column 8, in the same line as SEQ ID NO. 12974, preferably the coding region thereof, a homolog or a fragment thereof; which are operable linked.

[44300] In an embodiment thereof the expression cassette comprises in addition c) a nucleic acid molecule encoding a transit peptide, especially a plastidal transit petide in case in Table I, application no. 6, in column 6 in the same line as SEQ ID NO. 12974 is depicted, plastidic is mentioned, or a mitochondrial transit peptide in case in Table I, application no. 6, in column 6 in the same line as SEQ ID NO. 12974 is depicted, mitochondrial is mentioned; which is operable linked, too.

[44301] In another embodiment thereof the expression cassette does not comprise an additional transit peptide in case in Table I, application no. 6, in column 6 in the same line as SEQ ID NO. 12974 is depicted, non-targeted is mentioned.

[44302] In an embodiment the present invention relates to an expresssion cassette comprising a) a promoter, preferably a promoter selected from the group consisting of Big35S, PCUbi, Super and USP, in particular p-PcUBI; and b) the nucleic acid SEQ ID NO. 108092, or a homolog or fragment thereof, or a homolog thereof being depicted in Table I, application no. 6, column 8, in the same line as SEQ ID NO. 108092, preferably the coding region thereof, a homolog or a fragment thereof; which are operable linked.

[44303] In an embodiment thereof the expression cassette comprises in addition c) a nucleic acid molecule encoding a transit peptide, especially a plastidal transit petide in case in Table I, application no. 6, in column 6 in the same line as SEQ ID NO. 108092 is depicted, plastidic is mentioned, or a mitochondrial transit peptide in case in Table I, application no. 6, in column 6 in the same line as SEQ ID NO. 108092 is depicted, mitochondrial is mentioned; which is operable linked, too.

[44304] In another embodiment thereof the expression cassette does not comprise an additional transit peptide in case in Table I, application no. 6, in column 6 in the same line as SEQ ID NO. 108092 is depicted, non-targeted is mentioned.

[44305] In an embodiment the present invention relates to an expresssion cassette comprising a) a promoter, preferably a promoter selected from the group consisting of Big35S, PCUbi, Super and USP, in particular Big35S; and b) the nucleic acid SEQ ID NO. 62717, or a homolog or fragment thereof, or a homolog thereof being depicted in Table I, application no. 6, column 8, in the same line as SEQ ID NO. 62717, preferably the coding region thereof, a homolog or a fragment thereof; which are operable linked.

[44306] In an embodiment thereof the expression cassette comprises in addition c) a nucleic acid molecule encoding a transit peptide, especially a plastidal transit petide in case in Table I, application no. 6, in column 6 in the same line as SEQ ID NO. 62717 is depicted, plastidic is mentioned, or a mitochondrial transit peptide in case in Table I, application no. 6, in column 6 in the same line as SEQ ID NO. 62717 is depicted, mitochondrial is mentioned; which is operable linked, too.

[44307] In another embodiment thereof the expression cassette does not comprise an additional transit peptide in case in Table I, application no. 6, in column 6 in the same line as SEQ ID NO. 62717 is depicted, non-targeted is mentioned.

[44308] In an embodiment the present invention relates to an expresssion cassette comprising a) a promoter, preferably a promoter selected from the group consisting of Big35S, PCUbi, Super and USP, in particular p-Super; and b) the nucleic acid SEQ ID NO. 108113, or a homolog or fragment thereof, or a homolog thereof being depicted in Table I, application no. 6, column 8, in the same line as SEQ ID NO. 108113, preferably the coding region thereof, a homolog or a fragment thereof; which are operable linked.

[44309] In an embodiment thereof the expression cassette comprises in addition c) a nucleic acid molecule encoding a transit peptide, especially a plastidal transit petide in case in Table I, application no. 6, in column 6 in the same line as SEQ ID NO. 108113 is depicted, plastidic is mentioned, or a mitochondrial transit peptide in case in Table I, application no. 6, in column 6 in the same line as SEQ ID NO. 108113 is depicted, mitochondrial is mentioned; which is operable linked, too.

[44310] In another embodiment thereof the expression cassette does not comprise an additional transit peptide in case in Table I, application no. 6, in column 6 in the same line as SEQ ID NO. 108113 is depicted, non-targeted is mentioned.

[44311] In an embodiment the present invention relates to an expresssion cassette comprising a) a promoter, preferably a promoter selected from the group consisting of Big35S, PCUbi, Super and USP, in particular p-Super; and b) the nucleic acid SEQ ID NO. 63544, or a homolog or fragment thereof, or a homolog thereof being depicted in Table I, application no. 6, column 8, in the same line as SEQ ID NO. 63544, preferably the coding region thereof, a homolog or a fragment thereof; which are operable linked.

[44312] In an embodiment thereof the expression cassette comprises in addition c) a nucleic acid molecule encoding a transit peptide, especially a plastidal transit petide in case in Table I, application no. 6, in column 6 in the same line as SEQ ID NO. 63544 is depicted, plastidic is mentioned, or a mitochondrial transit peptide in case in Table I, application no. 6, in column 6 in the same line as SEQ ID NO. 63544 is depicted, mitochondrial is mentioned; which is operable linked, too.

[44313] In another embodiment thereof the expression cassette does not comprise an additional transit peptide in case in Table I, application no. 6, in column 6 in the same line as SEQ ID NO. 63544 is depicted, non-targeted is mentioned.

[44314] In an embodiment the present invention relates to an expresssion cassette comprising a) a promoter, preferably a promoter selected from the group consisting of Big35S, PCUbi, Super and USP, in particular p-Super; and b) the nucleic acid SEQ ID NO. 90103, or a homolog or fragment thereof, or a homolog thereof being depicted in Table I, application no. 6, column 8, in the same line as SEQ ID NO. 90103, preferably the coding region thereof, a homolog or a fragment thereof; which are operable linked.

[44315] In an embodiment thereof the expression cassette comprises in addition c) a nucleic acid molecule encoding a transit peptide, especially a plastidal transit petide in case in Table I, application no. 6, in column 6 in the same line as SEQ ID NO. 90103 is depicted, plastidic is mentioned, or a mitochondrial transit peptide in case in Table I, application no. 6, in column 6 in the same line as SEQ ID NO. 90103 is depicted, mitochondrial is mentioned; which is operable linked, too.

[44316] In another embodiment thereof the expression cassette does not comprise an additional transit peptide in case in Table I, application no. 6, in column 6 in the same line as SEQ ID NO. 90103 is depicted, non-targeted is mentioned.

[44317] In an embodiment the present invention relates to an expresssion cassette comprising a) a promoter, preferably a promoter selected from the group consisting of Big35S, PCUbi, Super and USP, in particular p-PcUBI; and b) the nucleic acid SEQ ID NO. 97298, or a homolog or fragment thereof, or a homolog thereof being depicted in Table I, application no. 6, column 8, in the same line as SEQ ID NO. 97298, preferably the coding region thereof, a homolog or a fragment thereof; which are operable linked.

[44318] In an embodiment thereof the expression cassette comprises in addition c) a nucleic acid molecule encoding a transit peptide, especially a plastidal transit petide in case in Table I, application no. 6, in column 6 in the same line as SEQ ID NO. 97298 is depicted, plastidic is mentioned, or a mitochondrial transit peptide in case in Table I, application no. 6, in column 6 in the same line as SEQ ID NO. 97298 is depicted, mitochondrial is mentioned; which is operable linked, too.

[44319] In another embodiment thereof the expression cassette does not comprise an additional transit peptide in case in Table I, application no. 6, in column 6 in the same line as SEQ ID NO. 97298 is depicted, non-targeted is mentioned.

[44320] In an embodiment the present invention relates to an expresssion cassette comprising a) a promoter, preferably a promoter selected from the group consisting of Big35S, PCUbi, Super and USP, in particular Big35S; and b) the nucleic acid SEQ ID NO. 64177, or a homolog or fragment thereof, or a homolog thereof being depicted in Table I, application no. 6, column 8, in the same line as SEQ ID NO. 64177, preferably the coding region thereof, a homolog or a fragment thereof; which are operable linked.

[44321] In an embodiment thereof the expression cassette comprises in addition c) a nucleic acid molecule encoding a transit peptide, especially a plastidal transit petide in case in Table I, application no. 6, in column 6 in the same line as SEQ ID NO. 64177 is depicted, plastidic is mentioned, or a mitochondrial transit peptide in case in Table I, application no. 6, in column 6 in the same line as SEQ ID NO. 64177 is depicted, mitochondrial is mentioned; which is operable linked, too.

[44322] In another embodiment thereof the expression cassette does not comprise an additional transit peptide in case in Table I, application no. 6, in column 6 in the same line as SEQ ID NO. 64177 is depicted, non-targeted is mentioned.

[44323] In an embodiment the present invention relates to an expresssion cassette comprising a) a promoter, preferably a promoter selected from the group consisting of Big35S, PCUbi, Super and USP, in particular p-PcUBI; and b) the nucleic acid SEQ ID NO. 108487, or a homolog or fragment thereof, or a homolog thereof being depicted in Table I, application no. 6, column 8, in the same line as SEQ ID NO. 108487, preferably the coding region thereof, a homolog or a fragment thereof; which are operable linked.

[44324] In an embodiment thereof the expression cassette comprises in addition c) a nucleic acid molecule encoding a transit peptide, especially a plastidal transit petide in case in Table I, application no. 6, in column 6 in the same line as SEQ ID NO. 108487 is depicted, plastidic is mentioned, or a mitochondrial transit peptide in case in Table I, application no. 6, in column 6 in the same line as SEQ ID NO. 108487 is depicted, mitochondrial is mentioned; which is operable linked, too.

[44325] In another embodiment thereof the expression cassette does not comprise an additional transit peptide in case in Table I, application no. 6, in column 6 in the same line as SEQ ID NO. 108487 is depicted, non-targeted is mentioned.

[44326] In an embodiment the present invention relates to an expresssion cassette comprising a) a promoter, preferably a promoter selected from the group consisting of Big35S, PCUbi, Super and USP, in particular Big35S; and b) the nucleic acid SEQ ID NO. 90284, or a homolog or fragment thereof, or a homolog thereof being depicted in Table I, application no. 6, column 8, in the same line as SEQ ID NO. 90284, preferably the coding region thereof, a homolog or a fragment thereof; which are operable linked.

[44327] In an embodiment thereof the expression cassette comprises in addition c) a nucleic acid molecule encoding a transit peptide, especially a plastidal transit petide in case in Table I, application no. 6, in column 6 in the same line as SEQ ID NO. 90284 is depicted, plastidic is mentioned, or a mitochondrial transit peptide in case in Table I, application no. 6, in column 6 in the same line as SEQ ID NO. 90284 is depicted, mitochondrial is mentioned; which is operable linked, too.

[44328] In another embodiment thereof the expression cassette does not comprise an additional transit peptide in case in Table I, application no. 6, in column 6 in the same line as SEQ ID NO. 90284 is depicted, non-targeted is mentioned.

[44329] In an embodiment the present invention relates to an expresssion cassette comprising a) a promoter, preferably a promoter selected from the group consisting of Big35S, PCUbi, Super and USP, in particular p-USP; and b) the nucleic acid SEQ ID NO. 64470, or a homolog or fragment thereof, or a homolog thereof being depicted in Table I, application no. 6, column 8, in the same line as SEQ ID NO. 64470, preferably the coding region thereof, a homolog or a fragment thereof; which are operable linked.

[44330] In an embodiment thereof the expression cassette comprises in addition c) a nucleic acid molecule encoding a transit peptide, especially a plastidal transit petide in case in Table I, application no. 6, in column 6 in the same line as SEQ ID NO. 64470 is depicted, plastidic is mentioned, or a mitochondrial transit peptide in case in Table I, application no. 6, in column 6 in the same line as SEQ ID NO. 64470 is depicted, mitochondrial is mentioned; which is operable linked, too.

[44331] In another embodiment thereof the expression cassette does not comprise an additional transit peptide in case in Table I, application no. 6, in column 6 in the same line as SEQ ID NO. 64470 is depicted, non-targeted is mentioned.

[44332] In an embodiment the present invention relates to an expresssion cassette comprising a) a promoter, preferably a promoter selected from the group consisting of Big35S, PCUbi, Super and USP, in particular p-PcUBI; and b) the nucleic acid SEQ ID NO. 108514, or a homolog or fragment thereof, or a homolog thereof being depicted in Table I, application no. 6, column 8, in the same line as SEQ ID NO. 108514, preferably the coding region thereof, a homolog or a fragment thereof; which are operable linked.

[44333] In an embodiment thereof the expression cassette comprises in addition c) a nucleic acid molecule encoding a transit peptide, especially a plastidal transit petide in case in Table I, application no. 6, in column 6 in the same line as SEQ ID NO. 108514 is depicted, plastidic is mentioned, or a mitochondrial transit peptide in case in Table I, application no. 6, in column 6 in the same line as SEQ ID NO. 108514 is depicted, mitochondrial is mentioned; which is operable linked, too.

[44334] In another embodiment thereof the expression cassette does not comprise an additional transit peptide in case in Table I, application no. 6, in column 6 in the same line as SEQ ID NO. 108514 is depicted, non-targeted is mentioned.

[44335] In an embodiment the present invention relates to an expresssion cassette comprising a) a promoter, preferably a promoter selected from the group consisting of Big35S, PCUbi, Super and USP, in particular p-PcUBI; and b) the nucleic acid SEQ ID NO. 14885, or a homolog or fragment thereof, or a homolog thereof being depicted in Table I, application no. 6, column 8, in the same line as SEQ ID NO. 14885, preferably the coding region thereof, a homolog or a fragment thereof; which are operable linked.

[44336] In an embodiment thereof the expression cassette comprises in addition c) a nucleic acid molecule encoding a transit peptide, especially a plastidal transit petide in case in Table I, application no. 6, in column 6 in the same line as SEQ ID NO. 14885 is depicted, plastidic is mentioned, or a mitochondrial transit peptide in case in Table I, application no. 6, in column 6 in the same line as SEQ ID NO. 14885 is depicted, mitochondrial is mentioned; which is operable linked, too.

[44337] In another embodiment thereof the expression cassette does not comprise an additional transit peptide in case in Table I, application no. 6, in column 6 in the same line as SEQ ID NO. 14885 is depicted, non-targeted is mentioned.

[44338] In an embodiment the present invention relates to an expresssion cassette comprising a) a promoter, preferably a promoter selected from the group consisting of Big35S, PCUbi, Super and USP, in particular p-Super; and b) the nucleic acid SEQ ID NO. 90409, or a homolog or fragment thereof, or a homolog thereof being depicted in Table I, application no. 6, column 8, in the same line as SEQ ID NO. 90409, preferably the coding region thereof, a homolog or a fragment thereof; which are operable linked.

[44339] In an embodiment thereof the expression cassette comprises in addition c) a nucleic acid molecule encoding a transit peptide, especially a plastidal transit petide in case in Table I, application no. 6, in column 6 in the same line as SEQ ID NO. 90409 is depicted, plastidic is mentioned, or a mitochondrial transit peptide in case in Table I, application no. 6, in column 6 in the same line as SEQ ID NO. 90409 is depicted, mitochondrial is mentioned; which is operable linked, too.

[44340] In another embodiment thereof the expression cassette does not comprise an additional transit peptide in case in Table I, application no. 6, in column 6 in the same line as SEQ ID NO. 90409 is depicted, non-targeted is mentioned.

[44341] In an embodiment the present invention relates to an expresssion cassette comprising a) a promoter, preferably a promoter selected from the group consisting of Big35S, PCUbi, Super and USP, in particular p-PcUBI; and b) the nucleic acid SEQ ID NO. 66274, or a homolog or fragment thereof, or a homolog thereof being depicted in Table I, application no. 6, column 8, in the same line as SEQ ID NO. 66274, preferably the coding region thereof, a homolog or a fragment thereof; which are operable linked.

[44342] In an embodiment thereof the expression cassette comprises in addition c) a nucleic acid molecule encoding a transit peptide, especially a plastidal transit petide in case in Table I, application no. 6, in column 6 in the same line as SEQ ID NO. 66274 is depicted, plastidic is mentioned, or a mitochondrial transit peptide in case in Table I, application no. 6, in column 6 in the same line as SEQ ID NO. 66274 is depicted, mitochondrial is mentioned; which is operable linked, too.

[44343] In another embodiment thereof the expression cassette does not comprise an additional transit peptide in case in Table I, application no. 6, in column 6 in the same line as SEQ ID NO. 66274 is depicted, non-targeted is mentioned.

[44344] In an embodiment the present invention relates to an expresssion cassette comprising a) a promoter, preferably a promoter selected from the group consisting of Big35S, PCUbi, Super and USP, in particular p-PcUBI; and b) the nucleic acid SEQ ID NO. 90602, or a homolog or fragment thereof, or a homolog thereof being depicted in Table I, application no. 6, column 8, in the same line as SEQ ID NO. 90602, preferably the coding region thereof, a homolog or a fragment thereof; which are operable linked.

[44345] In an embodiment thereof the expression cassette comprises in addition c) a nucleic acid molecule encoding a transit peptide, especially a plastidal transit petide in case in Table I, application no. 6, in column 6 in the same line as SEQ ID NO. 90602 is depicted, plastidic is mentioned, or a mitochondrial transit peptide in case in Table I, application no. 6, in column 6 in the same line as SEQ ID NO. 90602 is depicted, mitochondrial is mentioned; which is operable linked, too.

[44346] In another embodiment thereof the expression cassette does not comprise an additional transit peptide in case in Table I, application no. 6, in column 6 in the same line as SEQ ID NO. 90602 is depicted, non-targeted is mentioned.

[44347] In an embodiment the present invention relates to an expresssion cassette comprising a) a promoter, preferably a promoter selected from the group consisting of Big35S, PCUbi, Super and USP, in particular p-USP; and b) the nucleic acid SEQ ID NO. 108723, or a homolog or fragment thereof, or a homolog thereof being depicted in Table I, application no. 6, column 8, in the same line as SEQ ID NO. 108723, preferably the coding region thereof, a homolog or a fragment thereof; which are operable linked.

[44348] In an embodiment thereof the expression cassette comprises in addition c) a nucleic acid molecule encoding a transit peptide, especially a plastidal transit petide in case in Table I, application no. 6, in column 6 in the same line as SEQ ID NO. 108723 is depicted, plastidic is mentioned, or a mitochondrial transit peptide in case in Table I, application no. 6, in column 6 in the same line as SEQ ID NO. 108723 is depicted, mitochondrial is mentioned; which is operable linked, too.

[44349] In another embodiment thereof the expression cassette does not comprise an additional transit peptide in case in Table I, application no. 6, in column 6 in the same line as SEQ ID NO. 108723 is depicted, non-targeted is mentioned.

[44350] In an embodiment the present invention relates to an expresssion cassette comprising a) a promoter, preferably a promoter selected from the group consisting of Big35S, PCUbi, Super and USP, in particular p-PcUBI; and b) the nucleic acid SEQ ID NO. 98243, or a homolog or fragment thereof, or a homolog thereof being depicted in Table I, application no. 6, column 8, in the same line as SEQ ID NO. 98243, preferably the coding region thereof, a homolog or a fragment thereof; which are operable linked.

[44351] In an embodiment thereof the expression cassette comprises in addition c) a nucleic acid molecule encoding a transit peptide, especially a plastidal transit petide in case in Table I, application no. 6, in column 6 in the same line as SEQ ID NO. 98243 is depicted, plastidic is mentioned, or a mitochondrial transit peptide in case in Table I, application no. 6, in column 6 in the same line as SEQ ID NO. 98243 is depicted, mitochondrial is mentioned; which is operable linked, too.

[44352] In another embodiment thereof the expression cassette does not comprise an additional transit peptide in case in Table I, application no. 6, in column 6 in the same line as SEQ ID NO. 98243 is depicted, non-targeted is mentioned.

[44353] In an embodiment the present invention relates to an expresssion cassette comprising a) a promoter, preferably a promoter selected from the group consisting of Big35S, PCUbi, Super and USP, in particular p-Super; and b) the nucleic acid SEQ ID NO. 67190, or a homolog or fragment thereof, or a homolog thereof being depicted in Table I, application no. 6, column 8, in the same line as SEQ ID NO. 67190, preferably the coding region thereof, a homolog or a fragment thereof; which are operable linked.

[44354] In an embodiment thereof the expression cassette comprises in addition c) a nucleic acid molecule encoding a transit peptide, especially a plastidal transit petide in case in Table I, application no. 6, in column 6 in the same line as SEQ ID NO. 67190 is depicted, plastidic is mentioned, or a mitochondrial transit peptide in case in Table I, application no. 6, in column 6 in the same line as SEQ ID NO. 67190 is depicted, mitochondrial is mentioned; which is operable linked, too.

[44355] In another embodiment thereof the expression cassette does not comprise an additional transit peptide in case in Table I, application no. 6, in column 6 in the same line as SEQ ID NO. 67190 is depicted, non-targeted is mentioned.

[44356] In an embodiment the present invention relates to an expresssion cassette comprising a) a promoter, preferably a promoter selected from the group consisting of Big35S, PCUbi, Super and USP, in particular p-Super; and b) the nucleic acid SEQ ID NO. 91785, or a homolog or fragment thereof, or a homolog thereof being depicted in Table I, application no. 6, column 8, in the same line as SEQ ID NO. 91785, preferably the coding region thereof, a homolog or a fragment thereof; which are operable linked.

[44357] In an embodiment thereof the expression cassette comprises in addition c) a nucleic acid molecule encoding a transit peptide, especially a plastidal transit petide in case in Table I, application no. 6, in column 6 in the same line as SEQ ID NO. 91785 is depicted, plastidic is mentioned, or a mitochondrial transit peptide in case in Table I, application no. 6, in column 6 in the same line as SEQ ID NO. 91785 is depicted, mitochondrial is mentioned; which is operable linked, too.

[44358] In another embodiment thereof the expression cassette does not comprise an additional transit peptide in case in Table I, application no. 6, in column 6 in the same line as SEQ ID NO. 91785 is depicted, non-targeted is mentioned.

[44359] In an embodiment the present invention relates to an expresssion cassette comprising a) a promoter, preferably a promoter selected from the group consisting of Big35S, PCUbi, Super and USP, in particular p-PcUBI; and b) the nucleic acid SEQ ID NO. 92668, or a homolog or fragment thereof, or a homolog thereof being depicted in Table I, application no. 6, column 8, in the same line as SEQ ID NO. 92668, preferably the coding region thereof, a homolog or a fragment thereof; which are operable linked.

[44360] In an embodiment thereof the expression cassette comprises in addition c) a nucleic acid molecule encoding a transit peptide, especially a plastidal transit petide in case in Table I, application no. 6, in column 6 in the same line as SEQ ID NO. 92668 is depicted, plastidic is mentioned, or a mitochondrial transit peptide in case in Table I, application no. 6, in column 6 in the same line as SEQ ID NO. 92668 is depicted, mitochondrial is mentioned; which is operable linked, too.

[44361] In another embodiment thereof the expression cassette does not comprise an additional transit peptide in case in Table I, application no. 6, in column 6 in the same line as SEQ ID NO. 92668 is depicted, non-targeted is mentioned.

[44362] In an embodiment the present invention relates to an expresssion cassette comprising a) a promoter, preferably a promoter selected from the group consisting of Big35S, PCUbi, Super and USP, in particular Big35S; and b) the nucleic acid SEQ ID NO. 98445, or a homolog or fragment thereof, or a homolog thereof being depicted in Table I, application no. 6, column 8, in the same line as SEQ ID NO. 98445, preferably the coding region thereof, a homolog or a fragment thereof; which are operable linked.

[44363] In an embodiment thereof the expression cassette comprises in addition c) a nucleic acid molecule encoding a transit peptide, especially a plastidal transit petide in case in Table I, application no. 6, in column 6 in the same line as SEQ ID NO. 98445 is depicted, plastidic is mentioned, or a mitochondrial transit peptide in case in Table I, application no. 6, in column 6 in the same line as SEQ ID NO. 98445 is depicted, mitochondrial is mentioned; which is operable linked, too.

[44364] In another embodiment thereof the expression cassette does not comprise an additional transit peptide in case in Table I, application no. 6, in column 6 in the same line as SEQ ID NO. 98445 is depicted, non-targeted is mentioned.

[44365] In an embodiment the present invention relates to an expresssion cassette comprising a) a promoter, preferably a promoter selected from the group consisting of Big35S, PCUbi, Super and USP, in particular p-PcUBI; and b) the nucleic acid SEQ ID NO. 68413, or a homolog or fragment thereof, or a homolog thereof being depicted in Table I, application no. 6, column 8, in the same line as SEQ ID NO. 68413, preferably the coding region thereof, a homolog or a fragment thereof; which are operable linked.

[44366] In an embodiment thereof the expression cassette comprises in addition c) a nucleic acid molecule encoding a transit peptide, especially a plastidal transit petide in case in Table I, application no. 6, in column 6 in the same line as SEQ ID NO. 68413 is depicted, plastidic is mentioned, or a mitochondrial transit peptide in case in Table I, application no. 6, in column 6 in the same line as SEQ ID NO. 68413 is depicted, mitochondrial is mentioned; which is operable linked, too.

[44367] In another embodiment thereof the expression cassette does not comprise an additional transit peptide in case in Table I, application no. 6, in column 6 in the same line as SEQ ID NO. 68413 is depicted, non-targeted is mentioned.

[44368] [0165.1.1.6] to [0170.1.1.6] for the disclosure of these paragraphs see [0165.1.1.1] to [0170.1.1.1] above.

[44369] The invention further provides a vector, comprising a nucleic acid molecule comprising 1) a nucleic acid molecule selected from the group consisting of:
[44370] (a) a nucleic acid molecule encoding a polypeptide shown in Table II, column 5 or 8, application no. 6, preferably shown in Table II A, application no. 6, in column 5, or in Table II A, application no. 6, column 8, or in Table II B, application no. 6, column 8, or a homolog or a fragment thereof;
[44371] (b) a nucleic acid molecule shown in Table I, application no. 6, column 5 or 8, preferably shown in Table I A, application no. 6, in column 5, or in Table I A, application no. 6, column 8, or in Table I B, application no. 6, column 8, preferably the coding region thereof, or a homolog or a fragment thereof;
[44372] (c) a nucleic acid molecule, which, as a result of the degeneracy of the genetic code, can be derived from a polypeptide sequence depicted in column 5 or 8 of Table II, application no. 6, preferably shown in Table II A, application no. 6, in column 5, or in Table II A, application no. 6, column 8, or in Table II B, application no. 6, column 8;
[44373] (d) a nucleic acid molecule having at least 30% identity, preferably at least 40%, 50%, 60%, 70%, 75%, 80%, 85%, 90%, 95%, 96%, 97%, 98%, 99%, 99,5%, with the nucleic acid molecule sequence of a polynucleotide comprising the nucleic acid molecule shown in column 5 or 8 of Table I, application no. 6, preferably shown in Table I A, application no. 6, in column 5, or in Table I A, application no. 6, column 8, or in Table I B, application no. 6, column 8, preferably the coding region thereof;
[44374] (e) a nucleic acid molecule encoding a polypeptide having at least 30% identity, preferably at least 40%, 50% 60%, 70%, 75%, 80%, 85%, 90%, 95%, 96%, 97%, 98%, 99%, 99,5%, identity with the amino acid sequence of the polypeptide encoded by the nucleic acid molecule of (a), (b), (c), or (d);
[44375] (f) a nucleic acid molecule which hybridizes with a nucleic acid molecule of (a), (b), (c), (d), or (e) under stringent hybridization conditions;
[44376] (g) a nucleic acid molecule encoding a polypeptide which can be isolated with the aid of monoclonal or polyclonal antibodies made against a polypeptide encoded by one of the nucleic acid molecules of (a), (b), (c), (d), (e) or (f);
[44377] (h) a nucleic acid molecule encoding a polypeptide comprising the consensus sequence or one or more polypeptide motifs as shown in column 8 of Table IV, application no. 6;
[44378] (i) a nucleic acid molecule encoding a polypeptide having the activity represented by a protein as depicted in column 5 of Table II, application no. 6;
[44379] (j) a nucleic acid molecule comprising a polynucleotide which is obtained by amplifying a cDNA library or a genomic library using the primers in Table III, application no. 6, column 8;
[44380] and
[44381] (k) nucleic acid molecule which is obtainable by screening a suitable nucleic acid library, especially a cDNA library and/or a genomic library, under stringent hybridization conditions with a probe comprising one of the sequences of the nucleic acid molecule of (a), (b), (c), (d), (e), (f), (g), (h), (i) or (j) or with a fragment thereof having at least 15 nt, preferably 20 nt, 30 nt, 50 nt, 100 nt, 200 nt, 500 nt, 1000 nt, 1500 nt, 2000 nt or 3000 nt of the nucleic acid molecule complementary to a nucleic acid sequence characterized in (a), (b), (c), (d), (e), (f), (g), (h), (i) or (j);
[44382] or a nucleic acid molecule comprising a sequence which is complementary thereto.
   (All the references to Tables I to IV are references to the corresponding lines of Tables I to IV.)

[44383] In a preferred embodiment of said vector said nucleic acid molecule according to 1 (a), (b), (c), (d), (e), (f), (g), (h), (i), (j) or (k) encodes a polypeptide which has the activity of the respective polypeptide represented by a protein comprising a polypeptide as depicted in the respective line in column 5 of Table II, application no. 6.

[44384] In another preferred embodiment of said vector said nucleic acid molecule according to 1 (a), (b), (c), (d), (e), (f), (g), (h), (i), (j) or (k) confers a generation or an increase of the respective fine chemical in a non-human organism or a part thereof as compared to a corresponding wild-type non-human organism or part thereof.

[44385] In another preferred embodiment of said vector said nucleic acid molecule according to 1 (a), (b), (c), (d), (e), (f), (g), (h), (i), (j) or (k) encodes a polypeptide which has the activity of the respective polypeptide represented by a protein as depicted in the respective line in column 5 of Table II, application no. 6, and confers a generation or an increase of the respective fine chemical in a non-human organism or a part thereof as compared to a corresponding wild-type non-human organism or part thereof.

[44386] In another embodiment thereof said vector comprises beneath said nucleic acid molecule according to 1 (a), (b), (c), (d), (e), (f), (g), (h), (i), (j) or (k), a promoter, preferably a promoter selected from the group consisting of Big35S, PCUbi, Super and USP, which are operable linked.

[44387] In a preferred embodiment thereof said vector comprises beneath said nucleic acid molecule according to 1 (a), (b), (c), (d), (e), (f), (g), (h), (i), (j) or (k), a promoter, preferably a promoter selected from the group consisting of Big35S, PCUbi, Super and USP, which are operable linked; and said nucleic acid molecule according to 1 (a), (b), (c), (d), (e), (f), (g), (h), (i), (j) or (k) encodes a polypeptide which has the activity of the respective polypeptide represented by a protein comprising a polypeptide as depicted in the respective line in column 5 of Table II, application no. 6.

[44388] In another preferred embodiment thereof said vector comprises beneath said nucleic acid molecule according to 1 (a), (b), (c), (d), (e), (f), (g), (h), (i), (j) or (k), a promoter, preferably a promoter selected from the group consisting of Big35S, PCUbi, Super and USP, which are operable linked; and said nucleic acid molecule according to 1 (a), (b), (c), (d), (e), (f), (g), (h), (i), (j) or (k) confers a generation or an increase of the respective fine chemical in a non-human organism or a part thereof as compared to a corresponding wild-type non-human organism or part thereof.

[44389] In another preferred embodiment thereof said vector comprises beneath said nucleic acid molecule according to 1 (a), (b), (c), (d), (e), (f), (g), (h), (i), (j) or (k), a promoter, preferably a promoter selected from the group consisting of Big35S, PCUbi, Super and USP, which are operable linked; and said nucleic acid molecule according to 1 (a), (b), (c), (d), (e), (f), (g), (h), (i), (j) or (k) encodes a polypeptide which has the activity of the respective polypeptide represented by a protein as depicted in the respective line in column 5 of Table II, application no. 6, and confers a generation or an increase of the respective fine chemical in a non-human organism or a part thereof as compared to a corresponding wild-type non-human organism or part thereof.

[44390] In another embodiment thereof said vector comprises beneath said nucleic acid molecule according to 1 (a), (b), (c), (d), (e), (f), (g), (h), (i), (j) or (k), a nucleic acid molecule encoding a transit peptide, preferably encoding a plastidal transit peptide, especially in case in column 6 of Table I, application no. 6, in the same line as of the respective nucleic acid molecule according to 1) “plastidic” is depicted, or encoding a mitochondrial transit peptide, especially in case in column 6 of Table I, application no. 6, in the same line as of the respective nucleic acid molecule according to 1) “mitochondrial” is depicted, which are operable linked.

[44391] In another embodiment thereof said vector does not comprise beneath said nucleic acid molecule according to 1 (a), (b), (c), (d), (e), (f), (g), (h), (i), (j) or (k), a nucleic acid molecule encoding a transit peptide in case in column 6 of Table I, application no. 6, in the same line as of the respective nucleic acid molecule according to 1) “non-targeted” is depicted.

[44392] In another embodiment thereof said vector comprises beneath said nucleic acid molecule according to 1 (a), (b), (c), (d), (e), (f), (g), (h), (i), (j) or (k), and a promoter, preferably a promoter selected from the group consisting of Big35S, PCUbi, Super and USP; a nucleic acid molecule encoding a transit peptide, preferably encoding a plastidal transit peptide, especially in case in column 6 of Table I, application no. 6, in the same line as of the respective nucleic acid molecule according to 1) “plastidic” is depicted, or encoding a mitochondrial transit peptide, especially in case in column 6 of Table I, application no. 6, in the same line as of the respective nucleic acid molecule according to 1) “mitochondrial” is depicted, which are operable linked.

[44393] In another embodiment thereof said vector does not comprise beneath said nucleic acid molecule according to 1 (a), (b), (c), (d), (e), (f), (g), (h), (i), (j) or (k), and a promoter, preferably a promoter selected from the group consisting of Big35S, PCUbi, Super and USP, which are operable linked; a nucleic acid molecule encoding a transit peptide, especially in case in column 6 of Table I, application no. 6, in the same line as of the respective nucleic acid molecule according to 1) “non-targeted” is depicted.

[44394] In another embodiment thereof said vector comprises beneath said nucleic acid molecule according to 1 (a), (b), (c), (d), (e), (f), (g), (h), (i), (j) or (k), and a promoter, preferably a promoter selected from the group consisting of Big35S, PCUbi, Super and USP; a nucleic acid molecule encoding a transit peptide, preferably encoding a plastidal transit peptide, especially in case in column 6 of Table I, application no. 6, in the same line as of the respective nucleic acid molecule according to 1) “plastidic” is depicted, or encoding a mitochondrial transit peptide, especially in case in column 6 of Table I, application no. 6, in the same line as of the respective nucleic acid molecule according to 1) “mitochondrial” is depicted, which are operable linked; and wherein said nucleic acid molecule according to 1 (a), (b), (c), (d), (e), (f), (g), (h), (i), (j) or (k) encodes a polypeptide which has the activity of the respective polypeptide represented by a protein comprising a polypeptide as depicted in column 5 of Table II, application no. 6 (in the same line).

[44395] In another embodiment thereof said vector does not comprise beneath said nucleic acid molecule according to 1 (a), (b), (c), (d), (e), (f), (g), (h), (i), (j) or (k), and a promoter, preferably a promoter selected from the group consisting of Big35S, PCUbi, Super and USP, which are operatively linked; a nucleic acid molecule encoding a transit peptide, especially in case in column 6 of Table I, application no. 6, in the same line as of the respective nucleic acid molecule according to 1) “non-targeted” is depicted; and wherein said nucleic acid molecule according to 1 (a), (b), (c), (d), (e), (f), (g), (h), (i), (j) or (k) encodes a polypeptide which has the activity of the respective polypeptide represented by a protein comprising a polypeptide as depicted in column 5 of Table II, application no. 6.

[44396] In another embodiment thereof said vector comprises beneath said nucleic acid molecule according to 1 (a), (b), (c), (d), (e), (f), (g), (h), (i), (j) or (k), and a promoter, preferably a promoter selected from the group consisting of Big35S, PCUbi, Super and USP; a nucleic acid molecule encoding a transit peptide, preferably encoding a plastidal transit peptide, especially in case in column 6 of Table I, application no. 6, in the same line as of the respective nucleic acid molecule according to 1) “plastidic” is depicted, or encoding a mitochondrial transit peptide, especially in case in column 6 of Table I, application no. 6, in the same line as of the respective nucleic acid molecule according to 1) “mitochondrial” is depicted, which are operable linked; and wherein said nucleic acid molecule according to 1 (a), (b), (c), (d), (e), (f), (g), (h), (i), (j) or (k) confers a generation or an increase of the respective fine chemical in a non-human organism or a part thereof as compared to a corresponding wild-type non-human organism or part thereof.

[44397] In another embodiment thereof said vector does not comprise beneath said nucleic acid molecule according to 1 (a), (b), (c), (d), (e), (f), (g), (h), (i), (j) or (k), and a promoter, preferably a promoter selected from the group consisting of Big35S, PCUbi, Super and USP, which are operatively linked; a nucleic acid molecule encoding a transit peptide, especially in case in column 6 of Table I, application no. 6, in the same line as of the respective nucleic acid molecule according to 1) “non-targeted” is depicted; and wherein said nucleic acid molecule according to 1 (a), (b), (c), (d), (e), (f), (g), (h), (i), (j) or (k) confers a generation or an increase of the respective fine chemical in a non-human organism or a part thereof as compared to a corresponding wild-type non-human organism or part thereof.

[44398] In another embodiment thereof said vector comprises beneath said nucleic acid molecule according to 1 (a), (b), (c), (d), (e), (f), (g), (h), (i), (j) or (k), and a promoter, preferably a promoter selected from the group consisting of Big35S, PCUbi, Super and USP; a nucleic acid molecule encoding a transit peptide, preferably encoding a plastidal transit peptide, especially in case in column 6 of Table I, application no. 6, in the same line as of the respective nucleic acid molecule according to 1) “plastidic” is depicted, or encoding a mitochondrial transit peptide, especially in case in column 6 of Table I, application no. 6, in the same line as of the respective nu oleic acid molecule according to 1) “mitochondrial” is depicted, which are operable linked; and wherein said nucleic acid molecule according to 1 (a), (b), (c), (d), (e), (f), (g), (h), (i), (j) or (k) encodes a polypeptide which has the activity of the respective polypeptide represented by a protein as depicted in column 5 of Table II application no. 6 and confers a generation or an increase of the respective fine chemical in a non-human organism or a part thereof as compared to a corresponding wild-type non-human organism or part thereof.

[44399] In another embodiment thereof said vector does not comprise beneath said nucleic acid molecule according to 1 (a), (b), (c), (d), (e), (f), (g), (h), (i), (j) or (k), and a promoter, preferably a promoter selected from the group consisting of Big35S, PCUbi, Super and USP, which are operatively linked; a nucleic acid molecule encoding a transit peptide, especially in case in column 6 of Table I, application no. 6, in the same line as of the respective nucleic acid molecule according to 1) “non-targeted” is depicted; and wherein said nucleic acid molecule according to 1 (a), (b), (c), (d), (e), (f), (g), (h), (i), (j) or (k) encodes a polypeptide which has the activity of the respective polypeptide represented by a protein as depicted in column 5 of Table II application no. 6 (in the same line) and confers a generation or an increase of the respective fine chemical in a non-human organism or a part thereof as compared to a corresponding wild-type non-human organism or part thereof.

[44400] In a preferred embodiment of said vector said nucleic acid molecule according to 1 (a), (b), (c), (d), (e), (f), (g), (h), (i), (j) or (k), said promoter and optionally said nucleic acid molecule encoding a transit peptide are encompassed in an expression cassette. Accordingly in an embodiment the invention provides a vector comprising an expression cassette comprising said nucleic acid molecule according to 1 (a), (b), (c), (d), (e), (f), (g), (h), (i), (j) or (k), said promoter and optionally said a nucleic acid molecule encoding a transit peptide, operable linked. Said expression cassette may encompass a terminator, too.

[44401] The invention further provides a vector comprising a nucleic acid molecule comprising 1) a nucleic acid molecule selected from the group consisting of:
[44402] (a) a nucleic acid molecule encoding a polypeptide shown in Table II, column 5 or 8, application no. 6, preferably shown in Table II A, application no. 6, in column 5, or in Table II A, application no. 6, column 8, or in Table II B, application no. 6, column 8, or a homolog or a fragment thereof;
[44403] (b) a nucleic acid molecule shown in Table I, application no. 6, column 5 or 8, preferably shown in Table I A, application no. 6, in column 5, or in Table I A, application no. 6, column 8, or in Table I B, application no. 6, column 8, preferably the coding region thereof, or a homolog or a fragment thereof;
[44404] (c) a nucleic acid molecule, which, as a result of the degeneracy of the genetic code, can be derived from a polypeptide sequence depicted in column 5 or 8 of Table II, application no. 6, preferably shown in Table II A, application no. 6, in column 5, or in Table II A, application no. 6, column 8, or in Table II B, application no. 6, column 8;
[44405] (d) a nucleic acid molecule having at least 30% identity, preferably at least 40%, 50%, 60%, 70%, 75%, 80%, 85%, 90%, 95%, 96%, 97%, 98%, 99%, 99,5%, with the nucleic acid molecule sequence of a polynucleotide comprising the nucleic acid molecule shown in column 5 or 8 of Table I, application no. 6, preferably shown in Table I A, application no. 6, in column 5, or in Table I A, application no. 6, column 8, or in Table I B, application no. 6, column 8, preferably the coding region thereof;
[44406] (e) a nucleic acid molecule encoding a polypeptide having at least 30% identity, preferably at least 40%, 50% 60%, 70%, 75%, 80%, 85%, 90%, 95%, 96%, 97%, 98%, 99%, 99,5%, identity with the amino acid sequence of the polypeptide encoded by the nucleic acid molecule of (a), (b), (c), or (d);
[44407] (f) a nucleic acid molecule which hybridizes with a nucleic acid molecule of (a), (b), (c), (d), or (e) under stringent hybridization conditions;
[44408] (g) a nucleic acid molecule encoding a polypeptide which can be isolated with the aid of monoclonal or polyclonal antibodies made against a polypeptide encoded by one of the nucleic acid molecules of (a), (b), (c), (d), (e) or (f);
[44409] (h) a nucleic acid molecule encoding a polypeptide comprising the consensus sequence or one or more polypeptide motifs as shown in column 8 of Table IV, application no. 6;
[44410] (i) a nucleic acid molecule encoding a polypeptide having the activity represented by a protein as depicted in column 5 of Table II, application no. 6;
[44411] (j) a nucleic acid molecule comprising a polynucleotide which is obtained by amplifying a cDNA library or a genomic library using the primers in Table III, application no. 6, column 8;
[44412] and
[44413] (k) nucleic acid molecule which is obtainable by screening a suitable nucleic acid library, especially a cDNA library and/or a genomic library, under stringent hybridization conditions with a probe comprising one of the sequences of the nucleic acid molecule of (a), (b), (c), (d), (e), (f), (g), (h), (i) or (j) or with a fragment thereof having at least 15 nt, preferably 20 nt, 30 nt, 50 nt, 100 nt, 200 nt, 500 nt, 1000 nt, 1500 nt, 2000 nt or 3000 nt of the nucleic acid molecule complementary to a nucleic acid sequence characterized in (a), (b), (c), (d), (e), (f), (g), (h), (i) or (j);
[44414] or a nucleic acid molecule comprising a sequence which is complementary thereto;
   whereby, preferably, the nucleic acid molecule according to 1 (a), (b), (c), (d), (e), (f), (g), (h), (i), (j) or (k) distinguishes over the sequence depicted in Table I A and/or I B, application no. 6, column 5 or 8, or the coding region thereof, by one or more nucleotides (especially but not exceeding 5%, preferably 4%, 3%, 2%, 1%, 0.5%, 0.2% or 0.1%). In an embodiment, the nucleic acid molecule of the invention does not consist of the sequence shown in Table I A and/or I B, application no. 6, column 5 or 8, or the coding region thereof, respectively. In another embodiment, the nucleic acid molecule of the present invention, preferably the coding region thereof, is 30%, 40%, 50%, 60%, 70%, 80%, 90%, 95% identical but less than 100%, 99.999%, 99.99%, 99.9%, 99%, 98%, 97%, 96% or 95% identical to the sequence shown in Table I A and/or I B, application no. 6, column 5 or 8, or the coding region thereof, respectively. In a further embodiment the nucleic acid molecule does not encode the polypeptide sequence shown in Table II A and/or II B, application no. 6, column 5 or 8 but homologs thereof. Accordingly, in one embodiment, the nucleic acid molecule of the present invention encodes in one embodiment a polypeptide which differs at least in one or more amino acids (especially but not exceeding 5%, preferably 4%, 3%, 2%, 1%, 0.5%, 0.2% or 0.1%) from the polypeptide shown in Table II, application no. 6, column 5 or 8 and does not encode a protein of the sequence shown in Table II A and/or II B, application no. 6, column 5 or 8. Accordingly, in one embodiment, the protein encoded by a sequence of a nucleic acid according to (a), (b), (c), (d), (e), (f), (g), (h), (i), (j) or (k) does not consist of the sequence shown in Table I A and/or I B, application no. 6, column 5 and 8, or the coding region thereof. In a further embodiment, the protein of the present invention is at least 30%,40%, 50%, 60%, 70%, 80%, 90%, 95% identical to protein sequence depicted in Table II A and/or II B, application no. 6, column 5 or 8 but less than 100%, preferably less than 99.999%, 99.99% or 99.9%, more preferably less than 99%, 985, 97%, 96% or 95% identical to the sequence shown in Table II A and/or II B, application no. 6, column 5 or 8.
   (All the references to Tables I to IV are references to the corresponding lines of Tables I to IV.)

[44415] In a preferred embodiment of said vector said nucleic acid molecule according to 1 (a), (b), (c), (d), (e), (f), (g), (h), (i), (j) or (k) encodes a polypeptide which has the activity of the respective polypeptide represented by a protein comprising a polypeptide as depicted in the respective line in column 5 of Table II, application no. 6.

[44416] In another preferred embodiment of said vector said nucleic acid molecule according to 1 (a), (b), (c), (d), (e), (f), (g), (h), (i), (j) or (k) confers a generation or an increase of the respective fine chemical in a non-human organism or a part thereof as compared to a corresponding wild-type non-human organism or part thereof.

[44417] In another preferred embodiment of said vector said nucleic acid molecule according to 1 (a), (b), (c), (d), (e), (f), (g), (h), (i), (j) or (k) encodes a polypeptide which has the activity of the respective polypeptide represented by a protein as depicted in the respective line in column 5 of Table II, application no. 6, and confers a generation or an increase of the respective fine chemical in a non-human organism or a part thereof as compared to a corresponding wild-type non-human organism or part thereof.

[44418] In another embodiment thereof said vector comprises beneath said nucleic acid molecule according to 1 (a), (b), (c), (d), (e), (f), (g), (h), (i), (j) or (k), a promoter, preferably a promoter selected from the group consisting of Big35S, PCUbi, Super and USP, which are operable linked.

[44419] In a preferred embodiment thereof said vector comprises beneath said nucleic acid molecule according to 1 (a), (b), (c), (d), (e), (f), (g), (h), (i), (j) or (k), a promoter, preferably a promoter selected from the group consisting of Big35S, PCUbi, Super and USP, which are operable linked; and said nucleic acid molecule according to 1 (a), (b), (c), (d), (e), (f), (g), (h), (i), (j) or (k) encodes a polypeptide which has the activity of the respective polypeptide represented by a protein comprising a polypeptide as depicted in the respective line in column 5 of Table II, application no. 6.

[44420] In another preferred embodiment thereof said vector comprises beneath said nucleic acid molecule according to 1 (a), (b), (c), (d), (e), (f), (g), (h), (i), (j) or (k), a promoter, preferably a promoter selected from the group consisting of Big35S, PCUbi, Super and USP, which are operable linked; and said nucleic acid molecule according to 1 (a), (b), (c), (d), (e), (f), (g), (h), (i), (j) or (k) confers a generation or an increase of the respective fine chemical in a non-human organism or a part thereof as compared to a corresponding wild-type non-human organism or part thereof.

[44421] In another preferred embodiment thereof said vector comprises beneath said nucleic acid molecule according to 1 (a), (b), (c), (d), (e), (f), (g), (h), (i), (j) or (k), a promoter, preferably a promoter selected from the group consisting of Big35S, PCUbi, Super and USP, which are operable linked; and said nucleic acid molecule according to 1 (a), (b), (c), (d), (e), (f), (g), (h), (i), (j) or (k) encodes a polypeptide which has the activity of the respective polypeptide represented by a protein as depicted in the respective line in column 5 of Table II, application no. 6, and confers a generation or an increase of the respective fine chemical in a non-human organism or a part thereof as compared to a corresponding wild-type non-human organism or part thereof.

[44422] In another embodiment thereof said vector comprises beneath said nucleic acid molecule according to 1 (a), (b), (c), (d), (e), (f), (g), (h), (i), (j) or (k), a nucleic acid molecule encoding a transit peptide, preferably encoding a plastidal transit peptide, especially in case in column 6 of Table I, application no. 6, in the same line as of the respective nucleic acid molecule according to 1) “plastidic” is depicted, or encoding a mitochondrial transit peptide, especially in case in column 6 of Table I, application no. 6, in the same line as of the respective nucleic acid molecule according to 1) “mitochondrial” is depicted, which are operable linked.

[44423] In another embodiment thereof said vector does not comprise beneath said nucleic acid molecule according to 1 (a), (b), (c), (d), (e), (f), (g), (h), (i), (j) or (k), a nucleic acid molecule encoding a transit peptide in case in column 6 of Table I, application no. 6, in the same line as of the respective nucleic acid molecule according to 1) “non-targeted” is depicted.

[44424] In another embodiment thereof said vector comprises beneath said nucleic acid molecule according to 1 (a), (b), (c), (d), (e), (f), (g), (h), (i), (j) or (k), and a promoter, preferably a promoter selected from the group consisting of Big35S, PCUbi, Super and USP; a nucleic acid molecule encoding a transit peptide, preferably encoding a plastidal transit peptide, especially in case in column 6 of Table I, application no. 6, in the same line as of the respective nucleic acid molecule according to 1) “plastidic” is depicted, or encoding a mitochondrial transit peptide, especially in case in column 6 of Table I, application no. 6, in the same line as of the respective nucleic acid molecule according to 1) “mitochondrial” is depicted, which are operable linked.

[44425] In another embodiment thereof said vector does not comprise beneath said nucleic acid molecule according to 1 (a), (b), (c), (d), (e), (f), (g), (h), (i), (j) or (k), and a promoter, preferably a promoter selected from the group consisting of Big35S, PCUbi, Super and USP, which are operatively linked; a nucleic acid molecule encoding a transit peptide, especially in case in column 6 of Table I, application no. 6, in the same line as of the respective nucleic acid molecule according to 1) “non-targeted” is depicted.

[44426] In another embodiment thereof said vector comprises beneath said nucleic acid molecule according to 1 (a), (b), (c), (d), (e), (f), (g), (h), (i), (j) or (k), and a promoter, preferably a promoter selected from the group consisting of Big35S, PCUbi, Super and USP; a nucleic acid molecule encoding a transit peptide, preferably encoding a plastidal transit peptide, especially in case in column 6 of Table I, application no. 6, in the same line as of the respective nucleic acid molecule according to 1) “plastidic” is depicted, or encoding a mitochondrial transit peptide, especially in case in column 6 of Table I, application no. 6, in the same line as of the respective nucleic acid molecule according to 1) “mitochondrial” is depicted, which are operable linked; and wherein said nucleic acid molecule according to 1 (a), (b), (c), (d), (e), (f), (g), (h), (i), (j) or (k) encodes a polypeptide which has the activity of the respective polypeptide represented by a protein comprising a polypeptide as depicted in column 5 of Table II, application no. 6.

[44427] In another embodiment thereof said vector does not comprise beneath said nucleic acid molecule according to 1 (a), (b), (c), (d), (e), (f), (g), (h), (i), (j) or (k), and a promoter, preferably a promoter selected from the group consisting of Big35S, PCUbi, Super and USP, which are operatively linked; a nucleic acid molecule encoding a transit peptide, especially in case in column 6 of Table I, application no. 6, in the same line as of the respective nucleic acid molecule according to 1) “non-targeted” is depicted; and wherein said nucleic acid molecule according to 1 (a), (b), (c), (d), (e), (f), (g), (h), (i), (j) or (k) encodes a polypeptide which has the activity of the respective polypeptide represented by a protein comprising a polypeptide as depicted in column 5 of Table II, application no. 6.

[44428] In another embodiment thereof said vector comprises beneath said nucleic acid molecule according to 1 (a), (b), (c), (d), (e), (f), (g), (h), (i), (j) or (k), and a promoter, preferably a promoter selected from the group consisting of Big35S, PCUbi, Super and USP; a nucleic acid molecule encoding a transit peptide, preferably encoding a plastidal transit peptide, especially in case in column 6 of Table I, application no. 6, in the same line as of the respective nucleic acid molecule according to 1) “plastidic” is depicted, or encoding a mitochondrial transit peptide, especially in case in column 6 of Table I, application no. 6, in the same line as of the respective nu oleic acid molecule according to 1) “mitochondrial” is depicted, which are operable linked; and wherein said nucleic acid molecule according to 1 (a), (b), (c), (d), (e), (f), (g), (h), (i), (j) or (k) confers a generation or an increase of the respective fine chemical in a non-human organism or a part thereof as compared to a corresponding wild-type non-human organism or part thereof.

[44429] In another embodiment thereof said vector does not comprise beneath said nucleic acid molecule according to 1 (a), (b), (c), (d), (e), (f), (g), (h), (i), (j) or (k), and a promoter, preferably a promoter selected from the group consisting of Big35S, PCUbi, Super and USP, which are operatively linked; a nucleic acid molecule encoding a transit peptide, especially in case in column 6 of Table I, application no. 6, in the same line as of the respective nucleic acid molecule according to 1) “non-targeted” is depicted; and wherein said nucleic acid molecule according to 1 (a), (b), (c), (d), (e), (f), (g), (h), (i), (j) or (k) confers a generation or an increase of the respective fine chemical in a non-human organism or a part thereof as compared to a corresponding wild-type non-human organism or part thereof.

[44430] In another embodiment thereof said vector comprises beneath said nucleic acid molecule according to 1 (a), (b), (c), (d), (e), (f), (g), (h), (i), (j) or (k), and a promoter, preferably a promoter selected from the group consisting of Big35S, PCUbi, Super and USP; a nucleic acid molecule encoding a transit peptide, preferably encoding a plastidal transit peptide, especially in case in column 6 of Table I, application no. 6, in the same line as of the respective nucleic acid molecule according to 1) “plastidic” is depicted, or encoding a mitochondrial transit peptide, especially in case in column 6 of Table I, application no. 6, in the same line as of the respective nucleic acid molecule according to 1) “mitochondrial” is depicted, which are operable linked; and wherein said nucleic acid molecule according to 1 (a), (b), (c), (d), (e), (f), (g), (h), (i), (j) or (k) encodes a polypeptide which has the activity of the respective polypeptide represented by a protein as depicted in column 5 of Table II application no. 6 and confers a generation or an increase of the respective fine chemical in a non-human organism or a part thereof as compared to a corresponding wild-type non-human organism or part thereof.

[44431] In another embodiment thereof said vector does not comprise beneath said nucleic acid molecule according to 1 (a), (b), (c), (d), (e), (f), (g), (h), (i), (j) or (k), and a promoter, preferably a promoter selected from the group consisting of Big35S, PCUbi, Super and USP, which are operatively linked; a nucleic acid molecule encoding a transit peptide, especially in case in column 6 of Table I, application no. 6, in the same line as of the respective nucleic acid molecule according to 1) “non-targeted” is depicted; and wherein said nucleic acid molecule according to 1 (a), (b), (c), (d), (e), (f), (g), (h), (i), (j) or (k) encodes a polypeptide which has the activity of the respective polypeptide represented by a protein as depicted in column 5 of Table II application no. 6 and confers a generation or an increase of the respective fine chemical in a non-human organism or a part thereof as compared to a corresponding wild-type non-human organism or part thereof.

[44432] 0181.1.1.6] to [0209.1.1.6] for the disclosure of these paragraphs see [0181.1.1.1] to [0209.1.1.1] above.

[44433] The genes of the invention, coding for an activity selected from the group consisting of 2,3-dihydroxyphenylpropionate 1,2-dioxygenase, 2-isopropylmalate synthase, 3-isopropylmalate dehydrogenase, 47266012-protein, 50S ribosomal protein L14, ABC transporter ATP binding component, ABC transporter ATP-binding protein, ABC transporter component, ABC transporter permease protein, acetolactate synthase, acetolactate synthase small subunit, acetyl CoA carboxylase, acetyl-CoA acetyltransferase, acetyltransferase, acid shock protein, acyl transferase, acyltransferase, adenylate kinase, adenylosuccinate lyase, agmatinase, aldehyde dehydrogenase, aminotransferase, anthranilate synthase component II, arginine exporter protein, At1g19800-protein, At1g23110-protein, At1g47380-protein, At4g32480-protein, At5g16650-protein, ATP-binding component of a transport system, auxin response factor, b0050-protein, b1003-protein, b1163-protein, b1445-protein, b1522-protein, b1670-protein, b1672-protein, b2513-protein, b2613-protein, b2673-protein, b2739-protein, b2812-protein, b3083-protein, b3490-protein, b3989-protein, b4029-protein, b4050-protein, b4056-protein, b4263-protein, beta-galactosidase, beta-hydroxylase, bifunctional protein (phosphoribosyltransferase and regulatory protein), binding-protein-dependent transport systems inner membrane component, branched chain aminotransferase, branched-chain amino acid permease, branched-chain amino-acid aminotransferase, calcium-dependent protein kinase, carbamoylphosphate synthase subunit, CBL-interacting protein kinase, cell division control protein, chaperone protein CIpB, cullin, cyclin, cyclin D, cytochrome c-type protein, dihydroxyacid dehydratase, disease resistance protein, DNA helicase II, DNA helicase IV, DNA mismatch repair protein, DNA polymerase, DNA-binding protein, elongation factor Tu, enoyl-CoA hydratase, eukaryotic translation initiation factor, eukaryotic translation initiation factor 5, ferredoxin, flavodoxin, fumarylacetoacetate hydrolase, GDP-mannose 4,6-dehydratase, geranylgeranyl pyrophosphate synthase, gluconate transport system permease 3, glucose-1-phosphate cytidylyltransferase, glucose-6-phosphate 1-dehydrogenase, glutamate-ammonia-ligase, glutamine synthetase, glutaredoxin, glycerol-3-phosphate dehydrogenase, glycogen (starch) synthase, glycogen synthase, glycoprotease, glycosyl transferase, GM02LC11114-protein, GM02LC5744-protein, H/ACA ribonucleoprotein complex subunit 3, harpin-induced family protein, heat shock transcription factor, hexose transporter, histone H2A, homocitrate synthase, homoserine dehydrogenase, hydrolase, iron(III) dicitrate-binding protein, isochorismate synthase, isopropylmalate isomerase large subunit, ketol-acid reductoisomerase, L-serine dehydratase, MADS-box transcription factor, major facilitator superfamily transporter protein, malate dehydrogenase, malic enzyme, membrane protein, membrane transport protein, methylglyoxal synthase, mitochondrial dicarboxylate transporter, monothiol glutaredoxin, murein transglycosylase, Na+/K+ transporter, NAD(P)H-quinone oxidoreductase subunit, NADH-quinone oxidoreductase subunit, NADP-dependent malic enzyme, Nucleoside monophosphate phosphohydrolase, O-antigen chain length determinant, oxidoreductase, oxireductase, peptidase, phosphate transporter, phosphoadenosine phosphosulfate reductase , phosphoanhydride phosphorylase, phosphoglycerate kinase, phosphopantetheine adenylyltransferase, photosystem II protein, polygalacturonase, polyphosphate kinase, precorrin methylase, protein kinase, protein phosphatase, protoporphyrin oxidase, purine nucleoside phosphorylase, purine-nucleoside phosphorylase, pyruvate kinase, riboflavin biosynthesis protein, ribosephosphate isomerase, constitutive, RNA binding protein, RNA-binding protein, Sec-independent protein translocase subunit, serine hydroxymethyltransferase, short-chain alcohol dehydrogenase family, sll1032-protein, sll1455-protein, sll1761-protein, superoxide dismutase, thioredoxin, thioredoxin family protein, threonine dehydratase, threonine synthase, transcription factor, transcriptional regulator, transport protein, trehalose-phosphatase, TTC1386-protein, urease subunit, vacuolar ATPase subunit, valine-pyruvate transaminase, YAL013W-protein, ydr183w-protein, ygl237c-protein, YGR193C-protein, yhr006w-protein, YKL038W-protein, YLR224W-protein, zinc finger protein, zinc transporter, and Zm_{—}4842_BE510522-protein are also called “FCRP genes”.

[44434] 8 0211.1.1.6] to [0225.1.1.6] for the disclosure of these paragraphs see [0211.1.1.1] to [0225.1.1.1] above.

[44435] In addition to the sequence mentioned in Table I, application no. 6, column 5 or 8, preferably the coding region thereof, or its homologs or fragments, it may be advantageous additionally to express and/or mutate further genes in the non-human organisms. Especially advantageously, additionally at least one further gene of the biosynthetic pathway of the fine chemical is expressed in the non-human organisms such as plants or microorganisms. It is also possible that the regulation of the natural genes has been modified advantageously so that the gene and/or its gene product is no longer subject to the regulatory mechanisms which exist in the non-human organisms. This leads to an increased synthesis of the respective amino acid since, for example, feedback regulations no longer exist to the same extent or not at all. In addition it might be advantageously to combine the nucleic acids sequences of the invention containing the sequences shown in the respective line in Table I, application no. 6, column 5 or 8, preferably the coding region thereof, or homologs or fragments thereof, with genes which generally support or enhance the growth or yield of the target non-human organisms, for example genes which lead to faster growth rate of non human organism like microorganisms or plants or genes which produce stress-, pathogen-, or herbicide-resistant plants.

[44436] [0227.1.1.6] to [0239.1.1.6] for the disclosure of these paragraphs see [0227.1.1.1] to [0239.1.1.1] above.

[44437] In an embodiment of the present invention the nucleic acid construct of the present invention comprises a nucleic acid molecule as depicted in the respective line in Table I, application no. 6, column 5 or 8, preferably the coding region thereof, a fragment or a homolog thereof, and a plant promoter, such as the Big 35S promoter, the DC3 promoter, the PC Ubi promoter, the LegB4-promoter, the Super promoter, the USP promoter or the like. In another embodiment the nucleic acid construct of the present invention comprises a nucleic acid molecule as depicted in the respective line in Table I, application no. 6, column 5 or 8, preferably the coding region thereof, a fragment or a homolog thereof, and a plant promoter such as, for example, the USP, the LegB4-, the DC3 promoter or the ubiquitin promoter from parsley or other herein mentioned promoters. In a further embodiment the nucleic acid construct of the present invention comprises a nucleic acid molecule as depicted in the respective line in Table I, application no. 6, column 5 or 8, preferably the coding region thereof, a fragment or a homolog thereof, and a plant promoter, such as the Big 35S promoter, the PC Ubi promoter, the Super promoter, the USP promoter or the like. In addition different terminators may advantageously be used in these nucleic acid constructs; examples for transcriptional termination are polyadenylation signals.

[44438] [0241.1.1.6] to [0245.1.1.6] for the disclosure of these paragraphs see [0241.1.1.1] to [0245.1.1.1] above.

[44439] Other preferred sequences for use in operable linkage in gene expression constructs are targeting sequences, which are required for targeting the gene product into specific cell compartments (for a review, see Kermode, Crit. Rev. Plant Sci. 15 (4), 285 (1996) and references cited therein), for example into the vacuole, the nucleus, all types of plastids, such as amyloplasts, chloroplasts, chromoplasts, the extracellular space, the mitochondria, the endoplasmic reticulum, elaioplasts, peroxisomes, glycosomes, and other compartments of cells or extracellular; preferred are sequences, which are involved in targeting to plastids as mentioned above. Sequences, which must be mentioned in this context are, in particular, the signal-peptide- or transit-peptide-encoding sequences which are known per se. For example, plastid-transit-peptide-encoding sequences enable the targeting of the expression product into the plastids of a plant cell. Targeting sequences are also known for eukaryotic and to a lower extent for prokaryotic organisms and can advantageously be operable linked with the nucleic acid molecule of the present invention as shown in Table I, application no. 6, columns 5 and 8, preferably the coding region thereof, or homologs or fragments thereof, and described herein to achieve an expression in one of said compartments or extracellular.

[44440] [0247.1.1.6] to [0266.1.1.6] for the disclosure of these paragraphs see [0247.1.1.1] to [0266.1.1.1] above.

[44441] An embodiment of the invention relates to a vector where the nucleic acid molecule according to the invention is linked operably to regulatory sequences which permit the expression in a prokaryotic or eukaryotic host. A further embodiment of the invention relates to a vector in which a nucleic acid sequence encoding one of the polypeptides shown in the respective line in Table II, application no. 6, columns 5 or 8, or homologs or fragments thereof, is functionally linked to a targeting sequence such as a plastidial or mitochondrial targeting sequence. A further embodiment of the invention relates to a vector in which a nucleic acid sequence encoding one of the polypeptides shown in the respective line in Table II, application no. 6, columns 5 or 8, or homologs or fragments thereof, is functionally linked to (a) regulatory sequence which permit the expression in an organelle, such as plastids or mitochondria, preferably plastids.

[44442] A further embodiment of the invention relates to a vector which comprises a nucleic acid sequence encoding one of the polypeptides shown in the respective line in Table II, application no. 6, columns 5 or 8, or homologs or fragments thereof, but no additional targeting sequence.

[44443] [0268.1.1.6] to [0273.1.1.6] for the disclosure of these paragraphs see [0268.1.1.1] to [0273.1.1.1] above.

[44444] A further object of the invention relates to the use of a nucleic acid construct, e.g. an expression cassette, comprising one or more nucleic acid molecules encoding one or more polypeptides as depicted in the respective line(s) in Table II, application no. 6, columns 5 or 8, or homologs or fragments thereof, or comprising one or more nucleic acid molecules as depicted in the respective line(s) in Table I, application no. 6, columns 5 or 8, preferably the coding region thereof, or homologs or fragments thereof, or comprising a nucleic acid molecule hybridizing therewith for the transformation of a microorganism or a plant cell, plant tissues or a part of a plant

[44445] In doing so, depending on the choice of promoter, the nucleic acid molecules shown in the respective line in Table I, application no. 6, column 5 or 8, preferably the coding region thereof, or homologs or fragments thereof, or the nucleic acid molecules encoding a polypeptide as depicted in the respective line in Table II, application no. 6, column 5 or 8, or homologs or fragments thereof, can be expressed in the whole plant or specifically e.g. in the leaves, in the seeds, the nodules, in roots, in the stem or other parts of the plant. Those transgenic plants overproducing sequences, e.g. as depicted in the respective line in Table I, application no. 6, column 5 or 8, preferably the coding region thereof, or homologs or fragments thereof, the plant cell, plant tissues, plants, the reproductive material thereof, or parts thereof are a further object of the present invention.

[44446] Within the framework of the present invention, the production of the isoleucine, leucine, or valine is due to the generation or over-expression of one or more polypeptides as depicted in the respective line(s) in Table II, application no. 6, column 5 or 8, or homologs or fragments thereof, or encoded by the corresponding nucleic acid molecules as depicted in the respective line(s) in Table I, application no. 6, column 5 or 8, preferably the coding region thereof, or homologs or fragments thereof, in the non-human organism according to the invention, advantageously in the transgenic microorganism or plant according to the invention, at least for the duration of at least one plant generation.

[44447] A constitutive expression of the polypeptide as depicted in the respective line in Table II, application no. 6, column 5 or 8, or homologs or fragments thereof, or encoded by the respective nucleic acid molecule as depicted in the respective line in Table I, application no. 6, column 5 or 8, preferably the coding region thereof, or homologs or fragments thereof, may be advantageous. On the other hand, an inducible expression may also appear desirable. Expression of the polypeptide sequences of the invention can be either directed to the cytosol or to the organelles, such as plastids or mitochondria, preferably the plastids of the host cells, preferably the plant cells, or non-targeted.

[44448] for the disclosure of this paragraph see [0278.1.1.1] above.

[44449] In a further embodiment the invention relates to a transgenic non-human organisms such as transgenic microorganism or transgenic plant comprising a nucleic acid molecule comprising
[44450] [1) a nucleic acid molecule selected from the group consisting of
   [44451] (a) a nucleic acid molecule encoding a polypeptide shown in Table II, application no. 6, column 5 or 8, preferably shown in Table II A, application no. 6, column 5, or in Table II A, application no. 6, column 8, or in Table II B, application no. 6, column 8, or a homolog or a fragment thereof;
   [44452] (b) a nucleic acid molecule shown in Table I, application no. 6, column 5 or 8, preferably shown in Table I A, application no. 6, column 5, or in Table I A, application no. 6, column 8, or in Table I B, application no. 6, column 8, preferably the coding region thereof, or a homolog or a fragment thereof;
   [44453] (c) a nucleic acid molecule, which, as a result of the degeneracy of the genetic code, can be derived from a polypeptide sequence depicted in column 5 or 8 of Table II, application no. 6, preferably shown in Table II A, application no. 6, column 5, or in Table II A, application no. 6, column 8, or in Table II B, application no. 6, column 8;
   [44454] (d) a nucleic acid molecule having at least 30% identity, preferably at least 40%, 50%, 60%, 70%, 75%, 80%, 85%, 90%, 95%, 96%, 97%, 98%, 99%, 99,5%, with the nucleic acid molecule sequence of a polynucleotide comprising the nucleic acid molecule shown in column 5 or 8 of Table I, application no. 6, preferably shown in Table I A, application no. 6, column 5, or in Table I A, application no. 6, column 8, or in Table I B, application no. 6, column 8, preferably the coding region thereof;
   [44455] (e) a nucleic acid molecule encoding a polypeptide having at least 30% identity, preferably at least 40%, 50% 60%, 70%, 75%, 80%, 85%, 90%, 95%, 96%, 97%, 98%, 99%, 99,5%, identity with the amino acid sequence of the polypeptide encoded by the nucleic acid molecule of (a), (b), (c) or (d);
   [44456] (f) a nucleic acid molecule which hybridizes with a nucleic acid molecule of (a), (b), (c), (d) or (e) under stringent hybridization conditions;
   [44457] (g) a nucleic acid molecule encoding a polypeptide which can be isolated with the aid of monoclonal or polyclonal antibodies made against a polypeptide encoded by one of the nucleic acid molecules of (a), (b), (c), (d), (e) or (f);
   [44458] (h) a nucleic acid molecule encoding a polypeptide comprising the consensus sequence or one or more polypeptide motifs as shown in column 8 of Table IV, application no. 6;
   [44459] (i) a nucleic acid molecule encoding a polypeptide having the activity represented by a respective protein as depicted in column 5 of Table II, application no. 6;
   [44460] (j) a nucleic acid molecule comprising a polynucleotide which is obtained by amplifying a cDNA library or a genomic library using the primers in Table III, application no. 6, column 8;
   [44461] and
   [44462] (k) nucleic acid molecule which is obtainable by screening a suitable nucleic acid library, especially a cDNA library and/or a genomic library, under stringent hybridization conditions with a probe comprising one of the sequences of the nucleic acid molecule of (a), (b), (c), (d), (e), (f), (g), (h), (i) or (j) or with a fragment of at least 15 nt, preferably 20 nt, 30 nt, 50 nt, 100 nt, 200 nt,500 nt, 1000 nt, 1500 nt, 2000 nt or 3000 nt of the nucleic acid molecule characterized in (a), (b), (c), (d), (e), (f), (g), (h), (i) or (j);
   [44463] or a nucleic acid molecule comprising a sequence which is complementary thereto;
      and, if desired
[44464] 2) nucleic acid molecule encoding a transit peptide, preferably encoding a plastidal transit peptide or a mitochondrial transit peptide;
   which are operable linked;]
   or comprising an expression cassette comprising
[44465] [0) a promoter, preferably a promoter selected from the group consisting of Big35S, PCUbi, Super and USP; and
[44466] 1) a nucleic acid molecule selected from the group consisting of
   [44467] (a) a nucleic acid molecule encoding a polypeptide shown in Table II, application no. 6, column 5 or 8, preferably shown in Table II A, application no. 6, column 5, or in Table II A, application no. 6, column 8, or in Table II B, application no. 6, column 8, or a homolog or a fragment thereof;
   [44468] (b) a nucleic acid molecule shown in Table I, application no. 6, column 5 or 8, preferably shown in Table I A, application no. 6, column 5, or in Table I A, application no. 6, column 8, or in Table I B, application no. 6, column 8, preferably the coding region thereof, or a homolog or a fragment thereof;
   [44469] (c) a nucleic acid molecule, which, as a result of the degeneracy of the genetic code, can be derived from a polypeptide sequence depicted in column 5 or 8 of Table II, application no. 6, preferably shown in Table II A, application no. 6, column 5, or in Table II A, application no. 6, column 8, or in Table II B, application no. 6, column 8;
   [44470] (d) a nucleic acid molecule having at least 30% identity, preferably at least 40%, 50%, 60%, 70%, 75%, 80%, 85%, 90%, 95%, 96%, 97%, 98%, 99%, 99,5%, with the nucleic acid molecule sequence of a polynucleotide comprising the nucleic acid molecule shown in column 5 or 8 of Table I, application no. 6, preferably shown in Table I A, application no. 6, column 5, or in Table I A, application no. 6, column 8, or in Table I B, application no. 6, column 8, preferably the coding region thereof;
   [44471] (e) a nucleic acid molecule encoding a polypeptide having at least 30% identity, preferably at least 40%, 50% 60%, 70%, 75%, 80%, 85%, 90%, 95%, 96%, 97%, 98%, 99%, 99,5%, identity with the amino acid sequence of the polypeptide encoded by the nucleic acid molecule of (a), (b), (c) or (d);
   [44472] (f) a nucleic acid molecule which hybridizes with a nucleic acid molecule of (a), (b), (c), (d) or (e) under stringent hybridization conditions;
   [44473] (g) a nucleic acid molecule encoding a polypeptide which can be isolated with the aid of monoclonal or polyclonal antibodies made against a polypeptide encoded by one of the nucleic acid molecules of (a), (b), (c), (d), (e) or (f);
   [44474] (h) a nucleic acid molecule encoding a polypeptide comprising the consensus sequence or one or more polypeptide motifs as shown in column 8 of Table IV, application no. 6;
   [44475] (i) a nucleic acid molecule encoding a polypeptide having the activity represented by a respective protein as depicted in column 5 of Table II, application no. 6;
   [44476] (j) a nucleic acid molecule comprising a polynucleotide which is obtained by amplifying a cDNA library or a genomic library using the primers in Table III, application no. 6, column 8;
   [44477] and
   [44478] (k) nucleic acid molecule which is obtainable by screening a suitable nucleic acid library, especially a cDNA library and/or a genomic library, under stringent hybridization conditions with a probe comprising one of the sequences of the nucleic acid molecule of (a), (b), (c), (d), (e), (f), (g), (h), (i) or (j) or with a fragment of at least 15 nt, preferably 20 nt, 30 nt, 50 nt, 100 nt, 200 nt,500 nt, 1000 nt, 1500 nt, 2000 nt or 3000 nt of the nucleic acid molecule characterized in (a), (b), (c), (d), (e), (f), (g), (h), (i) or (j);
   [44479] or a nucleic acid molecule comprising a sequence which is complementary thereto;
      and, if desired
[44480] 2) nucleic acid molecule encoding a transit peptide, preferably encoding a plastidal transit peptide or a mitochondrial transit peptide;
   which are operable linked;]
   or comprising or being transformed by a vector comprising
[44481] [1) a nucleic acid molecule selected from the group consisting of
   [44482] (a) a nucleic acid molecule encoding a polypeptide shown in Table II, application no. 6, column 5 or 8, preferably shown in Table II A, application no. 6, column 5, or in Table II A, application no. 6, column 8, or in Table II B, application no. 6, column 8, or a homolog or a fragment thereof;
   [44483] (b) a nucleic acid molecule shown in Table I, application no. 6, column 5 or 8, preferably shown in Table I A, application no. 6, column 5, or in Table I A, application no. 6, column 8, or in Table I B, application no. 6, column 8, preferably the coding region thereof, or a homolog or a fragment thereof;
   [44484] (c) a nucleic acid molecule, which, as a result of the degeneracy of the genetic code, can be derived from a polypeptide sequence depicted in column 5 or 8 of Table II, application no. 6, preferably shown in Table II A, application no. 6, column 5, or in Table II A, application no. 6, column 8, or in Table II B, application no. 6, column 8;
   [44485] (d) a nucleic acid molecule having at least 30% identity, preferably at least 40%, 50%, 60%, 70%, 75%, 80%, 85%, 90%, 95%, 96%, 97%, 98%, 99%, 99,5%, with the nucleic acid molecule sequence of a polynucleotide comprising the nucleic acid molecule shown in column 5 or 8 of Table I, application no. 6, preferably shown in Table I A, application no. 6, column 5, or in Table I A, application no. 6, column 8, or in Table I B, application no. 6, column 8, preferably the coding region thereof;
   [44486] (e) a nucleic acid molecule encoding a polypeptide having at least 30% identity, preferably at least 40%, 50% 60%, 70%, 75%, 80%, 85%, 90%, 95%, 96%, 97%, 98%, 99%, 99,5%, identity with the amino acid sequence of the polypeptide encoded by the nucleic acid molecule of (a), (b), (c) or (d);
   [44487] (f) a nucleic acid molecule which hybridizes with a nucleic acid molecule of (a), (b), (c), (d) or (e) under stringent hybridization conditions;
   [44488] (g) a nucleic acid molecule encoding a polypeptide which can be isolated with the aid of monoclonal or polyclonal antibodies made against a polypeptide encoded by one of the nucleic acid molecules of (a), (b), (c), (d), (e) or (f);
   [44489] (h) a nucleic acid molecule encoding a polypeptide comprising the consensus sequence or one or more polypeptide motifs as shown in column 8 of Table IV, application no. 6;
   [44490] (i) a nucleic acid molecule encoding a polypeptide having the activity represented by a respective protein as depicted in column 5 of Table II, application no. 6;
   [44491] (j) a nucleic acid molecule comprising a polynucleotide which is obtained by amplifying a cDNA library or a genomic library using the primers in Table III, application no. 6, column 8;
   [44492] and
   [44493] (k) nucleic acid molecule which is obtainable by screening a suitable nucleic acid library, especially a cDNA library and/or a genomic library, under stringent hybridization conditions with a probe comprising one of the sequences of the nucleic acid molecule of (a), (b), (c), (d), (e), (f), (g), (h), (i) or (j) or with a fragment of at least 15 nt, preferably 20 nt, 30 nt, 50 nt, 100 nt, 200 nt,500 nt, 1000 nt, 1500 nt, 2000 nt or 3000 nt of the nucleic acid molecule characterized in (a), (b), (c), (d), (e), (f), (g), (h), (i) or (j);
   [44494] or a nucleic acid molecule comprising a sequence which is complementary thereto;]
      as well as respective transgenic cells, tissue, parts of such non-human organism, e.g. plant cells, plant tissue, part of plants, like leaves, roots, stems, blossoms, seeds, fruits, pollen and the like.
      (All the references to Tables I to IV are references to the corresponding lines of Tables I to IV.)

[44495] In a preferred embodiment of said transgenic non-human organism said nucleic acid molecule according to 1 (a), (b), (c), (d), (e), (f), (g), (h), (i), (j) or (k) encodes a polypeptide which has the activity of the respective polypeptide represented by a protein comprising a polypeptide as depicted in the respective line in column 5 of Table II, application no. 6.

[44496] In another preferred embodiment of said transgenic non-human organism said nucleic acid molecule according to 1 (a), (b), (c), (d), (e), (f), (g), (h), (i), (j) or (k) confers a generation or an increase of the respective fine chemical in a non-human organism or a part thereof as compared to a corresponding wild-type non-human organism or part thereof.

[44497] In another preferred embodiment of said transgenic non-human organism said nucleic acid molecule according to 1 (a), (b), (c), (d), (e), (f), (g), (h), (i), (j) or (k) encodes a polypeptide which has the activity of the respective polypeptide represented by a protein as depicted in the respective line in column 5 of Table II application no. 6 and confers a generation or an increase of the respective fine chemical in a non-human organism or a part thereof as compared to a corresponding wild-type non-human organism or part thereof.

[44498] In another embodiment of said transgenic non-human organism the expression cassette comprises 2) a nucleic acid molecule encoding a transit peptide, preferably encoding a plastidal transit peptide, especially in case in column 6 of Table I, application no. 6, in the same line as of the respective nucleic acid molecule according to 1) “plastidic” is depicted, or encoding a mitochondrial transit peptide, especially in case in column 6 of Table I, application no. 6, in the same line as of the respective nucleic acid molecule according to 1) “mitochondrial” is depicted.

[44499] In another embodiment of said transgenic non-human organism the expression cassette does not comprise 2) a nucleic acid molecule encoding a transit peptide, especially in case in column 6 of Table I, application no. 6, in the same line as of the respective nucleic acid molecule according to 1) “non-targeted” is depicted.

[44500] In another embodiment of said transgenic non-human organism said vector comprises beneath said nucleic acid molecule according to 1 (a), (b), (c), (d), (e), (f), (g), (h), (i), (j) or (k), a promoter, preferably a promoter selected from the group consisting of Big35S, PCUbi, Super and USP, which are operable linked.

[44501] In a preferred embodiment of said transgenic non-human organism said vector comprises beneath said nucleic acid molecule according to 1 (a), (b), (c), (d), (e), (f), (g), (h), (i), (j) or (k), a promoter, preferably a promoter selected from the group consisting of Big35S, PCUbi, Super and USP, which are operable linked; and said nucleic acid molecule according to 1 (a), (b), (c), (d), (e), (f), (g), (h), (i), (j) or (k) encodes a polypeptide which has the activity of the respective polypeptide represented by a protein comprising a polypeptide as depicted in the respective line in column 5 of Table II, application no. 6.

[44502] In another preferred embodiment of said transgenic non-human organism said vector comprises beneath said nucleic acid molecule according to 1 (a), (b), (c), (d), (e), (f), (g), (h), (i), (j) or (k), a promoter, preferably a promoter selected from the group consisting of Big35S, PCUbi, Super and USP, which are operable linked; and said nucleic acid molecule according to 1 (a), (b), (c), (d), (e), (f), (g), (h), (i), (j) or (k) confers a generation or an increase of the respective fine chemical in a non-human organism or a part thereof as compared to a corresponding wild-type non-human organism or part thereof.

[44503] In another preferred embodiment of said transgenic non-human organism said vector comprises beneath said nucleic acid molecule according to 1 (a), (b), (c), (d), (e), (f), (g), (h), (i), (j) or (k), a promoter, preferably a promoter selected from the group consisting of Big35S, PCUbi, Super and USP, which are operable linked; and said nucleic acid molecule according to 1 (a), (b), (c), (d), (e), (f), (g), (h), (i), (j) or (k) encodes a polypeptide which has the activity of the respective polypeptide represented by a protein as depicted in the respective line in column 5 of Table II, application no. 6, and confers a generation or an increase of the respective fine chemical in a non-human organism or a part thereof as compared to a corresponding wild-type non-human organism or part thereof.

[44504] In another embodiment of said transgenic non-human organism said vector comprises beneath said nucleic acid molecule according to 1 (a), (b), (c), (d), (e), (f), (g), (h), (i), (j) or (k), a nucleic acid molecule encoding a transit peptide, preferably encoding a plastidal transit peptide, especially in case in column 6 of Table I, application no. 6, in the same line as of the respective nucleic acid molecule according to 1) “plastidic” is depicted, or encoding a mitochondrial transit peptide, especially in case in column 6 of Table I, application no. 6, in the same line as of the respective nucleic acid molecule according to 1) “mitochondrial” is depicted, which are operable linked.

[44505] In another embodiment of said transgenic non-human organism said vector does not comprise beneath said nucleic acid molecule according to 1 (a), (b), (c), (d), (e), (f), (g), (h), (i), (j) or (k), a nucleic acid molecule encoding a transit peptide in case in column 6 of Table I, application no. 6, in the same line as of the respective nucleic acid molecule according to 1) “non-targeted” is depicted, which are operable linked.

[44506] In another embodiment of said transgenic non-human organism said vector comprises beneath said nucleic acid molecule according to 1 (a), (b), (c), (d), (e), (f), (g), (h), (i), (j) or (k), and a promoter, preferably a promoter selected from the group consisting of Big35S, PCUbi, Super and USP; a nucleic acid molecule encoding a transit peptide, preferably encoding a plastidal transit peptide, especially in case in column 6 of Table I, application no. 6, in the same line as of the respective nucleic acid molecule according to 1) “plastidic” is depicted, or encoding a mitochondrial transit peptide, especially in case in column 6 of Table I, application no. 6, in the same line as of the respective nucleic acid molecule according to 1) “mitochondrial” is depicted, which are operable linked.

[44507] In another embodiment of said transgenic non-human organism said vector does not comprise beneath said nucleic acid molecule according to 1 (a), (b), (c), (d), (e), (f), (g), (h), (i), (j) or (k), and a promoter, preferably a promoter selected from the group consisting of Big35S, PCUbi, Super and USP; a nucleic acid molecule encoding a transit peptide, especially in case in column 6 of Table I, application no. 6, in the same line as of the respective nucleic acid molecule according to 1) “non-targeted” is depicted, which are operable linked.

[44508] In another embodiment of said transgenic non-human organism said vector comprises beneath said nucleic acid molecule according to 1 (a), (b), (c), (d), (e), (f), (g), (h), (i), (j) or (k), and a promoter, preferably a promoter selected from the group consisting of Big35S, PCUbi, Super and USP; a nucleic acid molecule encoding a transit peptide, preferably encoding a plastidal transit peptide, especially in case in column 6 of Table I, application no. 6, in the same line as of the respective nucleic acid molecule according to 1) “plastidic” is depicted, or encoding a mitochondrial transit peptide, especially in case in column 6 of Table I, application no. 6, in the same line as of the respective nucleic acid molecule according to 1) “mitochondrial” is depicted, which are operable linked; and wherein said nucleic acid molecule according to 1 (a), (b), (c), (d), (e), (f), (g), (h), (i), (j) or (k) encodes a polypeptide which has the activity of the respective polypeptide represented by a protein comprising a polypeptide as depicted in the respective line in column 5 of Table II, application no. 6.

[44509] In another embodiment of said transgenic non-human organism said vector does not comprise beneath said nucleic acid molecule according to 1 (a), (b), (c), (d), (e), (f), (g), (h), (i), (j) or (k), and a promoter, preferably a promoter selected from the group consisting of Big35S, PCUbi, Super and USP; a nucleic acid molecule encoding a transit peptide, especially in case in column 6 of Table I, application no. 6, in the same line as of the respective nucleic acid molecule according to 1) “non-targeted” is depicted, which are operable linked; and wherein said nucleic acid molecule according to 1 (a), (b), (c), (d), (e), (f), (g), (h), (i), (j) or (k) encodes a polypeptide which has the activity of the respective polypeptide represented by a protein comprising a polypeptide as depicted in the respective line in column 5 of Table II, application no. 6.

[44510] In another embodiment of said transgenic non-human organism said vector comprises beneath said nucleic acid molecule according to 1 (a), (b), (c), (d), (e), (f), (g), (h), (i), (j) or (k), and a promoter, preferably a promoter selected from the group consisting of Big35S, PCUbi, Super and USP; a nucleic acid molecule encoding a transit peptide, preferably encoding a plastidal transit peptide, especially in case in column 6 of Table I, application no. 6, in the same line as of the respective nucleic acid molecule according to 1) “plastidic” is depicted, or encoding a mitochondrial transit peptide, especially in case in column 6 of Table I, application no. 6, in the same line as of the respective nucleic acid molecule according to 1) “mitochondrial” is depicted, which are operable linked; and wherein said nucleic acid molecule according to 1 (a), (b), (c), (d), (e), (f), (g), (h), (i), (j) or (k) confers a generation or an increase of the respective fine chemical in a non-human organism or a part thereof as compared to a corresponding wild-type non-human organism or part thereof.

[44511] In another embodiment of said transgenic non-human organism said vector does not comprise beneath said nucleic acid molecule according to 1 (a), (b), (c), (d), (e), (f), (g), (h), (i), (j) or (k), and a promoter, preferably a promoter selected from the group consisting of Big35S, PCUbi, Super and USP; a nucleic acid molecule encoding a transit peptide, especially in case in column 6 of Table I, application no. 6, in the same line as of the respective nucleic acid molecule according to 1) “non-targeted” is depicted, which are operable linked; and wherein said nucleic acid molecule according to 1 (a), (b), (c), (d), (e), (f), (g), (h), (i), (j) or (k) confers a generation or an increase of the respective fine chemical in a non-human organism or a part thereof as compared to a corresponding wild-type non-human organism or part thereof.

[44512] In another embodiment of said transgenic non-human organism said vector comprises beneath said nucleic acid molecule according to 1 (a), (b), (c), (d), (e), (f), (g), (h), (i), (j) or (k), and a promoter, preferably a promoter selected from the group consisting of Big35S, PCUbi, Super and USP; a nucleic acid molecule encoding a transit peptide, preferably encoding a plastidal transit peptide, especially in case in column 6 of Table I, application no. 6, in the same line as of the respective nucleic acid molecule according to 1) “plastidic” is depicted, or encoding a mitochondrial transit peptide, especially in case in column 6 of Table I, application no. 6, in the same line as of the respective nucleic acid molecule according to 1) “mitochondrial” is depicted, which are operable linked; and wherein said nucleic acid molecule according to 1 (a), (b), (c), (d), (e), (f), (g), (h), (i), (j) or (k) encodes a polypeptide which has the activity of the respective polypeptide represented by a protein as depicted in the respective line in column 5 of Table II application no. 6 and confers a generation or an increase of the respective fine chemical in a non-human organism or a part thereof as compared to a corresponding wild-type non-human organism or part thereof.

[44513] In another embodiment of said transgenic non-human organism said vector does not comprise beneath said nucleic acid molecule according to 1 (a), (b), (c), (d), (e), (f), (g), (h), (i), (j) or (k), and a promoter, preferably a promoter selected from the group consisting of Big35S, PCUbi, Super and USP; a nucleic acid molecule encoding a transit peptide, especially in case in column 6 of Table I, application no. 6, in the same line as of the respective nucleic acid molecule according to 1) “non-targeted” is depicted, which are operable linked; and wherein said nucleic acid molecule according to 1 (a), (b), (c), (d), (e), (f), (g), (h), (i), (j) or (k) encodes a polypeptide which has the activity of the respective polypeptide represented by a protein as depicted in the respective line in column 5 of Table II application no. 6 (in the same line) and confers a generation or an increase of the respective fine chemical in a non-human organism or a part thereof as compared to a corresponding wild-type non-human organism or part thereof.

[44514] In a preferred embodiment of said transgenic non-human organism said nucleic acid molecule according to 1 (a), (b), (c), (d), (e), (f), (g), (h), (i), (j) or (k), said promoter and optionally said nucleic acid molecule encoding a transit peptide are encompassed in an expression cassette in said vector. Accordingly an embodiment the invention provides a non-human organism comprising or being transformed by a vector comprising an expression cassette comprising said nucleic acid molecule according to 1 (a), (b), (c), (d), (e), (f), (g), (h), (i), (j) or (k), said promoter and optionally said a nucleic acid molecule encoding a transit peptide, operable linked. Said expression cassette may encompass a terminator, too.

[44515] In a further embodiment the invention relates to a transgenic non-human organisms such as transgenic microorganism or transgenic plant comprising a nucleic acid molecule comprising
[44516] [1) a nucleic acid molecule selected from the group consisting of
   [44517] (a) a nucleic acid molecule encoding a polypeptide shown in Table II, application no. 6, column 5 or 8, preferably shown in Table II A, application no. 6, column 5, or in Table II A, application no. 6, column 8, or in Table II B, application no. 6, column 8, or a homolog or a fragment thereof;
   [44518] (b) a nucleic acid molecule shown in Table I, application no. 6, column 5 or 8, preferably shown in Table I A, application no. 6, column 5, or in Table I A, application no. 6, column 8, or in Table I B, application no. 6, column 8, preferably the coding region thereof, or a homolog or a fragment thereof;
   [44519] (c) a nucleic acid molecule, which, as a result of the degeneracy of the genetic code, can be derived from a polypeptide sequence depicted in column 5 or 8 of Table II, application no. 6, preferably shown in Table II A, application no. 6, column 5, or in Table II A, application no. 6, column 8, or in Table II B, application no. 6, column 8;
   [44520] (d) a nucleic acid molecule having at least 30% identity, preferably at least 40%, 50%, 60%, 70%, 75%, 80%, 85%, 90%, 95%, 96%, 97%, 98%, 99%, 99,5%, with the nucleic acid molecule sequence of a polynucleotide comprising the nucleic acid molecule shown in column 5 or 8 of Table I, application no. 6, preferably shown in Table I A, application no. 6, column 5, or in Table I A, application no. 6, column 8, or in Table I B, application no. 6, column 8, preferably the coding region thereof;
   [44521] (e) a nucleic acid molecule encoding a polypeptide having at least 30% identity, preferably at least 40%, 50% 60%, 70%, 75%, 80%, 85%, 90%, 95%, 96%, 97%, 98%, 99%, 99,5%, identity with the amino acid sequence of the polypeptide encoded by the nucleic acid molecule of (a), (b), (c) or (d);
   [44522] (f) a nucleic acid molecule which hybridizes with a nucleic acid molecule of (a), (b), (c), (d) or (e) under stringent hybridization conditions;
   [44523] (g) a nucleic acid molecule encoding a polypeptide which can be isolated with the aid of monoclonal or polyclonal antibodies made against a polypeptide encoded by one of the nucleic acid molecules of (a), (b), (c), (d), (e) or (f);
   [44524] (h) a nucleic acid molecule encoding a polypeptide comprising the consensus sequence or one or more polypeptide motifs as shown in column 8 of Table IV, application no. 6;
   [44525] (i) a nucleic acid molecule encoding a polypeptide having the activity represented by a respective protein as depicted in column 5 of Table II, application no. 6;
   [44526] (j) a nucleic acid molecule comprising a polynucleotide which is obtained by amplifying a cDNA library or a genomic library using the primers in Table III, application no. 6, column 8;
   [44527] and
   [44528] (k) nucleic acid molecule which is obtainable by screening a suitable nucleic acid library, especially a cDNA library and/or a genomic library, under stringent hybridization conditions with a probe comprising one of the sequences of the nucleic acid molecule of (a), (b), (c), (d), (e), (f), (g), (h), (i) or (j) or with a fragment of at least 15 nt, preferably 20 nt, 30 nt, 50 nt, 100 nt, 200 nt,500 nt, 1000 nt, 1500 nt, 2000 nt or 3000 nt of the nucleic acid molecule characterized in (a), (b), (c), (d), (e), (f), (g), (h), (i) or (j);
   [44529] or a nucleic acid molecule comprising a sequence which is complementary thereto;
      and, if desired
[44530] 2) nucleic acid molecule encoding a transit peptide, preferably encoding a plastidal transit peptide or a mitochondrial transit peptide;
   [44531] which are operable linked;]
      or comprising an expression cassette comprising
[44532] [0) a promoter, preferably a promoter selected from the group consisting of Big35S, PCUbi, Super and USP; and
[44533] 1) a nucleic acid molecule selected from the group consisting of
   [44534] (a) a nucleic acid molecule encoding a polypeptide shown in Table II, application no. 6, column 5 or 8, preferably shown in Table II A, application no. 6, column 5, or in Table II A, application no. 6, column 8, or in Table II B, application no. 6, column 8, or a homolog or a fragment thereof;
   [44535] (b) a nucleic acid molecule shown in Table I, application no. 6, column 5 or 8, preferably shown in Table I A, application no. 6, column 5, or in Table I A, application no. 6, column 8, or in Table I B, application no. 6, column 8, preferably the coding region thereof, or a homolog or a fragment thereof;
   [44536] (c) a nucleic acid molecule, which, as a result of the degeneracy of the genetic code, can be derived from a polypeptide sequence depicted in column 5 or 8 of Table II, application no. 6, preferably shown in Table II A, application no. 6, column 5, or in Table II A, application no. 6, column 8, or in Table II B, application no. 6, column 8;
   [44537] (d) a nucleic acid molecule having at least 30% identity, preferably at least 40%, 50%, 60%, 70%, 75%, 80%, 85%, 90%, 95%, 96%, 97%, 98%, 99%, 99,5%, with the nucleic acid molecule sequence of a polynucleotide comprising the nucleic acid molecule shown in column 5 or 8 of Table I, application no. 6, preferably shown in Table I A, application no. 6, column 5, or in Table I A, application no. 6, column 8, or in Table I B, application no. 6, column 8, preferably the coding region thereof;
   [44538] (e) a nucleic acid molecule encoding a polypeptide having at least 30% identity, preferably at least 40%, 50% 60%, 70%, 75%, 80%, 85%, 90%, 95%, 96%, 97%, 98%, 99%, 99,5%, identity with the amino acid sequence of the polypeptide encoded by the nucleic acid molecule of (a), (b), (c) or (d);
   [44539] (f) a nucleic acid molecule which hybridizes with a nucleic acid molecule of (a), (b), (c), (d) or (e) under stringent hybridization conditions;
   [44540] (g) a nucleic acid molecule encoding a polypeptide which can be isolated with the aid of monoclonal or polyclonal antibodies made against a polypeptide encoded by one of the nucleic acid molecules of (a), (b), (c), (d), (e) or (f);
   [44541] (h) a nucleic acid molecule encoding a polypeptide comprising the consensus sequence or one or more polypeptide motifs as shown in column 8 of Table IV, application no. 6;
   [44542] (i) a nucleic acid molecule encoding a polypeptide having the activity represented by a respective protein as depicted in column 5 of Table II, application no. 6;
   [44543] (j) a nucleic acid molecule comprising a polynucleotide which is obtained by amplifying a cDNA library or a genomic library using the primers in Table III, application no. 6, column 8;
   [44544] and
   [44545] (k) nucleic acid molecule which is obtainable by screening a suitable nucleic acid library, especially a cDNA library and/or a genomic library, under stringent hybridization conditions with a probe comprising one of the sequences of the nucleic acid molecule of (a), (b), (c), (d), (e), (f), (g), (h), (i) or (j) or with a fragment of at least 15 nt, preferably 20 nt, 30 nt, 50 nt, 100 nt, 200 nt,500 nt, 1000 nt, 1500 nt, 2000 nt or 3000 nt of the nucleic acid molecule characterized in (a), (b), (c), (d), (e), (f), (g), (h), (i) or (j);
   [44546] or a nucleic acid molecule comprising a sequence which is complementary thereto;]
      and, if desired
[44547] 2) nucleic acid molecule encoding a transit peptide, preferably encoding a plastidal transit peptide or a mitochondrial transit peptide;
   [44548] which are operable linked;]
      or comprising or being transformed by a vector comprising
[44549] [1) a nucleic acid molecule selected from the group consisting of
   [44550] (a) a nucleic acid molecule encoding a polypeptide shown in Table II, application no. 6, column 5 or 8, preferably shown in Table II A, application no. 6, column 5, or in Table II A, application no. 6, column 8, or in Table II B, application no. 6, column 8, or a homolog or a fragment thereof;
   [44551] (b) a nucleic acid molecule shown in Table I, application no. 6, column 5 or 8, preferably shown in Table I A, application no. 6, column 5, or in Table I A, application no. 6, column 8, or in Table I B, application no. 6, column 8, preferably the coding region thereof, or a homolog or a fragment thereof;
   [44552] (c) a nucleic acid molecule, which, as a result of the degeneracy of the genetic code, can be derived from a polypeptide sequence depicted in column 5 or 8 of Table II, application no. 6, preferably shown in Table II A, application no. 6, column 5, or in Table II A, application no. 6, column 8, or in Table II B, application no. 6, column 8;
   [44553] (d) a nucleic acid molecule having at least 30% identity, preferably at least 40%, 50%, 60%, 70%, 75%, 80%, 85%, 90%, 95%, 96%, 97%, 98%, 99%, 99,5%, with the nucleic acid molecule sequence of a polynucleotide comprising the nucleic acid molecule shown in column 5 or 8 of Table I, application no. 6, preferably shown in Table I A, application no. 6, column 5, or in Table I A, application no. 6, column 8, or in Table I B, application no. 6, column 8, preferably the coding region thereof;
   [44554] (e) a nucleic acid molecule encoding a polypeptide having at least 30% identity, preferably at least 40%, 50% 60%, 70%, 75%, 80%, 85%, 90%, 95%, 96%, 97%, 98%, 99%, 99,5%, identity with the amino acid sequence of the polypeptide encoded by the nucleic acid molecule of (a), (b), (c) or (d);
   [44555] (f) a nucleic acid molecule which hybridizes with a nucleic acid molecule of (a), (b), (c), (d) or (e) under stringent hybridization conditions;
   [44556] (g) a nucleic acid molecule encoding a polypeptide which can be isolated with the aid of monoclonal or polyclonal antibodies made against a polypeptide encoded by one of the nucleic acid molecules of (a), (b), (c), (d), (e) or (f);
   [44557] (h) a nucleic acid molecule encoding a polypeptide comprising the consensus sequence or one or more polypeptide motifs as shown in column 8 of Table IV, application no. 6;
   [44558] (i) a nucleic acid molecule encoding a polypeptide having the activity represented by a respective protein as depicted in column 5 of Table II, application no. 6;
   [44559] (j) a nucleic acid molecule comprising a polynucleotide which is obtained by amplifying a cDNA library or a genomic library using the primers in Table III, application no. 6, column 8;
   [44560] and
   [44561] (k) nucleic acid molecule which is obtainable by screening a suitable nucleic acid library, especially a cDNA library and/or a genomic library, under stringent hybridization conditions with a probe comprising one of the sequences of the nucleic acid molecule of (a), (b), (c), (d), (e), (f), (g), (h), (i) or (j) or with a fragment of at least 15 nt, preferably 20 nt, 30 nt, 50 nt, 100 nt, 200 nt,500 nt, 1000 nt, 1500 nt, 2000 nt or 3000 nt of the nucleic acid molecule characterized in (a), (b), (c), (d), (e), (f), (g), (h), (i) or (j);
   [44562] or a nucleic acid molecule comprising a sequence which is complementary thereto;]
      whereby, preferably, the nucleic acid molecule according to 1 (a), (b), (c), (d), (e), (f), (g), (h), (i), (j) or (k) distinguishes over the sequence depicted in Table I A and/or I B, application no. 6, column 5 or 8, or the coding regions thereof, by one or more nucleotides (especially but not exceeding 5%, preferably 4%, 3%, 2%, 1%, 0.5%, 0.2% or 0.1%). In an embodiment, the nucleic acid molecule of the invention does not consist of the sequence shown in Table I A and/or I B, application no. 6, column 5 or 8, or the coding region thereof. In another embodiment, the nucleic acid molecule of the present invention, preferably the coding region thereof, is at least 30%, 40%, 50%, 60%, 70%, 80%, 90%, 95% identical but less than 100%, 99.999%, 99.99%, 99.9%, 99%, 98%, 97%, 96% or 95% identical to the sequence shown in Table I A and/or I B, application no. 6, column 5 or 8, or the coding region thereof, respectively. In a further embodiment the nucleic acid molecule does not encode the polypeptide sequence shown in Table II A and/or II B, application no. 6, column 5 or 8 but homologs thereof. Accordingly, in one embodiment, the nucleic acid molecule of the present invention encodes in one embodiment a polypeptide which differs at least in one or more amino acids (especially but not exceeding 5%, preferably 4%, 3%, 2%, 1%, 0.5%, 0.2% or 0.1%) from the polypeptide shown in Table II, application no. 6, column 5 or 8 and does not encode a protein of the sequence shown in Table II A and/or II B, application no. 6, column 5 or 8. Accordingly, in one embodiment, the protein encoded by a sequence of a nucleic acid according to 1 (a), (b), (c), (d), (e), (f), (g), (h), (i), (j) or (k) does not consist of the sequence shown in Table I A and/or I B, application no. 6, column 5 or 8, or the coding region thereof. In a further embodiment, the protein of the present invention is at least 30%, 40%, 50%, 60%, 70%, 80%, 90%, 95% identical to protein sequence depicted in Table II A and/or II B, application no. 6, column 5 or 8 but less than 100%, preferably less than 99.999%, 99.99%, 99.9%, 99%, 98%, 97%, 96% or 95% identical to the sequence shown in Table II A and/or II B, application no. 6, column 5 or 8;
      as well as respective transgenic cells, tissue, parts of such non-human organism, e.g. plant cells, plant tissue, part of plants, like leaves, roots, stems, blossoms, seeds, fruits, pollen and the like.
      (All the references to Tables I to IV are references to the corresponding lines of Tables I to IV.)

[44563] In a preferred embodiment of said transgenic non-human organism said nucleic acid molecule according to 1 (a), (b), (c), (d), (e), (f), (g), (h), (i), (j) or (k) encodes a poly peptide which has the activity of the respective polypeptide represented by a protein comprising a polypeptide as depicted in the respective line in column 5 of Table II, application no. 6.

[44564] In another preferred embodiment of said transgenic non-human organism said nucleic acid molecule according to 1 (a), (b), (c), (d), (e), (f), (g), (h), (i), (j) or (k) confers a generation or an increase of the respective fine chemical in a non-human organism or a part thereof as compared to a corresponding wild-type non-human organism or part thereof.

[44565] In another preferred embodiment of said transgenic non-human organism said nucleic acid molecule according to 1 (a), (b), (c), (d), (e), (f), (g), (h), (i), (j) or (k) encodes a polypeptide which has the activity of the respective polypeptide represented by a protein as depicted in the respective line in column 5 of Table II application no. 6 and confers a generation or an increase of the respective fine chemical in a non-human organism or a part thereof as compared to a corresponding wild-type non-human organism or part thereof.

[44566] In another embodiment of said transgenic non-human organism the expression cassette comprises 2) a nucleic acid molecule encoding a transit peptide, preferably encoding a plastidal transit peptide, especially in case in column 6 of Table I, application no. 6, in the same line as of the respective nucleic acid molecule according to 1) “plastidic” is depicted, or encoding a mitochondrial transit peptide, especially in case in column 6 of Table I, application no. 6, in the same line as of the respective nucleic acid molecule according to 1) “mitochondrial” is depicted.

[44567] In another embodiment thereof the expression cassette does not comprise 2) a nucleic acid molecule encoding a transit peptide, especially in case in column 6 of Table I, application no. 6, in the same line as of the respective nucleic acid molecule according to 1) “non-targeted” is depicted.

[44568] In another embodiment of said transgenic non-human organism said vector comprises beneath said nucleic acid molecule according to 1 (a), (b), (c), (d), (e), (f), (g), (h), (i), (j) or (k), a promoter, preferably a promoter selected from the group consisting of Big35S, PCUbi, Super and USP, which are operable linked.

[44569] In a preferred embodiment of said transgenic non-human organism said vector comprises beneath said nucleic acid molecule according to 1 (a), (b), (c), (d), (e), (f), (g), (h), (i), (j) or (k), a promoter, preferably a promoter selected from the group consisting of Big35S, PCUbi, Super and USP, which are operable linked; and said nucleic acid molecule according to 1 (a), (b), (c), (d), (e), (f), (g), (h), (i), (j) or (k) encodes a polypeptide which has the activity of the respective polypeptide represented by a protein comprising a polypeptide as depicted in the respective line in column 5 of Table II, application no. 6.

[44570] In another preferred embodiment of said transgenic non-human organism said vector comprises beneath said nucleic acid molecule according to 1 (a), (b), (c), (d), (e), (f), (g), (h), (i), (j) or (k), a promoter, preferably a promoter selected from the group consisting of Big35S, PCUbi, Super and USP, which are operable linked; and said nucleic acid molecule according to 1 (a), (b), (c), (d), (e), (f), (g), (h), (i), (j) or (k) confers a generation or an increase of the respective fine chemical in a non-human organism or a part thereof as compared to a corresponding wild-type non-human organism or part thereof.

[44571] In another preferred embodiment of said transgenic non-human organism said vector comprises beneath said nucleic acid molecule according to 1 (a), (b), (c), (d), (e), (f), (g), (h), (i), (j) or (k), a promoter, preferably a promoter selected from the group consisting of Big35S, PCUbi, Super and USP, which are operable linked; and said nucleic acid molecule according to 1 (a), (b), (c), (d), (e), (f), (g), (h), (i), (j) or (k) encodes a polypeptide which has the activity of the respective polypeptide represented by a protein as depicted in the same line in column 5 of Table II, application no. 6, and confers a generation or an increase of the respective fine chemical in a non-human organism or a part thereof as compared to a corresponding wild-type non-human organism or part thereof.

[44572] In another embodiment of said transgenic non-human organism said vector comprises beneath said nucleic acid molecule according to 1 (a), (b), (c), (d), (e), (f), (g), (h), (i), (j) or (k), a nucleic acid molecule encoding a transit peptide, preferably encoding a plastidal transit peptide, especially in case in column 6 of Table I, application no. 6, in the same line as of the respective nucleic acid molecule according to 1) “plastidic” is depicted, or encoding a mitochondrial transit peptide, especially in case in column 6 of Table I, application no. 6, in the same line as of the respective nucleic acid molecule according to 1) “mitochondrial” is depicted, which are operable linked.

[44573] In another embodiment of said transgenic non-human organism said vector does not comprise beneath said nucleic acid molecule according to 1 (a), (b), (c), (d), (e), (f), (g), (h), (i), (j) or (k), a nucleic acid molecule encoding a transit peptide in case in column 6 of Table I, application no. 6, in the same line as of the respective nucleic acid molecule according to 1) “non-targeted” is depicted, which are operable linked.

[44574] In another embodiment of said transgenic non-human organism said vector comprises beneath said nucleic acid molecule according to 1 (a), (b), (c), (d), (e), (f), (g), (h), (i), (j) or (k), and a promoter, preferably a promoter selected from the group consisting of Big35S, PCUbi, Super and USP; a nucleic acid molecule encoding a transit peptide, preferably encoding a plastidal transit peptide, especially in case in column 6 of Table I, application no. 6, in the same line as of the respective nucleic acid molecule according to 1) “plastidic” is depicted, or encoding a mitochondrial transit peptide, especially in case in column 6 of Table I, application no. 6, in the same line as of the respective nucleic acid molecule according to 1) “mitochondrial” is depicted, which are operable linked.

[44575] In another embodiment of said transgenic non-human organism said vector does not comprise beneath said nucleic acid molecule according to 1 (a), (b), (c), (d), (e), (f), (g), (h), (i), (j) or (k), and a promoter, preferably a promoter selected from the group consisting of Big35S, PCUbi, Super and USP; a nucleic acid molecule encoding a transit peptide, especially in case in column 6 of Table I, application no. 6, in the same line as of the respective nucleic acid molecule according to 1) “non-targeted” is depicted, which are operable linked.

[44576] In another embodiment of said transgenic non-human organism said vector comprises beneath said nucleic acid molecule according to 1 (a), (b), (c), (d), (e), (f), (g), (h), (i), (j) or (k), and a promoter, preferably a promoter selected from the group consisting of Big35S, PCUbi, Super and USP; a nucleic acid molecule encoding a transit peptide, preferably encoding a plastidal transit peptide, especially in case in column 6 of Table I, application no. 6, in the same line as of the respective nucleic acid molecule according to 1) “plastidic” is depicted, or encoding a mitochondrial transit peptide, especially in case in column 6 of Table I, application no. 6, in the same line as of the respective nucleic acid molecule according to 1) “mitochondrial” is depicted, which are operable linked; and wherein said nucleic acid molecule according to 1 (a), (b), (c), (d), (e), (f), (g), (h), (i), (j) or (k) encodes a polypeptide which has the activity of the respective polypeptide represented by a protein comprising a polypeptide as depicted in the respective line in column 5 of Table II, application no. 6.

[44577] In another embodiment of said transgenic non-human organism said vector does not comprise beneath said nucleic acid molecule according to 1 (a), (b), (c), (d), (e), (f), (g), (h), (i), (j) or (k), and a promoter, preferably a promoter selected from the group consisting of Big35S, PCUbi, Super and USP; a nucleic acid molecule encoding a transit peptide, especially in case in column 6 of Table I, application no. 6, in the same line as of the respective nucleic acid molecule according to 1) “non-targeted” is depicted, which are operable linked; and wherein said nucleic acid molecule according to 1 (a), (b), (c), (d), (e), (f), (g), (h), (i), (j) or (k) encodes a polypeptide which has the activity of the respective polypeptide represented by a protein comprising a polypeptide as depicted in the respective line in column 5 of Table II, application no. 6.

[44578] In another embodiment of said transgenic non-human organism said vector comprises beneath said nucleic acid molecule according to 1 (a), (b), (c), (d), (e), (f), (g), (h), (i), (j) or (k), and a promoter, preferably a promoter selected from the group consisting of Big35S, PCUbi, Super and USP; a nucleic acid molecule encoding a transit peptide, preferably encoding a plastidal transit peptide, especially in case in column 6 of Table I, application no. 6, in the same line as of the respective nucleic acid molecule according to 1) “plastidic” is depicted, or encoding a mitochondrial transit peptide, especially in case in column 6 of Table I, application no. 6, in the same line as of the respective nucleic acid molecule according to 1) “mitochondrial” is depicted, which are operable linked; and wherein said nucleic acid molecule according to 1 (a), (b), (c), (d), (e), (f), (g), (h), (i), (j) or (k) confers a generation or an increase of the respective fine chemical in a non-human organism or a part thereof as compared to a corresponding wild-type non-human organism or part thereof.

[44579] In another embodiment of said transgenic non-human organism said vector does not comprise beneath said nucleic acid molecule according to 1 (a), (b), (c), (d), (e), (f), (g), (h), (i), (j) or (k), and a promoter, preferably a promoter selected from the group consisting of Big35S, PCUbi, Super and USP; a nucleic acid molecule encoding a transit peptide, especially in case in column 6 of Table I, application no. 6, in the same line as of the respective nucleic acid molecule according to 1) “non-targeted” is depicted, which are operable linked; and wherein said nucleic acid molecule according to 1 (a), (b), (c), (d), (e), (f), (g), (h), (i), (j) or (k) confers a generation or an increase of the respective fine chemical in a non-human organism or a part thereof as compared to a corresponding wild-type non-human organism or part thereof.

[44580] In another embodiment of said transgenic non-human organism said vector comprises beneath said nucleic acid molecule according to 1 (a), (b), (c), (d), (e), (f), (g), (h), (i), (j) or (k), and a promoter, preferably a promoter selected from the group consisting of Big35S, PCUbi, Super and USP; a nucleic acid molecule encoding a transit peptide, preferably encoding a plastidal transit peptide, especially in case in column 6 of Table I, application no. 6, in the same line as of the respective nucleic acid molecule according to 1) “plastidic” is depicted, or encoding a mitochondrial transit peptide, especially in case in column 6 of Table I, application no. 6, in the same line as of the respective nucleic acid molecule according to 1) “mitochondrial” is depicted, which are operable linked; and wherein said nucleic acid molecule according to 1 (a), (b), (c), (d), (e), (f), (g), (h), (i), (j) or (k) encodes a polypeptide which has the activity of the respective polypeptide represented by a protein as depicted in the respective line in column 5 of Table II application no. 6 and confers a generation or an increase of the respective fine chemical in a non-human organism or a part thereof as compared to a corresponding wild-type non-human organism or part thereof.

[44581] In another embodiment of said transgenic non-human organism said vector does not comprise beneath said nucleic acid molecule according to 1 (a), (b), (c), (d), (e), (f), (g), (h), (i), (j) or (k), and a promoter, preferably a promoter selected from the group consisting of Big35S, PCUbi, Super and USP; a nucleic acid molecule encoding a transit peptide, especially in case in column 6 of Table I, application no. 6, in the same line as of the respective nucleic acid molecule according to 1) “non-targeted” is depicted, which are operable linked; and wherein said nucleic acid molecule according to 1 (a), (b), (c), (d), (e), (f), (g), (h), (i), (j) or (k) encodes a polypeptide which has the activity of the respective polypeptide represented by a protein as depicted in the respective line in column 5 of Table II application no. 6 and confers a generation or an increase of the respective fine chemical in a non-human organism or a part thereof as compared to a corresponding wild-type non-human organism or part thereof.

[44582] In a preferred embodiment of said transgenic non-human organism said nucleic acid molecule according to 1 (a), (b), (c), (d), (e), (f), (g), (h), (i), (j) or (k), said promoter and optionally said nucleic acid molecule encoding a transit peptide are encompassed in an expression cassette in said vector. Accordingly an embodiment the invention provides a non-human organism comprising or being transformed by a vector comprising an expression cassette comprising said nucleic acid molecule according to 1 (a), (b), (c), (d), (e), (f), (g), (h), (i), (j) or (k), said promoter and optionally said a nucleic acid molecule encoding a transit peptide, operable linked. Said expression cassette may encompass a terminator, too.

[44583] [0291.1.1.6] to [0299.1.1.6] for the disclosure of these paragraphs see [0291.1.1.1] to [0299.1.1.1] above.

[44584] The term “biological active portion” or “biological activity” means a polypeptide as depicted in the respective line in Table II, application no. 6, column 3 or a portion of said polypeptide which still has at least 10% or 20%, preferably 30%, 40%, 50% or 60%, especially preferably 70%, 75%, 80%, 90% or 95% of the enzymatic or biological activity of the natural or starting enzyme or protein.

[44585] [0301.1.1.6] to [0304.1.1.6] for the disclosure of these paragraphs see [0301.1.1.1] to 0304.1.1.1] above.

[44586] Synthetic oligonucleotide primers for the amplification, e.g. as shown in the respective line in Table III, application no. 6, column 8, by means of polymerase chain reaction can be generated on the basis of a sequence shown herein, for example the sequence shown in the respective line in Table I, application no. 6, columns 5 or 8, or the sequences derived from Table II, application no. 6, columns 5 or 8, respectively.

[44587] Moreover, it is possible to identify a conserved region of a protein from various organism by carrying out protein sequence alignments with the polypeptide encoded by the nucleic acid molecules of the present invention, in particular with the sequences encoded by the nucleic acid molecule shown in the respective line in column 5 or 8 of Table I, application no. 6, from which conserved regions, and in turn, degenerate primers can be derived. Conserved regions are those, which show a very little variation in the amino acid in one particular position of several homologs from different origin. The consensus sequence and polypeptide motifs shown in the respective line in column 8 of Table IV, application no. 6, are derived from such alignments of homologous proteins.

[44588] In an embodiment of the present invention, in the method of the present invention the activity of a polypeptide comprising or consisting of a consensus sequence or at least one polypeptide motif shown in the respective line in Table IV, application no. 6, column 8, is increased.

[44589] In another embodiment thereof, the method of the present invention relates to a polypeptide comprising or consisting of a consensus sequence shown in the respective line in Table IV, application no. 6, column 8 or comprising at least one polypeptide motif shown in the respective line in Table IV, application no. 6, column 8, whereby not more than 20, 15, 10, 9, 8, 7, 6, 5 4, 3, 2 or 1, or 0 of the amino acid positions indicated can be replaced by any amino acid.

[44590] In another embodiment thereof, the method of the present invention relates to a polypeptide comprising or consisting of a consensus sequence shown in the respective line in Table IV, application no. 6, column 8 or comprising at least one polypeptide motif shown in the respective line in Table IV, application no. 6, column 8, whereby not more than 15%, 10%, 5%, 4%, 3%, 2% or 1%, or 0% of the amino acid positions defined as distinct specific amino acids are/is replaced by another amino acid.

[44591] In another embodiment thereof, the method of the present invention relates to a polypeptide comprising or consisting of a consensus sequence shown in the respective line in Table IV, application no. 6, column 8 or comprising at least one polypeptide motif shown in the respective line in Table IV, application no. 6, column 8, whereby not more than 20, 15, 10, 9, 8, 7, 6, 5, 4, 3, 2 or 1, or 0 amino acids are inserted into a consensus sequence or polypeptide motif.

[44592] In an embodiment of the present invention, in the method of the present invention the activity of a polypeptide comprising or consisting of a consensus sequence or at least one polypeptide motif shown in the respective line in Table IV, application no. 6, column 8, is increased, whereby said polypeptide distinguishes over the sequence depicted in Table II, application no. 6, columns 5 or 8 by one or more amino acids.

[44593] In one embodiment, said polypeptide of the invention distinguishes over the sequence shown in the respective line in Table II, application no. 6, columns 5 and 8 by more than 5, 6, 7, 8 or 9 amino acids, preferably by more than 10, 15, 20, 25 or 30 amino acids, even more preferred are more than 40, 50, or 60 amino acids and, preferably, the sequence of the polypeptide of the invention distinguishes from the sequence shown in the respective line in Table II B, application no. 6, columns 5 and 8 by not more than 80%, 70%, 60%, 50%, 40%, 30%, 20%, 10%, 5%, 4%, 3%, 2%, 1% or 0.5%. In another embodiment, said polypeptide of the invention does not consist of the sequence shown in Table II, application no. 6, columns 5 or 8.

[44594] [309.1.1.6] to [0321.1.1.6] for the disclosure of these paragraphs see [0309.1.1.1] to [0321.1.1.1] above.

[44595] Polypeptides having above-mentioned activity, i.e. conferring the production or the increased production of the fine chemical isoleucine, leucine, or valine, respectively, as compared to a corresponding, e.g. non-transformed, wild type non-human organism, like a microorganism or a plant cell, plant or part thereof, can be encoded by other DNA sequences which hybridize to the sequences shown in the respective line in Table I, application no. 6, columns 5 and 8, preferably the coding region thereof, at least under relaxed hybridization conditions and which encode the expression of polypeptides conferring the production or the increased production of the respective fine chemical isoleucine, leucine, or valine, respectively, as compared to a corresponding, e.g. non-transformed, wild type non-human organism, like a microorganism or a plant cell, plant or part thereof.

[44596] [0323.1.1.6] to [0329.1.1.6] for the disclosure of these paragraphs see [0323.1.1.1] to [0329.1.1.1] above.

[44597] Further, the nucleic acid molecule of the invention comprises a nucleic acid molecule, which is a complement of one of the nucleotide sequences of above-mentioned nucleic acid molecules or a portion thereof. A nucleic acid molecule or its sequence which is complementary to one of the nucleotide molecules or sequences shown in the respective line in Table I, application no. 6, columns 5 or 8, preferably the coding region thereof, homologs or fragments thereof, is one which is sufficiently complementary to one of the nucleotide molecules or sequences shown in the respective line in Table I, application no. 6, columns 5 or 8, preferably the coding region thereof, homologs or fragments thereof, such that it can hybridize to one of the nucleotide sequences shown in Table I, application no. 6, columns 5 or 8, preferably the coding region thereof, homologs or fragments thereof, thereby forming a stable duplex. Preferably, the hybridization is performed under stringent hybridization conditions. However, a complement of one of the herein disclosed sequences is preferably a sequence complement thereto according to the base pairing of nucleic acid molecules well known to the skilled person. For example, the bases A and G undergo base pairing with the bases T and U or C, resp. and visa versa. Modifications of the bases can influence the base-pairing partner.

[44598] The nucleic acid molecule of the invention comprises a nucleotide sequence which is at least about 30%, 35%, 40%, 45%, 50%, 55%, 60%, 65%, 70%, 75%, 80%, 90%, 95%, 96%, 97%, 98%, 99%, 99.5% or more homologous to a nucleotide sequence shown in Table I, application no. 6, columns 5 or 8, preferably the coding region thereof, homologs or fragments thereof, and preferably has above-mentioned activity, in particular conferring the production or the increased production of the fine chemical isoleucine, leucine, or valine, respectively, after increasing the activity or an activity of a gene as shown in the respective line in Table I or of a gene product, e.g. as shown in the respective line in Table II, application no. 6, column 5 or 8, by for example in one embodiment expression either in the cytosol or in an organelle such as a plastid or mitochondria or both, preferably in a plastid, or in another embodiment non-targeted or targeted.

[44599] The nucleic acid molecule of the invention comprises a nucleotide sequence or molecule which hybridizes, preferably hybridizes under stringent conditions as defined herein, to one of the nucleic acid molecule shown in the respective line in Table I, preferably Table IB, application no. 6, columns 5 or 8, preferably the coding region thereof, fragments or homologs thereof, and encodes a protein having above-mentioned activity, e.g. conferring the production or the increased production of the respective fine chemical isoleucine, leucine, or valine as compared to a corresponding, e.g. non-transformed, wild type non-human organism, like a microorganism or a plant cell, plant or part thereof, by for example in one embodiment expression either in the cytosol or in an organelle such as a plastid or mitochondria or both, preferably in a plastid, or in another embodiment non-targeted or targeted, and optionally, the activity thereof is selected from the group consisting of 2,3-dihydroxyphenylpropionate 1,2-dioxygenase, 2-isopropylmalate synthase, 3-isopropylmalate dehydrogenase, 47266012-protein, 50S ribosomal protein L14, ABC transporter ATP binding component, ABC transporter ATP-binding protein, ABC transporter component, ABC transporter permease protein, acetolactate synthase, acetolactate synthase small subunit, acetyl CoA carboxylase, acetyl-CoA acetyltransferase, acetyltransferase, acid shock protein, acyl transferase, acyltransferase, adenylate kinase, adenylosuccinate lyase, agmatinase, aldehyde dehydrogenase, aminotransferase, anthranilate synthase component II, arginine exporter protein, At1g19800-protein, At1g23110-protein, At1g47380-protein, At4g32480-protein, At5g16650-protein, ATP-binding component of a transport system, auxin response factor, b0050-protein, b1003-protein, b1163-protein, b1445-protein, b1522-protein, b1670-protein, b1672-protein, b2513-protein, b2613-protein, b2673-protein, b2739-protein, b2812-protein, b3083-protein, b3490-protein, b3989-protein, b4029-protein, b4050-protein, b4056-protein, b4263-protein, beta-galactosidase, beta-hydroxylase, bifunctional protein (phosphoribosyltransferase and regulatory protein), binding-protein-dependent transport systems inner membrane component, branched chain aminotransferase, branched-chain amino acid permease, branched-chain amino-acid aminotransferase, calcium-dependent protein kinase, carbamoyl-phosphate synthase subunit, CBL-interacting protein kinase, cell division control protein, chaperone protein CIpB, cullin, cyclin, cyclin D, cytochrome c-type protein, dihydroxyacid dehydratase, disease resistance protein, DNA helicase II, DNA helicase IV, DNA mismatch repair protein, DNA polymerase, DNA-binding protein, elongation factor Tu, enoyl-CoA hydratase, eukaryotic translation initiation factor, eukaryotic translation initiation factor 5, ferredoxin, flavodoxin, fumarylacetoacetate hydrolase, GDP-mannose 4,6-dehydratase, geranylgeranyl pyrophosphate synthase, gluconate transport system permease 3, glucose-1-phosphate cytidylyltransferase, glucose-6-phosphate 1-dehydrogenase, glutamate-ammonia-ligase, glutamine synthetase, glutaredoxin, glycerol-3-phosphate dehydrogenase, glycogen (starch) synthase, glycogen synthase, glycoprotease, glycosyl transferase, GM02LC11114-protein, GM02LC5744-protein, H/ACA ribonucleoprotein complex subunit 3, harpin-induced family protein, heat shock transcription factor, hexose transporter, histone H2A, homocitrate synthase, homoserine dehydrogenase, hydrolase, iron(III) dicitrate-binding protein, isochorismate synthase, isopropylmalate isomerase large subunit, ketol-acid reductoisomerase, L-serine dehydratase, MADS-box transcription factor, major facilitator superfamily transporter protein, malate dehydrogenase, malic enzyme, membrane protein, membrane transport protein, methylglyoxal synthase, mitochondrial dicarboxylate transporter, monothiol glutaredoxin, murein transglycosylase, Na+/K+ transporter, NAD(P)H-quinone oxidoreductase subunit, NADH-quinone oxidoreductase subunit, NADP-dependent malic enzyme, Nucleoside monophosphate phosphohydrolase, O-antigen chain length determinant, oxidoreductase, oxireductase, peptidase, phosphate transporter, phosphoadenosine phosphosulfate reductase , phosphoanhydride phosphorylase, phosphoglycerate kinase, phosphopantetheine adenylyltransferase, photosystem II protein, polygalacturonase, polyphosphate kinase, precorrin methylase, protein kinase, protein phosphatase, protoporphyrin oxidase, purine nucleoside phosphorylase, purinenucleoside phosphorylase, pyruvate kinase, riboflavin biosynthesis protein, ribosephosphate isomerase, constitutive, RNA binding protein, RNA-binding protein, Sec-independent protein translocase subunit, serine hydroxymethyltransferase, short-chain alcohol dehydrogenase family, sll1032-protein, sll1455-protein, sll1761-protein, superoxide dismutase, thioredoxin, thioredoxin family protein, threonine dehydratase, threonine synthase, transcription factor, transcriptional regulator, transport protein, trehalose-phosphatase, TTC1386-protein, urease subunit, vacuolar ATPase subunit, valine-pyruvate transaminase, YAL013W-protein, ydr183w-protein, ygl237c-protein, YGR193C-protein, yhr006w-protein, YKL038W-protein, YLR224W-protein, zinc finger protein, zinc transporter, and Zm_{—}4842_BE510522-protein, respectively.

[44600] Moreover, the nucleic acid molecule of the invention can comprise only a portion of the coding region of one of the nucleic acid molecules depicted in Table I, application no. 6, columns 5 or 8, for example a fragment which can be used as a probe or primer or a fragment encoding a biologically active portion of the polypeptide of the present invention or of a polypeptide used in the process of the present invention, i.e. having above-mentioned activity, e.g. conferring the production or the increased production of the respective fine chemical isoleucine, leucine, or valine as compared to a corresponding, e.g. non-transformed, wild type non-human organism, like a microorganism or a plant cell, plant or part thereof, by for example in one embodiment expression either in the cytosol or in an organelle such as a plastid or mitochondria or both, preferably in a plastid, or in another embodiment non-targeted or targeted. The nucleotide sequences determined from the cloning of the present protein-according-to-the-invention -encoding gene allows for the generation of probes and primers designed for use in identifying and/or cloning its homologues from other cell types and organisms. The probe/primer typically comprises a substantially purified oligonucleotide. The oligonucleotide typically comprises a region of nucleotide sequence that hybridizes under stringent conditions to at least about 12, 15 preferably about 20 or 25, more preferably about 40, 50 or 75 consecutive nucleotides of a sense strand of one of the sequences set forth, e.g., in the respective line in Table I, application no. 6, column 5 or 8, preferably the coding region thereof, or a homolog or a fragment thereof, an anti-sense sequence of one of the sequences, e.g., set forth in the respective line in Table I, application no. 6, columns 5 or 8, preferably the coding region thereof, or a homolog or a fragment thereof or naturally occurring mutants thereof. Primers based on a nucleic acid molecule of invention can be used in PCR reactions to clone homologs of the polypeptide of the invention or of the polypeptide used in the process of the invention, e.g. as the primers described in the examples of the present invention, e.g. as shown in the examples. A PCR with the primers shown in the respective line in Table III, column 8 will result in a fragment of the gene product as shown in Table II, application no. 6, column 5.

[44601] Primer sets are interchangeable. The person skilled in the art knows how to design and combine said primers to result in the desired product, e.g. in a full length clone or a partial sequence. Probes based on the sequences of the nucleic acid molecule of the invention or used in the process of the present invention can be used to detect transcripts or genomic sequences encoding the same or homologous proteins. The probe can further comprise a label group attached thereto, e.g. the label group can be a radioisotope, a fluorescent compound, an enzyme, or an enzyme co-factor. Such probes can be used as a part of a genomic marker test kit for identifying cells which express a polypeptide of the invention or used in the process of the present invention, such as by measuring a level of an encoding nucleic acid molecule in a sample of cells, e.g. detecting mRNA levels or determining, whether a genomic gene comprising the sequence of the polynucleotide of the invention or used in the processes of the present invention has been mutated or deleted.

[44602] As the expression of a respective nucleic acids of the invention is related to the synthesis of the respective fine chemical isoleucine, leucine, or valine its function as a probe extends to the detection of microorganisms, plant tissues, plants, plant variets, plant ecotypes or plant genera with varying capability or potential for synthesis of the respective fine chemical isoleucine, leucine, or valine. Therefore in one embodiment the present invention relates to a method for analyzing the capability or potential of a plant tissue, a plant, a plant variety or plant ecotype to produce the fine chemical isoleucine, leucine, or valine by using the nucleic acid of the invention or parts thereof as a probe to detect the amount of the nucleic acid of the invention in the non-human organism or a part thereof in comparison to another non-human organism.

[44603] The nucleic acid molecule of the invention encodes a polypeptide or portion thereof which includes an amino acid sequence which is sufficiently homologous to the amino acid sequence shown in respective line in Table II, application no. 6, columns 5 or 8 such that the protein or portion thereof maintains the ability to confer the production or the increased production of the respective fine chemical isoleucine, leucine, or valine as compared to a corresponding, e.g. non-transformed, wild type non-human organism, like a microorganism or a plant cell, plant or part thereof, in particular increasing the activity as mentioned above or as described in the examples in microorganisms or plants.

[44604] As used herein, the language “sufficiently homologous” refers to proteins or portions thereof which have amino acid sequences which include a minimum number of identical or equivalent amino acids (e.g. an amino acid which has a similar side chain as an amino acid in one of the sequences of the polypeptide of the present invention) to an amino acid sequence shown in the respective line in Table II, application no. 6, columns 5 or 8 such that the protein or portion thereof is able to confer the production or the increased production of the respective fine chemical isoleucine, leucine, or valine as compared to a corresponding, e.g. non-transformed, wild type non-human organism, like a microorganism or a plant cell, plant or part thereof. For example having the activity of a protein as shown in the respective line in Table II, application no. 6, column 3 and as described herein.

[44605] In an embodiment of the present invention, the nucleic acid molecule of the present invention comprises a nucleic acid molecule that encodes a portion of the protein of the present invention. The protein is at least about 30%, 35%, 40%, 45% 50%, 55%, 60%, 65%, 70%, 75%, 80%, 85%, 90%, 91%, 92%, 93%, 94%, 95%, 96%, 97%, 98%, 99%, 99.5% or more homologous to an entire amino acid sequence shown in the respective line of Table II, application no. 6, column 5 or 8 and has the above-mentioned activity, e.g. conferring the production or the increased production of the respective fine chemical isoleucine, leucine, or valine as compared to a corresponding, e.g. non-transformed, wild type non-human organism, like a microorganism or a plant cell, plant or part thereof by, for example in a embodiment expression either in the cytosol or in an organelle such as a plastid or mitochondria or both, preferably in a plastid, or in another embodiment by targeted or non-targeted expression.

[44606] [0338.1.1.6] to [0339.1.1.6] for the disclosure of these paragraphs see [0338.1.1.1] to [0339.1.1.1] above.

[44607] The invention further relates to nucleic acid molecules or methods using said nucleic acid molecules that differ from one of the nucleotide sequences shown in the respective line in Table I, application no. 6, columns 5 or 8, preferably the coding region thereof, or fragments or homologs thereof, due to degeneracy of the genetic code but encode a polypeptide of the present invention, in particular a polypeptide having the above-mentioned activity, e.g. as those polypeptides depicted in the respective line in Table II, application no. 6, columns 5 or 8, fragments or homologs thereof. Advantageously, the nucleic acid molecule of the invention comprises, or in an other embodiment has, a nucleotide sequence encoding a protein comprising, or in an other embodiment having, an amino acid sequence shown in the respective line in Table II, application no. 6, columns 5 or 8, fragments or homologs thereof. In a further embodiment, the nucleic acid molecule of the invention encodes a full length protein which is substantially homologous to an amino acid sequence shown in the respective line in Table II, application no. 6, columns 5 or 8, or homologs thereof. However, in an embodiment, the nucleic acid molecule of the present invention does not consist of the sequence shown in the respective line in Table I, preferably Table IA, application no. 6, columns 5 or 8, preferably the coding region thereof, but the functional homologs thereof.

[44608] [0341.1.1.6] to [0343.1.1.6] for the disclosure of these paragraph see [0341.1.1.1] to [0343.1.1.1] above.

[44609] Accordingly, in another embodiment, a nucleic acid molecule of the invention is at least 15, 20, 25 or 30 nucleotides in length. Preferably, it hybridizes under stringent conditions to a nucleic acid molecule comprising a nucleotide sequence of the nucleic acid molecule of the present invention or used in the process of the present invention, e.g. comprising the sequence shown in the respective line in Table I, application no. 6, columns 5 or 8, preferably the coding region thereof. In another embodiment the nucleic acid molecule is preferably at least 20, 30, 50, 100, 250 or more nucleotides in length.

[44610] for the disclosure of this paragraph see [0345.1.1.1] above.

[44611] Preferably, a nucleic acid molecule of the invention that hybridizes under stringent conditions to a sequence shown in the respective line in Table I, application no. 6, columns 5 or 8, preferably the coding region thereof, corresponds to a naturally-occurring nucleic acid molecule of the invention. As used herein, a “naturally-occurring” nucleic acid molecule refers to a RNA or DNA molecule having a nucleotide sequence that occurs in nature (e.g. encodes a natural protein). Preferably, the nucleic acid molecule encodes a natural protein having above-mentioned activity, e.g. conferring the production or the increased production of the respective fine chemical isoleucine, leucine, or valine as compared to a corresponding, e.g. non-transformed, wild type non-human organism, like a microorganism or a plant cell, plant or part thereof after increasing the expression or activity thereof or the activity of a protein of the invention or used in the process of the invention, in an embodiment for example expression either in the cytosol or in an organelle such as a plastid or mitochondria, preferably in plastids, or, in another embodiment by targeted or non-targeted expression.

[44612] for the disclosure of this paragraph see [0347.1.1.1] above.

[44613] For example, nucleotide substitutions leading to amino acid substitutions at “non-essential” amino acid residues can be made in a sequence of the nucleic acid molecule of the invention or used in the process of the invention, e.g. shown in the respective line in Table I, application no. 6, columns 5 or 8, preferably the coding region thereof, or fragments or homologs thereof.

[44614] [0349.1.1.6] to [0350.1.1.6] for the disclosure of these paragraphs see [0349.1.1.1] to [0350.1.1.1] above.

[44615] Accordingly, the invention relates to nucleic acid molecules encoding a polypeptide having above-mentioned activity, in a non-human organisms or parts thereof by for example expression either in the cytosol or in an organelle such as a plastid or mitochondria or both, preferably in plastids, that contain changes in amino acid residues that are not essential for said activity. Such polypeptides differ in amino acid sequence from a sequence depicted in the respective line in Table II, especially Table IIA, application no. 6, columns 5 or 8, but retain said activity described herein. The nucleic acid molecule can comprise a nucleotide sequence encoding a polypeptide, wherein the polypeptide comprises an amino acid sequence at least about 50% identical to an amino acid sequence shown in the respective line in Table II, application no. 6, columns 5 or 8, and is capable of conferring the production or the increased production of the respective fine chemical isoleucine, leucine, or valine as compared to a corresponding, e.g. non-transformed, wild type non-human organism, like a microorganism or a plant cell, plant or part thereof, after increasing its activity for example in an embodiment by expression either in the cytosol or in an organelle such as a plastid or mitochondria or both, preferably in plastids, or, in another embodiment by targeted or non-targeted expression. Preferably, the protein encoded by the nucleic acid molecule is at least about 60%, 70%, 80%, 90%, 95%, 96%, 97%, 98%, 99% or 99.5% identical to the sequence shown in the respective line in Table II, application no. 6, columns 5 or 8.

[44616] [0352.1.1.6] to [0357.1.1.6] for the disclosure of these paragraphs see [0352.1.1.1] to [0357.1.1.1] above.

[44617] Functional equivalents of the nucleic acid molecules according to the present invention and/or used in the process according to the present invention represent an embodiment of homologs. Functional equivalents derived from the nucleic acid molecules as shown in the respective line in Table I, application no. 6, columns 5 or 8, preferably the coding region thereof, according to the invention by substitution, insertion or deletion have at least 30%, 35%, 40%, 45%, 50%, 55%, 60%, 65%, 70%, 75%, 80%, 85%, 90%, 91%, 92%, 93%, 94%, 95%, 96%, 97%, 98%, 99% or 99.5% homology with one of the nucleic acid molecules as shown in the respective line in Table I, application no. 6, columns 5 or 8, preferably the coding region thereof, according to the invention and encode polypeptides having essentially the same properties as the polypeptide as shown in the respective line in Table II, application no. 6, columns 5 or 8.

[44618] Functional equivalents derived from one of the polypeptides as shown in the respective line in Table II, application no. 6, columns 5 or 8 according to the invention by substitution, insertion or deletion have at least 30%, 35%, 40%, 45%, 50%, 55%, 60%, 65%, 70%, 75%, 80%, 85%, 90%, 91%, 92%, 93%, 94%, 95%, 96%, 97%, 98%, 99% or 99.5% homology with one of the polypeptides as shown in the respective line in Table II, application no. 6, columns 5 or 8 according to the invention and having essentially the same properties as the polypeptide as shown in the respective line in Table II, application no. 6, columns 5 or 8.

[44619] for the disclosure of this paragraph see [0359.1.1.1] above.

[44620] A nucleic acid molecule encoding a homolog to a polypeptide depicted in the respective line in Table II, application no. 6, columns 5 or 8 can be created by introducing one or more nucleotide substitutions, additions or deletions into the nucleic acid molecule of the present invention, in particular of Table I, application no. 6, columns 5 or 8, in the respective line, such that one or more amino acid substitutions, additions or deletions are introduced into the encoded protein. Mutations can be introduced into the nucleic acid molecules as depicted in the respective line in Table I, application no. 6, columns 5 or 8, preferably the coding region thereof, by standard techniques, such as site-directed mutagenesis, PCR-mediated mutagenesis or other methods known to the person skilled in the art.

[44621] [0361.1.1.6] to [0363.1.1.6] for the disclosure of these paragraphs see [0361.1.1.1] to [0363.1.1.1] above.

[44622] Homologues of the nucleic acid sequences used, with the sequences shown in the respective line in Table I, application no. 6, columns 5 or 8, preferably the coding region thereof, comprise also allelic variants with at least approximately 30%, 35%, 40%, 45%, 50%, 55%, 60%, 65%, 70%, 75%, 80%, 85%, 90%, 91%, 92%, 93%, 94% 95%. 96%, 97%, 98%, 99%, 99.5% or more % homology with one of the nucleotide sequences shown or the above-mentioned derived nucleic acid sequences or their homologues or derivatives or parts of these. Allelic variants encompass in particular functional variants which can be obtained by deletion, insertion or substitution of nucleotides from the sequences shown in the respective line, preferably in Table I, columns 5 or 8, preferably the coding region thereof, or from the derived nucleic acid sequences, the intention being, however, that the enzymatic activity or the biological activity of the resulting proteins synthesized is advantageously retained or increased.

[44623] In one embodiment of the present invention, the nucleic acid molecule of the invention or used in the process of the invention comprises the sequences shown in the respective line in any of the Table I, application no. 6, columns 5 or 8, preferably the coding region thereof, fragments or homologs thereof. It is preferred that the nucleic acid molecule comprises as little as possible other nucleotides not shown in the respective line in any one of Table I, application no. 6, columns 5 or 8, preferably the coding region thereof, fragments or homologs thereof. In one embodiment, the nucleic acid molecule comprises less than 500, 400, 300, 200, 100, 90, 80, 70, 60, 50 or 40 further nucleotides. In a further embodiment, the nucleic acid molecule comprises less than 30, 20 or 10 further nucleotides. In one embodiment, the nucleic acid molecule used in the process of the invention is identical to the sequences shown in the respective line in Table I, application no. 6, columns 5 or 8, preferably the coding region thereof.

[44624] Also preferred is that the nucleic acid molecule used in the process of the invention encodes a polypeptide comprising the sequence shown in the respective line in Table II, application no. 6, columns 5 or 8, fragments or homologs thereof. In one embodiment, the nucleic acid molecule encodes less than 150, 130, 100, 80, 60, 50, 40 or 30 further amino acids.

[44625] In a further embodiment, the encoded polypeptide comprises less than 20, 15, 10, 9, 8, 7, 6 or 5 further amino acids. In one embodiment used in the inventive process, the encoded polypeptide is identical to the sequences shown in the respective line in Table II, application no. 6, columns 5 or 8.

[44626] In one embodiment, the nucleic acid molecule of the invention or used in the process encodes a polypeptide comprising the sequence shown in the respective line in Table II, application no. 6, columns 5 or 8, or fragments or homologs thereof, and comprises less than 100 further nucleotides. In a further embodiment, said nucleic acid molecule comprises less than 30 further nucleotides. In one embodiment, the nucleic acid molecule used in the process is identical to a coding sequence of the sequences shown in the respective line in Table I, application no. 6, columns 5 or 8.

[44627] Polypeptides (=proteins), which still have the essential biological or enzymatic activity of the polypeptide of the present invention conferring the production or the increased production of the respective fine chemical isoleucine, leucine, or valine as compared to a corresponding, e.g. non-transformed, wild type non-human organism, like a microorganism or a plant cell, plant or part thereof, i.e. whose activity is essentially not reduced, are polypeptides with at least 10%, 20%, 30%, 40%, 50%, 60%, 70%, 80%, 90%, 95% or more of the wild type biological activity or enzymatic activity, advantageously, the activity is essentially not reduced in comparison with the activity of a polypeptide shown in the respective line in Table II, application no. 6, columns 5 or 8 expressed under identical conditions.

[44628] Homologues of nucleic acid molecules shown in the respective line in Table I, application no. 6, columns 5 or 8, preferably the coding region thereof, or fragments thereof, or of the derived sequences shown in the respective line in Table II, application no. 6, columns 5 or 8, or fragments thereof, also mean truncated sequences, cDNA, single-stranded DNA or RNA of the coding and noncoding DNA sequence. Homologues of said sequences are also understood as meaning derivatives, which comprise noncoding regions such as, for example, UTRs, introns, terminators, enhancers or promoter variants. The promoters upstream of the nucleotide sequences stated can be modified by one or more nucleotide substitution(s), insertion(s) and/or deletion(s) without, however, interfering with the functionality or activity either of the promoters, the open reading frame (=ORF) or with the 3′-regulatory region such as terminators or other 3′-regulatory regions, which are far away from the ORF. It is furthermore possible that the activity of the promoters is increased by modification of their sequence, or that they are replaced completely by more active promoters, even promoters from heterologous organisms. Appropriate promoters are known to the person skilled in the art and are mentioned herein below.

[44629] [0370.1.1.6] to [0379.1.1.6] for the disclosure of these paragraphs see [0370.1.1.1] to [0379.1.1.1] above.

[44630] Moreover, a native polypeptide conferring the increase of the respective fine chemical isoleucine, leucine, or valine in a non-human organism or a part thereof can be isolated from cells (e.g., endothelial cells), for example using the antibody of the present invention as described below, in particular, an antibody against proteins having 2,3-dihydroxyphenylpropionate 1,2-dioxygenase, 2-isopropylmalate synthase, 3-isopropylmalate dehydrogenase, 47266012-protein, 50S ribosomal protein L14, ABC transporter ATP binding component, ABC transporter ATP-binding protein, ABC transporter component, ABC transporter permease protein, acetolactate synthase, acetolactate synthase small subunit, acetyl CoA carboxylase, acetyl-CoA acetyltransferase, acetyltransferase, acid shock protein, acyl transferase, acyltransferase, adenylate kinase, adenylosuccinate lyase, agmatinase, aldehyde dehydrogenase, aminotransferase, anthranilate synthase component II, arginine exporter protein, At1g19800-protein, At1g23110-protein, At1g47380-protein, At4g32480-protein, At5g16650-protein, ATP-binding component of a transport system, auxin response factor, b0050-protein, b1003-protein, b1163-protein, b1445-protein, b1522-protein, b1670-protein, b1672-protein, b2513-protein, b2613-protein, b2673-protein, b2739-protein, b2812-protein, b3083-protein, b3490-protein, b3989-protein, b4029-protein, b4050-protein, b4056-protein, b4263-protein, beta-galactosidase, beta-hydroxylase, bifunctional protein (phosphoribosyltransferase and regulatory protein), binding-protein-dependent transport systems inner membrane component, branched chain aminotransferase, branched-chain amino acid permease, branched-chain amino-acid aminotransferase, calcium-dependent protein kinase, carbamoyl-phosphate synthase subunit, CBL-interacting protein kinase, cell division control protein, chaperone protein CIpB, cullin, cyclin, cyclin D, cytochrome c-type protein, dihydroxyacid dehydratase, disease resistance protein, DNA helicase II, DNA helicase IV, DNA mismatch repair protein, DNA polymerase, DNA-binding protein, elongation factor Tu, enoyl-CoA hydratase, eukaryotic translation initiation factor, eukaryotic translation initiation factor 5, ferredoxin, flavodoxin, fumarylacetoacetate hydrolase, GDP-mannose 4,6-dehydratase, geranylgeranyl pyrophosphate synthase, gluconate transport system permease 3, glucose-1-phosphate cytidylyltransferase, glucose-6-phosphate 1-dehydrogenase, glutamate-ammonia-ligase, glutamine synthetase, glutaredoxin, glycerol-3-phosphate dehydrogenase, glycogen (starch) synthase, glycogen synthase, glycoprotease, glycosyl transferase, GM02LC11114-protein, GM02LC5744-protein, H/ACA ribonucleoprotein complex subunit 3, harpin-induced family protein, heat shock transcription factor, hexose transporter, histone H2A, homocitrate synthase, homoserine dehydrogenase, hydrolase, iron(III) dicitrate-binding protein, isochorismate synthase, isopropylmalate isomerase large subunit, ketol-acid reductoisomerase, L-serine dehydratase, MADS-box transcription factor, major facilitator superfamily transporter protein, malate dehydrogenase, malic enzyme, membrane protein, membrane transport protein, methylglyoxal synthase, mitochondrial dicarboxylate transporter, monothiol glutaredoxin, murein transglycosylase, Na+/K+ transporter, NAD(P)H-quinone oxidoreductase subunit, NADH-quinone oxidoreductase subunit, NADP-dependent malic enzyme, Nucleoside monophosphate phosphohydrolase, O-antigen chain length determinant, oxidoreductase, oxireductase, peptidase, phosphate transporter, phosphoadenosine phosphosulfate reductase , phosphoanhydride phosphorylase, phosphoglycerate kinase, phosphopantetheine adenylyltransferase, photosystem II protein, polygalacturonase, polyphosphate kinase, precorrin methylase, protein kinase, protein phosphatase, protoporphyrin oxidase, purine nucleoside phosphorylase, purine-nucleoside phosphorylase, pyruvate kinase, riboflavin biosynthesis protein, ribosephosphate isomerase, constitutive, RNA binding protein, RNA-binding protein, Sec-independent protein translocase subunit, serine hydroxymethyltransferase, short-chain alcohol dehydrogenase family, sll1032-protein, sll1455-protein, sll1761-protein, superoxide dismutase, thioredoxin, thioredoxin family protein, threonine dehydratase, threonine synthase, transcription factor, transcriptional regulator, transport protein, trehalosephosphatase, TTC1386-protein, urease subunit, vacuolar ATPase subunit, valine-pyruvate transaminase, YAL013W-protein, ydr183w-protein, ygl237c-protein, YGR193C-protein, yhr006w-protein, YKL038W-protein, YLR224W-protein, zinc finger protein, zinc transporter, or Zm_{—}4842_BE510522-protein activity, respectively, or an antibody against polypeptides as shown in the respective line in Table II, application no. 6, columns 5 or 8, or fragments or homologs thereof which can be produced by standard techniques utilizing the polypeptid of the present invention or fragment thereof, i.e., the polypeptide of this invention (FCRP). Preferred are monoclonal antibodies.

[44631] for the disclosure of this paragraph see [0381.1.1.1] above.

[44632] In one embodiment, the present invention relates to a polypeptide as depicted in the respective line in Table II, especially in Table IIA or especially in Table IIB, application no. 6, columns 5 or 8, or fragment or homolog thereof or as coded by the nucleic acid molecule shown in the respective line in Table I, especially Table IA or especially Table IB, application no. 6, columns 5 or 8, preferably the coding region thereof, or fragment or homolog thereof.

[44633] In an embodiment, the present invention relates to a polypeptide comprising or consisting of a consensus sequence shown in the respective line in Table IV, application no. 6, column 8 or at least one polypeptide motif shown in the respective line in Table IV, application no. 6, column 8.

[44634] In an embodiment thereof, the present invention relates to a polypeptide comprising or consisting of a consensus sequence shown in the respective line in Table IV, application no. 6, column 8 or comprising at least one polypeptide motif shown in the respective line in Table IV, application no. 6, column 8, whereby not more than 20, 15, 10, 9, 8, 7, 6, 5, 4, 3, 2, or 1, or 0 of the amino acids can be replaced by any amino acid.

[44635] In another embodiment thereof, the present invention relates to a polypeptide comprising or consisting of a consensus sequence shown in the respective line in Table IV, application no. 6, column 8 or comprising at least one polypeptide motif shown in the respective line in Table IV, application no. 6, column 8, whereby not more than 15%, 10%, 5%, 4%, 3%, 2% or1% or 0% of the amino acids defined as distinct specific amino acids are/is replaced by another amino acid.

[44636] In another embodiment thereof, the present invention relates to a polypeptide comprising or consisting of a consensus sequence shown in the respective line in Table IV, application no. 6, column 8 or comprising at least one polypeptide motif shown in the respective line in Table IV, application no. 6, column 8, whereby not more than 20, 15, 10, 9, 8, 7, 6, 5, 4, 3, 2, or 1, or 0 amino acids are inserted into the consensus sequence or polypeptide motif.

[44637] In an embodiment of the present invention, the polypeptide of the present invention comprises or consists of a consensus sequence or at least one polypeptide motif shown in the respective line in Table IV, application no. 6, column 8, whereby said polypeptide distinguishes over the sequence depicted in the respective line in Table II, application no. 6, columns 5 or 8 by one or more amino acids. In one embodiment, said polypeptide of the invention distinguishes over the sequence shown in the respective line in Table II, application no. 6, columns 5 and 8 by more than 5, 6, 7, 8 or 9 amino acids, preferably by more than 10, 15, 20, 25 or 30 amino acids, even more preferred are more than 40, 50, or 60 amino acids and, preferably, the sequence of the polypeptide of the invention distinguishes from the sequence shown in the respective line in Table II, application no. 6, columns 5 and 8 by not more than 80%, 70%, 60%, 50%, 40%, 30%, 20%, 10%, 5%, 4%, 3%, 2%, 1% or 0.5%. In another embodiment, said polypeptide of the invention does not consist of the sequence shown in the respective line in Table II, application no. 6, columns 5 and 8.

[44638] In an embodiment, the invention relates to a polypeptide conferring an increase in the respective fine chemical isoleucine, leucine, or valine in a non-human organism, especially a microorganism or a plant, or a part thereof, being encoded by the nucleic acid molecule of the invention or used in the process of the invention and having a sequence which distinguishes over the sequence as shown in the respective line in Table II, application no. 6, columns 5 or 8 by one or more amino acids (but not exceeding 5%, preferably 4%, 3%, 2%, 1%, 0.5%, 0.2% or 0.1%). In an embodiment, said polypeptide of the invention does not comprise or consist of the sequence shown in the respective line in Table II, application no. 6, columns 5 or 8. In an embodiment, said polypeptide of the present invention is less than 100%, 99.999%, 99.99%, 99.9% or 99% identical. In one embodiment, said polypeptide which differs at least in one or more amino acids (but not exceeding 5%, preferably 4%, 3%, 2%, 1%, 0.5%, 0.2% or 0.1%) from the polypeptide shown in the respective line in Table II, application no. 6, columns 5 and 8 does not comprise a protein of the sequence shown in the respective line in Table II A and/or II B, application no. 6, columns 5 or 8.

[44639] In an embodiment, the present invention relates to a polypeptide having the activity of the protein as shown in the respective line in Table II, application no. 6, column 3, which distinguishes over the sequence depicted in the respective line in Table II, application no. 6, columns 5 or 8 by one or more amino acids, preferably by more than 5, 6, 7, 8 or 9 amino acids, preferably by more than 10, 15, 20, 25 or 30 amino acids, even more preferred are more than 40, 50, or 60 amino acids and, preferably, the sequence of the polypeptide of the invention distinguishes from the sequence shown in the respective line in Table II, application no. 6, columns 5 and 8 by not more than 80%, 70%, 60%, 50%, 40%, 30%, 20%, 10%, 5%, 4%, 3%, 2%, 1% or 0.5%.

[44640] In another embodiment the polypeptide of the invention takes the form of a preprotein consisting of a plastidial or mitochondrial transit peptide joint to a polypeptide having the activity of the protein as shown in Table II, column 3, from which the transit peptide is preferably cleaved off upon transport of the preprotein into the organelle for example into the plastid or mitochondrion.

[44641] In another embodiment the polypeptide of the invention takes not the form of a preprotein.

[44642] [0390.1.1.6] to [0391.1.1.6] for the disclosure of these paragraphs see [0390.1.1.1] to [0391.1.1.1] above.

[44643] A polypeptide of the invention can participate in the process of the present invention. The polypeptide or a portion thereof comprises preferably an amino acid sequence, which is sufficiently homologous to an amino acid sequence shown in the respective line in Table II A and/or II B, application no. 6, columns 5 or 8.

[44644] Further, the polypeptide can have an amino acid sequence which is encoded by a nucleotide sequence which hybridizes, preferably hybridizes under stringent conditions as described above, to a nucleotide sequence of the nucleic acid molecule of the present invention. Accordingly, the polypeptide has an amino acid sequence which is encoded by a nucleotide sequence that is at least about 35%, 40%, 45%, 50%, 55%, 60%, 65%, 70%, 75%, 80%, 85%, 90%, 91%, 92%, 93%, 94%, 95%, 96%, 97%, 98%, 99%, 99.5% or more homologous to one of the amino acid sequences as shown in the respective line in Table II A and/or II B, application no. 6, columns 5 or 8, or fragments thereof. The preferred polypeptide of the present invention preferably possesses at least one of the activities according to the invention and described herein. A preferred polypeptide of the present invention includes an amino acid sequence encoded by a nucleotide sequence which hybridizes, preferably hybridizes under stringent conditions, to a nucleotide sequence shown in the respective line in Table I A and/or I B, application no. 6, columns 5 or 8, preferably the coding region thereof, or fragments thereto or which is homologous thereto, as defined above.

[44645] The polypeptide of the present invention can vary from the sequences shown in the respective line in Table II A and/or II B, application no. 6, columns 5 or 8 in amino acid sequence due to natural variation or mutagenesis, as described in detail herein. Accordingly, the polypeptide comprise an amino acid sequence which is at least about 35%, 40%, 45%, 50%, 55%, 60%, 65%, 70%, 75%, 80%, 85% or 90, 91%, 92%, 93%, 94%, 95%, 96%, 97%, 98%, 99%, 99.5% or more homologous to an entire amino acid sequence shown in the respective line in Table II A and/or II B, application no. 6, columns 5 or 8.

[44646] Biologically active portions of a polypeptide of the present invention include peptides comprising amino acid sequences derived from the amino acid sequence of the polypeptide of the present invention or used in the process of the present invention, e.g., the amino acid sequence shown in the respective line in Table II, application no. 6, columns 5 or 8 or the amino acid sequence of a protein homologous thereto, which include fewer amino acids than a full length polypeptide of the present invention or used in the process of the present invention or the full length protein which is homologous to a polypeptide of the present invention or used in the process of the present invention depicted herein, and exhibit at least one activity of a polypeptide of the present invention or used in the process of the present invention.

[44647] for the disclosure of this paragraph see [0396.1.1.1] above.

[44648] Manipulation of the nucleic acid molecule of the invention may result in the production of a protein having differences from the protein as shown in the respective line in Table II, application no. 6, column 5 or 8. Differences shall mean at least one amino acid different from the sequences as shown in the respective line in Table II, application no. 6, column 5 or 8, preferably at least 2, 3, 4, 5, 6, 7, 8, 9 or 10 amino acids (especially but not exceeding 0.1%, preferably 0.2%, 0.5%, 1%, 2%, 3% 4% or 5%), more preferably at least 15, 20, 25, 30, 35, 40, 45 or 50 amino acids (especially but not exceeding 0.5%, preferably 1%, 2%, 3% 4%, 5%, 10% or 25%) different from the sequences as shown in the respective line in Table II, application no. 6, column 5 or 8. These proteins may be improved in efficiency or activity, or may be more stable and therefore present in greater numbers in the cell as compared to the wild-type cell.

[44649] Any mutagenesis strategies for the polypeptide of the present invention or the polypeptide used in the process of the present invention to result in increasing said activity are not meant to be limiting; variations on these strategies will be readily apparent to one skilled in the art. Using such strategies, and incorporating the mechanisms disclosed herein, the nucleic acid molecule and polypeptide of the invention may be utilized to generate algae, ciliates, fungi, other microorganisms like C. glutamicum or plants or parts thereof, expressing proteins as shown in the respective line in Table II, application no. 6, column 5 or 8, or mutated proteins thereof. The nucleic acid molecules and polypeptide molecules of the invention are expressed such that the yield, production, and/or efficiency of production of a desired compound is improved.

[44650] [0399.1.1.6] to [0401.1.1.6] for the disclosure of these paragraphs see [0399.1.1.1] to [0401.1.1.1] above.

[44651] In one embodiment, a protein (=polypeptide) as shown in the respective line in Table II, application no. 6, column 5 or 8 refers to a polypeptide having an amino acid sequence corresponding to the polypeptide of the invention, especially to a polypeptide as shown in Table II, application no. 6, columns 5 or 8 or homologs thereof, or used in the process of the invention, whereas a “non-inventive protein or polypeptide” or “other polypeptide” refers to a polypeptide having an amino acid sequence corresponding to a protein which is not substantially homologous to a polypeptide of the invention, preferably which is not substantially homologous to a polypeptide or protein as shown in the respective line in Table II, application no. 6, column 5 or 8 or homologs thereof, e.g., a protein which does not confer the activity described herein and which is derived from the same or a different organism.

[44652] [0403.1.1.6] to [0409.1.1.6] for the disclosure of these paragraphs see [0403.1.1.1] to [0409.1.1.1] above.

[44653] As the nucleic acid molecules of the invention and/or the expression thereof is related to the synthesis of the respective fine chemical isoleucine, leucine, or valine its function as a probe extends to the detection of microorganisms, plant tissues, plants, plant variets, plant ecotypes or plant genera with varying, advantageously increased, capability or potential for synthesis of the respective fine chemical isoleucine, leucine, or valine. Therefore in one embodiment the present invention relates to a method for analyzing the capability or potential of a plant tissue, a plant, a plant variety or ecotype to produce the respective fine chemical isoleucine, leucine, or valine by using the respective antibody of the invention as a probe to detect the amount of the polypeptide encoded by said nucleic acid molecule of the invention in a non-human organism in comparison to another organism.

[44654] Therefore in one embodiment the invention relates to a method to probe a non-human organism for its capability for the production of the respective fine chemical comprising the steps of
[44655] a) analyzing the sequence and/or the expression of the respective nucleic acid molecule of the invention in least two non-human organisms which differ in the capability to produce the respective fine chemical;
[44656] b) associate the different sequence and/or expression level of the nucleic acid molecules of the invention with their different capability to produce the respective fine chemical;
[44657] c) analyze the sequence and/or the expression of the nucleic acid molecule of the invention in at least a third non-human organism;
[44658] d) predict the capability of the at least third organism to produce the respective fine chemical based by comparing the sequence and/or expression of the nucleic acid of the invention to the sequences and/or expression levels of the nucleic acid molecule of the invention of the at least two organisms analyzed in step a.

[44659] [0411.1.1.6] to [0430.1.1.6] for the disclosure of these paragraphs see [0411.1.1.1] to [0430.1.1.1] above.

[44660] Accordingly the present invention relates to any cell transgenic for any nucleic acid characterized as part of the invention, e.g. conferring the increase of the respective fine chemical isoleucine, leucine, or valine in a cell or a non-human organism or a part thereof, e.g. the nucleic acid molecule of the invention, the nucleic acid construct of the invention, the vector of the invention, the expression cassette according to the invention, or a nucleic acid molecule encoding the polypeptide of the invention, e.g. encoding a polypeptide having an activity as the protein as shown in the respective line in Table II, application no. 6, column 3. Due to the above-mentioned activity the respective fine chemical isoleucine, leucine, or valine content in a cell or a non-human organism is increased. For example, due to modulation or manipulation, the cellular activity is increased, in a preferred embodiment in organelles such as plastids or mitochondria, e.g. due to an increased expression or specific activity or specific targeting of the subject matters of the invention in a cell or a non-human organism or a part thereof especially in organelles such as plastids or mitochondria, or in another embodiment in the cytosol. Transgenic for a polypeptide having a protein or a protein activity means herein that due to modulation or manipulation of the genome, the activity of protein as shown in the respective line in Table II, application no. 6, column 3 or a protein as shown in the respective line in Table II, application no. 6, column 3-like activity is increased in the cell or non-human organism or part thereof, especially in organelles such as plastids or mitochondria, or especially in the cytosol. Examples are described above in context with the process of the invention.

[44661] for the disclosure of this paragraph see [0432.1.1.1] above.

[44662] A naturally occurring expression cassette—for example the naturally occurring combination of the promoter of the gene encoding a protein as shown in the respective line in Table II, application no. 6, column 5 or 8, preferably the coding region thereof, or fragments or homologs thereof with the corresponding encoding gene—becomes a transgenic expression cassette when it is modified by non-natural, synthetic “artificial” methods such as, for example, mutagenesis. Such methods have been described (U.S. Pat. No. 5,565,350; WO 00/15815; also see above).

[44663] [0434.1.1.6] to [0435.1.1.6] for the disclosure of these paragraphs see [0434.1.1.1] to [0435.1.1.1] above.

[44664] Transgenic plants comprising the respective fine chemical(s) synthesized in the process according to the invention can be marketed directly without isolation of the fine chemical synthesized. In the process according to the invention, plants are understood as meaning all plant parts, plant organs such as leaf, stalk, root, tubers or seeds or propagation material or harvested material or the intact plant. In this context, the seed encompasses all parts of the seed such as the seed coats, epidermal cells, seed cells, endosperm or embryonic tissue. The fine chemical produced in the process according to the invention may, however, also be isolated from the plant. In case of isoleucine, leucine, or valine this can be in free form or bound form. Fine chemical(s) produced by this process can be harvested by harvesting the non-human organisms either from the culture in which they grow or from the field. For example, this can be done via squeezing, grinding and/or extraction, salt precipitation and/or ionexchange chromatography of the plant parts, preferably the plant seeds, plant fruits, plant tubers and the like.

[44665] [0437.1.1.6] to [0440.1.1.6] for the disclosure of these paragraphs see [0437.1.1.1] to [0440.1.1.1] above.

[44666] [0442.1.1.6] to [0454.1.1.6] for the disclosure of these paragraphs see [0442.1.1.1] to [0454.1.1.1] above.

[44667] In one embodiment, the present invention relates to a method for the identification of a gene product conferring the production of or an increase in the fine chemical production in a non-human cell, comprising the following steps:
[44668] (a) contacting, e.g. hybridizing, a, some or all nucleic acid molecules of a sample, e.g. cells, tissues, plants or microorganisms or a nucleic acid library, which can contain a candidate gene encoding a gene product conferring the production of or an increase in the fine chemical after expression, with the nucleic acid molecule of the present invention as shown in the respective line in column 5 or 8 of Table I A or B of application no. 6, preferably the coding region thereof, or a fragment or homolog thereof;
[44669] (b) identifying the nucleic acid molecules, which hybridize under relaxed stringent conditions with the nucleic acid molecule of the present invention in particular to the nucleic acid molecule sequence shown in the respective line in Table I, application no. 6, columns 5 or 8, preferably the coding region thereof, of a fragment or a homolog thereof, preferably in Table I B, application no. 6, columns 5 or 8, preferably the coding region thereof, of a fragment or a homolog thereof, and, optionally, isolating the full length cDNA clone or complete genomic clone;
[44670] (c) introducing the candidate nucleic acid molecules or a fragment thereof in host cells, preferably in a plant cell or a microorganism, appropriate for producing the fine chemical;
[44671] (d) expressing the identified nucleic acid molecules in the host cells for which the production of or the increased production of the fine chemical is desired;
[44672] (e) assaying the fine chemical level in the non-human host cells; and
[44673] (f) identifying the nucleic acid molecule and/or its gene product which expression confers the production of or an increase in the fine chemical level in the non-human host cell after expression compared to the wild type.

[44674] for the disclosure of this paragraph see [0456.1.1.1] above.

[44675] In another embodiment, the present invention relates to a method for the identification of a gene product conferring the production of or an increase in the fine chemical production in a cell, comprising the following steps:
[44676] (a) identifying a nucleic acid molecule of a non-human organism, which is at least 20%, 25%, 30%, 35%, 40%, 50%, 60%, 70%, 80%, 90%, 95%, 96%, 97%, 98%, 99%, 99.5% or more homolog to the nucleic acid molecule encoding a polypeptide comprising the polypeptide molecule as shown in the respective line in column 5 or 8 of Table II, application no. 6, or comprising a consensus sequence or a polypeptide motif as shown in the respective line in column 8 of Table IV, application no. 6, or being encoded by a nucleic acid molecule comprising a polynucleotide as shown in the respective line in column 5 or 8 of Table I, application no. 6, preferably the coding region thereof, or a homologue thereof as described herein, for example via homology search in a data bank;
[44677] (b) introducing the candidate nucleic acid molecule in non-human host cells, preferably in a plant cell or a microorganism, appropriate for producing the fine chemical;
[44678] (c) expressing the identified nucleic acid molecule in the non-human host cells;
[44679] (d) assaying the fine chemical level in the non-human host cells; and
[44680] (e) identifying the nucleic acid molecule and its gene product which expression confers the production of or an increase in the fine chemical level in the non-human host cell after expression compared to the wild type.

[44681] for the disclosure of this paragraph see [0458.1.1.1] above.

[44682] Further, the nucleic acid molecules disclosed herein, in particular the nucleic acid molecules shown in the respective line in column 5 or 8 of Table I A or B of application no. 6, may be sufficiently homologous to the sequences of related species such that these nucleic acid molecules may serve as markers for the construction of a genomic map in related organism or for association mapping. Furthermore natural variation in the genomic regions corresponding to nucleic acids disclosed herein, in particular the nucleic acid molecule shown in the respective line in column 5 or 8 of Table I A or B, of application no. 6 or homologous thereof, may lead to variation in the activity of the proteins disclosed herein, in particular the proteins comprising polypeptides as shown in the respective lines in column 5 or 8 of Table II A or B, of application no. 6 or their homologous, or comprising the consensus sequence or the polypeptide motif as shown in the respective line in column 8 of Table IV, and in consequence in a natural variation of an increased fine chemical production.

[44683] In consequence natural variation eventually also exists in form of more active allelic variants leading already to a relative increase in the fine chemical. Different variants of the nucleic acid molecules disclosed herein, in particular the nucleic acid molecules comprising the nucleic acid molecules as shown in the respective line in column 5 or 8 of Table I A or B of application no. 6, preferably the coding region thereof, which corresponds to different levels of increase in fine chemical, e.g. different levels of increase in fine chemical, can be indentified and used for marker assisted breeding for an enhanced production of the fine chemical.

[44684] Natural variation may also exist in the regulatory regions, e.g. the promoters of the natural genes comprising the nucleic acid molecules as shown in the respective line column 5 or 8 of Table I A or B of application no. 6, preferably the coding region thereof, which can similarly correspond to different levels of increase in the fine chemical, e.g. different levels of increase in the fine chemical can be identified and used for marker assisted breeding for an enhanced production of the fine chemical.

[44685] Accordingly, the present invention relates to a method for breeding plants for the production of the fine chemical, comprising
[44686] (a) selecting a first plant variety with an increased production of the fine chemical, e.g. based on an increased expression of a nucleic acid molecule of the invention as disclosed herein, in particular of a nucleic acid molecule comprising a nucleic acid molecule as shown in the respective line in column 5 or 8 of Table I A or B of application no. 6, preferably the coding region thereof, or fragments or homologs thereof, or a polypeptide comprising a polypeptide as shown in the respective line in column 5 or 8 of Table II A or B of application no. 6, or fragments or homologs thereof, or comprising a consensus sequence or a polypeptide motif as shown in the respective line in column 8 of Table IV, or a homolog thereof, as described herein;
[44687] (b) associating the level of increased production of the fine chemical, with the expression level or the genomic structure of a gene encoding said polypeptide or said nucleic acid molecule;
[44688] (c) crossing the first plant variety with a second plant variety, which significantly differs in its level of fine chemical; and
[44689] (d) identifying, which of the offspring varieties has got increased production of the fine chemical by the expression level of said polypeptide or nucleic acid molecule or the genomic structure of the gene(s) encoding said polypeptide or nucleic acid molecule of the invention.

[44690] [0462.1.1.6] to [0482.1.1.6] for the disclosure of these paragraphs see [0462.1.1.1] to [0482.1.1.1] above.

[44691] [0482.2.6.6] [0482.3.6.6] In a further embodiment the present invention is characterized by the features as disclosed in the following items:

[44692] Item 1. A process for the production of the fine chemical isoleucine, leucine or valine, respectively
[44693] (a) increasing or generating one or more activities selected from the group consisting of 2,3-dihydroxyphenylpropionate 1,2-dioxygenase, 2-isopropylmalate synthase, 3-isopropylmalate dehydrogenase, 47266012-protein, 50S ribosomal protein L14, ABC transporter ATP binding component, ABC transporter ATP-binding protein, ABC transporter component, ABC transporter permease protein, acetolactate synthase, acetolactate synthase small subunit, acetyl CoA carboxylase, acetyl-CoA acetyltransferase, acetyltransferase, acid shock protein, acyl transferase, acyltransferase, adenylate kinase, adenylosuccinate lyase, agmatinase, aldehyde dehydrogenase, aminotransferase, anthranilate synthase component II, arginine exporter protein, At1g19800-protein, At1g23110-protein, At1g47380-protein, At4g32480-protein, At5g16650-protein, ATP-binding component of a transport system, auxin response factor, b0050-protein, b1003-protein, b1163-protein, b1445-protein, b1522-protein, b1670-protein, b1672-protein, b2513-protein, b2613-protein, b2673-protein, b2739-protein, b2812-protein, b3083-protein, b3490-protein, b3989-protein, b4029-protein, b4050-protein, b4056-protein, b4263-protein, beta-galactosidase, beta-hydroxylase, bifunctional protein (phosphoribosyltransferase and regulatory protein), binding-protein-dependent transport systems inner membrane component, branched chain aminotransferase, branched-chain amino acid permease, branched-chain aminoacid aminotransferase, calcium-dependent protein kinase, carbamoyl-phosphate synthase subunit, CBL-interacting protein kinase, cell division control protein, chaperone protein CIpB, cullin, cyclin, cyclin D, cytochrome c-type protein, dihydroxyacid dehydratase, disease resistance protein, DNA helicase II, DNA helicase IV, DNA mismatch repair protein, DNA polymerase, DNA-binding protein, elongation factor Tu, enoyl-CoA hydratase, eukaryotic translation initiation factor, eukaryotic translation initiation factor 5, ferredoxin, flavodoxin, fumarylacetoacetate hydrolase, GDP-mannose 4,6-dehydratase, geranylgeranyl pyrophosphate synthase, gluconate transport system permease 3, glucose-1-phosphate cytidylyltransferase, glucose-6-phosphate 1-dehydrogenase, glutamate-ammonia-ligase, glutamine synthetase, glutaredoxin, glycerol-3-phosphate dehydrogenase, glycogen (starch) synthase, glycogen synthase, glycoprotease, glycosyl transferase, GM02LC11114-protein, GM02LC5744-protein, H/ACA ribonucleoprotein complex subunit 3, harpin-induced family protein, heat shock transcription factor, hexose transporter, histone H2A, homocitrate synthase, homoserine dehydrogenase, hydrolase, iron(III) dicitrate-binding protein, isochorismate synthase, isopropylmalate isomerase large subunit, ketol-acid reductoisomerase, L-serine dehydratase, MADS-box transcription factor, major facilitator superfamily transporter protein, malate dehydrogenase, malic enzyme, membrane protein, membrane transport protein, methylglyoxal synthase, mitochondrial dicarboxylate transporter, monothiol glutaredoxin, murein transglycosylase, Na+/K+ transporter, NAD(P)H-quinone oxidoreductase subunit, NADH-quinone oxidoreductase subunit, NADP-dependent malic enzyme, Nucleoside monophosphate phosphohydrolase, O-antigen chain length determinant, oxidoreductase, oxireductase, peptidase, phosphate transporter, phosphoadenosine phosphosulfate reductase, phosphoanhydride phosphorylase, phosphoglycerate kinase, phosphopantetheine adenylyltransferase, photosystem II protein, polygalacturonase, polyphosphate kinase, precorrin methylase, protein kinase, protein phosphatase, protoporphyrin oxidase, purine nucleoside phosphorylase, purine-nucleoside phosphorylase, pyruvate kinase, riboflavin biosynthesis protein, ribosephosphate isomerase, constitutive, RNA binding protein, RNA-binding protein, Sec-independent protein translocase subunit, serine hydroxymethyltransferase, short-chain alcohol dehydrogenase family, sll1032-protein, sll1455-protein, sll1761-protein, superoxide dismutase, thioredoxin, thioredoxin family protein, threonine dehydratase, threonine synthase, transcription factor, transcriptional regulator, transport protein, trehalose-phosphatase, TTC1386-protein, urease subunit, vacuolar ATPase subunit, valine-pyruvate transaminase, YAL013W-protein, ydr183w-protein, ygl237c-protein, YGR193C-protein, yhr006w-protein, YKL038W-protein, YLR224W-protein, zinc finger protein, zinc transporter, and Zm_{—}4842_BE510522-protein, in a non-human organism or a part thereof, preferably a microorganism, a plant cell, a plant or a part thereof, as compared to a corresponding non-transformed wild type non-human organism or a part thereof; and
[44694] (b) growing the non-human organism or a part thereof under conditions which permit the respective production of isoleucine, leucine or valine, respectively, or a composition comprising isoleucine, leucine or valine, respectively, in said non-human organism or in the culture medium surrounding said non-human organism.

[44695] Item 2. A process for the production of a respective fine chemical isoleucine, leucine or valine, which comprises
[44696] (A)
[44697] (i) increasing or generating of the expression of; and/or
[44698] (ii) increasing or generating the expression of an expression product of; and/or
[44699] (iii) increasing or generating one or more activities of an expression product encoded by;
[44700] at least one respective nucleic acid molecule comprising a nucleic acid molecule selected from the group consisting of:
[44701] (a) a nucleic acid molecule encoding the polypeptide shown in column 5 or 8 of Table II, preferably Table II B, application no.6, or a homolog or a fragment thereof, whereby the respective line discloses in column 7 isoleucine, leucine or valine, respectively;
[44702] (b) a nucleic acid molecule shown in column 5 or 8 of Table I, preferably Table I B, application no.6, or a homolog or a fragment thereof (preferably the coding region thereof) , whereby the respective line discloses in column 7 isoleucine, leucine or valine, respectively;
[44703] (c) a nucleic acid molecule, which, as a result of the degeneracy of the genetic code, can be derived from a polypeptide sequence depicted in column 5 or 8 of Table II, preferably Table II B, application no.6, whereby the respective line discloses in column 7 isoleucine, leucine or valine, respectively;
[44704] (d) a nucleic acid molecule having at least 30%, in particular at least 50%, 60%, 70%, 80%, 85%, 90%, 95%, 97%, 98%, 99% or 99.5% identity with the nucleic acid molecule sequence of a polynucleotide comprising the nucleic acid molecule shown in column 5 or 8 of Table I, preferably Table I B, application no. 6, or the coding region thereof , whereby the respective line discloses in column 7 isoleucine, leucine or valine, respectively;
[44705] (e) a nucleic acid molecule encoding a polypeptide having at least 30%, in particular 50%, 60%, 70%, 80%, 85%, 90%, 95%, 97%, 98%, 99% or 99.5% identity with the amino acid sequence of the polypeptide encoded by the nucleic acid molecule of (a), (b), (c) or (d);
[44706] (f) a nucleic acid molecule which hybridizes with a nucleic acid molecule of (a), (b), (c), (d) or (e) under stringent hybridization conditions;
[44707] (g) a nucleic acid molecule encoding a polypeptide which can be isolated with the aid of monoclonal or polyclonal antibodies made against a polypeptide encoded by one of the nucleic acid molecules of (a), (b), (c), (d), (e) or (f);
[44708] (h) a nucleic acid molecule encoding a polypeptide comprising the consensus sequence or one or more polypeptide motifs as shown in column 8 of Table IV, application no.6, whereby the respective line discloses in column 7 isoleucine, leucine or valine, respectively;
[44709] (i) a nucleic acid molecule encoding a polypeptide having the activity represented by a respective protein as depicted in column 5 of Table II, application no. 6, whereby the respective line discloses in column 7 isoleucine, leucine or valine, respectively;
[44710] (j) a nucleic acid molecule which comprises a polynucleotide, which is obtained by amplifying a cDNA library or a genomic library using the primers as depicted in column 8 of Table III, application no. 6, whereby the respective line discloses in column 7 isoleucine, leucine or valine, respectively; and
[44711] (k) a nucleic acid molecule which is obtainable by screening a suitable nucleic acid library, especially a cDNA library and/or a genomic library, under stringent hybridization conditions with a probe comprising a complementary sequence of a nucleic acid molecule of (a), (b), (c), (d), (e), (f), (g), (h), (i) or (j) or with a fragment thereof, having at least 15 nt, preferably 20 nt, 30 nt, 50 nt, 100 nt, 200 nt, 500 nt, 1000 nt, 1500 nt, 2000 nt or 3000 nt of a nucleic acid molecule complementary to a nucleic acid molecule sequence characterized in (a), (b), (c), (d), (e), (f), (g), (h), (i) or (j);
[44712] or a nucleic acid molecule comprising a sequence which is complementary thereto; in a non-human organism or a part thereof, preferably a microorganism, a plant cell, a plant or a part thereof, as compared to a corresponding non-transformed wild type non-human organism or a part thereof; and
[44713] (B) growing the non-human organism or a part thereof under conditions which permit the respective production of isoleucine, leucine or valine or a composition comprising isoleucine, leucine or valine, respectively, in said non-human organism or in the culture medium surrounding said non-human organism.

[44714] Item 3. A process of items 1 or 2, comprising of recovering isoleucine, leucine or valine in its free or bound form.

[44715] Item 4. The process of any one of items 1 to 3, comprising the following steps:
[44716] (a) selecting a non-human organism or a part thereof expressing a polypeptide encoded by the nucleic acid molecule characterized in item 2;
[44717] (b) mutagenizing the selected non-human organism or the part thereof;
[44718] (c) comparing the activity or the expression level of said polypeptide in the mutagenized non-human organism or the part thereof with the activity or the expression of said polypeptide of the selected non-human organisms or the part thereof;
[44719] (d) selecting the mutated non-human organisms or parts thereof, which comprise an increased activity or expression level of said polypeptide compared to the selected non-human organism or the part thereof;
[44720] (e) optionally, growing and cultivating the non-human organisms or the parts thereof; and
[44721] (f) recovering, and optionally isolating, the free or bound isoleucine, leucine or valine, respectively, produced by the selected mutated non-human organisms or parts thereof.

[44722] Item 5. The process of any one of items 1 to 4 wherein the activity of said protein or the expression of said nucleic acid molecule is increased or generated transiently or stably.

[44723] Item 6. An isolated nucleic acid molecule comprising a nucleic acid molecule selected from the group consisting of:
[44724] (a) a nucleic acid molecule encoding a polypeptide shown in Table II, application no. 6, column 5 or 8, preferably shown in Table II B, application no. 6, column 8, or a homolog or a fragment thereof;
[44725] (b) a nucleic acid molecule shown in Table I, application no. 6, column 5 or 8, preferably shown in Table I B, application no. 6, column 8, preferably the coding region thereof, or a homolog or a fragment thereof;
[44726] (c) a nucleic acid molecule, which, as a result of the degeneracy of the genetic code, can be derived from a polypeptide sequence depicted in column 5 or 8 of Table II, application no. 6, preferably in column 8 of Table II B, application no. application no.;
[44727] (d) a nucleic acid molecule having at least 30% identity, preferably at least 40%, 50%, 60%, 70%, 75%, 80%, 85%, 90%, 95%, 96%, 97%, 98%, 99%, 99,5%, with the nucleic acid molecule sequence of a polynucleotide comprising the nucleic acid molecule shown in column 5 or 8 of Table I, application no. 3, preferably shown in column 8 of Table I B, application no. 6, preferably the coding region thereof;
[44728] (e) a nucleic acid molecule encoding a polypeptide having at least 30% identity, preferably at least 40%, 50% 60%, 70%, 75%, 80%, 85%, 90%, 95%, 96%, 97%, 98%, 99%, 99,5%, identity with the amino acid sequence of the polypeptide encoded by the nucleic acid molecule of (a), (b), (c) or (d);
[44729] (f) a nucleic acid molecule which hybridizes with a nucleic acid molecule of (a), (b), (c), (d) or (e) under stringent hybridisation conditions;
[44730] (g) a nucleic acid molecule encoding a polypeptide which can be isolated with the aid of monoclonal or polyclonal antibodies made against a polypeptide encoded by one of the nucleic acid molecules of (a), (b), (c), (d), (e) or (f);
[44731] (h) a nucleic acid molecule encoding a polypeptide comprising the consensus sequence or one or more polypeptide motifs as shown in column 8 of Table IV, application no. 6;
[44732] (i) a nucleic acid molecule encoding a polypeptide having the activity represented by a respective protein as depicted in column 5 of Table II, application no. 6;
[44733] (j) a nucleic acid molecule comprising a polynucleotide which is obtained by amplifying a cDNA library or a genomic library using the primers in Table III, application no. 6, column 8;
[44734] and
[44735] (k) nucleic acid molecule which is obtainable by screening a suitable nucleic acid library, especially a cDNA library and/or a genomic library, under stringent hybridization conditions with a probe comprising one of the sequences of the nucleic acid molecule of (a), (b), (c), (d), (e), (f), (g), (h), (i) or (j) or with a fragment of at least 15 nt, preferably 20 nt, 30 nt, 50 nt, 100 nt, 200 nt,500 nt, 1000 nt, 1500 nt, 2000 nt or 3000 nt of the nucleic acid molecule characterized in (a), (b), (c), (d), (e), (f), (g), (h), (i) or (j) ;
[44736] or a nucleic acid molecule comprising a sequence which is complementary thereto.

[44737] Item 7. A nucleic acid construct which confers the expression of the nucleic acid molecule as defined in item 6, comprising one or more regulatory elements.

[44738] Item 8. An expression cassette comprising
[44739] (a) a promoter, preferably selected from the group consisting of Big35S, PCUbi, Super and USP;
[44740] (b) a nucleic acid molecule as defined in item 6.

[44741] Item 9. A vector comprising the nucleic acid molecule as defined in item 6 or the nucleic acid construct as claimed in item 7 or the expression cassette as claimed in item 8.

[44742] Item 10. A host cell or a plant organelle, which has been transformed with the vector as claimed in item 9 or the nucleic acid molecule as defined in item 6 or the nucleic acid construct as claimed in item 7 or the expression cassette as claimed in item 8.

[44743] Item 11. The host cell of item 10, which is a plant cell or a microorganism.

[44744] Item 12. A process for producing a polypeptide, wherein the polypeptide is expressed in a host cell as claimed in item 10 or 11.

[44745] Item 13. A polypeptide produced by the process as claimed in item 12 or encoded by the nucleic acid molecule as defined in item 6.

[44746] Item 14. An antibody, which binds specifically to the polypeptide as claimed in item 13.

[44747] Item 15. A plant tissue, propagation material, harvested material or a plant comprising the host cell as claimed in item 10 or 11.

[44748] Item 16. A process for the identification of a compound conferring an increase in isoleucine, leucine or valine production, respectively, in a non-human organism, comprising the steps:
[44749] (a) culturing a plant cell or tissue or microorganism or maintaining a plant expressing the polypeptide encoded by the nucleic acid molecule as defined in item 6 conferring an increase in the amount of the respective isoleucine, leucine or valine in a non-human organism or a part thereof and a readout system capable of interacting with the polypeptide under suitable conditions which permit the interaction of the polypeptide with said readout system in the presence of a compound or a sample comprising a plurality of compounds and capable of providing a detectable signal in response to the binding of a compound to said polypeptide under conditions which permit the expression of said readout system and of the polypeptide encoded by the nucleic acid molecule of item 6 conferring an increase in the amount of the respective isoleucine, leucine or valinein a non-human organism or a part thereof;
[44750] (b) identifying if the compound is an effective agonist by detecting the presence or absence or increase of a signal produced by said readout system.

[44751] Item 17. A method for the production of an agricultural composition comprising the steps of the method of item 16 and formulating the compound identified in item 16 in a form acceptable for an application in agriculture.

[44752] Item 18. A composition comprising the nucleic acid molecule as defined in item 6, the polypeptide as claimed in item 13, the nucleic acid construct as claimed in item 7, the expression cassette as claimed in item 8, the vector as claimed in item 9, the compound as claimed in item 16, the antibody as claimed in item 14, and optionally an agricultural acceptable carrier.

[44753] Item 19. Use of the nucleic acid molecule as defined in item 6 for the identification of a nucleic acid molecule conferring an increase in isoleucine, leucine or valine, respectively, after expression.

[44754] Item 20. Cosmetic, pharmaceutical, food or feed composition comprising the nucleic acid moleculeas defined in item 6, the polypeptide as claimed in item 13, the nucleic acid construct as claimed in item 7, the expression cassette as claimed in item 8, the vector as claimed in item 9, the antibody as claimed in item 14 , the plant or a part thereof, or plant tissue as claimed in item 15, the harvested material or propagation material as claimed in item 15 or the host cell of item as claimed in items 10 or 11.

[44755] Item 21. Use of the nuclei acid molecule as defined in item 6, the polypeptide as claimed in item 13, the nucleic acid construct as claimed in item 7, the expression cassette as claimed in item 8, the vector as claimed in claim9, the plant or plant tissue as claimed in item 15, or the host cell of item 10 to 11 for the production of plant resistant to a herbicide inhibiting the production of isoleucine, leucine or valine, respectively.

[44756] [0483.1.1.6] to [0494.1.1.6] for the disclosure of these paragraphs see [0483.1.1.1] to [0494.1.1.1] above.

### Example 11a

### PCR Amplification of the Sequences

[44757] Unless otherwise specified, standard methods as described in Sambrook et al., Molecular Cloning: A laboratory manual, Cold Spring Harbor 1989, Cold Spring Harbor Laboratory Press are used.

[44758] The inventive sequences as shown in the respective line in Table I, column 5, preferably the coding region thereof, were amplified by PCR as described in the protocol of the Pfu Ultra, Pfu Turbo or Herculase DNA polymerase (Stratagene). The composition for the protocol of the Pfu Ultra, Pfu Turbo or Herculase DNA polymerase was as follows: 1×PCR buffer (Stratagene), 0.2 mM of each dNTP, 100 ng genomic DNA of Saccharomyces cerevisiae (strain S288C; Research Genetics, Inc., now Invitrogen), Escherichia coli (strain MG1655; E. coli Genetic Stock

[44759] Center), Synechocystis sp. (strain PCC6803), Azotobacter vinelandii (strain N.R. Smith,16), Thermus thermophilus (HB8) or 50 ng cDNA from various tissues and development stages of Arabidopsis thaliana (ecotype Columbia), Physcomitrella patens, Glycine max (variety Resnick), Brassica napus, Oryza sativa or Zea mays (variety B73, Mo17, A188), 50 pmol forward primer, 50 pmol reverse primer, with or without 1 M Betaine, 2.5 u Pfu Ultra, Pfu Turbo or Herculase DNA polymerase.

[44760] The amplification cycles were as follows:

[44761] 1 cycle of 2-3 minutes at 94-95° C., then 25-36 cycles with 30-60 seconds at 94-95° C., 30-45 seconds at 50-60° C. and 210-480 seconds at 72° C., followed by 1 cycle of 5-10 minutes at 72° C., then 4-16° C.—preferably for Saccharomyces cerevisiae, Escherichia coli, Synechocystis sp., Azotobacter vinelandii, Thermus thermophilus.

[44762] In case of Arabidopsis thaliana, Brassica napus, Glycine max, Oryza sativa, Physcomitrella patens, Zea mays the amplification cycles were as follows: 1 cycle with 30 seconds at 94° C., 30 seconds at 61° C., 15 minutes at 72° C., then 2 cycles with 30 seconds at 94° C., 30 seconds at 60° C., 15 minutes at 72° C., then 3 cycles with 30 seconds at 94° C., 30 seconds at 59° C., 15 minutes at 72° C., then 4 cycles with 30 seconds at 94° C., 30 seconds at 58° C., 15 minutes at 72° C., then 25 cycles with 30 seconds at 94° C., 30 seconds at 57° C., 15 minutes at 72° C., then 1 cycle with 10 minutes at 72° C., then finally 4-16° C.

[44763] RNAs were generated with the RNeasy Plant Kit according to the standard protocol (Qiagen) and Superscript II Reverse Transkriptase was used to produce double stranded cDNA according to the standard protocol (Invitrogen).

[44764] ORF specific primer pairs for the genes to be expressed are shown in the respective line in Table III, column 8. The following adapter sequences were added to Saccharomyces cerevisiae ORF specific primers (see Table III) for cloning purposes:

SEQ ID NO: 20
i)foward primer: 5′-GGAATTCCAGCTGACCACC-3′
SEQ ID NO: 21
ii) reverse primer: 5′-GATCCCCGGGAATTGCCATG-3′

[44765] These adaptor sequences allow cloning of the ORF into the various vectors containing the Resgen adaptors, see table column E of Table c.

[44766] The following adapter sequences were added to Saccharomyces cerevisiae, Escherichia coli, Synechocystis sp., Azotobacter vinelandii, Thermus thermophilus, Arabidopsis thaliana, Brassica napus, Glycine max, Oryza sativa , Physcomitrella patens, or Zea mays ORF specific primers for cloning purposes:

SEQ ID NO: 22
iii) forward primer: 5′-TTGCTCTTCC- 3′
SEQ ID NO: 23
iiii) reverse primer: 5′-TTGCTCTTCG-3′

[44767] The adaptor sequences allow cloning of the ORF into the various vectors containing the Colic adaptors, see table column E of Table c.

[44768] Therefore for amplification and cloning of Saccharomyces cerevisiae SEQ ID NO: 62717, a primer consisting of the adaptor sequence i) and the ORF specific sequence SEQ ID NO: 63159 and a second primer consisting of the adaptor sequence ii) and the ORF specific sequence SEQ ID NO: 63160 were used.

[44769] For amplification and cloning of Escherichia coli SEQ ID NO: 6818, a primer consisting of the adaptor sequence iii) and the ORF specific sequence SEQ ID NO: 7076 and a second primer consisting of the adaptor sequence iiii) and the ORF specific sequence SEQ ID NO: 7077 were used.

[44770] For amplification and cloning of Synechocystis sp. SEQ ID NO: 12140, a primer consisting of the adaptor sequence iii) and the ORF specific sequence SEQ ID NO: 12336 and a second primer consisting of the adaptor sequence iiii) and the ORF specific sequence SEQ ID NO: 12337 were used.

[44771] For amplification and cloning of Arabidopsis thaliana SEQ ID NO: 385, a primer consisting of the adaptor sequence iii) and the ORF specific sequence SEQ ID NO: 623 and a second primer consisting of the adaptor sequence iiii) and the ORF specific sequence SEQ ID NO: 624 were used.

[44772] For amplification and cloning of Azotobacter vinelandii SEQ ID NO: 5557, a primer consisting of the adaptor sequence iii) and the ORF specific sequence SEQ ID NO: 6033 and a second primer consisting of the adaptor sequence iiii) and the ORF specific sequence SEQ ID NO: 6034 were used.

[44773] For amplification and cloning of Brassica napus SEQ ID NO: 15532, a primer consisting of the adaptor sequence iii) and the ORF specific sequence SEQ ID NO: 16150 and a second primer consisting of the adaptor sequence iiii) and the ORF specific sequence SEQ ID NO: 16151 were used.

[44774] For amplification and cloning of Glycine max SEQ ID NO: 10811, a primer consisting of the adaptor sequence iii) and the ORF specific sequence SEQ ID NO: 11207 and a second primer consisting of the adaptor sequence iiii) and the ORF specific sequence SEQ ID NO: 11208 were used.

[44775] For amplification and cloning of Physcomytrella patens SEQ ID NO: 45757, a primer consisting of the adaptor sequence iii) and the ORF specific sequence SEQ ID NO: 45791 and a second primer consisting of the adaptor sequence iiii) and the ORF specific sequence SEQ ID NO: 45792 were used.

[44776] For amplification and cloning of Thermus thermophilus SEQ ID NO: 12698, a primer consisting of the adaptor sequence iii) and the ORF specific sequence SEQ ID NO: 12970 and a second primer consisting of the adaptor sequence iiii) and the ORF specific sequence SEQ ID NO: 12971 were used.

[44777] For amplification and cloning of Zea mays SEQ ID NO: 68413, a primer consisting of the adaptor sequence iii) and the ORF specific sequence SEQ ID NO: 68531 and a second primer consisting of the adaptor sequence iiii) and the ORF specific sequence SEQ ID NO: 68532 were used.

[44778] Following these examples every sequence disclosed in Table I, preferably column 5, especially the coding region thereof can be cloned by fusing the adaptor sequences to the respective specific primers sequences as disclosed in Table III, column 8 using the respective vectors shown in Table c.

[44779] [0496.1.1.6] to [0499.1.1.6] for the disclosure of these paragraphs see [0496.1.1.1] to [0499.1.1.1] above.

### Example 11e

### Cloning of Inventive Sequences as Shown in Table I, Column 5 in the Different Expression Vectors

[44780] For cloning of for example SEQ ID NO: 6818 from Escherichia coli or any other ORF from Escherichia coli, Synechocystis sp., Azotobacter vinelandii, Thermus thermophilus, Arabidopsis thaliana, Brassica napus, Glycine max, Physcomitrella patens, or Zea mays the vector DNA was treated with the restriction enzymes Pacl and Ncol following the standard protocol (MBI Fermentas).

[44781] For cloning for example the ORFs of SEQ ID NO: 62717 from Saccharomyces cerevisiae or any other ORF from Saccharomyces cerevisiae into vectors containing the Resgen adaptor sequence the respective vector DNA was treated with the restriction enzyme Ncol.

[44782] For cloning of for example ORFs SEQ ID NO: 14885 from Saccharomyces cerevisiae or any other ORF from Saccharomyces cerevisiae into vectors containing the Colic adaptor sequence, the respective vector DNA was treated with the restriction enzymes Pacl and Ncol following the standard protocol (MBI Fermentas).

[44783] In all cases the reaction was stopped by inactivation at 70° C. for 20 minutes and purified over QIAquick or NucleoSpin Extract II columns following the standard protocol (Qiagen or Macherey-Nagel).

[44784] Then the PCR-product representing the amplified ORF with the respective adapter sequences and the vector DNA were treated with T4 DNA polymerase according to the standard protocol (MBI Fermentas) to produce single stranded overhangs with the parameters 1 unit T4 DNA polymerase at 37° C. for 2-10 minutes for the vector and 1-2 u T4 DNA polymerase at 15-17° C. for 10-60 minutes for the PCR product representing SEQ ID NO: 6818.

[44785] The reaction was stopped by addition of high-salt buffer and purified over QIAquick or NucleoSpin Extract II columns following the standard protocol (Qiagen or Macherey-Nagel).

[44786] According to this example the skilled person is able to clone all sequences disclosed in Table I, preferably column 5 or column 8, especially the coding region thereof.

[44787] Approximately 30-60 ng of prepared vector and a defined amount of prepared amplificate were mixed and hybridized at 65° C. for 15 minutes followed by 37° C. 0,1 ° C./1 seconds, followed by 37° C. 10 minutes, followed by 0,1 ° C./1 seconds, then 4-10 ° C.

[44788] The ligated constructs were transformed in the same reaction vessel by addition of competent E. coli cells (strain DHSalpha) and incubation for 20 minutes at 1° C. followed by a heat shock for 90 seconds at 42° C. and cooling to 1-4° C. Then, complete medium (SOC) was added and the mixture was incubated for 45 minutes at 37° C. The entire mixture was subsequently plated onto an agar plate with 0.05 mg/ml kanamycin and incubated overnight at 37° C.

[44789] The outcome of the cloning step was verified by amplification with the aid of primers which bind upstream and downstream of the integration site, thus allowing the amplification of the insertion. The amplifications were carried out as described in the protocol of Taq DNA polymerase (Gibco-BRL).

[44790] The amplification cycles were as follows:

[44791] 1 cycle of 1-5 minutes at 94° C., followed by 35 cycles of in each case 15-60 seconds at 94° C., 15-60 seconds at 50-66° C. and 5-15 minutes at 72° C., followed by 1 cycle of 10 minutes at 72° C., then 4-16° C.

[44792] Several colonies were checked, but only one colony for which a PCR product of the expected size was detected was used in the following steps.

[44793] A portion of this positive colony was transferred into a reaction vessel filled with complete medium (LB) supplemented with kanamycin and incubated overnight at 37° C.

[44794] The plasmid preparation was carried out as specified in the Qiaprep or NucleoSpin Multi-96 Plus standard protocol (Qiagen or Macherey-Nagel).

[44795] [0501.1.1.6] to [0503.1.1.6] for the disclosure of these paragraphs see [0501.1.1.1] to [0503.1.1.1] above. Table d showing results of plant analyses

TABLE d

| SeqID | Target | Locus | Metabolite | Source | Promotor | Method | Min | Max |
|---|---|---|---|---|---|---|---|---|
| 15187 | non- | 47266012_SOYBEAN | isoleucine | ARA_LEAF | p-PcUBI | GC | 36 | 43 |
| | targeted | | | | | | | |
| 15532 | plastidic | 51340801_CANOLA | leucine | ARA_LEAF | p-PcUBI | GC | 80 | 500 |
| 15532 | plastidic | 51340801_CANOLA | valine | ARA_LEAF | p-PcUBI | GC | 34 | 207 |
| 16263 | plastidic | 59554615_SOYBEAN | valine | ARA_LEAF | p-PcUBI | GC | 22 | 74 |
| 16883 | plastidic | 59582753_SOYBEAN | isoleucine | ARA_LEAF | p-PcUBI | GC | 33 | 45 |
| 16883 | plastidic | 59582753_SOYBEAN | leucine | ARA_LEAF | p-PcUBI | GC | 47 | 54 |
| 16883 | plastidic | 59582753_SOYBEAN | valine | ARA_LEAF | p-PcUBI | GC | 45 | 97 |
| 17451 | non- | At1g07430 | valine | ARA_LEAF | p-PcUBI | GC | 24 | 39 |
| | targeted | | | | | | | |
| 385 | non- | At1g14490 | valine | ARA_LEAF | p-PcUBI | GC | 21 | 54 |
| | targeted | | | | | | | |
| 17637 | non- | At1g19800 | isoleucine | ARA_LEAF | p-PcUBI | GC | 45 | 805 |
| | targeted | | | | | | | |
| 17637 | non- | At1g19800 | leucine | ARA_LEAF | p-PcUBI | GC | 115 | 1238 |
| | targeted | | | | | | | |
| 102086 | non- | At1g23110 | valine | ARA_LEAF | p-PcUBI | GC | 28 | 40 |
| | targeted | | | | | | | |
| 17701 | non- | At1g26830 | isoleucine | ARA_LEAF | p-PcUBI | GC | 45 | 143 |
| | targeted | | | | | | | |
| 17701 | non- | At1g26830 | leucine | ARA_LEAF | p-PcUBI | GC | 59 | 187 |
| | targeted | | | | | | | |
| 17968 | non- | At1g36730 | isoleucine | ARA_LEAF | p-PcUBI | GC | 49 | 162 |
| | targeted | | | | | | | |
| 17968 | non- | At1g36730 | leucine | ARA_LEAF | p-PcUBI | GC | 52 | 149 |
| | targeted | | | | | | | |
| 18070 | non- | At1g43850 | isoleucine | ARA_LEAF | p-PcUBI | GC | 69 | 406 |
| | targeted | | | | | | | |
| 18070 | non- | At1g43850 | leucine | ARA_LEAF | p-PcUBI | GC | 58 | 377 |
| | targeted | | | | | | | |
| 18070 | non- | At1g43850 | valine | ARA_LEAF | p-PcUBI | GC | 58 | 173 |
| | targeted | | | | | | | |
| 18122 | non- | At1g47380 | leucine | ARA_LEAF | p-PcUBI | GC | 51 | 134 |
| | targeted | | | | | | | |
| 18122 | non- | At1g47380 | valine | ARA_LEAF | p-PcUBI | GC | 20 | 105 |
| | targeted | | | | | | | |
| 18235 | non- | At1g48260 | isoleucine | ARA_LEAF | p-PcUBI | GC | 78 | 747 |
| | targeted | | | | | | | |
| 18235 | non- | At1g48260 | leucine | ARA_LEAF | p-PcUBI | GC | 86 | 639 |
| | targeted | | | | | | | |
| 18235 | non- | At1g48260 | valine | ARA_LEAF | p-PcUBI | GC | 51 | 277 |
| | targeted | | | | | | | |
| 18869 | non- | At1g61950 | isoleucine | ARA_LEAF | p-PcUBI | GC | 96 | 174 |
| | targeted | | | | | | | |
| 18869 | non- | At1g61950 | leucine | ARA_LEAF | p-PcUBI | GC | 99 | 169 |
| | targeted | | | | | | | |
| 18869 | non- | At1g61950 | valine | ARA_LEAF | p-PcUBI | GC | 43 | 84 |
| | targeted | | | | | | | |
| 102119 | non- | At1g68410 | isoleucine | ARA_LEAF | p-PcUBI | GC | 41 | 140 |
| | targeted | | | | | | | |
| 102119 | non- | At1g68410 | leucine | ARA_LEAF | p-PcUBI | GC | 50 | 137 |
| | targeted | | | | | | | |
| 19419 | non- | At1g72770 | valine | ARA_LEAF | p-PcUBI | GC | 22 | 134 |
| | targeted | | | | | | | |
| 19502 | non- | At2g17560 | valine | ARA_LEAF | p-PcUBI | GC | 25 | 108 |
| | targeted | | | | | | | |
| 19874 | non- | At2g28890 | isoleucine | ARA_LEAF | p-PcUBI | GC | 33 | 738 |
| | targeted | | | | | | | |
| 19874 | non- | At2g28890 | valine | ARA_LEAF | p-PcUBI | GC | 26 | 321 |
| | targeted | | | | | | | |
| 19919 | non- | At2g30360 | isoleucine | ARA_LEAF | p-PcUBI | GC | 35 | 810 |
| | targeted | | | | | | | |
| 19919 | non- | At2g30360 | leucine | ARA_LEAF | p-PcUBI | GC | 64 | 947 |
| | targeted | | | | | | | |
| 19919 | non- | At2g30360 | valine | ARA_LEAF | p-PcUBI | GC | 137 | 277 |
| | targeted | | | | | | | |
| 20346 | non- | At2g30540 | isoleucine | ARA_LEAF | p-PcUBI | GC | 39 | 206 |
| | targeted | | | | | | | |
| 20346 | non- | At2g30540 | leucine | ARA_LEAF | p-PcUBI | GC | 66 | 243 |
| | targeted | | | | | | | |
| 20346 | non- | At2g30540 | valine | ARA_LEAF | p-PcUBI | GC | 24 | 183 |
| | targeted | | | | | | | |
| 21159 | non- | At2g47880 | valine | ARA_LEAF | p-PcUBI | GC | 65 | 227 |
| | targeted | | | | | | | |
| 21497 | plastidic | At3g04050 | isoleucine | ARA_LEAF | p-PcUBI | GC | 39 | 470 |
| 21497 | plastidic | At3g04050 | leucine | ARA_LEAF | p-PcUBI | GC | 64 | 1234 |
| 21497 | plastidic | At3g04050 | valine | ARA_LEAF | p-PcUBI | GC | 35 | 681 |
| 22249 | non- | At3g08710 | isoleucine | ARA_LEAF | p-PcUBI | GC | 34 | 264 |
| | targeted | | | | | | | |
| 22249 | non- | At3g08710 | leucine | ARA_LEAF | p-PcUBI | GC | 53 | 221 |
| | targeted | | | | | | | |
| 22611 | non- | At3g11650 | isoleucine | ARA_LEAF | p-PcUBI | GC | 50 | 191 |
| | targeted | | | | | | | |
| 22611 | non- | At3g11650 | leucine | ARA_LEAF | p-PcUBI | GC | 52 | 216 |
| | targeted | | | | | | | |
| 22832 | non- | At3g18524 | isoleucine | ARA_LEAF | p-PcUBI | GC | 34 | 61 |
| | targeted | | | | | | | |
| 22832 | non- | At3g18524 | leucine | ARA_LEAF | p-PcUBI | GC | 61 | 87 |
| | targeted | | | | | | | |
| 22832 | non- | At3g18524 | valine | ARA_LEAF | p-PcUBI | GC | 21 | 31 |
| | targeted | | | | | | | |
| 1815 | non- | At3g23000 | isoleucine | ARA_LEAF | p-PcUBI | GC | 63 | 717 |
| | targeted | | | | | | | |
| 1815 | non- | At3g23000 | leucine | ARA_LEAF | p-PcUBI | GC | 82 | 562 |
| | targeted | | | | | | | |
| 1815 | non- | At3g23000 | valine | ARA_LEAF | p-PcUBI | GC | 42 | 249 |
| | targeted | | | | | | | |
| 68727 | non- | At3g26400 | isoleucine | ARA_LEAF | p-PcUBI | GC | 46 | 133 |
| | targeted | | | | | | | |
| 68727 | non- | At3g26400 | leucine | ARA_LEAF | p-PcUBI | GC | 51 | 129 |
| | targeted | | | | | | | |
| 68727 | non- | At3g26400 | valine | ARA_LEAF | p-PcUBI | GC | 32 | 76 |
| | targeted | | | | | | | |
| 68777 | non- | At3g27540 | isoleucine | ARA_LEAF | p-PcUBI | GC | 79 | 428 |
| | targeted | | | | | | | |
| 68777 | non- | At3g27540 | leucine | ARA_LEAF | p-PcUBI | GC | 89 | 469 |
| | targeted | | | | | | | |
| 68777 | non- | At3g27540 | valine | ARA_LEAF | p-PcUBI | GC | 26 | 161 |
| | targeted | | | | | | | |
| 2367 | non- | At3g61830 | isoleucine | ARA_LEAF | p-PcUBI | GC | 39 | 965 |
| | targeted | | | | | | | |
| 2367 | non- | At3g61830 | leucine | ARA_LEAF | p-PcUBI | GC | 67 | 1444 |
| | targeted | | | | | | | |
| 2367 | non- | At3g61830 | valine | ARA_LEAF | p-PcUBI | GC | 27 | 397 |
| | targeted | | | | | | | |
| 2935 | non- | At3g62950 | isoleucine | ARA_LEAF | p-PcUBI | GC | 60 | 274 |
| | targeted | | | | | | | |
| 2935 | non- | At3g62950 | leucine | ARA_LEAF | p-PcUBI | GC | 85 | 337 |
| | targeted | | | | | | | |
| 2935 | non- | At3g62950 | valine | ARA_LEAF | p-PcUBI | GC | 37 | 118 |
| | targeted | | | | | | | |
| 24232 | non- | At4g18880 | isoleucine | ARA_LEAF | p-PcUBI | GC | 52 | 136 |
| | targeted | | | | | | | |
| 68849 | non- | At4g26080 | valine | ARA_LEAF | p-PcUBI | GC | 21 | 56 |
| | targeted | | | | | | | |
| 4040 | non- | At4g32480 | isoleucine | ARA_LEAF | p-PcUBI | GC | 74 | 355 |
| | targeted | | | | | | | |
| 4040 | non- | At4g32480 | leucine | ARA_LEAF | p-PcUBI | GC | 53 | 320 |
| | targeted | | | | | | | |
| 4040 | non- | At4g32480 | valine | ARA_LEAF | p-PcUBI | GC | 29 | 286 |
| | targeted | | | | | | | |
| 24311 | non- | At4g34160 | isoleucine | ARA_LEAF | p-PcUBI | GC | 46 | 199 |
| | targeted | | | | | | | |
| 24311 | non- | At4g34160 | leucine | ARA_LEAF | p-PcUBI | GC | 83 | 188 |
| | targeted | | | | | | | |
| 24311 | non- | At4g34160 | valine | ARA_LEAF | p-PcUBI | GC | 23 | 115 |
| | targeted | | | | | | | |
| 4348 | non- | At4g35310 | isoleucine | ARA_LEAF | p-PcUBI | GC | 35 | 645 |
| | targeted | | | | | | | |
| 4348 | non- | At4g35310 | leucine | ARA_LEAF | p-PcUBI | GC | 164 | 698 |
| | targeted | | | | | | | |
| 4348 | non- | At4g35310 | valine | ARA_LEAF | p-PcUBI | GC | 39 | 329 |
| | targeted | | | | | | | |
| 68987 | non- | At5g02760 | isoleucine | ARA_LEAF | p-PcUBI | GC | 40 | 305 |
| | targeted | | | | | | | |
| 25283 | non- | At5g16650 | isoleucine | ARA_LEAF | p-PcUBI | GC | 48 | 142 |
| | targeted | | | | | | | |
| 25283 | non- | At5g16650 | valine | ARA_LEAF | p-PcUBI | GC | 24 | 86 |
| | targeted | | | | | | | |
| 4904 | non- | At5g18600 | valine | ARA_LEAF | p-PcUBI | GC | 31 | 59 |
| | targeted | | | | | | | |
| 69574 | non- | At5g39950 | leucine | ARA_LEAF | p-PcUBI | GC | 53 | 145 |
| | targeted | | | | | | | |
| 69574 | non- | At5g39950 | valine | ARA_LEAF | p-PcUBI | GC | 23 | 50 |
| | targeted | | | | | | | |
| 102223 | non- | At5g45060 | valine | ARA_LEAF | p-PcUBI | GC | 24 | 70 |
| | targeted | | | | | | | |
| 102373 | plastidic | At5g56350 | isoleucine | ARA_LEAF | p-PcUBI | GC | 35 | 84 |
| 102373 | plastidic | At5g56350 | leucine | ARA_LEAF | p-PcUBI | GC | 56 | 69 |
| 70006 | non- | At5g60110 | valine | ARA_LEAF | p-PcUBI | GC | 21 | 41 |
| | targeted | | | | | | | |
| 102899 | non- | At5g60440 | isoleucine | ARA_LEAF | p-PcUBI | GC | 33 | 474 |
| | targeted | | | | | | | |
| 102899 | non- | At5g60440 | leucine | ARA_LEAF | p-PcUBI | GC | 51 | 643 |
| | targeted | | | | | | | |
| 70038 | plastidic | At5g63680 | isoleucine | ARA_LEAF | p-PcUBI | GC | 41 | 182 |
| 70038 | plastidic | At5g63680 | leucine | ARA_LEAF | p-PcUBI | GC | 55 | 358 |
| 70038 | plastidic | At5g63680 | valine | ARA_LEAF | p-PcUBI | GC | 31 | 254 |
| 5493 | non- | At5g64920 | valine | ARA_LEAF | p-PcUBI | GC | 35 | 83 |
| | targeted | | | | | | | |
| 5557 | non- | Avin-DRAFT_1495 | isoleucine | ARA_LEAF | p-PcUBI | GC | 85 | 297 |
| | targeted | | | | | | | |
| 5557 | non- | AvinDRAFT_1495 | leucine | ARA_LEAF | p-PcUBI | GC | 98 | 461 |
| | targeted | | | | | | | |
| 5557 | non- | AvinDRAFT_1495 | valine | ARA_LEAF | p-PcUBI | GC | 50 | 122 |
| | targeted | | | | | | | |
| 26434 | non- | AvinDRAFT_1806 | valine | ARA_LEAF | p-PcUBI | GC | 21 | 47 |
| | targeted | | | | | | | |
| 6040 | non- | AvinDRAFT_2091 | valine | ARA_LEAF | p-PcUBI | GC | 32 | 131 |
| | targeted | | | | | | | |
| 27021 | non- | AvinDRAFT_2344 | isoleucine | ARA_LEAF | p-PcUBI | GC | 43 | 379 |
| | targeted | | | | | | | |
| 27021 | non- | AvinDRAFT_2344 | leucine | ARA_LEAF | p-PcUBI | GC | 114 | 353 |
| | targeted | | | | | | | |
| 27021 | non- | AvinDRAFT_2344 | valine | ARA_LEAF | p-PcUBI | GC | 47 | 203 |
| | targeted | | | | | | | |
| 71763 | non- | Avin- | valine | ARA_LEAF | p-PcUBI | GC | 22 | 62 |
| | targeted | DRAFT_2369 | | | | | | |
| 27882 | non- | AvinDRAFT_2521 | valine | ARA_LEAF | p-PcUBI | GC | 31 | 94 |
| | targeted | | | | | | | |
| 28738 | non- | AvinDRAFT_3159 | isoleucine | ARA_LEAF | p-PcUBI | GC | 114 | 177 |
| | targeted | | | | | | | |
| 28738 | non- | AvinDRAFT_3159 | leucine | ARA_LEAF | p-PcUBI | GC | 134 | 194 |
| | targeted | | | | | | | |
| 28738 | non- | AvinDRAFT_3159 | valine | ARA_LEAF | p-PcUBI | GC | 46 | 98 |
| | targeted | | | | | | | |
| 29286 | non- | AvinDRAFT_3209 | isoleucine | ARA_LEAF | p-PcUBI | GC | 41 | 207 |
| | targeted | | | | | | | |
| 29286 | non- | AvinDRAFT_3209 | leucine | ARA_LEAF | p-PcUBI | GC | 75 | 190 |
| | targeted | | | | | | | |
| 29286 | non- | AvinDRAFT_3209 | valine | ARA_LEAF | p-PcUBI | GC | 37 | 99 |
| | targeted | | | | | | | |
| 29397 | non- | AvinDRAFT_3250 | isoleucine | ARA_LEAF | p-PcUBI | GC | 120 | 251 |
| | targeted | | | | | | | |
| 29397 | non- | AvinDRAFT_3250 | leucine | ARA_LEAF | p-PcUBI | GC | 85 | 298 |
| | targeted | | | | | | | |
| 29397 | non- | AvinDRAFT_3250 | valine | ARA_LEAF | p-PcUBI | GC | 25 | 101 |
| | targeted | | | | | | | |
| 29500 | non- | AvinDRAFT_3253 | isoleucine | ARA_LEAF | p-PcUBI | GC | 35 | 67 |
| | targeted | | | | | | | |
| 29500 | non- | AvinDRAFT_3253 | leucine | ARA_LEAF | p-PcUBI | GC | 51 | 66 |
| | targeted | | | | | | | |
| 29500 | non- | AvinDRAFT_3253 | valine | ARA_LEAF | p-PcUBI | GC | 20 | 52 |
| | targeted | | | | | | | |
| 72520 | non- | AVIN- | valine | ARA_LEAF | p-PcUBI | GC | 22 | 64 |
| | targeted | DRAFT_4128 | | | | | | |
| 31717 | non- | AvinDRAFT_4384 | valine | ARA_LEAF | p-PcUBI | GC | 24 | 32 |
| | targeted | | | | | | | |
| 31926 | non- | AvinDRAFT_4562 | isoleucine | ARA_LEAF | p-PcUBI | GC | 59 | 77 |
| | targeted | | | | | | | |
| 31926 | non- | AvinDRAFT_4562 | valine | ARA_LEAF | p-PcUBI | GC | 26 | 56 |
| | targeted | | | | | | | |
| 73719 | non- | AvinDRAFT_4606 | isoleucine | ARA_LEAF | p-PcUBI | GC | 40 | 127 |
| | targeted | | | | | | | |
| 73719 | non- | AvinDRAFT_4606 | leucine | ARA_LEAF | p-PcUBI | GC | 58 | 85 |
| | targeted | | | | | | | |
| 74163 | non- | AvinDRAFT_4836 | isoleucine | ARA_LEAF | p-PcUBI | GC | 64 | 213 |
| | targeted | | | | | | | |
| 74163 | non- | AvinDRAFT_4836 | leucine | ARA_LEAF | p-PcUBI | GC | 68 | 176 |
| | targeted | | | | | | | |
| 74163 | non- | AvinDRAFT_4836 | valine | ARA_LEAF | p-PcUBI | GC | 24 | 135 |
| | targeted | | | | | | | |
| 102941 | non- | AvinDRAFT_4847 | valine | ARA_LEAF | p-PcUBI | GC | 26 | 31 |
| | targeted | | | | | | | |
| 6510 | non- | AvinDRAFT_5103 | isoleucine | ARA_LEAF | p-PcUBI | GC | 41 | 2397 |
| | targeted | | | | | | | |
| 6510 | non- | AvinDRAFT_5103 | leucine | ARA_LEAF | p-PcUBI | GC | 51 | 2753 |
| | targeted | | | | | | | |
| 6510 | non- | AvinDRAFT_5103 | valine | ARA_LEAF | p-PcUBI | GC | 24 | 951 |
| | targeted | | | | | | | |
| 32308 | non- | AvinDRAFT_5292 | isoleucine | ARA_LEAF | p-PcUBI | GC | 335 | 446 |
| | targeted | | | | | | | |
| 32308 | non- | AvinDRAFT_5292 | leucine | ARA_LEAF | p-PcUBI | GC | 469 | 550 |
| | targeted | | | | | | | |
| 32308 | non- | AvinDRAFT_5292 | valine | ARA_LEAF | p-PcUBI | GC | 132 | 187 |
| | targeted | | | | | | | |
| 74662 | non- | AvinDRAFT_5579 | leucine | ARA_LEAF | p-PcUBI | GC | 57 | 94 |
| | targeted | | | | | | | |
| 33596 | non- | AvinDRAFT_6093 | isoleucine | ARA_LEAF | p-PcUBI | GC | 44 | 134 |
| | targeted | | | | | | | |
| 34044 | non- | AvinDRAFT_6700 | isoleucine | ARA_LEAF | p-PcUBI | GC | 32 | 34 |
| | targeted | | | | | | | |
| 34044 | non- | AvinDRAFT_6700 | leucine | ARA_LEAF | p-PcUBI | GC | 31 | 53 |
| | targeted | | | | | | | |
| 34044 | non- | AvinDRAFT_6700 | valine | ARA_LEAF | p-PcUBI | GC | 22 | 29 |
| | targeted | | | | | | | |
| 103433 | non- | AY623894 | isoleucine | ARA_LEAF | p-PcUBI | GC | 49 | 103 |
| | targeted | | | | | | | |
| 103433 | non- | AY623894 | valine | ARA_LEAF | p-PcUBI | GC | 30 | 46 |
| | targeted | | | | | | | |
| 34889 | plastidic | B0004 | isoleucine | ARA_LEAF | p-Super | GC | 40 | 468 |
| 34889 | plastidic | B0004 | leucine | ARA_LEAF | p-Super | GC | 96 | 297 |
| 34889 | plastidic | B0004 | valine | ARA_LEAF | p-Super | GC | 33 | 220 |
| 103958 | non- | B0050 | valine | ARA_LEAF | p-Super | GC | 24 | 122 |
| | targeted | | | | | | | |
| 6818 | non- | B0078 | leucine | ARA_SEED_2 | p-USP | GC | 44 | 73 |
| | targeted | | | | | | | |
| 35733 | plastidic | B0344 | leucine | ARA_SEED_2 | p-USP | LC | 224 | 288 |
| 7269 | plastidic | B0348 | isoleucine | ARA_SEED_2 | p-USP | GC | 64 | 316 |
| 7269 | plastidic | B0348 | valine | ARA_SEED_2 | p-USP | GC | 35 | 236 |
| 7333 | non- | B0449 | isoleucine | ARA_LEAF | p-Super | GC | 75 | 2019 |
| | targeted | | | | | | | |
| 7333 | non- | B0449 | leucine | ARA_LEAF | p-Super | GC | 82 | 2204 |
| | targeted | | | | | | | |
| 7333 | non- | B0449 | valine | ARA_LEAF | p-Super | GC | 21 | 774 |
| | targeted | | | | | | | |
| 7686 | non- | B0486 | isoleucine | ARA_LEAF | p-Super | GC | 68 | 394 |
| | targeted | | | | | | | |
| 35967 | plastidic | B0593 | isoleucine | ARA_LEAF | p-Super | GC | 77 | 474 |
| 35967 | plastidic | B0593 | leucine | ARA_LEAF | p-Super | GC | 74 | 478 |
| 35967 | plastidic | B0593 | valine | ARA_LEAF | p-Super | GC | 62 | 214 |
| 36114 | non- | B0752 | isoleucine | ARA_LEAF | p-Super | GC | 36 | 58 |
| | targeted | | | | | | | |
| 36114 | non- | B0752 | leucine | ARA_LEAF | p-Super | GC | 54 | 81 |
| | targeted | | | | | | | |
| 7917 | non- | B0898 | isoleucine | ARA_LEAF | p-Super | GC | 40 | 6183 |
| | targeted | | | | | | | |
| 7917 | non- | B0898 | leucine | ARA_LEAF | p-Super | GC | 59 | 5609 |
| | targeted | | | | | | | |
| 7917 | non- | B0898 | valine | ARA_LEAF | p-Super | GC | 23 | 2254 |
| | targeted | | | | | | | |
| 36623 | non- | B0962 | leucine | ARA_SEED_2 | p-USP | GC | 52 | 274 |
| | targeted | | | | | | | |
| 36670 | non- | B0963 | valine | ARA_LEAF | p-Super | GC | 34 | 127 |
| | targeted | | | | | | | |
| 36809 | non- | B0980 | valine | ARA_SEED_2 | p-USP | GC | 33 | 99 |
| | targeted | | | | | | | |
| 7941 | non- | B1003 | isoleucine | ARA_LEAF | p-Super | GC | 185 | 1202 |
| | targeted | | | | | | | |
| 7941 | non- | B1003 | leucine | ARA_LEAF | p-Super | GC | 183 | 1058 |
| | targeted | | | | | | | |
| 7941 | non- | B1003 | valine | ARA_LEAF | p-Super | GC | 71 | 549 |
| | targeted | | | | | | | |
| 37394 | non- | B1163 | isoleucine | ARA_LEAF | p-Super | GC | 33 | 107 |
| | targeted | | | | | | | |
| 37394 | non- | B1163 | leucine | ARA_LEAF | p-Super | GC | 53 | 134 |
| | targeted | | | | | | | |
| 37394 | non- | B1163 | valine | ARA_LEAF | p-Super | GC | 27 | 47 |
| | targeted | | | | | | | |
| 104134 | plastidic | B1184 | leucine | ARA_SEED_2 | p-Super | GC | 31 | 169 |
| 104134 | plastidic | B1184 | valine | ARA_SEED_2 | p-Super | GC | 30 | 30 |
| 37483 | non- | B1255 | isoleucine | ARA_LEAF | p-Super | GC | 45 | 155 |
| | targeted | | | | | | | |
| 37483 | non- | B1255 | leucine | ARA_LEAF | p-Super | GC | 54 | 178 |
| | targeted | | | | | | | |
| 37483 | non- | B1255 | valine | ARA_LEAF | p-Super | GC | 20 | 69 |
| | targeted | | | | | | | |
| 37539 | plastidic | B1263 | isoleucine | ARA_SEED_2 | p-USP | GC | 22 | 106 |
| 37539 | plastidic | B1263 | leucine | ARA_SEED_2 | p-USP | GC | 58 | 74 |
| 37539 | plastidic | B1263 | valine | ARA_SEED_2 | p-USP | GC | 29 | 83 |
| 37658 | plastidic | B1297 | leucine | ARA_SEED_2 | p-USP | LC | 195 | 355 |
| 37807 | non- | B1300 | valine | ARA_LEAF | p-Super | GC | 20 | 52 |
| | targeted | | | | | | | |
| 38289 | non- | B1445 | valine | ARA_LEAF | p-Super | GC | 20 | 49 |
| | targeted | | | | | | | |
| 77774 | non- | B1479 | valine | ARA_SEED_2 | p-USP | GC | 40 | 188 |
| | targeted | | | | | | | |
| 7947 | non- | B1522 | isoleucine | ARA_LEAF | p-Super | GC | 41 | 920 |
| | targeted | | | | | | | |
| 7947 | non- | B1522 | leucine | ARA_LEAF | p-Super | GC | 213 | 780 |
| | targeted | | | | | | | |
| 7947 | non- | B1522 | valine | ARA_LEAF | p-Super | GC | 20 | 336 |
| | targeted | | | | | | | |
| 38300 | non- | B1597 | isoleucine | ARA_LEAF | p-Super | GC | 69 | 218 |
| | targeted | | | | | | | |
| 38300 | non- | B1597 | leucine | ARA_LEAF | p-Super | GC | 75 | 252 |
| | targeted | | | | | | | |
| 38300 | non- | B1597 | valine | ARA_LEAF | p-Super | GC | 44 | 105 |
| | targeted | | | | | | | |
| 7992 | non- | B1601 | valine | ARA_LEAF | p-Super | GC | 21 | 42 |
| | targeted | | | | | | | |
| 78753 | non- | B1670 | valine | ARA_LEAF | p-Super | GC | 20 | 80 |
| | targeted | | | | | | | |
| 78771 | non- | B1672 | valine | ARA_LEAF | p-Super | GC | 23 | 90 |
| | targeted | | | | | | | |
| 8363 | plastidic | B1854 | leucine | ARA_SEED_2 | p-USP | GC | 58 | 227 |
| 78970 | non- | B1873 | valine | ARA_LEAF | p-Super | GC | 24 | 49 |
| | targeted | | | | | | | |
| 79056 | non- | B1897 | isoleucine | ARA_LEAF | p-Super | GC | 41 | 333 |
| | targeted | | | | | | | |
| 79056 | non- | B1897 | leucine | ARA_LEAF | p-Super | GC | 154 | 467 |
| | targeted | | | | | | | |
| 79056 | non- | B1897 | valine | ARA_LEAF | p-Super | GC | 38 | 159 |
| | targeted | | | | | | | |
| 79217 | non- | B2027 | isoleucine | ARA_LEAF | p-Super | GC | 40 | 1182 |
| | targeted | | | | | | | |
| 79217 | non- | B2027 | leucine | ARA_LEAF | p-Super | GC | 68 | 1185 |
| | targeted | | | | | | | |
| 104277 | non- | B2053 | valine | ARA_LEAF | p-Super | GC | 22 | 50 |
| | targeted | | | | | | | |
| 38947 | non- | B2063 | isoleucine | ARA_LEAF | p-Super | GC | 35 | 778 |
| | targeted | | | | | | | |
| 38947 | non- | B2063 | leucine | ARA_LEAF | p-Super | GC | 62 | 415 |
| | targeted | | | | | | | |
| 104616 | non- | B2291 | valine | ARA_LEAF | p-Super | GC | 21 | 41 |
| | targeted | | | | | | | |
| 39255 | non- | B2405 | isoleucine | ARA_LEAF | p-Super | GC | 54 | 74 |
| | targeted | | | | | | | |
| 39255 | non- | B2405 | valine | ARA_LEAF | p-Super | GC | 24 | 74 |
| | targeted | | | | | | | |
| 9167 | non- | B2513 | isoleucine | ARA_LEAF | p-Super | GC | 63 | 339 |
| | targeted | | | | | | | |
| 9167 | non- | B2513 | leucine | ARA_LEAF | p-Super | GC | 60 | 464 |
| | targeted | | | | | | | |
| 9167 | non- | B2513 | valine | ARA_LEAF | p-Super | GC | 23 | 140 |
| | targeted | | | | | | | |
| 79627 | non- | B2551 | isoleucine | ARA_SEED_2 | p-USP | GC | 24 | 481 |
| | targeted | | | | | | | |
| 40665 | non- | B2613 | valine | ARA_LEAF | p-Super | GC | 24 | 29 |
| | targeted | | | | | | | |
| 40726 | non- | B2634 | isoleucine | ARA_LEAF | p-Super | GC | 34 | 118 |
| | targeted | | | | | | | |
| 40726 | non- | B2634 | leucine | ARA_LEAF | p-Super | GC | 52 | 124 |
| | targeted | | | | | | | |
| 9244 | non- | B2673 | isoleucine | ARA_LEAF | p-Super | GC | 44 | 144 |
| | targeted | | | | | | | |
| 80756 | non- | B2701 | isoleucine | ARA_LEAF | p-Super | GC | 57 | 501 |
| | targeted | | | | | | | |
| 80756 | non- | B2701 | leucine | ARA_LEAF | p-Super | GC | 348 | 403 |
| | targeted | | | | | | | |
| 80756 | non- | B2701 | valine | ARA_LEAF | p-Super | GC | 26 | 218 |
| | targeted | | | | | | | |
| 40741 | non- | B2714 | valine | ARA_LEAF | p-Super | GC | 21 | 38 |
| | targeted | | | | | | | |
| 80906 | non- | B2739 | isoleucine | ARA_LEAF | p-Super | GC | 51 | 542 |
| | targeted | | | | | | | |
| 80906 | non- | B2739 | leucine | ARA_LEAF | p-Super | GC | 57 | 800 |
| | targeted | | | | | | | |
| 80906 | non- | B2739 | valine | ARA_LEAF | p-Super | GC | 70 | 169 |
| | targeted | | | | | | | |
| 40795 | non- | B2812 | isoleucine | ARA_LEAF | p-Super | GC | 50 | 171 |
| | targeted | | | | | | | |
| 40795 | non- | B2812 | leucine | ARA_LEAF | p-Super | GC | 59 | 203 |
| | targeted | | | | | | | |
| 81935 | non- | B2839 | isoleucine | ARA_LEAF | p-Super | GC | 35 | 190 |
| | targeted | | | | | | | |
| 81935 | non- | B2839 | leucine | ARA_LEAF | p-Super | GC | 118 | 154 |
| | targeted | | | | | | | |
| 81935 | non- | B2839 | valine | ARA_LEAF | p-Super | GC | 30 | 94 |
| | targeted | | | | | | | |
| 41073 | non- | B2914 | isoleucine | ARA_SEED_2 | p-USP | GC | 30 | 97 |
| | targeted | | | | | | | |
| 9333 | non- | B2923 | valine | ARA_LEAF | p-Super | GC | 23 | 27 |
| | targeted | | | | | | | |
| 42046 | non- | B3064 | isoleucine | ARA_SEED_2 | p-Super | GC | 25 | 100 |
| | targeted | | | | | | | |
| 42046 | non- | B3064 | leucine | ARA_SEED_2 | p-Super | GC | 32 | 127 |
| | targeted | | | | | | | |
| 42046 | non- | B3064 | valine | ARA_SEED_2 | p-Super | GC | 32 | 82 |
| | targeted | | | | | | | |
| 82424 | non- | B3083 | isoleucine | ARA_LEAF | p-Super | GC | 40 | 74 |
| | targeted | | | | | | | |
| 82424 | non- | B3083 | valine | ARA_LEAF | p-Super | GC | 22 | 48 |
| | targeted | | | | | | | |
| 104660 | plastidic | B3112 | leucine | ARA_SEED_2 | p-USP | GC | 49 | 78 |
| 104871 | plastidic | B3117 | valine | ARA_SEED_2 | p-USP | GC | 29 | 130 |
| 9492 | non- | B3256 | leucine | ARA_SEED_2 | p-USP | GC | 42 | 465 |
| | targeted | | | | | | | |
| 82572 | non- | B3352 | valine | ARA_LEAF | p-Super | GC | 21 | 44 |
| | targeted | | | | | | | |
| 94051 | mitochondrial | B3429 | isoleucine | ARA_LEAF | p-Super | GC | 73 | 242 |
| 94051 | mitochondrial | B3429 | leucine | ARA_LEAF | p-Super | GC | 53 | 292 |
| 105332 | non- | B3490 | valine | ARA_LEAF | p-Super | GC | 21 | 44 |
| | targeted | | | | | | | |
| 10172 | plastidic | B3572 | isoleucine | ARA_SEED_2 | p-USP | GC | 23 | 132 |
| 10172 | plastidic | B3572 | leucine | ARA_SEED_2 | p-USP | GC | 32 | 115 |
| 42931 | non- | B3634 | isoleucine | ARA_LEAF | p-Super | GC | 42 | 126 |
| | targeted | | | | | | | |
| 42931 | non- | B3634 | leucine | ARA_LEAF | p-Super | GC | 94 | 289 |
| | targeted | | | | | | | |
| 42931 | non- | B3634 | valine | ARA_LEAF | p-Super | GC | 20 | 99 |
| | targeted | | | | | | | |
| 83629 | plastidic | B3670 | leucine | ARA_SEED_2 | p-USP | GC | 58 | 77 |
| 105354 | plastidic | B3770 | isoleucine | ARA_LEAF | p-Super | GC | 39 | 57 |
| 10252 | non- | B3771 | isoleucine | ARA_SEED_2 | p-USP | GC | 23 | 173 |
| | targeted | | | | | | | |
| 10252 | non- | B3771 | leucine | ARA_SEED_2 | p-USP | GC | 43 | 176 |
| | targeted | | | | | | | |
| 10252 | plastidic | B3771 | leucine | ARA_SEED_2 | p-USP | GC | 42 | 49 |
| 10252 | non- | B3771 | valine | ARA_SEED_2 | p-USP | GC | 37 | 128 |
| | targeted | | | | | | | |
| 94386 | non- | B3774 | isoleucine | ARA_LEAF | p-Super | GC | 55 | 61 |
| | targeted | | | | | | | |
| 94386 | plastidic | B3774 | leucine | ARA_SEED_2 | p-USP | GC | 38 | 127 |
| 43839 | non- | B3813 | isoleucine | ARA_SEED_2 | p-USP | GC | 33 | 137 |
| | targeted | | | | | | | |
| 43839 | non- | B3813 | leucine | ARA_SEED_2 | p-USP | GC | 40 | 118 |
| | targeted | | | | | | | |
| 43839 | non- | B3813 | valine | ARA_SEED_2 | p-USP | GC | 27 | 94 |
| | targeted | | | | | | | |
| 105602 | plastidic | B3850 | leucine | ARA_SEED_2 | p-USP | LC | 181 | 667 |
| 105659 | plastidic | B3908 | leucine | ARA_SEED_2 | p-USP | LC | 164 | 466 |
| 44372 | non- | B3989 | isoleucine | ARA_LEAF | p-Super | GC | 34 | 1033 |
| | targeted | | | | | | | |
| 44372 | non- | B3989 | leucine | ARA_LEAF | p-Super | GC | 53 | 1312 |
| | targeted | | | | | | | |
| 44372 | non- | B3989 | valine | ARA_LEAF | p-Super | GC | 23 | 332 |
| | targeted | | | | | | | |
| 10740 | non- | B4029 | isoleucine | ARA_LEAF | p-Super | GC | 39 | 2813 |
| | targeted | | | | | | | |
| 10740 | non- | B4029 | leucine | ARA_LEAF | p-Super | GC | 54 | 3551 |
| | targeted | | | | | | | |
| 10740 | non- | B4029 | valine | ARA_LEAF | p-Super | GC | 28 | 1098 |
| | targeted | | | | | | | |
| 106532 | non- | B4050 | isoleucine | ARA_LEAF | p-Super | GC | 105 | 106 |
| | targeted | | | | | | | |
| 94542 | non- | B4056 | isoleucine | ARA_LEAF | p-Super | GC | 39 | 51 |
| | targeted | | | | | | | |
| 94542 | non- | B4056 | leucine | ARA_LEAF | p-Super | GC | 44 | 52 |
| | targeted | | | | | | | |
| 45321 | non- | B4256 | isoleucine | ARA_LEAF | p-Super | GC | 51 | 240 |
| | targeted | | | | | | | |
| 45321 | non- | B4256 | leucine | ARA_LEAF | p-Super | GC | 194 | 267 |
| | targeted | | | | | | | |
| 45321 | non- | B4256 | valine | ARA_LEAF | p-Super | GC | 53 | 137 |
| | targeted | | | | | | | |
| 106538 | plastidic | B4263 | valine | ARA_LEAF | p-Super | GC | 23 | 38 |
| 45394 | non- | B4321 | isoleucine | ARA_LEAF | p-Super | GC | 43 | 228 |
| | targeted | | | | | | | |
| 45394 | non- | B4321 | leucine | ARA_LEAF | p-Super | GC | 113 | 284 |
| | targeted | | | | | | | |
| 45394 | non- | B4321 | valine | ARA_LEAF | p-Super | GC | 20 | 85 |
| | targeted | | | | | | | |
| 45556 | non- | B4384 | isoleucine | ARA_SEED_2 | p-USP | GC | 64 | 169 |
| | targeted | | | | | | | |
| 45757 | non- | C_pp004096192r | isoleucine | ARA_LEAF | p-Super | GC | 85 | 176 |
| | targeted | | | | | | | |
| 45757 | non- | C_pp004096192r | leucine | ARA_LEAF | p-Super | GC | 65 | 147 |
| | targeted | | | | | | | |
| 45757 | non- | C_pp004096192r | valine | ARA_LEAF | p-Super | GC | 21 | 74 |
| | targeted | | | | | | | |
| 45795 | non- | GM02LC11114 | isoleucine | ARA_LEAF | p-PcUBI | GC | 64 | 105 |
| | targeted | | | | | | | |
| 45795 | non- | GM02LC11114 | leucine | ARA_LEAF | p-PcUBI | GC | 62 | 113 |
| | targeted | | | | | | | |
| 10811 | non- | GM02LC12622 | isoleucine | ARA_LEAF | p-PcUBI | GC | 43 | 472 |
| | targeted | | | | | | | |
| 10811 | non- | GM02LC12622 | leucine | ARA_LEAF | p-PcUBI | GC | 63 | 562 |
| | targeted | | | | | | | |
| 10811 | non- | GM02LC12622 | valine | ARA_LEAF | p-PcUBI | GC | 24 | 155 |
| | targeted | | | | | | | |
| 45897 | non- | GM02LC15313 | isoleucine | ARA_LEAF | p-PcUBI | GC | 53 | 172 |
| | targeted | | | | | | | |
| 45897 | non- | GM02LC15313 | leucine | ARA_LEAF | p-PcUBI | GC | 80 | 144 |
| | targeted | | | | | | | |
| 45897 | non- | GM02LC15313 | valine | ARA_LEAF | p-PcUBI | GC | 30 | 99 |
| | targeted | | | | | | | |
| 106688 | non- | GM02LC17384 | valine | ARA_LEAF | p-PcUBI | GC | 21 | 63 |
| | targeted | | | | | | | |
| 46515 | non- | GM02LC17556 | isoleucine | ARA_LEAF | p-PcUBI | GC | 51 | 366 |
| | targeted | | | | | | | |
| 46515 | non- | GM02LC17556 | leucine | ARA_LEAF | p-PcUBI | GC | 55 | 406 |
| | targeted | | | | | | | |
| 46515 | non- | GM02LC17556 | valine | ARA_LEAF | p-PcUBI | GC | 21 | 90 |
| | targeted | | | | | | | |
| 84198 | non- | GM02LC21368 | isoleucine | ARA_LEAF | p-PcUBI | GC | 54 | 890 |
| | targeted | | | | | | | |
| 84198 | non- | GM02LC21368 | leucine | ARA_LEAF | p-PcUBI | GC | 100 | 811 |
| | targeted | | | | | | | |
| 84198 | non- | GM02LC21368 | valine | ARA_LEAF | p-PcUBI | GC | 21 | 230 |
| | targeted | | | | | | | |
| 46850 | non- | GM02LC44512 | isoleucine | ARA_LEAF | p-PcUBI | GC | 40 | 128 |
| | targeted | | | | | | | |
| 46850 | non- | GM02LC44512 | leucine | ARA_LEAF | p-PcUBI | GC | 82 | 122 |
| | targeted | | | | | | | |
| 46850 | non- | GM02LC44512 | valine | ARA_LEAF | p-PcUBI | GC | 22 | 86 |
| | targeted | | | | | | | |
| 47076 | non- | GM02LC5744 | leucine | ARA_LEAF | p-PcUBI | GC | 53 | 754 |
| | targeted | | | | | | | |
| 84265 | plastidic | Sll0228 | valine | ARA_LEAF | p-PcUBI | GC | 21 | 33 |
| 84441 | plastidic | Sll0240 | valine | ARA_LEAF | p-PcUBI | GC | 24 | 32 |
| 49143 | plastidic | Sll0248 | isoleucine | ARA_LEAF | p-PcUBI | GC | 53 | 313 |
| 49143 | plastidic | Sll0248 | leucine | ARA_LEAF | p-PcUBI | GC | 70 | 203 |
| 49828 | non- | Sll0290 | isoleucine | ARA_LEAF | p-PcUBI | GC | 35 | 238 |
| | targeted | | | | | | | |
| 49828 | non- | Sll0290 | leucine | ARA_LEAF | p-PcUBI | GC | 70 | 192 |
| | targeted | | | | | | | |
| 49828 | non- | Sll0290 | valine | ARA_LEAF | p-PcUBI | GC | 22 | 98 |
| | targeted | | | | | | | |
| 106920 | mitochondrial | Sll0368 | valine | ARA_LEAF | p-PcUBI | GC | 24 | 39 |
| 50104 | non- | Sll0420 | isoleucine | ARA_LEAF | p-PcUBI | GC | 41 | 69 |
| | targeted | | | | | | | |
| 50339 | plastidic | Sll0521 | valine | ARA_LEAF | p-PcUBI | GC | 21 | 56 |
| 51198 | non- | Sll0816 | isoleucine | ARA_LEAF | p-PcUBI | GC | 34 | 55 |
| | targeted | | | | | | | |
| 101707 | non- | Sll0833 | isoleucine | ARA_LEAF | p-PcUBI | GC | 39 | 124 |
| | targeted | | | | | | | |
| 85723 | mitochondrial | Sll1032 | valine | ARA_LEAF | p-PcUBI | GC | 19 | 29 |
| 53456 | non- | Sll1393 | isoleucine | ARA_LEAF | p-PcUBI | GC | 40 | 192 |
| | targeted | | | | | | | |
| 53456 | non- | Sll1393 | leucine | ARA_LEAF | p-PcUBI | GC | 99 | 132 |
| | targeted | | | | | | | |
| 53456 | non- | Sll1393 | valine | ARA_LEAF | p-PcUBI | GC | 19 | 121 |
| | targeted | | | | | | | |
| 107100 | plastidic | Sll1455 | valine | ARA_LEAF | p-PcUBI | GC | 21 | 36 |
| 95047 | plastidic | Sll1498 | isoleucine | ARA_LEAF | p-PcUBI | GC | 45 | 71 |
| 95047 | plastidic | Sll1498 | leucine | ARA_LEAF | p-PcUBI | GC | 53 | 90 |
| 55379 | non- | Sll1761 | isoleucine | ARA_LEAF | p-PcUBI | GC | 56 | 276 |
| | targeted | | | | | | | |
| 55379 | non- | Sll1761 | leucine | ARA_LEAF | p-PcUBI | GC | 67 | 245 |
| | targeted | | | | | | | |
| 85808 | mitochondrial | Sll1815 | isoleucine | ARA_LEAF | p-PcUBI | GC | 103 | 134 |
| 85808 | mitochondrial | Sll1815 | leucine | ARA_LEAF | p-PcUBI | GC | 102 | 148 |
| 85808 | mitochondrial | Sll1815 | valine | ARA_LEAF | p-PcUBI | GC | 21 | 138 |
| 86447 | plastidic | Sll1848 | isoleucine | ARA_LEAF | p-PcUBI | GC | 140 | 570 |
| 95527 | mitochondrial | Slr0150 | valine | ARA_LEAF | p-PcUBI | GC | 23 | 47 |
| 86540 | mitochondrial | Slr0239 | isoleucine | ARA_LEAF | p-PcUBI | GC | 33 | 447 |
| 86540 | mitochondrial | Slr0239 | leucine | ARA_LEAF | p-PcUBI | GC | 212 | 603 |
| 86540 | mitochondrial | Slr0239 | valine | ARA_LEAF | p-PcUBI | GC | 25 | 185 |
| 87397 | non- | Slr0721 | isoleucine | ARA_LEAF | p-PcUBI | GC | 49 | 129 |
| | targeted | | | | | | | |
| 87397 | plastidic | Slr0721 | isoleucine | ARA_LEAF | p-PcUBI | GC | 38 | 175 |
| 87397 | plastidic | Slr0721 | leucine | ARA_LEAF | p-PcUBI | GC | 98 | 267 |
| 87397 | non- | Slr0721 | leucine | ARA_LEAF | p-PcUBI | GC | 79 | 191 |
| | targeted | | | | | | | |
| 87397 | non- | Slr0721 | valine | ARA_LEAF | p-PcUBI | GC | 20 | 60 |
| | targeted | | | | | | | |
| 87397 | plastidic | Slr0721 | valine | ARA_LEAF | p-PcUBI | GC | 21 | 98 |
| 57235 | plastidic | Slr0739 | isoleucine | ARA_LEAF | p-PcUBI | GC | 37 | 120 |
| 57235 | plastidic | Slr0739 | leucine | ARA_LEAF | p-PcUBI | GC | 60 | 128 |
| 57235 | plastidic | Slr0739 | valine | ARA_LEAF | p-PcUBI | GC | 22 | 91 |
| 58668 | mitochondrial | Slr1492 | isoleucine | ARA_LEAF | p-PcUBI | GC | 27 | 42 |
| 88158 | mitochondrial | Slr1509 | isoleucine | ARA_LEAF | p-PcUBI | GC | 45 | 122 |
| 88158 | mitochondrial | Slr1509 | leucine | ARA_LEAF | p-PcUBI | GC | 59 | 144 |
| 107145 | mitochondrial | Slr1517 | valine | ARA_LEAF | p-PcUBI | GC | 27 | 33 |
| 58731 | plastidic | Slr1739 | isoleucine | ARA_LEAF | p-PcUBI | GC | 54 | 308 |
| 58731 | plastidic | Slr1739 | leucine | ARA_LEAF | p-PcUBI | GC | 148 | 331 |
| 58731 | plastidic | Slr1739 | valine | ARA_LEAF | p-PcUBI | GC | 37 | 107 |
| 12140 | plastidic | Slr1791 | valine | ARA_LEAF | p-PcUBI | GC | 25 | 33 |
| 59041 | non- | Slr1882 | valine | ARA_LEAF | p-PcUBI | GC | 20 | 27 |
| | targeted | | | | | | | |
| 12341 | mitochondrial | Slr2072 | isoleucine | ARA_LEAF | p-PcUBI | GC | 592 | 9865 |
| 12341 | plastidic | Slr2072 | isoleucine | ARA_LEAF | p-PcUBI | GC | 1626 | 10965 |
| 12341 | plastidic | Slr2072 | leucine | ARA_LEAF | p-PcUBI | GC | 50 | 250 |
| 12341 | mitochondrial | Slr2072 | leucine | ARA_LEAF | p-PcUBI | GC | 60 | 214 |
| 12341 | mitochondrial | Slr2072 | valine | ARA_LEAF | p-PcUBI | GC | 23 | 54 |
| 12341 | plastidic | Slr2072 | valine | ARA_LEAF | p-PcUBI | GC | 24 | 64 |
| 59370 | plastidic | Slr2124 | valine | ARA_LEAF | p-PcUBI | GC | 34 | 73 |
| 12698 | non- | TTC0019 | isoleucine | ARA_LEAF | p-PcUBI | GC | 43 | 847 |
| | targeted | | | | | | | |
| 12698 | non- | TTC0019 | leucine | ARA_LEAF | p-PcUBI | GC | 60 | 889 |
| | targeted | | | | | | | |
| 12698 | non- | TTC0019 | valine | ARA_LEAF | p-PcUBI | GC | 30 | 402 |
| | targeted | | | | | | | |
| 107556 | non- | TTC0849 | isoleucine | ARA_LEAF | p-PcUBI | GC | 54 | 92 |
| | targeted | | | | | | | |
| 107556 | non- | TTC0849 | leucine | ARA_LEAF | p-PcUBI | GC | 51 | 112 |
| | targeted | | | | | | | |
| 62079 | non- | TTC1386 | isoleucine | ARA_LEAF | p-PcUBI | GC | 56 | 744 |
| | targeted | | | | | | | |
| 62079 | non- | TTC1386 | leucine | ARA_LEAF | p-PcUBI | GC | 76 | 644 |
| | targeted | | | | | | | |
| 62079 | non- | TTC1386 | valine | ARA_LEAF | p-PcUBI | GC | 38 | 334 |
| | targeted | | | | | | | |
| 12974 | non- | TTC1550 | isoleucine | ARA_LEAF | p-PcUBI | GC | 70 | 355 |
| | targeted | | | | | | | |
| 12974 | non- | TTC1550 | leucine | ARA_LEAF | p-PcUBI | GC | 66 | 340 |
| | targeted | | | | | | | |
| 12974 | non- | TTC1550 | valine | ARA_LEAF | p-PcUBI | GC | 29 | 129 |
| | targeted | | | | | | | |
| 108092 | non- | Yal013w | leucine | ARA_SEED_2 | p-PcUBI | GC | 44 | 144 |
| | targeted | | | | | | | |
| 62717 | non- | Ybr160w | valine | ARA_LEAF | Big35S | GC | 20 | 55 |
| | targeted | | | | | | | |
| 108113 | plastidic | Ycr012w | isoleucine | ARA_SEED_2 | p-Super | GC | 29 | 218 |
| 108113 | plastidic | Ycr012w | leucine | ARA_SEED_2 | p-Super | GC | 33 | 136 |
| 63544 | plastidic | Ydr046c | isoleucine | ARA_LEAF | p-Super | GC | 50 | 70 |
| 63544 | plastidic | Ydr046c | valine | ARA_LEAF | p-Super | GC | 21 | 30 |
| 90103 | plastidic | Ydr183w | valine | ARA_LEAF | p-Super | GC | 30 | 48 |
| 97298 | plastidic | Yel069c | isoleucine | ARA_LEAF | p-PcUBI | GC | 38 | 58 |
| 64177 | non- | Ygl237c | isoleucine | ARA_LEAF | Big35S | GC | 39 | 294 |
| | targeted | | | | | | | |
| 64177 | non- | Ygl237c | leucine | ARA_LEAF | Big35S | GC | 80 | 355 |
| | targeted | | | | | | | |
| 108487 | non- | Ygr193c | leucine | ARA_SEED_2 | p-PcUBI | GC | 54 | 294 |
| | targeted | | | | | | | |
| 90284 | non- | Yhr006w | isoleucine | ARA_LEAF | Big35S | GC | 54 | 114 |
| | targeted | | | | | | | |
| 90284 | non- | Yhr006w | leucine | ARA_LEAF | Big35S | GC | 71 | 161 |
| | targeted | | | | | | | |
| 64470 | non- | Yhr072w-a | isoleucine | ARA_SEED_2 | p-USP | GC | 24 | 181 |
| | targeted | | | | | | | |
| 64470 | non- | Yhr072w-a | leucine | ARA_SEED_2 | p-USP | GC | 40 | 188 |
| | targeted | | | | | | | |
| 108514 | non- | Yil155c | isoleucine | ARA_SEED_2 | p-PcUBI | GC | 22 | 71 |
| | targeted | | | | | | | |
| 108514 | non- | Yil155c | leucine | ARA_SEED_2 | p-PcUBI | GC | 41 | 106 |
| | targeted | | | | | | | |
| 14885 | plastidic | Yjr139c | isoleucine | ARA_LEAF | p-PcUBI | GC | 59 | 86 |
| 90409 | plastidic | Yjr148w | isoleucine | ARA_LEAF | p-Super | GC | 109 | 273 |
| 90409 | plastidic | Yjr148w | valine | ARA_LEAF | p-Super | GC | 74 | 170 |
| 66274 | non- | Yjr153w | isoleucine | ARA_LEAF | p-PcUBI | GC | 66 | 273 |
| | targeted | | | | | | | |
| 66274 | non- | Yjr153w | leucine | ARA_LEAF | p-PcUBI | GC | 64 | 364 |
| | targeted | | | | | | | |
| 66274 | non- | Yjr153w | valine | ARA_LEAF | p-PcUBI | GC | 28 | 110 |
| | targeted | | | | | | | |
| 90602 | plastidic | YKL038W | isoleucine | ARA_LEAF | p-PcUBI | GC | 51 | 53 |
| 90602 | plastidic | YKL038W | leucine | ARA_LEAF | p-PcUBI | GC | 50 | 59 |
| 108723 | non- | Ylr224w | isoleucine | ARA_SEED_2 | p-USP | GC | 25 | 50 |
| | targeted | | | | | | | |
| 98243 | non- | Ylr348c | isoleucine | ARA_LEAF | p-PcUBI | GC | 55 | 83 |
| | targeted | | | | | | | |
| 67190 | plastidic | Ylr359w | isoleucine | ARA_LEAF | p-Super | GC | 59 | 451 |
| 67190 | plastidic | Ylr359w | leucine | ARA_LEAF | p-Super | GC | 83 | 685 |
| 67190 | plastidic | Ylr359w | valine | ARA_LEAF | p-Super | GC | 20 | 168 |
| 91785 | plastidic | Yml123c | leucine | ARA_LEAF | p-Super | GC | 65 | 96 |
| 92668 | non- | Ypl028w | isoleucine | ARA_SEED_2 | p-PcUBI | GC | 29 | 182 |
| | targeted | | | | | | | |
| 92668 | non- | Ypl028w | leucine | ARA_SEED_2 | p-PcUBI | GC | 32 | 142 |
| | targeted | | | | | | | |
| 98445 | non- | Ypr119w | isoleucine | ARA_LEAF | Big35S | GC | 33 | 57 |
| | targeted | | | | | | | |
| 68413 | non- | Zm_4842_BE510522 | isoleucine | ARA_LEAF | p-PcUBI | GC | 42 | 313 |
| | targeted | | | | | | | |
| 68413 | non- | Zm_4842_BE510522 | leucine | ARA_LEAF | p-PcUBI | GC | 53 | 336 |
| | targeted | | | | | | | |
| 68413 | non- | Zm_4842_BE510522 | valine | ARA_LEAF | p-PcUBI | GC | 29 | 116 |
| | targeted | | | | | | | |

[44796] Column 1 shows the SEQ ID NO, Column 2 shows the expression type (targeted or non-targeted), Column 3 shows the “gene name” (locus), Column 4 shows the metabolite analyzed, Column 5 indicates of the A. thaliana sourece tissue analyzed, Column 6 indicates the used promoter for expression, Column 7 indicates the analytical method. Columns 8 and 9 show the minumum and the maximum increase of the analyzed metabolite (in-percent) in comparison to the wild type (=ratio_by_weight, given as-percent increase).

[44797] When the analyses were repeated independently, all results proved to be significant.

[44798] [505.1.1.6] to [0515.1.1.6] for the disclosure of these paragraphs see [0505.1.1.1] to [0515.1.1.1] above.

[44799] In a further embodiment, the present invention relates in paragraphs [0000.1.7.7.] to [0514.1.7.7.] to a further process for the production of the fine chemical alpha-tocopherol, and/or gamma-tocopherol as defined below and corresponding embodiments as described herein as follows.

[44800] The present invention relates to a process for the production of fine chemical in a microorganism, a plant cell, a plant or a part thereof. The invention furthermore relates to nucleic acid molecules, polypeptides, nucleic acid constructs, vectors, antibodies, host cells, plant tissue, propagation material, harvested material, plants, microorganisms as well as agricultural compositions and to their use.

[44801] Due to their plastids, plants possess some biosynthetic pathways, which are, besides in cyanobacteria, unique in living organisms. Some plastidic compounds are indispensable for human and animal nutrition and are therefore called vitamins. Two essential lipophilic components for nutrition are provitamin A (beta-carotene) and vitamin E. Vitamin E is classified by its pharmacological effect and chromanol ring structure and not by biosynthesis. It comprises a class of 8 lipid-soluble components, being subdivided into tocopherols and tocotrienols. While tocopherols share an isoprenoid side chain derived from phytyl-PP, tocotrienol side chains are derivates of geranylgeranyl-PP. The α, β, γ and δ-members of these subclasses differ in their degree of methylation in the 6-chromanol-ring structure.

[44802] The tocopherol group (1a-d) has a saturated side chain, and the tocotrienol group (2a-d) has an unsaturated side chain:

[chemical structure]

[44803] 1a, α-tocopherol: R¹═R²═R³═CH₃
[44804] 1b, β-tocopherol: R¹═R³═CH3, R²═H
[44805] 1c, γ-tocopherol: R¹═H, R²═R³═CH₃
[44806] 1d, δ-tocopherol: R¹═R²═H, R³═CH₃

[chemical structure]

[44807] 2a, α-tocotrienol: R¹═R²═R³═CH₃
[44808] 2b, β-tocotrienol: R¹═R³═CH3, R²═H
[44809] 2c, γ-tocotrienol: R¹═H, R²═R³═CH₃
[44810] 2d, δ-tocotrienol: R¹═R²═H, R³═CH₃

[44811] In the present invention, vitamin E means all of the aforementioned tocopherols and tocotrienols with vitamin E activity or vitamin E precursor 2,3-Dimethyl-5-pythylquinol.

[44812] The four major forms of tocopherols, α, β, γ, and δ, differ in the position and number of methyl groups. The predominant form in the leaves of higher plants is α-tocopherol, whereas in seeds γ-tocopherol is often the major isoform. Tocopherols predominantly function as antioxidants in vivo in photosynthetic organisms and in animals, as well as in isolated compounds such as oils. The antioxidant properties of tocopherols derive from their ability to quench free radicals and different tocopherols may be optimal as antioxidants for different biological systems. For human and animal utility, α-tocopherol has the highest vitamin E activity and has been implicated in a variety of health areas, including possible benefits in preventing cardiovascular disease, certain cancers, and cataract formation. The amounts of vitamin E needed to achieve these effects are often quite high, 100 to 400 International Units (I.U.) and even up to 800 I.U. compared with the recommended daily allowance of 40 I.U. In fats and oils, tocopherols protect unsaturated fatty acids from oxidation. In these systems, γ-tocopherol appears to have the greater utility. In fact, tocopherols are often included in processed oils to help stabilize the fatty acids. For human health as well as food and feed utility, it is desirable to have plants with increased tocopherol content along with those where the tocopherol composition is customized.

[44813] Tocopherols contain an aromatic head group, which is derived from homogentisic acid (HGA) and a hydrocarbon portion, which arises from phytyldiphosphate (phytyl-DP). HGA is derived from the shikimic acid pathway and phytyl-DP is generated from the condensation of four isoprenoid units. The isoprenoid contribution to tocopherol biosynthesis is thought to come primarily from the plastidal methyl-erythritol phosphate pathway, and not the cytosolic mevalonic acid pathway. The condensation of HGA and phytyl-DP to form 2-methyl-6-phytylplastoquinol, the first committed step in tocopherol biosynthesis, is a prenyltransferase reaction that is performed by a homogentisate phytyltransferase (HPT). Subsequent cyclization and methylation reactions result in the formation of the four major tocopherols. The enzymatic reactions in tocopherol biosynthesis were identified 15 to 20 years ago, but cloning of the genes encoding these enzymes has only occurred in the last few years.

[44814] Tocopherol biosynthesis takes place in the plastid and the enzymes are associated with the chloroplast envelope. The membrane association of the enzymes has made purification difficult. With the advent of genomics and the availability of complete genome sequences of a number of organisms, including Synechocystis sp. PCC 6803 and Arabidopsis, it has become possible to use bioinformatics techniques to identify and clone additional genes in the tocopherol pathway.

[44815] The first enzyme cloned in the tocopherol pathway, γ-tocopherol methyl transferase (γ-TMT), was identified in Synechocystis sp. PCC 6803 and Arabidopsis using bioinformatics. In that study, the Arabidopsis γ-TMT was shown to alter seed tocopherol composition when overexpressed in Arabidopsis. γ-Tocopherol, normally the predominant tocopherol isomer in Arabidopsis seeds, was almost completely converted to α-tocopherol.

[44816] HPT catalyzes the first committed reaction in the tocopherol pathway, and was unidentified previously. Concomitant with this study, slr1736 was found to encode a HPT in Synechocystis sp. PCC 6803 and the Arabidopsis HTP was identified.

[44817] There are prenyltransferases that condense prenyl groups with allylic chains and those that condense prenyl chains with aromatic groups. The prenyltransferases that catalyze sequential condensations of isopentenylpyrophosphate with allylic chains share common features, including Asp-rich motifs, and lead to the formation of compounds with two isoprenoid units, such as geranylpyrophosphate, or to much longer molecules, such as rubber, which contains greater than 1,000 isoprenoid units. Prenyltransferases that catalyze condensations with nonisoprenoid groups have an Asp-rich motif distinct from that of the allylic class, and include UbiA, which attaches a prenyl group to 4-hydroxybenzoic acid, and chlorophyll synthase, which attaches a prenyl group to chlorophyllide.

[44818] The first committed step in tocopherol biosynthesis is catalyzed by an aromatic prenyltransferase that transfers a phytyl chain to HGA

[44819] Classification by head groups would arrange tocopherols, tocotrienols and plastoquinones in one group, being quinones with antioxidant properties and having homogentisic acid as a precursor. Plastoquinones are important components of the quinone-pool in the photosynthetic electron transport chains of plastids, also interfering in the biosynthesis of provitamin A (beta-carotene; Norris S R, (1995). Plant Cell 7, 2139-2149).

[44820] Vitamin E is predominantly delivered by the ingestion of vegetable oils. It plays an important role as a membrane-associated antioxidant scavenger. During past years several additional functions of vitamin E as anti-hypercholesterolemic and immunostimulatory agent in humans have been proposed (Beharka (1997). Methods Enzymol. 282, 247-263).

[44821] These compounds with vitamin E activity are important natural fat-soluble antioxidants. A vitamin E deficiency leads to pathophysiological situations in humans and animals. Vitamin E compounds therefore are of high economical value as additives in the food and feed sectors, in pharmaceutical formulations and in cosmetic applications.

[44822] In plastids of plants many isoprenoid pathways are localized, which are interconnected by their substrates, end products and by regulation. These are, e.g. monoterpene-, diterpene-, giberillic acid-, abscisic acid-, chlorophyll-, phylloquinone-, carotenoid-, tocopherol-, tocotrienol- and plastoquinone-biosynthesis. In all these pathways prenyltransferases are involved in the biosynthesis of these compounds. With respect to the length of their side chains diterpenes, chlorophylls, phylloquinones, tocopherols and tocotrienols can be arranged into a 020-group of isoprenoids. Another classification by degree of desaturation of the side chain, would arrange e.g. chlorophylls, phylloquinones and tocopherols into a phytyl-group and e.g. diterpenes, tocotrienols, plastoquinones and carotenoids into a group of desaturated isoprenoid compounds.

[44823] Economical methods for producing vitamin E or its precursor and food- and feedstuffs with increased vitamin E content are therefore very important.

[44824] Particularly economical methods are biotechnological methods utilizing vitamin E-producing organisms which are either natural or optimized by genetic modification.

[44825] There is a constant need for providing novel enzyme activities or direct or indirect regulators and thus alternative methods with advantageous properties for producing vitamin E or its precursor in organisms, e.g. in transgenic organisms.

[44826] Attempts are known to achieve an increase in the flow of metabolites so as to increase the tocopherol and/or tocotrienol content by overexpressing Phytyl/prenyltransferasegenes in transgenic organisms; WO 00/63391, WO 00/68393, WO 01/62781 and WO 02/33060. The content of a tocopherol and/or tocotrienol in a cell was also increased by increasing or decreasing certain activities as disclosed in WO2006/069610, WO2007/087815 or WO2008/034648 [0010.1.7.7] Improving the quality of foodstuffs and animal feeds is an important task of the food-and-feed industry. This is necessary since, for example, Vitamin E, which occur in plants are limited with regard to the supply of mammals. Especially advantageous for the quality of foodstuffs and animal feeds is as balanced as possible a vitamin profile since a great excess of some vitamins above a specific concentration in the food has no further positive effect on the utilization of the food since other vitamins suddenly become limiting. A further increase in quality is only possible via addition of further vitamins, which are limiting under these conditions. The targeted addition of the limiting vitamin in the form of synthetic products must be carried out with extreme caution in order to avoid vitamin imbalance.

[44827] To ensure a high quality of foods and animal feeds, it is therefore necessary to add a plurality of vitamins in a balanced manner to suit the respective organism. Accordingly, there is still a great demand for new and more suitable genes, which encode enzymes or regulators, which participate in the biosynthesis of vitamins, in particular vitamin E and make it possible to produce certain vitamins specifically on an industrial scale without unwanted byproducts being formed. In the selection of genes for biosynthesis or regulation two characteristics above all are particularly important. On the one hand, there is as ever a need for improved processes for obtaining the highest possible contents of vitamins like vitamin E and on the other hand as less as possible byproducts should be produced in the production process.

[44828] It is an object of the present invention to develop an inexpensive process for the synthesis of alpha-tocopherol, and/or gamma-tocopherol. Vitamin E is one of the vitamins, which are most frequently limiting.

[44829] It is a further object of the present invention to develop an inexpensive process for the synthesis of Vitamin E, preferably alpha-tocopherol, and/or gamma-tocopherol and to assure that the Vitamin E, preferably alpha-tocopherol, and/or gamma-tocopherol are more accessible and facilely to isolate and recover in an industrial scale from the producing organism, preferably from a plant.

[44830] It was now found that this object is achieved by providing the process according to the invention described herein and the embodiments characterized herein as well as in the claims.

[44831] Accordingly, in a first embodiment, the invention relates to a process for the production of at least one fine chemical selected from the group consisting of: alpha-tocopherol, and gamma-tocopherol, or, in other words, of the “fine chemical” or “fine chemical of the invention”.

[44832] The terms “fine chemical of the invention”, “fine chemical” or “the fine chemical” are used herein equally and relate in context of the paragraphs or sections [0014.1.7.7] to [0514.1.7.7] essentially to the metabolite or the metabolites indicated in column 7, application no. 7 of Tables I, II and IV in the respective line.

[44833] Further, the term “in context of any of the paragraphs [0014.1.7.7] to [0514.1.7.7]” as used herein means that for any of said paragraphs [0014.1.7.7] to [0514.1.7.7] the term “the fine chemical” is understood to follow the definition of paragraphs or sections [0014.1.7.7] and [0015.1.7.7], independently whether it refers to any other paragraph or not and whether the reference recites the term “fine chemical” in an other context.

[44834] Thus, in cases where one or more paragraphs or sections are incorporated by reference into any of the present paragraphs [0014.1.7.7] to [0514.1.7.7], e.g. by usage of the term “see paragraph” or the term “for the disclosure of this paragraph see the disclosure of paragraph” or the term “incorporated by reference” or a corresponding term, the incorporated paragraph, section or term “the fine chemical” is also understood to have the meaning according to the definition of paragraph [0014.1.7.7] and [0015.1.7.7].

[44835] Accordingly, in one embodiment, the term “fine chemical of the invention”, “fine chemical” or “the fine chemical” as used herein (alone or in combination, like in FCRP) means “alpha-tocopherol” in context of the nucleic acid or polypeptide sequences listed in the respective same line of any one of Tables Ito IV of application no. 7 and indicating in column 7 the metabolite “alpha-tocopherol”.

[44836] In one embodiment, the term alpha-tocopherol or the term “fine chemical” mean in context of the paragraphs or sections [0014.1.7.7] to [0514.1.7.7] at least one chemical compound with an activity of the above mentioned alpha-tocopherol, respectively.

[44837] Accordingly, in one embodiment, the term “fine chemical of the invention”, “fine chemical” or “the fine chemical” as used herein (alone or in combination, like in FCRP) means “gamma-tocopherol” in context of the nucleic acid or polypeptide sequences listed in the respective same line of any one of Tables Ito IV of application no. 7 and indicating in column 7 the metabolite “gamma-tocopherol”.

[44838] In one embodiment, the term gamma-tocopherol or the term “fine chemical” mean in context of the paragraphs or sections [0014.1.7.7] to [0514.1.7.7] at least one chemical compound with an activity of the above mentioned gamma-tocopherol, respectively.

[44839] Accordingly, in one embodiment, the term “fine chemical of the invention”, “fine chemical” or “the fine chemical” as used herein (alone or in combination, like in FCRP) means “Vitamin E” or its precursor 2,3-dimethyl-5-phytylquinol in context of the nucleic acid or polypeptide sequences listed in the respective same line of any one of Tables I to IV of application no. 7.

[44840] In one embodiment, the term “Vitamin E” or the term “fine chemical” mean in context of the paragraphs or sections [0014.1.7.7] to [0514.1.7.7] at least one chemical compound with an activity of the above mentioned “Vitamin E”, respectively.

[44841] Accordingly, in one embodiment, the terms “fine chemical of the invention”, “fine chemical” or “the fine chemical” mean in context of any of the paragraphs [0014.1.7.7] to [0514.1.7.7] alpha-tocopherol, its salts, ester or ether in free form or bound form. In a preferred embodiment, the term “the fine chemical” means alpha-tocopherol or its salts, ester or ether, in free form or bound form.

[44842] In a preferred embodiment “alpha-tocopherol” means alpha-tocopherol in free form.

[44843] Accordingly, in one embodiment, the terms “fine chemical of the invention”, “fine chemical” or “the fine chemical” mean in context of any of the paragraphs [0014.1.7.7] to [0514.1.7.7] gamma-tocopherol, its salts, ester or ether in free form or bound form. In a preferred embodiment, the term “the fine chemical” means gamma-tocopherol or its salts, ester or ether, in free form or bound form.

[44844] In a preferred embodiment “gamma-tocopherol” means gamma-tocopherol in free form.

[44845] In one embodiment, the term “Vitamin E” or “the fine chemical” or “the respective fine chemical” mean in context of any of the paragraphs [0014.1.7.7] to [0514.1.7.7] at least one chemical compound with vitamin E activity selected from the group “alpha-tocopherol, beta-tocopherol, gamma-tocopherol, delta-tocopherol, alpha-tocotrienol, beta-tocotrienol, gamma-tocotrienol and delta-tocotrienol” or Vitamin E precursor 2,3-dimethyl-5-phytylquinol. In an preferred embodiment, the term “the fine chemical” or the term “Vitamin E” or the term “the respective fine chemical” means at least one chemical compound with vitamin E activity selected from the group “alpha-tocopherol and gamma-tocopherol”.

[44846] Further, the term “in context of any of the paragraphs [0014.1.7.7] to [0514.1.7.7]” as used herein means that for any of said paragraphs [0014.1.7.7] to [0514.1.7.7] the term “the fine chemical” is understood to follow the definition of section [0014.1.7.7] or section [0015.1.7.7], independently whether it refers to any other paragraph or not and whether the reference recites the term “fine chemical” in an other context.

[44847] Thus, in cases where one or more paragraphs or sections are incorporated by reference into any of the present paragraphs [0014.1.7.7] to [0514.1.7.7], e.g. by usage of the term “see paragraph” or the term “for the disclosure of this paragraph see the disclosure of paragraph” or the term “incorporated by reference” or a corresponding term, the incorporated paragraph, section or term “the fine chemical” is also understood to have the meaning according to this definition of this paragraph [0015.1.7.7].

[44848] Further, the term “fine chemicals” as used herein relates to compositions comprising said fine chemical(s), i.e. comprising alpha-tocopherol, and/or gamma-tocopherol, and/or Vitamin E or its precursor 2,3-dimethyl-5-phytylquinol respectively.

[44849] An increased vitamin E content normally means an increased total vitamin E content. However, an increased vitamin E content also means, in particular, a modified content of the abovedescribed 8 compounds with vitamin E activity or its precursor 2,3-dimethyl-5-phytylquinol, without the need for an inevitable increase in the total vitamin E content. In a preferred embodiment, the term “the fine chemical” mean in context of any of the paragraphs [0014.1.7.7] to [0514.1.7.7] vitamin E in free form or its salts or its ester or ether or bound. In one embodiment, the term “the fine chemical” and the term “the respective fine chemical” mean at least one chemical compound with an activity of the above mentioned fine chemical.

[44850] Accordingly, the present invention relates to a process for the production of alpha-tocopherol, which comprises
[44851] (a) increasing or generating one or more activities selected from the group consisting of pyruvate kinase in a non-human organism or a part thereof, preferably a microorganism, a plant cell, a plant or a part thereof, as compared to a corresponding non-transformed wild type non-human organism or a part thereof; and
[44852] (b) growing the non-human organism or a part thereof under conditions which permit the production of alpha-tocopherol or a composition comprising alpha-tocopherol in said non-human organism or in the culture medium surrounding said non-human organism.

[44853] Accordingly, the present invention relates to a process for the production of gamma-tocopherol, which comprises
[44854] (a) increasing or generating one or more activities selected from the group consisting of pyruvate kinase in a non-human organism or a part thereof, preferably a microorganism, a plant cell, a plant or a part thereof, as compared to a corresponding non-transformed wild type non-human organism or a part thereof; and
[44855] (b) growing the non-human organism or a part thereof under conditions which permit the production of gamma-tocopherol or a composition comprising gamma-tocopherol in said non-human organism or in the culture medium surrounding said non-human organism.

[44856] Accordingly, the present invention relates to a process for the production of alpha-tocopherol, which comprises
[44857] (a) increasing or generating one or more activities selected from the group consisting of glucose-6-phosphate 1-dehydrogenase in a non-human organism or a part thereof, preferably a microorganism, a plant cell, a plant or a part thereof, as compared to a corresponding non-transformed wild type non-human organism or a part thereof; and
[44858] (b) growing the non-human organism or a part thereof under conditions which permit the production of alpha-tocopherol or a composition comprising alpha-tocopherol in said non-human organism or in the culture medium surrounding said non-human organism.

[44859] Accordingly, the present invention relates to a process for the production of gamma-tocopherol, which comprises
[44860] (a) increasing or generating one or more activities selected from the group consisting of At1g29350-protein in a non-human organism or a part thereof, preferably a microorganism, a plant cell, a plant or a part thereof, as compared to a corresponding non-transformed wild type non-human organism or a part thereof; and
[44861] (b) growing the non-human organism or a part thereof under conditions which permit the production of gamma-tocopherol or a composition comprising gamma-tocopherol in said non-human organism or in the culture medium surrounding said non-human organism.

[44862] Accordingly, the present invention relates to a process for the production of gamma-tocopherol, which comprises
[44863] (a) increasing or generating one or more activities selected from the group consisting of transcriptional regulator in a non-human organism or a part thereof, preferably a microorganism, a plant cell, a plant or a part thereof, as compared to a corresponding non-transformed wild type non-human organism or a part thereof; and
[44864] (b) growing the non-human organism or a part thereof under conditions which permit the production of gamma-tocopherol or a composition comprising gamma-tocopherol in said non-human organism or in the culture medium surrounding said non-human organism.

[44865] Accordingly, the present invention relates to a process for the production of gamma-tocopherol, which comprises
[44866] (a) increasing or generating one or more activities selected from the group consisting of protein kinase in a non-human organism or a part thereof, preferably a microorganism, a plant cell, a plant or a part thereof, as compared to a corresponding non-transformed wild type non-human organism or a part thereof; and
[44867] (b) growing the non-human organism or a part thereof under conditions which permit the production of gamma-tocopherol or a composition comprising gamma-tocopherol in said non-human organism or in the culture medium surrounding said non-human organism.

[44868] Accordingly, the present invention relates to a process for the production of gamma-tocopherol, which comprises
[44869] (a) increasing or generating one or more activities selected from the group consisting of calcium-dependent protein kinase in a non-human organism or a part thereof, preferably a microorganism, a plant cell, a plant or a part thereof, as compared to a corresponding non-transformed wild type non-human organism or a part thereof; and
[44870] (b) growing the non-human organism or a part thereof under conditions which permit the production of gamma-tocopherol or a composition comprising gamma-tocopherol in said non-human organism or in the culture medium surrounding said non-human organism.

[44871] Accordingly, the present invention relates to a process for the production of alpha-tocopherol, which comprises
[44872] (a) increasing or generating one or more activities selected from the group consisting of protein phosphatase in a non-human organism or a part thereof, preferably a microorganism, a plant cell, a plant or a part thereof, as compared to a corresponding non-transformed wild type non-human organism or a part thereof; and
[44873] (b) growing the non-human organism or a part thereof under conditions which permit the production of alpha-tocopherol or a composition comprising alpha-tocopherol in said non-human organism or in the culture medium surrounding said non-human organism.

[44874] Accordingly, the present invention relates to a process for the production of alpha-tocopherol, which comprises
[44875] (a) increasing or generating one or more activities selected from the group consisting of MADS box protein transcription factor in a non-human organism or a part thereof, preferably a microorganism, a plant cell, a plant or a part thereof, as compared to a corresponding non-transformed wild type non-human organism or a part thereof; and
[44876] (b) growing the non-human organism or a part thereof under conditions which permit the production of alpha-tocopherol or a composition comprising alpha-tocopherol in said non-human organism or in the culture medium surrounding said non-human organism.

[44877] Accordingly, the present invention relates to a process for the production of gamma-tocopherol, which comprises
[44878] (a) increasing or generating one or more activities selected from the group consisting of glutaredoxin in a non-human organism or a part thereof, preferably a microorganism, a plant cell, a plant or a part thereof, as compared to a corresponding non-transformed wild type non-human organism or a part thereof; and
[44879] (b) growing the non-human organism or a part thereof under conditions which permit the production of gamma-tocopherol or a composition comprising gamma-tocopherol in said non-human organism or in the culture medium surrounding said non-human organism.

[44880] Accordingly, the present invention relates to a process for the production of gamma-tocopherol, which comprises
[44881] (a) increasing or generating one or more activities selected from the group consisting of pyruvate kinase in a non-human organism or a part thereof, preferably a microorganism, a plant cell, a plant or a part thereof, as compared to a corresponding non-transformed wild type non-human organism or a part thereof; and
[44882] (b) growing the non-human organism or a part thereof under conditions which permit the production of gamma-tocopherol or a composition comprising gamma-tocopherol in said non-human organism or in the culture medium surrounding said non-human organism.

[44883] Accordingly, the present invention relates to a process for the production of alpha-tocopherol, which comprises
[44884] (a) increasing or generating one or more activities selected from the group consisting of ankyrin repeat family protein in a non-human organism or a part thereof, preferably a microorganism, a plant cell, a plant or a part thereof, as compared to a corresponding non-transformed wild type non-human organism or a part thereof; and
[44885] (b) growing the non-human organism or a part thereof under conditions which permit the production of alpha-tocopherol or a composition comprising alpha-tocopherol in said non-human organism or in the culture medium surrounding said non-human organism.

[44886] Accordingly, the present invention relates to a process for the production of alpha-tocopherol, which comprises
[44887] (a) increasing or generating one or more activities selected from the group consisting of protein phosphatase in a non-human organism or a part thereof, preferably a microorganism, a plant cell, a plant or a part thereof, as compared to a corresponding non-transformed wild type non-human organism or a part thereof; and
[44888] (b) growing the non-human organism or a part thereof under conditions which permit the production of alpha-tocopherol or a composition comprising alpha-tocopherol in said non-human organism or in the culture medium surrounding said non-human organism.

[44889] Accordingly, the present invention relates to a process for the production of alpha-tocopherol, which comprises
[44890] (a) increasing or generating one or more activities selected from the group consisting of thioredoxin family protein in a non-human organism or a part thereof, preferably a microorganism, a plant cell, a plant or a part thereof, as compared to a corresponding non-transformed wild type non-human organism or a part thereof; and
[44891] (b) growing the non-human organism or a part thereof under conditions which permit the production of alpha-tocopherol or a composition comprising alpha-tocopherol in said non-human organism or in the culture medium surrounding said non-human organism.

[44892] Accordingly, the present invention relates to a process for the production of alpha-tocopherol, which comprises
[44893] (a) increasing or generating one or more activities selected from the group consisting of harpin-induced family protein in a non-human organism or a part thereof, preferably a microorganism, a plant cell, a plant or a part thereof, as compared to a corresponding non-transformed wild type non-human organism or a part thereof; and
[44894] (b) growing the non-human organism or a part thereof under conditions which permit the production of alpha-tocopherol or a composition comprising alpha-tocopherol in said non-human organism or in the culture medium surrounding said non-human organism.

[44895] Accordingly, the present invention relates to a process for the production of gamma-tocopherol, which comprises
[44896] (a) increasing or generating one or more activities selected from the group consisting of harpin-induced family protein in a non-human organism or a part thereof, preferably a microorganism, a plant cell, a plant or a part thereof, as compared to a corresponding non-transformed wild type non-human organism or a part thereof; and
[44897] (b) growing the non-human organism or a part thereof under conditions which permit the production of gamma-tocopherol or a composition comprising gamma-tocopherol in said non-human organism or in the culture medium surrounding said non-human organism.

[44898] Accordingly, the present invention relates to a process for the production of gamma-tocopherol, which comprises
[44899] (a) increasing or generating one or more activities selected from the group consisting of protein kinase in a non-human organism or a part thereof, preferably a microorganism, a plant cell, a plant or a part thereof, as compared to a corresponding non-transformed wild type non-human organism or a part thereof; and
[44900] (b) growing the non-human organism or a part thereof under conditions which permit the production of gamma-tocopherol or a composition comprising gamma-tocopherol in said non-human organism or in the culture medium surrounding said non-human organism.

[44901] Accordingly, the present invention relates to a process for the production of gamma-tocopherol, which comprises
[44902] (a) increasing or generating one or more activities selected from the group consisting of monthiol glutaredoxin in a non-human organism or a part thereof, preferably a microorganism, a plant cell, a plant or a part thereof, as compared to a corresponding non-transformed wild type non-human organism or a part thereof; and
[44903] (b) growing the non-human organism or a part thereof under conditions which permit the production of gamma-tocopherol or a composition comprising gamma-tocopherol in said non-human organism or in the culture medium surrounding said non-human organism.

[44904] Accordingly, the present invention relates to a process for the production of gamma-tocopherol, which comprises
[44905] (a) increasing or generating one or more activities selected from the group consisting of glutaredoxin in a non-human organism or a part thereof, preferably a microorganism, a plant cell, a plant or a part thereof, as compared to a corresponding non-transformed wild type non-human organism or a part thereof; and
[44906] (b) growing the non-human organism or a part thereof under conditions which permit the production of gamma-tocopherol or a composition comprising gamma-tocopherol in said non-human organism or in the culture medium surrounding said non-human organism.

[44907] Accordingly, the present invention relates to a process for the production of alpha-tocopherol, which comprises
[44908] (a) increasing or generating one or more activities selected from the group consisting of transcription factor in a non-human organism or a part thereof, preferably a microorganism, a plant cell, a plant or a part thereof, as compared to a corresponding non-transformed wild type non-human organism or a part thereof; and
[44909] (b) growing the non-human organism or a part thereof under conditions which permit the production of alpha-tocopherol or a composition comprising alpha-tocopherol in said non-human organism or in the culture medium surrounding said non-human organism.

[44910] Accordingly, the present invention relates to a process for the production of alpha-tocopherol, which comprises
[44911] (a) increasing or generating one or more activities selected from the group consisting of monothiol glutaredoxin in a non-human organism or a part thereof, preferably a microorganism, a plant cell, a plant or a part thereof, as compared to a corresponding non-transformed wild type non-human organism or a part thereof; and
[44912] (b) growing the non-human organism or a part thereof under conditions which permit the production of alpha-tocopherol or a composition comprising alpha-tocopherol in said non-human organism or in the culture medium surrounding said non-human organism.

[44913] Accordingly, the present invention relates to a process for the production of gamma-tocopherol, which comprises
[44914] (a) increasing or generating one or more activities selected from the group consisting of monothiol glutaredoxin in a non-human organism or a part thereof, preferably a microorganism, a plant cell, a plant or a part thereof, as compared to a corresponding non-transformed wild type non-human organism or a part thereof; and
[44915] (b) growing the non-human organism or a part thereof under conditions which permit the production of gamma-tocopherol or a composition comprising gamma-tocopherol in said non-human organism or in the culture medium surrounding said non-human organism.

[44916] Accordingly, the present invention relates to a process for the production of alpha-tocopherol, which comprises
[44917] (a) increasing or generating one or more activities selected from the group consisting of monothiol glutaredoxin in a non-human organism or a part thereof, preferably a microorganism, a plant cell, a plant or a part thereof, as compared to a corresponding non-transformed wild type non-human organism or a part thereof; and
[44918] (b) growing the non-human organism or a part thereof under conditions which permit the production of alpha-tocopherol or a composition comprising alpha-tocopherol in said non-human organism or in the culture medium surrounding said non-human organism.

[44919] Accordingly, the present invention relates to a process for the production of alpha-tocopherol, which comprises
[44920] (a) increasing or generating one or more activities selected from the group consisting of monothiol glutaredoxin in a non-human organism or a part thereof, preferably a microorganism, a plant cell, a plant or a part thereof, as compared to a corresponding non-transformed wild type non-human organism or a part thereof; and
[44921] (b) growing the non-human organism or a part thereof under conditions which permit the production of alpha-tocopherol or a composition comprising alpha-tocopherol in said non-human organism or in the culture medium surrounding said non-human organism.

[44922] Accordingly, the present invention relates to a process for the production of alpha-tocopherol, which comprises
[44923] (a) increasing or generating one or more activities selected from the group consisting of protein phosphatase in a non-human organism or a part thereof, preferably a microorganism, a plant cell, a plant or a part thereof, as compared to a corresponding non-transformed wild type non-human organism or a part thereof; and
[44924] (b) growing the non-human organism or a part thereof under conditions which permit the production of alpha-tocopherol or a composition comprising alpha-tocopherol in said non-human organism or in the culture medium surrounding said non-human organism.

[44925] Accordingly, the present invention relates to a process for the production of alpha-tocopherol, which comprises
[44926] (a) increasing or generating one or more activities selected from the group consisting of cyclin D in a non-human organism or a part thereof, preferably a microorganism, a plant cell, a plant or a part thereof, as compared to a corresponding non-transformed wild type non-human organism or a part thereof; and
[44927] (b) growing the non-human organism or a part thereof under conditions which permit the production of alpha-tocopherol or a composition comprising alpha-tocopherol in said non-human organism or in the culture medium surrounding said non-human organism.

[44928] Accordingly, the present invention relates to a process for the production of alpha-tocopherol, which comprises
[44929] (a) increasing or generating one or more activities selected from the group consisting of calcium-dependent protein kinase in a non-human organism or a part thereof, preferably a microorganism, a plant cell, a plant or a part thereof, as compared to a corresponding non-transformed wild type non-human organism or a part thereof; and
[44930] (b) growing the non-human organism or a part thereof under conditions which permit the production of alpha-tocopherol or a composition comprising alpha-tocopherol in said non-human organism or in the culture medium surrounding said non-human organism.

[44931] Accordingly, the present invention relates to a process for the production of gamma-tocopherol, which comprises
[44932] (a) increasing or generating one or more activities selected from the group consisting of calcium-dependent protein kinase in a non-human organism or a part thereof, preferably a microorganism, a plant cell, a plant or a part thereof, as compared to a corresponding non-transformed wild type non-human organism or a part thereof; and
[44933] (b) growing the non-human organism or a part thereof under conditions which permit the production of gamma-tocopherol or a composition comprising gamma-tocopherol in said non-human organism or in the culture medium surrounding said non-human organism.

[44934] Accordingly, the present invention relates to a process for the production of alpha-tocopherol, which comprises
[44935] (a) increasing or generating one or more activities selected from the group consisting of RNA-binding protein in a non-human organism or a part thereof, preferably a microorganism, a plant cell, a plant or a part thereof, as compared to a corresponding non-transformed wild type non-human organism or a part thereof; and
[44936] (b) growing the non-human organism or a part thereof under conditions which permit the production of alpha-tocopherol or a composition comprising alpha-tocopherol in said non-human organism or in the culture medium surrounding said non-human organism.

[44937] Accordingly, the present invention relates to a process for the production of gamma-tocopherol, which comprises
[44938] (a) increasing or generating one or more activities selected from the group consisting of RNA-binding protein in a non-human organism or a part thereof, preferably a microorganism, a plant cell, a plant or a part thereof, as compared to a corresponding non-transformed wild type non-human organism or a part thereof; and
[44939] (b) growing the non-human organism or a part thereof under conditions which permit the production of gamma-tocopherol or a composition comprising gamma-tocopherol in said non-human organism or in the culture medium surrounding said non-human organism.

[44940] Accordingly, the present invention relates to a process for the production of gamma-tocopherol, which comprises
[44941] (a) increasing or generating one or more activities selected from the group consisting of zinc finger protein in a non-human organism or a part thereof, preferably a microorganism, a plant cell, a plant or a part thereof, as compared to a corresponding non-transformed wild type non-human organism or a part thereof; and
[44942] (b) growing the non-human organism or a part thereof under conditions which permit the production of gamma-tocopherol or a composition comprising gamma-tocopherol in said non-human organism or in the culture medium surrounding said non-human organism.

[44943] Accordingly, the present invention relates to a process for the production of gamma-tocopherol, which comprises
[44944] (a) increasing or generating one or more activities selected from the group consisting of NAD-dependent epimerase/dehydratase in a non-human organism or a part thereof, preferably a microorganism, a plant cell, a plant or a part thereof, as compared to a corresponding non-transformed wild type non-human organism or a part thereof; and
[44945] (b) growing the non-human organism or a part thereof under conditions which permit the production of gamma-tocopherol or a composition comprising gamma-tocopherol in said non-human organism or in the culture medium surrounding said non-human organism.

[44946] Accordingly, the present invention relates to a process for the production of gamma-tocopherol, which comprises
[44947] (a) increasing or generating one or more activities selected from the group consisting of transcriptional regulator in a non-human organism or a part thereof, preferably a microorganism, a plant cell, a plant or a part thereof, as compared to a corresponding non-transformed wild type non-human organism or a part thereof; and
[44948] (b) growing the non-human organism or a part thereof under conditions which permit the production of gamma-tocopherol or a composition comprising gamma-tocopherol in said non-human organism or in the culture medium surrounding said non-human organism.

[44949] Accordingly, the present invention relates to a process for the production of alpha-tocopherol, which comprises
[44950] (a) increasing or generating one or more activities selected from the group consisting of ThiF family protein in a non-human organism or a part thereof, preferably a microorganism, a plant cell, a plant or a part thereof, as compared to a corresponding non-transformed wild type non-human organism or a part thereof; and
[44951] (b) growing the non-human organism or a part thereof under conditions which permit the production of alpha-tocopherol or a composition comprising alpha-tocopherol in said non-human organism or in the culture medium surrounding said non-human organism.

[44952] Accordingly, the present invention relates to a process for the production of alpha-tocopherol, which comprises
[44953] (a) increasing or generating one or more activities selected from the group consisting of isopropylmalate isomerase large subunit in a non-human organism or a part thereof, preferably a microorganism, a plant cell, a plant or a part thereof, as compared to a corresponding non-transformed wild type non-human organism or a part thereof; and
[44954] (b) growing the non-human organism or a part thereof under conditions which permit the production of alpha-tocopherol or a composition comprising alpha-tocopherol in said non-human organism or in the culture medium surrounding said non-human organism.

[44955] Accordingly, the present invention relates to a process for the production of alpha-tocopherol, which comprises
[44956] (a) increasing or generating one or more activities selected from the group consisting of hydrolase in a non-human organism or a part thereof, preferably a microorganism, a plant cell, a plant or a part thereof, as compared to a corresponding non-transformed wild type non-human organism or a part thereof; and
[44957] (b) growing the non-human organism or a part thereof under conditions which permit the production of alpha-tocopherol or a composition comprising alpha-tocopherol in said non-human organism or in the culture medium surrounding said non-human organism.

[44958] Accordingly, the present invention relates to a process for the production of gamma-tocopherol, which comprises
[44959] (a) increasing or generating one or more activities selected from the group consisting of hydrolase in a non-human organism or a part thereof, preferably a microorganism, a plant cell, a plant or a part thereof, as compared to a corresponding non-transformed wild type non-human organism or a part thereof; and
[44960] (b) growing the non-human organism or a part thereof under conditions which permit the production of gamma-tocopherol or a composition comprising gamma-tocopherol in said non-human organism or in the culture medium surrounding said non-human organism.

[44961] Accordingly, the present invention relates to a process for the production of gamma-tocopherol, which comprises
[44962] (a) increasing or generating one or more activities selected from the group consisting of electron transfer flavoprotein subunit beta in a non-human organism or a part thereof, preferably a microorganism, a plant cell, a plant or a part thereof, as compared to a corresponding non-transformed wild type non-human organism or a part thereof; and
[44963] (b) growing the non-human organism or a part thereof under conditions which permit the production of gamma-tocopherol or a composition comprising gamma-tocopherol in said non-human organism or in the culture medium surrounding said non-human organism.

[44964] Accordingly, the present invention relates to a process for the production of gamma-tocopherol, which comprises
[44965] (a) increasing or generating one or more activities selected from the group consisting of threonine synthase in a non-human organism or a part thereof, preferably a microorganism, a plant cell, a plant or a part thereof, as compared to a corresponding non-transformed wild type non-human organism or a part thereof; and
[44966] (b) growing the non-human organism or a part thereof under conditions which permit the production of gamma-tocopherol or a composition comprising gamma-tocopherol in said non-human organism or in the culture medium surrounding said non-human organism.

[44967] Accordingly, the present invention relates to a process for the production of alpha-tocopherol, which comprises
[44968] (a) increasing or generating one or more activities selected from the group consisting of glucose dehydrogenase in a non-human organism or a part thereof, preferably a microorganism, a plant cell, a plant or a part thereof, as compared to a corresponding non-transformed wild type non-human organism or a part thereof; and
[44969] (b) growing the non-human organism or a part thereof under conditions which permit the production of alpha-tocopherol or a composition comprising alpha-tocopherol in said non-human organism or in the culture medium surrounding said non-human organism.

[44970] Accordingly, the present invention relates to a process for the production of gamma-tocopherol, which comprises
[44971] (a) increasing or generating one or more activities selected from the group consisting of glucose dehydrogenase in a non-human organism or a part thereof, preferably a microorganism, a plant cell, a plant or a part thereof, as compared to a corresponding non-transformed wild type non-human organism or a part thereof; and
[44972] (b) growing the non-human organism or a part thereof under conditions which permit the production of gamma-tocopherol or a composition comprising gamma-tocopherol in said non-human organism or in the culture medium surrounding said non-human organism.

[44973] Accordingly, the present invention relates to a process for the production of gamma-tocopherol, which comprises
[44974] (a) increasing or generating one or more activities selected from the group consisting of serine protease in a non-human organism or a part thereof, preferably a microorganism, a plant cell, a plant or a part thereof, as compared to a corresponding non-transformed wild type non-human organism or a part thereof; and
[44975] (b) growing the non-human organism or a part thereof under conditions which permit the production of gamma-tocopherol or a composition comprising gamma-tocopherol in said non-human organism or in the culture medium surrounding said non-human organism.

[44976] Accordingly, the present invention relates to a process for the production of alpha-tocopherol, which comprises
[44977] (a) increasing or generating one or more activities selected from the group consisting of geranyltranstransferase in a non-human organism or a part thereof, preferably a microorganism, a plant cell, a plant or a part thereof, as compared to a corresponding non-transformed wild type non-human organism or a part thereof; and
[44978] (b) growing the non-human organism or a part thereof under conditions which permit the production of alpha-tocopherol or a composition comprising alpha-tocopherol in said non-human organism or in the culture medium surrounding said non-human organism.

[44979] Accordingly, the present invention relates to a process for the production of gamma-tocopherol, which comprises
[44980] (a) increasing or generating one or more activities selected from the group consisting of ATP-binding component of a transport system in a non-human organism or a part thereof, preferably a microorganism, a plant cell, a plant or a part thereof, as compared to a corresponding non-transformed wild type non-human organism or a part thereof; and
[44981] (b) growing the non-human organism or a part thereof under conditions which permit the production of gamma-tocopherol or a composition comprising gamma-tocopherol in said non-human organism or in the culture medium surrounding said non-human organism.

[44982] Accordingly, the present invention relates to a process for the production of alpha-tocopherol, which comprises
[44983] (a) increasing or generating one or more activities selected from the group consisting of 3-deoxy-D-arabinoheptulosonate-7-phosphatesynthase in a non-human organism or a part thereof, preferably a microorganism, a plant cell, a plant or a part thereof, as compared to a corresponding non-transformed wild type non-human organism or a part thereof; and
[44984] (b) growing the non-human organism or a part thereof under conditions which permit the production of alpha-tocopherol or a composition comprising alpha-tocopherol in said non-human organism or in the culture medium surrounding said non-human organism.

[44985] Accordingly, the present invention relates to a process for the production of gamma-tocopherol, which comprises
[44986] (a) increasing or generating one or more activities selected from the group consisting of major facilitator superfamily transporter protein in a non-human organism or a part thereof, preferably a microorganism, a plant cell, a plant or a part thereof, as compared to a corresponding non-transformed wild type non-human organism or a part thereof; and
[44987] (b) growing the non-human organism or a part thereof under conditions which permit the production of gamma-tocopherol or a composition comprising gamma-tocopherol in said non-human organism or in the culture medium surrounding said non-human organism.

[44988] Accordingly, the present invention relates to a process for the production of alpha-tocopherol, which comprises
[44989] (a) increasing or generating one or more activities selected from the group consisting of b1163-protein in a non-human organism or a part thereof, preferably a microorganism, a plant cell, a plant or a part thereof, as compared to a corresponding non-transformed wild type non-human organism or a part thereof; and
[44990] (b) growing the non-human organism or a part thereof under conditions which permit the production of alpha-tocopherol or a composition comprising alpha-tocopherol in said non-human organism or in the culture medium surrounding said non-human organism.

[44991] Accordingly, the present invention relates to a process for the production of gamma-tocopherol, which comprises
[44992] (a) increasing or generating one or more activities selected from the group consisting of DNA polymerase subunit in a non-human organism or a part thereof, preferably a microorganism, a plant cell, a plant or a part thereof, as compared to a corresponding non-transformed wild type non-human organism or a part thereof; and
[44993] (b) growing the non-human organism or a part thereof under conditions which permit the production of gamma-tocopherol or a composition comprising gamma-tocopherol in said non-human organism or in the culture medium surrounding said non-human organism.

[44994] Accordingly, the present invention relates to a process for the production of alpha-tocopherol, which comprises
[44995] (a) increasing or generating one or more activities selected from the group consisting of b1219-protein in a non-human organism or a part thereof, preferably a microorganism, a plant cell, a plant or a part thereof, as compared to a corresponding non-transformed wild type non-human organism or a part thereof; and
[44996] (b) growing the non-human organism or a part thereof under conditions which permit the production of alpha-tocopherol or a composition comprising alpha-tocopherol in said non-human organism or in the culture medium surrounding said non-human organism.

[44997] Accordingly, the present invention relates to a process for the production of gamma-tocopherol, which comprises
[44998] (a) increasing or generating one or more activities selected from the group consisting of b1234-protein in a non-human organism or a part thereof, preferably a microorganism, a plant cell, a plant or a part thereof, as compared to a corresponding non-transformed wild type non-human organism or a part thereof; and
[44999] (b) growing the non-human organism or a part thereof under conditions which permit the production of gamma-tocopherol or a composition comprising gamma-tocopherol in said non-human organism or in the culture medium surrounding said non-human organism.

[45000] Accordingly, the present invention relates to a process for the production of gamma-tocopherol, which comprises
[45001] (a) increasing or generating one or more activities selected from the group consisting of NADP-dependent malic enzyme in a non-human organism or a part thereof, preferably a microorganism, a plant cell, a plant or a part thereof, as compared to a corresponding non-transformed wild type non-human organism or a part thereof; and
[45002] (b) growing the non-human organism or a part thereof under conditions which permit the production of gamma-tocopherol or a composition comprising gamma-tocopherol in said non-human organism or in the culture medium surrounding said non-human organism.

[45003] Accordingly, the present invention relates to a process for the production of gamma-tocopherol, which comprises
[45004] (a) increasing or generating one or more activities selected from the group consisting of b1522-protein in a non-human organism or a part thereof, preferably a microorganism, a plant cell, a plant or a part thereof, as compared to a corresponding non-transformed wild type non-human organism or a part thereof; and
[45005] (b) growing the non-human organism or a part thereof under conditions which permit the production of gamma-tocopherol or a composition comprising gamma-tocopherol in said non-human organism or in the culture medium surrounding said non-human organism.

[45006] Accordingly, the present invention relates to a process for the production of alpha-tocopherol, which comprises
[45007] (a) increasing or generating one or more activities selected from the group consisting of acid shock protein in a non-human organism or a part thereof, preferably a microorganism, a plant cell, a plant or a part thereof, as compared to a corresponding non-transformed wild type non-human organism or a part thereof; and
[45008] (b) growing the non-human organism or a part thereof under conditions which permit the production of alpha-tocopherol or a composition comprising alpha-tocopherol in said non-human organism or in the culture medium surrounding said non-human organism.

[45009] Accordingly, the present invention relates to a process for the production of alpha-tocopherol, which comprises
[45010] (a) increasing or generating one or more activities selected from the group consisting of transport protein in a non-human organism or a part thereof, preferably a microorganism, a plant cell, a plant or a part thereof, as compared to a corresponding non-transformed wild type non-human organism or a part thereof; and
[45011] (b) growing the non-human organism or a part thereof under conditions which permit the production of alpha-tocopherol or a composition comprising alpha-tocopherol in said non-human organism or in the culture medium surrounding said non-human organism.

[45012] Accordingly, the present invention relates to a process for the production of gamma-tocopherol, which comprises
[45013] (a) increasing or generating one or more activities selected from the group consisting of trehalose-phosphatase in a non-human organism or a part thereof, preferably a microorganism, a plant cell, a plant or a part thereof, as compared to a corresponding non-transformed wild type non-human organism or a part thereof; and
[45014] (b) growing the non-human organism or a part thereof under conditions which permit the production of gamma-tocopherol or a composition comprising gamma-tocopherol in said non-human organism or in the culture medium surrounding said non-human organism.

[45015] Accordingly, the present invention relates to a process for the production of gamma-tocopherol, which comprises
[45016] (a) increasing or generating one or more activities selected from the group consisting of b1921-protein in a non-human organism or a part thereof, preferably a microorganism, a plant cell, a plant or a part thereof, as compared to a corresponding non-transformed wild type non-human organism or a part thereof; and
[45017] (b) growing the non-human organism or a part thereof under conditions which permit the production of gamma-tocopherol or a composition comprising gamma-tocopherol in said non-human organism or in the culture medium surrounding said non-human organism.

[45018] Accordingly, the present invention relates to a process for the production of gamma-tocopherol, which comprises
[45019] (a) increasing or generating one or more activities selected from the group consisting of O-antigen chain length determinant in a non-human organism or a part thereof, preferably a microorganism, a plant cell, a plant or a part thereof, as compared to a corresponding non-transformed wild type non-human organism or a part thereof; and
[45020] (b) growing the non-human organism or a part thereof under conditions which permit the production of gamma-tocopherol or a composition comprising gamma-tocopherol in said non-human organism or in the culture medium surrounding said non-human organism.

[45021] Accordingly, the present invention relates to a process for the production of alpha-tocopherol, which comprises
[45022] (a) increasing or generating one or more activities selected from the group consisting of colanic acid biosynthesis protein in a non-human organism or a part thereof, preferably a microorganism, a plant cell, a plant or a part thereof, as compared to a corresponding non-transformed wild type non-human organism or a part thereof; and
[45023] (b) growing the non-human organism or a part thereof under conditions which permit the production of alpha-tocopherol or a composition comprising alpha-tocopherol in said non-human organism or in the culture medium surrounding said non-human organism.

[45024] Accordingly, the present invention relates to a process for the production of gamma-tocopherol, which comprises
[45025] (a) increasing or generating one or more activities selected from the group consisting of b2360-protein in a non-human organism or a part thereof, preferably a microorganism, a plant cell, a plant or a part thereof, as compared to a corresponding non-transformed wild type non-human organism or a part thereof; and
[45026] (b) growing the non-human organism or a part thereof under conditions which permit the production of gamma-tocopherol or a composition comprising gamma-tocopherol in said non-human organism or in the culture medium surrounding said non-human organism.

[45027] Accordingly, the present invention relates to a process for the production of alpha-tocopherol, which comprises
[45028] (a) increasing or generating one or more activities selected from the group consisting of putative transport system permease protein in a non-human organism or a part thereof, preferably a microorganism, a plant cell, a plant or a part thereof, as compared to a corresponding non-transformed wild type non-human organism or a part thereof; and
[45029] (b) growing the non-human organism or a part thereof under conditions which permit the production of alpha-tocopherol or a composition comprising alpha-tocopherol in said non-human organism or in the culture medium surrounding said non-human organism.

[45030] Accordingly, the present invention relates to a process for the production of gamma-tocopherol, which comprises
[45031] (a) increasing or generating one or more activities selected from the group consisting of b2548-protein in a non-human organism or a part thereof, preferably a microorganism, a plant cell, a plant or a part thereof, as compared to a corresponding non-transformed wild type non-human organism or a part thereof; and
[45032] (b) growing the non-human organism or a part thereof under conditions which permit the production of gamma-tocopherol or a composition comprising gamma-tocopherol in said non-human organism or in the culture medium surrounding said non-human organism.

[45033] Accordingly, the present invention relates to a process for the production of gamma-tocopherol, which comprises
[45034] (a) increasing or generating one or more activities selected from the group consisting of b2613-protein in a non-human organism or a part thereof, preferably a microorganism, a plant cell, a plant or a part thereof, as compared to a corresponding non-transformed wild type non-human organism or a part thereof; and
[45035] (b) growing the non-human organism or a part thereof under conditions which permit the production of gamma-tocopherol or a composition comprising gamma-tocopherol in said non-human organism or in the culture medium surrounding said non-human organism.

[45036] Accordingly, the present invention relates to a process for the production of gamma-tocopherol, which comprises
[45037] (a) increasing or generating one or more activities selected from the group consisting of b2673-protein in a non-human organism or a part thereof, preferably a microorganism, a plant cell, a plant or a part thereof, as compared to a corresponding non-transformed wild type non-human organism or a part thereof; and
[45038] (b) growing the non-human organism or a part thereof under conditions which permit the production of gamma-tocopherol or a composition comprising gamma-tocopherol in said non-human organism or in the culture medium surrounding said non-human organism.

[45039] Accordingly, the present invention relates to a process for the production of gamma-tocopherol, which comprises
[45040] (a) increasing or generating one or more activities selected from the group consisting of murein transglycosylase in a non-human organism or a part thereof, preferably a microorganism, a plant cell, a plant or a part thereof, as compared to a corresponding non-transformed wild type non-human organism or a part thereof; and
[45041] (b) growing the non-human organism or a part thereof under conditions which permit the production of gamma-tocopherol or a composition comprising gamma-tocopherol in said non-human organism or in the culture medium surrounding said non-human organism.

[45042] Accordingly, the present invention relates to a process for the production of gamma-tocopherol, which comprises
[45043] (a) increasing or generating one or more activities selected from the group consisting of b2812-protein in a non-human organism or a part thereof, preferably a microorganism, a plant cell, a plant or a part thereof, as compared to a corresponding non-transformed wild type non-human organism or a part thereof; and
[45044] (b) growing the non-human organism or a part thereof under conditions which permit the production of gamma-tocopherol or a composition comprising gamma-tocopherol in said non-human organism or in the culture medium surrounding said non-human organism.

[45045] Accordingly, the present invention relates to a process for the production of alpha-tocopherol, which comprises
[45046] (a) increasing or generating one or more activities selected from the group consisting of amino-acid acetyltransferase in a non-human organism or a part thereof, preferably a microorganism, a plant cell, a plant or a part thereof, as compared to a corresponding non-transformed wild type non-human organism or a part thereof; and
[45047] (b) growing the non-human organism or a part thereof under conditions which permit the production of alpha-tocopherol or a composition comprising alpha-tocopherol in said non-human organism or in the culture medium surrounding said non-human organism.

[45048] Accordingly, the present invention relates to a process for the production of gamma-tocopherol, which comprises
[45049] (a) increasing or generating one or more activities selected from the group consisting of amino-acid acetyltransferase in a non-human organism or a part thereof, preferably a microorganism, a plant cell, a plant or a part thereof, as compared to a corresponding non-transformed wild type non-human organism or a part thereof; and
[45050] (b) growing the non-human organism or a part thereof under conditions which permit the production of gamma-tocopherol or a composition comprising gamma-tocopherol in said non-human organism or in the culture medium surrounding said non-human organism.

[45051] Accordingly, the present invention relates to a process for the production of alpha-tocopherol, which comprises
[45052] (a) increasing or generating one or more activities selected from the group consisting of glycolate utilization protein in a non-human organism or a part thereof, preferably a microorganism, a plant cell, a plant or a part thereof, as compared to a corresponding non-transformed wild type non-human organism or a part thereof; and
[45053] (b) growing the non-human organism or a part thereof under conditions which permit the production of alpha-tocopherol or a composition comprising alpha-tocopherol in said non-human organism or in the culture medium surrounding said non-human organism.

[45054] Accordingly, the present invention relates to a process for the production of alpha-tocopherol, which comprises
[45055] (a) increasing or generating one or more activities selected from the group consisting of ABC transporter permease subunit in a non-human organism or a part thereof, preferably a microorganism, a plant cell, a plant or a part thereof, as compared to a corresponding non-transformed wild type non-human organism or a part thereof; and
[45056] (b) growing the non-human organism or a part thereof under conditions which permit the production of alpha-tocopherol or a composition comprising alpha-tocopherol in said non-human organism or in the culture medium surrounding said non-human organism.

[45057] Accordingly, the present invention relates to a process for the production of gamma-tocopherol, which comprises
[45058] (a) increasing or generating one or more activities selected from the group consisting of lipopolysaccharide biosynthesis protein in a non-human organism or a part thereof, preferably a microorganism, a plant cell, a plant or a part thereof, as compared to a corresponding non-transformed wild type non-human organism or a part thereof; and
[45059] (b) growing the non-human organism or a part thereof under conditions which permit the production of gamma-tocopherol or a composition comprising gamma-tocopherol in said non-human organism or in the culture medium surrounding said non-human organism.

[45060] Accordingly, the present invention relates to a process for the production of alpha-tocopherol, which comprises
[45061] (a) increasing or generating one or more activities selected from the group consisting of b3890-protein in a non-human organism or a part thereof, preferably a microorganism, a plant cell, a plant or a part thereof, as compared to a corresponding non-transformed wild type non-human organism or a part thereof; and
[45062] (b) growing the non-human organism or a part thereof under conditions which permit the production of alpha-tocopherol or a composition comprising alpha-tocopherol in said non-human organism or in the culture medium surrounding said non-human organism.

[45063] Accordingly, the present invention relates to a process for the production of alpha-tocopherol, which comprises
[45064] (a) increasing or generating one or more activities selected from the group consisting of glycerol dehydrogenase in a non-human organism or a part thereof, preferably a microorganism, a plant cell, a plant or a part thereof, as compared to a corresponding non-transformed wild type non-human organism or a part thereof; and
[45065] (b) growing the non-human organism or a part thereof under conditions which permit the production of alpha-tocopherol or a composition comprising alpha-tocopherol in said non-human organism or in the culture medium surrounding said non-human organism.

[45066] Accordingly, the present invention relates to a process for the production of alpha-tocopherol, which comprises
[45067] (a) increasing or generating one or more activities selected from the group consisting of b3989-protein in a non-human organism or a part thereof, preferably a microorganism, a plant cell, a plant or a part thereof, as compared to a corresponding non-transformed wild type non-human organism or a part thereof; and
[45068] (b) growing the non-human organism or a part thereof under conditions which permit the production of alpha-tocopherol or a composition comprising alpha-tocopherol in said non-human organism or in the culture medium surrounding said non-human organism.

[45069] Accordingly, the present invention relates to a process for the production of gamma-tocopherol, which comprises
[45070] (a) increasing or generating one or more activities selected from the group consisting of b3989-protein in a non-human organism or a part thereof, preferably a microorganism, a plant cell, a plant or a part thereof, as compared to a corresponding non-transformed wild type non-human organism or a part thereof; and
[45071] (b) growing the non-human organism or a part thereof under conditions which permit the production of gamma-tocopherol or a composition comprising gamma-tocopherol in said non-human organism or in the culture medium surrounding said non-human organism.

[45072] Accordingly, the present invention relates to a process for the production of gamma-tocopherol, which comprises
[45073] (a) increasing or generating one or more activities selected from the group consisting of b4029-protein in a non-human organism or a part thereof, preferably a microorganism, a plant cell, a plant or a part thereof, as compared to a corresponding non-transformed wild type non-human organism or a part thereof; and
[45074] (b) growing the non-human organism or a part thereof under conditions which permit the production of gamma-tocopherol or a composition comprising gamma-tocopherol in said non-human organism or in the culture medium surrounding said non-human organism.

[45075] Accordingly, the present invention relates to a process for the production of alpha-tocopherol, which comprises
[45076] (a) increasing or generating one or more activities selected from the group consisting of b4050-protein in a non-human organism or a part thereof, preferably a microorganism, a plant cell, a plant or a part thereof, as compared to a corresponding non-transformed wild type non-human organism or a part thereof; and
[45077] (b) growing the non-human organism or a part thereof under conditions which permit the production of alpha-tocopherol or a composition comprising alpha-tocopherol in said non-human organism or in the culture medium surrounding said non-human organism.

[45078] Accordingly, the present invention relates to a process for the production of alpha-tocopherol, which comprises
[45079] (a) increasing or generating one or more activities selected from the group consisting of b4056-protein in a non-human organism or a part thereof, preferably a microorganism, a plant cell, a plant or a part thereof, as compared to a corresponding non-transformed wild type non-human organism or a part thereof; and
[45080] (b) growing the non-human organism or a part thereof under conditions which permit the production of alpha-tocopherol or a composition comprising alpha-tocopherol in said non-human organism or in the culture medium surrounding said non-human organism.

[45081] Accordingly, the present invention relates to a process for the production of alpha-tocopherol, which comprises
[45082] (a) increasing or generating one or more activities selected from the group consisting of acetyltransferase in a non-human organism or a part thereof, preferably a microorganism, a plant cell, a plant or a part thereof, as compared to a corresponding non-transformed wild type non-human organism or a part thereof; and
[45083] (b) growing the non-human organism or a part thereof under conditions which permit the production of alpha-tocopherol or a composition comprising alpha-tocopherol in said non-human organism or in the culture medium surrounding said non-human organism.

[45084] Accordingly, the present invention relates to a process for the production of gamma-tocopherol, which comprises
[45085] (a) increasing or generating one or more activities selected from the group consisting of acetyltransferase in a non-human organism or a part thereof, preferably a microorganism, a plant cell, a plant or a part thereof, as compared to a corresponding non-transformed wild type non-human organism or a part thereof; and
[45086] (b) growing the non-human organism or a part thereof under conditions which permit the production of gamma-tocopherol or a composition comprising gamma-tocopherol in said non-human organism or in the culture medium surrounding said non-human organism.

[45087] Accordingly, the present invention relates to a process for the production of alpha-tocopherol, which comprises
[45088] (a) increasing or generating one or more activities selected from the group consisting of gluconate transport system permease 3 in a non-human organism or a part thereof, preferably a microorganism, a plant cell, a plant or a part thereof, as compared to a corresponding non-transformed wild type non-human organism or a part thereof; and
[45089] (b) growing the non-human organism or a part thereof under conditions which permit the production of alpha-tocopherol or a composition comprising alpha-tocopherol in said non-human organism or in the culture medium surrounding said non-human organism.

[45090] Accordingly, the present invention relates to a process for the production of gamma-tocopherol, which comprises
[45091] (a) increasing or generating one or more activities selected from the group consisting of gluconate transport system permease 3 in a non-human organism or a part thereof, preferably a microorganism, a plant cell, a plant or a part thereof, as compared to a corresponding non-transformed wild type non-human organism or a part thereof; and
[45092] (b) growing the non-human organism or a part thereof under conditions which permit the production of gamma-tocopherol or a composition comprising gamma-tocopherol in said non-human organism or in the culture medium surrounding said non-human organism.

[45093] Accordingly, the present invention relates to a process for the production of gamma-tocopherol, which comprises
[45094] (a) increasing or generating one or more activities selected from the group consisting of thioredoxin in a non-human organism or a part thereof, preferably a microorganism, a plant cell, a plant or a part thereof, as compared to a corresponding non-transformed wild type non-human organism or a part thereof; and
[45095] (b) growing the non-human organism or a part thereof under conditions which permit the production of gamma-tocopherol or a composition comprising gamma-tocopherol in said non-human organism or in the culture medium surrounding said non-human organism.

[45096] Accordingly, the present invention relates to a process for the production of alpha-tocopherol, which comprises
[45097] (a) increasing or generating one or more activities selected from the group consisting of glutaredoxin in a non-human organism or a part thereof, preferably a microorganism, a plant cell, a plant or a part thereof, as compared to a corresponding non-transformed wild type non-human organism or a part thereof; and
[45098] (b) growing the non-human organism or a part thereof under conditions which permit the production of alpha-tocopherol or a composition comprising alpha-tocopherol in said non-human organism or in the culture medium surrounding said non-human organism.

[45099] Accordingly, the present invention relates to a process for the production of gamma-tocopherol, which comprises
[45100] (a) increasing or generating one or more activities selected from the group consisting of glutaredoxin in a non-human organism or a part thereof, preferably a microorganism, a plant cell, a plant or a part thereof, as compared to a corresponding non-transformed wild type non-human organism or a part thereof; and
[45101] (b) growing the non-human organism or a part thereof under conditions which permit the production of gamma-tocopherol or a composition comprising gamma-tocopherol in said non-human organism or in the culture medium surrounding said non-human organism.

[45102] Accordingly, the present invention relates to a process for the production of gamma-tocopherol, which comprises
[45103] (a) increasing or generating one or more activities selected from the group consisting of transcription factor in a non-human organism or a part thereof, preferably a microorganism, a plant cell, a plant or a part thereof, as compared to a corresponding non-transformed wild type non-human organism or a part thereof; and
[45104] (b) growing the non-human organism or a part thereof under conditions which permit the production of gamma-tocopherol or a composition comprising gamma-tocopherol in said non-human organism or in the culture medium surrounding said non-human organism.

[45105] Accordingly, the present invention relates to a process for the production of alpha-tocopherol, which comprises
[45106] (a) increasing or generating one or more activities selected from the group consisting of polyphosphate kinase in a non-human organism or a part thereof, preferably a microorganism, a plant cell, a plant or a part thereof, as compared to a corresponding non-transformed wild type non-human organism or a part thereof; and
[45107] (b) growing the non-human organism or a part thereof under conditions which permit the production of alpha-tocopherol or a composition comprising alpha-tocopherol in said non-human organism or in the culture medium surrounding said non-human organism.

[45108] Accordingly, the present invention relates to a process for the production of gamma-tocopherol, which comprises
[45109] (a) increasing or generating one or more activities selected from the group consisting of phosphofructokinase in a non-human organism or a part thereof, preferably a microorganism, a plant cell, a plant or a part thereof, as compared to a corresponding non-transformed wild type non-human organism or a part thereof; and
[45110] (b) growing the non-human organism or a part thereof under conditions which permit the production of gamma-tocopherol or a composition comprising gamma-tocopherol in said non-human organism or in the culture medium surrounding said non-human organism.

[45111] Accordingly, the present invention relates to a process for the production of gamma-tocopherol, which comprises
[45112] (a) increasing or generating one or more activities selected from the group consisting of coproporphyrinogen oxidase in a non-human organism or a part thereof, preferably a microorganism, a plant cell, a plant or a part thereof, as compared to a corresponding non-transformed wild type non-human organism or a part thereof; and
[45113] (b) growing the non-human organism or a part thereof under conditions which permit the production of gamma-tocopherol or a composition comprising gamma-tocopherol in said non-human organism or in the culture medium surrounding said non-human organism.

[45114] Accordingly, the present invention relates to a process for the production of gamma-tocopherol, which comprises
[45115] (a) increasing or generating one or more activities selected from the group consisting of sll1761-protein in a non-human organism or a part thereof, preferably a microorganism, a plant cell, a plant or a part thereof, as compared to a corresponding non-transformed wild type non-human organism or a part thereof; and
[45116] (b) growing the non-human organism or a part thereof under conditions which permit the production of gamma-tocopherol or a composition comprising gamma-tocopherol in said non-human organism or in the culture medium surrounding said non-human organism.

[45117] Accordingly, the present invention relates to a process for the production of gamma-tocopherol, which comprises
[45118] (a) increasing or generating one or more activities selected from the group consisting of adenylate kinase in a non-human organism or a part thereof, preferably a microorganism, a plant cell, a plant or a part thereof, as compared to a corresponding non-transformed wild type non-human organism or a part thereof; and
[45119] (b) growing the non-human organism or a part thereof under conditions which permit the production of gamma-tocopherol or a composition comprising gamma-tocopherol in said non-human organism or in the culture medium surrounding said non-human organism.

[45120] Accordingly, the present invention relates to a process for the production of alpha-tocopherol, which comprises
[45121] (a) increasing or generating one or more activities selected from the group consisting of precorrin methylase in a non-human organism or a part thereof, preferably a microorganism, a plant cell, a plant or a part thereof, as compared to a corresponding non-transformed wild type non-human organism or a part thereof; and
[45122] (b) growing the non-human organism or a part thereof under conditions which permit the production of alpha-tocopherol or a composition comprising alpha-tocopherol in said non-human organism or in the culture medium surrounding said non-human organism.

[45123] Accordingly, the present invention relates to a process for the production of alpha-tocopherol, which comprises
[45124] (a) increasing or generating one or more activities selected from the group consisting of malate dehydrogenase in a non-human organism or a part thereof, preferably a microorganism, a plant cell, a plant or a part thereof, as compared to a corresponding non-transformed wild type non-human organism or a part thereof; and
[45125] (b) growing the non-human organism or a part thereof under conditions which permit the production of alpha-tocopherol or a composition comprising alpha-tocopherol in said non-human organism or in the culture medium surrounding said non-human organism.

[45126] Accordingly, the present invention relates to a process for the production of gamma-tocopherol, which comprises
[45127] (a) increasing or generating one or more activities selected from the group consisting of malate dehydrogenase in a non-human organism or a part thereof, preferably a microorganism, a plant cell, a plant or a part thereof, as compared to a corresponding non-transformed wild type non-human organism or a part thereof; and
[45128] (b) growing the non-human organism or a part thereof under conditions which permit the production of gamma-tocopherol or a composition comprising gamma-tocopherol in said non-human organism or in the culture medium surrounding said non-human organism.

[45129] Accordingly, the present invention relates to a process for the production of alpha-tocopherol, which comprises
[45130] (a) increasing or generating one or more activities selected from the group consisting of geranylgeranyl pyrophosphate synthase in a non-human organism or a part thereof, preferably a microorganism, a plant cell, a plant or a part thereof, as compared to a corresponding non-transformed wild type non-human organism or a part thereof; and
[45131] (b) growing the non-human organism or a part thereof under conditions which permit the production of alpha-tocopherol or a composition comprising alpha-tocopherol in said non-human organism or in the culture medium surrounding said non-human organism.

[45132] Accordingly, the present invention relates to a process for the production of gamma-tocopherol, which comprises
[45133] (a) increasing or generating one or more activities selected from the group consisting of geranylgeranyl pyrophosphate synthase in a non-human organism or a part thereof, preferably a microorganism, a plant cell, a plant or a part thereof, as compared to a corresponding non-transformed wild type non-human organism or a part thereof; and
[45134] (b) growing the non-human organism or a part thereof under conditions which permit the production of gamma-tocopherol or a composition comprising gamma-tocopherol in said non-human organism or in the culture medium surrounding said non-human organism.

[45135] Accordingly, the present invention relates to a process for the production of gamma-tocopherol, which comprises
[45136] (a) increasing or generating one or more activities selected from the group consisting of carbohydrate kinase in a non-human organism or a part thereof, preferably a microorganism, a plant cell, a plant or a part thereof, as compared to a corresponding non-transformed wild type non-human organism or a part thereof; and
[45137] (b) growing the non-human organism or a part thereof under conditions which permit the production of gamma-tocopherol or a composition comprising gamma-tocopherol in said non-human organism or in the culture medium surrounding said non-human organism.

[45138] Accordingly, the present invention relates to a process for the production of gamma-tocopherol, which comprises
[45139] (a) increasing or generating one or more activities selected from the group consisting of photosystem II protein in a non-human organism or a part thereof, preferably a microorganism, a plant cell, a plant or a part thereof, as compared to a corresponding non-transformed wild type non-human organism or a part thereof; and
[45140] (b) growing the non-human organism or a part thereof under conditions which permit the production of gamma-tocopherol or a composition comprising gamma-tocopherol in said non-human organism or in the culture medium surrounding said non-human organism.

[45141] Accordingly, the present invention relates to a process for the production of alpha-tocopherol, which comprises
[45142] (a) increasing or generating one or more activities selected from the group consisting of glycerol-3-phosphate dehydrogenase in a non-human organism or a part thereof, preferably a microorganism, a plant cell, a plant or a part thereof, as compared to a corresponding non-transformed wild type non-human organism or a part thereof; and
[45143] (b) growing the non-human organism or a part thereof under conditions which permit the production of alpha-tocopherol or a composition comprising alpha-tocopherol in said non-human organism or in the culture medium surrounding said non-human organism.

[45144] Accordingly, the present invention relates to a process for the production of gamma-tocopherol, which comprises
[45145] (a) increasing or generating one or more activities selected from the group consisting of phosphoadenosine phosphosulfate reductase in a non-human organism or a part thereof, preferably a microorganism, a plant cell, a plant or a part thereof, as compared to a corresponding non-transformed wild type non-human organism or a part thereof; and
[45146] (b) growing the non-human organism or a part thereof under conditions which permit the production of gamma-tocopherol or a composition comprising gamma-tocopherol in said non-human organism or in the culture medium surrounding said non-human organism.

[45147] Accordingly, the present invention relates to a process for the production of alpha-tocopherol, which comprises
[45148] (a) increasing or generating one or more activities selected from the group consisting of slr1917-protein in a non-human organism or a part thereof, preferably a microorganism, a plant cell, a plant or a part thereof, as compared to a corresponding non-transformed wild type non-human organism or a part thereof; and
[45149] (b) growing the non-human organism or a part thereof under conditions which permit the production of alpha-tocopherol or a composition comprising alpha-tocopherol in said non-human organism or in the culture medium surrounding said non-human organism.

[45150] Accordingly, the present invention relates to a process for the production of gamma-tocopherol, which comprises
[45151] (a) increasing or generating one or more activities selected from the group consisting of slr1917-protein in a non-human organism or a part thereof, preferably a microorganism, a plant cell, a plant or a part thereof, as compared to a corresponding non-transformed wild type non-human organism or a part thereof; and
[45152] (b) growing the non-human organism or a part thereof under conditions which permit the production of gamma-tocopherol or a composition comprising gamma-tocopherol in said non-human organism or in the culture medium surrounding said non-human organism.

[45153] Accordingly, the present invention relates to a process for the production of alpha-tocopherol, which comprises
[45154] (a) increasing or generating one or more activities selected from the group consisting of Sec-independent protein translocase subunit in a non-human organism or a part thereof, preferably a microorganism, a plant cell, a plant or a part thereof, as compared to a corresponding non-transformed wild type non-human organism or a part thereof; and
[45155] (b) growing the non-human organism or a part thereof under conditions which permit the production of alpha-tocopherol or a composition comprising alpha-tocopherol in said non-human organism or in the culture medium surrounding said non-human organism.

[45156] Accordingly, the present invention relates to a process for the production of gamma-tocopherol, which comprises
[45157] (a) increasing or generating one or more activities selected from the group consisting of Sec-independent protein translocase subunit in a non-human organism or a part thereof, preferably a microorganism, a plant cell, a plant or a part thereof, as compared to a corresponding non-transformed wild type non-human organism or a part thereof; and
[45158] (b) growing the non-human organism or a part thereof under conditions which permit the production of gamma-tocopherol or a composition comprising gamma-tocopherol in said non-human organism or in the culture medium surrounding said non-human organism.

[45159] Accordingly, the present invention relates to a process for the production of gamma-tocopherol, which comprises
[45160] (a) increasing or generating one or more activities selected from the group consisting of multiple antibiotic resistance protein in a non-human organism or a part thereof, preferably a microorganism, a plant cell, a plant or a part thereof, as compared to a corresponding non-transformed wild type non-human organism or a part thereof; and
[45161] (b) growing the non-human organism or a part thereof under conditions which permit the production of gamma-tocopherol or a composition comprising gamma-tocopherol in said non-human organism or in the culture medium surrounding said non-human organism.

[45162] Accordingly, the present invention relates to a process for the production of alpha-tocopherol, which comprises
[45163] (a) increasing or generating one or more activities selected from the group consisting of TTC1386-protein in a non-human organism or a part thereof, preferably a microorganism, a plant cell, a plant or a part thereof, as compared to a corresponding non-transformed wild type non-human organism or a part thereof; and
[45164] (b) growing the non-human organism or a part thereof under conditions which permit the production of alpha-tocopherol or a composition comprising alpha-tocopherol in said non-human organism or in the culture medium surrounding said non-human organism.

[45165] Accordingly, the present invention relates to a process for the production of gamma-tocopherol, which comprises
[45166] (a) increasing or generating one or more activities selected from the group consisting of TTC1386-protein in a non-human organism or a part thereof, preferably a microorganism, a plant cell, a plant or a part thereof, as compared to a corresponding non-transformed wild type non-human organism or a part thereof; and
[45167] (b) growing the non-human organism or a part thereof under conditions which permit the production of gamma-tocopherol or a composition comprising gamma-tocopherol in said non-human organism or in the culture medium surrounding said non-human organism.

[45168] Accordingly, the present invention relates to a process for the production of alpha-tocopherol, which comprises
[45169] (a) increasing or generating one or more activities selected from the group consisting of homocitrate synthase in a non-human organism or a part thereof, preferably a microorganism, a plant cell, a plant or a part thereof, as compared to a corresponding non-transformed wild type non-human organism or a part thereof; and
[45170] (b) growing the non-human organism or a part thereof under conditions which permit the production of alpha-tocopherol or a composition comprising alpha-tocopherol in said non-human organism or in the culture medium surrounding said non-human organism.

[45171] Accordingly, the present invention relates to a process for the production of alpha-tocopherol, which comprises
[45172] (a) increasing or generating one or more activities selected from the group consisting of 3-deoxy-7-phosphoheptulonate synthase in a non-human organism or a part thereof, preferably a microorganism, a plant cell, a plant or a part thereof, as compared to a corresponding non-transformed wild type non-human organism or a part thereof; and
[45173] (b) growing the non-human organism or a part thereof under conditions which permit the production of alpha-tocopherol or a composition comprising alpha-tocopherol in said non-human organism or in the culture medium surrounding said non-human organism.

[45174] Accordingly, the present invention relates to a process for the production of gamma-tocopherol, which comprises
[45175] (a) increasing or generating one or more activities selected from the group consisting of 3-deoxy-7-phosphoheptulonate synthase in a non-human organism or a part thereof, preferably a microorganism, a plant cell, a plant or a part thereof, as compared to a corresponding non-transformed wild type non-human organism or a part thereof; and
[45176] (b) growing the non-human organism or a part thereof under conditions which permit the production of gamma-tocopherol or a composition comprising gamma-tocopherol in said non-human organism or in the culture medium surrounding said non-human organism.

[45177] Accordingly, the present invention relates to a process for the production of gamma-tocopherol, which comprises
[45178] (a) increasing or generating one or more activities selected from the group consisting of ycl049c-protein in a non-human organism or a part thereof, preferably a microorganism, a plant cell, a plant or a part thereof, as compared to a corresponding non-transformed wild type non-human organism or a part thereof; and
[45179] (b) growing the non-human organism or a part thereof under conditions which permit the production of gamma-tocopherol or a composition comprising gamma-tocopherol in said non-human organism or in the culture medium surrounding said non-human organism.

[45180] Accordingly, the present invention relates to a process for the production of alpha-tocopherol, which comprises
[45181] (a) increasing or generating one or more activities selected from the group consisting of homocitrate synthase in a non-human organism or a part thereof, preferably a microorganism, a plant cell, a plant or a part thereof, as compared to a corresponding non-transformed wild type non-human organism or a part thereof; and
[45182] (b) growing the non-human organism or a part thereof under conditions which permit the production of alpha-tocopherol or a composition comprising alpha-tocopherol in said non-human organism or in the culture medium surrounding said non-human organism.

[45183] Accordingly, the present invention relates to a process for the production of alpha-tocopherol, which comprises
[45184] (a) increasing or generating one or more activities selected from the group consisting of ydl235c-protein in a non-human organism or a part thereof, preferably a microorganism, a plant cell, a plant or a part thereof, as compared to a corresponding non-transformed wild type non-human organism or a part thereof; and
[45185] (b) growing the non-human organism or a part thereof under conditions which permit the production of alpha-tocopherol or a composition comprising alpha-tocopherol in said non-human organism or in the culture medium surrounding said non-human organism.

[45186] Accordingly, the present invention relates to a process for the production of gamma-tocopherol, which comprises
[45187] (a) increasing or generating one or more activities selected from the group consisting of N(5′-phosphoribosyl)anthranilate isomerase in a non-human organism or a part thereof, preferably a microorganism, a plant cell, a plant or a part thereof, as compared to a corresponding non-transformed wild type non-human organism or a part thereof; and
[45188] (b) growing the non-human organism or a part thereof under conditions which permit the production of gamma-tocopherol or a composition comprising gamma-tocopherol in said non-human organism or in the culture medium surrounding said non-human organism.

[45189] Accordingly, the present invention relates to a process for the production of gamma-tocopherol, which comprises
[45190] (a) increasing or generating one or more activities selected from the group consisting of phospho-2-dehydro-3-deoxyheptonate aldolase in a non-human organism or a part thereof, preferably a microorganism, a plant cell, a plant or a part thereof, as compared to a corresponding non-transformed wild type non-human organism or a part thereof; and
[45191] (b) growing the non-human organism or a part thereof under conditions which permit the production of gamma-tocopherol or a composition comprising gamma-tocopherol in said non-human organism or in the culture medium surrounding said non-human organism.

[45192] Accordingly, the present invention relates to a process for the production of gamma-tocopherol, which comprises
[45193] (a) increasing or generating one or more activities selected from the group consisting of ydr183w-protein in a non-human organism or a part thereof, preferably a microorganism, a plant cell, a plant or a part thereof, as compared to a corresponding non-transformed wild type non-human organism or a part thereof; and
[45194] (b) growing the non-human organism or a part thereof under conditions which permit the production of gamma-tocopherol or a composition comprising gamma-tocopherol in said non-human organism or in the culture medium surrounding said non-human organism.

[45195] Accordingly, the present invention relates to a process for the production of gamma-tocopherol, which comprises
[45196] (a) increasing or generating one or more activities selected from the group consisting of yer106w-protein in a non-human organism or a part thereof, preferably a microorganism, a plant cell, a plant or a part thereof, as compared to a corresponding non-transformed wild type non-human organism or a part thereof; and
[45197] (b) growing the non-human organism or a part thereof under conditions which permit the production of gamma-tocopherol or a composition comprising gamma-tocopherol in said non-human organism or in the culture medium surrounding said non-human organism.

[45198] Accordingly, the present invention relates to a process for the production of gamma-tocopherol, which comprises
[45199] (a) increasing or generating one or more activities selected from the group consisting of small nuclear ribonucleoprotein in a non-human organism or a part thereof, preferably a microorganism, a plant cell, a plant or a part thereof, as compared to a corresponding non-transformed wild type non-human organism or a part thereof; and
[45200] (b) growing the non-human organism or a part thereof under conditions which permit the production of gamma-tocopherol or a composition comprising gamma-tocopherol in said non-human organism or in the culture medium surrounding said non-human organism.

[45201] Accordingly, the present invention relates to a process for the production of alpha-tocopherol, which comprises
[45202] (a) increasing or generating one or more activities selected from the group consisting of phosphatidylserine decarboxylase in a non-human organism or a part thereof, preferably a microorganism, a plant cell, a plant or a part thereof, as compared to a corresponding non-transformed wild type non-human organism or a part thereof; and
[45203] (b) growing the non-human organism or a part thereof under conditions which permit the production of alpha-tocopherol or a composition comprising alpha-tocopherol in said non-human organism or in the culture medium surrounding said non-human organism.

[45204] Accordingly, the present invention relates to a process for the production of gamma-tocopherol, which comprises
[45205] (a) increasing or generating one or more activities selected from the group consisting of polygalacturonase in a non-human organism or a part thereof, preferably a microorganism, a plant cell, a plant or a part thereof, as compared to a corresponding non-transformed wild type non-human organism or a part thereof; and
[45206] (b) growing the non-human organism or a part thereof under conditions which permit the production of gamma-tocopherol or a composition comprising gamma-tocopherol in said non-human organism or in the culture medium surrounding said non-human organism.

[45207] Accordingly, the present invention relates to a process for the production of gamma-tocopherol, which comprises
[45208] (a) increasing or generating one or more activities selected from the group consisting of ylr178c-protein in a non-human organism or a part thereof, preferably a microorganism, a plant cell, a plant or a part thereof, as compared to a corresponding non-transformed wild type non-human organism or a part thereof; and
[45209] (b) growing the non-human organism or a part thereof under conditions which permit the production of gamma-tocopherol or a composition comprising gamma-tocopherol in said non-human organism or in the culture medium surrounding said non-human organism.

[45210] Accordingly, the present invention relates to a process for the production of alpha-tocopherol, which comprises
[45211] (a) increasing or generating one or more activities selected from the group consisting of adenylosuccinate lyase in a non-human organism or a part thereof, preferably a microorganism, a plant cell, a plant or a part thereof, as compared to a corresponding non-transformed wild type non-human organism or a part thereof; and
[45212] (b) growing the non-human organism or a part thereof under conditions which permit the production of alpha-tocopherol or a composition comprising alpha-tocopherol in said non-human organism or in the culture medium surrounding said non-human organism.

[45213] Accordingly, the present invention relates to a process for the production of alpha-tocopherol, which comprises
[45214] (a) increasing or generating one or more activities selected from the group consisting of ypr170c-protein in a non-human organism or a part thereof, preferably a microorganism, a plant cell, a plant or a part thereof, as compared to a corresponding non-transformed wild type non-human organism or a part thereof; and
[45215] (b) growing the non-human organism or a part thereof under conditions which permit the production of alpha-tocopherol or a composition comprising alpha-tocopherol in said non-human organism or in the culture medium surrounding said non-human organism.

[45216] An embodiment of the present invention relates to a process for the production of alpha-tocopherol, which comprises
[45217] (a1) increasing or generating the activity of a polypeptide comprising a polypeptide as depicted in a respective line in column 5 or 8 of Table II, application no. 7, or a homolog or a fragment thereof, a consensus sequence or at least one polypeptide motif as depicted in the respective line in column 8 of Table IV, application no. 7, whereby the respective line disclose in column 7 the fine chemical alpha-tocopherol; or
[45218] (a2) increasing or generating the activity of an expression product of one or more nucleic acid molecule(s) comprising a polynucleotide as depicted in the respective line in column 5 or 8 of Table I, application no. 7, preferably the coding region thereof, or a homolog or a fragment thereof, whereby the respective line disclose in column 7 the fine chemical alpha-tocopherol; or
[45219] (a3) increasing or generating the activity of a functional equivalent of
[45220] (a1) or
[45221] (a2);
[45222] in a non-human organism or a part thereof; preferably a microorganism, a plant cell, a plant or a part thereof, as compared to a corresponding non-transformed wild type non-human organism or a part thereof; and
[45223] (b) growing the non-human organism under conditions which permit the production of alpha-tocopherol or a composition comprising alpha-tocopherol in said non-human organism or in the culture medium surrounding said non-human organism.

[45224] An embodiment of the present invention relates to a process for the production of gamma-tocopherol, which comprises
[45225] (a1) increasing or generating the activity of a polypeptide comprising a polypeptide as depicted in a respective line in column 5 or 8 of Table II, application no. 7, or a homolog or a fragment thereof, a consensus sequence or at least one polypeptide motif as depicted in the respective line in column 8 of Table IV, application no. 7, whereby the respective line disclose in column 7 the fine chemical gamma-tocopherol; or
[45226] (a2) increasing or generating the activity of an expression product of one or more nucleic acid molecule(s) comprising a polynucleotide as depicted in the respective line in column 5 or 8 of Table I, application no. 7, preferably the coding region thereof, or a homolog or a fragment thereof, whereby the respective line disclose in column 7 the fine chemical gamma-tocopherol; or
[45227] (a3) increasing or generating the activity of a functional equivalent of
[45228] (a1) or
[45229] (a2);
[45230] in a non-human organism or a part thereof; preferably a microorganism, a plant cell, a plant or a part thereof, as compared to a corresponding non-transformed wild type non-human organism or a part thereof; and
[45231] (b) growing the non-human organism under conditions which permit the production of gamma-tocopherol or a composition comprising gamma-tocopherol in said non-human organism or in the culture medium surrounding said non-human organism.

[45232] Accordingly, the increase or generation of one or more said activities is for example conferred by one or more expression products of said nucleic acid molecule, e.g. proteins. Accordingly, in the present invention described above, the increase or generation of one or more said activities is for example conferred by one or more protein(s) each comprising a polypeptide selected from the group as depicted in Table II, application no. 7, column 5 and 8, or a homolog or a fragment thereof.

[45233] The process of the invention comprises in one embodiment the following steps:
[45234] (i) increasing or generating of the expression of; and/or
[45235] (ii) increasing or generating the expression of an expression product of; and/or
[45236] (iii) increasing or generating one or more activities of an expression product encoded by;

[45237] at least one nucleic acid molecule (in the following “Fine Chemical Related Protein (FCRP)”-encoding gene or “FCRP”-gene) comprising a nucleic acid molecule selected from the group consisting of:
[45238] (a) a nucleic acid molecule encoding the polypeptide shown in column 5 or 8 of Table II, preferably Table II B, application no. 7, or a homolog or a fragment thereof;
[45239] (b) a nucleic acid molecule shown in column 5 or 8 of Table I, preferably Table I B, application no. 7, or a homolog or a fragment thereof (preferably the coding region thereof);
[45240] (c) a nucleic acid molecule, which, as a result of the degeneracy of the genetic code, can be derived from a polypeptide sequence depicted in column 5 or 8 of Table II, preferably Table II B, application no. 7;
[45241] (d) a nucleic acid molecule having at least 30%, in particular at least 50%, 60%, 70%, 80%, 85%, 90%, 95%, 97%, 98%, 99% or 99.5% identity with the nucleic acid molecule sequence of a polynucleotide comprising the nucleic acid molecule shown in column 5 or 8 of Table I, preferably Table I B, application no. 7, or the coding region thereof;
[45242] (e) a nucleic acid molecule encoding a polypeptide having at least 30%, in particular 50%, 60%, 70%, 80%, 85%, 90%, 95%, 97%, 98%, 99% or 99.5% identity with the amino acid sequence of the polypeptide encoded by the nucleic acid molecule of (a), (b), (c) or (d),
[45243] (f) a nucleic acid molecule which hybridizes with a nucleic acid molecule of (a), (b), (c), (d) or (e) under stringent hybridization conditions;
[45244] (g) a nucleic acid molecule encoding a polypeptide which can be isolated with the aid of monoclonal or polyclonal antibodies made against a polypeptide encoded by one of the nucleic acid molecules of (a), (b), (c), (d), (e) or (f);
[45245] (h) a nucleic acid molecule encoding a polypeptide comprising the consensus sequence or one or more polypeptide motifs as shown in column 8 of Table IV, application no. 7;
[45246] (i) a nucleic acid molecule encoding a polypeptide having the activity represented by a respective protein as depicted in column 5 of Table II, application no. 7;
[45247] (j) a nucleic acid molecule which comprises a polynucleotide, which is obtained by amplifying a cDNA library or a genomic library using the primers as depicted in column 8 of Table III, application no. 7; and
[45248] (k) a nucleic acid molecule which is obtainable by screening a suitable nucleic acid library, especially a cDNA library and/or a genomic library, under stringent hybridization conditions with a probe comprising a complementary sequence of a nucleic acid molecule of (a), (b), (c), (d), (e), (f), (g), (h), (i) or (j) or with a fragment thereof, having at least 15 nt, preferably 20 nt, 30 nt, 50 nt, 100 nt, 200 nt, 500 nt, 1000 nt, 1500 nt, 2000 nt or 3000 nt of a nucleic acid molecule complementary to a nucleic acid molecule sequence characterized in (a), (b), (c), (d), (e), (f), (g), (h), (i) or (j);
[45249] or a nucleic acid molecule comprising a sequence which is complementary thereto.
   (All the references to Tables I to IV are references to the corresponding lines of Tables I to IV.)

[45250] In a preferred embodiment thereof said nucleic acid molecule encodes a polypeptide which has the activity of the polypeptide represented by a protein comprising a polypeptide as depicted in the corresponding hit in column 5 of Table II, application no. 7.

[45251] In another preferred embodiment thereof said nucleic acid molecule confers a generation or an increase of the respective fine chemical in a non-human organism or a part thereof as compared to a corresponding wild-type non-human organism or part thereof.

[45252] In another preferred embodiment thereof said nucleic acid molecule encodes a polypeptide which has the activity of the polypeptide represented by a protein as depicted in the corresponding hit in column 5 of Table II, application no. 7, and confers a generation or an increase of the respective fine chemical in a non-human organism or a part thereof as compared to a corresponding wild-type non-human organism or part thereof.

[45253] Accordingly, the genes of the present invention or used in accordance with the present invention, which respectively encode a protein having an activity of 3-deoxy-7-phosphoheptulonate synthase, 3-deoxy-D-arabinoheptulosonate-7-phosphatesynthase, ABC transporter permease subunit, acetyltransferase, acid shock protein, adenylate kinase, adenylosuccinate lyase, amino-acid acetyltransferase, ankyrin repeat family protein, At1g29350-protein, ATP-binding component of a transport system, b1163-protein, b1219-protein, b1234-protein, b1522-protein, b1921-protein, b2360-protein, b2548-protein, b2613-protein, b2673-protein, b2812-protein, b3890-protein, b3989-protein, b4029-protein, b4050-protein, b4056-protein, calcium-dependent protein kinase, carbohydrate kinase, colanic acid biosynthesis protein, coproporphyrinogen oxidase, cyclin D , DNA polymerase subunit, electron transfer flavoprotein subunit beta, geranylgeranyl pyrophosphate synthase, geranyltranstransferase, gluconate transport system permease 3, glucose dehydrogenase, glucose-6-phosphate 1-dehydrogenase, glutaredoxin, glycerol dehydrogenase, glycerol-3-phosphate dehydrogenase, glycolate utilization protein, harpin-induced family protein, homocitrate synthase, hydrolase, isopropylmalate isomerase large subunit, lipopolysaccharide biosynthesis protein, MADS box protein transcription factor, major facilitator superfamily transporter protein, malate dehydrogenase, monothiol glutaredoxin, monthiol glutaredoxin, multiple antibiotic resistance protein, murein transglycosylase, N-(5′-phosphoribosyl) anthranilate isomerase, NAD-dependent epimerase/dehydratase, NADP-dependent malic enzyme, O-antigen chain length determinant, phosphatidylserine decarboxylase, phospho-2-dehydro-3-deoxyheptonate aldolase, phosphoadenosine phosphosulfate reductase, phosphofructokinase, photosystem II protein, polygalacturonase, polyphosphate kinase, precorrin methylase, protein kinase, protein phosphatase, putative transport system permease protein, pyruvate kinase, RNA-binding protein, Sec-independent protein translocase subunit, serine protease, sll1761-protein, slr1917-protein, small nuclear ribonucleoprotein , ThiF family protein, thioredoxin, thioredoxin family protein, threonine synthase, transcription factor, transcriptional regulator, transport protein, trehalose-phosphatase, TTC1386-protein, ycl049c-protein, ydl235c-protein, ydr183w-protein, yer106w-protein, ylr178c-protein, ypr170c-protein, or zinc finger protein, which respectively encode a protein comprising a polypeptide encoded by a nucleic acid sequence as shown in Table I, application no. 7, column 5 or 8, (preferably the coding region thereof), or a homolog or a fragment thereof, which respectively encode a protein comprising a polypeptide as depicted in Table II, application no. 7, column 5 or 8, or a homolg or a fragment thereof, and/or which respectively can be amplified with the primer set shown in Table III, application no. 7, column 8, are also referred to as “FCRP genes”.

[45254] Proteins or polypeptides encoded by “FCRP-genes” are referred to as “Fine Chemical Related Proteins” or “FCRP”. For the purposes of the description of the present invention, the respective protein having an activity of 3-deoxy-7-phosphoheptulonate synthase, 3-deoxy-D-arabinoheptulosonate-7-phosphatesynthase, ABC transporter permease subunit, acetyltransferase, acid shock protein, adenylate kinase, adenylosuccinate lyase, amino-acid acetyltransferase, ankyrin repeat family protein, At1g29350-protein, ATP-binding component of a transport system, b1163-protein, b1219-protein, b1234-protein, b1522-protein, b1921-protein, b2360-protein, b2548-protein, b2613-protein, b2673-protein, b2812-protein, b3890-protein, b3989-protein, b4029-protein, b4050-protein, b4056-protein, calcium-dependent protein kinase, carbohydrate kinase, colanic acid biosynthesis protein, coproporphyrinogen oxidase, cyclin D , DNA polymerase subunit, electron transfer flavoprotein subunit beta, geranylgeranyl pyrophosphate synthase, geranyltranstransferase, gluconate transport system permease 3, glucose dehydrogenase, glucose-6-phosphate 1-dehydrogenase, glutaredoxin, glycerol dehydrogenase, glycerol-3-phosphate dehydrogenase, glycolate utilization protein, harpin-induced family protein, homocitrate synthase, hydrolase, isopropylmalate isomerase large subunit, lipopolysaccharide biosynthesis protein, MADS box protein transcription factor, major facilitator superfamily transporter protein, malate dehydrogenase, monothiol glutaredoxin, monthiol glutaredoxin, multiple antibiotic resistance protein, murein transglycosylase, N-(5′-phosphoribosyl)anthranilate isomerase, NAD-dependent epimerase/dehydratase, NADP-dependent malic enzyme, O-antigen chain length determinant, phosphatidylserine decarboxylase, phospho-2-dehydro-3-deoxyheptonate aldolase, phosphoadenosine phosphosulfate reductase , phosphofructokinase, photosystem II protein, polygalacturonase, polyphosphate kinase, precorrin methylase, protein kinase, protein phosphatase, putative transport system permease protein, pyruvate kinase, RNA-binding protein, Sec-independent protein translocase subunit, serine protease, sll1761-protein, slr1917-protein, small nuclear ribonucleoprotein , ThiF family protein, thioredoxin, thioredoxin family protein, threonine synthase, transcription factor, transcriptional regulator, transport protein, trehalose-phosphatase, TTC1386-protein, ycl049c-protein, ydl235c-protein, ydr183w-protein, yer106w-protein, ylr178c-protein, ypr170c-protein, or zinc finger protein, the respective protein comprising a polypeptide encoded by one or more respective nucleic acid sequences as shown in Table I, application no. 7, column 5 or 8, (preferably the coding region thereof), or a homolog or fragment thereof, the respective protein comprising a respective polypeptide as depicted in Table II, application no. 7, column 5 or 8, or a homolog or fragment thereof, the respective protein comprising a sequence corresponding to the consensus sequence as shown in Table IV, application no. 7, column 8, and/or the respective protein comprising at least one polypeptide motif as shown in Table IV, application no. 7, column 8 is also referred to as Fine Chemical Related Protein” or “FCRP”.

[45255] Thus, in one embodiment, the present invention provides a process of the production of alpha-tocopherol, and/or gamma-tocopherol, by increasing or generating one or more activities, especially selected from the group consisting of 3-deoxy-7-phosphoheptulonate synthase, 3-deoxy-D-arabinoheptulosonate-7-phosphatesynthase, ABC transporter permease subunit, acetyltransferase, acid shock protein, adenylate kinase, adenylosuccinate lyase, amino-acid acetyltransferase, ankyrin repeat family protein, At1g29350-protein, ATP-binding component of a transport system, b1163-protein, b1219-protein, b1234-protein, b1522-protein, b1921-protein, b2360-protein, b2548-protein, b2613-protein, b2673-protein, b2812-protein, b3890-protein, b3989-protein, b4029-protein, b4050-protein, b4056-protein, calcium-dependent protein kinase, carbohydrate kinase, colanic acid biosynthesis protein, coproporphyrinogen oxidase, cyclin D , DNA polymerase subunit, electron transfer flavoprotein subunit beta, geranylgeranyl pyrophosphate synthase, geranyltranstransferase, gluconate transport system permease 3, glucose dehydrogenase, glucose-6-phosphate 1-dehydrogenase, glutaredoxin, glycerol dehydrogenase, glycerol-3-phosphate dehydrogenase, glycolate utilization protein, harpininduced family protein, homocitrate synthase, hydrolase, isopropylmalate isomerase large subunit, lipopolysaccharide biosynthesis protein, MADS box protein transcription factor, major facilitator superfamily transporter protein, malate dehydrogenase, monothiol glutaredoxin, monthiol glutaredoxin, multiple antibiotic resistance protein, murein transglycosylase, N-(5′-phosphoribosyl) anthranilate isomerase, NAD-dependent epimerase/dehydratase, NADP-dependent malic enzyme, O-antigen chain length determinant, phosphatidylserine decarboxylase, phospho-2-dehydro-3-deoxyheptonate aldolase, phosphoadenosine phosphosulfate reductase , phosphofructokinase, photosystem II protein, polygalacturonase, polyphosphate kinase, precorrin methylase, protein kinase, protein phosphatase, putative transport system permease protein, pyruvate kinase, RNA-binding protein, Sec-independent protein translocase subunit, serine protease, sll1761-protein, slr1917-protein, small nuclear ribonucleoprotein , ThiF family protein, thioredoxin, thioredoxin family protein, threonine synthase, transcription factor, transcriptional regulator, transport protein, trehalose-phosphatase, TTC1386-protein, ycl049c-protein, ydl235c-protein, ydr183w-protein, yer106w-protein, ylr178c-protein, ypr170c-protein, and zinc finger protein, which is conferred by one or more FCRPs or the gene product of one or more FCRP-genes, for example by the gene product of a nucleic acid sequences comprising a polynucleotide selected from the group as shown in Table I, application no. 7, column 5 or 8, (preferably by the coding region thereof), or a homolog or a fragment thereof, e.g. or by one or more proteins each comprising a polypeptide encoded by one or more nucleic acid sequences selected from the group as shown in Table I, application no. 7, column 5 or 8, (preferably by the coding region thereof), or a homolog or a fragment thereof, or by one or more protein(s) each comprising a polypeptide selected from the group as depicted in Table II, application no. 7, column 5 and 8, or a homolog thereof, or a protein comprising a sequence corresponding to the consensus sequence or comprising at least one polypeptide motif as shown in Table IV, application no. 7, column 8.

[45256] As mentioned, the process for the production of the fine chemical according to the present invention, in particular showing a generation or an increase of the respective fine chemical in a non-human organism or a part thereof as compared to a corresponding wild-type non-human organism or part thereof, can be mediated by one or more FCRP-genes or FCPRs.

[45257] In an embodiment, the process comprises increasing or generating the activity of one or more polypeptides having said activity, e.g.

[45258] by generating or increasing the amount and/or specific activity in the cell or a compartment of a cell of one of more FCRP, especially selected from the group consisting of 3-deoxy-7-phosphoheptulonate synthase, 3-deoxy-D-arabinoheptulosonate-7-phosphatesynthase, ABC transporter permease subunit, acetyltransferase, acid shock protein, adenylate kinase, adenylosuccinate lyase, amino-acid acetyltransferase, ankyrin repeat family protein, At1g29350-protein,

[45259] ATP-binding component of a transport system, b1163-protein, b1219-protein, b1234-protein, b1522-protein, b1921-protein, b2360-protein, b2548-protein, b2613-protein, b2673-protein, b2812-protein, b3890-protein, b3989-protein, b4029-protein, b4050-protein, b4056-protein, calcium-dependent protein kinase, carbohydrate kinase, colanic acid biosynthesis protein, coproporphyrinogen oxidase, cyclin D , DNA polymerase subunit, electron transfer flavoprotein subunit beta, geranylgeranyl pyrophosphate synthase, geranyltranstransferase, gluconate transport system permease 3, glucose dehydrogenase, glucose-6-phosphate 1-dehydrogenase, glutaredoxin, glycerol dehydrogenase, glycerol-3-phosphate dehydrogenase, glycolate utilization protein, harpin-induced family protein, homocitrate synthase, hydrolase, isopropylmalate isomerase large subunit, lipopolysaccharide biosynthesis protein, MADS box protein transcription factor, major facilitator superfamily transporter protein, malate dehydrogenase, monothiol glutaredoxin, monthiol glutaredoxin, multiple antibiotic resistance protein, murein transglycosylase, N-(5′-phosphoribosyl) anthranilate isomerase, NAD-dependent epimerase/dehydratase, NADP-dependent malic enzyme, O-antigen chain length determinant, phosphatidylserine decarboxylase, phospho-2-dehydro-3-deoxyheptonate aldolase, phosphoadenosine phosphosulfate reductase , phosphofructokinase, photosystem II protein, polygalacturonase, polyphosphate kinase, precorrin methylase, protein kinase, protein phosphatase, putative transport system permease protein, pyruvate kinase, RNA-binding protein, Sec-independent protein translocase subunit, serine protease, sll1761-protein, slr1917-protein, small nuclear ribonucleoprotein , ThiF family protein, thioredoxin, thioredoxin family protein, threonine synthase, transcription factor, transcriptional regulator, transport protein, trehalose-phosphatase, TTC1386-protein, ycl049c-protein, ydl235c-protein, ydr183w-protein, yer106w-protein, ylr178c-protein, ypr170c-protein, and zinc finger protein, for example of the respective polypeptide as depicted in Table II, application no. 7, column 5 and 8, or a homolog or a fragment thereof, or the respective polypeptide comprising a s equence corresponding to the consensus sequences as shown in Table IV, application no. 7, column 8, or the respective polypeptide comprising at least one polypeptide motif as depicted in Table IV, application no. 7, column 8.

[45260] A further embodiment of the present invention relates to a process for the production of alpha-tocopherol, which comprises
[45261] (a) increasing or generating the activity of a pyruvate kinase non-targeted in a non-human organism or a part thereof, preferably a microorganism, a plant cell, a plant or a part thereof, as compared to a corresponding non-transformed wild type non-human organism or a part thereof; and
[45262] (b) growing the non-human organism or a part thereof under conditions which permit the production of alpha-tocopherol or a composition comprising alpha-tocopherol in said non-human organism or in the culture medium surrounding said non-human organism.

[45263] A further embodiment of the present invention relates to a process for the production of gamma-tocopherol, which comprises
[45264] (a) increasing or generating the activity of a pyruvate kinase non-targeted in a non-human organism or a part thereof, preferably a microorganism, a plant cell, a plant or a part thereof, as compared to a corresponding non-transformed wild type non-human organism or a part thereof; and
[45265] (b) growing the non-human organism or a part thereof under conditions which permit the production of gamma-tocopherol or a composition comprising gamma-tocopherol in said non-human organism or in the culture medium surrounding said non-human organism.

[45266] A further embodiment of the present invention relates to a process for the production of alpha-tocopherol, which comprises
[45267] (a) increasing or generating the activity of a glucose-6-phosphate 1-dehydrogenase non-targeted in a non-human organism or a part thereof, preferably a microorganism, a plant cell, a plant or a part thereof, as compared to a corresponding non-transformed wild type non-human organism or a part thereof; and
[45268] (b) growing the non-human organism or a part thereof under conditions which permit the production of alpha-tocopherol or a composition comprising alpha-tocopherol in said non-human organism or in the culture medium surrounding said non-human organism.

[45269] A further embodiment of the present invention relates to a process for the production of gamma-tocopherol, which comprises
[45270] (a) increasing or generating the activity of a At1g29350-protein non-targeted in a non-human organism or a part thereof, preferably a microorganism, a plant cell, a plant or a part thereof, as compared to a corresponding non-transformed wild type non-human organism or a part thereof; and
[45271] (b) growing the non-human organism or a part thereof under conditions which permit the production of gamma-tocopherol or a composition comprising gamma-tocopherol in said non-human organism or in the culture medium surrounding said non-human organism.

[45272] A further embodiment of the present invention relates to a process for the production of gamma-tocopherol, which comprises
[45273] (a) increasing or generating the activity of a transcriptional regulator non-targeted in a non-human organism or a part thereof, preferably a microorganism, a plant cell, a plant or a part thereof, as compared to a corresponding non-transformed wild type non-human organism or a part thereof; and
[45274] (b) growing the non-human organism or a part thereof under conditions which permit the production of gamma-tocopherol or a composition comprising gamma-tocopherol in said non-human organism or in the culture medium surrounding said non-human organism.

[45275] A further embodiment of the present invention relates to a process for the production of gamma-tocopherol, which comprises
[45276] (a) increasing or generating the activity of a protein kinase non-targeted in a non-human organism or a part thereof, preferably a microorganism, a plant cell, a plant or a part thereof, as compared to a corresponding non-transformed wild type non-human organism or a part thereof; and
[45277] (b) growing the non-human organism or a part thereof under conditions which permit the production of gamma-tocopherol or a composition comprising gamma-tocopherol in said non-human organism or in the culture medium surrounding said non-human organism.

[45278] A further embodiment of the present invention relates to a process for the production of gamma-tocopherol, which comprises
[45279] (a) increasing or generating the activity of a calcium-dependent protein kinase non-targeted in a non-human organism or a part thereof, preferably a microorganism, a plant cell, a plant or a part thereof, as compared to a corresponding non-transformed wild type non-human organism or a part thereof; and
[45280] (b) growing the non-human organism or a part thereof under conditions which permit the production of gamma-tocopherol or a composition comprising gamma-tocopherol in said non-human organism or in the culture medium surrounding said non-human organism.

[45281] A further embodiment of the present invention relates to a process for the production of alpha-tocopherol, which comprises
[45282] (a) increasing or generating the activity of a protein phosphatase non-targeted in a non-human organism or a part thereof, preferably a microorganism, a plant cell, a plant or a part thereof, as compared to a corresponding non-transformed wild type non-human organism or a part thereof; and
[45283] (b) growing the non-human organism or a part thereof under conditions which permit the production of alpha-tocopherol or a composition comprising alpha-tocopherol in said non-human organism or in the culture medium surrounding said non-human organism.

[45284] A further embodiment of the present invention relates to a process for the production of alpha-tocopherol, which comprises
[45285] (a) increasing or generating the activity of a MADS box protein transcription factor non-targeted in a non-human organism or a part thereof, preferably a microorganism, a plant cell, a plant or a part thereof, as compared to a corresponding non-transformed wild type non-human organism or a part thereof; and
[45286] (b) growing the non-human organism or a part thereof under conditions which permit the production of alpha-tocopherol or a composition comprising alpha-tocopherol in said non-human organism or in the culture medium surrounding said non-human organism.

[45287] A further embodiment of the present invention relates to a process for the production of gamma-tocopherol, which comprises
[45288] (a) increasing or generating the activity of a glutaredoxin non-targeted in a non-human organism or a part thereof, preferably a microorganism, a plant cell, a plant or a part thereof, as compared to a corresponding non-transformed wild type non-human organism or a part thereof; and
[45289] (b) growing the non-human organism or a part thereof under conditions which permit the production of gamma-tocopherol or a composition comprising gamma-tocopherol in said non-human organism or in the culture medium surrounding said non-human organism.

[45290] A further embodiment of the present invention relates to a process for the production of gamma-tocopherol, which comprises
[45291] (a) increasing or generating the activity of a pyruvate kinase non-targeted in a non-human organism or a part thereof, preferably a microorganism, a plant cell, a plant or a part thereof, as compared to a corresponding non-transformed wild type non-human organism or a part thereof; and
[45292] (b) growing the non-human organism or a part thereof under conditions which permit the production of gamma-tocopherol or a composition comprising gamma-tocopherol in said non-human organism or in the culture medium surrounding said non-human organism.

[45293] A further embodiment of the present invention relates to a process for the production of alpha-tocopherol, which comprises
[45294] (a) increasing or generating the activity of a ankyrin repeat family protein non-targeted in a non-human organism or a part thereof, preferably a microorganism, a plant cell, a plant or a part thereof, as compared to a corresponding non-transformed wild type non-human organism or a part thereof; and
[45295] (b) growing the non-human organism or a part thereof under conditions which permit the production of alpha-tocopherol or a composition comprising alpha-tocopherol in said non-human organism or in the culture medium surrounding said non-human organism.

[45296] A further embodiment of the present invention relates to a process for the production of alpha-tocopherol, which comprises
[45297] (a) increasing or generating the activity of a protein phosphatase non-targeted in a non-human organism or a part thereof, preferably a microorganism, a plant cell, a plant or a part thereof, as compared to a corresponding non-transformed wild type non-human organism or a part thereof; and
[45298] (b) growing the non-human organism or a part thereof under conditions which permit the production of alpha-tocopherol or a composition comprising alpha-tocopherol in said non-human organism or in the culture medium surrounding said non-human organism.

[45299] A further embodiment of the present invention relates to a process for the production of alpha-tocopherol, which comprises
[45300] (a) increasing or generating the activity of a thioredoxin family protein non-targeted in a non-human organism or a part thereof, preferably a microorganism, a plant cell, a plant or a part thereof, as compared to a corresponding non-transformed wild type non-human organism or a part thereof; and
[45301] (b) growing the non-human organism or a part thereof under conditions which permit the production of alpha-tocopherol or a composition comprising alpha-tocopherol in said non-human organism or in the culture medium surrounding said non-human organism.

[45302] A further embodiment of the present invention relates to a process for the production of alpha-tocopherol, which comprises
[45303] (a) increasing or generating the activity of a harpin-induced family protein non-targeted in a non-human organism or a part thereof, preferably a microorganism, a plant cell, a plant or a part thereof, as compared to a corresponding non-transformed wild type non-human organism or a part thereof; and
[45304] (b) growing the non-human organism or a part thereof under conditions which permit the production of alpha-tocopherol or a composition comprising alpha-tocopherol in said non-human organism or in the culture medium surrounding said non-human organism.

[45305] A further embodiment of the present invention relates to a process for the production of gamma-tocopherol, which comprises
[45306] (a) increasing or generating the activity of a harpin-induced family protein non-targeted in a non-human organism or a part thereof, preferably a microorganism, a plant cell, a plant or a part thereof, as compared to a corresponding non-transformed wild type non-human organism or a part thereof; and
[45307] (b) growing the non-human organism or a part thereof under conditions which permit the production of gamma-tocopherol or a composition comprising gamma-tocopherol in said non-human organism or in the culture medium surrounding said non-human organism.

[45308] A further embodiment of the present invention relates to a process for the production of gamma-tocopherol, which comprises
[45309] (a) increasing or generating the activity of a protein kinase non-targeted in a non-human organism or a part thereof, preferably a microorganism, a plant cell, a plant or a part thereof, as compared to a corresponding non-transformed wild type non-human organism or a part thereof; and
[45310] (b) growing the non-human organism or a part thereof under conditions which permit the production of gamma-tocopherol or a composition comprising gamma-tocopherol in said non-human organism or in the culture medium surrounding said non-human organism.

[45311] A further embodiment of the present invention relates to a process for the production of gamma-tocopherol, which comprises
[45312] (a) increasing or generating the activity of a monthiol glutaredoxin non-targeted in a non-human organism or a part thereof, preferably a microorganism, a plant cell, a plant or a part thereof, as compared to a corresponding non-transformed wild type non-human organism or a part thereof; and
[45313] (b) growing the non-human organism or a part thereof under conditions which permit the production of gamma-tocopherol or a composition comprising gamma-tocopherol in said non-human organism or in the culture medium surrounding said non-human organism.

[45314] A further embodiment of the present invention relates to a process for the production of gamma-tocopherol, which comprises
[45315] (a) increasing or generating the activity of a glutaredoxin non-targeted in a non-human organism or a part thereof, preferably a microorganism, a plant cell, a plant or a part thereof, as compared to a corresponding non-transformed wild type non-human organism or a part thereof; and
[45316] (b) growing the non-human organism or a part thereof under conditions which permit the production of gamma-tocopherol or a composition comprising gamma-tocopherol in said non-human organism or in the culture medium surrounding said non-human organism.

[45317] A further embodiment of the present invention relates to a process for the production of alpha-tocopherol, which comprises
[45318] (a) increasing or generating the activity of a transcription factor non-targeted in a non-human organism or a part thereof, preferably a microorganism, a plant cell, a plant or a part thereof, as compared to a corresponding non-transformed wild type non-human organism or a part thereof; and
[45319] (b) growing the non-human organism or a part thereof under conditions which permit the production of alpha-tocopherol or a composition comprising alpha-tocopherol in said non-human organism or in the culture medium surrounding said non-human organism.

[45320] A further embodiment of the present invention relates to a process for the production of alpha-tocopherol, which comprises
[45321] (a) increasing or generating the activity of a monothiol glutaredoxin non-targeted in a non-human organism or a part thereof, preferably a microorganism, a plant cell, a plant or a part thereof, as compared to a corresponding non-transformed wild type non-human organism or a part thereof; and
[45322] (b) growing the non-human organism or a part thereof under conditions which permit the production of alpha-tocopherol or a composition comprising alpha-tocopherol in said non-human organism or in the culture medium surrounding said non-human organism.

[45323] A further embodiment of the present invention relates to a process for the production of gamma-tocopherol, which comprises
[45324] (a) increasing or generating the activity of a monothiol glutaredoxin non-targeted in a non-human organism or a part thereof, preferably a microorganism, a plant cell, a plant or a part thereof, as compared to a corresponding non-transformed wild type non-human organism or a part thereof; and
[45325] (b) growing the non-human organism or a part thereof under conditions which permit the production of gamma-tocopherol or a composition comprising gamma-tocopherol in said non-human organism or in the culture medium surrounding said non-human organism.

[45326] A further embodiment of the present invention relates to a process for the production of alpha-tocopherol, which comprises
[45327] (a) increasing or generating the activity of a monothiol glutaredoxin non-targeted in a non-human organism or a part thereof, preferably a microorganism, a plant cell, a plant or a part thereof, as compared to a corresponding non-transformed wild type non-human organism or a part thereof; and
[45328] (b) growing the non-human organism or a part thereof under conditions which permit the production of alpha-tocopherol or a composition comprising alpha-tocopherol in said non-human organism or in the culture medium surrounding said non-human organism.

[45329] A further embodiment of the present invention relates to a process for the production of alpha-tocopherol, which comprises
[45330] (a) increasing or generating the activity of a monothiol glutaredoxin non-targeted in a non-human organism or a part thereof, preferably a microorganism, a plant cell, a plant or a part thereof, as compared to a corresponding non-transformed wild type non-human organism or a part thereof; and
[45331] (b) growing the non-human organism or a part thereof under conditions which permit the production of alpha-tocopherol or a composition comprising alpha-tocopherol in said non-human organism or in the culture medium surrounding said non-human organism.

[45332] A further embodiment of the present invention relates to a process for the production of alpha-tocopherol, which comprises
[45333] (a) increasing or generating the activity of a protein phosphatase non-targeted in a non-human organism or a part thereof, preferably a microorganism, a plant cell, a plant or a part thereof, as compared to a corresponding non-transformed wild type non-human organism or a part thereof; and
[45334] (b) growing the non-human organism or a part thereof under conditions which permit the production of alpha-tocopherol or a composition comprising alpha-tocopherol in said non-human organism or in the culture medium surrounding said non-human organism.

[45335] A further embodiment of the present invention relates to a process for the production of alpha-tocopherol, which comprises
[45336] (a) increasing or generating the activity of a cyclin D non-targeted in a non-human organism or a part thereof, preferably a microorganism, a plant cell, a plant or a part thereof, as compared to a corresponding non-transformed wild type non-human organism or a part thereof; and
[45337] (b) growing the non-human organism or a part thereof under conditions which permit the production of alpha-tocopherol or a composition comprising alpha-tocopherol in said non-human organism or in the culture medium surrounding said non-human organism.

[45338] A further embodiment of the present invention relates to a process for the production of alpha-tocopherol, which comprises
[45339] (a) increasing or generating the activity of a calcium-dependent protein kinase non-targeted in a non-human organism or a part thereof, preferably a microorganism, a plant cell, a plant or a part thereof, as compared to a corresponding non-transformed wild type non-human organism or a part thereof; and
[45340] (b) growing the non-human organism or a part thereof under conditions which permit the production of alpha-tocopherol or a composition comprising alpha-tocopherol in said non-human organism or in the culture medium surrounding said non-human organism.

[45341] A further embodiment of the present invention relates to a process for the production of gamma-tocopherol, which comprises
[45342] (a) increasing or generating the activity of a calcium-dependent protein kinase non-targeted in a non-human organism or a part thereof, preferably a microorganism, a plant cell, a plant or a part thereof, as compared to a corresponding non-transformed wild type non-human organism or a part thereof; and
[45343] (b) growing the non-human organism or a part thereof under conditions which permit the production of gamma-tocopherol or a composition comprising gamma-tocopherol in said non-human organism or in the culture medium surrounding said non-human organism.

[45344] A further embodiment of the present invention relates to a process for the production of alpha-tocopherol, which comprises
[45345] (a) increasing or generating the activity of a RNA-binding protein non-targeted in a non-human organism or a part thereof, preferably a microorganism, a plant cell, a plant or a part thereof, as compared to a corresponding non-transformed wild type non-human organism or a part thereof; and
[45346] (b) growing the non-human organism or a part thereof under conditions which permit the production of alpha-tocopherol or a composition comprising alpha-tocopherol in said non-human organism or in the culture medium surrounding said non-human organism.

[45347] A further embodiment of the present invention relates to a process for the production of gamma-tocopherol, which comprises
[45348] (a) increasing or generating the activity of a RNA-binding protein non-targeted in a non-human organism or a part thereof, preferably a microorganism, a plant cell, a plant or a part thereof, as compared to a corresponding non-transformed wild type non-human organism or a part thereof; and
[45349] (b) growing the non-human organism or a part thereof under conditions which permit the production of gamma-tocopherol or a composition comprising gamma-tocopherol in said non-human organism or in the culture medium surrounding said non-human organism.

[45350] A further embodiment of the present invention relates to a process for the production of gamma-tocopherol, which comprises
[45351] (a) increasing or generating the activity of a zinc finger protein non-targeted in a non-human organism or a part thereof, preferably a microorganism, a plant cell, a plant or a part thereof, as compared to a corresponding non-transformed wild type non-human organism or a part thereof; and
[45352] (b) growing the non-human organism or a part thereof under conditions which permit the production of gamma-tocopherol or a composition comprising gamma-tocopherol in said non-human organism or in the culture medium surrounding said non-human organism.

[45353] A further embodiment of the present invention relates to a process for the production of gamma-tocopherol, which comprises
[45354] (a) increasing or generating the activity of a NAD-dependent epimerase/dehydratase non-targeted in a non-human organism or a part thereof, preferably a microorganism, a plant cell, a plant or a part thereof, as compared to a corresponding non-transformed wild type non-human organism or a part thereof; and
[45355] (b) growing the non-human organism or a part thereof under conditions which permit the production of gamma-tocopherol or a composition comprising gamma-tocopherol in said non-human organism or in the culture medium surrounding said non-human organism.

[45356] A further embodiment of the present invention relates to a process for the production of gamma-tocopherol, which comprises
[45357] (a) increasing or generating the activity of a transcriptional regulator non-targeted in a non-human organism or a part thereof, preferably a microorganism, a plant cell, a plant or a part thereof, as compared to a corresponding non-transformed wild type non-human organism or a part thereof; and
[45358] (b) growing the non-human organism or a part thereof under conditions which permit the production of gamma-tocopherol or a composition comprising gamma-tocopherol in said non-human organism or in the culture medium surrounding said non-human organism.

[45359] A further embodiment of the present invention relates to a process for the production of alpha-tocopherol, which comprises
[45360] (a) increasing or generating the activity of a ThiF family protein non-targeted in a non-human organism or a part thereof, preferably a microorganism, a plant cell, a plant or a part thereof, as compared to a corresponding non-transformed wild type non-human organism or a part thereof; and
[45361] (b) growing the non-human organism or a part thereof under conditions which permit the production of alpha-tocopherol or a composition comprising alpha-tocopherol in said non-human organism or in the culture medium surrounding said non-human organism.

[45362] A further embodiment of the present invention relates to a process for the production of alpha-tocopherol, which comprises
[45363] (a) increasing or generating the activity of a isopropylmalate isomerase large subunit non-targeted in a non-human organism or a part thereof, preferably a microorganism, a plant cell, a plant or a part thereof, as compared to a corresponding non-transformed wild type non-human organism or a part thereof; and
[45364] (b) growing the non-human organism or a part thereof under conditions which permit the production of alpha-tocopherol or a composition comprising alpha-tocopherol in said non-human organism or in the culture medium surrounding said non-human organism.

[45365] A further embodiment of the present invention relates to a process for the production of alpha-tocopherol, which comprises
[45366] (a) increasing or generating the activity of a hydrolase non-targeted in a non-human organism or a part thereof, preferably a microorganism, a plant cell, a plant or a part thereof, as compared to a corresponding non-transformed wild type non-human organism or a part thereof; and
[45367] (b) growing the non-human organism or a part thereof under conditions which permit the production of alpha-tocopherol or a composition comprising alpha-tocopherol in said non-human organism or in the culture medium surrounding said non-human organism.

[45368] A further embodiment of the present invention relates to a process for the production of gamma-tocopherol, which comprises
[45369] (a) increasing or generating the activity of a hydrolase non-targeted in a non-human organism or a part thereof, preferably a microorganism, a plant cell, a plant or a part thereof, as compared to a corresponding non-transformed wild type non-human organism or a part thereof; and
[45370] (b) growing the non-human organism or a part thereof under conditions which permit the production of gamma-tocopherol or a composition comprising gamma-tocopherol in said non-human organism or in the culture medium surrounding said non-human organism.

[45371] A further embodiment of the present invention relates to a process for the production of gamma-tocopherol, which comprises
[45372] (a) increasing or generating the activity of a electron transfer flavoprotein subunit beta non-targeted in a non-human organism or a part thereof, preferably a microorganism, a plant cell, a plant or a part thereof, as compared to a corresponding non-transformed wild type non-human organism or a part thereof; and
[45373] (b) growing the non-human organism or a part thereof under conditions which permit the production of gamma-tocopherol or a composition comprising gamma-tocopherol in said non-human organism or in the culture medium surrounding said non-human organism.

[45374] A further embodiment of the present invention relates to a process for the production of gamma-tocopherol, which comprises
[45375] (a) increasing or generating the activity of a threonine synthase non-targeted in a non-human organism or a part thereof, preferably a microorganism, a plant cell, a plant or a part thereof, as compared to a corresponding non-transformed wild type non-human organism or a part thereof; and
[45376] (b) growing the non-human organism or a part thereof under conditions which permit the production of gamma-tocopherol or a composition comprising gamma-tocopherol in said non-human organism or in the culture medium surrounding said non-human organism.

[45377] A further embodiment of the present invention relates to a process for the production of alpha-tocopherol, which comprises
[45378] (a) increasing or generating the activity of a glucose dehydrogenase non-targeted in a non-human organism or a part thereof, preferably a microorganism, a plant cell, a plant or a part thereof, as compared to a corresponding non-transformed wild type non-human organism or a part thereof; and
[45379] (b) growing the non-human organism or a part thereof under conditions which permit the production of alpha-tocopherol or a composition comprising alpha-tocopherol in said non-human organism or in the culture medium surrounding said non-human organism.

[45380] A further embodiment of the present invention relates to a process for the production of gamma-tocopherol, which comprises
[45381] (a) increasing or generating the activity of a glucose dehydrogenase non-targeted in a non-human organism or a part thereof, preferably a microorganism, a plant cell, a plant or a part thereof, as compared to a corresponding non-transformed wild type non-human organism or a part thereof; and
[45382] (b) growing the non-human organism or a part thereof under conditions which permit the production of gamma-tocopherol or a composition comprising gamma-tocopherol in said non-human organism or in the culture medium surrounding said non-human organism.

[45383] A further embodiment of the present invention relates to a process for the production of gamma-tocopherol, which comprises
[45384] (a) increasing or generating the activity of a serine protease non-targeted in a non-human organism or a part thereof, preferably a microorganism, a plant cell, a plant or a part thereof, as compared to a corresponding non-transformed wild type non-human organism or a part thereof; and
[45385] (b) growing the non-human organism or a part thereof under conditions which permit the production of gamma-tocopherol or a composition comprising gamma-tocopherol in said non-human organism or in the culture medium surrounding said non-human organism.

[45386] A further embodiment of the present invention relates to a process for the production of alpha-tocopherol, which comprises
[45387] (a) increasing or generating the activity of a geranyltranstransferase non-targeted in a non-human organism or a part thereof, preferably a microorganism, a plant cell, a plant or a part thereof, as compared to a corresponding non-transformed wild type non-human organism or a part thereof; and
[45388] (b) growing the non-human organism or a part thereof under conditions which permit the production of alpha-tocopherol or a composition comprising alpha-tocopherol in said non-human organism or in the culture medium surrounding said non-human organism.

[45389] A further embodiment of the present invention relates to a process for the production of gamma-tocopherol, which comprises
[45390] (a) increasing or generating the activity of a ATP-binding component of a transport system non-targeted in a non-human organism or a part thereof, preferably a microorganism, a plant cell, a plant or a part thereof, as compared to a corresponding non-transformed wild type non-human organism or a part thereof; and
[45391] (b) growing the non-human organism or a part thereof under conditions which permit the production of gamma-tocopherol or a composition comprising gamma-tocopherol in said non-human organism or in the culture medium surrounding said non-human organism.

[45392] A further embodiment of the present invention relates to a process for the production of alpha-tocopherol, which comprises
[45393] (a) increasing or generating the activity of a 3-deoxy-D-arabinoheptulosonate-7-phosphatesynthase non-targeted in a non-human organism or a part thereof, preferably a microorganism, a plant cell, a plant or a part thereof, as compared to a corresponding non-transformed wild type non-human organism or a part thereof; and
[45394] (b) growing the non-human organism or a part thereof under conditions which permit the production of alpha-tocopherol or a composition comprising alpha-tocopherol in said non-human organism or in the culture medium surrounding said non-human organism.

[45395] A further embodiment of the present invention relates to a process for the production of gamma-tocopherol, which comprises
[45396] (a) increasing or generating the activity of a major facilitator superfamily transporter protein non-targeted in a non-human organism or a part thereof, preferably a microorganism, a plant cell, a plant or a part thereof, as compared to a corresponding non-transformed wild type non-human organism or a part thereof; and
[45397] (b) growing the non-human organism or a part thereof under conditions which permit the production of gamma-tocopherol or a composition comprising gamma-tocopherol in said non-human organism or in the culture medium surrounding said non-human organism.

[45398] A further embodiment of the present invention relates to a process for the production of alpha-tocopherol, which comprises
[45399] (a) increasing or generating the activity of a b1163-protein non-targeted in a non-human organism or a part thereof, preferably a microorganism, a plant cell, a plant or a part thereof, as compared to a corresponding non-transformed wild type non-human organism or a part thereof; and
[45400] (b) growing the non-human organism or a part thereof under conditions which permit the production of alpha-tocopherol or a composition comprising alpha-tocopherol in said non-human organism or in the culture medium surrounding said non-human organism.

[45401] A further embodiment of the present invention relates to a process for the production of gamma-tocopherol, which comprises
[45402] (a) increasing or generating the activity of a DNA polymerase subunit non-targeted in a non-human organism or a part thereof, preferably a microorganism, a plant cell, a plant or a part thereof, as compared to a corresponding non-transformed wild type non-human organism or a part thereof; and
[45403] (b) growing the non-human organism or a part thereof under conditions which permit the production of gamma-tocopherol or a composition comprising gamma-tocopherol in said non-human organism or in the culture medium surrounding said non-human organism.

[45404] A further embodiment of the present invention relates to a process for the production of alpha-tocopherol, which comprises
[45405] (a) increasing or generating the activity of a b1219-protein non-targeted in a non-human organism or a part thereof, preferably a microorganism, a plant cell, a plant or a part thereof, as compared to a corresponding non-transformed wild type non-human organism or a part thereof; and
[45406] (b) growing the non-human organism or a part thereof under conditions which permit the production of alpha-tocopherol or a composition comprising alpha-tocopherol in said non-human organism or in the culture medium surrounding said non-human organism.

[45407] A further embodiment of the present invention relates to a process for the production of gamma-tocopherol, which comprises
[45408] (a) increasing or generating the activity of a b1234-protein non-targeted in a non-human organism or a part thereof, preferably a microorganism, a plant cell, a plant or a part thereof, as compared to a corresponding non-transformed wild type non-human organism or a part thereof; and
[45409] (b) growing the non-human organism or a part thereof under conditions which permit the production of gamma-tocopherol or a composition comprising gamma-tocopherol in said non-human organism or in the culture medium surrounding said non-human organism.

[45410] A further embodiment of the present invention relates to a process for the production of gamma-tocopherol, which comprises
[45411] (a) increasing or generating the activity of a NADP-dependent malic enzyme non-targeted in a non-human organism or a part thereof, preferably a microorganism, a plant cell, a plant or a part thereof, as compared to a corresponding non-transformed wild type non-human organism or a part thereof; and
[45412] (b) growing the non-human organism or a part thereof under conditions which permit the production of gamma-tocopherol or a composition comprising gamma-tocopherol in said non-human organism or in the culture medium surrounding said non-human organism.

[45413] A further embodiment of the present invention relates to a process for the production of gamma-tocopherol, which comprises
[45414] (a) increasing or generating the activity of a b1522-protein non-targeted in a non-human organism or a part thereof, preferably a microorganism, a plant cell, a plant or a part thereof, as compared to a corresponding non-transformed wild type non-human organism or a part thereof; and
[45415] (b) growing the non-human organism or a part thereof under conditions which permit the production of gamma-tocopherol or a composition comprising gamma-tocopherol in said non-human organism or in the culture medium surrounding said non-human organism.

[45416] A further embodiment of the present invention relates to a process for the production of alpha-tocopherol, which comprises
[45417] (a) increasing or generating the activity of a acid shock protein non-targeted in a non-human organism or a part thereof, preferably a microorganism, a plant cell, a plant or a part thereof, as compared to a corresponding non-transformed wild type non-human organism or a part thereof; and
[45418] (b) growing the non-human organism or a part thereof under conditions which permit the production of alpha-tocopherol or a composition comprising alpha-tocopherol in said non-human organism or in the culture medium surrounding said non-human organism.

[45419] A further embodiment of the present invention relates to a process for the production of alpha-tocopherol, which comprises
[45420] (a) increasing or generating the activity of a transport protein non-targeted in a non-human organism or a part thereof, preferably a microorganism, a plant cell, a plant or a part thereof, as compared to a corresponding non-transformed wild type non-human organism or a part thereof; and
[45421] (b) growing the non-human organism or a part thereof under conditions which permit the production of alpha-tocopherol or a composition comprising alpha-tocopherol in said non-human organism or in the culture medium surrounding said non-human organism.

[45422] A further embodiment of the present invention relates to a process for the production of gamma-tocopherol, which comprises
[45423] (a) increasing or generating the activity of a trehalose-phosphatase non-targeted in a non-human organism or a part thereof, preferably a microorganism, a plant cell, a plant or a part thereof, as compared to a corresponding non-transformed wild type non-human organism or a part thereof; and
[45424] (b) growing the non-human organism or a part thereof under conditions which permit the production of gamma-tocopherol or a composition comprising gamma-tocopherol in said non-human organism or in the culture medium surrounding said non-human organism.

[45425] A further embodiment of the present invention relates to a process for the production of gamma-tocopherol, which comprises
[45426] (a) increasing or generating the activity of a b1921-protein non-targeted in a non-human organism or a part thereof, preferably a microorganism, a plant cell, a plant or a part thereof, as compared to a corresponding non-transformed wild type non-human organism or a part thereof; and
[45427] (b) growing the non-human organism or a part thereof under conditions which permit the production of gamma-tocopherol or a composition comprising gamma-tocopherol in said non-human organism or in the culture medium surrounding said non-human organism.

[45428] A further embodiment of the present invention relates to a process for the production of gamma-tocopherol, which comprises
[45429] (a) increasing or generating the activity of a O-antigen chain length determinant non-targeted in a non-human organism or a part thereof, preferably a microorganism, a plant cell, a plant or a part thereof, as compared to a corresponding non-transformed wild type non-human organism or a part thereof; and
[45430] (b) growing the non-human organism or a part thereof under conditions which permit the production of gamma-tocopherol or a composition comprising gamma-tocopherol in said non-human organism or in the culture medium surrounding said non-human organism.

[45431] A further embodiment of the present invention relates to a process for the production of alpha-tocopherol, which comprises
[45432] (a) increasing or generating the activity of a colanic acid biosynthesis protein non-targeted in a non-human organism or a part thereof, preferably a microorganism, a plant cell, a plant or a part thereof, as compared to a corresponding non-transformed wild type non-human organism or a part thereof; and
[45433] (b) growing the non-human organism or a part thereof under conditions which permit the production of alpha-tocopherol or a composition comprising alpha-tocopherol in said non-human organism or in the culture medium surrounding said non-human organism.

[45434] A further embodiment of the present invention relates to a process for the production of gamma-tocopherol, which comprises
[45435] (a) increasing or generating the activity of a b2360-protein non-targeted in a non-human organism or a part thereof, preferably a microorganism, a plant cell, a plant or a part thereof, as compared to a corresponding non-transformed wild type non-human organism or a part thereof; and
[45436] (b) growing the non-human organism or a part thereof under conditions which permit the production of gamma-tocopherol or a composition comprising gamma-tocopherol in said non-human organism or in the culture medium surrounding said non-human organism.

[45437] A further embodiment of the present invention relates to a process for the production of alpha-tocopherol, which comprises
[45438] (a) increasing or generating the activity of a putative transport system permease protein non-targeted in a non-human organism or a part thereof, preferably a microorganism, a plant cell, a plant or a part thereof, as compared to a corresponding non-transformed wild type non-human organism or a part thereof; and
[45439] (b) growing the non-human organism or a part thereof under conditions which permit the production of alpha-tocopherol or a composition comprising alpha-tocopherol in said non-human organism or in the culture medium surrounding said non-human organism.

[45440] A further embodiment of the present invention relates to a process for the production of gamma-tocopherol, which comprises
[45441] (a) increasing or generating the activity of a b2548-protein non-targeted in a non-human organism or a part thereof, preferably a microorganism, a plant cell, a plant or a part thereof, as compared to a corresponding non-transformed wild type non-human organism or a part thereof; and
[45442] (b) growing the non-human organism or a part thereof under conditions which permit the production of gamma-tocopherol or a composition comprising gamma-tocopherol in said non-human organism or in the culture medium surrounding said non-human organism.

[45443] A further embodiment of the present invention relates to a process for the production of gamma-tocopherol, which comprises
[45444] (a) increasing or generating the activity of a b2613-protein non-targeted in a non-human organism or a part thereof, preferably a microorganism, a plant cell, a plant or a part thereof, as compared to a corresponding non-transformed wild type non-human organism or a part thereof; and
[45445] (b) growing the non-human organism or a part thereof under conditions which permit the production of gamma-tocopherol or a composition comprising gamma-tocopherol in said non-human organism or in the culture medium surrounding said non-human organism.

[45446] A further embodiment of the present invention relates to a process for the production of gamma-tocopherol, which comprises
[45447] (a) increasing or generating the activity of a b2673-protein non-targeted in a non-human organism or a part thereof, preferably a microorganism, a plant cell, a plant or a part thereof, as compared to a corresponding non-transformed wild type non-human organism or a part thereof; and
[45448] (b) growing the non-human organism or a part thereof under conditions which permit the production of gamma-tocopherol or a composition comprising gamma-tocopherol in said non-human organism or in the culture medium surrounding said non-human organism.

[45449] A further embodiment of the present invention relates to a process for the production of gamma-tocopherol, which comprises
[45450] (a) increasing or generating the activity of a murein transglycosylase non-targeted in a non-human organism or a part thereof, preferably a microorganism, a plant cell, a plant or a part thereof, as compared to a corresponding non-transformed wild type non-human organism or a part thereof; and
[45451] (b) growing the non-human organism or a part thereof under conditions which permit the production of gamma-tocopherol or a composition comprising gamma-tocopherol in said non-human organism or in the culture medium surrounding said non-human organism.

[45452] A further embodiment of the present invention relates to a process for the production of gamma-tocopherol, which comprises
[45453] (a) increasing or generating the activity of a b2812-protein non-targeted in a non-human organism or a part thereof, preferably a microorganism, a plant cell, a plant or a part thereof, as compared to a corresponding non-transformed wild type non-human organism or a part thereof; and
[45454] (b) growing the non-human organism or a part thereof under conditions which permit the production of gamma-tocopherol or a composition comprising gamma-tocopherol in said non-human organism or in the culture medium surrounding said non-human organism.

[45455] A further embodiment of the present invention relates to a process for the production of alpha-tocopherol, which comprises
[45456] (a) increasing or generating the activity of a amino-acid acetyltransferase non-targeted in a non-human organism or a part thereof, preferably a microorganism, a plant cell, a plant or a part thereof, as compared to a corresponding non-transformed wild type non-human organism or a part thereof; and
[45457] (b) growing the non-human organism or a part thereof under conditions which permit the production of alpha-tocopherol or a composition comprising alpha-tocopherol in said non-human organism or in the culture medium surrounding said non-human organism.

[45458] A further embodiment of the present invention relates to a process for the production of gamma-tocopherol, which comprises
[45459] (a) increasing or generating the activity of a amino-acid acetyltransferase non-targeted in a non-human organism or a part thereof, preferably a microorganism, a plant cell, a plant or a part thereof, as compared to a corresponding non-transformed wild type non-human organism or a part thereof; and
[45460] (b) growing the non-human organism or a part thereof under conditions which permit the production of gamma-tocopherol or a composition comprising gamma-tocopherol in said non-human organism or in the culture medium surrounding said non-human organism.

[45461] A further embodiment of the present invention relates to a process for the production of alpha-tocopherol, which comprises
[45462] (a) increasing or generating the activity of a glycolate utilization protein non-targeted in a non-human organism or a part thereof, preferably a microorganism, a plant cell, a plant or a part thereof, as compared to a corresponding non-transformed wild type non-human organism or a part thereof; and
[45463] (b) growing the non-human organism or a part thereof under conditions which permit the production of alpha-tocopherol or a composition comprising alpha-tocopherol in said non-human organism or in the culture medium surrounding said non-human organism.

[45464] A further embodiment of the present invention relates to a process for the production of alpha-tocopherol, which comprises
[45465] (a) increasing or generating the activity of a ABC transporter permease subunit non-targeted in a non-human organism or a part thereof, preferably a microorganism, a plant cell, a plant or a part thereof, as compared to a corresponding non-transformed wild type non-human organism or a part thereof; and
[45466] (b) growing the non-human organism or a part thereof under conditions which permit the production of alpha-tocopherol or a composition comprising alpha-tocopherol in said non-human organism or in the culture medium surrounding said non-human organism.

[45467] A further embodiment of the present invention relates to a process for the production of gamma-tocopherol, which comprises
[45468] (a) increasing or generating the activity of a lipopolysaccharide biosynthesis protein non-targeted in a non-human organism or a part thereof, preferably a microorganism, a plant cell, a plant or a part thereof, as compared to a corresponding non-transformed wild type non-human organism or a part thereof; and
[45469] (b) growing the non-human organism or a part thereof under conditions which permit the production of gamma-tocopherol or a composition comprising gamma-tocopherol in said non-human organism or in the culture medium surrounding said non-human organism.

[45470] A further embodiment of the present invention relates to a process for the production of alpha-tocopherol, which comprises
[45471] (a) increasing or generating the activity of a b3890-protein non-targeted in a non-human organism or a part thereof, preferably a microorganism, a plant cell, a plant or a part thereof, as compared to a corresponding non-transformed wild type non-human organism or a part thereof; and
[45472] (b) growing the non-human organism or a part thereof under conditions which permit the production of alpha-tocopherol or a composition comprising alpha-tocopherol in said non-human organism or in the culture medium surrounding said non-human organism.

[45473] A further embodiment of the present invention relates to a process for the production of alpha-tocopherol, which comprises
[45474] (a) increasing or generating the activity of a glycerol dehydrogenase non-targeted in a non-human organism or a part thereof, preferably a microorganism, a plant cell, a plant or a part thereof, as compared to a corresponding non-transformed wild type non-human organism or a part thereof; and
[45475] (b) growing the non-human organism or a part thereof under conditions which permit the production of alpha-tocopherol or a composition comprising alpha-tocopherol in said non-human organism or in the culture medium surrounding said non-human organism.

[45476] A further embodiment of the present invention relates to a process for the production of alpha-tocopherol, which comprises
[45477] (a) increasing or generating the activity of a b3989-protein non-targeted in a non-human organism or a part thereof, preferably a microorganism, a plant cell, a plant or a part thereof, as compared to a corresponding non-transformed wild type non-human organism or a part thereof; and
[45478] (b) growing the non-human organism or a part thereof under conditions which permit the production of alpha-tocopherol or a composition comprising alpha-tocopherol in said non-human organism or in the culture medium surrounding said non-human organism.

[45479] A further embodiment of the present invention relates to a process for the production of gamma-tocopherol, which comprises
[45480] (a) increasing or generating the activity of a b3989-protein non-targeted in a non-human organism or a part thereof, preferably a microorganism, a plant cell, a plant or a part thereof, as compared to a corresponding non-transformed wild type non-human organism or a part thereof; and
[45481] (b) growing the non-human organism or a part thereof under conditions which permit the production of gamma-tocopherol or a composition comprising gamma-tocopherol in said non-human organism or in the culture medium surrounding said non-human organism.

[45482] A further embodiment of the present invention relates to a process for the production of gamma-tocopherol, which comprises
[45483] (a) increasing or generating the activity of a b4029-protein non-targeted in a non-human organism or a part thereof, preferably a microorganism, a plant cell, a plant or a part thereof, as compared to a corresponding non-transformed wild type non-human organism or a part thereof; and
[45484] (b) growing the non-human organism or a part thereof under conditions which permit the production of gamma-tocopherol or a composition comprising gamma-tocopherol in said non-human organism or in the culture medium surrounding said non-human organism.

[45485] A further embodiment of the present invention relates to a process for the production of alpha-tocopherol, which comprises
[45486] (a) increasing or generating the activity of a b4050-protein non-targeted in a non-human organism or a part thereof, preferably a microorganism, a plant cell, a plant or a part thereof, as compared to a corresponding non-transformed wild type non-human organism or a part thereof; and
[45487] (b) growing the non-human organism or a part thereof under conditions which permit the production of alpha-tocopherol or a composition comprising alpha-tocopherol in said non-human organism or in the culture medium surrounding said non-human organism.

[45488] A further embodiment of the present invention relates to a process for the production of alpha-tocopherol, which comprises
[45489] (a) increasing or generating the activity of a b4056-protein non-targeted in a non-human organism or a part thereof, preferably a microorganism, a plant cell, a plant or a part thereof, as compared to a corresponding non-transformed wild type non-human organism or a part thereof; and
[45490] (b) growing the non-human organism or a part thereof under conditions which permit the production of alpha-tocopherol or a composition comprising alpha-tocopherol in said non-human organism or in the culture medium surrounding said non-human organism.

[45491] A further embodiment of the present invention relates to a process for the production of alpha-tocopherol, which comprises
[45492] (a) increasing or generating the activity of a acetyltransferase non-targeted in a non-human organism or a part thereof, preferably a microorganism, a plant cell, a plant or a part thereof, as compared to a corresponding non-transformed wild type non-human organism or a part thereof; and
[45493] (b) growing the non-human organism or a part thereof under conditions which permit the production of alpha-tocopherol or a composition comprising alpha-tocopherol in said non-human organism or in the culture medium surrounding said non-human organism.

[45494] A further embodiment of the present invention relates to a process for the production of gamma-tocopherol, which comprises
[45495] (a) increasing or generating the activity of a acetyltransferase non-targeted in a non-human organism or a part thereof, preferably a microorganism, a plant cell, a plant or a part thereof, as compared to a corresponding non-transformed wild type non-human organism or a part thereof; and
[45496] (b) growing the non-human organism or a part thereof under conditions which permit the production of gamma-tocopherol or a composition comprising gamma-tocopherol in said non-human organism or in the culture medium surrounding said non-human organism.

[45497] A further embodiment of the present invention relates to a process for the production of alpha-tocopherol, which comprises
[45498] (a) increasing or generating the activity of a gluconate transport system permease 3 non-targeted in a non-human organism or a part thereof, preferably a microorganism, a plant cell, a plant or a part thereof, as compared to a corresponding non-transformed wild type non-human organism or a part thereof; and
[45499] (b) growing the non-human organism or a part thereof under conditions which permit the production of alpha-tocopherol or a composition comprising alpha-tocopherol in said non-human organism or in the culture medium surrounding said non-human organism.

[45500] A further embodiment of the present invention relates to a process for the production of gamma-tocopherol, which comprises
[45501] (a) increasing or generating the activity of a gluconate transport system permease 3 non-targeted in a non-human organism or a part thereof, preferably a microorganism, a plant cell, a plant or a part thereof, as compared to a corresponding non-transformed wild type non-human organism or a part thereof; and
[45502] (b) growing the non-human organism or a part thereof under conditions which permit the production of gamma-tocopherol or a composition comprising gamma-tocopherol in said non-human organism or in the culture medium surrounding said non-human organism.

[45503] A further embodiment of the present invention relates to a process for the production of gamma-tocopherol, which comprises
[45504] (a) increasing or generating the activity of a thioredoxin non-targeted in a non-human organism or a part thereof, preferably a microorganism, a plant cell, a plant or a part thereof, as compared to a corresponding non-transformed wild type non-human organism or a part thereof; and
[45505] (b) growing the non-human organism or a part thereof under conditions which permit the production of gamma-tocopherol or a composition comprising gamma-tocopherol in said non-human organism or in the culture medium surrounding said non-human organism.

[45506] A further embodiment of the present invention relates to a process for the production of alpha-tocopherol, which comprises
[45507] (a) increasing or generating the activity of a glutaredoxin non-targeted in a non-human organism or a part thereof, preferably a microorganism, a plant cell, a plant or a part thereof, as compared to a corresponding non-transformed wild type non-human organism or a part thereof; and
[45508] (b) growing the non-human organism or a part thereof under conditions which permit the production of alpha-tocopherol or a composition comprising alpha-tocopherol in said non-human organism or in the culture medium surrounding said non-human organism.

[45509] A further embodiment of the present invention relates to a process for the production of gamma-tocopherol, which comprises
[45510] (a) increasing or generating the activity of a glutaredoxin non-targeted in a non-human organism or a part thereof, preferably a microorganism, a plant cell, a plant or a part thereof, as compared to a corresponding non-transformed wild type non-human organism or a part thereof; and
[45511] (b) growing the non-human organism or a part thereof under conditions which permit the production of gamma-tocopherol or a composition comprising gamma-tocopherol in said non-human organism or in the culture medium surrounding said non-human organism.

[45512] A further embodiment of the present invention relates to a process for the production of gamma-tocopherol, which comprises
[45513] (a) increasing or generating the activity of a transcription factor non-targeted in a non-human organism or a part thereof, preferably a microorganism, a plant cell, a plant or a part thereof, as compared to a corresponding non-transformed wild type non-human organism or a part thereof; and
[45514] (b) growing the non-human organism or a part thereof under conditions which permit the production of gamma-tocopherol or a composition comprising gamma-tocopherol in said non-human organism or in the culture medium surrounding said non-human organism.

[45515] A further embodiment of the present invention relates to a process for the production of alpha-tocopherol, which comprises
[45516] (a) increasing or generating the activity of a polyphosphate kinase non-targeted in a non-human organism or a part thereof, preferably a microorganism, a plant cell, a plant or a part thereof, as compared to a corresponding non-transformed wild type non-human organism or a part thereof; and
[45517] (b) growing the non-human organism or a part thereof under conditions which permit the production of alpha-tocopherol or a composition comprising alpha-tocopherol in said non-human organism or in the culture medium surrounding said non-human organism.

[45518] A further embodiment of the present invention relates to a process for the production of gamma-tocopherol, which comprises
[45519] (a) increasing or generating the activity of a phosphofructokinase non-targeted in a non-human organism or a part thereof, preferably a microorganism, a plant cell, a plant or a part thereof, as compared to a corresponding non-transformed wild type non-human organism or a part thereof; and
[45520] (b) growing the non-human organism or a part thereof under conditions which permit the production of gamma-tocopherol or a composition comprising gamma-tocopherol in said non-human organism or in the culture medium surrounding said non-human organism.

[45521] A further embodiment of the present invention relates to a process for the production of gamma-tocopherol, which comprises
[45522] (a) increasing or generating the activity of a coproporphyrinogen oxidase non-targeted in a non-human organism or a part thereof, preferably a microorganism, a plant cell, a plant or a part thereof, as compared to a corresponding non-transformed wild type non-human organism or a part thereof; and
[45523] (b) growing the non-human organism or a part thereof under conditions which permit the production of gamma-tocopherol or a composition comprising gamma-tocopherol in said non-human organism or in the culture medium surrounding said non-human organism.

[45524] A further embodiment of the present invention relates to a process for the production of gamma-tocopherol, which comprises
[45525] (a) increasing or generating the activity of a sll1761-protein non-targeted in a non-human organism or a part thereof, preferably a microorganism, a plant cell, a plant or a part thereof, as compared to a corresponding non-transformed wild type non-human organism or a part thereof; and
[45526] (b) growing the non-human organism or a part thereof under conditions which permit the production of gamma-tocopherol or a composition comprising gamma-tocopherol in said non-human organism or in the culture medium surrounding said non-human organism.

[45527] A further embodiment of the present invention relates to a process for the production of gamma-tocopherol, which comprises
[45528] (a) increasing or generating the activity of a adenylate kinase non-targeted in a non-human organism or a part thereof, preferably a microorganism, a plant cell, a plant or a part thereof, as compared to a corresponding non-transformed wild type non-human organism or a part thereof; and
[45529] (b) growing the non-human organism or a part thereof under conditions which permit the production of gamma-tocopherol or a composition comprising gamma-tocopherol in said non-human organism or in the culture medium surrounding said non-human organism.

[45530] A further embodiment of the present invention relates to a process for the production of alpha-tocopherol, which comprises
[45531] (a) increasing or generating the activity of a precorrin methylase non-targeted in a non-human organism or a part thereof, preferably a microorganism, a plant cell, a plant or a part thereof, as compared to a corresponding non-transformed wild type non-human organism or a part thereof; and
[45532] (b) growing the non-human organism or a part thereof under conditions which permit the production of alpha-tocopherol or a composition comprising alpha-tocopherol in said non-human organism or in the culture medium surrounding said non-human organism.

[45533] A further embodiment of the present invention relates to a process for the production of alpha-tocopherol, which comprises
[45534] (a) increasing or generating the activity of a malate dehydrogenase non-targeted in a non-human organism or a part thereof, preferably a microorganism, a plant cell, a plant or a part thereof, as compared to a corresponding non-transformed wild type non-human organism or a part thereof; and
[45535] (b) growing the non-human organism or a part thereof under conditions which permit the production of alpha-tocopherol or a composition comprising alpha-tocopherol in said non-human organism or in the culture medium surrounding said non-human organism.

[45536] A further embodiment of the present invention relates to a process for the production of gamma-tocopherol, which comprises
[45537] (a) increasing or generating the activity of a malate dehydrogenase non-targeted in a non-human organism or a part thereof, preferably a microorganism, a plant cell, a plant or a part thereof, as compared to a corresponding non-transformed wild type non-human organism or a part thereof; and
[45538] (b) growing the non-human organism or a part thereof under conditions which permit the production of gamma-tocopherol or a composition comprising gamma-tocopherol in said non-human organism or in the culture medium surrounding said non-human organism.

[45539] A further embodiment of the present invention relates to a process for the production of alpha-tocopherol, which comprises
[45540] (a) increasing or generating the activity of a geranylgeranyl pyrophosphate synthase non-targeted in a non-human organism or a part thereof, preferably a microorganism, a plant cell, a plant or a part thereof, as compared to a corresponding non-transformed wild type non-human organism or a part thereof; and
[45541] (b) growing the non-human organism or a part thereof under conditions which permit the production of alpha-tocopherol or a composition comprising alpha-tocopherol in said non-human organism or in the culture medium surrounding said non-human organism.

[45542] A further embodiment of the present invention relates to a process for the production of gamma-tocopherol, which comprises
[45543] (a) increasing or generating the activity of a geranylgeranyl pyrophosphate synthase non-targeted in a non-human organism or a part thereof, preferably a microorganism, a plant cell, a plant or a part thereof, as compared to a corresponding non-transformed wild type non-human organism or a part thereof; and
[45544] (b) growing the non-human organism or a part thereof under conditions which permit the production of gamma-tocopherol or a composition comprising gamma-tocopherol in said non-human organism or in the culture medium surrounding said non-human organism.

[45545] A further embodiment of the present invention relates to a process for the production of gamma-tocopherol, which comprises
[45546] (a) increasing or generating the activity of a carbohydrate kinase non-targeted in a non-human organism or a part thereof, preferably a microorganism, a plant cell, a plant or a part thereof, as compared to a corresponding non-transformed wild type non-human organism or a part thereof; and
[45547] (b) growing the non-human organism or a part thereof under conditions which permit the production of gamma-tocopherol or a composition comprising gamma-tocopherol in said non-human organism or in the culture medium surrounding said non-human organism.

[45548] A further embodiment of the present invention relates to a process for the production of gamma-tocopherol, which comprises
[45549] (a) increasing or generating the activity of a photosystem II protein non-targeted in a non-human organism or a part thereof, preferably a microorganism, a plant cell, a plant or a part thereof, as compared to a corresponding non-transformed wild type non-human organism or a part thereof; and
[45550] (b) growing the non-human organism or a part thereof under conditions which permit the production of gamma-tocopherol or a composition comprising gamma-tocopherol in said non-human organism or in the culture medium surrounding said non-human organism.

[45551] A further embodiment of the present invention relates to a process for the production of alpha-tocopherol, which comprises
[45552] (a) increasing or generating the activity of a glycerol-3-phosphate dehydrogenase non-targeted in a non-human organism or a part thereof, preferably a microorganism, a plant cell, a plant or a part thereof, as compared to a corresponding non-transformed wild type non-human organism or a part thereof; and
[45553] (b) growing the non-human organism or a part thereof under conditions which permit the production of alpha-tocopherol or a composition comprising alpha-tocopherol in said non-human organism or in the culture medium surrounding said non-human organism.

[45554] A further embodiment of the present invention relates to a process for the production of gamma-tocopherol, which comprises
[45555] (a) increasing or generating the activity of a phosphoadenosine phosphosulfate reductase non-targeted in a non-human organism or a part thereof, preferably a microorganism, a plant cell, a plant or a part thereof, as compared to a corresponding non-transformed wild type non-human organism or a part thereof; and
[45556] (b) growing the non-human organism or a part thereof under conditions which permit the production of gamma-tocopherol or a composition comprising gamma-tocopherol in said non-human organism or in the culture medium surrounding said non-human organism.

[45557] A further embodiment of the present invention relates to a process for the production of alpha-tocopherol, which comprises
[45558] (a) increasing or generating the activity of a slr1917-protein non-targeted in a non-human organism or a part thereof, preferably a microorganism, a plant cell, a plant or a part thereof, as compared to a corresponding non-transformed wild type non-human organism or a part thereof; and
[45559] (b) growing the non-human organism or a part thereof under conditions which permit the production of alpha-tocopherol or a composition comprising alpha-tocopherol in said non-human organism or in the culture medium surrounding said non-human organism.

[45560] A further embodiment of the present invention relates to a process for the production of gamma-tocopherol, which comprises
[45561] (a) increasing or generating the activity of a slr1917-protein non-targeted in a non-human organism or a part thereof, preferably a microorganism, a plant cell, a plant or a part thereof, as compared to a corresponding non-transformed wild type non-human organism or a part thereof; and
[45562] (b) growing the non-human organism or a part thereof under conditions which permit the production of gamma-tocopherol or a composition comprising gamma-tocopherol in said non-human organism or in the culture medium surrounding said non-human organism.

[45563] A further embodiment of the present invention relates to a process for the production of alpha-tocopherol, which comprises
[45564] (a) increasing or generating the activity of a Sec-independent protein translocase subunit non-targeted in a non-human organism or a part thereof, preferably a microorganism, a plant cell, a plant or a part thereof, as compared to a corresponding non-transformed wild type non-human organism or a part thereof; and
[45565] (b) growing the non-human organism or a part thereof under conditions which permit the production of alpha-tocopherol or a composition comprising alpha-tocopherol in said non-human organism or in the culture medium surrounding said non-human organism.

[45566] A further embodiment of the present invention relates to a process for the production of gamma-tocopherol, which comprises
[45567] (a) increasing or generating the activity of a Sec-independent protein translocase subunit non-targeted in a non-human organism or a part thereof, preferably a microorganism, a plant cell, a plant or a part thereof, as compared to a corresponding non-transformed wild type non-human organism or a part thereof; and
[45568] (b) growing the non-human organism or a part thereof under conditions which permit the production of gamma-tocopherol or a composition comprising gamma-tocopherol in said non-human organism or in the culture medium surrounding said non-human organism.

[45569] A further embodiment of the present invention relates to a process for the production of gamma-tocopherol, which comprises
[45570] (a) increasing or generating the activity of a multiple antibiotic resistance protein non-targeted in a non-human organism or a part thereof, preferably a microorganism, a plant cell, a plant or a part thereof, as compared to a corresponding non-transformed wild type non-human organism or a part thereof; and
[45571] (b) growing the non-human organism or a part thereof under conditions which permit the production of gamma-tocopherol or a composition comprising gamma-tocopherol in said non-human organism or in the culture medium surrounding said non-human organism.

[45572] A further embodiment of the present invention relates to a process for the production of alpha-tocopherol, which comprises
[45573] (a) increasing or generating the activity of a TTC1386-protein non-targeted in a non-human organism or a part thereof, preferably a microorganism, a plant cell, a plant or a part thereof, as compared to a corresponding non-transformed wild type non-human organism or a part thereof; and
[45574] (b) growing the non-human organism or a part thereof under conditions which permit the production of alpha-tocopherol or a composition comprising alpha-tocopherol in said non-human organism or in the culture medium surrounding said non-human organism.

[45575] A further embodiment of the present invention relates to a process for the production of gamma-tocopherol, which comprises
[45576] (a) increasing or generating the activity of a TTC1386-protein non-targeted in a non-human organism or a part thereof, preferably a microorganism, a plant cell, a plant or a part thereof, as compared to a corresponding non-transformed wild type non-human organism or a part thereof; and
[45577] (b) growing the non-human organism or a part thereof under conditions which permit the production of gamma-tocopherol or a composition comprising gamma-tocopherol in said non-human organism or in the culture medium surrounding said non-human organism.

[45578] A further embodiment of the present invention relates to a process for the production of alpha-tocopherol, which comprises
[45579] (a) increasing or generating the activity of a homocitrate synthase non-targeted in a non-human organism or a part thereof, preferably a microorganism, a plant cell, a plant or a part thereof, as compared to a corresponding non-transformed wild type non-human organism or a part thereof; and
[45580] (b) growing the non-human organism or a part thereof under conditions which permit the production of alpha-tocopherol or a composition comprising alpha-tocopherol in said non-human organism or in the culture medium surrounding said non-human organism.

[45581] A further embodiment of the present invention relates to a process for the production of alpha-tocopherol, which comprises
[45582] (a) increasing or generating the activity of a 3-deoxy-7-phosphoheptulonate synthase non-targeted in a non-human organism or a part thereof, preferably a microorganism, a plant cell, a plant or a part thereof, as compared to a corresponding non-transformed wild type non-human organism or a part thereof; and
[45583] (b) growing the non-human organism or a part thereof under conditions which permit the production of alpha-tocopherol or a composition comprising alpha-tocopherol in said non-human organism or in the culture medium surrounding said non-human organism.

[45584] A further embodiment of the present invention relates to a process for the production of gamma-tocopherol, which comprises
[45585] (a) increasing or generating the activity of a 3-deoxy-7-phosphoheptulonate synthase non-targeted in a non-human organism or a part thereof, preferably a microorganism, a plant cell, a plant or a part thereof, as compared to a corresponding non-transformed wild type non-human organism or a part thereof; and
[45586] (b) growing the non-human organism or a part thereof under conditions which permit the production of gamma-tocopherol or a composition comprising gamma-tocopherol in said non-human organism or in the culture medium surrounding said non-human organism.

[45587] A further embodiment of the present invention relates to a process for the production of gamma-tocopherol, which comprises
[45588] (a) increasing or generating the activity of a ycl049c-protein non-targeted in a non-human organism or a part thereof, preferably a microorganism, a plant cell, a plant or a part thereof, as compared to a corresponding non-transformed wild type non-human organism or a part thereof; and
[45589] (b) growing the non-human organism or a part thereof under conditions which permit the production of gamma-tocopherol or a composition comprising gamma-tocopherol in said non-human organism or in the culture medium surrounding said non-human organism.

[45590] A further embodiment of the present invention relates to a process for the production of alpha-tocopherol, which comprises
[45591] (a) increasing or generating the activity of a homocitrate synthase non-targeted in a non-human organism or a part thereof, preferably a microorganism, a plant cell, a plant or a part thereof, as compared to a corresponding non-transformed wild type non-human organism or a part thereof; and
[45592] (b) growing the non-human organism or a part thereof under conditions which permit the production of alpha-tocopherol or a composition comprising alpha-tocopherol in said non-human organism or in the culture medium surrounding said non-human organism.

[45593] A further embodiment of the present invention relates to a process for the production of alpha-tocopherol, which comprises
[45594] (a) increasing or generating the activity of a ydl235c-protein non-targeted in a non-human organism or a part thereof, preferably a microorganism, a plant cell, a plant or a part thereof, as compared to a corresponding non-transformed wild type non-human organism or a part thereof; and
[45595] (b) growing the non-human organism or a part thereof under conditions which permit the production of alpha-tocopherol or a composition comprising alpha-tocopherol in said non-human organism or in the culture medium surrounding said non-human organism.

[45596] A further embodiment of the present invention relates to a process for the production of gamma-tocopherol, which comprises
[45597] (a) increasing or generating the activity of a N-(5′-phosphoribosyl)anthranilate isomerase non-targeted in a non-human organism or a part thereof, preferably a microorganism, a plant cell, a plant or a part thereof, as compared to a corresponding non-transformed wild type non-human organism or a part thereof; and
[45598] (b) growing the non-human organism or a part thereof under conditions which permit the production of gamma-tocopherol or a composition comprising gamma-tocopherol in said non-human organism or in the culture medium surrounding said non-human organism.

[45599] A further embodiment of the present invention relates to a process for the production of gamma-tocopherol, which comprises
[45600] (a) increasing or generating the activity of a phospho-2-dehydro-3-deoxyheptonate aldolase non-targeted in a non-human organism or a part thereof, preferably a microorganism, a plant cell, a plant or a part thereof, as compared to a corresponding non-transformed wild type non-human organism or a part thereof; and
[45601] (b) growing the non-human organism or a part thereof under conditions which permit the production of gamma-tocopherol or a composition comprising gamma-tocopherol in said non-human organism or in the culture medium surrounding said non-human organism.

[45602] A further embodiment of the present invention relates to a process for the production of gamma-tocopherol, which comprises
[45603] (a) increasing or generating the activity of a ydr183w-protein non-targeted in a non-human organism or a part thereof, preferably a microorganism, a plant cell, a plant or a part thereof, as compared to a corresponding non-transformed wild type non-human organism or a part thereof; and
[45604] (b) growing the non-human organism or a part thereof under conditions which permit the production of gamma-tocopherol or a composition comprising gamma-tocopherol in said non-human organism or in the culture medium surrounding said non-human organism.

[45605] A further embodiment of the present invention relates to a process for the production of gamma-tocopherol, which comprises
[45606] (a) increasing or generating the activity of a yer106w-protein non-targeted in a non-human organism or a part thereof, preferably a microorganism, a plant cell, a plant or a part thereof, as compared to a corresponding non-transformed wild type non-human organism or a part thereof; and
[45607] (b) growing the non-human organism or a part thereof under conditions which permit the production of gamma-tocopherol or a composition comprising gamma-tocopherol in said non-human organism or in the culture medium surrounding said non-human organism.

[45608] A further embodiment of the present invention relates to a process for the production of gamma-tocopherol, which comprises
[45609] (a) increasing or generating the activity of a small nuclear ribonucleoprotein non-targeted in a non-human organism or a part thereof, preferably a microorganism, a plant cell, a plant or a part thereof, as compared to a corresponding non-transformed wild type non-human organism or a part thereof; and
[45610] (b) growing the non-human organism or a part thereof under conditions which permit the production of gamma-tocopherol or a composition comprising gamma-tocopherol in said non-human organism or in the culture medium surrounding said non-human organism.

[45611] A further embodiment of the present invention relates to a process for the production of alpha-tocopherol, which comprises
[45612] (a) increasing or generating the activity of a phosphatidylserine decarboxylase non-targeted in a non-human organism or a part thereof, preferably a microorganism, a plant cell, a plant or a part thereof, as compared to a corresponding non-transformed wild type non-human organism or a part thereof; and
[45613] (b) growing the non-human organism or a part thereof under conditions which permit the production of alpha-tocopherol or a composition comprising alpha-tocopherol in said non-human organism or in the culture medium surrounding said non-human organism.

[45614] A further embodiment of the present invention relates to a process for the production of gamma-tocopherol, which comprises
[45615] (a) increasing or generating the activity of a polygalacturonase non-targeted in a non-human organism or a part thereof, preferably a microorganism, a plant cell, a plant or a part thereof, as compared to a corresponding non-transformed wild type non-human organism or a part thereof; and
[45616] (b) growing the non-human organism or a part thereof under conditions which permit the production of gamma-tocopherol or a composition comprising gamma-tocopherol in said non-human organism or in the culture medium surrounding said non-human organism.

[45617] A further embodiment of the present invention relates to a process for the production of gamma-tocopherol, which comprises
[45618] (a) increasing or generating the activity of a ylr178c-protein non-targeted in a non-human organism or a part thereof, preferably a microorganism, a plant cell, a plant or a part thereof, as compared to a corresponding non-transformed wild type non-human organism or a part thereof; and
[45619] (b) growing the non-human organism or a part thereof under conditions which permit the production of gamma-tocopherol or a composition comprising gamma-tocopherol in said non-human organism or in the culture medium surrounding said non-human organism.

[45620] A further embodiment of the present invention relates to a process for the production of alpha-tocopherol, which comprises
[45621] (a) increasing or generating the activity of a adenylosuccinate lyase non-targeted in a non-human organism or a part thereof, preferably a microorganism, a plant cell, a plant or a part thereof, as compared to a corresponding non-transformed wild type non-human organism or a part thereof; and
[45622] (b) growing the non-human organism or a part thereof under conditions which permit the production of alpha-tocopherol or a composition comprising alpha-tocopherol in said non-human organism or in the culture medium surrounding said non-human organism.

[45623] A further embodiment of the present invention relates to a process for the production of alpha-tocopherol, which comprises
[45624] (a) increasing or generating the activity of a ypr170c-protein non-targeted in a non-human organism or a part thereof, preferably a microorganism, a plant cell, a plant or a part thereof, as compared to a corresponding non-transformed wild type non-human organism or a part thereof; and
[45625] (b) growing the non-human organism or a part thereof under conditions which permit the production of alpha-tocopherol or a composition comprising alpha-tocopherol in said non-human organism or in the culture medium surrounding said non-human organism.

[45626] A further embodiment of the present invention relates to a process for the production of alpha-tocopherol, which comprises
[45627] (a) increasing or generating the activity of a polypeptide comprising a polypeptide as depicted in the respective line in column 5 or 8 of Table II, application no. 7, or a homolog or a fragment thereof, a consensus sequence or at least one polypeptide motif as depicted in the respective line in column 8 of Table IV, application no. 7, whereby the respective line disclose in column 7 the fine chemical alpha-tocopherol; or
[45628] increasing or generating the activity of an expression product of one or more nucleic acid molecule(s) comprising a polynucleotide as depicted in the respective line in column 5 or 8 of Table I, application no. 7, preferably the coding region thereof, or a homolog or a fragment thereof, whereby the respective line disclose in column 7 the fine chemical alpha-tocopherol;
[45629] non-targeted in a non-human organism or a part thereof; preferably a microorganism, a plant cell, a plant or a part thereof, as compared to a corresponding non-transformed wild type non-human organism or a part thereof; and
[45630] (b) growing the non-human organism under conditions which permit the production of alpha-tocopherol, or a composition comprising alpha-tocopherol in said non-human organism or in the culture medium surrounding said non-human organism.

[45631] A further embodiment of the present invention relates to a process for the production of gamma-tocopherol, which comprises
[45632] (a) increasing or generating the activity of a polypeptide comprising a polypeptide as depicted in the respective line in column 5 or 8 of Table II, application no. 7, or a homolog or a fragment thereof, a consensus sequence or at least one polypeptide motif as depicted in the respective line in column 8 of Table IV, application no. 7, whereby the respective line disclose in column 7 the fine chemical gamma-tocopherol; or
[45633] increasing or generating the activity of an expression product of one or more nucleic acid molecule(s) comprising a polynucleotide as depicted in the respective line in column 5 or 8 of Table I, application no. 7, preferably the coding region thereof, or a homolog or a fragment thereof, whereby the respective line disclose in column 7 the fine chemical gamma-tocopherol;
[45634] non-targeted in a non-human organism or a part thereof; preferably a microorganism, a plant cell, a plant or a part thereof, as compared to a corresponding non-transformed wild type non-human organism or a part thereof; and
[45635] (b) growing the non-human organism under conditions which permit the production of gamma-tocopherol, or a composition comprising gamma-tocopherol in said non-human organism or in the culture medium surrounding said non-human organism.

[45636] A further embodiment of the present invention relates to a process for the production of alpha-tocopherol, which comprises
[45637] (a) increasing or generating one or more activities selected from the group consisting of pyruvate kinase in an organelle, preferably in plastids or mitochondria, especially in plastids, of a non-human organism or a part thereof, preferably a microorganism, a plant cell, a plant or a part thereof, as compared to a corresponding non-transformed wild type non-human organism or a part thereof; and
[45638] (b) growing the non-human organism or a part thereof under conditions which permit the production of alpha-tocopherol or a composition comprising alpha-tocopherol in said non-human organism or in the culture medium surrounding said non-human organism.

[45639] A further embodiment of the present invention relates to a process for the production of gamma-tocopherol, which comprises
[45640] (a) increasing or generating one or more activities selected from the group consisting of pyruvate kinase in an organelle, preferably in plastids or mitochondria, especially in plastids, of a non-human organism or a part thereof, preferably a microorganism, a plant cell, a plant or a part thereof, as compared to a corresponding non-transformed wild type non-human organism or a part thereof; and
[45641] (b) growing the non-human organism or a part thereof under conditions which permit the production of gamma-tocopherol or a composition comprising gamma-tocopherol in said non-human organism or in the culture medium surrounding said non-human organism.

[45642] A further embodiment of the present invention relates to a process for the production of alpha-tocopherol, which comprises
[45643] (a) increasing or generating one or more activities selected from the group consisting of glucose-6-phosphate 1-dehydrogenase in an organelle, preferably in plastids or mitochondria, especially in plastids, of a non-human organism or a part thereof, preferably a microorganism, a plant cell, a plant or a part thereof, as compared to a corresponding non-transformed wild type non-human organism or a part thereof; and
[45644] (b) growing the non-human organism or a part thereof under conditions which permit the production of alpha-tocopherol or a composition comprising alpha-tocopherol in said non-human organism or in the culture medium surrounding said non-human organism.

[45645] A further embodiment of the present invention relates to a process for the production of gamma-tocopherol, which comprises
[45646] (a) increasing or generating one or more activities selected from the group consisting of At1g29350-protein in an organelle, preferably in plastids or mitochondria, especially in plastids, of a non-human organism or a part thereof, preferably a microorganism, a plant cell, a plant or a part thereof, as compared to a corresponding non-transformed wild type non-human organism or a part thereof; and
[45647] (b) growing the non-human organism or a part thereof under conditions which permit the production of gamma-tocopherol or a composition comprising gamma-tocopherol in said non-human organism or in the culture medium surrounding said non-human organism.

[45648] A further embodiment of the present invention relates to a process for the production of gamma-tocopherol, which comprises
[45649] (a) increasing or generating one or more activities selected from the group consisting of transcriptional regulator in an organelle, preferably in plastids or mitochondria, especially in plastids, of a non-human organism or a part thereof, preferably a microorganism, a plant cell, a plant or a part thereof, as compared to a corresponding non-transformed wild type non-human organism or a part thereof; and
[45650] (b) growing the non-human organism or a part thereof under conditions which permit the production of gamma-tocopherol or a composition comprising gamma-tocopherol in said non-human organism or in the culture medium surrounding said non-human organism.

[45651] A further embodiment of the present invention relates to a process for the production of gamma-tocopherol, which comprises
[45652] (a) increasing or generating one or more activities selected from the group consisting of protein kinase in an organelle, preferably in plastids or mitochondria, especially in plastids, of a non-human organism or a part thereof, preferably a microorganism, a plant cell, a plant or a part thereof, as compared to a corresponding non-transformed wild type non-human organism or a part thereof; and
[45653] (b) growing the non-human organism or a part thereof under conditions which permit the production of gamma-tocopherol or a composition comprising gamma-tocopherol in said non-human organism or in the culture medium surrounding said non-human organism.

[45654] A further embodiment of the present invention relates to a process for the production of gamma-tocopherol, which comprises
[45655] (a) increasing or generating one or more activities selected from the group consisting of calcium-dependent protein kinase in an organelle, preferably in plastids or mitochondria, especially in plastids, of a non-human organism or a part thereof, preferably a microorganism, a plant cell, a plant or a part thereof, as compared to a corresponding non-transformed wild type non-human organism or a part thereof; and
[45656] (b) growing the non-human organism or a part thereof under conditions which permit the production of gamma-tocopherol or a composition comprising gamma-tocopherol in said non-human organism or in the culture medium surrounding said non-human organism.

[45657] A further embodiment of the present invention relates to a process for the production of alpha-tocopherol, which comprises
[45658] (a) increasing or generating one or more activities selected from the group consisting of protein phosphatase in an organelle, preferably in plastids or mitochondria, especially in plastids, of a non-human organism or a part thereof, preferably a microorganism, a plant cell, a plant or a part thereof, as compared to a corresponding non-transformed wild type non-human organism or a part thereof; and
[45659] (b) growing the non-human organism or a part thereof under conditions which permit the production of alpha-tocopherol or a composition comprising alpha-tocopherol in said non-human organism or in the culture medium surrounding said non-human organism.

[45660] A further embodiment of the present invention relates to a process for the production of alpha-tocopherol, which comprises
[45661] (a) increasing or generating one or more activities selected from the group consisting of MADS box protein transcription factor in an organelle, preferably in plastids or mitochondria, especially in plastids, of a non-human organism or a part thereof, preferably a microorganism, a plant cell, a plant or a part thereof, as compared to a corresponding non-transformed wild type non-human organism or a part thereof; and
[45662] (b) growing the non-human organism or a part thereof under conditions which permit the production of alpha-tocopherol or a composition comprising alpha-tocopherol in said non-human organism or in the culture medium surrounding said non-human organism.

[45663] A further embodiment of the present invention relates to a process for the production of gamma-tocopherol, which comprises
[45664] (a) increasing or generating one or more activities selected from the group consisting of glutaredoxin in an organelle, preferably in plastids or mitochondria, especially in plastids, of a non-human organism or a part thereof, preferably a microorganism, a plant cell, a plant or a part thereof, as compared to a corresponding non-transformed wild type non-human organism or a part thereof; and
[45665] (b) growing the non-human organism or a part thereof under conditions which permit the production of gamma-tocopherol or a composition comprising gamma-tocopherol in said non-human organism or in the culture medium surrounding said non-human organism.

[45666] A further embodiment of the present invention relates to a process for the production of gamma-tocopherol, which comprises
[45667] (a) increasing or generating one or more activities selected from the group consisting of pyruvate kinase in an organelle, preferably in plastids or mitochondria, especially in plastids, of a non-human organism or a part thereof, preferably a microorganism, a plant cell, a plant or a part thereof, as compared to a corresponding non-transformed wild type non-human organism or a part thereof; and
[45668] (b) growing the non-human organism or a part thereof under conditions which permit the production of gamma-tocopherol or a composition comprising gamma-tocopherol in said non-human organism or in the culture medium surrounding said non-human organism.

[45669] A further embodiment of the present invention relates to a process for the production of alpha-tocopherol, which comprises
[45670] (a) increasing or generating one or more activities selected from the group consisting of ankyrin repeat family protein in an organelle, preferably in plastids or mitochondria, especially in plastids, of a non-human organism or a part thereof, preferably a microorganism, a plant cell, a plant or a part thereof, as compared to a corresponding non-transformed wild type non-human organism or a part thereof; and
[45671] (b) growing the non-human organism or a part thereof under conditions which permit the production of alpha-tocopherol or a composition comprising alpha-tocopherol in said non-human organism or in the culture medium surrounding said non-human organism.

[45672] A further embodiment of the present invention relates to a process for the production of alpha-tocopherol, which comprises
[45673] (a) increasing or generating one or more activities selected from the group consisting of protein phosphatase in an organelle, preferably in plastids or mitochondria, especially in plastids, of a non-human organism or a part thereof, preferably a microorganism, a plant cell, a plant or a part thereof, as compared to a corresponding non-transformed wild type non-human organism or a part thereof; and
[45674] (b) growing the non-human organism or a part thereof under conditions which permit the production of alpha-tocopherol or a composition comprising alpha-tocopherol in said non-human organism or in the culture medium surrounding said non-human organism.

[45675] A further embodiment of the present invention relates to a process for the production of alpha-tocopherol, which comprises
[45676] (a) increasing or generating one or more activities selected from the group consisting of thioredoxin family protein in an organelle, preferably in plastids or mitochondria, especially in plastids, of a non-human organism or a part thereof, preferably a microorganism, a plant cell, a plant or a part thereof, as compared to a corresponding non-transformed wild type non-human organism or a part thereof; and
[45677] (b) growing the non-human organism or a part thereof under conditions which permit the production of alpha-tocopherol or a composition comprising alpha-tocopherol in said non-human organism or in the culture medium surrounding said non-human organism.

[45678] A further embodiment of the present invention relates to a process for the production of alpha-tocopherol, which comprises
[45679] (a) increasing or generating one or more activities selected from the group consisting of harpin-induced family protein in an organelle, preferably in plastids or mitochondria, especially in plastids, of a non-human organism or a part thereof, preferably a microorganism, a plant cell, a plant or a part thereof, as compared to a corresponding non-transformed wild type non-human organism or a part thereof; and
[45680] (b) growing the non-human organism or a part thereof under conditions which permit the production of alpha-tocopherol or a composition comprising alpha-tocopherol in said non-human organism or in the culture medium surrounding said non-human organism.

[45681] A further embodiment of the present invention relates to a process for the production of gamma-tocopherol, which comprises
[45682] (a) increasing or generating one or more activities selected from the group consisting of harpin-induced family protein in an organelle, preferably in plastids or mitochondria, especially in plastids, of a non-human organism or a part thereof, preferably a microorganism, a plant cell, a plant or a part thereof, as compared to a corresponding non-transformed wild type non-human organism or a part thereof; and
[45683] (b) growing the non-human organism or a part thereof under conditions which permit the production of gamma-tocopherol or a composition comprising gamma-tocopherol in said non-human organism or in the culture medium surrounding said non-human organism.

[45684] A further embodiment of the present invention relates to a process for the production of gamma-tocopherol, which comprises
[45685] (a) increasing or generating one or more activities selected from the group consisting of protein kinase in an organelle, preferably in plastids or mitochondria, especially in plastids, of a non-human organism or a part thereof, preferably a microorganism, a plant cell, a plant or a part thereof, as compared to a corresponding non-transformed wild type non-human organism or a part thereof; and
[45686] (b) growing the non-human organism or a part thereof under conditions which permit the production of gamma-tocopherol or a composition comprising gamma-tocopherol in said non-human organism or in the culture medium surrounding said non-human organism.

[45687] A further embodiment of the present invention relates to a process for the production of gamma-tocopherol, which comprises
[45688] (a) increasing or generating one or more activities selected from the group consisting of monthiol glutaredoxin in an organelle, preferably in plastids or mitochondria, especially in plastids, of a non-human organism or a part thereof, preferably a microorganism, a plant cell, a plant or a part thereof, as compared to a corresponding non-transformed wild type non-human organism or a part thereof; and
[45689] (b) growing the non-human organism or a part thereof under conditions which permit the production of gamma-tocopherol or a composition comprising gamma-tocopherol in said non-human organism or in the culture medium surrounding said non-human organism.

[45690] A further embodiment of the present invention relates to a process for the production of gamma-tocopherol, which comprises
[45691] (a) increasing or generating one or more activities selected from the group consisting of glutaredoxin in an organelle, preferably in plastids or mitochondria, especially in plastids, of a non-human organism or a part thereof, preferably a microorganism, a plant cell, a plant or a part thereof, as compared to a corresponding non-transformed wild type non-human organism or a part thereof; and
[45692] (b) growing the non-human organism or a part thereof under conditions which permit the production of gamma-tocopherol or a composition comprising gamma-tocopherol in said non-human organism or in the culture medium surrounding said non-human organism.

[45693] A further embodiment of the present invention relates to a process for the production of alpha-tocopherol, which comprises
[45694] (a) increasing or generating one or more activities selected from the group consisting of transcription factor in an organelle, preferably in plastids or mitochondria, especially in plastids, of a non-human organism or a part thereof, preferably a microorganism, a plant cell, a plant or a part thereof, as compared to a corresponding non-transformed wild type non-human organism or a part thereof; and
[45695] (b) growing the non-human organism or a part thereof under conditions which permit the production of alpha-tocopherol or a composition comprising alpha-tocopherol in said non-human organism or in the culture medium surrounding said non-human organism.

[45696] A further embodiment of the present invention relates to a process for the production of alpha-tocopherol, which comprises
[45697] (a) increasing or generating one or more activities selected from the group consisting of monothiol glutaredoxin in an organelle, preferably in plastids or mitochondria, especially in plastids, of a non-human organism or a part thereof, preferably a microorganism, a plant cell, a plant or a part thereof, as compared to a corresponding non-transformed wild type non-human organism or a part thereof; and
[45698] (b) growing the non-human organism or a part thereof under conditions which permit the production of alpha-tocopherol or a composition comprising alpha-tocopherol in said non-human organism or in the culture medium surrounding said non-human organism.

[45699] A further embodiment of the present invention relates to a process for the production of gamma-tocopherol, which comprises
[45700] (a) increasing or generating one or more activities selected from the group consisting of monothiol glutaredoxin in an organelle, preferably in plastids or mitochondria, especially in plastids, of a non-human organism or a part thereof, preferably a microorganism, a plant cell, a plant or a part thereof, as compared to a corresponding non-transformed wild type non-human organism or a part thereof; and
[45701] (b) growing the non-human organism or a part thereof under conditions which permit the production of gamma-tocopherol or a composition comprising gamma-tocopherol in said non-human organism or in the culture medium surrounding said non-human organism.

[45702] A further embodiment of the present invention relates to a process for the production of alpha-tocopherol, which comprises
[45703] (a) increasing or generating one or more activities selected from the group consisting of monothiol glutaredoxin in an organelle, preferably in plastids or mitochondria, especially in plastids, of a non-human organism or a part thereof, preferably a microorganism, a plant cell, a plant or a part thereof, as compared to a corresponding non-transformed wild type non-human organism or a part thereof; and
[45704] (b) growing the non-human organism or a part thereof under conditions which permit the production of alpha-tocopherol or a composition comprising alpha-tocopherol in said non-human organism or in the culture medium surrounding said non-human organism.

[45705] A further embodiment of the present invention relates to a process for the production of alpha-tocopherol, which comprises
[45706] (a) increasing or generating one or more activities selected from the group consisting of monothiol glutaredoxin in an organelle, preferably in plastids or mitochondria, especially in plastids, of a non-human organism or a part thereof, preferably a microorganism, a plant cell, a plant or a part thereof, as compared to a corresponding non-transformed wild type non-human organism or a part thereof; and
[45707] (b) growing the non-human organism or a part thereof under conditions which permit the production of alpha-tocopherol or a composition comprising alpha-tocopherol in said non-human organism or in the culture medium surrounding said non-human organism.

[45708] A further embodiment of the present invention relates to a process for the production of alpha-tocopherol, which comprises
[45709] (a) increasing or generating one or more activities selected from the group consisting of protein phosphatase in an organelle, preferably in plastids or mitochondria, especially in plastids, of a non-human organism or a part thereof, preferably a microorganism, a plant cell, a plant or a part thereof, as compared to a corresponding non-transformed wild type non-human organism or a part thereof; and
[45710] (b) growing the non-human organism or a part thereof under conditions which permit the production of alpha-tocopherol or a composition comprising alpha-tocopherol in said non-human organism or in the culture medium surrounding said non-human organism.

[45711] A further embodiment of the present invention relates to a process for the production of alpha-tocopherol, which comprises
[45712] (a) increasing or generating one or more activities selected from the group consisting of cyclin D in an organelle, preferably in plastids or mitochondria, especially in plastids, of a non-human organism or a part thereof, preferably a microorganism, a plant cell, a plant or a part thereof, as compared to a corresponding non-transformed wild type non-human organism or a part thereof; and
[45713] (b) growing the non-human organism or a part thereof under conditions which permit the production of alpha-tocopherol or a composition comprising alpha-tocopherol in said non-human organism or in the culture medium surrounding said non-human organism.

[45714] A further embodiment of the present invention relates to a process for the production of alpha-tocopherol, which comprises
[45715] (a) increasing or generating one or more activities selected from the group consisting of calcium-dependent protein kinase in an organelle, preferably in plastids or mitochondria, especially in plastids, of a non-human organism or a part thereof, preferably a microorganism, a plant cell, a plant or a part thereof, as compared to a corresponding non-transformed wild type non-human organism or a part thereof; and
[45716] (b) growing the non-human organism or a part thereof under conditions which permit the production of alpha-tocopherol or a composition comprising alpha-tocopherol in said non-human organism or in the culture medium surrounding said non-human organism.

[45717] A further embodiment of the present invention relates to a process for the production of gamma-tocopherol, which comprises
[45718] (a) increasing or generating one or more activities selected from the group consisting of calcium-dependent protein kinase in an organelle, preferably in plastids or mitochondria, especially in plastids, of a non-human organism or a part thereof, preferably a microorganism, a plant cell, a plant or a part thereof, as compared to a corresponding non-transformed wild type non-human organism or a part thereof; and
[45719] (b) growing the non-human organism or a part thereof under conditions which permit the production of gamma-tocopherol or a composition comprising gamma-tocopherol in said non-human organism or in the culture medium surrounding said non-human organism.

[45720] A further embodiment of the present invention relates to a process for the production of alpha-tocopherol, which comprises
[45721] (a) increasing or generating one or more activities selected from the group consisting of RNA-binding protein in an organelle, preferably in plastids or mitochondria, especially in plastids, of a non-human organism or a part thereof, preferably a microorganism, a plant cell, a plant or a part thereof, as compared to a corresponding non-transformed wild type non-human organism or a part thereof; and
[45722] (b) growing the non-human organism or a part thereof under conditions which permit the production of alpha-tocopherol or a composition comprising alpha-tocopherol in said non-human organism or in the culture medium surrounding said non-human organism.

[45723] A further embodiment of the present invention relates to a process for the production of gamma-tocopherol, which comprises
[45724] (a) increasing or generating one or more activities selected from the group consisting of RNA-binding protein in an organelle, preferably in plastids or mitochondria, especially in plastids, of a non-human organism or a part thereof, preferably a microorganism, a plant cell, a plant or a part thereof, as compared to a corresponding non-transformed wild type non-human organism or a part thereof; and
[45725] (b) growing the non-human organism or a part thereof under conditions which permit the production of gamma-tocopherol or a composition comprising gamma-tocopherol in said non-human organism or in the culture medium surrounding said non-human organism.

[45726] A further embodiment of the present invention relates to a process for the production of gamma-tocopherol, which comprises
[45727] (a) increasing or generating one or more activities selected from the group consisting of zinc finger protein in an organelle, preferably in plastids or mitochondria, especially in plastids, of a non-human organism or a part thereof, preferably a microorganism, a plant cell, a plant or a part thereof, as compared to a corresponding non-transformed wild type non-human organism or a part thereof; and
[45728] (b) growing the non-human organism or a part thereof under conditions which permit the production of gamma-tocopherol or a composition comprising gamma-tocopherol in said non-human organism or in the culture medium surrounding said non-human organism.

[45729] A further embodiment of the present invention relates to a process for the production of gamma-tocopherol, which comprises
[45730] (a) increasing or generating one or more activities selected from the group consisting of NAD-dependent epimerase/dehydratase in an organelle, preferably in plastids or mitochondria, especially in plastids, of a non-human organism or a part thereof, preferably a microorganism, a plant cell, a plant or a part thereof, as compared to a corresponding non-transformed wild type non-human organism or a part thereof; and
[45731] (b) growing the non-human organism or a part thereof under conditions which permit the production of gamma-tocopherol or a composition comprising gamma-tocopherol in said non-human organism or in the culture medium surrounding said non-human organism.

[45732] A further embodiment of the present invention relates to a process for the production of gamma-tocopherol, which comprises
[45733] (a) increasing or generating one or more activities selected from the group consisting of transcriptional regulator in an organelle, preferably in plastids or mitochondria, especially in plastids, of a non-human organism or a part thereof, preferably a microorganism, a plant cell, a plant or a part thereof, as compared to a corresponding non-transformed wild type non-human organism or a part thereof; and
[45734] (b) growing the non-human organism or a part thereof under conditions which permit the production of gamma-tocopherol or a composition comprising gamma-tocopherol in said non-human organism or in the culture medium surrounding said non-human organism.

[45735] A further embodiment of the present invention relates to a process for the production of alpha-tocopherol, which comprises
[45736] (a) increasing or generating one or more activities selected from the group consisting of ThiF family protein in an organelle, preferably in plastids or mitochondria, especially in plastids, of a non-human organism or a part thereof, preferably a microorganism, a plant cell, a plant or a part thereof, as compared to a corresponding non-transformed wild type non-human organism or a part thereof; and
[45737] (b) growing the non-human organism or a part thereof under conditions which permit the production of alpha-tocopherol or a composition comprising alpha-tocopherol in said non-human organism or in the culture medium surrounding said non-human organism.

[45738] A further embodiment of the present invention relates to a process for the production of alpha-tocopherol, which comprises
[45739] (a) increasing or generating one or more activities selected from the group consisting of isopropylmalate isomerase large subunit in an organelle, preferably in plastids or mitochondria, especially in plastids, of a non-human organism or a part thereof, preferably a microorganism, a plant cell, a plant or a part thereof, as compared to a corresponding non-transformed wild type non-human organism or a part thereof; and
[45740] (b) growing the non-human organism or a part thereof under conditions which permit the production of alpha-tocopherol or a composition comprising alpha-tocopherol in said non-human organism or in the culture medium surrounding said non-human organism.

[45741] A further embodiment of the present invention relates to a process for the production of alpha-tocopherol, which comprises
[45742] (a) increasing or generating one or more activities selected from the group consisting of hydrolase in an organelle, preferably in plastids or mitochondria, especially in plastids, of a non-human organism or a part thereof, preferably a microorganism, a plant cell, a plant or a part thereof, as compared to a corresponding non-transformed wild type non-human organism or a part thereof; and
[45743] (b) growing the non-human organism or a part thereof under conditions which permit the production of alpha-tocopherol or a composition comprising alpha-tocopherol in said non-human organism or in the culture medium surrounding said non-human organism.

[45744] A further embodiment of the present invention relates to a process for the production of gamma-tocopherol, which comprises
[45745] (a) increasing or generating one or more activities selected from the group consisting of hydrolase in an organelle, preferably in plastids or mitochondria, especially in plastids, of a non-human organism or a part thereof, preferably a microorganism, a plant cell, a plant or a part thereof, as compared to a corresponding non-transformed wild type non-human organism or a part thereof; and
[45746] (b) growing the non-human organism or a part thereof under conditions which permit the production of gamma-tocopherol or a composition comprising gamma-tocopherol in said non-human organism or in the culture medium surrounding said non-human organism.

[45747] A further embodiment of the present invention relates to a process for the production of gamma-tocopherol, which comprises
[45748] (a) increasing or generating one or more activities selected from the group consisting of electron transfer flavoprotein subunit beta in an organelle, preferably in plastids or mitochondria, especially in plastids, of a non-human organism or a part thereof, preferably a microorganism, a plant cell, a plant or a part thereof, as compared to a corresponding non-transformed wild type non-human organism or a part thereof; and
[45749] (b) growing the non-human organism or a part thereof under conditions which permit the production of gamma-tocopherol or a composition comprising gamma-tocopherol in said non-human organism or in the culture medium surrounding said non-human organism.

[45750] A further embodiment of the present invention relates to a process for the production of gamma-tocopherol, which comprises
[45751] (a) increasing or generating one or more activities selected from the group consisting of threonine synthase in an organelle, preferably in plastids or mitochondria, especially in plastids, of a non-human organism or a part thereof, preferably a microorganism, a plant cell, a plant or a part thereof, as compared to a corresponding non-transformed wild type non-human organism or a part thereof; and
[45752] (b) growing the non-human organism or a part thereof under conditions which permit the production of gamma-tocopherol or a composition comprising gamma-tocopherol in said non-human organism or in the culture medium surrounding said non-human organism.

[45753] A further embodiment of the present invention relates to a process for the production of alpha-tocopherol, which comprises
[45754] (a) increasing or generating one or more activities selected from the group consisting of glucose dehydrogenase in an organelle, preferably in plastids or mitochondria, especially in plastids, of a non-human organism or a part thereof, preferably a microorganism, a plant cell, a plant or a part thereof, as compared to a corresponding non-transformed wild type non-human organism or a part thereof; and
[45755] (b) growing the non-human organism or a part thereof under conditions which permit the production of alpha-tocopherol or a composition comprising alpha-tocopherol in said non-human organism or in the culture medium surrounding said non-human organism.

[45756] A further embodiment of the present invention relates to a process for the production of gamma-tocopherol, which comprises
[45757] (a) increasing or generating one or more activities selected from the group consisting of glucose dehydrogenase in an organelle, preferably in plastids or mitochondria, especially in plastids, of a non-human organism or a part thereof, preferably a microorganism, a plant cell, a plant or a part thereof, as compared to a corresponding non-transformed wild type non-human organism or a part thereof; and
[45758] (b) growing the non-human organism or a part thereof under conditions which permit the production of gamma-tocopherol or a composition comprising gamma-tocopherol in said non-human organism or in the culture medium surrounding said non-human organism.

[45759] A further embodiment of the present invention relates to a process for the production of gamma-tocopherol, which comprises
[45760] (a) increasing or generating one or more activities selected from the group consisting of serine protease in an organelle, preferably in plastids or mitochondria, especially in plastids, of a non-human organism or a part thereof, preferably a microorganism, a plant cell, a plant or a part thereof, as compared to a corresponding non-transformed wild type non-human organism or a part thereof; and
[45761] (b) growing the non-human organism or a part thereof under conditions which permit the production of gamma-tocopherol or a composition comprising gamma-tocopherol in said non-human organism or in the culture medium surrounding said non-human organism.

[45762] A further embodiment of the present invention relates to a process for the production of alpha-tocopherol, which comprises
[45763] (a) increasing or generating one or more activities selected from the group consisting of geranyltranstransferase in an organelle, preferably in plastids or mitochondria, especially in plastids, of a non-human organism or a part thereof, preferably a microorganism, a plant cell, a plant or a part thereof, as compared to a corresponding non-transformed wild type non-human organism or a part thereof; and
[45764] (b) growing the non-human organism or a part thereof under conditions which permit the production of alpha-tocopherol or a composition comprising alpha-tocopherol in said non-human organism or in the culture medium surrounding said non-human organism.

[45765] A further embodiment of the present invention relates to a process for the production of gamma-tocopherol, which comprises
[45766] (a) increasing or generating one or more activities selected from the group consisting of ATP-binding component of a transport system in an organelle, preferably in plastids or mitochondria, especially in plastids, of a non-human organism or a part thereof, preferably a microorganism, a plant cell, a plant or a part thereof, as compared to a corresponding non-transformed wild type non-human organism or a part thereof; and
[45767] (b) growing the non-human organism or a part thereof under conditions which permit the production of gamma-tocopherol or a composition comprising gamma-tocopherol in said non-human organism or in the culture medium surrounding said non-human organism.

[45768] A further embodiment of the present invention relates to a process for the production of alpha-tocopherol, which comprises
[45769] (a) increasing or generating one or more activities selected from the group consisting of 3-deoxy-D-arabinoheptulosonate-7-phosphatesynthase in an organelle, preferably in plastids or mitochondria, especially in plastids, of a non-human organism or a part thereof, preferably a microorganism, a plant cell, a plant or a part thereof, as compared to a corresponding non-transformed wild type non-human organism or a part thereof; and
[45770] (b) growing the non-human organism or a part thereof under conditions which permit the production of alpha-tocopherol or a composition comprising alpha-tocopherol in said non-human organism or in the culture medium surrounding said non-human organism.

[45771] A further embodiment of the present invention relates to a process for the production of gamma-tocopherol, which comprises
[45772] (a) increasing or generating one or more activities selected from the group consisting of major facilitator superfamily transporter protein in an organelle, preferably in plastids or mitochondria, especially in plastids, of a non-human organism or a part thereof, preferably a microorganism, a plant cell, a plant or a part thereof, as compared to a corresponding non-transformed wild type non-human organism or a part thereof; and
[45773] (b) growing the non-human organism or a part thereof under conditions which permit the production of gamma-tocopherol or a composition comprising gamma-tocopherol in said non-human organism or in the culture medium surrounding said non-human organism.

[45774] A further embodiment of the present invention relates to a process for the production of alpha-tocopherol, which comprises
[45775] (a) increasing or generating one or more activities selected from the group consisting of b1163-protein in an organelle, preferably in plastids or mitochondria, especially in plastids, of a non-human organism or a part thereof, preferably a microorganism, a plant cell, a plant or a part thereof, as compared to a corresponding non-transformed wild type non-human organism or a part thereof; and
[45776] (b) growing the non-human organism or a part thereof under conditions which permit the production of alpha-tocopherol or a composition comprising alpha-tocopherol in said non-human organism or in the culture medium surrounding said non-human organism.

[45777] A further embodiment of the present invention relates to a process for the production of gamma-tocopherol, which comprises
[45778] (a) increasing or generating one or more activities selected from the group consisting of DNA polymerase subunit in an organelle, preferably in plastids or mitochondria, especially in plastids, of a non-human organism or a part thereof, preferably a microorganism, a plant cell, a plant or a part thereof, as compared to a corresponding non-transformed wild type non-human organism or a part thereof; and
[45779] (b) growing the non-human organism or a part thereof under conditions which permit the production of gamma-tocopherol or a composition comprising gamma-tocopherol in said non-human organism or in the culture medium surrounding said non-human organism.

[45780] A further embodiment of the present invention relates to a process for the production of alpha-tocopherol, which comprises
[45781] (a) increasing or generating one or more activities selected from the group consisting of b1219-protein in an organelle, preferably in plastids or mitochondria, especially in plastids, of a non-human organism or a part thereof, preferably a microorganism, a plant cell, a plant or a part thereof, as compared to a corresponding non-transformed wild type non-human organism or a part thereof; and
[45782] (b) growing the non-human organism or a part thereof under conditions which permit the production of alpha-tocopherol or a composition comprising alpha-tocopherol in said non-human organism or in the culture medium surrounding said non-human organism.

[45783] A further embodiment of the present invention relates to a process for the production of gamma-tocopherol, which comprises
[45784] (a) increasing or generating one or more activities selected from the group consisting of b1234-protein in an organelle, preferably in plastids or mitochondria, especially in plastids, of a non-human organism or a part thereof, preferably a microorganism, a plant cell, a plant or a part thereof, as compared to a corresponding non-transformed wild type non-human organism or a part thereof; and
[45785] (b) growing the non-human organism or a part thereof under conditions which permit the production of gamma-tocopherol or a composition comprising gamma-tocopherol in said non-human organism or in the culture medium surrounding said non-human organism.

[45786] A further embodiment of the present invention relates to a process for the production of gamma-tocopherol, which comprises
[45787] (a) increasing or generating one or more activities selected from the group consisting of NADP-dependent malic enzyme in an organelle, preferably in plastids or mitochondria, especially in plastids, of a non-human organism or a part thereof, preferably a microorganism, a plant cell, a plant or a part thereof, as compared to a corresponding non-transformed wild type non-human organism or a part thereof; and
[45788] (b) growing the non-human organism or a part thereof under conditions which permit the production of gamma-tocopherol or a composition comprising gamma-tocopherol in said non-human organism or in the culture medium surrounding said non-human organism.

[45789] A further embodiment of the present invention relates to a process for the production of gamma-tocopherol, which comprises
[45790] (a) increasing or generating one or more activities selected from the group consisting of b1522-protein in an organelle, preferably in plastids or mitochondria, especially in plastids, of a non-human organism or a part thereof, preferably a microorganism, a plant cell, a plant or a part thereof, as compared to a corresponding non-transformed wild type non-human organism or a part thereof; and
[45791] (b) growing the non-human organism or a part thereof under conditions which permit the production of gamma-tocopherol or a composition comprising gamma-tocopherol in said non-human organism or in the culture medium surrounding said non-human organism.

[45792] A further embodiment of the present invention relates to a process for the production of alpha-tocopherol, which comprises
[45793] (a) increasing or generating one or more activities selected from the group consisting of acid shock protein in an organelle, preferably in plastids or mitochondria, especially in plastids, of a non-human organism or a part thereof, preferably a microorganism, a plant cell, a plant or a part thereof, as compared to a corresponding non-transformed wild type non-human organism or a part thereof; and
[45794] (b) growing the non-human organism or a part thereof under conditions which permit the production of alpha-tocopherol or a composition comprising alpha-tocopherol in said non-human organism or in the culture medium surrounding said non-human organism.

[45795] A further embodiment of the present invention relates to a process for the production of alpha-tocopherol, which comprises
[45796] (a) increasing or generating one or more activities selected from the group consisting of transport protein in an organelle, preferably in plastids or mitochondria, especially in plastids, of a non-human organism or a part thereof, preferably a microorganism, a plant cell, a plant or a part thereof, as compared to a corresponding non-transformed wild type non-human organism or a part thereof; and
[45797] (b) growing the non-human organism or a part thereof under conditions which permit the production of alpha-tocopherol or a composition comprising alpha-tocopherol in said non-human organism or in the culture medium surrounding said non-human organism.

[45798] A further embodiment of the present invention relates to a process for the production of gamma-tocopherol, which comprises
[45799] (a) increasing or generating one or more activities selected from the group consisting of trehalose-phosphatase in an organelle, preferably in plastids or mitochondria, especially in plastids, of a non-human organism or a part thereof, preferably a microorganism, a plant cell, a plant or a part thereof, as compared to a corresponding non-transformed wild type non-human organism or a part thereof; and
[45800] (b) growing the non-human organism or a part thereof under conditions which permit the production of gamma-tocopherol or a composition comprising gamma-tocopherol in said non-human organism or in the culture medium surrounding said non-human organism.

[45801] A further embodiment of the present invention relates to a process for the production of gamma-tocopherol, which comprises
[45802] (a) increasing or generating one or more activities selected from the group consisting of b1921-protein in an organelle, preferably in plastids or mitochondria, especially in plastids, of a non-human organism or a part thereof, preferably a microorganism, a plant cell, a plant or a part thereof, as compared to a corresponding non-transformed wild type non-human organism or a part thereof; and
[45803] (b) growing the non-human organism or a part thereof under conditions which permit the production of gamma-tocopherol or a composition comprising gamma-tocopherol in said non-human organism or in the culture medium surrounding said non-human organism.

[45804] A further embodiment of the present invention relates to a process for the production of gamma-tocopherol, which comprises
[45805] (a) increasing or generating one or more activities selected from the group consisting of O-antigen chain length determinant in an organelle, preferably in plastids or mitochondria, especially in plastids, of a non-human organism or a part thereof, preferably a microorganism, a plant cell, a plant or a part thereof, as compared to a corresponding non-transformed wild type non-human organism or a part thereof; and
[45806] (b) growing the non-human organism or a part thereof under conditions which permit the production of gamma-tocopherol or a composition comprising gamma-tocopherol in said non-human organism or in the culture medium surrounding said non-human organism.

[45807] A further embodiment of the present invention relates to a process for the production of alpha-tocopherol, which comprises
[45808] (a) increasing or generating one or more activities selected from the group consisting of colanic acid biosynthesis protein in an organelle, preferably in plastids or mitochondria, especially in plastids, of a non-human organism or a part thereof, preferably a microorganism, a plant cell, a plant or a part thereof, as compared to a corresponding non-transformed wild type non-human organism or a part thereof; and
[45809] (b) growing the non-human organism or a part thereof under conditions which permit the production of alpha-tocopherol or a composition comprising alpha-tocopherol in said non-human organism or in the culture medium surrounding said non-human organism.

[45810] A further embodiment of the present invention relates to a process for the production of gamma-tocopherol, which comprises
[45811] (a) increasing or generating one or more activities selected from the group consisting of b2360-protein in an organelle, preferably in plastids or mitochondria, especially in plastids, of a non-human organism or a part thereof, preferably a microorganism, a plant cell, a plant or a part thereof, as compared to a corresponding non-transformed wild type non-human organism or a part thereof; and
[45812] (b) growing the non-human organism or a part thereof under conditions which permit the production of gamma-tocopherol or a composition comprising gamma-tocopherol in said non-human organism or in the culture medium surrounding said non-human organism.

[45813] A further embodiment of the present invention relates to a process for the production of alpha-tocopherol, which comprises
[45814] (a) increasing or generating one or more activities selected from the group consisting of putative transport system permease protein in an organelle, preferably in plastids or mitochondria, especially in plastids, of a non-human organism or a part thereof, preferably a microorganism, a plant cell, a plant or a part thereof, as compared to a corresponding non-transformed wild type non-human organism or a part thereof; and
[45815] (b) growing the non-human organism or a part thereof under conditions which permit the production of alpha-tocopherol or a composition comprising alpha-tocopherol in said non-human organism or in the culture medium surrounding said non-human organism.

[45816] A further embodiment of the present invention relates to a process for the production of gamma-tocopherol, which comprises
[45817] (a) increasing or generating one or more activities selected from the group consisting of b2548-protein in an organelle, preferably in plastids or mitochondria, especially in plastids, of a non-human organism or a part thereof, preferably a microorganism, a plant cell, a plant or a part thereof, as compared to a corresponding non-transformed wild type non-human organism or a part thereof; and
[45818] (b) growing the non-human organism or a part thereof under conditions which permit the production of gamma-tocopherol or a composition comprising gamma-tocopherol in said non-human organism or in the culture medium surrounding said non-human organism.

[45819] A further embodiment of the present invention relates to a process for the production of gamma-tocopherol, which comprises
[45820] (a) increasing or generating one or more activities selected from the group consisting of b2613-protein in an organelle, preferably in plastids or mitochondria, especially in plastids, of a non-human organism or a part thereof, preferably a microorganism, a plant cell, a plant or a part thereof, as compared to a corresponding non-transformed wild type non-human organism or a part thereof; and
[45821] (b) growing the non-human organism or a part thereof under conditions which permit the production of gamma-tocopherol or a composition comprising gamma-tocopherol in said non-human organism or in the culture medium surrounding said non-human organism.

[45822] A further embodiment of the present invention relates to a process for the production of gamma-tocopherol, which comprises
[45823] (a) increasing or generating one or more activities selected from the group consisting of b2673-protein in an organelle, preferably in plastids or mitochondria, especially in plastids, of a non-human organism or a part thereof, preferably a microorganism, a plant cell, a plant or a part thereof, as compared to a corresponding non-transformed wild type non-human organism or a part thereof; and
[45824] (b) growing the non-human organism or a part thereof under conditions which permit the production of gamma-tocopherol or a composition comprising gamma-tocopherol in said non-human organism or in the culture medium surrounding said non-human organism.

[45825] A further embodiment of the present invention relates to a process for the production of gamma-tocopherol, which comprises
[45826] (a) increasing or generating one or more activities selected from the group consisting of murein transglycosylase in an organelle, preferably in plastids or mitochondria, especially in plastids, of a non-human organism or a part thereof, preferably a microorganism, a plant cell, a plant or a part thereof, as compared to a corresponding non-transformed wild type non-human organism or a part thereof; and
[45827] (b) growing the non-human organism or a part thereof under conditions which permit the production of gamma-tocopherol or a composition comprising gamma-tocopherol in said non-human organism or in the culture medium surrounding said non-human organism.

[45828] A further embodiment of the present invention relates to a process for the production of gamma-tocopherol, which comprises
[45829] (a) increasing or generating one or more activities selected from the group consisting of b2812-protein in an organelle, preferably in plastids or mitochondria, especially in plastids, of a non-human organism or a part thereof, preferably a microorganism, a plant cell, a plant or a part thereof, as compared to a corresponding non-transformed wild type non-human organism or a part thereof; and
[45830] (b) growing the non-human organism or a part thereof under conditions which permit the production of gamma-tocopherol or a composition comprising gamma-tocopherol in said non-human organism or in the culture medium surrounding said non-human organism.

[45831] A further embodiment of the present invention relates to a process for the production of alpha-tocopherol, which comprises
[45832] (a) increasing or generating one or more activities selected from the group consisting of amino-acid acetyltransferase in an organelle, preferably in plastids or mitochondria, especially in plastids, of a non-human organism or a part thereof, preferably a microorganism, a plant cell, a plant or a part thereof, as compared to a corresponding non-transformed wild type non-human organism or a part thereof; and
[45833] (b) growing the non-human organism or a part thereof under conditions which permit the production of alpha-tocopherol or a composition comprising alpha-tocopherol in said non-human organism or in the culture medium surrounding said non-human organism.

[45834] A further embodiment of the present invention relates to a process for the production of gamma-tocopherol, which comprises
[45835] (a) increasing or generating one or more activities selected from the group consisting of amino-acid acetyltransferase in an organelle, preferably in plastids or mitochondria, especially in plastids, of a non-human organism or a part thereof, preferably a microorganism, a plant cell, a plant or a part thereof, as compared to a corresponding non-transformed wild type non-human organism or a part thereof; and
[45836] (b) growing the non-human organism or a part thereof under conditions which permit the production of gamma-tocopherol or a composition comprising gamma-tocopherol in said non-human organism or in the culture medium surrounding said non-human organism.

[45837] A further embodiment of the present invention relates to a process for the production of alpha-tocopherol, which comprises
[45838] (a) increasing or generating one or more activities selected from the group consisting of glycolate utilization protein in an organelle, preferably in plastids or mitochondria, especially in plastids, of a non-human organism or a part thereof, preferably a microorganism, a plant cell, a plant or a part thereof, as compared to a corresponding non-transformed wild type non-human organism or a part thereof; and
[45839] (b) growing the non-human organism or a part thereof under conditions which permit the production of alpha-tocopherol or a composition comprising alpha-tocopherol in said non-human organism or in the culture medium surrounding said non-human organism.

[45840] A further embodiment of the present invention relates to a process for the production of alpha-tocopherol, which comprises
[45841] (a) increasing or generating one or more activities selected from the group consisting of ABC transporter permease subunit in an organelle, preferably in plastids or mitochondria, especially in plastids, of a non-human organism or a part thereof, preferably a microorganism, a plant cell, a plant or a part thereof, as compared to a corresponding non-transformed wild type non-human organism or a part thereof; and
[45842] (b) growing the non-human organism or a part thereof under conditions which permit the production of alpha-tocopherol or a composition comprising alpha-tocopherol in said non-human organism or in the culture medium surrounding said non-human organism.

[45843] A further embodiment of the present invention relates to a process for the production of gamma-tocopherol, which comprises
[45844] (a) increasing or generating one or more activities selected from the group consisting of lipopolysaccharide biosynthesis protein in an organelle, preferably in plastids or mitochondria, especially in plastids, of a non-human organism or a part thereof, preferably a microorganism, a plant cell, a plant or a part thereof, as compared to a corresponding non-transformed wild type non-human organism or a part thereof; and
[45845] (b) growing the non-human organism or a part thereof under conditions which permit the production of gamma-tocopherol or a composition comprising gamma-tocopherol in said non-human organism or in the culture medium surrounding said non-human organism.

[45846] A further embodiment of the present invention relates to a process for the production of alpha-tocopherol, which comprises
[45847] (a) increasing or generating one or more activities selected from the group consisting of b3890-protein in an organelle, preferably in plastids or mitochondria, especially in plastids, of a non-human organism or a part thereof, preferably a microorganism, a plant cell, a plant or a part thereof, as compared to a corresponding non-transformed wild type non-human organism or a part thereof; and
[45848] (b) growing the non-human organism or a part thereof under conditions which permit the production of alpha-tocopherol or a composition comprising alpha-tocopherol in said non-human organism or in the culture medium surrounding said non-human organism.

[45849] A further embodiment of the present invention relates to a process for the production of alpha-tocopherol, which comprises
[45850] (a) increasing or generating one or more activities selected from the group consisting of glycerol dehydrogenase in an organelle, preferably in plastids or mitochondria, especially in plastids, of a non-human organism or a part thereof, preferably a microorganism, a plant cell, a plant or a part thereof, as compared to a corresponding non-transformed wild type non-human organism or a part thereof; and
[45851] (b) growing the non-human organism or a part thereof under conditions which permit the production of alpha-tocopherol or a composition comprising alpha-tocopherol in said non-human organism or in the culture medium surrounding said non-human organism.

[45852] A further embodiment of the present invention relates to a process for the production of alpha-tocopherol, which comprises
[45853] (a) increasing or generating one or more activities selected from the group consisting of b3989-protein in an organelle, preferably in plastids or mitochondria, especially in plastids, of a non-human organism or a part thereof, preferably a microorganism, a plant cell, a plant or a part thereof, as compared to a corresponding non-transformed wild type non-human organism or a part thereof; and
[45854] (b) growing the non-human organism or a part thereof under conditions which permit the production of alpha-tocopherol or a composition comprising alpha-tocopherol in said non-human organism or in the culture medium surrounding said non-human organism.

[45855] A further embodiment of the present invention relates to a process for the production of gamma-tocopherol, which comprises
[45856] (a) increasing or generating one or more activities selected from the group consisting of b3989-protein in an organelle, preferably in plastids or mitochondria, especially in plastids, of a non-human organism or a part thereof, preferably a microorganism, a plant cell, a plant or a part thereof, as compared to a corresponding non-transformed wild type non-human organism or a part thereof; and
[45857] (b) growing the non-human organism or a part thereof under conditions which permit the production of gamma-tocopherol or a composition comprising gamma-tocopherol in said non-human organism or in the culture medium surrounding said non-human organism.

[45858] A further embodiment of the present invention relates to a process for the production of gamma-tocopherol, which comprises
[45859] (a) increasing or generating one or more activities selected from the group consisting of b4029-protein in an organelle, preferably in plastids or mitochondria, especially in plastids, of a non-human organism or a part thereof, preferably a microorganism, a plant cell, a plant or a part thereof, as compared to a corresponding non-transformed wild type non-human organism or a part thereof; and
[45860] (b) growing the non-human organism or a part thereof under conditions which permit the production of gamma-tocopherol or a composition comprising gamma-tocopherol in said non-human organism or in the culture medium surrounding said non-human organism.

[45861] A further embodiment of the present invention relates to a process for the production of alpha-tocopherol, which comprises
[45862] (a) increasing or generating one or more activities selected from the group consisting of b4050-protein in an organelle, preferably in plastids or mitochondria, especially in plastids, of a non-human organism or a part thereof, preferably a microorganism, a plant cell, a plant or a part thereof, as compared to a corresponding non-transformed wild type non-human organism or a part thereof; and
[45863] (b) growing the non-human organism or a part thereof under conditions which permit the production of alpha-tocopherol or a composition comprising alpha-tocopherol in said non-human organism or in the culture medium surrounding said non-human organism.

[45864] A further embodiment of the present invention relates to a process for the production of alpha-tocopherol, which comprises
[45865] (a) increasing or generating one or more activities selected from the group consisting of b4056-protein in an organelle, preferably in plastids or mitochondria, especially in plastids, of a non-human organism or a part thereof, preferably a microorganism, a plant cell, a plant or a part thereof, as compared to a corresponding non-transformed wild type non-human organism or a part thereof; and
[45866] (b) growing the non-human organism or a part thereof under conditions which permit the production of alpha-tocopherol or a composition comprising alpha-tocopherol in said non-human organism or in the culture medium surrounding said non-human organism.

[45867] A further embodiment of the present invention relates to a process for the production of alpha-tocopherol, which comprises
[45868] (a) increasing or generating one or more activities selected from the group consisting of acetyltransferase in an organelle, preferably in plastids or mitochondria, especially in plastids, of a non-human organism or a part thereof, preferably a microorganism, a plant cell, a plant or a part thereof, as compared to a corresponding non-transformed wild type non-human organism or a part thereof; and
[45869] (b) growing the non-human organism or a part thereof under conditions which permit the production of alpha-tocopherol or a composition comprising alpha-tocopherol in said non-human organism or in the culture medium surrounding said non-human organism.

[45870] A further embodiment of the present invention relates to a process for the production of gamma-tocopherol, which comprises
[45871] (a) increasing or generating one or more activities selected from the group consisting of acetyltransferase in an organelle, preferably in plastids or mitochondria, especially in plastids, of a non-human organism or a part thereof, preferably a microorganism, a plant cell, a plant or a part thereof, as compared to a corresponding non-transformed wild type non-human organism or a part thereof; and
[45872] (b) growing the non-human organism or a part thereof under conditions which permit the production of gamma-tocopherol or a composition comprising gamma-tocopherol in said non-human organism or in the culture medium surrounding said non-human organism.

[45873] A further embodiment of the present invention relates to a process for the production of alpha-tocopherol, which comprises
[45874] (a) increasing or generating one or more activities selected from the group consisting of gluconate transport system permease 3 in an organelle, preferably in plastids or mitochondria, especially in plastids, of a non-human organism or a part thereof, preferably a microorganism, a plant cell, a plant or a part thereof, as compared to a corresponding non-transformed wild type non-human organism or a part thereof; and
[45875] (b) growing the non-human organism or a part thereof under conditions which permit the production of alpha-tocopherol or a composition comprising alpha-tocopherol in said non-human organism or in the culture medium surrounding said non-human organism.

[45876] A further embodiment of the present invention relates to a process for the production of gamma-tocopherol, which comprises
[45877] (a) increasing or generating one or more activities selected from the group consisting of gluconate transport system permease 3 in an organelle, preferably in plastids or mitochondria, especially in plastids, of a non-human organism or a part thereof, preferably a microorganism, a plant cell, a plant or a part thereof, as compared to a corresponding non-transformed wild type non-human organism or a part thereof; and
[45878] (b) growing the non-human organism or a part thereof under conditions which permit the production of gamma-tocopherol or a composition comprising gamma-tocopherol in said non-human organism or in the culture medium surrounding said non-human organism.

[45879] A further embodiment of the present invention relates to a process for the production of gamma-tocopherol, which comprises
[45880] (a) increasing or generating one or more activities selected from the group consisting of thioredoxin in an organelle, preferably in plastids or mitochondria, especially in plastids, of a non-human organism or a part thereof, preferably a microorganism, a plant cell, a plant or a part thereof, as compared to a corresponding non-transformed wild type non-human organism or a part thereof; and
[45881] (b) growing the non-human organism or a part thereof under conditions which permit the production of gamma-tocopherol or a composition comprising gamma-tocopherol in said non-human organism or in the culture medium surrounding said non-human organism.

[45882] A further embodiment of the present invention relates to a process for the production of alpha-tocopherol, which comprises
[45883] (a) increasing or generating one or more activities selected from the group consisting of glutaredoxin in an organelle, preferably in plastids or mitochondria, especially in plastids, of a non-human organism or a part thereof, preferably a microorganism, a plant cell, a plant or a part thereof, as compared to a corresponding non-transformed wild type non-human organism or a part thereof; and
[45884] (b) growing the non-human organism or a part thereof under conditions which permit the production of alpha-tocopherol or a composition comprising alpha-tocopherol in said non-human organism or in the culture medium surrounding said non-human organism.

[45885] A further embodiment of the present invention relates to a process for the production of gamma-tocopherol, which comprises
[45886] (a) increasing or generating one or more activities selected from the group consisting of glutaredoxin in an organelle, preferably in plastids or mitochondria, especially in plastids, of a non-human organism or a part thereof, preferably a microorganism, a plant cell, a plant or a part thereof, as compared to a corresponding non-transformed wild type non-human organism or a part thereof; and
[45887] (b) growing the non-human organism or a part thereof under conditions which permit the production of gamma-tocopherol or a composition comprising gamma-tocopherol in said non-human organism or in the culture medium surrounding said non-human organism.

[45888] A further embodiment of the present invention relates to a process for the production of gamma-tocopherol, which comprises
[45889] (a) increasing or generating one or more activities selected from the group consisting of transcription factor in an organelle, preferably in plastids or mitochondria, especially in plastids, of a non-human organism or a part thereof, preferably a microorganism, a plant cell, a plant or a part thereof, as compared to a corresponding non-transformed wild type non-human organism or a part thereof; and
[45890] (b) growing the non-human organism or a part thereof under conditions which permit the production of gamma-tocopherol or a composition comprising gamma-tocopherol in said non-human organism or in the culture medium surrounding said non-human organism.

[45891] A further embodiment of the present invention relates to a process for the production of alpha-tocopherol, which comprises
[45892] (a) increasing or generating one or more activities selected from the group consisting of polyphosphate kinase in an organelle, preferably in plastids or mitochondria, especially in plastids, of a non-human organism or a part thereof, preferably a microorganism, a plant cell, a plant or a part thereof, as compared to a corresponding non-transformed wild type non-human organism or a part thereof; and
[45893] (b) growing the non-human organism or a part thereof under conditions which permit the production of alpha-tocopherol or a composition comprising alpha-tocopherol in said non-human organism or in the culture medium surrounding said non-human organism.

[45894] A further embodiment of the present invention relates to a process for the production of gamma-tocopherol, which comprises
[45895] (a) increasing or generating one or more activities selected from the group consisting of phosphofructokinase in an organelle, preferably in plastids or mitochondria, especially in plastids, of a non-human organism or a part thereof, preferably a microorganism, a plant cell, a plant or a part thereof, as compared to a corresponding non-transformed wild type non-human organism or a part thereof; and
[45896] (b) growing the non-human organism or a part thereof under conditions which permit the production of gamma-tocopherol or a composition comprising gamma-tocopherol in said non-human organism or in the culture medium surrounding said non-human organism.

[45897] A further embodiment of the present invention relates to a process for the production of gamma-tocopherol, which comprises
[45898] (a) increasing or generating one or more activities selected from the group consisting of coproporphyrinogen oxidase in an organelle, preferably in plastids or mitochondria, especially in plastids, of a non-human organism or a part thereof, preferably a microorganism, a plant cell, a plant or a part thereof, as compared to a corresponding non-transformed wild type non-human organism or a part thereof; and
[45899] (b) growing the non-human organism or a part thereof under conditions which permit the production of gamma-tocopherol or a composition comprising gamma-tocopherol in said non-human organism or in the culture medium surrounding said non-human organism.

[45900] A further embodiment of the present invention relates to a process for the production of gamma-tocopherol, which comprises
[45901] (a) increasing or generating one or more activities selected from the group consisting of sll1761-protein in an organelle, preferably in plastids or mitochondria, especially in plastids, of a non-human organism or a part thereof, preferably a microorganism, a plant cell, a plant or a part thereof, as compared to a corresponding non-transformed wild type non-human organism or a part thereof; and
[45902] (b) growing the non-human organism or a part thereof under conditions which permit the production of gamma-tocopherol or a composition comprising gamma-tocopherol in said non-human organism or in the culture medium surrounding said non-human organism.

[45903] A further embodiment of the present invention relates to a process for the production of gamma-tocopherol, which comprises
[45904] (a) increasing or generating one or more activities selected from the group consisting of adenylate kinase in an organelle, preferably in plastids or mitochondria, especially in plastids, of a non-human organism or a part thereof, preferably a microorganism, a plant cell, a plant or a part thereof, as compared to a corresponding non-transformed wild type non-human organism or a part thereof; and
[45905] (b) growing the non-human organism or a part thereof under conditions which permit the production of gamma-tocopherol or a composition comprising gamma-tocopherol in said non-human organism or in the culture medium surrounding said non-human organism.

[45906] A further embodiment of the present invention relates to a process for the production of alpha-tocopherol, which comprises
[45907] (a) increasing or generating one or more activities selected from the group consisting of precorrin methylase in an organelle, preferably in plastids or mitochondria, especially in plastids, of a non-human organism or a part thereof, preferably a microorganism, a plant cell, a plant or a part thereof, as compared to a corresponding non-transformed wild type non-human organism or a part thereof; and
[45908] (b) growing the non-human organism or a part thereof under conditions which permit the production of alpha-tocopherol or a composition comprising alpha-tocopherol in said non-human organism or in the culture medium surrounding said non-human organism.

[45909] A further embodiment of the present invention relates to a process for the production of alpha-tocopherol, which comprises
[45910] (a) increasing or generating one or more activities selected from the group consisting of malate dehydrogenase in an organelle, preferably in plastids or mitochondria, especially in plastids, of a non-human organism or a part thereof, preferably a microorganism, a plant cell, a plant or a part thereof, as compared to a corresponding non-transformed wild type non-human organism or a part thereof; and
[45911] (b) growing the non-human organism or a part thereof under conditions which permit the production of alpha-tocopherol or a composition comprising alpha-tocopherol in said non-human organism or in the culture medium surrounding said non-human organism.

[45912] A further embodiment of the present invention relates to a process for the production of gamma-tocopherol, which comprises
[45913] (a) increasing or generating one or more activities selected from the group consisting of malate dehydrogenase in an organelle, preferably in plastids or mitochondria, especially in plastids, of a non-human organism or a part thereof, preferably a microorganism, a plant cell, a plant or a part thereof, as compared to a corresponding non-transformed wild type non-human organism or a part thereof; and
[45914] (b) growing the non-human organism or a part thereof under conditions which permit the production of gamma-tocopherol or a composition comprising gamma-tocopherol in said non-human organism or in the culture medium surrounding said non-human organism.

[45915] A further embodiment of the present invention relates to a process for the production of alpha-tocopherol, which comprises
[45916] (a) increasing or generating one or more activities selected from the group consisting of geranylgeranyl pyrophosphate synthase in an organelle, preferably in plastids or mitochondria, especially in plastids, of a non-human organism or a part thereof, preferably a microorganism, a plant cell, a plant or a part thereof, as compared to a corresponding non-transformed wild type non-human organism or a part thereof; and
[45917] (b) growing the non-human organism or a part thereof under conditions which permit the production of alpha-tocopherol or a composition comprising alpha-tocopherol in said non-human organism or in the culture medium surrounding said non-human organism.

[45918] A further embodiment of the present invention relates to a process for the production of gamma-tocopherol, which comprises
[45919] (a) increasing or generating one or more activities selected from the group consisting of geranylgeranyl pyrophosphate synthase in an organelle, preferably in plastids or mitochondria, especially in plastids, of a non-human organism or a part thereof, preferably a microorganism, a plant cell, a plant or a part thereof, as compared to a corresponding non-transformed wild type non-human organism or a part thereof; and
[45920] (b) growing the non-human organism or a part thereof under conditions which permit the production of gamma-tocopherol or a composition comprising gamma-tocopherol in said non-human organism or in the culture medium surrounding said non-human organism.

[45921] A further embodiment of the present invention relates to a process for the production of gamma-tocopherol, which comprises
[45922] (a) increasing or generating one or more activities selected from the group consisting of carbohydrate kinase in an organelle, preferably in plastids or mitochondria, especially in plastids, of a non-human organism or a part thereof, preferably a microorganism, a plant cell, a plant or a part thereof, as compared to a corresponding non-transformed wild type non-human organism or a part thereof; and
[45923] (b) growing the non-human organism or a part thereof under conditions which permit the production of gamma-tocopherol or a composition comprising gamma-tocopherol in said non-human organism or in the culture medium surrounding said non-human organism.

[45924] A further embodiment of the present invention relates to a process for the production of gamma-tocopherol, which comprises
[45925] (a) increasing or generating one or more activities selected from the group consisting of photosystem II protein in an organelle, preferably in plastids or mitochondria, especially in plastids, of a non-human organism or a part thereof, preferably a microorganism, a plant cell, a plant or a part thereof, as compared to a corresponding non-transformed wild type non-human organism or a part thereof; and
[45926] (b) growing the non-human organism or a part thereof under conditions which permit the production of gamma-tocopherol or a composition comprising gamma-tocopherol in said non-human organism or in the culture medium surrounding said non-human organism.

[45927] A further embodiment of the present invention relates to a process for the production of alpha-tocopherol, which comprises
[45928] (a) increasing or generating one or more activities selected from the group consisting of glycerol-3-phosphate dehydrogenase in an organelle, preferably in plastids or mitochondria, especially in plastids, of a non-human organism or a part thereof, preferably a microorganism, a plant cell, a plant or a part thereof, as compared to a corresponding non-transformed wild type non-human organism or a part thereof; and
[45929] (b) growing the non-human organism or a part thereof under conditions which permit the production of alpha-tocopherol or a composition comprising alpha-tocopherol in said non-human organism or in the culture medium surrounding said non-human organism.

[45930] A further embodiment of the present invention relates to a process for the production of gamma-tocopherol, which comprises
[45931] (a) increasing or generating one or more activities selected from the group consisting of phosphoadenosine phosphosulfate reductase in an organelle, preferably in plastids or mitochondria, especially in plastids, of a non-human organism or a part thereof, preferably a microorganism, a plant cell, a plant or a part thereof, as compared to a corresponding non-transformed wild type non-human organism or a part thereof; and
[45932] (b) growing the non-human organism or a part thereof under conditions which permit the production of gamma-tocopherol or a composition comprising gamma-tocopherol in said non-human organism or in the culture medium surrounding said non-human organism.

[45933] A further embodiment of the present invention relates to a process for the production of alpha-tocopherol, which comprises
[45934] (a) increasing or generating one or more activities selected from the group consisting of slr1917-protein in an organelle, preferably in plastids or mitochondria, especially in plastids, of a non-human organism or a part thereof, preferably a microorganism, a plant cell, a plant or a part thereof, as compared to a corresponding non-transformed wild type non-human organism or a part thereof; and
[45935] (b) growing the non-human organism or a part thereof under conditions which permit the production of alpha-tocopherol or a composition comprising alpha-tocopherol in said non-human organism or in the culture medium surrounding said non-human organism.

[45936] A further embodiment of the present invention relates to a process for the production of gamma-tocopherol, which comprises
[45937] (a) increasing or generating one or more activities selected from the group consisting of slr1917-protein in an organelle, preferably in plastids or mitochondria, especially in plastids, of a non-human organism or a part thereof, preferably a microorganism, a plant cell, a plant or a part thereof, as compared to a corresponding non-transformed wild type non-human organism or a part thereof; and
[45938] (b) growing the non-human organism or a part thereof under conditions which permit the production of gamma-tocopherol or a composition comprising gamma-tocopherol in said non-human organism or in the culture medium surrounding said non-human organism.

[45939] A further embodiment of the present invention relates to a process for the production of alpha-tocopherol, which comprises
[45940] (a) increasing or generating one or more activities selected from the group consisting of Sec-independent protein translocase subunit in an organelle, preferably in plastids or mitochondria, especially in plastids, of a non-human organism or a part thereof, preferably a microorganism, a plant cell, a plant or a part thereof, as compared to a corresponding non-transformed wild type non-human organism or a part thereof; and
[45941] (b) growing the non-human organism or a part thereof under conditions which permit the production of alpha-tocopherol or a composition comprising alpha-tocopherol in said non-human organism or in the culture medium surrounding said non-human organism.

[45942] A further embodiment of the present invention relates to a process for the production of gamma-tocopherol, which comprises
[45943] (a) increasing or generating one or more activities selected from the group consisting of Sec-independent protein translocase subunit in an organelle, preferably in plastids or mitochondria, especially in plastids, of a non-human organism or a part thereof, preferably a microorganism, a plant cell, a plant or a part thereof, as compared to a corresponding non-transformed wild type non-human organism or a part thereof; and
[45944] (b) growing the non-human organism or a part thereof under conditions which permit the production of gamma-tocopherol or a composition comprising gamma-tocopherol in said non-human organism or in the culture medium surrounding said non-human organism.

[45945] A further embodiment of the present invention relates to a process for the production of gamma-tocopherol, which comprises
[45946] (a) increasing or generating one or more activities selected from the group consisting of multiple antibiotic resistance protein in an organelle, preferably in plastids or mitochondria, especially in plastids, of a non-human organism or a part thereof, preferably a microorganism, a plant cell, a plant or a part thereof, as compared to a corresponding non-transformed wild type non-human organism or a part thereof; and
[45947] (b) growing the non-human organism or a part thereof under conditions which permit the production of gamma-tocopherol or a composition comprising gamma-tocopherol in said non-human organism or in the culture medium surrounding said non-human organism.

[45948] A further embodiment of the present invention relates to a process for the production of alpha-tocopherol, which comprises
[45949] (a) increasing or generating one or more activities selected from the group consisting of TTC1386-protein in an organelle, preferably in plastids or mitochondria, especially in plastids, of a non-human organism or a part thereof, preferably a microorganism, a plant cell, a plant or a part thereof, as compared to a corresponding non-transformed wild type non-human organism or a part thereof; and
[45950] (b) growing the non-human organism or a part thereof under conditions which permit the production of alpha-tocopherol or a composition comprising alpha-tocopherol in said non-human organism or in the culture medium surrounding said non-human organism.

[45951] A further embodiment of the present invention relates to a process for the production of gamma-tocopherol, which comprises
[45952] (a) increasing or generating one or more activities selected from the group consisting of TTC1386-protein in an organelle, preferably in plastids or mitochondria, especially in plastids, of a non-human organism or a part thereof, preferably a microorganism, a plant cell, a plant or a part thereof, as compared to a corresponding non-transformed wild type non-human organism or a part thereof; and
[45953] (b) growing the non-human organism or a part thereof under conditions which permit the production of gamma-tocopherol or a composition comprising gamma-tocopherol in said non-human organism or in the culture medium surrounding said non-human organism.

[45954] A further embodiment of the present invention relates to a process for the production of alpha-tocopherol, which comprises
[45955] (a) increasing or generating one or more activities selected from the group consisting of homocitrate synthase in an organelle, preferably in plastids or mitochondria, especially in plastids, of a non-human organism or a part thereof, preferably a microorganism, a plant cell, a plant or a part thereof, as compared to a corresponding non-transformed wild type non-human organism or a part thereof; and
[45956] (b) growing the non-human organism or a part thereof under conditions which permit the production of alpha-tocopherol or a composition comprising alpha-tocopherol in said non-human organism or in the culture medium surrounding said non-human organism.

[45957] A further embodiment of the present invention relates to a process for the production of alpha-tocopherol, which comprises
[45958] (a) increasing or generating one or more activities selected from the group consisting of 3-deoxy-7-phosphoheptulonate synthase in an organelle, preferably in plastids or mitochondria, especially in plastids, of a non-human organism or a part thereof, preferably a microorganism, a plant cell, a plant or a part thereof, as compared to a corresponding non-transformed wild type non-human organism or a part thereof; and
[45959] (b) growing the non-human organism or a part thereof under conditions which permit the production of alpha-tocopherol or a composition comprising alpha-tocopherol in said non-human organism or in the culture medium surrounding said non-human organism.

[45960] A further embodiment of the present invention relates to a process for the production of gamma-tocopherol, which comprises
[45961] (a) increasing or generating one or more activities selected from the group consisting of 3-deoxy-7-phosphoheptulonate synthase in an organelle, preferably in plastids or mitochondria, especially in plastids, of a non-human organism or a part thereof, preferably a microorganism, a plant cell, a plant or a part thereof, as compared to a corresponding non-transformed wild type non-human organism or a part thereof; and
[45962] (b) growing the non-human organism or a part thereof under conditions which permit the production of gamma-tocopherol or a composition comprising gamma-tocopherol in said non-human organism or in the culture medium surrounding said non-human organism.

[45963] A further embodiment of the present invention relates to a process for the production of gamma-tocopherol, which comprises
[45964] (a) increasing or generating one or more activities selected from the group consisting of ycl049c-protein in an organelle, preferably in plastids or mitochondria, especially in plastids, of a non-human organism or a part thereof, preferably a microorganism, a plant cell, a plant or a part thereof, as compared to a corresponding non-transformed wild type non-human organism or a part thereof; and
[45965] (b) growing the non-human organism or a part thereof under conditions which permit the production of gamma-tocopherol or a composition comprising gamma-tocopherol in said non-human organism or in the culture medium surrounding said non-human organism.

[45966] A further embodiment of the present invention relates to a process for the production of alpha-tocopherol, which comprises
[45967] (a) increasing or generating one or more activities selected from the group consisting of homocitrate synthase in an organelle, preferably in plastids or mitochondria, especially in plastids, of a non-human organism or a part thereof, preferably a microorganism, a plant cell, a plant or a part thereof, as compared to a corresponding non-transformed wild type non-human organism or a part thereof; and
[45968] (b) growing the non-human organism or a part thereof under conditions which permit the production of alpha-tocopherol or a composition comprising alpha-tocopherol in said non-human organism or in the culture medium surrounding said non-human organism.

[45969] A further embodiment of the present invention relates to a process for the production of alpha-tocopherol, which comprises
[45970] (a) increasing or generating one or more activities selected from the group consisting of ydl235c-protein in an organelle, preferably in plastids or mitochondria, especially in plastids, of a non-human organism or a part thereof, preferably a microorganism, a plant cell, a plant or a part thereof, as compared to a corresponding non-transformed wild type non-human organism or a part thereof; and
[45971] (b) growing the non-human organism or a part thereof under conditions which permit the production of alpha-tocopherol or a composition comprising alpha-tocopherol in said non-human organism or in the culture medium surrounding said non-human organism.

[45972] A further embodiment of the present invention relates to a process for the production of gamma-tocopherol, which comprises
[45973] (a) increasing or generating one or more activities selected from the group consisting of N(5′-phosphoribosyl)anthranilate isomerase in an organelle, preferably in plastids or mitochondria, especially in plastids, of a non-human organism or a part thereof, preferably a microorganism, a plant cell, a plant or a part thereof, as compared to a corresponding non-transformed wild type non-human organism or a part thereof; and
[45974] (b) growing the non-human organism or a part thereof under conditions which permit the production of gamma-tocopherol or a composition comprising gamma-tocopherol in said non-human organism or in the culture medium surrounding said non-human organism.

[45975] A further embodiment of the present invention relates to a process for the production of gamma-tocopherol, which comprises
[45976] (a) increasing or generating one or more activities selected from the group consisting of phospho-2-dehydro-3-deoxyheptonate aldolase in an organelle, preferably in plastids or mitochondria, especially in plastids, of a non-human organism or a part thereof, preferably a microorganism, a plant cell, a plant or a part thereof, as compared to a corresponding non-transformed wild type non-human organism or a part thereof; and
[45977] (b) growing the non-human organism or a part thereof under conditions which permit the production of gamma-tocopherol or a composition comprising gamma-tocopherol in said non-human organism or in the culture medium surrounding said non-human organism.

[45978] A further embodiment of the present invention relates to a process for the production of gamma-tocopherol, which comprises
[45979] (a) increasing or generating one or more activities selected from the group consisting of ydr183w-protein in an organelle, preferably in plastids or mitochondria, especially in plastids, of a non-human organism or a part thereof, preferably a microorganism, a plant cell, a plant or a part thereof, as compared to a corresponding non-transformed wild type non-human organism or a part thereof; and
[45980] (b) growing the non-human organism or a part thereof under conditions which permit the production of gamma-tocopherol or a composition comprising gamma-tocopherol in said non-human organism or in the culture medium surrounding said non-human organism.

[45981] A further embodiment of the present invention relates to a process for the production of gamma-tocopherol, which comprises
[45982] (a) increasing or generating one or more activities selected from the group consisting of yer106w-protein in an organelle, preferably in plastids or mitochondria, especially in plastids, of a non-human organism or a part thereof, preferably a microorganism, a plant cell, a plant or a part thereof, as compared to a corresponding non-transformed wild type non-human organism or a part thereof; and
[45983] (b) growing the non-human organism or a part thereof under conditions which permit the production of gamma-tocopherol or a composition comprising gamma-tocopherol in said non-human organism or in the culture medium surrounding said non-human organism.

[45984] A further embodiment of the present invention relates to a process for the production of gamma-tocopherol, which comprises
[45985] (a) increasing or generating one or more activities selected from the group consisting of small nuclear ribonucleoprotein in an organelle, preferably in plastids or mitochondria, especially in plastids, of a non-human organism or a part thereof, preferably a microorganism, a plant cell, a plant or a part thereof, as compared to a corresponding non-transformed wild type non-human organism or a part thereof; and
[45986] (b) growing the non-human organism or a part thereof under conditions which permit the production of gamma-tocopherol or a composition comprising gamma-tocopherol in said non-human organism or in the culture medium surrounding said non-human organism.

[45987] A further embodiment of the present invention relates to a process for the production of alpha-tocopherol, which comprises
[45988] (a) increasing or generating one or more activities selected from the group consisting of phosphatidylserine decarboxylase in an organelle, preferably in plastids or mitochondria, especially in plastids, of a non-human organism or a part thereof, preferably a microorganism, a plant cell, a plant or a part thereof, as compared to a corresponding non-transformed wild type non-human organism or a part thereof; and
[45989] (b) growing the non-human organism or a part thereof under conditions which permit the production of alpha-tocopherol or a composition comprising alpha-tocopherol in said non-human organism or in the culture medium surrounding said non-human organism.

[45990] A further embodiment of the present invention relates to a process for the production of gamma-tocopherol, which comprises
[45991] (a) increasing or generating one or more activities selected from the group consisting of polygalacturonase in an organelle, preferably in plastids or mitochondria, especially in plastids, of a non-human organism or a part thereof, preferably a microorganism, a plant cell, a plant or a part thereof, as compared to a corresponding non-transformed wild type non-human organism or a part thereof; and
[45992] (b) growing the non-human organism or a part thereof under conditions which permit the production of gamma-tocopherol or a composition comprising gamma-tocopherol in said non-human organism or in the culture medium surrounding said non-human organism.

[45993] A further embodiment of the present invention relates to a process for the production of gamma-tocopherol, which comprises
[45994] (a) increasing or generating one or more activities selected from the group consisting of ylr178c-protein in an organelle, preferably in plastids or mitochondria, especially in plastids, of a non-human organism or a part thereof, preferably a microorganism, a plant cell, a plant or a part thereof, as compared to a corresponding non-transformed wild type non-human organism or a part thereof; and
[45995] (b) growing the non-human organism or a part thereof under conditions which permit the production of gamma-tocopherol or a composition comprising gamma-tocopherol in said non-human organism or in the culture medium surrounding said non-human organism.

[45996] A further embodiment of the present invention relates to a process for the production of alpha-tocopherol, which comprises
[45997] (a) increasing or generating one or more activities selected from the group consisting of adenylosuccinate lyase in an organelle, preferably in plastids or mitochondria, especially in plastids, of a non-human organism or a part thereof, preferably a microorganism, a plant cell, a plant or a part thereof, as compared to a corresponding non-transformed wild type non-human organism or a part thereof; and
[45998] (b) growing the non-human organism or a part thereof under conditions which permit the production of alpha-tocopherol or a composition comprising alpha-tocopherol in said non-human organism or in the culture medium surrounding said non-human organism.

[45999] A further embodiment of the present invention relates to a process for the production of alpha-tocopherol, which comprises
[46000] (a) increasing or generating one or more activities selected from the group consisting of ypr170c-protein in an organelle, preferably in plastids or mitochondria, especially in plastids, of a non-human organism or a part thereof, preferably a microorganism, a plant cell, a plant or a part thereof, as compared to a corresponding non-transformed wild type non-human organism or a part thereof; and
[46001] (b) growing the non-human organism or a part thereof under conditions which permit the production of alpha-tocopherol or a composition comprising alpha-tocopherol in said non-human organism or in the culture medium surrounding said non-human organism.

[46002] A further embodiment of the present invention relates to a process for the production of alpha-tocopherol, which comprises
[46003] (a1) increasing or generating the activity of a polypeptide comprising a polypeptide as depicted in the respective line in column 5 or 8 of Table II, application no. 7, or a homolog or fragment thereof, a consensus sequence or at least one polypeptide motif as depicted in column 8 of Table IV, application no. 7, whereby the respective line disclose in column 7 the fine chemical alpha-tocopherol; or
[46004] increasing or generating the activity of an expression product of one or more nucleic acid molecule(s) comprising a polynucleotide as depicted in the respective line in column 5 or 8 of Table I, application no. 7, preferably the coding region thereof, or a homolog or a fragment thereof, whereby the respective line disclose in column 7 the fine chemical alpha-tocopherol;
[46005] in an organelle, preferably in plastids or mitochondria, especially in plastids, in a non-human organism or a part thereof; preferably a microorganism, a plant cell, a plant or a part thereof, as compared to a corresponding non-transformed wild type non-human organism or a part thereof; or
[46006] (a2) increasing or generating the activity of a polypeptide comprising a polypeptide as depicted in the respective line in column 5 or 8 of Table II, application no. 7, or a homolog or a fragment thereof, a consensus sequence or at least one polypeptide motif as depicted in the respective line in column 8 of Table IV, application no. 7, which is joined to a transit peptide, whereby the respective line disclose in column 7 the fine chemical alpha-tocopherol; or
[46007] increasing or generating the activity of an expression product of one or more nucleic acid molecule(s) comprising a polynucleotide as depicted in the respective line in column 5 or 8 of Table I, application no. 7, preferably the coding region thereof, or a homolog or a fragment thereof, which is joined to a nucleic acid sequence encoding an organelle localization sequence, preferably a plastid or a mitochondrion localization sequence, especially a plastid localization sequence, whereby the respective line disclose in column 7 the fine chemical alpha-tocopherol;
[46008] in a non-human organism or a part thereof; preferably a microorganism, a plant cell, a plant or a part thereof, as compared to a corresponding non-transformed wild type non-human organism or a part thereof; or
[46009] (a3) increasing or generating the activity of a polypeptide comprising a polypeptide as depicted in the respective line in column 5 or 8 of Table II, application no. 7, or a homolog or a fragment thereof, a consensus sequence or at least one polypeptide motif as depicted in the respective line in column 8 of Table IV, application no. 7, whereby the respective line disclose in column 7 the fine chemical alpha-tocopherol; or
[46010] increasing or generating the activity of an expression product of one or more nucleic acid molecule(s) comprising a polynucleotide as depicted in the respective line in column 5 or 8 of Table I, application no. 7, preferably the coding region thereof, or a homolog or a fragment thereof, whereby the respective line disclose in column 7 the fine chemical alpha-tocopherol;
[46011] in an organelle, preferably in plastids or mitochondria, especially in plastids, in a non-human organism or a part thereof; preferably a microorganism, a plant cell, a plant or a part thereof, through transformation of the organelle, as compared to a corresponding non-transformed wild type non-human organism or a part thereof;
[46012] and
[46013] (b) growing the non-human organism under conditions which permit the production of alpha-tocopherol, or a composition comprising alpha-tocopherol in said non-human organism or in the culture medium surrounding said non-human organism.

[46014] A further embodiment of the present invention relates to a process for the production of gamma-tocopherol, which comprises
[46015] (a1) increasing or generating the activity of a polypeptide comprising a polypeptide as depicted in the respective line in column 5 or 8 of Table II, application no. 7, or a homolog or fragment thereof, a consensus sequence or at least one polypeptide motif as depicted in column 8 of Table IV, application no. 7, whereby the respective line disclose in column 7 the fine chemical gamma-tocopherol; or
[46016] increasing or generating the activity of an expression product of one or more nucleic acid molecule(s) comprising a polynucleotide as depicted in the respective line in column 5 or 8 of Table I, application no. 7, preferably the coding region thereof, or a homolog or a fragment thereof, whereby the respective line disclose in column 7 the fine chemical gamma-tocopherol;
[46017] in an organelle, preferably in plastids or mitochondria, especially in plastids, in a non-human organism or a part thereof; preferably a microorganism, a plant cell, a plant or a part thereof, as compared to a corresponding non-transformed wild type non-human organism or a part thereof; or
[46018] (a2) increasing or generating the activity of a polypeptide comprising a polypeptide as depicted in the respective line in column 5 or 8 of Table II, application no. 7, or a homolog or a fragment thereof, a consensus sequence or at least one polypeptide motif as depicted in the respective line in column 8 of Table IV, application no. 7, which is joined to a transit peptide, whereby the respective line disclose in column 7 the fine chemical gamma-tocopherol; or
[46019] increasing or generating the activity of an expression product of one or more nucleic acid molecule(s) comprising a polynucleotide as depicted in the respective line in column 5 or 8 of Table I, application no. 7, preferably the coding region thereof, or a homolog or a fragment thereof, which is joined to a nucleic acid sequence encoding an organelle localization sequence, preferably a plastid or a mitochondrion localization sequence, especially a plastid localization sequence, whereby the respective line disclose in column 7 the fine chemical gamma-tocopherol;
[46020] in a non-human organism or a part thereof; preferably a microorganism, a plant cell, a plant or a part thereof, as compared to a corresponding non-transformed wild type non-human organism or a part thereof; or
[46021] (a3) increasing or generating the activity of a polypeptide comprising a polypeptide as depicted in the respective line in column 5 or 8 of Table II, application no. 7, or a homolog or a fragment thereof, a consensus sequence or at least one polypeptide motif as depicted in the respective line in column 8 of Table IV, application no. 7, whereby the respective line disclose in column 7 the fine chemical gamma-tocopherol; or
[46022] increasing or generating the activity of an expression product of one or more nucleic acid molecule(s) comprising a polynucleotide as depicted in the respective line in column 5 or 8 of Table I, application no. 7, preferably the coding region thereof, or a homolog or a fragment thereof, whereby the respective line disclose in column 7 the fine chemical gamma-tocopherol;
[46023] in an organelle, preferably in plastids or mitochondria, especially in plastids, in a non-human organism or a part thereof; preferably a microorganism, a plant cell, a plant or a part thereof, through transformation of the organelle, as compared to a corresponding non-transformed wild type non-human organism or a part thereof;
[46024] and
[46025] (b) growing the non-human organism under conditions which permit the production of gamma-tocopherol, or a composition comprising gamma-tocopherol in said non-human organism or in the culture medium surrounding said non-human organism.

[46026] Accordingly, the present invention relates to a process for the production of alpha-tocopherol, which comprises
[46027] (a) increasing or generating the activity of a pyruvate kinase in the cytosol of a cell of a non-human organism or a part thereof, preferably a microorganism, a plant cell, a plant or a part thereof, as compared to a corresponding non-transformed wild type non-human organism or a part thereof; and
[46028] (b) growing the non-human organism or a part thereof under conditions which permit the production of alpha-tocopherol or a composition comprising alpha-tocopherol in said non-human organism or in the culture medium surrounding said non-human organism.

[46029] Accordingly, the present invention relates to a process for the production of gamma-tocopherol, which comprises
[46030] (a) increasing or generating the activity of a pyruvate kinase in the cytosol of a cell of a non-human organism or a part thereof, preferably a microorganism, a plant cell, a plant or a part thereof, as compared to a corresponding non-transformed wild type non-human organism or a part thereof; and
[46031] (b) growing the non-human organism or a part thereof under conditions which permit the production of gamma-tocopherol or a composition comprising gamma-tocopherol in said non-human organism or in the culture medium surrounding said non-human organism.

[46032] Accordingly, the present invention relates to a process for the production of alpha-tocopherol, which comprises
[46033] (a) increasing or generating the activity of a glucose-6-phosphate 1-dehydrogenase in the cytosol of a cell of a non-human organism or a part thereof, preferably a microorganism, a plant cell, a plant or a part thereof, as compared to a corresponding non-transformed wild type non-human organism or a part thereof; and
[46034] (b) growing the non-human organism or a part thereof under conditions which permit the production of alpha-tocopherol or a composition comprising alpha-tocopherol in said non-human organism or in the culture medium surrounding said non-human organism.

[46035] Accordingly, the present invention relates to a process for the production of gamma-tocopherol, which comprises
[46036] (a) increasing or generating the activity of a At1g29350-protein in the cytosol of a cell of a non-human organism or a part thereof, preferably a microorganism, a plant cell, a plant or a part thereof, as compared to a corresponding non-transformed wild type non-human organism or a part thereof; and
[46037] (b) growing the non-human organism or a part thereof under conditions which permit the production of gamma-tocopherol or a composition comprising gamma-tocopherol in said non-human organism or in the culture medium surrounding said non-human organism.

[46038] Accordingly, the present invention relates to a process for the production of gamma-tocopherol, which comprises
[46039] (a) increasing or generating the activity of a transcriptional regulator in the cytosol of a cell of a non-human organism or a part thereof, preferably a microorganism, a plant cell, a plant or a part thereof, as compared to a corresponding non-transformed wild type non-human organism or a part thereof; and
[46040] (b) growing the non-human organism or a part thereof under conditions which permit the production of gamma-tocopherol or a composition comprising gamma-tocopherol in said non-human organism or in the culture medium surrounding said non-human organism.

[46041] Accordingly, the present invention relates to a process for the production of gamma-tocopherol, which comprises
[46042] (a) increasing or generating the activity of a protein kinase in the cytosol of a cell of a non-human organism or a part thereof, preferably a microorganism, a plant cell, a plant or a part thereof, as compared to a corresponding non-transformed wild type non-human organism or a part thereof; and
[46043] (b) growing the non-human organism or a part thereof under conditions which permit the production of gamma-tocopherol or a composition comprising gamma-tocopherol in said non-human organism or in the culture medium surrounding said non-human organism.

[46044] Accordingly, the present invention relates to a process for the production of gamma-tocopherol, which comprises
[46045] (a) increasing or generating the activity of a calcium-dependent protein kinase in the cytosol of a cell of a non-human organism or a part thereof, preferably a microorganism, a plant cell, a plant or a part thereof, as compared to a corresponding non-transformed wild type non-human organism or a part thereof; and
[46046] (b) growing the non-human organism or a part thereof under conditions which permit the production of gamma-tocopherol or a composition comprising gamma-tocopherol in said non-human organism or in the culture medium surrounding said non-human organism.

[46047] Accordingly, the present invention relates to a process for the production of alpha-tocopherol, which comprises
[46048] (a) increasing or generating the activity of a protein phosphatase in the cytosol of a cell of a non-human organism or a part thereof, preferably a microorganism, a plant cell, a plant or a part thereof, as compared to a corresponding non-transformed wild type non-human organism or a part thereof; and
[46049] (b) growing the non-human organism or a part thereof under conditions which permit the production of alpha-tocopherol or a composition comprising alpha-tocopherol in said non-human organism or in the culture medium surrounding said non-human organism.

[46050] Accordingly, the present invention relates to a process for the production of alpha-tocopherol, which comprises
[46051] (a) increasing or generating the activity of a MADS box protein transcription factor in the cytosol of a cell of a non-human organism or a part thereof, preferably a microorganism, a plant cell, a plant or a part thereof, as compared to a corresponding non-transformed wild type non-human organism or a part thereof; and
[46052] (b) growing the non-human organism or a part thereof under conditions which permit the production of alpha-tocopherol or a composition comprising alpha-tocopherol in said non-human organism or in the culture medium surrounding said non-human organism.

[46053] Accordingly, the present invention relates to a process for the production of gamma-tocopherol, which comprises
[46054] (a) increasing or generating the activity of a glutaredoxin in the cytosol of a cell of a non-human organism or a part thereof, preferably a microorganism, a plant cell, a plant or a part thereof, as compared to a corresponding non-transformed wild type non-human organism or a part thereof; and
[46055] (b) growing the non-human organism or a part thereof under conditions which permit the production of gamma-tocopherol or a composition comprising gamma-tocopherol in said non-human organism or in the culture medium surrounding said non-human organism.

[46056] Accordingly, the present invention relates to a process for the production of gamma-tocopherol, which comprises
[46057] (a) increasing or generating the activity of a pyruvate kinase in the cytosol of a cell of a non-human organism or a part thereof, preferably a microorganism, a plant cell, a plant or a part thereof, as compared to a corresponding non-transformed wild type non-human organism or a part thereof; and
[46058] (b) growing the non-human organism or a part thereof under conditions which permit the production of gamma-tocopherol or a composition comprising gamma-tocopherol in said non-human organism or in the culture medium surrounding said non-human organism.

[46059] Accordingly, the present invention relates to a process for the production of alpha-tocopherol, which comprises
[46060] (a) increasing or generating the activity of a ankyrin repeat family protein in the cytosol of a cell of a non-human organism or a part thereof, preferably a microorganism, a plant cell, a plant or a part thereof, as compared to a corresponding non-transformed wild type non-human organism or a part thereof; and
[46061] (b) growing the non-human organism or a part thereof under conditions which permit the production of alpha-tocopherol or a composition comprising alpha-tocopherol in said non-human organism or in the culture medium surrounding said non-human organism.

[46062] Accordingly, the present invention relates to a process for the production of alpha-tocopherol, which comprises
[46063] (a) increasing or generating the activity of a protein phosphatase in the cytosol of a cell of a non-human organism or a part thereof, preferably a microorganism, a plant cell, a plant or a part thereof, as compared to a corresponding non-transformed wild type non-human organism or a part thereof; and
[46064] (b) growing the non-human organism or a part thereof under conditions which permit the production of alpha-tocopherol or a composition comprising alpha-tocopherol in said non-human organism or in the culture medium surrounding said non-human organism.

[46065] Accordingly, the present invention relates to a process for the production of alpha-tocopherol, which comprises
[46066] (a) increasing or generating the activity of a thioredoxin family protein in the cytosol of a cell of a non-human organism or a part thereof, preferably a microorganism, a plant cell, a plant or a part thereof, as compared to a corresponding non-transformed wild type non-human organism or a part thereof; and
[46067] (b) growing the non-human organism or a part thereof under conditions which permit the production of alpha-tocopherol or a composition comprising alpha-tocopherol in said non-human organism or in the culture medium surrounding said non-human organism.

[46068] Accordingly, the present invention relates to a process for the production of alpha-tocopherol, which comprises
[46069] (a) increasing or generating the activity of a harpin-induced family protein in the cytosol of a cell of a non-human organism or a part thereof, preferably a microorganism, a plant cell, a plant or a part thereof, as compared to a corresponding non-transformed wild type non-human organism or a part thereof; and
[46070] (b) growing the non-human organism or a part thereof under conditions which permit the production of alpha-tocopherol or a composition comprising alpha-tocopherol in said non-human organism or in the culture medium surrounding said non-human organism.

[46071] Accordingly, the present invention relates to a process for the production of gamma-tocopherol, which comprises
[46072] (a) increasing or generating the activity of a harpin-induced family protein in the cytosol of a cell of a non-human organism or a part thereof, preferably a microorganism, a plant cell, a plant or a part thereof, as compared to a corresponding non-transformed wild type non-human organism or a part thereof; and
[46073] (b) growing the non-human organism or a part thereof under conditions which permit the production of gamma-tocopherol or a composition comprising gamma-tocopherol in said non-human organism or in the culture medium surrounding said non-human organism.

[46074] Accordingly, the present invention relates to a process for the production of gamma-tocopherol, which comprises
[46075] (a) increasing or generating the activity of a protein kinase in the cytosol of a cell of a non-human organism or a part thereof, preferably a microorganism, a plant cell, a plant or a part thereof, as compared to a corresponding non-transformed wild type non-human organism or a part thereof; and
[46076] (b) growing the non-human organism or a part thereof under conditions which permit the production of gamma-tocopherol or a composition comprising gamma-tocopherol in said non-human organism or in the culture medium surrounding said non-human organism.

[46077] Accordingly, the present invention relates to a process for the production of gamma-tocopherol, which comprises
[46078] (a) increasing or generating the activity of a monthiol glutaredoxin in the cytosol of a cell of a non-human organism or a part thereof, preferably a microorganism, a plant cell, a plant or a part thereof, as compared to a corresponding non-transformed wild type non-human organism or a part thereof; and
[46079] (b) growing the non-human organism or a part thereof under conditions which permit the production of gamma-tocopherol or a composition comprising gamma-tocopherol in said non-human organism or in the culture medium surrounding said non-human organism.

[46080] Accordingly, the present invention relates to a process for the production of gamma-tocopherol, which comprises
[46081] (a) increasing or generating the activity of a glutaredoxin in the cytosol of a cell of a non-human organism or a part thereof, preferably a microorganism, a plant cell, a plant or a part thereof, as compared to a corresponding non-transformed wild type non-human organism or a part thereof; and
[46082] (b) growing the non-human organism or a part thereof under conditions which permit the production of gamma-tocopherol or a composition comprising gamma-tocopherol in said non-human organism or in the culture medium surrounding said non-human organism.

[46083] Accordingly, the present invention relates to a process for the production of alpha-tocopherol, which comprises
[46084] (a) increasing or generating the activity of a transcription factor in the cytosol of a cell of a non-human organism or a part thereof, preferably a microorganism, a plant cell, a plant or a part thereof, as compared to a corresponding non-transformed wild type non-human organism or a part thereof; and
[46085] (b) growing the non-human organism or a part thereof under conditions which permit the production of alpha-tocopherol or a composition comprising alpha-tocopherol in said non-human organism or in the culture medium surrounding said non-human organism.

[46086] Accordingly, the present invention relates to a process for the production of alpha-tocopherol, which comprises
[46087] (a) increasing or generating the activity of a monothiol glutaredoxin in the cytosol of a cell of a non-human organism or a part thereof, preferably a microorganism, a plant cell, a plant or a part thereof, as compared to a corresponding non-transformed wild type non-human organism or a part thereof; and
[46088] (b) growing the non-human organism or a part thereof under conditions which permit the production of alpha-tocopherol or a composition comprising alpha-tocopherol in said non-human organism or in the culture medium surrounding said non-human organism.

[46089] Accordingly, the present invention relates to a process for the production of gamma-tocopherol, which comprises
[46090] (a) increasing or generating the activity of a monothiol glutaredoxin in the cytosol of a cell of a non-human organism or a part thereof, preferably a microorganism, a plant cell, a plant or a part thereof, as compared to a corresponding non-transformed wild type non-human organism or a part thereof; and
[46091] (b) growing the non-human organism or a part thereof under conditions which permit the production of gamma-tocopherol or a composition comprising gamma-tocopherol in said non-human organism or in the culture medium surrounding said non-human organism.

[46092] Accordingly, the present invention relates to a process for the production of alpha-tocopherol, which comprises
[46093] (a) increasing or generating the activity of a monothiol glutaredoxin in the cytosol of a cell of a non-human organism or a part thereof, preferably a microorganism, a plant cell, a plant or a part thereof, as compared to a corresponding non-transformed wild type non-human organism or a part thereof; and
[46094] (b) growing the non-human organism or a part thereof under conditions which permit the production of alpha-tocopherol or a composition comprising alpha-tocopherol in said non-human organism or in the culture medium surrounding said non-human organism.

[46095] Accordingly, the present invention relates to a process for the production of alpha-tocopherol, which comprises
[46096] (a) increasing or generating the activity of a monothiol glutaredoxin in the cytosol of a cell of a non-human organism or a part thereof, preferably a microorganism, a plant cell, a plant or a part thereof, as compared to a corresponding non-transformed wild type non-human organism or a part thereof; and
[46097] (b) growing the non-human organism or a part thereof under conditions which permit the production of alpha-tocopherol or a composition comprising alpha-tocopherol in said non-human organism or in the culture medium surrounding said non-human organism.

[46098] Accordingly, the present invention relates to a process for the production of alpha-tocopherol, which comprises
[46099] (a) increasing or generating the activity of a protein phosphatase in the cytosol of a cell of a non-human organism or a part thereof, preferably a microorganism, a plant cell, a plant or a part thereof, as compared to a corresponding non-transformed wild type non-human organism or a part thereof; and
[46100] (b) growing the non-human organism or a part thereof under conditions which permit the production of alpha-tocopherol or a composition comprising alpha-tocopherol in said non-human organism or in the culture medium surrounding said non-human organism.

[46101] Accordingly, the present invention relates to a process for the production of alpha-tocopherol, which comprises
[46102] (a) increasing or generating the activity of a cyclin D in the cytosol of a cell of a non-human organism or a part thereof, preferably a microorganism, a plant cell, a plant or a part thereof, as compared to a corresponding non-transformed wild type non-human organism or a part thereof; and
[46103] (b) growing the non-human organism or a part thereof under conditions which permit the production of alpha-tocopherol or a composition comprising alpha-tocopherol in said non-human organism or in the culture medium surrounding said non-human organism.

[46104] Accordingly, the present invention relates to a process for the production of alpha-tocopherol, which comprises
[46105] (a) increasing or generating the activity of a calcium-dependent protein kinase in the cytosol of a cell of a non-human organism or a part thereof, preferably a microorganism, a plant cell, a plant or a part thereof, as compared to a corresponding non-transformed wild type non-human organism or a part thereof; and
[46106] (b) growing the non-human organism or a part thereof under conditions which permit the production of alpha-tocopherol or a composition comprising alpha-tocopherol in said non-human organism or in the culture medium surrounding said non-human organism.

[46107] Accordingly, the present invention relates to a process for the production of gamma-tocopherol, which comprises
[46108] (a) increasing or generating the activity of a calcium-dependent protein kinase in the cytosol of a cell of a non-human organism or a part thereof, preferably a microorganism, a plant cell, a plant or a part thereof, as compared to a corresponding non-transformed wild type non-human organism or a part thereof; and
[46109] (b) growing the non-human organism or a part thereof under conditions which permit the production of gamma-tocopherol or a composition comprising gamma-tocopherol in said non-human organism or in the culture medium surrounding said non-human organism.

[46110] Accordingly, the present invention relates to a process for the production of alpha-tocopherol, which comprises
[46111] (a) increasing or generating the activity of a RNA-binding protein in the cytosol of a cell of a non-human organism or a part thereof, preferably a microorganism, a plant cell, a plant or a part thereof, as compared to a corresponding non-transformed wild type non-human organism or a part thereof; and
[46112] (b) growing the non-human organism or a part thereof under conditions which permit the production of alpha-tocopherol or a composition comprising alpha-tocopherol in said non-human organism or in the culture medium surrounding said non-human organism.

[46113] Accordingly, the present invention relates to a process for the production of gamma-tocopherol, which comprises
[46114] (a) increasing or generating the activity of a RNA-binding protein in the cytosol of a cell of a non-human organism or a part thereof, preferably a microorganism, a plant cell, a plant or a part thereof, as compared to a corresponding non-transformed wild type non-human organism or a part thereof; and
[46115] (b) growing the non-human organism or a part thereof under conditions which permit the production of gamma-tocopherol or a composition comprising gamma-tocopherol in said non-human organism or in the culture medium surrounding said non-human organism.

[46116] Accordingly, the present invention relates to a process for the production of gamma-tocopherol, which comprises
[46117] (a) increasing or generating the activity of a zinc finger protein in the cytosol of a cell of a non-human organism or a part thereof, preferably a microorganism, a plant cell, a plant or a part thereof, as compared to a corresponding non-transformed wild type non-human organism or a part thereof; and
[46118] (b) growing the non-human organism or a part thereof under conditions which permit the production of gamma-tocopherol or a composition comprising gamma-tocopherol in said non-human organism or in the culture medium surrounding said non-human organism.

[46119] Accordingly, the present invention relates to a process for the production of gamma-tocopherol, which comprises
[46120] (a) increasing or generating the activity of a NAD-dependent epimerase/dehydratase in the cytosol of a cell of a non-human organism or a part thereof, preferably a microorganism, a plant cell, a plant or a part thereof, as compared to a corresponding non-transformed wild type non-human organism or a part thereof; and
[46121] (b) growing the non-human organism or a part thereof under conditions which permit the production of gamma-tocopherol or a composition comprising gamma-tocopherol in said non-human organism or in the culture medium surrounding said non-human organism.

[46122] Accordingly, the present invention relates to a process for the production of gamma-tocopherol, which comprises
[46123] (a) increasing or generating the activity of a transcriptional regulator in the cytosol of a cell of a non-human organism or a part thereof, preferably a microorganism, a plant cell, a plant or a part thereof, as compared to a corresponding non-transformed wild type non-human organism or a part thereof; and
[46124] (b) growing the non-human organism or a part thereof under conditions which permit the production of gamma-tocopherol or a composition comprising gamma-tocopherol in said non-human organism or in the culture medium surrounding said non-human organism.

[46125] Accordingly, the present invention relates to a process for the production of alpha-tocopherol, which comprises
[46126] (a) increasing or generating the activity of a ThiF family protein in the cytosol of a cell of a non-human organism or a part thereof, preferably a microorganism, a plant cell, a plant or a part thereof, as compared to a corresponding non-transformed wild type non-human organism or a part thereof; and
[46127] (b) growing the non-human organism or a part thereof under conditions which permit the production of alpha-tocopherol or a composition comprising alpha-tocopherol in said non-human organism or in the culture medium surrounding said non-human organism.

[46128] Accordingly, the present invention relates to a process for the production of alpha-tocopherol, which comprises
[46129] (a) increasing or generating the activity of a isopropylmalate isomerase large subunit in the cytosol of a cell of a non-human organism or a part thereof, preferably a microorganism, a plant cell, a plant or a part thereof, as compared to a corresponding non-transformed wild type non-human organism or a part thereof; and
[46130] (b) growing the non-human organism or a part thereof under conditions which permit the production of alpha-tocopherol or a composition comprising alpha-tocopherol in said non-human organism or in the culture medium surrounding said non-human organism.

[46131] Accordingly, the present invention relates to a process for the production of alpha-tocopherol, which comprises
[46132] (a) increasing or generating the activity of a hydrolase in the cytosol of a cell of a non-human organism or a part thereof, preferably a microorganism, a plant cell, a plant or a part thereof, as compared to a corresponding non-transformed wild type non-human organism or a part thereof; and
[46133] (b) growing the non-human organism or a part thereof under conditions which permit the production of alpha-tocopherol or a composition comprising alpha-tocopherol in said non-human organism or in the culture medium surrounding said non-human organism.

[46134] Accordingly, the present invention relates to a process for the production of gamma-tocopherol, which comprises
[46135] (a) increasing or generating the activity of a hydrolase in the cytosol of a cell of a non-human organism or a part thereof, preferably a microorganism, a plant cell, a plant or a part thereof, as compared to a corresponding non-transformed wild type non-human organism or a part thereof; and
[46136] (b) growing the non-human organism or a part thereof under conditions which permit the production of gamma-tocopherol or a composition comprising gamma-tocopherol in said non-human organism or in the culture medium surrounding said non-human organism.

[46137] Accordingly, the present invention relates to a process for the production of gamma-tocopherol, which comprises
[46138] (a) increasing or generating the activity of a electron transfer flavoprotein subunit beta in the cytosol of a cell of a non-human organism or a part thereof, preferably a microorganism, a plant cell, a plant or a part thereof, as compared to a corresponding non-transformed wild type non-human organism or a part thereof; and
[46139] (b) growing the non-human organism or a part thereof under conditions which permit the production of gamma-tocopherol or a composition comprising gamma-tocopherol in said non-human organism or in the culture medium surrounding said non-human organism.

[46140] Accordingly, the present invention relates to a process for the production of gamma-tocopherol, which comprises
[46141] (a) increasing or generating the activity of a threonine synthase in the cytosol of a cell of a non-human organism or a part thereof, preferably a microorganism, a plant cell, a plant or a part thereof, as compared to a corresponding non-transformed wild type non-human organism or a part thereof; and
[46142] (b) growing the non-human organism or a part thereof under conditions which permit the production of gamma-tocopherol or a composition comprising gamma-tocopherol in said non-human organism or in the culture medium surrounding said non-human organism.

[46143] Accordingly, the present invention relates to a process for the production of alpha-tocopherol, which comprises
[46144] (a) increasing or generating the activity of a glucose dehydrogenase in the cytosol of a cell of a non-human organism or a part thereof, preferably a microorganism, a plant cell, a plant or a part thereof, as compared to a corresponding non-transformed wild type non-human organism or a part thereof; and
[46145] (b) growing the non-human organism or a part thereof under conditions which permit the production of alpha-tocopherol or a composition comprising alpha-tocopherol in said non-human organism or in the culture medium surrounding said non-human organism.

[46146] Accordingly, the present invention relates to a process for the production of gamma-tocopherol, which comprises
[46147] (a) increasing or generating the activity of a glucose dehydrogenase in the cytosol of a cell of a non-human organism or a part thereof, preferably a microorganism, a plant cell, a plant or a part thereof, as compared to a corresponding non-transformed wild type non-human organism or a part thereof; and
[46148] (b) growing the non-human organism or a part thereof under conditions which permit the production of gamma-tocopherol or a composition comprising gamma-tocopherol in said non-human organism or in the culture medium surrounding said non-human organism.

[46149] Accordingly, the present invention relates to a process for the production of gamma-tocopherol, which comprises
[46150] (a) increasing or generating the activity of a serine protease in the cytosol of a cell of a non-human organism or a part thereof, preferably a microorganism, a plant cell, a plant or a part thereof, as compared to a corresponding non-transformed wild type non-human organism or a part thereof; and
[46151] (b) growing the non-human organism or a part thereof under conditions which permit the production of gamma-tocopherol or a composition comprising gamma-tocopherol in said non-human organism or in the culture medium surrounding said non-human organism.

[46152] Accordingly, the present invention relates to a process for the production of alpha-tocopherol, which comprises
[46153] (a) increasing or generating the activity of a geranyltranstransferase in the cytosol of a cell of a non-human organism or a part thereof, preferably a microorganism, a plant cell, a plant or a part thereof, as compared to a corresponding non-transformed wild type non-human organism or a part thereof; and
[46154] (b) growing the non-human organism or a part thereof under conditions which permit the production of alpha-tocopherol or a composition comprising alpha-tocopherol in said non-human organism or in the culture medium surrounding said non-human organism.

[46155] Accordingly, the present invention relates to a process for the production of gamma-tocopherol, which comprises
[46156] (a) increasing or generating the activity of a ATP-binding component of a transport system in the cytosol of a cell of a non-human organism or a part thereof, preferably a microorganism, a plant cell, a plant or a part thereof, as compared to a corresponding non-transformed wild type non-human organism or a part thereof; and
[46157] (b) growing the non-human organism or a part thereof under conditions which permit the production of gamma-tocopherol or a composition comprising gamma-tocopherol in said non-human organism or in the culture medium surrounding said non-human organism.

[46158] Accordingly, the present invention relates to a process for the production of alpha-tocopherol, which comprises
[46159] (a) increasing or generating the activity of a 3-deoxy-D-arabinoheptulosonate-7-phosphatesynthase in the cytosol of a cell of a non-human organism or a part thereof, preferably a microorganism, a plant cell, a plant or a part thereof, as compared to a corresponding non-transformed wild type non-human organism or a part thereof; and
[46160] (b) growing the non-human organism or a part thereof under conditions which permit the production of alpha-tocopherol or a composition comprising alpha-tocopherol in said non-human organism or in the culture medium surrounding said non-human organism.

[46161] Accordingly, the present invention relates to a process for the production of gamma-tocopherol, which comprises
[46162] (a) increasing or generating the activity of a major facilitator superfamily transporter protein in the cytosol of a cell of a non-human organism or a part thereof, preferably a microorganism, a plant cell, a plant or a part thereof, as compared to a corresponding non-transformed wild type non-human organism or a part thereof; and
[46163] (b) growing the non-human organism or a part thereof under conditions which permit the production of gamma-tocopherol or a composition comprising gamma-tocopherol in said non-human organism or in the culture medium surrounding said non-human organism.

[46164] Accordingly, the present invention relates to a process for the production of alpha-tocopherol, which comprises
[46165] (a) increasing or generating the activity of a b1163-protein in the cytosol of a cell of a non-human organism or a part thereof, preferably a microorganism, a plant cell, a plant or a part thereof, as compared to a corresponding non-transformed wild type non-human organism or a part thereof; and
[46166] (b) growing the non-human organism or a part thereof under conditions which permit the production of alpha-tocopherol or a composition comprising alpha-tocopherol in said non-human organism or in the culture medium surrounding said non-human organism.

[46167] Accordingly, the present invention relates to a process for the production of gamma-tocopherol, which comprises
[46168] (a) increasing or generating the activity of a DNA polymerase subunit in the cytosol of a cell of a non-human organism or a part thereof, preferably a microorganism, a plant cell, a plant or a part thereof, as compared to a corresponding non-transformed wild type non-human organism or a part thereof; and
[46169] (b) growing the non-human organism or a part thereof under conditions which permit the production of gamma-tocopherol or a composition comprising gamma-tocopherol in said non-human organism or in the culture medium surrounding said non-human organism.

[46170] Accordingly, the present invention relates to a process for the production of alpha-tocopherol, which comprises
[46171] (a) increasing or generating the activity of a b1219-protein in the cytosol of a cell of a non-human organism or a part thereof, preferably a microorganism, a plant cell, a plant or a part thereof, as compared to a corresponding non-transformed wild type non-human organism or a part thereof; and
[46172] (b) growing the non-human organism or a part thereof under conditions which permit the production of alpha-tocopherol or a composition comprising alpha-tocopherol in said non-human organism or in the culture medium surrounding said non-human organism.

[46173] Accordingly, the present invention relates to a process for the production of gamma-tocopherol, which comprises
[46174] (a) increasing or generating the activity of a b1234-protein in the cytosol of a cell of a non-human organism or a part thereof, preferably a microorganism, a plant cell, a plant or a part thereof, as compared to a corresponding non-transformed wild type non-human organism or a part thereof; and
[46175] (b) growing the non-human organism or a part thereof under conditions which permit the production of gamma-tocopherol or a composition comprising gamma-tocopherol in said non-human organism or in the culture medium surrounding said non-human organism.

[46176] Accordingly, the present invention relates to a process for the production of gamma-tocopherol, which comprises
[46177] (a) increasing or generating the activity of a NADP-dependent malic enzyme in the cytosol of a cell of a non-human organism or a part thereof, preferably a microorganism, a plant cell, a plant or a part thereof, as compared to a corresponding non-transformed wild type non-human organism or a part thereof; and
[46178] (b) growing the non-human organism or a part thereof under conditions which permit the production of gamma-tocopherol or a composition comprising gamma-tocopherol in said non-human organism or in the culture medium surrounding said non-human organism.

[46179] Accordingly, the present invention relates to a process for the production of gamma-tocopherol, which comprises
[46180] (a) increasing or generating the activity of a b1522-protein in the cytosol of a cell of a non-human organism or a part thereof, preferably a microorganism, a plant cell, a plant or a part thereof, as compared to a corresponding non-transformed wild type non-human organism or a part thereof; and
[46181] (b) growing the non-human organism or a part thereof under conditions which permit the production of gamma-tocopherol or a composition comprising gamma-tocopherol in said non-human organism or in the culture medium surrounding said non-human organism.

[46182] Accordingly, the present invention relates to a process for the production of alpha-tocopherol, which comprises
[46183] (a) increasing or generating the activity of a acid shock protein in the cytosol of a cell of a non-human organism or a part thereof, preferably a microorganism, a plant cell, a plant or a part thereof, as compared to a corresponding non-transformed wild type non-human organism or a part thereof; and
[46184] (b) growing the non-human organism or a part thereof under conditions which permit the production of alpha-tocopherol or a composition comprising alpha-tocopherol in said non-human organism or in the culture medium surrounding said non-human organism.

[46185] Accordingly, the present invention relates to a process for the production of alpha-tocopherol, which comprises
[46186] (a) increasing or generating the activity of a transport protein in the cytosol of a cell of a non-human organism or a part thereof, preferably a microorganism, a plant cell, a plant or a part thereof, as compared to a corresponding non-transformed wild type non-human organism or a part thereof; and
[46187] (b) growing the non-human organism or a part thereof under conditions which permit the production of alpha-tocopherol or a composition comprising alpha-tocopherol in said non-human organism or in the culture medium surrounding said non-human organism.

[46188] Accordingly, the present invention relates to a process for the production of gamma-tocopherol, which comprises
[46189] (a) increasing or generating the activity of a trehalose-phosphatase in the cytosol of a cell of a non-human organism or a part thereof, preferably a microorganism, a plant cell, a plant or a part thereof, as compared to a corresponding non-transformed wild type non-human organism or a part thereof; and
[46190] (b) growing the non-human organism or a part thereof under conditions which permit the production of gamma-tocopherol or a composition comprising gamma-tocopherol in said non-human organism or in the culture medium surrounding said non-human organism.

[46191] Accordingly, the present invention relates to a process for the production of gamma-tocopherol, which comprises
[46192] (a) increasing or generating the activity of a b1921-protein in the cytosol of a cell of a non-human organism or a part thereof, preferably a microorganism, a plant cell, a plant or a part thereof, as compared to a corresponding non-transformed wild type non-human organism or a part thereof; and
[46193] (b) growing the non-human organism or a part thereof under conditions which permit the production of gamma-tocopherol or a composition comprising gamma-tocopherol in said non-human organism or in the culture medium surrounding said non-human organism.

[46194] Accordingly, the present invention relates to a process for the production of gamma-tocopherol, which comprises
[46195] (a) increasing or generating the activity of a O-antigen chain length determinant in the cytosol of a cell of a non-human organism or a part thereof, preferably a microorganism, a plant cell, a plant or a part thereof, as compared to a corresponding non-transformed wild type non-human organism or a part thereof; and
[46196] (b) growing the non-human organism or a part thereof under conditions which permit the production of gamma-tocopherol or a composition comprising gamma-tocopherol in said non-human organism or in the culture medium surrounding said non-human organism.

[46197] Accordingly, the present invention relates to a process for the production of alpha-tocopherol, which comprises
[46198] (a) increasing or generating the activity of a colanic acid biosynthesis protein in the cytosol of a cell of a non-human organism or a part thereof, preferably a microorganism, a plant cell, a plant or a part thereof, as compared to a corresponding non-transformed wild type non-human organism or a part thereof; and
[46199] (b) growing the non-human organism or a part thereof under conditions which permit the production of alpha-tocopherol or a composition comprising alpha-tocopherol in said non-human organism or in the culture medium surrounding said non-human organism.

[46200] Accordingly, the present invention relates to a process for the production of gamma-tocopherol, which comprises
[46201] (a) increasing or generating the activity of a b2360-protein in the cytosol of a cell of a non-human organism or a part thereof, preferably a microorganism, a plant cell, a plant or a part thereof, as compared to a corresponding non-transformed wild type non-human organism or a part thereof; and
[46202] (b) growing the non-human organism or a part thereof under conditions which permit the production of gamma-tocopherol or a composition comprising gamma-tocopherol in said non-human organism or in the culture medium surrounding said non-human organism.

[46203] Accordingly, the present invention relates to a process for the production of alpha-tocopherol, which comprises
[46204] (a) increasing or generating the activity of a putative transport system permease protein in the cytosol of a cell of a non-human organism or a part thereof, preferably a microorganism, a plant cell, a plant or a part thereof, as compared to a corresponding non-transformed wild type non-human organism or a part thereof; and
[46205] (b) growing the non-human organism or a part thereof under conditions which permit the production of alpha-tocopherol or a composition comprising alpha-tocopherol in said non-human organism or in the culture medium surrounding said non-human organism.

[46206] Accordingly, the present invention relates to a process for the production of gamma-tocopherol, which comprises
[46207] (a) increasing or generating the activity of a b2548-protein in the cytosol of a cell of a non-human organism or a part thereof, preferably a microorganism, a plant cell, a plant or a part thereof, as compared to a corresponding non-transformed wild type non-human organism or a part thereof; and
[46208] (b) growing the non-human organism or a part thereof under conditions which permit the production of gamma-tocopherol or a composition comprising gamma-tocopherol in said non-human organism or in the culture medium surrounding said non-human organism.

[46209] Accordingly, the present invention relates to a process for the production of gamma-tocopherol, which comprises
[46210] (a) increasing or generating the activity of a b2613-protein in the cytosol of a cell of a non-human organism or a part thereof, preferably a microorganism, a plant cell, a plant or a part thereof, as compared to a corresponding non-transformed wild type non-human organism or a part thereof; and
[46211] (b) growing the non-human organism or a part thereof under conditions which permit the production of gamma-tocopherol or a composition comprising gamma-tocopherol in said non-human organism or in the culture medium surrounding said non-human organism.

[46212] Accordingly, the present invention relates to a process for the production of gamma-tocopherol, which comprises
[46213] (a) increasing or generating the activity of a b2673-protein in the cytosol of a cell of a non-human organism or a part thereof, preferably a microorganism, a plant cell, a plant or a part thereof, as compared to a corresponding non-transformed wild type non-human organism or a part thereof; and
[46214] (b) growing the non-human organism or a part thereof under conditions which permit the production of gamma-tocopherol or a composition comprising gamma-tocopherol in said non-human organism or in the culture medium surrounding said non-human organism.

[46215] Accordingly, the present invention relates to a process for the production of gamma-tocopherol, which comprises
[46216] (a) increasing or generating the activity of a murein transglycosylase in the cytosol of a cell of a non-human organism or a part thereof, preferably a microorganism, a plant cell, a plant or a part thereof, as compared to a corresponding non-transformed wild type non-human organism or a part thereof; and
[46217] (b) growing the non-human organism or a part thereof under conditions which permit the production of gamma-tocopherol or a composition comprising gamma-tocopherol in said non-human organism or in the culture medium surrounding said non-human organism.

[46218] Accordingly, the present invention relates to a process for the production of gamma-tocopherol, which comprises
[46219] (a) increasing or generating the activity of a b2812-protein in the cytosol of a cell of a non-human organism or a part thereof, preferably a microorganism, a plant cell, a plant or a part thereof, as compared to a corresponding non-transformed wild type non-human organism or a part thereof; and
[46220] (b) growing the non-human organism or a part thereof under conditions which permit the production of gamma-tocopherol or a composition comprising gamma-tocopherol in said non-human organism or in the culture medium surrounding said non-human organism.

[46221] Accordingly, the present invention relates to a process for the production of alpha-tocopherol, which comprises
[46222] (a) increasing or generating the activity of a amino-acid acetyltransferase in the cytosol of a cell of a non-human organism or a part thereof, preferably a microorganism, a plant cell, a plant or a part thereof, as compared to a corresponding non-transformed wild type non-human organism or a part thereof; and
[46223] (b) growing the non-human organism or a part thereof under conditions which permit the production of alpha-tocopherol or a composition comprising alpha-tocopherol in said non-human organism or in the culture medium surrounding said non-human organism.

[46224] Accordingly, the present invention relates to a process for the production of gamma-tocopherol, which comprises
[46225] (a) increasing or generating the activity of a amino-acid acetyltransferase in the cytosol of a cell of a non-human organism or a part thereof, preferably a microorganism, a plant cell, a plant or a part thereof, as compared to a corresponding non-transformed wild type non-human organism or a part thereof; and
[46226] (b) growing the non-human organism or a part thereof under conditions which permit the production of gamma-tocopherol or a composition comprising gamma-tocopherol in said non-human organism or in the culture medium surrounding said non-human organism.

[46227] Accordingly, the present invention relates to a process for the production of alpha-tocopherol, which comprises
[46228] (a) increasing or generating the activity of a glycolate utilization protein in the cytosol of a cell of a non-human organism or a part thereof, preferably a microorganism, a plant cell, a plant or a part thereof, as compared to a corresponding non-transformed wild type non-human organism or a part thereof; and
[46229] (b) growing the non-human organism or a part thereof under conditions which permit the production of alpha-tocopherol or a composition comprising alpha-tocopherol in said non-human organism or in the culture medium surrounding said non-human organism.

[46230] Accordingly, the present invention relates to a process for the production of alpha-tocopherol, which comprises
[46231] (a) increasing or generating the activity of a ABC transporter permease subunit in the cytosol of a cell of a non-human organism or a part thereof, preferably a microorganism, a plant cell, a plant or a part thereof, as compared to a corresponding non-transformed wild type non-human organism or a part thereof; and
[46232] (b) growing the non-human organism or a part thereof under conditions which permit the production of alpha-tocopherol or a composition comprising alpha-tocopherol in said non-human organism or in the culture medium surrounding said non-human organism.

[46233] Accordingly, the present invention relates to a process for the production of gamma-tocopherol, which comprises
[46234] (a) increasing or generating the activity of a lipopolysaccharide biosynthesis protein in the cytosol of a cell of a non-human organism or a part thereof, preferably a microorganism, a plant cell, a plant or a part thereof, as compared to a corresponding non-transformed wild type non-human organism or a part thereof; and
[46235] (b) growing the non-human organism or a part thereof under conditions which permit the production of gamma-tocopherol or a composition comprising gamma-tocopherol in said non-human organism or in the culture medium surrounding said non-human organism.

[46236] Accordingly, the present invention relates to a process for the production of alpha-tocopherol, which comprises
[46237] (a) increasing or generating the activity of a b3890-protein in the cytosol of a cell of a non-human organism or a part thereof, preferably a microorganism, a plant cell, a plant or a part thereof, as compared to a corresponding non-transformed wild type non-human organism or a part thereof; and
[46238] (b) growing the non-human organism or a part thereof under conditions which permit the production of alpha-tocopherol or a composition comprising alpha-tocopherol in said non-human organism or in the culture medium surrounding said non-human organism.

[46239] Accordingly, the present invention relates to a process for the production of alpha-tocopherol, which comprises
[46240] (a) increasing or generating the activity of a glycerol dehydrogenase in the cytosol of a cell of a non-human organism or a part thereof, preferably a microorganism, a plant cell, a plant or a part thereof, as compared to a corresponding non-transformed wild type non-human organism or a part thereof; and
[46241] (b) growing the non-human organism or a part thereof under conditions which permit the production of alpha-tocopherol or a composition comprising alpha-tocopherol in said non-human organism or in the culture medium surrounding said non-human organism.

[46242] Accordingly, the present invention relates to a process for the production of alpha-tocopherol, which comprises
[46243] (a) increasing or generating the activity of a b3989-protein in the cytosol of a cell of a non-human organism or a part thereof, preferably a microorganism, a plant cell, a plant or a part thereof, as compared to a corresponding non-transformed wild type non-human organism or a part thereof; and
[46244] (b) growing the non-human organism or a part thereof under conditions which permit the production of alpha-tocopherol or a composition comprising alpha-tocopherol in said non-human organism or in the culture medium surrounding said non-human organism.

[46245] Accordingly, the present invention relates to a process for the production of gamma-tocopherol, which comprises
[46246] (a) increasing or generating the activity of a b3989-protein in the cytosol of a cell of a non-human organism or a part thereof, preferably a microorganism, a plant cell, a plant or a part thereof, as compared to a corresponding non-transformed wild type non-human organism or a part thereof; and
[46247] (b) growing the non-human organism or a part thereof under conditions which permit the production of gamma-tocopherol or a composition comprising gamma-tocopherol in said non-human organism or in the culture medium surrounding said non-human organism.

[46248] Accordingly, the present invention relates to a process for the production of gamma-tocopherol, which comprises
[46249] (a) increasing or generating the activity of a b4029-protein in the cytosol of a cell of a non-human organism or a part thereof, preferably a microorganism, a plant cell, a plant or a part thereof, as compared to a corresponding non-transformed wild type non-human organism or a part thereof; and
[46250] (b) growing the non-human organism or a part thereof under conditions which permit the production of gamma-tocopherol or a composition comprising gamma-tocopherol in said non-human organism or in the culture medium surrounding said non-human organism.

[46251] Accordingly, the present invention relates to a process for the production of alpha-tocopherol, which comprises
[46252] (a) increasing or generating the activity of a b4050-protein in the cytosol of a cell of a non-human organism or a part thereof, preferably a microorganism, a plant cell, a plant or a part thereof, as compared to a corresponding non-transformed wild type non-human organism or a part thereof; and
[46253] (b) growing the non-human organism or a part thereof under conditions which permit the production of alpha-tocopherol or a composition comprising alpha-tocopherol in said non-human organism or in the culture medium surrounding said non-human organism.

[46254] Accordingly, the present invention relates to a process for the production of alpha-tocopherol, which comprises
[46255] (a) increasing or generating the activity of a b4056-protein in the cytosol of a cell of a non-human organism or a part thereof, preferably a microorganism, a plant cell, a plant or a part thereof, as compared to a corresponding non-transformed wild type non-human organism or a part thereof; and
[46256] (b) growing the non-human organism or a part thereof under conditions which permit the production of alpha-tocopherol or a composition comprising alpha-tocopherol in said non-human organism or in the culture medium surrounding said non-human organism.

[46257] Accordingly, the present invention relates to a process for the production of alpha-tocopherol, which comprises
[46258] (a) increasing or generating the activity of a acetyltransferase in the cytosol of a cell of a non-human organism or a part thereof, preferably a microorganism, a plant cell, a plant or a part thereof, as compared to a corresponding non-transformed wild type non-human organism or a part thereof; and
[46259] (b) growing the non-human organism or a part thereof under conditions which permit the production of alpha-tocopherol or a composition comprising alpha-tocopherol in said non-human organism or in the culture medium surrounding said non-human organism.

[46260] Accordingly, the present invention relates to a process for the production of gamma-tocopherol, which comprises
[46261] (a) increasing or generating the activity of a acetyltransferase in the cytosol of a cell of a non-human organism or a part thereof, preferably a microorganism, a plant cell, a plant or a part thereof, as compared to a corresponding non-transformed wild type non-human organism or a part thereof; and
[46262] (b) growing the non-human organism or a part thereof under conditions which permit the production of gamma-tocopherol or a composition comprising gamma-tocopherol in said non-human organism or in the culture medium surrounding said non-human organism.

[46263] Accordingly, the present invention relates to a process for the production of alpha-tocopherol, which comprises
[46264] (a) increasing or generating the activity of a gluconate transport system permease 3 in the cytosol of a cell of a non-human organism or a part thereof, preferably a microorganism, a plant cell, a plant or a part thereof, as compared to a corresponding non-transformed wild type non-human organism or a part thereof; and
[46265] (b) growing the non-human organism or a part thereof under conditions which permit the production of alpha-tocopherol or a composition comprising alpha-tocopherol in said non-human organism or in the culture medium surrounding said non-human organism.

[46266] Accordingly, the present invention relates to a process for the production of gamma-tocopherol, which comprises
[46267] (a) increasing or generating the activity of a gluconate transport system permease 3 in the cytosol of a cell of a non-human organism or a part thereof, preferably a microorganism, a plant cell, a plant or a part thereof, as compared to a corresponding non-transformed wild type non-human organism or a part thereof; and
[46268] (b) growing the non-human organism or a part thereof under conditions which permit the production of gamma-tocopherol or a composition comprising gamma-tocopherol in said non-human organism or in the culture medium surrounding said non-human organism.

[46269] Accordingly, the present invention relates to a process for the production of gamma-tocopherol, which comprises
[46270] (a) increasing or generating the activity of a thioredoxin in the cytosol of a cell of a non-human organism or a part thereof, preferably a microorganism, a plant cell, a plant or a part thereof, as compared to a corresponding non-transformed wild type non-human organism or a part thereof; and
[46271] (b) growing the non-human organism or a part thereof under conditions which permit the production of gamma-tocopherol or a composition comprising gamma-tocopherol in said non-human organism or in the culture medium surrounding said non-human organism.

[46272] Accordingly, the present invention relates to a process for the production of alpha-tocopherol, which comprises
[46273] (a) increasing or generating the activity of a glutaredoxin in the cytosol of a cell of a non-human organism or a part thereof, preferably a microorganism, a plant cell, a plant or a part thereof, as compared to a corresponding non-transformed wild type non-human organism or a part thereof; and
[46274] (b) growing the non-human organism or a part thereof under conditions which permit the production of alpha-tocopherol or a composition comprising alpha-tocopherol in said non-human organism or in the culture medium surrounding said non-human organism.

[46275] Accordingly, the present invention relates to a process for the production of gamma-tocopherol, which comprises
[46276] (a) increasing or generating the activity of a glutaredoxin in the cytosol of a cell of a non-human organism or a part thereof, preferably a microorganism, a plant cell, a plant or a part thereof, as compared to a corresponding non-transformed wild type non-human organism or a part thereof; and
[46277] (b) growing the non-human organism or a part thereof under conditions which permit the production of gamma-tocopherol or a composition comprising gamma-tocopherol in said non-human organism or in the culture medium surrounding said non-human organism.

[46278] Accordingly, the present invention relates to a process for the production of gamma-tocopherol, which comprises
[46279] (a) increasing or generating the activity of a transcription factor in the cytosol of a cell of a non-human organism or a part thereof, preferably a microorganism, a plant cell, a plant or a part thereof, as compared to a corresponding non-transformed wild type non-human organism or a part thereof; and
[46280] (b) growing the non-human organism or a part thereof under conditions which permit the production of gamma-tocopherol or a composition comprising gamma-tocopherol in said non-human organism or in the culture medium surrounding said non-human organism.

[46281] Accordingly, the present invention relates to a process for the production of alpha-tocopherol, which comprises
[46282] (a) increasing or generating the activity of a polyphosphate kinase in the cytosol of a cell of a non-human organism or a part thereof, preferably a microorganism, a plant cell, a plant or a part thereof, as compared to a corresponding non-transformed wild type non-human organism or a part thereof; and
[46283] (b) growing the non-human organism or a part thereof under conditions which permit the production of alpha-tocopherol or a composition comprising alpha-tocopherol in said non-human organism or in the culture medium surrounding said non-human organism.

[46284] Accordingly, the present invention relates to a process for the production of gamma-tocopherol, which comprises
[46285] (a) increasing or generating the activity of a phosphofructokinase in the cytosol of a cell of a non-human organism or a part thereof, preferably a microorganism, a plant cell, a plant or a part thereof, as compared to a corresponding non-transformed wild type non-human organism or a part thereof; and
[46286] (b) growing the non-human organism or a part thereof under conditions which permit the production of gamma-tocopherol or a composition comprising gamma-tocopherol in said non-human organism or in the culture medium surrounding said non-human organism.

[46287] Accordingly, the present invention relates to a process for the production of gamma-tocopherol, which comprises
[46288] (a) increasing or generating the activity of a coproporphyrinogen oxidase in the cytosol of a cell of a non-human organism or a part thereof, preferably a microorganism, a plant cell, a plant or a part thereof, as compared to a corresponding non-transformed wild type non-human organism or a part thereof; and
[46289] (b) growing the non-human organism or a part thereof under conditions which permit the production of gamma-tocopherol or a composition comprising gamma-tocopherol in said non-human organism or in the culture medium surrounding said non-human organism.

[46290] Accordingly, the present invention relates to a process for the production of gamma-tocopherol, which comprises
[46291] (a) increasing or generating the activity of a sll1761-protein in the cytosol of a cell of a non-human organism or a part thereof, preferably a microorganism, a plant cell, a plant or a part thereof, as compared to a corresponding non-transformed wild type non-human organism or a part thereof; and
[46292] (b) growing the non-human organism or a part thereof under conditions which permit the production of gamma-tocopherol or a composition comprising gamma-tocopherol in said non-human organism or in the culture medium surrounding said non-human organism.

[46293] Accordingly, the present invention relates to a process for the production of gamma-tocopherol, which comprises
[46294] (a) increasing or generating the activity of a adenylate kinase in the cytosol of a cell of a non-human organism or a part thereof, preferably a microorganism, a plant cell, a plant or a part thereof, as compared to a corresponding non-transformed wild type non-human organism or a part thereof; and
[46295] (b) growing the non-human organism or a part thereof under conditions which permit the production of gamma-tocopherol or a composition comprising gamma-tocopherol in said non-human organism or in the culture medium surrounding said non-human organism.

[46296] Accordingly, the present invention relates to a process for the production of alpha-tocopherol, which comprises
[46297] (a) increasing or generating the activity of a precorrin methylase in the cytosol of a cell of a non-human organism or a part thereof, preferably a microorganism, a plant cell, a plant or a part thereof, as compared to a corresponding non-transformed wild type non-human organism or a part thereof; and
[46298] (b) growing the non-human organism or a part thereof under conditions which permit the production of alpha-tocopherol or a composition comprising alpha-tocopherol in said non-human organism or in the culture medium surrounding said non-human organism.

[46299] Accordingly, the present invention relates to a process for the production of alpha-tocopherol, which comprises
[46300] (a) increasing or generating the activity of a malate dehydrogenase in the cytosol of a cell of a non-human organism or a part thereof, preferably a microorganism, a plant cell, a plant or a part thereof, as compared to a corresponding non-transformed wild type non-human organism or a part thereof; and
[46301] (b) growing the non-human organism or a part thereof under conditions which permit the production of alpha-tocopherol or a composition comprising alpha-tocopherol in said non-human organism or in the culture medium surrounding said non-human organism.

[46302] Accordingly, the present invention relates to a process for the production of gamma-tocopherol, which comprises
[46303] (a) increasing or generating the activity of a malate dehydrogenase in the cytosol of a cell of a non-human organism or a part thereof, preferably a microorganism, a plant cell, a plant or a part thereof, as compared to a corresponding non-transformed wild type non-human organism or a part thereof; and
[46304] (b) growing the non-human organism or a part thereof under conditions which permit the production of gamma-tocopherol or a composition comprising gamma-tocopherol in said non-human organism or in the culture medium surrounding said non-human organism.

[46305] Accordingly, the present invention relates to a process for the production of alpha-tocopherol, which comprises
[46306] (a) increasing or generating the activity of a geranylgeranyl pyrophosphate synthase in the cytosol of a cell of a non-human organism or a part thereof, preferably a microorganism, a plant cell, a plant or a part thereof, as compared to a corresponding non-transformed wild type non-human organism or a part thereof; and
[46307] (b) growing the non-human organism or a part thereof under conditions which permit the production of alpha-tocopherol or a composition comprising alpha-tocopherol in said non-human organism or in the culture medium surrounding said non-human organism.

[46308] Accordingly, the present invention relates to a process for the production of gamma-tocopherol, which comprises
[46309] (a) increasing or generating the activity of a geranylgeranyl pyrophosphate synthase in the cytosol of a cell of a non-human organism or a part thereof, preferably a microorganism, a plant cell, a plant or a part thereof, as compared to a corresponding non-transformed wild type non-human organism or a part thereof; and
[46310] (b) growing the non-human organism or a part thereof under conditions which permit the production of gamma-tocopherol or a composition comprising gamma-tocopherol in said non-human organism or in the culture medium surrounding said non-human organism.

[46311] Accordingly, the present invention relates to a process for the production of gamma-tocopherol, which comprises
[46312] (a) increasing or generating the activity of a carbohydrate kinase in the cytosol of a cell of a non-human organism or a part thereof, preferably a microorganism, a plant cell, a plant or a part thereof, as compared to a corresponding non-transformed wild type non-human organism or a part thereof; and
[46313] (b) growing the non-human organism or a part thereof under conditions which permit the production of gamma-tocopherol or a composition comprising gamma-tocopherol in said non-human organism or in the culture medium surrounding said non-human organism.

[46314] Accordingly, the present invention relates to a process for the production of gamma-tocopherol, which comprises
[46315] (a) increasing or generating the activity of a photosystem II protein in the cytosol of a cell of a non-human organism or a part thereof, preferably a microorganism, a plant cell, a plant or a part thereof, as compared to a corresponding non-transformed wild type non-human organism or a part thereof; and
[46316] (b) growing the non-human organism or a part thereof under conditions which permit the production of gamma-tocopherol or a composition comprising gamma-tocopherol in said non-human organism or in the culture medium surrounding said non-human organism.

[46317] Accordingly, the present invention relates to a process for the production of alpha-tocopherol, which comprises
[46318] (a) increasing or generating the activity of a glycerol-3-phosphate dehydrogenase in the cytosol of a cell of a non-human organism or a part thereof, preferably a microorganism, a plant cell, a plant or a part thereof, as compared to a corresponding non-transformed wild type non-human organism or a part thereof; and
[46319] (b) growing the non-human organism or a part thereof under conditions which permit the production of alpha-tocopherol or a composition comprising alpha-tocopherol in said non-human organism or in the culture medium surrounding said non-human organism.

[46320] Accordingly, the present invention relates to a process for the production of gamma-tocopherol, which comprises
[46321] (a) increasing or generating the activity of a phosphoadenosine phosphosulfate reductase in the cytosol of a cell of a non-human organism or a part thereof, preferably a microorganism, a plant cell, a plant or a part thereof, as compared to a corresponding non-transformed wild type non-human organism or a part thereof; and
[46322] (b) growing the non-human organism or a part thereof under conditions which permit the production of gamma-tocopherol or a composition comprising gamma-tocopherol in said non-human organism or in the culture medium surrounding said non-human organism.

[46323] Accordingly, the present invention relates to a process for the production of alpha-tocopherol, which comprises
[46324] (a) increasing or generating the activity of a slr1917-protein in the cytosol of a cell of a non-human organism or a part thereof, preferably a microorganism, a plant cell, a plant or a part thereof, as compared to a corresponding non-transformed wild type non-human organism or a part thereof; and
[46325] (b) growing the non-human organism or a part thereof under conditions which permit the production of alpha-tocopherol or a composition comprising alpha-tocopherol in said non-human organism or in the culture medium surrounding said non-human organism.

[46326] Accordingly, the present invention relates to a process for the production of gamma-tocopherol, which comprises
[46327] (a) increasing or generating the activity of a slr1917-protein in the cytosol of a cell of a non-human organism or a part thereof, preferably a microorganism, a plant cell, a plant or a part thereof, as compared to a corresponding non-transformed wild type non-human organism or a part thereof; and
[46328] (b) growing the non-human organism or a part thereof under conditions which permit the production of gamma-tocopherol or a composition comprising gamma-tocopherol in said non-human organism or in the culture medium surrounding said non-human organism.

[46329] Accordingly, the present invention relates to a process for the production of alpha-tocopherol, which comprises
[46330] (a) increasing or generating the activity of a Sec-independent protein translocase subunit in the cytosol of a cell of a non-human organism or a part thereof, preferably a microorganism, a plant cell, a plant or a part thereof, as compared to a corresponding non-transformed wild type non-human organism or a part thereof; and
[46331] (b) growing the non-human organism or a part thereof under conditions which permit the production of alpha-tocopherol or a composition comprising alpha-tocopherol in said non-human organism or in the culture medium surrounding said non-human organism.

[46332] Accordingly, the present invention relates to a process for the production of gamma-tocopherol, which comprises
[46333] (a) increasing or generating the activity of a Sec-independent protein translocase subunit in the cytosol of a cell of a non-human organism or a part thereof, preferably a microorganism, a plant cell, a plant or a part thereof, as compared to a corresponding non-transformed wild type non-human organism or a part thereof; and
[46334] (b) growing the non-human organism or a part thereof under conditions which permit the production of gamma-tocopherol or a composition comprising gamma-tocopherol in said non-human organism or in the culture medium surrounding said non-human organism.

[46335] Accordingly, the present invention relates to a process for the production of gamma-tocopherol, which comprises
[46336] (a) increasing or generating the activity of a multiple antibiotic resistance protein in the cytosol of a cell of a non-human organism or a part thereof, preferably a microorganism, a plant cell, a plant or a part thereof, as compared to a corresponding non-transformed wild type non-human organism or a part thereof; and
[46337] (b) growing the non-human organism or a part thereof under conditions which permit the production of gamma-tocopherol or a composition comprising gamma-tocopherol in said non-human organism or in the culture medium surrounding said non-human organism.

[46338] Accordingly, the present invention relates to a process for the production of alpha-tocopherol, which comprises
[46339] (a) increasing or generating the activity of a TTC1386-protein in the cytosol of a cell of a non-human organism or a part thereof, preferably a microorganism, a plant cell, a plant or a part thereof, as compared to a corresponding non-transformed wild type non-human organism or a part thereof; and
[46340] (b) growing the non-human organism or a part thereof under conditions which permit the production of alpha-tocopherol or a composition comprising alpha-tocopherol in said non-human organism or in the culture medium surrounding said non-human organism.

[46341] Accordingly, the present invention relates to a process for the production of gamma-tocopherol, which comprises
[46342] (a) increasing or generating the activity of a TTC1386-protein in the cytosol of a cell of a non-human organism or a part thereof, preferably a microorganism, a plant cell, a plant or a part thereof, as compared to a corresponding non-transformed wild type non-human organism or a part thereof; and
[46343] (b) growing the non-human organism or a part thereof under conditions which permit the production of gamma-tocopherol or a composition comprising gamma-tocopherol in said non-human organism or in the culture medium surrounding said non-human organism.

[46344] Accordingly, the present invention relates to a process for the production of alpha-tocopherol, which comprises
[46345] (a) increasing or generating the activity of a homocitrate synthase in the cytosol of a cell of a non-human organism or a part thereof, preferably a microorganism, a plant cell, a plant or a part thereof, as compared to a corresponding non-transformed wild type non-human organism or a part thereof; and
[46346] (b) growing the non-human organism or a part thereof under conditions which permit the production of alpha-tocopherol or a composition comprising alpha-tocopherol in said non-human organism or in the culture medium surrounding said non-human organism.

[46347] Accordingly, the present invention relates to a process for the production of alpha-tocopherol, which comprises
[46348] (a) increasing or generating the activity of a 3-deoxy-7-phosphoheptulonate synthase in the cytosol of a cell of a non-human organism or a part thereof, preferably a microorganism, a plant cell, a plant or a part thereof, as compared to a corresponding non-transformed wild type non-human organism or a part thereof; and
[46349] (b) growing the non-human organism or a part thereof under conditions which permit the production of alpha-tocopherol or a composition comprising alpha-tocopherol in said non-human organism or in the culture medium surrounding said non-human organism.

[46350] Accordingly, the present invention relates to a process for the production of gamma-tocopherol, which comprises
[46351] (a) increasing or generating the activity of a 3-deoxy-7-phosphoheptulonate synthase in the cytosol of a cell of a non-human organism or a part thereof, preferably a microorganism, a plant cell, a plant or a part thereof, as compared to a corresponding non-transformed wild type non-human organism or a part thereof; and
[46352] (b) growing the non-human organism or a part thereof under conditions which permit the production of gamma-tocopherol or a composition comprising gamma-tocopherol in said non-human organism or in the culture medium surrounding said non-human organism.

[46353] Accordingly, the present invention relates to a process for the production of gamma-tocopherol, which comprises
[46354] (a) increasing or generating the activity of a ycl049c-protein in the cytosol of a cell of a non-human organism or a part thereof, preferably a microorganism, a plant cell, a plant or a part thereof, as compared to a corresponding non-transformed wild type non-human organism or a part thereof; and
[46355] (b) growing the non-human organism or a part thereof under conditions which permit the production of gamma-tocopherol or a composition comprising gamma-tocopherol in said non-human organism or in the culture medium surrounding said non-human organism.

[46356] Accordingly, the present invention relates to a process for the production of alpha-tocopherol, which comprises
[46357] (a) increasing or generating the activity of a homocitrate synthase in the cytosol of a cell of a non-human organism or a part thereof, preferably a microorganism, a plant cell, a plant or a part thereof, as compared to a corresponding non-transformed wild type non-human organism or a part thereof; and
[46358] (b) growing the non-human organism or a part thereof under conditions which permit the production of alpha-tocopherol or a composition comprising alpha-tocopherol in said non-human organism or in the culture medium surrounding said non-human organism.

[46359] Accordingly, the present invention relates to a process for the production of alpha-tocopherol, which comprises
[46360] (a) increasing or generating the activity of a ydl235c-protein in the cytosol of a cell of a non-human organism or a part thereof, preferably a microorganism, a plant cell, a plant or a part thereof, as compared to a corresponding non-transformed wild type non-human organism or a part thereof; and
[46361] (b) growing the non-human organism or a part thereof under conditions which permit the production of alpha-tocopherol or a composition comprising alpha-tocopherol in said non-human organism or in the culture medium surrounding said non-human organism.

[46362] Accordingly, the present invention relates to a process for the production of gamma-tocopherol, which comprises
[46363] (a) increasing or generating the activity of a N-(5′-phosphoribosyl)anthranilate isomerase in the cytosol of a cell of a non-human organism or a part thereof, preferably a microorganism, a plant cell, a plant or a part thereof, as compared to a corresponding non-transformed wild type non-human organism or a part thereof; and
[46364] (b) growing the non-human organism or a part thereof under conditions which permit the production of gamma-tocopherol or a composition comprising gamma-tocopherol in said non-human organism or in the culture medium surrounding said non-human organism.

[46365] Accordingly, the present invention relates to a process for the production of gamma-tocopherol, which comprises
[46366] (a) increasing or generating the activity of a phospho-2-dehydro-3-deoxyheptonate aldolase in the cytosol of a cell of a non-human organism or a part thereof, preferably a microorganism, a plant cell, a plant or a part thereof, as compared to a corresponding non-transformed wild type non-human organism or a part thereof; and
[46367] (b) growing the non-human organism or a part thereof under conditions which permit the production of gamma-tocopherol or a composition comprising gamma-tocopherol in said non-human organism or in the culture medium surrounding said non-human organism.

[46368] Accordingly, the present invention relates to a process for the production of gamma-tocopherol, which comprises
[46369] (a) increasing or generating the activity of a ydr183w-protein in the cytosol of a cell of a non-human organism or a part thereof, preferably a microorganism, a plant cell, a plant or a part thereof, as compared to a corresponding non-transformed wild type non-human organism or a part thereof; and
[46370] (b) growing the non-human organism or a part thereof under conditions which permit the production of gamma-tocopherol or a composition comprising gamma-tocopherol in said non-human organism or in the culture medium surrounding said non-human organism.

[46371] Accordingly, the present invention relates to a process for the production of gamma-tocopherol, which comprises
[46372] (a) increasing or generating the activity of a yer106w-protein in the cytosol of a cell of a non-human organism or a part thereof, preferably a microorganism, a plant cell, a plant or a part thereof, as compared to a corresponding non-transformed wild type non-human organism or a part thereof; and
[46373] (b) growing the non-human organism or a part thereof under conditions which permit the production of gamma-tocopherol or a composition comprising gamma-tocopherol in said non-human organism or in the culture medium surrounding said non-human organism.

[46374] Accordingly, the present invention relates to a process for the production of gamma-tocopherol, which comprises
[46375] (a) increasing or generating the activity of a small nuclear ribonucleoprotein in the cytosol of a cell of a non-human organism or a part thereof, preferably a microorganism, a plant cell, a plant or a part thereof, as compared to a corresponding non-transformed wild type non-human organism or a part thereof; and
[46376] (b) growing the non-human organism or a part thereof under conditions which permit the production of gamma-tocopherol or a composition comprising gamma-tocopherol in said non-human organism or in the culture medium surrounding said non-human organism.

[46377] Accordingly, the present invention relates to a process for the production of alpha-tocopherol, which comprises
[46378] (a) increasing or generating the activity of a phosphatidylserine decarboxylase in the cytosol of a cell of a non-human organism or a part thereof, preferably a microorganism, a plant cell, a plant or a part thereof, as compared to a corresponding non-transformed wild type non-human organism or a part thereof; and
[46379] (b) growing the non-human organism or a part thereof under conditions which permit the production of alpha-tocopherol or a composition comprising alpha-tocopherol in said non-human organism or in the culture medium surrounding said non-human organism.

[46380] Accordingly, the present invention relates to a process for the production of gamma-tocopherol, which comprises
[46381] (a) increasing or generating the activity of a polygalacturonase in the cytosol of a cell of a non-human organism or a part thereof, preferably a microorganism, a plant cell, a plant or a part thereof, as compared to a corresponding non-transformed wild type non-human organism or a part thereof; and
[46382] (b) growing the non-human organism or a part thereof under conditions which permit the production of gamma-tocopherol or a composition comprising gamma-tocopherol in said non-human organism or in the culture medium surrounding said non-human organism.

[46383] Accordingly, the present invention relates to a process for the production of gamma-tocopherol, which comprises
[46384] (a) increasing or generating the activity of a ylr178c-protein in the cytosol of a cell of a non-human organism or a part thereof, preferably a microorganism, a plant cell, a plant or a part thereof, as compared to a corresponding non-transformed wild type non-human organism or a part thereof; and
[46385] (b) growing the non-human organism or a part thereof under conditions which permit the production of gamma-tocopherol or a composition comprising gamma-tocopherol in said non-human organism or in the culture medium surrounding said non-human organism.

[46386] Accordingly, the present invention relates to a process for the production of alpha-tocopherol, which comprises
[46387] (a) increasing or generating the activity of a adenylosuccinate lyase in the cytosol of a cell of a non-human organism or a part thereof, preferably a microorganism, a plant cell, a plant or a part thereof, as compared to a corresponding non-transformed wild type non-human organism or a part thereof; and
[46388] (b) growing the non-human organism or a part thereof under conditions which permit the production of alpha-tocopherol or a composition comprising alpha-tocopherol in said non-human organism or in the culture medium surrounding said non-human organism.

[46389] Accordingly, the present invention relates to a process for the production of alpha-tocopherol, which comprises
[46390] (a) increasing or generating the activity of a ypr170c-protein in the cytosol of a cell of a non-human organism or a part thereof, preferably a microorganism, a plant cell, a plant or a part thereof, as compared to a corresponding non-transformed wild type non-human organism or a part thereof; and
[46391] (b) growing the non-human organism or a part thereof under conditions which permit the production of alpha-tocopherol or a composition comprising alpha-tocopherol in said non-human organism or in the culture medium surrounding said non-human organism.

[46392] Accordingly, the present invention relates to a process for the production of alpha-tocopherol, which comprises
[46393] (a) increasing or generating the activity of a polypeptide comprising a polypeptide as depicted in the respective line in column 5 or 8 of Table II, application no. 7, or a homolog or a fragment thereof, a consensus sequence or at least one polypeptide motif as depicted in the respective line in column 8 of Table IV, application no. 7, whereby the respective line disclose in column 7 the fine chemical alpha-tocopherol; or
[46394] increasing or generating the activity of an expression product of one or more nucleic acid molecule(s) comprising a polynucleotide as depicted in the respective line in column 5 or 8 of Table I, application no. 7, preferably the coding region thereof, or a homolog or a fragment thereof, whereby the respective line disclose in column 7 the fine chemical alpha-tocopherol;
[46395] in the cytosol of a cell of a non-human organism or a part thereof; preferably a microorganism, a plant cell, a plant or a part thereof, as compared to a corresponding non-transformed wild type non-human organism or a part thereof; and
[46396] (b) growing the non-human organism under conditions which permit the production of alpha-tocopherol, or a composition comprising alpha-tocopherol in said non-human organism or in the culture medium surrounding said non-human organism.

[46397] Accordingly, the present invention relates to a process for the production of gamma-tocopherol, which comprises
[46398] (a) increasing or generating the activity of a polypeptide comprising a polypeptide as depicted in the respective line in column 5 or 8 of Table II, application no. 7, or a homolog or a fragment thereof, a consensus sequence or at least one polypeptide motif as depicted in the respective line in column 8 of Table IV, application no. 7, whereby the respective line disclose in column 7 the fine chemical gamma-tocopherol; or
[46399] increasing or generating the activity of an expression product of one or more nucleic acid molecule(s) comprising a polynucleotide as depicted in the respective line in column 5 or 8 of Table I, application no. 7, preferably the coding region thereof, or a homolog or a fragment thereof, whereby the respective line disclose in column 7 the fine chemical gamma-tocopherol;
[46400] in the cytosol of a cell of a non-human organism or a part thereof; preferably a microorganism, a plant cell, a plant or a part thereof, as compared to a corresponding non-transformed wild type non-human organism or a part thereof; and
[46401] (b) growing the non-human organism under conditions which permit the production of gamma-tocopherol, or a composition comprising gamma-tocopherol in said non-human organism or in the culture medium surrounding said non-human organism.

[46402] In a further embodiment the activity of the polypeptide comprising a polypeptide as depicted in the respective line in column 5 or 8 of Table II, application no. 7, or a homolog or a fragment thereof, a consensus sequence or at least one polypeptide motif as depicted in the respective line in column 8 of Table IV, application no. 7, is increased or generated non-targeted in the above-mentioned process in a microorganism or plant or a part thereof.

[46403] In a further embodiment said polypeptide has the activity of the respective polypeptide represented by a protein comprising a polypeptide as depicted in the respective line in column 5 of Table II, application no. 7.

[46404] In a further embodiment the activity of the expression product of one or more nucleic acid molecule(s) comprising a polynucleotide as depicted in the respective line in column 5 or 8 of Table I, application no. 7, preferably the coding region thereof, or a homolog or a fragment thereof, is increased or generated non-targeted in the above-mentioned process in a microorganism or plant or a part thereof.

[46405] In a further embodiment the activity of the polypeptide comprising a polypeptide as depicted in the respective line in column 5 or 8 of Table II, application no. 7, or a homolog or a fragment thereof, a consensus sequence or at least one polypeptide motif as depicted in the respective line in column 8 of Table IV, application no. 7, is increased or generated in the above-mentioned process in an organelle preferably in plastids or mitochondria, especially in plastids, of a microorganism or plant.

[46406] In a further embodiment said polypeptide has the activity of the respective polypeptide represented by a protein comprising a polypeptide as depicted in the respective line in column 5 of Table II, application no. 7.

[46407] In a further embodiment the activity of the expression product of one or more nucleic acid molecule(s) comprising a polynucleotide as depicted in the respective line in column 5 or 8 of Table I, application no. 7, preferably the coding region thereof, or a homolog or a fragment thereof, is increased or generated in the above-mentioned process in an organelle, preferably in plasids or mitochondria, especially in plastids, of a microorganism or plant.

[46408] In a further embodiment the activity of the polypeptide comprising a polypeptide as depicted in the respective line in column 5 or 8 of Table II, application no. 7, or a homolog or a fragment thereof, a consensus sequence or at least one polypeptide motif as depicted in the respective line in column 8 of Table IV, application no. 7, is increased or generated in the above-mentioned process in the cyctosol of a cell, of a microorganism or plant.

[46409] In a further embodiment said polypeptide has the activity of the respective polypeptide represented by a protein comprising a polypeptide as depicted in the respective line in column 5 of Table II, application no. 7.

[46410] In a further embodiment the activity of the expression product of one or more nucleic acid molecule(s) comprising a polynucleotide as depicted in the respective line in column 5 or 8 of Table I, application no. 7, preferably the coding region thereof, or a homolog or a fragment thereof, is increased or generated in the above-mentioned process in the cytosol of a cell, of a microorganism or plant.

[46411] In a further embodiment of the present invention the process further comprises the step of recovering the fine chemical, which is synthesized by the organism from the organism and/or from the culture medium used for the growth or maintenance of the organism.

[46412] For the purposes of the present invention, as a rule the plural is intended to encompass the singular and vice versa, unless otherwise specified.

[46413] For the purposes of the present invention, as a rule the term “mitochondric” is intended to encompass the term “mitochondrial” and vice versa, unless otherwise specified.

[46414] Comprises/comprising and grammatical variations thereof when used in this specification are to be taken to specify the presence of stated features, integers, steps or components or groups thereof, but not to preclude the presence or addition of one or more other features, integers, steps, components or groups thereof.

[46415] The term “Table I” used in this specification is to be taken to specify the content of Table I A and Table I B. The term “Table II” used in this specification is to be taken to specify the content of Table II A and Table II B. The term “Table I A” used in this specification is to be taken to specify the content of Table I A. The term “Table I B” used in this specification is to be taken to specify the content of Table I B. The term “Table II A” used in this specification is to be taken to specify the content of Table II A. The term “Table II B” used in this specification is to be taken to specify the content of Table II B. In one preferred embodiment, the term “Table I” means Table I B. In one preferred embodiment, the term “Table II” means Table II B.

[46416] In a line of Table I related nucleic acid molecules are listed. In column 3 the locus name, often also referred to as gene name, is given, in column 5 the lead sequence ID No. thereto and in column 8 the sequence ID No. of homologues thereof. In the corresponding line of Table II the respective polypeptides are listed. In column 3 the protein name is given (which is according to the common understanding of the skilled person in the art usually used for the gene as well as the polypeptide and therefore identical with the gene name/locus name), in column 5 the (corresponding) lead sequence ID No. thereto and in column 8 the (corresponding) sequence ID No. of homologues thereof.

[46417] In Tables I and II in column 4 information is given from which organism the lead sequence according to column 5 has been identified, in column 7 information is given which fine chemical is generated or increased, and in an especial embodiment in column 6 information is given about non-targeted expression or expression in plastids or mitochondria.

[46418] Tables III and IV are arranged accordingly whereby in column 8 of table III primers are listed which can be used to amplify the sequence of the corresponding lead sequence indicated in column 5 of the same line and whereby in column 8 of table IV consensus and pattern sequences are listed which are shared by the lead sequence as indicated in column 5 of the same line and their homologs listed in the same line in table II column 8. How theconsensus and pattern sequences are determined to be shared by their respective lead or homolog sequence is defined in a respective section of the application in more detail.

[46419] The terms “increase”, “raise”, “extend”, “enhance”, “improve” and “amplify” as well as the grammatical versions thereof relate to a corresponding change of a property in a non-human organism, a part of an organism such as a tissue, seed, root, leave, flower, pollen etc. or in a cell and are interchangeable. Preferably, the overall activity in the volume is increased or enhanced in cases if the increase or enhancement is related to the increase or enhancement of an activity of a gene product, independent whether the amount of gene product or the specific activity of the gene product or both is increased or enhanced or whether the amount, stability or translation efficacy of the nucleic acid sequence or gene encoding for the gene product is increased or enhanced.

[46420] Under “change of a property” it is understood that the activity, expression level or amount of a gene product or the metabolite content is changed in a specific volume relative to a corresponding volume of a control, reference or wild type, including the de novo creation of the activity or expression.

[46421] The term “increase” may be directed to a change of said property in the subject of the present invention or only in a part thereof, for example, the change can be found in a compartment of a cell, like an organelle, or in a part of an non-human organism, like plant tissue, plant seed, plant root, pollen, leave, flower etc. but is not detectable in the overall subject, i.e. complete cell or plant, if tested.

[46422] Accordingly, the term “increase” means that the specific activity of a polypeptide or the amount of a compound or of a metabolite, e.g. of a polypeptide, a nucleic acid molecule or an encoding mRNA or DNA or the fine chemical, can be increased in a volume.

[46423] The term “increase” includes that a compound or an activity is introduced into a cell or a subcellular compartment or organelle de novo or that the compound or the activity has not been detectable before, in other words it is “generated”.

[46424] Accordingly, in the following, the term “increasing” also comprises the term “generating” or “stimulating”. The increased activity manifests itself in an increase of the fine chemical.

[46425] The terms “wild type”, “control” or “reference” are exchangeable and can be a cell or a part of a non-human organism such as an organelle like a chloroplast or a tissue, or a non-human organism, in particular a microorganism or a plant, which was not modified or treated according to the herein described process according to the invention. Accordingly, the cell or a part of a non-human organism such as an organelle like a chloroplast or a tissue, or an organism, in particular a microorganism or a plant used as wild type, control or reference corresponds to the cell, non-human organism, microorganism, plant, or a part thereof, as much as possible and is in any other property but in the result of the process of the invention as identical to the subject matter of the invention as possible. Thus, the wild type, control or reference is treated identically or as identical as possible, saying that only conditions or properties might be different which do not influence the quality of the tested property.

[46426] Preferably, any comparison is carried out under analogous conditions. The term “analogous conditions” means that all conditions such as, for example, culture or growing conditions (such as soil, nutrient, water content of the soil, temperature, humidity or surrounding air), or assay conditions (such as buffer composition, temperature, substrates, pathogen strain, concentrations and the like) are kept identical between the experiments to be compared.

[46427] The “reference”, “control” or “wild type” is preferably a subject, e.g. an organelle, a cell, a tissue, an organism, in particular a microorganism or a plant, which was not modified or treated according to the herein described process of the invention and is in any other property as similar to the subject matter of the invention as possible. The reference, control or wild type is in its genome, transcriptome, proteome or metabolome as similar as possible to the subject of the present invention. Preferably, the term “reference-”, “control-” or “wild type-”organelle, -cell, -tissue or -organism, in particular a microorganism or a plant, relates to an organelle, cell, tissue or organism, in particular a microorganism or a plant, which is nearly genetically identical to the organelle, cell, tissue or organism, in particular a microorganism or plant, or a part thereof, of the present invention, preferably 95%, more preferred are 98%, even more preferred are 99,00%, in particular 99,10%, 99,30%, 99,50%, 99,70%, 99.90%, 99.99%, 99.999% or more. Most preferable the “reference”, “control”, or “wild type” is a subject, e.g. an organelle, a cell, a tissue, an organism, in particular a microorganism or a plant, which is genetically identical to the organism, in particular plant, cell, a tissue or organelle used according to the process of the invention except that the responsible or activity conferring nucleic acid molecules or the gene product encoded by them are amended, manipulated, exchanged or introduced according to the inventive process.

[46428] In case, a control, reference or wild type differing from the subject of the present invention only by not being subject of the process of the invention can not be provided, a control, reference or wild type can be a non-human organism in which the cause for the modulation of an activity conferring the generation/increase of the fine chemical or expression of the nucleic acid molecule of the invention as described herein has been switched back or off, e.g. by knocking out the expression of responsible gene product, e.g. by antisense inhibition, by inactivation of an activator or agonist, by activation of an inhibitor or antagonist, by inhibition through adding inhibitory antibodies, by adding active compounds as e.g. hormones, by introducing negative dominant mutants, etc. A gene production can for example be knocked out by introducing inactivating point mutations, which lead to an enzymatic activity inhibition or a destabilization or an inhibition of the ability to bind to cofactors etc.

[46429] Accordingly, preferred reference subject is the starting subject of the present process of the invention. Preferably, the reference and the subject matter of the invention are compared after standardization and normalization, e.g. to the amount of total RNA, DNA, or protein or activity or expression of reference genes, like housekeeping genes, such as ubiquitin, actin or ribosomal proteins.

[46430] In accordance with the invention, the term “non-human organism” as understood herein relates always to an organism with the exception of a human being, in particular to an animal or a plant or a microorganism. Further, the term “animal” as understood herein relates always to a non-human animal. Preferably the term “non-human organism” shall mean a microorganism, in particular those containing plastids, such as algae, or a plant or the like.

[46431] As used herein, “plant” is meant to include not only a whole plant but also a part thereof i.e., one or more cells, tissues, including for example, leaves, stems, shoots, roots, flowers, fruits, seeds and pollen.

[46432] The term “organelle” according to the invention shall mean for example “mitochondrion” or “plastid”. The term “plastid” according to the invention is intended to include various forms of plastids including proplastids, chloroplasts, chromoplasts, gerontoplasts, leucoplasts, amyloplasts, elaioplasts and etioplasts, preferably chloroplasts. They all have as a common ancestor the aforementioned proplasts.

[46433] Unless otherwise specified, the terms “polynucleotides”, “nucleic acid” and “nucleic acid molecule” are interchangeable in the present context. Unless otherwise specified, the terms “peptide”, “polypeptide” and “protein” are interchangeably in the present context. The term “sequence” may relate to polynucleotides, nucleic acids, nucleic acid molecules, peptides, polypeptides and proteins, depending on the context in which the term “sequence” is used. The terms “gene(s)”, “polynucleotide”, “nucleic acid sequence”, “nucleotide sequence”, or “nucleic acid molecule(s)” as used herein refer to a polymeric form of nucleotides of any length, either ribonucleotides or deoxyribonucleotides. The terms refer only to the primary structure of the molecule.

[46434] Thus, the terms “gene(s)”, “polynucleotide”, “nucleic acid sequence”, “nucleotide sequence”, or “nucleic acid molecule(s)” as used herein include double- and singlestranded DNA and/or RNA. They also include known types of modifications, for example, methylation, “caps”, substitutions of one or more of the naturally occurring nucleotides with an analog. Preferably, the DNA or RNA sequence comprises a coding sequence encoding the herein defined polypeptide.

[46435] A “coding sequence” is a nucleotide sequence, which is transcribed into a RNA, e.g. a regulatory RNA, such as a miRNA, a ta-siRNA, cosuppression molecule, an RNAi, a ribozyme, etc. or preferably into a mRNA which is translated into a polypeptide when placed under the control of appropriate regulatory sequences. The boundaries of the coding sequence are determined by a translation start codon at the 5′-terminus and a translation stop codon at the 3′-terminus. A coding sequence can include, but is not limited to mRNA, cDNA, recombinant nucleotide sequences or genomic DNA, while introns may be present as well under certain circumstances. The terms “coding sequence” and “coding region” are interchangeable in the present context.

[46436] As used in the present context a nucleic acid molecule may also encompass the untranslated sequence located at the 3′ and/or at the 5′ end of the coding gene region, for example at least 500, preferably 200, especially preferably 100, nucleotides of the sequence upstream of the 5′ end of the coding region and/or at least 100, preferably 50, especially preferably 20, nucleotides of the sequence downstream of the 3′ end of the coding gene region. In the event for example the antisense, RNAi, snRNA, dsRNA, siRNA, miRNA, ta-siRNA, cosuppression molecule, ribozyme etc. technology is used coding regions as well as the 5′- and/or 3′-regions can advantageously be used.

[46437] However, it is often advantageous only to choose the coding region of a nucleic acid sequence for cloning and expression purposes. Except as not otherwise specified in the sequence listing according to WI PO Standard 25 for a respective CDS usually the coding region of a nucleic acid molecule is depicted at numeric identifier <222>, whereby the coding region starts at the position given by the first number (given in brackets) and ends at the position given by the second number (given in brackets) and thereafter under numeric identifier <400>the respective sequence is disclosed.

[46438] Unless otherwise specified, the term “polypeptide” refers to a polymer of amino acids (amino acid sequence) and does not refer to a specific length of the molecule. Thus, peptides and oligopeptides are included within the definition of polypeptide. This term does also refer to or include post-translational modifications of the polypeptide, for example, glycosylations, acetylations, phosphorylations and the like. Included within the definition are, for example, polypeptides containing one or more analogs of an amino acid (including, for example, unnatural amino acids, etc.), polypeptides with substituted linkages, as well as other modifications known in the art, both naturally occurring and non-naturally occurring. The terms “protein” and “polypeptide” used in this application are interchangeable.

[46439] The term “recovering” means the isolation of the fine chemical in different purities, that means on the one hand harvesting of the biological material, which contains the fine chemical without further purification and on the other hand purities of the fine chemical between 5% and 100% purity, preferred purities are in the range of 10% and 99%. In one embodiment, the purities are at least 20%, 30%, 40%, 50%, 60%, 70%, 80%, 90%, 95% or 99%.

[46440] A “transit peptide” is an amino acid sequence, whose encoding nucleic acid sequence is translated together with the corresponding structural gene. That means the transit peptide is an integral part of the translated protein and forms an amino terminal extension of the protein. Both are translated as so called “preprotein”. In general the transit peptide is cleaved off from the preprotein during or just after import of the protein into the correct cell organelle such as a plastid or mitochondrion to yield the mature protein. The transit peptide ensures correct localization of the mature protein by facilitating the transport of proteins through intracellular membranes. In principle the nucleic acid sequence encoding a transit peptide can be isolated from every organism such as microorganisms such as algae or plants containing plastids, preferably chloroplasts, or mitochondria. Preferred nucleic acid sequences encoding a transit peptide are derived from a nucleic acid sequence encoding a protein finally resided in the plastid or mitochondria, respectively, and stemming from an organism selected from the group consisting of the genera:

[46441] Acetabularia, Arabidopsis, Brassica, Capsicum, Chlamydomonas, Cucurbita, Dunaliella, Euglena, Flaveria, Glycine, Helianthus, Hordeum, Lemna, Lolium, Lycopersion, Malus, Medicago, Mesembryanthemum, Nicotiana, Oenotherea, Oryza, Petunia, Phaseolus, Physcomitrella, Pinus, Pisum, Raphanus, Silene, Sinapis, Solanum, Spinacea, Stevia, Synechococcus, Triticum and Zea.

[46442] Advantageously plastidial transit peptides, which are beneficially used in an embodiment of the process of the present invention, are derived from the nucleic acid sequence encoding a protein selected from the group consisting of

[46443] ribulose bisphosphate carboxylase/oxygenase, 5-enolpyruvyl-shikimate-3-phosphate synthase, acetolactate synthase, chloroplast ribosomal protein CS17, Cs protein, ferredoxin, plastocyanin, ribulose bisphosphate carboxylase activase, tryptophan synthase, acyl carrier protein, plastid chaperonin-60, cytochrome c552, 22-kDA heat shock protein, 33-kDa Oxygen-evolving enhancer protein 1, ATP synthase γ subunit, ATP synthase δ subunit, chlorophyll-a/b-binding proteinII-1, Oxygen-evolving enhancer protein 2, Oxygen-evolving enhancer protein 3, photosystem I: P21, photosystem I: P28, photosystem I: P30, photosystem I: P35, photosystem I: P37, glycerol-3-phosphate acyltransferases, chlorophyll a/b binding protein, CAB2 protein, hydroxymethyl-bilane synthase, pyruvate-orthophosphate dikinase, CAB3 protein, plastid ferritin, ferritin, early light-inducible protein, glutamate-1-semialdehyde aminotransferase, protochlorophyllide reductase, starch-granule-bound amylase synthase, light-harvesting chlorophyll a/b-binding protein of photosystem II, major pollen allergen Lol p 5a, plastid CIpB ATP-dependent protease, superoxide dismutase, ferredoxin NADP oxidoreductase, 28-kDa ribonucleoprotein, 31-kDa ribonucleoprotein, 33-kDa ribonucleoprotein, acetolactate synthase, ATP synthase CFO subunit 1, ATP synthase CFO subunit 2, ATP synthase CFO subunit 3, ATP synthase CFO subunit 4, cytochrome f, ADP-glucose pyrophosphorylase, glutamine synthase, glutamine synthase 2, carbonic anhydrase, GapA protein, heat-shock-protein hsp21, phosphate translocator, plastid CIpA ATP-dependent protease, plastid ribosomal protein CL24, plastid ribosomal protein CL9, plastid ribosomal protein PsCL18, plastid ribosomal protein PsCL25, DAHP synthase, starch phosphorylase, root acyl carrier protein II, betaine-aldehyde dehydrogenase, GapB protein, glutamine synthetase 2, phosphoribulokinase, nitrite reductase, ribosomal protein L12, ribosomal protein L13, ribosomal protein L21, ribosomal protein L35, ribosomal protein L40, triose phosphate-3-phosphoglyerate-phosphate translocator, ferredoxin-dependent glutamate synthase, glyceraldehyde-3-phosphate dehydrogenase, NADP-dependent malic enzyme and NADP-malate dehydrogenase.

[46444] More preferred the nucleic acid sequence encoding a plastidal transit peptide is derived from a nucleic acid sequence encoding a protein finally resided in the plastid and stemming from an organism selected from the group consisting of the species:

[46445] Acetabularia mediterranea, Arabidopsis thaliana, Brassica campestris, Brassica napus, Capsicum annuum, Chlamydomonas reinhardtii, Cucurbita moschata, Dunaliella salina, Dunaliella tertiolecta, Euglena gracilis, Flaveria trinervia, Glycine max, Helianthus annuus, Hordeum vulgare, Lemna gibba, Lolium perenne, Lycopersion esculentum, Malus domestica, Medicago falcata, Medicago sativa, Mesembryanthemum crystallinum, Nicotiana plumbaginifolia, Nicotiana sylvestris, Nicotiana tabacum, Oenotherea hookeri, Oryza sativa, Petunia hybrida, Phaseolus vulgaris, Physcomitrella patens, Pinus tunbergii, Pisum sativum, Raphanus sativus, Silene pratensis, Sinapis alba, Solanum tuberosum, Spinacea oleracea, Stevia rebaudiana, Synechococcus, Synechocystis, Triticum aestivum and Zea mays.

[46446] Even more preferred nucleic acid sequences are encoding plastidal transit peptides as disclosed by von Heijne et al. (Plant Molecular Biology Reporter, 9 (2), 104 (1991)), which are hereby incorporated by reference. Table a shows some examples of the transit peptide sequences disclosed by von Heijne et al. According to the disclosure of the invention especially in the examples the skilled worker is able to link other nucleic acid sequences disclosed by von Heijne et al. to the respective nucleic acid sequences shown in Table I, columns 5 or 8, preferably the respective coding region thereof, or homologs or fragments thereof. Most preferred nucleic acid sequences encoding transit peptides are derived from the genus Spinacia such as chloroplast 30S ribosomal protein PSrp-1, root acyl carrier protein II, acyl carrier protein, ATP synthase: γ subunit, ATP synthase: δ subunit, cytochrom f, ferredoxin I, ferredoxin NADP oxidoreductase (=FNR), nitrite reductase, phosphoribulokinase, plastocyanin or carbonic anhydrase. The skilled worker will recognize that various other nucleic acid sequences encoding transit peptides can easily isolated from plastid-localized proteins, which are expressed from nuclear genes as precursors and are then targeted to plastids. Such transit peptides encoding sequences can be used for the construction of other expression constructs. The transit peptides advantageously used in the inventive process and which are part of the inventive nucleic acid sequences and proteins are typically 20 to 120 amino acids, preferably 25 to 110, 30 to 100 or 35 to 90 amino acids, more preferably 40 to 85 amino acids and most preferably 45 to 80 amino acids in length and function post-translationally to direct the protein to the plastid, preferably to the chloroplast. The nucleic acid sequences encoding such transit peptides are localized upstream of nucleic acid sequence encoding the mature protein. For the correct molecular joining of the transit peptide encoding nucleic acid and the nucleic acid encoding the protein to be targeted it is sometimes necessary to introduce additional base pairs at the joining position, which form restriction enzyme recognition sequences useful for the molecular joining of the different nucleic acid molecules. This procedure might lead to very few additional amino acids at the Nterminal of the mature imported protein, which usually and preferably do not interfere with the protein function. In any case, the additional base pairs at the joining position which form restriction enzyme recognition sequences have to be chosen with care, in order to avoid the formation of stop codons or codons which encode amino acids with a strong influence on protein folding, like e.g. proline. It is preferred that such additional codons encode small n.d. structural flexible amino acids such as glycine or alanine.

[46447] As mentioned above the nucleic acid sequences coding for the proteins as shown in Table II, application no. 7, column 5 or 8, or homologs or fragments thereof, are joined to a nucleic acid sequence encoding a plastidic transit peptide, e.g, if for the nucleic acid molecule in Table I, column 6 the term “plastidic” is indicated. This nucleic acid sequence encoding a transit peptide ensures transport of the protein to the organelle. The nucleic acid sequence of the gene to be expressed and the nucleic acid sequence encoding the transit peptide are operably linked. Therefore the transit peptide coding sequence is fused in frame to the nucleic acid sequence coding for proteins as shown in Table II, application no. 7, column 5 or 8, or homologs or fragments thereof, e.g., if for the nucleic acid molecule in Table I, column 6 the term “plastidic” is indicated.

[46448] Other plastid transit peptides are disclosed by Schmidt et al. (J. Biol. Chem. 268 (36), 27447 (1993)), Della-Cioppa et al. (Plant. Physiol. 84, 965 (1987)), de Castro Silva Filho et al. (Plant Mol. Biol. 30, 769 (1996)), Zhao et al. (J. Biol. Chem. 270 (11), 6081 (1995)), Römer et al. (Biochem. Biophys. Res. Commun., 196 (3), 1414 (1993)), Keegstra et al. (Annu. Rev. Plant Physiol. Plant Mol. Biol. 40, 471 (1989)), Lubben et al. (Photosynthesis Res. 17, 173 (1988)) and Lawrence et al. (J. Biol. Chem. 272, (33), 20357 (1997)), Cho et al. (Planta 224, 598 (2006)), Lucia et al. (Transgenic R. 17 (4), 529 (2008)), Murayama et al. (Planta 225 (5), 1193 (2007)). A general review about targeting is disclosed by Allison R. Kermode in Critical

[46449] Reviews in Plant Science 15 (4), 285 (1996).

[46450] Favored plastidal transit peptide sequences, which are used in an embodiment of the inventive process and which form part of the inventive nucleic acid sequences are generally enriched in hydroxylated amino acid residues (serine and threonine), with these two residues generally constituting 20-35% of the total. They often have an amino-terminal region empty of Gly, Pro, and charged residues. Furthermore they have a number of small hydrophobic amino acids such as valine and alanine and generally acidic amino acids are lacking. In addition they generally have a middle region rich in Ser, Thr, Lys and Arg. Overall they have very often a net positive charge.

[46451] Advantageously mitochondrial transit peptides, which are beneficially used in an embodiment of the process of the present invention, are derived from the nucleic acid sequence encoding a protein selected from the group consisting of 22 kDA heat shock protein; 70 kDA heat shock protein; 83 kDA heat shock protein; 40S ribosomal protein S19; 50S ribosomal protein L15; ribosomal protein L29; 22 kDA PSST protein of complex I; 2-oxoacid dehydrogenase family protein; 2-oxoglutarate/malate translocator; 3-methyl-2-oxobutanoate hydroxymethyltransferase; 3-Methylcrotonyl-coenzyme A carboxylase

[46452] (MCCase); 7,8 - Dihydropteroate synthase (DHPS)/6-hydroxymethyl-7,8-dihydropterine pyrophosphokinase (HPPK); aconitate hydratase; acyl carrier protein (ACP); ADP/ATP translocase; alanyl-tRNA synthetase; alcohol dehydrogenase (ADH); alternative oxidase (AOX); aminoacyltRNA ligase; asparate aminotransferase; ATP synthase alpha subunit; ATP synthase beta subunit; ATP synthase delta subunit; ATP synthase epsilon subunit; ATP synthase gamma subunit; ATP-dependent Clp protease - proteolytic subunit; Chaperonin 60—CPN60; Chaperonin 60 (2)—CPN60-2; Chaperonin 60(1) - CPN60-1; citrate synthase; cytochrome b-cl complex subunit Rieske FeS Protein; cytochrome c reductase-processing peptidase subunit II; dihydrolipoamide S-acetyltransferase; farnesyl-diphosphate synthase 1; formate dehydrogenase ; fumarate hydratase; gamma carbonic anhydrase protein (gammaCA); gamma carbonic anhydrase-like protein 1 (gammaCAL1); gamma carbonic anhydrase-like protein 2 (gammaCAL2); gammaaminobutyric acid transaminase (GABA-T); glutathione reductase (GR); glycine decarboxylase subunit H; glycine decarboxylase subunit L; glycine decarboxylase subunit P; glycine decarboxylase subunit T; isovaleryl-CoA dehydrogenase (IVD); lipoamide dehydrogenase; malate oxidoreductase; manganese superoxide dismutase (Mn)SOD; methylmalonate-semialdehyde dehydrogenase; mitochondrial-processing peptidase beta subunit (MPP); mitochondrialprocessing peptidase subunit alpha (MPP); monodehydroascorbate reductase (MDHAR; NAD dependent isocitrate dehydrogenase; NAD dependent malate dehydrogenase; NAD-dependent malic enzyme; NAD-dependent malic enzyme 59 kDa isoform; NAD-dependent malic enzyme 62 kDa isoform; NAD-dependent malic enzyme 65 kDa isoform; NADH ubiquinone oxidoreductase 29 kDa subunit; NADH-ubiquinone oxidoreductase 18 kDa subunit; NADH-ubiquinone oxidoreductase 20 kDa subunit; NADH-ubiquinone oxidoreductase 23 kDa subunit; NADH-ubiquinone oxidoreductase 75 kDa subunit; NADP dependent isocitrate dehydrogenase; NADP dependent malate dehydrogenase; nucleoside diphosphate kinase; nucleoside diphosphate kinase III; o-acetylserine (thiol) lyase (OAS-TL) ; propionyl-CoA carboxylase; protoporphyrinogen IX oxidase; pyruvate dehydrogenase E1 component subunit alpha; serine acetyltransferase (SAT); serine hydroxymethyltransferase; succinate dehydrogenase (SDH); succinic semialdehyde dehydrogenase (SSADH); succinyl-CoA ligase (GDP-forming) alpha-chain; succinyl-CoA ligase [GDP-forming] subunit beta; thiosulfate sulfurtransferase; threonyl-tRNA synthetase; trans-2-enoyl-CoA reductase; translocase inner membrane (TIM); translocase outer membrane (TOM); tRNA synthetase class I and ubiquinol cytochrome C oxidoreductase complex.

[46453] More preferred the nucleic acid sequence encoding a mitochondrial transit peptide is derived from a nucleic acid sequence encoding a protein finally resided in the mitochondrion and stemming from an organism selected from the group consisting of the species:

[46454] Acetabularia mediterranea, Arabidopsis thaliana, Brassica campestris, Brassica napus, Capsicum annuum, Chlamydomonas reinhardtii, CururbitaCucurbita moschata, Daucus carota, Dunaliella salina, Dunaliella tertiolecta, Euglena gracilis, Flaveria trinervia, Glycine max, Helianthus annuus, Hordeum vulgare, Lactuca sativa, Lemna gibba, Lolium perenne, Lycopersion esculentum, Malus domestica, Medicago falcata, Medicago sativa, Mesembryanthemum crystallinum, Nicotiana plumbaginifolia, Nicotiana sylvestris, Nicotiana tabacum, Oenotherea hookeri, Oryza sativa, Petunia hybrida, Phaseolus vulgaris, Physcomitrella patens, Pinus tunbergii, Pisum sativum, Pyrus pyrifolia, Raphanus sativus, Saccharum officinarum, Silene pratensis, Sinapis alba, Solanum tuberosum, Spinacea oleracea, Stevia rebaudiana, Synechococcus, Synechocystis, Triticum aestivum and Zea mays.

[46455] Even more preferred nucleic acid sequences are encoding mitochondrial transit peptides as disclosed by White and Scandalios (Proc. Natl. Acad. Sci., 86 (10), 3534 (1989)), Cho et al (Plant Physiol. 149, 745 (2009)), Chatre et al (Journal of Experimental Botany, 60 (3), 741 (2009)), Murayama et al (Planta 225 (5), 1193 (2007) and Manzano et al (2006) , which are hereby incorporated by reference. Table b shows some examples of the transit peptide sequences disclosed by White and Scandalios (1989), Cho et al (2009), Chatre et al (2009), Murayama et al (2007) and Manzano et al (2006), Glaser et al (Plant Mol Biol. 38 (1-2), 311 (1998) and Huang et al (Plant Phys. 150, 1272 (2009)). According to the disclosure of the invention especially in the examples the skilled worker is able to link other nucleic acid sequences disclosed by Glaser et al (Plant Mol Biol. 38 (1-2), 311 (1998)) and Huang et al (Plant Phys. 150, 1272 (2009)) to the respective nucleic acid sequences shown in Table I, columns 5 or 8, preferably the coding region thereof, or a homolog or a fragment thereof. Most preferred nucleic acid sequences encoding transit peptides are derived from the genus Arabidopsis thaliana such as mitochondrial malate oxidoreductase, manganese superoxide dismutase (Mn)SOD, translocase inner membrane (TIM), translocase outer membrane (TOM), ATP synthase alpha subunit, ATP synthase beta subunit, ATP synthase gamma subunit, ATP synthase delta subunit, ATP synthase epsilon subunit, ADP/ATP translocase, aconitate hydratase and isovaleryl-CoA dehydrogenase (IVD). The skilled worker will recognize that various other nucleic acid sequences encoding transit peptides can easily isolated from mitochondrion-localized proteins, which are expressed from nuclear genes as precursors and are then targeted to mitochondria. Such transit peptides encoding sequences can be used for the construction of other expression constructs. The transit peptides advantageously used in the inventive process and which are part of the inventive nucleic acid sequences and proteins are typically 20 to 120 amino acids, preferably 25 to 110, 30 to 100 or 35 to 90 amino acids, more preferably 40 to 85 amino acids and most preferably 45 to 80 amino acids in length and function post-translationally to direct the protein to the mitochondrion. The nucleic acid sequences encoding such transit peptides are localized upstream of nucleic acid sequence encoding the mature protein. For the correct molecular joining of the transit peptide encoding nucleic acid and the nucleic acid encoding the protein to be targeted it is sometimes necessary to introduce additional base pairs at the joining position, which forms restriction enzyme recognition sequences useful for the molecular joining of the different nucleic acid molecules. This procedure might lead to very few additional amino acids at the N-terminal of the mature imported protein, which usually and preferably do not interfere with the protein function. In any case, the additional base pairs at the joining position which forms restriction enzyme recognition sequences have to be chosen with care, in order to avoid the formation of stop codons or codons which encode amino acids with a strong influence on protein folding, like e.g. proline. It is preferred that such additional codons encode small n.d. structural flexible amino acids such as glycine or alanine.

[46456] As mentioned above the nucleic acid sequences coding for the proteins as shown in the respective line in Table II, application no. 7, column 5 or 8, or homologs or fragments thereof, are joined to a nucleic acid sequence encoding a mitochondric transit peptide, e.g., if for the respective nucleic acid molecule in Table I, column 6 the term “mitochondric” is indicated. This nucleic acid sequence encoding a transit peptide ensures transport of the protein to the organelle. The nucleic acid sequence of the gene to be expressed and the nucleic acid sequence encoding the transit peptide are operably linked. Therefore the transit peptide encoding sequence is fused in frame to the nucleic acid sequence coding for proteins as shown in the respective line in Table II, application no. 7, column 5 or 8, or homologs or fragments thereof, e.g., if for the nucleic acid molecule in the respective line in Table I, column 6 the term “mitochondric” is indicated.

[46457] Other mitochondric transit peptides are disclosed by Cho et al. (Plant Physiol. 149, 745 (2009)), Gnanasambandam et al. (Functional Plant Biology 35(2), 166, (2008)), Subbaiah et al. (J. Biol.Chem. 281 (23), 15625 (2006)), Murcha et al. (Plant Physiol. 138, 2134 (2005)), Chatre et al. (Journal of Experimental Botany, 60 (3), 741 (2009)), Millar and Heazlewood (Plant Physiol. 131, 443 (2003)), White and Scandalios (Proc. Natl. Acad. Sci., 86 (10), 3534 (1989)), Laloi et al. (Proc. Natl. Acad. Sci., 98 (24), 14144 (2001)), Barranco-Medina et al. (Plant Physiol. and Biochem. 45, 729 (2007)), Olejnik et al. (FEBS J. 274 (18), 4877 (2007)), Fabre et al. (Plant Cell and Env. 30 (5), 617 (2007)), Murayama et al. (Planta 225 (5), 1193 (2007)), Bathgate et al. (Eur. J. Biochem. 183, 303 (1989)), Winning et al. (Plant J. 2, 763 (1992)), Murcha et al. (Plant Physiol. 143, 199 (2007)), Lehnerer et al. (Botanica Acta, 107, 306 (1994)), Kimura et al. (J. Biol. Chem. 265 (11), 6079 (1990)), Yang et al. (Plant Mol. Biol., 62, 951 (2006)).

[46458] Favored mitochondric transit peptide sequences, which are used in an embodiment of the inventive process and which form part of the inventive nucleic acid sequences are generally enriched in hydroxylated amino acid residues (serine and threonine), with these two residues generally constituting 20-35% of the total. They often have an amino-terminal region empty of Gly, Pro, and charged residues. Furthermore they have a number of small hydrophobic amino acids such as valine and alanine and generally acidic amino acids are lacking.

[46459] In addition they generally have a middle region rich in Ser, Thr, Lys and Arg. Overall they have very often a net positive charge.

[46460] Nucleic acid sequences coding for the transit peptides may be chemically synthesized either in part or wholly according to structure of transit peptide sequences disclosed in the prior art. Said natural or chemically synthesized sequences can be directly linked to the sequences encoding the mature protein or via a linker nucleic acid sequence, which may be typically less than 500 base pairs, preferably less than 450, 400, 350, 300, 250 or 200 base pairs, more preferably less than 150, 100, 90, 80, 70, 60, 50, 40 or 30 base pairs and most preferably less than 25, 20, 15, 12, 9, 6 or 3 base pairs in length and are in frame to the coding sequence. Furthermore favorable nucleic acid sequences encoding transit peptides may comprise sequences derived from more than one biological and/or chemical source and may include a nucleic acid sequence derived from the amino-terminal region of the mature protein, which in its native state is linked to the transit peptide. In a preferred embodiment of the invention said amino-terminal region of the mature protein is typically less than 150 amino acids, preferably less than 140, 130, 120, 110, 100 or 90 amino acids, more preferably less than 80, 70, 60, 50, 40, 35, 30, 25 or 20 amino acids and most preferably less than 19, 18, 17, 16, 15, 14, 13, 12, 11 or 10 amino acids in length. But even shorter or longer stretches are also possible. In addition target sequences, which facilitate the transport of proteins to other cell compartments such as the vacuole, endoplasmic reticulum, golgi complex, glyoxysomes, peroxisomes, mitochondria (in case of a plastidal transit peptide) or plastids, especially chloroplasts (in case of a mitochondric transit peptide) may be also part of the inventive nucleic acid sequence. The proteins translated from said inventive nucleic acid sequences are a kind of fusion proteins that means the nucleic acid sequences encoding the plastidal transit peptide for example the ones shown in Table a, preferably the last one of the Table a are joint to the respective nucleic acid sequences shown in Table I, application no. 7, columns 5 or 8, especially the coding region thereof, or homologs or fragments thereof, in case of nucleic acid sequences being expressed in plastids, and that means the nucleic acid sequences encoding the mitochondric transit peptide for example the ones shown in Table b, preferably the last one of the Table b are joint to the respective nucleic acid sequences shown in Table I, application no. 7, columns 5 or 8, especially the coding region thereof, or homologs or fragments thereof, in case of nucleic acid sequences being expressed in mitochondria. The person skilled in the art is able to join said sequences in a functional manner. Advantageously the transit peptide part is cleaved off from the protein part shown in Table II, application no. 7, columns 5 or 8, or a homolog or fragment thereof, during or after the transport into the organelles, preferably into the plastids or mitochondria, respectively.

[46461] All products of the cleavage of the preferred transit peptide shown in the last line of Table a have preferably the N-terminal amino acid sequences QIA CSS or QIA EFQLTT in front of the start methionine of the respective protein mentioned in Table II, application no. 7, column 5 or 8.

[46462] or homologs or fragments thereof. Other short amino acid sequences of an range of 1 to 20 amino acids preferable 2 to 15 amino acids, more preferable 3 to 10 amino acids most preferably 4 to 8 amino acids are also possible in front of the start methionine of the protein mentioned in Table II, application no. 7, columns 5 or 8, or homologs or fragments thereof. In case of the amino acid sequence QIA CSS the three amino acids in front of the start methionine are stemming from the LIC (=ligatation independent cloning) cassette. Said short amino acid sequence is preferred in the case of the expression of E. coli genes. In case of the amino acid sequence QIA EFQLTT the six amino acids in front of the start methionine are stemming from the LIC cassette. Said short amino acid sequence is preferred in the case of the expression of S. cerevisiae genes. The skilled worker knowns that other short sequences are also useful in the expression of the respective nucleic acid molecule comprising a polynucleotide as depicted in Table I, application no. 7, column 5 or 8, preferably the coding region thereof, or a homolog or a fragment thereof. Furthermore the skilled worker is aware of the fact that there is not a need for such short sequences in the expression of the genes.

TABLE A
Examples of plastidal transit peptides disclosed by von Heijne et al.

| | | | SEQ | |
|---|---|---|---|---|
| Trans | | | ID | |
| Pep | Organism | Transit Peptide | NO. | Reference |
| 1 | Acetabularia | MASIMMNKSVVLSKECAKPLATPK | 1 | Mol. Gen. Genet. |
| | mediterranea | VTLNKRGFATTIATKNREMMVWQP | | 218, 445(1989) |
| | | FNNKMFETFSFLPP | | |

| | | | | |
|---|---|---|---|---|
| 2 | Arabidopsis | MAASLQSTATFLQSAKIATAPSRG | 2 | EMBO J. 8, 3187 |
| | thaliana | SSHLRSTQAVGKSFGLETSSARLT | | (1989) |
| | | CSFQSDFKDFTGKCSDAVKIAGFA | | |
| | | LATSALVVSGASAEGAPK | | |
| 3 | Arabidopsis | MAQVSRICNGVQNPSLICNLSKSS | 3 | Mol. Gen. Genet. |
| | thaliana | QRKSPLSVSLKTQQHPRAYPISSS | | 210, 437 (1987) |
| | | WGLKKSGMTLIGSELRPLKVMSSV | | |
| | | STAEKASEIVLQPIREISGLIKLP | | |
| 4 | Arabidopsis | MAAATTTTTTSSSISFSTKPSPSS | 4 | Plant Physiol. 85, |
| | thaliana | SKSPLPISRFSLPFSLNPNKSSSS | | 1110 (1987) |
| | | SRRRGIKSSSP SS ISAVLNTTTNV | | |
| | | TTTPSPTKPTKPETF ISRFAPDQP | | |
| | | RKGA | | |
| 5 | Arabidopsis | MITSSLTCSLQALKLSSPFAHGST | 5 | J. Biol. Chem. 265, |
| | thaliana | PLSSLSKPNSFPNHRMPALVPV | | 2763 (1990) |
| 6 | Arabidopsis | MASLLGTSSSAIWASPSLSSPSSK | 6 | EMBO J. 9,1337 |
| | thaliana | PSSSPICFRPGKLFGSKLNAGIQI | | (1990) |
| | | RPKKNRSRYHVSVMNVATEINSTE | | |
| | | QVVGKFDSKKSARPVYPFAAI | | |
| 7 | Arabidopsis | MASTALSSAIVGTSFIRRSPAPISL | 7 | Plant Physiol. 93, |
| | thaliana | RSLPSANTQSLFGLKSGTARGG | | 572 (1990) |
| | | RVVAM | | |
| 8 | Arabidopsis | MAASTMALSSPAFAGKAVNLSPAA | 8 | Nucl. Acids Res. 14, |
| | thaliana | SEVLGSGRVTNRKTV | | 4051 (1986) |
| 9 | Arabidopsis | MAAITSATVTIPSFTGLKLAVSSK | 9 | Gene 65, 59 (1988) |
| | thaliana | PKTLSTISRSSSATRAPPKLALKS | | |
| | | SLKDFGVIAVATAASIVLAGNAMA | | |
| | | MEVLLGSDDGSLAFVPSEFT | | |
| 10 | Arabidopsis | MAAAVSTVGAINRAPLSLNGSGSG | 10 | Nucl. Acids Res. 17, |
| | thaliana | AVSAPASTFLGKKWTVSRFAQSN | | 2871 (1989) |
| | | KKSNGSFKVLAVKEDKQTDGDRWR | | |
| | | GLAYDTSDDQIDI | | |
| 11 | Arabidopsis | MkSSMLSSTAWTSPAQATMVAPF | 11 | Plant Mol. Biol. 11, |
| | thaliana | TGLKSSASFPVTRKANNDITSITS | | 745 (1988) |
| | | NGGRVSC | | |
| 12 | Arabidopsis | MAASGTSATFRASVSSAPSSSSQL | 12 | Proc. Natl. Acad. |
| | thaliana | THLKSPFKAVKY TPLPS SRSKSSS | | Sci. USA 86, 4604 |
| | | FSVSCTIAKDPPVLMAAGSDPALW | | (1989) |
| | | QRPDSFGRFGKFGGKYVPE | | |
| 13 | Brassica | MSTTFCSSVCMQATSLAATTRISF | 13 | Nucl. Acids Res. 15, |
| | campestris | QKPALVSTTNLSFNLRRSIPTRFS | | 7197 (1987) |
| | | ISCAAKPETVEKVSKIVKKQLSLK | | |
| | | DDQKVVAE | | |
| 14 | Brassica | MATTFSASVSMQATSLATTTRISF | 14 | Eur. J. Biochem. |
| | napus | QKPVLVSNHGRTNLSFNLSRTRLSISC | | 174, 287 (1988) |
| 15 | Chlamydomonas | MQALSSRVNIAAKPQRAQRLWRA | 15 | Plant Mol. Biol. 12, |
| | reinhardtii | EEVKAAPKKEVGPKRGSLVK | | 463 (1989) |
| 16 | Cucurbita | MAELIQDKESAQSAATAAAASSGY | 16 | FEBS Lett. 238, 424 |
| | moschata | ERRNEPAHSRKFLEVRSEEELLSCIKK | | (1988) |
| 17 | Spinacea | MSTINGCLTSISPSRTQLKNTSTL | 17 | J. Biol. Chem. 265, |
| | oleracea | RPTFIANSRVNPSSSVPPSLIRNQ | | 5414 (1990) |
| | | PVFAAPAPIITPTL | | |
| 18 | Spinacea | MTTAVTAAVSFPSTKTTSLSARCS | 18 | Curr. Genet. 13, 517 |
| | oleracea | SVISPDKISYKKVPLYYRNVSATG | | (1988) |
| | | KMGPIRAQIASDVEAPPPAPAKVEKMS | | |
| 19 | Spinacea | MTTAVTAAVSFPSTKTTSLSARSS | 19 | |
| | oleracea | SVISPDKISYKKVPLYYRNVSATG | | |
| | | KMGPIRA | | |

TABLE B
Examples of mitochondric transit peptides disclosed by White and
Scandalios (1989); Cho et al (2009); Chatre et al (2008);
Murayama et al (2007); Manzano et al (2006):

| | | | SEQ | |
|---|---|---|---|---|
| Trans | | | ID | |
| Pep | Organism | Transit Peptide | NO. | Reference |
| 20 | Zea mays | MALRTLASKKVLSFPFGGAGRPL | 63 | Proc. Nat. Acad.Sci. |
| | | AAAASARGV | | 86, 3534 (1989) |
| 21 | Oryza | MGKAAAVGTAVVVAAAVGVAVVLA | 64 | Plant Physiol 149, |
| | sativa | | | 745, (2009) |
| 22 | Oryza | MGKGTVVGTAVVVCAAAAAAVGVAVV | 65 | Plant Physiol 149, |
| | sativa | VS | | 745, (2009) |
| 23 | Arabidosis | MIITTHKRDINLLVLQLGAALAV | 66 | J. Exp. Bot. 60 (3), |
| | thaliana | SFAGFLFARFRKNTKR | | 741 (2009) |
| 24 | Oryza | MAAAAISHLRRGAPRHARALYLSTR- | 67 | Planta 225 (5), 1193 |
| | sativa | RFSSSSAAGVAPLAAVAASARR- | | (2007) |
| | | LLSTSVDSGASSGESYKPPLFDPF- | | |
| | | RAASLASSAPPLESPPIEELPDDA- | | |
| | | TPPPEEEPGLPAPEKDPVATACQHE- | | |
| | | LEGLKAVETVRSRKESTEEKEAWSL- | | |
| | | LGRSVVSYCGTA | | |
| 25 | Arabidosis | MSVSCCCRNLGKTIKKAIPSHHLHL- | 68 | Plant Mol. Bio. 61, |
| | thaliana | RSLGGSLYRRRIQSSSMETDLKS | | 195 (2006) |

[46463] Alternatively to the targeting of the respective sequences shown in Table II, application no. 7, columns 5 or 8, or homologs or fragments thereof, preferably of sequences in general encoded in the nucleus with the aid of the targeting sequences mentioned for example in Table a alone, Table b alone, or in combination with other targeting sequences preferably into plastids or mitochondria, respectively, the nucleic acids of the invention can directly be introduced into the plastidal or mitochondrial genome. Therefore in a preferred embodiment the respective nucleic acid sequences shown in the respective line in Table I, application no. 7, columns 5 or 8, preferably the coding region thereof, or homologs or fragments thereof, are directly introduced and expressed in plastids e.g., if for the nucleic acid molecule in the respective line in Table I, column 6, the term “plastidic” is indicated, or are directly introduced and expressed in mitochondria e.g., if for the nucleic acid molecule in the respective line in Table I, column 6 the term “mitochondric” is indicated.

[46464] The term “introduced” in the context of this specification shall mean the insertion of a nucleic acid sequence into the organism by means of a “transfection”, “transduction” or preferably by “transformation”.

[46465] A plastid, such as a chloroplast, or a mitochondrion, has been “transformed” by an exogenous (preferably foreign) nucleic acid sequence if a nucleic acid sequence has been introduced into the plastid or mitochondrion that means that this sequence has crossed the membrane or the membranes of the plastid or of the mitochondrion. The exogenous, preferably foreign, DNA may be integrated (covalently linked) into plastid or mitochondrial DNA making up the genome of the plastid or mitochondrion, or it may remain unintegrated (e.g., by including a chloroplast origin of replication). “Stably” integrated DNA sequences are those, which are inherited through plastid or mitochondrion replication, thereby transferring new plastids or mitochondria, with the features of the integrated DNA sequence to the progeny.

[46466] For expression a person skilled in the art is familiar with different methods to introduce the nucleic acid sequences into different organelles, such as the preferred plastids or mitochondria. Such methods are for example disclosed by Pal Maiga (Annu. Rev. Plant Biol. 55, 289, (2004)), Evans T. (WO 2004/040973), McBride K.E. et al. (U.S. Pat. No. 5,455,818), Daniell H. et al. (U.S. Pat. No. 5,932,479 and U.S. Pat. No. 5,693,507) and Straub J. M. et al. (U.S. Pat. No. 6,781,033). A preferred method is the transformation of microspore-derived hypocotyl or cotyledonary tissue (which are green and thus contain numerous plastids) leaf tissue and afterwards the regeneration of shoots from said transformed plant material on selective medium. As methods for the transformation bombarding of the plant material or the use of independently replicating shuttle vectors are well known by the skilled worker. But also a PEG-mediated transformation of plastids or Agrobacterium transformation with binary vectors are possible. Useful markers for the transformation of plastids are positive selection markers for example the chloramphenicol-, streptomycin-, kanamycin-, neomycin-, amikamycin-, spectinomycin-, triazine- and/or lincomycin-resistance genes. As additional markers named in the literature often as secondary markers, genes coding for the resistance against herbicides such as phosphinothricin (=glufosinate, BASTA™, Liberty™, encoded by the bar gene), glyphosate (=N-(phosphonomethyl)glycine, Roundup Ready™, encoded by the 5-enolpyruvylshikimaete-3-phosphate synthase gene =epsps), sulfonylurea (e.g. =Staple™, encoded by the acetolactate synthase gene), imidazolinone (=IMI, e.g. imazethapyr, imazamox, Clearfield™, encoded by the acetohydroxyacid synthase (AHAS) gene, also known as acetolactate synthase (ALS) gene) or bromoxynil (=Buctril™, encoded by the oxy gene) or genes coding for antibiotics such as hygromycin or G418 are useful for further selection. Such secondary markers are useful in the case when most genome copies are transformed. In addition negative selection markers such as the bacterial cytosine deaminase (encoded by the codA gene) are also useful for the transformation of organelles, especially plastids.

[46467] Thus, in one embodiment, an activity disclosed herein as being conferred by a polypeptide shown in the respective line in Table II, or a homolog or a fragment thereof, is increased or generated by linking the polypeptide disclosed in respective line in Table II, or a homolog or a fragment thereof, or a polypeptide conferring the same said activity with a targeting signal as herein described, if in the respective line in column 6 of Table II the term “plastidic” is listed for said polypeptide. For example, the polypeptide described can be linked to the targeting signal shown in Table a.

[46468] Accordingly, in the method of the invention for producing a transgenic plant with increased fine chemical production as compared to a corresponding, e.g. non-transformed, wild type plant, comprising transforming a non-human organism, preferably a plant cell, a plant or a part thereof, with the mentioned nucleic acid molecule, said nucleic acid molecule selected from said mentioned group encodes for a polypeptide conferring said activity being linked to a targeting signal as mentioned herein, e.g. as mentioned in Table a, e.g. if in the respective line in column 6 of Table II the term “plastidic” is listed for the encoded polypeptide.

[46469] To increase the possibility of identification of transformants it is possible to use reporter genes other then the aforementioned resistance genes or in addition to said genes. Reporter genes are for example [3-galactosidase-, [3-glucuronidase-(GUS), alkaline phosphatase- and/or green-fluorescent protein-genes (GFP).

[46470] For the process of the present invention it may be of great advantage that by transforming the plastids the intraspecies specific transgene flow is blocked, because a lot of species such as corn, cotton and rice have a strict maternal inheritance of plastids. By placing the respective genes specified in the respective line in Table I, application no. 7, columns 5 or 8, preferably the coding region, or homologs or fragments thereof, e.g. if for the nucleic acid molecule in the respective line in column 6 of Table I the term “plastidic” is indicated, in the plastids of plants, these genes will not be present in the pollen of said plants.

[46471] A further preferred embodiment of the invention relates to the use of so called “chloroplast localization sequences”, in which a first RNA sequence or molecule is capable of transporting or “chaperoning” a second RNA sequence, such as a RNA sequence transcribed from the sequences depicted in the respective line in Table I, application no. 7, columns 5 or 8, preferably the coding region thereof, or a homolog or a fragment thereof, or a sequence encoding a protein, as depicted in the respective line in Table II, application no. 7, columns 5 and 8, or a homolog or a fragment thereof, from an external environment inside a cell or outside a plastid into a chloroplast. In one embodiment the chloroplast localization signal is substantially similar or complementary to a complete or intact viroid sequence. The chloroplast localization signal may be encoded by a DNA sequence, which is transcribed into the chloroplast localization RNA. The term “viroid” refers to a naturally occurring single stranded RNA molecule (Flores, C. R. Acad. Sci. III. 324 (10), 943 (2001)). Viroids usually contain about 200-500 nucleotides and generally exist as circular molecules. Examples of viroids that contain chloroplast localization signals include but are not limited to ASBVd, PLMVd, CChMVd and ELVd. The viroid sequence or a functional part of it can be fused to the sequences depicted in the respective line in Table I, application no. 7, columns 5 or 8, preferably the coding region thereof, or a homolog or a fragment thereof, or a sequence encoding a protein, as depicted in the respective line in Table II, application no. 7, columns 5 or 8, or a homolog or a fragment thereof, in such a manner that the viroid sequence transports a sequence transcribed from a sequence as depicted in the respective line in Table I, application no. 7 columns 5 or 8, preferably the coding region thereof, or a homolog or a fragment thereof, or a sequence encoding a protein as depicted in the respective line in Table II, application no. 7 columns 5 or 8, or a homolog or a fragment thereof, into the chloroplasts, e.g. if for the nucleic acid molecule in column 6 of Table I the term “plastidic” is indicated. A preferred embodiment uses a modified ASBVd (Navarro et al., Virology. 268 (1), 218 (2000)).

[46472] In a further specific embodiment the protein to be expressed in the plastids such as the proteins depicted in the respective line in Table II, application no. 7, columns 5 or 8, or a homolog or a fragment thereof, e.g. if for the nucleic acid molecule in the respective line in column 6 of Table I the term “plastidic” is indicated, are encoded by different nucleic acids. Such a method is disclosed in WO 2004/040973, which shall be incorporated by reference. WO 2004/040973 teaches a method, which relates to the translocation of an RNA corresponding to a gene or gene fragment into the chloroplast by means of a chloroplast localization sequence. The genes, which should be expressed in the plant or plant cells, are split into nucleic acid fragments, which are introduced into different compartments in the plant e.g. the nucleus, the plastids and/or mitochondria. Additionally plant cells are described in which the chloroplast contains a ribozyme fused at one end to an RNA encoding a fragment of a protein used in the inventive process such that the ribozyme can trans-splice the translocated fusion RNA to the RNA encoding the gene fragment to form and as the case may be reunite the nucleic acid fragments to an intact mRNA encoding a functional protein for example as disclosed in the respective line in Table II, application no. 7, columns 5 or 8, or a homolog or a fragment thereof.

[46473] In a preferred embodiment of the invention the nucleic acid sequences as shown in the respective line in Table I, application no. 7, columns 5 or 8, preferably the coding region thereof, or homologs or fragments thereof, e.g. if for the nucleic acid molecule in the respective line in column 6 of Table I the term “plastidic” is indicated, used in the inventive process are transformed into plastids, which are metabolically active. Those plastids should preferably maintain at a high copy number in the plant or plant tissue of interest, most preferably the chloroplasts found in green plant tissues, such as leaves or cotyledons or in seeds.

[46474] For a good expression in the plastids the nucleic acid sequences as shown in the respective line in Table I, application no. 7, columns 5 or 8, preferably the coding region thereof, or homologs or fragments thereof, e.g. if for the nucleic acid molecule in the respective line in column 6 of Table I the term “plastidic” is indicated, are introduced into an expression cassette using preferably a promoter and terminater, which are active in plastids preferably a chloroplast promoter. Examples of such promoters include the psbA promoter from the gene from spinach or pea, the rbcL promoter, and the atpB promoter from corn.

[46475] In another embodiment, an activity disclosed herein as being conferred by a polypeptide shown in the respective line in Table II is increased or generated by linking the polypeptide disclosed in the respective line in Table II or a polypeptide conferring the same said activity with an targeting signal as herein described, if in the respective line in column 6 of Table II the term “mitochondric” is listed for said polypeptide. For example, the polypeptide described can be linked to the targeting signal shown in Table b.

[46476] In these cases the respective organelle is a mitochondrion. However, the remarks made regarding the plastids are applicable in analogy.

[46477] In another embodiment, an activity disclosed herein as being conferred by a polypeptide shown in Table II is increased or generated by the polypeptide disclosed in the respective line in Table II or a polypeptide conferring the same said activity without linking said polypeptide shown in the respective line in Table II to a targeting signal, if in the respective line in column 6 of Table II the term “non-targeted” is listed for said polypeptide.

[46478] For the purposes of the description of the present invention, the terms “non-targeted” shall indicate, that the nucleic acid of the invention is expressed without the addition of a “non-natural transit peptide encoding sequence”. A “non-natural transit peptide encoding sequence” is a sequence which is not a natural part of a nucleic acid of the invention, e.g. of the nucleic acids depicted in the respective line in Table I column 5 or 8, preferably the coding region thereof, or homologs or fragments thereof, but which is rather added by molecular manipulation steps as for example described in the example under “plastid targeted expression”. However, the terms “non-targeted” shall not exclude a targeted localization to any cell compartment for the products of the inventive nucleic acid sequences by their naturally occurring sequence properties within the background of the transgenic organism. The subcellular location of the mature polypeptide derived from the enclosed sequences can be predicted by a skilled person for the organism (plant) by using software tools like TargetP (Emanuelsson et al., J. Mol. Biol. 300, 1005 (2000)), ChloroP (Emanuelsson et al., Protein Science 8, 978 (1999)) or other predictive software tools (Emanuelsson et al., Nature Protocols 2, 953 (2007)).

[46479] Preferably, the process according to the invention further comprises the step of recovering the fine chemical, which is synthesized by the organism from the organism and/or from the culture medium used for the growth or maintenance of the organism. The term “recovering” means the isolation of the fine chemical in different purities, that means on the one hand harvesting of the biological material, which contains the fine chemical without further purification and on the other hand purities of the fine chemical between 5% and 100% purity, preferred purities are in the range of 10% and 99%. In one embodiment, the purities are at least 20%, 30%, 40%, 50%, 60%, 70%, 80%, 90%, 95% or 99%.

[46480] Advantageously the process for the production of the fine chemical alpha-tocopherol, and/or gamma-tocopherol leads to an enhanced production of the respective fine chemical. The terms “enhanced” or “increase” mean at least a 10%, 20%, 30%, 40% or 50%, preferably at least 60%, 70%, 80%, 90% or 100%, more preferably 150%, 200%, 300%, 400% or 500% higher production of the respective fine chemical alpha-tocopherol, and/or gamma-tocopherol in comparison to the wild-type as defined above, e.g. that means in comparison to a non-human organism without the aforementioned modification of the activity of a protein as shown in the respective line in Table II, application no. 7, column 5 or 8, or a fragment or a homolog thereof. The modification of the activity of a protein as shown in the respective line in Table II, application no. 7, column 5 or 8, or a homolog or a fragment thereof, or their combination can be achieved by joining the protein to a respective transit peptide, e.g. if for the respective encoding nucleic acid molecule in column 6 of Table I the term “plastidic” or “mitochondric” is indicated.

[46481] Surprisingly it was found, that the transgenic expression of a protein as shown in the respective line in Table II, application no. 7, column 5, especially from the Saccaromyces cerevisiae, E. coli, Arabidopsis thaliana, Azotobacter vinelandii, Brassica napus, Glycine max, Oryza sativa, Physcomitrella patens, Synechocystis sp., Thermus thermophilus, Zea mays in a non-human organism, like a plant or a part thereof, such as Arabidopsis thaliana for example, or a microorganism, conferred a production of or an increase in alpha-tocopherol, and/or gamma-tocopherol, respectively, to the transgenic non-human organism as compared to a corresponding non-transformed wild type.

[46482] In one embodiment the transgenic expression of a protein as shown in the respective line in Table II, application no. 7, column 5 or 8, or a homolog or a fragment thereof, especially from the Saccaromyces cerevisiae, E. coli, Arabidopsis thaliana, Azotobacter vinelandii, Brassica napus, Glycine max, Oryza sativa, Physcomitrella patens, Synechocystis sp., Thermus thermophilus, Zea mays in a non-human organism, like a plant or a part thereof, such as Arabidopsis thaliana for example, or a microorganism, confers a production of or an increase in alpha-tocopherol, and/or gamma-tocopherol,respectively, to the transgenic non-human organism as compared to a corresponding non-transformed wild type.

[46483] Accordingly, in one embodiment, an increase of alpha-tocopherol in a non-human organism, as compared to a corresponding non-transformed wild type non-human organism, is conferred in the process of the invention, if the activity of a polypeptide showing the activity of a pyruvate kinase, or if the activity of the polypeptide 51340801_CANOLA, preferably represented by SEQ ID NO. 15533, or a homolog or fragment thereof, or if the activity of a polypeptide encoded by a nucleic acid molecule comprising the nucleic acid SEQ ID NO. 15532, preferably the coding region thereof, or a homolog or fragment thereof, e.g. derived from Brassica napus, is increased or generated. For example the activity of a nucleic acid molecule or a polypeptide comprising the nucleic acid, preferably the coding region thereof, or polypeptide or the consensus sequence or the polypeptide motif, as depicted in Table I, II or IV, application No. 7, column 5 or 8 in the respective same line as the nucleic acid molecule SEQ ID NO. 15532 or polypeptide SEQ ID NO. 15533, respectively, or a homolog or a fragment thereof, is increased or generated, or if the activity pyruvate kinase is increased or generated in a non-human organism, like a microorganism or a plant cell, plant or part thereof, especially with plastidic localization, whereby the respective line disclose in column 7 the fine chemical alpha-tocopherol. For example, an increase of the alpha-tocopherol of at least 1 percent, particularly in a range of 45 to 65-percent is conferred as compared to a corresponding non-transformed wild type non-human organism.

[46484] Accordingly, in one embodiment, an increase of gamma-tocopherol in a non-human organism, as compared to a corresponding non-transformed wild type non-human organism, is conferred in the process of the invention, if the activity of a polypeptide showing the activity of a pyruvate kinase, or if the activity of the polypeptide 51340801_CANOLA, preferably represented by SEQ ID NO. 15533, or a homolog or fragment thereof, or if the activity of a polypeptide encoded by a nucleic acid molecule comprising the nucleic acid SEQ ID NO. 15532, preferably the coding region thereof, or a homolog or fragment thereof, e.g. derived from Brassica napus, is increased or generated. For example the activity of a nucleic acid molecule or a polypeptide comprising the nucleic acid, preferably the coding region thereof, or polypeptide or the consensus sequence or the polypeptide motif, as depicted in Table I, II or IV, application No. 7, column 5 or 8 in the respective same line as the nucleic acid molecule SEQ ID NO. 15532 or polypeptide SEQ ID NO. 15533, respectively, or a homolog or a fragment thereof, is increased or generated, or if the activity pyruvate kinase is increased or generated in a non-human organism, like a microorganism or a plant cell, plant or part thereof, especially with plastidic localization, whereby the respective line disclose in column 7 the fine chemical gamma-tocopherol. For example, an increase of the gamma-tocopherol of at least 1 percent, particularly in a range of 38 to 134-percent is conferred as compared to a corresponding non-transformed wild type non-human organism.

[46485] Accordingly, in one embodiment, an increase of alpha-tocopherol in a non-human organism, as compared to a corresponding non-transformed wild type non-human organism, is conferred in the process of the invention, if the activity of a polypeptide showing the activity of a glucose-6-phosphate 1-dehydrogenase, or if the activity of the polypeptide 59582753_SOYBEAN, preferably represented by SEQ ID NO. 16884, or a homolog or fragment thereof, or if the activity of a polypeptide encoded by a nucleic acid molecule comprising the nucleic acid SEQ ID NO. 16883, preferably the coding region thereof, or a homolog or fragment thereof, e.g. derived from Glycine max, is increased or generated. For example the activity of a nucleic acid molecule or a polypeptide comprising the nucleic acid, preferably the coding region thereof, or polypeptide or the consensus sequence or the polypeptide motif, as depicted in Table I, II or IV, application No. 7, column 5 or 8 in the respective same line as the nucleic acid molecule SEQ ID NO. 16883 or polypeptide SEQ ID NO. 16884, respectively, or a homolog or a fragment thereof, is increased or generated, or if the activity glucose-6-phosphate 1-dehydrogenase is increased or generated in a non-human organism, like a microorganism or a plant cell, plant or part thereof, especially with plastidic localization, whereby the respective line disclose in column 7 the fine chemical alpha-tocopherol. For example, an increase of the alpha-tocopherol of at least 1 percent, particularly in a range of 50 to 120-percent is conferred as compared to a corresponding non-transformed wild type non-human organism.

[46486] Accordingly, in one embodiment, an increase of gamma-tocopherol in a non-human organism, as compared to a corresponding non-transformed wild type non-human organism, is conferred in the process of the invention, if the activity of a polypeptide showing the activity of a At1g29350-protein, or if the activity of the polypeptide At1g29350, preferably represented by SEQ ID NO. 17902, or a homolog or fragment thereof, or if the activity of a polypeptide encoded by a nucleic acid molecule comprising the nucleic acid SEQ ID NO. 17901, preferably the coding region thereof, or a homolog or fragment thereof, e.g. derived from Arabidopsis thaliana, is increased or generated. For example the activity of a nucleic acid molecule or a polypeptide comprising the nucleic acid, preferably the coding region thereof, or polypeptide or the consensus sequence or the polypeptide motif, as depicted in Table I, II or IV, application No. 7, column 5 or 8 in the respective same line as the nucleic acid molecule SEQ ID NO. 17901 or polypeptide SEQ ID NO. 17902, respectively, or a homolog or a fragment thereof, is increased or generated, or if the activity At1g29350-protein is increased or generated in a non-human organism, like a microorganism or a plant cell, plant or part thereof, especially with non-targeted localization, whereby the respective line disclose in column 7 the fine chemical gamma-tocopherol. For example, an increase of the gamma-tocopherol of at least 1 percent, particularly in a range of 40 to 88-percent is conferred as compared to a corresponding non-transformed wild type non-human organism.

[46487] Accordingly, in one embodiment, an increase of gamma-tocopherol in a non-human organism, as compared to a corresponding non-transformed wild type non-human organism, is conferred in the process of the invention, if the activity of a polypeptide showing the activity of a transcriptional regulator, or if the activity of the polypeptide At1g43850, preferably represented by SEQ ID NO. 18071, or a homolog or fragment thereof, or if the activity of a polypeptide encoded by a nucleic acid molecule comprising the nucleic acid SEQ ID NO. 18070, preferably the coding region thereof, or a homolog or fragment thereof, e.g. derived from Arabidopsis thaliana, is increased or generated. For example the activity of a nucleic acid molecule or a polypeptide comprising the nucleic acid, preferably the coding region thereof, or polypeptide or the consensus sequence or the polypeptide motif, as depicted in Table I, II or IV, application No. 7, column 5 or 8 in the respective same line as the nucleic acid molecule SEQ ID NO. 18070 or polypeptide SEQ ID NO. 18071, respectively, or a homolog or a fragment thereof, is increased or generated, or if the activity transcriptional regulator is increased or generated in a non-human organism, like a microorganism or a plant cell, plant or part thereof, especially with non-targeted localization, whereby the respective line disclose in column 7 the fine chemical gamma-tocopherol. For example, an increase of the gamma-tocopherol of at least 1 percent, particularly in a range of 55 to 134-percent is conferred as compared to a corresponding non-transformed wild type non-human organism.

[46488] Accordingly, in one embodiment, an increase of gamma-tocopherol in a non-human organism, as compared to a corresponding non-transformed wild type non-human organism, is conferred in the process of the invention, if the activity of a polypeptide showing the activity of a protein kinase, or if the activity of the polypeptide At1g48260, preferably represented by SEQ ID NO. 18236, or a homolog or fragment thereof, or if the activity of a polypeptide encoded by a nucleic acid molecule comprising the nucleic acid SEQ ID NO. 18235, preferably the coding region thereof, or a homolog or fragment thereof, e.g. derived from Arabidopsis thaliana, is increased or generated. For example the activity of a nucleic acid molecule or a polypeptide comprising the nucleic acid, preferably the coding region thereof, or polypeptide or the consensus sequence or the polypeptide motif, as depicted in Table I, II or IV, application No. 7, column 5 or 8 in the respective same line as the nucleic acid molecule SEQ ID NO. 18235 or polypeptide SEQ ID NO. 18236, respectively, or a homolog or a fragment thereof, is increased or generated, or if the activity protein kinase is increased or generated in a non-human organism, like a microorganism or a plant cell, plant or part thereof, especially with non-targeted localization, whereby the respective line disclose in column 7 the fine chemical gamma-tocopherol. For example, an increase of the gamma-tocopherol of at least 1 percent, particularly in a range of 66 to 160-percent is conferred as compared to a corresponding non-transformed wild type non-human organism.

[46489] Accordingly, in one embodiment, an increase of gamma-tocopherol in a non-human organism, as compared to a corresponding non-transformed wild type non-human organism, is conferred in the process of the invention, if the activity of a polypeptide showing the activity of a calcium-dependent protein kinase, or if the activity of the polypeptide At1g61950, preferably represented by SEQ ID NO. 18870, or a homolog or fragment thereof, or if the activity of a polypeptide encoded by a nucleic acid molecule comprising the nucleic acid SEQ ID NO. 18869, preferably the coding region thereof, or a homolog or fragment thereof, e.g. derived from Arabidopsis thaliana, is increased or generated. For example the activity of a nucleic acid molecule or a polypeptide comprising the nucleic acid, preferably the coding region thereof, or polypeptide or the consensus sequence or the polypeptide motif, as depicted in Table I, II or IV, application No. 7, column 5 or 8 in the respective same line as the nucleic acid molecule SEQ ID NO. 18869 or polypeptide SEQ ID NO. 18870, respectively, or a homolog or a fragment thereof, is increased or generated, or if the activity calcium-dependent protein kinase is increased or generated in a non-human organism, like a microorganism or a plant cell, plant or part thereof, especially with non-targeted localization, whereby the respective line disclose in column 7 the fine chemical gamma-tocopherol. For example, an increase of the gamma-tocopherol of at least 1 percent, particularly in a range of 44 to 91-percent is conferred as compared to a corresponding non-transformed wild type non-human organism.

[46490] Accordingly, in one embodiment, an increase of alpha-tocopherol in a non-human organism, as compared to a corresponding non-transformed wild type non-human organism, is conferred in the process of the invention, if the activity of a polypeptide showing the activity of a protein phosphatase, or if the activity of the polypeptide At1g72770, preferably represented by SEQ ID NO. 19420, or a homolog or fragment thereof, or if the activity of a polypeptide encoded by a nucleic acid molecule comprising the nucleic acid SEQ ID NO. 19419, preferably the coding region thereof, or a homolog or fragment thereof, e.g. derived from Arabidopsis thaliana, is increased or generated. For example the activity of a nucleic acid molecule or a polypeptide comprising the nucleic acid, preferably the coding region thereof, or polypeptide or the consensus sequence or the polypeptide motif, as depicted in Table I, II or IV, application No. 7, column 5 or 8 in the respective same line as the nucleic acid molecule SEQ ID NO. 19419 or polypeptide SEQ ID NO. 19420, respectively, or a homolog or a fragment thereof, is increased or generated, or if the activity protein phosphatase is increased or generated in a non-human organism, like a microorganism or a plant cell, plant or part thereof, especially with non-targeted localization, whereby the respective line disclose in column 7 the fine chemical alpha-tocopherol. For example, an increase of the alpha-tocopherol of at least 1 percent, particularly in a range of 63 to 133 -percent is conferred as compared to a corresponding non-transformed wild type non-human organism.

[46491] Accordingly, in one embodiment, an increase of alpha-tocopherol in a non-human organism, as compared to a corresponding non-transformed wild type non-human organism, is conferred in the process of the invention, if the activity of a polypeptide showing the activity of a MADS box protein transcription factor, or if the activity of the polypeptide At2g42830, preferably represented by SEQ ID NO. 108728, or a homolog or fragment thereof, or if the activity of a polypeptide encoded by a nucleic acid molecule comprising the nucleic acid SEQ ID NO. 108727, preferably the coding region thereof, or a homolog or fragment thereof, e.g. derived from Arabidopsis thaliana, is increased or generated. For example the activity of a nucleic acid molecule or a polypeptide comprising the nucleic acid, preferably the coding region thereof, or polypeptide or the consensus sequence or the polypeptide motif, as depicted in Table I, II or IV, application No. 7, column 5 or 8 in the respective same line as the nucleic acid molecule SEQ ID NO. 108727 or polypeptide SEQ ID NO. 108728, respectively, or a homolog or a fragment thereof, is increased or generated, or if the activity MADS box protein transcription factor is increased or generated in a non-human organism, like a microorganism or a plant cell, plant or part thereof, especially with non-targeted localization, whereby the respective line disclose in column 7 the fine chemical alpha-tocopherol. For example, an increase of the alpha-tocopherol of at least 1 percent, particularly in a range of 36 to 55-percent is conferred as compared to a corresponding non-transformed wild type non-human organism.

[46492] Accordingly, in one embodiment, an increase of gamma-tocopherol in a non-human organism, as compared to a corresponding non-transformed wild type non-human organism, is conferred in the process of the invention, if the activity of a polypeptide showing the activity of a glutaredoxin, or if the activity of the polypeptide At2g47880, preferably represented by SEQ ID NO. 21160, or a homolog or fragment thereof, or if the activity of a polypeptide encoded by a nucleic acid molecule comprising the nucleic acid SEQ ID NO. 21159, preferably the coding region thereof, or a homolog or fragment thereof, e.g. derived from Arabidopsis thaliana, is increased or generated. For example the activity of a nucleic acid molecule or a polypeptide comprising the nucleic acid, preferably the coding region thereof, or polypeptide or the consensus sequence or the polypeptide motif, as depicted in Table I, II or IV, application No. 7, column 5 or 8 in the respective same line as the nucleic acid molecule SEQ ID NO. 21159 or polypeptide SEQ ID NO. 21160, respectively, or a homolog or a fragment thereof, is increased or generated, or if the activity glutaredoxin is increased or generated in a non-human organism, like a microorganism or a plant cell, plant or part thereof, especially with non-targeted localization, whereby the respective line disclose in column 7 the fine chemical gamma-tocopherol. For example, an increase of the gamma-tocopherol of at least 1 percent, particularly in a range of 87 to 232-percent is conferred as compared to a corresponding non-transformed wild type non-human organism.

[46493] Accordingly, in one embodiment, an increase of gamma-tocopherol in a non-human organism, as compared to a corresponding non-transformed wild type non-human organism, is conferred in the process of the invention, if the activity of a polypeptide showing the activity of a pyruvate kinase, or if the activity of the polypeptide At3g04050, preferably represented by SEQ ID NO. 21498, or a homolog or fragment thereof, or if the activity of a polypeptide encoded by a nucleic acid molecule comprising the nucleic acid SEQ ID NO. 21497, preferably the coding region thereof, or a homolog or fragment thereof, e.g. derived from Arabidopsis thaliana, is increased or generated. For example the activity of a nucleic acid molecule or a polypeptide comprising the nucleic acid, preferably the coding region thereof, or polypeptide or the consensus sequence or the polypeptide motif, as depicted in Table I, II or IV, application No. 7, column 5 or 8 in the respective same line as the nucleic acid molecule SEQ ID NO. 21497 or polypeptide SEQ ID NO. 21498, respectively, or a homolog or a fragment thereof, is increased or generated, or if the activity pyruvate kinase is increased or generated in a non-human organism, like a microorganism or a plant cell, plant or part thereof, especially with plastidic localization, whereby the respective line disclose in column 7 the fine chemical gamma-tocopherol. For example, an increase of the gamma-tocopherol of at least 1 percent, particularly in a range of 74 to 160-percent is conferred as compared to a corresponding non-transformed wild type non-human organism.

[46494] Accordingly, in one embodiment, an increase of alpha-tocopherol in a non-human organism, as compared to a corresponding non-transformed wild type non-human organism, is conferred in the process of the invention, if the activity of a polypeptide showing the activity of a ankyrin repeat family protein, or if the activity of the polypeptide At3g04710, preferably represented by SEQ ID NO. 21903, or a homolog or fragment thereof, or if the activity of a polypeptide encoded by a nucleic acid molecule comprising the nucleic acid SEQ ID NO. 21902, preferably the coding region thereof, or a homolog or fragment thereof, e.g. derived from Arabidopsis thaliana, is increased or generated. For example the activity of a nucleic acid molecule or a polypeptide comprising the nucleic acid, preferably the coding region thereof, or polypeptide or the consensus sequence or the polypeptide motif, as depicted in Table I, II or IV, application No. 7, column 5 or 8 in the respective same line as the nucleic acid molecule SEQ ID NO. 21902 or polypeptide SEQ ID NO. 21903, respectively, or a homolog or a fragment thereof, is increased or generated, or if the activity ankyrin repeat family protein is increased or generated in a non-human organism, like a microorganism or a plant cell, plant or part thereof, especially with non-targeted localization, whereby the respective line disclose in column 7 the fine chemical alpha-tocopherol. For example, an increase of the alpha-tocopherol of at least 1 percent, particularly in a range of 39 to 64-percent is conferred as compared to a corresponding non-transformed wild type non-human organism.

[46495] Accordingly, in one embodiment, an increase of alpha-tocopherol in a non-human organism, as compared to a corresponding non-transformed wild type non-human organism, is conferred in the process of the invention, if the activity of a polypeptide showing the activity of a protein phosphatase, or if the activity of the polypeptide At3g06270, preferably represented by SEQ ID NO. 22016, or a homolog or fragment thereof, or if the activity of a polypeptide encoded by a nucleic acid molecule comprising the nucleic acid SEQ ID NO. 22015, preferably the coding region thereof, or a homolog or fragment thereof, e.g. derived from Arabidopsis thaliana, is increased or generated. For example the activity of a nucleic acid molecule or a polypeptide comprising the nucleic acid, preferably the coding region thereof, or polypeptide or the consensus sequence or the polypeptide motif, as depicted in Table I, II or IV, application No. 7, column 5 or 8 in the respective same line as the nucleic acid molecule SEQ ID NO. 22015 or polypeptide SEQ ID NO. 22016, respectively, or a homolog or a fragment thereof, is increased or generated, or if the activity protein phosphatase is increased or generated in a non-human organism, like a microorganism or a plant cell, plant or part thereof, especially with non-targeted localization, whereby the respective line disclose in column 7 the fine chemical alpha-tocopherol. For example, an increase of the alpha-tocopherol of at least 1 percent, particularly in a range of 56 to 56-percent is conferred as compared to a corresponding non-transformed wild type non-human organism.

[46496] Accordingly, in one embodiment, an increase of alpha-tocopherol in a non-human organism, as compared to a corresponding non-transformed wild type non-human organism, is conferred in the process of the invention, if the activity of a polypeptide showing the activity of a thioredoxin family protein, or if the activity of the polypeptide At3g08710, preferably represented by SEQ ID NO. 22250, or a homolog or fragment thereof, or if the activity of a polypeptide encoded by a nucleic acid molecule comprising the nucleic acid SEQ ID NO. 22249, preferably the coding region thereof, or a homolog or fragment thereof, e.g. derived from Arabidopsis thaliana, is increased or generated. For example the activity of a nucleic acid molecule or a polypeptide comprising the nucleic acid, preferably the coding region thereof, or polypeptide or the consensus sequence or the polypeptide motif, as depicted in Table I, II or IV, application No. 7, column 5 or 8 in the respective same line as the nucleic acid molecule SEQ ID NO. 22249 or polypeptide SEQ ID NO. 22250, respectively, or a homolog or a fragment thereof, is increased or generated, or if the activity thioredoxin family protein is increased or generated in a non-human organism, like a microorganism or a plant cell, plant or part thereof, especially with non-targeted localization, whereby the respective line disclose in column 7 the fine chemical alpha-tocopherol. For example, an increase of the alpha-tocopherol of at least 1 percent, particularly in a range of 57 to 140-percent is conferred as compared to a corresponding non-transformed wild type non-human organism.

[46497] Accordingly, in one embodiment, an increase of alpha-tocopherol in a non-human organism, as compared to a corresponding non-transformed wild type non-human organism, is conferred in the process of the invention, if the activity of a polypeptide showing the activity of a harpininduced family protein, or if the activity of the polypeptide At3g11650, preferably represented by SEQ ID NO. 22612, or a homolog or fragment thereof, or if the activity of a polypeptide encoded by a nucleic acid molecule comprising the nucleic acid SEQ ID NO. 22611, preferably the coding region thereof, or a homolog or fragment thereof, e.g. derived from Arabidopsis thaliana, is increased or generated. For example the activity of a nucleic acid molecule or a polypeptide comprising the nucleic acid, preferably the coding region thereof, or polypeptide or the consensus sequence or the polypeptide motif, as depicted in Table I, II or IV, application No. 7, column 5 or 8 in the respective same line as the nucleic acid molecule SEQ ID NO. 22611 or polypeptide SEQ ID NO. 22612, respectively, or a homolog or a fragment thereof, is increased or generated, or if the activity harpin-induced family protein is increased or generated in a non-human organism, like a microorganism or a plant cell, plant or part thereof, especially with non-targeted localization, whereby the respective line disclose in column 7 the fine chemical alpha-tocopherol. For example, an increase of the alpha-tocopherol of at least 1 percent, particularly in a range of 40 to 67-percent is conferred as compared to a corresponding non-transformed wild type non-human organism.

[46498] Accordingly, in one embodiment, an increase of gamma-tocopherol in a non-human organism, as compared to a corresponding non-transformed wild type non-human organism, is conferred in the process of the invention, if the activity of a polypeptide showing the activity of a harpininduced family protein, or if the activity of the polypeptide At3g11650, preferably represented by SEQ ID NO. 22612, or a homolog or fragment thereof, or if the activity of a polypeptide encoded by a nucleic acid molecule comprising the nucleic acid SEQ ID NO. 22611, preferably the coding region thereof, or a homolog or fragment thereof, e.g. derived from Arabidopsis thaliana, is increased or generated. For example the activity of a nucleic acid molecule or a polypeptide comprising the nucleic acid, preferably the coding region thereof, or polypeptide or the consensus sequence or the polypeptide motif, as depicted in Table I, II or IV, application No. 7, column 5 or 8 in the respective same line as the nucleic acid molecule SEQ ID NO. 22611 or polypeptide SEQ ID NO. 22612, respectively, or a homolog or a fragment thereof, is increased or generated, or if the activity harpin-induced family protein is increased or generated in a non-human organism, like a microorganism or a plant cell, plant or part thereof, especially with non-targeted localization, whereby the respective line disclose in column 7 the fine chemical gamma-tocopherol. For example, an increase of the gamma-tocopherol of at least 1 percent, particularly in a range of 43 to 300-percent is conferred as compared to a corresponding non-transformed wild type non-human organism.

[46499] Accordingly, in one embodiment, an increase of gamma-tocopherol in a non-human organism, as compared to a corresponding non-transformed wild type non-human organism, is conferred in the process of the invention, if the activity of a polypeptide showing the activity of a protein kinase, or if the activity of the polypeptide At3g23000, preferably represented by SEQ ID NO. 1816, or a homolog or fragment thereof, or if the activity of a polypeptide encoded by a nucleic acid molecule comprising the nucleic acid SEQ ID NO. 1815, preferably the coding region thereof, or a homolog or fragment thereof, e.g. derived from Arabidopsis thaliana, is increased or generated. For example the activity of a nucleic acid molecule or a polypeptide comprising the nucleic acid, preferably the coding region thereof, or polypeptide or the consensus sequence or the polypeptide motif, as depicted in Table I, II or IV, application No. 7, column 5 or 8 in the respective same line as the nucleic acid molecule SEQ ID NO. 1815 or polypeptide SEQ ID NO. 1816, respectively, or a homolog or a fragment thereof, is increased or generated, or if the activity protein kinase is increased or generated in a non-human organism, like a microorganism or a plant cell, plant or part thereof, especially with non-targeted localization, whereby the respective line disclose in column 7 the fine chemical gamma-tocopherol. For example, an increase of the gamma-tocopherol of at least 1 percent, particularly in a range of 60 to 223-percent is conferred as compared to a corresponding non-transformed wild type non-human organism.

[46500] Accordingly, in one embodiment, an increase of gamma-tocopherol in a non-human organism, as compared to a corresponding non-transformed wild type non-human organism, is conferred in the process of the invention, if the activity of a polypeptide showing the activity of a monthiol glutaredoxin, or if the activity of the polypeptide At3g62930, preferably represented by SEQ ID NO. 2574, or a homolog or fragment thereof, or if the activity of a polypeptide encoded by a nucleic acid molecule comprising the nucleic acid SEQ ID NO. 2573, preferably the coding region thereof, or a homolog or fragment thereof, e.g. derived from Arabidopsis thaliana, is increased or generated. For example the activity of a nucleic acid molecule or a polypeptide comprising the nucleic acid, preferably the coding region thereof, or polypeptide or the consensus sequence or the polypeptide motif, as depicted in Table I, II or IV, application No. 7, column 5 or 8 in the respective same line as the nucleic acid molecule SEQ ID NO. 2573 or polypeptide SEQ ID NO. 2574, respectively, or a homolog or a fragment thereof, is increased or generated, or if the activity monthiol glutaredoxin is increased or generated in a non-human organism, like a microorganism or a plant cell, plant or part thereof, especially with non-targeted localization, whereby the respective line disclose in column 7 the fine chemical gamma-tocopherol. For example, an increase of the gamma-tocopherol of at least 1 percent, particularly in a range of 63 to 110-percent is conferred as compared to a corresponding non-transformed wild type non-human organism.

[46501] Accordingly, in one embodiment, an increase of gamma-tocopherol in a non-human organism, as compared to a corresponding non-transformed wild type non-human organism, is conferred in the process of the invention, if the activity of a polypeptide showing the activity of a glutaredoxin, or if the activity of the polypeptide At3g62950, preferably represented by SEQ ID NO. 2936, or a homolog or fragment thereof, or if the activity of a polypeptide encoded by a nucleic acid molecule comprising the nucleic acid SEQ ID NO. 2935, preferably the coding region thereof, or a homolog or fragment thereof, e.g. derived from Arabidopsis thaliana, is increased or generated. For example the activity of a nucleic acid molecule or a polypeptide comprising the nucleic acid, preferably the coding region thereof, or polypeptide or the consensus sequence or the polypeptide motif, as depicted in Table I, II or IV, application No. 7, column 5 or 8 in the respective same line as the nucleic acid molecule SEQ ID NO. 2935 or polypeptide SEQ ID NO. 2936, respectively, or a homolog or a fragment thereof, is increased or generated, or if the activity glutaredoxin is increased or generated in a non-human organism, like a microorganism or a plant cell, plant or part thereof, especially with non-targeted localization, whereby the respective line disclose in column 7 the fine chemical gamma-tocopherol. For example, an increase of the gamma-tocopherol of at least 1 percent, particularly in a range of 77 to 155-percent is conferred as compared to a corresponding non-transformed wild type non-human organism.

[46502] Accordingly, in one embodiment, an increase of alpha-tocopherol in a non-human organism, as compared to a corresponding non-transformed wild type non-human organism, is conferred in the process of the invention, if the activity of a polypeptide showing the activity of a transcription factor, or if the activity of the polypeptide At4g09960, preferably represented by SEQ ID NO. 109718, or a homolog or fragment thereof, or if the activity of a polypeptide encoded by a nucleic acid molecule comprising the nucleic acid SEQ ID NO. 109717, preferably the coding region thereof, or a homolog or fragment thereof, e.g. derived from Arabidopsis thaliana, is increased or generated. For example the activity of a nucleic acid molecule or a polypeptide comprising the nucleic acid, preferably the coding region thereof, or polypeptide or the consensus sequence or the polypeptide motif, as depicted in Table I, II or IV, application No. 7, column 5 or 8 in the respective same line as the nucleic acid molecule SEQ ID NO. 109717 or polypeptide SEQ ID NO. 109718, respectively, or a homolog or a fragment thereof, is increased or generated, or if the activity transcription factor is increased or generated in a non-human organism, like a microorganism or a plant cell, plant or part thereof, especially with non-targeted localization, whereby the respective line disclose in column 7 the fine chemical alpha-tocopherol. For example, an increase of the alpha-tocopherol of at least 1 percent, particularly in a range of 59 to 154-percent is conferred as compared to a corresponding non-transformed wild type non-human organism.

[46503] Accordingly, in one embodiment, an increase of alpha-tocopherol in a non-human organism, as compared to a corresponding non-transformed wild type non-human organism, is conferred in the process of the invention, if the activity of a polypeptide showing the activity of a monothiol glutaredoxin, or if the activity of the polypeptide At4g15660, preferably represented by SEQ ID NO. 23483, or a homolog or fragment thereof, or if the activity of a polypeptide encoded by a nucleic acid molecule comprising the nucleic acid SEQ ID NO. 23482, preferably the coding region thereof, or a homolog or fragment thereof, e.g. derived from Arabidopsis thaliana, is increased or generated. For example the activity of a nucleic acid molecule or a polypeptide comprising the nucleic acid, preferably the coding region thereof, or polypeptide or the consensus sequence or the polypeptide motif, as depicted in Table I, II or IV, application No. 7, column 5 or 8 in the respective same line as the nucleic acid molecule SEQ ID NO. 23482 or polypeptide SEQ ID NO. 23483, respectively, or a homolog or a fragment thereof, is increased or generated, or if the activity monothiol glutaredoxin is increased or generated in a non-human organism, like a microorganism or a plant cell, plant or part thereof, especially with non-targeted localization, whereby the respective line disclose in column 7 the fine chemical alpha-tocopherol. For example, an increase of the alpha-tocopherol of at least 1 percent, particularly in a range of 50 to 139 -percent is conferred as compared to a corresponding non-transformed wild type non-human organism.

[46504] Accordingly, in one embodiment, an increase of gamma-tocopherol in a non-human organism, as compared to a corresponding non-transformed wild type non-human organism, is conferred in the process of the invention, if the activity of a polypeptide showing the activity of a monothiol glutaredoxin, or if the activity of the polypeptide At4g15660, preferably represented by SEQ ID NO. 23483, or a homolog or fragment thereof, or if the activity of a polypeptide encoded by a nucleic acid molecule comprising the nucleic acid SEQ ID NO. 23482, preferably the coding region thereof, or a homolog or fragment thereof, e.g. derived from Arabidopsis thaliana, is increased or generated. For example the activity of a nucleic acid molecule or a polypeptide comprising the nucleic acid, preferably the coding region thereof, or polypeptide or the consensus sequence or the polypeptide motif, as depicted in Table I, II or IV, application No. 7, column 5 or 8 in the respective same line as the nucleic acid molecule SEQ ID NO. 23482 or polypeptide SEQ ID NO. 23483, respectively, or a homolog or a fragment thereof, is increased or generated, or if the activity monothiol glutaredoxin is increased or generated in a non-human organism, like a microorganism or a plant cell, plant or part thereof, especially with non-targeted localization, whereby the respective line disclose in column 7 the fine chemical gamma-tocopherol. For example, an increase of the gamma-tocopherol of at least 1 percent, particularly in a range of 38 to 81-percent is conferred as compared to a corresponding non-transformed wild type non-human organism.

[46505] Accordingly, in one embodiment, an increase of alpha-tocopherol in a non-human organism, as compared to a corresponding non-transformed wild type non-human organism, is conferred in the process of the invention, if the activity of a polypeptide showing the activity of a monothiol glutaredoxin, or if the activity of the polypeptide At4g15670, preferably represented by SEQ ID NO. 3280, or a homolog or fragment thereof, or if the activity of a polypeptide encoded by a nucleic acid molecule comprising the nucleic acid SEQ ID NO. 3279, preferably the coding region thereof, or a homolog or fragment thereof, e.g. derived from Arabidopsis thaliana, is increased or generated. For example the activity of a nucleic acid molecule or a polypeptide comprising the nucleic acid, preferably the coding region thereof, or polypeptide or the consensus sequence or the polypeptide motif, as depicted in Table I, II or IV, application No. 7, column 5 or 8 in the respective same line as the nucleic acid molecule SEQ ID NO. 3279 or polypeptide SEQ ID NO. 3280, respectively, or a homolog or a fragment thereof, is increased or generated, or if the activity monothiol glutaredoxin is increased or generated in a non-human organism, like a microorganism or a plant cell, plant or part thereof, especially with non-targeted localization, whereby the respective line disclose in column 7 the fine chemical alpha-tocopherol. For example, an increase of the alpha-tocopherol of at least 1 percent, particularly in a range of 53 to 364 -percent is conferred as compared to a corresponding non-transformed wild type non-human organism.

[46506] Accordingly, in one embodiment, an increase of alpha-tocopherol in a non-human organism, as compared to a corresponding non-transformed wild type non-human organism, is conferred in the process of the invention, if the activity of a polypeptide showing the activity of a monothiol glutaredoxin, or if the activity of the polypeptide At4g15690, preferably represented by SEQ ID NO. 23845, or a homolog or fragment thereof, or if the activity of a polypeptide encoded by a nucleic acid molecule comprising the nucleic acid SEQ ID NO. 23844, preferably the coding region thereof, or a homolog or fragment thereof, e.g. derived from Arabidopsis thaliana, is increased or generated. For example the activity of a nucleic acid molecule or a polypeptide comprising the nucleic acid, preferably the coding region thereof, or polypeptide or the consensus sequence or the polypeptide motif, as depicted in Table I, II or IV, application No. 7, column 5 or 8 in the respective same line as the nucleic acid molecule SEQ ID NO. 23844 or polypeptide SEQ ID NO. 23845, respectively, or a homolog or a fragment thereof, is increased or generated, or if the activity monothiol glutaredoxin is increased or generated in a non-human organism, like a microorganism or a plant cell, plant or part thereof, especially with non-targeted localization, whereby the respective line disclose in column 7 the fine chemical alpha-tocopherol. For example, an increase of the alpha-tocopherol of at least 1 percent, particularly in a range of 53 to 125-percent is conferred as compared to a corresponding non-transformed wild type non-human organism.

[46507] Accordingly, in one embodiment, an increase of alpha-tocopherol in a non-human organism, as compared to a corresponding non-transformed wild type non-human organism, is conferred in the process of the invention, if the activity of a polypeptide showing the activity of a protein phosphatase, or if the activity of the polypeptide At4g26080, preferably represented by SEQ ID NO. 68850, or a homolog or fragment thereof, or if the activity of a polypeptide encoded by a nucleic acid molecule comprising the nucleic acid SEQ ID NO. 68849, preferably the coding region thereof, or a homolog or fragment thereof, e.g. derived from Arabidopsis thaliana, is increased or generated. For example the activity of a nucleic acid molecule or a polypeptide comprising the nucleic acid, preferably the coding region thereof, or polypeptide or the consensus sequence or the polypeptide motif, as depicted in Table I, II or IV, application No. 7, column 5 or 8 in the respective same line as the nucleic acid molecule SEQ ID NO. 68849 or polypeptide SEQ ID NO. 68850, respectively, or a homolog or a fragment thereof, is increased or generated, or if the activity protein phosphatase is increased or generated in a non-human organism, like a microorganism or a plant cell, plant or part thereof, especially with non-targeted localization, whereby the respective line disclose in column 7 the fine chemical alpha-tocopherol. For example, an increase of the alpha-tocopherol of at least 1 percent, particularly in a range of 54 to 99-percent is conferred as compared to a corresponding non-transformed wild type non-human organism.

[46508] Accordingly, in one embodiment, an increase of alpha-tocopherol in a non-human organism, as compared to a corresponding non-transformed wild type non-human organism, is conferred in the process of the invention, if the activity of a polypeptide showing the activity of a cyclin D , or if the activity of the polypeptide At4g34160, preferably represented by SEQ ID NO. 24312, or a homolog or fragment thereof, or if the activity of a polypeptide encoded by a nucleic acid molecule comprising the nucleic acid SEQ ID NO. 24311, preferably the coding region thereof, or a homolog or fragment thereof, e.g. derived from Arabidopsis thaliana, is increased or generated.

[46509] For example the activity of a nucleic acid molecule or a polypeptide comprising the nucleic acid, preferably the coding region thereof, or polypeptide or the consensus sequence or the polypeptide motif, as depicted in Table I, II or IV, application No. 7, column 5 or 8 in the respective same line as the nucleic acid molecule SEQ ID NO. 24311 or polypeptide SEQ ID NO. 24312, respectively, or a homolog or a fragment thereof, is increased or generated, or if the activity cyclin D is increased or generated in a non-human organism, like a microorganism or a plant cell, plant or part thereof, especially with non-targeted localization, whereby the respective line disclose in column 7 the fine chemical alpha-tocopherol. For example, an increase of the alpha-tocopherol of at least 1 percent, particularly in a range of 51 to 200-percent is conferred as compared to a corresponding non-transformed wild type non-human organism.

[46510] Accordingly, in one embodiment, an increase of alpha-tocopherol in a non-human organism, as compared to a corresponding non-transformed wild type non-human organism, is conferred in the process of the invention, if the activity of a polypeptide showing the activity of a calcium-dependent protein kinase, or if the activity of the polypeptide At4g35310, preferably represented by SEQ ID NO. 4349, or a homolog or fragment thereof, or if the activity of a polypeptide encoded by a nucleic acid molecule comprising the nucleic acid SEQ ID NO. 4348, preferably the coding region thereof, or a homolog or fragment thereof, e.g. derived from Arabidopsis thaliana, is increased or generated. For example the activity of a nucleic acid molecule or a polypeptide comprising the nucleic acid, preferably the coding region thereof, or polypeptide or the consensus sequence or the polypeptide motif, as depicted in Table I, II or IV, application No. 7, column 5 or 8 in the respective same line as the nucleic acid molecule SEQ ID NO. 4348 or polypeptide SEQ ID NO. 4349, respectively, or a homolog or a fragment thereof, is increased or generated, or if the activity calcium-dependent protein kinase is increased or generated in a non-human organism, like a microorganism or a plant cell, plant or part thereof, especially with non-targeted localization, whereby the respective line disclose in column 7 the fine chemical alpha-tocopherol. For example, an increase of the alpha-tocopherol of at least 1 percent, particularly in a range of 91 to 195-percent is conferred as compared to a corresponding non-transformed wild type non-human organism.

[46511] Accordingly, in one embodiment, an increase of gamma-tocopherol in a non-human organism, as compared to a corresponding non-transformed wild type non-human organism, is conferred in the process of the invention, if the activity of a polypeptide showing the activity of a calcium-dependent protein kinase, or if the activity of the polypeptide At4g35310, preferably represented by SEQ ID NO. 4349, or a homolog or fragment thereof, or if the activity of a polypeptide encoded by a nucleic acid molecule comprising the nucleic acid SEQ ID NO. 4348, preferably the coding region thereof, or a homolog or fragment thereof, e.g. derived from Arabidopsis thaliana, is increased or generated. For example the activity of a nucleic acid molecule or a polypeptide comprising the nucleic acid, preferably the coding region thereof, or polypeptide or the consensus sequence or the polypeptide motif, as depicted in Table I, II or IV, application No. 7, column 5 or 8 in the respective same line as the nucleic acid molecule SEQ ID NO. 4348 or polypeptide SEQ ID NO. 4349, respectively, or a homolog or a fragment thereof, is increased or generated, or if the activity calcium-dependent protein kinase is increased or generated in a non-human organism, like a microorganism or a plant cell, plant or part thereof, especially with non-targeted localization, whereby the respective line disclose in column 7 the fine chemical gamma-tocopherol. For example, an increase of the gamma-tocopherol of at least 1 percent, particularly in a range of 69 to 192-percent is conferred as compared to a corresponding non-transformed wild type non-human organism.

[46512] Accordingly, in one embodiment, an increase of alpha-tocopherol in a non-human organism, as compared to a corresponding non-transformed wild type non-human organism, is conferred in the process of the invention, if the activity of a polypeptide showing the activity of a RNA-binding protein, or if the activity of the polypeptide At5g60110, preferably represented by SEQ ID NO. 70007, or a homolog or fragment thereof, or if the activity of a polypeptide encoded by a nucleic acid molecule comprising the nucleic acid SEQ ID NO. 70006, preferably the coding region thereof, or a homolog or fragment thereof, e.g. derived from Arabidopsis thaliana, is increased or generated. For example the activity of a nucleic acid molecule or a polypeptide comprising the nucleic acid, preferably the coding region thereof, or polypeptide or the consensus sequence or the polypeptide motif, as depicted in Table I, II or IV, application No. 7, column 5 or 8 in the respective same line as the nucleic acid molecule SEQ ID NO. 70006 or polypeptide SEQ ID NO. 70007, respectively, or a homolog or a fragment thereof, is increased or generated, or if the activity RNA-binding protein is increased or generated in a non-human organism, like a microorganism or a plant cell, plant or part thereof, especially with non-targeted localization, whereby the respective line disclose in column 7 the fine chemical alpha-tocopherol. For example, an increase of the alpha-tocopherol of at least 1 percent, particularly in a range of 58 to 69-percent is conferred as compared to a corresponding non-transformed wild type non-human organism.

[46513] Accordingly, in one embodiment, an increase of gamma-tocopherol in a non-human organism, as compared to a corresponding non-transformed wild type non-human organism, is conferred in the process of the invention, if the activity of a polypeptide showing the activity of a RNAbinding protein, or if the activity of the polypeptide At5g60110, preferably represented by SEQ ID NO. 70007, or a homolog or fragment thereof, or if the activity of a polypeptide encoded by a nucleic acid molecule comprising the nucleic acid SEQ ID NO. 70006, preferably the coding region thereof, or a homolog or fragment thereof, e.g. derived from Arabidopsis thaliana, is increased or generated. For example the activity of a nucleic acid molecule or a polypeptide comprising the nucleic acid, preferably the coding region thereof, or polypeptide or the consensus sequence or the polypeptide motif, as depicted in Table I, II or IV, application No. 7, column 5 or 8 in the respective same line as the nucleic acid molecule SEQ ID NO. 70006 or polypeptide SEQ ID NO. 70007, respectively, or a homolog or a fragment thereof, is increased or generated, or if the activity RNA-binding protein is increased or generated in a non-human organism, like a microorganism or a plant cell, plant or part thereof, especially with non-targeted localization, whereby the respective line disclose in column 7 the fine chemical gamma-tocopherol. For example, an increase of the gamma-tocopherol of at least 1 percent, particularly in a range of 48 to 108-percent is conferred as compared to a corresponding non-transformed wild type non-human organism.

[46514] Accordingly, in one embodiment, an increase of gamma-tocopherol in a non-human organism, as compared to a corresponding non-transformed wild type non-human organism, is conferred in the process of the invention, if the activity of a polypeptide showing the activity of a zinc finger protein, or if the activity of the polypeptide At5g64920, preferably represented by SEQ ID NO. 5494, or a homolog or fragment thereof, or if the activity of a polypeptide encoded by a nucleic acid molecule comprising the nucleic acid SEQ ID NO. 5493, preferably the coding region thereof, or a homolog or fragment thereof, e.g. derived from Arabidopsis thaliana, is increased or generated. For example the activity of a nucleic acid molecule or a polypeptide comprising the nucleic acid, preferably the coding region thereof, or polypeptide or the consensus sequence or the polypeptide motif, as depicted in Table I, II or IV, application No. 7, column 5 or 8 in the respective same line as the nucleic acid molecule SEQ ID NO. 5493 or polypeptide SEQ ID NO. 5494, respectively, or a homolog or a fragment thereof, is increased or generated, or if the activity zinc finger protein is increased or generated in a non-human organism, like a microorganism or a plant cell, plant or part thereof, especially with non-targeted localization, whereby the respective line disclose in column 7 the fine chemical gamma-tocopherol. For example, an increase of the gamma-tocopherol of at least 1 percent, particularly in a range of 42 to 75-percent is conferred as compared to a corresponding non-transformed wild type non-human organism.

[46515] Accordingly, in one embodiment, an increase of gamma-tocopherol in a non-human organism, as compared to a corresponding non-transformed wild type non-human organism, is conferred in the process of the invention, if the activity of a polypeptide showing the activity of a NAD-dependent epimerase/dehydratase, or if the activity of the polypeptide AvinDRAFT_{—}3107, preferably represented by SEQ ID NO. 110652, or a homolog or fragment thereof, or if the activity of a polypeptide encoded by a nucleic acid molecule comprising the nucleic acid SEQ ID NO. 110651, preferably the coding region thereof, or a homolog or fragment thereof, e.g. derived from Azotobacter vinelandii, is increased or generated. For example the activity of a nucleic acid molecule or a polypeptide comprising the nucleic acid, preferably the coding region thereof, or polypeptide or the consensus sequence or the polypeptide motif, as depicted in Table I, II or IV, application No. 7, column 5 or 8 in the respective same line as the nucleic acid molecule SEQ ID NO. 110651 or polypeptide SEQ ID NO. 110652, respectively, or a homolog or a fragment thereof, is increased or generated, or if the activity NAD-dependent epimerase/dehydratase is increased or generated in a non-human organism, like a microorganism or a plant cell, plant or part thereof, especially with non-targeted localization, whereby the respective line disclose in column 7 the fine chemical gamma-tocopherol. For example, an increase of the gamma-tocopherol of at least 1 percent, particularly in a range of 39 to 66-percent is conferred as compared to a corresponding non-transformed wild type non-human organism.

[46516] Accordingly, in one embodiment, an increase of gamma-tocopherol in a non-human organism, as compared to a corresponding non-transformed wild type non-human organism, is conferred in the process of the invention, if the activity of a polypeptide showing the activity of a transcriptional regulator, or if the activity of the polypeptide AvinDRAFT_{—}3209, preferably represented by SEQ ID NO. 29287, or a homolog or fragment thereof, or if the activity of a polypeptide encoded by a nucleic acid molecule comprising the nucleic acid SEQ ID NO. 29286, preferably the coding region thereof, or a homolog or fragment thereof, e.g. derived from Azotobacter vinelandii, is increased or generated. For example the activity of a nucleic acid molecule or a polypeptide comprising the nucleic acid, preferably the coding region thereof, or polypeptide or the consensus sequence or the polypeptide motif, as depicted in Table I, II or IV, application No. 7, column 5 or 8 in the respective same line as the nucleic acid molecule SEQ ID NO. 29286 or polypeptide SEQ ID NO. 29287, respectively, or a homolog or a fragment thereof, is increased or generated, or if the activity transcriptional regulator is increased or generated in a non-human organism, like a microorganism or a plant cell, plant or part thereof, especially with non-targeted localization, whereby the respective line disclose in column 7 the fine chemical gamma-tocopherol. For example, an increase of the gamma-tocopherol of at least 1 percent, particularly in a range of 53 to 89-percent is conferred as compared to a corresponding non-transformed wild type non-human organism.

[46517] Accordingly, in one embodiment, an increase of alpha-tocopherol in a non-human organism, as compared to a corresponding non-transformed wild type non-human organism, is conferred in the process of the invention, if the activity of a polypeptide showing the activity of a ThiF family protein, or if the activity of the polypeptide AvinDRAFT_{—}3577, preferably represented by SEQ ID NO. 111156, or a homolog or fragment thereof, or if the activity of a polypeptide encoded by a nucleic acid molecule comprising the nucleic acid SEQ ID NO. 111155, preferably the coding region thereof, or a homolog or fragment thereof, e.g. derived from Azotobacter vinelandii, is increased or generated. For example the activity of a nucleic acid molecule or a polypeptide comprising the nucleic acid, preferably the coding region thereof, or polypeptide or the consensus sequence or the polypeptide motif, as depicted in Table I, II or IV, application No. 7, column 5 or 8 in the respective same line as the nucleic acid molecule SEQ ID NO. 111155 or polypeptide SEQ ID NO. 111156, respectively, or a homolog or a fragment thereof, is increased or generated, or if the activity ThiF family protein is increased or generated in a non-human organism, like a microorganism or a plant cell, plant or part thereof, especially with non-targeted localization, whereby the respective line disclose in column 7 the fine chemical alpha-tocopherol. For example, an increase of the alpha-tocopherol of at least 1 percent, particularly in a range of 37 to 38-percent is conferred as compared to a corresponding non-transformed wild type non-human organism.

[46518] Accordingly, in one embodiment, an increase of alpha-tocopherol in a non-human organism, as compared to a corresponding non-transformed wild type non-human organism, is conferred in the process of the invention, if the activity of a polypeptide showing the activity of a isopropylmalate isomerase large subunit, or if the activity of the polypeptide AvinDRAFT_{—}4847, preferably represented by SEQ ID NO. 102942, or a homolog or fragment thereof, or if the activity of a polypeptide encoded by a nucleic acid molecule comprising the nucleic acid SEQ ID NO. 102941, preferably the coding region thereof, or a homolog or fragment thereof, e.g. derived from Azotobacter vinelandii, is increased or generated. For example the activity of a nucleic acid molecule or a polypeptide comprising the nucleic acid, preferably the coding region thereof, or polypeptide or the consensus sequence or the polypeptide motif, as depicted in Table I, II or IV, application No. 7, column 5 or 8 in the respective same line as the nucleic acid molecule SEQ ID NO. 102941 or polypeptide SEQ ID NO. 102942, respectively, or a homolog or a fragment thereof, is increased or generated, or if the activity isopropylmalate isomerase large subunit is increased or generated in a non-human organism, like a microorganism or a plant cell, plant or part thereof, especially with non-targeted localization, whereby the respective line disclose in column 7 the fine chemical alpha-tocopherol. For example, an increase of the alpha-tocopherol of at least 1 percent, particularly in a range of 51 to 68-percent is conferred as compared to a corresponding non-transformed wild type non-human organism.

[46519] Accordingly, in one embodiment, an increase of alpha-tocopherol in a non-human organism, as compared to a corresponding non-transformed wild type non-human organism, is conferred in the process of the invention, if the activity of a polypeptide showing the activity of a hydrolase, or if the activity of the polypeptide AvinDRAFT_{—}5103, preferably represented by SEQ ID NO. 6511, or a homolog or fragment thereof, or if the activity of a polypeptide encoded by a nucleic acid molecule comprising the nucleic acid SEQ ID NO. 6510, preferably the coding region thereof, or a homolog or fragment thereof, e.g. derived from Azotobacter vinelandii, is increased or generated. For example the activity of a nucleic acid molecule or a polypeptide comprising the nucleic acid, preferably the coding region thereof, or polypeptide or the consensus sequence or the polypeptide motif, as depicted in Table I, II or IV, application No. 7, column 5 or 8 in the respective same line as the nucleic acid molecule SEQ ID NO. 6510 or polypeptide SEQ ID NO. 6511, respectively, or a homolog or a fragment thereof, is increased or generated, or if the activity hydrolase is increased or generated in a non-human organism, like a microorganism or a plant cell, plant or part thereof, especially with non-targeted localization, whereby the respective line disclose in column 7 the fine chemical alpha-tocopherol. For example, an increase of the alpha-tocopherol of at least 1 percent, particularly in a range of 145 to 201-percent is conferred as compared to a corresponding non-transformed wild type non-human organism.

[46520] Accordingly, in one embodiment, an increase of gamma-tocopherol in a non-human organism, as compared to a corresponding non-transformed wild type non-human organism, is conferred in the process of the invention, if the activity of a polypeptide showing the activity of a hydrolase, or if the activity of the polypeptide AvinDRAFT_{—}5103, preferably represented by SEQ ID NO. 6511, or a homolog or fragment thereof, or if the activity of a polypeptide encoded by a nucleic acid molecule comprising the nucleic acid SEQ ID NO. 6510, preferably the coding region thereof, or a homolog or fragment thereof, e.g. derived from Azotobacter vinelandii, is increased or generated. For example the activity of a nucleic acid molecule or a polypeptide comprising the nucleic acid, preferably the coding region thereof, or polypeptide or the consensus sequence or the polypeptide motif, as depicted in Table I, II or IV, application No. 7, column 5 or 8 in the respective same line as the nucleic acid molecule SEQ ID NO. 6510 or polypeptide SEQ ID NO. 6511, respectively, or a homolog or a fragment thereof, is increased or generated, or if the activity hydrolase is increased or generated in a non-human organism, like a microorganism or a plant cell, plant or part thereof, especially with non-targeted localization, whereby the respective line disclose in column 7 the fine chemical gamma-tocopherol. For example, an increase of the gamma-tocopherol of at least 1 percent, particularly in a range of 40 to 237-percent is conferred as compared to a corresponding non-transformed wild type non-human organism.

[46521] Accordingly, in one embodiment, an increase of gamma-tocopherol in a non-human organism, as compared to a corresponding non-transformed wild type non-human organism, is conferred in the process of the invention, if the activity of a polypeptide showing the activity of a electron transfer flavoprotein subunit beta, or if the activity of the polypeptide AvinDRAFT_{—}6679, preferably represented by SEQ ID NO. 74730, or a homolog or fragment thereof, or if the activity of a polypeptide encoded by a nucleic acid molecule comprising the nucleic acid SEQ ID NO. 74729, preferably the coding region thereof, or a homolog or fragment thereof, e.g. derived from Azotobacter vinelandii, is increased or generated. For example the activity of a nucleic acid molecule or a polypeptide comprising the nucleic acid, preferably the coding region thereof, or polypeptide or the consensus sequence or the polypeptide motif, as depicted in Table I, II or IV, application No. 7, column 5 or 8 in the respective same line as the nucleic acid molecule SEQ ID NO. 74729 or polypeptide SEQ ID NO. 74730, respectively, or a homolog or a fragment thereof, is increased or generated, or if the activity electron transfer flavoprotein subunit beta is increased or generated in a non-human organism, like a microorganism or a plant cell, plant or part thereof, especially with non-targeted localization, whereby the respective line disclose in column 7 the fine chemical gamma-tocopherol. For example, an increase of the gamma-tocopherol of at least 1 percent, particularly in a range of 44 to 243-percent is conferred as compared to a corresponding non-transformed wild type non-human organism.

[46522] Accordingly, in one embodiment, an increase of gamma-tocopherol in a non-human organism, as compared to a corresponding non-transformed wild type non-human organism, is conferred in the process of the invention, if the activity of a polypeptide showing the activity of a threonine synthase, or if the activity of the polypeptide B0004, preferably represented by SEQ ID NO. 34890, or a homolog or fragment thereof, or if the activity of a polypeptide encoded by a nucleic acid molecule comprising the nucleic acid SEQ ID NO. 34889, preferably the coding region thereof, or a homolog or fragment thereof, e.g. derived from Escherichia coli, is increased or generated. For example the activity of a nucleic acid molecule or a polypeptide comprising the nucleic acid, preferably the coding region thereof, or polypeptide or the consensus sequence or the polypeptide motif, as depicted in Table I, II or IV, application No. 7, column 5 or 8 in the respective same line as the nucleic acid molecule SEQ ID NO. 34889 or polypeptide SEQ ID NO. 34890, respectively, or a homolog or a fragment thereof, is increased or generated, or if the activity threonine synthase is increased or generated in a non-human organism, like a microorganism or a plant cell, plant or part thereof, especially with plastidic localization, whereby the respective line disclose in column 7 the fine chemical gamma-tocopherol. For example, an increase of the gamma-tocopherol of at least 1 percent, particularly in a range of 75 to 443-percent is conferred as compared to a corresponding non-transformed wild type non-human organism.

[46523] Accordingly, in one embodiment, an increase of alpha-tocopherol in a non-human organism, as compared to a corresponding non-transformed wild type non-human organism, is conferred in the process of the invention, if the activity of a polypeptide showing the activity of a glucose dehydrogenase, or if the activity of the polypeptide B0124, preferably represented by SEQ ID NO. 35483, or a homolog or fragment thereof, or if the activity of a polypeptide encoded by a nucleic acid molecule comprising the nucleic acid SEQ ID NO. 35482, preferably the coding region thereof, or a homolog or fragment thereof, e.g. derived from Escherichia coli, is increased or generated. For example the activity of a nucleic acid molecule or a polypeptide comprising the nucleic acid, preferably the coding region thereof, or polypeptide or the consensus sequence or the polypeptide motif, as depicted in Table I, II or IV, application No. 7, column 5 or 8 in the respective same line as the nucleic acid molecule SEQ ID NO. 35482 or polypeptide SEQ ID NO. 35483, respectively, or a homolog or a fragment thereof, is increased or generated, or if the activity glucose dehydrogenase is increased or generated in a non-human organism, like a microorganism or a plant cell, plant or part thereof, especially with non-targeted localization, whereby the respective line disclose in column 7 the fine chemical alpha-tocopherol. For example, an increase of the alpha-tocopherol of at least 1 percent, particularly in a range of 38 to 103 -percent is conferred as compared to a corresponding non-transformed wild type non-human organism.

[46524] Accordingly, in one embodiment, an increase of gamma-tocopherol in a non-human organism, as compared to a corresponding non-transformed wild type non-human organism, is conferred in the process of the invention, if the activity of a polypeptide showing the activity of a glucose dehydrogenase, or if the activity of the polypeptide B0124, preferably represented by SEQ ID NO. 35483, or a homolog or fragment thereof, or if the activity of a polypeptide encoded by a nucleic acid molecule comprising the nucleic acid SEQ ID NO. 35482, preferably the coding region thereof, or a homolog or fragment thereof, e.g. derived from Escherichia coli, is increased or generated. For example the activity of a nucleic acid molecule or a polypeptide comprising the nucleic acid, preferably the coding region thereof, or polypeptide or the consensus sequence or the polypeptide motif, as depicted in Table I, II or IV, application No. 7, column 5 or 8 in the respective same line as the nucleic acid molecule SEQ ID NO. 35482 or polypeptide SEQ ID NO. 35483, respectively, or a homolog or a fragment thereof, is increased or generated, or if the activity glucose dehydrogenase is increased or generated in a non-human organism, like a microorganism or a plant cell, plant or part thereof, especially with non-targeted localization, whereby the respective line disclose in column 7 the fine chemical gamma-tocopherol. For example, an increase of the gamma-tocopherol of at least 1 percent, particularly in a range of 175 to 277-percent is conferred as compared to a corresponding non-transformed wild type non-human organism.

[46525] Accordingly, in one embodiment, an increase of gamma-tocopherol in a non-human organism, as compared to a corresponding non-transformed wild type non-human organism, is conferred in the process of the invention, if the activity of a polypeptide showing the activity of a serine protease, or if the activity of the polypeptide B0161, preferably represented by SEQ ID NO. 7082, or a homolog or fragment thereof, or if the activity of a polypeptide encoded by a nucleic acid molecule comprising the nucleic acid SEQ ID NO. 7081, preferably the coding region thereof, or a homolog or fragment thereof, e.g. derived from Escherichia coli, is increased or generated. For example the activity of a nucleic acid molecule or a polypeptide comprising the nucleic acid, preferably the coding region thereof, or polypeptide or the consensus sequence or the polypeptide motif, as depicted in Table I, II or IV, application No. 7, column 5 or 8 in the respective same line as the nucleic acid molecule SEQ ID NO. 7081 or polypeptide SEQ ID NO. 7082, respectively, or a homolog or a fragment thereof, is increased or generated, or if the activity serine protease is increased or generated in a non-human organism, like a microorganism or a plant cell, plant or part thereof, especially with non-targeted localization, whereby the respective line disclose in column 7 the fine chemical gamma-tocopherol. For example, an increase of the gamma-tocopherol of at least 1 percent, particularly in a range of 98 to 238-percent is conferred as compared to a corresponding non-transformed wild type non-human organism.

[46526] Accordingly, in one embodiment, an increase of alpha-tocopherol in a non-human organism, as compared to a corresponding non-transformed wild type non-human organism, is conferred in the process of the invention, if the activity of a polypeptide showing the activity of a geranyltranstransferase, or if the activity of the polypeptide B0421, preferably represented by SEQ ID NO. 111341, or a homolog or fragment thereof, or if the activity of a polypeptide encoded by a nucleic acid molecule comprising the nucleic acid SEQ ID NO. 111340, preferably the coding region thereof, or a homolog or fragment thereof, e.g. derived from Escherichia coli, is increased or generated. For example the activity of a nucleic acid molecule or a polypeptide comprising the nucleic acid, preferably the coding region thereof, or polypeptide or the consensus sequence or the polypeptide motif, as depicted in Table I, II or IV, application No. 7, column 5 or 8 in the respective same line as the nucleic acid molecule SEQ ID NO. 111340 or polypeptide SEQ ID NO. 111341, respectively, or a homolog or a fragment thereof, is increased or generated, or if the activity geranyltranstransferase is increased or generated in a non-human organism, like a microorganism or a plant cell, plant or part thereof, especially with non-targeted localization, whereby the respective line disclose in column 7 the fine chemical alpha-tocopherol. For example, an increase of the alpha-tocopherol of at least 1 percent, particularly in a range of 42 to 44-percent is conferred as compared to a corresponding non-transformed wild type non-human organism.

[46527] Accordingly, in one embodiment, an increase of gamma-tocopherol in a non-human organism, as compared to a corresponding non-transformed wild type non-human organism, is conferred in the process of the invention, if the activity of a polypeptide showing the activity of a ATP-binding component of a transport system, or if the activity of the polypeptide B0449, preferably represented by SEQ ID NO. 7334, or a homolog or fragment thereof, or if the activity of a polypeptide encoded by a nucleic acid molecule comprising the nucleic acid SEQ ID NO. 7333, preferably the coding region thereof, or a homolog or fragment thereof, e.g. derived from Escherichia coli, is increased or generated. For example the activity of a nucleic acid molecule or a polypeptide comprising the nucleic acid, preferably the coding region thereof, or polypeptide or the consensus sequence or the polypeptide motif, as depicted in Table I, II or IV, application No. 7, column 5 or 8 in the respective same line as the nucleic acid molecule SEQ ID NO. 7333 or polypeptide SEQ ID NO. 7334, respectively, or a homolog or a fragment thereof, is increased or generated, or if the activity ATP-binding component of a transport system is increased or generated in a non-human organism, like a microorganism or a plant cell, plant or part thereof, especially with non-targeted localization, whereby the respective line disclose in column 7 the fine chemical gamma-tocopherol. For example, an increase of the gamma-tocopherol of at least 1 percent, particularly in a range of 42 to 248-percent is conferred as compared to a corresponding non-transformed wild type non-human organism.

[46528] Accordingly, in one embodiment, an increase of alpha-tocopherol in a non-human organism, as compared to a corresponding non-transformed wild type non-human organism, is conferred in the process of the invention, if the activity of a polypeptide showing the activity of a 3-deoxy-D-arabinoheptulosonate-7-phosphatesynthase, or if the activity of the polypeptide B0754, preferably represented by SEQ ID NO. 75287, or a homolog or fragment thereof, or if the activity of a polypeptide encoded by a nucleic acid molecule comprising the nucleic acid SEQ ID NO. 75286, preferably the coding region thereof, or a homolog or fragment thereof, e.g. derived from Escherichia coli, is increased or generated. For example the activity of a nucleic acid molecule or a polypeptide comprising the nucleic acid, preferably the coding region thereof, or polypeptide or the consensus sequence or the polypeptide motif, as depicted in Table I, II or IV, application No. 7, column 5 or 8 in the respective same line as the nucleic acid molecule SEQ ID NO. 75286 or polypeptide SEQ ID NO. 75287, respectively, or a homolog or a fragment thereof, is increased or generated, or if the activity 3-deoxy-D-arabinoheptulosonate-7-phosphatesynthase is increased or generated in a non-human organism, like a microorganism or a plant cell, plant or part thereof, especially with plastidic localization, whereby the respective line disclose in column 7 the fine chemical alpha-tocopherol. For example, an increase of the alpha-tocopherol of at least 1 percent, particularly in a range of 35 to 68-percent is conferred as compared to a corresponding non-transformed wild type non-human organism.

[46529] Accordingly, in one embodiment, an increase of gamma-tocopherol in a non-human organism, as compared to a corresponding non-transformed wild type non-human organism, is conferred in the process of the invention, if the activity of a polypeptide showing the activity of a major facilitator superfamily transporter protein, or if the activity of the polypeptide B0898, preferably represented by SEQ ID NO. 7918, or a homolog or fragment thereof, or if the activity of a polypeptide encoded by a nucleic acid molecule comprising the nucleic acid SEQ ID NO. 7917, preferably the coding region thereof, or a homolog or fragment thereof, e.g. derived from Escherichia coli, is increased or generated. For example the activity of a nucleic acid molecule or a polypeptide comprising the nucleic acid, preferably the coding region thereof, or polypeptide or the consensus sequence or the polypeptide motif, as depicted in Table I, II or IV, application No. 7, column 5 or 8 in the respective same line as the nucleic acid molecule SEQ ID NO. 7917 or polypeptide SEQ ID NO. 7918, respectively, or a homolog or a fragment thereof, is increased or generated, or if the activity major facilitator superfamily transporter protein is increased or generated in a non-human organism, like a microorganism or a plant cell, plant or part thereof, especially with non-targeted localization, whereby the respective line disclose in column 7 the fine chemical gamma-tocopherol. For example, an increase of the gamma-tocopherol of at least 1 percent, particularly in a range of 76 to 379-percent is conferred as compared to a corresponding non-transformed wild type non-human organism.

[46530] Accordingly, in one embodiment, an increase of alpha-tocopherol in a non-human organism, as compared to a corresponding non-transformed wild type non-human organism, is conferred in the process of the invention, if the activity of a polypeptide showing the activity of a b1163-protein, or if the activity of the polypeptide B1163, preferably represented by SEQ ID NO. 37395, or a homolog or fragment thereof, or if the activity of a polypeptide encoded by a nucleic acid molecule comprising the nucleic acid SEQ ID NO. 37394, preferably the coding region thereof, or a homolog or fragment thereof, e.g. derived from Escherichia coli, is increased or generated. For example the activity of a nucleic acid molecule or a polypeptide comprising the nucleic acid, preferably the coding region thereof, or polypeptide or the consensus sequence or the polypeptide motif, as depicted in Table I, II or IV, application No. 7, column 5 or 8 in the respective same line as the nucleic acid molecule SEQ ID NO. 37394 or polypeptide SEQ ID NO. 37395, respectively, or a homolog or a fragment thereof, is increased or generated, or if the activity b1163-protein is increased or generated in a non-human organism, like a microorganism or a plant cell, plant or part thereof, especially with non-targeted localization, whereby the respective line disclose in column 7 the fine chemical alpha-tocopherol. For example, an increase of the alpha-tocopherol of at least 1 percent, particularly in a range of 52 to 56-percent is conferred as compared to a corresponding non-transformed wild type non-human organism.

[46531] Accordingly, in one embodiment, an increase of gamma-tocopherol in a non-human organism, as compared to a corresponding non-transformed wild type non-human organism, is conferred in the process of the invention, if the activity of a polypeptide showing the activity of a DNA polymerase subunit, or if the activity of the polypeptide B1183, preferably represented by SEQ ID NO. 111911, or a homolog or fragment thereof, or if the activity of a polypeptide encoded by a nucleic acid molecule comprising the nucleic acid SEQ ID NO. 111910, preferably the coding region thereof, or a homolog or fragment thereof, e.g. derived from Escherichia coli, is increased or generated. For example the activity of a nucleic acid molecule or a polypeptide comprising the nucleic acid, preferably the coding region thereof, or polypeptide or the consensus sequence or the polypeptide motif, as depicted in Table I, II or IV, application No. 7, column 5 or 8 in the respective same line as the nucleic acid molecule SEQ ID NO. 111910 or polypeptide SEQ ID NO. 111911, respectively, or a homolog or a fragment thereof, is increased or generated, or if the activity DNA polymerase subunit is increased or generated in a non-human organism, like a microorganism or a plant cell, plant or part thereof, especially with non-targeted localization, whereby the respective line disclose in column 7 the fine chemical gamma-tocopherol. For example, an increase of the gamma-tocopherol of at least 1 percent, particularly in a range of 33 to 45-percent is conferred as compared to a corresponding non-transformed wild type non-human organism.

[46532] Accordingly, in one embodiment, an increase of alpha-tocopherol in a non-human organism, as compared to a corresponding non-transformed wild type non-human organism, is conferred in the process of the invention, if the activity of a polypeptide showing the activity of a b1219-protein, or if the activity of the polypeptide B1219, preferably represented by SEQ ID NO. 112073, or a homolog or fragment thereof, or if the activity of a polypeptide encoded by a nucleic acid molecule comprising the nucleic acid SEQ ID NO. 112072, preferably the coding region thereof, or a homolog or fragment thereof, e.g. derived from Escherichia coli, is increased or generated. For example the activity of a nucleic acid molecule or a polypeptide comprising the nucleic acid, preferably the coding region thereof, or polypeptide or the consensus sequence or the polypeptide motif, as depicted in Table I, II or IV, application No. 7, column 5 or 8 in the respective same line as the nucleic acid molecule SEQ ID NO. 112072 or polypeptide SEQ ID NO. 112073, respectively, or a homolog or a fragment thereof, is increased or generated, or if the activity b1219-protein is increased or generated in a non-human organism, like a microorganism or a plant cell, plant or part thereof, especially with non-targeted localization, whereby the respective line disclose in column 7 the fine chemical alpha-tocopherol. For example, an increase of the alpha-tocopherol of at least 1 percent, particularly in a range of 51 to 98-percent is conferred as compared to a corresponding non-transformed wild type non-human organism.

[46533] Accordingly, in one embodiment, an increase of gamma-tocopherol in a non-human organism, as compared to a corresponding non-transformed wild type non-human organism, is conferred in the process of the invention, if the activity of a polypeptide showing the activity of a b1234-protein, or if the activity of the polypeptide B1234, preferably represented by SEQ ID NO. 112112, or a homolog or fragment thereof, or if the activity of a polypeptide encoded by a nucleic acid molecule comprising the nucleic acid SEQ ID NO. 112111, preferably the coding region thereof, or a homolog or fragment thereof, e.g. derived from Escherichia coli, is increased or generated. For example the activity of a nucleic acid molecule or a polypeptide comprising the nucleic acid, preferably the coding region thereof, or polypeptide or the consensus sequence or the polypeptide motif, as depicted in Table I, II or IV, application No. 7, column 5 or 8 in the respective same line as the nucleic acid molecule SEQ ID NO. 112111 or polypeptide SEQ ID NO. 112112, respectively, or a homolog or a fragment thereof, is increased or generated, or if the activity b1234-protein is increased or generated in a non-human organism, like a microorganism or a plant cell, plant or part thereof, especially with non-targeted localization, whereby the respective line disclose in column 7 the fine chemical gamma-tocopherol. For example, an increase of the gamma-tocopherol of at least 1 percent, particularly in a range of 33 to 57-percent is conferred as compared to a corresponding non-transformed wild type non-human organism.

[46534] Accordingly, in one embodiment, an increase of gamma-tocopherol in a non-human organism, as compared to a corresponding non-transformed wild type non-human organism, is conferred in the process of the invention, if the activity of a polypeptide showing the activity of a NADP-dependent malic enzyme, or if the activity of the polypeptide B1479, preferably represented by SEQ ID NO. 77775, or a homolog or fragment thereof, or if the activity of a polypeptide encoded by a nucleic acid molecule comprising the nucleic acid SEQ ID NO. 77774, preferably the coding region thereof, or a homolog or fragment thereof, e.g. derived from Escherichia coli, is increased or generated. For example the activity of a nucleic acid molecule or a polypeptide comprising the nucleic acid, preferably the coding region thereof, or polypeptide or the consensus sequence or the polypeptide motif, as depicted in Table I, II or IV, application No. 7, column 5 or 8 in the respective same line as the nucleic acid molecule SEQ ID NO. 77774 or polypeptide SEQ ID NO. 77775, respectively, or a homolog or a fragment thereof, is increased or generated, or if the activity NADP-dependent malic enzyme is increased or generated in a non-human organism, like a microorganism or a plant cell, plant or part thereof, especially with non-targeted localization, whereby the respective line disclose in column 7 the fine chemical gamma-tocopherol. For example, an increase of the gamma-tocopherol of at least 1 percent, particularly in a range of 33 to 79-percent is conferred as compared to a corresponding non-transformed wild type non-human organism.

[46535] Accordingly, in one embodiment, an increase of gamma-tocopherol in a non-human organism, as compared to a corresponding non-transformed wild type non-human organism, is conferred in the process of the invention, if the activity of a polypeptide showing the activity of a b1522-protein, or if the activity of the polypeptide B1522, preferably represented by SEQ ID NO. 7948, or a homolog or fragment thereof, or if the activity of a polypeptide encoded by a nucleic acid molecule comprising the nucleic acid SEQ ID NO. 7947, preferably the coding region thereof, or a homolog or fragment thereof, e.g. derived from Escherichia coli, is increased or generated. For example the activity of a nucleic acid molecule or a polypeptide comprising the nucleic acid, preferably the coding region thereof, or polypeptide or the consensus sequence or the polypeptide motif, as depicted in Table I, II or IV, application No. 7, column 5 or 8 in the respective same line as the nucleic acid molecule SEQ ID NO. 7947 or polypeptide SEQ ID NO. 7948, respectively, or a homolog or a fragment thereof, is increased or generated, or if the activity b1522-protein is increased or generated in a non-human organism, like a microorganism or a plant cell, plant or part thereof, especially with non-targeted localization, whereby the respective line disclose in column 7 the fine chemical gamma-tocopherol. For example, an increase of the gamma-tocopherol of at least 1 percent, particularly in a range of 51 to 301-percent is conferred as compared to a corresponding non-transformed wild type non-human organism.

[46536] Accordingly, in one embodiment, an increase of alpha-tocopherol in a non-human organism, as compared to a corresponding non-transformed wild type non-human organism, is conferred in the process of the invention, if the activity of a polypeptide showing the activity of a acid shock protein, or if the activity of the polypeptide B1597, preferably represented by SEQ ID NO. 38301, or a homolog or fragment thereof, or if the activity of a polypeptide encoded by a nucleic acid molecule comprising the nucleic acid SEQ ID NO. 38300, preferably the coding region thereof, or a homolog or fragment thereof, e.g. derived from Escherichia coli, is increased or generated. For example the activity of a nucleic acid molecule or a polypeptide comprising the nucleic acid, preferably the coding region thereof, or polypeptide or the consensus sequence or the polypeptide motif, as depicted in Table I, II or IV, application No. 7, column 5 or 8 in the respective same line as the nucleic acid molecule SEQ ID NO. 38300 or polypeptide SEQ ID NO. 38301, respectively, or a homolog or a fragment thereof, is increased or generated, or if the activity acid shock protein is increased or generated in a non-human organism, like a microorganism or a plant cell, plant or part thereof, especially with non-targeted localization, whereby the respective line disclose in column 7 the fine chemical alpha-tocopherol. For example, an increase of the alpha-tocopherol of at least 1 percent, particularly in a range of 50 to 302-percent is conferred as compared to a corresponding non-transformed wild type non-human organism.

[46537] Accordingly, in one embodiment, an increase of alpha-tocopherol in a non-human organism, as compared to a corresponding non-transformed wild type non-human organism, is conferred in the process of the invention, if the activity of a polypeptide showing the activity of a transport protein, or if the activity of the polypeptide B1601, preferably represented by SEQ ID NO. 7993, or a homolog or fragment thereof, or if the activity of a polypeptide encoded by a nucleic acid molecule comprising the nucleic acid SEQ ID NO. 7992, preferably the coding region thereof, or a homolog or fragment thereof, e.g. derived from Escherichia coli, is increased or generated. For example the activity of a nucleic acid molecule or a polypeptide comprising the nucleic acid, preferably the coding region thereof, or polypeptide or the consensus sequence or the polypeptide motif, as depicted in Table I, II or IV, application No. 7, column 5 or 8 in the respective same line as the nucleic acid molecule SEQ ID NO. 7992 or polypeptide SEQ ID NO. 7993, respectively, or a homolog or a fragment thereof, is increased or generated, or if the activity transport protein is increased or generated in a non-human organism, like a microorganism or a plant cell, plant or part thereof, especially with non-targeted localization, whereby the respective line disclose in column 7 the fine chemical alpha-tocopherol. For example, an increase of the alpha-tocopherol of at least 1 percent, particularly in a range of 52 to 112-percent is conferred as compared to a corresponding non-transformed wild type non-human organism.

[46538] Accordingly, in one embodiment, an increase of gamma-tocopherol in a non-human organism, as compared to a corresponding non-transformed wild type non-human organism, is conferred in the process of the invention, if the activity of a polypeptide showing the activity of a trehalosephosphatase, or if the activity of the polypeptide B1897, preferably represented by SEQ ID NO. 79057, or a homolog or fragment thereof, or if the activity of a polypeptide encoded by a nucleic acid molecule comprising the nucleic acid SEQ ID NO. 79056, preferably the coding region thereof, or a homolog or fragment thereof, e.g. derived from Escherichia coli, is increased or generated. For example the activity of a nucleic acid molecule or a polypeptide comprising the nucleic acid, preferably the coding region thereof, or polypeptide or the consensus sequence or the polypeptide motif, as depicted in Table I, II or IV, application No. 7, column 5 or 8 in the respective same line as the nucleic acid molecule SEQ ID NO. 79056 or polypeptide SEQ ID NO. 79057, respectively, or a homolog or a fragment thereof, is increased or generated, or if the activity trehalose-phosphatase is increased or generated in a non-human organism, like a microorganism or a plant cell, plant or part thereof, especially with non-targeted localization, whereby the respective line disclose in column 7 the fine chemical gamma-tocopherol. For example, an increase of the gamma-tocopherol of at least 1 percent, particularly in a range of 36 to 153-percent is conferred as compared to a corresponding non-transformed wild type non-human organism.

[46539] Accordingly, in one embodiment, an increase of gamma-tocopherol in a non-human organism, as compared to a corresponding non-transformed wild type non-human organism, is conferred in the process of the invention, if the activity of a polypeptide showing the activity of a b1921-protein, or if the activity of the polypeptide B1921, preferably represented by SEQ ID NO. 112170, or a homolog or fragment thereof, or if the activity of a polypeptide encoded by a nucleic acid molecule comprising the nucleic acid SEQ ID NO. 112169, preferably the coding region thereof, or a homolog or fragment thereof, e.g. derived from Escherichia coli, is increased or generated. For example the activity of a nucleic acid molecule or a polypeptide comprising the nucleic acid, preferably the coding region thereof, or polypeptide or the consensus sequence or the polypeptide motif, as depicted in Table I, II or IV, application No. 7, column 5 or 8 in the respective same line as the nucleic acid molecule SEQ ID NO. 112169 or polypeptide SEQ ID NO. 112170, respectively, or a homolog or a fragment thereof, is increased or generated, or if the activity b1921-protein is increased or generated in a non-human organism, like a microorganism or a plant cell, plant or part thereof, especially with non-targeted localization, whereby the respective line disclose in column 7 the fine chemical gamma-tocopherol. For example, an increase of the gamma-tocopherol of at least 1 percent, particularly in a range of 46 to 84-percent is conferred as compared to a corresponding non-transformed wild type non-human organism.

[46540] Accordingly, in one embodiment, an increase of gamma-tocopherol in a non-human organism, as compared to a corresponding non-transformed wild type non-human organism, is conferred in the process of the invention, if the activity of a polypeptide showing the activity of a O-antigen chain length determinant, or if the activity of the polypeptide B2027, preferably represented by SEQ ID NO. 79218, or a homolog or fragment thereof, or if the activity of a polypeptide encoded by a nucleic acid molecule comprising the nucleic acid SEQ ID NO. 79217, preferably the coding region thereof, or a homolog or fragment thereof, e.g. derived from Escherichia coli, is increased or generated. For example the activity of a nucleic acid molecule or a polypeptide comprising the nucleic acid, preferably the coding region thereof, or polypeptide or the consensus sequence or the polypeptide motif, as depicted in Table I, II or IV, application No. 7, column 5 or 8 in the respective same line as the nucleic acid molecule SEQ ID NO. 79217 or polypeptide SEQ ID NO. 79218, respectively, or a homolog or a fragment thereof, is increased or generated, or if the activity O-antigen chain length determinant is increased or generated in a non-human organism, like a microorganism or a plant cell, plant or part thereof, especially with non-targeted localization, whereby the respective line disclose in column 7 the fine chemical gamma-tocopherol. For example, an increase of the gamma-tocopherol of at least 1 percent, particularly in a range of 39 to 203-percent is conferred as compared to a corresponding non-transformed wild type non-human organism.

[46541] Accordingly, in one embodiment, an increase of alpha-tocopherol in a non-human organism, as compared to a corresponding non-transformed wild type non-human organism, is conferred in the process of the invention, if the activity of a polypeptide showing the activity of a colanic acid biosynthesis protein, or if the activity of the polypeptide B2043, preferably represented by SEQ ID NO. 112194, or a homolog or fragment thereof, or if the activity of a polypeptide encoded by a nucleic acid molecule comprising the nucleic acid SEQ ID NO. 112193, preferably the coding region thereof, or a homolog or fragment thereof, e.g. derived from Escherichia coli, is increased or generated. For example the activity of a nucleic acid molecule or a polypeptide comprising the nucleic acid, preferably the coding region thereof, or polypeptide or the consensus sequence or the polypeptide motif, as depicted in Table I, II or IV, application No. 7, column 5 or 8 in the respective same line as the nucleic acid molecule SEQ ID NO. 112193 or polypeptide SEQ ID NO. 112194, respectively, or a homolog or a fragment thereof, is increased or generated, or if the activity colanic acid biosynthesis protein is increased or generated in a non-human organism, like a microorganism or a plant cell, plant or part thereof, especially with non-targeted localization, whereby the respective line disclose in column 7 the fine chemical alpha-tocopherol. For example, an increase of the alpha-tocopherol of at least 1 percent, particularly in a range of 38 to 60-percent is conferred as compared to a corresponding non-transformed wild type non-human organism.

[46542] Accordingly, in one embodiment, an increase of gamma-tocopherol in a non-human organism, as compared to a corresponding non-transformed wild type non-human organism, is conferred in the process of the invention, if the activity of a polypeptide showing the activity of a b2360-protein, or if the activity of the polypeptide B2360, preferably represented by SEQ ID NO. 39220, or a homolog or fragment thereof, or if the activity of a polypeptide encoded by a nucleic acid molecule comprising the nucleic acid SEQ ID NO. 39219, preferably the coding region thereof, or a homolog or fragment thereof, e.g. derived from Escherichia coli, is increased or generated. For example the activity of a nucleic acid molecule or a polypeptide comprising the nucleic acid, preferably the coding region thereof, or polypeptide or the consensus sequence or the polypeptide motif, as depicted in Table I, II or IV, application No. 7, column 5 or 8 in the respective same line as the nucleic acid molecule SEQ ID NO. 39219 or polypeptide SEQ ID NO. 39220, respectively, or a homolog or a fragment thereof, is increased or generated, or if the activity b2360-protein is increased or generated in a non-human organism, like a microorganism or a plant cell, plant or part thereof, especially with non-targeted localization, whereby the respective line disclose in column 7 the fine chemical gamma-tocopherol. For example, an increase of the gamma-tocopherol of at least 1 percent, particularly in a range of 48 to 93-percent is conferred as compared to a corresponding non-transformed wild type non-human organism.

[46543] Accordingly, in one embodiment, an increase of alpha-tocopherol in a non-human organism, as compared to a corresponding non-transformed wild type non-human organism, is conferred in the process of the invention, if the activity of a polypeptide showing the activity of a putative transport system permease protein, or if the activity of the polypeptide B2546, preferably represented by SEQ ID NO. 99899, or a homolog or fragment thereof, or if the activity of a polypeptide encoded by a nucleic acid molecule comprising the nucleic acid SEQ ID NO. 99898, preferably the coding region thereof, or a homolog or fragment thereof, e.g. derived from Escherichia coli, is increased or generated. For example the activity of a nucleic acid molecule or a polypeptide comprising the nucleic acid, preferably the coding region thereof, or polypeptide or the consensus sequence or the polypeptide motif, as depicted in Table I, II or IV, application No. 7, column 5 or 8 in the respective same line as the nucleic acid molecule SEQ ID NO. 99898 or polypeptide SEQ ID NO. 99899, respectively, or a homolog or a fragment thereof, is increased or generated, or if the activity putative transport system permease protein is increased or generated in a non-human organism, like a microorganism or a plant cell, plant or part thereof, especially with non-targeted localization, whereby the respective line disclose in column 7 the fine chemical alpha-tocopherol. For example, an increase of the alpha-tocopherol of at least 1 percent, particularly in a range of 53 to 87-percent is conferred as compared to a corresponding non-transformed wild type non-human organism.

[46544] Accordingly, in one embodiment, an increase of gamma-tocopherol in a non-human organism, as compared to a corresponding non-transformed wild type non-human organism, is conferred in the process of the invention, if the activity of a polypeptide showing the activity of a b2548-protein, or if the activity of the polypeptide B2548, preferably represented by SEQ ID NO. 40638, or a homolog or fragment thereof, or if the activity of a polypeptide encoded by a nucleic acid molecule comprising the nucleic acid SEQ ID NO. 40637, preferably the coding region thereof, or a homolog or fragment thereof, e.g. derived from Escherichia coli, is increased or generated. For example the activity of a nucleic acid molecule or a polypeptide comprising the nucleic acid, preferably the coding region thereof, or polypeptide or the consensus sequence or the polypeptide motif, as depicted in Table I, II or IV, application No. 7, column 5 or 8 in the respective same line as the nucleic acid molecule SEQ ID NO. 40637 or polypeptide SEQ ID NO. 40638, respectively, or a homolog or a fragment thereof, is increased or generated, or if the activity b2548-protein is increased or generated in a non-human organism, like a microorganism or a plant cell, plant or part thereof, especially with non-targeted localization, whereby the respective line disclose in column 7 the fine chemical gamma-tocopherol. For example, an increase of the gamma-tocopherol of at least 1 percent, particularly in a range of 35 to 100-percent is conferred as compared to a corresponding non-transformed wild type non-human organism.

[46545] Accordingly, in one embodiment, an increase of gamma-tocopherol in a non-human organism, as compared to a corresponding non-transformed wild type non-human organism, is conferred in the process of the invention, if the activity of a polypeptide showing the activity of a b2613-protein, or if the activity of the polypeptide B2613, preferably represented by SEQ ID NO. 40666, or a homolog or fragment thereof, or if the activity of a polypeptide encoded by a nucleic acid molecule comprising the nucleic acid SEQ ID NO. 40665, preferably the coding region thereof, or a homolog or fragment thereof, e.g. derived from Escherichia coli, is increased or generated. For example the activity of a nucleic acid molecule or a polypeptide comprising the nucleic acid, preferably the coding region thereof, or polypeptide or the consensus sequence or the polypeptide motif, as depicted in Table I, II or IV, application No. 7, column 5 or 8 in the respective same line as the nucleic acid molecule SEQ ID NO. 40665 or polypeptide SEQ ID NO. 40666, respectively, or a homolog or a fragment thereof, is increased or generated, or if the activity b2613-protein is increased or generated in a non-human organism, like a microorganism or a plant cell, plant or part thereof, especially with non-targeted localization, whereby the respective line disclose in column 7 the fine chemical gamma-tocopherol. For example, an increase of the gamma-tocopherol of at least 1 percent, particularly in a range of 39 to 100-percent is conferred as compared to a corresponding non-transformed wild type non-human organism.

[46546] Accordingly, in one embodiment, an increase of gamma-tocopherol in a non-human organism, as compared to a corresponding non-transformed wild type non-human organism, is conferred in the process of the invention, if the activity of a polypeptide showing the activity of a b2673-protein, or if the activity of the polypeptide B2673, preferably represented by SEQ ID NO. 9245, or a homolog or fragment thereof, or if the activity of a polypeptide encoded by a nucleic acid molecule comprising the nucleic acid SEQ ID NO. 9244, preferably the coding region thereof, or a homolog or fragment thereof, e.g. derived from Escherichia coli, is increased or generated. For example the activity of a nucleic acid molecule or a polypeptide comprising the nucleic acid, preferably the coding region thereof, or polypeptide or the consensus sequence or the polypeptide motif, as depicted in Table I, II or IV, application No. 7, column 5 or 8 in the respective same line as the nucleic acid molecule SEQ ID NO. 9244 or polypeptide SEQ ID NO. 9245, respectively, or a homolog or a fragment thereof, is increased or generated, or if the activity b2673-protein is increased or generated in a non-human organism, like a microorganism or a plant cell, plant or part thereof, especially with non-targeted localization, whereby the respective line disclose in column 7 the fine chemical gamma-tocopherol. For example, an increase of the gamma-tocopherol of at least 1 percent, particularly in a range of 36 to 55-percent is conferred as compared to a corresponding non-transformed wild type non-human organism.

[46547] Accordingly, in one embodiment, an increase of gamma-tocopherol in a non-human organism, as compared to a corresponding non-transformed wild type non-human organism, is conferred in the process of the invention, if the activity of a polypeptide showing the activity of a murein transglycosylase, or if the activity of the polypeptide B2701, preferably represented by SEQ ID NO. 80757, or a homolog or fragment thereof, or if the activity of a polypeptide encoded by a nucleic acid molecule comprising the nucleic acid SEQ ID NO. 80756, preferably the coding region thereof, or a homolog or fragment thereof, e.g. derived from Escherichia coli, is increased or generated. For example the activity of a nucleic acid molecule or a polypeptide comprising the nucleic acid, preferably the coding region thereof, or polypeptide or the consensus sequence or the polypeptide motif, as depicted in Table I, II or IV, application No. 7, column 5 or 8 in the respective same line as the nucleic acid molecule SEQ ID NO. 80756 or polypeptide SEQ ID NO. 80757, respectively, or a homolog or a fragment thereof, is increased or generated, or if the activity murein transglycosylase is increased or generated in a non-human organism, like a microorganism or a plant cell, plant or part thereof, especially with non-targeted localization, whereby the respective line disclose in column 7 the fine chemical gamma-tocopherol. For example, an increase of the gamma-tocopherol of at least 1 percent, particularly in a range of 49 to 174-percent is conferred as compared to a corresponding non-transformed wild type non-human organism.

[46548] Accordingly, in one embodiment, an increase of gamma-tocopherol in a non-human organism, as compared to a corresponding non-transformed wild type non-human organism, is conferred in the process of the invention, if the activity of a polypeptide showing the activity of a b2812-protein, or if the activity of the polypeptide B2812, preferably represented by SEQ ID NO. 40796, or a homolog or fragment thereof, or if the activity of a polypeptide encoded by a nucleic acid molecule comprising the nucleic acid SEQ ID NO. 40795, preferably the coding region thereof, or a homolog or fragment thereof, e.g. derived from Escherichia coli, is increased or generated. For example the activity of a nucleic acid molecule or a polypeptide comprising the nucleic acid, preferably the coding region thereof, or polypeptide or the consensus sequence or the polypeptide motif, as depicted in Table I, II or IV, application No. 7, column 5 or 8 in the respective same line as the nucleic acid molecule SEQ ID NO. 40795 or polypeptide SEQ ID NO. 40796, respectively, or a homolog or a fragment thereof, is increased or generated, or if the activity b2812-protein is increased or generated in a non-human organism, like a microorganism or a plant cell, plant or part thereof, especially with non-targeted localization, whereby the respective line disclose in column 7 the fine chemical gamma-tocopherol. For example, an increase of the gamma-tocopherol of at least 1 percent, particularly in a range of 34 to 83-percent is conferred as compared to a corresponding non-transformed wild type non-human organism.

[46549] Accordingly, in one embodiment, an increase of alpha-tocopherol in a non-human organism, as compared to a corresponding non-transformed wild type non-human organism, is conferred in the process of the invention, if the activity of a polypeptide showing the activity of a amino-acid acetyltransferase, or if the activity of the polypeptide B2818, preferably represented by SEQ ID NO. 81577, or a homolog or fragment thereof, or if the activity of a polypeptide encoded by a nucleic acid molecule comprising the nucleic acid SEQ ID NO. 81576, preferably the coding region thereof, or a homolog or fragment thereof, e.g. derived from Escherichia coli, is increased or generated. For example the activity of a nucleic acid molecule or a polypeptide comprising the nucleic acid, preferably the coding region thereof, or polypeptide or the consensus sequence or the polypeptide motif, as depicted in Table I, II or IV, application No. 7, column 5 or 8 in the respective same line as the nucleic acid molecule SEQ ID NO. 81576 or polypeptide SEQ ID NO. 81577, respectively, or a homolog or a fragment thereof, is increased or generated, or if the activity amino-acid acetyltransferase is increased or generated in a non-human organism, like a microorganism or a plant cell, plant or part thereof, especially with non-targeted localization, whereby the respective line disclose in column 7 the fine chemical alpha-tocopherol. For example, an increase of the alpha-tocopherol of at least 1 percent, particularly in a range of 36 to 39-percent is conferred as compared to a corresponding non-transformed wild type non-human organism.

[46550] Accordingly, in one embodiment, an increase of gamma-tocopherol in a non-human organism, as compared to a corresponding non-transformed wild type non-human organism, is conferred in the process of the invention, if the activity of a polypeptide showing the activity of a aminoacid acetyltransferase, or if the activity of the polypeptide B2818, preferably represented by SEQ ID NO. 81577, or a homolog or fragment thereof, or if the activity of a polypeptide encoded by a nucleic acid molecule comprising the nucleic acid SEQ ID NO. 81576, preferably the coding region thereof, or a homolog or fragment thereof, e.g. derived from Escherichia coli, is increased or generated. For example the activity of a nucleic acid molecule or a polypeptide comprising the nucleic acid, preferably the coding region thereof, or polypeptide or the consensus sequence or the polypeptide motif, as depicted in Table I, II or IV, application No. 7, column 5 or 8 in the respective same line as the nucleic acid molecule SEQ ID NO. 81576 or polypeptide SEQ ID NO. 81577, respectively, or a homolog or a fragment thereof, is increased or generated, or if the activity amino-acid acetyltransferase is increased or generated in a non-human organism, like a microorganism or a plant cell, plant or part thereof, especially with non-targeted localization, whereby the respective line disclose in column 7 the fine chemical gamma-tocopherol. For example, an increase of the gamma-tocopherol of at least 1 percent, particularly in a range of 33 to 153-percent is conferred as compared to a corresponding non-transformed wild type non-human organism.

[46551] Accordingly, in one embodiment, an increase of alpha-tocopherol in a non-human organism, as compared to a corresponding non-transformed wild type non-human organism, is conferred in the process of the invention, if the activity of a polypeptide showing the activity of a glycolate utilization protein, or if the activity of the polypeptide B2977, preferably represented by SEQ ID NO. 112217, or a homolog or fragment thereof, or if the activity of a polypeptide encoded by a nucleic acid molecule comprising the nucleic acid SEQ ID NO. 112216, preferably the coding region thereof, or a homolog or fragment thereof, e.g. derived from Escherichia coli, is increased or generated. For example the activity of a nucleic acid molecule or a polypeptide comprising the nucleic acid, preferably the coding region thereof, or polypeptide or the consensus sequence or the polypeptide motif, as depicted in Table I, II or IV, application No. 7, column 5 or 8 in the respective same line as the nucleic acid molecule SEQ ID NO. 112216 or polypeptide SEQ ID NO. 112217, respectively, or a homolog or a fragment thereof, is increased or generated, or if the activity glycolate utilization protein is increased or generated in a non-human organism, like a microorganism or a plant cell, plant or part thereof, especially with non-targeted localization, whereby the respective line disclose in column 7 the fine chemical alpha-tocopherol. For example, an increase of the alpha-tocopherol of at least 1 percent, particularly in a range of 42 to 53-percent is conferred as compared to a corresponding non-transformed wild type non-human organism.

[46552] Accordingly, in one embodiment, an increase of alpha-tocopherol in a non-human organism, as compared to a corresponding non-transformed wild type non-human organism, is conferred in the process of the invention, if the activity of a polypeptide showing the activity of a ABC transporter permease subunit, or if the activity of the polypeptide B3194, preferably represented by SEQ ID NO. 112381, or a homolog or fragment thereof, or if the activity of a polypeptide encoded by a nucleic acid molecule comprising the nucleic acid SEQ ID NO. 112380, preferably the coding region thereof, or a homolog or fragment thereof, e.g. derived from Escherichia coli, is increased or generated. For example the activity of a nucleic acid molecule or a polypeptide comprising the nucleic acid, preferably the coding region thereof, or polypeptide or the consensus sequence or the polypeptide motif, as depicted in Table I, II or IV, application No. 7, column 5 or 8 in the respective same line as the nucleic acid molecule SEQ ID NO. 112380 or polypeptide SEQ ID NO. 112381, respectively, or a homolog or a fragment thereof, is increased or generated, or if the activity ABC transporter permease subunit is increased or generated in a non-human organism, like a microorganism or a plant cell, plant or part thereof, especially with plastidic localization, whereby the respective line disclose in column 7 the fine chemical alpha-tocopherol. For example, an increase of the alpha-tocopherol of at least 1 percent, particularly in a range of 25 to 26-percent is conferred as compared to a corresponding non-transformed wild type non-human organism.

[46553] Accordingly, in one embodiment, an increase of gamma-tocopherol in a non-human organism, as compared to a corresponding non-transformed wild type non-human organism, is conferred in the process of the invention, if the activity of a polypeptide showing the activity of a lipopolysaccharide biosynthesis protein, or if the activity of the polypeptide B3790, preferably represented by SEQ ID NO. 112607, or a homolog or fragment thereof, or if the activity of a polypeptide encoded by a nucleic acid molecule comprising the nucleic acid SEQ ID NO. 112606, preferably the coding region thereof, or a homolog or fragment thereof, e.g. derived from Escherichia coli, is increased or generated. For example the activity of a nucleic acid molecule or a polypeptide comprising the nucleic acid, preferably the coding region thereof, or polypeptide or the consensus sequence or the polypeptide motif, as depicted in Table I, II or IV, application No. 7, column 5 or 8 in the respective same line as the nucleic acid molecule SEQ ID NO. 112606 or polypeptide SEQ ID NO. 112607, respectively, or a homolog or a fragment thereof, is increased or generated, or if the activity lipopolysaccharide biosynthesis protein is increased or generated in a non-human organism, like a microorganism or a plant cell, plant or part thereof, especially with non-targeted localization, whereby the respective line disclose in column 7 the fine chemical gamma-tocopherol. For example, an increase of the gamma-tocopherol of at least 1-percent, particularly in a range of 35 to 61-percent is conferred as compared to a corresponding non-transformed wild type non-human organism.

[46554] Accordingly, in one embodiment, an increase of alpha-tocopherol in a non-human organism, as compared to a corresponding non-transformed wild type non-human organism, is conferred in the process of the invention, if the activity of a polypeptide showing the activity of a b3890-protein, or if the activity of the polypeptide B3890, preferably represented by SEQ ID NO. 112635, or a homolog or fragment thereof, or if the activity of a polypeptide encoded by a nucleic acid molecule comprising the nucleic acid SEQ ID NO. 112634, preferably the coding region thereof, or a homolog or fragment thereof, e.g. derived from Escherichia coli, is increased or generated. For example the activity of a nucleic acid molecule or a polypeptide comprising the nucleic acid, preferably the coding region thereof, or polypeptide or the consensus sequence or the polypeptide motif, as depicted in Table I, II or IV, application No. 7, column 5 or 8 in the respective same line as the nucleic acid molecule SEQ ID NO. 112634 or polypeptide SEQ ID NO. 112635, respectively, or a homolog or a fragment thereof, is increased or generated, or if the activity b3890-protein is increased or generated in a non-human organism, like a microorganism or a plant cell, plant or part thereof, especially with non-targeted localization, whereby the respective line disclose in column 7 the fine chemical alpha-tocopherol. For example, an increase of the alpha-tocopherol of at least 1 percent, particularly in a range of 67 to 290-percent is conferred as compared to a corresponding non-transformed wild type non-human organism.

[46555] Accordingly, in one embodiment, an increase of alpha-tocopherol in a non-human organism, as compared to a corresponding non-transformed wild type non-human organism, is conferred in the process of the invention, if the activity of a polypeptide showing the activity of a glycerol dehydrogenase, or if the activity of the polypeptide B3945, preferably represented by SEQ ID NO. 44224, or a homolog or fragment thereof, or if the activity of a polypeptide encoded by a nucleic acid molecule comprising the nucleic acid SEQ ID NO. 44223, preferably the coding region thereof, or a homolog or fragment thereof, e.g. derived from Escherichia coli, is increased or generated. For example the activity of a nucleic acid molecule or a polypeptide comprising the nucleic acid, preferably the coding region thereof, or polypeptide or the consensus sequence or the polypeptide motif, as depicted in Table I, II or IV, application No. 7, column 5 or 8 in the respective same line as the nucleic acid molecule SEQ ID NO. 44223 or polypeptide SEQ ID NO. 44224, respectively, or a homolog or a fragment thereof, is increased or generated, or if the activity glycerol dehydrogenase is increased or generated in a non-human organism, like a microorganism or a plant cell, plant or part thereof, especially with non-targeted localization, whereby the respective line disclose in column 7 the fine chemical alpha-tocopherol. For example, an increase of the alpha-tocopherol of at least 1 percent, particularly in a range of 31 to 56-percent is conferred as compared to a corresponding non-transformed wild type non-human organism.

[46556] Accordingly, in one embodiment, an increase of alpha-tocopherol in a non-human organism, as compared to a corresponding non-transformed wild type non-human organism, is conferred in the process of the invention, if the activity of a polypeptide showing the activity of a b3989-protein, or if the activity of the polypeptide B3989, preferably represented by SEQ ID NO. 44373, or a homolog or fragment thereof, or if the activity of a polypeptide encoded by a nucleic acid molecule comprising the nucleic acid SEQ ID NO. 44372, preferably the coding region thereof, or a homolog or fragment thereof, e.g. derived from Escherichia coli, is increased or generated. For example the activity of a nucleic acid molecule or a polypeptide comprising the nucleic acid, preferably the coding region thereof, or polypeptide or the consensus sequence or the polypeptide motif, as depicted in Table I, II or IV, application No. 7, column 5 or 8 in the respective same line as the nucleic acid molecule SEQ ID NO. 44372 or polypeptide SEQ ID NO. 44373, respectively, or a homolog or a fragment thereof, is increased or generated, or if the activity b3989-protein is increased or generated in a non-human organism, like a microorganism or a plant cell, plant or part thereof, especially with non-targeted localization, whereby the respective line disclose in column 7 the fine chemical alpha-tocopherol. For example, an increase of the alpha-tocopherol of at least 1 percent, particularly in a range of 55 to 120-percent is conferred as compared to a corresponding non-transformed wild type non-human organism.

[46557] Accordingly, in one embodiment, an increase of gamma-tocopherol in a non-human organism, as compared to a corresponding non-transformed wild type non-human organism, is conferred in the process of the invention, if the activity of a polypeptide showing the activity of a b3989-protein, or if the activity of the polypeptide B3989, preferably represented by SEQ ID NO. 44373, or a homolog or fragment thereof, or if the activity of a polypeptide encoded by a nucleic acid molecule comprising the nucleic acid SEQ ID NO. 44372, preferably the coding region thereof, or a homolog or fragment thereof, e.g. derived from Escherichia coli, is increased or generated. For example the activity of a nucleic acid molecule or a polypeptide comprising the nucleic acid, preferably the coding region thereof, or polypeptide or the consensus sequence or the polypeptide motif, as depicted in Table I, II or IV, application No. 7, column 5 or 8 in the respective same line as the nucleic acid molecule SEQ ID NO. 44372 or polypeptide SEQ ID NO. 44373, respectively, or a homolog or a fragment thereof, is increased or generated, or if the activity b3989-protein is increased or generated in a non-human organism, like a microorganism or a plant cell, plant or part thereof, especially with non-targeted localization, whereby the respective line disclose in column 7 the fine chemical gamma-tocopherol. For example, an increase of the gamma-tocopherol of at least 1 percent, particularly in a range of 35 to 102-percent is conferred as compared to a corresponding non-transformed wild type non-human organism.

[46558] Accordingly, in one embodiment, an increase of gamma-tocopherol in a non-human organism, as compared to a corresponding non-transformed wild type non-human organism, is conferred in the process of the invention, if the activity of a polypeptide showing the activity of a b4029-protein, or if the activity of the polypeptide B4029, preferably represented by SEQ ID NO. 10741, or a homolog or fragment thereof, or if the activity of a polypeptide encoded by a nucleic acid molecule comprising the nucleic acid SEQ ID NO. 10740, preferably the coding region thereof, or a homolog or fragment thereof, e.g. derived from Escherichia coli, is increased or generated. For example the activity of a nucleic acid molecule or a polypeptide comprising the nucleic acid, preferably the coding region thereof, or polypeptide or the consensus sequence or the polypeptide motif, as depicted in Table I, II or IV, application No. 7, column 5 or 8 in the respective same line as the nucleic acid molecule SEQ ID NO. 10740 or polypeptide SEQ ID NO. 10741, respectively, or a homolog or a fragment thereof, is increased or generated, or if the activity b4029-protein is increased or generated in a non-human organism, like a microorganism or a plant cell, plant or part thereof, especially with non-targeted localization, whereby the respective line disclose in column 7 the fine chemical gamma-tocopherol. For example, an increase of the gamma-tocopherol of at least 1 percent, particularly in a range of 38 to 244-percent is conferred as compared to a corresponding non-transformed wild type non-human organism.

[46559] Accordingly, in one embodiment, an increase of alpha-tocopherol in a non-human organism, as compared to a corresponding non-transformed wild type non-human organism, is conferred in the process of the invention, if the activity of a polypeptide showing the activity of a b4050-protein, or if the activity of the polypeptide B4050, preferably represented by SEQ ID NO. 106533, or a homolog or fragment thereof, or if the activity of a polypeptide encoded by a nucleic acid molecule comprising the nucleic acid SEQ ID NO. 106532, preferably the coding region thereof, or a homolog or fragment thereof, e.g. derived from Escherichia coli, is increased or generated. For example the activity of a nucleic acid molecule or a polypeptide comprising the nucleic acid, preferably the coding region thereof, or polypeptide or the consensus sequence or the polypeptide motif, as depicted in Table I, II or IV, application No. 7, column 5 or 8 in the respective same line as the nucleic acid molecule SEQ ID NO. 106532 or polypeptide SEQ ID NO. 106533, respectively, or a homolog or a fragment thereof, is increased or generated, or if the activity b4050-protein is increased or generated in a non-human organism, like a microorganism or a plant cell, plant or part thereof, especially with non-targeted localization, whereby the respective line disclose in column 7 the fine chemical alpha-tocopherol. For example, an increase of the alpha-tocopherol of at least 1 percent, particularly in a range of 27 to 39-percent is conferred as compared to a corresponding non-transformed wild type non-human organism.

[46560] Accordingly, in one embodiment, an increase of alpha-tocopherol in a non-human organism, as compared to a corresponding non-transformed wild type non-human organism, is conferred in the process of the invention, if the activity of a polypeptide showing the activity of a b4056-protein, or if the activity of the polypeptide B4056, preferably represented by SEQ ID NO. 94543, or a homolog or fragment thereof, or if the activity of a polypeptide encoded by a nucleic acid molecule comprising the nucleic acid SEQ ID NO. 94542, preferably the coding region thereof, or a homolog or fragment thereof, e.g. derived from Escherichia coli, is increased or generated. For example the activity of a nucleic acid molecule or a polypeptide comprising the nucleic acid, preferably the coding region thereof, or polypeptide or the consensus sequence or the polypeptide motif, as depicted in Table I, II or IV, application No. 7, column 5 or 8 in the respective same line as the nucleic acid molecule SEQ ID NO. 94542 or polypeptide SEQ ID NO. 94543, respectively, or a homolog or a fragment thereof, is increased or generated, or if the activity b4056-protein is increased or generated in a non-human organism, like a microorganism or a plant cell, plant or part thereof, especially with non-targeted localization, whereby the respective line disclose in column 7 the fine chemical alpha-tocopherol. For example, an increase of the alpha-tocopherol of at least 1 percent, particularly in a range of 41 to 55-percent is conferred as compared to a corresponding non-transformed wild type non-human organism.

[46561] Accordingly, in one embodiment, an increase of alpha-tocopherol in a non-human organism, as compared to a corresponding non-transformed wild type non-human organism, is conferred in the process of the invention, if the activity of a polypeptide showing the activity of a acetyltransferase, or if the activity of the polypeptide B4256, preferably represented by SEQ ID NO. 45322, or a homolog or fragment thereof, or if the activity of a polypeptide encoded by a nucleic acid molecule comprising the nucleic acid SEQ ID NO. 45321, preferably the coding region thereof, or a homolog or fragment thereof, e.g. derived from Escherichia coli, is increased or generated. For example the activity of a nucleic acid molecule or a polypeptide comprising the nucleic acid, preferably the coding region thereof, or polypeptide or the consensus sequence or the polypeptide motif, as depicted in Table I, II or IV, application No. 7, column 5 or 8 in the respective same line as the nucleic acid molecule SEQ ID NO. 45321 or polypeptide SEQ ID NO. 45322, respectively, or a homolog or a fragment thereof, is increased or generated, or if the activity acetyltransferase is increased or generated in a non-human organism, like a microorganism or a plant cell, plant or part thereof, especially with non-targeted localization, whereby the respective line disclose in column 7 the fine chemical alpha-tocopherol. For example, an increase of the alpha-tocopherol of at least 1 percent, particularly in a range of 69 to 93-percent is conferred as compared to a corresponding non-transformed wild type non-human organism.

[46562] Accordingly, in one embodiment, an increase of gamma-tocopherol in a non-human organism, as compared to a corresponding non-transformed wild type non-human organism, is conferred in the process of the invention, if the activity of a polypeptide showing the activity of a acetyltransferase, or if the activity of the polypeptide B4256, preferably represented by SEQ ID NO. 45322, or a homolog or fragment thereof, or if the activity of a polypeptide encoded by a nucleic acid molecule comprising the nucleic acid SEQ ID NO. 45321, preferably the coding region thereof, or a homolog or fragment thereof, e.g. derived from Escherichia coli, is increased or generated. For example the activity of a nucleic acid molecule or a polypeptide comprising the nucleic acid, preferably the coding region thereof, or polypeptide or the consensus sequence or the polypeptide motif, as depicted in Table I, II or IV, application No. 7, column 5 or 8 in the respective same line as the nucleic acid molecule SEQ ID NO. 45321 or polypeptide SEQ ID NO. 45322, respectively, or a homolog or a fragment thereof, is increased or generated, or if the activity acetyltransferase is increased or generated in a non-human organism, like a microorganism or a plant cell, plant or part thereof, especially with non-targeted localization, whereby the respective line disclose in column 7 the fine chemical gamma-tocopherol. For example, an increase of the gamma-tocopherol of at least 1 percent, particularly in a range of 61 to 132-percent is conferred as compared to a corresponding non-transformed wild type non-human organism.

[46563] Accordingly, in one embodiment, an increase of alpha-tocopherol in a non-human organism, as compared to a corresponding non-transformed wild type non-human organism, is conferred in the process of the invention, if the activity of a polypeptide showing the activity of a gluconate transport system permease 3, or if the activity of the polypeptide B4321, preferably represented by SEQ ID NO. 45395, or a homolog or fragment thereof, or if the activity of a polypeptide encoded by a nucleic acid molecule comprising the nucleic acid SEQ ID NO. 45394, preferably the coding region thereof, or a homolog or fragment thereof, e.g. derived from Escherichia coli, is increased or generated. For example the activity of a nucleic acid molecule or a polypeptide comprising the nucleic acid, preferably the coding region thereof, or polypeptide or the consensus sequence or the polypeptide motif, as depicted in Table I, II or IV, application No. 7, column 5 or 8 in the respective same line as the nucleic acid molecule SEQ ID NO. 45394 or polypeptide SEQ ID NO. 45395, respectively, or a homolog or a fragment thereof, is increased or generated, or if the activity gluconate transport system permease 3 is increased or generated in a non-human organism, like a microorganism or a plant cell, plant or part thereof, especially with non-targeted localization, whereby the respective line disclose in column 7 the fine chemical alpha-tocopherol. For example, an increase of the alpha-tocopherol of at least 1 percent, particularly in a range of 39 to 72-percent is conferred as compared to a corresponding non-transformed wild type non-human organism.

[46564] Accordingly, in one embodiment, an increase of gamma-tocopherol in a non-human organism, as compared to a corresponding non-transformed wild type non-human organism, is conferred in the process of the invention, if the activity of a polypeptide showing the activity of a gluconate transport system permease 3, or if the activity of the polypeptide B4321, preferably represented by SEQ ID NO. 45395, or a homolog or fragment thereof, or if the activity of a polypeptide encoded by a nucleic acid molecule comprising the nucleic acid SEQ ID NO. 45394, preferably the coding region thereof, or a homolog or fragment thereof, e.g. derived from Escherichia coli, is increased or generated. For example the activity of a nucleic acid molecule or a polypeptide comprising the nucleic acid, preferably the coding region thereof, or polypeptide or the consensus sequence or the polypeptide motif, as depicted in Table I, II or IV, application No. 7, column 5 or 8 in the respective same line as the nucleic acid molecule SEQ ID NO. 45394 or polypeptide SEQ ID NO. 45395, respectively, or a homolog or a fragment thereof, is increased or generated, or if the activity gluconate transport system permease 3 is increased or generated in a non-human organism, like a microorganism or a plant cell, plant or part thereof, especially with non-targeted localization, whereby the respective line disclose in column 7 the fine chemical gamma-tocopherol. For example, an increase of the gamma-tocopherol of at least 1 percent, particularly in a range of 97 to 248-percent is conferred as compared to a corresponding non-transformed wild type non-human organism.

[46565] Accordingly, in one embodiment, an increase of gamma-tocopherol in a non-human organism, as compared to a corresponding non-transformed wild type non-human organism, is conferred in the process of the invention, if the activity of a polypeptide showing the activity of a thioredoxin, or if the activity of the polypeptide C_pp004096192r, preferably represented by SEQ ID NO. 45758, or a homolog or fragment thereof, or if the activity of a polypeptide encoded by a nucleic acid molecule comprising the nucleic acid SEQ ID NO. 45757, preferably the coding region thereof, or a homolog or fragment thereof, e.g. derived from Physcomitrella patens, is increased or generated. For example the activity of a nucleic acid molecule or a polypeptide comprising the nucleic acid, preferably the coding region thereof, or polypeptide or the consensus sequence or the polypeptide motif, as depicted in Table I, II or IV, application No. 7, column 5 or 8 in the respective same line as the nucleic acid molecule SEQ ID NO. 45757 or polypeptide SEQ ID NO. 45758, respectively, or a homolog or a fragment thereof, is increased or generated, or if the activity thioredoxin is increased or generated in a non-human organism, like a microorganism or a plant cell, plant or part thereof, especially with non-targeted localization, whereby the respective line disclose in column 7 the fine chemical gamma-tocopherol. For example, an increase of the gamma-tocopherol of at least 1 percent, particularly in a range of 35 to 147-percent is conferred as compared to a corresponding non-transformed wild type non-human organism.

[46566] Accordingly, in one embodiment, an increase of alpha-tocopherol in a non-human organism, as compared to a corresponding non-transformed wild type non-human organism, is conferred in the process of the invention, if the activity of a polypeptide showing the activity of a glutaredoxin, or if the activity of the polypeptide GM02LC12622, preferably represented by SEQ ID NO. 10812, or a homolog or fragment thereof, or if the activity of a polypeptide encoded by a nucleic acid molecule comprising the nucleic acid SEQ ID NO. 10811, preferably the coding region thereof, or a homolog or fragment thereof, e.g. derived from Glycine max, is increased or generated. For example the activity of a nucleic acid molecule or a polypeptide comprising the nucleic acid, preferably the coding region thereof, or polypeptide or the consensus sequence or the polypeptide motif, as depicted in Table I, II or IV, application No. 7, column 5 or 8 in the respective same line as the nucleic acid molecule SEQ ID NO. 10811 or polypeptide SEQ ID NO. 10812, respectively, or a homolog or a fragment thereof, is increased or generated, or if the activity glutaredoxin is increased or generated in a non-human organism, like a microorganism or a plant cell, plant or part thereof, especially with non-targeted localization, whereby the respective line disclose in column 7 the fine chemical alpha-tocopherol. For example, an increase of the alpha-tocopherol of at least 1 percent, particularly in a range of 57 to 105-percent is conferred as compared to a corresponding non-transformed wild type non-human organism.

[46567] Accordingly, in one embodiment, an increase of gamma-tocopherol in a non-human organism, as compared to a corresponding non-transformed wild type non-human organism, is conferred in the process of the invention, if the activity of a polypeptide showing the activity of a glutaredoxin, or if the activity of the polypeptide GM02LC12622, preferably represented by SEQ ID NO. 10812, or a homolog or fragment thereof, or if the activity of a polypeptide encoded by a nucleic acid molecule comprising the nucleic acid SEQ ID NO. 10811, preferably the coding region thereof, or a homolog or fragment thereof, e.g. derived from Glycine max, is increased or generated. For example the activity of a nucleic acid molecule or a polypeptide comprising the nucleic acid, preferably the coding region thereof, or polypeptide or the consensus sequence or the polypeptide motif, as depicted in Table I, II or IV, application No. 7, column 5 or 8 in the respective same line as the nucleic acid molecule SEQ ID NO. 10811 or polypeptide SEQ ID NO. 10812, respectively, or a homolog or a fragment thereof, is increased or generated, or if the activity glutaredoxin is increased or generated in a non-human organism, like a microorganism or a plant cell, plant or part thereof, especially with non-targeted localization, whereby the respective line disclose in column 7 the fine chemical gamma-tocopherol. For example, an increase of the gamma-tocopherol of at least 1 percent, particularly in a range of 34 to 204-percent is conferred as compared to a corresponding non-transformed wild type non-human organism.

[46568] Accordingly, in one embodiment, an increase of gamma-tocopherol in a non-human organism, as compared to a corresponding non-transformed wild type non-human organism, is conferred in the process of the invention, if the activity of a polypeptide showing the activity of a transcription factor, or if the activity of the polypeptide GM02LC21368, preferably represented by SEQ ID NO. 84199, or a homolog or fragment thereof, or if the activity of a polypeptide encoded by a nucleic acid molecule comprising the nucleic acid SEQ ID NO. 84198, preferably the coding region thereof, or a homolog or fragment thereof, e.g. derived from Glycine max, is increased or generated. For example the activity of a nucleic acid molecule or a polypeptide comprising the nucleic acid, preferably the coding region thereof, or polypeptide or the consensus sequence or the polypeptide motif, as depicted in Table I, II or IV, application No. 7, column 5 or 8 in the respective same line as the nucleic acid molecule SEQ ID NO. 84198 or polypeptide SEQ ID NO. 84199, respectively, or a homolog or a fragment thereof, is increased or generated, or if the activity transcription factor is increased or generated in a non-human organism, like a microorganism or a plant cell, plant or part thereof, especially with non-targeted localization, whereby the respective line disclose in column 7 the fine chemical gamma-tocopherol. For example, an increase of the gamma-tocopherol of at least 1 percent, particularly in a range of 48 to 185-percent is conferred as compared to a corresponding non-transformed wild type non-human organism.

[46569] Accordingly, in one embodiment, an increase of alpha-tocopherol in a non-human organism, as compared to a corresponding non-transformed wild type non-human organism, is conferred in the process of the invention, if the activity of a polypeptide showing the activity of a polyphosphate kinase, or if the activity of the polypeptide Sll0290, preferably represented by SEQ ID NO. 49829, or a homolog or fragment thereof, or if the activity of a polypeptide encoded by a nucleic acid molecule comprising the nucleic acid SEQ ID NO. 49828, preferably the coding region thereof, or a homolog or fragment thereof, e.g. derived from Synechocystis sp., is increased or generated. For example the activity of a nucleic acid molecule or a polypeptide comprising the nucleic acid, preferably the coding region thereof, or polypeptide or the consensus sequence or the polypeptide motif, as depicted in Table I, II or IV, application No. 7, column 5 or 8 in the respective same line as the nucleic acid molecule SEQ ID NO. 49828 or polypeptide SEQ ID NO. 49829, respectively, or a homolog or a fragment thereof, is increased or generated, or if the activity polyphosphate kinase is increased or generated in a non-human organism, like a microorganism or a plant cell, plant or part thereof, especially with non-targeted localization, whereby the respective line disclose in column 7 the fine chemical alpha-tocopherol. For example, an increase of the alpha-tocopherol of at least 1 percent, particularly in a range of 27 to 49-percent is conferred as compared to a corresponding non-transformed wild type non-human organism.

[46570] Accordingly, in one embodiment, an increase of gamma-tocopherol in a non-human organism, as compared to a corresponding non-transformed wild type non-human organism, is conferred in the process of the invention, if the activity of a polypeptide showing the activity of a phosphofructokinase, or if the activity of the polypeptide Sll0745, preferably represented by SEQ ID NO. 112662, or a homolog or fragment thereof, or if the activity of a polypeptide encoded by a nucleic acid molecule comprising the nucleic acid SEQ ID NO. 112661, preferably the coding region thereof, or a homolog or fragment thereof, e.g. derived from Synechocystis sp., is increased or generated. For example the activity of a nucleic acid molecule or a polypeptide comprising the nucleic acid, preferably the coding region thereof, or polypeptide or the consensus sequence or the polypeptide motif, as depicted in Table I, II or IV, application No. 7, column 5 or 8 in the respective same line as the nucleic acid molecule SEQ ID NO. 112661 or polypeptide SEQ ID NO. 112662, respectively, or a homolog or a fragment thereof, is increased or generated, or if the activity phosphofructokinase is increased or generated in a non-human organism, like a microorganism or a plant cell, plant or part thereof, especially with mitochondrial localization, whereby the respective line disclose in column 7 the fine chemical gamma-tocopherol. For example, an increase of the gamma-tocopherol of at least 1 percent, particularly in a range of 33 to 76-percent is conferred as compared to a corresponding non-transformed wild type non-human organism.

[46571] Accordingly, in one embodiment, an increase of gamma-tocopherol in a non-human organism, as compared to a corresponding non-transformed wild type non-human organism, is conferred in the process of the invention, if the activity of a polypeptide showing the activity of a coproporphyrinogen oxidase, or if the activity of the polypeptide Sll1185, preferably represented by SEQ ID NO. 53190, or a homolog or fragment thereof, or if the activity of a polypeptide encoded by a nucleic acid molecule comprising the nucleic acid SEQ ID NO. 53189, preferably the coding region thereof, or a homolog or fragment thereof, e.g. derived from Synechocystis sp., is increased or generated. For example the activity of a nucleic acid molecule or a polypeptide comprising the nucleic acid, preferably the coding region thereof, or polypeptide or the consensus sequence or the polypeptide motif, as depicted in Table I, II or IV, application No. 7, column 5 or 8 in the respective same line as the nucleic acid molecule SEQ ID NO. 53189 or polypeptide SEQ ID NO. 53190, respectively, or a homolog or a fragment thereof, is increased or generated, or if the activity coproporphyrinogen oxidase is increased or generated in a non-human organism, like a microorganism or a plant cell, plant or part thereof, especially with non-targeted localization, whereby the respective line disclose in column 7 the fine chemical gamma-tocopherol. For example, an increase of the gamma-tocopherol of at least 1 percent, particularly in a range of 28 to 42-percent is conferred as compared to a corresponding non-transformed wild type non-human organism.

[46572] Accordingly, in one embodiment, an increase of gamma-tocopherol in a non-human organism, as compared to a corresponding non-transformed wild type non-human organism, is conferred in the process of the invention, if the activity of a polypeptide showing the activity of a sll1761-protein, or if the activity of the polypeptide Sll1761, preferably represented by SEQ ID NO. 55380, or a homolog or fragment thereof, or if the activity of a polypeptide encoded by a nucleic acid molecule comprising the nucleic acid SEQ ID NO. 55379, preferably the coding region thereof, or a homolog or fragment thereof, e.g. derived from Synechocystis sp., is increased or generated. For example the activity of a nucleic acid molecule or a polypeptide comprising the nucleic acid, preferably the coding region thereof, or polypeptide or the consensus sequence or the polypeptide motif, as depicted in Table I, II or IV, application No. 7, column 5 or 8 in the respective same line as the nucleic acid molecule SEQ ID NO. 55379 or polypeptide SEQ ID NO. 55380, respectively, or a homolog or a fragment thereof, is increased or generated, or if the activity sll1761-protein is increased or generated in a non-human organism, like a microorganism or a plant cell, plant or part thereof, especially with non-targeted localization, whereby the respective line disclose in column 7 the fine chemical gamma-tocopherol. For example, an increase of the gamma-tocopherol of at least 1 percent, particularly in a range of 33 to 68-percent is conferred as compared to a corresponding non-transformed wild type non-human organism.

[46573] Accordingly, in one embodiment, an increase of gamma-tocopherol in a non-human organism, as compared to a corresponding non-transformed wild type non-human organism, is conferred in the process of the invention, if the activity of a polypeptide showing the activity of a adenylate kinase, or if the activity of the polypeptide Sll1815, preferably represented by SEQ ID NO. 85809, or a homolog or fragment thereof, or if the activity of a polypeptide encoded by a nucleic acid molecule comprising the nucleic acid SEQ ID NO. 85808, preferably the coding region thereof, or a homolog or fragment thereof, e.g. derived from Synechocystis sp., is increased or generated. For example the activity of a nucleic acid molecule or a polypeptide comprising the nucleic acid, preferably the coding region thereof, or polypeptide or the consensus sequence or the polypeptide motif, as depicted in Table I, II or IV, application No. 7, column 5 or 8 in the respective same line as the nucleic acid molecule SEQ ID NO. 85808 or polypeptide SEQ ID NO. 85809, respectively, or a homolog or a fragment thereof, is increased or generated, or if the activity adenylate kinase is increased or generated in a non-human organism, like a microorganism or a plant cell, plant or part thereof, especially with mitochondrial localization, whereby the respective line disclose in column 7 the fine chemical gamma-tocopherol. For example, an increase of the gamma-tocopherol of at least 1 percent, particularly in a range of 32 to 45-percent is conferred as compared to a corresponding non-transformed wild type non-human organism.

[46574] Accordingly, in one embodiment, an increase of alpha-tocopherol in a non-human organism, as compared to a corresponding non-transformed wild type non-human organism, is conferred in the process of the invention, if the activity of a polypeptide showing the activity of a precorrin methylase, or if the activity of the polypeptide Slr0239, preferably represented by SEQ ID NO. 86541, or a homolog or fragment thereof, or if the activity of a polypeptide encoded by a nucleic acid molecule comprising the nucleic acid SEQ ID NO. 86540, preferably the coding region thereof, or a homolog or fragment thereof, e.g. derived from Synechocystis sp., is increased or generated. For example the activity of a nucleic acid molecule or a polypeptide comprising the nucleic acid, preferably the coding region thereof, or polypeptide or the consensus sequence or the polypeptide motif, as depicted in Table I, II or IV, application No. 7, column 5 or 8 in the respective same line as the nucleic acid molecule SEQ ID NO. 86540 or polypeptide SEQ ID NO. 86541, respectively, or a homolog or a fragment thereof, is increased or generated, or if the activity precorrin methylase is increased or generated in a non-human organism, like a microorganism or a plant cell, plant or part thereof, especially with mitochondrial localization, whereby the respective line disclose in column 7 the fine chemical alpha-tocopherol. For example, an increase of the alpha-tocopherol of at least 1 percent, particularly in a range of 39 to 46-percent is conferred as compared to a corresponding non-transformed wild type non-human organism.

[46575] Accordingly, in one embodiment, an increase of alpha-tocopherol in a non-human organism, as compared to a corresponding non-transformed wild type non-human organism, is conferred in the process of the invention, if the activity of a polypeptide showing the activity of a malate dehydrogenase, or if the activity of the polypeptide Slr0721, preferably represented by SEQ ID NO. 87398, or a homolog or fragment thereof, or if the activity of a polypeptide encoded by a nucleic acid molecule comprising the nucleic acid SEQ ID NO. 87397, preferably the coding region thereof, or a homolog or fragment thereof, e.g. derived from Synechocystis sp., is increased or generated. For example the activity of a nucleic acid molecule or a polypeptide comprising the nucleic acid, preferably the coding region thereof, or polypeptide or the consensus sequence or the polypeptide motif, as depicted in Table I, II or IV, application No. 7, column 5 or 8 in the respective same line as the nucleic acid molecule SEQ ID NO. 87397 or polypeptide SEQ ID NO. 87398, respectively, or a homolog or a fragment thereof, is increased or generated, or if the activity malate dehydrogenase is increased or generated in a non-human organism, like a microorganism or a plant cell, plant or part thereof, especially with plastidic localization, whereby the respective line disclose in column 7 the fine chemical alpha-tocopherol. For example, an increase of the alpha-tocopherol of at least 1 percent, particularly in a range of 60 to 125-percent is conferred as compared to a corresponding non-transformed wild type non-human organism.

[46576] Accordingly, in one embodiment, an increase of gamma-tocopherol in a non-human organism, as compared to a corresponding non-transformed wild type non-human organism, is conferred in the process of the invention, if the activity of a polypeptide showing the activity of a malate dehydrogenase, or if the activity of the polypeptide Slr0721, preferably represented by SEQ ID NO. 87398, or a homolog or fragment thereof, or if the activity of a polypeptide encoded by a nucleic acid molecule comprising the nucleic acid SEQ ID NO. 87397, preferably the coding region thereof, or a homolog or fragment thereof, e.g. derived from Synechocystis sp., is increased or generated. For example the activity of a nucleic acid molecule or a polypeptide comprising the nucleic acid, preferably the coding region thereof, or polypeptide or the consensus sequence or the polypeptide motif, as depicted in Table I, II or IV, application No. 7, column 5 or 8 in the respective same line as the nucleic acid molecule SEQ ID NO. 87397 or polypeptide SEQ ID NO. 87398, respectively, or a homolog or a fragment thereof, is increased or generated, or if the activity malate dehydrogenase is increased or generated in a non-human organism, like a microorganism or a plant cell, plant or part thereof, especially with plastidic localization, whereby the respective line disclose in column 7 the fine chemical gamma-tocopherol. For example, an increase of the gamma-tocopherol of at least 1 percent, particularly in a range of 43 to 268-percent is conferred as compared to a corresponding non-transformed wild type non-human organism.

[46577] Accordingly, in one embodiment, an increase of alpha-tocopherol in a non-human organism, as compared to a corresponding non-transformed wild type non-human organism, is conferred in the process of the invention, if the activity of a polypeptide showing the activity of a geranylgeranyl pyrophosphate synthase, or if the activity of the polypeptide Slr0739, preferably represented by SEQ ID NO. 57236, or a homolog or fragment thereof, or if the activity of a polypeptide encoded by a nucleic acid molecule comprising the nucleic acid SEQ ID NO. 57235, preferably the coding region thereof, or a homolog or fragment thereof, e.g. derived from Synechocystis sp., is increased or generated. For example the activity of a nucleic acid molecule or a polypeptide comprising the nucleic acid, preferably the coding region thereof, or polypeptide or the consensus sequence or the polypeptide motif, as depicted in Table I, II or IV, application No. 7, column 5 or 8 in the respective same line as the nucleic acid molecule SEQ ID NO. 57235 or polypeptide SEQ ID NO. 57236, respectively, or a homolog or a fragment thereof, is increased or generated, or if the activity geranylgeranyl pyrophosphate synthase is increased or generated in a non-human organism, like a microorganism or a plant cell, plant or part thereof, especially with plastidic localization, whereby the respective line disclose in column 7 the fine chemical alpha-tocopherol. For example, an increase of the alpha-tocopherol of at least 1 percent, partitularly in a range of 45 to 82-percent is conferred as compared to a corresponding non-transformed wild type non-human organism.

[46578] Accordingly, in one embodiment, an increase of gamma-tocopherol in a non-human organism, as compared to a corresponding non-transformed wild type non-human organism, is conferred in the process of the invention, if the activity of a polypeptide showing the activity of a geranylgeranyl pyrophosphate synthase, or if the activity of the polypeptide Slr0739, preferably represented by SEQ ID NO. 57236, or a homolog or fragment thereof, or if the activity of a polypeptide encoded by a nucleic acid molecule comprising the nucleic acid SEQ ID NO. 57235, preferably the coding region thereof, or a homolog or fragment thereof, e.g. derived from Synechocystis sp., is increased or generated. For example the activity of a nucleic acid molecule or a polypeptide comprising the nucleic acid, preferably the coding region thereof, or polypeptide or the consensus sequence or the polypeptide motif, as depicted in Table I, II or IV, application No. 7, column 5 or 8 in the respective same line as the nucleic acid molecule SEQ ID NO. 57235 or polypeptide SEQ ID NO. 57236, respectively, or a homolog or a fragment thereof, is increased or generated, or if the activity geranylgeranyl pyrophosphate synthase is increased or generated in a non-human organism, like a microorganism or a plant cell, plant or part thereof, especially with plastidic localization, whereby the respective line disclose in column 7 the fine chemical gamma-tocopherol. For example, an increase of the gamma-tocopherol of at least 1 percent, particularly in a range of 91 to 144-percent is conferred as compared to a corresponding non-transformed wild type non-human organism.

[46579] Accordingly, in one embodiment, an increase of gamma-tocopherol in a non-human organism, as compared to a corresponding non-transformed wild type non-human organism, is conferred in the process of the invention, if the activity of a polypeptide showing the activity of a carbohydrate kinase, or if the activity of the polypeptide Slr1420, preferably represented by SEQ ID NO. 58591, or a homolog or fragment thereof, or if the activity of a polypeptide encoded by a nucleic acid molecule comprising the nucleic acid SEQ ID NO. 58590, preferably the coding region thereof, or a homolog or fragment thereof, e.g. derived from Synechocystis sp., is increased or generated. For example the activity of a nucleic acid molecule or a polypeptide comprising the nucleic acid, preferably the coding region thereof, or polypeptide or the consensus sequence or the polypeptide motif, as depicted in Table I, II or IV, application No. 7, column 5 or 8 in the respective same line as the nucleic acid molecule SEQ ID NO. 58590 or polypeptide SEQ ID NO. 58591, respectively, or a homolog or a fragment thereof, is increased or generated, or if the activity carbohydrate kinase is increased or generated in a non-human organism, like a microorganism or a plant cell, plant or part thereof, especially with non-targeted localization, whereby the respective line disclose in column 7 the fine chemical gamma-tocopherol. For example, an increase of the gamma-tocopherol of at least 1 percent, particularly in a range of 33 to 50-percent is conferred as compared to a corresponding non-transformed wild type non-human organism.

[46580] Accordingly, in one embodiment, an increase of gamma-tocopherol in a non-human organism, as compared to a corresponding non-transformed wild type non-human organism, is conferred in the process of the invention, if the activity of a polypeptide showing the activity of a photosystem II protein, or if the activity of the polypeptide Slr1739, preferably represented by SEQ ID NO. 58732, or a homolog or fragment thereof, or if the activity of a polypeptide encoded by a nucleic acid molecule comprising the nucleic acid SEQ ID NO. 58731, preferably the coding region thereof, or a homolog or fragment thereof, e.g. derived from Synechocystis sp., is increased or generated. For example the activity of a nucleic acid molecule or a polypeptide comprising the nucleic acid, preferably the coding region thereof, or polypeptide or the consensus sequence or the polypeptide motif, as depicted in Table I, II or IV, application No. 7, column 5 or 8 in the respective same line as the nucleic acid molecule SEQ ID NO. 58731 or polypeptide SEQ ID NO. 58732, respectively, or a homolog or a fragment thereof, is increased or generated, or if the activity photosystem II protein is increased or generated in a non-human organism, like a microorganism or a plant cell, plant or part thereof, especially with plastidic localization, whereby the respective line disclose in column 7 the fine chemical gamma-tocopherol. For example, an increase of the gamma-tocopherol of at least 1 percent, particularly in a range of 77 to 203-percent is conferred as compared to a corresponding non-transformed wild type non-human organism.

[46581] Accordingly, in one embodiment, an increase of alpha-tocopherol in a non-human organism, as compared to a corresponding non-transformed wild type non-human organism, is conferred in the process of the invention, if the activity of a polypeptide showing the activity of a glycerol-3-phosphate dehydrogenase, or if the activity of the polypeptide Slr1755, preferably represented by SEQ ID NO. 58824, or a homolog or fragment thereof, or if the activity of a polypeptide encoded by a nucleic acid molecule comprising the nucleic acid SEQ ID NO. 58823, preferably the coding region thereof, or a homolog or fragment thereof, e.g. derived from Synechocystis sp., is increased or generated. For example the activity of a nucleic acid molecule or a polypeptide comprising the nucleic acid, preferably the coding region thereof, or polypeptide or the consensus sequence or the polypeptide motif, as depicted in Table I, II or IV, application No. 7, column 5 or 8 in the respective same line as the nucleic acid molecule SEQ ID NO. 58823 or polypeptide SEQ ID NO. 58824, respectively, or a homolog or a fragment thereof, is increased or generated, or if the activity glycerol-3-phosphate dehydrogenase is increased or generated in a non-human organism, like a microorganism or a plant cell, plant or part thereof, especially with plastidic localization, whereby the respective line disclose in column 7 the fine chemical alpha-tocopherol. For example, an increase of the alpha-tocopherol of at least 1 percent, particularly in a range of 37 to 81-percent is conferred as compared to a corresponding non-transformed wild type non-human organism.

[46582] Accordingly, in one embodiment, an increase of gamma-tocopherol in a non-human organism, as compared to a corresponding non-transformed wild type non-human organism, is conferred in the process of the invention, if the activity of a polypeptide showing the activity of a phosphoadenosine phosphosulfate reductase , or if the activity of the polypeptide Slr1791, preferably represented by SEQ ID NO. 12141, or a homolog or fragment thereof, or if the activity of a polypeptide encoded by a nucleic acid molecule comprising the nucleic acid SEQ ID NO. 12140, preferably the coding region thereof, or a homolog or fragment thereof, e.g. derived from Synechocystis sp., is increased or generated. For example the activity of a nucleic acid molecule or a polypeptide comprising the nucleic acid, preferably the coding region thereof, or polypeptide or the consensus sequence or the polypeptide motif, as depicted in Table I, II or IV, application No. 7, column 5 or 8 in the respective same line as the nucleic acid molecule SEQ ID NO. 12140 or polypeptide SEQ ID NO. 12141, respectively, or a homolog or a fragment thereof, is increased or generated, or if the activity phosphoadenosine phosphosulfate reductase is increased or generated in a non-human organism, like a microorganism or a plant cell, plant or part thereof, especially with plastidic localization, whereby the respective line disclose in column 7 the fine chemical gamma-tocopherol. For example, an increase of the gamma-tocopherol of at least 1 percent, particularly in a range of 33 to 58-percent is conferred as compared to a corresponding non-transformed wild type non-human organism.

[46583] Accordingly, in one embodiment, an increase of alpha-tocopherol in a non-human organism, as compared to a corresponding non-transformed wild type non-human organism, is conferred in the process of the invention, if the activity of a polypeptide showing the activity of a slr1917-protein, or if the activity of the polypeptide Slr1917, preferably represented by SEQ ID NO. 113039, or a homolog or fragment thereof, or if the activity of a polypeptide encoded by a nucleic acid molecule comprising the nucleic acid SEQ ID NO. 113038, preferably the coding region thereof, or a homolog or fragment thereof, e.g. derived from Synechocystis sp., is increased or generated. For example the activity of a nucleic acid molecule or a polypeptide comprising the nucleic acid, preferably the coding region thereof, or polypeptide or the consensus sequence or the polypeptide motif, as depicted in Table I, II or IV, application No. 7, column 5 or 8 in the respective same line as the nucleic acid molecule SEQ ID NO. 113038 or polypeptide SEQ ID NO. 113039, respectively, or a homolog or a fragment thereof, is increased or generated, or if the activity slr1917-protein is increased or generated in a non-human organism, like a microorganism or a plant cell, plant or part thereof, especially with plastidic localization, whereby the respective line disclose in column 7 the fine chemical alpha-tocopherol. For example, an increase of the alpha-tocopherol of at least 1 percent, particularly in a range of 36 to 70-percent is conferred as compared to a corresponding non-transformed wild type non-human organism.

[46584] Accordingly, in one embodiment, an increase of gamma-tocopherol in a non-human organism, as compared to a corresponding non-transformed wild type non-human organism, is conferred in the process of the invention, if the activity of a polypeptide showing the activity of a slr1917-protein, or if the activity of the polypeptide Slr1917, preferably represented by SEQ ID NO. 113039, or a homolog or fragment thereof, or if the activity of a polypeptide encoded by a nucleic acid molecule comprising the nucleic acid SEQ ID NO. 113038, preferably the coding region thereof, or a homolog or fragment thereof, e.g. derived from Synechocystis sp., is increased or generated. For example the activity of a nucleic acid molecule or a polypeptide comprising the nucleic acid, preferably the coding region thereof, or polypeptide or the consensus sequence or the polypeptide motif, as depicted in Table I, II or IV, application No. 7, column 5 or 8 in the respective same line as the nucleic acid molecule SEQ ID NO. 113038 or polypeptide SEQ ID NO. 113039, respectively, or a homolog or a fragment thereof, is increased or generated, or if the activity slr1917-protein is increased or generated in a non-human organism, like a microorganism or a plant cell, plant or part thereof, especially with plastidic localization, whereby the respective line disclose in column 7 the fine chemical gamma-tocopherol. For example, an increase of the gamma-tocopherol of at least 1 percent, particularly in a range of 144 to 540-percent is conferred as compared to a corresponding non-transformed wild type non-human organism.

[46585] Accordingly, in one embodiment, an increase of alpha-tocopherol in a non-human organism, as compared to a corresponding non-transformed wild type non-human organism, is conferred in the process of the invention, if the activity of a polypeptide showing the activity of a Sec-independent protein translocase subunit, or if the activity of the polypeptide TTC0019, preferably represented by SEQ ID NO. 12699, or a homolog or fragment thereof, or if the activity of a polypeptide encoded by a nucleic acid molecule comprising the nucleic acid SEQ ID NO. 12698, preferably the coding region thereof, or a homolog or fragment thereof, e.g. derived from Thermus thermophilus, is increased or generated. For example the activity of a nucleic acid molecule or a polypeptide comprising the nucleic acid, preferably the coding region thereof, or polypeptide or the consensus sequence or the polypeptide motif, as depicted in Table I, II or IV, application No. 7, column 5 or 8 in the respective same line as the nucleic acid molecule SEQ ID NO. 12698 or polypeptide SEQ ID NO. 12699, respectively, or a homolog or a fragment thereof, is increased or generated, or if the activity Sec-independent protein translocase subunit is increased or generated in a non-human organism, like a microorganism or a plant cell, plant or part thereof, especially with non-targeted localization, whereby the respective line disclose in column 7 the fine chemical alpha-tocopherol. For example, an increase of the alpha-tocopherol of at least 1 percent, particularly in a range of 53 to 129-percent is conferred as compared to a corresponding non-transformed wild type non-human organism.

[46586] Accordingly, in one embodiment, an increase of gamma-tocopherol in a non-human organism, as compared to a corresponding non-transformed wild type non-human organism, is conferred in the process of the invention, if the activity of a polypeptide showing the activity of a Sec-independent protein translocase subunit, or if the activity of the polypeptide TTC0019, preferably represented by SEQ ID NO. 12699, or a homolog or fragment thereof, or if the activity of a polypeptide encoded by a nucleic acid molecule comprising the nucleic acid SEQ ID NO. 12698, preferably the coding region thereof, or a homolog or fragment thereof, e.g. derived from Thermus thermophilus, is increased or generated. For example the activity of a nucleic acid molecule or a polypeptide comprising the nucleic acid, preferably the coding region thereof, or polypeptide or the consensus sequence or the polypeptide motif, as depicted in Table I, II or IV, application No. 7, column 5 or 8 in the respective same line as the nucleic acid molecule SEQ ID NO. 12698 or polypeptide SEQ ID NO. 12699, respectively, or a homolog or a fragment thereof, is increased or generated, or if the activity Sec-independent protein translocase subunit is increased or generated in a non-human organism, like a microorganism or a plant cell, plant or part thereof, especially with non-targeted localization, whereby the respective line disclose in column 7 the fine chemical gamma-tocopherol. For example, an increase of the gamma-tocopherol of at least 1 percent, particularly in a range of 35 to 264-percent is conferred as compared to a corresponding non-transformed wild type non-human organism.

[46587] Accordingly, in one embodiment, an increase of gamma-tocopherol in a non-human organism, as compared to a corresponding non-transformed wild type non-human organism, is conferred in the process of the invention, if the activity of a polypeptide showing the activity of a multiple antibiotic resistance protein, or if the activity of the polypeptide TTC1193, preferably represented by SEQ ID NO. 61724, or a homolog or fragment thereof, or if the activity of a polypeptide encoded by a nucleic acid molecule comprising the nucleic acid SEQ ID NO. 61723, preferably the coding region thereof, or a homolog or fragment thereof, e.g. derived from Thermus thermophilus, is increased or generated. For example the activity of a nucleic acid molecule or a polypeptide comprising the nucleic acid, preferably the coding region thereof, or polypeptide or the consensus sequence or the polypeptide motif, as depicted in Table I, II or IV, application No. 7, column 5 or 8 in the respective same line as the nucleic acid molecule SEQ ID NO. 61723 or polypeptide SEQ ID NO. 61724, respectively, or a homolog or a fragment thereof, is increased or generated, or if the activity multiple antibiotic resistance protein is increased or generated in a non-human organism, like a microorganism or a plant cell, plant or part thereof, especially with non-targeted localization, whereby the respective line disclose in column 7 the fine chemical gamma-tocopherol. For example, an increase of the gamma-tocopherol of at least 1 percent, particularly in a range of 88 to 166-percent is conferred as compared to a corresponding non-transformed wild type non-human organism.

[46588] Accordingly, in one embodiment, an increase of alpha-tocopherol in a non-human organism, as compared to a corresponding non-transformed wild type non-human organism, is conferred in the process of the invention, if the activity of a polypeptide showing the activity of a TTC1386-protein, or if the activity of the polypeptide TTC1386, preferably represented by SEQ ID NO. 62080, or a homolog or fragment thereof, or if the activity of a polypeptide encoded by a nucleic acid molecule comprising the nucleic acid SEQ ID NO. 62079, preferably the coding region thereof, or a homolog or fragment thereof, e.g. derived from Thermus thermophilus, is increased or generated. For example the activity of a nucleic acid molecule or a polypeptide comprising the nucleic acid, preferably the coding region thereof, or polypeptide or the consensus sequence or the polypeptide motif, as depicted in Table I, II or IV, application No. 7, column 5 or 8 in the respective same line as the nucleic acid molecule SEQ ID NO. 62079 or polypeptide SEQ ID NO. 62080, respectively, or a homolog or a fragment thereof, is increased or generated, or if the activity TTC1386-protein is increased or generated in a non-human organism, like a microorganism or a plant cell, plant or part thereof, especially with non-targeted localization, whereby the respective line disclose in column 7 the fine chemical alpha-tocopherol. For example, an increase of the alpha-tocopherol of at least 1 percent, particularly in a range of 52 to 132-percent is conferred as compared to a corresponding non-transformed wild type non-human organism.

[46589] Accordingly, in one embodiment, an increase of gamma-tocopherol in a non-human organism, as compared to a corresponding non-transformed wild type non-human organism, is conferred in the process of the invention, if the activity of a polypeptide showing the activity of a TTC1386-protein, or if the activity of the polypeptide TTC1386, preferably represented by SEQ ID NO. 62080, or a homolog or fragment thereof, or if the activity of a polypeptide encoded by a nucleic acid molecule comprising the nucleic acid SEQ ID NO. 62079, preferably the coding region thereof, or a homolog or fragment thereof, e.g. derived from Thermus thermophilus, is increased or generated. For example the activity of a nucleic acid molecule or a polypeptide comprising the nucleic acid, preferably the coding region thereof, or polypeptide or the consensus sequence or the polypeptide motif, as depicted in Table I, II or IV, application No. 7, column 5 or 8 in the respective same line as the nucleic acid molecule SEQ ID NO. 62079 or polypeptide SEQ ID NO. 62080, respectively, or a homolog or a fragment thereof, is increased or generated, or if the activity TTC1386-protein is increased or generated in a non-human organism, like a microorganism or a plant cell, plant or part thereof, especially with non-targeted localization, whereby the respective line disclose in column 7 the fine chemical gamma-tocopherol. For example, an increase of the gamma-tocopherol of at least 1 percent, particularly in a range of 38 to 171-percent is conferred as compared to a corresponding non-transformed wild type non-human organism.

[46590] Accordingly, in one embodiment, an increase of alpha-tocopherol in a non-human organism, as compared to a corresponding non-transformed wild type non-human organism, is conferred in the process of the invention, if the activity of a polypeptide showing the activity of a homocitrate synthase, or if the activity of the polypeptide TTC1550, preferably represented by SEQ ID NO. 12975, or a homolog or fragment thereof, or if the activity of a polypeptide encoded by a nucleic acid molecule comprising the nucleic acid SEQ ID NO. 12974, preferably the coding region thereof, or a homolog or fragment thereof, e.g. derived from Thermus thermophilus, is increased or generated. For example the activity of a nucleic acid molecule or a polypeptide comprising the nucleic acid, preferably the coding region thereof, or polypeptide or the consensus sequence or the polypeptide motif, as depicted in Table I, II or IV, application No. 7, column 5 or 8 in the respective same line as the nucleic acid molecule SEQ ID NO. 12974 or polypeptide SEQ ID NO. 12975, respectively, or a homolog or a fragment thereof, is increased or generated, or if the activity homocitrate synthase is increased or generated in a non-human organism, like a microorganism or a plant cell, plant or part thereof, especially with non-targeted localization, whereby the respective line disclose in column 7 the fine chemical alpha-tocopherol. For example, an increase of the alpha-tocopherol of at least 1 percent, particularly in a range of 86 to 106-percent is conferred as compared to a corresponding non-transformed wild type non-human organism.

[46591] Accordingly, in one embodiment, an increase of alpha-tocopherol in a non-human organism, as compared to a corresponding non-transformed wild type non-human organism, is conferred in the process of the invention, if the activity of a polypeptide showing the activity of a 3-deoxy-7-phosphoheptulonate synthase, or if the activity of the polypeptide Ybr249c, preferably represented by SEQ ID NO. 88880, or a homolog or fragment thereof, or if the activity of a polypeptide encoded by a nucleic acid molecule comprising the nucleic acid SEQ ID NO. 88879, preferably the coding region thereof, or a homolog or fragment thereof, e.g. derived from Sac-charomyces cerevisiae, is increased or generated. For example the activity of a nucleic acid molecule or a polypeptide comprising the nucleic acid, preferably the coding region thereof, or polypeptide or the consensus sequence or the polypeptide motif, as depicted in Table I, II or IV, application No. 7, column 5 or 8 in the respective same line as the nucleic acid molecule SEQ ID NO. 88879 or polypeptide SEQ ID NO. 88880, respectively, or a homolog or a fragment thereof, is increased or generated, or if the activity 3-deoxy-7-phosphoheptulonate synthase is increased or generated in a non-human organism, like a microorganism or a plant cell, plant or part thereof, especially with plastidic localization, whereby the respective line disclose in column 7 the fine chemical alpha-tocopherol. For example, an increase of the alpha-tocopherol of at least 1 percent, particularly in a range of 76 to 142-percent is conferred as compared to a corresponding non-transformed wild type non-human organism.

[46592] Accordingly, in one embodiment, an increase of gamma-tocopherol in a non-human organism, as compared to a corresponding non-transformed wild type non-human organism, is conferred in the process of the invention, if the activity of a polypeptide showing the activity of a 3-deoxy-7-phosphoheptulonate synthase, or if the activity of the polypeptide Ybr249c, preferably represented by SEQ ID NO. 88880, or a homolog or fragment thereof, or if the activity of a polypeptide encoded by a nucleic acid molecule comprising the nucleic acid SEQ ID NO. 88879, preferably the coding region thereof, or a homolog or fragment thereof, e.g. derived from Saccharomyces cerevisiae, is increased or generated. For example the activity of a nucleic acid molecule or a polypeptide comprising the nucleic acid, preferably the coding region thereof, or polypeptide or the consensus sequence or the polypeptide motif, as depicted in Table I, II or IV, application No. 7, column 5 or 8 in the respective same line as the nucleic acid molecule SEQ ID NO. 88879 or polypeptide SEQ ID NO. 88880, respectively, or a homolog or a fragment thereof, is increased or generated, or if the activity 3-deoxy-7-phosphoheptulonate synthase is increased or generated in a non-human organism, like a microorganism or a plant cell, plant or part thereof, especially with plastidic localization, whereby the respective line disclose in column 7 the fine chemical gamma-tocopherol. For example, an increase of the gamma-tocopherol of at least 1 percent, particularly in a range of 51 to 168-percent is conferred as compared to a corresponding non-transformed wild type non-human organism.

[46593] Accordingly, in one embodiment, an increase of gamma-tocopherol in a non-human organism, as compared to a corresponding non-transformed wild type non-human organism, is conferred in the process of the invention, if the activity of a polypeptide showing the activity of a ycl049c-protein, or if the activity of the polypeptide Yc1049c, preferably represented by SEQ ID NO. 113221, or a homolog or fragment thereof, or if the activity of a polypeptide encoded by a nucleic acid molecule comprising the nucleic acid SEQ ID NO. 113220, preferably the coding region thereof, or a homolog or fragment thereof, e.g. derived from Saccharomyces cerevisiae, is increased or generated. For example the activity of a nucleic acid molecule or a polypeptide comprising the nucleic acid, preferably the coding region thereof, or polypeptide or the consensus sequence or the polypeptide motif, as depicted in Table I, II or IV, application No. 7, column 5 or 8 in the respective same line as the nucleic acid molecule SEQ ID NO. 113220 or polypeptide SEQ ID NO. 113221, respectively, or a homolog or a fragment thereof, is increased or generated, or if the activity ycl049c-protein is increased or generated in a non-human organism, like a microorganism or a plant cell, plant or part thereof, especially with plastidic localization, whereby the respective line disclose in column 7 the fine chemical gamma-tocopherol. For example, an increase of the gamma-tocopherol of at least 1 percent, particularly in a range of 57 to 92-percent is conferred as compared to a corresponding non-transformed wild type non-human organism.

[46594] Accordingly, in one embodiment, an increase of alpha-tocopherol in a non-human organism, as compared to a corresponding non-transformed wild type non-human organism, is conferred in the process of the invention, if the activity of a polypeptide showing the activity of a homocitrate synthase, or if the activity of the polypeptide Ydl131w, preferably represented by SEQ ID NO. 113225, or a homolog or fragment thereof, or if the activity of a polypeptide encoded by a nucleic acid molecule comprising the nucleic acid SEQ ID NO. 113224, preferably the coding region thereof, or a homolog or fragment thereof, e.g. derived from Saccharomyces cerevisiae, is increased or generated. For example the activity of a nucleic acid molecule or a polypeptide comprising the nucleic acid, preferably the coding region thereof, or polypeptide or the consensus sequence or the polypeptide motif, as depicted in Table I, II or IV, application No. 7, column 5 or 8 in the respective same line as the nucleic acid molecule SEQ ID NO. 113224 or polypeptide SEQ ID NO. 113225, respectively, or a homolog or a fragment thereof, is increased or generated, or if the activity homocitrate synthase is increased or generated in a non-human organism, like a microorganism or a plant cell, plant or part thereof, especially with plastidic localization, whereby the respective line disclose in column 7 the fine chemical alpha-tocopherol. For example, an increase of the alpha-tocopherol of at least 1 percent, particularly in a range of 66 to 285-percent is conferred as compared to a corresponding non-transformed wild type non-human organism.

[46595] Accordingly, in one embodiment, an increase of alpha-tocopherol in a non-human organism, as compared to a corresponding non-transformed wild type non-human organism, is conferred in the process of the invention, if the activity of a polypeptide showing the activity of a ydl235c-protein, or if the activity of the polypeptide Ydl235c, preferably represented by SEQ ID NO. 113314, or a homolog or fragment thereof, or if the activity of a polypeptide encoded by a nucleic acid molecule comprising the nucleic acid SEQ ID NO. 113313, preferably the coding region thereof, or a homolog or fragment thereof, e.g. derived from Saccharomyces cerevisiae, is increased or generated. For example the activity of a nucleic acid molecule or a polypeptide comprising the nucleic acid, preferably the coding region thereof, or polypeptide or the consensus sequence or the polypeptide motif, as depicted in Table I, II or IV, application No. 7, column 5 or 8 in the respective same line as the nucleic acid molecule SEQ ID NO. 113313 or polypeptide SEQ ID NO. 113314, respectively, or a homolog or a fragment thereof, is increased or generated, or if the activity ydl235c-protein is increased or generated in a non-human organism, like a microorganism or a plant cell, plant or part thereof, especially with plastidic localization, whereby the respective line disclose in column 7 the fine chemical alpha-tocopherol. For example, an increase of the alpha-tocopherol of at least 1 percent, particularly in a range of 55 to 199-percent is conferred as compared to a corresponding non-transformed wild type non-human organism.

[46596] Accordingly, in one embodiment, an increase of gamma-tocopherol in a non-human organism, as compared to a corresponding non-transformed wild type non-human organism, is conferred in the process of the invention, if the activity of a polypeptide showing the activity of a N-(5′-phosphoribosyl)anthranilate isomerase, or if the activity of the polypeptide Ydr007w, preferably represented by SEQ ID NO. 89974, or a homolog or fragment thereof, or if the activity of a polypeptide encoded by a nucleic acid molecule comprising the nucleic acid SEQ ID NO. 89973, preferably the coding region thereof, or a homolog or fragment thereof, e.g. derived from Saccharomyces cerevisiae, is increased or generated. For example the activity of a nucleic acid molecule or a polypeptide comprising the nucleic acid, preferably the coding region thereof, or polypeptide or the consensus sequence or the polypeptide motif, as depicted in Table I, II or IV, application No. 7, column 5 or 8 in the respective same line as the nucleic acid molecule SEQ ID NO. 89973 or polypeptide SEQ ID NO. 89974, respectively, or a homolog or a fragment thereof, is increased or generated, or if the activity N-(5′-phosphoribosyl)anthranilate isomerase is increased or generated in a non-human organism, like a microorganism or a plant cell, plant or part thereof, especially with plastidic localization, whereby the respective line disclose in column 7 the fine chemical gamma-tocopherol. For example, an increase of the gamma-tocopherol of at least 1 percent, particularly in a range of 70 to 140-percent is conferred as compared to a corresponding non-transformed wild type non-human organism.

[46597] Accordingly, in one embodiment, an increase of gamma-tocopherol in a non-human organism, as compared to a corresponding non-transformed wild type non-human organism, is conferred in the process of the invention, if the activity of a polypeptide showing the activity of a phospho 2-dehydro-3-deoxyheptonate aldolase, or if the activity of the polypeptide Ydr035w, preferably represented by SEQ ID NO. 113331, or a homolog or fragment thereof, or if the activity of a polypeptide encoded by a nucleic acid molecule comprising the nucleic acid SEQ ID NO. 113330, preferably the coding region thereof, or a homolog or fragment thereof, e.g. derived from Saccharomyces cerevisiae, is increased or generated. For example the activity of a nucleic acid molecule or a polypeptide comprising the nucleic acid, preferably the coding region thereof, or polypeptide or the consensus sequence or the polypeptide motif, as depicted in Table I, II or IV, application No. 7, column 5 or 8 in the respective same line as the nucleic acid molecule SEQ ID NO. 113330 or polypeptide SEQ ID NO. 113331, respectively, or a homolog or a fragment thereof, is increased or generated, or if the activity phospho-2-dehydro-3-deoxyheptonate aldolase is increased or generated in a non-human organism, like a microorganism or a plant cell, plant or part thereof, especially with plastidic localization, whereby the respective line disclose in column 7 the fine chemical gamma-tocopherol. For example, an increase of the gamma-tocopherol of at least 1 percent, particularly in a range of 39 to 106-percent is conferred as compared to a corresponding non-transformed wild type non-human organism.

[46598] Accordingly, in one embodiment, an increase of gamma-tocopherol in a non-human organism, as compared to a corresponding non-transformed wild type non-human organism, is conferred in the process of the invention, if the activity of a polypeptide showing the activity of a ydr183w-protein, or if the activity of the polypeptide Ydr183w, preferably represented by SEQ ID NO. 90104, or a homolog or fragment thereof, or if the activity of a polypeptide encoded by a nucleic acid molecule comprising the nucleic acid SEQ ID NO. 90103, preferably the coding region thereof, or a homolog or fragment thereof, e.g. derived from Saccharomyces cerevisiae, is increased or generated. For example the activity of a nucleic acid molecule or a polypeptide comprising the nucleic acid, preferably the coding region thereof, or polypeptide or the consensus sequence or the polypeptide motif, as depicted in Table I, II or IV, application No. 7, column 5 or 8 in the respective same line as the nucleic acid molecule SEQ ID NO. 90103 or polypeptide SEQ ID NO. 90104, respectively, or a homolog or a fragment thereof, is increased or generated, or if the activity ydr183w-protein is increased or generated in a non-human organism, like a microorganism or a plant cell, plant or part thereof, especially with plastidic localization, whereby the respective line disclose in column 7 the fine chemical gamma-tocopherol. For example, an increase of the gamma-tocopherol of at least 1 percent, particularly in a range of 35 to 105-percent is conferred as compared to a corresponding non-transformed wild type non-human organism.

[46599] Accordingly, in one embodiment, an increase of gamma-tocopherol in a non-human organism, as compared to a corresponding non-transformed wild type non-human organism, is conferred in the process of the invention, if the activity of a polypeptide showing the activity of a yer106w-protein, or if the activity of the polypeptide Yer106w, preferably represented by SEQ ID NO. 63804, or a homolog or fragment thereof, or if the activity of a polypeptide encoded by a nucleic acid molecule comprising the nucleic acid SEQ ID NO. 63803, preferably the coding region thereof, or a homolog or fragment thereof, e.g. derived from Saccharomyces cerevisiae, is increased or generated. For example the activity of a nucleic acid molecule or a polypeptide comprising the nucleic acid, preferably the coding region thereof, or polypeptide or the consensus sequence or the polypeptide motif, as depicted in Table I, II or IV, application No. 7, column 5 or 8 in the respective same line as the nucleic acid molecule SEQ ID NO. 63803 or polypeptide SEQ ID NO. 63804, respectively, or a homolog or a fragment thereof, is increased or generated, or if the activity yer106w-protein is increased or generated in a non-human organism, like a microorganism or a plant cell, plant or part thereof, especially with plastidic localization, whereby the respective line disclose in column 7 the fine chemical gamma-tocopherol. For example, an increase of the gamma-tocopherol of at least 1 percent, particularly in a range of 34 to 302-percent is conferred as compared to a corresponding non-transformed wild type non-human organism.

[46600] Accordingly, in one embodiment, an increase of gamma-tocopherol in a non-human organism, as compared to a corresponding non-transformed wild type non-human organism, is conferred in the process of the invention, if the activity of a polypeptide showing the activity of a small nuclear ribonucleoprotein , or if the activity of the polypeptide Yer112w, preferably represented by SEQ ID NO. 113599, or a homolog or fragment thereof, or if the activity of a polypeptide encoded by a nucleic acid molecule comprising the nucleic acid SEQ ID NO. 113598, preferably the coding region thereof, or a homolog or fragment thereof, e.g. derived from Saccharomyces cerevisiae, is increased or generated. For example the activity of a nucleic acid molecule or a polypeptide comprising the nucleic acid, preferably the coding region thereof, or polypeptide or the consensus sequence or the polypeptide motif, as depicted in Table I, II or IV, application No. 7, column 5 or 8 in the respective same line as the nucleic acid molecule SEQ ID NO. 113598 or polypeptide SEQ ID NO. 113599, respectively, or a homolog or a fragment thereof, is increased or generated, or if the activity small nuclear ribonucleoprotein is increased or generated in a non-human organism, like a microorganism or a plant cell, plant or part thereof, especially with non-targeted localization, whereby the respective line disclose in column 7 the fine chemical gamma-tocopherol. For example, an increase of the gamma-tocopherol of at least 1 percent, particularly in a range of 51 to 252-percent is conferred as compared to a corresponding non-transformed wild type non-human organism.

[46601] Accordingly, in one embodiment, an increase of alpha-tocopherol in a non-human organism, as compared to a corresponding non-transformed wild type non-human organism, is conferred in the process of the invention, if the activity of a polypeptide showing the activity of a phosphatidylserine decarboxylase, or if the activity of the polypeptide Ygr170w, preferably represented by SEQ ID NO. 113637, or a homolog or fragment thereof, or if the activity of a polypeptide encoded by a nucleic acid molecule comprising the nucleic acid SEQ ID NO. 113636, preferably the coding region thereof, or a homolog or fragment thereof, e.g. derived from Saccharomyces cerevisiae, is increased or generated. For example the activity of a nucleic acid molecule or a polypeptide comprising the nucleic acid, preferably the coding region thereof, or polypeptide or the consensus sequence or the polypeptide motif, as depicted in Table I, II or IV, application No. 7, column 5 or 8 in the respective same line as the nucleic acid molecule SEQ ID NO. 113636 or polypeptide SEQ ID NO. 113637, respectively, or a homolog or a fragment thereof, is increased or generated, or if the activity phosphatidylserine decarboxylase is increased or generated in a non-human organism, like a microorganism or a plant cell, plant or part thereof, especially with plastidic localization, whereby the respective line disclose in column 7 the fine chemical alpha-tocopherol. For example, an increase of the alpha-tocopherol of at least 1 percent, particularly in a range of 42 to 62-percent is conferred as compared to a corresponding non-transformed wild type non-human organism.

[46602] Accordingly, in one embodiment, an increase of gamma-tocopherol in a non-human organism, as compared to a corresponding non-transformed wild type non-human organism, is conferred in the process of the invention, if the activity of a polypeptide showing the activity of a polygalacturonase, or if the activity of the polypeptide Yjr153w, preferably represented by SEQ ID NO. 66275, or a homolog or fragment thereof, or if the activity of a polypeptide encoded by a nucleic acid molecule comprising the nucleic acid SEQ ID NO. 66274, preferably the coding region thereof, or a homolog or fragment thereof, e.g. derived from Saccharomyces cerevisiae, is increased or generated. For example the activity of a nucleic acid molecule or a polypeptide comprising the nucleic acid, preferably the coding region thereof, or polypeptide or the consensus sequence or the polypeptide motif, as depicted in Table I, II or IV, application No. 7, column 5 or 8 in the respective same line as the nucleic acid molecule SEQ ID NO. 66274 or polypeptide SEQ ID NO. 66275, respectively, or a homolog or a fragment thereof, is increased or generated, or if the activity polygalacturonase is increased or generated in a non-human organism, like a microorganism or a plant cell, plant or part thereof, especially with non-targeted localization, whereby the respective line disclose in column 7 the fine chemical gamma-tocopherol. For example, an increase of the gamma-tocopherol of at least 1 percent, particularly in a range of 89 to 115-percent is conferred as compared to a corresponding non-transformed wild type non-human organism.

[46603] Accordingly, in one embodiment, an increase of gamma-tocopherol in a non-human organism, as compared to a corresponding non-transformed wild type non-human organism, is conferred in the process of the invention, if the activity of a polypeptide showing the activity of a ylr178c-protein, or if the activity of the polypeptide Ylr178c, preferably represented by SEQ ID NO. 66716, or a homolog or fragment thereof, or if the activity of a polypeptide encoded by a nucleic acid molecule comprising the nucleic acid SEQ ID NO. 66715, preferably the coding region thereof, or a homolog or fragment thereof, e.g. derived from Saccharomyces cerevisiae, is increased or generated. For example the activity of a nucleic acid molecule or a polypeptide comprising the nucleic acid, preferably the coding region thereof, or polypeptide or the consensus sequence or the polypeptide motif, as depicted in Table I, II or IV, application No. 7, column 5 or 8 in the respective same line as the nucleic acid molecule SEQ ID NO. 66715 or polypeptide SEQ ID NO. 66716, respectively, or a homolog or a fragment thereof, is increased or generated, or if the activity ylr178c-protein is increased or generated in a non-human organism, like a microorganism or a plant cell, plant or part thereof, especially with plastidic localization, whereby the respective line disclose in column 7 the fine chemical gamma-tocopherol. For example, an increase of the gamma-tocopherol of at least 1 percent, particularly in a range of 39 to 62-percent is conferred as compared to a corresponding non-transformed wild type non-human organism.

[46604] Accordingly, in one embodiment, an increase of alpha-tocopherol in a non-human organism, as compared to a corresponding non-transformed wild type non-human organism, is conferred in the process of the invention, if the activity of a polypeptide showing the activity of a adenylosuccinate lyase, or if the activity of the polypeptide Ylr359w, preferably represented by SEQ ID NO. 67191, or a homolog or fragment thereof, or if the activity of a polypeptide encoded by a nucleic acid molecule comprising the nucleic acid SEQ ID NO. 67190, preferably the coding region thereof, or a homolog or fragment thereof, e.g. derived from Saccharomyces cerevisiae, is increased or generated. For example the activity of a nucleic acid molecule or a polypeptide comprising the nucleic acid, preferably the coding region thereof, or polypeptide or the consensus sequence or the polypeptide motif, as depicted in Table I, II or IV, application No. 7, column 5 or 8 in the respective same line as the nucleic acid molecule SEQ ID NO. 67190 or polypeptide SEQ ID NO. 67191, respectively, or a homolog or a fragment thereof, is increased or generated, or if the activity adenylosuccinate lyase is increased or generated in a non-human organism, like a microorganism or a plant cell, plant or part thereof, especially with plastidic localization, whereby the respective line disclose in column 7 the fine chemical alpha-tocopherol. For example, an increase of the alpha-tocopherol of at least 1 percent, particularly in a range of 54 to 78-percent is conferred as compared to a corresponding non-transformed wild type non-human organism.

[46605] Accordingly, in one embodiment, an increase of alpha-tocopherol in a non-human organism, as compared to a corresponding non-transformed wild type non-human organism, is conferred in the process of the invention, if the activity of a polypeptide showing the activity of a ypr170c-protein, or if the activity of the polypeptide Ypr170c, preferably represented by SEQ ID NO. 113648, or a homolog or fragment thereof, or if the activity of a polypeptide encoded by a nucleic acid molecule comprising the nucleic acid SEQ ID NO. 113647, preferably the coding region thereof, or a homolog or fragment thereof, e.g. derived from Saccharomyces cerevisiae, is increased or generated. For example the activity of a nucleic acid molecule or a polypeptide comprising the nucleic acid, preferably the coding region thereof, or polypeptide or the consensus sequence or the polypeptide motif, as depicted in Table I, II or IV, application No. 7, column 5 or 8 in the respective same line as the nucleic acid molecule SEQ ID NO. 113647 or polypeptide SEQ ID NO. 113648, respectively, or a homolog or a fragment thereof, is increased or generated, or if the activity ypr170c-protein is increased or generated in a non-human organism, like a microorganism or a plant cell, plant or part thereof, especially with plastidic localization, whereby the respective line disclose in column 7 the fine chemical alpha-tocopherol. For example, an increase of the alpha-tocopherol of at least 1 percent, particularly in a range of 59 to 73-percent is conferred as compared to a corresponding non-transformed wild type non-human organism.

[46606] In an embodiment of the invention, a protein or polypeptide has the “activity of a protein as shown in the respective line in Table II, column 3” if its de novo activity, or its increased expression directly or indirectly leads to an increase in the fine chemical level in the organism or a part thereof, preferably in a cell of said organism, and the protein has the above-mentioned activities of a protein as shown in the respective line in Table II, column 3. Throughout the specification the activity or preferably the biological activity of such a protein or polypeptide or an nucleic acid molecule or sequence encoding such protein or polypeptide is identical or similar if it still has the biological or enzymatic activity of a protein as shown in the respective line in Table II, column 3, or which has at least 10% of the original enzymatic activity, preferably at least 20%, 30%, 40%, 50%, 60%, 70%, 80%, 90%, 95% or 99% in comparison to a protein as shown in Table II, column 3.

[46607] A series of mechanisms exists via which a modification of a protein, e.g. the polypeptide of the invention can directly or indirectly affect the yield, production and/or production efficiency of the fine chemical.

[46608] For example, the molecule number or the specific activity of the polypeptide or the nucleic acid molecule may be increased. Larger amounts of the fine chemical can be produced if the polypeptide or the nucleic acid of the invention is expressed de novo in an organism lacking the activity of said protein, preferably the nucleic acid molecules as mentioned in the respective line in Table I, columns 5 or 8, preferably the coding region thereof, or a homolog or a fragment thereof, alone or, if desired in combination with a transit peptide for example as mentioned in Table a or b, respectively, or in another embodiment by introducing said nucleic acid molecules into an organelle, such as a plastid, in the transgenic organism. However, it is also possible to modify the expression of the gene which is naturally present in the organisms, for example by integrating a nucleic acid sequence, encoding an organelle targeting sequence in front (5 prime) of the coding sequence, leading to a functional preprotein, which is directed for example to the organelle.

[46609] This also applies analogously to the combined increased expression of the nucleic acid molecule of the present invention or its gene product with that of further enzymes or regulators of the fine chemical biosynthesis pathways, e.g. which are useful for the synthesis of the fine chemicals.

[46610] The increase or modulation according to this invention can be constitutive, e.g. due to a stable permanent transgenic expression or to a stable mutation in the corresponding endogenous gene encoding the nucleic acid molecule of the invention or to a modulation of the expression or of the behaviour of a gene conferring the expression of the polypeptide of the invention, or transient, e.g. due to a transient transformation or temporary addition of a modulator such as an agonist or antagonist or inducible, e.g. after transformation with a inducible construct carrying the nucleic acid molecule of the invention under control of an inducible promoter and adding the inducer, e.g. tetracycline or as described herein below.

[46611] The increase in activity of the polypeptide amounts in a cell, an organelle, an organ or a non-human organism or a part thereof preferably to at least 1%, 5%, 10%, 20%, 50%, 70%, 80%, 90%, 100%, 150% or 200%, 250% or more in comparison to the control, reference or wild type.

[46612] In an embodiment the increase in activity of the polypeptide amounts in an organelle such as a plastid or a mitochondrion. In another embodiment the increase in activity of the polypeptide amounts in the cytoplasm. In another embodiment the increase in activity of the polypeptide amounts in the cytosol.

[46613] In the context of the application the term “cytoplasm” defines the compartment of the cell to which the protein is directed by the host cell without the addition of artificial targeting sequences, which are naturally not part of the protein.

[46614] In the context of the application the term “cytosol” defines the fluid of the cell between the plasma membrane and the organelles; that means that the organelles as well as the nucleus are not part of the cytosol.

[46615] The specific activity of a polypeptide encoded by a nucleic acid molecule of the present invention or of the polypeptide of the present invention can be tested as described in the examples. In particular, the expression of a protein in question in a cell, e.g. a plant cell or a microorganism and the detection of an increase the fine chemical level in comparison to a control is an easy test and can be performed as described in the state of the art.

[46616] In this paragraph “A” means “Goffeau et al., Science 274 (5287), 546 (1996)”, “B” means “Blattner et al., Science 277 (5331), 1453 (1997)”, “C” means “Nakamura et al., Nucleic Acids Res. 28(1), 72 (2000)”, “D” means “deposition of the sequences to the EMBL/GenBank/DDBJ databases under “Sequencing of the draft genome assembly of Azotobacter vinelandii AvOP”. in June 2005 by Copeland et al.”, “E” means “Henne et al., Nat. Biotechnol. 22 (5), 547 (2004)”, “F” means “Kaul et al., Nature 408 (6814), 796 (2000)”, and “G” means “Matsumoto et al., Nature 436 (7052), 793 (2005)”.

[46617] The nucleic acid sequence of 51340801_CANOLA from Brassica napus, e.g. as shown in the respective line in column 5 of Table I, application no. 7, is unpublished. And the activity of the gene product thereof is the activity of pyruvate kinase.

[46618] Accordingly, in one embodiment, the process of the present invention for producing alpha-tocopherol in a non-human organism, like a microorganism or a plant or a part thereof, comprises increasing or generating the activity of a gene product with the activity of a gene product conferring the activity of “pyruvate kinase”, especially from Brassica napus or its functional equivalent or its homolog, e.g. the increase of
[46619] (a) a gene product of a gene comprising the nucleic acid molecule as shown in the respective line in column 5 of Table I (whereby the respective line disclose in column 7 the fine chemical alpha-tocopherol), application no. 7, preferably the coding region thereof, or a homolog or a fragment thereof, and being depicted in the same respective line as said 51340801_CANOLA, or a functional equivalent or a homolog thereof as shown in column 8 of Table I, application no. 7, preferably the coding region thereof, particularly a homolog or functional equivalent as shown in column 8 of Table I B, application no. 7, and being depicted in the same respective line as said 51340801_CANOLA, and preferably the activity is increased plastidic, or
[46620] (b) a polypeptide comprising a polypeptide, a consensus sequence or at least a polypeptide motif as shown in the respective line in column 5 of Table II or in column 8 of Table IV, application no. 7, respectively, and being depicted in the same respective line as said 51340801_CANOLA, or a functional equivalent or a homolog thereof as depicted in column 8 of Table II, application no. 7, preferably a homolog or functional equivalent as depicted in column 8 of Table II B, application no. 7, and being depicted in the same respective line as said 51340801_CANOLA, and preferably the activity is increased plastidic, whereby the respective line disclose in column 7 the fine chemical alpha-tocopherol.

[46621] Accordingly, in one embodiment, the molecule which activity is to be increased in the process of the invention is the gene product with an activity as a “pyruvate kinase”, preferably it is the molecule of section (a) or (b) of this paragraph.

[46622] In particular, it was observed that in plants, especially in Arabidopsis thaliana, increasing or generating the activity of a gene product plastidic with the activity of a “pyruvate kinase”, preferably being encoded by a gene comprising the nucleic acid sequence SEQ ID NO. 15532, preferably the coding region thereof, conferred the production of or the increase in alpha-tocopherol compared with the wild type control.

[46623] The nucleic acid sequence of 51340801_CANOLA from Brassica napus, e.g. as shown in the respective line in column 5 of Table I, application no. 7, is unpublished. And the activity of the gene product thereof is the activity of pyruvate kinase.

[46624] Accordingly, in one embodiment, the process of the present invention for producing gamma-tocopherol in a non-human organism, like a microorganism or a plant or a part thereof, comprises increasing or generating the activity of a gene product with the activity of a gene product conferring the activity of “pyruvate kinase”, especially from Brassica napus or its functional equivalent or its homolog, e.g. the increase of
[46625] (a) a gene product of a gene comprising the nucleic acid molecule as shown in the respective line in column 5 of Table I (whereby the respective line disclose in column 7 the fine chemical gamma-tocopherol), application no. 7, preferably the coding region thereof, or a homolog or a fragment thereof, and being depicted in the same respective line as said 51340801_CANOLA, or a functional equivalent or a homolog thereof as shown in column 8 of Table I, application no. 7, preferably the coding region thereof, particularly a homolog or functional equivalent as shown in column 8 of Table I B, application no. 7, and being depicted in the same respective line as said 51340801_CANOLA, and preferably the activity is increased plastidic, or
[46626] (b) a polypeptide comprising a polypeptide, a consensus sequence or at least a polypeptide motif as shown in the respective line in column 5 of Table II or in column 8 of Table IV, application no. 7, respectively, and being depicted in the same respective line as said 51340801_CANOLA, or a functional equivalent or a homolog thereof as depicted in column 8 of Table II, application no. 7, preferably a homolog or functional equivalent as depicted in column 8 of Table II B, application no. 7, and being depicted in the same respective line as said 51340801_CANOLA, and preferably the activity is increased plastidic, whereby the respective line disclose in column 7 the fine chemical gamma-tocopherol.

[46627] Accordingly, in one embodiment, the molecule which activity is to be increased in the process of the invention is the gene product with an activity as a “pyruvate kinase”, preferably it is the molecule of section (a) or (b) of this paragraph.

[46628] In particular, it was observed that in plants, especially in Arabidopsis thaliana, increasing or generating the activity of a gene product plastidic with the activity of a “pyruvate kinase”, preferably being encoded by a gene comprising the nucleic acid sequence SEQ ID NO. 15532, preferably the coding region thereof, conferred the production of or the increase in gamma-tocopherol compared with the wild type control.

[46629] The nucleic acid sequence of 59582753_SOYBEAN from Glycine max, e.g. as shown in the respective line in column 5 of Table I, application no. 7, is unpublished. And the activity of the gene product thereof is the activity of glucose-6-phosphate 1-dehydrogenase.

[46630] Accordingly, in one embodiment, the process of the present invention for producing alpha-tocopherol in a non-human organism, like a microorganism or a plant or a part thereof, comprises increasing or generating the activity of a gene product with the activity of a gene product conferring the activity of “glucose-6-phosphate 1-dehydrogenase”, especially from Glycine max or its functional equivalent or its homolog, e.g. the increase of
[46631] (a) a gene product of a gene comprising the nucleic acid molecule as shown in the respective line in column 5 of Table I (whereby the respective line disclose in column 7 the fine chemical alpha-tocopherol), application no. 7, preferably the coding region thereof, or a homolog or a fragment thereof, and being depicted in the same respective line as said 59582753_SOYBEAN, or a functional equivalent or a homolog thereof as shown in column 8 of Table I, application no. 7, preferably the coding region thereof, particularly a homolog or functional equivalent as shown in column 8 of Table I B, application no. 7, and being depicted in the same respective line as said 59582753_SOYBEAN, and preferably the activity is increased plastidic, or
[46632] (b) a polypeptide comprising a polypeptide, a consensus sequence or at least a polypeptide motif as shown in the respective line in column 5 of Table II or in column 8 of Table IV, application no. 7, respectively, and being depicted in the same respective line as said 59582753_SOYBEAN, or a functional equivalent or a homolog thereof as depicted in column 8 of Table II, application no. 7, preferably a homolog or functional equivalent as depicted in column 8 of Table II B, application no. 7, and being depicted in the same respective line as said 59582753_SOYBEAN, and preferably the activity is increased plastidic, whereby the respective line disclose in column 7 the fine chemical alpha-tocopherol.

[46633] Accordingly, in one embodiment, the molecule which activity is to be increased in the process of the invention is the gene product with an activity as a “glucose-6-phosphate 1-dehydrogenase”, preferably it is the molecule of section (a) or (b) of this paragraph.

[46634] In particular, it was observed that in plants, especially in Arabidopsis thaliana, increasing or generating the activity of a gene product plastidic with the activity of a “glucose-6-phosphate 1-dehydrogenase”, preferably being encoded by a gene comprising the nucleic acid sequence SEQ ID NO. 16883, preferably the coding region thereof, conferred the production of or the increase in alpha-tocopherol compared with the wild type control.

[46635] The nucleic acid sequence of At1g29350 from Arabidopsis thaliana, e.g. as shown in the respective line in column 5 of Table I, application no. 7, has been published in F. And the activity of the gene product thereof is the activity of At1g29350-protein.

[46636] Accordingly, in one embodiment, the process of the present invention for producing gamma-tocopherol in a non-human organism, like a microorganism or a plant or a part thereof, comprises increasing or generating the activity of a gene product with the activity of a gene product conferring the activity of “At1g29350-protein”, especially from Arabidopsis thaliana or its functional equivalent or its homolog, e.g. the increase of
[46637] (a) a gene product of a gene comprising the nucleic acid molecule as shown in the respective line in column 5 of Table I (whereby the respective line disclose in column 7 the fine chemical gamma-tocopherol), application no. 7, preferably the coding region thereof, or a homolog or a fragment thereof, and being depicted in the same respective line as said At1g29350, or a functional equivalent or a homolog thereof as shown in column 8 of Table I, application no. 7, preferably the coding region thereof, particularly a homolog or functional equivalent as shown in column 8 of Table I B, application no. 7, and being depicted in the same respective line as said At1g29350, and preferably the activity is increased non-targeted, or
[46638] (b) a polypeptide comprising a polypeptide, a consensus sequence or at least a polypeptide motif as shown in the respective line in column 5 of Table II or in column 8 of Table IV, application no. 7, respectively, and being depicted in the same respective line as said At1g29350, or a functional equivalent or a homolog thereof as depicted in column 8 of Table II, application no. 7, preferably a homolog or functional equivalent as depicted in column 8 of Table II B, application no. 7, and being depicted in the same respective line as said At1g29350, and preferably the activity is increased non-targeted, whereby the respective line disclose in column 7 the fine chemical gamma-tocopherol.

[46639] Accordingly, in one embodiment, the molecule which activity is to be increased in the process of the invention is the gene product with an activity as a “At1g29350-protein”, preferably it is the molecule of section (a) or (b) of this paragraph.

[46640] In particular, it was observed that in plants, especially in Arabidopsis thaliana, increasing or generating the activity of a gene product non-targeted with the activity of a “At1g29350-protein”, preferably being encoded by a gene comprising the nucleic acid sequence SEQ ID NO. 17901, preferably the coding region thereof, conferred the production of or the increase in gamma-tocopherol compared with the wild type control.

[46641] The nucleic acid sequence of At1g43850 from Arabidopsis thaliana, e.g. as shown in the respective line in column 5 of Table I, application no. 7, has been published in F. And the activity of the gene product thereof is the activity of transcriptional regulator.

[46642] Accordingly, in one embodiment, the process of the present invention for producing gamma-tocopherol in a non-human organism, like a microorganism or a plant or a part thereof, comprises increasing or generating the activity of a gene product with the activity of a gene product conferring the activity of “transcriptional regulator”, especially from Arabidopsis thaliana or its functional equivalent or its homolog, e.g. the increase of
[46643] (a) a gene product of a gene comprising the nucleic acid molecule as shown in the respective line in column 5 of Table I (whereby the respective line disclose in column 7 the fine chemical gamma-tocopherol), application no. 7, preferably the coding region thereof, or a homolog or a fragment thereof, and being depicted in the same respective line as said At1g43850, or a functional equivalent or a homolog thereof as shown in column 8 of Table I, application no. 7, preferably the coding region thereof, particularly a homolog or functional equivalent as shown in column 8 of Table I B, application no. 7, and being depicted in the same respective line as said At1g43850, and preferably the activity is increased non-targeted, or
[46644] (b) a polypeptide comprising a polypeptide, a consensus sequence or at least a polypeptide motif as shown in the respective line in column 5 of Table II or in column 8 of Table IV, application no. 7, respectively, and being depicted in the same respective line as said At1g43850, or a functional equivalent or a homolog thereof as depicted in column 8 of Table II, application no. 7, preferably a homolog or functional equivalent as depicted in column 8 of Table II B, application no. 7, and being depicted in the same respective line as said At1g43850, and preferably the activity is increased non-targeted, whereby the respective line disclose in column 7 the fine chemical gamma-tocopherol.

[46645] Accordingly, in one embodiment, the molecule which activity is to be increased in the process of the invention is the gene product with an activity as a “transcriptional regulator”, preferably it is the molecule of section (a) or (b) of this paragraph.

[46646] In particular, it was observed that in plants, especially in Arabidopsis thaliana, increasing or generating the activity of a gene product non-targeted with the activity of a “transcriptional regulator”, preferably being encoded by a gene comprising the nucleic acid sequence SEQ ID NO. 18070, preferably the coding region thereof, conferred the production of or the increase in gamma-tocopherol compared with the wild type control.

[46647] The nucleic acid sequence of At1g48260 from Arabidopsis thaliana, e.g. as shown in the respective line in column 5 of Table I, application no. 7, has been published in F. And the activity of the gene product thereof is the activity of protein kinase.

[46648] Accordingly, in one embodiment, the process of the present invention for producing gamma-tocopherol in a non-human organism, like a microorganism or a plant or a part thereof, comprises increasing or generating the activity of a gene product with the activity of a gene product conferring the activity of “protein kinase”, especially from Arabidopsis thaliana or its functional equivalent or its homolog, e.g. the increase of
[46649] (a) a gene product of a gene comprising the nucleic acid molecule as shown in the respective line in column 5 of Table I (whereby the respective line disclose in column 7 the fine chemical gamma-tocopherol), application no. 7, preferably the coding region thereof, or a homolog or a fragment thereof, and being depicted in the same respective line as said At1g48260, or a functional equivalent or a homolog thereof as shown in column 8 of Table I, application no. 7, preferably the coding region thereof, particularly a homolog or functional equivalent as shown in column 8 of Table I B, application no. 7, and being depicted in the same respective line as said At1g48260, and preferably the activity is increased non-targeted, or
[46650] (b) a polypeptide comprising a polypeptide, a consensus sequence or at least a polypeptide motif as shown in the respective line in column 5 of Table II or in column 8 of Table IV, application no. 7, respectively, and being depicted in the same respective line as said At1g48260, or a functional equivalent or a homolog thereof as depicted in column 8 of Table II, application no. 7, preferably a homolog or functional equivalent as depicted in column 8 of Table II B, application no. 7, and being depicted in the same respective line as said At1g48260, and preferably the activity is increased non-targeted, whereby the respective line disclose in column 7 the fine chemical gamma-tocopherol.

[46651] Accordingly, in one embodiment, the molecule which activity is to be increased in the process of the invention is the gene product with an activity as a “protein kinase”, preferably it is the molecule of section (a) or (b) of this paragraph.

[46652] In particular, it was observed that in plants, especially in Arabidopsis thaliana, increasing or generating the activity of a gene product non-targeted with the activity of a “protein kinase”, preferably being encoded by a gene comprising the nucleic acid sequence SEQ ID NO. 18235, preferably the coding region thereof, conferred the production of or the increase in gamma-tocopherol compared with the wild type control.

[46653] The nucleic acid sequence of At1g61950 from Arabidopsis thaliana, e.g. as shown in the respective line in column 5 of Table I, application no. 7, has been published in F. And the activity of the gene product thereof is the activity of calcium-dependent protein kinase.

[46654] Accordingly, in one embodiment, the process of the present invention for producing gamma-tocopherol in a non-human organism, like a microorganism or a plant or a part thereof, comprises increasing or generating the activity of a gene product with the activity of a gene product conferring the activity of “calcium-dependent protein kinase”, especially from Arabidopsis thaliana or its functional equivalent or its homolog, e.g. the increase of
[46655] (a) a gene product of a gene comprising the nucleic acid molecule as shown in the respective line in column 5 of Table I (whereby the respective line disclose in column 7 the fine chemical gamma-tocopherol), application no. 7, preferably the coding region thereof, or a homolog or a fragment thereof, and being depicted in the same respective line as said At1g61950, or a functional equivalent or a homolog thereof as shown in column 8 of Table I, application no. 7, preferably the coding region thereof, particularly a homolog or functional equivalent as shown in column 8 of Table I B, application no. 7, and being depicted in the same respective line as said At1g61950, and preferably the activity is increased non-targeted, or
[46656] (b) a polypeptide comprising a polypeptide, a consensus sequence or at least a polypeptide motif as shown in the respective line in column 5 of Table II or in column 8 of Table IV, application no. 7, respectively, and being depicted in the same respective line as said At1g61950, or a functional equivalent or a homolog thereof as depicted in column 8 of Table II, application no. 7, preferably a homolog or functional equivalent as depicted in column 8 of Table II B, application no. 7, and being depicted in the same respective line as said At1g61950, and preferably the activity is increased non-targeted, whereby the respective line disclose in column 7 the fine chemical gamma-tocopherol.

[46657] Accordingly, in one embodiment, the molecule which activity is to be increased in the process of the invention is the gene product with an activity as a “calcium-dependent protein kinase”, preferably it is the molecule of section (a) or (b) of this paragraph.

[46658] In particular, it was observed that in plants, especially in Arabidopsis thaliana, increasing or generating the activity of a gene product non-targeted with the activity of a “calcium-dependent protein kinase”, preferably being encoded by a gene comprising the nucleic acid sequence SEQ ID NO. 18869, preferably the coding region thereof, conferred the production of or the increase in gamma-tocopherol compared with the wild type control.

[46659] The nucleic acid sequence of At1g72770 from Arabidopsis thaliana, e.g. as shown in the respective line in column 5 of Table I, application no. 7, has been published in F. And the activity of the gene product thereof is the activity of protein phosphatase.

[46660] Accordingly, in one embodiment, the process of the present invention for producing alpha-tocopherol in a non-human organism, like a microorganism or a plant or a part thereof, comprises increasing or generating the activity of a gene product with the activity of a gene product conferring the activity of “protein phosphatase”, especially from Arabidopsis thaliana or its functional equivalent or its homolog, e.g. the increase of
[46661] (a) a gene product of a gene comprising the nucleic acid molecule as shown in the respective line in column 5 of Table I (whereby the respective line disclose in column 7 the fine chemical alpha-tocopherol), application no. 7, preferably the coding region thereof, or a homolog or a fragment thereof, and being depicted in the same respective line as said At1g72770, or a functional equivalent or a homolog thereof as shown in column 8 of Table I, application no. 7, preferably the coding region thereof, particularly a homolog or functional equivalent as shown in column 8 of Table I B, application no. 7, and being depicted in the same respective line as said At1g72770, and preferably the activity is increased non-targeted, or
[46662] (b) a polypeptide comprising a polypeptide, a consensus sequence or at least a polypeptide motif as shown in the respective line in column 5 of Table II or in column 8 of Table IV, application no. 7, respectively, and being depicted in the same respective line as said At1g72770, or a functional equivalent or a homolog thereof as depicted in column 8 of Table II, application no. 7, preferably a homolog or functional equivalent as depicted in column 8 of Table II B, application no. 7, and being depicted in the same respective line as said At1g72770, and preferably the activity is increased non-targeted, whereby the respective line disclose in column 7 the fine chemical alpha-tocopherol.

[46663] Accordingly, in one embodiment, the molecule which activity is to be increased in the process of the invention is the gene product with an activity as a “protein phosphatase”, preferably it is the molecule of section (a) or (b) of this paragraph.

[46664] In particular, it was observed that in plants, especially in Arabidopsis thaliana, increasing or generating the activity of a gene product non-targeted with the activity of a “protein phosphatase”, preferably being encoded by a gene comprising the nucleic acid sequence SEQ ID NO. 19419, preferably the coding region thereof, conferred the production of or the increase in alpha-tocopherol compared with the wild type control.

[46665] The nucleic acid sequence of At2g42830 from Arabidopsis thaliana, e.g. as shown in the respective line in column 5 of Table I, application no. 7, has been published in F. And the activity of the gene product thereof is the activity of MADS box protein transcription factor.

[46666] Accordingly, in one embodiment, the process of the present invention for producing alpha-tocopherol in a non-human organism, like a microorganism or a plant or a part thereof, comprises increasing or generating the activity of a gene product with the activity of a gene product conferring the activity of “MADS box protein transcription factor”, especially from Arabidopsis thaliana or its functional equivalent or its homolog, e.g. the increase of
[46667] (a) a gene product of a gene comprising the nucleic acid molecule as shown in the respective line in column 5 of Table I (whereby the respective line disclose in column 7 the fine chemical alpha-tocopherol), application no. 7, preferably the coding region thereof, or a homolog or a fragment thereof, and being depicted in the same respective line as said At2g42830, or a functional equivalent or a homolog thereof as shown in column 8 of Table I, application no. 7, preferably the coding region thereof, particularly a homolog or functional equivalent as shown in column 8 of Table I B, application no. 7, and being depicted in the same respective line as said At2g42830, and preferably the activity is increased non-targeted, or
[46668] (b) a polypeptide comprising a polypeptide, a consensus sequence or at least a polypeptide motif as shown in the respective line in column 5 of Table II or in column 8 of Table IV, application no. 7, respectively, and being depicted in the same respective line as said At2g42830, or a functional equivalent or a homolog thereof as depicted in column 8 of Table II, application no. 7, preferably a homolog or functional equivalent as depicted in column 8 of Table II B, application no. 7, and being depicted in the same respective line as said At2g42830, and preferably the activity is increased non-targeted, whereby the respective line disclose in column 7 the fine chemical alpha-tocopherol.

[46669] Accordingly, in one embodiment, the molecule which activity is to be increased in the process of the invention is the gene product with an activity as a “MADS box protein transcription factor”, preferably it is the molecule of section (a) or (b) of this paragraph.

[46670] In particular, it was observed that in plants, especially in Arabidopsis thaliana, increasing or generating the activity of a gene product non-targeted with the activity of a “MADS box protein transcription factor”, preferably being encoded by a gene comprising the nucleic acid sequence SEQ ID NO. 108727, preferably the coding region thereof, conferred the production of or the increase in alpha-tocopherol compared with the wild type control.

[46671] The nucleic acid sequence of At2g47880 from Arabidopsis thaliana, e.g. as shown in the respective line in column 5 of Table I, application no. 7, has been published in F. And the activity of the gene product thereof is the activity of glutaredoxin.

[46672] Accordingly, in one embodiment, the process of the present invention for producing gamma-tocopherol in a non-human organism, like a microorganism or a plant or a part thereof, comprises increasing or generating the activity of a gene product with the activity of a gene product conferring the activity of “glutaredoxin”, especially from Arabidopsis thaliana or its functional equivalent or its homolog, e.g. the increase of
[46673] (a) a gene product of a gene comprising the nucleic acid molecule as shown in the respective line in column 5 of Table I (whereby the respective line disclose in column 7 the fine chemical gamma-tocopherol), application no. 7, preferably the coding region thereof, or a homolog or a fragment thereof, and being depicted in the same respective line as said At2g47880, or a functional equivalent or a homolog thereof as shown in column 8 of Table I, application no. 7, preferably the coding region thereof, particularly a homolog or functional equivalent as shown in column 8 of Table I B, application no. 7, and being depicted in the same respective line as said At2g47880, and preferably the activity is increased non-targeted, or
[46674] (b) a polypeptide comprising a polypeptide, a consensus sequence or at least a polypeptide motif as shown in the respective line in column 5 of Table II or in column 8 of Table IV, application no. 7, respectively, and being depicted in the same respective line as said

[46675] At2g47880, or a functional equivalent or a homolog thereof as depicted in column 8 of Table II, application no. 7, preferably a homolog or functional equivalent as depicted in column 8 of Table II B, application no. 7, and being depicted in the same respective line as said At2g47880, and preferably the activity is increased non-targeted, whereby the respective line disclose in column 7 the fine chemical gamma-tocopherol.

[46676] Accordingly, in one embodiment, the molecule which activity is to be increased in the process of the invention is the gene product with an activity as a “glutaredoxin”, preferably it is the molecule of section (a) or (b) of this paragraph.

[46677] In particular, it was observed that in plants, especially in Arabidopsis thaliana, increasing or generating the activity of a gene product non-targeted with the activity of a “glutaredoxin”, preferably being encoded by a gene comprising the nucleic acid sequence SEQ ID NO. 21159, preferably the coding region thereof, conferred the production of or the increase in gamma-tocopherol compared with the wild type control.

[46678] The nucleic acid sequence of At3g04050 from Arabidopsis thaliana, e.g. as shown in the respective line in column 5 of Table I, application no. 7, has been published in F. And the activity of the gene product thereof is the activity of pyruvate kinase.

[46679] Accordingly, in one embodiment, the process of the present invention for producing gamma-tocopherol in a non-human organism, like a microorganism or a plant or a part thereof, comprises increasing or generating the activity of a gene product with the activity of a gene product conferring the activity of “pyruvate kinase”, especially from Arabidopsis thaliana or its functional equivalent or its homolog, e.g. the increase of
[46680] (a) a gene product of a gene comprising the nucleic acid molecule as shown in the respective line in column 5 of Table I (whereby the respective line disclose in column 7 the fine chemical gamma-tocopherol), application no. 7, preferably the coding region thereof, or a homolog or a fragment thereof, and being depicted in the same respective line as said At3g04050, or a functional equivalent or a homolog thereof as shown in column 8 of Table I, application no. 7, preferably the coding region thereof, particularly a homolog or functional equivalent as shown in column 8 of Table I B, application no. 7, and being depicted in the same respective line as said At3g04050, and preferably the activity is increased plastidic, or
[46681] (b) a polypeptide comprising a polypeptide, a consensus sequence or at least a polypeptide motif as shown in the respective line in column 5 of Table II or in column 8 of Table IV, application no. 7, respectively, and being depicted in the same respective line as said At3g04050, or a functional equivalent or a homolog thereof as depicted in column 8 of Table II, application no. 7, preferably a homolog or functional equivalent as depicted in column 8 of Table II B, application no. 7, and being depicted in the same respective line as said At3g04050, and preferably the activity is increased plastidic, whereby the respective line disclose in column 7 the fine chemical gamma-tocopherol.

[46682] Accordingly, in one embodiment, the molecule which activity is to be increased in the process of the invention is the gene product with an activity as a “pyruvate kinase”, preferably it is the molecule of section (a) or (b) of this paragraph.

[46683] In particular, it was observed that in plants, especially in Arabidopsis thaliana, increasing or generating the activity of a gene product plastidic with the activity of a “pyruvate kinase”, preferably being encoded by a gene comprising the nucleic acid sequence SEQ ID NO. 21497, preferably the coding region thereof, conferred the production of or the increase in gamma-tocopherol compared with the wild type control.

[46684] The nucleic acid sequence of At3g04710 from Arabidopsis thaliana, e.g. as shown in the respective line in column 5 of Table I, application no. 7, has been published in F. And the activity of the gene product thereof is the activity of ankyrin repeat family protein.

[46685] Accordingly, in one embodiment, the process of the present invention for producing alpha-tocopherol in a non-human organism, like a microorganism or a plant or a part thereof, comprises increasing or generating the activity of a gene product with the activity of a gene product conferring the activity of “ankyrin repeat family protein”, especially from Arabidopsis thaliana or its functional equivalent or its homolog, e.g. the increase of
[46686] (a) a gene product of a gene comprising the nucleic acid molecule as shown in the respective line in column 5 of Table I (whereby the respective line disclose in column 7 the fine chemical alpha-tocopherol), application no. 7, preferably the coding region thereof, or a homolog or a fragment thereof, and being depicted in the same respective line as said At3g04710, or a functional equivalent or a homolog thereof as shown in column 8 of Table I, application no. 7, preferably the coding region thereof, particularly a homolog or functional equivalent as shown in column 8 of Table I B, application no. 7, and being depicted in the same respective line as said At3g04710, and preferably the activity is increased non-targeted, or
[46687] (b) a polypeptide comprising a polypeptide, a consensus sequence or at least a polypeptide motif as shown in the respective line in column 5 of Table II or in column 8 of Table IV, application no. 7, respectively, and being depicted in the same respective line as said At3g04710, or a functional equivalent or a homolog thereof as depicted in column 8 of Table II, application no. 7, preferably a homolog or functional equivalent as depicted in column 8 of Table II B, application no. 7, and being depicted in the same respective line as said At3g04710, and preferably the activity is increased non-targeted, whereby the respective line disclose in column 7 the fine chemical alpha-tocopherol.

[46688] Accordingly, in one embodiment, the molecule which activity is to be increased in the process of the invention is the gene product with an activity as a “ankyrin repeat family protein”, preferably it is the molecule of section (a) or (b) of this paragraph.

[46689] In particular, it was observed that in plants, especially in Arabidopsis thaliana, increasing or generating the activity of a gene product non-targeted with the activity of a “ankyrin repeat family protein”, preferably being encoded by a gene comprising the nucleic acid sequence SEQ ID NO. 21902, preferably the coding region thereof, conferred the production of or the increase in alpha-tocopherol compared with the wild type control.

[46690] The nucleic acid sequence of At3g06270 from Arabidopsis thaliana, e.g. as shown in the respective line in column 5 of Table I, application no. 7, has been published in F. And the activity of the gene product thereof is the activity of protein phosphatase.

[46691] Accordingly, in one embodiment, the process of the present invention for producing alpha-tocopherol in a non-human organism, like a microorganism or a plant or a part thereof, comprises increasing or generating the activity of a gene product with the activity of a gene product conferring the activity of “protein phosphatase”, especially from Arabidopsis thaliana or its functional equivalent or its homolog, e.g. the increase of
[46692] (a) a gene product of a gene comprising the nucleic acid molecule as shown in the respective line in column 5 of Table I (whereby the respective line disclose in column 7 the fine chemical alpha-tocopherol), application no. 7, preferably the coding region thereof, or a homolog or a fragment thereof, and being depicted in the same respective line as said At3g06270, or a functional equivalent or a homolog thereof as shown in column 8 of Table I, application no. 7, preferably the coding region thereof, particularly a homolog or functional equivalent as shown in column 8 of Table I B, application no. 7, and being depicted in the same respective line as said At3g06270, and preferably the activity is increased non-targeted, or
[46693] (b) a polypeptide comprising a polypeptide, a consensus sequence or at least a polypeptide motif as shown in the respective line in column 5 of Table II or in column 8 of Table IV, application no. 7, respectively, and being depicted in the same respective line as said At3g06270, or a functional equivalent or a homolog thereof as depicted in column 8 of Table II, application no. 7, preferably a homolog or functional equivalent as depicted in column 8 of Table II B, application no. 7, and being depicted in the same respective line as said At3g06270, and preferably the activity is increased non-targeted, whereby the respective line disclose in column 7 the fine chemical alpha-tocopherol.

[46694] Accordingly, in one embodiment, the molecule which activity is to be increased in the process of the invention is the gene product with an activity as a “protein phosphatase”, preferably it is the molecule of section (a) or (b) of this paragraph.

[46695] In particular, it was observed that in plants, especially in Arabidopsis thaliana, increasing or generating the activity of a gene product non-targeted with the activity of a “protein phosphatase”, preferably being encoded by a gene comprising the nucleic acid sequence SEQ ID NO. 22015, preferably the coding region thereof, conferred the production of or the increase in alpha-tocopherol compared with the wild type control.

[46696] The nucleic acid sequence of At3g08710 from Arabidopsis thaliana, e.g. as shown in the respective line in column 5 of Table I, application no. 7, has been published in F. And the activity of the gene product thereof is the activity of thioredoxin family protein.

[46697] Accordingly, in one embodiment, the process of the present invention for producing alpha-tocopherol in a non-human organism, like a microorganism or a plant or a part thereof, comprises increasing or generating the activity of a gene product with the activity of a gene product conferring the activity of “thioredoxin family protein”, especially from Arabidopsis thaliana or its functional equivalent or its homolog, e.g. the increase of
[46698] (a) a gene product of a gene comprising the nucleic acid molecule as shown in the respective line in column 5 of Table I (whereby the respective line disclose in column 7 the fine chemical alpha-tocopherol), application no. 7, preferably the coding region thereof, or a homolog or a fragment thereof, and being depicted in the same respective line as said At3g08710, or a functional equivalent or a homolog thereof as shown in column 8 of Table I, application no. 7, preferably the coding region thereof, particularly a homolog or functional equivalent as shown in column 8 of Table I B, application no. 7, and being depicted in the same respective line as said At3g08710, and preferably the activity is increased non-targeted, or
[46699] (b) a polypeptide comprising a polypeptide, a consensus sequence or at least a polypeptide motif as shown in the respective line in column 5 of Table II or in column 8 of Table IV, application no. 7, respectively, and being depicted in the same respective line as said At3g08710, or a functional equivalent or a homolog thereof as depicted in column 8 of Table II, application no. 7, preferably a homolog or functional equivalent as depicted in column 8 of Table II B, application no. 7, and being depicted in the same respective line as said At3g08710, and preferably the activity is increased non-targeted, whereby the respective line disclose in column 7 the fine chemical alpha-tocopherol.

[46700] Accordingly, in one embodiment, the molecule which activity is to be increased in the process of the invention is the gene product with an activity as a “thioredoxin family protein”, preferably it is the molecule of section (a) or (b) of this paragraph.

[46701] In particular, it was observed that in plants, especially in Arabidopsis thaliana, increasing or generating the activity of a gene product non-targeted with the activity of a “thioredoxin family protein”, preferably being encoded by a gene comprising the nucleic acid sequence SEQ ID NO. 22249, preferably the coding region thereof, conferred the production of or the increase in alpha-tocopherol compared with the wild type control.

[46702] The nucleic acid sequence of At3g11650 from Arabidopsis thaliana, e.g. as shown in the respective line in column 5 of Table I, application no. 7, has been published in F. And the activity of the gene product thereof is the activity of harpin-induced family protein.

[46703] Accordingly, in one embodiment, the process of the present invention for producing alpha-tocopherol in a non-human organism, like a microorganism or a plant or a part thereof, comprises increasing or generating the activity of a gene product with the activity of a gene product conferring the activity of “harpin-induced family protein”, especially from Arabidopsis thaliana or its functional equivalent or its homolog, e.g. the increase of
[46704] (a) a gene product of a gene comprising the nucleic acid molecule as shown in the respective line in column 5 of Table I (whereby the respective line disclose in column 7 the fine chemical alpha-tocopherol), application no. 7, preferably the coding region thereof, or a homolog or a fragment thereof, and being depicted in the same respective line as said At3g11650, or a functional equivalent or a homolog thereof as shown in column 8 of Table I, application no. 7, preferably the coding region thereof, particularly a homolog or functional equivalent as shown in column 8 of Table I B, application no. 7, and being depicted in the same respective line as said At3g11650, and preferably the activity is increased non-targeted, or
[46705] (b) a polypeptide comprising a polypeptide, a consensus sequence or at least a polypeptide motif as shown in the respective line in column 5 of Table II or in column 8 of Table IV, application no. 7, respectively, and being depicted in the same respective line as said At3g11650, or a functional equivalent or a homolog thereof as depicted in column 8 of Table II, application no. 7, preferably a homolog or functional equivalent as depicted in column 8 of Table II B, application no. 7, and being depicted in the same respective line as said At3g11650, and preferably the activity is increased non-targeted, whereby the respective line disclose in column 7 the fine chemical alpha-tocopherol.

[46706] Accordingly, in one embodiment, the molecule which activity is to be increased in the process of the invention is the gene product with an activity as a “harpin-induced family protein”, preferably it is the molecule of section (a) or (b) of this paragraph.

[46707] In particular, it was observed that in plants, especially in Arabidopsis thaliana, increasing or generating the activity of a gene product non-targeted with the activity of a “harpin-induced family protein”, preferably being encoded by a gene comprising the nucleic acid sequence SEQ ID NO. 22611, preferably the coding region thereof, conferred the production of or the increase in alpha-tocopherol compared with the wild type control.

[46708] The nucleic acid sequence of At3g11650 from Arabidopsis thaliana, e.g. as shown in the respective line in column 5 of Table I, application no. 7, has been published in F. And the activity of the gene product thereof is the activity of harpin-induced family protein.

[46709] Accordingly, in one embodiment, the process of the present invention for producing gamma-tocopherol in a non-human organism, like a microorganism or a plant or a part thereof, comprises increasing or generating the activity of a gene product with the activity of a gene product conferring the activity of “harpin-induced family protein”, especially from Arabidopsis thaliana or its functional equivalent or its homolog, e.g. the increase of
[46710] (a) a gene product of a gene comprising the nucleic acid molecule as shown in the respective line in column 5 of Table I (whereby the respective line disclose in column 7 the fine chemical gamma-tocopherol), application no. 7, preferably the coding region thereof, or a homolog or a fragment thereof, and being depicted in the same respective line as said At3g11650, or a functional equivalent or a homolog thereof as shown in column 8 of Table I, application no. 7, preferably the coding region thereof, particularly a homolog or functional equivalent as shown in column 8 of Table I B, application no. 7, and being depicted in the same respective line as said At3g11650, and preferably the activity is increased non-targeted, or
[46711] (b) a polypeptide comprising a polypeptide, a consensus sequence or at least a polypeptide motif as shown in the respective line in column 5 of Table II or in column 8 of Table IV, application no. 7, respectively, and being depicted in the same respective line as said At3g11650, or a functional equivalent or a homolog thereof as depicted in column 8 of Table II, application no. 7, preferably a homolog or functional equivalent as depicted in column 8 of Table II B, application no. 7, and being depicted in the same respective line as said At3g11650, and preferably the activity is increased non-targeted, whereby the respective line disclose in column 7 the fine chemical gamma-tocopherol.

[46712] Accordingly, in one embodiment, the molecule which activity is to be increased in the process of the invention is the gene product with an activity as a “harpin-induced family protein”, preferably it is the molecule of section (a) or (b) of this paragraph.

[46713] In particular, it was observed that in plants, especially in Arabidopsis thaliana, increasing or generating the activity of a gene product non-targeted with the activity of a “harpin-induced family protein”, preferably being encoded by a gene comprising the nucleic acid sequence SEQ ID NO. 22611, preferably the coding region thereof, conferred the production of or the increase in gamma-tocopherol compared with the wild type control.

[46714] The nucleic acid sequence of At3g23000 from Arabidopsis thaliana, e.g. as shown in the respective line in column 5 of Table I, application no. 7, has been published in F. And the activity of the gene product thereof is the activity of protein kinase.

[46715] Accordingly, in one embodiment, the process of the present invention for producing gamma-tocopherol in a non-human organism, like a microorganism or a plant or a part thereof, comprises increasing or generating the activity of a gene product with the activity of a gene product conferring the activity of “protein kinase”, especially from Arabidopsis thaliana or its functional equivalent or its homolog, e.g. the increase of
[46716] (a) a gene product of a gene comprising the nucleic acid molecule as shown in the respective line in column 5 of Table I (whereby the respective line disclose in column 7 the fine chemical gamma-tocopherol), application no. 7, preferably the coding region thereof, or a homolog or a fragment thereof, and being depicted in the same respective line as said At3g23000, or a functional equivalent or a homolog thereof as shown in column 8 of Table I, application no. 7, preferably the coding region thereof, particularly a homolog or functional equivalent as shown in column 8 of Table I B, application no. 7, and being depicted in the same respective line as said At3g23000, and preferably the activity is increased non-targeted, or
[46717] (b) a polypeptide comprising a polypeptide, a consensus sequence or at least a polypeptide motif as shown in the respective line in column 5 of Table II or in column 8 of Table IV, application no. 7, respectively, and being depicted in the same respective line as said At3g23000, or a functional equivalent or a homolog thereof as depicted in column 8 of Table II, application no. 7, preferably a homolog or functional equivalent as depicted in column 8 of Table II B, application no. 7, and being depicted in the same respective line as said At3g23000, and preferably the activity is increased non-targeted, whereby the respective line disclose in column 7 the fine chemical gamma-tocopherol.

[46718] Accordingly, in one embodiment, the molecule which activity is to be increased in the process of the invention is the gene product with an activity as a “protein kinase”, preferably it is the molecule of section (a) or (b) of this paragraph.

[46719] In particular, it was observed that in plants, especially in Arabidopsis thaliana, increasing or generating the activity of a gene product non-targeted with the activity of a “protein kinase”, preferably being encoded by a gene comprising the nucleic acid sequence SEQ ID NO. 1815, preferably the coding region thereof, conferred the production of or the increase in gamma-tocopherol compared with the wild type control.

[46720] The nucleic acid sequence of At3g62930 from Arabidopsis thaliana, e.g. as shown in the respective line in column 5 of Table I, application no. 7, has been published in F. And the activity of the gene product thereof is the activity of monthiol glutaredoxin.

[46721] Accordingly, in one embodiment, the process of the present invention for producing gamma-tocopherol in a non-human organism, like a microorganism or a plant or a part thereof, comprises increasing or generating the activity of a gene product with the activity of a gene product conferring the activity of “monthiol glutaredoxin”, especially from Arabidopsis thaliana or its functional equivalent or its homolog, e.g. the increase of
[46722] (a) a gene product of a gene comprising the nucleic acid molecule as shown in the respective line in column 5 of Table I (whereby the respective line disclose in column 7 the fine chemical gamma-tocopherol), application no. 7, preferably the coding region thereof, or a homolog or a fragment thereof, and being depicted in the same respective line as said At3g62930, or a functional equivalent or a homolog thereof as shown in column 8 of Table I, application no. 7, preferably the coding region thereof, particularly a homolog or functional equivalent as shown in column 8 of Table I B, application no. 7, and being depicted in the same respective line as said At3g62930, and preferably the activity is increased non-targeted, or
[46723] (b) a polypeptide comprising a polypeptide, a consensus sequence or at least a polypeptide motif as shown in the respective line in column 5 of Table II or in column 8 of Table IV, application no. 7, respectively, and being depicted in the same respective line as said At3g62930, or a functional equivalent or a homolog thereof as depicted in column 8 of Table II, application no. 7, preferably a homolog or functional equivalent as depicted in column 8 of Table II B, application no. 7, and being depicted in the same respective line as said At3g62930, and preferably the activity is increased non-targeted, whereby the respective line disclose in column 7 the fine chemical gamma-tocopherol.

[46724] Accordingly, in one embodiment, the molecule which activity is to be increased in the process of the invention is the gene product with an activity as a “monthiol glutaredoxin”, preferably it is the molecule of section (a) or (b) of this paragraph.

[46725] In particular, it was observed that in plants, especially in Arabidopsis thaliana, increasing or generating the activity of a gene product non-targeted with the activity of a “monthiol glutaredoxin”, preferably being encoded by a gene comprising the nucleic acid sequence SEQ ID NO. 2573, preferably the coding region thereof, conferred the production of or the increase in gamma-tocopherol compared with the wild type control.

[46726] The nucleic acid sequence of At3g62950 from Arabidopsis thaliana, e.g. as shown in the respective line in column 5 of Table I, application no. 7, has been published in F. And the activity of the gene product thereof is the activity of glutaredoxin.

[46727] Accordingly, in one embodiment, the process of the present invention for producing gamma-tocopherol in a non-human organism, like a microorganism or a plant or a part thereof, comprises increasing or generating the activity of a gene product with the activity of a gene product conferring the activity of “glutaredoxin”, especially from Arabidopsis thaliana or its functional equivalent or its homolog, e.g. the increase of
[46728] (a) a gene product of a gene comprising the nucleic acid molecule as shown in the respective line in column 5 of Table I (whereby the respective line disclose in column 7 the fine chemical gamma-tocopherol), application no. 7, preferably the coding region thereof, or a homolog or a fragment thereof, and being depicted in the same respective line as said At3g62950, or a functional equivalent or a homolog thereof as shown in column 8 of Table I, application no. 7, preferably the coding region thereof, particularly a homolog or functional equivalent as shown in column 8 of Table I B, application no. 7, and being depicted in the same respective line as said At3g62950, and preferably the activity is increased non-targeted, or
[46729] (b) a polypeptide comprising a polypeptide, a consensus sequence or at least a polypeptide motif as shown in the respective line in column 5 of Table II or in column 8 of Table IV, application no. 7, respectively, and being depicted in the same respective line as said At3g62950, or a functional equivalent or a homolog thereof as depicted in column 8 of Table II, application no. 7, preferably a homolog or functional equivalent as depicted in column 8 of Table II B, application no. 7, and being depicted in the same respective line as said At3g62950, and preferably the activity is increased non-targeted, whereby the respective line disclose in column 7 the fine chemical gamma-tocopherol.

[46730] Accordingly, in one embodiment, the molecule which activity is to be increased in the process of the invention is the gene product with an activity as a “glutaredoxin”, preferably it is the molecule of section (a) or (b) of this paragraph.

[46731] In particular, it was observed that in plants, especially in Arabidopsis thaliana, increasing or generating the activity of a gene product non-targeted with the activity of a “glutaredoxin”, preferably being encoded by a gene comprising the nucleic acid sequence SEQ ID NO. 2935, preferably the coding region thereof, conferred the production of or the increase in gamma-tocopherol compared with the wild type control.

[46732] The nucleic acid sequence of At4g09960 from Arabidopsis thaliana, e.g. as shown in the respective line in column 5 of Table I, application no. 7, has been published in F. And the activity of the gene product thereof is the activity of transcription factor.

[46733] Accordingly, in one embodiment, the process of the present invention for producing alpha-tocopherol in a non-human organism, like a microorganism or a plant or a part thereof, comprises increasing or generating the activity of a gene product with the activity of a gene product conferring the activity of “transcription factor”, especially from Arabidopsis thaliana or its functional equivalent or its homolog, e.g. the increase of
[46734] (a) a gene product of a gene comprising the nucleic acid molecule as shown in the respective line in column 5 of Table I (whereby the respective line disclose in column 7 the fine chemical alpha-tocopherol), application no. 7, preferably the coding region thereof, or a homolog or a fragment thereof, and being depicted in the same respective line as said At4g09960, or a functional equivalent or a homolog thereof as shown in column 8 of Table I, application no. 7, preferably the coding region thereof, particularly a homolog or functional equivalent as shown in column 8 of Table I B, application no. 7, and being depicted in the same respective line as said At4g09960, and preferably the activity is increased non-targeted, or
[46735] (b) a polypeptide comprising a polypeptide, a consensus sequence or at least a polypeptide motif as shown in the respective line in column 5 of Table II or in column 8 of Table IV, application no. 7, respectively, and being depicted in the same respective line as said At4g09960, or a functional equivalent or a homolog thereof as depicted in column 8 of Table II, application no. 7, preferably a homolog or functional equivalent as depicted in column 8 of Table II B, application no. 7, and being depicted in the same respective line as said At4g09960, and preferably the activity is increased non-targeted, whereby the respective line disclose in column 7 the fine chemical alpha-tocopherol.

[46736] Accordingly, in one embodiment, the molecule which activity is to be increased in the process of the invention is the gene product with an activity as a “transcription factor”, preferably it is the molecule of section (a) or (b) of this paragraph.

[46737] In particular, it was observed that in plants, especially in Arabidopsis thaliana, increasing or generating the activity of a gene product non-targeted with the activity of a “transcription factor”, preferably being encoded by a gene comprising the nucleic acid sequence SEQ ID NO. 109717, preferably the coding region thereof, conferred the production of or the increase in alpha-tocopherol compared with the wild type control.

[46738] The nucleic acid sequence of At4g15660 from Arabidopsis thaliana, e.g. as shown in the respective line in column 5 of Table I, application no. 7, has been published in F. And the activity of the gene product thereof is the activity of monothiol glutaredoxin.

[46739] Accordingly, in one embodiment, the process of the present invention for producing alpha-tocopherol in a non-human organism, like a microorganism or a plant or a part thereof, comprises increasing or generating the activity of a gene product with the activity of a gene product conferring the activity of “monothiol glutaredoxin”, especially from Arabidopsis thaliana or its functional equivalent or its homolog, e.g. the increase of
[46740] (a) a gene product of a gene comprising the nucleic acid molecule as shown in the respective line in column 5 of Table I (whereby the respective line disclose in column 7 the fine chemical alpha-tocopherol), application no. 7, preferably the coding region thereof, or a homolog or a fragment thereof, and being depicted in the same respective line as said At4g15660, or a functional equivalent or a homolog thereof as shown in column 8 of Table I, application no. 7, preferably the coding region thereof, particularly a homolog or functional equivalent as shown in column 8 of Table I B, application no. 7, and being depicted in the same respective line as said At4g15660, and preferably the activity is increased non-targeted, or
[46741] (b) a polypeptide comprising a polypeptide, a consensus sequence or at least a polypeptide motif as shown in the respective line in column 5 of Table II or in column 8 of Table IV, application no. 7, respectively, and being depicted in the same respective line as said At4g15660, or a functional equivalent or a homolog thereof as depicted in column 8 of Table II, application no. 7, preferably a homolog or functional equivalent as depicted in column 8 of Table II B, application no. 7, and being depicted in the same respective line as said At4g15660, and preferably the activity is increased non-targeted, whereby the respective line disclose in column 7 the fine chemical alpha-tocopherol.

[46742] Accordingly, in one embodiment, the molecule which activity is to be increased in the process of the invention is the gene product with an activity as a “monothiol glutaredoxin”, preferably it is the molecule of section (a) or (b) of this paragraph.

[46743] In particular, it was observed that in plants, especially in Arabidopsis thaliana, increasing or generating the activity of a gene product non-targeted with the activity of a “monothiol glutaredoxin”, preferably being encoded by a gene comprising the nucleic acid sequence SEQ ID NO. 23482, preferably the coding region thereof, conferred the production of or the increase in alpha-tocopherol compared with the wild type control.

[46744] The nucleic acid sequence of At4g15660 from Arabidopsis thaliana, e.g. as shown in the respective line in column 5 of Table I, application no. 7, has been published in F. And the activity of the gene product thereof is the activity of monothiol glutaredoxin.

[46745] Accordingly, in one embodiment, the process of the present invention for producing gamma-tocopherol in a non-human organism, like a microorganism or a plant or a part thereof, comprises increasing or generating the activity of a gene product with the activity of a gene product conferring the activity of “monothiol glutaredoxin”, especially from Arabidopsis thaliana or its functional equivalent or its homolog, e.g. the increase of
[46746] (a) a gene product of a gene comprising the nucleic acid molecule as shown in the respective line in column 5 of Table I (whereby the respective line disclose in column 7 the fine chemical gamma-tocopherol), application no. 7, preferably the coding region thereof, or a homolog or a fragment thereof, and being depicted in the same respective line as said At4g15660, or a functional equivalent or a homolog thereof as shown in column 8 of Table I, application no. 7, preferably the coding region thereof, particularly a homolog or functional equivalent as shown in column 8 of Table I B, application no. 7, and being depicted in the same respective line as said At4g15660, and preferably the activity is increased non-targeted, or
[46747] (b) a polypeptide comprising a polypeptide, a consensus sequence or at least a polypeptide motif as shown in the respective line in column 5 of Table II or in column 8 of Table IV, application no. 7, respectively, and being depicted in the same respective line as said At4g15660, or a functional equivalent or a homolog thereof as depicted in column 8 of Table II, application no. 7, preferably a homolog or functional equivalent as depicted in column 8 of Table II B, application no. 7, and being depicted in the same respective line as said At4g15660, and preferably the activity is increased non-targeted, whereby the respective line disclose in column 7 the fine chemical gamma-tocopherol.

[46748] Accordingly, in one embodiment, the molecule which activity is to be increased in the process of the invention is the gene product with an activity as a “monothiol glutaredoxin”, preferably it is the molecule of section (a) or (b) of this paragraph.

[46749] In particular, it was observed that in plants, especially in Arabidopsis thaliana, increasing or generating the activity of a gene product non-targeted with the activity of a “monothiol glutaredoxin”, preferably being encoded by a gene comprising the nucleic acid sequence SEQ ID NO. 23482, preferably the coding region thereof, conferred the production of or the increase in gamma-tocopherol compared with the wild type control.

[46750] The nucleic acid sequence of At4g15670 from Arabidopsis thaliana, e.g. as shown in the respective line in column 5 of Table I, application no. 7, has been published in F. And the activity of the gene product thereof is the activity of monothiol glutaredoxin.

[46751] Accordingly, in one embodiment, the process of the present invention for producing alpha-tocopherol in a non-human organism, like a microorganism or a plant or a part thereof, comprises increasing or generating the activity of a gene product with the activity of a gene product conferring the activity of “monothiol glutaredoxin”, especially from Arabidopsis thaliana or its functional equivalent or its homolog, e.g. the increase of
[46752] (a) a gene product of a gene comprising the nucleic acid molecule as shown in the respective line in column 5 of Table I (whereby the respective line disclose in column 7 the fine chemical alpha-tocopherol), application no. 7, preferably the coding region thereof, or a homolog or a fragment thereof, and being depicted in the same respective line as said At4g15670, or a functional equivalent or a homolog thereof as shown in column 8 of Table I, application no. 7, preferably the coding region thereof, particularly a homolog or functional equivalent as shown in column 8 of Table I B, application no. 7, and being depicted in the same respective line as said At4g15670, and preferably the activity is increased non-targeted, or
[46753] (b) a polypeptide comprising a polypeptide, a consensus sequence or at least a polypeptide motif as shown in the respective line in column 5 of Table II or in column 8 of Table IV, application no. 7, respectively, and being depicted in the same respective line as said At4g15670, or a functional equivalent or a homolog thereof as depicted in column 8 of Table II, application no. 7, preferably a homolog or functional equivalent as depicted in column 8 of Table II B, application no. 7, and being depicted in the same respective line as said At4g15670, and preferably the activity is increased non-targeted, whereby the respective line disclose in column 7 the fine chemical alpha-tocopherol.

[46754] Accordingly, in one embodiment, the molecule which activity is to be increased in the process of the invention is the gene product with an activity as a “monothiol glutaredoxin”, preferably it is the molecule of section (a) or (b) of this paragraph.

[46755] In particular, it was observed that in plants, especially in Arabidopsis thaliana, increasing or generating the activity of a gene product non-targeted with the activity of a “monothiol glutaredoxin”, preferably being encoded by a gene comprising the nucleic acid sequence SEQ ID NO. 3279, preferably the coding region thereof, conferred the production of or the increase in alpha-tocopherol compared with the wild type control.

[46756] The nucleic acid sequence of At4g15690 from Arabidopsis thaliana, e.g. as shown in the respective line in column 5 of Table I, application no. 7, has been published in F. And the activity of the gene product thereof is the activity of monothiol glutaredoxin.

[46757] Accordingly, in one embodiment, the process of the present invention for producing alpha-tocopherol in a non-human organism, like a microorganism or a plant or a part thereof, comprises increasing or generating the activity of a gene product with the activity of a gene product conferring the activity of “monothiol glutaredoxin”, especially from Arabidopsis thaliana or its functional equivalent or its homolog, e.g. the increase of
[46758] (a) a gene product of a gene comprising the nucleic acid molecule as shown in the respective line in column 5 of Table I (whereby the respective line disclose in column 7 the fine chemical alpha-tocopherol), application no. 7, preferably the coding region thereof, or a homolog or a fragment thereof, and being depicted in the same respective line as said At4g15690, or a functional equivalent or a homolog thereof as shown in column 8 of Table I, application no. 7, preferably the coding region thereof, particularly a homolog or functional equivalent as shown in column 8 of Table I B, application no. 7, and being depicted in the same respective line as said At4g15690, and preferably the activity is increased non-targeted, or
[46759] (b) a polypeptide comprising a polypeptide, a consensus sequence or at least a polypeptide motif as shown in the respective line in column 5 of Table II or in column 8 of Table IV, application no. 7, respectively, and being depicted in the same respective line as said At4g15690, or a functional equivalent or a homolog thereof as depicted in column 8 of Table II, application no. 7, preferably a homolog or functional equivalent as depicted in column 8 of Table II B, application no. 7, and being depicted in the same respective line as said At4g15690, and preferably the activity is increased non-targeted, whereby the respective line disclose in column 7 the fine chemical alpha-tocopherol.

[46760] Accordingly, in one embodiment, the molecule which activity is to be increased in the process of the invention is the gene product with an activity as a “monothiol glutaredoxin”, preferably it is the molecule of section (a) or (b) of this paragraph.

[46761] In particular, it was observed that in plants, especially in Arabidopsis thaliana, increasing or generating the activity of a gene product non-targeted with the activity of a “monothiol glutaredoxin”, preferably being encoded by a gene comprising the nucleic acid sequence SEQ ID NO. 23844, preferably the coding region thereof, conferred the production of or the increase in alpha-tocopherol compared with the wild type control.

[46762] The nucleic acid sequence of At4g26080 from Arabidopsis thaliana, e.g. as shown in the respective line in column 5 of Table I, application no. 7, has been published in F. And the activity of the gene product thereof is the activity of protein phosphatase.

[46763] Accordingly, in one embodiment, the process of the present invention for producing alpha-tocopherol in a non-human organism, like a microorganism or a plant or a part thereof, comprises increasing or generating the activity of a gene product with the activity of a gene product conferring the activity of “protein phosphatase”, especially from Arabidopsis thaliana or its functional equivalent or its homolog, e.g. the increase of
[46764] (a) a gene product of a gene comprising the nucleic acid molecule as shown in the respective line in column 5 of Table I (whereby the respective line disclose in column 7 the fine chemical alpha-tocopherol), application no. 7, preferably the coding region thereof, or a homolog or a fragment thereof, and being depicted in the same respective line as said At4g26080, or a functional equivalent or a homolog thereof as shown in column 8 of Table I, application no. 7, preferably the coding region thereof, particularly a homolog or functional equivalent as shown in column 8 of Table I B, application no. 7, and being depicted in the same respective line as said At4g26080, and preferably the activity is increased non-targeted, or
[46765] (b) a polypeptide comprising a polypeptide, a consensus sequence or at least a polypeptide motif as shown in the respective line in column 5 of Table II or in column 8 of Table IV, application no. 7, respectively, and being depicted in the same respective line as said At4g26080, or a functional equivalent or a homolog thereof as depicted in column 8 of Table II, application no. 7, preferably a homolog or functional equivalent as depicted in column 8 of Table II B, application no. 7, and being depicted in the same respective line as said At4g26080, and preferably the activity is increased non-targeted, whereby the respective line disclose in column 7 the fine chemical alpha-tocopherol.

[46766] Accordingly, in one embodiment, the molecule which activity is to be increased in the process of the invention is the gene product with an activity as a “protein phosphatase”, preferably it is the molecule of section (a) or (b) of this paragraph.

[46767] In particular, it was observed that in plants, especially in Arabidopsis thaliana, increasing or generating the activity of a gene product non-targeted with the activity of a “protein phosphatase”, preferably being encoded by a gene comprising the nucleic acid sequence SEQ ID NO. 68849, preferably the coding region thereof, conferred the production of or the increase in alpha-tocopherol compared with the wild type control.

[46768] The nucleic acid sequence of At4g34160 from Arabidopsis thaliana, e.g. as shown in the respective line in column 5 of Table I, application no. 7, has been published in F. And the activity of the gene product thereof is the activity of cyclin D .

[46769] Accordingly, in one embodiment, the process of the present invention for producing alpha-tocopherol in a non-human organism, like a microorganism or a plant or a part thereof, comprises increasing or generating the activity of a gene product with the activity of a gene product conferring the activity of “cyclin D”, especially from Arabidopsis thaliana or its functional equivalent or its homolog, e.g. the increase of
[46770] (a) a gene product of a gene comprising the nucleic acid molecule as shown in the respective line in column 5 of Table I (whereby the respective line disclose in column 7 the fine chemical alpha-tocopherol), application no. 7, preferably the coding region thereof, or a homolog or a fragment thereof, and being depicted in the same respective line as said At4g34160, or a functional equivalent or a homolog thereof as shown in column 8 of Table I, application no. 7, preferably the coding region thereof, particularly a homolog or functional equivalent as shown in column 8 of Table I B, application no. 7, and being depicted in the same respective line as said At4g34160, and preferably the activity is increased non-targeted, or
[46771] (b) a polypeptide comprising a polypeptide, a consensus sequence or at least a polypeptide motif as shown in the respective line in column 5 of Table II or in column 8 of Table IV, application no. 7, respectively, and being depicted in the same respective line as said At4g34160, or a functional equivalent or a homolog thereof as depicted in column 8 of Table II, application no. 7, preferably a homolog or functional equivalent as depicted in column 8 of Table II B, application no. 7, and being depicted in the same respective line as said At4g34160, and preferably the activity is increased non-targeted, whereby the respective line disclose in column 7 the fine chemical alpha-tocopherol.

[46772] Accordingly, in one embodiment, the molecule which activity is to be increased in the process of the invention is the gene product with an activity as a “cyclin D”, preferably it is the molecule of section (a) or (b) of this paragraph.

[46773] In particular, it was observed that in plants, especially in Arabidopsis thaliana, increasing or generating the activity of a gene product non-targeted with the activity of a “cyclin D”, preferably being encoded by a gene comprising the nucleic acid sequence SEQ ID NO. 24311, preferably the coding region thereof, conferred the production of or the increase in alpha-tocopherol compared with the wild type control.

[46774] The nucleic acid sequence of At4g35310 from Arabidopsis thaliana, e.g. as shown in the respective line in column 5 of Table I, application no. 7, has been published in F. And the activity of the gene product thereof is the activity of calcium-dependent protein kinase.

[46775] Accordingly, in one embodiment, the process of the present invention for producing alpha-tocopherol in a non-human organism, like a microorganism or a plant or a part thereof, comprises increasing or generating the activity of a gene product with the activity of a gene product conferring the activity of “calcium-dependent protein kinase”, especially from Arabidopsis thaliana or its functional equivalent or its homolog, e.g. the increase of
[46776] (a) a gene product of a gene comprising the nucleic acid molecule as shown in the respective line in column 5 of Table I (whereby the respective line disclose in column 7 the fine chemical alpha-tocopherol), application no. 7, preferably the coding region thereof, or a homolog or a fragment thereof, and being depicted in the same respective line as said At4g35310, or a functional equivalent or a homolog thereof as shown in column 8 of Table I, application no. 7, preferably the coding region thereof, particularly a homolog or functional equivalent as shown in column 8 of Table I B, application no. 7, and being depicted in the same respective line as said At4g35310, and preferably the activity is increased non-targeted, or
[46777] (b) a polypeptide comprising a polypeptide, a consensus sequence or at least a polypeptide motif as shown in the respective line in column 5 of Table II or in column 8 of Table IV, application no. 7, respectively, and being depicted in the same respective line as said At4g35310, or a functional equivalent or a homolog thereof as depicted in column 8 of Table II, application no. 7, preferably a homolog or functional equivalent as depicted in column 8 of Table II B, application no. 7, and being depicted in the same respective line as said At4g35310, and preferably the activity is increased non-targeted, whereby the respective line disclose in column 7 the fine chemical alpha-tocopherol.

[46778] Accordingly, in one embodiment, the molecule which activity is to be increased in the process of the invention is the gene product with an activity as a “calcium-dependent protein kinase”, preferably it is the molecule of section (a) or (b) of this paragraph.

[46779] In particular, it was observed that in plants, especially in Arabidopsis thaliana, increasing or generating the activity of a gene product non-targeted with the activity of a “calcium-dependent protein kinase”, preferably being encoded by a gene comprising the nucleic acid sequence SEQ ID NO. 4348, preferably the coding region thereof, conferred the production of or the increase in alpha-tocopherol compared with the wild type control.

[46780] The nucleic acid sequence of At4g35310 from Arabidopsis thaliana, e.g. as shown in the respective line in column 5 of Table I, application no. 7, has been published in F. And the activity of the gene product thereof is the activity of calcium-dependent protein kinase.

[46781] Accordingly, in one embodiment, the process of the present invention for producing gamma-tocopherol in a non-human organism, like a microorganism or a plant or a part thereof, comprises increasing or generating the activity of a gene product with the activity of a gene product conferring the activity of “calcium-dependent protein kinase”, especially from Arabidopsis thaliana or its functional equivalent or its homolog, e.g. the increase of
[46782] (a) a gene product of a gene comprising the nucleic acid molecule as shown in the respective line in column 5 of Table I (whereby the respective line disclose in column 7 the fine chemical gamma-tocopherol), application no. 7, preferably the coding region thereof, or a homolog or a fragment thereof, and being depicted in the same respective line as said At4g35310, or a functional equivalent or a homolog thereof as shown in column 8 of Table I, application no. 7, preferably the coding region thereof, particularly a homolog or functional equivalent as shown in column 8 of Table I B, application no. 7, and being depicted in the same respective line as said At4g35310, and preferably the activity is increased non-targeted, or
[46783] (b) a polypeptide comprising a polypeptide, a consensus sequence or at least a polypeptide motif as shown in the respective line in column 5 of Table II or in column 8 of Table IV, application no. 7, respectively, and being depicted in the same respective line as said At4g35310, or a functional equivalent or a homolog thereof as depicted in column 8 of Table II, application no. 7, preferably a homolog or functional equivalent as depicted in column 8 of Table II B, application no. 7, and being depicted in the same respective line as said At4g35310, and preferably the activity is increased non-targeted, whereby the respective line disclose in column 7 the fine chemical gamma-tocopherol.

[46784] Accordingly, in one embodiment, the molecule which activity is to be increased in the process of the invention is the gene product with an activity as a “calcium-dependent protein kinase”, preferably it is the molecule of section (a) or (b) of this paragraph.

[46785] In particular, it was observed that in plants, especially in Arabidopsis thaliana, increasing or generating the activity of a gene product non-targeted with the activity of a “calcium-dependent protein kinase”, preferably being encoded by a gene comprising the nucleic acid sequence SEQ ID NO. 4348, preferably the coding region thereof, conferred the production of or the increase in gamma-tocopherol compared with the wild type control.

[46786] The nucleic acid sequence of At5g60110 from Arabidopsis thaliana, e.g. as shown in the respective line in column 5 of Table I, application no. 7, has been published in F. And the activity of the gene product thereof is the activity of RNA-binding protein.

[46787] Accordingly, in one embodiment, the process of the present invention for producing alpha-tocopherol in a non-human organism, like a microorganism or a plant or a part thereof, comprises increasing or generating the activity of a gene product with the activity of a gene product conferring the activity of “RNA-binding protein”, especially from Arabidopsis thaliana or its functional equivalent or its homolog, e.g. the increase of
[46788] (a) a gene product of a gene comprising the nucleic acid molecule as shown in the respective line in column 5 of Table I (whereby the respective line disclose in column 7 the fine chemical alpha-tocopherol), application no. 7, preferably the coding region thereof, or a homolog or a fragment thereof, and being depicted in the same respective line as said At5g60110, or a functional equivalent or a homolog thereof as shown in column 8 of Table I, application no. 7, preferably the coding region thereof, particularly a homolog or functional equivalent as shown in column 8 of Table I B, application no. 7, and being depicted in the same respective line as said At5g60110, and preferably the activity is increased non-targeted, or
[46789] (b) a polypeptide comprising a polypeptide, a consensus sequence or at least a polypeptide motif as shown in the respective line in column 5 of Table II or in column 8 of Table IV, application no. 7, respectively, and being depicted in the same respective line as said At5g60110, or a functional equivalent or a homolog thereof as depicted in column 8 of Table II, application no. 7, preferably a homolog or functional equivalent as depicted in column 8 of Table II B, application no. 7, and being depicted in the same respective line as said At5g60110, and preferably the activity is increased non-targeted, whereby the respective line disclose in column 7 the fine chemical alpha-tocopherol.

[46790] Accordingly, in one embodiment, the molecule which activity is to be increased in the process of the invention is the gene product with an activity as a “RNA-binding protein”, preferably it is the molecule of section (a) or (b) of this paragraph.

[46791] In particular, it was observed that in plants, especially in Arabidopsis thaliana, increasing or generating the activity of a gene product non-targeted with the activity of a “RNA-binding protein”, preferably being encoded by a gene comprising the nucleic acid sequence SEQ ID NO. 70006, preferably the coding region thereof, conferred the production of or the increase in alpha-tocopherol compared with the wild type control.

[46792] The nucleic acid sequence of At5g60110 from Arabidopsis thaliana, e.g. as shown in the respective line in column 5 of Table I, application no. 7, has been published in F. And the activity of the gene product thereof is the activity of RNA-binding protein.

[46793] Accordingly, in one embodiment, the process of the present invention for producing gamma-tocopherol in a non-human organism, like a microorganism or a plant or a part thereof, comprises increasing or generating the activity of a gene product with the activity of a gene product conferring the activity of “RNA-binding protein”, especially from Arabidopsis thaliana or its functional equivalent or its homolog, e.g. the increase of
[46794] (a) a gene product of a gene comprising the nucleic acid molecule as shown in the respective line in column 5 of Table I (whereby the respective line disclose in column 7 the fine chemical gamma-tocopherol), application no. 7, preferably the coding region thereof, or a homolog or a fragment thereof, and being depicted in the same respective line as said At5g60110, or a functional equivalent or a homolog thereof as shown in column 8 of Table I, application no. 7, preferably the coding region thereof, particularly a homolog or functional equivalent as shown in column 8 of Table I B, application no. 7, and being depicted in the same respective line as said At5g60110, and preferably the activity is increased non-targeted, or
[46795] (b) a polypeptide comprising a polypeptide, a consensus sequence or at least a polypeptide motif as shown in the respective line in column 5 of Table II or in column 8 of Table IV, application no. 7, respectively, and being depicted in the same respective line as said At5g60110, or a functional equivalent or a homolog thereof as depicted in column 8 of Table II, application no. 7, preferably a homolog or functional equivalent as depicted in column 8 of Table II B, application no. 7, and being depicted in the same respective line as said At5g60110, and preferably the activity is increased non-targeted, whereby the respective line disclose in column 7 the fine chemical gamma-tocopherol.

[46796] Accordingly, in one embodiment, the molecule which activity is to be increased in the process of the invention is the gene product with an activity as a “RNA-binding protein”, preferably it is the molecule of section (a) or (b) of this paragraph.

[46797] In particular, it was observed that in plants, especially in Arabidopsis thaliana, increasing or generating the activity of a gene product non-targeted with the activity of a “RNA-binding protein”, preferably being encoded by a gene comprising the nucleic acid sequence SEQ ID NO. 70006, preferably the coding region thereof, conferred the production of or the increase in gamma-tocopherol compared with the wild type control.

[46798] The nucleic acid sequence of At5g64920 from Arabidopsis thaliana, e.g. as shown in the respective line in column 5 of Table I, application no. 7, has been published in F. And the activity of the gene product thereof is the activity of zinc finger protein.

[46799] Accordingly, in one embodiment, the process of the present invention for producing gamma-tocopherol in a non-human organism, like a microorganism or a plant or a part thereof, comprises increasing or generating the activity of a gene product with the activity of a gene product conferring the activity of “zinc finger protein”, especially from Arabidopsis thaliana or its functional equivalent or its homolog, e.g. the increase of
[46800] (a) a gene product of a gene comprising the nucleic acid molecule as shown in the respective line in column 5 of Table I (whereby the respective line disclose in column 7 the fine chemical gamma-tocopherol), application no. 7, preferably the coding region thereof, or a homolog or a fragment thereof, and being depicted in the same respective line as said At5g64920, or a functional equivalent or a homolog thereof as shown in column 8 of Table I, application no. 7, preferably the coding region thereof, particularly a homolog or functional equivalent as shown in column 8 of Table I B, application no. 7, and being depicted in the same respective line as said At5g64920, and preferably the activity is increased non-targeted, or
[46801] (b) a polypeptide comprising a polypeptide, a consensus sequence or at least a polypeptide motif as shown in the respective line in column 5 of Table II or in column 8 of Table IV, application no. 7, respectively, and being depicted in the same respective line as said At5g64920, or a functional equivalent or a homolog thereof as depicted in column 8 of Table II, application no. 7, preferably a homolog or functional equivalent as depicted in column 8 of Table II B, application no. 7, and being depicted in the same respective line as said At5g64920, and preferably the activity is increased non-targeted, whereby the respective line disclose in column 7 the fine chemical gamma-tocopherol.

[46802] Accordingly, in one embodiment, the molecule which activity is to be increased in the process of the invention is the gene product with an activity as a “zinc finger protein”, preferably it is the molecule of section (a) or (b) of this paragraph.

[46803] In particular, it was observed that in plants, especially in Arabidopsis thaliana, increasing or generating the activity of a gene product non-targeted with the activity of a “zinc finger protein”, preferably being encoded by a gene comprising the nucleic acid sequence SEQ ID NO. 5493, preferably the coding region thereof, conferred the production of or the increase in gamma-tocopherol compared with the wild type control.

[46804] The nucleic acid sequence of AvinDRAFT_{—}3107 from Azotobacter vinelandii, e.g. as shown in the respective line in column 5 of Table I, application no. 7, has been published in D. And the activity of the gene product thereof is the activity of NAD-dependent epimerase/dehydratase.

[46805] Accordingly, in one embodiment, the process of the present invention for producing gamma-tocopherol in a non-human organism, like a microorganism or a plant or a part thereof, comprises increasing or generating the activity of a gene product with the activity of a gene product conferring the activity of “NAD-dependent epimerase/dehydratase”, especially from Azotobacter vinelandii or its functional equivalent or its homolog, e.g. the increase of
[46806] (a) a gene product of a gene comprising the nucleic acid molecule as shown in the respective line in column 5 of Table I (whereby the respective line disclose in column 7 the fine chemical gamma-tocopherol), application no. 7, preferably the coding region thereof, or a homolog or a fragment thereof, and being depicted in the same respective line as said AvinDRAFT_{—}3107, or a functional equivalent or a homolog thereof as shown in column 8 of Table I, application no. 7, preferably the coding region thereof, particularly a homolog or functional equivalent as shown in column 8 of Table I B, application no. 7, and being depicted in the same respective line as said AvinDRAFT_{—}3107, and preferably the activity is increased non-targeted, or
[46807] (b) a polypeptide comprising a polypeptide, a consensus sequence or at least a polypeptide motif as shown in the respective line in column 5 of Table II or in column 8 of Table IV, application no. 7, respectively, and being depicted in the same respective line as said AvinDRAFT_{—}3107, or a functional equivalent or a homolog thereof as depicted in column 8 of Table II, application no. 7, preferably a homolog or functional equivalent as depicted in column 8 of Table II B, application no. 7, and being depicted in the same respective line as said AvinDRAFT_{—}3107, and preferably the activity is increased non-targeted, whereby the respective line disclose in column 7 the fine chemical gamma-tocopherol.

[46808] Accordingly, in one embodiment, the molecule which activity is to be increased in the process of the invention is the gene product with an activity as a “NAD-dependent epimerase/dehydratase”, preferably it is the molecule of section (a) or (b) of this paragraph.

[46809] In particular, it was observed that in plants, especially in Arabidopsis thaliana, increasing or generating the activity of a gene product non-targeted with the activity of a “NAD-dependent epimerase/dehydratase”, preferably being encoded by a gene comprising the nucleic acid sequence SEQ ID NO. 110651, preferably the coding region thereof, conferred the production of or the increase in gamma-tocopherol compared with the wild type control.

[46810] The nucleic acid sequence of AvinDRAFT_{—}3209 from Azotobacter vinelandii, e.g. as shown in the respective line in column 5 of Table I, application no. 7, has been published in D. And the activity of the gene product thereof is the activity of transcriptional regulator.

[46811] Accordingly, in one embodiment, the process of the present invention for producing gamma-tocopherol in a non-human organism, like a microorganism or a plant or a part thereof, comprises increasing or generating the activity of a gene product with the activity of a gene product conferring the activity of “transcriptional regulator”, especially from Azotobacter vinelandii or its functional equivalent or its homolog, e.g. the increase of
[46812] (a) a gene product of a gene comprising the nucleic acid molecule as shown in the respective line in column 5 of Table I (whereby the respective line disclose in column 7 the fine chemical gamma-tocopherol), application no. 7, preferably the coding region thereof, or a homolog or a fragment thereof, and being depicted in the same respective line as said AvinDRAFT_{—}3209, or a functional equivalent or a homolog thereof as shown in column 8 of Table I, application no. 7, preferably the coding region thereof, particularly a homolog or functional equivalent as shown in column 8 of Table I B, application no. 7, and being depicted in the same respective line as said AvinDRAFT_{—}3209, and preferably the activity is increased non-targeted, or
[46813] (b) a polypeptide comprising a polypeptide, a consensus sequence or at least a polypeptide motif as shown in the respective line in column 5 of Table II or in column 8 of Table IV, application no. 7, respectively, and being depicted in the same respective line as said AvinDRAFT_{—}3209, or a functional equivalent or a homolog thereof as depicted in column 8 of Table II, application no. 7, preferably a homolog or functional equivalent as depicted in column 8 of Table II B, application no. 7, and being depicted in the same respective line as said AvinDRAFT_{—}3209, and preferably the activity is increased non-targeted, whereby the respective line disclose in column 7 the fine chemical gamma-tocopherol.

[46814] Accordingly, in one embodiment, the molecule which activity is to be increased in the process of the invention is the gene product with an activity as a “transcriptional regulator”, preferably it is the molecule of section (a) or (b) of this paragraph.

[46815] In particular, it was observed that in plants, especially in Arabidopsis thaliana, increasing or generating the activity of a gene product non-targeted with the activity of a “transcriptional regulator”, preferably being encoded by a gene comprising the nucleic acid sequence SEQ ID NO. 29286, preferably the coding region thereof, conferred the production of or the increase in gamma-tocopherol compared with the wild type control.

[46816] The nucleic acid sequence of AvinDRAFT_{—}3577 from Azotobacter vinelandii, e.g. as shown in the respective line in column 5 of Table I, application no. 7, has been published in D. And the activity of the gene product thereof is the activity of ThiF family protein.

[46817] Accordingly, in one embodiment, the process of the present invention for producing alpha-tocopherol in a non-human organism, like a microorganism or a plant or a part thereof, comprises increasing or generating the activity of a gene product with the activity of a gene product conferring the activity of “ThiF family protein”, especially from Azotobacter vinelandii or its functional equivalent or its homolog, e.g. the increase of
[46818] (a) a gene product of a gene comprising the nucleic acid molecule as shown in the respective line in column 5 of Table I (whereby the respective line disclose in column 7 the fine chemical alpha-tocopherol), application no. 7, preferably the coding region thereof, or a homolog or a fragment thereof, and being depicted in the same respective line as said AvinDRAFT_{—}3577, or a functional equivalent or a homolog thereof as shown in column 8 of Table I, application no. 7, preferably the coding region thereof, particularly a homolog or functional equivalent as shown in column 8 of Table I B, application no. 7, and being depicted in the same respective line as said AvinDRAFT_{—}3577, and preferably the activity is increased non-targeted, or
[46819] (b) a polypeptide comprising a polypeptide, a consensus sequence or at least a polypeptide motif as shown in the respective line in column 5 of Table II or in column 8 of Table IV, application no. 7, respectively, and being depicted in the same respective line as said AvinDRAFT_{—}3577, or a functional equivalent or a homolog thereof as depicted in column 8 of Table II, application no. 7, preferably a homolog or functional equivalent as depicted in column 8 of Table II B, application no. 7, and being depicted in the same respective line as said AvinDRAFT_{—}3577, and preferably the activity is increased non-targeted, whereby the respective line disclose in column 7 the fine chemical alpha-tocopherol.

[46820] Accordingly, in one embodiment, the molecule which activity is to be increased in the process of the invention is the gene product with an activity as a “ThiF family protein”, preferably it is the molecule of section (a) or (b) of this paragraph.

[46821] In particular, it was observed that in plants, especially in Arabidopsis thaliana, increasing or generating the activity of a gene product non-targeted with the activity of a “ThiF family protein”, preferably being encoded by a gene comprising the nucleic acid sequence SEQ ID NO. 111155, preferably the coding region thereof, conferred the production of or the increase in alpha-tocopherol compared with the wild type control.

[46822] The nucleic acid sequence of AvinDRAFT_{—}4847 from Azotobacter vinelandii, e.g. as shown in the respective line in column 5 of Table I, application no. 7, has been published in D. And the activity of the gene product thereof is the activity of isopropylmalate isomerase large subunit.

[46823] Accordingly, in one embodiment, the process of the present invention for producing alpha-tocopherol in a non-human organism, like a microorganism or a plant or a part thereof, comprises increasing or generating the activity of a gene product with the activity of a gene product conferring the activity of “isopropylmalate isomerase large subunit”, especially from Azotobacter vinelandii or its functional equivalent or its homolog, e.g. the increase of
[46824] (a) a gene product of a gene comprising the nucleic acid molecule as shown in the respective line in column 5 of Table I (whereby the respective line disclose in column 7 the fine chemical alpha-tocopherol), application no. 7, preferably the coding region thereof, or a homolog or a fragment thereof, and being depicted in the same respective line as said AvinDRAFT_{—}4847, or a functional equivalent or a homolog thereof as shown in column 8 of Table I, application no. 7, preferably the coding region thereof, particularly a homolog or functional equivalent as shown in column 8 of Table I B, application no. 7, and being depicted in the same respective line as said AvinDRAFT_{—}4847, and preferably the activity is increased non-targeted, or
[46825] (b) a polypeptide comprising a polypeptide, a consensus sequence or at least a polypeptide motif as shown in the respective line in column 5 of Table II or in column 8 of Table IV, application no. 7, respectively, and being depicted in the same respective line as said AvinDRAFT_{—}4847, or a functional equivalent or a homolog thereof as depicted in column 8 of Table II, application no. 7, preferably a homolog or functional equivalent as depicted in column 8 of Table II B, application no. 7, and being depicted in the same respective line as said AvinDRAFT_{—}4847, and preferably the activity is increased non-targeted, whereby the respective line disclose in column 7 the fine chemical alpha-tocopherol.

[46826] Accordingly, in one embodiment, the molecule which activity is to be increased in the process of the invention is the gene product with an activity as a “isopropylmalate isomerase large subunit”, preferably it is the molecule of section (a) or (b) of this paragraph.

[46827] In particular, it was observed that in plants, especially in Arabidopsis thaliana, increasing or generating the activity of a gene product non-targeted with the activity of a “isopropylmalate isomerase large subunit”, preferably being encoded by a gene comprising the nucleic acid sequence SEQ ID NO. 102941, preferably the coding region thereof, conferred the production of or the increase in alpha-tocopherol compared with the wild type control.

[46828] The nucleic acid sequence of AvinDRAFT_{—}5103 from Azotobacter vinelandii, e.g. as shown in the respective line in column 5 of Table I, application no. 7, has been published in D. And the activity of the gene product thereof is the activity of hydrolase.

[46829] Accordingly, in one embodiment, the process of the present invention for producing alpha-tocopherol in a non-human organism, like a microorganism or a plant or a part thereof, comprises increasing or generating the activity of a gene product with the activity of a gene product conferring the activity of “hydrolase”, especially from Azotobacter vinelandii or its functional equivalent or its homolog, e.g. the increase of
[46830] (a) a gene product of a gene comprising the nucleic acid molecule as shown in the respective line in column 5 of Table I (whereby the respective line disclose in column 7 the fine chemical alpha-tocopherol), application no. 7, preferably the coding region thereof, or a homolog or a fragment thereof, and being depicted in the same respective line as said AvinDRAFT_{—}5103, or a functional equivalent or a homolog thereof as shown in column 8 of Table I, application no. 7, preferably the coding region thereof, particularly a homolog or functional equivalent as shown in column 8 of Table I B, application no. 7, and being depicted in the same respective line as said AvinDRAFT_{—}5103, and preferably the activity is increased non-targeted, or
[46831] (b) a polypeptide comprising a polypeptide, a consensus sequence or at least a polypeptide motif as shown in the respective line in column 5 of Table II or in column 8 of Table IV, application no. 7, respectively, and being depicted in the same respective line as said AvinDRAFT_{—}5103, or a functional equivalent or a homolog thereof as depicted in column 8 of Table II, application no. 7, preferably a homolog or functional equivalent as depicted in column 8 of Table II B, application no. 7, and being depicted in the same respective line as said AvinDRAFT_{—}5103, and preferably the activity is increased non-targeted, whereby the respective line disclose in column 7 the fine chemical alpha-tocopherol.

[46832] Accordingly, in one embodiment, the molecule which activity is to be increased in the process of the invention is the gene product with an activity as a “hydrolase”, preferably it is the molecule of section (a) or (b) of this paragraph.

[46833] In particular, it was observed that in plants, especially in Arabidopsis thaliana, increasing or generating the activity of a gene product non-targeted with the activity of a “hydrolase”, preferably being encoded by a gene comprising the nucleic acid sequence SEQ ID NO. 6510, preferably the coding region thereof, conferred the production of or the increase in alpha-tocopherol compared with the wild type control.

[46834] The nucleic acid sequence of AvinDRAFT_{—}5103 from Azotobacter vinelandii, e.g. as shown in the respective line in column 5 of Table I, application no. 7, has been published in D. And the activity of the gene product thereof is the activity of hydrolase.

[46835] Accordingly, in one embodiment, the process of the present invention for producing gamma-tocopherol in a non-human organism, like a microorganism or a plant or a part thereof, comprises increasing or generating the activity of a gene product with the activity of a gene product conferring the activity of “hydrolase”, especially from Azotobacter vinelandii or its functional equivalent or its homolog, e.g. the increase of
[46836] (a) a gene product of a gene comprising the nucleic acid molecule as shown in the respective line in column 5 of Table I (whereby the respective line disclose in column 7 the fine chemical gamma-tocopherol), application no. 7, preferably the coding region thereof, or a homolog or a fragment thereof, and being depicted in the same respective line as said AvinDRAFT_{—}5103, or a functional equivalent or a homolog thereof as shown in column 8 of Table I, application no. 7, preferably the coding region thereof, particularly a homolog or functional equivalent as shown in column 8 of Table I B, application no. 7, and being depicted in the same respective line as said AvinDRAFT_{—}5103, and preferably the activity is increased non-targeted, or
[46837] (b) a polypeptide comprising a polypeptide, a consensus sequence or at least a polypeptide motif as shown in the respective line in column 5 of Table II or in column 8 of Table IV, application no. 7, respectively, and being depicted in the same respective line as said AvinDRAFT _{—}5103, or a functional equivalent or a homolog thereof as depicted in column 8 of Table II, application no. 7, preferably a homolog or functional equivalent as depicted in column 8 of Table II B, application no. 7, and being depicted in the same respective line as said AvinDRAFT_{—}5103, and preferably the activity is increased non-targeted, whereby the respective line disclose in column 7 the fine chemical gamma-tocopherol.

[46838] Accordingly, in one embodiment, the molecule which activity is to be increased in the process of the invention is the gene product with an activity as a “hydrolase”, preferably it is the molecule of section (a) or (b) of this paragraph.

[46839] In particular, it was observed that in plants, especially in Arabidopsis thaliana, increasing or generating the activity of a gene product non-targeted with the activity of a “hydrolase”, preferably being encoded by a gene comprising the nucleic acid sequence SEQ ID NO. 6510, preferably the coding region thereof, conferred the production of or the increase in gamma-tocopherol compared with the wild type control.

[46840] The nucleic acid sequence of AvinDRAFT_{—}6679 from Azotobacter vinelandii, e.g. as shown in the respective line in column 5 of Table I, application no. 7, has been published in D. And the activity of the gene product thereof is the activity of electron transfer flavoprotein subunit beta.

[46841] Accordingly, in one embodiment, the process of the present invention for producing gamma-tocopherol in a non-human organism, like a microorganism or a plant or a part thereof, comprises increasing or generating the activity of a gene product with the activity of a gene product conferring the activity of “electron transfer flavoprotein subunit beta”, especially from Azotobacter vinelandii or its functional equivalent or its homolog, e.g. the increase of
[46842] (a) a gene product of a gene comprising the nucleic acid molecule as shown in the respective line in column 5 of Table I (whereby the respective line disclose in column 7 the fine chemical gamma-tocopherol), application no. 7, preferably the coding region thereof, or a homolog or a fragment thereof, and being depicted in the same respective line as said AvinDRAFT_{—}6679, or a functional equivalent or a homolog thereof as shown in column 8 of Table I, application no. 7, preferably the coding region thereof, particularly a homolog or functional equivalent as shown in column 8 of Table I B, application no. 7, and being depicted in the same respective line as said AvinDRAFT_{—}6679, and preferably the activity is increased non-targeted, or
[46843] (b) a polypeptide comprising a polypeptide, a consensus sequence or at least a polypeptide motif as shown in the respective line in column 5 of Table II or in column 8 of Table IV, application no. 7, respectively, and being depicted in the same respective line as said AvinDRAFT_{—}6679, or a functional equivalent or a homolog thereof as depicted in column 8 of Table II, application no. 7, preferably a homolog or functional equivalent as depicted in column 8 of Table II B, application no. 7, and being depicted in the same respective line as said AvinDRAFT_{—}6679, and preferably the activity is increased non-targeted, whereby the respective line disclose in column 7 the fine chemical gamma-tocopherol.

[46844] Accordingly, in one embodiment, the molecule which activity is to be increased in the process of the invention is the gene product with an activity as a “electron transfer flavoprotein subunit beta”, preferably it is the molecule of section (a) or (b) of this paragraph.

[46845] In particular, it was observed that in plants, especially in Arabidopsis thaliana, increasing or generating the activity of a gene product non-targeted with the activity of a “electron transfer flavoprotein subunit beta”, preferably being encoded by a gene comprising the nucleic acid sequence SEQ ID NO. 74729, preferably the coding region thereof, conferred the production of or the increase in gamma-tocopherol compared with the wild type control.

[46846] The nucleic acid sequence of B0004 from Escherichia coli, e.g. as shown in the respective line in column 5 of Table I, application no. 7, has been published in B. And the activity of the gene product thereof is the activity of threonine synthase.

[46847] Accordingly, in one embodiment, the process of the present invention for producing gamma-tocopherol in a non-human organism, like a microorganism or a plant or a part thereof, comprises increasing or generating the activity of a gene product with the activity of a gene product conferring the activity of “threonine synthase”, especially from Escherichia coli or its functional equivalent or its homolog, e.g. the increase of
[46848] (a) a gene product of a gene comprising the nucleic acid molecule as shown in the respective line in column 5 of Table I (whereby the respective line disclose in column 7 the fine chemical gamma-tocopherol), application no. 7, preferably the coding region thereof, or a homolog or a fragment thereof, and being depicted in the same respective line as said B0004, or a functional equivalent or a homolog thereof as shown in column 8 of Table I, application no. 7, preferably the coding region thereof, particularly a homolog or functional equivalent as shown in column 8 of Table I B, application no. 7, and being depicted in the same respective line as said B0004, and preferably the activity is increased plastidic, or
[46849] (b) a polypeptide comprising a polypeptide, a consensus sequence or at least a polypeptide motif as shown in the respective line in column 5 of Table II or in column 8 of Table IV, application no. 7, respectively, and being depicted in the same respective line as said B0004, or a functional equivalent or a homolog thereof as depicted in column 8 of Table II, application no. 7, preferably a homolog or functional equivalent as depicted in column 8 of Table II B, application no. 7, and being depicted in the same respective line as said B0004, and preferably the activity is increased plastidic, whereby the respective line disclose in column 7 the fine chemical gamma-tocopherol.

[46850] Accordingly, in one embodiment, the molecule which activity is to be increased in the process of the invention is the gene product with an activity as a “threonine synthase”, preferably it is the molecule of section (a) or (b) of this paragraph.

[46851] In particular, it was observed that in plants, especially in Arabidopsis thaliana, increasing or generating the activity of a gene product plastidic with the activity of a “threonine synthase”, preferably being encoded by a gene comprising the nucleic acid sequence SEQ ID NO. 34889, preferably the coding region thereof, conferred the production of or the increase in gamma-tocopherol compared with the wild type control.

[46852] The nucleic acid sequence of B0124 from Escherichia coli, e.g. as shown in the respective line in column 5 of Table I, application no. 7, has been published in B. And the activity of the gene product thereof is the activity of glucose dehydrogenase.

[46853] Accordingly, in one embodiment, the process of the present invention for producing alpha-tocopherol in a non-human organism, like a microorganism or a plant or a part thereof, comprises increasing or generating the activity of a gene product with the activity of a gene product conferring the activity of “glucose dehydrogenase”, especially from Escherichia coli or its functional equivalent or its homolog, e.g. the increase of
[46854] (a) a gene product of a gene comprising the nucleic acid molecule as shown in the respective line in column 5 of Table I (whereby the respective line disclose in column 7 the fine chemical alpha-tocopherol), application no. 7, preferably the coding region thereof, or a homolog or a fragment thereof, and being depicted in the same respective line as said B0124, or a functional equivalent or a homolog thereof as shown in column 8 of Table I, application no. 7, preferably the coding region thereof, particularly a homolog or functional equivalent as shown in column 8 of Table I B, application no. 7, and being depicted in the same respective line as said B0124, and preferably the activity is increased non-targeted, or
[46855] (b) a polypeptide comprising a polypeptide, a consensus sequence or at least a polypeptide motif as shown in the respective line in column 5 of Table II or in column 8 of Table IV, application no. 7, respectively, and being depicted in the same respective line as said B0124, or a functional equivalent or a homolog thereof as depicted in column 8 of Table II, application no. 7, preferably a homolog or functional equivalent as depicted in column 8 of Table II B, application no. 7, and being depicted in the same respective line as said B0124, and preferably the activity is increased non-targeted, whereby the respective line disclose in column 7 the fine chemical alpha-tocopherol.

[46856] Accordingly, in one embodiment, the molecule which activity is to be increased in the process of the invention is the gene product with an activity as a “glucose dehydrogenase”, preferably it is the molecule of section (a) or (b) of this paragraph.

[46857] In particular, it was observed that in plants, especially in Arabidopsis thaliana, increasing or generating the activity of a gene product non-targeted with the activity of a “glucose dehydrogenase”, preferably being encoded by a gene comprising the nucleic acid sequence SEQ ID NO. 35482, preferably the coding region thereof, conferred the production of or the increase in alpha-tocopherol compared with the wild type control.

[46858] The nucleic acid sequence of B0124 from Escherichia coli, e.g. as shown in the respective line in column 5 of Table I, application no. 7, has been published in B. And the activity of the gene product thereof is the activity of glucose dehydrogenase.

[46859] Accordingly, in one embodiment, the process of the present invention for producing gamma-tocopherol in a non-human organism, like a microorganism or a plant or a part thereof, comprises increasing or generating the activity of a gene product with the activity of a gene product conferring the activity of “glucose dehydrogenase”, especially from Escherichia coli or its functional equivalent or its homolog, e.g. the increase of
[46860] (a) a gene product of a gene comprising the nucleic acid molecule as shown in the respective line in column 5 of Table I (whereby the respective line disclose in column 7 the fine chemical gamma-tocopherol), application no. 7, preferably the coding region thereof, or a homolog or a fragment thereof, and being depicted in the same respective line as said B0124, or a functional equivalent or a homolog thereof as shown in column 8 of Table I, application no. 7, preferably the coding region thereof, particularly a homolog or functional equivalent as shown in column 8 of Table I B, application no. 7, and being depicted in the same respective line as said B0124, and preferably the activity is increased non-targeted, or
[46861] (b) a polypeptide comprising a polypeptide, a consensus sequence or at least a polypeptide motif as shown in the respective line in column 5 of Table II or in column 8 of Table IV, application no. 7, respectively, and being depicted in the same respective line as said B0124, or a functional equivalent or a homolog thereof as depicted in column 8 of Table II, application no. 7, preferably a homolog or functional equivalent as depicted in column 8 of Table II B, application no. 7, and being depicted in the same respective line as said B0124, and preferably the activity is increased non-targeted, whereby the respective line disclose in column 7 the fine chemical gamma-tocopherol.

[46862] Accordingly, in one embodiment, the molecule which activity is to be increased in the process of the invention is the gene product with an activity as a “glucose dehydrogenase”, preferably it is the molecule of section (a) or (b) of this paragraph.

[46863] In particular, it was observed that in plants, especially in Arabidopsis thaliana, increasing or generating the activity of a gene product non-targeted with the activity of a “glucose dehydrogenase”, preferably being encoded by a gene comprising the nucleic acid sequence SEQ ID NO. 35482, preferably the coding region thereof, conferred the production of or the increase in gamma-tocopherol compared with the wild type control.

[46864] The nucleic acid sequence of B0161 from Escherichia coli, e.g. as shown in the respective line in column 5 of Table I, application no. 7, has been published in B. And the activity of the gene product thereof is the activity of serine protease.

[46865] Accordingly, in one embodiment, the process of the present invention for producing gamma-tocopherol in a non-human organism, like a microorganism or a plant or a part thereof, comprises increasing or generating the activity of a gene product with the activity of a gene product conferring the activity of “serine protease”, especially from Escherichia coli or its functional equivalent or its homolog, e.g. the increase of
[46866] (a) a gene product of a gene comprising the nucleic acid molecule as shown in the respective line in column 5 of Table I (whereby the respective line disclose in column 7 the fine chemical gamma-tocopherol), application no. 7, preferably the coding region thereof, or a homolog or a fragment thereof, and being depicted in the same respective line as said B0161, or a functional equivalent or a homolog thereof as shown in column 8 of Table I, application no. 7, preferably the coding region thereof, particularly a homolog or functional equivalent as shown in column 8 of Table I B, application no. 7, and being depicted in the same respective line as said B0161, and preferably the activity is increased non-targeted, or
[46867] (b) a polypeptide comprising a polypeptide, a consensus sequence or at least a polypeptide motif as shown in the respective line in column 5 of Table II or in column 8 of Table IV, application no. 7, respectively, and being depicted in the same respective line as said B0161, or a functional equivalent or a homolog thereof as depicted in column 8 of Table II, application no. 7, preferably a homolog or functional equivalent as depicted in column 8 of Table II B, application no. 7, and being depicted in the same respective line as said B0161, and preferably the activity is increased non-targeted, whereby the respective line disclose in column 7 the fine chemical gamma-tocopherol.

[46868] Accordingly, in one embodiment, the molecule which activity is to be increased in the process of the invention is the gene product with an activity as a “serine protease”, preferably it is the molecule of section (a) or (b) of this paragraph.

[46869] In particular, it was observed that in plants, especially in Arabidopsis thaliana, increasing or generating the activity of a gene product non-targeted with the activity of a “serine protease”, preferably being encoded by a gene comprising the nucleic acid sequence SEQ ID NO. 7081, preferably the coding region thereof, conferred the production of or the increase in gamma-tocopherol compared with the wild type control.

[46870] The nucleic acid sequence of B0421 from Escherichia coli, e.g. as shown in the respective line in column 5 of Table I, application no. 7, has been published in B. And the activity of the gene product thereof is the activity of geranyltranstransferase.

[46871] Accordingly, in one embodiment, the process of the present invention for producing alpha-tocopherol in a non-human organism, like a microorganism or a plant or a part thereof, comprises increasing or generating the activity of a gene product with the activity of a gene product conferring the activity of “geranyltranstransferase”, especially from Escherichia coli or its functional equivalent or its homolog, e.g. the increase of
[46872] (a) a gene product of a gene comprising the nucleic acid molecule as shown in the respective line in column 5 of Table I (whereby the respective line disclose in column 7 the fine chemical alpha-tocopherol), application no. 7, preferably the coding region thereof, or a homolog or a fragment thereof, and being depicted in the same respective line as said B0421, or a functional equivalent or a homolog thereof as shown in column 8 of Table I, application no. 7, preferably the coding region thereof, particularly a homolog or functional equivalent as shown in column 8 of Table I B, application no. 7, and being depicted in the same respective line as said B0421, and preferably the activity is increased non-targeted, or
[46873] (b) a polypeptide comprising a polypeptide, a consensus sequence or at least a polypeptide motif as shown in the respective line in column 5 of Table II or in column 8 of Table IV, application no. 7, respectively, and being depicted in the same respective line as said B0421, or a functional equivalent or a homolog thereof as depicted in column 8 of Table II, application no. 7, preferably a homolog or functional equivalent as depicted in column 8 of Table II B, application no. 7, and being depicted in the same respective line as said B0421, and preferably the activity is increased non-targeted, whereby the respective line disclose in column 7 the fine chemical alpha-tocopherol.

[46874] Accordingly, in one embodiment, the molecule which activity is to be increased in the process of the invention is the gene product with an activity as a “geranyltranstransferase”, preferably it is the molecule of section (a) or (b) of this paragraph.

[46875] In particular, it was observed that in plants, especially in Arabidopsis thaliana, increasing or generating the activity of a gene product non-targeted with the activity of a “geranyltranstransferase”, preferably being encoded by a gene comprising the nucleic acid sequence SEQ ID NO. 111340, preferably the coding region thereof, conferred the production of or the increase in alpha-tocopherol compared with the wild type control.

[46876] The nucleic acid sequence of B0449 from Escherichia coli, e.g. as shown in the respective line in column 5 of Table I, application no. 7, has been published in B. And the activity of the gene product thereof is the activity of ATP-binding component of a transport system.

[46877] Accordingly, in one embodiment, the process of the present invention for producing gamma-tocopherol in a non-human organism, like a microorganism or a plant or a part thereof, comprises increasing or generating the activity of a gene product with the activity of a gene product conferring the activity of “ATP-binding component of a transport system”, especially from Escherichia coli or its functional equivalent or its homolog, e.g. the increase of
[46878] (a) a gene product of a gene comprising the nucleic acid molecule as shown in the respective line in column 5 of Table I (whereby the respective line disclose in column 7 the fine chemical gamma-tocopherol), application no. 7, preferably the coding region thereof, or a homolog or a fragment thereof, and being depicted in the same respective line as said B0449, or a functional equivalent or a homolog thereof as shown in column 8 of Table I, application no. 7, preferably the coding region thereof, particularly a homolog or functional equivalent as shown in column 8 of Table I B, application no. 7, and being depicted in the same respective line as said B0449, and preferably the activity is increased non-targeted, or
[46879] (b) a polypeptide comprising a polypeptide, a consensus sequence or at least a polypeptide motif as shown in the respective line in column 5 of Table II or in column 8 of Table IV, application no. 7, respectively, and being depicted in the same respective line as said B0449, or a functional equivalent or a homolog thereof as depicted in column 8 of Table II, application no. 7, preferably a homolog or functional equivalent as depicted in column 8 of Table II B, application no. 7, and being depicted in the same respective line as said B0449, and preferably the activity is increased non-targeted, whereby the respective line disclose in column 7 the fine chemical gamma-tocopherol.

[46880] Accordingly, in one embodiment, the molecule which activity is to be increased in the process of the invention is the gene product with an activity as a “ATP-binding component of a transport system”, preferably it is the molecule of section (a) or (b) of this paragraph.

[46881] In particular, it was observed that in plants, especially in Arabidopsis thaliana, increasing or generating the activity of a gene product non-targeted with the activity of a “ATP-binding component of a transport system”, preferably being encoded by a gene comprising the nucleic acid sequence SEQ ID NO. 7333, preferably the coding region thereof, conferred the production of or the increase in gamma-tocopherol compared with the wild type control.

[46882] The nucleic acid sequence of B0754 from Escherichia coli, e.g. as shown in the respective line in column 5 of Table I, application no. 7, has been published in B. And the activity of the gene product thereof is the activity of 3-deoxy-D-arabinoheptulosonate-7-phosphatesynthase.

[46883] Accordingly, in one embodiment, the process of the present invention for producing alpha-tocopherol in a non-human organism, like a microorganism or a plant or a part thereof, comprises increasing or generating the activity of a gene product with the activity of a gene product conferring the activity of “3-deoxy-D-arabinoheptulosonate-7-phosphatesynthase”, especially from Escherichia coli or its functional equivalent or its homolog, e.g. the increase of
[46884] (a) a gene product of a gene comprising the nucleic acid molecule as shown in the respective line in column 5 of Table I (whereby the respective line disclose in column 7 the fine chemical alpha-tocopherol), application no. 7, preferably the coding region thereof, or a homolog or a fragment thereof, and being depicted in the same respective line as said B0754, or a functional equivalent or a homolog thereof as shown in column 8 of Table I, application no. 7, preferably the coding region thereof, particularly a homolog or functional equivalent as shown in column 8 of Table I B, application no. 7, and being depicted in the same respective line as said B0754, and preferably the activity is increased plastidic, or
[46885] (b) a polypeptide comprising a polypeptide, a consensus sequence or at least a polypeptide motif as shown in the respective line in column 5 of Table II or in column 8 of Table IV, application no. 7, respectively, and being depicted in the same respective line as said B0754, or a functional equivalent or a homolog thereof as depicted in column 8 of Table II, application no. 7, preferably a homolog or functional equivalent as depicted in column 8 of Table II B, application no. 7, and being depicted in the same respective line as said B0754, and preferably the activity is increased plastidic, whereby the respective line disclose in column 7 the fine chemical alpha-tocopherol.

[46886] Accordingly, in one embodiment, the molecule which activity is to be increased in the process of the invention is the gene product with an activity as a “3-deoxy-D-arabinoheptulosonate-7-phosphatesynthase”, preferably it is the molecule of section (a) or (b) of this paragraph.

[46887] In particular, it was observed that in plants, especially in Arabidopsis thaliana, increasing or generating the activity of a gene product plastidic with the activity of a “3-deoxy-D-arabinoheptulosonate-7-phosphatesynthase”, preferably being encoded by a gene comprising the nucleic acid sequence SEQ ID NO. 75286, preferably the coding region thereof, conferred the production of or the increase in alpha-tocopherol compared with the wild type control.

[46888] The nucleic acid sequence of B0898 from Escherichia coli, e.g. as shown in the respective line in column 5 of Table I, application no. 7, has been published in B. And the activity of the gene product thereof is the activity of major facilitator superfamily transporter protein.

[46889] Accordingly, in one embodiment, the process of the present invention for producing gamma-tocopherol in a non-human organism, like a microorganism or a plant or a part thereof, comprises increasing or generating the activity of a gene product with the activity of a gene product conferring the activity of “major facilitator superfamily transporter protein”, especially from Escherichia coli or its functional equivalent or its homolog, e.g. the increase of
[46890] (a) a gene product of a gene comprising the nucleic acid molecule as shown in the respective line in column 5 of Table I (whereby the respective line disclose in column 7 the fine chemical gamma-tocopherol), application no. 7, preferably the coding region thereof, or a homolog or a fragment thereof, and being depicted in the same respective line as said B0898, or a functional equivalent or a homolog thereof as shown in column 8 of Table I, application no. 7, preferably the coding region thereof, particularly a homolog or functional equivalent as shown in column 8 of Table I B, application no. 7, and being depicted in the same respective line as said B0898, and preferably the activity is increased non-targeted, or
[46891] (b) a polypeptide comprising a polypeptide, a consensus sequence or at least a polypeptide motif as shown in the respective line in column 5 of Table II or in column 8 of Table IV, application no. 7, respectively, and being depicted in the same respective line as said B0898, or a functional equivalent or a homolog thereof as depicted in column 8 of Table II, application no. 7, preferably a homolog or functional equivalent as depicted in column 8 of Table II B, application no. 7, and being depicted in the same respective line as said B0898, and preferably the activity is increased non-targeted, whereby the respective line disclose in column 7 the fine chemical gamma-tocopherol.

[46892] Accordingly, in one embodiment, the molecule which activity is to be increased in the process of the invention is the gene product with an activity as a “major facilitator superfamily transporter protein”, preferably it is the molecule of section (a) or (b) of this paragraph.

[46893] In particular, it was observed that in plants, especially in Arabidopsis thaliana, increasing or generating the activity of a gene product non-targeted with the activity of a “major facilitator superfamily transporter protein”, preferably being encoded by a gene comprising the nucleic acid sequence SEQ ID NO. 7917, preferably the coding region thereof, conferred the production of or the increase in gamma-tocopherol compared with the wild type control.

[46894] The nucleic acid sequence of B1163 from Escherichia coli, e.g. as shown in the respective line in column 5 of Table I, application no. 7, has been published in B. And the activity of the gene product thereof is the activity of b1163-protein.

[46895] Accordingly, in one embodiment, the process of the present invention for producing alpha-tocopherol in a non-human organism, like a microorganism or a plant or a part thereof, comprises increasing or generating the activity of a gene product with the activity of a gene product conferring the activity of “b1163-protein”, especially from Escherichia coli or its functional equivalent or its homolog, e.g. the increase of
[46896] (a) a gene product of a gene comprising the nucleic acid molecule as shown in the respective line in column 5 of Table I (whereby the respective line disclose in column 7 the fine chemical alpha-tocopherol), application no. 7, preferably the coding region thereof, or a homolog or a fragment thereof, and being depicted in the same respective line as said B1163, or a functional equivalent or a homolog thereof as shown in column 8 of Table I, application no. 7, preferably the coding region thereof, particularly a homolog or functional equivalent as shown in column 8 of Table I B, application no. 7, and being depicted in the same respective line as said B1163, and preferably the activity is increased non-targeted, or
[46897] (b) a polypeptide comprising a polypeptide, a consensus sequence or at least a polypeptide motif as shown in the respective line in column 5 of Table II or in column 8 of Table IV, application no. 7, respectively, and being depicted in the same respective line as said B1163, or a functional equivalent or a homolog thereof as depicted in column 8 of Table II, application no. 7, preferably a homolog or functional equivalent as depicted in column 8 of Table II B, application no. 7, and being depicted in the same respective line as said B1163, and preferably the activity is increased non-targeted, whereby the respective line disclose in column 7 the fine chemical alpha-tocopherol.

[46898] Accordingly, in one embodiment, the molecule which activity is to be increased in the process of the invention is the gene product with an activity as a “b1163-protein”, preferably it is the molecule of section (a) or (b) of this paragraph.

[46899] In particular, it was observed that in plants, especially in Arabidopsis thaliana, increasing or generating the activity of a gene product non-targeted with the activity of a “b1163-protein”, preferably being encoded by a gene comprising the nucleic acid sequence SEQ ID NO. 37394, preferably the coding region thereof, conferred the production of or the increase in alpha-tocopherol compared with the wild type control.

[46900] The nucleic acid sequence of B1183 from Escherichia coli, e.g. as shown in the respective line in column 5 of Table I, application no. 7, has been published in B. And the activity of the gene product thereof is the activity of DNA polymerase subunit.

[46901] Accordingly, in one embodiment, the process of the present invention for producing gamma-tocopherol in a non-human organism, like a microorganism or a plant or a part thereof, comprises increasing or generating the activity of a gene product with the activity of a gene product conferring the activity of “DNA polymerase subunit”, especially from Escherichia coli or its functional equivalent or its homolog, e.g. the increase of
[46902] (a) a gene product of a gene comprising the nucleic acid molecule as shown in the respective line in column 5 of Table I (whereby the respective line disclose in column 7 the fine chemical gamma-tocopherol), application no. 7, preferably the coding region thereof, or a homolog or a fragment thereof, and being depicted in the same respective line as said B1183, or a functional equivalent or a homolog thereof as shown in column 8 of Table I, application no. 7, preferably the coding region thereof, particularly a homolog or functional equivalent as shown in column 8 of Table I B, application no. 7, and being depicted in the same respective line as said B1183, and preferably the activity is increased non-targeted, or
[46903] (b) a polypeptide comprising a polypeptide, a consensus sequence or at least a polypeptide motif as shown in the respective line in column 5 of Table II or in column 8 of Table IV, application no. 7, respectively, and being depicted in the same respective line as said B1183, or a functional equivalent or a homolog thereof as depicted in column 8 of Table II, application no. 7, preferably a homolog or functional equivalent as depicted in column 8 of Table II B, application no. 7, and being depicted in the same respective line as said B1183, and preferably the activity is increased non-targeted, whereby the respective line disclose in column 7 the fine chemical gamma-tocopherol.

[46904] Accordingly, in one embodiment, the molecule which activity is to be increased in the process of the invention is the gene product with an activity as a “DNA polymerase subunit”, preferably it is the molecule of section (a) or (b) of this paragraph.

[46905] In particular, it was observed that in plants, especially in Arabidopsis thaliana, increasing or generating the activity of a gene product non-targeted with the activity of a “DNA polymerase subunit”, preferably being encoded by a gene comprising the nucleic acid sequence SEQ ID NO. 111910, preferably the coding region thereof, conferred the production of or the increase in gamma-tocopherol compared with the wild type control.

[46906] The nucleic acid sequence of B1219 from Escherichia coli, e.g. as shown in the respective line in column 5 of Table I, application no. 7, has been published in B. And the activity of the gene product thereof is the activity of b1219-protein.

[46907] Accordingly, in one embodiment, the process of the present invention for producing alpha-tocopherol in a non-human organism, like a microorganism or a plant or a part thereof, comprises increasing or generating the activity of a gene product with the activity of a gene product conferring the activity of “b1219-protein”, especially from Escherichia coli or its functional equivalent or its homolog, e.g. the increase of
[46908] (a) a gene product of a gene comprising the nucleic acid molecule as shown in the respective line in column 5 of Table I (whereby the respective line disclose in column 7 the fine chemical alpha-tocopherol), application no. 7, preferably the coding region thereof, or a homolog or a fragment thereof, and being depicted in the same respective line as said B1219, or a functional equivalent or a homolog thereof as shown in column 8 of Table I, application no. 7, preferably the coding region thereof, particularly a homolog or functional equivalent as shown in column 8 of Table I B, application no. 7, and being depicted in the same respective line as said B1219, and preferably the activity is increased non-targeted, or
[46909] (b) a polypeptide comprising a polypeptide, a consensus sequence or at least a polypeptide motif as shown in the respective line in column 5 of Table II or in column 8 of Table IV, application no. 7, respectively, and being depicted in the same respective line as said B1219, or a functional equivalent or a homolog thereof as depicted in column 8 of Table II, application no. 7, preferably a homolog or functional equivalent as depicted in column 8 of Table II B, application no. 7, and being depicted in the same respective line as said B1219, and preferably the activity is increased non-targeted, whereby the respective line disclose in column 7 the fine chemical alpha-tocopherol.

[46910] Accordingly, in one embodiment, the molecule which activity is to be increased in the process of the invention is the gene product with an activity as a “b1219-protein”, preferably it is the molecule of section (a) or (b) of this paragraph.

[46911] In particular, it was observed that in plants, especially in Arabidopsis thaliana, increasing or generating the activity of a gene product non-targeted with the activity of a “b1219-protein”, preferably being encoded by a gene comprising the nucleic acid sequence SEQ ID NO. 112072, preferably the coding region thereof, conferred the production of or the increase in alpha-tocopherol compared with the wild type control.

[46912] The nucleic acid sequence of B1234 from Escherichia coli, e.g. as shown in the respective line in column 5 of Table I, application no. 7, has been published in B. And the activity of the gene product thereof is the activity of b1234-protein.

[46913] Accordingly, in one embodiment, the process of the present invention for producing gamma-tocopherol in a non-human organism, like a microorganism or a plant or a part thereof, comprises increasing or generating the activity of a gene product with the activity of a gene product conferring the activity of “b1234-protein”, especially from Escherichia coli or its functional equivalent or its homolog, e.g. the increase of
[46914] (a) a gene product of a gene comprising the nucleic acid molecule as shown in the respective line in column 5 of Table I (whereby the respective line disclose in column 7 the fine chemical gamma-tocopherol), application no. 7, preferably the coding region thereof, or a homolog or a fragment thereof, and being depicted in the same respective line as said B1234, or a functional equivalent or a homolog thereof as shown in column 8 of Table I, application no. 7, preferably the coding region thereof, particularly a homolog or functional equivalent as shown in column 8 of Table I B, application no. 7, and being depicted in the same respective line as said B1234, and preferably the activity is increased non-targeted, or
[46915] (b) a polypeptide comprising a polypeptide, a consensus sequence or at least a polypeptide motif as shown in the respective line in column 5 of Table II or in column 8 of Table IV, application no. 7, respectively, and being depicted in the same respective line as said B1234, or a functional equivalent or a homolog thereof as depicted in column 8 of Table II, application no. 7, preferably a homolog or functional equivalent as depicted in column 8 of Table II B, application no. 7, and being depicted in the same respective line as said B1234, and preferably the activity is increased non-targeted, whereby the respective line disclose in column 7 the fine chemical gamma-tocopherol.

[46916] Accordingly, in one embodiment, the molecule which activity is to be increased in the process of the invention is the gene product with an activity as a “b1234-protein”, preferably it is the molecule of section (a) or (b) of this paragraph.

[46917] In particular, it was observed that in plants, especially in Arabidopsis thaliana, increasing or generating the activity of a gene product non-targeted with the activity of a “b1234-protein”, preferably being encoded by a gene comprising the nucleic acid sequence SEQ ID NO. 112111, preferably the coding region thereof, conferred the production of or the increase in gamma-tocopherol compared with the wild type control.

[46918] The nucleic acid sequence of B1479 from Escherichia coli, e.g. as shown in the respective line in column 5 of Table I, application no. 7, has been published in B. And the activity of the gene product thereof is the activity of NADP-dependent malic enzyme.

[46919] Accordingly, in one embodiment, the process of the present invention for producing gamma-tocopherol in a non-human organism, like a microorganism or a plant or a part thereof, comprises increasing or generating the activity of a gene product with the activity of a gene product conferring the activity of “NADP-dependent malic enzyme”, especially from Escherichia coli or its functional equivalent or its homolog, e.g. the increase of
[46920] (a) a gene product of a gene comprising the nucleic acid molecule as shown in the respective line in column 5 of Table I (whereby the respective line disclose in column 7 the fine chemical gamma-tocopherol), application no. 7, preferably the coding region thereof, or a homolog or a fragment thereof, and being depicted in the same respective line as said B1479, or a functional equivalent or a homolog thereof as shown in column 8 of Table I, application no. 7, preferably the coding region thereof, particularly a homolog or functional equivalent as shown in column 8 of Table I B, application no. 7, and being depicted in the same respective line as said B1479, and preferably the activity is increased non-targeted, or
[46921] (b) a polypeptide comprising a polypeptide, a consensus sequence or at least a polypeptide motif as shown in the respective line in column 5 of Table II or in column 8 of Table IV, application no. 7, respectively, and being depicted in the same respective line as said B1479, or a functional equivalent or a homolog thereof as depicted in column 8 of Table II, application no. 7, preferably a homolog or functional equivalent as depicted in column 8 of Table II B, application no. 7, and being depicted in the same respective line as said B1479, and preferably the activity is increased non-targeted, whereby the respective line disclose in column 7 the fine chemical gamma-tocopherol.

[46922] Accordingly, in one embodiment, the molecule which activity is to be increased in the process of the invention is the gene product with an activity as a “NADP-dependent malic enzyme”, preferably it is the molecule of section (a) or (b) of this paragraph.

[46923] In particular, it was observed that in plants, especially in Arabidopsis thaliana, increasing or generating the activity of a gene product non-targeted with the activity of a “NADP-dependent malic enzyme”, preferably being encoded by a gene comprising the nucleic acid sequence SEQ ID NO. 77774, preferably the coding region thereof, conferred the production of or the increase in gamma-tocopherol compared with the wild type control.

[46924] The nucleic acid sequence of B1522 from Escherichia coli, e.g. as shown in the respective line in column 5 of Table I, application no. 7, has been published in B. And the activity of the gene product thereof is the activity of b1522-protein.

[46925] Accordingly, in one embodiment, the process of the present invention for producing gamma-tocopherol in a non-human organism, like a microorganism or a plant or a part thereof, comprises increasing or generating the activity of a gene product with the activity of a gene product conferring the activity of “b1522-protein”, especially from Escherichia coli or its functional equivalent or its homolog, e.g. the increase of
[46926] (a) a gene product of a gene comprising the nucleic acid molecule as shown in the respective line in column 5 of Table I (whereby the respective line disclose in column 7 the fine chemical gamma-tocopherol), application no. 7, preferably the coding region thereof, or a homolog or a fragment thereof, and being depicted in the same respective line as said B1522, or a functional equivalent or a homolog thereof as shown in column 8 of Table I, application no. 7, preferably the coding region thereof, particularly a homolog or functional equivalent as shown in column 8 of Table I B, application no. 7, and being depicted in the same respective line as said B1522, and preferably the activity is increased non-targeted, or
[46927] (b) a polypeptide comprising a polypeptide, a consensus sequence or at least a polypeptide motif as shown in the respective line in column 5 of Table II or in column 8 of Table IV, application no. 7, respectively, and being depicted in the same respective line as said B1522, or a functional equivalent or a homolog thereof as depicted in column 8 of Table II, application no. 7, preferably a homolog or functional equivalent as depicted in column 8 of Table II B, application no. 7, and being depicted in the same respective line as said B1522, and preferably the activity is increased non-targeted, whereby the respective line disclose in column 7 the fine chemical gamma-tocopherol.

[46928] Accordingly, in one embodiment, the molecule which activity is to be increased in the process of the invention is the gene product with an activity as a “b1522-protein”, preferably it is the molecule of section (a) or (b) of this paragraph.

[46929] In particular, it was observed that in plants, especially in Arabidopsis thaliana, increasing or generating the activity of a gene product non-targeted with the activity of a “b1522-protein”, preferably being encoded by a gene comprising the nucleic acid sequence SEQ ID NO. 7947, preferably the coding region thereof, conferred the production of or the increase in gamma-tocopherol compared with the wild type control.

[46930] The nucleic acid sequence of B1597 from Escherichia coli, e.g. as shown in the respective line in column 5 of Table I, application no. 7, has been published in B. And the activity of the gene product thereof is the activity of acid shock protein.

[46931] Accordingly, in one embodiment, the process of the present invention for producing alpha-tocopherol in a non-human organism, like a microorganism or a plant or a part thereof, comprises increasing or generating the activity of a gene product with the activity of a gene product conferring the activity of “acid shock protein”, especially from Escherichia coli or its functional equivalent or its homolog, e.g. the increase of
[46932] (a) a gene product of a gene comprising the nucleic acid molecule as shown in the respective line in column 5 of Table I (whereby the respective line disclose in column 7 the fine chemical alpha-tocopherol), application no. 7, preferably the coding region thereof, or a homolog or a fragment thereof, and being depicted in the same respective line as said B1597, or a functional equivalent or a homolog thereof as shown in column 8 of Table I, application no. 7, preferably the coding region thereof, particularly a homolog or functional equivalent as shown in column 8 of Table I B, application no. 7, and being depicted in the same respective line as said B1597, and preferably the activity is increased non-targeted, or
[46933] (b) a polypeptide comprising a polypeptide, a consensus sequence or at least a polypeptide motif as shown in the respective line in column 5 of Table II or in column 8 of Table IV, application no. 7, respectively, and being depicted in the same respective line as said B1597, or a functional equivalent or a homolog thereof as depicted in column 8 of Table II, application no. 7, preferably a homolog or functional equivalent as depicted in column 8 of Table II B, application no. 7, and being depicted in the same respective line as said B1597, and preferably the activity is increased non-targeted, whereby the respective line disclose in column 7 the fine chemical alpha-tocopherol.

[46934] Accordingly, in one embodiment, the molecule which activity is to be increased in the process of the invention is the gene product with an activity as a “acid shock protein”, preferably it is the molecule of section (a) or (b) of this paragraph.

[46935] In particular, it was observed that in plants, especially in Arabidopsis thaliana, increasing or generating the activity of a gene product non-targeted with the activity of a “acid shock protein”, preferably being encoded by a gene comprising the nucleic acid sequence SEQ ID NO. 38300, preferably the coding region thereof, conferred the production of or the increase in alpha-tocopherol compared with the wild type control.

[46936] The nucleic acid sequence of B1601 from Escherichia coli, e.g. as shown in the respective line in column 5 of Table I, application no. 7, has been published in B. And the activity of the gene product thereof is the activity of transport protein.

[46937] Accordingly, in one embodiment, the process of the present invention for producing alpha-tocopherol in a non-human organism, like a microorganism or a plant or a part thereof, comprises increasing or generating the activity of a gene product with the activity of a gene product conferring the activity of “transport protein”, especially from Escherichia coli or its functional equivalent or its homolog, e.g. the increase of
[46938] (a) a gene product of a gene comprising the nucleic acid molecule as shown in the respective line in column 5 of Table I (whereby the respective line disclose in column 7 the fine chemical alpha-tocopherol), application no. 7, preferably the coding region thereof, or a homolog or a fragment thereof, and being depicted in the same respective line as said B1601, or a functional equivalent or a homolog thereof as shown in column 8 of Table I, application no. 7, preferably the coding region thereof, particularly a homolog or functional equivalent as shown in column 8 of Table I B, application no. 7, and being depicted in the same respective line as said B1601, and preferably the activity is increased non-targeted, or
[46939] (b) a polypeptide comprising a polypeptide, a consensus sequence or at least a polypeptide motif as shown in the respective line in column 5 of Table II or in column 8 of Table IV, application no. 7, respectively, and being depicted in the same respective line as said B1601, or a functional equivalent or a homolog thereof as depicted in column 8 of Table II, application no. 7, preferably a homolog or functional equivalent as depicted in column 8 of Table II B, application no. 7, and being depicted in the same respective line as said B1601, and preferably the activity is increased non-targeted, whereby the respective line disclose in column 7 the fine chemical alpha-tocopherol.

[46940] Accordingly, in one embodiment, the molecule which activity is to be increased in the process of the invention is the gene product with an activity as a “transport protein”, preferably it is the molecule of section (a) or (b) of this paragraph.

[46941] In particular, it was observed that in plants, especially in Arabidopsis thaliana, increasing or generating the activity of a gene product non-targeted with the activity of a “transport protein”, preferably being encoded by a gene comprising the nucleic acid sequence SEQ ID NO. 7992, preferably the coding region thereof, conferred the production of or the increase in alpha-tocopherol compared with the wild type control.

[46942] The nucleic acid sequence of B1897 from Escherichia coli, e.g. as shown in the respective line in column 5 of Table I, application no. 7, has been published in B. And the activity of the gene product thereof is the activity of trehalose-phosphatase.

[46943] Accordingly, in one embodiment, the process of the present invention for producing gamma-tocopherol in a non-human organism, like a microorganism or a plant or a part thereof, comprises increasing or generating the activity of a gene product with the activity of a gene product conferring the activity of “trehalose-phosphatase”, especially from Escherichia coli or its functional equivalent or its homolog, e.g. the increase of
[46944] (a) a gene product of a gene comprising the nucleic acid molecule as shown in the respective line in column 5 of Table I (whereby the respective line disclose in column 7 the fine chemical gamma-tocopherol), application no. 7, preferably the coding region thereof, or a homolog or a fragment thereof, and being depicted in the same respective line as said B1897, or a functional equivalent or a homolog thereof as shown in column 8 of Table I, application no. 7, preferably the coding region thereof, particularly a homolog or functional equivalent as shown in column 8 of Table I B, application no. 7, and being depicted in the same respective line as said B1897, and preferably the activity is increased non-targeted, or
[46945] (b) a polypeptide comprising a polypeptide, a consensus sequence or at least a polypeptide motif as shown in the respective line in column 5 of Table II or in column 8 of Table IV, application no. 7, respectively, and being depicted in the same respective line as said B1897, or a functional equivalent or a homolog thereof as depicted in column 8 of Table II, application no. 7, preferably a homolog or functional equivalent as depicted in column 8 of Table II B, application no. 7, and being depicted in the same respective line as said B1897, and preferably the activity is increased non-targeted, whereby the respective line disclose in column 7 the fine chemical gamma-tocopherol.

[46946] Accordingly, in one embodiment, the molecule which activity is to be increased in the process of the invention is the gene product with an activity as a “trehalose-phosphatase”, preferably it is the molecule of section (a) or (b) of this paragraph.

[46947] In particular, it was observed that in plants, especially in Arabidopsis thaliana, increasing or generating the activity of a gene product non-targeted with the activity of a “trehalosephosphatase”, preferably being encoded by a gene comprising the nucleic acid sequence SEQ ID NO. 79056, preferably the coding region thereof, conferred the production of or the increase in gamma-tocopherol compared with the wild type control.

[46948] The nucleic acid sequence of B1921 from Escherichia coli, e.g. as shown in the respective line in column 5 of Table I, application no. 7, has been published in B. And the activity of the gene product thereof is the activity of b1921-protein.

[46949] Accordingly, in one embodiment, the process of the present invention for producing gamma-tocopherol in a non-human organism, like a microorganism or a plant or a part thereof, comprises increasing or generating the activity of a gene product with the activity of a gene product conferring the activity of “b1921-protein”, especially from Escherichia coli or its functional equivalent or its homolog, e.g. the increase of
[46950] (a) a gene product of a gene comprising the nucleic acid molecule as shown in the respective line in column 5 of Table I (whereby the respective line disclose in column 7 the fine chemical gamma-tocopherol), application no. 7, preferably the coding region thereof, or a homolog or a fragment thereof, and being depicted in the same respective line as said B1921, or a functional equivalent or a homolog thereof as shown in column 8 of Table I, application no. 7, preferably the coding region thereof, particularly a homolog or functional equivalent as shown in column 8 of Table I B, application no. 7, and being depicted in the same respective line as said B1921, and preferably the activity is increased non-targeted, or
[46951] (b) a polypeptide comprising a polypeptide, a consensus sequence or at least a polypeptide motif as shown in the respective line in column 5 of Table II or in column 8 of Table IV, application no. 7, respectively, and being depicted in the same respective line as said B1921, or a functional equivalent or a homolog thereof as depicted in column 8 of Table II, application no. 7, preferably a homolog or functional equivalent as depicted in column 8 of Table II B, application no. 7, and being depicted in the same respective line as said B1921, and preferably the activity is increased non-targeted, whereby the respective line disclose in column 7 the fine chemical gamma-tocopherol.

[46952] Accordingly, in one embodiment, the molecule which activity is to be increased in the process of the invention is the gene product with an activity as a “b1921-protein”, preferably it is the molecule of section (a) or (b) of this paragraph.

[46953] In particular, it was observed that in plants, especially in Arabidopsis thaliana, increasing or generating the activity of a gene product non-targeted with the activity of a “b1921-protein”, preferably being encoded by a gene comprising the nucleic acid sequence SEQ ID NO. 112169, preferably the coding region thereof, conferred the production of or the increase in gamma-tocopherol compared with the wild type control.

[46954] The nucleic acid sequence of B2027 from Escherichia coli, e.g. as shown in the respective line in column 5 of Table I, application no. 7, has been published in B. And the activity of the gene product thereof is the activity of O-antigen chain length determinant.

[46955] Accordingly, in one embodiment, the process of the present invention for producing gamma-tocopherol in a non-human organism, like a microorganism or a plant or a part thereof, comprises increasing or generating the activity of a gene product with the activity of a gene product conferring the activity of “O-antigen chain length determinant”, especially from Escherichia coli or its functional equivalent or its homolog, e.g. the increase of
[46956] (a) a gene product of a gene comprising the nucleic acid molecule as shown in the respective line in column 5 of Table I (whereby the respective line disclose in column 7 the fine chemical gamma-tocopherol), application no. 7, preferably the coding region thereof, or a homolog or a fragment thereof, and being depicted in the same respective line as said B2027, or a functional equivalent or a homolog thereof as shown in column 8 of Table I, application no. 7, preferably the coding region thereof, particularly a homolog or functional equivalent as shown in column 8 of Table I B, application no. 7, and being depicted in the same respective line as said B2027, and preferably the activity is increased non-targeted, or
[46957] (b) a polypeptide comprising a polypeptide, a consensus sequence or at least a polypeptide motif as shown in the respective line in column 5 of Table II or in column 8 of Table IV, application no. 7, respectively, and being depicted in the same respective line as said B2027, or a functional equivalent or a homolog thereof as depicted in column 8 of Table II, application no. 7, preferably a homolog or functional equivalent as depicted in column 8 of Table II B, application no. 7, and being depicted in the same respective line as said B2027, and preferably the activity is increased non-targeted, whereby the respective line disclose in column 7 the fine chemical gamma-tocopherol.

[46958] Accordingly, in one embodiment, the molecule which activity is to be increased in the process of the invention is the gene product with an activity as a “O-antigen chain length determinant”, preferably it is the molecule of section (a) or (b) of this paragraph.

[46959] In particular, it was observed that in plants, especially in Arabidopsis thaliana, increasing or generating the activity of a gene product non-targeted with the activity of a “O-antigen chain length determinant”, preferably being encoded by a gene comprising the nucleic acid sequence SEQ ID NO. 79217, preferably the coding region thereof, conferred the production of or the increase in gamma-tocopherol compared with the wild type control.

[46960] The nucleic acid sequence of B2043 from Escherichia coli, e.g. as shown in the respective line in column 5 of Table I, application no. 7, has been published in B. And the activity of the gene product thereof is the activity of colanic acid biosynthesis protein.

[46961] Accordingly, in one embodiment, the process of the present invention for producing alpha-tocopherol in a non-human organism, like a microorganism or a plant or a part thereof, comprises increasing or generating the activity of a gene product with the activity of a gene product conferring the activity of “colanic acid biosynthesis protein”, especially from Escherichia coli or its functional equivalent or its homolog, e.g. the increase of
[46962] (a) a gene product of a gene comprising the nucleic acid molecule as shown in the respective line in column 5 of Table I (whereby the respective line disclose in column 7 the fine chemical alpha-tocopherol), application no. 7, preferably the coding region thereof, or a homolog or a fragment thereof, and being depicted in the same respective line as said B2043, or a functional equivalent or a homolog thereof as shown in column 8 of Table I, application no. 7, preferably the coding region thereof, particularly a homolog or functional equivalent as shown in column 8 of Table I B, application no. 7, and being depicted in the same respective line as said B2043, and preferably the activity is increased non-targeted, or
[46963] (b) a polypeptide comprising a polypeptide, a consensus sequence or at least a polypeptide motif as shown in the respective line in column 5 of Table II or in column 8 of Table IV, application no. 7, respectively, and being depicted in the same respective line as said B2043, or a functional equivalent or a homolog thereof as depicted in column 8 of Table II, application no. 7, preferably a homolog or functional equivalent as depicted in column 8 of Table II B, application no. 7, and being depicted in the same respective line as said B2043, and preferably the activity is increased non-targeted, whereby the respective line disclose in column 7 the fine chemical alpha-tocopherol.

[46964] Accordingly, in one embodiment, the molecule which activity is to be increased in the process of the invention is the gene product with an activity as a “colanic acid biosynthesis protein”, preferably it is the molecule of section (a) or (b) of this paragraph.

[46965] In particular, it was observed that in plants, especially in Arabidopsis thaliana, increasing or generating the activity of a gene product non-targeted with the activity of a “colanic acid biosynthesis protein”, preferably being encoded by a gene comprising the nucleic acid sequence SEQ ID NO. 112193, preferably the coding region thereof, conferred the production of or the increase in alpha-tocopherol compared with the wild type control.

[46966] The nucleic acid sequence of B2360 from Escherichia coli, e.g. as shown in the respective line in column 5 of Table I, application no. 7, has been published in B. And the activity of the gene product thereof is the activity of b2360-protein.

[46967] Accordingly, in one embodiment, the process of the present invention for producing gamma-tocopherol in a non-human organism, like a microorganism or a plant or a part thereof, comprises increasing or generating the activity of a gene product with the activity of a gene product conferring the activity of “b2360-protein”, especially from Escherichia coli or its functional equivalent or its homolog, e.g. the increase of
[46968] (a) a gene product of a gene comprising the nucleic acid molecule as shown in the respective line in column 5 of Table I (whereby the respective line disclose in column 7 the fine chemical gamma-tocopherol), application no. 7, preferably the coding region thereof, or a homolog or a fragment thereof, and being depicted in the same respective line as said B2360, or a functional equivalent or a homolog thereof as shown in column 8 of Table I, application no. 7, preferably the coding region thereof, particularly a homolog or functional equivalent as shown in column 8 of Table I B, application no. 7, and being depicted in the same respective line as said B2360, and preferably the activity is increased non-targeted, or
[46969] (b) a polypeptide comprising a polypeptide, a consensus sequence or at least a polypeptide motif as shown in the respective line in column 5 of Table II or in column 8 of Table IV, application no. 7, respectively, and being depicted in the same respective line as said B2360, or a functional equivalent or a homolog thereof as depicted in column 8 of Table II, application no. 7, preferably a homolog or functional equivalent as depicted in column 8 of Table II B, application no. 7, and being depicted in the same respective line as said B2360, and preferably the activity is increased non-targeted, whereby the respective line disclose in column 7 the fine chemical gamma-tocopherol.

[46970] Accordingly, in one embodiment, the molecule which activity is to be increased in the process of the invention is the gene product with an activity as a “b2360-protein”, preferably it is the molecule of section (a) or (b) of this paragraph.

[46971] In particular, it was observed that in plants, especially in Arabidopsis thaliana, increasing or generating the activity of a gene product non-targeted with the activity of a “b2360-protein”, preferably being encoded by a gene comprising the nucleic acid sequence SEQ ID NO. 39219, preferably the coding region thereof, conferred the production of or the increase in gamma-tocopherol compared with the wild type control.

[46972] The nucleic acid sequence of B2546 from Escherichia coli, e.g. as shown in the respective line in column 5 of Table I, application no. 7, has been published in B. And the activity of the gene product thereof is the activity of putative transport system permease protein.

[46973] Accordingly, in one embodiment, the process of the present invention for producing alpha-tocopherol in a non-human organism, like a microorganism or a plant or a part thereof, comprises increasing or generating the activity of a gene product with the activity of a gene product conferring the activity of “putative transport system permease protein”, especially from Escherichia coli or its functional equivalent or its homolog, e.g. the increase of
[46974] (a) a gene product of a gene comprising the nucleic acid molecule as shown in the respective line in column 5 of Table I (whereby the respective line disclose in column 7 the fine chemical alpha-tocopherol), application no. 7, preferably the coding region thereof, or a homolog or a fragment thereof, and being depicted in the same respective line as said B2546, or a functional equivalent or a homolog thereof as shown in column 8 of Table I, application no. 7, preferably the coding region thereof, particularly a homolog or functional equivalent as shown in column 8 of Table I B, application no. 7, and being depicted in the same respective line as said B2546, and preferably the activity is increased non-targeted, or
[46975] (b) a polypeptide comprising a polypeptide, a consensus sequence or at least a polypeptide motif as shown in the respective line in column 5 of Table II or in column 8 of Table IV, application no. 7, respectively, and being depicted in the same respective line as said B2546, or a functional equivalent or a homolog thereof as depicted in column 8 of Table II, application no. 7, preferably a homolog or functional equivalent as depicted in column 8 of Table II B, application no. 7, and being depicted in the same respective line as said B2546, and preferably the activity is increased non-targeted, whereby the respective line disclose in column 7 the fine chemical alpha-tocopherol.

[46976] Accordingly, in one embodiment, the molecule which activity is to be increased in the process of the invention is the gene product with an activity as a “putative transport system permease protein”, preferably it is the molecule of section (a) or (b) of this paragraph.

[46977] In particular, it was observed that in plants, especially in Arabidopsis thaliana, increasing or generating the activity of a gene product non-targeted with the activity of a “putative transport system permease protein”, preferably being encoded by a gene comprising the nucleic acid sequence SEQ ID NO. 99898, preferably the coding region thereof, conferred the production of or the increase in alpha-tocopherol compared with the wild type control.

[46978] The nucleic acid sequence of B2548 from Escherichia coli, e.g. as shown in the respective line in column 5 of Table I, application no. 7, has been published in B. And the activity of the gene product thereof is the activity of b2548-protein.

[46979] Accordingly, in one embodiment, the process of the present invention for producing gamma-tocopherol in a non-human organism, like a microorganism or a plant or a part thereof, comprises increasing or generating the activity of a gene product with the activity of a gene product conferring the activity of “b2548-protein”, especially from Escherichia coli or its functional equivalent or its homolog, e.g. the increase of
[46980] (a) a gene product of a gene comprising the nucleic acid molecule as shown in the respective line in column 5 of Table I (whereby the respective line disclose in column 7 the fine chemical gamma-tocopherol), application no. 7, preferably the coding region thereof, or a homolog or a fragment thereof, and being depicted in the same respective line as said B2548, or a functional equivalent or a homolog thereof as shown in column 8 of Table I, application no. 7, preferably the coding region thereof, particularly a homolog or functional equivalent as shown in column 8 of Table I B, application no. 7, and being depicted in the same respective line as said B2548, and preferably the activity is increased non-targeted, or
[46981] (b) a polypeptide comprising a polypeptide, a consensus sequence or at least a polypeptide motif as shown in the respective line in column 5 of Table II or in column 8 of Table IV, application no. 7, respectively, and being depicted in the same respective line as said B2548, or a functional equivalent or a homolog thereof as depicted in column 8 of Table II, application no. 7, preferably a homolog or functional equivalent as depicted in column 8 of Table II B, application no. 7, and being depicted in the same respective line as said B2548, and preferably the activity is increased non-targeted, whereby the respective line disclose in column 7 the fine chemical gamma-tocopherol.

[46982] Accordingly, in one embodiment, the molecule which activity is to be increased in the process of the invention is the gene product with an activity as a “b2548-protein”, preferably it is the molecule of section (a) or (b) of this paragraph.

[46983] In particular, it was observed that in plants, especially in Arabidopsis thaliana, increasing or generating the activity of a gene product non-targeted with the activity of a “b2548-protein”, preferably being encoded by a gene comprising the nucleic acid sequence SEQ ID NO. 40637, preferably the coding region thereof, conferred the production of or the increase in gamma-tocopherol compared with the wild type control.

[46984] The nucleic acid sequence of B2613 from Escherichia coli, e.g. as shown in the respective line in column 5 of Table I, application no. 7, has been published in B. And the activity of the gene product thereof is the activity of b2613-protein.

[46985] Accordingly, in one embodiment, the process of the present invention for producing gamma-tocopherol in a non-human organism, like a microorganism or a plant or a part thereof, comprises increasing or generating the activity of a gene product with the activity of a gene product conferring the activity of “b2613-protein”, especially from Escherichia coli or its functional equivalent or its homolog, e.g. the increase of
[46986] (a) a gene product of a gene comprising the nucleic acid molecule as shown in the respective line in column 5 of Table I (whereby the respective line disclose in column 7 the fine chemical gamma-tocopherol), application no. 7, preferably the coding region thereof, or a homolog or a fragment thereof, and being depicted in the same respective line as said B2613, or a functional equivalent or a homolog thereof as shown in column 8 of Table I, application no. 7, preferably the coding region thereof, particularly a homolog or functional equivalent as shown in column 8 of Table I B, application no. 7, and being depicted in the same respective line as said B2613, and preferably the activity is increased non-targeted, or
[46987] (b) a polypeptide comprising a polypeptide, a consensus sequence or at least a polypeptide motif as shown in the respective line in column 5 of Table II or in column 8 of Table IV, application no. 7, respectively, and being depicted in the same respective line as said B2613, or a functional equivalent or a homolog thereof as depicted in column 8 of Table II, application no. 7, preferably a homolog or functional equivalent as depicted in column 8 of Table II B, application no. 7, and being depicted in the same respective line as said B2613, and preferably the activity is increased non-targeted, whereby the respective line disclose in column 7 the fine chemical gamma-tocopherol.

[46988] Accordingly, in one embodiment, the molecule which activity is to be increased in the process of the invention is the gene product with an activity as a “b2613-protein”, preferably it is the molecule of section (a) or (b) of this paragraph.

[46989] In particular, it was observed that in plants, especially in Arabidopsis thaliana, increasing or generating the activity of a gene product non-targeted with the activity of a “b2613-protein”, preferably being encoded by a gene comprising the nucleic acid sequence SEQ ID NO. 40665, preferably the coding region thereof, conferred the production of or the increase in gamma-tocopherol compared with the wild type control.

[46990] The nucleic acid sequence of B2673 from Escherichia coli, e.g. as shown in the respective line in column 5 of Table I, application no. 7, has been published in B. And the activity of the gene product thereof is the activity of b2673-protein.

[46991] Accordingly, in one embodiment, the process of the present invention for producing gamma-tocopherol in a non-human organism, like a microorganism or a plant or a part thereof, comprises increasing or generating the activity of a gene product with the activity of a gene product conferring the activity of “b2673-protein”, especially from Escherichia coli or its functional equivalent or its homolog, e.g. the increase of
[46992] (a) a gene product of a gene comprising the nucleic acid molecule as shown in the respective line in column 5 of Table I (whereby the respective line disclose in column 7 the fine chemical gamma-tocopherol), application no. 7, preferably the coding region thereof, or a homolog or a fragment thereof, and being depicted in the same respective line as said B2673, or a functional equivalent or a homolog thereof as shown in column 8 of Table I, application no. 7, preferably the coding region thereof, particularly a homolog or functional equivalent as shown in column 8 of Table I B, application no. 7, and being depicted in the same respective line as said B2673, and preferably the activity is increased non-targeted, or
[46993] (b) a polypeptide comprising a polypeptide, a consensus sequence or at least a polypeptide motif as shown in the respective line in column 5 of Table II or in column 8 of Table IV, application no. 7, respectively, and being depicted in the same respective line as said B2673, or a functional equivalent or a homolog thereof as depicted in column 8 of Table II, application no. 7, preferably a homolog or functional equivalent as depicted in column 8 of Table II B, application no. 7, and being depicted in the same respective line as said B2673, and preferably the activity is increased non-targeted, whereby the respective line disclose in column 7 the fine chemical gamma-tocopherol.

[46994] Accordingly, in one embodiment, the molecule which activity is to be increased in the process of the invention is the gene product with an activity as a “b2673-protein”, preferably it is the molecule of section (a) or (b) of this paragraph.

[46995] In particular, it was observed that in plants, especially in Arabidopsis thaliana, increasing or generating the activity of a gene product non-targeted with the activity of a “b2673-protein”, preferably being encoded by a gene comprising the nucleic acid sequence SEQ ID NO. 9244, preferably the coding region thereof, conferred the production of or the increase in gamma-tocopherol compared with the wild type control.

[46996] The nucleic acid sequence of B2701 from Escherichia coli, e.g. as shown in the respective line in column 5 of Table I, application no. 7, has been published in B. And the activity of the gene product thereof is the activity of murein transglycosylase.

[46997] Accordingly, in one embodiment, the process of the present invention for producing gamma-tocopherol in a non-human organism, like a microorganism or a plant or a part thereof, comprises increasing or generating the activity of a gene product with the activity of a gene product conferring the activity of “murein transglycosylase”, especially from Escherichia coli or its functional equivalent or its homolog, e.g. the increase of
[46998] (a) a gene product of a gene comprising the nucleic acid molecule as shown in the respective line in column 5 of Table I (whereby the respective line disclose in column 7 the fine chemical gamma-tocopherol), application no. 7, preferably the coding region thereof, or a homolog or a fragment thereof, and being depicted in the same respective line as said B2701, or a functional equivalent or a homolog thereof as shown in column 8 of Table I, application no. 7, preferably the coding region thereof, particularly a homolog or functional equivalent as shown in column 8 of Table I B, application no. 7, and being depicted in the same respective line as said B2701, and preferably the activity is increased non-targeted, or
[46999] (b) a polypeptide comprising a polypeptide, a consensus sequence or at least a polypeptide motif as shown in the respective line in column 5 of Table II or in column 8 of Table IV, application no. 7, respectively, and being depicted in the same respective line as said B2701, or a functional equivalent or a homolog thereof as depicted in column 8 of Table II, application no. 7, preferably a homolog or functional equivalent as depicted in column 8 of Table II B, application no. 7, and being depicted in the same respective line as said B2701, and preferably the activity is increased non-targeted, whereby the respective line disclose in column 7 the fine chemical gamma-tocopherol.

[47000] Accordingly, in one embodiment, the molecule which activity is to be increased in the process of the invention is the gene product with an activity as a “murein transglycosylase”, preferably it is the molecule of section (a) or (b) of this paragraph.

[47001] In particular, it was observed that in plants, especially in Arabidopsis thaliana, increasing or generating the activity of a gene product non-targeted with the activity of a “murein transglycosylase”, preferably being encoded by a gene comprising the nucleic acid sequence SEQ ID NO. 80756, preferably the coding region thereof, conferred the production of or the increase in gamma-tocopherol compared with the wild type control.

[47002] The nucleic acid sequence of B2812 from Escherichia coli, e.g. as shown in the respective line in column 5 of Table I, application no. 7, has been published in B. And the activity of the gene product thereof is the activity of b2812-protein.

[47003] Accordingly, in one embodiment, the process of the present invention for producing gamma-tocopherol in a non-human organism, like a microorganism or a plant or a part thereof, comprises increasing or generating the activity of a gene product with the activity of a gene product conferring the activity of “b2812-protein”, especially from Escherichia coli or its functional equivalent or its homolog, e.g. the increase of
[47004] (a) a gene product of a gene comprising the nucleic acid molecule as shown in the respective line in column 5 of Table I (whereby the respective line disclose in column 7 the fine chemical gamma-tocopherol), application no. 7, preferably the coding region thereof, or a homolog or a fragment thereof, and being depicted in the same respective line as said B2812, or a functional equivalent or a homolog thereof as shown in column 8 of Table I, application no. 7, preferably the coding region thereof, particularly a homolog or functional equivalent as shown in column 8 of Table I B, application no. 7, and being depicted in the same respective line as said B2812, and preferably the activity is increased non-targeted, or
[47005] (b) a polypeptide comprising a polypeptide, a consensus sequence or at least a polypeptide motif as shown in the respective line in column 5 of Table II or in column 8 of Table IV, application no. 7, respectively, and being depicted in the same respective line as said B2812, or a functional equivalent or a homolog thereof as depicted in column 8 of Table II, application no. 7, preferably a homolog or functional equivalent as depicted in column 8 of Table II B, application no. 7, and being depicted in the same respective line as said B2812, and preferably the activity is increased non-targeted, whereby the respective line disclose in column 7 the fine chemical gamma-tocopherol.

[47006] Accordingly, in one embodiment, the molecule which activity is to be increased in the process of the invention is the gene product with an activity as a “b2812-protein”, preferably it is the molecule of section (a) or (b) of this paragraph.

[47007] In particular, it was observed that in plants, especially in Arabidopsis thaliana, increasing or generating the activity of a gene product non-targeted with the activity of a “b2812-protein”, preferably being encoded by a gene comprising the nucleic acid sequence SEQ ID NO. 40795, preferably the coding region thereof, conferred the production of or the increase in gamma-tocopherol compared with the wild type control.

[47008] The nucleic acid sequence of B2818 from Escherichia coli, e.g. as shown in the respective line in column 5 of Table I, application no. 7, has been published in B. And the activity of the gene product thereof is the activity of amino-acid acetyltransferase.

[47009] Accordingly, in one embodiment, the process of the present invention for producing alpha-tocopherol in a non-human organism, like a microorganism or a plant or a part thereof, comprises increasing or generating the activity of a gene product with the activity of a gene product conferring the activity of “amino-acid acetyltransferase”, especially from Escherichia coli or its functional equivalent or its homolog, e.g. the increase of
[47010] (a) a gene product of a gene comprising the nucleic acid molecule as shown in the respective line in column 5 of Table I (whereby the respective line disclose in column 7 the fine chemical alpha-tocopherol), application no. 7, preferably the coding region thereof, or a homolog or a fragment thereof, and being depicted in the same respective line as said B2818, or a functional equivalent or a homolog thereof as shown in column 8 of Table I, application no. 7, preferably the coding region thereof, particularly a homolog or functional equivalent as shown in column 8 of Table I B, application no. 7, and being depicted in the same respective line as said B2818, and preferably the activity is increased non-targeted, or
[47011] (b) a polypeptide comprising a polypeptide, a consensus sequence or at least a polypeptide motif as shown in the respective line in column 5 of Table II or in column 8 of Table IV, application no. 7, respectively, and being depicted in the same respective line as said B2818, or a functional equivalent or a homolog thereof as depicted in column 8 of Table II, application no. 7, preferably a homolog or functional equivalent as depicted in column 8 of Table II B, application no. 7, and being depicted in the same respective line as said B2818, and preferably the activity is increased non-targeted, whereby the respective line disclose in column 7 the fine chemical alpha-tocopherol.

[47012] Accordingly, in one embodiment, the molecule which activity is to be increased in the process of the invention is the gene product with an activity as a “amino-acid acetyltransferase”, preferably it is the molecule of section (a) or (b) of this paragraph.

[47013] In particular, it was observed that in plants, especially in Arabidopsis thaliana, increasing or generating the activity of a gene product non-targeted with the activity of a “amino-acid acetyltransferase”, preferably being encoded by a gene comprising the nucleic acid sequence SEQ ID NO. 81576, preferably the coding region thereof, conferred the production of or the increase in alpha-tocopherol compared with the wild type control.

[47014] The nucleic acid sequence of B2818 from Escherichia coli, e.g. as shown in the respective line in column 5 of Table I, application no. 7, has been published in B. And the activity of the gene product thereof is the activity of amino-acid acetyltransferase.

[47015] Accordingly, in one embodiment, the process of the present invention for producing gamma-tocopherol in a non-human organism, like a microorganism or a plant or a part thereof, comprises increasing or generating the activity of a gene product with the activity of a gene product conferring the activity of “amino-acid acetyltransferase”, especially from Escherichia coli or its functional equivalent or its homolog, e.g. the increase of
[47016] (a) a gene product of a gene comprising the nucleic acid molecule as shown in the respective line in column 5 of Table I (whereby the respective line disclose in column 7 the fine chemical gamma-tocopherol), application no. 7, preferably the coding region thereof, or a homolog or a fragment thereof, and being depicted in the same respective line as said B2818, or a functional equivalent or a homolog thereof as shown in column 8 of Table I, application no. 7, preferably the coding region thereof, particularly a homolog or functional equivalent as shown in column 8 of Table I B, application no. 7, and being depicted in the same respective line as said B2818, and preferably the activity is increased non-targeted, or
[47017] (b) a polypeptide comprising a polypeptide, a consensus sequence or at least a polypeptide motif as shown in the respective line in column 5 of Table II or in column 8 of Table IV, application no. 7, respectively, and being depicted in the same respective line as said B2818, or a functional equivalent or a homolog thereof as depicted in column 8 of Table II, application no. 7, preferably a homolog or functional equivalent as depicted in column 8 of Table II B, application no. 7, and being depicted in the same respective line as said B2818, and preferably the activity is increased non-targeted, whereby the respective line disclose in column 7 the fine chemical gamma-tocopherol.

[47018] Accordingly, in one embodiment, the molecule which activity is to be increased in the process of the invention is the gene product with an activity as a “amino-acid acetyltransferase”, preferably it is the molecule of section (a) or (b) of this paragraph.

[47019] In particular, it was observed that in plants, especially in Arabidopsis thaliana, increasing or generating the activity of a gene product non-targeted with the activity of a “amino-acid acetyltransferase”, preferably being encoded by a gene comprising the nucleic acid sequence SEQ ID NO. 81576, preferably the coding region thereof, conferred the production of or the increase in gamma-tocopherol compared with the wild type control.

[47020] The nucleic acid sequence of B2977 from Escherichia coli, e.g. as shown in the respective line in column 5 of Table I, application no. 7, has been published in B. And the activity of the gene product thereof is the activity of glycolate utilization protein.

[47021] Accordingly, in one embodiment, the process of the present invention for producing alpha-tocopherol in a non-human organism, like a microorganism or a plant or a part thereof, comprises increasing or generating the activity of a gene product with the activity of a gene product conferring the activity of “glycolate utilization protein”, especially from Escherichia coli or its functional equivalent or its homolog, e.g. the increase of
[47022] (a) a gene product of a gene comprising the nucleic acid molecule as shown in the respective line in column 5 of Table I (whereby the respective line disclose in column 7 the fine chemical alpha-tocopherol), application no. 7, preferably the coding region thereof, or a homolog or a fragment thereof, and being depicted in the same respective line as said B2977, or a functional equivalent or a homolog thereof as shown in column 8 of Table I, application no. 7, preferably the coding region thereof, particularly a homolog or functional equivalent as shown in column 8 of Table I B, application no. 7, and being depicted in the same respective line as said B2977, and preferably the activity is increased non-targeted, or
[47023] (b) a polypeptide comprising a polypeptide, a consensus sequence or at least a polypeptide motif as shown in the respective line in column 5 of Table II or in column 8 of Table IV, application no. 7, respectively, and being depicted in the same respective line as said B2977, or a functional equivalent or a homolog thereof as depicted in column 8 of Table II, application no. 7, preferably a homolog or functional equivalent as depicted in column 8 of Table II B, application no. 7, and being depicted in the same respective line as said B2977, and preferably the activity is increased non-targeted, whereby the respective line disclose in column 7 the fine chemical alpha-tocopherol.

[47024] Accordingly, in one embodiment, the molecule which activity is to be increased in the process of the invention is the gene product with an activity as a “glycolate utilization protein”, preferably it is the molecule of section (a) or (b) of this paragraph.

[47025] In particular, it was observed that in plants, especially in Arabidopsis thaliana, increasing or generating the activity of a gene product non-targeted with the activity of a “glycolate utilization protein”, preferably being encoded by a gene comprising the nucleic acid sequence SEQ ID NO. 112216, preferably the coding region thereof, conferred the production of or the increase in alpha-tocopherol compared with the wild type control.

[47026] The nucleic acid sequence of B3194 from Escherichia coli, e.g. as shown in the respective line in column 5 of Table I, application no. 7, has been published in B. And the activity of the gene product thereof is the activity of ABC transporter permease subunit.

[47027] Accordingly, in one embodiment, the process of the present invention for producing alpha-tocopherol in a non-human organism, like a microorganism or a plant or a part thereof, comprises increasing or generating the activity of a gene product with the activity of a gene product conferring the activity of “ABC transporter permease subunit”, especially from Escherichia coli or its functional equivalent or its homolog, e.g. the increase of
[47028] (a) a gene product of a gene comprising the nucleic acid molecule as shown in the respective line in column 5 of Table I (whereby the respective line disclose in column 7 the fine chemical alpha-tocopherol), application no. 7, preferably the coding region thereof, or a homolog or a fragment thereof, and being depicted in the same respective line as said B3194, or a functional equivalent or a homolog thereof as shown in column 8 of Table I, application no. 7, preferably the coding region thereof, particularly a homolog or functional equivalent as shown in column 8 of Table I B, application no. 7, and being depicted in the same respective line as said B3194, and preferably the activity is increased plastidic, or
[47029] (b) a polypeptide comprising a polypeptide, a consensus sequence or at least a polypeptide motif as shown in the respective line in column 5 of Table II or in column 8 of Table IV, application no. 7, respectively, and being depicted in the same respective line as said B3194, or a functional equivalent or a homolog thereof as depicted in column 8 of Table II, application no. 7, preferably a homolog or functional equivalent as depicted in column 8 of Table II B, application no. 7, and being depicted in the same respective line as said B3194, and preferably the activity is increased plastidic, whereby the respective line disclose in column 7 the fine chemical alpha-tocopherol.

[47030] Accordingly, in one embodiment, the molecule which activity is to be increased in the process of the invention is the gene product with an activity as a “ABC transporter permease subunit”, preferably it is the molecule of section (a) or (b) of this paragraph.

[47031] In particular, it was observed that in plants, especially in Arabidopsis thaliana, increasing or generating the activity of a gene product plastidic with the activity of a “ABC transporter permease subunit”, preferably being encoded by a gene comprising the nucleic acid sequence SEQ ID NO. 112380, preferably the coding region thereof, conferred the production of or the increase in alpha-tocopherol compared with the wild type control.

[47032] The nucleic acid sequence of B3790 from Escherichia coli, e.g. as shown in the respective line in column 5 of Table I, application no. 7, has been published in B. And the activity of the gene product thereof is the activity of lipopolysaccharide biosynthesis protein.

[47033] Accordingly, in one embodiment, the process of the present invention for producing gamma-tocopherol in a non-human organism, like a microorganism or a plant or a part thereof, comprises increasing or generating the activity of a gene product with the activity of a gene product conferring the activity of “lipopolysaccharide biosynthesis protein”, especially from Escherichia coli or its functional equivalent or its homolog, e.g. the increase of
[47034] (a) a gene product of a gene comprising the nucleic acid molecule as shown in the respective line in column 5 of Table I (whereby the respective line disclose in column 7 the fine chemical gamma-tocopherol), application no. 7, preferably the coding region thereof, or a homolog or a fragment thereof, and being depicted in the same respective line as said B3790, or a functional equivalent or a homolog thereof as shown in column 8 of Table I, application no. 7, preferably the coding region thereof, particularly a homolog or functional equivalent as shown in column 8 of Table I B, application no. 7, and being depicted in the same respective line as said B3790, and preferably the activity is increased non-targeted, or
[47035] (b) a polypeptide comprising a polypeptide, a consensus sequence or at least a polypeptide motif as shown in the respective line in column 5 of Table II or in column 8 of Table IV, application no. 7, respectively, and being depicted in the same respective line as said B3790, or a functional equivalent or a homolog thereof as depicted in column 8 of Table II, application no. 7, preferably a homolog or functional equivalent as depicted in column 8 of Table II B, application no. 7, and being depicted in the same respective line as said B3790, and preferably the activity is increased non-targeted, whereby the respective line disclose in column 7 the fine chemical gamma-tocopherol.

[47036] Accordingly, in one embodiment, the molecule which activity is to be increased in the process of the invention is the gene product with an activity as a “lipopolysaccharide biosynthesis protein”, preferably it is the molecule of section (a) or (b) of this paragraph.

[47037] In particular, it was observed that in plants, especially in Arabidopsis thaliana, increasing or generating the activity of a gene product non-targeted with the activity of a “lipopolysaccharide biosynthesis protein”, preferably being encoded by a gene comprising the nucleic acid sequence SEQ ID NO. 112606, preferably the coding region thereof, conferred the production of or the increase in gamma-tocopherol compared with the wild type control.

[47038] The nucleic acid sequence of B3890 from Escherichia coli, e.g. as shown in the respective line in column 5 of Table I, application no. 7, has been published in B. And the activity of the gene product thereof is the activity of b3890-protein.

[47039] Accordingly, in one embodiment, the process of the present invention for producing alpha-tocopherol in a non-human organism, like a microorganism or a plant or a part thereof, comprises increasing or generating the activity of a gene product with the activity of a gene product conferring the activity of “b3890-protein”, especially from Escherichia coli or its functional equivalent or its homolog, e.g. the increase of
[47040] (a) a gene product of a gene comprising the nucleic acid molecule as shown in the respective line in column 5 of Table I (whereby the respective line disclose in column 7 the fine chemical alpha-tocopherol), application no. 7, preferably the coding region thereof, or a homolog or a fragment thereof, and being depicted in the same respective line as said B3890, or a functional equivalent or a homolog thereof as shown in column 8 of Table I, application no. 7, preferably the coding region thereof, particularly a homolog or functional equivalent as shown in column 8 of Table I B, application no. 7, and being depicted in the same respective line as said B3890, and preferably the activity is increased non-targeted, or
[47041] (b) a polypeptide comprising a polypeptide, a consensus sequence or at least a polypeptide motif as shown in the respective line in column 5 of Table II or in column 8 of Table IV, application no. 7, respectively, and being depicted in the same respective line as said B3890, or a functional equivalent or a homolog thereof as depicted in column 8 of Table II, application no. 7, preferably a homolog or functional equivalent as depicted in column 8 of Table II B, application no. 7, and being depicted in the same respective line as said B3890, and preferably the activity is increased non-targeted, whereby the respective line disclose in column 7 the fine chemical alpha-tocopherol.

[47042] Accordingly, in one embodiment, the molecule which activity is to be increased in the process of the invention is the gene product with an activity as a “b3890-protein”, preferably it is the molecule of section (a) or (b) of this paragraph.

[47043] In particular, it was observed that in plants, especially in Arabidopsis thaliana, increasing or generating the activity of a gene product non-targeted with the activity of a “b3890-protein”, preferably being encoded by a gene comprising the nucleic acid sequence SEQ ID NO. 112634, preferably the coding region thereof, conferred the production of or the increase in alpha-tocopherol compared with the wild type control.

[47044] The nucleic acid sequence of B3945 from Escherichia coli, e.g. as shown in the respective line in column 5 of Table I, application no. 7, has been published in B. And the activity of the gene product thereof is the activity of glycerol dehydrogenase.

[47045] Accordingly, in one embodiment, the process of the present invention for producing alpha-tocopherol in a non-human organism, like a microorganism or a plant or a part thereof, comprises increasing or generating the activity of a gene product with the activity of a gene product conferring the activity of “glycerol dehydrogenase”, especially from Escherichia coli or its functional equivalent or its homolog, e.g. the increase of
[47046] (a) a gene product of a gene comprising the nucleic acid molecule as shown in the respective line in column 5 of Table I (whereby the respective line disclose in column 7 the fine chemical alpha-tocopherol), application no. 7, preferably the coding region thereof, or a homolog or a fragment thereof, and being depicted in the same respective line as said B3945, or a functional equivalent or a homolog thereof as shown in column 8 of Table I, application no. 7, preferably the coding region thereof, particularly a homolog or functional equivalent as shown in column 8 of Table I B, application no. 7, and being depicted in the same respective line as said B3945, and preferably the activity is increased non-targeted, or
[47047] (b) a polypeptide comprising a polypeptide, a consensus sequence or at least a polypeptide motif as shown in the respective line in column 5 of Table II or in column 8 of Table IV, application no. 7, respectively, and being depicted in the same respective line as said B3945, or a functional equivalent or a homolog thereof as depicted in column 8 of Table II, application no. 7, preferably a homolog or functional equivalent as depicted in column 8 of Table II B, application no. 7, and being depicted in the same respective line as said B3945, and preferably the activity is increased non-targeted, whereby the respective line disclose in column 7 the fine chemical alpha-tocopherol.

[47048] Accordingly, in one embodiment, the molecule which activity is to be increased in the process of the invention is the gene product with an activity as a “glycerol dehydrogenase”, preferably it is the molecule of section (a) or (b) of this paragraph.

[47049] In particular, it was observed that in plants, especially in Arabidopsis thaliana, increasing or generating the activity of a gene product non-targeted with the activity of a “glycerol dehydrogenase”, preferably being encoded by a gene comprising the nucleic acid sequence SEQ ID NO. 44223, preferably the coding region thereof, conferred the production of or the increase in alpha-tocopherol compared with the wild type control.

[47050] The nucleic acid sequence of B3989 from Escherichia coli, e.g. as shown in the respective line in column 5 of Table I, application no. 7, has been published in B. And the activity of the gene product thereof is the activity of b3989-protein.

[47051] Accordingly, in one embodiment, the process of the present invention for producing alpha-tocopherol in a non-human organism, like a microorganism or a plant or a part thereof, comprises increasing or generating the activity of a gene product with the activity of a gene product conferring the activity of “b3989-protein”, especially from Escherichia coli or its functional equivalent or its homolog, e.g. the increase of
[47052] (a) a gene product of a gene comprising the nucleic acid molecule as shown in the respective line in column 5 of Table I (whereby the respective line disclose in column 7 the fine chemical alpha-tocopherol), application no. 7, preferably the coding region thereof, or a homolog or a fragment thereof, and being depicted in the same respective line as said B3989, or a functional equivalent or a homolog thereof as shown in column 8 of Table I, application no. 7, preferably the coding region thereof, particularly a homolog or functional equivalent as shown in column 8 of Table I B, application no. 7, and being depicted in the same respective line as said B3989, and preferably the activity is increased non-targeted, or
[47053] (b) a polypeptide comprising a polypeptide, a consensus sequence or at least a polypeptide motif as shown in the respective line in column 5 of Table II or in column 8 of Table IV, application no. 7, respectively, and being depicted in the same respective line as said B3989, or a functional equivalent or a homolog thereof as depicted in column 8 of Table II, application no. 7, preferably a homolog or functional equivalent as depicted in column 8 of Table II B, application no. 7, and being depicted in the same respective line as said B3989, and preferably the activity is increased non-targeted, whereby the respective line disclose in column 7 the fine chemical alpha-tocopherol.

[47054] Accordingly, in one embodiment, the molecule which activity is to be increased in the process of the invention is the gene product with an activity as a “b3989-protein”, preferably it is the molecule of section (a) or (b) of this paragraph.

[47055] In particular, it was observed that in plants, especially in Arabidopsis thaliana, increasing or generating the activity of a gene product non-targeted with the activity of a “b3989-protein”, preferably being encoded by a gene comprising the nucleic acid sequence SEQ ID NO. 44372, preferably the coding region thereof, conferred the production of or the increase in alpha-tocopherol compared with the wild type control.

[47056] The nucleic acid sequence of B3989 from Escherichia coli, e.g. as shown in the respective line in column 5 of Table I, application no. 7, has been published in B. And the activity of the gene product thereof is the activity of b3989-protein.

[47057] Accordingly, in one embodiment, the process of the present invention for producing gamma-tocopherol in a non-human organism, like a microorganism or a plant or a part thereof, comprises increasing or generating the activity of a gene product with the activity of a gene product conferring the activity of “b3989-protein”, especially from Escherichia coli or its functional equivalent or its homolog, e.g. the increase of
[47058] (a) a gene product of a gene comprising the nucleic acid molecule as shown in the respective line in column 5 of Table I (whereby the respective line disclose in column 7 the fine chemical gamma-tocopherol), application no. 7, preferably the coding region thereof, or a homolog or a fragment thereof, and being depicted in the same respective line as said B3989, or a functional equivalent or a homolog thereof as shown in column 8 of Table I, application no. 7, preferably the coding region thereof, particularly a homolog or functional equivalent as shown in column 8 of Table I B, application no. 7, and being depicted in the same respective line as said B3989, and preferably the activity is increased non-targeted, or
[47059] (b) a polypeptide comprising a polypeptide, a consensus sequence or at least a polypeptide motif as shown in the respective line in column 5 of Table II or in column 8 of Table IV, application no. 7, respectively, and being depicted in the same respective line as said B3989, or a functional equivalent or a homolog thereof as depicted in column 8 of Table II, application no. 7, preferably a homolog or functional equivalent as depicted in column 8 of Table II B, application no. 7, and being depicted in the same respective line as said B3989, and preferably the activity is increased non-targeted, whereby the respective line disclose in column 7 the fine chemical gamma-tocopherol.

[47060] Accordingly, in one embodiment, the molecule which activity is to be increased in the process of the invention is the gene product with an activity as a “b3989-protein”, preferably it is the molecule of section (a) or (b) of this paragraph.

[47061] In particular, it was observed that in plants, especially in Arabidopsis thaliana, increasing or generating the activity of a gene product non-targeted with the activity of a “b3989-protein”, preferably being encoded by a gene comprising the nucleic acid sequence SEQ ID NO. 44372, preferably the coding region thereof, conferred the production of or the increase in gamma-tocopherol compared with the wild type control.

[47062] The nucleic acid sequence of B4029 from Escherichia coli, e.g. as shown in the respective line in column 5 of Table I, application no. 7, has been published in B. And the activity of the gene product thereof is the activity of b4029-protein.

[47063] Accordingly, in one embodiment, the process of the present invention for producing gamma-tocopherol in a non-human organism, like a microorganism or a plant or a part thereof, comprises increasing or generating the activity of a gene product with the activity of a gene product conferring the activity of “b4029-protein”, especially from Escherichia coli or its functional equivalent or its homolog, e.g. the increase of
[47064] (a) a gene product of a gene comprising the nucleic acid molecule as shown in the respective line in column 5 of Table I (whereby the respective line disclose in column 7 the fine chemical gamma-tocopherol), application no. 7, preferably the coding region thereof, or a homolog or a fragment thereof, and being depicted in the same respective line as said B4029, or a functional equivalent or a homolog thereof as shown in column 8 of Table I, application no. 7, preferably the coding region thereof, particularly a homolog or functional equivalent as shown in column 8 of Table I B, application no. 7, and being depicted in the same respective line as said B4029, and preferably the activity is increased non-targeted, or
[47065] (b) a polypeptide comprising a polypeptide, a consensus sequence or at least a polypeptide motif as shown in the respective line in column 5 of Table II or in column 8 of Table IV, application no. 7, respectively, and being depicted in the same respective line as said B4029, or a functional equivalent or a homolog thereof as depicted in column 8 of Table II, application no. 7, preferably a homolog or functional equivalent as depicted in column 8 of Table II B, application no. 7, and being depicted in the same respective line as said B4029, and preferably the activity is increased non-targeted, whereby the respective line disclose in column 7 the fine chemical gamma-tocopherol.

[47066] Accordingly, in one embodiment, the molecule which activity is to be increased in the process of the invention is the gene product with an activity as a “b4029-protein”, preferably it is the molecule of section (a) or (b) of this paragraph.

[47067] In particular, it was observed that in plants, especially in Arabidopsis thaliana, increasing or generating the activity of a gene product non-targeted with the activity of a “b4029-protein”, preferably being encoded by a gene comprising the nucleic acid sequence SEQ ID NO. 10740, preferably the coding region thereof, conferred the production of or the increase in gamma-tocopherol compared with the wild type control.

[47068] The nucleic acid sequence of B4050 from Escherichia coli, e.g. as shown in the respective line in column 5 of Table I, application no. 7, has been published in B. And the activity of the gene product thereof is the activity of b4050-protein.

[47069] Accordingly, in one embodiment, the process of the present invention for producing alpha-tocopherol in a non-human organism, like a microorganism or a plant or a part thereof, comprises increasing or generating the activity of a gene product with the activity of a gene product conferring the activity of “b4050-protein”, especially from Escherichia coli or its functional equivalent or its homolog, e.g. the increase of
[47070] (a) a gene product of a gene comprising the nucleic acid molecule as shown in the respective line in column 5 of Table I (whereby the respective line disclose in column 7 the fine chemical alpha-tocopherol), application no. 7, preferably the coding region thereof, or a homolog or a fragment thereof, and being depicted in the same respective line as said B4050, or a functional equivalent or a homolog thereof as shown in column 8 of Table I, application no. 7, preferably the coding region thereof, particularly a homolog or functional equivalent as shown in column 8 of Table I B, application no. 7, and being depicted in the same respective line as said B4050, and preferably the activity is increased non-targeted, or
[47071] (b) a polypeptide comprising a polypeptide, a consensus sequence or at least a polypeptide motif as shown in the respective line in column 5 of Table II or in column 8 of Table IV, application no. 7, respectively, and being depicted in the same respective line as said B4050, or a functional equivalent or a homolog thereof as depicted in column 8 of Table II, application no. 7, preferably a homolog or functional equivalent as depicted in column 8 of Table II B, application no. 7, and being depicted in the same respective line as said B4050, and preferably the activity is increased non-targeted, whereby the respective line disclose in column 7 the fine chemical alpha-tocopherol.

[47072] Accordingly, in one embodiment, the molecule which activity is to be increased in the process of the invention is the gene product with an activity as a “b4050-protein”, preferably it is the molecule of section (a) or (b) of this paragraph.

[47073] In particular, it was observed that in plants, especially in Arabidopsis thaliana, increasing or generating the activity of a gene product non-targeted with the activity of a “b4050-protein”, preferably being encoded by a gene comprising the nucleic acid sequence SEQ ID NO. 106532, preferably the coding region thereof, conferred the production of or the increase in alpha-tocopherol compared with the wild type control.

[47074] The nucleic acid sequence of B4056 from Escherichia coli, e.g. as shown in the respective line in column 5 of Table I, application no. 7, has been published in B. And the activity of the gene product thereof is the activity of b4056-protein.

[47075] Accordingly, in one embodiment, the process of the present invention for producing alpha-tocopherol in a non-human organism, like a microorganism or a plant or a part thereof, comprises increasing or generating the activity of a gene product with the activity of a gene product conferring the activity of “b4056-protein”, especially from Escherichia coli or its functional equivalent or its homolog, e.g. the increase of
[47076] (a) a gene product of a gene comprising the nucleic acid molecule as shown in the respective line in column 5 of Table I (whereby the respective line disclose in column 7 the fine chemical alpha-tocopherol), application no. 7, preferably the coding region thereof, or a homolog or a fragment thereof, and being depicted in the same respective line as said B4056, or a functional equivalent or a homolog thereof as shown in column 8 of Table I, application no. 7, preferably the coding region thereof, particularly a homolog or functional equivalent as shown in column 8 of Table I B, application no. 7, and being depicted in the same respective line as said B4056, and preferably the activity is increased non-targeted, or
[47077] (b) a polypeptide comprising a polypeptide, a consensus sequence or at least a polypeptide motif as shown in the respective line in column 5 of Table II or in column 8 of Table IV, application no. 7, respectively, and being depicted in the same respective line as said B4056, or a functional equivalent or a homolog thereof as depicted in column 8 of Table II, application no. 7, preferably a homolog or functional equivalent as depicted in column 8 of Table II B, application no. 7, and being depicted in the same respective line as said B4056, and preferably the activity is increased non-targeted, whereby the respective line disclose in column 7 the fine chemical alpha-tocopherol.

[47078] Accordingly, in one embodiment, the molecule which activity is to be increased in the process of the invention is the gene product with an activity as a “b4056-protein”, preferably it is the molecule of section (a) or (b) of this paragraph.

[47079] In particular, it was observed that in plants, especially in Arabidopsis thaliana, increasing or generating the activity of a gene product non-targeted with the activity of a “b4056-protein”, preferably being encoded by a gene comprising the nucleic acid sequence SEQ ID NO. 94542, preferably the coding region thereof, conferred the production of or the increase in alpha-tocopherol compared with the wild type control.

[47080] The nucleic acid sequence of B4256 from Escherichia coli, e.g. as shown in the respective line in column 5 of Table I, application no. 7, has been published in B. And the activity of the gene product thereof is the activity of acetyltransferase.

[47081] Accordingly, in one embodiment, the process of the present invention for producing alpha-tocopherol in a non-human organism, like a microorganism or a plant or a part thereof, comprises increasing or generating the activity of a gene product with the activity of a gene product conferring the activity of “acetyltransferase”, especially from Escherichia coli or its functional equivalent or its homolog, e.g. the increase of
[47082] (a) a gene product of a gene comprising the nucleic acid molecule as shown in the respective line in column 5 of Table I (whereby the respective line disclose in column 7 the fine chemical alpha-tocopherol), application no. 7, preferably the coding region thereof, or a homolog or a fragment thereof, and being depicted in the same respective line as said B4256, or a functional equivalent or a homolog thereof as shown in column 8 of Table I, application no. 7, preferably the coding region thereof, particularly a homolog or functional equivalent as shown in column 8 of Table I B, application no. 7, and being depicted in the same respective line as said B4256, and preferably the activity is increased non-targeted, or
[47083] (b) a polypeptide comprising a polypeptide, a consensus sequence or at least a polypeptide motif as shown in the respective line in column 5 of Table II or in column 8 of Table IV, application no. 7, respectively, and being depicted in the same respective line as said B4256, or a functional equivalent or a homolog thereof as depicted in column 8 of Table II, application no. 7, preferably a homolog or functional equivalent as depicted in column 8 of Table II B, application no. 7, and being depicted in the same respective line as said B4256, and preferably the activity is increased non-targeted, whereby the respective line disclose in column 7 the fine chemical alpha-tocopherol.

[47084] Accordingly, in one embodiment, the molecule which activity is to be increased in the process of the invention is the gene product with an activity as a “acetyltransferase”, preferably it is the molecule of section (a) or (b) of this paragraph.

[47085] In particular, it was observed that in plants, especially in Arabidopsis thaliana, increasing or generating the activity of a gene product non-targeted with the activity of a “acetyltransferase”, preferably being encoded by a gene comprising the nucleic acid sequence SEQ ID NO. 45321, preferably the coding region thereof, conferred the production of or the increase in alpha-tocopherol compared with the wild type control.

[47086] The nucleic acid sequence of B4256 from Escherichia coli, e.g. as shown in the respective line in column 5 of Table I, application no. 7, has been published in B. And the activity of the gene product thereof is the activity of acetyltransferase.

[47087] Accordingly, in one embodiment, the process of the present invention for producing gamma-tocopherol in a non-human organism, like a microorganism or a plant or a part thereof, comprises increasing or generating the activity of a gene product with the activity of a gene product conferring the activity of “acetyltransferase”, especially from Escherichia coli or its functional equivalent or its homolog, e.g. the increase of
[47088] (a) a gene product of a gene comprising the nucleic acid molecule as shown in the respective line in column 5 of Table I (whereby the respective line disclose in column 7 the fine chemical gamma-tocopherol), application no. 7, preferably the coding region thereof, or a homolog or a fragment thereof, and being depicted in the same respective line as said B4256, or a functional equivalent or a homolog thereof as shown in column 8 of Table I, application no. 7, preferably the coding region thereof, particularly a homolog or functional equivalent as shown in column 8 of Table I B, application no. 7, and being depicted in the same respective line as said B4256, and preferably the activity is increased non-targeted, or
[47089] (b) a polypeptide comprising a polypeptide, a consensus sequence or at least a polypeptide motif as shown in the respective line in column 5 of Table II or in column 8 of Table IV, application no. 7, respectively, and being depicted in the same respective line as said B4256, or a functional equivalent or a homolog thereof as depicted in column 8 of Table II, application no. 7, preferably a homolog or functional equivalent as depicted in column 8 of Table II B, application no. 7, and being depicted in the same respective line as said B4256, and preferably the activity is increased non-targeted, whereby the respective line disclose in column 7 the fine chemical gamma-tocopherol.

[47090] Accordingly, in one embodiment, the molecule which activity is to be increased in the process of the invention is the gene product with an activity as a “acetyltransferase”, preferably it is the molecule of section (a) or (b) of this paragraph.

[47091] In particular, it was observed that in plants, especially in Arabidopsis thaliana, increasing or generating the activity of a gene product non-targeted with the activity of a “acetyltransferase”, preferably being encoded by a gene comprising the nucleic acid sequence SEQ ID NO. 45321, preferably the coding region thereof, conferred the production of or the increase in gamma-tocopherol compared with the wild type control.

[47092] The nucleic acid sequence of B4321 from Escherichia coli, e.g. as shown in the respective line in column 5 of Table I, application no. 7, has been published in B. And the activity of the gene product thereof is the activity of gluconate transport system permease 3.

[47093] Accordingly, in one embodiment, the process of the present invention for producing alpha-tocopherol in a non-human organism, like a microorganism or a plant or a part thereof, comprises increasing or generating the activity of a gene product with the activity of a gene product conferring the activity of “gluconate transport system permease 3”, especially from Escherichia coli or its functional equivalent or its homolog, e.g. the increase of
[47094] (a) a gene product of a gene comprising the nucleic acid molecule as shown in the respective line in column 5 of Table I (whereby the respective line disclose in column 7 the fine chemical alpha-tocopherol), application no. 7, preferably the coding region thereof, or a homolog or a fragment thereof, and being depicted in the same respective line as said B4321, or a functional equivalent or a homolog thereof as shown in column 8 of Table I, application no. 7, preferably the coding region thereof, particularly a homolog or functional equivalent as shown in column 8 of Table I B, application no. 7, and being depicted in the same respective line as said B4321, and preferably the activity is increased non-targeted, or
[47095] (b) a polypeptide comprising a polypeptide, a consensus sequence or at least a polypeptide motif as shown in the respective line in column 5 of Table II or in column 8 of Table IV, application no. 7, respectively, and being depicted in the same respective line as said B4321, or a functional equivalent or a homolog thereof as depicted in column 8 of Table II, application no. 7, preferably a homolog or functional equivalent as depicted in column 8 of Table II B, application no. 7, and being depicted in the same respective line as said B4321, and preferably the activity is increased non-targeted, whereby the respective line disclose in column 7 the fine chemical alpha-tocopherol.

[47096] Accordingly, in one embodiment, the molecule which activity is to be increased in the process of the invention is the gene product with an activity as a “gluconate transport system permease 3”, preferably it is the molecule of section (a) or (b) of this paragraph.

[47097] In particular, it was observed that in plants, especially in Arabidopsis thaliana, increasing or generating the activity of a gene product non-targeted with the activity of a “gluconate transport system permease 3”, preferably being encoded by a gene comprising the nucleic acid sequence SEQ ID NO. 45394, preferably the coding region thereof, conferred the production of or the increase in alpha-tocopherol compared with the wild type control.

[47098] The nucleic acid sequence of B4321 from Escherichia coli, e.g. as shown in the respective line in column 5 of Table I, application no. 7, has been published in B. And the activity of the gene product thereof is the activity of gluconate transport system permease 3.

[47099] Accordingly, in one embodiment, the process of the present invention for producing gamma-tocopherol in a non-human organism, like a microorganism or a plant or a part thereof, comprises increasing or generating the activity of a gene product with the activity of a gene product conferring the activity of “gluconate transport system permease 3”, especially from Escherichia coli or its functional equivalent or its homolog, e.g. the increase of
[47100] (a) a gene product of a gene comprising the nucleic acid molecule as shown in the respective line in column 5 of Table I (whereby the respective line disclose in column 7 the fine chemical gamma-tocopherol), application no. 7, preferably the coding region thereof, or a homolog or a fragment thereof, and being depicted in the same respective line as said B4321, or a functional equivalent or a homolog thereof as shown in column 8 of Table I, application no. 7, preferably the coding region thereof, particularly a homolog or functional equivalent as shown in column 8 of Table I B, application no. 7, and being depicted in the same respective line as said B4321, and preferably the activity is increased non-targeted, or
[47101] (b) a polypeptide comprising a polypeptide, a consensus sequence or at least a polypeptide motif as shown in the respective line in column 5 of Table II or in column 8 of Table IV, application no. 7, respectively, and being depicted in the same respective line as said B4321, or a functional equivalent or a homolog thereof as depicted in column 8 of Table II, application no. 7, preferably a homolog or functional equivalent as depicted in column 8 of Table II B, application no. 7, and being depicted in the same respective line as said B4321, and preferably the activity is increased non-targeted, whereby the respective line disclose in column 7 the fine chemical gamma-tocopherol.

[47102] Accordingly, in one embodiment, the molecule which activity is to be increased in the process of the invention is the gene product with an activity as a “gluconate transport system permease 3”, preferably it is the molecule of section (a) or (b) of this paragraph.

[47103] In particular, it was observed that in plants, especially in Arabidopsis thaliana, increasing or generating the activity of a gene product non-targeted with the activity of a “gluconate transport system permease 3”, preferably being encoded by a gene comprising the nucleic acid sequence SEQ ID NO. 45394, preferably the coding region thereof, conferred the production of or the increase in gamma-tocopherol compared with the wild type control.

[47104] The nucleic acid sequence of C_pp004096192r from Physcomitrella patens, e.g. as shown in the respective line in column 5 of Table I, application no. 7, is unpublished. And the activity of the gene product thereof is the activity of thioredoxin.

[47105] Accordingly, in one embodiment, the process of the present invention for producing gamma-tocopherol in a non-human organism, like a microorganism or a plant or a part thereof, comprises increasing or generating the activity of a gene product with the activity of a gene product conferring the activity of “thioredoxin”, especially from Physcomitrella patens or its functional equivalent or its homolog, e.g. the increase of
[47106] (a) a gene product of a gene comprising the nucleic acid molecule as shown in the respective line in column 5 of Table I (whereby the respective line disclose in column 7 the fine chemical gamma-tocopherol), application no. 7, preferably the coding region thereof, or a homolog or a fragment thereof, and being depicted in the same respective line as said C_pp004096192r, or a functional equivalent or a homolog thereof as shown in column 8 of Table I, application no. 7, preferably the coding region thereof, particularly a homolog or functional equivalent as shown in column 8 of Table I B, application no. 7, and being depicted in the same respective line as said C_pp004096192r, and preferably the activity is increased non-targeted, or
[47107] (b) a polypeptide comprising a polypeptide, a consensus sequence or at least a polypeptide motif as shown in the respective line in column 5 of Table II or in column 8 of Table IV, application no. 7, respectively, and being depicted in the same respective line as said C_pp004096192r, or a functional equivalent or a homolog thereof as depicted in column 8 of Table II, application no. 7, preferably a homolog or functional equivalent as depicted in column 8 of Table II B, application no. 7, and being depicted in the same respective line as said C_pp004096192r, and preferably the activity is increased non-targeted, whereby the respective line disclose in column 7 the fine chemical gamma-tocopherol.

[47108] Accordingly, in one embodiment, the molecule which activity is to be increased in the process of the invention is the gene product with an activity as a “thioredoxin”, preferably it is the molecule of section (a) or (b) of this paragraph.

[47109] In particular, it was observed that in plants, especially in Arabidopsis thaliana, increasing or generating the activity of a gene product non-targeted with the activity of a “thioredoxin”, preferably being encoded by a gene comprising the nucleic acid sequence SEQ ID NO. 45757, preferably the coding region thereof, conferred the production of or the increase in gamma-tocopherol compared with the wild type control.

[47110] The nucleic acid sequence of GM02LC12622 from Glycine max, e.g. as shown in the respective line in column 5 of Table I, application no. 7, is unpublished. And the activity of the gene product thereof is the activity of glutaredoxin.

[47111] Accordingly, in one embodiment, the process of the present invention for producing alpha-tocopherol in a non-human organism, like a microorganism or a plant or a part thereof, comprises increasing or generating the activity of a gene product with the activity of a gene product conferring the activity of “glutaredoxin”, especially from Glycine max or its functional equivalent or its homolog, e.g. the increase of
[47112] (a) a gene product of a gene comprising the nucleic acid molecule as shown in the respective line in column 5 of Table I (whereby the respective line disclose in column 7 the fine chemical alpha-tocopherol), application no. 7, preferably the coding region thereof, or a homolog or a fragment thereof, and being depicted in the same respective line as said GM02LC12622, or a functional equivalent or a homolog thereof as shown in column 8 of Table I, application no. 7, preferably the coding region thereof, particularly a homolog or functional equivalent as shown in column 8 of Table I B, application no. 7, and being depicted in the same respective line as said GM02LC12622, and preferably the activity is increased non-targeted, or
[47113] (b) a polypeptide comprising a polypeptide, a consensus sequence or at least a polypeptide motif as shown in the respective line in column 5 of Table II or in column 8 of Table IV, application no. 7, respectively, and being depicted in the same respective line as said GM02LC12622, or a functional equivalent or a homolog thereof as depicted in column 8 of Table II, application no. 7, preferably a homolog or functional equivalent as depicted in column 8 of Table II B, application no. 7, and being depicted in the same respective line as said GM02LC12622, and preferably the activity is increased non-targeted, whereby the respective line disclose in column 7 the fine chemical alpha-tocopherol.

[47114] Accordingly, in one embodiment, the molecule which activity is to be increased in the process of the invention is the gene product with an activity as a “glutaredoxin”, preferably it is the molecule of section (a) or (b) of this paragraph.

[47115] In particular, it was observed that in plants, especially in Arabidopsis thaliana, increasing or generating the activity of a gene product non-targeted with the activity of a “glutaredoxin”, preferably being encoded by a gene comprising the nucleic acid sequence SEQ ID NO. 10811, preferably the coding region thereof, conferred the production of or the increase in alpha-tocopherol compared with the wild type control.

[47116] The nucleic acid sequence of GM02LC12622 from Glycine max, e.g. as shown in the respective line in column 5 of Table I, application no. 7, is unpublished. And the activity of the gene product thereof is the activity of glutaredoxin.

[47117] Accordingly, in one embodiment, the process of the present invention for producing gamma-tocopherol in a non-human organism, like a microorganism or a plant or a part thereof, comprises increasing or generating the activity of a gene product with the activity of a gene product conferring the activity of “glutaredoxin”, especially from Glycine max or its functional equivalent or its homolog, e.g. the increase of
[47118] (a) a gene product of a gene comprising the nucleic acid molecule as shown in the respective line in column 5 of Table I (whereby the respective line disclose in column 7 the fine chemical gamma-tocopherol), application no. 7, preferably the coding region thereof, or a homolog or a fragment thereof, and being depicted in the same respective line as said GM02LC12622, or a functional equivalent or a homolog thereof as shown in column 8 of Table I, application no. 7, preferably the coding region thereof, particularly a homolog or functional equivalent as shown in column 8 of Table I B, application no. 7, and being depicted in the same respective line as said GM02LC12622, and preferably the activity is increased non-targeted, or
[47119] (b) a polypeptide comprising a polypeptide, a consensus sequence or at least a polypeptide motif as shown in the respective line in column 5 of Table II or in column 8 of Table IV, application no. 7, respectively, and being depicted in the same respective line as said GM02LC12622, or a functional equivalent or a homolog thereof as depicted in column 8 of Table II, application no. 7, preferably a homolog or functional equivalent as depicted in column 8 of Table II B, application no. 7, and being depicted in the same respective line as said GM02LC12622, and preferably the activity is increased non-targeted, whereby the respective line disclose in column 7 the fine chemical gamma-tocopherol.

[47120] Accordingly, in one embodiment, the molecule which activity is to be increased in the process of the invention is the gene product with an activity as a “glutaredoxin”, preferably it is the molecule of section (a) or (b) of this paragraph.

[47121] In particular, it was observed that in plants, especially in Arabidopsis thaliana, increasing or generating the activity of a gene product non-targeted with the activity of a “glutaredoxin”, preferably being encoded by a gene comprising the nucleic acid sequence SEQ ID NO. 10811, preferably the coding region thereof, conferred the production of or the increase in gamma-tocopherol compared with the wild type control.

[47122] The nucleic acid sequence of GM02LC21368 from Glycine max, e.g. as shown in the respective line in column 5 of Table I, application no. 7, is unpublished. And the activity of the gene product thereof is the activity of transcription factor.

[47123] Accordingly, in one embodiment, the process of the present invention for producing gamma-tocopherol in a non-human organism, like a microorganism or a plant or a part thereof, comprises increasing or generating the activity of a gene product with the activity of a gene product conferring the activity of “transcription factor”, especially from Glycine max or its functional equivalent or its homolog, e.g. the increase of
[47124] (a) a gene product of a gene comprising the nucleic acid molecule as shown in the respective line in column 5 of Table I (whereby the respective line disclose in column 7 the fine chemical gamma-tocopherol), application no. 7, preferably the coding region thereof, or a homolog or a fragment thereof, and being depicted in the same respective line as said GM02LC21368, or a functional equivalent or a homolog thereof as shown in column 8 of Table I, application no. 7, preferably the coding region thereof, particularly a homolog or functional equivalent as shown in column 8 of Table I B, application no. 7, and being depicted in the same respective line as said GM02LC21368, and preferably the activity is increased non-targeted, or
[47125] (b) a polypeptide comprising a polypeptide, a consensus sequence or at least a polypeptide motif as shown in the respective line in column 5 of Table II or in column 8 of Table IV, application no. 7, respectively, and being depicted in the same respective line as said GM02LC21368, or a functional equivalent or a homolog thereof as depicted in column 8 of Table II, application no. 7, preferably a homolog or functional equivalent as depicted in column 8 of Table II B, application no. 7, and being depicted in the same respective line as said GM02LC21368, and preferably the activity is increased non-targeted, whereby the respective line disclose in column 7 the fine chemical gamma-tocopherol.

[47126] Accordingly, in one embodiment, the molecule which activity is to be increased in the process of the invention is the gene product with an activity as a “transcription factor”, preferably it is the molecule of section (a) or (b) of this paragraph.

[47127] In particular, it was observed that in plants, especially in Arabidopsis thaliana, increasing or generating the activity of a gene product non-targeted with the activity of a “transcription factor”, preferably being encoded by a gene comprising the nucleic acid sequence SEQ ID NO. 84198, preferably the coding region thereof, conferred the production of or the increase in gamma-tocopherol compared with the wild type control.

[47128] The nucleic acid sequence of Sll0290 from Synechocystis sp., e.g. as shown in the respective line in column 5 of Table I, application no. 7, has been published in C. And the activity of the gene product thereof is the activity of polyphosphate kinase.

[47129] Accordingly, in one embodiment, the process of the present invention for producing alpha-tocopherol in a non-human organism, like a microorganism or a plant or a part thereof, comprises increasing or generating the activity of a gene product with the activity of a gene product conferring the activity of “polyphosphate kinase”, especially from Synechocystis sp. or its functional equivalent or its homolog, e.g. the increase of
[47130] (a) a gene product of a gene comprising the nucleic acid molecule as shown in the respective line in column 5 of Table I (whereby the respective line disclose in column 7 the fine chemical alpha-tocopherol), application no. 7, preferably the coding region thereof, or a homolog or a fragment thereof, and being depicted in the same respective line as said Sll0290, or a functional equivalent or a homolog thereof as shown in column 8 of Table I, application no. 7, preferably the coding region thereof, particularly a homolog or functional equivalent as shown in column 8 of Table I B, application no. 7, and being depicted in the same respective line as said Sll0290, and preferably the activity is increased non-targeted, or
[47131] (b) a polypeptide comprising a polypeptide, a consensus sequence or at least a polypeptide motif as shown in the respective line in column 5 of Table II or in column 8 of Table IV, application no. 7, respectively, and being depicted in the same respective line as said Sll0290, or a functional equivalent or a homolog thereof as depicted in column 8 of Table II, application no. 7, preferably a homolog or functional equivalent as depicted in column 8 of Table II B, application no. 7, and being depicted in the same respective line as said Sll0290, and preferably the activity is increased non-targeted, whereby the respective line disclose in column 7 the fine chemical alpha-tocopherol.

[47132] Accordingly, in one embodiment, the molecule which activity is to be increased in the process of the invention is the gene product with an activity as a “polyphosphate kinase”, preferably it is the molecule of section (a) or (b) of this paragraph.

[47133] In particular, it was observed that in plants, especially in Arabidopsis thaliana, increasing or generating the activity of a gene product non-targeted with the activity of a “polyphosphate kinase”, preferably being encoded by a gene comprising the nucleic acid sequence SEQ ID NO. 49828, preferably the coding region thereof, conferred the production of or the increase in alpha-tocopherol compared with the wild type control.

[47134] The nucleic acid sequence of Sll0745 from Synechocystis sp., e.g. as shown in the respective line in column 5 of Table I, application no. 7, has been published in C. And the activity of the gene product thereof is the activity of phosphofructokinase.

[47135] Accordingly, in one embodiment, the process of the present invention for producing gamma-tocopherol in a non-human organism, like a microorganism or a plant or a part thereof, comprises increasing or generating the activity of a gene product with the activity of a gene product conferring the activity of “phosphofructokinase”, especially from Synechocystis sp. or its functional equivalent or its homolog, e.g. the increase of
[47136] (a) a gene product of a gene comprising the nucleic acid molecule as shown in the respective line in column 5 of Table I (whereby the respective line disclose in column 7 the fine chemical gamma-tocopherol), application no. 7, preferably the coding region thereof, or a homolog or a fragment thereof, and being depicted in the same respective line as said Sll0745, or a functional equivalent or a homolog thereof as shown in column 8 of Table I, application no. 7, preferably the coding region thereof, particularly a homolog or functional equivalent as shown in column 8 of Table I B, application no. 7, and being depicted in the same respective line as said Sll0745, and preferably the activity is increased mitochondrial, or
[47137] (b) a polypeptide comprising a polypeptide, a consensus sequence or at least a polypeptide motif as shown in the respective line in column 5 of Table II or in column 8 of Table IV, application no. 7, respectively, and being depicted in the same respective line as said Sll0745, or a functional equivalent or a homolog thereof as depicted in column 8 of Table II, application no. 7, preferably a homolog or functional equivalent as depicted in column 8 of Table II B, application no. 7, and being depicted in the same respective line as said Sll0745, and preferably the activity is increased mitochondrial, whereby the respective line disclose in column 7 the fine chemical gamma-tocopherol.

[47138] Accordingly, in one embodiment, the molecule which activity is to be increased in the process of the invention is the gene product with an activity as a “phosphofructokinase”, preferably it is the molecule of section (a) or (b) of this paragraph.

[47139] In particular, it was observed that in plants, especially in Arabidopsis thaliana, increasing or generating the activity of a gene product mitochondrial with the activity of a “phosphofructokinase”, preferably being encoded by a gene comprising the nucleic acid sequence SEQ ID NO. 112661, preferably the coding region thereof, conferred the production of or the increase in gamma-tocopherol compared with the wild type control.

[47140] The nucleic acid sequence of Sll1185 from Synechocystis sp., e.g. as shown in the respective line in column 5 of Table I, application no. 7, has been published in C. And the activity of the gene product thereof is the activity of coproporphyrinogen oxidase.

[47141] Accordingly, in one embodiment, the process of the present invention for producing gamma-tocopherol in a non-human organism, like a microorganism or a plant or a part thereof, comprises increasing or generating the activity of a gene product with the activity of a gene product conferring the activity of “coproporphyrinogen oxidase”, especially from Synechocystis sp. or its functional equivalent or its homolog, e.g. the increase of
[47142] (a) a gene product of a gene comprising the nucleic acid molecule as shown in the respective line in column 5 of Table I (whereby the respective line disclose in column 7 the fine chemical gamma-tocopherol), application no. 7, preferably the coding region thereof, or a homolog or a fragment thereof, and being depicted in the same respective line as said Sll1185, or a functional equivalent or a homolog thereof as shown in column 8 of Table I, application no. 7, preferably the coding region thereof, particularly a homolog or functional equivalent as shown in column 8 of Table I B, application no. 7, and being depicted in the same respective line as said Sll1185, and preferably the activity is increased non-targeted, or
[47143] (b) a polypeptide comprising a polypeptide, a consensus sequence or at least a polypeptide motif as shown in the respective line in column 5 of Table II or in column 8 of Table IV, application no. 7, respectively, and being depicted in the same respective line as said Sll1185, or a functional equivalent or a homolog thereof as depicted in column 8 of Table II, application no. 7, preferably a homolog or functional equivalent as depicted in column 8 of Table II B, application no. 7, and being depicted in the same respective line as said Sll1185, and preferably the activity is increased non-targeted, whereby the respective line disclose in column 7 the fine chemical gamma-tocopherol.

[47144] Accordingly, in one embodiment, the molecule which activity is to be increased in the process of the invention is the gene product with an activity as a “coproporphyrinogen oxidase”, preferably it is the molecule of section (a) or (b) of this paragraph.

[47145] In particular, it was observed that in plants, especially in Arabidopsis thaliana, increasing or generating the activity of a gene product non-targeted with the activity of a “coproporphyrinogen oxidase”, preferably being encoded by a gene comprising the nucleic acid sequence SEQ ID NO. 53189, preferably the coding region thereof, conferred the production of or the increase in gamma-tocopherol compared with the wild type control.

[47146] The nucleic acid sequence of Sll1761 from Synechocystis sp., e.g. as shown in the respective line in column 5 of Table I, application no. 7, has been published in C. And the activity of the gene product thereof is the activity of sll1761-protein.

[47147] Accordingly, in one embodiment, the process of the present invention for producing gamma-tocopherol in a non-human organism, like a microorganism or a plant or a part thereof, comprises increasing or generating the activity of a gene product with the activity of a gene product conferring the activity of “sll1761-protein”, especially from Synechocystis sp. or its functional equivalent or its homolog, e.g. the increase of
[47148] (a) a gene product of a gene comprising the nucleic acid molecule as shown in the respective line in column 5 of Table I (whereby the respective line disclose in column 7 the fine chemical gamma-tocopherol), application no. 7, preferably the coding region thereof, or a homolog or a fragment thereof, and being depicted in the same respective line as said Sll1761, or a functional equivalent or a homolog thereof as shown in column 8 of Table I, application no. 7, preferably the coding region thereof, particularly a homolog or functional equivalent as shown in column 8 of Table I B, application no. 7, and being depicted in the same respective line as said Sll1761, and preferably the activity is increased non-targeted, or
[47149] (b) a polypeptide comprising a polypeptide, a consensus sequence or at least a polypeptide motif as shown in the respective line in column 5 of Table II or in column 8 of Table IV, application no. 7, respectively, and being depicted in the same respective line as said Sll1761, or a functional equivalent or a homolog thereof as depicted in column 8 of Table II, application no. 7, preferably a homolog or functional equivalent as depicted in column 8 of Table II B, application no. 7, and being depicted in the same respective line as said Sll1761, and preferably the activity is increased non-targeted, whereby the respective line disclose in column 7 the fine chemical gamma-tocopherol.

[47150] Accordingly, in one embodiment, the molecule which activity is to be increased in the process of the invention is the gene product with an activity as a “sll1761-protein”, preferably it is the molecule of section (a) or (b) of this paragraph.

[47151] In particular, it was observed that in plants, especially in Arabidopsis thaliana, increasing or generating the activity of a gene product non-targeted with the activity of a “sll1761-protein”, preferably being encoded by a gene comprising the nucleic acid sequence SEQ ID NO. 55379, preferably the coding region thereof, conferred the production of or the increase in gamma-tocopherol compared with the wild type control.

[47152] The nucleic acid sequence of Sll1815 from Synechocystis sp., e.g. as shown in the respective line in column 5 of Table I, application no. 7, has been published in C. And the activity of the gene product thereof is the activity of adenylate kinase.

[47153] Accordingly, in one embodiment, the process of the present invention for producing gamma-tocopherol in a non-human organism, like a microorganism or a plant or a part thereof, comprises increasing or generating the activity of a gene product with the activity of a gene product conferring the activity of “adenylate kinase”, especially from Synechocystis sp. or its functional equivalent or its homolog, e.g. the increase of
[47154] (a) a gene product of a gene comprising the nucleic acid molecule as shown in the respective line in column 5 of Table I (whereby the respective line disclose in column 7 the fine chemical gamma-tocopherol), application no. 7, preferably the coding region thereof, or a homolog or a fragment thereof, and being depicted in the same respective line as said Sll1815, or a functional equivalent or a homolog thereof as shown in column 8 of Table I, application no. 7, preferably the coding region thereof, particularly a homolog or functional equivalent as shown in column 8 of Table I B, application no. 7, and being depicted in the same respective line as said Sll1815, and preferably the activity is increased mitochondrial, or
[47155] (b) a polypeptide comprising a polypeptide, a consensus sequence or at least a polypeptide motif as shown in the respective line in column 5 of Table II or in column 8 of Table IV, application no. 7, respectively, and being depicted in the same respective line as said Sll1815, or a functional equivalent or a homolog thereof as depicted in column 8 of Table II, application no. 7, preferably a homolog or functional equivalent as depicted in column 8 of Table II B, application no. 7, and being depicted in the same respective line as said Sll1815, and preferably the activity is increased mitochondrial, whereby the respective line disclose in column 7 the fine chemical gamma-tocopherol.

[47156] Accordingly, in one embodiment, the molecule which activity is to be increased in the process of the invention is the gene product with an activity as a “adenylate kinase”, preferably it is the molecule of section (a) or (b) of this paragraph.

[47157] In particular, it was observed that in plants, especially in Arabidopsis thaliana, increasing or generating the activity of a gene product mitochondrial with the activity of a “adenylate kinase”, preferably being encoded by a gene comprising the nucleic acid sequence SEQ ID NO. 85808, preferably the coding region thereof, conferred the production of or the increase in gamma-tocopherol compared with the wild type control.

[47158] The nucleic acid sequence of Slr0239 from Synechocystis sp., e.g. as shown in the respective line in column 5 of Table I, application no. 7, has been published in C. And the activity of the gene product thereof is the activity of precorrin methylase.

[47159] Accordingly, in one embodiment, the process of the present invention for producing alpha-tocopherol in a non-human organism, like a microorganism or a plant or a part thereof, comprises increasing or generating the activity of a gene product with the activity of a gene product conferring the activity of “precorrin methylase”, especially from Synechocystis sp. or its functional equivalent or its homolog, e.g. the increase of
[47160] (a) a gene product of a gene comprising the nucleic acid molecule as shown in the respective line in column 5 of Table I (whereby the respective line disclose in column 7 the fine chemical alpha-tocopherol), application no. 7, preferably the coding region thereof, or a homolog or a fragment thereof, and being depicted in the same respective line as said Slr0239, or a functional equivalent or a homolog thereof as shown in column 8 of Table I, application no. 7, preferably the coding region thereof, particularly a homolog or functional equivalent as shown in column 8 of Table I B, application no. 7, and being depicted in the same respective line as said Slr0239, and preferably the activity is increased mitochondrial, or
[47161] (b) a polypeptide comprising a polypeptide, a consensus sequence or at least a polypeptide motif as shown in the respective line in column 5 of Table II or in column 8 of Table IV, application no. 7, respectively, and being depicted in the same respective line as said Slr0239, or a functional equivalent or a homolog thereof as depicted in column 8 of Table II, application no. 7, preferably a homolog or functional equivalent as depicted in column 8 of Table II B, application no. 7, and being depicted in the same respective line as said Slr0239, and preferably the activity is increased mitochondrial, whereby the respective line disclose in column 7 the fine chemical alpha-tocopherol.

[47162] Accordingly, in one embodiment, the molecule which activity is to be increased in the process of the invention is the gene product with an activity as a “precorrin methylase”, preferably it is the molecule of section (a) or (b) of this paragraph.

[47163] In particular, it was observed that in plants, especially in Arabidopsis thaliana, increasing or generating the activity of a gene product mitochondrial with the activity of a “precorrin methylase”, preferably being encoded by a gene comprising the nucleic acid sequence SEQ ID NO. 86540, preferably the coding region thereof, conferred the production of or the increase in alpha-tocopherol compared with the wild type control.

[47164] The nucleic acid sequence of Slr0721 from Synechocystis sp., e.g. as shown in the respective line in column 5 of Table I, application no. 7, has been published in C. And the activity of the gene product thereof is the activity of malate dehydrogenase.

[47165] Accordingly, in one embodiment, the process of the present invention for producing alpha-tocopherol in a non-human organism, like a microorganism or a plant or a part thereof, comprises increasing or generating the activity of a gene product with the activity of a gene product conferring the activity of “malate dehydrogenase”, especially from Synechocystis sp. or its functional equivalent or its homolog, e.g. the increase of
[47166] (a) a gene product of a gene comprising the nucleic acid molecule as shown in the respective line in column 5 of Table I (whereby the respective line disclose in column 7 the fine chemical alpha-tocopherol), application no. 7, preferably the coding region thereof, or a homolog or a fragment thereof, and being depicted in the same respective line as said Slr0721, or a functional equivalent or a homolog thereof as shown in column 8 of Table I, application no. 7, preferably the coding region thereof, particularly a homolog or functional equivalent as shown in column 8 of Table I B, application no. 7, and being depicted in the same respective line as said Slr0721, and preferably the activity is increased plastidic, or
[47167] (b) a polypeptide comprising a polypeptide, a consensus sequence or at least a polypeptide motif as shown in the respective line in column 5 of Table II or in column 8 of Table IV, application no. 7, respectively, and being depicted in the same respective line as said Slr0721, or a functional equivalent or a homolog thereof as depicted in column 8 of Table II, application no. 7, preferably a homolog or functional equivalent as depicted in column 8 of Table II B, application no. 7, and being depicted in the same respective line as said Slr0721, and preferably the activity is increased plastidic, whereby the respective line disclose in column 7 the fine chemical alpha-tocopherol.

[47168] Accordingly, in one embodiment, the molecule which activity is to be increased in the process of the invention is the gene product with an activity as a “malate dehydrogenase”, preferably it is the molecule of section (a) or (b) of this paragraph.

[47169] In particular, it was observed that in plants, especially in Arabidopsis thaliana, increasing or generating the activity of a gene product plastidic with the activity of a “malate dehydrogenase”, preferably being encoded by a gene comprising the nucleic acid sequence SEQ ID NO. 87397, preferably the coding region thereof, conferred the production of or the increase in alpha-tocopherol compared with the wild type control.

[47170] The nucleic acid sequence of Slr0721 from Synechocystis sp., e.g. as shown in the respective line in column 5 of Table I, application no. 7, has been published in C. And the activity of the gene product thereof is the activity of malate dehydrogenase.

[47171] Accordingly, in one embodiment, the process of the present invention for producing gamma-tocopherol in a non-human organism, like a microorganism or a plant or a part thereof, comprises increasing or generating the activity of a gene product with the activity of a gene product conferring the activity of “malate dehydrogenase”, especially from Synechocystis sp. or its functional equivalent or its homolog, e.g. the increase of
[47172] (a) a gene product of a gene comprising the nucleic acid molecule as shown in the respective line in column 5 of Table I (whereby the respective line disclose in column 7 the fine chemical gamma-tocopherol), application no. 7, preferably the coding region thereof, or a homolog or a fragment thereof, and being depicted in the same respective line as said Slr0721, or a functional equivalent or a homolog thereof as shown in column 8 of Table I, application no. 7, preferably the coding region thereof, particularly a homolog or functional equivalent as shown in column 8 of Table I B, application no. 7, and being depicted in the same respective line as said Slr0721, and preferably the activity is increased plastidic, or
[47173] (b) a polypeptide comprising a polypeptide, a consensus sequence or at least a polypeptide motif as shown in the respective line in column 5 of Table II or in column 8 of Table IV, application no. 7, respectively, and being depicted in the same respective line as said Slr0721, or a functional equivalent or a homolog thereof as depicted in column 8 of Table II, application no. 7, preferably a homolog or functional equivalent as depicted in column 8 of Table II B, application no. 7, and being depicted in the same respective line as said Slr0721, and preferably the activity is increased plastidic, whereby the respective line disclose in column 7 the fine chemical gamma-tocopherol.

[47174] Accordingly, in one embodiment, the molecule which activity is to be increased in the process of the invention is the gene product with an activity as a “malate dehydrogenase”, preferably it is the molecule of section (a) or (b) of this paragraph.

[47175] In particular, it was observed that in plants, especially in Arabidopsis thaliana, increasing or generating the activity of a gene product plastidic with the activity of a “malate dehydrogenase”, preferably being encoded by a gene comprising the nucleic acid sequence SEQ ID NO. 87397, preferably the coding region thereof, conferred the production of or the increase in gamma-tocopherol compared with the wild type control.

[47176] The nucleic acid sequence of Slr0739 from Synechocystis sp., e.g. as shown in the respective line in column 5 of Table I, application no. 7, has been published in C. And the activity of the gene product thereof is the activity of geranylgeranyl pyrophosphate synthase.

[47177] Accordingly, in one embodiment, the process of the present invention for producing alpha-tocopherol in a non-human organism, like a microorganism or a plant or a part thereof, comprises increasing or generating the activity of a gene product with the activity of a gene product conferring the activity of “geranylgeranyl pyrophosphate synthase”, especially from Synechocystis sp. or its functional equivalent or its homolog, e.g. the increase of
[47178] (a) a gene product of a gene comprising the nucleic acid molecule as shown in the respective line in column 5 of Table I (whereby the respective line disclose in column 7 the fine chemical alpha-tocopherol), application no. 7, preferably the coding region thereof, or a homolog or a fragment thereof, and being depicted in the same respective line as said Slr0739, or a functional equivalent or a homolog thereof as shown in column 8 of Table I, application no. 7, preferably the coding region thereof, particularly a homolog or functional equivalent as shown in column 8 of Table I B, application no. 7, and being depicted in the same respective line as said Slr0739, and preferably the activity is increased plastidic, or
[47179] (b) a polypeptide comprising a polypeptide, a consensus sequence or at least a polypeptide motif as shown in the respective line in column 5 of Table II or in column 8 of Table IV, application no. 7, respectively, and being depicted in the same respective line as said Slr0739, or a functional equivalent or a homolog thereof as depicted in column 8 of Table II, application no. 7, preferably a homolog or functional equivalent as depicted in column 8 of Table II B, application no. 7, and being depicted in the same respective line as said Slr0739, and preferably the activity is increased plastidic, whereby the respective line disclose in column 7 the fine chemical alpha-tocopherol.

[47180] Accordingly, in one embodiment, the molecule which activity is to be increased in the process of the invention is the gene product with an activity as a “geranylgeranyl pyrophosphate synthase”, preferably it is the molecule of section (a) or (b) of this paragraph.

[47181] In particular, it was observed that in plants, especially in Arabidopsis thaliana, increasing or generating the activity of a gene product plastidic with the activity of a “geranylgeranyl pyrophosphate synthase”, preferably being encoded by a gene comprising the nucleic acid sequence SEQ ID NO. 57235, preferably the coding region thereof, conferred the production of or the increase in alpha-tocopherol compared with the wild type control.

[47182] The nucleic acid sequence of Slr0739 from Synechocystis sp., e.g. as shown in the respective line in column 5 of Table I, application no. 7, has been published in C. And the activity of the gene product thereof is the activity of geranylgeranyl pyrophosphate synthase.

[47183] Accordingly, in one embodiment, the process of the present invention for producing gamma-tocopherol in a non-human organism, like a microorganism or a plant or a part thereof, comprises increasing or generating the activity of a gene product with the activity of a gene product conferring the activity of “geranylgeranyl pyrophosphate synthase”, especially from Synechocystis sp. or its functional equivalent or its homolog, e.g. the increase of
[47184] (a) a gene product of a gene comprising the nucleic acid molecule as shown in the respective line in column 5 of Table I (whereby the respective line disclose in column 7 the fine chemical gamma-tocopherol), application no. 7, preferably the coding region thereof, or a homolog or a fragment thereof, and being depicted in the same respective line as said Slr0739, or a functional equivalent or a homolog thereof as shown in column 8 of Table I, application no. 7, preferably the coding region thereof, particularly a homolog or functional equivalent as shown in column 8 of Table I B, application no. 7, and being depicted in the same respective line as said Slr0739, and preferably the activity is increased plastidic, or
[47185] (b) a polypeptide comprising a polypeptide, a consensus sequence or at least a polypeptide motif as shown in the respective line in column 5 of Table II or in column 8 of Table IV, application no. 7, respectively, and being depicted in the same respective line as said Slr0739, or a functional equivalent or a homolog thereof as depicted in column 8 of Table II, application no. 7, preferably a homolog or functional equivalent as depicted in column 8 of Table II B, application no. 7, and being depicted in the same respective line as said Slr0739, and preferably the activity is increased plastidic, whereby the respective line disclose in column 7 the fine chemical gamma-tocopherol.

[47186] Accordingly, in one embodiment, the molecule which activity is to be increased in the process of the invention is the gene product with an activity as a “geranylgeranyl pyrophosphate synthase”, preferably it is the molecule of section (a) or (b) of this paragraph.

[47187] In particular, it was observed that in plants, especially in Arabidopsis thaliana, increasing or generating the activity of a gene product plastidic with the activity of a “geranylgeranyl pyrophosphate synthase”, preferably being encoded by a gene comprising the nucleic acid sequence SEQ ID NO. 57235, preferably the coding region thereof, conferred the production of or the increase in gamma-tocopherol compared with the wild type control.

[47188] The nucleic acid sequence of Slr1420 from Synechocystis sp., e.g. as shown in the respective line in column 5 of Table I, application no. 7, has been published in C. And the activity of the gene product thereof is the activity of carbohydrate kinase.

[47189] Accordingly, in one embodiment, the process of the present invention for producing gamma-tocopherol in a non-human organism, like a microorganism or a plant or a part thereof, comprises increasing or generating the activity of a gene product with the activity of a gene product conferring the activity of “carbohydrate kinase”, especially from Synechocystis sp. or its functional equivalent or its homolog, e.g. the increase of
[47190] (a) a gene product of a gene comprising the nucleic acid molecule as shown in the respective line in column 5 of Table I (whereby the respective line disclose in column 7 the fine chemical gamma-tocopherol), application no. 7, preferably the coding region thereof, or a homolog or a fragment thereof, and being depicted in the same respective line as said Slr1420, or a functional equivalent or a homolog thereof as shown in column 8 of Table I, application no. 7, preferably the coding region thereof, particularly a homolog or functional equivalent as shown in column 8 of Table I B, application no. 7, and being depicted in the same respective line as said Slr1420, and preferably the activity is increased non-targeted, or
[47191] (b) a polypeptide comprising a polypeptide, a consensus sequence or at least a polypeptide motif as shown in the respective line in column 5 of Table II or in column 8 of Table IV, application no. 7, respectively, and being depicted in the same respective line as said Slr1420, or a functional equivalent or a homolog thereof as depicted in column 8 of Table II, application no. 7, preferably a homolog or functional equivalent as depicted in column 8 of Table II B, application no. 7, and being depicted in the same respective line as said Slr1420, and preferably the activity is increased non-targeted, whereby the respective line disclose in column 7 the fine chemical gamma-tocopherol.

[47192] Accordingly, in one embodiment, the molecule which activity is to be increased in the process of the invention is the gene product with an activity as a “carbohydrate kinase”, preferably it is the molecule of section (a) or (b) of this paragraph.

[47193] In particular, it was observed that in plants, especially in Arabidopsis thaliana, increasing or generating the activity of a gene product non-targeted with the activity of a “carbohydrate kinase”, preferably being encoded by a gene comprising the nucleic acid sequence SEQ ID NO. 58590, preferably the coding region thereof, conferred the production of or the increase in gamma-tocopherol compared with the wild type control.

[47194] The nucleic acid sequence of Slr1739 from Synechocystis sp., e.g. as shown in the respective line in column 5 of Table I, application no. 7, has been published in C. And the activity of the gene product thereof is the activity of photosystem II protein.

[47195] Accordingly, in one embodiment, the process of the present invention for producing gamma-tocopherol in a non-human organism, like a microorganism or a plant or a part thereof, comprises increasing or generating the activity of a gene product with the activity of a gene product conferring the activity of “photosystem II protein”, especially from Synechocystis sp. or its functional equivalent or its homolog, e.g. the increase of
[47196] (a) a gene product of a gene comprising the nucleic acid molecule as shown in the respective line in column 5 of Table I (whereby the respective line disclose in column 7 the fine chemical gamma-tocopherol), application no. 7, preferably the coding region thereof, or a homolog or a fragment thereof, and being depicted in the same respective line as said Slr1739, or a functional equivalent or a homolog thereof as shown in column 8 of Table I, application no. 7, preferably the coding region thereof, particularly a homolog or functional equivalent as shown in column 8 of Table I B, application no. 7, and being depicted in the same respective line as said Slr1739, and preferably the activity is increased plastidic, or
[47197] (b) a polypeptide comprising a polypeptide, a consensus sequence or at least a polypeptide motif as shown in the respective line in column 5 of Table II or in column 8 of Table IV, application no. 7, respectively, and being depicted in the same respective line as said Slr1739, or a functional equivalent or a homolog thereof as depicted in column 8 of Table II, application no. 7, preferably a homolog or functional equivalent as depicted in column 8 of Table II B, application no. 7, and being depicted in the same respective line as said Slr1739, and preferably the activity is increased plastidic, whereby the respective line disclose in column 7 the fine chemical gamma-tocopherol.

[47198] Accordingly, in one embodiment, the molecule which activity is to be increased in the process of the invention is the gene product with an activity as a “photosystem II protein”, preferably it is the molecule of section (a) or (b) of this paragraph.

[47199] In particular, it was observed that in plants, especially in Arabidopsis thaliana, increasing or generating the activity of a gene product plastidic with the activity of a “photosystem II protein”, preferably being encoded by a gene comprising the nucleic acid sequence SEQ ID NO. 58731, preferably the coding region thereof, conferred the production of or the increase in gamma-tocopherol compared with the wild type control.

[47200] The nucleic acid sequence of Slr1755 from Synechocystis sp., e.g. as shown in the respective line in column 5 of Table I, application no. 7, has been published in C. And the activity of the gene product thereof is the activity of glycerol-3-phosphate dehydrogenase.

[47201] Accordingly, in one embodiment, the process of the present invention for producing alpha-tocopherol in a non-human organism, like a microorganism or a plant or a part thereof, comprises increasing or generating the activity of a gene product with the activity of a gene product conferring the activity of “glycerol-3-phosphate dehydrogenase”, especially from Synechocystis sp. or its functional equivalent or its homolog, e.g. the increase of
[47202] (a) a gene product of a gene comprising the nucleic acid molecule as shown in the respective line in column 5 of Table I (whereby the respective line disclose in column 7 the fine chemical alpha-tocopherol), application no. 7, preferably the coding region thereof, or a homolog or a fragment thereof, and being depicted in the same respective line as said Slr1755, or a functional equivalent or a homolog thereof as shown in column 8 of Table I, application no. 7, preferably the coding region thereof, particularly a homolog or functional equivalent as shown in column 8 of Table I B, application no. 7, and being depicted in the same respective line as said Slr1755, and preferably the activity is increased plastidic, or
[47203] (b) a polypeptide comprising a polypeptide, a consensus sequence or at least a polypeptide motif as shown in the respective line in column 5 of Table II or in column 8 of Table IV, application no. 7, respectively, and being depicted in the same respective line as said Slr1755, or a functional equivalent or a homolog thereof as depicted in column 8 of Table II, application no. 7, preferably a homolog or functional equivalent as depicted in column 8 of Table II B, application no. 7, and being depicted in the same respective line as said Slr1755, and preferably the activity is increased plastidic, whereby the respective line disclose in column 7 the fine chemical alpha-tocopherol.

[47204] Accordingly, in one embodiment, the molecule which activity is to be increased in the process of the invention is the gene product with an activity as a “glycerol-3-phosphate dehydrogenase”, preferably it is the molecule of section (a) or (b) of this paragraph.

[47205] In particular, it was observed that in plants, especially in Arabidopsis thaliana, increasing or generating the activity of a gene product plastidic with the activity of a “glycerol-3-phosphate dehydrogenase”, preferably being encoded by a gene comprising the nucleic acid sequence SEQ ID NO. 58823, preferably the coding region thereof, conferred the production of or the increase in alpha-tocopherol compared with the wild type control.

[47206] The nucleic acid sequence of Slr1791 from Synechocystis sp., e.g. as shown in the respective line in column 5 of Table I, application no. 7, has been published in C. And the activity of the gene product thereof is the activity of phosphoadenosine phosphosulfate reductase .

[47207] Accordingly, in one embodiment, the process of the present invention for producing gamma-tocopherol in a non-human organism, like a microorganism or a plant or a part thereof, comprises increasing or generating the activity of a gene product with the activity of a gene product conferring the activity of “phosphoadenosine phosphosulfate reductase”, especially from Synechocystis sp. or its functional equivalent or its homolog, e.g. the increase of
[47208] (a) a gene product of a gene comprising the nucleic acid molecule as shown in the respective line in column 5 of Table I (whereby the respective line disclose in column 7 the fine chemical gamma-tocopherol), application no. 7, preferably the coding region thereof, or a homolog or a fragment thereof, and being depicted in the same respective line as said Slr1791, or a functional equivalent or a homolog thereof as shown in column 8 of Table I, application no. 7, preferably the coding region thereof, particularly a homolog or functional equivalent as shown in column 8 of Table I B, application no. 7, and being depicted in the same respective line as said Slr1791, and preferably the activity is increased plastidic, or
[47209] (b) a polypeptide comprising a polypeptide, a consensus sequence or at least a polypeptide motif as shown in the respective line in column 5 of Table II or in column 8 of Table IV, application no. 7, respectively, and being depicted in the same respective line as said Slr1791, or a functional equivalent or a homolog thereof as depicted in column 8 of Table II, application no. 7, preferably a homolog or functional equivalent as depicted in column 8 of Table II B, application no. 7, and being depicted in the same respective line as said Slr1791, and preferably the activity is increased plastidic, whereby the respective line disclose in column 7 the fine chemical gamma-tocopherol.

[47210] Accordingly, in one embodiment, the molecule which activity is to be increased in the process of the invention is the gene product with an activity as a “phosphoadenosine phosphosulfate reductase”, preferably it is the molecule of section (a) or (b) of this paragraph.

[47211] In particular, it was observed that in plants, especially in Arabidopsis thaliana, increasing or generating the activity of a gene product plastidic with the activity of a “phosphoadenosine phosphosulfate reductase”, preferably being encoded by a gene comprising the nucleic acid sequence SEQ ID NO. 12140, preferably the coding region thereof, conferred the production of or the increase in gamma-tocopherol compared with the wild type control.

[47212] The nucleic acid sequence of Slr1917 from Synechocystis sp., e.g. as shown in the respective line in column 5 of Table I, application no. 7, has been published in C. And the activity of the gene product thereof is the activity of slr1917-protein.

[47213] Accordingly, in one embodiment, the process of the present invention for producing alpha-tocopherol in a non-human organism, like a microorganism or a plant or a part thereof, comprises increasing or generating the activity of a gene product with the activity of a gene product conferring the activity of “slr1917-protein”, especially from Synechocystis sp. or its functional equivalent or its homolog, e.g. the increase of
[47214] (a) a gene product of a gene comprising the nucleic acid molecule as shown in the respective line in column 5 of Table I (whereby the respective line disclose in column 7 the fine chemical alpha-tocopherol), application no. 7, preferably the coding region thereof, or a homolog or a fragment thereof, and being depicted in the same respective line as said Slr1917, or a functional equivalent or a homolog thereof as shown in column 8 of Table I, application no. 7, preferably the coding region thereof, particularly a homolog or functional equivalent as shown in column 8 of Table I B, application no. 7, and being depicted in the same respective line as said Slr1917, and preferably the activity is increased plastidic, or
[47215] (b) a polypeptide comprising a polypeptide, a consensus sequence or at least a polypeptide motif as shown in the respective line in column 5 of Table II or in column 8 of Table IV, application no. 7, respectively, and being depicted in the same respective line as said Slr1917, or a functional equivalent or a homolog thereof as depicted in column 8 of Table II, application no. 7, preferably a homolog or functional equivalent as depicted in column 8 of Table II B, application no. 7, and being depicted in the same respective line as said Slr1917, and preferably the activity is increased plastidic, whereby the respective line disclose in column 7 the fine chemical alpha-tocopherol.

[47216] Accordingly, in one embodiment, the molecule which activity is to be increased in the process of the invention is the gene product with an activity as a “slr1917-protein”, preferably it is the molecule of section (a) or (b) of this paragraph.

[47217] In particular, it was observed that in plants, especially in Arabidopsis thaliana, increasing or generating the activity of a gene product plastidic with the activity of a “slr1917-protein”, preferably being encoded by a gene comprising the nucleic acid sequence SEQ ID NO. 113038, preferably the coding region thereof, conferred the production of or the increase in alpha-tocopherol compared with the wild type control.

[47218] The nucleic acid sequence of Slr1917 from Synechocystis sp., e.g. as shown in the respective line in column 5 of Table I, application no. 7, has been published in C. And the activity of the gene product thereof is the activity of slr1917-protein.

[47219] Accordingly, in one embodiment, the process of the present invention for producing gamma-tocopherol in a non-human organism, like a microorganism or a plant or a part thereof, comprises increasing or generating the activity of a gene product with the activity of a gene product conferring the activity of “slr1917-protein”, especially from Synechocystis sp. or its functional equivalent or its homolog, e.g. the increase of
[47220] (a) a gene product of a gene comprising the nucleic acid molecule as shown in the respective line in column 5 of Table I (whereby the respective line disclose in column 7 the fine chemical gamma-tocopherol), application no. 7, preferably the coding region thereof, or a homolog or a fragment thereof, and being depicted in the same respective line as said Slr1917, or a functional equivalent or a homolog thereof as shown in column 8 of Table I, application no. 7, preferably the coding region thereof, particularly a homolog or functional equivalent as shown in column 8 of Table I B, application no. 7, and being depicted in the same respective line as said Slr1917, and preferably the activity is increased plastidic, or
[47221] (b) a polypeptide comprising a polypeptide, a consensus sequence or at least a polypeptide motif as shown in the respective line in column 5 of Table II or in column 8 of Table IV, application no. 7, respectively, and being depicted in the same respective line as said Slr1917, or a functional equivalent or a homolog thereof as depicted in column 8 of Table II, application no. 7, preferably a homolog or functional equivalent as depicted in column 8 of Table II B, application no. 7, and being depicted in the same respective line as said Slr1917, and preferably the activity is increased plastidic, whereby the respective line disclose in column 7 the fine chemical gamma-tocopherol.

[47222] Accordingly, in one embodiment, the molecule which activity is to be increased in the process of the invention is the gene product with an activity as a “slr1917-protein”, preferably it is the molecule of section (a) or (b) of this paragraph.

[47223] In particular, it was observed that in plants, especially in Arabidopsis thaliana, increasing or generating the activity of a gene product plastidic with the activity of a “slr1917-protein”, preferably being encoded by a gene comprising the nucleic acid sequence SEQ ID NO. 113038, preferably the coding region thereof, conferred the production of or the increase in gamma-tocopherol compared with the wild type control.

[47224] The nucleic acid sequence of TTC0019 from Thermus thermophilus, e.g. as shown in the respective line in column 5 of Table I, application no. 7, has been published in E. And the activity of the gene product thereof is the activity of Sec-independent protein translocase subunit.

[47225] Accordingly, in one embodiment, the process of the present invention for producing alpha-tocopherol in a non-human organism, like a microorganism or a plant or a part thereof, comprises increasing or generating the activity of a gene product with the activity of a gene product conferring the activity of “Sec-independent protein translocase subunit”, especially from Thermus thermophilus or its functional equivalent or its homolog, e.g. the increase of
[47226] (a) a gene product of a gene comprising the nucleic acid molecule as shown in the respective line in column 5 of Table I (whereby the respective line disclose in column 7 the fine chemical alpha-tocopherol), application no. 7, preferably the coding region thereof, or a homolog or a fragment thereof, and being depicted in the same respective line as said TTC0019, or a functional equivalent or a homolog thereof as shown in column 8 of Table I, application no. 7, preferably the coding region thereof, particularly a homolog or functional equivalent as shown in column 8 of Table I B, application no. 7, and being depicted in the same respective line as said TTC0019, and preferably the activity is increased non-targeted, or
[47227] (b) a polypeptide comprising a polypeptide, a consensus sequence or at least a polypeptide motif as shown in the respective line in column 5 of Table II or in column 8 of Table IV, application no. 7, respectively, and being depicted in the same respective line as said TTC0019, or a functional equivalent or a homolog thereof as depicted in column 8 of Table II, application no. 7, preferably a homolog or functional equivalent as depicted in column 8 of Table II B, application no. 7, and being depicted in the same respective line as said TTC0019, and preferably the activity is increased non-targeted, whereby the respective line disclose in column 7 the fine chemical alpha-tocopherol.

[47228] Accordingly, in one embodiment, the molecule which activity is to be increased in the process of the invention is the gene product with an activity as a “Sec-independent protein translocase subunit”, preferably it is the molecule of section (a) or (b) of this paragraph.

[47229] In particular, it was observed that in plants, especially in Arabidopsis thaliana, increasing or generating the activity of a gene product non-targeted with the activity of a “Sec-independent protein translocase subunit”, preferably being encoded by a gene comprising the nucleic acid sequence SEQ ID NO. 12698, preferably the coding region thereof, conferred the production of or the increase in alpha-tocopherol compared with the wild type control.

[47230] The nucleic acid sequence of TTC0019 from Thermus thermophilus, e.g. as shown in the respective line in column 5 of Table I, application no. 7, has been published in E. And the activity of the gene product thereof is the activity of Sec-independent protein translocase subunit.

[47231] Accordingly, in one embodiment, the process of the present invention for producing gamma-tocopherol in a non-human organism, like a microorganism or a plant or a part thereof, comprises increasing or generating the activity of a gene product with the activity of a gene product conferring the activity of “Sec-independent protein translocase subunit”, especially from Thermus thermophilus or its functional equivalent or its homolog, e.g. the increase of
[47232] (a) a gene product of a gene comprising the nucleic acid molecule as shown in the respective line in column 5 of Table I (whereby the respective line disclose in column 7 the fine chemical gamma-tocopherol), application no. 7, preferably the coding region thereof, or a homolog or a fragment thereof, and being depicted in the same respective line as said TTC0019, or a functional equivalent or a homolog thereof as shown in column 8 of Table I, application no. 7, preferably the coding region thereof, particularly a homolog or functional equivalent as shown in column 8 of Table I B, application no. 7, and being depicted in the same respective line as said TTC0019, and preferably the activity is increased non-targeted, or
[47233] (b) a polypeptide comprising a polypeptide, a consensus sequence or at least a polypeptide motif as shown in the respective line in column 5 of Table II or in column 8 of Table IV, application no. 7, respectively, and being depicted in the same respective line as said TTC0019, or a functional equivalent or a homolog thereof as depicted in column 8 of Table II, application no. 7, preferably a homolog or functional equivalent as depicted in column 8 of Table II B, application no. 7, and being depicted in the same respective line as said TTC0019, and preferably the activity is increased non-targeted, whereby the respective line disclose in column 7 the fine chemical gamma-tocopherol.

[47234] Accordingly, in one embodiment, the molecule which activity is to be increased in the process of the invention is the gene product with an activity as a “Sec-independent protein translocase subunit”, preferably it is the molecule of section (a) or (b) of this paragraph.

[47235] In particular, it was observed that in plants, especially in Arabidopsis thaliana, increasing or generating the activity of a gene product non-targeted with the activity of a “Sec-independent protein translocase subunit”, preferably being encoded by a gene comprising the nucleic acid sequence SEQ ID NO. 12698, preferably the coding region thereof, conferred the production of or the increase in gamma-tocopherol compared with the wild type control.

[47236] The nucleic acid sequence of TTC1193 from Thermus thermophilus, e.g. as shown in the respective line in column 5 of Table I, application no. 7, has been published in E. And the activity of the gene product thereof is the activity of multiple antibiotic resistance protein.

[47237] Accordingly, in one embodiment, the process of the present invention for producing gamma-tocopherol in a non-human organism, like a microorganism or a plant or a part thereof, comprises increasing or generating the activity of a gene product with the activity of a gene product conferring the activity of “multiple antibiotic resistance protein”, especially from Thermus thermophilus or its functional equivalent or its homolog, e.g. the increase of
[47238] (a) a gene product of a gene comprising the nucleic acid molecule as shown in the respective line in column 5 of Table I (whereby the respective line disclose in column 7 the fine chemical gamma-tocopherol), application no. 7, preferably the coding region thereof, or a homolog or a fragment thereof, and being depicted in the same respective line as said TTC1193, or a functional equivalent or a homolog thereof as shown in column 8 of Table I, application no. 7, preferably the coding region thereof, particularly a homolog or functional equivalent as shown in column 8 of Table I B, application no. 7, and being depicted in the same respective line as said TTC1193, and preferably the activity is increased non-targeted, or
[47239] (b) a polypeptide comprising a polypeptide, a consensus sequence or at least a polypeptide motif as shown in the respective line in column 5 of Table II or in column 8 of Table IV, application no. 7, respectively, and being depicted in the same respective line as said TTC1193, or a functional equivalent or a homolog thereof as depicted in column 8 of Table II, application no. 7, preferably a homolog or functional equivalent as depicted in column 8 of Table II B, application no. 7, and being depicted in the same respective line as said TTC1193, and preferably the activity is increased non-targeted, whereby the respective line disclose in column 7 the fine chemical gamma-tocopherol.

[47240] Accordingly, in one embodiment, the molecule which activity is to be increased in the process of the invention is the gene product with an activity as a “multiple antibiotic resistance protein”, preferably it is the molecule of section (a) or (b) of this paragraph.

[47241] In particular, it was observed that in plants, especially in Arabidopsis thaliana, increasing or generating the activity of a gene product non-targeted with the activity of a “multiple antibiotic resistance protein”, preferably being encoded by a gene comprising the nucleic acid sequence SEQ ID NO. 61723, preferably the coding region thereof, conferred the production of or the increase in gamma-tocopherol compared with the wild type control.

[47242] The nucleic acid sequence of TTC1386 from Thermus thermophilus, e.g. as shown in the respective line in column 5 of Table I, application no. 7, has been published in E. And the activity of the gene product thereof is the activity of TTC1386-protein.

[47243] Accordingly, in one embodiment, the process of the present invention for producing alpha-tocopherol in a non-human organism, like a microorganism or a plant or a part thereof, comprises increasing or generating the activity of a gene product with the activity of a gene product conferring the activity of “TTC1386-protein”, especially from Thermus thermophilus or its functional equivalent or its homolog, e.g. the increase of
[47244] (a) a gene product of a gene comprising the nucleic acid molecule as shown in the respective line in column 5 of Table I (whereby the respective line disclose in column 7 the fine chemical alpha-tocopherol), application no. 7, preferably the coding region thereof, or a homolog or a fragment thereof, and being depicted in the same respective line as said TTC1386, or a functional equivalent or a homolog thereof as shown in column 8 of Table I, application no. 7, preferably the coding region thereof, particularly a homolog or functional equivalent as shown in column 8 of Table I B, application no. 7, and being depicted in the same respective line as said TTC1386, and preferably the activity is increased non-targeted, or
[47245] (b) a polypeptide comprising a polypeptide, a consensus sequence or at least a polypeptide motif as shown in the respective line in column 5 of Table II or in column 8 of Table IV, application no. 7, respectively, and being depicted in the same respective line as said TTC1386, or a functional equivalent or a homolog thereof as depicted in column 8 of Table II, application no. 7, preferably a homolog or functional equivalent as depicted in column 8 of Table II B, application no. 7, and being depicted in the same respective line as said TTC1386, and preferably the activity is increased non-targeted, whereby the respective line disclose in column 7 the fine chemical alpha-tocopherol.

[47246] Accordingly, in one embodiment, the molecule which activity is to be increased in the process of the invention is the gene product with an activity as a “TTC1386-protein”, preferably it is the molecule of section (a) or (b) of this paragraph.

[47247] In particular, it was observed that in plants, especially in Arabidopsis thaliana, increasing or generating the activity of a gene product non-targeted with the activity of a “TTC1386-protein”, preferably being encoded by a gene comprising the nucleic acid sequence SEQ ID NO. 62079, preferably the coding region thereof, conferred the production of or the increase in alpha-tocopherol compared with the wild type control.

[47248] The nucleic acid sequence of TTC1386 from Thermus thermophilus, e.g. as shown in the respective line in column 5 of Table I, application no. 7, has been published in E. And the activity of the gene product thereof is the activity of TTC1386-protein.

[47249] Accordingly, in one embodiment, the process of the present invention for producing gamma-tocopherol in a non-human organism, like a microorganism or a plant or a part thereof, comprises increasing or generating the activity of a gene product with the activity of a gene product conferring the activity of “TTC1386-protein”, especially from Thermus thermophilus or its functional equivalent or its homolog, e.g. the increase of
[47250] (a) a gene product of a gene comprising the nucleic acid molecule as shown in the respective line in column 5 of Table I (whereby the respective line disclose in column 7 the fine chemical gamma-tocopherol), application no. 7, preferably the coding region thereof, or a homolog or a fragment thereof, and being depicted in the same respective line as said TTC1386, or a functional equivalent or a homolog thereof as shown in column 8 of Table I, application no. 7, preferably the coding region thereof, particularly a homolog or functional equivalent as shown in column 8 of Table I B, application no. 7, and being depicted in the same respective line as said TTC1386, and preferably the activity is increased non-targeted, or
[47251] (b) a polypeptide comprising a polypeptide, a consensus sequence or at least a polypeptide motif as shown in the respective line in column 5 of Table II or in column 8 of Table IV, application no. 7, respectively, and being depicted in the same respective line as said TTC1386, or a functional equivalent or a homolog thereof as depicted in column 8 of Table II, application no. 7, preferably a homolog or functional equivalent as depicted in column 8 of Table II B, application no. 7, and being depicted in the same respective line as said TTC1386, and preferably the activity is increased non-targeted, whereby the respective line disclose in column 7 the fine chemical gamma-tocopherol.

[47252] Accordingly, in one embodiment, the molecule which activity is to be increased in the process of the invention is the gene product with an activity as a “TTC1386-protein”, preferably it is the molecule of section (a) or (b) of this paragraph.

[47253] In particular, it was observed that in plants, especially in Arabidopsis thaliana, increasing or generating the activity of a gene product non-targeted with the activity of a “TTC1386-protein”, preferably being encoded by a gene comprising the nucleic acid sequence SEQ ID NO. 62079, preferably the coding region thereof, conferred the production of or the increase in gamma-tocopherol compared with the wild type control.

[47254] The nucleic acid sequence of TTC1550 from Thermus thermophilus, e.g. as shown in the respective line in column 5 of Table I, application no. 7, has been published in E. And the activity of the gene product thereof is the activity of homocitrate synthase.

[47255] Accordingly, in one embodiment, the process of the present invention for producing alpha-tocopherol in a non-human organism, like a microorganism or a plant or a part thereof, comprises increasing or generating the activity of a gene product with the activity of a gene product conferring the activity of “homocitrate synthase”, especially from Thermus thermophilus or its functional equivalent or its homolog, e.g. the increase of
[47256] (a) a gene product of a gene comprising the nucleic acid molecule as shown in the respective line in column 5 of Table I (whereby the respective line disclose in column 7 the fine chemical alpha-tocopherol), application no. 7, preferably the coding region thereof, or a homolog or a fragment thereof, and being depicted in the same respective line as said TTC1550, or a functional equivalent or a homolog thereof as shown in column 8 of Table I, application no. 7, preferably the coding region thereof, particularly a homolog or functional equivalent as shown in column 8 of Table I B, application no. 7, and being depicted in the same respective line as said TTC1550, and preferably the activity is increased non-targeted, or
[47257] (b) a polypeptide comprising a polypeptide, a consensus sequence or at least a polypeptide motif as shown in the respective line in column 5 of Table II or in column 8 of Table IV, application no. 7, respectively, and being depicted in the same respective line as said TTC1550, or a functional equivalent or a homolog thereof as depicted in column 8 of Table II, application no. 7, preferably a homolog or functional equivalent as depicted in column 8 of Table II B, application no. 7, and being depicted in the same respective line as said TTC1550, and preferably the activity is increased non-targeted, whereby the respective line disclose in column 7 the fine chemical alpha-tocopherol.

[47258] Accordingly, in one embodiment, the molecule which activity is to be increased in the process of the invention is the gene product with an activity as a “homocitrate synthase”, preferably it is the molecule of section (a) or (b) of this paragraph.

[47259] In particular, it was observed that in plants, especially in Arabidopsis thaliana, increasing or generating the activity of a gene product non-targeted with the activity of a “homocitrate synthase”, preferably being encoded by a gene comprising the nucleic acid sequence SEQ ID NO. 12974, preferably the coding region thereof, conferred the production of or the increase in alpha-tocopherol compared with the wild type control.

[47260] The nucleic acid sequence of Ybr249c from Saccharomyces cerevisiae, e.g. as shown in the respective line in column 5 of Table I, application no. 7, has been published in A. And the activity of the gene product thereof is the activity of 3-deoxy-7-phosphoheptulonate synthase.

[47261] Accordingly, in one embodiment, the process of the present invention for producing alpha-tocopherol in a non-human organism, like a microorganism or a plant or a part thereof, comprises increasing or generating the activity of a gene product with the activity of a gene product conferring the activity of “3-deoxy-7-phosphoheptulonate synthase”, especially from Saccharomyces cerevisiae or its functional equivalent or its homolog, e.g. the increase of
[47262] (a) a gene product of a gene comprising the nucleic acid molecule as shown in the respective line in column 5 of Table I (whereby the respective line disclose in column 7 the fine chemical alpha-tocopherol), application no. 7, preferably the coding region thereof, or a homolog or a fragment thereof, and being depicted in the same respective line as said Ybr249c, or a functional equivalent or a homolog thereof as shown in column 8 of Table I, application no. 7, preferably the coding region thereof, particularly a homolog or functional equivalent as shown in column 8 of Table I B, application no. 7, and being depicted in the same respective line as said Ybr249c, and preferably the activity is increased plastidic, or
[47263] (b) a polypeptide comprising a polypeptide, a consensus sequence or at least a polypeptide motif as shown in the respective line in column 5 of Table II or in column 8 of Table IV, application no. 7, respectively, and being depicted in the same respective line as said Ybr249c, or a functional equivalent or a homolog thereof as depicted in column 8 of Table II, application no. 7, preferably a homolog or functional equivalent as depicted in column 8 of Table II B, application no. 7, and being depicted in the same respective line as said Ybr249c, and preferably the activity is increased plastidic, whereby the respective line disclose in column 7 the fine chemical alpha-tocopherol.

[47264] Accordingly, in one embodiment, the molecule which activity is to be increased in the process of the invention is the gene product with an activity as a “3-deoxy-7-phosphoheptulonate synthase”, preferably it is the molecule of section (a) or (b) of this paragraph.

[47265] In particular, it was observed that in plants, especially in Arabidopsis thaliana, increasing or generating the activity of a gene product plastidic with the activity of a “3-deoxy-7-phosphoheptulonate synthase”, preferably being encoded by a gene comprising the nucleic acid sequence SEQ ID NO. 88879, preferably the coding region thereof, conferred the production of or the increase in alpha-tocopherol compared with the wild type control.

[47266] The nucleic acid sequence of Ybr249c from Saccharomyces cerevisiae, e.g. as shown in the respective line in column 5 of Table I, application no. 7, has been published in A. And the activity of the gene product thereof is the activity of 3-deoxy-7-phosphoheptulonate synthase.

[47267] Accordingly, in one embodiment, the process of the present invention for producing gamma-tocopherol in a non-human organism, like a microorganism or a plant or a part thereof, comprises increasing or generating the activity of a gene product with the activity of a gene product conferring the activity of “3-deoxy-7-phosphoheptulonate synthase”, especially from Saccharomyces cerevisiae or its functional equivalent or its homolog, e.g. the increase of
[47268] (a) a gene product of a gene comprising the nucleic acid molecule as shown in the respective line in column 5 of Table I (whereby the respective line disclose in column 7 the fine chemical gamma-tocopherol), application no. 7, preferably the coding region thereof, or a homolog or a fragment thereof, and being depicted in the same respective line as said Ybr249c, or a functional equivalent or a homolog thereof as shown in column 8 of Table I, application no. 7, preferably the coding region thereof, particularly a homolog or functional equivalent as shown in column 8 of Table I B, application no. 7, and being depicted in the same respective line as said Ybr249c, and preferably the activity is increased plastidic, or
[47269] (b) a polypeptide comprising a polypeptide, a consensus sequence or at least a polypeptide motif as shown in the respective line in column 5 of Table II or in column 8 of Table IV, application no. 7, respectively, and being depicted in the same respective line as said Ybr249c, or a functional equivalent or a homolog thereof as depicted in column 8 of Table II, application no. 7, preferably a homolog or functional equivalent as depicted in column 8 of Table II B, application no. 7, and being depicted in the same respective line as said Ybr249c, and preferably the activity is increased plastidic, whereby the respective line disclose in column 7 the fine chemical gamma-tocopherol.

[47270] Accordingly, in one embodiment, the molecule which activity is to be increased in the process of the invention is the gene product with an activity as a “3-deoxy-7-phosphoheptulonate synthase”, preferably it is the molecule of section (a) or (b) of this paragraph.

[47271] In particular, it was observed that in plants, especially in Arabidopsis thaliana, increasing or generating the activity of a gene product plastidic with the activity of a “3-deoxy-7-phosphoheptulonate synthase”, preferably being encoded by a gene comprising the nucleic acid sequence SEQ ID NO. 88879, preferably the coding region thereof, conferred the production of or the increase in gamma-tocopherol compared with the wild type control.

[47272] The nucleic acid sequence of Ycl049c from Saccharomyces cerevisiae, e.g. as shown in the respective line in column 5 of Table I, application no. 7, has been published in A. And the activity of the gene product thereof is the activity of ycl049c-protein.

[47273] Accordingly, in one embodiment, the process of the present invention for producing gamma-tocopherol in a non-human organism, like a microorganism or a plant or a part thereof, comprises increasing or generating the activity of a gene product with the activity of a gene product conferring the activity of “ycl049c-protein”, especially from Saccharomyces cerevisiae or its functional equivalent or its homolog, e.g. the increase of
[47274] (a) a gene product of a gene comprising the nucleic acid molecule as shown in the respective line in column 5 of Table I (whereby the respective line disclose in column 7 the fine chemical gamma-tocopherol), application no. 7, preferably the coding region thereof, or a homolog or a fragment thereof, and being depicted in the same respective line as said Ycl049c, or a functional equivalent or a homolog thereof as shown in column 8 of Table I, application no. 7, preferably the coding region thereof, particularly a homolog or functional equivalent as shown in column 8 of Table I B, application no. 7, and being depicted in the same respective line as said Ycl049c, and preferably the activity is increased plastidic, or
[47275] (b) a polypeptide comprising a polypeptide, a consensus sequence or at least a polypeptide motif as shown in the respective line in column 5 of Table II or in column 8 of Table IV, application no. 7, respectively, and being depicted in the same respective line as said Ycl049c, or a functional equivalent or a homolog thereof as depicted in column 8 of Table II, application no. 7, preferably a homolog or functional equivalent as depicted in column 8 of Table II B, application no. 7, and being depicted in the same respective line as said Ycl049c, and preferably the activity is increased plastidic, whereby the respective line disclose in column 7 the fine chemical gamma-tocopherol.

[47276] Accordingly, in one embodiment, the molecule which activity is to be increased in the process of the invention is the gene product with an activity as a “ycl049c-protein”, preferably it is the molecule of section (a) or (b) of this paragraph.

[47277] In particular, it was observed that in plants, especially in Arabidopsis thaliana, increasing or generating the activity of a gene product plastidic with the activity of a “ycl049c-protein”, preferably being encoded by a gene comprising the nucleic acid sequence SEQ ID NO. 113220, preferably the coding region thereof, conferred the production of or the increase in gamma-tocopherol compared with the wild type control.

[47278] The nucleic acid sequence of Ydl131w from Saccharomyces cerevisiae, e.g. as shown in the respective line in column 5 of Table I, application no. 7, has been published in A. And the activity of the gene product thereof is the activity of homocitrate synthase.

[47279] Accordingly, in one embodiment, the process of the present invention for producing alpha-tocopherol in a non-human organism, like a microorganism or a plant or a part thereof, comprises increasing or generating the activity of a gene product with the activity of a gene product conferring the activity of “homocitrate synthase”, especially from Saccharomyces cerevisiae or its functional equivalent or its homolog, e.g. the increase of
[47280] (a) a gene product of a gene comprising the nucleic acid molecule as shown in the respective line in column 5 of Table I (whereby the respective line disclose in column 7 the fine chemical alpha-tocopherol), application no. 7, preferably the coding region thereof, or a homolog or a fragment thereof, and being depicted in the same respective line as said Ydl131w, or a functional equivalent or a homolog thereof as shown in column 8 of Table I, application no. 7, preferably the coding region thereof, particularly a homolog or functional equivalent as shown in column 8 of Table I B, application no. 7, and being depicted in the same respective line as said Ydl131w, and preferably the activity is increased plastidic, or
[47281] (b) a polypeptide comprising a polypeptide, a consensus sequence or at least a polypeptide motif as shown in the respective line in column 5 of Table II or in column 8 of Table IV, application no. 7, respectively, and being depicted in the same respective line as said Ydl131w, or a functional equivalent or a homolog thereof as depicted in column 8 of Table II, application no. 7, preferably a homolog or functional equivalent as depicted in column 8 of Table II B, application no. 7, and being depicted in the same respective line as said Ydl131w, and preferably the activity is increased plastidic, whereby the respective line disclose in column 7 the fine chemical alpha-tocopherol.

[47282] Accordingly, in one embodiment, the molecule which activity is to be increased in the process of the invention is the gene product with an activity as a “homocitrate synthase”, preferably it is the molecule of section (a) or (b) of this paragraph.

[47283] In particular, it was observed that in plants, especially in Arabidopsis thaliana, increasing or generating the activity of a gene product plastidic with the activity of a “homocitrate synthase”, preferably being encoded by a gene comprising the nucleic acid sequence SEQ ID NO. 113224, preferably the coding region thereof, conferred the production of or the increase in alpha-tocopherol compared with the wild type control.

[47284] The nucleic acid sequence of Ydl235c from Saccharomyces cerevisiae, e.g. as shown in the respective line in column 5 of Table I, application no. 7, has been published in A. And the activity of the gene product thereof is the activity of ydl235c-protein.

[47285] Accordingly, in one embodiment, the process of the present invention for producing alpha-tocopherol in a non-human organism, like a microorganism or a plant or a part thereof, comprises increasing or generating the activity of a gene product with the activity of a gene product conferring the activity of “ydl235c-protein”, especially from Saccharomyces cerevisiae or its functional equivalent or its homolog, e.g. the increase of
[47286] (a) a gene product of a gene comprising the nucleic acid molecule as shown in the respective line in column 5 of Table I (whereby the respective line disclose in column 7 the fine chemical alpha-tocopherol), application no. 7, preferably the coding region thereof, or a homolog or a fragment thereof, and being depicted in the same respective line as said Ydl235c, or a functional equivalent or a homolog thereof as shown in column 8 of Table I, application no. 7, preferably the coding region thereof, particularly a homolog or functional equivalent as shown in column 8 of Table I B, application no. 7, and being depicted in the same respective line as said Ydl235c, and preferably the activity is increased plastidic, or
[47287] (b) a polypeptide comprising a polypeptide, a consensus sequence or at least a polypeptide motif as shown in the respective line in column 5 of Table II or in column 8 of Table IV, application no. 7, respectively, and being depicted in the same respective line as said Ydl235c, or a functional equivalent or a homolog thereof as depicted in column 8 of Table II, application no. 7, preferably a homolog or functional equivalent as depicted in column 8 of Table II B, application no. 7, and being depicted in the same respective line as said Ydl235c, and preferably the activity is increased plastidic, whereby the respective line disclose in column 7 the fine chemical alpha-tocopherol.

[47288] Accordingly, in one embodiment, the molecule which activity is to be increased in the process of the invention is the gene product with an activity as a “ydl235c-protein”, preferably it is the molecule of section (a) or (b) of this paragraph.

[47289] In particular, it was observed that in plants, especially in Arabidopsis thaliana, increasing or generating the activity of a gene product plastidic with the activity of a “ydl235c-protein”, preferably being encoded by a gene comprising the nucleic acid sequence SEQ ID NO. 113313, preferably the coding region thereof, conferred the production of or the increase in alpha-tocopherol compared with the wild type control.

[47290] The nucleic acid sequence of Ydr007w from Saccharomyces cerevisiae, e.g. as shown in the respective line in column 5 of Table I, application no. 7, has been published in A. And the activity of the gene product thereof is the activity of N-(5′-phosphoribosyl)anthranilate isomerase.

[47291] Accordingly, in one embodiment, the process of the present invention for producing gamma-tocopherol in a non-human organism, like a microorganism or a plant or a part thereof, comprises increasing or generating the activity of a gene product with the activity of a gene product conferring the activity of “N-(5′-phosphoribosyl)anthranilate isomerase”, especially from Saccharomyces cerevisiae or its functional equivalent or its homolog, e.g. the increase of
[47292] (a) a gene product of a gene comprising the nucleic acid molecule as shown in the respective line in column 5 of Table I (whereby the respective line disclose in column 7 the fine chemical gamma-tocopherol), application no. 7, preferably the coding region thereof, or a homolog or a fragment thereof, and being depicted in the same respective line as said Ydr007w, or a functional equivalent or a homolog thereof as shown in column 8 of Table I, application no. 7, preferably the coding region thereof, particularly a homolog or functional equivalent as shown in column 8 of Table I B, application no. 7, and being depicted in the same respective line as said Ydr007w, and preferably the activity is increased plastidic, or
[47293] (b) a polypeptide comprising a polypeptide, a consensus sequence or at least a polypeptide motif as shown in the respective line in column 5 of Table II or in column 8 of Table IV, application no. 7, respectively, and being depicted in the same respective line as said Ydr007w, or a functional equivalent or a homolog thereof as depicted in column 8 of Table II, application no. 7, preferably a homolog or functional equivalent as depicted in column 8 of Table II B, application no. 7, and being depicted in the same respective line as said Ydr007w, and preferably the activity is increased plastidic, whereby the respective line disclose in column 7 the fine chemical gamma-tocopherol.

[47294] Accordingly, in one embodiment, the molecule which activity is to be increased in the process of the invention is the gene product with an activity as a “N-(5′-phosphoribosyl)anthranilate isomerase”, preferably it is the molecule of section (a) or (b) of this paragraph.

[47295] In particular, it was observed that in plants, especially in Arabidopsis thaliana, increasing or generating the activity of a gene product plastidic with the activity of a “N-(5′-phosphoribosyl) anthranilate isomerase”, preferably being encoded by a gene comprising the nucleic acid sequence SEQ ID NO. 89973, preferably the coding region thereof, conferred the production of or the increase in gamma-tocopherol compared with the wild type control.

[47296] The nucleic acid sequence of Ydr035w from Saccharomyces cerevisiae, e.g. as shown in the respective line in column 5 of Table I, application no. 7, has been published in A. And the activity of the gene product thereof is the activity of phospho-2-dehydro-3-deoxyheptonate aldolase.

[47297] Accordingly, in one embodiment, the process of the present invention for producing gamma-tocopherol in a non-human organism, like a microorganism or a plant or a part thereof, comprises increasing or generating the activity of a gene product with the activity of a gene product conferring the activity of “phospho-2-dehydro-3-deoxyheptonate aldolase”, especially from Saccharomyces cerevisiae or its functional equivalent or its homolog, e.g. the increase of
[47298] (a) a gene product of a gene comprising the nucleic acid molecule as shown in the respective line in column 5 of Table I (whereby the respective line disclose in column 7 the fine chemical gamma-tocopherol), application no. 7, preferably the coding region thereof, or a homolog or a fragment thereof, and being depicted in the same respective line as said Ydr035w, or a functional equivalent or a homolog thereof as shown in column 8 of Table I, application no. 7, preferably the coding region thereof, particularly a homolog or functional equivalent as shown in column 8 of Table I B, application no. 7, and being depicted in the same respective line as said Ydr035w, and preferably the activity is increased plastidic, or
[47299] (b) a polypeptide comprising a polypeptide, a consensus sequence or at least a polypeptide motif as shown in the respective line in column 5 of Table II or in column 8 of Table IV, application no. 7, respectively, and being depicted in the same respective line as said Ydr035w, or a functional equivalent or a homolog thereof as depicted in column 8 of Table II, application no. 7, preferably a homolog or functional equivalent as depicted in column 8 of Table II B, application no. 7, and being depicted in the same respective line as said Ydr035w, and preferably the activity is increased plastidic, whereby the respective line disclose in column 7 the fine chemical gamma-tocopherol.

[47300] Accordingly, in one embodiment, the molecule which activity is to be increased in the process of the invention is the gene product with an activity as a “phospho-2-dehydro-3-deoxyheptonate aldolase”, preferably it is the molecule of section (a) or (b) of this paragraph.

[47301] In particular, it was observed that in plants, especially in Arabidopsis thaliana, increasing or generating the activity of a gene product plastidic with the activity of a “phospho-2-dehydro-3-deoxyheptonate aldolase”, preferably being encoded by a gene comprising the nucleic acid sequence SEQ ID NO. 113330, preferably the coding region thereof, conferred the production of or the increase in gamma-tocopherol compared with the wild type control.

[47302] The nucleic acid sequence of Ydr183w from Saccharomyces cerevisiae, e.g. as shown in the respective line in column 5 of Table I, application no. 7, has been published in A. And the activity of the gene product thereof is the activity of ydr183w-protein.

[47303] Accordingly, in one embodiment, the process of the present invention for producing gamma-tocopherol in a non-human organism, like a microorganism or a plant or a part thereof, comprises increasing or generating the activity of a gene product with the activity of a gene product conferring the activity of “ydr183w-protein”, especially from Saccharomyces cerevisiae or its functional equivalent or its homolog, e.g. the increase of
[47304] (a) a gene product of a gene comprising the nucleic acid molecule as shown in the respective line in column 5 of Table I (whereby the respective line disclose in column 7 the fine chemical gamma-tocopherol), application no. 7, preferably the coding region thereof, or a homolog or a fragment thereof, and being depicted in the same respective line as said Ydr183w, or a functional equivalent or a homolog thereof as shown in column 8 of Table I, application no. 7, preferably the coding region thereof, particularly a homolog or functional equivalent as shown in column 8 of Table I B, application no. 7, and being depicted in the same respective line as said Ydr183w, and preferably the activity is increased plastidic, or
[47305] (b) a polypeptide comprising a polypeptide, a consensus sequence or at least a polypeptide motif as shown in the respective line in column 5 of Table II or in column 8 of Table IV, application no. 7, respectively, and being depicted in the same respective line as said Ydr183w, or a functional equivalent or a homolog thereof as depicted in column 8 of Table II, application no. 7, preferably a homolog or functional equivalent as depicted in column 8 of Table II B, application no. 7, and being depicted in the same respective line as said Ydr183w, and preferably the activity is increased plastidic, whereby the respective line disclose in column 7 the fine chemical gamma-tocopherol.

[47306] Accordingly, in one embodiment, the molecule which activity is to be increased in the process of the invention is the gene product with an activity as a “ydr183w-protein”, preferably it is the molecule of section (a) or (b) of this paragraph.

[47307] In particular, it was observed that in plants, especially in Arabidopsis thaliana, increasing or generating the activity of a gene product plastidic with the activity of a “ydr183w-protein”, preferably being encoded by a gene comprising the nucleic acid sequence SEQ ID NO. 90103, preferably the coding region thereof, conferred the production of or the increase in gamma-tocopherol compared with the wild type control.

[47308] The nucleic acid sequence of Yer106w from Saccharomyces cerevisiae, e.g. as shown in the respective line in column 5 of Table I, application no. 7, has been published in A. And the activity of the gene product thereof is the activity of yer106w-protein.

[47309] Accordingly, in one embodiment, the process of the present invention for producing gamma-tocopherol in a non-human organism, like a microorganism or a plant or a part thereof, comprises increasing or generating the activity of a gene product with the activity of a gene product conferring the activity of “yer106w-protein”, especially from Saccharomyces cerevisiae or its functional equivalent or its homolog, e.g. the increase of
[47310] (a) a gene product of a gene comprising the nucleic acid molecule as shown in the respective line in column 5 of Table I (whereby the respective line disclose in column 7 the fine chemical gamma-tocopherol), application no. 7, preferably the coding region thereof, or a homolog or a fragment thereof, and being depicted in the same respective line as said Yer106w, or a functional equivalent or a homolog thereof as shown in column 8 of Table I, application no. 7, preferably the coding region thereof, particularly a homolog or functional equivalent as shown in column 8 of Table I B, application no. 7, and being depicted in the same respective line as said Yer106w, and preferably the activity is increased plastidic, or
[47311] (b) a polypeptide comprising a polypeptide, a consensus sequence or at least a polypeptide motif as shown in the respective line in column 5 of Table II or in column 8 of Table IV, application no. 7, respectively, and being depicted in the same respective line as said Yer106w, or a functional equivalent or a homolog thereof as depicted in column 8 of Table II, application no. 7, preferably a homolog or functional equivalent as depicted in column 8 of Table II B, application no. 7, and being depicted in the same respective line as said Yer106w, and preferably the activity is increased plastidic, whereby the respective line disclose in column 7 the fine chemical gamma-tocopherol.

[47312] Accordingly, in one embodiment, the molecule which activity is to be increased in the process of the invention is the gene product with an activity as a “yer106w-protein”, preferably it is the molecule of section (a) or (b) of this paragraph.

[47313] In particular, it was observed that in plants, especially in Arabidopsis thaliana, increasing or generating the activity of a gene product plastidic with the activity of a “yer106w-protein”, preferably being encoded by a gene comprising the nucleic acid sequence SEQ ID NO. 63803, preferably the coding region thereof, conferred the production of or the increase in gamma-tocopherol compared with the wild type control.

[47314] The nucleic acid sequence of Yer112w from Saccharomyces cerevisiae, e.g. as shown in the respective line in column 5 of Table I, application no. 7, has been published in A. And the activity of the gene product thereof is the activity of small nuclear ribonucleoprotein .

[47315] Accordingly, in one embodiment, the process of the present invention for producing gamma-tocopherol in a non-human organism, like a microorganism or a plant or a part thereof, comprises increasing or generating the activity of a gene product with the activity of a gene product conferring the activity of “small nuclear ribonucleoprotein”, especially from Saccharomyces cerevisiae or its functional equivalent or its homolog, e.g. the increase of
[47316] (a) a gene product of a gene comprising the nucleic acid molecule as shown in the respective line in column 5 of Table I (whereby the respective line disclose in column 7 the fine chemical gamma-tocopherol), application no. 7, preferably the coding region thereof, or a homolog or a fragment thereof, and being depicted in the same respective line as said Yer112w, or a functional equivalent or a homolog thereof as shown in column 8 of Table I, application no. 7, preferably the coding region thereof, particularly a homolog or functional equivalent as shown in column 8 of Table I B, application no. 7, and being depicted in the same respective line as said Yer112w, and preferably the activity is increased non-targeted, or
[47317] (b) a polypeptide comprising a polypeptide, a consensus sequence or at least a polypeptide motif as shown in the respective line in column 5 of Table II or in column 8 of Table IV, application no. 7, respectively, and being depicted in the same respective line as said Yer112w, or a functional equivalent or a homolog thereof as depicted in column 8 of Table II, application no. 7, preferably a homolog or functional equivalent as depicted in column 8 of Table II B, application no. 7, and being depicted in the same respective line as said Yer112w, and preferably the activity is increased non-targeted, whereby the respective line disclose in column 7 the fine chemical gamma-tocopherol.

[47318] Accordingly, in one embodiment, the molecule which activity is to be increased in the process of the invention is the gene product with an activity as a “small nuclear ribonucleoprotein”, preferably it is the molecule of section (a) or (b) of this paragraph.

[47319] In particular, it was observed that in plants, especially in Arabidopsis thaliana, increasing or generating the activity of a gene product non-targeted with the activity of a “small nuclear ribonucleoprotein”, preferably being encoded by a gene comprising the nucleic acid sequence SEQ ID NO. 113598, preferably the coding region thereof, conferred the production of or the increase in gamma-tocopherol compared with the wild type control.

[47320] The nucleic acid sequence of Ygr170w from Saccharomyces cerevisiae, e.g. as shown in the respective line in column 5 of Table I, application no. 7, has been published in A. And the activity of the gene product thereof is the activity of phosphatidylserine decarboxylase.

[47321] Accordingly, in one embodiment, the process of the present invention for producing alpha-tocopherol in a non-human organism, like a microorganism or a plant or a part thereof, comprises increasing or generating the activity of a gene product with the activity of a gene product conferring the activity of “phosphatidylserine decarboxylase”, especially from Saccharomyces cerevisiae or its functional equivalent or its homolog, e.g. the increase of
[47322] (a) a gene product of a gene comprising the nucleic acid molecule as shown in the respective line in column 5 of Table I (whereby the respective line disclose in column 7 the fine chemical alpha-tocopherol), application no. 7, preferably the coding region thereof, or a homolog or a fragment thereof, and being depicted in the same respective line as said Ygr170w, or a functional equivalent or a homolog thereof as shown in column 8 of Table I, application no. 7, preferably the coding region thereof, particularly a homolog or functional equivalent as shown in column 8 of Table I B, application no. 7, and being depicted in the same respective line as said Ygr170w, and preferably the activity is increased plastidic, or
[47323] (b) a polypeptide comprising a polypeptide, a consensus sequence or at least a polypeptide motif as shown in the respective line in column 5 of Table II or in column 8 of Table IV, application no. 7, respectively, and being depicted in the same respective line as said Ygr170w, or a functional equivalent or a homolog thereof as depicted in column 8 of Table II, application no. 7, preferably a homolog or functional equivalent as depicted in column 8 of Table II B, application no. 7, and being depicted in the same respective line as said Ygr170w, and preferably the activity is increased plastidic, whereby the respective line disclose in column 7 the fine chemical alpha-tocopherol.

[47324] Accordingly, in one embodiment, the molecule which activity is to be increased in the process of the invention is the gene product with an activity as a “phosphatidylserine decarboxylase”, preferably it is the molecule of section (a) or (b) of this paragraph.

[47325] In particular, it was observed that in plants, especially in Arabidopsis thaliana, increasing or generating the activity of a gene product plastidic with the activity of a “phosphatidylserine decarboxylase”, preferably being encoded by a gene comprising the nucleic acid sequence SEQ ID NO. 113636, preferably the coding region thereof, conferred the production of or the increase in alpha-tocopherol compared with the wild type control.

[47326] The nucleic acid sequence of Yjr153w from Saccharomyces cerevisiae, e.g. as shown in the respective line in column 5 of Table I, application no. 7, has been published in A. And the activity of the gene product thereof is the activity of polygalacturonase.

[47327] Accordingly, in one embodiment, the process of the present invention for producing gamma-tocopherol in a non-human organism, like a microorganism or a plant or a part thereof, comprises increasing or generating the activity of a gene product with the activity of a gene product conferring the activity of “polygalacturonase”, especially from Saccharomyces cerevisiae or its functional equivalent or its homolog, e.g. the increase of
[47328] (a) a gene product of a gene comprising the nucleic acid molecule as shown in the respective line in column 5 of Table I (whereby the respective line disclose in column 7 the fine chemical gamma-tocopherol), application no. 7, preferably the coding region thereof, or a homolog or a fragment thereof, and being depicted in the same respective line as said Yjr153w, or a functional equivalent or a homolog thereof as shown in column 8 of Table I, application no. 7, preferably the coding region thereof, particularly a homolog or functional equivalent as shown in column 8 of Table I B, application no. 7, and being depicted in the same respective line as said Yjr153w, and preferably the activity is increased non-targeted, or
[47329] (b) a polypeptide comprising a polypeptide, a consensus sequence or at least a polypeptide motif as shown in the respective line in column 5 of Table II or in column 8 of Table IV, application no. 7, respectively, and being depicted in the same respective line as said Yjr153w, or a functional equivalent or a homolog thereof as depicted in column 8 of Table II, application no. 7, preferably a homolog or functional equivalent as depicted in column 8 of Table II B, application no. 7, and being depicted in the same respective line as said Yjr153w, and preferably the activity is increased non-targeted, whereby the respective line disclose in column 7 the fine chemical gamma-tocopherol.

[47330] Accordingly, in one embodiment, the molecule which activity is to be increased in the process of the invention is the gene product with an activity as a “polygalacturonase”, preferably it is the molecule of section (a) or (b) of this paragraph.

[47331] In particular, it was observed that in plants, especially in Arabidopsis thaliana, increasing or generating the activity of a gene product non-targeted with the activity of a “polygalacturonase”, preferably being encoded by a gene comprising the nucleic acid sequence SEQ ID NO. 66274, preferably the coding region thereof, conferred the production of or the increase in gamma-tocopherol compared with the wild type control.

[47332] The nucleic acid sequence of Ylr178c from Saccharomyces cerevisiae, e.g. as shown in the respective line in column 5 of Table I, application no. 7, has been published in A. And the activity of the gene product thereof is the activity of ylr178c-protein.

[47333] Accordingly, in one embodiment, the process of the present invention for producing gamma-tocopherol in a non-human organism, like a microorganism or a plant or a part thereof, comprises increasing or generating the activity of a gene product with the activity of a gene product conferring the activity of “yid 78c-protein”, especially from Saccharomyces cerevisiae or its functional equivalent or its homolog, e.g. the increase of
[47334] (a) a gene product of a gene comprising the nucleic acid molecule as shown in the respective line in column 5 of Table I (whereby the respective line disclose in column 7 the fine chemical gamma-tocopherol), application no. 7, preferably the coding region thereof, or a homolog or a fragment thereof, and being depicted in the same respective line as said Ylr178c, or a functional equivalent or a homolog thereof as shown in column 8 of Table I, application no. 7, preferably the coding region thereof, particularly a homolog or functional equivalent as shown in column 8 of Table I B, application no. 7, and being depicted in the same respective line as said Ylr178c, and preferably the activity is increased plastidic, or
[47335] (b) a polypeptide comprising a polypeptide, a consensus sequence or at least a polypeptide motif as shown in the respective line in column 5 of Table II or in column 8 of Table IV, application no. 7, respectively, and being depicted in the same respective line as said Ylr178c, or a functional equivalent or a homolog thereof as depicted in column 8 of Table II, application no. 7, preferably a homolog or functional equivalent as depicted in column 8 of Table II B, application no. 7, and being depicted in the same respective line as said Ylr178c, and preferably the activity is increased plastidic, whereby the respective line disclose in column 7 the fine chemical gamma-tocopherol.

[47336] Accordingly, in one embodiment, the molecule which activity is to be increased in the process of the invention is the gene product with an activity as a “ylr178c-protein”, preferably it is the molecule of section (a) or (b) of this paragraph.

[47337] In particular, it was observed that in plants, especially in Arabidopsis thaliana, increasing or generating the activity of a gene product plastidic with the activity of a “yid 78c-protein”, preferably being encoded by a gene comprising the nucleic acid sequence SEQ ID NO. 66715, preferably the coding region thereof, conferred the production of or the increase in gamma-tocopherol compared with the wild type control.

[47338] The nucleic acid sequence of Ylr359w from Saccharomyces cerevisiae, e.g. as shown in the respective line in column 5 of Table I, application no. 7, has been published in A. And the activity of the gene product thereof is the activity of adenylosuccinate lyase.

[47339] Accordingly, in one embodiment, the process of the present invention for producing alpha-tocopherol in a non-human organism, like a microorganism or a plant or a part thereof, comprises increasing or generating the activity of a gene product with the activity of a gene product conferring the activity of “adenylosuccinate lyase”, especially from Saccharomyces cerevisiae or its functional equivalent or its homolog, e.g. the increase of
[47340] (a) a gene product of a gene comprising the nucleic acid molecule as shown in the respective line in column 5 of Table I (whereby the respective line disclose in column 7 the fine chemical alpha-tocopherol), application no. 7, preferably the coding region thereof, or a homolog or a fragment thereof, and being depicted in the same respective line as said Ylr359w, or a functional equivalent or a homolog thereof as shown in column 8 of Table I, application no. 7, preferably the coding region thereof, particularly a homolog or functional equivalent as shown in column 8 of Table I B, application no. 7, and being depicted in the same respective line as said Ylr359w, and preferably the activity is increased plastidic, or
[47341] (b) a polypeptide comprising a polypeptide, a consensus sequence or at least a polypeptide motif as shown in the respective line in column 5 of Table II or in column 8 of Table IV, application no. 7, respectively, and being depicted in the same respective line as said Ylr359w, or a functional equivalent or a homolog thereof as depicted in column 8 of Table II, application no. 7, preferably a homolog or functional equivalent as depicted in column 8 of Table II B, application no. 7, and being depicted in the same respective line as said Ylr359w, and preferably the activity is increased plastidic, whereby the respective line disclose in column 7 the fine chemical alpha-tocopherol.

[47342] Accordingly, in one embodiment, the molecule which activity is to be increased in the process of the invention is the gene product with an activity as a “adenylosuccinate lyase”, preferably it is the molecule of section (a) or (b) of this paragraph.

[47343] In particular, it was observed that in plants, especially in Arabidopsis thaliana, increasing or generating the activity of a gene product plastidic with the activity of a “adenylosuccinate lyase”, preferably being encoded by a gene comprising the nucleic acid sequence SEQ ID NO. 67190, preferably the coding region thereof, conferred the production of or the increase in alpha-tocopherol compared with the wild type control.

[47344] The nucleic acid sequence of Ypr170c from Saccharomyces cerevisiae, e.g. as shown in the respective line in column 5 of Table I, application no. 7, has been published in A. And the activity of the gene product thereof is the activity of ypr170c-protein.

[47345] Accordingly, in one embodiment, the process of the present invention for producing alpha-tocopherol in a non-human organism, like a microorganism or a plant or a part thereof, comprises increasing or generating the activity of a gene product with the activity of a gene product conferring the activity of “ypr170c-protein”, especially from Saccharomyces cerevisiae or its functional equivalent or its homolog, e.g. the increase of
[47346] (a) a gene product of a gene comprising the nucleic acid molecule as shown in the respective line in column 5 of Table I (whereby the respective line disclose in column 7 the fine chemical alpha-tocopherol), application no. 7, preferably the coding region thereof, or a homolog or a fragment thereof, and being depicted in the same respective line as said Ypr170c, or a functional equivalent or a homolog thereof as shown in column 8 of Table I, application no. 7, preferably the coding region thereof, particularly a homolog or functional equivalent as shown in column 8 of Table I B, application no. 7, and being depicted in the same respective line as said Ypr170c, and preferably the activity is increased plastidic, or
[47347] (b) a polypeptide comprising a polypeptide, a consensus sequence or at least a polypeptide motif as shown in the respective line in column 5 of Table II or in column 8 of Table IV, application no. 7, respectively, and being depicted in the same respective line as said Ypr170c, or a functional equivalent or a homolog thereof as depicted in column 8 of Table II, application no. 7, preferably a homolog or functional equivalent as depicted in column 8 of Table II B, application no. 7, and being depicted in the same respective line as said Ypr170c, and preferably the activity is increased plastidic, whereby the respective line disclose in column 7 the fine chemical alpha-tocopherol.

[47348] Accordingly, in one embodiment, the molecule which activity is to be increased in the process of the invention is the gene product with an activity as a “ypr170c-protein”, preferably it is the molecule of section (a) or (b) of this paragraph.

[47349] In particular, it was observed that in plants, especially in Arabidopsis thaliana, increasing or generating the activity of a gene product plastidic with the activity of a “ypr170c-protein”, preferably being encoded by a gene comprising the nucleic acid sequence SEQ ID NO. 113647, preferably the coding region thereof, conferred the production of or the increase in alpha-tocopherol compared with the wild type control.

[47350] It was further observed that increasing or generating the activity of a FCRP gene shown in Table d, e.g. a nucleic acid molecule derived from the coding region of the nucleic acid molecule shown in Table d in A. thaliana conferred the production of or the increase in fine chemical, compared with the wild type control. Thus, in one embodiment, a nucleic acid molecule, preferably the coding region thereof, indicated in Table d or its homolog as indicated in the respective line in Table I or the expression product is used in the method of the present invention to generate or to increase the production of fine chemical in a non-human organism, like a microorganism or a plant, compared with the wild type control.

[47351] In this context, the fine chemical amount in a cell, in a non-human organism, like a plant or a microorganism or a part thereof, is increased by 1%, 3%, 5%, 10%, 20%, 30%, 40%, 50%, 60%, 70%, 80%, 90%, 100%, 120, 150% or 200% or more.

[47352] The fine chemical can be contained in the organism either in its free form and/or bound to proteins or polypeptides or mixtures thereof. Accordingly, in one embodiment, the amount of the free form in a cell, in a non-human organism, like a plant or a microorganism or part thereof, is increased byl%, 3%, 5%, 10%, 20%, 30%, 40%, 50%, 60%, 70%, 80%, 90%, 100%, 120, 150% or 200% or more. Accordingly, in another embodiment, the amount of the bound fine chemical in a cell, in a non-human organism, like a plant or a microorganism or part thereof, is increased by 1%, 3%, 5%, 10%, 20%, 30%, 40%, 50%, 60%, 70%, 80%, 90%, 100%, 120, 150% or 200% or more.

[47353] A protein having an activity conferring an increase in the amount or level of the fine chemical alpha-tocopherol, or gamma-tocopherol, upon targeting to the plastids or mitochondria or upon non-targeting, preferably has the structure of the respective polypeptide described herein, in particular of the polypeptides comprising the consensus sequence or at least one polypeptide motifs as shown in the respective line in Table IV, application no. 7, column 8 or of the polypeptide comprising an amino acid sequence as disclosed in the respective line in Table II, application no. 7, columns 5 or 8, or homologs or fragments thereof as described herein, or is encoded by the nucleic acid molecule characterized herein or the nucleic acid molecule according to the invention, for example by the nucleic acid molecule as shown in the respective line in Table I, application no. 7, columns 5 or 8, preferably the coding region thereof, or homologs or fragments thereof and has the herein mentioned activity.

[47354] Owing to the biological activity of the proteins which are used in the process according to the invention and which are encoded by nucleic acid molecules according to the invention, it is possible to produce compositions comprising the fine chemical, i.e. an increased amount of the fine chemical free or bound, e.g. amino acid compositions. Depending on the choice of the non-human organism used for the process according to the present invention, for example a microorganism or a plant, compositions or mixtures comprising the fine chemical can be produced.

[47355] The term “expression” refers to the transcription and/or translation of a codogenic gene segment or gene. As a rule, the resulting product is an mRNA or a protein. However, expression products can also include functional RNAs such as, for example, antisense, nucleic acids, tRNAs, snRNAs, rRNAs, RNAi, siRNA, ribozymes etc. Expression may be systemic, local or temporal, for example limited to certain cell types, tissues organs or organelles or time periods.

[47356] In one embodiment, the process of the present invention comprises one or more of the following steps
[47357] (a) stabilizing a protein conferring the generation or increased expression of a protein encoded by the nucleic acid molecule of the invention or of the polypeptide of the invention, e.g. of a polypeptide having the activity selected from the group consisting of 3-deoxy-7-phosphoheptulonate synthase, 3-deoxy-D-arabinoheptulosonate-7-phosphatesynthase, ABC transporter permease subunit, acetyltransferase, acid shock protein, adenylate kinase, adenylosuccinate lyase, amino-acid acetyltransferase, ankyrin repeat family protein, At1g29350-protein, ATP-binding component of a transport system, b1163-protein, b1219-protein, b1234-protein, b1522-protein, b1921-protein, b2360-protein, b2548-protein, b2613-protein, b2673-protein, b2812-protein, b3890-protein, b3989-protein, b4029-protein, b4050-protein, b4056-protein, calcium-dependent protein kinase, carbohydrate kinase, colanic acid biosynthesis protein, coproporphyrinogen oxidase, cyclin D , DNA polymerase subunit, electron transfer flavoprotein subunit beta, geranylgeranyl pyrophosphate synthase, geranyltranstransferase, gluconate transport system permease 3, glucose dehydrogenase, glucose-6-phosphate 1-dehydrogenase, glutaredoxin, glycerol dehydrogenase, glycerol-3-phosphate dehydrogenase, glycolate utilization protein, harpin-induced family protein, homocitrate synthase, hydrolase, isopropylmalate isomerase large subunit, lipopolysaccharide biosynthesis protein, MADS box protein transcription factor, major facilitator superfamily transporter protein, malate dehydrogenase, monothiol glutaredoxin, monthiol glutaredoxin, multiple antibiotic resistance protein, murein transglycosylase, N-(5′-phosphoribosyl)anthranilate isomerase, NAD-dependent epimerase/dehydratase, NADP-dependent malic enzyme, O-antigen chain length determinant, phosphatidylserine decarboxylase, phospho-2-dehydro-3-deoxyheptonate aldolase, phosphoadenosine phosphosulfate reductase , phosphofructokinase, photosystem II protein, polygalacturonase, polyphosphate kinase, precorrin methylase, protein kinase, protein phosphatase, putative transport system permease protein, pyruvate kinase, RNAbinding protein, Sec-independent protein translocase subunit, serine protease, sll1761-protein, slr1917-protein, small nuclear ribonucleoprotein , ThiF family protein, thioredoxin, thioredoxin family protein, threonine synthase, transcription factor, transcriptional regulator, transport protein, trehalose-phosphatase, TTC1386-protein, ycl049c-protein, ydl235c-protein, ydr183w-protein, yer106w-protein, ylr178c-protein, ypr170c-protein, and zinc finger protein, or of a polypeptide as indicated in the respective line in Table II, application no. 7, columns 5 or 8, or its homologs or fragments, and conferring the production of or an increase in alpha-tocopherol, or gamma-tocopherol, respectively; and/or
[47358] (b) stabilizing a mRNA conferring the generation or increased expression of a FCRP, e.g. protein encoded by the nucleic acid molecule of the invention or its homologs or fragments, or of a mRNA encoding the polypeptide of the present invention having the hereinmentioned activity selected from the group consisting of said activities mentioned in (a) and conferring the production of or an increase in alpha-tocopherol, or gamma-tocopherol, respectively; and/or
[47359] (c) increasing the specific activity of a protein conferring the increased expression of a FCRP, e.g. a protein encoded by the nucleic acid molecule of the invention or of the polypeptide of the present invention having herein-mentioned alpha-tocopherol, or gamma-tocopherol generating or increasing activity, respectively, e.g. of a polypeptide having the activity of a protein as indicated in the respective line in Table II, application no. 7, columns 5 or 8, or its homologs or fragments, or decreasing the inhibitory regulation of the polypeptide of the invention; and/or
[47360] (d) generating or increasing the expression of an endogenous or artificial transcription factor mediating the expression of a protein conferring the generation or increased expression of a FCRP, e.g. a protein encoded by the nucleic acid molecule of the invention or of the polypeptide of the invention having herein-mentioned activity selected from the group consisting of said activities mentioned in (a) and conferring a alpha-tocopherol, or gamma-tocopherol increasing activity, respectively, e.g. of a polypeptide having the activity of a protein as indicated in the respective line in Table II, application no. 7, columns 5 or 8 or its homologs; and/or
[47361] (e) stimulating activity of a protein conferring the increased expression of a FCRP, e.g. a protein encoded by the nucleic acid molecule of the present invention or a polypeptide of the present invention having herein-mentioned activity selected from the group consisting of said activities mentioned in (a) and conferring a alpha-tocopherol, or gamma-tocopherol increasing activity, respectively, e.g. of a polypeptide having the activity of a protein as indicated in the respective line in Table II, application no. 7, columns 5 or 8, or its homologs or fragments, by adding one or more exogenous inducing factors to the non-human organism or parts thereof; and/or
[47362] (f) expressing a transgenic gene encoding a protein conferring the increased expression of a FCRP, e.g. a polypeptide encoded by the nucleic acid molecule of the present invention or a polypeptide of the present invention, having herein-mentioned activity selected from the group consisting of said activities mentioned in (a) and conferring a alpha-tocopherol, or gamma-tocopherol increasing activity, respectively, e.g. of a polypeptide having the activity of a protein as indicated in the respective line in Table II, application no. 7, columns 5 or 8, or its homologs or fragments, and/or
[47363] (g) increasing the copy number of a gene conferring the increased expression of a nucleic acid molecule encoding a FCRP, e.g. a polypeptide encoded by the nucleic acid molecule of the invention or the polypeptide of the invention having herein-mentioned activity selected from the group consisting of said activities mentioned in (a) and conferring a alpha-tocopherol, or gamma-tocopherol increasing activity, respectively, e.g. of a polypeptide having the activity of a protein as indicated in the respective line in Table II, application no. 7, columns 5 or 8, or its homologs or fragments; and/or
[47364] (h) increasing the expression of the endogenous gene encoding the FCRP, polypeptide of the invention, e.g. a polypeptide encoded by the nucleic acid molecule of the invention or the polypeptide of the invention having herein-mentioned activity selected from the group consisting of said activities mentioned in (a) and conferring a alpha-tocopherol, or gamma-tocopherol; increasing activity, respectively, e.g. of a polypeptide having the activity of a protein as indicated in the respective line in Table II, application no. 7, columns 5 or 8, or its homologs or fragments, by adding positive expression or removing negative expression elements, e.g. homologous recombination can be used to either introduce positive regulatory elements like for plants the 35S enhancer into the promoter or to remove repressor elements form regulatory regions. Further gene conversion methods can be used to disrupt repressor elements or to enhance to activity of positive elements. Positive elements can be randomly introduced in plants by T-DNA or transposon mutagenesis and lines can be identified in which the positive elements have be integrated near to a gene of the invention, the expression of which is thereby enhanced; and/or
[47365] (i) modulating growth conditions of the non-human organism in such a manner, that the expression or activity of the gene encoding the FCRP, e.g. a protein of the invention or the protein itself is enhanced, for example microorganisms or plants can be grown for example under a higher temperature regime leading to an enhanced expression of heat shock proteins, which can lead to an enhanced alpha-tocopherol, or gamma-tocopherol production, respectively; and/or
[47366] (j) selecting of non-human organisms with especially high activity of the proteins of the invention from natural or from mutagenized resources and breeding them into the target organisms, e.g. the elite crops; and/or
[47367] (k) directing a protein encoded by the nucleic acid molecule of the invention or of the polypeptide of the present invention having herein-mentioned activity selected from the group consisting of said activities mentioned in (a) and conferring a alpha-tocopherol, or gamma-tocopherol increasing activity, respectively, e.g. of a polypeptide having the activity of a protein as indicated in the respective line in Table II, application no. 7, columns 5 or 8, or its homologs or fragments, if for the corresponding nucleic acid molecule in the respective line in column 6 of Table I the term “plastidic” is indicated, to the plastids by the addition of a plastidial targeting sequence or if for the corresponding nucleic acid molecule in the respective line in column 6 of Table I the term “mitochondric” is indicated, to the mitochondria by the addition of a mitochondrial targeting sequence; and/or
[47368] (l) generating the expression of a protein encoded by the nucleic acid molecule of the invention or of the polypeptide of the present invention having herein-mentioned activity selected from the group consisting of said activities mentioned in (a) and conferring a alpha-tocopherol, or gamma-tocopherol increasing activity, respectively, e.g. of a polypeptide having the activity of a protein as indicated in the respective line in Table II, application no. 7, columns 5 or 8, or its homologs or fragments, if for the corresponding nucleic acid molecule in the respective line in column 6 of Table I the term “plastidic” or “mitochondric” is indicated, in these organelles by the stable or transient transformation, advantageously stable transformation, of organelles, preferably plastids or mitochondria, with an inventive nucleic acid sequence preferably in form of an expression cassette containing said sequence leading to the expression of the nucleic acids or polypeptides of the invention in the respective organelle; and/or
[47369] (m) generating the expression of a protein encoded by the nucleic acid molecule of the invention or of the polypeptide of the present invention having herein-mentioned activity selected from the group consisting of said activities mentioned in (a) and conferring a alpha-tocopherol, and/or gamma-tocopherol increasing activity, respectively, e.g. of a polypeptide having the activity of a protein as indicated in the respective line in Table II, application no. 7, columns 5 or 8, or its homologs or fragments, if for the corresponding nucleic acid molecule in the respective line in column 6 of Table I the term “plastidic” or “mitochondric” is indicated, in these organelles by integration of a nucleic acid of the invention into the genome of the respective organelle under control of preferable a promoter selective for the respective organelle.

[47370] Preferably, said mRNA is the coding region of the nucleic acid molecule of the present invention and/or the protein conferring the increased expression of a protein encoded by the coding region of the nucleic acid molecule of the present invention alone or linked to a transit nucleic acid sequence or transit peptide encoding nucleic acid sequence or the polypeptide having the herein mentioned activity, e.g. conferring the generation of or increase of alpha-tocopherol, or gamma-tocopherol, respectively, after increasing the expression or activity of the encoded polypeptide, non-targeted or in organelles such as plastids and/or mitochondria, preferably plastids, or having the activity of a polypeptide having an activity as the protein as shown in the respective line in Table II, application no. 7, column 3, or its homologs. Preferably the increase of alpha-tocopherol, or gamma-tocopherol, respectively, takes place non-targeted or in plastids and/or mitochondria, preferably non-targeted or in plastids.

[47371] In general, the amount of mRNA or polypeptide in a cell or a compartment of a non-human organism correlates with the amount of encoded protein and thus with the overall activity of the encoded protein in said volume. Said correlation is not always linear, the activity in the volume is dependent on the stability of the molecules, the degradation of the molecules or the presence of activating or inhibiting co-factors. Further, product and educt inhibitions of enzymes are well known and described in Textbooks, e.g. Stryer, Biochemistry or Zinser et al. “Enzyminhibitoren”/Enzyme inhibitors”.

[47372] The activity of the above-mentioned proteins and/or polypeptide encoded by the nucleic acid molecule of the present invention can be increased in various ways. For example, the activity in an organism or in a part thereof, like a cell or in an organelle of the cell, is increased for example via targeting of the nucleic acid sequence or the encoded gene product to an organelle such as plastids or mitochondria, preferentially to plastids, and/or increasing the gene product number, e.g. by increasing the expression rate, like introducing a stronger promoter, or by increasing the stability of the mRNA expressed, thus increasing the translation rate, and/or increasing the stability of the gene product, thus reducing the proteins decayed. Further, the activity or turnover of enzymes can be influenced in such a way that a reduction or increase of the reaction rate or a modification (reduction or increase) of the affinity to the substrate results, is reached. A mutation in the catalytic centre of an polypeptide of the invention, e.g. as enzyme, can modulate the turn over rate of the enzyme, e.g. an exchange of an amino acid in the catalytic center can lead to an increased activity of the enzyme, or the deletion of regulator binding sites can reduce a negative regulation like a feedback inhibition (or a substrate inhibition, if the substrate level is also increased). The specific activity of an enzyme of the present invention can be increased such that the turn over rate is increased or the binding of a co-factor is improved. Improving the stability of the encoding mRNA or the protein can also increase the activity of a gene product. The stimulation of the activity is also under the scope of the term “increased activity”.

[47373] Moreover, the regulation of the above-mentioned nucleic acid sequences may be modified so that gene expression is increased. This can be achieved advantageously by means of heterologous regulatory sequences or by modifying, for example mutating, the natural regulatory sequences which are present. The advantageous methods may also be combined with each other.

[47374] In general, an activity of a gene product in a non-human organism or part thereof, in particular in a plant cell or organelle of a plant cell, a plant, or a plant or a part thereof or in a microorganism can be increased by increasing the amount of the specific encoding mRNA or the corresponding protein in said organism or part thereof. “Amount of protein or mRNA” is understood as meaning the molecule number of polypeptides or mRNA molecules in an organism, a tissue, a cell or a cell compartment. “Increase” in the amount of a protein means the quantitative increase of the molecule number of said protein in a non-human organism, a cell or a cell compartment, such as an organelle like a plastid or mitochondrion, or part thereof for example by one of the methods described herein below - in comparison to a wild type, controt or reference.

[47375] The increase in molecule number amounts preferably to at least 1%, 5%, 10%, 20%, 30%, 50%, 70%, 100%, 150%, 200% or more. However, a de novo expression is also regarded as subject of the present invention.

[47376] A modification, i.e. an increase, can be caused by endogenous or exogenous factors. For example, an increase in activity in a non-human organism or a part thereof can be caused by adding a gene product or a precursor or an activator or an agonist to the media or nutrition or can be caused by introducing said subjects into an organism, transient or stable. Such an increase can be reached by the introduction of the inventive nucleic acid sequence or the encoded protein into an organism, transient or stable. Furthermore such an increase can be reached by the introduction of the inventive nucleic acid sequence, preferably the coding region thereof, or the encoded protein in the correct cell compartment, for example into organelles, such as plastids or mitochondria, either by transformation and/or targeting.

[47377] In one embodiment the increase in the amount of the fine chemical in the non-human organism or a part thereof, e.g. in a cell, an organ, an organelle etc., is achieved by increasing the endogenous level of the polypeptide of the invention. Accordingly, in an embodiment of the present invention, the present invention relates to a process wherein the gene copy number of a gene encoding the polynucleotide or nucleic acid molecule of the invention is increased. Further, the endogenous level of the polypeptide of the invention can for example be increased by modifying the transcriptional or translational regulation of the polypeptide.

[47378] In one embodiment the amount of the fine chemical in the non-human organism or part thereof can be increase by targeted or random mutagenesis of the endogenous genes of the invention. For example homologous recombination can be used to either introduce positive regulatory elements like for plants the 35S enhancer into the promoter or to remove repressor elements form regulatory regions. In addition gene conversion like methods described by Kochevenko and Willmitzer (Plant Physiol. 132 (1), 174 (2003)) and citations therein can be used to disrupt repressor elements or to enhance to activity of positive regulatory elements.

[47379] Furthermore positive elements can be randomly introduced in (plant) genomes by T-DNA or transposon mutagenesis and lines can be screened for, in which the positive elements has be integrated near to a gene of the invention, the expression of which is thereby enhanced. The activation of plant genes by random integrations of enhancer elements has been described by Hayashi et al. (Science 258,1350 (1992)) or Weigel et al. (Plant Physiol. 122, 1003 (2000)) and others citated therein.

[47380] Reverse genetic strategies to identify insertions (which eventually carrying the activation elements) near in genes of interest have been described for various cases e.g. Krysan et al. (Plant Cell 11, 2283 (1999)); Sessions et al. (Plant Cell 14, 2985 (2002)); Young et al. (Plant Physiol. 125, 513 (2001)); Koprek et al. (Plant J. 24, 253 (2000)); Jeon et al.(Plant J. 22, 561 (2000)); Tissier et al., (Plant Cell 11, 1841 (1999)); Speulmann et al. (Plant Cell 11, 1853 (1999)). Briefly, material from all plants of a large T-DNA or transposon mutagenized plant population is harvested and genomic DNA prepared. Then the genomic DNA is pooled following specific architectures as described for example in Krysan et al. (Plant Cell 11, 2283 (1999)). Pools of genomics DNAs are then screened by specific multiplex PCR reactions detecting the combination of the insertional mutagen (e.g. T-DNA or Transposon) and the gene of interest. Therefore PCR reactions are run on the DNA pools with specific combinations of T-DNA or transposon border primers and gene specific primers. General rules for primer design can again be taken from Krysan et al. (Plant Cell 11, 2283 (1999)). Rescreening of lower levels DNA pools lead to the identification of individual plants in which the gene of interest is disrupted by the insertional mutagen.

[47381] The enhancement of positive regulatory elements or the disruption or weaking of negative regulatory elements can also be achieved through common mutagenesis techniques: The production of chemically or radiation mutated populations is a common technique and known to the skilled worker. Methods for plants are described by Koorneef et al. 1982 and the citations therein and by Lightner and Caspar in “Methods in Molecular Biology” Vol. 82. These techniques usually induce point mutations that can be identified in any known gene using methods such as TILLING (Colbert et al., Plant Physiol.126 (2), 480 (2001)). One can also envisage to introduce nucleic acids sequences, encoding organelle-, such as plastidal- or mitochondrial-targeting signals, like for example present in Table a or Table b, respectively, by homologous recombination or other methods of site specific integration, into the genome in that way, that an endogenous gene is functionally fused to the targeting sequence and the protein is redirected to the plastids or mitochondria, respectively. Eventually the integration can also occur randomly and the desired fusion event is selected for.

[47382] Accordingly, the expression level can be increased if the endogenous genes encoding a polypeptide conferring an increased expression of the polypeptide of the present invention, in particular genes comprising the nucleic acid molecule of the present invention, are modified via homologous recombination, Tilling approaches or gene conversion. It is also possible to add as mentioned herein targeting sequences to the inventive nucleic acid sequences.

[47383] Regulatory sequences, preferably in addition to a targeting sequence or part thereof (if present), can be operatively linked to the coding region of an endogenous nucleic acid and control its transcription and translation or the stability or decay of the encoding mRNA or the expressed protein. In order to modify and control the expression, promoter, UTRs, splicing sites, processing signals, polyadenylation sites, terminators, enhancers, repressors, post transcriptional or posttranslational modification sites can be changed, added or amended. For example, the activation of plant genes by random integrations of enhancer elements has been described by Hayashi et al. (Science 258, 1350 (1992)) or Weigel et al. (Plant Physiol. 122, 1003 (2000)) and others citated therein. For example, the expression level of the endogenous protein can be modulated by replacing the endogenous promoter with a stronger transgenic promoter or by replacing the endogenous 3′UTR with a 3′UTR, which provides more stability without amending the coding region. Further, the transcriptional regulation can be modulated by introduction of an artificial transcription factor as described in the examples. Alternative promoters, terminators and UTR are described below.

[47384] The activation of an endogenous polypeptide having above-mentioned activity, e.g. having the activity of a protein as shown in the respective line in Table II, application no. 7, column 3 or of the polypeptide of the invention, e.g. conferring the increase of the fine chemical alpha-tocopherol, or gamma-tocopherol, respectively, by increase of expression or activity in the cytoplasm, and/or in the cytosol, and/or in an organelle, such as plastids or mitochondria, can also be increased by introducing a synthetic transcription factor, which binds close to the coding region of the gene encoding the protein as shown in the respective line in Table II, application no. 7, column 5 or 8, or homologs or fragments thereof, and activates its transcription. A chimeric zinc finger protein can be constructed, which comprises a specific DNA-binding domain and an activation domain as e.g. the VP16 domain of Herpes Simplex virus. The specific binding domain can bind to the regulatory region of the gene encoding the protein as shown in the respective line in Table II, application no. 7, column 5 or 8, or homologs or fragments thereof. The expression of the chimeric transcription factor in a non-human organism, in particular in a plant, leads to a specific expression of the protein as shown in the respective line in Table II, application no. 7, column 5 or 8, or homologs or fragments thereof, see e.g. in WO01/52620, Oriz, Proc. Natl. Acad. Sci. USA 99, 13290 (2002), or Guan, Proc. Natl. Acad. Sci. USA 99, 13296 (2002).

[47385] In one further embodiment of the process according to the invention, organisms are used in which one of the above-mentioned genes, or one of the above-mentioned nucleic acids, is mutated in a way that the activity of the encoded gene products is less influenced by cellular factors, or not at all, in comparison with the unmutated proteins. For example, well known regulation mechanisms of enzymic activity are substrate inhibition or feed back regulation mechanisms. Ways and techniques for the introduction of substitution, deletions and additions of one or more bases, nucleotides or amino acids of a corresponding sequence are described herein below in the corresponding paragraphs and the references listed there, e.g. in Sambrook et al., Molecular Cloning, Cold Spring Habour, N.Y., 1989. The person skilled in the art will be able to identify regulation domains and binding sites of regulators by comparing the sequence of the nucleic acid molecule of the present invention or the expression product thereof with the state of the art by computer software means which comprise algorithms for the identifying of binding sites and regulation domains or by introducing into a nucleic acid molecule or in a protein systematically mutations and assaying for those mutations which will lead to an increased specify activity or an increased activity per volume, in particular per cell.

[47386] It can therefore be advantageous to express in a non-human organism a nucleic acid molecule of the invention or a polypeptide of the invention derived from a evolutionary distantly related organism, as e.g. using a prokaryotic gene in a eukaryotic host, as in these cases the regulation mechanism of the host cell may not weaken the activity (cellular or specific) of the gene or its expression product.

[47387] In another embodiment it can be advantageous to express in a non-human organism a nucleic acid molecule of the invention or a polypeptide of the invention in a compartment by the use of a respective targeting sequence, in which it is naturally not expressed, as in these cases the regulation mechanism of the host cell may not weaken the activity (cellular or specific) of the gene or its expression product.

[47388] The mutation is introduced in such a way that the production of the fine chemical is not adversely affected by e.g. undesired mutations.

[47389] Less influence on the regulation of a gene or its gene product is understood as meaning a reduced regulation of the enzymatic activity leading to an increased specific or cellular activity of the gene or its product. An increase of the enzymatic activity is understood as meaning an enzymatic activity, which is increased by at least 10%, 20%, 30%, 40%, 50%, 60% or 70% in comparison with the starting organism. This leads to an increased productivity of the desired fine chemical(s).

[47390] Owing to the introduction of a gene or a plurality of genes conferring the expression of the nucleic acid molecule of the invention or the polypeptide of the invention, for example the nucleic acid construct mentioned below, or encoding the protein as shown in the respective line in Table II, application no. 7, column 5 or 8, or homologs or fragments thereof, into a non-human organism alone or in combination with other genes, it is possible not only to increase the biosynthetic flux towards the end product, but also to increase, modify or create de novo an advantageous, preferably novel metabolites composition in the non-human organism, e.g. an advantageous composition comprising a higher content of (from a viewpoint of nutritional physiology limited) Vitamin E, alpha-tocopherol, or gamma-tocopherol and if desired other vitamins, and/or other metabolites, in free or bound form.

[47391] In another embodiment the composition comprises further higher amounts of metabolites positively affecting or lower amounts of metabolites negatively affecting the nutrition or health of animals or humans provided with said compositions or non-human organisms of the invention or parts thereof. Likewise, the number or activity of further genes which are required for the import or export of nutrients or metabolites, including amino acids, fatty acids, vitamins etc. or its precursors, required for the cell's biosynthesis of the fine chemical may be increased so that the concentration of necessary or relevant precursors, cofactors or intermediates within the cell(s) or within the corresponding storage compartments is increased. Owing to the increased or novel generated activity of the polypeptide of the invention or owing to the increased number of nucleic acid sequences of the invention and/or to the modulation of further genes which are involved in the biosynthesis of the fine chemical, e.g. by increasing the activity of enzymes synthesizing precursors or by destroying the activity of one or more genes which are involved in the breakdown of the fine chemical, it is possible to increase the yield, production and/or production efficiency of the fine chemical in the host organism, such as plants or microorganisms.

[47392] Accordingly, in one embodiment, the process according to the invention relates to a process, which comprises:
[47393] (a) providing a non-human organism, preferably a microorganism, a plant cell, a plant tissue, a plant or a part thereof, more preferably a microorganism, a plant tissue, a plant or a part thereof;
[47394] (b) increasing the activity of a protein as shown in the respective line in Table II, application no. 7, column 3 or of a polypeptide being encoded by the respective nucleic acid molecule of the present invention and described below, e.g. conferring an increase of the fine chemical Vitamin E, alpha-tocopherol, or gamma-tocopherol, respectively, in the non-human organism, preferably in the microorganism, the plant cell, the plant tissue, the plant or a part thereof, more preferably a microorganism, a plant tissue, a plant or a part thereof, especially cytoplasmic or in an organelle, like plastids or mitochondria,
[47395] (c) growing the non-human organism, preferably the microorganism, the plant cell, the plant tissue, the plant or a part thereof, under conditions which permit the production of said chemical in the non-human organism, preferably the microorganism, the plant cell, the plant tissue, the plant or a part thereof; and
[47396] (d) if desired, recovering, optionally isolating, said fine chemical, in free and/or bound form, and, optionally further free and/or bound vitamins, and/or other metabolites synthesized by the non-human organism, the microorganism, the plant cell, the plant tissue, the plant or a part thereof.

[47397] After the above-described increasing (which as defined above also encompasses the generating of an activity in a non-human organism, i.e. a de novo activity), for example after the introduction and the expression of the nucleic acid molecules of the invention or described in the methods or processes according to the invention, the organism according to the invention, advantageously, a microorganism, a non-human animal, a plant, plant or animal tissue or plant or animal cell, is grown and subsequently harvested.

[47398] Suitable non-human organisms or host organisms (transgenic organism) for the nucleic acid molecule used according to the invention and for the inventive process, the nucleic acid construct or the vector (both as described below) are, in principle, all organisms which are capable of synthesizing the fine chemical, and which are suitable for the activation, introduction or stimulation of recombinant genes. Examples which may be mentioned are transgenic plants, transgenic microorganisms such as fungi, bacteria, yeasts, alga or diatom preferably alga. Preferred organisms are those which are naturally capable of synthesizing the fine chemical in substantial amounts, like fungi, yeasts, bacteria or plants preferably alga and plants.

[47399] In the event that the transgenic non-human organism is a microorganism, such as a eukaryotic organism, for example a fungus, an alga, diatom or a yeast, in particular a fungus, alga, diatom or yeast selected from the families Tuberculariaceae, Adelotheciaceae, Dinophyceae, Ditrichaceae or Prasinophyceae. Preferred non-human organisms are microorganisms such as green algae or plants. After the growing phase, the organisms can be harvested.

[47400] The non-human organism, in particular the microorganism, plant or part thereof, is advantageously grown in such a way that it is not only possible to recover, if desired to isolate the free or bound fine chemical or the free and bound fine chemical but as option it is also possible to produce, recover and, if desired to isolate, other free or/and bound vitamins and/or other metabolites.

[47401] The organisms are harvested in a manner known per se and appropriate for the particular organism. Microorganisms such as bacteria, mosses, yeasts and fungi or plant cells which are cultured in liquid media by fermentation may be removed, for example, by centrifugation, decanting or filtration. Plants are grown on solid media in a manner known per se and harvested accordingly.

[47402] Vitamin E or its precursor 2,3-dimethyl-5-phytylquinol are isolated from the harvested biomass in a manner known per se, for example by extraction and, where appropriate, further chemical or physical purification processes such as, for example, precipitation methods, crystallography, thermal separation methods such as rectification methods or physical separation methods such as, for example, chromatography.

[47403] Vitamin E is isolated from oil-containing plants, for example, preferably by chemical conversion and distillation from vegetable oils or from the steam distillates obtained in the deodorization of vegetable oils (deodorizer condensates).

[47404] Further methods of isolating vitamin E from deodorizer condensates are described, for example, in DE 31 26 110 A1, EP 171 009 A2, GB 2 145 079, EP 333 472 A2 and WO 94/05650.

[47405] Preferred microorganisms are selected from the group consisting of Charophyceae such as the genera Chara, Nitella e.g. the species Chara globularis, Chara vulgaris, Nitella flexilis, Chlorophyceae such as the genera Acrosiphonia, Spongomorpha, Urospora, Bryopsis, Pseudobryopsis, Trichosolen, Dichotomosiphon, Caulerpa, Rhipilia, Blastophysa, Avrainvillea, Chlorodesmis, Codium, Espera, Halicystis, Halimeda, Penicillus, Pseudocodium, Rhipiliopsis, Rhipocephalus, Tydemania, Udotea, Derbesia, Acrochaete, Aphanochaete, Bolbocoleon, Chaetobolus, Chaetonema, Chaetophora, Chlorotylium, Desmococcus, Draparnaldia, Draparnaldiopsis, Ectochaete, Endophyton, Entocladia, Epicladia, Internoretia, Microthamnion, Ochlochaete, Phaeophila, Pilinella, Pringsheimiella, Protoderma, Pseudendoclonium, Pseudodictyon, Pseudopringsheimia, Pseudulvella, Schizomeris, Stigeoclonium, Thamniochaete, Ulvella, Pilinia, Tellamia, Helicodictyon, Actidesmium, Ankyra, Characium, Codiolum, Sykidion, Keratococcus, Prototheca, Bracteacoccus Chlorococcum, Excentrosphaera, Hormidium, Oophila, Schroederia, Tetraedron, Trebouxia Chlorosarcinopsis, Gomphonitzschia, Coccomyxa, Dactylothece, Diógenes, Disporá, Gloeocystis, Mycanthococcus, Ourococcus, Coelastrum, Dicranochaete, Botryococcus, Dictyosphaerium, Dimorphococcus, Chlorochytrium, Kentrosphaera, Phyllobium, Gomontia, Hormotila, Euastropsis, Hydrodictyon, Pectodictyon, Pediastrum, Sorastrum, Tetrapedia, Acanthosphaera, Echinosphaerella, Echinosphaeridium, Errerella, Gloeoactinium, Golenkeniopsis Golenkinia, Micractinium, Ankistrodesmus, Chlorella, Chodatella, Closteriopsis, Cryocystis, Dactylococcus, Dematractum, Eremosphaera, Eutetramorus, Franceia, Glaucocystis, Gloeotaenium, Kirchneriella, Lagerheimiella, Monoraphidium, Nannochloris, Nephrochlamys, Nephrocytium, Oocystis, Oonephris, Pachycladon, Palmellococcus, Planktosphaeria, Polyedriopsis, Pseudoraciborskia, Quadrigula, Radiococcus, Rochiscia, Scotiella, Selanastrum, Thorakochloris, Treubaria, Trochiscia, Westella, Zoochlorella, Ostreobium, Phyllosiphon, Protosiphon, Rhodochytrium, Actinastrum, Coronastrum, Crucigenia, Dictymocystis, Enallax, Scenedesmus, Selenastrum, Tetradesmus, Tetrallantos, Tetrastrum, Chlorosarcina, Anadyomene, Valoniopsis, Ventricaria, Basicladia, Chaetomorpha, Cladophora, Lola Pithophora Rhizoclonium Chaetosphaeridium, Conochaete, Coleochaete, Oligochaetophora, Polychaetophora, Cylindrocapsa, Gongrosira, Protococcus, Acetabularia, Batophora, Bornetella, Dasycladus, Halicoryne, Neomeris, Elakatothrix, Raphidonema, Microspora, Bulbochaete, Oedocladium, Oedogonium, Prasiola, Rosenvingiella, Schizogonium, Apjohnia, Chamaedoris, Cladophoropsis, Siphonocladus, Spongocladia, Boergesenia, Boodlea, Cystodictyon, Dictyosphaeria, Ernodesmis, Microdictyon, Struvea, Valonia, Sphaeroplea, Malleochloris, Stylosphaeridium, Gloeococcus, Palmella, Palmodictyon, Palmophyllum, Pseudospherocystis, Sphaerocystis, Urococcus, Apiocystis, Chaetopeltis, Gemellicystis, Paulschulzia, Phacomyxa, Pseudotetraspora, Schizochlamys, Tetraspora, Cephaleuros, Ctenocladus, Epibolium, Leptosira, Trentepohlia, Diplochaete, Monostroma, Binuclearia, Geminella, Klebsormidium, Planetonema, Radiofilum, Stichococcus, Ulothrix, Uronema, Blidingia, Capsosiphon, Chloropelta, Enteromorpha, Percursaria, Ulva, Ulvaria, Brachiomonas, Carteria, Chlainomonas, Chlamydomonas, Chlamydonephris, Chlorangium, Chlorogonium, Cyanidium, Fortiella, Glenomonas, Gloeomonas, Hyalogonium, Lobomonas Polytoma, Pyramichlamys, Scourfieldia, Smithsonimonas, Sphaerellopsis, Sphenochloris, Spirogonium, Collodictyon, Dunaliella, Haematococcus, Stephanosphaera, Coccomonas, Dysmorphococcus, Phacotus, Pteromonas, Thoracomonas, Wislouchiella, Mascherina, Pyrobotrys, Spondylomorum, Eudorina, Gonium, Oltmannsiella, Pandorina, Platydorina, Pleodorina, Stephanoon, Volvox, Volvulina, Actinotaenium, Arthrodesmus, Bambusina Closterium, Cosmarium, Desmidium, Euastrum, Groenbladia, Hyalotheca, Micrasterias, Penium, Phymatodocis, Pleurotaenium, Sphaerozosma, Spinoclosterium, Spinocosmarium, Spondylosium, Staurastrum, Tetmemorus, Triploceras, Xanthidium, Cylindrocystis, Genicularia, Gonatozygon, Mesotaenium, Netrium, Roya, Spirotaenia, Cosmocladium, Debarya, Docidium, Euastridium, Hallasia, Mougeotia, Mougeotiopsis, Sirogonium, Spirogyra, Staurodesmus, Teilingia, Zygnema, Zygogonium, e.g. the species Caulerpa taxifolia, Prototheca wickerhamii, Ankistrodesmus falcatus, Chlorella ellipsoidea, Chlorella pyrenoidosa, Clorella sorokiniana, Chlorella vulgaris, Scenedesmus obliquus, Scenedesmus quadricauda, Selenastrum capricornutum, Selenastrum undecimnotata, Cladophora glomerata, Chlamydomonas eugametos, Chlamydomonas reinhardtii, Cyanidium caldarium, Dunaliella salina, Dunaliella tertiolecta, Euglena gracilis, Haematococcus pluvialis, Coniugatophyceae, Prasinophyceae Trebouxiophyceae, Ulvophyceae, Chlorodendraceae, Pedinomonadales, Halosphaeraceae, Pterospermataceae, Monomastigaceae, Pyramimonadaceae, Chlorodendraceae such as the genera Prasinocladus e.g. the species Prasinocladus ascus, Halosphaeraceae, Pedinomonadales, Pedinomonadaceae such as the genera Pedinomonas, Pterospermataceae such as the genera Pachysphaera, Pterosperma, Halosphaera, Pyramimonas, Bacillariophyceae, Chrysophyceae, Craspedophyceae, Euglenophyceae, Prymnesiophyceae, Phaeophyceae, Dinophyceae, Rhodophyceae, Xanthophyceae, Prasinophyceae such as the genera Nephroselmis, Prasinococcus, Scherffelia, Tetraselmis, Mantoniella, Ostreococcus e.g. the species Nephroselmis olivacea, Prasinococcus capsulatus, Scherffelia dubia, Tetraselmis chui, Tetraselmis suecica, Mantoniella squamata or Ostreococcus tauri.

[47406] Preferred plants are monocotyledonous or dicotyledonous plants, preferably selected from the group consisting of Anacardiaceae such as the genera Pistacia, Mangifera, Anacardium e.g. the species Pistacia vera [pistachios, Pistazie], Mangifer indica [Mango] or Anacardium occidentale [Cashew]; Asteraceae such as the genera Calendula, Carthamus, Centaurea, Cichorium, Cynara, Helianthus, Lactuca, Locusta, Tagetes, Valeriana e.g. the species Calendula officinalis [Marigold], Carthamus tinctorius [safflower], Centaurea cyanus [cornflower], Cichorium intybus [blue daisy], Cynara scolymus [Artichoke], Helianthus annus [sunflower], Lactuca sativa, Lactuca crispa, Lactuca esculenta, Lactuca scariola L. ssp. sativa, Lactuca scariola L. var. integrate, Lactuca scariola L. var. integrifolia, Lactuca sativa subsp. romana, Locusta communis, Valeriana locusta [lettuce], Tagetes lucida, Tagetes erecta or Tagetes tenuifolia [Marigold]; Apiaceae such as the genera Daucus e.g. the species Daucus carota [carrot]; Betulaceae such as the genera Corylus e.g. the species Corylus avellana or Corylus colurna [hazelnut]; Boraginaceae such as the genera Borago e.g. the species Borago officinalis [borage]; Brassicaceae such as the genera Brassica, Melanosinapis, Sinapis, Arabadopsis e.g. the species Brassica napus, Brassica rapa ssp. [canola, oilseed rape, turnip rape], Sinapis arvensis Brassica juncea, Brassica juncea var. juncea, Brassica juncea var. crispifolia, Brassica juncea var. foliosa, Brassica nigra, Brassica sinapioides, Melanosinapis communis [mustard], Brassica oleracea [fodder beet] or Arabidopsis thaliana; Bromeliaceae such as the genera Anana, Bromelia e.g. the species Anana comosus, Ananas ananas or Bromelia comosa [pineapple]; Caricaceae such as the genera Carica e.g. the species Carica papaya [papaya]; Cannabaceae such as the genera Cannabis e.g. the species Cannabis sative [hemp], Convolvulaceae such as the genera Ipomea, Convolvulus e.g. the species Ipomoea batatus, Ipomoea pandurata, Convolvulus batatas, Convolvulus tiliaceus, Ipomoea fastigiata, Ipomoea tiliacea, Ipomoea triloba or Convolvulus panduratus [sweet potato, Man of the Earth, wild potato], Chenopodiaceae such as the genera Beta, i.e. the species Beta vulgaris, Beta vulgaris var. altissima, Beta vulgaris var. Vulgaris, Beta maritima, Beta vulgaris var. perennis, Beta vulgaris var. conditiva or Beta vulgaris var. esculenta [sugar beet]; Cucurbitaceae such as the genera Cucubita e.g. the species Cucurbita maxima, Cucurbita mixta, Cucurbita pepo or Cucurbita moschata [pumpkin, squash]; Elaeagnaceae such as the genera Elaeagnus e.g. the species Olea europaea [olive]; Ericaceae such as the genera Kalmia e.g. the species Kalmia latifolia, Kalmia angustifolia, Kalmia microphylla, Kalmia polifolia, Kalmia occidentalis, Cistus chamaerhodendros or Kalmia lucida [American laurel, broad-leafed laurel, calico bush, spoon wood, sheep laurel, alpine laurel, bog laurel, western bog-laurel, swamp-laurel]; Euphorbiaceae such as the genera Manihot, Janipha, Jatropha, Ricinus e.g. the species Manihot utilissima, Janipha manihot, Jatropha manihot, Manihot aipil, Manihot dulcis, Manihot manihot, Manihot melanobasis, Manihot esculenta [manihot, arrowroot, tapioca, cassava] or Ricinus communis [castor bean, Castor Oil Bush, Castor Oil Plant, Palma Christi, Wonder Tree]; Fabaceae such as the genera Pisum, Albizia, Cathormion, Feuillea, Inga, Pithecolobium, Acacia, Mimosa, Medicajo, Glycine, Dolichos, Phaseolus, Soja e.g. the species Pisum sativum, Pisum arvense, Pisum humile [pea], Albizia berteriana, Albizia julibrissin, Albizia lebbeck, Acacia berteriana, Acacia littoralis, Albizia berteriana, Albizzia berteriana, Cathormion berteriana, Feuillea berteriana, Inga fragrans, Pithecellobium berterianum, Pithecellobium fragrans, Pithecolobium berterianum, Pseudalbizzia berteriana, Acacia julibrissin, Acacia nemu, Albizia nemu, Feuilleea julibrissin, Mimosa julibrissin, Mimosa speciosa, Sericanrda julibrissin, Acacia lebbeck, Acacia macrophylla, Albizia lebbek, Feuilleea lebbeck, Mimosa lebbeck, Mimosa speciosa [bastard logwood, silk tree, East Indian Walnut], Medicago sativa, Medicago falcata, Medicago varia [alfalfa], Glycine max [soybean], Dolichos soja, Glycine gracilis, Glycine hispida, Phaseolus max or Soja hispida; Geraniaceae such as the genera Pelargonium, Cocos, Oleum e.g. the species Cocos nucifera, Pelargonium grossularioides or Oleum cocois [coconut]; Gramineae such as the genera Saccharum e.g. the species Saccharum officinarum; Juglandaceae such as the genera Juglans, Wallia e.g. the species Juglans regia, Juglans ailanthifolia, Juglans sieboldiana, Juglans cinerea, Wallia cinerea, Juglans bixbyi, Juglans californica, Juglans hindsii, Juglans intermedia, Juglans jamaicensis, Juglans major, Juglans microcarpa, Juglans nigra or Wallia nigra [walnut, black walnut, common walnut, persian walnut, white walnut, butternut, black walnut]; Lauraceae such as the genera Persea, Laurus e.g. the species laurel Laurus nobilis [bay, laurel, bay laurel, sweet bay], Persea americana Persea americana, Persea gratissima or Persea persea [avocado]; Leguminosae such as the genera Arachis e.g. the species Arachis hypogaea [peanut]; Linaceae such as the genera Linum, Adenolinum e.g. the species Linum usitatissimum, Linum humile, Linum austriacum, Linum bienne, Linum angustifolium, Linum catharticum, Linum flavum, Linum grandiflorum, Adenolinum grandiflorum, Linum lewisii, Linum narbonense, Linum perenne, Linum perenne var. lewisii, Linum pratense or Linum trigynum [flax, linseed]; Lythrarieae such as the genera Punica e.g. the species Punica granatum [pomegranate]; Malvaceae such as the genera Gossypium e.g. the species Gossypium hirsutum, Gossypium arboreum, Gossypium barbadense, Gossypium herbaceum or Gossypium thurberi [cotton]; Musaceae such as the genera Musa e.g. the species Musa nana, Musa acuminata, Musa paradisiaca, Musa spp. [banana]; Onagraceae such as the genera Camissonia, Oenothera e.g. the species Oenothera biennis or Camissonia brevipes [primrose, evening primrose]; Palmae such as the genera Elacis e.g. the species Elaeis guineensis [oil plam]; Papaveraceae such as the genera Papaver e.g. the species Papaver orientale, Papaver rhoeas, Papaver dubium [poppy, oriental poppy, corn poppy, field poppy, shirley poppies, field poppy, long-headed poppy, long-pod poppy]; Pedaliaceae such as the genera Sesamum e.g. the species Sesamum indicum [sesame];

[47407] Piperaceae such as the genera Piper, Artanthe, Peperomia, Steffensia e.g. the species Piper aduncum, Piper amalago, Piper angustifolium, Piper auritum, Piper betel, Piper cubeba, Piper longum, Piper nigrum, Piper retrofractum, Artanthe adunca, Artanthe elongata, Peperomia elongata, Piper elongatum, Steffensia elongata. [Cayenne pepper, wild pepper]; Poaceae such as the genera Hordeum, Secale, Avena, Sorghum, Andropogon, Holcus, Panicum, Oryza, Zea, Triticum e.g. the species Hordeum vulgare, Hordeum jubatum, Hordeum murinum, Hordeum secalinum, Hordeum distichon Hordeum aegiceras, Hordeum hexastichon, Hordeum hexastichum, Hordeum irregulare, Hordeum sativum, Hordeum secalinum [barley, pearl barley, foxtail barley, wall barley, meadow barley], Secale cereale [rye], Avena sativa, Avena fatua, Avena byzantina, Avena fatua var. sativa, Avena hybrida [oat], Sorghum bicolor, Sorghum halepense, Sorghum saccharatum, Sorghum vulgare, Andropogon drummondii, Holcus bicolor, Holcus sorghum, Sorghum aethiopicum, Sorghum arundinaceum, Sorghum caffrorum, Sorghum cernuum, Sorghum dochna, Sorghum drummondii, Sorghum durra, Sorghum guineense, Sorghum lanceolatum, Sorghum nervosum, Sorghum saccharatum, Sorghum subglabrescens, Sorghum verticilliflorum, Sorghum vulgare, Holcus halepensis, Sorghum miliaceum millet, Panicum militaceum [Sorghum, millet], Oryza sativa, Oryza latifolia [rice], Zea mays [corn, maize] Triticum aestivum, Triticum durum, Triticum turgidum, Triticum hybernum, Triticum macha, Triticum sativum or Triticum vulgare [wheat, bread wheat, common wheat], Proteaceae such as the genera Macadamia e.g. the species Macadamia intergrifolia [macadamia]; Rubiaceae such as the genera Coffea e.g. the species Cofea spp., Coffea arabica, Coffea canephora or Coffea liberica [coffee]; Scrophulariaceae such as the genera Verbascum e.g. the species Verbascum blattaria, Verbascum chaixii, Verbascum densiflorum, Verbascum lagurus, Verbascum longifolium, Verbascum lychnitis, Verbascum nigrum, Verbascum olympicum, Verbascum phlomoides, Verbascum phoenicum, Verbascum pulverulentum or Verbascum thapsus [mullein, white moth mullein, nettle-leaved mullein, dense-flowered mullein, silver mullein, long-leaved mullein, white mullein, dark mullein, greek mullein, orange mullein, purple mullein, hoary mullein, great mullein]; Solanaceae such as the genera Capsicum, Nicotiana, Solanum, Lycopersicon e.g. the species Capsicum annuum, Capsicum annuum var. glabriusculum, Capsicum frutescens [pepper], Capsicum annuum [paprika], Nicotiana tabacum, Nicotiana alata, Nicotiana attenuata, Nicotiana glauca, Nicotiana langsdorffii, Nicotiana obtusifolia, Nicotiana quadrivalvis, Nicotiana repanda, Nicotiana rustica, Nicotiana sylvestris [tobacco], Solanum tuberosum [potato], Solanum melongena [egg-plant] (Lycopersicon esculentum, Lycopersicon lycopersicum, Lycopersicon pyriforme, Solanum integrifolium or Solanum lycopersicum [tomato]; Sterculiaceae such as the genera Theobroma e.g. the species Theobroma cacao [cacao]; Theaceae such as the genera Camellia e.g. the species Camellia sinensis) [tea].

[47408] Particular preferred plants are monocotyledonous or dicotyledonous plants selected from the group consisting of Asteraceae such as the genera Helianthus, Tagetes e.g. the species Helianthus annus [sunflower], Tagetes lucida, Tagetes erecta or Tagetes tenuifolia [Marigold]; Brassicaceae such as the genera Brassica, Arabadopsis e.g. the species Brassica napus, Brassica rapa ssp. [canola, oilseed rape, turnip rape] or Arabidopsis thaliana; Fabaceae such as the genera Glycine e.g. the species Glycine max [soybean] or Soja hispida; Linaceae such as the genera Linum e.g. the species Linum usitatissimum, [flax, linseed]; Poaceae such as the genera Hordeum, Secale, Avena, Sorghum, Oryza, Zea, Triticum e.g. the species Hordeum vulgare [barley], Secale cereale [rye], Avena sativa, Avena fatua, Avena byzantina, Avena fatua var. sativa, Avena hybrida [oat], Sorghum bicolor [Sorghum, millet], Oryza sativa, Oryza latifolia [rice], Zea mays [corn, maize], Triticum aestivum, Triticum durum, Triticum turgidum, Triticum hybernum, Triticum macha, Triticum sativum or Triticum vulgare [wheat, bread wheat, common wheat]; Solanaceae such as the genera Solanum, Lycopersicon e.g. the species Solanum tuberosum [potato], Lycopersicon esculentum, Lycopersicon lycopersicum, Lycopersicon pyriforme, Solanum integrifolium or Solanum lycopersicum [tomato]; Gramineae such as the genera Saccharum e.g. the species Saccharum officinarum or Helianthus annus [sunflower] or Chenopodiaceae such as the genera Beta, i.e. Beta vulgaris var. esculenta [sugar beet].

[47409] All above-mentioned organisms can be used as host organisms and/or can be used as donor organism.

[47410] The invention is not limited to specific nucleic acids, specific polypeptides, specific cell types, specific host cells, specific conditions or specific methods etc. as such, but may vary and numerous modifications and variations therein will be apparent to those skilled in the art. It is also to be understood that the terminology used herein is for the purpose of describing specific embodiments only and is not intended to be limiting.

[47411] In another embodiment, the invention relates to a (isolated) nucleic acid molecule, which comprises a nucleic acid molecule selected from the group consisting of:
[47412] (a) a nucleic acid molecule encoding a polypeptide shown in Table II, application no. 7, column 5 or 8, preferably shown in Table II B, application no. 7, column 8, or a homolog or a fragment thereof;
[47413] (b) a nucleic acid molecule shown in Table I, application no. 7, column 5 or 8, preferably shown in Table I B, application no. 7, column 8, preferably the coding region thereof, or a homolog or a fragment thereof;
[47414] (c) a nucleic acid molecule, which, as a result of the degeneracy of the genetic code, can be derived from a polypeptide sequence depicted in column 5 or 8 of Table II, application no. 7, preferably in column 8 of Table II B, application no. 7;
[47415] (d) a nucleic acid molecule having at least 30% identity, preferably at least 40%, 50%, 60%, 70%, 75%, 80%, 85%, 90%, 95%, 96%, 97%, 98%, 99%, 99,5%, with the nucleic acid molecule sequence of a polynucleotide comprising the nucleic acid molecule shown in column 5 or 8 of Table I, application no. 7, preferably shown in column 8 of Table I B, application no. 7, preferably the coding region thereof;
[47416] (e) a nucleic acid molecule encoding a polypeptide having at least 30% identity, preferably at least 40%, 50% 60%, 70%, 75%, 80%, 85%, 90%, 95%, 96%, 97%, 98%, 99%, 99,5%, identity with the amino acid sequence of the polypeptide encoded by the nucleic acid molecule of (a), (b), (c) or (d);
[47417] (f) a nucleic acid molecule which hybridizes with a nucleic acid molecule of (a), (b), (c), (d) or (e) under stringent hybridization conditions;
[47418] (g) a nucleic acid molecule encoding a polypeptide which can be isolated with the aid of monoclonal or polyclonal antibodies made against a polypeptide encoded by one of the nucleic acid molecules of (a), (b), (c), (d), (e) or (f);
[47419] (h) a nucleic acid molecule encoding a polypeptide comprising the consensus sequence or one or more polypeptide motifs as shown in column 8 of Table IV, application no. 7;
[47420] (i) a nucleic acid molecule encoding a polypeptide having the activity represented by a respective protein as depicted in column 5 of Table II, application no. 7;
[47421] (j) a nucleic acid molecule comprising a polynucleotide which is obtained by amplifying a cDNA library or a genomic library using the primers in Table III, application no. 7, column 8;
[47422] and
[47423] (k) nucleic acid molecule which is obtainable by screening a suitable nucleic acid library, especially a cDNA library and/or a genomic library, under stringent hybridization conditions with a probe comprising one of the sequences of the nucleic acid molecule of (a), (b), (c), (d), (e), (f), (g), (h), (i) or (j) or with a fragment of at least 15 nt, preferably 20 nt, 30 nt, 50 nt, 100 nt, 200 nt,500 nt, 1000 nt, 1500 nt, 2000 nt or 3000 nt of the nucleic acid molecule characterized in (a), (b), (c), (d), (e), (f), (g), (h), (i) or (j);
[47424] or a nucleic acid molecule comprising a sequence which is complementary thereto.
   (All the references to Tables I to IV are references to the corresponding lines of Tables I to IV.)

[47425] In a preferred embodiment thereof said nucleic acid molecule according to (a), (b), (c), (d), (e), (f), (g), (h), (i), (j) or (k) encodes a polypeptide which has the activity of the respective polypeptide represented by a protein comprising a polypeptide as depicted in the respective line in column 5 of Table II, application no. 7.

[47426] In another preferred embodiment thereof said nucleic acid molecule according to (a), (b), (c), (d), (e), (f), (g), (h), (i), (j) or (k) confers a generation or an increase of the respective fine chemical in a non-human organism or a part thereof as compared to a corresponding wild-type non-human organism or part thereof.

[47427] In another preferred embodiment thereof said nucleic acid molecule according to (a), (b), (c), (d), (e), (f), (g), (h), (i), (j) or (k) encodes a polypeptide which has the activity of the respective polypeptide represented by a protein as depicted in the respective line in column 5 of Table II application no. 7 and confers a generation or an increase of the respective fine chemical in a non-human organism or a part thereof as compared to a corresponding wild-type non-human organism or part thereof.

[47428] In another embodiment, the invention relates to a (isolated) nucleic acid molecule, which comprises a nucleic acid molecule selected from the group consisting of:
[47429] (a) a nucleic acid molecule encoding a polypeptide shown in Table II, column 5 or 8, application no. 7, preferably shown in Table II A, application no. 7, in column 5 or in Table II A, application no. 7, column 8 or in Table II B, application no. 7, column 8, or a homolog or a fragment thereof;
[47430] (b) a nucleic acid molecule shown in Table I, application no. 7, column 5 or 8, preferably shown in Table I A, application no. 7, in column 5 or in Table I A, application no. 7, column 8 or in Table I B, application no. 7, column 8, preferably the coding region thereof, or a homolog or a fragment thereof;
[47431] (c) a nucleic acid molecule, which, as a result of the degeneracy of the genetic code, can be derived from a polypeptide sequence depicted in column 5 or 8 of Table II, application no. 7, preferably shown in Table II A, application no. 7, in column 5 or in Table II A, application no. 7, column 8 or in Table II B, application no. 7, column 8;
[47432] (d) a nucleic acid molecule having at least 30% identity, preferably at least 40%, 50%, 60%, 70%, 75%, 80%, 85%, 90%, 95%, 96%, 97%, 98%, 99%, 99,5%, with the nucleic acid molecule sequence of a polynucleotide comprising the nucleic acid molecule shown in column 5 or 8 of Table I, application no. 7, preferably shown in Table I A, application no. 7, in column 5 or in Table I A, application no. 7, column 8 or in Table I B column 8, preferably the coding region thereof;
[47433] (e) a nucleic acid molecule encoding a polypeptide having at least 30% identity, preferably at least 40%, 50% 60%, 70%, 75%, 80%, 85%, 90%, 95%, 96%, 97%, 98%, 99%, 99,5%, identity with the amino acid sequence of the polypeptide encoded by the nucleic acid molecule of (a), (b), (c) or (d);
[47434] (f) a nucleic acid molecule which hybridizes with a nucleic acid molecule of (a), (b), (c), (d) or (e) under stringent hybridization conditions;
[47435] (g) a nucleic acid molecule encoding a polypeptide which can be isolated with the aid of monoclonal or polyclonal antibodies made against a polypeptide encoded by one of the nucleic acid molecules of (a), (b), (c), (d), (e) or (f);
[47436] (h) a nucleic acid molecule encoding a polypeptide comprising the consensus sequence or one or more polypeptide motifs as shown in column 8 of Table IV, application no. 7;
[47437] (i) a nucleic acid molecule encoding a polypeptide having the activity represented by a respective protein as depicted in column 5 of Table II, application no. 7;
[47438] (j) a nucleic acid molecule comprising a polynucleotide which is obtained by amplifying a cDNA library or a genomic library using the primers in Table III, application no. 7, column 8;
[47439] and
[47440] (k) nucleic acid molecule which is obtainable by screening a suitable nucleic acid library, especially a cDNA library and/or a genomic library, under stringent hybridization conditions with a probe comprising one of the sequences of the nucleic acid molecule of (a), (b), (c), (d), (e), (f), (g), (h), (i) or (j) or with a fragment thereof having at least 15 nt, preferably 20 nt, 30 nt, 50 nt, 100 nt, 200 nt,500 nt, 1000 nt, 1500 nt, 2000 nt or 3000 nt of the nucleic acid molecule complementary to a nucleic acid sequence characterized in (a), (b), (c), (d), (e), (f), (g), (h), (i) or (j);
[47441] or a nucleic acid molecule comprising a sequence which is complementary thereto;
   whereby, preferably, the nucleic acid molecule according to (a), (b), (c), (d), (e), (f), (g), (h), (i), (j) or (k) distinguishes over the sequence depicted in Table I A and/or I B, application no. 7, column 5 or 8, or the coding regions thereof, by one or more nucleotides (especially but not exceeding 5%, preferably 4%, 3%, 2%, 1%, 0.5%, 0.2% or 0.1%). In an embodiment, the nucleic acid molecule of the invention does not consist of the sequence shown in Table I A and/or I B, application no. 7, column 5 or 8, or the coding region thereof. In another embodiment, the nucleic acid molecule of the present invention, preferably the coding region thereof, is at least 30%, 40%, 50%, 60%, 70%, 80%, 90%, 95% identical but less than 100%, 99.999%, 99.99%, 99.9%, 99%, 98%, 97%, 96% or 95% identical to the sequence shown in Table I A and/or I B, application no. 7, column 5 or 8, or the coding region thereof, respectively. In a further embodiment the nucleic acid molecule does not encode the polypeptide sequence shown in Table II A and/or II B, application no. 7, column 5 or 8 but homologs thereof. Accordingly, in one embodiment, the nucleic acid molecule of the present invention encodes in one embodiment a polypeptide which differs at least in one or more amino acids (especially but not exceeding 5%, preferably 4%, 3%, 2%, 1%, 0.5%, 0.2% or 0.1%) from the polypeptide shown in Table II, application no. 7, column 5 or 8 and does not encode a protein of the sequence shown in Table II A and/or II B, application no. 7, column 5 or 8. Accordingly, in one embodiment, the protein encoded by a sequence of a nucleic acid according to (a), (b), (c), (d), (e), (f), (g), (h), (i), (j) or (k) does not consist of the sequence shown in Table I A and/or I B, application no. 7, column 5 or 8, or the coding region thereof. In a further embodiment, the protein of the present invention is at least 30%, 40%, 50%, 60%, 70%, 80%, 90%, 95% identical to protein sequence depicted in Table II A and/or II B, application no. 7, column 5 or 8 but less than 100%, preferably less than 99.999%, 99.99%, 99.9%, 99%, 98%, 97%, 96% or 95% identical to the sequence shown in Table II A and/or II B, application no. 7, column 5 or 8.
   (All the references to Tables I to IV are references to the corresponding lines of Tables I to IV.)

[47442] In a preferred embodiment thereof said nucleic acid molecule according to (a), (b), (c), (d), (e), (f), (g), (h), (i), (j) or (k) encodes a polypeptide which has the activity of the respective polypeptide represented by a protein comprising a polypeptide as depicted in the respective line in column 5 of Table II, application no. 7.

[47443] In another preferred embodiment thereof said nucleic acid molecule according to (a), (b), (c), (d), (e), (f), (g), (h), (i), (j) or (k) confers a generation or an increase of the respective fine chemical in a non-human organism or a part thereof as compared to a corresponding wild-type non-human organism or part thereof.

[47444] In another preferred embodiment thereof said nucleic acid molecule according to (a), (b), (c), (d), (e), (f), (g), (h), (i), (j) or (k) encodes a polypeptide which has the activity of the respective polypeptide represented by a protein as depicted in the respective line in column 5 of Table II, application no. 7, and confers a generation or an increase of the respective fine chemical in a non-human organism or a part thereof as compared to a corresponding wild-type non-human organism or part thereof.

[47445] In one embodiment the invention relates to the aforementioned nucleic acid molecules, which can be isolated advantageously from yeast, fungi, viruses, algae, bacteria, for example from Charophyceae such as the genera Chara, Nitella e.g. the species Chara globularis, Chara vulgaris, Nitella flexilis, Chlorophyceae such as the genera Acrosiphonia, Spongomorpha, Urospora, Bryopsis, Pseudobryopsis, Trichosolen, Dichotomosiphon, Caulerpa, Rhipilia, Blastophysa, Avrainvillea, Chlorodesmis, Codium, Espera, Halicystis, Halimeda, Penicillus, Pseudocodium, Rhipiliopsis, Rhipocephalus, Tydemania, Udotea, Derbesia, Acrochaete, Aphanochaete, Bolbocoleon, Chaetobolus, Chaetonema, Chaetophora, Chlorotylium, Desmococcus, Draparnaldia, Draparnaldiopsis, Ectochaete, Endophyton, Entocladia, Epicladia, Internoretia, Microthamnion, Ochlochaete, Phaeophila, Pilinella, Pringsheimiella, Protoderma, Pseudendoclonium, Pseudodictyon, Pseudopringsheimia, Pseudulvella, Schizomeris, Stigeoclonium, Thamniochaete, Ulvella, Pilinia, Tellamia, Helicodictyon, Actidesmium, Ankyra, Characium, Codiolum, Sykidion, Keratococcus, Prototheca, Bracteacoccus Chlorococcum, Excentrosphaera, Hormidium, Oophila, Schroederia, Tetraedron, Trebouxia Chlorosarcinopsis, Gomphonitzschia, Coccomyxa, Dactylothece, DiÓgenes, Disporá, Gloeocystis, Mycanthococcus, Ourococcus, Coelastrum, Dicranochaete, Botryococcus, Dictyosphaerium, Dimorphococcus, Chlorochytrium, Kentrosphaera, Phyllobium, Gomontia, Hormotila, Euastropsis, Hydrodictyon, Pectodictyon, Pediastrum, Sorastrum, Tetrapedia, Acanthosphaera, Echinosphaerella, Echinosphaeridium, Errerella, Gloeoactinium, Golenkeniopsis Golenkinia, Micractinium, Ankistrodesmus, Chlorella, Chodatella, Closteriopsis, Cryocystis, Dactylococcus, Dematractum, Eremosphaera, Eutetramorus, Franceia, Glaucocystis, Gloeotaenium, Kirchneriella, Lagerheimiella, Monoraphidium, Nannochloris, Nephrochlamys, Nephrocytium, Oocystis, Oonephris, Pachycladon, Palmellococcus, Planktosphaeria, Polyedriopsis, Pseudoraciborskia, Quadrigula, Radiococcus, Rochiscia, Scotiella, Selanastrum, Thorakochloris, Treubaria, Trochiscia, Westella, Zoochlorella, Ostreobium, Phyllosiphon, Protosiphon, Rhodochytrium, Actinastrum, Coronastrum, Crucigenia, Dictymocystis, Enallax, Scenedesmus, Selenastrum, Tetradesmus, Tetrallantos, Tetrastrum, Chlorosarcina, Anadyomene, Valoniopsis, Ventricaria, Basicladia,

[47446] Chaetomorpha, Cladophora, LolaPithophoraRhizoclonium Chaetosphaeridium, Conochaete, Coleochaete, Oligochaetophora, Polychaetophora, Cylindrocapsa, Gongrosira, Protococcus, Acetabularia, Batophora, Bornetella, Dasycladus, Halicoryne, Neomeris, Elakatothrix, Raphidonema, Microspora, Bulbochaete, Oedocladium, Oedogonium, Prasiola, Rosenvingiella, Schizogonium, Apjohnia, Chamaedoris, Cladophoropsis, Siphonocladus, Spongocladia, Boergesenia, Boodlea, Cystodictyon, Dictyosphaeria, Ernodesmis, Microdictyon, Struvea, Valonia, Sphaeroplea, Malleochloris, Stylosphaeridium, Gloeococcus, Palmella, Palmodictyon, Palmophyllum, Pseudospherocystis, Sphaerocystis, Urococcus, Apiocystis, Chaetopeltis, Gemellicystis, Paulschulzia, Phacomyxa, Pseudotetraspora, Schizochlamys, Tetraspora, Cephaleuros, Ctenocladus, Epibolium, Leptosira, Trentepohlia, Diplochaete, Monostroma, Binuclearia, Geminella, Klebsormidium, Planetonema, Radiofilum, Stichococcus, Ulothrix, Uronema, Blidingia, Capsosiphon, Chloropelta, Enteromorpha, Percursaria, Ulva, Ulvaria, Brachiomonas, Carteria, Chlainomonas, Chlamydomonas, Chlamydonephris, Chlorangium, Chlorogonium, Cyanidium, Fortiella, Glenomonas, Gloeomonas, Hyalogonium, Lobomonas Polytoma, Pyramichlamys, Scourfieldia, Smithsonimonas, Sphaerellopsis, Sphenochloris, Spirogonium, Collodictyon, Dunaliella, Haematococcus, Stephanosphaera, Coccomonas, Dysmorphococcus, Phacotus, Pteromonas, Thoracomonas, Wislouchiella, Mascherina, Pyrobotrys, Spondylomorum, Eudorina, Gonium, Oltmannsiella, Pandorina, Platydorina, Pleodorina, Stephanoon, Volvox, Volvulina, Actinotaenium, Arthrodesmus, Bambusina Closterium, Cosmarium, Desmidium, Euastrum, Groenbladia, Hyalotheca, Micrasterias, Penium, Phymatodocis, Pleurotaenium, Sphaerozosma, Spinoclosterium, Spinocosmarium, Spondylosium, Staurastrum, Tetmemorus, Triploceras, Xanthidium, Cylindrocystis, Genicularia, Gonatozygon, Mesotaenium, Netrium, Roya, Spirotaenia, Cosmocladium, Debarya, Docidium, Euastridium, Hallasia, Mougeotia, Mougeotiopsis, Sirogonium, Spirogyra, Staurodesmus, Teilingia, Zygnema, Zygogonium, e.g. the species Caulerpa taxifolia, Prototheca wickerhamii, Ankistrodesmus falcatus, Chlorella ellipsoidea, Chlorella pyrenoidosa, Clorella sorokiniana, Chlorella vulgaris, Scenedesmus obliquus, Scenedesmus quadricauda, Selenastrum capricornutum, Selenastrum undecimnotata, Cladophora glomerata, Chlamydomonas eugametos, Chlamydomonas reinhardtii, Cyanidium caldarium, Dunaliella salina, Dunaliella tertiolecta, Euglena gracilis, Haematococcus pluvialis, Coniugatophyceae, Prasinophyceae Trebouxiophyceae, Ulvophyceae, Chlorodendraceae, Pedinomonadales, Halosphaeraceae, Pterospermataceae, Monomastigaceae, Pyramimonadaceae, Chlorodendraceae such as the genera Prasinocladus e.g. the species Prasinocladus ascus, Halosphaeraceae, Pedinomonadales, Pedinomonadaceae such as the genera Pedinomonas, Pterospermataceae such as the genera Pachysphaera, Pterosperma, Halosphaera, Pyramimonas, Bacillariophyceae, Chrysophyceae, Craspedophyceae, Euglenophyceae, Prymnesiophyceae, Phaeophyceae, Dinophyceae, Rhodophyceae, Xanthophyceae, Prasinophyceae such as the genera Nephroselmis, Prasinococcus, Scherffelia, Tetraselmis, Mantoniella, Ostreococcus e.g. the species Nephroselmis olivacea, Prasinococcus capsulatus, Scherffelia dubia, Tetraselmis chui, Tetraselmis suecica, Mantoniella squamata, Ostreococcus tauri, especially such as Acetobacter (subgen. Acetobacter) aceti; Acidithiobacillus ferrooxidans; Acinetobacter sp.; Actinobacillus sp; Aeromonas salmonicida; Agrobacterium tumefaciens; Aquifex aeolicus; Arcanobacterium pyogenes; Aster yellows phytoplasma; Bacillus sp.; Bifidobacterium sp.; Borrelia burgdorferi; Brevibacterium linens; Brucella melitensis; Buchnera sp.; Butyrivibrio fibrisolvens; Campylobacter jejuni; Caulobacter crescentus; Chlamydia sp.; Chlamydophila sp.; Chlorobium limicola; Citrobacter rodentium; Clostridium sp.; Comamonas testosteroni; Corynebacterium sp.; Coxiella burnetii; Deinococcus radiodurans; Dichelobacter nodosus; Edwardsiella ictaluri; Enterobacter sp.; Erysipelothrix rhusiopathiae; E. coli; Flavobacterium sp.; Francisella tularensis; Frankia sp. Cpl1; Fusobacterium nucleatum; Geobacillus stearothermophilus; Gluconobacter oxydans; Haemophilus sp.; Helicobacter pylori; Klebsiella pneumoniae; Lactobacillus sp.; Lactococcus lactis; Listeria sp.; Mannheimia haemolytica; Mesorhizobium loti; Methylophaga thalassica; Microcystis aeruginosa; Microscilla sp. PRE1; Moraxella sp. TA144; Mycobacterium sp.; Mycoplasma sp.; Neisseria sp.; Nitrosomonas sp.; Nostoc sp. PCC 7120; Novosphingobium aromaticivorans; Oenococcus oeni; Pantoea citrea; Pasteurella multocida; Pediococcus pentosaceus; Phormidium foveolarum; Phytoplasma sp.; Plectonema boryanum; Prevotella ruminicola; Propionibacterium sp.; Proteus vulgaris; Pseudomonas sp.; Ralstonia sp.; Rhizobium sp.; Rhodococcus equi; Rhodothermus marinus; Rickettsia sp.; Riemerella anatipestifer; Ruminococcus flavefaciens; Salmonella sp.; Selenomonas ruminantium; Serratia entomophila; Shigella sp.; Sinorhizobium meliloti; Staphylococcus sp.; Streptococcus sp.; Streptomyces sp.; Synechococcus sp.; Synechocystis sp. PCC 6803; Thermotoga maritima; Treponema sp.; Ureaplasma urealyticum; Vibrio cholerae; Vibrio parahaemolyticus; Xylella fastidiosa; Yersinia sp.; Zymomonas mobilis, preferably Salmonella sp. or E. coli, preferably from yeasts such as from the genera Saccharomyces, Pichia, Candida, Hansenula, Torulopsis or Schizosaccharomyces, or from plants, such as monocotyledonous or dicotyledonous plants, preferably selected from the group consisting of Anacardiaceae such as the genera Pistacia, Mangifera, Anacardium e.g. the species Pistacia vera [pistachios, Pistazie], Mangifer indica [Mango] or Anacardium occidentale [Cashew]; Asteraceae such as the genera Calendula, Carthamus, Centaurea, Cichorium, Cynara, Helianthus, Lactuca, Locusta, Tagetes, Valeriana e.g. the species Calendula officinalis [Marigold], Carthamus tinctorius [safflower], Centaurea cyanus [cornflower], Cichorium intybus [blue daisy], Cynara scolymus [Artichoke], Helianthus annus [sunflower], Lactuca sativa, Lactuca crispa, Lactuca esculenta, Lactuca scariola L. ssp. sativa, Lactuca scariola L. var. integrata, Lactuca scariola L. var. integrifolia, Lactuca sativa subsp. romana, Locusta communis, Valeriana locusta [lettuce], Tagetes lucida, Tagetes erecta or Tagetes tenuifolia [Marigold]; Apiaceae such as the genera Daucus e.g. the species Daucus carota [carrot]; Betulaceae such as the genera Corylus e.g. the species Corylus avellana or Corylus colurna [hazelnut]; Boraginaceae such as the genera Borago e.g. the species Borago officinalis [borage]; Brassicaceae such as the genera Brassica, Melanosinapis, Sinapis, Arabadopsis e.g. the species Brassica napus, Brassica rapa ssp. [canola, oilseed rape, turnip rape], Sinapis arvensis Brassica juncea, Brassica juncea var. juncea, Brassica juncea var. crispifolia, Brassica juncea var. foliosa, Brassica nigra, Brassica sinapioides, Melanosinapis communis [mustard], Brassica oleracea [fodder beet] or Arabidopsis thaliana; Bromeliaceae such as the genera Anana, Bromelia e.g. the species Anana comosus, Ananas ananas or Bromelia comosa [pineapple]; Caricaceae such as the genera Carica e.g. the species Carica papaya [papaya]; Cannabaceae such as the genera Cannabis e.g. the species Cannabis sative [hemp], Convolvulaceae such as the genera Ipomea, Convolvulus e.g. the species Ipomoea batatus, Ipomoea pandurata, Convolvulus batatas, Convolvulus tiliaceus, Ipomoea fastigiata, Ipomoea tiliacea, Ipomoea triloba or Convolvulus panduratus [sweet potato, Man of the Earth, wild potato], Chenopodiaceae such as the genera Beta, i.e. the species Beta vulgaris, Beta vulgaris var. altissima, Beta vulgaris var. Vulgaris, Beta maritima, Beta vulgaris var. perennis, Beta vulgaris var. conditiva or Beta vulgaris var. esculenta [sugar beet]; Cucurbitaceae such as the genera Cucubita e.g. the species Cucurbita maxima, Cucurbita mixta, Cucurbita pepo or Cucurbita moschata [pumpkin, squash]; Elaeagnaceae such as the genera Elaeagnus e.g. the species Olea europaea [olive]; Ericaceae such as the genera Kalmia e.g. the species Kalmia latifolia, Kalmia angustifolia, Kalmia microphylla, Kalmia polifolia, Kalmia occidentalis, Cistus chamaerhodendros or Kalmia lucida [American laurel, broad-leafed laurel, calico bush, spoon wood, sheep laurel, alpine laurel, bog laurel, western bog-laurel, swamp-laurel]; Euphorbiaceae such as the genera Manihot, Janipha, Jatropha, Ricinus e.g. the species Manihot utilissima, Janipha manihot, Jatropha manihot, Manihot aipil, Manihot dulcis, Manihot manihot, Manihot melanobasis, Manihot esculenta [manihot, arrowroot, tapioca, cassava] or Ricinus communis [castor bean, Castor Oil Bush, Castor Oil Plant, Palma Christi, Wonder Tree]; Fabaceae such as the genera Pisum, Albizia, Cathormion, Feuillea, Inga, Pithecolobium, Acacia, Mimosa, Medicajo, Glycine, Dolichos, Phaseolus, Soja e.g. the species Pisum sativum, Pisum arvense, Pisum humile [pea], Albizia berteriana, Albizia julibrissin, Albizia lebbeck, Acacia berteriana, Acacia littoralis, Albizia berteriana, Albizzia berteriana, Cathormion berteriana, Feuillea berteriana, Inga fragrans, Pithecellobium berterianum, Pithecellobium fragrans, Pithecolobium berterianum, Pseudalbizzia berteriana, Acacia julibrissin, Acacia nemu, Albizia nemu, Feuilleea julibrissin, Mimosa julibrissin, Mimosa speciosa, Sericanrda julibrissin, Acacia lebbeck, Acacia macrophylla, Albizia lebbek, Feuilleea lebbeck, Mimosa lebbeck, Mimosa speciosa [bastard logwood, silk tree, East Indian Walnut], Medicago sativa, Medicago falcata, Medicago varia [alfalfa], Glycine max [soybean], Dolichos soja, Glycine gracilis, Glycine hispida, Phaseolus max or Soja hispida; Geraniaceae such as the genera Pelargonium, Cocos, Oleum e.g. the species Cocos nucifera, Pelargonium grossularioides or Oleum cocois [coconut]; Gramineae such as the genera Saccharum e.g. the species Saccharum officinarum; Juglandaceae such as the genera Juglans, Wallia e.g. the species Juglans regia, Juglans ailanthifolia, Juglans sieboldiana, Juglans cinerea, Wallia cinerea, Juglans bixbyi, Juglans californica, Juglans hindsii, Juglans intermedia, Juglans jamaicensis, Juglans major, Juglans microcarpa, Juglans nigra or Wallia nigra [walnut, black walnut, common walnut, persian walnut, white walnut, butternut, black walnut]; Lauraceae such as the genera Persea, Laurus e.g. the species laurel Laurus nobilis [bay, laurel, bay laurel, sweet bay], Persea americana Persea americana, Persea gratissima or Persea persea [avocado]; Leguminosae such as the genera Arachis e.g. the species Arachis hypogaea [peanut]; Linaceae such as the genera Linum, Adenolinum e.g. the species Linum usitatissimum, Linum humile, Linum austriacum, Linum bienne, Linum angustifolium, Linum catharticum, Linum flavum, Linum grandiflorum, Adenolinum grandiflorum, Linum lewisii, Linum narbonense, Linum perenne, Linum perenne var. lewisii, Linum pratense or Linum trigynum [flax, linseed]; Lythrarieae such as the genera Punica e.g. the species Punica granatum [pomegranate]; Malvaceae such as the genera Gossypium e.g. the species Gossypium hirsutum, Gossypium arboreum, Gossypium barbadense, Gossypium herbaceum or Gossypium thurberi [cotton]; Musaceae such as the genera Musa e.g. the species Musa nana, Musa acuminate, Musa paradisiaca, Musa spp. [banana]; Onagraceae such as the genera Camissonia, Oenothera e.g. the species Oenothera biennis or Camissonia brevipes [primrose, evening primrose]; Palmae such as the genera Elacis e.g. the species Elaeis guineensis [oil plam]; Papaveraceae such as the genera Papaver e.g. the species Papaver orientale, Papaver rhoeas, Papaver dubium [poppy, oriental poppy, corn poppy, field poppy, shirley poppies, field poppy, longheaded poppy, long-pod poppy]; Pedaliaceae such as the genera Sesamum e.g. the species Sesamum indicum [sesame]; Piperaceae such as the genera Piper, Artanthe, Peperomia, Steffensia e.g. the species Piper aduncum, Piper amalago, Piper angustifolium, Piper auritum, Piper betel, Piper cubeba, Piper longum, Piper nigrum, Piper retrofractum, Artanthe adunca, Artanthe elongata, Peperomia elongata, Piper elongatum, Steffensia elongata. [Cayenne pepper, wild pepper]; Poaceae such as the genera Hordeum, Secale, Avena, Sorghum, Andropogon, Holcus, Panicum, Oryza, Zea, Triticum e.g. the species Hordeum vulgare, Hordeum jubaturn, Hordeum murinum, Hordeum secalinum, Hordeum distichon Hordeum aegiceras, Hordeum hexastichon, Hordeum hexastichum, Hordeum irregulare, Hordeum sativum, Hordeum secalinum [barley, pearl barley, foxtail barley, wall barley, meadow barley], Secale cereale [rye], Avena sativa, Avena fatua, Avena byzantina, Avena fatua var. sativa, Avena hybrida [oat], Sorghum bicolor, Sorghum halepense, Sorghum saccharatum, Sorghum vulgare, Andropogon drummondii, Holcus bicolor, Holcus sorghum, Sorghum aethiopicum, Sorghum arundinaceum, Sorghum caffrorum, Sorghum cernuum, Sorghum dochna, Sorghum drummondii, Sorghum durra, Sorghum guineense, Sorghum lanceolatum, Sorghum nervosum, Sorghum saccharatum, Sorghum subglabrescens, Sorghum verticilliflorum, Sorghum vulgare, Holcus halepensis, Sorghum miliaceum millet, Panicum militaceum [Sorghum, millet], Oryza sativa, Oryza latifolia [rice], Zea mays [corn, maize] Triticum aestivum, Triticum durum, Triticum turgidum, Triticum hybernum, Triticum macha, Triticum sativum or Triticum vulgare [wheat, bread wheat, common wheat], Proteaceae such as the genera Macadamia e.g. the species Macadamia intergrifolia [macadamia]; Rubiaceae such as the genera Coffea e.g. the species Cofea spp., Coffea arabica, Coffea canephora or Coffea liberica [coffee]; Scrophulariaceae such as the genera Verbascum e.g. the species Verbascum blattaria, Verbascum chaixii, Verbascum densiflorum, Verbascum lagurus, Verbascum longifolium, Verbascum lychnitis, Verbascum nigrum, Verbascum olympicum, Verbascum phlomoides, Verbascum phoenicum, Verbascum pulverulentum or Verbascum thapsus [mullein, white moth mullein, nettle-leaved mullein, dense-flowered mullein, silver mullein, long-leaved mullein, white mullein, dark mullein, greek mullein, orange mullein, purple mullein, hoary mullein, great mullein]; Solanaceae such as the genera Capsicum, Nicotiana, Solanum, Lycopersicon e.g. the species Capsicum annuum, Capsicum annuum var. glabriusculum, Capsicum frutescens [pepper], Capsicum annuum [paprika], Nicotiana tabacum, Nicotiana alata, Nicotiana attenuata, Nicotiana glauca, Nicotiana langsdorffii, Nicotiana obtusifolia, Nicotiana quadrivalvis, Nicotiana repanda, Nicotiana rustica, Nicotiana sylvestris [tobacco], Solanum tuberosum [potato], Solanum melongena [egg-plant] (Lycopersicon esculentum, Lycopersicon lycopersicum, Lycopersicon pyriforme, Solanum integrifolium or Solanum lycopersicum [tomato]; Sterculiaceae such as the genera Theobroma e.g. the species Theobroma cacao [cacao]; Theaceae such as the genera Camellia e.g. the species Camellia sinensis) [tea]; especially A. thaliana, maize, wheat, rye, oat, triticale, rice, barley, soybean, peanut, cotton, borage, sunflower, sugar cane, sugar beet, linseed, primrose, rapeseed, canola and turnip rape, manihot, pepper, sunflower, tagetes, solanaceous plant such as potato, tobacco, eggplant and tomato, Vicia species, pea, alfalfa, bushy plants such as coffee, cacao, tea, Salix species, trees such as oil palm, coconut, perennial grass, such as ryegrass and fescue, and forage crops, such as alfalfa and clover and from spruce, pine or fir for example.

[47447] More preferably said nucleic acid molecules can be isolated from S. cerevisiae, E. coli, Azotobacter vinelandii, Thermus thermophilus or i Synechocystis sp. or plants, preferably Arabidopsis thaliana, Brassica napus, Glycine max, Zea mays, Gossypium or Oryza sativa.

[47448] The FCRPs of the present invention are preferably produced by recombinant DNA techniques. For example, a nucleic acid molecule encoding the protein is cloned into an expression vector, for example into a binary vector, the expression vector is introduced into a host cell, for example into cells of the Arabidopsis thaliana wild type NASC N906 or any other plant cell as described above and/or below and/or in the examples, and the FCRP is expressed in said host cell.

[47449] In an embodiment of the present invention, the respective FCRP is localized after expression as indicated in column 6 of Table II, e.g. non-targeted, mitochondric or plastidic.

[47450] In an embodiment of the present invention the FCRP is preferably produced in an compartment of the cell, e.g. in an organelle, for example in plastids or mitochondria. Ways of introducing nucleic acids into organelles, for example into plastids or mitochondria, and producing proteins in this compartment are known to the person skilled in the art.

[47451] The respective nucleic acid sequence according to the invention mentioned above is advantageously functionally joined to a nucleic acid sequence encoding a transit peptide, in such a manner that a preprotein is translated, which is able to direct the polypeptide to the organelle such as to plastids or mitochondria. In another preferred embodiment the nucleic acids according to the invention mentioned above is advantageously functionally joined to a promoter region functional in plastids or mitochondria like for example the RNA operon promoter fused to the 5s UTR of the rbcL gene and in another preferred embodiment joined to a plastome sequences homologous to the integration sites. Example for useful integration sites are the trnV-rps12/7 (Skidar et al., Plant Cell Rep. 18, 20 (1998), and other reports), thr rbvL-aacD site (Svab et al., Proc. Natl. Acad. Sci. USA 90, 913 (1993)), the trnl-trnA site (De Cosa et al., Nat. Biotech. 19, 71 (2001)), the rps7-ndhB site (Hou et al., Transgenic Res. 12, 111 (2003)) and the ndhF-trnL site Zhang et al., Plant Physiol. 127, 131 (2001c)).

[47452] The nucleic acid sequence coding for the transit peptide is advantageously derived from a nucleic acid sequence encoding a protein finally resided in the plastids or mitochondria and is stemming from an organism selected from the group consisting of the genera Acetabularia, Arabidopsis, Brassica, Capsicum, Chlamydomonas, Cucurbita, Daucus, Dunaliella, Euglena, Flaveria, Glycine, Helianthus, Hordeum, Lactua, Lemna, Lolium, Lycopersion, Malus, Meticago, Mesembryanthemum, Nicotiana, Oenotherea, Oryza, PetOnia, Phaseolus, Physcomitrella, Pinus, Pisum, Pyrus, Raphanus, Saccharum, Silene, Sinapis, Solanum, Spinacea, Stevia, Synechococcus,Triticum and Zea.

[47453] Preferably the plastidal transit peptide is derived from the nucleic acid sequence encoding a protein selected from the group consisting of ribulose bisphosphate carboxylase/oxygenase, 5-enolpyruvyl-shikimate-3-phosphate synthase, acetolactate synthase, chloroplast ribosomal protein CS17, Cs protein, ferredoxin, plastocyanin, ribulose bisphosphate carboxylase activase, tryptophan synthase, acyl carrier protein, plastid chaperonin-60, cytochrome c552, 22-kDA heat shock protein, 33-kDa Oxygen-evolving enhancer protein 1, ATP synthase γ subunit, ATP synthase δ subunit, chlorophyll-a/b-binding proteinII-1, Oxygen-evolving enhancer protein 2, Oxygen-evolving enhancer protein 3, photosystem I: P21, photosystem I: P28, photosystem I: P30, photosystem I: P35, photosystem I: P37, glycerol-3-phosphate acyltransferases, chlorophyll a/b binding protein, CAB2 protein, hydroxymethyl-bilane synthase, pyruvate-orthophosphate dikinase, CAB3 protein, plastid ferritin, ferritin, early light-inducible protein, glutamate-1-semialdehyde aminotransferase, protochlorophyllide reductase, starch-granule-bound amylase synthase, light-harvesting chlorophyll a/b-binding protein of photosystem II, major pollen allergen Lol p 5a, plastid CIpB ATP-dependent protease, superoxide dismutase, ferredoxin NADP oxidoreductase, 28-kDa ribonucleoprotein, 31-kDa ribonucleoprotein, 33-kDa ribonucleoprotein, acetolactate synthase, ATP synthase CFO subunit 1, ATP synthase CFO subunit 2, ATP synthase CFO subunit 3, ATP synthase CFO subunit 4, cytochrome f, ADP-glucose pyrophosphorylase, glutamine synthase, glutamine synthase 2, carbonic anhydrase, GapA protein, heatshock-protein hsp21, phosphate translocator, plastid CIpA ATP-dependent protease, plastid ribosomal protein CL24, plastid ribosomal protein CL9, plastid ribosomal protein PsCL18, plastid ribosomal protein PsCL25, DAHP synthase, starch phosphorylase, root acyl carrier protein II, betaine-aldehyde dehydrogenase, GapB protein, glutamine synthetase 2, phosphoribulokinase, nitrite reductase, ribosomal protein L12, ribosomal protein L13, ribosomal protein L21, ribosomal protein L35, ribosomal protein L40, triose phosphate-3-phosphoglyerate-phosphate translocator, ferredoxin-dependent glutamate synthase, glyceraldehyde-3-phosphate dehydrogenase, NADP-dependent malic enzyme and NADP-malate dehydrogenase.

[47454] In an embodiment the plastome sequences are preferential derived from the plastome of the target organisms themselves and are advantegously derived from one of the following intergration sites: trnV-rps12/7 (Skidar et al., Plant Cell Rep. 18, 20 (1998) and other reports), rbvLaacD (Svab et al., Proc. Natl. Acad. Sci. USA 90, 913 (1993)), trnl-trnA (De Cosa et al., Nat. Biotech. 19, 71 (2001)), rps7-ndhB (Hou et al., Transgenic Res. 12, 111 (2003)) or ndhF-trnL site Zhang et al., Plant Physiol. 127, 131 (2001c)).

[47455] Advantageously the mitochondrial transit peptide is derived from the nucleic acid sequence encoding a protein selected from the group consisting of 22 kDA heat shock protein; 70 kDA heat shock protein; 83 kDA heat shock protein; 40S ribosomal protein S19; 50S ribosomal protein L15; ribosomal protein L29; 22 kDA PSST protein of complex I; 2-oxoacid dehydrogenase family protein; 2-oxoglutarate/malate translocator; 3methyl-2-oxobutanoate hydroxymethyltransferase; 3-Methylcrotonyl-coenzyme A carboxylase (MCCase); 7,8 -Dihydropteroate synthase (DHPS)/6-hydroxymethyl-7,8-dihydropterine pyrophosphokinase (HPPK); aconitate hydratase; acyl carrier protein (ACP); ADP/ATP translocase; alanyl-tRNA synthetase; alcohol dehydrogenase (ADH); alternative oxidase (AOX); aminoacyl-tRNA ligase; asparate aminotransferase; ATP synthase alpha subunit; ATP synthase beta subunit; ATP synthase delta subunit; ATP synthase epsilon subunit; ATP synthase gamma subunit; ATP-dependent Clp protease-proteolytic subunit; Chaperonin 60 - CPN60; Chaperonin 60 (2) CPN 60-2; Chaperonin 60(1)-CPN60-1; citrate synthase; cytochrome b-c1 complex subunit Rieske FeS Protein; cytochrome c reductase-processing peptidase subunit II; dihydrolipoamide S-acetyltransferase; farnesyl-diphosphate synthase 1; formate dehydrogenase; fumarate hydratase; gamma carbonic anhydrase protein (gammaCA); gamma carbonic anhydrase-like protein 1 (gammaCAL1); gamma carbonic anhydrase-like protein 2 (gammaCAL2); gamma-aminobutyric acid transaminase (GABA-T); glutathione reductase (GR); glycine decarboxylase subunit H; glycine decarboxylase subunit L; glycine decarboxylase subunit P; glycine decarboxylase subunit T; isovaleryl-CoA dehydrogenase (IVD); lipoamide dehydrogenase; malate oxidoreductase; manganese superoxide dismutase (Mn)SOD; methylmalonate-semialdehyde dehydrogenase; mitochondrial-processing peptidase beta subunit (MPP); mitochondrial processing peptidase subunit alpha (MPP); monodehydroascorbate reductase (MDHAR); NAD dependent isocitrate dehydrogenase; NAD dependent malate dehydrogenase; NAD-dependent malic enzyme; NAD-dependent malic enzyme 59 kDa isoform; NAD-dependent malic enzyme 62 kDa isoform; NAD-dependent malic enzyme 65 kDa isoform; NADH ubiquinone oxidoreductase 29 kDa subunit; NADH-ubiquinone oxidoreductase 18 kDa subunit; NADH-ubiquinone oxidoreductase 20 kDa subunit; NADH-ubiquinone oxidoreductase 23 kDa subunit; NADHubiquinone oxidoreductase 75 kDa subunit; NADP dependent isocitrate dehydrogenase; NADP dependent malate dehydrogenase; nucleoside diphosphate kinase; nucleoside diphosphate kinase III; o-acetylserine (thiol) lyase (OAS-TL); propionyl-CoA carboxylase; protoporphyrinogen IX oxidase; pyruvate dehydrogenase E1 component subunit alpha; serine acetyltransferase (SAT); serine hydroxymethyltransferase; succinate dehydrogenase (SDH); succinic semialdehyde dehydrogenase (SSADH); succinyl-CoA ligase (GDP-forming) alpha-chain; succinyl-CoA ligase [GDP-forming] subunit beta; thiosulfate sulfurtransferase; threonyl-tRNA synthetase; trans-2-enoyl-CoA reductase; translocase inner membrane (TIM); translocase outer membrane (TOM); tRNA synthetase class I and ubiquinol cytochrome C oxidoreductase complex.

[47456] Further transit peptides and details thereto have been described above.

[47457] In another embodiment of the present invention the FCRP is produced without further targeting signal (e.g. as mentioned herein), e.g. in the cytoplasm of the cell. Ways of producing proteins without artificial targeting are known to the person skilled in the art.

[47458] The nucleic acid sequences used in the process are advantageously introduced in a nucleic acid construct, preferably an expression cassette, which makes possible the expression of the nucleic acid molecules in a non-human organism, advantageously a plant or a microorganism such as an algae, advantageously non-targeted or in an organelle, like plastids or mitochondria , respectively, of those non-human organisms.

[47459] Accordingly, the invention also relates to a nucleic acid construct, preferably to an expression construct, comprising the nucleic acid molecule of the present invention functionally linked to one or more regulatory elements or signals.

[47460] As described herein, the nucleic acid construct can also comprise further genes, which are to be introduced into the non-human organisms or cells. It is possible and advantageous to introduce into, and express in, the host organisms regulatory genes such as genes for inductors, repressors or enzymes, which, owing to their enzymatic activity, engage in the regulation of one or more genes of the respective biosynthetic pathway. These genes can be of heterologous or homologous origin. Moreover, further biosynthesis genes may advantageously be present, or else these genes may be located on one or more further nucleic acid constructs. Genes, which are advantageously employed as further biosynthesis genes are genes of the fatty acid metabolism, amino acid metabolism, of glycolysis, of the tricarboxylic acid metabolism or their combinations. As described herein, regulator sequences or factors can have a positive effect on preferably the gene expression of the genes introduced, thus increasing it. Thus, an enhancement of the regulator elements may advantageously take place at the transcriptional level by using strong transcription signals such as promoters and/or enhancers. In addition, however, an enhancement of translation is also possible, for example by increasing mRNA stability or by inserting a translation enhancer sequence.

[47461] In principle, the nucleic acid construct can comprise the herein described regulator sequences and further sequences relevant for the expression of the comprised genes. Thus, the nucleic acid construct of the invention can be used as expression cassette and thus can be used directly for introduction into the plant, or else they may be introduced into a vector. Accordingly in one embodiment the nucleic acid construct is an expression cassette comprising a microorganism promoter or a microorganism terminator or both, beneath the nucleic acid molecule according to the invention. In another embodiment the expression cassette encompasses a plant promoter or a plant terminator or both, beneath the nucleic acid molecule according to the invention. In another embodiment the expression cassette encompasses sequences for transcription by organelle RNA polymerases, beneath the nucleic acid molecule according to the invention. In another embodiment an expression cassette encompasses a nucleic acid molecule encoding for a transit peptide, beneath the gene according to the invention.

[47462] In a preferred embodiment a nucleic acid construct, for example an expression cassette, comprises upstream, i.e. at the 5′ end of the encoding sequence, a promoter and downstream, i.e. at the 3′ end, a polyadenylation signal and optionally other regulatory elements which are operably linked to the intervening encoding sequence with one of the nucleic acids as depicted in the respective line in Table I, application no. 7, column 5 or 8, preferably the coding region thereof, or a homolog or a fragment thereof. By an operable linkage is meant the sequential arrangement of promoter, encoding sequence, terminator, optionally other regulatory elements and optionally targeting sequences in such a way that each of the regulatory elements/targeting sequence can fulfill its function in the expression of the encoding sequence in due manner. In one embodiment the sequences preferred for operable linkage are targeting sequences for ensuring subcellular localization in organelles, like plastids or mitochondria. However, targeting sequences for ensuring subcellular localization in the endoplasmic reticulum (=ER), in the nucleus, in oil corpuscles or other compartments may also be employed as well as translation promoters such as the 5′ lead sequence in tobacco mosaic virus (Gallie et al., Nucl. Acids Res. 15, 8693 (1987)).

[47463] As an example, a nucleic acid construct, like an expression cassette may, for example, contain a constitutive promoter or a tissue-specific promoter (preferably the USP or napin promoter), the gene to be expressed and a ER retention signal. For the ER retention signal the KDEL amino acid sequence (lysine, aspartic acid, glutamic acid, leucine) or the KKX amino acid sequence (lysine-lysine-X-stop, wherein X means every other known amino acid) is preferably employed.

[47464] In an embodiment, the invention relates to an expression cassette, comprising
[47465] 1) a promoter, preferably a promoter selected from the group consisting of Big35S, PCUbi, Super and USP;
[47466] 2) a nucleic acid molecule selected from the group consisting of
   [47467] (a) a nucleic acid molecule encoding a polypeptide shown in Table II, application no. 7, column 5 or 8, preferably shown in Table II A, application no. 7, column 5, or in Table II A, application no. 7, column 8, or in Table II B, application no. 7, column 8, or a homolog or a fragment thereof;
   [47468] (b) a nucleic acid molecule shown in Table I, application no. 7, column 5 or 8, preferably shown in Table I A, application no. 7, column 5, or in Table I A, application no. 7, column 8, or in Table I B, application no. 7, column 8, preferably the coding region thereof, or a homolog or a fragment thereof;
   [47469] (c) a nucleic acid molecule, which, as a result of the degeneracy of the genetic code, can be derived from a polypeptide sequence depicted in column 5 or 8 of Table II, application no. 7, preferably shown in Table II A, application no. 7, column 5, or in Table II A, application no. 7, column 8, or in Table II B, application no. 7, column 8;
   [47470] (d) a nucleic acid molecule having at least 30% identity, preferably at least 40%, 50%, 60%, 70%, 75%, 80%, 85%, 90%, 95%, 96%, 97%, 98%, 99%, 99,5%, with the nucleic acid molecule sequence of a polynucleotide comprising the nucleic acid molecule shown in column 5 or 8 of Table I, application no. 7, preferably shown in Table I A, application no. 7, column 5, or in Table I A, application no. 7, column 8, or in Table I B, application no. 7, column 8, preferably the coding region thereof;
   [47471] (e) a nucleic acid molecule encoding a polypeptide having at least 30% identity, preferably at least 40%, 50% 60%, 70%, 75%, 80%, 85%, 90%, 95%, 96%, 97%, 98%, 99%, 99,5%, identity with the amino acid sequence of the polypeptide encoded by the nucleic acid molecule of (a), (b), (c) or (d);
   [47472] (f) a nucleic acid molecule which hybridizes with a nucleic acid molecule of (a), (b), (c), (d) or (e) under stringent hybridization conditions;
   [47473] (g) a nucleic acid molecule encoding a polypeptide which can be isolated with the aid of monoclonal or polyclonal antibodies made against a polypeptide encoded by one of the nucleic acid molecules of (a), (b), (c), (d), (e) or (f);
   [47474] (h) a nucleic acid molecule encoding a polypeptide comprising the consensus sequence or one or more polypeptide motifs as shown in column 8 of Table IV, application no. 7;
   [47475] (i) a nucleic acid molecule encoding a polypeptide having the activity represented by a respective protein as depicted in column 5 of Table II, application no. 7;
   [47476] (j) a nucleic acid molecule comprising a polynucleotide which is obtained by amplifying a cDNA library or a genomic library using the primers in Table III, application no. 7, column 8;
   [47477] and
   [47478] (k) nucleic acid molecule which is obtainable by screening a suitable nucleic acid library, especially a cDNA library and/or a genomic library, under stringent hybridization conditions with a probe comprising one of the sequences of the nucleic acid molecule of (a), (b), (c), (d), (e), (f), (g), (h), (i) or (j) or with a fragment of at least 15 nt, preferably 20 nt, 30 nt, 50 nt, 100 nt, 200 nt,500 nt, 1000 nt, 1500 nt, 2000 nt or 3000 nt of the nucleic acid molecule characterized in (a), (b), (c), (d), (e), (f), (g), (h), (i) or (j);
   [47479] or a nucleic acid molecule comprising a sequence which is complementary thereto.
      and, optionally
[47480] 3) nucleic acid molecule encoding a transit peptide, preferably encoding a plastidal transit peptide or a mitochondrial transit peptide;
   which are operable linked.
   (All the references to Tables I to IV are references to the corresponding lines of Tables I to IV.)

[47481] In a preferred embodiment thereof said nucleic acid molecule according to 2 (a), (b), (c), (d), (e), (f), (g), (h), (i), (j) or (k) encodes a polypeptide which has the activity of the respective polypeptide represented by a protein comprising a polypeptide as depicted in the respective line in column 5 of Table II, application no. 7.

[47482] In another preferred embodiment thereof said nucleic acid molecule according to 2 (a), (b), (c), (d), (e), (f), (g), (h), (i), (j) or (k) confers a generation or an increase of the respective fine chemical in a non-human organism or a part thereof as compared to a corresponding wild-type non-human organism or part thereof.

[47483] In another preferred embodiment thereof said nucleic acid molecule according to 2 (a), (b), (c), (d), (e), (f), (g), (h), (i), (j) or (k) encodes a polypeptide which has the activity of the respective polypeptide represented by a protein as depicted in the respective line in column 5 of Table II application no. 7 and confers a generation or an increase of the respective fine chemical in a non-human organism or a part thereof as compared to a corresponding wild-type non-human organism or part thereof.

[47484] In another embodiment thereof the expression cassette comprises 3) a nucleic acid molecule encoding a transit peptide, preferably encoding a plastidal transit peptide, especially in case in column 6 of Table I, application no. 7, in the same line as of the respective nucleic acid molecule according to 2) “plastidic” is depicted, or encoding a mitochondrial transit peptide, especially in case in column 6 of Table I, application no. 7, in the same line as of the respective nucleic acid molecule according to 2) “mitochondric” is depicted.

[47485] In another embodiment thereof the expression cassette does not comprise 3) a nucleic acid molecule encoding a transit peptide, especially in case in column 6 of Table I, application no. 7, in the same line as of the respective nucleic acid molecule according to 2) “non-targeted” is depicted.

[47486] In a further embodiment, the invention relates to an expression cassette, comprising
[47487] 1) a promoter, preferably a promoter selected from the group consisting of Big35S, PCUbi, Super and USP;
[47488] 2) a nucleic acid molecule selected from the group consisting of
   [47489] (a) a nucleic acid molecule encoding a polypeptide shown in Table II, application no. 7, column 5 or 8, preferably shown in Table II A, application no. 7, column 5, or in Table II A, application no. 7, column 8, or in Table II B, application no. 7, column 8, or a homolog or a fragment thereof;
   [47490] (b) a nucleic acid molecule shown in Table I, application no. 7, column 5 or 8, preferably shown in Table I A, application no. 7, column 5, or in Table I A, application no. 7, column 8, or in Table I B, application no. 7, column 8, preferably the coding region thereof, or a homolog or a fragment thereof;
   [47491] (c) a nucleic acid molecule, which, as a result of the degeneracy of the genetic code, can be derived from a polypeptide sequence depicted in column 5 or 8 of Table II, application no. 7, preferably shown in Table II A, application no. 7, column 5, or in Table II A, application no. 7, column 8, or in Table II B, application no. 7, column 8;
   [47492] (d) a nucleic acid molecule having at least 30% identity, preferably at least 40%, 50%, 60%, 70%, 75%, 80%, 85%, 90%, 95%, 96%, 97%, 98%, 99%, 99,5%, with the nucleic acid molecule sequence of a polynucleotide comprising the nucleic acid molecule shown in column 5 or 8 of Table I, application no. 7, preferably shown in Table I A, application no. 7, column 5, or in Table I A, application no. 7, column 8,or in Table I B, application no. 7, column 8, preferably the coding region thereof;
   [47493] (e) a nucleic acid molecule encoding a polypeptide having at least 30% identity, preferably at least 40%, 50% 60%, 70%, 75%, 80%, 85%, 90%, 95%, 96%, 97%, 98%, 99%, 99,5%, identity with the amino acid sequence of the polypeptide encoded by the nucleic acid molecule of (a), (b), (c) or (d);
   [47494] (f) a nucleic acid molecule which hybridizes with a nucleic acid molecule of (a), (b), (c), (d) or (e) under stringent hybridization conditions;
   [47495] (g) a nucleic acid molecule encoding a polypeptide which can be isolated with the aid of monoclonal or polyclonal antibodies made against a polypeptide encoded by one of the nucleic acid molecules of (a), (b), (c), (d), (e) or (f);
   [47496] (h) a nucleic acid molecule encoding a polypeptide comprising the consensus sequence or one or more polypeptide motifs as shown in column 8 of Table IV, application no. 7;
   [47497] (i) a nucleic acid molecule encoding a polypeptide having the activity represented by a respective protein as depicted in column 5 of Table II, application no. 7;
   [47498] (j) a nucleic acid molecule comprising a polynucleotide which is obtained by amplifying a cDNA library or a genomic library using the primers in Table III, application no. 7, column 8;
   [47499] and
   [47500] (k) nucleic acid molecule which is obtainable by screening a suitable nucleic acid library, especially a cDNA library and/or a genomic library, under stringent hybridization conditions with a probe comprising one of the sequences of the nucleic acid molecule of (a), (b), (c), (d), (e), (f), (g), (h), (i) or (j) or with a fragment of at least 15 nt, preferably 20 nt, 30 nt, 50 nt, 100 nt, 200 nt,500 nt, 1000 nt, 1500 nt, 2000 nt or 3000 nt of the nucleic acid molecule characterized in (a), (b), (c), (d), (e), (f), (g), (h), (i) or (j);
   [47501] or a nucleic acid molecule comprising a sequence which is complementary thereto;
      and, optionally
[47502] 3) nucleic acid molecule encoding a transit peptide, preferably encoding a plastidal transit peptide or a mitochondrial transit peptide;
   which are operable linked and
   whereby, preferably, the nucleic acid molecule according to 2 (a), (b), (c), (d), (e), (f), (g), (h), (i), (j) or (k) distinguishes over the sequence depicted in Table I A and/or I B, application no. 7, column 5 or 8, or the coding region thereof, by one or more nucleotides (especially but not exceeding 5%, preferably 4%, 3%, 2%, 1%, 0.5%, 0.2% or 0.1%). In an embodiment, the nucleic acid molecule of the invention according to 2) does not consist of the sequence shown in Table I A and/or I B, application no. 7, column 5 or 8, or the coding region thereof. In another embodiment, the nucleic acid molecule of the present invention, preferably the coding region thereof, is at least 30%, 40%, 50%, 60%, 70%, 80%, 90%, 95% identical but less than 100%, 99.999%, 99.99%, 99.9%, 99%, 98%, 97%, 96% or 95% identical to the sequence shown in Table I A and/or I B, application no. 7, column 5 or 8, or the coding region thereof, respectively. In a further embodiment the nucleic acid molecule does not encode the polypeptide sequence shown in Table II A and/or II B, application no. 7, column 5 or 8 but homologs thereof. Accordingly, in one embodiment, the nucleic acid molecule of the present invention encodes in one embodiment a polypeptide which differs at least in one or more amino acids (especially but not exceeding 5%, preferably 4%, 3%, 2%, 1%, 0.5%, 0.2% or 0.1%) from the polypeptide shown in Table II, application no. 7, column 5 or 8 and does not encode a protein of the sequence shown in Table II A and/or II B, application no. 7, column 5 or 8. Accordingly, in one embodiment, the protein encoded by a sequence of a nucleic acid according to 2(a), (b), (c), (d), (e), (f), (g), (h), (i), (j) or (k) does not consist of the sequence shown in Table I A and/or I B, application no. 7, column 5 or 8, or the coding region thereof. In a further embodiment, the protein of the present invention is at least 30%, 40%, 50%, 60%, 70%, 80%, 90%, 95% identical to protein sequence depicted in Table II A and/or II B, application no. 7, column 5 or 8 but less than 100%, 99.999%, 99.99%, 99.9%, 99%, 98%, 97%, 96% or 95% identical to the sequence shown in Table II A and/or II B, application no. 7, column 5 or 8.
   (All the references to Tables I to IV are references to the corresponding lines of Tables I to IV.)

[47503] In a preferred embodiment thereof said nucleic acid molecule according to 2 (a), (b), (c), (d), (e), (f), (g), (h), (i), (j) or (k) encodes a polypeptide which has the activity of the respective polypeptide represented by a protein comprising a polypeptide as depicted in the respective line in column 5 of Table II, application no. 7.

[47504] In another preferred embodiment thereof said nucleic acid molecule according to 2 (a), (b), (c), (d), (e), (f), (g), (h), (i), (j) or (k) confers a generation or an increase of the respective fine chemical in a non-human organism or a part thereof as compared to a corresponding wild-type non-human organism or part thereof.

[47505] In another preferred embodiment thereof said nucleic acid molecule according to 2 (a), (b), (c), (d), (e), (f), (g), (h), (i), (j) or (k) encodes a polypeptide which has the activity of the respective polypeptide represented by a protein as depicted in the respective line in column 5 of Table II application no. 7 and confers a generation or an increase of the respective fine chemical in a non-human organism or a part thereof as compared to a corresponding wild-type non-human organism or part thereof.

[47506] In another embodiment thereof the expression cassette comprises 3) a nucleic acid molecule encoding a transit peptide, preferably encoding a plastidal transit peptide, especially in case in column 6 of Table I, application no. 7, in the same line as of the respective nucleic acid molecule according to 2) “plastidic” is depicted, or encoding a mitochondrial transit peptide, especially in case in column 6 of Table I, application no. 7, in the same line as of the respective nucleic acid molecule according to 2) “mitochondric” is depicted.

[47507] In another embodiment thereof the expression cassette does not comprise 3) a nucleic acid molecule encoding a transit peptide, especially in case in column 6 of Table I, application no. 7, in the same line as of the respective nucleic acid molecule according to 2) “non-targeted” is depicted.

[47508] In an embodiment the present invention relates to an expresssion cassette comprising a) a promoter, preferably a promoter selected from the group consisting of Big35S, PCUbi, Super and USP, in particular p-PcUBI; and b) the nucleic acid SEQ ID NO. 15532, or a homolog or fragment thereof, or a homolog thereof being depicted in Table I, application no. 7, column 8, in the same line as SEQ ID NO. 15532, preferably the coding region thereof, a homolog or a fragment thereof; which are operable linked.

[47509] In an embodiment thereof the expression cassette comprises in addition c) a nucleic acid molecule encoding a transit peptide, especially a plastidal transit petide in case in Table I, application no. 7, in column 6 in the same line as SEQ ID NO. 15532 is depicted, plastidic is mentioned, or a mitochondrial transit peptide in case in Table I, application no. 7, in column 6 in the same line as SEQ ID NO. 15532 is depicted, mitochondric is mentioned; which is operable linked, too.

[47510] In another embodiment thereof the expression cassette does not comprise an additional transit peptide in case in Table I, application no. 7, in column 6 in the same line as SEQ ID NO. 15532 is depicted, non-targeted is mentioned.

[47511] In an embodiment the present invention relates to an expresssion cassette comprising a) a promoter, preferably a promoter selected from the group consisting of Big35S, PCUbi, Super and USP, in particular p-PcUBI; and b) the nucleic acid SEQ ID NO. 16883, or a homolog or fragment thereof, or a homolog thereof being depicted in Table I, application no. 7, column 8, in the same line as SEQ ID NO. 16883, preferably the coding region thereof, a homolog or a fragment thereof; which are operable linked.

[47512] In an embodiment thereof the expression cassette comprises in addition c) a nucleic acid molecule encoding a transit peptide, especially a plastidal transit petide in case in Table I, application no. 7, in column 6 in the same line as SEQ ID NO. 16883 is depicted, plastidic is mentioned, or a mitochondrial transit peptide in case in Table I, application no. 7, in column 6 in the same line as SEQ ID NO. 16883 is depicted, mitochondric is mentioned; which is operable linked, too.

[47513] In another embodiment thereof the expression cassette does not comprise an additional transit peptide in case in Table I, application no. 7, in column 6 in the same line as SEQ ID NO. 16883 is depicted, non-targeted is mentioned.

[47514] In an embodiment the present invention relates to an expresssion cassette comprising a) a promoter, preferably a promoter selected from the group consisting of Big35S, PCUbi, Super and USP, in particular p-PcUBI; and b) the nucleic acid SEQ ID NO. 17901, or a homolog or fragment thereof, or a homolog thereof being depicted in Table I, application no. 7, column 8, in the same line as SEQ ID NO. 17901, preferably the coding region thereof, a homolog or a fragment thereof; which are operable linked.

[47515] In an embodiment thereof the expression cassette comprises in addition c) a nucleic acid molecule encoding a transit peptide, especially a plastidal transit petide in case in Table I, application no. 7, in column 6 in the same line as SEQ ID NO. 17901 is depicted, plastidic is mentioned, or a mitochondrial transit peptide in case in Table I, application no. 7, in column 6 in the same line as SEQ ID NO. 17901 is depicted, mitochondric is mentioned; which is operable linked, too.

[47516] In another embodiment thereof the expression cassette does not comprise an additional transit peptide in case in Table I, application no. 7, in column 6 in the same line as SEQ ID NO. 17901 is depicted, non-targeted is mentioned.

[47517] In an embodiment the present invention relates to an expresssion cassette comprising a) a promoter, preferably a promoter selected from the group consisting of Big35S, PCUbi, Super and USP, in particular p-PcUBI; and b) the nucleic acid SEQ ID NO. 18070, or a homolog or fragment thereof, or a homolog thereof being depicted in Table I, application no. 7, column 8, in the same line as SEQ ID NO. 18070, preferably the coding region thereof, a homolog or a fragment thereof; which are operable linked.

[47518] In an embodiment thereof the expression cassette comprises in addition c) a nucleic acid molecule encoding a transit peptide, especially a plastidal transit petide in case in Table I, application no. 7, in column 6 in the same line as SEQ ID NO. 18070 is depicted, plastidic is mentioned, or a mitochondrial transit peptide in case in Table I, application no. 7, in column 6 in the same line as SEQ ID NO. 18070 is depicted, mitochondric is mentioned; which is operable linked, too.

[47519] In another embodiment thereof the expression cassette does not comprise an additional transit peptide in case in Table I, application no. 7, in column 6 in the same line as SEQ ID NO. 18070 is depicted, non-targeted is mentioned.

[47520] In an embodiment the present invention relates to an expresssion cassette comprising a) a promoter, preferably a promoter selected from the group consisting of Big35S, PCUbi, Super and USP, in particular p-PcUBI; and b) the nucleic acid SEQ ID NO. 18235, or a homolog or fragment thereof, or a homolog thereof being depicted in Table I, application no. 7, column 8, in the same line as SEQ ID NO. 18235, preferably the coding region thereof, a homolog or a fragment thereof; which are operable linked.

[47521] In an embodiment thereof the expression cassette comprises in addition c) a nucleic acid molecule encoding a transit peptide, especially a plastidal transit petide in case in Table I, application no. 7, in column 6 in the same line as SEQ ID NO. 18235 is depicted, plastidic is mentioned, or a mitochondrial transit peptide in case in Table I, application no. 7, in column 6 in the same line as SEQ ID NO. 18235 is depicted, mitochondric is mentioned; which is operable linked, too.

[47522] In another embodiment thereof the expression cassette does not comprise an additional transit peptide in case in Table I, application no. 7, in column 6 in the same line as SEQ ID NO. 18235 is depicted, non-targeted is mentioned.

[47523] In an embodiment the present invention relates to an expresssion cassette comprising a) a promoter, preferably a promoter selected from the group consisting of Big35S, PCUbi, Super and USP, in particular p-PcUBI; and b) the nucleic acid SEQ ID NO. 18869, or a homolog or fragment thereof, or a homolog thereof being depicted in Table I, application no. 7, column 8, in the same line as SEQ ID NO. 18869, preferably the coding region thereof, a homolog or a fragment thereof; which are operable linked.

[47524] In an embodiment thereof the expression cassette comprises in addition c) a nucleic acid molecule encoding a transit peptide, especially a plastidal transit petide in case in Table I, application no. 7, in column 6 in the same line as SEQ ID NO. 18869 is depicted, plastidic is mentioned, or a mitochondrial transit peptide in case in Table I, application no. 7, in column 6 in the same line as SEQ ID NO. 18869 is depicted, mitochondric is mentioned; which is operable linked, too.

[47525] In another embodiment thereof the expression cassette does not comprise an additional transit peptide in case in Table I, application no. 7, in column 6 in the same line as SEQ ID NO. 18869 is depicted, non-targeted is mentioned.

[47526] In an embodiment the present invention relates to an expresssion cassette comprising a) a promoter, preferably a promoter selected from the group consisting of Big35S, PCUbi, Super and USP, in particular p-PcUBI; and b) the nucleic acid SEQ ID NO. 19419, or a homolog or fragment thereof, or a homolog thereof being depicted in Table I, application no. 7, column 8, in the same line as SEQ ID NO. 19419, preferably the coding region thereof, a homolog or a fragment thereof; which are operable linked.

[47527] In an embodiment thereof the expression cassette comprises in addition c) a nucleic acid molecule encoding a transit peptide, especially a plastidal transit petide in case in Table I, application no. 7, in column 6 in the same line as SEQ ID NO. 19419 is depicted, plastidic is mentioned, or a mitochondrial transit peptide in case in Table I, application no. 7, in column 6 in the same line as SEQ ID NO. 19419 is depicted, mitochondric is mentioned; which is operable linked, too.

[47528] In another embodiment thereof the expression cassette does not comprise an additional transit peptide in case in Table I, application no. 7, in column 6 in the same line as SEQ ID NO. 19419 is depicted, non-targeted is mentioned.

[47529] In an embodiment the present invention relates to an expresssion cassette comprising a) a promoter, preferably a promoter selected from the group consisting of Big35S, PCUbi, Super and USP, in particular p-PcUBI; and b) the nucleic acid SEQ ID NO. 108727, or a homolog or fragment thereof, or a homolog thereof being depicted in Table I, application no. 7, column 8, in the same line as SEQ ID NO. 108727, preferably the coding region thereof, a homolog or a fragment thereof; which are operable linked.

[47530] In an embodiment thereof the expression cassette comprises in addition c) a nucleic acid molecule encoding a transit peptide, especially a plastidal transit petide in case in Table I, application no. 7, in column 6 in the same line as SEQ ID NO. 108727 is depicted, plastidic is mentioned, or a mitochondrial transit peptide in case in Table I, application no. 7, in column 6 in the same line as SEQ ID NO. 108727 is depicted, mitochondric is mentioned; which is operable linked, too.

[47531] In another embodiment thereof the expression cassette does not comprise an additional transit peptide in case in Table I, application no. 7, in column 6 in the same line as SEQ ID NO. 108727 is depicted, non-targeted is mentioned.

[47532] In an embodiment the present invention relates to an expresssion cassette comprising a) a promoter, preferably a promoter selected from the group consisting of Big35S, PCUbi, Super and USP, in particular p-PcUBI; and b) the nucleic acid SEQ ID NO. 21159, or a homolog or fragment thereof, or a homolog thereof being depicted in Table I, application no. 7, column 8, in the same line as SEQ ID NO. 21159, preferably the coding region thereof, a homolog or a fragment thereof; which are operable linked.

[47533] In an embodiment thereof the expression cassette comprises in addition c) a nucleic acid molecule encoding a transit peptide, especially a plastidal transit petide in case in Table I, application no. 7, in column 6 in the same line as SEQ ID NO. 21159 is depicted, plastidic is mentioned, or a mitochondrial transit peptide in case in Table I, application no. 7, in column 6 in the same line as SEQ ID NO. 21159 is depicted, mitochondric is mentioned; which is operable linked, too.

[47534] In another embodiment thereof the expression cassette does not comprise an additional transit peptide in case in Table I, application no. 7, in column 6 in the same line as SEQ ID NO. 21159 is depicted, non-targeted is mentioned.

[47535] In an embodiment the present invention relates to an expresssion cassette comprising a) a promoter, preferably a promoter selected from the group consisting of Big35S, PCUbi, Super and USP, in particular p-PcUBI; and b) the nucleic acid SEQ ID NO. 21497, or a homolog or fragment thereof, or a homolog thereof being depicted in Table I, application no. 7, column 8, in the same line as SEQ ID NO. 21497, preferably the coding region thereof, a homolog or a fragment thereof; which are operable linked.

[47536] In an embodiment thereof the expression cassette comprises in addition c) a nucleic acid molecule encoding a transit peptide, especially a plastidal transit petide in case in Table I, application no. 7, in column 6 in the same line as SEQ ID NO. 21497 is depicted, plastidic is mentioned, or a mitochondrial transit peptide in case in Table I, application no. 7, in column 6 in the same line as SEQ ID NO. 21497 is depicted, mitochondric is mentioned; which is operable linked, too.

[47537] In another embodiment thereof the expression cassette does not comprise an additional transit peptide in case in Table I, application no. 7, in column 6 in the same line as SEQ ID NO. 21497 is depicted, non-targeted is mentioned.

[47538] In an embodiment the present invention relates to an expresssion cassette comprising a) a promoter, preferably a promoter selected from the group consisting of Big35S, PCUbi, Super and USP, in particular p-PcUBI; and b) the nucleic acid SEQ ID NO. 21902, or a homolog or fragment thereof, or a homolog thereof being depicted in Table I, application no. 7, column 8, in the same line as SEQ ID NO. 21902, preferably the coding region thereof, a homolog or a fragment thereof; which are operable linked.

[47539] In an embodiment thereof the expression cassette comprises in addition c) a nucleic acid molecule encoding a transit peptide, especially a plastidal transit petide in case in Table I, application no. 7, in column 6 in the same line as SEQ ID NO. 21902 is depicted, plastidic is mentioned, or a mitochondrial transit peptide in case in Table I, application no. 7, in column 6 in the same line as SEQ ID NO. 21902 is depicted, mitochondric is mentioned; which is operable linked, too.

[47540] In another embodiment thereof the expression cassette does not comprise an additional transit peptide in case in Table I, application no. 7, in column 6 in the same line as SEQ ID NO. 21902 is depicted, non-targeted is mentioned.

[47541] In an embodiment the present invention relates to an expresssion cassette comprising a) a promoter, preferably a promoter selected from the group consisting of Big35S, PCUbi, Super and USP, in particular p-PcUBI; and b) the nucleic acid SEQ ID NO. 22015, or a homolog or fragment thereof, or a homolog thereof being depicted in Table I, application no. 7, column 8, in the same line as SEQ ID NO. 22015, preferably the coding region thereof, a homolog or a fragment thereof; which are operable linked.

[47542] In an embodiment thereof the expression cassette comprises in addition c) a nucleic acid molecule encoding a transit peptide, especially a plastidal transit petide in case in Table I, application no. 7, in column 6 in the same line as SEQ ID NO. 22015 is depicted, plastidic is mentioned, or a mitochondrial transit peptide in case in Table I, application no. 7, in column 6 in the same line as SEQ ID NO. 22015 is depicted, mitochondric is mentioned; which is operable linked, too.

[47543] In another embodiment thereof the expression cassette does not comprise an additional transit peptide in case in Table I, application no. 7, in column 6 in the same line as SEQ ID NO. 22015 is depicted, non-targeted is mentioned.

[47544] In an embodiment the present invention relates to an expresssion cassette comprising a) a promoter, preferably a promoter selected from the group consisting of Big35S, PCUbi, Super and USP, in particular p-PcUBI; and b) the nucleic acid SEQ ID NO. 22249, or a homolog or fragment thereof, or a homolog thereof being depicted in Table I, application no. 7, column 8, in the same line as SEQ ID NO. 22249, preferably the coding region thereof, a homolog or a fragment thereof; which are operable linked.

[47545] In an embodiment thereof the expression cassette comprises in addition c) a nucleic acid molecule encoding a transit peptide, especially a plastidal transit petide in case in Table I, application no. 7, in column 6 in the same line as SEQ ID NO. 22249 is depicted, plastidic is mentioned, or a mitochondrial transit peptide in case in Table I, application no. 7, in column 6 in the same line as SEQ ID NO. 22249 is depicted, mitochondric is mentioned; which is operable linked, too.

[47546] In another embodiment thereof the expression cassette does not comprise an additional transit peptide in case in Table I, application no. 7, in column 6 in the same line as SEQ ID NO. 22249 is depicted, non-targeted is mentioned.

[47547] In an embodiment the present invention relates to an expresssion cassette comprising a) a promoter, preferably a promoter selected from the group consisting of Big35S, PCUbi, Super and USP, in particular p-PcUBI; and b) the nucleic acid SEQ ID NO. 22611, or a homolog or fragment thereof, or a homolog thereof being depicted in Table I, application no. 7, column 8, in the same line as SEQ ID NO. 22611, preferably the coding region thereof, a homolog or a fragment thereof; which are operable linked.

[47548] In an embodiment thereof the expression cassette comprises in addition c) a nucleic acid molecule encoding a transit peptide, especially a plastidal transit petide in case in Table I, application no. 7, in column 6 in the same line as SEQ ID NO. 22611 is depicted, plastidic is mentioned, or a mitochondrial transit peptide in case in Table I, application no. 7, in column 6 in the same line as SEQ ID NO. 22611 is depicted, mitochondric is mentioned; which is operable linked, too.

[47549] In another embodiment thereof the expression cassette does not comprise an additional transit peptide in case in Table I, application no. 7, in column 6 in the same line as SEQ ID NO. 22611 is depicted, non-targeted is mentioned.

[47550] In an embodiment the present invention relates to an expresssion cassette comprising a) a promoter, preferably a promoter selected from the group consisting of Big35S, PCUbi, Super and USP, in particular p-PcUBI; and b) the nucleic acid SEQ ID NO. 1815, or a homolog or fragment thereof, or a homolog thereof being depicted in Table I, application no. 7, column 8, in the same line as SEQ ID NO. 1815, preferably the coding region thereof, a homolog or a fragment thereof; which are operable linked.

[47551] In an embodiment thereof the expression cassette comprises in addition c) a nucleic acid molecule encoding a transit peptide, especially a plastidal transit petide in case in Table I, application no. 7, in column 6 in the same line as SEQ ID NO. 1815 is depicted, plastidic is mentioned, or a mitochondrial transit peptide in case in Table I, application no. 7, in column 6 in the same line as SEQ ID NO. 1815 is depicted, mitochondric is mentioned; which is operable linked, too.

[47552] In another embodiment thereof the expression cassette does not comprise an additional transit peptide in case in Table I, application no. 7, in column 6 in the same line as SEQ ID NO. 1815 is depicted, non-targeted is mentioned.

[47553] In an embodiment the present invention relates to an expresssion cassette comprising a) a promoter, preferably a promoter selected from the group consisting of Big35S, PCUbi, Super and USP, in particular p-PcUBI; and b) the nucleic acid SEQ ID NO. 2573, or a homolog or fragment thereof, or a homolog thereof being depicted in Table I, application no. 7, column 8, in the same line as SEQ ID NO. 2573, preferably the coding region thereof, a homolog or a fragment thereof; which are operable linked.

[47554] In an embodiment thereof the expression cassette comprises in addition c) a nucleic acid molecule encoding a transit peptide, especially a plastidal transit petide in case in Table I, application no. 7, in column 6 in the same line as SEQ ID NO. 2573 is depicted, plastidic is mentioned, or a mitochondrial transit peptide in case in Table I, application no. 7, in column 6 in the same line as SEQ ID NO. 2573 is depicted, mitochondric is mentioned; which is operable linked, too.

[47555] In another embodiment thereof the expression cassette does not comprise an additional transit peptide in case in Table I, application no. 7, in column 6 in the same line as SEQ ID NO. 2573 is depicted, non-targeted is mentioned.

[47556] In an embodiment the present invention relates to an expresssion cassette comprising a) a promoter, preferably a promoter selected from the group consisting of Big35S, PCUbi, Super and USP, in particular p-PcUBI; and b) the nucleic acid SEQ ID NO. 2935, or a homolog or fragment thereof, or a homolog thereof being depicted in Table I, application no. 7, column 8, in the same line as SEQ ID NO. 2935, preferably the coding region thereof, a homolog or a fragment thereof; which are operable linked.

[47557] In an embodiment thereof the expression cassette comprises in addition c) a nucleic acid molecule encoding a transit peptide, especially a plastidal transit petide in case in Table I, application no. 7, in column 6 in the same line as SEQ ID NO. 2935 is depicted, plastidic is mentioned, or a mitochondrial transit peptide in case in Table I, application no. 7, in column 6 in the same line as SEQ ID NO. 2935 is depicted, mitochondric is mentioned; which is operable linked, too.

[47558] In another embodiment thereof the expression cassette does not comprise an additional transit peptide in case in Table I, application no. 7, in column 6 in the same line as SEQ ID NO. 2935 is depicted, non-targeted is mentioned.

[47559] In an embodiment the present invention relates to an expresssion cassette comprising a) a promoter, preferably a promoter selected from the group consisting of Big35S, PCUbi, Super and USP, in particular p-PcUBI; and b) the nucleic acid SEQ ID NO. 109717, or a homolog or fragment thereof, or a homolog thereof being depicted in Table I, application no. 7, column 8, in the same line as SEQ ID NO. 109717, preferably the coding region thereof, a homolog or a fragment thereof; which are operable linked.

[47560] In an embodiment thereof the expression cassette comprises in addition c) a nucleic acid molecule encoding a transit peptide, especially a plastidal transit petide in case in Table I, application no. 7, in column 6 in the same line as SEQ ID NO. 109717 is depicted, plastidic is mentioned, or a mitochondrial transit peptide in case in Table I, application no. 7, in column 6 in the same line as SEQ ID NO. 109717 is depicted, mitochondric is mentioned; which is operable linked, too.

[47561] In another embodiment thereof the expression cassette does not comprise an additional transit peptide in case in Table I, application no. 7, in column 6 in the same line as SEQ ID NO. 109717 is depicted, non-targeted is mentioned.

[47562] In an embodiment the present invention relates to an expresssion cassette comprising a) a promoter, preferably a promoter selected from the group consisting of Big35S, PCUbi, Super and USP, in particular p-PcUBI; and b) the nucleic acid SEQ ID NO. 23482, or a homolog or fragment thereof, or a homolog thereof being depicted in Table I, application no. 7, column 8, in the same line as SEQ ID NO. 23482, preferably the coding region thereof, a homolog or a fragment thereof; which are operable linked.

[47563] In an embodiment thereof the expression cassette comprises in addition c) a nucleic acid molecule encoding a transit peptide, especially a plastidal transit petide in case in Table I, application no. 7, in column 6 in the same line as SEQ ID NO. 23482 is depicted, plastidic is mentioned, or a mitochondrial transit peptide in case in Table I, application no. 7, in column 6 in the same line as SEQ ID NO. 23482 is depicted, mitochondric is mentioned; which is operable linked, too.

[47564] In another embodiment thereof the expression cassette does not comprise an additional transit peptide in case in Table I, application no. 7, in column 6 in the same line as SEQ ID NO. 23482 is depicted, non-targeted is mentioned.

[47565] In an embodiment the present invention relates to an expresssion cassette comprising a) a promoter, preferably a promoter selected from the group consisting of Big35S, PCUbi, Super and USP, in particular p-PcUBI; and b) the nucleic acid SEQ ID NO. 3279, or a homolog or fragment thereof, or a homolog thereof being depicted in Table I, application no. 7, column 8, in the same line as SEQ ID NO. 3279, preferably the coding region thereof, a homolog or a fragment thereof; which are operable linked.

[47566] In an embodiment thereof the expression cassette comprises in addition c) a nucleic acid molecule encoding a transit peptide, especially a plastidal transit petide in case in Table I, application no. 7, in column 6 in the same line as SEQ ID NO. 3279 is depicted, plastidic is mentioned, or a mitochondrial transit peptide in case in Table I, application no. 7, in column 6 in the same line as SEQ ID NO. 3279 is depicted, mitochondric is mentioned; which is operable linked, too.

[47567] In another embodiment thereof the expression cassette does not comprise an additional transit peptide in case in Table I, application no. 7, in column 6 in the same line as SEQ ID NO. 3279 is depicted, non-targeted is mentioned.

[47568] In an embodiment the present invention relates to an expresssion cassette comprising a) a promoter, preferably a promoter selected from the group consisting of Big35S, PCUbi, Super and USP, in particular p-PcUBI; and b) the nucleic acid SEQ ID NO. 23844, or a homolog or fragment thereof, or a homolog thereof being depicted in Table I, application no. 7, column 8, in the same line as SEQ ID NO. 23844, preferably the coding region thereof, a homolog or a fragment thereof; which are operable linked.

[47569] In an embodiment thereof the expression cassette comprises in addition c) a nucleic acid molecule encoding a transit peptide, especially a plastidal transit petide in case in Table I, application no. 7, in column 6 in the same line as SEQ ID NO. 23844 is depicted, plastidic is mentioned, or a mitochondrial transit peptide in case in Table I, application no. 7, in column 6 in the same line as SEQ ID NO. 23844 is depicted, mitochondric is mentioned; which is operable linked, too.

[47570] In another embodiment thereof the expression cassette does not comprise an additional transit peptide in case in Table I, application no. 7, in column 6 in the same line as SEQ ID NO. 23844 is depicted, non-targeted is mentioned.

[47571] In an embodiment the present invention relates to an expresssion cassette comprising a) a promoter, preferably a promoter selected from the group consisting of Big35S, PCUbi, Super and USP, in particular p-PcUBI; and b) the nucleic acid SEQ ID NO. 68849, or a homolog or fragment thereof, or a homolog thereof being depicted in Table I, application no. 7, column 8, in the same line as SEQ ID NO. 68849, preferably the coding region thereof, a homolog or a fragment thereof; which are operable linked.

[47572] In an embodiment thereof the expression cassette comprises in addition c) a nucleic acid molecule encoding a transit peptide, especially a plastidal transit petide in case in Table I, application no. 7, in column 6 in the same line as SEQ ID NO. 68849 is depicted, plastidic is mentioned, or a mitochondrial transit peptide in case in Table I, application no. 7, in column 6 in the same line as SEQ ID NO. 68849 is depicted, mitochondric is mentioned; which is operable linked, too.

[47573] In another embodiment thereof the expression cassette does not comprise an additional transit peptide in case in Table I, application no. 7, in column 6 in the same line as SEQ ID NO. 68849 is depicted, non-targeted is mentioned.

[47574] In an embodiment the present invention relates to an expresssion cassette comprising a) a promoter, preferably a promoter selected from the group consisting of Big35S, PCUbi, Super and USP, in particular p-PcUBI; and b) the nucleic acid SEQ ID NO. 24311, or a homolog or fragment thereof, or a homolog thereof being depicted in Table I, application no. 7, column 8, in the same line as SEQ ID NO. 24311, preferably the coding region thereof, a homolog or a fragment thereof; which are operable linked.

[47575] In an embodiment thereof the expression cassette comprises in addition c) a nucleic acid molecule encoding a transit peptide, especially a plastidal transit petide in case in Table I, application no. 7, in column 6 in the same line as SEQ ID NO. 24311 is depicted, plastidic is mentioned, or a mitochondrial transit peptide in case in Table I, application no. 7, in column 6 in the same line as SEQ ID NO. 24311 is depicted, mitochondric is mentioned; which is operable linked, too.

[47576] In another embodiment thereof the expression cassette does not comprise an additional transit peptide in case in Table I, application no. 7, in column 6 in the same line as SEQ ID NO. 24311 is depicted, non-targeted is mentioned.

[47577] In an embodiment the present invention relates to an expresssion cassette comprising a) a promoter, preferably a promoter selected from the group consisting of Big35S, PCUbi, Super and USP, in particular p-PcUBI; and b) the nucleic acid SEQ ID NO. 4348, or a homolog or fragment thereof, or a homolog thereof being depicted in Table I, application no. 7, column 8, in the same line as SEQ ID NO. 4348, preferably the coding region thereof, a homolog or a fragment thereof; which are operable linked.

[47578] In an embodiment thereof the expression cassette comprises in addition c) a nucleic acid molecule encoding a transit peptide, especially a plastidal transit petide in case in Table I, application no. 7, in column 6 in the same line as SEQ ID NO. 4348 is depicted, plastidic is mentioned, or a mitochondrial transit peptide in case in Table I, application no. 7, in column 6 in the same line as SEQ ID NO. 4348 is depicted, mitochondric is mentioned; which is operable linked, too.

[47579] In another embodiment thereof the expression cassette does not comprise an additional transit peptide in case in Table I, application no. 7, in column 6 in the same line as SEQ ID NO. 4348 is depicted, non-targeted is mentioned.

[47580] In an embodiment the present invention relates to an expresssion cassette comprising a) a promoter, preferably a promoter selected from the group consisting of Big35S, PCUbi, Super and USP, in particular p-PcUBI; and b) the nucleic acid SEQ ID NO. 70006, or a homolog or fragment thereof, or a homolog thereof being depicted in Table I, application no. 7, column 8, in the same line as SEQ ID NO. 70006, preferably the coding region thereof, a homolog or a fragment thereof; which are operable linked.

[47581] In an embodiment thereof the expression cassette comprises in addition c) a nucleic acid molecule encoding a transit peptide, especially a plastidal transit petide in case in Table I, application no. 7, in column 6 in the same line as SEQ ID NO. 70006 is depicted, plastidic is mentioned, or a mitochondrial transit peptide in case in Table I, application no. 7, in column 6 in the same line as SEQ ID NO. 70006 is depicted, mitochondric is mentioned; which is operable linked, too.

[47582] In another embodiment thereof the expression cassette does not comprise an additional transit peptide in case in Table I, application no. 7, in column 6 in the same line as SEQ ID NO. 70006 is depicted, non-targeted is mentioned.

[47583] In an embodiment the present invention relates to an expresssion cassette comprising a) a promoter, preferably a promoter selected from the group consisting of Big35S, PCUbi, Super and USP, in particular p-PcUBI; and b) the nucleic acid SEQ ID NO. 5493, or a homolog or fragment thereof, or a homolog thereof being depicted in Table I, application no. 7, column 8, in the same line as SEQ ID NO. 5493, preferably the coding region thereof, a homolog or a fragment thereof; which are operable linked.

[47584] In an embodiment thereof the expression cassette comprises in addition c) a nucleic acid molecule encoding a transit peptide, especially a plastidal transit petide in case in Table I, application no. 7, in column 6 in the same line as SEQ ID NO. 5493 is depicted, plastidic is mentioned, or a mitochondrial transit peptide in case in Table I, application no. 7, in column 6 in the same line as SEQ ID NO. 5493 is depicted, mitochondric is mentioned; which is operable linked, too.

[47585] In another embodiment thereof the expression cassette does not comprise an additional transit peptide in case in Table I, application no. 7, in column 6 in the same line as SEQ ID NO. 5493 is depicted, non-targeted is mentioned.

[47586] In an embodiment the present invention relates to an expresssion cassette comprising a) a promoter, preferably a promoter selected from the group consisting of Big35S, PCUbi, Super and USP, in particular p-PcUBI; and b) the nucleic acid SEQ ID NO. 110651, or a homolog or fragment thereof, or a homolog thereof being depicted in Table I, application no. 7, column 8, in the same line as SEQ ID NO. 110651, preferably the coding region thereof, a homolog or a fragment thereof; which are operable linked.

[47587] In an embodiment thereof the expression cassette comprises in addition c) a nucleic acid molecule encoding a transit peptide, especially a plastidal transit petide in case in Table I, application no. 7, in column 6 in the same line as SEQ ID NO. 110651 is depicted, plastidic is mentioned, or a mitochondrial transit peptide in case in Table I, application no. 7, in column 6 in the same line as SEQ ID NO. 110651 is depicted, mitochondric is mentioned; which is operable linked, too.

[47588] In another embodiment thereof the expression cassette does not comprise an additional transit peptide in case in Table I, application no. 7, in column 6 in the same line as SEQ ID NO. 110651 is depicted, non-targeted is mentioned.

[47589] In an embodiment the present invention relates to an expresssion cassette comprising a) a promoter, preferably a promoter selected from the group consisting of Big35S, PCUbi, Super and USP, in particular p-PcUBI; and b) the nucleic acid SEQ ID NO. 29286, or a homolog or fragment thereof, or a homolog thereof being depicted in Table I, application no. 7, column 8, in the same line as SEQ ID NO. 29286, preferably the coding region thereof, a homolog or a fragment thereof; which are operable linked.

[47590] In an embodiment thereof the expression cassette comprises in addition c) a nucleic acid molecule encoding a transit peptide, especially a plastidal transit petide in case in Table I, application no. 7, in column 6 in the same line as SEQ ID NO. 29286 is depicted, plastidic is mentioned, or a mitochondrial transit peptide in case in Table I, application no. 7, in column 6 in the same line as SEQ ID NO. 29286 is depicted, mitochondric is mentioned; which is operable linked, too.

[47591] In another embodiment thereof the expression cassette does not comprise an additional transit peptide in case in Table I, application no. 7, in column 6 in the same line as SEQ ID NO. 29286 is depicted, non-targeted is mentioned.

[47592] In an embodiment the present invention relates to an expresssion cassette comprising a) a promoter, preferably a promoter selected from the group consisting of Big35S, PCUbi, Super and USP, in particular p-PcUBI; and b) the nucleic acid SEQ ID NO. 111155, or a homolog or fragment thereof, or a homolog thereof being depicted in Table I, application no. 7, column 8, in the same line as SEQ ID NO. 111155, preferably the coding region thereof, a homolog or a fragment thereof; which are operable linked.

[47593] In an embodiment thereof the expression cassette comprises in addition c) a nucleic acid molecule encoding a transit peptide, especially a plastidal transit petide in case in Table I, application no. 7, in column 6 in the same line as SEQ ID NO. 111155 is depicted, plastidic is mentioned, or a mitochondrial transit peptide in case in Table I, application no. 7, in column 6 in the same line as SEQ ID NO. 111155 is depicted, mitochondric is mentioned; which is operable linked, too.

[47594] In another embodiment thereof the expression cassette does not comprise an additional transit peptide in case in Table I, application no. 7, in column 6 in the same line as SEQ ID NO. 111155 is depicted, non-targeted is mentioned.

[47595] In an embodiment the present invention relates to an expresssion cassette comprising a) a promoter, preferably a promoter selected from the group consisting of Big35S, PCUbi, Super and USP, in particular p-PcUBI; and b) the nucleic acid SEQ ID NO. 102941, or a homolog or fragment thereof, or a homolog thereof being depicted in Table I, application no. 7, column 8, in the same line as SEQ ID NO. 102941, preferably the coding region thereof, a homolog or a fragment thereof; which are operable linked.

[47596] In an embodiment thereof the expression cassette comprises in addition c) a nucleic acid molecule encoding a transit peptide, especially a plastidal transit petide in case in Table I, application no. 7, in column 6 in the same line as SEQ ID NO. 102941 is depicted, plastidic is mentioned, or a mitochondrial transit peptide in case in Table I, application no. 7, in column 6 in the same line as SEQ ID NO. 102941 is depicted, mitochondric is mentioned; which is operable linked, too.

[47597] In another embodiment thereof the expression cassette does not comprise an additional transit peptide in case in Table I, application no. 7, in column 6 in the same line as SEQ ID NO. 102941 is depicted, non-targeted is mentioned.

[47598] In an embodiment the present invention relates to an expresssion cassette comprising a) a promoter, preferably a promoter selected from the group consisting of Big35S, PCUbi, Super and USP, in particular p-PcUBI; and b) the nucleic acid SEQ ID NO. 6510, or a homolog or fragment thereof, or a homolog thereof being depicted in Table I, application no. 7, column 8, in the same line as SEQ ID NO. 6510, preferably the coding region thereof, a homolog or a fragment thereof; which are operable linked.

[47599] In an embodiment thereof the expression cassette comprises in addition c) a nucleic acid molecule encoding a transit peptide, especially a plastidal transit petide in case in Table I, application no. 7, in column 6 in the same line as SEQ ID NO. 6510 is depicted, plastidic is mentioned, or a mitochondrial transit peptide in case in Table I, application no. 7, in column 6 in the same line as SEQ ID NO. 6510 is depicted, mitochondric is mentioned; which is operable linked, too.

[47600] In another embodiment thereof the expression cassette does not comprise an additional transit peptide in case in Table I, application no. 7, in column 6 in the same line as SEQ ID NO. 6510 is depicted, non-targeted is mentioned.

[47601] In an embodiment the present invention relates to an expresssion cassette comprising a) a promoter, preferably a promoter selected from the group consisting of Big35S, PCUbi, Super and USP, in particular p-PcUBI; and b) the nucleic acid SEQ ID NO. 74729, or a homolog or fragment thereof, or a homolog thereof being depicted in Table I, application no. 7, column 8, in the same line as SEQ ID NO. 74729, preferably the coding region thereof, a homolog or a fragment thereof; which are operable linked.

[47602] In an embodiment thereof the expression cassette comprises in addition c) a nucleic acid molecule encoding a transit peptide, especially a plastidal transit petide in case in Table I, application no. 7, in column 6 in the same line as SEQ ID NO. 74729 is depicted, plastidic is mentioned, or a mitochondrial transit peptide in case in Table I, application no. 7, in column 6 in the same line as SEQ ID NO. 74729 is depicted, mitochondric is mentioned; which is operable linked, too.

[47603] In another embodiment thereof the expression cassette does not comprise an additional transit peptide in case in Table I, application no. 7, in column 6 in the same line as SEQ ID NO. 74729 is depicted, non-targeted is mentioned.

[47604] In an embodiment the present invention relates to an expresssion cassette comprising a) a promoter, preferably a promoter selected from the group consisting of Big35S, PCUbi, Super and USP, in particular p-Super; and b) the nucleic acid SEQ ID NO. 34889, or a homolog or fragment thereof, or a homolog thereof being depicted in Table I, application no. 7, column 8, in the same line as SEQ ID NO. 34889, preferably the coding region thereof, a homolog or a fragment thereof; which are operable linked.

[47605] In an embodiment thereof the expression cassette comprises in addition c) a nucleic acid molecule encoding a transit peptide, especially a plastidal transit petide in case in Table I, application no. 7, in column 6 in the same line as SEQ ID NO. 34889 is depicted, plastidic is mentioned, or a mitochondrial transit peptide in case in Table I, application no. 7, in column 6 in the same line as SEQ ID NO. 34889 is depicted, mitochondric is mentioned; which is operable linked, too.

[47606] In another embodiment thereof the expression cassette does not comprise an additional transit peptide in case in Table I, application no. 7, in column 6 in the same line as SEQ ID NO. 34889 is depicted, non-targeted is mentioned.

[47607] In an embodiment the present invention relates to an expresssion cassette comprising a) a promoter, preferably a promoter selected from the group consisting of Big35S, PCUbi, Super and USP, in particular p-Super; and b) the nucleic acid SEQ ID NO. 35482, or a homolog or fragment thereof, or a homolog thereof being depicted in Table I, application no. 7, column 8, in the same line as SEQ ID NO. 35482, preferably the coding region thereof, a homolog or a fragment thereof; which are operable linked.

[47608] In an embodiment thereof the expression cassette comprises in addition c) a nucleic acid molecule encoding a transit peptide, especially a plastidal transit petide in case in Table I, application no. 7, in column 6 in the same line as SEQ ID NO. 35482 is depicted, plastidic is mentioned, or a mitochondrial transit peptide in case in Table I, application no. 7, in column 6 in the same line as SEQ ID NO. 35482 is depicted, mitochondric is mentioned; which is operable linked, too.

[47609] In another embodiment thereof the expression cassette does not comprise an additional transit peptide in case in Table I, application no. 7, in column 6 in the same line as SEQ ID NO. 35482 is depicted, non-targeted is mentioned.

[47610] In an embodiment the present invention relates to an expresssion cassette comprising a) a promoter, preferably a promoter selected from the group consisting of Big35S, PCUbi, Super and USP, in particular p-Super; and b) the nucleic acid SEQ ID NO. 7081, or a homolog or fragment thereof, or a homolog thereof being depicted in Table I, application no. 7, column 8, in the same line as SEQ ID NO. 7081, preferably the coding region thereof, a homolog or a fragment thereof; which are operable linked.

[47611] In an embodiment thereof the expression cassette comprises in addition c) a nucleic acid molecule encoding a transit peptide, especially a plastidal transit petide in case in Table I, application no. 7, in column 6 in the same line as SEQ ID NO. 7081 is depicted, plastidic is mentioned, or a mitochondrial transit peptide in case in Table I, application no. 7, in column 6 in the same line as SEQ ID NO. 7081 is depicted, mitochondric is mentioned; which is operable linked, too.

[47612] In another embodiment thereof the expression cassette does not comprise an additional transit peptide in case in Table I, application no. 7, in column 6 in the same line as SEQ ID NO. 7081 is depicted, non-targeted is mentioned.

[47613] In an embodiment the present invention relates to an expresssion cassette comprising a) a promoter, preferably a promoter selected from the group consisting of Big35S, PCUbi, Super and USP, in particular p-Super; and b) the nucleic acid SEQ ID NO. 111340, or a homolog or fragment thereof, or a homolog thereof being depicted in Table I, application no. 7, column 8, in the same line as SEQ ID NO. 111340, preferably the coding region thereof, a homolog or a fragment thereof; which are operable linked.

[47614] In an embodiment thereof the expression cassette comprises in addition c) a nucleic acid molecule encoding a transit peptide, especially a plastidal transit petide in case in Table I, application no. 7, in column 6 in the same line as SEQ ID NO. 111340 is depicted, plastidic is mentioned, or a mitochondrial transit peptide in case in Table I, application no. 7, in column 6 in the same line as SEQ ID NO. 111340 is depicted, mitochondric is mentioned; which is operable linked, too.

[47615] In another embodiment thereof the expression cassette does not comprise an additional transit peptide in case in Table I, application no. 7, in column 6 in the same line as SEQ ID NO. 111340 is depicted, non-targeted is mentioned.

[47616] In an embodiment the present invention relates to an expresssion cassette comprising a) a promoter, preferably a promoter selected from the group consisting of Big35S, PCUbi, Super and USP, in particular p-Super; and b) the nucleic acid SEQ ID NO. 7333, or a homolog or fragment thereof, or a homolog thereof being depicted in Table I, application no. 7, column 8, in the same line as SEQ ID NO. 7333, preferably the coding region thereof, a homolog or a fragment thereof; which are operable linked.

[47617] In an embodiment thereof the expression cassette comprises in addition c) a nucleic acid molecule encoding a transit peptide, especially a plastidal transit petide in case in Table I, application no. 7, in column 6 in the same line as SEQ ID NO. 7333 is depicted, plastidic is mentioned, or a mitochondrial transit peptide in case in Table I, application no. 7, in column 6 in the same line as SEQ ID NO. 7333 is depicted, mitochondric is mentioned; which is operable linked, too.

[47618] In another embodiment thereof the expression cassette does not comprise an additional transit peptide in case in Table I, application no. 7, in column 6 in the same line as SEQ ID NO. 7333 is depicted, non-targeted is mentioned.

[47619] In an embodiment the present invention relates to an expresssion cassette comprising a) a promoter, preferably a promoter selected from the group consisting of Big35S, PCUbi, Super and USP, in particular p-USP; and b) the nucleic acid SEQ ID NO. 75286, or a homolog or fragment thereof, or a homolog thereof being depicted in Table I, application no. 7, column 8, in the same line as SEQ ID NO. 75286, preferably the coding region thereof, a homolog or a fragment thereof; which are operable linked.

[47620] In an embodiment thereof the expression cassette comprises in addition c) a nucleic acid molecule encoding a transit peptide, especially a plastidal transit petide in case in Table I, application no. 7, in column 6 in the same line as SEQ ID NO. 75286 is depicted, plastidic is mentioned, or a mitochondrial transit peptide in case in Table I, application no. 7, in column 6 in the same line as SEQ ID NO. 75286 is depicted, mitochondric is mentioned; which is operable linked, too.

[47621] In another embodiment thereof the expression cassette does not comprise an additional transit peptide in case in Table I, application no. 7, in column 6 in the same line as SEQ ID NO. 75286 is depicted, non-targeted is mentioned.

[47622] In an embodiment the present invention relates to an expresssion cassette comprising a) a promoter, preferably a promoter selected from the group consisting of Big35S, PCUbi, Super and USP, in particular p-Super; and b) the nucleic acid SEQ ID NO. 7917, or a homolog or fragment thereof, or a homolog thereof being depicted in Table I, application no. 7, column 8, in the same line as SEQ ID NO. 7917, preferably the coding region thereof, a homolog or a fragment thereof; which are operable linked.

[47623] In an embodiment thereof the expression cassette comprises in addition c) a nucleic acid molecule encoding a transit peptide, especially a plastidal transit petide in case in Table I, application no. 7, in column 6 in the same line as SEQ ID NO. 7917 is depicted, plastidic is mentioned, or a mitochondrial transit peptide in case in Table I, application no. 7, in column 6 in the same line as SEQ ID NO. 7917 is depicted, mitochondric is mentioned; which is operable linked, too.

[47624] In another embodiment thereof the expression cassette does not comprise an additional transit peptide in case in Table I, application no. 7, in column 6 in the same line as SEQ ID NO. 7917 is depicted, non-targeted is mentioned.

[47625] In an embodiment the present invention relates to an expresssion cassette comprising a) a promoter, preferably a promoter selected from the group consisting of Big35S, PCUbi, Super and USP, in particular p-Super; and b) the nucleic acid SEQ ID NO. 37394, or a homolog or fragment thereof, or a homolog thereof being depicted in Table I, application no. 7, column 8, in the same line as SEQ ID NO. 37394, preferably the coding region thereof, a homolog or a fragment thereof; which are operable linked.

[47626] In an embodiment thereof the expression cassette comprises in addition c) a nucleic acid molecule encoding a transit peptide, especially a plastidal transit petide in case in Table I, application no. 7, in column 6 in the same line as SEQ ID NO. 37394 is depicted, plastidic is mentioned, or a mitochondrial transit peptide in case in Table I, application no. 7, in column 6 in the same line as SEQ ID NO. 37394 is depicted, mitochondric is mentioned; which is operable linked, too.

[47627] In another embodiment thereof the expression cassette does not comprise an additional transit peptide in case in Table I, application no. 7, in column 6 in the same line as SEQ ID NO. 37394 is depicted, non-targeted is mentioned.

[47628] In an embodiment the present invention relates to an expresssion cassette comprising a) a promoter, preferably a promoter selected from the group consisting of Big35S, PCUbi, Super and USP, in particular p-Super; and b) the nucleic acid SEQ ID NO. 111910, or a homolog or fragment thereof, or a homolog thereof being depicted in Table I, application no. 7, column 8, in the same line as SEQ ID NO. 111910, preferably the coding region thereof, a homolog or a fragment thereof; which are operable linked.

[47629] In an embodiment thereof the expression cassette comprises in addition c) a nucleic acid molecule encoding a transit peptide, especially a plastidal transit petide in case in Table I, application no. 7, in column 6 in the same line as SEQ ID NO. 111910 is depicted, plastidic is mentioned, or a mitochondrial transit peptide in case in Table I, application no. 7, in column 6 in the same line as SEQ ID NO. 111910 is depicted, mitochondric is mentioned; which is operable linked, too.

[47630] In another embodiment thereof the expression cassette does not comprise an additional transit peptide in case in Table I, application no. 7, in column 6 in the same line as SEQ ID NO. 111910 is depicted, non-targeted is mentioned.

[47631] In an embodiment the present invention relates to an expresssion cassette comprising a) a promoter, preferably a promoter selected from the group consisting of Big35S, PCUbi, Super and USP, in particular p-Super; and b) the nucleic acid SEQ ID NO. 112072, or a homolog or fragment thereof, or a homolog thereof being depicted in Table I, application no. 7, column 8, in the same line as SEQ ID NO. 112072, preferably the coding region thereof, a homolog or a fragment thereof; which are operable linked.

[47632] In an embodiment thereof the expression cassette comprises in addition c) a nucleic acid molecule encoding a transit peptide, especially a plastidal transit petide in case in Table I, application no. 7, in column 6 in the same line as SEQ ID NO. 112072 is depicted, plastidic is mentioned, or a mitochondrial transit peptide in case in Table I, application no. 7, in column 6 in the same line as SEQ ID NO. 112072 is depicted, mitochondric is mentioned; which is operable linked, too.

[47633] In another embodiment thereof the expression cassette does not comprise an additional transit peptide in case in Table I, application no. 7, in column 6 in the same line as SEQ ID NO. 112072 is depicted, non-targeted is mentioned.

[47634] In an embodiment the present invention relates to an expresssion cassette comprising a) a promoter, preferably a promoter selected from the group consisting of Big35S, PCUbi, Super and USP, in particular p-Super; and b) the nucleic acid SEQ ID NO. 112111, or a homolog or fragment thereof, or a homolog thereof being depicted in Table I, application no. 7, column 8, in the same line as SEQ ID NO. 112111, preferably the coding region thereof, a homolog or a fragment thereof; which are operable linked.

[47635] In an embodiment thereof the expression cassette comprises in addition c) a nucleic acid molecule encoding a transit peptide, especially a plastidal transit petide in case in Table I, application no. 7, in column 6 in the same line as SEQ ID NO. 112111 is depicted, plastidic is mentioned, or a mitochondrial transit peptide in case in Table I, application no. 7, in column 6 in the same line as SEQ ID NO. 112111 is depicted, mitochondric is mentioned; which is operable linked, too.

[47636] In another embodiment thereof the expression cassette does not comprise an additional transit peptide in case in Table I, application no. 7, in column 6 in the same line as SEQ ID NO. 112111 is depicted, non-targeted is mentioned.

[47637] In an embodiment the present invention relates to an expresssion cassette comprising a) a promoter, preferably a promoter selected from the group consisting of Big35S, PCUbi, Super and USP, in particular p-Super; and b) the nucleic acid SEQ ID NO. 77774, or a homolog or fragment thereof, or a homolog thereof being depicted in Table I, application no. 7, column 8, in the same line as SEQ ID NO. 77774, preferably the coding region thereof, a homolog or a fragment thereof; which are operable linked.

[47638] In an embodiment thereof the expression cassette comprises in addition c) a nucleic acid molecule encoding a transit peptide, especially a plastidal transit petide in case in Table I, application no. 7, in column 6 in the same line as SEQ ID NO. 77774 is depicted, plastidic is mentioned, or a mitochondrial transit peptide in case in Table I, application no. 7, in column 6 in the same line as SEQ ID NO. 77774 is depicted, mitochondric is mentioned; which is operable linked, too.

[47639] In another embodiment thereof the expression cassette does not comprise an additional transit peptide in case in Table I, application no. 7, in column 6 in the same line as SEQ ID NO. 77774 is depicted, non-targeted is mentioned.

[47640] In an embodiment the present invention relates to an expresssion cassette comprising a) a promoter, preferably a promoter selected from the group consisting of Big35S, PCUbi, Super and USP, in particular p-Super; and b) the nucleic acid SEQ ID NO. 7947, or a homolog or fragment thereof, or a homolog thereof being depicted in Table I, application no. 7, column 8, in the same line as SEQ ID NO. 7947, preferably the coding region thereof, a homolog or a fragment thereof; which are operable linked.

[47641] In an embodiment thereof the expression cassette comprises in addition c) a nucleic acid molecule encoding a transit peptide, especially a plastidal transit petide in case in Table I, application no. 7, in column 6 in the same line as SEQ ID NO. 7947 is depicted, plastidic is mentioned, or a mitochondrial transit peptide in case in Table I, application no. 7, in column 6 in the same line as SEQ ID NO. 7947 is depicted, mitochondric is mentioned; which is operable linked, too.

[47642] In another embodiment thereof the expression cassette does not comprise an additional transit peptide in case in Table I, application no. 7, in column 6 in the same line as SEQ ID NO. 7947 is depicted, non-targeted is mentioned.

[47643] In an embodiment the present invention relates to an expresssion cassette comprising a) a promoter, preferably a promoter selected from the group consisting of Big35S, PCUbi, Super and USP, in particular p-Super; and b) the nucleic acid SEQ ID NO. 38300, or a homolog or fragment thereof, or a homolog thereof being depicted in Table I, application no. 7, column 8, in the same line as SEQ ID NO. 38300, preferably the coding region thereof, a homolog or a fragment thereof; which are operable linked.

[47644] In an embodiment thereof the expression cassette comprises in addition c) a nucleic acid molecule encoding a transit peptide, especially a plastidal transit petide in case in Table I, application no. 7, in column 6 in the same line as SEQ ID NO. 38300 is depicted, plastidic is mentioned, or a mitochondrial transit peptide in case in Table I, application no. 7, in column 6 in the same line as SEQ ID NO. 38300 is depicted, mitochondric is mentioned; which is operable linked, too.

[47645] In another embodiment thereof the expression cassette does not comprise an additional transit peptide in case in Table I, application no. 7, in column 6 in the same line as SEQ ID NO. 38300 is depicted, non-targeted is mentioned.

[47646] In an embodiment the present invention relates to an expresssion cassette comprising a) a promoter, preferably a promoter selected from the group consisting of Big35S, PCUbi, Super and USP, in particular p-Super; and b) the nucleic acid SEQ ID NO. 7992, or a homolog or fragment thereof, or a homolog thereof being depicted in Table I, application no. 7, column 8, in the same line as SEQ ID NO. 7992, preferably the coding region thereof, a homolog or a fragment thereof; which are operable linked.

[47647] In an embodiment thereof the expression cassette comprises in addition c) a nucleic acid molecule encoding a transit peptide, especially a plastidal transit petide in case in Table I, application no. 7, in column 6 in the same line as SEQ ID NO. 7992 is depicted, plastidic is mentioned, or a mitochondrial transit peptide in case in Table I, application no. 7, in column 6 in the same line as SEQ ID NO. 7992 is depicted, mitochondric is mentioned; which is operable linked, too.

[47648] In another embodiment thereof the expression cassette does not comprise an additional transit peptide in case in Table I, application no. 7, in column 6 in the same line as SEQ ID NO. 7992 is depicted, non-targeted is mentioned.

[47649] In an embodiment the present invention relates to an expresssion cassette comprising a) a promoter, preferably a promoter selected from the group consisting of Big35S, PCUbi, Super and USP, in particular p-Super; and b) the nucleic acid SEQ ID NO. 79056, or a homolog or fragment thereof, or a homolog thereof being depicted in Table I, application no. 7, column 8, in the same line as SEQ ID NO. 79056, preferably the coding region thereof, a homolog or a fragment thereof; which are operable linked.

[47650] In an embodiment thereof the expression cassette comprises in addition c) a nucleic acid molecule encoding a transit peptide, especially a plastidal transit petide in case in Table I, application no. 7, in column 6 in the same line as SEQ ID NO. 79056 is depicted, plastidic is mentioned, or a mitochondrial transit peptide in case in Table I, application no. 7, in column 6 in the same line as SEQ ID NO. 79056 is depicted, mitochondric is mentioned; which is operable linked, too.

[47651] In another embodiment thereof the expression cassette does not comprise an additional transit peptide in case in Table I, application no. 7, in column 6 in the same line as SEQ ID NO. 79056 is depicted, non-targeted is mentioned.

[47652] In an embodiment the present invention relates to an expresssion cassette comprising a) a promoter, preferably a promoter selected from the group consisting of Big35S, PCUbi, Super and USP, in particular p-Super; and b) the nucleic acid SEQ ID NO. 112169, or a homolog or fragment thereof, or a homolog thereof being depicted in Table I, application no. 7, column 8, in the same line as SEQ ID NO. 112169, preferably the coding region thereof, a homolog or a fragment thereof; which are operable linked.

[47653] In an embodiment thereof the expression cassette comprises in addition c) a nucleic acid molecule encoding a transit peptide, especially a plastidal transit petide in case in Table I, application no. 7, in column 6 in the same line as SEQ ID NO. 112169 is depicted, plastidic is mentioned, or a mitochondrial transit peptide in case in Table I, application no. 7, in column 6 in the same line as SEQ ID NO. 112169 is depicted, mitochondric is mentioned; which is operable linked, too.

[47654] In another embodiment thereof the expression cassette does not comprise an additional transit peptide in case in Table I, application no. 7, in column 6 in the same line as SEQ ID NO. 112169 is depicted, non-targeted is mentioned.

[47655] In an embodiment the present invention relates to an expresssion cassette comprising a) a promoter, preferably a promoter selected from the group consisting of Big35S, PCUbi, Super and USP, in particular p-Super; and b) the nucleic acid SEQ ID NO. 79217, or a homolog or fragment thereof, or a homolog thereof being depicted in Table I, application no. 7, column 8, in the same line as SEQ ID NO. 79217, preferably the coding region thereof, a homolog or a fragment thereof; which are operable linked.

[47656] In an embodiment thereof the expression cassette comprises in addition c) a nucleic acid molecule encoding a transit peptide, especially a plastidal transit petide in case in Table I, application no. 7, in column 6 in the same line as SEQ ID NO. 79217 is depicted, plastidic is mentioned, or a mitochondrial transit peptide in case in Table I, application no. 7, in column 6 in the same line as SEQ ID NO. 79217 is depicted, mitochondric is mentioned; which is operable linked, too.

[47657] In another embodiment thereof the expression cassette does not comprise an additional transit peptide in case in Table I, application no. 7, in column 6 in the same line as SEQ ID NO. 79217 is depicted, non-targeted is mentioned.

[47658] In an embodiment the present invention relates to an expresssion cassette comprising a) a promoter, preferably a promoter selected from the group consisting of Big35S, PCUbi, Super and USP, in particular p-Super; and b) the nucleic acid SEQ ID NO. 112193, or a homolog or fragment thereof, or a homolog thereof being depicted in Table I, application no. 7, column 8, in the same line as SEQ ID NO. 112193, preferably the coding region thereof, a homolog or a fragment thereof; which are operable linked.

[47659] In an embodiment thereof the expression cassette comprises in addition c) a nucleic acid molecule encoding a transit peptide, especially a plastidal transit petide in case in Table I, application no. 7, in column 6 in the same line as SEQ ID NO. 112193 is depicted, plastidic is mentioned, or a mitochondrial transit peptide in case in Table I, application no. 7, in column 6 in the same line as SEQ ID NO. 112193 is depicted, mitochondric is mentioned; which is operable linked, too.

[47660] In another embodiment thereof the expression cassette does not comprise an additional transit peptide in case in Table I, application no. 7, in column 6 in the same line as SEQ ID NO. 112193 is depicted, non-targeted is mentioned.

[47661] In an embodiment the present invention relates to an expresssion cassette comprising a) a promoter, preferably a promoter selected from the group consisting of Big35S, PCUbi, Super and USP, in particular p-Super; and b) the nucleic acid SEQ ID NO. 39219, or a homolog or fragment thereof, or a homolog thereof being depicted in Table I, application no. 7, column 8, in the same line as SEQ ID NO. 39219, preferably the coding region thereof, a homolog or a fragment thereof; which are operable linked.

[47662] In an embodiment thereof the expression cassette comprises in addition c) a nucleic acid molecule encoding a transit peptide, especially a plastidal transit petide in case in Table I, application no. 7, in column 6 in the same line as SEQ ID NO. 39219 is depicted, plastidic is mentioned, or a mitochondrial transit peptide in case in Table I, application no. 7, in column 6 in the same line as SEQ ID NO. 39219 is depicted, mitochondric is mentioned; which is operable linked, too.

[47663] In another embodiment thereof the expression cassette does not comprise an additional transit peptide in case in Table I, application no. 7, in column 6 in the same line as SEQ ID NO. 39219 is depicted, non-targeted is mentioned.

[47664] In an embodiment the present invention relates to an expresssion cassette comprising a) a promoter, preferably a promoter selected from the group consisting of Big35S, PCUbi, Super and USP, in particular p-Super; and b) the nucleic acid SEQ ID NO. 99898, or a homolog or fragment thereof, or a homolog thereof being depicted in Table I, application no. 7, column 8, in the same line as SEQ ID NO. 99898, preferably the coding region thereof, a homolog or a fragment thereof; which are operable linked.

[47665] In an embodiment thereof the expression cassette comprises in addition c) a nucleic acid molecule encoding a transit peptide, especially a plastidal transit petide in case in Table I, application no. 7, in column 6 in the same line as SEQ ID NO. 99898 is depicted, plastidic is mentioned, or a mitochondrial transit peptide in case in Table I, application no. 7, in column 6 in the same line as SEQ ID NO. 99898 is depicted, mitochondric is mentioned; which is operable linked, too.

[47666] In another embodiment thereof the expression cassette does not comprise an additional transit peptide in case in Table I, application no. 7, in column 6 in the same line as SEQ ID NO. 99898 is depicted, non-targeted is mentioned.

[47667] In an embodiment the present invention relates to an expresssion cassette comprising a) a promoter, preferably a promoter selected from the group consisting of Big35S, PCUbi, Super and USP, in particular p-Super; and b) the nucleic acid SEQ ID NO. 40637, or a homolog or fragment thereof, or a homolog thereof being depicted in Table I, application no. 7, column 8, in the same line as SEQ ID NO. 40637, preferably the coding region thereof, a homolog or a fragment thereof; which are operable linked.

[47668] In an embodiment thereof the expression cassette comprises in addition c) a nucleic acid molecule encoding a transit peptide, especially a plastidal transit petide in case in Table I, application no. 7, in column 6 in the same line as SEQ ID NO. 40637 is depicted, plastidic is mentioned, or a mitochondrial transit peptide in case in Table I, application no. 7, in column 6 in the same line as SEQ ID NO. 40637 is depicted, mitochondric is mentioned; which is operable linked, too.

[47669] In another embodiment thereof the expression cassette does not comprise an additional transit peptide in case in Table I, application no. 7, in column 6 in the same line as SEQ ID NO. 40637 is depicted, non-targeted is mentioned.

[47670] In an embodiment the present invention relates to an expresssion cassette comprising a) a promoter, preferably a promoter selected from the group consisting of Big35S, PCUbi, Super and USP, in particular p-Super; and b) the nucleic acid SEQ ID NO. 40665, or a homolog or fragment thereof, or a homolog thereof being depicted in Table I, application no. 7, column 8, in the same line as SEQ ID NO. 40665, preferably the coding region thereof, a homolog or a fragment thereof; which are operable linked.

[47671] In an embodiment thereof the expression cassette comprises in addition c) a nucleic acid molecule encoding a transit peptide, especially a plastidal transit petide in case in Table I, application no. 7, in column 6 in the same line as SEQ ID NO. 40665 is depicted, plastidic is mentioned, or a mitochondrial transit peptide in case in Table I, application no. 7, in column 6 in the same line as SEQ ID NO. 40665 is depicted, mitochondric is mentioned; which is operable linked, too.

[47672] In another embodiment thereof the expression cassette does not comprise an additional transit peptide in case in Table I, application no. 7, in column 6 in the same line as SEQ ID NO. 40665 is depicted, non-targeted is mentioned.

[47673] In an embodiment the present invention relates to an expresssion cassette comprising a) a promoter, preferably a promoter selected from the group consisting of Big35S, PCUbi, Super and USP, in particular p-Super; and b) the nucleic acid SEQ ID NO. 9244, or a homolog or fragment thereof, or a homolog thereof being depicted in Table I, application no. 7, column 8, in the same line as SEQ ID NO. 9244, preferably the coding region thereof, a homolog or a fragment thereof; which are operable linked.

[47674] In an embodiment thereof the expression cassette comprises in addition c) a nucleic acid molecule encoding a transit peptide, especially a plastidal transit petide in case in Table I, application no. 7, in column 6 in the same line as SEQ ID NO. 9244 is depicted, plastidic is mentioned, or a mitochondrial transit peptide in case in Table I, application no. 7, in column 6 in the same line as SEQ ID NO. 9244 is depicted, mitochondric is mentioned; which is operable linked, too.

[47675] In another embodiment thereof the expression cassette does not comprise an additional transit peptide in case in Table I, application no. 7, in column 6 in the same line as SEQ ID NO. 9244 is depicted, non-targeted is mentioned.

[47676] In an embodiment the present invention relates to an expresssion cassette comprising a) a promoter, preferably a promoter selected from the group consisting of Big35S, PCUbi, Super and USP, in particular p-Super; and b) the nucleic acid SEQ ID NO. 80756, or a homolog or fragment thereof, or a homolog thereof being depicted in Table I, application no. 7, column 8, in the same line as SEQ ID NO. 80756, preferably the coding region thereof, a homolog or a fragment thereof; which are operable linked.

[47677] In an embodiment thereof the expression cassette comprises in addition c) a nucleic acid molecule encoding a transit peptide, especially a plastidal transit petide in case in Table I, application no. 7, in column 6 in the same line as SEQ ID NO. 80756 is depicted, plastidic is mentioned, or a mitochondrial transit peptide in case in Table I, application no. 7, in column 6 in the same line as SEQ ID NO. 80756 is depicted, mitochondric is mentioned; which is operable linked, too.

[47678] In another embodiment thereof the expression cassette does not comprise an additional transit peptide in case in Table I, application no. 7, in column 6 in the same line as SEQ ID NO. 80756 is depicted, non-targeted is mentioned.

[47679] In an embodiment the present invention relates to an expresssion cassette comprising a) a promoter, preferably a promoter selected from the group consisting of Big35S, PCUbi, Super and USP, in particular p-Super; and b) the nucleic acid SEQ ID NO. 40795, or a homolog or fragment thereof, or a homolog thereof being depicted in Table I, application no. 7, column 8, in the same line as SEQ ID NO. 40795, preferably the coding region thereof, a homolog or a fragment thereof; which are operable linked.

[47680] In an embodiment thereof the expression cassette comprises in addition c) a nucleic acid molecule encoding a transit peptide, especially a plastidal transit petide in case in Table I, application no. 7, in column 6 in the same line as SEQ ID NO. 40795 is depicted, plastidic is mentioned, or a mitochondrial transit peptide in case in Table I, application no. 7, in column 6 in the same line as SEQ ID NO. 40795 is depicted, mitochondric is mentioned; which is operable linked, too.

[47681] In another embodiment thereof the expression cassette does not comprise an additional transit peptide in case in Table I, application no. 7, in column 6 in the same line as SEQ ID NO. 40795 is depicted, non-targeted is mentioned.

[47682] In an embodiment the present invention relates to an expresssion cassette comprising a) a promoter, preferably a promoter selected from the group consisting of Big35S, PCUbi, Super and USP, in particular p-Super; and b) the nucleic acid SEQ ID NO. 81576, or a homolog or fragment thereof, or a homolog thereof being depicted in Table I, application no. 7, column 8, in the same line as SEQ ID NO. 81576, preferably the coding region thereof, a homolog or a fragment thereof; which are operable linked.

[47683] In an embodiment thereof the expression cassette comprises in addition c) a nucleic acid molecule encoding a transit peptide, especially a plastidal transit petide in case in Table I, application no. 7, in column 6 in the same line as SEQ ID NO. 81576 is depicted, plastidic is mentioned, or a mitochondrial transit peptide in case in Table I, application no. 7, in column 6 in the same line as SEQ ID NO. 81576 is depicted, mitochondric is mentioned; which is operable linked, too.

[47684] In another embodiment thereof the expression cassette does not comprise an additional transit peptide in case in Table I, application no. 7, in column 6 in the same line as SEQ ID NO. 81576 is depicted, non-targeted is mentioned.

[47685] In an embodiment the present invention relates to an expresssion cassette comprising a) a promoter, preferably a promoter selected from the group consisting of Big35S, PCUbi, Super and USP, in particular p-Super; and b) the nucleic acid SEQ ID NO. 112216, or a homolog or fragment thereof, or a homolog thereof being depicted in Table I, application no. 7, column 8, in the same line as SEQ ID NO. 112216, preferably the coding region thereof, a homolog or a fragment thereof; which are operable linked.

[47686] In an embodiment thereof the expression cassette comprises in addition c) a nucleic acid molecule encoding a transit peptide, especially a plastidal transit petide in case in Table I, application no. 7, in column 6 in the same line as SEQ ID NO. 112216 is depicted, plastidic is mentioned, or a mitochondrial transit peptide in case in Table I, application no. 7, in column 6 in the same line as SEQ ID NO. 112216 is depicted, mitochondric is mentioned; which is operable linked, too.

[47687] In another embodiment thereof the expression cassette does not comprise an additional transit peptide in case in Table I, application no. 7, in column 6 in the same line as SEQ ID NO. 112216 is depicted, non-targeted is mentioned.

[47688] In an embodiment the present invention relates to an expresssion cassette comprising a) a promoter, preferably a promoter selected from the group consisting of Big35S, PCUbi, Super and USP, in particular p-Super; and b) the nucleic acid SEQ ID NO. 112380, or a homolog or fragment thereof, or a homolog thereof being depicted in Table I, application no. 7, column 8, in the same line as SEQ ID NO. 112380, preferably the coding region thereof, a homolog or a fragment thereof; which are operable linked.

[47689] In an embodiment thereof the expression cassette comprises in addition c) a nucleic acid molecule encoding a transit peptide, especially a plastidal transit petide in case in Table I, application no. 7, in column 6 in the same line as SEQ ID NO. 112380 is depicted, plastidic is mentioned, or a mitochondrial transit peptide in case in Table I, application no. 7, in column 6 in the same line as SEQ ID NO. 112380 is depicted, mitochondric is mentioned; which is operable linked, too.

[47690] In another embodiment thereof the expression cassette does not comprise an additional transit peptide in case in Table I, application no. 7, in column 6 in the same line as SEQ ID NO. 112380 is depicted, non-targeted is mentioned.

[47691] In an embodiment the present invention relates to an expresssion cassette comprising a) a promoter, preferably a promoter selected from the group consisting of Big35S, PCUbi, Super and USP, in particular p-Super; and b) the nucleic acid SEQ ID NO. 112606, or a homolog or fragment thereof, or a homolog thereof being depicted in Table I, application no. 7, column 8, in the same line as SEQ ID NO. 112606, preferably the coding region thereof, a homolog or a fragment thereof; which are operable linked.

[47692] In an embodiment thereof the expression cassette comprises in addition c) a nucleic acid molecule encoding a transit peptide, especially a plastidal transit petide in case in Table I, application no. 7, in column 6 in the same line as SEQ ID NO. 112606 is depicted, plastidic is mentioned, or a mitochondrial transit peptide in case in Table I, application no. 7, in column 6 in the same line as SEQ ID NO. 112606 is depicted, mitochondric is mentioned; which is operable linked, too.

[47693] In another embodiment thereof the expression cassette does not comprise an additional transit peptide in case in Table I, application no. 7, in column 6 in the same line as SEQ ID NO. 112606 is depicted, non-targeted is mentioned.

[47694] In an embodiment the present invention relates to an expresssion cassette comprising a) a promoter, preferably a promoter selected from the group consisting of Big35S, PCUbi, Super and USP, in particular p-Super; and b) the nucleic acid SEQ ID NO. 112634, or a homolog or fragment thereof, or a homolog thereof being depicted in Table I, application no. 7, column 8, in the same line as SEQ ID NO. 112634, preferably the coding region thereof, a homolog or a fragment thereof; which are operable linked.

[47695] In an embodiment thereof the expression cassette comprises in addition c) a nucleic acid molecule encoding a transit peptide, especially a plastidal transit petide in case in Table I, application no. 7, in column 6 in the same line as SEQ ID NO. 112634 is depicted, plastidic is mentioned, or a mitochondrial transit peptide in case in Table I, application no. 7, in column 6 in the same line as SEQ ID NO. 112634 is depicted, mitochondric is mentioned; which is operable linked, too.

[47696] In another embodiment thereof the expression cassette does not comprise an additional transit peptide in case in Table I, application no. 7, in column 6 in the same line as SEQ ID NO. 112634 is depicted, non-targeted is mentioned.

[47697] In an embodiment the present invention relates to an expresssion cassette comprising a) a promoter, preferably a promoter selected from the group consisting of Big35S, PCUbi, Super and USP, in particular p-USP; and b) the nucleic acid SEQ ID NO. 44223, or a homolog or fragment thereof, or a homolog thereof being depicted in Table I, application no. 7, column 8, in the same line as SEQ ID NO. 44223, preferably the coding region thereof, a homolog or a fragment thereof; which are operable linked.

[47698] In an embodiment thereof the expression cassette comprises in addition c) a nucleic acid molecule encoding a transit peptide, especially a plastidal transit petide in case in Table I, application no. 7, in column 6 in the same line as SEQ ID NO. 44223 is depicted, plastidic is mentioned, or a mitochondrial transit peptide in case in Table I, application no. 7, in column 6 in the same line as SEQ ID NO. 44223 is depicted, mitochondric is mentioned; which is operable linked, too.

[47699] In another embodiment thereof the expression cassette does not comprise an additional transit peptide in case in Table I, application no. 7, in column 6 in the same line as SEQ ID NO. 44223 is depicted, non-targeted is mentioned.

[47700] In an embodiment the present invention relates to an expresssion cassette comprising a) a promoter, preferably a promoter selected from the group consisting of Big35S, PCUbi, Super and USP, in particular p-Super; and b) the nucleic acid SEQ ID NO. 44372, or a homolog or fragment thereof, or a homolog thereof being depicted in Table I, application no. 7, column 8, in the same line as SEQ ID NO. 44372, preferably the coding region thereof, a homolog or a fragment thereof; which are operable linked.

[47701] In an embodiment thereof the expression cassette comprises in addition c) a nucleic acid molecule encoding a transit peptide, especially a plastidal transit petide in case in Table I, application no. 7, in column 6 in the same line as SEQ ID NO. 44372 is depicted, plastidic is mentioned, or a mitochondrial transit peptide in case in Table I, application no. 7, in column 6 in the same line as SEQ ID NO. 44372 is depicted, mitochondric is mentioned; which is operable linked, too.

[47702] In another embodiment thereof the expression cassette does not comprise an additional transit peptide in case in Table I, application no. 7, in column 6 in the same line as SEQ ID NO. 44372 is depicted, non-targeted is mentioned.

[47703] In an embodiment the present invention relates to an expresssion cassette comprising a) a promoter, preferably a promoter selected from the group consisting of Big35S, PCUbi, Super and USP, in particular p-Super; and b) the nucleic acid SEQ ID NO. 10740, or a homolog or fragment thereof, or a homolog thereof being depicted in Table I, application no. 7, column 8, in the same line as SEQ ID NO. 10740, preferably the coding region thereof, a homolog or a fragment thereof; which are operable linked.

[47704] In an embodiment thereof the expression cassette comprises in addition c) a nucleic acid molecule encoding a transit peptide, especially a plastidal transit petide in case in Table I, application no. 7, in column 6 in the same line as SEQ ID NO. 10740 is depicted, plastidic is mentioned, or a mitochondrial transit peptide in case in Table I, application no. 7, in column 6 in the same line as SEQ ID NO. 10740 is depicted, mitochondric is mentioned; which is operable linked, too.

[47705] In another embodiment thereof the expression cassette does not comprise an additional transit peptide in case in Table I, application no. 7, in column 6 in the same line as SEQ ID NO. 10740 is depicted, non-targeted is mentioned.

[47706] In an embodiment the present invention relates to an expresssion cassette comprising a) a promoter, preferably a promoter selected from the group consisting of Big35S, PCUbi, Super and USP, in particular p-Super; and b) the nucleic acid SEQ ID NO. 106532, or a homolog or fragment thereof, or a homolog thereof being depicted in Table I, application no. 7, column 8, in the same line as SEQ ID NO. 106532, preferably the coding region thereof, a homolog or a fragment thereof; which are operable linked.

[47707] In an embodiment thereof the expression cassette comprises in addition c) a nucleic acid molecule encoding a transit peptide, especially a plastidal transit petide in case in Table I, application no. 7, in column 6 in the same line as SEQ ID NO. 106532 is depicted, plastidic is mentioned, or a mitochondrial transit peptide in case in Table I, application no. 7, in column 6 in the same line as SEQ ID NO. 106532 is depicted, mitochondric is mentioned; which is operable linked, too.

[47708] In another embodiment thereof the expression cassette does not comprise an additional transit peptide in case in Table I, application no. 7, in column 6 in the same line as SEQ ID NO. 106532 is depicted, non-targeted is mentioned.

[47709] In an embodiment the present invention relates to an expresssion cassette comprising a) a promoter, preferably a promoter selected from the group consisting of Big35S, PCUbi, Super and USP, in particular p-Super; and b) the nucleic acid SEQ ID NO. 94542, or a homolog or fragment thereof, or a homolog thereof being depicted in Table I, application no. 7, column 8, in the same line as SEQ ID NO. 94542, preferably the coding region thereof, a homolog or a fragment thereof; which are operable linked.

[47710] In an embodiment thereof the expression cassette comprises in addition c) a nucleic acid molecule encoding a transit peptide, especially a plastidal transit petide in case in Table I, application no. 7, in column 6 in the same line as SEQ ID NO. 94542 is depicted, plastidic is mentioned, or a mitochondrial transit peptide in case in Table I, application no. 7, in column 6 in the same line as SEQ ID NO. 94542 is depicted, mitochondric is mentioned; which is operable linked, too.

[47711] In another embodiment thereof the expression cassette does not comprise an additional transit peptide in case in Table I, application no. 7, in column 6 in the same line as SEQ ID NO. 94542 is depicted, non-targeted is mentioned.

[47712] In an embodiment the present invention relates to an expresssion cassette comprising a) a promoter, preferably a promoter selected from the group consisting of Big35S, PCUbi, Super and USP, in particular p-Super; and b) the nucleic acid SEQ ID NO. 45321, or a homolog or fragment thereof, or a homolog thereof being depicted in Table I, application no. 7, column 8, in the same line as SEQ ID NO. 45321, preferably the coding region thereof, a homolog or a fragment thereof; which are operable linked.

[47713] In an embodiment thereof the expression cassette comprises in addition c) a nucleic acid molecule encoding a transit peptide, especially a plastidal transit petide in case in Table I, application no. 7, in column 6 in the same line as SEQ ID NO. 45321 is depicted, plastidic is mentioned, or a mitochondrial transit peptide in case in Table I, application no. 7, in column 6 in the same line as SEQ ID NO. 45321 is depicted, mitochondric is mentioned; which is operable linked, too.

[47714] In another embodiment thereof the expression cassette does not comprise an additional transit peptide in case in Table I, application no. 7, in column 6 in the same line as SEQ ID NO. 45321 is depicted, non-targeted is mentioned.

[47715] In an embodiment the present invention relates to an expresssion cassette comprising a) a promoter, preferably a promoter selected from the group consisting of Big35S, PCUbi, Super and USP, in particular p-Super; and b) the nucleic acid SEQ ID NO. 45394, or a homolog or fragment thereof, or a homolog thereof being depicted in Table I, application no. 7, column 8, in the same line as SEQ ID NO. 45394, preferably the coding region thereof, a homolog or a fragment thereof; which are operable linked.

[47716] In an embodiment thereof the expression cassette comprises in addition c) a nucleic acid molecule encoding a transit peptide, especially a plastidal transit petide in case in Table I, application no. 7, in column 6 in the same line as SEQ ID NO. 45394 is depicted, plastidic is mentioned, or a mitochondrial transit peptide in case in Table I, application no. 7, in column 6 in the same line as SEQ ID NO. 45394 is depicted, mitochondric is mentioned; which is operable linked, too.

[47717] In another embodiment thereof the expression cassette does not comprise an additional transit peptide in case in Table I, application no. 7, in column 6 in the same line as SEQ ID NO. 45394 is depicted, non-targeted is mentioned.

[47718] In an embodiment the present invention relates to an expresssion cassette comprising a) a promoter, preferably a promoter selected from the group consisting of Big35S, PCUbi, Super and USP, in particular p-Super; and b) the nucleic acid SEQ ID NO. 45757, or a homolog or fragment thereof, or a homolog thereof being depicted in Table I, application no. 7, column 8, in the same line as SEQ ID NO. 45757, preferably the coding region thereof, a homolog or a fragment thereof; which are operable linked.

[47719] In an embodiment thereof the expression cassette comprises in addition c) a nucleic acid molecule encoding a transit peptide, especially a plastidal transit petide in case in Table I, application no. 7, in column 6 in the same line as SEQ ID NO. 45757 is depicted, plastidic is mentioned, or a mitochondrial transit peptide in case in Table I, application no. 7, in column 6 in the same line as SEQ ID NO. 45757 is depicted, mitochondric is mentioned; which is operable linked, too.

[47720] In another embodiment thereof the expression cassette does not comprise an additional transit peptide in case in Table I, application no. 7, in column 6 in the same line as SEQ ID NO. 45757 is depicted, non-targeted is mentioned.

[47721] In an embodiment the present invention relates to an expresssion cassette comprising a) a promoter, preferably a promoter selected from the group consisting of Big35S, PCUbi, Super and USP, in particular p-PcUBI; and b) the nucleic acid SEQ ID NO. 10811, or a homolog or fragment thereof, or a homolog thereof being depicted in Table I, application no. 7, column 8, in the same line as SEQ ID NO. 10811, preferably the coding region thereof, a homolog or a fragment thereof; which are operable linked.

[47722] In an embodiment thereof the expression cassette comprises in addition c) a nucleic acid molecule encoding a transit peptide, especially a plastidal transit petide in case in Table I, application no. 7, in column 6 in the same line as SEQ ID NO. 10811 is depicted, plastidic is mentioned, or a mitochondrial transit peptide in case in Table I, application no. 7, in column 6 in the same line as SEQ ID NO. 10811 is depicted, mitochondric is mentioned; which is operable linked, too.

[47723] In another embodiment thereof the expression cassette does not comprise an additional transit peptide in case in Table I, application no. 7, in column 6 in the same line as SEQ ID NO. 10811 is depicted, non-targeted is mentioned.

[47724] In an embodiment the present invention relates to an expresssion cassette comprising a) a promoter, preferably a promoter selected from the group consisting of Big35S, PCUbi, Super and USP, in particular p-PcUBI; and b) the nucleic acid SEQ ID NO. 84198, or a homolog or fragment thereof, or a homolog thereof being depicted in Table I, application no. 7, column 8, in the same line as SEQ ID NO. 84198, preferably the coding region thereof, a homolog or a fragment thereof; which are operable linked.

[47725] In an embodiment thereof the expression cassette comprises in addition c) a nucleic acid molecule encoding a transit peptide, especially a plastidal transit petide in case in Table I, application no. 7, in column 6 in the same line as SEQ ID NO. 84198 is depicted, plastidic is mentioned, or a mitochondrial transit peptide in case in Table I, application no. 7, in column 6 in the same line as SEQ ID NO. 84198 is depicted, mitochondric is mentioned; which is operable linked, too.

[47726] In another embodiment thereof the expression cassette does not comprise an additional transit peptide in case in Table I, application no. 7, in column 6 in the same line as SEQ ID NO. 84198 is depicted, non-targeted is mentioned.

[47727] In an embodiment the present invention relates to an expresssion cassette comprising a) a promoter, preferably a promoter selected from the group consisting of Big35S, PCUbi, Super and USP, in particular p-PcUBI; and b) the nucleic acid SEQ ID NO. 49828, or a homolog or fragment thereof, or a homolog thereof being depicted in Table I, application no. 7, column 8, in the same line as SEQ ID NO. 49828, preferably the coding region thereof, a homolog or a fragment thereof; which are operable linked.

[47728] In an embodiment thereof the expression cassette comprises in addition c) a nucleic acid molecule encoding a transit peptide, especially a plastidal transit petide in case in Table I, application no. 7, in column 6 in the same line as SEQ ID NO. 49828 is depicted, plastidic is mentioned, or a mitochondrial transit peptide in case in Table I, application no. 7, in column 6 in the same line as SEQ ID NO. 49828 is depicted, mitochondric is mentioned; which is operable linked, too.

[47729] In another embodiment thereof the expression cassette does not comprise an additional transit peptide in case in Table I, application no. 7, in column 6 in the same line as SEQ ID NO. 49828 is depicted, non-targeted is mentioned.

[47730] In an embodiment the present invention relates to an expresssion cassette comprising a) a promoter, preferably a promoter selected from the group consisting of Big35S, PCUbi, Super and USP, in particular p-PcUBI; and b) the nucleic acid SEQ ID NO. 112661, or a homolog or fragment thereof, or a homolog thereof being depicted in Table I, application no. 7, column 8, in the same line as SEQ ID NO. 112661, preferably the coding region thereof, a homolog or a fragment thereof; which are operable linked.

[47731] In an embodiment thereof the expression cassette comprises in addition c) a nucleic acid molecule encoding a transit peptide, especially a plastidal transit petide in case in Table I, application no. 7, in column 6 in the same line as SEQ ID NO. 112661 is depicted, plastidic is mentioned, or a mitochondrial transit peptide in case in Table I, application no. 7, in column 6 in the same line as SEQ ID NO. 112661 is depicted, mitochondric is mentioned; which is operable linked, too.

[47732] In another embodiment thereof the expression cassette does not comprise an additional transit peptide in case in Table I, application no. 7, in column 6 in the same line as SEQ ID NO. 112661 is depicted, non-targeted is mentioned.

[47733] In an embodiment the present invention relates to an expresssion cassette comprising a) a promoter, preferably a promoter selected from the group consisting of Big35S, PCUbi, Super and USP, in particular p-PcUBI; and b) the nucleic acid SEQ ID NO. 53189, or a homolog or fragment thereof, or a homolog thereof being depicted in Table I, application no. 7, column 8, in the same line as SEQ ID NO. 53189, preferably the coding region thereof, a homolog or a fragment thereof; which are operable linked.

[47734] In an embodiment thereof the expression cassette comprises in addition c) a nucleic acid molecule encoding a transit peptide, especially a plastidal transit petide in case in Table I, application no. 7, in column 6 in the same line as SEQ ID NO. 53189 is depicted, plastidic is mentioned, or a mitochondrial transit peptide in case in Table I, application no. 7, in column 6 in the same line as SEQ ID NO. 53189 is depicted, mitochondric is mentioned; which is operable linked, too.

[47735] In another embodiment thereof the expression cassette does not comprise an additional transit peptide in case in Table I, application no. 7, in column 6 in the same line as SEQ ID NO. 53189 is depicted, non-targeted is mentioned.

[47736] In an embodiment the present invention relates to an expresssion cassette comprising a) a promoter, preferably a promoter selected from the group consisting of Big35S, PCUbi, Super and USP, in particular p-PcUBI; and b) the nucleic acid SEQ ID NO. 55379, or a homolog or fragment thereof, or a homolog thereof being depicted in Table I, application no. 7, column 8, in the same line as SEQ ID NO. 55379, preferably the coding region thereof, a homolog or a fragment thereof; which are operable linked.

[47737] In an embodiment thereof the expression cassette comprises in addition c) a nucleic acid molecule encoding a transit peptide, especially a plastidal transit petide in case in Table I, application no. 7, in column 6 in the same line as SEQ ID NO. 55379 is depicted, plastidic is mentioned, or a mitochondrial transit peptide in case in Table I, application no. 7, in column 6 in the same line as SEQ ID NO. 55379 is depicted, mitochondric is mentioned; which is operable linked, too.

[47738] In another embodiment thereof the expression cassette does not comprise an additional transit peptide in case in Table I, application no. 7, in column 6 in the same line as SEQ ID NO. 55379 is depicted, non-targeted is mentioned.

[47739] In an embodiment the present invention relates to an expresssion cassette comprising a) a promoter, preferably a promoter selected from the group consisting of Big35S, PCUbi, Super and USP, in particular p-PcUBI; and b) the nucleic acid SEQ ID NO. 85808, or a homolog or fragment thereof, or a homolog thereof being depicted in Table I, application no. 7, column 8, in the same line as SEQ ID NO. 85808, preferably the coding region thereof, a homolog or a fragment thereof; which are operable linked.

[47740] In an embodiment thereof the expression cassette comprises in addition c) a nucleic acid molecule encoding a transit peptide, especially a plastidal transit petide in case in Table I, application no. 7, in column 6 in the same line as SEQ ID NO. 85808 is depicted, plastidic is mentioned, or a mitochondrial transit peptide in case in Table I, application no. 7, in column 6 in the same line as SEQ ID NO. 85808 is depicted, mitochondric is mentioned; which is operable linked, too.

[47741] In another embodiment thereof the expression cassette does not comprise an additional transit peptide in case in Table I, application no. 7, in column 6 in the same line as SEQ ID NO. 85808 is depicted, non-targeted is mentioned.

[47742] In an embodiment the present invention relates to an expresssion cassette comprising a) a promoter, preferably a promoter selected from the group consisting of Big35S, PCUbi, Super and USP, in particular p-PcUBI; and b) the nucleic acid SEQ ID NO. 86540, or a homolog or fragment thereof, or a homolog thereof being depicted in Table I, application no. 7, column 8, in the same line as SEQ ID NO. 86540, preferably the coding region thereof, a homolog or a fragment thereof; which are operable linked.

[47743] In an embodiment thereof the expression cassette comprises in addition c) a nucleic acid molecule encoding a transit peptide, especially a plastidal transit petide in case in Table I, application no. 7, in column 6 in the same line as SEQ ID NO. 86540 is depicted, plastidic is mentioned, or a mitochondrial transit peptide in case in Table I, application no. 7, in column 6 in the same line as SEQ ID NO. 86540 is depicted, mitochondric is mentioned; which is operable linked, too.

[47744] In another embodiment thereof the expression cassette does not comprise an additional transit peptide in case in Table I, application no. 7, in column 6 in the same line as SEQ ID NO. 86540 is depicted, non-targeted is mentioned.

[47745] In an embodiment the present invention relates to an expresssion cassette comprising a) a promoter, preferably a promoter selected from the group consisting of Big35S, PCUbi, Super and USP, in particular p-PcUBI; and b) the nucleic acid SEQ ID NO. 87397, or a homolog or fragment thereof, or a homolog thereof being depicted in Table I, application no. 7, column 8, in the same line as SEQ ID NO. 87397, preferably the coding region thereof, a homolog or a fragment thereof; which are operable linked.

[47746] In an embodiment thereof the expression cassette comprises in addition c) a nucleic acid molecule encoding a transit peptide, especially a plastidal transit petide in case in Table I, application no. 7, in column 6 in the same line as SEQ ID NO. 87397 is depicted, plastidic is mentioned, or a mitochondrial transit peptide in case in Table I, application no. 7, in column 6 in the same line as SEQ ID NO. 87397 is depicted, mitochondric is mentioned; which is operable linked, too.

[47747] In another embodiment thereof the expression cassette does not comprise an additional transit peptide in case in Table I, application no. 7, in column 6 in the same line as SEQ ID NO. 87397 is depicted, non-targeted is mentioned.

[47748] In an embodiment the present invention relates to an expresssion cassette comprising a) a promoter, preferably a promoter selected from the group consisting of Big35S, PCUbi, Super and USP, in particular p-PcUBI; and b) the nucleic acid SEQ ID NO. 57235, or a homolog or fragment thereof, or a homolog thereof being depicted in Table I, application no. 7, column 8, in the same line as SEQ ID NO. 57235, preferably the coding region thereof, a homolog or a fragment thereof; which are operable linked.

[47749] In an embodiment thereof the expression cassette comprises in addition c) a nucleic acid molecule encoding a transit peptide, especially a plastidal transit petide in case in Table I, application no. 7, in column 6 in the same line as SEQ ID NO. 57235 is depicted, plastidic is mentioned, or a mitochondrial transit peptide in case in Table I, application no. 7, in column 6 in the same line as SEQ ID NO. 57235 is depicted, mitochondric is mentioned; which is operable linked, too.

[47750] In another embodiment thereof the expression cassette does not comprise an additional transit peptide in case in Table I, application no. 7, in column 6 in the same line as SEQ ID NO. 57235 is depicted, non-targeted is mentioned.

[47751] In an embodiment the present invention relates to an expresssion cassette comprising a) a promoter, preferably a promoter selected from the group consisting of Big35S, PCUbi, Super and USP, in particular p-PcUBI; and b) the nucleic acid SEQ ID NO. 58590, or a homolog or fragment thereof, or a homolog thereof being depicted in Table I, application no. 7, column 8, in the same line as SEQ ID NO. 58590, preferably the coding region thereof, a homolog or a fragment thereof; which are operable linked.

[47752] In an embodiment thereof the expression cassette comprises in addition c) a nucleic acid molecule encoding a transit peptide, especially a plastidal transit petide in case in Table I, application no. 7, in column 6 in the same line as SEQ ID NO. 58590 is depicted, plastidic is mentioned, or a mitochondrial transit peptide in case in Table I, application no. 7, in column 6 in the same line as SEQ ID NO. 58590 is depicted, mitochondric is mentioned; which is operable linked, too.

[47753] In another embodiment thereof the expression cassette does not comprise an additional transit peptide in case in Table I, application no. 7, in column 6 in the same line as SEQ ID NO. 58590 is depicted, non-targeted is mentioned.

[47754] In an embodiment the present invention relates to an expresssion cassette comprising a) a promoter, preferably a promoter selected from the group consisting of Big35S, PCUbi, Super and USP, in particular p-PcUBI; and b) the nucleic acid SEQ ID NO. 58731, or a homolog or fragment thereof, or a homolog thereof being depicted in Table I, application no. 7, column 8, in the same line as SEQ ID NO. 58731, preferably the coding region thereof, a homolog or a fragment thereof; which are operable linked.

[47755] In an embodiment thereof the expression cassette comprises in addition c) a nucleic acid molecule encoding a transit peptide, especially a plastidal transit petide in case in Table I, application no. 7, in column 6 in the same line as SEQ ID NO. 58731 is depicted, plastidic is mentioned, or a mitochondrial transit peptide in case in Table I, application no. 7, in column 6 in the same line as SEQ ID NO. 58731 is depicted, mitochondric is mentioned; which is operable linked, too.

[47756] In another embodiment thereof the expression cassette does not comprise an additional transit peptide in case in Table I, application no. 7, in column 6 in the same line as SEQ ID NO. 58731 is depicted, non-targeted is mentioned.

[47757] In an embodiment the present invention relates to an expresssion cassette comprising a) a promoter, preferably a promoter selected from the group consisting of Big35S, PCUbi, Super and USP, in particular p-PcUBI; and b) the nucleic acid SEQ ID NO. 58823, or a homolog or fragment thereof, or a homolog thereof being depicted in Table I, application no. 7, column 8, in the same line as SEQ ID NO. 58823, preferably the coding region thereof, a homolog or a fragment thereof; which are operable linked.

[47758] In an embodiment thereof the expression cassette comprises in addition c) a nucleic acid molecule encoding a transit peptide, especially a plastidal transit petide in case in Table I, application no. 7, in column 6 in the same line as SEQ ID NO. 58823 is depicted, plastidic is mentioned, or a mitochondrial transit peptide in case in Table I, application no. 7, in column 6 in the same line as SEQ ID NO. 58823 is depicted, mitochondric is mentioned; which is operable linked, too.

[47759] In another embodiment thereof the expression cassette does not comprise an additional transit peptide in case in Table I, application no. 7, in column 6 in the same line as SEQ ID NO. 58823 is depicted, non-targeted is mentioned.

[47760] In an embodiment the present invention relates to an expresssion cassette comprising a) a promoter, preferably a promoter selected from the group consisting of Big35S, PCUbi, Super and USP, in particular p-PcUBI; and b) the nucleic acid SEQ ID NO. 12140, or a homolog or fragment thereof, or a homolog thereof being depicted in Table I, application no. 7, column 8, in the same line as SEQ ID NO. 12140, preferably the coding region thereof, a homolog or a fragment thereof; which are operable linked.

[47761] In an embodiment thereof the expression cassette comprises in addition c) a nucleic acid molecule encoding a transit peptide, especially a plastidal transit petide in case in Table I, application no. 7, in column 6 in the same line as SEQ ID NO. 12140 is depicted, plastidic is mentioned, or a mitochondrial transit peptide in case in Table I, application no. 7, in column 6 in the same line as SEQ ID NO. 12140 is depicted, mitochondric is mentioned; which is operable linked, too.

[47762] In another embodiment thereof the expression cassette does not comprise an additional transit peptide in case in Table I, application no. 7, in column 6 in the same line as SEQ ID NO. 12140 is depicted, non-targeted is mentioned.

[47763] In an embodiment the present invention relates to an expresssion cassette comprising a) a promoter, preferably a promoter selected from the group consisting of Big35S, PCUbi, Super and USP, in particular p-PcUBI; and b) the nucleic acid SEQ ID NO. 113038, or a homolog or fragment thereof, or a homolog thereof being depicted in Table I, application no. 7, column 8, in the same line as SEQ ID NO. 113038, preferably the coding region thereof, a homolog or a fragment thereof; which are operable linked.

[47764] In an embodiment thereof the expression cassette comprises in addition c) a nucleic acid molecule encoding a transit peptide, especially a plastidal transit petide in case in Table I, application no. 7, in column 6 in the same line as SEQ ID NO. 113038 is depicted, plastidic is mentioned, or a mitochondrial transit peptide in case in Table I, application no. 7, in column 6 in the same line as SEQ ID NO. 113038 is depicted, mitochondric is mentioned; which is operable linked, too.

[47765] In another embodiment thereof the expression cassette does not comprise an additional transit peptide in case in Table I, application no. 7, in column 6 in the same line as SEQ ID NO. 113038 is depicted, non-targeted is mentioned.

[47766] In an embodiment the present invention relates to an expresssion cassette comprising a) a promoter, preferably a promoter selected from the group consisting of Big35S, PCUbi, Super and USP, in particular p-PcUBI; and b) the nucleic acid SEQ ID NO. 12698, or a homolog or fragment thereof, or a homolog thereof being depicted in Table I, application no. 7, column 8, in the same line as SEQ ID NO. 12698, preferably the coding region thereof, a homolog or a fragment thereof; which are operable linked.

[47767] In an embodiment thereof the expression cassette comprises in addition c) a nucleic acid molecule encoding a transit peptide, especially a plastidal transit petide in case in Table I, application no. 7, in column 6 in the same line as SEQ ID NO. 12698 is depicted, plastidic is mentioned, or a mitochondrial transit peptide in case in Table I, application no. 7, in column 6 in the same line as SEQ ID NO. 12698 is depicted, mitochondric is mentioned; which is operable linked, too.

[47768] In another embodiment thereof the expression cassette does not comprise an additional transit peptide in case in Table I, application no. 7, in column 6 in the same line as SEQ ID NO. 12698 is depicted, non-targeted is mentioned.

[47769] In an embodiment the present invention relates to an expresssion cassette comprising a) a promoter, preferably a promoter selected from the group consisting of Big35S, PCUbi, Super and USP, in particular p-PcUBI; and b) the nucleic acid SEQ ID NO. 61723, or a homolog or fragment thereof, or a homolog thereof being depicted in Table I, application no. 7, column 8, in the same line as SEQ ID NO. 61723, preferably the coding region thereof, a homolog or a fragment thereof; which are operable linked.

[47770] In an embodiment thereof the expression cassette comprises in addition c) a nucleic acid molecule encoding a transit peptide, especially a plastidal transit petide in case in Table I, application no. 7, in column 6 in the same line as SEQ ID NO. 61723 is depicted, plastidic is mentioned, or a mitochondrial transit peptide in case in Table I, application no. 7, in column 6 in the same line as SEQ ID NO. 61723 is depicted, mitochondric is mentioned; which is operable linked, too.

[47771] In another embodiment thereof the expression cassette does not comprise an additional transit peptide in case in Table I, application no. 7, in column 6 in the same line as SEQ ID NO. 61723 is depicted, non-targeted is mentioned.

[47772] In an embodiment the present invention relates to an expresssion cassette comprising a) a promoter, preferably a promoter selected from the group consisting of Big35S, PCUbi, Super and USP, in particular p-PcUBI; and b) the nucleic acid SEQ ID NO. 62079, or a homolog or fragment thereof, or a homolog thereof being depicted in Table I, application no. 7, column 8, in the same line as SEQ ID NO. 62079, preferably the coding region thereof, a homolog or a fragment thereof; which are operable linked.

[47773] In an embodiment thereof the expression cassette comprises in addition c) a nucleic acid molecule encoding a transit peptide, especially a plastidal transit petide in case in Table I, application no. 7, in column 6 in the same line as SEQ ID NO. 62079 is depicted, plastidic is mentioned, or a mitochondrial transit peptide in case in Table I, application no. 7, in column 6 in the same line as SEQ ID NO. 62079 is depicted, mitochondric is mentioned; which is operable linked, too.

[47774] In another embodiment thereof the expression cassette does not comprise an additional transit peptide in case in Table I, application no. 7, in column 6 in the same line as SEQ ID NO. 62079 is depicted, non-targeted is mentioned.

[47775] In an embodiment the present invention relates to an expresssion cassette comprising a) a promoter, preferably a promoter selected from the group consisting of Big35S, PCUbi, Super and USP, in particular p-PcUBI; and b) the nucleic acid SEQ ID NO. 12974, or a homolog or fragment thereof, or a homolog thereof being depicted in Table I, application no. 7, column 8, in the same line as SEQ ID NO. 12974, preferably the coding region thereof, a homolog or a fragment thereof; which are operable linked.

[47776] In an embodiment thereof the expression cassette comprises in addition c) a nucleic acid molecule encoding a transit peptide, especially a plastidal transit petide in case in Table I, application no. 7, in column 6 in the same line as SEQ ID NO. 12974 is depicted, plastidic is mentioned, or a mitochondrial transit peptide in case in Table I, application no. 7, in column 6 in the same line as SEQ ID NO. 12974 is depicted, mitochondric is mentioned; which is operable linked, too.

[47777] In another embodiment thereof the expression cassette does not comprise an additional transit peptide in case in Table I, application no. 7, in column 6 in the same line as SEQ ID NO. 12974 is depicted, non-targeted is mentioned.

[47778] In an embodiment the present invention relates to an expresssion cassette comprising a) a promoter, preferably a promoter selected from the group consisting of Big35S, PCUbi, Super and USP, in particular p-Super; and b) the nucleic acid SEQ ID NO. 88879, or a homolog or fragment thereof, or a homolog thereof being depicted in Table I, application no. 7, column 8, in the same line as SEQ ID NO. 88879, preferably the coding region thereof, a homolog or a fragment thereof; which are operable linked.

[47779] In an embodiment thereof the expression cassette comprises in addition c) a nucleic acid molecule encoding a transit peptide, especially a plastidal transit petide in case in Table I, application no. 7, in column 6 in the same line as SEQ ID NO. 88879 is depicted, plastidic is mentioned, or a mitochondrial transit peptide in case in Table I, application no. 7, in column 6 in the same line as SEQ ID NO. 88879 is depicted, mitochondric is mentioned; which is operable linked, too.

[47780] In another embodiment thereof the expression cassette does not comprise an additional transit peptide in case in Table I, application no. 7, in column 6 in the same line as SEQ ID NO. 88879 is depicted, non-targeted is mentioned.

[47781] In an embodiment the present invention relates to an expresssion cassette comprising a) a promoter, preferably a promoter selected from the group consisting of Big35S, PCUbi, Super and USP, in particular p-Super; and b) the nucleic acid SEQ ID NO. 113220, or a homolog or fragment thereof, or a homolog thereof being depicted in Table I, application no. 7, column 8, in the same line as SEQ ID NO. 113220, preferably the coding region thereof, a homolog or a fragment thereof; which are operable linked.

[47782] In an embodiment thereof the expression cassette comprises in addition c) a nucleic acid molecule encoding a transit peptide, especially a plastidal transit petide in case in Table I, application no. 7, in column 6 in the same line as SEQ ID NO. 113220 is depicted, plastidic is mentioned, or a mitochondrial transit peptide in case in Table I, application no. 7, in column 6 in the same line as SEQ ID NO. 113220 is depicted, mitochondric is mentioned; which is operable linked, too.

[47783] In another embodiment thereof the expression cassette does not comprise an additional transit peptide in case in Table I, application no. 7, in column 6 in the same line as SEQ ID NO. 113220 is depicted, non-targeted is mentioned.

[47784] In an embodiment the present invention relates to an expresssion cassette comprising a) a promoter, preferably a promoter selected from the group consisting of Big35S, PCUbi, Super and USP, in particular p-Super; and b) the nucleic acid SEQ ID NO. 113224, or a homolog or fragment thereof, or a homolog thereof being depicted in Table I, application no. 7, column 8, in the same line as SEQ ID NO. 113224, preferably the coding region thereof, a homolog or a fragment thereof; which are operable linked.

[47785] In an embodiment thereof the expression cassette comprises in addition c) a nucleic acid molecule encoding a transit peptide, especially a plastidal transit petide in case in Table I, application no. 7, in column 6 in the same line as SEQ ID NO. 113224 is depicted, plastidic is mentioned, or a mitochondrial transit peptide in case in Table I, application no. 7, in column 6 in the same line as SEQ ID NO. 113224 is depicted, mitochondric is mentioned; which is operable linked, too.

[47786] In another embodiment thereof the expression cassette does not comprise an additional transit peptide in case in Table I, application no. 7, in column 6 in the same line as SEQ ID NO. 113224 is depicted, non-targeted is mentioned.

[47787] In an embodiment the present invention relates to an expresssion cassette comprising a) a promoter, preferably a promoter selected from the group consisting of Big35S, PCUbi, Super and USP, in particular p-Super; and b) the nucleic acid SEQ ID NO. 113313, or a homolog or fragment thereof, or a homolog thereof being depicted in Table I, application no. 7, column 8, in the same line as SEQ ID NO. 113313, preferably the coding region thereof, a homolog or a fragment thereof; which are operable linked.

[47788] In an embodiment thereof the expression cassette comprises in addition c) a nucleic acid molecule encoding a transit peptide, especially a plastidal transit petide in case in Table I, application no. 7, in column 6 in the same line as SEQ ID NO. 113313 is depicted, plastidic is mentioned, or a mitochondrial transit peptide in case in Table I, application no. 7, in column 6 in the same line as SEQ ID NO. 113313 is depicted, mitochondric is mentioned; which is operable linked, too.

[47789] In another embodiment thereof the expression cassette does not comprise an additional transit peptide in case in Table I, application no. 7, in column 6 in the same line as SEQ ID NO. 113313 is depicted, non-targeted is mentioned.

[47790] In an embodiment the present invention relates to an expresssion cassette comprising a) a promoter, preferably a promoter selected from the group consisting of Big35S, PCUbi, Super and USP, in particular p-Super; and b) the nucleic acid SEQ ID NO. 89973, or a homolog or fragment thereof, or a homolog thereof being depicted in Table I, application no. 7, column 8, in the same line as SEQ ID NO. 89973, preferably the coding region thereof, a homolog or a fragment thereof; which are operable linked.

[47791] In an embodiment thereof the expression cassette comprises in addition c) a nucleic acid molecule encoding a transit peptide, especially a plastidal transit petide in case in Table I, application no. 7, in column 6 in the same line as SEQ ID NO. 89973 is depicted, plastidic is mentioned, or a mitochondrial transit peptide in case in Table I, application no. 7, in column 6 in the same line as SEQ ID NO. 89973 is depicted, mitochondric is mentioned; which is operable linked, too.

[47792] In another embodiment thereof the expression cassette does not comprise an additional transit peptide in case in Table I, application no. 7, in column 6 in the same line as SEQ ID NO. 89973 is depicted, non-targeted is mentioned.

[47793] In an embodiment the present invention relates to an expresssion cassette comprising a) a promoter, preferably a promoter selected from the group consisting of Big35S, PCUbi, Super and USP, in particular p-Super; and b) the nucleic acid SEQ ID NO. 113330, or a homolog or fragment thereof, or a homolog thereof being depicted in Table I, application no. 7, column 8, in the same line as SEQ ID NO. 113330, preferably the coding region thereof, a homolog or a fragment thereof; which are operable linked.

[47794] In an embodiment thereof the expression cassette comprises in addition c) a nucleic acid molecule encoding a transit peptide, especially a plastidal transit petide in case in Table I, application no. 7, in column 6 in the same line as SEQ ID NO. 113330 is depicted, plastidic is mentioned, or a mitochondrial transit peptide in case in Table I, application no. 7, in column 6 in the same line as SEQ ID NO. 113330 is depicted, mitochondric is mentioned; which is operable linked, too.

[47795] In another embodiment thereof the expression cassette does not comprise an additional transit peptide in case in Table I, application no. 7, in column 6 in the same line as SEQ ID NO. 113330 is depicted, non-targeted is mentioned.

[47796] In an embodiment the present invention relates to an expresssion cassette comprising a) a promoter, preferably a promoter selected from the group consisting of Big35S, PCUbi, Super and USP, in particular p-Super; and b) the nucleic acid SEQ ID NO. 90103, or a homolog or fragment thereof, or a homolog thereof being depicted in Table I, application no. 7, column 8, in the same line as SEQ ID NO. 90103, preferably the coding region thereof, a homolog or a fragment thereof; which are operable linked.

[47797] In an embodiment thereof the expression cassette comprises in addition c) a nucleic acid molecule encoding a transit peptide, especially a plastidal transit petide in case in Table I, application no. 7, in column 6 in the same line as SEQ ID NO. 90103 is depicted, plastidic is mentioned, or a mitochondrial transit peptide in case in Table I, application no. 7, in column 6 in the same line as SEQ ID NO. 90103 is depicted, mitochondric is mentioned; which is operable linked, too.

[47798] In another embodiment thereof the expression cassette does not comprise an additional transit peptide in case in Table I, application no. 7, in column 6 in the same line as SEQ ID NO. 90103 is depicted, non-targeted is mentioned.

[47799] In an embodiment the present invention relates to an expresssion cassette comprising a) a promoter, preferably a promoter selected from the group consisting of Big35S, PCUbi, Super and USP, in particular p-Super; and b) the nucleic acid SEQ ID NO. 63803, or a homolog or fragment thereof, or a homolog thereof being depicted in Table I, application no. 7, column 8, in the same line as SEQ ID NO. 63803, preferably the coding region thereof, a homolog or a fragment thereof; which are operable linked.

[47800] In an embodiment thereof the expression cassette comprises in addition c) a nucleic acid molecule encoding a transit peptide, especially a plastidal transit petide in case in Table I, application no. 7, in column 6 in the same line as SEQ ID NO. 63803 is depicted, plastidic is mentioned, or a mitochondrial transit peptide in case in Table I, application no. 7, in column 6 in the same line as SEQ ID NO. 63803 is depicted, mitochondric is mentioned; which is operable linked, too.

[47801] In another embodiment thereof the expression cassette does not comprise an additional transit peptide in case in Table I, application no. 7, in column 6 in the same line as SEQ ID NO. 63803 is depicted, non-targeted is mentioned.

[47802] In an embodiment the present invention relates to an expresssion cassette comprising a) a promoter, preferably a promoter selected from the group consisting of Big35S, PCUbi, Super and USP, in particular Big35S; and b) the nucleic acid SEQ ID NO. 113598, or a homolog or fragment thereof, or a homolog thereof being depicted in Table I, application no. 7, column 8, in the same line as SEQ ID NO. 113598, preferably the coding region thereof, a homolog or a fragment thereof; which are operable linked.

[47803] In an embodiment thereof the expression cassette comprises in addition c) a nucleic acid molecule encoding a transit peptide, especially a plastidal transit petide in case in Table I, application no. 7, in column 6 in the same line as SEQ ID NO. 113598 is depicted, plastidic is mentioned, or a mitochondrial transit peptide in case in Table I, application no. 7, in column 6 in the same line as SEQ ID NO. 113598 is depicted, mitochondric is mentioned; which is operable linked, too.

[47804] In another embodiment thereof the expression cassette does not comprise an additional transit peptide in case in Table I, application no. 7, in column 6 in the same line as SEQ ID NO. 113598 is depicted, non-targeted is mentioned.

[47805] In an embodiment the present invention relates to an expresssion cassette comprising a) a promoter, preferably a promoter selected from the group consisting of Big35S, PCUbi, Super and USP, in particular p-PcUBI; and b) the nucleic acid SEQ ID NO. 113636, or a homolog or fragment thereof, or a homolog thereof being depicted in Table I, application no. 7, column 8, in the same line as SEQ ID NO. 113636, preferably the coding region thereof, a homolog or a fragment thereof; which are operable linked.

[47806] In an embodiment thereof the expression cassette comprises in addition c) a nucleic acid molecule encoding a transit peptide, especially a plastidal transit petide in case in Table I, application no. 7, in column 6 in the same line as SEQ ID NO. 113636 is depicted, plastidic is mentioned, or a mitochondrial transit peptide in case in Table I, application no. 7, in column 6 in the same line as SEQ ID NO. 113636 is depicted, mitochondric is mentioned; which is operable linked, too.

[47807] In another embodiment thereof the expression cassette does not comprise an additional transit peptide in case in Table I, application no. 7, in column 6 in the same line as SEQ ID NO. 113636 is depicted, non-targeted is mentioned.

[47808] In an embodiment the present invention relates to an expresssion cassette comprising a) a promoter, preferably a promoter selected from the group consisting of Big35S, PCUbi, Super and USP, in particular p-PcUBI; and b) the nucleic acid SEQ ID NO. 66274, or a homolog or fragment thereof, or a homolog thereof being depicted in Table I, application no. 7, column 8, in the same line as SEQ ID NO. 66274, preferably the coding region thereof, a homolog or a fragment thereof; which are operable linked.

[47809] In an embodiment thereof the expression cassette comprises in addition c) a nucleic acid molecule encoding a transit peptide, especially a plastidal transit petide in case in Table I, application no. 7, in column 6 in the same line as SEQ ID NO. 66274 is depicted, plastidic is mentioned, or a mitochondrial transit peptide in case in Table I, application no. 7, in column 6 in the same line as SEQ ID NO. 66274 is depicted, mitochondric is mentioned; which is operable linked, too.

[47810] In another embodiment thereof the expression cassette does not comprise an additional transit peptide in case in Table I, application no. 7, in column 6 in the same line as SEQ ID NO. 66274 is depicted, non-targeted is mentioned.

[47811] In an embodiment the present invention relates to an expresssion cassette comprising a) a promoter, preferably a promoter selected from the group consisting of Big35S, PCUbi, Super and USP, in particular p-Super; and b) the nucleic acid SEQ ID NO. 66715, or a homolog or fragment thereof, or a homolog thereof being depicted in Table I, application no. 7, column 8, in the same line as SEQ ID NO. 66715, preferably the coding region thereof, a homolog or a fragment thereof; which are operable linked.

[47812] In an embodiment thereof the expression cassette comprises in addition c) a nucleic acid molecule encoding a transit peptide, especially a plastidal transit petide in case in Table I, application no. 7, in column 6 in the same line as SEQ ID NO. 66715 is depicted, plastidic is mentioned, or a mitochondrial transit peptide in case in Table I, application no. 7, in column 6 in the same line as SEQ ID NO. 66715 is depicted, mitochondric is mentioned; which is operable linked, too.

[47813] In another embodiment thereof the expression cassette does not comprise an additional transit peptide in case in Table I, application no. 7, in column 6 in the same line as SEQ ID NO. 66715 is depicted, non-targeted is mentioned.

[47814] In an embodiment the present invention relates to an expresssion cassette comprising a) a promoter, preferably a promoter selected from the group consisting of Big35S, PCUbi, Super and USP, in particular p-Super; and b) the nucleic acid SEQ ID NO. 67190, or a homolog or fragment thereof, or a homolog thereof being depicted in Table I, application no. 7, column 8, in the same line as SEQ ID NO. 67190, preferably the coding region thereof, a homolog or a fragment thereof; which are operable linked.

[47815] In an embodiment thereof the expression cassette comprises in addition c) a nucleic acid molecule encoding a transit peptide, especially a plastidal transit petide in case in Table I, application no. 7, in column 6 in the same line as SEQ ID NO. 67190 is depicted, plastidic is mentioned, or a mitochondrial transit peptide in case in Table I, application no. 7, in column 6 in the same line as SEQ ID NO. 67190 is depicted, mitochondric is mentioned; which is operable linked, too.

[47816] In another embodiment thereof the expression cassette does not comprise an additional transit peptide in case in Table I, application no. 7, in column 6 in the same line as SEQ ID NO. 67190 is depicted, non-targeted is mentioned.

[47817] In an embodiment the present invention relates to an expresssion cassette comprising a) a promoter, preferably a promoter selected from the group consisting of Big35S, PCUbi, Super and USP, in particular p-Super; and b) the nucleic acid SEQ ID NO. 113647, or a homolog or fragment thereof, or a homolog thereof being depicted in Table I, application no. 7, column 8, in the same line as SEQ ID NO. 113647, preferably the coding region thereof, a homolog or a fragment thereof; which are operable linked.

[47818] In an embodiment thereof the expression cassette comprises in addition c) a nucleic acid molecule encoding a transit peptide, especially a plastidal transit petide in case in Table I, application no. 7, in column 6 in the same line as SEQ ID NO. 113647 is depicted, plastidic is mentioned, or a mitochondrial transit peptide in case in Table I, application no. 7, in column 6 in the same line as SEQ ID NO. 113647 is depicted, mitochondric is mentioned; which is operable linked, too.

[47819] In another embodiment thereof the expression cassette does not comprise an additional transit peptide in case in Table I, application no. 7, in column 6 in the same line as SEQ ID NO. 113647 is depicted, non-targeted is mentioned.

[47820] Accordingly, in one embodiment, the process according to the invention comprises the following steps:
[47821] (a) introducing of a nucleic acid construct comprising the nucleic acid molecule of the invention (and if desired, in combination with the nucleic acid encoding a respective transit peptide) or used in the process of the invention or encoding the polypeptide of the present invention or used in the process of the invention; or
[47822] (b) introducing of a nucleic acid molecule, including regulatory sequences and/or factors (and if desired, in combination with the nucleic acid encoding a respective transit peptide), which expression increases the expression of the nucleic acid molecule of the invention or used in the process of the invention or encoding the polypeptide of the present invention or used in the process of the invention;
[47823] in a cell, or a non-human organism or a part thereof, preferably in a plant, plant cell or a microorganism, preferably in the organelles such as the plastids or mitochondria thereof, or preferably non-targeted, or
[47824] (c) introducing an expression cassette as mentioned above,
[47825] and
[47826] (d) expressing of the gene product encoded by the nucleic acid construct or the nucleic acid molecule (and if desired, in combination with the nucleic acid encoding a respective transit peptide) or expression cassette mentioned under (a), (b) or (c) in the cell or the non-human organism or part thereof.

[47827] For expression in a host organism, for example a plant, the expression cassette is advantageously inserted into a vector such as by way of example a plasmid, a phage or other DNA which allows optimal expression of the genes in the host organism. Examples of suitable plasmids are: in E. coli pLG338, pACYC184, pBR series such as e.g. pBR322, pUC series such as pUC18 or pUC19, M113mp series, pKC30, pRep4, pHS1, pHS2, pPLc236, pMBL24, pLG200, pUR290, pIN-III113-B1, λgt11 or pBdCI; in Streptomyces pIJ101, pIJ364, pIJ702 or pIJ361; in Bacillus pUB110, pC194 or pBD214; in Corynebacterium pSA77 or pAJ667; in fungi pALS1, pIL2 or pBB116; other advantageous fungal vectors are described by Romanos M. A. et al., Yeast 8, 423 (1992) and by van den Hondel C. A. M. J. J. et al. [(1991) “Heterologous gene expression in filamentous fungi”] as well as in “More Gene Manipulations” in “Fungi” in Bennet J. W. & Lasure L. L., eds., pp. 396-428, Academic Press, San Diego, and in “Gene transfer systems and vector development for filamentous fungi” [van den Hondel C. A. M. J. J. & Punt P. J. (1991) in: Applied Molecular Genetics of Fungi, Peberdy J. F. et al., eds., pp. 1-28, Cambridge University Press: Cambridge]. Examples of advantageous yeast vectors are 2 μM, pAG-1, YEp6, YEp13 or pEMBLYe23. Examples of algal or plant plasmids are pLGV23, pGHlac+, pBIN19, pAK2004, pVKH or pDH51 (see Schmidt R., Willmitzer L., Plant Cell Rep. 7, 583 (1988)). The vectors identified above or derivatives of the vectors identified above are a small selection of the possible plasmids. Further plasmids are well known to those skilled in the art and may be found, for example, in “Cloning Vectors” (Eds. P. H. Pouwels et al., Elsevier, Amsterdam-New York-Oxford, 1985, ISBN 0 444 904018). Suitable plant vectors are described inter alia in “Methods in Plant Molecular Biology and Biotechnology” (CRC Press, Ch. 6/7, pp. 71-119). Advantageous vectors are known as shuttle vectors or binary vectors which replicate in E. coli and Agrobacterium. Examples for binary vectors are pBIN19, pBI101, pBinAR, pGPTV, pCAMBIA, pBIB-HYG, pBecks, pGreen or pPZP (Hajukiewicz P. et al., Plant Mol. Biol. 25, 989 (1994), and Hellens et al, Trends in Plant Science 5, 446 (2000)).

[47828] In a further embodiment of the vector the expression cassette according to the invention may also advantageously be introduced into the organisms in the form of a linear DNA and be integrated into the genome of the host organism by way of heterologous or homologous recombination. This linear DNA may be composed of a linearized plasmid or only of the expression cassette as vector or the respective nucleic acid sequences (if desired, in combination with the nucleic acid encoding a respective transit peptide) according to the invention.

[47829] In a further advantageous embodiment the nucleic acid sequence (if desired, in combination with the nucleic acid encoding a respective transit peptide) according to the invention can also be introduced into an organism on its own.

[47830] If in addition to the nucleic acid sequence according to the invention (and if desired, in combination with the nucleic acid encoding a respective transit peptide) further genes are to be introduced into the organism, all genes altogether with a marker in a single vector or each single gene with a marker in a vector can be introduced into the organism, whereby the different vectors can be introduced simultaneously or successively.

[47831] The vector advantageously contains at least one copy of the nucleic acid sequences according to the invention (and if desired, in combination with the nucleic acid encoding a respective transit peptide) or of the expression cassette (=gene construct) according to the invention.

[47832] The invention further provides a vector, comprising a nucleic acid molecule comprising 1) a nucleic acid molecule selected from the group consisting of:
[47833] (a) a nucleic acid molecule encoding a polypeptide shown in Table II, column 5 or 8, application no. 7, preferably shown in Table II A, application no. 7, in column 5, or in Table II A, application no. 7, column 8, or in Table II B, application no. 7, column 8, or a homolog or a fragment thereof;
[47834] (b) a nucleic acid molecule shown in Table I, application no. 7, column 5 or 8, preferably shown in Table I A, application no. 7, in column 5, or in Table I A, application no. 7, column 8, or in Table I B, application no. 7, column 8, preferably the coding region thereof, or a homolog or a fragment thereof;
[47835] (c) a nucleic acid molecule, which, as a result of the degeneracy of the genetic code, can be derived from a polypeptide sequence depicted in column 5 or 8 of Table II, application no. 7, preferably shown in Table II A, application no. 7, in column 5, or in Table II A, application no. 7, column 8, or in Table II B, application no. 7, column 8;
[47836] (d) a nucleic acid molecule having at least 30% identity, preferably at least 40%, 50%, 60%, 70%, 75%, 80%, 85%, 90%, 95%, 96%, 97%, 98%, 99%, 99,5%, with the nucleic acid molecule sequence of a polynucleotide comprising the nucleic acid molecule shown in column 5 or 8 of Table I, application no. 7, preferably shown in Table I A, application no. 7, in column 5, or in Table I A, application no. 7, column 8, or in Table I B, application no. 7, column 8, preferably the coding region thereof;
[47837] (e) a nucleic acid molecule encoding a polypeptide having at least 30% identity, preferably at least 40%, 50% 60%, 70%, 75%, 80%, 85%, 90%, 95%, 96%, 97%, 98%, 99%, 99,5%, identity with the amino acid sequence of the polypeptide encoded by the nucleic acid molecule of (a), (b), (c), or (d);
[47838] (f) a nucleic acid molecule which hybridizes with a nucleic acid molecule of (a), (b), (c), (d), or (e) under stringent hybridization conditions;
[47839] (g) a nucleic acid molecule encoding a polypeptide which can be isolated with the aid of monoclonal or polyclonal antibodies made against a polypeptide encoded by one of the nucleic acid molecules of (a), (b), (c), (d), (e) or (f);
[47840] (h) a nucleic acid molecule encoding a polypeptide comprising the consensus sequence or one or more polypeptide motifs as shown in column 8 of Table IV, application no. 7;
[47841] (i) a nucleic acid molecule encoding a polypeptide having the activity represented by a protein as depicted in column 5 of Table II, application no. 7;
[47842] (j) a nucleic acid molecule comprising a polynucleotide which is obtained by amplifying a cDNA library or a genomic library using the primers in Table III, application no. 7, column 8;
[47843] and
[47844] (k) nucleic acid molecule which is obtainable by screening a suitable nucleic acid library, especially a cDNA library and/or a genomic library, under stringent hybridization conditions with a probe comprising one of the sequences of the nucleic acid molecule of (a), (b), (c), (d), (e), (f), (g), (h), (i) or (j) or with a fragment thereof having at least 15 nt, preferably 20 nt, 30 nt, 50 nt, 100 nt, 200 nt, 500 nt, 1000 nt, 1500 nt, 2000 nt or 3000 nt of the nucleic acid molecule complementary to a nucleic acid sequence characterized in (a), (b), (c), (d), (e), (f), (g), (h), (i) or (j);
[47845] or a nucleic acid molecule comprising a sequence which is complementary thereto.
   (All the references to Tables I to IV are references to the corresponding lines of Tables I to IV.)

[47846] In a preferred embodiment of said vector said nucleic acid molecule according to 1 (a), (b), (c), (d), (e), (f), (g), (h), (i), (j) or (k) encodes a polypeptide which has the activity of the respective polypeptide represented by a protein comprising a polypeptide as depicted in the respective line in column 5 of Table II, application no. 7.

[47847] In another preferred embodiment of said vector said nucleic acid molecule according to 1 (a), (b), (c), (d), (e), (f), (g), (h), (i), (j) or (k) confers a generation or an increase of the respective fine chemical in a non-human organism or a part thereof as compared to a corresponding wild-type non-human organism or part thereof.

[47848] In another preferred embodiment of said vector said nucleic acid molecule according to 1 (a), (b), (c), (d), (e), (f), (g), (h), (i), (j) or (k) encodes a polypeptide which has the activity of the respective polypeptide represented by a protein as depicted in the respective line in column 5 of Table II, application no. 7, and confers a generation or an increase of the respective fine chemical in a non-human organism or a part thereof as compared to a corresponding wild-type non-human organism or part thereof.

[47849] In another embodiment thereof said vector comprises beneath said nucleic acid molecule according to 1 (a), (b), (c), (d), (e), (f), (g), (h), (i), (j) or (k), a promoter, preferably a promoter selected from the group consisting of Big35S, PCUbi, Super and USP, which are operable linked.

[47850] In a preferred embodiment thereof said vector comprises beneath said nucleic acid molecule according to 1 (a), (b), (c), (d), (e), (f), (g), (h), (i), (j) or (k), a promoter, preferably a promoter selected from the group consisting of Big35S, PCUbi, Super and USP, which are operable linked; and said nucleic acid molecule according to 1 (a), (b), (c), (d), (e), (f), (g), (h), (i), (j) or (k) encodes a polypeptide which has the activity of the respective polypeptide represented by a protein comprising a polypeptide as depicted in the respective line in column 5 of Table II, application no. 7.

[47851] In another preferred embodiment thereof said vector comprises beneath said nucleic acid molecule according to 1 (a), (b), (c), (d), (e), (f), (g), (h), (i), (j) or (k), a promoter, preferably a promoter selected from the group consisting of Big35S, PCUbi, Super and USP, which are operable linked; and said nucleic acid molecule according to 1 (a), (b), (c), (d), (e), (f), (g), (h), (i), (j) or (k) confers a generation or an increase of the respective fine chemical in a non-human organism or a part thereof as compared to a corresponding wild-type non-human organism or part thereof.

[47852] In another preferred embodiment thereof said vector comprises beneath said nucleic acid molecule according to 1 (a), (b), (c), (d), (e), (f), (g), (h), (i), (j) or (k), a promoter, preferably a promoter selected from the group consisting of Big35S, PCUbi, Super and USP, which are operable linked; and said nucleic acid molecule according to 1 (a), (b), (c), (d), (e), (f), (g), (h), (i), (j) or (k) encodes a polypeptide which has the activity of the respective polypeptide represented by a protein as depicted in the respective line in column 5 of Table II, application no. 7, and confers a generation or an increase of the respective fine chemical in a non-human organism or a part thereof as compared to a corresponding wild-type non-human organism or part thereof.

[47853] In another embodiment thereof said vector comprises beneath said nucleic acid molecule according to 1 (a), (b), (c), (d), (e), (f), (g), (h), (i), (j) or (k), a nucleic acid molecule encoding a transit peptide, preferably encoding a plastidal transit peptide, especially in case in column 6 of Table I, application no. 7, in the same line as of the respective nucleic acid molecule according to 1) “plastidic” is depicted, or encoding a mitochondrial transit peptide, especially in case in column 6 of Table I, application no. 7, in the same line as of the respective nucleic acid molecule according to 1) “mitochondric” is depicted, which are operable linked.

[47854] In another embodiment thereof said vector does not comprise beneath said nucleic acid molecule according to 1 (a), (b), (c), (d), (e), (f), (g), (h), (i), (j) or (k), a nucleic acid molecule encoding a transit peptide in case in column 6 of Table I, application no. 7, in the same line as of the respective nucleic acid molecule according to 1) “non-targeted” is depicted.

[47855] In another embodiment thereof said vector comprises beneath said nucleic acid molecule according to 1 (a), (b), (c), (d), (e), (f), (g), (h), (i), (j) or (k), and a promoter, preferably a promoter selected from the group consisting of Big35S, PCUbi, Super and USP; a nucleic acid molecule encoding a transit peptide, preferably encoding a plastidal transit peptide, especially in case in column 6 of Table I, application no. 7, in the same line as of the respective nucleic acid molecule according to 1) “plastidic” is depicted, or encoding a mitochondrial transit peptide, especially in case in column 6 of Table I, application no. 7, in the same line as of the respective nucleic acid molecule according to 1) “mitochondric” is depicted, which are operable linked.

[47856] In another embodiment thereof said vector does not comprise beneath said nucleic acid molecule according to 1 (a), (b), (c), (d), (e), (f), (g), (h), (i), (j) or (k), and a promoter, preferably a promoter selected from the group consisting of Big35S, PCUbi, Super and USP, which are operable linked; a nucleic acid molecule encoding a transit peptide, especially in case in column 6 of Table I, application no. 7, in the same line as of the respective nucleic acid molecule according to 1) “non-targeted” is depicted.

[47857] In another embodiment thereof said vector comprises beneath said nucleic acid molecule according to 1 (a), (b), (c), (d), (e), (f), (g), (h), (i), (j) or (k), and a promoter, preferably a promoter selected from the group consisting of Big35S, PCUbi, Super and USP; a nucleic acid molecule encoding a transit peptide, preferably encoding a plastidal transit peptide, especially in case in column 6 of Table I, application no. 7, in the same line as of the respective nucleic acid molecule according to 1) “plastidic” is depicted, or encoding a mitochondrial transit peptide, especially in case in column 6 of Table I, application no. 7, in the same line as of the respective nucleic acid molecule according to 1) “mitochondric” is depicted, which are operable linked; and wherein said nucleic acid molecule according to 1 (a), (b), (c), (d), (e), (f), (g), (h), (i), (j) or (k) encodes a polypeptide which has the activity of the respective polypeptide represented by a protein comprising a polypeptide as depicted in column 5 of Table II, application no. 7 (in the same line).

[47858] In another embodiment thereof said vector does not comprise beneath said nucleic acid molecule according to 1 (a), (b), (c), (d), (e), (f), (g), (h), (i), (j) or (k), and a promoter, preferably a promoter selected from the group consisting of Big35S, PCUbi, Super and USP, which are operatively linked; a nucleic acid molecule encoding a transit peptide, especially in case in column 6 of Table I, application no. 7, in the same line as of the respective nucleic acid molecule according to 1) “non-targeted” is depicted; and wherein said nucleic acid molecule according to 1 (a), (b), (c), (d), (e), (f), (g), (h), (i), (j) or (k) encodes a polypeptide which has the activity of the respective polypeptide represented by a protein comprising a polypeptide as depicted in column 5 of Table II, application no. 7.

[47859] In another embodiment thereof said vector comprises beneath said nucleic acid molecule according to 1 (a), (b), (c), (d), (e), (f), (g), (h), (i), (j) or (k), and a promoter, preferably a promoter selected from the group consisting of Big35S, PCUbi, Super and USP; a nucleic acid molecule encoding a transit peptide, preferably encoding a plastidal transit peptide, especially in case in column 6 of Table I, application no. 7, in the same line as of the respective nucleic acid molecule according to 1) “plastidic” is depicted, or encoding a mitochondrial transit peptide, especially in case in column 6 of Table I, application no. 7, in the same line as of the respective nucleic acid molecule according to 1) “mitochondric” is depicted, which are operable linked; and wherein said nucleic acid molecule according to 1 (a), (b), (c), (d), (e), (f), (g), (h), (i), (j) or (k) confers a generation or an increase of the respective fine chemical in a non-human organism or a part thereof as compared to a corresponding wild-type non-human organism or part thereof.

[47860] In another embodiment thereof said vector does not comprise beneath said nucleic acid molecule according to 1 (a), (b), (c), (d), (e), (f), (g), (h), (i), (j) or (k), and a promoter, preferably a promoter selected from the group consisting of Big35S, PCUbi, Super and USP, which are operatively linked; a nucleic acid molecule encoding a transit peptide, especially in case in column 6 of Table I, application no. 7, in the same line as of the respective nucleic acid molecule according to 1) “non-targeted” is depicted; and wherein said nucleic acid molecule according to 1 (a), (b), (c), (d), (e), (f), (g), (h), (i), (j) or (k) confers a generation or an increase of the respective fine chemical in a non-human organism or a part thereof as compared to a corresponding wild-type non-human organism or part thereof.

[47861] In another embodiment thereof said vector comprises beneath said nucleic acid molecule according to 1 (a), (b), (c), (d), (e), (f), (g), (h), (i), (j) or (k), and a promoter, preferably a promoter selected from the group consisting of Big35S, PCUbi, Super and USP; a nucleic acid molecule encoding a transit peptide, preferably encoding a plastidal transit peptide, especially in case in column 6 of Table I, application no. 7, in the same line as of the respective nucleic acid molecule according to 1) “plastidic” is depicted, or encoding a mitochondrial transit peptide, especially in case in column 6 of Table I, application no. 7, in the same line as of the respective nucleic acid molecule according to 1) “mitochondric” is depicted, which are operable linked; and wherein said nucleic acid molecule according to 1 (a), (b), (c), (d), (e), (f), (g), (h), (i), (j) or (k) encodes a polypeptide which has the activity of the respective polypeptide represented by a protein as depicted in column 5 of Table II application no. 7 and confers a generation or an increase of the respective fine chemical in a non-human organism or a part thereof as compared to a corresponding wild-type non-human organism or part thereof.

[47862] In another embodiment thereof said vector does not comprise beneath said nucleic acid molecule according to 1 (a), (b), (c), (d), (e), (f), (g), (h), (i), (j) or (k), and a promoter, preferably a promoter selected from the group consisting of Big35S, PCUbi, Super and USP, which are operatively linked; a nucleic acid molecule encoding a transit peptide, especially in case in column 6 of Table I, application no. 7, in the same line as of the respective nucleic acid molecule according to 1) “non-targeted” is depicted; and wherein said nucleic acid molecule according to 1 (a), (b), (c), (d), (e), (f), (g), (h), (i), (j) or (k) encodes a polypeptide which has the activity of the respective polypeptide represented by a protein as depicted in column 5 of Table II application no. 7 (in the same line) and confers a generation or an increase of the respective fine chemical in a non-human organism or a part thereof as compared to a corresponding wild-type non-human organism or part thereof.

[47863] In a preferred embodiment of said vector said nucleic acid molecule according to 1 (a), (b), (c), (d), (e), (f), (g), (h), (i), (j) or (k), said promoter and optionally said nucleic acid molecule encoding a transit peptide are encompassed in an expression cassette. Accordingly in an embodiment the invention provides a vector comprising an expression cassette comprising said nucleic acid molecule according to 1 (a), (b), (c), (d), (e), (f), (g), (h), (i), (j) or (k), said promoter and optionally said a nucleic acid molecule encoding a transit peptide, operable linked. Said expression cassette may encompass a terminator, too.

[47864] The invention further provides a vector comprising a nucleic acid molecule comprising 1) a nucleic acid molecule selected from the group consisting of:
[47865] (a) a nucleic acid molecule encoding a polypeptide shown in Table II, column 5 or 8, application no. 7, preferably shown in Table II A, application no. 7, in column 5, or in Table II A, application no. 7, column 8, or in Table II B, application no. 7, column 8, or a homolog or a fragment thereof;
[47866] (b) a nucleic acid molecule shown in Table I, application no. 7, column 5 or 8, preferably shown in Table I A, application no. 7, in column 5, or in Table I A, application no. 7, column 8, or in Table I B, application no. 7, column 8, preferably the coding region thereof, or a homolog or a fragment thereof;
[47867] (c) a nucleic acid molecule, which, as a result of the degeneracy of the genetic code, can be derived from a polypeptide sequence depicted in column 5 or 8 of Table II, application no. 7, preferably shown in Table II A, application no. 7, in column 5, or in Table II A, application no. 7, column 8, or in Table II B, application no. 7, column 8;
[47868] (d) a nucleic acid molecule having at least 30% identity, preferably at least 40%, 50%, 60%, 70%, 75%, 80%, 85%, 90%, 95%, 96%, 97%, 98%, 99%, 99,5%, with the nucleic acid molecule sequence of a polynucleotide comprising the nucleic acid molecule shown in column 5 or 8 of Table I, application no. 7, preferably shown in Table I A, application no. 7, in column 5, or in Table I A, application no. 7, column 8, or in Table I B, application no. 7, column 8, preferably the coding region thereof;
[47869] (e) a nucleic acid molecule encoding a polypeptide having at least 30% identity, preferably at least 40%, 50% 60%, 70%, 75%, 80%, 85%, 90%, 95%, 96%, 97%, 98%, 99%, 99,5%, identity with the amino acid sequence of the polypeptide encoded by the nucleic acid molecule of (a), (b), (c), or (d);
[47870] (f) a nucleic acid molecule which hybridizes with a nucleic acid molecule of (a), (b), (c), (d), or (e) under stringent hybridization conditions;
[47871] (g) a nucleic acid molecule encoding a polypeptide which can be isolated with the aid of monoclonal or polyclonal antibodies made against a polypeptide encoded by one of the nucleic acid molecules of (a), (b), (c), (d), (e) or (f);
[47872] (h) a nucleic acid molecule encoding a polypeptide comprising the consensus sequence or one or more polypeptide motifs as shown in column 8 of Table IV, application no. 7;
[47873] (i) a nucleic acid molecule encoding a polypeptide having the activity represented by a protein as depicted in column 5 of Table II, application no. 7;
[47874] (j) a nucleic acid molecule comprising a polynucleotide which is obtained by amplifying a cDNA library or a genomic library using the primers in Table III, application no. 7, column 8;
[47875] and
[47876] (k) nucleic acid molecule which is obtainable by screening a suitable nucleic acid library, especially a cDNA library and/or a genomic library, under stringent hybridization conditions with a probe comprising one of the sequences of the nucleic acid molecule of (a), (b), (c), (d), (e), (f), (g), (h), (i) or (j) or with a fragment thereof having at least 15 nt, preferably 20 nt, 30 nt, 50 nt, 100 nt, 200 nt, 500 nt, 1000 nt, 1500 nt, 2000 nt or 3000 nt of the nucleic acid molecule complementary to a nucleic acid sequence characterized in (a), (b), (c), (d), (e), (f), (g), (h), (i) or (j);
[47877] or a nucleic acid molecule comprising a sequence which is complementary thereto;
   whereby, preferably, the nucleic acid molecule according to 1 (a), (b), (c), (d), (e), (f), (g), (h), (i), (j) or (k) distinguishes over the sequence depicted in Table I A and/or I B, application no. 7, column 5 or 8, or the coding region thereof, by one or more nucleotides (especially but not exceeding 5%, preferably 4%, 3%, 2%, 1%, 0.5%, 0.2% or 0.1%). In an embodiment, the nucleic acid molecule of the invention does not consist of the sequence shown in Table I A and/or I B, application no. 7, column 5 or 8, or the coding region thereof, respectively. In another embodiment, the nucleic acid molecule of the present invention, preferably the coding region thereof, is 30%, 40%, 50%, 60%, 70%, 80%, 90%, 95% identical but less than 100%, 99.999%, 99.99%, 99.9%, 99%, 98%, 97%, 96% or 95% identical to the sequence shown in Table I A and/or I B, application no. 7, column 5 or 8, or the coding region thereof, respectively. In a further embodiment the nucleic acid molecule does not encode the polypeptide sequence shown in Table II A and/or II B, application no. 7, column 5 or 8 but homologs thereof. Accordingly, in one embodiment, the nucleic acid molecule of the present invention encodes in one embodiment a polypeptide which differs at least in one or more amino acids (especially but not exceeding 5%, preferably 4%, 3%, 2%, 1%, 0.5%, 0.2% or 0.1%) from the polypeptide shown in Table II, application no. 7, column 5 or 8 and does not encode a protein of the sequence shown in Table II A and/or II B, application no. 7, column 5 or 8. Accordingly, in one embodiment, the protein encoded by a sequence of a nucleic acid according to (a), (b), (c), (d), (e), (f), (g), (h), (i), (j) or (k) does not consist of the sequence shown in Table I A and/or I B, application no. 7, column 5 and 8, or the coding region thereof. In a further embodiment, the protein of the present invention is at least 30%,40%, 50%, 60%, 70%, 80%, 90%, 95% identical to protein sequence depicted in Table II A and/or II B, application no. 7, column 5 or 8 but less than 100%, preferably less than 99.999%, 99.99% or 99.9%, more preferably less than 99%, 985, 97%, 96% or 95% identical to the sequence shown in Table II A and/or II B, application no. 7, column 5 or 8.
   (All the references to Tables I to IV are references to the corresponding lines of Tables I to IV.)

[47878] In a preferred embodiment of said vector said nucleic acid molecule according to 1 (a), (b), (c), (d), (e), (f), (g), (h), (i), (j) or (k) encodes a polypeptide which has the activity of the respective polypeptide represented by a protein comprising a polypeptide as depicted in the respective line in column 5 of Table II, application no. 7.

[47879] In another preferred embodiment of said vector said nucleic acid molecule according to 1 (a), (b), (c), (d), (e), (f), (g), (h), (i), (j) or (k) confers a generation or an increase of the respective fine chemical in a non-human organism or a part thereof as compared to a corresponding wild-type non-human organism or part thereof.

[47880] In another preferred embodiment of said vector said nucleic acid molecule according to 1 (a), (b), (c), (d), (e), (f), (g), (h), (i), (j) or (k) encodes a polypeptide which has the activity of the respective polypeptide represented by a protein as depicted in the respective line in column 5 of Table II, application no. 7, and confers a generation or an increase of the respective fine chemical in a non-human organism or a part thereof as compared to a corresponding wild-type non-human organism or part thereof.

[47881] In another embodiment thereof said vector comprises beneath said nucleic acid molecule according to 1 (a), (b), (c), (d), (e), (f), (g), (h), (i), (j) or (k), a promoter, preferably a promoter selected from the group consisting of Big35S, PCUbi, Super and USP, which are operable linked.

[47882] In a preferred embodiment thereof said vector comprises beneath said nucleic acid molecule according to 1 (a), (b), (c), (d), (e), (f), (g), (h), (i), (j) or (k), a promoter, preferably a promoter selected from the group consisting of Big35S, PCUbi, Super and USP, which are operable linked; and said nucleic acid molecule according to 1 (a), (b), (c), (d), (e), (f), (g), (h), (i), (j) or (k) encodes a polypeptide which has the activity of the respective polypeptide represented by a protein comprising a polypeptide as depicted in the respective line in column 5 of Table II, application no. 7.

[47883] In another preferred embodiment thereof said vector comprises beneath said nucleic acid molecule according to 1 (a), (b), (c), (d), (e), (f), (g), (h), (i), (j) or (k), a promoter, preferably a promoter selected from the group consisting of Big35S, PCUbi, Super and USP, which are operable linked; and said nucleic acid molecule according to 1 (a), (b), (c), (d), (e), (f), (g), (h), (i), (j) or (k) confers a generation or an increase of the respective fine chemical in a non-human organism or a part thereof as compared to a corresponding wild-type non-human organism or part thereof.

[47884] In another preferred embodiment thereof said vector comprises beneath said nucleic acid molecule according to 1 (a), (b), (c), (d), (e), (f), (g), (h), (i), (j) or (k), a promoter, preferably a promoter selected from the group consisting of Big35S, PCUbi, Super and USP, which are operable linked; and said nucleic acid molecule according to 1 (a), (b), (c), (d), (e), (f), (g), (h), (i), (j) or (k) encodes a polypeptide which has the activity of the respective polypeptide represented by a protein as depicted in the respective line in column 5 of Table II, application no. 7, and confers a generation or an increase of the respective fine chemical in a non-human organism or a part thereof as compared to a corresponding wild-type non-human organism or part thereof.

[47885] In another embodiment thereof said vector comprises beneath said nucleic acid molecule according to 1 (a), (b), (c), (d), (e), (f), (g), (h), (i), (j) or (k), a nucleic acid molecule encoding a transit peptide, preferably encoding a plastidal transit peptide, especially in case in column 6 of Table I, application no. 7, in the same line as of the respective nucleic acid molecule according to 1) “plastidic” is depicted, or encoding a mitochondrial transit peptide, especially in case in column 6 of Table I, application no. 7, in the same line as of the respective nucleic acid molecule according to 1) “mitochondric” is depicted, which are operable linked.

[47886] In another embodiment thereof said vector does not comprise beneath said nucleic acid molecule according to 1 (a), (b), (c), (d), (e), (f), (g), (h), (i), (j) or (k), a nucleic acid molecule encoding a transit peptide in case in column 6 of Table I, application no. 7, in the same line as of the respective nucleic acid molecule according to 1) “non-targeted” is depicted.

[47887] In another embodiment thereof said vector comprises beneath said nucleic acid molecule according to 1 (a), (b), (c), (d), (e), (f), (g), (h), (i), (j) or (k), and a promoter, preferably a promoter selected from the group consisting of Big35S, PCUbi, Super and USP; a nucleic acid molecule encoding a transit peptide, preferably encoding a plastidal transit peptide, especially in case in column 6 of Table I, application no. 7, in the same line as of the respective nucleic acid molecule according to 1) “plastidic” is depicted, or encoding a mitochondrial transit peptide, especially in case in column 6 of Table I, application no. 7, in the same line as of the respective nucleic acid molecule according to 1) “mitochondric” is depicted, which are operable linked.

[47888] In another embodiment thereof said vector does not comprise beneath said nucleic acid molecule according to 1 (a), (b), (c), (d), (e), (f), (g), (h), (i), (j) or (k), and a promoter, preferably a promoter selected from the group consisting of Big35S, PCUbi, Super and USP, which are operatively linked; a nucleic acid molecule encoding a transit peptide, especially in case in column 6 of Table I, application no. 7, in the same line as of the respective nucleic acid molecule according to 1) “non-targeted” is depicted.

[47889] In another embodiment thereof said vector comprises beneath said nucleic acid molecule according to 1 (a), (b), (c), (d), (e), (f), (g), (h), (i), (j) or (k), and a promoter, preferably a promoter selected from the group consisting of Big35S, PCUbi, Super and USP; a nucleic acid molecule encoding a transit peptide, preferably encoding a plastidal transit peptide, especially in case in column 6 of Table I, application no. 7, in the same line as of the respective nucleic acid molecule according to 1) “plastidic” is depicted, or encoding a mitochondrial transit peptide, especially in case in column 6 of Table I, application no. 7, in the same line as of the respective nucleic acid molecule according to 1) “mitochondric” is depicted, which are operable linked; and wherein said nucleic acid molecule according to 1 (a), (b), (c), (d), (e), (f), (g), (h), (i), (j) or (k) encodes a polypeptide which has the activity of the respective polypeptide represented by a protein comprising a polypeptide as depicted in column 5 of Table II, application no. 7.

[47890] In another embodiment thereof said vector does not comprise beneath said nucleic acid molecule according to 1 (a), (b), (c), (d), (e), (f), (g), (h), (i), (j) or (k), and a promoter, preferably a promoter selected from the group consisting of Big35S, PCUbi, Super and USP, which are operatively linked; a nucleic acid molecule encoding a transit peptide, especially in case in column 6 of Table I, application no. 7, in the same line as of the respective nucleic acid molecule according to 1) “non-targeted” is depicted; and wherein said nucleic acid molecule according to 1 (a), (b), (c), (d), (e), (f), (g), (h), (i), (j) or (k) encodes a polypeptide which has the activity of the respective polypeptide represented by a protein comprising a polypeptide as depicted in column 5 of Table II, application no. 7.

[47891] In another embodiment thereof said vector comprises beneath said nucleic acid molecule according to 1 (a), (b), (c), (d), (e), (f), (g), (h), (i), (j) or (k), and a promoter, preferably a promoter selected from the group consisting of Big35S, PCUbi, Super and USP; a nucleic acid molecule encoding a transit peptide, preferably encoding a plastidal transit peptide, especially in case in column 6 of Table I, application no. 7, in the same line as of the respective nucleic acid molecule according to 1) “plastidic” is depicted, or encoding a mitochondrial transit peptide, especially in case in column 6 of Table I, application no. 7, in the same line as of the respective nucleic acid molecule according to 1) “mitochondric” is depicted, which are operable linked; and wherein said nucleic acid molecule according to 1 (a), (b), (c), (d), (e), (f), (g), (h), (i), (j) or (k) confers a generation or an increase of the respective fine chemical in a non-human organism or a part thereof as compared to a corresponding wild-type non-human organism or part thereof.

[47892] In another embodiment thereof said vector does not comprise beneath said nucleic acid molecule according to 1 (a), (b), (c), (d), (e), (f), (g), (h), (i), (j) or (k), and a promoter, preferably a promoter selected from the group consisting of Big35S, PCUbi, Super and USP, which are operatively linked; a nucleic acid molecule encoding a transit peptide, especially in case in column 6 of Table I, application no. 7, in the same line as of the respective nucleic acid molecule according to 1) “non-targeted” is depicted; and wherein said nucleic acid molecule according to 1 (a), (b), (c), (d), (e), (f), (g), (h), (i), (j) or (k) confers a generation or an increase of the respective fine chemical in a non-human organism or a part thereof as compared to a corresponding wild-type non-human organism or part thereof.

[47893] In another embodiment thereof said vector comprises beneath said nucleic acid molecule according to 1 (a), (b), (c), (d), (e), (f), (g), (h), (i), (j) or (k), and a promoter, preferably a promoter selected from the group consisting of Big35S, PCUbi, Super and USP; a nucleic acid molecule encoding a transit peptide, preferably encoding a plastidal transit peptide, especially in case in column 6 of Table I, application no. 7, in the same line as of the respective nucleic acid molecule according to 1) “plastidic” is depicted, or encoding a mitochondrial transit peptide, especially in case in column 6 of Table I, application no. 7, in the same line as of the respective nucleic acid molecule according to 1) “mitochondric” is depicted, which are operable linked; and wherein said nucleic acid molecule according to 1 (a), (b), (c), (d), (e), (f), (g), (h), (i), (j) or (k) encodes a polypeptide which has the activity of the respective polypeptide represented by a protein as depicted in column 5 of Table II application no. 7 and confers a generation or an increase of the respective fine chemical in a non-human organism or a part thereof as compared to a corresponding wild-type non-human organism or part thereof.

[47894] In another embodiment thereof said vector does not comprise beneath said nucleic acid molecule according to 1 (a), (b), (c), (d), (e), (f), (g), (h), (i), (j) or (k), and a promoter, preferably a promoter selected from the group consisting of Big35S, PCUbi, Super and USP, which are operatively linked; a nucleic acid molecule encoding a transit peptide, especially in case in column 6 of Table I, application no. 7, in the same line as of the respective nucleic acid molecule according to 1) “non-targeted” is depicted; and wherein said nucleic acid molecule according to 1 (a), (b), (c), (d), (e), (f), (g), (h), (i), (j) or (k) encodes a polypeptide which has the activity of the respective polypeptide represented by a protein as depicted in column 5 of Table II application no. 7 and confers a generation or an increase of the respective fine chemical in a non-human organism or a part thereof as compared to a corresponding wild-type non-human organism or part thereof.

[47895] In a preferred embodiment of said vector said nucleic acid molecule according to 1 (a), (b), (c), (d), (e), (f), (g), (h), (i), (j) or (k), said promoter and optionally said nucleic acid molecule encoding a transit peptide are encompassed in an expression cassette. Accordingly in an embodiment the invention provides a vector comprising an expression cassette comprising said nucleic acid molecule according to 1 (a), (b), (c), (d), (e), (f), (g), (h), (i), (j) or (k), said promoter and optionally said a nucleic acid molecule encoding a transit peptide, operable linked. Said expression cassette may encompass a terminator, too.

[47896] The invention further provides a vector, especially an expression vector, comprising a FCRP encoding nucleic acid as described above, wherein expression of the vector or FCRP encoding nucleic acid, respectively in a host cell results in the production of a the respective fine chemical, preferably in an increased production of the respective fine chemical, as compared to a wild type of the host cell.

[47897] As used herein, the term “vector” refers to a nucleic acid molecule capable of transporting another nucleic acid which has been linked thereto. One type of vector is a “plasmid”, which refers to a circular double stranded DNA loop into which additional DNA segments can be ligated. Another type of vector is a viral vector, wherein additional DNA segments can be ligated into the viral genome. Further types of vectors can be linearized nucleic acid sequences, such as transposons, which are pieces of DNA which can copy and insert themselves. There have been two types of transposons found: simple transposons, known as Insertion Sequences and composite transposons, which can have several genes as well as the genes that are required for transposition. Certain vectors are capable of autonomous replication in a host cell into which they are introduced (e.g. bacterial vectors having a bacterial origin of replication and episomal mammalian vectors). Other vectors (e.g. non-episomal mammalian vectors) are integrated into the genome of a host cell or an organelle upon introduction into the host cell, and thereby are replicated along with the host or organelle genome. Moreover, certain vectors are capable of directing the expression of genes to which they are operatively linked. Such vectors are referred to herein as “expression vectors.” In general, expression vectors of utility in recombinant DNA techniques are often in the form of plasmids. In the present specification, “plasmid” and “vector” can be used interchangeably as the plasmid is the most commonly used form of vector. However, the invention is intended to include other forms of expression vectors, such as viral vectors (e.g., replication defective retroviruses, adenoviruses, and adeno-associated viruses), which exert similar functions.

[47898] The term vector furthermore encompasses other vectors known to those skilled in the art such as by way of example phages, viruses such as SV40, CMV, baculovirus, adenovirus, transposons, IS elements, phasmids, phagemids, cosmids, linear or circular DNA.

[47899] These vectors can be replicated autonomously in the host organism or be chromosomally replicated, chromosomal replication being preferred.

[47900] The recombinant expression vectors of the invention comprise a nucleic acid molecule of the invention in a form suitable for expression of the nucleic acid molecule in a host cell, which means that the recombinant expression vectors include one or more regulatory sequences, selected on the basis of the host cells to be used for expression, and, if desired a targeting sequence, which are operatively linked to the nucleic acid sequence to be expressed. As used herein with respect to a recombinant expression vector, “operatively linked” is intended to mean that the nucleotide sequence of interest is linked to the regulatory sequence(s)/targeting sequence in a manner which allows for expression of the nucleotide sequence in such way that the predicted function assigned to the nucleic sequence is fulfilled (e.g. in an in vitro transcription/translation system or in a host cell when the vector is introduced into the host cell). The term “regulatory sequence” is intended to include promoters, enhancers, and other expression control elements (e.g. polyadenylation signals). Such regulatory sequences are described, for example, in Goeddel “Gene Expression Technology: Methods in Enzymology 185”, Academic Press, San Diego, Calif. (1990), and Gruber and Crosby, in: Methods in Plant Molecular Biology and Biotechnology, eds. Glick and Thompson, Chapter 7, 89-108, CRC Press; Boca Raton, Fla., including the references therein. Regulatory sequences include those that direct constitutive expression of a nucleotide sequence in many types of host cells and those that direct expression of the nucleotide sequence only in certain host cells or under certain conditions. It will be appreciated by those skilled in the art that the design of the expression vector can depend on such factors as the choice of the host cell to be transformed, the level of expression of polypeptide desired, etc. The term “regulatory sequence” is to be considered as being encompassed by the term “regulatory signal”. The expression vectors of the invention can be introduced into host cells to thereby produce polypeptides or peptides, including fusion polypeptides or peptides, encoded by nucleic acid molecules as described herein (e.g., fusion polypeptides, FCRPs etc.).

[47901] In another embodiment the recombinant expression vectors of the invention can be designed specifically for expression of the polypeptides of the invention in plant cells. For example, FCRP genes can be expressed in plant cells (see R. Schmidt, L. Willmitzer, Plant Cell Rep. 7, 583 (1988); Plant Molecular Biology and Biotechnology, C Press, Boca Raton, Fla., Chapter 6/7, p. 71-119 (1993); F. F. White, B. Jenes et al., Techniques for Gene Transfer, in: Transgenic Plants, Vol. 1, Engineering and Utilization, eds. Kung and Wu R., 128-43, Academic Press: 1993; Potrykus, Annu. Rev. Plant Physiol. Plant Molec. Biol. 42, 205 (1991) and references cited therein). Suitable host cells are discussed further in Goeddel, “Gene Expression Technology: Methods in Enzymology 185”, Academic Press: San Diego, Calif. (1990). By way of example the plant expression cassette can be installed in the pRT transformation vector ((a) Toepfer et al., Methods Enzymol. 217, 66 (1993), (b) Toepfer et al., Nucl. Acids. Res. 15, 5890 (1987)). Alternatively, the recombinant expression vector can be transcribed and translated in vitro, for example using T7 promoter regulatory sequences and T7 polymerase.

[47902] Expression vectors employed in prokaryotes frequently make use of inducible systems with and without fusion proteins or fusion oligopeptides, wherein these fusions can ensue in both N-terminal and C-terminal manner or in other useful domains of a protein. Such fusion vectors usually have the following purposes: 1) to increase the RNA expression rate; 2) to increase the achievable protein synthesis rate; 3) to increase the solubility of the protein; 4) or to simplify purification by means of a binding sequence usable for affinity chromatography. Proteolytic cleavage points are also frequently introduced via fusion proteins, which allow cleavage of a portion of the fusion protein and purification. Such recognition sequences for proteases are recognized, e.g. factor Xa, thrombin and enterokinase.

[47903] Typical advantageous fusion and expression vectors are pGEX (Pharmacia Biotech Inc; D. B. Smith and K. S. Johnson, Gene 67, 31 (1988)), pMAL (New England Biolabs, Beverly, Mass.) and pRIT5 (Pharmacia, Piscataway, N.J.) which contains glutathione S-transferase (GST), maltose binding protein or protein A.

[47904] In an embodiment of the present invention, the coding sequence for the polypeptide of the invention is cloned into a pGEX expression vector to create a vector encoding a fusion polypeptide comprising, from the N-terminus to the C-terminus, GST-thrombin cleavage site-X polypeptide. The fusion polypeptide can be purified by affinity chromatography using glutathione-agarose resin. Recombinant FCRP unfused to GST can be recovered by cleavage of the fusion polypeptide with thrombin. Other examples of E. coli expression vectors are pTrc (Amann et al., Gene 69, 301 (1988)) and pET vectors (Studier et al., “Gene Expression Technology: Methods in Enzymology 185”, Academic Press, San Diego, Calif. (1990) 60-89; Stratagene, Amsterdam, The Netherlands).

[47905] Target gene expression from the pTrc vector relies on host RNA polymerase transcription from a hybrid trp-lac fusion promoter. Target gene expression from the pET 11d vector relies on transcription from a T7 gn10-lac fusion promoter mediated by a co-expressed viral RNA polymerase (T7 gn1). This viral polymerase is supplied by host strains BL21(DE3) or HMS174(DE3) from a resident I prophage harboring a T7 gn1 gene under the transcriptional control of the lacUV 5 promoter.

[47906] In a further embodiment of the present invention, the FCRPs are expressed in plants and plant cells such as unicellular plant cells (e.g. algae) (see Falciatore et al., Marine Biotechnology 1 (3), 239 (1999) and references therein) and plant cells from higher plants (e.g., the spermatophytes, such as crop plants), for example to regenerate plants from the plant cells. A nucleic acid molecule coding for FCRP as depicted in Table II, column 5 or 8, or a homolog or a fragment thereof, (and, if desired, in combination with the nucleic acid encoding a respective transit peptide) may be “introduced” into a plant cell by any means, including transfection, transformation or transduction, electroporation, particle bombardment, agroinfection, and the like. One transformation method known to those of skill in the art is the dipping of a flowering plant into an Agrobacteria solution, wherein the Agrobacteria contains the nucleic acid of the invention, followed by breeding of the transformed gametes.

[47907] Other suitable methods for transforming or transfecting host cells including plant cells can be found in Sambrook et al., “Molecular Cloning: A Laboratory Manual”. 2nd ed., Cold Spring Harbor Laboratory, Cold Spring Harbor Laboratory Press, Cold Spring Harbor, N.Y., 1989, and other laboratory manuals such as “Methods in Molecular Biology”, 1995, Vol. 44,

[47908] Agrobacterium protocols, ed: Gartland and Davey, Humana Press, Totowa, N.J. As generated or increased production of the fine chemical is generally wished to be inherited into a wide variety of monocotyledonous or dicotyledonous plants, preferably plants like maize, wheat, rye, oat, triticale, rice, barley, sugar cane, soybean, peanut, cotton, rapeseed and canola, manihot, pepper, sunflower and tagetes, sugar beet, solanaceous plants like potato, tobacco, eggplant, and tomato, Vicia species, pea, alfalfa, bushy plants (coffee, cacao, tea), Salix species, trees (oil palm, coconut), perennial grasses, and forage crops, these crop plants are also preferred target plants for a genetic engineering as one further embodiment of the present invention. Forage crops include, but are not limited to Wheatgrass, Canarygrass, Bromegrass, Wildrye Grass, Bluegrass, Orchardgrass, Alfalfa, Salfoin, Birdsfoot Trefoil, Alsike Clover, Red Clover and Sweet Clover.

[47909] In one embodiment of the present invention, transfection of a nucleic acid molecule coding for FCRP e.g. as depicted in Table II column 5 or 8, or a homolog or a fragment thereof, (and, if desired, in combination with the nucleic acid encoding a respective transit peptide) into a plant is achieved by Agrobacterium mediated gene transfer. Agrobacterium mediated plant transformation can be performed using for example the GV3101(pMP90) (Koncz and Schell, Mol. Gen. Genet. 204, 383 (1986)) or LBA4404 (Clontech) Agrobacterium tumefaciens strain. Transformation can be performed by standard transformation and regeneration techniques (Deblaere et al., Nucl. Acids Res. 13, 4777 (1994), Gelvin, B. Stanton and Robert A. Schilperoort, Plant Molecular Biology Manual, 2nd ed.—Dordrecht : Kluwer Academic Publ., 1995.—in Sect., Ringbuc Zentrale Signatur: BT11-P ISBN 0-7923-2731-4; Bernard R. Glick., John E. Thompson, “Methods in Plant Molecular Biology and Biotechnology”, Boca Raton: CRC Press, 1993 p. 360, ISBN 0-8493-5164-2). For example, rapeseed can be transformed via cotyledon or hypocotyl transformation (Moloney et al., Plant Cell Report 8, 238 (1989); De Block et al., Plant Physiol. 91, 694 (1989)). Use of antibiotics for Agrobacterium and plant selection depends on the binary vector and the Agrobacterium strain used for transformation. Rapeseed selection is normally performed using kanamycin as selectable plant marker. Agrobacterium mediated gene transfer to flax can be performed using, for example, a technique described by Mlynarova et al., Plant Cell Report 13, 282 (1994). Additionally, transformation of soybean can be performed using for example a technique described in European Patent No. 424 047, U.S. Pat. No. 5,322,783, European Patent No. 397 687, U.S. Pat. No. 5,376,543 or U.S. Pat. No. 5,169,770. Transformation of maize can be achieved by particle bombardment, polyethylene glycol mediated DNA uptake or via the silicon carbide fiber technique. (See, for example, Freeling and Walbot “The maize handbook” Springer Verlag: New York (1993) ISBN 3-540. 97826-7). A specific example of maize transformation is found in U.S. Pat. No. 5,990,387, and a specific example of wheat transformation can be found in PCT Application No. WO 93/07256. Examples for rice transformation can be found e.g. in EP 1 728 418 or EP 897 013.

[47910] According to the present invention, the introduced nucleic acid molecule coding for FCRP e.g. as depicted in Table II, column 5 or 8, or a homolog or a fragment thereof, may be maintained in the plant cell stably if it is incorporated into a non-chromosomal autonomous replicon or integrated into the plant chromosomes or organelle genome. Alternatively, the introduced FCRP may be present on an extra-chromosomal non-replicating vector and be transiently expressed or transiently active.

[47911] Whether present in an extra-chromosomal non-replicating vector or a vector that is integrated into a chromosome, the nucleic acid molecule coding for FCRP as depicted in Table II, column 5 or 8, a homolog or a fragment thereof, preferably resides in a non-human organism expression cassette, preferably a microorganism expression cassette or a plant expression cassette. A plant expression cassette preferably contains regulatory sequences capable of driving gene expression in plant cells that are operatively linked so that each sequence can fulfill its function, for example, termination of transcription by polyadenylation signals. Preferred polyadenylation signals are those originating from Agrobacterium tumefaciens t-DNA such as the gene 3 known as octopine synthase of the Ti-plasmid pTiACH5 (Gielen et al., EMBO J. 3, 835 (1984)) or functional equivalents thereof but also all other terminators functionally active in plants are suitable. As plant gene expression is very often not limited on transcriptional levels, a plant expression cassette preferably contains other operatively linked sequences like translational enhancers such as the overdrive-sequence containing the 5″-untranslated leader sequence from tobacco mosaic virus enhancing the polypeptide per RNA ratio (Gallie et al., Nucl. Acids Research 15, 8693 (1987)). Examples of plant expression vectors include those detailed in: D. Becker et al., Plant Mol. Biol. 20, 1195 (1992); and M. W. Bevan, Nucl. Acid. Res. 12, 8711 (1984); and “Vectors for Gene Transfer in Higher Plants” in: Transgenic Plants, Vol. 1, Engineering and Utilization, eds. Kung and Wu R., Academic Press, 1993, S. 15-38. “Transformation” is defined herein as a process for introducing DNA into a non-human organism, preferably a microorganism or a plant or a part thereof, like a plant cell or plant tissue. In an embodiment the transformation is performed with heterologous DNA. In another embodiment the transformation is performed with “additional” homologous DNA. Transformation may occur under natural or artificial conditions using various methods well known in the art. Transformation may rely on any known method for the insertion of (foreign, additional) nucleic acid sequences into a prokaryotic or eukaryotic host cell. The method is selected based on the host cell being transformed and may include, but is not limited to, viral infection, electroporation, lipofection, and particle bombardment. Such “transformed” cells include stably transformed cells in which the inserted DNA is capable of replication either as an autonomously replicating plasmid or as part of the host chromosome. They also include cells which transiently express the inserted DNA or RNA for limited periods of time. Transformed plant cells, plant tissue, or plants are understood to encompass not only the end product of a transformation process, but also transgenic progeny thereof.

[47912] The terms “transformed,” “transgenic,” and “recombinant” refer to a host organism such as a microorganism, e.g. a bacterium, or a plant into which a nucleic acid molecule has been introduced. In an embodiment the introduced nucleic acid molecule is heterogenous. In another embodiment the introduced DNA is homologous. The nucleic acid molecule can be stably integrated into the genome of the host or the nucleic acid molecule can also be present as an extra-chromosomal molecule. Such an extra-chromosomal molecule can be autoreplicating. A “non-transformed”, “non-transgenic” or “non-recombinant” host refers to a wild-type organism, e.g. a bacterium or plant, which does not contain the heterologous nucleic acid molecule or the additional homologous nucleic acid molecule.

[47913] In an embodiment a “transgenic plant”, as used herein, refers to a plant which contains a nucleotide sequence inserted into either its nuclear genome or organelle genome. In an embodiment the introduced nucleic acid molecule is heterogenous. In another embodiment the introduced DNA is homologous. In each case it encompasses further the offspring generations i.e. the Ti-, T2- and consecutively generations or BC1-, BC2- and consecutively generation as well as crossbreeds thereof with non-transgenic or other transgenic plants, as long as it contains said nucleic acid sequence.

[47914] The host organism (=transgenic organism) advantageously contains at least one copy of the nucleic acid in addition according to the invention and/or of the nucleic acid construct in addition according to the invention.

[47915] In principle all non-human organism can be used as host organism. In an embodiment the transgenic non-human organism or cell is a prokaryotic organism. In an embodiment the transgenic non-human organism or cell is an eukaryotic organism, like an alga, a non-human animal or a plant, in particular an algae or a plant. Preferred transgenic plants are monocotyledonous or dicotyledonous plants, preferably, for example, selected from the families Aceraceae, Anacardiaceae, Apiaceae, Asteraceae, Brassicaceae, Cactaceae, Cucurbitaceae, Euphorbiaceae, Fabaceae, Malvaceae, Nymphaeaceae, Papaveraceae, Rosaceae, Salicaceae, Solanaceae, Arecaceae, Bromeliaceae, Cyperaceae, lridaceae, Liliaceae, Orchidaceae, Gentianaceae, Labiaceae, Magnoliaceae, Ranunculaceae, Carifolaceae, Rubiaceae, Scrophulariaceae, Caryophyllaceae, Ericaceae, Polygonaceae, Violaceae, Juncaceae or Poaceae and preferably from a plant selected from the group of the families Apiaceae, Asteraceae, Brassicaceae, Cucurbitaceae, Fabaceae, Papaveraceae, Rosaceae, Solanaceae, Liliaceae or Poaceae. Preferred are crop plants such as plants advantageously selected from the group of the genus peanut, oilseed rape, canola, sunflower, safflower, olive, sesame, hazelnut, almond, avocado, bay, pumpkin/squash, linseed, soya, pistachio, borage, maize, wheat, rye, oats, sorghum and millet, triticale, rice, barley, sugarcane, cotton, cassava, potato, sugarbeet, egg plant, alfalfa, and perennial grasses and forage plants, oil palm, vegetables (brassicas, root vegetables, tuber vegetables, pod vegetables, fruiting vegetables, onion vegetables, leafy vegetables and stem vegetables), buckwheat, Jerusalem artichoke, broad bean, vetches, lentil, dwarf bean, lupin, clover and lucerne for mentioning only some of them.

[47916] In one embodiment of the invention transgenic plants are selected from the group comprising monocotyledonous or dicotyledonous plants, preferably cereals, soybean, rapeseed (including oil seed rape, especially canola and winter oil seed rape), cotton, sugarcane and potato, especially corn, soy, rapeseed (including oil seed rape, especially canola and winter oil seed rape), cotton, wheat and rice.

[47917] In one embodiment, the transgenic plant is a crop plant, in particular a transgenic plant belonging to e.g. Anacardium occidentale, Calendula officinalis, Carthamus tinctorius, Cichorium intybus, Cynara scolymus, Helianthus annus, Tagetes lucida, Tagetes erecta, Tagetes tenuifolia; Daucus carota; Corylus avellana, Corylus colurna, Borago officinalis; Brassica napus, Brassica rapa ssp., Sinapis arvensis Brassica juncea, Brassica juncea var. juncea, Brassica juncea var. crispifolia, Brassica juncea var. foliosa, Brassica nigra, Brassica sinapioides, Melanosinapis communis, Brassica oleracea, Arabidopsis thaliana, Anana comosus, Ananas ananas, Bromelia comosa, Carica papaya, Cannabis sative, Ipomoea batatus, Ipomoea pandurata, Convolvulus batatas, Convolvulus tiliaceus, Ipomoea fastigiata, Ipomoea tiliacea, Ipomoea triloba, Convolvulus panduratus, Beta vulgaris, Beta vulgaris var. altissima, Beta vulgaris var. vulgaris, Beta maritima, Beta vulgaris var. perennis, Beta vulgaris var. conditiva, Beta vulgaris var. esculenta, Cucurbita maxima, Cucurbita mixta, Cucurbita pepo, Cucurbita moschata, Olea europaea, Manihot utilissima, Janipha manihot, Jatropha manihot, Manihot aipil, Manihot dulcis, Manihot manihot, Manihot melanobasis, Manihot esculenta, Ricinus communis, Pisum sativum, Pisum arvense, Pisum humile, Medicago sativa, Medicago falcata, Medicago varia, Glycine max Dolichos soja, Glycine gracilis, Glycine hispida, Phaseolus max, Soja hispida, Glycine max, Cocos nucifera, Pelargonium grossularioides, Oleum cocoas, Laurus nobilis, Persea americana, Arachis hypogaea, Linum usitatissimum, Linum humile, Linum austriacum, Linum bienne, Linum angustifolium, Linum catharticum, Linum flavum, Linum grandiflorum, Adenolinum grandiflorum, Linum lewisii, Linum narbonense, Linum perenne, Linum perenne var. lewisii, Linum pratense, Linum trigynum, Punica granatum, Gossypium hirsutum, Gossypium arboreum, Gossypium barbadense, Gossypium herbaceum, Gossypium thurberi, Musa nana, Musa acuminata, Musa paradisiaca, Musa spp., Elaeis guineensis, Papaver orientale, Papaver rhoeas, Papaver dubium, Sesamum indicum, Piper aduncum, Piper amalago, Piper angustifolium, Piper auritum, Piper betel, Piper cubeba, Piper longum, Piper nigrum, Piper retrofractum, Artanthe adunca, Artanthe elongata, Peperomia elongata, Piper elongatum, Steffensia elongata, Hordeum vulgare, Hordeum jubatum, Hordeum murinum, Hordeum secalinum, Hordeum distichon Hordeum aegiceras, Hordeum hexastichon., Hordeum hexastichum, Hordeum irregulare, Hordeum sativum, Hordeum secalinum, Avena sativa, Avena fatua, Avena byzantina, Avena fatua var. sativa, Avena hybrida, Sorghum bicolor, Sorghum halepense, Sorghum saccharatum, Sorghum vulgare, Andropogon drummondii, Holcus bicolor, Holcus sorghum, Sorghum aethiopicum, Sorghum arundinaceum, Sorghum caffrorum, Sorghum cernuum, Sorghum dochna, Sorghum drummondii, Sorghum durra, Sorghum guineense, Sorghum lanceolatum, Sorghum nervosum, Sorghum saccharatum, Sorghum subglabrescens, Sorghum verticilliflorum, Sorghum vulgare, Holcus halepensis, Sorghum miliaceum millet, Panicum militaceum, Zea mays, Triticum aestivum, Triticum durum, Triticum turgidum, Triticum hybernum, Triticum macha, Triticum sativum or Triticum vulgare, Cofea spp., Coffea arabica, Coffea canephora, Coffea liberica, Capsicum annuum, Capsicum annuum var. glabriusculum, Capsicum frutescens, Capsicum annuum, Nicotiana tabacum, Solanum tuberosum, Solanum melongena, Lycopersicon esculentum, Lycopersicon lycopersicum, Lycopersicon pyriforme, Solanum integrifolium, Solanum lycopersicum Theobroma cacao, Panicum virgatum or Camellia sinensis.

[47918] In another embodiment, the transgenic plant belongs to monocotyledonous or dicotyledonous plants, preferably to Anacardiaceae such as the genera Pistacia, Mangifera, Anacardium e.g. the species Pistacia vera [pistachios, Pistazie], Mangifer indica [Mango] or Anacardium occidentale [Cashew]; Asteraceae such as the genera Calendula, Carthamus, Centaurea, Cichorium, Cynara, Helianthus, Lactuca, Locusta, Tagetes, Valeriana e.g. the species Calendula officinalis [Marigold], Carthamus tinctorius [safflower], Centaurea cyanus [cornflower], Cichorium intybus [blue daisy], Cynara scolymus [Artichoke], Helianthus annus [sunflower], Lactuca sativa, Lactuca crispa, Lactuca esculenta, Lactuca scariola L. ssp. sativa, Lactuca scariola L. var. integrate, Lactuca scariola L. var. integrifolia, Lactuca sativa subsp. romana, Locusta communis, Valeriana locusta [lettuce], Tagetes lucida, Tagetes erecta or Tagetes tenuifolia [Marigold]; Apiaceae such as the genera Daucus e.g. the species Daucus carota [carrot]; Betulaceae such as the genera Corylus e.g. the species Corylus avellana or Corylus colurna [hazelnut]; Boraginaceae such as the genera Borago e.g. the species Borago officinalis [borage]; Brassicaceae such as the genera Brassica, Melanosinapis, Sinapis, Arabadopsis e.g. the species Brassica napus, Brassica rapa ssp. [canola, oilseed rape, turnip rape], Sinapis arvensis Brassica juncea, Brassica juncea var. juncea, Brassica juncea var. crispifolia, Brassica juncea var. foliosa, Brassica nigra, Brassica sinapioides, Melanosinapis communis [mustard], Brassica oleracea [fodder beet] or Arabidopsis thaliana; Bromeliaceae such as the genera Anana, Bromelia e.g. the species Anana comosus, Ananas ananas or Bromelia comosa [pineapple]; Caricaceae such as the genera Carica e.g. the species Carica papaya [papaya]; Cannabaceae such as the genera Cannabis e.g. the species Cannabis sative [hemp], Convolvulaceae such as the genera Ipomea, Convolvulus e.g. the species Ipomoea batatus, Ipomoea pandurata, Convolvulus batatas, Convolvulus tiliaceus, Ipomoea fastigiata, Ipomoea tiliacea, Ipomoea triloba or Convolvulus panduratus [sweet potato, Man of the Earth, wild potato], Chenopodiaceae such as the genera Beta, i.e. the species Beta vulgaris, Beta vulgaris var. altissima, Beta vulgaris var. Vulgaris, Beta maritima, Beta vulgaris var. perennis, Beta vulgaris var. conditiva or Beta vulgaris var. esculenta [sugar beet]; Cucurbitaceae such as the genera Cucubita e.g. the species Cucurbita maxima, Cucurbita mixta, Cucurbita pepo or Cucurbita moschata [pumpkin, squash]; Elaeagnaceae such as the genera Elaeagnus e.g. the species Olea europaea [olive]; Ericaceae such as the genera Kalmia e.g. the species Kalmia latifolia, Kalmia angustifolia, Kalmia microphylla, Kalmia polifolia, Kalmia occidentalis, Cistus chamaerhodendros or Kalmia lucida [American laurel, broad-leafed laurel, calico bush, spoon wood, sheep laurel, alpine laurel, bog laurel, western bog-laurel, swamp-laurel]; Euphorbiaceae such as the genera Manihot, Janipha, Jatropha, Ricinus e.g. the species Manihot utilissima, Janipha manihot, Jatropha manihot, Manihot aipil, Manihot dulcis, Manihot manihot, Manihot melanobasis, Manihot esculenta [manihot, arrowroot, tapioca, cassava] or Ricinus communis [castor bean, Castor Oil Bush, Castor Oil Plant, Palma Christi, Wonder Tree]; Fabaceae such as the genera Pisum, Albizia, Cathormion, Feuillea, Inga, Pithecolobium, Acacia, Mimosa, Medicajo, Glycine, Dolichos, Phaseolus, Soja e.g. the species Pisum sativum, Pisum arvense, Pisum humile [pea], Albizia berteriana, Albizia julibrissin, Albizia lebbeck, Acacia berteriana, Acacia littoralis, Albizia berteriana, Albizzia berteriana, Cathormion berteriana, Feuillea berteriana, Inga fragrans, Pithecellobium berterianum, Pithecellobium fragrans, Pithecolobium berterianum, Pseudalbizzia berteriana, Acacia julibrissin, Acacia nemu, Albizia nemu, Feuilleea julibrissin, Mimosa julibrissin, Mimosa speciosa, Sericanrda julibrissin, Acacia lebbeck, Acacia macrophylla, Albizia lebbek, Feuilleea lebbeck, Mimosa lebbeck, Mimosa speciosa [bastard logwood, silk tree, East Indian Walnut], Medicago sativa, Medicago falcata, Medicago varia [alfalfa], Glycine max [soybean ], Dolichos soja, Glycine gracilis, Glycine hispida, Phaseolus max or Soja hispida; Geraniaceae such as the genera Pelargonium, Cocos, Oleum e.g. the species Cocos nucifera, Pelargonium grossularioides or Oleum cocois [coconut]; Gramineae such as the genera Saccharum e.g. the species Saccharum officinarum; Juglandaceae such as the genera Juglans, Wallia e.g. the species Juglans regia, Juglans ailanthifolia, Juglans sieboldiana, Juglans cinerea, Wallia cinerea, Juglans bixbyi, Juglans californica, Juglans hindsii, Juglans intermedia, Juglans jamaicensis, Juglans major, Juglans microcarpa, Juglans nigra or Wallia nigra [walnut, black walnut, common walnut, persian walnut, white walnut, butternut, black walnut]; Lauraceae such as the genera Persea, Laurus e.g. the species laurel Laurus nobilis [bay, laurel, bay laurel, sweet bay], Persea americana Persea americana, Persea gratissima or Persea persea [avocado]; Leguminosae such as the genera Arachis e.g. the species Arachis hypogaea [peanut]; Linaceae such as the genera Linum, Adenolinum e.g. the species Linum usitatissimum, Linum humile, Linum austriacum, Linum bienne, Linum angustifolium, Linum catharticum, Linum flavum, Linum grandiflorum, Adenolinum grandiflorum, Linum lewisii, Linum narbonense, Linum perenne, Linum perenne var. lewisii, Linum pratense or Linum trigynum [flax, linseed]; Lythrarieae such as the genera Punica e.g. the species Punica granatum [pomegranate]; Malvaceae such as the genera Gossypium e.g. the species Gossypium hirsutum, Gossypium arboreum, Gossypium barbadense, Gossypium herbaceum or Gossypium thurberi [cotton]; Musaceae such as the genera Musa e.g. the species Musa nana, Musa acuminata, Musa paradisiaca, Musa spp. [banana ]; Onagraceae such as the genera Camissonia, Oenothera e.g. the species Oenothera biennis or Camissonia brevipes [primrose, evening primrose]; Palmae such as the genera Elacis e.g. the species Elaeis guineensis [oil plam]; Papaveraceae such as the genera Papaver e.g. the species Papaver orientale, Papaver rhoeas, Papaver dubium [poppy, oriental poppy, corn poppy, field poppy, shirley poppies, field poppy, long-headed poppy, long-pod poppy]; Pedaliaceae such as the genera Sesamum e.g. the species Sesamum indicum [sesame]; Piperaceae such as the genera Piper, Artanthe, Peperomia, Steffensia e.g. the species Piper aduncum, Piper amalago, Piper angustifolium, Piper auritum, Piper betel, Piper cubeba, Piper longum, Piper nigrum, Piper retrofractum, Artanthe adunca, Artanthe elongata, Peperomia elongata, Piper elongatum, Steffensia elongata. [Cayenne pepper, wild pepper]; Poaceae such as the genera Hordeum, Secale, Avena, Sorghum, Andropogon, Holcus, Panicum, Oryza, Zea, Triticum e.g. the species Hordeum vulgare, Hordeum jubatum, Hordeum murinum, Hordeum secalinum, Hordeum distichon Hordeum aegiceras, Hordeum hexastichon, Hordeum hexastichum, Hordeum irregulare, Hordeum sativum, Hordeum secalinum [barley, pearl barley, foxtail barley, wall barley, meadow barley], Secale cereale [rye], Avena sativa, Avena fatua, Avena byzantina, Avena fatua var. sativa, Avena hybrida [oat], Sorghum bicolor, Sorghum halepense, Sorghum saccharatum, Sorghum vulgare, Andropogon drummondii, Holcus bicolor, Holcus sorghum, Sorghum aethiopicum, Sorghum arundinaceum, Sorghum caffrorum, Sorghum cernuum, Sorghum dochna, Sorghum drummondii, Sorghum durra, Sorghum guineense, Sorghum lanceolatum, Sorghum nervosum, Sorghum saccharatum, Sorghum subglabrescens, Sorghum verticilliflorum, Sorghum vulgare, Holcus halepensis, Sorghum miliaceum millet, Panicum militaceum [Sorghum, millet], Oryza sativa, Oryza latifolia [rice], Zea mays [corn, maize] Triticum aestivum, Triticum durum, Triticum turgidum, Triticum hybernum, Triticum macha, Triticum sativum or Triticum vulgare [wheat, bread wheat, common wheat], Proteaceae such as the genera Macadamia e.g. the species Macadamia intergrifolia [macadamia]; Rubiaceae such as the genera Coffea e.g. the species Cofea spp., Coffea arabica, Coffea canephora or Coffea liberica [coffee]; Scrophulariaceae such as the genera Verbascum e.g. the species Verbascum blattaria, Verbascum chaixii, Verbascum densiflorum, Verbascum lagurus, Verbascum longifolium, Verbascum lychnitis, Verbascum nigrum, Verbascum olympicum, Verbascum phlomoides, Verbascum phoenicum, Verbascum pulverulentum or Verbascum thapsus [mullein, white moth mullein, nettle-leaved mullein, dense-flowered mullein, silver mullein, long-leaved mullein, white mullein, dark mullein, greek mullein, orange mullein, purple mullein, hoary mullein, great mullein]; Solanaceae such as the genera Capsicum, Nicotiana, Solanum, Lycopersicon e.g. the species Capsicum annuum, Capsicum annuum var. glabriusculum, Capsicum frutescens [pepper], Capsicum annuum [paprika], Nicotiana tabacum, Nicotiana alata, Nicotiana attenuata, Nicotiana glauca, Nicotiana langsdorffii, Nicotiana obtusifolia, Nicotiana quadrivalvis, Nicotiana repanda, Nicotiana rustica, Nicotiana sylvestris [tobacco], Solanum tuberosum [potato], Solanum melongena [egg-plant] (Lycopersicon esculentum, Lycopersicon lycopersicum, Lycopersicon pyriforme, Solanum integrifolium or Solanum lycopersicum [tomato]; Sterculiaceae such as the genera Theobroma e.g. the species Theobroma cacao [cacao]; Theaceae such as the genera Camellia e.g. the species Camellia sinensis) [tea].

[47919] In another embodiment of the invention the transgenic non-human organism is a transgenic microorganism like selected from the group consisting of Charophyceae such as the genera Chara, Nitella e.g. the species Chara globularis, Chara vulgaris, Nitella flexilis, Chlorophyceae such as the genera Acrosiphonia, Spongomorpha, Urospora, Bryopsis, Pseudobryopsis, Trichosolen, Dichotomosiphon, Caulerpa, Rhipilia, Blastophysa, Avrainvillea, Chlorodesmis, Codium, Espera, Halicystis, Halimeda, Penicillus, Pseudocodium, Rhipiliopsis, Rhipocephalus, Tydemania, Udotea, Derbesia, Acrochaete, Aphanochaete, Bolbocoleon, Chaetobolus, Chaetonema, Chaetophora, Chlorotylium, Desmococcus, Draparnaldia, Draparnaldiopsis, Ectochaete, Endophyton, Entocladia, Epicladia, Internoretia, Microthamnion, Ochlochaete, Phaeophila, Pilinella, Pringsheimiella, Protoderma, Pseudendoclonium, Pseudodictyon, Pseudopringsheimia, Pseudulvella, Schizomeris, Stigeoclonium, Thamniochaete, Ulvella, Pilinia, Tellamia, Helicodictyon, Actidesmium, Ankyra, Characium, Codiolum, Sykidion, Keratococcus, Prototheca, Bracteacoccus Chlorococcum, Excentrosphaera, Hormidium, Oophila, Schroederia, Tetraedron, Trebouxia Chlorosarcinopsis, Gomphonitzschia, Coccomyxa, Dactylothece, Diógenes, Disporá, Gloeocystis, Mycanthococcus, Ourococcus, Coelastrum, Dicranochaete, Botryococcus, Dictyosphaerium, Dimorphococcus, Chlorochytrium, Kentrosphaera, Phyllobium, Gomontia, Hormotila, Euastropsis, Hydrodictyon, Pectodictyon, Pediastrum, Sorastrum, Tetrapedia, Acanthosphaera, Echinosphaerella, Echinosphaeridium, Errerella, Gloeoactinium, Golenkeniopsis Golenkinia, Micractinium, Ankistrodesmus, Chlorella, Chodatella, Closteriopsis, Cryocystis, Dactylococcus, Dematractum, Eremosphaera, Eutetramorus, Franceia, Glaucocystis, Gloeotaenium, Kirchneriella, Lagerheimiella, Monoraphidium, Nannochloris, Nephrochlamys, Nephrocytium, Oocystis, Oonephris, Pachycladon, Palmellococcus, Planktosphaeria, Polyedriopsis, Pseudoraciborskia, Quadrigula, Radiococcus, Rochiscia, Scotiella, Selanastrum, Thorakochloris, Treubaria, Trochiscia, Westella, Zoochlorella, Ostreobium, Phyllosiphon, Protosiphon, Rhodochytrium, Actinastrum, Coronastrum, Crucigenia, Dictymocystis, Enallax, Scenedesmus, Selenastrum, Tetradesmus, Tetrallantos, Tetrastrum, Chlorosarcina, Anadyomene, Valoniopsis, Ventricaria, Basicladia, Chaetomorpha, Cladophora, LolaPithophoraRhizoclonium Chaetosphaeridium, Conochaete, Coleochaete, Oligochaetophora, Polychaetophora, Cylindrocapsa, Gongrosira, Protococcus, Acetabularia, Batophora, Bornetella, Dasycladus, Halicoryne, Neomeris, Elakatothrix, Raphidonema, Microspora, Bulbochaete, Oedocladium, Oedogonium, Prasiola, Rosenvingiella, Schizogonium, Apjohnia, Chamaedoris, Cladophoropsis, Siphonocladus, Spongocladia, Boergesenia, Boodlea, Cystodictyon, Dictyosphaeria, Ernodesmis, Microdictyon, Struvea, Valonia, Sphaeroplea, Malleochloris, Stylosphaeridium, Gloeococcus, Palmella, Palmodictyon, Palmophyllum, Pseudospherocystis, Sphaerocystis, Urococcus, Apiocystis, Chaetopeltis, Gemellicystis, Paulschulzia, Phacomyxa, Pseudotetraspora, Schizochlamys, Tetraspora, Cephaleuros, Ctenocladus, Epibolium, Leptosira, Trentepohlia, Diplochaete, Monostroma, Binuclearia, Geminella, Klebsormidium, Planetonema, Radiofilum, Stichococcus, Ulothrix, Uronema, Blidingia, Capsosiphon, Chloropelta, Enteromorpha, Percursaria, Ulva, Ulvaria, Brachiomonas, Carteria, Chlainomonas, Chlamydomonas, Chlamydonephris, Chlorangium, Chlorogonium, Cyanidium, Fortiella, Glenomonas, Gloeomonas, Hyalogonium, Lobomonas Polytoma, Pyramichlamys, Scourfieldia, Smithsonimonas, Sphaerellopsis, Sphenochloris, Spirogonium, Collodictyon, Dunaliella, Haematococcus, Stephanosphaera, Coccomonas, Dysmorphococcus, Phacotus, Pteromonas, Thoracomonas, Wislouchiella, Mascherina, Pyrobotrys, Spondylomorum, Eudorina, Gonium, Oltmannsiella, Pandorina, Platydorina, Pleodorina, Stephanoon, Volvox, Volvulina, Actinotaenium, Arthrodesmus, Bambusina Closterium, Cosmarium, Desmidium, Euastrum, Groenbladia, Hyalotheca, Micrasterias, Penium, Phymatodocis, Pleurotaenium, Sphaerozosma, Spinoclosterium, Spinocosmarium, Spondylosium, Staurastrum, Tetmemorus, Triploceras, Xanthidium, Cylindrocystis, Genicularia, Gonatozygon, Mesotaenium, Netrium, Roya, Spirotaenia, Cosmocladium, Debarya, Docidium, Euastridium, Hallasia, Mougeotia, Mougeotiopsis, Sirogonium, Spirogyra, Staurodesmus, Teilingia, Zygnema, Zygogonium, e.g. the species Caulerpa taxifolia, Prototheca wickerhamii, Ankistrodesmus falcatus, Chlorella ellipsoidea, Chlorella pyrenoidosa, Clorella sorokiniana, Chlorella vulgaris, Scenedesmus obliquus, Scenedesmus quadricauda, Selenastrum capricornutum, Selenastrum undecimnotata, Cladophora glomerata, Chlamydomonas eugametos, Chlamydomonas reinhardtii, Cyanidium caldarium, Dunaliella salina, Dunaliella tertiolecta, Euglena gracilis, Haematococcus pluvialis, Coniugatophyceae, Prasinophyceae Trebouxiophyceae, Ulvophyceae, Chlorodendraceae, Pedinomonadales, Halosphaeraceae, Pterospermataceae, Monomastigaceae, Pyramimonadaceae, Chlorodendraceae such as the genera Prasinocladus e.g. the species Prasinocladus ascus, Halosphaeraceae, Pedinomonadales, Pedinomonadaceae such as the genera Pedinomonas, Pterospermataceae such as the genera Pachysphaera, Pterosperma, Halosphaera, Pyramimonas, Bacillariophyceae, Chrysophyceae, Craspedophyceae, Euglenophyceae, Prymnesiophyceae, Phaeophyceae, Dinophyceae, Rhodophyceae, Xanthophyceae, Prasinophyceae such as the genera Nephroselmis, Prasinococcus, Scherffelia, Tetraselmis, Mantoniella, Ostreococcus e.g. the species Nephroselmis olivacea, Prasinococcus capsulatus, Scherffelia dubia, Tetraselmis chui, Tetraselmis suecica, Mantoniella squamata or Ostreococcus tauri.

[47920] Other useful organism are prokaryotic host organism, which may be useful for the cloning of the desired nucleic acid constructs or vectors such as the genera Escherichia, for example the species Escherichia coli, in particular E. coli K12 and its described strains or Agrobacterium, for example Agrobacterium tumefaciens.

[47921] The introduction of the nucleic acids according to the invention, the expression cassette or the vector into the non-human organism, like a microorganism or a plant, can in principle be done by all of the methods known to those skilled in the art. The introduction of the nucleic acid sequences gives rise to recombinant or transgenic organisms.

[47922] After the introduction of the nucleic acid, nucleic acid construct, expression cassette or vector, and the expression thereof the transgenic organism or cell is advantageously cultured and subsequently harvested.

[47923] Unless otherwise specified, the terms “polynucleotides”, “nucleic acid” and “nucleic acid molecule” as used herein are interchangeably. Unless otherwise specified, the terms “peptide”, “polypeptide” and “protein” are interchangeably in the present context. The term “sequence” may relate to polynucleotides, nucleic acids, nucleic acid molecules, peptides, polypeptides and proteins, depending on the context in which the term “sequence” is used. The terms “gene(s)”, “polynucleotide”, “nucleic acid sequence”, “nucleotide sequence”, or “nucleic acid molecule(s)” as used herein refers to a polymeric form of nucleotides of any length, either ribonucleotides or deoxyribonucleotides. The terms refer only to the primary structure of the molecule.

[47924] Thus, the terms “gene(s)”, “polynucleotide”, “nucleic acid sequence”, “nucleotide sequence”, or “nucleic acid molecule(s)” as used herein include double- and single-stranded DNA and RNA. They also include known types of modifications, for example, methylation, “caps”, substitutions of one or more of the naturally occurring nucleotides with an analog. Preferably, the DNA or RNA sequence of the invention comprises a coding sequence encoding the herein defined polypeptide.

[47925] The genes of the invention, coding in one embodiment for an activity selected from the group consisting of 3-deoxy-7-phosphoheptulonate synthase, 3-deoxy-D-arabinoheptulosonate-7-phosphatesynthase, ABC transporter permease subunit, acetyltransferase, acid shock protein, adenylate kinase, adenylosuccinate lyase, amino-acid acetyltransferase, ankyrin repeat family protein, At1g29350-protein, ATP-binding component of a transport system, b1163-protein, b1219-protein, b1234-protein, b1522-protein, b1921-protein, b2360-protein, b2548-protein, b2613-protein, b2673-protein, b2812-protein, b3890-protein, b3989-protein, b4029-protein, b4050-protein, b4056-protein, calcium-dependent protein kinase, carbohydrate kinase, colanic acid biosynthesis protein, coproporphyrinogen oxidase, cyclin D , DNA polymerase subunit, electron transfer flavoprotein subunit beta, geranylgeranyl pyrophosphate synthase, geranyltranstransferase, gluconate transport system permease 3, glucose dehydrogenase, glucose-6-phosphate 1-dehydrogenase, glutaredoxin, glycerol dehydrogenase, glycerol-3-phosphate dehydrogenase, glycolate utilization protein, harpin-induced family protein, homocitrate synthase, hydrolase, isopropylmalate isomerase large subunit, lipopolysaccharide biosynthesis protein, MADS box protein transcription factor, major facilitator superfamily transporter protein, malate dehydrogenase, monothiol glutaredoxin, monthiol glutaredoxin, multiple antibiotic resistance protein, murein transglycosylase, N-(5′-phosphoribosyl)anthranilate isomerase, NAD-dependent epimerase/dehydratase, NADP-dependent malic enzyme, O-antigen chain length determinant, phosphatidylserine decarboxylase, phospho-2-dehydro-3-deoxyheptonate aldolase, phosphoadenosine phosphosulfate reductase , phosphofructokinase, photosystem II protein, polygalacturonase, polyphosphate kinase, precorrin methylase, protein kinase, protein phosphatase, putative transport system permease protein, pyruvate kinase, RNA-binding protein, Sec-independent protein translocase subunit, serine protease, sll1761-protein, slr1917-protein, small nuclear ribonucleoprotein , ThiF family protein, thioredoxin, thioredoxin family protein, threonine synthase, transcription factor, transcriptional regulator, transport protein, trehalose-phosphatase, TTC1386-protein, ycl049c-protein, ydl235c-protein, ydr183w-protein, yer106w-protein, ylr178c-protein, ypr170c-protein, and zinc finger protein are also called “FCRP genes”.

[47926] A “coding sequence” is a nucleotide sequence, which is transcribed into mRNA and/or translated into a polypeptide when placed under the control of appropriate regulatory sequences. The boundaries of the coding sequence are determined by a translation start codon at the 5′-terminus and a translation stop codon at the 3′-terminus. The triplets taa, tga and tag represent the (usual) stop codons which are interchangeable. A coding sequence can include, but is not limited to mRNA, cDNA, recombinant nucleotide sequences or genomic DNA, while introns may be present as well under certain circumstances.

[47927] To introduce a nucleic acid molecule into a nucleic acid construct, e.g. as part of an expression cassette, the codogenic gene segment is advantageously subjected to an amplification and ligation reaction in the manner known by a skilled person. It is preferred to follow a procedure similar to the protocol for the Pfu DNA polymerase or a Pfu/Taq DNA polymerase mixture. The primers are selected according to the sequence to be amplified. The primers should expediently be chosen in such a way that the amplificate comprise the codogenic sequence from the start to the stop codon. After the amplification, the amplificate is expediently analyzed. For example, the analysis may consider quality and quantity and be carried out following separation by gel electrophoresis. Thereafter, the amplificate can be purified following a standard protocol (for example Qiagen). An aliquot of the purified amplificate is then available for the subsequent cloning step. The skilled worker generally knows suitable cloning vectors.

[47928] They include, in particular, vectors which are capable of replication in easy to handle cloning systems like as bacterial, yeast or insect cell based (e.g. baculovirus expression) systems, that is to say especially vectors which ensure efficient cloning in E. coli, and which make possible the stable transformation of plants. Vectors, which must be mentioned, in particular are various binary and cointegrated vector systems, which are suitable for the T-DNA-mediated transformation. Such vector systems are generally characterized in that they contain at least the vir genes, which are required for the Agrobacterium-mediated transformation, and the T-DNA border sequences.

[47929] In general, vector systems preferably also comprise further cisregulatory regions such as promoters and terminators and/or selection markers by means of which suitably transformed organisms can be identified. While vir genes and T-DNA sequences are located on the same vector in the case of cointegrated vector systems, binary systems are based on at least two vectors, one of which bears vir genes, but no T-DNA, while a second one bears T-DNA, but no vir gene. Owing to this fact, the last-mentioned vectors are relatively small, easy to manipulate and capable of replication in E. coli and in Agrobacterium. These binary vectors include vectors from the series pBIB-HYG, pPZP, pBecks, pGreen. Those which are preferably used in accordance with the invention are Bin19, pBI101, pBinAR, pGPTV and pCAMBIA. An overview of binary vectors and their use is given by Hellens et al, Trends in Plant Science 5, 446-451 (2000). In case of a targeted expression the vectors are preferably modified in such a manner, that they already contain the nucleic acid coding for the transit peptide and that the nuleic acids of the invention, preferentially the nucleic acid sequences encoding the polypeptides shown in the respective line in Table II, column 5 or 8, or a homolog or a fragment thereof, can be cloned 3″prime to the transit peptide encoding sequence, leading to a functional preprotein, which is directed to the intended compartment, like plastids or mitochondria, and which means that the mature protein fulfills its biological activity.

[47930] For a vector preparation, vectors may first be linearized using restriction endonuclease(s) and then be modified enzymatically in a suitable manner. Thereafter, the vector is purified, and an aliquot is employed in the cloning step. In the cloning step, the enzymecleaved and, if required, purified amplificate is cloned together with similarly prepared vector fragments, using ligase. In this context, a specific nucleic acid construct, or vector or plasmid construct, may have one or else more codogenic gene segments. The codogenic gene segments in these constructs are preferably linked operably to regulatory sequences. The regulatory sequences include, in particular, plant sequences like the above-described promoters and terminators. The constructs can advantageously be propagated stably in microorganisms, in particular Escherichia coli and/or Agrobacterium tumefaciens, under selective conditions and enable the transfer of homologous or heterologous DNA into non-human organisms, like plants or other microorganisms. In accordance with a particular embodiment, the constructs are based on binary vectors (overview of a binary vector: Hellens et al., 2000). As a rule, they contain prokaryotic regulatory sequences, such as replication origin and selection markers, for the multiplication in microorganisms such as Escherichia coli and Agrobacterium tumefaciens. Vectors can further contain agrobacterial T-DNA sequences for the transfer of DNA into plant genomes or other eukaryotic regulatory sequences for transfer into other eukaryotic cells, e.g. Saccharomyces sp. or other prokaryotic regulatory sequences for the transfer into other prokaryotic cells, e.g. Corynebacterium sp. or Bacillus sp. For the transformation of plants, the right border sequence, which comprises approximately 25 base pairs, of the total agrobacterial T-DNA sequence is advantageously included. Usually, the plant transformation vector constructs according to the invention contain T-DNA sequences both from the right and from the left border region, which contain expedient recognition sites for site-specific acting enzymes, which, in turn, are encoded by some of the vir genes.

[47931] Alternatively the nuleic acids of the invention are cloned into vectors, which are designed for the direct transformation of organelles such as for example plastids. Generally such vectors additionally carry a specific resistance gene (as mentioned above), like the spectomycin resistance gene (aad) under control of a plastid regulatory sequence and two adjacent plastome sequences of the target organism, which mediated the directed insertion of the sequences of interest, e.g. the resistance gene and the expression cassette, into the plastidal genome through homologous recombination. As transformation can be achieved by particle bombardment or other physical or chemical methods e.g. PEG treatment or microinjection, the vectors do not need to contain the elements necessary for agrobacterial T-DNA transfer (see below).

[47932] In order to introduce, into a plant, the nucleic acid molecule of the invention or used in the process according to the invention, it has proved advantageous first to transfer them into an intermediate host, for example a bacterium or a eukaryotic unicellular cell. The transformation into E. coli, which can be carried out in a manner known per se, for example by means of heat shock or electroporation, has proved itself expedient in this context. Thus, the transformed E. coli colonies can be analyzed for their cloning efficiency. This can be carried out with the aid of a PCR. Here, not only the identity, but also the integrity, of the plasmid construct can be verified with the aid of a defined colony number by subjecting an aliquot of the colonies to said PCR. As a rule, universal primers which are derived from vector sequences are used for this purpose, it being possible, for example, for a forward primer to be arranged upstream of the start ATG and a reverse primer to be arranged downstream of the stop codon of the codogenic gene segment. The amplificates are separated by electrophoresis and assessed with regard to quantity and quality.

[47933] The nucleic acid constructs, which are optionally verified, are subsequently used for the transformation of the plants or other hosts, e.g. other eukaryotic cells or other prokaryotic cells. To this end, it may first be necessary to obtain the constructs from the intermediate host. For example, the constructs may be obtained as plasmids from bacterial hosts by a method similar to conventional plasmid isolation.

[47934] The nucleic acid molecule of the invention or used in the process according to the invention can also be introduced into modified viral vectors like baculovirus vectors for expression in insect cells or plant viral vectors like tobacco mosaic virus or potato virus X-based vectors. Approaches leading to the expression of proteins from the modified viral genome including the nucleic acid molecule of the invention or used in the process according to the invention involve for example the inoculation of tobacco plants with infectious RNA transcribed in vitro from a cDNA copy of the recombinant viral genome. Another approach utilizes the transfection of whole plants from wounds inoculated with Agrobacterium tumefaciens containing cDNA copies of recombinant plus-sense RNA viruses. Different vectors and virus are known to the skilled worker for expression in different target e.g. production plants.

[47935] A large number of methods for the transformation of plants are known. Since, in accordance with the invention, a stable integration of heterologous or additional homologous DNA into the genome of plants is advantageous, the T-DNA-mediated transformation has proved expedient in particular. For this purpose, it is first necessary to transform suitable vehicles, in particular agrobacteria, with a codogenic gene segment or the corresponding plasmid construct comprising the nucleic acid molecule of the invention or an expression cassette according to the invention. This can be carried out in a manner known per se. For example, said nucleic acid construct of the invention, like said expression cassette or said plasmid construct, which has been generated in accordance with what has been detailed above, can be transformed into competent agrobacteria by means of electroporation or heat shock. In principle, one must differentiate between the formation of cointegrated vectors on the one hand and the transformation with binary vectors on the other hand. In the case of the first alternative, the constructs, which comprise the codogenic gene segment or the nucleic acid molecule of the invention have no T-DNA sequences, but the formation of the cointegrated vectors or constructs takes place in the agrobacteria by homologous recombination of the construct with T-DNA. The T-DNA is present in the agrobacteria in the form of Ti or Ri plasmids in which exogenous DNA has expediently replaced the oncogenes. If binary vectors are used, they can be transferred to agrobacteria either by bacterial conjugation or by direct transfer. These agrobacteria expediently already comprise the vector bearing the vir genes (currently referred to as helper Ti (Ri) plasmid). As mentioned before the stable integration of the heterologous (or additional homologous) nucleic acids into the plastidial genome may also be advantageously.

[47936] One or more markers may expediently also be used together with the nucleic acid construct, like the expression cassette, or the vector of the invention and, if plants or plant cells shall be transformed together with the T-DNA, with the aid of which the isolation or selection of transformed organisms, such as agrobacteria or transformed plant cells, is possible. These marker genes enable the identification of a successful transfer of the nucleic acid molecules according to the invention via a series of different principles, for example via visual identification with the aid of fluorescence, luminescence or in the wavelength range of light which is discernible for the human eye, by a resistance to herbicides or antibiotics, via what are known as nutritive markers (auxotrophism markers) or antinutritive markers, via enzyme assays or via phytohormones. Examples of such markers which may be mentioned are GFP (=green fluorescent protein); the luciferin/luceferase system, the [3-galactosidase with its colored substrates, for example X-Gal, the herbicide resistances to, for example, imidazolinone, glyphosate, phosphinothricin or sulfonylurea, the antibiotic resistances to, for example, bleomycin, hygromycin, streptomycin, kanamycin, tetracyclin, chloramphenicol, ampicillin, gentamycin, geneticin (G418), spectinomycin or blasticidin, to mention only a few, nutritive markers such as the utilization of mannose or xylose, or antinutritive markers such as the resistance to 2-deoxyglucose. This list is a small number of possible markers. The skilled worker is very familiar with such markers. Different markers are preferred, depending on the organism and the selection method. In case of plastidal transformation methods other marker genes known to a person skilled in the art may be used, but also the ones mentioned above, preferably e.g. the spectomycin resistance gene (aadA).

[47937] As a rule, it is desired that the plant nucleic acid constructs, plant expression cassettes, are flanked by T-DNA at one or both sides of the codogenic gene segment. This is particularly useful when bacteria of the species Agrobacterium tumefaciens or Agrobacterium rhizogenes are used for the transformation. A method, which is preferred in accordance with the invention, is the transformation with the aid of Agrobacterium tumefaciens. However, biolistic methods may also be used advantageously for introducing the sequences in the process according to the invention, and the introduction by means of PEG is also possible. The transformed agrobacteria can be grown in the manner known per se and are thus available for the expedient transformation of the plants. The plants or plant parts to be transformed are grown or provided in the customary manner. The transformed agrobacteria are subsequently allowed to act on the plants or plant parts until a sufficient transformation rate is reached. Allowing the agrobacteria to act on the plants or plant parts can take different forms. For example, a culture of morphogenic plant cells or tissue may be used. After the T-DNA transfer, the bacteria are, as a rule, eliminated by antibiotics, and the regeneration of plant tissue is induced. This is done in particular using suitable plant hormones in order to initially induce callus formation and then to promote shoot development.

[47938] Plant cells, plant tissues etc. may be transformed transient or stable. An advantageous transformation method is the transformation in planta. To this end, it is possible, for example, to allow the agrobacteria to act on plant seeds or to inoculate the plant meristem with agrobacteria. It has proved particularly expedient in accordance with the invention to allow a suspension of transformed agrobacteria to act on the intact plant or at least the flower primordia. The plant is subsequently grown on until the seeds of the treated plant are obtained (Clough and Bent, Plant J. 16, 735 (1998)). To select transformed plants, the plant material obtained in the transformation is, as a rule, subjected to selective conditions so that transformed plants can be distinguished from untransformed plants. For example, the seeds obtained in the above-described manner can be planted and, after an initial growing period, subjected to a suitable selection by spraying. A further possibility consists in growing the seeds, if appropriate after sterilization, on agar plates using a suitable selection agent so that only the transformed seeds can grow into plants. Further advantageous transformation methods, in particular for plants, are known to the skilled worker and are described herein.

[47939] Further advantageous and suitable methods are protoplast transformation by poly(ethylene glycol)-induced DNA uptake, the “biolistic” method using the gene cannon—referred to as the particle bombardment method, electroporation, the incubation of dry embryos in DNA solution, microinjection and gene transfer mediated by Agrobacterium. Said methods are described by way of example in Jenes B. et al., Techniques for Gene Transfer, in: Transgenic Plants, Vol. 1, Engineering and Utilization, eds. Kung S. D. and Wu R., Academic Press (1993) 128-143 and in Potrykus, Annu. Rev. Plant Physiol. Plant Molec. Biol. 42, 205 (1991)). The nucleic acids or the construct, e.g. the expression cassette, to be expressed is preferably cloned into a vector, which is suitable for transforming Agrobacterium tumefaciens, for example pBin19 (Bevan et al., Nucl. Acids Res. 12, 8711 (1984)). Agrobacteria transformed by an expression vector according to the invention may likewise be used in known manner for the transformation of plants such as test plants like Arabidopsis or crop plants such as cereal crops, corn, oats, rye, barley, wheat, soybean, rice, cotton, sugar beet, canola, sunflower, flax, hemp, potatoes, tobacco, tomatoes, carrots, paprika, oilseed rape, tapioca, cassava, arrowroot, tagetes, alfalfa, lettuce and the various tree, nut and vine species, in particular oil-containing crop plants such as soybean, peanut, castor oil plant, sunflower, corn, cotton, flax, oilseed rape, coconut, oil palm, safflower (Carthamus tinctorius) or cocoa bean, or in particular corn, wheat, soybean, rice, cotton and canola, e.g. by bathing bruised leaves or chopped leaves in an agrobacterial solution and then culturing them in suitable media. The transformation of plants by means of Agrobacterium tumefaciens is described, for example, by Hofgen and Willmitzer in Nucl. Acid Res. 16, 9877 (1988) or is known inter alia from White F. F., “Vectors for Gene Transfer in

[47940] Higher Plants”; in Transgenic Plants, Vol. 1, Engineering and Utilization, eds. Kung S. D. and Wu R., Academic Press, 1993, pp. 15-38. For the transformation of plastids physical methods like PEG-treatment (O'Neil et al., Plant Journal. 3, 729 (1993), Golds et al., BioTechnology 11, 95 (1993)), microinjection (Knoblauch et al., Nat. Biotech. 17, 906 (1999)) or biolistics (Svab et al., Proc. Natl. Acad. Sci. USA 90, 8526 (1990)) are preferred. Such transformation methods are especially useful for the direct transformation of plastids and are well known to the skilled worker.

[47941] The expression of the nucleic acid molecules used in the process according the present invention may be desired alone or in combination with other genes or nucleic acid molecules. Multiple nucleic acid molecules conferring the expression of advantageous genes can be introduced via the simultaneous transformation of several individual suitable nucleic acid constructs, i.e. expression constructs, or, preferably, by combining several expression cassettes on one construct. It is also possible to transform the recipient non-human organisms stepwise with several vectors which in each case comprises a single expression cassette or several expression cassettes.

[47942] In addition to the sequence mentioned in Table I, application no. 7, column 5 or 8, preferably the coding region thereof, or its homologs or fragments, it may be advantageous additionally to express and/or mutate further genes in the non-human organisms. Especially advantageously, additionally at least one further gene of the biosynthetic pathway of the fine chemical is expressed in the non-human organisms such as plants or microorganisms. It is also possible that the regulation of the natural genes has been modified advantageously so that the gene and/or its gene product is no longer subject to the regulatory mechanisms which exist in the non-human organisms. This leads to an increased synthesis of the respective fine chemical vitamin E or its precursor 2,3-dimethyl-5-phytylquinol resp., in particular, of alpha- and/or gamma-tocopherol, resp. since, for example, feedback regulations no longer exist to the same extent or not at all. In addition it might be advantageously to combine the nucleic acids sequences of the invention containing the sequences shown in the respective line in Table I, application no. 7, column 5 or 8, preferably the coding region thereof, or homologs or fragments thereof, with genes which generally support or enhance the growth or yield of the target non-human organisms, for example genes which lead to faster growth rate of non human organism like microorganisms or plants or genes which produce stress-, pathogen-, or herbicide-resistant plants.

[47943] In a further embodiment of the process of the invention, non-human organisms are grown, in which there is in addition to the expression of the nucleic acid molecule according to the invention simultaneous expression of at least one nucleic acid molecule or one of the genes which code for proteins involved in the vitamin metabolism, in particular in the vitamin E or its precursor 2,3-dimethyl-5-phytylquinol resp., in particular, of alpha-, beta-, and/or gamma-tocopherol synthesi , such as the homogentisate phytyltransferase (HPT) or the enzymes catalysing the subsequent cyclization and methylation reactions, γ-tocopherol methyl transferase (γTMT), prenyltransferases that condense prenyl groups with allylic chains and those that condense prenyl chains with aromatic groups and others. The expression of these genes can lead to an increased synthesis of the essential vitamin E or its precursor 2,3-dimethyl-5-phytylquinol resp., in particular, of alpha- and/or gamma-tocopherol, resp.

[47944] In a further advantageous embodiment of the process of the invention, the non-human organisms used in the process are those in which simultaneously in addition a fine chemical degrading protein is attenuated, in particular by reducing the rate of expression of the corresponding gene.

[47945] In another embodiment of the process of the invention, the non-human organisms used in the process are those in which simultaneously in addition at least one of the aforementioned nucleic acids or of the aforementioned genes is mutated in such a way that the enzymatic or biological activity of the corresponding fine chemical degrading protein is partially reduced or completely blocked. A reduction in the enzymatic or biological activity means an enzymatic or biological activity, which is reduced by at least 10%, advantageously at least 20%, 30%, 40%, 50%, 60%, 70% or more, compared with the starting organism.

[47946] If it is intended to transform the host cell, in particular the plant cell, with several constructs, expression cassettes or vectors, the marker of a preceding transformation must be removed or a further marker employed in a following transformation. The markers can be removed from the host cell, in particular the plant cell, as described herein below via methods with which the skilled worker is familiar. These methods may be not used for multiple transformed host cell only but also for single transformed host cells. In particular plants without a marker, in particular without resistance to antibiotics, are an especially preferred embodiment of the present invention.

[47947] In the process according to the invention, the nucleic acid molecules used in the process according to the invention are advantageously linked operably to one or more regulatory signals in order to increase gene expression. These regulatory sequences are intended to enable the specific expression of the genes and the expression of protein. Depending on the host organism for example plant or microorganism, this may mean, for example, that the gene is expressed and/or overexpressed after induction only, or that it is expressed and/or overexpressed constitutively. These regulatory sequences are, for example, sequences to which the inductors or repressors bind and which thus regulate the expression of the nucleic acid. In addition to these novel regulatory sequences, or instead of these sequences, the natural regulation of these sequences may still be present before the actual structural genes and, if appropriate, may have been genetically modified so that the natural regulation has been switched off and gene expression has been increased. However, the nucleic acid construct of the invention suitable as expression cassette (=expression construct =gene construct) can also be simpler in construction, that is to say no additional regulatory signals have been inserted before the nucleic acid molecule or the homolog or fragment thereof, and the natural promoter together with its regulation has not been removed. Instead, the natural regulatory sequence has been mutated in such a way that regulation no longer takes place and/or gene expression is increased.

[47948] These modified promoters can also be introduced on their own before the natural gene in the form of part sequences (=promoter with parts of the nucleic acid sequences according to the invention) in order to increase the activity. Moreover, the gene construct can advantageously also comprise one or more of what are known as enhancer sequences in operable linkage with the promoter, and these enable an increased expression of the nucleic acid sequence. Also, it is possible to insert additional advantageous sequences at the 3′ end of the DNA sequences, such as, for example, further regulatory elements or terminators. In another preferred embodiment, the natural or created expression cassette is further modified in such a manner, that a nucleic acid sequence encoding a transit peptide is functionally introduced between the regulatory and the coding region such, that a functionally preprotein is expressed, which is targeted to the organelles such as plastids or mitochondria, preferably the plastids.

[47949] The nucleic acid molecules, which encode proteins according to the invention and nucleic acid molecules, which encode other polypeptides may be present in one nucleic acid construct, expression cassette or vector or in respective several ones. Advantageously, only one copy of the nucleic acid molecule of the invention or its encoding genes is present in the nucleic acid construct, expression cassette or vector. Several vectors, nucleic acid construct, or expression cassettes can be expressed together in the host organism. The nucleic acid molecule, the nucleic acid construct or the expression cassette according to the invention can be inserted in a vector and be present in the cell in a free form. If a stable transformation is preferred, a vector is used, which is stably duplicated over several generations or which is else inserted into the genome. In the case of plants, integration into the genome of e.g. plastids or mitochondria or, in particular, into the nuclear genome may have taken place. For the insertion of more than one gene in the host genome the genes to be expressed are present together in one gene construct, for example in above-described vectors bearing a plurality of genes.

[47950] As a rule, regulatory sequences for the expression rate of a gene are located upstream (5′), within, and/or downstream (3′) relative to the coding sequence of the nucleic acid molecule of the invention or another codogenic gene segment. They control in particular transcription and/or translation and/or the transcript stability. The expression level is dependent on the conjunction of further cellular regulatory systems, such as the protein biosynthesis and degradation systems of the cell.

[47951] Regulatory sequences include transcription and translation regulating sequences or signals, e.g. sequences located upstream (5′), which concern in particular the regulation of transcription or translation initiation, such as promoters or start codons, and sequences located downstream (3′), which concern in particular the regulation of transcription or translation termination and transcript stability, such as polyadenylation signals or stop codons. Regulatory sequences can also be present in transcribed coding regions as well in transcribed non-coding regions, e.g. in introns, as for example splicing sites, promoters for the regulation of expression of the nucleic acid molecule according to the invention in a cell and which can be employed are, in principle, all those which are capable of stimulating the transcription of genes in the organisms in question, such as microorganisms or plants. Suitable promoters, which are functional in these non-human organisms are generally known. They may take the form of constitutive or inducible promoters. Suitable promoters can enable the development- and/or tissue-specific expression in multi-cell eukaryotes; thus, leaf-, root-, flower-, seed-, stomata-, tuber-, fruit- or pollen-specific promoters may advantageously be used in plants. Furthermore in case of direct transformation of organelles such as plastids, promoters recognized by the plastid RNA-polymerases such as the plastid encoded Escherichia coli-like RNA polymerase or the nuclear encoded plastid RNA polymerase may advantageously be used.

[47952] The regulatory sequences or factors can, as described above, have a positive effect on, the expression of the genes introduced, thus increasing their expression. Thus, an enhancement of the expression can advantageously take place at the transcriptional level by using strong transcription signals such as strong promoters and/or strong enhancers. In addition, enhancement of expression on the translational level is also possible, for example by introducing translation enhancer sequences, e.g., the omega-enhancer e.g. improving the ribosomal binding to the transcript, or by increasing the stability of the mRNA, e.g. by replacing the 3′UTR coding region by a region encoding a 3′UTR known as conferring an high stability of the transcript or by stabilization of the transcript through the elimination of transcript instability, so that the mRNA molecule is translated more often than the wild type. For example in plants AU-rich elements (AREs) and DST (downstream) elements destabilized transcripts. Mutagenesis studies have demonstrated that residues within two of the conserved domains, the ATAGAT and the GTA regions, are necessary for instability function. Therefore removal or mutation of such elements would obviously lead to more stable transcripts, higher transcript rates and higher protein activity. Translation enhancers are also the “overdrive sequence”, which comprises the tobacco mosaic virus 5′-untranslated leader sequence and which increases the protein/RNA ratio (Gallie et al., Nucl. Acids Research 15, 8693 (1987)).

[47953] Enhancers are generally defined as cis active elements, which can stimulate gene transcription independent of position and orientation. Different enhancers have been identified in plants, which can either stimulate transcription constitutively or tissue or stimuli specific.

[47954] Well known examples for constitutive enhancers are the enhancer from the 35S promoter (Odell et al., Nature 313, 810 (1985)) or the ocs enhancer (Fromm et al., Plant Cell 1, 977 (1989)). Other examples are the G-Box motif tetramer which confers high-level constitutive expression in dicotyledonous and monocotyledonous plants (Ishige et al., Plant Journal 18, 443 (1999)) or the petE, a NT-rich sequence which act as quantitative enhancers of gene expression in transgenic tobacco and potato plants (Sandhu et al., Plant Mol Biol. 37 (5), 885 (1998)). Beside that, a large variety of cis-active elements have been described which contribute to specific expression pattern, like organ specific expression or induced expression in response to biotic or abiotic stress. Examples are elements, which provide pathogen or wound-induced expression (Rushton, Plant Cell 14, 749 (2002)) or guard cell-specific expression (Plesch, Plant Journal 28, 455 (2001)).

[47955] Advantageous regulatory sequences for the expression of the nucleic acid molecule according to the invention in microorganisms are present for example in promoters such as the cos, tac, rha, trp, tet, trp-tet, Ipp, lac, !pp-lac, laclq-, T7, T5, T3, gal, trc, ara, SP6, Λ-PR or Λ-PL promoter, which are advantageously used in Gram-negative bacteria. Further advantageous regulatory sequences are present for example in the Gram-positive promoters amy, dnaK, xylS and SPO2, in the yeast or fungal promoters ADC1, MFα, AC, P-60, UASH, MCB, PHO, CYC1, GAPDH, TEF, rp28, ADH. Promoters, which are particularly advantageous, are constitutive, tissue or compartment specific or inducible promoters. In general, “promoter” is understood as meaning, in the present context, a regulatory sequence in a nucleic acid molecule, which mediates the expression of a coding sequence segment of a nucleic acid molecule. In general, the promoter is located upstream to the coding sequence segment. Some elements, for example expression-enhancing elements such as enhancer may, however, also be located downstream or even in the transcribed region.

[47956] In principle it is possible to use all natural promoters with their regulation sequences like those named above for the expression cassette according to the invention and the method according to the invention. Also, synthetic promoters may advantageously be used, either additionally or alone, for example synthetic promoters mediating seed-specific expression such as described in, for example, WO 99/16890. In the preparation of an expression cassette various DNA fragments can be manipulated in order to obtain a nucleotide sequence, which usefully reads in the correct direction and is equipped with a correct reading frame. To connect the DNA fragments (=nucleic acids according to the invention) to one another adaptors or linkers may be attached to the fragments. The promoter and the terminator regions can usefully be provided in the transcription direction with a linker or polylinker containing one or more restriction points for the insertion of this sequence. Generally, the linker has 1 to 10, mostly 1 to 8, preferably 2 to 6, restriction points. In general the size of the linker inside the regulatory region is less than 100 bp, frequently less than 60 bp, but at least 5 bp. The promoter may be both native or homologous as well as foreign or heterologous to the host non-human organism, for example to the host plant. In the 5′-3′ transcription direction the expression cassette contains the promoter, a nucleic acid molecule which is shown in the respective line in Table I, column 5 or 8, preferably the coding region, a homolog or a fragment thereof, and a region for transcription termination. Different termination regions can be exchanged for one another in any desired fashion.

[47957] As described above, the transcription of the genes introduced should advantageously be terminated by suitable terminators at the 3′ end of the genes introduced (behind the stop codon). A terminator, which may be used for this purpose is, for example, the OCS1 terminator, the nos3 terminator or the 35S terminator. As is the case with the promoters, different terminator sequences should be used for each gene in case several genes are introduced. Terminators, which are useful in microorganisms are for example the fimA terminator, txn terminator or trp terminator. Such terminators can be rho-dependent or rho-independent.

[47958] In an embodiment of the present invention the nucleic acid construct of the present invention comprises a nucleic acid molecule as depicted in the respective line in Table I, application no. 7, column 5 or 8, preferably the coding region thereof, a fragment or a homolog thereof, and a plant promoter, such as the Big 35S promoter, the DC3 promoter, the PC Ubi promoter, the LegB4-promoter, the Super promoter, the USP promoter or the like. In another embodiment the nucleic acid construct of the present invention comprises a nucleic acid molecule as depicted in the respective line in Table I, application no. 7, column 5 or 8, preferably the coding region thereof, a fragment or a homolog thereof, and a plant promoter such as, for example, the USP, the LegB4-, the DC3 promoter or the ubiquitin promoter from parsley or other herein mentioned promoters. In a further embodiment the nucleic acid construct of the present invention comprises a nucleic acid molecule as depicted in the respective line in Table I, application no. 7, column 5 or 8, preferably the coding region thereof, a fragment or a homolog thereof, and a plant promoter, such as the Big 35S promoter, the PC Ubi promoter, the Super promoter, the USP promoter or the like. In addition different terminators may advantageously be used in these nucleic acid constructs; examples for transcriptional termination are polyadenylation signals.

[47959] In order to ensure the stable integration, into the transgenic plant, of nucleic acid molecules used in the process according to the invention in combination with further genes, especially biosynthesis genes, over a plurality of generations, it may be advantageous to express each of the respective coding regions used in the process under the control of its own, preferably unique, promoter.

[47960] The nucleic acid construct is advantageously constructed in such a way that a promoter is followed by a suitable cleavage site for insertion of the nucleic acid to be expressed, advantageously in a polylinker, followed, if appropriate, by a terminator located behind the polylinker. If appropriate, this order is repeated several times so that several genes are combined in one construct and thus can be introduced into the transgenic plant in order to be expressed. The sequence is advantageously repeated up to three times. For the expression, the nucleic acid sequences are inserted via the above-mentioned suitable cleavage site, for example in the polylinker behind the promoter. It is advantageous for each nucleic acid sequence to have its own promoter and, if appropriate, its own terminator, as mentioned above. However, it is also possible to insert several nucleic acid sequences behind a promoter and, if appropriate, before a terminator if a polycistronic transcription is possible in the host or target cells. In this context, the insertion site, or the sequence of the nucleic acid molecules inserted, in the nucleic acid construct is not decisive, that is to say a nucleic acid molecule can be inserted in the first or last position in the cassette without this having a substantial effect on the expression. However, it is also possible to use only one promoter type in the construct.

[47961] Accordingly, in a preferred embodiment, the nucleic acid construct according to the invention confers expression of the nucleic acid molecule of the invention, and, optionally further genes, in a plant and comprises one or more plant regulatory elements. Said nucleic acid construct according to the invention advantageously encompasses beneath the nucleic acid molecule of the invention a plant promoter or a plant terminator or a plant promoter and a plant terminator. In another embodiment said nucleic acid construct according to the invention advantageously encompasses beneath the nucleic acid molecule of the invention a microorganism promoter or a microorganism terminator or a microorganism promoter and a microorganism terminator.

[47962] A “plant” promoter comprises regulatory elements, which mediate the expression of a coding sequence segment in plant cells. The plant promoter can originate from a plant cell, e.g. from the plant, which is transformed with the nucleic acid construct, expression cassette, or vector as described herein. However, a plant promoter does not need to be of plant origin, but may originate from viruses or microorganisms, in particular for example from viruses which attack plant cells. This also applies to other plant regulatory signals, for example in plant terminators The term plant promoter shall also encompass organelle, especially plastidal promoters.

[47963] A nucleic acid construct suitable for plant expression preferably comprises regulatory elements which are capable of controlling the expression of genes in plant cells and which are operably linked so that each sequence can fulfill its function. Accordingly, the nucleic acid construct can also comprise transcription terminators. Examples for transcriptional termination are polyadenylation signals. Preferred polyadenylation signals are those which originate from Agrobacterium tumefaciens T-DNA, such as the gene 3 of the Ti plasmid pTiACH5, which is known as octopine synthase (Gielen et al., EMBO J. 3, 835 (1984)) or functional equivalents thereof, but all the other terminators which are functionally active in plants are also suitable.

[47964] Other preferred sequences for use in operable linkage in gene expression constructs are targeting sequences, which are required for targeting the gene product into specific cell compartments (for a review, see Kermode, Crit. Rev. Plant Sci. 15 (4), 285 (1996) and references cited therein), for example into the vacuole, the nucleus, all types of plastids, such as amyloplasts, chloroplasts, chromoplasts, the extracellular space, the mitochondria, the endoplasmic reticulum, elaioplasts, peroxisomes, glycosomes, and other compartments of cells or extracellular; preferred are sequences, which are involved in targeting to plastids as mentioned above. Sequences, which must be mentioned in this context are, in particular, the signal-peptide- or transit-peptide-encoding sequences which are known per se. For example, plastid-transit-peptide-encoding sequences enable the targeting of the expression product into the plastids of a plant cell. Targeting sequences are also known for eukaryotic and to a lower extent for prokaryotic organisms and can advantageously be operable linked with the nucleic acid molecule of the present invention as shown in Table I, application no. 7, columns 5 and 8, preferably the coding region thereof, or homologs or fragments thereof, and described herein to achieve an expression in one of said compartments or extracellular.

[47965] For expression in plants, the nucleic acid molecule must, as described above, be linked operably to or comprise a suitable promoter which expresses the gene at the right point in time and in a cell- or tissue-specific manner. Usable promoters are constitutive promoters (Benfey et al., EMBO J. 8, 2195 (1989)), such as those which originate from plant viruses, such as 35S CAMV (Franck et al., Cell 21, 285 (1980)), 19S CaMV (see also U.S. Pat. No. 5,352,605 and WO 84/02913), 34S FMV (Sanger et al., Plant. Mol. Biol., 14, 433 (1990)), the parsley ubiquitin promoter, or plant promoters such as the Rubisco small subunit promoter described in U.S. Pat. No. 4,962,028 or the plant promoters PRP1 (Ward et al., Plant. Mol. Biol. 22 (1993)), SSU, PGEL1, OCS (Leisner, Proc. Natl. Acad. Sci. USA 85 (5), 2553 (1988)), lib4, usp, mas (Comai, Plant Mol. Biol. 15 (3), 373 (1990)), STLS1, ScBV (Schenk, Plant Mol. Biol. 39 (6),1221 (1999)), B33, SAD1 or SAD2 (flax promoters, Jain et al., Crop Science, 39 (6), 1696 (1999)) or nos (Shaw et al., Nucleic Acids Res. 12 (20), 7831 (1984)). Stable, constitutive expression of the proteins according to the invention into a plant can be advantageous. However, inducible expression of the polypeptide of the invention may be advantageous, if, for example, a late expression before the harvest is of advantage.

[47966] The expression of plant genes can also be facilitated as described above via a chemical inducible promoter (for a review, see Gatz, Annu. Rev. Plant Physiol. Plant Mol. Biol. 48, 89 (1997)). Chemically inducible promoters are particularly suitable when it is desired to express the gene in a time-specific manner. Examples of such promoters are a salicylic acid inducible promoter (WO 95/19443), a benzenesulfonamide inducible promoter (EP 388 186), and abscisic acid-inducible promoter (EP 335 528), a tetracyclin-inducible promoter (Gatz et al., Plant J. 2, 397 (1992)), a cyclohexanol- or ethanol-inducible promoter (WO 93/21334) or others as described herein.

[47967] Other suitable promoters are those which react to biotic or abiotic stress conditions, for example the pathogen-induced PRP1 gene promoter (Ward et al., Plant. Mol. Biol. 22, 361 (1993)), the auxin-induced GH3-promotor (Liu et al., Plant Cell 6, 645 (1994)), the cold/dehydration/ABA-induced Cor15A-promoter (Baker et al., Plant Mol. Biol. 24, 701 (1994)), the cold/drought/salt/ABA/wound-induced Cor78 promoter (Ishitani et al., Plant Cell 9, 1935 (1997), Yamaguchi-Shinozaki and Shinozaki, Plant Cell 6, 251 (1994)), the cold/dehydrationinduced Rci2A-promoter (Capel et al., Plant Physiol. 115, 569 (1997)), the drought/salt-induced Rd22-promoter (Yamaguchi-Shinozaki and Shinozaki, Mol. Gen. Genet. 238, 17 (1993)), the salt-induced RD29A-promoter (Yamaguchi-Shinozalei et al., Mol. Gen. Genet. 236, 331 (1993)), the salt-induced ARSK1-root promoter (Hwang and Goodman, Plant J. 8, 37 (1995), the saltinduced PtxA-root promoter (GenBank accession X67427), the tomato heat-inducible hsp80 promoter (U.S. Pat. No. 5,187,267), the potato chill-inducible alpha-amylase promoter (WO 96/12814) or the wound-inducible pinII promoter (EP-A-0 375 091) or others as described herein.

[47968] Preferred promoters are in particular those which bring about gene expression in tissues and organs, such as leaves, roots, seeds, pollen or xylem. Examples of tissue preferred or organ preferred promoters include, but are not limited to fruit-preferred, ovule-preferred, male tissue-preferred, seed-preferred, pollen-preferred integument-preferred, tuber-preferred, stalk-preferred, pericarp-preferred, leaf-preferred, stigma-preferred, pollen-preferred, anther-preferred, petal-preferred, sepal-preferred, pedicel-preferred, silique-preferred, stem-preferred, root-preferred promoters, and the like. Especially those promoters are preferred which bring about gene expression in tissues and organs in which the biosynthesis of vitamin E or its precursor 2,3-dimethyl-5-phytylquinol resp., in particular, of alpha- and/or gamma-tocopherol takes place, like in seed cells, such as endosperm cells and cells of the developing embryo. Seed promoters are preferentially expressed during seed development and/or germination. For example, seed preferred promoters can be embryo-preferred, endosperm preferred and seed coat-preferred (see Thompson et al., BioEssays 10, 108 (1989)). Examples of seed preferred promoters include, but are not limited to, cellulose synthase (celA), Cim1, gammazein, globulin-1, maize 19 kD zein (cZ19B1), and the like. Other suitable promoters are the oilseed rape napin gene promoter (U.S. Pat. No. 5,608,152), the Vicia faba USP promoter (Baeumlein et al., Mol Gen Genet, 225 (3), 459 (1991)), the Arabidopsis oleosin promoter (WO 98/45461), the Phaseolus vulgaris phaseolin promoter (U.S. Pat. No. 5,504,200), the Brassica Bce4 promoter (WO 91/13980), the bean arcs promoter, the carrot DcG3 promoter, or the Legumin B4 promoter (LeB4) (Baeumlein et al., Plant Journal, 2 (2), 233 (1992)), and promoters which bring about the seed-specific expression in monocotyledonous plants such as maize, barley, wheat, rye, rice and the like. Advantageous seed-specific promoters are the sucrose binding protein promoter (WO 00/26388), the phaseolin promoter and the napin promoter. Suitable promoters which must be considered are the barley Ipt2 or Ipt1 gene promoter (WO 95/15389 and WO 95/23230), and the promoters described in WO 99/16890 (promoters from the barley hordein gene, the rice glutelin gene, the rice oryzin gene, the rice prolamin gene, the wheat gliadin gene, the wheat glutelin gene, the maize zein gene, the oat glutelin gene, the sorghum kasirin gene and the rye secalin gene). Further suitable promoters are Amy32b, Amy 6-6 and Aleurain (U.S. Pat. No. 5,677,474), Bce4 (oilseed rape) (U.S. Pat. No. 5,530,149), glycinin (soya) (EP 571 741], phosphoenolpyruvate carboxylase (soya) (JP 06/62870), ADR12-2 (soya) (WO 98/08962), isocitrate lyase (oilseed rape) (U.S. Pat. No. 5,689,040]) or α-amylase (barley) (EP 781 8499. Other promoters which are available for the expression of genes in plants are leaf-specific promoters such as those described in DE-A 19 644 478 or light-regulated promoters such as, for example, the pea petE promoter.

[47969] Further suitable plant promoters are the cytosolic FBPase promoter or the potato ST-LSI promoter (Stockhaus et al., EMBO J. 8, 2445 (1989)), the Glycine max phosphoribosylpyrophosphate amidotransferase promoter (GenBank Accession No. U87999) or the noduline-specific promoter described in EP 249 676.

[47970] Promoters, which are particularly suitable, are those which bring about plastidspecific expression. Suitable promoters such as the viral RNA polymerase promoter are described in WO 95/16783 and WO 97/06250, and the Arabidopsis clpP promoter, which is described in WO 99/46394.

[47971] Promoters, which are used for the strong expression of heterologous sequences as well as additional homologous sequences in as many tissues as possible, in particular also in leaves, are, in addition to several of the above-mentioned viral and bacterial promoters, preferably, plant promoters of actin or ubiquitin genes such as, for example, the rice actin1 promoter. Further examples of constitutive plant promoters are the sugarbeet V-ATPase promoters (WO 01/14572). Examples of synthetic constitutive promoters are the Super promoter (WO 95/14098) and promoters derived from G-boxes (WO 94/12015). If appropriate, chemical inducible promoters may furthermore also be used, as described in EP 388 186, EP 335 528, WO 97/06268.

[47972] Promoters, which are particularly suitable, are e.g. the super-promoter (Ni et al., Plant Journal 7, 661 (1995)), the ubiquitin promoter (Callis et al., J. Biol. Chem., 265, 12486 (1990); U.S. Pat. No. 5,510,474; U.S. Pat. No. 6,020,190; Kawalleck et al., Plant. Molecular Biology, 21, 673 (1993)) or the 34S promoter (GenBank Accession numbers M59930 and X16673). Promoters useful in the expression cassettes of the invention include, but are not limited to, the major chlorophyll a/b binding protein promoter, histone promoters, the Ap3 promoter, the [3-conglycin promoter, the napin promoter, the soybean lectin promoter, the maize 15kD zein promoter, the 22kD zein promoter, the 27kD zein promoter, the g-zein promoter, the waxy, shrunken 1, shrunken 2 and bronze promoters, the Zm13 promoter (U.S. Pat. No. 5,086,169), the maize polygalacturonase promoters (PG) (U.S. Pat. Nos. 5,412,085 and 5,545,546), and the SGB6 promoter (U.S. Pat. No. 5,470,359), the rice cyclophilin promoter (Buchholz et al., Plant Mol. Biol.25 (5), 837 (1994)), the glutelin (rice) promoter (Takaiwa et al., Mol. Gen. Genet. 208, 15 (1986), Takaiwa et al., FEBS letts. 221, 43 (1987), the rice prolamin NRP33 promoter and the rice aglobulin Glb-1 promoter (Wu et al., Plant cell Physiology 39 (8), 885 (1998),as well as synthetic or other natural promoters.

[47973] As already mentioned herein, further regulatory sequences, which may be expedient, if appropriate, also include sequences, which target the transport and/or the localization of the expression products. Sequences, which must be mentioned in this context are, in particular, the signal-peptide- or transit-peptide-encoding sequences which are known per se. For example, plastid-transit-peptide-encoding sequences enable the targeting of the expression product into the plastids of a plant cell.

[47974] One embodiment of the present invention also relates to a method for generating a vector, which comprises the insertion of the nucleic acid molecule according to the invention or the expression cassette according to the invention into a nucleic acid molecule to give the vector. The vector can, for example, be introduced in to a cell, e.g. a microorganism or a plant cell, a plant or a part therof, as described herein for the nucleic acid construct, or below under transformation or transfection or shown in the examples. A transient or stable transformation of the host or target cell is possible, however, a stable transformation is preferred. The vector according to the invention is preferably a vector, which is suitable for expressing the polypeptide according to the invention in a microorganism or a plant cell, a plant or a part thereof.

[47975] The method can thus also encompass one or more steps for integrating regulatory signals into the vector, in particular signals, which mediate the expression in microorganisms or plant cells, plants or respective parts thereof.

[47976] Accordingly, the present invention also relates to a vector comprising the nucleic acid molecule characterized herein as part of a nucleic acid construct suitable for expression in plants and/or microorganisms or the nucleic acid molecule according to the invention.

[47977] The advantageous vectors of the invention comprise the nucleic acid molecules which encode proteins according to the invention, nucleic acid molecules which are used in the process, or nucleic acid construct suitable for plant expression or for microorganism expression comprising the nucleic acid molecules used, or expression cassettes according to the invention, either alone or in combination with further genes such as the biosynthesis or regulatory genes of the fine chemical metabolism e.g. with the genes mentioned herein above.

[47978] The recombinant expression vectors which are advantageously used in the process comprise the nucleic acid molecules according to the invention or the nucleic acid construct according to the invention, or the expression cassettes according to the invention, in a form which is suitable for expressing, in a host cell, the nucleic acid molecules according to the invention or described herein. Accordingly, the recombinant expression vectors in addition may comprise one or more regulatory signals selected on the basis of the host cells to be used for the expression, in operable linkage with the nucleic acid sequence to be expressed. Furthermore, if desired, in addition the vector can comprise plastome sequences of the recipient organism to facilitate integration into the plastidal genome by homologous recombination as mentioned above.

[47979] The recombinant expression vectors used can be designed specifically for the expression, in prokaryotic and/or eukaryotic cells, of nucleic acid molecules used in the process. This is advantageous since intermediate steps of the vector construction are frequently carried out in microorganisms for the sake of simplicity. For example, the genes according to the invention and other genes can be expressed in bacterial cells, insect cells (using baculovirus expression vectors), yeast cells and other fungal cells (Romanos, Yeast 8, 423 (1992); van den Hondel, in “More Gene Manipulations in Fungi”, ed. Bennet J. W., Lasure L. L., pp. 396-428, Academic Press, San Diego (1991); van den Hondel C. A. M. J. J., in “Applied Molecular Genetics of Fungi”, ed. Peberdy J. F. et al., pp. 1-28, Cambridge University Press, Cambridge(1991)), algae (Falciatore et al., Marine Biotechnology.1 (3), 239 (1999)) using vectors and following a transformation method as described in WO 98/01572, and preferably in cells of multi-celled plants (see Schmidt R. and Willmitzer L., Plant Cell Rep. 7, 583 (1988); “Plant Molecular Biology and Biotechnology”, C Press, Boca Raton, Fla., chapter 6/7, pp.71-119 (1993); White F. F., in “Transgenic Plants”, Bd. 1, Engineering and Utilization, ed.Kung and Wu R., Academic Press, 128-43 (1993); Potrykus, Annu. Rev. Plant Physiol. Plant Molec. Biol. 42, 205 (1991) (and references cited therein)). Suitable host cells are furthermore discussed in Goeddel, “Gene Expression Technology: Methods in Enzymology 185”, Academic Press, San Diego, Calif. (1990). As an alternative, the sequence of the recombinant expression vector can be transcribed and translated in vitro, for example using T7 promoter-regulatory sequences and T7 polymerase.

[47980] In the event it is necessary proteins can be expressed in prokaryotes using vectors comprising constitutive or inducible promoters, which control the expression of fusion proteins or nonfusion proteins as mentioned above.

[47981] Other vectors which are suitable in prokaryotic organisms are known to the skilled worker; these vectors are for example in E. coli pLG338, pACYC184, the pBR series, such as pBR322, the pUC series such as pUC18 or pUC19, the M113mp series, pKC30, pRep4, pHS1, pHS2, pPLc236, pMBL24, pLG200, pUR290, pIN-111113-B1, lambda-gt11 or pBdCI, in Streptomyces pIJ101, pIJ364, pIJ702 or pIJ361, in Bacillus pUB110, pC194 or pBD214, in Corynebacterium pSA77 or pAJ667.

[47982] In a further embodiment, the expression vector is a yeast expression vector. Examples of vectors for expression in the yeasts S. cerevisiae encompass pYeDesaturasecl (Baldari et al., Embo J. 6, 229 (1987)), pMFa (Kurjan and Herskowitz, Cell 30, 933 (1982)), pJRY88 (Schultz et al., Gene 54, 113(1987)) and pYES2 (Invitrogen Corporation, San Diego, Calif.). Vectors and methods for the construction of vectors which are suitable for use in other fungi, such as the filamentous fungi, encompass those which are described in detail in: van den Hondel C. A. M. J. J. in “Applied Molecular Genetics of Fungi”, Peberdy J. F., ed., pp. 1-28, Cambridge University Press, Cambridge (1991); or van den Hondel C. A. M. J. J. in “More Gene Manipulations in Fungi”, Bennet J. W. & Lasure L. L., ed., pp. 396-428, Academic Press, San Diego (1991). Examples of other suitable yeast vectors are 2alphaM, pAG-1, YEp6, YEp13 or pEM-BLYe23.

[47983] Further vectors, which may be mentioned by way of example, are pALS1, pIL2 or pBB116 in fungi or pLGV23, pGHlac+, pBIN19, pAK2004 or pDH51 in plants.

[47984] As an alternative, the nucleic acid sequences can be expressed in insect cells using baculovirus expression vectors. Baculovirus vectors, which are available for expressing proteins in cultured insect cells (for example Sf9 cells) encompass the pAc series (Smith et al., Mol. Cell Biol. 3, 2156 (1983)) and the pVL series (Lucklow and Summers, Virology 170, 31 (1989)).

[47985] The above-mentioned vectors are only a small overview of potentially suitable vectors. Further plasmids are known to the skilled worker and are described, for example, in “Cloning Vectors” (ed. Pouwels P. H., et al., Elsevier, Amsterdam-New York-Oxford, 1985, ISBN 0 444 904018). Further suitable expression systems for prokaryotic and eukaryotic cells, see the chapters 16 and 17 by Sambrook J., Fritsch E. F. and Maniatis T., “Molecular Cloning: A Laboratory Manual”, 2nd edition, Cold Spring Harbor Laboratory, Cold Spring Harbor Laboratory Press, Cold Spring Harbor, N.Y., 1989.

[47986] An embodiment of the invention relates to a vector where the nucleic acid molecule according to the invention is linked operably to regulatory sequences which permit the expression in a prokaryotic or eukaryotic host. A further embodiment of the invention relates to a vector in which a nucleic acid sequence encoding one of the polypeptides shown in the respective line in Table II, application no. 7, columns 5 or 8, or homologs or fragments thereof, is functionally linked to a targeting sequence such as a plastidial or mitochondrial targeting sequence. A further embodiment of the invention relates to a vector in which a nucleic acid sequence encoding one of the polypeptides shown in the respective line in Table II, application no. 7, columns 5 or 8, or homologs or fragments thereof, is functionally linked to (a) regulatory sequence which permit the expression in an organelle, such as plastids or mitochondria, preferably plastids.

[47987] A further embodiment of the invention relates to a vector which comprises a nucleic acid sequence encoding one of the polypeptides shown in the respective line in Table II, application no. 7, columns 5 or 8, or homologs or fragments thereof, but no additional targeting sequence.

[47988] Accordingly, one embodiment of the invention relates to a host cell, which has been transformed stably or transiently with the vector according to the invention or the nucleic acid molecule according to the invention or the nucleic acid construct according to the invention or the expression construct according to the invention.

[47989] The genetically modified cells may be regenerated to the respective non-human organism, for example a plant cell to a plant, by all of the methods known to those skilled in the art. Appropriate methods can be found in the publications referred to above by Kung S. D. and Wu R., Potrykus or Höfgen and Willmitzer.

[47990] Accordingly, a further aspect of the invention relates to transgenic non-human organisms transformed by at least one nucleic acid molecule, expression cassette or vector according to the invention as well as cells, cell cultures, tissue, parts—such as, for example, leaves, roots, pollen, etc. in the case of plant organisms—or reproductive material derived from such non-human organisms. The terms “host organism”, “host cell”, “recombinant (host) non-human organism” and “transgenic (host) cell” are used here interchangeably. Of course these terms relate not only to the particular host non-human organism or the particular target cell but also to the descendants or potential descendants of these non-human organisms or cells. Since, due to mutation or environmental effects certain modifications may arise in successive generations, these descendants need not necessarily be identical with the parental cell but nevertheless are still encompassed by the term as used here.

[47991] For the purposes of the invention “transgenic” or “recombinant” means with regard for example to a nucleic acid molecule, a nucleic acid construct, an expression cassette or a vector containing the nucleic acid molecule according to the invention or an non-human organism transformed with/by the nucleic acid molecule, nucleic acid construct, expression cassette or vector according to the invention all those constructions produced by genetic engineering methods in which either
[47992] (a) the nucleic acid molecule depicted in the respective line in Table I, column 5 or 8, preferably the coding region thereof, or homologs or fragments thereof; or
[47993] (b) a genetic control sequence functionally linked to the nucleic acid molecule described under (a), for example a 3′- and/or 5′-genetic control sequence such as a promoter or terminator, or
[47994] (c)
[47995] (a) and (b);
   are not found in their natural, genetic environment or have been modified by genetic engineering methods, wherein the modification may by way of example be a substitution, addition, deletion, inversion or insertion of one or more nucleotide residues. Natural genetic environment means the natural genomic or chromosomal locus in the organism of origin or inside the host non-human organism or presence in a genomic library. In the case of a genomic library the natural genetic environment of the nucleic acid sequence is preferably retained at least in part. The environment sequence borders the nucleic acid sequence at least on one side and has a sequence length of at least 50 bp, preferably at least 500 bp, particularly preferably at least 1,000 bp, most particularly preferably at least 5,000 bp. A naturally occurring expression cassette—for example the naturally occurring combination of the natural promoter of the nucleic acid sequence according to the invention with the corresponding gene—turns into a transgenic expression cassette when the latter is modified by unnatural, synthetic (“artificial”) methods such as by way of example a mutagenesis. In case a non-human organism is transformed by a homologous nucleic acid molecule or by a homologous expression cassette the resulting non-human organism represents also a respective transgenic non-human organism since the additional homologous nucleic acid molecule or the additional homologous expression cassette is not located in its original environment. Appropriate methods are described by way of example in U.S. Pat. No. 5,565,350 or WO 00/15815. In another embodiment the non-human organism comprises a heterologous nucleic acid molecule.

[47996] Suitable organisms or host organisms for the nucleic acid molecule, nucleic acid construct, expression cassette or vector according to the invention are advantageously in principle all non-human organisms, which are suitable for the expression of recombinant genes as described above. Preferred non-human organism are microorganism or plants as described above, in particular those plants, which can be transformed in a suitable manner. These include monocotyledonous and dicotyledonous plants. In an embodiment of the present invention plants like Arabidopsis, Asteraceae such as Calendula or crop plants such as soybean, peanut, castor oil plant, sunflower, flax, corn, cotton, oilseed rape, coconut, oil palm, safflower (Carthamus tinctorius) or cocoa bean are preferred. In another embodiment agriculturally useful plants such as cereals and grasses, for example Triticum spp., Zea mays, Hordeum vulgare, oats, Secale cereale, Oryza sativa, Pennisetum glaucum, Sorghum bicolor, Triticale, Agrostis spp., Cenchrus ciliaris, Dactylis glomerata, Festuca arundinacea, Lolium spp., Medicago spp. and Saccharum spp., legumes and oil crops, for example Brassica juncea, Brassica napus, Glycine max, Arachis hypogaea, Gossypium hirsutum, Cicer arietinum, Helianthus annuus, Lens culinaris, Linum usitatissimum, Sinapis alba, Trifolium repens and Vicia narbonensis, vegetables and fruits, for example bananas, grapes, Lycopersicon esculentum, asparagus, cabbage, watermelons, kiwi fruit, Solanum tuberosum, Beta vulgaris, cassava and chicory, trees, for example Coffea species, Citrus spp., Eucalyptus spp., Picea spp., Pinus spp. and Populus spp., medicinal plants and trees, and flowers are preferred.

[47997] In another embodiment of the invention host plants for the nucleic acid molecule, nucleic acid construct, expression cassette or vector according to the invention are selected from the group comprising corn, soy, oil seed rape (including canola and winter oil seed rape), cotton, wheat and rice.

[47998] A further object of the invention relates to the use of a nucleic acid construct, e.g. an expression cassette, comprising one or more nucleic acid molecules encoding one or more polypeptides as depicted in the respective line(s) in Table II, application no. 7, columns 5 or 8, or homologs or fragments thereof, or comprising one or more nucleic acid molecules as depicted in the respective line(s) in Table I, application no. 7, columns 5 or 8, preferably the coding region thereof, or homologs or fragments thereof, or comprising a nucleic acid molecule hybridizing therewith for the transformation of a microorganism or a plant cell, plant tissues or a part of a plant

[47999] In doing so, depending on the choice of promoter, the nucleic acid molecules shown in the respective line in Table I, application no. 7, column 5 or 8, preferably the coding region thereof, or homologs or fragments thereof, or the nucleic acid molecules encoding a polypeptide as depicted in the respective line in Table II, application no. 7, column 5 or 8, or homologs or fragments thereof, can be expressed in the whole plant or specifically e.g. in the leaves, in the seeds, the nodules, in roots, in the stem or other parts of the plant. Those transgenic plants overproducing sequences, e.g. as depicted in the respective line in Table I, application no. 7, column 5 or 8, preferably the coding region thereof, or homologs or fragments thereof, the plant cell, plant tissues, plants, the reproductive material thereof, or parts thereof are a further object of the present invention.

[48000] Within the framework of the present invention, the production of the alpha-tocopherol, or gamma-tocopherol is due to the generation or over-expression of one or more polypeptides as depicted in the respective line(s) in Table II, application no. 7, column 5 or 8, or homologs or fragments thereof, or encoded by the corresponding nucleic acid molecules as depicted in the respective line(s) in Table I, application no. 7, column 5 or 8, preferably the coding region thereof, or homologs or fragments thereof, in the non-human organism according to the invention, advantageously in the transgenic microorganism or plant according to the invention, at least for the duration of at least one plant generation.

[48001] A constitutive expression of the polypeptide as depicted in the respective line in Table II, application no. 7, column 5 or 8, or homologs or fragments thereof, or encoded by the respective nucleic acid molecule as depicted in the respective line in Table I, application no. 7, column 5 or 8, preferably the coding region thereof, or homologs or fragments thereof, may be advantageous. On the other hand, an inducible expression may also appear desirable. Expression of the polypeptide sequences of the invention can be either directed to the cytosol or to the organelles, such as plastids or mitochondria, preferably the plastids of the host cells, preferably the plant cells, or non-targeted.

[48002] The efficiency of the expression of the polypeptides depicted in the respective line in Table II, column 5 or 8, or homologs or fragments thereof, or encoded by the respective nucleic acid molecule as depicted in the respective line in Table I, column 5 or 8, preferably the coding region thereof, or homologs or fragments thereof, can be determined, for example, on test plants in greenhouse trials.

[48003] In a further embodiment the invention relates to a transgenic non-human organisms such as transgenic microorganism or transgenic plant comprising a nucleic acid molecule comprising
[48004] [1) a nucleic acid molecule selected from the group consisting of
   [48005] (a) a nucleic acid molecule encoding a polypeptide shown in Table II, application no. 7, column 5 or 8, preferably shown in Table II A, application no. 7, column 5, or in Table II A, application no. 7, column 8, or in Table II B, application no. 7, column 8, or a homolog or a fragment thereof;
   [48006] (b) a nucleic acid molecule shown in Table I, application no. 7, column 5 or 8, preferably shown in Table I A, application no. 7, column 5, or in Table I A, application no. 7, column 8, or in Table I B, application no. 7, column 8, preferably the coding region thereof, or a homolog or a fragment thereof;
   [48007] (c) a nucleic acid molecule, which, as a result of the degeneracy of the genetic code, can be derived from a polypeptide sequence depicted in column 5 or 8 of Table II, application no. 7, preferably shown in Table II A, application no. 7, column 5, or in Table II A, application no. 7, column 8, or in Table II B, application no. 7, column 8;
   [48008] (d) a nucleic acid molecule having at least 30% identity, preferably at least 40%, 50%, 60%, 70%, 75%, 80%, 85%, 90%, 95%, 96%, 97%, 98%, 99%, 99,5%, with the nucleic acid molecule sequence of a polynucleotide comprising the nucleic acid molecule shown in column 5 or 8 of Table I, application no. 7, preferably shown in Table I A, application no. 7, column 5, or in Table I A, application no. 7, column 8, or in Table I B, application no. 7, column 8, preferably the coding region thereof;
   [48009] (e) a nucleic acid molecule encoding a polypeptide having at least 30% identity, preferably at least 40%, 50% 60%, 70%, 75%, 80%, 85%, 90%, 95%, 96%, 97%, 98%, 99%, 99,5%, identity with the amino acid sequence of the polypeptide encoded by the nucleic acid molecule of (a), (b), (c) or (d);
   [48010] (f) a nucleic acid molecule which hybridizes with a nucleic acid molecule of (a), (b), (c), (d) or (e) under stringent hybridization conditions;
   [48011] (g) a nucleic acid molecule encoding a polypeptide which can be isolated with the aid of monoclonal or polyclonal antibodies made against a polypeptide encoded by one of the nucleic acid molecules of (a), (b), (c), (d), (e) or (f);
   [48012] (h) a nucleic acid molecule encoding a polypeptide comprising the consensus sequence or one or more polypeptide motifs as shown in column 8 of Table IV, application no. 7;
   [48013] (i) a nucleic acid molecule encoding a polypeptide having the activity represented by a respective protein as depicted in column 5 of Table II, application no. 7;
   [48014] (j) a nucleic acid molecule comprising a polynucleotide which is obtained by amplifying a cDNA library or a genomic library using the primers in Table III, application no. 7, column 8;
   [48015] and
   [48016] (k) nucleic acid molecule which is obtainable by screening a suitable nucleic acid library, especially a cDNA library and/or a genomic library, under stringent hybridization conditions with a probe comprising one of the sequences of the nucleic acid molecule of (a), (b), (c), (d), (e), (f), (g), (h), (i) or (j) or with a fragment of at least 15 nt, preferably 20 nt, 30 nt, 50 nt, 100 nt, 200 nt,500 nt, 1000 nt, 1500 nt, 2000 nt or 3000 nt of the nucleic acid molecule characterized in (a), (b), (c), (d), (e), (f), (g), (h), (i) or (j);
   [48017] or a nucleic acid molecule comprising a sequence which is complementary thereto;
      and, if desired
[48018] 2) nucleic acid molecule encoding a transit peptide, preferably encoding a plastidal transit peptide or a mitochondrial transit peptide;
   which are operable linked;]
   or comprising an expression cassette comprising
[48019] [0) a promoter, preferably a promoter selected from the group consisting of Big35S, PCUbi, Super and USP; and
[48020] 1) a nucleic acid molecule selected from the group consisting of
   [48021] (a) a nucleic acid molecule encoding a polypeptide shown in Table II, application no. 7, column 5 or 8, preferably shown in Table II A, application no. 7, column 5, or in Table II A, application no. 7, column 8, or in Table II B, application no. 7, column 8, or a homolog or a fragment thereof;
   [48022] (b) a nucleic acid molecule shown in Table I, application no. 7, column 5 or 8, preferably shown in Table I A, application no. 7, column 5, or in Table I A, application no. 7, column 8, or in Table I B, application no. 7, column 8, preferably the coding region thereof, or a homolog or a fragment thereof;
   [48023] (c) a nucleic acid molecule, which, as a result of the degeneracy of the genetic code, can be derived from a polypeptide sequence depicted in column 5 or 8 of Table II, application no. 7, preferably shown in Table II A, application no. 7, column 5, or in Table II A, application no. 7, column 8, or in Table II B, application no. 7, column 8;
   [48024] (d) a nucleic acid molecule having at least 30% identity, preferably at least 40%, 50%, 60%, 70%, 75%, 80%, 85%, 90%, 95%, 96%, 97%, 98%, 99%, 99,5%, with the nucleic acid molecule sequence of a polynucleotide comprising the nucleic acid molecule shown in column 5 or 8 of Table I, application no. 7, preferably shown in Table I A, application no. 7, column 5, or in Table I A, application no. 7, column 8, or in Table I B, application no. 7, column 8, preferably the coding region thereof;
   [48025] (e) a nucleic acid molecule encoding a polypeptide having at least 30% identity, preferably at least 40%, 50% 60%, 70%, 75%, 80%, 85%, 90%, 95%, 96%, 97%, 98%, 99%, 99,5%, identity with the amino acid sequence of the polypeptide encoded by the nucleic acid molecule of (a), (b), (c) or (d);
   [48026] (f) a nucleic acid molecule which hybridizes with a nucleic acid molecule of (a), (b), (c), (d) or (e) under stringent hybridization conditions;
   [48027] (g) a nucleic acid molecule encoding a polypeptide which can be isolated with the aid of monoclonal or polyclonal antibodies made against a polypeptide encoded by one of the nucleic acid molecules of (a), (b), (c), (d), (e) or (f);
   [48028] (h) a nucleic acid molecule encoding a polypeptide comprising the consensus sequence or one or more polypeptide motifs as shown in column 8 of Table IV, application no. 7;
   [48029] (i) a nucleic acid molecule encoding a polypeptide having the activity represented by a respective protein as depicted in column 5 of Table II, application no. 7;
   [48030] (j) a nucleic acid molecule comprising a polynucleotide which is obtained by amplifying a cDNA library or a genomic library using the primers in Table III, application no. 7, column 8;
   [48031] and
   [48032] (k) nucleic acid molecule which is obtainable by screening a suitable nucleic acid library, especially a cDNA library and/or a genomic library, under stringent hybridization conditions with a probe comprising one of the sequences of the nucleic acid molecule of (a), (b), (c), (d), (e), (f), (g), (h), (i) or (j) or with a fragment of at least 15 nt, preferably 20 nt, 30 nt, 50 nt, 100 nt, 200 nt,500 nt, 1000 nt, 1500 nt, 2000 nt or 3000 nt of the nucleic acid molecule characterized in (a), (b), (c), (d), (e), (f), (g), (h), (i) or (j);
   [48033] or a nucleic acid molecule comprising a sequence which is complementary thereto;
      and, if desired
[48034] 2) nucleic acid molecule encoding a transit peptide, preferably encoding a plastidal transit peptide or a mitochondrial transit peptide; which are operable linked;]
   or comprising or being transformed by a vector comprising
[48035] [1) a nucleic acid molecule selected from the group consisting of
   [48036] (a) a nucleic acid molecule encoding a polypeptide shown in Table II, application no. 7, column 5 or 8, preferably shown in Table II A, application no. 7, column 5, or in Ta ble II A, application no. 7, column 8, or in Table II B, application no. 7, column 8, or a homolog or a fragment thereof;
   [48037] (b) a nucleic acid molecule shown in Table I, application no. 7, column 5 or 8, preferably shown in Table I A, application no. 7, column 5, or in Table I A, application no. 7, column 8, or in Table I B, application no. 7, column 8, preferably the coding region thereof, or a homolog or a fragment thereof;
   [48038] (c) a nucleic acid molecule, which, as a result of the degeneracy of the genetic code, can be derived from a polypeptide sequence depicted in column 5 or 8 of Table II, application no. 7, preferably shown in Table II A, application no. 7, column 5, or in Table II A, application no. 7, column 8, or in Table II B, application no. 7, column 8;
   [48039] (d) a nucleic acid molecule having at least 30% identity, preferably at least 40%, 50%, 60%, 70%, 75%, 80%, 85%, 90%, 95%, 96%, 97%, 98%, 99%, 99,5%, with the nucleic acid molecule sequence of a polynucleotide comprising the nucleic acid molecule shown in column 5 or 8 of Table I, application no. 7, preferably shown in Table I A, application no. 7, column 5, or in Table I A, application no. 7, column 8, or in Table I B, application no. 7, column 8, preferably the coding region thereof;
   [48040] (e) a nucleic acid molecule encoding a polypeptide having at least 30% identity, preferably at least 40%, 50% 60%, 70%, 75%, 80%, 85%, 90%, 95%, 96%, 97%, 98%, 99%, 99,5%, identity with the amino acid sequence of the polypeptide encoded by the nucleic acid molecule of (a), (b), (c) or (d);
   [48041] (f) a nucleic acid molecule which hybridizes with a nucleic acid molecule of (a), (b), (c), (d) or (e) under stringent hybridization conditions;
   [48042] (g) a nucleic acid molecule encoding a polypeptide which can be isolated with the aid of monoclonal or polyclonal antibodies made against a polypeptide encoded by one of the nucleic acid molecules of (a), (b), (c), (d), (e) or (f);
   [48043] (h) a nucleic acid molecule encoding a polypeptide comprising the consensus sequence or one or more polypeptide motifs as shown in column 8 of Table IV, application no. 7;
   [48044] (i) a nucleic acid molecule encoding a polypeptide having the activity represented by a respective protein as depicted in column 5 of Table II, application no. 7;
   [48045] (j) a nucleic acid molecule comprising a polynucleotide which is obtained by amplifying a cDNA library or a genomic library using the primers in Table III, application no. 7, column 8;
   [48046] and
   [48047] (k) nucleic acid molecule which is obtainable by screening a suitable nucleic acid library, especially a cDNA library and/or a genomic library, under stringent hybridization conditions with a probe comprising one of the sequences of the nucleic acid molecule of (a), (b), (c), (d), (e), (f), (g), (h), (i) or (j) or with a fragment of at least 15 nt, preferably 20 nt, 30 nt, 50 nt, 100 nt, 200 nt,500 nt, 1000 nt, 1500 nt, 2000 nt or 3000 nt of the nucleic acid molecule characterized in (a), (b), (c), (d), (e), (f), (g), (h), (i) or (j);
   [48048] or a nucleic acid molecule comprising a sequence which is complementary thereto;]
      as well as respective transgenic cells, tissue, parts of such non-human organism, e.g. plant cells, plant tissue, part of plants, like leaves, roots, stems, blossoms, seeds, fruits, pollen and the like.
      (All the references to Tables I to IV are references to the corresponding lines of Tables I to IV.)

[48049] In a preferred embodiment of said transgenic non-human organism said nucleic acid molecule according to 1 (a), (b), (c), (d), (e), (f), (g), (h), (i), (j) or (k) encodes a polypeptide which has the activity of the respective polypeptide represented by a protein comprising a polypeptide as depicted in the respective line in column 5 of Table II, application no. 7.

[48050] In another preferred embodiment of said transgenic non-human organism said nucleic acid molecule according to 1 (a), (b), (c), (d), (e), (f), (g), (h), (i), (j) or (k) confers a generation or an increase of the respective fine chemical in a non-human organism or a part thereof as compared to a corresponding wild-type non-human organism or part thereof.

[48051] In another preferred embodiment of said transgenic non-human organism said nucleic acid molecule according to 1 (a), (b), (c), (d), (e), (f), (g), (h), (i), (j) or (k) encodes a polypeptide which has the activity of the respective polypeptide represented by a protein as depicted in the respective line in column 5 of Table II application no. 7 and confers a generation or an increase of the respective fine chemical in a non-human organism or a part thereof as compared to a corresponding wild-type non-human organism or part thereof.

[48052] In another embodiment of said transgenic non-human organism the expression cassette comprises 2) a nucleic acid molecule encoding a transit peptide, preferably encoding a plastidal transit peptide, especially in case in column 6 of Table I, application no. 7, in the same line as of the respective nucleic acid molecule according to 1) “plastidic” is depicted, or encoding a mitochondrial transit peptide, especially in case in column 6 of Table I, application no. 7, in the same line as of the respective nucleic acid molecule according to 1) “mitochondric” is depicted.

[48053] In another embodiment of said transgenic non-human organism the expression cassette does not comprise 2) a nucleic acid molecule encoding a transit peptide, especially in case in column 6 of Table I, application no. 7, in the same line as of the respective nucleic acid molecule according to 1) “non-targeted” is depicted.

[48054] In another embodiment of said transgenic non-human organism said vector comprises beneath said nucleic acid molecule according to 1 (a), (b), (c), (d), (e), (f), (g), (h), (i), (j) or (k), a promoter, preferably a promoter selected from the group consisting of Big35S, PCUbi, Super and USP, which are operable linked.

[48055] In a preferred embodiment of said transgenic non-human organism said vector comprises beneath said nucleic acid molecule according to 1 (a), (b), (c), (d), (e), (f), (g), (h), (i), (j) or (k), a promoter, preferably a promoter selected from the group consisting of Big35S, PCUbi, Super and USP, which are operable linked; and said nucleic acid molecule according to 1 (a), (b), (c), (d), (e), (f), (g), (h), (i), (j) or (k) encodes a polypeptide which has the activity of the respective polypeptide represented by a protein comprising a polypeptide as depicted in the respective line in column 5 of Table II, application no. 7.

[48056] In another preferred embodiment of said transgenic non-human organism said vector comprises beneath said nucleic acid molecule according to 1 (a), (b), (c), (d), (e), (f), (g), (h), (i), (j) or (k), a promoter, preferably a promoter selected from the group consisting of Big35S, PCUbi, Super and USP, which are operable linked; and said nucleic acid molecule according to 1 (a), (b), (c), (d), (e), (f), (g), (h), (i), (j) or (k) confers a generation or an increase of the respective fine chemical in a non-human organism or a part thereof as compared to a corresponding wild-type non-human organism or part thereof.

[48057] In another preferred embodiment of said transgenic non-human organism said vector comprises beneath said nucleic acid molecule according to 1 (a), (b), (c), (d), (e), (f), (g), (h), (i), (j) or (k), a promoter, preferably a promoter selected from the group consisting of Big35S, PCUbi, Super and USP, which are operable linked; and said nucleic acid molecule according to 1 (a), (b), (c), (d), (e), (f), (g), (h), (i), (j) or (k) encodes a polypeptide which has the activity of the respective polypeptide represented by a protein as depicted in the respective line in column 5 of Table II, application no. 7, and confers a generation or an increase of the respective fine chemical in a non-human organism or a part thereof as compared to a corresponding wild-type non-human organism or part thereof.

[48058] In another embodiment of said transgenic non-human organism said vector comprises beneath said nucleic acid molecule according to 1 (a), (b), (c), (d), (e), (f), (g), (h), (i), (j) or (k), a nucleic acid molecule encoding a transit peptide, preferably encoding a plastidal transit peptide, especially in case in column 6 of Table I, application no. 7, in the same line as of the respective nucleic acid molecule according to 1) “plastidic” is depicted, or encoding a mitochondrial transit peptide, especially in case in column 6 of Table I, application no. 7, in the same line as of the respective nucleic acid molecule according to 1) “mitochondric” is depicted, which are operable linked.

[48059] In another embodiment of said transgenic non-human organism said vector does not comprise beneath said nucleic acid molecule according to 1 (a), (b), (c), (d), (e), (f), (g), (h), (i), (j) or (k), a nucleic acid molecule encoding a transit peptide in case in column 6 of Table I, application no. 7, in the same line as of the respective nucleic acid molecule according to 1) “non-targeted” is depicted, which are operable linked.

[48060] In another embodiment of said transgenic non-human organism said vector comprises beneath said nucleic acid molecule according to 1 (a), (b), (c), (d), (e), (f), (g), (h), (i), (j) or (k), and a promoter, preferably a promoter selected from the group consisting of Big35S, PCUbi, Super and USP; a nucleic acid molecule encoding a transit peptide, preferably encoding a plastidal transit peptide, especially in case in column 6 of Table I, application no. 7, in the same line as of the respective nucleic acid molecule according to 1) “plastidic” is depicted, or encoding a mitochondrial transit peptide, especially in case in column 6 of Table I, application no. 7, in the same line as of the respective nucleic acid molecule according to 1) “mitochondric” is depicted, which are operable linked.

[48061] In another embodiment of said transgenic non-human organism said vector does not comprise beneath said nucleic acid molecule according to 1 (a), (b), (c), (d), (e), (f), (g), (h), (i), (j) or (k), and a promoter, preferably a promoter selected from the group consisting of Big35S, PCUbi, Super and USP; a nucleic acid molecule encoding a transit peptide, especially in case in column 6 of Table I, application no. 7, in the same line as of the respective nucleic acid molecule according to 1) “non-targeted” is depicted, which are operable linked.

[48062] In another embodiment of said transgenic non-human organism said vector comprises beneath said nucleic acid molecule according to 1 (a), (b), (c), (d), (e), (f), (g), (h), (i), (j) or (k), and a promoter, preferably a promoter selected from the group consisting of Big35S, PCUbi, Super and USP; a nucleic acid molecule encoding a transit peptide, preferably encoding a plastidal transit peptide, especially in case in column 6 of Table I, application no. 7, in the same line as of the respective nucleic acid molecule according to 1) “plastidic” is depicted, or encoding a mitochondrial transit peptide, especially in case in column 6 of Table I, application no. 7, in the same line as of the respective nucleic acid molecule according to 1) “mitochondric” is depicted, which are operable linked; and wherein said nucleic acid molecule according to 1 (a), (b), (c), (d), (e), (f), (g), (h), (i), (j) or (k) encodes a polypeptide which has the activity of the respective polypeptide represented by a protein comprising a polypeptide as depicted in the respective line in column 5 of Table II, application no. 7.

[48063] In another embodiment of said transgenic non-human organism said vector does not comprise beneath said nucleic acid molecule according to 1 (a), (b), (c), (d), (e), (f), (g), (h), (i), (j) or (k), and a promoter, preferably a promoter selected from the group consisting of Big35S, PCUbi, Super and USP; a nucleic acid molecule encoding a transit peptide, especially in case in column 6 of Table I, application no. 7, in the same line as of the respective nucleic acid molecule according to 1) “non-targeted” is depicted, which are operable linked; and wherein said nucleic acid molecule according to 1 (a), (b), (c), (d), (e), (f), (g), (h), (i), (j) or (k) encodes a polypeptide which has the activity of the respective polypeptide represented by a protein comprising a polypeptide as depicted in the respective line in column 5 of Table II, application no. 7.

[48064] In another embodiment of said transgenic non-human organism said vector comprises beneath said nucleic acid molecule according to 1 (a), (b), (c), (d), (e), (f), (g), (h), (i), (j) or (k), and a promoter, preferably a promoter selected from the group consisting of Big35S, PCUbi, Super and USP; a nucleic acid molecule encoding a transit peptide, preferably encoding a plastidal transit peptide, especially in case in column 6 of Table I, application no. 7, in the same line as of the respective nucleic acid molecule according to 1) “plastidic” is depicted, or encoding a mitochondrial transit peptide, especially in case in column 6 of Table I, application no. 7, in the same line as of the respective nucleic acid molecule according to 1) “mitochondric” is depicted, which are operable linked; and wherein said nucleic acid molecule according to 1 (a), (b), (c), (d), (e), (f), (g), (h), (i), (j) or (k) confers a generation or an increase of the respective fine chemical in a non-human organism or a part thereof as compared to a corresponding wild-type non-human organism or part thereof.

[48065] In another embodiment of said transgenic non-human organism said vector does not comprise beneath said nucleic acid molecule according to 1 (a), (b), (c), (d), (e), (f), (g), (h), (i), (j) or (k), and a promoter, preferably a promoter selected from the group consisting of Big35S, PCUbi, Super and USP; a nucleic acid molecule encoding a transit peptide, especially in case in column 6 of Table I, application no. 7, in the same line as of the respective nucleic acid molecule according to 1) “non-targeted” is depicted, which are operable linked; and wherein said nucleic acid molecule according to 1 (a), (b), (c), (d), (e), (f), (g), (h), (i), (j) or (k) confers a generation or an increase of the respective fine chemical in a non-human organism or a part thereof as compared to a corresponding wild-type non-human organism or part thereof.

[48066] In another embodiment of said transgenic non-human organism said vector comprises beneath said nucleic acid molecule according to 1 (a), (b), (c), (d), (e), (f), (g), (h), (i), (j) or (k), and a promoter, preferably a promoter selected from the group consisting of Big35S, PCUbi, Super and USP; a nucleic acid molecule encoding a transit peptide, preferably encoding a plastidal transit peptide, especially in case in column 6 of Table I, application no. 7, in the same line as of the respective nucleic acid molecule according to 1) “plastidic” is depicted, or encoding a mitochondrial transit peptide, especially in case in column 6 of Table I, application no. 7, in the same line as of the respective nucleic acid molecule according to 1) “mitochondric” is depicted, which are operable linked; and wherein said nucleic acid molecule according to 1 (a), (b), (c), (d), (e), (f), (g), (h), (i), (j) or (k) encodes a polypeptide which has the activity of the respective polypeptide represented by a protein as depicted in the respective line in column 5 of Table II application no. 7 and confers a generation or an increase of the respective fine chemical in a non-human organism or a part thereof as compared to a corresponding wild-type non-human organism or part thereof.

[48067] In another embodiment of said transgenic non-human organism said vector does not comprise beneath said nucleic acid molecule according to 1 (a), (b), (c), (d), (e), (f), (g), (h), (i), (j) or (k), and a promoter, preferably a promoter selected from the group consisting of Big35S, PCUbi, Super and USP; a nucleic acid molecule encoding a transit peptide, especially in case in column 6 of Table I, application no. 7, in the same line as of the respective nucleic acid molecule according to 1) “non-targeted” is depicted, which are operable linked; and wherein said nucleic acid molecule according to 1 (a), (b), (c), (d), (e), (f), (g), (h), (i), (j) or (k) encodes a polypeptide which has the activity of the respective polypeptide represented by a protein as depicted in the respective line in column 5 of Table II application no. 7 (in the same line) and confers a generation or an increase of the respective fine chemical in a non-human organism or a part thereof as compared to a corresponding wild-type non-human organism or part thereof.

[48068] In a preferred embodiment of said transgenic non-human organism said nucleic acid molecule according to 1 (a), (b), (c), (d), (e), (f), (g), (h), (i), (j) or (k), said promoter and optionally said nucleic acid molecule encoding a transit peptide are encompassed in an expression cassette in said vector. Accordingly an embodiment the invention provides a non-human organism comprising or being transformed by a vector comprising an expression cassette comprising said nucleic acid molecule according to 1 (a), (b), (c), (d), (e), (f), (g), (h), (i), (j) or (k), said promoter and optionally said a nucleic acid molecule encoding a transit peptide, operable linked. Said expression cassette may encompass a terminator, too.

[48069] In a further embodiment the invention relates to a transgenic non-human organisms such as transgenic microorganism or transgenic plant comprising a nucleic acid molecule comprising
[48070] [1) a nucleic acid molecule selected from the group consisting of
   [48071] (a) a nucleic acid molecule encoding a polypeptide shown in Table II, application no. 7, column 5 or 8, preferably shown in Table II A, application no. 7, column 5, or in Table II A, application no. 7, column 8, or in Table II B, application no. 7, column 8, or a homolog or a fragment thereof;
   [48072] (b) a nucleic acid molecule shown in Table I, application no. 7, column 5 or 8, preferably shown in Table I A, application no. 7, column 5, or in Table I A, application no. 7, column 8, or in Table I B, application no. 7, column 8, preferably the coding region thereof, or a homolog or a fragment thereof;
   [48073] (c) a nucleic acid molecule, which, as a result of the degeneracy of the genetic code, can be derived from a polypeptide sequence depicted in column 5 or 8 of Table II, application no. 7, preferably shown in Table II A, application no. 7, column 5, or in Table II A, application no. 7, column 8, or in Table II B, application no. 7, column 8;
   [48074] (d) a nucleic acid molecule having at least 30% identity, preferably at least 40%, 50%, 60%, 70%, 75%, 80%, 85%, 90%, 95%, 96%, 97%, 98%, 99%, 99,5%, with the nucleic acid molecule sequence of a polynucleotide comprising the nucleic acid molecule shown in column 5 or 8 of Table I, application no. 7, preferably shown in Table I A, application no. 7, column 5, or in Table I A, application no. 7, column 8, or in Table I B, application no. 7, column 8, preferably the coding region thereof;
   [48075] (e) a nucleic acid molecule encoding a polypeptide having at least 30% identity, preferably at least 40%, 50% 60%, 70%, 75%, 80%, 85%, 90%, 95%, 96%, 97%, 98%, 99%, 99,5%, identity with the amino acid sequence of the polypeptide encoded by the nucleic acid molecule of (a), (b), (c) or (d);
   [48076] (f) a nucleic acid molecule which hybridizes with a nucleic acid molecule of (a), (b), (c), (d) or (e) under stringent hybridization conditions;
   [48077] (g) a nucleic acid molecule encoding a polypeptide which can be isolated with the aid of monoclonal or polyclonal antibodies made against a polypeptide encoded by one of the nucleic acid molecules of (a), (b), (c), (d), (e) or (f);
   [48078] (h) a nucleic acid molecule encoding a polypeptide comprising the consensus sequence or one or more polypeptide motifs as shown in column 8 of Table IV, application no. 7;
   [48079] (i) a nucleic acid molecule encoding a polypeptide having the activity represented by a respective protein as depicted in column 5 of Table II, application no. 7;
   [48080] (j) a nucleic acid molecule comprising a polynucleotide which is obtained by amplifying a cDNA library or a genomic library using the primers in Table III, application no. 7, column 8;
   [48081] and
   [48082] (k) nucleic acid molecule which is obtainable by screening a suitable nucleic acid library, especially a cDNA library and/or a genomic library, under stringent hybridization conditions with a probe comprising one of the sequences of the nucleic acid molecule of (a), (b), (c), (d), (e), (f), (g), (h), (i) or (j) or with a fragment of at least 15 nt, preferably 20 nt, 30 nt, 50 nt, 100 nt, 200 nt,500 nt, 1000 nt, 1500 nt, 2000 nt or 3000 nt of the nucleic acid molecule characterized in (a), (b), (c), (d), (e), (f), (g), (h), (i) or (j);
   [48083] or a nucleic acid molecule comprising a sequence which is complementary thereto;
      and, if desired
[48084] 2) nucleic acid molecule encoding a transit peptide, preferably encoding a plastidal transit peptide or a mitochondrial transit peptide; which are operable linked;]
   or comprising an expression cassette comprising
[48085] [0) a promoter, preferably a promoter selected from the group consisting of Big35S, PCUbi, Super and USP; and
[48086] 1) a nucleic acid molecule selected from the group consisting of
   [48087] (a) a nucleic acid molecule encoding a polypeptide shown in Table II, application no. 7, column 5 or 8, preferably shown in Table II A, application no. 7, column 5, or in Table II A, application no. 7, column 8, or in Table II B, application no. 7, column 8, or a homolog or a fragment thereof;
   [48088] (b) a nucleic acid molecule shown in Table I, application no. 7, column 5 or 8, preferably shown in Table I A, application no. 7, column 5, or in Table I A, application no. 7, column 8, or in Table I B, application no. 7, column 8, preferably the coding region thereof, or a homolog or a fragment thereof;
   [48089] (c) a nucleic acid molecule, which, as a result of the degeneracy of the genetic code, can be derived from a polypeptide sequence depicted in column 5 or 8 of Table II, application no. 7, preferably shown in Table II A, application no. 7, column 5, or in Table II A, application no. 7, column 8, or in Table II B, application no. 7, column 8;
   [48090] (d) a nucleic acid molecule having at least 30% identity, preferably at least 40%, 50%, 60%, 70%, 75%, 80%, 85%, 90%, 95%, 96%, 97%, 98%, 99%, 99,5%, with the nucleic acid molecule sequence of a polynucleotide comprising the nucleic acid molecule shown in column 5 or 8 of Table I, application no. 7, preferably shown in Table I A, application no. 7, column 5, or in Table I A, application no. 7, column 8, or in Table I B, application no. 7, column 8, preferably the coding region thereof;
   [48091] (e) a nucleic acid molecule encoding a polypeptide having at least 30% identity, preferably at least 40%, 50% 60%, 70%, 75%, 80%, 85%, 90%, 95%, 96%, 97%, 98%, 99%, 99,5%, identity with the amino acid sequence of the polypeptide encoded by the nucleic acid molecule of (a), (b), (c) or (d);
   [48092] (f) a nucleic acid molecule which hybridizes with a nucleic acid molecule of (a), (b), (c), (d) or (e) under stringent hybridization conditions;
   [48093] (g) a nucleic acid molecule encoding a polypeptide which can be isolated with the aid of monoclonal or polyclonal antibodies made against a polypeptide encoded by one of the nucleic acid molecules of (a), (b), (c), (d), (e) or (f);
   [48094] (h) a nucleic acid molecule encoding a polypeptide comprising the consensus sequence or one or more polypeptide motifs as shown in column 8 of Table IV, application no. 7;
   [48095] (i) a nucleic acid molecule encoding a polypeptide having the activity represented by a respective protein as depicted in column 5 of Table II, application no. 7;
   [48096] (j) a nucleic acid molecule comprising a polynucleotide which is obtained by amplifying a cDNA library or a genomic library using the primers in Table III, application no. 7, column 8;
   [48097] and
   [48098] (k) nucleic acid molecule which is obtainable by screening a suitable nucleic acid library, especially a cDNA library and/or a genomic library, under stringent hybridization conditions with a probe comprising one of the sequences of the nucleic acid molecule of (a), (b), (c), (d), (e), (f), (g), (h), (i) or (j) or with a fragment of at least 15 nt, preferably 20 nt, 30 nt, 50 nt, 100 nt, 200 nt,500 nt, 1000 nt, 1500 nt, 2000 nt or 3000 nt of the nucleic acid molecule characterized in (a), (b), (c), (d), (e), (f), (g), (h), (i) or (j);
   [48099] or a nucleic acid molecule comprising a sequence which is complementary thereto;]
   [48100] and, if desired
[48101] 2) nucleic acid molecule encoding a transit peptide, preferably encoding a plastidal transit peptide or a mitochondrial transit peptide;
   which are operable linked;]
   or comprising or being transformed by a vector comprising [1) a nucleic acid molecule selected from the group consisting of
   [48102] (a) a nucleic acid molecule encoding a polypeptide shown in Table II, application no. 7, column 5 or 8, preferably shown in Table II A, application no. 7, column 5, or in Table II A, application no. 7, column 8, or in Table II B, application no. 7, column 8, or a homolog or a fragment thereof;
   [48103] (b) a nucleic acid molecule shown in Table I, application no. 7, column 5 or 8, preferably shown in Table I A, application no. 7, column 5, or in Table I A, application no. 7, column 8, or in Table I B, application no. 7, column 8, preferably the coding region thereof, or a homolog or a fragment thereof;
   [48104] (c) a nucleic acid molecule, which, as a result of the degeneracy of the genetic code, can be derived from a polypeptide sequence depicted in column 5 or 8 of Table II, application no. 7, preferably shown in Table II A, application no. 7, column 5, or in Table II A, application no. 7, column 8, or in Table II B, application no. 7, column 8;
   [48105] (d) a nucleic acid molecule having at least 30% identity, preferably at least 40%, 50%, 60%, 70%, 75%, 80%, 85%, 90%, 95%, 96%, 97%, 98%, 99%, 99,5%, with the nucleic acid molecule sequence of a polynucleotide comprising the nucleic acid molecule shown in column 5 or 8 of Table I, application no. 7, preferably shown in Table I A, application no. 7, column 5, or in Table I A, application no. 7, column 8, or in Table I B, application no. 7, column 8, preferably the coding region thereof;
   [48106] (e) a nucleic acid molecule encoding a polypeptide having at least 30% identity, preferably at least 40%, 50% 60%, 70%, 75%, 80%, 85%, 90%, 95%, 96%, 97%, 98%, 99%, 99,5%, identity with the amino acid sequence of the polypeptide encoded by the nucleic acid molecule of (a), (b), (c) or (d);
   [48107] (f) a nucleic acid molecule which hybridizes with a nucleic acid molecule of (a), (b), (c), (d) or (e) under stringent hybridization conditions;
   [48108] (g) a nucleic acid molecule encoding a polypeptide which can be isolated with the aid of monoclonal or polyclonal antibodies made against a polypeptide encoded by one of the nucleic acid molecules of (a), (b), (c), (d), (e) or (f);
   [48109] (h) a nucleic acid molecule encoding a polypeptide comprising the consensus sequence or one or more polypeptide motifs as shown in column 8 of Table IV, application no. 7;
   [48110] (i) a nucleic acid molecule encoding a polypeptide having the activity represented by a respective protein as depicted in column 5 of Table II, application no. 7;
   [48111] (j) a nucleic acid molecule comprising a polynucleotide which is obtained by amplifying a cDNA library or a genomic library using the primers in Table III, application no. 7, column 8;
   [48112] and
   [48113] (k) nucleic acid molecule which is obtainable by screening a suitable nucleic acid library, especially a cDNA library and/or a genomic library, under stringent hybridization conditions with a probe comprising one of the sequences of the nucleic acid molecule of (a), (b), (c), (d), (e), (f), (g), (h), (i) or (j) or with a fragment of at least 15 nt, preferably 20 nt, 30 nt, 50 nt, 100 nt, 200 nt,500 nt, 1000 nt, 1500 nt, 2000 nt or 3000 nt of the nucleic acid molecule characterized in (a), (b), (c), (d), (e), (f), (g), (h), (i) or (j);
   [48114] or a nucleic acid molecule comprising a sequence which is complementary thereto;]
      whereby, preferably, the nucleic acid molecule according to 1 (a), (b), (c), (d), (e), (f), (g), (h), (i), (j) or (k) distinguishes over the sequence depicted in Table I A and/or I B, application no. 7, column 5 or 8, or the coding regions thereof, by one or more nucleotides (especially but not exceeding 5%, preferably 4%, 3%, 2%, 1%, 0.5%, 0.2% or 0.1%). In an embodiment, the nucleic acid molecule of the invention does not consist of the sequence shown in Table I A and/or I B, application no. 7, column 5 or 8, or the coding region thereof. In another embodiment, the nucleic acid molecule of the present invention, preferably the coding region thereof, is at least 30%, 40%, 50%, 60%, 70%, 80%, 90%, 95% identical but less than 100%, 99.999%, 99.99%, 99.9%, 99%, 98%, 97%, 96% or 95% identical to the sequence shown in Table I A and/or I B, application no. 7, column 5 or 8, or the coding region thereof, respectively. In a further embodiment the nucleic acid molecule does not encode the polypeptide sequence shown in Table II A and/or II B, application no. 7, column 5 or 8 but homologs thereof. Accordingly, in one embodiment, the nucleic acid molecule of the present invention encodes in one embodiment a polypeptide which differs at least in one or more amino acids (especially but not exceeding 5%, preferably 4%, 3%, 2%, 1%, 0.5%, 0.2% or 0.1%) from the polypeptide shown in Table II, application no. 7, column 5 or 8 and does not encode a protein of the sequence shown in Table II A and/or II B, application no. 7, column 5 or 8. Accordingly, in one embodiment, the protein encoded by a sequence of a nucleic acid according to 1 (a), (b), (c), (d), (e), (f), (g), (h), (i), (j) or (k) does not consist of the sequence shown in Table I A and/or I B, application no. 7, column 5 or 8, or the coding region thereof. In a further embodiment, the protein of the present invention is at least 30%, 40%, 50%, 60%, 70%, 80%, 90%, 95% identical to protein sequence depicted in Table II A and/or II B, application no. 7, column 5 or 8 but less than 100%, preferably less than 99.999%, 99.99%, 99.9%, 99%, 98%, 97%, 96% or 95% identical to the sequence shown in Table II A and/or II B, application no. 7, column 5 or 8;
      as well as respective transgenic cells, tissue, parts of such non-human organism, e.g. plant cells, plant tissue, part of plants, like leaves, roots, stems, blossoms, seeds, fruits, pollen and the like.
      (All the references to Tables I to IV are references to the corresponding lines of Tables I to IV.)

[48115] In a preferred embodiment of said transgenic non-human organism said nucleic acid molecule according to 1 (a), (b), (c), (d), (e), (f), (g), (h), (i), (j) or (k) encodes a polypeptide which has the activity of the respective polypeptide represented by a protein comprising a polypeptide as depicted in the respective line in column 5 of Table II, application no. 7.

[48116] In another preferred embodiment of said transgenic non-human organism said nucleic acid molecule according to 1 (a), (b), (c), (d), (e), (f), (g), (h), (i), (j) or (k) confers a generation or an increase of the respective fine chemical in a non-human organism or a part thereof as compared to a corresponding wild-type non-human organism or part thereof.

[48117] In another preferred embodiment of said transgenic non-human organism said nucleic acid molecule according to 1 (a), (b), (c), (d), (e), (f), (g), (h), (i), (j) or (k) encodes a polypeptide which has the activity of the respective polypeptide represented by a protein as depicted in the respective line in column 5 of Table II application no. 7 and confers a generation or an increase of the respective fine chemical in a non-human organism or a part thereof as compared to a corresponding wild-type non-human organism or part thereof.

[48118] In another embodiment of said transgenic non-human organism the expression cassette comprises 2) a nucleic acid molecule encoding a transit peptide, preferably encoding a plastidal transit peptide, especially in case in column 6 of Table I, application no. 7, in the same line as of the respective nucleic acid molecule according to 1) “plastidic” is depicted, or encoding a mitochondrial transit peptide, especially in case in column 6 of Table I, application no. 7, in the same line as of the respective nucleic acid molecule according to 1) “mitochondric” is depicted.

[48119] In another embodiment thereof the expression cassette does not comprise 2) a nucleic acid molecule encoding a transit peptide, especially in case in column 6 of Table I, application no. 7, in the same line as of the respective nucleic acid molecule according to 1) “non-targeted” is depicted.

[48120] In another embodiment of said transgenic non-human organism said vector comprises beneath said nucleic acid molecule according to 1 (a), (b), (c), (d), (e), (f), (g), (h), (i), (j) or (k), a promoter, preferably a promoter selected from the group consisting of Big35S, PCUbi, Super and USP, which are operable linked.

[48121] In a preferred embodiment of said transgenic non-human organism said vector comprises beneath said nucleic acid molecule according to 1 (a), (b), (c), (d), (e), (f), (g), (h), (i), (j) or (k), a promoter, preferably a promoter selected from the group consisting of Big35S, PCUbi, Super and USP, which are operable linked; and said nucleic acid molecule according to 1 (a), (b), (c), (d), (e), (f), (g), (h), (i), (j) or (k) encodes a polypeptide which has the activity of the respective polypeptide represented by a protein comprising a polypeptide as depicted in the respective line in column 5 of Table II, application no. 7.

[48122] In another preferred embodiment of said transgenic non-human organism said vector comprises beneath said nucleic acid molecule according to 1 (a), (b), (c), (d), (e), (f), (g), (h), (i), (j) or (k), a promoter, preferably a promoter selected from the group consisting of Big35S, PCUbi, Super and USP, which are operable linked; and said nucleic acid molecule according to 1 (a), (b), (c), (d), (e), (f), (g), (h), (i), (j) or (k) confers a generation or an increase of the respective fine chemical in a non-human organism or a part thereof as compared to a corresponding wild-type non-human organism or part thereof.

[48123] In another preferred embodiment of said transgenic non-human organism said vector comprises beneath said nucleic acid molecule according to 1 (a), (b), (c), (d), (e), (f), (g), (h), (i), (j) or (k), a promoter, preferably a promoter selected from the group consisting of Big35S, PCUbi, Super and USP, which are operable linked; and said nucleic acid molecule according to 1 (a), (b), (c), (d), (e), (f), (g), (h), (i), (j) or (k) encodes a polypeptide which has the activity of the respective polypeptide represented by a protein as depicted in the same line in column 5 of Table II, application no. 7, and confers a generation or an increase of the respective fine chemical in a non-human organism or a part thereof as compared to a corresponding wild-type non-human organism or part thereof.

[48124] In another embodiment of said transgenic non-human organism said vector comprises beneath said nucleic acid molecule according to 1 (a), (b), (c), (d), (e), (f), (g), (h), (i), (j) or (k), a nucleic acid molecule encoding a transit peptide, preferably encoding a plastidal transit peptide, especially in case in column 6 of Table I, application no. 7, in the same line as of the respective nucleic acid molecule according to 1) “plastidic” is depicted, or encoding a mitochondrial transit peptide, especially in case in column 6 of Table I, application no. 7, in the same line as of the respective nucleic acid molecule according to 1) “mitochondric” is depicted, which are operable linked.

[48125] In another embodiment of said transgenic non-human organism said vector does not comprise beneath said nucleic acid molecule according to 1 (a), (b), (c), (d), (e), (f), (g), (h), (i), (j) or (k), a nucleic acid molecule encoding a transit peptide in case in column 6 of Table I, application no. 7, in the same line as of the respective nucleic acid molecule according to 1) “non-targeted” is depicted, which are operable linked.

[48126] In another embodiment of said transgenic non-human organism said vector comprises beneath said nucleic acid molecule according to 1 (a), (b), (c), (d), (e), (f), (g), (h), (i), (j) or (k), and a promoter, preferably a promoter selected from the group consisting of Big35S, PCUbi, Super and USP; a nucleic acid molecule encoding a transit peptide, preferably encoding a plastidal transit peptide, especially in case in column 6 of Table I, application no. 7, in the same line as of the respective nucleic acid molecule according to 1) “plastidic” is depicted, or encoding a mitochondrial transit peptide, especially in case in column 6 of Table I, application no. 7, in the same line as of the respective nucleic acid molecule according to 1) “mitochondric” is depicted, which are operable linked.

[48127] In another embodiment of said transgenic non-human organism said vector does not comprise beneath said nucleic acid molecule according to 1 (a), (b), (c), (d), (e), (f), (g), (h), (i), (j) or (k), and a promoter, preferably a promoter selected from the group consisting of Big35S, PCUbi, Super and USP; a nucleic acid molecule encoding a transit peptide, especially in case in column 6 of Table I, application no. 7, in the same line as of the respective nucleic acid molecule according to 1) “non-targeted” is depicted, which are operable linked.

[48128] In another embodiment of said transgenic non-human organism said vector comprises beneath said nucleic acid molecule according to 1 (a), (b), (c), (d), (e), (f), (g), (h), (i), (j) or (k), and a promoter, preferably a promoter selected from the group consisting of Big35S, PCUbi, Super and USP; a nucleic acid molecule encoding a transit peptide, preferably encoding a plastidal transit peptide, especially in case in column 6 of Table I, application no. 7, in the same line as of the respective nucleic acid molecule according to 1) “plastidic” is depicted, or encoding a mitochondrial transit peptide, especially in case in column 6 of Table I, application no. 7, in the same line as of the respective nucleic acid molecule according to 1) “mitochondric” is depicted, which are operable linked; and wherein said nucleic acid molecule according to 1 (a), (b), (c), (d), (e), (f), (g), (h), (i), (j) or (k) encodes a polypeptide which has the activity of the respective polypeptide represented by a protein comprising a polypeptide as depicted in the respective line in column 5 of Table II, application no. 7.

[48129] In another embodiment of said transgenic non-human organism said vector does not comprise beneath said nucleic acid molecule according to 1 (a), (b), (c), (d), (e), (f), (g), (h), (i), (j) or (k), and a promoter, preferably a promoter selected from the group consisting of Big35S, PCUbi, Super and USP; a nucleic acid molecule encoding a transit peptide, especially in case in column 6 of Table I, application no. 7, in the same line as of the respective nucleic acid molecule according to 1) “non-targeted” is depicted, which are operable linked; and wherein said nucleic acid molecule according to 1 (a), (b), (c), (d), (e), (f), (g), (h), (i), (j) or (k) encodes a polypeptide which has the activity of the respective polypeptide represented by a protein comprising a polypeptide as depicted in the respective line in column 5 of Table II, application no. 7.

[48130] In another embodiment of said transgenic non-human organism said vector comprises beneath said nucleic acid molecule according to 1 (a), (b), (c), (d), (e), (f), (g), (h), (i), (j) or (k), and a promoter, preferably a promoter selected from the group consisting of Big35S, PCUbi, Super and USP; a nucleic acid molecule encoding a transit peptide, preferably encoding a plastidal transit peptide, especially in case in column 6 of Table I, application no. 7, in the same line as of the respective nucleic acid molecule according to 1) “plastidic” is depicted, or encoding a mitochondrial transit peptide, especially in case in column 6 of Table I, application no. 7, in the same line as of the respective nucleic acid molecule according to 1) “mitochondric” is depicted, which are operable linked; and wherein said nucleic acid molecule according to 1 (a), (b), (c), (d), (e), (f), (g), (h), (i), (j) or (k) confers a generation or an increase of the respective fine chemical in a non-human organism or a part thereof as compared to a corresponding wild-type non-human organism or part thereof.

[48131] In another embodiment of said transgenic non-human organism said vector does not comprise beneath said nucleic acid molecule according to 1 (a), (b), (c), (d), (e), (f), (g), (h), (i), (j) or (k), and a promoter, preferably a promoter selected from the group consisting of Big35S, PCUbi, Super and USP; a nucleic acid molecule encoding a transit peptide, especially in case in column 6 of Table I, application no. 7, in the same line as of the respective nucleic acid molecule according to 1) “non-targeted” is depicted, which are operable linked; and wherein said nucleic acid molecule according to 1 (a), (b), (c), (d), (e), (f), (g), (h), (i), (j) or (k) confers a generation or an increase of the respective fine chemical in a non-human organism or a part thereof as compared to a corresponding wild-type non-human organism or part thereof.

[48132] In another embodiment of said transgenic non-human organism said vector comprises beneath said nucleic acid molecule according to 1 (a), (b), (c), (d), (e), (f), (g), (h), (i), (j) or (k), and a promoter, preferably a promoter selected from the group consisting of Big35S, PCUbi, Super and USP; a nucleic acid molecule encoding a transit peptide, preferably encoding a plastidal transit peptide, especially in case in column 6 of Table I, application no. 7, in the same line as of the respective nucleic acid molecule according to 1) “plastidic” is depicted, or encoding a mitochondrial transit peptide, especially in case in column 6 of Table I, application no. 7, in the same line as of the respective nucleic acid molecule according to 1) “mitochondric” is depicted, which are operable linked; and wherein said nucleic acid molecule according to 1 (a), (b), (c), (d), (e), (f), (g), (h), (i), (j) or (k) encodes a polypeptide which has the activity of the respective polypeptide represented by a protein as depicted in the respective line in column 5 of Table II application no. 7 and confers a generation or an increase of the respective fine chemical in a non-human organism or a part thereof as compared to a corresponding wild-type non-human organism or part thereof.

[48133] In another embodiment of said transgenic non-human organism said vector does not comprise beneath said nucleic acid molecule according to 1 (a), (b), (c), (d), (e), (f), (g), (h), (i), (j) or (k), and a promoter, preferably a promoter selected from the group consisting of Big35S, PCUbi, Super and USP; a nucleic acid molecule encoding a transit peptide, especially in case in column 6 of Table I, application no. 7, in the same line as of the respective nucleic acid molecule according to 1) “non-targeted” is depicted, which are operable linked; and wherein said nucleic acid molecule according to 1 (a), (b), (c), (d), (e), (f), (g), (h), (i), (j) or (k) encodes a polypeptide which has the activity of the respective polypeptide represented by a protein as depicted in the respective line in column 5 of Table II application no. 7 and confers a generation or an increase of the respective fine chemical in a non-human organism or a part thereof as compared to a corresponding wild-type non-human organism or part thereof.

[48134] In a preferred embodiment of said transgenic non-human organism said nucleic acid molecule according to 1 (a), (b), (c), (d), (e), (f), (g), (h), (i), (j) or (k), said promoter and optionally said nucleic acid molecule encoding a transit peptide are encompassed in an expression cassette in said vector. Accordingly an embodiment the invention provides a non-human organism comprising or being transformed by a vector comprising an expression cassette comprising said nucleic acid molecule according to 1 (a), (b), (c), (d), (e), (f), (g), (h), (i), (j) or (k), said promoter and optionally said a nucleic acid molecule encoding a transit peptide, operable linked. Said expression cassette may encompass a terminator, too.

[48135] In an embodiment thereof the transgenic non-human organism is a microorganism selected from the group consisting of Charophyceae such as the genera Chara, Nitella e.g. the species Chara globularis, Chara vulgaris, Nitella flexilis, Chlorophyceae such as the genera Acrosiphonia, Spongomorpha, Urospora, Bryopsis, Pseudobryopsis, Trichosolen, Dichotomosiphon, Caulerpa, Rhipilia, Blastophysa, Avrainvillea, Chlorodesmis, Codium, Espera, Halicystis, Halimeda, Penicillus, Pseudocodium, Rhipiliopsis, Rhipocephalus, Tydemania, Udotea, Derbesia, Acrochaete, Aphanochaete, Bolbocoleon, Chaetobolus, Chaetonema,

[48136] Chaetophora, Chlorotylium, Desmococcus, Draparnaldia, Draparnaldiopsis, Ectochaete, Endophyton, Entocladia, Epicladia, Internoretia, Microthamnion, Ochlochaete, Phaeophila, Pilinella, Pringsheimiella, Protoderma, Pseudendoclonium, Pseudodictyon, Pseudopringsheimia, Pseudulvella, Schizomeris, Stigeoclonium, Thamniochaete, Ulvella, Pilinia, Tellamia, Helicodictyon, Actidesmium, Ankyra, Characium, Codiolum, Sykidion, Keratococcus, Prototheca, Bracteacoccus Chlorococcum, Excentrosphaera, Hormidium, Oophila, Schroederia, Tetraedron, Trebouxia Chlorosarcinopsis, Gomphonitzschia, Coccomyxa, Dactylothece, Diógenes, Disporá, Gloeocystis, Mycanthococcus, Ourococcus, Coelastrum, Dicranochaete, Botryococcus, Dictyosphaerium, Dimorphococcus, Chlorochytrium, Kentrosphaera, Phyllobium, Gomontia, Hormotila, Euastropsis, Hydrodictyon, Pectodictyon, Pediastrum, Sorastrum, Tetrapedia, Acanthosphaera, Echinosphaerella, Echinosphaeridium, Errerella, Gloeoactinium, Golenkeniopsis Golenkinia, Micractinium, Ankistrodesmus, Chlorella, Chodatella, Closteriopsis, Cryocystis, Dactylococcus, Dematractum, Eremosphaera, Eutetramorus, Franceia, Glaucocystis, Gloeotaenium, Kirchneriella, Lagerheimiella, Monoraphidium, Nannochloris, Nephrochlamys, Nephrocytium, Oocystis, Oonephris, Pachycladon, Palmellococcus, Planktosphaeria, Polyedriopsis, Pseudoraciborskia, Quadrigula, Radiococcus, Rochiscia, Scotiella, Selanastrum, Thorakochloris, Treubaria, Trochiscia, Westella, Zoochlorella, Ostreobium, Phyllosiphon, Protosiphon, Rhodochytrium, Actinastrum, Coronastrum, Crucigenia, Dictymocystis, Enallax, Scenedesmus, Selenastrum, Tetradesmus, Tetrallantos, Tetrastrum, Chlorosarcina, Anadyomene, Valoniopsis, Ventricaria, Basicladia, Chaetomorpha, Cladophora, LolaPithophoraRhizoclonium Chaetosphaeridium, Conochaete, Coleochaete, Oligochaetophora, Polychaetophora, Cylindrocapsa, Gongrosira, Protococcus, Acetabularia, Batophora, Bornetella, Dasycladus, Halicoryne, Neomeris, Elakatothrix, Raphidonema, Microspora, Bulbochaete, Oedocladium, Oedogonium, Prasiola, Rosenvingiella, Schizogonium, Apjohnia, Chamaedoris, Cladophoropsis, Siphonocladus, Spongocladia, Boergesenia, Boodlea, Cystodictyon, Dictyosphaeria, Ernodesmis, Microdictyon, Struvea, Valonia, Sphaeroplea, Malleochloris, Stylosphaeridium, Gloeococcus, Palmella, Palmodictyon, Palmophyllum, Pseudospherocystis, Sphaerocystis, Urococcus, Apiocystis, Chaetopeltis, Gemellicystis, Paulschulzia, Phacomyxa, Pseudotetraspora, Schizochlamys, Tetraspora, Cephaleuros, Ctenocladus, Epibolium, Leptosira, Trentepohlia, Diplochaete, Monostroma, Binuclearia, Geminella, Klebsormidium, Planetonema, Radiofilum, Stichococcus, Ulothrix, Uronema, Blidingia, Capsosiphon, Chloropelta, Enteromorpha, Percursaria, Ulva, Ulvaria, Brachiomonas, Carteria, Chlainomonas, Chlamydomonas, Chlamydonephris, Chlorangium, Chlorogonium, Cyanidium, Fortiella, Glenomonas, Gloeomonas, Hyalogonium, Lobomonas Polytoma, Pyramichlamys, Scourfieldia, Smithsonimonas, Sphaerellopsis, Sphenochloris, Spirogonium, Collodictyon, Dunaliella, Haematococcus, Stephanosphaera, Coccomonas, Dysmorphococcus, Phacotus, Pteromonas, Thoracomonas, Wislouchiella, Mascherina, Pyrobotrys, Spondylomorum, Eudorina, Gonium, Oltmannsiella, Pandorina, Platydorina, Pleodorina, Stephanoon, Volvox, Volvulina, Actinotaenium, Arthrodesmus, Bambusina Closterium, Cosmarium, Desmidium, Euastrum, Groenbladia, Hyalotheca, Micrasterias, Penium, Phymatodocis, Pleurotaenium, Sphaerozosma, Spinoclosterium, Spinocosmarium, Spondylosium, Staurastrum, Tetmemorus, Triploceras, Xanthidium, Cylindrocystis, Genicularia, Gonatozygon, Mesotaenium, Netrium, Roya, Spirotaenia, Cosmocladium, Debarya, Docidium, Euastridium, Hallasia, Mougeotia, Mougeotiopsis, Sirogonium, Spirogyra, Staurodesmus, Teilingia, Zygnema, Zygogonium, e.g. the species Caulerpa taxifolia, Prototheca wickerhamii, Ankistrodesmus falcatus, Chlorella ellipsoidea, Chlorella pyrenoidosa, Clorella sorokiniana, Chlorella vulgaris, Scenedesmus obliquus, Scenedesmus quadricauda, Selenastrum capricornutum, Selenastrum undecimnotata, Cladophora glomerata, Chlamydomonas eugametos, Chlamydomonas reinhardtii, Cyanidium caldarium, Dunaliella salina, Dunaliella tertiolecta, Euglena gracilis, Haematococcus pluvialis, Coniugatophyceae, Prasinophyceae Trebouxiophyceae, Ulvophyceae, Chlorodendraceae, Pedinomonadales, Halosphaeraceae, Pterospermataceae, Monomastigaceae, Pyramimonadaceae, Chlorodendraceae such as the genera Prasinocladus e.g. the species Prasinocladus ascus, Halosphaeraceae, Pedinomonadales,Pedinomonadaceae such as the genera Pedinomonas, Pterospermataceae such as the genera Pachysphaera, Pterosperma, Halosphaera, Pyramimonas, Bacillariophyceae, Chrysophyceae, Craspedophyceae, Euglenophyceae, Prymnesiophyceae, Phaeophyceae, Dinophyceae, Rhodophyceae, Xanthophyceae, Prasinophyceae such as the genera Nephroselmis, Prasinococcus, Scherffelia, Tetraselmis, Mantoniella, Ostreococcus e.g. the species Nephroselmis olivacea, Prasinococcus capsulatus, Scherffelia dubia, Tetraselmis chui, Tetraselmis suecica, Mantoniella squamata or Ostreococcus tauri.

[48137] In an embodiment thereof the transgenic non-human organism is a plant (or a part thereof), preferably a monocotyledonous or a dicotyledonous plant. Preferably the plant is selected from the group consisting of Anacardiaceae such as the genera Pistacia, Mangifera, Anacardium e.g. the species Pistacia vera [pistachios, Pistazie], Mangifer indica [Mango] or Anacardium occidentale [Cashew]; Asteraceae such as the genera Calendula, Carthamus, Centaurea, Cichorium, Cynara, Helianthus, Lactuca, Locusta, Tagetes, Valeriana e.g. the species Calendula officinalis [Marigold], Carthamus tinctorius [safflower], Centaurea cyanus [cornflower], Cichorium intybus [blue daisy], Cynara scolymus [Artichoke], Helianthus annus [sunflower], Lactuca sativa, Lactuca crispa, Lactuca esculenta, Lactuca scariola L. ssp. sativa, Lactuca scariola L. var. integrate, Lactuca scariola L. var. integrifolia, Lactuca sativa subsp. romana, Locusta communis, Valeriana locusta [lettuce], Tagetes lucida, Tagetes erecta or Tagetes tenuifolia [Marigold]; Apiaceae such as the genera Daucus e.g. the species Daucus carota [carrot]; Betulaceae such as the genera Corylus e.g. the species Corylus avellana or Corylus colurna [hazelnut]; Boraginaceae such as the genera Borago e.g. the species Borago officinalis [borage]; Brassicaceae such as the genera Brassica, Melanosinapis, Sinapis, Arabadopsis e.g. the species Brassica napus, Brassica rapa ssp. [canola, oilseed rape, turnip rape], Sinapis arvensis Brassica juncea, Brassica juncea var. juncea, Brassica juncea var. crispifolia, Brassica juncea var. foliosa, Brassica nigra, Brassica sinapioides, Melanosinapis communis [mustard], Brassica oleracea [fodder beet] or Arabidopsis thaliana; Bromeliaceae such as the genera Anana, Bromelia e.g. the species Anana comosus, Ananas ananas or Bromelia comosa [pineapple]; Caricaceae such as the genera Carica e.g. the species Carica papaya [papaya]; Cannabaceae such as the genera Cannabis e.g. the species Cannabis sative [hemp], Convolvulaceae such as the genera Ipomea, Convolvulus e.g. the species Ipomoea batatus, Ipomoea pandurata, Convolvulus batatas, Convolvulus tiliaceus, Ipomoea fastigiata, Ipomoea tiliacea, Ipomoea triloba or Convolvulus panduratus [sweet potato, Man of the Earth, wild potato], Chenopodiaceae such as the genera Beta, i.e. the species Beta vulgaris, Beta vulgaris var. altissima, Beta vulgaris var. Vulgaris, Beta maritima, Beta vulgaris var. perennis, Beta vulgaris var. conditiva or Beta vulgaris var. esculenta [sugar beet]; Cucurbitaceae such as the genera Cucubita e.g. the species Cucurbita maxima, Cucurbita mixta, Cucurbita pepo or Cucurbita moschata [pumpkin, squash]; Elaeagnaceae such as the genera Elaeagnus e.g. the species Olea europaea [olive]; Ericaceae such as the genera Kalmia e.g. the species Kalmia latifolia, Kalmia angustifolia, Kalmia microphylla, Kalmia polifolia, Kalmia occidentalis, Cistus chamaerhodendros or Kalmia lucida [American laurel, broad-leafed laurel, calico bush, spoon wood, sheep laurel, alpine laurel, bog laurel, western bog-laurel, swamp-laurel]; Euphorbiaceae such as the genera Manihot, Janipha, Jatropha, Ricinus e.g. the species Manihot utilissima, Janipha manihot, Jatropha manihot, Manihot aipil, Manihot dulcis, Manihot manihot, Manihot melanobasis, Manihot esculenta [manihot, arrowroot, tapioca, cassava] or Ricinus communis [castor bean, Castor Oil Bush, Castor Oil Plant, Palma Christi, Wonder Tree]; Fabaceae such as the genera Pisum, Albizia, Cathormion, Feuillea, Inga, Pithecolobium, Acacia, Mimosa, Medicajo, Glycine, Dolichos, Phaseolus, Soja e.g. the species Pisum sativum, Pisum arvense, Pisum humile [pea], Albizia berteriana, Albizia julibrissin, Albizia lebbeck, Acacia berteriana, Acacia littoralis, Albizia berteriana, Albizzia berteriana, Cathormion berteriana, Feuillea berteriana, Inga fragrans, Pithecellobium berterianum, Pithecellobium fragrans, Pithecolobium berterianum, Pseudalbizzia berteriana, Acacia julibrissin, Acacia nemu, Albizia nemu, Feuilleea julibrissin, Mimosa julibrissin, Mimosa speciosa, Sericanrda julibrissin, Acacia lebbeck, Acacia macrophylla, Albizia lebbek, Feuilleea lebbeck, Mimosa lebbeck, Mimosa speciosa [bastard logwood, silk tree, East Indian Walnut], Medicago sativa, Medicago falcata, Medicago varia [alfalfa], Glycine max [soybean], Dolichos soja, Glycine gracilis, Glycine hispida, Phaseolus max or Soja hispida; Geraniaceae such as the genera Pelargonium, Cocos, Oleum e.g. the species Cocos nucifera, Pelargonium grossularioides or Oleum cocois [coconut]; Gramineae such as the genera Saccharum e.g. the species Saccharum officinarum; Juglandaceae such as the genera Juglans, Wallia e.g. the species Juglans regia, Juglans ailanthifolia, Juglans sieboldiana, Juglans cinerea, Wallia cinerea, Juglans bixbyi, Juglans californica, Juglans hindsii, Juglans intermedia, Juglans jamaicensis, Juglans major, Juglans microcarpa, Juglans nigra or Wallia nigra [walnut, black walnut, common walnut, persian walnut, white walnut, butternut, black walnut]; Lauraceae such as the genera Persea, Laurus e.g. the species laurel Laurus nobilis [bay, laurel, bay laurel, sweet bay], Persea americana Persea americana, Persea gratissima or Persea persea [avocado]; Leguminosae such as the genera Arachis e.g. the species Arachis hypogaea [peanut]; Linaceae such as the genera Linum, Adenolinum e.g. the species Linum usitatissimum, Linum humile, Linum austriacum, Linum bienne, Linum angustifolium, Linum catharticum, Linum flavum, Linum grandiflorum, Adenolinum grandiflorum, Linum lewisii, Linum narbonense, Linum perenne, Linum perenne var. lewisii, Linum pratense or Linum trigynum [flax, linseed]; Lythrarieae such as the genera Punica e.g. the species Punica granatum [pomegranate]; Malvaceae such as the genera Gossypium e.g. the species Gossypium hirsutum, Gossypium arboreum, Gossypium barbadense, Gossypium herbaceum or Gossypium thurberi [cotton]; Musaceae such as the genera Musa e.g. the species Musa nana, Musa acuminata, Musa paradisiaca, Musa spp. [banana]; Onagraceae such as the genera Camissonia, Oenothera e.g. the species Oenothera biennis or Camissonia brevipes [primrose, evening primrose]; Palmae such as the genera Elacis e.g. the species Elaeis guineensis [oil plam]; Papaveraceae such as the genera Papaver e.g. the species Papaver orientale, Papaver rhoeas, Papaver dubium [poppy, oriental poppy, corn poppy, field poppy, shirley poppies, field poppy, long-headed poppy, long-pod poppy]; Pedaliaceae such as the genera Sesamum e.g. the species Sesamum indicum [sesame]; Piperaceae such as the genera Piper, Artanthe, Peperomia, Steffensia e.g. the species Piper aduncum, Piper amalago, Piper angustifolium, Piper auritum, Piper betel, Piper cubeba, Piper longum, Piper nigrum, Piper retrofractum, Artanthe adunca, Artanthe elongata, Peperomia elongata, Piper elongatum, Steffensia elongata. [Cayenne pepper, wild pepper]; Poaceae such as the genera Hordeum, Secale, Avena, Sorghum, Andropogon, Holcus, Panicum, Oryza, Zea, Triticum e.g. the species Hordeum vulgare, Hordeum jubatum, Hordeum murinum, Hordeum secalinum, Hordeum distichon Hordeum aegiceras, Hordeum hexastichon, Hordeum hexastichum, Hordeum irregulare, Hordeum sativum, Hordeum secalinum [barley, pearl barley, foxtail barley, wall barley, meadow barley], Secale cereale [rye], Avena sativa, Avena fatua, Avena byzantina, Avena fatua var. sativa, Avena hybrida [oat], Sorghum bicolor, Sorghum halepense, Sorghum saccharatum, Sorghum vulgare, Andropogon drummondii, Holcus bicolor, Holcus sorghum, Sorghum aethiopicum, Sorghum arundinaceum, Sorghum caffrorum, Sorghum cernuum, Sorghum dochna, Sorghum drummondii, Sorghum durra, Sorghum guineense, Sorghum lanceolatum, Sorghum nervosum, Sorghum saccharatum, Sorghum subglabrescens, Sorghum verticilliflorum, Sorghum vulgare, Holcus halepensis, Sorghum miliaceum millet, Panicum militaceum [Sorghum, millet], Oryza sativa, Oryza latifolia [rice], Zea mays [corn, maize] Triticum aestivum, Triticum durum, Triticum turgidum, Triticum hybernum, Triticum macha, Triticum sativum or Triticum vulgare [wheat, bread wheat, common wheat], Proteaceae such as the genera Macadamia e.g. the species Macadamia intergrifolia [macadamia]; Rubiaceae such as the genera Coffea e.g. the species Cofea spp., Coffea arabica, Coffea canephora or Coffea liberica [coffee]; Scrophulariaceae such as the genera Verbascum e.g. the species Verbascum blattaria, Verbascum chaixii, Verbascum densiflorum, Verbascum lagurus, Verbascum longifolium, Verbascum lychnitis, Verbascum nigrum, Verbascum olympicum, Verbascum phlomoides, Verbascum phoenicum, Verbascum pulverulentum or Verbascum thapsus [mullein, white moth mullein, nettle-leaved mullein, dense-flowered mullein, silver mullein, long-leaved mullein, white mullein, dark mullein, greek mullein, orange mullein, purple mullein, hoary mullein, great mullein]; Solanaceae such as the genera Capsicum, Nicotiana, Solanum, Lycopersicon e.g. the species Capsicum annuum, Capsicum annuum var. glabriusculum, Capsicum frutescens [pepper], Capsicum annuum [paprika], Nicotiana tabacum, Nicotiana alata, Nicotiana attenuata, Nicotiana glauca, Nicotiana langsdorffii, Nicotiana obtusifolia, Nicotiana quadrivalvis, Nicotiana repanda, Nicotiana rustica, Nicotiana sylvestris [tobacco], Solanum tuberosum [potato], Solanum melongena [egg-plant] (Lycopersicon esculentum, Lycopersicon lycopersicum, Lycopersicon pyriforme, Solanum integrifolium or Solanum lycopersicum [tomato]; Sterculiaceae such as the genera Theobroma e.g. the species Theobroma cacao [cacao]; Theaceae such as the genera Camellia e.g. the species Camellia sinensis) [tea]

[48138] Particular preference is given to transgenic crop plants such as by way of example barley, wheat, rye, oats, corn, soybean, rice, cotton, sugar beet, oilseed rape and canola, sunflower, flax, hemp, thistle, potatoes, tobacco, tomatoes, tapioca, cassava, arrowroot, alfalfa, lettuce and the various tree, nut and vine species; especial preference is given to monocotyledonous crop plants like corn, wheat or rice; in another embodiment special preference is given to dicotyledonous crop plants like soy bean, oil seed rape (including canola and winter oil seed rape), cotton.

[48139] The term “transgenic plants” used in accordance with the invention also refers to the progeny of a transgenic plant, for example the T₁, T₂, T₃ and subsequent plant generations or the BC₁, BC₂, BC₃ and subsequent plant generations. Thus, the transgenic plants according to the invention can be raised and selfed or crossed with other individuals in order to obtain further transgenic plants according to the invention. Transgenic plants may also be obtained by propagating transgenic plant cells vegetatively. The present invention also relates to transgenic plant material, which can be derived from a transgenic plant population according to the invention. Such material includes plant cells and certain tissues, organs and parts of plants in all their manifestations, such as seeds, leaves, anthers, fibers, tubers, roots, root hairs, stems, embryo, calli, cotyledons, petioles, harvested material, plant tissue, reproductive tissue, pollen, and cell cultures, which are derived from the actual transgenic plant and/or can be used for bringing about the transgenic plant. Any transformed plant obtained according to the invention can be used in a conventional breeding scheme or in vitro plant propagation to produce more transformed plants with the same characteristics and/or can be used to introduce the same characteristic in other varieties of the same or related species. Such plants are also part of the invention. Seeds obtained from the transformed plants genetically also contain the same characteristic and are part of the invention. As mentioned before, the present invention is in principle applicable to any plant and crop that can be transformed with any of the transformation method known to those skilled in the art.

[48140] An “isolated” nucleic acid molecule is one that is substantially separated from other nucleic acid molecules, which are present in the natural source of the nucleic acid. That means other nucleic acid molecules are present in an amount less than 5% based on weight of the amount of the desired nucleic acid, preferably less than 2% by weight, more preferably less than 1% by weight, most preferably less than 0.5% by weight. Preferably, an “isolated” nucleic acid is free of some of the sequences that naturally flank the nucleic acid (i.e., sequences located at the 5′ and 3′ ends of the nucleic acid) in the genomic DNA of the non-human organism from which the nucleic acid is derived. For example, in various embodiments, the FCRP encoding nucleic acid molecule can contain less than about 5 kb, 4 kb, 3 kb, 2 kb, 1 kb, 0.5 kb or 0.1 kb of nucleotide sequences which naturally flank the nucleic acid molecule in genomic DNA of the cell from which the nucleic acid is derived. Moreover, an “isolated” nucleic acid molecule, such as a cDNA molecule, can be free from some of the other cellular material with which it is naturally associated, or culture medium when produced by recombinant techniques, or chemical precursors or other chemicals when chemically synthesized.

[48141] A nucleic acid molecule of the present invention, e.g., a nucleic acid molecule encoding a FCRP, especially the coding region thereof, or a portion thereof which confers the production or increased production of the fine chemical, can be isolated using standard molecular biological techniques and the sequence information provided herein. For example, an A. thaliana FCRP encoding cDNA can be isolated from a A. thaliana c-DNA library or a E. coli, Saccharomyces cerevisiae, Synechocystis sp., Brassica napus, Glycine max, Zea mays or Oryza sativa FCRP encoding cDNA can be isolated from a E. coli, Saccharomyces cerevisiae, Synechocystis sp., Brassica napus, Glycine max, Zea mays or Oryza sativa c-DNA library respectively using all or portion of one of the respective sequences. Moreover, a nucleic acid molecule encompassing all or a portion of one of the sequences of Table I can be isolated by the polymerase chain reaction using oligonucleotide primers designed based upon this sequence. For example, mRNA can be isolated from plant cells (e.g., by the guanidiniumthiocyanate extraction procedure of Chirgwin et al., Biochemistry 18, 5294 (1979)) and cDNA can be prepared using reverse transcriptase (e.g., Moloney MLV reverse transcriptase, available from Gibco/BRL, Bethesda, Md.; or AMV reverse transcriptase, available from Seikagaku America, Inc., St. Petersburg, Fla.). Synthetic oligonucleotide primers for polymerase chain reaction amplification can be designed based upon one of the nucleotide sequences shown in Table I. A nucleic acid molecule of the invention can be amplified using cDNA or, alternatively, genomic DNA, as a template and appropriate oligonucleotide primers according to standard PCR amplification techniques. The nucleic acid molecule so amplified can be cloned into an appropriate vector and characterized by DNA sequence analysis. Furthermore, oligonucleotides corresponding to a FCRP encoding nucleotide sequence can be prepared by standard synthetic techniques, e.g., using an automated DNA synthesizer.

[48142] In an embodiment, an isolated nucleic acid molecule of the invention comprises one of the nucleic acid molecules as shown in Table I, especially the coding region thereof, and if desired, as well as a 5′ untranslated sequence and 3′ untranslated sequence.

[48143] Moreover, the nucleic acid molecule of the invention can comprise only a portion of the coding region of one of the nucleic acid molecule of Table I, for example, a fragment which can be used as a probe or primer or a fragment encoding a biologically active portion of a FCRP.

[48144] Portions of proteins encoded by the FCRP encoding nucleic acid molecules of the invention are preferably biologically active portions described herein. As used herein, the term “biologically active portion of” a FCRP is intended to include a portion, e.g. a domain/motif, of the protein being responsible for the ability of the protein to enable the production or increased production of the fine chemical. To determine whether a FCRP, or a biologically active portion thereof, results in a production or an increased production of the fine chemical in the non-human organism, like a microorganism or a plant, an analysis of the non-human organism comprising the FCRP may be performed. Such analysis methods are well known to those skilled in the art, as detailed in the Examples. More specifically, nucleic acid fragments encoding biologically active portions of a FCRP can be prepared by isolating a portion of one of the sequences of the nucleic acid of Table I, e.g. expressing the encoded portion of the FCRP or peptide (e.g. by recombinant expression in vitro) and assessing the activity of the encoded portion of the FCRP or peptide.

[48145] Biologically active portions of a FCRP are encompassed by the present invention and include peptides comprising amino acid sequences derived from the amino acid sequence of a FCRP encoding gene, or the amino acid sequence of a protein homologous to a FCRP, which include fewer amino acids than a full length FCRP or the full length protein which is homologous to a FCRP, and exhibits at least some enzymatic or biological activity of a FCRP. Typically, biologically active portions (e.g., peptides which are, for example, 5, 10, 15, 20, 30, 35, 36, 37, 38, 39, 40, 50, 75, 100, 125, 150 or more amino acids in length) comprise a domain or motif with at least one activity of a FCRP. Moreover, other biologically active portions in which other regions of the protein are deleted, can be prepared by recombinant techniques and evaluated for one or more of the activities described herein. Preferably, the biologically active portions of a FCRP include one or more selected domains/motifs or portions thereof having biological activity.

[48146] The term “biological active portion” or “biological activity” means a polypeptide as depicted in the respective line in Table II, application no. 7, column 3 or a portion of said polypeptide which still has at least 10% or 20%, preferably 30%, 40%, 50% or 60%, especially preferably 70%, 75%, 80%, 90% or 95% of the enzymatic or biological activity of the natural or starting enzyme or protein.

[48147] In the process according to the invention nucleic acid sequences or molecules can be used, which, if appropriate, contain synthetic, non-natural or modified nucleotide bases, which can be incorporated into DNA or RNA. Said synthetic, non-natural or modified bases can for example increase the stability of the nucleic acid molecule outside or inside a cell. The nucleic acid molecules of the invention can contain the same modifications as aforementioned.

[48148] As used in the present context the term “nucleic acid molecule” may also encompass the untranslated sequence or molecule located at the 3′ and at the 5′ end of the coding gene region, for example at least 500, preferably 200, especially preferably 100, nucleotides of the sequence upstream of the 5′ end of the coding region and at least 100, preferably 50, especially preferably 20, nucleotides of the sequence downstream of the 3′ end of the coding gene region. It is often advantageous only to choose the coding region for cloning and expression purposes.

[48149] Preferably, the nucleic acid molecule used in the process according to the invention or the nucleic acid molecule of the invention is an isolated nucleic acid molecule. In one embodiment, the nucleic acid molecule of the invention is the nucleic acid molecule used in the process of the invention.

[48150] The nucleic acid molecules used in the process, for example the polynucleotide of the invention or of a part thereof can be isolated using molecular-biological standard techniques and the sequence information provided herein. Also, for example a homologous sequence or homologous, conserved sequence regions at the DNA or amino acid level can be identified with the aid of comparison algorithms. The former can be used as hybridization probes under standard hybridization techniques (for example those described in Sambrook et al., “Molecular Cloning: A Laboratory Manual” 2nd ed., Cold Spring Harbor Laboratory, Cold Spring Harbor Laboratory Press, Cold Spring Harbor, N.Y., 1989) for isolating further nucleic acid sequences useful in this process.

[48151] Synthetic oligonucleotide primers for the amplification, e.g. as shown in the respective line in Table III, application no. 7, column 8, by means of polymerase chain reaction can be generated on the basis of a sequence shown herein, for example the sequence shown in the respective line in Table I, application no. 7, columns 5 or 8, or the sequences derived from Table II, application no. 7, columns 5 or 8, respectively.

[48152] Moreover, it is possible to identify a conserved region of a protein from various organism by carrying out protein sequence alignments with the polypeptide encoded by the nucleic acid molecules of the present invention, in particular with the sequences encoded by the nucleic acid molecule shown in the respective line in column 5 or 8 of Table I, application no. 7, from which conserved regions, and in turn, degenerate primers can be derived. Conserved regions are those, which show a very little variation in the amino acid in one particular position of several homologs from different origin. The consensus sequence and polypeptide motifs shown in the respective line in column 8 of Table IV, application no. 7, are derived from such alignments of homologous proteins.

[48153] In an embodiment of the present invention, in the method of the present invention the activity of a polypeptide comprising or consisting of a consensus sequence or at least one polypeptide motif shown in the respective line in Table IV, application no. 7, column 8, is increased.

[48154] In another embodiment thereof, the method of the present invention relates to a polypeptide comprising or consisting of a consensus sequence shown in the respective line in Table IV, application no. 7, column 8 or comprising at least one polypeptide motif shown in the respective line in Table IV, application no. 7, column 8, whereby not more than 20, 15, 10, 9, 8, 7, 6, 5 4, 3, 2 or 1, or 0 of the amino acid positions indicated can be replaced by any amino acid.

[48155] In another embodiment thereof, the method of the present invention relates to a polypeptide comprising or consisting of a consensus sequence shown in the respective line in Table IV, application no. 7, column 8 or comprising at least one polypeptide motif shown in the respective line in Table IV, application no. 7, column 8, whereby not more than 15%, 10%, 5%, 4%, 3%, 2% or 1%, or 0% of the amino acid positions defined as distinct specific amino acids are/is replaced by another amino acid.

[48156] In another embodiment thereof, the method of the present invention relates to a polypeptide comprising or consisting of a consensus sequence shown in the respective line in Table IV, application no. 7, column 8 or comprising at least one polypeptide motif shown in the respective line in Table IV, application no. 7, column 8, whereby not more than 20, 15, 10, 9, 8, 7, 6, 5, 4, 3, 2 or 1, or 0 amino acids are inserted into a consensus sequence or polypeptide motif.

[48157] In an embodiment of the present invention, in the method of the present invention the activity of a polypeptide comprising or consisting of a consensus sequence or at least one polypeptide motif shown in the respective line in Table IV, application no. 7, column 8, is increased, whereby said polypeptide distinguishes over the sequence depicted in Table II, application no. 7, columns 5 or 8 by one or more amino acids.

[48158] In one embodiment, said polypeptide of the invention distinguishes over the sequence shown in the respective line in Table II, application no. 7, columns 5 and 8 by more than 5, 6, 7, 8 or 9 amino acids, preferably by more than 10, 15, 20, 25 or 30 amino acids, even more preferred are more than 40, 50, or 60 amino acids and, preferably, the sequence of the polypeptide of the invention distinguishes from the sequence shown in the respective line in Table II B, application no. 7, columns 5 and 8 by not more than 80%, 70%, 60%, 50%, 40%, 30%, 20%, 10%, 5%, 4%, 3%, 2%, 1% or 0.5%. In another embodiment, said polypeptide of the invention does not consist of the sequence shown in Table II, application no. 7, columns 5 or 8.

[48159] The consensus sequence was derived from a multiple alignment of the sequences as listed in Table II. The amino acids are given in their three letter code. In case a specific amino acid is indicated this specific amino acid is conserved in at least 80% of the aligned proteins whereas the three letter code XAA stands for amino acids, which are not conserved in at least 80% of the aligned sequences. The consensus sequence starts with the first conserved amino acid in the alignment, and ends with the last conserved amino acid in the alignment of the investigated sequences.

[48160] Patterns had to match at least 80% of the investigated proteins. Conserved patterns were identified with the software tool MEME version 3.5.1 or manually by using first standard prosite annotation. The number of given x indicates the distances between conserved amino acid residues (given in the one letter code), e.g. (1) the pattern Y-x(21,23)-F means that conserved tyrosine and phenylalanine residues in the alignment are separated from each other by minimum 21 and maximum 23 amino acid residues in the alignment of all investigated sequences, (2) the pattern Y-x(21,23)-[FW] means that a conserved tyrosine is separated by minimum 21 and maximum 23 amino acid residues from either a phenylalanine or tryptophane. However, these patterns have been “translated” into the WIPO standard 25. MEME was developed by Bailey Timothy L. and Elkan Charles, Dept. of Computer Science and Engineering, University of California, San Diego, USA and is described by Bailey Timothy L. and Elkan Charles (Proceedings of the Second International Conference on Intelligent Systems for Molecular Biology, pp. 28-36, AAAI Press, Menlo Park, Calif., 1994). The source code for the stand-alone program is public available from the San Diego Supercomputer centre (http://meme.sdsc.edu). For identifying common motifs in all sequences with the software tool MEME, the following settings were used:—maxsize 500000,—nmotifs 15,—evt 0.001,—maxw 60,—distance 1e−3,—minsites number of sequences used for the analysis. Input sequences for MEME were non-aligned sequences in Fasta format. Other parameters were used in the default settings in this software version. Prosite patterns for conserved domains were generated with the software tool Pratt version 2.1 or manually. Pratt was developed by Jonassen Inge, Dept. of Informatics, University of Bergen, Norway and is described by Jonassen et al. (Jonassen I., Collins J. F. and Higgins D. G., Protein Science 4, 1587 (1995); Jonassen I., Efficient discovery of conserved patterns using a pattern graph, Submitted to CABIOS Febr. 1997). The source code (ANSI C) for the stand-alone program is public available, e.g. at established Bioinformatic centers like EBI (European Bioinformatics Institute). For generating patterns with the software tool Pratt, following settings were used: PL (max Pattern Length): 100, PN (max Nr of Pattern Symbols): 100, PX (max Nr of consecutive x's): 30, FN (max Nr of flexible spacers): 5, FL (max Flexibility): 30, FP (max Flex.Product): 10, ON (max number patterns): 50. Input sequences for Pratt were distinct regions of the protein sequences exhibiting high similarity as identified from software tool MEME. The minimum number of sequences, which have to match the generated patterns (CM, min Nr of Seqs to Match) was set to at least 80% of the provided sequences. Parameters not mentioned here were used in their default settings. The Prosite patterns of the conserved domains can be used to search for protein sequences matching this pattern. Various established Bioinformatic centres provide public internet portals for using those patterns in database searches (e.g. PIR (Protein Information Resource, located at Georgetown University Medical Center) or ExPASy (Expert Protein Analysis System)). Alternatively, stand-alone software is available, like the program Fuzzpro, which is part of the EMBOSS software package.

[48161] For example, the program Fuzzpro not only allows searching for an exact pattern-protein match but also allows setting various ambiguities in the performed search.

[48162] The alignment was performed with the software ClustalW (version 1.83) and is described by Thompson et al. (Nucleic Acids Research 22, 4673 (1994)). The source code for the stand-alone program is public available from the European Molecular Biology Laboratory; Heidelberg, Germany. The analysis was performed using the default parameters of ClustalW v1.83 (gap open penalty: 10.0; gap extension penalty: 0.2; protein matrix: Gonnet; protein/DNA endgap: −1; protein/DNA gapdist: 4).

[48163] Degenerated primers can then be utilized by PCR for the amplification of fragments of novel proteins having above-mentioned activity, e.g. conferring the production or the increased production of the fine chemical as compared to a corresponding, non-transformed, wild type cell, or non-human organism, like a plant cell or a plant or a part thereof, after generating or increasing the expression or activity or having the activity of a protein as shown in the respective line in Table II, column 3 or further functional homologs of the polypeptide of the invention from other non-human organisms.

[48164] These fragments can then be utilized as hybridization probe for isolating the complete gene sequence. As an alternative, the missing 5′ and 3′ sequences can be isolated by means of RACE-PCR. A nucleic acid molecule according to the invention can be amplified using cDNA or, as an alternative, genomic DNA as template and suitable oligonucleotide primers, following standard PCR amplification techniques. The nucleic acid molecule amplified thus can be cloned into a suitable vector and characterized by means of DNA sequence analysis. Oligonucleotides, which correspond to one of the nucleic acid molecules used in the process, can be generated by standard synthesis methods, for example using an automatic DNA synthesizer.

[48165] Nucleic acid molecules which are advantageously for the process according to the invention can be isolated based on their homology to the nucleic acid molecules disclosed herein using the sequences or part thereof as or for the generation of a hybridization probe and following standard hybridization techniques under stringent hybridization conditions. In this context, it is possible to use, for example, isolated one or more nucleic acid molecules of at least 15, 20, 25, 30, 35, 40, 50, 60 or more nucleotides, preferably of at least 15, 20 or 25 nucleotides in length which hybridize under stringent conditions with the above-described nucleic acid molecules, in particular with those which encompass a nucleotide sequence of the nucleic acid molecule used in the process of the invention or encoding a protein used in the invention or of the nucleic acid molecule of the invention. Nucleic acid molecules with 30, 50, 100, 250 or more nucleotides may also be used.

[48166] The term “homology” means that the respective nucleic acid molecules or the encoded proteins are functionally and/or structurally equivalent. The nucleic acid molecules that are homologous to the nucleic acid molecules described above and that are derivatives of said nucleic acid molecules are, for example, variations of said nucleic acid molecules which represent modifications having the same biological function, in particular encoding proteins with the same or substantially the same biological function. They may be naturally occurring variations, such as sequences from other plant varieties or species, or mutations. These mutations may occur naturally or may be obtained by mutagenesis techniques. The allelic variations may be naturally occurring allelic variants as well as synthetically produced or genetically engineered variants. Structurally equivalents can, for example, be identified by testing the binding of said polypeptide to antibodies or computer based predictions. Structurally equivalents have the similar immunological characteristic, e.g. comprise similar epitopes.

[48167] By “hybridizing” it is meant that such nucleic acid molecules hybridize under conventional hybridization conditions, preferably under stringent conditions such as described by, e.g., Sambrook (“Molecular Cloning; A Laboratory Manual”, 2nd edition, Cold Spring Harbor Laboratory Press, Cold Spring Harbor, NY (1989)) or in “Current Protocols in Molecular Biology”, John Wiley & Sons, N.Y. (1989), chapter 6.3.1-6.3.6.)

[48168] According to the invention, DNA as well as RNA molecules of the corresponding nucleic acid molecules of the invention can be used as probes. Further, as template for the identification of functional homologues Northern blot assays as well as Southern blot assays can be performed. The Northern blot assay advantageously provides further information about the expressed gene product: e.g. expression pattern, occurrence of processing steps, like splicing and capping, etc. The Southern blot assay provides additional information about the chromosomal localization and organization of the gene being related to the nucleic acid molecule of the invention.

[48169] A preferred, non-limiting example of stringent hybridization conditions are hybridizations in 6× sodium chloride/sodium citrate (=SSC) at approximately 45° C., followed by one or more wash steps in 0.2×SSC, 0.1% SDS at 50 to 65° C., for example at 50° C., 55° C. or 60° C. The skilled worker knows that these hybridization conditions differ as a function of the type of the nucleic acid and, for example when organic solvents are present, with regard to the temperature and concentration of the buffer. The temperature under “standard hybridization conditions” differs for example as a function of the type of the nucleic acid between 42° C. and 65° C., preferably between 45° C. and 50° C. in an aqueous buffer with a concentration of 0.1×, 0.5×, 1×, 2×, 3×, 4×or 5×SSC (pH 7.2). If organic solvent(s) is/are present in the above-mentioned buffer, for example 50% formamide, the temperature under standard conditions is approximately 40° C., 42° C. or 45° C. The hybridization conditions for DNA:DNA hybrids are preferably for example 0.1×SSC and 20° C., 25° C., 30° C., 35° C., 40° C. or 45° C., preferably between 30° C. and 45° C. The hybridization conditions for DNA:RNA hybrids are preferably for example 0.1×SSC and 30° C., 35° C., 40° C., 45° C., 50° C. or 55° C., preferably between 45° C. and 55° C. The above-mentioned hybridization temperatures are determined for example for a nucleic acid approximately 100 by (=base pairs) in length and a G+C content of 50% in the absence of formamide. The skilled worker knows to determine the hybridization conditions required with the aid of textbooks, for example the ones mentioned above, or from the following textbooks: Sambrook et al., “Molecular Cloning”, Cold Spring Harbor Laboratory, 1989; Hames and Higgins (ed.), “Nucleic Acids Hybridization: A Practical Approach”, IRL Press at Oxford University Press, Oxford, 1985; Brown (ed.), “Essential Molecular Biology: A Practical Approach”, IRL Press at Oxford University Press, Oxford, 1991.

[48170] A further example of one such stringent hybridization condition is hybridization at 4×SSC at 65° C., followed by a washing in 0.1×SSC at 65° C. for one hour. Alternatively, an exemplary stringent hybridization condition is in 50% formamide, 4×SSC at 42° C. Further, the conditions during the wash step can be selected from the range of conditions delimited by low-stringency conditions (approximately 2×SSC at 50° C.) and high-stringency conditions (approximately 0.2×SSC at 50° C., preferably at 65° C.) (20×SSC : 0.3 M sodium citrate, 3 M NaCl, pH 7.0). In addition, the temperature during the wash step can be raised from low-stringency conditions at room temperature, approximately 22° C., to higher-stringency conditions at approximately 65° C. Both of the parameters salt concentration and temperature can be varied simultaneously, or else one of the two parameters can be kept constant while only the other is varied. Denaturants, for example formamide or SDS, may also be employed during the hybridization. In the presence of 50% formamide, hybridization is preferably effected at 42° C. Relevant factors like 1) length of treatment, 2) salt conditions, 3) detergent conditions, 4) competitor DNAs, 5) temperature and 6) probe selection can be combined case by case so that not all possibilities can be mentioned herein.

[48171] Thus, in a preferred embodiment, Northern blots are prehybridized with RothiHybri-Quick buffer (Roth, Karlsruhe) at 68° C. for 2 h. Hybridization with radioactive labeled probe is done overnight at 68° C. Subsequent washing steps are performed at 68° C. with 1×SSC. For Southern blot assays the membrane is prehybridized with Rothi-Hybri-Quick buffer (Roth, Karlsruhe) at 68° C. for 2 h. The hybridization with radioactive labeled probe is conducted over night at 68° C. Subsequently the hybridization buffer is discarded and the filter shortly washed using 2×SSC; 0.1% SDS. After discarding the washing buffer new 2×SSC; 0.1% SDS buffer is added and incubated at 68° C. for 15 minutes. This washing step is performed twice followed by an additional washing step using 1×SSC; 0.1% SDS at 68° C. for 10 min.

[48172] Some examples of conditions for DNA hybridization (Southern blot assays) and wash step are shown herein below:

(1) Hybridization conditions can be selected, for example, from the following conditions:
[48173] (a) 4×SSC at 65° C.,
[48174] (b) 6×SSC at 45° C.,
[48175] (c) 6×SSC, 100 mg/ml denatured fragmented fish sperm DNA at 68° C.,
[48176] (d) 6×SSC, 0.5% SDS, 100 mg/ml denatured salmon sperm DNA at 68° C.,
[48177] (e) 6×SSC, 0.5% SDS, 100 mg/ml denatured fragmented salmon sperm DNA, 50% formamide at 42° C.,
[48178] (f) 50% formamide, 4×SSC at 42° C.,
[48179] (g) 50% (v/v) formamide, 0.1% bovine serum albumin, 0.1% Ficoll, 0.1% polyvinylpyrrolidone, 50 mM sodium phosphate buffer pH 6.5, 750 mM NaCl, 75 mM sodium citrate at 42° C.,
[48180] (h) 2× or 4×SSC at 50° C. (low-stringency condition), or
[48181] (i) 30 to 40% formamide, 2 x or 4×SSC at 42° C. (low-stringency condition).
   (2) Wash steps can be selected, for example, from the following conditions:
[48182] (a) 0.015 M NaCl/0.0015 M sodium citrate/0.1% SDS at 50° C.,
[48183] (b) 0.1×SSC at 65° C.,
[48184] (c) 0.1×SSC, 0.5% SDS at 68° C.,
[48185] (d) 0.1×SSC, 0.5% SDS, 50% formamide at 42° C.,
[48186] (e) 0.2×SSC, 0.1% SDS at 42° C.,
[48187] (f) 2×SSC at 65° C. (low-stringency condition),

[48188] Polypeptides having above-mentioned activity, i.e. conferring the production or the increased production of the fine chemical alpha-tocopherol, or gamma-tocopherol as compared to a corresponding, e.g. non-transformed, wild type non-human organism, like a microorganism or a plant cell, plant or part thereof, can be encoded by other DNA sequences which hybridize to the sequences shown in the respective line in Table I, application no. 7, columns 5 and 8, preferably the coding region thereof, at least under relaxed hybridization conditions and which encode the expression of polypeptides conferring the production or the increased production of the respective fine chemical alpha-tocopherol, or gamma-tocopherol as compared to a corresponding, e.g. non-transformed, wild type non-human organism, like a microorganism or a plant cell, plant or part thereof.

[48189] Further, some applications have to be performed at low stringency hybridization conditions, without any consequences for the specificity of the hybridization. For example, a Southern blot analysis of total DNA could be probed with a nucleic acid molecule of the present invention and washed at low stringency (55° C. in 2×SSPE, 0,1% SDS). The hybridization analysis could reveal a simple pattern of only genes encoding polypeptides of the present invention or used in the process of the invention, e.g. having the herein-mentioned activity of conferring the production or the increased production of the fine chemical as compared to a corresponding, e.g. non-transformed, wild type non-human organism, like a microorganism or a plant cell, plant or part thereof. A further example of such low-stringent hybridization conditions is 4×SSC at 50° C. or hybridization with 30 to 40% formamide at 42° C. Such molecules comprise those which are fragments, analogues or derivatives of the polypeptide of the invention or used in the process of the invention and differ, for example, by way of amino acid and/or nucleotide deletion(s), insertion(s), substitution (s), addition(s) and/or recombination (s) or any other modification(s) known in the art either alone or in combination from the above-described amino acid sequences or their underlying nucleotide sequence(s). However, it is preferred to use high stringency hybridization conditions.

[48190] Hybridization should advantageously be carried out with fragments of at least 5, 10, 15, 20, 25, 30, 35 or 40 bp, advantageously at least 50, 60, 70 or 80 bp, preferably at least 90, 100 or 110 bp. Most preferably are fragments of at least 15, 20, 25 or 30 bp. Preferably are also hybridizations with at least 100 by or 200 bp, very especially preferably at least 400 by in length. In an especially preferred embodiment, the hybridization should be carried out with the entire nucleic acid sequence with conditions described above.

[48191] The terms “fragment”, “fragment of a sequence” or “part of a sequence” mean a truncated sequence of the original sequence referred to. The truncated sequence (nucleic acid or protein sequence) can vary widely in length; the minimum size being a sequence of sufficient size to provide a sequence with at least a comparable function and/or activity of the original sequence or molecule referred to, or hybridizing with the nucleic acid molecule of the invention or used in the process of the invention under stringent conditions, while the maximum size is not critical. In some applications, the maximum size usually is not substantially greater than that required to provide the desired activity and/or function(s) of the original sequence.

[48192] Typically, the truncated amino acid sequence or molecule will range from about 5 to about 310 amino acids in length. More typically, however, the sequence will be a maximum of about 250 amino acids in length, preferably a maximum of about 200 or 100 amino acids. It is usually desirable to select sequences of at least about 10, 12 or 15 amino acids, up to a maximum of about 20 or 25 amino acids.

[48193] The term “epitope” relates to specific immunoreactive sites within an antigen, also known as antigenic determinates. These epitopes can be a linear array of monomers in a polymeric composition—such as amino acids in a protein—or consist of or comprise a more complex secondary or tertiary structure. Those of skill will recognize that immunogens (i.e. substances capable of eliciting an immune response) are antigens; however, some antigen, such as haptens, are not immunogens but may be made immunogenic by coupling to a carrier molecule. The term “antigen” includes references to a substance to which an antibody can be generated and/or to which the antibody is specifically immunoreactive.

[48194] In an embodiment the present invention relates to an epitope of the polypeptide of the present invention or used in the process of the present invention and conferring the production or the increased production of the fine chemical as compared to a corresponding, e.g. non-transformed, wild type non-human organism, like a microorganism or a plant cell, plant or part thereof.

[48195] The term “one or several amino acids” relates to at least one amino acid but not more than that number of amino acids, which would result in a homology of below 50% identity. Preferably, the identity is more than 70%, 80%, 85%, 90%, 91%, 92%, 93%, 94%, 95%, 96%, 97%, 98%, 99% or 99.5% identity.

[48196] Further, the nucleic acid molecule of the invention comprises a nucleic acid molecule, which is a complement of one of the nucleotide sequences of above-mentioned nucleic acid molecules or a portion thereof. A nucleic acid molecule or its sequence which is complementary to one of the nucleotide molecules or sequences shown in the respective line in Table I, application no. 7, columns 5 or 8, preferably the coding region thereof, homologs or fragments thereof, is one which is sufficiently complementary to one of the nucleotide molecules or sequences shown in the respective line in Table I, application no. 7, columns 5 or 8, preferably the coding region thereof, homologs or fragments thereof, such that it can hybridize to one of the nucleotide sequences shown in Table I, application no. 7, columns 5 or 8, preferably the coding region thereof, homologs or fragments thereof, thereby forming a stable duplex. Preferably, the hybridization is performed under stringent hybridization conditions. However, a complement of one of the herein disclosed sequences is preferably a sequence complement thereto according to the base pairing of nucleic acid molecules well known to the skilled person. For example, the bases A and G undergo base pairing with the bases T and U or C, resp. and visa versa. Modifications of the bases can influence the base-pairing partner.

[48197] The nucleic acid molecule of the invention comprises a nucleotide sequence which is at least about 30%, 35%, 40%, 45%, 50%, 55%, 60%, 65%, 70%, 75%, 80%, 90%, 95%, 96%, 97%, 98%, 99%, 99.5% or more homologous to a nucleotide sequence shown in Table I, application no. 7, columns 5 or 8, preferably the coding region thereof, homologs or fragments thereof, and preferably has above-mentioned activity, in particular conferring the production or the increased production of the fine chemical alpha-tocopherol, or gamma-tocopherol, respectively, after increasing the activity or an activity of a gene as shown in the respective line in Table I or of a gene product, e.g. as shown in the respective line in Table II, application no. 7, column 5 or 8, by for example in one embodiment expression either in the cytosol or in an organelle such as a plastid or mitochondria or both, preferably in a plastid, or in another embodiment non-targeted or targeted.

[48198] The nucleic acid molecule of the invention comprises a nucleotide sequence or molecule which hybridizes, preferably hybridizes under stringent conditions as defined herein, to one of the nucleic acid molecule shown in the respective line in Table I, preferably Table IB, application no. 7, columns 5 or 8, preferably the coding region thereof, fragments or homologs thereof, and encodes a protein having above-mentioned activity, e.g. conferring the production or the increased production of the respective fine chemical alpha-tocopherol, or gamma-tocopherol as compared to a corresponding, e.g. non-transformed, wild type non-human organism, like a microorganism or a plant cell, plant or part thereof, by for example in one embodiment expression either in the cytosol or in an organelle such as a plastid or mitochondria or both, preferably in a plastid, or in another embodiment non-targeted or targeted, and optionally, the activity thereof is selected from the group consisting of 3-deoxy-7-phosphoheptulonate synthase, 3-deoxy-D-arabinoheptulosonate-7-phosphatesynthase, ABC transporter permease subunit, acetyltransferase, acid shock protein, adenylate kinase, adenylosuccinate lyase, amino-acid acetyltransferase, ankyrin repeat family protein, At1g29350-protein, ATP-binding component of a transport system, b1163-protein, b1219-protein, b1234-protein, b1522-protein, b1921-protein, b2360-protein, b2548-protein, b2613-protein, b2673-protein, b2812-protein, b3890-protein, b3989-protein, b4029-protein, b4050-protein, b4056-protein, calcium-dependent protein kinase, carbohydrate kinase, colanic acid biosynthesis protein, coproporphyrinogen oxidase, cyclin D , DNA polymerase subunit, electron transfer flavoprotein subunit beta, geranylgeranyl pyrophosphate synthase, geranyltranstransferase, gluconate transport system permease 3, glucose dehydrogenase, glucose-6-phosphate 1-dehydrogenase, glutaredoxin, glycerol dehydrogenase, glycerol-3-phosphate dehydrogenase, glycolate utilization protein, harpin-induced family protein, homocitrate synthase, hydrolase, isopropylmalate isomerase large subunit, lipopolysaccharide biosynthesis protein, MADS box protein transcription factor, major facilitator superfamily transporter protein, malate dehydrogenase, monothiol glutaredoxin, monthiol glutaredoxin, multiple antibiotic resistance protein, murein transglycosylase, N-(5′-phosphoribosyl) anthranilate isomerase, NAD-dependent epimerase/dehydratase, NADP-dependent malic enzyme, O-antigen chain length determinant, phosphatidylserine decarboxylase, phospho-2-dehydro-3-deoxyheptonate aldolase, phosphoadenosine phosphosulfate reductase, phosphofructokinase, photosystem II protein, polygalacturonase, polyphosphate kinase, precorrin methylase, protein kinase, protein phosphatase, putative transport system permease protein, pyruvate kinase, RNA-binding protein, Sec-independent protein translocase subunit, serine protease, sll1761-protein, slr1917-protein, small nuclear ribonucleo-protein , ThiF family protein, thioredoxin, thioredoxin family protein, threonine synthase, transcription factor, transcriptional regulator, transport protein, trehalose-phosphatase, TTC1386-protein, ycl049c-protein, ydl235c-protein, ydr183w-protein, yer106w-protein, ylr178c-protein, ypr170c-protein, and zinc finger protein, respectively.

[48199] Moreover, the nucleic acid molecule of the invention can comprise only a portion of the coding region of one of the nucleic acid molecules depicted in Table I, application no. 7, columns 5 or 8, for example a fragment which can be used as a probe or primer or a fragment encoding a biologically active portion of the polypeptide of the present invention or of a polypeptide used in the process of the present invention, i.e. having above-mentioned activity, e.g. conferring the production or the increased production of the respective fine chemical alpha-tocopherol, or gamma-tocopherol as compared to a corresponding, e.g. non-transformed, wild type non-human organism, like a microorganism or a plant cell, plant or part thereof, by for example in one embodiment expression either in the cytosol or in an organelle such as a plastid or mitochondria or both, preferably in a plastid, or in another embodiment non-targeted or targeted. The nucleotide sequences determined from the cloning of the present protein-according-to-the-invention-encoding gene allows for the generation of probes and primers designed for use in identifying and/or cloning its homologues from other cell types and organisms. The probe/primer typically comprises a substantially purified oligonucleotide. The oligonucleotide typically comprises a region of nucleotide sequence that hybridizes under stringent conditions to at least about 12, 15 preferably about 20 or 25, more preferably about 40, 50 or 75 consecutive nucleotides of a sense strand of one of the sequences set forth, e.g., in the respective line in Table I, application no. 7, column 5 or 8, preferably the coding region thereof, or a homolog or a fragment thereof, an anti-sense sequence of one of the sequences, e.g., set forth in the respective line in Table I, application no. 7, columns 5 or 8, preferably the coding region thereof, or a homolog or a fragment thereof or naturally occurring mutants thereof. Primers based on a nucleic acid molecule of invention can be used in PCR reactions to clone homologs of the polypeptide of the invention or of the polypeptide used in the process of the invention, e.g. as the primers described in the examples of the present invention, e.g. as shown in the examples. A PCR with the primers shown in the respective line in Table III, column 8 will result in a fragment of the gene product as shown in Table II, application no. 7, column 5.

[48200] Primer sets are interchangeable. The person skilled in the art knows how to design and combine said primers to result in the desired product, e.g. in a full length clone or a partial sequence. Probes based on the sequences of the nucleic acid molecule of the invention or used in the process of the present invention can be used to detect transcripts or genomic sequences encoding the same or homologous proteins. The probe can further comprise a label group attached thereto, e.g. the label group can be a radioisotope, a fluorescent compound, an enzyme, or an enzyme co-factor. Such probes can be used as a part of a genomic marker test kit for identifying cells which express a polypeptide of the invention or used in the process of the present invention, such as by measuring a level of an encoding nucleic acid molecule in a sample of cells, e.g. detecting mRNA levels or determining, whether a genomic gene comprising the sequence of the polynucleotide of the invention or used in the processes of the present invention has been mutated or deleted.

[48201] As the expression of a respective nucleic acids of the invention is related to the synthesis of the respective fine chemical alpha-tocopherol, or gamma-tocopherol its function as a probe extends to the detection of microorganisms, plant tissues, plants, plant variets, plant ecotypes or plant genera with varying capability or potential for synthesis of the respective fine chemical alpha-tocopherol, or gamma-tocopherol. Therefore in one embodiment the present invention relates to a method for analyzing the capability or potential of a plant tissue, a plant, a plant variety or plant ecotype to produce the fine chemical alpha-tocopherol, or gamma-tocopherol by using the nucleic acid of the invention or parts thereof as a probe to detect the amount of the nucleic acid of the invention in the non-human organism or a part thereof in comparison to another non-human organism.

[48202] The nucleic acid molecule of the invention encodes a polypeptide or portion thereof which includes an amino acid sequence which is sufficiently homologous to the amino acid sequence shown in respective line in Table II, application no. 7, columns 5 or 8 such that the protein or portion thereof maintains the ability to confer the production or the increased production of the respective fine chemical alpha-tocopherol, or gamma-tocopherol as compared to a corresponding, e.g. non-transformed, wild type non-human organism, like a microorganism or a plant cell, plant or part thereof, in particular increasing the activity as mentioned above or as described in the examples in microorganisms or plants.

[48203] As used herein, the language “sufficiently homologous” refers to proteins or portions thereof which have amino acid sequences which include a minimum number of identical or equivalent amino acids (e.g. an amino acid which has a similar side chain as an amino acid in one of the sequences of the polypeptide of the present invention) to an amino acid sequence shown in the respective line in Table II, application no. 7, columns 5 or 8 such that the protein or portion thereof is able to confer the production or the increased production of the respective fine chemical alpha-tocopherol, or gamma-tocopherol as compared to a corresponding, e.g. non-transformed, wild type non-human organism, like a microorganism or a plant cell, plant or part thereof. For example having the activity of a protein as shown in the respective line in Table II, application no. 7, column 3 and as described herein.

[48204] In an embodiment of the present invention, the nucleic acid molecule of the present invention comprises a nucleic acid molecule that encodes a portion of the protein of the present invention. The protein is at least about 30%, 35%, 40%, 45% 50%, 55%, 60%, 65%, 70%, 75%, 80%, 85%, 90%, 91%, 92%, 93%, 94%, 95%, 96%, 97%, 98%, 99%, 99.5% or more homologous to an entire amino acid sequence shown in the respective line of Table II, application no. 7, column 5 or 8 and has the above-mentioned activity, e.g. conferring the production or the increased production of the respective fine chemical alpha-tocopherol, or gamma-tocopherol as compared to a corresponding, e.g. non-transformed, wild type non-human organism, like a microorganism or a plant cell, plant or part thereof by, for example in a embodiment expression either in the cytosol or in an organelle such as a plastid or mitochondria or both, preferably in a plastid, or in another embodiment by targeted or non-targeted expression.

[48205] Portions of proteins encoded by the nucleic acid molecule of the invention show preferably the above-mentioned activity, e.g. conferring the production or the increased production of the fine chemical as compared to a corresponding, e.g. non-transformed, wild type non-human organism, like a microorganism or a plant cell, plant or part thereof.

[48206] As mentioned herein, the term “biologically active portion” is intended to include a portion, e.g., a domain/motif, that confers the production or the increased production of the fine chemical as compared to a corresponding, e.g. non-transformed, wild type non-human organism, like a microorganism or a plant cell, plant or part thereof or has an immunological activity such that it binds to an antibody binding specifically to the polypeptide of the present invention or a polypeptide used in the process of the present invention for conferring the production or the increased production of the fine chemical as compared to a corresponding, e.g. non-transformed, wild type non-human organism, like a microorganism or a plant cell, plant or part thereof.

[48207] The invention further relates to nucleic acid molecules or methods using said nucleic acid molecules that differ from one of the nucleotide sequences shown in the respective line in Table I, application no. 7, columns 5 or 8, preferably the coding region thereof, or fragments or homologs thereof, due to degeneracy of the genetic code but encode a polypeptide of the present invention, in particular a polypeptide having the above-mentioned activity, e.g. as those polypeptides depicted in the respective line in Table II, application no. 7, columns 5 or 8, fragments or homologs thereof. Advantageously, the nucleic acid molecule of the invention comprises, or in an other embodiment has, a nucleotide sequence encoding a protein comprising, or in an other embodiment having, an amino acid sequence shown in the respective line in Table II, application no. 7, columns 5 or 8, fragments or homologs thereof. In a further embodiment, the nucleic acid molecule of the invention encodes a full length protein which is substantially homologous to an amino acid sequence shown in the respective line in Table II, application no. 7, columns 5 or 8, or homologs thereof. However, in an embodiment, the nucleic acid molecule of the present invention does not consist of the sequence shown in the respective line in Table I, preferably Table IA, application no. 7, columns 5 or 8, preferably the coding region thereof, but the functional homologs thereof.

[48208] In addition, it will be appreciated by those skilled in the art that DNA sequence polymorphisms that lead to changes in the amino acid sequences may exist within a population of the non-human organism of the present invention. Also these non-human organisms are encompassed by the respective non-human organism according to the invention.

[48209] As used herein, the terms “gene” and “recombinant gene” refer to nucleic acid molecules comprising an open reading frame encoding the polypeptide of the invention or comprising the nucleic acid molecule of the invention or encoding the polypeptide used in the process of the present invention, preferably from a plant, especially a crop plant, or from a microorganism useful for the method of the invention. Such genetic polymorphism in the gene encoding the polypeptide of the invention or comprising the nucleic acid molecule of the invention may exist among individuals within a population due to natural variation. Such natural variations can typically result in 1 to 5% variance in the nucleotide sequence of the gene. Any and all such nucleotide variations and resulting amino acid polymorphisms in genes encoding a polypeptide of the invention or comprising a the nucleic acid molecule of the invention that are the result of natural variation and that do not alter the functional activity as described are intended to be within the scope of the invention.

[48210] Nucleic acid molecules corresponding to natural variants of a nucleic acid molecule of the invention, which can also be a cDNA, can be isolated based on their homology to the nucleic acid molecules disclosed herein using the nucleic acid molecule of the invention, or a portion thereof, as a hybridization probe according to standard hybridization techniques under stringent hybridization conditions.

[48211] Accordingly, in another embodiment, a nucleic acid molecule of the invention is at least 15, 20, 25 or 30 nucleotides in length. Preferably, it hybridizes under stringent conditions to a nucleic acid molecule comprising a nucleotide sequence of the nucleic acid molecule of the present invention or used in the process of the present invention, e.g. comprising the sequence shown in the respective line in Table I, application no. 7, columns 5 or 8, preferably the coding region thereof. In another embodiment the nucleic acid molecule is preferably at least 20, 30, 50, 100, 250 or more nucleotides in length.

[48212] The term “hybridizes under stringent conditions” is defined above. In an embodiment, the term “hybridizes under stringent conditions” is intended to describe conditions for hybridization and washing under which nucleotide sequences at least 30%, 40%, 50% or 65% identical to each other typically remain hybridized to each other. Preferably, the conditions are such that sequences at least about 70%, 75%, 80%, 85%, 90% or 95% or more identical to each other typically remain hybridized to each other.

[48213] Preferably, a nucleic acid molecule of the invention that hybridizes under stringent conditions to a sequence shown in the respective line in Table I, application no. 7, columns 5 or 8, preferably the coding region thereof, corresponds to a naturally-occurring nucleic acid molecule of the invention. As used herein, a “naturally-occurring” nucleic acid molecule refers to a RNA or DNA molecule having a nucleotide sequence that occurs in nature (e.g. encodes a natural protein). Preferably, the nucleic acid molecule encodes a natural protein having above-mentioned activity, e.g. conferring the production or the increased production of the respective fine chemical alpha-tocopherol, or gamma-tocopherol as compared to a corresponding, e.g. non-transformed, wild type non-human organism, like a microorganism or a plant cell, plant or part thereof after increasing the expression or activity thereof or the activity of a protein of the invention or used in the process of the invention, in an embodiment for example expression either in the cytosol or in an organelle such as a plastid or mitochondria, preferably in plastids, or, in another embodiment by targeted or non-targeted expression.

[48214] In addition to naturally-occurring variants of the sequences of the polypeptide or nucleic acid molecule of the invention as well as of the polypeptide or nucleic acid molecule used in the process of the invention that may exist in the population, the skilled artisan will further appreciate that changes can be introduced by mutation into a nucleotide sequence of the nucleic acid molecule of the invention, e.g. encoding the polypeptide of the invention or used in the process of the present invention, thereby leading to changes in the amino acid sequence of the encoded said polypeptide, without altering the functional ability of the polypeptide, preferably not decreasing said activity, preferably increasing said activity.

[48215] For example, nucleotide substitutions leading to amino acid substitutions at “non-essential” amino acid residues can be made in a sequence of the nucleic acid molecule of the invention or used in the process of the invention, e.g. shown in the respective line in Table I, application no. 7, columns 5 or 8, preferably the coding region thereof, or fragments or homologs thereof.

[48216] With regard to the activity of a polypeptide a “non-essential” amino acid residue is a residue that can be altered without altering the activity of said polypeptide, whereas an “essential” amino acid residue is required for an activity as mentioned above, e.g. conferring the production or the increased production of the fine chemical as compared to a corresponding, e.g. non-transformed, wild type non-human organism, like a microorganism or a plant cell, plant or part thereof. Other amino acid residues, however, (e.g., those that are not conserved or only semi-conserved in the domain having said activity) may not be essential for activity and thus are likely to be amenable to alteration without altering said activity.

[48217] Further, a person skilled in the art knows that the codon usage between organisms can differ. In the enclosed sequence protocol according to WIPO ST 25 the respective donor organism codon usage “translation” is used.The person skilled in the art refore, he may adapt the codon usage in the nucleic acid molecule of the present invention to the usage of the organism or the cell compartment for example of the plastid or mitochondria in which the polynucleotide or polypeptide is expressed.

[48218] Accordingly, the invention relates to nucleic acid molecules encoding a polypeptide having above-mentioned activity, in a non-human organisms or parts thereof by for example expression either in the cytosol or in an organelle such as a plastid or mitochondria or both, preferably in plastids, that contain changes in amino acid residues that are not essential for said activity. Such polypeptides differ in amino acid sequence from a sequence depicted in the respective line in Table II, especially Table IIA, application no. 7, columns 5 or 8, but retain said activity described herein. The nucleic acid molecule can comprise a nucleotide sequence encoding a polypeptide, wherein the polypeptide comprises an amino acid sequence at least about 50% identical to an amino acid sequence shown in the respective line in Table II, application no. 7, columns 5 or 8, and is capable of conferring the production or the increased production of the respective fine chemical alpha-tocopherol, or gamma-tocopherol as compared to a corresponding, e.g. non-transformed, wild type non-human organism, like a microorganism or a plant cell, plant or part thereof, after increasing its activity for example in an embodiment by expression either in the cytosol or in an organelle such as a plastid or mitochondria or both, preferably in plastids, or, in another embodiment by targeted or non-targeted expression. Preferably, the protein encoded by the nucleic acid molecule is at least about 60%, 70%, 80%, 90%, 95%, 96%, 97%, 98%, 99% or 99.5% identical to the sequence shown in the respective line in Table II, application no. 7, columns 5 or 8.

[48219] To determine the-percentage identity (=homology, herein used interchangeably) of two amino acid sequences or of two nucleic acid molecules, the sequences are written one underneath the other for an optimal comparison (for example gaps may be inserted into the sequence of a protein or of a nucleic acid in order to generate an optimal alignment with the other protein or the other nucleic acid). The amino acids or nucleobases at the respective corresponding positions are then compared. If a position in one sequence is occupied by the same amino acid or the same nucleobase as the corresponding position in the other sequence, the molecules are homologous at this position. The-percentage identity between the two sequences is a function of the number of identical positions shared by the sequences (i.e. % homology=identity=number of identical positions/total number of positions×100).

[48220] For the determination of the-percentage identity (=homology) of two or more amino acid sequences or of two or more nucleic acid molecules several computer software programs have been developed. The homology of two or more sequences can be calculated with for example the software Fasta, which presently has been used in the version Fasta 3 (Pearson W. R. and Lipman D. J., PNAS 85, 2444 (1988); Pearson W. R., Methods in Enzymology 183, 63 (1990)). Another useful program for the calculation of homologies of different sequences is the standard blast program, which is included in the Biomax PEDANTTM software (Biomax, Munich, Federal Republic of Germany). This leads unfortunately sometimes to suboptimal results since blast does not always include complete sequences of the subject and the query. Nevertheless as this program is very efficient it can be used for the comparison of a huge number of sequences. The following settings are typically used for such a comparison of sequences: -p Program Name [String]; -d Database [String]; default =nr; -i Query File [File In]; default=stdin; -e Expectation value (E) [Real]; default=10.0; -m alignment view options: 0 =pairwise; 1=query-anchored showing identities; 2=query-anchored no identities; 3=flat query-anchored, show identities; 4=flat query-anchored, no identities; 5=query-anchored no identities and blunt ends; 6=flat query-anchored, no identities and blunt ends; 7=XML Blast output; 8=tabular; 9 tabular with comment lines [Integer]; default=0; -o BLAST report Output File [File Out] Optional; default=stdout; -F Filter query sequence (DUST with blastn, SEG with others) [String]; default=T; -G Cost to open a gap (zero invokes default behavior) [Integer]; default=0; -E Cost to extend a gap (zero invokes default behavior) [Integer]; default=0; -X X dropoff value for gapped alignment (in bits) (zero invokes default behavior); blastn 30, megablast 20, tblastx 0, all others 15 [Integer]; default=0; -I Show GI's in deflines [T/F]; default=F; -q Penalty for a nucleotide mismatch (blastn only) [Integer]; default=-3; -r Reward for a nucleotide match (blastn only) [Integer]; default=1; -v Number of database sequences to show one-line descriptions for (V) [Integer]; default=500; -b Number of database sequence to show alignments for (B) [Integer]; default=250; -f Threshold for extending hits, default if zero; blastp 11, blastn 0, blastx 12, tblastn 13; tblastx 13, megablast 0 [Integer]; default=0; -g Perfom gapped alignment (not available with tblastx) [T/F]; default=T; -Q Query Genetic code to use [Integer]; default=1; -D DB Genetic code (for tblast[nx] only) [Integer]; default=1; -a Number of processors to use [Integer]; default=1; -O SeqAlign file [File Out] Optional; -J Believe the query defline [T/F]; default=F; -M Matrix [String]; default=BLOSUM62; -W Word size, default if zero (blastn 11, megablast 28, all others 3) [Integer]; default=0; -z Effective length of the database (use zero for the real size) [Real]; default=0; -K Number of best hits from a region to keep (off by default, if used a value of 100 is recommended) [Integer]; default=0; -P 0 for multiple hit, 1 for single hit [Integer]; default=0; -Y Effective length of the search space (use zero for the real size) [Real]; default=0; -S Query strands to search against database (for blast[nx], and tblastx); 3 is both, 1 is top, 2 is bottom [Integer]; default=3; -T Produce HTML output [T/F]; default=F; -I Restrict search of database to list of GI's [String] Optional; -U Use lower case filtering of FASTA sequence [T/F] Optional; default=F; -y X dropoff value for ungapped extensions in bits (0.0 invokes default behavior); blastn 20, megablast 10, all others 7 [Real]; default =0.0; -Z X dropoff value for final gapped alignment in bits (0.0 invokes default behavior); blastn/megablast 50, tblastx 0, all others 25 [Integer]; default=0; -R PSI-TBLASTN checkpoint file [File In] Optional; -n MegaBlast search [T/F]; default=F; -L Location on query sequence [String] Optional; -A Multiple Hits window size, default if zero (blastn/megablast 0, all others 40 [Integer]; default=0; -w Frame shift penalty (00F algorithm for blastx) [Integer]; default=0; -t Length of the largest intron allowed in tblastn for linking HSPs (0 disables linking) [Integer]; default=0.

[48221] Results of high quality are reached by using the algorithm of Needleman and Wunsch or Smith and Waterman. Therefore programs based on said algorithms are preferred. Advantageously the comparisons of sequences can be done with the program PileUp (J. Mol. Evolution., 25, 351 (1987), Higgins et al., CABIOS 5, 151 (1989)) or preferably with the programs “Gap” and “Needle”, which are both based on the algorithms of Needleman and Wunsch (J. Mol. Biol. 48, 443 (1970)), and “BestFit”, which is based on the algorithm of Smith and Waterman (Adv. Appl. Math. 2, 482 (1981)). “Gap” and “BestFit” are part of the GCG softwarepackage (Genetics Computer Group, 575 Science Drive, Madison, Wis., USA 53711 (1991); Altschul et al., (Nucleic Acids Res. 25, 3389 (1997)), “Needle” is part of the The European Molecular Biology Open Software Suite (EMBOSS) (Trends in Genetics 16 (6), 276 (2000)). Therefore preferably the calculations to determine the-percentages of sequence homology are done with the programs “Gap” or “Needle” over the whole range of the sequences. The following standard adjustments for the comparison of nucleic acid sequences were used for “Needle”: matrix: EDNAFULL, Gap_penalty: 10.0, Extend_penalty: 0.5. The following standard adjustments for the comparison of nucleic acid sequences were used for “Gap”: gap weight: 50, length weight: 3, average match: 10.000, average mismatch: 0.000.

[48222] For example a sequence, which has 80% homology with sequence SEQ ID NO: 1815 at the nucleic acid level is understood as meaning a sequence which, upon comparison with the sequence SEQ ID NO: 1815 by the above-mentioned program “Needle” with the above-mentioned parameter set, has a 80% homology.

[48223] Homology between two polypeptides is understood as meaning the identity of the amino acid sequence over in each case the entire sequence length which is calculated by comparison with the aid of the above program “Needle” using Matrix: EBLOSUM62, Gap_penalty: 8.0, Extend_penalty: 2.0.

[48224] For example a sequence which has a 80% homology with sequence SEQ ID NO: 1816 at the protein level is understood as meaning a sequence which, upon comparison with the sequence SEQ ID NO: 1816 by the above-mentioned program “Needle” with the above-mentioned parameter set, has a 80% homology.

[48225] Functional equivalents of the nucleic acid molecules according to the present invention and/or used in the process according to the present invention represent an embodiment of homologs. Functional equivalents derived from the nucleic acid molecules as shown in the respective line in Table I, application no. 7, columns 5 or 8, preferably the coding region thereof, according to the invention by substitution, insertion or deletion have at least 30%, 35%, 40%, 45%, 50%, 55%, 60%, 65%, 70%, 75%, 80%, 85%, 90%, 91%, 92%, 93%, 94%, 95%, 96%, 97%, 98%, 99% or 99.5% homology with one of the nucleic acid molecules as shown in the respective line in Table I, application no. 7, columns 5 or 8, preferably the coding region thereof, according to the invention and encode polypeptides having essentially the same properties as the polypeptide as shown in the respective line in Table II, application no. 7, columns 5 or 8.

[48226] Functional equivalents derived from one of the polypeptides as shown in the respective line in Table II, application no. 7, columns 5 or 8 according to the invention by substitution, insertion or deletion have at least 30%, 35%, 40%, 45%, 50%, 55%, 60%, 65%, 70%, 75%, 80%, 85%, 90%, 91%, 92%, 93%, 94%, 95%, 96%, 97%, 98%, 99% or 99.5% homology with one of the polypeptides as shown in the respective line in Table II, application no. 7, columns 5 or 8 according to the invention and having essentially the same properties as the polypeptide as shown in the respective line in Table II, application no. 7, columns 5 or 8.

[48227] “Essentially the same properties” of a functional equivalent is above all understood as meaning that the functional equivalent has the above-mentioned activity, by for example in an embodiment expression either in the cytosol or in an organelle such as a plastid or mitochondria or both, or, in another embodiment by targeted or non-targeted expression, while increasing the amount of protein, activity or function of said functional equivalent in an organism, e.g. a microorganism, a plant or plant tissue or animal tissue, plant or animal cells or a part of the same.

[48228] A nucleic acid molecule encoding a homolog to a polypeptide depicted in the respective line in Table II, application no. 7, columns 5 or 8 can be created by introducing one or more nucleotide substitutions, additions or deletions into the nucleic acid molecule of the present invention, in particular of Table I, application no. 7, columns 5 or 8, in the respective line, such that one or more amino acid substitutions, additions or deletions are introduced into the encoded protein. Mutations can be introduced into the nucleic acid molecules as depicted in the respective line in Table I, application no. 7, columns 5 or 8, preferably the coding region thereof, by standard techniques, such as site-directed mutagenesis, PCR-mediated mutagenesis or other methods known to the person skilled in the art.

[48229] Preferably, conservative amino acid substitutions are made at one or more predicted non-essential amino acid. A “conservative amino acid substitution” is one in which the amino acid is replaced with an amino acid having a similar side chain. Families of amino acids having similar side chains have been defined in the art. These families include amino acids with basic side chains (e.g. lysine, arginine, histidine), acidic side chains (e.g. aspartic acid, glutamic acid), uncharged polar side chains (e.g. glycine, asparagine, glutamine, serine, threonine, tyrosine, cysteine), nonpolar side chains (e.g. alanine, valine, leucine, isoleucine, proline, phenylalanine, methionine, tryptophane), beta-branched side chains (e.g. threonine, valine, isoleucine) and aromatic side chains (e.g. tyrosine, phenylalanine, tryptophane, histidine).

[48230] Thus, a predicted non-essential amino acid in a polypeptide of the invention or a polypeptide used in the process of the invention is preferably replaced with another amino acid from the same family. Alternatively, in another embodiment, mutations can be introduced randomly along all or part of a coding sequence of a nucleic acid molecule of the invention or used in the process of the invention, such as by saturation mutagenesis, and the resultant mutants can be screened for activity described herein to identify mutants that retain or even have increased activity, e.g. conferring the production or the increased production of the fine chemical as compared to a corresponding, e.g. non-transformed, wild type non-human organism, like a microorganism or a plant cell, plant or part thereof.

[48231] Following mutagenesis of one of the sequences as shown herein, the encoded protein can be expressed recombinantly and the activity of the protein can be determined using, for example, assays described herein (see Examples) or by measuring the resulting fine chemical production in an organism expressing the mutagenized form of the sequence in comparison to an organism expressing the original non-mutagenized form of the sequence.

[48232] Homologues of the nucleic acid sequences used, with the sequences shown in the respective line in Table I, application no. 7, columns 5 or 8, preferably the coding region thereof, comprise also allelic variants with at least approximately 30%, 35%, 40%, 45%, 50%, 55%, 60%, 65%, 70%, 75%, 80%, 85%, 90%, 91%, 92%, 93%, 94% 95%. 96%, 97%, 98%, 99%, 99.5% or more % homology with one of the nucleotide sequences shown or the above-mentioned derived nucleic acid sequences or their homologues or derivatives or parts of these.

[48233] Allelic variants encompass in particular functional variants which can be obtained by deletion, insertion or substitution of nucleotides from the sequences shown in the respective line, preferably in Table I, columns 5 or 8, preferably the coding region thereof, or from the derived nucleic acid sequences, the intention being, however, that the enzymatic activity or the biological activity of the resulting proteins synthesized is advantageously retained or increased.

[48234] In one embodiment of the present invention, the nucleic acid molecule of the invention or used in the process of the invention comprises the sequences shown in the respective line in any of the Table I, application no. 7, columns 5 or 8, preferably the coding region thereof, fragments or homologs thereof. It is preferred that the nucleic acid molecule comprises as little as possible other nucleotides not shown in the respective line in any one of Table I, application no. 7, columns 5 or 8, preferably the coding region thereof, fragments or homologs thereof. In one embodiment, the nucleic acid molecule comprises less than 500, 400, 300, 200, 100, 90, 80, 70, 60, 50 or 40 further nucleotides. In a further embodiment, the nucleic acid molecule comprises less than 30, 20 or 10 further nucleotides. In one embodiment, the nucleic acid molecule used in the process of the invention is identical to the sequences shown in the respective line in Table I, application no. 7, columns 5 or 8, preferably the coding region thereof.

[48235] Also preferred is that the nucleic acid molecule used in the process of the invention encodes a polypeptide comprising the sequence shown in the respective line in Table II, application no. 7, columns 5 or 8, fragments or homologs thereof. In one embodiment, the nucleic acid molecule encodes less than 150, 130, 100, 80, 60, 50, 40 or 30 further amino acids. In a further embodiment, the encoded polypeptide comprises less than 20, 15, 10, 9, 8, 7, 6 or 5 further amino acids. In one embodiment used in the inventive process, the encoded polypeptide is identical to the sequences shown in the respective line in Table II, application no. 7, columns 5 or 8.

[48236] In one embodiment, the nucleic acid molecule of the invention or used in the process encodes a polypeptide comprising the sequence shown in the respective line in Table II, application no. 7, columns 5 or 8, or fragments or homologs thereof, and comprises less than 100 further nucleotides. In a further embodiment, said nucleic acid molecule comprises less than 30 further nucleotides. In one embodiment, the nucleic acid molecule used in the process is identical to a coding sequence of the sequences shown in the respective line in Table I, application no. 7, columns 5 or 8.

[48237] Polypeptides (=proteins), which still have the essential biological or enzymatic activity of the polypeptide of the present invention conferring the production or the increased production of the respective fine chemical alpha-tocopherol, or gamma-tocopherol as compared to a corresponding, e.g. non-transformed, wild type non-human organism, like a microorganism or a plant cell, plant or part thereof, i.e. whose activity is essentially not reduced, are polypeptides with at least 10%, 20%, 30%, 40%, 50%, 60%, 70%, 80%, 90%, 95% or more of the wild type biological activity or enzymatic activity, advantageously, the activity is essentially not reduced in comparison with the activity of a polypeptide shown in the respective line in Table II, application no. 7, columns 5 or 8 expressed under identical conditions.

[48238] Homologues of nucleic acid molecules shown in the respective line in Table I, application no. 7, columns 5 or 8, preferably the coding region thereof, or fragments thereof, or of the derived sequences shown in the respective line in Table II, application no. 7, columns 5 or 8, or fragments thereof, also mean truncated sequences, cDNA, single-stranded DNA or RNA of the coding and noncoding DNA sequence. Homologues of said sequences are also understood as meaning derivatives, which comprise noncoding regions such as, for example,

[48239] UTRs, introns, terminators, enhancers or promoter variants. The promoters upstream of the nucleotide sequences stated can be modified by one or more nucleotide substitution(s), insertion(s) and/or deletion(s) without, however, interfering with the functionality or activity either of the promoters, the open reading frame (=ORF) or with the 3′-regulatory region such as terminators or other 3′-regulatory regions, which are far away from the ORF. It is furthermore possible that the activity of the promoters is increased by modification of their sequence, or that they are replaced completely by more active promoters, even promoters from heterologous organisms. Appropriate promoters are known to the person skilled in the art and are mentioned herein below.

[48240] Accordingly, one embodiment of the invention relates to a host cell, which has been transformed stably or transiently with the vector according to the invention or the nucleic acid molecule according to the invention or the nucleic acid construct or the expression construct according to the invention.

[48241] Depending on the non-human host organism, the non-human organisms used in the process according to the invention are cultured or grown in a manner with which the skilled worker is familiar.

[48242] As a rule, microorganisms are grown in a liquid medium comprising a carbon source, usually in the form of sugars, a nitrogen source, usually in the form of organic nitrogen sources such as yeast extract or salts such as ammonium sulfate, trace elements such as iron salts, manganese salts, magnesium salts, and, if appropriate, vitamins, at temperatures between 0° C. and 100° C., preferably between 10° C. and 60° C., while passing in oxygen. In the event the microorganism is anaerobe, no oxygen is blown through the culture medium. The pH value of the liquid nutrient medium may be kept constant, that is to say regulated during the culturing phase, or not. The organisms may be cultured batch wise, semi batch wise or continuously. Nutrients may be provided at the beginning of the fermentation or fed in semi continuously or continuously. Advantageously microorganisms such as algae are grown under sunlight in open ponds or in fermentors illuminated with a light intensity between 10 to 2000 μmol×m⁻²×s⁻¹, preferred between 100 to 1000 μmol×m⁻²×s⁻¹, more preferred between 200 to 800 μmol×m⁻²×s⁻¹, most preferred between 300 to 600 μmol×m⁻²×⁻¹. The cells are grown between several hours for example 3 to 48 h and several days 1 to 20 days, preferably 2 to 10 days. Algae as autotrophic organisms grow well in the presence of light as energy source, inorganic hydrogen donors and CO₂ as sole carbon source.

[48243] As a rule, plants used in the process according to the invention are grown according to general knowledge of a skilled worker.

[48244] The fine chemical produced can be isolated from the non-human organism by methods with which the skilled worker is familiar. For example via extraction, salt precipitation or chromatography, like ion-exchange chromatography. To this end, the non-human organisms, especially the microorganism or the plant, may be disrupted beforehand. The process according to the invention can be conducted batch wise, semi batch wise or continuously. A summary of known culture and isolation techniques can be found in the textbook by Chmiel (“Bioprozeβtechnik 1, Einführung in die Bioverfahrenstechnik”, Gustav Fischer Verlag, Stuttgart, 1991)), Demain et al. (“Industrial Microbiology and Biotechnology”, 2ndedition, ASM Press, Washington, D.C., 1999, ISBN 1-55581-128-0) or in the textbook by Storhas (“Bioreaktoren und periphere Einrichtungen”, Vieweg Verlag, Braunschweig/Wiesbaden, 1994)).

[48245] In one embodiment, the present invention relates to a polypeptide encoded by the nucleic acid molecule according to the present invention, preferably conferring the production of or an increase in the fine chemical content in an non-human organism or cell after generating or increasing the expression or activity of said nucleic acid molecule, either in the cytosol or in an organelles such as a plastid or mitochondrion or both, preferably in a plastid, or in another embodiment by targeted or non-targeted expression.

[48246] The present invention also relates to a process for the production of a polypeptide according to the present invention, the polypeptide being expressed in a host cell according to the invention, preferably in a microorganism or a plant cell, plant or a part thereof, especially in a transgenic microorganism or a transgenic plant cell, plant or a part thereof.

[48247] In an embodiment, the nucleic acid molecule used in the process for the production of the polypeptide (FCRP) is derived from a microorganism such as a eukaryotic or prokaryotic microorganism, preferably from a eukaryotic microorganism, such as an algae or Saccharomyces cerevisiae; in an embodiment thereof this polypeptide is produced in another microorganism or in another embodiment thereof this polypeptide is produced in a plant cell, plant or a part thereof. In another embodiment, the nucleic acid molecule used in the process for the production of the polypeptide is derived from a plant, in an embodiment thereof the polypeptide is produced in a microorganism or in another embodiment thereof this polypeptide is produced in another plant, a part or cell thereof.

[48248] The skilled worker knows that protein and DNA expressed in different non-human organisms differ in many respects and properties, e. g. DNA modulation and imprinting, such as methylation or post-translational modification, as for example glucosylation, phosphorylation, acetylation, myristoylation, ADP-ribosylation, farnesylation, carboxylation, sulfation, ubiquination, etc. though having the same coding sequence. Preferably, the cellular expression control of the corresponding protein differs accordingly in the control mechanisms controlling the activity and expression of an endogenous protein or another prokaryotic or eukaryotic protein. One major difference between proteins expressed in prokaryotic or eukaryotic organisms is the amount and pattern of glycosylation. For example in E. coli there are no glycosylated proteins. Proteins expressed in yeasts have a high mannose content in the glycosylated proteins, whereas in plants the glycosylation pattern is complex.

[48249] The polypeptide (FCRP) of the present invention is preferably produced by recombinant DNA techniques. For example, a nucleic acid molecule encoding the protein is cloned into a vector (as described above), the vector is introduced into a host cell (as described above) and said polypeptide is expressed in the host cell. Said polypeptide (FCRP) can then be isolated from the cells by an appropriate purification scheme using standard protein purification techniques. Alternative to recombinant expression, the polypeptide or peptide of the present invention can be synthesized chemically using standard peptide synthesis techniques.

[48250] Moreover, a native polypeptide conferring the increase of the respective fine chemical alpha-tocopherol, or gamma-tocopherol in a non-human organism or a part thereof can be isolated from cells (e.g., endothelial cells), for example using the antibody of the present invention as described below, in particular, an antibody against proteins having 3-deoxy-7-phosphoheptulonate synthase, 3-deoxy-D-arabinoheptulosonate-7-phosphatesynthase, ABC transporter permease subunit, acetyltransferase, acid shock protein, adenylate kinase, adenylosuccinate lyase, amino-acid acetyltransferase, ankyrin repeat family protein, At1g29350-protein, ATP-binding component of a transport system, b1163-protein, b1219-protein, b1234-protein, b1522-protein, b1921-protein, b2360-protein, b2548-protein, b2613-protein, b2673-protein, b2812-protein, b3890-protein, b3989-protein, b4029-protein, b4050-protein, b4056-protein, calcium-dependent protein kinase, carbohydrate kinase, colanic acid biosynthesis protein, coproporphyrinogen oxidase, cyclin D , DNA polymerase subunit, electron transfer flavoprotein subunit beta, geranylgeranyl pyrophosphate synthase, geranyltranstransferase, gluconate transport system permease 3, glucose dehydrogenase, glucose-6-phosphate 1-dehydrogenase, glutaredoxin, glycerol dehydrogenase, glycerol-3-phosphate dehydrogenase, glycolate utilization protein, harpin-induced family protein, homocitrate synthase, hydrolase, isopropylmalate isomerase large subunit, lipopolysaccharide biosynthesis protein, MADS box protein transcription factor, major facilitator superfamily transporter protein, malate dehydrogenase, monothiol glutaredoxin, monthiol glutaredoxin, multiple antibiotic resistance protein, murein transglycosylase, N-(5′-phosphoribosyl) anthranilate isomerase, NAD-dependent epimerase/dehydratase, NADP-dependent malic enzyme, O-antigen chain length determinant, phosphatidylserine decarboxylase, phospho-2-dehydro-3-deoxyheptonate aldolase, phosphoadenosine phosphosulfate reductase , phosphofructokinase, photosystem II protein, polygalacturonase, polyphosphate kinase, precorrin methylase, protein kinase, protein phosphatase, putative transport system permease protein, pyruvate kinase, RNA-binding protein, Sec-independent protein translocase subunit, serine protease, sll1761-protein, slr1917-protein, small nuclear ribonucleoprotein , ThiF family protein, thioredoxin, thioredoxin family protein, threonine synthase, transcription factor, transcriptional regulator, transport protein, trehalose-phosphatase, TTC1386-protein, ycl049c-protein, ydl235c-protein, ydr183w-protein, yer106w-protein, ylr178c-protein, ypr170c-protein, or zinc finger protein activity, respectively, or an antibody against polypeptides as shown in the respective line in Table II, application no. 7, columns 5 or 8, or fragments or homologs thereof which can be produced by standard techniques utilizing the polypeptid of the present invention or fragment thereof, i.e., the polypeptide of this invention (FCRP). Preferred are monoclonal antibodies.

[48251] In an embodiment, the present invention relates to a polypeptide encoded by a nucleic acid molecule of the invention or obtainable by a process of the invention. Said polypeptide confers preferably the aforementioned activity, in particular, the polypeptide confers the generation or the increased production of the fine chemical in a cell or an organism or a part thereof after generating or increasing the cellular activity, e.g. by generating or increasing the expression or the specific activity of the polypeptide.

[48252] In one embodiment, the present invention relates to a polypeptide as depicted in the respective line in Table II, especially in Table IIA or especially in Table IIB, application no. 7, columns 5 or 8, or fragment or homolog thereof or as coded by the nucleic acid molecule shown in the respective line in Table I, especially Table IA or especially Table IB, application no. 7, columns 5 or 8, preferably the coding region thereof, or fragment or homolog thereof.

[48253] In an embodiment, the present invention relates to a polypeptide comprising or consisting of a consensus sequence shown in the respective line in Table IV, application no. 7, column 8 or at least one polypeptide motif shown in the respective line in Table IV, application no. 7, column 8.

[48254] In an embodiment thereof, the present invention relates to a polypeptide comprising or consisting of a consensus sequence shown in the respective line in Table IV, application no. 7, column 8 or comprising at least one polypeptide motif shown in the respective line in Table IV, application no. 7, column 8, whereby not more than 20, 15, 10, 9, 8, 7, 6, 5, 4, 3, 2, or 1, or 0 of the amino acids can be replaced by any amino acid.

[48255] In another embodiment thereof, the present invention relates to a polypeptide comprising or consisting of a consensus sequence shown in the respective line in Table IV, application no. 7, column 8 or comprising at least one polypeptide motif shown in the respective line in Table IV, application no. 7, column 8, whereby not more than 15%, 10%, 5%, 4%, 3%, 2% or1% or 0% of the amino acids defined as distinct specific amino acids are/is replaced by another amino acid.

[48256] In another embodiment thereof, the present invention relates to a polypeptide comprising or consisting of a consensus sequence shown in the respective line in Table IV, application no. 7, column 8 or comprising at least one polypeptide motif shown in the respective line in Table IV, application no. 7, column 8, whereby not more than 20, 15, 10, 9, 8, 7, 6, 5, 4, 3, 2, or 1, or 0 amino acids are inserted into the consensus sequence or polypeptide motif.

[48257] In an embodiment of the present invention, the polypeptide of the present invention comprises or consists of a consensus sequence or at least one polypeptide motif shown in the respective line in Table IV, application no. 7, column 8, whereby said polypeptide distinguishes over the sequence depicted in the respective line in Table II, application no. 7, columns 5 or 8 by one or more amino acids. In one embodiment, said polypeptide of the invention distinguishes over the sequence shown in the respective line in Table II, application no. 7, columns 5 and 8 by more than 5, 6, 7, 8 or 9 amino acids, preferably by more than 10, 15, 20, 25 or 30 amino acids, even more preferred are more than 40, 50, or 60 amino acids and, preferably, the sequence of the polypeptide of the invention distinguishes from the sequence shown in the respective line in Table II, application no. 7, columns 5 and 8 by not more than 80%, 70%, 60%, 50%, 40%, 30%, 20%, 10%, 5%, 4%, 3%, 2%, 1% or 0.5%. In another embodiment, said polypeptide of the invention does not consist of the sequence shown in the respective line in Table II, application no. 7, columns 5 and 8.

[48258] In an embodiment, the invention relates to a polypeptide conferring an increase in the respective fine chemical alpha-tocopherol, or gamma-tocopherol in a non-human organism, especially a microorganism or a plant, or a part thereof, being encoded by the nucleic acid molecule of the invention or used in the process of the invention and having a sequence which distinguishes over the sequence as shown in the respective line in Table II, application no. 7, columns 5 or 8 by one or more amino acids (but not exceeding 5%, preferably 4%, 3%, 2%, 1%, 0.5%, 0.2% or 0.1%). In an embodiment, said polypeptide of the invention does not comprise or consist of the sequence shown in the respective line in Table II, application no. 7, columns 5 or 8. In an embodiment, said polypeptide of the present invention is less than 100%, 99.999%, 99.99%, 99.9% or 99% identical. In one embodiment, said polypeptide which differs at least in one or more amino acids (but not exceeding 5%, preferably 4%, 3%, 2%, 1%, 0.5%, 0.2% or 0.1%) from the polypeptide shown in the respective line in Table II, application no. 7, columns 5 and 8 does not comprise a protein of the sequence shown in the respective line in Table II A and/or II B, application no. 7, columns 5 or 8.

[48259] In an embodiment, the present invention relates to a polypeptide having the activity of the protein as shown in the respective line in Table II, application no. 7, column 3, which distinguishes over the sequence depicted in the respective line in Table II, application no. 7, columns 5 or 8 by one or more amino acids, preferably by more than 5, 6, 7, 8 or 9 amino acids, preferably by more than 10, 15, 20, 25 or 30 amino acids, even more preferred are more than 40, 50, or 60 amino acids and, preferably, the sequence of the polypeptide of the invention distinguishes from the sequence shown in the respective line in Table II, application no. 7, columns 5 and 8 by not more than 80%, 70%, 60%, 50%, 40%, 30%, 20%, 10%, 5%, 4%, 3%, 2%, 1% or 0.5%.

[48260] In another embodiment the polypeptide of the invention takes the form of a preprotein consisting of a plastidial or mitochondrial transit peptide joint to a polypeptide having the activity of the protein as shown in Table II, column 3, from which the transit peptide is preferably cleaved off upon transport of the preprotein into the organelle for example into the plastid or mitochondrion.

[48261] In another embodiment the polypeptide of the invention takes not the form of a preprotein.

[48262] The terms “protein” and “polypeptide” used in this application are interchangeable. “Polypeptide” refers to a polymer of amino acids (amino acid sequence) and does not refer to a specific length of the molecule. Thus peptides and oligopeptides are included within the definition of polypeptide. This term does also refer to or include post-translational modifications of the polypeptide, for example, glycosylations, acetylations, phosphorylations and the like. Included within the definition are, for example, polypeptides containing one or more analogs of an amino acid (including, for example, unnatural amino acids, etc.), polypeptides with substituted linkages, as well as other modifications known in the art, both naturally occurring and nonnaturally occurring.

[48263] Another aspect of the present invention pertains to isolated FCRP, or biologically active portions thereof. An “isolated” or “purified” protein or biologically active portion thereof is substantially free of cellular material when produced by recombinant DNA techniques or chemical precursors or other chemicals when chemically synthesized.

[48264] The language “substantially free of cellular material” includes preparations of the polypeptide of the invention in which the protein is separated from cellular components of the cells in which it is naturally or recombinantly produced. In an embodiment, the language “substantially free of cellular material” includes preparations having less than about 30% (by dry weight) of “contaminating protein”, more preferably less than about 20% of “contaminating protein”, still more preferably less than about 10% of “contaminating protein”, and most preferably less than about 5% “contaminating protein”. The term “contaminating protein” relates to polypeptides, which differ from the polypeptide in question of the present invention. When the polypeptide of the present invention or biologically active portion thereof is recombinantly produced, it is also preferably substantially free of culture medium, i.e., culture medium represents less than about 20%, more preferably less than about 10%, and most preferably less than about 5% of the volume of the protein preparation. The language “substantially free of chemical precursors or other chemicals” includes preparations in which the polypeptide of the present invention is separated from chemical precursors or other chemicals, which are involved in the synthesis of the protein. The language “substantially free of chemical precursors or other chemicals” includes preparations having less than about 30% (by dry weight) of chemical precursors, other chemicals or other proteins, which differ from the polypeptide in question. Other chemical precursors, other chemicals or other proteins, which are not identical to the proteins as shown in the respective line in Table II, column 5 or 8, or fragments or homologs thereof, are all collectively named as impurities. The term “chemical precursors” shall mean in the sense of the specification chemical substances, which are intermediates of the biochemical pathway within the organism or within the cell(s) of the non-human organism for example glucose-6-phoshat, citrate, fumarate, homoserine etc. The term “other chemicals” shall mean in the sense of the specification chemical substances, which are end products of the biochemical pathway within the organism or within the cell(s) of the organism for example amino acids such as lysine, alanine etc; fatty acids such as linolenic acid, eicosapantaenoic acid etc, sugars such as glucose, mannose, ribose, desoxy ribose etc, vitamins such as vitamin C, vitamin B2 etc. and all other chemical substances of the cell. The term “other proteins” shall mean in the sense of the specification all other proteins, which are not identical to the proteins mentioned in the respective line in Table II, columns 5 or 8, or fragments or homologs thereof. The fine chemical preparations advantageously shall have less than about 25% impurities, preferably less than about 20% impurities, still more preferably less than about 10% impurities, and most preferably less than about 5% impurities. In preferred embodiments, isolated proteins or biologically active portions thereof lack contaminating proteins from the same organism from which the polypeptide of the present invention is derived. Typically, such proteins are produced by recombinant techniques.

[48265] A polypeptide of the invention can participate in the process of the present invention. The polypeptide or a portion thereof comprises preferably an amino acid sequence, which is sufficiently homologous to an amino acid sequence shown in the respective line in Table II A and/or II B, application no. 7, columns 5 or 8.

[48266] Further, the polypeptide can have an amino acid sequence which is encoded by a nucleotide sequence which hybridizes, preferably hybridizes under stringent conditions as described above, to a nucleotide sequence of the nucleic acid molecule of the present invention. Accordingly, the polypeptide has an amino acid sequence which is encoded by a nucleotide sequence that is at least about 35%, 40%, 45%, 50%, 55%, 60%, 65%, 70%, 75%, 80%, 85%, 90%, 91%, 92%, 93%, 94%, 95%, 96%, 97%, 98%, 99%, 99.5% or more homologous to one of the amino acid sequences as shown in the respective line in Table II A and/or II B, application no. 7, columns 5 or 8, or fragments thereof. The preferred polypeptide of the present invention preferably possesses at least one of the activities according to the invention and described herein. A preferred polypeptide of the present invention includes an amino acid sequence encoded by a nucleotide sequence which hybridizes, preferably hybridizes under stringent conditions, to a nucleotide sequence shown in the respective line in Table I A and/or I B, application no. 7, columns 5 or 8, preferably the coding region thereof, or fragments thereto or which is homologous thereto, as defined above.

[48267] The polypeptide of the present invention can vary from the sequences shown in the respective line in Table II A and/or II B, application no. 7, columns 5 or 8 in amino acid sequence due to natural variation or mutagenesis, as described in detail herein. Accordingly, the polypeptide comprise an amino acid sequence which is at least about 35%, 40%, 45%, 50%, 55%, 60%, 65%, 70%, 75%, 80%, 85% or 90, 91%, 92%, 93%, 94%, 95%, 96%, 97%, 98%, 99%, 99.5% or more homologous to an entire amino acid sequence shown in the respective line in Table II A and/or II B, application no. 7, columns 5 or 8.

[48268] Biologically active portions of a polypeptide of the present invention include peptides comprising amino acid sequences derived from the amino acid sequence of the polypeptide of the present invention or used in the process of the present invention, e.g., the amino acid sequence shown in the respective line in Table II, application no. 7, columns 5 or 8 or the amino acid sequence of a protein homologous thereto, which include fewer amino acids than a full length polypeptide of the present invention or used in the process of the present invention or the full length protein which is homologous to a polypeptide of the present invention or used in the process of the present invention depicted herein, and exhibit at least one activity of a polypeptide of the present invention or used in the process of the present invention.

[48269] Typically, biologically (or immunologically) active portions of i.e. peptides are, for example, 5, 10, 15, 20, 30, 35, 36, 37, 38, 39, 40, 50, 75, 100, 125, 150 or more amino acids in length; especially they comprise a domain or motif with at least one activity or epitope of a polypeptide of the present invention or used in the process of the present invention. Moreover, other biologically active portions, in which other regions of the polypeptide are deleted, can be prepared by recombinant techniques and evaluated for one or more of the activities described herein.

[48270] Manipulation of the nucleic acid molecule of the invention may result in the production of a protein having differences from the protein as shown in the respective line in Table II, application no. 7, column 5 or 8. Differences shall mean at least one amino acid different from the sequences as shown in the respective line in Table II, application no. 7, column 5 or 8, preferably at least 2, 3, 4, 5, 6, 7, 8, 9 or 10 amino acids (especially but not exceeding 0.1%, preferably 0.2%, 0.5%, 1%, 2%, 3% 4% or 5%), more preferably at least 15, 20, 25, 30, 35, 40, 45 or 50 amino acids (especially but not exceeding 0.5%, preferably 1%, 2%, 3% 4%, 5%, 10% or 25%) different from the sequences as shown in the respective line in Table II, application no. 7, column 5 or 8. These proteins may be improved in efficiency or activity, or may be more stable and therefore present in greater numbers in the cell as compared to the wild-type cell.

[48271] Any mutagenesis strategies for the polypeptide of the present invention or the polypeptide used in the process of the present invention to result in increasing said activity are not meant to be limiting; variations on these strategies will be readily apparent to one skilled in the art. Using such strategies, and incorporating the mechanisms disclosed herein, the nucleic acid molecule and polypeptide of the invention may be utilized to generate algae, ciliates, fungi, other microorganisms like C. glutamicum or plants or parts thereof, expressing proteins as shown in the respective line in Table II, application no. 7, column 5 or 8, or mutated proteins thereof. The nucleic acid molecules and polypeptide molecules of the invention are expressed such that the yield, production, and/or efficiency of production of a desired compound is improved.

[48272] This desired compound may be any natural product of the respective non-human organism, especially a microorganism or a plant, which includes the final products of biosynthesis pathways and intermediates of naturally-occurring metabolic pathways, as well as molecules which do not naturally occur in the metabolism of said cells of said non-human organism, but which are produced by said cells of the invention.

[48273] The invention also provides chimeric or fusion proteins.

[48274] As used herein, a “chimeric protein” or “fusion protein” comprises a polypeptide of the present invention operatively linked to a polypeptide whereby the latter does not confer on its own above-mentioned activity, in particular, which does not confer an increase of content of the fine chemical in a cell or a non-human organism or a part thereof, if its activity is increased.

[48275] In one embodiment, a protein (=polypeptide) as shown in the respective line in Table II, application no. 7, column 5 or 8 refers to a polypeptide having an amino acid sequence corresponding to the polypeptide of the invention, especially to a polypeptide as shown in Table II, application no. 7, columns 5 or 8 or homologs thereof, or used in the process of the invention, whereas a “non- inventive protein or polypeptide” or “other polypeptide” refers to a polypeptide having an amino acid sequence corresponding to a protein which is not substantially homologous to a polypeptide of the invention, preferably which is not substantially homologous to a polypeptide or protein as shown in the respective line in Table II, application no. 7, column 5 or 8 or homologs thereof, e.g., a protein which does not confer the activity described herein and which is derived from the same or a different organism.

[48276] Within the fusion protein, the term “operatively linked” is intended to indicate that the polypeptide of the invention or a polypeptide used in the process of the invention and the “other polypeptide” or a part thereof are fused to each other so that both sequences fulfill the proposed function addicted to the sequence used. The “other polypeptide” can be fused to the N-terminus or C-terminus preferable to the C-terminus of the polypeptide of the invention or used in the process of the invention. For example, in one embodiment the fusion protein is a GST-LMRP fusion protein in which the sequences of the polypeptide of the invention or the polypeptide used in the process of the invention are fused to the C-terminus of the GST sequences. Such fusion proteins can facilitate the purification of recombinant polypeptides of the invention or a polypeptide useful in the process of the invention.

[48277] In another preferred embodiment, the fusion protein is a polypeptide of the invention or a polypeptide used in the process of the invention containing a heterologous signal sequence, preferably at its N-terminus. In certain host cells (e.g., mammalian host cells), expression and/or secretion of a polypeptide of the invention or a polypeptide used in the process of the invention can be increased through use of a heterologous signal sequence. As already mentioned above, targeting sequences, are required for targeting the gene product into specific cell compartment (for a review, see Kermode, Crit. Rev. Plant Sci. 15 (4), 285 (1996) and references cited therein), for example into the vacuole, the nucleus, all types of plastids, such as amyloplasts, chloroplasts, chromoplasts, the extracellular space, the mitochondria, the endoplasmic reticulum, elaioplasts, peroxisomes, glycosomes, and other compartments of cells or extracellular. Sequences, which must be mentioned in this context, are, in particular, the signal-peptide- or transit-peptide-sequences which are known by the person skilled in the art. For example, plastid or mitochondrial-transit-peptide- sequences enable the targeting of the expression product into the plastids or the mitochondria, respectively, of a plant cell or the mitochondria of a microorganism. Targeting sequences are especially known for eukaryotic and to a lower extent for prokaryotic organisms and can advantageously be operable linked with the nucleic acid molecule of the present invention to achieve an expression in one of said compartments or extracellular.

[48278] Preferably, a chimeric or fusion protein of the invention is produced by standard recombinant DNA techniques. For example, DNA fragments coding for the different polypeptide sequences are ligated together in-frame in accordance with conventional techniques, for example by employing blunt-ended or stagger-ended termini for ligation, restriction enzyme digestion to provide for appropriate termini, filling-in of cohesive ends as appropriate, alkaline phosphatase treatment to avoid undesirable joining, and enzymatic ligation. The fusion gene can be synthesized by conventional techniques including automated DNA synthesizers. Alternatively, PCR amplification of gene fragments can be carried out using anchor primers, which give rise to complementary overhangs between two consecutive gene fragments which can subsequently be annealed and reamplified to generate a chimeric gene sequence (see, for example, Current Protocols in Molecular Biology, eds. Ausubel et al. John Wiley & Sons (1992)). Moreover, many expression vectors are commercially available that already encode a fusion moiety (e.g., a GST polypeptide). The nucleic acid molecule of the invention can be cloned into such an expression vector such that the fusion moiety is linked in-frame to the encoded protein.

[48279] Furthermore, folding simulations and computer redesign of structural motifs of the protein of the invention can be performed using appropriate computer programs (Olszewski, Proteins 25, 286 (1996); Hoffman, Comput. Appl. Biosci. 11, 675 (1995)). Computer modeling of protein folding can be used for the conformational and energetic analysis of detailed peptide and protein models (Monge, J. Mol. Biol. 247, 995 (1995); Renouf, Adv. Exp. Med. Biol. 376, 37 (1995)). The appropriate programs can be used for the identification of interactive sites the polypeptide of the invention or polypeptides used in the process of the invention and its substrates or binding factors or other interacting proteins by computer assistant searches for complementary peptide sequences (Fassina, Immunomethods 114 (1994)). This can be used to identify motifs and domains of the polypeptides according to the present invention or used in the process of the present invention. Further appropriate computer systems for the design of protein and peptides are described in the prior art, for example in Berry, Biochem. Soc. Trans. 22, 1033 (1994); Wodak, Ann. N.Y. Acad. Sci. 501, 1 (1987); Pabo, Biochemistry 25, 5987 (1986). The results obtained from the above-described computer analysis can be used for, e.g., the preparation of peptidomimetics of the protein of the invention or fragments thereof. Such pseudopeptide analogues of the natural amino acid sequence of the protein may very efficiently mimic the parent protein (Benkirane, J. Biol. Chem. 271, 33218 (1996)). For example, the replacement of Gly-Gly in a protein of the present invention or a fragment thereof by the easily available achiral omega-amino acid delta-amino valeric acid results in the substitution of —CH₂CONHCH₂— by CH₂CH₂CH₂CH₂—, thereby providing a replacement of an amido group by an ethylen group, and a convenient strategy for constructing a peptidomimetic (Banerjee, Biopolymers 39, 769 (1996)).

[48280] Furthermore, a three-dimensional and/or crystallographic structure of the protein of the invention or used in the process of the present invention and the identification of motifs and/or interactive sites of the polypeptide of the invention or used in the process of the present invention and its substrates or binding factors can be used for the design of mutants with modulated binding or turnover activities. For example, the active center of the polypeptide of the present invention can be modeled and amino acids participating in the catalytic reaction can be modulated to increase or decrease the binding of the substrate to activate or improve the polypeptide. The identification of the active center, respective motifs and the amino acids involved in the catalytic reaction facilitates the screening for mutants having an increased activity.

[48281] Another embodiment of the invention relates to an antibody, which binds specifically to the polypeptide according to the invention or a portion thereof, i.e. specific fragments or epitopes of such a polypeptide.

[48282] The antibodies of the invention can be used to identify and isolate the polypeptide according to the invention in any organism, preferably microorganism or plants. These antibodies can be monoclonal antibodies, polyclonal antibodies or synthetic antibodies as well as fragments of antibodies, such as Fab, Fv or scFv fragments etc. Antibodies can be made by many well-known methods (see, e.g. Harlow and Lane, “Antibodies; A Laboratory Manual”, Cold Spring Harbor Laboratory, Cold Spring Harbor, N.Y., (1988)). Briefly, purified antigen can be injected into an animal in an amount and in intervals sufficient to elicit an immune response.

[48283] Antibodies can either be purified directly, or spleen cells can be obtained from the animal. The cells can then be fused with an immortal cell line and screened for antibody secretion. The antibodies can be used to screen nucleic acid clone libraries for cells secreting the antigen. Those positive clones can then be sequenced. See, for example, Kelly et al., Bio/Technology 10, 163 (1992); Bebbington et al., Bio/Technology 10, 169 (1992).

[48284] As the nucleic acid molecules of the invention and/or the expression thereof is related to the synthesis of the respective fine chemical alpha-tocopherol, or gamma-tocopherol its function as a probe extends to the detection of microorganisms, plant tissues, plants, plant variets, plant ecotypes or plant genera with varying, advantageously increased, capability or potential for synthesis of the respective fine chemical alpha-tocopherol, or gamma-tocopherol.

[48285] Therefore in one embodiment the present invention relates to a method for analyzing the capability or potential of a plant tissue, a plant, a plant variety or ecotype to produce the respective fine chemical alpha-tocopherol, or gamma-tocopherol by using the respective antibody of the invention as a probe to detect the amount of the polypeptide encoded by said nucleic acid molecule of the invention in a non-human organism in comparison to another organism.

[48286] Therefore in one embodiment the invention relates to a method to probe a non-human organism for its capability for the production of the respective fine chemical comprising the steps of
[48287] a) analyzing the sequence and/or the expression of the respective nucleic acid molecule of the invention in least two non-human organisms which differ in the capability to produce the respective fine chemical;
[48288] b) associate the different sequence and/or expression level of the nucleic acid molecules of the invention with their different capability to produce the respective fine chemical;
[48289] c) analyze the sequence and/or the expression of the nucleic acid molecule of the invention in at least a third non-human organism;
[48290] d) predict the capability of the at least third organism to produce the respective fine chemical based by comparing the sequence and/or expression of the nucleic acid of the invention to the sequences and/or expression levels of the nucleic acid molecule of the invention of the at least two organisms analyzed in step a.

[48291] The phrases “selectively binds” and “specifically binds” with the polypeptide refer to a binding reaction that is determinative of the presence of the polypeptide in a heterogeneous population of polypeptides and other biologics. Thus, under designated immunoassay conditions, the specified antibodies bound to a particular polypeptide do not bind in a significant amount to other polypeptides present in the sample. Selective binding of an antibody under such conditions may require an antibody that is selected for its specificity for a particular polypeptide. A variety of immunoassay formats may be used to select antibodies that selectively bind with a particular polypeptide. For example, solid-phase ELISA immunoassays are routinely used to select antibodies selectively immunoreactive with a polypeptide. See Harlow and Lane, “Antibodies, A Laboratory Manual,” Cold Spring Harbor Publications, New York, (1988), for a description of immunoassay formats and conditions that could be used to determine selective binding.

[48292] In some instances, it is desirable to prepare monoclonal antibodies from various hosts. A description of techniques for preparing such monoclonal antibodies may be found in Stites et al., eds., “Basic and Clinical Immunology,” (Lange Medical Publications, Los Altos, Calif., Fourth Edition) and references cited therein, and in Harlow and Lane, “Antibodies, A Laboratory Manual,” Cold Spring Harbor Publications, New York (1988).

[48293] Gene expression in non-human organism, like microorganism or plants, especially plants, is regulated by the interaction of protein transcription factors with specific nucleotide sequences within the regulatory region of a gene. One example of transcription factors are polypeptides that contain zinc finger (ZF) motifs. Each ZF module is approximately 30 amino acids long and folds around a zinc ion. The DNA recognition domain of a ZF protein is an α-helical structure that inserts into the major groove of the DNA double helix. The module contains three amino acids that bind to the DNA with each amino acid contacting a single base pair in the target DNA sequence. ZF motifs are arranged in a modular repeating fashion to form a set of fingers that recognize a contiguous DNA sequence. For example, a three-fingered ZF motif will recognize 9 bp of DNA. Hundreds of proteins have been shown to contain ZF motifs with between 2 and 37 ZF modules in each protein (Isalan M. et al., Biochemistry 37 (35), 12026 (1998); Moore M. et al., Proc. Natl. Acad. Sci. USA 98 (4), 1432 (2001) and Moore M. et al., Proc. Natl. Acad. Sci. USA 98 (4), 1437 (2001); U.S. Pat. No. 6,007,988 and U.S. Pat. No. 6,013,453).

[48294] The regulatory region of a gene contains many short DNA sequences (cis-acting elements) that serve as recognition domains for transcription factors, including ZF proteins. Similar recognition domains in different genes allow the coordinate expression of several genes encoding enzymes in a metabolic pathway by common transcription factors. Variation in the recognition domains among members of a gene family facilitates differences in gene expression within the same gene family, for example, among tissues and stages of development and in response to environmental conditions.

[48295] Typical ZF proteins contain not only a DNA recognition domain but also a functional domain that enables the ZF protein to activate or repress transcription of a specific gene. Experimentally, an activation domain has been used to activate transcription of the target gene (U.S. Pat. No. 5,789,538 and patent application WO 95/19431), but it is also possible to link a transcription repressor domain to the ZF and thereby inhibit transcription (WO 00/47754 and WO 01/002019). It has been reported that an enzymatic function such as nucleic acid cleavage can be linked to the ZF (WO 00/20622).

[48296] The invention provides a method that allows one skilled in the art to isolate the regulatory region of one or more FCRP encoding genes from the genome of a non-human organism, preferably a plant cell and to design zinc finger transcription factors linked to a functional domain that will interact with the regulatory region of the gene. The interaction of the zinc finger protein with the gene can be designed in such a manner as to alter expression of the gene and preferably thereby to confer the production or the increased production of the fine chemical as compared to a corresponding, e.g. non-transformed, wild type non-human organism, like a microorganism or a plant cell, plant or part thereof.

[48297] A further embodiment of the invention also relates to a method for the generation of a transgenic host or host cell, e.g. a eukaryotic or prokaryotic cell, preferably a transgenic microorganism, a transgenic plant cell or a transgenic plant tissue or a transgenic plant, which comprises introducing, into the plant cell, the plant or a part thereof , the nucleic acid molecule according to the invention, the nucleic acid construct according to the invention or the vector according to the invention or the expression cassette according to the invention.

[48298] A further embodiment of the invention also relates to a method for the stable generation of a host or host cell, prokaryotic or eukaryotic cell, preferably a transgenic microorganism such as a transgenic algae, a transgenic plant cell or a transgenic plant or a transgenic part thereof, which comprises introducing, into the plant cell, the plant or a part thereof, the nucleic acid construct according to the invention, the vector according to the invention, the expression cassette according to the invention, or the nucleic acid molecule according to the invention, whereby the introduction of the nucleic acid molecule, nucleic acid construct, expression cassette and/or vector is in such manner that the transformants are stable during the propagation of the host in respect of the introduced nucleic acid molecules, nucleic acid construct, expression cassette and/or vector.

[48299] A further embodiment of the invention also relates to a method for the transient generation of a host or host cell, prokaryotic or eukaryotic cell, preferably a transgenic microorganism such as a transgenic algae, a transgenic plant cell or a transgenic plant or a transgenic part thereof, which comprises introducing, into the plant cell, the plant or a part thereof, the nucleic acid construct according to the invention, the vector according to the invention, the expression cassette according to the invention or the nucleic acid molecule according to the invention, whereby the introduced nucleic acid molecule, nucleic acid construct, expression cassette and/or vector is not integrated into the genome of the host or host cell. Therefore the transformants are not stable during the propagation of the host in respect of the introduced nucleic acid molecules, nucleic acid construct, expressions cassette and/or vector.

[48300] In the process according to the invention, transgenic non-human organisms are also to be understood as meaning—if they take the form of plants—plant cells, plant tissues, plant organs such as root, shoot, stem, seed, flower, tuber or leaf, or intact plants which are grown for the production of the fine chemical.

[48301] Growing is to be understood as meaning for example culturing the transgenic plant cells, plant tissue or plant organs on or in a nutrient medium or the intact plant or part thereof on or in a substrate, for example in hydroponic culture, potting compost or on a field soil.

[48302] In a further advantageous embodiment of the process, the nucleic acid molecules can be expressed in single-celled plant cells (such as algae), see Falciatore et al., Marine

[48303] Biotechnology 1 (3), 239 (1999), and references cited therein, and plant cells from higher plants (for example spermatophytes such as crops). Examples of plant expression vectors encompass those which are described in detail herein or in D. Becker, Plant Mol. Biol. 20,1195 (1992), M.W Bevan, [Nucl. Acids Res. 12, 8711(1984), and in “Vectors for Gene Transfer in Higher Plants” in: Transgenic Plants, Vol. 1, Engineering and Utilization, eds. S. D. Kung and R. Wu, Academic Press, 1993, pp. 15-38]. An overview of binary vectors and their use is also found in R. Hellens, Trends in Plant Science,5 (10), 446 (2000).

[48304] Vector DNA can be introduced into prokaryotic or eukaryotic cells via conventional transformation or transfection techniques. The terms “transformation” and “transfection” include conjugation and transduction and, as used in the present context, are intended to encompass a multiplicity of prior-art methods for introducing foreign nucleic acid molecules (for example DNA) into a host cell, including calcium phosphate coprecipitation or calcium chloride coprecipitation, DEAE-dextran-mediated transfection, PEG-mediated transfection, lipofection, natural competence, chemically mediated transfer, electroporation or particle bombardment. Suitable methods for the transformation or transfection of host cells, including plant cells, can be found in Sambrook et al. (Molecular Cloning: A Laboratory Manual., 2^{nd} Ed., Cold Spring Harbor Laboratory, Cold Spring Harbor Laboratory Press, Cold Spring Harbor, N.Y., 1989) and in other laboratory handbooks such as Methods in Molecular Biology, 1995, Vol. 44, Agrobacterium protocols, eds. Gartland and Davey, Humana Press, Totowa, N.J.

[48305] The above-described methods for the transformation and, if desired, regeneration of plants from plant cells, plant tissues or parts of a plant are exploited for transient or stable transformation of plants. Suitable methods are the transformation of protoplasts by polyethylene-glycol-induced DNA uptake, the biolistic method with the gene gun—known as the particle bombardment method—, electroporation, the incubation of dry embryos in DNA-containing solution, microinjection and the Agrobacterium-mediated gene transfer. The above-mentioned methods are described for example in B. Jenes, Techniques for Gene Transfer, in: Transgenic Plants, Vol. 1, Engineering and Utilization, edited by Kung S.D. and Wu R., Academic Press, pp. 128-143 (1993) and in Potrykus, Annu. Rev. Plant Physiol. Plant Molec. Biol. 42, 205 (1991). The construct to be expressed is preferably cloned into a vector, which is suitable for transforming Agrobacterium tumefaciens, for example pBin19 (Bevan, Nucl. Acids Res. 12, 8711 (1984)). Agrobacteria transformed with such a vector can then be used in the known manner for the transformation of plants, in particular crop plants, such as, for example, tobacco plants, for example by bathing scarified leaves or leaf segments in an agrobacterial solution and subsequently culturing them in suitable media. The transformation of plants with Agrobacterium tumefaciens is described for example by Hofgen and Willmitzer in Nucl. Acid Res. 16, 9877 (1988) or known from, inter alia, White F.F., “Vectors for Gene Transfer in Higher Plants” in Transgenic Plants, Vol. 1, Engineering and Utilization, edited by Kung S. D. and Wu R., Academic Press, 1993, pp. 15-38. Alternatively the construct to be expressed can be cloned into vectors suitable for plastid transformation, as for example described in WO 2004/029256, WO 20040/04445 or Dufourmantel et al., Plant Mol. Biol. 55, 479 (2004).

[48306] To select for the successful transfer of the nucleic acid molecule, vector or nucleic acid construct of the invention according to the invention into a host organism, it is advantageous to use marker genes as have already been described above in detail. It is known of the stable or transient integration of nucleic acids into plant cells that only a minority of the cells takes up the foreign DNA and, if desired, integrates it into its genome, depending on the expression vector used and the transfection technique used. To identify and select these integrants, a gene encoding for a selectable marker (as described above, for example resistance to antibiotics) is usually introduced into the host cells together with the gene of interest. Preferred selectable markers in plants comprise those, which confer resistance to an herbicide such as glyphosate or gluphosinate. Other suitable markers are, for example, markers, which encode genes involved in biosynthetic pathways of, for example, sugars or amino acids, such as R-galactosidase, ura3 or ilv2. Markers, which encode genes such as luciferase, gfp or other fluorescence genes, are likewise suitable. These markers and the aforementioned markers can be used in mutants in which these genes are not functional since, for example, they have been deleted by conventional methods. Furthermore, nucleic acid molecules, which encode a selectable marker, can be introduced into a host cell on the same vector as those, which encode the polypeptides of the invention or used in the process or else in a separate vector. Cells which have been transfected stably with the nucleic acid introduced can be identified for example by selection (for example, cells which have integrated the selectable marker survive whereas the other cells die).

[48307] Since the marker genes, as a rule specifically the gene for resistance to antibiotics and herbicides, are no longer required or are undesired in the transgenic host cell once the nucleic acids have been introduced successfully, the process according to the invention for introducing the nucleic acids advantageously employs techniques which enable the removal, or excision, of these marker genes. One such a method is what is known as cotransformation. The cotransformation method employs two vectors simultaneously for the transformation, one vector bearing the nucleic acid according to the invention and a second bearing the marker gene(s). A large proportion of transformants receives or, in the case of plants, comprises (up to 40% of the transformants and above), both vectors. In case of transformation with Agrobacteria, the transformants usually receive only a part of the vector, the sequence flanked by the T-DNA, which usually represents the expression cassette. The marker genes can subsequently be removed from the transformed plant by performing crosses. In another method, marker genes integrated into a transposon are used for the transformation together with desired nucleic acid (known as the Ac/Ds technology). The transformants can be crossed with a transposase resource or the transformants are transformed with a nucleic acid construct conferring expression of a transposase, transiently or stable. In some cases (approx. 10%), the transposon jumps out of the genome of the host cell once transformation has taken place successfully and is lost. In a further number of cases, the transposon jumps to a different location. In these cases, the marker gene must be eliminated by performing crosses. In microbiology, techniques were developed which make possible, or facilitate, the detection of such events. A further advantageous method relies on what are known as recombination systems, whose advantage is that elimination by crossing can be dispensed with. The best-known system of this type is what is known as the Cre/lox system. Crel is a recombinase, which removes the sequences located between the loxP sequences. If the marker gene is integrated between the loxP sequences, it is removed, once transformation has taken place successfully, by expression of the recombinase. Further recombination systems are the HI N/H IX, FLP/FRT and REP/STB system (Tribble et al., J. Biol. Chem., 275, 22255 (2000); Velmurugan et al., J. Cell Biol., 149, 553 (2000)). A site-specific integration into the plant genome of the nucleic acid sequences according to the invention is possible. Naturally, these methods can also be applied to microorganisms such as yeast, fungi or bacteria. Also methods for the production of marker-free plastid transformants using a transiently cointegrated selection gene have been described for example by Koop et al., Nature Biotechology, 22 (2), 225 (2004).

[48308] Agrobacteria transformed with an expression vector according to the invention may also be used in the manner known per se for the transformation of plants such as experimental plants like Arabidopsis or crop plants, such as, for example, cereals, maize, oats, rye, barley, wheat, soya, rice, cotton, sugarbeet, canola, sunflower, flax, hemp, potato, tobacco, tomato, carrot, bell peppers, oilseed rape, tapioca, cassava, arrow root, tagetes, alfalfa, lettuce and the various tree, nut, and grapevine species, in particular oil-containing crop plants such as soya, peanut, castor-oil plant, sunflower, maize, cotton, flax, oilseed rape, coconut, oil palm, safflower (Carthamus tinctorius) or cocoa beans, or in particular crop plants, like cereals, maize, oats, rye, barley, wheat, soya, rice, cotton, sugarbeet, canola, sunflower, potato or oilseed rape, for example by bathing scarified leaves or leaf segments in an agrobacterial solution and subsequently growing them in suitable media.

[48309] In addition to the transformation of somatic cells, which then have to be regenerated into intact plants, it is also possible to transform the cells of plant meristems and in particular those cells which develop into gametes. In this case, the transformed gametes follow the natural plant development, giving rise to transgenic plants. Thus, for example, seeds of Arabidopsis are treated with agrobacteria and seeds are obtained from the developing plants of which a certain proportion is transformed and thus transgenic (Feldman K. A. and Marks M. D., Mol. Gen. Genet. 208, 274 (1987), Feldmann K . in: Koncz C., Chua N.-H. and Shell J., eds., “Methods in Arabidopsis Research”, Word Scientific, Singapore, (1992) pp. 274-289). Alternative methods are based on the repeated removal of the influorescences and incubation of the excision site in the center of the rosette with transformed agrobacteria, whereby transformed seeds can likewise be obtained at a later point in time (Chang, Plant J., 5, 551 (1994), Katavic, Mol. Gen. Genet. 245, 363 (1994)). However, an especially effective method is the vacuum infiltration method with its modifications such as the “floral dip” method. In the case of vacuum infiltration of Arabidopsis, intact plants under reduced pressure are treated with an agrobacterial suspension (Bechthold N., C. R. Acad. Sci. Paris Life Sci, 316, 1194 (1993)), while in the case of the” floral dip” method the developing floral tissue is incubated briefly with a surfactanttreated agrobacterial suspension (Clough S. J., and Bent A. F., Plant J. 16, 735 (1998)). A certain proportion of transgenic seeds are harvested in both cases, and these seeds can be distinguished from non-transgenic seeds by growing under the above-described selective conditions. In addition the stable transformation of plastids is of advantages because plastids are inherited maternally in most crops reducing or eliminating the risk of transgene flow through pollen. The transformation of the chloroplast genome is generally achieved by a process, which has been schematically displayed in Klaus et al., (Nature Biotechnology 22 (2), 225 (2004)). Briefly the sequences to be transformed are cloned together with a selectable marker gene between flanking sequences homologous to the chloroplast genome. These homologous flanking sequences direct site specific integration into the plastome. Plastidal transformation has been described for many different plant species and an overview can be taken from Bock R., J. Mol. Biol. 312 (3), 425 (2001) or Maliga P., Trends Biotechnol. 21, 20 (2003). Further biotechnological progress has recently been reported in form of marker free plastid transformants, which can be produced by a transient cointegrated maker gene (Klaus et al., Nature Biotechnology 22 (2), 225 (2004)).

[48310] The genetically modified plant cells can be regenerated via all methods with which the skilled worker is familiar. Suitable methods can be found in the above-mentioned publications by Kung S. D. and Wu R., Potrykus or Hofgen and Willmitzer.

[48311] Accordingly, the present invention thus also relates to a plant cell comprising the nucleic acid construct according to the invention, the expression cassette according to the invention, the nucleic acid molecule according to the invention or the vector according to the invention, as well as a process to generate such a plant cell.

[48312] Accordingly the present invention relates to any cell transgenic for any nucleic acid characterized as part of the invention, e.g. conferring the increase of the respective fine chemical alpha-tocopherol, or gamma-tocopherol in a cell or a non-human organism or a part thereof, e.g. the nucleic acid molecule of the invention, the nucleic acid construct of the invention, the vector of the invention, the expression cassette according to the invention, or a nucleic acid molecule encoding the polypeptide of the invention, e.g. encoding a polypeptide having an activity as the protein as shown in the respective line in Table II, application no. 7, column 3. Due to the above-mentioned activity the respective fine chemical alpha-tocopherol, or gamma-tocopherol content in a cell or a non-human organism is increased. For example, due to modulation or manipulation, the cellular activity is increased, in a preferred embodiment in organelles such as plastids or mitochondria, e.g. due to an increased expression or specific activity or specific targeting of the subject matters of the invention in a cell or a non-human organism or a part thereof especially in organelles such as plastids or mitochondria, or in another embodiment in the cytosol. Transgenic for a polypeptide having a protein or a protein activity means herein that due to modulation or manipulation of the genome, the activity of protein as shown in the respective line in Table II, application no. 7, column 3 or a protein as shown in the respective line in Table II, application no. 7, column 3-like activity is increased in the cell or non-human organism or part thereof, especially in organelles such as plastids or mitochondria, or especially in the cytosol. Examples are described above in context with the process of the invention.

[48313] “Transgenic”, for example regarding a nucleic acid molecule, a nucleic acid construct, an expression cassette or a vector comprising said nucleic acid molecule or a non-human organism transformed with said nucleic acid molecule, nucleic acid construct, expression cassette or vector, refers to all those subjects originating by recombinant methods in which either
[48314] a) the nucleic acid sequence, or
[48315] b) a genetic control sequence linked operably to the nucleic acid sequence, for example a promoter, or
[48316] c) (a) and (b);

[48317] are not located in their natural genetic environment or have been modified by recombinant methods, an example of a modification being a substitution, addition, deletion, inversion or insertion of one or more nucleotide residues. Natural genetic environment refers to the natural chromosomal locus in the organism of origin, or to the presence in a genomic library. In the case of a genomic library, the natural genetic environment of the nucleic acid sequence is preferably retained, at least in part. The environment flanks the nucleic acid sequence at least at one side and has a sequence of at least 50 bp, preferably at least 500 bp, especially preferably at least 1000 bp, very especially preferably at least 5000 bp, in length.

[48318] A naturally occurring expression cassette—for example the naturally occurring combination of the promoter of the gene encoding a protein as shown in the respective line in Table II, application no. 7, column 5 or 8, preferably the coding region thereof, or fragments or homologs thereof with the corresponding encoding gene—becomes a transgenic expression cassette when it is modified by non-natural, synthetic “artificial” methods such as, for example, mutagenesis. Such methods have been described (U.S. Pat. No. 5,565,350; WO 00/15815; also see above).

[48319] Further, the plant cell, plant or a part thereof can also be transformed such that further enzymes and proteins are (over)expressed which expression supports an increase of the fine chemical.

[48320] However, transgenic also means that the nucleic acids according to the invention are located at their natural position in the genome of a non-human organism, but that the sequence has been modified in comparison with the natural sequence and/or that the regulatory sequences of the natural sequences have been modified. Preferably, transgenic/recombinant is to be understood as meaning the transcription of the nucleic acids used in the process according to the invention occurs at a non-natural position in the genome, that is to say the expression of the nucleic acids is homologous or, preferably, heterologous. This expression can be performed with transiently transformed organism or with stably transformed organism.

[48321] Transgenic plants comprising the respective fine chemical(s) synthesized in the process according to the invention can be marketed directly without isolation of the fine chemical synthesized. In the process according to the invention, plants are understood as meaning all plant parts, plant organs such as leaf, stalk, root, tubers or seeds or propagation material or harvested material or the intact plant. In this context, the seed encompasses all parts of the seed such as the seed coats, epidermal cells, seed cells, endosperm or embryonic tissue. The fine chemical produced in the process according to the invention may, however, also be isolated from the plant. In case of alpha-tocopherol, or gamma-tocopherol this can be in free form or bound to proteins. Fine chemical(s) produced by this process can be harvested by harvesting the non-human organisms either from the culture in which they grow or from the field. For example, this can be done via squeezing, grinding and/or extraction, salt precipitation and/or ion-exchange chromatography of the plant parts, preferably the plant seeds, plant fruits, plant tubers and the like.

[48322] In a further embodiment, the present invention relates to a process for the generation of a microorganism, comprising the introduction, into the microorganism or parts thereof, of the nucleic acid construct of the invention, or the expression cassette of the invention, or the vector of the invention or the nucleic acid molecule of the invention.

[48323] In another embodiment, the present invention relates also to a transgenic microorganism comprising the nucleic acid molecule of the invention, the nucleic acid construct of the invention, or the expression cassette of the invention, or the vector of the invention. Appropriate microorganisms have been described herein before under source organism, preferred are in particular aforementioned strains suitable for the production of fine chemicals.

[48324] In principle all microorganisms can be used as host organism especially the ones mentioned under source organism above. It is advantageous to use in the process of the invention transgenic microorganisms such as algae selected from the group of the families Bacillariophyceae, Charophyceae, Chlorophyceae, Chrysophyceae, Craspedophyceae, Euglenophyceae, Prymnesiophyceae, Phaeophyceae, Dinophyceae, Rhodophyceae, Xanthophyceae, Prasinophyceae and its described species and strains. Examples for such algae are the following species Isochrysis galbana, Chaetoceros gracilis, Chaetoceros calcitrans, Tetraselmis suecica, Thalassiosira pseudonana, Pavlova lutheri, Isochrysis sp., Skeletonema costatum, Chroomonas salina, Dunaliella tertiolecta, Chaetoceros simplex, Chaetoceros muelleri, Nannochloropsis sp., Cyclotella sp., Phaeodactylum tricornutum, Tetraselmis chui, Pavlova salina, Dicruteria sp., Tetraselmis levis, Dunaliella perva, Thalassiosira weissfloggii, Chlamydomonas sp., Chlorella vulgaris, Neochloris oleoabundans or Chlorella sp, which are only small overview.

[48325] The process of the invention is, when the host organisms are microorganisms, advantageously carried out at a temperature between 0° C. and 95° C., preferably between 10° C. and 85° C., particularly preferably between 15° C. and 75° C., very particularly preferably between 15° C. and 45° C. The pH is advantageously kept at between pH 4 and 12, preferably between pH 6 and 9, particularly preferably between pH 7 and 8, during this. The process of the invention can be operated batch wise, semi batch wise or continuously. A summary of known cultivation methods is to be found in the textbook by Chmiel (Bioprozeβtechnik 1. Einführung in die Bioverfahrenstechnik (Gustav Fischer Verlag, Stuttgart, 1991)) or in the textbook by Storhas (Bioreaktoren and periphere Einrichtungen (Vieweg Verlag, Braunschweig/Wiesbaden, 1994)). The culture medium to be used must meet the requirements of the respective strains in a suitable manner. Descriptions of culture media for various microorganisms are present in the handbook “Manual of Methods for General Bacteriology” of the American Society for Bacteriology (Washington D.C., USA, 1981) and for algae in McLellan et al. (“Maintenance of algae and protozoa”, in “Maintenance of Microorganisms”, eds. Doyle A. and Kirsop B., London pp. 183-208 (1991)), Provasoli et al. (“Artificial media for freshwater algae: problems and suggestions”, in “The Ecology of Algae”, eds. Hartman R. T., Pymatunig Laboratory of Field Biology Special publication 2, University of Pittsburgh, pp. 84-96 (1960)) or Starr R. C. (“Algal cultures-sources and methods of cultivation”, in “Photosynthesis Part A, Methods in Enzymology 23”, eds. San Pietro A., N.Y., pp 29-53 (1971)). These media, which can be employed according to the invention include, as described above, usually one or more carbon sources, nitrogen sources, inorganic salts, vitamins and/or trace elements. Preferred carbon sources are sugars such as mono-, di- or polysaccharides. Examples of very good carbon sources are glucose, fructose, mannose, galactose, ribose, sorbose, ribulose, lactose, maltose, sucrose, raffinose, starch or cellulose. Sugars can also be added to the media via complex compounds such as molasses, or other byproducts of sugar refining. It may also be advantageous to add mixtures of various carbon sources. Other possible carbon sources are oils and fats such as, for example, soybean oil, sunflower oil, peanut oil and/or coconut fat, fatty acids such as, for example, palmitic acid, stearic acid and/or linoleic acid, alcohols and/or polyalcohols such as, for example, glycerol, methanol and/or ethanol and/or organic acids such as, for example, acetic acid and/or lactic acid. Nitrogen sources are usually organic or inorganic nitrogen compounds or materials, which contain these compounds. Examples of nitrogen sources include ammonia in liquid or gaseous form or ammonium salts such as ammonium sulfate, ammonium chloride, ammonium phosphate, ammonium carbonate or ammonium nitrate, nitrates, urea, amino acids or complex nitrogen sources such as corn steep liquor, soybean meal, soybean protein, yeast extract, meat extract and others. The nitrogen sources may be used singly or as a mixture. Inorganic salt compounds, which may be present in the media include the chloride, phosphorus or sulfate salts of calcium, magnesium, sodium, cobalt, molybdenum, potassium, manganese, zinc, copper and iron. For the cultivation of algae the so called soilwater media are preferred. Such media are composed of soil extract, trace element solutions, filtered seawater, a nitrogen source and a buffer substance. Such culture media are well known by the skilled person and are available for example from culture collections such as the culture collection of algae (SAG) at the University of Gottingen, the Culture collection of algae in Coimbra, Portugal (ACOI) or the culture collection of algae (UTEX) in Tex., USA.

[48326] For preparing sulfur-containing amino acids, in particular methionine or cystein, it is possible to use as sulfur source inorganic sulfur-containing compounds such as, for example, sulfates, sulfites, dithionites, tetrathionates, thiosulfates, sulfides or else organic sulfur compounds such as mercaptans and thiols.

[48327] It is possible to use as phosphorus source phosphoric acid, potassium dihydrogenphosphate or dipotassium hydrogenphosphate or the corresponding sodium-containing salts. Chelating agents can be added to the medium in order to keep the metal ions in solution. Particularly suitable chelating agents include dihydroxyphenols such as catechol or protocatechuate, or organic acids such as citric acid. The fermentation media employed according to the invention for cultivating microorganisms normally also contain other growth factors such as vitamins or growth promoters, which include, for example, biotin, riboflavin, thiamine, folic acid, nicotinic acid, pantothenate and pyridoxine. All media components are sterilized either by heat (1.5 bar and 121° C. for 20 min) or by sterilizing filtration. The components can be sterilized either together or, if necessary, separately. All media components can be present at the start of the cultivation or optionally be added continuously or batch wise. The temperature of the culture is normally between 0° C. and 55° C., preferably at 10° C. to 30° C., and can be kept constant or changed during the experiment. The pH of the medium should be in the range from 3.5 to 8.5, preferably in the range between 5 to 7. The pH for the cultivation can be controlled during the cultivation by adding basic compounds such as sodium hydroxide, potassium hydroxide, ammonia or aqueous ammonia or acidic compounds such as phosphoric acid or sulfuric acid. Foaming can be controlled by employing antifoams such as, for example, fatty acid polyglycol esters. In addition the stability of plasmids can be maintained by adding to the medium suitable substances having a selective effect, for example antibiotics, if the plasmids carry the genetic information to overcome the selective effect. Aerobic conditions are maintained by introducing oxygen or oxygen-containing gas mixtures such as, for example, ambient air into the culture. The temperature of the culture is normally from 20° C. to 45° C. and preferably from 25° C. to 40° C. The culture is continued until formation of the desired product is at a maximum. This aim is normally achieved within 10 hours to 160 hours.

[48328] The fermentation broths obtained in this way, normally have a dry matter content of 7.5 to 25% by weight. The fermentation broth can be processed further. Depending on requirements, the biomass can be removed entirely or partly by separation methods, such as, for example, centrifugation, filtration, decantation or a combination of these methods, from the fermentation broth or left completely in it. The fermentation broth can then be thickened or concentrated by known methods, such as, for example, with the aid of a rotary evaporator, thin-film evaporator, falling film evaporator, by reverse osmosis or by nanofiltration. This concentrated fermentation broth can then be worked up by freeze-drying, spray drying, spray granulation or by other processes.

[48329] In another embodiment, the present invention relates to a method of producing a transgenic non-human organism, especially a microorganism or a plant, with a FCRP coding nucleic acid, wherein expression of the nucleic acid(s) in the microorganism or a plant confers the production or the increased production of the fine chemical as compared to a wild type non-human organism comprising: (a) transforming a non-human cell with a vector comprising a FCRP encoding nucleic acid, and (b) generating from the non-human cell a transgenic non-human organism with production or enhanced production of the fine chemical.

[48330] The present invention relates also to a process according to the present invention whereby the produced fine chemical composition or the produced the fine chemical is isolated.

[48331] In this manner, more than 50% by weight, advantageously more than 60% by weight, preferably more than 70% by weight, especially preferably more than 80% by weight, very especially preferably more than 90% by weight, of the fine chemical produced in the process can be isolated. The resulting fine chemical can, if appropriate, subsequently be further purified, if desired mixed with other active ingredients such as vitamins, amino acids, carbohydrates, antibiotics and the like, and, if appropriate, formulated.

[48332] However, it is also possible to purify the fine chemical produced further with methods known by a person skilled in the art, like extraction, precipitation, crystallization etc. For this purpose, the product-containing composition is for example subjected to a chromatography on a suitable resin, in which case the desired product or the impurities are retained wholly or partly on the chromatography resin. These chromatography steps can be repeated if necessary, using the same or different chromatography resins. The skilled worker is familiar with the choice of suitable chromatography resins and their most effective use. The purified product can be concentrated by filtration or ultrafiltration and stored at a temperature at which the stability of the product is a maximum.

[48333] The identity and purity of the isolated compound(s) can be determined by prior art techniques. These include high performance liquid chromatography (HPLC), spectroscopic methods, mass spectrometry (MS), staining methods, thin-layer chromatography, NIRS, enzyme assay or microbiological assays. These analytical methods are summarized for example in: Patek et al., Appl. Environ. Microbiol. 60, 133 (1994), Malakhova et al., Biotekhnologiya 11, 27 (1996); Schmidt et al., Bioprocess Engineer. 19, 67 (1998), Ullmann's Encyclopedia of Industrial Chemistry (1996) Vol. A27, VCH, Weinheim, pp. 89-90, pp. 521-540, pp. 540-547, pp. 559 566, 575-581 and pp. 581-587, Michal G., “Biochemical Pathways: An Atlas of Biochemistry and Molecular Biology”, John Wiley and Sons (1999); Fallon A. et al. “Applications of HPLC in Biochemistry” in “Laboratory Techniques in Biochemistry and Molecular Biology”, Vol. 17 (1987).

[48334] The fine chemical of the invention can for example be analyzed advantageously via HPLC or GC separation methods and detected by MS or MSMS methods. The unambiguous detection for the presence of the fine chemical containing products can be obtained by analyzing recombinant organisms using analytical standard methods: GC, GC-MS or TLC, as described on several occasions by Christie and the references therein (1997, in: Advances on Lipid Methodology, Fourth Edition: Christie, Oily Press, Dundee, 119-169; 1998, Gaschromatographie-Massenspektrometrie-Verfahren [Gas chromatography/mass spectrometric methods], Lipide 33:343-353). The material to be analyzed can be disrupted by sonication, grinding in a glass mill, liquid nitrogen and grinding, cooking, or via other applicable methods; see also Biotechnology of Vitamins, Pigments and Growth Factors, Edited by Erik J. Vandamme, London, 1989, p.96 to 103.

[48335] The fine chemical obtained in the process are suitable as starting material for the synthesis of further products of value.

[48336] For example, in case of vitamins they can be used in combination with each other or alone for the production of pharmaceuticals, foodstuffs, animal feeds or cosmetics. The respective fine chemical can then be processed further directly into foodstuffs or animal feeds or for other applications, for example according to the disclosures made in U.S. Pat. No. 6,399,059: Thermally stable enzyme composition and method of preparing the same, U.S. Pat. No. 6,361,800: Multivitamin and mineral supplement , U.S. Pat. No. 6,348,200: Cosmetic composition, U.S. Pat. No. 6,338,854: Photoaging skin-care preparation and method of treating wrinkled skin, U.S. Pat. No. 6,323,188: Treatment and prevention of cardiovascular diseases, heart attack, and stroke, primary and subsequent, with help of aspirin and certain vitamins, U.S. Pat. No. 6,299,896: Multi-vitamin and mineral supplement, U.S. Pat. No. 6,262,279: Preparation of tocopherols, U.S. Pat. No. 6,362,221: Compositions containing natural lycopene and natural tocopherol, US 6,358,997: Tocopherol and tocotrienol compositions, U.S. Pat. No. 6,344,573: Process for extraction and concentration of liposoluble vitamins and provitamins, growth factors and animal and vegetable hormones from residues and by-products of industrialized animal and vegetable products, U.S. Pat. No. 6,242,227: Method of vitamin production, U.S. Pat. No. 6,207,187: Compositions based on tocopherols, U.S. Pat. No. 6,177,114: Refining of edible oil rich in natural carotenes and Vitamin E which are expressly incorporated herein by reference. The fermentation broth, fermentation products, plants or plant products can be purified as described in above mentioned applications or by other methods known to the person skilled in the art and described herein below.

[48337] Accordingly, the present invention relates a method for the production of a pharmaceuticals, food stuff, animal feeds, nutrients or cosmetics comprising the steps of the process according to the invention, including the isolation of the fine chemical produced or a composition produced comprising the fine chemical, and, if desired, formulating the product with a pharmaceutical acceptable carrier or formulating the product in a form acceptable for an application in agriculture or formulating the product in a form acceptable for an application as food stuff, animal feed, nutrient or cosmetic. A further embodiment according to the invention is the use of the fine chemical produced in the process or of the transgenic non-human organisms in animal feeds, foodstuffs, medicines, food supplements, cosmetics or pharmaceuticals.

[48338] In yet another aspect, the invention also relates to harvestable parts and to propagation material of the transgenic plants according to the invention which either contain transgenic plant cells expressing a nucleic acid molecule according to the invention or which contains cells which show an increased cellular activity of the polypeptide of the invention, e.g. an increased expression level or higher activity of the described protein.

[48339] Harvestable parts can be in principle any useful parts of a plant, for example, flowers, pollen, seedlings, tubers, leaves, stems, fruit, seeds, roots etc. Propagation material includes, for example, seeds, fruits, cuttings, seedlings, tubers, rootstocks etc. Preferred are seeds, fruits, seedlings or tubers as harvestable or propagation material.

[48340] The invention furthermore relates to the use of the transgenic non-human organisms according to the invention and of the cells, cell cultures, parts—such as, for example, roots, leaves and the like as mentioned above in the case of transgenic plant organisms—derived from them, and to transgenic propagation material such as seeds or fruits and the like as mentioned above, for the production of foodstuffs or feeding stuffs, pharmaceuticals or fine chemicals.

[48341] Further in another embodiment, the present invention relates to the use of the nucleic acid molecule of the invention or used in the method of the invention alone or in combination with other genes of the respective fine chemical synthesis for example of the vitamin E or its precursor 2,3-dimethyl-5-phytylquinol resp., in particular, of alpha- and/or gamma-tocopherol biosynthesis, the polypeptide of the invention or used in the method of the invention, the nucleic acid construct of the invention, the expression cassette of the invention, the vector of the invention, the plant or plant tissue or the host cell of the invention, for the production of plant resistant to a herbicide inhibiting eventually the production of the fine chemical.

[48342] Furthermore preferred is a method for the recombinant production of fine chemicals in non-human host organisms, wherein a non-human host organism is transformed with one of the above-described nucleic acid molecules or nucleic acid constructs, expression cassettes or vectors comprising one or more nucleic acid molecules, wherein said nucleic acid molecule participates in the biosynthesis of the desired fine chemical or encodes a polypeptide that catalyze the biosynthesis of the desired fine chemical, the transformed non-human host organism is cultured, and the desired fine chemical is isolated from the non-human organism and/or culture medium. In another embodiment s the additional production of further amino acids, tocopherols and tocotrienols and/or carotenoids or compositions comprising said compounds and/or of pharmaceuticals is preferred. The transformed non-human host organisms are cultured and the products are recovered from the non-human host organisms and/or the culture medium by methods known to the skilled worker or the non-human organism itself serves as food or feed or food or feed supplement. The production of pharmaceuticals such as, for example, antibodies or vaccines, is described by Hood E.E. et al., J, Curr. Opin. Biotechnol. 10 (4), 382 (1999), Ma J.K., Vine N.D., Curr. Top. Microbiol. Immunol. 236, 275 (1999).

[48343] In one embodiment, the present invention relates to a method for the identification of a gene product conferring the production of or an increase in the fine chemical production in a non-human cell, comprising the following steps:
[48344] (a) contacting, e.g. hybridizing, a, some or all nucleic acid molecules of a sample, e.g. cells, tissues, plants or microorganisms or a nucleic acid library, which can contain a candidate gene encoding a gene product conferring the production of or an increase in the fine chemical after expression, with the nucleic acid molecule of the present invention as shown in the respective line in column 5 or 8 of Table I A or B of application no. 7, preferably the coding region thereof, or a fragment or homolog thereof;
[48345] (b) identifying the nucleic acid molecules, which hybridize under relaxed stringent conditions with the nucleic acid molecule of the present invention in particular to the nucleic acid molecule sequence shown in the respective line in Table I, application no. 7, columns 5 or 8, preferably the coding region thereof, of a fragment or a homolog thereof, preferably in Table I B, application no. 7, columns 5 or 8, preferably the coding region thereof, of a fragment or a homolog thereof, and, optionally, isolating the full length cDNA clone or complete genomic clone;
[48346] (c) introducing the candidate nucleic acid molecules or a fragment thereof in host cells, preferably in a plant cell or a microorganism, appropriate for producing the fine chemical;
[48347] (d) expressing the identified nucleic acid molecules in the host cells for which the production of or the increased production of the fine chemical is desired;
[48348] (e) assaying the fine chemical level in the non-human host cells; and
[48349] (f) identifying the nucleic acid molecule and/or its gene product which expression confers the production of or an increase in the fine chemical level in the non-human host cell after expression compared to the wild type.

[48350] Relaxed hybridization conditions are: After standard hybridization procedures washing steps can be performed at low to medium stringency conditions usually with washing conditions of 40° -55° C. and salt conditions between 2×SSC and 0.2×SSC with 0.1% SDS in comparison to stringent washing conditions as e.g. 60° -68° C. with 0.1% SDS. Further examples can be found in the references listed above for the stringent hybridization conditions. Usually washing steps are repeated with increasing stringency and length until a useful signal to noise ratio is detected and depend on many factors as the target, e.g. its purity, GC-content, size etc, the probe, e.g. its length, is it a RNA or a DNA probe, salt conditions, washing or hybridization temperature, washing or hybridization time etc.

[48351] In another embodiment, the present invention relates to a method for the identification of a gene product conferring the production of or an increase in the fine chemical production in a cell, comprising the following steps:
[48352] (a) identifying a nucleic acid molecule of a non-human organism, which is at least 20%, 25%, 30%, 35%, 40%, 50%, 60%, 70%, 80%, 90%, 95%, 96%, 97%, 98%, 99%, 99.5% or more homolog to the nucleic acid molecule encoding a polypeptide comprising the polypeptide molecule as shown in the respective line in column 5 or 8 of Table II, application no. 7, or comprising a consensus sequence or a polypeptide motif as shown in the respective line in column 8 of Table IV, application no. 7, or being encoded by a nucleic acid molecule comprising a polynucleotide as shown in the respective line in column 5 or 8 of Table I, application no. 7, preferably the coding region thereof, or a homologue thereof as described herein, for example via homology search in a data bank;
[48353] (b) introducing the candidate nucleic acid molecule in non-human host cells, preferably in a plant cell or a microorganism, appropriate for producing the fine chemical;
[48354] (c) expressing the identified nucleic acid molecule in the non-human host cells;
[48355] (d) assaying the fine chemical level in the non-human host cells; and
[48356] (e) identifying the nucleic acid molecule and its gene product which expression confers the production of or an increase in the fine chemical level in the non-human host cell after expression compared to the wild type.

[48357] The nucleic acid molecules identified can then be used for the production of the fine chemical in the same way as the nucleic acid molecule of the present invention. Accordingly, in one embodiment, the present invention relates to a process for the production of the fine chemical, comprising (i) identifying a nucleic acid molecule according to aforementioned steps (a) to (f) or (a) to (e) and (ii) recovering the free or bound fine chemical from a non-human organism having an increased cellular activity of a polypeptide encoded by the nucleic acid molecule compared to a wild type and/or the respective culture medium.

[48358] Further, the nucleic acid molecules disclosed herein, in particular the nucleic acid molecules shown in the respective line in column 5 or 8 of Table I A or B of application no. 7, may be sufficiently homologous to the sequences of related species such that these nucleic acid molecules may serve as markers for the construction of a genomic map in related organism or for association mapping. Furthermore natural variation in the genomic regions corresponding to nucleic acids disclosed herein, in particular the nucleic acid molecule shown in the respective line in column 5 or 8 of Table I A or B, of application no. 7 or homologous thereof, may lead to variation in the activity of the proteins disclosed herein, in particular the proteins comprising polypeptides as shown in the respective lines in column 5 or 8 of Table II A or B, of application no. 7 or their homologous, or comprising the consensus sequence or the polypeptide motif as shown in the respective line in column 8 of Table IV, and in consequence in a natural variation of an increased fine chemical production.

[48359] In consequence natural variation eventually also exists in form of more active allelic variants leading already to a relative increase in the fine chemical. Different variants of the nucleic acid molecules disclosed herein, in particular the nucleic acid molecules comprising the nucleic acid molecules as shown in the respective line in column 5 or 8 of Table I A or B of application no. 7, preferably the coding region thereof, which corresponds to different levels of increase in fine chemical, e.g. different levels of increase in fine chemical, can be indentified and used for marker assisted breeding for an enhanced production of the fine chemical.

[48360] Natural variation may also exist in the regulatory regions, e.g. the promoters of the natural genes comprising the nucleic acid molecules as shown in the respective line column 5 or 8 of Table I A or B of application no. 7, preferably the coding region thereof, which can similarly correspond to different levels of increase in the fine chemical, e.g. different levels of increase in the fine chemical can be identified and used for marker assisted breeding for an enhanced production of the fine chemical.

[48361] Accordingly, the present invention relates to a method for breeding plants for the production of the fine chemical, comprising
[48362] (a) selecting a first plant variety with an increased production of the fine chemical, e.g. based on an increased expression of a nucleic acid molecule of the invention as disclosed herein, in particular of a nucleic acid molecule comprising a nucleic acid molecule as shown in the respective line in column 5 or 8 of Table I A or B of application no. 7, preferably the coding region thereof, or fragments or homologs thereof, or a polypeptide comprising a polypeptide as shown in the respective line in column 5 or 8 of Table II A or B of application no. 7, or fragments or homologs thereof, or comprising a consensus sequence or a polypeptide motif as shown in the respective line in column 8 of Table IV, or a homolog thereof, as described herein;
[48363] (b) associating the level of increased production of the fine chemical, with the expression level or the genomic structure of a gene encoding said polypeptide or said nucleic acid molecule;
[48364] (c) crossing the first plant variety with a second plant variety, which significantly differs in its level of fine chemical; and
[48365] (d) identifying, which of the offspring varieties has got increased production of the fine chemical by the expression level of said polypeptide or nucleic acid molecule or the genomic structure of the gene(s) encoding said polypeptide or nucleic acid molecule of the invention.

[48366] In one embodiment, the expression level of the gene according to step (b) is increased.

[48367] In another embodiment, the present invention relates to a method for the identification of a compound stimulating production of the fine chemical in a non-human organism, especially a microorganism or a plant, comprising:
[48368] (a) contacting the microorganism or plant cells which express the polypeptide of the present invention or its mRNA with a candidate compound under appropriate conditions or in case of plant cells under cell cultivation conditions;
[48369] (b) assaying the production of or an increase in expression of said polypeptide or said mRNA;
[48370] (c) comparing the expression level to a standard response made in the absence of said candidate compound; whereby, the production of or an increased expression over the standard indicates that the compound is stimulating production of the fine chemical.

[48371] Furthermore, in one embodiment, the present invention relates to a process for the identification of a compound conferring the production of or an increase in the fine chemical production in a non-human organism, especially a plant or microorganism, comprising the steps:
[48372] (a) culturing a cell or a part of a plant or a microorganism or maintaining a plant expressing the polypeptide according to the invention or a nucleic acid molecule encoding said polypeptide and a readout system capable of interacting with the polypeptide under suitable conditions which permit the interaction of the polypeptide with said readout system in the presence of a compound or a sample comprising a plurality of compounds and capable of providing a detectable signal in response to the binding of a compound to said polypeptide under conditions which permit the expression of said readout system and the polypeptide of the present invention or used in the process of the invention; and
[48373] (b) identifying if the compound is an effective agonist by detecting the presence or absence or increase of a signal produced by said readout system.

[48374] The screen for a gene product or an agonist conferring the production of or an increase in the fine chemical can be performed by growth of a non-human organism for example a microorganism in the presence of growth reducing amounts of an inhibitor of the synthesis of the fine chemical. Better growth, e.g. higher dividing rate or high dry mass in comparison to the control, e.g. with a gene product or an agonist conferring the production of or an increase in the fine chemical, under such conditions would identify a gene or gene product or an agonist conferring the production of or an increase in fine chemical.

[48375] Said compound may be chemically synthesized or microbiologically produced and/or comprised in, for example, samples, e.g., cell extracts from, e.g., plants, non-human animals or microorganisms, e.g. pathogens. Furthermore, said compound(s) may be known in the art but hitherto not known to be capable of suppressing or activating the polypeptide of the present invention. The reaction mixture may be a cell free extract or may comprise a cell or tissue culture. Suitable set ups for the method of the invention are known to the person skilled in the art and are, for example, generally described in Alberts et al., “Molecular Biology of the Cell”, third edition (1994), in particular Chapter 17. The compounds may be, e.g., added to the reaction mixture, culture medium, injected into the cell or sprayed onto the plant.

[48376] If a sample containing a compound is identified in the method of the invention, then it is either possible to isolate the compound from the original sample identified as containing the compound capable of activating or conferring the production of or an increase in the fine chemical in a non-human organism or part thereof, or one can further subdivide the original sample, for example, if it consists of a plurality of different compounds, so as to reduce the number of different compounds per sample and repeat the method with the subdivisions of the original sample. Depending on the complexity of the samples, the steps described above can be performed several times, preferably until the sample identified according to the method of the invention only comprises a limited number of or only one compound(s). Preferably said sample comprises compounds of similar chemical and/or physical properties. Preferably, the compound identified according to the above-described method or a respective “active” derivative thereof is further formulated in a form suitable for the application in plant breeding or plant cell and tissue culture.

[48377] The compounds which can be tested and identified according to a method of the invention may be expression libraries, e.g., cDNA expression libraries, peptides, proteins, nucleic acids, antibodies, small organic compounds, hormones, peptidomimetics, PNAs or the like (Milner, Nature Medicine 1, 879 (1995); Hupp, Cell 83, 237 (1995); Gibbs, Cell 79, 193 (1994) and references cited supra). Said compounds can also be functional derivatives or analogues of known inhibitors or activators. Methods for the preparation of chemical derivatives and analogues are well known to those skilled in the art and are described in, for example, Beilstein, Handbook of Organic Chemistry, Springer edition New York Inc., 175 Fifth Avenue, New York, N.Y. 10010 U.S.A. and Organic Synthesis, Wiley, New York, USA. Furthermore, said derivatives and analogues can be tested for their effects according to methods known in the art. Furthermore, peptidomimetics and/or computer aided design of appropriate derivatives and analogues can be used, for example, according to the methods described above. The non-human cell or tissue that may be employed in the method of the invention preferably is a non-human host cell, plant cell or plant tissue of the invention described in the embodiments hereinbefore.

[48378] Thus, in a further embodiment the invention relates to a compound obtained or identified according to the method for identifying an agonist of the invention said compound being an agonist of the polypeptide of the present invention or used in the process of the present invention.

[48379] Accordingly, in one embodiment, the present invention further relates to a compound identified by the method for identifying a compound of the present invention.

[48380] Said compound is, for example, a homolog of the polypeptide of the present invention. Homologs of the polypeptide of the present invention can be generated by mutagenesis, e.g., discrete point mutation or truncation of the polypeptide of the present invention. As used herein, the term “homolog” refers to a variant form of the protein, which acts as an agonist of the activity of the polypeptide of the present invention. An agonist of said protein can retain substantially the same, or a subset, of the biological activities of the polypeptide of the present invention. In particular, said agonist confers the increase of the expression level of the polypeptide of the present invention and/or the expression of said agonist in a non-human organisms or part thereof confers the increase of free and/or bound fine chemical in the non-human organism or part thereof.

[48381] In another embodiment, the invention relates to an antibody specifically recognizing the compound or agonist of the present invention.

[48382] The invention also relates to a diagnostic composition comprising at least one of the aforementioned nucleic acid molecules, expression cassettes, vectors, proteins, antibodies or compounds of the invention and optionally suitable means for detection.

[48383] The diagnostic composition of the present invention is suitable for the isolation of mRNA from a non-human cell and contacting the mRNA so obtained with a probe comprising a nucleic acid probe as described above under hybridizing conditions, detecting the presence of mRNA hybridized to the probe, and thereby detecting the expression of the protein in the non-human cell. Further methods of detecting the presence of a protein according to the present invention comprise immunotechniques well known in the art, for example enzyme linked immunoadsorbent assay. Furthermore, it is possible to use the nucleic acid molecules according to the invention as molecular markers or primers in plant breeding. Suitable means for detection are well known to a person skilled in the art, e.g. buffers and solutions for hybridization assays, e.g. the afore-mentioned solutions and buffers, and further means for Southern-, Western-, Northern- etc. -blots, as e.g. described in Sambrook et al. are known. In one embodiment diagnostic compositions contain PCR primers designed to specifically detect the presence or the expression level of the nucleic acid molecule to be expressed or to be expressed on an enhanced level in the process of the invention, e.g. of the nucleic acid molecule of the invention, or to discriminate between different variants or alleles of the nucleic acid molecule of the invention or nucleic acid molecules the activity of which is to be increased in the process of the invention.

[48384] In another embodiment, the present invention relates to a kit comprising the nucleic acid molecule, the vector, the host cell, the polypeptide, or the, viral nucleic acid molecule, antibody, plant cell, plant or part thereof, the harvestable part, the propagation material and/or the compound and/or agonist identified according to the method of the invention.

[48385] The compounds of the kit of the present invention may be packaged in containers such as vials, optionally with/in buffers and/or solvents. If appropriate, one or more of the components of said kits might be packaged in one and the same container or in different ones. Additionally or alternatively, one or more of said components might be adsorbed to a solid support, like a nitrocellulose filter, a glass plate, a chip, a nylon membrane or to the well of a micro titer plate. The kit can be used for any of the herein described methods and embodiments, e.g. for the production of the host cells, transgenic plants, pharmaceutical compositions, detection of homologous sequences, identification of agonists, as food or feed or as a supplement thereof or as supplement for the treating of plants, etc. Further, the kit can comprise instructions for the use of the kit for any of said embodiments. In one embodiment said kit comprises further a nucleic acid molecule encoding one or more of the aforementioned protein, and/or an antibody, a vector, a host cell, a plant cell, a plant or a part thereof. In another embodiment said kit comprises PCR primers to detect and increase the nucleic acid molecule to be increased in the process of the invention, e.g. of the nucleic acid molecule of the invention.

[48386] In a further embodiment, the present invention relates to a method for the production of a agricultural composition providing the nucleic acid molecule, the vector, or antibody of the present invention, the viral nucleic acid of the invention, or the polypeptide of the invention, the compound or agonist or comprising the steps of the method according to the invention for the identification of said compound or agonist; and formulating the nucleic acid molecule, the vector, or antibody of the present invention, the viral nucleic acid of the invention, the polypeptide of the invention or the agonist, or compound identified according to the methods or processes of the present invention or with use of the subject matters of the present invention in a form applicable as plant agricultural composition.

[48387] In another embodiment, the present invention relates to a method for the production of “the fine chemical”-production supporting plant culture composition comprising the steps of the method of the present invention; and formulating the compound identified in a form acceptable as agricultural composition.

[48388] Under “acceptable as agricultural composition” is understood, that such a composition optionally comprises auxiliaries which are customarily used for formulating crop protection agents.

[48389] In a further embodiment the nucleic acid molecule of the invention, the polypeptide of the invention, the nucleic acid construct of the invention, the expression cassette of the invention, the non-human organisms, the non-human host cell, the microorganisms, the plant, plant cell, or the part thereof, of the invention, the vector of the invention, the agonist identified with the method of the invention, the nucleic acid molecule identified with the method of the present invention, can be used for the production of the fine chemical or of the fine chemical and one or more other vitamines.

[48390] Accordingly, the nucleic acid molecule of the invention, or the nucleic acid molecule identified with the method of the present invention or the complement sequences thereof, the polypeptide of the invention, the nucleic acid construct of the invention, the expression cassette of the invention, the non-human organism, the non-human host cell, the microorganism, the plant, plant cell, or the part thereof of the invention, the vector of the invention, the agonist identified with the method of the invention, the antibody of the present invention, can be used for the production of or the increase in the fine chemical in a non-human organism or part thereof, e.g. in a cell.

[48391] These and other embodiments are disclosed and encompassed by the description and examples of the present invention. Further literature concerning any one of the methods, uses and compounds to be employed in accordance with the present invention may be retrieved from public libraries, using for example electronic devices. For example the public database “Medline” may be utilized which is available on the Internet, for example under http://www.ncbi.nlm.nih.gov/PubMed/medline.html. Further databases and addresses, such as http://www.ncbi.nlm.nih.gov/, http://www.infobiogen.fr/, http://www.fmi.ch/biology/researchtools. html, hftp://www.tigr.org/, are known to the person skilled in the art and can also be obtained using, e.g., http://www.lycos.com.

[48392] The present invention is illustrated by the examples, which follow. The present examples illustrate the basic invention without being intended as limiting the subject of the invention. The content of all of the references, patent applications, patents and published patent applications cited in the present patent application is herewith incorporated by reference.

[48393] A special embodiment of this invention is related to genes which increase or generate the production of the fine chemical Vitamin E, alpha- or gamma-tocopherol in plant cells, plants or part thereof. Phenotypes thereto are associated with yield of plants (=yield related phenotypes). In accordance with the invention, therefore, the respective genes identified in Table I, wherein in column 7 alpha- or gamma-tocopherol are mentioned, especially the coding region thereof, or homologs or fragments thereof, may be employed to enhance any yield-related phenotype. Increased yield may be determined in field trials of transgenic plants and suitable control plants. Alternatively, a transgene's ability to increase yield may be determined in a model plant. An increased yield phenotype may be determined in the field test or in a model plant by measuring any one or any combination of the following phenotypes, in comparison to a control plant: yield of dry harvestable parts of the plant, yield of dry aerial harvestable parts of the plant, yield of underground dry harvestable parts of the plant, yield of fresh weight harvestable parts of the plant, yield of aerial fresh weight harvestable parts of the plant yield of underground fresh weight harvestable parts of the plant, yield of the plant's fruit (both fresh and dried), grain dry weight, yield of seeds (both fresh and dry), and the like.

[48394] The most basic yield-related phenotype is increased yield associated with the presence of the gene or a homolog or a fragment thereof as a transgene in the plant, i.e., the intrinsic yield of the plant. Intrinsic yield capacity of a plant can be, for example, manifested in a field test or in a model system by demonstrating an improvement of seed yield (e.g. in terms of increased seed/grain size, increased ear number, increased seed number per ear, improvement of seed filling, improvement of seed composition, embryo and/or endosperm improvements, and the like); modification and improvement of inherent growth and development mechanisms of a plant (such as plant height, plant growth rate, pod number, pod position on the plant, number of internodes, incidence of pod shatter, efficiency of nodulation and nitrogen fixation, efficiency of carbon assimilation, improvement of seedling vigour/early vigour, enhanced efficiency of germination (under non-stressed conditions), improvement in plant architecture. Increased yield-related phenotypes may also be measured to determine tolerance to abiotic environmental stress. Abiotic stresses include drought, low temperature, salinity, osmotic stress, shade, high plant density, mechanical stresses, and oxidative stress, and yield-related phenotypes are encompassed by tolerance to such abiotic stresses. Additional phenotypes that can be monitored to determine enhanced tolerance to abiotic environmental stress include, without limitation, wilting; leaf browning; loss of turgor, which results in drooping of leaves or needles stems, and flowers; drooping and/or shedding of leaves or needles; the leaves are green but leaf angled slightly toward the ground compared with controls; leaf blades begun to fold (curl) inward; premature senescence of leaves or needles; loss of chlorophyll in leaves or needles and/or yellowing. Any of the yield-related phenotypes described above may be monitored in field tests or in model plants to demonstrate that a transgenic plant has increased tolerance to abiotic environmental stress. In accordance with the invention, the respective genes identified in Table 1, in case in column 7 alpha- or gamma-tocopherol is indicated, especially the coding region thereof, or homologs or fragments thereof, may be employed to enhance tolerance to abiotic environmental stress in a plant means that the plant, when confronted with abiotic environmental stress.

[48395] A polypeptide conferring an yield-increasing activity can be encoded by a respective nucleic acid sequence as shown in Table I, column 5 or 8, and/or comprises or consists of a respective polypeptide as depicted in Table II, column 5 and 8, and/or can be amplified with the respective primer set shown in Table III, column 8, in case in column 7 alpha- or gamma-tocopherol is indicated.

[48396] “Improved adaptation” to environmental stress like e.g. freezing and/or chilling temperatures refers to an improved plant performance under environmental stress conditions.

[48397] A modification, i.e. an increase, can be caused by endogenous or exogenous factors. For example, an increase in activity in an organism or a part thereof can be caused by adding a gene product or a precursor or an activator or an agonist to the media or nutrition or can be caused by introducing said subjects into an organism, transient or stable. Furthermore such an increase can be reached by the introduction of the respective inventive nucleic acid sequence or the encoded protein in the correct cell compartment for example into the nucleus or cytoplasmic respectively or into plastids either by transformation and/or targeting.

[48398] The term “yield” as used herein generally refers to a measurable produce from a plant, particularly a crop. Yield and yield increase (in comparison to a non-transformed starting or wild-type plant) can be measured in a number of ways, and it is understood that a skilled person will be able to apply the correct meaning in view of the particular embodiments, the particular crop concerned and the specific purpose or application concerned. The terms “improved yield” or “increased yield” can be used interchangeable.

[48399] As used herein, the term “improved yield” or the term “increased yield” means any improvement in the yield of any measured plant product, such as grain, fruit or fiber. In accordance with the invention, changes in different phenotypic traits may improve yield. For example, and without limitation, parameters such as floral organ development, root initiation, root biomass, seed number, seed weight, harvest index, tolerance to abiotic environmental stress, leaf formation, phototropism, apical dominance, and fruit development, are suitable measurements of improved yield. Any increase in yield is an improved yield in accordance with the invention. For example, the improvement in yield can comprise a 0.1%, 0.5%, 1%, 3%, 5%, 10%, 15%, 20%, 30%, 40%, 50%, 60%, 70%, 80%, 90% or greater increase in any measured parameter. For example, an increase in the bushel/acre yield of soybeans or corn derived from a crop comprising plants which are transgenic for the nucleotides and polypeptides of Table I, in case in column 7 alpha- or gamma-tocopherol is mentioned, as compared with the bushel/acre yield from untreated soybeans or corn cultivated under the same conditions, is an improved yield in accordance with the invention. The increased or improved yield can be achieved in the absence or presence of stress conditions.

[48400] For example, enhanced or increased “yield” refers to one or more yield parameters selected from the group consisting of biomass yield, dry biomass yield, aerial dry biomass yield, underground dry biomass yield, fresh-weight biomass yield, aerial fresh-weight biomass yield, underground fresh-weight biomass yield; enhanced yield of harvestable parts, either dry or freshweight or both, either aerial or underground or both; enhanced yield of crop fruit, either dry or fresh-weight or both, either aerial or underground or both; and preferably enhanced yield of seeds, either dry or fresh-weight or both, either aerial or underground or both.

[48401] Crop yield is defined herein as the number of bushels of relevant agricultural product (such as grain, forage, or seed) harvested per acre. Crop yield is impacted by abiotic stresses, such as drought, heat, salinity, and cold stress, and by the size (biomass) of the plant. Traditional plant breeding strategies are relatively slow and have in general not been successful in conferring increased tolerance to abiotic stresses. Grain yield improvements by conventional breeding have nearly reached a plateau in maize.

[48402] Accordingly, the yield of a plant can depend on the specific plant/crop of interest as well as its intended application (such as food production, feed production, processed food production, biofuel, biogas or alcohol production, or the like) of interest in each particular case. Thus, in one embodiment, yield is calculated as harvest index (expressed as a ratio of the weight of the respective harvestable parts divided by the total biomass), harvestable parts weight per area (acre, square meter, or the like); and the like. The harvest index, i.e., the ratio of yield biomass to the total cumulative biomass at harvest, in maize has remained essentially unchanged during selective breeding for grain yield over the last hundred years. Accordingly, recent yield improvements that have occurred in maize are the result of the increased total biomass production per unit land area. This increased total biomass has been achieved by increasing planting density, which has led to adaptive phenotypic alterations, such as a reduction in leaf angle, which may reduce shading of lower leaves, and tassel size, which may increase harvest index. Harvest index is relatively stable under many environmental conditions, and so a robust correlation between plant size and grain yield is possible. Plant size and grain yield are intrinsically linked, because the majority of grain biomass is dependent on current or stored photosynthetic productivity by the leaves and stem of the plant. As with abiotic stress tolerance, measurements of plant size in early development, under standardized conditions in a growth chamber or greenhouse, are standard practices to measure potential yield advantages conferred by the presence of a transgene.

[48403] Acccordingly, the yield of a plant can be increased by improving one or more of the yield-related phenotypes.

[48404] Such yield-related phenotypes or traits of a plant the improvement of which results in increased yield comprise, without limitation, the increase of the intrinsic yield capacity of a plant, improved nutrient use efficiency, and/or increased stress tolerance.

[48405] For example, yield refers to biomass yield, e.g. to dry weight biomass yield and/or fresh-weight biomass yield. Biomass yield refers to the aerial or underground parts of a plant, depending on the specific circumstances (test conditions, specific crop of interest, application of interest, and the like). In one embodiment, biomass yield refers to the aerial and underground parts. Biomass yield may be calculated as fresh-weight, dry weight or a moisture adjusted basis. Biomass yield may be calculated on a per plant basis or in relation to a specific area (e.g. biomass yield per acre/ square meter/ or the like).

[48406] In other embodiment, “yield” refers to seed yield which can be measured by one or more of the following parameters: number of seeds or number of filled seeds (per plant or per area (acre/square meter/ or the like)); seed filling rate (ratio between number of filled seeds and total number of seeds); number of flowers per plant; seed biomass or total seeds weight (per plant or per area (acre/square meter/ or the like); thousand kernel weight (TKW; extrapolated from the number of filled seeds counted and their total weight; an increase in TKW may be caused by an increased seed size, an increased seed weight, an increased embryo size, and/or an increased endosperm). Other parameters allowing to measure seed yield are also known in the art. Seed yield may be determined on a dry weight or on a fresh weight basis, or typically on a moisture adjusted basis, e.g. at 15.5-percent moisture.

[48407] For example, the term “increased yield” means that the plant, exhibits an increased growth rate, under conditions of abiotic environmental stress, compared to the corresponding wild-type plant.

[48408] An increased growth rate may be reflected inter alia by or confers an increased biomass production of the whole plant, or an increased biomass production of the aerial parts of a plant, or by an increased biomass production of the underground parts of a plant, or by an increased biomass production of parts of a plant, like stems, leaves, blossoms, fruits, and/or seeds. Increased yield includes higher fruit yields, higher seed yields, higher fresh matter production, and/or higher dry matter production.

[48409] The term “increased yield” means that the plant, exhibits a prolonged growth under conditions of abiotic environmental stress, as compared to the corresponding, e.g. non-transformed, wild type organism. A prolonged growth comprises survival and/or continued growth of the plant, at the moment when the non-transformed wild type organism shows visual symptoms of deficiency and/or death.

[48410] When the plant of the invention is a corn plant increased yield for corn plants means, for example, increased seed yield, in particular for corn varieties used for feed or food. Increased seed yield of corn refers to an increased kernel size or weight, an increased kernel per ear, or increased ears per plant. Alternatively or in addition the cob yield may be increased, or the length or size of the cob is increased, or the kernel per cob ratio is improved.

[48411] When the plant of the invention is a soy plant, increased yield for soy plants means increased seed yield, in particular for soy varieties used for feed or food. Increased seed yield of soy refers for example to an increased kernel size or weight, an increased kernel per pod, or increased pods per plant.

[48412] When the plant of the invention is an oil seed rape (OSR) plant, increased yield for OSR plants means increased seed yield, in particular for OSR varieties used for feed or food. Increased seed yield of OSR refers to an increased seed size or weight, an increased seed number per silique, or increased siliques per plant.

[48413] When the plant of the invention is a cotton plant,increased yield for cotton plants means increased lint yield. Increased lint yield of cotton refers in one embodiment to an increased length of lint.

[48414] When the plant of the invention is a wheat plant increased yield for wheat plants means, for example, increased seed yield, in particular for wheat varieties used for feed or food. Increased seed yield of wheat refers to an increased kernel size or weight, an increased kernel per ear, or increased ears per plant. Increased seed yield of wheat refers to an increased grain size or weight, an increased number of grains per spike, or an increased number of spikes per plant. Additionally or as an alternative increased seed yield of wheat refers to an increased 1000 grain weight, an increased length of spikes, or an increased number of spikelets per spikes, or an increased number of spikes per square meter, or or an increased flag leaf area (flag leaf is the leaf directly below the spike).

[48415] Said increased yield can typically be achieved by enhancing or improving, one or more yieldrelated traits of the plant. Such yield-related traits of a plant comprise, without limitation, the increase of the intrinsic yield capacity of a plant, improved nutrient use efficiency, and/or increased stress tolerance, in particular increased abiotic stress tolerance.

[48416] Intrinsic yield capacity of a plant can be, for example, manifested by improving the specific (intrinsic) seed yield (e.g. in terms of increased seed/ grain size, increased ear number, increased seed number per ear, improvement of seed filling, improvement of seed composition, embryo and/or endosperm improvements, or the like); modification and improvement of inherent growth and development mechanisms of a plant (such as plant height, plant growth rate, pod number, pod position on the plant, number of internodes, incidence of pod shatter, efficiency of nodulation and nitrogen fixation, efficiency of carbon assimilation, improvement of seedling vigour/early vigour, enhanced efficiency of germination (under stressed or non-stressed conditions), improvement in plant architecture, cell cycle modifications, photosynthesis modifications, various signaling pathway modifications, modification of transcriptional regulation, modification of translational regulation, modification of enzyme activities, and the like); and/or the like. The improvement or increase of stress tolerance of a plant can for example be manifested by improving or increasing a plant's tolerance against stress, particularly abiotic stress. In the present application, abiotic stress refers generally to abiotic environmental conditions a plant is typically confronted with, including, but not limited to, drought (tolerance to drought may be achieved as a result of improved water use efficiency), heat, low temperatures and cold conditions (such as freezing and chilling conditions), salinity, osmotic stress , shade, high plant density, mechanical stress, oxidative stress, and the like. The increased plant yield can also be mediated by increasing the “nutrient use efficiency of a plant”, e.g. by improving the use efficiency of nutrients including, but not limited to, phosphorus, potassium, and nitrogen. Further, higher yields may be obtained with current or standard levels of nitrogen use.

[48417] Generally, the term “increased tolerance to stress” can be defined as survival of plants, and/or higher yield production, under stress conditions as compared to a non-transformed wild type or starting plant: For example, the plant of the invention or produced according to the method of the invention is better adapted to the stress conditions. “Improved adaptation” to environmental stress like e.g. drought, heat, nutrient depletion, freezing and/or chilling temperatures refers herein to an improved plant performance resulting in an increased yield, particularly with regard to one or more of the yield related traits as defined in more detail above.

[48418] During its life-cycle, a plant is generally confronted with a diversity of environmental conditions. Any such conditions, which may, under certain circumstances, have an impact on plant yield, are herein referred to as “stress” condition. Environmental stresses may generally be divided into biotic and abiotic (environmental) stresses. Unfavorable nutrient conditions are sometimes also referred to as “environmental stress”. The present invention does also contemplate solutions for this kind of environmental stress, e.g. referring to increased nutrient use efficiency. For the purposes of the description of the present invention, the terms “enhanced tolerance to abiotic stress”, “enhanced resistance to abiotic environmental stress”, “enhanced tolerance to environmental stress”, “improved adaptation to environmental stress” and other variations and expressions similar in its meaning are used interchangeably and refer, without limitation, to an improvement in tolerance to one or more abiotic environmental stress(es) as described herein and as compared to a corresponding origin or wild type plant or a part thereof.

[48419] The term abiotic stress tolerance(s) refers for example low temperature tolerance, drought tolerance or improved water use efficiency (WUE), heat tolerance, salt stress tolerance and others. Studies of a plant's response to desiccation, osmotic shock, and temperature extremes are also employed to determine the plant's tolerance or resistance to abiotic stresses. Water use efficiency (WUE) is a parameter often correlated with drought tolerance. In selecting traits for improving crops, a decrease in water use, without a change in growth would have particular merit in an irrigated agricultural system where the water input costs were high. An increase in growth without a corresponding jump in water use would have applicability to all agricultural systems. In many agricultural systems where water supply is not limiting, an increase in growth, even if it came at the expense of an increase in water use also increases yield. Drought stress means any environmental stress which leads to a lack of water in plants or reduction of water supply to plants, including a secondary stress by low temperature and/or salt, and/or a primary stress during drought or heat, e.g. desiccation etc.

[48420] Accordingly, this invention provides respective measures and methods to produce plants with increased yield, e.g. genes conferring an increased yield-related trait, for example enhanced tolerance to abiotic environmental stress, for example an increased drought tolerance and/or low temperature tolerance, intrinsic yield and/or another increased yield-related trait, upon expression or over-expression. Accordingly, the present invention provides such genes in case in column 7 of the respective Table or alpha- or gamma-tocopherol is indicated. In particular, such genes are described in column 5 as well as in column 8 of Tables I, especially the coding region thereof, or homologs or fragments thereof, in case alpha- or gamma-tocopherol are indicated in column 7 or the respective polypeptides are described in column 5 as well as in column 8 of Table II, or homologs or fragments thereof, in case alpha- or gamma-tocopherol are indicated in column 7.

[48421] Accordingly, the present invention provides respective transgenic plants showing one or more improved yield-related traits as compared to the corresponding origin or the wild type plant and methods for producing such transgenic plants with increased yield in case in column 7 of the respective Table “alpha-tocopherol” or “gamma-tocopherol” is indicated.

[48422] In one embodiment, one or more of said yield-increasing activities are increased by increasing the amount and/or the specific activity of one or more proteins listed in Table II, column 5 or 8 in a compartment of a cell indicated in Table II, column 6, in case in column 7 of the respective Table “alpha-tocopherol” or “gamma-tocopherol” is indicated.

[48423] Accordingly to present invention, the yield of the plant of the invention is increased by improving one or more of the yield-related traits as defined herein. Said increased yield in accordance with the present invention can typically be achieved by enhancing or improving, in comparison to an origin or wild-type plant, one or more yield-related traits of said plant. Such yield-related traits of a plant the improvement of which results in increased yield comprise, without limitation, the increase of the intrinsic yield capacity of a plant, improved nutrient use efficiency, and/or increased stress tolerance, preferably an increased drought tolerance and/or low temperature tolerance.

[48424] In one embodiment, the present invention provides respective transgenic plants showing one or more improved yield-related traits, preferably increased drought tolerance as compared to the corresponding origin or the wild type plant and methods for producing such transgenic plants with increased yield in case in column 7 of the respective Table “alpha-tocopherol” or “gamma-tocopherol” is indicated.

[48425] In one embodiment, the present invention provides respective transgenic plants showing one or more improved yield-related traits, preferably increased stress tolerance against low temperatures and cold conditions (such as freezing and chilling conditions) as compared to the corresponding origin or the wild type plant and methods for producing such transgenic plants with increased yield in case in column 7 of the respective Table “alpha-tocopherol” or “gamma-tocopherol” is indicated.

[48426] In a further embodiment the present invention is characterized by the features as disclosed in the following items:

[48427] Item 1. A process for the production of a fine chemical selected from the group consisting of:
[48428] alpha-tocopherol and/or gamma-tocopherol
[48429] (a) increasing or generating one or more activities selected from the group consisting of 3-deoxy-7-phosphoheptulonate synthase, 3-deoxy-D-arabinoheptulosonate-7-phosphatesynthase, ABC transporter permease subunit, acetyltransferase, acid shock protein, adenylate kinase, adenylosuccinate lyase, amino-acid acetyltransferase, ankyrin repeat family protein, At1g29350-protein, ATP-binding component of a transport system, b1163-protein, b1219-protein, b1234-protein, b1522-protein, b1921-protein, b2360-protein, b2548-protein, b2613-protein, b2673-protein, b2812-protein, b3890-protein, b3989-protein, b4029-protein, b4050-protein, b4056-protein, calcium-dependent protein kinase, carbohydrate kinase, colanic acid biosynthesis protein, coproporphyrinogen oxidase, cyclin D , DNA polymerase subunit, electron transfer flavoprotein subunit beta, geranylgeranyl pyrophosphate synthase, geranyltranstransferase, gluconate transport system permease 3, glucose dehydrogenase, glucose-6-phosphate 1-dehydrogenase, glutaredoxin, glycerol dehydrogenase, glycerol-3-phosphate dehydrogenase, glycolate utilization protein, harpin-induced family protein, homocitrate synthase, hydrolase, isopropylmalate isomerase large subunit, lipopolysaccharide biosynthesis protein, MADS box protein transcription factor, major facilitator superfamily transporter protein, malate dehydrogenase, monothiol glutaredoxin, monthiol glutaredoxin, multiple antibiotic resistance protein, murein transglycosylase, N-(5′-phosphoribosyl)anthranilate isomerase, NAD-dependent epimerase/dehydratase, NADP-dependent malic enzyme, O-antigen chain length determinant, phosphatidylserine decarboxylase, phospho-2-dehydro-3-deoxyheptonate aldolase, phosphoadenosine phosphosulfate reductase , phosphofructokinase, photosystem II protein, polygalacturonase, polyphosphate kinase, precorrin methylase, protein kinase, protein phosphatase, putative transport system permease protein, pyruvate kinase, RNA-binding protein, Sec-independent protein translocase subunit, serine protease, sll1761-protein, slr1917-protein, small nuclear ribonucleoprotein , ThiF family protein, thioredoxin, thioredoxin family protein, threonine synthase, transcription factor, transcriptional regulator, transport protein, trehalose-phosphatase, TTC1386-protein, ycl049c-protein, ydl235c-protein, ydr183w-protein, yer106w-protein, ylr178c-protein, ypr170c-protein, and zinc finger protein, in a non-human organism or a part thereof, preferably a microorganism, a plant cell, a plant or a part thereof, as compared to a corresponding non-transformed wild type non-human organism or a part thereof; and
[48430] (b) growing the non-human organism or a part thereof under conditions which permit the production of alpha-tocopherol and/or gamma-tocopherol or a composition comprising alpha-tocopherol and/or gamma-tocopherol in said non-human organism or in the culture medium surrounding said non-human organism.

[48431] Item 2. A process for the production of a fine chemical selected from the group consisting of: alpha-tocopherol and/or gamma-tocopherol, which comprises
[48432] (A)
   [48433] (i) increasing or generating of the expression of; and/or
   [48434] (ii) increasing or generating the expression of an expression product of; and/or
   [48435] (iii) increasing or generating one or more activities of an expression product encoded by;
   [48436] at least one respective nucleic acid molecule comprising a nucleic acid molecule selected from the group consisting of:
   [48437] (a) a nucleic acid molecule encoding the polypeptide shown in column 5 or 8 of Table II, preferably Table II B, application no.7, or a homolog or a fragment thereof;
   [48438] (b) a nucleic acid molecule shown in column 5 or 8 of Table I, preferably Table I B, application no.7, or a homolog or a fragment thereof (preferably the coding region thereof);
   [48439] (c) a nucleic acid molecule, which, as a result of the degeneracy of the genetic code, can be derived from a polypeptide sequence depicted in column 5 or 8 of Table II, preferably Table II B, application no.7;
   [48440] (d) a nucleic acid molecule having at least 30%, in particular at least 50%, 60%, 70%, 80%, 85%, 90%, 95%, 97%, 98%, 99% or 99.5% identity with the nucleic acid molecule sequence of a polynucleotide comprising the nucleic acid molecule shown in column 5 or 8 of Table I, preferably Table I B, application no. 7, or the coding region thereof;
   [48441] (e) a nucleic acid molecule encoding a polypeptide having at least 30%, in particular 50%, 60%, 70%, 80%, 85%, 90%, 95%, 97%, 98%, 99% or 99.5% identity with the amino acid sequence of the polypeptide encoded by the nucleic acid molecule of (a), (b), (c) or (d);
   [48442] (f) a nucleic acid molecule which hybridizes with a nucleic acid molecule of (a), (b), (c), (d) or (e) under stringent hybridization conditions;
   [48443] (g) a nucleic acid molecule encoding a polypeptide which can be isolated with the aid of monoclonal or polyclonal antibodies made against a polypeptide encoded by one of the nucleic acid molecules of (a), (b), (c), (d), (e) or (f);
   [48444] (h) a nucleic acid molecule encoding a polypeptide comprising the consensus sequence or one or more polypeptide motifs as shown in column 8 of Table IV, application no.7;
   [48445] (i) a nucleic acid molecule encoding a polypeptide having the activity represented by a respective protein as depicted in column 5 of Table II, application no. 7;
   [48446] (j) a nucleic acid molecule which comprises a polynucleotide, which is obtained by amplifying a cDNA library or a genomic library using the primers as depicted in column 8 of Table III, application no. 7; and
   [48447] (k) a nucleic acid molecule which is obtainable by screening a suitable nucleic acid library, especially a cDNA library and/or a genomic library, under stringent hybridization conditions with a probe comprising a complementary sequence of a nucleic acid molecule of (a), (b), (c), (d), (e), (f), (g), (h), (i) or (j) or with a fragment thereof, having at least 15 nt, preferably 20 nt, 30 nt, 50 nt, 100 nt, 200 nt, 500 nt, 1000 nt, 1500 nt, 2000 nt or 3000 nt of a nucleic acid molecule complementary to a nucleic acid molecule sequence characterized in (a), (b), (c), (d), (e), (f), (g), (h), (i) or (j);
   [48448] or a nucleic acid molecule comprising a sequence which is complementary thereto; in a non-human organism or a part thereof, preferably a microorganism, a plant cell, a plant or a part thereof, as compared to a corresponding non-transformed wild type non-human organism or a part thereof; and
[48449] (B) growing the non-human organism or a part thereof under conditions which permit the production of alpha-tocopherol and/or gamma-tocopherol or a composition comprising alpha-tocopherol and/or gamma-tocopherol in said non-human organism or in the culture medium surrounding said non-human organism.

[48450] Item 3. A process of items 1 or 2, comprising of recovering alpha-tocopherol and/or gamma-tocopherol in its free or bound form.

[48451] Item 4. The process of any one of items 1 to 3, comprising the following steps:
[48452] (a) selecting a non-human organism or a part thereof expressing a polypeptide encoded by the nucleic acid molecule characterized in item 2;
[48453] (b) mutagenizing the selected non-human organism or the part thereof;
[48454] (c) comparing the activity or the expression level of said polypeptide in the mutagenized non-human organism or the part thereof with the activity or the expression of said polypeptide of the selected non-human organisms or the part thereof;

[48455] (d) selecting the mutated non-human organisms or parts thereof, which comprise an increased activity or expression level of said polypeptide compared to the selected non-human organism or the part thereof;
[48456] (e) optionally, growing and cultivating the non-human organisms or the parts thereof; and
[48457] (f) recovering, and optionally isolating, the free or bound alpha-tocopherol and/or gamma-tocopherol produced by the selected mutated non-human organisms or parts thereof.

[48458] Item 5. The process of any one of items 1 to 4 wherein the activity of said protein or the expression of said nucleic acid molecule is increased or generated transiently or stably.

[48459] Item 6. An isolated nucleic acid molecule comprising a nucleic acid molecule selected from the group consisting of:
[48460] (a) a nucleic acid molecule encoding a polypeptide shown in Table II, application no. 7, column 5 or 8, preferably shown in Table II B, application no. 7, column 8, or a homolog or a fragment thereof;
[48461] (b) a nucleic acid molecule shown in Table I, application no. 7, column 5 or 8, preferably shown in Table I B, application no. 7, column 8, preferably the coding region thereof, or a homolog or a fragment thereof;
[48462] (c) a nucleic acid molecule, which, as a result of the degeneracy of the genetic code, can be derived from a polypeptide sequence depicted in column 5 or 8 of Table II, application no. 7, preferably in column 8 of Table II B, application no. application no.;
[48463] (d) a nucleic acid molecule having at least 30% identity, preferably at least 40%, 50%, 60%, 70%, 75%, 80%, 85%, 90%, 95%, 96%, 97%, 98%, 99%, 99,5%, with the nucleic acid molecule sequence of a polynucleotide comprising the nucleic acid molecule shown in column 5 or 8 of Table I, application no. 3, preferably shown in column 8 of Table I B, application no. 7, preferably the coding region thereof;
[48464] (e) a nucleic acid molecule encoding a polypeptide having at least 30% identity, preferably at least 40%, 50% 60%, 70%, 75%, 80%, 85%, 90%, 95%, 96%, 97%, 98%, 99%, 99,5%, identity with the amino acid sequence of the polypeptide encoded by the nucleic acid molecule of (a), (b), (c) or (d);
[48465] (f) a nucleic acid molecule which hybridizes with a nucleic acid molecule of (a), (b), (c), (d) or (e) under stringent hybridisation conditions;
[48466] (g) a nucleic acid molecule encoding a polypeptide which can be isolated with the aid of monoclonal or polyclonal antibodies made against a polypeptide encoded by one of the nucleic acid molecules of (a), (b), (c), (d), (e) or (f);
[48467] (h) a nucleic acid molecule encoding a polypeptide comprising the consensus sequence or one or more polypeptide motifs as shown in column 8 of Table IV, application no. 7;
[48468] (i) a nucleic acid molecule encoding a polypeptide having the activity represented by a respective protein as depicted in column 5 of Table II, application no. 7;
[48469] (j) a nucleic acid molecule comprising a polynucleotide which is obtained by amplifying a cDNA library or a genomic library using the primers in Table III, application no. 7, column 8;
[48470] and
[48471] (k) nucleic acid molecule which is obtainable by screening a suitable nucleic acid library, especially a cDNA library and/or a genomic library, under stringent hybridization conditions with a probe comprising one of the sequences of the nucleic acid molecule of (a), (b), (c), (d), (e), (f), (g), (h), (i) or (j) or with a fragment of at least 15 nt, preferably 20 nt, 30 nt, 50 nt, 100 nt, 200 nt,500 nt, 1000 nt, 1500 nt, 2000 nt or 3000 nt of the nucleic acid molecule characterized in (a), (b), (c), (d), (e), (f), (g), (h), (i) or (i), or a nucleic acid molecule comprising a sequence which is complementary thereto.

[48472] Item 7. A nucleic acid construct which confers the expression of the nucleic acid molecule as defined in item 6, comprising one or more regulatory elements.

[48473] Item 8. An expression cassette comprising
[48474] (a) a promoter, preferably selected from the group consisting of Big35S, PCUbi, Super and USP;
[48475] (b) a nucleic acid molecule as defined in item 6.

[48476] Item 9. A vector comprising the nucleic acid molecule as defined in item 6 or the nucleic acid construct as claimed in item 7 or the expression cassette as claimed in item 8.

[48477] Item 10. A host cell or a plant organelle, which has been transformed with the vector as claimed in item 9 or the nucleic acid molecule as defined in item 6 or the nucleic acid construct as claimed in item 7 or the expression cassette as claimed in item 8.

[48478] Item 11. The host cell of item 10, which is a plant cell or a microorganism.

[48479] Item 12. A process for producing a polypeptide, wherein the polypeptide is expressed in a host cell as claimed in item 10 or 11.

[48480] Item 13. A polypeptide produced by the process as claimed in item 12 or encoded by the nucleic acid molecule as defined in item 6.

[48481] Item 14. An antibody, which binds specifically to the polypeptide as claimed in item 13.

[48482] Item 15. A plant tissue, propagation material, harvested material or a plant comprising the host cell as claimed in item 10 or 11.

[48483] Item 16. A process for the identification of a compound conferring an increase in alpha-tocopherol and/or gamma-tocopherol production in a non-human organism, comprising the steps:
[48484] (a) culturing a plant cell or tissue or microorganism or maintaining a plant expressing the polypeptide encoded by the nucleic acid molecule as defined in item 6 conferring an increase in the amount of alpha-tocopherol and/or gamma-tocopherol in a non-human organism or a part thereof and a readout system capable of interacting with the polypeptide under suitable conditions which permit the interaction of the polypeptide with said readout system in the presence of a compound or a sample comprising a plurality of compounds and capable of providing a detectable signal in response to the binding of a compound to said polypeptide under conditions which permit the expression of said readout system and of the polypeptide encoded by the nucleic acid molecule of item 6 conferring an increase in the amount of alpha-tocopherol and/or gamma-tocopherolin a non-human organism or a part thereof;
[48485] (b) identifying if the compound is an effective agonist by detecting the presence or absence or increase of a signal produced by said readout system.

[48486] Item 17. A method for the production of an agricultural composition comprising the steps of the method of item 16 and formulating the compound identified in item 16 in a form acceptable for an application in agriculture.

[48487] Item 18. A composition comprising the nucleic acid molecule as defined in item 6, the polypeptide as claimed in item 13, the nucleic acid construct as claimed in item 7, the expression cassette as claimed in item 8, the vector as claimed in item 9, the compound as claimed in item 16, the antibody as claimed in item 14, and optionally an agricultural acceptable carrier.

[48488] Item 19. Use of the nucleic acid molecule as defined in item 6 for the identification of a nucleic acid molecule conferring an increase in alpha-tocopherol and/or gamma-tocopherol after expression.

[48489] Item 20. Cosmetic, pharmaceutical, food or feed composition comprising the nucleic acid moleculeas defined in item 6, the polypeptide as claimed in item 13, the nucleic acid construct as claimed in item 7, the expression cassette as claimed in item 8, the vector as claimed in item 9, the antibody as claimed in item 14 , the plant or plant tissue as claimed in item 15, the harvested material as claimed in item 15 or the host cell of item as claimed in items 10 or 11.

[48490] Item 21. Use of the nuclei acid molecule as defined in item 6, the polypeptide as claimed in item 13, the nucleic acid construct as claimed in item 7, the expression cassette as claimed in item 8, the vector as claimed in item 9, the plant or plant tissue as claimed in item 15, or the host cell of item 10 to 11 for the production of plant resistant to a herbicide inhibiting the production of alpha-tocopherol and/or gamma-tocopherol.

[48491] Item 22. A method for producing a plant with increased yield as compared to a corresponding non-transformed wild type plant, whereby the method comprises
[48492] (i) increasing or generating of the expression of; and/or
[48493] (ii) increasing or generating the expression of an expression product of; and/or
[48494] (iii) increasing or generating one or more activities of an expression product encoded by;
[48495] at least one respective nucleic acid molecule comprising a nucleic acid molecule selected from the group consisting of:
[48496] (a) a nucleic acid molecule encoding the polypeptide shown in column 5 or 8 of Table II, preferably Table II B, application no. 7, or a homolog or a fragment thereof, in case in column 7 alpha-tocopherol and/or gamma-tocopherol is indicated;
[48497] (b) a nucleic acid molecule shown in column 5 or 8 of Table I, preferably Table I B, application no. 7, or a homolog or a fragment thereof (preferably the coding region thereof), in case in column 7 alpha-tocopherol and/or gamma-tocopherol is indicated,
[48498] (c) a nucleic acid molecule, which, as a result of the degeneracy of the genetic code, can be derived from a polypeptide sequence depicted in column 5 or 8 of Table II, preferably Table II B, application no. 7, in case in column 7 alpha-tocopherol and/or gamma-tocopherolis indicated;
[48499] (d) a nucleic acid molecule having at least 30%, in particular at least 50%, 60%, 70%, 80%, 85%, 90%, 95%, 97%, 98%, 99% or 99.5% identity with the nucleic acid molecule sequence of a polynucleotide comprising the nucleic acid molecule shown in column 5 or 8 of Table I, preferably Table I B, application no. 7, or the coding region thereof, in case in column 7 alpha-tocopherol and/or gamma-tocopherol is indicated;
[48500] (e) a nucleic acid molecule encoding a polypeptide having at least 30%, in particular 50%, 60%, 70%, 80%, 85%, 90%, 95%, 97%, 98%, 99% or 99.5% identity with the amino acid sequence of the polypeptide encoded by the nucleic acid molecule of (a), (b), (c) or (d);
[48501] (f) a nucleic acid molecule which hybridizes with a nucleic acid molecule of (a), (b), (c), (d) or (e) under stringent hybridization conditions;
[48502] (g) a nucleic acid molecule encoding a polypeptide which can be isolated with the aid of monoclonal or polyclonal antibodies made against a polypeptide encoded by one of the nucleic acid molecules of (a), (b), (c), (d), (e) or (f);
[48503] (h) a nucleic acid molecule encoding a polypeptide comprising the consensus sequence or one or more polypeptide motifs as shown in column 8 of Table IV, application no. 7, in case in column 7 alpha-tocopherol and/or gamma-tocopherol is indicated;
[48504] (i) a nucleic acid molecule encoding a polypeptide having the activity represented by a respective protein as depicted in column 5 of Table II, application no. 7, in case in column 7 alpha-tocopherol and/or gamma-tocopherol is indicated;
[48505] (j) a nucleic acid molecule which comprises a polynucleotide, which is obtained by amplifying a cDNA library or a genomic library using the primers as depicted in column 8 of Table III, application no. 7, in case in column 7 alpha-tocopherol and/or gamma-tocopherol is indicated; and
[48506] (k) a nucleic acid molecule which is obtainable by screening a suitable nucleic acid library, especially a cDNA library and/or a genomic library, under stringent hybridization conditions with a probe comprising a complementary sequence of a nucleic acid molecule of (a), (b), (c), (d), (e), (f), (g), (h), (i) or (j) or with a fragment thereof, having at least 15 nt, preferably 20 nt, 30 nt, 50 nt, 100 nt, 200 nt, 500 nt, 1000 nt, 1500 nt, 2000 nt or 3000 nt of a nucleic acid molecule complementary to a nucleic acid molecule sequence characterized in (a), (b), (c), (d), (e), (f), (g), (h), (i) or (j);
[48507] or a nucleic acid molecule comprising a sequence which is complementary thereto; in a plant cell, plant or a part thereof.

[48508] Item 23. A method for producing a plant with increased yield according to item 22, which comprises in addition the regeneration of a plant from such transformed plant cell, plant cell compartment, plant cell nucleus, plant cell or plant tissue with increased yield.

### EXAMPLES

### Example 1

### Cloning of the Sequences as Shown in Table I, Column 5 or 8 in Escherichia Coli

[48509] The inventive sequences as shown in the respective line in Table I, column 5 or 8 were cloned into the plasmids pBR322 (Sutcliffe J. G., Proc. Natl. Acad. Sci. USA, 75, 3737 (1979)), pACYC 177 (Change and Cohen, J. Bacteriol. 134, 1141 (1978)), plasmids of the pBS series (pBSSK+, pBSSK− and others; Stratagene, LaJolla, USA) or cosmids such as SuperCosi (Stratagene, LaJolla, USA) or Lorist6 (Gibson T. J., Rosenthal A. and Waterson R. H., Gene 53, 283 (1987) for expression in E. coli using known, well-established procedures (see, for example, J. Sambrook et al. “Molecular Cloning: A Laboratory Manual”. Cold Spring Harbor Laboratory Press (1989) or F. M. Ausubel et al., “Current Protocols in Molecular Biology”, John Wiley & Sons (1994)).

### Example 2

### DNA Sequencing and Computerized Functional Analysis

[48510] The DNA was sequenced by standard procedures, in particular the chain determination method, using AB1377 sequencers (see, for example, Fleischman R. D. et al., Science 269, 496 (1995)).

### Example 3

### In-Vivo and In-Vitro Mutagenesis

[48511] An in vivo mutagenesis of organisms such as Saccharomyces, Mortierella, Escherichia and others mentioned above, which are beneficial for the production of a fine chemical can be carried out by passing a plasmid DNA (or another vector DNA) containing the desired nucleic acid sequence or nucleic acid sequences through E. coli and other microorganisms (for example Bacillus spp. or yeasts such as Saccharomyces cerevisiae) which are not capable of maintaining the integrity of its genetic information. Usual mutator strains have mutations in the genes for the DNA repair system (for example mutHLS, mutD, mutT and the like; for comparison, see Rupp W. D., “DNA repair mechanisms in Escherichia coli and Salmonella”, pp. 2277-2294, ASM, Washington (1996)]. The skilled worker knows these strains. The use of these strains is illustrated for example in Greener A., and Callahan M., Strategies 7, 32 (1994).

[48512] In-vitro mutation methods such as increasing the spontaneous mutation rates by chemical or physical treatment are well known to the skilled person. Mutagens like 5-bromo-uracil, N-methyl-N-nitro-N-nitrosoguanidine (=NTG), ethyl methanesulfonate (=EMS), hydroxylamine and/or nitrous acid are widely used as chemical agents for random in-vitro mutagenesis. The most common physical method for mutagenesis is the treatment with UV irradiation. Another random mutagenesis technique is the error-prone PCR for introducing amino acid changes into proteins. Mutations are deliberately introduced during PCR through the use of error-prone DNA polymerases and special reaction conditions known to a person skilled in the art. For this method randomized DNA sequences are cloned into expression vectors and the resulting mutant libraries screened for altered or improved protein activity as described below.

[48513] Site-directed mutagenesis method such as the introduction of desired mutations with an M13 or phagemid vector and short oligonucleotides primers is a well-known approach for site-directed mutagenesis. The clou of this method involves cloning of the nucleic acid sequence of the invention into an M13 or phagemid vector, which permits recovery of single-stranded recombinant nucleic acid sequence. A mutagenic oligonucleotide primer is then designed whose sequence is perfectly complementary to nucleic acid sequence in the region to be mutated, but with a single difference: at the intended mutation site it bears a base that is complementary to the desired mutant nucleotide rather than the original. The mutagenic oligonucleotide is then allowed to prime new DNA synthesis to create a complementary full-length sequence containing the desired mutation. Another site-directed mutagenesis method is the PCR mismatch primer mutagenesis method also known to the skilled person. Dpnl site-directed mutagenesis is a further known method as described for example in the Stratagene Quickchange™ site-directed mutagenesis kit protocol. A huge number of other methods are also known and used in common practice.

[48514] Positive mutation events can be selected by screening the organisms for the production of the desired fine chemical.

### Example 4

### DNA transfer between Escherichia Coli, Saccharomyces Cerevisiae and Mortierella Alpina

[48515] Shuttle vectors such as pYE22m, pPAC-ResQ, pClasper, pAUR224, pAMH10, pAML10, pAMT10, pAMU10, pGMH10, pGML10, pGMT10, pGMU10, pPGAL1, pPADH1, pTADH1, pTAex3, pNGA142, pHT3101 and derivatives thereof which allow the transfer of nucleic acid sequences between Escherichia coli, Saccharomyces cerevisiae and/or Mortierella alpina are available to the skilled worker. An easy method to isolate such shuttle vectors is disclosed by Soni R. and Murray J. A. H., Nucleic Acid Research, 20 (21), 5852 (1992). If necessary such shuttle vectors can be constructed easily using standard vectors for E. coli (Sambrook J. et al. “Molecular Cloning: A Laboratory Manual”, Cold Spring Harbor Laboratory Press (1989) or Ausubel F. M. et al. “Current Protocols in Molecular Biology”, John Wiley & Sons (1994)) and/or the aforementioned vectors, which have a replication origin for, and suitable marker from, Escherichia coli, Saccharomyces cerevisiae or Mortierella alpina added. Such replication origins are preferably taken from endogenous plasmids, which have been isolated from species used in the inventive process. Genes, which are used in particular as transformation markers for these species are genes for kanamycin resistance (such as those which originate from the Tn5 or Tn 903 transposon) or for chloramphenicol resistance (Winnacker E.L., “From Genes to Clones Introduction to Gene Technology”, VCH, Weinheim (1987)) or for other antibiotic resistance genes such as for G418, gentamycin, neomycin, hygromycin or tetracycline resistance.

[48516] Using standard methods, it is possible to clone a gene of interest into one of the abovedescribed shuttle vectors and to introduce such hybrid vectors into the microorganism strains used in the inventive process. The transformation of Saccharomyces can be achieved for example by LiCI or sheroplast transformation (Bishop et al., Mol. Cell. Biol., 6, 3401 (1986), Sherman et al., “Methods in Yeasts in Genetics”, Cold Spring Harbor Lab. Cold Spring Harbor, N.Y. (1982), Agatep et al., Technical Tips Online 1998, 1:51: P01525 or Gietz et al., Methods Mol. Cell. Biol. 5,255 (1995)) or electroporation (Delorme E., Appl. Environ. Microbiol., 55 (9), 2242 (1989)).

[48517] If the transformed sequence(s) is/are to be integrated advantageously into the genome of the microorganism used in the inventive process for example into the yeast or fungi genome, standard techniques known to the skilled worker also exist for this purpose. Solinger et al. (Proc. Natl. Acad. Sci. U S A., 15, 8447 (2001)) and Freedman et al. (Genetics, 162, 15 (2002)) teaches a homolog recombination system dependent on rad 50, rad51, rad54 and rad59 in yeasts. Vectors using this system for homologous recombination are vectors derived from the Ylp series. Plasmid vectors derived for example from the 2p-Vector are known by the skilled worker and used for the expression in yeasts. Other preferred vectors are for example pART1, pCHY21 or pEVP11 as they have been described by McLeod et al. (EMBO J., 6, 729 (1987)) and Hoffman et al. (Genes Dev. 5, 561 (1991)) or Russell et al. (J. Biol. Chem. 258, 143 (1983)). Other beneficial yeast vectors are plasmids of the REP, REP-X, pYZ or RIP series.

### Example 5

### Determining the Expression of the Mutant/Transgenic Protein

[48518] The observations of the activity of a mutated, or transgenic, protein in a transformed host cell are based on the fact that the protein is expressed in a similar manner and in a similar quantity as the wild-type protein. A suitable method for determining the transcription quantity of the mutant, or transgenic, gene (a sign for the amount of mRNA which is available for the translation of the gene product) is to carry out a Northern blot (see, for example, Ausubel et al., “Current Protocols in Molecular Biology”, Wiley, New York (1988)), where a primer which is designed in such a way that it binds to the gene of interest is provided with a detectable marker (usually a radioactive or chemiluminescent marker) so that, when the total RNA of a culture of the organism is extracted, separated on a gel, applied to a stable matrix and incubated with this probe, the binding and quantity of the binding of the probe indicates the presence and also the amount of mRNA for this gene. Another method is a quantitative PCR. This information detects the extent to which the gene has been transcribed. Total cell RNA can be isolated for example from yeasts or E. coli by a variety of methods, which are known in the art, for example with the Ambion kit according to the instructions of the manufacturer or as described in Edgington et al., Promega Notes Magazine Number 41, 14 (1993).

[48519] Standard techniques, such as Western blot, may be employed to determine the presence or relative amount of protein translated from this mRNA (see, for example, Ausubel et al. “Current Protocols in Molecular Biology”, Wiley, New York (1988)). In this method, total cell proteins are extracted, separated by gel electrophoresis, transferred to a matrix such as nitrocellulose and incubated with a probe, such as an antibody, which binds specifically to the desired protein. This probe is usually provided directly or indirectly with a chemiluminescent or colorimetric marker, which can be detected readily. The presence and the observed amount of marker indicate the presence and the amount of the sought mutant protein in the cell. However, other methods are also known.

### Example 6

### Growth of Genetically Modified Organism: Media and Culture Conditions

[48520] Genetically modified Yeast, Mortierella or Escherichia coli are grown in synthetic or natural growth media known by the skilled worker. A number of different growth media for Yeast, Mortierella or Escherichia coli are well known and widely available. A method for culturing Mortierella is disclosed by Jang et al. (Bot. Bull. Acad. Sin. 41, 41 (2000)). Mortierella can be grown at 20° C. in a culture medium containing: 10 g/l glucose, 5 g/l yeast extract at pH 6.5. Furthermore Jang et al. teaches a submerged basal medium containing 20 g/l soluble starch, 5 g/l Bacto yeast extract, 10 g/l KNO3, 1 g/l KH2PO4, and 0.5 g/l MgSO₄.7H₂O, pH 6.5.

[48521] Said media, which can be used according to the invention usually consist of one or more carbon sources, nitrogen sources, inorganic salts, vitamins and trace elements. Preferred carbon sources are sugars such as mono-, di- or polysaccharides. Examples of very good carbon sources are glucose, fructose, mannose, galactose, ribose, sorbose, ribulose, lactose, maltose, sucrose, raffinose, starch or cellulose. Sugars may also be added to the media via complex compounds such as molasses or other by-products of sugar refining. It may also be advantageous to add mixtures of various carbon sources. Other possible carbon sources are alcohols and/or organic acids such as methanol, ethanol, acetic acid or lactic acid. Nitrogen sources are usually organic or inorganic nitrogen compounds or materials containing said compounds. Examples of nitrogen sources include ammonia gas, aqueous ammonia solutions or ammonium salts such as NH₄Cl, or (NH4)2SO₄, NH₄OH, nitrates, urea, amino acids or complex nitrogen sources such as cornsteep liquor, soybean flour, soybean protein, yeast extract, meat extract and others. Mixtures of the above nitrogen sources may be used advantageously.

[48522] Inorganic salt compounds, which may be included in the media comprise the chloride, phosphorus or sulfate salts of calcium, magnesium, sodium, cobalt, molybdenum, potassium, manganese, zinc, copper and iron. Chelating agents may be added to the medium in order to keep the metal ions in solution. Particularly suitable chelating agents include dihydroxyphenols such as catechol or protocatechulate or organic acids such as citric acid. The media usually also contain other growth factors such as vitamins or growth promoters, which include, for example, biotin, riboflavin, thiamine, folic acid, nicotinic acid, panthothenate and pyridoxine. Growth factors and salts are frequently derived from complex media components such as yeast extract, molasses, cornsteep liquor and the like. The exact composition of the compounds used in the media depends heavily on the particular experiment and is decided upon individually for each specific case. Information on the optimization of media can be found in the textbook “Applied Microbiol. Physiology, A Practical Approach” (eds. Rhodes P. M., Stanbury P. F., IRL Press pp. 53-73 (1997)). Growth media can also be obtained from commercial suppliers, for example Standard 1 (Merck) or BHI (Brain heart infusion, DIFCO) and the like.

[48523] All media components are sterilized, either by heat (20 min at 1.5 bar and 121° C.) or by filter sterilization. The components may be sterilized either together or, if required, separately. All media components may be present at the start of the cultivation or added continuously or batchwise, as desired.

[48524] The culture conditions are defined separately for each experiment. The temperature is normally between 15° C. and 45° C. and may be kept constant or may be altered during the experiment.

[48525] The pH of the medium should be in the range from 5 to 8.5, preferably around 7.0, and can be maintained by adding buffers to the media. An example of a buffer for this purpose is a potassium phosphate buffer. Synthetic buffers such as MOPS, HEPES, ACES and the like may be used as an alternative or simultaneously. The culture pH value may also be kept constant during the culture period by addition of, for example, NaOH or NH₄OH. If complex media components such as yeast extract are used, additional buffers are required less since many complex compounds have a high buffer capacity. When using a fermenter for the culture of microorganisms, the pH value can also be regulated using gaseous ammonia.

[48526] The incubation period is generally in a range of from several hours to several days. This time period is selected in such a way that the maximum amount of product accumulates in the fermentation broth. The growth experiments, which are disclosed, can be carried out in a multiplicity of containers such as microtiter plates, glass tubes, glass flasks or glass or metal fermenters of various sizes. To screen a large number of clones, the microorganisms should be grown in microtiter plates, glass tubes or shake flasks, either using simple flasks or baffle flasks. 100 ml shake flasks filled with 10% (based on the volume) of the growth medium required are preferably used. The flasks should be shaken on an orbital shaker (amplitude 25 mm) at a rate ranging from 100 to 300 rpm. Evaporation losses can be reduced by maintaining a humid atmosphere; as an alternative, a mathematical correction should be carried out for the evaporation losses.

[48527] If genetically modified clones are examined, an unmodified control clone, or a control clone, which contains the basic plasmid without insertion, should also be included in the tests. If a transgenic sequence is expressed, a control clone should advantageously again be included in these tests. The medium is advantageously inoculated to an OD600 of 0.5 to 1.5 using cells which have been grown on agar plates, such as CM plates (10 g/l glucose, 2.5 g/l NaCl, 2 g/I urea, 10 g/l polypeptone, 5 g/l yeast extract, 5 g/l meat extract, 22 g/l agar, pH value 6.8 established with 2M NaOH), which have been incubated at 30° C. The media are inoculated for example by addition of a liquid preculture of seed organism such as E. coli or S. cerevisiae.

### Example 7

### Growth of Genetically Modified Algae: Media and Culture Conditions

### Growing Chlamydomonas:

[48528] Chlamydomonas reinhardtii is able to grow under various growth conditions. It is a unicellular alga. The cells of Chlamydomonas reinhardtii can be normally cultured autotrophically in the media mentioned below. Cells of Chlamydomonas reinhardtii can be cultivated at 25° C. under cool-white fluorescence light at 10,000 lux (120 μmol m²s¹ photosynthetically active radiation) as described by Ghirardi et al., Appl. Biochem. Biotechnol. 63, 141 (1997) or Semin et al., Plant. Physiol., 131, 1756 (2003).

### Chlamydomonas Growth Medium:

[48529] 1 l growth medium is prepared by adding the following volumes of the stock solutions as mentioned below:

[48530] 1 ml solution A, 5 ml solution B, 1 ml solution C, 1 ml solution D, 3 ml solution E, 3 ml solution F, 1 ml solution G, 1 ml solution H.

| | |
|---|---|
| A) Trace elements solution: | 1 g/l H₃BO₃ |
| | 1 g/l ZnSO₄ × 7 H₂O |
| | 0.3 g/l MnSO₄ × H₂O |
| | 0.2 g/l CoCl₂ × 6 H₂O |
| | 0.2 g/l Na₂MoO₄ × 2 H₂O |
| | 0.04 g/l CuSO₄ |
| B) Na Citrate solution: | 10% w/v Na citrate × 2 H₂O |
| C) Iron solution: | 1% w/v FeCl₃ × 6 H₂O |
| D) Calcium solution: | 5.3% w/v CaCl₂ × H₂O |
| E) Magnesium solution: | 10% w/v MgSO₄ × 7 H₂O |
| F) Ammonium solution: | 10% w/v NH₄NO₃ |
| G) Potassium solution: | 10% w/v KH₂PO₄ |
| H) Dipotassium solution | 10% w/v K₂HPO₄ |

### Bristol's Soil Extract Medium:

[48531] Soil extract medium can generally be used for the growth of axenic and xenic algae cultures. The soil extract is prepared by adding a teaspoon of dry garden soil and a pinch of CaCO₃ to 200 ml distilled water and steaming said solution for approximately 2 h on two consecutive days. Afterwards the supernatant is decanted and added to the desired medium.

[48532] To 940 ml bristol's solution 40 ml of soil extract medium is added.

### Bristol's Solution:

[48533] To 940 ml of distilled water, the following stock solutions are added:

| | | |
|---|---|---|
| 10 ml | NaNO₃ | (25 g/l) |
| 10 ml | CaCl₂ × 2 H₂O | (2.5 g/l) |
| 10 ml | MgSO₄ × 7 H₂O | (7.5 g/l) |
| 10 ml | K₂HPO₄ | (7.5 g/l) |
| 10 ml | KH₂PO₄ | (17.5 g/l) |
| 10 ml | NaCl | (2.5 g/l) |

Amplification and Cloning of DNA from Chlamydomonas Reinhardtii:

[48534] The DNA can be amplified by the polymerase chain reaction (PCR) from Chlamydomonas reinhardtii by the method of Howitt Crispin A. (BioTechniques 21, 32 (1996)).

### Fine Chemical Production in Chlamydomonas Reinhardtii:

[48535] The fine chemical production can be analysed as mentioned above. The proteins and nucleic acids can be analyzed as mentioned below.

### Example 8

### In-Vitro Analysis of the Function of the Proteins Encoded by the Transformed Sequences

[48536] The determination of the activities and kinetic parameters of enzymes is well known in the art. Experiments for determining the activity of a specific modified enzyme must be adapted to the specific activity of the wild-enzyme type, which is well within the capabilities of the skilled worker. Overviews of enzymes in general and specific details regarding the structure, kinetics, principles, methods, applications and examples for the determination of many enzyme activities can be found for example in the following literature: Dixon M. and Webb E. C.: “Enzymes”, Longmans, London (1979); Fersht “Enzyme Structure and Mechanism”, Freeman, New York(1985); Walsh “Enzymatic Reaction Mechanisms” Freeman, San Francisco (1979); Price N. C., Stevens L., “Fundamentals of Enzymology” Oxford Univ. Press, Oxford (1982); Boyer P. D. (ed.), “The Enzymes”, 3rd ed. Academic Press, New York (1983); Bisswanger H., “Enzymkinetik”, 2^{nd} ed. VCH, Weinheim (1994); Bergmeyer H.U., Bergmeyer J., GraRl M., (eds.) “Methods of Enzymatic Analysis”, 3rd rd. Vol. 1-XII, Verlag Chemie: Weinheim (1983-1986); and “Ullmann's Encyclopedia of Industrial Chemistry” Vol. A9, “Enzymes”, VCH, Weinheim, pp. 352-363 (1987).

### Example 9

### Analysis of the Effect of the Nucleic Acid Molecule on the Production of the Fine Chemical

[48537] The effect of the genetic modification in plants, fungi, algae, ciliates on the production of a fine chemical can be determined by growing the modified microorganisms for example Chlamydomonas reinhardtii under suitable conditions (such as those described above) and analyzing the medium and/or the cellular components for the increased production of the fine chemical. Such analytical techniques are well known to the skilled worker and encompass spectroscopy, thinlayer chromatography, various types of staining methods, enzymatic and microbiological methods and analytical chromatography such as high-performance liquid chromatography (see, for example, “Ullmann Encyclopedia of Industrial Chemistry”, Vol. A2, pp. 89-90 and pp. 443-613, V C H, Weinheim (1985); Fallon A. et al., “Applications of HPLC in Biochemistry” in “Laboratory Techniques in Biochemistry and Molecular Biology”, Vol. 17 (1987); Rehm et al. “Biotechnology”, Vol. 3, Chapter III: “Product recovery and purification”, pp. 469-714, VCH: Weinheim (1993); Belter P. A. et al. “Bioseparations: downstream processing for Biotechnology”, John Wiley and Sons (1988); Kennedy J. F. and Cabral J. M. S., “Recovery processes for biological Materials”, John Wiley and Sons(1992); Shaeiwitzand J. A., Henry J. D., “Biochemical Separations” in “Ullmann's Encyclopedia of Industrial Chemistry”, Vol. B3; chapter 11, pp. 1-27, VCH, Weinheim (1988); and Dechow, “Separation and purification techniques in biotechnology”, Noyes Publications (1989)).

[48538] In addition to the determination of the fermentation end product, other components of the metabolic pathways which are used for the production of the desired compound, such as intermediates and by-products, may also be analyzed in order to determine the total productivity of the organism, the yield and/or production efficiency of the compound. The analytical methods encompass determining the amounts of nutrients in the medium (for example sugars, hydrocarbons, nitrogen sources, phosphate and other ions), determining biomass composition and growth, analyzing the production of ordinary metabolites from biosynthetic pathways and measuring gases generated during the fermentation. Standard methods for these are described in “Applied Microbial Physiology” A Practical Approach, Rhodes P. M. and Stanbury P. F., eds. IRL Press, pp. 103-129; 131-163 and 165-192, and the references cited therein.

### Example 10

### Purification of a Fine Chemical e.g. Vitamin E, like Alpha-, Beta-, or Gamma-Tocopherol or its Precursor 2,3-dimethyl-5-phytylquinol

[48539] The unambiguous detection for the presence of vitamin E, like alpha-, beta-, or gamma-tocopherol, or its precursor 2,3-dimethyl-5-phytylquinol can be obtained by analyzing recombinant organisms using analytical standard methods: GC, GC-MS or TLC, as described (1997, in: Advances on Lipid Methodology, Fourth Edition: Christie, Oily Press, Dundee, 119-169; 1998, Gaschromatographie-Massenspektrometrie-Verfahren [Gas chromatography/mass spectrometric methods], Lipide 33:343-353).

[48540] The total vitamin E produced in the organism for example in yeasts used in the inventive process can be analysed for example according to the following procedure:

[48541] The material such as yeasts, E. coli or plants to be analyzed can be disrupted by sonication, grinding in a glass mill, liquid nitrogen and grinding or via other applicable methods.

[48542] Plant material is initially homogenized mechanically by comminuting in a pestle and mortar to make it more amenable to extraction.

[48543] A typical sample pretreatment consists of a total lipid extraction using such polar organic solvents as acetone or alcohols as methanol, or ethers, saponification , partition between phases, seperation of non-polar epiphase from more polar hypophasic derivatives and chromatography.

[48544] In order to avoid oxidation, the resulting extracts can be analyzed immediate after the extraction with the aid of a Waters Allience 2690 HPLC system. Tocopherols and vitamin E is separated on a reverse phase column (ProntoSil 200-3-C30, Bischoff) with a mobile phase of 100% methanol, and identified by means of a standard (Merck). The fluorescence of the substances (excitation 295 nm, emission 320 nm), which is detected with the aid of a Jasco FP 920 fluorescence detector, can serve as detection system.

[48545] If required and desired, further chromatography steps with a suitable resin may follow. Advantageously, the vitamin E, like alpha-, beta-, or gamma-tocopherol, or its precursor 2,3-dimethyl-5phytylquinol, can be further purified with a so-called RTH PLC. As eluent acetonitrile/water or chloroform/acetonitrile mixtures can be used. If necessary, these chromatography steps may be repeated, using identical or other chromatography resins. The skilled worker is familiar with the selection of suitable chromatography resin and the most effective use for a particular molecule to be purified.

### Example 11

### Cloning of the Sequences as Shown in Table I, Column 5 or 8 for the Expression in Plants

### Example 11a

### PCR Amplification of the Sequences

[48546] Unless otherwise specified, standard methods as described in Sambrook et al., Molecular Cloning: A laboratory manual, Cold Spring Harbor 1989, Cold Spring Harbor Laboratory Press are used.

[48547] The inventive sequences as shown in the respective line in Table I, column 5, preferably the coding region thereof, were amplified by PCR as described in the protocol of the Pfu Ultra, Pfu Turbo or Herculase DNA polymerase (Stratagene). The composition for the protocol of the Pfu Ultra, Pfu Turbo or Herculase DNA polymerase was as follows: 1×PCR buffer (Stratagene), 0.2 mM of each dNTP, 100 ng genomic DNA of Saccharomyces cerevisiae (strain S288C; Research Genetics, Inc., now Invitrogen), Escherichia coli (strain MG1655; E. coli Genetic Stock Center), Synechocystis sp. (strain PCC6803), Azotobacter vinelandii (strain N.R. Smith,16), Thermus thermophilus (HB8) or 50 ng cDNA from various tissues and development stages of Arabidopsis thaliana (ecotype Columbia), Physcomitrella patens, Glycine max (variety Resnick), Brassica napus, Oryza sativa or Zea mays (variety B73, Mo17, A188), 50 pmol forward primer, 50 pmol reverse primer, with or without 1 M Betaine, 2.5 u Pfu Ultra, Pfu Turbo or Herculase DNA polymerase.

[48548] The amplification cycles were as follows:

[48549] 1 cycle of 2-3 minutes at 94-95° C., then 25-36 cycles with 30-60 seconds at 94-95° C., 30-45 seconds at 50-60° C. and 210-480 seconds at 72° C., followed by 1 cycle of 5-10 minutes at 72° C., then 4-16° C.—preferably for Saccharomyces cerevisiae, Escherichia coli, Synechocystis sp., Azotobacter vinelandii, Thermus thermophilus.

[48550] In case of Arabidopsis thaliana, Brassica napus, Glycine max, Oryza sativa, Physcomitrella patens, Zea mays the amplification cycles were as follows:

[48551] 1 cycle with 30 seconds at 94° C., 30 seconds at 61° C., 15 minutes at 72° C., then 2 cycles with 30 seconds at 94° C., 30 seconds at 60° C., 15 minutes at 72° C., then 3 cycles with 30 seconds at 94° C., 30 seconds at 59° C., 15 minutes at 72° C., then 4 cycles with 30 seconds at 94° C., 30 seconds at 58° C., 15 minutes at 72° C., then 25 cycles with 30 seconds at 94° C., 30 seconds at 57° C., 15 minutes at 72° C., then 1 cycle with 10 minutes at 72° C., then finally 4-16° C.

[48552] RNAs were generated with the RNeasy Plant Kit according to the standard protocol (Qiagen) and Superscript II Reverse Transkriptase was used to produce double stranded cDNA according to the standard protocol (Invitrogen).

[48553] ORF specific primer pairs for the genes to be expressed are shown in the respective line in Table III, column 8. The following adapter sequences were added to Saccharomyces cerevisiae ORF specific primers (see Table III) for cloning purposes:

SEQ ID NO: 20
i) foward primer: 5′-GGAATTCCAGCTGACCACC-3′
SEQ ID NO: 21
ii) reverse primer: 5′-GATCCCCGGGAATTGCCATG-3′

[48554] These adaptor sequences allow cloning of the ORF into the various vectors containing the Resgen adaptors, see table column E of Table c.

[48555] The following adapter sequences were added to Saccharomyces cerevisiae, Escherichia coli, Synechocystis sp., Azotobacter vinelandii, Thermus thermophilus, Arabidopsis thaliana, Brassica napus, Glycine max, Oryza sativa , Physcomitrella patens, or Zea mays ORF specific primers for cloning purposes:

SEQ ID NO: 22
iii) forward primer: 5′-TTGCTCTTCC-3′
SEQ ID NO: 23
iiii) reverse primer: 5′-TTGCTCTTCG-3′

[48556] The adaptor sequences allow cloning of the ORF into the various vectors containing the Colic adaptors, see table column E of Table c.

[48557] Therefore for amplification and cloning of Saccharomyces cerevisiae SEQ ID NO: 113598, a primer consisting of the adaptor sequence i) and the ORF specific sequence SEQ ID NO: 113632 and a second primer consisting of the adaptor sequence ii) and the ORF specific sequence SEQ ID NO: 113633 were used.

[48558] For amplification and cloning of Escherichia coli SEQ ID NO: 7081, a primer consisting of the adaptor sequence iii) and the ORF specific sequence SEQ ID NO: 7261 and a second primer consisting of the adaptor sequence iiii) and the ORF specific sequence SEQ ID NO: 7262 were used.

[48559] For amplification and cloning of Synechocystis sp. SEQ ID NO: 12140, a primer consisting of the adaptor sequence iii) and the ORF specific sequence SEQ ID NO: 12336 and a second primer consisting of the adaptor sequence iiii) and the ORF specific sequence SEQ ID NO: 12337 were used.

[48560] For amplification and cloning of Arabidopsis thaliana SEQ ID NO: 1815, a primer consisting of the adaptor sequence iii) and the ORF specific sequence SEQ ID NO: 2361 and a second primer consisting of the adaptor sequence iiii) and the ORF specific sequence SEQ ID NO: 2362 were used.

[48561] For amplification and cloning of Azotobacter vinelandii SEQ ID NO: 6510, a primer consisting of the adaptor sequence iii) and the ORF specific sequence SEQ ID NO: 6670 and a second primer consisting of the adaptor sequence iiii) and the ORF specific sequence SEQ ID NO: 6671 were used.

[48562] For amplification and cloning of Brassica napus SEQ ID NO: 15532, a primer consisting of the adaptor sequence iii) and the ORF specific sequence SEQ ID NO: 16150 and a second primer consisting of the adaptor sequence iiii) and the ORF specific sequence SEQ ID NO: 16151 were used.

[48563] For amplification and cloning of Glycine max SEQ ID NO: 10811, a primer consisting of the adaptor sequence iii) and the ORF specific sequence SEQ ID NO: 11207 and a second primer consisting of the adaptor sequence iiii) and the ORF specific sequence SEQ ID NO: 11208 were used.

[48564] For amplification and cloning of Physcomytrella patens SEQ ID NO: 45757, a primer consisting of the adaptor sequence iii) and the ORF specific sequence SEQ ID NO: 45791 and a second primer consisting of the adaptor sequence iiii) and the ORF specific sequence SEQ ID NO: 45792 were used.

[48565] For amplification and cloning of Thermus thermophilus SEQ ID NO: 12698, a primer consisting of the adaptor sequence iii) and the ORF specific sequence SEQ ID NO: 12970 and a second primer consisting of the adaptor sequence iiii) and the ORF specific sequence SEQ ID NO: 12971 were used.

[48566] Following these examples every sequence disclosed in Table I, preferably column 5, especially the coding region thereof can be cloned by fusing the adaptor sequences to the respective specific primers sequences as disclosed in Table III, column 8 using the respective vectors shown in Table c. Table c showing binary vectors used in Example 11

TABLE c
Overview of the different vectors used for cloning the ORFs; showing their
SEQ ID NOs (column A), their vector names (column B), the promoters they
contain for expression of the ORFs (column C), if present, the additional artificial
targeting sequence (column D), the adapter sequence (column E), the expression
type conferred by the promoter mentioned in column B (column F)
and the figure number (column G).

| | B | C | D | E | | |
|---|---|---|---|---|---|---|
| A | Vector | Promoter | Target | Adapter | F | G |
| Seq ID | Name | Name | Sequence | Sequence | Expression Type | FIG. |
| 30 | pMTX0270p | Super | | Colic | non targeted constitutive | 6 |
| | | | | | expression preferentially | |
| | | | | | in green tissues | |
| 31 | pMTX155 | Big35S | | Resgen | non targeted constitutive | 7 |
| | | | | | expression preferentially | |
| | | | | | in green tissues | |
| 32 | VC- | Super | FNR | Resgen | plastidic targeted constitutive | 3 |
| | MME354- | | | | expression preferentially | |
| | 1QCZ | | | | in green tissues | |
| 34 | VC- | Super | IVD | Resgen | mitochondric targeted | 8 |
| | MME356- | | | | constitutive expression | |
| | 1QCZ | | | | preferentially in green | |
| | | | | | tissues | |
| 36 | VC- | USP | | Resgen | non targeted expression | 9 |
| | MME301- | | | | preferentially in seeds | |
| | 1QCZ | | | | | |
| 37 | pMTX461korrp | USP | FNR | Resgen | plastidic targeted expression | 10 |
| | | | | | preferentially in | |
| | | | | | seeds | |
| 39 | VC- | USP | IVD | Resgen | mitochondric targeted | 11 |
| | MME462- | | | | expression preferentially | |
| | 1QCZ | | | | in seeds | |
| 41 | VC- | Super | | Colic | non targeted constitutive | 1 |
| | MME220- | | | | expression preferentially | |
| | 1qcz | | | | in green tissues | |
| 42 | VC- | Super | FNR | Colic | plastidic targeted constitutive | 4 |
| | MME432- | | | | expression preferentially | |
| | 1qcz | | | | in green tissues | |
| 44 | VC- | Super | IVD | Colic | mitochondric targeted | 12 |
| | MME431- | | | | constitutive expression | |
| | 1qcz | | | | preferentially in green | |
| | | | | | tissues | |
| 46 | VC- | PcUbi | | Colic | non targeted constitutive | 2 |
| | MME221- | | | | expression preferentially | |
| | 1qcz | | | | in green tissues | |
| 47 | pMTX447korr | PcUbi | FNR | Colic | plastidic targeted constitutive | 13 |
| | | | | | expression preferentially | |
| | | | | | in green tissues | |
| 49 | VC- | PcUbi | IVD | Colic | mitochondric targeted | 14 |
| | MME445- | | | | constitutive expression | |
| | 1qcz | | | | preferentially in green | |
| | | | | | tissues | |
| 51 | VC- | USP | | Colic | non targeted expression | 15 |
| | MME289- | | | | preferentially in seeds | |
| | 1qcz | | | | | |
| 52 | VC- | USP | FNR | Colic | plastidic targeted expression | 16 |
| | MME464- | | | | preferentially in | |
| | 1qcz | | | | seeds | |
| 54 | VC- | USP | IVD | Colic | mitochondric targeted | 17 |
| | MME465- | | | | expression in preferentially | |
| | 1qcz | | | | seeds | |
| 56 | VC- | Super | | Resgen | non targeted constitutive | 5 |
| | MME489- | | | | expression preferentially | |
| | 1QCZ | | | | in green tissues | |

[48567] In column C PcUbi refers to the PcUbi promoter (Kawalleck et al., Plant. Molecular Biology, 21, 673 (1993)) also named p-PcUBI in table d, Super to the Super promoter (Ni et al,. Plant Journal 7, 661 (1995), WO 95/14098) also named p-Super in table d, Big35S to the enhanced 35S promoter (Comai et al., Plant Mol Biol 15, 373-383 (1990) and USP to the USP promoter (Bumlein et al., Mol Gen Genet. 225(3):459-67 (1991)) als named p-USP in table d.

### Example 11 b

### Construction of Binary Vectors for Non-Targeted Expression of Proteins

[48568] “Non-targeted” expression in this context means, that no additional targeting sequences were added to the ORF to be expressed.

[48569] For non-targeted expression the binary vectors used for cloning were VC-MME220-1 qcz SEQ ID NO 41 (FIG. 1), VC-MME221-1qcz SEQ ID NO 46 (FIG. 2), and VC-MME489-1QCZ SEQ ID NO: 56 (FIG. 5), respectively. The binary vectors used for cloning the targeting sequence were VC-MME489-1QCZ SEQ ID NO: 56 (FIG. 5) and pMTX0270p SEQ ID NO 30 (FIG. 6), respectively. Other useful binary vectors are known to the skilled worker; an overview of binary vectors and their use can be found in Hellens R., Mullineaux P. and Klee H. (Trends in Plant Science, 5 (10), 446 (2000)). Such vectors have to be equally equipped with appropriate promoters and targeting sequences.

### Example 11c

### Construction of Binary Vectors for Plastidic-Targeted Expression of Proteins

[48570] For construction of a vector for plastid-targeted expression in preferential green tissues or preferential in seeds, the plastidic targeting sequence of the gene FNR from Spinacia oleracea was amplified. In order to amplify the targeting sequence, genomic DNA was extracted from leaves of 4 weeks old S. oleracea plants (DNeasy Plant Mini Kit, Qiagen, Hilden). The gDNA was used as the template for a PCR.

[48571] To enable cloning of the transit sequence into the vector VC-MME489-1QCZ and VC-MME301 1QCZ an EcoRl restriction enzyme recognition sequence was added to both the forward and reverse primers, whereas for cloning in the vectors pMTX0270p, VC-MME220-1 qcz, VCMME 221-1qcz and VC-MME289-1qcz a Pmel restriction enzyme recognition sequence was added to the forward primer and a Ncol site was added to the reverse primer.

| | |
|---|---|
| FNR5EcoResgen | ATA GAA TTC GCA TAA ACT TAT CTT CAT AGT TGC C |
| | SEQ ID NO: 24 |
| FNR3EcoResgen | ATA GAA TTC AGA GGC GAT CTG GGC CCT |
| | SEQ ID NO: 25 |
| FNR5PmeColic | ATA GTT TAA ACG CAT AAA CTT ATC TTC ATA GTT GCC |
| | SEQ ID NO: 26 |
| FNR3NcoColic | ATA CCA TGG AAG AGC AAG AGG CGA TCT GGG CCC T |
| | SEQ ID NO: 27 |

[48572] The resulting sequence SEQ ID NO: 28 amplified from genomic spinach DNA, comprised a 511TR (bp 1-165), and the coding region (bp 166-273 and 351-419). The coding sequence is interrupted by an intronic sequence from by 274 to by 350:

(SEQ ID NO: 28)
gcataaacttatcttcatagttgccactccaatttgctccttgaatctcctccacccaatacataatccac
tcctccatcacccacttcactactaaatcaaacttaactctgtttttctctctcctcctttcatttcttat
tcttccaatcatcgtactccgccatgaccaccgctgtcaccgccgctgtttctttcccctctaccaaaacc
acctctctctccgcccgaagctcctccgtcatttcccctgacaaaatcagctacaaaaaggtgattcccaa
tttcactgtgttttttattaataatttgttattttgatgatgagatgattaatttgggtgctgcaggttcc
tttgtactacaggaatgtatctgcaactgggaaaatgggacccatcagggcccagatcgcctct

[48573] The PCR fragment derived with the primers FNR5EcoResgen and FNR3EcoResgen was digested with EcoRI and ligated in the vectors VC-MME489-1QCZ and VC-MME301-1QCZ, that had also been digested with EcoRl. The correct orientation of the FNR targeting sequence was tested by sequencing. The vector generated in this ligation step were VC-MME354-1 QCZ and pMTX461 korrp, respectively.

[48574] The PCR fragment derived with the primers FNR5PmeColic and FNR3NcoColic was digested with Pmel and Ncol and ligated in the vectors pMTX0270p, VC-MME220-1qcz, VC-MME221 1qcz and VC-MME289-1qcz that had been digested with Smal and Ncol. The vectors generated in this ligation step were VC-MME432-1 qcz, VC-MME464-1 qcz and pMTX447korr, respectively.

[48575] For plastidic-targeted constitutive expression in preferentially green tissues an artifical promoter A(ocs)3AmasPmas promoter (Super promoter)) (Ni et al, Plant Journal 7, 661 (1995), WO 95/14098) was used in context of the vector VC-MME354-1QCZ for ORFs from Saccharomyces cerevisiae as well as Arabidopsis thaliana and in context of the vector VC-MME432-1 qcz for ORFs from Escherichia coli as well as Arabidopsis thaliana, resulting in each case in an “inframe” fusion of the FNR targeting sequence with the ORFs.

[48576] For plastidic-targeted expression in preferentially seeds the USP promoter (Baumlein et al., Mol Gen Genet. 225(3):459-67 (1991)) was used in context of either the vector pMTX461 korrp for ORFs from Saccharomyces cerevisiae or in context of the vector VC-MME464-1 qcz for ORFs from Escherichia coli, resulting in each case in an “in-frame” fusion of the FNR targeting sequence with the ORFs.

[48577] For plastidic-targeted constitutive expression in preferentially green tissues and seeds the PcUbi promoter was used in context of the vector pMTX447korr for ORFs from Saccharomyces cerevisiae, Escherichia coli, Synechocystis sp., Azotobacter vinelandii, Thermus thermophilus, Arabidopsis thaliana, Brassica napus, Glycine max, Oryza sativa, Physcomitrella patens, or Zea mays, resulting in each case in an “in-frame” fusion of the FNR targeting sequence with the ORFs.

### Example 11d

### Construction of Binary Vectors for Mitochondric-Targeted Expression of Proteins

[48578] Amplification of the mitochondrial targeting sequence of the gene IVD from Arabidopsis thaliana and construction of vector for mitochondrial-targeted expression in preferential green tissues or preferential in seeds.

[48579] In order to amplify the targeting sequence of the IVD gene from A. thaliana, genomic DNA was extracted from leaves of A. thaliana plants (DNeasy Plant Mini Kit, Qiagen, Hilden). The gDNA was used as the template for a PCR.

[48580] To enable cloning of the transit sequence into the vectors VC-MME489-1 QCZ and VC-MME-301-1QCZ an EcoRI restriction enzyme recognition sequence was added to both the forward and reverse primers, whereas for cloning in the vectors VC-MME220-1qcz, VC-MME-221-1qcz and VC-MME289-1qcz a Pmel restriction enzyme recognition sequence was added to the forward primer and a Ncol site was added to the reverse primer.

| | |
|---|---|
| IVD5EcoResgen | ATA GAA TTC ATG CAG AGG TTT TTC TCC GC |
| | SEQ ID NO: 57 |
| IVD3EcoResgen | ATA GAA TTC CGA AGA ACG AGA AGA GAA AG |
| | SEQ ID NO: 58 |
| IVD5PmeColic | ATA GTT TAA ACA TGC AGA GGT TTT TCT CCG C |
| | SEQ ID NO: 59 |
| IVD3NcoColic | ATA CCA TGG AAG AGC AAA GGA GAG ACG AAG AAC GAG |
| | SEQ ID NO: 60 |

[48581] The resulting sequence (SEQ ID NO: 61) amplified from genomic A. thaliana DNA with IVD5EcoResgen and IVD3EcoResgen comprised 81 bp:

(SEQ ID NO: 61)
atgcagaggtttttctccgccagatcgattctcggttacgccgtcaag
acgcggaggaggtctttctcttctcgttcttcg

[48582] The resulting sequence (SEQ ID NO: 62) amplified from genomic A. thaliana DNA with IVD5PmeColic and IVD3NcoColic comprised 89 bp:

(SEQ ID NO: 62)
atgcagaggtttttctccgccagatcgattctcggttacgcc
gtcaagacgcggaggaggtctttctcttctcgttcttcgtctctcct

[48583] The PCR fragment derived with the primers IVD5EcoResgen and IVD3EcoResgen was digested with EcoRl and ligated in the vectors VC-MME489-1QCZ and VC-MME301-1QCZ that had also been digested with EcoRl. The correct orientation of the IVD targeting sequence was tested by sequencing. The vectors generated in this ligation step were VC-MME356-1 QCZ and VC-MME462-1 QCZ, respectively.

[48584] The PCR fragment derived with the primers IVD5PmeColic and IVD3NcoColic was digested with Pmel and Ncol and ligated in the vectors VC-MME220-1qcz, VC-MME221-1qcz and VC-MME289-1qcz that had been digested with Smal and Ncol. The vectors generated in this ligation step were VC-MME431-1qcz, VC-MME465-1qcz and VC-MME445-1qcz, respectively.

[48585] For mitochondrial-targeted constitutive expression in preferentially green tissues an artificial promoter A(ocs)3AmasPmas promoter (Super promoter) (Ni et al, Plant Journal 7, 661 (1995), WO 95/14098) was used in context of the vector VC-MME356-1 QCZ for ORFs from Saccharomyces cerevisiae and in context of the vector VC-MME431-1qcz for ORFs from Escherichia coli, resulting in each case in an “in-frame” fusion between the IVD sequence and the respective ORFs.

[48586] For mitochondrial-targeted constitutive expression in preferentially seeds the USP promoter (Bäumlein et al., Mol Gen Genet. 225 (3), 459 (1991)) was used in context of the vector VC-MME462-1QCZ for ORFs from Saccharomyces cerevisiae and in context of the vector VC-MME465-1qcz for ORFs from Escherichia coli, resulting in each case in an “in-frame” fusion between the IVD sequence and the respective ORFs.

[48587] For mitochondrial-targeted constitutive expression in preferentially green tissues and seeds the

[48588] PcUbi promoter was used in context of the vector VC-MME445-1 qcz for ORFs from Saccharomyces cerevisiae, Escherichia coli, Synechocystis sp., Azotobacter vinelandii, Thermus thermophilus, Arabidopsis thaliana, Brassica napus, Glycine max, Oryza sativa, Physcomitrella patens, or Zea mays, resulting in each case in an “in-frame” fusion between the IVD sequence and the respective ORFs.

[48589] Other useful binary vectors are known to the skilled worker; an overview of binary vectors and their use can be found in Hellens R., Mullineaux P. and Klee H., (Trends in Plant Science, 5 (10), 446 (2000)). Such vectors have to be equally equipped with appropriate promoters and targeting sequences.

### Example 11e

### Cloning of Inventive Sequences as Shown in Table I, Column 5 in the Different Expression Vectors

[48590] For cloning of for example SEQ ID NO: 7081 from Escherichia coli or any other ORF from Escherichia coli, Synechocystis sp., Azotobacter vinelandii, Thermus thermophilus, Arabidopsis thaliana, Brassica napus, Glycine max or Physcomitrella patens the vector DNA was treated with the restriction enzymes Pacl and Ncol following the standard protocol (MBI Fermentas).

[48591] For cloning for example the ORFs of SEQ ID NO: 113598 from Saccharomyces cerevisiae or any other ORF from Saccharomyces cerevisiae into vectors containing the Resgen adaptor sequence the respective vector DNA was treated with the restriction enzyme Ncol.

[48592] For cloning of for example ORFs SEQ ID NO: 66274 from Saccharomyces cerevisiae or any other ORF from Saccharomyces cerevisiae into vectors containing the Colic adaptor sequence, the respective vector DNA was treated with the restriction enzymes Pacl and Ncol following the standard protocol (MBI Fermentas).

[48593] In all cases the reaction was stopped by inactivation at 70° C. for 20 minutes and purified over QlAquick or NucleoSpin Extract II columns following the standard protocol (Qiagen or Macherey-Nagel).

[48594] Then the PCR-product representing the amplified ORF with the respective adapter sequences and the vector DNA were treated with T4 DNA polymerase according to the standard protocol (MBI Fermentas) to produce single stranded overhangs with the parameters 1 unit T4 DNA polymerase at 37° C. for 2-10 minutes for the vector and 1-2 u T4 DNA polymerase at 15-17° C. for 10-60 minutes for the PCR product representing SEQ ID NO: 7081.

[48595] The reaction was stopped by addition of high-salt buffer and purified over QlAquick or NucleoSpin Extract II columns following the standard protocol (Qiagen or Macherey-Nagel).

[48596] According to this example the skilled person is able to clone all sequences disclosed in Table I, preferably column 5 or column 8, especially the coding region thereof.

[48597] Approximately 30-60 ng of prepared vector and a defined amount of prepared amplificate were mixed and hybridized at 65° C. for 15 minutes followed by 37° C. 0.1° C./1 seconds, followed by 37° C. 10 minutes, followed by 0.1° C./1 seconds, then 4-10° C.

[48598] The ligated constructs were transformed in the same reaction vessel by addition of competent E. coli cells (strain DHSalpha) and incubation for 20 minutes at 1° C. followed by a heat shock for 90 seconds at 42° C. and cooling to 1-4° C. Then, complete medium (SOC) was added and the mixture was incubated for 45 minutes at 37° C. The entire mixture was subsequently plated onto an agar plate with 0.05 mg/ml kanamycin and incubated overnight at 37° C.

[48599] The outcome of the cloning step was verified by amplification with the aid of primers which bind upstream and downstream of the integration site, thus allowing the amplification of the insertion.

[48600] The amplifications were carried out as described in the protocol of Taq DNA polymerase (Gibco-BRL).

[48601] The amplification cycles were as follows: 1 cycle of 1-5 minutes at 94° C., followed by 35 cycles of in each case 15-60 seconds at 94° C., 15-60 seconds at 50-66° C. and 5-15 minutes at 72° C., followed by 1 cycle of 10 minutes at 72° C., then 4-16° C. Several colonies were checked, but only one colony for which a PCR product of the expected size was detected was used in the following steps.

[48602] A portion of this positive colony was transferred into a reaction vessel filled with complete medium (LB) supplemented with kanamycin and incubated overnight at 37° C.

[48603] The plasmid preparation was carried out as specified in the Qiaprep or NucleoSpin Multi-96 Plus standard protocol (Qiagen or Macherey-Nagel).

### Example 11f

### Generation of Transgenic Plants which Express Sequences as Shown in Table I, Preferably Column 5

[48604] 1-5 ng of the plasmid DNA isolated was transformed by electroporation or transformation into competent cells of Agrobacterium tumefaciens, of strain GV 3101 pMP90 (Koncz and Schell, Mol. Gen. Gent. 204, 383 (1986)). Thereafter, complete medium (YEP) was added and the mixture was transferred into a fresh reaction vessel for 3 hours at 28° C. Thereafter, all of the reaction mixture was plated onto YEP agar plates supplemented with the respective antibiotics, e.g. rifampicine (0.1 mg/ml), gentamycine (0.025 mg/ml and kanamycin (0.05 mg/ml) and incubated for 48 hours at 28° C.

[48605] The agrobacteria that contains the plasmid construct were then used for the transformation of plants.

[48606] A colony was picked from the agar plate with the aid of a pipette tip and taken up in 3 ml of liquid TB medium, which also contained suitable antibiotics as described above. The preculture was grown for 48 hours at 28° C. and 120 rpm.

[48607] 400 ml of LB medium containing the same antibiotics as above were used for the main culture. The preculture was transferred into the main culture. It was grown for 18 hours at 28° C. and 120 rpm. After centrifugation at 4 000 rpm, the pellet was resuspended in infiltration medium (MS medium, 10% sucrose).

[48608] In order to grow the plants for the transformation, dishes (Piki Saat 80, green, provided with a screen bottom, 30×20×4.5 cm, from Wiesauplast, Kunststofftechnik, Germany) were half-filled with a GS 90 substrate (standard soil, Werkverband E.V., Germany). The dishes were watered overnight with 0.05% Proplant solution (Chimac-Apriphar, Belgium). A. thaliana C24 seeds (Nottingham Arabidopsis Stock Centre, UK; NASC Stock N906) were scattered over the dish, approximately 1 000 seeds per dish. The dishes were covered with a hood and placed in the stratification facility (8 h, 110 μmol m⁻²s⁻¹, 22° C.; 16 h, dark, 6° C.). After 5 days, the dishes were placed into the short-day controlled environment chamber (8 h, 130 μmol m⁻²s⁻¹, 22° C.; 16 h, dark, 20° C.), where they remained for approximately 10 days until the first true leaves had formed.

[48609] The seedlings were transferred into pots containing the same substrate (Teku pots, 7 cm, LC series, manufactured by Poppelmann GmbH & Co, Germany). Five plants were pricked out into each pot. The pots were then returned into the short-day controlled environment chamber for the plant to continue growing.

[48610] After 10 days, the plants were transferred into the greenhouse cabinet (supplementary illumination, 16 h, 340 μmol m⁻²s⁻¹, 22° C.; 8 h, dark, 20° C.), where they were allowed to grow for further 17 days.

[48611] For the transformation, 6-week-old Arabidopsis plants, which had just started flowering were immersed for 10 seconds into the above-described agrobacterial suspension which had previously been treated with 10 μl Silwett L77 (Crompton S. A., Osi Specialties, Switzerland). The method in question is described by Clough J. C. and Bent A. F. (Plant J. 16, 735 (1998)).

[48612] The plants were subsequently placed for 18 hours into a humid chamber. Thereafter, the pots were returned to the greenhouse for the plants to continue growing. The plants remained in the greenhouse for another 10 weeks until the seeds were ready for harvesting.

[48613] Depending on the tolerance marker used for the selection of the transformed plants the harvested seeds were planted in the greenhouse and subjected to a spray selection or else first sterilized and then grown on agar plates supplemented with the respective selection agent. Since the vector contained the bar gene as the tolerance marker, plantlets were sprayed four times at an interval of 2 to 3 days with 0.02% BASTA® and transformed plants were allowed to set seeds.

[48614] The seeds of the transgenic A. thaliana plants were stored in the freezer (at −20° C.).

### Example 11g

### Plant Culture (Arabidopsis) for Bioanalytical Analyses

[48615] For the bioanalytical analyses of the transgenic plants, the latter were grown uniformly a specific culture facility. To this end the GS-90 substrate as the compost mixture was introduced into the potting machine (Laible System GmbH, Singen, Germany) and filled into the pots. Thereafter, 35 pots were combined in one dish and treated with Previcur. For the treatment, 25 ml of Previcur were taken up in 10 l of tap water. This amount was sufficient for the treatment of approximately 200 pots. The pots were placed into the Previcur solution and additionally irrigated overhead with tap water without Previcur. They were used within four days.

[48616] For the sowing, the seeds, which had been stored in the refrigerator (at −20° C.), were removed from the Eppendorf tubes with the aid of a toothpick and transferred into the pots with the compost. In total, approximately 5 to 12 seeds were distributed in the middle of the pot.

[48617] After the seeds had been sown, the dishes with the pots were covered with matching plastic hood and placed into the stratification chamber for 4 days in the dark at 4° C. The humidity was approximately 90%. After the stratification, the test plants were grown for 22 to 23 days at a 16-h-light, 8-h-dark rhythm at 20° C., an atmospheric humidity of 60% and a CO2 concentration of approximately 400 ppm. The light sources used were Powerstar HQI-T 250 W/D Daylight lamps from Osram, which generate a light resembling the solar color spectrum with a light intensity of approximately 220 E/m2/s−1.

[48618] Selection of transgenic plants was depending on the use resistance marker. In case of the bar gene as the resistance marker plantlets were sprayed three times at days 8-10 after sowing with 0.02% BASTA®, (Glufosinate ammonium;) Bayer CropScience, Germany, Leverkusen .The resistance plants were thinned when they had reached the age of 14 days. The plants, which had grown best in the center of the pot were considered the target plants. All the remaining plants were removed carefully with the aid of metal tweezers and discarded.

[48619] During their growth, the plants received overhead irrigation with distilled water (onto the compost) and bottom irrigation into the placement grooves. Once the grown plants had reached the age of 23 days, they were harvested. In case their seeds are desired these had been harvested 10 to 12 weeks after sowing (once they are ripe).

### Example 11h

### Metabolic Analysis of Transformed Plants

[48620] The modifications identified in accordance with the invention, in the content of above-described metabolites, were identified by the following procedure.

a) sampling and Storage of the Samples

[48621] Sampling was performed directly in the controlled-environment chamber. The plants, or respective parts thereof, like leafs, were cut using small laboratory scissors, rapidly weighed on laboratory scales, transferred into a pre-cooled extraction thimble and placed into an aluminum rack cooled by liquid nitrogen. If required, the extraction thimbles can be stored in the freezer at −80° C. The time elapsing between cutting the plant/plant parts to freezing it in liquid nitrogen amounted to not more than 10 to 20 seconds.

### b) Lyophilization

[48622] During the experiment, care was taken that the plants either remained in the deep-frozen state (temperatures <−40° C.) or were freed from water by lyophilization until the first contact with solvents.

[48623] The aluminum rack with the plant samples in the extraction thimbles was placed into the precooled (−40° C.) lyophilization facility. The initial temperature during the main drying phase was −35° C. and the pressure was 0.120 mbar. During the drying phase, the parameters were altered following a pressure and temperature program. The final temperature after 12 hours was +30° C. and the final pressure was 0.001 to 0.004 mbar. After the vacuum pump and the refrigerating machine had been switched off, the system was flushed with air (dried via a drying tube) or argon.

### c) Extraction

### Extraction of Arabidopsis Green Tissue:

[48624] Immediately after the lyophilization apparatus had been flushed, the extraction thimbles with the lyophilized plant material were transferred into the 5 ml extraction cartridges of the ASE device (Accelerated Solvent Extractor ASE 200 with Solvent Controller and AutoASE software (DIONEX)).

[48625] The 24 sample positions of an ASE device (Accelerated Solvent Extractor ASE 200 with Solvent

[48626] Controller and AutoASE software (DIONEX)) were filled with plant samples, including some samples for testing quality control.

[48627] The polar substances were extracted with approximately 10 ml of methanol/water (80/20, v/v) at T=70° C. and p=140 bar, 5 minutes heating-up phase, 1 minute static extraction. The more lipophilic substances were extracted with approximately 10 ml of methanol/dichloromethane (40/60, v/v) at T=70° C. and p=140 bar, 5 minute heating-up phase, 1 minute static extraction. The two solvent mixtures were extracted into the same glass tubes (centrifuge tubes, 50 ml, equipped with screw cap and pierceable septum for the ASE (DIONEX)).

[48628] The solution was treated with commercial available internal standards, such as ribitol, L-glycine-2,2-d2, L-alanine-2,3,3,3-d4, methionine-d3, Arginine_(13C), Tryptophan-d5, and α-methylglucopyranoside and methyl nonadecanoate, methyl undecanoate, methyl tridecanoate, methyl pentadecanoate, methyl nonacosanoate

[48629] The total extract was treated with 8 ml of water. The solid residue of the plant sample and the extraction thimbles were discarded.

[48630] The extract was shaken and then centrifuged for 5 to 10 minutes at at least 1400 g in order to accelerate phase separation. 1 ml of the supernatant methanol/water phase (“polar phase”, colorless) was removed for the further GC analysis, and 1 ml was removed for the LC analysis. The remainder of the methanol/water phase was discarded. 0.5 ml of the organic phase (“lipid phase”, dark green) was removed for the further GC analysis and 0.5 ml was removed for the LC analysis. All the portions removed were evaporated to dryness using the IR Dancer infrared vacuum evaporator (Hettich). The maximum temperature during the evaporation process did not exceed 40° C. Pressure in the apparatus was not less than 10 mbar.

[48631] Extraction of Arabidopsis Seeds:

[48632] 3 mg of Arabidopsis seeds are transferred into a 1.2-mL-stainless steel grinding jar and ground and extracted with a mixture of 770 μL methanol and 290 μL water. A solution containing commercially available standard substances (ribitol, L-glycine-2,2-d2, L-alanine-2,3,3,3-d4, methionine-methyl-d3, tryptophane-d5, Arginine 13C615N4, Pep3 (Boc-Ala-Gly-Gly-Gly-OH) and amethylglucopyranoside) is added as internal standard. The extraction is performed using a stainless steel ball and a ball mill (Retsch MM 200, Retsch, Germany) operated at 30 Hz for 3 minutes. After centrifugation at 6000 rpm for 5 min 800 μL of the extraction solvent is transferred into a 2-mL-reaction tube (Eppendorf).

[48633] A solution of commercially available internal standard substances (Coenzyme Q1, Coenzyme Q2, Coenzyme Q4, and methyl nonadecanoate, undecanoic acid, tridecanoic acid, pentadecanoic acid, methyl nonacosanoate) is added as internal standard. For the extraction of lipophilic metabolites, 640 μL methylene chloride and 170 μL methanol are added and the sample is extracted in a ball mill operated at 30 Hz for 3 minutes. After centrifugation at 6000 rpm for 5 min 800 μL of the extraction solvent is transferred and combined with the extract of the first extraction step. After the addition of 400 μL of water and a centrifugation step to ensure proper separation of the organic and aqueous layer, two aliquots of 500 μL of the aqueous top layer (polar phase) are taken for GC and LC analysis, respectively.

[48634] Two aliquots of 100 μL of the organic bottom layer (lipid phase) are take for GC and LC analysis, respectively.

[48635] All the portions removed were evaporated to dryness using the IR Dancer infrared vacuum evaporator (Hettich). The maximum temperature during the evaporation process did not exceed 40° C. Pressure in the apparatus was not less than 10 mbar.

### Extraction of Rice or Corn Seed Material:

[48636] 20 rice or corn kernels are homogenized with a 50-mL-stainless steel grinding jar and ground with a stainless steel grinding ball using a ball mill (Retsch MM 200, Retsch, Germany) operated at 30 Hz for 3 minutes. The ground samples are lyophilized over night The initial temperature during the main drying phase was −35° C. and the pressure was 0.120 mbar. During the drying phase, the parameters were altered following a pressure and temperature program. The final temperature after 12 hours was +30° C. and the final pressure was 0.001 to 0.004 mbar. After the vacuum pump and the refrigerating machine had been switched off, the system was flushed with air (dried via a drying tube) or argon.

[48637] 50 mg of the lyophilized kernel material are weighed into glass fibre extraction thimbles and extracted and further processed as described for the Extraction of Arabidopsis green tissue.

d) Processing the Lipid and Polar Phase for the LC/MS or LC/MS/MS Analysis The lipid extract, which had been evaporated to dryness was taken up in mobile phase. The polar extract, which had been evaporated to dryness was taken up in mobile phase.

### LC-MS Analysis:

[48638] The LC part was carried out on a commercially available LCMS system from Agilent Technologies, USA. For polar extracts 10 μl are injected into the system at a flow rate of 200μl/min. The separation column (Reversed Phase C18) was maintained at 15° C. during chromatography. For lipid extracts 5 pl are injected into the system at a flow rate of 200 μl/min. The separation column (Reversed Phase C18) was maintained at 30° C. HPLC was performed with gradient elution.

[48639] The mass spectrometric analysis was performed on an Applied Biosystems API 4000 triple quadrupole instrument with turbo ion spray source. For polar extracts the instrument measured in negative ion mode in MRM-mode and fullscan mode from 100-1000 amu. For lipid extracts the instrument measured in positive ion mode in MRM-mode fullscan mode from 100-1000 amu. MS analysis is described in more detail in patent publication number WO 03/073464 (Walk and Dostler).

### e) Derivatization of the Lipid and Polar Phase for the GC/MS Analysis

[48640] Derivatization of the lipid phase for the GC/MS analysis: For the transmethanolysis, a mixture of 140 μl of chloroform, 37 μl of hydrochloric acid (37% by weight HCl in water), 320 μl of methanol and 20 μl of toluene was added to the evaporated extract of the lipid phase. The vessel was sealed tightly and heated for 2 hours at 100° C., with shaking. The solution was subsequently evaporated to dryness. The residue was dried completely.

[48641] The methoximation of the carbonyl groups was carried out by reaction with methoxyamine hydrochloride (5 mg/ml in pyridine, 100 μl for 1.5 hours at 60° C.) in a tightly sealed vessel. 20 μl of a solution of odd-numbered, straight-chain fatty acids (solution of each 0.3 mg/mL of fatty acids from 7 to 25 carbon atoms and each 0.6 mg/mL of fatty acids with 27, 29 and 31 carbon atoms in 3/7 (v/v) pyridine/toluene) were added as time standards. Finally, the derivatization with 100 μl of N-methyl-N-(trimethylsilyl)-2,2,2-trifluoroacetamide (MSTFA) was carried out for 30 minutes at 60° C., again in the tightly sealed vessel. The final volume before injection into the GC was 220 pl.

### Derivatization of the Polar Phase for the GC/MS Analysis:

[48642] The methoximation of the carbonyl groups was carried out by reaction with methoxyamine hydrochloride (5 mg/ml in pyridine, 50 pl for 1.5 hours at 60° C.) in a tightly sealed vessel. 10 pl of a solution of odd-numbered, straight-chain fatty acids (solution of each 0.3 mg/mL of fatty acids from 7 to 25 carbon atoms and each 0.6 mg/mL of fatty acids with 27, 29 and 31 carbon atoms in 3/7 (v/v) pyridine/toluene) were added as time standards. Finally, the derivatization with 50 pl of N-methyl-N-(trimethylsilyl)-2,2,2-trifluoroacetamide (MSTFA) was carried out for 30 minutes at 60° C., again in the tightly sealed vessel. The final volume before injection into the GC was 110 μl.

### f) GC-MS Analysis

[48643] The GC-MS systems consisted of an Agilent 6890 GC coupled to an Agilent 5973 MSD. The autosamplers were CompiPal or GCPal from CTC. For the analysis usual commercial capillary separation columns (30 m×0.25 mm×0.25 μm) with different poly-methyl-siloxane stationary phases containing 0% up to 35% of aromatic moieties, depending on the analysed sample materials and fractions from the phase separation step, were used (for example: DB-1ms, HP-5ms, DB-XLB, DB-35ms, Agilent Technologies). Up to 1 μL of the final volume was injected splitless and the oven temperature program was started at 70° C. and ended at 340° C. with different heating rates depending on the sample material and fraction from the phase separation step in order to achieve a sufficient chromatographic separation and number of scans within each analyte peak. Usual GC-MS standard conditions, for example constant flow with nominal 1 to 1.7 ml/min. and helium as the mobile phase gas were used. Ionisation was done by electron impact with 70 eV, scanning within a m/z range from 15 to 600 with scan rates from 2.5 to 3 scans/sec and standard tune conditions.

### g) Analysis of the Various Plant Samples

[48644] The samples were measured in individual series of 20 to 21 plant or seed samples each (also referred to as sequences), each sequence containing at least 5 wild-type plants or seed samples as controls. Seed samples were from individual plants. The peak area of each analyte was divided by the peak area of the respective internal standard. The data were standardized for the fresh weight established for the plant or seed sample, respectively. The values calculated thus were related to the wild-type control group by being divided by the mean of the corresponding data of the wild-type control group of the same sequence. The values obtained were referred to as ratio_by_WT, they are comparable between sequences and indicate how much the analyte concentration in the mutant differs in relation to the wild-type control. Appropriate controls were done before to proof that the vector and transformation procedure itself has no significant influence on the metabolic composition of the plants. Therefore the described changes in comparison with wild types were caused by the introduced gene constructs. At least 3-5 independent lines were analyzed in two independent experiments for each construct.

[48645] The results of the different plant analyses can be seen from the Table d.

[48646] Table d showing results of plant analyses

TABLE d

| SeqID | Target | Locus | Metabolite | Source | Promotor | Method | Min | Max |
|---|---|---|---|---|---|---|---|---|
| 15532 | plastidic | 51340801_CANOLA | a-toco | ARA_LEAF | p-PcUBI | GC | 45 | 65 |
| 15532 | plastidic | 51340801_CANOLA | g-toco | ARA_LEAF | p-PcUBI | LC | 38 | 134 |
| 16883 | plastidic | 59582753_SOYBEAN | a-toco | ARA_LEAF | p-PcUBI | GC | 50 | 120 |
| 17901 | non-targ | At1g29350 | g-toco | ARA_LEAF | p-PcUBI | LC | 40 | 88 |
| 18070 | non-targ | At1g43850 | g-toco | ARA_LEAF | p-PcUBI | LC | 55 | 134 |
| 18235 | non-targ | At1g48260 | g-toco | ARA_LEAF | p-PcUBI | LC | 66 | 160 |
| 18869 | non-targ | At1g61950 | g-toco | ARA_LEAF | p-PcUBI | LC | 44 | 91 |
| 19419 | non-targ | At1g72770 | a-toco | ARA_LEAF | p-PcUBI | GC | 63 | 133 |
| 108727 | non-targ | At2g42830 | a-toco | ARA_LEAF | p-PcUBI | LC | 36 | 55 |
| 21159 | non-targ | At2g47880 | g-toco | ARA_LEAF | p-PcUBI | LC | 87 | 232 |
| 21497 | plastidic | At3g04050 | g-toco | ARA_LEAF | p-PcUBI | LC | 74 | 160 |
| 21902 | non-targ | At3g04710 | a-toco | ARA_LEAF | p-PcUBI | LC | 39 | 64 |
| 22015 | non-targ | At3g06270 | a-toco | ARA_LEAF | p-PcUBI | GC | 56 | 56 |
| 22249 | non-targ | At3g08710 | a-toco | ARA_LEAF | p-PcUBI | GC | 57 | 140 |
| 22611 | non-targ | At3g11650 | a-toco | ARA_LEAF | p-PcUBI | LC | 40 | 67 |
| 22611 | non-targ | At3g11650 | g-toco | ARA_LEAF | p-PcUBI | LC | 43 | 300 |
| 1815 | non-targ | At3g23000 | g-toco | ARA_LEAF | p-PcUBI | LC | 60 | 223 |
| 2573 | non-targ | At3g62930 | g-toco | ARA_LEAF | p-PcUBI | LC | 63 | 110 |
| 2935 | non-targ | At3g62950 | g-toco | ARA_LEAF | p-PcUBI | LC | 77 | 155 |
| 109717 | non-targ | At4g09960 | a-toco | ARA_LEAF | p-PcUBI | GC | 59 | 154 |
| 23482 | non-targ | At4g15660 | a-toco | ARA_LEAF | p-PcUBI | GC | 50 | 139 |
| 23482 | non-targ | At4g15660 | g-toco | ARA_LEAF | p-PcUBI | LC | 38 | 81 |
| 3279 | non-targ | At4g15670 | a-toco | ARA_LEAF | p-PcUBI | GC | 53 | 364 |
| 23844 | non-targ | At4g15690 | a-toco | ARA_LEAF | p-PcUBI | GC | 53 | 125 |
| 68849 | non-targ | At4g26080 | a-toco | ARA_LEAF | p-PcUBI | GC | 54 | 99 |
| 24311 | non-targ | At4g34160 | a-toco | ARA_LEAF | p-PcUBI | GC | 51 | 200 |
| 4348 | non-targ | At4g35310 | a-toco | ARA_LEAF | p-PcUBI | GC | 91 | 195 |
| 4348 | non-targ | At4g35310 | g-toco | ARA_LEAF | p-PcUBI | LC | 69 | 192 |
| 70006 | non-targ | At5g60110 | a-toco | ARA_LEAF | p-PcUBI | GC | 58 | 69 |
| 70006 | non-targ | At5g60110 | g-toco | ARA_LEAF | p-PcUBI | LC | 48 | 108 |
| 5493 | non-targ | At5g64920 | g-toco | ARA_LEAF | p-PcUBI | LC | 42 | 75 |
| 110651 | non-targ | Avin- | g-toco | ARA_LEAF | p-PcUBI | LC | 39 | 66 |
| | | DRAFT_3107 | | | | | | |
| 29286 | non-targ | Avin- | g-toco | ARA_LEAF | p-PcUBI | LC | 53 | 89 |
| | | DRAFT_3209 | | | | | | |
| 111155 | non-targ | Avin- | a-toco | ARA_LEAF | p-PcUBI | LC | 37 | 38 |
| | | DRAFT_3577 | | | | | | |
| 102941 | non-targ | Avin- | a-toco | ARA_LEAF | p-PcUBI | GC | 51 | 68 |
| | | DRAFT_4847 | | | | | | |
| 6510 | non-targ | Avin- | a-toco | ARA_LEAF | p-PcUBI | GC | 145 | 201 |
| | | DRAFT_5103 | | | | | | |
| 6510 | non-targ | Avin- | g-toco | ARA_LEAF | p-PcUBI | LC | 40 | 237 |
| | | DRAFT_5103 | | | | | | |
| 74729 | non-targ | Avin- | g-toco | ARA_LEAF | p-PcUBI | LC | 44 | 243 |
| | | DRAFT_6679 | | | | | | |
| 34889 | plastidic | B0004 | g-toco | ARA_LEAF | p-Super | LC | 75 | 443 |
| 35482 | non-targ | B0124 | a-toco | ARA_LEAF | p-Super | LC | 38 | 103 |
| 35482 | non-targ | B0124 | g-toco | ARA_LEAF | p-Super | LC | 175 | 277 |
| 7081 | non-targ | B0161 | g-toco | ARA_LEAF | p-Super | LC | 98 | 238 |
| 111340 | non-targ | B0421 | a-toco | ARA_LEAF | p-Super | LC | 42 | 44 |
| 7333 | non-targ | B0449 | g-toco | ARA_LEAF | p-Super | LC | 42 | 248 |
| 75286 | plastidic | B0754 | a-toco | ARA_LEAF | p-USP | LC | 35 | 68 |
| 7917 | non-targ | B0898 | g-toco | ARA_LEAF | p-Super | LC | 76 | 379 |
| 37394 | non-targ | B1163 | a-toco | ARA_LEAF | p-Super | GC | 52 | 56 |
| 111910 | non-targ | B1183 | g-toco | ARA_LEAF | p-Super | GC | 33 | 45 |
| 112072 | non-targ | B1219 | a-toco | ARA_LEAF | p-Super | GC | 51 | 98 |
| 112111 | non-targ | B1234 | g-toco | ARA_LEAF | p-Super | LC | 33 | 57 |
| 77774 | non-targ | B1479 | g-toco | ARA_LEAF | p-Super | LC | 33 | 79 |
| 7947 | non-targ | B1522 | g-toco | ARA_LEAF | p-Super | LC | 51 | 301 |
| 38300 | non-targ | B1597 | a-toco | ARA_LEAF | p-Super | GC | 50 | 302 |
| 7992 | non-targ | B1601 | a-toco | ARA_LEAF | p-Super | GC | 52 | 112 |
| 79056 | non-targ | B1897 | g-toco | ARA_LEAF | p-Super | LC | 36 | 153 |
| 112169 | non-targ | B1921 | g-toco | ARA_LEAF | p-Super | LC | 46 | 84 |
| 79217 | non-targ | B2027 | g-toco | ARA_LEAF | p-Super | LC | 39 | 203 |
| 112193 | non-targ | B2043 | a-toco | ARA_LEAF | p-Super | LC | 38 | 60 |
| 39219 | non-targ | B2360 | g-toco | ARA_LEAF | p-Super | LC | 48 | 93 |
| 99898 | non-targ | B2546 | a-toco | ARA_LEAF | p-Super | GC | 53 | 87 |
| 40637 | non-targ | B2548 | g-toco | ARA_LEAF | p-Super | LC | 35 | 100 |
| 40665 | non-targ | B2613 | g-toco | ARA_LEAF | p-Super | LC | 39 | 100 |
| 9244 | non-targ | B2673 | g-toco | ARA_LEAF | p-Super | LC | 36 | 55 |
| 80756 | non-targ | B2701 | g-toco | ARA_LEAF | p-Super | LC | 49 | 174 |
| 40795 | non-targ | B2812 | g-toco | ARA_LEAF | p-Super | LC | 34 | 83 |
| 81576 | non-targ | B2818 | a-toco | ARA_LEAF | p-Super | LC | 36 | 39 |
| 81576 | non-targ | B2818 | g-toco | ARA_LEAF | p-Super | LC | 33 | 153 |
| 112216 | non-targ | B2977 | a-toco | ARA_LEAF | p-Super | LC | 42 | 53 |
| 112380 | plastidic | B3194 | a-toco | ARA_LEAF | p-Super | LC | 25 | 26 |
| 112606 | non-targ | B3790 | g-toco | ARA_LEAF | p-Super | LC | 35 | 61 |
| 112634 | non-targ | B3890 | a-toco | ARA_LEAF | p-Super | GC | 67 | 290 |
| 44223 | non-targ | B3945 | a-toco | ARA_SEED_2 | p-USP | LC | 31 | 56 |
| 44372 | non-targ | B3989 | a-toco | ARA_LEAF | p-Super | GC | 55 | 120 |
| 44372 | non-targ | B3989 | g-toco | ARA_LEAF | p-Super | LC | 35 | 102 |
| 10740 | non-targ | B4029 | g-toco | ARA_LEAF | p-Super | LC | 38 | 244 |
| 106532 | non-targ | B4050 | a-toco | ARA_LEAF | p-Super | LC | 27 | 39 |
| 94542 | non-targ | B4056 | a-toco | ARA_LEAF | p-Super | LC | 41 | 55 |
| 45321 | non-targ | B4256 | a-toco | ARA_LEAF | p-Super | LC | 69 | 93 |
| 45321 | non-targ | B4256 | g-toco | ARA_LEAF | p-Super | LC | 61 | 132 |
| 45394 | non-targ | B4321 | a-toco | ARA_LEAF | p-Super | LC | 39 | 72 |
| 45394 | non-targ | B4321 | g-toco | ARA_LEAF | p-Super | LC | 97 | 248 |
| 45757 | non-targ | C_pp004096192r | g-toco | ARA_LEAF | p-Super | LC | 35 | 147 |
| 10811 | non-targ | GM02LC12622 | a-toco | ARA_LEAF | p-PcUBI | GC | 57 | 105 |
| 10811 | non-targ | GM02LC12622 | g-toco | ARA_LEAF | p-PcUBI | LC | 34 | 204 |
| 84198 | non-targ | GM02LC21368 | g-toco | ARA_LEAF | p-PcUBI | LC | 48 | 185 |
| 49828 | non-targ | Sll0290 | a-toco | ARA_LEAF | p-PcUBI | LC | 27 | 49 |
| 112661 | mitochondrial | Sll0745 | g-toco | ARA_LEAF | p-PcUBI | LC | 33 | 76 |
| 53189 | non-targ | Sll1185 | g-toco | ARA_LEAF | p-PcUBI | LC | 28 | 42 |
| 55379 | non-targ | Sll1761 | g-toco | ARA_LEAF | p-PcUBI | LC | 33 | 68 |
| 85808 | mitochondrial | Sll1815 | g-toco | ARA_LEAF | p-PcUBI | LC | 32 | 45 |
| 86540 | mitochondrial | Slr0239 | a-toco | ARA_LEAF | p-PcUBI | LC | 39 | 46 |
| 87397 | plastidic | Slr0721 | a-toco | ARA_LEAF | p-PcUBI | GC | 60 | 125 |
| 87397 | plastidic | Slr0721 | g-toco | ARA_LEAF | p-PcUBI | LC | 43 | 268 |
| 57235 | plastidic | Slr0739 | a-toco | ARA_LEAF | p-PcUBI | LC | 45 | 82 |
| 57235 | plastidic | Slr0739 | g-toco | ARA_LEAF | p-PcUBI | LC | 91 | 144 |
| 58590 | non-targ | Slr1420 | g-toco | ARA_LEAF | p-PcUBI | LC | 33 | 50 |
| 58731 | plastidic | Slr1739 | g-toco | ARA_LEAF | p-PcUBI | LC | 77 | 203 |
| 58823 | plastidic | Slr1755 | a-toco | ARA_LEAF | p-PcUBI | LC | 37 | 81 |
| 12140 | plastidic | Slr1791 | g-toco | ARA_LEAF | p-PcUBI | LC | 33 | 58 |
| 113038 | plastidic | Slr1917 | a-toco | ARA_LEAF | p-PcUBI | LC | 36 | 70 |
| 113038 | plastidic | Slr1917 | g-toco | ARA_LEAF | p-PcUBI | LC | 144 | 540 |
| 12698 | non-targ | TTC0019 | a-toco | ARA_LEAF | p-PcUBI | GC | 53 | 129 |
| 12698 | non-targ | TTC0019 | g-toco | ARA_LEAF | p-PcUBI | LC | 35 | 264 |
| 61723 | non-targ | TTC1193 | g-toco | ARA_LEAF | p-PcUBI | LC | 88 | 166 |
| 62079 | non-targ | TTC1386 | a-toco | ARA_LEAF | p-PcUBI | GC | 52 | 132 |
| 62079 | non-targ | TTC1386 | g-toco | ARA_LEAF | p-PcUBI | LC | 38 | 171 |
| 12974 | non-targ | TTC1550 | a-toco | ARA_LEAF | p-PcUBI | GC | 86 | 106 |
| 88879 | plastidic | Ybr249c | a-toco | ARA_LEAF | p-Super | GC | 76 | 142 |
| 88879 | plastidic | Ybr249c | g-toco | ARA_LEAF | p-Super | LC | 51 | 168 |
| 113220 | plastidic | Ycl049c | g-toco | ARA_LEAF | p-Super | LC | 57 | 92 |
| 113224 | plastidic | Ydl131w | a-toco | ARA_LEAF | p-Super | GC | 66 | 285 |
| 113313 | plastidic | Ydl235c | a-toco | ARA_LEAF | p-Super | GC | 55 | 199 |
| 89973 | plastidic | Ydr007w | g-toco | ARA_LEAF | p-Super | LC | 70 | 140 |
| 113330 | plastidic | Ydr035w | g-toco | ARA_LEAF | p-Super | LC | 39 | 106 |
| 90103 | plastidic | Ydr183w | g-toco | ARA_LEAF | p-Super | LC | 35 | 105 |
| 63803 | plastidic | Yer106w | g-toco | ARA_LEAF | p-Super | LC | 34 | 302 |
| 113598 | non-targ | Yer112w | g-toco | ARA_LEAF | Big35S | GC | 51 | 252 |
| 113636 | plastidic | Ygr170w | a-toco | ARA_LEAF | p-PcUBI | LC | 42 | 62 |
| 66274 | non-targ | Yjr153w | g-toco | ARA_LEAF | p-PcUBI | LC | 89 | 115 |
| 66715 | plastidic | Ylr178c | g-toco | ARA_LEAF | p-Super | LC | 39 | 62 |
| 67190 | plastidic | Ylr359w | a-toco | ARA_LEAF | p-Super | GC | 54 | 78 |
| 113647 | plastidic | Ypr170c | a-toco | ARA_LEAF | p-Super | GC | 59 | 73 |

[48647] Column 1 shows the SEQ ID NO, Column 2 shows the expression type (targeted or non-targeted), Column 3 shows the “gene name” (locus), Column 4 shows the metabolite analyzed, Column 5 indicates the A. thaliana source tissue analyzed, Column 6 indicates the used promoter for expression, Column 7 indicates the analytical method. Columns 8 and 9 show the minimum and the maximum increase of the analyzed metabolite (in-percent) in comparison to the wild type (ratio_by_WT, given as-percent increase).

[48648] The term “non-targ” in Table d, Column 2 which shows the expression type means “non-targeted”. The term “a-toco” in Table d, Column 4 which shows the metabolite means “alpha-tocopherol”.

[48649] The term “g-toco” in Table d, Column 4 which shows the metabolite means “gamma-tocopherol”.

[48650] When the analyses were repeated independently, all results proved to be significant.

### Example 12

### Engineering Arabidopsis Plants with an Increased Production of a Fine Chemical by (Over)Expressing a FCRP-Protein Encoded by a Gene from Saccharomyces Cerevisiae or Synechocystis or E. Coli, Azotobacter Vinelandii, Thermus Thermophilus, Physcomitrella Patens, Arabidopsis. Thaliana, Brassica Napus, Glycine Max, Zea Mays or Oryza Sativa using Tissue-Specific and/or Stress Inducible Promoters

[48651] Transgenic Arabidopsis plants are created as in example 11 to express the FCRP under the control of a tissue-specific and/or stress inducible promoter.

[48652] T2 generation plants are produced and are grown under standard conditions. The fine chemical production is determined after a total time of 29 to 30 days starting with the sowing. The transgenic Arabidopsis plant produces more fine chemical then non-transgenic control plants.

### Example 13

### Engineering Alfalfa Plants with an Increased Production of a Fine Chemical by (Over)Expressing a FCRP-Protein Encoded by a Gene from Saccharomyces Cerevisiae or Synechocystis or E. Coli, Azotobacter Vinelandii, Thermus Thermophilus, Physcomitrella Patens, Arabidopsis. Thaliana, Brassica Napus, Glycine Max, Zea Mays or Oryza Sativa

[48653] A regenerating clone of alfalfa (Medicago sativa) is transformed using the method of (McKersie et al., Plant Physiol 119, 839 (1999)). Regeneration and transformation of alfalfa is genotype dependent and therefore a regenerating plant is required. Methods to obtain regenerating plants have been described. For example, these can be selected from the cultivar Rangelander (Agriculture Canada) or any other commercial alfalfa variety as described by Brown D. C. W. and Atanassov A. (Plant Cell Tissue Organ Culture 4, 111 (1985)). Alternatively, the RA3 variety (University of Wisconsin) is selected for use in tissue culture (Walker et al., Am. J. Bot. 65, 654 (1978)).

[48654] Petiole explants are cocultivated with an overnight culture of Agrobacterium tumefaciens C58C1 pMP90 (McKersie et al., Plant Physiol 119, 839 (1999)) or LBA4404 containing a binary vector. Many different binary vector systems have been described for plant transformation (e.g. G. An, in “Agrobacterium Protocols, Methods in Molecular Biology”, Vol. 44, pp. 47-62, Gartland K. M. A. and Davey M. R., eds. Humana Press, Totowa, N.J.). Many are based on the vector pBIN19 described by Bevan (Nucleic Acid Research. 12, 8711 (1984)) that includes a plant gene expression cassette flanked by the left and right border sequences from the Ti plasmid of Agrobacterium tumefaciens. A plant gene expression cassette consists of at least two genes—a selection marker gene and a plant promoter regulating the transcription of the cDNA or genomic DNA of the trait gene. Various selection marker genes can be used including the Arabidopsis gene encoding a mutated acetohydroxy acid synthase (AHAS) enzyme (U.S. Pat. No. 5,7673,666 and U.S. Pat. No. 6,225,105). Similarly, various promoters can be used to regulate the trait gene that provides constitutive, developmental, tissue or environmental regulation of gene transcription. In this example, the 34S promoter (GenBank Accession numbers M59930 and X16673) is used to provide constitutive expression of the trait gene.

[48655] The explants are cocultivated for 3 days in the dark on SH induction medium containing 288 mg/ L Pro, 53 mg/ L thioproline, 4.35 g/L K_{2SO}₄, and 100 μm acetosyringinone. The explants are washed in half-strength Murashige-Skoog medium (Murashige and Skoog, 1962) and plated on the same SH induction medium without acetosyringinone but with a suitable selection agent and suitable antibiotic to inhibit Agrobacterium growth. After several weeks, somatic embryos are transferred to BOi2Y development medium containing no growth regulators, no antibiotics, and 50 g/L sucrose. Somatic embryos are subsequently germinated on half-strength Murashige-Skoog medium. Rooted seedlings are transplanted into pots and grown in a greenhouse.

[48656] T1 or T2 generation plants are produced, grown and processed and evaluated for their fine chemical produced in analogy as described above.

### Example 14

### Engineering Ryegrass Plants with an Increased Production of Fine Chemical by (Over)-Expressing a FCRP Encoded by a Gene from Saccharomyces Cerevisiae or Synechocystis or E. Coli, Azotobacter Vinelandii, Thermus Thermophilus, Physcomitrella Patens, Arabidopsis. Thaliana, Brassica Napus, Glycine Max, Zea Mays or Oryza Sativa

[48657] Seeds of several different ryegrass varieties may be used as explant sources for transformation, including the commercial variety Gunne available from Svalof Weibull seed company or the variety Affinity. Seeds are surface-sterilized sequentially with 1% Tween-20 for 1 minute, 100% bleach for 60 minutes, 3 rinses with 5 minutes each with deionized and distilled H2O, and then germinated for 3-4 days on moist, sterile filter paper in the dark. Seedlings are further sterilized for 1 minute with 1% Tween-20, 5 minutes with 75% bleach, and rinsed 3 times with double distilled H₂O, 5 min each.

[48658] Surface-sterilized seeds are placed on the callus induction medium containing Murashige and Skoog basal salts and vitamins, 20 g/L sucrose, 150 mg/L asparagine, 500 mg/L casein hydrolysate, 3 g/L Phytagel, 10 mg/L BAP, and 5 mg/L dicamba. Plates are incubated in the dark at 25° C. for 4 weeks for seed germination and embryogenic callus induction.

[48659] After 4 weeks on the callus induction medium, the shoots and roots of the seedlings are trimmed away, the callus is transferred to fresh media, maintained in culture for another 4 weeks, and then transferred to MSO medium in light for 2 weeks. Several pieces of callus (11-17 weeks old) are either strained through a 10 mesh sieve and put onto callus induction medium, or cultured in 100 ml of liquid ryegrass callus induction media (same medium as for callus induction with agar) in a 250 ml flask. The flask is wrapped in foil and shaken at 175 rpm in the dark at 23° C. for 1 week. Sieving the liquid culture with a 40-mesh sieve collected the cells. The fraction collected on the sieve is plated and cultured on solid ryegrass callus induction medium for 1 week in the dark at 25° C. The callus is then transferred to and cultured on MS medium containing 1% sucrose for 2 weeks.

[48660] Transformation can be accomplished with either Agrobacterium of with particle bombardment methods. An expression vector is created containing a constitutive plant promoter and the cDNA of the gene in a pUC vector. The plasmid DNA is prepared from E. coli cells using with

[48661] Qiagen kit according to manufacturer's instruction. Approximately 2 g of embryogenic callus is spread in the center of a sterile filter paper in a Petri dish. An aliquot of liquid MSO with 10 g/L sucrose is added to the filter paper. Gold particles (1.0 pm in size) are coated with plasmid DNA according to method of Sanford et al., 1993 and delivered to the embryogenic callus with the following parameters: 500 pg particles and 2 pg DNA per shot, 1300 psi and a target distance of 8.5 cm from stopping plate to plate of callus and 1 shot per plate of callus.

[48662] After the bombardment, calli are transferred back to the fresh callus development medium and maintained in the dark at room temperature for a 1-week period. The callus is then transferred to growth conditions in the light at 25° C. to initiate embryo differentiation with the appropriate selection agent, e.g. 250 nM Arsenal, 5 mg/L PPT or 50 mg/L kanamycin. Shoots resistant to the selection agent are appearing and once rooted are transferred to soil.

[48663] Samples of the primary transgenic plants (T0) are analyzed by PCR to confirm the presence of T-DNA. These results are confirmed by Southern hybridization in which DNA is electrophoresed on a 1% agarose gel and transferred to a positively charged nylon membrane (Roche Diagnostics). The PCR DIG Probe Synthesis Kit (Roche Diagnostics) is used to prepare a digoxigeninlabelled probe by PCR, and used as recommended by the manufacturer.

[48664] Transgenic T0 ryegrass plants are propagated vegetatively by excising tillers. The transplanted tillers are maintained in the greenhouse for 2 months until well established. The shoots are defoliated and allowed to grow for 2 weeks.

[48665] T1 or T2 generation plants are produced, grown and processed and evaluated for their fine chemical produced in analogy as described above to determine the fine chemical content.

### Example 15

### Engineering Soybean Plants with an Increased Production of Fine Chemical by (Over)-Expressing a FCRP Encoded by a Gene from Saccharomyces Cerevisiae or Synechocystis or E. Coli, Azotobacter Vinelandii, Thermus Thermophilus, Physcomitrella Patens, Arabidopsis. Thaliana, Brassica Napus, Glycine Max, Zea Mays or Oryza Sativa

[48666] Soybean is transformed according to the following modification of the method described in the Texas A & M U.S. Pat. No. 5,164,310. Several commercial soybean varieties are amenable to transformation by this method. The cultivar Jack (available from the Illinois Seed Foundation) is commonly used for transformation. Seeds are sterilized by immersion in 70% (v/v) ethanol for 6 min and in 25% commercial bleach (NaOCI) supplemented with 0.1% (v/v) Tween for 20 min, followed by rinsing 4 times with sterile double distilled water. Seven-day seedlings are propagated by removing the radicle, hypocotyl and one cotyledon from each seedling. Then, the epicotyl with one cotyledon is transferred to fresh germination media in petri dishes and incubated at 25° C. under a 16-h photoperiod (approx. 100 μmol m⁻²s−1) for three weeks. Axillary nodes (approx. 4 mm in length) were cut from 3-4 week-old plants. Axillary nodes are excised and incubated in Agrobacterium LBA4404 culture.

[48667] Many different binary vector systems have been described for plant transformation (e.g. An G., in Agrobacterium Protocols. Methods in Molecular Biology Vol. 44, pp. 47-62, Gartland K.M.A. and Davey M. R. eds. Humana Press, Totowa, N.Jersey.). Many are based on the vector pBIN19 described by Bevan (Nucleic Acid Research. 12, 8711 (1984)) that includes a plant gene expression cassette flanked by the left and right border sequences from the Ti plasmid of Agrobacterium tumefaciens. A plant gene expression cassette consists of at least two genes—a selection marker gene and a plant promoter regulating the transcription of the cDNA or genomic DNA of the trait gene. Various selection marker genes can be used including the Arabidopsis gene encoding a mutated acetohydroxy acid synthase (AHAS) enzyme (U.S. Pat. No. 5,7673,666 and U.S. Pat. No. 6,225,105). Similarly, various promoters can be used to regulate the trait gene to provide constitutive, developmental, tissue or environmental regulation of gene transcription. In this example, the 34S promoter (GenBank Accession numbers M59930 and X16673) can be used to provide constitutive expression of the trait gene.

[48668] After the co-cultivation treatment, the explants are washed and transferred to selection media supplemented with 500 mg/L timentin. Shoots are excised and placed on a shoot elongation medium. Shoots longer than 1 cm are placed on rooting medium for two to four weeks prior to transplanting to soil.

[48669] The primary transgenic plants (TO) are analyzed by PCR to confirm the presence of T-DNA.

[48670] These results are confirmed by Southern hybridization in which DNA is electrophoresed on a 1% agarose gel and transferred to a positively charged nylon membrane (Roche Diagnostics). The PCR DIG Probe Synthesis Kit (Roche Diagnostics) is used to prepare a digoxigeninlabelled probe by PCR, and used as recommended by the manufacturer.

[48671] T1 or T2 generation plants are produced, grown and processed and evaluated for their fine chemical produced in analogy as described above.

### Example 16

### Engineering Rapeseed/Canola Plants with an Increased Production of Fine Chemical by (Over)-Expressing a FCRP Encoded by a Gene from Saccharomyces Cerevisiae or Synechocystis or E. Coli, Azotobacter Vinelandii, Thermus Thermophilus, Physcomitrella Patens, Arabidopsis. Thaliana, Brassica Napus, Glycine Max, Zea Mays or Oryza Sativa

[48672] Cotyledonary petioles and hypocotyls of 5-6 day-old young seedlings are used as explants for tissue culture and transformed according to Babic et al. (Plant Cell Rep 17, 183 (1998)). The commercial cultivar Westar (Agriculture Canada) is the standard variety used for transformation, but other varieties can be used.

[48673] Agrobacterium tumefaciens LBA4404 containing a binary vector can be used for canola transformation. Many different binary vector systems have been described for plant transformation (e.g. An G., in Agrobacterium Protocols. Methods in Molecular Biology Vol. 44, p. 47-62, Gartland K. M. A. and Davey M. R. eds. Humana Press, Totowa, N.J.). Many are based on the vector pBIN19 described by Bevan (Nucleic Acid Research. 12, 8711(1984)) that includes a plant gene expression cassette flanked by the left and right border sequences from the Ti plasmid of Agrobacterium tumefaciens. A plant gene expression cassette consists of at least two genes—a selection marker gene and a plant promoter regulating the transcription of the cDNA or genomic DNA of the trait gene. Various selection marker genes can be used including the Arabidopsis gene encoding a mutated acetohydroxy acid synthase (AHAS) enzyme (U.S. Pat. No. 5,7673,666 and U.S. Pat. No. 6,225,105). Similarly, various promoters can be used to regulate the trait gene to provide constitutive, developmental, tissue or environmental regulation of gene transcription. In this example, the 34S promoter (GenBank Accession numbers M59930 and X16673) can be used to provide constitutive expression of the trait gene.

[48674] Canola seeds are surface-sterilized in 70% ethanol for 2 min., and then in 30% Clorox with a drop of Tween-20 for 10 min, followed by three rinses with sterilized distilled water. Seeds are then germinated in vitro 5 days on half strength MS medium without hormones, 1% sucrose, 0.7% Phytagar at 23° C., 16 h light. The cotyledon petiole explants with the cotyledon attached are excised from the in vitro seedlings, and inoculated with Agrobacterium by dipping the cut end of the petiole explant into the bacterial suspension. The explants are then cultured for 2 days on MSBAP-3 medium containing 3 mg/L BAP, 3% sucrose, 0.7% Phytagar at 23° C., 16 h light. After two days of co-cultivation with Agrobacterium, the petiole explants are transferred to MSBAP-3 medium containing 3 mg/L BAP, cefotaxime, carbenicillin, or timentin (300 mg/L) for 7 days, and then cultured on MSBAP-3 medium with cefotaxime, carbenicillin, or timentin and selection agent until shoot regeneration. When the shoots were 5-10 mm in length, they are cut and transferred to shoot elongation medium (MSBAP-0.5, containing 0.5 mg/L BAP). Shoots of about 2 cm in length are transferred to the rooting medium (MSO) for root induction.

[48675] Samples of the primary transgenic plants (TO) are analyzed by PCR to confirm the presence of T-DNA. These results are confirmed by Southern hybridization in which DNA is electrophoresed on a 1% agarose gel and transferred to a positively charged nylon membrane (Roche Diagnostics). The PCR DIG Probe Synthesis Kit (Roche Diagnostics) is used to prepare a digoxigeninlabelled probe by PCR, and used as recommended by the manufacturer.

[48676] T1 or T2 generation plants are produced, grown and processed and evaluated for their fine chemical produced in analogy as described above.

### Example 17

### Engineering Corn Plants with an Increased Production of Fine Chemical by (Over)-Expressing a FCRP Encoded by a Gene from Saccharomyces Cerevisiae or Synechocystis or E. Coli, Azotobacter Vinelandii, Thermus Thermophilus, Physcomitrella Patens, Arabidopsis. Thaliana, Brassica Napus, Glycine Max, Zea Mays or Oryza Sativa

[48677] Transformation of maize (Zea Mays L.) is performed with a modification of the method described by Ishida et al. (Nature Biotech 14745 (1996)). Transformation is genotype-dependent in corn and only specific genotypes are amenable to transformation and regeneration. The inbred line A188 (University of Minnesota) or hybrids with A188 as a parent are good sources of donor material for transformation (Fromm et al., Biotech 8, 833 (1990)), but other genotypes can be used successfully as well. Ears are harvested from corn plants at approximately 11 days after pollination (DAP) when the length of immature embryos is about 1 to 1.2 mm. Immature embryos are co-cultivated with Agrobacterium tumefaciens that carry “super binary” vectors and transgenic plants are recovered through organogenesis. The super binary vector system of Japan Tobacco is described in WO patents WO 94/00977 and WO 95/06722. Vectors were constructed as described. Various selection marker genes can be used including the maize gene encoding a mutated acetohydroxy acid synthase (AHAS) enzyme (U.S. Pat. No. 6,025,541). Similarly, various promoters can be used to regulate the trait gene to provide constitutive, developmental, tissue or environmental regulation of gene transcription. In this example, the 34S promoter (GenBank Accession numbers M59930 and X16673) was used to provide constitutive expression of the trait gene.

[48678] Excised embryos are grown on callus induction medium, then maize regeneration medium, containing imidazolinone as a selection agent. The Petri plates are incubated in the light at 25° C. for 2-3 weeks, or until shoots develop. The green shoots are transferred from each embryo to maize rooting medium and incubated at 25° C. for 2-3 weeks, until roots develop. The rooted shoots are transplanted to soil in the greenhouse. T1 seeds are produced from plants that exhibit tolerance to the imidazolinone herbicides and which are PCR positive for the transgenes.

[48679] The T1 transgenic plants are then evaluated for their fine chemical producted as described above. The T1 generation of single locus insertions of the T-DNA will segregate for the transgene in a 3:1 ratio. Those progeny containing one or two copies of the transgene are tolerant regarding the imidazolinone herbicide, and exhibit an increased fine chemical production then those progeny lacking the transgenes.

[48680] T1 or T2 generation plants are produced, grown, processed and evaluated for their fine chemical produced in analogy as described above. Homozygous T2 plants exhibited similar phenotypes. Hybrid plants (F1 progeny) of homozygous transgenic plants and non-transgenic plants also exhibited enhanced fine chemical production.

### Example 18

### Engineering Wheat Plants with an Increased Production of Fine Chemical by (Over)-Expressing a FCRP Encoded by a Gene from Saccharomyces cerevisiae or Synechocystis or E. Coli, Azotobacter Vinelandii, Thermus Thermophilus, Physcomitrella Patens, Arabidopsis. Thaliana, Brassica Napus, Glycine Max, Zea Mays or Oryza Sativa

[48681] Transformation of wheat is performed with the method described by Ishida et al. (Nature Biotech. 14745 (1996)). The cultivar Bobwhite (available from CYMMIT, Mexico) is commonly used in transformation. Immature embryos are co-cultivated with Agrobacterium tumefaciens that carry “super binary” vectors, and transgenic plants are recovered through organogenesis. The super binary vector system of Japan Tobacco is described in WO patents WO 94/00977 and WO 95/06722. Vectors were constructed as described. Various selection marker genes can be used including the maize gene encoding a mutated acetohydroxy acid synthase (AHAS) enzyme (U.S. Pat. No. 6,025,541). Similarly, various promoters can be used to regulate the trait gene to provide constitutive, developmental, tissue or environmental regulation of gene transcription. In this example, the 34S promoter (GenBank Accession numbers M59930 and X16673) was used to provide constitutive expression of the trait gene.

[48682] After incubation with Agrobacterium, the embryos are grown on callus induction medium, then regeneration medium, containing imidazolinone as a selection agent. The Petri plates are incubated in the light at 25° C. for 2-3 weeks, or until shoots develop. The green shoots are transferred from each embryo to rooting medium and incubated at 25° C. for 2-3 weeks, until roots develop. The rooted shoots are transplanted to soil in the greenhouse. T1 seeds are produced from plants that exhibit tolerance to the imidazolinone herbicides and which are PCR positive for the transgenes.

[48683] The T1 transgenic plants are then evaluated for their enhanced production of fine chemical according to the methods described in the previous examples. The T1 generation of single locus insertions of the T-DNA will segregate for the transgene in a 3:1 ratio. Those progeny containing one or two copies of the transgene are tolerant regarding the imidazolinone herbicide, and exhibit an enhanced production of fine chemical then those progeny lacking the transgenes. Homozygous T2 plants exhibited similar phenotypes.

### Example 19

### Engineering Rice Plants with an Increased Production of Fine Chemical by (Over)-Expressing a FCRP Encoded by a Gene from Saccharomyces Cerevisiae or Synechocystis or E. Coli, Azotobacter Vinelandii, Thermus Thermophilus, Physcomitrella Patens, Arabidopsis. Thaliana, Brassica Napus, Glycine Max, Zea Mays or Oryza Sativa

[48684] The Agrobacterium containing the expression vector of the invention is used to transform Oryza sativa plants. Mature dry seeds of the rice japonica cultivar Nipponbare are dehusked. Sterilization is carried out by incubating for one minute in 70% ethanol, followed by 30 minutes in 0.2% HgCl₂, followed by a 6 times 15 minutes can beh with sterile distilled water. The sterile seeds are then germinated on a medium containing 2,4-D (callus induction medium). After incubation in the dark for four weeks, embryogenic, scutellum-derived calli are excised and propagated on the same medium. After two weeks, the calli are multiplied or propagated by subculture on the same medium for another 2 weeks. Embryogenic callus pieces are sub-cultured on fresh medium 3 days before co-cultivation (to boost cell division activity).

[48685] Agrobacterium strain LBA4404 containing the expression vector of the invention is used for cocultivation. Agrobacterium is inoculated on AB medium with the appropriate antibiotics and cultured for 3 days at 28° C. The bacteria are then collected and suspended in liquid co-cultivation medium to a density (0D600) of about 1. The suspension is then transferred to a Petri dish and the calli immersed in the suspension for 15 minutes. The callus tissues are then blotted dry on a filter paper and transferred to solidified, co-cultivation medium and incubated for 3 days in the dark at 25° C. Co-cultivated calli are grown on 2,4-D-containing medium for 4 weeks in the dark at 28° C. in the presence of a selection agent. During this period, rapidly growing resistant callus islands developed. After transfer of this material to a regeneration medium and incubation in the light, the embryogenic potential is released and shoots developed in the next four to five weeks. Shoots are excised from the calli and incubated for 2 to 3 weeks on an auxin-containing medium from which they are transferred to soil. Hardened shoots are grown under high humidity and short days in a greenhouse.

[48686] Approximately 35 independent TO rice transformants are generated for one construct. The primary transformants are transferred from a tissue culture chamber to a greenhouse. After a quantitative PCR analysis to verify copy number of the T-DNA insert, only single copy transgenic plants that exhibit tolerance to the selection agent are kept for harvest of T1 seed. Seeds are then harvested three to five months after transplanting. The method yielded single locus transformants at a rate of over 50% (Aldemita and Hodges1996, Chan et al. 1993, Hiei et al. 1994).

[48687] T1 or T2 generation plants are produced, grown, processed and evaluated for their fine chemical produced in analogy as described above

### Example 20

### Identification of Identical and Heterologous Genes

[48688] Gene sequences can be used to identify identical or heterologous genes from cDNA or genomic libraries. Identical genes (e. g. full-length cDNA clones) can be isolated via nucleic acid hybridization using for example cDNA libraries. Depending on the abundance of the gene of interest, 100,000 up to 1,000,000 recombinant bacteriophages are plated and transferred to nylon membranes. After denaturation with alkali, DNA is immobilized on the membrane by e. g. UV cross linking. Hybridization is carried out at high stringency conditions. In aqueous solution, hybridization and washing is performed at an ionic strength of 1 M NaCl and a temperature of 68° C. Hybridization probes are generated by e.g. radioactive (32P) nick transcription labeling (High Prime, Roche, Mannheim, Germany). Signals are detected by autoradiography.

[48689] Partially identical or heterologous genes that are related but not identical can be identified in a manner analogous to the above-described procedure using low stringency hybridization and washing conditions. For aqueous hybridization, the ionic strength is normally kept at 1 M NaCl while the temperature is progressively lowered from 68 to 42° C.

[48690] Isolation of gene sequences with homology (or sequence identity/similarity) only in a distinct domain of (for example 10-20 amino acids) can be carried out by using synthetic radio labeled oligonucleotide probes. Radiolabeled oligonucleotides are prepared by phosphorylation of the 5-prime end of two complementary oligonucleotides with T4 polynucleotide kinase. The complementary oligonucleotides are annealed and ligated to form concatemers. The double stranded concatemers are than radiolabeled by, for example, nick transcription. Hybridization is normally performed at low stringency conditions using high oligonucleotide concentrations.

### Oligonucleotide Hybridization Solution:

[48691] 6×SSC
[48692] 0.01 M sodium phosphate
[48693] 1 mM EDTA (pH 8)
[48694] 0.5% SDS
[48695] 100 μg/ml denatured salmon sperm DNA
[48696] 0.1% nonfat dried milk

[48697] During hybridization, temperature is lowered stepwise to 5-10° C. below the estimated oligonucleotide Tm or down to room temperature followed by washing steps and autoradiography.

[48698] Washing is performed with low stringency such as 3 washing steps using 4×SSC. Further details are described by Sambrook J. et al., 1989, “Molecular Cloning: A Laboratory Manual,” Cold Spring Harbor Laboratory Press or Ausubel F.M. et al., 1994, “Current Protocols in Molecular Biology,” John Wiley & Sons.

### Example 21

### Identification of Identical Genes by Screening Expression Libraries with Antibodies

[48699] c-DNA clones can be used to produce recombinant polypeptide for example in E. coli (e.g. Qiagen QlAexpress pQE system). Recombinant polypeptides are then normally affinity purified via Ni-NTA affinity chromatography (Qiagen). Recombinant polypeptides are then used to produce specific antibodies for example by using standard techniques for rabbit immunization. Antibodies are affinity purified using a Ni-NTA column saturated with the recombinant antigen as described by Gu et al., BioTechniques 17, 257 (1994). The antibody can than be used to screen expression cDNA libraries to identify identical or heterologous genes via an immunological screening (Sambrook J., et al., “Molecular Cloning: A Laboratory Manual,” Cold Spring Harbor Laboratory Press, 1989, or Ausubel F. M. et al., “Current Protocols in Molecular Biology”, John Wiley & Sons, 1994,).

### FIGURES

[48700] FIG. 1. Vector VC-MME220-1 qcz (SEQ ID NO: 41) used for cloning gene of interest for non-targeted expression.

[48701] FIG. 2. Vector VC-MME221-1qcz (SEQ ID NO: 46) used for cloning gene of interest for non-targeted expression.

[48702] FIG. 3. Vector VC-MME354-1 QCZ (SEQ ID NO: 32) used for cloning gene of interest for plastidic targeted expression.

[48703] FIG. 4. Vector VC-MME432-1 qcz (SEQ ID NO: 42) used for cloning gene of interest for plastidic targeted expression.

[48704] FIG. 5. Vector VC-MME489-1 QCZ (SEQ ID NO: 56) used for cloning gene of interest for non-targeted expression and cloning of a targeting sequence.

[48705] FIG. 6. Vector pMTX0270p (SEQ ID NO: 30) used for cloning of a targeting sequence.

[48706] FIG. 7. Vector pMTX155 (SEQ ID NO: 31) used for used for cloning gene of interest for non-targeted expression.

[48707] FIG. 8. Vector VC-MME356-1 QCZ (SEQ ID NO: 34) used for mitochondric targeted expression.

[48708] FIG. 9. Vector VC-MME301-1 QCZ (SEQ ID NO: 36) used for non-targeted expression in preferentially seeds.

[48709] FIG. 10. Vector pMTX461korrp (SEQ ID NO: 37) used for plastidic targeted expression in preferentially seeds.

[48710] FIG. 11. Vector VC-MME462-1 QCZ (SEQ ID NO: 39) used for mitochondric targeted expression in preferentially seeds.

[48711] FIG. 12. Vector VC-MME431-1qcz (SEQ ID NO: 44) used for mitochondric targeted expression.

[48712] FIG. 13. Vector pMTX447korr (SEQ ID NO: 47) used for plastidic targeted expression.

[48713] FIG. 14. Vector VC-MME445-1 qcz (SEQ ID NO: 49) used for mitochondric targeted expression.

[48714] FIG. 15. Vector VC-MME289-1 qcz (SEQ ID NO: 51) used for non targeted expression in preferentially seeds.

[48715] FIG. 16. Vector VC-MME464-1 qcz (SEQ ID NO: 52) used for plastidic targeted expression in preferentially seeds.

[48716] FIG. 17. Vector VC-MME465-1 qcz (SEQ ID NO: 54) used for mitochondric targeted expression in preferentially seeds.

[48717] In a further embodiment, the present invention relates in paragraphs [0000.1.8.8.] to [0514.1.8.8.] to a further process for the production of the fine chemical linoleic acid as defined below and corresponding embodiments as described herein as follows.

[48718] The present invention relates to a process for the production of fine chemical in a microorganism, a plant cell, a plant or a part thereof. The invention furthermore relates to nucleic acid molecules, polypeptides, nucleic acid constructs, vectors, antibodies, host cells, plant tissue, propagation material, harvested material, plants, microorganisms as well as agricultural compositions and to their use.

[48719] Fatty acids are the building blocks of triglycerides, phospholipids, lipids, oils and fats. Some of the fatty acids such as linoleic or linolenic acid are “essential” because the human body is not able to synthesize them but needs them, so humans must ingest them through the diet. The human body can synthesize other fatty acids therefore they are not labeled as “essential”. Nevertheless very often the amount of production of for example fatty acids such as eicosapentaenoic acid (=EPA, C20:5Δ^{5,8,11,14,17})or docosahexaenoic acid (=DHA, C22:6Δ_{4,7,10,13,16,19}) in the body is not sufficient for an optimal body function. Polyunsaturated fatty acids (=PU FA) that mean fatty acids, which have more than 1 double bond in the carbon chain are divided into families depending on where their end-most double bond is located. There are two main subtypes of fatty acids: the omega-3 and omega-6 fatty acids. The Omega 3′s are those with their endmost double bond 3 carbons from their methyl end. The Omega-6′s are those with their endmost double bond 6 carbons from their methyl end. Linoleic acid (an omega-6) and alpha-linolenic acid (an omega-3) are the only true “essential” fatty acids. Both are used inside the body as starting material to synthesize others such as EPA or DHA.

[48720] Fatty acids and triglycerides have numerous applications in the food and feed industry, in cosmetics and in the drug sector. Depending on whether they are free saturated or unsaturated fatty acids or bound , e.g. in form of triglycerides with an increased content of saturated or unsaturated fatty acids, they are suitable for the most varied applications; thus, for example, polyunsaturated fatty acids (=PUFAs) are added to infant formula to increase its nutritional value. The various fatty acids and triglycerides are mainly obtained from microorganisms such as fungi, from animals such as fish or from oil-producing plants including phytoplankton and algae, such as soybean, oilseed rape, sunflower and others, where they are usually obtained in the form of their triacylglycerides.

[48721] In principal microorganisms such as Mortierella or oil producing plants such as soybean, rapeseed or sunflower, or algae such as Crytocodinium or Phaeodactylum are common sources for oils containing PUFAs, where they are usually obtained in the form of their triacylglycerides. Alternatively, they are obtained advantageously from animals, such as fish. The free fatty acids are prepared advantageously by hydrolysis with a strong base such as potassium or sodium hydroxide. Higher poly unsaturated fatty acids such as DHA, EPA, ARA, Di-homo-γ-linoleic acid (C20:3Δ^{8,11,14}) or Docosapentaenoic acid (=DPA, C22:5Δ^{7,10,13,16,19})are rare or not produced by oil producing plants such as soybean, rapeseed, safflower or sunflower. Natural sources for said fatty acids are fish for example herring, salmon, sardine, redfish, eel, carp, trout, halibut, mackerel, pike-perch or tuna, or algae.

[48722] Whether oils with unsaturated or with saturated fatty acids are preferred depends on the intended purpose; thus, for example, lipids with unsaturated fatty acids, specifically polyunsaturated fatty acids, are preferred in human nutrition since they have a positive effect on the cholesterol level in the blood and thus on the possibility of heart disease. They are used in a variety of dietetic foodstuffs or medicaments. In addition PUFAs are commonly used in food, feed and in the cosmetic industry. Polyunsaturated ω-3- and/or ω-6-fatty acids are an important part of animal feed and human food. Because of the common composition of human food polyunsaturated ω-3-fatty acids, which are an essential component of fish oil, should be added to the food to increase the nutritional value of the food; thus, for example, polyunsaturated fatty acids such as DHA or EPA are added as mentioned above to infant formula to increase its nutritional value. The true essential fatty acids linoleic and linolenic fatty acid have a lot of positive effects in the human body such as a positive effect on healthy heart, arteries and skin. They bring for example relieve from eczema, diabetic neuropathy or PMS and cyclical breast pain.

[48723] Polyunsaturated ω-3- and ω-6-fatty acids are for example precursor of a family of paracrine hormones called eicosanoids such as prostaglandins which are products of the metabolism of dihomo-γ-linoleic acid, ARA or EPA. Eicosanoids are involved in the regulation of lipolysis, the initiation of inflammatory responses, the regulation of blood circulation and pressure and other central functions of the body. Eicosanoids comprise prostaglandins, leukotrienes, thromboxanes, and prostacyclins. ω-3-fatty acids seem to prevent artherosclerosis and cardiovascular diseases primarily by regulating the levels of different eicosanoids. Other Eicosanoids are the thromboxanes and leukotrienes, which are products of the metabolism of ARA or EPA.

[48724] On account of their positive properties there has been no shortage of attempts in the past to make available genes which participate in the synthesis of fatty acids or triglycerides for the production of oils in various organisms having a modified content of unsaturated fatty acids.

[48725] Methods of recombinant DNA technology have also been used for some years to improve the oil content in microorganisms or plants by amplifying individual fatty acid biosynthesis genes and investigating the effect on fatty acid production. For example in WO 91/13972 a Δ-9-desaturase is described, which is involved in the synthesis of polyunsaturated fatty acids. In WO 93/11245 a A-15-desaturase and in WO 94/11516 a Δ-12-desaturase is claimed. Other desaturases are described, for example, in WO 95/18222 or Huang et al., Lipids 34, 649 (1999). To date, however, the various desaturases have been only inadequately characterized biochemically since the enzymes in the form of membrane-bound proteins are isolable and characterizable only with very great difficulty (Wang et al., Plant Physiol. Biochem. 26, 777 (1988)). Generally, membrane-bound desaturases are characterized by introduction into a suitable organism, which is then investigated for enzyme activity by means of analysis of starting materials and products. With regard to the effectiveness of the expression of desaturases and their effect on the formation of polyunsaturated fatty acids it may be noted that through expression of desaturases and elongases as described to date only low contents of poly-unsaturated fatty acids/lipids have been achieved. Therefore, an alternative and more effective pathway with higher product yield is desirable. Beside the desaturases mentioned above several other genes have been described to modify the accumulation of fatty acid, for example in WO 2007/087815.

[48726] As described above, the essential fatty acids are necessary for humans and many mammals, for example for livestock. In a study of middle-aged men disclosed by Finnish researchers (International Journal of Cancer, Sep. 1, 2004), high intake of linoleic acid seemed to lower the risk of prostate and other cancers. In another publication the positive influence on stroke is disclosed (Umemura et al., Stroke 33, 2086 (2002)).

[48727] Improving the quality of foodstuffs and animal feeds is an important task of the food-and-feed industry. This is necessary since, for example, certain fatty acids E, which occur in plants are limited with regard to the supply of mammals. Especially advantageous for the quality of foodstuffs and animal feeds is an as balanced as possible fatty acid profile since a great excess of of certain fatty acids like omega-3-fatty acids above a specific concentration in the food has no further positive effect unless the omega-3-fatty acid content is in balance to the omega-6-fatty acid content of the diet. A further increase in quality is only possible via addition of further fatty acids, which are limiting under these conditions. The targeted addition of the limiting fatty acid in form of synthetic products must be carried out with extreme caution in order to avoid fatty acid imbalance.

[48728] To ensure a high quality of foods and animal feeds, it is therefore necessary to add a plurality of fatty acids in a balanced manner to suit the respective organism. Accordingly, there is still a great demand for new and more suitable genes, which encode enzymes or regulators, which participate in the biosynthesis of fatty acids and make it possible to produce certain fatty acids specifically on an industrial scale without unwanted byproducts being formed. In the selection of genes for biosynthesis or regulation two characteristics above all are particularly important. On the one hand, there is as ever a need for improved processes for obtaining the highest possible contents of fatty acids and on the other hand as less as possible byproducts should be produced in the production process.

[48729] It is an object of the present invention to develop an inexpensive process for the synthesis of linoleic acid. Linoleic acid is one of the fatty acids , which are most frequently limiting.

[48730] It was now found that this object is achieved by providing the process according to the invention described herein and the embodiments characterized herein as well as in the claims.

[48731] Accordingly, in a first embodiment, the invention relates to a process for the production of at least one fine chemical selected from the group consisting of: linoleic acid, or, in other words, of the “fine chemical” or “fine chemical of the invention”.

[48732] The terms “fine chemical of the invention”, “fine chemical” or “the fine chemical” are used herein equally and relate in context of the paragraphs or sections [0014.1.8.8] to [0514.1.8.8] essentially to the metabolite or the metabolites indicated in column 7, application no. 8 of Tables I, II and IV in the respective line.

[48733] Further, the term “in context of any of the paragraphs [0014.1.8.8] to [0514.1.8.8]” as used herein means that for any of said paragraphs [0014.1.8.8] to [0514.1.8.8] the term “the fine chemical” is understood to follow the definition of paragraphs or sections [0014.1.8.8] and [0015.1.8.8], independently whether it refers to any other paragraph or not and whether the reference recites the term “fine chemical” in an other context.

[48734] Thus, in cases where one or more paragraphs or sections are incorporated by reference into any of the present paragraphs [0014.1.8.8] to [0514.1.8.8], e.g. by usage of the term “see paragraph” or the term “for the disclosure of this paragraph see the disclosure of paragraph” or the term “incorporated by reference” or a corresponding term, the incorporated paragraph, section or term “the fine chemical” is also understood to have the meaning according to the definition of paragraph [0014.1.8.8] and [0015.1.8.8].

[48735] Accordingly, in one embodiment, the term “fine chemical of the invention”, “fine chemical” or “the fine chemical” as used herein (alone or in combination, like in FCRP) means “linoleic acid” in context of the nucleic acid or polypeptide sequences listed in the respective same line of any one of Tables I to IV of application no. 8 and indicating in column 7 the metabolite “linoleic acid”. In one embodiment, the term linoleic acid or the term “fine chemical” mean in context of the paragraphs or sections [0014.1.8.8] to [0514.1.8.8] at least one chemical compound with an activity of the above mentioned linoleic acid, respectively.

[48736] Accordingly, in one embodiment, the terms “fine chemical of the invention”, “fine chemical” or “the fine chemical” mean in context of any of the paragraphs [0014.1.8.8] to [0514.1.8.8] linoleic acid, its tryglycerides, lipids, oils and/or fats in free form or bound form. In a preferred embodiment, the term “the fine chemical” means linoleic acid in free form or e.g. in form of its tryglycerides, lipids, oils and/or fats. In a preferred embodiment “linoleic acid” means linoleic acid in free form.

[48737] In one embodiment, the term “the fine chemical” or “the respective fine chemical” mean in context of any of the paragraphs [0014.1.8.8] to [0514.1.8.8] linoleic acid and/or tryglycerides, lipids, oils and/or fats of linoleic acid, and/or its salts, ester, thioester or linoleic acid in free form or bound to other compounds such as triglycerides, glycolipids, phospholipids etc.ln a preferred embodiment, the term “the fine chemical” means linoleic acid., in free form or its salts or bound to triglycerides. Triglycerides, lipids, oils, fats or lipid mixture thereof shall mean any triglyceride, lipid, oil and/or fat containing any bound or free linoleic acid for example sphingolipids, phosphoglycerides, lipids, glycolipids such as glycosphingolipids, phospholipids such as phosphatidylethanolamine, phosphatidylcholine, phosphatidylserine, phosphatidylglycerol, phosphatidylinositol or diphosphatidylglycerol, or as monoacylglyceride, diacylglyceride or triacylglyceride or other fatty acid esters such as acetyl-Coenzym A thioester, which contain further saturated or unsaturated fatty acids in the fatty acid molecule.

[48738] In one embodiment, the term “the fine chemical” and the term “the respective fine chemical” mean at least one chemical compound with an activity of the above-mentioned fine chemical. Further, the term “in context of any of the paragraphs [0014.1.8.8] to [0514.1.8.8]” as used herein means that for any of said paragraphs [0014.1.8.8] to [0514.1.8.8] the term “the fine chemical” is understood to follow the definition of section [0014.1.8.8] or section [0015.1.8.8], independently whether it refers to any other paragraph or not and whether the reference recites the term “fine chemical” in an other context.

[48739] Thus, in cases where one or more paragraphs or sections are incorporated by reference into any of the present paragraphs [0014.1.8.8] to [0514.1.8.8], e.g. by usage of the term “see paragraph” or the term “for the disclosure of this paragraph see the disclosure of paragraph” or the term “incorporated by reference” or a corresponding term, the incorporated paragraph, section or term “the fine chemical” is also understood to have the meaning according to this definition of this paragraph [0015.1.8.8].

[48740] Further, the term “fine chemicals” as used herein relates to compositions comprising said fine chemical(s), i.e. comprising linoleic acid, respectively.

[48741] Accordingly, the present invention relates to a process for the production of linoleic acid, which comprises
[48742] (a) increasing or generating one or more activities selected from the group consisting of chlorophyllase in a non-human organism or a part thereof, preferably a microorganism, a plant cell, a plant or a part thereof, as compared to a corresponding non-transformed wild type non-human organism or a part thereof; and
[48743] (b) growing the non-human organism or a part thereof under conditions which permit the production of linoleic acid or a composition comprising linoleic acid in said non-human organism or in the culture medium surrounding said non-human organism.

[48744] Accordingly, the present invention relates to a process for the production of linoleic acid, which comprises
[48745] (a) increasing or generating one or more activities selected from the group consisting of At1g19800-protein in a non-human organism or a part thereof, preferably a microorganism, a plant cell, a plant or a part thereof, as compared to a corresponding non-transformed wild type non-human organism or a part thereof; and
[48746] (b) growing the non-human organism or a part thereof under conditions which permit the production of linoleic acid or a composition comprising linoleic acid in said non-human organism or in the culture medium surrounding said non-human organism.

[48747] Accordingly, the present invention relates to a process for the production of linoleic acid, which comprises
[48748] (a) increasing or generating one or more activities selected from the group consisting of transcription factor in a non-human organism or a part thereof, preferably a microorganism, a plant cell, a plant or a part thereof, as compared to a corresponding non-transformed wild type non-human organism or a part thereof; and
[48749] (b) growing the non-human organism or a part thereof under conditions which permit the production of linoleic acid or a composition comprising linoleic acid in said non-human organism or in the culture medium surrounding said non-human organism.

[48750] Accordingly, the present invention relates to a process for the production of linoleic acid, which comprises
[48751] (a) increasing or generating one or more activities selected from the group consisting of pyruvate kinase in a non-human organism or a part thereof, preferably a microorganism, a plant cell, a plant or a part thereof, as compared to a corresponding non-transformed wild type non-human organism or a part thereof; and
[48752] (b) growing the non-human organism or a part thereof under conditions which permit the production of linoleic acid or a composition comprising linoleic acid in said non-human organism or in the culture medium surrounding said non-human organism.

[48753] Accordingly, the present invention relates to a process for the production of linoleic acid, which comprises
[48754] (a) increasing or generating one or more activities selected from the group consisting of At2g45420-protein in a non-human organism or a part thereof, preferably a microorganism, a plant cell, a plant or a part thereof, as compared to a corresponding non-transformed wild type non-human organism or a part thereof; and
[48755] (b) growing the non-human organism or a part thereof under conditions which permit the production of linoleic acid or a composition comprising linoleic acid in said non-human organism or in the culture medium surrounding said non-human organism.

[48756] Accordingly, the present invention relates to a process for the production of linoleic acid, which comprises
[48757] (a) increasing or generating one or more activities selected from the group consisting of heat shock transcription factor in a non-human organism or a part thereof, preferably a microorganism, a plant cell, a plant or a part thereof, as compared to a corresponding non-transformed wild type non-human organism or a part thereof; and
[48758] (b) growing the non-human organism or a part thereof under conditions which permit the production of linoleic acid or a composition comprising linoleic acid in said non-human organism or in the culture medium surrounding said non-human organism.

[48759] Accordingly, the present invention relates to a process for the production of linoleic acid, which comprises
[48760] (a) increasing or generating one or more activities selected from the group consisting of CCAAT-binding transcription factor in a non-human organism or a part thereof, preferably a microorganism, a plant cell, a plant or a part thereof, as compared to a corresponding non-transformed wild type non-human organism or a part thereof; and
[48761] (b) growing the non-human organism or a part thereof under conditions which permit the production of linoleic acid or a composition comprising linoleic acid in said non-human organism or in the culture medium surrounding said non-human organism.

[48762] Accordingly, the present invention relates to a process for the production of linoleic acid, which comprises
[48763] (a) increasing or generating one or more activities selected from the group consisting of glutaredoxin in a non-human organism or a part thereof, preferably a microorganism, a plant cell, a plant or a part thereof, as compared to a corresponding non-transformed wild type non-human organism or a part thereof; and
[48764] (b) growing the non-human organism or a part thereof under conditions which permit the production of linoleic acid or a composition comprising linoleic acid in said non-human organism or in the culture medium surrounding said non-human organism.

[48765] Accordingly, the present invention relates to a process for the production of linoleic acid, which comprises
[48766] (a) increasing or generating one or more activities selected from the group consisting of transcription factor in a non-human organism or a part thereof, preferably a microorganism, a plant cell, a plant or a part thereof, as compared to a corresponding non-transformed wild type non-human organism or a part thereof; and
[48767] (b) growing the non-human organism or a part thereof under conditions which permit the production of linoleic acid or a composition comprising linoleic acid in said non-human organism or in the culture medium surrounding said non-human organism.

[48768] Accordingly, the present invention relates to a process for the production of linoleic acid, which comprises
[48769] (a) increasing or generating one or more activities selected from the group consisting of monothiol glutaredoxin in a non-human organism or a part thereof, preferably a microorganism, a plant cell, a plant or a part thereof, as compared to a corresponding non-transformed wild type non-human organism or a part thereof; and
[48770] (b) growing the non-human organism or a part thereof under conditions which permit the production of linoleic acid or a composition comprising linoleic acid in said non-human organism or in the culture medium surrounding said non-human organism.

[48771] Accordingly, the present invention relates to a process for the production of linoleic acid, which comprises
[48772] (a) increasing or generating one or more activities selected from the group consisting of monothiol glutaredoxin in a non-human organism or a part thereof, preferably a microorganism, a plant cell, a plant or a part thereof, as compared to a corresponding non-transformed wild type non-human organism or a part thereof; and
[48773] (b) growing the non-human organism or a part thereof under conditions which permit the production of linoleic acid or a composition comprising linoleic acid in said non-human organism or in the culture medium surrounding said non-human organism.

[48774] Accordingly, the present invention relates to a process for the production of linoleic acid, which comprises
[48775] (a) increasing or generating one or more activities selected from the group consisting of protein phosphatase in a non-human organism or a part thereof, preferably a microorganism, a plant cell, a plant or a part thereof, as compared to a corresponding non-transformed wild type non-human organism or a part thereof; and
[48776] (b) growing the non-human organism or a part thereof under conditions which permit the production of linoleic acid or a composition comprising linoleic acid in said non-human organism or in the culture medium surrounding said non-human organism.

[48777] Accordingly, the present invention relates to a process for the production of linoleic acid, which comprises
[48778] (a) increasing or generating one or more activities selected from the group consisting of glutaredoxin in a non-human organism or a part thereof, preferably a microorganism, a plant cell, a plant or a part thereof, as compared to a corresponding non-transformed wild type non-human organism or a part thereof; and
[48779] (b) growing the non-human organism or a part thereof under conditions which permit the production of linoleic acid or a composition comprising linoleic acid in said non-human organism or in the culture medium surrounding said non-human organism.

[48780] Accordingly, the present invention relates to a process for the production of linoleic acid, which comprises
[48781] (a) increasing or generating one or more activities selected from the group consisting of heat shock transcription factor in a non-human organism or a part thereof, preferably a microorganism, a plant cell, a plant or a part thereof, as compared to a corresponding non-transformed wild type non-human organism or a part thereof; and
[48782] (b) growing the non-human organism or a part thereof under conditions which permit the production of linoleic acid or a composition comprising linoleic acid in said non-human organism or in the culture medium surrounding said non-human organism.

[48783] Accordingly, the present invention relates to a process for the production of linoleic acid, which comprises
[48784] (a) increasing or generating one or more activities selected from the group consisting of protein phosphatase in a non-human organism or a part thereof, preferably a microorganism, a plant cell, a plant or a part thereof, as compared to a corresponding non-transformed wild type non-human organism or a part thereof; and
[48785] (b) growing the non-human organism or a part thereof under conditions which permit the production of linoleic acid or a composition comprising linoleic acid in said non-human organism or in the culture medium surrounding said non-human organism.

[48786] Accordingly, the present invention relates to a process for the production of linoleic acid, which comprises
[48787] (a) increasing or generating one or more activities selected from the group consisting of oxidoreductase in a non-human organism or a part thereof, preferably a microorganism, a plant cell, a plant or a part thereof, as compared to a corresponding non-transformed wild type non-human organism or a part thereof; and
[48788] (b) growing the non-human organism or a part thereof under conditions which permit the production of linoleic acid or a composition comprising linoleic acid in said non-human organism or in the culture medium surrounding said non-human organism.

[48789] Accordingly, the present invention relates to a process for the production of linoleic acid, which comprises
[48790] (a) increasing or generating one or more activities selected from the group consisting of transcriptional regulator protein in a non-human organism or a part thereof, preferably a microorganism, a plant cell, a plant or a part thereof, as compared to a corresponding non-transformed wild type non-human organism or a part thereof; and
[48791] (b) growing the non-human organism or a part thereof under conditions which permit the production of linoleic acid or a composition comprising linoleic acid in said non-human organism or in the culture medium surrounding said non-human organism.

[48792] Accordingly, the present invention relates to a process for the production of linoleic acid, which comprises
[48793] (a) increasing or generating one or more activities selected from the group consisting of beta-hydroxylase in a non-human organism or a part thereof, preferably a microorganism, a plant cell, a plant or a part thereof, as compared to a corresponding non-transformed wild type non-human organism or a part thereof; and
[48794] (b) growing the non-human organism or a part thereof under conditions which permit the production of linoleic acid or a composition comprising linoleic acid in said non-human organism or in the culture medium surrounding said non-human organism.

[48795] Accordingly, the present invention relates to a process for the production of linoleic acid, which comprises
[48796] (a) increasing or generating one or more activities selected from the group consisting of oxidoreductase in a non-human organism or a part thereof, preferably a microorganism, a plant cell, a plant or a part thereof, as compared to a corresponding non-transformed wild type non-human organism or a part thereof; and
[48797] (b) growing the non-human organism or a part thereof under conditions which permit the production of linoleic acid or a composition comprising linoleic acid in said non-human organism or in the culture medium surrounding said non-human organism.

[48798] Accordingly, the present invention relates to a process for the production of linoleic acid, which comprises
[48799] (a) increasing or generating one or more activities selected from the group consisting of ThiF family protein in a non-human organism or a part thereof, preferably a microorganism, a plant cell, a plant or a part thereof, as compared to a corresponding non-transformed wild type non-human organism or a part thereof; and
[48800] (b) growing the non-human organism or a part thereof under conditions which permit the production of linoleic acid or a composition comprising linoleic acid in said non-human organism or in the culture medium surrounding said non-human organism.

[48801] Accordingly, the present invention relates to a process for the production of linoleic acid, which comprises
[48802] (a) increasing or generating one or more activities selected from the group consisting of recombinase A in a non-human organism or a part thereof, preferably a microorganism, a plant cell, a plant or a part thereof, as compared to a corresponding non-transformed wild type non-human organism or a part thereof; and
[48803] (b) growing the non-human organism or a part thereof under conditions which permit the production of linoleic acid or a composition comprising linoleic acid in said non-human organism or in the culture medium surrounding said non-human organism.

[48804] Accordingly, the present invention relates to a process for the production of linoleic acid, which comprises
[48805] (a) increasing or generating one or more activities selected from the group consisting of hydrolase in a non-human organism or a part thereof, preferably a microorganism, a plant cell, a plant or a part thereof, as compared to a corresponding non-transformed wild type non-human organism or a part thereof; and
[48806] (b) growing the non-human organism or a part thereof under conditions which permit the production of linoleic acid or a composition comprising linoleic acid in said non-human organism or in the culture medium surrounding said non-human organism.

[48807] Accordingly, the present invention relates to a process for the production of linoleic acid, which comprises
[48808] (a) increasing or generating one or more activities selected from the group consisting of membrane transport protein in a non-human organism or a part thereof, preferably a microorganism, a plant cell, a plant or a part thereof, as compared to a corresponding non-transformed wild type non-human organism or a part thereof; and
[48809] (b) growing the non-human organism or a part thereof under conditions which permit the production of linoleic acid or a composition comprising linoleic acid in said non-human organism or in the culture medium surrounding said non-human organism.

[48810] Accordingly, the present invention relates to a process for the production of linoleic acid, which comprises
[48811] (a) increasing or generating one or more activities selected from the group consisting of b0801-protein in a non-human organism or a part thereof, preferably a microorganism, a plant cell, a plant or a part thereof, as compared to a corresponding non-transformed wild type non-human organism or a part thereof; and
[48812] (b) growing the non-human organism or a part thereof under conditions which permit the production of linoleic acid or a composition comprising linoleic acid in said non-human organism or in the culture medium surrounding said non-human organism.

[48813] Accordingly, the present invention relates to a process for the production of linoleic acid, which comprises
[48814] (a) increasing or generating one or more activities selected from the group consisting of 3-oxoacyl-[acyl-carrier-protein] synthase in a non-human organism or a part thereof, preferably a microorganism, a plant cell, a plant or a part thereof, as compared to a corresponding non-transformed wild type non-human organism or a part thereof; and
[48815] (b) growing the non-human organism or a part thereof under conditions which permit the production of linoleic acid or a composition comprising linoleic acid in said non-human organism or in the culture medium surrounding said non-human organism.

[48816] Accordingly, the present invention relates to a process for the production of linoleic acid, which comprises
[48817] (a) increasing or generating one or more activities selected from the group consisting of outer membrane receptor protein precursor in a non-human organism or a part thereof, preferably a microorganism, a plant cell, a plant or a part thereof, as compared to a corresponding non-transformed wild type non-human organism or a part thereof; and
[48818] (b) growing the non-human organism or a part thereof under conditions which permit the production of linoleic acid or a composition comprising linoleic acid in said non-human organism or in the culture medium surrounding said non-human organism.

[48819] Accordingly, the present invention relates to a process for the production of linoleic acid, which comprises
[48820] (a) increasing or generating one or more activities selected from the group consisting of b1330-protein in a non-human organism or a part thereof, preferably a microorganism, a plant cell, a plant or a part thereof, as compared to a corresponding non-transformed wild type non-human organism or a part thereof; and
[48821] (b) growing the non-human organism or a part thereof under conditions which permit the production of linoleic acid or a composition comprising linoleic acid in said non-human organism or in the culture medium surrounding said non-human organism.

[48822] Accordingly, the present invention relates to a process for the production of linoleic acid, which comprises
[48823] (a) increasing or generating one or more activities selected from the group consisting of lipoprotein precursor in a non-human organism or a part thereof, preferably a microorganism, a plant cell, a plant or a part thereof, as compared to a corresponding non-transformed wild type non-human organism or a part thereof; and
[48824] (b) growing the non-human organism or a part thereof under conditions which permit the production of linoleic acid or a composition comprising linoleic acid in said non-human organism or in the culture medium surrounding said non-human organism.

[48825] Accordingly, the present invention relates to a process for the production of linoleic acid, which comprises
[48826] (a) increasing or generating one or more activities selected from the group consisting of b1470-protein in a non-human organism or a part thereof, preferably a microorganism, a plant cell, a plant or a part thereof, as compared to a corresponding non-transformed wild type non-human organism or a part thereof; and
[48827] (b) growing the non-human organism or a part thereof under conditions which permit the production of linoleic acid or a composition comprising linoleic acid in said non-human organism or in the culture medium surrounding said non-human organism.

[48828] Accordingly, the present invention relates to a process for the production of linoleic acid, which comprises
[48829] (a) increasing or generating one or more activities selected from the group consisting of Fe—S subunit of oxidoreductase in a non-human organism or a part thereof, preferably a microorganism, a plant cell, a plant or a part thereof, as compared to a corresponding non-transformed wild type non-human organism or a part thereof; and
[48830] (b) growing the non-human organism or a part thereof under conditions which permit the production of linoleic acid or a composition comprising linoleic acid in said non-human organism or in the culture medium surrounding said non-human organism.

[48831] Accordingly, the present invention relates to a process for the production of linoleic acid, which comprises
[48832] (a) increasing or generating one or more activities selected from the group consisting of acid shock protein in a non-human organism or a part thereof, preferably a microorganism, a plant cell, a plant or a part thereof, as compared to a corresponding non-transformed wild type non-human organism or a part thereof; and
[48833] (b) growing the non-human organism or a part thereof under conditions which permit the production of linoleic acid or a composition comprising linoleic acid in said non-human organism or in the culture medium surrounding said non-human organism.

[48834] Accordingly, the present invention relates to a process for the production of linoleic acid, which comprises
[48835] (a) increasing or generating one or more activities selected from the group consisting of fumarate hydratase in a non-human organism or a part thereof, preferably a microorganism, a plant cell, a plant or a part thereof, as compared to a corresponding non-transformed wild type non-human organism or a part thereof; and
[48836] (b) growing the non-human organism or a part thereof under conditions which permit the production of linoleic acid or a composition comprising linoleic acid in said non-human organism or in the culture medium surrounding said non-human organism.

[48837] Accordingly, the present invention relates to a process for the production of linoleic acid, which comprises
[48838] (a) increasing or generating one or more activities selected from the group consisting of electron transport complex protein in a non-human organism or a part thereof, preferably a microorganism, a plant cell, a plant or a part thereof, as compared to a corresponding non-transformed wild type non-human organism or a part thereof; and
[48839] (b) growing the non-human organism or a part thereof under conditions which permit the production of linoleic acid or a composition comprising linoleic acid in said non-human organism or in the culture medium surrounding said non-human organism.

[48840] Accordingly, the present invention relates to a process for the production of linoleic acid, which comprises
[48841] (a) increasing or generating one or more activities selected from the group consisting of b1670-protein in a non-human organism or a part thereof, preferably a microorganism, a plant cell, a plant or a part thereof, as compared to a corresponding non-transformed wild type non-human organism or a part thereof; and
[48842] (b) growing the non-human organism or a part thereof under conditions which permit the production of linoleic acid or a composition comprising linoleic acid in said non-human organism or in the culture medium surrounding said non-human organism.

[48843] Accordingly, the present invention relates to a process for the production of linoleic acid, which comprises
[48844] (a) increasing or generating one or more activities selected from the group consisting of b1837-protein in a non-human organism or a part thereof, preferably a microorganism, a plant cell, a plant or a part thereof, as compared to a corresponding non-transformed wild type non-human organism or a part thereof; and
[48845] (b) growing the non-human organism or a part thereof under conditions which permit the production of linoleic acid or a composition comprising linoleic acid in said non-human organism or in the culture medium surrounding said non-human organism.

[48846] Accordingly, the present invention relates to a process for the production of linoleic acid, which comprises
[48847] (a) increasing or generating one or more activities selected from the group consisting of b2032-protein in a non-human organism or a part thereof, preferably a microorganism, a plant cell, a plant or a part thereof, as compared to a corresponding non-transformed wild type non-human organism or a part thereof; and
[48848] (b) growing the non-human organism or a part thereof under conditions which permit the production of linoleic acid or a composition comprising linoleic acid in said non-human organism or in the culture medium surrounding said non-human organism.

[48849] Accordingly, the present invention relates to a process for the production of linoleic acid, which comprises
[48850] (a) increasing or generating one or more activities selected from the group consisting of colanic acid biosynthesis protein in a non-human organism or a part thereof, preferably a microorganism, a plant cell, a plant or a part thereof, as compared to a corresponding non-transformed wild type non-human organism or a part thereof; and
[48851] (b) growing the non-human organism or a part thereof under conditions which permit the production of linoleic acid or a composition comprising linoleic acid in said non-human organism or in the culture medium surrounding said non-human organism.

[48852] Accordingly, the present invention relates to a process for the production of linoleic acid, which comprises
[48853] (a) increasing or generating one or more activities selected from the group consisting of b2099-protein in a non-human organism or a part thereof, preferably a microorganism, a plant cell, a plant or a part thereof, as compared to a corresponding non-transformed wild type non-human organism or a part thereof; and
[48854] (b) growing the non-human organism or a part thereof under conditions which permit the production of linoleic acid or a composition comprising linoleic acid in said non-human organism or in the culture medium surrounding said non-human organism.

[48855] Accordingly, the present invention relates to a process for the production of linoleic acid, which comprises
[48856] (a) increasing or generating one or more activities selected from the group consisting of b2107-protein in a non-human organism or a part thereof, preferably a microorganism, a plant cell, a plant or a part thereof, as compared to a corresponding non-transformed wild type non-human organism or a part thereof; and
[48857] (b) growing the non-human organism or a part thereof under conditions which permit the production of linoleic acid or a composition comprising linoleic acid in said non-human organism or in the culture medium surrounding said non-human organism.

[48858] Accordingly, the present invention relates to a process for the production of linoleic acid, which comprises
[48859] (a) increasing or generating one or more activities selected from the group consisting of ABC transporter permease protein in a non-human organism or a part thereof, preferably a microorganism, a plant cell, a plant or a part thereof, as compared to a corresponding non-transformed wild type non-human organism or a part thereof; and
[48860] (b) growing the non-human organism or a part thereof under conditions which permit the production of linoleic acid or a composition comprising linoleic acid in said non-human organism or in the culture medium surrounding said non-human organism.

[48861] Accordingly, the present invention relates to a process for the production of linoleic acid, which comprises
[48862] (a) increasing or generating one or more activities selected from the group consisting of b2399-protein in a non-human organism or a part thereof, preferably a microorganism, a plant cell, a plant or a part thereof, as compared to a corresponding non-transformed wild type non-human organism or a part thereof; and
[48863] (b) growing the non-human organism or a part thereof under conditions which permit the production of linoleic acid or a composition comprising linoleic acid in said non-human organism or in the culture medium surrounding said non-human organism.

[48864] Accordingly, the present invention relates to a process for the production of linoleic acid, which comprises
[48865] (a) increasing or generating one or more activities selected from the group consisting of ethanolamine utilization protein in a non-human organism or a part thereof, preferably a microorganism, a plant cell, a plant or a part thereof, as compared to a corresponding non-transformed wild type non-human organism or a part thereof; and
[48866] (b) growing the non-human organism or a part thereof under conditions which permit the production of linoleic acid or a composition comprising linoleic acid in said non-human organism or in the culture medium surrounding said non-human organism.

[48867] Accordingly, the present invention relates to a process for the production of linoleic acid, which comprises
[48868] (a) increasing or generating one or more activities selected from the group consisting of b2474-protein in a non-human organism or a part thereof, preferably a microorganism, a plant cell, a plant or a part thereof, as compared to a corresponding non-transformed wild type non-human organism or a part thereof; and
[48869] (b) growing the non-human organism or a part thereof under conditions which permit the production of linoleic acid or a composition comprising linoleic acid in said non-human organism or in the culture medium surrounding said non-human organism.

[48870] Accordingly, the present invention relates to a process for the production of linoleic acid, which comprises
[48871] (a) increasing or generating one or more activities selected from the group consisting of b2613-protein in a non-human organism or a part thereof, preferably a microorganism, a plant cell, a plant or a part thereof, as compared to a corresponding non-transformed wild type non-human organism or a part thereof; and
[48872] (b) growing the non-human organism or a part thereof under conditions which permit the production of linoleic acid or a composition comprising linoleic acid in said non-human organism or in the culture medium surrounding said non-human organism.

[48873] Accordingly, the present invention relates to a process for the production of linoleic acid, which comprises
[48874] (a) increasing or generating one or more activities selected from the group consisting of b2682-protein in a non-human organism or a part thereof, preferably a microorganism, a plant cell, a plant or a part thereof, as compared to a corresponding non-transformed wild type non-human organism or a part thereof; and
[48875] (b) growing the non-human organism or a part thereof under conditions which permit the production of linoleic acid or a composition comprising linoleic acid in said non-human organism or in the culture medium surrounding said non-human organism.

[48876] Accordingly, the present invention relates to a process for the production of linoleic acid, which comprises
[48877] (a) increasing or generating one or more activities selected from the group consisting of flavodoxin in a non-human organism or a part thereof, preferably a microorganism, a plant cell, a plant or a part thereof, as compared to a corresponding non-transformed wild type non-human organism or a part thereof; and
[48878] (b) growing the non-human organism or a part thereof under conditions which permit the production of linoleic acid or a composition comprising linoleic acid in said non-human organism or in the culture medium surrounding said non-human organism.

[48879] Accordingly, the present invention relates to a process for the production of linoleic acid, which comprises
[48880] (a) increasing or generating one or more activities selected from the group consisting of AAS bifunctional protein in a non-human organism or a part thereof, preferably a microorganism, a plant cell, a plant or a part thereof, as compared to a corresponding non-transformed wild type non-human organism or a part thereof; and
[48881] (b) growing the non-human organism or a part thereof under conditions which permit the production of linoleic acid or a composition comprising linoleic acid in said non-human organism or in the culture medium surrounding said non-human organism.

[48882] Accordingly, the present invention relates to a process for the production of linoleic acid, which comprises
[48883] (a) increasing or generating one or more activities selected from the group consisting of b2849-protein in a non-human organism or a part thereof, preferably a microorganism, a plant cell, a plant or a part thereof, as compared to a corresponding non-transformed wild type non-human organism or a part thereof; and
[48884] (b) growing the non-human organism or a part thereof under conditions which permit the production of linoleic acid or a composition comprising linoleic acid in said non-human organism or in the culture medium surrounding said non-human organism.

[48885] Accordingly, the present invention relates to a process for the production of linoleic acid, which comprises
[48886] (a) increasing or generating one or more activities selected from the group consisting of xanthine dehydrogenase in a non-human organism or a part thereof, preferably a microorganism, a plant cell, a plant or a part thereof, as compared to a corresponding non-transformed wild type non-human organism or a part thereof; and
[48887] (b) growing the non-human organism or a part thereof under conditions which permit the production of linoleic acid or a composition comprising linoleic acid in said non-human organism or in the culture medium surrounding said non-human organism.

[48888] Accordingly, the present invention relates to a process for the production of linoleic acid, which comprises
[48889] (a) increasing or generating one or more activities selected from the group consisting of b2909-protein in a non-human organism or a part thereof, preferably a microorganism, a plant cell, a plant or a part thereof, as compared to a corresponding non-transformed wild type non-human organism or a part thereof; and
[48890] (b) growing the non-human organism or a part thereof under conditions which permit the production of linoleic acid or a composition comprising linoleic acid in said non-human organism or in the culture medium surrounding said non-human organism.

[48891] Accordingly, the present invention relates to a process for the production of linoleic acid, which comprises
[48892] (a) increasing or generating one or more activities selected from the group consisting of phosphotriesterase in a non-human organism or a part thereof, preferably a microorganism, a plant cell, a plant or a part thereof, as compared to a corresponding non-transformed wild type non-human organism or a part thereof; and
[48893] (b) growing the non-human organism or a part thereof under conditions which permit the production of linoleic acid or a composition comprising linoleic acid in said non-human organism or in the culture medium surrounding said non-human organism.

[48894] Accordingly, the present invention relates to a process for the production of linoleic acid, which comprises
[48895] (a) increasing or generating one or more activities selected from the group consisting of sn-glycerol-3-phosphate transport system permease protein in a non-human organism or a part thereof, preferably a microorganism, a plant cell, a plant or a part thereof, as compared to a corresponding non-transformed wild type non-human organism or a part thereof; and
[48896] (b) growing the non-human organism or a part thereof under conditions which permit the production of linoleic acid or a composition comprising linoleic acid in said non-human organism or in the culture medium surrounding said non-human organism.

[48897] Accordingly, the present invention relates to a process for the production of linoleic acid, which comprises
[48898] (a) increasing or generating one or more activities selected from the group consisting of threonine efflux protein in a non-human organism or a part thereof, preferably a microorganism, a plant cell, a plant or a part thereof, as compared to a corresponding non-transformed wild type non-human organism or a part thereof; and
[48899] (b) growing the non-human organism or a part thereof under conditions which permit the production of linoleic acid or a composition comprising linoleic acid in said non-human organism or in the culture medium surrounding said non-human organism.

[48900] Accordingly, the present invention relates to a process for the production of linoleic acid, which comprises
[48901] (a) increasing or generating one or more activities selected from the group consisting of 3-ketoacyl-CoA thiolase in a non-human organism or a part thereof, preferably a microorganism, a plant cell, a plant or a part thereof, as compared to a corresponding non-transformed wild type non-human organism or a part thereof; and
[48902] (b) growing the non-human organism or a part thereof under conditions which permit the production of linoleic acid or a composition comprising linoleic acid in said non-human organism or in the culture medium surrounding said non-human organism.

[48903] Accordingly, the present invention relates to a process for the production of linoleic acid, which comprises
[48904] (a) increasing or generating one or more activities selected from the group consisting of GM02LC38418-protein in a non-human organism or a part thereof, preferably a microorganism, a plant cell, a plant or a part thereof, as compared to a corresponding non-transformed wild type non-human organism or a part thereof; and
[48905] (b) growing the non-human organism or a part thereof under conditions which permit the production of linoleic acid or a composition comprising linoleic acid in said non-human organism or in the culture medium surrounding said non-human organism.

[48906] Accordingly, the present invention relates to a process for the production of linoleic acid, which comprises
[48907] (a) increasing or generating one or more activities selected from the group consisting of sll1032-protein in a non-human organism or a part thereof, preferably a microorganism, a plant cell, a plant or a part thereof, as compared to a corresponding non-transformed wild type non-human organism or a part thereof; and
[48908] (b) growing the non-human organism or a part thereof under conditions which permit the production of linoleic acid or a composition comprising linoleic acid in said non-human organism or in the culture medium surrounding said non-human organism.

[48909] Accordingly, the present invention relates to a process for the production of linoleic acid, which comprises
[48910] (a) increasing or generating one or more activities selected from the group consisting of phosphoribosylformyl glycinamidine synthase subunit in a non-human organism or a part thereof, preferably a microorganism, a plant cell, a plant or a part thereof, as compared to a corresponding non-transformed wild type non-human organism or a part thereof; and
[48911] (b) growing the non-human organism or a part thereof under conditions which permit the production of linoleic acid or a composition comprising linoleic acid in said non-human organism or in the culture medium surrounding said non-human organism.

[48912] Accordingly, the present invention relates to a process for the production of linoleic acid, which comprises
[48913] (a) increasing or generating one or more activities selected from the group consisting of CTP synthetase in a non-human organism or a part thereof, preferably a microorganism, a plant cell, a plant or a part thereof, as compared to a corresponding non-transformed wild type non-human organism or a part thereof; and
[48914] (b) growing the non-human organism or a part thereof under conditions which permit the production of linoleic acid or a composition comprising linoleic acid in said non-human organism or in the culture medium surrounding said non-human organism.

[48915] Accordingly, the present invention relates to a process for the production of linoleic acid, which comprises
[48916] (a) increasing or generating one or more activities selected from the group consisting of carbamoyl-phosphate synthase subunit in a non-human organism or a part thereof, preferably a microorganism, a plant cell, a plant or a part thereof, as compared to a corresponding non-transformed wild type non-human organism or a part thereof; and
[48917] (b) growing the non-human organism or a part thereof under conditions which permit the production of linoleic acid or a composition comprising linoleic acid in said non-human organism or in the culture medium surrounding said non-human organism.

[48918] Accordingly, the present invention relates to a process for the production of linoleic acid, which comprises
[48919] (a) increasing or generating one or more activities selected from the group consisting of coproporphyrinogen III oxidase in a non-human organism or a part thereof, preferably a microorganism, a plant cell, a plant or a part thereof, as compared to a corresponding non-transformed wild type non-human organism or a part thereof; and
[48920] (b) growing the non-human organism or a part thereof under conditions which permit the production of linoleic acid or a composition comprising linoleic acid in said non-human organism or in the culture medium surrounding said non-human organism.

[48921] Accordingly, the present invention relates to a process for the production of linoleic acid, which comprises
[48922] (a) increasing or generating one or more activities selected from the group consisting of cation-transporting ATPase in a non-human organism or a part thereof, preferably a microorganism, a plant cell, a plant or a part thereof, as compared to a corresponding non-transformed wild type non-human organism or a part thereof; and
[48923] (b) growing the non-human organism or a part thereof under conditions which permit the production of linoleic acid or a composition comprising linoleic acid in said non-human organism or in the culture medium surrounding said non-human organism.

[48924] Accordingly, the present invention relates to a process for the production of linoleic acid, which comprises
[48925] (a) increasing or generating one or more activities selected from the group consisting of oxidoreductase in a non-human organism or a part thereof, preferably a microorganism, a plant cell, a plant or a part thereof, as compared to a corresponding non-transformed wild type non-human organism or a part thereof; and
[48926] (b) growing the non-human organism or a part thereof under conditions which permit the production of linoleic acid or a composition comprising linoleic acid in said non-human organism or in the culture medium surrounding said non-human organism.

[48927] Accordingly, the present invention relates to a process for the production of linoleic acid, which comprises
[48928] (a) increasing or generating one or more activities selected from the group consisting of tryptophan synthase alpha chain in a non-human organism or a part thereof, preferably a microorganism, a plant cell, a plant or a part thereof, as compared to a corresponding non-transformed wild type non-human organism or a part thereof; and
[48929] (b) growing the non-human organism or a part thereof under conditions which permit the production of linoleic acid or a composition comprising linoleic acid in said non-human organism or in the culture medium surrounding said non-human organism.

[48930] Accordingly, the present invention relates to a process for the production of linoleic acid, which comprises
[48931] (a) increasing or generating one or more activities selected from the group consisting of aromatic acid decarboxylase in a non-human organism or a part thereof, preferably a microorganism, a plant cell, a plant or a part thereof, as compared to a corresponding non-transformed wild type non-human organism or a part thereof; and
[48932] (b) growing the non-human organism or a part thereof under conditions which permit the production of linoleic acid or a composition comprising linoleic acid in said non-human organism or in the culture medium surrounding said non-human organism.

[48933] Accordingly, the present invention relates to a process for the production of linoleic acid, which comprises
[48934] (a) increasing or generating one or more activities selected from the group consisting of phosphate import ATP-binding protein in a non-human organism or a part thereof, preferably a microorganism, a plant cell, a plant or a part thereof, as compared to a corresponding non-transformed wild type non-human organism or a part thereof; and
[48935] (b) growing the non-human organism or a part thereof under conditions which permit the production of linoleic acid or a composition comprising linoleic acid in said non-human organism or in the culture medium surrounding said non-human organism.

[48936] Accordingly, the present invention relates to a process for the production of linoleic acid, which comprises
[48937] (a) increasing or generating one or more activities selected from the group consisting of gamma-glutamyltranspeptidase in a non-human organism or a part thereof, preferably a microorganism, a plant cell, a plant or a part thereof, as compared to a corresponding non-transformed wild type non-human organism or a part thereof; and
[48938] (b) growing the non-human organism or a part thereof under conditions which permit the production of linoleic acid or a composition comprising linoleic acid in said non-human organism or in the culture medium surrounding said non-human organism.

[48939] Accordingly, the present invention relates to a process for the production of linoleic acid, which comprises
[48940] (a) increasing or generating one or more activities selected from the group consisting of arginine decarboxylase in a non-human organism or a part thereof, preferably a microorganism, a plant cell, a plant or a part thereof, as compared to a corresponding non-transformed wild type non-human organism or a part thereof; and
[48941] (b) growing the non-human organism or a part thereof under conditions which permit the production of linoleic acid or a composition comprising linoleic acid in said non-human organism or in the culture medium surrounding said non-human organism.

[48942] Accordingly, the present invention relates to a process for the production of linoleic acid, which comprises
[48943] (a) increasing or generating one or more activities selected from the group consisting of fatty acid desaturase in a non-human organism or a part thereof, preferably a microorganism, a plant cell, a plant or a part thereof, as compared to a corresponding non-transformed wild type non-human organism or a part thereof; and
[48944] (b) growing the non-human organism or a part thereof under conditions which permit the production of linoleic acid or a composition comprising linoleic acid in said non-human organism or in the culture medium surrounding said non-human organism.

[48945] Accordingly, the present invention relates to a process for the production of linoleic acid, which comprises
[48946] (a) increasing or generating one or more activities selected from the group consisting of threonine dehydratase in a non-human organism or a part thereof, preferably a microorganism, a plant cell, a plant or a part thereof, as compared to a corresponding non-transformed wild type non-human organism or a part thereof; and
[48947] (b) growing the non-human organism or a part thereof under conditions which permit the production of linoleic acid or a composition comprising linoleic acid in said non-human organism or in the culture medium surrounding said non-human organism.

[48948] Accordingly, the present invention relates to a process for the production of linoleic acid, which comprises
[48949] (a) increasing or generating one or more activities selected from the group consisting of TTC0490-protein in a non-human organism or a part thereof, preferably a microorganism, a plant cell, a plant or a part thereof, as compared to a corresponding non-transformed wild type non-human organism or a part thereof; and
[48950] (b) growing the non-human organism or a part thereof under conditions which permit the production of linoleic acid or a composition comprising linoleic acid in said non-human organism or in the culture medium surrounding said non-human organism.

[48951] Accordingly, the present invention relates to a process for the production of linoleic acid, which comprises
[48952] (a) increasing or generating one or more activities selected from the group consisting of metal-dependent hydrolase in a non-human organism or a part thereof, preferably a microorganism, a plant cell, a plant or a part thereof, as compared to a corresponding non-transformed wild type non-human organism or a part thereof; and
[48953] (b) growing the non-human organism or a part thereof under conditions which permit the production of linoleic acid or a composition comprising linoleic acid in said non-human organism or in the culture medium surrounding said non-human organism.

[48954] Accordingly, the present invention relates to a process for the production of linoleic acid, which comprises
[48955] (a) increasing or generating one or more activities selected from the group consisting of multiple antibiotic resistance protein in a non-human organism or a part thereof, preferably a microorganism, a plant cell, a plant or a part thereof, as compared to a corresponding non-transformed wild type non-human organism or a part thereof; and
[48956] (b) growing the non-human organism or a part thereof under conditions which permit the production of linoleic acid or a composition comprising linoleic acid in said non-human organism or in the culture medium surrounding said non-human organism.

[48957] Accordingly, the present invention relates to a process for the production of linoleic acid, which comprises
[48958] (a) increasing or generating one or more activities selected from the group consisting of glycin cleavage system protein in a non-human organism or a part thereof, preferably a microorganism, a plant cell, a plant or a part thereof, as compared to a corresponding non-transformed wild type non-human organism or a part thereof; and
[48959] (b) growing the non-human organism or a part thereof under conditions which permit the production of linoleic acid or a composition comprising linoleic acid in said non-human organism or in the culture medium surrounding said non-human organism.

[48960] Accordingly, the present invention relates to a process for the production of linoleic acid, which comprises
[48961] (a) increasing or generating one or more activities selected from the group consisting of protein kinase in a non-human organism or a part thereof, preferably a microorganism, a plant cell, a plant or a part thereof, as compared to a corresponding non-transformed wild type non-human organism or a part thereof; and
[48962] (b) growing the non-human organism or a part thereof under conditions which permit the production of linoleic acid or a composition comprising linoleic acid in said non-human organism or in the culture medium surrounding said non-human organism.

[48963] Accordingly, the present invention relates to a process for the production of linoleic acid, which comprises
[48964] (a) increasing or generating one or more activities selected from the group consisting of aspartate-semialdehyde dehydrogenase in a non-human organism or a part thereof, preferably a microorganism, a plant cell, a plant or a part thereof, as compared to a corresponding non-transformed wild type non-human organism or a part thereof; and
[48965] (b) growing the non-human organism or a part thereof under conditions which permit the production of linoleic acid or a composition comprising linoleic acid in said non-human organism or in the culture medium surrounding said non-human organism.

[48966] Accordingly, the present invention relates to a process for the production of linoleic acid, which comprises
[48967] (a) increasing or generating one or more activities selected from the group consisting of ydr507c-protein in a non-human organism or a part thereof, preferably a microorganism, a plant cell, a plant or a part thereof, as compared to a corresponding non-transformed wild type non-human organism or a part thereof; and
[48968] (b) growing the non-human organism or a part thereof under conditions which permit the production of linoleic acid or a composition comprising linoleic acid in said non-human organism or in the culture medium surrounding said non-human organism.

[48969] Accordingly, the present invention relates to a process for the production of linoleic acid, which comprises
[48970] (a) increasing or generating one or more activities selected from the group consisting of YGR104C-protein in a non-human organism or a part thereof, preferably a microorganism, a plant cell, a plant or a part thereof, as compared to a corresponding non-transformed wild type non-human organism or a part thereof; and
[48971] (b) growing the non-human organism or a part thereof under conditions which permit the production of linoleic acid or a composition comprising linoleic acid in said non-human organism or in the culture medium surrounding said non-human organism.

[48972] Accordingly, the present invention relates to a process for the production of linoleic acid, which comprises
[48973] (a) increasing or generating one or more activities selected from the group consisting of DnaJ-like chaperone in a non-human organism or a part thereof, preferably a microorganism, a plant cell, a plant or a part thereof, as compared to a corresponding non-transformed wild type non-human organism or a part thereof; and
[48974] (b) growing the non-human organism or a part thereof under conditions which permit the production of linoleic acid or a composition comprising linoleic acid in said non-human organism or in the culture medium surrounding said non-human organism.

[48975] Accordingly, the present invention relates to a process for the production of linoleic acid, which comprises
[48976] (a) increasing or generating one or more activities selected from the group consisting of aconitate hydratase in a non-human organism or a part thereof, preferably a microorganism, a plant cell, a plant or a part thereof, as compared to a corresponding non-transformed wild type non-human organism or a part thereof; and
[48977] (b) growing the non-human organism or a part thereof under conditions which permit the production of linoleic acid or a composition comprising linoleic acid in said non-human organism or in the culture medium surrounding said non-human organism.

[48978] Accordingly, the present invention relates to a process for the production of linoleic acid, which comprises
[48979] (a) increasing or generating one or more activities selected from the group consisting of molecular chaperone in a non-human organism or a part thereof, preferably a microorganism, a plant cell, a plant or a part thereof, as compared to a corresponding non-transformed wild type non-human organism or a part thereof; and
[48980] (b) growing the non-human organism or a part thereof under conditions which permit the production of linoleic acid or a composition comprising linoleic acid in said non-human organism or in the culture medium surrounding said non-human organism.

[48981] Accordingly, the present invention relates to a process for the production of linoleic acid, which comprises
[48982] (a) increasing or generating one or more activities selected from the group consisting of ATPase epsilon subunit in a non-human organism or a part thereof, preferably a microorganism, a plant cell, a plant or a part thereof, as compared to a corresponding non-transformed wild type non-human organism or a part thereof; and
[48983] (b) growing the non-human organism or a part thereof under conditions which permit the production of linoleic acid or a composition comprising linoleic acid in said non-human organism or in the culture medium surrounding said non-human organism.

[48984] Accordingly, the present invention relates to a process for the production of linoleic acid, which comprises
[48985] (a) increasing or generating one or more activities selected from the group consisting of glucose-6-phosphate 1-dehydrogenase in a non-human organism or a part thereof, preferably a microorganism, a plant cell, a plant or a part thereof, as compared to a corresponding non-transformed wild type non-human organism or a part thereof; and
[48986] (b) growing the non-human organism or a part thereof under conditions which permit the production of linoleic acid or a composition comprising linoleic acid in said non-human organism or in the culture medium surrounding said non-human organism.

[48987] An embodiment of the present invention relates to a process for the production of linoleic acid, which comprises
[48988] (a1) increasing or generating the activity of a polypeptide comprising a polypeptide as depicted in a respective line in column 5 or 8 of Table II, application no. 8, or a homolog or a fragment thereof, a consensus sequence or at least one polypeptide motif as depicted in the respective line in column 8 of Table IV, application no. 8; or
[48989] (a2) increasing or generating the activity of an expression product of one or more nucleic acid molecule(s) comprising a polynucleotide as depicted in the respective line in column 5 or 8 of Table I, application no. 8, preferably the coding region thereof, or a homolog or a fragment thereof; or
[48990] (a3) increasing or generating the activity of a functional equivalent of
[48991] (a1) or
[48992] (a2); in a non-human organism or a part thereof; preferably a microorganism, a plant cell, a plant or a part thereof, as compared to a corresponding non-transformed wild type non-human organism or a part thereof; and
[48993] (b) growing the non-human organism under conditions which permit the production of linoleic acid or a composition comprising linoleic acid in said non-human organism or in the culture medium surrounding said non-human organism.

[48994] Accordingly, the increase or generation of one or more said activities is for example conferred by one or more expression products of said nucleic acid molecule, e.g. proteins. Accordingly, in the present invention described above, the increase or generation of one or more said activities is for example conferred by one or more protein(s) each comprising a polypeptide selected from the group as depicted in Table II, application no. 8, column 5 and 8, or a homolog or a fragment thereof.

[48995] The process of the invention comprises in one embodiment the following steps:
[48996] (i) increasing or generating of the expression of; and/or
[48997] (ii) increasing or generating the expression of an expression product of; and/or
[48998] (iii) increasing or generating one or more activities of an expression product encoded by;
   at least one nucleic acid molecule (in the following “Fine Chemical Related Protein (FCRP)”encoding gene or “FCRP”-gene) comprising a nucleic acid molecule selected from the group consisting of:
[48999] (a) a nucleic acid molecule encoding the polypeptide shown in column 5 or 8 of Table II, preferably Table II B, application no. 8, or a homolog or a fragment thereof;
[49000] (b) a nucleic acid molecule shown in column 5 or 8 of Table I, preferably Table I B, application no. 8, or a homolog or a fragment thereof (preferably the coding region thereof);
[49001] (c) a nucleic acid molecule, which, as a result of the degeneracy of the genetic code, can be derived from a polypeptide sequence depicted in column 5 or 8 of Table II, preferably Table II B, application no. 8;
[49002] (d) a nucleic acid molecule having at least 30%, in particular at least 50%, 60%, 70%, 80%, 85%, 90%, 95%, 97%, 98%, 99% or 99.5% identity with the nucleic acid molecule sequence of a polynucleotide comprising the nucleic acid molecule shown in column 5 or 8 of Table I, preferably Table I B, application no. 8, or the coding region thereof;
[49003] (e) a nucleic acid molecule encoding a polypeptide having at least 30%, in particular 50%, 60%, 70%, 80%, 85%, 90%, 95%, 97%, 98%, 99% or 99.5% identity with the amino acid sequence of the polypeptide encoded by the nucleic acid molecule of (a), (b), (c) or (d),
[49004] (f) a nucleic acid molecule which hybridizes with a nucleic acid molecule of (a), (b), (c), (d) or (e) under stringent hybridization conditions;
[49005] (g) a nucleic acid molecule encoding a polypeptide which can be isolated with the aid of monoclonal or polyclonal antibodies made against a polypeptide encoded by one of the nucleic acid molecules of (a), (b), (c), (d), (e) or (f);
[49006] (h) a nucleic acid molecule encoding a polypeptide comprising the consensus sequence or one or more polypeptide motifs as shown in column 8 of Table IV, application no. 8;
[49007] (i) a nucleic acid molecule encoding a polypeptide having the activity represented by a respective protein as depicted in column 5 of Table II, application no. 8;
[49008] (j) a nucleic acid molecule which comprises a polynucleotide, which is obtained by amplifying a cDNA library or a genomic library using the primers as depicted in column 8 of Table III, application no. 8; and
[49009] (k) a nucleic acid molecule which is obtainable by screening a suitable nucleic acid library, especially a cDNA library and/or a genomic library, under stringent hybridization conditions with a probe comprising a complementary sequence of a nucleic acid molecule of (a), (b), (c), (d), (e), (f), (g), (h), (i) or (j) or with a fragment thereof, having at least 15 nt, preferably 20 nt, 30 nt, 50 nt, 100 nt, 200 nt, 500 nt, 1000 nt, 1500 nt, 2000 nt or 3000 nt of a nucleic acid molecule complementary to a nucleic acid molecule sequence characterized in (a), (b), (c), (d), (e), (f), (g), (h), (i) or (j);
[49010] or a nucleic acid molecule comprising a sequence which is complementary thereto.
   (All the references to Tables I to IV are references to the corresponding lines of Tables I to IV.)

[49011] The term “increasing or generating of the expression of” may also be interchanged by the term “overexpressing”.

[49012] In a preferred embodiment thereof said nucleic acid molecule encodes a polypeptide which has the activity of the polypeptide represented by a protein comprising a polypeptide as depicted in the corresponding hit in column 5 of Table II, application no. 8. In another preferred embodiment thereof said nucleic acid molecule confers a generation or an increase of the respective fine chemical in a non-human organism or a part thereof as compared to a corresponding wild-type non-human organism or part thereof.

[49013] In another preferred embodiment thereof said nucleic acid molecule encodes a polypeptide which has the activity of the polypeptide represented by a protein as depicted in the corresponding hit in column 5 of Table II, application no. 8, and confers a generation or an increase of the respective fine chemical in a non-human organism or a part thereof as compared to a corresponding wild-type non-human organism or part thereof.

[49014] Accordingly, the genes of the present invention or used in accordance with the present invention, which respectively encode a protein having an activity of 3-ketoacyl-CoA thiolase, 3-oxoacyl-[acyl-carrier-protein] synthase, AAS bifunctional protein, ABC transporter permease protein, acid shock protein, aconitate hydratase, arginine decarboxylase, aromatic acid decarboxylase, aspartate-semialdehyde dehydrogenase, At1g19800-protein, At2g45420-protein, ATPase epsilon subunit, b0801-protein, b1330-protein, b1470-protein, b1670-protein, b1837-protein, b2032-protein, b2099-protein, b2107-protein, b2399-protein, b2474-protein, b2613-protein, b2682-protein, b2849-protein, b2909-protein, beta-hydroxylase, carbamoylphosphate synthase subunit, cation-transporting ATPase, CCAAT-binding transcription factor, chlorophyllase, colanic acid biosynthesis protein, coproporphyrinogen III oxidase, CTP synthetase, DnaJ-like chaperone, electron transport complex protein, ethanolamine utilization protein, fatty acid desaturase, Fe—S subunit of oxidoreductase, flavodoxin, fumarate hydratase, gamma-glutamyltranspeptidase, glucose-6-phosphate 1-dehydrogenase, glutaredoxin, glycin cleavage system protein, GM02LC38418-protein, heat shock transcription factor, hydrolase, lipoprotein precursor, membrane transport protein, metal-dependent hydrolase, molecular chaperone, monothiol glutaredoxin, multiple antibiotic resistance protein, outer membrane receptor protein precursor, oxidoreductase, phosphate import ATP-binding protein, phosphoribosylformyl glycinamidine synthase subunit, phosphotriesterase, protein kinase, protein phosphatase, pyruvate kinase, recombinase A, sll1032-protein, sn-glycerol-3-phosphate transport system permease protein, ThiF family protein, threonine dehydratase, threonine efflux protein, transcription factor, transcriptional regulator protein, tryptophan synthase alpha chain, TTC0490-protein, xanthine dehydrogenase, ydr507c-protein, or YGR104C-protein, which respectively encode a protein comprising a polypeptide encoded by a nucleic acid sequence as shown in Table I, application no. 8, column 5 or 8, (preferably the coding region thereof), or a homolog or a fragment thereof, which respectively encode a protein comprising a polypeptide as depicted in Table II, application no. 8, column 5 or 8, or a homolg or a fragment thereof, and/or which respectively can be amplified with the primer set shown in Table III, application no. 8, column 8, are also referred to as “FCRP genes”.

[49015] Proteins or polypeptides encoded by “FCRP-genes” are referred to as “Fine Chemical Related Proteins” or “FCRP”. For the purposes of the description of the present invention, the respective protein having an activity of 3-ketoacyl-CoA thiolase, 3-oxoacyl-[acyl-carrierprotein] synthase, AAS bifunctional protein, ABC transporter permease protein, acid shock protein, aconitate hydratase, arginine decarboxylase, aromatic acid decarboxylase, aspartate-semialdehyde dehydrogenase, At1g19800-protein, At2g45420-protein, ATPase epsilon subunit, b0801-protein, b1330-protein, b1470-protein, b1670-protein, b1837-protein, b2032-protein, b2099-protein, b2107-protein, b2399-protein, b2474-protein, b2613-protein, b2682-protein, b2849-protein, b2909-protein, beta-hydroxylase, carbamoyl-phosphate synthase subunit, cation-transporting ATPase, CCAAT-binding transcription factor, chlorophyllase, colanic acid biosynthesis protein, coproporphyrinogen III oxidase, CTP synthetase, DnaJ-like chaperone, electron transport complex protein, ethanolamine utilization protein, fatty acid desaturase, Fe—S subunit of oxidoreductase, flavodoxin, fumarate hydratase, gamma-glutamyltranspeptidase, glucose-6-phosphate 1-dehydrogenase, glutaredoxin, glycin cleavage system protein, GM02LC38418-protein, heat shock transcription factor, hydrolase, lipoprotein precursor, membrane transport protein, metal-dependent hydrolase, molecular chaperone, monothiol glutaredoxin, multiple antibiotic resistance protein, outer membrane receptor protein precursor, oxidoreductase, phosphate import ATP-binding protein, phosphoribosylformyl glycinamidine synthase subunit, phosphotriesterase, protein kinase, protein phosphatase, pyruvate kinase, recombinase A, sll1032-protein, sn-glycerol-3-phosphate transport system permease protein, ThiF family protein, threonine dehydratase, threonine efflux protein, transcription factor, transcriptional regulator protein, tryptophan synthase alpha chain, TTC0490-protein, xanthine dehydrogenase, ydr507c-protein, or YGR104C-protein, the respective protein comprising a polypeptide encoded by one or more respective nucleic acid sequences as shown in Table I, application no. 8, column 5 or 8, (preferably the coding region thereof), or a homolog or fragment thereof, the respective protein comprising a respective polypeptide as depicted in Table II, application no. 8, column 5 or 8, or a homolog or fragment thereof, the respective protein comprising a sequence corresponding to the consensus sequence as shown in Table IV, application no. 8, column 8, and/or the respective protein comprising at least one polypeptide motif as shown in Table IV, application no. 8, column 8 is also referred to as Fine Chemical Related Protein” or “FCRP”.

[49016] Thus, in one embodiment, the present invention provides a process of the production of linoleic acid, by increasing or generating one or more activities, especially selected from the group consisting of 3-ketoacyl-CoA thiolase, 3-oxoacyl-[acyl-carrier-protein] synthase, AAS bifunctional protein, ABC transporter permease protein, acid shock protein, aconitate hydratase, arginine decarboxylase, aromatic acid decarboxylase, aspartate-semialdehyde dehydrogenase, At1g19800-protein, At2g45420-protein, ATPase epsilon subunit, b0801-protein, b1330-protein, b1470-protein, b1670-protein, b1837-protein, b2032-protein, b2099-protein, b2107-protein, b2399-protein, b2474-protein, b2613-protein, b2682-protein, b2849-protein, b2909-protein, beta-hydroxylase, carbamoyl-phosphate synthase subunit, cationtransporting ATPase, CCAAT-binding transcription factor, chlorophyllase, colanic acid biosynthesis protein, coproporphyrinogen III oxidase, CTP synthetase, DnaJ-like chaperone, electron transport complex protein, ethanolamine utilization protein, fatty acid desaturase, Fe—S subunit of oxidoreductase, flavodoxin, fumarate hydratase, gamma-glutamyltranspeptidase, glucose-6-phosphate 1-dehydrogenase, glutaredoxin, glycin cleavage system protein, GM02LC38418-protein, heat shock transcription factor, hydrolase, lipoprotein precursor, membrane transport protein, metal-dependent hydrolase, molecular chaperone, monothiol glutaredoxin, multiple antibiotic resistance protein, outer membrane receptor protein precursor, oxidoreductase, phosphate import ATP-binding protein, phosphoribosylformyl glycinamidine synthase subunit, phosphotriesterase, protein kinase, protein phosphatase, pyruvate kinase, recombinase A, sll1032-protein, sn-glycerol-3-phosphate transport system permease protein, ThiF family protein, threonine dehydratase, threonine efflux protein, transcription factor, transcriptional regulator protein, tryptophan synthase alpha chain, TTC0490-protein, xanthine dehydrogenase, ydr507c-protein, and YGR104C-protein, which is conferred by one or more FCRPs or the gene product of one or more FCRP-genes, for example by the gene product of a nucleic acid sequences comprising a polynucleotide selected from the group as shown in Table I, application no. 8, column 5 or 8, (preferably by the coding region thereof), or a homolog or a fragment thereof, e.g. or by one or more proteins each comprising a polypeptide encoded by one or more nucleic acid sequences selected from the group as shown in Table I, application no. 8, column 5 or 8, (preferably by the coding region thereof), or a homolog or a fragment thereof, or by one or more protein(s) each comprising a polypeptide selected from the group as depicted in Table II, application no. 8, column 5 and 8, or a homolog thereof, or a protein comprising a sequence corresponding to the consensus sequence or comprising at least one polypeptide motif as shown in Table IV, application no. 8, column 8.

[49017] As mentioned, the process for the production of the fine chemical according to the present invention, in particular showing a generation or an increase of the respective fine chemical in a non-human organism or a part thereof as compared to a corresponding wild-type non-human organism or part thereof, can be mediated by one or more FCRP-genes or FCPRs.

[49018] In an embodiment, the process comprises increasing or generating the activity of one or more polypeptides having said activity, e.g.

[49019] by generating or increasing the amount and/or specific activity in the cell or a compartment of a cell of one of more FCRP, especially selected from the group consisting of 3-ketoacyl-CoA thiolase, 3-oxoacyl-[acyl-carrier-protein] synthase, AAS bifunctional protein, ABC transporter permease protein, acid shock protein, aconitate hydratase, arginine decarboxylase, aromatic acid decarboxylase, aspartate-semialdehyde dehydrogenase, At1g19800-protein, At2g45420-protein, ATPase epsilon subunit, b0801-protein, b1330-protein, b1470-protein, b1670-protein, b1837-protein, b2032-protein, b2099-protein, b2107-protein, b2399-protein, b2474-protein, b2613-protein, b2682-protein, b2849-protein, b2909-protein, beta-hydroxylase, carbamoylphosphate synthase subunit, cation-transporting ATPase, CCAAT-binding transcription factor, chlorophyllase, colanic acid biosynthesis protein, coproporphyrinogen III oxidase, CTP synthetase, DnaJ-like chaperone, electron transport complex protein, ethanolamine utilization protein, fatty acid desaturase, Fe—S subunit of oxidoreductase, flavodoxin, fumarate hydratase, gamma-glutamyltranspeptidase, glucose-6-phosphate 1-dehydrogenase, glutaredoxin, glycin cleavage system protein, GM02LC38418-protein, heat shock transcription factor, hydrolase, lipoprotein precursor, membrane transport protein, metal-dependent hydrolase, molecular chaperone, monothiol glutaredoxin, multiple antibiotic resistance protein, outer membrane receptor protein precursor, oxidoreductase, phosphate import ATP-binding protein, phosphoribosylformyl glycinamidine synthase subunit, phosphotriesterase, protein kinase, protein phosphatase, pyruvate kinase, recombinase A, sll1032-protein, sn-glycerol-3-phosphate transport system permease protein, ThiF family protein, threonine dehydratase, threonine efflux protein, transcription factor, transcriptional regulator protein, tryptophan synthase alpha chain, TTC0490-protein, xanthine dehydrogenase, ydr507c-protein, and YGR104C-protein, for example of the respective polypeptide as depicted in Table II, application no. 8, column 5 and 8, or a homolog or a fragment thereof, or the respective polypeptide comprising a sequence corresponding to the consensus sequences as shown in Table IV, application no. 8, column 8, or the respective polypeptide comprising at least one polypeptide motif as depicted in Table IV, application no. 8, column 8.

[49020] A further embodiment of the present invention relates to a process for the production of linoleic acid, which comprises
[49021] (a) increasing or generating the activity of a chlorophyllase non-targeted in a non-human organism or a part thereof, preferably a microorganism, a plant cell, a plant or a part thereof, as compared to a corresponding non-transformed wild type non-human organism or a part thereof; and
[49022] (b) growing the non-human organism or a part thereof under conditions which permit the production of linoleic acid or a composition comprising linoleic acid in said non-human organism or in the culture medium surrounding said non-human organism.

[49023] A further embodiment of the present invention relates to a process for the production of linoleic acid, which comprises
[49024] (a) increasing or generating the activity of a At1g19800-protein non-targeted in a non-human organism or a part thereof, preferably a microorganism, a plant cell, a plant or a part thereof, as compared to a corresponding non-transformed wild type non-human organism or a part thereof; and
[49025] (b) growing the non-human organism or a part thereof under conditions which permit the production of linoleic acid or a composition comprising linoleic acid in said non-human organism or in the culture medium surrounding said non-human organism.

[49026] A further embodiment of the present invention relates to a process for the production of linoleic acid, which comprises
[49027] (a) increasing or generating the activity of a transcription factor non-targeted in a non-human organism or a part thereof, preferably a microorganism, a plant cell, a plant or a part thereof, as compared to a corresponding non-transformed wild type non-human organism or a part thereof; and
[49028] (b) growing the non-human organism or a part thereof under conditions which permit the production of linoleic acid or a composition comprising linoleic acid in said non-human organism or in the culture medium surrounding said non-human organism.

[49029] A further embodiment of the present invention relates to a process for the production of linoleic acid, which comprises
[49030] (a) increasing or generating the activity of a pyruvate kinase non-targeted in a non-human organism or a part thereof, preferably a microorganism, a plant cell, a plant or a part thereof, as compared to a corresponding non-transformed wild type non-human organism or a part thereof; and
[49031] (b) growing the non-human organism or a part thereof under conditions which permit the production of linoleic acid or a composition comprising linoleic acid in said non-human organism or in the culture medium surrounding said non-human organism.

[49032] A further embodiment of the present invention relates to a process for the production of linoleic acid, which comprises
[49033] (a) increasing or generating the activity of a At2g45420-protein non-targeted in a non-human organism or a part thereof, preferably a microorganism, a plant cell, a plant or a part thereof, as compared to a corresponding non-transformed wild type non-human organism or a part thereof; and
[49034] (b) growing the non-human organism or a part thereof under conditions which permit the production of linoleic acid or a composition comprising linoleic acid in said non-human organism or in the culture medium surrounding said non-human organism.

[49035] A further embodiment of the present invention relates to a process for the production of linoleic acid, which comprises
[49036] (a) increasing or generating the activity of a heat shock transcription factor non-targeted in a non-human organism or a part thereof, preferably a microorganism, a plant cell, a plant or a part thereof, as compared to a corresponding non-transformed wild type non-human organism or a part thereof; and
[49037] (b) growing the non-human organism or a part thereof under conditions which permit the production of linoleic acid or a composition comprising linoleic acid in said non-human organism or in the culture medium surrounding said non-human organism.

[49038] A further embodiment of the present invention relates to a process for the production of linoleic acid, which comprises
[49039] (a) increasing or generating the activity of a CCAAT-binding transcription factor non-targeted in a non-human organism or a part thereof, preferably a microorganism, a plant cell, a plant or a part thereof, as compared to a corresponding non-transformed wild type non-human organism or a part thereof; and
[49040] (b) growing the non-human organism or a part thereof under conditions which permit the production of linoleic acid or a composition comprising linoleic acid in said non-human organism or in the culture medium surrounding said non-human organism.

[49041] A further embodiment of the present invention relates to a process for the production of linoleic acid, which comprises
[49042] (a) increasing or generating the activity of a glutaredoxin non-targeted in a non-human organism or a part thereof, preferably a microorganism, a plant cell, a plant or a part thereof, as compared to a corresponding non-transformed wild type non-human organism or a part thereof; and
[49043] (b) growing the non-human organism or a part thereof under conditions which permit the production of linoleic acid or a composition comprising linoleic acid in said non-human organism or in the culture medium surrounding said non-human organism.

[49044] A further embodiment of the present invention relates to a process for the production of linoleic acid, which comprises
[49045] (a) increasing or generating the activity of a transcription factor non-targeted in a non-human organism or a part thereof, preferably a microorganism, a plant cell, a plant or a part thereof, as compared to a corresponding non-transformed wild type non-human organism or a part thereof; and
[49046] (b) growing the non-human organism or a part thereof under conditions which permit the production of linoleic acid or a composition comprising linoleic acid in said non-human organism or in the culture medium surrounding said non-human organism.

[49047] A further embodiment of the present invention relates to a process for the production of linoleic acid, which comprises
[49048] (a) increasing or generating the activity of a monothiol glutaredoxin non-targeted in a non-human organism or a part thereof, preferably a microorganism, a plant cell, a plant or a part thereof, as compared to a corresponding non-transformed wild type non-human organism or a part thereof; and
[49049] (b) growing the non-human organism or a part thereof under conditions which permit the production of linoleic acid or a composition comprising linoleic acid in said non-human organism or in the culture medium surrounding said non-human organism.

[49050] A further embodiment of the present invention relates to a process for the production of linoleic acid, which comprises
[49051] (a) increasing or generating the activity of a monothiol glutaredoxin non-targeted in a non-human organism or a part thereof, preferably a microorganism, a plant cell, a plant or a part thereof, as compared to a corresponding non-transformed wild type non-human organism or a part thereof; and
[49052] (b) growing the non-human organism or a part thereof under conditions which permit the production of linoleic acid or a composition comprising linoleic acid in said non-human organism or in the culture medium surrounding said non-human organism.

[49053] A further embodiment of the present invention relates to a process for the production of linoleic acid, which comprises
[49054] (a) increasing or generating the activity of a protein phosphatase non-targeted in a non-human organism or a part thereof, preferably a microorganism, a plant cell, a plant or a part thereof, as compared to a corresponding non-transformed wild type non-human organism or a part thereof; and
[49055] (b) growing the non-human organism or a part thereof under conditions which permit the production of linoleic acid or a composition comprising linoleic acid in said non-human organism or in the culture medium surrounding said non-human organism.

[49056] A further embodiment of the present invention relates to a process for the production of linoleic acid, which comprises
[49057] (a) increasing or generating the activity of a glutaredoxin non-targeted in a non-human organism or a part thereof, preferably a microorganism, a plant cell, a plant or a part thereof, as compared to a corresponding non-transformed wild type non-human organism or a part thereof; and
[49058] (b) growing the non-human organism or a part thereof under conditions which permit the production of linoleic acid or a composition comprising linoleic acid in said non-human organism or in the culture medium surrounding said non-human organism.

[49059] A further embodiment of the present invention relates to a process for the production of linoleic acid, which comprises
[49060] (a) increasing or generating the activity of a heat shock transcription factor non-targeted in a non-human organism or a part thereof, preferably a microorganism, a plant cell, a plant or a part thereof, as compared to a corresponding non-transformed wild type non-human organism or a part thereof; and
[49061] (b) growing the non-human organism or a part thereof under conditions which permit the production of linoleic acid or a composition comprising linoleic acid in said non-human organism or in the culture medium surrounding said non-human organism.

[49062] A further embodiment of the present invention relates to a process for the production of linoleic acid, which comprises
[49063] (a) increasing or generating the activity of a protein phosphatase non-targeted in a non-human organism or a part thereof, preferably a microorganism, a plant cell, a plant or a part thereof, as compared to a corresponding non-transformed wild type non-human organism or a part thereof; and
[49064] (b) growing the non-human organism or a part thereof under conditions which permit the production of linoleic acid or a composition comprising linoleic acid in said non-human organism or in the culture medium surrounding said non-human organism.

[49065] A further embodiment of the present invention relates to a process for the production of linoleic acid, which comprises
[49066] (a) increasing or generating the activity of a oxidoreductase non-targeted in a non-human organism or a part thereof, preferably a microorganism, a plant cell, a plant or a part thereof, as compared to a corresponding non-transformed wild type non-human organism or a part thereof; and
[49067] (b) growing the non-human organism or a part thereof under conditions which permit the production of linoleic acid or a composition comprising linoleic acid in said non-human organism or in the culture medium surrounding said non-human organism.

[49068] A further embodiment of the present invention relates to a process for the production of linoleic acid, which comprises
[49069] (a) increasing or generating the activity of a transcriptional regulator protein non-targeted in a non-human organism or a part thereof, preferably a microorganism, a plant cell, a plant or a part thereof, as compared to a corresponding non-transformed wild type non-human organism or a part thereof; and
[49070] (b) growing the non-human organism or a part thereof under conditions which permit the production of linoleic acid or a composition comprising linoleic acid in said non-human organism or in the culture medium surrounding said non-human organism.

[49071] A further embodiment of the present invention relates to a process for the production of linoleic acid, which comprises
[49072] (a) increasing or generating the activity of a beta-hydroxylase non-targeted in a non-human organism or a part thereof, preferably a microorganism, a plant cell, a plant or a part thereof, as compared to a corresponding non-transformed wild type non-human organism or a part thereof; and
[49073] (b) growing the non-human organism or a part thereof under conditions which permit the production of linoleic acid or a composition comprising linoleic acid in said non-human organism or in the culture medium surrounding said non-human organism.

[49074] A further embodiment of the present invention relates to a process for the production of linoleic acid, which comprises
[49075] (a) increasing or generating the activity of a oxidoreductase non-targeted in a non-human organism or a part thereof, preferably a microorganism, a plant cell, a plant or a part thereof, as compared to a corresponding non-transformed wild type non-human organism or a part thereof; and
[49076] (b) growing the non-human organism or a part thereof under conditions which permit the production of linoleic acid or a composition comprising linoleic acid in said non-human organism or in the culture medium surrounding said non-human organism.

[49077] A further embodiment of the present invention relates to a process for the production of linoleic acid, which comprises
[49078] (a) increasing or generating the activity of a ThiF family protein non-targeted in a non-human organism or a part thereof, preferably a microorganism, a plant cell, a plant or a part thereof, as compared to a corresponding non-transformed wild type non-human organism or a part thereof; and
[49079] (b) growing the non-human organism or a part thereof under conditions which permit the production of linoleic acid or a composition comprising linoleic acid in said non-human organism or in the culture medium surrounding said non-human organism.

[49080] A further embodiment of the present invention relates to a process for the production of linoleic acid, which comprises
[49081] (a) increasing or generating the activity of a recombinase A non-targeted in a non-human organism or a part thereof, preferably a microorganism, a plant cell, a plant or a part thereof, as compared to a corresponding non-transformed wild type non-human organism or a part thereof; and
[49082] (b) growing the non-human organism or a part thereof under conditions which permit the production of linoleic acid or a composition comprising linoleic acid in said non-human organism or in the culture medium surrounding said non-human organism.

[49083] A further embodiment of the present invention relates to a process for the production of linoleic acid, which comprises
[49084] (a) increasing or generating the activity of a hydrolase non-targeted in a non-human organism or a part thereof, preferably a microorganism, a plant cell, a plant or a part thereof, as compared to a corresponding non-transformed wild type non-human organism or a part thereof; and
[49085] (b) growing the non-human organism or a part thereof under conditions which permit the production of linoleic acid or a composition comprising linoleic acid in said non-human organism or in the culture medium surrounding said non-human organism.

[49086] A further embodiment of the present invention relates to a process for the production of linoleic acid, which comprises
[49087] (a) increasing or generating the activity of a membrane transport protein non-targeted in a non-human organism or a part thereof, preferably a microorganism, a plant cell, a plant or a part thereof, as compared to a corresponding non-transformed wild type non-human organism or a part thereof; and
[49088] (b) growing the non-human organism or a part thereof under conditions which permit the production of linoleic acid or a composition comprising linoleic acid in said non-human organism or in the culture medium surrounding said non-human organism.

[49089] A further embodiment of the present invention relates to a process for the production of linoleic acid, which comprises
[49090] (a) increasing or generating the activity of a b0801-protein non-targeted in a non-human organism or a part thereof, preferably a microorganism, a plant cell, a plant or a part thereof, as compared to a corresponding non-transformed wild type non-human organism or a part thereof; and
[49091] (b) growing the non-human organism or a part thereof under conditions which permit the production of linoleic acid or a composition comprising linoleic acid in said non-human organism or in the culture medium surrounding said non-human organism.

[49092] A further embodiment of the present invention relates to a process for the production of linoleic acid, which comprises
[49093] (a) increasing or generating the activity of a 3-oxoacyl-[acyl-carrier-protein] synthase non-targeted in a non-human organism or a part thereof, preferably a microorganism, a plant cell, a plant or a part thereof, as compared to a corresponding non-transformed wild type non-human organism or a part thereof; and
[49094] (b) growing the non-human organism or a part thereof under conditions which permit the production of linoleic acid or a composition comprising linoleic acid in said non-human organism or in the culture medium surrounding said non-human organism.

[49095] A further embodiment of the present invention relates to a process for the production of linoleic acid, which comprises
[49096] (a) increasing or generating the activity of a outer membrane receptor protein precursor non-targeted in a non-human organism or a part thereof, preferably a microorganism, a plant cell, a plant or a part thereof, as compared to a corresponding non-transformed wild type non-human organism or a part thereof; and
[49097] (b) growing the non-human organism or a part thereof under conditions which permit the production of linoleic acid or a composition comprising linoleic acid in said non-human organism or in the culture medium surrounding said non-human organism.

[49098] A further embodiment of the present invention relates to a process for the production of linoleic acid, which comprises
[49099] (a) increasing or generating the activity of a b1330-protein non-targeted in a non-human organism or a part thereof, preferably a microorganism, a plant cell, a plant or a part thereof, as compared to a corresponding non-transformed wild type non-human organism or a part thereof; and
[49100] (b) growing the non-human organism or a part thereof under conditions which permit the production of linoleic acid or a composition comprising linoleic acid in said non-human organism or in the culture medium surrounding said non-human organism.

[49101] A further embodiment of the present invention relates to a process for the production of linoleic acid, which comprises
[49102] (a) increasing or generating the activity of a lipoprotein precursor non-targeted in a non-human organism or a part thereof, preferably a microorganism, a plant cell, a plant or a part thereof, as compared to a corresponding non-transformed wild type non-human organism or a part thereof; and
[49103] (b) growing the non-human organism or a part thereof under conditions which permit the production of linoleic acid or a composition comprising linoleic acid in said non-human organism or in the culture medium surrounding said non-human organism.

[49104] A further embodiment of the present invention relates to a process for the production of linoleic acid, which comprises
[49105] (a) increasing or generating the activity of a b1470-protein non-targeted in a non-human organism or a part thereof, preferably a microorganism, a plant cell, a plant or a part thereof, as compared to a corresponding non-transformed wild type non-human organism or a part thereof; and
[49106] (b) growing the non-human organism or a part thereof under conditions which permit the production of linoleic acid or a composition comprising linoleic acid in said non-human organism or in the culture medium surrounding said non-human organism.

[49107] A further embodiment of the present invention relates to a process for the production of linoleic acid, which comprises
[49108] (a) increasing or generating the activity of a Fe—S subunit of oxidoreductase non-targeted in a non-human organism or a part thereof, preferably a microorganism, a plant cell, a plant or a part thereof, as compared to a corresponding non-transformed wild type non-human organism or a part thereof; and
[49109] (b) growing the non-human organism or a part thereof under conditions which permit the production of linoleic acid or a composition comprising linoleic acid in said non-human organism or in the culture medium surrounding said non-human organism.

[49110] A further embodiment of the present invention relates to a process for the production of linoleic acid, which comprises
[49111] (a) increasing or generating the activity of a acid shock protein non-targeted in a non-human organism or a part thereof, preferably a microorganism, a plant cell, a plant or a part thereof, as compared to a corresponding non-transformed wild type non-human organism or a part thereof; and
[49112] (b) growing the non-human organism or a part thereof under conditions which permit the production of linoleic acid or a composition comprising linoleic acid in said non-human organism or in the culture medium surrounding said non-human organism.

[49113] A further embodiment of the present invention relates to a process for the production of linoleic acid, which comprises
[49114] (a) increasing or generating the activity of a fumarate hydratase non-targeted in a non-human organism or a part thereof, preferably a microorganism, a plant cell, a plant or a part thereof, as compared to a corresponding non-transformed wild type non-human organism or a part thereof; and
[49115] (b) growing the non-human organism or a part thereof under conditions which permit the production of linoleic acid or a composition comprising linoleic acid in said non-human organism or in the culture medium surrounding said non-human organism.

[49116] A further embodiment of the present invention relates to a process for the production of linoleic acid, which comprises
[49117] (a) increasing or generating the activity of a electron transport complex protein non-targeted in a non-human organism or a part thereof, preferably a microorganism, a plant cell, a plant or a part thereof, as compared to a corresponding non-transformed wild type non-human organism or a part thereof; and
[49118] (b) growing the non-human organism or a part thereof under conditions which permit the production of linoleic acid or a composition comprising linoleic acid in said non-human organism or in the culture medium surrounding said non-human organism.

[49119] A further embodiment of the present invention relates to a process for the production of linoleic acid, which comprises
[49120] (a) increasing or generating the activity of a b1670-protein non-targeted in a non-human organism or a part thereof, preferably a microorganism, a plant cell, a plant or a part thereof, as compared to a corresponding non-transformed wild type non-human organism or a part thereof; and
[49121] (b) growing the non-human organism or a part thereof under conditions which permit the production of linoleic acid or a composition comprising linoleic acid in said non-human organism or in the culture medium surrounding said non-human organism.

[49122] A further embodiment of the present invention relates to a process for the production of linoleic acid, which comprises
[49123] (a) increasing or generating the activity of a b1837-protein non-targeted in a non-human organism or a part thereof, preferably a microorganism, a plant cell, a plant or a part thereof, as compared to a corresponding non-transformed wild type non-human organism or a part thereof; and
[49124] (b) growing the non-human organism or a part thereof under conditions which permit the production of linoleic acid or a composition comprising linoleic acid in said non-human organism or in the culture medium surrounding said non-human organism.

[49125] A further embodiment of the present invention relates to a process for the production of linoleic acid, which comprises
[49126] (a) increasing or generating the activity of a b2032-protein non-targeted in a non-human organism or a part thereof, preferably a microorganism, a plant cell, a plant or a part thereof, as compared to a corresponding non-transformed wild type non-human organism or a part thereof; and
[49127] (b) growing the non-human organism or a part thereof under conditions which permit the production of linoleic acid or a composition comprising linoleic acid in said non-human organism or in the culture medium surrounding said non-human organism.

[49128] A further embodiment of the present invention relates to a process for the production of linoleic acid, which comprises
[49129] (a) increasing or generating the activity of a colanic acid biosynthesis protein non-targeted in a non-human organism or a part thereof, preferably a microorganism, a plant cell, a plant or a part thereof, as compared to a corresponding non-transformed wild type non-human organism or a part thereof; and
[49130] (b) growing the non-human organism or a part thereof under conditions which permit the production of linoleic acid or a composition comprising linoleic acid in said non-human organism or in the culture medium surrounding said non-human organism.

[49131] A further embodiment of the present invention relates to a process for the production of linoleic acid, which comprises
[49132] (a) increasing or generating the activity of a b2099-protein non-targeted in a non-human organism or a part thereof, preferably a microorganism, a plant cell, a plant or a part thereof, as compared to a corresponding non-transformed wild type non-human organism or a part thereof; and
[49133] (b) growing the non-human organism or a part thereof under conditions which permit the production of linoleic acid or a composition comprising linoleic acid in said non-human organism or in the culture medium surrounding said non-human organism.

[49134] A further embodiment of the present invention relates to a process for the production of linoleic acid, which comprises
[49135] (a) increasing or generating the activity of a b2107-protein non-targeted in a non-human organism or a part thereof, preferably a microorganism, a plant cell, a plant or a part thereof, as compared to a corresponding non-transformed wild type non-human organism or a part thereof; and
[49136] (b) growing the non-human organism or a part thereof under conditions which permit the production of linoleic acid or a composition comprising linoleic acid in said non-human organism or in the culture medium surrounding said non-human organism.

[49137] A further embodiment of the present invention relates to a process for the production of linoleic acid, which comprises
[49138] (a) increasing or generating the activity of a ABC transporter permease protein non-targeted in a non-human organism or a part thereof, preferably a microorganism, a plant cell, a plant or a part thereof, as compared to a corresponding non-transformed wild type non-human organism or a part thereof; and
[49139] (b) growing the non-human organism or a part thereof under conditions which permit the production of linoleic acid or a composition comprising linoleic acid in said non-human organism or in the culture medium surrounding said non-human organism.

[49140] A further embodiment of the present invention relates to a process for the production of linoleic acid, which comprises
[49141] (a) increasing or generating the activity of a b2399-protein non-targeted in a non-human organism or a part thereof, preferably a microorganism, a plant cell, a plant or a part thereof, as compared to a corresponding non-transformed wild type non-human organism or a part thereof; and
[49142] (b) growing the non-human organism or a part thereof under conditions which permit the production of linoleic acid or a composition comprising linoleic acid in said non-human organism or in the culture medium surrounding said non-human organism.

[49143] A further embodiment of the present invention relates to a process for the production of linoleic acid, which comprises
[49144] (a) increasing or generating the activity of a ethanolamine utilization protein non-targeted in a non-human organism or a part thereof, preferably a microorganism, a plant cell, a plant or a part thereof, as compared to a corresponding non-transformed wild type non-human organism or a part thereof; and
[49145] (b) growing the non-human organism or a part thereof under conditions which permit the production of linoleic acid or a composition comprising linoleic acid in said non-human organism or in the culture medium surrounding said non-human organism.

[49146] A further embodiment of the present invention relates to a process for the production of linoleic acid, which comprises
[49147] (a) increasing or generating the activity of a b2474-protein non-targeted in a non-human organism or a part thereof, preferably a microorganism, a plant cell, a plant or a part thereof, as compared to a corresponding non-transformed wild type non-human organism or a part thereof; and
[49148] (b) growing the non-human organism or a part thereof under conditions which permit the production of linoleic acid or a composition comprising linoleic acid in said non-human organism or in the culture medium surrounding said non-human organism.

[49149] A further embodiment of the present invention relates to a process for the production of linoleic acid, which comprises
[49150] (a) increasing or generating the activity of a b2613-protein non-targeted in a non-human organism or a part thereof, preferably a microorganism, a plant cell, a plant or a part thereof, as compared to a corresponding non-transformed wild type non-human organism or a part thereof; and
[49151] (b) growing the non-human organism or a part thereof under conditions which permit the production of linoleic acid or a composition comprising linoleic acid in said non-human organism or in the culture medium surrounding said non-human organism.

[49152] A further embodiment of the present invention relates to a process for the production of linoleic acid, which comprises
[49153] (a) increasing or generating the activity of a b2682-protein non-targeted in a non-human organism or a part thereof, preferably a microorganism, a plant cell, a plant or a part thereof, as compared to a corresponding non-transformed wild type non-human organism or a part thereof; and
[49154] (b) growing the non-human organism or a part thereof under conditions which permit the production of linoleic acid or a composition comprising linoleic acid in said non-human organism or in the culture medium surrounding said non-human organism.

[49155] A further embodiment of the present invention relates to a process for the production of linoleic acid, which comprises
[49156] (a) increasing or generating the activity of a flavodoxin non-targeted in a non-human organism or a part thereof, preferably a microorganism, a plant cell, a plant or a part thereof, as compared to a corresponding non-transformed wild type non-human organism or a part thereof; and
[49157] (b) growing the non-human organism or a part thereof under conditions which permit the production of linoleic acid or a composition comprising linoleic acid in said non-human organism or in the culture medium surrounding said non-human organism.

[49158] A further embodiment of the present invention relates to a process for the production of linoleic acid, which comprises
[49159] (a) increasing or generating the activity of a AAS bifunctional protein non-targeted in a non-human organism or a part thereof, preferably a microorganism, a plant cell, a plant or a part thereof, as compared to a corresponding non-transformed wild type non-human organism or a part thereof; and
[49160] (b) growing the non-human organism or a part thereof under conditions which permit the production of linoleic acid or a composition comprising linoleic acid in said non-human organism or in the culture medium surrounding said non-human organism.

[49161] A further embodiment of the present invention relates to a process for the production of linoleic acid, which comprises
[49162] (a) increasing or generating the activity of a b2849-protein non-targeted in a non-human organism or a part thereof, preferably a microorganism, a plant cell, a plant or a part thereof, as compared to a corresponding non-transformed wild type non-human organism or a part thereof; and
[49163] (b) growing the non-human organism or a part thereof under conditions which permit the production of linoleic acid or a composition comprising linoleic acid in said non-human organism or in the culture medium surrounding said non-human organism.

[49164] A further embodiment of the present invention relates to a process for the production of linoleic acid, which comprises
[49165] (a) increasing or generating the activity of a xanthine dehydrogenase non-targeted in a non-human organism or a part thereof, preferably a microorganism, a plant cell, a plant or a part thereof, as compared to a corresponding non-transformed wild type non-human organism or a part thereof; and
[49166] (b) growing the non-human organism or a part thereof under conditions which permit the production of linoleic acid or a composition comprising linoleic acid in said non-human organism or in the culture medium surrounding said non-human organism.

[49167] A further embodiment of the present invention relates to a process for the production of linoleic acid, which comprises
[49168] (a) increasing or generating the activity of a b2909-protein non-targeted in a non-human organism or a part thereof, preferably a microorganism, a plant cell, a plant or a part thereof, as compared to a corresponding non-transformed wild type non-human organism or a part thereof; and
[49169] (b) growing the non-human organism or a part thereof under conditions which permit the production of linoleic acid or a composition comprising linoleic acid in said non-human organism or in the culture medium surrounding said non-human organism.

[49170] A further embodiment of the present invention relates to a process for the production of linoleic acid, which comprises
[49171] (a) increasing or generating the activity of a phosphotriesterase non-targeted in a non-human organism or a part thereof, preferably a microorganism, a plant cell, a plant or a part thereof, as compared to a corresponding non-transformed wild type non-human organism or a part thereof; and
[49172] (b) growing the non-human organism or a part thereof under conditions which permit the production of linoleic acid or a composition comprising linoleic acid in said non-human organism or in the culture medium surrounding said non-human organism.

[49173] A further embodiment of the present invention relates to a process for the production of linoleic acid, which comprises
[49174] (a) increasing or generating the activity of a sn-glycerol-3-phosphate transport system permease protein non-targeted in a non-human organism or a part thereof, preferably a microorganism, a plant cell, a plant or a part thereof, as compared to a corresponding non-transformed wild type non-human organism or a part thereof; and
[49175] (b) growing the non-human organism or a part thereof under conditions which permit the production of linoleic acid or a composition comprising linoleic acid in said non-human organism or in the culture medium surrounding said non-human organism.

[49176] A further embodiment of the present invention relates to a process for the production of linoleic acid, which comprises
[49177] (a) increasing or generating the activity of a threonine efflux protein non-targeted in a non-human organism or a part thereof, preferably a microorganism, a plant cell, a plant or a part thereof, as compared to a corresponding non-transformed wild type non-human organism or a part thereof; and
[49178] (b) growing the non-human organism or a part thereof under conditions which permit the production of linoleic acid or a composition comprising linoleic acid in said non-human organism or in the culture medium surrounding said non-human organism.

[49179] A further embodiment of the present invention relates to a process for the production of linoleic acid, which comprises
[49180] (a) increasing or generating the activity of a 3-ketoacyl-CoA thiolase non-targeted in a non-human organism or a part thereof, preferably a microorganism, a plant cell, a plant or a part thereof, as compared to a corresponding non-transformed wild type non-human organism or a part thereof; and
[49181] (b) growing the non-human organism or a part thereof under conditions which permit the production of linoleic acid or a composition comprising linoleic acid in said non-human organism or in the culture medium surrounding said non-human organism.

[49182] A further embodiment of the present invention relates to a process for the production of linoleic acid, which comprises
[49183] (a) increasing or generating the activity of a GM02LC38418-protein non-targeted in a non-human organism or a part thereof, preferably a microorganism, a plant cell, a plant or a part thereof, as compared to a corresponding non-transformed wild type non-human organism or a part thereof; and
[49184] (b) growing the non-human organism or a part thereof under conditions which permit the production of linoleic acid or a composition comprising linoleic acid in said non-human organism or in the culture medium surrounding said non-human organism.

[49185] A further embodiment of the present invention relates to a process for the production of linoleic acid, which comprises
[49186] (a) increasing or generating the activity of a sll1032-protein non-targeted in a non-human organism or a part thereof, preferably a microorganism, a plant cell, a plant or a part thereof, as compared to a corresponding non-transformed wild type non-human organism or a part thereof; and
[49187] (b) growing the non-human organism or a part thereof under conditions which permit the production of linoleic acid or a composition comprising linoleic acid in said non-human organism or in the culture medium surrounding said non-human organism.

[49188] A further embodiment of the present invention relates to a process for the production of linoleic acid, which comprises
[49189] (a) increasing or generating the activity of a phosphoribosylformyl glycinamidine synthase subunit non-targeted in a non-human organism or a part thereof, preferably a microorganism, a plant cell, a plant or a part thereof, as compared to a corresponding non-transformed wild type non-human organism or a part thereof; and
[49190] (b) growing the non-human organism or a part thereof under conditions which permit the production of linoleic acid or a composition comprising linoleic acid in said non-human organism or in the culture medium surrounding said non-human organism.

[49191] A further embodiment of the present invention relates to a process for the production of linoleic acid, which comprises
[49192] (a) increasing or generating the activity of a CTP synthetase non-targeted in a non-human organism or a part thereof, preferably a microorganism, a plant cell, a plant or a part thereof, as compared to a corresponding non-transformed wild type non-human organism or a part thereof; and
[49193] (b) growing the non-human organism or a part thereof under conditions which permit the production of linoleic acid or a composition comprising linoleic acid in said non-human organism or in the culture medium surrounding said non-human organism.

[49194] A further embodiment of the present invention relates to a process for the production of linoleic acid, which comprises
[49195] (a) increasing or generating the activity of a carbamoyl-phosphate synthase subunit non-targeted in a non-human organism or a part thereof, preferably a microorganism, a plant cell, a plant or a part thereof, as compared to a corresponding non-transformed wild type non-human organism or a part thereof; and
[49196] (b) growing the non-human organism or a part thereof under conditions which permit the production of linoleic acid or a composition comprising linoleic acid in said non-human organism or in the culture medium surrounding said non-human organism.

[49197] A further embodiment of the present invention relates to a process for the production of linoleic acid, which comprises
[49198] (a) increasing or generating the activity of a coproporphyrinogen III oxidase non-targeted in a non-human organism or a part thereof, preferably a microorganism, a plant cell, a plant or a part thereof, as compared to a corresponding non-transformed wild type non-human organism or a part thereof; and
[49199] (b) growing the non-human organism or a part thereof under conditions which permit the production of linoleic acid or a composition comprising linoleic acid in said non-human organism or in the culture medium surrounding said non-human organism.

[49200] A further embodiment of the present invention relates to a process for the production of linoleic acid, which comprises
[49201] (a) increasing or generating the activity of a cation-transporting ATPase non-targeted in a non-human organism or a part thereof, preferably a microorganism, a plant cell, a plant or a part thereof, as compared to a corresponding non-transformed wild type non-human organism or a part thereof; and
[49202] (b) growing the non-human organism or a part thereof under conditions which permit the production of linoleic acid or a composition comprising linoleic acid in said non-human organism or in the culture medium surrounding said non-human organism.

[49203] A further embodiment of the present invention relates to a process for the production of linoleic acid, which comprises
[49204] (a) increasing or generating the activity of a oxidoreductase non-targeted in a non-human organism or a part thereof, preferably a microorganism, a plant cell, a plant or a part thereof, as compared to a corresponding non-transformed wild type non-human organism or a part thereof; and
[49205] (b) growing the non-human organism or a part thereof under conditions which permit the production of linoleic acid or a composition comprising linoleic acid in said non-human organism or in the culture medium surrounding said non-human organism.

[49206] A further embodiment of the present invention relates to a process for the production of linoleic acid, which comprises
[49207] (a) increasing or generating the activity of a tryptophan synthase alpha chain non-targeted in a non-human organism or a part thereof, preferably a microorganism, a plant cell, a plant or a part thereof, as compared to a corresponding non-transformed wild type non-human organism or a part thereof; and
[49208] (b) growing the non-human organism or a part thereof under conditions which permit the production of linoleic acid or a composition comprising linoleic acid in said non-human organism or in the culture medium surrounding said non-human organism.

[49209] A further embodiment of the present invention relates to a process for the production of linoleic acid, which comprises
[49210] (a) increasing or generating the activity of a aromatic acid decarboxylase non-targeted in a non-human organism or a part thereof, preferably a microorganism, a plant cell, a plant or a part thereof, as compared to a corresponding non-transformed wild type non-human organism or a part thereof; and
[49211] (b) growing the non-human organism or a part thereof under conditions which permit the production of linoleic acid or a composition comprising linoleic acid in said non-human organism or in the culture medium surrounding said non-human organism.

[49212] A further embodiment of the present invention relates to a process for the production of linoleic acid, which comprises
[49213] (a) increasing or generating the activity of a phosphate import ATP-binding protein non-targeted in a non-human organism or a part thereof, preferably a microorganism, a plant cell, a plant or a part thereof, as compared to a corresponding non-transformed wild type non-human organism or a part thereof; and
[49214] (b) growing the non-human organism or a part thereof under conditions which permit the production of linoleic acid or a composition comprising linoleic acid in said non-human organism or in the culture medium surrounding said non-human organism.

[49215] A further embodiment of the present invention relates to a process for the production of linoleic acid, which comprises
[49216] (a) increasing or generating the activity of a gamma-glutamyltranspeptidase non-targeted in a non-human organism or a part thereof, preferably a microorganism, a plant cell, a plant or a part thereof, as compared to a corresponding non-transformed wild type non-human organism or a part thereof; and
[49217] (b) growing the non-human organism or a part thereof under conditions which permit the production of linoleic acid or a composition comprising linoleic acid in said non-human organism or in the culture medium surrounding said non-human organism.

[49218] A further embodiment of the present invention relates to a process for the production of linoleic acid, which comprises
[49219] (a) increasing or generating the activity of a arginine decarboxylase non-targeted in a non-human organism or a part thereof, preferably a microorganism, a plant cell, a plant or a part thereof, as compared to a corresponding non-transformed wild type non-human organism or a part thereof; and
[49220] (b) growing the non-human organism or a part thereof under conditions which permit the production of linoleic acid or a composition comprising linoleic acid in said non-human organism or in the culture medium surrounding said non-human organism.

[49221] A further embodiment of the present invention relates to a process for the production of linoleic acid, which comprises
[49222] (a) increasing or generating the activity of a fatty acid desaturase non-targeted in a non-human organism or a part thereof, preferably a microorganism, a plant cell, a plant or a part thereof, as compared to a corresponding non-transformed wild type non-human organism or a part thereof; and
[49223] (b) growing the non-human organism or a part thereof under conditions which permit the production of linoleic acid or a composition comprising linoleic acid in said non-human organism or in the culture medium surrounding said non-human organism.

[49224] A further embodiment of the present invention relates to a process for the production of linoleic acid, which comprises
[49225] (a) increasing or generating the activity of a threonine dehydratase non-targeted in a non-human organism or a part thereof, preferably a microorganism, a plant cell, a plant or a part thereof, as compared to a corresponding non-transformed wild type non-human organism or a part thereof; and
[49226] (b) growing the non-human organism or a part thereof under conditions which permit the production of linoleic acid or a composition comprising linoleic acid in said non-human organism or in the culture medium surrounding said non-human organism.

[49227] A further embodiment of the present invention relates to a process for the production of linoleic acid, which comprises
[49228] (a) increasing or generating the activity of a TTC0490-protein non-targeted in a non-human organism or a part thereof, preferably a microorganism, a plant cell, a plant or a part thereof, as compared to a corresponding non-transformed wild type non-human organism or a part thereof; and
[49229] (b) growing the non-human organism or a part thereof under conditions which permit the production of linoleic acid or a composition comprising linoleic acid in said non-human organism or in the culture medium surrounding said non-human organism.

[49230] A further embodiment of the present invention relates to a process for the production of linoleic acid, which comprises
[49231] (a) increasing or generating the activity of a metal-dependent hydrolase non-targeted in a non-human organism or a part thereof, preferably a microorganism, a plant cell, a plant or a part thereof, as compared to a corresponding non-transformed wild type non-human organism or a part thereof; and
[49232] (b) growing the non-human organism or a part thereof under conditions which permit the production of linoleic acid or a composition comprising linoleic acid in said non-human organism or in the culture medium surrounding said non-human organism.

[49233] A further embodiment of the present invention relates to a process for the production of linoleic acid, which comprises
[49234] (a) increasing or generating the activity of a multiple antibiotic resistance protein non-targeted in a non-human organism or a part thereof, preferably a microorganism, a plant cell, a plant or a part thereof, as compared to a corresponding non-transformed wild type non-human organism or a part thereof; and
[49235] (b) growing the non-human organism or a part thereof under conditions which permit the production of linoleic acid or a composition comprising linoleic acid in said non-human organism or in the culture medium surrounding said non-human organism.

[49236] A further embodiment of the present invention relates to a process for the production of linoleic acid, which comprises
[49237] (a) increasing or generating the activity of a glycin cleavage system protein non-targeted in a non-human organism or a part thereof, preferably a microorganism, a plant cell, a plant or a part thereof, as compared to a corresponding non-transformed wild type non-human organism or a part thereof; and
[49238] (b) growing the non-human organism or a part thereof under conditions which permit the production of linoleic acid or a composition comprising linoleic acid in said non-human organism or in the culture medium surrounding said non-human organism.

[49239] A further embodiment of the present invention relates to a process for the production of linoleic acid, which comprises
[49240] (a) increasing or generating the activity of a protein kinase non-targeted in a non-human organism or a part thereof, preferably a microorganism, a plant cell, a plant or a part thereof, as compared to a corresponding non-transformed wild type non-human organism or a part thereof; and
[49241] (b) growing the non-human organism or a part thereof under conditions which permit the production of linoleic acid or a composition comprising linoleic acid in said non-human organism or in the culture medium surrounding said non-human organism.

[49242] A further embodiment of the present invention relates to a process for the production of linoleic acid, which comprises
[49243] (a) increasing or generating the activity of a aspartate-semialdehyde dehydrogenase non-targeted in a non-human organism or a part thereof, preferably a microorganism, a plant cell, a plant or a part thereof, as compared to a corresponding non-transformed wild type non-human organism or a part thereof; and
[49244] (b) growing the non-human organism or a part thereof under conditions which permit the production of linoleic acid or a composition comprising linoleic acid in said non-human organism or in the culture medium surrounding said non-human organism.

[49245] A further embodiment of the present invention relates to a process for the production of linoleic acid, which comprises
[49246] (a) increasing or generating the activity of a ydr507c-protein non-targeted in a non-human organism or a part thereof, preferably a microorganism, a plant cell, a plant or a part thereof, as compared to a corresponding non-transformed wild type non-human organism or a part thereof; and
[49247] (b) growing the non-human organism or a part thereof under conditions which permit the production of linoleic acid or a composition comprising linoleic acid in said non-human organism or in the culture medium surrounding said non-human organism.

[49248] A further embodiment of the present invention relates to a process for the production of linoleic acid, which comprises
[49249] (a) increasing or generating the activity of a YGR104C-protein non-targeted in a non-human organism or a part thereof, preferably a microorganism, a plant cell, a plant or a part thereof, as compared to a corresponding non-transformed wild type non-human organism or a part thereof; and
[49250] (b) growing the non-human organism or a part thereof under conditions which permit the production of linoleic acid or a composition comprising linoleic acid in said non-human organism or in the culture medium surrounding said non-human organism.

[49251] A further embodiment of the present invention relates to a process for the production of linoleic acid, which comprises
[49252] (a) increasing or generating the activity of a DnaJ-like chaperone non-targeted in a non-human organism or a part thereof, preferably a microorganism, a plant cell, a plant or a part thereof, as compared to a corresponding non-transformed wild type non-human organism or a part thereof; and
[49253] (b) growing the non-human organism or a part thereof under conditions which permit the production of linoleic acid or a composition comprising linoleic acid in said non-human organism or in the culture medium surrounding said non-human organism.

[49254] A further embodiment of the present invention relates to a process for the production of linoleic acid, which comprises
[49255] (a) increasing or generating the activity of a aconitate hydratase non-targeted in a non-human organism or a part thereof, preferably a microorganism, a plant cell, a plant or a part thereof, as compared to a corresponding non-transformed wild type non-human organism or a part thereof; and
[49256] (b) growing the non-human organism or a part thereof under conditions which permit the production of linoleic acid or a composition comprising linoleic acid in said non-human organism or in the culture medium surrounding said non-human organism.

[49257] A further embodiment of the present invention relates to a process for the production of linoleic acid, which comprises
[49258] (a) increasing or generating the activity of a molecular chaperone non-targeted in a non-human organism or a part thereof, preferably a microorganism, a plant cell, a plant or a part thereof, as compared to a corresponding non-transformed wild type non-human organism or a part thereof; and
[49259] (b) growing the non-human organism or a part thereof under conditions which permit the production of linoleic acid or a composition comprising linoleic acid in said non-human organism or in the culture medium surrounding said non-human organism.

[49260] A further embodiment of the present invention relates to a process for the production of linoleic acid, which comprises
[49261] (a) increasing or generating the activity of a ATPase epsilon subunit non-targeted in a non-human organism or a part thereof, preferably a microorganism, a plant cell, a plant or a part thereof, as compared to a corresponding non-transformed wild type non-human organism or a part thereof; and
[49262] (b) growing the non-human organism or a part thereof under conditions which permit the production of linoleic acid or a composition comprising linoleic acid in said non-human organism or in the culture medium surrounding said non-human organism.

[49263] A further embodiment of the present invention relates to a process for the production of linoleic acid, which comprises
[49264] (a) increasing or generating the activity of a glucose-6-phosphate 1-dehydrogenase non-targeted in a non-human organism or a part thereof, preferably a microorganism, a plant cell, a plant or a part thereof, as compared to a corresponding non-transformed wild type non-human organism or a part thereof; and
[49265] (b) growing the non-human organism or a part thereof under conditions which permit the production of linoleic acid or a composition comprising linoleic acid in said non-human organism or in the culture medium surrounding said non-human organism.

[49266] A further embodiment of the present invention relates to a process for the production of linoleic acid, which comprises
[49267] (a) increasing or generating the activity of a polypeptide comprising a polypeptide as depicted in the respective line in column 5 or 8 of Table II, application no. 8, or a homolog or a fragment thereof, a consensus sequence or at least one polypeptide motif as depicted in the respective line in column 8 of Table IV, application no. 8; or increasing or generating the activity of an expression product of one or more nucleic acid molecule(s) comprising a polynucleotide as depicted in the respective line in column 5 or 8 of Table I, application no. 8, preferably the coding region thereof, or a homolog or a fragment thereof; non-targeted in a non-human organism or a part thereof; preferably a microorganism, a plant cell, a plant or a part thereof, as compared to a corresponding non-transformed wild type non-human organism or a part thereof; and
[49268] (b) growing the non-human organism under conditions which permit the production of linoleic acid, or a composition comprising linoleic acid in said non-human organism or in the culture medium surrounding said non-human organism.

[49269] A further embodiment of the present invention relates to a process for the production of linoleic acid, which comprises
[49270] (a) increasing or generating one or more activities selected from the group consisting of chlorophyllase in an organelle, preferably in plastids or mitochondria, especially in plastids, of a non-human organism or a part thereof, preferably a microorganism, a plant cell, a plant or a part thereof, as compared to a corresponding non-transformed wild type non-human organism or a part thereof; and
[49271] (b) growing the non-human organism or a part thereof under conditions which permit the production of linoleic acid or a composition comprising linoleic acid in said non-human organism or in the culture medium surrounding said non-human organism.

[49272] A further embodiment of the present invention relates to a process for the production of linoleic acid, which comprises
[49273] (a) increasing or generating one or more activities selected from the group consisting of At1g19800-protein in an organelle, preferably in plastids or mitochondria, especially in plastids, of a non-human organism or a part thereof, preferably a microorganism, a plant cell, a plant or a part thereof, as compared to a corresponding non-transformed wild type non-human organism or a part thereof; and
[49274] (b) growing the non-human organism or a part thereof under conditions which permit the production of linoleic acid or a composition comprising linoleic acid in said non-human organism or in the culture medium surrounding said non-human organism.

[49275] A further embodiment of the present invention relates to a process for the production of linoleic acid, which comprises
[49276] (a) increasing or generating one or more activities selected from the group consisting of transcription factor in an organelle, preferably in plastids or mitochondria, especially in plastids, of a non-human organism or a part thereof, preferably a microorganism, a plant cell, a plant or a part thereof, as compared to a corresponding non-transformed wild type non-human organism or a part thereof; and
[49277] (b) growing the non-human organism or a part thereof under conditions which permit the production of linoleic acid or a composition comprising linoleic acid in said non-human organism or in the culture medium surrounding said non-human organism.

[49278] A further embodiment of the present invention relates to a process for the production of linoleic acid, which comprises
[49279] (a) increasing or generating one or more activities selected from the group consisting of pyruvate kinase in an organelle, preferably in plastids or mitochondria, especially in plastids, of a non-human organism or a part thereof, preferably a microorganism, a plant cell, a plant or a part thereof, as compared to a corresponding non-transformed wild type non-human organism or a part thereof; and
[49280] (b) growing the non-human organism or a part thereof under conditions which permit the production of linoleic acid or a composition comprising linoleic acid in said non-human organism or in the culture medium surrounding said non-human organism.

[49281] A further embodiment of the present invention relates to a process for the production of linoleic acid, which comprises
[49282] (a) increasing or generating one or more activities selected from the group consisting of At2g45420-protein in an organelle, preferably in plastids or mitochondria, especially in plastids, of a non-human organism or a part thereof, preferably a microorganism, a plant cell, a plant or a part thereof, as compared to a corresponding non-transformed wild type non-human organism or a part thereof; and
[49283] (b) growing the non-human organism or a part thereof under conditions which permit the production of linoleic acid or a composition comprising linoleic acid in said non-human organism or in the culture medium surrounding said non-human organism.

[49284] A further embodiment of the present invention relates to a process for the production of linoleic acid, which comprises
[49285] (a) increasing or generating one or more activities selected from the group consisting of heat shock transcription factor in an organelle, preferably in plastids or mitochondria, especially in plastids, of a non-human organism or a part thereof, preferably a microorganism, a plant cell, a plant or a part thereof, as compared to a corresponding non-transformed wild type non-human organism or a part thereof; and
[49286] (b) growing the non-human organism or a part thereof under conditions which permit the production of linoleic acid or a composition comprising linoleic acid in said non-human organism or in the culture medium surrounding said non-human organism.

[49287] A further embodiment of the present invention relates to a process for the production of linoleic acid, which comprises
[49288] (a) increasing or generating one or more activities selected from the group consisting of CCAAT-binding transcription factor in an organelle, preferably in plastids or mitochondria, especially in plastids, of a non-human organism or a part thereof, preferably a microorganism, a plant cell, a plant or a part thereof, as compared to a corresponding non-transformed wild type non-human organism or a part thereof; and
[49289] (b) growing the non-human organism or a part thereof under conditions which permit the production of linoleic acid or a composition comprising linoleic acid in said non-human organism or in the culture medium surrounding said non-human organism.

[49290] A further embodiment of the present invention relates to a process for the production of linoleic acid, which comprises
[49291] (a) increasing or generating one or more activities selected from the group consisting of glutaredoxin in an organelle, preferably in plastids or mitochondria, especially in plastids, of a non-human organism or a part thereof, preferably a microorganism, a plant cell, a plant or a part thereof, as compared to a corresponding non-transformed wild type non-human organism or a part thereof; and
[49292] (b) growing the non-human organism or a part thereof under conditions which permit the production of linoleic acid or a composition comprising linoleic acid in said non-human organism or in the culture medium surrounding said non-human organism.

[49293] A further embodiment of the present invention relates to a process for the production of linoleic acid, which comprises
[49294] (a) increasing or generating one or more activities selected from the group consisting of transcription factor in an organelle, preferably in plastids or mitochondria, especially in plastids, of a non-human organism or a part thereof, preferably a microorganism, a plant cell, a plant or a part thereof, as compared to a corresponding non-transformed wild type non-human organism or a part thereof; and
[49295] (b) growing the non-human organism or a part thereof under conditions which permit the production of linoleic acid or a composition comprising linoleic acid in said non-human organism or in the culture medium surrounding said non-human organism.

[49296] A further embodiment of the present invention relates to a process for the production of linoleic acid, which comprises
[49297] (a) increasing or generating one or more activities selected from the group consisting of monothiol glutaredoxin in an organelle, preferably in plastids or mitochondria, especially in plastids, of a non-human organism or a part thereof, preferably a microorganism, a plant cell, a plant or a part thereof, as compared to a corresponding non-transformed wild type non-human organism or a part thereof; and
[49298] (b) growing the non-human organism or a part thereof under conditions which permit the production of linoleic acid or a composition comprising linoleic acid in said non-human organism or in the culture medium surrounding said non-human organism.

[49299] A further embodiment of the present invention relates to a process for the production of linoleic acid, which comprises
[49300] (a) increasing or generating one or more activities selected from the group consisting of monothiol glutaredoxin in an organelle, preferably in plastids or mitochondria, especially in plastids, of a non-human organism or a part thereof, preferably a microorganism, a plant cell, a plant or a part thereof, as compared to a corresponding non-transformed wild type non-human organism or a part thereof; and
[49301] (b) growing the non-human organism or a part thereof under conditions which permit the production of linoleic acid or a composition comprising linoleic acid in said non-human organism or in the culture medium surrounding said non-human organism.

[49302] A further embodiment of the present invention relates to a process for the production of linoleic acid, which comprises
[49303] (a) increasing or generating one or more activities selected from the group consisting of protein phosphatase in an organelle, preferably in plastids or mitochondria, especially in plastids, of a non-human organism or a part thereof, preferably a microorganism, a plant cell, a plant or a part thereof, as compared to a corresponding non-transformed wild type non-human organism or a part thereof; and
[49304] (b) growing the non-human organism or a part thereof under conditions which permit the production of linoleic acid or a composition comprising linoleic acid in said non-human organism or in the culture medium surrounding said non-human organism.

[49305] A further embodiment of the present invention relates to a process for the production of linoleic acid, which comprises
[49306] (a) increasing or generating one or more activities selected from the group consisting of glutaredoxin in an organelle, preferably in plastids or mitochondria, especially in plastids, of a non-human organism or a part thereof, preferably a microorganism, a plant cell, a plant or a part thereof, as compared to a corresponding non-transformed wild type non-human organism or a part thereof; and
[49307] (b) growing the non-human organism or a part thereof under conditions which permit the production of linoleic acid or a composition comprising linoleic acid in said non-human organism or in the culture medium surrounding said non-human organism.

[49308] A further embodiment of the present invention relates to a process for the production of linoleic acid, which comprises
[49309] (a) increasing or generating one or more activities selected from the group consisting of heat shock transcription factor in an organelle, preferably in plastids or mitochondria, especially in plastids, of a non-human organism or a part thereof, preferably a microorganism, a plant cell, a plant or a part thereof, as compared to a corresponding non-transformed wild type non-human organism or a part thereof; and
[49310] (b) growing the non-human organism or a part thereof under conditions which permit the production of linoleic acid or a composition comprising linoleic acid in said non-human organism or in the culture medium surrounding said non-human organism.

[49311] A further embodiment of the present invention relates to a process for the production of linoleic acid, which comprises
[49312] (a) increasing or generating one or more activities selected from the group consisting of protein phosphatase in an organelle, preferably in plastids or mitochondria, especially in plastids, of a non-human organism or a part thereof, preferably a microorganism, a plant cell, a plant or a part thereof, as compared to a corresponding non-transformed wild type non-human organism or a part thereof; and
[49313] (b) growing the non-human organism or a part thereof under conditions which permit the production of linoleic acid or a composition comprising linoleic acid in said non-human organism or in the culture medium surrounding said non-human organism.

[49314] A further embodiment of the present invention relates to a process for the production of linoleic acid, which comprises
[49315] (a) increasing or generating one or more activities selected from the group consisting of oxidoreductase in an organelle, preferably in plastids or mitochondria, especially in plastids, of a non-human organism or a part thereof, preferably a microorganism, a plant cell, a plant or a part thereof, as compared to a corresponding non-transformed wild type non-human organism or a part thereof; and
[49316] (b) growing the non-human organism or a part thereof under conditions which permit the production of linoleic acid or a composition comprising linoleic acid in said non-human organism or in the culture medium surrounding said non-human organism.

[49317] A further embodiment of the present invention relates to a process for the production of linoleic acid, which comprises
[49318] (a) increasing or generating one or more activities selected from the group consisting of transcriptional regulator protein in an organelle, preferably in plastids or mitochondria, especially in plastids, of a non-human organism or a part thereof, preferably a microorganism, a plant cell, a plant or a part thereof, as compared to a corresponding non-transformed wild type non-human organism or a part thereof; and
[49319] (b) growing the non-human organism or a part thereof under conditions which permit the production of linoleic acid or a composition comprising linoleic acid in said non-human organism or in the culture medium surrounding said non-human organism.

[49320] A further embodiment of the present invention relates to a process for the production of linoleic acid, which comprises
[49321] (a) increasing or generating one or more activities selected from the group consisting of betahydroxylase in an organelle, preferably in plastids or mitochondria, especially in plastids, of a non-human organism or a part thereof, preferably a microorganism, a plant cell, a plant or a part thereof, as compared to a corresponding non-transformed wild type non-human organism or a part thereof; and
[49322] (b) growing the non-human organism or a part thereof under conditions which permit the production of linoleic acid or a composition comprising linoleic acid in said non-human organism or in the culture medium surrounding said non-human organism.

[49323] A further embodiment of the present invention relates to a process for the production of linoleic acid, which comprises
[49324] (a) increasing or generating one or more activities selected from the group consisting of oxidoreductase in an organelle, preferably in plastids or mitochondria, especially in plastids, of a non-human organism or a part thereof, preferably a microorganism, a plant cell, a plant or a part thereof, as compared to a corresponding non-transformed wild type non-human organism or a part thereof; and
[49325] (b) growing the non-human organism or a part thereof under conditions which permit the production of linoleic acid or a composition comprising linoleic acid in said non-human organism or in the culture medium surrounding said non-human organism.

[49326] A further embodiment of the present invention relates to a process for the production of linoleic acid, which comprises
[49327] (a) increasing or generating one or more activities selected from the group consisting of ThiF family protein in an organelle, preferably in plastids or mitochondria, especially in plastids, of a non-human organism or a part thereof, preferably a microorganism, a plant cell, a plant or a part thereof, as compared to a corresponding non-transformed wild type non-human organism or a part thereof; and
[49328] (b) growing the non-human organism or a part thereof under conditions which permit the production of linoleic acid or a composition comprising linoleic acid in said non-human organism or in the culture medium surrounding said non-human organism.

[49329] A further embodiment of the present invention relates to a process for the production of linoleic acid, which comprises
[49330] (a) increasing or generating one or more activities selected from the group consisting of recombinase A in an organelle, preferably in plastids or mitochondria, especially in plastids, of a non-human organism or a part thereof, preferably a microorganism, a plant cell, a plant or a part thereof, as compared to a corresponding non-transformed wild type non-human organism or a part thereof; and
[49331] (b) growing the non-human organism or a part thereof under conditions which permit the production of linoleic acid or a composition comprising linoleic acid in said non-human organism or in the culture medium surrounding said non-human organism.

[49332] A further embodiment of the present invention relates to a process for the production of linoleic acid, which comprises
[49333] (a) increasing or generating one or more activities selected from the group consisting of hydrolase in an organelle, preferably in plastids or mitochondria, especially in plastids, of a non-human organism or a part thereof, preferably a microorganism, a plant cell, a plant or a part thereof, as compared to a corresponding non-transformed wild type non-human organism or a part thereof; and
[49334] (b) growing the non-human organism or a part thereof under conditions which permit the production of linoleic acid or a composition comprising linoleic acid in said non-human organism or in the culture medium surrounding said non-human organism.

[49335] A further embodiment of the present invention relates to a process for the production of linoleic acid, which comprises
[49336] (a) increasing or generating one or more activities selected from the group consisting of membrane transport protein in an organelle, preferably in plastids or mitochondria, especially in plastids, of a non-human organism or a part thereof, preferably a microorganism, a plant cell, a plant or a part thereof, as compared to a corresponding non-transformed wild type non-human organism or a part thereof; and
[49337] (b) growing the non-human organism or a part thereof under conditions which permit the production of linoleic acid or a composition comprising linoleic acid in said non-human organism or in the culture medium surrounding said non-human organism.

[49338] A further embodiment of the present invention relates to a process for the production of linoleic acid, which comprises
[49339] (a) increasing or generating one or more activities selected from the group consisting of b0801-protein in an organelle, preferably in plastids or mitochondria, especially in plastids, of a non-human organism or a part thereof, preferably a microorganism, a plant cell, a plant or a part thereof, as compared to a corresponding non-transformed wild type non-human organism or a part thereof; and
[49340] (b) growing the non-human organism or a part thereof under conditions which permit the production of linoleic acid or a composition comprising linoleic acid in said non-human organism or in the culture medium surrounding said non-human organism.

[49341] A further embodiment of the present invention relates to a process for the production of linoleic acid, which comprises
[49342] (a) increasing or generating one or more activities selected from the group consisting of 3-oxoacyl-[acyl-carrier-protein] synthase in an organelle, preferably in plastids or mitochondria, especially in plastids, of a non-human organism or a part thereof, preferably a microorganism, a plant cell, a plant or a part thereof, as compared to a corresponding non-transformed wild type non-human organism or a part thereof; and
[49343] (b) growing the non-human organism or a part thereof under conditions which permit the production of linoleic acid or a composition comprising linoleic acid in said non-human organism or in the culture medium surrounding said non-human organism.

[49344] A further embodiment of the present invention relates to a process for the production of linoleic acid, which comprises
[49345] (a) increasing or generating one or more activities selected from the group consisting of outer membrane receptor protein precursor in an organelle, preferably in plastids or mitochondria, especially in plastids, of a non-human organism or a part thereof, preferably a microorganism, a plant cell, a plant or a part thereof, as compared to a corresponding non-transformed wild type non-human organism or a part thereof; and
[49346] (b) growing the non-human organism or a part thereof under conditions which permit the production of linoleic acid or a composition comprising linoleic acid in said non-human organism or in the culture medium surrounding said non-human organism.

[49347] A further embodiment of the present invention relates to a process for the production of linoleic acid, which comprises
[49348] (a) increasing or generating one or more activities selected from the group consisting of b1330-protein in an organelle, preferably in plastids or mitochondria, especially in plastids, of a non-human organism or a part thereof, preferably a microorganism, a plant cell, a plant or a part thereof, as compared to a corresponding non-transformed wild type non-human organism or a part thereof; and
[49349] (b) growing the non-human organism or a part thereof under conditions which permit the production of linoleic acid or a composition comprising linoleic acid in said non-human organism or in the culture medium surrounding said non-human organism.

[49350] A further embodiment of the present invention relates to a process for the production of linoleic acid, which comprises
[49351] (a) increasing or generating one or more activities selected from the group consisting of lipoprotein precursor in an organelle, preferably in plastids or mitochondria, especially in plastids, of a non-human organism or a part thereof, preferably a microorganism, a plant cell, a plant or a part thereof, as compared to a corresponding non-transformed wild type non-human organism or a part thereof; and
[49352] (b) growing the non-human organism or a part thereof under conditions which permit the production of linoleic acid or a composition comprising linoleic acid in said non-human organism or in the culture medium surrounding said non-human organism.

[49353] A further embodiment of the present invention relates to a process for the production of linoleic acid, which comprises
[49354] (a) increasing or generating one or more activities selected from the group consisting of b1470-protein in an organelle, preferably in plastids or mitochondria, especially in plastids, of a non-human organism or a part thereof, preferably a microorganism, a plant cell, a plant or a part thereof, as compared to a corresponding non-transformed wild type non-human organism or a part thereof; and
[49355] (b) growing the non-human organism or a part thereof under conditions which permit the production of linoleic acid or a composition comprising linoleic acid in said non-human organism or in the culture medium surrounding said non-human organism.

[49356] A further embodiment of the present invention relates to a process for the production of linoleic acid, which comprises
[49357] (a) increasing or generating one or more activities selected from the group consisting of Fe—S subunit of oxidoreductase in an organelle, preferably in plastids or mitochondria, especially in plastids, of a non-human organism or a part thereof, preferably a microorganism, a plant cell, a plant or a part thereof, as compared to a corresponding non-transformed wild type non-human organism or a part thereof; and
[49358] (b) growing the non-human organism or a part thereof under conditions which permit the production of linoleic acid or a composition comprising linoleic acid in said non-human organism or in the culture medium surrounding said non-human organism.

[49359] A further embodiment of the present invention relates to a process for the production of linoleic acid, which comprises
[49360] (a) increasing or generating one or more activities selected from the group consisting of acid shock protein in an organelle, preferably in plastids or mitochondria, especially in plastids, of a non-human organism or a part thereof, preferably a microorganism, a plant cell, a plant or a part thereof, as compared to a corresponding non-transformed wild type non-human organism or a part thereof; and
[49361] (b) growing the non-human organism or a part thereof under conditions which permit the production of linoleic acid or a composition comprising linoleic acid in said non-human organism or in the culture medium surrounding said non-human organism.

[49362] A further embodiment of the present invention relates to a process for the production of linoleic acid, which comprises
[49363] (a) increasing or generating one or more activities selected from the group consisting of fumarate hydratase in an organelle, preferably in plastids or mitochondria, especially in plastids, of a non-human organism or a part thereof, preferably a microorganism, a plant cell, a plant or a part thereof, as compared to a corresponding non-transformed wild type non-human organism or a part thereof; and
[49364] (b) growing the non-human organism or a part thereof under conditions which permit the production of linoleic acid or a composition comprising linoleic acid in said non-human organism or in the culture medium surrounding said non-human organism.

[49365] A further embodiment of the present invention relates to a process for the production of linoleic acid, which comprises
[49366] (a) increasing or generating one or more activities selected from the group consisting of electron transport complex protein in an organelle, preferably in plastids or mitochondria, especially in plastids, of a non-human organism or a part thereof, preferably a microorganism, a plant cell, a plant or a part thereof, as compared to a corresponding non-transformed wild type non-human organism or a part thereof; and
[49367] (b) growing the non-human organism or a part thereof under conditions which permit the production of linoleic acid or a composition comprising linoleic acid in said non-human organism or in the culture medium surrounding said non-human organism.

[49368] A further embodiment of the present invention relates to a process for the production of linoleic acid, which comprises
[49369] (a) increasing or generating one or more activities selected from the group consisting of b1670-protein in an organelle, preferably in plastids or mitochondria, especially in plastids, of a non-human organism or a part thereof, preferably a microorganism, a plant cell, a plant or a part thereof, as compared to a corresponding non-transformed wild type non-human organism or a part thereof; and
[49370] (b) growing the non-human organism or a part thereof under conditions which permit the production of linoleic acid or a composition comprising linoleic acid in said non-human organism or in the culture medium surrounding said non-human organism.

[49371] A further embodiment of the present invention relates to a process for the production of linoleic acid, which comprises
[49372] (a) increasing or generating one or more activities selected from the group consisting of b1837-protein in an organelle, preferably in plastids or mitochondria, especially in plastids, of a non-human organism or a part thereof, preferably a microorganism, a plant cell, a plant or a part thereof, as compared to a corresponding non-transformed wild type non-human organism or a part thereof; and
[49373] (b) growing the non-human organism or a part thereof under conditions which permit the production of linoleic acid or a composition comprising linoleic acid in said non-human organism or in the culture medium surrounding said non-human organism.

[49374] A further embodiment of the present invention relates to a process for the production of linoleic acid, which comprises
[49375] (a) increasing or generating one or more activities selected from the group consisting of b2032-protein in an organelle, preferably in plastids or mitochondria, especially in plastids, of a non-human organism or a part thereof, preferably a microorganism, a plant cell, a plant or a part thereof, as compared to a corresponding non-transformed wild type non-human organism or a part thereof; and
[49376] (b) growing the non-human organism or a part thereof under conditions which permit the production of linoleic acid or a composition comprising linoleic acid in said non-human organism or in the culture medium surrounding said non-human organism.

[49377] A further embodiment of the present invention relates to a process for the production of linoleic acid, which comprises
[49378] (a) increasing or generating one or more activities selected from the group consisting of colanic acid biosynthesis protein in an organelle, preferably in plastids or mitochondria, especially in plastids, of a non-human organism or a part thereof, preferably a microorganism, a plant cell, a plant or a part thereof, as compared to a corresponding non-transformed wild type non-human organism or a part thereof; and
[49379] (b) growing the non-human organism or a part thereof under conditions which permit the production of linoleic acid or a composition comprising linoleic acid in said non-human organism or in the culture medium surrounding said non-human organism.

[49380] A further embodiment of the present invention relates to a process for the production of linoleic acid, which comprises
[49381] (a) increasing or generating one or more activities selected from the group consisting of b2099-protein in an organelle, preferably in plastids or mitochondria, especially in plastids, of a non-human organism or a part thereof, preferably a microorganism, a plant cell, a plant or a part thereof, as compared to a corresponding non-transformed wild type non-human organism or a part thereof; and
[49382] (b) growing the non-human organism or a part thereof under conditions which permit the production of linoleic acid or a composition comprising linoleic acid in said non-human organism or in the culture medium surrounding said non-human organism.

[49383] A further embodiment of the present invention relates to a process for the production of linoleic acid, which comprises
[49384] (a) increasing or generating one or more activities selected from the group consisting of b2107-protein in an organelle, preferably in plastids or mitochondria, especially in plastids, of a non-human organism or a part thereof, preferably a microorganism, a plant cell, a plant or a part thereof, as compared to a corresponding non-transformed wild type non-human organism or a part thereof; and
[49385] (b) growing the non-human organism or a part thereof under conditions which permit the production of linoleic acid or a composition comprising linoleic acid in said non-human organism or in the culture medium surrounding said non-human organism.

[49386] A further embodiment of the present invention relates to a process for the production of linoleic acid, which comprises
[49387] (a) increasing or generating one or more activities selected from the group consisting of ABC transporter permease protein in an organelle, preferably in plastids or mitochondria, especially in plastids, of a non-human organism or a part thereof, preferably a microorganism, a plant cell, a plant or a part thereof, as compared to a corresponding non-transformed wild type non-human organism or a part thereof; and
[49388] (b) growing the non-human organism or a part thereof under conditions which permit the production of linoleic acid or a composition comprising linoleic acid in said non-human organism or in the culture medium surrounding said non-human organism.

[49389] A further embodiment of the present invention relates to a process for the production of linoleic acid, which comprises
[49390] (a) increasing or generating one or more activities selected from the group consisting of b2399-protein in an organelle, preferably in plastids or mitochondria, especially in plastids, of a non-human organism or a part thereof, preferably a microorganism, a plant cell, a plant or a part thereof, as compared to a corresponding non-transformed wild type non-human organism or a part thereof; and
[49391] (b) growing the non-human organism or a part thereof under conditions which permit the production of linoleic acid or a composition comprising linoleic acid in said non-human organism or in the culture medium surrounding said non-human organism.

[49392] A further embodiment of the present invention relates to a process for the production of linoleic acid, which comprises
[49393] (a) increasing or generating one or more activities selected from the group consisting of ethanolamine utilization protein in an organelle, preferably in plastids or mitochondria, especially in plastids, of a non-human organism or a part thereof, preferably a microorganism, a plant cell, a plant or a part thereof, as compared to a corresponding non-transformed wild type non-human organism or a part thereof; and
[49394] (b) growing the non-human organism or a part thereof under conditions which permit the production of linoleic acid or a composition comprising linoleic acid in said non-human organism or in the culture medium surrounding said non-human organism.

[49395] A further embodiment of the present invention relates to a process for the production of linoleic acid, which comprises
[49396] (a) increasing or generating one or more activities selected from the group consisting of b2474-protein in an organelle, preferably in plastids or mitochondria, especially in plastids, of a non-human organism or a part thereof, preferably a microorganism, a plant cell, a plant or a part thereof, as compared to a corresponding non-transformed wild type non-human organism or a part thereof; and
[49397] (b) growing the non-human organism or a part thereof under conditions which permit the production of linoleic acid or a composition comprising linoleic acid in said non-human organism or in the culture medium surrounding said non-human organism.

[49398] A further embodiment of the present invention relates to a process for the production of linoleic acid, which comprises
[49399] (a) increasing or generating one or more activities selected from the group consisting of b2613-protein in an organelle, preferably in plastids or mitochondria, especially in plastids, of a non-human organism or a part thereof, preferably a microorganism, a plant cell, a plant or a part thereof, as compared to a corresponding non-transformed wild type non-human organism or a part thereof; and
[49400] (b) growing the non-human organism or a part thereof under conditions which permit the production of linoleic acid or a composition comprising linoleic acid in said non-human organism or in the culture medium surrounding said non-human organism.

[49401] A further embodiment of the present invention relates to a process for the production of linoleic acid, which comprises
[49402] (a) increasing or generating one or more activities selected from the group consisting of b2682-protein in an organelle, preferably in plastids or mitochondria, especially in plastids, of a non-human organism or a part thereof, preferably a microorganism, a plant cell, a plant or a part thereof, as compared to a corresponding non-transformed wild type non-human organism or a part thereof; and
[49403] (b) growing the non-human organism or a part thereof under conditions which permit the production of linoleic acid or a composition comprising linoleic acid in said non-human organism or in the culture medium surrounding said non-human organism.

[49404] A further embodiment of the present invention relates to a process for the production of linoleic acid, which comprises
[49405] (a) increasing or generating one or more activities selected from the group consisting of flavodoxin in an organelle, preferably in plastids or mitochondria, especially in plastids, of a non-human organism or a part thereof, preferably a microorganism, a plant cell, a plant or a part thereof, as compared to a corresponding non-transformed wild type non-human organism or a part thereof; and
[49406] (b) growing the non-human organism or a part thereof under conditions which permit the production of linoleic acid or a composition comprising linoleic acid in said non-human organism or in the culture medium surrounding said non-human organism.

[49407] A further embodiment of the present invention relates to a process for the production of linoleic acid, which comprises
[49408] (a) increasing or generating one or more activities selected from the group consisting of AAS bifunctional protein in an organelle, preferably in plastids or mitochondria, especially in plastids, of a non-human organism or a part thereof, preferably a microorganism, a plant cell, a plant or a part thereof, as compared to a corresponding non-transformed wild type non-human organism or a part thereof; and
[49409] (b) growing the non-human organism or a part thereof under conditions which permit the production of linoleic acid or a composition comprising linoleic acid in said non-human organism or in the culture medium surrounding said non-human organism.

[49410] A further embodiment of the present invention relates to a process for the production of linoleic acid, which comprises
[49411] (a) increasing or generating one or more activities selected from the group consisting of b2849-protein in an organelle, preferably in plastids or mitochondria, especially in plastids, of a non-human organism or a part thereof, preferably a microorganism, a plant cell, a plant or a part thereof, as compared to a corresponding non-transformed wild type non-human organism or a part thereof; and
[49412] (b) growing the non-human organism or a part thereof under conditions which permit the production of linoleic acid or a composition comprising linoleic acid in said non-human organism or in the culture medium surrounding said non-human organism.

[49413] A further embodiment of the present invention relates to a process for the production of linoleic acid, which comprises
[49414] (a) increasing or generating one or more activities selected from the group consisting of xanthine dehydrogenase in an organelle, preferably in plastids or mitochondria, especially in plastids, of a non-human organism or a part thereof, preferably a microorganism, a plant cell, a plant or a part thereof, as compared to a corresponding non-transformed wild type non-human organism or a part thereof; and
[49415] (b) growing the non-human organism or a part thereof under conditions which permit the production of linoleic acid or a composition comprising linoleic acid in said non-human organism or in the culture medium surrounding said non-human organism.

[49416] A further embodiment of the present invention relates to a process for the production of linoleic acid, which comprises
[49417] (a) increasing or generating one or more activities selected from the group consisting of b2909-protein in an organelle, preferably in plastids or mitochondria, especially in plastids, of a non-human organism or a part thereof, preferably a microorganism, a plant cell, a plant or a part thereof, as compared to a corresponding non-transformed wild type non-human organism or a part thereof; and
[49418] (b) growing the non-human organism or a part thereof under conditions which permit the production of linoleic acid or a composition comprising linoleic acid in said non-human organism or in the culture medium surrounding said non-human organism.

[49419] A further embodiment of the present invention relates to a process for the production of linoleic acid, which comprises
[49420] (a) increasing or generating one or more activities selected from the group consisting of phosphotriesterase in an organelle, preferably in plastids or mitochondria, especially in plastids, of a non-human organism or a part thereof, preferably a microorganism, a plant cell, a plant or a part thereof, as compared to a corresponding non-transformed wild type non-human organism or a part thereof; and
[49421] (b) growing the non-human organism or a part thereof under conditions which permit the production of linoleic acid or a composition comprising linoleic acid in said non-human organism or in the culture medium surrounding said non-human organism.

[49422] A further embodiment of the present invention relates to a process for the production of linoleic acid, which comprises
[49423] (a) increasing or generating one or more activities selected from the group consisting of sn-glycerol-3-phosphate transport system permease protein in an organelle, preferably in plastids or mitochondria, especially in plastids, of a non-human organism or a part thereof, preferably a microorganism, a plant cell, a plant or a part thereof, as compared to a corresponding non-transformed wild type non-human organism or a part thereof; and
[49424] (b) growing the non-human organism or a part thereof under conditions which permit the production of linoleic acid or a composition comprising linoleic acid in said non-human organism or in the culture medium surrounding said non-human organism.

[49425] A further embodiment of the present invention relates to a process for the production of linoleic acid, which comprises
[49426] (a) increasing or generating one or more activities selected from the group consisting of threonine efflux protein in an organelle, preferably in plastids or mitochondria, especially in plastids, of a non-human organism or a part thereof, preferably a microorganism, a plant cell, a plant or a part thereof, as compared to a corresponding non-transformed wild type non-human organism or a part thereof; and
[49427] (b) growing the non-human organism or a part thereof under conditions which permit the production of linoleic acid or a composition comprising linoleic acid in said non-human organism or in the culture medium surrounding said non-human organism.

[49428] A further embodiment of the present invention relates to a process for the production of linoleic acid, which comprises
[49429] (a) increasing or generating one or more activities selected from the group consisting of 3-ketoacyl-CoA thiolase in an organelle, preferably in plastids or mitochondria, especially in plastids, of a non-human organism or a part thereof, preferably a microorganism, a plant cell, a plant or a part thereof, as compared to a corresponding non-transformed wild type non-human organism or a part thereof; and
[49430] (b) growing the non-human organism or a part thereof under conditions which permit the production of linoleic acid or a composition comprising linoleic acid in said non-human organism or in the culture medium surrounding said non-human organism.

[49431] A further embodiment of the present invention relates to a process for the production of linoleic acid, which comprises
[49432] (a) increasing or generating one or more activities selected from the group consisting of GM02LC38418-protein in an organelle, preferably in plastids or mitochondria, especially in plastids, of a non-human organism or a part thereof, preferably a microorganism, a plant cell, a plant or a part thereof, as compared to a corresponding non-transformed wild type non-human organism or a part thereof; and
[49433] (b) growing the non-human organism or a part thereof under conditions which permit the production of linoleic acid or a composition comprising linoleic acid in said non-human organism or in the culture medium surrounding said non-human organism.

[49434] A further embodiment of the present invention relates to a process for the production of linoleic acid, which comprises
[49435] (a) increasing or generating one or more activities selected from the group consisting of sll1032-protein in an organelle, preferably in plastids or mitochondria, especially in plastids, of a non-human organism or a part thereof, preferably a microorganism, a plant cell, a plant or a part thereof, as compared to a corresponding non-transformed wild type non-human organism or a part thereof; and
[49436] (b) growing the non-human organism or a part thereof under conditions which permit the production of linoleic acid or a composition comprising linoleic acid in said non-human organism or in the culture medium surrounding said non-human organism.

[49437] A further embodiment of the present invention relates to a process for the production of linoleic acid, which comprises
[49438] (a) increasing or generating one or more activities selected from the group consisting of phosphoribosylformyl glycinamidine synthase subunit in an organelle, preferably in plastids or mitochondria, especially in plastids, of a non-human organism or a part thereof, preferably a microorganism, a plant cell, a plant or a part thereof, as compared to a corresponding non-transformed wild type non-human organism or a part thereof; and
[49439] (b) growing the non-human organism or a part thereof under conditions which permit the production of linoleic acid or a composition comprising linoleic acid in said non-human organism or in the culture medium surrounding said non-human organism.

[49440] A further embodiment of the present invention relates to a process for the production of linoleic acid, which comprises
[49441] (a) increasing or generating one or more activities selected from the group consisting of CTP synthetase in an organelle, preferably in plastids or mitochondria, especially in plastids, of a non-human organism or a part thereof, preferably a microorganism, a plant cell, a plant or a part thereof, as compared to a corresponding non-transformed wild type non-human organism or a part thereof; and
[49442] (b) growing the non-human organism or a part thereof under conditions which permit the production of linoleic acid or a composition comprising linoleic acid in said non-human organism or in the culture medium surrounding said non-human organism.

[49443] A further embodiment of the present invention relates to a process for the production of linoleic acid, which comprises
[49444] (a) increasing or generating one or more activities selected from the group consisting of carbamoyl-phosphate synthase subunit in an organelle, preferably in plastids or mitochondria, especially in plastids, of a non-human organism or a part thereof, preferably a microorganism, a plant cell, a plant or a part thereof, as compared to a corresponding non-transformed wild type non-human organism or a part thereof; and
[49445] (b) growing the non-human organism or a part thereof under conditions which permit the production of linoleic acid or a composition comprising linoleic acid in said non-human organism or in the culture medium surrounding said non-human organism.

[49446] A further embodiment of the present invention relates to a process for the production of linoleic acid, which comprises
[49447] (a) increasing or generating one or more activities selected from the group consisting of coproporphyrinogen III oxidase in an organelle, preferably in plastids or mitochondria, especially in plastids, of a non-human organism or a part thereof, preferably a microorganism, a plant cell, a plant or a part thereof, as compared to a corresponding non-transformed wild type non-human organism or a part thereof; and
[49448] (b) growing the non-human organism or a part thereof under conditions which permit the production of linoleic acid or a composition comprising linoleic acid in said non-human organism or in the culture medium surrounding said non-human organism.

[49449] A further embodiment of the present invention relates to a process for the production of linoleic acid, which comprises
[49450] (a) increasing or generating one or more activities selected from the group consisting of cation-transporting ATPase in an organelle, preferably in plastids or mitochondria, especially in plastids, of a non-human organism or a part thereof, preferably a microorganism, a plant cell, a plant or a part thereof, as compared to a corresponding non-transformed wild type non-human organism or a part thereof; and
[49451] (b) growing the non-human organism or a part thereof under conditions which permit the production of linoleic acid or a composition comprising linoleic acid in said non-human organism or in the culture medium surrounding said non-human organism.

[49452] A further embodiment of the present invention relates to a process for the production of linoleic acid, which comprises
[49453] (a) increasing or generating one or more activities selected from the group consisting of oxidoreductase in an organelle, preferably in plastids or mitochondria, especially in plastids, of a non-human organism or a part thereof, preferably a microorganism, a plant cell, a plant or a part thereof, as compared to a corresponding non-transformed wild type non-human organism or a part thereof; and
[49454] (b) growing the non-human organism or a part thereof under conditions which permit the production of linoleic acid or a composition comprising linoleic acid in said non-human organism or in the culture medium surrounding said non-human organism.

[49455] A further embodiment of the present invention relates to a process for the production of linoleic acid, which comprises
[49456] (a) increasing or generating one or more activities selected from the group consisting of tryptophan synthase alpha chain in an organelle, preferably in plastids or mitochondria, especially in plastids, of a non-human organism or a part thereof, preferably a microorganism, a plant cell, a plant or a part thereof, as compared to a corresponding non-transformed wild type non-human organism or a part thereof; and
[49457] (b) growing the non-human organism or a part thereof under conditions which permit the production of linoleic acid or a composition comprising linoleic acid in said non-human organism or in the culture medium surrounding said non-human organism.

[49458] A further embodiment of the present invention relates to a process for the production of linoleic acid, which comprises
[49459] (a) increasing or generating one or more activities selected from the group consisting of aromatic acid decarboxylase in an organelle, preferably in plastids or mitochondria, especially in plastids, of a non-human organism or a part thereof, preferably a microorganism, a plant cell, a plant or a part thereof, as compared to a corresponding non-transformed wild type non-human organism or a part thereof; and
[49460] (b) growing the non-human organism or a part thereof under conditions which permit the production of linoleic acid or a composition comprising linoleic acid in said non-human organism or in the culture medium surrounding said non-human organism.

[49461] A further embodiment of the present invention relates to a process for the production of linoleic acid, which comprises
[49462] (a) increasing or generating one or more activities selected from the group consisting of phosphate import ATP-binding protein in an organelle, preferably in plastids or mitochondria, especially in plastids, of a non-human organism or a part thereof, preferably a microorganism, a plant cell, a plant or a part thereof, as compared to a corresponding non-transformed wild type non-human organism or a part thereof; and
[49463] (b) growing the non-human organism or a part thereof under conditions which permit the production of linoleic acid or a composition comprising linoleic acid in said non-human organism or in the culture medium surrounding said non-human organism.

[49464] A further embodiment of the present invention relates to a process for the production of linoleic acid, which comprises
[49465] (a) increasing or generating one or more activities selected from the group consisting of gamma-glutamyltranspeptidase in an organelle, preferably in plastids or mitochondria, especially in plastids, of a non-human organism or a part thereof, preferably a microorganism, a plant cell, a plant or a part thereof, as compared to a corresponding non-transformed wild type non-human organism or a part thereof; and
[49466] (b) growing the non-human organism or a part thereof under conditions which permit the production of linoleic acid or a composition comprising linoleic acid in said non-human organism or in the culture medium surrounding said non-human organism.

[49467] A further embodiment of the present invention relates to a process for the production of linoleic acid, which comprises
[49468] (a) increasing or generating one or more activities selected from the group consisting of arginine decarboxylase in an organelle, preferably in plastids or mitochondria, especially in plastids, of a non-human organism or a part thereof, preferably a microorganism, a plant cell, a plant or a part thereof, as compared to a corresponding non-transformed wild type non-human organism or a part thereof; and
[49469] (b) growing the non-human organism or a part thereof under conditions which permit the production of linoleic acid or a composition comprising linoleic acid in said non-human organism or in the culture medium surrounding said non-human organism.

[49470] A further embodiment of the present invention relates to a process for the production of linoleic acid, which comprises
[49471] (a) increasing or generating one or more activities selected from the group consisting of fatty acid desaturase in an organelle, preferably in plastids or mitochondria, especially in plastids, of a non-human organism or a part thereof, preferably a microorganism, a plant cell, a plant or a part thereof, as compared to a corresponding non-transformed wild type non-human organism or a part thereof; and
[49472] (b) growing the non-human organism or a part thereof under conditions which permit the production of linoleic acid or a composition comprising linoleic acid in said non-human organism or in the culture medium surrounding said non-human organism.

[49473] A further embodiment of the present invention relates to a process for the production of linoleic acid, which comprises
[49474] (a) increasing or generating one or more activities selected from the group consisting of threonine dehydratase in an organelle, preferably in plastids or mitochondria, especially in plastids, of a non-human organism or a part thereof, preferably a microorganism, a plant cell, a plant or a part thereof, as compared to a corresponding non-transformed wild type non-human organism or a part thereof; and
[49475] (b) growing the non-human organism or a part thereof under conditions which permit the production of linoleic acid or a composition comprising linoleic acid in said non-human organism or in the culture medium surrounding said non-human organism.

[49476] A further embodiment of the present invention relates to a process for the production of linoleic acid, which comprises
[49477] (a) increasing or generating one or more activities selected from the group consisting of TTC0490-protein in an organelle, preferably in plastids or mitochondria, especially in plastids, of a non-human organism or a part thereof, preferably a microorganism, a plant cell, a plant or a part thereof, as compared to a corresponding non-transformed wild type non-human organism or a part thereof; and
[49478] (b) growing the non-human organism or a part thereof under conditions which permit the production of linoleic acid or a composition comprising linoleic acid in said non-human organism or in the culture medium surrounding said non-human organism.

[49479] A further embodiment of the present invention relates to a process for the production of linoleic acid, which comprises
[49480] (a) increasing or generating one or more activities selected from the group consisting of metal-dependent hydrolase in an organelle, preferably in plastids or mitochondria, especially in plastids, of a non-human organism or a part thereof, preferably a microorganism, a plant cell, a plant or a part thereof, as compared to a corresponding non-transformed wild type non-human organism or a part thereof; and
[49481] (b) growing the non-human organism or a part thereof under conditions which permit the production of linoleic acid or a composition comprising linoleic acid in said non-human organism or in the culture medium surrounding said non-human organism.

[49482] A further embodiment of the present invention relates to a process for the production of linoleic acid, which comprises
[49483] (a) increasing or generating one or more activities selected from the group consisting of multiple antibiotic resistance protein in an organelle, preferably in plastids or mitochondria, especially in plastids, of a non-human organism or a part thereof, preferably a microorganism, a plant cell, a plant or a part thereof, as compared to a corresponding non-transformed wild type non-human organism or a part thereof; and
[49484] (b) growing the non-human organism or a part thereof under conditions which permit the production of linoleic acid or a composition comprising linoleic acid in said non-human organism or in the culture medium surrounding said non-human organism.

[49485] A further embodiment of the present invention relates to a process for the production of linoleic acid, which comprises
[49486] (a) increasing or generating one or more activities selected from the group consisting of glycin cleavage system protein in an organelle, preferably in plastids or mitochondria, especially in plastids, of a non-human organism or a part thereof, preferably a microorganism, a plant cell, a plant or a part thereof, as compared to a corresponding non-transformed wild type non-human organism or a part thereof; and
[49487] (b) growing the non-human organism or a part thereof under conditions which permit the production of linoleic acid or a composition comprising linoleic acid in said non-human organism or in the culture medium surrounding said non-human organism.

[49488] A further embodiment of the present invention relates to a process for the production of linoleic acid, which comprises
[49489] (a) increasing or generating one or more activities selected from the group consisting of protein kinase in an organelle, preferably in plastids or mitochondria, especially in plastids, of a non-human organism or a part thereof, preferably a microorganism, a plant cell, a plant or a part thereof, as compared to a corresponding non-transformed wild type non-human organism or a part thereof; and
[49490] (b) growing the non-human organism or a part thereof under conditions which permit the production of linoleic acid or a composition comprising linoleic acid in said non-human organism or in the culture medium surrounding said non-human organism.

[49491] A further embodiment of the present invention relates to a process for the production of linoleic acid, which comprises
[49492] (a) increasing or generating one or more activities selected from the group consisting of aspartate-semialdehyde dehydrogenase in an organelle, preferably in plastids or mitochondria, especially in plastids, of a non-human organism or a part thereof, preferably a microorganism, a plant cell, a plant or a part thereof, as compared to a corresponding non-transformed wild type non-human organism or a part thereof; and
[49493] (b) growing the non-human organism or a part thereof under conditions which permit the production of linoleic acid or a composition comprising linoleic acid in said non-human organism or in the culture medium surrounding said non-human organism.

[49494] A further embodiment of the present invention relates to a process for the production of linoleic acid, which comprises
[49495] (a) increasing or generating one or more activities selected from the group consisting of ydr507c-protein in an organelle, preferably in plastids or mitochondria, especially in plastids, of a non-human organism or a part thereof, preferably a microorganism, a plant cell, a plant or a part thereof, as compared to a corresponding non-transformed wild type non-human organism or a part thereof; and
[49496] (b) growing the non-human organism or a part thereof under conditions which permit the production of linoleic acid or a composition comprising linoleic acid in said non-human organism or in the culture medium surrounding said non-human organism.

[49497] A further embodiment of the present invention relates to a process for the production of linoleic acid, which comprises
[49498] (a) increasing or generating one or more activities selected from the group consisting of YGR104C-protein in an organelle, preferably in plastids or mitochondria, especially in plastids, of a non-human organism or a part thereof, preferably a microorganism, a plant cell, a plant or a part thereof, as compared to a corresponding non-transformed wild type non-human organism or a part thereof; and
[49499] (b) growing the non-human organism or a part thereof under conditions which permit the production of linoleic acid or a composition comprising linoleic acid in said non-human organism or in the culture medium surrounding said non-human organism.

[49500] A further embodiment of the present invention relates to a process for the production of linoleic acid, which comprises
[49501] (a) increasing or generating one or more activities selected from the group consisting of DnaJ-like chaperone in an organelle, preferably in plastids or mitochondria, especially in plastids, of a non-human organism or a part thereof, preferably a microorganism, a plant cell, a plant or a part thereof, as compared to a corresponding non-transformed wild type non-human organism or a part thereof; and
[49502] (b) growing the non-human organism or a part thereof under conditions which permit the production of linoleic acid or a composition comprising linoleic acid in said non-human organism or in the culture medium surrounding said non-human organism.

[49503] A further embodiment of the present invention relates to a process for the production of linoleic acid, which comprises
[49504] (a) increasing or generating one or more activities selected from the group consisting of aconitate hydratase in an organelle, preferably in plastids or mitochondria, especially in plastids, of a non-human organism or a part thereof, preferably a microorganism, a plant cell, a plant or a part thereof, as compared to a corresponding non-transformed wild type non-human organism or a part thereof; and
[49505] (b) growing the non-human organism or a part thereof under conditions which permit the production of linoleic acid or a composition comprising linoleic acid in said non-human organism or in the culture medium surrounding said non-human organism.

[49506] A further embodiment of the present invention relates to a process for the production of linoleic acid, which comprises
[49507] (a) increasing or generating one or more activities selected from the group consisting of molecular chaperone in an organelle, preferably in plastids or mitochondria, especially in plastids, of a non-human organism or a part thereof, preferably a microorganism, a plant cell, a plant or a part thereof, as compared to a corresponding non-transformed wild type non-human organism or a part thereof; and
[49508] (b) growing the non-human organism or a part thereof under conditions which permit the production of linoleic acid or a composition comprising linoleic acid in said non-human organism or in the culture medium surrounding said non-human organism.

[49509] A further embodiment of the present invention relates to a process for the production of linoleic acid, which comprises
[49510] (a) increasing or generating one or more activities selected from the group consisting of ATPase epsilon subunit in an organelle, preferably in plastids or mitochondria, especially in plastids, of a non-human organism or a part thereof, preferably a microorganism, a plant cell, a plant or a part thereof, as compared to a corresponding non-transformed wild type non-human organism or a part thereof; and
[49511] (b) growing the non-human organism or a part thereof under conditions which permit the production of linoleic acid or a composition comprising linoleic acid in said non-human organism or in the culture medium surrounding said non-human organism.

[49512] A further embodiment of the present invention relates to a process for the production of linoleic acid, which comprises
[49513] (a) increasing or generating one or more activities selected from the group consisting of glucose-6-phosphate 1-dehydrogenase in an organelle, preferably in plastids or mitochondria, especially in plastids, of a non-human organism or a part thereof, preferably a microorganism, a plant cell, a plant or a part thereof, as compared to a corresponding non-transformed wild type non-human organism or a part thereof; and
[49514] (b) growing the non-human organism or a part thereof under conditions which permit the production of linoleic acid or a composition comprising linoleic acid in said non-human organism or in the culture medium surrounding said non-human organism.

[49515] A further embodiment of the present invention relates to a process for the production of linoleic acid, which comprises
[49516] (a1) increasing or generating the activity of a polypeptide comprising a polypeptide as depicted in the respective line in column 5 or 8 of Table II, application no. 8, or a homolog or fragment thereof, a consensus sequence or at least one polypeptide motif as depicted in column 8 of Table IV, application no. 8; or
[49517] increasing or generating the activity of an expression product of one or more nucleic acid molecule(s) comprising a polynucleotide as depicted in the respective line in column 5 or 8 of Table I, application no. 8, preferably the coding region thereof, or a homolog or a fragment thereof;
[49518] in an organelle, preferably in plastids or mitochondria, especially in plastids, in a non-human organism or a part thereof; preferably a microorganism, a plant cell, a plant or a part thereof, as compared to a corresponding non-transformed wild type non-human organism or a part thereof; or
[49519] (a2) increasing or generating the activity of a polypeptide comprising a polypeptide as depicted in the respective line in column 5 or 8 of Table II, application no. 8, or a homolog or a fragment thereof, a consensus sequence or at least one polypeptide motif as depicted in the respective line in column 8 of Table IV, application no. 8, which is joined to a transit peptide; or
[49520] increasing or generating the activity of an expression product of one or more nucleic acid molecule(s) comprising a polynucleotide as depicted in the respective line in column 5 or 8 of Table I, application no. 8, preferably the coding region thereof, or a homolog or a fragment thereof, which is joined to a nucleic acid sequence encoding an organelle localization sequence, preferably a plastid or a mitochondrion localization sequence, especially a plastid localization sequence;
[49521] in a non-human organism or a part thereof; preferably a microorganism, a plant cell, a plant or a part thereof, as compared to a corresponding non-transformed wild type non-human organism or a part thereof; or
[49522] (a3) increasing or generating the activity of a polypeptide comprising a polypeptide as depicted in the respective line in column 5 or 8 of Table II, application no. 8, or a homolog or a fragment thereof, a consensus sequence or at least one polypeptide motif as depicted in the respective line in column 8 of Table IV, application no. 8; or increasing or generating the activity of an expression product of one or more nucleic acid molecule(s) comprising a polynucleotide as depicted in the respective line in column 5 or 8 of Table I, application no. 8, preferably the coding region thereof, or a homolog or a fragment thereof;
[49523] in an organelle, preferably in plastids or mitochondria, especially in plastids, in a non-human organism or a part thereof; preferably a microorganism, a plant cell, a plant or a part thereof, through transformation of the organelle, as compared to a corresponding non-transformed wild type non-human organism or a part thereof;
[49524] and
[49525] (b) growing the non-human organism under conditions which permit the production of linoleic acid, or a composition comprising linoleic acid in said non-human organism or in the culture medium surrounding said non-human organism.

[49526] Accordingly, the present invention relates to a process for the production of linoleic acid, which comprises
[49527] (a) increasing or generating the activity of a chlorophyllase in the cytosol of a cell of a non-human organism or a part thereof, preferably a microorganism, a plant cell, a plant or a part thereof, as compared to a corresponding non-transformed wild type non-human organism or a part thereof; and
[49528] (b) growing the non-human organism or a part thereof under conditions which permit the production of linoleic acid or a composition comprising linoleic acid in said non-human organism or in the culture medium surrounding said non-human organism.

[49529] Accordingly, the present invention relates to a process for the production of linoleic acid, which comprises
[49530] (a) increasing or generating the activity of a At1g19800-protein in the cytosol of a cell of a non-human organism or a part thereof, preferably a microorganism, a plant cell, a plant or a part thereof, as compared to a corresponding non-transformed wild type non-human organism or a part thereof; and
[49531] (b) growing the non-human organism or a part thereof under conditions which permit the production of linoleic acid or a composition comprising linoleic acid in said non-human organism or in the culture medium surrounding said non-human organism.

[49532] Accordingly, the present invention relates to a process for the production of linoleic acid, which comprises
[49533] (a) increasing or generating the activity of a transcription factor in the cytosol of a cell of a non-human organism or a part thereof, preferably a microorganism, a plant cell, a plant or a part thereof, as compared to a corresponding non-transformed wild type non-human organism or a part thereof; and
[49534] (b) growing the non-human organism or a part thereof under conditions which permit the production of linoleic acid or a composition comprising linoleic acid in said non-human organism or in the culture medium surrounding said non-human organism.

[49535] Accordingly, the present invention relates to a process for the production of linoleic acid, which comprises
[49536] (a) increasing or generating the activity of a pyruvate kinase in the cytosol of a cell of a non-human organism or a part thereof, preferably a microorganism, a plant cell, a plant or a part thereof, as compared to a corresponding non-transformed wild type non-human organism or a part thereof; and
[49537] (b) growing the non-human organism or a part thereof under conditions which permit the production of linoleic acid or a composition comprising linoleic acid in said non-human organism or in the culture medium surrounding said non-human organism.

[49538] Accordingly, the present invention relates to a process for the production of linoleic acid, which comprises
[49539] (a) increasing or generating the activity of a At2g45420-protein in the cytosol of a cell of a non-human organism or a part thereof, preferably a microorganism, a plant cell, a plant or a part thereof, as compared to a corresponding non-transformed wild type non-human organism or a part thereof; and
[49540] (b) growing the non-human organism or a part thereof under conditions which permit the production of linoleic acid or a composition comprising linoleic acid in said non-human organism or in the culture medium surrounding said non-human organism.

[49541] Accordingly, the present invention relates to a process for the production of linoleic acid, which comprises
[49542] (a) increasing or generating the activity of a heat shock transcription factor in the cytosol of a cell of a non-human organism or a part thereof, preferably a microorganism, a plant cell, a plant or a part thereof, as compared to a corresponding non-transformed wild type non-human organism or a part thereof; and
[49543] (b) growing the non-human organism or a part thereof under conditions which permit the production of linoleic acid or a composition comprising linoleic acid in said non-human organism or in the culture medium surrounding said non-human organism.

[49544] Accordingly, the present invention relates to a process for the production of linoleic acid, which comprises
[49545] (a) increasing or generating the activity of a CCAAT-binding transcription factor in the cytosol of a cell of a non-human organism or a part thereof, preferably a microorganism, a plant cell, a plant or a part thereof, as compared to a corresponding non-transformed wild type non-human organism or a part thereof; and
[49546] (b) growing the non-human organism or a part thereof under conditions which permit the production of linoleic acid or a composition comprising linoleic acid in said non-human organism or in the culture medium surrounding said non-human organism.

[49547] Accordingly, the present invention relates to a process for the production of linoleic acid, which comprises
[49548] (a) increasing or generating the activity of a glutaredoxin in the cytosol of a cell of a non-human organism or a part thereof, preferably a microorganism, a plant cell, a plant or a part thereof, as compared to a corresponding non-transformed wild type non-human organism or a part thereof; and
[49549] (b) growing the non-human organism or a part thereof under conditions which permit the production of linoleic acid or a composition comprising linoleic acid in said non-human organism or in the culture medium surrounding said non-human organism.

[49550] Accordingly, the present invention relates to a process for the production of linoleic acid, which comprises
[49551] (a) increasing or generating the activity of a transcription factor in the cytosol of a cell of a non-human organism or a part thereof, preferably a microorganism, a plant cell, a plant or a part thereof, as compared to a corresponding non-transformed wild type non-human organism or a part thereof; and
[49552] (b) growing the non-human organism or a part thereof under conditions which permit the production of linoleic acid or a composition comprising linoleic acid in said non-human organism or in the culture medium surrounding said non-human organism.

[49553] Accordingly, the present invention relates to a process for the production of linoleic acid, which comprises
[49554] (a) increasing or generating the activity of a monothiol glutaredoxin in the cytosol of a cell of a non-human organism or a part thereof, preferably a microorganism, a plant cell, a plant or a part thereof, as compared to a corresponding non-transformed wild type non-human organism or a part thereof; and
[49555] (b) growing the non-human organism or a part thereof under conditions which permit the production of linoleic acid or a composition comprising linoleic acid in said non-human organism or in the culture medium surrounding said non-human organism.

[49556] Accordingly, the present invention relates to a process for the production of linoleic acid, which comprises
[49557] (a) increasing or generating the activity of a monothiol glutaredoxin in the cytosol of a cell of a non-human organism or a part thereof, preferably a microorganism, a plant cell, a plant or a part thereof, as compared to a corresponding non-transformed wild type non-human organism or a part thereof; and
[49558] (b) growing the non-human organism or a part thereof under conditions which permit the production of linoleic acid or a composition comprising linoleic acid in said non-human organism or in the culture medium surrounding said non-human organism.

[49559] Accordingly, the present invention relates to a process for the production of linoleic acid, which comprises
[49560] (a) increasing or generating the activity of a protein phosphatase in the cytosol of a cell of a non-human organism or a part thereof, preferably a microorganism, a plant cell, a plant or a part thereof, as compared to a corresponding non-transformed wild type non-human organism or a part thereof; and
[49561] (b) growing the non-human organism or a part thereof under conditions which permit the production of linoleic acid or a composition comprising linoleic acid in said non-human organism or in the culture medium surrounding said non-human organism.

[49562] Accordingly, the present invention relates to a process for the production of linoleic acid, which comprises
[49563] (a) increasing or generating the activity of a glutaredoxin in the cytosol of a cell of a non-human organism or a part thereof, preferably a microorganism, a plant cell, a plant or a part thereof, as compared to a corresponding non-transformed wild type non-human organism or a part thereof; and
[49564] (b) growing the non-human organism or a part thereof under conditions which permit the production of linoleic acid or a composition comprising linoleic acid in said non-human organism or in the culture medium surrounding said non-human organism.

[49565] Accordingly, the present invention relates to a process for the production of linoleic acid, which comprises
[49566] (a) increasing or generating the activity of a heat shock transcription factor in the cytosol of a cell of a non-human organism or a part thereof, preferably a microorganism, a plant cell, a plant or a part thereof, as compared to a corresponding non-transformed wild type non-human organism or a part thereof; and
[49567] (b) growing the non-human organism or a part thereof under conditions which permit the production of linoleic acid or a composition comprising linoleic acid in said non-human organism or in the culture medium surrounding said non-human organism.

[49568] Accordingly, the present invention relates to a process for the production of linoleic acid, which comprises
[49569] (a) increasing or generating the activity of a protein phosphatase in the cytosol of a cell of a non-human organism or a part thereof, preferably a microorganism, a plant cell, a plant or a part thereof, as compared to a corresponding non-transformed wild type non-human organism or a part thereof; and
[49570] (b) growing the non-human organism or a part thereof under conditions which permit the production of linoleic acid or a composition comprising linoleic acid in said non-human organism or in the culture medium surrounding said non-human organism.

[49571] Accordingly, the present invention relates to a process for the production of linoleic acid, which comprises
[49572] (a) increasing or generating the activity of a oxidoreductase in the cytosol of a cell of a non-human organism or a part thereof, preferably a microorganism, a plant cell, a plant or a part thereof, as compared to a corresponding non-transformed wild type non-human organism or a part thereof; and
[49573] (b) growing the non-human organism or a part thereof under conditions which permit the production of linoleic acid or a composition comprising linoleic acid in said non-human organism or in the culture medium surrounding said non-human organism.

[49574] Accordingly, the present invention relates to a process for the production of linoleic acid, which comprises
[49575] (a) increasing or generating the activity of a transcriptional regulator protein in the cytosol of a cell of a non-human organism or a part thereof, preferably a microorganism, a plant cell, a plant or a part thereof, as compared to a corresponding non-transformed wild type non-human organism or a part thereof; and
[49576] (b) growing the non-human organism or a part thereof under conditions which permit the production of linoleic acid or a composition comprising linoleic acid in said non-human organism or in the culture medium surrounding said non-human organism.

[49577] Accordingly, the present invention relates to a process for the production of linoleic acid, which comprises
[49578] (a) increasing or generating the activity of a beta-hydroxylase in the cytosol of a cell of a non-human organism or a part thereof, preferably a microorganism, a plant cell, a plant or a part thereof, as compared to a corresponding non-transformed wild type non-human organism or a part thereof; and
[49579] (b) growing the non-human organism or a part thereof under conditions which permit the production of linoleic acid or a composition comprising linoleic acid in said non-human organism or in the culture medium surrounding said non-human organism.

[49580] Accordingly, the present invention relates to a process for the production of linoleic acid, which comprises
[49581] (a) increasing or generating the activity of a oxidoreductase in the cytosol of a cell of a non-human organism or a part thereof, preferably a microorganism, a plant cell, a plant or a part thereof, as compared to a corresponding non-transformed wild type non-human organism or a part thereof; and
[49582] (b) growing the non-human organism or a part thereof under conditions which permit the production of linoleic acid or a composition comprising linoleic acid in said non-human organism or in the culture medium surrounding said non-human organism.

[49583] Accordingly, the present invention relates to a process for the production of linoleic acid, which comprises
[49584] (a) increasing or generating the activity of a ThiF family protein in the cytosol of a cell of a non-human organism or a part thereof, preferably a microorganism, a plant cell, a plant or a part thereof, as compared to a corresponding non-transformed wild type non-human organism or a part thereof; and
[49585] (b) growing the non-human organism or a part thereof under conditions which permit the production of linoleic acid or a composition comprising linoleic acid in said non-human organism or in the culture medium surrounding said non-human organism.

[49586] Accordingly, the present invention relates to a process for the production of linoleic acid, which comprises
[49587] (a) increasing or generating the activity of a recombinase A in the cytosol of a cell of a non-human organism or a part thereof, preferably a microorganism, a plant cell, a plant or a part thereof, as compared to a corresponding non-transformed wild type non-human organism or a part thereof; and
[49588] (b) growing the non-human organism or a part thereof under conditions which permit the production of linoleic acid or a composition comprising linoleic acid in said non-human organism or in the culture medium surrounding said non-human organism.

[49589] Accordingly, the present invention relates to a process for the production of linoleic acid, which comprises
[49590] (a) increasing or generating the activity of a hydrolase in the cytosol of a cell of a non-human organism or a part thereof, preferably a microorganism, a plant cell, a plant or a part thereof, as compared to a corresponding non-transformed wild type non-human organism or a part thereof; and
[49591] (b) growing the non-human organism or a part thereof under conditions which permit the production of linoleic acid or a composition comprising linoleic acid in said non-human organism or in the culture medium surrounding said non-human organism.

[49592] Accordingly, the present invention relates to a process for the production of linoleic acid, which comprises
[49593] (a) increasing or generating the activity of a membrane transport protein in the cytosol of a cell of a non-human organism or a part thereof, preferably a microorganism, a plant cell, a plant or a part thereof, as compared to a corresponding non-transformed wild type non-human organism or a part thereof; and
[49594] (b) growing the non-human organism or a part thereof under conditions which permit the production of linoleic acid or a composition comprising linoleic acid in said non-human organism or in the culture medium surrounding said non-human organism.

[49595] Accordingly, the present invention relates to a process for the production of linoleic acid, which comprises
[49596] (a) increasing or generating the activity of a b0801-protein in the cytosol of a cell of a non-human organism or a part thereof, preferably a microorganism, a plant cell, a plant or a part thereof, as compared to a corresponding non-transformed wild type non-human organism or a part thereof; and
[49597] (b) growing the non-human organism or a part thereof under conditions which permit the production of linoleic acid or a composition comprising linoleic acid in said non-human organism or in the culture medium surrounding said non-human organism.

[49598] Accordingly, the present invention relates to a process for the production of linoleic acid, which comprises
[49599] (a) increasing or generating the activity of a 3-oxoacyl-[acyl-carrier-protein] synthase in the cytosol of a cell of a non-human organism or a part thereof, preferably a microorganism, a plant cell, a plant or a part thereof, as compared to a corresponding non-transformed wild type non-human organism or a part thereof; and
[49600] (b) growing the non-human organism or a part thereof under conditions which permit the production of linoleic acid or a composition comprising linoleic acid in said non-human organism or in the culture medium surrounding said non-human organism.

[49601] Accordingly, the present invention relates to a process for the production of linoleic acid, which comprises
[49602] (a) increasing or generating the activity of a outer membrane receptor protein precursor in the cytosol of a cell of a non-human organism or a part thereof, preferably a microorganism, a plant cell, a plant or a part thereof, as compared to a corresponding non-transformed wild type non-human organism or a part thereof; and
[49603] (b) growing the non-human organism or a part thereof under conditions which permit the production of linoleic acid or a composition comprising linoleic acid in said non-human organism or in the culture medium surrounding said non-human organism.

[49604] Accordingly, the present invention relates to a process for the production of linoleic acid, which comprises
[49605] (a) increasing or generating the activity of a b1330-protein in the cytosol of a cell of a non-human organism or a part thereof, preferably a microorganism, a plant cell, a plant or a part thereof, as compared to a corresponding non-transformed wild type non-human organism or a part thereof; and
[49606] (b) growing the non-human organism or a part thereof under conditions which permit the production of linoleic acid or a composition comprising linoleic acid in said non-human organism or in the culture medium surrounding said non-human organism.

[49607] Accordingly, the present invention relates to a process for the production of linoleic acid, which comprises
[49608] (a) increasing or generating the activity of a lipoprotein precursor in the cytosol of a cell of a non-human organism or a part thereof, preferably a microorganism, a plant cell, a plant or a part thereof, as compared to a corresponding non-transformed wild type non-human organism or a part thereof; and
[49609] (b) growing the non-human organism or a part thereof under conditions which permit the production of linoleic acid or a composition comprising linoleic acid in said non-human organism or in the culture medium surrounding said non-human organism.

[49610] Accordingly, the present invention relates to a process for the production of linoleic acid, which comprises
[49611] (a) increasing or generating the activity of a b1470-protein in the cytosol of a cell of a non-human organism or a part thereof, preferably a microorganism, a plant cell, a plant or a part thereof, as compared to a corresponding non-transformed wild type non-human organism or a part thereof; and
[49612] (b) growing the non-human organism or a part thereof under conditions which permit the production of linoleic acid or a composition comprising linoleic acid in said non-human organism or in the culture medium surrounding said non-human organism.

[49613] Accordingly, the present invention relates to a process for the production of linoleic acid, which comprises
[49614] (a) increasing or generating the activity of a Fe—S subunit of oxidoreductase in the cytosol of a cell of a non-human organism or a part thereof, preferably a microorganism, a plant cell, a plant or a part thereof, as compared to a corresponding non-transformed wild type non-human organism or a part thereof; and
[49615] (b) growing the non-human organism or a part thereof under conditions which permit the production of linoleic acid or a composition comprising linoleic acid in said non-human organism or in the culture medium surrounding said non-human organism.

[49616] Accordingly, the present invention relates to a process for the production of linoleic acid, which comprises
[49617] (a) increasing or generating the activity of a acid shock protein in the cytosol of a cell of a non-human organism or a part thereof, preferably a microorganism, a plant cell, a plant or a part thereof, as compared to a corresponding non-transformed wild type non-human organism or a part thereof; and
[49618] (b) growing the non-human organism or a part thereof under conditions which permit the production of linoleic acid or a composition comprising linoleic acid in said non-human organism or in the culture medium surrounding said non-human organism.

[49619] Accordingly, the present invention relates to a process for the production of linoleic acid, which comprises
[49620] (a) increasing or generating the activity of a fumarate hydratase in the cytosol of a cell of a non-human organism or a part thereof, preferably a microorganism, a plant cell, a plant or a part thereof, as compared to a corresponding non-transformed wild type non-human organism or a part thereof; and
[49621] (b) growing the non-human organism or a part thereof under conditions which permit the production of linoleic acid or a composition comprising linoleic acid in said non-human organism or in the culture medium surrounding said non-human organism.

[49622] Accordingly, the present invention relates to a process for the production of linoleic acid, which comprises
[49623] (a) increasing or generating the activity of a electron transport complex protein in the cytosol of a cell of a non-human organism or a part thereof, preferably a microorganism, a plant cell, a plant or a part thereof, as compared to a corresponding non-transformed wild type non-human organism or a part thereof; and
[49624] (b) growing the non-human organism or a part thereof under conditions which permit the production of linoleic acid or a composition comprising linoleic acid in said non-human organism or in the culture medium surrounding said non-human organism.

[49625] Accordingly, the present invention relates to a process for the production of linoleic acid, which comprises
[49626] (a) increasing or generating the activity of a b1670-protein in the cytosol of a cell of a non-human organism or a part thereof, preferably a microorganism, a plant cell, a plant or a part thereof, as compared to a corresponding non-transformed wild type non-human organism or a part thereof; and
[49627] (b) growing the non-human organism or a part thereof under conditions which permit the production of linoleic acid or a composition comprising linoleic acid in said non-human organism or in the culture medium surrounding said non-human organism.

[49628] Accordingly, the present invention relates to a process for the production of linoleic acid, which comprises
[49629] (a) increasing or generating the activity of a b1837-protein in the cytosol of a cell of a non-human organism or a part thereof, preferably a microorganism, a plant cell, a plant or a part thereof, as compared to a corresponding non-transformed wild type non-human organism or a part thereof; and
[49630] (b) growing the non-human organism or a part thereof under conditions which permit the production of linoleic acid or a composition comprising linoleic acid in said non-human organism or in the culture medium surrounding said non-human organism.

[49631] Accordingly, the present invention relates to a process for the production of linoleic acid, which comprises
[49632] (a) increasing or generating the activity of a b2032-protein in the cytosol of a cell of a non-human organism or a part thereof, preferably a microorganism, a plant cell, a plant or a part thereof, as compared to a corresponding non-transformed wild type non-human organism or a part thereof; and
[49633] (b) growing the non-human organism or a part thereof under conditions which permit the production of linoleic acid or a composition comprising linoleic acid in said non-human organism or in the culture medium surrounding said non-human organism.

[49634] Accordingly, the present invention relates to a process for the production of linoleic acid, which comprises
[49635] (a) increasing or generating the activity of a colanic acid biosynthesis protein in the cytosol of a cell of a non-human organism or a part thereof, preferably a microorganism, a plant cell, a plant or a part thereof, as compared to a corresponding non-transformed wild type non-human organism or a part thereof; and
[49636] (b) growing the non-human organism or a part thereof under conditions which permit the production of linoleic acid or a composition comprising linoleic acid in said non-human organism or in the culture medium surrounding said non-human organism.

[49637] Accordingly, the present invention relates to a process for the production of linoleic acid, which comprises
[49638] (a) increasing or generating the activity of a b2099-protein in the cytosol of a cell of a non-human organism or a part thereof, preferably a microorganism, a plant cell, a plant or a part thereof, as compared to a corresponding non-transformed wild type non-human organism or a part thereof; and
[49639] (b) growing the non-human organism or a part thereof under conditions which permit the production of linoleic acid or a composition comprising linoleic acid in said non-human organism or in the culture medium surrounding said non-human organism.

[49640] Accordingly, the present invention relates to a process for the production of linoleic acid, which comprises
[49641] (a) increasing or generating the activity of a b2107-protein in the cytosol of a cell of a non-human organism or a part thereof, preferably a microorganism, a plant cell, a plant or a part thereof, as compared to a corresponding non-transformed wild type non-human organism or a part thereof; and
[49642] (b) growing the non-human organism or a part thereof under conditions which permit the production of linoleic acid or a composition comprising linoleic acid in said non-human organism or in the culture medium surrounding said non-human organism.

[49643] Accordingly, the present invention relates to a process for the production of linoleic acid, which comprises
[49644] (a) increasing or generating the activity of a ABC transporter permease protein in the cytosol of a cell of a non-human organism or a part thereof, preferably a microorganism, a plant cell, a plant or a part thereof, as compared to a corresponding non-transformed wild type non-human organism or a part thereof; and
[49645] (b) growing the non-human organism or a part thereof under conditions which permit the production of linoleic acid or a composition comprising linoleic acid in said non-human organism or in the culture medium surrounding said non-human organism.

[49646] Accordingly, the present invention relates to a process for the production of linoleic acid, which comprises
[49647] (a) increasing or generating the activity of a b2399-protein in the cytosol of a cell of a non-human organism or a part thereof, preferably a microorganism, a plant cell, a plant or a part thereof, as compared to a corresponding non-transformed wild type non-human organism or a part thereof; and
[49648] (b) growing the non-human organism or a part thereof under conditions which permit the production of linoleic acid or a composition comprising linoleic acid in said non-human organism or in the culture medium surrounding said non-human organism.

[49649] Accordingly, the present invention relates to a process for the production of linoleic acid, which comprises
[49650] (a) increasing or generating the activity of a ethanolamine utilization protein in the cytosol of a cell of a non-human organism or a part thereof, preferably a microorganism, a plant cell, a plant or a part thereof, as compared to a corresponding non-transformed wild type non-human organism or a part thereof; and
[49651] (b) growing the non-human organism or a part thereof under conditions which permit the production of linoleic acid or a composition comprising linoleic acid in said non-human organism or in the culture medium surrounding said non-human organism.

[49652] Accordingly, the present invention relates to a process for the production of linoleic acid, which comprises
[49653] (a) increasing or generating the activity of a b2474-protein in the cytosol of a cell of a non-human organism or a part thereof, preferably a microorganism, a plant cell, a plant or a part thereof, as compared to a corresponding non-transformed wild type non-human organism or a part thereof; and
[49654] (b) growing the non-human organism or a part thereof under conditions which permit the production of linoleic acid or a composition comprising linoleic acid in said non-human organism or in the culture medium surrounding said non-human organism.

[49655] Accordingly, the present invention relates to a process for the production of linoleic acid, which comprises
[49656] (a) increasing or generating the activity of a b2613-protein in the cytosol of a cell of a non-human organism or a part thereof, preferably a microorganism, a plant cell, a plant or a part thereof, as compared to a corresponding non-transformed wild type non-human organism or a part thereof; and
[49657] (b) growing the non-human organism or a part thereof under conditions which permit the production of linoleic acid or a composition comprising linoleic acid in said non-human organism or in the culture medium surrounding said non-human organism.

[49658] Accordingly, the present invention relates to a process for the production of linoleic acid, which comprises
[49659] (a) increasing or generating the activity of a b2682-protein in the cytosol of a cell of a non-human organism or a part thereof, preferably a microorganism, a plant cell, a plant or a part thereof, as compared to a corresponding non-transformed wild type non-human organism or a part thereof; and
[49660] (b) growing the non-human organism or a part thereof under conditions which permit the production of linoleic acid or a composition comprising linoleic acid in said non-human organism or in the culture medium surrounding said non-human organism.

[49661] Accordingly, the present invention relates to a process for the production of linoleic acid, which comprises
[49662] (a) increasing or generating the activity of a flavodoxin in the cytosol of a cell of a non-human organism or a part thereof, preferably a microorganism, a plant cell, a plant or a part thereof, as compared to a corresponding non-transformed wild type non-human organism or a part thereof; and
[49663] (b) growing the non-human organism or a part thereof under conditions which permit the production of linoleic acid or a composition comprising linoleic acid in said non-human organism or in the culture medium surrounding said non-human organism.

[49664] Accordingly, the present invention relates to a process for the production of linoleic acid, which comprises
[49665] (a) increasing or generating the activity of a AAS bifunctional protein in the cytosol of a cell of a non-human organism or a part thereof, preferably a microorganism, a plant cell, a plant or a part thereof, as compared to a corresponding non-transformed wild type non-human organism or a part thereof; and
[49666] (b) growing the non-human organism or a part thereof under conditions which permit the production of linoleic acid or a composition comprising linoleic acid in said non-human organism or in the culture medium surrounding said non-human organism.

[49667] Accordingly, the present invention relates to a process for the production of linoleic acid, which comprises
[49668] (a) increasing or generating the activity of a b2849-protein in the cytosol of a cell of a non-human organism or a part thereof, preferably a microorganism, a plant cell, a plant or a part thereof, as compared to a corresponding non-transformed wild type non-human organism or a part thereof; and
[49669] (b) growing the non-human organism or a part thereof under conditions which permit the production of linoleic acid or a composition comprising linoleic acid in said non-human organism or in the culture medium surrounding said non-human organism.

[49670] Accordingly, the present invention relates to a process for the production of linoleic acid, which comprises
[49671] (a) increasing or generating the activity of a xanthine dehydrogenase in the cytosol of a cell of a non-human organism or a part thereof, preferably a microorganism, a plant cell, a plant or a part thereof, as compared to a corresponding non-transformed wild type non-human organism or a part thereof; and
[49672] (b) growing the non-human organism or a part thereof under conditions which permit the production of linoleic acid or a composition comprising linoleic acid in said non-human organism or in the culture medium surrounding said non-human organism.

[49673] Accordingly, the present invention relates to a process for the production of linoleic acid, which comprises
[49674] (a) increasing or generating the activity of a b2909-protein in the cytosol of a cell of a non-human organism or a part thereof, preferably a microorganism, a plant cell, a plant or a part thereof, as compared to a corresponding non-transformed wild type non-human organism or a part thereof; and
[49675] (b) growing the non-human organism or a part thereof under conditions which permit the production of linoleic acid or a composition comprising linoleic acid in said non-human organism or in the culture medium surrounding said non-human organism.

[49676] Accordingly, the present invention relates to a process for the production of linoleic acid, which comprises
[49677] (a) increasing or generating the activity of a phosphotriesterase in the cytosol of a cell of a non-human organism or a part thereof, preferably a microorganism, a plant cell, a plant or a part thereof, as compared to a corresponding non-transformed wild type non-human organism or a part thereof; and
[49678] (b) growing the non-human organism or a part thereof under conditions which permit the production of linoleic acid or a composition comprising linoleic acid in said non-human organism or in the culture medium surrounding said non-human organism.

[49679] Accordingly, the present invention relates to a process for the production of linoleic acid, which comprises
[49680] (a) increasing or generating the activity of a sn-glycerol-3-phosphate transport system permease protein in the cytosol of a cell of a non-human organism or a part thereof, preferably a microorganism, a plant cell, a plant or a part thereof, as compared to a corresponding non-transformed wild type non-human organism or a part thereof; and
[49681] (b) growing the non-human organism or a part thereof under conditions which permit the production of linoleic acid or a composition comprising linoleic acid in said non-human organism or in the culture medium surrounding said non-human organism.

[49682] Accordingly, the present invention relates to a process for the production of linoleic acid, which comprises
[49683] (a) increasing or generating the activity of a threonine efflux protein in the cytosol of a cell of a non-human organism or a part thereof, preferably a microorganism, a plant cell, a plant or a part thereof, as compared to a corresponding non-transformed wild type non-human organism or a part thereof; and
[49684] (b) growing the non-human organism or a part thereof under conditions which permit the production of linoleic acid or a composition comprising linoleic acid in said non-human organism or in the culture medium surrounding said non-human organism.

[49685] Accordingly, the present invention relates to a process for the production of linoleic acid, which comprises
[49686] (a) increasing or generating the activity of a 3-ketoacyl-CoA thiolase in the cytosol of a cell of a non-human organism or a part thereof, preferably a microorganism, a plant cell, a plant or a part thereof, as compared to a corresponding non-transformed wild type non-human organism or a part thereof; and
[49687] (b) growing the non-human organism or a part thereof under conditions which permit the production of linoleic acid or a composition comprising linoleic acid in said non-human organism or in the culture medium surrounding said non-human organism.

[49688] Accordingly, the present invention relates to a process for the production of linoleic acid, which comprises
[49689] (a) increasing or generating the activity of a GM02LC38418-protein in the cytosol of a cell of a non-human organism or a part thereof, preferably a microorganism, a plant cell, a plant or a part thereof, as compared to a corresponding non-transformed wild type non-human organism or a part thereof; and
[49690] (b) growing the non-human organism or a part thereof under conditions which permit the production of linoleic acid or a composition comprising linoleic acid in said non-human organism or in the culture medium surrounding said non-human organism.

[49691] Accordingly, the present invention relates to a process for the production of linoleic acid, which comprises
[49692] (a) increasing or generating the activity of a sll1032-protein in the cytosol of a cell of a non-human organism or a part thereof, preferably a microorganism, a plant cell, a plant or a part thereof, as compared to a corresponding non-transformed wild type non-human organism or a part thereof; and
[49693] (b) growing the non-human organism or a part thereof under conditions which permit the production of linoleic acid or a composition comprising linoleic acid in said non-human organism or in the culture medium surrounding said non-human organism.

[49694] Accordingly, the present invention relates to a process for the production of linoleic acid, which comprises
[49695] (a) increasing or generating the activity of a phosphoribosylformyl glycinamidine synthase subunit in the cytosol of a cell of a non-human organism or a part thereof, preferably a microorganism, a plant cell, a plant or a part thereof, as compared to a corresponding non-transformed wild type non-human organism or a part thereof; and
[49696] (b) growing the non-human organism or a part thereof under conditions which permit the production of linoleic acid or a composition comprising linoleic acid in said non-human organism or in the culture medium surrounding said non-human organism.

[49697] Accordingly, the present invention relates to a process for the production of linoleic acid, which comprises
[49698] (a) increasing or generating the activity of a CTP synthetase in the cytosol of a cell of a non-human organism or a part thereof, preferably a microorganism, a plant cell, a plant or a part thereof, as compared to a corresponding non-transformed wild type non-human organism or a part thereof; and
[49699] (b) growing the non-human organism or a part thereof under conditions which permit the production of linoleic acid or a composition comprising linoleic acid in said non-human organism or in the culture medium surrounding said non-human organism.

[49700] Accordingly, the present invention relates to a process for the production of linoleic acid, which comprises
[49701] (a) increasing or generating the activity of a carbamoyl-phosphate synthase subunit in the cytosol of a cell of a non-human organism or a part thereof, preferably a microorganism, a plant cell, a plant or a part thereof, as compared to a corresponding non-transformed wild type non-human organism or a part thereof; and
[49702] (b) growing the non-human organism or a part thereof under conditions which permit the production of linoleic acid or a composition comprising linoleic acid in said non-human organism or in the culture medium surrounding said non-human organism.

[49703] Accordingly, the present invention relates to a process for the production of linoleic acid, which comprises
[49704] (a) increasing or generating the activity of a coproporphyrinogen III oxidase in the cytosol of a cell of a non-human organism or a part thereof, preferably a microorganism, a plant cell, a plant or a part thereof, as compared to a corresponding non-transformed wild type non-human organism or a part thereof; and
[49705] (b) growing the non-human organism or a part thereof under conditions which permit the production of linoleic acid or a composition comprising linoleic acid in said non-human organism or in the culture medium surrounding said non-human organism.

[49706] Accordingly, the present invention relates to a process for the production of linoleic acid, which comprises
[49707] (a) increasing or generating the activity of a cation-transporting ATPase in the cytosol of a cell of a non-human organism or a part thereof, preferably a microorganism, a plant cell, a plant or a part thereof, as compared to a corresponding non-transformed wild type non-human organism or a part thereof; and
[49708] (b) growing the non-human organism or a part thereof under conditions which permit the production of linoleic acid or a composition comprising linoleic acid in said non-human organism or in the culture medium surrounding said non-human organism.

[49709] Accordingly, the present invention relates to a process for the production of linoleic acid, which comprises
[49710] (a) increasing or generating the activity of a oxidoreductase in the cytosol of a cell of a non-human organism or a part thereof, preferably a microorganism, a plant cell, a plant or a part thereof, as compared to a corresponding non-transformed wild type non-human organism or a part thereof; and
[49711] (b) growing the non-human organism or a part thereof under conditions which permit the production of linoleic acid or a composition comprising linoleic acid in said non-human organism or in the culture medium surrounding said non-human organism.

[49712] Accordingly, the present invention relates to a process for the production of linoleic acid, which comprises
[49713] (a) increasing or generating the activity of a tryptophan synthase alpha chain in the cytosol of a cell of a non-human organism or a part thereof, preferably a microorganism, a plant cell, a plant or a part thereof, as compared to a corresponding non-transformed wild type non-human organism or a part thereof; and
[49714] (b) growing the non-human organism or a part thereof under conditions which permit the production of linoleic acid or a composition comprising linoleic acid in said non-human organism or in the culture medium surrounding said non-human organism.

[49715] Accordingly, the present invention relates to a process for the production of linoleic acid, which comprises
[49716] (a) increasing or generating the activity of a aromatic acid decarboxylase in the cytosol of a cell of a non-human organism or a part thereof, preferably a microorganism, a plant cell, a plant or a part thereof, as compared to a corresponding non-transformed wild type non-human organism or a part thereof; and
[49717] (b) growing the non-human organism or a part thereof under conditions which permit the production of linoleic acid or a composition comprising linoleic acid in said non-human organism or in the culture medium surrounding said non-human organism.

[49718] Accordingly, the present invention relates to a process for the production of linoleic acid, which comprises
[49719] (a) increasing or generating the activity of a phosphate import ATP-binding protein in the cytosol of a cell of a non-human organism or a part thereof, preferably a microorganism, a plant cell, a plant or a part thereof, as compared to a corresponding non-transformed wild type non-human organism or a part thereof; and
[49720] (b) growing the non-human organism or a part thereof under conditions which permit the production of linoleic acid or a composition comprising linoleic acid in said non-human organism or in the culture medium surrounding said non-human organism.

[49721] Accordingly, the present invention relates to a process for the production of linoleic acid, which comprises
[49722] (a) increasing or generating the activity of a gamma-glutamyltranspeptidase in the cytosol of a cell of a non-human organism or a part thereof, preferably a microorganism, a plant cell, a plant or a part thereof, as compared to a corresponding non-transformed wild type non-human organism or a part thereof; and
[49723] (b) growing the non-human organism or a part thereof under conditions which permit the production of linoleic acid or a composition comprising linoleic acid in said non-human organism or in the culture medium surrounding said non-human organism.

[49724] Accordingly, the present invention relates to a process for the production of linoleic acid, which comprises
[49725] (a) increasing or generating the activity of a arginine decarboxylase in the cytosol of a cell of a non-human organism or a part thereof, preferably a microorganism, a plant cell, a plant or a part thereof, as compared to a corresponding non-transformed wild type non-human organism or a part thereof; and
[49726] (b) growing the non-human organism or a part thereof under conditions which permit the production of linoleic acid or a composition comprising linoleic acid in said non-human organism or in the culture medium surrounding said non-human organism.

[49727] Accordingly, the present invention relates to a process for the production of linoleic acid, which comprises
[49728] (a) increasing or generating the activity of a fatty acid desaturase in the cytosol of a cell of a non-human organism or a part thereof, preferably a microorganism, a plant cell, a plant or a part thereof, as compared to a corresponding non-transformed wild type non-human organism or a part thereof; and
[49729] (b) growing the non-human organism or a part thereof under conditions which permit the production of linoleic acid or a composition comprising linoleic acid in said non-human organism or in the culture medium surrounding said non-human organism.

[49730] Accordingly, the present invention relates to a process for the production of linoleic acid, which comprises
[49731] (a) increasing or generating the activity of a threonine dehydratase in the cytosol of a cell of a non-human organism or a part thereof, preferably a microorganism, a plant cell, a plant or a part thereof, as compared to a corresponding non-transformed wild type non-human organism or a part thereof; and
[49732] (b) growing the non-human organism or a part thereof under conditions which permit the production of linoleic acid or a composition comprising linoleic acid in said non-human organism or in the culture medium surrounding said non-human organism.

[49733] Accordingly, the present invention relates to a process for the production of linoleic acid, which comprises
[49734] (a) increasing or generating the activity of a TTC0490-protein in the cytosol of a cell of a non-human organism or a part thereof, preferably a microorganism, a plant cell, a plant or a part thereof, as compared to a corresponding non-transformed wild type non-human organism or a part thereof; and
[49735] (b) growing the non-human organism or a part thereof under conditions which permit the production of linoleic acid or a composition comprising linoleic acid in said non-human organism or in the culture medium surrounding said non-human organism.

[49736] Accordingly, the present invention relates to a process for the production of linoleic acid, which comprises
[49737] (a) increasing or generating the activity of a metal-dependent hydrolase in the cytosol of a cell of a non-human organism or a part thereof, preferably a microorganism, a plant cell, a plant or a part thereof, as compared to a corresponding non-transformed wild type non-human organism or a part thereof; and
[49738] (b) growing the non-human organism or a part thereof under conditions which permit the production of linoleic acid or a composition comprising linoleic acid in said non-human organism or in the culture medium surrounding said non-human organism.

[49739] Accordingly, the present invention relates to a process for the production of linoleic acid, which comprises
[49740] (a) increasing or generating the activity of a multiple antibiotic resistance protein in the cytosol of a cell of a non-human organism or a part thereof, preferably a microorganism, a plant cell, a plant or a part thereof, as compared to a corresponding non-transformed wild type non-human organism or a part thereof; and
[49741] (b) growing the non-human organism or a part thereof under conditions which permit the production of linoleic acid or a composition comprising linoleic acid in said non-human organism or in the culture medium surrounding said non-human organism.

[49742] Accordingly, the present invention relates to a process for the production of linoleic acid, which comprises
[49743] (a) increasing or generating the activity of a glycin cleavage system protein in the cytosol of a cell of a non-human organism or a part thereof, preferably a microorganism, a plant cell, a plant or a part thereof, as compared to a corresponding non-transformed wild type non-human organism or a part thereof; and
[49744] (b) growing the non-human organism or a part thereof under conditions which permit the production of linoleic acid or a composition comprising linoleic acid in said non-human organism or in the culture medium surrounding said non-human organism.

[49745] Accordingly, the present invention relates to a process for the production of linoleic acid, which comprises
[49746] (a) increasing or generating the activity of a protein kinase in the cytosol of a cell of a non-human organism or a part thereof, preferably a microorganism, a plant cell, a plant or a part thereof, as compared to a corresponding non-transformed wild type non-human organism or a part thereof; and
[49747] (b) growing the non-human organism or a part thereof under conditions which permit the production of linoleic acid or a composition comprising linoleic acid in said non-human organism or in the culture medium surrounding said non-human organism.

[49748] Accordingly, the present invention relates to a process for the production of linoleic acid, which comprises
[49749] (a) increasing or generating the activity of a aspartate-semialdehyde dehydrogenase in the cytosol of a cell of a non-human organism or a part thereof, preferably a microorganism, a plant cell, a plant or a part thereof, as compared to a corresponding non-transformed wild type non-human organism or a part thereof; and
[49750] (b) growing the non-human organism or a part thereof under conditions which permit the production of linoleic acid or a composition comprising linoleic acid in said non-human organism or in the culture medium surrounding said non-human organism.

[49751] Accordingly, the present invention relates to a process for the production of linoleic acid, which comprises
[49752] (a) increasing or generating the activity of a ydr507c-protein in the cytosol of a cell of a non-human organism or a part thereof, preferably a microorganism, a plant cell, a plant or a part thereof, as compared to a corresponding non-transformed wild type non-human organism or a part thereof; and
[49753] (b) growing the non-human organism or a part thereof under conditions which permit the production of linoleic acid or a composition comprising linoleic acid in said non-human organism or in the culture medium surrounding said non-human organism.

[49754] Accordingly, the present invention relates to a process for the production of linoleic acid, which comprises
[49755] (a) increasing or generating the activity of a YGR104C-protein in the cytosol of a cell of a non-human organism or a part thereof, preferably a microorganism, a plant cell, a plant or a part thereof, as compared to a corresponding non-transformed wild type non-human organism or a part thereof; and
[49756] (b) growing the non-human organism or a part thereof under conditions which permit the production of linoleic acid or a composition comprising linoleic acid in said non-human organism or in the culture medium surrounding said non-human organism.

[49757] Accordingly, the present invention relates to a process for the production of linoleic acid, which comprises
[49758] (a) increasing or generating the activity of a DnaJ-like chaperone in the cytosol of a cell of a non-human organism or a part thereof, preferably a microorganism, a plant cell, a plant or a part thereof, as compared to a corresponding non-transformed wild type non-human organism or a part thereof; and
[49759] (b) growing the non-human organism or a part thereof under conditions which permit the production of linoleic acid or a composition comprising linoleic acid in said non-human organism or in the culture medium surrounding said non-human organism.

[49760] Accordingly, the present invention relates to a process for the production of linoleic acid, which comprises
[49761] (a) increasing or generating the activity of a aconitate hydratase in the cytosol of a cell of a non-human organism or a part thereof, preferably a microorganism, a plant cell, a plant or a part thereof, as compared to a corresponding non-transformed wild type non-human organism or a part thereof; and
[49762] (b) growing the non-human organism or a part thereof under conditions which permit the production of linoleic acid or a composition comprising linoleic acid in said non-human organism or in the culture medium surrounding said non-human organism.

[49763] Accordingly, the present invention relates to a process for the production of linoleic acid, which comprises
[49764] (a) increasing or generating the activity of a molecular chaperone in the cytosol of a cell of a non-human organism or a part thereof, preferably a microorganism, a plant cell, a plant or a part thereof, as compared to a corresponding non-transformed wild type non-human organism or a part thereof; and
[49765] (b) growing the non-human organism or a part thereof under conditions which permit the production of linoleic acid or a composition comprising linoleic acid in said non-human organism or in the culture medium surrounding said non-human organism.

[49766] Accordingly, the present invention relates to a process for the production of linoleic acid, which comprises
[49767] (a) increasing or generating the activity of a ATPase epsilon subunit in the cytosol of a cell of a non-human organism or a part thereof, preferably a microorganism, a plant cell, a plant or a part thereof, as compared to a corresponding non-transformed wild type non-human organism or a part thereof; and
[49768] (b) growing the non-human organism or a part thereof under conditions which permit the production of linoleic acid or a composition comprising linoleic acid in said non-human organism or in the culture medium surrounding said non-human organism.

[49769] Accordingly, the present invention relates to a process for the production of linoleic acid, which comprises
[49770] (a) increasing or generating the activity of a glucose-6-phosphate 1-dehydrogenase in the cytosol of a cell of a non-human organism or a part thereof, preferably a microorganism, a plant cell, a plant or a part thereof, as compared to a corresponding non-transformed wild type non-human organism or a part thereof; and
[49771] (b) growing the non-human organism or a part thereof under conditions which permit the production of linoleic acid or a composition comprising linoleic acid in said non-human organism or in the culture medium surrounding said non-human organism.

[49772] Accordingly, the present invention relates to a process for the production of linoleic acid, which comprises
[49773] (a) increasing or generating the activity of a polypeptide comprising a polypeptide as depicted in the respective line in column 5 or 8 of Table II, application no. 8, or a homolog or a fragment thereof, a consensus sequence or at least one polypeptide motif as depicted in the respective line in column 8 of Table IV, application no. 8; or
[49774] increasing or generating the activity of an expression product of one or more nucleic acid molecule(s) comprising a polynucleotide as depicted in the respective line in column 5 or 8 of Table I, application no. 8, preferably the coding region thereof, or a homolog or a fragment thereof;
[49775] in the cytosol of a cell of a non-human organism or a part thereof; preferably a microorganism, a plant cell, a plant or a part thereof, as compared to a corresponding non-transformed wild type non-human organism or a part thereof; and
[49776] (b) growing the non-human organism under conditions which permit the production of linoleic acid, or a composition comprising linoleic acid in said non-human organism or in the culture medium surrounding said non-human organism.

[49777] In a further embodiment the activity of the polypeptide comprising a polypeptide as depicted in the respective line in column 5 or 8 of Table II, application no. 8, or a homolog or a fragment thereof, a consensus sequence or at least one polypeptide motif as depicted in the respective line in column 8 of Table IV, application no. 8, is increased or generated non-targeted in the above-mentioned process in a microorganism or plant or a part thereof.

[49778] In a further embodiment said polypeptide has the activity of the respective polypeptide represented by a protein comprising a polypeptide as depicted in the respective line in column 5 of Table II, application no. 8.

[49779] In a further embodiment the activity of the expression product of one or more nucleic acid molecule(s) comprising a polynucleotide as depicted in the respective line in column 5 or 8 of Table I, application no. 8, preferably the coding region thereof, or a homolog or a fragment thereof, is increased or generated non-targeted in the above-mentioned process in a microorganism or plant or a part thereof.

[49780] In a further embodiment the activity of the polypeptide comprising a polypeptide as depicted in the respective line in column 5 or 8 of Table II, application no. 8, or a homolog or a fragment thereof, a consensus sequence or at least one polypeptide motif as depicted in the respective line in column 8 of Table IV, application no. 8, is increased or generated in the above-mentioned process in an organelle preferably in plastids or mitochondria, especially in plastids, of a microorganism or plant.

[49781] In a further embodiment said polypeptide has the activity of the respective polypeptide represented by a protein comprising a polypeptide as depicted in the respective line in column 5 of Table II, application no. 8.

[49782] In a further embodiment the activity of the expression product of one or more nucleic acid molecule(s) comprising a polynucleotide as depicted in the respective line in column 5 or 8 of Table I, application no. 8, preferably the coding region thereof, or a homolog or a fragment thereof, is increased or generated in the above-mentioned process in an organelle, preferably in plasids or mitochondria, especially in plastids, of a microorganism or plant.

[49783] In a further embodiment the activity of the polypeptide comprising a polypeptide as depicted in the respective line in column 5 or 8 of Table II, application no. 8, or a homolog or a fragment thereof, a consensus sequence or at least one polypeptide motif as depicted in the respective line in column 8 of Table IV, application no. 8, is increased or generated in the above-mentioned process in the cyctosol of a cell, of a microorganism or plant.

[49784] In a further embodiment said polypeptide has the activity of the respective polypeptide represented by a protein comprising a polypeptide as depicted in the respective line in column 5 of Table II, application no. 8.

[49785] In a further embodiment the activity of the expression product of one or more nucleic acid molecule(s) comprising a polynucleotide as depicted in the respective line in column 5 or 8 of Table I, application no. 8, preferably the coding region thereof, or a homolog or a fragment thereof, is increased or generated in the above-mentioned process in the cytosol of a cell, of a microorganism or plant.

[49786] In a further embodiment of the present invention the process further comprises the step of recovering the fine chemical, which is synthesized by the organism from the organism and/or from the culture medium used for the growth or maintenance of the organism.

[49787] For the purposes of the present invention, as a rule the plural is intended to encompass the singular and vice versa, unless otherwise specified.

[49788] Comprises/comprising and grammatical variations thereof when used in this specification are to be taken to specify the presence of stated features, integers, steps or components or groups thereof, but not to preclude the presence or addition of one or more other features, integers, steps, components or groups thereof.

[49789] The term “Table I” used in this specification is to be taken to specify the content of Table I A and Table I B. The term “Table II” used in this specification is to be taken to specify the content of Table II A and Table II B. The term “Table I A” used in this specification is to be taken to specify the content of Table I A. The term “Table I B” used in this specification is to be taken to specify the content of Table I B. The term “Table II A” used in this specification is to be taken to specify the content of Table II A. The term “Table II B” used in this specification is to be taken to specify the content of Table II B. In one preferred embodiment, the term “Table I” means Table I B. In one preferred embodiment, the term “Table II” means Table II B.

[49790] In a line of Table I related nucleic acid molecules are listed. In column 3 the locus name, often also referred to as gene name, is given, in column 5 the lead sequence ID No. thereto and in column 8 the sequence ID No. of homologues thereof. In the corresponding line of Table II the respective polypeptides are listed. In column 3 the protein name is given (which is according to the common understanding of the skilled person in the art usually used for the gene as well as the polypeptide and therefore identical with the gene name/locus name), in column 5 the (corresponding) lead sequence ID No. thereto and in column 8 the (corresponding) sequence ID No. of homologues thereof.

[49791] In Tables I and II in column 4 information is given from which organism the lead sequence according to column 5 has been identified, in column 7 information is given which fine chemical is generated or increased, and in an especial embodiment in column 6 information is given about non-targeted expression or expression in plastids or mitochondria. Tables III and IV are arranged accordingly whereby in column 8 of Table III primers are listed which can be used to amplify the sequence of the corresponding lead sequence indicated in column 5 of the same line and whereby in column 8 of Table IV consensus and pattern sequences are listed which are shared by the lead sequence as indicated in column 5 of the same line and their homologs listed in the same line in Table II column 8. How the consensus and pattern sequences are determinedis described lateron in the application in more detail.

[49792] The terms “increase”, “raise”, “extend”, “enhance”, “improve” and “amplify” as well as the grammatical versions thereof relate to a corresponding change of a property in a non-human organism, a part of an organism such as a tissue, seed, root, leave, flower, pollen etc. or in a cell and are interchangeable. Preferably, the overall activity in the volume is increased or enhanced in cases if the increase or enhancement is related to the increase or enhancement of an activity of a gene product, independent whether the amount of gene product or the specific activity of the gene product or both is increased or enhanced or whether the amount, stability or translation efficacy of the nucleic acid sequence or gene encoding for the gene product is increased or enhanced.

[49793] Under “change of a property” it is understood that the activity, expression level or amount of a gene product or the metabolite content is changed in a specific volume relative to a corresponding volume of a control, reference or wild type, including the de novo creation of the activity or expression.

[49794] The term “increase” may be directed to a change of said property in the subject of the present invention or only in a part thereof, for example, the change can be found in a compartment of a cell, like an organelle, or in a part of an non-human organism, like plant tissue, plant seed, plant root, pollen, leave, flower etc. but is not detectable in the overall subject, i.e. complete cell or plant, if tested.

[49795] Accordingly, the term “increase” means that the specific activity of a polypeptide or the amount of a compound or of a metabolite, e.g. of a polypeptide, a nucleic acid molecule or an encoding mRNA or DNA or the fine chemical, can be increased in a volume.

[49796] The term “increase” includes that a compound or an activity is introduced into a cell or a subcellular compartment or organelle de novo or that the compound or the activity has not been detectable before, in other words it is “generated”.

[49797] Accordingly, in the following, the term “increasing” also comprises the term “generating” or “stimulating”. The increased activity manifests itself in an increase of the fine chemical.

[49798] The terms “wild type”, “control” or “reference” are exchangeable and can be a cell or a part of a non-human organism such as an organelle like a chloroplast or a tissue, or a non-human organism, in particular a microorganism or a plant, which was not modified or treated according to the herein described process according to the invention. Accordingly, the cell or a part of a non-human organism such as an organelle like a chloroplast or a tissue, or an organism, in particular a microorganism or a plant used as wild type, control or reference corresponds to the cell, non-human organism, microorganism, plant, or a part thereof, as much as possible and is in any other property but in the result of the process of the invention as identical to the subject matter of the invention as possible. Thus, the wild type, control or reference is treated identically or as identical as possible, saying that only conditions or properties might be different which do not influence the quality of the tested property.

[49799] Preferably, any comparison is carried out under analogous conditions. The term “analogous conditions” means that all conditions such as, for example, culture or growing conditions (such as soil, nutrient, water content of the soil, temperature, humidity or surrounding air), or assay conditions (such as buffer composition, temperature, substrates, pathogen strain, concentrations and the like) are kept identical between the experiments to be compared.

[49800] The “reference”, “control” or “wild type” is preferably a subject, e.g. an organelle, a cell, a tissue, an organism, in particular a microorganism or a plant, which was not modified or treated according to the herein described process of the invention and is in any other property as similar to the subject matter of the invention as possible. The reference, control or wild type is in its genome, transcriptome, proteome or metabolome as similar as possible to the subject of the present invention. Preferably, the term “reference-”, “control-” or “wild type-”-organelle, -cell, -tissue or -organism, in particular a microorganism or a plant, relates to an organelle, cell, tissue or organism, in particular a microorganism or a plant, which is nearly genetically identical to the organelle, cell, tissue or organism, in particular a microorganism or plant, or a part thereof, of the present invention, preferably 95%, more preferred are 98%, even more preferred are 99.00%, in particular 99.10%, 99.30%, 99.50%, 99.70%, 99.90%, 99.99%, 99.999% or more. Most preferable the “reference”, “control”, or “wild type” is a subject, e.g. an organelle, a cell, a tissue, an organism, in particular a microorganism or a plant, which is genetically identical to the organism, in particular plant, cell, a tissue or organelle used according to the process of the invention except that the responsible or activity conferring nucleic acid molecules or the gene product encoded by them are amended, manipulated, exchanged or introduced according to the inventive process.

[49801] In case, a control, reference or wild type differing from the subject of the present invention only by not being subject of the process of the invention can not be provided, a control, reference or wild type can be a non-human organism in which the cause for the modulation of an activity conferring the generation/increase of the fine chemical or expression of the nucleic acid molecule of the invention as described herein has been switched back or off, e.g. by knocking out the expression of responsible gene product, e.g. by antisense inhibition, by inactivation of an activator or agonist, by activation of an inhibitor or antagonist, by inhibition through adding inhibitory antibodies, by adding active compounds as e.g. hormones, by introducing negative dominant mutants, etc. A gene production can for example be knocked out by introducing inactivating point mutations, which lead to an enzymatic activity inhibition or a destabilization or an inhibition of the ability to bind to cofactors etc.

[49802] Accordingly, preferred reference subject is the starting subject of the present process of the invention. Preferably, the reference and the subject matter of the invention are compared after standardization and normalization, e.g. to the amount of total RNA, DNA, or protein or activity or expression of reference genes, like housekeeping genes, such as ubiquitin, actin or ribosomal proteins.

[49803] In accordance with the invention, the term “non-human organism” as understood herein relates always to an organism with the exception of a human being, in particular to an animal or a plant or a microorganism. Further, the term “animal” as understood herein relates always to a non-human animal. Preferably the term “non-human organism” shall mean a microorganism, in particular those containing plastids, such as algae, or a plant or the like.

[49804] As used herein, “plant” is meant to include not only a whole plant but also a part thereof i.e., one or more cells, tissues, including for example, leaves, stems, shoots, roots, flowers, fruits, seeds and pollen.

[49805] The term “organelle” according to the invention shall mean for example “mitochondrion” or “plastid”. The term “plastid” according to the invention is intended to include vahous forms of plastids including proplastids, chloroplasts, chromoplasts, gerontoplasts, leucoplasts, amyloplasts, elaioplasts and etioplasts, preferably chloroplasts. They all have as a common ancestor the aforementioned proplasts.

[49806] Unless otherwise specified, the terms “polynucleotides”, “nucleic acid” and “nucleic acid molecule” are interchangeable in the present context. Unless otherwise specified, the terms “peptide”, “polypeptide” and “protein” are interchangeably in the present context. The term “sequence” may relate to polynucleotides, nucleic acids, nucleic acid molecules, peptides, polypeptides and proteins, depending on the context in which the term “sequence” is used. The terms “gene(s)”, “polynucleotide”, “nucleic acid sequence”, “nucleotide sequence”, or “nucleic acid molecule(s)” as used herein refer to a polymeric form of nucleotides of any length, either ribonucleotides or deoxyribonucleotides. The terms refer only to the primary structure of the molecule.

[49807] Thus, the terms “gene(s)”, “polynucleotide”, “nucleic acid sequence”, “nucleotide sequence”, or “nucleic acid molecule(s)” as used herein include double- and single-stranded DNA and/or RNA. They also include known types of modifications, for example, methylation, “caps”, substitutions of one or more of the naturally occurring nucleotides with an analog. Preferably, the DNA or RNA sequence comprises a coding sequence encoding the herein defined polypeptide.

[49808] A “coding sequence” is a nucleotide sequence, which is transcribed into a RNA, e.g. a regulatory RNA, such as a miRNA, a ta-siRNA, cosuppression molecule, an RNAi, a ribozyme, etc. or preferably into a mRNA which is translated into a polypeptide when placed under the control of appropriate regulatory sequences. The boundaries of the coding sequence are determined by a translation start codon at the 5′-terminus and a translation stop codon at the 3′-terminus. A coding sequence can include, but is not limited to mRNA, cDNA, recombinant nucleotide sequences or genomic DNA, while introns may be present as well under certain circumstances. The terms “coding sequence” and “coding region” are interchangeable in the present context.

[49809] As used in the present context a nucleic acid molecule may also encompass the untranslated sequence located at the 3′ and/or at the 5′ end of the coding gene region, for example at least 500, preferably 200, especially preferably 100, nucleotides of the sequence upstream of the 5′ end of the coding region and/or at least 100, preferably 50, especially preferably 20, nucleotides of the sequence downstream of the 3′ end of the coding gene region. In the event for example the antisense, RNAi, snRNA, dsRNA, siRNA, miRNA, ta-siRNA, cosuppression molecule, ribozyme etc. technology is used coding regions as well as the 5′- and/or 3′-regions can advantageously be used.

[49810] However, it is often advantageous only to choose the coding region of a nucleic acid sequence for cloning and expression purposes. Except as not otherwise specified in the sequence listing according to WI PO Standard 25 for a respective CDS usually the coding region of a nucleic acid molecule is depicted at numeric identifier <222>, whereby the coding region starts at the position given by the first number (given in brackets) and ends at the position given by the second number (given in brackets) and thereafter under numeric identifier <400>the respective sequence is disclosed.

[49811] Unless otherwise specified, the term “polypeptide” refers to a polymer of amino acids (amino acid sequence) and does not refer to a specific length of the molecule. Thus, peptides and oligopeptides are included within the definition of polypeptide. This term does also refer to or include post-translational modifications of the polypeptide, for example, glycosylations, acetylations, phosphorylations and the like. Included within the definition are, for example, polypeptides containing one or more analogs of an amino acid (including, for example, unnatural amino acids, etc.), polypeptides with substituted linkages, as well as other modifications known in the art, both naturally occurring and non-naturally occurring. The terms “protein” and “polypeptide” used in this application are interchangeable.

[49812] The term “recovering” means the isolation of the fine chemical in different purities, that means on the one hand harvesting of the biological material, which contains the fine chemical without further purification and on the other hand purities of the fine chemical between 5% and 100% purity, preferred purities are in the range of 10% and 99%. In one embodiment, the purities are at least 20%, 30%, 40%, 50%, 60%, 70%, 80%, 90%, 95% or 99%.

[49813] A “transit peptide” is an amino acid sequence, whose encoding nucleic acid sequence is translated together with the corresponding structural gene. That means the transit peptide is an integral part of the translated protein and forms an amino terminal extension of the protein. Both are translated as so called “preprotein”. In general the transit peptide is cleaved off from the preprotein during or just after import of the protein into the correct cell organelle such as a plastid or mitochondrion to yield the mature protein. The transit peptide ensures correct localization of the mature protein by facilitating the transport of proteins through intracellular membranes. In principle the nucleic acid sequence encoding a transit peptide can be isolated from every organism such as microorganisms such as algae or plants containing plastids, preferably chloroplasts, or mitochondria. Preferred nucleic acid sequences encoding a transit peptide are derived from a nucleic acid sequence encoding a protein finally resided in the plastid or mitochondria, respectively, and stemming from an organism selected from the group consisting of the genera:

Acetabularia, Arabidopsis, Brassica, Capsicum, Chlamydomonas, Cucurbita, Dunaliella, Euglena, Flaveria, Glycine, Helianthus, Hordeum, Lemna, Lolium, Lycopersion, Malus, Medicago, Mesembryanthemum, Nicotiana, Oenotherea, Oryza, Petunia, Phaseolus, Physcomitrella, Pinus, Pisum, Raphanus, Silene, Sinapis, Solanum, Spinacea, Stevia, Synechococcus, Triticum and Zea.

[49814] Advantageously plastidial transit peptides, which are beneficially used in an embodiment of the process of the present invention, are derived from the nucleic acid sequence encoding a protein selected from the group consisting of ribulose bisphosphate carboxylase/oxygenase, 5-enolpyruvyl-shikimate-3-phosphate synthase, acetolactate synthase, chloroplast ribosomal protein CS17, Cs protein, ferredoxin, plastocyanin, ribulose bisphosphate carboxylase activase, tryptophan synthase, acyl carrier protein, plastid chaperonin-60, cytochrome c552, 22-kDA heat shock protein, 33-kDa Oxygen-evolving enhancer protein 1, ATP synthase γ subunit, ATP synthase δ subunit, chlorophyll-a/b-binding proteinII-1, Oxygen-evolving enhancer protein 2, Oxygen-evolving enhancer protein 3, photosystem I: P21, photosystem I: P28, photosystem I: P30, photosystem I: P35, photosystem I: P37, glycerol-3-phosphate acyltransferases, chlorophyll a/b binding protein, CAB2 protein, hydroxymethyl-bilane synthase, pyruvate-orthophosphate dikinase, CAB3 protein, plastid ferritin, ferritin, early light-inducible protein, glutamate-1-semialdehyde aminotransferase, protochlorophyllide reductase, starch-granule-bound amylase synthase, light-harvesting chlorophyll a/b-binding protein of photosystem II, major pollen allergen Lol p 5a, plastid CIpB ATP-dependent protease, superoxide dismutase, ferredoxin NADP oxidoreductase, 28-kDa ribonucleoprotein, 31-kDa ribonucleoprotein, 33-kDa ribonucleoprotein, acetolactate synthase, ATP synthase CFO subunit 1, ATP synthase CFO subunit 2, ATP synthase CFO subunit 3, ATP synthase CFO subunit 4, cytochrome f, ADP-glucose pyrophosphorylase, glutamine synthase, glutamine synthase 2, carbonic anhydrase, GapA protein, heat-shock-protein hsp21, phosphate translocator, plastid CIpA ATP-dependent protease, plastid ribosomal protein CL24, plastid ribosomal protein CL9, plastid ribosomal protein PsCL18, plastid ribosomal protein PsCL25, DAHP synthase, starch phosphorylase, root acyl carrier protein II, betaine-aldehyde dehydrogenase, GapB protein, glutamine synthetase 2, phosphoribulokinase, nitrite reductase, ribosomal protein L12, ribosomal protein L13, ribosomal protein L21, ribosomal protein L35, ribosomal protein L40, triose phosphate-3-phosphoglyerate-phosphate translocator, ferredoxin-dependent glutamate synthase, glyceraldehyde-3-phosphate dehydrogenase, NADP-dependent malic enzyme and NADP-malate dehydrogenase.

[49815] More preferred the nucleic acid sequence encoding a plastidal transit peptide is derived from a nucleic acid sequence encoding a protein finally resided in the plastid and stemming from an organism selected from the group consisting of the species:

Acetabularia mediterranea, Arabidopsis thaliana, Brassica campestris, Brassica napus, Capsicum annuum, Chlamydomonas reinhardtii, Cucurbita moschata, Dunaliella salina, Dunaliella tertiolecta, Euglena gracilis, Flaveria trinervia, Glycine max, Helianthus annuus, Hordeum vulgare, Lemna gibba, Lolium perenne, Lycopersion esculentum, Malus domestica, Medicago falcata, Medicago sativa, Mesembryanthemum crystallinum, Nicotiana plumbaginifolia, Nicotiana sylvestris, Nicotiana tabacum, Oenotherea hookeri, Oryza sativa, Petunia hybrida, Phaseolus vulgaris, Physcomitrella patens, Pinus tunbergii, Pisum sativum, Raphanus sativus, Silene pratensis, Sinapis alba, Solanum tuberosum, Spinacea oleracea, Stevia rebaudiana, Synechococcus, Synechocystis, Triticum aestivum and Zea mays.

[49816] Even more preferred nucleic acid sequences are encoding plastidal transit peptides as disclosed by von Heijne et al. (Plant Molecular Biology Reporter, 9 (2), 104 (1991)), which are hereby incorporated by reference. Table a shows some examples of the transit peptide sequences disclosed by von Heijne et al. According to the disclosure of the invention especially in the examples the skilled worker is able to link other nucleic acid sequences disclosed by von Heijne et al. to the respective nucleic acid sequences shown in Table I, columns 5 or 8, preferably the respective coding region thereof, or homologs or fragments thereof. Most preferred nucleic acid sequences encoding transit peptides are derived from the genus Spinacia such as chloroplast 30S ribosomal protein PSrp-1, root acyl carrier protein II, acyl carrier protein, ATP synthase: γ subunit, ATP synthase: δ subunit, cytochrom f, ferredoxin I, ferredoxin NADP oxidoreductase (=FNR), nitrite reductase, phosphoribulokinase, plastocyanin or carbonic anhydrase. The skilled worker will recognize that various other nucleic acid sequences encoding transit peptides can easily isolated from plastid-localized proteins, which are expressed from nuclear genes as precursors and are then targeted to plastids. Such transit peptides encoding sequences can be used for the construction of other expression constructs. The transit peptides advantageously used in the inventive process and which are part of the inventive nucleic acid sequences and proteins are typically 20 to 120 amino acids, preferably 25 to 110, 30 to 100 or 35 to 90 amino acids, more preferably 40 to 85 amino acids and most preferably 45 to 80 amino acids in length and function post-translationally to direct the protein to the plastid, preferably to the chloroplast. The nucleic acid sequences encoding such transit peptides are localized upstream of nucleic acid sequence encoding the mature protein. For the correct molecular joining of the transit peptide encoding nucleic acid and the nucleic acid encoding the protein to be targeted it is sometimes necessary to introduce additional base pairs at the joining position, which form restriction enzyme recognition sequences useful for the molecular joining of the different nucleic acid molecules. This procedure might lead to very few additional amino acids at the N-terminal of the mature imported protein, which usually and preferably do not interfere with the protein function. In any case, the additional base pairs at the joining position which form restriction enzyme recognition sequences have to be chosen with care, in order to avoid the formation of stop codons or codons which encode amino acids with a strong influence on protein folding, like e.g. proline. It is preferred that such additional codons encode small n.d. structural flexible amino acids such as glycine or alanine.

[49817] As mentioned above the nucleic acid sequences coding for the proteins as shown in Table II, application no. 8, column 5 or 8, or homologs or fragments thereof, are joined to a nucleic acid sequence encoding a plastidic transit peptide, e.g, if for the nucleic acid molecule in Table I, column 6 the term “plastidic” is indicated. This nucleic acid sequence encoding a transit peptide ensures transport of the protein to the organelle. The nucleic acid sequence of the gene to be expressed and the nucleic acid sequence encoding the transit peptide are operably linked. Therefore the transit peptide encoding sequence is fused in frame to the nucleic acid sequence coding for proteins as shown in Table II, application no. 8, column 5 or 8, or homologs or fragments thereof, e.g., if for the nucleic acid molecule in Table I, column 6 the term “plastidic” is indicated.

[49818] Other plastid transit peptides are disclosed by Schmidt et al. (J. Biol. Chem. 268 (36), 27447 (1993)), Della-Cioppa et al. (Plant. Physiol. 84, 965 (1987)), de Castro Silva Filho et al. (Plant Mol. Biol. 30, 769 (1996)), Zhao et al. (J. Biol. Chem. 270 (11), 6081 (1995)), Römer et al. (Biochem. Biophys. Res. Commun., 196 (3), 1414 (1993)), Keegstra et al. (Annu. Rev. Plant Physiol. Plant Mol. Biol. 40, 471 (1989)), Lubben et al. (Photosynthesis Res. 17, 173 (1988)) and Lawrence et al. (J. Biol. Chem. 272, (33), 20357 (1997)), Cho et al. (Planta 224, 598 (2006)), Lucia et al. (Transgenic R. 17 (4), 529 (2008)), Murayama et al. (Planta 225 (5), 1193 (2007)). A general review about targeting is disclosed by Allison R. Kermode in Critical Reviews in Plant Science 15 (4), 285 (1996).

[49819] Favored plastidal transit peptide sequences, which are used in an embodiment of the inventive process and which form part of the inventive nucleic acid sequences are generally enriched in hydroxylated amino acid residues (serine and threonine), with these two residues generally constituting 20-35% of the total. They often have an amino-terminal region empty of Gly, Pro, and charged residues. Furthermore they have a number of small hydrophobic amino acids such as valine and alanine and generally acidic amino acids are lacking. In addition they generally have a middle region rich in Ser, Thr, Lys and Arg. Overall they have very often a net positive charge.

[49820] Advantageously mitochondrial transit peptides, which are beneficially used in an embodiment of the process of the present invention, are derived from the nucleic acid sequence encoding a protein selected from the group consisting of 22 kDA heat shock protein; 70 kDA heat shock protein; 83 kDA heat shock protein; 40S ribosomal protein S19; 50S ribosomal protein L15; ribosomal protein L29; 22 kDA PSST protein of complex I; 2-oxoacid dehydrogenase family protein; 2-oxoglutarate/malate translocator; 3methyl-2-oxobutanoate hydroxymethyltransferase; 3-Methylcrotonyl-coenzyme A carboxylase (MCCase); 7,8-Dihydropteroate synthase (DHPS)/6-hydroxymethyl-7,8-dihydropterine pyrophosphokinase (HPPK); aconitate hydratase; acyl carrier protein (ACP); ADP/ATP translocase; alanyl-tRNA synthetase; alcohol dehydrogenase (ADH); alternative oxidase (AOX); aminoacyl-tRNA ligase; asparate aminotransferase; ATP synthase alpha subunit; ATP synthase beta subunit; ATP synthase delta subunit; ATP synthase epsilon subunit; ATP synthase gamma subunit; ATP-dependent Clp protease-proteolytic subunit; Chaperonin 60-CPN60; Chaperonin 60 (2)-CPN60-2; Chaperonin 60(1)-CPN60-1; citrate synthase; cytochrome b-c1 complex subunit Rieske FeS Protein; cytochrome c reductase-processing peptidase subunit II; dihydrolipoamide S-acetyltransferase; farnesyl-diphosphate synthase 1; formate dehydrogenase; fumarate hydratase; gamma carbonic anhydrase protein (gammaCA); gamma carbonic anhydrase-like protein 1 (gammaCAL1); gamma carbonic anhydrase-like protein 2 (gammaCAL2); gamma-aminobutyric acid transaminase (GABA-T); glutathione reductase (GR); glycine decarboxylase subunit H; glycine decarboxylase subunit L; glycine decarboxylase subunit P; glycine decarboxylase subunit T; isovaleryl-CoA dehydrogenase (IVD); lipoamide dehydrogenase; malate oxidoreductase; manganese superoxide dismutase (Mn)SOD; methylmalonate-semialdehyde dehydrogenase; mitochondrial-processing peptidase beta subunit (MPP); mitochondrialprocessing peptidase subunit alpha (MPP); monodehydroascorbate reductase (MDHAR; NAD dependent isocitrate dehydrogenase; NAD dependent malate dehydrogenase; NAD-dependent malic enzyme; NAD-dependent malic enzyme 59 kDa isoform; NAD-dependent malic enzyme 62 kDa isoform; NAD-dependent malic enzyme 65 kDa isoform; NADH ubiquinone oxidoreductase 29 kDa subunit; NADH-ubiquinone oxidoreductase 18 kDa subunit; NADH-ubiquinone oxidoreductase 20 kDa subunit; NADH-ubiquinone oxidoreductase 23 kDa subunit; NADH-ubiquinone oxidoreductase 75 kDa subunit; NADP dependent isocitrate dehydrogenase; NADP dependent malate dehydrogenase; nucleoside diphosphate kinase; nucleoside diphosphate kinase III; o-acetylserine (thiol) lyase (OAS-TL) ; propionyl-CoA carboxylase; protoporphyrinogen IX oxidase; pyruvate dehydrogenase E1 component subunit alpha; serine acetyltransferase (SAT); serine hydroxymethyltransferase; succinate dehydrogenase (SDH); succinic semialdehyde dehydrogenase (SSADH); succinyl-CoA ligase (GDP-forming) alpha-chain; succinyl-CoA ligase [GDP-forming] subunit beta; thiosulfate sulfurtransferase; threonyl-tRNA synthetase; trans-2-enoyl-CoA reductase; translocase inner membrane (TIM); translocase outer membrane (TOM); tRNA synthetase class I and ubiquinol cytochrome C oxidoreductase complex.

[49821] More preferred the nucleic acid sequence encoding a mitochondrial transit peptide is derived from a nucleic acid sequence encoding a protein finally resided in the mitochondrion and stemming from an organism selected from the group consisting of the species:

Acetabularia mediterranea, Arabidopsis thaliana, Brassica campestris, Brassica napus, Capsicum annuum, Chlamydomonas reinhardtii, CururbitaCucurbita moschata, Daucus carota, Dunaliella salina, Dunaliella tertiolecta, Euglena gracilis, Flaveria trinervia, Glycine max, Helianthus annuus, Hordeum vulgare, Lactuca sativa, Lemna gibba, Lolium perenne, Lycopersion esculentum, Malus domestica, Medicago falcata, Medicago sativa, Mesembryanthemum crystallinum, Nicotiana plumbaginifolia, Nicotiana sylvestris, Nicotiana tabacum, Oenotherea hookeri, Oryza sativa, Petunia hybrida, Phaseolus vulgaris, Physcomitrella patens, Pinus tunbergii, Pisum sativum, Pyrus pyrifolia, Raphanus sativus, Saccharum officinarum, Silene pratensis, Sinapis alba, Solanum tuberosum, Spinacea oleracea, Stevia rebaudiana, Synechococcus, Synechocystis, Triticum aestivum and Zea mays.

[49822] Even more preferred nucleic acid sequences are encoding mitochondrial transit peptides as disclosed by White and Scandalios (Proc. Natl. Acad. Sci., 86 (10), 3534 (1989)), Cho et al (Plant Physiol. 149, 745 (2009)), Chatre et al (Journal of Experimental Botany, 60 (3), 741 (2009)), Murayama et al (Planta 225 (5), 1193 (2007) and Manzano et al (2006) , which are hereby incorporated by reference. Table b shows some examples of the transit peptide sequences disclosed by White and Scandalios (1989), Cho et al (2009), Chatre et al (2009), Murayama et al (2007) and Manzano et al (2006), Glaser et al (Plant Mol Biol. 38 (1-2), 311 (1998) and Huang et al (Plant Phys. 150, 1272 (2009)). According to the disclosure of the invention especially in the examples the skilled worker is able to link other nucleic acid sequences disclosed by Glaser et al (Plant Mol Biol. 38 (1-2), 311 (1998)) and Huang et al (Plant Phys. 150, 1272 (2009)) to the respective nucleic acid sequences shown in Table I, columns 5 or 8, preferably the coding region thereof, or a homolog or a fragment thereof. Most preferred nucleic acid sequences encoding transit peptides are derived from the genus Arabidopsis thaliana such as mitochondrial malate oxidoreductase, manganese superoxide dismutase (Mn)SOD, translocase inner membrane (TIM), translocase outer membrane (TOM), ATP synthase alpha subunit, ATP synthase beta subunit, ATP synthase gamma subunit, ATP synthase delta subunit, ATP synthase epsilon subunit, ADP/ATP translocase, aconitate hydratase and isovaleryl-CoA dehydrogenase (IVD). The skilled worker will recognize that various other nucleic acid sequences encoding transit peptides can easily isolated from mitochondrion-localized proteins, which are expressed from nuclear genes as precursors and are then targeted to mitochondria. Such transit peptides encoding sequences can be used for the construction of other expression constructs. The transit peptides advantageously used in the inventive process and which are part of the inventive nucleic acid sequences and proteins are typically 20 to 120 amino acids, preferably 25 to 110, 30 to 100 or 35 to 90 amino acids, more preferably 40 to 85 amino acids and most preferably 45 to 80 amino acids in length and function post-translationally to direct the protein to the mitochondrion. The nucleic acid sequences encoding such transit peptides are localized upstream of nucleic acid sequence encoding the mature protein. For the correct molecular joining of the transit peptide encoding nucleic acid and the nucleic acid encoding the protein to be targeted it is sometimes necessary to introduce additional base pairs at the joining position, which forms restriction enzyme recognition sequences useful for the molecular joining of the different nucleic acid molecules. This procedure might lead to very few additional amino acids at the N-terminal of the mature imported protein, which usually and preferably do not interfere with the protein function. In any case, the additional base pairs at the joining position which forms restriction enzyme recognition sequences have to be chosen with care, in order to avoid the formation of stop codons or codons which encode amino acids with a strong influence on protein folding, like e.g. proline. It is preferred that such additional codons encode small n.d. structural flexible amino acids such as glycine or alanine.

[49823] As mentioned above the nucleic acid sequences coding for the proteins as shown in the respective line in Table II, application no. 8, column 5 or 8, or homologs or fragments thereof, are joined to a nucleic acid sequence encoding a mitochondric transit peptide, e.g., if for the respective nucleic acid molecule in Table I, column 6 the term “mitochondrial” is indicated. This nucleic acid sequence encoding a transit peptide ensures transport of the protein to the organelle. The nucleic acid sequence of the gene to be expressed and the nucleic acid sequence encoding the transit peptide are operably linked. Therefore the transit peptide encoding sequence is fused in frame to the nucleic acid sequence coding for proteins as shown in the respective line in Table II, application no. 8, column 5 or 8, or homologs or fragments thereof, e.g., if for the nucleic acid molecule in the respective line in Table I, column 6 the term “mitochondrial” is indicated. (For the avoidance of doubt, the term “mitochondric” and “mitochondrial” are interchangeable.)

[49824] Other mitochondric transit peptides are disclosed by Cho et al. (Plant Physiol. 149, 745 (2009)), Gnanasambandam et al. (Functional Plant Biology 35(2), 166, (2008)), Subbaiah et al. (J. Biol.Chem. 281 (23), 15625 (2006)), Murcha et al. (Plant Physiol. 138, 2134 (2005)), Chatre et al. (Journal of Experimental Botany, 60 (3), 741 (2009)), Millar and Heazlewood (Plant Physiol. 131, 443 (2003)), White and Scandalios (Proc. Natl. Acad. Sci., 86 (10), 3534 (1989)), Laloi et al. (Proc. Natl. Acad. Sci., 98 (24), 14144 (2001)), Barranco-Medina et al. (Plant Physiol. and Biochem. 45, 729 (2007)), Olejnik et al. (FEBS J. 274 (18), 4877 (2007)), Fabre et al. (Plant Cell and Env. 30 (5), 617 (2007)), Murayama et al. (Planta 225 (5), 1193 (2007)), Bathgate et al. (Eur. J. Biochem. 183, 303 (1989)), Winning et al. (Plant J. 2, 763 (1992)), Murcha et al. (Plant Physiol. 143, 199 (2007)), Lehnerer et al. (Botanica Acta, 107, 306 (1994)), Kimura et al. (J. Biol. Chem. 265 (11), 6079 (1990)), Yang et al. (Plant Mol. Biol., 62, 951 (2006)).

[49825] Favored mitochondric transit peptide sequences, which are used in an embodiment of the inventive process and which form part of the inventive nucleic acid sequences are generally enriched in hydroxylated amino acid residues (serine and threonine), with these two residues generally constituting 20-35% of the total. They often have an amino-terminal region empty of Gly, Pro, and charged residues. Furthermore they have a number of small hydrophobic amino acids such as valine and alanine and generally acidic amino acids are lacking.

[49826] In addition they generally have a middle region rich in Ser, Thr, Lys and Arg. Overall they have very often a net positive charge.

[49827] Nucleic acid sequences coding for the transit peptides may be chemically synthesized either in part or wholly according to structure of transit peptide sequences disclosed in the prior art. Said natural or chemically synthesized sequences can be directly linked to the sequences encoding the mature protein or via a linker nucleic acid sequence, which may be typically less than 500 base pairs, preferably less than 450, 400, 350, 300, 250 or 200 base pairs, more preferably less than 150, 100, 90, 80, 70, 60, 50, 40 or 30 base pairs and most preferably less than 25, 20, 15, 12, 9, 6 or 3 base pairs in length and are in frame to the coding sequence. Furthermore favorable nucleic acid sequences encoding transit peptides may comprise sequences derived from more than one biological and/or chemical source and may include a nucleic acid sequence derived from the amino-terminal region of the mature protein, which in its native state is linked to the transit peptide. In a preferred embodiment of the invention said amino-terminal region of the mature protein is typically less than 150 amino acids, preferably less than 140, 130, 120, 110, 100 or 90 amino acids, more preferably less than 80, 70, 60, 50, 40, 35, 30, 25 or 20 amino acids and most preferably less than 19, 18, 17, 16, 15, 14, 13, 12, 11 or 10 amino acids in length. But even shorter or longer stretches are also possible. In addition target sequences, which facilitate the transport of proteins to other cell compartments such as the vacuole, endoplasmic reticulum, golgi complex, glyoxysomes, peroxisomes, mitochondria (in case of a plastidal transit peptide) or plastids, especially chloroplasts (in case of a mitochondric transit peptide) may be also part of the inventive nucleic acid sequence. The proteins translated from said inventive nucleic acid sequences are a kind of fusion proteins that means the nucleic acid sequences encoding the plastidal transit peptide for example the ones shown in Table a, preferably the last one of the Table a are joint to the respective nucleic acid sequences shown in Table I, application no. 8, columns 5 or 8, especially the coding region thereof, or homologs or fragments thereof, in case of nucleic acid sequences being expressed in plastids, and that means the nucleic acid sequences encoding the mitochondric transit peptide for example the ones shown in Table b, preferably the last one of the Table b are joint to the respective nucleic acid sequences shown in Table I, application no. 8, columns 5 or 8, especially the coding region thereof, or homologs or fragments thereof, in case of nucleic acid sequences being expressed in mitochondria. The person skilled in the art is able to join said sequences in a functional manner. Advantageously the transit peptide part is cleaved off from the protein part shown in Table II, application no. 8, columns 5 or 8, or a homolog or fragment thereof, during or after the transport into the organelles, preferably into the plastids or mitochondria, respectively.

[49828] All products of the cleavage of the preferred transit peptide shown in the last line of Table a have preferably the N-terminal amino acid sequences QIA CSS or QIA EFQLTT in front of the start methionine of the respective protein mentioned in Table II, application no. 8, column 5 or 8. or homologs or fragments thereof. Other short amino acid sequences of an range of 1 to 20 amino acids preferable 2 to 15 amino acids, more preferable 3 to 10 amino acids most preferably 4 to 8 amino acids are also possible in front of the start methionine of the protein mentioned in Table II, application no. 8, columns 5 or 8, or homologs or fragments thereof. In case of the amino acid sequence QIA CSS the three amino acids in front of the start methionine are stemming from the LIC (=ligatation independent cloning) cassette. Said short amino acid sequence is preferred in the case of the expression of E. coli genes. In case of the amino acid sequence QIA EFQLTT the six amino acids in front of the start methionine are stemming from the LIC cassette. Said short amino acid sequence is preferred in the case of the expression of S. cerevisiae genes. The skilled worker knowns that other short sequences are also useful in the expression of the respective nucleic acid molecule comprising a polynucleotide as depicted in Table I, application no. 8, column 5 or 8, preferably the coding region thereof, or a homolog or a fragment thereof. Furthermore the skilled worker is aware of the fact that there is not a need for such short sequences in the expression of the genes.

TABLE A
Examples of plastidal transit peptides disclosed by von Heijne et al.

| Trans | | | SEQ | |
|---|---|---|---|---|
| Pep | Organism | Transit Peptide | ID NO. | Reference |
| 1 | Acetabularia | MASIMMNKSVVLSKECAKPLATPK | 1 | Mol. Gen. |
| | mediterranea | VTLNKRGFATTIATKNREMMVWQP | | Genet. 218, |
| | | FNNKMFETFSFLPP | | 445(1989) |
| 2 | Arabidopsis | MAASLQSTATFLQSAKIATAPSRG | 2 | EMBO J. 8, |
| | thaliana | SSHLRSTQAVGKSFGLETSSARLT | | 3187 |
| | | CSFQSDFKDFTGKCSDAVKIAGFA | | (1989) |
| | | LATSALVVSGASAEGAPK | | |
| 3 | Arabidopsis | MAQVSRICNGVQNPSLICNLSKSS | 3 | Mol. Gen. |
| | thaliana | QRKSPLSVSLKTQQHPRAYPISSS | | Genet. 210, |
| | | WGLKKSGMTLIGSELRPLKVMSSV | | 437 (1987) |
| | | STAEKASEIVLQPIREISGLIKLP | | |
| 4 | Arabidopsis | MAAATTTTTTSSSISFSTKPSPSS | 4 | Plant |
| | thaliana | SKSPLPISRFSLPFSLNPNKSSSS | | Physiol. 85, |
| | | SRRRGIKSSSP SS ISAVLNTTTNV | | 1110 |
| | | TTTPSPTKPTKPETF ISRFAPDQP | | (1987) |
| | | RKGA | | |
| 5 | Arabidopsis | MITSSLTCSLQALKLSSPFAHGST | 5 | J. Biol. |
| | thaliana | PLSSLSKPNSFPNHRMPALVPV | | Chem. 265, |
| | | | | 2763 |
| | | | | (1990) |
| 6 | Arabidopsis | MASLLGTSSSAIWASPSLSSPSSK | 6 | EMBO J. |
| | thaliana | PSSSPICFRPGKLFGSKLNAGIQI | | 9,1337 |
| | | RPKKNRSRYHVSVMNVATEINSTE | | (1990) |
| | | QVVGKFDSKKSARPVYPFAAI | | |
| 7 | Arabidopsis | MASTALSSAIVGTSFIRRSPAPISL | 7 | Plant |
| | thaliana | RSLPSANTQSLFGLKSGTARGG | | Physiol. 93, |
| | | RVVAM | | 572 (1990) |
| 8 | Arabidopsis | MAASTMALSSPAFAGKAVNLSPAA | 8 | Nucl. Acids |
| | thaliana | SEVLGSGRVTNRKTV | | Res. 14, |
| | | | | 4051 |
| | | | | (1986) |
| 9 | Arabidopsis | MAAITSATVTIPSFTGLKLAVSSK | 9 | Gene 65, |
| | thaliana | PKTLSTISRSSSATRAPPKLALKS | | 59 (1988) |
| | | SLKDFGVIAVATAASIVLAGNAMA | | |
| | | MEVLLGSDDGSLAFVPSEFT | | |
| 10 | Arabidopsis | MAAAVSTVGAINRAPLSLNGSGSG | 10 | Nucl. Acids |
| | thaliana | AVSAPASTFLGKKVVTVSRFAQSN | | Res. 17, |
| | | KKSNGSFKVLAVKEDKQTDGDRWR | | 2871 |
| | | GLAYDTSDDQIDI | | (1989) |
| 11 | Arabidopsis | MkSSMLSSTAWTSPAQATMVAPF | 11 | Plant Mol. |
| | thaliana | TGLKSSASFPVTRKANNDITSITS | | Biol. 11, |
| | | NGGRVSC | | 745 (1988) |
| 12 | Arabidopsis | MAASGTSATFRASVSSAPSSSSQL | 12 | Proc. Natl. |
| | thaliana | THLKSPFKAVKY TPLPS SRSKSSS | | Acad. Sci. |
| | | FSVSCTIAKDPPVLMAAGSDPALW | | USA 86, |
| | | QRPDSFGRFGKFGGKYVPE | | 4604 |
| | | | | (1989) |
| 13 | Brassica | MSTTFCSSVCMQATSLAATTRISF | 13 | Nucl. Acids |
| | campestris | QKPALVSTTNLSFNLRRSIPTRFS | | Res. 15, |
| | | ISCAAKPETVEKVSKIVKKQLSLK | | 7197 |
| | | DDQKVVAE | | (1987) |
| 14 | Brassica | MATTFSASVSMQATSLATTTRISF | 14 | Eur. J. Bio- |
| | napus | QKPVLVSNHGRTNLSFNLSRTRLSISC | | chem. 174, |
| | | | | 287 (1988) |
| 15 | Chlamydomonas | MQALSSRVNIAAKPQRAQRLVVRA | 15 | Plant Mol. |
| | reinhardtii | EEVKAAPKKEVGPKRGSLVK | | Biol. 12, |
| | | | | 463 (1989) |
| 16 | Cucurbita | MAELIQDKESAQSAATAAAASSGY | 16 | FEBS Lett. |
| | moschata | ERRNEPAHSRKFLEVRSEEELLSCIKK | | 238, 424 |
| | | | | (1988) |
| 17 | Spinacea | MSTINGCLTSISPSRTQLKNTSTL | 17 | J. Biol. |
| | oleracea | RPTFIANSRVNPSSSVPPSLIRNQ | | Chem. 265, |
| | | PVFAAPAPIITPTL | | 5414 |
| | | | | (1990) |
| 18 | Spinacea | MTTAVTAAVSFPSTKTTSLSARCS | 18 | Curr. |
| | oleracea | SVISPDKISYKKVPLYYRNVSATG | | Genet. 13, |
| | | KMGPIRAQIASDVEAPPPAPAKVEKMS | | 517 (1988) |
| 19 | Spinacea | MTTAVTAAVSFPSTKTTSLSARSS | 19 | |
| | oleracea | SVISPDKISYKKVPLYYRNVSATG | | |
| | | KMGPIRA | | |

TABLE b
Examples of mitochondric transit peptides disclosed by White and
Scandalios (1989); Cho et al (2009); Chatre et al (2008);
Murayama et al (2007); Manzano et al (2006):

| Trans | | | SEQ | |
|---|---|---|---|---|
| Pep | Organism | Transit Peptide | ID NO. | Reference |
| 20 | Zea mays | MALRTLASKKVLSFPFGGAGRPLAAAAS | 63 | Proc. Nat. |
| | | ARGV | | Acad.Sci. |
| | | | | 86, 3534 |
| | | | | (1989) |
| 21 | Oryza sativa | MGKAAAVGTAVVVAAAVGVAVVLA | 64 | Plant |
| | | | | Physiol |
| | | | | 149, 745 |
| | | | | (2009) |
| 22 | Oryza sativa | MGKGTVVGTAVVVCAAAAAAVGVAVVVS | 65 | Plant |
| | | | | Physiol |
| | | | | 149, 745 |
| | | | | (2009) |
| 23 | Arabidosis | MIITTHKRDINLLVLQLGAALAVSFAGF | 66 | J. Exp. Bot. |
| | thaliana | LFARFRKNTKR | | 60 (3), 741 |
| | | | | (2009) |
| 24 | Oryza sativa | MAAAAISHLRRGAPRHARALYLSTR- | 67 | Planta 225 |
| | | RFSSSSAAGVAPLAAVAASARR- | | (5), 1193 |
| | | LLSTSVDSGASSGESYKPPLFDPF- | | (2007) |
| | | RAASLASSAPPLESPPIEELPDDA- | | |
| | | TPPPEEEPGLPAPEKDPVATACQHE- | | |
| | | LEGLKAVETVRSRKESTEEKEAWSL- | | |
| | | LGRSVVSYCGTA | | |
| 25 | Arabidosis | MSVSCCCRNLGKTIKKAIPSHHLHL- | 68 | Plant Mol. |
| | thaliana | RSLGGSLYRRRIQSSSMETDLKS | | Bio. 61, |
| | | | | 195 (2006) |

[49829] Alternatively to the targeting of the respective sequences shown in Table II, application no. 8, columns 5 or 8, or homologs or fragments thereof, preferably of sequences in general encoded in the nucleus with the aid of the targeting sequences mentioned for example in Table a alone, Table b alone, or in combination with other targeting sequences preferably into plastids or mitochondria, respectively, the nucleic acids of the invention can directly be introduced into the plastidal or mitochondrial genome. Therefore in a preferred embodiment the respective nucleic acid sequences shown in the respective line in Table I, application no. 8, columns 5 or 8, preferably the coding region thereof, or homologs or fragments thereof, are directly introduced and expressed in plastids e.g., if for the nucleic acid molecule in the respective line in Table I, column 6, the term “plastidic” is indicated, or are directly introduced and expressed in mitochondria e.g., if for the nucleic acid molecule in the respective line in Table I, column 6 the term “mitochondrial” is indicated.

[49830] The term “introduced” in the context of this specification shall mean the insertion of a nucleic acid sequence into the organism by means of a “transfection”, “transduction” or preferably by “transformation”.

[49831] A plastid, such as a chloroplast, or a mitochondrion, has been “transformed” by an exogenous (preferably foreign) nucleic acid sequence if a nucleic acid sequence has been introduced into the plastid or mitochondrion that means that this sequence has crossed the membrane or the membranes of the plastid or of the mitochondrion. The exogenous, preferably foreign, DNA may be integrated (covalently linked) into plastid or mitochondrial DNA making up the genome of the plastid or mitochondrion, or it may remain unintegrated (e.g., by including a chloroplast origin of replication). “Stably” integrated DNA sequences are those, which are inherited through plastid or mitochondrion replication, thereby transferring new plastids or mitochondria, with the features of the integrated DNA sequence to the progeny.

[49832] For expression a person skilled in the art is familiar with different methods to introduce the nucleic acid sequences into different organelles, such as the preferred plastids or mitochondria. Such methods are for example disclosed by Pal Maiga (Annu. Rev. Plant Biol. 55, 289, (2004)), Evans T. (WO 2004/040973), McBride K.E. et al. (U.S. Pat. No. 5,455,818), Daniell H. et al. (U.S. Pat. No. 5,932,479 and U.S. Pat. No. 5,693,507) and Straub J. M. et al. (US 6,781,033). A preferred method is the transformation of microspore-derived hypocotyl or cotyledonary tissue (which are green and thus contain numerous plastids) leaf tissue and afterwards the regeneration of shoots from said transformed plant material on selective medium. As methods for the transformation bombarding of the plant material or the use of independently replicating shuttle vectors are well known by the skilled worker. But also a PEG-mediated transformation of plastids or Agrobacterium transformation with binary vectors are possible. Useful markers for the transformation of plastids are positive selection markers for example the chloramphenicol-, streptomycin-, kanamycin-, neomycin-, amikamycin-, spectinomycin-, triazine- and/or lincomycin-resistance genes. As additional markers named in the literature often as secondary markers, genes coding for the resistance against herbicides such as phosphinothricin (=glufosinate, BASTA™, Liberty™, encoded by the bar gene), glyphosate (=N-(phosphonomethyl)glycine, Roundup Ready™, encoded by the 5-enolpyruvylshikimaete-3-phosphate synthase gene=epsps), sulfonylurea (e.g. =Staple™, encoded by the acetolactate synthase gene), imidazolinone (=IMI, e.g. imazethapyr, imazamox, Clearfield™, encoded by the acetohydroxyacid synthase (AHAS) gene, also known as acetolactate synthase (ALS) gene) or bromoxynil (=Buctril™, encoded by the oxy gene) or genes coding for antibiotics such as hygromycin or G418 are useful for further selection. Such secondary markers are useful in the case when most genome copies are transformed. In addition negative selection markers such as the bacterial cytosine deaminase (encoded by the codA gene) are also useful for the transformation of organelles, especially plastids.

[49833] Thus, in one embodiment, an activity disclosed herein as being conferred by a polypeptide shown in the respective line in Table II, or a homolog or a fragment thereof, is increased or generated by linking the polypeptide disclosed in respective line in Table II, or a homolog or a fragment thereof, or a polypeptide conferring the same said activity with a targeting signal as herein described, if in the respective line in column 6 of Table II the term “plastidic” is listed for said polypeptide. For example, the polypeptide described can be linked to the targeting signal shown in Table a.

[49834] Accordingly, in the method of the invention for producing a transgenic plant with increased fine chemical production as compared to a corresponding, e.g. non-transformed, wild type plant, comprising transforming a non-human organism, preferably a plant cell, a plant or a part thereof, with the mentioned nucleic acid molecule, said nucleic acid molecule selected from said mentioned group encodes for a polypeptide conferring said activity being linked to a targeting signal as mentioned herein, e.g. as mentioned in Table a, e.g. if in the respective line in column 6 of Table II the term “plastidic” is listed for the encoded polypeptide.

[49835] To increase the possibility of identification of transformants it is possible to use reporter genes other then the aforementioned resistance genes or in addition to said genes. Reporter genes are for example β-galactosidase-, β-glucuronidase-(GUS), alkaline phosphatase- and/or green-fluorescent protein-genes (GFP).

[49836] For the process of the present invention it may be of great advantage that by transforming the plastids the intraspecies specific transgene flow is blocked, because a lot of species such as corn, cotton and rice have a strict maternal inheritance of plastids. By placing the respective genes specified in the respective line in Table I, application no. 8, columns 5 or 8, preferably the coding region, or homologs or fragments thereof, e.g. if for the nucleic acid molecule in the respective line in column 6 of Table I the term “plastidic” is indicated, in the plastids of plants, these genes will not be present in the pollen of said plants.

[49837] A further preferred embodiment of the invention relates to the use of so called “chloroplast localization sequences”, in which a first RNA sequence or molecule is capable of transporting or “chaperoning” a second RNA sequence, such as a RNA sequence transcribed from the sequences depicted in the respective line in Table I, application no. 8, columns 5 or 8, preferably the coding region thereof, or a homolog or a fragment thereof, or a sequence encoding a protein, as depicted in the respective line in Table II, application no. 8, columns 5 and 8, or a homolog or a fragment thereof, from an external environment inside a cell or outside a plastid into a chloroplast. In one embodiment the chloroplast localization signal is substantially similar or complementary to a complete or intact viroid sequence. The chloroplast localization signal may be encoded by a DNA sequence, which is transcribed into the chloroplast localization RNA. The term “viroid” refers to a naturally occurring single stranded RNA molecule (Flores, C. R. Acad. Sci. III. 324 (10), 943 (2001)). Viroids usually contain about 200-500 nucleotides and generally exist as circular molecules. Examples of viroids that contain chloroplast localization signals include but are not limited to ASBVd, PLMVd, CChMVd and ELVd. The viroid sequence or a functional part of it can be fused to the sequences depicted in the respective line in Table I, application no. 8, columns 5 or 8, preferably the coding region thereof, or a homolog or a fragment thereof, or a sequence encoding a protein, as depicted in the respective line in Table II, application no. 8, columns 5 or 8, or a homolog or a fragment thereof, in such a manner that the viroid sequence transports a sequence transcribed from a sequence as depicted in the respective line in Table I, application no. 8 columns 5 or 8, preferably the coding region thereof, or a homolog or a fragment thereof, or a sequence encoding a protein as depicted in the respective line in Table II, application no. 8 columns 5 or 8, or a homolog or a fragment thereof, into the chloroplasts, e.g. if for the nucleic acid molecule in column 6 of Table I the term “plastidic” is indicated. A preferred embodiment uses a modified ASBVd (Navarro et al., Virology. 268 (1), 218 (2000)).

[49838] In a further specific embodiment the protein to be expressed in the plastids such as the proteins depicted in the respective line in Table II, application no. 8, columns 5 or 8, or a homolog or a fragment thereof, e.g. if for the nucleic acid molecule in the respective line in column 6 of Table I the term “plastidic” is indicated, are encoded by different nucleic acids. Such a method is disclosed in WO 2004/040973, which shall be incorporated by reference. WO 2004/040973 teaches a method, which relates to the translocation of an RNA corresponding to a gene or gene fragment into the chloroplast by means of a chloroplast localization sequence.

[49839] The genes, which should be expressed in the plant or plant cells, are split into nucleic acid fragments, which are introduced into different compartments in the plant e.g. the nucleus, the plastids and/or mitochondria. Additionally plant cells are described in which the chloroplast contains a ribozyme fused at one end to an RNA encoding a fragment of a protein used in the inventive process such that the ribozyme can trans-splice the translocated fusion RNA to the RNA encoding the gene fragment to form and as the case may be reunite the nucleic acid fragments to an intact mRNA encoding a functional protein for example as disclosed in the respective line in Table II, application no. 8, columns 5 or 8, or a homolog or a fragment thereof.

[49840] In a preferred embodiment of the invention the nucleic acid sequences as shown in the respective line in Table I, application no. 8, columns 5 or 8, preferably the coding region thereof, or homologs or fragments thereof, e.g. if for the nucleic acid molecule in the respective line in column 6 of Table I the term “plastidic” is indicated, used in the inventive process are transformed into plastids, which are metabolically active. Those plastids should preferably maintain at a high copy number in the plant or plant tissue of interest, most preferably the chloroplasts found in green plant tissues, such as leaves or cotyledons or in seeds.

[49841] For a good expression in the plastids the nucleic acid sequences as shown in the respective line in Table I, application no. 8, columns 5 or 8, preferably the coding region thereof, or homologs or fragments thereof, e.g. if for the nucleic acid molecule in the respective line in column 6 of Table I the term “plastidic” is indicated, are introduced into an expression cassette using preferably a promoter and terminater, which are active in plastids preferably a chloroplast promoter. Examples of such promoters include the psbA promoter from the gene from spinach or pea, the rbcL promoter, and the atpB promoter from corn.

[49842] In another embodiment, an activity disclosed herein as being conferred by a polypeptide shown in the respective line in Table II is increased or generated by linking the polypeptide disclosed in the respective line in Table II or a polypeptide conferring the same said activity with an targeting signal as herein described, if in the respective line in column 6 of Table II the term “mitochondrial” is listed for said polypeptide. For example, the polypeptide described can be linked to the targeting signal shown in Table b.

[49843] In these cases the respective organelle is a mitochondrion. However, the remarks made regarding the plastids are applicable in analogy.

[49844] In another embodiment, an activity disclosed herein as being conferred by a polypeptide shown in Table II is increased or generated by the polypeptide disclosed in the respective line in Table II or a polypeptide conferring the same said activity without linking said polypeptide shown in the respective line in Table II to a targeting signal, if in the respective line in column 6 of Table II the term “non-targeted” is listed for said polypeptide.

[49845] For the purposes of the description of the present invention, the terms “non-targeted” shall indicate, that the nucleic acid of the invention is expressed without the addition of a “non-natural transit peptide encoding sequence”. A “non-natural transit peptide encoding sequence” is a sequence which is not a natural part of a nucleic acid of the invention, e.g. of the nucleic acids depicted in the respective line in Table I column 5 or 8, preferably the coding region thereof, or homologs or fragments thereof, but which is rather added by molecular manipulation steps as for example described in the example under “plastid targeted expression”. However, the terms “non-targeted” shall not exclude a targeted localization to any cell compartment for the products of the inventive nucleic acid sequences by their naturally occurring sequence properties within the background of the transgenic organism. The subcellular location of the mature polypeptide derived from the enclosed sequences can be predicted by a skilled person for the organism (plant) by using software tools like TargetP (Emanuelsson et al., J. Mol. Biol. 300, 1005 (2000)), ChloroP (Emanuelsson et al., Protein Science 8, 978 (1999)) or other predictive software tools (Emanuelsson et al., Nature Protocols 2, 953 (2007)).

[49846] Preferably, the process according to the invention further comprises the step of recovering the fine chemical, which is synthesized by the organism from the organism and/or from the culture medium used for the growth or maintenance of the organism. The term “recovering” means the isolation of the fine chemical in different purities, that means on the one hand harvesting of the biological material, which contains the fine chemical without further purification and on the other hand purities of the fine chemical between 5% and 100% purity, preferred purities are in the range of 10% and 99%. In one embodiment, the purities are at least 20%, 30%, 40%, 50%, 60%, 70%, 80%, 90%, 95% or 99%.

[49847] Advantageously the process for the production of the fine chemical linoleic acid leads to an enhanced production of the respective fine chemical. The terms “enhanced” or “increase” mean at least a 10%, 20%, 30%, 40% or 50%, preferably at least 60%, 70%, 80%, 90% or 100%, more preferably 150%, 200%, 300%, 400% or 500% higher production of the respective fine chemical linoleic acid in comparison to the wild-type as defined above, e.g. that means in comparison to a non-human organism without the aforementioned modification of the activity of a protein as shown in the respective line in Table II, application no. 8, column 5 or 8, or a fragment or a homolog thereof. The modification of the activity of a protein as shown in the respective line in Table II, application no. 8, column 5 or 8, or a homolog or a fragment thereof, or their combination can be achieved by joining the protein to a respective transit peptide, e.g. if for the respective encoding nucleic acid molecule in column 6 of Table I the term “plastidic” or “mitochondrial” is indicated.

[49848] Surprisingly it was found, that the transgenic expression of a protein as shown in the respective line in Table II, application no. 8, column 5, especially from the Saccaromyces cerevisiae, E. coli, Arabidopsis thaliana, Azotobacter vinelandii, Brassica napus, Glycine max, Oryza sativa, Physcomitrella patens, Synechocystis sp., Thermus thermophilus, Zea mays in a non-human organism, like a plant or a part thereof, such as Arabidopsis thaliana for example, or a microorganism, conferred a production of or an increase in linoleic acid,respectively, to the transgenic non-human organism as compared to a corresponding non-transformed wild type.

[49849] In one embodiment the transgenic expression of a protein as shown in the respective line in Table II, application no. 8, column 5 or 8, or a homolog or a fragment thereof, especially from the Saccaromyces cerevisiae, E. coli, Arabidopsis thaliana, Azotobacter vinelandii, Brassica napus, Glycine max, Oryza sativa, Physcomitrella patens, Synechocystis sp., Thermus thermophilus, Zea mays in a non-human organism, like a plant or a part thereof, such as Arabidopsis thaliana for example, or a microorganism, confers a production of or an increase in linoleic acid,respectively, to the transgenic non-human organism as compared to a corresponding non-transformed wild type.

[49850] Accordingly, in one embodiment, an increase of linoleic acid in a non-human organism, as compared to a corresponding non-transformed wild type non-human organism, is conferred in the process of the invention, if the activity of a polypeptide showing the activity of a chlorophyllase, or if the activity of the polypeptide At1g19670, preferably represented by SEQ ID NO. 113652, or a homolog or fragment thereof, or if the activity of a polypeptide encoded by a nucleic acid molecule comprising the nucleic acid SEQ ID NO. 113651, preferably the coding region thereof, or a homolog or fragment thereof, e.g. derived from Arabidopsis thaliana, is increased or generated. For example the activity of a nucleic acid molecule or a polypeptide comprising the nucleic acid, preferably the coding region thereof, or polypeptide or the consensus sequence or the polypeptide motif, as depicted in Table I, II or IV, application No. 8, column 5 or 8 in the respective same line as the nucleic acid molecule SEQ ID NO. 113651 or polypeptide SEQ ID NO. 113652, respectively, or a homolog or a fragment thereof, is increased or generated, or if the activity chlorophyllase is increased or generated in a non-human organism, like a microorganism or a plant cell, plant or part thereof, especially with non-targeted localization. For example, an increase of the linoleic acid of at least 1 percent, particularly in a range of 15 to 24-percent is conferred as compared to a corresponding non-transformed wild type non-human organism.

[49851] Accordingly, in one embodiment, an increase of linoleic acid in a non-human organism, as compared to a corresponding non-transformed wild type non-human organism, is conferred in the process of the invention, if the activity of a polypeptide showing the activity of a At1g19800-protein, or if the activity of the polypeptide At1g19800, preferably represented by SEQ ID NO. 17638, or a homolog or fragment thereof, or if the activity of a polypeptide encoded by a nucleic acid molecule comprising the nucleic acid SEQ ID NO. 17637, preferably the coding region thereof, or a homolog or fragment thereof, e.g. derived from Arabidopsis thaliana, is increased or generated. For example the activity of a nucleic acid molecule or a polypeptide comprising the nucleic acid, preferably the coding region thereof, or polypeptide or the consensus sequence or the polypeptide motif, as depicted in Table I, II or IV, application No. 8, column 5 or 8 in the respective same line as the nucleic acid molecule SEQ ID NO. 17637 or polypeptide SEQ ID NO. 17638, respectively, or a homolog or a fragment thereof, is increased or generated, or if the activity At1g19800-protein is increased or generated in a non-human organism, like a microorganism or a plant cell, plant or part thereof, especially with non-targeted localization. For example, an increase of the linoleic acid of at least 1 percent, particularly in a range of 14 to 29-percent is conferred as compared to a corresponding non-transformed wild type non-human organism.

[49852] Accordingly, in one embodiment, an increase of linoleic acid in a non-human organism, as compared to a corresponding non-transformed wild type non-human organism, is conferred in the process of the invention, if the activity of a polypeptide showing the activity of a transcription factor, or if the activity of the polypeptide At1g68320, preferably represented by SEQ ID NO. 1062, or a homolog or fragment thereof, or if the activity of a polypeptide encoded by a nucleic acid molecule comprising the nucleic acid SEQ ID NO. 1061, preferably the coding region thereof, or a homolog or fragment thereof, e.g. derived from Arabidopsis thaliana, is increased or generated. For example the activity of a nucleic acid molecule or a polypeptide comprising the nucleic acid, preferably the coding region thereof, or polypeptide or the consensus sequence or the polypeptide motif, as depicted in Table I, II or IV, application No. 8, column 5 or 8 in the respective same line as the nucleic acid molecule SEQ ID NO. 1061 or polypeptide SEQ ID NO. 1062, respectively, or a homolog or a fragment thereof, is increased or generated, or if the activity transcription factor is increased or generated in a non-human organism, like a microorganism or a plant cell, plant or part thereof, especially with non-targeted localization. For example, an increase of the linoleic acid of at least 1 percent, particularly in a range of 15 to 79-percent is conferred as compared to a corresponding non-transformed wild type non-human organism.

[49853] Accordingly, in one embodiment, an increase of linoleic acid in a non-human organism, as compared to a corresponding non-transformed wild type non-human organism, is conferred in the process of the invention, if the activity of a polypeptide showing the activity of a pyruvate kinase, or if the activity of the polypeptide At2g36580, preferably represented by SEQ ID NO. 113715, or a homolog or fragment thereof, or if the activity of a polypeptide encoded by a nucleic acid molecule comprising the nucleic acid SEQ ID NO. 113714, preferably the coding region thereof, or a homolog or fragment thereof, e.g. derived from Arabidopsis thaliana, is increased or generated. For example the activity of a nucleic acid molecule or a polypeptide comprising the nucleic acid, preferably the coding region thereof, or polypeptide or the consensus sequence or the polypeptide motif, as depicted in Table I, II or IV, application No. 8, column 5 or 8 in the respective same line as the nucleic acid molecule SEQ ID NO. 113714 or polypeptide SEQ ID NO. 113715, respectively, or a homolog or a fragment thereof, is increased or generated, or if the activity pyruvate kinase is increased or generated in a non-human organism, like a microorganism or a plant cell, plant or part thereof, especially with plastidic localization. For example, an increase of the linoleic acid of at least 1 percent, particularly in a range of 14 to 19-percent is conferred as compared to a corresponding non-transformed wild type non-human organism.

[49854] Accordingly, in one embodiment, an increase of linoleic acid in a non-human organism, as compared to a corresponding non-transformed wild type non-human organism, is conferred in the process of the invention, if the activity of a polypeptide showing the activity of a At2g45420-protein, or if the activity of the polypeptide At2g45420, preferably represented by SEQ ID NO. 1624, or a homolog or fragment thereof, or if the activity of a polypeptide encoded by a nucleic acid molecule comprising the nucleic acid SEQ ID NO. 1623, preferably the coding region thereof, or a homolog or fragment thereof, e.g. derived from Arabidopsis thaliana, is increased or generated. For example the activity of a nucleic acid molecule or a polypeptide comprising the nucleic acid, preferably the coding region thereof, or polypeptide or the consensus sequence or the polypeptide motif, as depicted in Table I, II or IV, application No. 8, column 5 or 8 in the respective same line as the nucleic acid molecule SEQ ID NO. 1623 or polypeptide SEQ ID NO. 1624, respectively, or a homolog or a fragment thereof, is increased or generated, or if the activity At2g45420-protein is increased or generated in a non-human organism, like a microorganism or a plant cell, plant or part thereof, especially with non-targeted localization. For example, an increase of the linoleic acid of at least 1 percent, particularly in a range of 16 to 42-percent is conferred as compared to a corresponding non-transformed wild type non-human organism.

[49855] Accordingly, in one embodiment, an increase of linoleic acid in a non-human organism, as compared to a corresponding non-transformed wild type non-human organism, is conferred in the process of the invention, if the activity of a polypeptide showing the activity of a heat shock transcription factor, or if the activity of the polypeptide At3g02990, preferably represented by SEQ ID NO. 68658, or a homolog or fragment thereof, or if the activity of a polypeptide encoded by a nucleic acid molecule comprising the nucleic acid SEQ ID NO. 68657, preferably the coding region thereof, or a homolog or fragment thereof, e.g. derived from Arabidopsis thaliana, is increased or generated. For example the activity of a nucleic acid molecule or a polypeptide comprising the nucleic acid, preferably the coding region thereof, or polypeptide or the consensus sequence or the polypeptide motif, as depicted in Table I, II or IV, application No. 8, column 5 or 8 in the respective same line as the nucleic acid molecule SEQ ID NO. 68657 or polypeptide SEQ ID NO. 68658, respectively, or a homolog or a fragment thereof, is increased or generated, or if the activity heat shock transcription factor is increased or generated in a non-human organism, like a microorganism or a plant cell, plant or part thereof, especially with non-targeted localization. For example, an increase of the linoleic acid of at least 1 percent, particularly in a range of 19 to 30-percent is conferred as compared to a corresponding non-transformed wild type non-human organism.

[49856] Accordingly, in one embodiment, an increase of linoleic acid in a non-human organism, as compared to a corresponding non-transformed wild type non-human organism, is conferred in the process of the invention, if the activity of a polypeptide showing the activity of a CCAAT-binding transcription factor, or if the activity of the polypeptide At3g20910, preferably represented by SEQ ID NO. 22922, or a homolog or fragment thereof, or if the activity of a polypeptide encoded by a nucleic acid molecule comprising the nucleic acid SEQ ID NO. 22921, preferably the coding region thereof, or a homolog or fragment thereof, e.g. derived from Arabidopsis thaliana, is increased or generated. For example the activity of a nucleic acid molecule or a polypeptide comprising the nucleic acid, preferably the coding region thereof, or polypeptide or the consensus sequence or the polypeptide motif, as depicted in Table I, II or IV, application No. 8, column 5 or 8 in the respective same line as the nucleic acid molecule SEQ ID NO. 22921 or polypeptide SEQ ID NO. 22922, respectively, or a homolog or a fragment thereof, is increased or generated, or if the activity CCAAT-binding transcription factor is increased or generated in a non-human organism, like a microorganism or a plant cell, plant or part thereof, especially with non-targeted localization. For example, an increase of the linoleic acid of at least 1 percent, particularly in a range of 14 to 29-percent is conferred as compared to a corresponding non-transformed wild type non-human organism.

[49857] Accordingly, in one embodiment, an increase of linoleic acid in a non-human organism, as compared to a corresponding non-transformed wild type non-human organism, is conferred in the process of the invention, if the activity of a polypeptide showing the activity of a glutaredoxin, or if the activity of the polypeptide At3g62950, preferably represented by SEQ ID NO. 2936, or a homolog or fragment thereof, or if the activity of a polypeptide encoded by a nucleic acid molecule comprising the nucleic acid SEQ ID NO. 2935, preferably the coding region thereof, or a homolog or fragment thereof, e.g. derived from Arabidopsis thaliana, is increased or generated. For example the activity of a nucleic acid molecule or a polypeptide comprising the nucleic acid, preferably the coding region thereof, or polypeptide or the consensus sequence or the polypeptide motif, as depicted in Table I, II or IV, application No. 8, column 5 or 8 in the respective same line as the nucleic acid molecule SEQ ID NO. 2935 or polypeptide SEQ ID NO. 2936, respectively, or a homolog or a fragment thereof, is increased or generated, or if the activity glutaredoxin is increased or generated in a non-human organism, like a microorganism or a plant cell, plant or part thereof, especially with non-targeted localization. For example, an increase of the linoleic acid of at least 1 percent, particularly in a range of 16 to 30-percent is conferred as compared to a corresponding non-transformed wild type non-human organism.

[49858] Accordingly, in one embodiment, an increase of linoleic acid in a non-human organism, as compared to a corresponding non-transformed wild type non-human organism, is conferred in the process of the invention, if the activity of a polypeptide showing the activity of a transcription factor, or if the activity of the polypeptide At4g09960, preferably represented by SEQ ID NO. 109718, or a homolog or fragment thereof, or if the activity of a polypeptide encoded by a nucleic acid molecule comprising the nucleic acid SEQ ID NO. 109717, preferably the coding region thereof, or a homolog or fragment thereof, e.g. derived from Arabidopsis thaliana, is increased or generated. For example the activity of a nucleic acid molecule or a polypeptide comprising the nucleic acid, preferably the coding region thereof, or polypeptide or the consensus sequence or the polypeptide motif, as depicted in Table I, II or IV, application No. 8, column 5 or 8 in the respective same line as the nucleic acid molecule SEQ ID NO. 109717 or polypeptide SEQ ID NO. 109718, respectively, or a homolog or a fragment thereof, is increased or generated, or if the activity transcription factor is increased or generated in a non-human organism, like a microorganism or a plant cell, plant or part thereof, especially with non-targeted localization. For example, an increase of the linoleic acid of at least 1 percent, particularly in a range of 16 to 32-percent is conferred as compared to a corresponding non-transformed wild type non-human organism.

[49859] Accordingly, in one embodiment, an increase of linoleic acid in a non-human organism, as compared to a corresponding non-transformed wild type non-human organism, is conferred in the process of the invention, if the activity of a polypeptide showing the activity of a monothiol glutaredoxin, or if the activity of the polypeptide At4g15660, preferably represented by SEQ ID NO. 23483, or a homolog or fragment thereof, or if the activity of a polypeptide encoded by a nucleic acid molecule comprising the nucleic acid SEQ ID NO. 23482, preferably the coding region thereof, or a homolog or fragment thereof, e.g. derived from Arabidopsis thaliana, is increased or generated. For example the activity of a nucleic acid molecule or a polypeptide comprising the nucleic acid, preferably the coding region thereof, or polypeptide or the consensus sequence or the polypeptide motif, as depicted in Table I, II or IV, application No. 8, column 5 or 8 in the respective same line as the nucleic acid molecule SEQ ID NO. 23482 or polypeptide SEQ ID NO. 23483, respectively, or a homolog or a fragment thereof, is increased or generated, or if the activity monothiol glutaredoxin is increased or generated in a non-human organism, like a microorganism or a plant cell, plant or part thereof, especially with non-targeted localization. For example, an increase of the linoleic acid of at least 1 percent, particularly in a range of 16 to 57-percent is conferred as compared to a corresponding non-transformed wild type non-human organism.

[49860] Accordingly, in one embodiment, an increase of linoleic acid in a non-human organism, as compared to a corresponding non-transformed wild type non-human organism, is conferred in the process of the invention, if the activity of a polypeptide showing the activity of a monothiol glutaredoxin, or if the activity of the polypeptide At4g15670, preferably represented by SEQ ID NO. 3280, or a homolog or fragment thereof, or if the activity of a polypeptide encoded by a nucleic acid molecule comprising the nucleic acid SEQ ID NO. 3279, preferably the coding region thereof, or a homolog or fragment thereof, e.g. derived from Arabidopsis thaliana, is increased or generated. For example the activity of a nucleic acid molecule or a polypeptide comprising the nucleic acid, preferably the coding region thereof, or polypeptide or the consensus sequence or the polypeptide motif, as depicted in Table I, II or IV, application No. 8, column 5 or 8 in the respective same line as the nucleic acid molecule SEQ ID NO. 3279 or polypeptide SEQ ID NO. 3280, respectively, or a homolog or a fragment thereof, is increased or generated, or if the activity monothiol glutaredoxin is increased or generated in a non-human organism, like a microorganism or a plant cell, plant or part thereof, especially with non-targeted localization. For example, an increase of the linoleic acid of at least 1 percent, particularly in a range of 21 to 59-percent is conferred as compared to a corresponding non-transformed wild type non-human organism.

[49861] Accordingly, in one embodiment, an increase of linoleic acid in a non-human organism, as compared to a corresponding non-transformed wild type non-human organism, is conferred in the process of the invention, if the activity of a polypeptide showing the activity of a protein phosphatase, or if the activity of the polypeptide At4g26080, preferably represented by SEQ ID NO. 68850, or a homolog or fragment thereof, or if the activity of a polypeptide encoded by a nucleic acid molecule comprising the nucleic acid SEQ ID NO. 68849, preferably the coding region thereof, or a homolog or fragment thereof, e.g. derived from Arabidopsis thaliana, is increased or generated. For example the activity of a nucleic acid molecule or a polypeptide comprising the nucleic acid, preferably the coding region thereof, or polypeptide or the consensus sequence or the polypeptide motif, as depicted in Table I, II or IV, application No. 8, column 5 or 8 in the respective same line as the nucleic acid molecule SEQ ID NO. 68849 or polypeptide SEQ ID NO. 68850, respectively, or a homolog or a fragment thereof, is increased or generated, or if the activity protein phosphatase is increased or generated in a non-human organism, like a microorganism or a plant cell, plant or part thereof, especially with non-targeted localization. For example, an increase of the linoleic acid of at least 1 percent, particularly in a range of 16 to 23-percent is conferred as compared to a corresponding non-transformed wild type non-human organism.

[49862] Accordingly, in one embodiment, an increase of linoleic acid in a non-human organism, as compared to a corresponding non-transformed wild type non-human organism, is conferred in the process of the invention, if the activity of a polypeptide showing the activity of a glutaredoxin, or if the activity of the polypeptide At4g33040, preferably represented by SEQ ID NO. 4103, or a homolog or fragment thereof, or if the activity of a polypeptide encoded by a nucleic acid molecule comprising the nucleic acid SEQ ID NO. 4102, preferably the coding region thereof, or a homolog or fragment thereof, e.g. derived from Arabidopsis thaliana, is increased or generated.

[49863] For example the activity of a nucleic acid molecule or a polypeptide comprising the nucleic acid, preferably the coding region thereof, or polypeptide or the consensus sequence or the polypeptide motif, as depicted in Table I, II or IV, application No. 8, column 5 or 8 in the respective same line as the nucleic acid molecule SEQ ID NO. 4102 or polypeptide SEQ ID NO. 4103, respectively, or a homolog or a fragment thereof, is increased or generated, or if the activity glutaredoxin is increased or generated in a non-human organism, like a microorganism or a plant cell, plant or part thereof, especially with non-targeted localization. For example, an increase of the linoleic acid of at least 1 percent, particularly in a range of 14 to 39-percent is conferred as compared to a corresponding non-transformed wild type non-human organism.

[49864] Accordingly, in one embodiment, an increase of linoleic acid in a non-human organism, as compared to a corresponding non-transformed wild type non-human organism, is conferred in the process of the invention, if the activity of a polypeptide showing the activity of a heat shock transcription factor, or if the activity of the polypeptide At5g03720, preferably represented by SEQ ID NO. 24439, or a homolog or fragment thereof, or if the activity of a polypeptide encoded by a nucleic acid molecule comprising the nucleic acid SEQ ID NO. 24438, preferably the coding region thereof, or a homolog or fragment thereof, e.g. derived from Arabidopsis thaliana, is increased or generated. For example the activity of a nucleic acid molecule or a polypeptide comprising the nucleic acid, preferably the coding region thereof, or polypeptide or the consensus sequence or the polypeptide motif, as depicted in Table I, II or IV, application No. 8, column 5 or 8 in the respective same line as the nucleic acid molecule SEQ ID NO. 24438 or polypeptide SEQ ID NO. 24439, respectively, or a homolog or a fragment thereof, is increased or generated, or if the activity heat shock transcription factor is increased or generated in a non-human organism, like a microorganism or a plant cell, plant or part thereof, especially with non-targeted localization. For example, an increase of the linoleic acid of at least 1 percent, particularly in a range of 22 to 42-percent is conferred as compared to a corresponding non-transformed wild type non-human organism.

[49865] Accordingly, in one embodiment, an increase of linoleic acid in a non-human organism, as compared to a corresponding non-transformed wild type non-human organism, is conferred in the process of the invention, if the activity of a polypeptide showing the activity of a protein phosphatase, or if the activity of the polypeptide At5g59220, preferably represented by SEQ ID NO. 25499, or a homolog or fragment thereof, or if the activity of a polypeptide encoded by a nucleic acid molecule comprising the nucleic acid SEQ ID NO. 25498, preferably the coding region thereof, or a homolog or fragment thereof, e.g. derived from Arabidopsis thaliana, is increased or generated. For example the activity of a nucleic acid molecule or a polypeptide comprising the nucleic acid, preferably the coding region thereof, or polypeptide or the consensus sequence or the polypeptide motif, as depicted in Table I, II or IV, application No. 8, column 5 or 8 in the respective same line as the nucleic acid molecule SEQ ID NO. 25498 or polypeptide SEQ ID NO. 25499, respectively, or a homolog or a fragment thereof, is increased or generated, or if the activity protein phosphatase is increased or generated in a non-human organism, like a microorganism or a plant cell, plant or part thereof, especially with non-targeted localization. For example, an increase of the linoleic acid of at least 1 percent, particularly in a range of 18 to 48-percent is conferred as compared to a corresponding non-transformed wild type non-human organism.

[49866] Accordingly, in one embodiment, an increase of linoleic acid in a non-human organism, as compared to a corresponding non-transformed wild type non-human organism, is conferred in the process of the invention, if the activity of a polypeptide showing the activity of a oxidoreductase, or if the activity of the polypeptide AvinDRAFT_{—}1788, preferably represented by SEQ ID NO. 114084, or a homolog or fragment thereof, or if the activity of a polypeptide encoded by a nucleic acid molecule comprising the nucleic acid SEQ ID NO. 114083, preferably the coding region thereof, or a homolog or fragment thereof, e.g. derived from Azotobacter vinelandii, is increased or generated. For example the activity of a nucleic acid molecule or a polypeptide comprising the nucleic acid, preferably the coding region thereof, or polypeptide or the consensus sequence or the polypeptide motif, as depicted in Table I, II or IV, application No. 8, column 5 or 8 in the respective same line as the nucleic acid molecule SEQ ID NO. 114083 or polypeptide SEQ ID NO. 114084, respectively, or a homolog or a fragment thereof, is increased or generated, or if the activity oxidoreductase is increased or generated in a non-human organism, like a microorganism or a plant cell, plant or part thereof, especially with non-targeted localization. For example, an increase of the linoleic acid of at least 1 percent, particularly in a range of 15 to 27-percent is conferred as compared to a corresponding non-transformed wild type non-human organism.

[49867] Accordingly, in one embodiment, an increase of linoleic acid in a non-human organism, as compared to a corresponding non-transformed wild type non-human organism, is conferred in the process of the invention, if the activity of a polypeptide showing the activity of a transcriptional regulator protein, or if the activity of the polypeptide AvinDRAFT_{—}2010, preferably represented by SEQ ID NO. 114199, or a homolog or fragment thereof, or if the activity of a polypeptide encoded by a nucleic acid molecule comprising the nucleic acid SEQ ID NO. 114198, preferably the coding region thereof, or a homolog or fragment thereof, e.g. derived from Azotobacter vinelandii, is increased or generated. For example the activity of a nucleic acid molecule or a polypeptide comprising the nucleic acid, preferably the coding region thereof, or polypeptide or the consensus sequence or the polypeptide motif, as depicted in Table I, II or IV, application No. 8, column 5 or 8 in the respective same line as the nucleic acid molecule SEQ ID NO. 114198 or polypeptide SEQ ID NO. 114199, respectively, or a homolog or a fragment thereof, is increased or generated, or if the activity transcriptional regulator protein is increased or generated in a non-human organism, like a microorganism or a plant cell, plant or part thereof, especially with non-targeted localization. For example, an increase of the linoleic acid of at least 1 percent, partitularly in a range of 15 to 38-percent is conferred as compared to a corresponding non-transformed wild type non-human organism.

[49868] Accordingly, in one embodiment, an increase of linoleic acid in a non-human organism, as compared to a corresponding non-transformed wild type non-human organism, is conferred in the process of the invention, if the activity of a polypeptide showing the activity of a beta-hydroxylase, or if the activity of the polypeptide AvinDRAFT_{—}2091, preferably represented by SEQ ID NO. 6041, or a homolog or fragment thereof, or if the activity of a polypeptide encoded by a nucleic acid molecule comprising the nucleic acid SEQ ID NO. 6040, preferably the coding region thereof, or a homolog or fragment thereof, e.g. derived from Azotobacter vinelandii, is increased or generated. For example the activity of a nucleic acid molecule or a polypeptide comprising the nucleic acid, preferably the coding region thereof, or polypeptide or the consensus sequence or the polypeptide motif, as depicted in Table I, II or IV, application No. 8, column 5 or 8 in the respective same line as the nucleic acid molecule SEQ ID NO. 6040 or polypeptide SEQ ID NO. 6041, respectively, or a homolog or a fragment thereof, is increased or generated, or if the activity beta-hydroxylase is increased or generated in a non-human organism, like a microorganism or a plant cell, plant or part thereof, especially with non-targeted localization. For example, an increase of the linoleic acid of at least 1 percent, particularly in a range of 18 to 29-percent is conferred as compared to a corresponding non-transformed wild type non-human organism.

[49869] Accordingly, in one embodiment, an increase of linoleic acid in a non-human organism, as compared to a corresponding non-transformed wild type non-human organism, is conferred in the process of the invention, if the activity of a polypeptide showing the activity of a oxidoreductase, or if the activity of the polypeptide AvinDRAFT_{—}3253, preferably represented by SEQ ID NO. 29501, or a homolog or fragment thereof, or if the activity of a polypeptide encoded by a nucleic acid molecule comprising the nucleic acid SEQ ID NO. 29500, preferably the coding region thereof, or a homolog or fragment thereof, e.g. derived from Azotobacter vinelandii, is increased or generated. For example the activity of a nucleic acid molecule or a polypeptide comprising the nucleic acid, preferably the coding region thereof, or polypeptide or the consensus sequence or the polypeptide motif, as depicted in Table I, II or IV, application No. 8, column 5 or 8 in the respective same line as the nucleic acid molecule SEQ ID NO. 29500 or polypeptide SEQ ID NO. 29501, respectively, or a homolog or a fragment thereof, is increased or generated, or if the activity oxidoreductase is increased or generated in a non-human organism, like a microorganism or a plant cell, plant or part thereof, especially with non-targeted localization. For example, an increase of the linoleic acid of at least 1 percent, particularly in a range of 14 to 44-percent is conferred as compared to a corresponding non-transformed wild type non-human organism.

[49870] Accordingly, in one embodiment, an increase of linoleic acid in a non-human organism, as compared to a corresponding non-transformed wild type non-human organism, is conferred in the process of the invention, if the activity of a polypeptide showing the activity of a ThiF family protein, or if the activity of the polypeptide AvinDRAFT_{—}3577, preferably represented by SEQ ID NO. 111156, or a homolog or fragment thereof, or if the activity of a polypeptide encoded by a nucleic acid molecule comprising the nucleic acid SEQ ID NO. 111155, preferably the coding region thereof, or a homolog or fragment thereof, e.g. derived from Azotobacter vinelandii, is increased or generated. For example the activity of a nucleic acid molecule or a polypeptide comprising the nucleic acid, preferably the coding region thereof, or polypeptide or the consensus sequence or the polypeptide motif, as depicted in Table I, II or IV, application No. 8, column 5 or 8 in the respective same line as the nucleic acid molecule SEQ ID NO. 111155 or polypeptide SEQ ID NO. 111156, respectively, or a homolog or a fragment thereof, is increased or generated, or if the activity ThiF family protein is increased or generated in a non-human organism, like a microorganism or a plant cell, plant or part thereof, especially with non-targeted localization. For example, an increase of the linoleic acid of at least 1 percent, particularly in a range of 15 to 43-percent is conferred as compared to a corresponding non-transformed wild type non-human organism.

[49871] Accordingly, in one embodiment, an increase of linoleic acid in a non-human organism, as compared to a corresponding non-transformed wild type non-human organism, is conferred in the process of the invention, if the activity of a polypeptide showing the activity of a recombinase A, or if the activity of the polypeptide AvinDRAFT_{—}3629, preferably represented by SEQ ID NO. 114232, or a homolog or fragment thereof, or if the activity of a polypeptide encoded by a nucleic acid molecule comprising the nucleic acid SEQ ID NO. 114231, preferably the coding region thereof, or a homolog or fragment thereof, e.g. derived from Azotobacter vinelandii, is increased or generated. For example the activity of a nucleic acid molecule or a polypeptide comprising the nucleic acid, preferably the coding region thereof, or polypeptide or the consensus sequence or the polypeptide motif, as depicted in Table I, II or IV, application No. 8, column 5 or 8 in the respective same line as the nucleic acid molecule SEQ ID NO. 114231 or polypeptide SEQ ID NO. 114232, respectively, or a homolog or a fragment thereof, is increased or generated, or if the activity recombinase A is increased or generated in a non-human organism, like a microorganism or a plant cell, plant or part thereof, especially with non-targeted localization. For example, an increase of the linoleic acid of at least 1 percent, particularly in a range of 16 to 30-percent is conferred as compared to a corresponding non-transformed wild type non-human organism.

[49872] Accordingly, in one embodiment, an increase of linoleic acid in a non-human organism, as compared to a corresponding non-transformed wild type non-human organism, is conferred in the process of the invention, if the activity of a polypeptide showing the activity of a hydrolase, or if the activity of the polypeptide AvinDRAFT_{—}5103, preferably represented by SEQ ID NO. 6511, or a homolog or fragment thereof, or if the activity of a polypeptide encoded by a nucleic acid molecule comprising the nucleic acid SEQ ID NO. 6510, preferably the coding region thereof, or a homolog or fragment thereof, e.g. derived from Azotobacter vinelandii, is increased or generated. For example the activity of a nucleic acid molecule or a polypeptide comprising the nucleic acid, preferably the coding region thereof, or polypeptide or the consensus sequence or the polypeptide motif, as depicted in Table I, II or IV, application No. 8, column 5 or 8 in the respective same line as the nucleic acid molecule SEQ ID NO. 6510 or polypeptide SEQ ID NO. 6511, respectively, or a homolog or a fragment thereof, is increased or generated, or if the activity hydrolase is increased or generated in a non-human organism, like a microorganism or a plant cell, plant or part thereof, especially with non-targeted localization. For example, an increase of the linoleic acid of at least 1 percent, particularly in a range of 20 to 36-percent is conferred as compared to a corresponding non-transformed wild type non-human organism.

[49873] Accordingly, in one embodiment, an increase of linoleic acid in a non-human organism, as compared to a corresponding non-transformed wild type non-human organism, is conferred in the process of the invention, if the activity of a polypeptide showing the activity of a membrane transport protein, or if the activity of the polypeptide B0486, preferably represented by SEQ ID NO. 7687, or a homolog or fragment thereof, or if the activity of a polypeptide encoded by a nucleic acid molecule comprising the nucleic acid SEQ ID NO. 7686, preferably the coding region thereof, or a homolog or fragment thereof, e.g. derived from Escherichia coli, is increased or generated. For example the activity of a nucleic acid molecule or a polypeptide comprising the nucleic acid, preferably the coding region thereof, or polypeptide or the consensus sequence or the polypeptide motif, as depicted in Table I, II or IV, application No. 8, column 5 or 8 in the respective same line as the nucleic acid molecule SEQ ID NO. 7686 or polypeptide SEQ ID NO. 7687, respectively, or a homolog or a fragment thereof, is increased or generated, or if the activity membrane transport protein is increased or generated in a non-human organism, like a microorganism or a plant cell, plant or part thereof, especially with non-targeted localization. For example, an increase of the linoleic acid of at least 1 percent, particularly in a range of 16 to 26-percent is conferred as compared to a corresponding non-transformed wild type non-human organism.

[49874] Accordingly, in one embodiment, an increase of linoleic acid in a non-human organism, as compared to a corresponding non-transformed wild type non-human organism, is conferred in the process of the invention, if the activity of a polypeptide showing the activity of a b0801-protein, or if the activity of the polypeptide B0801, preferably represented by SEQ ID NO. 75808, or a homolog or fragment thereof, or if the activity of a polypeptide encoded by a nucleic acid molecule comprising the nucleic acid SEQ ID NO. 75807, preferably the coding region thereof, or a homolog or fragment thereof, e.g. derived from Escherichia coli, is increased or generated. For example the activity of a nucleic acid molecule or a polypeptide comprising the nucleic acid, preferably the coding region thereof, or polypeptide or the consensus sequence or the polypeptide motif, as depicted in Table I, II or IV, application No. 8, column 5 or 8 in the respective same line as the nucleic acid molecule SEQ ID NO. 75807 or polypeptide SEQ ID NO. 75808, respectively, or a homolog or a fragment thereof, is increased or generated, or if the activity b0801-protein is increased or generated in a non-human organism, like a microorganism or a plant cell, plant or part thereof, especially with non-targeted localization. For example, an increase of the linoleic acid of at least 1 percent, particularly in a range of 15 to 30-percent is conferred as compared to a corresponding non-transformed wild type non-human organism.

[49875] Accordingly, in one embodiment, an increase of linoleic acid in a non-human organism, as compared to a corresponding non-transformed wild type non-human organism, is conferred in the process of the invention, if the activity of a polypeptide showing the activity of a 3-oxoacyl-[acylcarrier-protein] synthase, or if the activity of the polypeptide B1095, preferably represented by SEQ ID NO. 114553, or a homolog or fragment thereof, or if the activity of a polypeptide encoded by a nucleic acid molecule comprising the nucleic acid SEQ ID NO. 114552, preferably the coding region thereof, or a homolog or fragment thereof, e.g. derived from Escherichia coli, is increased or generated. For example the activity of a nucleic acid molecule or a polypeptide comprising the nucleic acid, preferably the coding region thereof, or polypeptide or the consensus sequence or the polypeptide motif, as depicted in Table I, II or IV, application No. 8, column 5 or 8 in the respective same line as the nucleic acid molecule SEQ ID NO. 114552 or polypeptide SEQ ID NO. 114553, respectively, or a homolog or a fragment thereof, is increased or generated, or if the activity 3-oxoacyl-[acyl-carrier-protein] synthase is increased or generated in a non-human organism, like a microorganism or a plant cell, plant or part thereof, especially with plastidic localization. For example, an increase of the linoleic acid of at least 1 percent, particularly in a range of 18 to 46-percent is conferred as compared to a corresponding non-transformed wild type non-human organism.

[49876] Accordingly, in one embodiment, an increase of linoleic acid in a non-human organism, as compared to a corresponding non-transformed wild type non-human organism, is conferred in the process of the invention, if the activity of a polypeptide showing the activity of a outer membrane receptor protein precursor, or if the activity of the polypeptide B1102, preferably represented by SEQ ID NO. 114980, or a homolog or fragment thereof, or if the activity of a polypeptide encoded by a nucleic acid molecule comprising the nucleic acid SEQ ID NO. 114979, preferably the coding region thereof, or a homolog or fragment thereof, e.g. derived from Escherichia coli, is increased or generated. For example the activity of a nucleic acid molecule or a polypeptide comprising the nucleic acid, preferably the coding region thereof, or polypeptide or the consensus sequence or the polypeptide motif, as depicted in Table I, II or IV, application No. 8, column 5 or 8 in the respective same line as the nucleic acid molecule SEQ ID NO. 114979 or polypeptide SEQ ID NO. 114980, respectively, or a homolog or a fragment thereof, is increased or generated, or if the activity outer membrane receptor protein precursor is increased or generated in a non-human organism, like a microorganism or a plant cell, plant or part thereof, especially with non-targeted localization. For example, an increase of the linoleic acid of at least 1 percent, particularly in a range of 15 to 21-percent is conferred as compared to a corresponding non-transformed wild type non-human organism.

[49877] Accordingly, in one embodiment, an increase of linoleic acid in a non-human organism, as compared to a corresponding non-transformed wild type non-human organism, is conferred in the process of the invention, if the activity of a polypeptide showing the activity of a b1330-protein, or if the activity of the polypeptide B1330, preferably represented by SEQ ID NO. 38227, or a homolog or fragment thereof, or if the activity of a polypeptide encoded by a nucleic acid molecule comprising the nucleic acid SEQ ID NO. 38226, preferably the coding region thereof, or a homolog or fragment thereof, e.g. derived from Escherichia coli, is increased or generated. For example the activity of a nucleic acid molecule or a polypeptide comprising the nucleic acid, preferably the coding region thereof, or polypeptide or the consensus sequence or the polypeptide motif, as depicted in Table I, II or IV, application No. 8, column 5 or 8 in the respective same line as the nucleic acid molecule SEQ ID NO. 38226 or polypeptide SEQ ID NO. 38227, respectively, or a homolog or a fragment thereof, is increased or generated, or if the activity b1330-protein is increased or generated in a non-human organism, like a microorganism or a plant cell, plant or part thereof, especially with non-targeted localization. For example, an increase of the linoleic acid of at least 1 percent, particularly in a range of 15 to 35-percent is conferred as compared to a corresponding non-transformed wild type non-human organism.

[49878] Accordingly, in one embodiment, an increase of linoleic acid in a non-human organism, as compared to a corresponding non-transformed wild type non-human organism, is conferred in the process of the invention, if the activity of a polypeptide showing the activity of a lipoprotein precursor, or if the activity of the polypeptide B1431, preferably represented by SEQ ID NO. 38267, or a homolog or fragment thereof, or if the activity of a polypeptide encoded by a nucleic acid molecule comprising the nucleic acid SEQ ID NO. 38266, preferably the coding region thereof, or a homolog or fragment thereof, e.g. derived from Escherichia coli, is increased or generated. For example the activity of a nucleic acid molecule or a polypeptide comprising the nucleic acid, preferably the coding region thereof, or polypeptide or the consensus sequence or the polypeptide motif, as depicted in Table I, II or IV, application No. 8, column 5 or 8 in the respective same line as the nucleic acid molecule SEQ ID NO. 38266 or polypeptide SEQ ID NO. 38267, respectively, or a homolog or a fragment thereof, is increased or generated, or if the activity lipoprotein precursor is increased or generated in a non-human organism, like a microorganism or a plant cell, plant or part thereof, especially with plastidic localization. For example, an increase of the linoleic acid of at least 1 percent, particularly in a range of 15 to 40-percent is conferred as compared to a corresponding non-transformed wild type non-human organism.

[49879] Accordingly, in one embodiment, an increase of linoleic acid in a non-human organism, as compared to a corresponding non-transformed wild type non-human organism, is conferred in the process of the invention, if the activity of a polypeptide showing the activity of a b1470-protein, or if the activity of the polypeptide B1470, preferably represented by SEQ ID NO. 115057, or a homolog or fragment thereof, or if the activity of a polypeptide encoded by a nucleic acid molecule comprising the nucleic acid SEQ ID NO. 115056, preferably the coding region thereof, or a homolog or fragment thereof, e.g. derived from Escherichia coli, is increased or generated. For example the activity of a nucleic acid molecule or a polypeptide comprising the nucleic acid, preferably the coding region thereof, or polypeptide or the consensus sequence or the polypeptide motif, as depicted in Table I, II or IV, application No. 8, column 5 or 8 in the respective same line as the nucleic acid molecule SEQ ID NO. 115056 or polypeptide SEQ ID NO. 115057, respectively, or a homolog or a fragment thereof, is increased or generated, or if the activity b1470-protein is increased or generated in a non-human organism, like a microorganism or a plant cell, plant or part thereof, especially with non-targeted localization. For example, an increase of the linoleic acid of at least 1 percent, particularly in a range of 14 to 39-percent is conferred as compared to a corresponding non-transformed wild type non-human organism.

[49880] Accordingly, in one embodiment, an increase of linoleic acid in a non-human organism, as compared to a corresponding non-transformed wild type non-human organism, is conferred in the process of the invention, if the activity of a polypeptide showing the activity of a Fe—S subunit of oxidoreductase, or if the activity of the polypeptide B1589, preferably represented by SEQ ID NO. 78155, or a homolog or fragment thereof, or if the activity of a polypeptide encoded by a nucleic acid molecule comprising the nucleic acid SEQ ID NO. 78154, preferably the coding region thereof, or a homolog or fragment thereof, e.g. derived from Escherichia coli, is increased or generated. For example the activity of a nucleic acid molecule or a polypeptide comprising the nucleic acid, preferably the coding region thereof, or polypeptide or the consensus sequence or the polypeptide motif, as depicted in Table I, II or IV, application No. 8, column 5 or 8 in the respective same line as the nucleic acid molecule SEQ ID NO. 78154 or polypeptide SEQ ID NO. 78155, respectively, or a homolog or a fragment thereof, is increased or generated, or if the activity Fe—S subunit of oxidoreductase is increased or generated in a non-human organism, like a microorganism or a plant cell, plant or part thereof, especially with non-targeted localization. For example, an increase of the linoleic acid of at least 1 percent, particularly in a range of 14 to 33-percent is conferred as compared to a corresponding non-transformed wild type non-human organism.

[49881] Accordingly, in one embodiment, an increase of linoleic acid in a non-human organism, as compared to a corresponding non-transformed wild type non-human organism, is conferred in the process of the invention, if the activity of a polypeptide showing the activity of a acid shock protein, or if the activity of the polypeptide B1597, preferably represented by SEQ ID NO. 38301, or a homolog or fragment thereof, or if the activity of a polypeptide encoded by a nucleic acid molecule comprising the nucleic acid SEQ ID NO. 38300, preferably the coding region thereof, or a homolog or fragment thereof, e.g. derived from Escherichia coli, is increased or generated.

[49882] For example the activity of a nucleic acid molecule or a polypeptide comprising the nucleic acid, preferably the coding region thereof, or polypeptide or the consensus sequence or the polypeptide motif, as depicted in Table I, II or IV, application No. 8, column 5 or 8 in the respective same line as the nucleic acid molecule SEQ ID NO. 38300 or polypeptide SEQ ID NO. 38301, respectively, or a homolog or a fragment thereof, is increased or generated, or if the activity acid shock protein is increased or generated in a non-human organism, like a microorganism or a plant cell, plant or part thereof, especially with non-targeted localization. For example, an increase of the linoleic acid of at least 1 percent, particularly in a range of 14 to 35-percent is conferred as compared to a corresponding non-transformed wild type non-human organism.

[49883] Accordingly, in one embodiment, an increase of linoleic acid in a non-human organism, as compared to a corresponding non-transformed wild type non-human organism, is conferred in the process of the invention, if the activity of a polypeptide showing the activity of a fumarate hydratase, or if the activity of the polypeptide B1611, preferably represented by SEQ ID NO. 115065, or a homolog or fragment thereof, or if the activity of a polypeptide encoded by a nucleic acid molecule comprising the nucleic acid SEQ ID NO. 115064, preferably the coding region thereof, or a homolog or fragment thereof, e.g. derived from Escherichia coli, is increased or generated. For example the activity of a nucleic acid molecule or a polypeptide comprising the nucleic acid, preferably the coding region thereof, or polypeptide or the consensus sequence or the polypeptide motif, as depicted in Table I, II or IV, application No. 8, column 5 or 8 in the respective same line as the nucleic acid molecule SEQ ID NO. 115064 or polypeptide SEQ ID NO. 115065, respectively, or a homolog or a fragment thereof, is increased or generated, or if the activity fumarate hydratase is increased or generated in a non-human organism, like a microorganism or a plant cell, plant or part thereof, especially with plastidic localization. For example, an increase of the linoleic acid of at least 1 percent, particularly in a range of 14 to 33-percent is conferred as compared to a corresponding non-transformed wild type non-human organism.

[49884] Accordingly, in one embodiment, an increase of linoleic acid in a non-human organism, as compared to a corresponding non-transformed wild type non-human organism, is conferred in the process of the invention, if the activity of a polypeptide showing the activity of a electron transport complex protein, or if the activity of the polypeptide B1627, preferably represented by SEQ ID NO. 38346, or a homolog or fragment thereof, or if the activity of a polypeptide encoded by a nucleic acid molecule comprising the nucleic acid SEQ ID NO. 38345, preferably the coding region thereof, or a homolog or fragment thereof, e.g. derived from Escherichia coli, is increased or generated. For example the activity of a nucleic acid molecule or a polypeptide comprising the nucleic acid, preferably the coding region thereof, or polypeptide or the consensus sequence or the polypeptide motif, as depicted in Table I, II or IV, application No. 8, column 5 or 8 in the respective same line as the nucleic acid molecule SEQ ID NO. 38345 or polypeptide SEQ ID NO. 38346, respectively, or a homolog or a fragment thereof, is increased or generated, or if the activity electron transport complex protein is increased or generated in a non-human organism, like a microorganism or a plant cell, plant or part thereof, especially with non-targeted localization. For example, an increase of the linoleic acid of at least 1 percent, particularly in a range of 18 to 25-percent is conferred as compared to a corresponding non-transformed wild type non-human organism.

[49885] Accordingly, in one embodiment, an increase of linoleic acid in a non-human organism, as compared to a corresponding non-transformed wild type non-human organism, is conferred in the process of the invention, if the activity of a polypeptide showing the activity of a b1670-protein, or if the activity of the polypeptide B1670, preferably represented by SEQ ID NO. 78754, or a homolog or fragment thereof, or if the activity of a polypeptide encoded by a nucleic acid molecule comprising the nucleic acid SEQ ID NO. 78753, preferably the coding region thereof, or a homolog or fragment thereof, e.g. derived from Escherichia coli, is increased or generated. For example the activity of a nucleic acid molecule or a polypeptide comprising the nucleic acid, preferably the coding region thereof, or polypeptide or the consensus sequence or the polypeptide motif, as depicted in Table I, II or IV, application No. 8, column 5 or 8 in the respective same line as the nucleic acid molecule SEQ ID NO. 78753 or polypeptide SEQ ID NO. 78754, respectively, or a homolog or a fragment thereof, is increased or generated, or if the activity b1670-protein is increased or generated in a non-human organism, like a microorganism or a plant cell, plant or part thereof, especially with non-targeted localization. For example, an increase of the linoleic acid of at least 1 percent, particularly in a range of 13 to 33-percent is conferred as compared to a corresponding non-transformed wild type non-human organism.

[49886] Accordingly, in one embodiment, an increase of linoleic acid in a non-human organism, as compared to a corresponding non-transformed wild type non-human organism, is conferred in the process of the invention, if the activity of a polypeptide showing the activity of a b1837-protein, or if the activity of the polypeptide B1837, preferably represented by SEQ ID NO. 78954, or a homolog or fragment thereof, or if the activity of a polypeptide encoded by a nucleic acid molecule comprising the nucleic acid SEQ ID NO. 78953, preferably the coding region thereof, or a homolog or fragment thereof, e.g. derived from Escherichia coli, is increased or generated. For example the activity of a nucleic acid molecule or a polypeptide comprising the nucleic acid, preferably the coding region thereof, or polypeptide or the consensus sequence or the polypeptide motif, as depicted in Table I, II or IV, application No. 8, column 5 or 8 in the respective same line as the nucleic acid molecule SEQ ID NO. 78953 or polypeptide SEQ ID NO. 78954, respectively, or a homolog or a fragment thereof, is increased or generated, or if the activity b1837-protein is increased or generated in a non-human organism, like a microorganism or a plant cell, plant or part thereof, especially with non-targeted localization. For example, an increase of the linoleic acid of at least 1 percent, particularly in a range of 13 to 37-percent is conferred as compared to a corresponding non-transformed wild type non-human organism.

[49887] Accordingly, in one embodiment, an increase of linoleic acid in a non-human organism, as compared to a corresponding non-transformed wild type non-human organism, is conferred in the process of the invention, if the activity of a polypeptide showing the activity of a b2032-protein, or if the activity of the polypeptide B2032, preferably represented by SEQ ID NO. 8921, or a homolog or fragment thereof, or if the activity of a polypeptide encoded by a nucleic acid molecule comprising the nucleic acid SEQ ID NO. 8920, preferably the coding region thereof, or a homolog or fragment thereof, e.g. derived from Escherichia coli, is increased or generated. For example the activity of a nucleic acid molecule or a polypeptide comprising the nucleic acid, preferably the coding region thereof, or polypeptide or the consensus sequence or the polypeptide motif, as depicted in Table I, II or IV, application No. 8, column 5 or 8 in the respective same line as the nucleic acid molecule SEQ ID NO. 8920 or polypeptide SEQ ID NO. 8921, respectively, or a homolog or a fragment thereof, is increased or generated, or if the activity b2032-protein is increased or generated in a non-human organism, like a microorganism or a plant cell, plant or part thereof, especially with non-targeted localization. For example, an increase of the linoleic acid of at least 1 percent, particularly in a range of 15 to 74-percent is conferred as compared to a corresponding non-transformed wild type non-human organism.

[49888] Accordingly, in one embodiment, an increase of linoleic acid in a non-human organism, as compared to a corresponding non-transformed wild type non-human organism, is conferred in the process of the invention, if the activity of a polypeptide showing the activity of a colanic acid biosynthesis protein, or if the activity of the polypeptide B2043, preferably represented by SEQ ID NO. 112194, or a homolog or fragment thereof, or if the activity of a polypeptide encoded by a nucleic acid molecule comprising the nucleic acid SEQ ID NO. 112193, preferably the coding region thereof, or a homolog or fragment thereof, e.g. derived from Escherichia coli, is increased or generated. For example the activity of a nucleic acid molecule or a polypeptide comprising the nucleic acid, preferably the coding region thereof, or polypeptide or the consensus sequence or the polypeptide motif, as depicted in Table I, II or IV, application No. 8, column 5 or 8 in the respective same line as the nucleic acid molecule SEQ ID NO. 112193 or polypeptide SEQ ID NO. 112194, respectively, or a homolog or a fragment thereof, is increased or generated, or if the activity colanic acid biosynthesis protein is increased or generated in a non-human organism, like a microorganism or a plant cell, plant or part thereof, especially with non-targeted localization. For example, an increase of the linoleic acid of at least 1 percent, particularly in a range of 14 to 27-percent is conferred as compared to a corresponding non-transformed wild type non-human organism.

[49889] Accordingly, in one embodiment, an increase of linoleic acid in a non-human organism, as compared to a corresponding non-transformed wild type non-human organism, is conferred in the process of the invention, if the activity of a polypeptide showing the activity of a b2099-protein, or if the activity of the polypeptide B2099, preferably represented by SEQ ID NO. 115596, or a homolog or fragment thereof, or if the activity of a polypeptide encoded by a nucleic acid molecule comprising the nucleic acid SEQ ID NO. 115595, preferably the coding region thereof, or a homolog or fragment thereof, e.g. derived from Escherichia coli, is increased or generated. For example the activity of a nucleic acid molecule or a polypeptide comprising the nucleic acid, preferably the coding region thereof, or polypeptide or the consensus sequence or the polypeptide motif, as depicted in Table I, II or IV, application No. 8, column 5 or 8 in the respective same line as the nucleic acid molecule SEQ ID NO. 115595 or polypeptide SEQ ID NO. 115596, respectively, or a homolog or a fragment thereof, is increased or generated, or if the activity b2099-protein is increased or generated in a non-human organism, like a microorganism or a plant cell, plant or part thereof, especially with non-targeted localization. For example, an increase of the linoleic acid of at least 1 percent, particularly in a range of 16 to 31-percent is conferred as compared to a corresponding non-transformed wild type non-human organism.

[49890] Accordingly, in one embodiment, an increase of linoleic acid in a non-human organism, as compared to a corresponding non-transformed wild type non-human organism, is conferred in the process of the invention, if the activity of a polypeptide showing the activity of a b2107-protein, or if the activity of the polypeptide B2107, preferably represented by SEQ ID NO. 39003, or a homolog or fragment thereof, or if the activity of a polypeptide encoded by a nucleic acid molecule comprising the nucleic acid SEQ ID NO. 39002, preferably the coding region thereof, or a homolog or fragment thereof, e.g. derived from Escherichia coli, is increased or generated. For example the activity of a nucleic acid molecule or a polypeptide comprising the nucleic acid, preferably the coding region thereof, or polypeptide or the consensus sequence or the polypeptide motif, as depicted in Table I, II or IV, application No. 8, column 5 or 8 in the respective same line as the nucleic acid molecule SEQ ID NO. 39002 or polypeptide SEQ ID NO. 39003, respectively, or a homolog or a fragment thereof, is increased or generated, or if the activity b2107-protein is increased or generated in a non-human organism, like a microorganism or a plant cell, plant or part thereof, especially with non-targeted localization. For example, an increase of the linoleic acid of at least 1 percent, particularly in a range of 15 to 47-percent is conferred as compared to a corresponding non-transformed wild type non-human organism.

[49891] Accordingly, in one embodiment, an increase of linoleic acid in a non-human organism, as compared to a corresponding non-transformed wild type non-human organism, is conferred in the process of the invention, if the activity of a polypeptide showing the activity of a ABC transporter permease protein, or if the activity of the polypeptide B2178, preferably represented by SEQ ID NO. 39041, or a homolog or fragment thereof, or if the activity of a polypeptide encoded by a nucleic acid molecule comprising the nucleic acid SEQ ID NO. 39040, preferably the coding region thereof, or a homolog or fragment thereof, e.g. derived from Escherichia coli, is increased or generated. For example the activity of a nucleic acid molecule or a polypeptide comprising the nucleic acid, preferably the coding region thereof, or polypeptide or the consensus sequence or the polypeptide motif, as depicted in Table I, II or IV, application No. 8, column 5 or 8 in the respective same line as the nucleic acid molecule SEQ ID NO. 39040 or polypeptide SEQ ID NO. 39041, respectively, or a homolog or a fragment thereof, is increased or generated, or if the activity ABC transporter permease protein is increased or generated in a non-human organism, like a microorganism or a plant cell, plant or part thereof, especially with non-targeted localization. For example, an increase of the linoleic acid of at least 1 percent, particularly in a range of 16 to 40-percent is conferred as compared to a corresponding non-transformed wild type non-human organism.

[49892] Accordingly, in one embodiment, an increase of linoleic acid in a non-human organism, as compared to a corresponding non-transformed wild type non-human organism, is conferred in the process of the invention, if the activity of a polypeptide showing the activity of a b2399-protein, or if the activity of the polypeptide B2399, preferably represented by SEQ ID NO. 39238, or a homolog or fragment thereof, or if the activity of a polypeptide encoded by a nucleic acid molecule comprising the nucleic acid SEQ ID NO. 39237, preferably the coding region thereof, or a homolog or fragment thereof, e.g. derived from Escherichia coli, is increased or generated. For example the activity of a nucleic acid molecule or a polypeptide comprising the nucleic acid, preferably the coding region thereof, or polypeptide or the consensus sequence or the polypeptide motif, as depicted in Table I, II or IV, application No. 8, column 5 or 8 in the respective same line as the nucleic acid molecule SEQ ID NO. 39237 or polypeptide SEQ ID NO. 39238, respectively, or a homolog or a fragment thereof, is increased or generated, or if the activity b2399-protein is increased or generated in a non-human organism, like a microorganism or a plant cell, plant or part thereof, especially with non-targeted localization. For example, an increase of the linoleic acid of at least 1 percent, particularly in a range of 24 to 35-percent is conferred as compared to a corresponding non-transformed wild type non-human organism.

[49893] Accordingly, in one embodiment, an increase of linoleic acid in a non-human organism, as compared to a corresponding non-transformed wild type non-human organism, is conferred in the process of the invention, if the activity of a polypeptide showing the activity of a ethanolamine utilization protein, or if the activity of the polypeptide B2439, preferably represented by SEQ ID NO. 115629, or a homolog or fragment thereof, or if the activity of a polypeptide encoded by a nucleic acid molecule comprising the nucleic acid SEQ ID NO. 115628, preferably the coding region thereof, or a homolog or fragment thereof, e.g. derived from Escherichia coli, is increased or generated. For example the activity of a nucleic acid molecule or a polypeptide comprising the nucleic acid, preferably the coding region thereof, or polypeptide or the consensus sequence or the polypeptide motif, as depicted in Table I, II or IV, application No. 8, column 5 or 8 in the respective same line as the nucleic acid molecule SEQ ID NO. 115628 or polypeptide SEQ ID NO. 115629, respectively, or a homolog or a fragment thereof, is increased or generated, or if the activity ethanolamine utilization protein is increased or generated in a non-human organism, like a microorganism or a plant cell, plant or part thereof, especially with non-targeted localization. For example, an increase of the linoleic acid of at least 1 percent, particularly in a range of 20 to 34-percent is conferred as compared to a corresponding non-transformed wild type non-human organism.

[49894] Accordingly, in one embodiment, an increase of linoleic acid in a non-human organism, as compared to a corresponding non-transformed wild type non-human organism, is conferred in the process of the invention, if the activity of a polypeptide showing the activity of a b2474-protein, or if the activity of the polypeptide B2474, preferably represented by SEQ ID NO. 40330, or a homolog or fragment thereof, or if the activity of a polypeptide encoded by a nucleic acid molecule comprising the nucleic acid SEQ ID NO. 40329, preferably the coding region thereof, or a homolog or fragment thereof, e.g. derived from Escherichia coli, is increased or generated. For example the activity of a nucleic acid molecule or a polypeptide comprising the nucleic acid, preferably the coding region thereof, or polypeptide or the consensus sequence or the polypeptide motif, as depicted in Table I, II or IV, application No. 8, column 5 or 8 in the respective same line as the nucleic acid molecule SEQ ID NO. 40329 or polypeptide SEQ ID NO. 40330, respectively, or a homolog or a fragment thereof, is increased or generated, or if the activity b2474-protein is increased or generated in a non-human organism, like a microorganism or a plant cell, plant or part thereof, especially with non-targeted localization. For example, an increase of the linoleic acid of at least 1 percent, particularly in a range of 19 to 39-percent is conferred as compared to a corresponding non-transformed wild type non-human organism.

[49895] Accordingly, in one embodiment, an increase of linoleic acid in a non-human organism, as compared to a corresponding non-transformed wild type non-human organism, is conferred in the process of the invention, if the activity of a polypeptide showing the activity of a b2613-protein, or if the activity of the polypeptide B2613, preferably represented by SEQ ID NO. 40666, or a homolog or fragment thereof, or if the activity of a polypeptide encoded by a nucleic acid molecule comprising the nucleic acid SEQ ID NO. 40665, preferably the coding region thereof, or a homolog or fragment thereof, e.g. derived from Escherichia coli, is increased or generated. For example the activity of a nucleic acid molecule or a polypeptide comprising the nucleic acid, preferably the coding region thereof, or polypeptide or the consensus sequence or the polypeptide motif, as depicted in Table I, II or IV, application No. 8, column 5 or 8 in the respective same line as the nucleic acid molecule SEQ ID NO. 40665 or polypeptide SEQ ID NO. 40666, respectively, or a homolog or a fragment thereof, is increased or generated, or if the activity b2613-protein is increased or generated in a non-human organism, like a microorganism or a plant cell, plant or part thereof, especially with non-targeted localization. For example, an increase of the linoleic acid of at least 1 percent, particularly in a range of 14 to 48-percent is conferred as compared to a corresponding non-transformed wild type non-human organism.

[49896] Accordingly, in one embodiment, an increase of linoleic acid in a non-human organism, as compared to a corresponding non-transformed wild type non-human organism, is conferred in the process of the invention, if the activity of a polypeptide showing the activity of a b2682-protein, or if the activity of the polypeptide B2682, preferably represented by SEQ ID NO. 115656, or a homolog or fragment thereof, or if the activity of a polypeptide encoded by a nucleic acid molecule comprising the nucleic acid SEQ ID NO. 115655, preferably the coding region thereof, or a homolog or fragment thereof, e.g. derived from Escherichia coli, is increased or generated. For example the activity of a nucleic acid molecule or a polypeptide comprising the nucleic acid, preferably the coding region thereof, or polypeptide or the consensus sequence or the polypeptide motif, as depicted in Table I, II or IV, application No. 8, column 5 or 8 in the respective same line as the nucleic acid molecule SEQ ID NO. 115655 or polypeptide SEQ ID NO. 115656, respectively, or a homolog or a fragment thereof, is increased or generated, or if the activity b2682-protein is increased or generated in a non-human organism, like a microorganism or a plant cell, plant or part thereof, especially with non-targeted localization. For example, an increase of the linoleic acid of at least 1 percent, particularly in a range of 20 to 23-percent is conferred as compared to a corresponding non-transformed wild type non-human organism.

[49897] Accordingly, in one embodiment, an increase of linoleic acid in a non-human organism, as compared to a corresponding non-transformed wild type non-human organism, is conferred in the process of the invention, if the activity of a polypeptide showing the activity of a flavodoxin, or if the activity of the polypeptide B2790, preferably represented by SEQ ID NO. 115720, or a homolog or fragment thereof, or if the activity of a polypeptide encoded by a nucleic acid molecule comprising the nucleic acid SEQ ID NO. 115719, preferably the coding region thereof, or a homolog or fragment thereof, e.g. derived from Escherichia coli, is increased or generated. For example the activity of a nucleic acid molecule or a polypeptide comprising the nucleic acid, preferably the coding region thereof, or polypeptide or the consensus sequence or the polypeptide motif, as depicted in Table I, II or IV, application No. 8, column 5 or 8 in the respective same line as the nucleic acid molecule SEQ ID NO. 115719 or polypeptide SEQ ID NO. 115720, respectively, or a homolog or a fragment thereof, is increased or generated, or if the activity flavodoxin is increased or generated in a non-human organism, like a microorganism or a plant cell, plant or part thereof, especially with non-targeted localization. For example, an increase of the linoleic acid of at least 1 percent, particularly in a range of 17 to 25-percent is conferred as compared to a corresponding non-transformed wild type non-human organism.

[49898] Accordingly, in one embodiment, an increase of linoleic acid in a non-human organism, as compared to a corresponding non-transformed wild type non-human organism, is conferred in the process of the invention, if the activity of a polypeptide showing the activity of a AAS bifunctional protein, or if the activity of the polypeptide B2836, preferably represented by SEQ ID NO. 115792, or a homolog or fragment thereof, or if the activity of a polypeptide encoded by a nucleic acid molecule comprising the nucleic acid SEQ ID NO. 115791, preferably the coding region thereof, or a homolog or fragment thereof, e.g. derived from Escherichia coli, is increased or generated. For example the activity of a nucleic acid molecule or a polypeptide comprising the nucleic acid, preferably the coding region thereof, or polypeptide or the consensus sequence or the polypeptide motif, as depicted in Table I, II or IV, application No. 8, column 5 or 8 in the respective same line as the nucleic acid molecule SEQ ID NO. 115791 or polypeptide SEQ ID NO. 115792, respectively, or a homolog or a fragment thereof, is increased or generated, or if the activity AAS bifunctional protein is increased or generated in a non-human organism, like a microorganism or a plant cell, plant or part thereof, especially with plastidic localization. For example, an increase of the linoleic acid of at least 1 percent, particularly in a range of 19 to 43-percent is conferred as compared to a corresponding non-transformed wild type non-human organism.

[49899] Accordingly, in one embodiment, an increase of linoleic acid in a non-human organism, as compared to a corresponding non-transformed wild type non-human organism, is conferred in the process of the invention, if the activity of a polypeptide showing the activity of a b2849-protein, or if the activity of the polypeptide B2849, preferably represented by SEQ ID NO. 81981, or a homolog or fragment thereof, or if the activity of a polypeptide encoded by a nucleic acid molecule comprising the nucleic acid SEQ ID NO. 81980, preferably the coding region thereof, or a homolog or fragment thereof, e.g. derived from Escherichia coli, is increased or generated. For example the activity of a nucleic acid molecule or a polypeptide comprising the nucleic acid, preferably the coding region thereof, or polypeptide or the consensus sequence or the polypeptide motif, as depicted in Table I, II or IV, application No. 8, column 5 or 8 in the respective same line as the nucleic acid molecule SEQ ID NO. 81980 or polypeptide SEQ ID NO. 81981, respectively, or a homolog or a fragment thereof, is increased or generated, or if the activity b2849-protein is increased or generated in a non-human organism, like a microorganism or a plant cell, plant or part thereof, especially with non-targeted localization. For example, an increase of the linoleic acid of at least 1 percent, particularly in a range of 15 to 40-percent is conferred as compared to a corresponding non-transformed wild type non-human organism.

[49900] Accordingly, in one embodiment, an increase of linoleic acid in a non-human organism, as compared to a corresponding non-transformed wild type non-human organism, is conferred in the process of the invention, if the activity of a polypeptide showing the activity of a xanthine dehydrogenase, or if the activity of the polypeptide B2866, preferably represented by SEQ ID NO. 115865, or a homolog or fragment thereof, or if the activity of a polypeptide encoded by a nucleic acid molecule comprising the nucleic acid SEQ ID NO. 115864, preferably the coding region thereof, or a homolog or fragment thereof, e.g. derived from Escherichia coli, is increased or generated. For example the activity of a nucleic acid molecule or a polypeptide comprising the nucleic acid, preferably the coding region thereof, or polypeptide or the consensus sequence or the polypeptide motif, as depicted in Table I, II or IV, application No. 8, column 5 or 8 in the respective same line as the nucleic acid molecule SEQ ID NO. 115864 or polypeptide SEQ ID NO. 115865, respectively, or a homolog or a fragment thereof, is increased or generated, or if the activity xanthine dehydrogenase is increased or generated in a non-human organism, like a microorganism or a plant cell, plant or part thereof, especially with non-targeted localization. For example, an increase of the linoleic acid of at least 1 percent, particularly in a range of 16 to 20-percent is conferred as compared to a corresponding non-transformed wild type non-human organism.

[49901] Accordingly, in one embodiment, an increase of linoleic acid in a non-human organism, as compared to a corresponding non-transformed wild type non-human organism, is conferred in the process of the invention, if the activity of a polypeptide showing the activity of a b2909-protein, or if the activity of the polypeptide B2909, preferably represented by SEQ ID NO. 41007, or a homolog or fragment thereof, or if the activity of a polypeptide encoded by a nucleic acid molecule comprising the nucleic acid SEQ ID NO. 41006, preferably the coding region thereof, or a homolog or fragment thereof, e.g. derived from Escherichia coli, is increased or generated. For example the activity of a nucleic acid molecule or a polypeptide comprising the nucleic acid, preferably the coding region thereof, or polypeptide or the consensus sequence or the polypeptide motif, as depicted in Table I, II or IV, application No. 8, column 5 or 8 in the respective same line as the nucleic acid molecule SEQ ID NO. 41006 or polypeptide SEQ ID NO. 41007, respectively, or a homolog or a fragment thereof, is increased or generated, or if the activity b2909-protein is increased or generated in a non-human organism, like a microorganism or a plant cell, plant or part thereof, especially with non-targeted localization. For example, an increase of the linoleic acid of at least 1 percent, particularly in a range of 20 to 28-percent is conferred as compared to a corresponding non-transformed wild type non-human organism.

[49902] Accordingly, in one embodiment, an increase of linoleic acid in a non-human organism, as compared to a corresponding non-transformed wild type non-human organism, is conferred in the process of the invention, if the activity of a polypeptide showing the activity of a phosphotriesterase, or if the activity of the polypeptide B3379, preferably represented by SEQ ID NO. 116111, or a homolog or fragment thereof, or if the activity of a polypeptide encoded by a nucleic acid molecule comprising the nucleic acid SEQ ID NO. 116110, preferably the coding region thereof, or a homolog or fragment thereof, e.g. derived from Escherichia coli, is increased or generated. For example the activity of a nucleic acid molecule or a polypeptide comprising the nucleic acid, preferably the coding region thereof, or polypeptide or the consensus sequence or the polypeptide motif, as depicted in Table I, II or IV, application No. 8, column 5 or 8 in the respective same line as the nucleic acid molecule SEQ ID NO. 116110 or polypeptide SEQ ID NO. 116111, respectively, or a homolog or a fragment thereof, is increased or generated, or if the activity phosphotriesterase is increased or generated in a non-human organism, like a microorganism or a plant cell, plant or part thereof, especially with non-targeted localization. For example, an increase of the linoleic acid of at least 1 percent, particularly in a range of 16 to 34-percent is conferred as compared to a corresponding non-transformed wild type non-human organism.

[49903] Accordingly, in one embodiment, an increase of linoleic acid in a non-human organism, as compared to a corresponding non-transformed wild type non-human organism, is conferred in the process of the invention, if the activity of a polypeptide showing the activity of a sn-glycerol-3-phosphate transport system permease protein, or if the activity of the polypeptide B3451, preferably represented by SEQ ID NO. 116173, or a homolog or fragment thereof, or if the activity of a polypeptide encoded by a nucleic acid molecule comprising the nucleic acid SEQ ID NO. 116172, preferably the coding region thereof, or a homolog or fragment thereof, e.g. derived from Escherichia coli, is increased or generated. For example the activity of a nucleic acid molecule or a polypeptide comprising the nucleic acid, preferably the coding region thereof, or polypeptide or the consensus sequence or the polypeptide motif, as depicted in Table I, II or IV, application No. 8, column 5 or 8 in the respective same line as the nucleic acid molecule SEQ ID NO. 116172 or polypeptide SEQ ID NO. 116173, respectively, or a homolog or a fragment thereof, is increased or generated, or if the activity sn-glycerol-3-phosphate transport system permease protein is increased or generated in a non-human organism, like a microorganism or a plant cell, plant or part thereof, especially with plastidic localization. For example, an increase of the linoleic acid of at least 1 percent, particularly in a range of 14 to 32-percent is conferred as compared to a corresponding non-transformed wild type non-human organism.

[49904] Accordingly, in one embodiment, an increase of linoleic acid in a non-human organism, as compared to a corresponding non-transformed wild type non-human organism, is conferred in the process of the invention, if the activity of a polypeptide showing the activity of a threonine efflux protein, or if the activity of the polypeptide B3823, preferably represented by SEQ ID NO. 10727, or a homolog or fragment thereof, or if the activity of a polypeptide encoded by a nucleic acid molecule comprising the nucleic acid SEQ ID NO. 10726, preferably the coding region thereof, or a homolog or fragment thereof, e.g. derived from Escherichia coli, is increased or generated. For example the activity of a nucleic acid molecule or a polypeptide comprising the nucleic acid, preferably the coding region thereof, or polypeptide or the consensus sequence or the polypeptide motif, as depicted in Table I, II or IV, application No. 8, column 5 or 8 in the respective same line as the nucleic acid molecule SEQ ID NO. 10726 or polypeptide SEQ ID NO. 10727, respectively, or a homolog or a fragment thereof, is increased or generated, or if the activity threonine efflux protein is increased or generated in a non-human organism, like a microorganism or a plant cell, plant or part thereof, especially with non-targeted localization. For example, an increase of the linoleic acid of at least 1 percent, particularly in a range of 14 to 42-percent is conferred as compared to a corresponding non-transformed wild type non-human organism.

[49905] Accordingly, in one embodiment, an increase of linoleic acid in a non-human organism, as compared to a corresponding non-transformed wild type non-human organism, is conferred in the process of the invention, if the activity of a polypeptide showing the activity of a 3-ketoacyl-CoA thiolase, or if the activity of the polypeptide B3845, preferably represented by SEQ ID NO. 100676, or a homolog or fragment thereof, or if the activity of a polypeptide encoded by a nucleic acid molecule comprising the nucleic acid SEQ ID NO. 100675, preferably the coding region thereof, or a homolog or fragment thereof, e.g. derived from Escherichia coli, is increased or generated. For example the activity of a nucleic acid molecule or a polypeptide comprising the nucleic acid, preferably the coding region thereof, or polypeptide or the consensus sequence or the polypeptide motif, as depicted in Table I, II or IV, application No. 8, column 5 or 8 in the respective same line as the nucleic acid molecule SEQ ID NO. 100675 or polypeptide SEQ ID NO. 100676, respectively, or a homolog or a fragment thereof, is increased or generated, or if the activity 3-ketoacyl-CoA thiolase is increased or generated in a non-human organism, like a microorganism or a plant cell, plant or part thereof, especially with plastidic localization. For example, an increase of the linoleic acid of at least 1 percent, particularly in a range of 11 to 29-percent is conferred as compared to a corresponding non-transformed wild type non-human organism.

[49906] Accordingly, in one embodiment, an increase of linoleic acid in a non-human organism, as compared to a corresponding non-transformed wild type non-human organism, is conferred in the process of the invention, if the activity of a polypeptide showing the activity of a GM02LC38418-protein, or if the activity of the polypeptide GM02LC38418, preferably represented by SEQ ID NO. 116313, or a homolog or fragment thereof, or if the activity of a polypeptide encoded by a nucleic acid molecule comprising the nucleic acid SEQ ID NO. 116312, preferably the coding region thereof, or a homolog or fragment thereof, e.g. derived from Glycine max, is increased or generated. For example the activity of a nucleic acid molecule or a polypeptide comprising the nucleic acid, preferably the coding region thereof, or polypeptide or the consensus sequence or the polypeptide motif, as depicted in Table I, II or IV, application No. 8, column 5 or 8 in the respective same line as the nucleic acid molecule SEQ ID NO. 116312 or polypeptide SEQ ID NO. 116313, respectively, or a homolog or a fragment thereof, is increased or generated, or if the activity GM02LC38418-protein is increased or generated in a non-human organism, like a microorganism or a plant cell, plant or part thereof, especially with non-targeted localization. For example, an increase of the linoleic acid of at least 1 percent, particularly in a range of 14 to 23-percent is conferred as compared to a corresponding non-transformed wild type non-human organism.

[49907] Accordingly, in one embodiment, an increase of linoleic acid in a non-human organism, as compared to a corresponding non-transformed wild type non-human organism, is conferred in the process of the invention, if the activity of a polypeptide showing the activity of a sll1032-protein, or if the activity of the polypeptide Sll1032, preferably represented by SEQ ID NO. 85724, or a homolog or fragment thereof, or if the activity of a polypeptide encoded by a nucleic acid molecule comprising the nucleic acid SEQ ID NO. 85723, preferably the coding region thereof, or a homolog or fragment thereof, e.g. derived from Synechocystis sp., is increased or generated. For example the activity of a nucleic acid molecule or a polypeptide comprising the nucleic acid, preferably the coding region thereof, or polypeptide or the consensus sequence or the polypeptide motif, as depicted in Table I, II or IV, application No. 8, column 5 or 8 in the respective same line as the nucleic acid molecule SEQ ID NO. 85723 or polypeptide SEQ ID NO. 85724, respectively, or a homolog or a fragment thereof, is increased or generated, or if the activity sll1032-protein is increased or generated in a non-human organism, like a microorganism or a plant cell, plant or part thereof, especially with mitochondrial localization. For example, an increase of the linoleic acid of at least 1 percent, particularly in a range of 16 to 22-percent is conferred as compared to a corresponding non-transformed wild type non-human organism.

[49908] Accordingly, in one embodiment, an increase of linoleic acid in a non-human organism, as compared to a corresponding non-transformed wild type non-human organism, is conferred in the process of the invention, if the activity of a polypeptide showing the activity of a phosphoribosylformyl glycinamidine synthase subunit, or if the activity of the polypeptide Sll1056, preferably represented by SEQ ID NO. 52661, or a homolog or fragment thereof, or if the activity of a polypeptide encoded by a nucleic acid molecule comprising the nucleic acid SEQ ID NO. 52660, preferably the coding region thereof, or a homolog or fragment thereof, e.g. derived from Synechocystis sp., is increased or generated. For example the activity of a nucleic acid molecule or a polypeptide comprising the nucleic acid, preferably the coding region thereof, or polypeptide or the consensus sequence or the polypeptide motif, as depicted in Table I, II or IV, application No. 8, column 5 or 8 in the respective same line as the nucleic acid molecule SEQ ID NO. 52660 or polypeptide SEQ ID NO. 52661, respectively, or a homolog or a fragment thereof, is increased or generated, or if the activity phosphoribosylformyl glycinamidine synthase subunit is increased or generated in a non-human organism, like a microorganism or a plant cell, plant or part thereof, especially with plastidic localization. For example, an increase of the linoleic acid of at least 1 percent, particularly in a range of 18 to 40-percent is conferred as compared to a corresponding non-transformed wild type non-human organism.

[49909] Accordingly, in one embodiment, an increase of linoleic acid in a non-human organism, as compared to a corresponding non-transformed wild type non-human organism, is conferred in the process of the invention, if the activity of a polypeptide showing the activity of a CTP synthetase, or if the activity of the polypeptide Sll1443, preferably represented by SEQ ID NO. 53879, or a homolog or fragment thereof, or if the activity of a polypeptide encoded by a nucleic acid molecule comprising the nucleic acid SEQ ID NO. 53878, preferably the coding region thereof, or a homolog or fragment thereof, e.g. derived from Synechocystis sp., is increased or generated. For example the activity of a nucleic acid molecule or a polypeptide comprising the nucleic acid, preferably the coding region thereof, or polypeptide or the consensus sequence or the polypeptide motif, as depicted in Table I, II or IV, application No. 8, column 5 or 8 in the respective same line as the nucleic acid molecule SEQ ID NO. 53878 or polypeptide SEQ ID NO. 53879, respectively, or a homolog or a fragment thereof, is increased or generated, or if the activity CTP synthetase is increased or generated in a non-human organism, like a microorganism or a plant cell, plant or part thereof, especially with mitochondrial localization. For example, an increase of the linoleic acid of at least 1 percent, particularly in a range of 15 to 33-percent is conferred as compared to a corresponding non-transformed wild type non-human organism.

[49910] Accordingly, in one embodiment, an increase of linoleic acid in a non-human organism, as compared to a corresponding non-transformed wild type non-human organism, is conferred in the process of the invention, if the activity of a polypeptide showing the activity of a carbamoyl-phosphate synthase subunit, or if the activity of the polypeptide Sll1498, preferably represented by SEQ ID NO. 95048, or a homolog or fragment thereof, or if the activity of a polypeptide encoded by a nucleic acid molecule comprising the nucleic acid SEQ ID NO. 95047, preferably the coding region thereof, or a homolog or fragment thereof, e.g. derived from Synechocystis sp., is increased or generated. For example the activity of a nucleic acid molecule or a polypeptide comprising the nucleic acid, preferably the coding region thereof, or polypeptide or the consensus sequence or the polypeptide motif, as depicted in Table I, II or IV, application No. 8, column 5 or 8 in the respective same line as the nucleic acid molecule SEQ ID NO. 95047 or polypeptide SEQ ID NO. 95048, respectively, or a homolog or a fragment thereof, is increased or generated, or if the activity carbamoyl-phosphate synthase subunit is increased or generated in a non-human organism, like a microorganism or a plant cell, plant or part thereof, especially with non-targeted localization. For example, an increase of the linoleic acid of at least 1 percent, particularly in a range of 18 to 34-percent is conferred as compared to a corresponding non-transformed wild type non-human organism.

[49911] Accordingly, in one embodiment, an increase of linoleic acid in a non-human organism, as compared to a corresponding non-transformed wild type non-human organism, is conferred in the process of the invention, if the activity of a polypeptide showing the activity of a coproporphyrinogen III oxidase, or if the activity of the polypeptide Sll1917, preferably represented by SEQ ID NO. 11472, or a homolog or fragment thereof, or if the activity of a polypeptide encoded by a nucleic acid molecule comprising the nucleic acid SEQ ID NO. 11471, preferably the coding region thereof, or a homolog or fragment thereof, e.g. derived from Synechocystis sp., is increased or generated. For example the activity of a nucleic acid molecule or a polypeptide comprising the nucleic acid, preferably the coding region thereof, or polypeptide or the consensus sequence or the polypeptide motif, as depicted in Table I, II or IV, application No. 8, column 5 or 8 in the respective same line as the nucleic acid molecule SEQ ID NO. 11471 or polypeptide SEQ ID NO. 11472, respectively, or a homolog or a fragment thereof, is increased or generated, or if the activity coproporphyrinogen III oxidase is increased or generated in a non-human organism, like a microorganism or a plant cell, plant or part thereof, especially with mitochondrial localization. For example, an increase of the linoleic acid of at least 1 percent, particularly in a range of 14 to 29-percent is conferred as compared to a corresponding non-transformed wild type non-human organism.

[49912] Accordingly, in one embodiment, an increase of linoleic acid in a non-human organism, as compared to a corresponding non-transformed wild type non-human organism, is conferred in the process of the invention, if the activity of a polypeptide showing the activity of a cationtransporting ATPase, or if the activity of the polypeptide Sll1920, preferably represented by SEQ ID NO. 55386, or a homolog or fragment thereof, or if the activity of a polypeptide encoded by a nucleic acid molecule comprising the nucleic acid SEQ ID NO. 55385, preferably the coding region thereof, or a homolog or fragment thereof, e.g. derived from Synechocystis sp., is increased or generated. For example the activity of a nucleic acid molecule or a polypeptide comprising the nucleic acid, preferably the coding region thereof, or polypeptide or the consensus sequence or the polypeptide motif, as depicted in Table I, II or IV, application No. 8, column 5 or 8 in the respective same line as the nucleic acid molecule SEQ ID NO. 55385 or polypeptide SEQ ID NO. 55386, respectively, or a homolog or a fragment thereof, is increased or generated, or if the activity cation-transporting ATPase is increased or generated in a non-human organism, like a microorganism or a plant cell, plant or part thereof, especially with mitochondrial localization. For example, an increase of the linoleic acid of at least 1 percent, particularly in a range of 14 to 22-percent is conferred as compared to a corresponding non-transformed wild type non-human organism.

[49913] Accordingly, in one embodiment, an increase of linoleic acid in a non-human organism, as compared to a corresponding non-transformed wild type non-human organism, is conferred in the process of the invention, if the activity of a polypeptide showing the activity of a oxidoreductase, or if the activity of the polypeptide Slr0338, preferably represented by SEQ ID NO. 11991, or a homolog or fragment thereof, or if the activity of a polypeptide encoded by a nucleic acid molecule comprising the nucleic acid SEQ ID NO. 11990, preferably the coding region thereof, or a homolog or fragment thereof, e.g. derived from Synechocystis sp., is increased or generated. For example the activity of a nucleic acid molecule or a polypeptide comprising the nucleic acid, preferably the coding region thereof, or polypeptide or the consensus sequence or the polypeptide motif, as depicted in Table I, II or IV, application No. 8, column 5 or 8 in the respective same line as the nucleic acid molecule SEQ ID NO. 11990 or polypeptide SEQ ID NO. 11991, respectively, or a homolog or a fragment thereof, is increased or generated, or if the activity oxidoreductase is increased or generated in a non-human organism, like a microorganism or a plant cell, plant or part thereof, especially with non-targeted localization. For example, an increase of the linoleic acid of at least 1 percent, particularly in a range of 14 to 42-percent is conferred as compared to a corresponding non-transformed wild type non-human organism.

[49914] Accordingly, in one embodiment, an increase of linoleic acid in a non-human organism, as compared to a corresponding non-transformed wild type non-human organism, is conferred in the process of the invention, if the activity of a polypeptide showing the activity of a tryptophan synthase alpha chain, or if the activity of the polypeptide Slr0966, preferably represented by SEQ ID NO. 87656, or a homolog or fragment thereof, or if the activity of a polypeptide encoded by a nucleic acid molecule comprising the nucleic acid SEQ ID NO. 87655, preferably the coding region thereof, or a homolog or fragment thereof, e.g. derived from Synechocystis sp., is increased or generated. For example the activity of a nucleic acid molecule or a polypeptide comprising the nucleic acid, preferably the coding region thereof, or polypeptide or the consensus sequence or the polypeptide motif, as depicted in Table I, II or IV, application No. 8, column 5 or 8 in the respective same line as the nucleic acid molecule SEQ ID NO. 87655 or polypeptide SEQ ID NO. 87656, respectively, or a homolog or a fragment thereof, is increased or generated, or if the activity tryptophan synthase alpha chain is increased or generated in a non-human organism, like a microorganism or a plant cell, plant or part thereof, especially with plastidic localization. For example, an increase of the linoleic acid of at least 1 percent, particularly in a range of 17 to 43-percent is conferred as compared to a corresponding non-transformed wild type non-human organism.

[49915] Accordingly, in one embodiment, an increase of linoleic acid in a non-human organism, as compared to a corresponding non-transformed wild type non-human organism, is conferred in the process of the invention, if the activity of a polypeptide showing the activity of a aromatic acid decarboxylase, or if the activity of the polypeptide Slr1099, preferably represented by SEQ ID NO. 116342, or a homolog or fragment thereof, or if the activity of a polypeptide encoded by a nucleic acid molecule comprising the nucleic acid SEQ ID NO. 116341, preferably the coding region thereof, or a homolog or fragment thereof, e.g. derived from Synechocystis sp., is increased or generated. For example the activity of a nucleic acid molecule or a polypeptide comprising the nucleic acid, preferably the coding region thereof, or polypeptide or the consensus sequence or the polypeptide motif, as depicted in Table I, II or IV, application No. 8, column 5 or 8 in the respective same line as the nucleic acid molecule SEQ ID NO. 116341 or polypeptide SEQ ID NO. 116342, respectively, or a homolog or a fragment thereof, is increased or generated, or if the activity aromatic acid decarboxylase is increased or generated in a non-human organism, like a microorganism or a plant cell, plant or part thereof, especially with mitochondrial localization. For example, an increase of the linoleic acid of at least 1 percent, particularly in a range of 14 to 44-percent is conferred as compared to a corresponding non-transformed wild type non-human organism.

[49916] Accordingly, in one embodiment, an increase of linoleic acid in a non-human organism, as compared to a corresponding non-transformed wild type non-human organism, is conferred in the process of the invention, if the activity of a polypeptide showing the activity of a phosphate import ATP-binding protein, or if the activity of the polypeptide Slr1250, preferably represented by SEQ ID NO. 116461, or a homolog or fragment thereof, or if the activity of a polypeptide encoded by a nucleic acid molecule comprising the nucleic acid SEQ ID NO. 116460, preferably the coding region thereof, or a homolog or fragment thereof, e.g. derived from Synechocystis sp., is increased or generated. For example the activity of a nucleic acid molecule or a polypeptide comprising the nucleic acid, preferably the coding region thereof, or polypeptide or the consensus sequence or the polypeptide motif, as depicted in Table I, II or IV, application No. 8, column 5 or 8 in the respective same line as the nucleic acid molecule SEQ ID NO. 116460 or polypeptide SEQ ID NO. 116461, respectively, or a homolog or a fragment thereof, is increased or generated, or if the activity phosphate import ATP-binding protein is increased or generated in a non-human organism, like a microorganism or a plant cell, plant or part thereof, especially with mitochondrial localization. For example, an increase of the linoleic acid of at least 1 percent, particularly in a range of 14 to 29-percent is conferred as compared to a corresponding non-transformed wild type non-human organism.

[49917] Accordingly, in one embodiment, an increase of linoleic acid in a non-human organism, as compared to a corresponding non-transformed wild type non-human organism, is conferred in the process of the invention, if the activity of a polypeptide showing the activity of a gamma-glutamyltranspeptidase, or if the activity of the polypeptide Slr1269, preferably represented by SEQ ID NO. 58059, or a homolog or fragment thereof, or if the activity of a polypeptide encoded by a nucleic acid molecule comprising the nucleic acid SEQ ID NO. 58058, preferably the coding region thereof, or a homolog or fragment thereof, e.g. derived from Synechocystis sp., is increased or generated. For example the activity of a nucleic acid molecule or a polypeptide comprising the nucleic acid, preferably the coding region thereof, or polypeptide or the consensus sequence or the polypeptide motif, as depicted in Table I, II or IV, application No. 8, column 5 or 8 in the respective same line as the nucleic acid molecule SEQ ID NO. 58058 or polypeptide SEQ ID NO. 58059, respectively, or a homolog or a fragment thereof, is increased or generated, or if the activity gamma-glutamyltranspeptidase is increased or generated in a non-human organism, like a microorganism or a plant cell, plant or part thereof, especially with non-targeted localization. For example, an increase of the linoleic acid of at least 1 percent, particularly in a range of 18 to 24-percent is conferred as compared to a corresponding non-transformed wild type non-human organism.

[49918] Accordingly, in one embodiment, an increase of linoleic acid in a non-human organism, as compared to a corresponding non-transformed wild type non-human organism, is conferred in the process of the invention, if the activity of a polypeptide showing the activity of a arginine decarboxylase, or if the activity of the polypeptide Slr1312, preferably represented by SEQ ID NO. 58325, or a homolog or fragment thereof, or if the activity of a polypeptide encoded by a nucleic acid molecule comprising the nucleic acid SEQ ID NO. 58324, preferably the coding region thereof, or a homolog or fragment thereof, e.g. derived from Synechocystis sp., is increased or generated. For example the activity of a nucleic acid molecule or a polypeptide comprising the nucleic acid, preferably the coding region thereof, or polypeptide or the consensus sequence or the polypeptide motif, as depicted in Table I, II or IV, application No. 8, column 5 or 8 in the respective same line as the nucleic acid molecule SEQ ID NO. 58324 or polypeptide SEQ ID NO. 58325, respectively, or a homolog or a fragment thereof, is increased or generated, or if the activity arginine decarboxylase is increased or generated in a non-human organism, like a microorganism or a plant cell, plant or part thereof, especially with non-targeted localization. For example, an increase of the linoleic acid of at least 1 percent, particularly in a range of 14 to 45-percent is conferred as compared to a corresponding non-transformed wild type non-human organism.

[49919] Accordingly, in one embodiment, an increase of linoleic acid in a non-human organism, as compared to a corresponding non-transformed wild type non-human organism, is conferred in the process of the invention, if the activity of a polypeptide showing the activity of a fatty acid desaturase, or if the activity of the polypeptide Slr1350, preferably represented by SEQ ID NO. 116714, or a homolog or fragment thereof, or if the activity of a polypeptide encoded by a nucleic acid molecule comprising the nucleic acid SEQ ID NO. 116713, preferably the coding region thereof, or a homolog or fragment thereof, e.g. derived from Synechocystis sp., is increased or generated. For example the activity of a nucleic acid molecule or a polypeptide comprising the nucleic acid, preferably the coding region thereof, or polypeptide or the consensus sequence or the polypeptide motif, as depicted in Table I, II or IV, application No. 8, column 5 or 8 in the respective same line as the nucleic acid molecule SEQ ID NO. 116713 or polypeptide SEQ ID NO. 116714, respectively, or a homolog or a fragment thereof, is increased or generated, or if the activity fatty acid desaturase is increased or generated in a non-human organism, like a microorganism or a plant cell, plant or part thereof, especially with non-targeted localization. For example, an increase of the linoleic acid of at least 1 percent, particularly in a range of 14 to 29-percent is conferred as compared to a corresponding non-transformed wild type non-human organism.

[49920] Accordingly, in one embodiment, an increase of linoleic acid in a non-human organism, as compared to a corresponding non-transformed wild type non-human organism, is conferred in the process of the invention, if the activity of a polypeptide showing the activity of a threonine dehydratase, or if the activity of the polypeptide Slr2072, preferably represented by SEQ ID NO. 12342, or a homolog or fragment thereof, or if the activity of a polypeptide encoded by a nucleic acid molecule comprising the nucleic acid SEQ ID NO. 12341, preferably the coding region thereof, or a homolog or fragment thereof, e.g. derived from Synechocystis sp., is increased or generated. For example the activity of a nucleic acid molecule or a polypeptide comprising the nucleic acid, preferably the coding region thereof, or polypeptide or the consensus sequence or the polypeptide motif, as depicted in Table I, II or IV, application No. 8, column 5 or 8 in the respective same line as the nucleic acid molecule SEQ ID NO. 12341 or polypeptide SEQ ID NO. 12342, respectively, or a homolog or a fragment thereof, is increased or generated, or if the activity threonine dehydratase is increased or generated in a non-human organism, like a microorganism or a plant cell, plant or part thereof, especially with mitochondrial localization. For example, an increase of the linoleic acid of at least 1 percent, particularly in a range of 13 to 35-percent is conferred as compared to a corresponding non-transformed wild type non-human organism.

[49921] Accordingly, in one embodiment, an increase of linoleic acid in a non-human organism, as compared to a corresponding non-transformed wild type non-human organism, is conferred in the process of the invention, if the activity of a polypeptide showing the activity of a TTC0490-protein, or if the activity of the polypeptide TTC0490, preferably represented by SEQ ID NO. 116849, or a homolog or fragment thereof, or if the activity of a polypeptide encoded by a nucleic acid molecule comprising the nucleic acid SEQ ID NO. 116848, preferably the coding region thereof, or a homolog or fragment thereof, e.g. derived from Thermus thermophilus, is increased or generated. For example the activity of a nucleic acid molecule or a polypeptide comprising the nucleic acid, preferably the coding region thereof, or polypeptide or the consensus sequence or the polypeptide motif, as depicted in Table I, II or IV, application No. 8, column 5 or 8 in the respective same line as the nucleic acid molecule SEQ ID NO. 116848 or polypeptide SEQ ID NO. 116849, respectively, or a homolog or a fragment thereof, is increased or generated, or if the activity TTC0490-protein is increased or generated in a non-human organism, like a microorganism or a plant cell, plant or part thereof, especially with non-targeted localization.

[49922] For example, an increase of the linoleic acid of at least 1 percent, particularly in a range of 16 to 31-percent is conferred as compared to a corresponding non-transformed wild type non-human organism.

[49923] Accordingly, in one embodiment, an increase of linoleic acid in a non-human organism, as compared to a corresponding non-transformed wild type non-human organism, is conferred in the process of the invention, if the activity of a polypeptide showing the activity of a metal-dependent hydrolase, or if the activity of the polypeptide TTC0917, preferably represented by SEQ ID NO. 61554, or a homolog or fragment thereof, or if the activity of a polypeptide encoded by a nucleic acid molecule comprising the nucleic acid SEQ ID NO. 61553, preferably the coding region thereof, or a homolog or fragment thereof, e.g. derived from Thermus thermophilus, is increased or generated. For example the activity of a nucleic acid molecule or a polypeptide comprising the nucleic acid, preferably the coding region thereof, or polypeptide or the consensus sequence or the polypeptide motif, as depicted in Table I, II or IV, application No. 8, column 5 or 8 in the respective same line as the nucleic acid molecule SEQ ID NO. 61553 or polypeptide SEQ ID NO. 61554, respectively, or a homolog or a fragment thereof, is increased or generated, or if the activity metal-dependent hydrolase is increased or generated in a non-human organism, like a microorganism or a plant cell, plant or part thereof, especially with non-targeted localization. For example, an increase of the linoleic acid of at least 1 percent, particularly in a range of 23 to 98-percent is conferred as compared to a corresponding non-transformed wild type non-human organism.

[49924] Accordingly, in one embodiment, an increase of linoleic acid in a non-human organism, as compared to a corresponding non-transformed wild type non-human organism, is conferred in the process of the invention, if the activity of a polypeptide showing the activity of a multiple antibiotic resistance protein, or if the activity of the polypeptide TTC1193, preferably represented by SEQ ID NO. 61724, or a homolog or fragment thereof, or if the activity of a polypeptide encoded by a nucleic acid molecule comprising the nucleic acid SEQ ID NO. 61723, preferably the coding region thereof, or a homolog or fragment thereof, e.g. derived from Thermus thermophilus, is increased or generated. For example the activity of a nucleic acid molecule or a polypeptide comprising the nucleic acid, preferably the coding region thereof, or polypeptide or the consensus sequence or the polypeptide motif, as depicted in Table I, II or IV, application No. 8, column 5 or 8 in the respective same line as the nucleic acid molecule SEQ ID NO. 61723 or polypeptide SEQ ID NO. 61724, respectively, or a homolog or a fragment thereof, is increased or generated, or if the activity multiple antibiotic resistance protein is increased or generated in a non-human organism, like a microorganism or a plant cell, plant or part thereof, especially with non-targeted localization. For example, an increase of the linoleic acid of at least 1 percent, particularly in a range of 17 to 22-percent is conferred as compared to a corresponding non-transformed wild type non-human organism.

[49925] Accordingly, in one embodiment, an increase of linoleic acid in a non-human organism, as compared to a corresponding non-transformed wild type non-human organism, is conferred in the process of the invention, if the activity of a polypeptide showing the activity of a glycin cleavage system protein, or if the activity of the polypeptide Yal044c, preferably represented by SEQ ID NO. 116949, or a homolog or fragment thereof, or if the activity of a polypeptide encoded by a nucleic acid molecule comprising the nucleic acid SEQ ID NO. 116948, preferably the coding region thereof, or a homolog or fragment thereof, e.g. derived from Saccharomyces cerevisiae, is increased or generated. For example the activity of a nucleic acid molecule or a polypeptide comprising the nucleic acid, preferably the coding region thereof, or polypeptide or the consensus sequence or the polypeptide motif, as depicted in Table I, II or IV, application No. 8, column 5 or 8 in the respective same line as the nucleic acid molecule SEQ ID NO. 116948 or polypeptide SEQ ID NO. 116949, respectively, or a homolog or a fragment thereof, is increased or generated, or if the activity glycin cleavage system protein is increased or generated in a non-human organism, like a microorganism or a plant cell, plant or part thereof, especially with plastidic localization. For example, an increase of the linoleic acid of at least 1 percent, particularly in a range of 17 to 29-percent is conferred as compared to a corresponding non-transformed wild type non-human organism.

[49926] Accordingly, in one embodiment, an increase of linoleic acid in a non-human organism, as compared to a corresponding non-transformed wild type non-human organism, is conferred in the process of the invention, if the activity of a polypeptide showing the activity of a protein kinase, or if the activity of the polypeptide Ydl159w, preferably represented by SEQ ID NO. 14276, or a homolog or fragment thereof, or if the activity of a polypeptide encoded by a nucleic acid molecule comprising the nucleic acid SEQ ID NO. 14275, preferably the coding region thereof, or a homolog or fragment thereof, e.g. derived from Saccharomyces cerevisiae, is increased or generated. For example the activity of a nucleic acid molecule or a polypeptide comprising the nucleic acid, preferably the coding region thereof, or polypeptide or the consensus sequence or the polypeptide motif, as depicted in Table I, II or IV, application No. 8, column 5 or 8 in the respective same line as the nucleic acid molecule SEQ ID NO. 14275 or polypeptide SEQ ID NO. 14276, respectively, or a homolog or a fragment thereof, is increased or generated, or if the activity protein kinase is increased or generated in a non-human organism, like a microorganism or a plant cell, plant or part thereof, especially with plastidic localization. For example, an increase of the linoleic acid of at least 1 percent, particularly in a range of 16 to 34-percent is conferred as compared to a corresponding non-transformed wild type non-human organism.

[49927] Accordingly, in one embodiment, an increase of linoleic acid in a non-human organism, as compared to a corresponding non-transformed wild type non-human organism, is conferred in the process of the invention, if the activity of a polypeptide showing the activity of a aspartatesemialdehyde dehydrogenase, or if the activity of the polypeptide Ydr158w, preferably represented by SEQ ID NO. 117353, or a homolog or fragment thereof, or if the activity of a polypeptide encoded by a nucleic acid molecule comprising the nucleic acid SEQ ID NO. 117352, preferably the coding region thereof, or a homolog or fragment thereof, e.g. derived from Saccharomyces cerevisiae, is increased or generated. For example the activity of a nucleic acid molecule or a polypeptide comprising the nucleic acid, preferably the coding region thereof, or polypeptide or the consensus sequence or the polypeptide motif, as depicted in Table I, II or IV, application No. 8, column 5 or 8 in the respective same line as the nucleic acid molecule SEQ ID NO. 117352 or polypeptide SEQ ID NO. 117353, respectively, or a homolog or a fragment thereof, is increased or generated, or if the activity aspartate-semialdehyde dehydrogenase is increased or generated in a non-human organism, like a microorganism or a plant cell, plant or part thereof, especially with plastidic localization. For example, an increase of the linoleic acid of at least 1 percent, particularly in a range of 14 to 38-percent is conferred as compared to a corresponding non-transformed wild type non-human organism.

[49928] Accordingly, in one embodiment, an increase of linoleic acid in a non-human organism, as compared to a corresponding non-transformed wild type non-human organism, is conferred in the process of the invention, if the activity of a polypeptide showing the activity of a ydr507c-protein, or if the activity of the polypeptide Ydr507c, preferably represented by SEQ ID NO. 90166, or a homolog or fragment thereof, or if the activity of a polypeptide encoded by a nucleic acid molecule comprising the nucleic acid SEQ ID NO. 90165, preferably the coding region thereof, or a homolog or fragment thereof, e.g. derived from Saccharomyces cerevisiae, is increased or generated. For example the activity of a nucleic acid molecule or a polypeptide comprising the nucleic acid, preferably the coding region thereof, or polypeptide or the consensus sequence or the polypeptide motif, as depicted in Table I, II or IV, application No. 8, column 5 or 8 in the respective same line as the nucleic acid molecule SEQ ID NO. 90165 or polypeptide SEQ ID NO. 90166, respectively, or a homolog or a fragment thereof, is increased or generated, or if the activity ydr507c-protein is increased or generated in a non-human organism, like a microorganism or a plant cell, plant or part thereof, especially with non-targeted localization. For example, an increase of the linoleic acid of at least 1 percent, particularly in a range of 14 to 34-percent is conferred as compared to a corresponding non-transformed wild type non-human organism.

[49929] Accordingly, in one embodiment, an increase of linoleic acid in a non-human organism, as compared to a corresponding non-transformed wild type non-human organism, is conferred in the process of the invention, if the activity of a polypeptide showing the activity of a YGR104C-protein, or if the activity of the polypeptide Ygr104c, preferably represented by SEQ ID NO. 117483, or a homolog or fragment thereof, or if the activity of a polypeptide encoded by a nucleic acid molecule comprising the nucleic acid SEQ ID NO. 117482, preferably the coding region thereof, or a homolog or fragment thereof, e.g. derived from Saccharomyces cerevisiae, is increased or generated. For example the activity of a nucleic acid molecule or a polypeptide comprising the nucleic acid, preferably the coding region thereof, or polypeptide or the consensus sequence or the polypeptide motif, as depicted in Table I, II or IV, application No. 8, column 5 or 8 in the respective same line as the nucleic acid molecule SEQ ID NO. 117482 or polypeptide SEQ ID NO. 117483, respectively, or a homolog or a fragment thereof, is increased or generated, or if the activity YGR104C-protein is increased or generated in a non-human organism, like a microorganism or a plant cell, plant or part thereof, especially with non-targeted localization. For example, an increase of the linoleic acid of at least 1 percent, particularly in a range of 15 to 19-percent is conferred as compared to a corresponding non-transformed wild type non-human organism.

[49930] Accordingly, in one embodiment, an increase of linoleic acid in a non-human organism, as compared to a corresponding non-transformed wild type non-human organism, is conferred in the process of the invention, if the activity of a polypeptide showing the activity of a DnaJ-like chaperone, or if the activity of the polypeptide Yj1073w, preferably represented by SEQ ID NO. 64965, or a homolog or fragment thereof, or if the activity of a polypeptide encoded by a nucleic acid molecule comprising the nucleic acid SEQ ID NO. 64964, preferably the coding region thereof, or a homolog or fragment thereof, e.g. derived from Saccharomyces cerevisiae, is increased or generated. For example the activity of a nucleic acid molecule or a polypeptide comprising the nucleic acid, preferably the coding region thereof, or polypeptide or the consensus sequence or the polypeptide motif, as depicted in Table I, II or IV, application No. 8, column 5 or 8 in the respective same line as the nucleic acid molecule SEQ ID NO. 64964 or polypeptide SEQ ID NO. 64965, respectively, or a homolog or a fragment thereof, is increased or generated, or if the activity DnaJ-like chaperone is increased or generated in a non-human organism, like a microorganism or a plant cell, plant or part thereof, especially with plastidic localization. For example, an increase of the linoleic acid of at least 1 percent, particularly in a range of 14 to 21-percent is conferred as compared to a corresponding non-transformed wild type non-human organism.

[49931] Accordingly, in one embodiment, an increase of linoleic acid in a non-human organism, as compared to a corresponding non-transformed wild type non-human organism, is conferred in the process of the invention, if the activity of a polypeptide showing the activity of a aconitate hydratase, or if the activity of the polypeptide Ylr304c, preferably represented by SEQ ID NO. 66773, or a homolog or fragment thereof, or if the activity of a polypeptide encoded by a nucleic acid molecule comprising the nucleic acid SEQ ID NO. 66772, preferably the coding region thereof, or a homolog or fragment thereof, e.g. derived from Saccharomyces cerevisiae, is increased or generated. For example the activity of a nucleic acid molecule or a polypeptide comprising the nucleic acid, preferably the coding region thereof, or polypeptide or the consensus sequence or the polypeptide motif, as depicted in Table I, II or IV, application No. 8, column 5 or 8 in the respective same line as the nucleic acid molecule SEQ ID NO. 66772 or polypeptide SEQ ID NO. 66773, respectively, or a homolog or a fragment thereof, is increased or generated, or if the activity aconitate hydratase is increased or generated in a non-human organism, like a microorganism or a plant cell, plant or part thereof, especially with non-targeted localization. For example, an increase of the linoleic acid of at least 1 percent, particularly in a range of 16 to 34-percent is conferred as compared to a corresponding non-transformed wild type non-human organism.

[49932] Accordingly, in one embodiment, an increase of linoleic acid in a non-human organism, as compared to a corresponding non-transformed wild type non-human organism, is conferred in the process of the invention, if the activity of a polypeptide showing the activity of a molecular chaperone, or if the activity of the polypeptide Ynl064c, preferably represented by SEQ ID NO. 117496, or a homolog or fragment thereof, or if the activity of a polypeptide encoded by a nucleic acid molecule comprising the nucleic acid SEQ ID NO. 117495, preferably the coding region thereof, or a homolog or fragment thereof, e.g. derived from Saccharomyces cerevisiae, is increased or generated. For example the activity of a nucleic acid molecule or a polypeptide comprising the nucleic acid, preferably the coding region thereof, or polypeptide or the consensus sequence or the polypeptide motif, as depicted in Table I, II or IV, application No. 8, column 5 or 8 in the respective same line as the nucleic acid molecule SEQ ID NO. 117495 or polypeptide SEQ ID NO. 117496, respectively, or a homolog or a fragment thereof, is increased or generated, or if the activity molecular chaperone is increased or generated in a non-human organism, like a microorganism or a plant cell, plant or part thereof, especially with non-targeted localization. For example, an increase of the linoleic acid of at least 1 percent, particularly in a range of 15 to 25-percent is conferred as compared to a corresponding non-transformed wild type non-human organism.

[49933] Accordingly, in one embodiment, an increase of linoleic acid in a non-human organism, as compared to a corresponding non-transformed wild type non-human organism, is conferred in the process of the invention, if the activity of a polypeptide showing the activity of a ATPase epsilon subunit, or if the activity of the polypeptide Ypl271w, preferably represented by SEQ ID NO. 118213, or a homolog or fragment thereof, or if the activity of a polypeptide encoded by a nucleic acid molecule comprising the nucleic acid SEQ ID NO. 118212, preferably the coding region thereof, or a homolog or fragment thereof, e.g. derived from Saccharomyces cerevisiae, is increased or generated. For example the activity of a nucleic acid molecule or a polypeptide comprising the nucleic acid, preferably the coding region thereof, or polypeptide or the consensus sequence or the polypeptide motif, as depicted in Table I, II or IV, application No. 8, column 5 or 8 in the respective same line as the nucleic acid molecule SEQ ID NO. 118212 or polypeptide SEQ ID NO. 118213, respectively, or a homolog or a fragment thereof, is increased or generated, or if the activity ATPase epsilon subunit is increased or generated in a non-human organism, like a microorganism or a plant cell, plant or part thereof, especially with plastidic localization. For example, an increase of the linoleic acid of at least 1 percent, particularly in a range of 14 to 34-percent is conferred as compared to a corresponding non-transformed wild type non-human organism.

[49934] Accordingly, in one embodiment, an increase of linoleic acid in a non-human organism, as compared to a corresponding non-transformed wild type non-human organism, is conferred in the process of the invention, if the activity of a polypeptide showing the activity of a glucose-6-phosphate 1-dehydrogenase, or if the activity of the polypeptide 59582753_SOYBEAN, preferably represented by SEQ ID NO. 16884, or a homolog or fragment thereof, or if the activity of a polypeptide encoded by a nucleic acid molecule comprising the nucleic acid SEQ ID NO. 16883, preferably the coding region thereof, or a homolog or fragment thereof, e.g. derived from Glycine max, is increased or generated. For example the activity of a nucleic acid molecule or a polypeptide comprising the nucleic acid, preferably the coding region thereof, or polypeptide or the consensus sequence or the polypeptide motif, as depicted in Table I, II or IV, application No. 8, column 5 or 8 in the respective same line as the nucleic acid molecule SEQ ID NO. 16883 or polypeptide SEQ ID NO. 16884, respectively, or a homolog or a fragment thereof, is increased or generated, or if the activity glucose-6-phosphate 1-dehydrogenase is increased or generated in a non-human organism, like a microorganism or a plant cell, plant or part thereof, especially with plastidic localization. For example, an increase of the linoleic acid of at least 1 percent, particularly in a range of 14 to 37-percent is conferred as compared to a corresponding non-transformed wild type non-human organism.

[49935] In an embodiment of the invention, a protein or polypeptide has the “activity of a protein as shown in the respective line in Table II, column 3” if its de novo activity, or its increased expression directly or indirectly leads to an increase in the fine chemical level in the organism or a part thereof, preferably in a cell of said organism, and the protein has the above-mentioned activities of a protein as shown in the respective line in Table II, column 3. Throughout the specification the activity or preferably the biological activity of such a protein or polypeptide or an nucleic acid molecule or sequence encoding such protein or polypeptide is identical or similar if it still has the biological or enzymatic activity of a protein as shown in the respective line in Table II, column 3, or which has at least 10% of the original biological or enzymatic activity, preferably at least 20%, 30%, 40%, 50%, 60%, 70%, 80%, 90%, 95% or 99% in comparison to a protein as shown in Table II, column 3.

[49936] A series of mechanisms exists via which a modification of a protein, e.g. the polypeptide of the invention can directly or indirectly affect the yield, production and/or production efficiency of the fine chemical.

[49937] For example, the molecule number or the specific activity of the polypeptide or the nucleic acid molecule may be increased. Larger amounts of the fine chemical can be produced if the polypeptide or the nucleic acid of the invention is expressed de novo in an organism lacking the activity of said protein, preferably the nucleic acid molecules as mentioned in the respective line in Table I, columns 5 or 8, preferably the coding region thereof, or a homolog or a fragment thereof, alone or, if desired in combination with a transit peptide for example as mentioned in Table a or b, respectively, or in another embodiment by introducing said nucleic acid molecules into an organelle, such as a plastid, in the transgenic organism. However, it is also possible to modify the expression of the gene which is naturally present in the organisms, for example by integrating a nucleic acid sequence, encoding an organelle targeting sequence in front (5 prime) of the coding sequence, leading to a functional preprotein, which is directed for example to the organelle.

[49938] This also applies analogously to the combined increased expression of the nucleic acid molecule of the present invention or its gene product with that of further enzymes or regulators of the fine chemical biosynthesis pathways, e.g. which are useful for the synthesis of the fine chemicals.

[49939] The increase or modulation according to this invention can be constitutive, e.g. due to a stable permanent transgenic expression or to a stable mutation in the corresponding endogenous gene encoding the nucleic acid molecule of the invention or to a modulation of the expression or of the behaviour of a gene conferring the expression of the polypeptide of the invention, or transient, e.g. due to a transient transformation or temporary addition of a modulafor such as an agonist or antagonist or inducible, e.g. after transformation with a inducible construct carrying the nucleic acid molecule of the invention under control of an inducible promoter and adding the inducer, e.g. tetracycline or as described herein below.

[49940] The increase in activity of the polypeptide amounts in a cell, an organelle, an organ or a non-human organism or a part thereof preferably to at least 1%, 5%, 10%, 20%, 50%, 70%, 80%, 90%, 100%, 150% or 200%, 250% or more in comparison to the control, reference or wild type.

[49941] In an embodiment the increase in activity of the polypeptide amounts in an organelle such as a plastid or a mitochondrion. In another embodiment the increase in activity of the polypeptide amounts in the cytoplasm. In another embodiment the increase in activity of the polypeptide amounts in the cytosol.

[49942] In the context of the application the term “cytoplasm” defines the compartment of the cell to which the protein is directed by the host cell without the addition of artificial targeting sequences, which are naturally not part of the protein.

[49943] In the context of the application the term “cytosol” defines the fluid of the cell between the plasma membrane and the organelles; that means that the organelles as well as the nucleus are not part of the cytosol.

[49944] The specific activity of a polypeptide encoded by a nucleic acid molecule of the present invention or of the polypeptide of the present invention can be tested as described in the examples. In particular, the expression of a protein in question in a cell, e.g. a plant cell or a microorganism and the detection of an increase the fine chemical level in comparison to a control is an easy test and can be performed as described in the state of the art.

[49945] In this paragraph “A” means “Goffeau et al., Science 274 (5287), 546 (1996)”, “B” means “Blattner et al., Science 277 (5331), 1453 (1997)”, “C” means “Nakamura et al., Nucleic Acids Res. 28(1), 72 (2000)”, “D” means “deposition of the sequences to the EMBL/GenBank/DDBJ databases under “Sequencing of the draft genome assembly of Azotobacter vinelandii AvOP”. in June 2005 by Copeland et al.”, “E” means “Henne et al., Nat. Biotechnol. 22 (5), 547 (2004)”, “F” means “Kaul et al., Nature 408 (6814), 796 (2000)”, and “G” means “Matsumoto et al., Nature 436 (7052), 793 (2005)”.

[49946] The nucleic acid sequence of At1g19670 from Arabidopsis thaliana, e.g. as shown in the respective line in column 5 of Table I, application no. 8, has been published in F. And the activity of the gene product thereof is the activity of chlorophyllase.

[49947] Accordingly, in one embodiment, the process of the present invention for producing linoleic acid in a non-human organism, like a microorganism or a plant or a part thereof, comprises increasing or generating the activity of a gene product with the activity of a gene product conferring the activity of “chlorophyllase”, especially from Arabidopsis thaliana or its functional equivalent or its homolog, e.g. the increase of
[49948] (a) a gene product of a gene comprising the nucleic acid molecule as shown in the respective line in column 5 of Table I, application no. 8, preferably the coding region thereof, or a homolog or a fragment thereof, and being depicted in the same respective line as said At1g19670, or a functional equivalent or a homolog thereof as shown in column 8 of Table I, application no. 8, preferably the coding region thereof, particularly a homolog or functional equivalent as shown in column 8 of Table I B, application no. 8, and being depicted in the same respective line as said At1g19670, and preferably the activity is increased non-targeted, or
[49949] (b) a polypeptide comprising a polypeptide, a consensus sequence or at least a polypeptide motif as shown in the respective line in column 5 of Table II or in column 8 of Table IV, application no. 8, respectively, and being depicted in the same respective line as said At1g19670, or a functional equivalent or a homolog thereof as depicted in column 8 of Table II, application no. 8, preferably a homolog or functional equivalent as depicted in column 8 of Table II B, application no. 8, and being depicted in the same respective line as said At1g19670, and preferably the activity is increased non-targeted.

[49950] Accordingly, in one embodiment, the molecule which activity is to be increased in the process of the invention is the gene product with an activity as a “chlorophyllase”, preferably it is the molecule of section (a) or (b) of this paragraph.

[49951] In particular, it was observed that in plants, especially in Arabidopsis thaliana, increasing or generating the activity of a gene product non-targeted with the activity of a “chlorophyllase”, preferably being encoded by a gene comprising the nucleic acid sequence SEQ ID NO. 113651, preferably the coding region thereof, conferred the production of or the increase in linoleic acid compared with the wild type control.

[49952] The nucleic acid sequence of At1g19800 from Arabidopsis thaliana, e.g. as shown in the respective line in column 5 of Table I, application no. 8, has been published in F. And the activity of the gene product thereof is the activity of At1g19800-protein.

[49953] Accordingly, in one embodiment, the process of the present invention for producing linoleic acid in a non-human organism, like a microorganism or a plant or a part thereof, comprises increasing or generating the activity of a gene product with the activity of a gene product conferring the activity of “At1g19800-protein”, especially from Arabidopsis thaliana or its functional equivalent or its homolog, e.g. the increase of
[49954] (a) a gene product of a gene comprising the nucleic acid molecule as shown in the respective line in column 5 of Table I, application no. 8, preferably the coding region thereof, or a homolog or a fragment thereof, and being depicted in the same respective line as said At1g19800, or a functional equivalent or a homolog thereof as shown in column 8 of Table I, application no. 8, preferably the coding region thereof, particularly a homolog or functional equivalent as shown in column 8 of Table I B, application no. 8, and being depicted in the same respective line as said At1g19800, and preferably the activity is increased non-targeted, or
[49955] (b) a polypeptide comprising a polypeptide, a consensus sequence or at least a polypeptide motif as shown in the respective line in column 5 of Table II or in column 8 of Table IV, application no. 8, respectively, and being depicted in the same respective line as said At1g19800, or a functional equivalent or a homolog thereof as depicted in column 8 of Table II, application no. 8, preferably a homolog or functional equivalent as depicted in column 8 of Table II B, application no. 8, and being depicted in the same respective line as said At1g19800, and preferably the activity is increased non-targeted.

[49956] Accordingly, in one embodiment, the molecule which activity is to be increased in the process of the invention is the gene product with an activity as a “At1g19800-protein”, preferably it is the molecule of section (a) or (b) of this paragraph.

[49957] In particular, it was observed that in plants, especially in Arabidopsis thaliana, increasing or generating the activity of a gene product non-targeted with the activity of a “At1g19800-protein”, preferably being encoded by a gene comprising the nucleic acid sequence SEQ ID NO. 17637, preferably the coding region thereof, conferred the production of or the increase in linoleic acid compared with the wild type control.

[49958] The nucleic acid sequence of At1g68320 from Arabidopsis thaliana, e.g. as shown in the respective line in column 5 of Table I, application no. 8, has been published in F. And the activity of the gene product thereof is the activity of transcription factor.

[49959] Accordingly, in one embodiment, the process of the present invention for producing linoleic acid in a non-human organism, like a microorganism or a plant or a part thereof, comprises increasing or generating the activity of a gene product with the activity of a gene product conferring the activity of “transcription factor”, especially from Arabidopsis thaliana or its functional equivalent or its homolog, e.g. the increase of
[49960] (a) a gene product of a gene comprising the nucleic acid molecule as shown in the respective line in column 5 of Table I, application no. 8, preferably the coding region thereof, or a homolog or a fragment thereof, and being depicted in the same respective line as said At1g68320, or a functional equivalent or a homolog thereof as shown in column 8 of Table I, application no. 8, preferably the coding region thereof, particularly a homolog or functional equivalent as shown in column 8 of Table I B, application no. 8, and being depicted in the same respective line as said At1g68320, and preferably the activity is increased non-targeted, or
[49961] (b) a polypeptide comprising a polypeptide, a consensus sequence or at least a polypeptide motif as shown in the respective line in column 5 of Table II or in column 8 of Table IV, application no. 8, respectively, and being depicted in the same respective line as said At1g68320, or a functional equivalent or a homolog thereof as depicted in column 8 of Table II, application no. 8, preferably a homolog or functional equivalent as depicted in column 8 of Table II B, application no. 8, and being depicted in the same respective line as said At1g68320, and preferably the activity is increased non-targeted.

[49962] Accordingly, in one embodiment, the molecule which activity is to be increased in the process of the invention is the gene product with an activity as a “transcription factor”, preferably it is the molecule of section (a) or (b) of this paragraph.

[49963] In particular, it was observed that in plants, especially in Arabidopsis thaliana, increasing or generating the activity of a gene product non-targeted with the activity of a “transcription factor”, preferably being encoded by a gene comprising the nucleic acid sequence SEQ ID NO. 1061, preferably the coding region thereof, conferred the production of or the increase in linoleic acid compared with the wild type control.

[49964] The nucleic acid sequence of At2g36580 from Arabidopsis thaliana, e.g. as shown in the respective line in column 5 of Table I, application no. 8, has been published in F. And the activity of the gene product thereof is the activity of pyruvate kinase.

[49965] Accordingly, in one embodiment, the process of the present invention for producing linoleic acid in a non-human organism, like a microorganism or a plant or a part thereof, comprises increasing or generating the activity of a gene product with the activity of a gene product conferring the activity of “pyruvate kinase”, especially from Arabidopsis thaliana or its functional equivalent or its homolog, e.g. the increase of
[49966] (a) a gene product of a gene comprising the nucleic acid molecule as shown in the respective line in column 5 of Table I, application no. 8, preferably the coding region thereof, or a homolog or a fragment thereof, and being depicted in the same respective line as said At2g36580, or a functional equivalent or a homolog thereof as shown in column 8 of Table I, application no. 8, preferably the coding region thereof, particularly a homolog or functional equivalent as shown in column 8 of Table I B, application no. 8, and being depicted in the same respective line as said At2g36580, and preferably the activity is increased plastidic, or
[49967] (b) a polypeptide comprising a polypeptide, a consensus sequence or at least a polypeptide motif as shown in the respective line in column 5 of Table II or in column 8 of Table IV, application no. 8, respectively, and being depicted in the same respective line as said At2g36580, or a functional equivalent or a homolog thereof as depicted in column 8 of Table II, application no. 8, preferably a homolog or functional equivalent as depicted in column 8 of Table II B, application no. 8, and being depicted in the same respective line as said At2g36580, and preferably the activity is increased plastidic.

[49968] Accordingly, in one embodiment, the molecule which activity is to be increased in the process of the invention is the gene product with an activity as a “pyruvate kinase”, preferably it is the molecule of section (a) or (b) of this paragraph.

[49969] In particular, it was observed that in plants, especially in Arabidopsis thaliana, increasing or generating the activity of a gene product plastidic with the activity of a “pyruvate kinase”, preferably being encoded by a gene comprising the nucleic acid sequence SEQ ID NO. 113714, preferably the coding region thereof, conferred the production of or the increase in linoleic acid compared with the wild type control.

[49970] The nucleic acid sequence of At2g45420 from Arabidopsis thaliana, e.g. as shown in the respective line in column 5 of Table I, application no. 8, has been published in F. And the activity of the gene product thereof is the activity of At2g45420-protein.

[49971] Accordingly, in one embodiment, the process of the present invention for producing linoleic acid in a non-human organism, like a microorganism or a plant or a part thereof, comprises increasing or generating the activity of a gene product with the activity of a gene product conferring the activity of “At2g45420-protein”, especially from Arabidopsis thaliana or its functional equivalent or its homolog, e.g. the increase of
[49972] (a) a gene product of a gene comprising the nucleic acid molecule as shown in the respective line in column 5 of Table I, application no. 8, preferably the coding region thereof, or a homolog or a fragment thereof, and being depicted in the same respective line as said At2g45420, or a functional equivalent or a homolog thereof as shown in column 8 of Table I, application no. 8, preferably the coding region thereof, particularly a homolog or functional equivalent as shown in column 8 of Table I B, application no. 8, and being depicted in the same respective line as said At2g45420, and preferably the activity is increased non-targeted, or
[49973] (b) a polypeptide comprising a polypeptide, a consensus sequence or at least a polypeptide motif as shown in the respective line in column 5 of Table II or in column 8 of Table IV, application no. 8, respectively, and being depicted in the same respective line as said At2g45420, or a functional equivalent or a homolog thereof as depicted in column 8 of Table II, application no. 8, preferably a homolog or functional equivalent as depicted in column 8 of Table II B, application no. 8, and being depicted in the same respective line as said At2g45420, and preferably the activity is increased non-targeted.

[49974] Accordingly, in one embodiment, the molecule which activity is to be increased in the process of the invention is the gene product with an activity as a “At2g45420-protein”, preferably it is the molecule of section (a) or (b) of this paragraph.

[49975] In particular, it was observed that in plants, especially in Arabidopsis thaliana, increasing or generating the activity of a gene product non-targeted with the activity of a “At2g45420-protein”, preferably being encoded by a gene comprising the nucleic acid sequence SEQ ID NO. 1623, preferably the coding region thereof, conferred the production of or the increase in linoleic acid compared with the wild type control.

[49976] The nucleic acid sequence of At3g02990 from Arabidopsis thaliana, e.g. as shown in the respective line in column 5 of Table I, application no. 8, has been published in F. And the activity of the gene product thereof is the activity of heat shock transcription factor.

[49977] Accordingly, in one embodiment, the process of the present invention for producing linoleic acid in a non-human organism, like a microorganism or a plant or a part thereof, comprises increasing or generating the activity of a gene product with the activity of a gene product conferring the activity of “heat shock transcription factor”, especially from Arabidopsis thaliana or its functional equivalent or its homolog, e.g. the increase of
[49978] (a) a gene product of a gene comprising the nucleic acid molecule as shown in the respective line in column 5 of Table I, application no. 8, preferably the coding region thereof, or a homolog or a fragment thereof, and being depicted in the same respective line as said At3g02990, or a functional equivalent or a homolog thereof as shown in column 8 of Table I, application no. 8, preferably the coding region thereof, particularly a homolog or functional equivalent as shown in column 8 of Table I B, application no. 8, and being depicted in the same respective line as said At3g02990, and preferably the activity is increased non-targeted, or
[49979] (b) a polypeptide comprising a polypeptide, a consensus sequence or at least a polypeptide motif as shown in the respective line in column 5 of Table II or in column 8 of Table IV, application no. 8, respectively, and being depicted in the same respective line as said At3g02990, or a functional equivalent or a homolog thereof as depicted in column 8 of Table II, application no. 8, preferably a homolog or functional equivalent as depicted in column 8 of Table II B, application no. 8, and being depicted in the same respective line as said At3g02990, and preferably the activity is increased non-targeted.

[49980] Accordingly, in one embodiment, the molecule which activity is to be increased in the process of the invention is the gene product with an activity as a “heat shock transcription factor”, preferably it is the molecule of section (a) or (b) of this paragraph.

[49981] In particular, it was observed that in plants, especially in Arabidopsis thaliana, increasing or generating the activity of a gene product non-targeted with the activity of a “heat shock transcription factor”, preferably being encoded by a gene comprising the nucleic acid sequence SEQ ID NO. 68657, preferably the coding region thereof, conferred the production of or the increase in linoleic acid compared with the wild type control.

[49982] The nucleic acid sequence of At3g20910 from Arabidopsis thaliana, e.g. as shown in the respective line in column 5 of Table I, application no. 8, has been published in F. And the activity of the gene product thereof is the activity of CCAAT-binding transcription factor.

[49983] Accordingly, in one embodiment, the process of the present invention for producing linoleic acid in a non-human organism, like a microorganism or a plant or a part thereof, comprises increasing or generating the activity of a gene product with the activity of a gene product conferring the activity of “CCAAT-binding transcription factor”, especially from Arabidopsis thaliana or its functional equivalent or its homolog, e.g. the increase of
[49984] (a) a gene product of a gene comprising the nucleic acid molecule as shown in the respective line in column 5 of Table I, application no. 8, preferably the coding region thereof, or a homolog or a fragment thereof, and being depicted in the same respective line as said At3g20910, or a functional equivalent or a homolog thereof as shown in column 8 of Table I, application no. 8, preferably the coding region thereof, particularly a homolog or functional equivalent as shown in column 8 of Table I B, application no. 8, and being depicted in the same respective line as said At3g20910, and preferably the activity is increased non-targeted, or
[49985] (b) a polypeptide comprising a polypeptide, a consensus sequence or at least a polypeptide motif as shown in the respective line in column 5 of Table II or in column 8 of Table IV, application no. 8, respectively, and being depicted in the same respective line as said At3g20910, or a functional equivalent or a homolog thereof as depicted in column 8 of Table II, application no. 8, preferably a homolog or functional equivalent as depicted in column 8 of Table II B, application no. 8, and being depicted in the same respective line as said At3g20910, and preferably the activity is increased non-targeted.

[49986] Accordingly, in one embodiment, the molecule which activity is to be increased in the process of the invention is the gene product with an activity as a “CCAAT-binding transcription factor”, preferably it is the molecule of section (a) or (b) of this paragraph.

[49987] In particular, it was observed that in plants, especially in Arabidopsis thaliana, increasing or generating the activity of a gene product non-targeted with the activity of a “CCAAT-binding transcription factor”, preferably being encoded by a gene comprising the nucleic acid sequence SEQ ID NO. 22921, preferably the coding region thereof, conferred the production of or the increase in linoleic acid compared with the wild type control.

[49988] The nucleic acid sequence of At3g62950 from Arabidopsis thaliana, e.g. as shown in the respective line in column 5 of Table I, application no. 8, has been published in F. And the activity of the gene product thereof is the activity of glutaredoxin.

[49989] Accordingly, in one embodiment, the process of the present invention for producing linoleic acid in a non-human organism, like a microorganism or a plant or a part thereof, comprises increasing or generating the activity of a gene product with the activity of a gene product conferring the activity of “glutaredoxin”, especially from Arabidopsis thaliana or its functional equivalent or its homolog, e.g. the increase of
[49990] (a) a gene product of a gene comprising the nucleic acid molecule as shown in the respective line in column 5 of Table I, application no. 8, preferably the coding region thereof, or a homolog or a fragment thereof, and being depicted in the same respective line as said At3g62950, or a functional equivalent or a homolog thereof as shown in column 8 of Table I, application no. 8, preferably the coding region thereof, particularly a homolog or functional equivalent as shown in column 8 of Table I B, application no. 8, and being depicted in the same respective line as said At3g62950, and preferably the activity is increased non-targeted, or
[49991] (b) a polypeptide comprising a polypeptide, a consensus sequence or at least a polypeptide motif as shown in the respective line in column 5 of Table II or in column 8 of Table IV, application no. 8, respectively, and being depicted in the same respective line as said At3g62950, or a functional equivalent or a homolog thereof as depicted in column 8 of Table II, application no. 8, preferably a homolog or functional equivalent as depicted in column 8 of Table II B, application no. 8, and being depicted in the same respective line as said At3g62950, and preferably the activity is increased non-targeted.

[49992] Accordingly, in one embodiment, the molecule which activity is to be increased in the process of the invention is the gene product with an activity as a “glutaredoxin”, preferably it is the molecule of section (a) or (b) of this paragraph.

[49993] In particular, it was observed that in plants, especially in Arabidopsis thaliana, increasing or generating the activity of a gene product non-targeted with the activity of a “glutaredoxin”, preferably being encoded by a gene comprising the nucleic acid sequence SEQ ID NO. 2935, preferably the coding region thereof, conferred the production of or the increase in linoleic acid compared with the wild type control.

[49994] The nucleic acid sequence of At4g09960 from Arabidopsis thaliana, e.g. as shown in the respective line in column 5 of Table I, application no. 8, has been published in F. And the activity of the gene product thereof is the activity of transcription factor.

[49995] Accordingly, in one embodiment, the process of the present invention for producing linoleic acid in a non-human organism, like a microorganism or a plant or a part thereof, comprises increasing or generating the activity of a gene product with the activity of a gene product conferring the activity of “transcription factor”, especially from Arabidopsis thaliana or its functional equivalent or its homolog, e.g. the increase of
[49996] (a) a gene product of a gene comprising the nucleic acid molecule as shown in the respective line in column 5 of Table I, application no. 8, preferably the coding region thereof, or a homolog or a fragment thereof, and being depicted in the same respective line as said At4g09960, or a functional equivalent or a homolog thereof as shown in column 8 of Table I, application no. 8, preferably the coding region thereof, particularly a homolog or functional equivalent as shown in column 8 of Table I B, application no. 8, and being depicted in the same respective line as said At4g09960, and preferably the activity is increased non-targeted, or
[49997] (b) a polypeptide comprising a polypeptide, a consensus sequence or at least a polypeptide motif as shown in the respective line in column 5 of Table II or in column 8 of Table IV, application no. 8, respectively, and being depicted in the same respective line as said At4g09960, or a functional equivalent or a homolog thereof as depicted in column 8 of Table II, application no. 8, preferably a homolog or functional equivalent as depicted in column 8 of Table II B, application no. 8, and being depicted in the same respective line as said At4g09960, and preferably the activity is increased non-targeted.

[49998] Accordingly, in one embodiment, the molecule which activity is to be increased in the process of the invention is the gene product with an activity as a “transcription factor”, preferably it is the molecule of section (a) or (b) of this paragraph.

[49999] In particular, it was observed that in plants, especially in Arabidopsis thaliana, increasing or generating the activity of a gene product non-targeted with the activity of a “transcription factor”, preferably being encoded by a gene comprising the nucleic acid sequence SEQ ID NO. 109717, preferably the coding region thereof, conferred the production of or the increase in linoleic acid compared with the wild type control.

[50000] The nucleic acid sequence of At4g15660 from Arabidopsis thaliana, e.g. as shown in the respective line in column 5 of Table I, application no. 8, has been published in F. And the activity of the gene product thereof is the activity of monothiol glutaredoxin.

[50001] Accordingly, in one embodiment, the process of the present invention for producing linoleic acid in a non-human organism, like a microorganism or a plant or a part thereof, comprises increasing or generating the activity of a gene product with the activity of a gene product conferring the activity of “monothiol glutaredoxin”, especially from Arabidopsis thaliana or its functional equivalent or its homolog, e.g. the increase of
[50002] (a) a gene product of a gene comprising the nucleic acid molecule as shown in the respective line in column 5 of Table I, application no. 8, preferably the coding region thereof, or a homolog or a fragment thereof, and being depicted in the same respective line as said At4g15660, or a functional equivalent or a homolog thereof as shown in column 8 of Table I, application no. 8, preferably the coding region thereof, particularly a homolog or functional equivalent as shown in column 8 of Table I B, application no. 8, and being depicted in the same respective line as said At4g15660, and preferably the activity is increased non-targeted, or
[50003] (b) a polypeptide comprising a polypeptide, a consensus sequence or at least a polypeptide motif as shown in the respective line in column 5 of Table II or in column 8 of Table IV, application no. 8, respectively, and being depicted in the same respective line as said At4g15660, or a functional equivalent or a homolog thereof as depicted in column 8 of Table II, application no. 8, preferably a homolog or functional equivalent as depicted in column 8 of Table II B, application no. 8, and being depicted in the same respective line as said At4g15660, and preferably the activity is increased non-targeted.

[50004] Accordingly, in one embodiment, the molecule which activity is to be increased in the process of the invention is the gene product with an activity as a “monothiol glutaredoxin”, preferably it is the molecule of section (a) or (b) of this paragraph.

[50005] In particular, it was observed that in plants, especially in Arabidopsis thaliana, increasing or generating the activity of a gene product non-targeted with the activity of a “monothiol glutaredoxin”, preferably being encoded by a gene comprising the nucleic acid sequence SEQ ID NO. 23482, preferably the coding region thereof, conferred the production of or the increase in linoleic acid compared with the wild type control.

[50006] The nucleic acid sequence of At4g15670 from Arabidopsis thaliana, e.g. as shown in the respective line in column 5 of Table I, application no. 8, has been published in F. And the activity of the gene product thereof is the activity of monothiol glutaredoxin.

[50007] Accordingly, in one embodiment, the process of the present invention for producing linoleic acid in a non-human organism, like a microorganism or a plant or a part thereof, comprises increasing or generating the activity of a gene product with the activity of a gene product conferring the activity of “monothiol glutaredoxin”, especially from Arabidopsis thaliana or its functional equivalent or its homolog, e.g. the increase of
[50008] (a) a gene product of a gene comprising the nucleic acid molecule as shown in the respective line in column 5 of Table I, application no. 8, preferably the coding region thereof, or a homolog or a fragment thereof, and being depicted in the same respective line as said At4g15670, or a functional equivalent or a homolog thereof as shown in column 8 of Table I, application no. 8, preferably the coding region thereof, particularly a homolog or functional equivalent as shown in column 8 of Table I B, application no. 8, and being depicted in the same respective line as said At4g15670, and preferably the activity is increased non-targeted, or
[50009] (b) a polypeptide comprising a polypeptide, a consensus sequence or at least a polypeptide motif as shown in the respective line in column 5 of Table II or in column 8 of Table IV, application no. 8, respectively, and being depicted in the same respective line as said At4g15670, or a functional equivalent or a homolog thereof as depicted in column 8 of Table II, application no. 8, preferably a homolog or functional equivalent as depicted in column 8 of Table II B, application no. 8, and being depicted in the same respective line as said At4g15670, and preferably the activity is increased non-targeted.

[50010] Accordingly, in one embodiment, the molecule which activity is to be increased in the process of the invention is the gene product with an activity as a “monothiol glutaredoxin”, preferably it is the molecule of section (a) or (b) of this paragraph.

[50011] In particular, it was observed that in plants, especially in Arabidopsis thaliana, increasing or generating the activity of a gene product non-targeted with the activity of a “monothiol glutaredoxin”, preferably being encoded by a gene comprising the nucleic acid sequence SEQ ID NO. 3279, preferably the coding region thereof, conferred the production of or the increase in linoleic acid compared with the wild type control.

[50012] The nucleic acid sequence of At4g26080 from Arabidopsis thaliana, e.g. as shown in the respective line in column 5 of Table I, application no. 8, has been published in F. And the activity of the gene product thereof is the activity of protein phosphatase.

[50013] Accordingly, in one embodiment, the process of the present invention for producing linoleic acid in a non-human organism, like a microorganism or a plant or a part thereof, comprises increasing or generating the activity of a gene product with the activity of a gene product conferring the activity of “protein phosphatase”, especially from Arabidopsis thaliana or its functional equivalent or its homolog, e.g. the increase of
[50014] (a) a gene product of a gene comprising the nucleic acid molecule as shown in the respective line in column 5 of Table I, application no. 8, preferably the coding region thereof, or a homolog or a fragment thereof, and being depicted in the same respective line as said At4g26080, or a functional equivalent or a homolog thereof as shown in column 8 of Table I, application no. 8, preferably the coding region thereof, particularly a homolog or functional equivalent as shown in column 8 of Table I B, application no. 8, and being depicted in the same respective line as said At4g26080, and preferably the activity is increased non-targeted, or
[50015] (b) a polypeptide comprising a polypeptide, a consensus sequence or at least a polypeptide motif as shown in the respective line in column 5 of Table II or in column 8 of Table IV, application no. 8, respectively, and being depicted in the same respective line as said At4g26080, or a functional equivalent or a homolog thereof as depicted in column 8 of Table II, application no. 8, preferably a homolog or functional equivalent as depicted in column 8 of Table II B, application no. 8, and being depicted in the same respective line as said At4g26080, and preferably the activity is increased non-targeted.

[50016] Accordingly, in one embodiment, the molecule which activity is to be increased in the process of the invention is the gene product with an activity as a “protein phosphatase”, preferably it is the molecule of section (a) or (b) of this paragraph.

[50017] In particular, it was observed that in plants, especially in Arabidopsis thaliana, increasing or generating the activity of a gene product non-targeted with the activity of a “protein phosphatase”, preferably being encoded by a gene comprising the nucleic acid sequence SEQ ID NO. 68849, preferably the coding region thereof, conferred the production of or the increase in linoleic acid compared with the wild type control.

[50018] The nucleic acid sequence of At4g33040 from Arabidopsis thaliana, e.g. as shown in the respective line in column 5 of Table I, application no. 8, has been published in F. And the activity of the gene product thereof is the activity of glutaredoxin.

[50019] Accordingly, in one embodiment, the process of the present invention for producing linoleic acid in a non-human organism, like a microorganism or a plant or a part thereof, comprises increasing or generating the activity of a gene product with the activity of a gene product conferring the activity of “glutaredoxin”, especially from Arabidopsis thaliana or its functional equivalent or its homolog, e.g. the increase of
[50020] (a) a gene product of a gene comprising the nucleic acid molecule as shown in the respective line in column 5 of Table I, application no. 8, preferably the coding region thereof, or a homolog or a fragment thereof, and being depicted in the same respective line as said At4g33040, or a functional equivalent or a homolog thereof as shown in column 8 of Table I, application no. 8, preferably the coding region thereof, particularly a homolog or functional equivalent as shown in column 8 of Table I B, application no. 8, and being depicted in the same respective line as said At4g33040, and preferably the activity is increased non-targeted, or
[50021] (b) a polypeptide comprising a polypeptide, a consensus sequence or at least a polypeptide motif as shown in the respective line in column 5 of Table II or in column 8 of Table IV, application no. 8, respectively, and being depicted in the same respective line as said At4g33040, or a functional equivalent or a homolog thereof as depicted in column 8 of Table II, application no. 8, preferably a homolog or functional equivalent as depicted in column 8 of Table II B, application no. 8, and being depicted in the same respective line as said At4g33040, and preferably the activity is increased non-targeted.

[50022] Accordingly, in one embodiment, the molecule which activity is to be increased in the process of the invention is the gene product with an activity as a “glutaredoxin”, preferably it is the molecule of section (a) or (b) of this paragraph.

[50023] In particular, it was observed that in plants, especially in Arabidopsis thaliana, increasing or generating the activity of a gene product non-targeted with the activity of a “glutaredoxin”, preferably being encoded by a gene comprising the nucleic acid sequence SEQ ID NO. 4102, preferably the coding region thereof, conferred the production of or the increase in linoleic acid compared with the wild type control.

[50024] The nucleic acid sequence of At5g03720 from Arabidopsis thaliana, e.g. as shown in the respective line in column 5 of Table I, application no. 8, has been published in F. And the activity of the gene product thereof is the activity of heat shock transcription factor.

[50025] Accordingly, in one embodiment, the process of the present invention for producing linoleic acid in a non-human organism, like a microorganism or a plant or a part thereof, comprises increasing or generating the activity of a gene product with the activity of a gene product conferring the activity of “heat shock transcription factor”, especially from Arabidopsis thaliana or its functional equivalent or its homolog, e.g. the increase of
[50026] (a) a gene product of a gene comprising the nucleic acid molecule as shown in the respective line in column 5 of Table I, application no. 8, preferably the coding region thereof, or a homolog or a fragment thereof, and being depicted in the same respective line as said At5g03720, or a functional equivalent or a homolog thereof as shown in column 8 of Table I, application no. 8, preferably the coding region thereof, particularly a homolog or functional equivalent as shown in column 8 of Table I B, application no. 8, and being depicted in the same respective line as said At5g03720, and preferably the activity is increased non-targeted, or
[50027] (b) a polypeptide comprising a polypeptide, a consensus sequence or at least a polypeptide motif as shown in the respective line in column 5 of Table II or in column 8 of Table IV, application no. 8, respectively, and being depicted in the same respective line as said At5g03720, or a functional equivalent or a homolog thereof as depicted in column 8 of Table II, application no. 8, preferably a homolog or functional equivalent as depicted in column 8 of Table II B, application no. 8, and being depicted in the same respective line as said At5g03720, and preferably the activity is increased non-targeted.

[50028] Accordingly, in one embodiment, the molecule which activity is to be increased in the process of the invention is the gene product with an activity as a “heat shock transcription factor”, preferably it is the molecule of section (a) or (b) of this paragraph.

[50029] In particular, it was observed that in plants, especially in Arabidopsis thaliana, increasing or generating the activity of a gene product non-targeted with the activity of a “heat shock transcription factor”, preferably being encoded by a gene comprising the nucleic acid sequence SEQ ID NO. 24438, preferably the coding region thereof, conferred the production of or the increase in linoleic acid compared with the wild type control.

[50030] The nucleic acid sequence of At5g59220 from Arabidopsis thaliana, e.g. as shown in the respective line in column 5 of Table I, application no. 8, has been published in F. And the activity of the gene product thereof is the activity of protein phosphatase.

[50031] Accordingly, in one embodiment, the process of the present invention for producing linoleic acid in a non-human organism, like a microorganism or a plant or a part thereof, comprises increasing or generating the activity of a gene product with the activity of a gene product conferring the activity of “protein phosphatase”, especially from Arabidopsis thaliana or its functional equivalent or its homolog, e.g. the increase of
[50032] (a) a gene product of a gene comprising the nucleic acid molecule as shown in the respective line in column 5 of Table I, application no. 8, preferably the coding region thereof, or a homolog or a fragment thereof, and being depicted in the same respective line as said At5g59220, or a functional equivalent or a homolog thereof as shown in column 8 of Table I, application no. 8, preferably the coding region thereof, particularly a homolog or functional equivalent as shown in column 8 of Table I B, application no. 8, and being depicted in the same respective line as said At5g59220, and preferably the activity is increased non-targeted, or
[50033] (b) a polypeptide comprising a polypeptide, a consensus sequence or at least a polypeptide motif as shown in the respective line in column 5 of Table II or in column 8 of Table IV, application no. 8, respectively, and being depicted in the same respective line as said At5g59220, or a functional equivalent or a homolog thereof as depicted in column 8 of Table II, application no. 8, preferably a homolog or functional equivalent as depicted in column 8 of Table II B, application no. 8, and being depicted in the same respective line as said At5g59220, and preferably the activity is increased non-targeted.

[50034] Accordingly, in one embodiment, the molecule which activity is to be increased in the process of the invention is the gene product with an activity as a “protein phosphatase”, preferably it is the molecule of section (a) or (b) of this paragraph.

[50035] In particular, it was observed that in plants, especially in Arabidopsis thaliana, increasing or generating the activity of a gene product non-targeted with the activity of a “protein phosphatase”, preferably being encoded by a gene comprising the nucleic acid sequence SEQ ID NO. 25498, preferably the coding region thereof, conferred the production of or the increase in linoleic acid compared with the wild type control.

[50036] The nucleic acid sequence of AvinDRAFT_{—}1788 from Azotobacter vinelandii, e.g. as shown in the respective line in column 5 of Table I, application no. 8, has been published in D. And the activity of the gene product thereof is the activity of oxidoreductase.

[50037] Accordingly, in one embodiment, the process of the present invention for producing linoleic acid in a non-human organism, like a microorganism or a plant or a part thereof, comprises increasing or generating the activity of a gene product with the activity of a gene product conferring the activity of “oxidoreductase”, especially from Azotobacter vinelandii or its functional equivalent or its homolog, e.g. the increase of
[50038] (a) a gene product of a gene comprising the nucleic acid molecule as shown in the respective line in column 5 of Table I, application no. 8, preferably the coding region thereof, or a homolog or a fragment thereof, and being depicted in the same respective line as said AvinDRAFT_{—}1788, or a functional equivalent or a homolog thereof as shown in column 8 of Table I, application no. 8, preferably the coding region thereof, particularly a homolog or functional equivalent as shown in column 8 of Table I B, application no. 8, and being depicted in the same respective line as said AvinDRAFT_{—}1788, and preferably the activity is increased non-targeted, or
[50039] (b) a polypeptide comprising a polypeptide, a consensus sequence or at least a polypeptide motif as shown in the respective line in column 5 of Table II or in column 8 of Table IV, application no. 8, respectively, and being depicted in the same respective line as said AvinDRAFT_{—}1788, or a functional equivalent or a homolog thereof as depicted in column 8 of Table II, application no. 8, preferably a homolog or functional equivalent as depicted in column 8 of Table II B, application no. 8, and being depicted in the same respective line as said AvinDRAFT_{—}1788, and preferably the activity is increased non-targeted.

[50040] Accordingly, in one embodiment, the molecule which activity is to be increased in the process of the invention is the gene product with an activity as a “oxidoreductase”, preferably it is the molecule of section (a) or (b) of this paragraph.

[50041] In particular, it was observed that in plants, especially in Arabidopsis thaliana, increasing or generating the activity of a gene product non-targeted with the activity of a “oxidoreductase”, preferably being encoded by a gene comprising the nucleic acid sequence SEQ ID NO. 114083, preferably the coding region thereof, conferred the production of or the increase in linoleic acid compared with the wild type control.

[50042] The nucleic acid sequence of AvinDRAFT_{—}2010 from Azotobacter vinelandii, e.g. as shown in the respective line in column 5 of Table I, application no. 8, has been published in D. And the activity of the gene product thereof is the activity of transcriptional regulator protein.

[50043] Accordingly, in one embodiment, the process of the present invention for producing linoleic acid in a non-human organism, like a microorganism or a plant or a part thereof, comprises increasing or generating the activity of a gene product with the activity of a gene product conferring the activity of “transcriptional regulator protein”, especially from Azotobacter vinelandii or its functional equivalent or its homolog, e.g. the increase of
[50044] (a) a gene product of a gene comprising the nucleic acid molecule as shown in the respective line in column 5 of Table I, application no. 8, preferably the coding region thereof, or a homolog or a fragment thereof, and being depicted in the same respective line as said AvinDRAFT_{—}2010, or a functional equivalent or a homolog thereof as shown in column 8 of Table I, application no. 8, preferably the coding region thereof, particularly a homolog or functional equivalent as shown in column 8 of Table I B, application no. 8, and being depicted in the same respective line as said AvinDRAFT_{—}2010, and preferably the activity is increased non-targeted, or
[50045] (b) a polypeptide comprising a polypeptide, a consensus sequence or at least a polypeptide motif as shown in the respective line in column 5 of Table II or in column 8 of Table IV, application no. 8, respectively, and being depicted in the same respective line as said AvinDRAFT_{—}2010, or a functional equivalent or a homolog thereof as depicted in column 8 of Table II, application no. 8, preferably a homolog or functional equivalent as depicted in column 8 of Table II B, application no. 8, and being depicted in the same respective line as said AvinDRAFT_{—}2010, and preferably the activity is increased non-targeted.

[50046] Accordingly, in one embodiment, the molecule which activity is to be increased in the process of the invention is the gene product with an activity as a “transcriptional regulator protein”, preferably it is the molecule of section (a) or (b) of this paragraph.

[50047] In particular, it was observed that in plants, especially in Arabidopsis thaliana, increasing or generating the activity of a gene product non-targeted with the activity of a “transcriptional regulator protein”, preferably being encoded by a gene comprising the nucleic acid sequence SEQ ID NO. 114198, preferably the coding region thereof, conferred the production of or the increase in linoleic acid compared with the wild type control.

[50048] The nucleic acid sequence of AvinDRAFT_{—}2091 from Azotobacter vinelandii, e.g. as shown in the respective line in column 5 of Table I, application no. 8, has been published in D. And the activity of the gene product thereof is the activity of beta-hydroxylase.

[50049] Accordingly, in one embodiment, the process of the present invention for producing linoleic acid in a non-human organism, like a microorganism or a plant or a part thereof, comprises increasing or generating the activity of a gene product with the activity of a gene product conferring the activity of “beta-hydroxylase”, especially from Azotobacter vinelandii or its functional equivalent or its homolog, e.g. the increase of
[50050] (a) a gene product of a gene comprising the nucleic acid molecule as shown in the respective line in column 5 of Table I, application no. 8, preferably the coding region thereof, or a homolog or a fragment thereof, and being depicted in the same respective line as said AvinDRAFT_{—}2091, or a functional equivalent or a homolog thereof as shown in column 8 of Table I, application no. 8, preferably the coding region thereof, particularly a homolog or functional equivalent as shown in column 8 of Table I B, application no. 8, and being depicted in the same respective line as said AvinDRAFT_{—}2091, and preferably the activity is increased non-targeted, or
[50051] (b) a polypeptide comprising a polypeptide, a consensus sequence or at least a polypeptide motif as shown in the respective line in column 5 of Table II or in column 8 of Table IV, application no. 8, respectively, and being depicted in the same respective line as said AvinDRAFT_{—}2091, or a functional equivalent or a homolog thereof as depicted in column 8 of Table II, application no. 8, preferably a homolog or functional equivalent as depicted in column 8 of Table II B, application no. 8, and being depicted in the same respective line as said AvinDRAFT_{—}2091, and preferably the activity is increased non-targeted.

[50052] Accordingly, in one embodiment, the molecule which activity is to be increased in the process of the invention is the gene product with an activity as a “beta-hydroxylase”, preferably it is the molecule of section (a) or (b) of this paragraph.

[50053] In particular, it was observed that in plants, especially in Arabidopsis thaliana, increasing or generating the activity of a gene product non-targeted with the activity of a “beta-hydroxylase”, preferably being encoded by a gene comprising the nucleic acid sequence SEQ ID NO. 6040, preferably the coding region thereof, conferred the production of or the increase in linoleic acid compared with the wild type control.

[50054] The nucleic acid sequence of AvinDRAFT_{—}3253 from Azotobacter vinelandii, e.g. as shown in the respective line in column 5 of Table I, application no. 8, has been published in D. And the activity of the gene product thereof is the activity of oxidoreductase.

[50055] Accordingly, in one embodiment, the process of the present invention for producing linoleic acid in a non-human organism, like a microorganism or a plant or a part thereof, comprises increasing or generating the activity of a gene product with the activity of a gene product conferring the activity of “oxidoreductase”, especially from Azotobacter vinelandii or its functional equivalent or its homolog, e.g. the increase of
[50056] (a) a gene product of a gene comprising the nucleic acid molecule as shown in the respective line in column 5 of Table I, application no. 8, preferably the coding region thereof, or a homolog or a fragment thereof, and being depicted in the same respective line as said AvinDRAFT_{—}3253, or a functional equivalent or a homolog thereof as shown in column 8 of Table I, application no. 8, preferably the coding region thereof, particularly a homolog or functional equivalent as shown in column 8 of Table I B, application no. 8, and being depicted in the same respective line as said AvinDRAFT_{—}3253, and preferably the activity is increased non-targeted, or
[50057] (b) a polypeptide comprising a polypeptide, a consensus sequence or at least a polypeptide motif as shown in the respective line in column 5 of Table II or in column 8 of Table IV, application no. 8, respectively, and being depicted in the same respective line as said AvinDRAFT_{—}3253, or a functional equivalent or a homolog thereof as depicted in column 8 of Table II, application no. 8, preferably a homolog or functional equivalent as depicted in column 8 of Table II B, application no. 8, and being depicted in the same respective line as said AvinDRAFT_{—}3253, and preferably the activity is increased non-targeted.

[50058] Accordingly, in one embodiment, the molecule which activity is to be increased in the process of the invention is the gene product with an activity as a “oxidoreductase”, preferably it is the molecule of section (a) or (b) of this paragraph.

[50059] In particular, it was observed that in plants, especially in Arabidopsis thaliana, increasing or generating the activity of a gene product non-targeted with the activity of a “oxidoreductase”, preferably being encoded by a gene comprising the nucleic acid sequence SEQ ID NO. 29500, preferably the coding region thereof, conferred the production of or the increase in linoleic acid compared with the wild type control.

[50060] The nucleic acid sequence of AvinDRAFT_{—}3577 from Azotobacter vinelandii, e.g. as shown in the respective line in column 5 of Table I, application no. 8, has been published in D. And the activity of the gene product thereof is the activity of ThiF family protein.

[50061] Accordingly, in one embodiment, the process of the present invention for producing linoleic acid in a non-human organism, like a microorganism or a plant or a part thereof, comprises increasing or generating the activity of a gene product with the activity of a gene product conferring the activity of “ThiF family protein”, especially from Azotobacter vinelandii or its functional equivalent or its homolog, e.g. the increase of
[50062] (a) a gene product of a gene comprising the nucleic acid molecule as shown in the respective line in column 5 of Table I, application no. 8, preferably the coding region thereof, or a homolog or a fragment thereof, and being depicted in the same respective line as said AvinDRAFT_{—}3577, or a functional equivalent or a homolog thereof as shown in column 8 of Table I, application no. 8, preferably the coding region thereof, particularly a homolog or functional equivalent as shown in column 8 of Table I B, application no. 8, and being depicted in the same respective line as said AvinDRAFT_{—}3577, and preferably the activity is increased non-targeted, or
[50063] (b) a polypeptide comprising a polypeptide, a consensus sequence or at least a polypeptide motif as shown in the respective line in column 5 of Table II or in column 8 of Table IV, application no. 8, respectively, and being depicted in the same respective line as said AvinDRAFT_{—}3577, or a functional equivalent or a homolog thereof as depicted in column 8 of Table II, application no. 8, preferably a homolog or functional equivalent as depicted in column 8 of Table II B, application no. 8, and being depicted in the same respective line as said AvinDRAFT_{—}3577, and preferably the activity is increased non-targeted.

[50064] Accordingly, in one embodiment, the molecule which activity is to be increased in the process of the invention is the gene product with an activity as a “ThiF family protein”, preferably it is the molecule of section (a) or (b) of this paragraph.

[50065] In particular, it was observed that in plants, especially in Arabidopsis thaliana, increasing or generating the activity of a gene product non-targeted with the activity of a “ThiF family protein”, preferably being encoded by a gene comprising the nucleic acid sequence SEQ ID NO. 111155, preferably the coding region thereof, conferred the production of or the increase in linoleic acid compared with the wild type control.

[50066] The nucleic acid sequence of AvinDRAFT_{—}3629 from Azotobacter vinelandii, e.g. as shown in the respective line in column 5 of Table I, application no. 8, has been published in D. And the activity of the gene product thereof is the activity of recombinase A.

[50067] Accordingly, in one embodiment, the process of the present invention for producing linoleic acid in a non-human organism, like a microorganism or a plant or a part thereof, comprises increasing or generating the activity of a gene product with the activity of a gene product conferring the activity of “recombinase A”, especially from Azotobacter vinelandii or its functional equivalent or its homolog, e.g. the increase of
[50068] (a) a gene product of a gene comprising the nucleic acid molecule as shown in the respective line in column 5 of Table I, application no. 8, preferably the coding region thereof, or a homolog or a fragment thereof, and being depicted in the same respective line as said AvinDRAFT_{—}3629, or a functional equivalent or a homolog thereof as shown in column 8 of Table I, application no. 8, preferably the coding region thereof, particularly a homolog or functional equivalent as shown in column 8 of Table I B, application no. 8, and being depicted in the same respective line as said AvinDRAFT_{—}3629, and preferably the activity is increased non-targeted, or
[50069] (b) a polypeptide comprising a polypeptide, a consensus sequence or at least a polypeptide motif as shown in the respective line in column 5 of Table II or in column 8 of Table IV, application no. 8, respectively, and being depicted in the same respective line as said AvinDRAFT_{—}3629, or a functional equivalent or a homolog thereof as depicted in column 8 of Table II, application no. 8, preferably a homolog or functional equivalent as depicted in column 8 of Table II B, application no. 8, and being depicted in the same respective line as said AvinDRAFT_{—}3629, and preferably the activity is increased non-targeted.

[50070] Accordingly, in one embodiment, the molecule which activity is to be increased in the process of the invention is the gene product with an activity as a “recombinase A”, preferably it is the molecule of section (a) or (b) of this paragraph.

[50071] In particular, it was observed that in plants, especially in Arabidopsis thaliana, increasing or generating the activity of a gene product non-targeted with the activity of a “recombinase A”, preferably being encoded by a gene comprising the nucleic acid sequence SEQ ID NO. 114231, preferably the coding region thereof, conferred the production of or the increase in linoleic acid compared with the wild type control.

[50072] The nucleic acid sequence of AvinDRAFT_{—}5103 from Azotobacter vinelandii, e.g. as shown in the respective line in column 5 of Table I, application no. 8, has been published in D. And the activity of the gene product thereof is the activity of hydrolase.

[50073] Accordingly, in one embodiment, the process of the present invention for producing linoleic acid in a non-human organism, like a microorganism or a plant or a part thereof, comprises increasing or generating the activity of a gene product with the activity of a gene product conferring the activity of “hydrolase”, especially from Azotobacter vinelandii or its functional equivalent or its homolog, e.g. the increase of
[50074] (a) a gene product of a gene comprising the nucleic acid molecule as shown in the respective line in column 5 of Table I, application no. 8, preferably the coding region thereof, or a homolog or a fragment thereof, and being depicted in the same respective line as said AvinDRAFT_{—}5103, or a functional equivalent or a homolog thereof as shown in column 8 of Table I, application no. 8, preferably the coding region thereof, particularly a homolog or functional equivalent as shown in column 8 of Table I B, application no. 8, and being depicted in the same respective line as said AvinDRAFT_{—}5103, and preferably the activity is increased non-targeted, or
[50075] (b) a polypeptide comprising a polypeptide, a consensus sequence or at least a polypeptide motif as shown in the respective line in column 5 of Table II or in column 8 of Table IV, application no. 8, respectively, and being depicted in the same respective line as said AvinDRAFT_{—}5103, or a functional equivalent or a homolog thereof as depicted in column 8 of Table II, application no. 8, preferably a homolog or functional equivalent as depicted in column 8 of Table II B, application no. 8, and being depicted in the same respective line as said AvinDRAFT_{—}5103, and preferably the activity is increased non-targeted.

[50076] Accordingly, in one embodiment, the molecule which activity is to be increased in the process of the invention is the gene product with an activity as a “hydrolase”, preferably it is the molecule of section (a) or (b) of this paragraph.

[50077] In particular, it was observed that in plants, especially in Arabidopsis thaliana, increasing or generating the activity of a gene product non-targeted with the activity of a “hydrolase”, preferably being encoded by a gene comprising the nucleic acid sequence SEQ ID NO. 6510, preferably the coding region thereof, conferred the production of or the increase in linoleic acid compared with the wild type control.

[50078] The nucleic acid sequence of B0486 from Escherichia coli, e.g. as shown in the respective line in column 5 of Table I, application no. 8, has been published in B. And the activity of the gene product thereof is the activity of membrane transport protein.

[50079] Accordingly, in one embodiment, the process of the present invention for producing linoleic acid in a non-human organism, like a microorganism or a plant or a part thereof, comprises increasing or generating the activity of a gene product with the activity of a gene product conferring the activity of “membrane transport protein”, especially from Escherichia coli or its functional equivalent or its homolog, e.g. the increase of
[50080] (a) a gene product of a gene comprising the nucleic acid molecule as shown in the respective line in column 5 of Table I, application no. 8, preferably the coding region thereof, or a homolog or a fragment thereof, and being depicted in the same respective line as said B0486, or a functional equivalent or a homolog thereof as shown in column 8 of Table I, application no. 8, preferably the coding region thereof, particularly a homolog or functional equivalent as shown in column 8 of Table I B, application no. 8, and being depicted in the same respective line as said B0486, and preferably the activity is increased non-targeted, or
[50081] (b) a polypeptide comprising a polypeptide, a consensus sequence or at least a polypeptide motif as shown in the respective line in column 5 of Table II or in column 8 of Table IV, application no. 8, respectively, and being depicted in the same respective line as said B0486, or a functional equivalent or a homolog thereof as depicted in column 8 of Table II, application no. 8, preferably a homolog or functional equivalent as depicted in column 8 of Table II B, application no. 8, and being depicted in the same respective line as said B0486, and preferably the activity is increased non-targeted.

[50082] Accordingly, in one embodiment, the molecule which activity is to be increased in the process of the invention is the gene product with an activity as a “membrane transport protein”, preferably it is the molecule of section (a) or (b) of this paragraph.

[50083] In particular, it was observed that in plants, especially in Arabidopsis thaliana, increasing or generating the activity of a gene product non-targeted with the activity of a “membrane transport protein”, preferably being encoded by a gene comprising the nucleic acid sequence SEQ ID NO. 7686, preferably the coding region thereof, conferred the production of or the increase in linoleic acid compared with the wild type control.

[50084] The nucleic acid sequence of B0801 from Escherichia coli, e.g. as shown in the respective line in column 5 of Table I, application no. 8, has been published in B. And the activity of the gene product thereof is the activity of b0801-protein.

[50085] Accordingly, in one embodiment, the process of the present invention for producing linoleic acid in a non-human organism, like a microorganism or a plant or a part thereof, comprises increasing or generating the activity of a gene product with the activity of a gene product conferring the activity of “b0801-protein”, especially from Escherichia coli or its functional equivalent or its homolog, e.g. the increase of
[50086] (a) a gene product of a gene comprising the nucleic acid molecule as shown in the respective line in column 5 of Table I, application no. 8, preferably the coding region thereof, or a homolog or a fragment thereof, and being depicted in the same respective line as said B0801, or a functional equivalent or a homolog thereof as shown in column 8 of Table I, application no. 8, preferably the coding region thereof, particularly a homolog or functional equivalent as shown in column 8 of Table I B, application no. 8, and being depicted in the same respective line as said B0801, and preferably the activity is increased non-targeted, or
[50087] (b) a polypeptide comprising a polypeptide, a consensus sequence or at least a polypeptide motif as shown in the respective line in column 5 of Table II or in column 8 of Table IV, application no. 8, respectively, and being depicted in the same respective line as said B0801, or a functional equivalent or a homolog thereof as depicted in column 8 of Table II, application no. 8, preferably a homolog or functional equivalent as depicted in column 8 of Table II B, application no. 8, and being depicted in the same respective line as said B0801, and preferably the activity is increased non-targeted.

[50088] Accordingly, in one embodiment, the molecule which activity is to be increased in the process of the invention is the gene product with an activity as a “b0801-protein”, preferably it is the molecule of section (a) or (b) of this paragraph.

[50089] In particular, it was observed that in plants, especially in Arabidopsis thaliana, increasing or generating the activity of a gene product non-targeted with the activity of a “b0801-protein”, preferably being encoded by a gene comprising the nucleic acid sequence SEQ ID NO. 75807, preferably the coding region thereof, conferred the production of or the increase in linoleic acid compared with the wild type control.

[50090] The nucleic acid sequence of B1095 from Escherichia coli, e.g. as shown in the respective line in column 5 of Table I, application no. 8, has been published in B. And the activity of the gene product thereof is the activity of 3-oxoacyl-[acyl-carrier-protein] synthase.

[50091] Accordingly, in one embodiment, the process of the present invention for producing linoleic acid in a non-human organism, like a microorganism or a plant or a part thereof, comprises increasing or generating the activity of a gene product with the activity of a gene product conferring the activity of “3-oxoacyl-[acyl-carrier-protein] synthase”, especially from Escherichia coli or its functional equivalent or its homolog, e.g. the increase of
[50092] (a) a gene product of a gene comprising the nucleic acid molecule as shown in the respective line in column 5 of Table I, application no. 8, preferably the coding region thereof, or a homolog or a fragment thereof, and being depicted in the same respective line as said B1095, or a functional equivalent or a homolog thereof as shown in column 8 of Table I, application no. 8, preferably the coding region thereof, particularly a homolog or functional equivalent as shown in column 8 of Table I B, application no. 8, and being depicted in the same respective line as said B1095, and preferably the activity is increased plastidic, or
[50093] (b) a polypeptide comprising a polypeptide, a consensus sequence or at least a polypeptide motif as shown in the respective line in column 5 of Table II or in column 8 of Table IV, application no. 8, respectively, and being depicted in the same respective line as said B1095, or a functional equivalent or a homolog thereof as depicted in column 8 of Table II, application no. 8, preferably a homolog or functional equivalent as depicted in column 8 of Table II B, application no. 8, and being depicted in the same respective line as said B1095, and preferably the activity is increased plastidic.

[50094] Accordingly, in one embodiment, the molecule which activity is to be increased in the process of the invention is the gene product with an activity as a “3-oxoacyl-[acyl-carrier-protein] synthase”, preferably it is the molecule of section (a) or (b) of this paragraph.

[50095] In particular, it was observed that in plants, especially in Arabidopsis thaliana, increasing or generating the activity of a gene product plastidic with the activity of a “3-oxoacyl-[acyl-carrier-protein] synthase”, preferably being encoded by a gene comprising the nucleic acid sequence SEQ ID NO. 114552, preferably the coding region thereof, conferred the production of or the increase in linoleic acid compared with the wild type control.

[50096] The nucleic acid sequence of B1102 from Escherichia coli, e.g. as shown in the respective line in column 5 of Table I, application no. 8, has been published in B. And the activity of the gene product thereof is the activity of outer membrane receptor protein precursor.

[50097] Accordingly, in one embodiment, the process of the present invention for producing linoleic acid in a non-human organism, like a microorganism or a plant or a part thereof, comprises increasing or generating the activity of a gene product with the activity of a gene product conferring the activity of “outer membrane receptor protein precursor”, especially from Escherichia coli or its functional equivalent or its homolog, e.g. the increase of
[50098] (a) a gene product of a gene comprising the nucleic acid molecule as shown in the respective line in column 5 of Table I, application no. 8, preferably the coding region thereof, or a homolog or a fragment thereof, and being depicted in the same respective line as said B1102, or a functional equivalent or a homolog thereof as shown in column 8 of Table I, application no. 8, preferably the coding region thereof, particularly a homolog or functional equivalent as shown in column 8 of Table I B, application no. 8, and being depicted in the same respective line as said B1102, and preferably the activity is increased non-targeted, or
[50099] (b) a polypeptide comprising a polypeptide, a consensus sequence or at least a polypeptide motif as shown in the respective line in column 5 of Table II or in column 8 of Table IV, application no. 8, respectively, and being depicted in the same respective line as said B1102, or a functional equivalent or a homolog thereof as depicted in column 8 of Table II, application no. 8, preferably a homolog or functional equivalent as depicted in column 8 of Table II B, application no. 8, and being depicted in the same respective line as said B1102, and preferably the activity is increased non-targeted.

[50100] Accordingly, in one embodiment, the molecule which activity is to be increased in the process of the invention is the gene product with an activity as a “outer membrane receptor protein precursor”, preferably it is the molecule of section (a) or (b) of this paragraph.

[50101] In particular, it was observed that in plants, especially in Arabidopsis thaliana, increasing or generating the activity of a gene product non-targeted with the activity of a “outer membrane receptor protein precursor”, preferably being encoded by a gene comprising the nucleic acid sequence SEQ ID NO. 114979, preferably the coding region thereof, conferred the production of or the increase in linoleic acid compared with the wild type control.

[50102] The nucleic acid sequence of B1330 from Escherichia coli, e.g. as shown in the respective line in column 5 of Table I, application no. 8, has been published in B. And the activity of the gene product thereof is the activity of b1330-protein.

[50103] Accordingly, in one embodiment, the process of the present invention for producing linoleic acid in a non-human organism, like a microorganism or a plant or a part thereof, comprises increasing or generating the activity of a gene product with the activity of a gene product conferring the activity of “b1330-protein”, especially from Escherichia coli or its functional equivalent or its homolog, e.g. the increase of
[50104] (a) a gene product of a gene comprising the nucleic acid molecule as shown in the respective line in column 5 of Table I, application no. 8, preferably the coding region thereof, or a homolog or a fragment thereof, and being depicted in the same respective line as said B1330, or a functional equivalent or a homolog thereof as shown in column 8 of Table I, application no. 8, preferably the coding region thereof, particularly a homolog or functional equivalent as shown in column 8 of Table I B, application no. 8, and being depicted in the same respective line as said B1330, and preferably the activity is increased non-targeted, or
[50105] (b) a polypeptide comprising a polypeptide, a consensus sequence or at least a polypeptide motif as shown in the respective line in column 5 of Table II or in column 8 of Table IV, application no. 8, respectively, and being depicted in the same respective line as said B1330, or a functional equivalent or a homolog thereof as depicted in column 8 of Table II, application no. 8, preferably a homolog or functional equivalent as depicted in column 8 of Table II B, application no. 8, and being depicted in the same respective line as said B1330, and preferably the activity is increased non-targeted.

[50106] Accordingly, in one embodiment, the molecule which activity is to be increased in the process of the invention is the gene product with an activity as a “b1330-protein”, preferably it is the molecule of section (a) or (b) of this paragraph.

[50107] In particular, it was observed that in plants, especially in Arabidopsis thaliana, increasing or generating the activity of a gene product non-targeted with the activity of a “b1330-protein”, preferably being encoded by a gene comprising the nucleic acid sequence SEQ ID NO. 38226, preferably the coding region thereof, conferred the production of or the increase in linoleic acid compared with the wild type control.

[50108] The nucleic acid sequence of B1431 from Escherichia coli, e.g. as shown in the respective line in column 5 of Table I, application no. 8, has been published in B. And the activity of the gene product thereof is the activity of lipoprotein precursor.

[50109] Accordingly, in one embodiment, the process of the present invention for producing linoleic acid in a non-human organism, like a microorganism or a plant or a part thereof, comprises increasing or generating the activity of a gene product with the activity of a gene product conferring the activity of “lipoprotein precursor”, especially from Escherichia coli or its functional equivalent or its homolog, e.g. the increase of
[50110] (a) a gene product of a gene comprising the nucleic acid molecule as shown in the respective line in column 5 of Table I, application no. 8, preferably the coding region thereof, or a homolog or a fragment thereof, and being depicted in the same respective line as said B1431, or a functional equivalent or a homolog thereof as shown in column 8 of Table I, application no. 8, preferably the coding region thereof, particularly a homolog or functional equivalent as shown in column 8 of Table I B, application no. 8, and being depicted in the same respective line as said B1431, and preferably the activity is increased plastidic, or
[50111] (b) a polypeptide comprising a polypeptide, a consensus sequence or at least a polypeptide motif as shown in the respective line in column 5 of Table II or in column 8 of Table IV, application no. 8, respectively, and being depicted in the same respective line as said B1431, or a functional equivalent or a homolog thereof as depicted in column 8 of Table II, application no. 8, preferably a homolog or functional equivalent as depicted in column 8 of Table II B, application no. 8, and being depicted in the same respective line as said B1431, and preferably the activity is increased plastidic.

[50112] Accordingly, in one embodiment, the molecule which activity is to be increased in the process of the invention is the gene product with an activity as a “lipoprotein precursor”, preferably it is the molecule of section (a) or (b) of this paragraph.

[50113] In particular, it was observed that in plants, especially in Arabidopsis thaliana, increasing or generating the activity of a gene product plastidic with the activity of a “lipoprotein precursor”, preferably being encoded by a gene comprising the nucleic acid sequence SEQ ID NO. 38266, preferably the coding region thereof, conferred the production of or the increase in linoleic acid compared with the wild type control.

[50114] The nucleic acid sequence of B1470 from Escherichia coli, e.g. as shown in the respective line in column 5 of Table I, application no. 8, has been published in B. And the activity of the gene product thereof is the activity of b1470-protein.

[50115] Accordingly, in one embodiment, the process of the present invention for producing linoleic acid in a non-human organism, like a microorganism or a plant or a part thereof, comprises increasing or generating the activity of a gene product with the activity of a gene product conferring the activity of “b1470-protein”, especially from Escherichia coli or its functional equivalent or its homolog, e.g. the increase of
[50116] (a) a gene product of a gene comprising the nucleic acid molecule as shown in the respective line in column 5 of Table I, application no. 8, preferably the coding region thereof, or a homolog or a fragment thereof, and being depicted in the same respective line as said B1470, or a functional equivalent or a homolog thereof as shown in column 8 of Table I, application no. 8, preferably the coding region thereof, particularly a homolog or functional equivalent as shown in column 8 of Table I B, application no. 8, and being depicted in the same respective line as said B1470, and preferably the activity is increased non-targeted, or
[50117] (b) a polypeptide comprising a polypeptide, a consensus sequence or at least a polypeptide motif as shown in the respective line in column 5 of Table II or in column 8 of Table IV, application no. 8, respectively, and being depicted in the same respective line as said B1470, or a functional equivalent or a homolog thereof as depicted in column 8 of Table II, application no. 8, preferably a homolog or functional equivalent as depicted in column 8 of Table II B, application no. 8, and being depicted in the same respective line as said B1470, and preferably the activity is increased non-targeted.

[50118] Accordingly, in one embodiment, the molecule which activity is to be increased in the process of the invention is the gene product with an activity as a “b1470-protein”, preferably it is the molecule of section (a) or (b) of this paragraph.

[50119] In particular, it was observed that in plants, especially in Arabidopsis thaliana, increasing or generating the activity of a gene product non-targeted with the activity of a “b1470-protein”, preferably being encoded by a gene comprising the nucleic acid sequence SEQ ID NO. 115056, preferably the coding region thereof, conferred the production of or the increase in linoleic acid compared with the wild type control.

[50120] The nucleic acid sequence of B1589 from Escherichia coli, e.g. as shown in the respective line in column 5 of Table I, application no. 8, has been published in B. And the activity of the gene product thereof is the activity of Fe—S subunit of oxidoreductase.

[50121] Accordingly, in one embodiment, the process of the present invention for producing linoleic acid in a non-human organism, like a microorganism or a plant or a part thereof, comprises increasing or generating the activity of a gene product with the activity of a gene product conferring the activity of “Fe—S subunit of oxidoreductase”, especially from Escherichia coli or its functional equivalent or its homolog, e.g. the increase of
[50122] (a) a gene product of a gene comprising the nucleic acid molecule as shown in the respective line in column 5 of Table I, application no. 8, preferably the coding region thereof, or a homolog or a fragment thereof, and being depicted in the same respective line as said B1589, or a functional equivalent or a homolog thereof as shown in column 8 of Table I, application no. 8, preferably the coding region thereof, particularly a homolog or functional equivalent as shown in column 8 of Table I B, application no. 8, and being depicted in the same respective line as said B1589, and preferably the activity is increased non-targeted, or
[50123] (b) a polypeptide comprising a polypeptide, a consensus sequence or at least a polypeptide motif as shown in the respective line in column 5 of Table II or in column 8 of Table IV, application no. 8, respectively, and being depicted in the same respective line as said B1589, or a functional equivalent or a homolog thereof as depicted in column 8 of Table II, application no. 8, preferably a homolog or functional equivalent as depicted in column 8 of Table II B, application no. 8, and being depicted in the same respective line as said B1589, and preferably the activity is increased non-targeted.

[50124] Accordingly, in one embodiment, the molecule which activity is to be increased in the process of the invention is the gene product with an activity as a “Fe—S subunit of oxidoreductase”, preferably it is the molecule of section (a) or (b) of this paragraph.

[50125] In particular, it was observed that in plants, especially in Arabidopsis thaliana, increasing or generating the activity of a gene product non-targeted with the activity of a “Fe—S subunit of oxidoreductase”, preferably being encoded by a gene comprising the nucleic acid sequence SEQ ID NO. 78154, preferably the coding region thereof, conferred the production of or the increase in linoleic acid compared with the wild type control.

[50126] The nucleic acid sequence of B1597 from Escherichia coli, e.g. as shown in the respective line in column 5 of Table I, application no. 8, has been published in B. And the activity of the gene product thereof is the activity of acid shock protein.

[50127] Accordingly, in one embodiment, the process of the present invention for producing linoleic acid in a non-human organism, like a microorganism or a plant or a part thereof, comprises increasing or generating the activity of a gene product with the activity of a gene product conferring the activity of “acid shock protein”, especially from Escherichia coli or its functional equivalent or its homolog, e.g. the increase of
[50128] (a) a gene product of a gene comprising the nucleic acid molecule as shown in the respective line in column 5 of Table I, application no. 8, preferably the coding region thereof, or a homolog or a fragment thereof, and being depicted in the same respective line as said B1597, or a functional equivalent or a homolog thereof as shown in column 8 of Table I, application no. 8, preferably the coding region thereof, particularly a homolog or functional equivalent as shown in column 8 of Table I B, application no. 8, and being depicted in the same respective line as said B1597, and preferably the activity is increased non-targeted, or
[50129] (b) a polypeptide comprising a polypeptide, a consensus sequence or at least a polypeptide motif as shown in the respective line in column 5 of Table II or in column 8 of Table IV, application no. 8, respectively, and being depicted in the same respective line as said B1597, or a functional equivalent or a homolog thereof as depicted in column 8 of Table II, application no. 8, preferably a homolog or functional equivalent as depicted in column 8 of Table II B, application no. 8, and being depicted in the same respective line as said B1597, and preferably the activity is increased non-targeted.

[50130] Accordingly, in one embodiment, the molecule which activity is to be increased in the process of the invention is the gene product with an activity as a “acid shock protein”, preferably it is the molecule of section (a) or (b) of this paragraph.

[50131] In particular, it was observed that in plants, especially in Arabidopsis thaliana, increasing or generating the activity of a gene product non-targeted with the activity of a “acid shock protein”, preferably being encoded by a gene comprising the nucleic acid sequence SEQ ID NO. 38300, preferably the coding region thereof, conferred the production of or the increase in linoleic acid compared with the wild type control.

[50132] The nucleic acid sequence of B1611 from Escherichia coli, e.g. as shown in the respective line in column 5 of Table I, application no. 8, has been published in B. And the activity of the gene product thereof is the activity of fumarate hydratase.

[50133] Accordingly, in one embodiment, the process of the present invention for producing linoleic acid in a non-human organism, like a microorganism or a plant or a part thereof, comprises increasing or generating the activity of a gene product with the activity of a gene product conferring the activity of “fumarate hydratase”, especially from Escherichia coli or its functional equivalent or its homolog, e.g. the increase of
[50134] (a) a gene product of a gene comprising the nucleic acid molecule as shown in the respective line in column 5 of Table I, application no. 8, preferably the coding region thereof, or a homolog or a fragment thereof, and being depicted in the same respective line as said B1611, or a functional equivalent or a homolog thereof as shown in column 8 of Table I, application no. 8, preferably the coding region thereof, particularly a homolog or functional equivalent as shown in column 8 of Table I B, application no. 8, and being depicted in the same respective line as said B1611, and preferably the activity is increased plastidic, or
[50135] (b) a polypeptide comprising a polypeptide, a consensus sequence or at least a polypeptide motif as shown in the respective line in column 5 of Table II or in column 8 of Table IV, application no. 8, respectively, and being depicted in the same respective line as said B1611, or a functional equivalent or a homolog thereof as depicted in column 8 of Table II, application no. 8, preferably a homolog or functional equivalent as depicted in column 8 of Table II B, application no. 8, and being depicted in the same respective line as said B1611, and preferably the activity is increased plastidic.

[50136] Accordingly, in one embodiment, the molecule which activity is to be increased in the process of the invention is the gene product with an activity as a “fumarate hydratase”, preferably it is the molecule of section (a) or (b) of this paragraph.

[50137] In particular, it was observed that in plants, especially in Arabidopsis thaliana, increasing or generating the activity of a gene product plastidic with the activity of a “fumarate hydratase”, preferably being encoded by a gene comprising the nucleic acid sequence SEQ ID NO. 115064, preferably the coding region thereof, conferred the production of or the increase in linoleic acid compared with the wild type control.

[50138] The nucleic acid sequence of B1627 from Escherichia coli, e.g. as shown in the respective line in column 5 of Table I, application no. 8, has been published in B. And the activity of the gene product thereof is the activity of electron transport complex protein.

[50139] Accordingly, in one embodiment, the process of the present invention for producing linoleic acid in a non-human organism, like a microorganism or a plant or a part thereof, comprises increasing or generating the activity of a gene product with the activity of a gene product conferring the activity of “electron transport complex protein”, especially from Escherichia coli or its functional equivalent or its homolog, e.g. the increase of
[50140] (a) a gene product of a gene comprising the nucleic acid molecule as shown in the respective line in column 5 of Table I, application no. 8, preferably the coding region thereof, or a homolog or a fragment thereof, and being depicted in the same respective line as said B1627, or a functional equivalent or a homolog thereof as shown in column 8 of Table I, application no. 8, preferably the coding region thereof, particularly a homolog or functional equivalent as shown in column 8 of Table I B, application no. 8, and being depicted in the same respective line as said B1627, and preferably the activity is increased non-targeted, or
[50141] (b) a polypeptide comprising a polypeptide, a consensus sequence or at least a polypeptide motif as shown in the respective line in column 5 of Table II or in column 8 of Table IV, application no. 8, respectively, and being depicted in the same respective line as said B1627, or a functional equivalent or a homolog thereof as depicted in column 8 of Table II, application no. 8, preferably a homolog or functional equivalent as depicted in column 8 of Table II B, application no. 8, and being depicted in the same respective line as said B1627, and preferably the activity is increased non-targeted.

[50142] Accordingly, in one embodiment, the molecule which activity is to be increased in the process of the invention is the gene product with an activity as a “electron transport complex protein”, preferably it is the molecule of section (a) or (b) of this paragraph.

[50143] In particular, it was observed that in plants, especially in Arabidopsis thaliana, increasing or generating the activity of a gene product non-targeted with the activity of a “electron transport complex protein”, preferably being encoded by a gene comprising the nucleic acid sequence SEQ ID NO. 38345, preferably the coding region thereof, conferred the production of or the increase in linoleic acid compared with the wild type control.

[50144] The nucleic acid sequence of B1670 from Escherichia coli, e.g. as shown in the respective line in column 5 of Table I, application no. 8, has been published in B. And the activity of the gene product thereof is the activity of b1670-protein.

[50145] Accordingly, in one embodiment, the process of the present invention for producing linoleic acid in a non-human organism, like a microorganism or a plant or a part thereof, comprises increasing or generating the activity of a gene product with the activity of a gene product conferring the activity of “b1670-protein”, especially from Escherichia coli or its functional equivalent or its homolog, e.g. the increase of
[50146] (a) a gene product of a gene comprising the nucleic acid molecule as shown in the respective line in column 5 of Table I, application no. 8, preferably the coding region thereof, or a homolog or a fragment thereof, and being depicted in the same respective line as said B1670, or a functional equivalent or a homolog thereof as shown in column 8 of Table I, application no. 8, preferably the coding region thereof, particularly a homolog or functional equivalent as shown in column 8 of Table I B, application no. 8, and being depicted in the same respective line as said B1670, and preferably the activity is increased non-targeted, or
[50147] (b) a polypeptide comprising a polypeptide, a consensus sequence or at least a polypeptide motif as shown in the respective line in column 5 of Table II or in column 8 of Table IV, application no. 8, respectively, and being depicted in the same respective line as said B1670, or a functional equivalent or a homolog thereof as depicted in column 8 of Table II, application no. 8, preferably a homolog or functional equivalent as depicted in column 8 of Table II B, application no. 8, and being depicted in the same respective line as said B1670, and preferably the activity is increased non-targeted.

[50148] Accordingly, in one embodiment, the molecule which activity is to be increased in the process of the invention is the gene product with an activity as a “b1670-protein”, preferably it is the molecule of section (a) or (b) of this paragraph.

[50149] In particular, it was observed that in plants, especially in Arabidopsis thaliana, increasing or generating the activity of a gene product non-targeted with the activity of a “b1670-protein”, preferably being encoded by a gene comprising the nucleic acid sequence SEQ ID NO. 78753, preferably the coding region thereof, conferred the production of or the increase in linoleic acid compared with the wild type control.

[50150] The nucleic acid sequence of B1837 from Escherichia coli, e.g. as shown in the respective line in column 5 of Table I, application no. 8, has been published in B. And the activity of the gene product thereof is the activity of b1837-protein.

[50151] Accordingly, in one embodiment, the process of the present invention for producing linoleic acid in a non-human organism, like a microorganism or a plant or a part thereof, comprises increasing or generating the activity of a gene product with the activity of a gene product conferring the activity of “b1837-protein”, especially from Escherichia coli or its functional equivalent or its homolog, e.g. the increase of
[50152] (a) a gene product of a gene comprising the nucleic acid molecule as shown in the respective line in column 5 of Table I, application no. 8, preferably the coding region thereof, or a homolog or a fragment thereof, and being depicted in the same respective line as said B1837, or a functional equivalent or a homolog thereof as shown in column 8 of Table I, application no. 8, preferably the coding region thereof, particularly a homolog or functional equivalent as shown in column 8 of Table I B, application no. 8, and being depicted in the same respective line as said B1837, and preferably the activity is increased non-targeted, or
[50153] (b) a polypeptide comprising a polypeptide, a consensus sequence or at least a polypeptide motif as shown in the respective line in column 5 of Table II or in column 8 of Table IV, application no. 8, respectively, and being depicted in the same respective line as said B1837, or a functional equivalent or a homolog thereof as depicted in column 8 of Table II, application no. 8, preferably a homolog or functional equivalent as depicted in column 8 of Table II B, application no. 8, and being depicted in the same respective line as said B1837, and preferably the activity is increased non-targeted.

[50154] Accordingly, in one embodiment, the molecule which activity is to be increased in the process of the invention is the gene product with an activity as a “b1837-protein”, preferably it is the molecule of section (a) or (b) of this paragraph.

[50155] In particular, it was observed that in plants, especially in Arabidopsis thaliana, increasing or generating the activity of a gene product non-targeted with the activity of a “b1837-protein”, preferably being encoded by a gene comprising the nucleic acid sequence SEQ ID NO. 78953, preferably the coding region thereof, conferred the production of or the increase in linoleic acid compared with the wild type control.

[50156] The nucleic acid sequence of B2032 from Escherichia coli, e.g. as shown in the respective line in column 5 of Table I, application no. 8, has been published in B. And the activity of the gene product thereof is the activity of b2032-protein.

[50157] Accordingly, in one embodiment, the process of the present invention for producing linoleic acid in a non-human organism, like a microorganism or a plant or a part thereof, comprises increasing or generating the activity of a gene product with the activity of a gene product conferring the activity of “b2032-protein”, especially from Escherichia coli or its functional equivalent or its homolog, e.g. the increase of
[50158] (a) a gene product of a gene comprising the nucleic acid molecule as shown in the respective line in column 5 of Table I, application no. 8, preferably the coding region thereof, or a homolog or a fragment thereof, and being depicted in the same respective line as said B2032, or a functional equivalent or a homolog thereof as shown in column 8 of Table I, application no. 8, preferably the coding region thereof, particularly a homolog or functional equivalent as shown in column 8 of Table I B, application no. 8, and being depicted in the same respective line as said B2032, and preferably the activity is increased non-targeted, or
[50159] (b) a polypeptide comprising a polypeptide, a consensus sequence or at least a polypeptide motif as shown in the respective line in column 5 of Table II or in column 8 of Table IV, application no. 8, respectively, and being depicted in the same respective line as said B2032, or a functional equivalent or a homolog thereof as depicted in column 8 of Table II, application no. 8, preferably a homolog or functional equivalent as depicted in column 8 of Table II B, application no. 8, and being depicted in the same respective line as said B2032, and preferably the activity is increased non-targeted.

[50160] Accordingly, in one embodiment, the molecule which activity is to be increased in the process of the invention is the gene product with an activity as a “b2032-protein”, preferably it is the molecule of section (a) or (b) of this paragraph.

[50161] In particular, it was observed that in plants, especially in Arabidopsis thaliana, increasing or generating the activity of a gene product non-targeted with the activity of a “b2032-protein”, preferably being encoded by a gene comprising the nucleic acid sequence SEQ ID NO. 8920, preferably the coding region thereof, conferred the production of or the increase in linoleic acid compared with the wild type control.

[50162] The nucleic acid sequence of B2043 from Escherichia coli, e.g. as shown in the respective line in column 5 of Table I, application no. 8, has been published in B. And the activity of the gene product thereof is the activity of colanic acid biosynthesis protein.

[50163] Accordingly, in one embodiment, the process of the present invention for producing linoleic acid in a non-human organism, like a microorganism or a plant or a part thereof, comprises increasing or generating the activity of a gene product with the activity of a gene product conferring the activity of “colanic acid biosynthesis protein”, especially from Escherichia coli or its functional equivalent or its homolog, e.g. the increase of
[50164] (a) a gene product of a gene comprising the nucleic acid molecule as shown in the respective line in column 5 of Table I, application no. 8, preferably the coding region thereof, or a homolog or a fragment thereof, and being depicted in the same respective line as said B2043, or a functional equivalent or a homolog thereof as shown in column 8 of Table I, application no. 8, preferably the coding region thereof, particularly a homolog or functional equivalent as shown in column 8 of Table I B, application no. 8, and being depicted in the same respective line as said B2043, and preferably the activity is increased non-targeted, or
[50165] (b) a polypeptide comprising a polypeptide, a consensus sequence or at least a polypeptide motif as shown in the respective line in column 5 of Table II or in column 8 of Table IV, application no. 8, respectively, and being depicted in the same respective line as said B2043, or a functional equivalent or a homolog thereof as depicted in column 8 of Table II, application no. 8, preferably a homolog or functional equivalent as depicted in column 8 of Table II B, application no. 8, and being depicted in the same respective line as said B2043, and preferably the activity is increased non-targeted.

[50166] Accordingly, in one embodiment, the molecule which activity is to be increased in the process of the invention is the gene product with an activity as a “colanic acid biosynthesis protein”, preferably it is the molecule of section (a) or (b) of this paragraph.

[50167] In particular, it was observed that in plants, especially in Arabidopsis thaliana, increasing or generating the activity of a gene product non-targeted with the activity of a “colanic acid biosynthesis protein”, preferably being encoded by a gene comprising the nucleic acid sequence SEQ ID NO. 112193, preferably the coding region thereof, conferred the production of or the increase in linoleic acid compared with the wild type control.

[50168] The nucleic acid sequence of B2099 from Escherichia coli, e.g. as shown in the respective line in column 5 of Table I, application no. 8, has been published in B. And the activity of the gene product thereof is the activity of b2099-protein.

[50169] Accordingly, in one embodiment, the process of the present invention for producing linoleic acid in a non-human organism, like a microorganism or a plant or a part thereof, comprises increasing or generating the activity of a gene product with the activity of a gene product conferring the activity of “b2099-protein”, especially from Escherichia coli or its functional equivalent or its homolog, e.g. the increase of
[50170] (a) a gene product of a gene comprising the nucleic acid molecule as shown in the respective line in column 5 of Table I, application no. 8, preferably the coding region thereof, or a homolog or a fragment thereof, and being depicted in the same respective line as said B2099, or a functional equivalent or a homolog thereof as shown in column 8 of Table I, application no. 8, preferably the coding region thereof, particularly a homolog or functional equivalent as shown in column 8 of Table I B, application no. 8, and being depicted in the same respective line as said B2099, and preferably the activity is increased non-targeted, or
[50171] (b) a polypeptide comprising a polypeptide, a consensus sequence or at least a polypeptide motif as shown in the respective line in column 5 of Table II or in column 8 of Table IV, application no. 8, respectively, and being depicted in the same respective line as said B2099, or a functional equivalent or a homolog thereof as depicted in column 8 of Table II, application no. 8, preferably a homolog or functional equivalent as depicted in column 8 of Table II B, application no. 8, and being depicted in the same respective line as said B2099, and preferably the activity is increased non-targeted.

[50172] Accordingly, in one embodiment, the molecule which activity is to be increased in the process of the invention is the gene product with an activity as a “b2099-protein”, preferably it is the molecule of section (a) or (b) of this paragraph.

[50173] In particular, it was observed that in plants, especially in Arabidopsis thaliana, increasing or generating the activity of a gene product non-targeted with the activity of a “b2099-protein”, preferably being encoded by a gene comprising the nucleic acid sequence SEQ ID NO. 115595, preferably the coding region thereof, conferred the production of or the increase in linoleic acid compared with the wild type control.

[50174] The nucleic acid sequence of B2107 from Escherichia coli, e.g. as shown in the respective line in column 5 of Table I, application no. 8, has been published in B. And the activity of the gene product thereof is the activity of b2107-protein.

[50175] Accordingly, in one embodiment, the process of the present invention for producing linoleic acid in a non-human organism, like a microorganism or a plant or a part thereof, comprises increasing or generating the activity of a gene product with the activity of a gene product conferring the activity of “b2107-protein”, especially from Escherichia coli or its functional equivalent or its homolog, e.g. the increase of
[50176] (a) a gene product of a gene comprising the nucleic acid molecule as shown in the respective line in column 5 of Table I, application no. 8, preferably the coding region thereof, or a homolog or a fragment thereof, and being depicted in the same respective line as said B2107, or a functional equivalent or a homolog thereof as shown in column 8 of Table I, application no. 8, preferably the coding region thereof, particularly a homolog or functional equivalent as shown in column 8 of Table I B, application no. 8, and being depicted in the same respective line as said B2107, and preferably the activity is increased non-targeted, or
[50177] (b) a polypeptide comprising a polypeptide, a consensus sequence or at least a polypeptide motif as shown in the respective line in column 5 of Table II or in column 8 of Table IV, application no. 8, respectively, and being depicted in the same respective line as said B2107, or a functional equivalent or a homolog thereof as depicted in column 8 of Table II, application no. 8, preferably a homolog or functional equivalent as depicted in column 8 of Table II B, application no. 8, and being depicted in the same respective line as said B2107, and preferably the activity is increased non-targeted.

[50178] Accordingly, in one embodiment, the molecule which activity is to be increased in the process of the invention is the gene product with an activity as a “b2107-protein”, preferably it is the molecule of section (a) or (b) of this paragraph.

[50179] In particular, it was observed that in plants, especially in Arabidopsis thaliana, increasing or generating the activity of a gene product non-targeted with the activity of a “b2107-protein”, preferably being encoded by a gene comprising the nucleic acid sequence SEQ ID NO. 39002, preferably the coding region thereof, conferred the production of or the increase in linoleic acid compared with the wild type control.

[50180] The nucleic acid sequence of B2178 from Escherichia coli, e.g. as shown in the respective line in column 5 of Table I, application no. 8, has been published in B. And the activity of the gene product thereof is the activity of ABC transporter permease protein.

[50181] Accordingly, in one embodiment, the process of the present invention for producing linoleic acid in a non-human organism, like a microorganism or a plant or a part thereof, comprises increasing or generating the activity of a gene product with the activity of a gene product conferring the activity of “ABC transporter permease protein”, especially from Escherichia coli or its functional equivalent or its homolog, e.g. the increase of
[50182] (a) a gene product of a gene comprising the nucleic acid molecule as shown in the respective line in column 5 of Table I, application no. 8, preferably the coding region thereof, or a homolog or a fragment thereof, and being depicted in the same respective line as said B2178, or a functional equivalent or a homolog thereof as shown in column 8 of Table I, application no. 8, preferably the coding region thereof, particularly a homolog or functional equivalent as shown in column 8 of Table I B, application no. 8, and being depicted in the same respective line as said B2178, and preferably the activity is increased non-targeted, or
[50183] (b) a polypeptide comprising a polypeptide, a consensus sequence or at least a polypeptide motif as shown in the respective line in column 5 of Table II or in column 8 of Table IV, application no. 8, respectively, and being depicted in the same respective line as said B2178, or a functional equivalent or a homolog thereof as depicted in column 8 of Table II, application no. 8, preferably a homolog or functional equivalent as depicted in column 8 of Table II B, application no. 8, and being depicted in the same respective line as said B2178, and preferably the activity is increased non-targeted.

[50184] Accordingly, in one embodiment, the molecule which activity is to be increased in the process of the invention is the gene product with an activity as a “ABC transporter permease protein”, preferably it is the molecule of section (a) or (b) of this paragraph.

[50185] In particular, it was observed that in plants, especially in Arabidopsis thaliana, increasing or generating the activity of a gene product non-targeted with the activity of a “ABC transporter permease protein”, preferably being encoded by a gene comprising the nucleic acid sequence SEQ ID NO. 39040, preferably the coding region thereof, conferred the production of or the increase in linoleic acid compared with the wild type control.

[50186] The nucleic acid sequence of B2399 from Escherichia coli, e.g. as shown in the respective line in column 5 of Table I, application no. 8, has been published in B. And the activity of the gene product thereof is the activity of b2399-protein.

[50187] Accordingly, in one embodiment, the process of the present invention for producing linoleic acid in a non-human organism, like a microorganism or a plant or a part thereof, comprises increasing or generating the activity of a gene product with the activity of a gene product conferring the activity of “b2399-protein”, especially from Escherichia coli or its functional equivalent or its homolog, e.g. the increase of
[50188] (a) a gene product of a gene comprising the nucleic acid molecule as shown in the respective line in column 5 of Table I, application no. 8, preferably the coding region thereof, or a homolog or a fragment thereof, and being depicted in the same respective line as said B2399, or a functional equivalent or a homolog thereof as shown in column 8 of Table I, application no. 8, preferably the coding region thereof, particularly a homolog or functional equivalent as shown in column 8 of Table I B, application no. 8, and being depicted in the same respective line as said B2399, and preferably the activity is increased non-targeted, or
[50189] (b) a polypeptide comprising a polypeptide, a consensus sequence or at least a polypeptide motif as shown in the respective line in column 5 of Table II or in column 8 of Table IV, application no. 8, respectively, and being depicted in the same respective line as said B2399, or a functional equivalent or a homolog thereof as depicted in column 8 of Table II, application no. 8, preferably a homolog or functional equivalent as depicted in column 8 of Table II B, application no. 8, and being depicted in the same respective line as said B2399, and preferably the activity is increased non-targeted.

[50190] Accordingly, in one embodiment, the molecule which activity is to be increased in the process of the invention is the gene product with an activity as a “b2399-protein”, preferably it is the molecule of section (a) or (b) of this paragraph.

[50191] In particular, it was observed that in plants, especially in Arabidopsis thaliana, increasing or generating the activity of a gene product non-targeted with the activity of a “b2399-protein”, preferably being encoded by a gene comprising the nucleic acid sequence SEQ ID NO. 39237, preferably the coding region thereof, conferred the production of or the increase in linoleic acid compared with the wild type control.

[50192] The nucleic acid sequence of B2439 from Escherichia coli, e.g. as shown in the respective line in column 5 of Table I, application no. 8, has been published in B. And the activity of the gene product thereof is the activity of ethanolamine utilization protein.

[50193] Accordingly, in one embodiment, the process of the present invention for producing linoleic acid in a non-human organism, like a microorganism or a plant or a part thereof, comprises increasing or generating the activity of a gene product with the activity of a gene product conferring the activity of “ethanolamine utilization protein”, especially from Escherichia coli or its functional equivalent or its homolog, e.g. the increase of
[50194] (a) a gene product of a gene comprising the nucleic acid molecule as shown in the respective line in column 5 of Table I, application no. 8, preferably the coding region thereof, or a homolog or a fragment thereof, and being depicted in the same respective line as said B2439, or a functional equivalent or a homolog thereof as shown in column 8 of Table I, application no. 8, preferably the coding region thereof, particularly a homolog or functional equivalent as shown in column 8 of Table I B, application no. 8, and being depicted in the same respective line as said B2439, and preferably the activity is increased non-targeted, or
[50195] (b) a polypeptide comprising a polypeptide, a consensus sequence or at least a polypeptide motif as shown in the respective line in column 5 of Table II or in column 8 of Table IV, application no. 8, respectively, and being depicted in the same respective line as said B2439, or a functional equivalent or a homolog thereof as depicted in column 8 of Table II, application no. 8, preferably a homolog or functional equivalent as depicted in column 8 of Table II B, application no. 8, and being depicted in the same respective line as said B2439, and preferably the activity is increased non-targeted.

[50196] Accordingly, in one embodiment, the molecule which activity is to be increased in the process of the invention is the gene product with an activity as a “ethanolamine utilization protein”, preferably it is the molecule of section (a) or (b) of this paragraph.

[50197] In particular, it was observed that in plants, especially in Arabidopsis thaliana, increasing or generating the activity of a gene product non-targeted with the activity of a “ethanolamine utilization protein”, preferably being encoded by a gene comprising the nucleic acid sequence SEQ ID NO. 115628, preferably the coding region thereof, conferred the production of or the increase in linoleic acid compared with the wild type control.

[50198] The nucleic acid sequence of B2474 from Escherichia coli, e.g. as shown in the respective line in column 5 of Table I, application no. 8, has been published in B. And the activity of the gene product thereof is the activity of b2474-protein.

[50199] Accordingly, in one embodiment, the process of the present invention for producing linoleic acid in a non-human organism, like a microorganism or a plant or a part thereof, comprises increasing or generating the activity of a gene product with the activity of a gene product conferring the activity of “b2474-protein”, especially from Escherichia coli or its functional equivalent or its homolog, e.g. the increase of
[50200] (a) a gene product of a gene comprising the nucleic acid molecule as shown in the respective line in column 5 of Table I, application no. 8, preferably the coding region thereof, or a homolog or a fragment thereof, and being depicted in the same respective line as said B2474, or a functional equivalent or a homolog thereof as shown in column 8 of Table I, application no. 8, preferably the coding region thereof, particularly a homolog or functional equivalent as shown in column 8 of Table I B, application no. 8, and being depicted in the same respective line as said B2474, and preferably the activity is increased non-targeted, or
[50201] (b) a polypeptide comprising a polypeptide, a consensus sequence or at least a polypeptide motif as shown in the respective line in column 5 of Table II or in column 8 of Table IV, application no. 8, respectively, and being depicted in the same respective line as said B2474, or a functional equivalent or a homolog thereof as depicted in column 8 of Table II, application no. 8, preferably a homolog or functional equivalent as depicted in column 8 of Table II B, application no. 8, and being depicted in the same respective line as said B2474, and preferably the activity is increased non-targeted.

[50202] Accordingly, in one embodiment, the molecule which activity is to be increased in the process of the invention is the gene product with an activity as a “b2474-protein”, preferably it is the molecule of section (a) or (b) of this paragraph.

[50203] In particular, it was observed that in plants, especially in Arabidopsis thaliana, increasing or generating the activity of a gene product non-targeted with the activity of a “b2474-protein”, preferably being encoded by a gene comprising the nucleic acid sequence SEQ ID NO. 40329, preferably the coding region thereof, conferred the production of or the increase in linoleic acid compared with the wild type control.

[50204] The nucleic acid sequence of B2613 from Escherichia coli, e.g. as shown in the respective line in column 5 of Table I, application no. 8, has been published in B. And the activity of the gene product thereof is the activity of b2613-protein.

[50205] Accordingly, in one embodiment, the process of the present invention for producing linoleic acid in a non-human organism, like a microorganism or a plant or a part thereof, comprises increasing or generating the activity of a gene product with the activity of a gene product conferring the activity of “b2613-protein”, especially from Escherichia coli or its functional equivalent or its homolog, e.g. the increase of
[50206] (a) a gene product of a gene comprising the nucleic acid molecule as shown in the respective line in column 5 of Table I, application no. 8, preferably the coding region thereof, or a homolog or a fragment thereof, and being depicted in the same respective line as said B2613, or a functional equivalent or a homolog thereof as shown in column 8 of Table I, application no. 8, preferably the coding region thereof, particularly a homolog or functional equivalent as shown in column 8 of Table I B, application no. 8, and being depicted in the same respective line as said B2613, and preferably the activity is increased non-targeted, or
[50207] (b) a polypeptide comprising a polypeptide, a consensus sequence or at least a polypeptide motif as shown in the respective line in column 5 of Table II or in column 8 of Table IV, application no. 8, respectively, and being depicted in the same respective line as said B2613, or a functional equivalent or a homolog thereof as depicted in column 8 of Table II, application no. 8, preferably a homolog or functional equivalent as depicted in column 8 of Table II B, application no. 8, and being depicted in the same respective line as said B2613, and preferably the activity is increased non-targeted.

[50208] Accordingly, in one embodiment, the molecule which activity is to be increased in the process of the invention is the gene product with an activity as a “b2613-protein”, preferably it is the molecule of section (a) or (b) of this paragraph.

[50209] In particular, it was observed that in plants, especially in Arabidopsis thaliana, increasing or generating the activity of a gene product non-targeted with the activity of a “b2613-protein”, preferably being encoded by a gene comprising the nucleic acid sequence SEQ ID NO. 40665, preferably the coding region thereof, conferred the production of or the increase in linoleic acid compared with the wild type control.

[50210] The nucleic acid sequence of B2682 from Escherichia coli, e.g. as shown in the respective line in column 5 of Table I, application no. 8, has been published in B. And the activity of the gene product thereof is the activity of b2682-protein.

[50211] Accordingly, in one embodiment, the process of the present invention for producing linoleic acid in a non-human organism, like a microorganism or a plant or a part thereof, comprises increasing or generating the activity of a gene product with the activity of a gene product conferring the activity of “b2682-protein”, especially from Escherichia coli or its functional equivalent or its homolog, e.g. the increase of
[50212] (a) a gene product of a gene comprising the nucleic acid molecule as shown in the respective line in column 5 of Table I, application no. 8, preferably the coding region thereof, or a homolog or a fragment thereof, and being depicted in the same respective line as said B2682, or a functional equivalent or a homolog thereof as shown in column 8 of Table I, application no. 8, preferably the coding region thereof, particularly a homolog or functional equivalent as shown in column 8 of Table I B, application no. 8, and being depicted in the same respective line as said B2682, and preferably the activity is increased non-targeted, or
[50213] (b) a polypeptide comprising a polypeptide, a consensus sequence or at least a polypeptide motif as shown in the respective line in column 5 of Table II or in column 8 of Table IV, application no. 8, respectively, and being depicted in the same respective line as said B2682, or a functional equivalent or a homolog thereof as depicted in column 8 of Table II, application no. 8, preferably a homolog or functional equivalent as depicted in column 8 of Table II B, application no. 8, and being depicted in the same respective line as said B2682, and preferably the activity is increased non-targeted.

[50214] Accordingly, in one embodiment, the molecule which activity is to be increased in the process of the invention is the gene product with an activity as a “b2682-protein”, preferably it is the molecule of section (a) or (b) of this paragraph.

[50215] In particular, it was observed that in plants, especially in Arabidopsis thaliana, increasing or generating the activity of a gene product non-targeted with the activity of a “b2682-protein”, preferably being encoded by a gene comprising the nucleic acid sequence SEQ ID NO. 115655, preferably the coding region thereof, conferred the production of or the increase in linoleic acid compared with the wild type control.

[50216] The nucleic acid sequence of B2790 from Escherichia coli, e.g. as shown in the respective line in column 5 of Table I, application no. 8, has been published in B. And the activity of the gene product thereof is the activity of flavodoxin.

[50217] Accordingly, in one embodiment, the process of the present invention for producing linoleic acid in a non-human organism, like a microorganism or a plant or a part thereof, comprises increasing or generating the activity of a gene product with the activity of a gene product conferring the activity of “flavodoxin”, especially from Escherichia coli or its functional equivalent or its homolog, e.g. the increase of
[50218] (a) a gene product of a gene comprising the nucleic acid molecule as shown in the respective line in column 5 of Table I, application no. 8, preferably the coding region thereof, or a homolog or a fragment thereof, and being depicted in the same respective line as said B2790, or a functional equivalent or a homolog thereof as shown in column 8 of Table I, application no. 8, preferably the coding region thereof, particularly a homolog or functional equivalent as shown in column 8 of Table I B, application no. 8, and being depicted in the same respective line as said B2790, and preferably the activity is increased non-targeted, or
[50219] (b) a polypeptide comprising a polypeptide, a consensus sequence or at least a polypeptide motif as shown in the respective line in column 5 of Table II or in column 8 of Table IV, application no. 8, respectively, and being depicted in the same respective line as said B2790, or a functional equivalent or a homolog thereof as depicted in column 8 of Table II, application no. 8, preferably a homolog or functional equivalent as depicted in column 8 of Table II B, application no. 8, and being depicted in the same respective line as said B2790, and preferably the activity is increased non-targeted.

[50220] Accordingly, in one embodiment, the molecule which activity is to be increased in the process of the invention is the gene product with an activity as a “flavodoxin”, preferably it is the molecule of section (a) or (b) of this paragraph.

[50221] In particular, it was observed that in plants, especially in Arabidopsis thaliana, increasing or generating the activity of a gene product non-targeted with the activity of a “flavodoxin”, preferably being encoded by a gene comprising the nucleic acid sequence SEQ ID NO. 115719, preferably the coding region thereof, conferred the production of or the increase in linoleic acid compared with the wild type control.

[50222] The nucleic acid sequence of B2836 from Escherichia coli, e.g. as shown in the respective line in column 5 of Table I, application no. 8, has been published in B. And the activity of the gene product thereof is the activity of AAS bifunctional protein.

[50223] Accordingly, in one embodiment, the process of the present invention for producing linoleic acid in a non-human organism, like a microorganism or a plant or a part thereof, comprises increasing or generating the activity of a gene product with the activity of a gene product conferring the activity of “AAS bifunctional protein”, especially from Escherichia coli or its functional equivalent or its homolog, e.g. the increase of
[50224] (a) a gene product of a gene comprising the nucleic acid molecule as shown in the respective line in column 5 of Table I, application no. 8, preferably the coding region thereof, or a homolog or a fragment thereof, and being depicted in the same respective line as said B2836, or a functional equivalent or a homolog thereof as shown in column 8 of Table I, application no. 8, preferably the coding region thereof, particularly a homolog or functional equivalent as shown in column 8 of Table I B, application no. 8, and being depicted in the same respective line as said B2836, and preferably the activity is increased plastidic, or
[50225] (b) a polypeptide comprising a polypeptide, a consensus sequence or at least a polypeptide motif as shown in the respective line in column 5 of Table II or in column 8 of Table IV, application no. 8, respectively, and being depicted in the same respective line as said B2836, or a functional equivalent or a homolog thereof as depicted in column 8 of Table II, application no. 8, preferably a homolog or functional equivalent as depicted in column 8 of Table II B, application no. 8, and being depicted in the same respective line as said B2836, and preferably the activity is increased plastidic.

[50226] Accordingly, in one embodiment, the molecule which activity is to be increased in the process of the invention is the gene product with an activity as a “AAS bifunctional protein”, preferably it is the molecule of section (a) or (b) of this paragraph.

[50227] In particular, it was observed that in plants, especially in Arabidopsis thaliana, increasing or generating the activity of a gene product plastidic with the activity of a “AAS bifunctional protein”, preferably being encoded by a gene comprising the nucleic acid sequence SEQ ID NO. 115791, preferably the coding region thereof, conferred the production of or the increase in linoleic acid compared with the wild type control.

[50228] The nucleic acid sequence of B2849 from Escherichia coli, e.g. as shown in the respective line in column 5 of Table I, application no. 8, has been published in B. And the activity of the gene product thereof is the activity of b2849-protein.

[50229] Accordingly, in one embodiment, the process of the present invention for producing linoleic acid in a non-human organism, like a microorganism or a plant or a part thereof, comprises increasing or generating the activity of a gene product with the activity of a gene product conferring the activity of “b2849-protein”, especially from Escherichia coli or its functional equivalent or its homolog, e.g. the increase of
[50230] (a) a gene product of a gene comprising the nucleic acid molecule as shown in the respective line in column 5 of Table I, application no. 8, preferably the coding region thereof, or a homolog or a fragment thereof, and being depicted in the same respective line as said B2849, or a functional equivalent or a homolog thereof as shown in column 8 of Table I, application no. 8, preferably the coding region thereof, particularly a homolog or functional equivalent as shown in column 8 of Table I B, application no. 8, and being depicted in the same respective line as said B2849, and preferably the activity is increased non-targeted, or
[50231] (b) a polypeptide comprising a polypeptide, a consensus sequence or at least a polypeptide motif as shown in the respective line in column 5 of Table II or in column 8 of Table IV, application no. 8, respectively, and being depicted in the same respective line as said B2849, or a functional equivalent or a homolog thereof as depicted in column 8 of Table II, application no. 8, preferably a homolog or functional equivalent as depicted in column 8 of Table II B, application no. 8, and being depicted in the same respective line as said B2849, and preferably the activity is increased non-targeted.

[50232] Accordingly, in one embodiment, the molecule which activity is to be increased in the process of the invention is the gene product with an activity as a “b2849-protein”, preferably it is the molecule of section (a) or (b) of this paragraph.

[50233] In particular, it was observed that in plants, especially in Arabidopsis thaliana, increasing or generating the activity of a gene product non-targeted with the activity of a “b2849-protein”, preferably being encoded by a gene comprising the nucleic acid sequence SEQ ID NO. 81980, preferably the coding region thereof, conferred the production of or the increase in linoleic acid compared with the wild type control.

[50234] The nucleic acid sequence of B2866 from Escherichia coli, e.g. as shown in the respective line in column 5 of Table I, application no. 8, has been published in B. And the activity of the gene product thereof is the activity of xanthine dehydrogenase.

[50235] Accordingly, in one embodiment, the process of the present invention for producing linoleic acid in a non-human organism, like a microorganism or a plant or a part thereof, comprises increasing or generating the activity of a gene product with the activity of a gene product conferring the activity of “xanthine dehydrogenase”, especially from Escherichia coli or its functional equivalent or its homolog, e.g. the increase of
[50236] (a) a gene product of a gene comprising the nucleic acid molecule as shown in the respective line in column 5 of Table I, application no. 8, preferably the coding region thereof, or a homolog or a fragment thereof, and being depicted in the same respective line as said B2866, or a functional equivalent or a homolog thereof as shown in column 8 of Table I, application no. 8, preferably the coding region thereof, particularly a homolog or functional equivalent as shown in column 8 of Table I B, application no. 8, and being depicted in the same respective line as said B2866, and preferably the activity is increased non-targeted, or
[50237] (b) a polypeptide comprising a polypeptide, a consensus sequence or at least a polypeptide motif as shown in the respective line in column 5 of Table II or in column 8 of Table IV, application no. 8, respectively, and being depicted in the same respective line as said B2866, or a functional equivalent or a homolog thereof as depicted in column 8 of Table II, application no. 8, preferably a homolog or functional equivalent as depicted in column 8 of Table II B, application no. 8, and being depicted in the same respective line as said B2866, and preferably the activity is increased non-targeted.

[50238] Accordingly, in one embodiment, the molecule which activity is to be increased in the process of the invention is the gene product with an activity as a “xanthine dehydrogenase”, preferably it is the molecule of section (a) or (b) of this paragraph.

[50239] In particular, it was observed that in plants, especially in Arabidopsis thaliana, increasing or generating the activity of a gene product non-targeted with the activity of a “xanthine dehydrogenase”, preferably being encoded by a gene comprising the nucleic acid sequence SEQ ID NO. 115864, preferably the coding region thereof, conferred the production of or the increase in linoleic acid compared with the wild type control.

[50240] The nucleic acid sequence of B2909 from Escherichia coli, e.g. as shown in the respective line in column 5 of Table I, application no. 8, has been published in B. And the activity of the gene product thereof is the activity of b2909-protein.

[50241] Accordingly, in one embodiment, the process of the present invention for producing linoleic acid in a non-human organism, like a microorganism or a plant or a part thereof, comprises increasing or generating the activity of a gene product with the activity of a gene product conferring the activity of “b2909-protein”, especially from Escherichia coli or its functional equivalent or its homolog, e.g. the increase of
[50242] (a) a gene product of a gene comprising the nucleic acid molecule as shown in the respective line in column 5 of Table I, application no. 8, preferably the coding region thereof, or a homolog or a fragment thereof, and being depicted in the same respective line as said B2909, or a functional equivalent or a homolog thereof as shown in column 8 of Table I, application no. 8, preferably the coding region thereof, particularly a homolog or functional equivalent as shown in column 8 of Table I B, application no. 8, and being depicted in the same respective line as said B2909, and preferably the activity is increased non-targeted, or
[50243] (b) a polypeptide comprising a polypeptide, a consensus sequence or at least a polypeptide motif as shown in the respective line in column 5 of Table II or in column 8 of Table IV, application no. 8, respectively, and being depicted in the same respective line as said B2909, or a functional equivalent or a homolog thereof as depicted in column 8 of Table II, application no. 8, preferably a homolog or functional equivalent as depicted in column 8 of Table II B, application no. 8, and being depicted in the same respective line as said B2909, and preferably the activity is increased non-targeted.

[50244] Accordingly, in one embodiment, the molecule which activity is to be increased in the process of the invention is the gene product with an activity as a “b2909-protein”, preferably it is the molecule of section (a) or (b) of this paragraph.

[50245] In particular, it was observed that in plants, especially in Arabidopsis thaliana, increasing or generating the activity of a gene product non-targeted with the activity of a “b2909-protein”, preferably being encoded by a gene comprising the nucleic acid sequence SEQ ID NO. 41006, preferably the coding region thereof, conferred the production of or the increase in linoleic acid compared with the wild type control.

[50246] The nucleic acid sequence of B3379 from Escherichia coli, e.g. as shown in the respective line in column 5 of Table I, application no. 8, has been published in B. And the activity of the gene product thereof is the activity of phosphotriesterase.

[50247] Accordingly, in one embodiment, the process of the present invention for producing linoleic acid in a non-human organism, like a microorganism or a plant or a part thereof, comprises increasing or generating the activity of a gene product with the activity of a gene product conferring the activity of “phosphotriesterase”, especially from Escherichia coli or its functional equivalent or its homolog, e.g. the increase of
[50248] (a) a gene product of a gene comprising the nucleic acid molecule as shown in the respective line in column 5 of Table I, application no. 8, preferably the coding region thereof, or a homolog or a fragment thereof, and being depicted in the same respective line as said B3379, or a functional equivalent or a homolog thereof as shown in column 8 of Table I, application no. 8, preferably the coding region thereof, particularly a homolog or functional equivalent as shown in column 8 of Table I B, application no. 8, and being depicted in the same respective line as said B3379, and preferably the activity is increased non-targeted, or
[50249] (b) a polypeptide comprising a polypeptide, a consensus sequence or at least a polypeptide motif as shown in the respective line in column 5 of Table II or in column 8 of Table IV, application no. 8, respectively, and being depicted in the same respective line as said B3379, or a functional equivalent or a homolog thereof as depicted in column 8 of Table II, application no. 8, preferably a homolog or functional equivalent as depicted in column 8 of Table II B, application no. 8, and being depicted in the same respective line as said B3379, and preferably the activity is increased non-targeted.

[50250] Accordingly, in one embodiment, the molecule which activity is to be increased in the process of the invention is the gene product with an activity as a “phosphotriesterase”, preferably it is the molecule of section (a) or (b) of this paragraph.

[50251] In particular, it was observed that in plants, especially in Arabidopsis thaliana, increasing or generating the activity of a gene product non-targeted with the activity of a “phosphotriesterase”, preferably being encoded by a gene comprising the nucleic acid sequence SEQ ID NO. 116110, preferably the coding region thereof, conferred the production of or the increase in linoleic acid compared with the wild type control.

[50252] The nucleic acid sequence of B3451 from Escherichia coli, e.g. as shown in the respective line in column 5 of Table I, application no. 8, has been published in B. And the activity of the gene product thereof is the activity of sn-glycerol-3-phosphate transport system permease protein.

[50253] Accordingly, in one embodiment, the process of the present invention for producing linoleic acid in a non-human organism, like a microorganism or a plant or a part thereof, comprises increasing or generating the activity of a gene product with the activity of a gene product conferring the activity of “sn-glycerol-3-phosphate transport system permease protein”, especially from Escherichia coli or its functional equivalent or its homolog, e.g. the increase of
[50254] (a) a gene product of a gene comprising the nucleic acid molecule as shown in the respective line in column 5 of Table I, application no. 8, preferably the coding region thereof, or a homolog or a fragment thereof, and being depicted in the same respective line as said B3451, or a functional equivalent or a homolog thereof as shown in column 8 of Table I, application no. 8, preferably the coding region thereof, particularly a homolog or functional equivalent as shown in column 8 of Table I B, application no. 8, and being depicted in the same respective line as said B3451, and preferably the activity is increased plastidic, or
[50255] (b) a polypeptide comprising a polypeptide, a consensus sequence or at least a polypeptide motif as shown in the respective line in column 5 of Table II or in column 8 of Table IV, application no. 8, respectively, and being depicted in the same respective line as said B3451, or a functional equivalent or a homolog thereof as depicted in column 8 of Table II, application no. 8, preferably a homolog or functional equivalent as depicted in column 8 of Table II B, application no. 8, and being depicted in the same respective line as said B3451, and preferably the activity is increased plastidic.

[50256] Accordingly, in one embodiment, the molecule which activity is to be increased in the process of the invention is the gene product with an activity as a “sn-glycerol-3-phosphate transport system permease protein”, preferably it is the molecule of section (a) or (b) of this paragraph.

[50257] In particular, it was observed that in plants, especially in Arabidopsis thaliana, increasing or generating the activity of a gene product plastidic with the activity of a “sn-glycerol-3-phosphate transport system permease protein”, preferably being encoded by a gene comprising the nucleic acid sequence SEQ ID NO. 116172, preferably the coding region thereof, conferred the production of or the increase in linoleic acid compared with the wild type control.

[50258] The nucleic acid sequence of B3823 from Escherichia coli, e.g. as shown in the respective line in column 5 of Table I, application no. 8, has been published in B. And the activity of the gene product thereof is the activity of threonine efflux protein.

[50259] Accordingly, in one embodiment, the process of the present invention for producing linoleic acid in a non-human organism, like a microorganism or a plant or a part thereof, comprises increasing or generating the activity of a gene product with the activity of a gene product conferring the activity of “threonine efflux protein”, especially from Escherichia coli or its functional equivalent or its homolog, e.g. the increase of
[50260] (a) a gene product of a gene comprising the nucleic acid molecule as shown in the respective line in column 5 of Table I, application no. 8, preferably the coding region thereof, or a homolog or a fragment thereof, and being depicted in the same respective line as said B3823, or a functional equivalent or a homolog thereof as shown in column 8 of Table I, application no. 8, preferably the coding region thereof, particularly a homolog or functional equivalent as shown in column 8 of Table I B, application no. 8, and being depicted in the same respective line as said B3823, and preferably the activity is increased non-targeted, or
[50261] (b) a polypeptide comprising a polypeptide, a consensus sequence or at least a polypeptide motif as shown in the respective line in column 5 of Table II or in column 8 of Table IV, application no. 8, respectively, and being depicted in the same respective line as said B3823, or a functional equivalent or a homolog thereof as depicted in column 8 of Table II, application no. 8, preferably a homolog or functional equivalent as depicted in column 8 of Table II B, application no. 8, and being depicted in the same respective line as said B3823, and preferably the activity is increased non-targeted.

[50262] Accordingly, in one embodiment, the molecule which activity is to be increased in the process of the invention is the gene product with an activity as a “threonine efflux protein”, preferably it is the molecule of section (a) or (b) of this paragraph.

[50263] In particular, it was observed that in plants, especially in Arabidopsis thaliana, increasing or generating the activity of a gene product non-targeted with the activity of a “threonine efflux protein”, preferably being encoded by a gene comprising the nucleic acid sequence SEQ ID NO. 10726, preferably the coding region thereof, conferred the production of or the increase in linoleic acid compared with the wild type control.

[50264] The nucleic acid sequence of B3845 from Escherichia coli, e.g. as shown in the respective line in column 5 of Table I, application no. 8, has been published in B. And the activity of the gene product thereof is the activity of 3-ketoacyl-CoA thiolase.

[50265] Accordingly, in one embodiment, the process of the present invention for producing linoleic acid in a non-human organism, like a microorganism or a plant or a part thereof, comprises increasing or generating the activity of a gene product with the activity of a gene product conferring the activity of “3-ketoacyl-CoA thiolase”, especially from Escherichia coli or its functional equivalent or its homolog, e.g. the increase of
[50266] (a) a gene product of a gene comprising the nucleic acid molecule as shown in the respective line in column 5 of Table I, application no. 8, preferably the coding region thereof, or a homolog or a fragment thereof, and being depicted in the same respective line as said B3845, or a functional equivalent or a homolog thereof as shown in column 8 of Table I, application no. 8, preferably the coding region thereof, particularly a homolog or functional equivalent as shown in column 8 of Table I B, application no. 8, and being depicted in the same respective line as said B3845, and preferably the activity is increased plastidic, or
[50267] (b) a polypeptide comprising a polypeptide, a consensus sequence or at least a polypeptide motif as shown in the respective line in column 5 of Table II or in column 8 of Table IV, application no. 8, respectively, and being depicted in the same respective line as said B3845, or a functional equivalent or a homolog thereof as depicted in column 8 of Table II, application no. 8, preferably a homolog or functional equivalent as depicted in column 8 of Table II B, application no. 8, and being depicted in the same respective line as said B3845, and preferably the activity is increased plastidic.

[50268] Accordingly, in one embodiment, the molecule which activity is to be increased in the process of the invention is the gene product with an activity as a “3-ketoacyl-CoA thiolase”, preferably it is the molecule of section (a) or (b) of this paragraph.

[50269] In particular, it was observed that in plants, especially in Arabidopsis thaliana, increasing or generating the activity of a gene product plastidic with the activity of a “3-ketoacyl-CoA thiolase”, preferably being encoded by a gene comprising the nucleic acid sequence SEQ ID NO. 100675, preferably the coding region thereof, conferred the production of or the increase in linoleic acid compared with the wild type control.

[50270] The nucleic acid sequence of GM02LC38418 from Glycine max, e.g. as shown in the respective line in column 5 of Table I, application no. 8, is unpublished. And the activity of the gene product thereof is the activity of GM02LC38418-protein.

[50271] Accordingly, in one embodiment, the process of the present invention for producing linoleic acid in a non-human organism, like a microorganism or a plant or a part thereof, comprises increasing or generating the activity of a gene product with the activity of a gene product conferring the activity of “GM02LC38418-protein”, especially from Glycine max or its functional equivalent or its homolog, e.g. the increase of
[50272] (a) a gene product of a gene comprising the nucleic acid molecule as shown in the respective line in column 5 of Table I, application no. 8, preferably the coding region thereof, or a homolog or a fragment thereof, and being depicted in the same respective line as said GM02LC38418, or a functional equivalent or a homolog thereof as shown in column 8 of Table I, application no. 8, preferably the coding region thereof, particularly a homolog or functional equivalent as shown in column 8 of Table I B, application no. 8, and being depicted in the same respective line as said GM02LC38418, and preferably the activity is increased non-targeted, or
[50273] (b) a polypeptide comprising a polypeptide, a consensus sequence or at least a polypeptide motif as shown in the respective line in column 5 of Table II or in column 8 of Table IV, application no. 8, respectively, and being depicted in the same respective line as said GM02LC38418, or a functional equivalent or a homolog thereof as depicted in column 8 of Table II, application no. 8, preferably a homolog or functional equivalent as depicted in column 8 of Table II B, application no. 8, and being depicted in the same respective line as said GM02LC38418, and preferably the activity is increased non-targeted.

[50274] Accordingly, in one embodiment, the molecule which activity is to be increased in the process of the invention is the gene product with an activity as a “GM02LC38418-protein”, preferably it is the molecule of section (a) or (b) of this paragraph.

[50275] In particular, it was observed that in plants, especially in Arabidopsis thaliana, increasing or generating the activity of a gene product non-targeted with the activity of a “GM02LC38418-protein”, preferably being encoded by a gene comprising the nucleic acid sequence SEQ ID NO. 116312, preferably the coding region thereof, conferred the production of or the increase in linoleic acid compared with the wild type control.

[50276] The nucleic acid sequence of Sll1032 from Synechocystis sp., e.g. as shown in the respective line in column 5 of Table I, application no. 8, has been published in C. And the activity of the gene product thereof is the activity of sll1032-protein.

[50277] Accordingly, in one embodiment, the process of the present invention for producing linoleic acid in a non-human organism, like a microorganism or a plant or a part thereof, comprises increasing or generating the activity of a gene product with the activity of a gene product conferring the activity of “sll1032-protein”, especially from Synechocystis sp. or its functional equivalent or its homolog, e.g. the increase of
[50278] (a) a gene product of a gene comprising the nucleic acid molecule as shown in the respective line in column 5 of Table I, application no. 8, preferably the coding region thereof, or a homolog or a fragment thereof, and being depicted in the same respective line as said Sll1032, or a functional equivalent or a homolog thereof as shown in column 8 of Table I, application no. 8, preferably the coding region thereof, particularly a homolog or functional equivalent as shown in column 8 of Table I B, application no. 8, and being depicted in the same respective line as said Sll1032, and preferably the activity is increased mitochondrial, or
[50279] (b) a polypeptide comprising a polypeptide, a consensus sequence or at least a polypeptide motif as shown in the respective line in column 5 of Table II or in column 8 of Table IV, application no. 8, respectively, and being depicted in the same respective line as said Sll1032, or a functional equivalent or a homolog thereof as depicted in column 8 of Table II, application no. 8, preferably a homolog or functional equivalent as depicted in column 8 of Table II B, application no. 8, and being depicted in the same respective line as said Sll1032, and preferably the activity is increased mitochondrial.

[50280] Accordingly, in one embodiment, the molecule which activity is to be increased in the process of the invention is the gene product with an activity as a “sll1032-protein”, preferably it is the molecule of section (a) or (b) of this paragraph.

[50281] In particular, it was observed that in plants, especially in Arabidopsis thaliana, increasing or generating the activity of a gene product mitochondrial with the activity of a “sll1032-protein”, preferably being encoded by a gene comprising the nucleic acid sequence SEQ ID NO. 85723, preferably the coding region thereof, conferred the production of or the increase in linoleic acid compared with the wild type control.

[50282] The nucleic acid sequence of Sll1056 from Synechocystis sp., e.g. as shown in the respective line in column 5 of Table I, application no. 8, has been published in C. And the activity of the gene product thereof is the activity of phosphoribosylformyl glycinamidine synthase subunit.

[50283] Accordingly, in one embodiment, the process of the present invention for producing linoleic acid in a non-human organism, like a microorganism or a plant or a part thereof, comprises increasing or generating the activity of a gene product with the activity of a gene product conferring the activity of “phosphoribosylformyl glycinamidine synthase subunit”, especially from Synechocystis sp. or its functional equivalent or its homolog, e.g. the increase of
[50284] (a) a gene product of a gene comprising the nucleic acid molecule as shown in the respective line in column 5 of Table I, application no. 8, preferably the coding region thereof, or a homolog or a fragment thereof, and being depicted in the same respective line as said Sll1056, or a functional equivalent or a homolog thereof as shown in column 8 of Table I, application no. 8, preferably the coding region thereof, particularly a homolog or functional equivalent as shown in column 8 of Table I B, application no. 8, and being depicted in the same respective line as said Sll1056, and preferably the activity is increased plastidic, or
[50285] (b) a polypeptide comprising a polypeptide, a consensus sequence or at least a polypeptide motif as shown in the respective line in column 5 of Table II or in column 8 of Table IV, application no. 8, respectively, and being depicted in the same respective line as said Sll1056, or a functional equivalent or a homolog thereof as depicted in column 8 of Table II, application no. 8, preferably a homolog or functional equivalent as depicted in column 8 of Table II B, application no. 8, and being depicted in the same respective line as said Sll1056, and preferably the activity is increased plastidic.

[50286] Accordingly, in one embodiment, the molecule which activity is to be increased in the process of the invention is the gene product with an activity as a “phosphoribosylformyl glycinamidine synthase subunit”, preferably it is the molecule of section (a) or (b) of this paragraph.

[50287] In particular, it was observed that in plants, especially in Arabidopsis thaliana, increasing or generating the activity of a gene product plastidic with the activity of a “phosphoribosylformyl glycinamidine synthase subunit”, preferably being encoded by a gene comprising the nucleic acid sequence SEQ ID NO. 52660, preferably the coding region thereof, conferred the production of or the increase in linoleic acid compared with the wild type control.

[50288] The nucleic acid sequence of Sll1443 from Synechocystis sp., e.g. as shown in the respective line in column 5 of Table I, application no. 8, has been published in C. And the activity of the gene product thereof is the activity of CTP synthetase.

[50289] Accordingly, in one embodiment, the process of the present invention for producing linoleic acid in a non-human organism, like a microorganism or a plant or a part thereof, comprises increasing or generating the activity of a gene product with the activity of a gene product conferring the activity of “CTP synthetase”, especially from Synechocystis sp. or its functional equivalent or its homolog, e.g. the increase of
[50290] (a) a gene product of a gene comprising the nucleic acid molecule as shown in the respective line in column 5 of Table I, application no. 8, preferably the coding region thereof, or a homolog or a fragment thereof, and being depicted in the same respective line as said Sll1443, or a functional equivalent or a homolog thereof as shown in column 8 of Table I, application no. 8, preferably the coding region thereof, particularly a homolog or functional equivalent as shown in column 8 of Table I B, application no. 8, and being depicted in the same respective line as said Sll1443, and preferably the activity is increased mitochondrial, or
[50291] (b) a polypeptide comprising a polypeptide, a consensus sequence or at least a polypeptide motif as shown in the respective line in column 5 of Table II or in column 8 of Table IV, application no. 8, respectively, and being depicted in the same respective line as said Sll1443, or a functional equivalent or a homolog thereof as depicted in column 8 of Table II, application no. 8, preferably a homolog or functional equivalent as depicted in column 8 of Table II B, application no. 8, and being depicted in the same respective line as said Sll1443, and preferably the activity is increased mitochondrial.

[50292] Accordingly, in one embodiment, the molecule which activity is to be increased in the process of the invention is the gene product with an activity as a “CTP synthetase”, preferably it is the molecule of section (a) or (b) of this paragraph.

[50293] In particular, it was observed that in plants, especially in Arabidopsis thaliana, increasing or generating the activity of a gene product mitochondrial with the activity of a “CTP synthetase”, preferably being encoded by a gene comprising the nucleic acid sequence SEQ ID NO. 53878, preferably the coding region thereof, conferred the production of or the increase in linoleic acid compared with the wild type control.

[50294] The nucleic acid sequence of Sll1498 from Synechocystis sp., e.g. as shown in the respective line in column 5 of Table I, application no. 8, has been published in C. And the activity of the gene product thereof is the activity of carbamoyl-phosphate synthase subunit.

[50295] Accordingly, in one embodiment, the process of the present invention for producing linoleic acid in a non-human organism, like a microorganism or a plant or a part thereof, comprises increasing or generating the activity of a gene product with the activity of a gene product conferring the activity of “carbamoyl-phosphate synthase subunit”, especially from Synechocystis sp. or its functional equivalent or its homolog, e.g. the increase of
[50296] (a) a gene product of a gene comprising the nucleic acid molecule as shown in the respective line in column 5 of Table I, application no. 8, preferably the coding region thereof, or a homolog or a fragment thereof, and being depicted in the same respective line as said Sll1498, or a functional equivalent or a homolog thereof as shown in column 8 of Table I, application no. 8, preferably the coding region thereof, particularly a homolog or functional equivalent as shown in column 8 of Table I B, application no. 8, and being depicted in the same respective line as said Sll1498, and preferably the activity is increased non-targeted, or
[50297] (b) a polypeptide comprising a polypeptide, a consensus sequence or at least a polypeptide motif as shown in the respective line in column 5 of Table II or in column 8 of Table IV, application no. 8, respectively, and being depicted in the same respective line as said Sll1498, or a functional equivalent or a homolog thereof as depicted in column 8 of Table II, application no. 8, preferably a homolog or functional equivalent as depicted in column 8 of Table II B, application no. 8, and being depicted in the same respective line as said Sll1498, and preferably the activity is increased non-targeted.

[50298] Accordingly, in one embodiment, the molecule which activity is to be increased in the process of the invention is the gene product with an activity as a “carbamoyl-phosphate synthase subunit”, preferably it is the molecule of section (a) or (b) of this paragraph.

[50299] In particular, it was observed that in plants, especially in Arabidopsis thaliana, increasing or generating the activity of a gene product non-targeted with the activity of a “carbamoylphosphate synthase subunit”, preferably being encoded by a gene comprising the nucleic acid sequence SEQ ID NO. 95047, preferably the coding region thereof, conferred the production of or the increase in linoleic acid compared with the wild type control.

[50300] The nucleic acid sequence of Sll1917 from Synechocystis sp., e.g. as shown in the respective line in column 5 of Table I, application no. 8, has been published in C. And the activity of the gene product thereof is the activity of coproporphyrinogen III oxidase.

[50301] Accordingly, in one embodiment, the process of the present invention for producing linoleic acid in a non-human organism, like a microorganism or a plant or a part thereof, comprises increasing or generating the activity of a gene product with the activity of a gene product conferring the activity of “coproporphyrinogen III oxidase”, especially from Synechocystis sp. or its functional equivalent or its homolog, e.g. the increase of
[50302] (a) a gene product of a gene comprising the nucleic acid molecule as shown in the respective line in column 5 of Table I, application no. 8, preferably the coding region thereof, or a homolog or a fragment thereof, and being depicted in the same respective line as said Sll1917, or a functional equivalent or a homolog thereof as shown in column 8 of Table I, application no. 8, preferably the coding region thereof, particularly a homolog or functional equivalent as shown in column 8 of Table I B, application no. 8, and being depicted in the same respective line as said Sll1917, and preferably the activity is increased mitochondrial, or
[50303] (b) a polypeptide comprising a polypeptide, a consensus sequence or at least a polypeptide motif as shown in the respective line in column 5 of Table II or in column 8 of Table IV, application no. 8, respectively, and being depicted in the same respective line as said Sll1917, or a functional equivalent or a homolog thereof as depicted in column 8 of Table II, application no. 8, preferably a homolog or functional equivalent as depicted in column 8 of Table II B, application no. 8, and being depicted in the same respective line as said Sll1917, and preferably the activity is increased mitochondrial.

[50304] Accordingly, in one embodiment, the molecule which activity is to be increased in the process of the invention is the gene product with an activity as a “coproporphyrinogen III oxidase”, preferably it is the molecule of section (a) or (b) of this paragraph.

[50305] In particular, it was observed that in plants, especially in Arabidopsis thaliana, increasing or generating the activity of a gene product mitochondrial with the activity of a “coproporphyrinogen III oxidase”, preferably being encoded by a gene comprising the nucleic acid sequence SEQ ID NO. 11471, preferably the coding region thereof, conferred the production of or the increase in linoleic acid compared with the wild type control.

[50306] The nucleic acid sequence of Sll1920 from Synechocystis sp., e.g. as shown in the respective line in column 5 of Table I, application no. 8, has been published in C. And the activity of the gene product thereof is the activity of cation-transporting ATPase.

[50307] Accordingly, in one embodiment, the process of the present invention for producing linoleic acid in a non-human organism, like a microorganism or a plant or a part thereof, comprises increasing or generating the activity of a gene product with the activity of a gene product conferring the activity of “cation-transporting ATPase”, especially from Synechocystis sp. or its functional equivalent or its homolog, e.g. the increase of
[50308] (a) a gene product of a gene comprising the nucleic acid molecule as shown in the respective line in column 5 of Table I, application no. 8, preferably the coding region thereof, or a homolog or a fragment thereof, and being depicted in the same respective line as said Sll1920, or a functional equivalent or a homolog thereof as shown in column 8 of Table I, application no. 8, preferably the coding region thereof, particularly a homolog or functional equivalent as shown in column 8 of Table I B, application no. 8, and being depicted in the same respective line as said Sll1920, and preferably the activity is increased mitochondrial, or
[50309] (b) a polypeptide comprising a polypeptide, a consensus sequence or at least a polypeptide motif as shown in the respective line in column 5 of Table II or in column 8 of Table IV, application no. 8, respectively, and being depicted in the same respective line as said Sll1920, or a functional equivalent or a homolog thereof as depicted in column 8 of Table II, application no. 8, preferably a homolog or functional equivalent as depicted in column 8 of Table II B, application no. 8, and being depicted in the same respective line as said Sll1920, and preferably the activity is increased mitochondrial.

[50310] Accordingly, in one embodiment, the molecule which activity is to be increased in the process of the invention is the gene product with an activity as a “cation-transporting ATPase”, preferably it is the molecule of section (a) or (b) of this paragraph.

[50311] In particular, it was observed that in plants, especially in Arabidopsis thaliana, increasing or generating the activity of a gene product mitochondrial with the activity of a “cation-transporting ATPase”, preferably being encoded by a gene comprising the nucleic acid sequence SEQ ID NO. 55385, preferably the coding region thereof, conferred the production of or the increase in linoleic acid compared with the wild type control.

[50312] The nucleic acid sequence of Slr0338 from Synechocystis sp., e.g. as shown in the respective line in column 5 of Table I, application no. 8, has been published in C. And the activity of the gene product thereof is the activity of oxidoreductase.

[50313] Accordingly, in one embodiment, the process of the present invention for producing linoleic acid in a non-human organism, like a microorganism or a plant or a part thereof, comprises increasing or generating the activity of a gene product with the activity of a gene product conferring the activity of “oxidoreductase”, especially from Synechocystis sp. or its functional equivalent or its homolog, e.g. the increase of
[50314] (a) a gene product of a gene comprising the nucleic acid molecule as shown in the respective line in column 5 of Table I, application no. 8, preferably the coding region thereof, or a homolog or a fragment thereof, and being depicted in the same respective line as said Slr0338, or a functional equivalent or a homolog thereof as shown in column 8 of Table I, application no. 8, preferably the coding region thereof, particularly a homolog or functional equivalent as shown in column 8 of Table I B, application no. 8, and being depicted in the same respective line as said Slr0338, and preferably the activity is increased non-targeted, or
[50315] (b) a polypeptide comprising a polypeptide, a consensus sequence or at least a polypeptide motif as shown in the respective line in column 5 of Table II or in column 8 of Table IV, application no. 8, respectively, and being depicted in the same respective line as said Slr0338, or a functional equivalent or a homolog thereof as depicted in column 8 of Table II, application no. 8, preferably a homolog or functional equivalent as depicted in column 8 of Table II B, application no. 8, and being depicted in the same respective line as said Slr0338, and preferably the activity is increased non-targeted.

[50316] Accordingly, in one embodiment, the molecule which activity is to be increased in the process of the invention is the gene product with an activity as a “oxidoreductase”, preferably it is the molecule of section (a) or (b) of this paragraph.

[50317] In particular, it was observed that in plants, especially in Arabidopsis thaliana, increasing or generating the activity of a gene product non-targeted with the activity of a “oxidoreductase”, preferably being encoded by a gene comprising the nucleic acid sequence SEQ ID NO. 11990, preferably the coding region thereof, conferred the production of or the increase in linoleic acid compared with the wild type control.

[50318] The nucleic acid sequence of Slr0966 from Synechocystis sp., e.g. as shown in the respective line in column 5 of Table I, application no. 8, has been published in C. And the activity of the gene product thereof is the activity of tryptophan synthase alpha chain.

[50319] Accordingly, in one embodiment, the process of the present invention for producing linoleic acid in a non-human organism, like a microorganism or a plant or a part thereof, comprises increasing or generating the activity of a gene product with the activity of a gene product conferring the activity of “tryptophan synthase alpha chain”, especially from Synechocystis sp. or its functional equivalent or its homolog, e.g. the increase of
[50320] (a) a gene product of a gene comprising the nucleic acid molecule as shown in the respective line in column 5 of Table I, application no. 8, preferably the coding region thereof, or a homolog or a fragment thereof, and being depicted in the same respective line as said Slr0966, or a functional equivalent or a homolog thereof as shown in column 8 of Table I, application no. 8, preferably the coding region thereof, particularly a homolog or functional equivalent as shown in column 8 of Table I B, application no. 8, and being depicted in the same respective line as said Slr0966, and preferably the activity is increased plastidic, or
[50321] (b) a polypeptide comprising a polypeptide, a consensus sequence or at least a polypeptide motif as shown in the respective line in column 5 of Table II or in column 8 of Table IV, application no. 8, respectively, and being depicted in the same respective line as said Slr0966, or a functional equivalent or a homolog thereof as depicted in column 8 of Table II, application no. 8, preferably a homolog or functional equivalent as depicted in column 8 of Table II B, application no. 8, and being depicted in the same respective line as said Slr0966, and preferably the activity is increased plastidic.

[50322] Accordingly, in one embodiment, the molecule which activity is to be increased in the process of the invention is the gene product with an activity as a “tryptophan synthase alpha chain”, preferably it is the molecule of section (a) or (b) of this paragraph.

[50323] In particular, it was observed that in plants, especially in Arabidopsis thaliana, increasing or generating the activity of a gene product plastidic with the activity of a “tryptophan synthase alpha chain”, preferably being encoded by a gene comprising the nucleic acid sequence SEQ ID NO. 87655, preferably the coding region thereof, conferred the production of or the increase in linoleic acid compared with the wild type control.

[50324] The nucleic acid sequence of Slr1099 from Synechocystis sp., e.g. as shown in the respective line in column 5 of Table I, application no. 8, has been published in C. And the activity of the gene product thereof is the activity of aromatic acid decarboxylase.

[50325] Accordingly, in one embodiment, the process of the present invention for producing linoleic acid in a non-human organism, like a microorganism or a plant or a part thereof, comprises increasing or generating the activity of a gene product with the activity of a gene product conferring the activity of “aromatic acid decarboxylase”, especially from Synechocystis sp. or its functional equivalent or its homolog, e.g. the increase of
[50326] (a) a gene product of a gene comprising the nucleic acid molecule as shown in the respective line in column 5 of Table I, application no. 8, preferably the coding region thereof, or a homolog or a fragment thereof, and being depicted in the same respective line as said Slr1099, or a functional equivalent or a homolog thereof as shown in column 8 of Table I, application no. 8, preferably the coding region thereof, particularly a homolog or functional equivalent as shown in column 8 of Table I B, application no. 8, and being depicted in the same respective line as said Slr1099, and preferably the activity is increased mitochondrial, or
[50327] (b) a polypeptide comprising a polypeptide, a consensus sequence or at least a polypeptide motif as shown in the respective line in column 5 of Table II or in column 8 of Table IV, application no. 8, respectively, and being depicted in the same respective line as said Slr1099, or a functional equivalent or a homolog thereof as depicted in column 8 of Table II, application no. 8, preferably a homolog or functional equivalent as depicted in column 8 of Table II B, application no. 8, and being depicted in the same respective line as said Slr1099, and preferably the activity is increased mitochondrial.

[50328] Accordingly, in one embodiment, the molecule which activity is to be increased in the process of the invention is the gene product with an activity as a “aromatic acid decarboxylase”, preferably it is the molecule of section (a) or (b) of this paragraph.

[50329] In particular, it was observed that in plants, especially in Arabidopsis thaliana, increasing or generating the activity of a gene product mitochondrial with the activity of a “aromatic acid decarboxylase”, preferably being encoded by a gene comprising the nucleic acid sequence SEQ ID NO. 116341, preferably the coding region thereof, conferred the production of or the increase in linoleic acid compared with the wild type control.

[50330] The nucleic acid sequence of Slr1250 from Synechocystis sp., e.g. as shown in the respective line in column 5 of Table I, application no. 8, has been published in C. And the activity of the gene product thereof is the activity of phosphate import ATP-binding protein.

[50331] Accordingly, in one embodiment, the process of the present invention for producing linoleic acid in a non-human organism, like a microorganism or a plant or a part thereof, comprises increasing or generating the activity of a gene product with the activity of a gene product conferring the activity of “phosphate import ATP-binding protein”, especially from Synechocystis sp. or its functional equivalent or its homolog, e.g. the increase of
[50332] (a) a gene product of a gene comprising the nucleic acid molecule as shown in the respective line in column 5 of Table I, application no. 8, preferably the coding region thereof, or a homolog or a fragment thereof, and being depicted in the same respective line as said Slr1250, or a functional equivalent or a homolog thereof as shown in column 8 of Table I, application no. 8, preferably the coding region thereof, particularly a homolog or functional equivalent as shown in column 8 of Table I B, application no. 8, and being depicted in the same respective line as said Slr1250, and preferably the activity is increased mitochondrial, or
[50333] (b) a polypeptide comprising a polypeptide, a consensus sequence or at least a polypeptide motif as shown in the respective line in column 5 of Table II or in column 8 of Table IV, application no. 8, respectively, and being depicted in the same respective line as said Slr1250, or a functional equivalent or a homolog thereof as depicted in column 8 of Table II, application no. 8, preferably a homolog or functional equivalent as depicted in column 8 of Table II B, application no. 8, and being depicted in the same respective line as said Slr1250, and preferably the activity is increased mitochondrial.

[50334] Accordingly, in one embodiment, the molecule which activity is to be increased in the process of the invention is the gene product with an activity as a “phosphate import ATP-binding protein”, preferably it is the molecule of section (a) or (b) of this paragraph.

[50335] In particular, it was observed that in plants, especially in Arabidopsis thaliana, increasing or generating the activity of a gene product mitochondrial with the activity of a “phosphate import ATP-binding protein”, preferably being encoded by a gene comprising the nucleic acid sequence SEQ ID NO. 116460, preferably the coding region thereof, conferred the production of or the increase in linoleic acid compared with the wild type control.

[50336] The nucleic acid sequence of Slr1269 from Synechocystis sp., e.g. as shown in the respective line in column 5 of Table I, application no. 8, has been published in C. And the activity of the gene product thereof is the activity of gamma-glutamyltranspeptidase.

[50337] Accordingly, in one embodiment, the process of the present invention for producing linoleic acid in a non-human organism, like a microorganism or a plant or a part thereof, comprises increasing or generating the activity of a gene product with the activity of a gene product conferring the activity of “gamma-glutamyltranspeptidase”, especially from Synechocystis sp. or its functional equivalent or its homolog, e.g. the increase of
[50338] (a) a gene product of a gene comprising the nucleic acid molecule as shown in the respective line in column 5 of Table I, application no. 8, preferably the coding region thereof, or a homolog or a fragment thereof, and being depicted in the same respective line as said Slr1269, or a functional equivalent or a homolog thereof as shown in column 8 of Table I, application no. 8, preferably the coding region thereof, particularly a homolog or functional equivalent as shown in column 8 of Table I B, application no. 8, and being depicted in the same respective line as said Slr1269, and preferably the activity is increased non-targeted, or
[50339] (b) a polypeptide comprising a polypeptide, a consensus sequence or at least a polypeptide motif as shown in the respective line in column 5 of Table II or in column 8 of Table IV, application no. 8, respectively, and being depicted in the same respective line as said Slr1269, or a functional equivalent or a homolog thereof as depicted in column 8 of Table II, application no. 8, preferably a homolog or functional equivalent as depicted in column 8 of Table II B, application no. 8, and being depicted in the same respective line as said Slr1269, and preferably the activity is increased non-targeted.

[50340] Accordingly, in one embodiment, the molecule which activity is to be increased in the process of the invention is the gene product with an activity as a “gamma-glutamyltranspeptidase”, preferably it is the molecule of section (a) or (b) of this paragraph.

[50341] In particular, it was observed that in plants, especially in Arabidopsis thaliana, increasing or generating the activity of a gene product non-targeted with the activity of a “gammaglutamyltranspeptidase”, preferably being encoded by a gene comprising the nucleic acid sequence SEQ ID NO. 58058, preferably the coding region thereof, conferred the production of or the increase in linoleic acid compared with the wild type control.

[50342] The nucleic acid sequence of Slr1312 from Synechocystis sp., e.g. as shown in the respective line in column 5 of Table I, application no. 8, has been published in C. And the activity of the gene product thereof is the activity of arginine decarboxylase.

[50343] Accordingly, in one embodiment, the process of the present invention for producing linoleic acid in a non-human organism, like a microorganism or a plant or a part thereof, comprises increasing or generating the activity of a gene product with the activity of a gene product conferring the activity of “arginine decarboxylase”, especially from Synechocystis sp. or its functional equivalent or its homolog, e.g. the increase of
[50344] (a) a gene product of a gene comprising the nucleic acid molecule as shown in the respective line in column 5 of Table I, application no. 8, preferably the coding region thereof, or a homolog or a fragment thereof, and being depicted in the same respective line as said Slr1312, or a functional equivalent or a homolog thereof as shown in column 8 of Table I, application no. 8, preferably the coding region thereof, particularly a homolog or functional equivalent as shown in column 8 of Table I B, application no. 8, and being depicted in the same respective line as said Slr1312, and preferably the activity is increased non-targeted, or
[50345] (b) a polypeptide comprising a polypeptide, a consensus sequence or at least a polypeptide motif as shown in the respective line in column 5 of Table II or in column 8 of Table IV, application no. 8, respectively, and being depicted in the same respective line as said Slr1312, or a functional equivalent or a homolog thereof as depicted in column 8 of Table II, application no. 8, preferably a homolog or functional equivalent as depicted in column 8 of Table II B, application no. 8, and being depicted in the same respective line as said Slr1312, and preferably the activity is increased non-targeted.

[50346] Accordingly, in one embodiment, the molecule which activity is to be increased in the process of the invention is the gene product with an activity as a “arginine decarboxylase”, preferably it is the molecule of section (a) or (b) of this paragraph.

[50347] In particular, it was observed that in plants, especially in Arabidopsis thaliana, increasing or generating the activity of a gene product non-targeted with the activity of a “arginine decarboxylase”, preferably being encoded by a gene comprising the nucleic acid sequence SEQ ID NO. 58324, preferably the coding region thereof, conferred the production of or the increase in linoleic acid compared with the wild type control.

[50348] The nucleic acid sequence of Slr1350 from Synechocystis sp., e.g. as shown in the respective line in column 5 of Table I, application no. 8, has been published in C. And the activity of the gene product thereof is the activity of fatty acid desaturase.

[50349] Accordingly, in one embodiment, the process of the present invention for producing linoleic acid in a non-human organism, like a microorganism or a plant or a part thereof, comprises increasing or generating the activity of a gene product with the activity of a gene product conferring the activity of “fatty acid desaturase”, especially from Synechocystis sp. or its functional equivalent or its homolog, e.g. the increase of
[50350] (a) a gene product of a gene comprising the nucleic acid molecule as shown in the respective line in column 5 of Table I, application no. 8, preferably the coding region thereof, or a homolog or a fragment thereof, and being depicted in the same respective line as said Slr1350, or a functional equivalent or a homolog thereof as shown in column 8 of Table I, application no. 8, preferably the coding region thereof, particularly a homolog or functional equivalent as shown in column 8 of Table I B, application no. 8, and being depicted in the same respective line as said Slr1350, and preferably the activity is increased non-targeted, or
[50351] (b) a polypeptide comprising a polypeptide, a consensus sequence or at least a polypeptide motif as shown in the respective line in column 5 of Table II or in column 8 of Table IV, application no. 8, respectively, and being depicted in the same respective line as said Slr1350, or a functional equivalent or a homolog thereof as depicted in column 8 of Table II, application no. 8, preferably a homolog or functional equivalent as depicted in column 8 of Table II B, application no. 8, and being depicted in the same respective line as said Slr1350, and preferably the activity is increased non-targeted.

[50352] Accordingly, in one embodiment, the molecule which activity is to be increased in the process of the invention is the gene product with an activity as a “fatty acid desaturase”, preferably it is the molecule of section (a) or (b) of this paragraph.

[50353] In particular, it was observed that in plants, especially in Arabidopsis thaliana, increasing or generating the activity of a gene product non-targeted with the activity of a “fatty acid desaturase”, preferably being encoded by a gene comprising the nucleic acid sequence SEQ ID NO. 116713, preferably the coding region thereof, conferred the production of or the increase in linoleic acid compared with the wild type control.

[50354] The nucleic acid sequence of Slr2072 from Synechocystis sp., e.g. as shown in the respective line in column 5 of Table I, application no. 8, has been published in C. And the activity of the gene product thereof is the activity of threonine dehydratase.

[50355] Accordingly, in one embodiment, the process of the present invention for producing linoleic acid in a non-human organism, like a microorganism or a plant or a part thereof, comprises increasing or generating the activity of a gene product with the activity of a gene product conferring the activity of “threonine dehydratase”, especially from Synechocystis sp. or its functional equivalent or its homolog, e.g. the increase of
[50356] (a) a gene product of a gene comprising the nucleic acid molecule as shown in the respective line in column 5 of Table I, application no. 8, preferably the coding region thereof, or a homolog or a fragment thereof, and being depicted in the same respective line as said Slr2072, or a functional equivalent or a homolog thereof as shown in column 8 of Table I, application no. 8, preferably the coding region thereof, particularly a homolog or functional equivalent as shown in column 8 of Table I B, application no. 8, and being depicted in the same respective line as said Slr2072, and preferably the activity is increased mitochondrial, or
[50357] (b) a polypeptide comprising a polypeptide, a consensus sequence or at least a polypeptide motif as shown in the respective line in column 5 of Table II or in column 8 of Table IV, application no. 8, respectively, and being depicted in the same respective line as said Slr2072, or a functional equivalent or a homolog thereof as depicted in column 8 of Table II, application no. 8, preferably a homolog or functional equivalent as depicted in column 8 of Table II B, application no. 8, and being depicted in the same respective line as said Slr2072, and preferably the activity is increased mitochondrial.

[50358] Accordingly, in one embodiment, the molecule which activity is to be increased in the process of the invention is the gene product with an activity as a “threonine dehydratase”, preferably it is the molecule of section (a) or (b) of this paragraph.

[50359] In particular, it was observed that in plants, especially in Arabidopsis thaliana, increasing or generating the activity of a gene product mitochondrial with the activity of a “threonine dehydratase”, preferably being encoded by a gene comprising the nucleic acid sequence SEQ ID NO. 12341, preferably the coding region thereof, conferred the production of or the increase in linoleic acid compared with the wild type control.

[50360] The nucleic acid sequence of TTC0490 from Thermus thermophilus, e.g. as shown in the respective line in column 5 of Table I, application no. 8, has been published in E. And the activity of the gene product thereof is the activity of TTC0490-protein.

[50361] Accordingly, in one embodiment, the process of the present invention for producing linoleic acid in a non-human organism, like a microorganism or a plant or a part thereof, comprises increasing or generating the activity of a gene product with the activity of a gene product conferring the activity of “TTC0490-protein”, especially from Thermus thermophilus or its functional equivalent or its homolog, e.g. the increase of
[50362] (a) a gene product of a gene comprising the nucleic acid molecule as shown in the respective line in column 5 of Table I, application no. 8, preferably the coding region thereof, or a homolog or a fragment thereof, and being depicted in the same respective line as said TTC0490, or a functional equivalent or a homolog thereof as shown in column 8 of Table I, application no. 8, preferably the coding region thereof, particularly a homolog or functional equivalent as shown in column 8 of Table I B, application no. 8, and being depicted in the same respective line as said TTC0490, and preferably the activity is increased non-targeted, or
[50363] (b) a polypeptide comprising a polypeptide, a consensus sequence or at least a polypeptide motif as shown in the respective line in column 5 of Table II or in column 8 of Table IV, application no. 8, respectively, and being depicted in the same respective line as said TTC0490, or a functional equivalent or a homolog thereof as depicted in column 8 of Table II, application no. 8, preferably a homolog or functional equivalent as depicted in column 8 of Table II B, application no. 8, and being depicted in the same respective line as said TTC0490, and preferably the activity is increased non-targeted.

[50364] Accordingly, in one embodiment, the molecule which activity is to be increased in the process of the invention is the gene product with an activity as a “TTC0490-protein”, preferably it is the molecule of section (a) or (b) of this paragraph.

[50365] In particular, it was observed that in plants, especially in Arabidopsis thaliana, increasing or generating the activity of a gene product non-targeted with the activity of a “TTC0490-protein”, preferably being encoded by a gene comprising the nucleic acid sequence SEQ ID NO. 116848, preferably the coding region thereof, conferred the production of or the increase in linoleic acid compared with the wild type control.

[50366] The nucleic acid sequence of TTC0917 from Thermus thermophilus, e.g. as shown in the respective line in column 5 of Table I, application no. 8, has been published in E. And the activity of the gene product thereof is the activity of metal-dependent hydrolase.

[50367] Accordingly, in one embodiment, the process of the present invention for producing linoleic acid in a non-human organism, like a microorganism or a plant or a part thereof, comprises increasing or generating the activity of a gene product with the activity of a gene product conferring the activity of “metal-dependent hydrolase”, especially from Thermus thermophilus or its functional equivalent or its homolog, e.g. the increase of
[50368] (a) a gene product of a gene comprising the nucleic acid molecule as shown in the respective line in column 5 of Table I, application no. 8, preferably the coding region thereof, or a homolog or a fragment thereof, and being depicted in the same respective line as said TTC0917, or a functional equivalent or a homolog thereof as shown in column 8 of Table I, application no. 8, preferably the coding region thereof, particularly a homolog or functional equivalent as shown in column 8 of Table I B, application no. 8, and being depicted in the same respective line as said TTC0917, and preferably the activity is increased non-targeted, or
[50369] (b) a polypeptide comprising a polypeptide, a consensus sequence or at least a polypeptide motif as shown in the respective line in column 5 of Table II or in column 8 of Table IV, application no. 8, respectively, and being depicted in the same respective line as said TTC0917, or a functional equivalent or a homolog thereof as depicted in column 8 of Table II, application no. 8, preferably a homolog or functional equivalent as depicted in column 8 of Table II B, application no. 8, and being depicted in the same respective line as said TTC0917, and preferably the activity is increased non-targeted.

[50370] Accordingly, in one embodiment, the molecule which activity is to be increased in the process of the invention is the gene product with an activity as a “metal-dependent hydrolase”, preferably it is the molecule of section (a) or (b) of this paragraph.

[50371] In particular, it was observed that in plants, especially in Arabidopsis thaliana, increasing or generating the activity of a gene product non-targeted with the activity of a “metal-dependent hydrolase”, preferably being encoded by a gene comprising the nucleic acid sequence SEQ ID NO. 61553, preferably the coding region thereof, conferred the production of or the increase in linoleic acid compared with the wild type control.

[50372] The nucleic acid sequence of TTC1193 from Thermus thermophilus, e.g. as shown in the respective line in column 5 of Table I, application no. 8, has been published in E. And the activity of the gene product thereof is the activity of multiple antibiotic resistance protein.

[50373] Accordingly, in one embodiment, the process of the present invention for producing linoleic acid in a non-human organism, like a microorganism or a plant or a part thereof, comprises increasing or generating the activity of a gene product with the activity of a gene product conferring the activity of “multiple antibiotic resistance protein”, especially from Thermus thermophilus or its functional equivalent or its homolog, e.g. the increase of
[50374] (a) a gene product of a gene comprising the nucleic acid molecule as shown in the respective line in column 5 of Table I, application no. 8, preferably the coding region thereof, or a homolog or a fragment thereof, and being depicted in the same respective line as said TTC1193, or a functional equivalent or a homolog thereof as shown in column 8 of Table I, application no. 8, preferably the coding region thereof, particularly a homolog or functional equivalent as shown in column 8 of Table I B, application no. 8, and being depicted in the same respective line as said TTC1193, and preferably the activity is increased non-targeted, or
[50375] (b) a polypeptide comprising a polypeptide, a consensus sequence or at least a polypeptide motif as shown in the respective line in column 5 of Table II or in column 8 of Table IV, application no. 8, respectively, and being depicted in the same respective line as said TTC1193, or a functional equivalent or a homolog thereof as depicted in column 8 of Table II, application no. 8, preferably a homolog or functional equivalent as depicted in column 8 of Table II B, application no. 8, and being depicted in the same respective line as said TTC1193, and preferably the activity is increased non-targeted.

[50376] Accordingly, in one embodiment, the molecule which activity is to be increased in the process of the invention is the gene product with an activity as a “multiple antibiotic resistance protein”, preferably it is the molecule of section (a) or (b) of this paragraph.

[50377] In particular, it was observed that in plants, especially in Arabidopsis thaliana, increasing or generating the activity of a gene product non-targeted with the activity of a “multiple antibiotic resistance protein”, preferably being encoded by a gene comprising the nucleic acid sequence SEQ ID NO. 61723, preferably the coding region thereof, conferred the production of or the increase in linoleic acid compared with the wild type control.

[50378] The nucleic acid sequence of Yal044c from Saccharomyces cerevisiae, e.g. as shown in the respective line in column 5 of Table I, application no. 8, has been published in A. And the activity of the gene product thereof is the activity of glycin cleavage system protein.

[50379] Accordingly, in one embodiment, the process of the present invention for producing linoleic acid in a non-human organism, like a microorganism or a plant or a part thereof, comprises increasing or generating the activity of a gene product with the activity of a gene product conferring the activity of “glycin cleavage system protein”, especially from Saccharomyces cerevisiae or its functional equivalent or its homolog, e.g. the increase of
[50380] (a) a gene product of a gene comprising the nucleic acid molecule as shown in the respective line in column 5 of Table I, application no. 8, preferably the coding region thereof, or a homolog or a fragment thereof, and being depicted in the same respective line as said Yal044c, or a functional equivalent or a homolog thereof as shown in column 8 of Table I, application no. 8, preferably the coding region thereof, particularly a homolog or functional equivalent as shown in column 8 of Table I B, application no. 8, and being depicted in the same respective line as said Yal044c, and preferably the activity is increased plastidic, or
[50381] (b) a polypeptide comprising a polypeptide, a consensus sequence or at least a polypeptide motif as shown in the respective line in column 5 of Table II or in column 8 of Table IV, application no. 8, respectively, and being depicted in the same respective line as said Yal044c, or a functional equivalent or a homolog thereof as depicted in column 8 of Table II, application no. 8, preferably a homolog or functional equivalent as depicted in column 8 of Table II B, application no. 8, and being depicted in the same respective line as said Yal044c, and preferably the activity is increased plastidic.

[50382] Accordingly, in one embodiment, the molecule which activity is to be increased in the process of the invention is the gene product with an activity as a “glycin cleavage system protein”, preferably it is the molecule of section (a) or (b) of this paragraph.

[50383] In particular, it was observed that in plants, especially in Arabidopsis thaliana, increasing or generating the activity of a gene product plastidic with the activity of a “glycin cleavage system protein”, preferably being encoded by a gene comprising the nucleic acid sequence SEQ ID NO. 116948, preferably the coding region thereof, conferred the production of or the increase in linoleic acid compared with the wild type control.

[50384] The nucleic acid sequence of Ydl159w from Saccharomyces cerevisiae, e.g. as shown in the respective line in column 5 of Table I, application no. 8, has been published in A. And the activity of the gene product thereof is the activity of protein kinase.

[50385] Accordingly, in one embodiment, the process of the present invention for producing linoleic acid in a non-human organism, like a microorganism or a plant or a part thereof, comprises increasing or generating the activity of a gene product with the activity of a gene product conferring the activity of “protein kinase”, especially from Saccharomyces cerevisiae or its functional equivalent or its homolog, e.g. the increase of
[50386] (a) a gene product of a gene comprising the nucleic acid molecule as shown in the respective line in column 5 of Table I, application no. 8, preferably the coding region thereof, or a homolog or a fragment thereof, and being depicted in the same respective line as said Ydl159w, or a functional equivalent or a homolog thereof as shown in column 8 of Table I, application no. 8, preferably the coding region thereof, particularly a homolog or functional equivalent as shown in column 8 of Table I B, application no. 8, and being depicted in the same respective line as said Ydl159w, and preferably the activity is increased plastidic, or
[50387] (b) a polypeptide comprising a polypeptide, a consensus sequence or at least a polypeptide motif as shown in the respective line in column 5 of Table II or in column 8 of Table IV, application no. 8, respectively, and being depicted in the same respective line as said Ydl159w, or a functional equivalent or a homolog thereof as depicted in column 8 of Table II, application no. 8, preferably a homolog or functional equivalent as depicted in column 8 of Table II B, application no. 8, and being depicted in the same respective line as said Ydl159w, and preferably the activity is increased plastidic.

[50388] Accordingly, in one embodiment, the molecule which activity is to be increased in the process of the invention is the gene product with an activity as a “protein kinase”, preferably it is the molecule of section (a) or (b) of this paragraph.

[50389] In particular, it was observed that in plants, especially in Arabidopsis thaliana, increasing or generating the activity of a gene product plastidic with the activity of a “protein kinase”, preferably being encoded by a gene comprising the nucleic acid sequence SEQ ID NO. 14275, preferably the coding region thereof, conferred the production of or the increase in linoleic acid compared with the wild type control.

[50390] The nucleic acid sequence of Ydr158w from Saccharomyces cerevisiae, e.g. as shown in the respective line in column 5 of Table I, application no. 8, has been published in A. And the activity of the gene product thereof is the activity of aspartate-semialdehyde dehydrogenase.

[50391] Accordingly, in one embodiment, the process of the present invention for producing linoleic acid in a non-human organism, like a microorganism or a plant or a part thereof, comprises increasing or generating the activity of a gene product with the activity of a gene product conferring the activity of “aspartate-semialdehyde dehydrogenase”, especially from Saccharomyces cerevisiae or its functional equivalent or its homolog, e.g. the increase of
[50392] (a) a gene product of a gene comprising the nucleic acid molecule as shown in the respective line in column 5 of Table I, application no. 8, preferably the coding region thereof, or a homolog or a fragment thereof, and being depicted in the same respective line as said Ydr158w, or a functional equivalent or a homolog thereof as shown in column 8 of Table I, application no. 8, preferably the coding region thereof, particularly a homolog or functional equivalent as shown in column 8 of Table I B, application no. 8, and being depicted in the same respective line as said Ydr158w, and preferably the activity is increased plastidic, or
[50393] (b) a polypeptide comprising a polypeptide, a consensus sequence or at least a polypeptide motif as shown in the respective line in column 5 of Table II or in column 8 of Table IV, application no. 8, respectively, and being depicted in the same respective line as said Ydr158w, or a functional equivalent or a homolog thereof as depicted in column 8 of Table II, application no. 8, preferably a homolog or functional equivalent as depicted in column 8 of Table II B, application no. 8, and being depicted in the same respective line as said Ydr158w, and preferably the activity is increased plastidic.

[50394] Accordingly, in one embodiment, the molecule which activity is to be increased in the process of the invention is the gene product with an activity as a “aspartate-semialdehyde dehydrogenase”, preferably it is the molecule of section (a) or (b) of this paragraph.

[50395] In particular, it was observed that in plants, especially in Arabidopsis thaliana, increasing or generating the activity of a gene product plastidic with the activity of a “aspartate-semialdehyde dehydrogenase”, preferably being encoded by a gene comprising the nucleic acid sequence SEQ ID NO. 117352, preferably the coding region thereof, conferred the production of or the increase in linoleic acid compared with the wild type control.

[50396] The nucleic acid sequence of Ydr507c from Saccharomyces cerevisiae, e.g. as shown in the respective line in column 5 of Table I, application no. 8, has been published in A. And the activity of the gene product thereof is the activity of ydr507c-protein.

[50397] Accordingly, in one embodiment, the process of the present invention for producing linoleic acid in a non-human organism, like a microorganism or a plant or a part thereof, comprises increasing or generating the activity of a gene product with the activity of a gene product conferring the activity of “ydr507c-protein”, especially from Saccharomyces cerevisiae or its functional equivalent or its homolog, e.g. the increase of
[50398] (a) a gene product of a gene comprising the nucleic acid molecule as shown in the respective line in column 5 of Table I, application no. 8, preferably the coding region thereof, or a homolog or a fragment thereof, and being depicted in the same respective line as said Ydr507c, or a functional equivalent or a homolog thereof as shown in column 8 of Table I, application no. 8, preferably the coding region thereof, particularly a homolog or functional equivalent as shown in column 8 of Table I B, application no. 8, and being depicted in the same respective line as said Ydr507c, and preferably the activity is increased non-targeted, or
[50399] (b) a polypeptide comprising a polypeptide, a consensus sequence or at least a polypeptide motif as shown in the respective line in column 5 of Table II or in column 8 of Table IV, application no. 8, respectively, and being depicted in the same respective line as said Ydr507c, or a functional equivalent or a homolog thereof as depicted in column 8 of Table II, application no. 8, preferably a homolog or functional equivalent as depicted in column 8 of Table II B, application no. 8, and being depicted in the same respective line as said Ydr507c, and preferably the activity is increased non-targeted.

[50400] Accordingly, in one embodiment, the molecule which activity is to be increased in the process of the invention is the gene product with an activity as a “ydr507c-protein”, preferably it is the molecule of section (a) or (b) of this paragraph.

[50401] In particular, it was observed that in plants, especially in Arabidopsis thaliana, increasing or generating the activity of a gene product non-targeted with the activity of a “ydr507c-protein”, preferably being encoded by a gene comprising the nucleic acid sequence SEQ ID NO. 90165, preferably the coding region thereof, conferred the production of or the increase in linoleic acid compared with the wild type control.

[50402] The nucleic acid sequence of Ygr104c from Saccharomyces cerevisiae, e.g. as shown in the respective line in column 5 of Table I, application no. 8, has been published in A. And the activity of the gene product thereof is the activity of YGR104C-protein.

[50403] Accordingly, in one embodiment, the process of the present invention for producing linoleic acid in a non-human organism, like a microorganism or a plant or a part thereof, comprises increasing or generating the activity of a gene product with the activity of a gene product conferring the activity of “YGR104C-protein”, especially from Saccharomyces cerevisiae or its functional equivalent or its homolog, e.g. the increase of
[50404] (a) a gene product of a gene comprising the nucleic acid molecule as shown in the respective line in column 5 of Table I, application no. 8, preferably the coding region thereof, or a homolog or a fragment thereof, and being depicted in the same respective line as said Ygr104c, or a functional equivalent or a homolog thereof as shown in column 8 of Table I, application no. 8, preferably the coding region thereof, particularly a homolog or functional equivalent as shown in column 8 of Table I B, application no. 8, and being depicted in the same respective line as said Ygr104c, and preferably the activity is increased non-targeted, or
[50405] (b) a polypeptide comprising a polypeptide, a consensus sequence or at least a polypeptide motif as shown in the respective line in column 5 of Table II or in column 8 of Table IV, application no. 8, respectively, and being depicted in the same respective line as said Ygr104c, or a functional equivalent or a homolog thereof as depicted in column 8 of Table II, application no. 8, preferably a homolog or functional equivalent as depicted in column 8 of Table II B, application no. 8, and being depicted in the same respective line as said Ygr104c, and preferably the activity is increased non-targeted.

[50406] Accordingly, in one embodiment, the molecule which activity is to be increased in the process of the invention is the gene product with an activity as a “YGR104C-protein”, preferably it is the molecule of section (a) or (b) of this paragraph.

[50407] In particular, it was observed that in plants, especially in Arabidopsis thaliana, increasing or generating the activity of a gene product non-targeted with the activity of a “YGR104C-protein”, preferably being encoded by a gene comprising the nucleic acid sequence SEQ ID NO. 117482, preferably the coding region thereof, conferred the production of or the increase in linoleic acid compared with the wild type control.

[50408] The nucleic acid sequence of Yjl073w from Saccharomyces cerevisiae, e.g. as shown in the respective line in column 5 of Table I, application no. 8, has been published in A. And the activity of the gene product thereof is the activity of DnaJ-like chaperone.

[50409] Accordingly, in one embodiment, the process of the present invention for producing linoleic acid in a non-human organism, like a microorganism or a plant or a part thereof, comprises increasing or generating the activity of a gene product with the activity of a gene product conferring the activity of “DnaJ-like chaperone”, especially from Saccharomyces cerevisiae or its functional equivalent or its homolog, e.g. the increase of
[50410] (a) a gene product of a gene comprising the nucleic acid molecule as shown in the respective line in column 5 of Table I, application no. 8, preferably the coding region thereof, or a homolog or a fragment thereof, and being depicted in the same respective line as said Yjl073w, or a functional equivalent or a homolog thereof as shown in column 8 of Table I, application no. 8, preferably the coding region thereof, particularly a homolog or functional equivalent as shown in column 8 of Table I B, application no. 8, and being depicted in the same respective line as said Yjl073w, and preferably the activity is increased plastidic, or
[50411] (b) a polypeptide comprising a polypeptide, a consensus sequence or at least a polypeptide motif as shown in the respective line in column 5 of Table II or in column 8 of Table IV, application no. 8, respectively, and being depicted in the same respective line as said Yj1073w, or a functional equivalent or a homolog thereof as depicted in column 8 of Table II, application no. 8, preferably a homolog or functional equivalent as depicted in column 8 of Table II B, application no. 8, and being depicted in the same respective line as said Yjl073w, and preferably the activity is increased plastidic.

[50412] Accordingly, in one embodiment, the molecule which activity is to be increased in the process of the invention is the gene product with an activity as a “DnaJ-like chaperone”, preferably it is the molecule of section (a) or (b) of this paragraph.

[50413] In particular, it was observed that in plants, especially in Arabidopsis thaliana, increasing or generating the activity of a gene product plastidic with the activity of a “DnaJ-like chaperone”, preferably being encoded by a gene comprising the nucleic acid sequence SEQ ID NO. 64964, preferably the coding region thereof, conferred the production of or the increase in linoleic acid compared with the wild type control.

[50414] The nucleic acid sequence of Ylr304c from Saccharomyces cerevisiae, e.g. as shown in the respective line in column 5 of Table I, application no. 8, has been published in A. And the activity of the gene product thereof is the activity of aconitate hydratase.

[50415] Accordingly, in one embodiment, the process of the present invention for producing linoleic acid in a non-human organism, like a microorganism or a plant or a part thereof, comprises increasing or generating the activity of a gene product with the activity of a gene product conferring the activity of “aconitate hydratase”, especially from Saccharomyces cerevisiae or its functional equivalent or its homolog, e.g. the increase of
[50416] (a) a gene product of a gene comprising the nucleic acid molecule as shown in the respective line in column 5 of Table I, application no. 8, preferably the coding region thereof, or a homolog or a fragment thereof, and being depicted in the same respective line as said Ylr304c, or a functional equivalent or a homolog thereof as shown in column 8 of Table I, application no. 8, preferably the coding region thereof, particularly a homolog or functional equivalent as shown in column 8 of Table I B, application no. 8, and being depicted in the same respective line as said Ylr304c, and preferably the activity is increased non-targeted, or
[50417] (b) a polypeptide comprising a polypeptide, a consensus sequence or at least a polypeptide motif as shown in the respective line in column 5 of Table II or in column 8 of Table IV, application no. 8, respectively, and being depicted in the same respective line as said Ylr304c, or a functional equivalent or a homolog thereof as depicted in column 8 of Table II, application no. 8, preferably a homolog or functional equivalent as depicted in column 8 of Table II B, application no. 8, and being depicted in the same respective line as said Ylr304c, and preferably the activity is increased non-targeted.

[50418] Accordingly, in one embodiment, the molecule which activity is to be increased in the process of the invention is the gene product with an activity as a “aconitate hydratase”, preferably it is the molecule of section (a) or (b) of this paragraph.

[50419] In particular, it was observed that in plants, especially in Arabidopsis thaliana, increasing or generating the activity of a gene product non-targeted with the activity of a “aconitate hydratase”, preferably being encoded by a gene comprising the nucleic acid sequence SEQ ID NO. 66772, preferably the coding region thereof, conferred the production of or the increase in linoleic acid compared with the wild type control.

[50420] The nucleic acid sequence of Ynl064c from Saccharomyces cerevisiae, e.g. as shown in the respective line in column 5 of Table I, application no. 8, has been published in A. And the activity of the gene product thereof is the activity of molecular chaperone.

[50421] Accordingly, in one embodiment, the process of the present invention for producing linoleic acid in a non-human organism, like a microorganism or a plant or a part thereof, comprises increasing or generating the activity of a gene product with the activity of a gene product conferring the activity of “molecular chaperone”, especially from Saccharomyces cerevisiae or its functional equivalent or its homolog, e.g. the increase of
[50422] (a) a gene product of a gene comprising the nucleic acid molecule as shown in the respective line in column 5 of Table I, application no. 8, preferably the coding region thereof, or a homolog or a fragment thereof, and being depicted in the same respective line as said Ynl064c, or a functional equivalent or a homolog thereof as shown in column 8 of Table I, application no. 8, preferably the coding region thereof, particularly a homolog or functional equivalent as shown in column 8 of Table I B, application no. 8, and being depicted in the same respective line as said YnI064c, and preferably the activity is increased non-targeted, or
[50423] (b) a polypeptide comprising a polypeptide, a consensus sequence or at least a polypeptide motif as shown in the respective line in column 5 of Table II or in column 8 of Table IV, application no. 8, respectively, and being depicted in the same respective line as said Ynl064c, or a functional equivalent or a homolog thereof as depicted in column 8 of Table II, application no. 8, preferably a homolog or functional equivalent as depicted in column 8 of Table II B, application no. 8, and being depicted in the same respective line as said Ynl064c, and preferably the activity is increased non-targeted.

[50424] Accordingly, in one embodiment, the molecule which activity is to be increased in the process of the invention is the gene product with an activity as a “molecular chaperone”, preferably it is the molecule of section (a) or (b) of this paragraph.

[50425] In particular, it was observed that in plants, especially in Arabidopsis thaliana, increasing or generating the activity of a gene product non-targeted with the activity of a “molecular chaperone”, preferably being encoded by a gene comprising the nucleic acid sequence SEQ ID NO. 117495, preferably the coding region thereof, conferred the production of or the increase in linoleic acid compared with the wild type control.

[50426] The nucleic acid sequence of Ypl271w from Saccharomyces cerevisiae, e.g. as shown in the respective line in column 5 of Table I, application no. 8, has been published in A. And the activity of the gene product thereof is the activity of ATPase epsilon subunit.

[50427] Accordingly, in one embodiment, the process of the present invention for producing linoleic acid in a non-human organism, like a microorganism or a plant or a part thereof, comprises increasing or generating the activity of a gene product with the activity of a gene product conferring the activity of “ATPase epsilon subunit”, especially from Saccharomyces cerevisiae or its functional equivalent or its homolog, e.g. the increase of
[50428] (a) a gene product of a gene comprising the nucleic acid molecule as shown in the respective line in column 5 of Table I, application no. 8, preferably the coding region thereof, or a homolog or a fragment thereof, and being depicted in the same respective line as said Ypl271w, or a functional equivalent or a homolog thereof as shown in column 8 of Table I, application no. 8, preferably the coding region thereof, particularly a homolog or functional equivalent as shown in column 8 of Table I B, application no. 8, and being depicted in the same respective line as said Ypl271w, and preferably the activity is increased plastidic, or
[50429] (b) a polypeptide comprising a polypeptide, a consensus sequence or at least a polypeptide motif as shown in the respective line in column 5 of Table II or in column 8 of Table IV, application no. 8, respectively, and being depicted in the same respective line as said Ypl271w, or a functional equivalent or a homolog thereof as depicted in column 8 of Table II, application no. 8, preferably a homolog or functional equivalent as depicted in column 8 of Table II B, application no. 8, and being depicted in the same respective line as said Ypl271w, and preferably the activity is increased plastidic.

[50430] Accordingly, in one embodiment, the molecule which activity is to be increased in the process of the invention is the gene product with an activity as a “ATPase epsilon subunit”, preferably it is the molecule of section (a) or (b) of this paragraph.

[50431] In particular, it was observed that in plants, especially in Arabidopsis thaliana, increasing or generating the activity of a gene product plastidic with the activity of a “ATPase epsilon subunit”, preferably being encoded by a gene comprising the nucleic acid sequence SEQ ID NO. 118212, preferably the coding region thereof, conferred the production of or the increase in linoleic acid compared with the wild type control.

[50432] The nucleic acid sequence of 59582753_SOYBEAN from Glycine max, e.g. as shown in the respective line in column 5 of Table I, application no. 8, is unpublished. And the activity of the gene product thereof is the activity of glucose-6-phosphate 1-dehydrogenase.

[50433] Accordingly, in one embodiment, the process of the present invention for producing linoleic acid in a non-human organism, like a microorganism or a plant or a part thereof, comprises increasing or generating the activity of a gene product with the activity of a gene product conferring the activity of “glucose-6-phosphate 1-dehydrogenase”, especially from Glycine max or its functional equivalent or its homolog, e.g. the increase of
[50434] (a) a gene product of a gene comprising the nucleic acid molecule as shown in the respective line in column 5 of Table I, application no. 8, preferably the coding region thereof, or a homolog or a fragment thereof, and being depicted in the same respective line as said 59582753_SOYBEAN, or a functional equivalent or a homolog thereof as shown in column 8 of Table I, application no. 8, preferably the coding region thereof, particularly a homolog or functional equivalent as shown in column 8 of Table I B, application no. 8, and being depicted in the same respective line as said 59582753_SOYBEAN, and preferably the activity is increased plastidic, or
[50435] (b) a polypeptide comprising a polypeptide, a consensus sequence or at least a polypeptide motif as shown in the respective line in column 5 of Table II or in column 8 of Table IV, application no. 8, respectively, and being depicted in the same respective line as said 59582753_SOYBEAN, or a functional equivalent or a homolog thereof as depicted in column 8 of Table II, application no. 8, preferably a homolog or functional equivalent as depicted in column 8 of Table II B, application no. 8, and being depicted in the same respective line as said 59582753_SOYBEAN, and preferably the activity is increased plastidic.

[50436] Accordingly, in one embodiment, the molecule which activity is to be increased in the process of the invention is the gene product with an activity as a “glucose-6-phosphate 1-dehydrogenase”, preferably it is the molecule of section (a) or (b) of this paragraph.

[50437] In particular, it was observed that in plants, especially in Arabidopsis thaliana, increasing or generating the activity of a gene product plastidic with the activity of a “glucose-6-phosphate 1-dehydrogenase”, preferably being encoded by a gene comprising the nucleic acid sequence SEQ ID NO. 16883, preferably the coding region thereof, conferred the production of or the increase in linoleic acid compared with the wild type control.

[50438] It was further observed that increasing or generating the activity of a FCRP gene shown in Table d, e.g. a nucleic acid molecule derived from the coding region of the nucleic acid molecule shown in Table d in A. thaliana conferred the production of or the increase in fine chemical, compared with the wild type control. Thus, in one embodiment, a nucleic acid molecule, preferably the coding region thereof, indicated in Table d or its homolog as indicated in the respective line in Table I or the expression product is used in the method of the present invention to generate or to increase the production of fine chemical in a non-human organism, like a microorganism or a plant, compared with the wild type control.

[50439] In this context, the fine chemical amount in a cell, in a non-human organism, like a plant or a microorganism or a part thereof, is increased by 1%, 3%, 5%, 10%, 20%, 30%, 40%, 50%, 60%, 70%, 80%, 90%, 100%, 120, 150% or 200% or more.

[50440] The fine chemical can be contained in the organism either in its free form and/or bound, e.g. in triglycerides, phospholipids, lipids, oils and/or fatsor mixtures thereof. Accordingly, in one embodiment, the amount of the free form in a cell, in a non-human organism, like a plant or a microorganism or part thereof, is increased by 1%, 3%, 5%, 10%, 20%, 30%, 40%, 50%, 60%, 70%, 80%, 90%, 100%, 120, 150% or 200% or more. Accordingly, in another embodiment, the amount of the bound fine chemical in a cell, in a non-human organism, like a plant or a microorganism or part thereof, is increased byl %, 3%, 5%, 10%, 20%, 30%, 40%, 50%, 60%, 70%, 80%, 90%, 100%, 120, 150% or 200% or more.

[50441] A protein having an activity conferring an increase in the amount or level of the fine chemical linoleic acid, upon targeting to the plastids or mitochondria or upon non-targeting, preferably has the structure of the respective polypeptide described herein, in particular of the polypeptides comprising the consensus sequence or at least one polypeptide motifs as shown in the respective line in Table IV, application no. 8, column 8 or of the polypeptide comprising an amino acid sequence as disclosed in the respective line in Table II, application no. 8, columns 5 or 8, or homologs or fragments thereof as described herein, or is encoded by the nucleic acid molecule characterized herein or the nucleic acid molecule according to the invention, for example by the nucleic acid molecule as shown in the respective line in Table I, application no. 8, columns 5 or 8, preferably the coding region thereof, or homologs or fragments thereof and has the herein mentioned activity.

[50442] Owing to the biological activity of the proteins which are used in the process according to the invention and which are encoded by nucleic acid molecules according to the invention, it is possible to produce compositions comprising the fine chemical, i.e. an increased amount of the fine chemical free or bound, e.g. in triglyceride, phospholipid,lipid, oil and/or fat compositions. Depending on the choice of the non-human organism used for the process according to the present invention, for example a microorganism or a plant, compositions or mixtures comprising the fine chemical can be produced.

[50443] The term “expression” refers to the transcription and/or translation of a codogenic gene segment or gene. As a rule, the resulting product is an mRNA or a protein. However, expression products can also include functional RNAs such as, for example, antisense, nucleic acids, tRNAs, snRNAs, rRNAs, RNAi, siRNA, ribozymes etc. Expression may be systemic, local or temporal, for example limited to certain cell types, tissues organs or organelles or time periods.

[50444] In one embodiment, the process of the present invention comprises one or more of the following steps
[50445] (a) stabilizing a protein conferring the generation or increased expression of a protein encoded by the nucleic acid molecule of the invention or of the polypeptide of the invention, e.g. of a polypeptide having the activity selected from the group consisting of 3-ketoacyl-CoA thiolase, 3-oxoacyl-[acyl-carrier-protein] synthase, AAS bifunctional protein, ABC transporter permease protein, acid shock protein, aconitate hydratase, arginine decarboxylase, aromatic acid decarboxylase, aspartate-semialdehyde dehydrogenase, At1g19800-protein, At2g45420-protein, ATPase epsilon subunit, b0801-protein, b1330-protein, b1470-protein, b1670-protein, b1837-protein, b2032-protein, b2099-protein, b2107-protein, b2399-protein, b2474-protein, b2613-protein, b2682-protein, b2849-protein, b2909-protein, beta-hydroxylase, carbamoyl-phosphate synthase subunit, cation-transporting ATPase, CCAAT-binding transcription factor, chlorophyllase, colanic acid biosynthesis protein, coproporphyrinogen III oxidase, CTP synthetase, DnaJ-like chaperone, electron transport complex protein, ethanolamine utilization protein, fatty acid desaturase, Fe—S subunit of oxidoreductase, flavodoxin, fumarate hydratase, gamma-glutamyltranspeptidase, glucose-6-phosphate 1-dehydrogenase, glutaredoxin, glycin cleavage system protein, GM02LC38418-protein, heat shock transcription factor, hydrolase, lipoprotein precursor, membrane transport protein, metal-dependent hydrolase, molecular chaperone, monothiol glutaredoxin, multiple antibiotic resistance protein, outer membrane receptor protein precursor, oxidoreductase, phosphate import ATP-binding protein, phosphoribosylformyl glycinamidine synthase subunit, phosphotriesterase, protein kinase, protein phosphatase, pyruvate kinase, recombinase A, sll1032-protein, sn-glycerol-3-phosphate transport system permease protein, ThiF family protein, threonine dehydratase, threonine efflux protein, transcription factor, transcriptional regulator protein, tryptophan synthase alpha chain, TTC0490-protein, xanthine dehydrogenase, ydr507c-protein, and YGR104C-protein, or of a polypeptide as indicated in the respective line in Table II, application no. 8, columns 5 or 8, or its homologs or fragments, and conferring the production of or an increase in linoleic acid, respectively; and/or
[50446] (b) stabilizing a mRNA conferring the generation or increased expression of a FCRP, e.g. protein encoded by the nucleic acid molecule of the invention or its homologs or fragments, or of a mRNA encoding the polypeptide of the present invention having the hereinmentioned activity selected from the group consisting of said activities mentioned in (a) and conferring the production of or an increase in linoleic acid, respectively; and/or
[50447] (c) increasing the specific activity of a protein conferring the increased expression of a FCRP, e.g. a protein encoded by the nucleic acid molecule of the invention or of the polypeptide of the present invention having herein-mentioned linoleic acid generating or increasing activity, respectively, e.g. of a polypeptide having the activity of a protein as indicated in the respective line in Table II, application no. 8, columns 5 or 8, or its homologs or fragments, or decreasing the inhibitory regulation of the polypeptide of the invention; and/or
[50448] (d) generating or increasing the expression of an endogenous or artificial transcription factor mediating the expression of a protein conferring the generation or increased expression of a FCRP, e.g. a protein encoded by the nucleic acid molecule of the invention or of the polypeptide of the invention having herein-mentioned activity selected from the group consisting of said activities mentioned in (a) and conferring a linoleic acid increasing activity, respectively, e.g. of a polypeptide having the activity of a protein as indicated in the respective line in Table II, application no. 8, columns 5 or 8 or its homologs; and/or
[50449] (e) stimulating activity of a protein conferring the increased expression of a FCRP, e.g. a protein encoded by the nucleic acid molecule of the present invention or a polypeptide of the present invention having herein-mentioned activity selected from the group consisting of said activities mentioned in (a) and conferring a linoleic acid increasing activity, respectively, e.g. of a polypeptide having the activity of a protein as indicated in the respective line in Table II, application no. 8, columns 5 or 8, or its homologs or fragments, by adding one or more exogenous inducing factors to the non-human organism or parts thereof; and/or
[50450] (f) expressing a transgenic gene encoding a protein conferring the increased expression of a FCRP, e.g. a polypeptide encoded by the nucleic acid molecule of the present invention or a polypeptide of the present invention, having herein-mentioned activity selected from the group consisting of said activities mentioned in (a) and conferring a linoleic acid increasing activity, respectively, e.g. of a polypeptide having the activity of a protein as indicated in the respective line in Table II, application no. 8, columns 5 or 8, or its homologs or fragments, and/or
[50451] (g) increasing the copy number of a gene conferring the increased expression of a nucleic acid molecule encoding a FCRP, e.g. a polypeptide encoded by the nucleic acid molecule of the invention or the polypeptide of the invention having herein-mentioned activity selected from the group consisting of said activities mentioned in (a) and conferring a linoleic acid increasing activity, respectively, e.g. of a polypeptide having the activity of a protein as indicated in the respective line in Table II, application no. 8, columns 5 or 8, or its homologs or fragments; and/or
[50452] (h) increasing the expression of the endogenous gene encoding the FCRP, polypeptide of the invention, e.g. a polypeptide encoded by the nucleic acid molecule of the invention or the polypeptide of the invention having herein-mentioned activity selected from the group consisting of said activities mentioned in (a) and conferring a linoleic acid; increasing activity, respectively, e.g. of a polypeptide having the activity of a protein as indicated in the respective line in Table II, application no. 8, columns 5 or 8, or its homologs or fragments, by adding positive expression or removing negative expression elements, e.g. homologous recombination can be used to either introduce positive regulatory elements like for plants the 35S enhancer into the promoter or to remove repressor elements form regulatory regions. Further gene conversion methods can be used to disrupt repressor elements or to enhance to activity of positive elements. Positive elements can be randomly introduced in plants by T-DNA or transposon mutagenesis and lines can be identified in which the positive elements have be integrated near to a gene of the invention, the expression of which is thereby enhanced; and/or
[50453] (i) modulating growth conditions of the non-human organism in such a manner, that the expression or activity of the gene encoding the FCRP, e.g. a protein of the invention or the protein itself is enhanced, for example microorganisms or plants can be grown for example under a higher temperature regime leading to an enhanced expression of heat shock proteins, which can lead to an enhanced linoleic acid production, respectively; and/or
[50454] (j) selecting of non-human organisms with especially high activity of the proteins of the invention from natural or from mutagenized resources and breeding them into the target organisms, e.g. the elite crops; and/or
[50455] (k) directing a protein encoded by the nucleic acid molecule of the invention or of the polypeptide of the present invention having herein-mentioned activity selected from the group consisting of said activities mentioned in (a) and conferring a linoleic acid increasing activity, respectively, e.g. of a polypeptide having the activity of a protein as indicated in the respective line in Table II, application no. 8, columns 5 or 8, or its homologs or fragments, if for the corresponding nucleic acid molecule in the respective line in column 6 of Table I the term “plastidic” is indicated, to the plastids by the addition of a plastidial targeting sequence or if for the corresponding nucleic acid molecule in the respective line in column 6 of Table I the term “mitochondrial” is indicated, to the mitochondria by the addition of a mitochondrial targeting sequence; and/or
[50456] (l) generating the expression of a protein encoded by the nucleic acid molecule of the invention or of the polypeptide of the present invention having herein-mentioned activity selected from the group consisting of said activities mentioned in (a) and conferring a linoleic acid increasing activity, respectively, e.g. of a polypeptide having the activity of a protein as indicated in the respective line in Table II, application no. 8, columns 5 or 8, or its homologs or fragments, if for the corresponding nucleic acid molecule in the respective line in column 6 of Table I the term “plastidic” or “mitochondrial” is indicated, in these organelles by the stable or transient transformation, advantageously stable transformation, of organelles, preferably plastids or mitochondria, with an inventive nucleic acid sequence preferably in form of an expression cassette containing said sequence leading to the expression of the nucleic acids or polypeptides of the invention in the respective organelle; and/or
[50457] (m) generating the expression of a protein encoded by the nucleic acid molecule of the invention or of the polypeptide of the present invention having herein-mentioned activity selected from the group consisting of said activities mentioned in (a) and conferring a linoleic acid increasing activity, respectively, e.g. of a polypeptide having the activity of a protein as indicated in the respective line in Table II, application no. 8, columns 5 or 8, or its homologs or fragments, if for the corresponding nucleic acid molecule in the respective line in column 6 of Table I the term “plastidic” or “mitochondrial” is indicated, in these organelles by integration of a nucleic acid of the invention into the genome of the respective organelle under control of preferable a promoter selective for the respective organelle.

[50458] Preferably, said mRNA is the coding region of the nucleic acid molecule of the present invention and/or the protein conferring the increased expression of a protein encoded by the coding region of the nucleic acid molecule of the present invention alone or linked to a transit nucleic acid sequence or transit peptide encoding nucleic acid sequence or the polypeptide having the herein mentioned activity, e.g. conferring the generation of or increase of linoleic acid, respectively, after increasing the expression or activity of the encoded polypeptide, non-targeted or in organelles such as plastids and/or mitochondria, preferably plastids, or having the activity of a polypeptide having an activity as the protein as shown in the respective line in Table II, application no. 8, column 3, or its homologs. Preferably the increase of linoleic acid, respectively, takes place non-targeted or in plastids and/or mitochondria, preferably non-targeted or in plastids.

[50459] In general, the amount of mRNA or polypeptide in a cell or a compartment of a non-human organism correlates with the amount of encoded protein and thus with the overall activity of the encoded protein in said volume. Said correlation is not always linear, the activity in the volume is dependent on the stability of the molecules, the degradation of the molecules or the presence of activating or inhibiting co-factors. Further, product and educt inhibitions of enzymes are well known and described in Textbooks, e.g. Stryer, Biochemistry or Zinser et al. “Enzyminhibitoren”/Enzyme inhibitors”.

[50460] The activity of the above-mentioned proteins and/or polypeptide encoded by the nucleic acid molecule of the present invention can be increased in various ways. For example, the activity in an organism or in a part thereof, like a cell or in an organelle of the cell, is increased for example via targeting of the nucleic acid sequence or the encoded gene product to an organelle such as plastids or mitochondria, preferentially to plastids, and/or increasing the gene product number, e.g. by increasing the expression rate, like introducing a stronger promoter, or by increasing the stability of the mRNA expressed, thus increasing the translation rate, and/or increasing the stability of the gene product, thus reducing the proteins decayed. Further, the activity or turnover of enzymes can be influenced in such a way that a reduction or increase of the reaction rate or a modification (reduction or increase) of the affinity to the substrate results, is reached. A mutation in the catalytic centre of an polypeptide of the invention, e.g. as enzyme, can modulate the turn over rate of the enzyme, e.g. an exchange of an amino acid in the catalytic center can lead to an increased activity of the enzyme, or the deletion of regulator binding sites can reduce a negative regulation like a feedback inhibition (or a substrate inhibition, if the substrate level is also increased). The specific activity of an enzyme of the present invention can be increased such that the turn over rate is increased or the binding of a co-factor is improved. Improving the stability of the encoding mRNA or the protein can also increase the activity of a gene product. The stimulation of the activity is also under the scope of the term “increased activity”.

[50461] Moreover, the regulation of the above-mentioned nucleic acid sequences may be modified so that gene expression is increased. This can be achieved advantageously by means of heterologous regulatory sequences or by modifying, for example mutating, the natural regulatory sequences which are present. The advantageous methods may also be combined with each other.

[50462] In general, an activity of a gene product in a non-human organism or part thereof, in particular in a plant cell or organelle of a plant cell, a plant, or a plant or a part thereof or in a microorganism can be increased by increasing the amount of the specific encoding mRNA or the corresponding protein in said organism or part thereof. “Amount of protein or mRNA” is understood as meaning the molecule number of polypeptides or mRNA molecules in an organism, a tissue, a cell or a cell compartment. “Increase” in the amount of a protein means the quantitative increase of the molecule number of said protein in a non-human organism, a cell or a cell compartment, such as an organelle like a plastid or mitochondrion, or part thereof for example by one of the methods described herein below—in comparison to a wild type, control or reference.

[50463] The increase in molecule number amounts preferably to at least 1%, 5%, 10%, 20%, 30%, 50%, 70%, 100%, 150%, 200% or more. However, a de novo expression is also regarded as subject of the present invention.

[50464] A modification, i.e. an increase, can be caused by endogenous or exogenous factors. For example, an increase in activity in a non-human organism or a part thereof can be caused by adding a gene product or a precursor or an activator or an agonist to the media or nutrition or can be caused by introducing said subjects into an organism, transient or stable. Such an increase can be reached by the introduction of the inventive nucleic acid sequence or the encoded protein into an organism, transient or stable. Furthermore such an increase can be reached by the introduction of the inventive nucleic acid sequence, preferably the coding region thereof, or the encoded protein in the correct cell compartment, for example into organelles, such as plastids or mitochondria, either by transformation and/or targeting.

[50465] In one embodiment the increase in the amount of the fine chemical in the non-human organism or a part thereof, e.g. in a cell, an organ, an organelle etc., is achieved by increasing the endogenous level of the polypeptide of the invention. Accordingly, in an embodiment of the present invention, the present invention relates to a process wherein the gene copy number of a gene encoding the polynucleotide or nucleic acid molecule of the invention is increased. Further, the endogenous level of the polypeptide of the invention can for example be increased by modifying the transcriptional or translational regulation of the polypeptide.

[50466] In one embodiment the amount of the fine chemical in the non-human organism or part thereof can be increase by targeted or random mutagenesis of the endogenous genes of the invention. For example homologous recombination can be used to either introduce positive regulatory elements like for plants the 35S enhancer into the promoter or to remove repressor elements form regulatory regions. In addition gene conversion like methods described by Kochevenko and Willmitzer (Plant Physiol. 132 (1), 174 (2003)) and citations therein can be used to disrupt repressor elements or to enhance to activity of positive regulatory elements.

[50467] Furthermore positive elements can be randomly introduced in (plant) genomes by T-DNA or transposon mutagenesis and lines can be screened for, in which the positive elements has be integrated near to a gene of the invention, the expression of which is thereby enhanced. The activation of plant genes by random integrations of enhancer elements has been described by Hayashi et al. (Science 258,1350 (1992)) or Weigel et al. (Plant Physiol. 122, 1003 (2000)) and others citated therein. Reverse genetic strategies to identify insertions (which eventually carrying the activation elements) near in genes of interest have been described for various cases e.g. Krysan et al. (Plant Cell 11, 2283 (1999)); Sessions et al. (Plant Cell 14, 2985 (2002)); Young et al. (Plant Physiol. 125, 513 (2001)); Koprek et al. (Plant J. 24, 253 (2000)); Jeon et al.(Plant J. 22, 561 (2000)); Tissier et al., (Plant Cell 11, 1841 (1999)); Speulmann et al. (Plant Cell 11, 1853 (1999)). Briefly, material from all plants of a large T-DNA or transposon mutagenized plant population is harvested and genomic DNA prepared. Then the genomic DNA is pooled following specific architectures as described for example in Krysan et al. (Plant Cell 11, 2283 (1999)). Pools of genomics DNAs are then screened by specific multiplex PCR reactions detecting the combination of the insertional mutagen (e.g. T-DNA or Transposon) and the gene of interest. Therefore PCR reactions are run on the DNA pools with specific combinations of T-DNA or transposon border primers and gene specific primers. General rules for primer design can again be taken from Krysan et al. (Plant Cell 11, 2283 (1999)). Rescreening of lower levels DNA pools lead to the identification of individual plants in which the gene of interest is disrupted by the insertional mutagen.

[50468] The enhancement of positive regulatory elements or the disruption or weaking of negative regulatory elements can also be achieved through common mutagenesis techniques: The production of chemically or radiation mutated populations is a common technique and known to the skilled worker. Methods for plants are described by Koorneef et al. 1982 and the citations therein and by Lightner and Caspar in “Methods in Molecular Biology” Vol. 82. These techniques usually induce point mutations that can be identified in any known gene using methods such as TILLING (Colbert et al., Plant Physiol.126 (2), 480 (2001)). One can also envisage to introduce nucleic acids sequences, encoding organelle- ,such as plastidal- or mitochondrial-targeting signals, like for example present in Table a or Table b, respectively, by homologous recombination or other methods of site specific integration, into the genome in that way, that an endogenous gene is functionally fused to the targeting sequence and the protein is redirected to the plastids or mitochondria, respectively. Eventually the integration can also occur randomly and the desired fusion event is selected for.

[50469] Accordingly, the expression level can be increased if the endogenous genes encoding a polypeptide conferring an increased expression of the polypeptide of the present invention, in particular genes comprising the nucleic acid molecule of the present invention, are modified via homologous recombination, Tilling approaches or gene conversion. It is also possible to add as mentioned herein targeting sequences to the inventive nucleic acid sequences.

[50470] Regulatory sequences, preferably in addition to a targeting sequence or part thereof (if present), can be operatively linked to the coding region of an endogenous nucleic acid and control its transcription and translation or the stability or decay of the encoding mRNA or the expressed protein. In order to modify and control the expression, promoter, UTRs, splicing sites, processing signals, polyadenylation sites, terminators, enhancers, repressors, post transcriptional or posttranslational modification sites can be changed, added or amended. For example, the activation of plant genes by random integrations of enhancer elements has been described by Hayashi et al. (Science 258, 1350 (1992)) or Weigel et al. (Plant Physiol. 122, 1003 (2000)) and others citated therein. For example, the expression level of the endogenous protein can be modulated by replacing the endogenous promoter with a stronger transgenic promoter or by replacing the endogenous 3′UTR with a 3′UTR, which provides more stability without amending the coding region. Further, the transcriptional regulation can be modulated by introduction of an artificial transcription factor as described in the examples. Alternative promoters, terminators and UTR are described below.

[50471] The activation of an endogenous polypeptide having above-mentioned activity, e.g. having the activity of a protein as shown in the respective line in Table II, application no. 8, column 3 or of the polypeptide of the invention, e.g. conferring the increase of the fine chemical linoleic acid, respectively, by increase of expression or activity in the cytoplasm, and/or in the cytosol, and/or in an organelle, such as plastids or mitochondria, can also be increased by introducing a synthetic transcription factor, which binds close to the coding region of the gene encoding the protein as shown in the respective line in Table II, application no. 8, column 5 or 8, or homologs or fragments thereof, and activates its transcription. A chimeric zinc finger protein can be constructed, which comprises a specific DNA-binding domain and an activation domain as e.g. the VP16 domain of Herpes Simplex virus. The specific binding domain can bind to the regulatory region of the gene encoding the protein as shown in the respective line in Table II, application no. 8, column 5 or 8, or homologs or fragments thereof. The expression of the chimeric transcription factor in a non-human organism, in particular in a plant, leads to a specific expression of the protein as shown in the respective line in Table II, application no. 8, column 5 or 8, or homologs or fragments thereof, see e.g. in WO01/52620, Oriz, Proc. Natl. Acad. Sci. USA 99, 13290 (2002), or Guan, Proc. Natl. Acad. Sci. USA 99, 13296 (2002).

[50472] In one further embodiment of the process according to the invention, organisms are used in which one of the above-mentioned genes, or one of the above-mentioned nucleic acids, is mutated in a way that the activity of the encoded gene products is less influenced by cellular factors, or not at all, in comparison with the unmutated proteins. For example, well known regulation mechanisms of enzymic activity are substrate inhibition or feed back regulation mechanisms. Ways and techniques for the introduction of substitution, deletions and additions of one or more bases, nucleotides or amino acids of a corresponding sequence are described herein below in the corresponding paragraphs and the references listed there, e.g. in Sambrook et al., Molecular Cloning, Cold Spring Habour, N.Y., 1989. The person skilled in the art will be able to identify regulation domains and binding sites of regulators by comparing the sequence of the nucleic acid molecule of the present invention or the expression product thereof with the state of the art by computer software means which comprise algorithms for the identifying of binding sites and regulation domains or by introducing into a nucleic acid molecule or in a protein systematically mutations and assaying for those mutations which will lead to an increased specify activity or an increased activity per volume, in particular per cell.

[50473] It can therefore be advantageous to express in a non-human organism a nucleic acid molecule of the invention or a polypeptide of the invention derived from a evolutionary distantly related organism, as e.g. using a prokaryotic gene in a eukaryotic host, as in these cases the regulation mechanism of the host cell may not weaken the activity (cellular or specific) of the gene or its expression product.

[50474] In another embodiment it can be advantageous to express in a non-human organism a nucleic acid molecule of the invention or a polypeptide of the invention in a compartment by the use of a respective targeting sequence, in which it is naturally not expressed, as in these cases the regulation mechanism of the host cell may not weaken the activity (cellular or specific) of the gene or its expression product.

[50475] The mutation is introduced in such a way that the production of the fine chemical is not adversely affected by e.g. undesired mutations.

[50476] Less influence on the regulation of a gene or its gene product is understood as meaning a reduced regulation of the enzymatic or biological activity leading to an increased specific or cellular activity of the gene or its product. An increase of the enzymatic activity is understood as meaning an enzymatic or biological activity, which is increased by at least 10%, 20%, 30%, 40%, 50%, 60% or 70% in comparison with the starting organism. This leads to an increased productivity of the desired fine chemical(s).

[50477] Owing to the introduction of a gene or a plurality of genes conferring the expression of the nucleic acid molecule of the invention or the polypeptide of the invention, for example the nucleic acid construct mentioned below, or encoding the protein as shown in the respective line in Table II, application no. 8, column 5 or 8, or homologs or fragments thereof, into a non-human organism alone or in combination with other genes, it is possible not only to increase the biosynthetic flux towards the end product, but also to increase, modify or create de novo an advantageous, preferably novel metabolites composition in the non-human organism, e.g. an advantageous composition comprising a higher content of (from a viewpoint of nutritional physiology limited) linoleic acid and if desired other fatty acids, and/or other metabolites, in free or bound form.

[50478] In another embodiment the composition comprises further higher amounts of metabolites positively affecting or lower amounts of metabolites negatively affecting the nutrition or health of animals or humans provided with said compositions or non-human organisms of the invention or parts thereof. Likewise, the number or activity of further genes which are required for the import or export of nutrients or metabolites, including amino acids, fatty acids, vitamins etc. or its precursors, required for the cell's biosynthesis of the fine chemical may be increased so that the concentration of necessary or relevant precursors, cofactors or intermediates within the cell(s) or within the corresponding storage compartments is increased. Owing to the increased or novel generated activity of the polypeptide of the invention or owing to the increased number of nucleic acid sequences of the invention and/or to the modulation of further genes which are involved in the biosynthesis of the fine chemical, e.g. by increasing the activity of enzymes synthesizing precursors or by destroying the activity of one or more genes which are involved in the breakdown of the fine chemical, it is possible to increase the yield, production and/or production efficiency of the fine chemical in the host organism, such as plants or microorganisms.

[50479] Accordingly, in one embodiment, the process according to the invention relates to a process, which comprises:
[50480] (a) providing a non-human organism, preferably a microorganism, a plant cell, a plant tissue, a plant or a part thereof, more preferably a microorganism, a plant tissue, a plant or a part thereof;
[50481] (b) increasing the activity of a protein as shown in the respective line in Table II, application no. 8, column 3 or of a polypeptide being encoded by the respective nucleic acid molecule of the present invention and described below, e.g. conferring an increase of the fine chemical linoleic acid, respectively, in the non-human organism, preferably in the microorganism, the plant cell, the plant tissue, the plant or a part thereof, more preferably a microorganism, a plant tissue, a plant or a part thereof, especially cytoplasmic or in an organelle, like plastids or mitochondria,
[50482] (c) growing the non-human organism, preferably the microorganism, the plant cell, the plant tissue, the plant or a part thereof, under conditions which permit the production of said fine chemical in the non-human organism, preferably the microorganism, the plant cell, the plant tissue, the plant or a part thereof; and
[50483] (d) if desired, recovering, optionally isolating, said fine chemical, in free and/or bound form, and, optionally further free and/or bound fatty acids, and/or other metabolites synthesized by the non-human organism, the microorganism, the plant cell, the plant tissue, the plant or a part thereof.

[50484] After the above-described increasing (which as defined above also encompasses the generating of an activity in a non-human organism, i.e. a de novo activity), for example after the introduction and the expression of the nucleic acid molecules of the invention or described in the methods or processes according to the invention, the organism according to the invention, advantageously, a microorganism, a non-human animal, a plant, plant or animal tissue or plant or animal cell, is grown and subsequently harvested.

[50485] Suitable non-human organisms or host organisms (transgenic organism) for the nucleic acid molecule used according to the invention and for the inventive process, the nucleic acid construct or the vector (both as described below) are, in principle, all organisms which are capable of synthesizing the fine chemical, and which are suitable for the activation, introduction or stimulation of recombinant genes. Examples which may be mentioned are transgenic plants, transgenic microorganisms such as fungi, bacteria, yeasts, alga or diatom preferably alga. Preferred organisms are those which are naturally capable of synthesizing the fine chemical in substantial amounts, like fungi, yeasts, bacteria or plants preferably alga and plants.

[50486] In the event that the transgenic non-human organism is a microorganism, such as a eukaryotic organism, for example a fungus, an alga, diatom or a yeast, in particular a fungus, alga, diatom or yeast selected from the families Tuberculariaceae, Adelotheciaceae, Dinophyceae, Ditrichaceae or Prasinophyceae. Preferred non-human organisms are microorganisms such as green algae or plants. After the growing phase, the organisms can be harvested.

[50487] The non-human organism, in particular the microorganism, plant or part thereof, is advantageously grown in such a way that it is not only possible to recover, if desired to isolate the free or bound fine chemical or the free and bound fine chemical but as option it is also possible to produce, recover and, if desired to isolate, other free or/and bound fatty acids and/or other metabolites.

[50488] The organisms are harvested in a manner known per se and appropriate for the particular organism. Microorganisms such as bacteria, mosses, yeasts and fungi or plant cells which are cultured in liquid media by fermentation may be removed, for example, by centrifugation, decanting or filtration. Plants are grown on solid media in a manner known per se and harvested accordingly.

[50489] Fatty Acids are isolated from the harvested biomass in a manner known per se, for example by extraction and, where appropriate, further chemical or physical purification processes such as, for example, precipitation methods, crystallography, thermal separation methods such as rectification methods or physical separation methods such as, for example, chromatography. Especially extraction methods using plant materials are described by Cahoon et al. (Proc. Natl. Acad. Sci. USA 96 (22), 12935 (1999)) or Browse et al., Analytic Biochemistry 152,141 (1986)).

[50490] Preferred microorganisms are selected from the group consisting of Charophyceae such as the genera Chara, Nitella e.g. the species Chara globularis, Chara vulgaris, Nitella flexilis, Chlorophyceae such as the genera Acrosiphonia, Spongomorpha, Urospora, Bryopsis, Pseudobryopsis, Trichosolen, Dichotomosiphon, Caulerpa, Rhipilia, Blastophysa, Avrainvillea, Chlorodesmis, Codium, Espera, Halicystis, Halimeda, Penicillus, Pseudocodium, Rhipiliopsis, Rhipocephalus, Tydemania, Udotea, Derbesia, Acrochaete, Aphanochaete, Bolbocoleon, Chaetobolus, Chaetonema, Chaetophora, Chlorotylium, Desmococcus, Draparnaldia, Draparnaldiopsis, Ectochaete, Endophyton, Entocladia, Epicladia, Internoretia, Microthamnion, Ochlochaete, Phaeophila, Pilinella, Pringsheimiella, Protoderma, Pseudendoclonium, Pseudodictyon, Pseudopringsheimia, Pseudulvella, Schizomeris, Stigeoclonium, Thamniochaete, Ulvella, Pilinia, Tellamia, Helicodictyon, Actidesmium, Ankyra, Characium, Codiolum, Sykidion, Keratococcus, Prototheca, Bracteacoccus Chlorococcum, Excentrosphaera, Hormidium, Oophila, Schroederia, Tetraedron, Trebouxia Chlorosarcinopsis, Gomphonitzschia, Coccomyxa, Dactylothece, Diógenes, Disporá, Gloeocystis, Mycanthococcus, Ourococcus, Coelastrum, Dicranochaete, Botryococcus, Dictyosphaerium, Dimorphococcus, Chlorochytrium, Kentrosphaera, Phyllobium, Gomontia, Hormotila, Euastropsis, Hydrodictyon, Pectodictyon, Pediastrum, Sorastrum, Tetrapedia, Acanthosphaera, Echinosphaerella, Echinosphaeridium, Errerella, Gloeoactinium, Golenkeniopsis Golenkinia, Micractinium, Ankistrodesmus, Chlorella, Chodatella, Closteriopsis, Cryocystis, Dactylococcus, Dematractum, Eremosphaera, Eutetramorus, Franceia, Glaucocystis, Gloeotaenium, Kirchneriella, Lagerheimiella, Monoraphidium, Nannochloris, Nephrochlamys, Nephrocytium, Oocystis, Oonephris, Pachycladon, Palmellococcus, Planktosphaeria, Polyedriopsis, Pseudoraciborskia, Quadrigula, Radiococcus, Rochiscia, Scotiella, Selanastrum, Thorakochloris, Treubaria, Trochiscia, Westella, Zoochlorella, Ostreobium, Phyllosiphon, Protosiphon, Rhodochytrium, Actinastrum, Coronastrum, Crucigenia, Dictymocystis, Enallax, Scenedesmus, Selenastrum, Tetradesmus, Tetrallantos, Tetrastrum, Chlorosarcina, Anadyomene, Valoniopsis, Ventricaria, Basicladia, Chaetomorpha, Cladophora, Lola Pithophora Rhizoclonium Chaetosphaeridium, Conochaete, Coleochaete, Oligochaetophora, Polychaetophora, Cylindrocapsa, Gongrosira, Protococcus, Acetabularia, Batophora, Bornetella, Dasycladus, Halicoryne, Neomeris, Elakatothrix, Raphidonema, Microspora, Bulbochaete, Oedocladium, Oedogonium, Prasiola, Rosenvingiella, Schizogonium, Apjohnia, Chamaedoris, Cladophoropsis, Siphonocladus, Spongocladia, Boergesenia, Boodlea, Cystodictyon, Dictyosphaeria, Ernodesmis, Microdictyon, Struvea, Valonia, Sphaeroplea, Malleochloris, Stylosphaeridium, Gloeococcus, Palmella, Palmodictyon, Palmophyllum, Pseudospherocystis, Sphaerocystis, Urococcus, Apiocystis, Chaetopeltis, Gemellicystis, Paulschulzia, Phacomyxa, Pseudotetraspora, Schizochlamys, Tetraspora, Cephaleuros, Ctenocladus, Epibolium, Leptosira, Trentepohlia, Diplochaete, Monostroma, Binuclearia, Geminella, Klebsormidium, Planetonema, Radiofilum, Stichococcus, Ulothrix, Uronema, Blidingia, Capsosiphon, Chloropelta, Enteromorpha, Percursaria, Ulva, Ulvaria, Brachiomonas, Carteria, Chlainomonas, Chlamydomonas, Chlamydonephris, Chlorangium, Chlorogonium, Cyanidium, Fortiella, Glenomonas, Gloeomonas, Hyalogonium, Lobomonas Polytoma, Pyramichlamys, Scourfieldia, Smithsonimonas, Sphaerellopsis, Sphenochloris, Spirogonium, Collodictyon, Dunaliella, Haematococcus, Stephanosphaera, Coccomonas, Dysmorphococcus, Phacotus, Pteromonas, Thoracomonas, Wislouchiella, Mascherina, Pyrobotrys, Spondylomorum, Eudorina, Gonium, Oltmannsiella, Pandorina, Platydorina, Pleodorina, Stephanoon, Volvox, Volvulina, Actinotaenium, Arthrodesmus, Bambusina Closterium, Cosmarium, Desmidium, Euastrum, Groenbladia, Hyalotheca, Micrasterias, Penium, Phymatodocis, Pleurotaenium, Sphaerozosma, Spinoclosterium, Spinocosmarium, Spondylosium, Staurastrum, Tetmemorus, Triploceras, Xanthidium, Cylindrocystis, Genicularia, Gonatozygon, Mesotaenium, Netrium, Roya, Spirotaenia, Cosmocladium, Debarya, Docidium, Euastridium, Hallasia, Mougeotia, Mougeotiopsis, Sirogonium, Spirogyra, Staurodesmus, Teilingia, Zygnema, Zygogonium, e.g. the species Caulerpa taxifolia, Prototheca wickerhamii, Ankistrodesmus falcatus, Chlorella ellipsoidea, Chlorella pyrenoidosa, Clorella sorokiniana, Chlorella vulgaris, Scenedesmus obliquus, Scenedesmus quadricauda, Selenastrum capricornutum, Selenastrum undecimnotata, Cladophora glomerata, Chlamydomonas eugametos, Chlamydomonas reinhardtii, Cyanidium caldarium, Dunaliella salina, Dunaliella tertiolecta, Euglena gracilis, Haematococcus pluvialis, Coniugatophyceae, Prasinophyceae Trebouxiophyceae, Ulvophyceae, Chlorodendraceae, Pedinomonadales, Halosphaeraceae, Pterospermataceae, Monomastigaceae, Pyramimonadaceae, Chlorodendraceae such as the genera Prasinocladus e.g. the species Prasinocladus ascus, Halosphaeraceae, Pedinomonadales, Pedinomonadaceae such as the genera Pedinomonas, Pterospermataceae such as the genera Pachysphaera, Pterosperma, Halosphaera, Pyramimonas, Bacillariophyceae, Chrysophyceae, Craspedophyceae, Euglenophyceae, Prymnesiophyceae, Phaeophyceae, Dinophyceae, Rhodophyceae, Xanthophyceae, Prasinophyceae such as the genera Nephroselmis, Prasinococcus, Scherffelia, Tetraselmis, Mantoniella, Ostreococcus e.g. the species Nephroselmis olivacea, Prasinococcus capsulatus, Scherffelia dubia, Tetraselmis chui, Tetraselmis suecica, Mantoniella squamata or Ostreococcus tauri.

[50491] Preferred plants are monocotyledonous or dicotyledonous plants, preferably selected from the group consisting of Anacardiaceae such as the genera Pistacia, Mangifera, Anacardium e.g. the species Pistacia vera [pistachios, Pistazie], Mangifer indica [Mango] or Anacardium occidentale [Cashew]; Asteraceae such as the genera Calendula, Carthamus, Centaurea, Cichorium, Cynara, Helianthus, Lactuca, Locusta, Tagetes, Valeriana e.g. the species Calendula officinalis [Marigold], Carthamus tinctorius [safflower], Centaurea cyanus [cornflower], Cichorium intybus [blue daisy], Cynara scolymus [Artichoke], Helianthus annus [sunflower], Lactuca sativa, Lactuca crispa, Lactuca esculenta, Lactuca scariola L. ssp. sativa, Lactuca scariola L. var. integrate, Lactuca scariola L. var. integrifolia, Lactuca sativa subsp. romana, Locusta communis, Valeriana locusta [lettuce], Tagetes lucida, Tagetes erecta or Tagetes tenuifolia [Marigold]; Apiaceae such as the genera Daucus e.g. the species Daucus carota [carrot]; Betulaceae such as the genera Corylus e.g. the species Corylus avellana or Corylus colurna [hazelnut]; Boraginaceae such as the genera Borago e.g. the species Borago officinalis [borage]; Brassicaceae such as the genera Brassica, Melanosinapis, Sinapis, Arabadopsis e.g. the species Brassica napus, Brassica rapa ssp. [canola, oilseed rape, turnip rape], Sinapis arvensis Brassica juncea, Brassica juncea var. juncea, Brassica juncea var. crispifolia, Brassica juncea var. foliosa, Brassica nigra, Brassica sinapioides, Melanosinapis communis [mustard], Brassica oleracea [fodder beet] or Arabidopsis thaliana; Bromeliaceae such as the genera Anana, Bromelia e.g. the species Anana comosus, Ananas ananas or Bromelia comosa [pineapple]; Caricaceae such as the genera Carica e.g. the species Carica papaya [papaya]; Cannabaceae such as the genera Cannabis e.g. the species Cannabis sative [hemp], Convolvulaceae such as the genera Ipomea, Convolvulus e.g. the species Ipomoea batatus, Ipomoea pandurata, Convolvulus batatas, Convolvulus tiliaceus, Ipomoea fastigiata, Ipomoea tiliacea, Ipomoea triloba or Convolvulus panduratus [sweet potato, Man of the Earth, wild potato], Chenopodiaceae such as the genera Beta, i.e. the species Beta vulgaris, Beta vulgaris var. altissima, Beta vulgaris var. Vulgaris, Beta maritima, Beta vulgaris var. perennis, Beta vulgaris var. conditiva or Beta vulgaris var. esculenta [sugar beet]; Cucurbitaceae such as the genera Cucubita e.g. the species Cucurbita maxima, Cucurbita mixta, Cucurbita pepo or Cucurbita moschata [pumpkin, squash]; Elaeagnaceae such as the genera Elaeagnus e.g. the species Olea europaea [olive]; Ericaceae such as the genera Kalmia e.g. the species Kalmia latifolia, Kalmia angustifolia, Kalmia microphylla, Kalmia polifolia, Kalmia occidentalis, Cistus chamaerhodendros or Kalmia lucida [American laurel, broad-leafed laurel, calico bush, spoon wood, sheep laurel, alpine laurel, bog laurel, western bog-laurel, swamp-laurel]; Euphorbiaceae such as the genera Manihot, Janipha, Jatropha, Ricinus e.g. the species Manihot utilissima, Janipha manihot, Jatropha manihot, Manihot aipil, Manihot dulcis, Manihot manihot, Manihot melanobasis, Manihot esculenta [manihot, arrowroot, tapioca, cassava] or Ricinus communis [castor bean, Castor Oil Bush, Castor Oil Plant, Palma Christi, Wonder Tree]; Fabaceae such as the genera Pisum, Albizia, Cathormion, Feuillea, Inga, Pithecolobium, Acacia, Mimosa, Medicajo, Glycine, Dolichos, Phaseolus, Soja e.g. the species Pisum sativum, Pisum arvense, Pisum humile [pea], Albizia berteriana, Albizia julibrissin, Albizia lebbeck, Acacia berteriana, Acacia littoralis, Albizia berteriana, Albizzia berteriana, Cathormion berteriana, Feuillea berteriana, Inga fragrans, Pithecellobium berterianum, Pithecellobium fragrans, Pithecolobium berterianum, Pseudalbizzia berteriana, Acacia julibrissin, Acacia nemu, Albizia nemu, Feuilleea julibrissin, Mimosa julibrissin, Mimosa speciosa, Sericanrda julibrissin, Acacia lebbeck, Acacia macrophylla, Albizia lebbek, Feuilleea lebbeck, Mimosa lebbeck, Mimosa speciosa [bastard logwood, silk tree, East Indian Walnut], Medicago sativa, Medicago falcata, Medicago varia [alfalfa], Glycine max [soybean], Dolichos soja, Glycine gracilis, Glycine hispida, Phaseolus max or Soja hispida; Geraniaceae such as the genera Pelargonium, Cocos, Oleum e.g. the species Cocos nucifera, Pelargonium grossularioides or Oleum cocois [coconut]; Gramineae such as the genera Saccharum e.g. the species Saccharum officinarum; Juglandaceae such as the genera Juglans, Wallia e.g. the species Juglans regia, Juglans ailanthifolia, Juglans sieboldiana, Juglans cinerea, Wallia cinerea, Juglans bixbyi, Juglans californica, Juglans hindsii, Juglans intermedia, Juglans jamaicensis, Juglans major, Juglans microcarpa, Juglans nigra or Wallia nigra [walnut, black walnut, common walnut, persian walnut, white walnut, butternut, black walnut]; Lauraceae such as the genera Persea, Laurus e.g. the species laurel Laurus nobilis [bay, laurel, bay laurel, sweet bay], Persea americana Persea americana, Persea gratissima or Persea persea [avocado]; Leguminosae such as the genera Arachis e.g. the species Arachis hypogaea [peanut]; Linaceae such as the genera Linum, Adenolinum e.g. the species Linum usitatissimum, Linum humile, Linum austriacum, Linum bienne, Linum angustifolium, Linum catharticum, Linum flavum, Linum grandiflorum, Adenolinum grandiflorum, Linum lewisii, Linum narbonense, Linum perenne, Linum perenne var. lewisii, Linum pratense or Linum trigynum [flax, linseed]; Lythrarieae such as the genera Punica e.g. the species Punica granatum [pomegranate]; Malvaceae such as the genera Gossypium e.g. the species Gossypium hirsutum, Gossypium arboreum, Gossypium barbadense, Gossypium herbaceum or Gossypium thurberi [cotton]; Musaceae such as the genera Musa e.g. the species Musa nana, Musa acuminata, Musa paradisiaca, Musa spp. [banana]; Onagraceae such as the genera Camissonia, Oenothera e.g. the species Oenothera biennis or Camissonia brevipes [primrose, evening primrose]; Palmae such as the genera Elacis e.g. the species Elaeis guineensis [oil plam]; Papaveraceae such as the genera Papaver e.g. the species Papaver orientale, Papaver rhoeas, Papaver dubium [poppy, oriental poppy, corn poppy, field poppy, shirley poppies, field poppy, long-headed poppy, long-pod poppy]; Pedaliaceae such as the genera Sesamum e.g. the species Sesamum indicum [sesame]; Piperaceae such as the genera Piper, Artanthe, Peperomia, Steffensia e.g. the species Piper aduncum, Piper amalago, Piper angustifolium, Piper auritum, Piper betel, Piper cubeba, Piper longum, Piper nigrum, Piper retrofractum, Artanthe adunca, Artanthe elongata, Peperomia elongata, Piper elongatum, Steffensia elongata. [Cayenne pepper, wild pepper]; Poaceae such as the genera Hordeum, Secale, Avena, Sorghum, Andropogon, Holcus, Panicum, Oryza, Zea, Triticum e.g. the species Hordeum vulgare, Hordeum jubatum, Hordeum murinum, Hordeum secalinum, Hordeum distichon Hordeum aegiceras, Hordeum hexastichon, Hordeum hexastichum, Hordeum irregulare, Hordeum sativum, Hordeum secalinum [barley, pearl barley, foxtail barley, wall barley, meadow barley], Secale cereale [rye], Avena sativa, Avena fatua, Avena byzantina, Avena fatua var. sativa, Avena hybrida [oat], Sorghum bicolor, Sorghum halepense, Sorghum saccharatum, Sorghum vulgare, Andropogon drummondii, Holcus bicolor, Holcus sorghum, Sorghum aethiopicum, Sorghum arundinaceum, Sorghum caffrorum, Sorghum cernuum, Sorghum dochna, Sorghum drummondii, Sorghum durra, Sorghum guineense, Sorghum lanceolatum, Sorghum nervosum, Sorghum saccharatum, Sorghum subglabrescens, Sorghum verticilliflorum, Sorghum vulgare, Holcus halepensis, Sorghum miliaceum millet, Panicum militaceum [Sorghum, millet], Oryza sativa, Oryza latifolia [rice], Zea mays [corn, maize] Triticum aestivum, Triticum durum, Triticum turgidum, Triticum hybernum, Triticum macha, Triticum sativum or Triticum vulgare [wheat, bread wheat, common wheat], Proteaceae such as the genera Macadamia e.g. the species Macadamia intergrifolia [macadamia]; Rubiaceae such as the genera Coffea e.g. the species Cofea spp., Coffea arabica, Coffea canephora or Coffea liberica [coffee]; Scrophulariaceae such as the genera Verbascum e.g. the species Verbascum blattaria, Verbascum chaixii, Verbascum densiflorum, Verbascum lagurus, Verbascum longifolium, Verbascum lychnitis, Verbascum nigrum, Verbascum olympicum, Verbascum phlomoides, Verbascum phoenicum, Verbascum pulverulentum or Verbascum thapsus [mullein, white moth mullein, nettle-leaved mullein, dense-flowered mullein, silver mullein, long-leaved mullein, white mullein, dark mullein, greek mullein, orange mullein, purple mullein, hoary mullein, great mullein]; Solanaceae such as the genera Capsicum, Nicotiana, Solanum, Lycopersicon e.g. the species Capsicum annuum, Capsicum annuum var. glabriusculum, Capsicum frutescens [pepper], Capsicum annuum [paprika], Nicotiana tabacum, Nicotiana alata, Nicotiana attenuata, Nicotiana glauca, Nicotiana langsdorffii, Nicotiana obtusifolia, Nicotiana quadrivalvis, Nicotiana repanda, Nicotiana rustica, Nicotiana sylvestris [tobacco], Solanum tuberosum [potato], Solanum melongena [egg-plant] (Lycopersicon esculentum, Lycopersicon lycopersicum, Lycopersicon pyriforme, Solanum integrifolium or Solanum lycopersicum [tomato]; Sterculiaceae such as the genera Theobroma e.g. the species Theobroma cacao [cacao]; Theaceae such as the genera Camellia e.g. the species Camellia sinensis) [tea].

[50492] Particular preferred plants are monocotyledonous or dicotyledonous plants selected from the group consisting of Asteraceae such as the genera Helianthus, Tagetes e.g. the species Helianthus annus [sunflower], Tagetes lucida, Tagetes erecta or Tagetes tenuifolia [Marigold]; Brassicaceae such as the genera Brassica, Arabadopsis e.g. the species Brassica napus, Brassica rapa ssp. [canola, oilseed rape, turnip rape] or Arabidopsis thaliana; Fabaceae such as the genera Glycine e.g. the species Glycine max [soybean] or Soja hispida; Linaceae such as the genera Linum e.g. the species Linum usitatissimum, [flax, linseed]; Poaceae such as the genera Hordeum, Secale, Avena, Sorghum, Oryza, Zea, Triticum e.g. the species Hordeum vulgare [barley], Secale cereale [rye], Avena sativa, Avena fatua, Avena byzantina, Avena fatua var. sativa, Avena hybrida [oat], Sorghum bicolor [Sorghum, millet], Oryza sativa, Oryza latifolia [rice], Zea mays [corn, maize], Triticum aestivum, Triticum durum, Triticum turgidum, Triticum hybernum, Triticum macha, Triticum sativum or Triticum vulgare [wheat, bread wheat, common wheat]; Solanaceae such as the genera Solanum, Lycopersicon e.g. the species Solanum tuberosum [potato], Lycopersicon esculentum, Lycopersicon lycopersicum, Lycopersicon pyriforme, Solanum integrifolium or Solanum lycopersicum [tomato]; Gramineae such as the genera Saccharum e.g. the species Saccharum officinarum or Helianthus annus [sunflower] or Chenopodiaceae such as the genera Beta, i.e. Beta vulgaris var. esculents [sugar beet].

[50493] All above-mentioned organisms can be used as host organisms and/or can be used as donor organism.

[50494] The invention is not limited to specific nucleic acids, specific polypeptides, specific cell types, specific host cells, specific conditions or specific methods etc. as such, but may vary and numerous modifications and variations therein will be apparent to those skilled in the art. It is also to be understood that the terminology used herein is for the purpose of describing specific embodiments only and is not intended to be limiting.

[50495] In another embodiment, the invention relates to a (isolated) nucleic acid molecule, which comprises a nucleic acid molecule selected from the group consisting of:
[50496] (a) a nucleic acid molecule encoding a polypeptide shown in Table II, application no. 8, column 5 or 8, preferably shown in Table II B, application no. 8, column 8, or a homolog or a fragment thereof;
[50497] (b) a nucleic acid molecule shown in Table I, application no. 8, column 5 or 8, preferably shown in Table I B, application no. 8, column 8, preferably the coding region thereof, or a homolog or a fragment thereof;
[50498] (c) a nucleic acid molecule, which, as a result of the degeneracy of the genetic code, can be derived from a polypeptide sequence depicted in column 5 or 8 of Table II, application no. 8, preferably in column 8 of Table II B, application no. 8;
[50499] (d) a nucleic acid molecule having at least 30% identity, preferably at least 40%, 50%, 60%, 70%, 75%, 80%, 85%, 90%, 95%, 96%, 97%, 98%, 99%, 99,5%, with the nucleic acid molecule sequence of a polynucleotide comprising the nucleic acid molecule shown in column 5 or 8 of Table I, application no. 8, preferably shown in column 8 of Table I B, application no. 8, preferably the coding region thereof;
[50500] (e) a nucleic acid molecule encoding a polypeptide having at least 30% identity, preferably at least 40%, 50% 60%, 70%, 75%, 80%, 85%, 90%, 95%, 96%, 97%, 98%, 99%, 99,5%, identity with the amino acid sequence of the polypeptide encoded by the nucleic acid molecule of (a), (b), (c) or (d);
[50501] (f) a nucleic acid molecule which hybridizes with a nucleic acid molecule of (a), (b), (c), (d) or (e) under stringent hybridization conditions;
[50502] (g) a nucleic acid molecule encoding a polypeptide which can be isolated with the aid of monoclonal or polyclonal antibodies made against a polypeptide encoded by one of the nucleic acid molecules of (a), (b), (c), (d), (e) or (f);
[50503] (h) a nucleic acid molecule encoding a polypeptide comprising the consensus sequence or one or more polypeptide motifs as shown in column 8 of Table IV, application no. 8;
[50504] (i) a nucleic acid molecule encoding a polypeptide having the activity represented by a respective protein as depicted in column 5 of Table II, application no. 8;
[50505] (j) a nucleic acid molecule comprising a polynucleotide which is obtained by amplifying a cDNA library or a genomic library using the primers in Table III, application no. 8, column 8;
[50506] and
[50507] (k) nucleic acid molecule which is obtainable by screening a suitable nucleic acid library, especially a cDNA library and/or a genomic library, under stringent hybridization conditions with a probe comprising one of the sequences of the nucleic acid molecule of (a), (b), (c), (d), (e), (f), (g), (h), (i) or (j) or with a fragment of at least 15 nt, preferably 20 nt, 30 nt, 50 nt, 100 nt, 200 nt,500 nt, 1000 nt, 1500 nt, 2000 nt or 3000 nt of the nucleic acid molecule characterized in (a), (b), (c), (d), (e), (f), (g), (h), (i) or (j) ;
[50508] or a nucleic acid molecule comprising a sequence which is complementary thereto.
   (All the references to Tables I to IV are references to the corresponding lines of Tables I to IV.)

[50509] In a preferred embodiment thereof said nucleic acid molecule according to (a), (b), (c), (d), (e), (f), (g), (h), (i), (j) or (k) encodes a polypeptide which has the activity of the respective polypeptide represented by a protein comprising a polypeptide as depicted in the respective line in column 5 of Table II, application no. 8.

[50510] In another preferred embodiment thereof said nucleic acid molecule according to (a), (b), (c), (d), (e), (f), (g), (h), (i), (j) or (k) confers a generation or an increase of the respective fine chemical in a non-human organism or a part thereof as compared to a corresponding wild-type non-human organism or part thereof.

[50511] In another preferred embodiment thereof said nucleic acid molecule according to (a), (b), (c), (d), (e), (f), (g), (h), (i), (j) or (k) encodes a polypeptide which has the activity of the respective polypeptide represented by a protein as depicted in the respective line in column 5 of Table II application no. 8 and confers a generation or an increase of the respective fine chemical in a non-human organism or a part thereof as compared to a corresponding wild-type non-human organism or part thereof.

[50512] In another embodiment, the invention relates to a (isolated) nucleic acid molecule, which comprises a nucleic acid molecule selected from the group consisting of:
[50513] (a) a nucleic acid molecule encoding a polypeptide shown in Table II, column 5 or 8, application no. 8, preferably shown in Table II A, application no. 8, in column 5 or in Table II A, application no. 8, column 8 or in Table II B, application no. 8, column 8, or a homolog or a fragment thereof;
[50514] (b) a nucleic acid molecule shown in Table I, application no. 8, column 5 or 8, preferably shown in Table I A, application no. 8, in column 5 or in Table I A, application no. 8, column 8 or in Table I B, application no. 8, column 8, preferably the coding region thereof, or a homolog or a fragment thereof;
[50515] (c) a nucleic acid molecule, which, as a result of the degeneracy of the genetic code, can be derived from a polypeptide sequence depicted in column 5 or 8 of Table II, application no. 8, preferably shown in Table II A, application no. 8, in column 5 or in Table II A, application no. 8, column 8 or in Table II B, application no. 8, column 8;
[50516] (d) a nucleic acid molecule having at least 30% identity, preferably at least 40%, 50%, 60%, 70%, 75%, 80%, 85%, 90%, 95%, 96%, 97%, 98%, 99%, 99,5%, with the nucleic acid molecule sequence of a polynucleotide comprising the nucleic acid molecule shown in column 5 or 8 of Table I, application no. 8, preferably shown in Table I A, application no. 8, in column 5 or in Table I A, application no. 8, column 8 or in Table I B column 8, preferably the coding region thereof;
[50517] (e) a nucleic acid molecule encoding a polypeptide having at least 30% identity, preferably at least 40%, 50% 60%, 70%, 75%, 80%, 85%, 90%, 95%, 96%, 97%, 98%, 99%, 99,5%, identity with the amino acid sequence of the polypeptide encoded by the nucleic acid molecule of (a), (b), (c) or (d);
[50518] (f) a nucleic acid molecule which hybridizes with a nucleic acid molecule of (a), (b), (c), (d) or (e) under stringent hybridization conditions;
[50519] (g) a nucleic acid molecule encoding a polypeptide which can be isolated with the aid of monoclonal or polyclonal antibodies made against a polypeptide encoded by one of the nucleic acid molecules of (a), (b), (c), (d), (e) or (f);
[50520] (h) a nucleic acid molecule encoding a polypeptide comprising the consensus sequence or one or more polypeptide motifs as shown in column 8 of Table IV, application no. 8;
[50521] (i) a nucleic acid molecule encoding a polypeptide having the activity represented by a respective protein as depicted in column 5 of Table II, application no. 8;
[50522] (j) a nucleic acid molecule comprising a polynucleotide which is obtained by amplifying a cDNA library or a genomic library using the primers in Table III, application no. 8, column 8;
[50523] and
[50524] (k) nucleic acid molecule which is obtainable by screening a suitable nucleic acid library, especially a cDNA library and/or a genomic library, under stringent hybridization conditions with a probe comprising one of the sequences of the nucleic acid molecule of (a), (b), (c), (d), (e), (f), (g), (h), (i) or (j) or with a fragment thereof having at least 15 nt, preferably 20 nt, 30 nt, 50 nt, 100 nt, 200 nt,500 nt, 1000 nt, 1500 nt, 2000 nt or 3000 nt of the nucleic acid molecule complementary to a nucleic acid sequence characterized in (a), (b), (c), (d), (e), (f), (g), (h), (i) or (j);
[50525] or a nucleic acid molecule comprising a sequence which is complementary thereto;
   whereby, preferably, the nucleic acid molecule according to (a), (b), (c), (d), (e), (f), (g), (h), (i), (j) or (k) distinguishes over the sequence depicted in Table I A and/or I B, application no. 8, column 5 or 8, or the coding regions thereof, by one or more nucleotides (especially but not exceeding 5%, preferably 4%, 3%, 2%, 1%, 0.5%, 0.2% or 0.1%). In an embodiment, the nucleic acid molecule of the invention does not consist of the sequence shown in Table I A and/or I B, application no. 8, column 5 or 8, or the coding region thereof. In another embodiment, the nucleic acid molecule of the present invention, preferably the coding region thereof, is at least 30%, 40%, 50%, 60%, 70%, 80%, 90%, 95% identical but less than 100%, 99.999%, 99.99%, 99.9%, 99%, 98%, 97%, 96% or 95% identical to the sequence shown in Table I A and/or I B, application no. 8, column 5 or 8, or the coding region thereof, respectively. In a further embodiment the nucleic acid molecule does not encode the polypeptide sequence shown in Table II A and/or II B, application no. 8, column 5 or 8 but homologs thereof. Accordingly, in one embodiment, the nucleic acid molecule of the present invention encodes in one embodiment a polypeptide which differs at least in one or more amino acids (especially but not exceeding 5%, preferably 4%, 3%, 2%, 1%, 0.5%, 0.2% or 0.1%) from the polypeptide shown in Table II, application no. 8, column 5 or 8 and does not encode a protein of the sequence shown in Table II A and/or II B, application no. 8, column 5 or 8. Accordingly, in one embodiment, the protein encoded by a sequence of a nucleic acid according to (a), (b), (c), (d), (e), (f), (g), (h), (i), (j) or (k) does not consist of the sequence shown in Table I A and/or I B, application no. 8, column 5 or 8, or the coding region thereof. In a further embodiment, the protein of the present invention is at least 30%, 40%, 50%, 60%, 70%, 80%, 90%, 95% identical to protein sequence depicted in Table II A and/or II B, application no. 8, column 5 or 8 but less than 100%, preferably less than 99.999%, 99.99%, 99.9%, 99%, 98%, 97%, 96% or 95% identical to the sequence shown in Table II A and/or II B, application no. 8, column 5 or 8.
   (All the references to Tables I to IV are references to the corresponding lines of Tables I to IV.)

[50526] In a preferred embodiment thereof said nucleic acid molecule according to (a), (b), (c), (d), (e), (f), (g), (h), (i), (j) or (k) encodes a polypeptide which has the activity of the respective polypeptide represented by a protein comprising a polypeptide as depicted in the respective line in column 5 of Table II, application no. 8.

[50527] In another preferred embodiment thereof said nucleic acid molecule according to (a), (b), (c), (d), (e), (f), (g), (h), (i), (j) or (k) confers a generation or an increase of the respective fine chemical in a non-human organism or a part thereof as compared to a corresponding wild-type non-human organism or part thereof.

[50528] In another preferred embodiment thereof said nucleic acid molecule according to (a), (b), (c), (d), (e), (f), (g), (h), (i), (j) or (k) encodes a polypeptide which has the activity of the respective polypeptide represented by a protein as depicted in the respective line in column 5 of Table II, application no. 8, and confers a generation or an increase of the respective fine chemical in a non-human organism or a part thereof as compared to a corresponding wild-type non-human organism or part thereof.

[50529] In one embodiment the invention relates to the aforementioned nucleic acid molecules, which can be isolated advantageously from yeast, fungi, viruses, algae, bacteria, for example from Charophyceae such as the genera Chara, Nitella e.g. the species Chara globularis, Chara vulgaris, Nitella flexilis, Chlorophyceae such as the genera Acrosiphonia, Spongomorpha, Urospora, Bryopsis, Pseudobryopsis, Trichosolen, Dichotomosiphon, Caulerpa, Rhipilia, Blastophysa, Avrainvillea, Chlorodesmis, Codium, Espera, Halicystis, Halimeda, Penicillus, Pseudocodium, Rhipiliopsis, Rhipocephalus, Tydemania, Udotea, Derbesia, Acrochaete, Aphanochaete, Bolbocoleon, Chaetobolus, Chaetonema, Chaetophora, Chlorotylium, Desmococcus, Draparnaldia, Draparnaldiopsis, Ectochaete, Endophyton, Entocladia, Epicladia, Internoretia, Microthamnion, Ochlochaete, Phaeophila, Pilinella, Pringsheimiella, Protoderma, Pseudendoclonium, Pseudodictyon, Pseudopringsheimia, Pseudulvella, Schizomeris, Stigeoclonium, Thamniochaete, Ulvella, Pilinia, Tellamia, Helicodictyon, Actidesmium, Ankyra, Characium, Codiolum, Sykidion, Keratococcus, Prototheca, Bracteacoccus Chlorococcum, Excentrosphaera, Hormidium, Oophila, Schroederia, Tetraedron, Trebouxia Chlorosarcinopsis, Gomphonitzschia, Coccomyxa, Dactylothece, Diógenes, Disporá, Gloeocystis, Mycanthococcus, Ourococcus, Coelastrum, Dicranochaete, Botryococcus, Dictyosphaerium, Dimorphococcus, Chlorochytrium, Kentrosphaera, Phyllobium, Gomontia, Hormotila, Euastropsis, Hydrodictyon, Pectodictyon, Pediastrum, Sorastrum, Tetrapedia, Acanthosphaera, Echinosphaerella, Echinosphaeridium, Errerella, Gloeoactinium, Golenkeniopsis Golenkinia, Micractinium, Ankistrodesmus, Chlorella, Chodatella, Closteriopsis, Cryocystis, Dactylococcus, Dematractum, Eremosphaera, Eutetramorus, Franceia, Glaucocystis, Gloeotaenium, Kirchneriella, Lagerheimiella, Monoraphidium, Nannochloris, Nephrochlamys, Nephrocytium, Oocystis, Oonephris, Pachycladon, Palmellococcus, Planktosphaeria, Polyedriopsis, Pseudoraciborskia, Quadrigula, Radiococcus, Rochiscia, Scotiella, Selanastrum, Thorakochloris, Treubaria, Trochiscia, Westella, Zoochlorella, Ostreobium, Phyllosiphon, Protosiphon, Rhodochytrium, Actinastrum, Coronastrum, Crucigenia, Dictymocystis, Enallax, Scenedesmus, Selenastrum, Tetradesmus, Tetrallantos, Tetrastrum, Chlorosarcina, Anadyomene, Valoniopsis, Ventricaria, Basicladia, Chaetomorpha, Cladophora, Lola Pithophora Rhizoclonium Chaetosphaeridium, Conochaete, Coleochaete, Oligochaetophora, Polychaetophora, Cylindrocapsa, Gongrosira, Protococcus, Acetabularia, Batophora, Bornetella, Dasycladus, Halicoryne, Neomeris, Elakatothrix, Raphidonema, Microspora, Bulbochaete, Oedocladium, Oedogonium, Prasiola, Rosenvingiella, Schizogonium, Apjohnia, Chamaedoris, Cladophoropsis, Siphonocladus, Spongocladia, Boergesenia, Boodlea, Cystodictyon, Dictyosphaeria, Ernodesmis, Microdictyon, Struvea, Valonia, Sphaeroplea, Malleochloris, Stylosphaeridium, Gloeococcus, Palmella, Palmodictyon, Palmophyllum, Pseudospherocystis, Sphaerocystis, Urococcus, Apiocystis, Chaetopeltis, Gemellicystis, Paulschulzia, Phacomyxa, Pseudotetraspora, Schizochlamys, Tetraspora, Cephaleuros, Ctenocladus, Epibolium, Leptosira, Trentepohlia, Diplochaete, Monostroma, Binuclearia, Geminella, Klebsormidium, Planetonema, Radiofilum, Stichococcus, Ulothrix, Uronema, Blidingia, Capsosiphon, Chloropelta, Enteromorpha, Percursaria, Ulva, Ulvaria, Brachiomonas, Carteria, Chlainomonas, Chlamydomonas, Chlamydonephris, Chlorangium, Chlorogonium, Cyanidium, Fortiella, Glenomonas, Gloeomonas, Hyalogonium, Lobomonas Polytoma, Pyramichlamys, Scourfieldia, Smithsonimonas, Sphaerellopsis, Sphenochloris, Spirogonium, Collodictyon, Dunaliella, Haematococcus, Stephanosphaera, Coccomonas, Dysmorphococcus, Phacotus, Pteromonas, Thoracomonas, Wislouchiella, Mascherina, Pyrobotrys, Spondylomorum, Eudorina, Gonium, Oltmannsiella, Pandorina, Platydorina, Pleodorina, Stephanoon, Volvox, Volvulina, Actinotaenium, Arthrodesmus, Bambusina Closterium, Cosmarium, Desmidium, Euastrum, Groenbladia, Hyalotheca, Micrasterias, Penium, Phymatodocis, Pleurotaenium, Sphaerozosma, Spinoclosterium, Spinocosmarium, Spondylosium, Staurastrum, Tetmemorus, Triploceras, Xanthidium, Cylindrocystis, Genicularia, Gonatozygon, Mesotaenium, Netrium, Roya, Spirotaenia, Cosmocladium, Debarya, Docidium, Euastridium, Hallasia, Mougeotia, Mougeotiopsis, Sirogonium, Spirogyra, Staurodesmus, Teilingia, Zygnema, Zygogonium, e.g. the species Caulerpa taxifolia, Prototheca wickerhamii, Ankistrodesmus falcatus, Chlorella ellipsoidea, Chlorella pyrenoidosa, Clorella sorokiniana, Chlorella vulgaris, Scenedesmus obliquus, Scenedesmus quadricauda, Selenastrum capricornutum, Selenastrum undecimnotata, Cladophora glomerata, Chlamydomonas eugametos, Chlamydomonas reinhardtii, Cyanidium caldarium, Dunaliella salina, Dunaliella tertiolecta, Euglena gracilis, Haematococcus pluvialis, Coniugatophyceae, Prasinophyceae Trebouxiophyceae, Ulvophyceae, Chlorodendraceae, Pedinomonadales, Halosphaeraceae, Pterospermataceae, Monomastigaceae, Pyramimonadaceae, Chlorodendraceae such as the genera Prasinocladus e.g. the species Prasinocladus ascus, Halosphaeraceae, Pedinomonadales, Pedinomonadaceae such as the genera Pedinomonas, Pterospermataceae such as the genera Pachysphaera, Pterosperma, Halosphaera, Pyramimonas, Bacillariophyceae, Chrysophyceae, Craspedophyceae, Euglenophyceae, Prymnesiophyceae, Phaeophyceae, Dinophyceae, Rhodophyceae, Xanthophyceae, Prasinophyceae such as the genera Nephroselmis, Prasinococcus, Scherffelia, Tetraselmis, Mantoniella, Ostreococcus e.g. the species Nephroselmis olivacea, Prasinococcus capsulatus, Scherffelia dubia, Tetraselmis chui, Tetraselmis suecica, Mantoniella squamata, Ostreococcus tauri, especially such as Acetobacter (subgen. Acetobacter) aceti; Acidithiobacillus ferrooxidans; Acinetobacter sp.; Actinobacillus sp; Aeromonas salmonicida; Agrobacterium tumefaciens; Aquifex aeolicus; Arcanobacterium pyogenes; Aster yellows phytoplasma; Bacillus sp.; Bifidobacterium sp.; Borrelia burgdorferi; Brevibacterium linens; Brucella melitensis; Buchnera sp.; Butyrivibrio fibrisolvens; Campylobacter jejuni; Caulobacter crescentus; Chlamydia sp.; Chlamydophila sp.; Chlorobium limicola; Citrobacter rodentium; Clostridium sp.; Comamonas testosteroni; Corynebacterium sp.; Coxiella burnetii; Deinococcus radiodurans; Dichelobacter nodosus; Edwardsiella ictaluri; Enterobacter sp.; Erysipelothrix rhusiopathiae; E. coli; Flavobacterium sp.; Francisella tularensis; Frankia sp. Cpl1; Fusobacterium nucleatum; Geobacillus stearothermophilus; Gluconobacter oxydans; Haemophilus sp.; Helicobacter pylori; Klebsiella pneumoniae; Lactobacillus sp.; Lactococcus lactis; Listeria sp.; Mannheimia haemolytica; Mesorhizobium loti; Methylophaga thalassica; Microcystis aeruginosa; Microscilla sp. PRE1; Moraxella sp. TA144; Mycobacterium sp.; Mycoplasma sp.; Neisseria sp.; Nitrosomonas sp.; Nostoc sp. PCC 7120; Novosphingobium aromaticivorans; Oenococcus oeni; Pantoea citrea; Pasteurella multocida; Pediococcus pentosaceus; Phormidium foveolarum; Phytoplasma sp.; Plectonema boryanum; Prevotella ruminicola; Propionibacterium sp.; Proteus vulgaris; Pseudomonas sp.; Ralstonia sp.; Rhizobium sp.; Rhodococcus equi; Rhodothermus marinus; Rickettsia sp.; Riemerella anatipestifer; Ruminococcus flavefaciens; Salmonella sp.; Selenomonas ruminantium; Serratia entomophila; Shigella sp.; Sinorhizobium meliloti; Staphylococcus sp.; Streptococcus sp.; Streptomyces sp.; Synechococcus sp.; Synechocystis sp. PCC 6803; Thermotoga maritima; Treponema sp.; Ureaplasma urealyticum; Vibrio cholerae; Vibrio parahaemolyticus; Xylella fastidiosa; Yersinia sp.; Zymomonas mobilis, preferably Salmonella sp. or E. coli, preferably from yeasts such as from the genera Saccharomyces, Pichia, Candida, Hansenula, Torulopsis or Schizosaccharomyces, or from plants, such as monocotyledonous or dicotyledonous plants, preferably selected from the group consisting of Anacardiaceae such as the genera Pistacia, Mangifera, Anacardium e.g. the species Pistacia vera [pistachios, Pistazie], Mangifer indica [Mango] or Anacardium occidentale [Cashew]; Asteraceae such as the genera Calendula, Carthamus, Centaurea, Cichorium, Cynara, Helianthus, Lactuca, Locusta, Tagetes, Valeriana e.g. the species Calendula officinalis [Marigold], Carthamus tinctorius [safflower], Centaurea cyanus [cornflower], Cichorium intybus [blue daisy], Cynara scolymus [Artichoke], Helianthus annus [sunflower], Lactuca sativa, Lactuca crispa, Lactuca esculenta, Lactuca scariola L. ssp. sativa, Lactuca scariola L. var. integrata, Lactuca scariola L. var. integrifolia, Lactuca sativa subsp. romana, Locusta communis, Valeriana locusta [lettuce], Tagetes lucida, Tagetes erecta or Tagetes tenuifolia [Marigold]; Apiaceae such as the genera Daucus e.g. the species Daucus carota [carrot]; Betulaceae such as the genera Corylus e.g. the species Corylus avellana or Corylus colurna [hazelnut]; Boraginaceae such as the genera Borago e.g. the species Borago officinalis [borage]; Brassicaceae such as the genera Brassica, Melanosinapis, Sinapis, Arabadopsis e.g. the species Brassica napus, Brassica rapa ssp. [canola, oilseed rape, turnip rape], Sinapis arvensis Brassica juncea, Brassica juncea var. juncea, Brassica juncea var. crispifolia, Brassica juncea var. foliosa, Brassica nigra, Brassica sinapioides, Melanosinapis communis [mustard], Brassica oleracea [fodder beet] or Arabidopsis thaliana; Bromeliaceae such as the genera Anana, Bromelia e.g. the species Anana comosus, Ananas ananas or Bromelia comosa [pineapple]; Caricaceae such as the genera Carica e.g. the species Carica papaya [papaya]; Cannabaceae such as the genera Cannabis e.g. the species Cannabis sative [hemp], Convolvulaceae such as the genera Ipomea, Convolvulus e.g. the species Ipomoea batatus, Ipomoea pandurata, Convolvulus batatas, Convolvulus tiliaceus, Ipomoea fastigiata, Ipomoea tiliacea, Ipomoea triloba or Convolvulus panduratus [sweet potato, Man of the Earth, wild potato], Chenopodiaceae such as the genera Beta, i.e. the species Beta vulgaris, Beta vulgaris var. altissima, Beta vulgaris var. Vulgaris, Beta maritima, Beta vulgaris var. perennis, Beta vulgaris var. conditiva or Beta vulgaris var. esculenta [sugar beet]; Cucurbitaceae such as the genera Cucubita e.g. the species Cucurbita maxima, Cucurbita mixta, Cucurbita pepo or Cucurbita moschata [pumpkin, squash]; Elaeagnaceae such as the genera Elaeagnus e.g. the species Olea europaea [olive]; Ericaceae such as the genera Kalmia e.g. the species Kalmia latifolia, Kalmia angustifolia, Kalmia microphylla, Kalmia polifolia, Kalmia occidentalis, Cistus chamaerhodendros or Kalmia lucida [American laurel, broad-leafed laurel, calico bush, spoon wood, sheep laurel, alpine laurel, bog laurel, western bog-laurel, swamp-laurel]; Euphorbiaceae such as the genera Manihot, Janipha, Jatropha, Ricinus e.g. the species Manihot utilissima, Janipha manihot, Jatropha manihot, Manihot aipil, Manihot dulcis, Manihot manihot, Manihot melanobasis, Manihot esculenta [manihot, arrowroot, tapioca, cassava] or Ricinus communis [castor bean, Castor Oil Bush, Castor Oil Plant, Palma Christi, Wonder Tree]; Fabaceae such as the genera Pisum, Albizia, Cathormion, Feuillea, Inga, Pithecolobium, Acacia, Mimosa, Medicajo, Glycine, Dolichos, Phaseolus, Soja e.g. the species Pisum sativum, Pisum arvense, Pisum humile [pea], Albizia berteriana, Albizia julibrissin, Albizia lebbeck, Acacia berteriana, Acacia littoralis, Albizia berteriana, Albizzia berteriana, Cathormion berteriana, Feuillea berteriana, Inga fragrans, Pithecellobium berterianum, Pithecellobium fragrans, Pithecolobium berterianum, Pseudalbizzia berteriana, Acacia julibrissin, Acacia nemu, Albizia nemu, Feuilleea julibrissin, Mimosa julibrissin, Mimosa speciosa, Sericanrda julibrissin, Acacia lebbeck, Acacia macrophylla, Albizia lebbek, Feuilleea lebbeck, Mimosa lebbeck, Mimosa speciosa [bastard logwood, silk tree, East Indian Walnut], Medicago sativa, Medicago falcata, Medicago varia [alfalfa], Glycine max [soybean], Dolichos soja, Glycine gracilis, Glycine hispida, Phaseolus max or Soja hispida; Geraniaceae such as the genera Pelargonium, Cocos, Oleum e.g. the species Cocos nucifera, Pelargonium grossularioides or Oleum cocois [coconut]; Gramineae such as the genera Saccharum e.g. the species Saccharum officinarum; Juglandaceae such as the genera Juglans, Wallia e.g. the species Juglans regia, Juglans ailanthifolia, Juglans sieboldiana, Juglans cinerea, Wallia cinerea, Juglans bixbyi, Juglans californica, Juglans hindsii, Juglans intermedia, Juglans jamaicensis, Juglans major, Juglans microcarpa, Juglans nigra or Wallia nigra [walnut, black walnut, common walnut, persian walnut, white walnut, butternut, black walnut]; Lauraceae such as the genera Persea, Laurus e.g. the species laurel Laurus nobilis [bay, laurel, bay laurel, sweet bay], Persea americana Persea americana, Persea gratissima or Persea persea [avocado]; Leguminosae such as the genera Arachis e.g. the species Arachis hypogaea [peanut]; Linaceae such as the genera Linum, Adenolinum e.g. the species Linum usitatissimum, Linum humile, Linum austriacum, Linum bienne, Linum angustifolium, Linum catharticum, Linum flavum, Linum grandiflorum, Adenolinum grandiflorum, Linum lewisii, Linum narbonense, Linum perenne, Linum perenne var. lewisii, Linum pratense or Linum trigynum [flax, linseed]; Lythrarieae such as the genera Punica e.g. the species Punica granatum [pomegranate]; Malvaceae such as the genera Gossypium e.g. the species Gossypium hirsutum, Gossypium arboreum, Gossypium barbadense, Gossypium herbaceum or Gossypium thurberi [cotton]; Musaceae such as the genera Musa e.g. the species Musa nana, Musa acuminate, Musa paradisiaca, Musa spp. [banana]; Onagraceae such as the genera Camissonia, Oenothera e.g. the species Oenothera biennis or Camissonia brevipes [primrose, evening primrose]; Palmae such as the genera Elacis e.g. the species Elaeis guineensis [oil plam]; Papaveraceae such as the genera Papaver e.g. the species Papaver orientale, Papaver rhoeas, Papaver dubium [poppy, oriental poppy, corn poppy, field poppy, shirley poppies, field poppy, longheaded poppy, long-pod poppy]; Pedaliaceae such as the genera Sesamum e.g. the species Sesamum indicum [sesame]; Piperaceae such as the genera Piper, Artanthe, Peperomia, Steffensia e.g. the species Piper aduncum, Piper amalago, Piper angustifolium, Piper auritum, Piper betel, Piper cubeba, Piper longum, Piper nigrum, Piper retrofractum, Artanthe adunca, Artanthe elongata, Peperomia elongata, Piper elongatum, Steffensia elongata. [Cayenne pepper, wild pepper]; Poaceae such as the genera Hordeum, Secale, Avena, Sorghum, Andropogon, Holcus, Panicum, Oryza, Zea, Triticum e.g. the species Hordeum vulgare, Hordeum jubatum, Hordeum murinum, Hordeum secalinum, Hordeum distichon Hordeum aegiceras, Hordeum hexastichon, Hordeum hexastichum, Hordeum irregulare, Hordeum sativum, Hordeum secalinum [barley, pearl barley, foxtail barley, wall barley, meadow barley], Secale cereale [rye], Avena sativa, Avena fatua, Avena byzantina, Avena fatua var. sativa, Avena hybrida [oat], Sorghum bicolor, Sorghum halepense, Sorghum saccharatum, Sorghum vulgare, Andropogon drummondii, Holcus bicolor, Holcus sorghum, Sorghum aethiopicum, Sorghum arundinaceum, Sorghum caffrorum, Sorghum cernuum, Sorghum dochna, Sorghum drummondii, Sorghum durra, Sorghum guineense, Sorghum lanceolatum, Sorghum nervosum, Sorghum saccharatum, Sorghum subglabrescens, Sorghum verticilliflorum, Sorghum vulgare, Holcus halepensis, Sorghum miliaceum millet, Panicum militaceum [Sorghum, millet], Oryza sativa, Oryza latifolia [rice], Zea mays [corn, maize] Triticum aestivum, Triticum durum, Triticum turgidum, Triticum hybernum, Triticum macha, Triticum sativum or Triticum vulgare [wheat, bread wheat, common wheat], Proteaceae such as the genera Macadamia e.g. the species Macadamia intergrifolia [macadamia]; Rubiaceae such as the genera Coffea e.g. the species Cofea spp., Coffea arabica, Coffea canephora or Coffea liberica [coffee]; Scrophulariaceae such as the genera Verbascum e.g. the species Verbascum blattaria, Verbascum chaixii, Verbascum densiflorum, Verbascum lagurus, Verbascum longifolium, Verbascum lychnitis, Verbascum nigrum, Verbascum olympicum, Verbascum phlomoides, Verbascum phoenicum, Verbascum pulverulentum or Verbascum thapsus [mullein, white moth mullein, nettle-leaved mullein, dense-flowered mullein, silver mullein, long-leaved mullein, white mullein, dark mullein, greek mullein, orange mullein, purple mullein, hoary mullein, great mullein]; Solanaceae such as the genera Capsicum, Nicotiana, Solanum, Lycopersicon e.g. the species Capsicum annuum, Capsicum annuum var. glabriusculum, Capsicum frutescens [pepper], Capsicum annuum [paprika], Nicotiana tabacum, Nicotiana alata, Nicotiana attenuata, Nicotiana glauca, Nicotiana langsdorffii, Nicotiana obtusifolia, Nicotiana quadrivalvis, Nicotiana repanda, Nicotiana rustica, Nicotiana sylvestris [tobacco], Solanum tuberosum [potato], Solanum melongena [egg-plant] (Lycopersicon esculentum, Lycopersicon lycopersicum, Lycopersicon pyriforme, Solanum integrifolium or Solanum lycopersicum [tomato]; Sterculiaceae such as the genera Theobroma e.g. the species Theobroma cacao [cacao]; Theaceae such as the genera Camellia e.g. the species Camellia sinensis) [tea]; especially A. thaliana, maize, wheat, rye, oat, triticale, rice, barley, soybean, peanut, cotton, borage, sunflower, sugar cane, sugar beet, linseed, primrose, rapeseed, canola and turnip rape, manihot, pepper, sunflower, tagetes, solanaceous plant such as potato, tobacco, eggplant and tomato, Vicia species, pea, alfalfa, bushy plants such as coffee, cacao, tea, Salix species, trees such as oil palm, coconut, perennial grass, such as ryegrass and fescue, and forage crops, such as alfalfa and clover and from spruce, pine or fir for example.

[50530] More preferably said nucleic acid molecules can be isolated from S. cerevisiae, E. coli, Azotobacter vinelandii, Thermus thermophilus or Synechocystis sp. or plants, preferably Arabidopsis thaliana, Brassica napus, Glycine max, Zea mays, Gossypium or Oryza sativa.

[50531] The FCRPs of the present invention are preferably produced by recombinant DNA techniques. For example, a nucleic acid molecule encoding the protein is cloned into an expression vector, for example into a binary vector, the expression vector is introduced into a host cell, for example into cells of the Arabidopsis thaliana wild type NASC N906 or any other plant cell as described above and/or below and/or in the examples, and the FCRP is expressed in said host cell.

[50532] In an embodiment of the present invention, the respective FCRP is localized after expression as indicated in column 6 of Table II, e.g. non-targeted, mitochondrial or plastidic.

[50533] In an embodiment of the present invention the FCRP is preferably produced in an compartment of the cell, e.g. in an organelle, for example in plastids or mitochondria. Ways of introducing nucleic acids into organelles, for example into plastids or mitochondria, and producing proteins in this compartment are known to the person skilled in the art.

[50534] The respective nucleic acid sequence according to the invention mentioned above is advantageously functionally joined to a nucleic acid sequence encoding a transit peptide, in such a manner that a preprotein is translated, which is able to direct the polypeptide to the organelle such as to plastids or mitochondria. In another preferred embodiment the nucleic acids according to the invention mentioned above is advantageously functionally joined to a promoter region functional in plastids or mitochondria like for example the RNA operon promoter fused to the 5′ UTR of the rbcL gene and in another preferred embodiment joined to a plastome sequences homologous to the integration sites. Example for useful integration sites are the trnV-rps12/7 (Skidar et al., Plant Cell Rep. 18, 20 (1998), and other reports), thr rbvL-aacD site (Svab et al., Proc. Natl. Acad. Sci. USA 90, 913 (1993)), the trnl-trnA site (De Cosa et al., Nat. Biotech. 19, 71 (2001)), the rps7-ndhB site (Hou et al., Transgenic Res. 12, 111 (2003)) and the ndhF-trnL site Zhang et al., Plant Physiol. 127, 131 (2001c)).

[50535] The nucleic acid sequence coding for the transit peptide is advantageously derived from a nucleic acid sequence encoding a protein finally resided in the plastids or mitochondria and is stemming from an organism selected from the group consisting of the genera Acetabularia, Arabidopsis, Brassica, Capsicum, Chlamydomonas, Cucurbita, Daucus, Dunaliella, Euglena, Flaveria, Glycine, Helianthus, Hordeum, Lactua, Lemna, Lolium, Lycopersion, Malus, Meticago, Mesembryanthemum, Nicotiana, Oenotherea, Oryza, Petúnia, Phaseolus, Physcomitrella, Pinus, Pisum, Pyrus, Raphanus, Saccharum, Silene, Sinapis, Solanum, Spinacea, Stevia, Synechococcus,Triticum and Zea.

[50536] Preferably the plastidal transit peptide is derived from the nucleic acid sequence encoding a protein selected from the group consisting of ribulose bisphosphate carboxylase/oxygenase, 5-enolpyruvyl-shikimate-3-phosphate synthase, acetolactate synthase, chloroplast ribosomal protein CS17, Cs protein, ferredoxin, plastocyanin, ribulose bisphosphate carboxylase activase, tryptophan synthase, acyl carrier protein, plastid chaperonin-60, cytochrome c552, 22-kDA heat shock protein, 33-kDa Oxygen-evolving enhancer protein 1, ATP synthase γ subunit, ATP synthase δ subunit, chlorophyll-a/b-binding proteinll-1, Oxygen-evolving enhancer protein 2, Oxygen-evolving enhancer protein 3, photosystem I: P21, photosystem I: P28, photosystem I: P30, photosystem I: P35, photosystem I: P37, glycerol-3-phosphate acyltransferases, chlorophyll a/b binding protein, CAB2 protein, hydroxymethyl-bilane synthase, pyruvate-orthophosphate dikinase, CAB3 protein, plastid ferritin, ferritin, early light-inducible protein, glutamate-1semialdehyde aminotransferase, protochlorophyllide reductase, starch-granule-bound amylase synthase, light-harvesting chlorophyll a/b-binding protein of photosystem II, major pollen allergen Lol p 5a, plastid CIpB ATP-dependent protease, superoxide dismutase, ferredoxin NADP oxidoreductase, 28-kDa ribonucleoprotein, 31-kDa ribonucleoprotein, 33-kDa ribonucleoprotein, acetolactate synthase, ATP synthase CFO subunit 1, ATP synthase CFO subunit 2, ATP synthase CFO subunit 3, ATP synthase CFO subunit 4, cytochrome f, ADP-glucose pyrophosphorylase, glutamine synthase, glutamine synthase 2, carbonic anhydrase, GapA protein, heatshock-protein hsp21, phosphate translocator, plastid CIpA ATP-dependent protease, plastid ribosomal protein CL24, plastid ribosomal protein CL9, plastid ribosomal protein PsCL18, plastid ribosomal protein PsCL25, DAHP synthase, starch phosphorylase, root acyl carrier protein II, betaine-aldehyde dehydrogenase, GapB protein, glutamine synthetase 2, phosphoribulokinase, nitrite reductase, ribosomal protein L12, ribosomal protein L13, ribosomal protein L21, ribosomal protein L35, ribosomal protein L40, triose phosphate-3-phosphoglyerate-phosphate translocator, ferredoxin-dependent glutamate synthase, glyceraldehyde-3-phosphate dehydrogenase, NADP-dependent malic enzyme and NADP-malate dehydrogenase. In an embodiment the plastome sequences are preferential derived from the plastome of the target organisms themselves and are advantegously derived from one of the following intergration sites: trnV-rps12/7 (Skidar et al., Plant Cell Rep. 18, 20 (1998) and other reports), rbvLaacD (Svab et al., Proc. Natl. Acad. Sci. USA 90, 913 (1993)), trnl-trnA (De Cosa et al., Nat. Biotech. 19, 71 (2001)), rps7-ndhB (Hou et al., Transgenic Res. 12, 111 (2003)) or ndhF-trnL site Zhang et al., Plant Physiol. 127, 131 (2001c)).

[50537] Advantageously the mitochondrial transit peptide is derived from the nucleic acid sequence encoding a protein selected from the group consisting of

[50538] 22 kDA heat shock protein; 70 kDA heat shock protein; 83 kDA heat shock protein; 40S ribosomal protein S19; 50S ribosomal protein L15; ribosomal protein L29; 22 kDA PSST protein of complex I; 2-oxoacid dehydrogenase family protein; 2-oxoglutarate/malate translocator; 3-methyl-2-oxobutanoate hydroxymethyltransferase; 3-Methylcrotonyl-coenzyme A carboxylase (MCCase); 7,8-Dihydropteroate synthase (DHPS)/6-hydroxymethyl-7,8-dihydropterine pyrophosphokinase (HPPK); aconitate hydratase; acyl carrier protein (ACP); ADP/ATP translocase; alanyl-tRNA synthetase; alcohol dehydrogenase (ADH); alternative oxidase (AOX); aminoacyl-tRNA ligase; asparate aminotransferase; ATP synthase alpha subunit; ATP synthase beta subunit; ATP synthase delta subunit; ATP synthase epsilon subunit; ATP synthase gamma subunit; ATP-dependent Clp protease-proteolytic subunit; Chaperonin 60—- CPN60; Chaperonin 60 (2)—CPN60-2; Chaperonin 60(1)—CPN60-1; citrate synthase; cytochrome b-c1 complex subunit Rieske FeS Protein; cytochrome c reductase-processing peptidase subunit II; dihydrolipoamide S-acetyltransferase; farnesyl-diphosphate synthase 1; formate dehydrogenase; fumarate hydratase; gamma carbonic anhydrase protein (gammaCA); gamma carbonic anhydrase-like protein 1 (gammaCAL1); gamma carbonic anhydrase-like protein 2 (gammaCAL2); gamma-aminobutyric acid transaminase (GABA-T); glutathione reductase (GR); glycine decarboxylase subunit H; glycine decarboxylase subunit L; glycine decarboxylase subunit P; glycine decarboxylase subunit T; isovaleryl-CoA dehydrogenase (IVD); lipoamide dehydrogenase; malate oxidoreductase; manganese superoxide dismutase (Mn)SOD; methylmalonate-semialdehyde dehydrogenase; mitochondrial-processing peptidase beta subunit (MPP); mitochondrial-processing peptidase subunit alpha (MPP); monodehydroascorbate reductase (MDHAR); NAD dependent isocitrate dehydrogenase; NAD dependent malate dehydrogenase; NAD-dependent malic enzyme; NAD-dependent malic enzyme 59 kDa isoform; NAD-dependent malic enzyme 62 kDa isoform; NAD-dependent malic enzyme 65 kDa isoform; NADH ubiquinone oxidoreductase 29 kDa subunit; NADH-ubiquinone oxidoreductase 18 kDa subunit; NADH-ubiquinone oxidoreductase 20 kDa subunit; NADH-ubiquinone oxidoreductase 23 kDa subunit; NADH-ubiquinone oxidoreductase 75 kDa subunit; NADP dependent isocitrate dehydrogenase; NADP dependent malate dehydrogenase; nucleoside diphosphate kinase; nucleoside diphosphate kinase III; o-acetylserine (thiol) lyase (OAS-TL); propionyl-CoA carboxylase; protoporphyrinogen IX oxidase; pyruvate dehydrogenase E1 component subunit alpha; serine acetyltransferase (SAT); serine hydroxymethyltransferase; succinate dehydrogenase (SDH); succinic semialdehyde dehydrogenase (SSADH); succinyl-CoA ligase (GDP-forming) alpha-chain; succinyl-CoA ligase [GDP-forming] subunit beta; thiosulfate sulfurtransferase; threonyl-tRNA synthetase; trans-2-enoyl-CoA reductase; translocase inner membrane (TIM); translocase outer membrane (TOM); tRNA synthetase class I and ubiquinol cytochrome C oxidoreductase complex.

[50539] Further transit peptides and details thereto have been described above.

[50540] In another embodiment of the present invention the FCRP is produced without further targeting signal (e.g. as mentioned herein), e.g. in the cytoplasm of the cell. Ways of producing proteins without artificial targeting are known to the person skilled in the art.

[50541] The nucleic acid sequences used in the process are advantageously introduced in a nucleic acid construct, preferably an expression cassette, which makes possible the expression of the nucleic acid molecules in a non-human organism, advantageously a plant or a microorganism such as an algae, advantageously non-targeted or in an organelle, like plastids or mitochondria , respectively, of those non-human organisms.

[50542] Accordingly, the invention also relates to a nucleic acid construct, preferably to an expression construct, comprising the nucleic acid molecule of the present invention functionally linked to one or more regulatory elements or signals.

[50543] As described herein, the nucleic acid construct can also comprise further genes, which are to be introduced into the non-human organisms or cells. It is possible and advantageous to introduce into, and express in, the host organisms regulatory genes such as genes for inductors, repressors or enzymes, which, owing to their biological or enzymatic activity, engage in the regulation of one or more genes of the respective biosynthetic pathway. These genes can be of heterologous or homologous origin. Moreover, further biosynthesis genes may advantageously be present, or else these genes may be located on one or more further nucleic acid constructs. Genes, which are advantageously employed as further biosynthesis genes are genes of the fatty acid metabolism, amino acid metabolism, of glycolysis, of the tricarboxylic acid metabolism or their combinations. As described herein, regulator sequences or factors can have a positive effect on preferably the gene expression of the genes introduced, thus increasing it. Thus, an enhancement of the regulator elements may advantageously take place at the transcriptional level by using strong transcription signals such as promoters and/or enhancers. In addition, however, an enhancement of translation is also possible, for example by increasing mRNA stability or by inserting a translation enhancer sequence.

[50544] In principle, the nucleic acid construct can comprise the herein described regulator sequences and further sequences relevant for the expression of the comprised genes. Thus, the nucleic acid construct of the invention can be used as expression cassette and thus can be used directly for introduction into the plant, or else they may be introduced into a vector. Accordingly in one embodiment the nucleic acid construct is an expression cassette comprising a microorganism promoter or a microorganism terminator or both, beneath the nucleic acid molecule according to the invention. In another embodiment the expression cassette encompasses a plant promoter or a plant terminator or both, beneath the nucleic acid molecule according to the invention. In another embodiment the expression cassette encompasses sequences for transcription by organelle RNA polymerases, beneath the nucleic acid molecule according to the invention. In another embodiment an expression cassette encompasses a nucleic acid molecule encoding for a transit peptide, beneath the gene according to the invention.

[50545] In a preferred embodiment a nucleic acid construct, for example an expression cassette, comprises upstream, i.e. at the 5′ end of the encoding sequence, a promoter and downstream, i.e. at the 3′ end, a polyadenylation signal and optionally other regulatory elements which are operably linked to the intervening encoding sequence with one of the nucleic acids as depicted in the respective line in Table I, application no. 8, column 5 or 8, preferably the coding region thereof, or a homolog or a fragment thereof. By an operable linkage is meant the sequential arrangement of promoter, encoding sequence, terminator, optionally other regulatory elements and optionally targeting sequences in such a way that each of the regulatory elements/targeting sequence can fulfill its function in the expression of the encoding sequence in due manner. In one embodiment the sequences preferred for operable linkage are targeting sequences for ensuring subcellular localization in organelles, like plastids or mitochondria. However, targeting sequences for ensuring subcellular localization in the endoplasmic reticulum (=ER), in the nucleus, in oil corpuscles or other compartments may also be employed as well as translation promoters such as the 5′ lead sequence in tobacco mosaic virus (Gallie et al., Nucl. Acids Res. 15, 8693 (1987)).

[50546] As an example, a nucleic acid construct, like an expression cassette may, for example, contain a constitutive promoter or a tissue-specific promoter (preferably the USP or napin promoter), the gene to be expressed and a ER retention signal. For the ER retention signal the KDEL amino acid sequence (lysine, aspartic acid, glutamic acid, leucine) or the KKX amino acid sequence (lysine-lysine-X-stop, wherein X means every other known amino acid) is preferably employed.

[50547] In an embodiment, the invention relates to an expression cassette, comprising
[50548] 1) a promoter, preferably a promoter selected from the group consisting of Big35S, PCUbi, Super and USP;
[50549] 2) a nucleic acid molecule selected from the group consisting of
   [50550] (a) a nucleic acid molecule encoding a polypeptide shown in Table II, application no. 8, column 5 or 8, preferably shown in Table II A, application no. 8, column 5, or in Table II A, application no. 8, column 8, or in Table II B, application no. 8, column 8, or a homolog or a fragment thereof;
   [50551] (b) a nucleic acid molecule shown in Table I, application no. 8, column 5 or 8, preferably shown in Table I A, application no. 8, column 5, or in Table I A, application no. 8, column 8, or in Table I B, application no. 8, column 8, preferably the coding region thereof, or a homolog or a fragment thereof;
   [50552] (c) a nucleic acid molecule, which, as a result of the degeneracy of the genetic code, can be derived from a polypeptide sequence depicted in column 5 or 8 of Table II, application no. 8, preferably shown in Table II A, application no. 8, column 5, or in Table II A, application no. 8, column 8, or in Table II B, application no. 8, column 8;
   [50553] (d) a nucleic acid molecule having at least 30% identity, preferably at least 40%, 50%, 60%, 70%, 75%, 80%, 85%, 90%, 95%, 96%, 97%, 98%, 99%, 99,5%, with the nucleic acid molecule sequence of a polynucleotide comprising the nucleic acid molecule shown in column 5 or 8 of Table I, application no. 8, preferably shown in Table I A, application no. 8, column 5, or in Table I A, application no. 8, column 8, or in Table I B, application no. 8, column 8, preferably the coding region thereof;
   [50554] (e) a nucleic acid molecule encoding a polypeptide having at least 30% identity, preferably at least 40%, 50% 60%, 70%, 75%, 80%, 85%, 90%, 95%, 96%, 97%, 98%, 99%, 99,5%, identity with the amino acid sequence of the polypeptide encoded by the nucleic acid molecule of (a), (b), (c) or (d);
   [50555] (f) a nucleic acid molecule which hybridizes with a nucleic acid molecule of (a), (b), (c), (d) or (e) under stringent hybridization conditions;
   [50556] (g) a nucleic acid molecule encoding a polypeptide which can be isolated with the aid of monoclonal or polyclonal antibodies made against a polypeptide encoded by one of the nucleic acid molecules of (a), (b), (c), (d), (e) or (f);
   [50557] (h) a nucleic acid molecule encoding a polypeptide comprising the consensus sequence or one or more polypeptide motifs as shown in column 8 of Table IV, application no. 8;
   [50558] (i) a nucleic acid molecule encoding a polypeptide having the activity represented by a respective protein as depicted in column 5 of Table II, application no. 8;
   [50559] (j) a nucleic acid molecule comprising a polynucleotide which is obtained by amplifying a cDNA library or a genomic library using the primers in Table III, application no. 8, column 8;
   [50560] and
   [50561] (k) nucleic acid molecule which is obtainable by screening a suitable nucleic acid library, especially a cDNA library and/or a genomic library, under stringent hybridization conditions with a probe comprising one of the sequences of the nucleic acid molecule of (a), (b), (c), (d), (e), (f), (g), (h), (i) or (j) or with a fragment of at least 15 nt, preferably 20 nt, 30 nt, 50 nt, 100 nt, 200 nt,500 nt, 1000 nt, 1500 nt, 2000 nt or 3000 nt of the nucleic acid molecule characterized in (a), (b), (c), (d), (e), (f), (g), (h), (i) or (j);
   [50562] or a nucleic acid molecule comprising a sequence which is complementary thereto.
      and, optionally
[50563] 3) nucleic acid molecule encoding a transit peptide, preferably encoding a plastidal transit peptide or a mitochondrial transit peptide;
   which are operable linked.
   (All the references to Tables I to IV are references to the corresponding lines of Tables I to IV.)

[50564] In a preferred embodiment thereof said nucleic acid molecule according to 2 (a), (b), (c), (d), (e), (f), (g), (h), (i), (j) or (k) encodes a polypeptide which has the activity of the respective polypeptide represented by a protein comprising a polypeptide as depicted in the respective line in column 5 of Table II, application no. 8.

[50565] In another preferred embodiment thereof said nucleic acid molecule according to 2 (a), (b), (c), (d), (e), (f), (g), (h), (i), (j) or (k) confers a generation or an increase of the respective fine chemical in a non-human organism or a part thereof as compared to a corresponding wild-type non-human organism or part thereof.

[50566] In another preferred embodiment thereof said nucleic acid molecule according to 2 (a), (b), (c), (d), (e), (f), (g), (h), (i), (j) or (k) encodes a polypeptide which has the activity of the respective polypeptide represented by a protein as depicted in the respective line in column 5 of Table II application no. 8 and confers a generation or an increase of the respective fine chemical in a non-human organism or a part thereof as compared to a corresponding wild-type non-human organism or part thereof.

[50567] In another embodiment thereof the expression cassette comprises 3) a nucleic acid molecule encoding a transit peptide, preferably encoding a plastidal transit peptide, especially in case in column 6 of Table I, application no. 8, in the same line as of the respective nucleic acid molecule according to 2) “plastidic” is depicted, or encoding a mitochondrial transit peptide, especially in case in column 6 of Table I, application no. 8, in the same line as of the respective nucleic acid molecule according to 2) “mitochondrial” is depicted.

[50568] In another embodiment thereof the expression cassette does not comprise 3) a nucleic acid molecule encoding a transit peptide, especially in case in column 6 of Table I, application no. 8, in the same line as of the respective nucleic acid molecule according to 2) “non-targeted” is depicted.

[50569] In a further embodiment, the invention relates to an expression cassette, comprising
[50570] 1) a promoter, preferably a promoter selected from the group consisting of Big35S, PCUbi, Super and USP;
[50571] 2) a nucleic acid molecule selected from the group consisting of
   [50572] (a) a nucleic acid molecule encoding a polypeptide shown in Table II, application no. 8, column 5 or 8, preferably shown in Table II A, application no. 8, column 5, or in Table II A, application no. 8, column 8, or in Table II B, application no. 8, column 8, or a homolog or a fragment thereof;
   [50573] (b) a nucleic acid molecule shown in Table I, application no. 8, column 5 or 8, preferably shown in Table I A, application no. 8, column 5, or in Table I A, application no. 8, column 8, or in Table I B, application no. 8, column 8, preferably the coding region thereof, or a homolog or a fragment thereof;
   [50574] (c) a nucleic acid molecule, which, as a result of the degeneracy of the genetic code, can be derived from a polypeptide sequence depicted in column 5 or 8 of Table II, application no. 8, preferably shown in Table II A, application no. 8, column 5, or in Table II A, application no. 8, column 8, or in Table II B, application no. 8, column 8;
   [50575] (d) a nucleic acid molecule having at least 30% identity, preferably at least 40%, 50%, 60%, 70%, 75%, 80%, 85%, 90%, 95%, 96%, 97%, 98%, 99%, 99,5%, with the nucleic acid molecule sequence of a polynucleotide comprising the nucleic acid molecule shown in column 5 or 8 of Table I, application no. 8, preferably shown in Table I A, application no. 8, column 5, or in Table I A, application no. 8, column 8, or in Table I B, application no. 8, column 8, preferably the coding region thereof;
   [50576] (e) a nucleic acid molecule encoding a polypeptide having at least 30% identity, preferably at least 40%, 50% 60%, 70%, 75%, 80%, 85%, 90%, 95%, 96%, 97%, 98%, 99%, 99,5%, identity with the amino acid sequence of the polypeptide encoded by the nucleic acid molecule of (a), (b), (c) or (d);
   [50577] (f) a nucleic acid molecule which hybridizes with a nucleic acid molecule of (a), (b), (c), (d) or (e) under stringent hybridization conditions;
   [50578] (g) a nucleic acid molecule encoding a polypeptide which can be isolated with the aid of monoclonal or polyclonal antibodies made against a polypeptide encoded by one of the nucleic acid molecules of (a), (b), (c), (d), (e) or (f);
   [50579] (h) a nucleic acid molecule encoding a polypeptide comprising the consensus sequence or one or more polypeptide motifs as shown in column 8 of Table IV, application no. 8;
   [50580] (i) a nucleic acid molecule encoding a polypeptide having the activity represented by a respective protein as depicted in column 5 of Table II, application no. 8;
   [50581] (j) a nucleic acid molecule comprising a polynucleotide which is obtained by amplifying a cDNA library or a genomic library using the primers in Table III, application no. 8, column 8;
   [50582] and
   [50583] (k) nucleic acid molecule which is obtainable by screening a suitable nucleic acid library, especially a cDNA library and/or a genomic library, under stringent hybridization conditions with a probe comprising one of the sequences of the nucleic acid molecule of (a), (b), (c), (d), (e), (f), (g), (h), (i) or (j) or with a fragment of at least 15 nt, preferably 20 nt, 30 nt, 50 nt, 100 nt, 200 nt,500 nt, 1000 nt, 1500 nt, 2000 nt or 3000 nt of the nucleic acid molecule characterized in (a), (b), (c), (d), (e), (f), (g), (h), (i) or (j);
   [50584] or a nucleic acid molecule comprising a sequence which is complementary thereto;
      and, optionally
[50585] 3) nucleic acid molecule encoding a transit peptide, preferably encoding a plastidal transit peptide or a mitochondrial transit peptide;
   which are operable linked and
   whereby, preferably, the nucleic acid molecule according to 2 (a), (b), (c), (d), (e), (f), (g), (h), (i), (j) or (k) distinguishes over the sequence depicted in Table I A and/or I B, application no. 8, column 5 or 8, or the coding region thereof, by one or more nucleotides (especially but not exceeding 5%, preferably 4%, 3%, 2%, 1%, 0.5%, 0.2% or 0.1%). In an embodiment, the nucleic acid molecule of the invention according to 2) does not consist of the sequence shown in Table I A and/or I B, application no. 8, column 5 or 8, or the coding region thereof. In another embodiment, the nucleic acid molecule of the present invention, preferably the coding region thereof, is at least 30%, 40%, 50%, 60%, 70%, 80%, 90%, 95% identical but less than 100%, 99.999%, 99.99%, 99.9%, 99%, 98%, 97%, 96% or 95% identical to the sequence shown in Table I A and/or I B, application no. 8, column 5 or 8, or the coding region thereof, respectively. In a further embodiment the nucleic acid molecule does not encode the polypeptide sequence shown in Table II A and/or II B, application no. 8, column 5 or 8 but homologs thereof. Accordingly, in one embodiment, the nucleic acid molecule of the present invention encodes in one embodiment a polypeptide which differs at least in one or more amino acids (especially but not exceeding 5%, preferably 4%, 3%, 2%, 1%, 0.5%, 0.2% or 0.1%) from the polypeptide shown in Table II, application no. 8, column 5 or 8 and does not encode a protein of the sequence shown in Table II A and/or II B, application no. 8, column 5 or 8. Accordingly, in one embodiment, the protein encoded by a sequence of a nucleic acid according to 2 (a), (b), (c), (d), (e), (f), (g), (h), (i), (j) or (k) does not consist of the sequence shown in Table I A and/or I B, application no. 8, column 5 or 8, or the coding region thereof. In a further embodiment, the protein of the present invention is at least 30%, 40%, 50%, 60%, 70%, 80%, 90%, 95% identical to protein sequence depicted in Table II A and/or II B, application no. 8, column 5 or 8 but less than 100%, 99.999%, 99.99%, 99.9%, 99%, 98%, 97%, 96% or 95% identical to the sequence shown in Table II A and/or II B, application no. 8, column 5 or 8.
   (All the references to Tables I to IV are references to the corresponding lines of Tables I to IV.)

[50586] In a preferred embodiment thereof said nucleic acid molecule according to 2 (a), (b), (c), (d), (e), (f), (g), (h), (i), (j) or (k) encodes a polypeptide which has the activity of the respective polypeptide represented by a protein comprising a polypeptide as depicted in the respective line in column 5 of Table II, application no. 8.

[50587] In another preferred embodiment thereof said nucleic acid molecule according to 2 (a), (b), (c), (d), (e), (f), (g), (h), (i), (j) or (k) confers a generation or an increase of the respective fine chemical in a non-human organism or a part thereof as compared to a corresponding wild-type non-human organism or part thereof.

[50588] In another preferred embodiment thereof said nucleic acid molecule according to 2 (a), (b), (c), (d), (e), (f), (g), (h), (i), (j) or (k) encodes a polypeptide which has the activity of the respective polypeptide represented by a protein as depicted in the respective line in column 5 of Table II application no. 8 and confers a generation or an increase of the respective fine chemical in a non-human organism or a part thereof as compared to a corresponding wild-type non-human organism or part thereof.

[50589] In another embodiment thereof the expression cassette comprises 3) a nucleic acid molecule encoding a transit peptide, preferably encoding a plastidal transit peptide, especially in case in column 6 of Table I, application no. 8, in the same line as of the respective nu oleic acid molecule according to 2) “plastidic” is depicted, or encoding a mitochondrial transit peptide, especially in case in column 6 of Table I, application no. 8, in the same line as of the respective nucleic acid molecule according to 2) “mitochondrial” is depicted.

[50590] In another embodiment thereof the expression cassette does not comprise 3) a nucleic acid molecule encoding a transit peptide, especially in case in column 6 of Table I, application no. 8, in the same line as of the respective nucleic acid molecule according to 2) “non-targeted” is depicted.

[50591] In an embodiment the present invention relates to an expresssion cassette comprising a) a promoter, preferably a promoter selected from the group consisting of Big35S, PCUbi, Super and USP, in particular p-PcUBI; and b) the nucleic acid SEQ ID NO. 113651, or a homolog or fragment thereof, or a homolog thereof being depicted in Table I, application no. 8, column 8, in the same line as SEQ ID NO. 113651, preferably the coding region thereof, a homolog or a fragment thereof; which are operable linked.

[50592] In an embodiment thereof the expression cassette comprises in addition c) a nucleic acid molecule encoding a transit peptide, especially a plastidal transit petide in case in Table I, application no. 8, in column 6 in the same line as SEQ ID NO. 113651 is depicted, plastidic is mentioned, or a mitochondrial transit peptide in case in Table I, application no. 8, in column 6 in the same line as SEQ ID NO. 113651 is depicted, mitochondrial is mentioned; which is operable linked, too.

[50593] In another embodiment thereof the expression cassette does not comprise an additional transit peptide in case in Table I, application no. 8, in column 6 in the same line as SEQ ID NO. 113651 is depicted, non-targeted is mentioned.

[50594] In an embodiment the present invention relates to an expresssion cassette comprising a) a promoter, preferably a promoter selected from the group consisting of Big35S, PCUbi, Super and USP, in particular p-PcUBI; and b) the nucleic acid SEQ ID NO. 17637, or a homolog or fragment thereof, or a homolog thereof being depicted in Table I, application no. 8, column 8, in the same line as SEQ ID NO. 17637, preferably the coding region thereof, a homolog or a fragment thereof; which are operable linked.

[50595] In an embodiment thereof the expression cassette comprises in addition c) a nucleic acid molecule encoding a transit peptide, especially a plastidal transit petide in case in Table I, application no. 8, in column 6 in the same line as SEQ ID NO. 17637 is depicted, plastidic is mentioned, or a mitochondrial transit peptide in case in Table I, application no. 8, in column 6 in the same line as SEQ ID NO. 17637 is depicted, mitochondrial is mentioned; which is operable linked, too.

[50596] In another embodiment thereof the expression cassette does not comprise an additional transit peptide in case in Table I, application no. 8, in column 6 in the same line as SEQ ID NO. 17637 is depicted, non-targeted is mentioned.

[50597] In an embodiment the present invention relates to an expresssion cassette comprising a) a promoter, preferably a promoter selected from the group consisting of Big35S, PCUbi, Super and USP, in particular p-PcUBI; and b) the nucleic acid SEQ ID NO. 1061, or a homolog or fragment thereof, or a homolog thereof being depicted in Table I, application no. 8, column 8, in the same line as SEQ ID NO. 1061, preferably the coding region thereof, a homolog or a fragment thereof; which are operable linked.

[50598] In an embodiment thereof the expression cassette comprises in addition c) a nucleic acid molecule encoding a transit peptide, especially a plastidal transit petide in case in Table I, application no. 8, in column 6 in the same line as SEQ ID NO. 1061 is depicted, plastidic is mentioned, or a mitochondrial transit peptide in case in Table I, application no. 8, in column 6 in the same line as SEQ ID NO. 1061 is depicted, mitochondrial is mentioned; which is operable linked, too.

[50599] In another embodiment thereof the expression cassette does not comprise an additional transit peptide in case in Table I, application no. 8, in column 6 in the same line as SEQ ID NO. 1061 is depicted, non-targeted is mentioned.

[50600] In an embodiment the present invention relates to an expresssion cassette comprising a) a promoter, preferably a promoter selected from the group consisting of Big35S, PCUbi, Super and USP, in particular p-PcUBI; and b) the nucleic acid SEQ ID NO. 113714, or a homolog or fragment thereof, or a homolog thereof being depicted in Table I, application no. 8, column 8, in the same line as SEQ ID NO. 113714, preferably the coding region thereof, a homolog or a fragment thereof; which are operable linked.

[50601] In an embodiment thereof the expression cassette comprises in addition c) a nucleic acid molecule encoding a transit peptide, especially a plastidal transit petide in case in Table I, application no. 8, in column 6 in the same line as SEQ ID NO. 113714 is depicted, plastidic is mentioned, or a mitochondrial transit peptide in case in Table I, application no. 8, in column 6 in the same line as SEQ ID NO. 113714 is depicted, mitochondrial is mentioned; which is operable linked, too.

[50602] In another embodiment thereof the expression cassette does not comprise an additional transit peptide in case in Table I, application no. 8, in column 6 in the same line as SEQ ID NO. 113714 is depicted, non-targeted is mentioned.

[50603] In an embodiment the present invention relates to an expresssion cassette comprising a) a promoter, preferably a promoter selected from the group consisting of Big35S, PCUbi, Super and USP, in particular p-PcUBI; and b) the nucleic acid SEQ ID NO. 1623, or a homolog or fragment thereof, or a homolog thereof being depicted in Table I, application no. 8, column 8, in the same line as SEQ ID NO. 1623, preferably the coding region thereof, a homolog or a fragment thereof; which are operable linked.

[50604] In an embodiment thereof the expression cassette comprises in addition c) a nucleic acid molecule encoding a transit peptide, especially a plastidal transit petide in case in Table I, application no. 8, in column 6 in the same line as SEQ ID NO. 1623 is depicted, plastidic is mentioned, or a mitochondrial transit peptide in case in Table I, application no. 8, in column 6 in the same line as SEQ ID NO. 1623 is depicted, mitochondrial is mentioned; which is operable linked, too.

[50605] In another embodiment thereof the expression cassette does not comprise an additional transit peptide in case in Table I, application no. 8, in column 6 in the same line as SEQ ID NO. 1623 is depicted, non-targeted is mentioned.

[50606] In an embodiment the present invention relates to an expresssion cassette comprising a) a promoter, preferably a promoter selected from the group consisting of Big35S, PCUbi, Super and USP, in particular p-PcUBI; and b) the nucleic acid SEQ ID NO. 68657, or a homolog or fragment thereof, or a homolog thereof being depicted in Table I, application no. 8, column 8, in the same line as SEQ ID NO. 68657, preferably the coding region thereof, a homolog or a fragment thereof; which are operable linked.

[50607] In an embodiment thereof the expression cassette comprises in addition c) a nucleic acid molecule encoding a transit peptide, especially a plastidal transit petide in case in Table I, application no. 8, in column 6 in the same line as SEQ ID NO. 68657 is depicted, plastidic is mentioned, or a mitochondrial transit peptide in case in Table I, application no. 8, in column 6 in the same line as SEQ ID NO. 68657 is depicted, mitochondrial is mentioned; which is operable linked, too.

[50608] In another embodiment thereof the expression cassette does not comprise an additional transit peptide in case in Table I, application no. 8, in column 6 in the same line as SEQ ID NO. 68657 is depicted, non-targeted is mentioned.

[50609] In an embodiment the present invention relates to an expresssion cassette comprising a) a promoter, preferably a promoter selected from the group consisting of Big35S, PCUbi, Super and USP, in particular p-PcUBI; and b) the nucleic acid SEQ ID NO. 22921, or a homolog or fragment thereof, or a homolog thereof being depicted in Table I, application no. 8, column 8, in the same line as SEQ ID NO. 22921, preferably the coding region thereof, a homolog or a fragment thereof; which are operable linked.

[50610] In an embodiment thereof the expression cassette comprises in addition c) a nucleic acid molecule encoding a transit peptide, especially a plastidal transit petide in case in Table I, application no. 8, in column 6 in the same line as SEQ ID NO. 22921 is depicted, plastidic is mentioned, or a mitochondrial transit peptide in case in Table I, application no. 8, in column 6 in the same line as SEQ ID NO. 22921 is depicted, mitochondrial is mentioned; which is operable linked, too.

[50611] In another embodiment thereof the expression cassette does not comprise an additional transit peptide in case in Table I, application no. 8, in column 6 in the same line as SEQ ID NO. 22921 is depicted, non-targeted is mentioned.

[50612] In an embodiment the present invention relates to an expresssion cassette comprising a) a promoter, preferably a promoter selected from the group consisting of Big35S, PCUbi, Super and USP, in particular p-PcUBI; and b) the nucleic acid SEQ ID NO. 2935, or a homolog or fragment thereof, or a homolog thereof being depicted in Table I, application no. 8, column 8, in the same line as SEQ ID NO. 2935, preferably the coding region thereof, a homolog or a fragment thereof; which are operable linked.

[50613] In an embodiment thereof the expression cassette comprises in addition c) a nucleic acid molecule encoding a transit peptide, especially a plastidal transit petide in case in Table I, application no. 8, in column 6 in the same line as SEQ ID NO. 2935 is depicted, plastidic is mentioned, or a mitochondrial transit peptide in case in Table I, application no. 8, in column 6 in the same line as SEQ ID NO. 2935 is depicted, mitochondrial is mentioned; which is operable linked, too.

[50614] In another embodiment thereof the expression cassette does not comprise an additional transit peptide in case in Table I, application no. 8, in column 6 in the same line as SEQ ID NO. 2935 is depicted, non-targeted is mentioned.

[50615] In an embodiment the present invention relates to an expresssion cassette comprising a) a promoter, preferably a promoter selected from the group consisting of Big35S, PCUbi, Super and USP, in particular p-PcUBI; and b) the nucleic acid SEQ ID NO. 109717, or a homolog or fragment thereof, or a homolog thereof being depicted in Table I, application no. 8, column 8, in the same line as SEQ ID NO. 109717, preferably the coding region thereof, a homolog or a fragment thereof; which are operable linked.

[50616] In an embodiment thereof the expression cassette comprises in addition c) a nucleic acid molecule encoding a transit peptide, especially a plastidal transit petide in case in Table I, application no. 8, in column 6 in the same line as SEQ ID NO. 109717 is depicted, plastidic is mentioned, or a mitochondrial transit peptide in case in Table I, application no. 8, in column 6 in the same line as SEQ ID NO. 109717 is depicted, mitochondrial is mentioned; which is operable linked, too.

[50617] In another embodiment thereof the expression cassette does not comprise an additional transit peptide in case in Table I, application no. 8, in column 6 in the same line as SEQ ID NO. 109717 is depicted, non-targeted is mentioned.

[50618] In an embodiment the present invention relates to an expresssion cassette comprising a) a promoter, preferably a promoter selected from the group consisting of Big35S, PCUbi, Super and USP, in particular p-PcUBI; and b) the nucleic acid SEQ ID NO. 23482, or a homolog or fragment thereof, or a homolog thereof being depicted in Table I, application no. 8, column 8, in the same line as SEQ ID NO. 23482, preferably the coding region thereof, a homolog or a fragment thereof; which are operable linked.

[50619] In an embodiment thereof the expression cassette comprises in addition c) a nucleic acid molecule encoding a transit peptide, especially a plastidal transit petide in case in Table I, application no. 8, in column 6 in the same line as SEQ ID NO. 23482 is depicted, plastidic is mentioned, or a mitochondrial transit peptide in case in Table I, application no. 8, in column 6 in the same line as SEQ ID NO. 23482 is depicted, mitochondrial is mentioned; which is operable linked, too.

[50620] In another embodiment thereof the expression cassette does not comprise an additional transit peptide in case in Table I, application no. 8, in column 6 in the same line as SEQ ID NO. 23482 is depicted, non-targeted is mentioned.

[50621] In an embodiment the present invention relates to an expresssion cassette comprising a) a promoter, preferably a promoter selected from the group consisting of Big35S, PCUbi, Super and USP, in particular p-PcUBI; and b) the nucleic acid SEQ ID NO. 3279, or a homolog or fragment thereof, or a homolog thereof being depicted in Table I, application no. 8, column 8, in the same line as SEQ ID NO. 3279, preferably the coding region thereof, a homolog or a fragment thereof; which are operable linked.

[50622] In an embodiment thereof the expression cassette comprises in addition c) a nucleic acid molecule encoding a transit peptide, especially a plastidal transit petide in case in Table I, application no. 8, in column 6 in the same line as SEQ ID NO. 3279 is depicted, plastidic is mentioned, or a mitochondrial transit peptide in case in Table I, application no. 8, in column 6 in the same line as SEQ ID NO. 3279 is depicted, mitochondrial is mentioned; which is operable linked, too.

[50623] In another embodiment thereof the expression cassette does not comprise an additional transit peptide in case in Table I, application no. 8, in column 6 in the same line as SEQ ID NO. 3279 is depicted, non-targeted is mentioned.

[50624] In an embodiment the present invention relates to an expresssion cassette comprising a) a promoter, preferably a promoter selected from the group consisting of Big35S, PCUbi, Super and USP, in particular p-PcUBI; and b) the nucleic acid SEQ ID NO. 68849, or a homolog or fragment thereof, or a homolog thereof being depicted in Table I, application no. 8, column 8, in the same line as SEQ ID NO. 68849, preferably the coding region thereof, a homolog or a fragment thereof; which are operable linked.

[50625] In an embodiment thereof the expression cassette comprises in addition c) a nucleic acid molecule encoding a transit peptide, especially a plastidal transit petide in case in Table I, application no. 8, in column 6 in the same line as SEQ ID NO. 68849 is depicted, plastidic is mentioned, or a mitochondrial transit peptide in case in Table I, application no. 8, in column 6 in the same line as SEQ ID NO. 68849 is depicted, mitochondrial is mentioned; which is operable linked, too.

[50626] In another embodiment thereof the expression cassette does not comprise an additional transit peptide in case in Table I, application no. 8, in column 6 in the same line as SEQ ID NO. 68849 is depicted, non-targeted is mentioned.

[50627] In an embodiment the present invention relates to an expresssion cassette comprising a) a promoter, preferably a promoter selected from the group consisting of Big35S, PCUbi, Super and USP, in particular p-PcUBI; and b) the nucleic acid SEQ ID NO. 4102, or a homolog or fragment thereof, or a homolog thereof being depicted in Table I, application no. 8, column 8, in the same line as SEQ ID NO. 4102, preferably the coding region thereof, a homolog or a fragment thereof; which are operable linked.

[50628] In an embodiment thereof the expression cassette comprises in addition c) a nucleic acid molecule encoding a transit peptide, especially a plastidal transit petide in case in Table I, application no. 8, in column 6 in the same line as SEQ ID NO. 4102 is depicted, plastidic is mentioned, or a mitochondrial transit peptide in case in Table I, application no. 8, in column 6 in the same line as SEQ ID NO. 4102 is depicted, mitochondrial is mentioned; which is operable linked, too.

[50629] In another embodiment thereof the expression cassette does not comprise an additional transit peptide in case in Table I, application no. 8, in column 6 in the same line as SEQ ID NO. 4102 is depicted, non-targeted is mentioned.

[50630] In an embodiment the present invention relates to an expresssion cassette comprising a) a promoter, preferably a promoter selected from the group consisting of Big35S, PCUbi, Super and USP, in particular p-PcUBI; and b) the nucleic acid SEQ ID NO. 24438, or a homolog or fragment thereof, or a homolog thereof being depicted in Table I, application no. 8, column 8, in the same line as SEQ ID NO. 24438, preferably the coding region thereof, a homolog or a fragment thereof; which are operable linked.

[50631] In an embodiment thereof the expression cassette comprises in addition c) a nucleic acid molecule encoding a transit peptide, especially a plastidal transit petide in case in Table I, application no. 8, in column 6 in the same line as SEQ ID NO. 24438 is depicted, plastidic is mentioned, or a mitochondrial transit peptide in case in Table I, application no. 8, in column 6 in the same line as SEQ ID NO. 24438 is depicted, mitochondrial is mentioned; which is operable linked, too.

[50632] In another embodiment thereof the expression cassette does not comprise an additional transit peptide in case in Table I, application no. 8, in column 6 in the same line as SEQ ID NO. 24438 is depicted, non-targeted is mentioned.

[50633] In an embodiment the present invention relates to an expresssion cassette comprising a) a promoter, preferably a promoter selected from the group consisting of Big35S, PCUbi, Super and USP, in particular p-PcUBI; and b) the nucleic acid SEQ ID NO. 25498, or a homolog or fragment thereof, or a homolog thereof being depicted in Table I, application no. 8, column 8, in the same line as SEQ ID NO. 25498, preferably the coding region thereof, a homolog or a fragment thereof; which are operable linked.

[50634] In an embodiment thereof the expression cassette comprises in addition c) a nucleic acid molecule encoding a transit peptide, especially a plastidal transit petide in case in Table I, application no. 8, in column 6 in the same line as SEQ ID NO. 25498 is depicted, plastidic is mentioned, or a mitochondrial transit peptide in case in Table I, application no. 8, in column 6 in the same line as SEQ ID NO. 25498 is depicted, mitochondrial is mentioned; which is operable linked, too.

[50635] In another embodiment thereof the expression cassette does not comprise an additional transit peptide in case in Table I, application no. 8, in column 6 in the same line as SEQ ID NO. 25498 is depicted, non-targeted is mentioned.

[50636] In an embodiment the present invention relates to an expresssion cassette comprising a) a promoter, preferably a promoter selected from the group consisting of Big35S, PCUbi, Super and USP, in particular p-PcUBI; and b) the nucleic acid SEQ ID NO. 114083, or a homolog or fragment thereof, or a homolog thereof being depicted in Table I, application no. 8, column 8, in the same line as SEQ ID NO. 114083, preferably the coding region thereof, a homolog or a fragment thereof; which are operable linked.

[50637] In an embodiment thereof the expression cassette comprises in addition c) a nucleic acid molecule encoding a transit peptide, especially a plastidal transit petide in case in Table I, application no. 8, in column 6 in the same line as SEQ ID NO. 114083 is depicted, plastidic is mentioned, or a mitochondrial transit peptide in case in Table I, application no. 8, in column 6 in the same line as SEQ ID NO. 114083 is depicted, mitochondrial is mentioned; which is operable linked, too.

[50638] In another embodiment thereof the expression cassette does not comprise an additional transit peptide in case in Table I, application no. 8, in column 6 in the same line as SEQ ID NO. 114083 is depicted, non-targeted is mentioned.

[50639] In an embodiment the present invention relates to an expresssion cassette comprising a) a promoter, preferably a promoter selected from the group consisting of Big35S, PCUbi, Super and USP, in particular p-PcUBI; and b) the nucleic acid SEQ ID NO. 114198, or a homolog or fragment thereof, or a homolog thereof being depicted in Table I, application no. 8, column 8, in the same line as SEQ ID NO. 114198, preferably the coding region thereof, a homolog or a fragment thereof; which are operable linked.

[50640] In an embodiment thereof the expression cassette comprises in addition c) a nucleic acid molecule encoding a transit peptide, especially a plastidal transit petide in case in Table I, application no. 8, in column 6 in the same line as SEQ ID NO. 114198 is depicted, plastidic is mentioned, or a mitochondrial transit peptide in case in Table I, application no. 8, in column 6 in the same line as SEQ ID NO. 114198 is depicted, mitochondrial is mentioned; which is operable linked, too.

[50641] In another embodiment thereof the expression cassette does not comprise an additional transit peptide in case in Table I, application no. 8, in column 6 in the same line as SEQ ID NO. 114198 is depicted, non-targeted is mentioned.

[50642] In an embodiment the present invention relates to an expresssion cassette comprising a) a promoter, preferably a promoter selected from the group consisting of Big35S, PCUbi, Super and USP, in particular p-PcUBI; and b) the nucleic acid SEQ ID NO. 6040, or a homolog or fragment thereof, or a homolog thereof being depicted in Table I, application no. 8, column 8, in the same line as SEQ ID NO. 6040, preferably the coding region thereof, a homolog or a fragment thereof; which are operable linked.

[50643] In an embodiment thereof the expression cassette comprises in addition c) a nucleic acid molecule encoding a transit peptide, especially a plastidal transit petide in case in Table I, application no. 8, in column 6 in the same line as SEQ ID NO. 6040 is depicted, plastidic is mentioned, or a mitochondrial transit peptide in case in Table I, application no. 8, in column 6 in the same line as SEQ ID NO. 6040 is depicted, mitochondrial is mentioned; which is operable linked, too.

[50644] In another embodiment thereof the expression cassette does not comprise an additional transit peptide in case in Table I, application no. 8, in column 6 in the same line as SEQ ID NO. 6040 is depicted, non-targeted is mentioned.

[50645] In an embodiment the present invention relates to an expresssion cassette comprising a) a promoter, preferably a promoter selected from the group consisting of Big35S, PCUbi, Super and USP, in particular p-PcUBI; and b) the nucleic acid SEQ ID NO. 29500, or a homolog or fragment thereof, or a homolog thereof being depicted in Table I, application no. 8, column 8, in the same line as SEQ ID NO. 29500, preferably the coding region thereof, a homolog or a fragment thereof; which are operable linked.

[50646] In an embodiment thereof the expression cassette comprises in addition c) a nucleic acid molecule encoding a transit peptide, especially a plastidal transit petide in case in Table I, application no. 8, in column 6 in the same line as SEQ ID NO. 29500 is depicted, plastidic is mentioned, or a mitochondrial transit peptide in case in Table I, application no. 8, in column 6 in the same line as SEQ ID NO. 29500 is depicted, mitochondrial is mentioned; which is operable linked, too.

[50647] In another embodiment thereof the expression cassette does not comprise an additional transit peptide in case in Table I, application no. 8, in column 6 in the same line as SEQ ID NO. 29500 is depicted, non-targeted is mentioned.

[50648] In an embodiment the present invention relates to an expresssion cassette comprising a) a promoter, preferably a promoter selected from the group consisting of Big35S, PCUbi, Super and USP, in particular p-PcUBI; and b) the nucleic acid SEQ ID NO. 111155, or a homolog or fragment thereof, or a homolog thereof being depicted in Table I, application no. 8, column 8, in the same line as SEQ ID NO. 111155, preferably the coding region thereof, a homolog or a fragment thereof; which are operable linked.

[50649] In an embodiment thereof the expression cassette comprises in addition c) a nucleic acid molecule encoding a transit peptide, especially a plastidal transit petide in case in Table I, application no. 8, in column 6 in the same line as SEQ ID NO. 111155 is depicted, plastidic is mentioned, or a mitochondrial transit peptide in case in Table I, application no. 8, in column 6 in the same line as SEQ ID NO. 111155 is depicted, mitochondrial is mentioned; which is operable linked, too.

[50650] In another embodiment thereof the expression cassette does not comprise an additional transit peptide in case in Table I, application no. 8, in column 6 in the same line as SEQ ID NO. 111155 is depicted, non-targeted is mentioned.

[50651] In an embodiment the present invention relates to an expresssion cassette comprising a) a promoter, preferably a promoter selected from the group consisting of Big35S, PCUbi, Super and USP, in particular p-PcUBI; and b) the nucleic acid SEQ ID NO. 114231, or a homolog or fragment thereof, or a homolog thereof being depicted in Table I, application no. 8, column 8, in the same line as SEQ ID NO. 114231, preferably the coding region thereof, a homolog or a fragment thereof; which are operable linked.

[50652] In an embodiment thereof the expression cassette comprises in addition c) a nucleic acid molecule encoding a transit peptide, especially a plastidal transit petide in case in Table I, application no. 8, in column 6 in the same line as SEQ ID NO. 114231 is depicted, plastidic is mentioned, or a mitochondrial transit peptide in case in Table I, application no. 8, in column 6 in the same line as SEQ ID NO. 114231 is depicted, mitochondrial is mentioned; which is operable linked, too.

[50653] In another embodiment thereof the expression cassette does not comprise an additional transit peptide in case in Table I, application no. 8, in column 6 in the same line as SEQ ID NO. 114231 is depicted, non-targeted is mentioned.

[50654] In an embodiment the present invention relates to an expresssion cassette comprising a) a promoter, preferably a promoter selected from the group consisting of Big35S, PCUbi, Super and USP, in particular p-PcUBI; and b) the nucleic acid SEQ ID NO. 6510, or a homolog or fragment thereof, or a homolog thereof being depicted in Table I, application no. 8, column 8, in the same line as SEQ ID NO. 6510, preferably the coding region thereof, a homolog or a fragment thereof; which are operable linked.

[50655] In an embodiment thereof the expression cassette comprises in addition c) a nucleic acid molecule encoding a transit peptide, especially a plastidal transit petide in case in Table I, application no. 8, in column 6 in the same line as SEQ ID NO. 6510 is depicted, plastidic is mentioned, or a mitochondrial transit peptide in case in Table I, application no. 8, in column 6 in the same line as SEQ ID NO. 6510 is depicted, mitochondrial is mentioned; which is operable linked, too.

[50656] In another embodiment thereof the expression cassette does not comprise an additional transit peptide in case in Table I, application no. 8, in column 6 in the same line as SEQ ID NO. 6510 is depicted, non-targeted is mentioned.

[50657] In an embodiment the present invention relates to an expresssion cassette comprising a) a promoter, preferably a promoter selected from the group consisting of Big35S, PCUbi, Super and USP, in particular p-Super; and b) the nucleic acid SEQ ID NO. 7686, or a homolog or fragment thereof, or a homolog thereof being depicted in Table I, application no. 8, column 8, in the same line as SEQ ID NO. 7686, preferably the coding region thereof, a homolog or a fragment thereof; which are operable linked.

[50658] In an embodiment thereof the expression cassette comprises in addition c) a nucleic acid molecule encoding a transit peptide, especially a plastidal transit petide in case in Table I, application no. 8, in column 6 in the same line as SEQ ID NO. 7686 is depicted, plastidic is mentioned, or a mitochondrial transit peptide in case in Table I, application no. 8, in column 6 in the same line as SEQ ID NO. 7686 is depicted, mitochondrial is mentioned; which is operable linked, too.

[50659] In another embodiment thereof the expression cassette does not comprise an additional transit peptide in case in Table I, application no. 8, in column 6 in the same line as SEQ ID NO. 7686 is depicted, non-targeted is mentioned.

[50660] In an embodiment the present invention relates to an expresssion cassette comprising a) a promoter, preferably a promoter selected from the group consisting of Big35S, PCUbi, Super and USP, in particular p-Super; and b) the nucleic acid SEQ ID NO. 75807, or a homolog or fragment thereof, or a homolog thereof being depicted in Table I, application no. 8, column 8, in the same line as SEQ ID NO. 75807, preferably the coding region thereof, a homolog or a fragment thereof; which are operable linked.

[50661] In an embodiment thereof the expression cassette comprises in addition c) a nucleic acid molecule encoding a transit peptide, especially a plastidal transit petide in case in Table I, application no. 8, in column 6 in the same line as SEQ ID NO. 75807 is depicted, plastidic is mentioned, or a mitochondrial transit peptide in case in Table I, application no. 8, in column 6 in the same line as SEQ ID NO. 75807 is depicted, mitochondrial is mentioned; which is operable linked, too.

[50662] In another embodiment thereof the expression cassette does not comprise an additional transit peptide in case in Table I, application no. 8, in column 6 in the same line as SEQ ID NO. 75807 is depicted, non-targeted is mentioned.

[50663] In an embodiment the present invention relates to an expresssion cassette comprising a) a promoter, preferably a promoter selected from the group consisting of Big35S, PCUbi, Super and USP, in particular p-Super; and b) the nucleic acid SEQ ID NO. 114552, or a homolog or fragment thereof, or a homolog thereof being depicted in Table I, application no. 8, column 8, in the same line as SEQ ID NO. 114552, preferably the coding region thereof, a homolog or a fragment thereof; which are operable linked.

[50664] In an embodiment thereof the expression cassette comprises in addition c) a nucleic acid molecule encoding a transit peptide, especially a plastidal transit petide in case in Table I, application no. 8, in column 6 in the same line as SEQ ID NO. 114552 is depicted, plastidic is mentioned, or a mitochondrial transit peptide in case in Table I, application no. 8, in column 6 in the same line as SEQ ID NO. 114552 is depicted, mitochondrial is mentioned; which is operable linked, too.

[50665] In another embodiment thereof the expression cassette does not comprise an additional transit peptide in case in Table I, application no. 8, in column 6 in the same line as SEQ ID NO. 114552 is depicted, non-targeted is mentioned.

[50666] In an embodiment the present invention relates to an expresssion cassette comprising a) a promoter, preferably a promoter selected from the group consisting of Big35S, PCUbi, Super and USP, in particular p-Super; and b) the nucleic acid SEQ ID NO. 114979, or a homolog or fragment thereof, or a homolog thereof being depicted in Table I, application no. 8, column 8, in the same line as SEQ ID NO. 114979, preferably the coding region thereof, a homolog or a fragment thereof; which are operable linked.

[50667] In an embodiment thereof the expression cassette comprises in addition c) a nucleic acid molecule encoding a transit peptide, especially a plastidal transit petide in case in Table I, application no. 8, in column 6 in the same line as SEQ ID NO. 114979 is depicted, plastidic is mentioned, or a mitochondrial transit peptide in case in Table I, application no. 8, in column 6 in the same line as SEQ ID NO. 114979 is depicted, mitochondrial is mentioned; which is operable linked, too.

[50668] In another embodiment thereof the expression cassette does not comprise an additional transit peptide in case in Table I, application no. 8, in column 6 in the same line as SEQ ID NO. 114979 is depicted, non-targeted is mentioned.

[50669] In an embodiment the present invention relates to an expresssion cassette comprising a) a promoter, preferably a promoter selected from the group consisting of Big35S, PCUbi, Super and USP, in particular p-Super; and b) the nucleic acid SEQ ID NO. 38226, or a homolog or fragment thereof, or a homolog thereof being depicted in Table I, application no. 8, column 8, in the same line as SEQ ID NO. 38226, preferably the coding region thereof, a homolog or a fragment thereof; which are operable linked.

[50670] In an embodiment thereof the expression cassette comprises in addition c) a nucleic acid molecule encoding a transit peptide, especially a plastidal transit petide in case in Table I, application no. 8, in column 6 in the same line as SEQ ID NO. 38226 is depicted, plastidic is mentioned, or a mitochondrial transit peptide in case in Table I, application no. 8, in column 6 in the same line as SEQ ID NO. 38226 is depicted, mitochondrial is mentioned; which is operable linked, too.

[50671] In another embodiment thereof the expression cassette does not comprise an additional transit peptide in case in Table I, application no. 8, in column 6 in the same line as SEQ ID NO. 38226 is depicted, non-targeted is mentioned.

[50672] In an embodiment the present invention relates to an expresssion cassette comprising a) a promoter, preferably a promoter selected from the group consisting of Big35S, PCUbi, Super and USP, in particular p-Super; and b) the nucleic acid SEQ ID NO. 38266, or a homolog or fragment thereof, or a homolog thereof being depicted in Table I, application no. 8, column 8, in the same line as SEQ ID NO. 38266, preferably the coding region thereof, a homolog or a fragment thereof; which are operable linked.

[50673] In an embodiment thereof the expression cassette comprises in addition c) a nucleic acid molecule encoding a transit peptide, especially a plastidal transit petide in case in Table I, application no. 8, in column 6 in the same line as SEQ ID NO. 38266 is depicted, plastidic is mentioned, or a mitochondrial transit peptide in case in Table I, application no. 8, in column 6 in the same line as SEQ ID NO. 38266 is depicted, mitochondrial is mentioned; which is operable linked, too.

[50674] In another embodiment thereof the expression cassette does not comprise an additional transit peptide in case in Table I, application no. 8, in column 6 in the same line as SEQ ID NO. 38266 is depicted, non-targeted is mentioned.

[50675] In an embodiment the present invention relates to an expresssion cassette comprising a) a promoter, preferably a promoter selected from the group consisting of Big35S, PCUbi, Super and USP, in particular p-Super; and b) the nucleic acid SEQ ID NO. 115056, or a homolog or fragment thereof, or a homolog thereof being depicted in Table I, application no. 8, column 8, in the same line as SEQ ID NO. 115056, preferably the coding region thereof, a homolog or a fragment thereof; which are operable linked.

[50676] In an embodiment thereof the expression cassette comprises in addition c) a nucleic acid molecule encoding a transit peptide, especially a plastidal transit petide in case in Table I, application no. 8, in column 6 in the same line as SEQ ID NO. 115056 is depicted, plastidic is mentioned, or a mitochondrial transit peptide in case in Table I, application no. 8, in column 6 in the same line as SEQ ID NO. 115056 is depicted, mitochondrial is mentioned; which is operable linked, too.

[50677] In another embodiment thereof the expression cassette does not comprise an additional transit peptide in case in Table I, application no. 8, in column 6 in the same line as SEQ ID NO. 115056 is depicted, non-targeted is mentioned.

[50678] In an embodiment the present invention relates to an expresssion cassette comprising a) a promoter, preferably a promoter selected from the group consisting of Big35S, PCUbi, Super and USP, in particular p-Super; and b) the nucleic acid SEQ ID NO. 78154, or a homolog or fragment thereof, or a homolog thereof being depicted in Table I, application no. 8, column 8, in the same line as SEQ ID NO. 78154, preferably the coding region thereof, a homolog or a fragment thereof; which are operable linked.

[50679] In an embodiment thereof the expression cassette comprises in addition c) a nucleic acid molecule encoding a transit peptide, especially a plastidal transit petide in case in Table I, application no. 8, in column 6 in the same line as SEQ ID NO. 78154 is depicted, plastidic is mentioned, or a mitochondrial transit peptide in case in Table I, application no. 8, in column 6 in the same line as SEQ ID NO. 78154 is depicted, mitochondrial is mentioned; which is operable linked, too.

[50680] In another embodiment thereof the expression cassette does not comprise an additional transit peptide in case in Table I, application no. 8, in column 6 in the same line as SEQ ID NO. 78154 is depicted, non-targeted is mentioned.

[50681] In an embodiment the present invention relates to an expresssion cassette comprising a) a promoter, preferably a promoter selected from the group consisting of Big35S, PCUbi, Super and USP, in particular p-Super; and b) the nucleic acid SEQ ID NO. 38300, or a homolog or fragment thereof, or a homolog thereof being depicted in Table I, application no. 8, column 8, in the same line as SEQ ID NO. 38300, preferably the coding region thereof, a homolog or a fragment thereof; which are operable linked.

[50682] In an embodiment thereof the expression cassette comprises in addition c) a nucleic acid molecule encoding a transit peptide, especially a plastidal transit petide in case in Table I, application no. 8, in column 6 in the same line as SEQ ID NO. 38300 is depicted, plastidic is mentioned, or a mitochondrial transit peptide in case in Table I, application no. 8, in column 6 in the same line as SEQ ID NO. 38300 is depicted, mitochondrial is mentioned; which is operable linked, too.

[50683] In another embodiment thereof the expression cassette does not comprise an additional transit peptide in case in Table I, application no. 8, in column 6 in the same line as SEQ ID NO. 38300 is depicted, non-targeted is mentioned.

[50684] In an embodiment the present invention relates to an expresssion cassette comprising a) a promoter, preferably a promoter selected from the group consisting of Big35S, PCUbi, Super and USP, in particular p-Super; and b) the nucleic acid SEQ ID NO. 115064, or a homolog or fragment thereof, or a homolog thereof being depicted in Table I, application no. 8, column 8, in the same line as SEQ ID NO. 115064, preferably the coding region thereof, a homolog or a fragment thereof; which are operable linked.

[50685] In an embodiment thereof the expression cassette comprises in addition c) a nucleic acid molecule encoding a transit peptide, especially a plastidal transit petide in case in Table I, application no. 8, in column 6 in the same line as SEQ ID NO. 115064 is depicted, plastidic is mentioned, or a mitochondrial transit peptide in case in Table I, application no. 8, in column 6 in the same line as SEQ ID NO. 115064 is depicted, mitochondrial is mentioned; which is operable linked, too.

[50686] In another embodiment thereof the expression cassette does not comprise an additional transit peptide in case in Table I, application no. 8, in column 6 in the same line as SEQ ID NO. 115064 is depicted, non-targeted is mentioned.

[50687] In an embodiment the present invention relates to an expresssion cassette comprising a) a promoter, preferably a promoter selected from the group consisting of Big35S, PCUbi, Super and USP, in particular p-Super; and b) the nucleic acid SEQ ID NO. 38345, or a homolog or fragment thereof, or a homolog thereof being depicted in Table I, application no. 8, column 8, in the same line as SEQ ID NO. 38345, preferably the coding region thereof, a homolog or a fragment thereof; which are operable linked.

[50688] In an embodiment thereof the expression cassette comprises in addition c) a nucleic acid molecule encoding a transit peptide, especially a plastidal transit petide in case in Table I, application no. 8, in column 6 in the same line as SEQ ID NO. 38345 is depicted, plastidic is mentioned, or a mitochondrial transit peptide in case in Table I, application no. 8, in column 6 in the same line as SEQ ID NO. 38345 is depicted, mitochondrial is mentioned; which is operable linked, too.

[50689] In another embodiment thereof the expression cassette does not comprise an additional transit peptide in case in Table I, application no. 8, in column 6 in the same line as SEQ ID NO. 38345 is depicted, non-targeted is mentioned.

[50690] In an embodiment the present invention relates to an expresssion cassette comprising a) a promoter, preferably a promoter selected from the group consisting of Big35S, PCUbi, Super and USP, in particular p-Super; and b) the nucleic acid SEQ ID NO. 78753, or a homolog or fragment thereof, or a homolog thereof being depicted in Table I, application no. 8, column 8, in the same line as SEQ ID NO. 78753, preferably the coding region thereof, a homolog or a fragment thereof; which are operable linked.

[50691] In an embodiment thereof the expression cassette comprises in addition c) a nucleic acid molecule encoding a transit peptide, especially a plastidal transit petide in case in Table I, application no. 8, in column 6 in the same line as SEQ ID NO. 78753 is depicted, plastidic is mentioned, or a mitochondrial transit peptide in case in Table I, application no. 8, in column 6 in the same line as SEQ ID NO. 78753 is depicted, mitochondrial is mentioned; which is operable linked, too.

[50692] In another embodiment thereof the expression cassette does not comprise an additional transit peptide in case in Table I, application no. 8, in column 6 in the same line as SEQ ID NO. 78753 is depicted, non-targeted is mentioned.

[50693] In an embodiment the present invention relates to an expresssion cassette comprising a) a promoter, preferably a promoter selected from the group consisting of Big35S, PCUbi, Super and USP, in particular p-Super; and b) the nucleic acid SEQ ID NO. 78953, or a homolog or fragment thereof, or a homolog thereof being depicted in Table I, application no. 8, column 8, in the same line as SEQ ID NO. 78953, preferably the coding region thereof, a homolog or a fragment thereof; which are operable linked.

[50694] In an embodiment thereof the expression cassette comprises in addition c) a nucleic acid molecule encoding a transit peptide, especially a plastidal transit petide in case in Table I, application no. 8, in column 6 in the same line as SEQ ID NO. 78953 is depicted, plastidic is mentioned, or a mitochondrial transit peptide in case in Table I, application no. 8, in column 6 in the same line as SEQ ID NO. 78953 is depicted, mitochondrial is mentioned; which is operable linked, too.

[50695] In another embodiment thereof the expression cassette does not comprise an additional transit peptide in case in Table I, application no. 8, in column 6 in the same line as SEQ ID NO. 78953 is depicted, non-targeted is mentioned.

[50696] In an embodiment the present invention relates to an expresssion cassette comprising a) a promoter, preferably a promoter selected from the group consisting of Big35S, PCUbi, Super and USP, in particular p-Super; and b) the nucleic acid SEQ ID NO. 8920, or a homolog or fragment thereof, or a homolog thereof being depicted in Table I, application no. 8, column 8, in the same line as SEQ ID NO. 8920, preferably the coding region thereof, a homolog or a fragment thereof; which are operable linked.

[50697] In an embodiment thereof the expression cassette comprises in addition c) a nucleic acid molecule encoding a transit peptide, especially a plastidal transit petide in case in Table I, application no. 8, in column 6 in the same line as SEQ ID NO. 8920 is depicted, plastidic is mentioned, or a mitochondrial transit peptide in case in Table I, application no. 8, in column 6 in the same line as SEQ ID NO. 8920 is depicted, mitochondrial is mentioned; which is operable linked, too.

[50698] In another embodiment thereof the expression cassette does not comprise an additional transit peptide in case in Table I, application no. 8, in column 6 in the same line as SEQ ID NO. 8920 is depicted, non-targeted is mentioned.

[50699] In an embodiment the present invention relates to an expresssion cassette comprising a) a promoter, preferably a promoter selected from the group consisting of Big35S, PCUbi, Super and USP, in particular p-Super; and b) the nucleic acid SEQ ID NO. 112193, or a homolog or fragment thereof, or a homolog thereof being depicted in Table I, application no. 8, column 8, in the same line as SEQ ID NO. 112193, preferably the coding region thereof, a homolog or a fragment thereof; which are operable linked.

[50700] In an embodiment thereof the expression cassette comprises in addition c) a nucleic acid molecule encoding a transit peptide, especially a plastidal transit petide in case in Table I, application no. 8, in column 6 in the same line as SEQ ID NO. 112193 is depicted, plastidic is mentioned, or a mitochondrial transit peptide in case in Table I, application no. 8, in column 6 in the same line as SEQ ID NO. 112193 is depicted, mitochondrial is mentioned; which is operable linked, too.

[50701] In another embodiment thereof the expression cassette does not comprise an additional transit peptide in case in Table I, application no. 8, in column 6 in the same line as SEQ ID NO. 112193 is depicted, non-targeted is mentioned.

[50702] In an embodiment the present invention relates to an expresssion cassette comprising a) a promoter, preferably a promoter selected from the group consisting of Big35S, PCUbi, Super and USP, in particular p-Super; and b) the nucleic acid SEQ ID NO. 115595, or a homolog or fragment thereof, or a homolog thereof being depicted in Table I, application no. 8, column 8, in the same line as SEQ ID NO. 115595, preferably the coding region thereof, a homolog or a fragment thereof; which are operable linked.

[50703] In an embodiment thereof the expression cassette comprises in addition c) a nucleic acid molecule encoding a transit peptide, especially a plastidal transit petide in case in Table I, application no. 8, in column 6 in the same line as SEQ ID NO. 115595 is depicted, plastidic is mentioned, or a mitochondrial transit peptide in case in Table I, application no. 8, in column 6 in the same line as SEQ ID NO. 115595 is depicted, mitochondrial is mentioned; which is operable linked, too.

[50704] In another embodiment thereof the expression cassette does not comprise an additional transit peptide in case in Table I, application no. 8, in column 6 in the same line as SEQ ID NO. 115595 is depicted, non-targeted is mentioned.

[50705] In an embodiment the present invention relates to an expresssion cassette comprising a) a promoter, preferably a promoter selected from the group consisting of Big35S, PCUbi, Super and USP, in particular p-Super; and b) the nucleic acid SEQ ID NO. 39002, or a homolog or fragment thereof, or a homolog thereof being depicted in Table I, application no. 8, column 8, in the same line as SEQ ID NO. 39002, preferably the coding region thereof, a homolog or a fragment thereof; which are operable linked.

[50706] In an embodiment thereof the expression cassette comprises in addition c) a nucleic acid molecule encoding a transit peptide, especially a plastidal transit petide in case in Table I, application no. 8, in column 6 in the same line as SEQ ID NO. 39002 is depicted, plastidic is mentioned, or a mitochondrial transit peptide in case in Table I, application no. 8, in column 6 in the same line as SEQ ID NO. 39002 is depicted, mitochondrial is mentioned; which is operable linked, too.

[50707] In another embodiment thereof the expression cassette does not comprise an additional transit peptide in case in Table I, application no. 8, in column 6 in the same line as SEQ ID NO. 39002 is depicted, non-targeted is mentioned.

[50708] In an embodiment the present invention relates to an expresssion cassette comprising a) a promoter, preferably a promoter selected from the group consisting of Big35S, PCUbi, Super and USP, in particular p-Super; and b) the nucleic acid SEQ ID NO. 39040, or a homolog or fragment thereof, or a homolog thereof being depicted in Table I, application no. 8, column 8, in the same line as SEQ ID NO. 39040, preferably the coding region thereof, a homolog or a fragment thereof; which are operable linked.

[50709] In an embodiment thereof the expression cassette comprises in addition c) a nucleic acid molecule encoding a transit peptide, especially a plastidal transit petide in case in Table I, application no. 8, in column 6 in the same line as SEQ ID NO. 39040 is depicted, plastidic is mentioned, or a mitochondrial transit peptide in case in Table I, application no. 8, in column 6 in the same line as SEQ ID NO. 39040 is depicted, mitochondrial is mentioned; which is operable linked, too.

[50710] In another embodiment thereof the expression cassette does not comprise an additional transit peptide in case in Table I, application no. 8, in column 6 in the same line as SEQ ID NO. 39040 is depicted, non-targeted is mentioned.

[50711] In an embodiment the present invention relates to an expresssion cassette comprising a) a promoter, preferably a promoter selected from the group consisting of Big35S, PCUbi, Super and USP, in particular p-Super; and b) the nucleic acid SEQ ID NO. 39237, or a homolog or fragment thereof, or a homolog thereof being depicted in Table I, application no. 8, column 8, in the same line as SEQ ID NO. 39237, preferably the coding region thereof, a homolog or a fragment thereof; which are operable linked.

[50712] In an embodiment thereof the expression cassette comprises in addition c) a nucleic acid molecule encoding a transit peptide, especially a plastidal transit petide in case in Table I, application no. 8, in column 6 in the same line as SEQ ID NO. 39237 is depicted, plastidic is mentioned, or a mitochondrial transit peptide in case in Table I, application no. 8, in column 6 in the same line as SEQ ID NO. 39237 is depicted, mitochondrial is mentioned; which is operable linked, too.

[50713] In another embodiment thereof the expression cassette does not comprise an additional transit peptide in case in Table I, application no. 8, in column 6 in the same line as SEQ ID NO. 39237 is depicted, non-targeted is mentioned.

[50714] In an embodiment the present invention relates to an expresssion cassette comprising a) a promoter, preferably a promoter selected from the group consisting of Big35S, PCUbi, Super and USP, in particular p-Super; and b) the nucleic acid SEQ ID NO. 115628, or a homolog or fragment thereof, or a homolog thereof being depicted in Table I, application no. 8, column 8, in the same line as SEQ ID NO. 115628, preferably the coding region thereof, a homolog or a fragment thereof; which are operable linked.

[50715] In an embodiment thereof the expression cassette comprises in addition c) a nucleic acid molecule encoding a transit peptide, especially a plastidal transit petide in case in Table I, application no. 8, in column 6 in the same line as SEQ ID NO. 115628 is depicted, plastidic is mentioned, or a mitochondrial transit peptide in case in Table I, application no. 8, in column 6 in the same line as SEQ ID NO. 115628 is depicted, mitochondrial is mentioned; which is operable linked, too.

[50716] In another embodiment thereof the expression cassette does not comprise an additional transit peptide in case in Table I, application no. 8, in column 6 in the same line as SEQ ID NO. 115628 is depicted, non-targeted is mentioned.

[50717] In an embodiment the present invention relates to an expresssion cassette comprising a) a promoter, preferably a promoter selected from the group consisting of Big35S, PCUbi, Super and USP, in particular p-Super; and b) the nucleic acid SEQ ID NO. 40329, or a homolog or fragment thereof, or a homolog thereof being depicted in Table I, application no. 8, column 8, in the same line as SEQ ID NO. 40329, preferably the coding region thereof, a homolog or a fragment thereof; which are operable linked.

[50718] In an embodiment thereof the expression cassette comprises in addition c) a nucleic acid molecule encoding a transit peptide, especially a plastidal transit petide in case in Table I, application no. 8, in column 6 in the same line as SEQ ID NO. 40329 is depicted, plastidic is mentioned, or a mitochondrial transit peptide in case in Table I, application no. 8, in column 6 in the same line as SEQ ID NO. 40329 is depicted, mitochondrial is mentioned; which is operable linked, too.

[50719] In another embodiment thereof the expression cassette does not comprise an additional transit peptide in case in Table I, application no. 8, in column 6 in the same line as SEQ ID NO. 40329 is depicted, non-targeted is mentioned.

[50720] In an embodiment the present invention relates to an expresssion cassette comprising a) a promoter, preferably a promoter selected from the group consisting of Big35S, PCUbi, Super and USP, in particular p-Super; and b) the nucleic acid SEQ ID NO. 40665, or a homolog or fragment thereof, or a homolog thereof being depicted in Table I, application no. 8, column 8, in the same line as SEQ ID NO. 40665, preferably the coding region thereof, a homolog or a fragment thereof; which are operable linked.

[50721] In an embodiment thereof the expression cassette comprises in addition c) a nucleic acid molecule encoding a transit peptide, especially a plastidal transit petide in case in Table I, application no. 8, in column 6 in the same line as SEQ ID NO. 40665 is depicted, plastidic is mentioned, or a mitochondrial transit peptide in case in Table I, application no. 8, in column 6 in the same line as SEQ ID NO. 40665 is depicted, mitochondrial is mentioned; which is operable linked, too.

[50722] In another embodiment thereof the expression cassette does not comprise an additional transit peptide in case in Table I, application no. 8, in column 6 in the same line as SEQ ID NO. 40665 is depicted, non-targeted is mentioned.

[50723] In an embodiment the present invention relates to an expresssion cassette comprising a) a promoter, preferably a promoter selected from the group consisting of Big35S, PCUbi, Super and USP, in particular p-Super; and b) the nucleic acid SEQ ID NO. 115655, or a homolog or fragment thereof, or a homolog thereof being depicted in Table I, application no. 8, column 8, in the same line as SEQ ID NO. 115655, preferably the coding region thereof, a homolog or a fragment thereof; which are operable linked.

[50724] In an embodiment thereof the expression cassette comprises in addition c) a nucleic acid molecule encoding a transit peptide, especially a plastidal transit petide in case in Table I, application no. 8, in column 6 in the same line as SEQ ID NO. 115655 is depicted, plastidic is mentioned, or a mitochondrial transit peptide in case in Table I, application no. 8, in column 6 in the same line as SEQ ID NO. 115655 is depicted, mitochondrial is mentioned; which is operable linked, too.

[50725] In another embodiment thereof the expression cassette does not comprise an additional transit peptide in case in Table I, application no. 8, in column 6 in the same line as SEQ ID NO. 115655 is depicted, non-targeted is mentioned.

[50726] In an embodiment the present invention relates to an expresssion cassette comprising a) a promoter, preferably a promoter selected from the group consisting of Big35S, PCUbi, Super and USP, in particular p-Super; and b) the nucleic acid SEQ ID NO. 115719, or a homolog or fragment thereof, or a homolog thereof being depicted in Table I, application no. 8, column 8, in the same line as SEQ ID NO. 115719, preferably the coding region thereof, a homolog or a fragment thereof; which are operable linked.

[50727] In an embodiment thereof the expression cassette comprises in addition c) a nucleic acid molecule encoding a transit peptide, especially a plastidal transit petide in case in Table I, application no. 8, in column 6 in the same line as SEQ ID NO. 115719 is depicted, plastidic is mentioned, or a mitochondrial transit peptide in case in Table I, application no. 8, in column 6 in the same line as SEQ ID NO. 115719 is depicted, mitochondrial is mentioned; which is operable linked, too.

[50728] In another embodiment thereof the expression cassette does not comprise an additional transit peptide in case in Table I, application no. 8, in column 6 in the same line as SEQ ID NO. 115719 is depicted, non-targeted is mentioned.

[50729] In an embodiment the present invention relates to an expresssion cassette comprising a) a promoter, preferably a promoter selected from the group consisting of Big35S, PCUbi, Super and USP, in particular p-Super; and b) the nucleic acid SEQ ID NO. 115791, or a homolog or fragment thereof, or a homolog thereof being depicted in Table I, application no. 8, column 8, in the same line as SEQ ID NO. 115791, preferably the coding region thereof, a homolog or a fragment thereof; which are operable linked.

[50730] In an embodiment thereof the expression cassette comprises in addition c) a nucleic acid molecule encoding a transit peptide, especially a plastidal transit petide in case in Table I, application no. 8, in column 6 in the same line as SEQ ID NO. 115791 is depicted, plastidic is mentioned, or a mitochondrial transit peptide in case in Table I, application no. 8, in column 6 in the same line as SEQ ID NO. 115791 is depicted, mitochondrial is mentioned; which is operable linked, too.

[50731] In another embodiment thereof the expression cassette does not comprise an additional transit peptide in case in Table I, application no. 8, in column 6 in the same line as SEQ ID NO. 115791 is depicted, non-targeted is mentioned.

[50732] In an embodiment the present invention relates to an expresssion cassette comprising a) a promoter, preferably a promoter selected from the group consisting of Big35S, PCUbi, Super and USP, in particular p-Super; and b) the nucleic acid SEQ ID NO. 81980, or a homolog or fragment thereof, or a homolog thereof being depicted in Table I, application no. 8, column 8, in the same line as SEQ ID NO. 81980, preferably the coding region thereof, a homolog or a fragment thereof; which are operable linked.

[50733] In an embodiment thereof the expression cassette comprises in addition c) a nucleic acid molecule encoding a transit peptide, especially a plastidal transit petide in case in Table I, application no. 8, in column 6 in the same line as SEQ ID NO. 81980 is depicted, plastidic is mentioned, or a mitochondrial transit peptide in case in Table I, application no. 8, in column 6 in the same line as SEQ ID NO. 81980 is depicted, mitochondrial is mentioned; which is operable linked, too.

[50734] In another embodiment thereof the expression cassette does not comprise an additional transit peptide in case in Table I, application no. 8, in column 6 in the same line as SEQ ID NO. 81980 is depicted, non-targeted is mentioned.

[50735] In an embodiment the present invention relates to an expresssion cassette comprising a) a promoter, preferably a promoter selected from the group consisting of Big35S, PCUbi, Super and USP, in particular p-Super; and b) the nucleic acid SEQ ID NO. 115864, or a homolog or fragment thereof, or a homolog thereof being depicted in Table I, application no. 8, column 8, in the same line as SEQ ID NO. 115864, preferably the coding region thereof, a homolog or a fragment thereof; which are operable linked.

[50736] In an embodiment thereof the expression cassette comprises in addition c) a nucleic acid molecule encoding a transit peptide, especially a plastidal transit petide in case in Table I, application no. 8, in column 6 in the same line as SEQ ID NO. 115864 is depicted, plastidic is mentioned, or a mitochondrial transit peptide in case in Table I, application no. 8, in column 6 in the same line as SEQ ID NO. 115864 is depicted, mitochondrial is mentioned; which is operable linked, too.

[50737] In another embodiment thereof the expression cassette does not comprise an additional transit peptide in case in Table I, application no. 8, in column 6 in the same line as SEQ ID NO. 115864 is depicted, non-targeted is mentioned.

[50738] In an embodiment the present invention relates to an expresssion cassette comprising a) a promoter, preferably a promoter selected from the group consisting of Big35S, PCUbi, Super and USP, in particular p-Super; and b) the nucleic acid SEQ ID NO. 41006, or a homolog or fragment thereof, or a homolog thereof being depicted in Table I, application no. 8, column 8, in the same line as SEQ ID NO. 41006, preferably the coding region thereof, a homolog or a fragment thereof; which are operable linked.

[50739] In an embodiment thereof the expression cassette comprises in addition c) a nucleic acid molecule encoding a transit peptide, especially a plastidal transit petide in case in Table I, application no. 8, in column 6 in the same line as SEQ ID NO. 41006 is depicted, plastidic is mentioned, or a mitochondrial transit peptide in case in Table I, application no. 8, in column 6 in the same line as SEQ ID NO. 41006 is depicted, mitochondrial is mentioned; which is operable linked, too.

[50740] In another embodiment thereof the expression cassette does not comprise an additional transit peptide in case in Table I, application no. 8, in column 6 in the same line as SEQ ID NO. 41006 is depicted, non-targeted is mentioned.

[50741] In an embodiment the present invention relates to an expresssion cassette comprising a) a promoter, preferably a promoter selected from the group consisting of Big35S, PCUbi, Super and USP, in particular p-Super; and b) the nucleic acid SEQ ID NO. 116110, or a homolog or fragment thereof, or a homolog thereof being depicted in Table I, application no. 8, column 8, in the same line as SEQ ID NO. 116110, preferably the coding region thereof, a homolog or a fragment thereof; which are operable linked.

[50742] In an embodiment thereof the expression cassette comprises in addition c) a nucleic acid molecule encoding a transit peptide, especially a plastidal transit petide in case in Table I, application no. 8, in column 6 in the same line as SEQ ID NO. 116110 is depicted, plastidic is mentioned, or a mitochondrial transit peptide in case in Table I, application no. 8, in column 6 in the same line as SEQ ID NO. 116110 is depicted, mitochondrial is mentioned; which is operable linked, too.

[50743] In another embodiment thereof the expression cassette does not comprise an additional transit peptide in case in Table I, application no. 8, in column 6 in the same line as SEQ ID NO. 116110 is depicted, non-targeted is mentioned.

[50744] In an embodiment the present invention relates to an expresssion cassette comprising a) a promoter, preferably a promoter selected from the group consisting of Big35S, PCUbi, Super and USP, in particular p-Super; and b) the nucleic acid SEQ ID NO. 116172, or a homolog or fragment thereof, or a homolog thereof being depicted in Table I, application no. 8, column 8, in the same line as SEQ ID NO. 116172, preferably the coding region thereof, a homolog or a fragment thereof; which are operable linked.

[50745] In an embodiment thereof the expression cassette comprises in addition c) a nucleic acid molecule encoding a transit peptide, especially a plastidal transit petide in case in Table I, application no. 8, in column 6 in the same line as SEQ ID NO. 116172 is depicted, plastidic is mentioned, or a mitochondrial transit peptide in case in Table I, application no. 8, in column 6 in the same line as SEQ ID NO. 116172 is depicted, mitochondrial is mentioned; which is operable linked, too.

[50746] In another embodiment thereof the expression cassette does not comprise an additional transit peptide in case in Table I, application no. 8, in column 6 in the same line as SEQ ID NO. 116172 is depicted, non-targeted is mentioned.

[50747] In an embodiment the present invention relates to an expresssion cassette comprising a) a promoter, preferably a promoter selected from the group consisting of Big35S, PCUbi, Super and USP, in particular p-Super; and b) the nucleic acid SEQ ID NO. 10726, or a homolog or fragment thereof, or a homolog thereof being depicted in Table I, application no. 8, column 8, in the same line as SEQ ID NO. 10726, preferably the coding region thereof, a homolog or a fragment thereof; which are operable linked.

[50748] In an embodiment thereof the expression cassette comprises in addition c) a nucleic acid molecule encoding a transit peptide, especially a plastidal transit petide in case in Table I, application no. 8, in column 6 in the same line as SEQ ID NO. 10726 is depicted, plastidic is mentioned, or a mitochondrial transit peptide in case in Table I, application no. 8, in column 6 in the same line as SEQ ID NO. 10726 is depicted, mitochondrial is mentioned; which is operable linked, too.

[50749] In another embodiment thereof the expression cassette does not comprise an additional transit peptide in case in Table I, application no. 8, in column 6 in the same line as SEQ ID NO. 10726 is depicted, non-targeted is mentioned.

[50750] In an embodiment the present invention relates to an expresssion cassette comprising a) a promoter, preferably a promoter selected from the group consisting of Big35S, PCUbi, Super and USP, in particular p-USP; and b) the nucleic acid SEQ ID NO. 100675, or a homolog or fragment thereof, or a homolog thereof being depicted in Table I, application no. 8, column 8, in the same line as SEQ ID NO. 100675, preferably the coding region thereof, a homolog or a fragment thereof; which are operable linked.

[50751] In an embodiment thereof the expression cassette comprises in addition c) a nucleic acid molecule encoding a transit peptide, especially a plastidal transit petide in case in Table I, application no. 8, in column 6 in the same line as SEQ ID NO. 100675 is depicted, plastidic is mentioned, or a mitochondrial transit peptide in case in Table I, application no. 8, in column 6 in the same line as SEQ ID NO. 100675 is depicted, mitochondrial is mentioned; which is operable linked, too.

[50752] In another embodiment thereof the expression cassette does not comprise an additional transit peptide in case in Table I, application no. 8, in column 6 in the same line as SEQ ID NO. 100675 is depicted, non-targeted is mentioned.

[50753] In an embodiment the present invention relates to an expresssion cassette comprising a) a promoter, preferably a promoter selected from the group consisting of Big35S, PCUbi, Super and USP, in particular p-PcUBI; and b) the nucleic acid SEQ ID NO. 116312, or a homolog or fragment thereof, or a homolog thereof being depicted in Table I, application no. 8, column 8, in the same line as SEQ ID NO. 116312, preferably the coding region thereof, a homolog or a fragment thereof; which are operable linked.

[50754] In an embodiment thereof the expression cassette comprises in addition c) a nucleic acid molecule encoding a transit peptide, especially a plastidal transit petide in case in Table I, application no. 8, in column 6 in the same line as SEQ ID NO. 116312 is depicted, plastidic is mentioned, or a mitochondrial transit peptide in case in Table I, application no. 8, in column 6 in the same line as SEQ ID NO. 116312 is depicted, mitochondrial is mentioned; which is operable linked, too.

[50755] In another embodiment thereof the expression cassette does not comprise an additional transit peptide in case in Table I, application no. 8, in column 6 in the same line as SEQ ID NO. 116312 is depicted, non-targeted is mentioned.

[50756] In an embodiment the present invention relates to an expresssion cassette comprising a) a promoter, preferably a promoter selected from the group consisting of Big35S, PCUbi, Super and USP, in particular p-PcUBI; and b) the nucleic acid SEQ ID NO. 85723, or a homolog or fragment thereof, or a homolog thereof being depicted in Table I, application no. 8, column 8, in the same line as SEQ ID NO. 85723, preferably the coding region thereof, a homolog or a fragment thereof; which are operable linked.

[50757] In an embodiment thereof the expression cassette comprises in addition c) a nucleic acid molecule encoding a transit peptide, especially a plastidal transit petide in case in Table I, application no. 8, in column 6 in the same line as SEQ ID NO. 85723 is depicted, plastidic is mentioned, or a mitochondrial transit peptide in case in Table I, application no. 8, in column 6 in the same line as SEQ ID NO. 85723 is depicted, mitochondrial is mentioned; which is operable linked, too.

[50758] In another embodiment thereof the expression cassette does not comprise an additional transit peptide in case in Table I, application no. 8, in column 6 in the same line as SEQ ID NO. 85723 is depicted, non-targeted is mentioned.

[50759] In an embodiment the present invention relates to an expresssion cassette comprising a) a promoter, preferably a promoter selected from the group consisting of Big35S, PCUbi, Super and USP, in particular p-PcUBI; and b) the nucleic acid SEQ ID NO. 52660, or a homolog or fragment thereof, or a homolog thereof being depicted in Table I, application no. 8, column 8, in the same line as SEQ ID NO. 52660, preferably the coding region thereof, a homolog or a fragment thereof; which are operable linked.

[50760] In an embodiment thereof the expression cassette comprises in addition c) a nucleic acid molecule encoding a transit peptide, especially a plastidal transit petide in case in Table I, application no. 8, in column 6 in the same line as SEQ ID NO. 52660 is depicted, plastidic is mentioned, or a mitochondrial transit peptide in case in Table I, application no. 8, in column 6 in the same line as SEQ ID NO. 52660 is depicted, mitochondrial is mentioned; which is operable linked, too.

[50761] In another embodiment thereof the expression cassette does not comprise an additional transit peptide in case in Table I, application no. 8, in column 6 in the same line as SEQ ID NO. 52660 is depicted, non-targeted is mentioned.

[50762] In an embodiment the present invention relates to an expresssion cassette comprising a) a promoter, preferably a promoter selected from the group consisting of Big35S, PCUbi, Super and USP, in particular p-PcUBI; and b) the nucleic acid SEQ ID NO. 53878, or a homolog or fragment thereof, or a homolog thereof being depicted in Table I, application no. 8, column 8, in the same line as SEQ ID NO. 53878, preferably the coding region thereof, a homolog or a fragment thereof; which are operable linked.

[50763] In an embodiment thereof the expression cassette comprises in addition c) a nucleic acid molecule encoding a transit peptide, especially a plastidal transit petide in case in Table I, application no. 8, in column 6 in the same line as SEQ ID NO. 53878 is depicted, plastidic is mentioned, or a mitochondrial transit peptide in case in Table I, application no. 8, in column 6 in the same line as SEQ ID NO. 53878 is depicted, mitochondrial is mentioned; which is operable linked, too.

[50764] In another embodiment thereof the expression cassette does not comprise an additional transit peptide in case in Table I, application no. 8, in column 6 in the same line as SEQ ID NO. 53878 is depicted, non-targeted is mentioned.

[50765] In an embodiment the present invention relates to an expresssion cassette comprising a) a promoter, preferably a promoter selected from the group consisting of Big35S, PCUbi, Super and USP, in particular p-PcUBI; and b) the nucleic acid SEQ ID NO. 95047, or a homolog or fragment thereof, or a homolog thereof being depicted in Table I, application no. 8, column 8, in the same line as SEQ ID NO. 95047, preferably the coding region thereof, a homolog or a fragment thereof; which are operable linked.

[50766] In an embodiment thereof the expression cassette comprises in addition c) a nucleic acid molecule encoding a transit peptide, especially a plastidal transit petide in case in Table I, application no. 8, in column 6 in the same line as SEQ ID NO. 95047 is depicted, plastidic is mentioned, or a mitochondrial transit peptide in case in Table I, application no. 8, in column 6 in the same line as SEQ ID NO. 95047 is depicted, mitochondrial is mentioned; which is operable linked, too.

[50767] In another embodiment thereof the expression cassette does not comprise an additional transit peptide in case in Table I, application no. 8, in column 6 in the same line as SEQ ID NO. 95047 is depicted, non-targeted is mentioned.

[50768] In an embodiment the present invention relates to an expresssion cassette comprising a) a promoter, preferably a promoter selected from the group consisting of Big35S, PCUbi, Super and USP, in particular p-PcUBI; and b) the nucleic acid SEQ ID NO. 11471, or a homolog or fragment thereof, or a homolog thereof being depicted in Table I, application no. 8, column 8, in the same line as SEQ ID NO. 11471, preferably the coding region thereof, a homolog or a fragment thereof; which are operable linked.

[50769] In an embodiment thereof the expression cassette comprises in addition c) a nucleic acid molecule encoding a transit peptide, especially a plastidal transit petide in case in Table I, application no. 8, in column 6 in the same line as SEQ ID NO. 11471 is depicted, plastidic is mentioned, or a mitochondrial transit peptide in case in Table I, application no. 8, in column 6 in the same line as SEQ ID NO. 11471 is depicted, mitochondrial is mentioned; which is operable linked, too.

[50770] In another embodiment thereof the expression cassette does not comprise an additional transit peptide in case in Table I, application no. 8, in column 6 in the same line as SEQ ID NO. 11471 is depicted, non-targeted is mentioned.

[50771] In an embodiment the present invention relates to an expresssion cassette comprising a) a promoter, preferably a promoter selected from the group consisting of Big35S, PCUbi, Super and USP, in particular p-PcUBI; and b) the nucleic acid SEQ ID NO. 55385, or a homolog or fragment thereof, or a homolog thereof being depicted in Table I, application no. 8, column 8, in the same line as SEQ ID NO. 55385, preferably the coding region thereof, a homolog or a fragment thereof; which are operable linked.

[50772] In an embodiment thereof the expression cassette comprises in addition c) a nucleic acid molecule encoding a transit peptide, especially a plastidal transit petide in case in Table I, application no. 8, in column 6 in the same line as SEQ ID NO. 55385 is depicted, plastidic is mentioned, or a mitochondrial transit peptide in case in Table I, application no. 8, in column 6 in the same line as SEQ ID NO. 55385 is depicted, mitochondrial is mentioned; which is operable linked, too.

[50773] In another embodiment thereof the expression cassette does not comprise an additional transit peptide in case in Table I, application no. 8, in column 6 in the same line as SEQ ID NO. 55385 is depicted, non-targeted is mentioned.

[50774] In an embodiment the present invention relates to an expresssion cassette comprising a) a promoter, preferably a promoter selected from the group consisting of Big35S, PCUbi, Super and USP, in particular p-PcUBI; and b) the nucleic acid SEQ ID NO. 11990, or a homolog or fragment thereof, or a homolog thereof being depicted in Table I, application no. 8, column 8, in the same line as SEQ ID NO. 11990, preferably the coding region thereof, a homolog or a fragment thereof; which are operable linked.

[50775] In an embodiment thereof the expression cassette comprises in addition c) a nucleic acid molecule encoding a transit peptide, especially a plastidal transit petide in case in Table I, application no. 8, in column 6 in the same line as SEQ ID NO. 11990 is depicted, plastidic is mentioned, or a mitochondrial transit peptide in case in Table I, application no. 8, in column 6 in the same line as SEQ ID NO. 11990 is depicted, mitochondrial is mentioned; which is operable linked, too.

[50776] In another embodiment thereof the expression cassette does not comprise an additional transit peptide in case in Table I, application no. 8, in column 6 in the same line as SEQ ID NO. 11990 is depicted, non-targeted is mentioned.

[50777] In an embodiment the present invention relates to an expresssion cassette comprising a) a promoter, preferably a promoter selected from the group consisting of Big35S, PCUbi, Super and USP, in particular p-PcUBI; and b) the nucleic acid SEQ ID NO. 87655, or a homolog or fragment thereof, or a homolog thereof being depicted in Table I, application no. 8, column 8, in the same line as SEQ ID NO. 87655, preferably the coding region thereof, a homolog or a fragment thereof; which are operable linked.

[50778] In an embodiment thereof the expression cassette comprises in addition c) a nucleic acid molecule encoding a transit peptide, especially a plastidal transit petide in case in Table I, application no. 8, in column 6 in the same line as SEQ ID NO. 87655 is depicted, plastidic is mentioned, or a mitochondrial transit peptide in case in Table I, application no. 8, in column 6 in the same line as SEQ ID NO. 87655 is depicted, mitochondrial is mentioned; which is operable linked, too.

[50779] In another embodiment thereof the expression cassette does not comprise an additional transit peptide in case in Table I, application no. 8, in column 6 in the same line as SEQ ID NO. 87655 is depicted, non-targeted is mentioned.

[50780] In an embodiment the present invention relates to an expresssion cassette comprising a) a promoter, preferably a promoter selected from the group consisting of Big35S, PCUbi, Super and USP, in particular p-PcUBI; and b) the nucleic acid SEQ ID NO. 116341, or a homolog or fragment thereof, or a homolog thereof being depicted in Table I, application no. 8, column 8, in the same line as SEQ ID NO. 116341, preferably the coding region thereof, a homolog or a fragment thereof; which are operable linked.

[50781] In an embodiment thereof the expression cassette comprises in addition c) a nucleic acid molecule encoding a transit peptide, especially a plastidal transit petide in case in Table I, application no. 8, in column 6 in the same line as SEQ ID NO. 116341 is depicted, plastidic is mentioned, or a mitochondrial transit peptide in case in Table I, application no. 8, in column 6 in the same line as SEQ ID NO. 116341 is depicted, mitochondrial is mentioned; which is operable linked, too.

[50782] In another embodiment thereof the expression cassette does not comprise an additional transit peptide in case in Table I, application no. 8, in column 6 in the same line as SEQ ID NO. 116341 is depicted, non-targeted is mentioned.

[50783] In an embodiment the present invention relates to an expresssion cassette comprising a) a promoter, preferably a promoter selected from the group consisting of Big35S, PCUbi, Super and USP, in particular p-PcUBI; and b) the nucleic acid SEQ ID NO. 116460, or a homolog or fragment thereof, or a homolog thereof being depicted in Table I, application no. 8, column 8, in the same line as SEQ ID NO. 116460, preferably the coding region thereof, a homolog or a fragment thereof; which are operable linked.

[50784] In an embodiment thereof the expression cassette comprises in addition c) a nucleic acid molecule encoding a transit peptide, especially a plastidal transit petide in case in Table I, application no. 8, in column 6 in the same line as SEQ ID NO. 116460 is depicted, plastidic is mentioned, or a mitochondrial transit peptide in case in Table I, application no. 8, in column 6 in the same line as SEQ ID NO. 116460 is depicted, mitochondrial is mentioned; which is operable linked, too.

[50785] In another embodiment thereof the expression cassette does not comprise an additional transit peptide in case in Table I, application no. 8, in column 6 in the same line as SEQ ID NO. 116460 is depicted, non-targeted is mentioned.

[50786] In an embodiment the present invention relates to an expresssion cassette comprising a) a promoter, preferably a promoter selected from the group consisting of Big35S, PCUbi, Super and USP, in particular p-PcUBI; and b) the nucleic acid SEQ ID NO. 58058, or a homolog or fragment thereof, or a homolog thereof being depicted in Table I, application no. 8, column 8, in the same line as SEQ ID NO. 58058, preferably the coding region thereof, a homolog or a fragment thereof; which are operable linked.

[50787] In an embodiment thereof the expression cassette comprises in addition c) a nucleic acid molecule encoding a transit peptide, especially a plastidal transit petide in case in Table I, application no. 8, in column 6 in the same line as SEQ ID NO. 58058 is depicted, plastidic is mentioned, or a mitochondrial transit peptide in case in Table I, application no. 8, in column 6 in the same line as SEQ ID NO. 58058 is depicted, mitochondrial is mentioned; which is operable linked, too.

[50788] In another embodiment thereof the expression cassette does not comprise an additional transit peptide in case in Table I, application no. 8, in column 6 in the same line as SEQ ID NO. 58058 is depicted, non-targeted is mentioned.

[50789] In an embodiment the present invention relates to an expresssion cassette comprising a) a promoter, preferably a promoter selected from the group consisting of Big35S, PCUbi, Super and USP, in particular p-PcUBI; and b) the nucleic acid SEQ ID NO. 58324, or a homolog or fragment thereof, or a homolog thereof being depicted in Table I, application no. 8, column 8, in the same line as SEQ ID NO. 58324, preferably the coding region thereof, a homolog or a fragment thereof; which are operable linked.

[50790] In an embodiment thereof the expression cassette comprises in addition c) a nucleic acid molecule encoding a transit peptide, especially a plastidal transit petide in case in Table I, application no. 8, in column 6 in the same line as SEQ ID NO. 58324 is depicted, plastidic is mentioned, or a mitochondrial transit peptide in case in Table I, application no. 8, in column 6 in the same line as SEQ ID NO. 58324 is depicted, mitochondrial is mentioned; which is operable linked, too.

[50791] In another embodiment thereof the expression cassette does not comprise an additional transit peptide in case in Table I, application no. 8, in column 6 in the same line as SEQ ID NO. 58324 is depicted, non-targeted is mentioned.

[50792] In an embodiment the present invention relates to an expresssion cassette comprising a) a promoter, preferably a promoter selected from the group consisting of Big35S, PCUbi, Super and USP, in particular p-PcUBI; and b) the nucleic acid SEQ ID NO. 116713, or a homolog or fragment thereof, or a homolog thereof being depicted in Table I, application no. 8, column 8, in the same line as SEQ ID NO. 116713, preferably the coding region thereof, a homolog or a fragment thereof; which are operable linked.

[50793] In an embodiment thereof the expression cassette comprises in addition c) a nucleic acid molecule encoding a transit peptide, especially a plastidal transit petide in case in Table I, application no. 8, in column 6 in the same line as SEQ ID NO. 116713 is depicted, plastidic is mentioned, or a mitochondrial transit peptide in case in Table I, application no. 8, in column 6 in the same line as SEQ ID NO. 116713 is depicted, mitochondrial is mentioned; which is operable linked, too.

[50794] In another embodiment thereof the expression cassette does not comprise an additional transit peptide in case in Table I, application no. 8, in column 6 in the same line as SEQ ID NO. 116713 is depicted, non-targeted is mentioned.

[50795] In an embodiment the present invention relates to an expresssion cassette comprising a) a promoter, preferably a promoter selected from the group consisting of Big35S, PCUbi, Super and USP, in particular p-PcUBI; and b) the nucleic acid SEQ ID NO. 12341, or a homolog or fragment thereof, or a homolog thereof being depicted in Table I, application no. 8, column 8, in the same line as SEQ ID NO. 12341, preferably the coding region thereof, a homolog or a fragment thereof; which are operable linked.

[50796] In an embodiment thereof the expression cassette comprises in addition c) a nucleic acid molecule encoding a transit peptide, especially a plastidal transit petide in case in Table I, application no. 8, in column 6 in the same line as SEQ ID NO. 12341 is depicted, plastidic is mentioned, or a mitochondrial transit peptide in case in Table I, application no. 8, in column 6 in the same line as SEQ ID NO. 12341 is depicted, mitochondrial is mentioned; which is operable linked, too.

[50797] In another embodiment thereof the expression cassette does not comprise an additional transit peptide in case in Table I, application no. 8, in column 6 in the same line as SEQ ID NO. 12341 is depicted, non-targeted is mentioned.

[50798] In an embodiment the present invention relates to an expresssion cassette comprising a) a promoter, preferably a promoter selected from the group consisting of Big35S, PCUbi, Super and USP, in particular p-PcUBI; and b) the nucleic acid SEQ ID NO. 116848, or a homolog or fragment thereof, or a homolog thereof being depicted in Table I, application no. 8, column 8, in the same line as SEQ ID NO. 116848, preferably the coding region thereof, a homolog or a fragment thereof; which are operable linked.

[50799] In an embodiment thereof the expression cassette comprises in addition c) a nucleic acid molecule encoding a transit peptide, especially a plastidal transit petide in case in Table I, application no. 8, in column 6 in the same line as SEQ ID NO. 116848 is depicted, plastidic is mentioned, or a mitochondrial transit peptide in case in Table I, application no. 8, in column 6 in the same line as SEQ ID NO. 116848 is depicted, mitochondrial is mentioned; which is operable linked, too.

[50800] In another embodiment thereof the expression cassette does not comprise an additional transit peptide in case in Table I, application no. 8, in column 6 in the same line as SEQ ID NO. 116848 is depicted, non-targeted is mentioned.

[50801] In an embodiment the present invention relates to an expresssion cassette comprising a) a promoter, preferably a promoter selected from the group consisting of Big35S, PCUbi, Super and USP, in particular p-PcUBI; and b) the nucleic acid SEQ ID NO. 61553, or a homolog or fragment thereof, or a homolog thereof being depicted in Table I, application no. 8, column 8, in the same line as SEQ ID NO. 61553, preferably the coding region thereof, a homolog or a fragment thereof; which are operable linked.

[50802] In an embodiment thereof the expression cassette comprises in addition c) a nucleic acid molecule encoding a transit peptide, especially a plastidal transit petide in case in Table I, application no. 8, in column 6 in the same line as SEQ ID NO. 61553 is depicted, plastidic is mentioned, or a mitochondrial transit peptide in case in Table I, application no. 8, in column 6 in the same line as SEQ ID NO. 61553 is depicted, mitochondrial is mentioned; which is operable linked, too.

[50803] In another embodiment thereof the expression cassette does not comprise an additional transit peptide in case in Table I, application no. 8, in column 6 in the same line as SEQ ID NO. 61553 is depicted, non-targeted is mentioned.

[50804] In an embodiment the present invention relates to an expresssion cassette comprising a) a promoter, preferably a promoter selected from the group consisting of Big35S, PCUbi, Super and USP, in particular p-PcUBI; and b) the nucleic acid SEQ ID NO. 61723, or a homolog or fragment thereof, or a homolog thereof being depicted in Table I, application no. 8, column 8, in the same line as SEQ ID NO. 61723, preferably the coding region thereof, a homolog or a fragment thereof; which are operable linked.

[50805] In an embodiment thereof the expression cassette comprises in addition c) a nucleic acid molecule encoding a transit peptide, especially a plastidal transit petide in case in Table I, application no. 8, in column 6 in the same line as SEQ ID NO. 61723 is depicted, plastidic is mentioned, or a mitochondrial transit peptide in case in Table I, application no. 8, in column 6 in the same line as SEQ ID NO. 61723 is depicted, mitochondrial is mentioned; which is operable linked, too.

[50806] In another embodiment thereof the expression cassette does not comprise an additional transit peptide in case in Table I, application no. 8, in column 6 in the same line as SEQ ID NO. 61723 is depicted, non-targeted is mentioned.

[50807] In an embodiment the present invention relates to an expresssion cassette comprising a) a promoter, preferably a promoter selected from the group consisting of Big35S, PCUbi, Super and USP, in particular p-Super; and b) the nucleic acid SEQ ID NO. 116948, or a homolog or fragment thereof, or a homolog thereof being depicted in Table I, application no. 8, column 8, in the same line as SEQ ID NO. 116948, preferably the coding region thereof, a homolog or a fragment thereof; which are operable linked.

[50808] In an embodiment thereof the expression cassette comprises in addition c) a nucleic acid molecule encoding a transit peptide, especially a plastidal transit petide in case in Table I, application no. 8, in column 6 in the same line as SEQ ID NO. 116948 is depicted, plastidic is mentioned, or a mitochondrial transit peptide in case in Table I, application no. 8, in column 6 in the same line as SEQ ID NO. 116948 is depicted, mitochondrial is mentioned; which is operable linked, too.

[50809] In another embodiment thereof the expression cassette does not comprise an additional transit peptide in case in Table I, application no. 8, in column 6 in the same line as SEQ ID NO. 116948 is depicted, non-targeted is mentioned.

[50810] In an embodiment the present invention relates to an expresssion cassette comprising a) a promoter, preferably a promoter selected from the group consisting of Big35S, PCUbi, Super and USP, in particular p-Super; and b) the nucleic acid SEQ ID NO. 14275, or a homolog or fragment thereof, or a homolog thereof being depicted in Table I, application no. 8, column 8, in the same line as SEQ ID NO. 14275, preferably the coding region thereof, a homolog or a fragment thereof; which are operable linked.

[50811] In an embodiment thereof the expression cassette comprises in addition c) a nucleic acid molecule encoding a transit peptide, especially a plastidal transit petide in case in Table I, application no. 8, in column 6 in the same line as SEQ ID NO. 14275 is depicted, plastidic is mentioned, or a mitochondrial transit peptide in case in Table I, application no. 8, in column 6 in the same line as SEQ ID NO. 14275 is depicted, mitochondrial is mentioned; which is operable linked, too.

[50812] In another embodiment thereof the expression cassette does not comprise an additional transit peptide in case in Table I, application no. 8, in column 6 in the same line as SEQ ID NO. 14275 is depicted, non-targeted is mentioned.

[50813] In an embodiment the present invention relates to an expresssion cassette comprising a) a promoter, preferably a promoter selected from the group consisting of Big35S, PCUbi, Super and USP, in particular p-PcUBI; and b) the nucleic acid SEQ ID NO. 117352, or a homolog or fragment thereof, or a homolog thereof being depicted in Table I, application no. 8, column 8, in the same line as SEQ ID NO. 117352, preferably the coding region thereof, a homolog or a fragment thereof; which are operable linked.

[50814] In an embodiment thereof the expression cassette comprises in addition c) a nucleic acid molecule encoding a transit peptide, especially a plastidal transit petide in case in Table I, application no. 8, in column 6 in the same line as SEQ ID NO. 117352 is depicted, plastidic is mentioned, or a mitochondrial transit peptide in case in Table I, application no. 8, in column 6 in the same line as SEQ ID NO. 117352 is depicted, mitochondrial is mentioned; which is operable linked, too.

[50815] In another embodiment thereof the expression cassette does not comprise an additional transit peptide in case in Table I, application no. 8, in column 6 in the same line as SEQ ID NO. 117352 is depicted, non-targeted is mentioned.

[50816] In an embodiment the present invention relates to an expresssion cassette comprising a) a promoter, preferably a promoter selected from the group consisting of Big35S, PCUbi, Super and USP, in particular Big35S; and b) the nucleic acid SEQ ID NO. 90165, or a homolog or fragment thereof, or a homolog thereof being depicted in Table I, application no. 8, column 8, in the same line as SEQ ID NO. 90165, preferably the coding region thereof, a homolog or a fragment thereof; which are operable linked.

[50817] In an embodiment thereof the expression cassette comprises in addition c) a nucleic acid molecule encoding a transit peptide, especially a plastidal transit petide in case in Table I, application no. 8, in column 6 in the same line as SEQ ID NO. 90165 is depicted, plastidic is mentioned, or a mitochondrial transit peptide in case in Table I, application no. 8, in column 6 in the same line as SEQ ID NO. 90165 is depicted, mitochondrial is mentioned; which is operable linked, too.

[50818] In another embodiment thereof the expression cassette does not comprise an additional transit peptide in case in Table I, application no. 8, in column 6 in the same line as SEQ ID NO. 90165 is depicted, non-targeted is mentioned.

[50819] In an embodiment the present invention relates to an expresssion cassette comprising a) a promoter, preferably a promoter selected from the group consisting of Big35S, PCUbi, Super and USP, in particular p-PcUBI; and b) the nucleic acid SEQ ID NO. 117482, or a homolog or fragment thereof, or a homolog thereof being depicted in Table I, application no. 8, column 8, in the same line as SEQ ID NO. 117482, preferably the coding region thereof, a homolog or a fragment thereof; which are operable linked.

[50820] In an embodiment thereof the expression cassette comprises in addition c) a nucleic acid molecule encoding a transit peptide, especially a plastidal transit petide in case in Table I, application no. 8, in column 6 in the same line as SEQ ID NO. 117482 is depicted, plastidic is mentioned, or a mitochondrial transit peptide in case in Table I, application no. 8, in column 6 in the same line as SEQ ID NO. 117482 is depicted, mitochondrial is mentioned; which is operable linked, too.

[50821] In another embodiment thereof the expression cassette does not comprise an additional transit peptide in case in Table I, application no. 8, in column 6 in the same line as SEQ ID NO. 117482 is depicted, non-targeted is mentioned.

[50822] In an embodiment the present invention relates to an expresssion cassette comprising a) a promoter, preferably a promoter selected from the group consisting of Big35S, PCUbi, Super and USP, in particular p-Super; and b) the nucleic acid SEQ ID NO. 64964, or a homolog or fragment thereof, or a homolog thereof being depicted in Table I, application no. 8, column 8, in the same line as SEQ ID NO. 64964, preferably the coding region thereof, a homolog or a fragment thereof; which are operable linked.

[50823] In an embodiment thereof the expression cassette comprises in addition c) a nucleic acid molecule encoding a transit peptide, especially a plastidal transit petide in case in Table I, application no. 8, in column 6 in the same line as SEQ ID NO. 64964 is depicted, plastidic is mentioned, or a mitochondrial transit peptide in case in Table I, application no. 8, in column 6 in the same line as SEQ ID NO. 64964 is depicted, mitochondrial is mentioned; which is operable linked, too.

[50824] In another embodiment thereof the expression cassette does not comprise an additional transit peptide in case in Table I, application no. 8, in column 6 in the same line as SEQ ID NO. 64964 is depicted, non-targeted is mentioned.

[50825] In an embodiment the present invention relates to an expresssion cassette comprising a) a promoter, preferably a promoter selected from the group consisting of Big35S, PCUbi, Super and USP, in particular Big35S; and b) the nucleic acid SEQ ID NO. 66772, or a homolog or fragment thereof, or a homolog thereof being depicted in Table I, application no. 8, column 8, in the same line as SEQ ID NO. 66772, preferably the coding region thereof, a homolog or a fragment thereof; which are operable linked.

[50826] In an embodiment thereof the expression cassette comprises in addition c) a nucleic acid molecule encoding a transit peptide, especially a plastidal transit petide in case in Table I, application no. 8, in column 6 in the same line as SEQ ID NO. 66772 is depicted, plastidic is mentioned, or a mitochondrial transit peptide in case in Table I, application no. 8, in column 6 in the same line as SEQ ID NO. 66772 is depicted, mitochondrial is mentioned; which is operable linked, too.

[50827] In another embodiment thereof the expression cassette does not comprise an additional transit peptide in case in Table I, application no. 8, in column 6 in the same line as SEQ ID NO. 66772 is depicted, non-targeted is mentioned.

[50828] In an embodiment the present invention relates to an expresssion cassette comprising a) a promoter, preferably a promoter selected from the group consisting of Big35S, PCUbi, Super and USP, in particular Big35S; and b) the nucleic acid SEQ ID NO. 117495, or a homolog or fragment thereof, or a homolog thereof being depicted in Table I, application no. 8, column 8, in the same line as SEQ ID NO. 117495, preferably the coding region thereof, a homolog or a fragment thereof; which are operable linked.

[50829] In an embodiment thereof the expression cassette comprises in addition c) a nucleic acid molecule encoding a transit peptide, especially a plastidal transit petide in case in Table I, application no. 8, in column 6 in the same line as SEQ ID NO. 117495 is depicted, plastidic is mentioned, or a mitochondrial transit peptide in case in Table I, application no. 8, in column 6 in the same line as SEQ ID NO. 117495 is depicted, mitochondrial is mentioned; which is operable linked, too.

[50830] In another embodiment thereof the expression cassette does not comprise an additional transit peptide in case in Table I, application no. 8, in column 6 in the same line as SEQ ID NO. 117495 is depicted, non-targeted is mentioned.

[50831] In an embodiment the present invention relates to an expresssion cassette comprising a) a promoter, preferably a promoter selected from the group consisting of Big35S, PCUbi, Super and USP, in particular p-Super; and b) the nucleic acid SEQ ID NO. 118212, or a homolog or fragment thereof, or a homolog thereof being depicted in Table I, application no. 8, column 8, in the same line as SEQ ID NO. 118212, preferably the coding region thereof, a homolog or a fragment thereof; which are operable linked.

[50832] In an embodiment thereof the expression cassette comprises in addition c) a nucleic acid molecule encoding a transit peptide, especially a plastidal transit petide in case in Table I, application no. 8, in column 6 in the same line as SEQ ID NO. 118212 is depicted, plastidic is mentioned, or a mitochondrial transit peptide in case in Table I, application no. 8, in column 6 in the same line as SEQ ID NO. 118212 is depicted, mitochondrial is mentioned; which is operable linked, too.

[50833] In another embodiment thereof the expression cassette does not comprise an additional transit peptide in case in Table I, application no. 8, in column 6 in the same line as SEQ ID NO. 118212 is depicted, non-targeted is mentioned.

[50834] In an embodiment the present invention relates to an expresssion cassette comprising a) a promoter, preferably a promoter selected from the group consisting of Big35S, PCUbi, Super and USP, in particular p-PcUBI; and b) the nucleic acid SEQ ID NO. 16883, or a homolog or fragment thereof, or a homolog thereof being depicted in Table I, application no. 8, column 8, in the same line as SEQ ID NO. 16883, preferably the coding region thereof, a homolog or a fragment thereof; which are operable linked.

[50835] In an embodiment thereof the expression cassette comprises in addition c) a nucleic acid molecule encoding a transit peptide, especially a plastidal transit petide in case in Table I, application no. 8, in column 6 in the same line as SEQ ID NO. 16883 is depicted, plastidic is mentioned, or a mitochondrial transit peptide in case in Table I, application no. 8, in column 6 in the same line as SEQ ID NO. 16883 is depicted, mitochondrial is mentioned; which is operable linked, too.

[50836] In another embodiment thereof the expression cassette does not comprise an additional transit peptide in case in Table I, application no. 8, in column 6 in the same line as SEQ ID NO. 16883 is depicted, non-targeted is mentioned.

[50837] Accordingly, in one embodiment, the process according to the invention comprises the following steps:
[50838] (a) introducing of a nucleic acid construct comprising the nucleic acid molecule of the invention (and if desired, in combination with the nucleic acid encoding a respective transit peptide) or used in the process of the invention or encoding the polypeptide of the present invention or used in the process of the invention; or
[50839] (b) introducing of a nucleic acid molecule, including regulatory sequences and/or factors (and if desired, in combination with the nucleic acid encoding a respective transit peptide), which expression increases the expression of the nucleic acid molecule of the invention or used in the process of the invention or encoding the polypeptide of the present invention or used in the process of the invention; in a cell, or a non-human organism or a part thereof, preferably in a plant, plant cell or a microorganism, preferably in the organelles such as the plastids or mitochondria thereof, or preferably non-targeted, or
[50840] (c) introducing an expression cassette as mentioned above, and
[50841] (d) expressing of the gene product encoded by the nucleic acid construct or the nucleic acid molecule (and if desired, in combination with the nucleic acid encoding a respective transit peptide) or expression cassette mentioned under (a), (b) or (c) in the cell or the non-human organism or part thereof.

[50842] For expression in a host organism, for example a plant, the expression cassette is advantageously inserted into a vector such as by way of example a plasmid, a phage or other DNA which allows optimal expression of the genes in the host organism. Examples of suitable plasmids are: in E. coli pLG338, pACYC184, pBR series such as e.g. pBR322, pUC series such as pUC18 or pUC19, M113mp series, pKC30, pRep4, pHS1, pHS2, pPLc236, pMBL24, μLG200, pUR290, pIN-111113-B1, λgt11 or pBdCI; in Streptomyces pIJ101, pIJ364, pIJ702 or pIJ361; in Bacillus pUB110, pC194 or pBD214; in Corynebacterium pSA77 or pAJ667; in fungi pALS1, pl L2 or pBB116; other advantageous fungal vectors are described by Romanos M. A. et al., Yeast 8, 423 (1992) and by van den Hondel C. A. M. J. J. et al. [(1991) “Heterologous gene expression in filamentous fungi”] as well as in “More Gene Manipulations” in “Fungi” in Bennet J. W. & Lasure L. L., eds., pp. 396-428, Academic Press, San Diego, and in “Gene transfer systems and vector development for filamentous fungi” [van den Hondel C. A. M. J. J. & Punt P. J. (1991) in: Applied Molecular Genetics of Fungi, Peberdy J. F. et al., eds., pp. 1-28, Cambridge University Press: Cambridge]. Examples of advantageous yeast vectors are 2pM, pAG-1, YEp6, YEp13 or pEMBLYe23. Examples of algal or plant plasmids are pLGV23, pGHlac+, pBIN19, pAK2004, pVKH or pDH51 (see Schmidt R., Willmitzer L., Plant Cell Rep. 7, 583 (1988)). The vectors identified above or derivatives of the vectors identified above are a small selection of the possible plasmids. Further plasmids are well known to those skilled in the art and may be found, for example, in “Cloning Vectors” (Eds. P. H. Pouwels et al., Elsevier, Amsterdam-New York-Oxford, 1985, ISBN 0 444 904018). Suitable plant vectors are described inter alia in “Methods in Plant Molecular Biology and Biotechnology” (CRC Press, Ch. 6/7, pp. 71-119). Advantageous vectors are known as shuttle vectors or binary vectors which replicate in E. coli and Agrobacterium. Examples for binary vectors are pBIN19, pBI101, pBinAR, pGPTV, pCAMBIA, pBIB-HYG, pBecks, pGreen or pPZP (Hajukiewicz P. et al., Plant Mol. Biol. 25, 989 (1994), and Hellens et al, Trends in Plant Science 5, 446 (2000)).

[50843] In a further embodiment of the vector the expression cassette according to the invention may also advantageously be introduced into the organisms in the form of a linear DNA and be integrated into the genome of the host organism by way of heterologous or homologous recombination. This linear DNA may be composed of a linearized plasmid or only of the expression cassette as vector or the respective nucleic acid sequences (if desired, in combination with the nucleic acid encoding a respective transit peptide) according to the invention.

[50844] In a further advantageous embodiment the nucleic acid sequence (if desired, in combination with the nucleic acid encoding a respective transit peptide) according to the invention can also be introduced into an organism on its own.

[50845] If in addition to the nucleic acid sequence according to the invention (and if desired, in combination with the nucleic acid encoding a respective transit peptide) further genes are to be introduced into the organism, all genes altogether with a marker in a single vector or each single gene with a marker in a vector can be introduced into the organism, whereby the different vectors can be introduced simultaneously or successively.

[50846] The vector advantageously contains at least one copy of the nucleic acid sequences according to the invention (and if desired, in combination with the nucleic acid encoding a respective transit peptide) or of the expression cassette (=gene construct) according to the invention.

[50847] The invention further provides a vector, comprising a nucleic acid molecule comprising 1) a nucleic acid molecule selected from the group consisting of:
[50848] (a) a nucleic acid molecule encoding a polypeptide shown in Table II, column 5 or 8, application no. 8, preferably shown in Table II A, application no. 8, in column 5, or in Table II A, application no. 8, column 8, or in Table II B, application no. 8, column 8, or a homolog or a fragment thereof;
[50849] (b) a nucleic acid molecule shown in Table I, application no. 8, column 5 or 8, preferably shown in Table I A, application no. 8, in column 5, or in Table I A, application no. 8, column 8, or in Table I B, application no. 8, column 8, preferably the coding region thereof, or a homolog or a fragment thereof;
[50850] (c) a nucleic acid molecule, which, as a result of the degeneracy of the genetic code, can be derived from a polypeptide sequence depicted in column 5 or 8 of Table II, application no. 8, preferably shown in Table II A, application no. 8, in column 5, or in Table II A, application no. 8, column 8, or in Table II B, application no. 8, column 8;
[50851] (d) a nucleic acid molecule having at least 30% identity, preferably at least 40%, 50%, 60%, 70%, 75%, 80%, 85%, 90%, 95%, 96%, 97%, 98%, 99%, 99,5%, with the nucleic acid molecule sequence of a polynucleotide comprising the nucleic acid molecule shown in column 5 or 8 of Table I, application no. 8, preferably shown in Table I A, application no. 8, in column 5, or in Table I A, application no. 8, column 8, or in Table I B, application no. 8, column 8, preferably the coding region thereof;
[50852] (e) a nucleic acid molecule encoding a polypeptide having at least 30% identity, preferably at least 40%, 50% 60%, 70%, 75%, 80%, 85%, 90%, 95%, 96%, 97%, 98%, 99%, 99,5%, identity with the amino acid sequence of the polypeptide encoded by the nucleic acid molecule of (a), (b), (c), or (d);
[50853] (f) a nucleic acid molecule which hybridizes with a nucleic acid molecule of (a), (b), (c), (d), or (e) under stringent hybridization conditions;
[50854] (g) a nucleic acid molecule encoding a polypeptide which can be isolated with the aid of monoclonal or polyclonal antibodies made against a polypeptide encoded by one of the nucleic acid molecules of (a), (b), (c), (d), (e) or (f);
[50855] (h) a nucleic acid molecule encoding a polypeptide comprising the consensus sequence or one or more polypeptide motifs as shown in column 8 of Table IV, application no. 8;
[50856] (i) a nucleic acid molecule encoding a polypeptide having the activity represented by a protein as depicted in column 5 of Table II, application no. 8;
[50857] (j) a nucleic acid molecule comprising a polynucleotide which is obtained by amplifying a cDNA library or a genomic library using the primers in Table III, application no. 8, column 8;
[50858] and
[50859] (k) nucleic acid molecule which is obtainable by screening a suitable nucleic acid library, especially a cDNA library and/or a genomic library, under stringent hybridization conditions with a probe comprising one of the sequences of the nucleic acid molecule of (a), (b), (c), (d), (e), (f), (g), (h), (i) or (j) or with a fragment thereof having at least 15 nt, preferably 20 nt, 30 nt, 50 nt, 100 nt, 200 nt, 500 nt, 1000 nt, 1500 nt, 2000 nt or 3000 nt of the nucleic acid molecule complementary to a nucleic acid sequence characterized in (a), (b), (c), (d), (e), (f), (g), (h), (i) or (j);
[50860] or a nucleic acid molecule comprising a sequence which is complementary thereto.
   (All the references to Tables I to IV are references to the corresponding lines of Tables I to IV.)

[50861] In a preferred embodiment of said vector said nucleic acid molecule according to 1 (a), (b), (c), (d), (e), (f), (g), (h), (i), (j) or (k) encodes a polypeptide which has the activity of the respective polypeptide represented by a protein comprising a polypeptide as depicted in the respective line in column 5 of Table II, application no. 8.

[50862] In another preferred embodiment of said vector said nucleic acid molecule according to 1 (a), (b), (c), (d), (e), (f), (g), (h), (i), (j) or (k) confers a generation or an increase of the respective fine chemical in a non-human organism or a part thereof as compared to a corresponding wild-type non-human organism or part thereof.

[50863] In another preferred embodiment of said vector said nucleic acid molecule according to 1 (a), (b), (c), (d), (e), (f), (g), (h), (i), (j) or (k) encodes a polypeptide which has the activity of the respective polypeptide represented by a protein as depicted in the respective line in column 5 of Table II, application no. 8, and confers a generation or an increase of the respective fine chemical in a non-human organism or a part thereof as compared to a corresponding wild-type non-human organism or part thereof.

[50864] In another embodiment thereof said vector comprises beneath said nucleic acid molecule according to 1 (a), (b), (c), (d), (e), (f), (g), (h), (i), (j) or (k), a promoter, preferably a promoter selected from the group consisting of Big35S, PCUbi, Super and USP, which are operable linked.

[50865] In a preferred embodiment thereof said vector comprises beneath said nucleic acid molecule according to 1 (a), (b), (c), (d), (e), (f), (g), (h), (i), (j) or (k), a promoter, preferably a promoter selected from the group consisting of Big35S, PCUbi, Super and USP, which are operable linked; and said nucleic acid molecule according to 1 (a), (b), (c), (d), (e), (f), (g), (h), (i), (j) or (k) encodes a polypeptide which has the activity of the respective polypeptide represented by a protein comprising a polypeptide as depicted in the respective line in column 5 of Table II, application no. 8.

[50866] In another preferred embodiment thereof said vector comprises beneath said nucleic acid molecule according to 1 (a), (b), (c), (d), (e), (f), (g), (h), (i), (j) or (k), a promoter, preferably a promoter selected from the group consisting of Big35S, PCUbi, Super and USP, which are operable linked; and said nucleic acid molecule according to 1 (a), (b), (c), (d), (e), (f), (g), (h), (i), (j) or (k) confers a generation or an increase of the respective fine chemical in a non-human organism or a part thereof as compared to a corresponding wild-type non-human organism or part thereof.

[50867] In another preferred embodiment thereof said vector comprises beneath said nucleic acid molecule according to 1 (a), (b), (c), (d), (e), (f), (g), (h), (i), (j) or (k), a promoter, preferably a promoter selected from the group consisting of Big35S, PCUbi, Super and USP, which are operable linked; and said nucleic acid molecule according to 1 (a), (b), (c), (d), (e), (f), (g), (h), (i), (j) or (k) encodes a polypeptide which has the activity of the respective polypeptide represented by a protein as depicted in the respective line in column 5 of Table II, application no. 8, and confers a generation or an increase of the respective fine chemical in a non-human organism or a part thereof as compared to a corresponding wild-type non-human organism or part thereof.

[50868] In another embodiment thereof said vector comprises beneath said nucleic acid molecule according to 1 (a), (b), (c), (d), (e), (f), (g), (h), (i), (j) or (k), a nucleic acid molecule encoding a transit peptide, preferably encoding a plastidal transit peptide, especially in case in column 6 of Table I, application no. 8, in the same line as of the respective nucleic acid molecule according to 1) “plastidic” is depicted, or encoding a mitochondrial transit peptide, especially in case in column 6 of Table I, application no. 8, in the same line as of the respective nucleic acid molecule according to 1) “mitochondrial” is depicted, which are operable linked.

[50869] In another embodiment thereof said vector does not comprise beneath said nucleic acid molecule according to 1 (a), (b), (c), (d), (e), (f), (g), (h), (i), (j) or (k), a nucleic acid molecule encoding a transit peptide in case in column 6 of Table I, application no. 8, in the same line as of the respective nucleic acid molecule according to 1) “non-targeted” is depicted.

[50870] In another embodiment thereof said vector comprises beneath said nucleic acid molecule according to 1 (a), (b), (c), (d), (e), (f), (g), (h), (i), (j) or (k), and a promoter, preferably a promoter selected from the group consisting of Big35S, PCUbi, Super and USP; a nucleic acid molecule encoding a transit peptide, preferably encoding a plastidal transit peptide, especially in case in column 6 of Table I, application no. 8, in the same line as of the respective nucleic acid molecule according to 1) “plastidic” is depicted, or encoding a mitochondrial transit peptide, especially in case in column 6 of Table I, application no. 8, in the same line as of the respective nucleic acid molecule according to 1) “mitochondrial” is depicted, which are operable linked.

[50871] In another embodiment thereof said vector does not comprise beneath said nucleic acid molecule according to 1 (a), (b), (c), (d), (e), (f), (g), (h), (i), (j) or (k), and a promoter, preferably a promoter selected from the group consisting of Big35S, PCUbi, Super and USP, which are operable linked; a nucleic acid molecule encoding a transit peptide, especially in case in column 6 of Table I, application no. 8, in the same line as of the respective nucleic acid molecule according to 1) “non-targeted” is depicted.

[50872] In another embodiment thereof said vector comprises beneath said nucleic acid molecule according to 1 (a), (b), (c), (d), (e), (f), (g), (h), (i), (j) or (k), and a promoter, preferably a promoter selected from the group consisting of Big35S, PCUbi, Super and USP; a nucleic acid molecule encoding a transit peptide, preferably encoding a plastidal transit peptide, especially in case in column 6 of Table I, application no. 8, in the same line as of the respective nucleic acid molecule according to 1) “plastidic” is depicted, or encoding a mitochondrial transit peptide, especially in case in column 6 of Table I, application no. 8, in the same line as of the respective nucleic acid molecule according to 1) “mitochondrial” is depicted, which are operable linked; and wherein said nucleic acid molecule according to 1 (a), (b), (c), (d), (e), (f), (g), (h), (i), (j) or (k) encodes a polypeptide which has the activity of the respective polypeptide represented by a protein comprising a polypeptide as depicted in column 5 of Table II, application no. 8 (in the same line).

[50873] In another embodiment thereof said vector does not comprise beneath said nucleic acid molecule according to 1 (a), (b), (c), (d), (e), (f), (g), (h), (i), (j) or (k), and a promoter, preferably a promoter selected from the group consisting of Big35S, PCUbi, Super and USP, which are operatively linked; a nucleic acid molecule encoding a transit peptide, especially in case in column 6 of Table I, application no. 8, in the same line as of the respective nucleic acid molecule according to 1) “non-targeted” is depicted; and wherein said nucleic acid molecule according to 1 (a), (b), (c), (d), (e), (f), (g), (h), (i), (j) or (k) encodes a polypeptide which has the activity of the respective polypeptide represented by a protein comprising a polypeptide as depicted in column 5 of Table II, application no. 8.

[50874] In another embodiment thereof said vector comprises beneath said nucleic acid molecule according to 1 (a), (b), (c), (d), (e), (f), (g), (h), (i), (j) or (k), and a promoter, preferably a promoter selected from the group consisting of Big35S, PCUbi, Super and USP; a nucleic acid molecule encoding a transit peptide, preferably encoding a plastidal transit peptide, especially in case in column 6 of Table I, application no. 8, in the same line as of the respective nucleic acid molecule according to 1) “plastidic” is depicted, or encoding a mitochondrial transit peptide, especially in case in column 6 of Table I, application no. 8, in the same line as of the respective nucleic acid molecule according to 1) “mitochondrial” is depicted, which are operable linked; and wherein said nucleic acid molecule according to 1 (a), (b), (c), (d), (e), (f), (g), (h), (i), (j) or (k) confers a generation or an increase of the respective fine chemical in a non-human organism or a part thereof as compared to a corresponding wild-type non-human organism or part thereof.

[50875] In another embodiment thereof said vector does not comprise beneath said nucleic acid molecule according to 1 (a), (b), (c), (d), (e), (f), (g), (h), (i), (j) or (k), and a promoter, preferably a promoter selected from the group consisting of Big35S, PCUbi, Super and USP, which are operatively linked; a nucleic acid molecule encoding a transit peptide, especially in case in column 6 of Table I, application no. 8, in the same line as of the respective nucleic acid molecule according to 1) “non-targeted” is depicted; and wherein said nucleic acid molecule according to 1 (a), (b), (c), (d), (e), (f), (g), (h), (i), (j) or (k) confers a generation or an increase of the respective fine chemical in a non-human organism or a part thereof as compared to a corresponding wild-type non-human organism or part thereof.

[50876] In another embodiment thereof said vector comprises beneath said nucleic acid molecule according to 1 (a), (b), (c), (d), (e), (f), (g), (h), (i), (j) or (k), and a promoter, preferably a promoter selected from the group consisting of Big35S, PCUbi, Super and USP; a nucleic acid molecule encoding a transit peptide, preferably encoding a plastidal transit peptide, especially in case in column 6 of Table I, application no. 8, in the same line as of the respective nucleic acid molecule according to 1) “plastidic” is depicted, or encoding a mitochondrial transit peptide, especially in case in column 6 of Table I, application no. 8, in the same line as of the respective nucleic acid molecule according to 1) “mitochondrial” is depicted, which are operable linked; and wherein said nucleic acid molecule according to 1 (a), (b), (c), (d), (e), (f), (g), (h), (i), (j) or (k) encodes a polypeptide which has the activity of the respective polypeptide represented by a protein as depicted in column 5 of Table II application no. 8 and confers a generation or an increase of the respective fine chemical in a non-human organism or a part thereof as compared to a corresponding wild-type non-human organism or part thereof.

[50877] In another embodiment thereof said vector does not comprise beneath said nucleic acid molecule according to 1 (a), (b), (c), (d), (e), (f), (g), (h), (i), (j) or (k), and a promoter, preferably a promoter selected from the group consisting of Big35S, PCUbi, Super and USP, which are operatively linked; a nucleic acid molecule encoding a transit peptide, especially in case in column 6 of Table I, application no. 8, in the same line as of the respective nucleic acid molecule according to 1) “non-targeted” is depicted; and wherein said nucleic acid molecule according to 1 (a), (b), (c), (d), (e), (f), (g), (h), (i), (j) or (k) encodes a polypeptide which has the activity of the respective polypeptide represented by a protein as depicted in column 5 of Table II application no. 8 (in the same line) and confers a generation or an increase of the respective fine chemical in a non-human organism or a part thereof as compared to a corresponding wild-type non-human organism or part thereof.

[50878] In a preferred embodiment of said vector said nucleic acid molecule according to 1 (a), (b), (c), (d), (e), (f), (g), (h), (i), (j) or (k), said promoter and optionally said nucleic acid molecule encoding a transit peptide are encompassed in an expression cassette. Accordingly in an embodiment the invention provides a vector comprising an expression cassette comprising said nucleic acid molecule according to 1 (a), (b), (c), (d), (e), (f), (g), (h), (i), (j) or (k), said promoter and optionally said a nucleic acid molecule encoding a transit peptide, operable linked. Said expression cassette may encompass a terminator, too.

[50879] The invention further provides a vector comprising a nucleic acid molecule comprising 1) a nucleic acid molecule selected from the group consisting of:
[50880] (a) a nucleic acid molecule encoding a polypeptide shown in Table II, column 5 or 8, application no. 8, preferably shown in Table II A, application no. 8, in column 5, or in Table II A, application no. 8, column 8, or in Table II B, application no. 8, column 8, or a homolog or a fragment thereof;
[50881] (b) a nucleic acid molecule shown in Table I, application no. 8, column 5 or 8, preferably shown in Table I A, application no. 8, in column 5, or in Table I A, application no. 8, column 8, or in Table I B, application no. 8, column 8, preferably the coding region thereof, or a homolog or a fragment thereof;
[50882] (c) a nucleic acid molecule, which, as a result of the degeneracy of the genetic code, can be derived from a polypeptide sequence depicted in column 5 or 8 of Table II, application no. 8, preferably shown in Table II A, application no. 8, in column 5, or in Table II A, application no. 8, column 8, or in Table II B, application no. 8, column 8;
[50883] (d) a nucleic acid molecule having at least 30% identity, preferably at least 40%, 50%, 60%, 70%, 75%, 80%, 85%, 90%, 95%, 96%, 97%, 98%, 99%, 99,5%, with the nucleic acid molecule sequence of a polynucleotide comprising the nucleic acid molecule shown in column 5 or 8 of Table I, application no. 8, preferably shown in Table I A, application no. 8, in column 5, or in Table I A, application no. 8, column 8, or in Table I B, application no. 8, column 8, preferably the coding region thereof;
[50884] (e) a nucleic acid molecule encoding a polypeptide having at least 30% identity, preferably at least 40%, 50% 60%, 70%, 75%, 80%, 85%, 90%, 95%, 96%, 97%, 98%, 99%, 99,5%, identity with the amino acid sequence of the polypeptide encoded by the nucleic acid molecule of (a), (b), (c), or (d);
[50885] (f) a nucleic acid molecule which hybridizes with a nucleic acid molecule of (a), (b), (c), (d), or (e) under stringent hybridization conditions;
[50886] (g) a nucleic acid molecule encoding a polypeptide which can be isolated with the aid of monoclonal or polyclonal antibodies made against a polypeptide encoded by one of the nucleic acid molecules of (a), (b), (c), (d), (e) or (f);
[50887] (h) a nucleic acid molecule encoding a polypeptide comprising the consensus sequence or one or more polypeptide motifs as shown in column 8 of Table IV, application no. 8;
[50888] (i) a nucleic acid molecule encoding a polypeptide having the activity represented by a protein as depicted in column 5 of Table II, application no. 8;
[50889] (j) a nucleic acid molecule comprising a polynucleotide which is obtained by amplifying a cDNA library or a genomic library using the primers in Table III, application no. 8, column 8;
[50890] and
[50891] (k) nucleic acid molecule which is obtainable by screening a suitable nucleic acid library, especially a cDNA library and/or a genomic library, under stringent hybridization conditions with a probe comprising one of the sequences of the nucleic acid molecule of (a), (b), (c), (d), (e), (f), (g), (h), (i) or (j) or with a fragment thereof having at least 15 nt, preferably 20 nt, 30 nt, 50 nt, 100 nt, 200 nt, 500 nt, 1000 nt, 1500 nt, 2000 nt or 3000 nt of the nucleic acid molecule complementary to a nucleic acid sequence characterized in (a), (b), (c), (d), (e), (f), (g), (h), (i) or (j);
[50892] or a nucleic acid molecule comprising a sequence which is complementary thereto;
   whereby, preferably, the nucleic acid molecule according to 1 (a), (b), (c), (d), (e), (f), (g), (h), (i), (j) or (k) distinguishes over the sequence depicted in Table I A and/or I B, application no. 8, column 5 or 8, or the coding region thereof, by one or more nucleotides (especially but not exceeding 5%, preferably 4%, 3%, 2%, 1%, 0.5%, 0.2% or 0.1%). In an embodiment, the nucleic acid molecule of the invention does not consist of the sequence shown in Table I A and/or I B, application no. 8, column 5 or 8, or the coding region thereof, respectively. In another embodiment, the nucleic acid molecule of the present invention, preferably the coding region thereof, is 30%, 40%, 50%, 60%, 70%, 80%, 90%, 95% identical but less than 100%, 99.999%, 99.99%, 99.9%, 99%, 98%, 97%, 96% or 95% identical to the sequence shown in Table I A and/or I B, application no. 8, column 5 or 8, or the coding region thereof, respectively. In a further embodiment the nucleic acid molecule does not encode the polypeptide sequence shown in Table II A and/or II B, application no. 8, column 5 or 8 but homologs thereof. Accordingly, in one embodiment, the nucleic acid molecule of the present invention encodes in one embodiment a polypeptide which differs at least in one or more amino acids (especially but not exceeding 5%, preferably 4%, 3%, 2%, 1%, 0.5%, 0.2% or 0.1%) from the polypeptide shown in Table II, application no. 8, column 5 or 8 and does not encode a protein of the sequence shown in Table II A and/or II B, application no. 8, column 5 or 8. Accordingly, in one embodiment, the protein encoded by a sequence of a nucleic acid according to (a), (b), (c), (d), (e), (f), (g), (h), (i), (j) or (k) does not consist of the sequence shown in Table I A and/or I B, application no. 8, column 5 and 8, or the coding region thereof. In a further embodiment, the protein of the present invention is at least 30%,40%, 50%, 60%, 70%, 80%, 90%, 95% identical to protein sequence depicted in Table II A and/or II B, application no. 8, column 5 or 8 but less than 100%, preferably less than 99.999%, 99.99% or 99.9%, more preferably less than 99%, 985, 97%, 96% or 95% identical to the sequence shown in Table II A and/or II B, application no. 8, column 5 or 8.
   (All the references to Tables I to IV are references to the corresponding lines of Tables I to IV.)

[50893] In a preferred embodiment of said vector said nucleic acid molecule according to 1 (a), (b), (c), (d), (e), (f), (g), (h), (i), (j) or (k) encodes a polypeptide which has the activity of the respective polypeptide represented by a protein comprising a polypeptide as depicted in the respective line in column 5 of Table II, application no. 8.

[50894] In another preferred embodiment of said vector said nucleic acid molecule according to 1 (a), (b), (c), (d), (e), (f), (g), (h), (i), (j) or (k) confers a generation or an increase of the respective fine chemical in a non-human organism or a part thereof as compared to a corresponding wild-type non-human organism or part thereof.

[50895] In another preferred embodiment of said vector said nucleic acid molecule according to 1 (a), (b), (c), (d), (e), (f), (g), (h), (i), (j) or (k) encodes a polypeptide which has the activity of the respective polypeptide represented by a protein as depicted in the respective line in column 5 of Table II, application no. 8, and confers a generation or an increase of the respective fine chemical in a non-human organism or a part thereof as compared to a corresponding wild-type non-human organism or part thereof.

[50896] In another embodiment thereof said vector comprises beneath said nucleic acid molecule according to 1 (a), (b), (c), (d), (e), (f), (g), (h), (i), (j) or (k), a promoter, preferably a promoter selected from the group consisting of Big35S, PCUbi, Super and USP, which are operable linked.

[50897] In a preferred embodiment thereof said vector comprises beneath said nucleic acid molecule according to 1 (a), (b), (c), (d), (e), (f), (g), (h), (i), (j) or (k), a promoter, preferably a promoter selected from the group consisting of Big35S, PCUbi, Super and USP, which are operable linked; and said nucleic acid molecule according to 1 (a), (b), (c), (d), (e), (f), (g), (h), (i), (j) or (k) encodes a polypeptide which has the activity of the respective polypeptide represented by a protein comprising a polypeptide as depicted in the respective line in column 5 of Table II, application no. 8.

[50898] In another preferred embodiment thereof said vector comprises beneath said nucleic acid molecule according to 1 (a), (b), (c), (d), (e), (f), (g), (h), (i), (j) or (k), a promoter, preferably a promoter selected from the group consisting of Big35S, PCUbi, Super and USP, which are operable linked; and said nucleic acid molecule according to 1 (a), (b), (c), (d), (e), (f), (g), (h), (i), (j) or (k) confers a generation or an increase of the respective fine chemical in a non-human organism or a part thereof as compared to a corresponding wild-type non-human organism or part thereof.

[50899] In another preferred embodiment thereof said vector comprises beneath said nucleic acid molecule according to 1 (a), (b), (c), (d), (e), (f), (g), (h), (i), (j) or (k), a promoter, preferably a promoter selected from the group consisting of Big35S, PCUbi, Super and USP, which are operable linked; and said nucleic acid molecule according to 1 (a), (b), (c), (d), (e), (f), (g), (h), (i), (j) or (k) encodes a polypeptide which has the activity of the respective polypeptide represented by a protein as depicted in the respective line in column 5 of Table II, application no. 8, and confers a generation or an increase of the respective fine chemical in a non-human organism or a part thereof as compared to a corresponding wild-type non-human organism or part thereof.

[50900] In another embodiment thereof said vector comprises beneath said nucleic acid molecule according to 1 (a), (b), (c), (d), (e), (f), (g), (h), (i), (j) or (k), a nucleic acid molecule encoding a transit peptide, preferably encoding a plastidal transit peptide, especially in case in column 6 of Table I, application no. 8, in the same line as of the respective nucleic acid molecule according to 1) “plastidic” is depicted, or encoding a mitochondrial transit peptide, especially in case in column 6 of Table I, application no. 8, in the same line as of the respective nucleic acid molecule according to 1) “mitochondrial” is depicted, which are operable linked.

[50901] In another embodiment thereof said vector does not comprise beneath said nucleic acid molecule according to 1 (a), (b), (c), (d), (e), (f), (g), (h), (i), (j) or (k), a nucleic acid molecule encoding a transit peptide in case in column 6 of Table I, application no. 8, in the same line as of the respective nucleic acid molecule according to 1) “non-targeted” is depicted.

[50902] In another embodiment thereof said vector comprises beneath said nucleic acid molecule according to 1 (a), (b), (c), (d), (e), (f), (g), (h), (i), (j) or (k), and a promoter, preferably a promoter selected from the group consisting of Big35S, PCUbi, Super and USP; a nucleic acid molecule encoding a transit peptide, preferably encoding a plastidal transit peptide, especially in case in column 6 of Table I, application no. 8, in the same line as of the respective nucleic acid molecule according to 1) “plastidic” is depicted, or encoding a mitochondrial transit peptide, especially in case in column 6 of Table I, application no. 8, in the same line as of the respective nucleic acid molecule according to 1) “mitochondrial” is depicted, which are operable linked.

[50903] In another embodiment thereof said vector does not comprise beneath said nucleic acid molecule according to 1 (a), (b), (c), (d), (e), (f), (g), (h), (i), (j) or (k), and a promoter, preferably a promoter selected from the group consisting of Big35S, PCUbi, Super and USP, which are operatively linked; a nucleic acid molecule encoding a transit peptide, especially in case in column 6 of Table I, application no. 8, in the same line as of the respective nucleic acid molecule according to 1) “non-targeted” is depicted.

[50904] In another embodiment thereof said vector comprises beneath said nucleic acid molecule according to 1 (a), (b), (c), (d), (e), (f), (g), (h), (i), (j) or (k), and a promoter, preferably a promoter selected from the group consisting of Big35S, PCUbi, Super and USP; a nucleic acid molecule encoding a transit peptide, preferably encoding a plastidal transit peptide, especially in case in column 6 of Table I, application no. 8, in the same line as of the respective nucleic acid molecule according to 1) “plastidic” is depicted, or encoding a mitochondrial transit peptide, especially in case in column 6 of Table I, application no. 8, in the same line as of the respective nucleic acid molecule according to 1) “mitochondrial” is depicted, which are operable linked; and wherein said nucleic acid molecule according to 1 (a), (b), (c), (d), (e), (f), (g), (h), (i), (j) or (k) encodes a polypeptide which has the activity of the respective polypeptide represented by a protein comprising a polypeptide as depicted in column 5 of Table II, application no. 8.

[50905] In another embodiment thereof said vector does not comprise beneath said nucleic acid molecule according to 1 (a), (b), (c), (d), (e), (f), (g), (h), (i), (j) or (k), and a promoter, preferably a promoter selected from the group consisting of Big35S, PCUbi, Super and USP, which are operatively linked; a nucleic acid molecule encoding a transit peptide, especially in case in column 6 of Table I, application no. 8, in the same line as of the respective nucleic acid molecule according to 1) “non-targeted” is depicted; and wherein said nucleic acid molecule according to 1 (a), (b), (c), (d), (e), (f), (g), (h), (i), (j) or (k) encodes a polypeptide which has the activity of the respective polypeptide represented by a protein comprising a polypeptide as depicted in column 5 of Table II, application no. 8.

[50906] In another embodiment thereof said vector comprises beneath said nucleic acid molecule according to 1 (a), (b), (c), (d), (e), (f), (g), (h), (i), (j) or (k), and a promoter, preferably a promoter selected from the group consisting of Big35S, PCUbi, Super and USP; a nucleic acid molecule encoding a transit peptide, preferably encoding a plastidal transit peptide, especially in case in column 6 of Table I, application no. 8, in the same line as of the respective nucleic acid molecule according to 1) “plastidic” is depicted, or encoding a mitochondrial transit peptide, especially in case in column 6 of Table I, application no. 8, in the same line as of the respective nucleic acid molecule according to 1) “mitochondrial” is depicted, which are operable linked; and wherein said nucleic acid molecule according to 1 (a), (b), (c), (d), (e), (f), (g), (h), (i), (j) or (k) confers a generation or an increase of the respective fine chemical in a non-human organism or a part thereof as compared to a corresponding wild-type non-human organism or part thereof.

[50907] In another embodiment thereof said vector does not comprise beneath said nucleic acid molecule according to 1 (a), (b), (c), (d), (e), (f), (g), (h), (i), (j) or (k), and a promoter, preferably a promoter selected from the group consisting of Big35S, PCUbi, Super and USP, which are operatively linked; a nucleic acid molecule encoding a transit peptide, especially in case in column 6 of Table I, application no. 8, in the same line as of the respective nucleic acid molecule according to 1) “non-targeted” is depicted; and wherein said nucleic acid molecule according to 1 (a), (b), (c), (d), (e), (f), (g), (h), (i), (j) or (k) confers a generation or an increase of the respective fine chemical in a non-human organism or a part thereof as compared to a corresponding wild-type non-human organism or part thereof.

[50908] In another embodiment thereof said vector comprises beneath said nucleic acid molecule according to 1 (a), (b), (c), (d), (e), (f), (g), (h), (i), (j) or (k), and a promoter, preferably a promoter selected from the group consisting of Big35S, PCUbi, Super and USP; a nucleic acid molecule encoding a transit peptide, preferably encoding a plastidal transit peptide, especially in case in column 6 of Table I, application no. 8, in the same line as of the respective nucleic acid molecule according to 1) “plastidic” is depicted, or encoding a mitochondrial transit peptide, especially in case in column 6 of Table I, application no. 8, in the same line as of the respective nucleic acid molecule according to 1) “mitochondrial” is depicted, which are operable linked; and wherein said nucleic acid molecule according to 1 (a), (b), (c), (d), (e), (f), (g), (h), (i), (j) or (k) encodes a polypeptide which has the activity of the respective polypeptide represented by a protein as depicted in column 5 of Table II application no. 8 and confers a generation or an increase of the respective fine chemical in a non-human organism or a part thereof as compared to a corresponding wild-type non-human organism or part thereof.

[50909] In another embodiment thereof said vector does not comprise beneath said nucleic acid molecule according to 1 (a), (b), (c), (d), (e), (f), (g), (h), (i), (j) or (k), and a promoter, preferably a promoter selected from the group consisting of Big35S, PCUbi, Super and USP, which are operatively linked; a nucleic acid molecule encoding a transit peptide, especially in case in column 6 of Table I, application no. 8, in the same line as of the respective nucleic acid molecule according to 1) “non-targeted” is depicted; and wherein said nucleic acid molecule according to 1 (a), (b), (c), (d), (e), (f), (g), (h), (i), (j) or (k) encodes a polypeptide which has the activity of the respective polypeptide represented by a protein as depicted in column 5 of Table II application no. 8 and confers a generation or an increase of the respective fine chemical in a non-human organism or a part thereof as compared to a corresponding wild-type non-human organism or part thereof.

[50910] In a preferred embodiment of said vector said nucleic acid molecule according to 1 (a), (b), (c), (d), (e), (f), (g), (h), (i), (j) or (k), said promoter and optionally said nucleic acid molecule encoding a transit peptide are encompassed in an expression cassette. Accordingly in an embodiment the invention provides a vector comprising an expression cassette comprising said nucleic acid molecule according to 1 (a), (b), (c), (d), (e), (f), (g), (h), (i), (j) or (k), said promoter and optionally said a nucleic acid molecule encoding a transit peptide, operable linked. Said expression cassette may encompass a terminator, too.

[50911] The invention further provides a vector, especially an expression vector, comprising a FCRP encoding nucleic acid as described above, wherein expression of the vector or FCRP encoding nucleic acid, respectively in a host cell results in the production of a the respective fine chemical, preferably in an increased production of the respective fine chemical, as compared to a wild type of the host cell.

[50912] As used herein, the term “vector” refers to a nucleic acid molecule capable of transporting another nucleic acid which has been linked thereto. One type of vector is a “plasmid”, which refers to a circular double stranded DNA loop into which additional DNA segments can be ligated. Another type of vector is a viral vector, wherein additional DNA segments can be ligated into the viral genome. Further types of vectors can be linearized nucleic acid sequences, such as transposons, which are pieces of DNA which can copy and insert themselves. There have been two types of transposons found: simple transposons, known as Insertion Sequences and composite transposons, which can have several genes as well as the genes that are required for transposition. Certain vectors are capable of autonomous replication in a host cell into which they are introduced (e.g. bacterial vectors having a bacterial origin of replication and episomal mammalian vectors). Other vectors (e.g. non-episomal mammalian vectors) are integrated into the genome of a host cell or an organelle upon introduction into the host cell, and thereby are replicated along with the host or organelle genome. Moreover, certain vectors are capable of directing the expression of genes to which they are operatively linked. Such vectors are referred to herein as “expression vectors.” In general, expression vectors of utility in recombinant DNA techniques are often in the form of plasmids. In the present specification, “plasmid” and “vector” can be used interchangeably as the plasmid is the most commonly used form of vector. However, the invention is intended to include other forms of expression vectors, such as viral vectors (e.g., replication defective retroviruses, adenoviruses, and adeno-associated viruses), which exert similar functions.

[50913] The term vector furthermore encompasses other vectors known to those skilled in the art such as by way of example phages, viruses such as SV40, CMV, baculovirus, adenovirus, transposons, IS elements, phasmids, phagemids, cosmids, linear or circular DNA. These vectors can be replicated autonomously in the host organism or be chromosomally replicated, chromosomal replication being preferred.

[50914] The recombinant expression vectors of the invention comprise a nucleic acid molecule of the invention in a form suitable for expression of the nucleic acid molecule in a host cell, which means that the recombinant expression vectors include one or more regulatory sequences, selected on the basis of the host cells to be used for expression, and, if desired a targeting sequence, which are operatively linked to the nucleic acid sequence to be expressed. As used herein with respect to a recombinant expression vector, “operatively linked” is intended to mean that the nucleotide sequence of interest is linked to the regulatory sequence(s)/targeting sequence in a manner which allows for expression of the nucleotide sequence in such way that the predicted function assigned to the nucleic sequence is fulfilled (e.g. in an in vitro transcription/translation system or in a host cell when the vector is introduced into the host cell). The term “regulatory sequence” is intended to include promoters, enhancers, and other expression control elements (e.g. polyadenylation signals). Such regulatory sequences are described, for example, in Goeddel “Gene Expression Technology: Methods in Enzymology 185”, Academic Press, San Diego, Calif. (1990), and Gruber and Crosby, in: Methods in Plant Molecular Biology and Biotechnology, eds. Glick and Thompson, Chapter 7, 89-108, CRC Press; Boca Raton, Fla., including the references therein. Regulatory sequences include those that direct constitutive expression of a nucleotide sequence in many types of host cells and those that direct expression of the nucleotide sequence only in certain host cells or under certain conditions. It will be appreciated by those skilled in the art that the design of the expression vector can depend on such factors as the choice of the host cell to be transformed, the level of expression of polypeptide desired, etc. The term “regulatory sequence” is to be considered as being encompassed by the term “regulatory signal”. The expression vectors of the invention can be introduced into host cells to thereby produce polypeptides or peptides, including fusion polypeptides or peptides, encoded by nucleic acid molecules as described herein (e.g., fusion polypeptides, FCRPs etc.).

[50915] In another embodiment the recombinant expression vectors of the invention can be designed specifically for expression of the polypeptides of the invention in plant cells.

[50916] For example, FCRP genes can be expressed in plant cells (see R. Schmidt, L. Willmitzer, Plant Cell Rep. 7, 583 (1988); Plant Molecular Biology and Biotechnology, C Press, Boca Raton, Fla., Chapter 6/7, p. 71-119 (1993); F. F. White, B. Jenes et al., Techniques for Gene Transfer, in: Transgenic Plants, Vol. 1, Engineering and Utilization, eds. Kung and Wu R., 128-43, Academic Press: 1993; Potrykus, Annu. Rev. Plant Physiol. Plant Molec. Biol. 42, 205 (1991) and references cited therein). Suitable host cells are discussed further in Goeddel, “Gene Expression Technology: Methods in Enzymology 185”, Academic Press: San Diego, Calif. (1990). By way of example the plant expression cassette can be installed in the pRT transformation vector ((a) Toepfer et al., Methods Enzymol. 217, 66 (1993), (b) Toepfer et al., Nucl. Acids. Res. 15, 5890 (1987)). Alternatively, the recombinant expression vector can be transcribed and translated in vitro, for example using T7 promoter regulatory sequences and T7 polymerase.

[50917] Expression vectors employed in prokaryotes frequently make use of inducible systems with and without fusion proteins or fusion oligopeptides, wherein these fusions can ensue in both N-terminal and C-terminal manner or in other useful domains of a protein. Such fusion vectors usually have the following purposes: 1) to increase the RNA expression rate; 2) to increase the achievable protein synthesis rate; 3) to increase the solubility of the protein; 4) or to simplify purification by means of a binding sequence usable for affinity chromatography. Proteolytic cleavage points are also frequently introduced via fusion proteins, which allow cleavage of a portion of the fusion protein and purification. Such recognition sequences for proteases are recognized, e.g. factor Xa, thrombin and enterokinase.

[50918] Typical advantageous fusion and expression vectors are pGEX (Pharmacia Biotech Inc; D. B. Smith and K. S. Johnson, Gene 67, 31 (1988)), pMAL (New England Biolabs, Beverly, Mass.) and pRIT5 (Pharmacia, Piscataway, N.J.) which contains glutathione S-transferase (GST), maltose binding protein or protein A.

[50919] In an embodiment of the present invention, the coding sequence for the polypeptide of the invention is cloned into a pGEX expression vector to create a vector encoding a fusion polypeptide comprising, from the N-terminus to the C-terminus, GST-thrombin cleavage site-X polypeptide. The fusion polypeptide can be purified by affinity chromatography using glutathione-agarose resin. Recombinant FCRP unfused to GST can be recovered by cleavage of the fusion polypeptide with thrombin. Other examples of E. coli expression vectors are pTrc (Amann et al., Gene 69, 301 (1988)) and pET vectors (Studier et al., “Gene Expression Technology: Methods in Enzymology 185”, Academic Press, San Diego, Calif. (1990) 60-89; Stratagene, Amsterdam, The Netherlands).

[50920] Target gene expression from the pTrc vector relies on host RNA polymerase transcription from a hybrid trp-lac fusion promoter. Target gene expression from the pET 11d vector relies on transcription from a T7 gn10-lac fusion promoter mediated by a co-expressed viral RNA polymerase (T7 gn1). This viral polymerase is supplied by host strains BL21(DE3) or HMS174(DE3) from a resident I prophage harboring a T7 gn1 gene under the transcriptional control of the lacUV 5 promoter.

[50921] In a further embodiment of the present invention, the FCRPs are expressed in plants and plant cells such as unicellular plant cells (e.g. algae) (see Falciatore et al., Marine Biotechnology 1 (3), 239 (1999) and references therein) and plant cells from higher plants (e.g., the spermatophytes, such as crop plants), for example to regenerate plants from the plant cells. A nucleic acid molecule coding for FCRP as depicted in Table II, column 5 or 8, or a homolog or a fragment thereof, (and, if desired, in combination with the nucleic acid encoding a respective transit peptide) may be “introduced” into a plant cell by any means, including transfection, transformation or transduction, electroporation, particle bombardment, agroinfection, and the like.

[50922] One transformation method known to those of skill in the art is the dipping of a flowering plant into an Agrobacteria solution, wherein the Agrobacteria contains the nucleic acid of the invention, followed by breeding of the transformed gametes.

[50923] Other suitable methods for transforming or transfecting host cells including plant cells can be found in Sambrook et al., “Molecular Cloning: A Laboratory Manual”. 2nd ed., Cold Spring Harbor Laboratory, Cold Spring Harbor Laboratory Press, Cold Spring Harbor, N.Y., 1989, and other laboratory manuals such as “Methods in Molecular Biology”, 1995, Vol. 44, Agrobacterium protocols, ed: Gartland and Davey, Humana Press, Totowa, New Jersey. As generated or increased production of the fine chemical is generally wished to be inherited into a wide variety of monocotyledonous or dicotyledonous plants, preferably plants like maize, wheat, rye, oat, triticale, rice, barley, sugar cane, soybean, peanut, cotton, rapeseed and canola, manihot, pepper, sunflower and tagetes, sugar beet, solanaceous plants like potato, tobacco, eggplant, and tomato, Vicia species, pea, alfalfa, bushy plants (coffee, cacao, tea), Salix species, trees (oil palm, coconut), perennial grasses, and forage crops, these crop plants are also preferred target plants for a genetic engineering as one further embodiment of the present invention. Forage crops include, but are not limited to Wheatgrass, Canarygrass, Bromegrass, Wildrye Grass, Bluegrass, Orchardgrass, Alfalfa, Salfoin, Birdsfoot Trefoil, Alsike Clover, Red Clover and Sweet Clover.

[50924] In one embodiment of the present invention, transfection of a nucleic acid molecule coding for FCRP e.g. as depicted in Table II column 5 or 8, or a homolog or a fragment thereof, (and, if desired, in combination with the nucleic acid encoding a respective transit peptide) into a plant is achieved by Agrobacterium mediated gene transfer. Agrobacterium mediated plant transformation can be performed using for example the GV3101(pMP90) (Koncz and Schell, Mol. Gen. Genet. 204, 383 (1986)) or LBA4404 (Clontech) Agrobacterium tumefaciens strain. Transformation can be performed by standard transformation and regeneration techniques (Deblaere et al., Nucl. Acids Res. 13, 4777 (1994), Gelvin, B. Stanton and Robert A. Schilperoort, Plant Molecular Biology Manual, 2nd ed.—Dordrecht : Kluwer Academic Publ., 1995.—in Sect., Ringbuc Zentrale Signatur: BT11-P ISBN 0-7923-2731-4; Bernard R. Glick., John E. Thompson, “Methods in Plant Molecular Biology and Biotechnology”, Boca Raton: CRC Press, 1993 p. 360, ISBN 0-8493-5164-2). For example, rapeseed can be transformed via cotyledon or hypocotyl transformation (Moloney et al., Plant Cell Report 8, 238 (1989); De Block et al., Plant Physiol. 91, 694 (1989)). Use of antibiotics for Agrobacterium and plant selection depends on the binary vector and the Agrobacterium strain used for transformation. Rapeseed selection is normally performed using kanamycin as selectable plant marker. Agrobacterium mediated gene transfer to flax can be performed using, for example, a technique described by Mlynarova et al., Plant Cell Report 13, 282 (1994). Additionally, transformation of soybean can be performed using for example a technique described in European Patent No. 424 047, U.S. Pat. No. 5,322,783, European Patent No. 397 687, U.S. Pat. No. 5,376,543 or U.S. Pat. No. 5,169,770. Transformation of maize can be achieved by particle bombardment, polyethylene glycol mediated DNA uptake or via the silicon carbide fiber technique. (See, for example, Freeling and Walbot “The maize handbook” Springer Verlag: New York (1993) ISBN 3-540 -97826-7). A specific example of maize transformation is found in U.S. Pat. No. 5,990,387, and a specific example of wheat transformation can be found in PCT Application No. WO 93/07256. Examples for rice transformation can be found e.g. in EP 1 728 418 or EP 897 013.

[50925] According to the present invention, the introduced nucleic acid molecule coding for FCRP e.g. as depicted in Table II, column 5 or 8, or a homolog or a fragment thereof, may be maintained in the plant cell stably if it is incorporated into a non-chromosomal autonomous replicon or integrated into the plant chromosomes or organelle genome. Alternatively, the introduced FCRP may be present on an extra-chromosomal non-replicating vector and be transiently expressed or transiently active.

[50926] Whether present in an extra-chromosomal non-replicating vector or a vector that is integrated into a chromosome, the nucleic acid molecule coding for FCRP as depicted in Table II, column 5 or 8, a homolog or a fragment thereof, preferably resides in a non-human organism expression cassette, preferably a microorganism expression cassette or a plant expression cassette. A plant expression cassette preferably contains regulatory sequences capable of driving gene expression in plant cells that are operatively linked so that each sequence can fulfill its function, for example, termination of transcription by polyadenylation signals. Preferred polyadenylation signals are those originating from Agrobacterium tumefaciens t-DNA such as the gene 3 known as octopine synthase of the Ti-plasmid pTiACH5 (Gielen et al., EMBO J. 3, 835 (1984)) or functional equivalents thereof but also all other terminators functionally active in plants are suitable. As plant gene expression is very often not limited on transcriptional levels, a plant expression cassette preferably contains other operatively linked sequences like translational enhancers such as the overdrive-sequence containing the 5″-untranslated leader sequence from tobacco mosaic virus enhancing the polypeptide per RNA ratio (Gallie et al., Nucl. Acids Research 15, 8693 (1987)). Examples of plant expression vectors include those detailed in: D. Becker et al., Plant Mol. Biol. 20, 1195 (1992); and M. W. Bevan, Nucl. Acid. Res. 12, 8711 (1984); and “Vectors for Gene Transfer in Higher Plants” in: Transgenic Plants, Vol. 1, Engineering and Utilization, eds. Kung and Wu R., Academic Press, 1993, S. 15-38. “Transformation” is defined herein as a process for introducing DNA into a non-human organism, preferably a microorganism or a plant or a part thereof, like a plant cell or plant tissue. In an embodiment the transformation is performed with heterologous DNA. In another embodiment the transformation is performed with “additional” homologous DNA. Transformation may occur under natural or artificial conditions using various methods well known in the art. Transformation may rely on any known method for the insertion of (foreign, additional) nucleic acid sequences into a prokaryotic or eukaryotic host cell. The method is selected based on the host cell being transformed and may include, but is not limited to, viral infection, electroporation, lipofection, and particle bombardment. Such “transformed” cells include stably transformed cells in which the inserted DNA is capable of replication either as an autonomously replicating plasmid or as part of the host chromosome. They also include cells which transiently express the inserted DNA or RNA for limited periods of time. Transformed plant cells, plant tissue, or plants are understood to encompass not only the end product of a transformation process, but also transgenic progeny thereof.

[50927] The terms “transformed,” “transgenic,” and “recombinant” refer to a host organism such as a microorganism, e.g. a bacterium, or a plant into which a nucleic acid molecule has been introduced. In an embodiment the introduced nucleic acid molecule is heterogenous. In another embodiment the introduced DNA is homologous. The nucleic acid molecule can be stably integrated into the genome of the host or the nucleic acid molecule can also be present as an extra-chromosomal molecule. Such an extra-chromosomal molecule can be autoreplicating. A “non-transformed”, “non-transgenic” or “non-recombinant” host refers to a wild-type organism, e.g. a bacterium or plant, which does not contain the heterologous nucleic acid molecule or the additional homologous nucleic acid molecule.

[50928] In an embodiment a “transgenic plant”, as used herein, refers to a plant which contains a nucleotide sequence inserted into either its nuclear genome or organelle genome. In an embodiment the introduced nucleic acid molecule is heterogenous. In another embodiment the introduced DNA is homologous. In each case it encompasses further the offspring generations i.e. the Ti-, T2- and consecutively generations or BC1-, BC2- and consecutively generation as well as crossbreeds thereof with non-transgenic or other transgenic plants, as long as it contains said nucleic acid sequence.

[50929] The host organism (=transgenic organism) advantageously contains at least one copy of the nucleic acid in addition according to the invention and/or of the nucleic acid construct in addition according to the invention.

[50930] In principle all non-human organism can be used as host organism. In an embodiment the transgenic non-human organism or cell is a prokaryotic organism. In an embodiment the transgenic non-human organism or cell is an eukaryotic organism, like an alga, a non-human animal or a plant, in particular an algae or a plant. Preferred transgenic plants are monocotyledonous or dicotyledonous plants, preferably, for example, selected from the families Aceraceae, Anacardiaceae, Apiaceae, Asteraceae, Brassicaceae, Cactaceae, Cucurbitaceae, Euphorbiaceae, Fabaceae, Malvaceae, Nymphaeaceae, Papaveraceae, Rosaceae, Salicaceae, Solanaceae, Arecaceae, Bromeliaceae, Cyperaceae, lridaceae, Liliaceae, Orchidaceae, Gentianaceae, Labiaceae, Magnoliaceae, Ranunculaceae, Carifolaceae, Rubiaceae, Scrophulariaceae, Caryophyllaceae, Ericaceae, Polygonaceae, Violaceae, Juncaceae or Poaceae and preferably from a plant selected from the group of the families Apiaceae, Asteraceae, Brassicaceae, Cucurbitaceae, Fabaceae, Papaveraceae, Rosaceae, Solanaceae, Liliaceae or Poaceae. Preferred are crop plants such as plants advantageously selected from the group of the genus peanut, oilseed rape, canola, sunflower, safflower, olive, sesame, hazelnut, almond, avocado, bay, pumpkin/squash, linseed, soya, pistachio, borage, maize, wheat, rye, oats, sorghum and millet, triticale, rice, barley, sugarcane, cotton, cassava, potato, sugarbeet, egg plant, alfalfa, and perennial grasses and forage plants, oil palm, vegetables (brassicas, root vegetables, tuber vegetables, pod vegetables, fruiting vegetables, onion vegetables, leafy vegetables and stem vegetables), buckwheat, Jerusalem artichoke, broad bean, vetches, lentil, dwarf bean, lupin, clover and lucerne for mentioning only some of them.

[50931] In one embodiment of the invention transgenic plants are selected from the group comprising monocotyledonous or dicotyledonous plants, preferably cereals, soybean, rapeseed (including oil seed rape, especially canola and winter oil seed rape), cotton, sugarcane and potato, especially corn, soy, rapeseed (including oil seed rape, especially canola and winter oil seed rape), cotton, wheat and rice.

[50932] In one embodiment, the transgenic plant is a crop plant, in particular a transgenic plant belonging to e.g. Anacardium occidentale, Calendula officinalis, Carthamus tinctorius, Cichorium intybus, Cynara scolymus, Helianthus annus, Tagetes lucida, Tagetes erecta, Tagetes tenuifolia; Daucus carota; Corylus avellana, Corylus colurna, Borago officinalis; Brassica napus, Brassica rapa ssp., Sinapis arvensis Brassica juncea, Brassica juncea var. juncea, Brassica juncea var. crispifolia, Brassica juncea var. foliosa, Brassica nigra, Brassica sinapioides, Melanosinapis communis, Brassica oleracea, Arabidopsis thaliana, Anana comosus, Ananas ananas, Bromelia comosa, Carica papaya, Cannabis sative, Ipomoea batatus, Ipomoea pandurata, Convolvulus batatas, Convolvulus tiliaceus, Ipomoea fastigiata, Ipomoea tiliacea, Ipomoea triloba, Convolvulus panduratus, Beta vulgaris, Beta vulgaris var. altissima, Beta vulgaris var. vulgaris, Beta maritima, Beta vulgaris var. perennis, Beta vulgaris var. conditiva, Beta vulgaris var. esculenta, Cucurbita maxima, Cucurbita mixta, Cucurbita pepo, Cucurbita moschata, Olea europaea, Manihot utilissima, Janipha manihot, Jatropha manihot., Manihot aipil, Manihot dulcis, Manihot manihot, Manihot melanobasis, Manihot esculenta, Ricinus communis, Pisum sativum, Pisum arvense, Pisum humile, Medicago sativa, Medicago falcata, Medicago varia, Glycine max Dolichos soja, Glycine gracilis, Glycine hispida, Phaseolus max, Soja hispida, Glycine max, Cocos nucifera, Pelargonium grossularioides, Oleum cocoas, Laurus nobilis, Persea americana, Arachis hypogaea, Linum usitatissimum, Linum humile, Linum austriacum, Linum bienne, Linum angustifolium, Linum catharticum, Linum flavum, Linum grandiflorum, Adenolinum grandiflorum, Linum lewisii, Linum narbonense, Linum perenne, Linum perenne var. lewisii, Linum pratense, Linum trigynum, Punica granatum, Gossypium hirsutum, Gossypium arboreum, Gossypium barbadense, Gossypium herbaceum, Gossypium thurberi, Musa nana, Musa acuminata, Musa paradisiaca, Musa spp., Elaeis guineensis, Papaver orientale, Papaver rhoeas, Papaver dubium, Sesamum indicum, Piper aduncum, Piper amalago, Piper angustifolium, Piper auritum, Piper betel, Piper cubeba, Piper longum, Piper nigrum, Piper retrofractum, Artanthe adunca, Artanthe elongata, Peperomia elongata, Piper elongatum, Steffensia elongata, Hordeum vulgare, Hordeum jubatum, Hordeum murinum, Hordeum secalinum, Hordeum distichon Hordeum aegiceras, Hordeum hexastichon., Hordeum hexastichum, Hordeum irregulare, Hordeum sativum, Hordeum secalinum, Avena sativa, Avena fatua, Avena byzantina, Avena fatua var. sativa, Avena hybrida, Sorghum bicolor, Sorghum halepense, Sorghum saccharatum, Sorghum vulgare, Andropogon drummondii, Holcus bicolor, Holcus sorghum, Sorghum aethiopicum, Sorghum arundinaceum, Sorghum caffrorum, Sorghum cernuum, Sorghum dochna, Sorghum drummondii, Sorghum durra, Sorghum guineense, Sorghum lanceolatum, Sorghum nervosum, Sorghum saccharatum, Sorghum subglabrescens, Sorghum verticilliflorum, Sorghum vulgare, Holcus halepensis, Sorghum miliaceum millet, Panicum militaceum, Zea mays, Triticum aestivum, Triticum durum, Triticum turgidum, Triticum hybernum, Triticum macha, Triticum sativum or Triticum vulgare, Cofea spp., Coffea arabica, Coffea canephora, Coffea liberica, Capsicum annuum, Capsicum annuum var. glabriusculum, Capsicum frutescens, Capsicum annuum, Nicotiana tabacum, Solanum tuberosum, Solanum melongena, Lycopersicon esculentum, Lycopersicon lycopersicum., Lycopersicon pyriforme, Solanum integrifolium, Solanum lycopersicum Theobroma cacao, Panicum virgatum or Camellia sinensis.

[50933] In another embodiment, the transgenic plant belongs to monocotyledonous or dicotyledonous plants, preferably to Anacardiaceae such as the genera Pistacia, Mangifera, Anacardium e.g. the species Pistacia vera [pistachios, Pistazie], Mangifer indica [Mango] or Anacardium occidentale [Cashew]; Asteraceae such as the genera Calendula, Carthamus, Centaurea, Cichorium, Cynara, Helianthus, Lactuca, Locusta, Tagetes, Valeriana e.g. the species Calendula officinalis [Marigold], Carthamus tinctorius [safflower], Centaurea cyanus [cornflower], Cichorium intybus [blue daisy], Cynara scolymus [Artichoke], Helianthus annus [sunflower], Lactuca sativa, Lactuca crispa, Lactuca esculenta, Lactuca scariola L. ssp. sativa, Lactuca scariola L. var. integrate, Lactuca scariola L. var. integrifolia, Lactuca sativa subsp. romana, Locusta communis, Valeriana locusta [lettuce], Tagetes lucida, Tagetes erecta or Tagetes tenuifolia [Marigold]; Apiaceae such as the genera Daucus e.g. the species Daucus carota [carrot]; Betulaceae such as the genera Corylus e.g. the species Corylus avellana or Corylus colurna [hazelnut]; Boraginaceae such as the genera Borago e.g. the species Borago officinalis [borage]; Brassicaceae such as the genera Brassica, Melanosinapis, Sinapis, Arabadopsis e.g. the species Brassica napus, Brassica rapa ssp. [canola, oilseed rape, turnip rape], Sinapis arvensis Brassica juncea, Brassica juncea var. juncea, Brassica juncea var. crispifolia, Brassica juncea var. foliosa, Brassica nigra, Brassica sinapioides, Melanosinapis communis [mustard], Brassica oleracea [fodder beet] or Arabidopsis thaliana; Bromeliaceae such as the genera Anana, Bromelia e.g. the species Anana comosus, Ananas ananas or Bromelia comosa [pineapple]; Caricaceae such as the genera Carica e.g. the species Carica papaya [papaya]; Cannabaceae such as the genera Cannabis e.g. the species Cannabis sative [hemp], Convolvulaceae such as the genera Ipomea, Convolvulus e.g. the species Ipomoea batatus, Ipomoea pandurata, Convolvulus batatas, Convolvulus tiliaceus, Ipomoea fastigiata, Ipomoea tiliacea, Ipomoea triloba or Convolvulus panduratus [sweet potato, Man of the Earth, wild potato], Chenopodiaceae such as the genera Beta, i.e. the species Beta vulgaris, Beta vulgaris var. altissima, Beta vulgaris var. Vulgaris, Beta maritima, Beta vulgaris var. perennis, Beta vulgaris var. conditiva or Beta vulgaris var. esculenta [sugar beet]; Cucurbitaceae such as the genera Cucubita e.g. the species Cucurbita maxima, Cucurbita mixta, Cucurbita pepo or Cucurbita moschata [pumpkin, squash]; Elaeagnaceae such as the genera Elaeagnus e.g. the species Olea europaea [olive]; Ericaceae such as the genera Kalmia e.g. the species Kalmia latifolia, Kalmia angustifolia, Kalmia microphylla, Kalmia polifolia, Kalmia occidentalis, Cistus chamaerhodendros or Kalmia lucida [American laurel, broad-leafed laurel, calico bush, spoon wood, sheep laurel, alpine laurel, bog laurel, western bog-laurel, swamp-laurel]; Euphorbiaceae such as the genera Manihot, Janipha, Jatropha, Ricinus e.g. the species Manihot utilissima, Janipha manihot, Jatropha manihot, Manihot aipil, Manihot dulcis, Manihot manihot, Manihot melanobasis, Manihot esculenta [manihot, arrowroot, tapioca, cassava] or Ricinus communis [castor bean, Castor Oil Bush, Castor Oil Plant, Palma Christi, Wonder Tree]; Fabaceae such as the genera Pisum, Albizia, Cathormion, Feuillea, Inga, Pithecolobium, Acacia, Mimosa, Medicajo, Glycine, Dolichos, Phaseolus, Soja e.g. the species Pisum sativum, Pisum arvense, Pisum humile [pea], Albizia berteriana, Albizia julibrissin, Albizia lebbeck, Acacia berteriana, Acacia littoralis, Albizia berteriana, Albizzia berteriana, Cathormion berteriana, Feuillea berteriana, Inga fragrans, Pithecellobium berterianum, Pithecellobium fragrans, Pithecolobium berterianum, Pseudalbizzia berteriana, Acacia julibrissin, Acacia nemu, Albizia nemu, Feuilleea julibrissin, Mimosa julibrissin, Mimosa speciosa, Sericanrda julibrissin, Acacia lebbeck, Acacia macrophylla, Albizia lebbek, Feuilleea lebbeck, Mimosa lebbeck, Mimosa speciosa [bastard logwood, silk tree, East Indian Walnut], Medicago sativa, Medicago falcata, Medicago varia [alfalfa], Glycine max [soybean], Dolichos soja, Glycine gracilis, Glycine hispida, Phaseolus max or Soja hispida; Geraniaceae such as the genera Pelargonium, Cocos, Oleum e.g. the species Cocos nucifera, Pelargonium grossularioides or Oleum cocois [coconut]; Gramineae such as the genera Saccharum e.g. the species Saccharum officinarum; Juglandaceae such as the genera Juglans, Wallia e.g. the species Juglans regia, Juglans ailanthifolia, Juglans sieboldiana, Juglans cinerea, Wallia cinerea, Juglans bixbyi, Juglans californica, Juglans hindsii, Juglans intermedia, Juglans jamaicensis, Juglans major, Juglans microcarpa, Juglans nigra or Wallia nigra [walnut, black walnut, common walnut, persian walnut, white walnut, butternut, black walnut]; Lauraceae such as the genera Persea, Laurus e.g. the species laurel Laurus nobilis [bay, laurel, bay laurel, sweet bay], Persea americana Persea americana, Persea gratissima or Persea persea [avocado]; Leguminosae such as the genera Arachis e.g. the species Arachis hypogaea [peanut]; Linaceae such as the genera Linum, Adenolinum e.g. the species Linum usitatissimum, Linum humile, Linum austriacum, Linum bienne, Linum angustifolium, Linum catharticum, Linum flavum, Linum grandiflorum, Adenolinum grandiflorum, Linum lewisii, Linum narbonense, Linum perenne, Linum perenne var. lewisii, Linum pratense or Linum trigynum [flax, linseed]; Lythrarieae such as the genera Punica e.g. the species Punica granatum [pomegranate]; Malvaceae such as the genera Gossypium e.g. the species Gossypium hirsutum, Gossypium arboreum, Gossypium barbadense, Gossypium herbaceum or Gossypium thurberi [cotton]; Musaceae such as the genera Musa e.g. the species Musa nana, Musa acuminata, Musa paradisiaca, Musa spp. [banana]; Onagraceae such as the genera Camissonia, Oenothera e.g. the species Oenothera biennis or Camissonia brevipes [primrose, evening primrose]; Palmae such as the genera Elacis e.g. the species Elaeis guineensis [oil plam]; Papaveraceae such as the genera Papaver e.g. the species Papaver orientale, Papaver rhoeas, Papaver dubium [poppy, oriental poppy, corn poppy, field poppy, shirley poppies, field poppy, long-headed poppy, long-pod poppy]; Pedaliaceae such as the genera Sesamum e.g. the species Sesamum indicum [sesame]; Piperaceae such as the genera Piper, Artanthe, Peperomia, Steffensia e.g. the species Piper aduncum, Piper amalago, Piper angustifolium, Piper auritum, Piper betel, Piper cubeba, Piper longum, Piper nigrum, Piper retrofractum, Artanthe adunca, Artanthe elongata, Peperomia elongata, Piper elongatum, Steffensia elongata. [Cayenne pepper, wild pepper]; Poaceae such as the genera Hordeum, Secale, Avena, Sorghum, Andropogon, Holcus, Panicum, Oryza, Zea, Triticum e.g. the species Hordeum vulgare, Hordeum jubatum, Hordeum murinum, Hordeum secalinum, Hordeum distichon Hordeum aegiceras, Hordeum hexastichon., Hordeum hexastichum, Hordeum irregulare, Hordeum sativum, Hordeum secalinum [barley, pearl barley, foxtail barley, wall barley, meadow barley], Secale cereale [rye], Avena sativa, Avena fatua, Avena byzantina, Avena fatua var. sativa, Avena hybrida [oat], Sorghum bicolor, Sorghum halepense, Sorghum saccharatum, Sorghum vulgare, Andropogon drummondii, Holcus bicolor, Holcus sorghum, Sorghum aethiopicum, Sorghum arundinaceum, Sorghum caffrorum, Sorghum cernuum, Sorghum dochna, Sorghum drummondii, Sorghum durra, Sorghum guineense, Sorghum lanceolatum, Sorghum nervosum, Sorghum saccharatum, Sorghum subglabrescens, Sorghum verticilliflorum, Sorghum vulgare, Holcus halepensis, Sorghum miliaceum millet, Panicum militaceum [Sorghum, millet], Oryza sativa, Oryza latifolia [rice], Zea mays [corn, maize] Triticum aestivum, Triticum durum, Triticum turgidum, Triticum hybernum, Triticum macha, Triticum sativum or Triticum vulgare [wheat, bread wheat, common wheat], Proteaceae such as the genera Macadamia e.g. the species Macadamia intergrifolia [macadamia]; Rubiaceae such as the genera Coffea e.g. the species Cofea spp., Coffea arabica, Coffea canephora or Coffea liberica [coffee]; Scrophulariaceae such as the genera Verbascum e.g. the species Verbascum blattaria, Verbascum chaixii, Verbascum densiflorum, Verbascum lagurus, Verbascum longifolium, Verbascum lychnitis, Verbascum nigrum, Verbascum olympicum, Verbascum phlomoides, Verbascum phoenicum, Verbascum pulverulentum or Verbascum thapsus [mullein, white moth mullein, nettle-leaved mullein, dense-flowered mullein, silver mullein, long-leaved mullein, white mullein, dark mullein, greek mullein, orange mullein, purple mullein, hoary mullein, great mullein]; Solanaceae such as the genera Capsicum, Nicotiana, Solanum, Lycopersicon e.g. the species Capsicum annuum, Capsicum annuum var. glabriusculum, Capsicum frutescens [pepper], Capsicum annuum [paprika], Nicotiana tabacum, Nicotiana alata, Nicotiana attenuata, Nicotiana glauca, Nicotiana langsdorffii, Nicotiana obtusifolia, Nicotiana quadrivalvis, Nicotiana repanda, Nicotiana rustica, Nicotiana sylvestris [tobacco], Solanum tuberosum [potato], Solanum melongena [egg-plant] (Lycopersicon esculentum, Lycopersicon lycopersicum, Lycopersicon pyriforme, Solanum integrifolium or Solanum lycopersicum [tomato]; Sterculiaceae such as the genera Theobroma e.g. the species Theobroma cacao [cacao]; Theaceae such as the genera Camellia e.g. the species Camellia sinensis) [tea].

[50934] In another embodiment of the invention the transgenic non-human organism is a transgenic microorganism like selected from the group consisting of Charophyceae such as the genera Chara, Nitella e.g. the species Chara globularis, Chara vulgaris, Nitella flexilis, Chlorophyceae such as the genera Acrosiphonia, Spongomorpha, Urospora, Bryopsis, Pseudobryopsis, Trichosolen, Dichotomosiphon, Caulerpa, Rhipilia, Blastophysa, Avrainvillea, Chlorodesmis, Codium, Espera, Halicystis, Halimeda, Penicillus, Pseudocodium, Rhipiliopsis, Rhipocephalus, Tydemania, Udotea, Derbesia, Acrochaete, Aphanochaete, Bolbocoleon, Chaetobolus, Chaetonema, Chaetophora, Chlorotylium, Desmococcus, Draparnaldia, Draparnaldiopsis, Ectochaete, Endophyton, Entocladia, Epicladia, Internoretia, Microthamnion, Ochlochaete, Phaeophila, Pilinella, Pringsheimiella, Protoderma, Pseudendoclonium, Pseudodictyon, Pseudopringsheimia, Pseudulvella, Schizomeris, Stigeoclonium, Thamniochaete, Ulvella, Pilinia, Tellamia, Helicodictyon, Actidesmium, Ankyra, Characium, Codiolum, Sykidion, Keratococcus, Prototheca, Bracteacoccus Chlorococcum, Excentrosphaera, Hormidium, Oophila, Schroederia, Tetraedron, Trebouxia Chlorosarcinopsis, Gomphonitzschia, Coccomyxa, Dactylothece, Diógenes, Disporá, Gloeocystis, Mycanthococcus, Ourococcus, Coelastrum, Dicranochaete, Botryococcus, Dictyosphaerium, Dimorphococcus, Chlorochytrium, Kentrosphaera, Phyllobium, Gomontia, Hormotila, Euastropsis, Hydrodictyon, Pectodictyon, Pediastrum, Sorastrum, Tetrapedia, Acanthosphaera, Echinosphaerella, Echinosphaeridium, Errerella, Gloeoactinium, Golenkeniopsis Golenkinia, Micractinium, Ankistrodesmus, Chlorella, Chodatella, Closteriopsis, Cryocystis, Dactylococcus, Dematractum, Eremosphaera, Eutetramorus, Franceia, Glaucocystis, Gloeotaenium, Kirchneriella, Lagerheimiella, Monoraphidium, Nannochloris, Nephrochlamys, Nephrocytium, Oocystis, Oonephris, Pachycladon, Palmellococcus, Planktosphaeria, Polyedriopsis, Pseudoraciborskia, Quadrigula, Radiococcus, Rochiscia, Scotiella, Selanastrum, Thorakochloris, Treubaria, Trochiscia, Westella, Zoochlorella, Ostreobium, Phyllosiphon, Protosiphon, Rhodochytrium, Actinastrum, Coronastrum, Crucigenia, Dictymocystis, Enallax, Scenedesmus, Selenastrum, Tetradesmus, Tetrallantos, Tetrastrum, Chlorosarcina, Anadyomene, Valoniopsis, Ventricaria, Basicladia, Chaetomorpha, Cladophora, Lola Pithophora Rhizoclonium Chaetosphaeridium, Conochaete, Coleochaete, Oligochaetophora, Polychaetophora, Cylindrocapsa, Gongrosira, Protococcus, Acetabularia, Batophora, Bornetella, Dasycladus, Halicoryne, Neomeris, Elakatothrix, Raphidonema, Microspora, Bulbochaete, Oedocladium, Oedogonium, Prasiola, Rosenvingiella, Schizogonium, Apjohnia, Chamaedoris, Cladophoropsis, Siphonocladus, Spongocladia, Boergesenia, Boodlea, Cystodictyon, Dictyosphaeria, Ernodesmis, Microdictyon, Struvea, Valonia, Sphaeroplea, Malleochloris, Stylosphaeridium, Gloeococcus, Palmella, Palmodictyon, Palmophyllum, Pseudospherocystis, Sphaerocystis, Urococcus, Apiocystis, Chaetopeltis, Gemellicystis, Paulschulzia, Phacomyxa, Pseudotetraspora, Schizochlamys, Tetraspora, Cephaleuros, Ctenocladus, Epibolium, Leptosira, Trentepohlia, Diplochaete, Monostroma, Binuclearia, Geminella, Klebsormidium, Planetonema, Radiofilum, Stichococcus, Ulothrix, Uronema, Blidingia, Capsosiphon, Chloropelta, Enteromorpha, Percursaria, Ulva, Ulvaria, Brachiomonas, Carteria, Chlainomonas, Chlamydomonas, Chlamydonephris, Chlorangium, Chlorogonium, Cyanidium, Fortiella, Glenomonas, Gloeomonas, Hyalogonium, Lobomonas Polytoma, Pyramichlamys, Scourfieldia, Smithsonimonas, Sphaerellopsis, Sphenochloris, Spirogonium, Collodictyon, Dunaliella, Haematococcus, Stephanosphaera, Coccomonas, Dysmorphococcus, Phacotus, Pteromonas, Thoracomonas, Wislouchiella, Mascherina, Pyrobotrys, Spondylomorum, Eudorina, Gonium, Oltmannsiella, Pandorina, Platydorina, Pleodorina, Stephanoon, Volvox, Volvulina, Actinotaenium, Arthrodesmus, Bambusina Closterium, Cosmarium, Desmidium, Euastrum, Groenbladia, Hyalotheca, Micrasterias, Penium, Phymatodocis, Pleurotaenium, Sphaerozosma, Spinoclosterium, Spinocosmarium, Spondylosium, Staurastrum, Tetmemorus, Triploceras, Xanthidium, Cylindrocystis, Genicularia, Gonatozygon, Mesotaenium, Netrium, Roya, Spirotaenia, Cosmocladium, Debarya, Docidium, Euastridium, Hallasia, Mougeotia, Mougeotiopsis, Sirogonium, Spirogyra, Staurodesmus, Teilingia, Zygnema, Zygogonium, e.g. the species Caulerpa taxifolia, Prototheca wickerhamii, Ankistrodesmus falcatus, Chlorella ellipsoidea, Chlorella pyrenoidosa, Clorella sorokiniana, Chlorella vulgaris, Scenedesmus obliquus, Scenedesmus quadricauda, Selenastrum capricornutum, Selenastrum undecimnotata, Cladophora glomerata, Chlamydomonas eugametos, Chlamydomonas reinhardtii, Cyanidium caldarium, Dunaliella salina, Dunaliella tertiolecta, Euglena gracilis, Haematococcus pluvialis, Coniugatophyceae, Prasinophyceae Trebouxiophyceae, Ulvophyceae, Chlorodendraceae, Pedinomonadales, Halosphaeraceae, Pterospermataceae, Monomastigaceae, Pyramimonadaceae, Chlorodendraceae such as the genera Prasinocladus e.g. the species Prasinocladus ascus, Halosphaeraceae, Pedinomonadales, Pedinomonadaceae such as the genera Pedinomonas, Pterospermataceae such as the genera Pachysphaera, Pterosperma, Halosphaera, Pyramimonas, Bacillariophyceae, Chrysophyceae, Craspedophyceae, Euglenophyceae, Prymnesiophyceae, Phaeophyceae, Dinophyceae, Rhodophyceae, Xanthophyceae, Prasinophyceae such as the genera Nephroselmis, Prasinococcus, Scherffelia, Tetraselmis, Mantoniella, Ostreococcus e.g. the species Nephroselmis olivacea, Prasinococcus capsulatus, Scherffelia dubia, Tetraselmis chui, Tetraselmis suecica, Mantoniella squamata or Ostreococcus tauri.

[50935] Other useful organism are prokaryotic host organism, which may be useful for the cloning of the desired nucleic acid constructs or vectors such as the genera Escherichia, for example the species Escherichia coli, in particular E. coli K12 and its described strains or Agrobacterium, for example Agrobacterium tumefaciens.

[50936] The introduction of the nucleic acids according to the invention, the expression cassette or the vector into the non-human organism, like a microorganism or a plant, can in principle be done by all of the methods known to those skilled in the art. The introduction of the nucleic acid sequences gives rise to recombinant or transgenic organisms.

[50937] After the introduction of the nucleic acid, nucleic acid construct, expression cassette or vector, and the expression thereof the transgenic organism or cell is advantageously cultured and subsequently harvested.

[50938] Unless otherwise specified, the terms “polynucleotides”, “nucleic acid” and “nucleic acid molecule” as used herein are interchangeably. Unless otherwise specified, the terms “peptide”, “polypeptide” and “protein” are interchangeably in the present context. The term “sequence” may relate to polynucleotides, nucleic acids, nucleic acid molecules, peptides, polypeptides and proteins, depending on the context in which the term “sequence” is used. The terms “gene(s)”, “polynucleotide”, “nucleic acid sequence”, “nucleotide sequence”, or “nucleic acid molecule(s)” as used herein refers to a polymeric form of nucleotides of any length, either ribonucleotides or deoxyribonucleotides. The terms refer only to the primary structure of the molecule.

[50939] Thus, the terms “gene(s)”, “polynucleotide”, “nucleic acid sequence”, “nucleotide sequence”, or “nucleic acid molecule(s)” as used herein include double- and single-stranded DNA and RNA. They also include known types of modifications, for example, methylation, “caps”, substitutions of one or more of the naturally occurring nucleotides with an analog. Preferably, the DNA or RNA sequence of the invention comprises a coding sequence encoding the herein defined polypeptide.

[50940] The genes of the invention, coding for an activity selected from the group consisting of 3-ketoacyl-CoA thiolase, 3-oxoacyl-[acyl-carrier-protein] synthase, AAS bifunctional protein, ABC transporter permease protein, acid shock protein, aconitate hydratase, arginine decarboxylase, aromatic acid decarboxylase, aspartate-semialdehyde dehydrogenase, At1g19800-protein, At2g45420-protein, ATPase epsilon subunit, b0801-protein, b1330-protein, b1470-protein, b1670-protein, b1837-protein, b2032-protein, b2099-protein, b2107-protein, b2399-protein, b2474-protein, b2613-protein, b2682-protein, b2849-protein, b2909-protein, beta-hydroxylase, carbamoyl-phosphate synthase subunit, cation-transporting ATPase, CCAAT-binding transcription factor, chlorophyllase, colanic acid biosynthesis protein, coproporphyrinogen III oxidase, CTP synthetase, DnaJ-like chaperone, electron transport complex protein, ethanolamine utilization protein, fatty acid desaturase, Fe—S subunit of oxidoreductase, flavodoxin, fumarate hydratase, gamma-glutamyltranspeptidase, glucose-6-phosphate 1-dehydrogenase, glutaredoxin, glycin cleavage system protein, GM02LC38418-protein, heat shock transcription factor, hydrolase, lipoprotein precursor, membrane transport protein, metal-dependent hydrolase, molecular chaperone, monothiol glutaredoxin, multiple antibiotic resistance protein, outer membrane receptor protein precursor, oxidoreductase, phosphate import ATP-binding protein, phosphoribosylformyl glycinamidine synthase subunit, phosphotriesterase, protein kinase, protein phosphatase, pyruvate kinase, recombinase A, sll1032-protein, sn-glycerol-3-phosphate transport system permease protein, ThiF family protein, threonine dehydratase, threonine efflux protein, transcription factor, transcriptional regulator protein, tryptophan synthase alpha chain, TTC0490-protein, xanthine dehydrogenase, ydr507c-protein, and YGR104C-protein are also called “FCRP genes”.

[50941] A “coding sequence” is a nucleotide sequence, which is transcribed into mRNA and/or translated into a polypeptide when placed under the control of appropriate regulatory sequences. The boundaries of the coding sequence are determined by a translation start codon at the 5′-terminus and a translation stop codon at the 3′-terminus. The triplets taa, tga and tag represent the (usual) stop codons which are interchangeable. A coding sequence can include, but is not limited to mRNA, cDNA, recombinant nucleotide sequences or genomic DNA, while introns may be present as well under certain circumstances.

[50942] To introduce a nucleic acid molecule into a nucleic acid construct, e.g. as part of an expression cassette, the codogenic gene segment is advantageously subjected to an amplification and ligation reaction in the manner known by a skilled person. It is preferred to follow a procedure similar to the protocol for the Pfu DNA polymerase or a Pfu/Taq DNA polymerase mixture. The primers are selected according to the sequence to be amplified. The primers should expediently be chosen in such a way that the amplificate comprise the codogenic sequence from the start to the stop codon. After the amplification, the amplificate is expediently analyzed. For example, the analysis may consider quality and quantity and be carried out following separation by gel electrophoresis. Thereafter, the amplificate can be purified following a standard protocol (for example Qiagen). An aliquot of the purified amplificate is then available for the subsequent cloning step. The skilled worker generally knows suitable cloning vectors.

[50943] They include, in particular, vectors which are capable of replication in easy to handle cloning systems like as bacterial, yeast or insect cell based (e.g. baculovirus expression) systems, that is to say especially vectors which ensure efficient cloning in E. coli, and which make possible the stable transformation of plants. Vectors, which must be mentioned, in particular are various binary and cointegrated vector systems, which are suitable for the T-DNA-mediated transformation. Such vector systems are generally characterized in that they contain at least the vir genes, which are required for the Agrobacterium-mediated transformation, and the T-DNA border sequences.

[50944] In general, vector systems preferably also comprise further cisregulatory regions such as promoters and terminators and/or selection markers by means of which suitably transformed organisms can be identified. While vir genes and T-DNA sequences are located on the same vector in the case of cointegrated vector systems, binary systems are based on at least two vectors, one of which bears vir genes, but no T-DNA, while a second one bears T-DNA, but no vir gene. Owing to this fact, the last-mentioned vectors are relatively small, easy to manipulate and capable of replication in E. coli and in Agrobacterium. These binary vectors include vectors from the series pBIB-HYG, pPZP, pBecks, pGreen. Those which are preferably used in accordance with the invention are Bin19, pBI101, pBinAR, pGPTV and pCAMBIA. An overview of binary vectors and their use is given by Hellens et al, Trends in Plant Science 5, 446-451 (2000). In case of a targeted expression the vectors are preferably modified in such a manner, that they already contain the nucleic acid coding for the transit peptide and that the nuleic acids of the invention, preferentially the nucleic acid sequences encoding the polypeptides shown in the respective line in Table II, column 5 or 8, or a homolog or a fragment thereof, can be cloned 3″prime to the transit peptide encoding sequence, leading to a functional preprotein, which is directed to the intended compartment, like plastids or mitochondria, and which means that the mature protein fulfills its biological activity.

[50945] For a vector preparation, vectors may first be linearized using restriction endonuclease(s) and then be modified enzymatically in a suitable manner. Thereafter, the vector is purified, and an aliquot is employed in the cloning step. In the cloning step, the enzymecleaved and, if required, purified amplificate is cloned together with similarly prepared vector fragments, using ligase. In this context, a specific nucleic acid construct, or vector or plasmid construct, may have one or else more codogenic gene segments. The codogenic gene segments in these constructs are preferably linked operably to regulatory sequences. The regulatory sequences include, in particular, plant sequences like the above-described promoters and terminators. The constructs can advantageously be propagated stably in microorganisms, in particular Escherichia coli and/or Agrobacterium tumefaciens, under selective conditions and enable the transfer of homologous or heterologous DNA into non-human organisms, like plants or other microorganisms. In accordance with a particular embodiment, the constructs are based on binary vectors (overview of a binary vector: Hellens et al., 2000). As a rule, they contain prokaryotic regulatory sequences, such as replication origin and selection markers, for the multiplication in microorganisms such as Escherichia coli and Agrobacterium tumefaciens. Vectors can further contain agrobacterial T-DNA sequences for the transfer of DNA into plant genomes or other eukaryotic regulatory sequences for transfer into other eukaryotic cells, e.g. Saccharomyces sp. or other prokaryotic regulatory sequences for the transfer into other prokaryotic cells, e.g. Corynebacterium sp. or Bacillus sp. For the transformation of plants, the right border sequence, which comprises approximately 25 base pairs, of the total agrobacterial T-DNA sequence is advantageously included. Usually, the plant transformation vector constructs according to the invention contain T-DNA sequences both from the right and from the left border region, which contain expedient recognition sites for site-specific acting enzymes, which, in turn, are encoded by some of the vir genes.

[50946] Alternatively the nuleic acids of the invention are cloned into vectors, which are designed for the direct transformation of organelles such as for example plastids. Generally such vectors additionally carry a specific resistance gene (as mentioned above), like the spectomycin resistance gene (aad) under control of a plastid regulatory sequence and two adjacent plastome sequences of the target organism, which mediated the directed insertion of the sequences of interest, e.g. the resistance gene and the expression cassette, into the plastidal genome through homologous recombination. As transformation can be achieved by particle bombardment or other physical or chemical methods e.g. PEG treatment or microinjection, the vectors do not need to contain the elements necessary for agrobacterial T-DNA transfer (see below).

[50947] In order to introduce, into a plant, the nucleic acid molecule of the invention or used in the process according to the invention, it has proved advantageous first to transfer them into an intermediate host, for example a bacterium or a eukaryotic unicellular cell. The transformation into E. coli, which can be carried out in a manner known per se, for example by means of heat shock or electroporation, has proved itself expedient in this context. Thus, the transformed E. coli colonies can be analyzed for their cloning efficiency. This can be carried out with the aid of a PCR. Here, not only the identity, but also the integrity, of the plasmid construct can be verified with the aid of a defined colony number by subjecting an aliquot of the colonies to said PCR. As a rule, universal primers which are derived from vector sequences are used for this purpose, it being possible, for example, for a forward primer to be arranged upstream of the start ATG and a reverse primer to be arranged downstream of the stop codon of the codogenic gene segment. The amplificates are separated by electrophoresis and assessed with regard to quantity and quality.

[50948] The nucleic acid constructs, which are optionally verified, are subsequently used for the transformation of the plants or other hosts, e.g. other eukaryotic cells or other prokaryotic cells. To this end, it may first be necessary to obtain the constructs from the intermediate host. For example, the constructs may be obtained as plasmids from bacterial hosts by a method similar to conventional plasmid isolation.

[50949] The nucleic acid molecule of the invention or used in the process according to the invention can also be introduced into modified viral vectors like baculovirus vectors for expression in insect cells or plant viral vectors like tobacco mosaic virus or potato virus X-based vectors. Approaches leading to the expression of proteins from the modified viral genome including the nucleic acid molecule of the invention or used in the process according to the invention involve for example the inoculation of tobacco plants with infectious RNA transcribed in vitro from a cDNA copy of the recombinant viral genome. Another approach utilizes the transfection of whole plants from wounds inoculated with Agrobacterium tumefaciens containing cDNA copies of recombinant plus-sense RNA viruses. Different vectors and virus are known to the skilled worker for expression in different target e.g. production plants.

[50950] A large number of methods for the transformation of plants are known. Since, in accordance with the invention, a stable integration of heterologous or additional homologous DNA into the genome of plants is advantageous, the T-DNA-mediated transformation has proved expedient in particular. For this purpose, it is first necessary to transform suitable vehicles, in particular agrobacteria, with a codogenic gene segment or the corresponding plasmid construct comprising the nucleic acid molecule of the invention or an expression cassette according to the invention. This can be carried out in a manner known per se. For example, said nucleic acid construct of the invention, like said expression cassette or said plasmid construct, which has been generated in accordance with what has been detailed above, can be transformed into competent agrobacteria by means of electroporation or heat shock. In principle, one must differentiate between the formation of cointegrated vectors on the one hand and the transformation with binary vectors on the other hand. In the case of the first alternative, the constructs, which comprise the codogenic gene segment or the nucleic acid molecule of the invention have no T-DNA sequences, but the formation of the cointegrated vectors or constructs takes place in the agrobacteria by homologous recombination of the construct with T-DNA. The T-DNA is present in the agrobacteria in the form of Ti or Ri plasmids in which exogenous DNA has expediently replaced the oncogenes. If binary vectors are used, they can be transferred to agrobacteria either by bacterial conjugation or by direct transfer. These agrobacteria expediently already comprise the vector bearing the vir genes (currently referred to as helper Ti (Ri) plasmid). As mentioned before the stable integration of the heterologous (or additional homologous) nucleic acids into the plastidial genome may also be advantageously.

[50951] One or more markers may expediently also be used together with the nucleic acid construct, like the expression cassette, or the vector of the invention and, if plants or plant cells shall be transformed together with the T-DNA, with the aid of which the isolation or selection of transformed organisms, such as agrobacteria or transformed plant cells, is possible. These marker genes enable the identification of a successful transfer of the nucleic acid molecules according to the invention via a series of different principles, for example via visual identification with the aid of fluorescence, luminescence or in the wavelength range of light which is discernible for the human eye, by a resistance to herbicides or antibiotics, via what are known as nutritive markers (auxotrophism markers) or antinutritive markers, via enzyme assays or via phytohormones. Examples of such markers which may be mentioned are GFP (=green fluorescent protein); the luciferin/luceferase system, the [3-galactosidase with its colored substrates, for example X-Gal, the herbicide resistances to, for example, imidazolinone, glyphosate, phosphinothricin or sulfonylurea, the antibiotic resistances to, for example, bleomycin, hygromycin, streptomycin, kanamycin, tetracyclin, chloramphenicol, ampicillin, gentamycin, geneticin (G418), spectinomycin or blasticidin, to mention only a few, nutritive markers such as the utilization of mannose or xylose, or antinutritive markers such as the resistance to 2-deoxyglucose. This list is a small number of possible markers. The skilled worker is very familiar with such markers. Different markers are preferred, depending on the organism and the selection method. In case of plastidal transformation methods other marker genes known to a person skilled in the art may be used, but also the ones mentioned above, preferably e.g. the spectomycin resistance gene (aadA).

[50952] As a rule, it is desired that the plant nucleic acid constructs, plant expression cassettes, are flanked by T-DNA at one or both sides of the codogenic gene segment. This is particularly useful when bacteria of the species Agrobacterium tumefaciens or Agrobacterium rhizogenes are used for the transformation. A method, which is preferred in accordance with the invention, is the transformation with the aid of Agrobacterium tumefaciens. However, biolistic methods may also be used advantageously for introducing the sequences in the process according to the invention, and the introduction by means of PEG is also possible. The transformed agrobacteria can be grown in the manner known per se and are thus available for the expedient transformation of the plants. The plants or plant parts to be transformed are grown or provided in the customary manner. The transformed agrobacteria are subsequently allowed to act on the plants or plant parts until a sufficient transformation rate is reached. Allowing the agrobacteria to act on the plants or plant parts can take different forms. For example, a culture of morphogenic plant cells or tissue may be used. After the T-DNA transfer, the bacteria are, as a rule, eliminated by antibiotics, and the regeneration of plant tissue is induced. This is done in particular using suitable plant hormones in order to initially induce callus formation and then to promote shoot development.

[50953] Plant cells, plant tissues etc. may be transformed transient or stable. An advantageous transformation method is the transformation in planta. To this end, it is possible, for example, to allow the agrobacteria to act on plant seeds or to inoculate the plant meristem with agrobacteria. It has proved particularly expedient in accordance with the invention to allow a suspension of transformed agrobacteria to act on the intact plant or at least the flower primordia. The plant is subsequently grown on until the seeds of the treated plant are obtained (Clough and Bent, Plant J. 16, 735 (1998)). To select transformed plants, the plant material obtained in the transformation is, as a rule, subjected to selective conditions so that transformed plants can be distinguished from untransformed plants. For example, the seeds obtained in the above-described manner can be planted and, after an initial growing period, subjected to a suitable selection by spraying. A further possibility consists in growing the seeds, if appropriate after sterilization, on agar plates using a suitable selection agent so that only the transformed seeds can grow into plants. Further advantageous transformation methods, in particular for plants, are known to the skilled worker and are described herein.

[50954] Further advantageous and suitable methods are protoplast transformation by poly(ethylene glycol)-induced DNA uptake, the “biolistic” method using the gene cannon—referred to as the particle bombardment method, electroporation, the incubation of dry embryos in DNA solution, microinjection and gene transfer mediated by Agrobacterium. Said methods are described by way of example in Jenes B. et al., Techniques for Gene Transfer, in: Transgenic Plants, Vol. 1, Engineering and Utilization, eds. Kung S. D. and Wu R., Academic Press (1993) 128-143 and in Potrykus, Annu. Rev. Plant Physiol. Plant Molec. Biol. 42, 205 (1991)). The nucleic acids or the construct, e.g. the expression cassette, to be expressed is preferably cloned into a vector, which is suitable for transforming Agrobacterium tumefaciens, for example pBin19 (Bevan et al., Nucl. Acids Res. 12, 8711 (1984)). Agrobacteria transformed by an expression vector according to the invention may likewise be used in known manner for the transformation of plants such as test plants like Arabidopsis or crop plants such as cereal crops, corn, oats, rye, barley, wheat, soybean, rice, cotton, sugar beet, canola, sunflower, flax, hemp, potatoes, tobacco, tomatoes, carrots, paprika, oilseed rape, tapioca, cassava, arrowroot, tagetes, alfalfa, lettuce and the various tree, nut and vine species, in particular oil-containing crop plants such as soybean, peanut, castor oil plant, sunflower, corn, cotton, flax, oilseed rape, coconut, oil palm, safflower (Carthamus tinctorius) or cocoa bean, or in particular corn, wheat, soybean, rice, cotton and canola, e.g. by bathing bruised leaves or chopped leaves in an agrobacterial solution and then culturing them in suitable media. The transformation of plants by means of Agrobacterium tumefaciens is described, for example, by Höfgen and Willmitzer in Nucl. Acid Res. 16, 9877 (1988) or is known inter alia from White F. F., “Vectors for Gene Transfer in Higher Plants”; in Transgenic Plants, Vol. 1, Engineering and Utilization, eds. Kung S. D. and Wu R., Academic Press, 1993, pp. 15-38. For the transformation of plastids physical methods like PEG-treatment (O'Neil et al., Plant Journal. 3, 729 (1993), Golds et al., BioTechnology 11, 95 (1993)), microinjection (Knoblauch et al., Nat. Biotech. 17, 906 (1999)) or biolistics (Svab et al., Proc. Natl. Acad. Sci. USA 90, 8526 (1990)) are preferred. Such transformation methods are especially useful for the direct transformation of plastids and are well known to the skilled worker.

[50955] The expression of the nucleic acid molecules used in the process according the present invention may be desired alone or in combination with other genes or nucleic acid molecules. Multiple nucleic acid molecules conferring the expression of advantageous genes can be introduced via the simultaneous transformation of several individual suitable nucleic acid constructs, i.e. expression constructs, or, preferably, by combining several expression cassettes on one construct. It is also possible to transform the recipient non-human organisms stepwise with several vectors which in each case comprises a single expression cassette or several expression cassettes.

[50956] In addition to the sequence mentioned in Table I, application no. 8, column 5 or 8, preferably the coding region thereof, or its homologs or fragments, it may be advantageous additionally to express and/or mutate further genes in the non-human organisms. Especially advantageously, additionally at least one further gene of the biosynthetic pathway of the fine chemical is expressed in the non-human organisms such as plants or microorganisms. It is also possible that the regulation of the natural genes has been modified advantageously so that the gene and/or its gene product is no longer subject to the regulatory mechanisms which exist in the non-human organisms. This leads to an increased synthesis of the respective fatty acid since, for example, feedback regulations no longer exist to the same extent or not at all. In addition it might be advantageously to combine the nucleic acids sequences of the invention containing the sequences shown in the respective line in Table I, application no. 8, column 5 or 8, preferably the coding region thereof, or homologs or fragments thereof, with genes which generally support or enhance the growth or yield of the target non-human organisms, for example genes which lead to faster growth rate of non human organism like microorganisms or plants or genes which produce stress-, pathogen-, or herbicide-resistant plants.

[50957] In a further embodiment of the process of the invention, non-human organisms are grown, in which there is in addition to the expression of the nucleic acid molecule according to the invention simultaneous expression of at least one nucleic acid molecule or one of the genes which code for proteins involved in the fatty acid metabolism, in particular in fatty acid synthesis, especially genes coding for proteins selected from the group of acyl-CoA dehydrogenase(s), acyl-ACP [=acyl carrier protein] desaturase(s), acyl-ACP thioesterase(s), fatty acid acyltransferase(s), acyl- CoA: lysophospholipid acyltransferases, fatty acid synthase(s) , fatty acid hydroxylase(s), acetyl-coenzyme A carboxylase(s), acyl-coenzyme A oxidase(s), fatty acid desaturase(s), fatty acid acetylenases, lipoxygenases, triacylglycerol lipases, allene oxide synthases, hydroperoxide lyases or fatty acid elongase(s), Δ4-desaturases, Δ5-desaturases, Δ6-desaturases, Δ8-desaturases, Δ9-desaturases, Δ12-desaturases, Δ15-desaturases, Δ12- and Δ15-desaturases, ω-3-desaturases, Δ6-elongases, Δ9-elongases or Δ5-elongases in the cytosol or in an organelle, like plastids or mitochondria.

[50958] In a further advantageous embodiment of the process of the invention, the non-human organisms used in the process are those in which simultaneously in addition a fine chemical degrading protein is attenuated, in particular by reducing the rate of expression of the corresponding gene.

[50959] In another embodiment of the process of the invention, the non-human organisms used in the process are those in which simultaneously in addition at least one of the aforementioned nucleic acids or of the aforementioned genes is mutated in such a way that the enzymatic or biological activity of the corresponding fine chemical degrading protein is partially reduced or completely blocked. A reduction in the enzymatic or biological activity means an enzymatic or biological activity, which is reduced by at least 10%, advantageously at least 20%, 30%, 40%, 50%, 60%, 70% or more, compared with the starting organism.

[50960] If it is intended to transform the host cell, in particular the plant cell, with several constructs, expression cassettes or vectors, the marker of a preceding transformation must be removed or a further marker employed in a following transformation. The markers can be removed from the host cell, in particular the plant cell, as described herein below via methods with which the skilled worker is familiar. These methods may be not used for multiple transformed host cell only but also for single transformed host cells. In particular plants without a marker, in particular without resistance to antibiotics, are an especially preferred embodiment of the present invention.

[50961] In the process according to the invention, the nucleic acid molecules used in the process according to the invention are advantageously linked operably to one or more regulatory signals in order to increase gene expression. These regulatory sequences are intended to enable the specific expression of the genes and the expression of protein. Depending on the host organism for example plant or microorganism, this may mean, for example, that the gene is expressed and/or overexpressed after induction only, or that it is expressed and/or overexpressed constitutively. These regulatory sequences are, for example, sequences to which the inductors or repressors bind and which thus regulate the expression of the nucleic acid. In addition to these novel regulatory sequences, or instead of these sequences, the natural regulation of these sequences may still be present before the actual structural genes and, if appropriate, may have been genetically modified so that the natural regulation has been switched off and gene expression has been increased. However, the nucleic acid construct of the invention suitable as expression cassette (=expression construct=gene construct) can also be simpler in construction, that is to say no additional regulatory signals have been inserted before the nu oleic acid molecule or the homolog or fragment thereof, and the natural promoter together with its regulation has not been removed. Instead, the natural regulatory sequence has been mutated in such a way that regulation no longer takes place and/or gene expression is increased. These modified promoters can also be introduced on their own before the natural gene in the form of part sequences (=promoter with parts of the nucleic acid sequences according to the invention) in order to increase the activity. Moreover, the gene construct can advantageously also comprise one or more of what are known as enhancer sequences in operable linkage with the promoter, and these enable an increased expression of the nucleic acid sequence. Also, it is possible to insert additional advantageous sequences at the 3′ end of the DNA sequences, such as, for example, further regulatory elements or terminators. In another preferred embodiment, the natural or created expression cassette is further modified in such a manner, that a nucleic acid sequence encoding a transit peptide is functionally introduced between the regulatory and the coding region such, that a functionally preprotein is expressed, which is targeted to the organelles such as plastids or mitochondria, preferably the plastids.

[50962] The nucleic acid molecules, which encode proteins according to the invention and nucleic acid molecules, which encode other polypeptides may be present in one nucleic acid construct, expression cassette or vector or in respective several ones. Advantageously, only one copy of the nucleic acid molecule of the invention or its encoding genes is present in the nucleic acid construct, expression cassette or vector. Several vectors, nucleic acid construct, or expression cassettes can be expressed together in the host organism. The nucleic acid molecule, the nucleic acid construct or the expression cassette according to the invention can be inserted in a vector and be present in the cell in a free form. If a stable transformation is preferred, a vector is used, which is stably duplicated over several generations or which is else inserted into the genome. In the case of plants, integration into the genome of e.g. plastids or mitochondria or, in particular, into the nuclear genome may have taken place. For the insertion of more than one gene in the host genome the genes to be expressed are present together in one gene construct, for example in above-described vectors bearing a plurality of genes.

[50963] As a rule, regulatory sequences for the expression rate of a gene are located upstream (5′), within, and/or downstream (3′) relative to the coding sequence of the nucleic acid molecule of the invention or another codogenic gene segment. They control in particular transcription and/or translation and/or the transcript stability. The expression level is dependent on the conjunction of further cellular regulatory systems, such as the protein biosynthesis and degradation systems of the cell.

[50964] Regulatory sequences include transcription and translation regulating sequences or signals, e.g. sequences located upstream (5′), which concern in particular the regulation of transcription or translation initiation, such as promoters or start codons, and sequences located downstream (3′), which concern in particular the regulation of transcription or translation termination and transcript stability, such as polyadenylation signals or stop codons. Regulatory sequences can also be present in transcribed coding regions as well in transcribed non-coding regions, e.g. in introns, as for example splicing sites, promoters for the regulation of expression of the nucleic acid molecule according to the invention in a cell and which can be employed are, in principle, all those which are capable of stimulating the transcription of genes in the organisms in question, such as microorganisms or plants. Suitable promoters, which are functional in these non-human organisms are generally known. They may take the form of constitutive or inducible promoters. Suitable promoters can enable the development- and/or tissue-specific expression in multi-cell eukaryotes; thus, leaf-, root-, flower-, seed-, stomata-, tuber-, fruit- or pollen-specific promoters may advantageously be used in plants. Furthermore in case of direct transformation of organelles such as plastids, promoters recognized by the plastid RNA-polymerases such as the plastid encoded Escherichia coli-like RNA polymerase or the nuclear encoded plastid RNA polymerase may advantageously be used.

[50965] The regulatory sequences or factors can, as described above, have a positive effect on, the expression of the genes introduced, thus increasing their expression. Thus, an enhancement of the expression can advantageously take place at the transcriptional level by using strong transcription signals such as strong promoters and/or strong enhancers. In addition, enhancement of expression on the translational level is also possible, for example by introducing translation enhancer sequences, e.g., the omega-enhancer e.g. improving the ribosomal binding to the transcript, or by increasing the stability of the mRNA, e.g. by replacing the 3′UTR coding region by a region encoding a 3′UTR known as conferring an high stability of the transcript or by stabilization of the transcript through the elimination of transcript instability, so that the mRNA molecule is translated more often than the wild type. For example in plants AU-rich elements (AREs) and DST (downstream) elements destabilized transcripts. Mutagenesis studies have demonstrated that residues within two of the conserved domains, the ATAGAT and the GTA regions, are necessary for instability function. Therefore removal or mutation of such elements would obviously lead to more stable transcripts, higher transcript rates and higher protein activity. Translation enhancers are also the “overdrive sequence”, which comprises the tobacco mosaic virus 5′-untranslated leader sequence and which increases the protein/RNA ratio (Gallie et al., Nucl. Acids Research 15, 8693 (1987)).

[50966] Enhancers are generally defined as cis active elements, which can stimulate gene transcription independent of position and orientation. Different enhancers have been identified in plants, which can either stimulate transcription constitutively or tissue or stimuli specific. Well known examples for constitutive enhancers are the enhancer from the 35S promoter (Odell et al., Nature 313, 810 (1985)) or the ocs enhancer (Fromm et al., Plant Cell 1, 977 (1989)). Other examples are the G-Box motif tetramer which confers high-level constitutive expression in dicotyledonous and monocotyledonous plants (Ishige et al., Plant Journal 18, 443 (1999)) or the petE, a NT-rich sequence which act as quantitative enhancers of gene expression in transgenic tobacco and potato plants (Sandhu et al., Plant Mol Biol. 37 (5), 885 (1998)). Beside that, a large variety of cis-active elements have been described which contribute to specific expression pattern, like organ specific expression or induced expression in response to biotic or abiotic stress. Examples are elements, which provide pathogen or wound-induced expression (Rushton, Plant Cell 14, 749 (2002)) or guard cell-specific expression (Plesch, Plant Journal 28, 455 (2001)).

[50967] Advantageous regulatory sequences for the expression of the nucleic acid molecule according to the invention in microorganisms are present for example in promoters such as the cos, tac, rha, trp, tet, trp-tet, Ipp, lac, lpp-lac, laclq-, T7, T5, T3, gal, trc, ara, SP6, Λ-PR or Λ-PL promoter, which are advantageously used in Gram-negative bacteria. Further advantageous regulatory sequences are present for example in the Gram-positive promoters amy, dnaK, xylS and SPO2, in the yeast or fungal promoters ADC1, MFα, AC, P-60, UASH, MCB, PHO, CYC1, GAPDH, TEF, rp28, ADH. Promoters, which are particularly advantageous, are constitutive, tissue or compartment specific or inducible promoters. In general, “promoter” is understood as meaning, in the present context, a regulatory sequence in a nucleic acid molecule, which mediates the expression of a coding sequence segment of a nucleic acid molecule. In general, the promoter is located upstream to the coding sequence segment. Some elements, for example expression-enhancing elements such as enhancer may, however, also be located downstream or even in the transcribed region.

[50968] In principle it is possible to use all natural promoters with their regulation sequences like those named above for the expression cassette according to the invention and the method according to the invention. Also, synthetic promoters may advantageously be used, either additionally or alone, for example synthetic promoters mediating seed-specific expression such as described in, for example, WO 99/16890. In the preparation of an expression cassette various DNA fragments can be manipulated in order to obtain a nucleotide sequence, which usefully reads in the correct direction and is equipped with a correct reading frame. To connect the DNA fragments (=nucleic acids according to the invention) to one another adaptors or linkers may be attached to the fragments. The promoter and the terminator regions can usefully be provided in the transcription direction with a linker or polylinker containing one or more restriction points for the insertion of this sequence. Generally, the linker has 1 to 10, mostly 1 to 8, preferably 2 to 6, restriction points. In general the size of the linker inside the regulatory region is less than 100 bp, frequently less than 60 bp, but at least 5 bp. The promoter may be both native or homologous as well as foreign or heterologous to the host non-human organism, for example to the host plant. In the 5′-3′ transcription direction the expression cassette contains the promoter, a nucleic acid molecule which is shown in the respective line in Table I, column 5 or 8, preferably the coding region, a homolog or a fragment thereof, and a region for transcription termination. Different termination regions can be exchanged for one another in any desired fashion.

[50969] As described above, the transcription of the genes introduced should advantageously be terminated by suitable terminators at the 3′ end of the genes introduced (behind the stop codon). A terminator, which may be used for this purpose is, for example, the OCS1 terminator, the nos3 terminator or the 35S terminator. As is the case with the promoters, different terminator sequences should be used for each gene in case several genes are introduced. Terminators, which are useful in microorganisms are for example the fimA terminator, txn terminator or trp terminator. Such terminators can be rho-dependent or rho-independent.

[50970] In an embodiment of the present invention the nucleic acid construct of the present invention comprises a nucleic acid molecule as depicted in the respective line in Table I, application no. 8, column 5 or 8, preferably the coding region thereof, a fragment or a homolog thereof, and a plant promoter, such as the Big 35S promoter, the DC3 promoter, the PC Ubi promoter, the LegB4-promoter, the Super promoter, the USP promoter or the like. In another embodiment the nucleic acid construct of the present invention comprises a nucleic acid molecule as depicted in the respective line in Table I, application no. 8, column 5 or 8, preferably the coding region thereof, a fragment or a homolog thereof, and a plant promoter such as, for example, the USP, the LegB4-, the DC3 promoter or the ubiquitin promoter from parsley or other herein mentioned promoters. In a further embodiment the nucleic acid construct of the present invention comprises a nucleic acid molecule as depicted in the respective line in Table I, application no. 8, column 5 or 8, preferably the coding region thereof, a fragment or a homolog thereof, and a plant promoter, such as the Big 35S promoter, the PC Ubi promoter, the

[50971] Super promoter, the USP promoter or the like. In addition different terminators may advantageously be used in these nucleic acid constructs; examples for transcriptional termination are polyadenylation signals.

[50972] In order to ensure the stable integration, into the transgenic plant, of nucleic acid molecules used in the process according to the invention in combination with further genes, especially biosynthesis genes, over a plurality of generations, it may be advantageous to express each of the respective coding regions used in the process under the control of its own, preferably unique, promoter.

[50973] The nucleic acid construct is advantageously constructed in such a way that a promoter is followed by a suitable cleavage site for insertion of the nucleic acid to be expressed, advantageously in a polylinker, followed, if appropriate, by a terminator located behind the polylinker. If appropriate, this order is repeated several times so that several genes are combined in one construct and thus can be introduced into the transgenic plant in order to be expressed.

[50974] The sequence is advantageously repeated up to three times. For the expression, the nucleic acid sequences are inserted via the above-mentioned suitable cleavage site, for example in the polylinker behind the promoter. It is advantageous for each nucleic acid sequence to have its own promoter and, if appropriate, its own terminator, as mentioned above. However, it is also possible to insert several nucleic acid sequences behind a promoter and, if appropriate, before a terminator if a polycistronic transcription is possible in the host or target cells. In this context, the insertion site, or the sequence of the nucleic acid molecules inserted, in the nucleic acid construct is not decisive, that is to say a nucleic acid molecule can be inserted in the first or last position in the cassette without this having a substantial effect on the expression. However, it is also possible to use only one promoter type in the construct.

[50975] Accordingly, in a preferred embodiment, the nucleic acid construct according to the invention confers expression of the nucleic acid molecule of the invention, and, optionally further genes, in a plant and comprises one or more plant regulatory elements. Said nucleic acid construct according to the invention advantageously encompasses beneath the nucleic acid molecule of the invention a plant promoter or a plant terminator or a plant promoter and a plant terminator. In another embodiment said nucleic acid construct according to the invention advantageously encompasses beneath the nucleic acid molecule of the invention a microorganism promoter or a microorganism terminator or a microorganism promoter and a microorganism terminator.

[50976] A “plant” promoter comprises regulatory elements, which mediate the expression of a coding sequence segment in plant cells. The plant promoter can originate from a plant cell, e.g. from the plant, which is transformed with the nucleic acid construct, expression cassette, or vector as described herein. However, a plant promoter does not need to be of plant origin, but may originate from viruses or microorganisms, in particular for example from viruses which attack plant cells. This also applies to other plant regulatory signals, for example in plant terminators. The term plant promoter shall also encompass organelle, especially plastidal promoters.

[50977] A nucleic acid construct suitable for plant expression preferably comprises regulatory elements which are capable of controlling the expression of genes in plant cells and which are operably linked so that each sequence can fulfill its function. Accordingly, the nucleic acid construct can also comprise transcription terminators. Examples for transcriptional termination are polyadenylation signals. Preferred polyadenylation signals are those which originate from Agrobacterium tumefaciens T-DNA, such as the gene 3 of the Ti plasmid pTiACH5, which is known as octopine synthase (Gielen et al., EMBO J. 3, 835 (1984)) or functional equivalents thereof, but all the other terminators which are functionally active in plants are also suitable.

[50978] Other preferred sequences for use in operable linkage in gene expression constructs are targeting sequences, which are required for targeting the gene product into specific cell compartments (for a review, see Kermode, Crit. Rev. Plant Sci. 15 (4), 285 (1996) and references cited therein), for example into the vacuole, the nucleus, all types of plastids, such as amyloplasts, chloroplasts, chromoplasts, the extracellular space, the mitochondria, the endoplasmic reticulum, elaioplasts, peroxisomes, glycosomes, and other compartments of cells or extracellular; preferred are sequences, which are involved in targeting to plastids as mentioned above. Sequences, which must be mentioned in this context are, in particular, the signal-peptide- or transit-peptide-encoding sequences which are known per se. For example, plastid-transit-peptide-encoding sequences enable the targeting of the expression product into the plastids of a plant cell. Targeting sequences are also known for eukaryotic and to a lower extent for prokaryotic organisms and can advantageously be operable linked with the nucleic acid molecule of the present invention as shown in Table I, application no. 8, columns 5 and 8, preferably the coding region thereof, or homologs or fragments thereof, and described herein to achieve an expression in one of said compartments or extracellular.

[50979] For expression in plants, the nucleic acid molecule must, as described above, be linked operably to or comprise a suitable promoter which expresses the gene at the right point in time and in a cell- or tissue-specific manner. Usable promoters are constitutive promoters (Benfey et al., EMBO J. 8, 2195 (1989)), such as those which originate from plant viruses, such as 35S CAMV (Franck et al., Cell 21, 285 (1980)), 19S CaMV (see also U.S. Pat. No. 5,352,605 and WO 84/02913), 34S FMV (Sanger et al., Plant. Mol. Biol., 14, 433 (1990)), the parsley ubiquitin promoter, or plant promoters such as the Rubisco small subunit promoter described in U.S. Pat. No. 4,962,028 or the plant promoters PRP1 (Ward et al., Plant. Mol. Biol. 22 (1993)), SSU, PGEL1, OCS (Leisner, Proc. Natl. Acad. Sci. USA 85 (5), 2553 (1988)), lib4, usp, mas (Comai, Plant Mol. Biol. 15 (3), 373 (1990)), STLS1, ScBV (Schenk, Plant Mol. Biol. 39 (6),1221 (1999)), B33, SAD1 or SAD2 (flax promoters, Jain et al., Crop Science, 39 (6), 1696 (1999)) or nos (Shaw et al., Nucleic Acids Res. 12 (20), 7831 (1984)). Stable, constitutive expression of the proteins according to the invention into a plant can be advantageous. However, inducible expression of the polypeptide of the invention may be advantageous, if, for example, a late expression before the harvest is of advantage.

[50980] The expression of plant genes can also be facilitated as described above via a chemical inducible promoter (for a review, see Gatz, Annu. Rev. Plant Physiol. Plant Mol. Biol. 48, 89 (1997)). Chemically inducible promoters are particularly suitable when it is desired to express the gene in a time-specific manner. Examples of such promoters are a salicylic acid inducible promoter (WO 95/19443), a benzenesulfonamide inducible promoter (EP 388 186), and abscisic acid-inducible promoter (EP 335 528), a tetracyclin-inducible promoter (Gatz et al., Plant J. 2, 397 (1992)), a cyclohexanol- or ethanol-inducible promoter (WO 93/21334) or others as described herein.

[50981] Other suitable promoters are those which react to biotic or abiotic stress conditions, for example the pathogen-induced PRP1 gene promoter (Ward et al., Plant. Mol. Biol. 22, 361 (1993)), the auxin-induced GH3-promotor (Liu et al., Plant Cell 6, 645 (1994)), the cold/dehydration/ABA-induced Cor15A-promoter (Baker et al., Plant Mol. Biol. 24, 701 (1994)), the cold/drought/salt/ABA/wound-induced Cor78 promoter (Ishitani et al., Plant Cell 9, 1935 (1997), Yamaguchi-Shinozaki and Shinozaki, Plant Cell 6, 251 (1994)), the cold/dehydration-induced Rci2A-promoter (Capel et al., Plant Physiol. 115, 569 (1997)), the drought/salt-induced Rd22-promoter (Yamaguchi-Shinozaki and Shinozaki, Mol. Gen. Genet. 238, 17 (1993)), the salt-induced RD29A-promoter (Yamaguchi-Shinozalei et al., Mol. Gen. Genet. 236, 331 (1993)), the salt-induced ARSK1-root promoter (Hwang and Goodman, Plant J. 8, 37 (1995), the salt-induced PtxA-root promoter (GenBank accession X67427), the tomato heat-inducible hsp80 promoter (U.S. Pat. No. 5,187,267), the potato chill-inducible alpha-amylase promoter (WO 96/12814) or the wound-inducible pinl I promoter (EP-A-0 375 091) or others as described herein.

[50982] Preferred promoters are in particular those which bring about gene expression in tissues and organs, such as leaves, roots, seeds, pollen or xylem. Examples of tissue preferred or organ preferred promoters include, but are not limited to fruit-preferred, ovulepreferred, male tissue-preferred, seed-preferred, pollen-preferred integument-preferred, tuberpreferred, stalk-preferred, pericarp-preferred, leaf-preferred, stigma-preferred, pollen-preferred, anther-preferred, petal-preferred, sepal-preferred, pedicel-preferred, silique-preferred, stem-preferred, root-preferred promoters, and the like. Especially those promoters are preferred which bring about gene expression in tissues and organs in which the biosynthesis of fatty acids takes place, like in seed cells, such as endosperm cells and cells of the developing embryo. Seed promoters are preferentially expressed during seed development and/or germination. For example, seed preferred promoters can be embryo-preferred, endosperm preferred and seed coat-preferred (see Thompson et al., BioEssays 10, 108 (1989)). Examples of seed preferred promoters include, but are not limited to, cellulose synthase (celA), Cim1, gamma-zein, globulin 1, maize 19 kD zein (cZ19B1), and the like. Other suitable promoters are the oilseed rape napin gene promoter (U.S. Pat. No. 5,608,152), the Vicia faba USP promoter (Baeumlein et al., Mol Gen Genet, 225 (3), 459 (1991)), the Arabidopsis oleosin promoter (WO 98/45461), the Phaseolus vulgaris phaseolin promoter (U.S. Pat. No. 5,504,200), the Brassica Bce4 promoter (WO 91/13980), the bean arc5 promoter, the carrot DcG3 promoter, or the Legumin B4 promoter (LeB4) (Baeumlein et al., Plant Journal, 2 (2), 233 (1992)), and promoters which bring about the seed-specific expression in monocotyledonous plants such as maize, barley, wheat, rye, rice and the like. Advantageous seed-specific promoters are the sucrose binding protein promoter (WO 00/26388), the phaseolin promoter and the napin promoter. Suitable promoters which must be considered are the barley lpt2 or lpt1 gene promoter (WO 95/15389 and WO 95/23230), and the promoters described in WO 99/16890 (promoters from the barley hordein gene, the rice glutelin gene, the rice oryzin gene, the rice prolamin gene, the wheat gliadin gene, the wheat glutelin gene, the maize zein gene, the oat glutelin gene, the sorghum kasirin gene and the rye secalin gene). Further suitable promoters are Amy32b, Amy 6-6 and Aleurain (U.S. Pat. No. 5,677,474), Bce4 (oilseed rape) (U.S. Pat. No. 5,530,149), glycinin (soya) (EP 571 741], phosphoenolpyruvate carboxylase (soya) (JP 06/62870), ADR12-2 (soya) (WO 98/08962), isocitrate lyase (oilseed rape) (U.S. Pat. No. 5,689,040]) or a-amylase (barley) (EP 781 8499. Other promoters which are available for the expression of genes in plants are leaf-specific promoters such as those described in DE-A 19 644 478 or lightregulated promoters such as, for example, the pea petE promoter.

[50983] Further suitable plant promoters are the cytosolic FBPase promoter or the potato ST-LSI promoter (Stockhaus et al., EMBO J. 8, 2445 (1989)), the Glycine max phosphoribosylpyrophosphate amidotransferase promoter (GenBank Accession No. U87999) or the noduline-specific promoter described in EP 249 676.

[50984] Promoters, which are particularly suitable, are those which bring about plastid-specific expression. Suitable promoters such as the viral RNA polymerase promoter are described in WO 95/16783 and WO 97/06250, and the Arabidopsis clpP promoter, which is described in WO 99/46394.

[50985] Promoters, which are used for the strong expression of heterologous sequences as well as additional homologous sequences in as many tissues as possible, in particular also in leaves, are, in addition to several of the above-mentioned viral and bacterial promoters, preferably, plant promoters of actin or ubiquitin genes such as, for example, the rice actin1 promoter. Further examples of constitutive plant promoters are the sugarbeet V-ATPase promoters (WO 01/14572). Examples of synthetic constitutive promoters are the Super promoter (WO 95/14098) and promoters derived from G-boxes (WO 94/12015). If appropriate, chemical inducible promoters may furthermore also be used, as described in EP 388 186, EP 335 528, WO 97/06268.

[50986] Promoters, which are particularly suitable, are e.g. the super-promoter (Ni et al., Plant Journal 7, 661 (1995)), the ubiquitin promoter (Callis et al., J. Biol. Chem., 265, 12486 (1990); U.S. Pat. No. 5,510,474; U.S. Pat. No. 6,020,190; Kawalleck et al., Plant. Molecular Biology, 21, 673 (1993)) or the 34S promoter (GenBank Accession numbers M59930 and X16673). Promoters useful in the expression cassettes of the invention include, but are not limited to, the major chlorophyll a/b binding protein promoter, histone promoters, the Ap3 promoter, the 6-conglycin promoter, the napin promoter, the soybean lectin promoter, the maize 15kD zein promoter, the 22kD zein promoter, the 27kD zein promoter, the g-zein promoter, the waxy, shrunken 1, shrunken 2 and bronze promoters, the Zm13 promoter (U.S. Pat. No. 5,086,169), the maize polygalacturonase promoters (PG) (U.S. Pat. Nos. 5,412,085 and 5,545,546), and the SGB6 promoter (U.S. Pat. No. 5,470,359), the rice cyclophilin promoter (Buchholz et al., Plant Mol. Biol.25 (5), 837 (1994)), the glutelin (rice) promoter (Takaiwa et al., Mol. Gen. Genet. 208, 15 (1986), Takaiwa et al., FEBS letts. 221, 43 (1987), the rice prolamin NRP33 promoter and the rice aglobulin Glb-1 promoter (Wu et al., Plant cell Physiology 39 (8), 885 (1998),as well as synthetic or other natural promoters.

[50987] As already mentioned herein, further regulatory sequences, which may be expedient, if appropriate, also include sequences, which target the transport and/or the localization of the expression products. Sequences, which must be mentioned in this context are, in particular, the signal-peptide- or transit-peptide-encoding sequences which are known per se.

[50988] For example, plastid-transit-peptide-encoding sequences enable the targeting of the expression product into the plastids of a plant cell.

[50989] One embodiment of the present invention also relates to a method for generating a vector, which comprises the insertion of the nucleic acid molecule according to the invention or the expression cassette according to the invention into a nucleic acid molecule to give the vector. The vector can, for example, be introduced in to a cell, e.g. a microorganism or a plant cell, a plant or a part therof, as described herein for the nucleic acid construct, or below under transformation or transfection or shown in the examples. A transient or stable transformation of the host or target cell is possible, however, a stable transformation is preferred. The vector according to the invention is preferably a vector, which is suitable for expressing the polypeptide according to the invention in a microorganism or a plant cell, a plant or a part thereof. The method can thus also encompass one or more steps for integrating regulatory signals into the vector, in particular signals, which mediate the expression in microorganisms or plant cells, plants or respective parts thereof.

[50990] Accordingly, the present invention also relates to a vector comprising the nucleic acid molecule characterized herein as part of a nucleic acid construct suitable for expression in plants and/or microorganisms or the nucleic acid molecule according to the invention.

[50991] The advantageous vectors of the invention comprise the nucleic acid molecules which encode proteins according to the invention, nucleic acid molecules which are used in the process, or nucleic acid construct suitable for plant expression or for microorganism expression comprising the nucleic acid molecules used, or expression cassettes according to the invention, either alone or in combination with further genes such as the biosynthesis or regulatory genes of the fine chemical metabolism e.g. with the genes mentioned herein above.

[50992] The recombinant expression vectors which are advantageously used in the process comprise the nucleic acid molecules according to the invention or the nucleic acid construct according to the invention, or the expression cassettes according to the invention, in a form which is suitable for expressing, in a host cell, the nucleic acid molecules according to the invention or described herein. Accordingly, the recombinant expression vectors in addition may comprise one or more regulatory signals selected on the basis of the host cells to be used for the expression, in operable linkage with the nucleic acid sequence to be expressed. Furthermore, if desired, in addition the vector can comprise plastome sequences of the recipient organism to facilitate integration into the plastidal genome by homologous recombination as mentioned above.

[50993] The recombinant expression vectors used can be designed specifically for the expression, in prokaryotic and/or eukaryotic cells, of nucleic acid molecules used in the process. This is advantageous since intermediate steps of the vector construction are frequently carried out in microorganisms for the sake of simplicity. For example, the genes according to the invention and other genes can be expressed in bacterial cells, insect cells (using baculovirus expression vectors), yeast cells and other fungal cells (Romanos, Yeast 8, 423 (1992); van den Hondel, in “More Gene Manipulations in Fungi”, ed. Bennet J. W., Lasure L. L., pp. 396-428, Academic Press, San Diego (1991); van den Hondel C. A. M. J. J., in “Applied Molecular Genetics of Fungi”, ed. Peberdy J. F. et al., pp. 1-28, Cambridge University Press, Cambridge(1991)), algae (Falciatore et al., Marine Biotechnology.1 (3), 239 (1999)) using vectors and following a transformation method as described in WO 98/01572, and preferably in cells of multi-celled plants (see Schmidt R. and Willmitzer L., Plant Cell Rep. 7, 583 (1988); “Plant Molecular Biology and Biotechnology”, C Press, Boca Raton, Fla., chapter 6/7, pp.71-119 (1993); White F. F., in “Transgenic Plants”, Bd. 1, Engineering and Utilization, ed. Kung and Wu R., Academic Press, 128-43 (1993); Potrykus, Annu. Rev. Plant Physiol. Plant Molec. Biol. 42, 205 (1991) (and references cited therein)). Suitable host cells are furthermore discussed in Goeddel, “Gene Expression Technology: Methods in Enzymology 185”, Academic Press, San Diego, Calif. (1990). As an alternative, the sequence of the recombinant expression vector can be transcribed and translated in vitro, for example using T7 promoter-regulatory sequences and T7 polymerase.

[50994] In the event it is necessary proteins can be expressed in prokaryotes using vectors comprising constitutive or inducible promoters, which control the expression of fusion proteins or nonfusion proteins as mentioned above.

[50995] Other vectors which are suitable in prokaryotic organisms are known to the skilled worker; these vectors are for example in E. coli pLG338, pACYC184, the pBR series, such as pBR322, the pUC series such as pUC18 or pUC19, the M113mp series, pKC30, pRep4, pHS1, pHS2, pPLc236, pMBL24, μLG200, pUR290, pIN-III-B1, lambda-gt11 or pBdCI, in Streptomyces pIJ101, pIJ364, pIJ702 or pIJ361, in Bacillus pUB110, pC194 or pBD214, in Corynebacterium pSA77 or pAJ667.

[50996] In a further embodiment, the expression vector is a yeast expression vector. Examples of vectors for expression in the yeasts S. cerevisiae encompass pYeDesaturasec1 (Baldari et al., Embo J. 6, 229 (1987)), pMFa (Kurjan and Herskowitz, Cell 30, 933 (1982)), pJRY88 (Schultz et al., Gene 54, 113(1987)) and pYES2 (Invitrogen Corporation, San Diego, Calif.). Vectors and methods for the construction of vectors which are suitable for use in other fungi, such as the filamentous fungi, encompass those which are described in detail in: van den Hondel C. A. M. J. J.in “Applied Molecular Genetics of Fungi”, Peberdy J. F., ed., pp. 1-28, Cambridge University Press, Cambridge (1991); or van den Hondel C. A. M. J. J. in “More Gene Manipulations in Fungi”, Bennet J. W. & Lasure L. L., ed., pp. 396-428, Academic Press, San Diego (1991). Examples of other suitable yeast vectors are 2alphaM, pAG-1, YEp6, YEp13 or pEMBLYe 23.

[50997] Further vectors, which may be mentioned by way of example, are pALS1, pl L2 or pBB116 in fungi or pLGV23, pGHlac+, pBIN19, pAK2004 or pDH51 in plants.

[50998] As an alternative, the nucleic acid sequences can be expressed in insect cells using baculovirus expression vectors. Baculovirus vectors, which are available for expressing proteins in cultured insect cells (for example Sf9 cells) encompass the pAc series (Smith et al., Mol. Cell Biol. 3, 2156 (1983)) and the pVL series (Lucklow and Summers, Virology 170, 31 (1989)).

[50999] The above-mentioned vectors are only a small overview of potentially suitable vectors. Further plasmids are known to the skilled worker and are described, for example, in “Cloning Vectors” (ed. Pouwels P. H., et al., Elsevier, Amsterdam-New York-Oxford, 1985, ISBN 0 444 904018). Further suitable expression systems for prokaryotic and eukaryotic cells, see the chapters 16 and 17 by Sambrook J., Fritsch E.F. and Maniatis T., “Molecular Cloning: A Laboratory Manual”, 2nd edition, Cold Spring Harbor Laboratory, Cold Spring Harbor Laboratory Press, Cold Spring Harbor, N.Y., 1989.

[51000] An embodiment of the invention relates to a vector where the nucleic acid molecule according to the invention is linked operably to regulatory sequences which permit the expression in a prokaryotic or eukaryotic host. A further embodiment of the invention relates to a vector in which a nucleic acid sequence encoding one of the polypeptides shown in the respective line in Table II, application no. 8, columns 5 or 8, or homologs or fragments thereof, is functionally linked to a targeting sequence such as a plastidial or mitochondrial targeting sequence. A further embodiment of the invention relates to a vector in which a nucleic acid sequence encoding one of the polypeptides shown in the respective line in Table II, application no. 8, columns 5 or 8, or homologs or fragments thereof, is functionally linked to (a) regulatory sequence which permit the expression in an organelle, such as plastids or mitochondria, preferably plastids.

[51001] A further embodiment of the invention relates to a vector which comprises a nucleic acid sequence encoding one of the polypeptides shown in the respective line in Table II, application no. 8, columns 5 or 8, or homologs or fragments thereof, but no additional targeting sequence.

[51002] Accordingly, one embodiment of the invention relates to a host cell, which has been transformed stably or transiently with the vector according to the invention or the nucleic acid molecule according to the invention or the nucleic acid construct according to the invention or the expression construct according to the invention.

[51003] The genetically modified cells may be regenerated to the respective non-human organism, for example a plant cell to a plant, by all of the methods known to those skilled in the art. Appropriate methods can be found in the publications referred to above by Kung S. D. and Wu R., Potrykus or Hofgen and Willmitzer.

[51004] Accordingly, a further aspect of the invention relates to transgenic non-human organisms transformed by at least one nucleic acid molecule, expression cassette or vector according to the invention as well as cells, cell cultures, tissue, parts—such as, for example, leaves, roots, pollen, etc. in the case of plant organisms—or reproductive material derived from such non-human organisms. The terms “host organism”, “host cell”, “recombinant (host) non-human organism” and “transgenic (host) cell” are used here interchangeably. Of course these terms relate not only to the particular host non-human organism or the particular target cell but also to the descendants or potential descendants of these non-human organisms or cells. Since, due to mutation or environmental effects certain modifications may arise in successive generations, these descendants need not necessarily be identical with the parental cell but nevertheless are still encompassed by the term as used here.

[51005] For the purposes of the invention “transgenic” or “recombinant” means with regard for example to a nucleic acid molecule, a nucleic acid construct, an expression cassette or a vector containing the nucleic acid molecule according to the invention or an non-human organism transformed with/by the nucleic acid molecule, nucleic acid construct, expression cassette or vector according to the invention all those constructions produced by genetic engineering methods in which either
[51006] (a) the nucleic acid molecule depicted in the respective line in Table I, column 5 or 8, preferably the coding region thereof, or homologs or fragments thereof; or
[51007] (b) a genetic control sequence functionally linked to the nucleic acid molecule described under (a), for example a 3′- and/or 5′- genetic control sequence such as a promoter or terminator, or
[51008] (c)
[51009] (a) and (b);
   are not found in their natural, genetic environment or have been modified by genetic engineering methods, wherein the modification may by way of example be a substitution, addition, deletion, inversion or insertion of one or more nucleotide residues. Natural genetic environment means the natural genomic or chromosomal locus in the organism of origin or inside the host non-human organism or presence in a genomic library. In the case of a genomic library the natural genetic environment of the nucleic acid sequence is preferably retained at least in part. The environment sequence borders the nucleic acid sequence at least on one side and has a sequence length of at least 50 bp, preferably at least 500 bp, particularly preferably at least 1,000 bp, most particularly preferably at least 5,000 bp. A naturally occurring expression cassette—for example the naturally occurring combination of the natural promoter of the nucleic acid sequence according to the invention with the corresponding gene—turns into a transgenic expression cassette when the latter is modified by unnatural, synthetic (“artificial”) methods such as by way of example a mutagenesis. In case a non-human organism is transformed by a homologous nucleic acid molecule or by a homologous expression cassette the resulting non-human organism represents also a respective transgenic non-human organism since the additional homologous nucleic acid molecule or the additional homologous expression cassette is not located in its original environment. Appropriate methods are described by way of example in U.S. Pat. No. 5,565,350 or WO 00/15815. In another embodiment the non-human organism comprises a heterologous nucleic acid molecule.

[51010] Suitable organisms or host organisms for the nucleic acid molecule, nucleic acid construct, expression cassette or vector according to the invention are advantageously in principle all non-human organisms, which are suitable for the expression of recombinant genes as described above. Preferred non-human organism are microorganism or plants as described above, in particular those plants, which can be transformed in a suitable manner. These include monocotyledonous and dicotyledonous plants. In an embodiment of the present invention plants like Arabidopsis, Asteraceae such as Calendula or crop plants such as soybean, peanut, castor oil plant, sunflower, flax, corn, cotton, oilseed rape, coconut, oil palm, safflower (Carthamus tinctorius) or cocoa bean are preferred. In another embodiment agriculturally useful plants such as cereals and grasses, for example Triticum spp., Zea mays, Hordeum vulgare, oats, Secale cereale, Oryza sativa, Pennisetum glaucum, Sorghum bicolor, Triticale, Agrostis spp., Cenchrus ciliaris, Dactylis glomerata, Festuca arundinacea, Lolium spp., Medicago spp. and Saccharum spp., legumes and oil crops, for example Brassica juncea, Brassica napus, Glycine max, Arachis hypogaea, Gossypium hirsutum, Cicer arietinum, Helianthus annuus, Lens culinaris, Linum usitatissimum, Sinapis alba, Trifolium repens and Vicia narbonensis, vegetables and fruits, for example bananas, grapes, Lycopersicon esculentum, asparagus, cabbage, watermelons, kiwi fruit, Solanum tuberosum, Beta vulgaris, cassava and chicory, trees, for example Coffea species, Citrus spp., Eucalyptus spp., Picea spp., Pinus spp. and Populus spp., medicinal plants and trees, and flowers are preferred.

[51011] In another embodiment of the invention host plants for the nucleic acid molecule, nucleic acid construct, expression cassette or vector according to the invention are selected from the group comprising corn, soy, oil seed rape (including canola and winter oil seed rape), cotton, wheat and rice.

[51012] A further object of the invention relates to the use of a nucleic acid construct, e.g. an expression cassette, comprising one or more nucleic acid molecules encoding one or more polypeptides as depicted in the respective line(s) in Table II, application no. 8, columns 5 or 8, or homologs or fragments thereof, or comprising one or more nucleic acid molecules as depicted in the respective line(s) in Table I, application no. 8, columns 5 or 8, preferably the coding region thereof, or homologs or fragments thereof, or comprising a nucleic acid molecule hybridizing therewith for the transformation of a microorganism or a plant cell, plant tissues or a part of a plant.

[51013] In doing so, depending on the choice of promoter, the nucleic acid molecules shown in the respective line in Table I, application no. 8, column 5 or 8, preferably the coding region thereof, or homologs or fragments thereof, or the nucleic acid molecules encoding a polypeptide as depicted in the respective line in Table II, application no. 8, column 5 or 8, or homologs or fragments thereof, can be expressed in the whole plant or specifically e.g. in the leaves, in the seeds, the nodules, in roots, in the stem or other parts of the plant. Those transgenic plants overproducing sequences, e.g. as depicted in the respective line in Table I, application no. 8, column 5 or 8, preferably the coding region thereof, or homologs or fragments thereof, the plant cell, plant tissues, plants, the reproductive material thereof, or parts thereof are a further object of the present invention.

[51014] Within the framework of the present invention, the production of the linoleic acid is due to the generation or over-expression of one or more polypeptides as depicted in the respective line(s) in Table II, application no. 8, column 5 or 8, or homologs or fragments thereof, or encoded by the corresponding nucleic acid molecules as depicted in the respective line(s) in Table I, application no. 8, column 5 or 8, preferably the coding region thereof, or homologs or fragments thereof, in the non-human organism according to the invention, advantageously in the transgenic microorganism or plant according to the invention, at least for the duration of at least one plant generation.

[51015] A constitutive expression of the polypeptide as depicted in the respective line in Table II, application no. 8, column 5 or 8, or homologs or fragments thereof, or encoded by the respective nucleic acid molecule as depicted in the respective line in Table I, application no. 8, column 5 or 8, preferably the coding region thereof, or homologs or fragments thereof, may be advantageous. On the other hand, an inducible expression may also appear desirable. Expression of the polypeptide sequences of the invention can be either directed to the cytosol or to the organelles, such as plastids or mitochondria, preferably the plastids of the host cells, preferably the plant cells, or non-targeted.

[51016] The efficiency of the expression of the polypeptides depicted in the respective line in Table II, column 5 or 8, or homologs or fragments thereof, or encoded by the respective nucleic acid molecule as depicted in the respective line in Table I, column 5 or 8, preferably the coding region thereof, or homologs or fragments thereof, can be determined, for example, on test plants in greenhouse trials.

[51017] In a further embodiment the invention relates to a transgenic non-human organisms such as transgenic microorganism or transgenic plant comprising a nucleic acid molecule comprising
[51018] [1) a nucleic acid molecule selected from the group consisting of
   [51019] (a) a nucleic acid molecule encoding a polypeptide shown in Table II, application no. 8, column 5 or 8, preferably shown in Table II A, application no. 8, column 5, or in Table II A, application no. 8, column 8, or in Table II B, application no. 8, column 8, or a homolog or a fragment thereof;
   [51020] (b) a nucleic acid molecule shown in Table I, application no. 8, column 5 or 8, preferably shown in Table I A, application no. 8, column 5, or in Table I A, application no. 8, column 8, or in Table I B, application no. 8, column 8, preferably the coding region thereof, or a homolog or a fragment thereof;
   [51021] (c) a nucleic acid molecule, which, as a result of the degeneracy of the genetic code, can be derived from a polypeptide sequence depicted in column 5 or 8 of Table II, application no. 8, preferably shown in Table II A, application no. 8, column 5, or in Table II A, application no. 8, column 8, or in Table II B, application no. 8, column 8;
   [51022] (d) a nucleic acid molecule having at least 30% identity, preferably at least 40%, 50%, 60%, 70%, 75%, 80%, 85%, 90%, 95%, 96%, 97%, 98%, 99%, 99,5%, with the nucleic acid molecule sequence of a polynucleotide comprising the nucleic acid molecule shown in column 5 or 8 of Table I, application no. 8, preferably shown in Table I A, application no. 8, column 5, or in Table I A, application no. 8, column 8, or in Table I B, application no. 8, column 8, preferably the coding region thereof;
   [51023] (e) a nucleic acid molecule encoding a polypeptide having at least 30% identity, preferably at least 40%, 50% 60%, 70%, 75%, 80%, 85%, 90%, 95%, 96%, 97%, 98%, 99%, 99,5%, identity with the amino acid sequence of the polypeptide encoded by the nucleic acid molecule of (a), (b), (c) or (d);
   [51024] (f) a nucleic acid molecule which hybridizes with a nucleic acid molecule of (a), (b), (c), (d) or (e) under stringent hybridization conditions;
   [51025] (g) a nucleic acid molecule encoding a polypeptide which can be isolated with the aid of monoclonal or polyclonal antibodies made against a polypeptide encoded by one of the nucleic acid molecules of (a), (b), (c), (d), (e) or (f);
   [51026] (h) a nucleic acid molecule encoding a polypeptide comprising the consensus sequence or one or more polypeptide motifs as shown in column 8 of Table IV, application no. 8;
   [51027] (i) a nucleic acid molecule encoding a polypeptide having the activity represented by a respective protein as depicted in column 5 of Table II, application no. 8;
   [51028] (j) a nucleic acid molecule comprising a polynucleotide which is obtained by amplifying a cDNA library or a genomic library using the primers in Table III, application no. 8, column 8;
   [51029] and
   [51030] (k) nucleic acid molecule which is obtainable by screening a suitable nucleic acid library, especially a cDNA library and/or a genomic library, under stringent hybridization conditions with a probe comprising one of the sequences of the nucleic acid molecule of (a), (b), (c), (d), (e), (f), (g), (h), (i) or (j) or with a fragment of at least 15 nt, preferably 20 nt, 30 nt, 50 nt, 100 nt, 200 nt,500 nt, 1000 nt, 1500 nt, 2000 nt or 3000 nt of the nucleic acid molecule characterized in (a), (b), (c), (d), (e), (f), (g), (h), (i) or (j);
   [51031] or a nucleic acid molecule comprising a sequence which is complementary thereto;
      and, if desired
[51032] 2) nucleic acid molecule encoding a transit peptide, preferably encoding a plastidal transit peptide or a mitochondrial transit peptide;
   which are operable linked;]
   or comprising an expression cassette comprising
[51033] [0) a promoter, preferably a promoter selected from the group consisting of Big35S, PCUbi, Super and USP; and
[51034] 1) a nucleic acid molecule selected from the group consisting of
   [51035] (a) a nucleic acid molecule encoding a polypeptide shown in Table II, application no. 8, column 5 or 8, preferably shown in Table II A, application no. 8, column 5, or in Table II A, application no. 8, column 8, or in Table II B, application no. 8, column 8, or a homolog or a fragment thereof;
   [51036] (b) a nucleic acid molecule shown in Table I, application no. 8, column 5 or 8, preferably shown in Table I A, application no. 8, column 5, or in Table I A, application no. 8, column 8, or in Table I B, application no. 8, column 8, preferably the coding region thereof, or a homolog or a fragment thereof;
   [51037] (c) a nucleic acid molecule, which, as a result of the degeneracy of the genetic code, can be derived from a polypeptide sequence depicted in column 5 or 8 of Table II, application no. 8, preferably shown in Table II A, application no. 8, column 5, or in Table II A, application no. 8, column 8, or in Table II B, application no. 8, column 8;
   [51038] (d) a nucleic acid molecule having at least 30% identity, preferably at least 40%, 50%, 60%, 70%, 75%, 80%, 85%, 90%, 95%, 96%, 97%, 98%, 99%, 99,5%, with the nucleic acid molecule sequence of a polynucleotide comprising the nucleic acid molecule shown in column 5 or 8 of Table I, application no. 8, preferably shown in Table I A, application no. 8, column 5, or in Table I A, application no. 8, column 8, or in Table I B, application no. 8, column 8, preferably the coding region thereof;
   [51039] (e) a nucleic acid molecule encoding a polypeptide having at least 30% identity, preferably at least 40%, 50% 60%, 70%, 75%, 80%, 85%, 90%, 95%, 96%, 97%, 98%, 99%, 99,5%, identity with the amino acid sequence of the polypeptide encoded by the nucleic acid molecule of (a), (b), (c) or (d);
   [51040] (f) a nucleic acid molecule which hybridizes with a nucleic acid molecule of (a), (b), (c), (d) or (e) under stringent hybridization conditions;
   [51041] (g) a nucleic acid molecule encoding a polypeptide which can be isolated with the aid of monoclonal or polyclonal antibodies made against a polypeptide encoded by one of the nucleic acid molecules of (a), (b), (c), (d), (e) or (f);
   [51042] (h) a nucleic acid molecule encoding a polypeptide comprising the consensus sequence or one or more polypeptide motifs as shown in column 8 of Table IV, application no. 8;
   [51043] (i) a nucleic acid molecule encoding a polypeptide having the activity represented by a respective protein as depicted in column 5 of Table II, application no. 8;
   [51044] (j) a nucleic acid molecule comprising a polynucleotide which is obtained by amplifying a cDNA library or a genomic library using the primers in Table III, application no. 8, column 8;
   [51045] and
   [51046] (k) nucleic acid molecule which is obtainable by screening a suitable nucleic acid library, especially a cDNA library and/or a genomic library, under stringent hybridization conditions with a probe comprising one of the sequences of the nucleic acid molecule of (a), (b), (c), (d), (e), (f), (g), (h), (i) or (j) or with a fragment of at least 15 nt, preferably 20 nt, 30 nt, 50 nt, 100 nt, 200 nt,500 nt, 1000 nt, 1500 nt, 2000 nt or 3000 nt of the nucleic acid molecule characterized in (a), (b), (c), (d), (e), (f), (g), (h), (i) or (j);
   [51047] or a nucleic acid molecule comprising a sequence which is complementary thereto;
      and, if desired
[51048] 2) nucleic acid molecule encoding a transit peptide, preferably encoding a plastidal transit peptide or a mitochondrial transit peptide;
   which are operable linked;]
   or comprising or being transformed by a vector comprising
[51049] [1) a nucleic acid molecule selected from the group consisting of
   [51050] (a) a nucleic acid molecule encoding a polypeptide shown in Table II, application no. 8, column 5 or 8, preferably shown in Table II A, application no. 8, column 5, or in Table II A, application no. 8, column 8, or in Table II B, application no. 8, column 8, or a homolog or a fragment thereof;
   [51051] (b) a nucleic acid molecule shown in Table I, application no. 8, column 5 or 8, preferably shown in Table I A, application no. 8, column 5, or in Table I A, application no. 8, column 8, or in Table I B, application no. 8, column 8, preferably the coding region thereof, or a homolog or a fragment thereof;
   [51052] (c) a nucleic acid molecule, which, as a result of the degeneracy of the genetic code, can be derived from a polypeptide sequence depicted in column 5 or 8 of Table II, application no. 8, preferably shown in Table II A, application no. 8, column 5, or in Table II A, application no. 8, column 8, or in Table II B, application no. 8, column 8;
   [51053] (d) a nucleic acid molecule having at least 30% identity, preferably at least 40%, 50%, 60%, 70%, 75%, 80%, 85%, 90%, 95%, 96%, 97%, 98%, 99%, 99.5%, with the nucleic acid molecule sequence of a polynucleotide comprising the nucleic acid molecule shown in column 5 or 8 of Table I, application no. 8, preferably shown in Table I A, application no. 8, column 5, or in Table I A, application no. 8, column 8, or in Table I B, application no. 8, column 8, preferably the coding region thereof;
   [51054] (e) a nucleic acid molecule encoding a polypeptide having at least 30% identity, preferably at least 40%, 50% 60%, 70%, 75%, 80%, 85%, 90%, 95%, 96%, 97%, 98%, 99%, 99.5%, identity with the amino acid sequence of the polypeptide encoded by the nucleic acid molecule of (a), (b), (c) or (d);
   [51055] (f) a nucleic acid molecule which hybridizes with a nucleic acid molecule of (a), (b), (c), (d) or (e) under stringent hybridization conditions;
   [51056] (g) a nucleic acid molecule encoding a polypeptide which can be isolated with the aid of monoclonal or polyclonal antibodies made against a polypeptide encoded by one of the nucleic acid molecules of (a), (b), (c), (d), (e) or (f);
   [51057] (h) a nucleic acid molecule encoding a polypeptide comprising the consensus sequence or one or more polypeptide motifs as shown in column 8 of Table IV, application no. 8;
   [51058] (i) a nucleic acid molecule encoding a polypeptide having the activity represented by a respective protein as depicted in column 5 of Table II, application no. 8;
   [51059] (j) a nucleic acid molecule comprising a polynucleotide which is obtained by amplifying a cDNA library or a genomic library using the primers in Table III, application no. 8, column 8;
   [51060] and
   [51061] (k) nucleic acid molecule which is obtainable by screening a suitable nucleic acid library, especially a cDNA library and/or a genomic library, under stringent hybridization conditions with a probe comprising one of the sequences of the nucleic acid molecule of (a), (b), (c), (d), (e), (f), (g), (h), (i) or (j) or with a fragment of at least 15 nt, preferably 20 nt, 30 nt, 50 nt, 100 nt, 200 nt,500 nt, 1000 nt, 1500 nt, 2000 nt or 3000 nt of the nucleic acid molecule characterized in (a), (b), (c), (d), (e), (f), (g), (h), (i) or (j);
   [51062] or a nucleic acid molecule comprising a sequence which is complementary thereto;]
      as well as respective transgenic cells, tissue, parts of such non-human organism, e.g. plant cells, plant tissue, part of plants, like leaves, roots, stems, blossoms, seeds, fruits, pollen and the like.
      (All the references to Tables I to IV are references to the corresponding lines of Tables I to IV.)

[51063] In a preferred embodiment of said transgenic non-human organism said nucleic acid molecule according to 1 (a), (b), (c), (d), (e), (f), (g), (h), (i), (j) or (k) encodes a polypeptide which has the activity of the respective polypeptide represented by a protein comprising a polypeptide as depicted in the respective line in column 5 of Table II, application no. 8.

[51064] In another preferred embodiment of said transgenic non-human organism said nucleic acid molecule according to 1 (a), (b), (c), (d), (e), (f), (g), (h), (i), (j) or (k) confers a generation or an increase of the respective fine chemical in a non-human organism or a part thereof as compared to a corresponding wild-type non-human organism or part thereof.

[51065] In another preferred embodiment of said transgenic non-human organism said nucleic acid molecule according to 1 (a), (b), (c), (d), (e), (f), (g), (h), (i), (j) or (k) encodes a polypeptide which has the activity of the respective polypeptide represented by a protein as depicted in the respective line in column 5 of Table II application no. 8 and confers a generation or an increase of the respective fine chemical in a non-human organism or a part thereof as compared to a corresponding wild-type non-human organism or part thereof.

[51066] In another embodiment of said transgenic non-human organism the expression cassette comprises 2) a nucleic acid molecule encoding a transit peptide, preferably encoding a plastidal transit peptide, especially in case in column 6 of Table I, application no. 8, in the same line as of the respective nucleic acid molecule according to 1) “plastidic” is depicted, or encoding a mitochondrial transit peptide, especially in case in column 6 of Table I, application no. 8, in the same line as of the respective nucleic acid molecule according to 1) “mitochondrial” is depicted.

[51067] In another embodiment of said transgenic non-human organism the expression cassette does not comprise 2) a nucleic acid molecule encoding a transit peptide, especially in case in column 6 of Table I, application no. 8, in the same line as of the respective nucleic acid molecule according to 1) “non-targeted” is depicted.

[51068] In another embodiment of said transgenic non-human organism said vector comprises beneath said nucleic acid molecule according to 1 (a), (b), (c), (d), (e), (f), (g), (h), (i), (j) or (k), a promoter, preferably a promoter selected from the group consisting of Big35S, PCUbi, Super and USP, which are operable linked.

[51069] In a preferred embodiment of said transgenic non-human organism said vector comprises beneath said nucleic acid molecule according to 1 (a), (b), (c), (d), (e), (f), (g), (h), (i), (j) or (k), a promoter, preferably a promoter selected from the group consisting of Big35S, PCUbi, Super and USP, which are operable linked; and said nucleic acid molecule according to 1 (a), (b), (c), (d), (e), (f), (g), (h), (i), (j) or (k) encodes a polypeptide which has the activity of the respective polypeptide represented by a protein comprising a polypeptide as depicted in the respective line in column 5 of Table II, application no. 8.

[51070] In another preferred embodiment of said transgenic non-human organism said vector comprises beneath said nucleic acid molecule according to 1 (a), (b), (c), (d), (e), (f), (g), (h), (i), (j) or (k), a promoter, preferably a promoter selected from the group consisting of Big35S, PCUbi, Super and USP, which are operable linked; and said nucleic acid molecule according to 1 (a), (b), (c), (d), (e), (f), (g), (h), (i), (j) or (k) confers a generation or an increase of the respective fine chemical in a non-human organism or a part thereof as compared to a corresponding wild-type non-human organism or part thereof.

[51071] In another preferred embodiment of said transgenic non-human organism said vector comprises beneath said nucleic acid molecule according to 1 (a), (b), (c), (d), (e), (f), (g), (h), (i), (j) or (k), a promoter, preferably a promoter selected from the group consisting of Big35S, PCUbi, Super and USP, which are operable linked; and said nucleic acid molecule according to 1 (a), (b), (c), (d), (e), (f), (g), (h), (i), (j) or (k) encodes a polypeptide which has the activity of the respective polypeptide represented by a protein as depicted in the respective line in column 5 of Table II, application no. 8, and confers a generation or an increase of the respective fine chemical in a non-human organism or a part thereof as compared to a corresponding wild-type non-human organism or part thereof.

[51072] In another embodiment of said transgenic non-human organism said vector comprises beneath said nucleic acid molecule according to 1 (a), (b), (c), (d), (e), (f), (g), (h), (i), (j) or (k), a nucleic acid molecule encoding a transit peptide, preferably encoding a plastidal transit peptide, especially in case in column 6 of Table I, application no. 8, in the same line as of the respective nucleic acid molecule according to 1) “plastidic” is depicted, or encoding a mitochondrial transit peptide, especially in case in column 6 of Table I, application no. 8, in the same line as of the respective nucleic acid molecule according to 1) “mitochondrial” is depicted, which are operable linked.

[51073] In another embodiment of said transgenic non-human organism said vector does not comprise beneath said nucleic acid molecule according to 1 (a), (b), (c), (d), (e), (f), (g), (h), (i), (j) or (k), a nucleic acid molecule encoding a transit peptide in case in column 6 of Table I, application no. 8, in the same line as of the respective nucleic acid molecule according to 1) “non-targeted” is depicted, which are operable linked.

[51074] In another embodiment of said transgenic non-human organism said vector comprises beneath said nucleic acid molecule according to 1 (a), (b), (c), (d), (e), (f), (g), (h), (i), (j) or (k), and a promoter, preferably a promoter selected from the group consisting of Big35S, PCUbi, Super and USP; a nucleic acid molecule encoding a transit peptide, preferably encoding a plastidal transit peptide, especially in case in column 6 of Table I, application no. 8, in the same line as of the respective nucleic acid molecule according to 1) “plastidic” is depicted, or encoding a mitochondrial transit peptide, especially in case in column 6 of Table I, application no. 8, in the same line as of the respective nucleic acid molecule according to 1) “mitochondrial” is depicted, which are operable linked.

[51075] In another embodiment of said transgenic non-human organism said vector does not comprise beneath said nucleic acid molecule according to 1 (a), (b), (c), (d), (e), (f), (g), (h), (i), (j) or (k), and a promoter, preferably a promoter selected from the group consisting of Big35S, PCUbi, Super and USP; a nucleic acid molecule encoding a transit peptide, especially in case in column 6 of Table I, application no. 8, in the same line as of the respective nucleic acid molecule according to 1) “non-targeted” is depicted, which are operable linked.

[51076] In another embodiment of said transgenic non-human organism said vector comprises beneath said nucleic acid molecule according to 1 (a), (b), (c), (d), (e), (f), (g), (h), (i), (j) or (k), and a promoter, preferably a promoter selected from the group consisting of Big35S, PCUbi, Super and USP; a nucleic acid molecule encoding a transit peptide, preferably encoding a plastidal transit peptide, especially in case in column 6 of Table I, application no. 8, in the same line as of the respective nucleic acid molecule according to 1) “plastidic” is depicted, or encoding a mitochondrial transit peptide, especially in case in column 6 of Table I, application no. 8, in the same line as of the respective nucleic acid molecule according to 1) “mitochondrial” is depicted, which are operable linked; and wherein said nucleic acid molecule according to 1 (a), (b), (c), (d), (e), (f), (g), (h), (i), (j) or (k) encodes a polypeptide which has the activity of the respective polypeptide represented by a protein comprising a polypeptide as depicted in the respective line in column 5 of Table II, application no. 8.

[51077] In another embodiment of said transgenic non-human organism said vector does not comprise beneath said nucleic acid molecule according to 1 (a), (b), (c), (d), (e), (f), (g), (h), (i), (j) or (k), and a promoter, preferably a promoter selected from the group consisting of Big35S, PCUbi, Super and USP; a nucleic acid molecule encoding a transit peptide, especially in case in column 6 of Table I, application no. 8, in the same line as of the respective nucleic acid molecule according to 1) “non-targeted” is depicted, which are operable linked; and wherein said nucleic acid molecule according to 1 (a), (b), (c), (d), (e), (f), (g), (h), (i), (j) or (k) encodes a polypeptide which has the activity of the respective polypeptide represented by a protein comprising a polypeptide as depicted in the respective line in column 5 of Table II, application no. 8.

[51078] In another embodiment of said transgenic non-human organism said vector comprises beneath said nucleic acid molecule according to 1 (a), (b), (c), (d), (e), (f), (g), (h), (i), (j) or (k), and a promoter, preferably a promoter selected from the group consisting of Big35S, PCUbi, Super and USP; a nucleic acid molecule encoding a transit peptide, preferably encoding a plastidal transit peptide, especially in case in column 6 of Table I, application no. 8, in the same line as of the respective nucleic acid molecule according to 1) “plastidic” is depicted, or encoding a mitochondrial transit peptide, especially in case in column 6 of Table I, application no. 8, in the same line as of the respective nucleic acid molecule according to 1) “mitochondrial” is depicted, which are operable linked; and wherein said nucleic acid molecule according to 1 (a), (b), (c), (d), (e), (f), (g), (h), (i), (j) or (k) confers a generation or an increase of the respective fine chemical in a non-human organism or a part thereof as compared to a corresponding wild-type non-human organism or part thereof.

[51079] In another embodiment of said transgenic non-human organism said vector does not comprise beneath said nucleic acid molecule according to 1 (a), (b), (c), (d), (e), (f), (g), (h), (i), (j) or (k), and a promoter, preferably a promoter selected from the group consisting of Big35S, PCUbi, Super and USP; a nucleic acid molecule encoding a transit peptide, especially in case in column 6 of Table I, application no. 8, in the same line as of the respective nucleic acid molecule according to 1) “non-targeted” is depicted, which are operable linked; and wherein said nucleic acid molecule according to 1 (a), (b), (c), (d), (e), (f), (g), (h), (i), (j) or (k) confers a generation or an increase of the respective fine chemical in a non-human organism or a part thereof as compared to a corresponding wild-type non-human organism or part thereof.

[51080] In another embodiment of said transgenic non-human organism said vector comprises beneath said nucleic acid molecule according to 1 (a), (b), (c), (d), (e), (f), (g), (h), (i), (j) or (k), and a promoter, preferably a promoter selected from the group consisting of Big35S, PCUbi, Super and USP; a nucleic acid molecule encoding a transit peptide, preferably encoding a plastidal transit peptide, especially in case in column 6 of Table I, application no. 8, in the same line as of the respective nucleic acid molecule according to 1) “plastidic” is depicted, or encoding a mitochondrial transit peptide, especially in case in column 6 of Table I, application no. 8, in the same line as of the respective nucleic acid molecule according to 1) “mitochondrial” is depicted, which are operable linked; and wherein said nucleic acid molecule according to 1 (a), (b), (c), (d), (e), (f), (g), (h), (i), (j) or (k) encodes a polypeptide which has the activity of the respective polypeptide represented by a protein as depicted in the respective line in column 5 of Table II application no. 8 and confers a generation or an increase of the respective fine chemical in a non-human organism or a part thereof as compared to a corresponding wild-type non-human organism or part thereof.

[51081] In another embodiment of said transgenic non-human organism said vector does not comprise beneath said nucleic acid molecule according to 1 (a), (b), (c), (d), (e), (f), (g), (h), (i), (j) or (k), and a promoter, preferably a promoter selected from the group consisting of Big35S, PCUbi, Super and USP; a nucleic acid molecule encoding a transit peptide, especially in case in column 6 of Table I, application no. 8, in the same line as of the respective nucleic acid molecule according to 1) “non-targeted” is depicted, which are operable linked; and wherein said nucleic acid molecule according to 1 (a), (b), (c), (d), (e), (f), (g), (h), (i), (j) or (k) encodes a polypeptide which has the activity of the respective polypeptide represented by a protein as depicted in the respective line in column 5 of Table II application no. 8 (in the same line) and confers a generation or an increase of the respective fine chemical in a non-human organism or a part thereof as compared to a corresponding wild-type non-human organism or part thereof.

[51082] In a preferred embodiment of said transgenic non-human organism said nucleic acid molecule according to 1 (a), (b), (c), (d), (e), (f), (g), (h), (i), (j) or (k), said promoter and optionally said nucleic acid molecule encoding a transit peptide are encompassed in an expression cassette in said vector. Accordingly an embodiment the invention provides a non-human organism comprising or being transformed by a vector comprising an expression cassette comprising said nucleic acid molecule according to 1 (a), (b), (c), (d), (e), (f), (g), (h), (i), (j) or (k), said promoter and optionally said a nucleic acid molecule encoding a transit peptide, operable linked. Said expression cassette may encompass a terminator, too.

[51083] In a further embodiment the invention relates to a transgenic non-human organisms such as transgenic microorganism or transgenic plant comprising a nucleic acid molecule comprising
[51084] [1) a nucleic acid molecule selected from the group consisting of
   [51085] (a) a nucleic acid molecule encoding a polypeptide shown in Table II, application no. 8, column 5 or 8, preferably shown in Table II A, application no. 8, column 5, or in Table II A, application no. 8, column 8, or in Table II B, application no. 8, column 8, or a homolog or a fragment thereof;
   [51086] (b) a nucleic acid molecule shown in Table I, application no. 8, column 5 or 8, preferably shown in Table I A, application no. 8, column 5, or in Table I A, application no. 8, column 8, or in Table I B, application no. 8, column 8, preferably the coding region thereof, or a homolog or a fragment thereof;
   [51087] (c) a nucleic acid molecule, which, as a result of the degeneracy of the genetic code, can be derived from a polypeptide sequence depicted in column 5 or 8 of Table II, application no. 8, preferably shown in Table II A, application no. 8, column 5, or in Table II A, application no. 8, column 8, or in Table II B, application no. 8, column 8;
   [51088] (d) a nucleic acid molecule having at least 30% identity, preferably at least 40%, 50%, 60%, 70%, 75%, 80%, 85%, 90%, 95%, 96%, 97%, 98%, 99%, 99.5%, with the nucleic acid molecule sequence of a polynucleotide comprising the nucleic acid molecule shown in column 5 or 8 of Table I, application no. 8, preferably shown in Table I A, application no. 8, column 5, or in Table I A, application no. 8, column 8, or in Table I B, application no. 8, column 8, preferably the coding region thereof;
   [51089] (e) a nucleic acid molecule encoding a polypeptide having at least 30% identity, preferably at least 40%, 50% 60%, 70%, 75%, 80%, 85%, 90%, 95%, 96%, 97%, 98%, 99%, 99.5%, identity with the amino acid sequence of the polypeptide encoded by the nucleic acid molecule of (a), (b), (c) or (d);
   [51090] (f) a nucleic acid molecule which hybridizes with a nucleic acid molecule of (a), (b), (c), (d) or (e) under stringent hybridization conditions;
   [51091] (g) a nucleic acid molecule encoding a polypeptide which can be isolated with the aid of monoclonal or polyclonal antibodies made against a polypeptide encoded by one of the nucleic acid molecules of (a), (b), (c), (d), (e) or (f);
   [51092] (h) a nucleic acid molecule encoding a polypeptide comprising the consensus sequence or one or more polypeptide motifs as shown in column 8 of Table IV, application no. 8;
   [51093] (i) a nucleic acid molecule encoding a polypeptide having the activity represented by a respective protein as depicted in column 5 of Table II, application no. 8;
   [51094] (j) a nucleic acid molecule comprising a polynucleotide which is obtained by amplifying a cDNA library or a genomic library using the primers in Table III, application no. 8, column 8;
   [51095] and
   [51096] (k) nucleic acid molecule which is obtainable by screening a suitable nucleic acid library, specially a cDNA library and/or a genomic library, under stringent hybridization conditions with a probe comprising one of the sequences of the nucleic acid molecule of (a), (b), (c), (d), (e), (f), (g), (h), (i) or (j) or with a fragment of at least 15 nt, preferably 20 nt, 30 nt, 50 nt, 100 nt, 200 nt,500 nt, 1000 nt, 1500 nt, 2000 nt or 3000 nt of the nucleic acid molecule characterized in (a), (b), (c), (d), (e), (f), (g), (h), (i) or (j);
   [51097] or a nucleic acid molecule comprising a sequence which is complementary thereto;
      and, if desired
[51098] 2) nucleic acid molecule encoding a transit peptide, preferably encoding a plastidal transit peptide or a mitochondrial transit peptide;
   which are operable linked;]
   or comprising an expression cassette comprising
[51099] [0) a promoter, preferably a promoter selected from the group consisting of Big35S, PCUbi, Super and USP; and
[51100] 1) a nucleic acid molecule selected from the group consisting of
   [51101] (a) a nucleic acid molecule encoding a polypeptide shown in Table II, application no. 8, column 5 or 8, preferably shown in Table II A, application no. 8, column 5, or in Table II A, application no. 8, column 8, or in Table II B, application no. 8, column 8, or a homolog or a fragment thereof;
   [51102] (b) a nucleic acid molecule shown in Table I, application no. 8, column 5 or 8, preferably shown in Table I A, application no. 8, column 5, or in Table I A, application no. 8, column 8, or in Table I B, application no. 8, column 8, preferably the coding region thereof, or a homolog or a fragment thereof;
   [51103] (c) a nucleic acid molecule, which, as a result of the degeneracy of the genetic code, can be derived from a polypeptide sequence depicted in column 5 or 8 of Table II, application no. 8, preferably shown in Table II A, application no. 8, column 5, or in Table II A, application no. 8, column 8, or in Table II B, application no. 8, column 8;
   [51104] (d) a nucleic acid molecule having at least 30% identity, preferably at least 40%, 50%, 60%, 70%, 75%, 80%, 85%, 90%, 95%, 96%, 97%, 98%, 99%, 99.5%, with the nucleic acid molecule sequence of a polynucleotide comprising the nucleic acid molecule shown in column 5 or 8 of Table I, application no. 8, preferably shown in Table I A, application no. 8, column 5, or in Table I A, application no. 8, column 8, or in Table I B, application no. 8, column 8, preferably the coding region thereof;
   [51105] (e) a nucleic acid molecule encoding a polypeptide having at least 30% identity, preferably at least 40%, 50% 60%, 70%, 75%, 80%, 85%, 90%, 95%, 96%, 97%, 98%, 99%, 99.5%, identity with the amino acid sequence of the polypeptide encoded by the nucleic acid molecule of (a), (b), (c) or (d);
   [51106] (f) a nucleic acid molecule which hybridizes with a nucleic acid molecule of (a), (b), (c), (d) or (e) under stringent hybridization conditions;
   [51107] (g) a nucleic acid molecule encoding a polypeptide which can be isolated with the aid of monoclonal or polyclonal antibodies made against a polypeptide encoded by one of the nucleic acid molecules of (a), (b), (c), (d), (e) or (f);
   [51108] (h) a nucleic acid molecule encoding a polypeptide comprising the consensus sequence or one or more polypeptide motifs as shown in column 8 of Table IV, application no. 8;
   [51109] (i) a nucleic acid molecule encoding a polypeptide having the activity represented by a respective protein as depicted in column 5 of Table II, application no. 8;
   [51110] (j) a nucleic acid molecule comprising a polynucleotide which is obtained by amplifying a cDNA library or a genomic library using the primers in Table III, application no. 8, column 8;
   [51111] and
   [51112] (k) nucleic acid molecule which is obtainable by screening a suitable nucleic acid library, especially a cDNA library and/or a genomic library, under stringent hybridization conditions with a probe comprising one of the sequences of the nucleic acid molecule of (a), (b), (c), (d), (e), (f), (g), (h), (i) or (j) or with a fragment of at least 15 nt, preferably 20 nt, 30 nt, 50 nt, 100 nt, 200 nt,500 nt, 1000 nt, 1500 nt, 2000 nt or 3000 nt of the nucleic acid molecule characterized in (a), (b), (c), (d), (e), (f), (g), (h), (i) or (j);
   [51113] or a nucleic acid molecule comprising a sequence which is complementary thereto;]
      and, if desired
[51114] 2) nucleic acid molecule encoding a transit peptide, preferably encoding a plastidal transit peptide or a mitochondrial transit peptide;
   which are operable linked;]
   or comprising or being transformed by a vector comprising
[51115] [1) a nucleic acid molecule selected from the group consisting of
   [51116] (a) a nucleic acid molecule encoding a polypeptide shown in Table II, application no. 8, column 5 or 8, preferably shown in Table II A, application no. 8, column 5, or in Table II A, application no. 8, column 8, or in Table II B, application no. 8, column 8, or a homolog or a fragment thereof;
   [51117] (b) a nucleic acid molecule shown in Table I, application no. 8, column 5 or 8, preferably shown in Table I A, application no. 8, column 5, or in Table I A, application no. 8, column 8, or in Table I B, application no. 8, column 8, preferably the coding region thereof, or a homolog or a fragment thereof;
   [51118] (c) a nucleic acid molecule, which, as a result of the degeneracy of the genetic code, can be derived from a polypeptide sequence depicted in column 5 or 8 of Table II, application no. 8, preferably shown in Table II A, application no. 8, column 5, or in Table II A, application no. 8, column 8, or in Table II B, application no. 8, column 8;
   [51119] (d) a nucleic acid molecule having at least 30% identity, preferably at least 40%, 50%, 60%, 70%, 75%, 80%, 85%, 90%, 95%, 96%, 97%, 98%, 99%, 99.5%, with the nucleic acid molecule sequence of a polynucleotide comprising the nucleic acid molecule shown in column 5 or 8 of Table I, application no. 8, preferably shown in Table I A, application no. 8, column 5, or in Table I A, application no. 8, column 8, or in Table I B, application no. 8, column 8, preferably the coding region thereof;
   [51120] (e) a nucleic acid molecule encoding a polypeptide having at least 30% identity, preferably at least 40%, 50% 60%, 70%, 75%, 80%, 85%, 90%, 95%, 96%, 97%, 98%, 99%, 99.5%, identity with the amino acid sequence of the polypeptide encoded by the nucleic acid molecule of (a), (b), (c) or (d);
   [51121] (f) a nucleic acid molecule which hybridizes with a nucleic acid molecule of (a), (b), (c), (d) or (e) under stringent hybridization conditions;
   [51122] (g) a nucleic acid molecule encoding a polypeptide which can be isolated with the aid of monoclonal or polyclonal antibodies made against a polypeptide encoded by one of the nucleic acid molecules of (a), (b), (c), (d), (e) or (f);
   [51123] (h) a nucleic acid molecule encoding a polypeptide comprising the consensus sequence or one or more polypeptide motifs as shown in column 8 of Table IV, application no. 8;
   [51124] (i) a nucleic acid molecule encoding a polypeptide having the activity represented by a respective protein as depicted in column 5 of Table II, application no. 8;
   [51125] (j) a nucleic acid molecule comprising a polynucleotide which is obtained by amplifying a cDNA library or a genomic library using the primers in Table III, application no. 8, column 8;
   [51126] and
   [51127] (k) nucleic acid molecule which is obtainable by screening a suitable nucleic acid library, especially a cDNA library and/or a genomic library, under stringent hybridization conditions with a probe comprising one of the sequences of the nucleic acid molecule of (a), (b), (c), (d), (e), (f), (g), (h), (i) or (j) or with a fragment of at least 15 nt, preferably 20 nt, 30 nt, 50 nt, 100 nt, 200 nt,500 nt, 1000 nt, 1500 nt, 2000 nt or 3000 nt of the nucleic acid molecule characterized in (a), (b), (c), (d), (e), (f), (g), (h), (i) or (j);
   [51128] or a nucleic acid molecule comprising a sequence which is complementary thereto;]
      whereby, preferably, the nucleic acid molecule according to 1 (a), (b), (c), (d), (e), (f), (g), (h), (i), (j) or (k) distinguishes over the sequence depicted in Table I A and/or I B, application no. 8, column 5 or 8, or the coding regions thereof, by one or more nucleotides (especially but not exceeding 5%, preferably 4%, 3%, 2%, 1%, 0.5%, 0.2% or 0.1%). In an embodiment, the nucleic acid molecule of the invention does not consist of the sequence shown in Table I A and/or I B, application no. 8, column 5 or 8, or the coding region thereof. In another embodiment, the nucleic acid molecule of the present invention, preferably the coding region thereof, is at least 30%, 40%, 50%, 60%, 70%, 80%, 90%, 95% identical but less than 100%, 99.999%, 99.99%, 99.9%, 99%, 98%, 97%, 96% or 95% identical to the sequence shown in Table I A and/or I B, application no. 8, column 5 or 8, or the coding region thereof, respectively. In a further embodiment the nucleic acid molecule does not encode the polypeptide sequence shown in Table II A and/or II B, application no. 8, column 5 or 8 but homologs thereof. Accordingly, in one embodiment, the nucleic acid molecule of the present invention encodes in one embodiment a polypeptide which differs at least in one or more amino acids (especially but not exceeding 5%, preferably 4%, 3%, 2%, 1%, 0.5%, 0.2% or 0.1%) from the polypeptide shown in Table II, application no. 8, column 5 or 8 and does not encode a protein of the sequence shown in Table II A and/or II B, application no. 8, column 5 or 8. Accordingly, in one embodiment, the protein encoded by a sequence of a nucleic acid according to 1 (a), (b), (c), (d), (e), (f), (g), (h), (i), (j) or (k) does not consist of the sequence shown in Table I A and/or I B, application no. 8, column 5 or 8, or the coding region thereof. In a further embodiment, the protein of the present invention is at least 30%, 40%, 50%, 60%, 70%, 80%, 90%, 95% identical to protein sequence depicted in Table II A and/or II B, application no. 8, column 5 or 8 but less than 100%, preferably less than 99.999%, 99.99%, 99.9%, 99%, 98%, 97%, 96% or 95% identical to the sequence shown in Table II A and/or II B, application no. 8, column 5 or 8;
      as well as respective transgenic cells, tissue, parts of such non-human organism, e.g. plant cells, plant tissue, part of plants, like leaves, roots, stems, blossoms, seeds, fruits, pollen and the like.
      (All the references to Tables I to IV are references to the corresponding lines of Tables I to IV.)

[51129] In a preferred embodiment of said transgenic non-human organism said nucleic acid molecule according to 1 (a), (b), (c), (d), (e), (f), (g), (h), (i), (j) or (k) encodes a polypeptide which has the activity of the respective polypeptide represented by a protein comprising a polypeptide as depicted in the respective line in column 5 of Table II, application no. 8.

[51130] In another preferred embodiment of said transgenic non-human organism said nucleic acid molecule according to 1 (a), (b), (c), (d), (e), (f), (g), (h), (i), (j) or (k) confers a generation or an increase of the respective fine chemical in a non-human organism or a part thereof as compared to a corresponding wild-type non-human organism or part thereof.

[51131] In another preferred embodiment of said transgenic non-human organism said nucleic acid molecule according to 1 (a), (b), (c), (d), (e), (f), (g), (h), (i), (j) or (k) encodes a polypeptide which has the activity of the respective polypeptide represented by a protein as depicted in the respective line in column 5 of Table II application no. 8 and confers a generation or an increase of the respective fine chemical in a non-human organism or a part thereof as compared to a corresponding wild-type non-human organism or part thereof.

[51132] In another embodiment of said transgenic non-human organism the expression cassette comprises 2) a nucleic acid molecule encoding a transit peptide, preferably encoding a plastidal transit peptide, especially in case in column 6 of Table I, application no. 8, in the same line as of the respective nucleic acid molecule according to 1) “plastidic” is depicted, or encoding a mitochondrial transit peptide, especially in case in column 6 of Table I, application no. 8, in the same line as of the respective nucleic acid molecule according to 1) “mitochondrial” is depicted.

[51133] In another embodiment thereof the expression cassette does not comprise 2) a nucleic acid molecule encoding a transit peptide, especially in case in column 6 of Table I, application no. 8, in the same line as of the respective nucleic acid molecule according to 1) “non-targeted” is depicted.

[51134] In another embodiment of said transgenic non-human organism said vector comprises beneath said nucleic acid molecule according to 1 (a), (b), (c), (d), (e), (f), (g), (h), (i), (j) or (k), a promoter, preferably a promoter selected from the group consisting of Big35S, PCUbi, Super and USP, which are operable linked.

[51135] In a preferred embodiment of said transgenic non-human organism said vector comprises beneath said nucleic acid molecule according to 1 (a), (b), (c), (d), (e), (f), (g), (h), (i), (j) or (k), a promoter, preferably a promoter selected from the group consisting of Big35S, PCUbi, Super and USP, which are operable linked; and said nucleic acid molecule according to 1 (a), (b), (c), (d), (e), (f), (g), (h), (i), (j) or (k) encodes a polypeptide which has the activity of the respective polypeptide represented by a protein comprising a polypeptide as depicted in the respective line in column 5 of Table II, application no. 8.

[51136] In another preferred embodiment of said transgenic non-human organism said vector comprises beneath said nucleic acid molecule according to 1 (a), (b), (c), (d), (e), (f), (g), (h), (i), (j) or (k), a promoter, preferably a promoter selected from the group consisting of Big35S, PCUbi, Super and USP, which are operable linked; and said nucleic acid molecule according to 1 (a), (b), (c), (d), (e), (f), (g), (h), (i), (j) or (k) confers a generation or an increase of the respective fine chemical in a non-human organism or a part thereof as compared to a corresponding wild-type non-human organism or part thereof.

[51137] In another preferred embodiment of said transgenic non-human organism said vector comprises beneath said nucleic acid molecule according to 1 (a), (b), (c), (d), (e), (f), (g), (h), (i), (j) or (k), a promoter, preferably a promoter selected from the group consisting of Big35S, PCUbi, Super and USP, which are operable linked; and said nucleic acid molecule according to 1 (a), (b), (c), (d), (e), (f), (g), (h), (i), (j) or (k) encodes a polypeptide which has the activity of the respective polypeptide represented by a protein as depicted in the same line in column 5 of Table II, application no. 8, and confers a generation or an increase of the respective fine chemical in a non-human organism or a part thereof as compared to a corresponding wild-type non-human organism or part thereof.

[51138] In another embodiment of said transgenic non-human organism said vector comprises beneath said nucleic acid molecule according to 1 (a), (b), (c), (d), (e), (f), (g), (h), (i), (j) or (k), a nucleic acid molecule encoding a transit peptide, preferably encoding a plastidal transit peptide, especially in case in column 6 of Table I, application no. 8, in the same line as of the respective nucleic acid molecule according to 1) “plastidic” is depicted, or encoding a mitochondrial transit peptide, especially in case in column 6 of Table I, application no. 8, in the same line as of the respective nucleic acid molecule according to 1) “mitochondrial” is depicted, which are operable linked.

[51139] In another embodiment of said transgenic non-human organism said vector does not comprise beneath said nucleic acid molecule according to 1 (a), (b), (c), (d), (e), (f), (g), (h), (i), (j) or (k), a nucleic acid molecule encoding a transit peptide in case in column 6 of Table I, application no. 8, in the same line as of the respective nucleic acid molecule according to 1) “non-targeted” is depicted, which are operable linked.

[51140] In another embodiment of said transgenic non-human organism said vector comprises beneath said nucleic acid molecule according to 1 (a), (b), (c), (d), (e), (f), (g), (h), (i), (j) or (k), and a promoter, preferably a promoter selected from the group consisting of Big35S, PCUbi, Super and USP; a nucleic acid molecule encoding a transit peptide, preferably encoding a plastidal transit peptide, especially in case in column 6 of Table I, application no. 8, in the same line as of the respective nucleic acid molecule according to 1) “plastidic” is depicted, or encoding a mitochondrial transit peptide, especially in case in column 6 of Table I, application no. 8, in the same line as of the respective nucleic acid molecule according to 1) “mitochondrial” is depicted, which are operable linked.

[51141] In another embodiment of said transgenic non-human organism said vector does not comprise beneath said nucleic acid molecule according to 1 (a), (b), (c), (d), (e), (f), (g), (h), (i), (j) or (k), and a promoter, preferably a promoter selected from the group consisting of Big35S, PCUbi, Super and USP; a nucleic acid molecule encoding a transit peptide, especially in case in column 6 of Table I, application no. 8, in the same line as of the respective nucleic acid molecule according to 1) “non-targeted” is depicted, which are operable linked.

[51142] In another embodiment of said transgenic non-human organism said vector comprises beneath said nucleic acid molecule according to 1 (a), (b), (c), (d), (e), (f), (g), (h), (i), (j) or (k), and a promoter, preferably a promoter selected from the group consisting of Big35S, PCUbi, Super and USP; a nucleic acid molecule encoding a transit peptide, preferably encoding a plastidal transit peptide, especially in case in column 6 of Table I, application no. 8, in the same line as of the respective nucleic acid molecule according to 1) “plastidic” is depicted, or encoding a mitochondrial transit peptide, especially in case in column 6 of Table I, application no. 8, in the same line as of the respective nucleic acid molecule according to 1) “mitochondrial” is depicted, which are operable linked; and wherein said nucleic acid molecule according to 1 (a), (b), (c), (d), (e), (f), (g), (h), (i), (j) or (k) encodes a polypeptide which has the activity of the respective polypeptide represented by a protein comprising a polypeptide as depicted in the respective line in column 5 of Table II, application no. 8.

[51143] In another embodiment of said transgenic non-human organism said vector does not comprise beneath said nucleic acid molecule according to 1 (a), (b), (c), (d), (e), (f), (g), (h), (i), (j) or (k), and a promoter, preferably a promoter selected from the group consisting of Big35S, PCUbi, Super and USP; a nucleic acid molecule encoding a transit peptide, especially in case in column 6 of Table I, application no. 8, in the same line as of the respective nucleic acid molecule according to 1) “non-targeted” is depicted, which are operable linked; and wherein said nucleic acid molecule according to 1 (a), (b), (c), (d), (e), (f), (g), (h), (i), (j) or (k) encodes a polypeptide which has the activity of the respective polypeptide represented by a protein comprising a polypeptide as depicted in the respective line in column 5 of Table II, application no. 8.

[51144] In another embodiment of said transgenic non-human organism said vector comprises beneath said nucleic acid molecule according to 1 (a), (b), (c), (d), (e), (f), (g), (h), (i), (j) or (k), and a promoter, preferably a promoter selected from the group consisting of Big35S, PCUbi, Super and USP; a nucleic acid molecule encoding a transit peptide, preferably encoding a plastidal transit peptide, especially in case in column 6 of Table I, application no. 8, in the same line as of the respective nucleic acid molecule according to 1) “plastidic” is depicted, or encoding a mitochondrial transit peptide, especially in case in column 6 of Table I, application no. 8, in the same line as of the respective nucleic acid molecule according to 1) “mitochondrial” is depicted, which are operable linked; and wherein said nucleic acid molecule according to 1 (a), (b), (c), (d), (e), (f), (g), (h), (i), (j) or (k) confers a generation or an increase of the respective fine chemical in a non-human organism or a part thereof as compared to a corresponding wild-type non-human organism or part thereof.

[51145] In another embodiment of said transgenic non-human organism said vector does not comprise beneath said nucleic acid molecule according to 1 (a), (b), (c), (d), (e), (f), (g), (h), (i), (j) or (k), and a promoter, preferably a promoter selected from the group consisting of Big35S, PCUbi, Super and USP; a nucleic acid molecule encoding a transit peptide, especially in case in column 6 of Table I, application no. 8, in the same line as of the respective nucleic acid molecule according to 1) “non-targeted” is depicted, which are operable linked; and wherein said nucleic acid molecule according to 1 (a), (b), (c), (d), (e), (f), (g), (h), (i), (j) or (k) confers a generation or an increase of the respective fine chemical in a non-human organism or a part thereof as compared to a corresponding wild-type non-human organism or part thereof.

[51146] In another embodiment of said transgenic non-human organism said vector comprises beneath said nucleic acid molecule according to 1 (a), (b), (c), (d), (e), (f), (g), (h), (i), (j) or (k), and a promoter, preferably a promoter selected from the group consisting of Big35S, PCUbi, Super and USP; a nucleic acid molecule encoding a transit peptide, preferably encoding a plastidal transit peptide, especially in case in column 6 of Table I, application no. 8, in the same line as of the respective nucleic acid molecule according to 1) “plastidic” is depicted, or encoding a mitochondrial transit peptide, especially in case in column 6 of Table I, application no. 8, in the same line as of the respective nucleic acid molecule according to 1) “mitochondrial” is depicted, which are operable linked; and wherein said nucleic acid molecule according to 1 (a), (b), (c), (d), (e), (f), (g), (h), (i), (j) or (k) encodes a polypeptide which has the activity of the respective polypeptide represented by a protein as depicted in the respective line in column 5 of Table II application no. 8 and confers a generation or an increase of the respective fine chemical in a non-human organism or a part thereof as compared to a corresponding wild-type non-human organism or part thereof.

[51147] In another embodiment of said transgenic non-human organism said vector does not comprise beneath said nucleic acid molecule according to 1 (a), (b), (c), (d), (e), (f), (g), (h), (i), (j) or (k), and a promoter, preferably a promoter selected from the group consisting of Big35S, PCUbi, Super and USP; a nucleic acid molecule encoding a transit peptide, especially in case in column 6 of Table I, application no. 8, in the same line as of the respective nucleic acid molecule according to 1) “non-targeted” is depicted, which are operable linked; and wherein said nucleic acid molecule according to 1 (a), (b), (c), (d), (e), (f), (g), (h), (i), (j) or (k) encodes a polypeptide which has the activity of the respective polypeptide represented by a protein as depicted in the respective line in column 5 of Table II application no. 8 and confers a generation or an increase of the respective fine chemical in a non-human organism or a part thereof as compared to a corresponding wild-type non-human organism or part thereof.

[51148] In a preferred embodiment of said transgenic non-human organism said nucleic acid molecule according to 1 (a), (b), (c), (d), (e), (f), (g), (h), (i), (j) or (k), said promoter and optionally said nucleic acid molecule encoding a transit peptide are encompassed in an expression cassette in said vector. Accordingly an embodiment the invention provides a non-human organism comprising or being transformed by a vector comprising an expression cassette comprising said nucleic acid molecule according to 1 (a), (b), (c), (d), (e), (f), (g), (h), (i), (j) or (k), said promoter and optionally said a nucleic acid molecule encoding a transit peptide, operable linked. Said expression cassette may encompass a terminator, too.

[51149] In an embodiment thereof the transgenic non-human organism is a microorganism selected from the group consisting of Charophyceae such as the genera Chara, Nitella e.g. the species Chara globularis, Chara vulgaris, Nitella flexilis, Chlorophyceae such as the genera Acrosiphonia, Spongomorpha, Urospora, Bryopsis, Pseudobryopsis, Trichosolen, Dichotomosiphon, Caulerpa, Rhipilia, Blastophysa, Avrainvillea, Chlorodesmis, Codium, Espera, Halicystis, Halimeda, Penicillus, Pseudocodium, Rhipiliopsis, Rhipocephalus, Tydemania, Udotea, Derbesia, Acrochaete, Aphanochaete, Bolbocoleon, Chaetobolus, Chaetonema, Chaetophora, Chlorotylium, Desmococcus, Draparnaldia, Draparnaldiopsis, Ectochaete, Endophyton, Entocladia, Epicladia, Internoretia, Microthamnion, Ochlochaete, Phaeophila, Pilinella, Pringsheimiella, Protoderma, Pseudendoclonium, Pseudodictyon, Pseudopringsheimia, Pseudulvella, Schizomeris, Stigeoclonium, Thamniochaete, Ulvella, Pilinia, Tellamia, Helicodictyon, Actidesmium, Ankyra, Characium, Codiolum, Sykidion, Keratococcus, Prototheca, Bracteacoccus Chlorococcum, Excentrosphaera, Hormidium, Oophila, Schroederia, Tetraedron, Trebouxia Chlorosarcinopsis, Gomphonitzschia, Coccomyxa, Dactylothece, Diógenes, Disporá, Gloeocystis, Mycanthococcus, Ourococcus, Coelastrum, Dicranochaete, Botryococcus, Dictyosphaerium, Dimorphococcus, Chlorochytrium, Kentrosphaera, Phyllobium, Gomontia, Hormotila, Euastropsis, Hydrodictyon, Pectodictyon, Pediastrum, Sorastrum, Tetrapedia, Acanthosphaera, Echinosphaerella, Echinosphaeridium, Errerella, Gloeoactinium, Golenkeniopsis Golenkinia, Micractinium, Ankistrodesmus, Chlorella, Chodatella, Closteriopsis, Cryocystis, Dactylococcus, Dematractum, Eremosphaera, Eutetramorus, Franceia, Glaucocystis, Gloeotaenium, Kirchneriella, Lagerheimiella, Monoraphidium, Nannochloris, Nephrochlamys, Nephrocytium, Oocystis, Oonephris, Pachycladon, Palmellococcus, Planktosphaeria, Polyedriopsis, Pseudoraciborskia, Quadrigula, Radiococcus, Rochiscia, Scotiella, Selanastrum, Thorakochloris, Treubaria, Trochiscia, Westella, Zoochlorella, Ostreobium, Phyllosiphon, Protosiphon, Rhodochytrium, Actinastrum, Coronastrum, Crucigenia, Dictymocystis, Enallax, Scenedesmus, Selenastrum, Tetradesmus, Tetrallantos, Tetrastrum, Chlorosarcina, Anadyomene, Valoniopsis,

[51150] Ventricaria, Basicladia, Chaetomorpha, Cladophora, Lola Pithophora Rhizoclonium Chaetosphaeridium, Conochaete, Coleochaete, Oligochaetophora, Polychaetophora, Cylindrocapsa, Gongrosira, Protococcus, Acetabularia, Batophora, Bornetella, Dasycladus, Halicoryne, Neomeris, Elakatothrix, Raphidonema, Microspora, Bulbochaete, Oedocladium, Oedogonium, Prasiola, Rosenvingiella, Schizogonium, Apjohnia, Chamaedoris, Cladophoropsis, Siphonocladus, Spongocladia, Boergesenia, Boodlea, Cystodictyon, Dictyosphaeria, Ernodesmis, Microdictyon, Struvea, Valonia, Sphaeroplea, Malleochloris, Stylosphaeridium, Gloeococcus, Palmella, Palmodictyon, Palmophyllum, Pseudospherocystis, Sphaerocystis, Urococcus, Apiocystis, Chaetopeltis, Gemellicystis, Paulschulzia, Phacomyxa, Pseudotetraspora, Schizochlamys, Tetraspora, Cephaleuros, Ctenocladus, Epibolium, Leptosira, Trentepohlia, Diplochaete, Monostroma, Binuclearia, Geminella, Klebsormidium, Planetonema, Radiofilum, Stichococcus, Ulothrix, Uronema, Blidingia, Capsosiphon, Chloropelta, Enteromorpha, Percursaria, Ulva, Ulvaria, Brachiomonas, Carteria, Chlainomonas, Chlamydomonas, Chlamydonephris, Chlorangium, Chlorogonium, Cyanidium, Fortiella, Glenomonas, Gloeomonas, Hyalogonium, Lobomonas Polytoma, Pyramichlamys, Scourfieldia, Smithsonimonas, Sphaerellopsis, Sphenochloris, Spirogonium, Collodictyon, Dunaliella, Haematococcus, Stephanosphaera, Coccomonas, Dysmorphococcus, Phacotus, Pteromonas, Thoracomonas, Wislouchiella, Mascherina, Pyrobotrys, Spondylomorum, Eudorina, Gonium, Oltmannsiella, Pandorina, Platydorina, Pleodorina,

[51151] Stephanoon, Volvox, Volvulina, Actinotaenium, Arthrodesmus, Bambusina Closterium, Cosmarium, Desmidium, Euastrum, Groenbladia, Hyalotheca, Micrasterias, Penium, Phymatodocis, Pleurotaenium, Sphaerozosma, Spinoclosterium, Spinocosmarium, Spondylosium, Staurastrum, Tetmemorus, Triploceras, Xanthidium, Cylindrocystis, Genicularia, Gonatozygon, Mesotaenium, Netrium, Roya, Spirotaenia, Cosmocladium, Debarya, Docidium, Euastridium, Hallasia, Mougeotia, Mougeotiopsis, Sirogonium, Spirogyra, Staurodesmus, Teilingia, Zygnema, Zygogonium, e.g. the species Caulerpa taxifolia, Prototheca wickerhamii, Ankistrodesmus falcatus, Chlorella ellipsoidea, Chlorella pyrenoidosa, Clorella sorokiniana, Chlorella vulgaris, Scenedesmus obliquus, Scenedesmus quadricauda, Selenastrum capricornutum, Selenastrum undecimnotata, Cladophora glomerata, Chlamydomonas eugametos, Chlamydomonas reinhardtii, Cyanidium caldarium, Dunaliella salina, Dunaliella tertiolecta, Euglena gracilis, Haematococcus pluvialis, Coniugatophyceae, Prasinophyceae Trebouxiophyceae, Ulvophyceae, Chlorodendraceae, Pedinomonadales, Halosphaeraceae, Pterospermataceae, Monomastigaceae, Pyramimonadaceae, Chlorodendraceae such as the genera Prasinocladus e.g. the species Prasinocladus ascus, Halosphaeraceae, Pedinomonadales, Pedinomonadaceae such as the genera Pedinomonas, Pterospermataceae such as the genera Pachysphaera, Pterosperma, Halosphaera, Pyramimonas, Bacillariophyceae, Chrysophyceae, Craspedophyceae, Euglenophyceae, Prymnesiophyceae, Phaeophyceae, Dinophyceae, Rhodophyceae, Xanthophyceae, Prasinophyceae such as the genera Nephroselmis, Prasinococcus, Scherffelia, Tetraselmis, Mantoniella, Ostreococcus e.g. the species Nephroselmis olivacea, Prasinococcus capsulatus, Scherffelia dubia, Tetraselmis chui, Tetraselmis suecica, Mantoniella squamata or Ostreococcus tauri.

[51152] In an embodiment thereof the transgenic non-human organism is a plant (or a part thereof), preferably a monocotyledonous or a dicotyledonous plant. Preferably the plant is selected from the group consisting of Anacardiaceae such as the genera Pistacia, Mangifera, Anacardium e.g. the species Pistacia vera [pistachios, Pistazie], Mangifer indica [Mango] or Anacardium occidentale [Cashew]; Asteraceae such as the genera Calendula, Carthamus, Centaurea, Cichorium, Cynara, Helianthus, Lactuca, Locusta, Tagetes, Valeriana e.g. the species Calendula officinalis [Marigold], Carthamus tinctorius [safflower], Centaurea cyanus [cornflower], Cichorium intybus [blue daisy], Cynara scolymus [Artichoke], Helianthus annus [sunflower], Lactuca sativa, Lactuca crispa, Lactuca esculenta, Lactuca scariola L. ssp. sativa, Lactuca scariola L. var. integrate, Lactuca scariola L. var. integrifolia, Lactuca sativa subsp. romana, Locusta communis, Valeriana locusta [lettuce], Tagetes lucida, Tagetes erecta or Tagetes tenuifolia [Marigold]; Apiaceae such as the genera Daucus e.g. the species Daucus carota [carrot]; Betulaceae such as the genera Corylus e.g. the species Corylus avellana or Corylus colurna [hazelnut]; Boraginaceae such as the genera Borago e.g. the species Borago officinalis [borage]; Brassicaceae such as the genera Brassica, Melanosinapis, Sinapis, Arabadopsis e.g. the species Brassica napus, Brassica rapa ssp. [canola, oilseed rape, turnip rape], Sinapis arvensis Brassica juncea, Brassica juncea var. juncea, Brassica juncea var. crispifolia, Brassica juncea var. foliosa, Brassica nigra, Brassica sinapioides, Melanosinapis communis [mustard], Brassica oleracea [fodder beet] or Arabidopsis thaliana; Bromeliaceae such as the genera Anana, Bromelia e.g. the species Anana comosus, Ananas ananas or Bromelia comosa [pineapple]; Caricaceae such as the genera Carica e.g. the species Carica papaya [papaya]; Cannabaceae such as the genera Cannabis e.g. the species Cannabis sative [hemp], Convolvulaceae such as the genera Ipomea, Convolvulus e.g. the species Ipomoea batatus, Ipomoea pandurata, Convolvulus batatas, Convolvulus tiliaceus, Ipomoea fastigiata, Ipomoea tiliacea, Ipomoea triloba or Convolvulus panduratus [sweet potato, Man of the Earth, wild potato], Chenopodiaceae such as the genera Beta, i.e. the species Beta vulgaris, Beta vulgaris var. altissima, Beta vulgaris var. Vulgaris, Beta maritima, Beta vulgaris var. perennis, Beta vulgaris var. conditiva or Beta vulgaris var. esculenta [sugar beet]; Cucurbitaceae such as the genera Cucubita e.g. the species Cucurbita maxima, Cucurbita mixta, Cucurbita pepo or Cucurbita moschata [pumpkin, squash]; Elaeagnaceae such as the genera Elaeagnus e.g. the species Olea europaea [olive]; Ericaceae such as the genera Kalmia e.g. the species Kalmia latifolia, Kalmia angustifolia, Kalmia microphylla, Kalmia polifolia, Kalmia occidentalis, Cistus chamaerhodendros or Kalmia lucida [American laurel, broad-leafed laurel, calico bush, spoon wood, sheep laurel, alpine laurel, bog laurel, western bog-laurel, swamp-laurel]; Euphorbiaceae such as the genera Manihot, Janipha, Jatropha, Ricinus e.g. the species Manihot utilissima, Janipha manihot, Jatropha manihot, Manihot aipil, Manihot dulcis, Manihot manihot, Manihot melanobasis, Manihot esculenta [manihot, arrowroot, tapioca, cassava] or Ricinus communis [castor bean, Castor Oil Bush, Castor Oil Plant, Palma Christi, Wonder Tree]; Fabaceae such as the genera Pisum, Albizia, Cathormion, Feuillea, Inga, Pithecolobium, Acacia, Mimosa, Medicajo, Glycine, Dolichos, Phaseolus, Soja e.g. the species Pisum sativum, Pisum arvense, Pisum humile [pea], Albizia berteriana, Albizia julibrissin, Albizia lebbeck, Acacia berteriana, Acacia littoralis, Albizia berteriana, Albizzia berteriana, Cathormion berteriana, Feuillea berteriana, Inga fragrans, Pithecellobium berterianum, Pithecellobium fragrans, Pithecolobium berterianum, Pseudalbizzia berteriana, Acacia julibrissin, Acacia nemu, Albizia nemu, Feuilleea julibrissin, Mimosa julibrissin, Mimosa speciosa, Sericanrda julibrissin, Acacia lebbeck, Acacia macrophylla, Albizia lebbek, Feuilleea lebbeck, Mimosa lebbeck, Mimosa speciosa [bastard logwood, silk tree, East Indian Walnut], Medicago sativa, Medicago falcata, Medicago varia [alfalfa], Glycine max [soybean], Dolichos soja, Glycine gracilis, Glycine hispida, Phaseolus max or Soja hispida; Geraniaceae such as the genera Pelargonium, Cocos, Oleum e.g. the species Cocos nucifera, Pelargonium grossularioides or Oleum cocois [coconut]; Gramineae such as the genera Saccharum e.g. the species Saccharum officinarum; Juglandaceae such as the genera Juglans, Wallia e.g. the species Juglans regia, Juglans ailanthifolia, Juglans sieboldiana, Juglans cinerea, Wallia cinerea, Juglans bixbyi, Juglans californica, Juglans hindsii, Juglans intermedia, Juglans jamaicensis, Juglans major, Juglans microcarpa, Juglans nigra or Wallia nigra [walnut, black walnut, common walnut, persian walnut, white walnut, butternut, black walnut]; Lauraceae such as the genera Persea, Laurus e.g. the species laurel Laurus nobilis [bay, laurel, bay laurel, sweet bay], Persea americana Persea americana, Persea gratissima or Persea persea [avocado]; Leguminosae such as the genera Arachis e.g. the species Arachis hypogaea [peanut]; Linaceae such as the genera Linum, Adenolinum e.g. the species Linum usitatissimum, Linum humile, Linum austriacum, Linum bienne, Linum angustifolium, Linum catharticum, Linum flavum, Linum grandiflorum, Adenolinum grandiflorum, Linum lewisii, Linum narbonense, Linum perenne, Linum perenne var. lewisii, Linum pratense or Linum trigynum [flax, linseed]; Lythrarieae such as the genera Punica e.g. the species Punica granatum [pomegranate]; Malvaceae such as the genera Gossypium e.g. the species Gossypium hirsutum, Gossypium arboreum, Gossypium barbadense, Gossypium herbaceum or Gossypium thurberi [cotton]; Musaceae such as the genera Musa e.g. the species Musa nana, Musa acuminata, Musa paradisiaca, Musa spp. [banana]; Onagraceae such as the genera Camissonia, Oenothera e.g. the species Oenothera biennis or Camissonia brevipes [primrose, evening primrose]; Palmae such as the genera Elacis e.g. the species Elaeis guineensis [oil plam]; Papaveraceae such as the genera Papaver e.g. the species Papaver orientale, Papaver rhoeas, Papaver dubium [poppy, oriental poppy, corn poppy, field poppy, shirley poppies, field poppy, long-headed poppy, long-pod poppy]; Pedaliaceae such as the genera Sesamum e.g. the species Sesamum indicum [sesame]; Piperaceae such as the genera Piper, Artanthe, Peperomia, Steffensia e.g. the species Piper aduncum, Piper amalago, Piper angustifolium, Piper auritum, Piper betel, Piper cubeba, Piper longum, Piper nigrum, Piper retrofractum, Artanthe adunca, Artanthe elongata, Peperomia elongata, Piper elongatum, Steffensia elongata. [Cayenne pepper, wild pepper]; Poaceae such as the genera Hordeum, Secale, Avena, Sorghum, Andropogon, Holcus, Panicum, Oryza, Zea, Triticum e.g. the species Hordeum vulgare, Hordeum jubatum, Hordeum murinum, Hordeum secalinum, Hordeum distichon Hordeum aegiceras, Hordeum hexastichon, Hordeum hexastichum, Hordeum irregulare, Hordeum sativum, Hordeum secalinum [barley, pearl barley, foxtail barley, wall barley, meadow barley], Secale cereale [rye], Avena sativa, Avena fatua, Avena byzantina, Avena fatua var. sativa, Avena hybrida [oat], Sorghum bicolor, Sorghum halepense, Sorghum saccharatum, Sorghum vulgare, Andropogon drummondii, Holcus bicolor, Holcus sorghum, Sorghum aethiopicum, Sorghum arundinaceum, Sorghum caffrorum, Sorghum cernuum, Sorghum dochna, Sorghum drummondii, Sorghum durra, Sorghum guineense, Sorghum lanceolatum, Sorghum nervosum, Sorghum saccharatum, Sorghum subglabrescens, Sorghum verticilliflorum, Sorghum vulgare, Holcus halepensis, Sorghum miliaceum millet, Panicum militaceum [Sorghum, millet], Oryza sativa, Oryza latifolia [rice], Zea mays [corn, maize] Triticum aestivum, Triticum durum, Triticum turgidum, Triticum hybernum, Triticum macha, Triticum sativum or Triticum vulgare [wheat, bread wheat, common wheat], Proteaceae such as the genera Macadamia e.g. the species Macadamia intergrifolia [macadamia]; Rubiaceae such as the genera Coffea e.g. the species Cofea spp., Coffea arabica, Coffea canephora or Coffea liberica [coffee]; Scrophulariaceae such as the genera Verbascum e.g. the species Verbascum blattaria, Verbascum chaixii, Verbascum densiflorum, Verbascum lagurus, Verbascum longifolium, Verbascum lychnitis, Verbascum nigrum, Verbascum olympicum, Verbascum phlomoides, Verbascum phoenicum, Verbascum pulverulentum or Verbascum thapsus [mullein, white moth mullein, nettle-leaved mullein, dense-flowered mullein, silver mullein, long-leaved mullein, white mullein, dark mullein, greek mullein, orange mullein, purple mullein, hoary mullein, great mullein]; Solanaceae such as the genera Capsicum, Nicotiana, Solanum, Lycopersicon e.g. the species Capsicum annuum, Capsicum annuum var. glabriusculum, Capsicum frutescens [pepper], Capsicum annuum [paprika], Nicotiana tabacum, Nicotiana alata, Nicotiana attenuata, Nicotiana glauca, Nicotiana langsdorffii, Nicotiana obtusifolia, Nicotiana quadrivalvis, Nicotiana repanda, Nicotiana rustica, Nicotiana sylvestris [tobacco], Solanum tuberosum [potato], Solanum melongena [egg-plant] (Lycopersicon esculentum, Lycopersicon lycopersicum, Lycopersicon pyriforme, Solanum integrifolium or Solanum lycopersicum [tomato]; Sterculiaceae such as the genera Theobroma e.g. the species Theobroma cacao [cacao]; Theaceae such as the genera Camellia e.g. the species Camellia sinensis) [tea]

[51153] Particular preference is given to transgenic crop plants such as by way of example barley, wheat, rye, oats, corn, soybean, rice, cotton, sugar beet, oilseed rape and canola, sunflower, flax, hemp, thistle, potatoes, tobacco, tomatoes, tapioca, cassava, arrowroot, alfalfa, lettuce and the various tree, nut and vine species; especial preference is given to monocotyledonous crop plants like corn, wheat or rice; in another embodiment special preference is given to dicotyledonous crop plants like soy bean, oil seed rape (including canola and winter oil seed rape), cotton.

[51154] The term “transgenic plants” used in accordance with the invention also refers to the progeny of a transgenic plant, for example the T₁, T₂, T₃ and subsequent plant generations or the BC₁, BC₂, BC₃ and subsequent plant generations. Thus, the transgenic plants according to the invention can be raised and selfed or crossed with other individuals in order to obtain further transgenic plants according to the invention. Transgenic plants may also be obtained by propagating transgenic plant cells vegetatively. The present invention also relates to transgenic plant material, which can be derived from a transgenic plant population according to the invention. Such material includes plant cells and certain tissues, organs and parts of plants in all their manifestations, such as seeds, leaves, anthers, fibers, tubers, roots, root hairs, stems, embryo, calli, cotyledons, petioles, harvested material, plant tissue, reproductive tissue, pollen, and cell cultures, which are derived from the actual transgenic plant and/or can be used for bringing about the transgenic plant. Any transformed plant obtained according to the invention can be used in a conventional breeding scheme or in vitro plant propagation to produce more transformed plants with the same characteristics and/or can be used to introduce the same characteristic in other varieties of the same or related species. Such plants are also part of the invention. Seeds obtained from the transformed plants genetically also contain the same characteristic and are part of the invention. As mentioned before, the present invention is in principle applicable to any plant and crop that can be transformed with any of the transformation method known to those skilled in the art.

[51155] An “isolated” nucleic acid molecule is one that is substantially separated from other nucleic acid molecules, which are present in the natural source of the nucleic acid. That means other nucleic acid molecules are present in an amount less than 5% based on weight of the amount of the desired nucleic acid, preferably less than 2% by weight, more preferably less than 1% by weight, most preferably less than 0.5% by weight. Preferably, an “isolated” nucleic acid is free of some of the sequences that naturally flank the nucleic acid (i.e., sequences located at the 5′ and 3′ ends of the nucleic acid) in the genomic DNA of the non-human organism from which the nucleic acid is derived. For example, in various embodiments, the FCRP encoding nucleic acid molecule can contain less than about 5 kb, 4 kb, 3 kb, 2 kb, 1 kb, 0.5 kb or 0.1 kb of nucleotide sequences which naturally flank the nucleic acid molecule in genomic DNA of the cell from which the nucleic acid is derived. Moreover, an “isolated” nucleic acid molecule, such as a cDNA molecule, can be free from some of the other cellular material with which it is naturally associated, or culture medium when produced by recombinant techniques, or chemical precursors or other chemicals when chemically synthesized.

[51156] A nucleic acid molecule of the present invention, e.g., a nucleic acid molecule encoding a FCRP, especially the coding region thereof, or a portion thereof which confers the production or increased production of the fine chemical, can be isolated using standard molecular biological techniques and the sequence information provided herein. For example, an A. thaliana FCRP encoding cDNA can be isolated from a A. thaliana c-DNA library or a E. coli, Saccharomyces cerevisiae, Synechocystis sp., Brassica napus, Glycine max, Zea mays or Oryza sativa FCRP encoding cDNA can be isolated from a E. coli, Saccharomyces cerevisiae, Synechocystis sp., Brassica napus, Glycine max, Zea mays or Oryza sativa c-DNA library respectively using all or portion of one of the respective sequences. Moreover, a nucleic acid molecule encompassing all or a portion of one of the sequences of Table I can be isolated by the polymerase chain reaction using oligonucleotide primers designed based upon this sequence. For example, mRNA can be isolated from plant cells (e.g., by the guanidiniumthiocyanate extraction procedure of Chirgwin et al., Biochemistry 18, 5294 (1979)) and cDNA can be prepared using reverse transcriptase (e.g., Moloney MLV reverse transcriptase, available from Gibco/BRL, Bethesda, MD; or AMV reverse transcriptase, available from Seikagaku America, Inc., St. Petersburg, Fla.). Synthetic oligonucleotide primers for polymerase chain reaction amplification can be designed based upon one of the nucleotide sequences shown in Table I. A nucleic acid molecule of the invention can be amplified using cDNA or, alternatively, genomic DNA, as a template and appropriate oligonucleotide primers according to standard PCR amplification techniques. The nucleic acid molecule so amplified can be cloned into an appropriate vector and characterized by DNA sequence analysis. Furthermore, oligonucleotides corresponding to a FCRP encoding nucleotide sequence can be prepared by standard synthetic techniques, e.g., using an automated DNA synthesizer.

[51157] In an embodiment, an isolated nucleic acid molecule of the invention comprises one of the nucleic acid molecules as shown in Table I, especially the coding region thereof, and if desired, as well as a 5′ untranslated sequence and 3′ untranslated sequence.

[51158] Moreover, the nucleic acid molecule of the invention can comprise only a portion of the coding region of one of the nucleic acid molecule of Table I, for example, a fragment which can be used as a probe or primer or a fragment encoding a biologically active portion of a FCRP.

[51159] Portions of proteins encoded by the FCRP encoding nucleic acid molecules of the invention are preferably biologically active portions described herein. As used herein, the term “biologically active portion of” a FCRP is intended to include a portion, e.g. a domain/motif, of the protein being responsible for the ability of the protein to enable the production or increased production of the fine chemical. To determine whether a FCRP, or a biologically active portion thereof, results in a production or an increased production of the fine chemical in the non-human organism, like a microorganism or a plant, an analysis of the non-human organism comprising the FCRP may be performed. Such analysis methods are well known to those skilled in the art, as detailed in the Examples. More specifically, nucleic acid fragments encoding biologically active portions of a FCRP can be prepared by isolating a portion of one of the sequences of the nucleic acid of Table I, e.g. expressing the encoded portion of the FCRP or peptide (e.g. by recombinant expression in vitro) and assessing the activity of the encoded portion of the FCRP or peptide.

[51160] Biologically active portions of a FCRP are encompassed by the present invention and include peptides comprising amino acid sequences derived from the amino acid sequence of a FCRP encoding gene, or the amino acid sequence of a protein homologous to a FCRP, which include fewer amino acids than a full length FCRP or the full length protein which is homologous to a FCRP, and exhibits at least some enzymatic or biological activity of a FCRP. Typically, biologically active portions (e.g., peptides which are, for example, 5, 10, 15, 20, 30, 35, 36, 37, 38, 39, 40, 50, 75, 100, 125, 150 or more amino acids in length) comprise a domain or motif with at least one activity of a FCRP. Moreover, other biologically active portions in which other regions of the protein are deleted, can be prepared by recombinant techniques and evaluated for one or more of the activities described herein. Preferably, the biologically active portions of a FCRP include one or more selected domains/motifs or portions thereof having biological activity.

[51161] The term “biological active portion” or “biological activity” means a polypeptide as depicted in the respective line in Table II, application no. 8, column 3 or a portion of said polypeptide which still has at least 10% or 20%, preferably 30%, 40%, 50% or 60%, especially preferably 70%, 75%, 80%, 90% or 95% of the enzymatic or biological activity of the natural or starting enzyme or protein.

[51162] In the process according to the invention nucleic acid sequences or molecules can be used, which, if appropriate, contain synthetic, non-natural or modified nucleotide bases, which can be incorporated into DNA or RNA. Said synthetic, non-natural or modified bases can for example increase the stability of the nucleic acid molecule outside or inside a cell. The nucleic acid molecules of the invention can contain the same modifications as aforementioned.

[51163] As used in the present context the term “nucleic acid molecule” may also encompass the untranslated sequence or molecule located at the 3′ and at the 5′ end of the coding gene region, for example at least 500, preferably 200, especially preferably 100, nucleotides of the sequence upstream of the 5′ end of the coding region and at least 100, preferably 50, especially preferably 20, nucleotides of the sequence downstream of the 3′ end of the coding gene region. It is often advantageous only to choose the coding region for cloning and expression purposes.

[51164] Preferably, the nucleic acid molecule used in the process according to the invention or the nucleic acid molecule of the invention is an isolated nucleic acid molecule. In one embodiment, the nucleic acid molecule of the invention is the nucleic acid molecule used in the process of the invention.

[51165] The nucleic acid molecules used in the process, for example the polynucleotide of the invention or of a part thereof can be isolated using molecular-biological standard techniques and the sequence information provided herein. Also, for example a homologous sequence or homologous, conserved sequence regions at the DNA or amino acid level can be identified with the aid of comparison algorithms. The former can be used as hybridization probes under standard hybridization techniques (for example those described in Sambrook et al., “Molecular Cloning: A Laboratory Manual” 2^{nd} ed., Cold Spring Harbor Laboratory, Cold Spring Harbor Laboratory Press, Cold Spring Harbor, N.Y., 1989) for isolating further nucleic acid sequences useful in this process.

[51166] Synthetic oligonucleotide primers for the amplification, e.g. as shown in the respective line in Table III, application no. 8, column 8, by means of polymerase chain reaction can be generated on the basis of a sequence shown herein, for example the sequence shown in the respective line in Table I, application no. 8, columns 5 or 8, or the sequences derived from Table II, application no. 8, columns 5 or 8, respectively.

[51167] Moreover, it is possible to identify a conserved region of a protein from various organism by carrying out protein sequence alignments with the polypeptide encoded by the nucleic acid molecules of the present invention, in particular with the sequences encoded by the nucleic acid molecule shown in the respective line in column 5 or 8 of Table I, application no. 8, from which conserved regions, and in turn, degenerate primers can be derived. Conserved regions are those, which show a very little variation in the amino acid in one particular position of several homologs from different origin. The consensus sequence and polypeptide motifs shown in the respective line in column 8 of Table IV, application no. 8, are derived from such alignments of homologous proteins.

[51168] In an embodiment of the present invention, in the method of the present invention the activity of a polypeptide comprising or consisting of a consensus sequence or at least one polypeptide motif shown in the respective line in Table IV, application no. 8, column 8, is increased. In another embodiment thereof, the method of the present invention relates to a polypeptide comprising or consisting of a consensus sequence shown in the respective line in Table IV, application no. 8, column 8 or comprising at least one polypeptide motif shown in the respective line in Table IV, application no. 8, column 8, whereby not more than 20, 15, 10, 9, 8, 7, 6, 5 4, 3, 2 or 1, or 0 of the amino acid positions indicated can be replaced by any amino acid. In another embodiment thereof, the method of the present invention relates to a polypeptide comprising or consisting of a consensus sequence shown in the respective line in Table IV, application no. 8, column 8 or comprising at least one polypeptide motif shown in the respective line in Table IV, application no. 8, column 8, whereby not more than 15%, 10%, 5%, 4%, 3%, 2% or 1%, or 0% of the amino acid positions defined as distinct specific amino acids are/is replaced by another amino acid. In another embodiment thereof, the method of the present invention relates to a polypeptide comprising or consisting of a consensus sequence shown in the respective line in Table IV, application no. 8, column 8 or comprising at least one polypeptide motif shown in the respective line in Table IV, application no. 8, column 8, whereby not more than 20, 15, 10, 9, 8, 7, 6, 5, 4, 3, 2 or 1, or 0 amino acids are inserted into a consensus sequence or polypeptide motif.

[51169] In an embodiment of the present invention, in the method of the present invention the activity of a polypeptide comprising or consisting of a consensus sequence or at least one polypeptide motif shown in the respective line in Table IV, application no. 8, column 8, is increased, whereby said polypeptide distinguishes over the sequence depicted in Table II, application no. 8, columns 5 or 8 by one or more amino acids.

[51170] In one embodiment, said polypeptide of the invention distinguishes over the sequence shown in the respective line in Table II, application no. 8, columns 5 and 8 by more than 5, 6, 7, 8 or 9 amino acids, preferably by more than 10, 15, 20, 25 or 30 amino acids, even more preferred are more than 40, 50, or 60 amino acids and, preferably, the sequence of the polypeptide of the invention distinguishes from the sequence shown in the respective line in Table II B, application no. 8, columns 5 and 8 by not more than 80%, 70%, 60%, 50%, 40%, 30%, 20%, 10%, 5%, 4%, 3%, 2%, 1% or 0.5%. In another embodiment, said polypeptide of the invention does not consist of the sequence shown in Table II, application no. 8, columns 5 or 8.

[51171] The consensus sequence was derived from a multiple alignment of the sequences as listed in a single line of Table II. The amino acids are given in their three letter code. In case a specific amino acid is indicated this specific amino acid is conserved in at least 80% of the aligned proteins whereas the three letter code XAA stands for amino acids, which are not conserved in at least 80% of the aligned sequences. The consensus sequence starts with the first conserved amino acid in the alignment, and ends with the last conserved amino acid in the alignment of the investigated sequences.

[51172] Patterns had to match at least 80% of the investigated proteins. Conserved patterns were identified with the software tool MEME version 3.5.1 or manually by using first standard prosite annotation. The number of given x indicates the distances between conserved amino acid residues (given in the one letter code), e.g. (1) the pattern Y-x(21,23)-F means that conserved tyrosine and phenylalanine residues in the alignment are separated from each other by minimum 21 and maximum 23 amino acid residues in the alignment of all investigated sequences, (2) the pattern Y-x(21,23)-[FW] means that a conserved tyrosine is separated by minimum 21 and maximum 23 amino acid residues from either a phenylalanine or tryptophane. However, these patterns have been “translated” into the WIPO standard 25. MEME was developed by Bailey Timothy L. and Elkan Charles, Dept. of Computer Science and Engineering, University of California, San Diego, USA and is described by Bailey Timothy L. and Elkan Charles (Proceedings of the Second International Conference on Intelligent Systems for Molecular Biology, pp. 28-36, AAAI Press, Menlo Park, Calif., 1994). The source code for the stand-alone program is public available from the San Diego Supercomputer centre (http://meme.sdsc.edu). For identifying common motifs in all sequences with the software tool MEME, the following settings were used:—maxsize 500000,—nmotifs 15,—evt 0.001,—maxw 60, Distance 1e−3,—minsites number of sequences used for the analysis. Input sequences for MEME were non-aligned sequences in Fasta format. Other parameters were used in the default settings in this software version. Prosite patterns for conserved domains were generated with the software tool Pratt version 2.1 or manually. Pratt was developed by Jonassen Inge, Dept. of Informatics, University of Bergen, Norway and is described by Jonassen et al. (Jonassen I., Collins J. F. and Higgins D. G., Protein Science 4, 1587 (1995); Jonassen I., Efficient discovery of conserved patterns using a pattern graph, Submitted to CABIOS February 1997). The source code (ANSI C) for the stand-alone program is public available, e.g. at established Bioinformatic centers like EBI (European Bioinformatics Institute). For generating patterns with the software tool Pratt, following settings were used: PL (max Pattern Length): 100, PN (max Nr of Pattern Symbols): 100, PX (max Nr of consecutive x's): 30, FN (max Nr of flexible spacers): 5, FL (max Flexibility): 30, FP (max Flex.Product): 10, ON (max number patterns): 50. Input sequences for

[51173] Pratt were distinct regions of the protein sequences exhibiting high similarity as identified from software tool MEME. The minimum number of sequences, which have to match the generated patterns (CM, min Nr of Seqs to Match) was set to at least 80% of the provided sequences. Parameters not mentioned here were used in their default settings. The Prosite patterns of the conserved domains can be used to search for protein sequences matching this pattern. Various established Bioinformatic centres provide public internet portals for using those patterns in database searches (e.g. PIR (Protein Information Resource, located at Georgetown University Medical Center) or ExPASy (Expert Protein Analysis System)). Alternatively, stand-alone software is available, like the program Fuzzpro, which is part of the EMBOSS software package. For example, the program Fuzzpro not only allows searching for an exact pattern-protein match but also allows setting various ambiguities in the performed search.

[51174] The alignment was performed with the software ClustalW (version 1.83) and is described by Thompson et al. (Nucleic Acids Research 22, 4673 (1994)). The source code for the stand-alone program is public available from the European Molecular Biology Laboratory; Heidelberg, Germany. The analysis was performed using the default parameters of ClustalW v1.83 (gap open penalty: 10.0; gap extension penalty: 0.2; protein matrix: Gonnet; protein/DNA endgap: −1; protein/DNA gapdist: 4).

[51175] Degenerated primers can then be utilized by PCR for the amplification of fragments of novel proteins having above-mentioned activity, e.g. conferring the production or the increased production of the fine chemical as compared to a corresponding, non-transformed, wild type cell, or non-human organism, like a plant cell or a plant or a part thereof, after generating or increasing the expression or activity or having the activity of a protein as shown in the respective line in Table II, column 3 or further functional homologs of the polypeptide of the invention from other non-human organisms.

[51176] These fragments can then be utilized as hybridization probe for isolating the complete gene sequence. As an alternative, the missing 5′ and 3′ sequences can be isolated by means of RACE-PCR. A nucleic acid molecule according to the invention can be amplified using cDNA or, as an alternative, genomic DNA as template and suitable oligonucleotide primers, following standard PCR amplification techniques. The nucleic acid molecule amplified thus can be cloned into a suitable vector and characterized by means of DNA sequence analysis. Oligonucleotides, which correspond to one of the nucleic acid molecules used in the process, can be generated by standard synthesis methods, for example using an automatic DNA synthesizer.

[51177] Nucleic acid molecules which are advantageously for the process according to the invention can be isolated based on their homology to the nucleic acid molecules disclosed herein using the sequences or part thereof as or for the generation of a hybridization probe and following standard hybridization techniques under stringent hybridization conditions. In this context, it is possible to use, for example, isolated one or more nucleic acid molecules of at least 15, 20, 25, 30, 35, 40, 50, 60 or more nucleotides, preferably of at least 15, 20 or 25 nucleotides in length which hybridize under stringent conditions with the above-described nucleic acid molecules, in particular with those which encompass a nucleotide sequence of the nucleic acid molecule used in the process of the invention or encoding a protein used in the invention or of the nucleic acid molecule of the invention. Nucleic acid molecules with 30, 50, 100, 250 or more nucleotides may also be used.

[51178] The term “homology” means that the respective nucleic acid molecules or the encoded proteins are functionally and/or structurally equivalent. The nucleic acid molecules that are homologous to the nucleic acid molecules described above and that are derivatives of said nucleic acid molecules are, for example, variations of said nucleic acid molecules which represent modifications having the same biological function, in particular encoding proteins with the same or substantially the same biological function. They may be naturally occurring variations, such as sequences from other plant varieties or species, or mutations. These mutations may occur naturally or may be obtained by mutagenesis techniques. The allelic variations may be naturally occurring allelic variants as well as synthetically produced or genetically engineered variants. Structurally equivalents can, for example, be identified by testing the binding of said polypeptide to antibodies or computer based predictions. Structurally equivalents have the similar immunological characteristic, e.g. comprise similar epitopes.

[51179] By “hybridizing” it is meant that such nucleic acid molecules hybridize under conventional hybridization conditions, preferably under stringent conditions such as described by, e.g., Sambrook (“Molecular Cloning; A Laboratory Manual”, 2nd edition, Cold Spring Harbor Laboratory Press, Cold Spring Harbor, N.Y. (1989)) or in “Current Protocols in Molecular Biology”, John Wiley & Sons, N.Y. (1989), chapter 6.3.1-6.3.6.)

[51180] According to the invention, DNA as well as RNA molecules of the corresponding nucleic acid molecules of the invention can be used as probes. Further, as template for the identification of functional homologues Northern blot assays as well as Southern blot assays can be performed. The Northern blot assay advantageously provides further information about the expressed gene product: e.g. expression pattern, occurrence of processing steps, like splicing and capping, etc. The Southern blot assay provides additional information about the chromosomal localization and organization of the gene being related to the nucleic acid molecule of the invention.

[51181] A preferred, non-limiting example of stringent hybridization conditions are hybridizations in 6×sodium chloride/sodium citrate (=SSC) at approximately 45° C., followed by one or more wash steps in 0.2×SSC, 0.1% SDS at 50 to 65° C., for example at 50° C., 55° C. or 60° C. The skilled worker knows that these hybridization conditions differ as a function of the type of the nucleic acid and, for example when organic solvents are present, with regard to the temperature and concentration of the buffer. The temperature under “standard hybridization conditions” differs for example as a function of the type of the nucleic acid between 42° C. and 65° C., preferably between 45° C. and 50° C. in an aqueous buffer with a concentration of 0.1×, 0.5×, 1×, 2×, 3×, 4× or 5×SSC (pH 7.2). If organic solvent(s) is/are present in the abovementioned buffer, for example 50% formamide, the temperature under standard conditions is approximately 40° C., 42° C. or 45° C. The hybridization conditions for DNA:DNA hybrids are preferably for example 0.1×SSC and 20° C., 25° C., 30° C., 35° C., 40° C. or 45° C., preferably between 30° C. and 45° C. The hybridization conditions for DNA:RNA hybrids are preferably for example 0.1×SSC and 30° C., 35° C., 40° C., 45° C., 50° C. or 55° C., preferably between 45° C. and 55° C. The above-mentioned hybridization temperatures are determined for example for a nucleic acid approximately 100 by (=base pairs) in length and a G+C content of 50% in the absence of formamide. The skilled worker knows to determine the hybridization conditions required with the aid of textbooks, for example the ones mentioned above, or from the following textbooks: Sambrook et al., “Molecular Cloning”, Cold Spring Harbor Laboratory, 1989; Hames and Higgins (ed.), “Nucleic Acids Hybridization: A Practical Approach”, IRL Press at Oxford University Press, Oxford, 1985; Brown (ed.), “Essential Molecular Biology: A Practical Approach”, IRL Press at Oxford University Press, Oxford, 1991.

[51182] A further example of one such stringent hybridization condition is hybridization at 4×SSC at 65° C., followed by a washing in 0.1×SSC at 65° C. for one hour. Alternatively, an exemplary stringent hybridization condition is in 50% formamide, 4×SSC at 42° C. Further, the conditions during the wash step can be selected from the range of conditions delimited by lowstringency conditions (approximately 2×SSC at 50° C.) and high-stringency conditions (approximately 0.2×SSC at 50° C., preferably at 65° C.) (20×SSC : 0.3 M sodium citrate, 3 M NaCl, pH 7.0). In addition, the temperature during the wash step can be raised from low-stringency conditions at room temperature, approximately 22° C., to higher-stringency conditions at approximately 65° C. Both of the parameters salt concentration and temperature can be varied simultaneously, or else one of the two parameters can be kept constant while only the other is varied. Denaturants, for example formamide or SDS, may also be employed during the hybridization. In the presence of 50% formamide, hybridization is preferably effected at 42° C. Relevant factors like 1) length of treatment, 2) salt conditions, 3) detergent conditions, 4) competitor DNAs, 5) temperature and 6) probe selection can be combined case by case so that not all possibilities can be mentioned herein.

[51183] Thus, in a preferred embodiment, Northern blots are prehybridized with RothiHybri-Quick buffer (Roth, Karlsruhe) at 68° C. for 2 h. Hybridization with radioactive labeled probe is done overnight at 68° C. Subsequent washing steps are performed at 68° C. with 1×SSC. For Southern blot assays the membrane is prehybridized with Rothi-Hybri-Quick buffer (Roth, Karlsruhe) at 68° C. for 2 h. The hybridization with radioactive labeled probe is conducted over night at 68° C. Subsequently the hybridization buffer is discarded and the filter shortly washed using 2×SSC; 0.1% SDS. After discarding the washing buffer new 2×SSC; 0.1% SDS buffer is added and incubated at 68° C. for 15 minutes. This washing step is performed twice followed by an additional washing step using 1×SSC; 0.1% SDS at 68° C. for 10 min.

[51184] Some examples of conditions for DNA hybridization (Southern blot assays) and wash step are shown herein below:

(1) Hybridization conditions can be selected, for example, from the following conditions:
[51185] (a) 4×SSC at 65° C.,
[51186] (b) 6×SSC at 45° C.,
[51187] (c) 6×SSC, 100 mg/ml denatured fragmented fish sperm DNA at 68° C.,
[51188] (d) 6×SSC, 0.5% SDS, 100 mg/ml denatured salmon sperm DNA at 68° C.,
[51189] (e) 6×SSC, 0.5% SDS, 100 mg/ml denatured fragmented salmon sperm DNA, 50% formamide at 42° C.,
[51190] (f) 50% formamide, 4×SSC at 42° C.,
[51191] (g) 50% (v/v) formamide, 0.1% bovine serum albumin, 0.1% Ficoll, 0.1% polyvinylpyrrolidone, 50 mM sodium phosphate buffer pH 6.5, 750 mM NaCl, 75 mM sodium citrate at 42° C.,
[51192] (h) 2× or 4×SSC at 50° C. (low-stringency condition), or
[51193] (i) 30 to 40% formamide, 2× or 4×SSC at 42° C. (low-stringency condition).
   (2) Wash steps can be selected, for example, from the following conditions:
[51194] (a) 0.015 M NaCl/0.0015 M sodium citrate/0.1% SDS at 50° C.,
[51195] (b) 0.1×SSC at 65° C.,
[51196] (c) 0.1×SSC, 0.5% SDS at 68° C.,
[51197] (d) 0.1×SSC, 0.5% SDS, 50% formamide at 42° C.,
[51198] (e) 0.2×SSC, 0.1% SDS at 42° C.,
[51199] (f) 2×SSC at 65° C. (low-stringency condition),

[51200] Polypeptides having above-mentioned activity, i.e. conferring the production or the increased production of the fine chemical linoleic acid as compared to a corresponding, e.g. non-transformed, wild type non-human organism, like a microorganism or a plant cell, plant or part thereof, can be encoded by other DNA sequences which hybridize to the sequences shown in the respective line in Table I, application no. 8, columns 5 and 8, preferably the coding region thereof, at least under relaxed hybridization conditions and which encode the expression of polypeptides conferring the production or the increased production of the respective fine chemical linoleic acid as compared to a corresponding, e.g. non-transformed, wild type non-human organism, like a microorganism or a plant cell, plant or part thereof.

[51201] Further, some applications have to be performed at low stringency hybridization conditions, without any consequences for the specificity of the hybridization. For example, a Southern blot analysis of total DNA could be probed with a nucleic acid molecule of the present invention and washed at low stringency (55° C. in 2×SSPE, 0.1% SDS). The hybridization analysis could reveal a simple pattern of only genes encoding polypeptides of the present invention or used in the process of the invention, e.g. having the herein-mentioned activity of conferring the production or the increased production of the fine chemical as compared to a corresponding, e.g. non-transformed, wild type non-human organism, like a microorganism or a plant cell, plant or part thereof. A further example of such low-stringent hybridization conditions is 4×SSC at 50° C. or hybridization with 30 to 40% formamide at 42° C. Such molecules comprise those which are fragments, analogues or derivatives of the polypeptide of the invention or used in the process of the invention and differ, for example, by way of amino acid and/or nucleotide deletion(s), insertion(s), substitution (s), addition(s) and/or recombination (s) or any other modification(s) known in the art either alone or in combination from the above-described amino acid sequences or their underlying nucleotide sequence(s). However, it is preferred to use high stringency hybridization conditions.

[51202] Hybridization should advantageously be carried out with fragments of at least 5, 10, 15, 20, 25, 30, 35 or 40 bp, advantageously at least 50, 60, 70 or 80 bp, preferably at least 90, 100 or 110 bp. Most preferably are fragments of at least 15, 20, 25 or 30 bp. Preferably are also hybridizations with at least 100 by or 200 bp, very especially preferably at least 400 by in length. In an especially preferred embodiment, the hybridization should be carried out with the entire nucleic acid sequence with conditions described above.

[51203] The terms “fragment”, “fragment of a sequence” or “part of a sequence” mean a truncated sequence of the original sequence referred to. The truncated sequence (nucleic acid or protein sequence) can vary widely in length; the minimum size being a sequence of sufficient size to provide a sequence with at least a comparable function and/or activity of the original sequence or molecule referred to, or hybridizing with the nucleic acid molecule of the invention or used in the process of the invention under stringent conditions, while the maximum size is not critical. In some applications, the maximum size usually is not substantially greater than that required to provide the desired activity and/or function(s) of the original sequence.

[51204] Typically, the truncated amino acid sequence or molecule will range from about 5 to about 310 amino acids in length. More typically, however, the sequence will be a maximum of about 250 amino acids in length, preferably a maximum of about 200 or 100 amino acids. It is usually desirable to select sequences of at least about 10, 12 or 15 amino acids, up to a maximum of about 20 or 25 amino acids.

[51205] The term “epitope” relates to specific immunoreactive sites within an antigen, also known as antigenic determinates. These epitopes can be a linear array of monomers in a polymeric composition—such as amino acids in a protein—or consist of or comprise a more complex secondary or tertiary structure. Those of skill will recognize that immunogens (i.e. substances capable of eliciting an immune response) are antigens; however, some antigen, such as haptens, are not immunogens but may be made immunogenic by coupling to a carrier molecute. The term “antigen” includes references to a substance to which an antibody can be generated and/or to which the antibody is specifically immunoreactive.

[51206] In an embodiment the present invention relates to an epitope of the polypeptide of the present invention or used in the process of the present invention and conferring the production or the increased production of the fine chemical as compared to a corresponding, e.g. non-transformed, wild type non-human organism, like a microorganism or a plant cell, plant or part thereof.

[51207] The term “one or several amino acids” relates to at least one amino acid but not more than that number of amino acids, which would result in a homology of below 50% identity. Preferably, the identity is more than 70%, 80%, 85%, 90%, 91%, 92%, 93%, 94%, 95%, 96%, 97%, 98%, 99% or 99.5% identity.

[51208] Further, the nucleic acid molecule of the invention comprises a nucleic acid molecule, which is a complement of one of the nucleotide sequences of above-mentioned nucleic acid molecules or a portion thereof. A nucleic acid molecule or its sequence which is complementary to one of the nucleotide molecules or sequences shown in the respective line in Table I, application no. 8, columns 5 or 8, preferably the coding region thereof, homologs or fragments thereof, is one which is sufficiently complementary to one of the nucleotide molecules or sequences shown in the respective line in Table I, application no. 8, columns 5 or 8, preferably the coding region thereof, homologs or fragments thereof, such that it can hybridize to one of the nucleotide sequences shown in Table I, application no. 8, columns 5 or 8, preferably the coding region thereof, homologs or fragments thereof, thereby forming a stable duplex. Preferably, the hybridization is performed under stringent hybridization conditions. However, a complement of one of the herein disclosed sequences is preferably a sequence complement thereto according to the base pairing of nucleic acid molecules well known to the skilled person. For example, the bases A and G undergo base pairing with the bases T and U or C, resp. and visa versa. Modifications of the bases can influence the base-pairing partner.

[51209] The nucleic acid molecule of the invention comprises a nucleotide sequence which is at least about 30%, 35%, 40%, 45%, 50%, 55%, 60%, 65%, 70%, 75%, 80%, 90%, 95%, 96%, 97%, 98%, 99%, 99.5% or more homologous to a nucleotide sequence shown in Table I, application no. 8, columns 5 or 8, preferably the coding region thereof, homologs or fragments thereof, and preferably has above-mentioned activity, in particular conferring the production or the increased production of the fine chemical linoleic acid, respectively, after increasing the activity or an activity of a gene as shown in the respective line in Table I or of a gene product, e.g. as shown in the respective line in Table II, application no. 8, column 5 or 8, by for example in one embodiment expression either in the cytosol or in an organelle such as a plastid or mitochondria or both, preferably in a plastid, or in another embodiment non-targeted or targeted.

[51210] The nucleic acid molecule of the invention comprises a nucleotide sequence or molecule which hybridizes, preferably hybridizes under stringent conditions as defined herein, to one of the nucleic acid molecule shown in the respective line in Table I, preferably Table IB, application no. 8, columns 5 or 8, preferably the coding region thereof, fragments or homologs thereof, and encodes a protein having above-mentioned activity, e.g. conferring the production or the increased production of the respective fine chemical linoleic acid as compared to a corresponding, e.g. non-transformed, wild type non-human organism, like a microorganism or a plant cell, plant or part thereof, by for example in one embodiment expression either in the cytosol or in an organelle such as a plastid or mitochondria or both, preferably in a plastid, or in another embodiment non-targeted or targeted, and optionally, the activity thereof is selected from the group consisting of 3-ketoacyl-CoA thiolase, 3-oxoacyl-[acyl-carrier-protein] synthase, AAS bifunctional protein, ABC transporter permease protein, acid shock protein, aconitate hydratase, arginine decarboxylase, aromatic acid decarboxylase, aspartate-semialdehyde dehydrogenase, At1g19800-protein, At2g45420-protein, ATPase epsilon subunit, b0801-protein, b1330-protein, b1470-protein, b1670-protein, b1837-protein, b2032-protein, b2099-protein, b2107-protein, b2399-protein, b2474-protein, b2613-protein, b2682-protein, b2849-protein, b2909-protein, beta-hydroxylase, carbamoyl-phosphate synthase subunit, cation-transporting ATPase, CCAAT-binding transcription factor, chlorophyllase, colanic acid biosynthesis protein, coproporphyrinogen III oxidase, CTP synthetase, DnaJ-like chaperone, electron transport complex protein, ethanolamine utilization protein, fatty acid desaturase, Fe—S subunit of oxidoreductase, flavodoxin, fumarate hydratase, gamma-glutamyltranspeptidase, glucose-6-phosphate 1-dehydrogenase, glutaredoxin, glycin cleavage system protein, GMO2LC38418-protein, heat shock transcription factor, hydrolase, lipoprotein precursor, membrane transport protein, metal-dependent hydrolase, molecular chaperone, monothiol glutaredoxin, multiple antibiotic resistance protein, outer membrane receptor protein precursor, oxidoreductase, phosphate import ATP-binding protein, phosphoribosylformyl glycinamidine synthase subunit, phosphotriesterase, protein kinase, protein phosphatase, pyruvate kinase, recombinase A, sll1032-protein, sn-glycerol-3-phosphate transport system permease protein, ThiF family protein, threonine dehydratase, threonine efflux protein, transcription factor, transcriptional regulator protein, tryptophan synthase alpha chain, TTC0490-protein, xanthine dehydrogenase, ydr507c-protein, and YGR104C-protein, respectively.

[51211] Moreover, the nucleic acid molecule of the invention can comprise only a portion of the coding region of one of the nucleic acid molecules depicted in Table I, application no. 8, columns 5 or 8, for example a fragment which can be used as a probe or primer or a fragment encoding a biologically active portion of the polypeptide of the present invention or of a polypeptide used in the process of the present invention, i.e. having above-mentioned activity, e.g. conferring the production or the increased production of the respective fine chemical linoleic acid as compared to a corresponding, e.g. non-transformed, wild type non-human organism, like a microorganism or a plant cell, plant or part thereof, by for example in one embodiment expression either in the cytosol or in an organelle such as a plastid or mitochondria or both, preferably in a plastid, or in another embodiment non-targeted or targeted. The nucleotide sequences determined from the cloning of the present protein-according-to-the-invention-encoding gene allows for the generation of probes and primers designed for use in identifying and/or cloning its homologues from other cell types and organisms. The probe/primer typically comprises a substantially purified oligonucleotide. The oligonucleotide typically comprises a region of nucleotide sequence that hybridizes under stringent conditions to at least about 12, 15 preferably about 20 or 25, more preferably about 40, 50 or 75 consecutive nucleotides of a sense strand of one of the sequences set forth, e.g., in the respective line in Table I, application no. 8, column 5 or 8, preferably the coding region thereof, or a homolog or a fragment thereof, an anti-sense sequence of one of the sequences, e.g., set forth in the respective line in Table I, application no. 8, columns 5 or 8, preferably the coding region thereof, or a homolog or a fragment thereof or naturally occurring mutants thereof. Primers based on a nucleic acid molecule of the invention can be used in PCR reactions to clone homologs of the polypeptide of the invention or of the polypeptide used in the process of the invention, e.g. as the primers described in the examples of the present invention, e.g. as shown in the examples. A PCR with the primers shown in the respective line in Table III, column 8 will result in a fragment of the gene product as shown in Table II, application no. 8, column 5.

[51212] Primer sets are interchangeable. The person skilled in the art knows how to design and combine said primers to result in the desired product, e.g. in a full length clone or a partial sequence. Probes based on the sequences of the nucleic acid molecule of the invention or used in the process of the present invention can be used to detect transcripts or genomic sequences encoding the same or homologous proteins. The probe can further comprise a label group attached thereto, e.g. the label group can be a radioisotope, a fluorescent compound, an enzyme, or an enzyme co-factor. Such probes can be used as a part of a genomic marker test kit for identifying cells which express a polypeptide of the invention or used in the process of the present invention, such as by measuring a level of an encoding nucleic acid molecule in a sample of cells, e.g. detecting mRNA levels or determining, whether a genomic gene comprising the sequence of the polynucleotide of the invention or used in the processes of the present invention has been mutated or deleted.

[51213] As the expression of a respective nucleic acids of the invention is related to the synthesis of the respective fine chemical linoleic acid its function as a probe extends to the detection of microorganisms, plant tissues, plants, plant variets, plant ecotypes or plant genera with varying capability or potential for synthesis of the respective fine chemical linoleic acid. Therefore in one embodiment the present invention relates to a method for analyzing the capability or potential of a plant tissue, a plant, a plant variety or plant ecotype to produce the fine chemical linoleic acid by using the nucleic acid of the invention or parts thereof as a probe to detect the amount of the nucleic acid of the invention in the non-human organism or a part thereof in comparison to another non-human organism.

[51214] The nucleic acid molecule of the invention encodes a polypeptide or portion thereof which includes an amino acid sequence which is sufficiently homologous to the amino acid sequence shown in respective line in Table II, application no. 8, columns 5 or 8 such that the protein or portion thereof maintains the ability to confer the production or the increased production of the respective fine chemical linoleic acid as compared to a corresponding, e.g. non-transformed, wild type non-human organism, like a microorganism or a plant cell, plant or part thereof, in particular increasing the activity as mentioned above or as described in the examples in microorganisms or plants.

[51215] As used herein, the language “sufficiently homologous” refers to proteins or portions thereof which have amino acid sequences which include a minimum number of identical or equivalent amino acids (e.g. an amino acid which has a similar side chain as an amino acid in one of the sequences of the polypeptide of the present invention) to an amino acid sequence shown in the respective line in Table II, application no. 8, columns 5 or 8 such that the protein or portion thereof is able to confer the production or the increased production of the respective fine chemical linoleic acid as compared to a corresponding, e.g. non-transformed, wild type non-human organism, like a microorganism or a plant cell, plant or part thereof. For example having the activity of a protein as shown in the respective line in Table II, application no. 8, column 3 and as described herein.

[51216] In an embodiment of the present invention, the nucleic acid molecule of the present invention comprises a nucleic acid molecule that encodes a portion of the protein of the present invention. The protein is at least about 30%, 35%, 40%, 45% 50%, 55%, 60%, 65%, 70%, 75%, 80%, 85%, 90%, 91%, 92%, 93%, 94%, 95%, 96%, 97%, 98%, 99%, 99.5% or more homologous to an entire amino acid sequence shown in the respective line of Table II, application no. 8, column 5 or 8 and has the above-mentioned activity, e.g. conferring the production or the increased production of the respective fine chemical linoleic acid as compared to a corresponding, e.g. non-transformed, wild type non-human organism, like a microorganism or a plant cell, plant or part thereof by, for example in a embodiment expression either in the cytosol or in an organelle such as a plastid or mitochondria or both, preferably in a plastid, or in another embodiment by targeted or non-targeted expression.

[51217] Portions of proteins encoded by the nucleic acid molecule of the invention show preferably the above-mentioned activity, e.g. conferring the production or the increased production of the fine chemical as compared to a corresponding, e.g. non-transformed, wild type non-human organism, like a microorganism or a plant cell, plant or part thereof.

[51218] As mentioned herein, the term “biologically active portion” is intended to include a portion, e.g., a domain/motif, that confers the production or the increased production of the fine chemical as compared to a corresponding, e.g. non-transformed, wild type non-human organism, like a microorganism or a plant cell, plant or part thereof or has an immunological activity such that it binds to an antibody binding specifically to the polypeptide of the present invention or a polypeptide used in the process of the present invention for conferring the production or the increased production of the fine chemical as compared to a corresponding, e.g.

[51219] non-transformed, wild type non-human organism, like a microorganism or a plant cell, plant or part thereof.

[51220] The invention further relates to nucleic acid molecules or methods using said nucleic acid molecules that differ from one of the nucleotide sequences shown in the respective line in Table I, application no. 8, columns 5 or 8, preferably the coding region thereof, or fragments or homologs thereof, due to degeneracy of the genetic code but encode a polypeptide of the present invention, in particular a polypeptide having the above-mentioned activity, e.g. as those polypeptides depicted in the respective line in Table II, application no. 8, columns 5 or 8, fragments or homologs thereof. Advantageously, the nucleic acid molecule of the invention comprises, or in an other embodiment has, a nucleotide sequence encoding a protein comprising, or in an other embodiment having, an amino acid sequence shown in the respective line in Table II, application no. 8, columns 5 or 8, fragments or homologs thereof. In a further embodiment, the nucleic acid molecule of the invention encodes a full length protein which is substantially homologous to an amino acid sequence shown in the respective line in Table II, application no. 8, columns 5 or 8, or homologs thereof. However, in an embodiment, the nucleic acid molecule of the present invention does not consist of the sequence shown in the respective line in Table I, preferably Table IA, application no. 8, columns 5 or 8, preferably the coding region thereof, but the functional homologs thereof.

[51221] In addition, it will be appreciated by those skilled in the art that DNA sequence polymorphisms that lead to changes in the amino acid sequences may exist within a population of the non-human organism of the present invention. Also these non-human organisms are encompassed by the respective non-human organism according to the invention.

[51222] As used herein, the terms “gene” and “recombinant gene” refer to nucleic acid molecules comprising an open reading frame encoding the polypeptide of the invention or comprising the nucleic acid molecule of the invention or encoding the polypeptide used in the process of the present invention, preferably from a plant, especially a crop plant, or from a microorganism useful for the method of the invention. Such genetic polymorphism in the gene encoding the polypeptide of the invention or comprising the nucleic acid molecule of the invention may exist among individuals within a population due to natural variation. Such natural variations can typically result in 1 to 5% variance in the nucleotide sequence of the gene. Any and all such nucleotide variations and resulting amino acid polymorphisms in genes encoding a polypeptide of the invention or comprising a the nucleic acid molecule of the invention that are the result of natural variation and that do not alter the functional activity as described are intended to be within the scope of the invention.

[51223] Nucleic acid molecules corresponding to natural variants of a nucleic acid molecule of the invention, which can also be a cDNA, can be isolated based on their homology to the nucleic acid molecules disclosed herein using the nucleic acid molecule of the invention, or a portion thereof, as a hybridization probe according to standard hybridization techniques under stringent hybridization conditions.

[51224] Accordingly, in another embodiment, a nucleic acid molecule of the invention is at least 15, 20, 25 or 30 nucleotides in length. Preferably, it hybridizes under stringent conditions to a nucleic acid molecule comprising a nucleotide sequence of the nucleic acid molecule of the present invention or used in the process of the present invention, e.g. comprising the sequence shown in the respective line in Table I, application no. 8, columns 5 or 8, preferably the coding region thereof. In another embodiment the nucleic acid molecule is preferably at least 20, 30, 50, 100, 250 or more nucleotides in length.

[51225] The term “hybridizes under stringent conditions” is defined above. In an embodiment, the term “hybridizes under stringent conditions” is intended to describe conditions for hybridization and washing under which nucleotide sequences at least 30%, 40%, 50% or 65% identical to each other typically remain hybridized to each other. Preferably, the conditions are such that sequences at least about 70%, 75%, 80%, 85%, 90% or 95% or more identical to each other typically remain hybridized to each other.

[51226] Preferably, a nucleic acid molecule of the invention that hybridizes under stringent conditions to a sequence shown in the respective line in Table I, application no. 8, columns 5 or 8, preferably the coding region thereof, corresponds to a naturally-occurring nucleic acid molecule of the invention. As used herein, a “naturally-occurring” nucleic acid molecule refers to a RNA or DNA molecule having a nucleotide sequence that occurs in nature (e.g. encodes a natural protein). Preferably, the nucleic acid molecule encodes a natural protein having above-mentioned activity, e.g. conferring the production or the increased production of the respective fine chemical linoleic acid as compared to a corresponding, e.g. non-transformed, wild type non-human organism, like a microorganism or a plant cell, plant or part thereof after increasing the expression or activity thereof or the activity of a protein of the invention or used in the process of the invention, in an embodiment for example expression either in the cytosol or in an organelle such as a plastid or mitochondria, preferably in plastids, or, in another embodiment by targeted or non-targeted expression.

[51227] In addition to naturally-occurring variants of the sequences of the polypeptide or nucleic acid molecule of the invention as well as of the polypeptide or nucleic acid molecule used in the process of the invention that may exist in the population, the skilled artisan will further appreciate that changes can be introduced by mutation into a nucleotide sequence of the nucleic acid molecule of the invention, e.g. encoding the polypeptide of the invention or used in the process of the present invention, thereby leading to changes in the amino acid sequence of the encoded said polypeptide, without altering the functional ability of the polypeptide, preferably not decreasing said activity, preferably increasing said activity.

[51228] For example, nucleotide substitutions leading to amino acid substitutions at “non-essential” amino acid residues can be made in a sequence of the nucleic acid molecule of the invention or used in the process of the invention, e.g. shown in the respective line in Table I, application no. 8, columns 5 or 8, preferably the coding region thereof, or fragments or homologs thereof.

[51229] With regard to the activity of a polypeptide a “non-essential” amino acid residue is a residue that can be altered without altering the activity of said polypeptide, whereas an “essential” amino acid residue is required for an activity as mentioned above, e.g. conferring the production or the increased production of the fine chemical as compared to a corresponding, e.g. non-transformed, wild type non-human organism, like a microorganism or a plant cell, plant or part thereof. Other amino acid residues, however, (e.g., those that are not conserved or only semi-conserved in the domain having said activity) may not be essential for activity and thus are likely to be amenable to alteration without altering said activity.

[51230] Further, a person skilled in the art knows that the codon usage between organisms can differ. In the enclosed sequence potocol according to WIPO ST 25 the respective donor organism codon usage “translation” is used.The person skilled in the art may adapt the codon usage in the nucleic acid molecule of the present invention to the usage of the organism or the cell compartment for example of the plastid or mitochondria in which the polynucleotide or polypeptide is expressed.

[51231] Accordingly, the invention relates to nucleic acid molecules encoding a polypeptide having above-mentioned activity, in a non-human organisms or parts thereof by for example expression either in the cytosol or in an organelle such as a plastid or mitochondria or both, preferably in plastids, that contain changes in amino acid residues that are not essential for said activity. Such polypeptides differ in amino acid sequence from a sequence depicted in the respective line in Table II, especially Table IIA, application no. 8, columns 5 or 8, but retain said activity described herein. The nucleic acid molecule can comprise a nucleotide sequence encoding a polypeptide, wherein the polypeptide comprises an amino acid sequence at least about 50% identical to an amino acid sequence shown in the respective line in Table II, application no. 8, columns 5 or 8, and is capable of conferring the production or the increased production of the respective fine chemical linoleic acid as compared to a corresponding, e.g. non-transformed, wild type non-human organism, like a microorganism or a plant cell, plant or part thereof, after increasing its activity for example in an embodiment by expression either in the cytosol or in an organelle such as a plastid or mitochondria or both, preferably in plastids, or, in another embodiment by targeted or non-targeted expression. Preferably, the protein encoded by the nucleic acid molecule is at least about 60%, 70%, 80%, 90%, 95%, 96%, 97%, 98%, 99% or 99.5% identical to the sequence shown in the respective line in Table II, application no. 8, columns 5 or 8.

[51232] To determine the percentage identity (=homology, herein used interchangeably) of two amino acid sequences or of two nucleic acid molecules, the sequences are written one underneath the other for an optimal comparison (for example gaps may be inserted into the sequence of a protein or of a nucleic acid in order to generate an optimal alignment with the other protein or the other nucleic acid). The amino acids or nucleobases at the respective corresponding positions are then compared. If a position in one sequence is occupied by the same amino acid or the same nucleobase as the corresponding position in the other sequence, the molecules are homologous at this position. The percentage identity between the two sequences is a function of the number of identical positions shared by the sequences (i.e. % homology=% identity=number of identical positions/total number of positions×100).

[51233] For the determination of the percentage identity (=homology) of two or more amino acid sequences or of two or more nucleic acid molecules several computer software programs have been developed. The homology of two or more sequences can be calculated with for example the software Fasta, which presently has been used in the version Fasta 3 (Pearson W. R. and Lipman D. J., PNAS 85, 2444 (1988); Pearson W. R., Methods in Enzymology 183, 63 (1990)). Another useful program for the calculation of homologies of different sequences is the standard blast program, which is included in the Biomax PEDANT™ software (Biomax, Munich, Federal Republic of Germany). This leads unfortunately sometimes to suboptimal results since blast does not always include complete sequences of the subject and the query. Nevertheless as this program is very efficient it can be used for the comparison of a huge number of sequences. The following settings are typically used for such a comparison of sequences: -p Program Name [String]; -d Database [String]; default=nr; -i Query File [File In]; default=stdin; -e Expectation value (E) [Real]; default=10.0; -m alignment view options: 0=pairwise; 1=query-anchored showing identities; 2=query-anchored no identities; 3=flat query-anchored, show identities; 4=flat query-anchored, no identities; 5=query-anchored no identities and blunt ends; 6=flat query-anchored, no identities and blunt ends; 7=XML Blast output; 8=tabular; 9 tabular with comment lines [Integer]; default=0; -o BLAST report Output File [File Out] Optional; default=stdout; -F Filter query sequence (DUST with blastn, SEG with others) [String]; default=T; -G Cost to open a gap (zero invokes default behavior) [Integer]; default=0; -E Cost to extend a gap (zero invokes default behavior) [Integer]; default=0; -X X dropoff value for gapped alignment (in bits) (zero invokes default behavior); blastn 30, megablast 20, tblastx 0, all others 15 [Integer]; default=0; -I Show GI's in deflines [T/F]; default=F; -q Penalty for a nucleotide mismatch (blastn only) [Integer]; default=−3; -r Reward for a nucleotide match (blastn only) [Integer]; default=1; -v Number of database sequences to show one-line descriptions for (V) [Integer]; default=500; -b Number of database sequence to show alignments for (B) [Integer]; default=250; -f Threshold for extending hits, default if zero; blastp 11, blastn 0, blastx 12, tblastn 13; tblastx 13, megablast 0 [Integer]; default=0; -g Perfom gapped alignment (not available with tblastx) [T/F]; default=T; -Q Query Genetic code to use [Integer]; default=1; -D DB Genetic code (for tblast[nx] only) [Integer]; default=1; -a Number of processors to use [Integer]; default=1; -O SeqAlign file [File Out] Optional; -J Believe the query defline [T/F]; default=F; -M Matrix [String]; default=BLOSUM62; -W Word size, default if zero (blastn 11, megablast 28, all others 3) [Integer]; default=0; -z Effective length of the database (use zero for the real size) [Real]; default=0; -K Number of best hits from a region to keep (off by default, if used a value of 100 is recommended) [Integer]; default=0; -P 0 for multiple hit, 1 for single hit [Integer]; default=0; -Y Effective length of the search space (use zero for the real size) [Real]; default=0; -S Query strands to search against database (for blast[nx], and tblastx); 3 is both, 1 is top, 2 is bottom [Integer]; default=3; -T Produce HTML output [T/F]; default=F; -I Restrict search of database to list of GI's [String] Optional; -U Use lower case filtering of FASTA sequence [T/F] Optional; default=F; -y X dropoff value for ungapped extensions in bits (0.0 invokes default behavior); blastn 20, megablast 10, all others 7 [Real]; default=0.0; -Z X dropoff value for final gapped alignment in bits (0.0 invokes default behavior); blastn/megablast 50, tblastx 0, all others 25 [Integer]; default=0; -R PSI-TBLASTN checkpoint file [File In] Optional; -n MegaBlast search [T/F]; default=F; -L Location on query sequence [String] Optional; -A Multiple Hits window size, default if zero (blastn/megablast 0, all others 40 [Integer]; default=0; -w Frame shift penalty (OOF algorithm for blastx) [Integer]; default=0; -t Length of the largest intron allowed in tblastn for linking HSPs (0 disables linking) [Integer]; default=O.

[51234] Results of high quality are reached by using the algorithm of Needleman and Wunsch or Smith and Waterman. Therefore programs based on said algorithms are preferred. Advantageously the comparisons of sequences can be done with the program PileUp (J. Mol. Evolution., 25, 351 (1987), Higgins et al., CABIOS 5, 151 (1989)) or preferably with the programs “Gap” and “Needle”, which are both based on the algorithms of Needleman and Wunsch (J. Mol. Biol. 48, 443 (1970)), and “BestFit”, which is based on the algorithm of Smith and Waterman (Adv. Appl. Math. 2, 482 (1981)). “Gap” and “BestFit” are part of the GCG softwarepackage (Genetics Computer Group, 575 Science Drive, Madison, Wis., USA 53711 (1991); Altschul et al., (Nucleic Acids Res. 25, 3389 (1997)), “Needle” is part of the The European Molecular Biology Open Software Suite (EMBOSS) (Trends in Genetics 16 (6), 276 (2000)). Therefore preferably the calculations to determine the percentages of sequence homology are done with the programs “Gap” or “Needle” over the whole range of the sequences. The following standard adjustments for the comparison of nucleic acid sequences were used for “Needle”: matrix: EDNAFULL, Gap_penalty: 10.0, Extend_penalty: 0.5. The following standard adjustments for the comparison of nucleic acid sequences were used for “Gap”: gap weight: 50, length weight: 3, average match: 10.000, average mismatch: 0.000.

[51235] For example a sequence, which has 80% homology with sequence SEQ ID NO: 1061 at the nucleic acid level is understood as meaning a sequence which, upon comparison with the sequence SEQ ID NO: 1061 by the above-mentioned program “Needle” with the above-mentioned parameter set, has a 80% homology.

[51236] Homology between two polypeptides is understood as meaning the identity of the amino acid sequence over in each case the entire sequence length which is calculated by comparison with the aid of the above program “Needle” using Matrix: EBLOSUM62, Gap_penalty: 8.0, Extend_penalty: 2.0.

[51237] For example a sequence which has a 80% homology with sequence SEQ ID NO: 1062 at the protein level is understood as meaning a sequence which, upon comparison with the sequence SEQ ID NO: 1062 by the above-mentioned program “Needle” with the abovementioned parameter set, has a 80% homology.

[51238] Functional equivalents of the nucleic acid molecules according to the present invention and/or used in the process according to the present invention represent an embodiment of homologs. Functional equivalents derived from the nucleic acid molecules as shown in the respective line in Table I, application no. 8, columns 5 or 8, preferably the coding region thereof, according to the invention by substitution, insertion or deletion have at least 30%, 35%, 40%, 45%, 50%, 55%, 60%, 65%, 70%, 75%, 80%, 85%, 90%, 91%, 92%, 93%, 94%, 95%, 96%, 97%, 98%, 99% or 99.5% homology with one of the nucleic acid molecules as shown in the respective line in Table I, application no. 8, columns 5 or 8, preferably the coding region thereof, according to the invention and encode polypeptides having essentially the same properties as the polypeptide as shown in the respective line in Table II, application no. 8, columns 5 or 8.

[51239] Functional equivalents derived from one of the polypeptides as shown in the respective line in Table II, application no. 8, columns 5 or 8 according to the invention by substitution, insertion or deletion have at least 30%, 35%, 40%, 45%, 50%, 55%, 60%, 65%, 70%, 75%, 80%, 85%, 90%, 91%, 92%, 93%, 94%, 95%, 96%, 97%, 98%, 99% or 99.5% homology with one of the polypeptides as shown in the respective line in Table II, application no. 8, columns 5 or 8 according to the invention and having essentially the same properties as the polypeptide as shown in the respective line in Table II, application no. 8, columns 5 or 8.

[51240] “Essentially the same properties” of a functional equivalent is above all understood as meaning that the functional equivalent has the above-mentioned activity, by for example in an embodiment expression either in the cytosol or in an organelle such as a plastid or mitochondria or both, or, in another embodiment by targeted or non-targeted expression, while increasing the amount of protein, activity or function of said functional equivalent in an organism, e.g. a microorganism, a plant or plant tissue or animal tissue, plant or animal cells or a part of the same.

[51241] A nucleic acid molecule encoding a homolog to a polypeptide depicted in the respective line in Table II, application no. 8, columns 5 or 8 can be created by introducing one or more nucleotide substitutions, additions or deletions into the nucleic acid molecule of the present invention, in particular of Table I, application no. 8, columns 5 or 8, in the respective line, such that one or more amino acid substitutions, additions or deletions are introduced into the encoded protein. Mutations can be introduced into the nucleic acid molecules as depicted in the respective line in Table I, application no. 8, columns 5 or 8, preferably the coding region thereof, by standard techniques, such as site-directed mutagenesis, PCR-mediated mutagenesis or other methods known to the person skilled in the art.

[51242] Preferably, conservative amino acid substitutions are made at one or more predicted non-essential amino acid. A “conservative amino acid substitution” is one in which the amino acid is replaced with an amino acid having a similar side chain. Families of amino acids having similar side chains have been defined in the art. These families include amino acids with basic side chains (e.g. lysine, arginine, histidine), acidic side chains (e.g. aspartic acid, glutamic acid), uncharged polar side chains (e.g. glycine, asparagine, glutamine, serine, threonine, tyrosine, cysteine), nonpolar side chains (e.g. alanine, valine, leucine, isoleucine, proline, phenylalanine, methionine, tryptophane), beta-branched side chains (e.g. threonine, valine, isoleucine) and aromatic side chains (e.g. tyrosine, phenylalanine, tryptophane, histidine).

[51243] Thus, a predicted non-essential amino acid in a polypeptide of the invention or a polypeptide used in the process of the invention is preferably replaced with another amino acid from the same family. Alternatively, in another embodiment, mutations can be introduced randomly along all or part of a coding sequence of a nucleic acid molecule of the invention or used in the process of the invention, such as by saturation mutagenesis, and the resultant mutants can be screened for activity described herein to identify mutants that retain or even have increased activity, e.g. conferring the production or the increased production of the fine chemical as compared to a corresponding, e.g. non-transformed, wild type non-human organism, like a microorganism or a plant cell, plant or part thereof.

[51244] Following mutagenesis of one of the sequences as shown herein, the encoded protein can be expressed recombinantly and the activity of the protein can be determined using, for example, assays described herein (see Examples) or by measuring the resulting fine chemical production in an organism expressing the mutagenized form of the sequence in comparison to an organism expressing the original non-mutagenized form of the sequence.

[51245] Homologues of the nucleic acid sequences used, with the sequences shown in the respective line in Table I, application no. 8, columns 5 or 8, preferably the coding region thereof, comprise also allelic variants with at least approximately 30%, 35%, 40%, 45%, 50%, 55%, 60%, 65%, 70%, 75%, 80%, 85%, 90%, 91%, 92%, 93%, 94% 95%. 96%, 97%, 98%, 99%, 99.5% or more % homology with one of the nucleotide sequences shown or the abovementioned derived nucleic acid sequences or their homologues or derivatives or parts of these. Allelic variants encompass in particular functional variants which can be obtained by deletion, insertion or substitution of nucleotides from the sequences shown in the respective line, preferably in Table I, columns 5 or 8, preferably the coding region thereof, or from the derived nucleic acid sequences, the intention being, however, that the enzymatic activity or the biological activity of the resulting proteins synthesized is advantageously retained or increased.

[51246] In one embodiment of the present invention, the nucleic acid molecule of the invention or used in the process of the invention comprises the sequences shown in the respective line in any of the Table I, application no. 8, columns 5 or 8, preferably the coding region thereof, fragments or homologs thereof. It is preferred that the nucleic acid molecule comprises as little as possible other nucleotides not shown in the respective line in any one of Table I, application no. 8, columns 5 or 8, preferably the coding region thereof, fragments or homologs thereof. In one embodiment, the nucleic acid molecule comprises less than 500, 400, 300, 200, 100, 90, 80, 70, 60, 50 or 40 further nucleotides. In a further embodiment, the nucleic acid molecule comprises less than 30, 20 or 10 further nucleotides. In one embodiment, the nucleic acid molecule used in the process of the invention is identical to the sequences shown in the respective line in Table I, application no. 8, columns 5 or 8, preferably the coding region thereof.

[51247] Also preferred is that the nucleic acid molecule used in the process of the invention encodes a polypeptide comprising the sequence shown in the respective line in Table II, application no. 8, columns 5 or 8, fragments or homologs thereof. In one embodiment, the nucleic acid molecule encodes less than 150, 130, 100, 80, 60, 50, 40 or 30 further amino acids. In a further embodiment, the encoded polypeptide comprises less than 20, 15, 10, 9, 8, 7, 6 or 5 further amino acids. In one embodiment used in the inventive process, the encoded polypeptide is identical to the sequences shown in the respective line in Table II, application no. 8, columns 5 or 8.

[51248] In one embodiment, the nucleic acid molecule of the invention or used in the process encodes a polypeptide comprising the sequence shown in the respective line in Table II, application no. 8, columns 5 or 8, or fragments or homologs thereof, and comprises less than 100 further nucleotides. In a further embodiment, said nucleic acid molecule comprises less than 30 further nucleotides. In one embodiment, the nucleic acid molecule used in the process is identical to a coding sequence of the sequences shown in the respective line in Table I, application no. 8, columns 5 or 8.

[51249] Polypeptides (=proteins), which still have the essential biological or enzymatic activity of the polypeptide of the present invention conferring the production or the increased production of the respective fine chemical linoleic acid as compared to a corresponding, e.g. non-transformed, wild type non-human organism, like a microorganism or a plant cell, plant or part thereof, i.e. whose activity is essentially not reduced, are polypeptides with at least 10%, 20%, 30%, 40%, 50%, 60%, 70%, 80%, 90%, 95% or more of the wild type biological activity or enzymatic activity, advantageously, the activity is essentially not reduced in comparison with the activity of a polypeptide shown in the respective line in Table II, application no. 8, columns 5 or 8 expressed under identical conditions.

[51250] Homologues of nucleic acid molecules shown in the respective line in Table I, application no. 8, columns 5 or 8, preferably the coding region thereof, or fragments thereof, or of the derived sequences shown in the respective line in Table II, application no. 8, columns 5 or 8, or fragments thereof, also mean truncated sequences, cDNA, single-stranded DNA or RNA of the coding and noncoding DNA sequence. Homologues of said sequences are also understood as meaning derivatives, which comprise noncoding regions such as, for example, UTRs, introns, terminators, enhancers or promoter variants. The promoters upstream of the nucleotide sequences stated can be modified by one or more nucleotide substitution(s), insertion(s) and/or deletion(s) without, however, interfering with the functionality or activity either of the promoters, the open reading frame (=ORF) or with the 3′-regulatory region such as terminators or other 3′-regulatory regions, which are far away from the ORF. It is furthermore possible that the activity of the promoters is increased by modification of their sequence, or that they are replaced completely by more active promoters, even promoters from heterologous organisms. Appropriate promoters are known to the person skilled in the art and are mentioned herein below.

[51251] Accordingly, one embodiment of the invention relates to a host cell, which has been transformed stably or transiently with the vector according to the invention or the nucleic acid molecule according to the invention or the nucleic acid construct or the expression construct according to the invention.

[51252] Depending on the non-human host organism, the non-human organisms used in the process according to the invention are cultured or grown in a manner with which the skilled worker is familiar.

[51253] As a rule, microorganisms are grown in a liquid medium comprising a carbon source, usually in the form of sugars, a nitrogen source, usually in the form of organic nitrogen sources such as yeast extract or salts such as ammonium sulfate, trace elements such as iron salts, manganese salts, magnesium salts, and, if appropriate, vitamins, at temperatures between 0° C. and 100° C., preferably between 10° C. and 60° C., while passing in oxygen. In the event the microorganism is anaerobe, no oxygen is blown through the culture medium. The pH value of the liquid nutrient medium may be kept constant, that is to say regulated during the culturing phase, or not. The organisms may be cultured batch wise, semi batch wise or continuously. Nutrients may be provided at the beginning of the fermentation or fed in semi continuously or continuously. Advantageously microorganisms such as algae are grown under sunlight in open ponds or in fermentors illuminated with a light intensity between 10 to 2000 μmol×m⁻²×s⁻¹, preferred between 100 to 1000 μmol×m⁻²×s⁻¹, more preferred between 200 to 800 μmol×m^{-b 2}×s⁻¹, most preferred between 300 to 600 μmol×m⁻²×s⁻¹. The cells are grown between several hours for example 3 to 48 h and several days 1 to 20 days, preferably 2 to 10 days. Algae as autotrophic organisms grow well in the presence of light as energy source, inorganic hydrogen donors and CO₂ as sole carbon source.

[51254] As a rule, plants used in the process according to the invention are grown according to general knowledge of a skilled worker.

[51255] The fine chemical produced can be isolated from the non-human organism by methods with which the skilled worker is familiar. For example via extraction, salt precipitation or chromatography, like ion-exchange chromatography. To this end, the non-human organisms, especially the microorganism or the plant, may be disrupted beforehand. The process according to the invention can be conducted batch wise, semi batch wise or continuously. A summary of known culture and isolation techniques can be found in the textbook by Chmiel (“Bioprozeβtechnik 1, Einührung in die Bioverfahrenstechnik”, Gustav Fischer Verlag, Stuttgart, 1991)), Demain et al. (“Industrial Microbiology and Biotechnology”, 2^{nd} edition, ASM Press, Washington, D.C., 1999, ISBN 1-55581-128-0) or in the textbook by Storhas (“Bioreaktoren and periphere Einrichtungen”, Vieweg Verlag, Braunschweig/Wiesbaden, 1994)).

[51256] In one embodiment, the present invention relates to a polypeptide encoded by the nucleic acid molecule according to the present invention, preferably conferring the production of or an increase in the fine chemical content in an non-human organism or cell after generating or increasing the expression or activity of said nucleic acid molecule, either in the cytosol or in an organelles such as a plastid or mitochondrion or both, preferably in a plastid, or in another embodiment by targeted or non-targeted expression.

[51257] The present invention also relates to a process for the production of a polypeptide according to the present invention, the polypeptide being expressed in a host cell according to the invention, preferably in a microorganism or a plant cell, plant or a part thereof, especially in a transgenic microorganism or a transgenic plant cell, plant or a part thereof.

[51258] In an embodiment, the nucleic acid molecule used in the process for the production of the polypeptide (FCRP) is derived from a microorganism such as a eukaryotic or prokaryotic microorganism, preferably from a eukaryotic microorganism, such as an algae or Saccharomyces cerevisiae; in an embodiment thereof this polypeptide is produced in another microorganism or in another embodiment thereof this polypeptide is produced in a plant cell, plant or a part thereof. In another embodiment, the nucleic acid molecule used in the process for the production of the polypeptide is derived from a plant, in an embodiment thereof the polypeptide is produced in a microorganism or in another embodiment thereof this polypeptide is produced in another plant, a part or cell thereof.

[51259] The skilled worker knows that protein and DNA expressed in different non-human organisms differ in many respects and properties, e. g. DNA modulation and imprinting, such as methylation or post-translational modification, as for example glucosylation, phosphorylation, acetylation, myristoylation, ADP-ribosylation, farnesylation, carboxylation, sulfation, ubiquination, etc. though having the same coding sequence. Preferably, the cellular expression control of the corresponding protein differs accordingly in the control mechanisms controlling the activity and expression of an endogenous protein or another prokaryotic or eukaryotic protein. One major difference between proteins expressed in prokaryotic or eukaryotic organisms is the amount and pattern of glycosylation. For example in E. coli there are no glycosylated proteins.

[51260] Proteins expressed in yeasts have a high mannose content in the glycosylated proteins, whereas in plants the glycosylation pattern is complex.

[51261] The polypeptide (FCRP) of the present invention is preferably produced by recombinant DNA techniques. For example, a nucleic acid molecule encoding the protein is cloned into a vector (as described above), the vector is introduced into a host cell (as described above) and said polypeptide is expressed in the host cell. Said polypeptide (FCRP) can then be isolated from the cells by an appropriate purification scheme using standard protein purification techniques. Alternative to recombinant expression, the polypeptide or peptide of the present invention can be synthesized chemically using standard peptide synthesis techniques.

[51262] Moreover, a native polypeptide conferring the increase of the respective fine chemical linoleic acid in a non-human organism or a part thereof can be isolated from cells (e.g., endothelial cells), for example using the antibody of the present invention as described below, in particular, an antibody against proteins having 3-ketoacyl-CoA thiolase, 3-oxoacyl-[acyl-carrier-protein] synthase, AAS bifunctional protein, ABC transporter permease protein, acid shock protein, aconitate hydratase, arginine decarboxylase, aromatic acid decarboxylase, aspartate-semialdehyde dehydrogenase, At1g19800-protein, At2g45420-protein, ATPase epsilon subunit, b0801-protein, b1330-protein, b1470-protein, b1670-protein, b1837-protein, b2032-protein, b2099-protein, b2107-protein, b2399-protein, b2474-protein, b2613-protein, b2682-protein, b2849-protein, b2909-protein, beta-hydroxylase, carbamoyl-phosphate synthase subunit, cation-transporting ATPase, CCAAT-binding transcription factor, chlorophyllase, colanic acid biosynthesis protein, coproporphyrinogen III oxidase, CTP synthetase, DnaJ-like chaperone, electron transport complex protein, ethanolamine utilization protein, fatty acid desaturase, Fe—S subunit of oxidoreductase, flavodoxin, fumarate hydratase, gammaglutamyltranspeptidase, glucose-6-phosphate 1-dehydrogenase, glutaredoxin, glycin cleavage system protein, GMO2LC38418-protein, heat shock transcription factor, hydrolase, lipoprotein precursor, membrane transport protein, metal-dependent hydrolase, molecular chaperone, monothiol glutaredoxin, multiple antibiotic resistance protein, outer membrane receptor protein precursor, oxidoreductase, phosphate import ATP-binding protein, phosphoribosylformyl glycinamidine synthase subunit, phosphotriesterase, protein kinase, protein phosphatase, pyruvate kinase, recombinase A, sll1032-protein, sn-glycerol-3-phosphate transport system permease protein, ThiF family protein, threonine dehydratase, threonine efflux protein, transcription factor, transcriptional regulator protein, tryptophan synthase alpha chain, TTC0490-protein, xanthine dehydrogenase, ydr507c-protein, or YGR104C-protein activity, respectively, or an antibody against polypeptides as shown in the respective line in Table II, application no. 8, columns 5 or 8, or fragments or homologs thereof which can be produced by standard techniques utilizing the polypeptid of the present invention or fragment thereof, i.e., the polypeptide of this invention (FCRP). Preferred are monoclonal antibodies.

[51263] In an embodiment, the present invention relates to a polypeptide encoded by a nucleic acid molecule of the invention or obtainable by a process of the invention. Said polypeptide confers preferably the aforementioned activity, in particular, the polypeptide confers the generation or the increased production of the fine chemical in a cell or an organism or a part thereof after generating or increasing the cellular activity, e.g. by generating or increasing the expression or the specific activity of the polypeptide.

[51264] In one embodiment, the present invention relates to a polypeptide as depicted in the respective line in Table II, especially in Table IIA or especially in Table IIB, application no. 8, columns 5 or 8, or fragment or homolog thereof or as coded by the nucleic acid molecule shown in the respective line in Table I, especially Table IA or especially Table IB, application no. 8, columns 5 or 8, preferably the coding region thereof, or fragment or homolog thereof.

[51265] In an embodiment, the present invention relates to a polypeptide comprising or consisting of a consensus sequence shown in the respective line in Table IV, application no. 8, column 8 or at least one polypeptide motif shown in the respective line in Table IV, application no. 8, column 8.

[51266] In an embodiment thereof, the present invention relates to a polypeptide comprising or consisting of a consensus sequence shown in the respective line in Table IV, application no. 8, column 8 or comprising at least one polypeptide motif shown in the respective line in Table IV, application no. 8, column 8, whereby not more than 20, 15, 10, 9, 8, 7, 6, 5, 4, 3, 2, or 1, or 0 of the amino acids can be replaced by any amino acid.

[51267] In another embodiment thereof, the present invention relates to a polypeptide comprising or consisting of a consensus sequence shown in the respective line in Table IV, application no. 8, column 8 or comprising at least one polypeptide motif shown in the respective line in Table IV, application no. 8, column 8, whereby not more than 15%, 10%, 5%, 4%, 3%, 2% or1% or 0% of the amino acids defined as distinct specific amino acids are/is replaced by another amino acid.

[51268] In another embodiment thereof, the present invention relates to a polypeptide comprising or consisting of a consensus sequence shown in the respective line in Table IV, application no. 8, column 8 or comprising at least one polypeptide motif shown in the respective line in Table IV, application no. 8, column 8, whereby not more than 20, 15, 10, 9, 8, 7, 6, 5, 4, 3, 2, or 1, or 0 amino acids are inserted into the consensus sequence or polypeptide motif.

[51269] In an embodiment of the present invention, the polypeptide of the present invention comprises or consists of a consensus sequence or at least one polypeptide motif shown in the respective line in Table IV, application no. 8, column 8, whereby said polypeptide distinguishes over the sequence depicted in the respective line in Table II, application no. 8, columns 5 or 8 by one or more amino acids. In one embodiment, said polypeptide of the invention distinguishes over the sequence shown in the respective line in Table II, application no. 8, columns 5 and 8 by more than 5, 6, 7, 8 or 9 amino acids, preferably by more than 10, 15, 20, 25 or 30 amino acids, even more preferred are more than 40, 50, or 60 amino acids and, preferably, the sequence of the polypeptide of the invention distinguishes from the sequence shown in the respective line in Table II, application no. 8, columns 5 and 8 by not more than 80%, 70%, 60%, 50%, 40%, 30%, 20%, 10%, 5%, 4%, 3%, 2%, 1% or 0.5%. In another embodiment, said polypeptide of the invention does not consist of the sequence shown in the respective line in Table II, application no. 8, columns 5 and 8.

[51270] In an embodiment, the invention relates to a polypeptide conferring an increase in the respective fine chemical linoleic acid in a non-human organism, especially a microorganism or a plant, or a part thereof, being encoded by the nucleic acid molecule of the invention or used in the process of the invention and having a sequence which distinguishes over the sequence as shown in the respective line in Table II, application no. 8, columns 5 or 8 by one or more amino acids (but not exceeding 5%, preferably 4%, 3%, 2%, 1%, 0.5%, 0.2% or 0.1%). In an embodiment, said polypeptide of the invention does not comprise or consist of the sequence shown in the respective line in Table II, application no. 8, columns 5 or 8. In an embodiment, said polypeptide of the present invention is less than 100%, 99.999%, 99.99%, 99.9% or 99% identical. In one embodiment, said polypeptide which differs at least in one or more amino acids (but not exceeding 5%, preferably 4%, 3%, 2%, 1%, 0.5%, 0.2% or 0.1%) from the polypeptide shown in the respective line in Table II, application no. 8, columns 5 and 8 does not comprise a protein of the sequence shown in the respective line in Table II A and/or II B, application no. 8, columns 5 or 8.

[51271] In an embodiment, the present invention relates to a polypeptide having the activity of the protein as shown in the respective line in Table II, application no. 8, column 3, which distinguishes over the sequence depicted in the respective line in Table II, application no. 8, columns 5 or 8 by one or more amino acids, preferably by more than 5, 6, 7, 8 or 9 amino acids, preferably by more than 10, 15, 20, 25 or 30 amino acids, even more preferred are more than 40, 50, or 60 amino acids and, preferably, the sequence of the polypeptide of the invention distinguishes from the sequence shown in the respective line in Table II, application no. 8, columns 5 and 8 by not more than 80%, 70%, 60%, 50%, 40%, 30%, 20%, 10%, 5%, 4%, 3%, 2%, 1% or 0.5%.

[51272] In another embodiment the polypeptide of the invention takes the form of a preprotein consisting of a plastidial or mitochondrial transit peptide joint to a polypeptide having the activity of the protein as shown in Table II, column 3, from which the transit peptide is preferably cleaved off upon transport of the preprotein into the organelle for example into the plastid or mitochondrion.

[51273] In another embodiment the polypeptide of the invention takes not the form of a preprotein.

[51274] The terms “protein” and “polypeptide” used in this application are interchangeable. “Polypeptide” refers to a polymer of amino acids (amino acid sequence) and does not refer to a specific length of the molecule. Thus peptides and oligopeptides are included within the definition of polypeptide. This term does also refer to or include post-translational modifications of the polypeptide, for example, glycosylations, acetylations, phosphorylations and the like. Included within the definition are, for example, polypeptides containing one or more analogs of an amino acid (including, for example, unnatural amino acids, etc.), polypeptides with substituted linkages, as well as other modifications known in the art, both naturally occurring and nonnaturally occurring.

[51275] Another aspect of the present invention pertains to isolated FCRP, or biologically active portions thereof. An “isolated” or “purified” protein or biologically active portion thereof is substantially free of cellular material when produced by recombinant DNA techniques or chemical precursors or other chemicals when chemically synthesized.

[51276] The language “substantially free of cellular material” includes preparations of the polypeptide of the invention in which the protein is separated from cellular components of the cells in which it is naturally or recombinantly produced. In an embodiment, the language “substantially free of cellular material” includes preparations having less than about 30% (by dry weight) of “contaminating protein”, more preferably less than about 20% of “contaminating protein”, still more preferably less than about 10% of “contaminating protein”, and most preferably less than about 5% “contaminating protein”. The term “contaminating protein” relates to polypeptides, which differ from the polypeptide in question of the present invention. When the polypeptide of the present invention or biologically active portion thereof is recombinantly produced, it is also preferably substantially free of culture medium, i.e., culture medium represents less than about 20%, more preferably less than about 10%, and most preferably less than about 5% of the volume of the protein preparation. The language “substantially free of chemical precursors or other chemicals” includes preparations in which the polypeptide of the present invention is separated from chemical precursors or other chemicals, which are involved in the synthesis of the protein. The language “substantially free of chemical precursors or other chemicals” includes preparations having less than about 30% (by dry weight) of chemical precursors, other chemicals or other proteins, which differ from the polypeptide in question. Other chemical precursors, other chemicals or other proteins, which are not identical to the proteins as shown in the respective line in Table II, column 5 or 8, or fragments or homologs thereof, are all collectively named as impurities. The term “chemical precursors” shall mean in the sense of the specification chemical substances, which are intermediates of the biochemical pathway within the organism or within the cell(s) of the non-human organism for example glucose-6-phoshat, citrate, fumarate, homoserine etc. The term “other chemicals” shall mean in the sense of the specification chemical substances, which are end products of the biochemical pathway within the organism or within the cell(s) of the organism for example amino acids such as lysine, alanine etc; fatty acids such as linolenic acid, eicosapantaenoic acid etc, sugars such as glucose, mannose, ribose, desoxy ribose etc, vitamins such as vitamin C, vitamin B2 etc. and all other chemical substances of the cell. The term “other proteins” shall mean in the sense of the specification all other proteins, which are not identical to the proteins mentioned in the respective line in Table II, columns 5 or 8, or fragments or homologs thereof. The fine chemical preparations advantageously shall have less than about 25% impurities, preferably less than about 20% impurities, still more preferably less than about 10% impurities, and most preferably less than about 5% impurities. In preferred embodiments, isolated proteins or biologically active portions thereof lack contaminating proteins from the same organism from which the polypeptide of the present invention is derived. Typically, such proteins are produced by recombinant techniques.

[51277] A polypeptide of the invention can participate in the process of the present invention. The polypeptide or a portion thereof comprises preferably an amino acid sequence, which is sufficiently homologous to an amino acid sequence shown in the respective line in Table II A and/or II B, application no. 8, columns 5 or 8.

[51278] Further, the polypeptide can have an amino acid sequence which is encoded by a nucleotide sequence which hybridizes, preferably hybridizes under stringent conditions as described above, to a nucleotide sequence of the nucleic acid molecule of the present invention. Accordingly, the polypeptide has an amino acid sequence which is encoded by a nucleotide sequence that is at least about 35%, 40%, 45%, 50%, 55%, 60%, 65%, 70%, 75%, 80%, 85%, 90%, 91%, 92%, 93%, 94%, 95%, 96%, 97%, 98%, 99%, 99.5% or more homologous to one of the amino acid sequences as shown in the respective line in Table II A and/or II B, application no. 8, columns 5 or 8, or fragments thereof. The preferred polypeptide of the present invention preferably possesses at least one of the activities according to the invention and described herein. A preferred polypeptide of the present invention includes an amino acid sequence encoded by a nucleotide sequence which hybridizes, preferably hybridizes under stringent conditions, to a nucleotide sequence shown in the respective line in Table I A and/or I B, application no. 8, columns 5 or 8, preferably the coding region thereof, or fragments thereto or which is homologous thereto, as defined above.

[51279] The polypeptide of the present invention can vary from the sequences shown in the respective line in Table II A and/or II B, application no. 8, columns 5 or 8 in amino acid sequence due to natural variation or mutagenesis, as described in detail herein. Accordingly, the polypeptide comprise an amino acid sequence which is at least about 35%, 40%, 45%, 50%, 55%, 60%, 65%, 70%, 75%, 80%, 85% or 90, 91%, 92%, 93%, 94%, 95%, 96%, 97%, 98%, 99%, 99.5% or more homologous to an entire amino acid sequence shown in the respective line in Table II A and/or II B, application no. 8, columns 5 or 8.

[51280] Biologically active portions of a polypeptide of the present invention include peptides comprising amino acid sequences derived from the amino acid sequence of the polypeptide of the present invention or used in the process of the present invention, e.g., the amino acid sequence shown in the respective line in Table II, application no. 8, columns 5 or 8 or the amino acid sequence of a protein homologous thereto, which include fewer amino acids than a full length polypeptide of the present invention or used in the process of the present invention or the full length protein which is homologous to a polypeptide of the present invention or used in the process of the present invention depicted herein, and exhibit at least one activity of a polypeptide of the present invention or used in the process of the present invention.

[51281] Typically, biologically (or immunologically) active portions of i.e. peptides are, for example, 5, 10, 15, 20, 30, 35, 36, 37, 38, 39, 40, 50, 75, 100, 125, 150 or more amino acids in length; especially they comprise a domain or motif with at least one activity or epitope of a polypeptide of the present invention or used in the process of the present invention. Moreover, other biologically active portions, in which other regions of the polypeptide are deleted, can be prepared by recombinant techniques and evaluated for one or more of the activities described herein.

[51282] Manipulation of the nucleic acid molecule of the invention may result in the production of a protein having differences from the protein as shown in the respective line in Table II, application no. 8, column 5 or 8. Differences shall mean at least one amino acid different from the sequences as shown in the respective line in Table II, application no. 8, column 5 or 8, preferably at least 2, 3, 4, 5, 6, 7, 8, 9 or 10 amino acids (especially but not exceeding 0.1%, preferably 0.2%, 0.5%, 1%, 2%, 3% 4% or 5%), more preferably at least 15, 20, 25, 30, 35, 40, 45 or 50 amino acids (especially but not exceeding 0.5%, preferably 1%, 2%, 3% 4%, 5%, 10% or 25%) different from the sequences as shown in the respective line in Table II, application no. 8, column 5 or 8. These proteins may be improved in efficiency or activity, or may be more stable and therefore present in greater numbers in the cell as compared to the wild-type cell.

[51283] Any mutagenesis strategies for the polypeptide of the present invention or the polypeptide used in the process of the present invention to result in increasing said activity are not meant to be limiting; variations on these strategies will be readily apparent to one skilled in the art. Using such strategies, and incorporating the mechanisms disclosed herein, the nucleic acid molecule and polypeptide of the invention may be utilized to generate algae, ciliates, fungi, other microorganisms like C. glutamicum or plants or parts thereof, expressing proteins as shown in the respective line in Table II, application no. 8, column 5 or 8, or mutated proteins thereof. The nucleic acid molecules and polypeptide molecules of the invention are expressed such that the yield, production, and/or efficiency of production of a desired compound is improved.

[51284] This desired compound may be any natural product of the respective non-human organism, especially a microorganism or a plant, which includes the final products of biosynthesis pathways and intermediates of naturally-occurring metabolic pathways, as well as molecules which do not naturally occur in the metabolism of said cells of said non-human organism, but which are produced by said cells of the invention.

[51285] The invention also provides chimeric or fusion proteins.

[51286] As used herein, a “chimeric protein” or “fusion protein” comprises a polypeptide of the present invention operatively linked to a polypeptide whereby the latter does not confer on its own above-mentioned activity, in particular, which does not confer an increase of content of the fine chemical in a cell or a non-human organism or a part thereof, if its activity is increased.

[51287] In one embodiment, a protein (=polypeptide) as shown in the respective line in Table II, application no. 8, column 5 or 8 refers to a polypeptide having an amino acid sequence corresponding to the polypeptide of the invention, especially to a polypeptide as shown in Table II, application no. 8, columns 5 or 8 or homologs thereof, or used in the process of the invention, whereas a “non-inventive protein or polypeptide” or “other polypeptide” refers to a polypeptide having an amino acid sequence corresponding to a protein which is not substantially homologous to a polypeptide of the invention, preferably which is not substantially homologous to a polypeptide or protein as shown in the respective line in Table II, application no. 8, column 5 or 8 or homologs thereof, e.g., a protein which does not confer the activity described herein and which is derived from the same or a different organism.

[51288] Within the fusion protein, the term “operatively linked” is intended to indicate that the polypeptide of the invention or a polypeptide used in the process of the invention and the “other polypeptide” or a part thereof are fused to each other so that both sequences fulfill the proposed function addicted to the sequence used. The “other polypeptide” can be fused to the N-terminus or C-terminus preferable to the C-terminus of the polypeptide of the invention or used in the process of the invention. For example, in one embodiment the fusion protein is a GST-LMRP fusion protein in which the sequences of the polypeptide of the invention or the polypeptide used in the process of the invention are fused to the C-terminus of the GST sequences. Such fusion proteins can facilitate the purification of recombinant polypeptides of the invention or a polypeptide useful in the process of the invention.

[51289] In another preferred embodiment, the fusion protein is a polypeptide of the invention or a polypeptide used in the process of the invention containing a heterologous signal sequence, preferably at its N-terminus. In certain host cells (e.g., mammalian host cells), expression and/or secretion of a polypeptide of the invention or a polypeptide used in the process of the invention can be increased through use of a heterologous signal sequence. As already mentioned above, targeting sequences, are required for targeting the gene product into specific cell compartment (for a review, see Kermode, Crit. Rev. Plant Sci. 15 (4), 285 (1996) and references cited therein), for example into the vacuole, the nucleus, all types of plastids, such as amyloplasts, chloroplasts, chromoplasts, the extracellular space, the mitochondria, the endoplasmic reticulum, elaioplasts, peroxisomes, glycosomes, and other compartments of cells or extracellular. Sequences, which must be mentioned in this context, are, in particular, the signalpeptide-or transit-peptide-sequences which are known by the person skilled in the art. For example, plastid or mitochondrial-transit-peptide- sequences enable the targeting of the expression product into the plastids or the mitochondria, respectively, of a plant cell or the mitochondria of a microorganism. Targeting sequences are especially known for eukaryotic and to a lower extent for prokaryotic organisms and can advantageously be operable linked with the nucleic acid molecule of the present invention to achieve an expression in one of said compartments or extracellular.

[51290] Preferably, a chimeric or fusion protein of the invention is produced by standard recombinant DNA techniques. For example, DNA fragments coding for the different polypeptide sequences are ligated together in-frame in accordance with conventional techniques, for example by employing blunt-ended or stagger-ended termini for ligation, restriction enzyme digestion to provide for appropriate termini, filling-in of cohesive ends as appropriate, alkaline phosphatase treatment to avoid undesirable joining, and enzymatic ligation. The fusion gene can be synthesized by conventional techniques including automated DNA synthesizers. Alternatively, PCR amplification of gene fragments can be carried out using anchor primers, which give rise to complementary overhangs between two consecutive gene fragments which can subsequently be annealed and reamplified to generate a chimeric gene sequence (see, for example, Current Protocols in Molecular Biology, eds. Ausubel et al. John Wiley & Sons (1992)). Moreover, many expression vectors are commercially available that already encode a fusion moiety (e.g., a GST polypeptide). The nucleic acid molecule of the invention can be cloned into such an expression vector such that the fusion moiety is linked in-frame to the encoded protein.

[51291] Furthermore, folding simulations and computer redesign of structural motifs of the protein of the invention can be performed using appropriate computer programs (Olszewski, Proteins 25, 286 (1996); Hoffman, Comput. Appl. Biosci. 11, 675 (1995)). Computer modeling of protein folding can be used for the conformational and energetic analysis of detailed peptide and protein models (Monge, J. Mol. Biol. 247, 995 (1995); Renouf, Adv. Exp. Med. Biol. 376, 37 (1995)). The appropriate programs can be used for the identification of interactive sites the polypeptide of the invention or polypeptides used in the process of the invention and its substrates or binding factors or other interacting proteins by computer assistant searches for complementary peptide sequences (Fassina, Immunomethods 114 (1994)). This can be used to identify motifs and domains of the polypeptides according to the present invention or used in the process of the present invention. Further appropriate computer systems for the design of protein and peptides are described in the prior art, for example in Berry, Biochem. Soc. Trans. 22, 1033 (1994); Wodak, Ann. N.Y. Acad. Sci. 501, 1 (1987); Pabo, Biochemistry 25, 5987 (1986). The results obtained from the above-described computer analysis can be used for, e.g., the preparation of peptidomimetics of the protein of the invention or fragments thereof. Such pseudopeptide analogues of the natural amino acid sequence of the protein may very efficiently mimic the parent protein (Benkirane, J. Biol. Chem. 271, 33218 (1996)). For example, the replacement of Gly-Gly in a protein of the present invention or a fragment thereof by the easily available achiral omega-amino acid delta-amino valeric acid results in the substitution of —CH2CONHCH₂—by —CH₂CH₂CH₂CH₂—, thereby providing a replacement of an amido group by an ethylen group, and a convenient strategy for constructing a peptidomimetic (Banerjee, Biopolymers 39, 769 (1996)).

[51292] Furthermore, a three-dimensional and/or crystallographic structure of the protein of the invention or used in the process of the present invention and the identification of motifs and/or interactive sites of the polypeptide of the invention or used in the process of the present invention and its substrates or binding factors can be used for the design of mutants with modulated binding or turnover activities. For example, the active center of the polypeptide of the present invention can be modeled and amino acids participating in the catalytic reaction can be modulated to increase or decrease the binding of the substrate to activate or improve the polypeptide. The identification of the active center, respective motifs and the amino acids involved in the catalytic reaction facilitates the screening for mutants having an increased activity.

[51293] Another embodiment of the invention relates to an antibody, which binds specifically to the polypeptide according to the invention or a portion thereof, i.e. specific fragments or epitopes of such a polypeptide.

[51294] The antibodies of the invention can be used to identify and isolate the polypeptide according to the invention in any organism, preferably microorganism or plants. These antibodies can be monoclonal antibodies, polyclonal antibodies or synthetic antibodies as well as fragments of antibodies, such as Fab, Fv or scFv fragments etc. Antibodies can be made by many well-known methods (see, e.g. Harlow and Lane, “Antibodies; A Laboratory Manual”, Cold Spring Harbor Laboratory, Cold Spring Harbor, N.Y., (1988)). Briefly, purified antigen can be injected into an animal in an amount and in intervals sufficient to elicit an immune response. Antibodies can either be purified directly, or spleen cells can be obtained from the animal. The cells can then be fused with an immortal cell line and screened for antibody secretion. The antibodies can be used to screen nucleic acid clone libraries for cells secreting the antigen. Those positive clones can then be sequenced. See, for example, Kelly et al., Bio/Technology 10, 163 (1992); Bebbington et al., Bio/Technology 10, 169 (1992).

[51295] As the nucleic acid molecules of the invention and/or the expression thereof is related to the synthesis of the respective fine chemical linoleic acid its function as a probe extends to the detection of microorganisms, plant tissues, plants, plant variets, plant ecotypes or plant genera with varying, advantageously increased, capability or potential for synthesis of the respective fine chemical linoleic acid. Therefore in one embodiment the present invention relates to a method for analyzing the capability or potential of a plant tissue, a plant, a plant variety or ecotype to produce the respective fine chemical linoleic acid by using the respective antibody of the invention as a probe to detect the amount of the polypeptide encoded by said nucleic acid molecule of the invention in a non-human organism in comparison to another organism.

[51296] Therefore in one embodiment the invention relates to a method to probe a non-human organism for its capability for the production of the respective fine chemical comprising the steps of
[51297] a) analyzing the sequence and/or the expression of the respective nucleic acid molecule of the invention in least two non-human organisms which differ in the capability to produce the respective fine chemical;
[51298] b) associate the different sequence and/or expression level of the nucleic acid molecules of the invention with their different capability to produce the respective fine chemical;
[51299] c) analyze the sequence and/or the expression of the nucleic acid molecule of the invention in at least a third non-human organism;
[51300] d) predict the capability of the at least third organism to produce the respective fine chemical based by comparing the sequence and/or expression of the nucleic acid of the invention to the sequences and/or expression levels of the nucleic acid molecule of the invention of the at least two organisms analyzed in step a.

[51301] The phrases “selectively binds” and “specifically binds” with the polypeptide refer to a binding reaction that is determinative of the presence of the polypeptide in a heterogeneous population of polypeptides and other biologics. Thus, under designated immunoassay conditions, the specified antibodies bound to a particular polypeptide but do not bind in a significant amount to other polypeptides present in the sample. Selective binding of an antibody under such conditions may require an antibody that is selected for its specificity for a particular polypeptide. A variety of immunoassay formats may be used to select antibodies that selectively bind with a particular polypeptide. For example, solid-phase ELISA immunoassays are routinely used to select antibodies selectively immunoreactive with a polypeptide. See Harlow and Lane,

[51302] “Antibodies, A Laboratory Manual,” Cold Spring Harbor Publications, New York, (1988), for a description of immunoassay formats and conditions that could be used to determine selective binding.

[51303] In some instances, it is desirable to prepare monoclonal antibodies from various hosts. A description of techniques for preparing such monoclonal antibodies may be found in Stites et al., eds., “Basic and Clinical Immunology,” (Lange Medical Publications, Los Altos, Calif., Fourth Edition) and references cited therein, and in Harlow and Lane, “Antibodies, A Laboratory Manual,” Cold Spring Harbor Publications, New York (1988).

[51304] Gene expression in non-human organism, like microorganism or plants, especially plants, is regulated by the interaction of protein transcription factors with specific nucleotide sequences within the regulatory region of a gene. One example of transcription factors are polypeptides that contain zinc finger (ZF) motifs. Each ZF module is approximately 30 amino acids long and folds around a zinc ion. The DNA recognition domain of a ZF protein is an ahelical structure that inserts into the major groove of the DNA double helix. The module contains three amino acids that bind to the DNA with each amino acid contacting a single base pair in the target DNA sequence. ZF motifs are arranged in a modular repeating fashion to form a set of fingers that recognize a contiguous DNA sequence. For example, a three-fingered ZF motif will recognize 9 by of DNA. Hundreds of proteins have been shown to contain ZF motifs with between 2 and 37 ZF modules in each protein (Isalan M. et al., Biochemistry 37 (35), 12026 (1998); Moore M. et al., Proc. Natl. Acad. Sci. USA 98 (4), 1432 (2001) and Moore M. et al., Proc. Natl. Acad. Sci. USA 98 (4), 1437 (2001); U.S. Pat Nos. 6,007,988 and 6,013,453).

[51305] The regulatory region of a gene contains many short DNA sequences (cisacting elements) that serve as recognition domains for transcription factors, including ZF proteins. Similar recognition domains in different genes allow the coordinate expression of several genes encoding enzymes in a metabolic pathway by common transcription factors. Variation in the recognition domains among members of a gene family facilitates differences in gene expression within the same gene family, for example, among tissues and stages of development and in response to environmental conditions.

[51306] Typical ZF proteins contain not only a DNA recognition domain but also a functional domain that enables the ZF protein to activate or repress transcription of a specific gene. Experimentally, an activation domain has been used to activate transcription of the target gene (U.S. Pat No. 5,789,538 and patent application WO 95/19431), but it is also possible to link a transcription repressor domain to the ZF and thereby inhibit transcription (WO 00/47754 and WO 01/002019). It has been reported that an enzymatic function such as nucleic acid cleavage can be linked to the ZF (WO 00/20622).

[51307] The invention provides a method that allows one skilled in the art to isolate the regulatory region of one or more FCRP encoding genes from the genome of a non-human organism, preferably a plant cell and to design zinc finger transcription factors linked to a functional domain that will interact with the regulatory region of the gene. The interaction of the zinc finger protein with the gene can be designed in such a manner as to alter expression of the gene and preferably thereby to confer the production or the increased production of the fine chemical as compared to a corresponding, e.g. non-transformed, wild type non-human organism, like a microorganism or a plant cell, plant or part thereof.

[51308] A further embodiment of the invention also relates to a method for the generation of a transgenic host or host cell, e.g. a eukaryotic or prokaryotic cell, preferably a transgenic microorganism, a transgenic plant cell or a transgenic plant tissue or a transgenic plant, which comprises introducing, into the plant cell, the plant or a part thereof , the nucleic acid molecule according to the invention, the nucleic acid construct according to the invention or the vector according to the invention or the expression cassette according to the invention.

[51309] A further embodiment of the invention also relates to a method for the stable generation of a host or host cell, prokaryotic or eukaryotic cell, preferably a transgenic microorganism such as a transgenic algae, a transgenic plant cell or a transgenic plant or a transgenic part thereof, which comprises introducing, into the plant cell, the plant or a part thereof, the nucleic acid construct according to the invention, the vector according to the invention, the expression cassette according to the invention, or the nucleic acid molecule according to the invention, whereby the introduction of the nucleic acid molecule, nucleic acid construct, expression cassette and/or vector is in such manner that the transformants are stable during the propagation of the host in respect of the introduced nucleic acid molecules, nucleic acid construct, expression cassette and/or vector.

[51310] A further embodiment of the invention also relates to a method for the transient generation of a host or host cell, prokaryotic or eukaryotic cell, preferably a transgenic microorganism such as a transgenic algae, a transgenic plant cell or a transgenic plant or a transgenic part thereof, which comprises introducing, into the plant cell, the plant or a part thereof, the nucleic acid construct according to the invention, the vector according to the invention, the expression cassette according to the invention or the nucleic acid molecule according to the invention, whereby the introduced nucleic acid molecule, nucleic acid construct, expression cassette and/or vector is not integrated into the genome of the host or host cell. Therefore the transformants are not stable during the propagation of the host in respect of the introduced nucleic acid molecules, nucleic acid construct, expressions cassette and/or vector.

[51311] In the process according to the invention, transgenic non-human organisms are also to be understood as meaning—if they take the form of plants—plant cells, plant tissues, plant organs such as root, shoot, stem, seed, flower, tuber or leaf, or intact plants which are grown for the production of the fine chemical.

[51312] Growing is to be understood as meaning for example culturing the transgenic plant cells, plant tissue or plant organs on or in a nutrient medium or the intact plant or part thereof on or in a substrate, for example in hydroponic culture, potting compost or on a field soil.

[51313] In a further advantageous embodiment of the process, the nucleic acid molecules can be expressed in single-celled plant cells (such as algae), see Falciatore et al., Marine Biotechnology 1 (3), 239 (1999), and references cited therein, and plant cells from higher plants (for example spermatophytes such as crops). Examples of plant expression vectors encompass those which are described in detail herein or in D. Becker, Plant Mol. Biol. 20,1195 (1992), M. W Bevan, [Nucl. Acids Res. 12, 8711(1984), and in “Vectors for Gene Transfer in Higher Plants” in: Transgenic Plants, Vol. 1, Engineering and Utilization, eds. S. D. Kung and R. Wu, Academic Press, 1993, pp. 15-38]. An overview of binary vectors and their use is also found in R. Hellens, Trends in Plant Science,5 (10), 446 (2000).

[51314] Vector DNA can be introduced into prokaryotic or eukaryotic cells via conventional transformation or transfection techniques. The terms “transformation” and “transfection” include conjugation and transduction and, as used in the present context, are intended to encompass a multiplicity of prior-art methods for introducing foreign nucleic acid molecules (for example DNA) into a host cell, including calcium phosphate coprecipitation or calcium chloride coprecipitation, DEAE-dextran-mediated transfection, PEG-mediated transfection, lipofection, natural competence, chemically mediated transfer, electroporation or particle bombardment. Suitable methods for the transformation or transfection of host cells, including plant cells, can be found in Sambrook et al. (Molecular Cloning: A Laboratory Manual., 2^{nd} Ed., Cold Spring Harbor Laboratory, Cold Spring Harbor Laboratory Press, Cold Spring Harbor, N.Y., 1989) and in other laboratory handbooks such as Methods in Molecular Biology, 1995, Vol. 44, Agrobacterium protocols, eds. Gartland and Davey, Humana Press, Totowa, N.J.

[51315] The above-described methods for the transformation and, if desired, regeneration of plants from plant cells, plant tissues or parts of a plant are exploited for transient or stable transformation of plants. Suitable methods are the transformation of protoplasts by polyethylene-glycol-induced DNA uptake, the biolistic method with the gene gun—known as the particle bombardment method—electroporation, the incubation of dry embryos in DNA-containing solution, microinjection and the Agrobacterium-mediated gene transfer. The above-mentioned methods are described for example in B. Jenes, Techniques for Gene Transfer, in: Transgenic Plants, Vol. 1, Engineering and Utilization, edited by Kung S. D. and Wu R., Academic Press, pp. 128-143 (1993) and in Potrykus, Annu. Rev. Plant Physiol. Plant Molec. Biol. 42, 205 (1991). The construct to be expressed is preferably cloned into a vector, which is suitable for transforming Agrobacterium tumefaciens, for example pBin19 (Bevan, Nucl. Acids Res. 12, 8711 (1984)). Agrobacteria transformed with such a vector can then be used in the known manner for the transformation of plants, in particular crop plants, such as, for example, tobacco plants, for example by bathing scarified leaves or leaf segments in an agrobacterial solution and subsequently culturing them in suitable media. The transformation of plants with Agrobacterium tumefaciens is described for example by Hofgen and Willmitzer in Nucl. Acid Res. 16, 9877 (1988) or known from, inter alia, White F.F., “Vectors for Gene Transfer in Higher Plants” in Transgenic Plants, Vol. 1, Engineering and Utilization, edited by Kung S. D. and Wu R., Academic Press, 1993, pp. 15-38. Alternatively the construct to be expressed can be cloned into vectors suitable for plastid transformation, as for example described in WO 2004/029256, WO 20040/04445 or Dufourmantel et al., Plant Mol. Biol. 55, 479 (2004).

[51316] To select for the successful transfer of the nucleic acid molecule, vector or nucleic acid construct of the invention according to the invention into a host organism, it is advantageous to use marker genes as have already been described above in detail. It is known of the stable or transient integration of nucleic acids into plant cells that only a minority of the cells takes up the foreign DNA and, if desired, integrates it into its genome, depending on the expression vector used and the transfection technique used. To identify and select these integrants, a gene encoding for a selectable marker (as described above, for example resistance to antibiotics) is usually introduced into the host cells together with the gene of interest. Preferred selectable markers in plants comprise those, which confer resistance to an herbicide such as glyphosate or gluphosinate. Other suitable markers are, for example, markers, which encode genes involved in biosynthetic pathways of, for example, sugars or amino acids, such as β-galactosidase, ura3 or ilv2. Markers, which encode genes such as luciferase, gfp or other fluorescence genes, are likewise suitable. These markers and the aforementioned markers can be used in mutants in which these genes are not functional since, for example, they have been deleted by conventional methods. Furthermore, nucleic acid molecules, which encode a selectable marker, can be introduced into a host cell on the same vector as those, which encode the polypeptides of the invention or used in the process or else in a separate vector. Cells which have been transfected stably with the nucleic acid introduced can be identified for example by selection (for example, cells which have integrated the selectable marker survive whereas the other cells die).

[51317] Since the marker genes, as a rule specifically the gene for resistance to antibiotics and herbicides, are no longer required or are undesired in the transgenic host cell once the nucleic acids have been introduced successfully, the process according to the invention for introducing the nucleic acids advantageously employs techniques which enable the removal, or excision, of these marker genes. One such a method is what is known as cotransformation. The cotransformation method employs two vectors simultaneously for the transformation, one vector bearing the nucleic acid according to the invention and a second bearing the marker gene(s). A large proportion of transformants receives or, in the case of plants, comprises (up to 40% of the transformants and above), both vectors. In case of transformation with Agrobacteria, the transformants usually receive only a part of the vector, the sequence flanked by the T-DNA, which usually represents the expression cassette. The marker genes can subsequently be removed from the transformed plant by performing crosses. In another method, marker genes integrated into a transposon are used for the transformation together with desired nucleic acid (known as the Ac/Ds technology). The transformants can be crossed with a transposase resource or the transformants are transformed with a nucleic acid construct conferring expression of a transposase, transiently or stable. In some cases (approx. 10%), the transposon jumps out of the genome of the host cell once transformation has taken place successfully and is lost. In a further number of cases, the transposon jumps to a different location. In these cases, the marker gene must be eliminated by performing crosses. In microbiology, techniques were developed which make possible, or facilitate, the detection of such events. A further advantageous method relies on what are known as recombination systems, whose advantage is that elimination by crossing can be dispensed with. The best-known system of this type is what is known as the Cre/lox system. Crel is a recombinase, which removes the sequences located between the loxP sequences. If the marker gene is integrated between the loxP sequences, it is removed, once transformation has taken place successfully, by expression of the recombinase. Further recombination systems are the HI N/H IX, FLP/FRT and REP/STB system (Tribble et al., J. Biol. Chem., 275, 22255 (2000); Velmurugan et al., J. Cell Biol., 149, 553 (2000)). A site-specific integration into the plant genome of the nucleic acid sequences according to the invention is possible.

[51318] Naturally, these methods can also be applied to microorganisms such as yeast, fungi or bacteria. Also methods for the production of marker-free plastid transformants using a transiently cointegrated selection gene have been described for example by Koop et al., Nature Biotechology, 22 (2), 225 (2004).

[51319] Agrobacteria transformed with an expression vector according to the invention may also be used in the manner known per se for the transformation of plants such as experimental plants like Arabidopsis or crop plants, such as, for example, cereals, maize, oats, rye, barley, wheat, soya, rice, cotton, sugarbeet, canola, sunflower, flax, hemp, potato, tobacco, tomato, carrot, bell peppers, oilseed rape, tapioca, cassava, arrow root, tagetes, alfalfa, lettuce and the various tree, nut, and grapevine species, in particular oil-containing crop plants such as soya, peanut, castor-oil plant, sunflower, maize, cotton, flax, oilseed rape, coconut, oil palm, safflower (Carthamus tinctorius) or cocoa beans, or in particular crop plants, like cereals, maize, oats, rye, barley, wheat, soya, rice, cotton, sugarbeet, canola, sunflower, potato or oilseed rape, for example by bathing scarified leaves or leaf segments in an agrobacterial solution and subsequently growing them in suitable media.

[51320] In addition to the transformation of somatic cells, which then have to be regenerated into intact plants, it is also possible to transform the cells of plant meristems and in particular those cells which develop into gametes. In this case, the transformed gametes follow the natural plant development, giving rise to transgenic plants. Thus, for example, seeds of Arabidopsis are treated with agrobacteria and seeds are obtained from the developing plants of which a certain proportion is transformed and thus transgenic (Feldman K. A. and Marks M. D., Mol. Gen. Genet. 208, 274 (1987), Feldmann K . in: Koncz C., Chua N.-H. and Shell J., eds., “Methods in Arabidopsis Research”, Word Scientific, Singapore, (1992) pp. 274-289). Alternative methods are based on the repeated removal of the influorescences and incubation of the excision site in the center of the rosette with transformed agrobacteria, whereby transformed seeds can likewise be obtained at a later point in time (Chang, Plant J., 5, 551 (1994), Katavic, Mol. Gen. Genet. 245, 363 (1994)). However, an especially effective method is the vacuum infiltration method with its modifications such as the “floral dip” method. In the case of vacuum infiltration of Arabidopsis, intact plants under reduced pressure are treated with an agrobacterial suspension (Bechthold N., C. R. Acad. Sci. Paris Life Sci, 316, 1194 (1993)), while in the case of the” floral dip” method the developing floral tissue is incubated briefly with a surfactanttreated agrobacterial suspension (Clough S. J., and Bent A. F., Plant J. 16, 735 (1998)). A certain proportion of transgenic seeds are harvested in both cases, and these seeds can be distinguished from non-transgenic seeds by growing under the above-described selective conditions. In addition the stable transformation of plastids is of advantages because plastids are inherited maternally in most crops reducing or eliminating the risk of transgene flow through pollen. The transformation of the chloroplast genome is generally achieved by a process, which has been schematically displayed in Klaus et al., (Nature Biotechnology 22 (2), 225 (2004)). Briefly the sequences to be transformed are cloned together with a selectable marker gene between flanking sequences homologous to the chloroplast genome. These homologous flanking sequences direct site specific integration into the plastome. Plastidal transformation has been described for many different plant species and an overview can be taken from Bock R., J. Mol. Biol. 312 (3), 425 (2001) or Maliga P., Trends Biotechnol. 21, 20 (2003). Further biotechnological progress has recently been reported in form of marker free plastid transformants, which can be produced by a transient cointegrated maker gene (Klaus et al., Nature Biotechnology 22 (2), 225 (2004)).

[51321] The genetically modified plant cells can be regenerated via all methods with which the skilled worker is familiar. Suitable methods can be found in the above-mentioned publications by Kung S. D. and Wu R., Potrykus or Hofgen and Willmitzer.

[51322] Accordingly, the present invention thus also relates to a plant cell comprising the nucleic acid construct according to the invention, the expression cassette according to the invention, the nucleic acid molecule according to the invention or the vector according to the invention, as well as a process to generate such a plant cell.

[51323] Accordingly the present invention relates to any cell transgenic for any nucleic acid characterized as part of the invention, e.g. conferring the increase of the respective fine chemical linoleic acid in a cell or a non-human organism or a part thereof, e.g. the nucleic acid molecule of the invention, the nucleic acid construct of the invention, the vector of the invention, the expression cassette according to the invention, or a nucleic acid molecule encoding the polypeptide of the invention, e.g. encoding a polypeptide having an activity as the protein as shown in the respective line in Table II, application no. 8, column 3. Due to the abovementioned activity the respective fine chemical linoleic acid content in a cell or a non-human organism is increased. For example, due to modulation or manipulation, the cellular activity is increased, in a preferred embodiment in organelles such as plastids or mitochondria, e.g. due to an increased expression or specific activity or specific targeting of the subject matters of the invention in a cell or a non-human organism or a part thereof especially in organelles such as plastids or mitochondria, or in another embodiment in the cytosol. Transgenic for a polypeptide having a protein or a protein activity means herein that due to modulation or manipulation of the genome, the activity of protein as shown in the respective line in Table II, application no. 8, column 3 or a protein as shown in the respective line in Table II, application no. 8, column 3-like activity is increased in the cell or non-human organism or part thereof, especially in organelles such as plastids or mitochondria, or especially in the cytosol. Examples are described above in context with the process of the invention.

[51324] “Transgenic”, for example regarding a nucleic acid molecule, a nucleic acid construct, an expression cassette or a vector comprising said nucleic acid molecule or a non-human organism transformed with said nucleic acid molecule, nucleic acid construct, expression cassette or vector, refers to all those subjects originating by recombinant methods in which either
[51325] a) the nucleic acid sequence, or
[51326] b) a genetic control sequence linked operably to the nucleic acid sequence, for example a promoter, or
[51327] c) (a) and (b);

[51328] are not located in their natural genetic environment or have been modified by recombinant methods, an example of a modification being a substitution, addition, deletion, inversion or insertion of one or more nucleotide residues. Natural genetic environment refers to the natural chromosomal locus in the organism of origin, or to the presence in a genomic library. In the case of a genomic library, the natural genetic environment of the nucleic acid sequence is preferably retained, at least in part. The environment flanks the nucleic acid sequence at least at one side and has a sequence of at least 50 bp, preferably at least 500 bp, especially preferably at least 1000 bp, very especially preferably at least 5000 bp, in length.

[51329] A naturally occurring expression cassette—for example the naturally occurring combination of the promoter of the gene encoding a protein as shown in the respective line in Table II, application no. 8, column 5 or 8, preferably the coding region thereof, or fragments or homologs thereof with the corresponding encoding gene—becomes a transgenic expression cassette when it is modified by non-natural, synthetic “artificial” methods such as, for example, mutagenesis. Such methods have been described (U.S. Pat. No. 5,565,350; WO 00/15815; also see above).

[51330] Further, the plant cell, plant or a part thereof can also be transformed such that further enzymes and proteins are (over)expressed which expression supports an increase of the fine chemical.

[51331] However, transgenic also means that the nucleic acids according to the invention are located at their natural position in the genome of a non-human organism, but that the sequence has been modified in comparison with the natural sequence and/or that the regulatory sequences of the natural sequences have been modified. Preferably, transgenic/recombinant is to be understood as meaning the transcription of the nucleic acids used in the process according to the invention occurs at a non-natural position in the genome, that is to say the expression of the nucleic acids is homologous or, preferably, heterologous. This expression can be performed with transiently transformed organism or with stably transformed organism.

[51332] Transgenic plants comprising the respective fine chemical(s) synthesized in the process according to the invention can be marketed directly without isolation of the fine chemical synthesized. In the process according to the invention, plants are understood as meaning all plant parts, plant organs such as leaf, stalk, root, tubers or seeds or propagation material or harvested material or the intact plant. In this context, the seed encompasses all parts of the seed such as the seed coats, epidermal cells, seed cells, endosperm or embryonic tissue. The fine chemical produced in the process according to the invention may, however, also be isolated from the plant. In case of linoleic acid this can be in free form or bound to proteins. Fine chemical(s) produced by this process can be harvested by harvesting the non-human organisms either from the culture in which they grow or from the field. For example, this can be done via squeezing, grinding and/or extraction, salt precipitation and/or ion-exchange chromatography of the plant parts, preferably the plant seeds, plant fruits, plant tubers and the like.

[51333] In a further embodiment, the present invention relates to a process for the generation of a microorganism, comprising the introduction, into the microorganism or parts thereof, of the nucleic acid construct of the invention, or the expression cassette of the invention, or the vector of the invention or the nucleic acid molecule of the invention.

[51334] In another embodiment, the present invention relates also to a transgenic microorganism comprising the nucleic acid molecule of the invention, the nucleic acid construct of the invention, or the expression cassette of the invention, or the vector of the invention. Appropriate microorganisms have been described herein before under source organism, preferred are in particular aforementioned strains suitable for the production of fine chemicals.

[51335] In principle all microorganisms can be used as host organism especially the ones mentioned under source organism above. It is advantageous to use in the process of the invention transgenic microorganisms such as algae selected from the group of the families Bacillariophyceae, Charophyceae, Chlorophyceae, Chrysophyceae, Craspedophyceae, Euglenophyceae, Prymnesiophyceae, Phaeophyceae, Dinophyceae, Rhodophyceae, Xanthophyceae, Prasinophyceae and its described species and strains. Examples for such algae are the following species Isochrysis galbana, Chaetoceros gracilis, Chaetoceros calcitrans, Tetraselmis suecica, Thalassiosira pseudonana, Pavlova lutheri, lsochrysis sp., Skeletonema costatum, Chroomonas salina, Dunaliella tertiolecta, Chaetoceros simplex, Chaetoceros muelleri, Nannochloropsis sp., Cyclotella sp., Phaeodactylum tricornutum, Tetraselmis chui, Pavlova salina, Dicruteria sp., Tetraselmis levis, Dunaliella perva, Thalassiosira weissfloggii, Chlamydomonas sp., Chlorella vulgaris, Neochloris oleoabundans or Chlorella sp, which are only small overview.

[51336] The process of the invention is, when the host organisms are microorganisms, advantageously carried out at a temperature between 0° C. and 95° C., preferably between 10° C. and 85° C., particularly preferably between 15° C. and 75° C., very particularly preferably between 15° C. and 45° C. The pH is advantageously kept at between pH 4 and 12, preferably between pH 6 and 9, particularly preferably between pH 7 and 8, during this. The process of the invention can be operated batch wise, semi batch wise or continuously. A summary of known cultivation methods is to be found in the textbook by Chmiel (Bioprozeβtechnik 1. Einführung in die Bioverfahrenstechnik (Gustav Fischer Verlag, Stuttgart, 1991)) or in the textbook by Storhas (Bioreaktoren and periphere Einrichtungen (Vieweg Verlag, Braunschweig/Wiesbaden, 1994)). The culture medium to be used must meet the requirements of the respective strains in a suitable manner. Descriptions of culture media for various microorganisms are present in the handbook “Manual of Methods for General Bacteriology” of the American Society for Bacteriology (Washington D.C., USA, 1981) and for algae in McLellan et al. (“Maintenance of algae and protozoa”, in “Maintenance of Microorganisms”, eds. Doyle A. and Kirsop B., London pp. 183-208 (1991)), Provasoli et al. (“Artificial media for freshwater algae: problems and suggestions”, in “The Ecology of Algae”, eds. Hartman R. T., Pymatunig Laboratory of Field Biology Special publication 2, University of Pittsburgh, pp. 84-96 (1960)) or Starr R. C. (“Algal cultures-sources and methods of cultivation”, in “Photosynthesis Part A, Methods in Enzymology 23”, eds. San Pietro A., N. Y., pp 29-53 (1971)). These media, which can be employed according to the invention include, as described above, usually one or more carbon sources, nitrogen sources, inorganic salts, vitamins and/or trace elements. Preferred carbon sources are sugars such as mono-, di- or polysaccharides. Examples of very good carbon sources are glucose, fructose, mannose, galactose, ribose, sorbose, ribulose, lactose, maltose, sucrose, raffinose, starch or cellulose. Sugars can also be added to the media via complex compounds such as molasses, or other byproducts of sugar refining. It may also be advantageous to add mixtures of various carbon sources. Other possible carbon sources are oils and fats such as, for example, soybean oil, sunflower oil, peanut oil and/or coconut fat, fatty acids such as, for example, palmitic acid, stearic acid and/or linoleic acid, alcohols and/or polyalcohols such as, for example, glycerol, methanol and/or ethanol and/or organic acids such as, for example, acetic acid and/or lactic acid. Nitrogen sources are usually organic or inorganic nitrogen compounds or materials, which contain these compounds. Examples of nitrogen sources include ammonia in liquid or gaseous form or ammonium salts such as ammonium sulfate, ammonium chloride, ammonium phosphate, ammonium carbonate or ammonium nitrate, nitrates, urea, amino acids or complex nitrogen sources such as corn steep liquor, soybean meal, soybean protein, yeast extract, meat extract and others. The nitrogen sources may be used singly or as a mixture. Inorganic salt compounds, which may be present in the media include the chloride, phosphorus or sulfate salts of calcium, magnesium, sodium, cobalt, molybdenum, potassium, manganese, zinc, copper and iron. For the cultivation of algae the so called soilwater media are preferred. Such media are composed of soil extract, trace element solutions, filtered seawater, a nitrogen source and a buffer substance. Such culture media are well known by the skilled person and are available for example from culture collections such as the culture collection of algae (SAG) at the University of Gottingen, the Culture collection of algae in Coimbra, Portugal (ACOI) or the culture collection of algae (UTEX) in Texas, USA.

[51337] It is possible to use as phosphorus source phosphoric acid, potassium dihydrogenphosphate or dipotassium hydrogenphosphate or the corresponding sodium-containing salts. Chelating agents can be added to the medium in order to keep the metal ions in solution. Particularly suitable chelating agents include dihydroxyphenols such as catechol or protocatechuate, or organic acids such as citric acid. The fermentation media employed according to the invention for cultivating microorganisms normally also contain other growth factors such as vitamins or growth promoters, which include, for example, biotin, riboflavin, thiamine, folic acid, nicotinic acid, pantothenate and pyridoxine. All media components are sterilized either by heat (1.5 bar and 121° C. for 20 min) or by sterilizing filtration. The components can be sterilized either together or, if necessary, separately. All media components can be present at the start of the cultivation or optionally be added continuously or batch wise. The temperature of the culture is normally between 0° C. and 55° C., preferably at 10° C. to 30° C., and can be kept constant or changed during the experiment. The pH of the medium should be in the range from 3,5 to 8.5, preferably in the range between 5 to 7. The pH for the cultivation can be controlled during the cultivation by adding basic compounds such as sodium hydroxide, potassium hydroxide, ammonia or aqueous ammonia or acidic compounds such as phosphoric acid or sulfuric acid. Foaming can be controlled by employing antifoams such as, for example, fatty acid polyglycol esters. In addition the stability of plasmids can be maintained by adding to the medium suitable substances having a selective effect, for example antibiotics, if the plasmids carry the genetic information to overcome the selective effect. Aerobic conditions are maintained by introducing oxygen or oxygen-containing gas mixtures such as, for example, ambient air into the culture. The temperature of the culture is normally from 20° C. to 45° C. and preferably from 25° C. to 40° C. The culture is continued until formation of the desired product is at a maximum. This aim is normally achieved within 10 hours to 160 hours.

[51338] The fermentation broths obtained in this way, normally have a dry matter content of 7.5 to 25% by weight. The fermentation broth can be processed further. Depending on requirements, the biomass can be removed entirely or partly by separation methods, such as, for example, centrifugation, filtration, decantation or a combination of these methods, from the fermentation broth or left completely in it. The fermentation broth can then be thickened or concentrated by known methods, such as, for example, with the aid of a rotary evaporator, thin-film evaporator, falling film evaporator, by reverse osmosis or by nanofiltration. This concentrated fermentation broth can then be worked up by freeze-drying, spray drying, spray granulation or by other processes.

[51339] In another embodiment, the present invention relates to a method of producing a transgenic non-human organism, especially a microorganism or a plant, with a FCRP coding nucleic acid, wherein expression of the nucleic acid(s) in the microorganism or a plant confers the production or the increased production of the fine chemical as compared to a wild type non-human organism comprising: (a) transforming a non-human cell with a vector comprising a FCRP encoding nucleic acid, and (b) generating from the non-human cell a transgenic non-human organism with production or enhanced production of the fine chemical.

[51340] The present invention relates also to a process according to the present invention whereby the produced fine chemical composition or the produced the fine chemical is isolated.

[51341] In this manner, more than 50% by weight, advantageously more than 60% by weight, preferably more than 70% by weight, especially preferably more than 80% by weight, very especially preferably more than 90% by weight, of the fine chemical produced in the process can be isolated. The resulting fine chemical can, if appropriate, subsequently be further purifled, if desired mixed with other active ingredients such as vitamins, amino acids, carbohydrates, antibiotics and the like, and, if appropriate, formulated.

[51342] However, it is also possible to purify the fine chemical produced further with methods known by a person skilled in the art, like extraction, precipitation, crystallization etc. For this purpose, the product-containing composition is for example subjected to a chromatography on a suitable resin, in which case the desired product or the impurities are retained wholly or partly on the chromatography resin. These chromatography steps can be repeated if necessary, using the same or different chromatography resins. The skilled worker is familiar with the choice of suitable chromatography resins and their most effective use. The purified product can be concentrated by filtration or ultrafiltration and stored at a temperature at which the stability of the product is a maximum.

[51343] The identity and purity of the isolated compound(s) can be determined by prior art techniques. These include gas chromatography (GC), high performance liquid chromatography (HPLC), spectroscopic methods, mass spectrometry (MS), staining methods, thin-layer chromatography, NIRS, enzyme assay or microbiological assays. These analytical methods are summarized for example in: Patek et al., Appl. Environ. Microbiol. 60, 133 (1994), Malakhova et al., Biotekhnologiya 11, 27 (1996); Schmidt et al., Bioprocess Engineer. 19, 67 (1998), Ullmann's Encyclopedia of Industrial Chemistry (1996) Vol. A27, VCH, Weinheim, pp. 89-90, pp. 521-540, pp. 540-547, pp. 559-566, 575-581 and pp. 581-587, Michal G., “Biochemical Pathways: An Atlas of Biochemistry and Molecular Biology”, John Wiley and Sons (1999); Fallon A. et al. “Applications of HPLC in Biochemistry” in “Laboratory Techniques in Biochemistry and Molecular Biology”, Vol. 17 (1987).

[51344] The fine chemical obtained in the process are suitable as starting material for the synthesis of further products of value. For example, in case of fatty acids they can be used in combination with each other or alone for the production of pharmaceuticals, foodstuffs, animal feeds or cosmetics.

[51345] Accordingly, the present invention relates a method for the production of a pharmaceuticals, food stuff, animal feeds, nutrients or cosmetics comprising the steps of the process according to the invention, including the isolation of the fine chemical produced or a composition produced comprising the fine chemical, and, if desired, formulating the product with a pharmaceutical acceptable carrier or formulating the product in a form acceptable for an application in agriculture or formulating the product in a form acceptable for an application as food stuff, animal feed, nutrient or cosmetic. A further embodiment according to the invention is the use of the fine chemical produced in the process or of the transgenic non-human organisms in animal feeds, foodstuffs, medicines, food supplements, cosmetics or pharmaceuticals.

[51346] In yet another aspect, the invention also relates to harvestable parts and to propagation material of the transgenic plants according to the invention which either contain transgenic plant cells expressing a nucleic acid molecule according to the invention or which contains cells which show an increased cellular activity of the polypeptide of the invention, e.g. an increased expression level or higher activity of the described protein.

[51347] Harvestable parts can be in principle any useful parts of a plant, for example, flowers, pollen, seedlings, tubers, leaves, stems, fruit, seeds, roots etc. Propagation material includes, for example, seeds, fruits, cuttings, seedlings, tubers, rootstocks etc. Preferred are seeds, fruits, seedlings or tubers as harvestable or propagation material.

[51348] The invention furthermore relates to the use of the transgenic non-human organisms according to the invention and of the cells, cell cultures, parts—such as, for example, roots, leaves and the like as mentioned above in the case of transgenic plant organisms—derived from them, and to transgenic propagation material such as seeds or fruits and the like as mentioned above, for the production of foodstuffs or feeding stuffs, pharmaceuticals or fine chemicals.

[51349] Further in another embodiment, the present invention relates to the use of the nucleic acid molecule of the invention or used in the method of the invention alone or in combination with other genes of the respective fine chemical synthesis for example of the fatty acid biosynthesis, the polypeptide of the invention or used in the method of the invention, the nucleic acid construct of the invention, the expression cassette of the invention, the vector of the invention, the plant or plant tissue or the host cell of the invention, for the production of plant resistant to a herbicide inhibiting eventually the production of the fine chemical.

[51350] Furthermore preferred is a method for the recombinant production of fine chemicals in non-human host organisms, wherein a non-human host organism is transformed with one of the above-described nucleic acid molecules or nucleic acid constructs, expression cassettes or vectors comprising one or more nucleic acid molecules, wherein said nucleic acid molecule participates in the biosynthesis of the desired fine chemical or encodes a polypeptide that catalyze the biosynthesis of the desired fine chemical, the transformed non-human host organism is cultured, and the desired fine chemical is isolated from the non-human organism and/or culture medium. In another embodiment the additional production of further fatty acids or compositions comprising said compounds and/or of pharmaceuticals is preferred. The transformed non-human host organisms are cultured and the products are recovered from the non-human host organisms and/or the culture medium by methods known to the skilled worker or the non-human organism itself serves as food or feed or food or feed supplement. The production of pharmaceuticals such as, for example, antibodies or vaccines, is described by Hood E. E. et al., J, Curr. Opin. Biotechnol. 10 (4), 382 (1999), Ma J. K., Vine N. D., Curr. Top. Microbiol. Immunol. 236, 275 (1999).

[51351] In one embodiment, the present invention relates to a method for the identification of a gene product conferring the production of or an increase in the fine chemical production in a non-human cell, comprising the following steps:
[51352] (a) contacting, e.g. hybridizing, a, some or all nucleic acid molecules of a sample, e.g. cells, tissues, plants or microorganisms or a nucleic acid library, which can contain a candidate gene encoding a gene product conferring the production of or an increase in the fine chemical after expression, with the nucleic acid molecule of the present invention as shown in the respective line in column 5 or 8 of Table I A or B of application no. 8, preferably the coding region thereof, or a fragment or homolog thereof;
[51353] (b) identifying the nucleic acid molecules, which hybridize under relaxed stringent conditions with the nucleic acid molecule of the present invention in particular to the nucleic acid molecule sequence shown in the respective line in Table I, application no. 8, columns 5 or 8, preferably the coding region thereof, of a fragment or a homolog thereof, preferably in Table I B, application no. 8, columns 5 or 8, preferably the coding region thereof, of a fragment or a homolog thereof, and, optionally, isolating the full length cDNA clone or complete genomic clone;
[51354] (c) introducing the candidate nucleic acid molecules or a fragment thereof in host cells, preferably in a plant cell or a microorganism, appropriate for producing the fine chemical;
[51355] (d) expressing the identified nucleic acid molecules in the host cells for which the production of or the increased production of the fine chemical is desired;
[51356] (e) assaying the fine chemical level in the non-human host cells; and
[51357] (f) identifying the nucleic acid molecule and/or its gene product which expression confers the production of or an increase in the fine chemical level in the non-human host cell after expression compared to the wild type.

[51358] Relaxed hybridization conditions are: After standard hybridization procedures washing steps can be performed at low to medium stringency conditions usually with washing conditions of 40° -55° C. and salt conditions between 2×SSC and 0.2×SSC with 0.1% SDS in comparison to stringent washing conditions as e.g. 60° -68° C. with 0.1% SDS. Further examples can be found in the references listed above for the stringent hybridization conditions. Usually washing steps are repeated with increasing stringency and length until a useful signal to noise ratio is detected and depend on many factors as the target, e.g. its purity, GC-content, size etc, the probe, e.g. its length, is it a RNA or a DNA probe, salt conditions, washing or hybridization temperature, washing or hybridization time etc.

[51359] In another embodiment, the present invention relates to a method for the identification of a gene product conferring the production of or an increase in the fine chemical production in a cell, comprising the following steps:
[51360] (a) identifying a nucleic acid molecule of a non-human organism, which is at least 20%, 25%, 30%, 35%, 40%, 50%, 60%, 70%, 80%, 90%, 95%, 96%, 97%, 98%, 99%, 99.5% or more homolog to the nucleic acid molecule encoding a polypeptide comprising the polypeptide molecule as shown in the respective line in column 5 or 8 of Table II, application no. 8, or comprising a consensus sequence or a polypeptide motif as shown in the respective line in column 8 of Table IV, application no. 8, or being encoded by a nucleic acid molecule comprising a polynucleotide as shown in the respective line in column 5 or 8 of Table I, application no. 8, preferably the coding region thereof, or a homologue thereof as described herein, for example via homology search in a data bank;
[51361] (b) introducing the candidate nucleic acid molecule in non-human host cells, preferably in a plant cell or a microorganism, appropriate for producing the fine chemical;
[51362] (c) expressing the identified nucleic acid molecule in the non-human host cells;
[51363] (d) assaying the fine chemical level in the non-human host cells; and
[51364] (e) identifying the nucleic acid molecule and its gene product which expression confers the production of or an increase in the fine chemical level in the non-human host cell after expression compared to the wild type.

[51365] The nucleic acid molecules identified can then be used for the production of the fine chemical in the same way as the nucleic acid molecule of the present invention. Accordingly, in one embodiment, the present invention relates to a process for the production of the fine chemical, comprising (i) identifying a nucleic acid molecule according to aforementioned steps (a) to (f) or (a) to (e) and (ii) recovering the free or bound fine chemical from a non-human organism having an increased cellular activity of a polypeptide encoded by the nucleic acid molecule compared to a wild type and/or the respective culture medium.

[51366] Further, the nucleic acid molecules disclosed herein, in particular the nucleic acid molecules shown in the respective line in column 5 or 8 of Table I A or B of application no. 8, may be sufficiently homologous to the sequences of related species such that these nucleic acid molecules may serve as markers for the construction of a genomic map in related organism or for association mapping. Furthermore natural variation in the genomic regions corresponding to nucleic acids disclosed herein, in particular the nucleic acid molecule shown in the respective line in column 5 or 8 of Table I A or B, of application no. 8 or homologous thereof, may lead to variation in the activity of the proteins disclosed herein, in particular the proteins comprising polypeptides as shown in the respective lines in column 5 or 8 of Table II A or B, of application no. 8 or their homologous, or comprising the consensus sequence or the polypeptide motif as shown in the respective line in column 8 of Table IV, and in consequence in a natural variation of an increased fine chemical production.

[51367] In consequence natural variation eventually also exists in form of more active allelic variants leading already to a relative increase in the fine chemical. Different variants of the nucleic acid molecules disclosed herein, in particular the nucleic acid molecules comprising the nucleic acid molecules as shown in the respective line in column 5 or 8 of Table I A or B of application no. 8, preferably the coding region thereof, which corresponds to different levels of increase in fine chemical, e.g. different levels of increase in fine chemical, can be indentified and used for marker assisted breeding for an enhanced production of the fine chemical.

[51368] Natural variation may also exist in the regulatory regions, e.g. the promoters of the natural genes comprising the nucleic acid molecules as shown in the respective line column 5 or 8 of Table I A or B of application no. 8, preferably the coding region thereof, which can similarly correspond to different levels of increase in the fine chemical, e.g. different levels of increase in the fine chemical can be identified and used for marker assisted breeding for an enhanced production of the fine chemical.

[51369] Accordingly, the present invention relates to a method for breeding plants for the production of the fine chemical, comprising
[51370] (a) selecting a first plant variety with an increased production of the fine chemical, e.g. based on an increased expression of a nucleic acid molecule of the invention as disclosed herein, in particular of a nucleic acid molecule comprising a nucleic acid molecule as shown in the respective line in column 5 or 8 of Table I A or B of application no. 8, preferably the coding region thereof, or fragments or homologs thereof, or a polypeptide comprising a polypeptide as shown in the respective line in column 5 or 8 of Table II A or B of application no. 8, or fragments or homologs thereof, or comprising a consensus sequence or a polypeptide motif as shown in the respective line in column 8 of Table IV, or a homolog thereof, as described herein;
[51371] (b) associating the level of increased production of the fine chemical, with the expression level or the genomic structure of a gene encoding said polypeptide or said nucleic acid molecule;
[51372] (c) crossing the first plant variety with a second plant variety, which significantly differs in its level of fine chemical; and
[51373] (d) identifying, which of the offspring varieties has got increased production of the fine chemical by the expression level of said polypeptide or nucleic acid molecule or the genomic structure of the gene(s) encoding said polypeptide or nucleic acid molecule of the invention.

[51374] In one embodiment, the expression level of the gene according to step (b) is increased.

[51375] In another embodiment, the present invention relates to a method for the identification of a compound stimulating production of the fine chemical in a non-human organism, especially a microorganism or a plant, comprising:
[51376] (a) contacting the microorganism or plant cells which express the polypeptide of the present invention or its mRNA with a candidate compound under appropriate conditions or in case of plant cells under cell cultivation conditions;
[51377] (b) assaying the production of or an increase in expression of said polypeptide or said mRNA;
[51378] (c) comparing the expression level to a standard response made in the absence of said candidate compound; whereby, the production of or an increased expression over the standard indicates that the compound is stimulating production of the fine chemical.

[51379] Furthermore, in one embodiment, the present invention relates to a process for the identification of a compound conferring the production of or an increase in the fine chemical production in a non-human organism, especially a plant or microorganism, comprising the steps:
[51380] (a) culturing a cell or a part of a plant or a microorganism or maintaining a plant expressing the polypeptide according to the invention or a nucleic acid molecule encoding said polypeptide and a readout system capable of interacting with the polypeptide under suitable conditions which permit the interaction of the polypeptide with said readout system in the presence of a compound or a sample comprising a plurality of compounds and capable of providing a detectable signal in response to the binding of a compound to said polypeptide under conditions which permit the expression of said readout system and the polypeptide of the present invention or used in the process of the invention; and
[51381] (b) identifying if the compound is an effective agonist by detecting the presence or absence or increase of a signal produced by said readout system.

[51382] The screen for a gene product or an agonist conferring the production of or an increase in the fine chemical can be performed by growth of a non-human organism for example a microorganism in the presence of growth reducing amounts of an inhibitor of the synthesis of the fine chemical. Better growth, e.g. higher dividing rate or high dry mass in comparison to the control, e.g. with a gene product or an agonist conferring the production of or an increase in the fine chemical, under such conditions would identify a gene or gene product or an agonist conferring the production of or an increase in fine chemical.

[51383] Said compound may be chemically synthesized or microbiologically produced and/or comprised in, for example, samples, e.g., cell extracts from, e.g., plants, non-human animals or microorganisms, e.g. pathogens. Furthermore, said compound(s) may be known in the art but hitherto not known to be capable of suppressing or activating the polypeptide of the present invention. The reaction mixture may be a cell free extract or may comprise a cell or tissue culture. Suitable set ups for the method of the invention are known to the person skilled in the art and are, for example, generally described in Alberts et al., “Molecular Biology of the Cell”, third edition (1994), in particular Chapter 17. The compounds may be, e.g., added to the reaction mixture, culture medium, injected into the cell or sprayed onto the plant.

[51384] If a sample containing a compound is identified in the method of the invention, then it is either possible to isolate the compound from the original sample identified as containing the compound capable of activating or conferring the production of or an increase in the fine chemical in a non-human organism or part thereof, or one can further subdivide the original sample, for example, if it consists of a plurality of different compounds, so as to reduce the number of different compounds per sample and repeat the method with the subdivisions of the original sample. Depending on the complexity of the samples, the steps described above can be performed several times, preferably until the sample identified according to the method of the invention only comprises a limited number of or only one compound(s). Preferably said sample comprises compounds of similar chemical and/or physical properties. Preferably, the compound identified according to the above-described method or a respective “active” derivative thereof is further formulated in a form suitable for the application in plant breeding or plant cell and tissue culture.

[51385] The compounds which can be tested and identified according to a method of the invention may be expression libraries, e.g., cDNA expression libraries, peptides, proteins, nucleic acids, antibodies, small organic compounds, hormones, peptidomimetics, PNAs or the like (Milner, Nature Medicine 1, 879 (1995); Hupp, Cell 83, 237 (1995); Gibbs, Cell 79, 193 (1994) and references cited supra). Said compounds can also be functional derivatives or analogues of known inhibitors or activators. Methods for the preparation of chemical derivatives and analogues are well known to those skilled in the art and are described in, for example, Beilstein,

[51386] Handbook of Organic Chemistry, Springer edition New York Inc., 175 Fifth Avenue, New York, N.Y. 10010 U.S.A. and Organic Synthesis, Wiley, New York, USA. Furthermore, said derivatives and analogues can be tested for their effects according to methods known in the art. Furthermore, peptidomimetics and/or computer aided design of appropriate derivatives and analogues can be used, for example, according to the methods described above. The non-human cell or tissue that may be employed in the method of the invention preferably is a non-human host cell, plant cell or plant tissue of the invention described in the embodiments hereinbefore.

[51387] Thus, in a further embodiment the invention relates to a compound obtained or identified according to the method for identifying an agonist of the invention said compound being an agonist of the polypeptide of the present invention or used in the process of the present invention.

[51388] Accordingly, in one embodiment, the present invention further relates to a compound identified by the method for identifying a compound of the present invention.

[51389] Said compound is, for example, a homolog of the polypeptide of the present invention. Homologs of the polypeptide of the present invention can be generated by mutagenesis, e.g., discrete point mutation or truncation of the polypeptide of the present invention. As used herein, the term “homolog” refers to a variant form of the protein, which acts as an agonist of the activity of the polypeptide of the present invention. An agonist of said protein can retain substantially the same, or a subset, of the biological activities of the polypeptide of the present invention. In particular, said agonist confers the increase of the expression level of the polypeptide of the present invention and/or the expression of said agonist in a non-human organisms or part thereof confers the increase of free and/or bound fine chemical in the non-human organism or part thereof.

[51390] In another embodiment, the invention relates to an antibody specifically recognizing the compound or agonist of the present invention.

[51391] The invention also relates to a diagnostic composition comprising at least one of the aforementioned nucleic acid molecules, expression cassettes, vectors, proteins, antibodies or compounds of the invention and optionally suitable means for detection.

[51392] The diagnostic composition of the present invention is suitable for the isolation of mRNA from a non-human cell and contacting the mRNA so obtained with a probe comprising a nucleic acid probe as described above under hybridizing conditions, detecting the presence of mRNA hybridized to the probe, and thereby detecting the expression of the protein in the non-human cell. Further methods of detecting the presence of a protein according to the present invention comprise immunotechniques well known in the art, for example enzyme linked immuno-adsorbent assay. Furthermore, it is possible to use the nucleic acid molecules according to the invention as molecular markers or primers in plant breeding. Suitable means for detection are well known to a person skilled in the art, e.g. buffers and solutions for hybridization assays, e.g. the afore-mentioned solutions and buffers, and further means for Southern-, Western-, Northern- etc. -blots, as e.g. described in Sambrook et al. are known. In one embodiment diagnostic compositions contain PCR primers designed to specifically detect the presence or the expression level of the nucleic acid molecule to be expressed or to be expressed on an enhanced level in the process of the invention, e.g. of the nucleic acid molecule of the invention, or to discriminate between different variants or alleles of the nucleic acid molecule of the invention or nucleic acid molecules the activity of which is to be increased in the process of the invention.

[51393] In another embodiment, the present invention relates to a kit comprising the nucleic acid molecule, the vector, the host cell, the polypeptide, or the, viral nucleic acid molecule, antibody, plant cell, plant or part thereof, the harvestable part, the propagation material and/or the compound and/or agonist identified according to the method of the invention.

[51394] The compounds of the kit of the present invention may be packaged in containers such as vials, optionally with/in buffers and/or solvents. If appropriate, one or more of the components of said kits might be packaged in one and the same container or in different ones. Additionally or alternatively, one or more of said components might be adsorbed to a solid support, like a nitrocellulose filter, a glass plate, a chip, a nylon membrane or to the well of a micro titer plate. The kit can be used for any of the herein described methods and embodiments, e.g.

[51395] for the production of the host cells, transgenic plants, pharmaceutical compositions, detection of homologous sequences, identification of agonists, as food or feed or as a supplement thereof or as supplement for the treating of plants, etc. Further, the kit can comprise instructions for the use of the kit for any of said embodiments. In one embodiment said kit comprises further a nuoleic acid molecule encoding one or more of the aforementioned protein, and/or an antibody, a vector, a host cell, a plant cell, a plant or a part thereof. In another embodiment said kit comprises PCR primers to detect and increase the nucleic acid molecule to be increased in the process of the invention, e.g. of the nucleic acid molecule of the invention.

[51396] In a further embodiment, the present invention relates to a method for the production of a agricultural composition providing the nucleic acid molecule, the vector, or antibody of the present invention, the viral nucleic acid of the invention, or the polypeptide of the invention, the compound or agonist or comprising the steps of the method according to the invention for the identification of said compound or agonist; and formulating the nucleic acid molecule, the vector, or antibody of the present invention, the viral nucleic acid of the invention, the polypeptide of the invention or the agonist, or compound identified according to the methods or processes of the present invention or with use of the subject matters of the present invention in a form applicable as plant agricultural composition.

[51397] In another embodiment, the present invention relates to a method for the production of “the fine chemical”-production supporting plant culture composition comprising the steps of the method of the present invention; and formulating the compound identified in a form acceptable as agricultural composition.

[51398] Under “acceptable as agricultural composition” is understood, that such a composition optionally comprises auxiliaries which are customarily used for formulating crop protection agents.

[51399] In a further embodiment the nucleic acid molecule of the invention, the polypeptide of the invention, the nucleic acid construct of the invention, the expression cassette of the invention, the non-human organisms, the non-human host cell, the microorganisms, the plant, plant cell, or the part thereof, of the invention, the vector of the invention, the agonist identified with the method of the invention, the nucleic acid molecule identified with the method of the present invention, can be used for the production of the fine chemical or of the fine chemical and one or more other fatty acids, e.g. polyunsaturated long-chain w-3-fatty acids such as eicosapentaenoic acid (=EPA) or docosahexaenoic acid (=DHA)

[51400] Accordingly, the nucleic acid molecule of the invention, or the nucleic acid molecule identified with the method of the present invention or the complement sequences thereof, the polypeptide of the invention, the nucleic acid construct of the invention, the expression cassette of the invention, the non-human organism, the non-human host cell, the microorganism, the plant, plant cell, or the part thereof of the invention, the vector of the invention, the agonist identified with the method of the invention, the antibody of the present invention, can be used for the production of or the increase in the fine chemical in a non-human organism or part thereof, e.g. in a cell.

[51401] These and other embodiments are disclosed and encompassed by the description and examples of the present invention. Further literature concerning any one of the methods, uses and compounds to be employed in accordance with the present invention may be retrieved from public libraries, using for example electronic devices. For example the public database “Medline” may be utilized which is available on the Internet, for example under http://www.ncbi.nlm.nih.gov/PubMed/medline.html. Further databases and addresses, such as http://www.ncbi.nlm.nih.gov/, http://www.infobiogen.fr/, http://www.fmi.ch/biology/researchtools.html, hftp://www.tigr.org/, are known to the person skilled in the art and can also be obtained using, e.g., http://www.lycos.com.

[51402] The present invention is illustrated by the examples, which follow. The present examples illustrate the basic invention without being intended as limiting the subject of the invention. The content of all of the references, patent applications, patents and published patent applications cited in the present patent application is herewith incorporated by reference.

[51403] A further embodiment of this invention is related to genes which increase or generate the production of the fine chemical linoleic acid in plant cells, plants or part thereof. Phenotypes thereto are associated with yield of plants (=yield related phenotypes). In accordance with the invention, therefore, the respective genes identified in Table I, wherein in column 7 linoleic acid is mentioned, especially the coding region thereof, or homologs or fragments thereof, may be employed to enhance any yield-related phenotype. Increased yield may be determined in field trials of transgenic plants and suitable control plants. Alternatively, a transgene's ability to increase yield may be determined in a model plant. An increased yield phenotype may be determined in the field test or in a model plant by measuring any one or any combination of the following phenotypes, in comparison to a control plant: yield of dry harvestable parts of the plant, yield of dry aerial harvestable parts of the plant, yield of underground dry harvestable parts of the plant, yield of fresh weight harvestable parts of the plant, yield of aerial fresh weight harvestable parts of the plant yield of underground fresh weight harvestable parts of the plant, yield of the plant's fruit (both fresh and dried), grain dry weight, yield of seeds (both fresh and dry), and the like.

[51404] The most basic yield-related phenotype is increased yield associated with the presence of the gene or a homolog or a fragment thereof as a transgene in the plant, i.e., the intrinsic yield of the plant. Intrinsic yield capacity of a plant can be, for example, manifested in a field test or in a model system by demonstrating an improvement of seed yield (e.g. in terms of increased seed/grain size, increased ear number, increased seed number per ear, improvement of seed filling, improvement of seed composition, embryo and/or endosperm improvements, and the like); modification and improvement of inherent growth and development mechanisms of a plant (such as plant height, plant growth rate, pod number, pod position on the plant, number of internodes, incidence of pod shatter, efficiency of nodulation and nitrogen fixation, efficiency of carbon assimilation, improvement of seedling vigour/early vigour, enhanced efficiency of germination (under non-stressed conditions), improvement in plant architecture. In accordance with the invention, the respective genes identified in Table I, application 8, especially the coding region thereof, or homologs or fragments thereof, wherein in the respective line linoleic acid is mentioned, may be employed to enhance intrinsic yield capacity.

[51405] Increased yield-related phenotypes may also be measured to determine tolerance to abiotic environmental stress. Abiotic stresses include drought, low temperature, nutrient deficiency, salinity, osmotic stress, shade, high plant density, mechanical stresses, and oxidative stress, and yield-related phenotypes are encompassed by tolerance to such abiotic stresses. Additional phenotypes that can be monitored to determine enhanced tolerance to abiotic environmental stress include, without limitation, wilting; leaf browning; loss of turgor, which results in drooping of leaves or needles stems, and flowers; drooping and/or shedding of leaves or needles; the leaves are green but leaf angled slightly toward the ground compared with controls; leaf blades begun to fold (curl) inward; premature senescence of leaves or needles; loss of chlorophyll in leaves or needles and/or yellowing. Any of the yield-related phenotypes described above may be monitored in field tests or in model plants to demonstrate that a transgenic plant has increased tolerance to abiotic environmental stress.

[51406] A polypeptide conferring an yield-increasing activity can be encoded by a respective nucleic acid sequence as shown in Table I, column 5 or 8, and/or comprises or consists of a respective polypeptide as depicted in Table II, column 5 and 8, and/or can be amplified with the respective primer set shown in Table III, column 8, in case in column 8 linoleic acid is indicated.

[51407] “Improved adaptation” to environmental stress like e.g. freezing and/or chilling temperatures refers to an improved plant performance under environmental stress conditions.

[51408] A modification, i.e. an increase, can be caused by endogenous or exogenous factors. For example, an increase in activity in an organism or a part thereof can be caused by adding a gene product or a precursor or an activator or an agonist to the media or nutrition or can be caused by introducing said subjects into an organism, transient or stable. Furthermore such an increase can be reached by the introduction of the respective inventive nucleic acid sequence or the encoded protein in the correct cell compartment for example into the nucleus or cytoplasmic respectively or into plastids either by transformation and/or targeting.

[51409] The term “yield” as used herein generally refers to a measurable produce from a plant, particularly a crop. Yield and yield increase (in comparison to a non-transformed starting or wild-type plant) can be measured in a number of ways, and it is understood that a skilled person will be able to apply the correct meaning in view of the particular embodiments, the particular crop concerned and the specific purpose or application concerned. The terms “improved yield” or “increased yield” can be used interchangeable.

[51410] As used herein, the term “improved yield” or the term “increased yield” means any improvement in the yield of any measured plant product, such as grain, fruit or fiber. In accordance with the invention, changes in different phenotypic traits may improve yield. For example, and without limitation, parameters such as floral organ development, root initiation, root biomass, seed number, seed weight, harvest index, tolerance to abiotic environmental stress, leaf formation, phototropism, apical dominance, and fruit development, are suitable measurements of improved yield. Any increase in yield is an improved yield in accordance with the invention. For example, the improvement in yield can comprise a 0.1%, 0.5%, 1%, 3%, 5%, 10%, 15%, 20%, 30%, 40%, 50%, 60%, 70%, 80%, 90% or greater increase in any measured parameter. For example, an increase in the bushel/acre yield of soybeans or corn derived from a crop comprising plants which are transgenic for the nucleotides and polypeptides of Table I, in case in column 7 linoleic acid is mentioned, as compared with the bushel/acre yield from untreated soybeans or corn cultivated under the same conditions, is an improved yield in accordance with the invention. The increased or improved yield can be achieved in the absence or presence of stress conditions.

[51411] For example, enhanced or increased “yield” refers to one or more yield parameters selected from the group consisting of biomass yield, dry biomass yield, aerial dry biomass yield, underground dry biomass yield, fresh-weight biomass yield, aerial fresh-weight biomass yield, underground fresh-weight biomass yield; enhanced yield of harvestable parts, either dry or fresh-weight or both, either aerial or underground or both; enhanced yield of crop fruit, either dry or fresh-weight or both, either aerial or underground or both; and preferably enhanced yield of seeds, either dry or fresh-weight or both, either aerial or underground or both.

[51412] Crop yield is defined herein as the number of bushels of relevant agricultural product (such as grain, forage, or seed) harvested per acre. Crop yield is impacted by abiotic stresses, such as drought, heat, salinity, and cold stress, and by the size (biomass) of the plant. Traditional plant breeding strategies are relatively slow and have in general not been successful in conferring increased tolerance to abiotic stresses. Grain yield improvements by conventional breeding have nearly reached a plateau in maize.

[51413] Accordingly, the yield of a plant can depend on the specific plant/crop of interest as well as its intended application (such as food production, feed production, processed food production, biofuel, biogas or alcohol production, or the like) of interest in each particular case. Thus, in one embodiment, yield is calculated as harvest index (expressed as a ratio of the weight of the respective harvestable parts divided by the total biomass), harvestable parts weight per area (acre, square meter, or the like); and the like. The harvest index, i.e., the ratio of yield biomass to the total cumulative biomass at harvest, in maize has remained essentially unchanged during selective breeding for grain yield over the last hundred years. Accordingly, recent yield improvements that have occurred in maize are the result of the increased total biomass production per unit land area. This increased total biomass has been achieved by increasing planting density, which has led to adaptive phenotypic alterations, such as a reduction in leaf angle, which may reduce shading of lower leaves, and tassel size, which may increase harvest index. Harvest index is relatively stable under many environmental conditions, and so a robust correlation between plant size and grain yield is possible. Plant size and grain yield are intrinsically linked, because the majority of grain biomass is dependent on current or stored photosynthetic productivity by the leaves and stem of the plant. As with abiotic stress tolerance, measurements of plant size in early development, under standardized conditions in a growth chamber or greenhouse, are standard practices to measure potential yield advantages conferred by the presence of a transgene.

[51414] Acccordingly, the yield of a plant can be increased by improving one or more of the yield-related phenotypes.

[51415] Such yield-related phenotypes or traits of a plant the improvement of which results in increased yield comprise, without limitation, the increase of the intrinsic yield capacity of a plant, and/or increased stress tolerance, e.g improved drought tolerance or improved nutrient use efficiency.

[51416] For example, yield refers to biomass yield, e.g. to dry weight biomass yield and/or fresh-weight biomass yield. Biomass yield refers to the aerial or underground parts of a plant, depending on the specific circumstances (test conditions, specific crop of interest, application of interest, and the like). In one embodiment, biomass yield refers to the aerial and underground parts. Biomass yield may be calculated as fresh-weight, dry weight or a moisture adjusted basis. Biomass yield may be calculated on a per plant basis or in relation to a specific area (e.g. biomass yield per acre/ square meter/ or the like).

[51417] In other embodiment, “yield” refers to seed yield which can be measured by one or more of the following parameters: number of seeds or number of filled seeds (per plant or per area (acre/square meter/ or the like)); seed filling rate (ratio between number of filled seeds and total number of seeds); number of flowers per plant; seed biomass or total seeds weight (per plant or per area (acre/square meter/ or the like); thousand kernel weight (TKW; extrapolated from the number of filled seeds counted and their total weight; an increase in TKW may be caused by an increased seed size, an increased seed weight, an increased embryo size, and/or an increased endosperm). Other parameters allowing to measure seed yield are also known in the art. Seed yield may be determined on a dry weight or on a fresh weight basis, or typically on a moisture adjusted basis, e.g. at 15.5 percent moisture.

[51418] For example, the term “increased yield” means that the a plant, exhibits an increased growth rate, under conditions of abiotic environmental stress, compared to the corresponding wild-type plant.

[51419] An increased growth rate may be reflected inter alia by or confers an increased biomass production of the whole plant, or an increased biomass production of the aerial parts of a plant, or by an increased biomass production of the underground parts of a plant, or by an increased biomass production of parts of a plant, like stems, leaves, blossoms, fruits, and/or seeds.

[51420] Increased yield includes higher fruit yields, higher seed yields, higher fresh matter production, and/or higher dry matter production.

[51421] The term “increased yield” means that the plant, exhibits a prolonged growth under conditions of abiotic environmental stress, as compared to the corresponding, e.g. non-transformed, wild type organism. A prolonged growth comprises survival and/or continued growth of the plant, at the moment when the non-transformed wild type organism shows visual symptoms of deficiency and/or death.

[51422] When the plant of the invention is a corn plant increased yield for corn plants means, for example, increased seed yield, in particular for corn varieties used for feed or food. Increased seed yield of corn refers to an increased kernel size or weight, an increased kernel per ear, or increased ears per plant. Alternatively or in addition the cob yield may be increased, or the length or size of the cob is increased, or the kernel per cob ratio is improved.

[51423] When the plant of the invention is a soy plant, increased yield for soy plants means increased seed yield, in particular for soy varieties used for feed or food. Increased seed yield of soy refers for example to an increased kernel size or weight, an increased kernel per pod, or increased pods per plant.

[51424] When the plant of the invention is an oil seed rape (OSR) plant, increased yield for OSR plants means increased seed yield, in particular for OSR varieties used for feed or food. Increased seed yield of OSR refers to an increased seed size or weight, an increased seed number per silique, or increased siliques per plant.

[51425] When the plant of the invention is a cotton plant, increased yield for cotton plants means increased lint yield. Increased lint yield of cotton refers in one embodiment to an increased length of lint.

[51426] Said increased yield can typically be achieved by enhancing or improving, one or more yield-related traits of the plant. Such yield-related traits of a plant comprise, without limitation, the increase of the intrinsic yield capacity of a plant, and/or increased stress tolerance, in particular increased abiotic stress tolerance, like for example improved nutrient use efficiency, e.g. nitrogen use efficiency, water use efficiency.

[51427] Intrinsic yield capacity of a plant can be, for example, manifested by improving the specific (intrinsic) seed yield (e.g. in terms of increased seed/ grain size, increased ear number, increased seed number per ear, improvement of seed filling, improvement of seed composition, embryo and/or endosperm improvements, or the like); modification and improvement of inherent growth and development mechanisms of a plant (such as plant height, plant growth rate, pod number, pod position on the plant, number of internodes, incidence of pod shatter, efficiency of nodulation and nitrogen fixation, efficiency of carbon assimilation, improvement of seedling vigour/early vigour, enhanced efficiency of germination (under stressed or non-stressed conditions), improvement in plant architecture, cell cycle modifications, photosynthesis modifications, various signaling pathway modifications, modification of transcriptional regulation, modification of translational regulation, modification of enzyme activities, and the like); and/or the like.

[51428] The improvement or increase of stress tolerance of a plant can for example be manifested by improving or increasing a plant's tolerance against stress, particularly abiotic stress. In the present application, abiotic stress refers generally to abiotic environmental conditions a plant is typically confronted with, including, but not limited to, drought (tolerance to drought may be achieved as a result of improved water use efficiency), heat, low temperatures and cold conditions (such as freezing and chilling conditions), nutrient depletion, salinity, osmotic stress, shade, high plant density, mechanical stress, oxidative stress, and the like.

[51429] The increased plant yield can for example be mediated by increasing the “nutrient use efficiency of a plant”, e.g. by improving the use efficiency of nutrients including, but not limited to, phosphorus, potassium, and nitrogen. Further, higher yields may be obtained with current or standard levels of nitrogen use.

[51430] Generally, the term “increased tolerance to stress” can be defined as survival of plants, and/or higher yield production, under stress conditions as compared to a non-transformed wild type or starting plant: For example, the plant of the invention or produced according to the method of the invention is better adapted to the stress conditions. “Improved adaptation” to environmental stress like e.g. drought, heat, nutrient depletion, freezing and/or chilling temperatures refers herein to an improved plant performance resulting in an increased yield, particularly with regard to one or more of the yield related traits as defined in more detail above.

[51431] During its life-cycle, a plant is generally confronted with a diversity of environmental conditions. Any such conditions, which may, under certain circumstances, have an impact on plant yield, are herein referred to as “stress” condition. Environmental stresses may generally be divided into biotic and abiotic (environmental) stresses. Unfavorable nutrient conditions are also referred to as “environmental stress”. The present invention does also contemplate solutions for this kind of environmental stress, e.g. referring to increased nutrient use efficiency.

[51432] For the purposes of the description of the present invention, the terms “enhanced tolerance to abiotic stress”, “enhanced resistance to abiotic environmental stress”, “enhanced tolerance to environmental stress”, “improved adaptation to environmental stress” and other variations and expressions similar in its meaning are used interchangeably and refer, without limitation, to an improvement in tolerance to one or more abiotic environmental stress(es) as described herein and as compared to a corresponding origin or wild type plant or a part thereof.

[51433] The term abiotic stress tolerance(s) refers for example low temperature tolerance, drought tolerance or improved water use efficiency (WUE), heat tolerance, salt stress tolerance, improved nutrient efficiency, especially nitrogen use efficiency (NUE) and others. Studies of a plant's response to desiccation, osmotic shock, and temperature extremes are also employed to determine the plant's tolerance or resistance to abiotic stresses. Water use efficiency (WUE) is a parameter often correlated with drought tolerance. In selecting traits for improving crops, a decrease in water use, without a change in growth would have particular merit in an irrigated agricultural system where the water input costs were high. An increase in growth without a corresponding jump in water use would have applicability to all agricultural systems. In many agricultural systems where water supply is not limiting, an increase in growth, even if it came at the expense of an increase in water use also increases yield.

[51434] Drought stress means any environmental stress which leads to a lack of water in plants or reduction of water supply to plants, including a secondary stress by low temperature and/or salt, and/or a primary stress during drought or heat, e.g. desiccation etc.

### Specific Embodiments

[51435] Accordingly, this invention provides respective measures and methods to produce plants with increased yield, e.g. genes conferring an increased yield-related trait, for example enhanced tolerance to abiotic environmental stress, for example an increased drought tolerance and/or low temperature tolerance and/or an increased nutrient use efficiency, intrinsic yield and/or another increased yield-related trait, upon expression or over-expression, especially increased intrinsic yield. Accordingly, the present invention provides such genes in case in column 7 of the respective Table “linoleic acid” is indicated. In particular, such genes are described in column 5 as well as in column 8 of Tables I, especially the coding region thereof, or homologs or fragments thereof, in case linoleic acid is indicated in column 7 or the respective polypeptides are described in column 5 as well as in column 8 of Table II, or homologs or fragments thereof, in case linoleic acid is indicated in column 7.

[51436] Accordingly, the present invention provides respective transgenic plants showing one or more improved yield-related traits as compared to the corresponding origin or the wild type plant and methods for producing such transgenic plants with increased yield in case in column 7 of the respective Table “linoleic acid” is indicated.

[51437] In one embodiment, one or more of said yield-increasing activities are increased by increasing the amount and/or the specific activity of one or more proteins listed in Table I, column 5 or 8 in a compartment of a cell indicated in Table I, column 6, in case in column 7 of the respective Table “linoleic acid” is indicated.

[51438] Accordingly to present invention, the yield of the plant of the invention is increased by improving one or more of the yield-related traits as defined herein. Said increased yield in accordance with the present invention can typically be achieved by enhancing or improving, in comparison to an origin or wild-type plant, one or more yield-related traits of said plant. Such yield-related traits of a plant the improvement of which results in increased yield comprise, without limitation, the increase of the intrinsic yield capacity of a plant, and/or increased stress tolerance, e.g. improved nutrient use efficiency, like nitrogen use efficiency; especially enhanced intrinsic yield capacity.

[51439] In another embodiment the present invention relates to plants with enhanced intrinsic yield capacity in case a plant is transformed with a gene being depicted in Table I, and wherein in the same line of said gene in column 7 linoleic acid is depicted.

[51440] In a further embodiment the present invention is characterized by the features as disclosed in the following items:

[51441] Item 1. A process for the production of the fine chemical linoleic acid
[51442] (a) increasing or generating one or more activities selected from the group consisting of 3-ketoacyl-CoA thiolase, 3-oxoacyl-[acyl-carrier-protein] synthase, AAS bifunctional protein, ABC transporter permease protein, acid shock protein, aconitate hydratase, arginine decarboxylase, aromatic acid decarboxylase, aspartate-semialdehyde dehydrogenase, At1g19800-protein, At2g45420-protein, ATPase epsilon subunit, b0801-protein, b1330-protein, b1470-protein, b1670-protein, b1837-protein, b2032-protein, b2099-protein, b2107-protein, b2399-protein, b2474-protein, b2613-protein, b2682-protein, b2849-protein, b2909-protein, beta-hydroxylase, carbamoylphosphate synthase subunit, cation-transporting ATPase, CCAAT-binding transcription factor, chlorophyllase, colanic acid biosynthesis protein, coproporphyrinogen III oxidase, CTP synthetase, DnaJ-like chaperone, electron transport complex protein, ethanolamine utilization protein, fatty acid desaturase, Fe—S subunit of oxidoreductase, flavodoxin, fumarate hydratase, gamma-glutamyltranspeptidase, glucose-6-phosphate 1-dehydrogenase, glutaredoxin, glycin cleavage system protein, GMO2LC38418-protein, heat shock transcription factor, hydrolase, lipoprotein precursor, membrane transport protein, metal-dependent hydrolase, molecular chaperone, monothiol glutaredoxin, multiple antibiotic resistance protein, outer membrane receptor protein precursor, oxidoreductase, phosphate import ATP-binding protein, phosphoribosylformyl glycinamidine synthase subunit, phosphotriesterase, protein kinase, protein phosphatase, pyruvate kinase, recombinase A, sll1032-protein, sn-glycerol-3-phosphate transport system permease protein, ThiF family protein, threonine dehydratase, threonine efflux protein, transcription factor, transcriptional regulator protein, tryptophan synthase alpha chain, TTC0490-protein, xanthine dehydrogenase, ydr507c-protein, and YGR104C-protein, in a non-human organism or a part thereof, preferably a microorganism, a plant cell, a plant or a part thereof, as compared to a corresponding non-transformed wild type non-human organism or a part thereof; and
[51443] (b) growing the non-human organism or a part thereof under conditions which permit the production of linoleic acid or a composition comprising linoleic acid in said non-human organism or in the culture medium surrounding said non-human organism.

[51444] Item 2. A process for the production of a respective fine chemical linoleic acid, which comprises
[51445] (A)
   [51446] (i) increasing or generating of the expression of; and/or
   [51447] (ii) increasing or generating the expression of an expression product of; and/or
   [51448] (iii) increasing or generating one or more activities of an expression product encoded by;
   [51449] at least one respective nucleic acid molecule comprising a nucleic acid molecule selected from the group consisting of:
   [51450] (a) a nucleic acid molecule encoding the polypeptide shown in column 5 or 8 of Table II, preferably Table II B, application no. 8, or a homolog or a fragment thereof;
   [51451] (b) a nucleic acid molecule shown in column 5 or 8 of Table I, preferably Table I B, application no.8, or a homolog or a fragment thereof (preferably the coding region thereof);
   [51452] (c) a nucleic acid molecule, which, as a result of the degeneracy of the genetic code, can be derived from a polypeptide sequence depicted in column 5 or 8 of Table II, preferably Table II B, application no. 8;
   [51453] (d) a nucleic acid molecule having at least 30%, in particular at least 50%, 60%, 70%, 80%, 85%, 90%, 95%, 97%, 98%, 99% or 99.5% identity with the nucleic acid molecule sequence of a polynucleotide comprising the nucleic acid molecule shown in column 5 or 8 of Table I, preferably Table I B, application no. 8, or the coding region thereof;
   [51454] (e) a nucleic acid molecule encoding a polypeptide having at least 30%, in particular 50%, 60%, 70%, 80%, 85%, 90%, 95%, 97%, 98%, 99% or 99.5% identity with the amino acid sequence of the polypeptide encoded by the nucleic acid molecule of (a), (b), (c) or (d);
   [51455] (f) a nucleic acid molecule which hybridizes with a nucleic acid molecule of (a), (b), (c), (d) or (e) under stringent hybridization conditions;
   [51456] (g) a nucleic acid molecule encoding a polypeptide which can be isolated with the aid of monoclonal or polyclonal antibodies made against a polypeptide encoded by one of the nucleic acid molecules of (a), (b), (c), (d), (e) or (f);
   [51457] (h) a nucleic acid molecule encoding a polypeptide comprising the consensus sequence or one or more polypeptide motifs as shown in column 8 of Table IV, application no. 8;
   [51458] (i) a nucleic acid molecule encoding a polypeptide having the activity represented by a respective protein as depicted in column 5 of Table II, application no. 8;
   [51459] (j) a nucleic acid molecule which comprises a polynucleotide, which is obtained by amplifying a cDNA library or a genomic library using the primers as depicted in column 8 of Table III, application no. 8; and
   [51460] (k) a nucleic acid molecule which is obtainable by screening a suitable nucleic acid library, especially a cDNA library and/or a genomic library, under stringent hybridization conditions with a probe comprising a complementary sequence of a nucleic acid molecule of (a), (b), (c), (d), (e), (f), (g), (h), (i) or (j) or with a fragment thereof, having at least 15 nt, preferably 20 nt, 30 nt, 50 nt, 100 nt, 200 nt, 500 nt, 1000 nt, 1500 nt, 2000 nt or 3000 nt of a nucleic acid molecule complementary to a nucleic acid molecule sequence characterized in (a), (b), (c), (d), (e), (f), (g), (h), (i) or (j);
   [51461] or a nucleic acid molecule comprising a sequence which is complementary thereto; in a non-human organism or a part thereof, preferably a microorganism, a plant cell, a plant or a part thereof, as compared to a corresponding non-transformed wild type non-human organism or a part thereof; and
[51462] (B) growing the non-human organism or a part thereof under conditions which permit the production of linoleic acid or a composition comprising linoleic acid in said non-human organism or in the culture medium surrounding said non-human organism.

[51463] Item 3. A process of items 1 or 2, comprising of recovering linoleic acid in its free or bound form.

[51464] Item 4. The process of any one of items 1 to 3, comprising the following steps:
[51465] (a) selecting a non-human organism or a part thereof expressing a polypeptide encoded by the nucleic acid molecule characterized in item 2;
[51466] (b) mutagenizing the selected non-human organism or the part thereof;
[51467] (c) comparing the activity or the expression level of said polypeptide in the mutagenized non-human organism or the part thereof with the activity or the expression of said polypeptide of the selected non-human organisms or the part thereof;
[51468] (d) selecting the mutated non-human organisms or parts thereof, which comprise an increased activity or expression level of said polypeptide compared to the selected non-human organism or the part thereof;
[51469] (e) optionally, growing and cultivating the non-human organisms or the parts thereof;
[51470] and
[51471] (f) recovering, and optionally isolating, the free or bound linoleic acid produced by the selected mutated non-human organisms or parts thereof.

[51472] Item 5. The process of any one of items 1 to 4 wherein the activity of said protein or the expression of said nucleic acid molecule is increased or generated transiently or stably.

[51473] Item 6. An isolated nucleic acid molecule comprising a nucleic acid molecule selected from the group consisting of:
[51474] (a) a nucleic acid molecule encoding a polypeptide shown in Table II, application no. 8, column 5 or 8, preferably shown in Table II B, application no. 8, column 8, or a homolog or a fragment thereof;
[51475] (b) a nucleic acid molecule shown in Table I, application no. 8, column 5 or 8, preferably shown in Table I B, application no. 8, column 8, preferably the coding region thereof, or a homolog or a fragment thereof;
[51476] (c) a nucleic acid molecule, which, as a result of the degeneracy of the genetic code, can be derived from a polypeptide sequence depicted in column 5 or 8 of Table II, application no. 8, preferably in column 8 of Table II B, application no. application no.;
[51477] (d) a nucleic acid molecule having at least 30% identity, preferably at least 40%, 50%, 60%, 70%, 75%, 80%, 85%, 90%, 95%, 96%, 97%, 98%, 99%, 99.5%, with the nucleic acid molecule sequence of a polynucleotide comprising the nucleic acid molecule shown in column 5 or 8 of Table I, application no. 3, preferably shown in column 8 of Table I B, application no. 8, preferably the coding region thereof;
[51478] (e) a nucleic acid molecule encoding a polypeptide having at least 30% identity, preferably at least 40%, 50% 60%, 70%, 75%, 80%, 85%, 90%, 95%, 96%, 97%, 98%, 99%, 99.5%, identity with the amino acid sequence of the polypeptide encoded by the nucleic acid molecule of (a), (b), (c) or (d);
[51479] (f) a nucleic acid molecule which hybridizes with a nucleic acid molecule of (a), (b), (c), (d) or (e) under stringent hybridisation conditions;
[51480] (g) a nucleic acid molecule encoding a polypeptide which can be isolated with the aid of monoclonal or polyclonal antibodies made against a polypeptide encoded by one of the nucleic acid molecules of (a), (b), (c), (d), (e) or (f);
[51481] (h) a nucleic acid molecule encoding a polypeptide comprising the consensus sequence or one or more polypeptide motifs as shown in column 8 of Table IV, application no. 8;
[51482] (i) a nucleic acid molecule encoding a polypeptide having the activity represented by a respective protein as depicted in column 5 of Table II, application no. 8;
[51483] (j) a nucleic acid molecule comprising a polynucleotide which is obtained by amplifying a cDNA library or a genomic library using the primers in Table III, application no. 8, column 8;
[51484] and
[51485] (k) nucleic acid molecule which is obtainable by screening a suitable nucleic acid library, especially a cDNA library and/or a genomic library, under stringent hybridization conditions with a probe comprising one of the sequences of the nucleic acid molecule of (a), (b), (c), (d), (e), (f), (g), (h), (i) or (j) or with a fragment of at least 15 nt, preferably 20 nt, 30 nt, 50 nt, 100 nt, 200 nt,500 nt, 1000 nt, 1500 nt, 2000 nt or 3000 nt of the nucleic acid molecule characterized in (a), (b), (c), (d), (e), (f), (g), (h), (i) or (j); or a nucleic acid molecule comprising a sequence which is complementary thereto.

[51486] Item 7. A nucleic acid construct which confers the expression of the nucleic acid molecule as defined in item 6, comprising one or more regulatory elements.

[51487] Item 8. An expression cassette comprising
[51488] (a) a promoter, preferably selected from the group consisting of Big35S, PCUbi, Super and USP;
[51489] (b) a nucleic acid molecule as defined in item 6.

[51490] Item 9. A vector comprising the nucleic acid molecule as defined in item 6 or the nucleic acid construct as claimed in item 7 or the expression cassette as claimed in item 8.

[51491] Item 10. A host cell or a plant organelle, which has been transformed with the vector as claimed in item 9 or the nucleic acid molecule as defined in item 6 or the nucleic acid construct as claimed in item 7 or the expression cassette as claimed in item 8.

[51492] Item 11. The host cell of item 10, which is a plant cell or a microorganism.

[51493] Item 12. A process for producing a polypeptide, wherein the polypeptide is expressed in a host cell as claimed in item 10 or 11.

[51494] Item 13. A polypeptide produced by the process as claimed in item 12 or encoded by the nucleic acid molecule as defined in item 6.

[51495] Item 14. An antibody, which binds specifically to the polypeptide as claimed in item 13.

[51496] Item 15. A plant tissue, propagation material, harvested material or a plant comprising the host cell as claimed in item 10 or 11.

[51497] Item 16. A process for the identification of a compound conferring an increase in linoleic acid production in a non-human organism, comprising the steps:
[51498] (a) culturing a plant cell or tissue or microorganism or maintaining a plant expressing the polypeptide encoded by the nucleic acid molecule as defined in item 6 conferring an increase in the amount of linoleic acid in a non-human organism or a part thereof and a readout system capable of interacting with the polypeptide under suitable conditions which permit the interaction of the polypeptide with said readout system in the presence of a compound or a sample comprising a plurality of compounds and capable of providing a detectable signal in response to the binding of a compound to said polypeptide under conditions which permit the expression of said readout system and of the polypeptide encoded by the nucleic acid molecule of item 6 conferring an increase in the amount of linoleic acidin a non-human organism or a part thereof;
[51499] (b) identifying if the compound is an effective agonist by detecting the presence or absence or increase of a signal produced by said readout system.

[51500] Item 17. A method for the production of an agricultural composition comprising the steps of the method of item 16 and formulating the compound identified in item 16 in a form acceptable for an application in agriculture.

[51501] Item 18. A composition comprising the nucleic acid molecule as defined in item 6, the polypeptide as claimed in item 13, the nucleic acid construct as claimed in item 7, the expression cassette as claimed in item 8, the vector as claimed in item 9, the compound as claimed in item 16, the antibody as claimed in item 14, and optionally an agricultural acceptable carrier.

[51502] Item 19. Use of the nucleic acid molecule as defined in item 6 for the identification of a nucleic acid molecule conferring an increase in linoleic acid after expression.

[51503] Item 20. Cosmetic, pharmaceutical, food or feed composition comprising the nucleic acid molecule as defined in item 6, the polypeptide as claimed in item 13, the nucleic acid construct as claimed in item 7, the expression cassette as claimed in item 8, the vector as claimed in item 9, the antibody as claimed in item 14, the plant or a part thereof, or plant tissue as claimed in item 15, the harvested material or propagation material as claimed in item 15 or the host cell of item as claimed in items 10 or 11.

[51504] Item 21. Use of the nuclei acid molecule as defined in item 6, the polypeptide as claimed in item 13, the nucleic acid construct as claimed in item 7, the expression cassette as claimed in item 8, the vector as claimed in claim9, the plant or plant tissue as claimed in item 15, or the host cell of item 10 to 11 for the production of plant resistant to a herbicide inhibiting the production of linoleic acid.

[51505] Item 22. A method for producing a plant with increased yield as compared to a corresponding non-transformed wild type plant, whereby the method comprises
[51506] (i) increasing or generating of the expression of; and/or
[51507] (ii) increasing or generating the expression of an expression product of; and/or
[51508] (iii) increasing or generating one or more activities of an expression product encoded by;
[51509] at least one respective nucleic acid molecule comprising a nucleic acid molecule selected from the group consisting of:
[51510] (a) a nucleic acid molecule encoding the polypeptide shown in column 5 or 8 of Table II, preferably Table II B, application no. 8, or a homolog or a fragment thereof, in case in column 7 linoleic acid is indicated;
[51511] (b) a nucleic acid molecule shown in column 5 or 8 of Table I, preferably Table I B, application no. 8, or a homolog or a fragment thereof (preferably the coding region thereof) , in case in column 7 linoleic acid is indicated;
[51512] (c) a nucleic acid molecule, which, as a result of the degeneracy of the genetic code, can be derived from a polypeptide sequence depicted in column 5 or 8 of Table II, preferably Table II B, application no. 8, in case in column 7 linoleic acidis indicated;
[51513] (d) a nucleic acid molecule having at least 30%, in particular at least 50%, 60%, 70%, 80%, 85%, 90%, 95%, 97%, 98%, 99% or 99.5% identity with the nucleic acid molecule sequence of a polynucleotide comprising the nucleic acid molecule shown in column 5 or 8 of Table I, preferably Table I B, application no. 8, or the coding region thereof, in case in column 7 linoleic acid is indicated;
[51514] (e) a nucleic acid molecule encoding a polypeptide having at least 30%, in particular 50%, 60%, 70%, 80%, 85%, 90%, 95%, 97%, 98%, 99% or 99.5% identity with the amino acid sequence of the polypeptide encoded by the nucleic acid molecule of (a), (b), (c) or (d);
[51515] (f) a nucleic acid molecule which hybridizes with a nucleic acid molecule of (a), (b), (c), (d) or (e) under stringent hybridization conditions;
[51516] (g) a nucleic acid molecule encoding a polypeptide which can be isolated with the aid of monoclonal or polyclonal antibodies made against a polypeptide encoded by one of the nucleic acid molecules of (a), (b), (c), (d), (e) or (f);
[51517] (h) a nucleic acid molecule encoding a polypeptide comprising the consensus sequence or one or more polypeptide motifs as shown in column 8 of Table IV, application no. 8, in case in column 7 linoleic acid is indicated;
[51518] (i) a nucleic acid molecule encoding a polypeptide having the activity represented by a respective protein as depicted in column 5 of Table II, application no. 8, in case in column 7 linoleic acid is indicated;
[51519] (j) a nucleic acid molecule which comprises a polynucleotide, which is obtained by amplifying a cDNA library or a genomic library using the primers as depicted in column 8 of Table III, application no. 8, in case in column 7 linoleic acid is indicated; and
[51520] (k) a nucleic acid molecule which is obtainable by screening a suitable nucleic acid library, especially a cDNA library and/or a genomic library, under stringent hybridization conditions with a probe comprising a complementary sequence of a nucleic acid molecule of (a), (b), (c), (d), (e), (f), (g), (h), (i) or (j) or with a fragment thereof, having at least 15 nt, preferably 20 nt, 30 nt, 50 nt, 100 nt, 200 nt, 500 nt, 1000 nt, 1500 nt, 2000 nt or 3000 nt of a nucleic acid molecule complementary to a nucleic acid molecule sequence characterized in (a), (b), (c), (d), (e), (f), (g), (h), (i) or (j);
[51521] or a nucleic acid molecule comprising a sequence which is complementary thereto; in a plant cell, plant or a part thereof.

[51522] Item 23. A method for producing a plant with increased yield according to item 22, which comprises in addition the regeneration of a plant from such transformed plant cell, plant cell compartment, plant cell nucleus, plant cell or plant tissue with increased yield.

### EXAMPLES

### Example 1

### Cloning of the Sequences as Shown in Table I, Column 5 or 8 in Escherichia Coli

[51523] The inventive sequences as shown in the respective line in Table I, column 5 or 8 were cloned into the plasmids pBR322 (Sutcliffe J.G., Proc. Natl. Acad. Sci. USA, 75, 3737 (1979)), pA-CYC177 (Change and Cohen, J. Bacteriol. 134, 1141 (1978)), plasmids of the pBS series (pBSSK+, pBSSK− and others; Stratagene, LaJolla, USA) or cosmids such as SuperCosi (Stratagene, LaJolla, USA) or Lorist6 (Gibson T. J., Rosenthal A. and Waterson R. H., Gene 53, 283 (1987) for expression in E. coli using known, well-established procedures (see, for example, J. Sambrook et al. “Molecular Cloning: A Laboratory Manual”. Cold Spring Harbor Laboratory Press (1989) or F. M. Ausubel et al., “Current Protocols in Molecular Biology”, John Wiley & Sons (1994)).

### Example 2

### DNA Sequencing and Computerized Functional Analysis

[51524] The DNA was sequenced by standard procedures, in particular the chain determination method, using AB1377 sequencers (see, for example, Fleischman R. D. et al., Science 269, 496 (1995)).

### Example 3

### In-Vivo and In-Vitro Mutagenesis

[51525] An in vivo mutagenesis of organisms such as Saccharomyces, Mortierella, Escherichia and others mentioned above, which are beneficial for the production of a fine chemical can be carried out by passing a plasmid DNA (or another vector DNA) containing the desired nucleic acid sequence or nucleic acid sequences through E. coli and other microorganisms (for example Bacillus spp. or yeasts such as Saccharomyces cerevisiae) which are not capable of maintaining the integrity of its genetic information. Usual mutator strains have mutations in the genes for the DNA repair system (for example mutHLS, mutD, mutT and the like; for comparison, see Rupp W.D., “DNA repair mechanisms in Escherichia coli and Salmonella”, pp. 2277-2294, ASM, Washington (1996)]. The skilled worker knows these strains. The use of these strains is illustrated for example in Greener A., and Callahan M., Strategies 7, 32 (1994).

[51526] In-vitro mutation methods such as increasing the spontaneous mutation rates by chemical or physical treatment are well known to the skilled person. Mutagens like 5-bromo-uracil, N-methyl-N-nitro-N-nitrosoguanidine (=NTG), ethyl methanesulfonate (=EMS), hydroxylamine and/or nitrous acid are widely used as chemical agents for random in-vitro mutagenesis. The most common physical method for mutagenesis is the treatment with UV irradiation. Another random mutagenesis technique is the error-prone PCR for introducing amino acid changes into proteins. Mutations are deliberately introduced during PCR through the use of error-prone DNA polymerases and special reaction conditions known to a person skilled in the art. For this method randomized DNA sequences are cloned into expression vectors and the resulting mutant libraries screened for altered or improved protein activity as described below.

[51527] Site-directed mutagenesis method such as the introduction of desired mutations with an M13 or phagemid vector and short oligonucleotides primers is a well-known approach for site-directed mutagenesis. The clou of this method involves cloning of the nucleic acid sequence of the invention into an M13 or phagemid vector, which permits recovery of single-stranded recombinant nucleic acid sequence. A mutagenic oligonucleotide primer is then designed whose sequence is perfectly complementary to nucleic acid sequence in the region to be mutated, but with a single difference: at the intended mutation site it bears a base that is complementary to the desired mutant nucleotide rather than the original. The mutagenic oligonucleotide is then allowed to prime new DNA synthesis to create a complementary full-length sequence containing the desired mutation. Another site-directed mutagenesis method is the PCR mismatch primer mutagenesis method also known to the skilled person. Dpnl site-directed mutagenesis is a further known method as described for example in the Stratagene Quickchange™ site-directed mutagenesis kit protocol. A huge number of other methods are also known and used in common practice.

[51528] Positive mutation events can be selected by screening the organisms for the production of the desired fine chemical.

### Example 4

### DNA Transfer between Escherichia Coli, Saccharomyces Cerevisiae and Mortierella Alpina

[51529] Shuttle vectors such as pYE22m, pPAC-ResQ, pClasper, pAUR224, pAMH10, pAML10, pAMT10, pAMU10, pGMH10, pGML10, pGMT10, pGMU10, pPGAL1, pPADH1, pTADH1, pTAex3, pNGA142, pHT3101 and derivatives thereof which allow the transfer of nucleic acid sequences between Escherichia coli, Saccharomyces cerevisiae and/or Mortierella alpina are available to the skilled worker. An easy method to isolate such shuttle vectors is disclosed by Soni R. and Murray J. A. H., Nucleic Acid Research, 20 (21), 5852 (1992). If necessary such shuttle vectors can be constructed easily using standard vectors for E. coli (Sambrook J. et al. “Molecular Cloning: A Laboratory Manual”, Cold Spring Harbor Laboratory Press (1989) or Ausubel F. M. et al. “Current Protocols in Molecular Biology”, John Wiley & Sons (1994)) and/or the aforementioned vectors, which have a replication origin for, and suitable marker from, Escherichia coli, Saccharomyces cerevisiae or Mortierella alpina added. Such replication origins are preferably taken from endogenous plasmids, which have been isolated from species used in the inventive process. Genes, which are used in particular as transformation markers for these species are genes for kanamycin resistance (such as those which originate from the Tn5 or Tn903 transposon) or for chloramphenicol resistance (Winnacker E. L., “From Genes to Clones—Introduction to Gene Technology”, VCH, Weinheim (1987)) or for other antibiotic resistance genes such as for G418, gentamycin, neomycin, hygromycin or tetracycline resistance.

[51530] Using standard methods, it is possible to clone a gene of interest into one of the above-described shuttle vectors and to introduce such hybrid vectors into the microorganism strains used in the inventive process. The transformation of Saccharomyces can be achieved for example by LiCl or sheroplast transformation (Bishop et al., Mol. Cell. Biol., 6, 3401 (1986), Sherman et al., “Methods in Yeasts in Genetics”, Cold Spring Harbor Lab. Cold Spring Harbor, N.Y. (1982), Agatep et al., Technical Tips Online 1998, 1:51: P01525 or Gietz et al., Methods Mol. Cell. Biol. 5,255 (1995)) or electroporation (Delorme E., Appl. Environ. Microbiol., 55 (9), 2242 (1989)).

[51531] If the transformed sequence(s) is/are to be integrated advantageously into the genome of the microorganism used in the inventive process for example into the yeast or fungi genome, standard techniques known to the skilled worker also exist for this purpose. Solinger et al. (Proc. Natl. Acad. Sci. U S A., 15, 8447 (2001)) and Freedman et al. (Genetics, 162, 15 (2002)) teaches a homolog recombination system dependent on rad 50, rad51, rad54 and rad59 in yeasts. Vectors using this system for homologous recombination are vectors derived from the Ylp series. Plasmid vectors derived for example from the 2p-Vector are known by the skilled worker and used for the expression in yeasts. Other preferred vectors are for example pART1, pCHY21 or pEVP11 as they have been described by McLeod et al. (EMBO J., 6, 729 (1987)) and Hoffman et al. (Genes Dev. 5, 561 (1991)) or Russell et al. (J. Biol. Chem. 258, 143 (1983)). Other beneficial yeast vectors are plasmids of the REP, REP-X, pYZ or RIP series.

### Example 5

### Determining the Expression of the Mutant/Transgenic Protein

[51532] The observations of the activity of a mutated, or transgenic, protein in a transformed host cell are based on the fact that the protein is expressed in a similar manner and in a similar quantity as the wild-type protein. A suitable method for determining the transcription quantity of the mutant, or transgenic, gene (a sign for the amount of mRNA which is available for the translation of the gene product) is to carry out a Northern blot (see, for example, Ausubel et al., “Current Protocols in Molecular Biology”, Wiley, New York (1988)), where a primer which is designed in such a way that it binds to the gene of interest is provided with a detectable marker (usually a radioactive or chemiluminescent marker) so that, when the total RNA of a culture of the organism is extracted, separated on a gel, applied to a stable matrix and incubated with this probe, the binding and quantity of the binding of the probe indicates the presence and also the amount of mRNA for this gene. Another method is a quantitative PCR. This information detects the extent to which the gene has been transcribed. Total cell RNA can be isolated for example from yeasts or E. coli by a variety of methods, which are known in the art, for example with the Ambion kit according to the instructions of the manufacturer or as described in Edgington et al., Promega Notes Magazine Number 41, 14 (1993).

[51533] Standard techniques, such as Western blot, may be employed to determine the presence or relative amount of protein translated from this mRNA (see, for example, Ausubel et al. “Current Protocols in Molecular Biology”, Wiley, New York (1988)). In this method, total cell proteins are extracted, separated by gel electrophoresis, transferred to a matrix such as nitrocellulose and incubated with a probe, such as an antibody, which binds specifically to the desired protein.

[51534] This probe is usually provided directly or indirectly with a chemiluminescent or colorimetric marker, which can be detected readily. The presence and the observed amount of marker indicate the presence and the amount of the sought mutant protein in the cell. However, other methods are also known.

### Example 6

### Growth of Genetically Modified Organism: Media and Culture Conditions

[51535] Genetically modified Yeast, Mortierella or Escherichia coli are grown in synthetic or natural growth media known by the skilled worker. A number of different growth media for Yeast, Mortierella or Escherichia coli are well known and widely available. A method for culturing Mortierella is disclosed by Jang et al. (Bot. Bull. Acad. Sin. 41, 41 (2000)). Mortierella can be grown at 20° C. in a culture medium containing: 10 g/l glucose, 5 g/l yeast extract at pH 6.5. Furthermore Jang et al. teaches a submerged basal medium containing 20 g/l soluble starch, 5 g/l Bacto yeast extract, 10 g/l KNO₃, 1 g/l KH₂PO₄, and 0.5 g/l MgSO₄x7H₂O, pH 6.5.

[51536] Said media, which can be used according to the invention usually consist of one or more carbon sources, nitrogen sources, inorganic salts, vitamins and trace elements. Preferred carbon sources are sugars such as mono-, di- or polysaccharides. Examples of very good carbon sources are glucose, fructose, mannose, galactose, ribose, sorbose, ribulose, lactose, maltose, sucrose, raffinose, starch or cellulose. Sugars may also be added to the media via complex compounds such as molasses or other by-products of sugar refining. It may also be advantageous to add mixtures of various carbon sources. Other possible carbon sources are alcohols and/or organic acids such as methanol, ethanol, acetic acid or lactic acid. Nitrogen sources are usually organic or inorganic nitrogen compounds or materials containing said compounds. Examples of nitrogen sources include ammonia gas, aqueous ammonia solutions or ammonium salts such as NH₄Cl, or (NH₄)₂SO₄, NH₄OH, nitrates, urea, amino acids or complex nitrogen sources such as cornsteep liquor, soybean flour, soybean protein, yeast extract, meat extract and others. Mixtures of the above nitrogen sources may be used advantageously.

[51537] Inorganic salt compounds, which may be included in the media comprise the chloride, phosphorus or sulfate salts of calcium, magnesium, sodium, cobalt, molybdenum, potassium, manganese, zinc, copper and iron. Chelating agents may be added to the medium in order to keep the metal ions in solution. Particularly suitable chelating agents include dihydroxyphenols such as catechol or protocatechulate or organic acids such as citric acid. The media usually also contain other growth factors such as vitamins or growth promoters, which include, for example, biotin, riboflavin, thiamine, folic acid, nicotinic acid, panthothenate and pyridoxine. Growth factors and salts are frequently derived from complex media components such as yeast extract, molasses, cornsteep liquor and the like. The exact composition of the compounds used in the media depends heavily on the particular experiment and is decided upon individually for each specific case. Information on the optimization of media can be found in the textbook “Applied Microbiol. Physiology, A Practical Approach” (eds. Rhodes P. M., Stanbury P. F., IRL Press pp. 53-73 (1997)). Growth media can also be obtained from commercial suppliers, for example Standard 1 (Merck) or BHI (Brain heart infusion, DIFCO) and the like.

[51538] All media components are sterilized, either by heat (20 min at 1.5 bar and 121° C.) or by filter sterilization. The components may be sterilized either together or, if required, separately. All media components may be present at the start of the cultivation or added continuously or batchwise, as desired.

[51539] The culture conditions are defined separately for each experiment. The temperature is normally between 15° C. and 45° C. and may be kept constant or may be altered during the experiment. The pH of the medium should be in the range from 5 to 8.5, preferably around 7.0, and can be maintained by adding buffers to the media. An example of a buffer for this purpose is a potassium phosphate buffer. Synthetic buffers such as MOPS, HEPES, ACES and the like may be used as an alternative or simultaneously. The culture pH value may also be kept constant during the culture period by addition of, for example, NaOH or NH₄OH. If complex media components such as yeast extract are used, additional buffers are required less since many complex compounds have a high buffer capacity. When using a fermenter for the culture of microorganisms, the pH value can also be regulated using gaseous ammonia.

[51540] The incubation period is generally in a range of from several hours to several days. This time period is selected in such a way that the maximum amount of product accumulates in the fermentation broth. The growth experiments, which are disclosed, can be carried out in a multiplicity of containers such as microtiter plates, glass tubes, glass flasks or glass or metal fermenters of various sizes. To screen a large number of clones, the microorganisms should be grown in microtiter plates, glass tubes or shake flasks, either using simple flasks or baffle flasks. 100 ml shake flasks filled with 10% (based on the volume) of the growth medium required are preferably used. The flasks should be shaken on an orbital shaker (amplitude 25 mm) at a rate ranging from 100 to 300 rpm. Evaporation losses can be reduced by maintaining a humid atmosphere; as an alternative, a mathematical correction should be carried out for the evaporation losses.

[51541] If genetically modified clones are examined, an unmodified control clone, or a control clone, which contains the basic plasmid without insertion, should also be included in the tests. If a transgenic sequence is expressed, a control clone should advantageously again be included in these tests. The medium is advantageously inoculated to an OD600 of 0.5 to 1.5 using cells which have been grown on agar plates, such as CM plates (10 g/l glucose, 2.5 g/l NaCl, 2 g/l urea, 10 g/l polypeptone, 5 g/l yeast extract, 5 g/l meat extract, 22 g/l agar, pH value 6.8 established with 2M NaOH), which have been incubated at 30° C. The media are inoculated for example by addition of a liquid preculture of seed organism such as E. coli or S. cerevisiae.

### Example 7

### Growth of Genetically Modified Algae: Media and Culture Conditions

### Growing Chlamydomonas:

[51542] Chlamydomonas reinhardtii is able to grow under various growth conditions. It is a unicellular alga. The cells of Chlamydomonas reinhardtii can be normally cultured autotrophically in the media mentioned below. Cells of Chlamydomonas reinhardtii can be cultivated at 25° C. under cool-white fluorescence light at 10,000 lux (120 μmol m⁻²s⁻¹ photosynthetically active radiation) as described by Ghirardi et al., Appl. Biochem. Biotechnol. 63, 141 (1997) or Semin et al., Plant. Physiol., 131, 1756 (2003).

### Chlamydomonas Growth Medium:

[51543] 1 l growth medium is prepared by adding the following volumes of the stock solutions as mentioned below:

[51544] 1 ml solution A, 5 ml solution B, 1 ml solution C, 1 ml solution D, 3 ml solution E, 3 ml solution F, 1 ml solution G, 1 ml solution H.

| | |
|---|---|
| A) Trace elements solution: | 1 g/l H₃BO₃ |
| | 1 g/l ZnSO₄ × 7 H₂O |
| | 0.3 g/l MnSO₄ × H₂O |
| | 0.2 g/l CoCl₂ × 6 H₂O |
| | 0.2 g/l Na₂MoO₄ × 2 H₂O |
| | 0.04 g/l CuSO₄ |
| B) Na Citrate solution: | 10% w/v Na citrate × 2 H₂O |
| C) Iron solution: | 1% w/v FeCl₃ × 6 H₂O |
| D) Calcium solution: | 5.3% w/v CaCl₂ × H₂O |
| E) Magnesium solution: | 10% w/v MgSO₄ × 7 H₂O |
| F) Ammonium solution: | 10% w/v NH₄NO₃ |
| G) Potassium solution: | 10% w/v KH₂PO₄ |
| H) Dipotassium solution | 10% w/v K₂HPO₄ |

### Bristol's Soil Extract Medium:

[51545] Soil extract medium can generally be used for the growth of axenic and xenic algae cultures. The soil extract is prepared by adding a teaspoon of dry garden soil and a pinch of CaCO₃ to 200 ml distilled water and steaming said solution for approximately 2 h on two consecutive days. Afterwards the supernatant is decanted and added to the desired medium. To 940 ml bristol's solution 40 ml of soil extract medium is added.

### Bristol's Solution:

[51546] To 940 ml of distilled water, the following stock solutions are added:

| | | |
|---|---|---|
| 10 ml | NaNO₃ | (25 g/l) |
| 10 ml | CaCl₂ × 2 H₂O | (2.5 g/l) |
| 10 ml | MgSO₄ × 7 H₂O | (7.5 g/l) |
| 10 ml | K₂HPO₄ | (7.5 g/l) |
| 10 ml | KH₂PO₄ | (17.5 g/l) |
| 10 ml | NaCl | (2.5 g/l) |

Amplification and Cloning of DNA from Chlamydomonas Reinhardtii:

[51547] The DNA can be amplified by the polymerase chain reaction (PCR) from Chlamydomonas reinhardtii by the method of Howitt Crispin A. (BioTechniques 21, 32 (1996)).

### Fine Chemical Production in Chlamydomonas Reinhardtii:

[51548] The fine chemical production can be analysed as mentioned above. The proteins and nucleic acids can be analyzed as mentioned below.

### Example 8

### In-Vitro Analysis of the Function of the Proteins Encoded by the Transformed Sequences

[51549] The determination of the activities and kinetic parameters of enzymes is well known in the art. Experiments for determining the activity of a specific modified enzyme must be adapted to the specific activity of the wild-enzyme type, which is well within the capabilities of the skilled worker. Overviews of enzymes in general and specific details regarding the structure, kinetics, principles, methods, applications and examples for the determination of many enzyme activities can be found for example in the following literature: Dixon M. and Webb E. C.: “Enzymes”, Longmans, London (1979); Fersht “Enzyme Structure and Mechanism”, Freeman, New York (1985); Walsh “Enzymatic Reaction Mechanisms” Freeman, San Francisco (1979); Price N. C., Stevens L., “Fundamentals of Enzymology” Oxford Univ. Press, Oxford (1982); Boyer P. D. (ed.), “The Enzymes”, 3rd ed. Academic Press, New York (1983); Bisswanger H., “Enzymkinetik”, 2^{nd} ed. VCH, Weinheim (1994); Bergmeyer H. U., Bergmeyer J., GraRl M., (eds.) “Methods of Enzymatic Analysis”, 3rd rd. Vol. I-XII, Verlag Chemie: Weinheim (1983-1986); and “Ullmann's Encyclopedia of Industrial Chemistry” Vol. A9, “Enzymes”, VCH, Weinheim, pp. 352-363 (1987).

### Example 9

### Analysis of the Effect of the Nucleic Acid Molecule on the Production of the Fine Chemical

[51550] The effect of the genetic modification in plants, fungi, algae, ciliates on the production of a fine chemical can be determined by growing the modified microorganisms for example Chlamydomonas reinhardtii under suitable conditions (such as those described above) and analyzing the medium and/or the cellular components for the increased production of the fine chemical. Such analytical techniques are well known to the skilled worker and encompass spectroscopy, thin-layer chromatography, various types of staining methods, enzymatic and microbiological methods and analytical chromatography such as high-performance liquid chromatography (see, for example, “Ullmann Encyclopedia of Industrial Chemistry”, Vol. A2, pp. 89-90 and pp. 443-613, VCH, Weinheim (1985); Fallon A.et al., “Applications of HPLC in Biochemistry” in “Laboratory Techniques in Biochemistry and Molecular Biology”, Vol. 17 (1987); Rehm et al. “Biotechnology”, Vol. 3, Chapter III: “Product recovery and purification”, pp. 469-714, VCH: Weinheim (1993); Better P.A. et al. “Bioseparations: downstream processing for Biotechnology”, John Wiley and Sons (1988); Kennedy J.F. and Cabral J.M.S., “Recovery processes for biological Materials”, John Wiley and Sons(1992); Shaeiwitzand J. A., Henry J. D., “Biochemical Separations” in “Ullmann's Encyclopedia of Industrial Chemistry”, Vol. B3; chapter 11, pp. 1-27, VCH, Weinheim (1988); and Dechow, “Separation and purification techniques in biotechnology”, Noyes Publications (1989)).

[51551] In addition to the determination of the fermentation end product, other components of the metabolic pathways which are used for the production of the desired compound, such as intermediates and by-products, may also be analyzed in order to determine the total productivity of the organism, the yield and/or production efficiency of the compound. The analytical methods encompass determining the amounts of nutrients in the medium (for example sugars, hydrocarbons, nitrogen sources, phosphate and other ions), determining biomass composition and growth, analyzing the production of ordinary metabolites from biosynthetic pathways and measuring gases generated during the fermentation. Standard methods for these are described in “Applied Microbial Physiology” A Practical Approach, Rhodes P. M. and Stanbury P. F., eds. IRL Press, pp. 103-129; 131-163 and 165-192, and the references cited therein.

### Example 10

### Purification of a Fine Chemical e.g. Fatty Acids

[51552] The microorganism can be disrupted by sonication, grinding in a glass mill, liquid nitrogen and grinding, cooking, or via other applicable methods. After disruption centrifugation may follow. The sediment is resuspended in distilled water, heated for 10 minutes at 100° C., cooled on ice and recentrifuged, followed by extraction for one hour at 90° C. in 0.5 M sulfuric acid in methanol with 2% dimethoxypropane, which leads to hydrolyzed oil and lipid compounds, which give transmethylated lipids. These fatty acid methyl esters are extracted with petroleum ether and the solvent is evaporated lateron. (Analysis of the so obtained fatty acid ester(s) will be performed by GC analysis using a capillary column (Chrompack, WCOT Fused Silica, CP-Wax-52 CB, 25 micrometer, 0.32 mm) at a temperature gradient of between 170° C. and 240° C. for 20 minutes and 5 minutes at 240° C. The identity of the resulting fatty acid methyl esters can be determined using standards which are available from commercial sources (i.e. Sigma).)

### Example 11

### Cloning of the Sequences as Shown in Table I, Column 5 or 8 for the Expression in Plants

### Example 11a

### PCR Amplification of the Sequences

[51553] Unless otherwise specified, standard methods as described in Sambrook et al., Molecular Cloning: A laboratory manual, Cold Spring Harbor 1989, Cold Spring Harbor Laboratory Press are used.

[51554] The inventive sequences as shown in the respective line in Table I, column 5, preferably the coding region thereof, were amplified by PCR as described in the protocol of the Pfu Ultra, Pfu Turbo or Herculase DNA polymerase (Stratagene). The composition for the protocol of the Pfu Ultra, Pfu Turbo or Herculase DNA polymerase was as follows: 1×PCR buffer (Stratagene), 0.2 mM of each dNTP, 100 ng genomic DNA of Saccharomyces cerevisiae (strain S288C; Research Genetics, Inc., now Invitrogen), Escherichia coli (strain MG1655; E. coli Genetic Stock Center), Synechocystis sp. (strain PCC6803), Azotobacter vinelandii (strain N.R. Smith,16), Thermus thermophilus (HB8) or 50 ng cDNA from various tissues and development stages of Arabidopsis thaliana (ecotype Columbia), Physcomitrella patens, Glycine max (variety Resnick), Brassica napus, Oryza sativa or Zea mays (variety B73, Mo17, A188), 50 μmol forward primer, 50 μmol reverse primer, with or without 1 M Betaine, 2.5 u Pfu Ultra, Pfu Turbo or Herculase DNA polymerase.

[51555] The amplification cycles were as follows:

[51556] 1 cycle of 2-3 minutes at 94-95° C., then 25-36 cycles with 30-60 seconds at 94-95° C., 30-45 seconds at 50-60° C. and 210-480 seconds at 72° C., followed by 1 cycle of 5-10 minutes at 72° C., then 4-16° C.—preferably for Saccharomyces cerevisiae, Escherichia coli, Synechocystis sp., Azotobacter vinelandii, Thermus thermophilus.

[51557] In case of Arabidopsis thaliana, Brassica napus, Glycine max, Oryza sativa, Physcomitrella patens, Zea mays the amplification cycles were as follows:

[51558] 1 cycle with 30 seconds at 94° C., 30 seconds at 61° C., 15 minutes at 72° C., then 2 cycles with 30 seconds at 94° C., 30 seconds at 60° C., 15 minutes at 72° C., then 3 cycles with 30 seconds at 94° C., 30 seconds at 59° C., 15 minutes at 72° C., then 4 cycles with 30 seconds at 94° C., 30 seconds at 58° C., 15 minutes at 72° C., then 25 cycles with 30 seconds at 94° C., 30 seconds at 57° C., 15 minutes at 72° C., then 1 cycle with 10 minutes at 72° C., then finally 4-16° C. RNAs were generated with the RNeasy Plant Kit according to the standard protocol (Qiagen) and Superscript II Reverse Transkriptase was used to produce double stranded cDNA according to the standard protocol (Invitrogen).

[51559] ORF specific primer pairs for the genes to be expressed are shown in the respective line in Table III, column 8. The following adapter sequences were added to Saccharomyces cerevisiae ORF specific primers (see Table III) for cloning purposes:

SEQ ID NO: 20

| | | |
|---|---|---|
| i) | foward primer: | 5′-GGAATTCCAGCTGACCACC-3′ |

SEQ ID NO: 21

| | | |
|---|---|---|
| ii) | reverse primer: | 5′-GATCCCCGGGAATTGCCATG-3′ |

[51560] These adaptor sequences allow cloning of the ORF into the various vectors containing the Resgen adaptors, see table column E of Table c.

[51561] The following adapter sequences were added to Saccharomyces cerevisiae, Escherichia coli, Synechocystis sp., Azotobacter vinelandii, Thermus thermophilus, Arabidopsis thaliana, Brassica napus, Glycine max, Oryza sativa , Physcomitrella patens, or Zea mays ORF specific primers for cloning purposes:

| SEQ ID NO: 22 | | |
|---|---|---|
| iii) | forward primer: | 5′-TTGCTCTTCC- 3′ |
| SEQ ID NO: 23 | | |
| iiii) | reverse primer: | 5′-TTGCTCTTCG-3′ |

[51562] The adaptor sequences allow cloning of the ORF into the various vectors containing the Colic adaptors, see table column E of Table c.

[51563] Therefore for amplification and cloning of Saccharomyces cerevisiae SEQ ID NO: 66772, a primer consisting of the adaptor sequence i) and the ORF specific sequence SEQ ID NO: 67180 and a second primer consisting of the adaptor sequence ii) and the ORF specific sequence SEQ ID NO: 67181 were used.

[51564] For amplification and cloning of Escherichia coli SEQ ID NO: 7686, a primer consisting of the adaptor sequence iii) and the ORF specific sequence SEQ ID NO: 7726 and a second primer consisting of the adaptor sequence iiii) and the ORF specific sequence SEQ ID NO: 7727 were used.

[51565] For amplification and cloning of Synechocystis sp. SEQ ID NO: 11471, a primer consisting of the adaptor sequence iii) and the ORF specific sequence SEQ ID NO: 11983 and a second primer consisting of the adaptor sequence iiii) and the ORF specific sequence SEQ ID NO: 11984 were used.

[51566] For amplification and cloning of Arabidopsis thaliana SEQ ID NO: 1061, a primer consisting of the adaptor sequence iii) and the ORF specific sequence SEQ ID NO: 1293 and a second primer consisting of the adaptor sequence iiii) and the ORF specific sequence SEQ ID NO: 1294 were used.

[51567] For amplification and cloning of Azotobacter vinelandii SEQ ID NO: 6040, a primer consisting of the adaptor sequence iii) and the ORF specific sequence SEQ ID NO: 6070 and a second primer consisting of the adaptor sequence iiii) and the ORF specific sequence SEQ ID NO: 6071 were used.

[51568] For amplification and cloning of Glycine max SEQ ID NO: 16883, a primer consisting of the adaptor sequence iii) and the ORF specific sequence SEQ ID NO: 17345 and a second primer consisting of the adaptor sequence iiii) and the ORF specific sequence SEQ ID NO: 17346 were used.

[51569] For amplification and cloning of Thermus thermophilus SEQ ID NO: 61553, a primer consisting of the adaptor sequence iii) and the ORF specific sequence SEQ ID NO: 61719 and a second primer consisting of the adaptor sequence iiii) and the ORF specific sequence SEQ ID NO: 61720 were used.

[51570] Following these examples every sequence disclosed in Table I, preferably column 5, especially the coding region thereof can be cloned by fusing the adaptor sequences to the respective specific primers sequences as disclosed in Table III, column 8 using the respective vectors shown in Table c.

[51571] Table c showing binary vectors used in Example 11

TABLE c
Overview of the different vectors used for cloning the ORFs; showing their
SEQ ID NOs (column A), their vector names (column B), the promoters they
contain for expression of the ORFs (column C), if present, the additional artificial
targeting sequence (column D), the adapter sequence (column E), the expression
type conferred by the promoter mentioned in column B (column F)
and the figure number (column G).

| | B | C | D | E | | |
|---|---|---|---|---|---|---|
| A | Vector | Promoter | Target | Adapter | F | G |
| SeqID | Name | Name | Sequence | Sequence | Expression Type | FIG. |
| 30 | pMTX0270p | Super | | Colic | non targeted constitutive | 6 |
| | | | | | expression preferentially | |
| | | | | | in green tissues | |
| 31 | pMTX155 | Big35S | | Resgen | non targeted constitutive | 7 |
| | | | | | expression preferentially | |
| | | | | | in green tissues | |
| 32 | VC- | Super | FNR | Resgen | plastidic targeted constitutive | 3 |
| | MME354- | | | | expression preferentially | |
| | 1QCZ | | | | in green tissues | |
| 34 | VC- | Super | IVD | Resgen | mitochondric targeted | 8 |
| | MME356- | | | | constitutive expression | |
| | 1QCZ | | | | preferentially in green | |
| | | | | | tissues | |
| 36 | VC- | USP | | Resgen | non targeted expression | 9 |
| | MME301- | | | | preferentially in seeds | |
| | 1QCZ | | | | | |
| 37 | pMTX461korrp | USP | FNR | Resgen | plastidic targeted expression | 10 |
| | | | | | preferentially in | |
| | | | | | seeds | |
| 39 | VC- | USP | IVD | Resgen | mitochondric targeted | 11 |
| | MME462- | | | | expression preferentially | |
| | 1QCZ | | | | in seeds | |
| 41 | VC- | Super | | Colic | non targeted constitutive | 1 |
| | MME220- | | | | expression preferentially | |
| | 1qcz | | | | in green tissues | |
| 42 | VC- | Super | FNR | Colic | plastidic targeted constitutive | 4 |
| | MME432- | | | | expression preferentially | |
| | 1qcz | | | | in green tissues | |
| 44 | VC- | Super | IVD | Colic | mitochondric targeted | 12 |
| | MME431- | | | | constitutive expression | |
| | 1qcz | | | | preferentially in green | |
| | | | | | tissues | |
| 46 | VC- | PcUbi | | Colic | non targeted constitutive | 2 |
| | MME221- | | | | expression preferentially | |
| | 1qcz | | | | in green tissues | |
| 47 | pMTX447korr | PcUbi | FNR | Colic | plastidic targeted constitutive | 13 |
| | | | | | expression preferentially | |
| | | | | | in green tissues | |
| 49 | VC- | PcUbi | IVD | Colic | mitochondric targeted | 14 |
| | MME445- | | | | constitutive expression | |
| | 1qcz | | | | preferentially in green | |
| | | | | | tissues | |
| 51 | VC- | USP | | Colic | non targeted expression | 15 |
| | MME289- | | | | preferentially in seeds | |
| | 1qcz | | | | | |
| 52 | VC- | USP | FNR | Colic | plastidic targeted expression | 16 |
| | MME464- | | | | preferentially in | |
| | 1qcz | | | | seeds | |
| 54 | VC- | USP | IVD | Colic | mitochondric targeted | 17 |
| | MME465- | | | | expression in preferentially | |
| | 1qcz | | | | seeds | |
| 56 | VC- | Super | | Resgen | non targeted constitutive | 5 |
| | MME489- | | | | expression preferentially | |
| | 1QCZ | | | | in green tissues | |

[51572] In this Table c PcUbi refers to the PcUbi promoter (Kawalleck et al., Plant. Molecular Biology, 21, 673 (1993)) also being named p-PcUBI (e.g. in Table d), Super refers to the Super promoter (Ni et al,. Plant Journal 7, 661 (1995)) also being named p-Super (e.g. in Table d), Big35S refers to the enhanced 35S promoter (Comai et al., Plant Mol Biol 15, 373 (1990)) and USP to the USP promoter (Baumlein et al., Mol Gen Genet. 225(3), 459 (1991)) also being named p-USP in Table d.

### Example 11 b

### Construction of Binary Vectors for Non-Targeted Expression of Proteins

[51573] “Non-targeted” expression in this context means, that no additional targeting sequences were added to the ORF to be expressed.

[51574] For non-targeted expression the binary vectors used for cloning were VC-MME220-1 qcz SEQ ID NO 41 (FIG. 1), VC-MME221-1qcz SEQ ID NO 46 (FIG. 2), and VC-MME489-1QCZ SEQ ID NO: 56 (FIG. 5), respectively. The binary vectors used for cloning the targeting sequence were VC-MME489-1QCZ SEQ ID NO: 56 (FIG. 5) and pMTX0270p SEQ ID NO 30 (FIG. 6), respectively. Other useful binary vectors are known to the skilled worker; an overview of binary vectors and their use can be found in Hellens R., Mullineaux P. and Klee H. (Trends in Plant Science, 5 (10), 446 (2000)). Such vectors have to be equally equipped with appropriate promoters and targeting sequences.

### Example 11c

### Construction of Binary Vectors for Plastidic-Targeted Expression of Proteins

[51575] For construction of a vector for plastid-targeted expression in preferential green tissues or preferential in seeds, the plastidic targeting sequence of the gene FNR from Spinacia oleracea was amplified. In order to amplify the targeting sequence, genomic DNA was extracted from leaves of 4 weeks old S. oleracea plants (DNeasy Plant Mini Kit, Qiagen, Hilden). The gDNA was used as the template for a PCR.

[51576] To enable cloning of the transit sequence into the vector VC-MME489-1QCZ and VC-MME301-1QCZ an EcoRl restriction enzyme recognition sequence was added to both the forward and reverse primers, whereas for cloning in the vectors pMTX0270p, VC-MME220-1 qcz, VC-MME221-1qcz and VC-MME289-1qcz a Pmel restriction enzyme recognition sequence was added to the forward primer and a Ncol site was added to the reverse primer.

FNR5EcoResgen
SEQ ID NO: 24
ATA GAA TTC GCA TAA ACT TAT CTT CAT AGT TGC C
FNR3EcoResgen
SEQ ID NO: 25
ATA GAA TTC AGA GGC GAT CTG GGC CCT
FNR5PmeColic
SEQ ID NO: 26
ATA GTT TAA ACG CAT AAA CTT ATC TTC ATA GTT GCC
FNR3NcoColic
SEQ ID NO: 27
ATA CCA TGG AAG AGC AAG AGG CGA TCT GGG CCC T

[51577] The resulting sequence SEQ ID NO: 28 amplified from genomic spinach DNA, comprised a 5″UTR (bp 1-165), and the coding region (bp 166-273 and 351-419). The coding sequence is interrupted by an intronic sequence from by 274 to by 350:

(SEQ ID NO: 28)
gcataaacttatcttcatagttgccactccaatttgctccttgaatc
tcctccacccaatacataatccactcctccatcacccacttcactac
taaatcaaacttaactctgtttttctctctcctcctttcatttctta
ttcttccaatcatcgtactccgccatgaccaccgctgtcaccgccgc
tgtttctttcccctctaccaaaaccacctctctctccgcccgaagct
cctccgtcatttcccctgacaaaatcagctacaaaaaggtgattccc
aatttcactgtgttttttattaataatttgttattttgatgatgaga
tgattaatttgggtgctgcaggttcctttgtactacaggaatgtatc
tgcaactgggaaaatgggacccatcagggcccagatcgcctct

[51578] The PCR fragment derived with the primers FNR5EcoResgen and FNR3EcoResgen was digested with EcoRl and ligated in the vectors VC-MME489-1QCZ and VC-MME301-1QCZ, that had also been digested with EcoRl. The correct orientation of the FNR targeting sequence was tested by sequencing. The vector generated in this ligation step were VC-MME354-1 QCZ and pMTX461 korrp, respectively.

[51579] The PCR fragment derived with the primers FNR5PmeColic and FNR3NcoColic was digested with Pmel and Ncol and ligated in the vectors pMTX0270p, VC-MME220-1qcz, VC-MME221-1qcz and VC-MME289-1qcz that had been digested with Smal and Ncol. The vectors generated in this ligation step were VC-MME432-1qcz, VC-MME464-1qcz and pMTX447korr, respectively.

[51580] For plastidic-targeted constitutive expression in preferentially green tissues an artifical promoter A(ocs)3AmasPmas promoter (Super promoter)) (Ni et al, Plant Journal 7, 661 (1995), WO 95/14098) was used in context of the vector VC-MME354-1QCZ for ORFs from Saccharomyces cerevisiae as well as Arabidopsis thaliana and in context of the vector VC-MME432-1 qcz for ORFs from Escherichia coli as well as Arabidopsis thaliana, resulting in each case in an “inframe” fusion of the FNR targeting sequence with the ORFs.

[51581] For plastidic-targeted expression in preferentially seeds the USP promoter (Baumlein et al., Mol Gen Genet. 225(3):459-67 (1991)) was used in context of either the vector pMTX461 korrp for ORFs from Saccharomyces cerevisiae or in context of the vector VC-MME464-1 qcz for ORFs from Escherichia coli, resulting in each case in an “in-frame” fusion of the FNR targeting sequence with the ORFs.

[51582] For plastidic-targeted constitutive expression in preferentially green tissues and seeds the PcUbi promoter was used in context of the vector pMTX447korr for ORFs from Saccharomyces cerevisiae, Escherichia coli, Synechocystis sp., Azotobacter vinelandii, Thermus thermophilus, Arabidopsis thaliana, Brassica napus, Glycine max, Oryza sativa, Physcomitrella patens, or Zea mays, resulting in each case in an “in-frame” fusion of the FNR targeting sequence with the ORFs.

### Example 11d

### Construction of Binary Vectors for Mitochondric-Targeted Expression of Proteins

[51583] Amplification of the mitochondrial targeting sequence of the gene IVD from Arabidopsis thaliana and construction of vector for mitochondrial-targeted expression in preferential green tissues or preferential in seeds.

[51584] In order to amplify the targeting sequence of the IVD gene from A. thaliana, genomic DNA was extracted from leaves of A. thaliana plants (DNeasy Plant Mini Kit, Qiagen, Hilden). The gDNA was used as the template for a PCR.

[51585] To enable cloning of the transit sequence into the vectors VC-MME489-1 QCZ and VC-MME301-1QCZ an EcoRl restriction enzyme recognition sequence was added to both the for-ward and reverse primers, whereas for cloning in the vectors VC-MME220-1qcz, VC-MME221-1qcz and VC-MME289-1qcz a Pmel restriction enzyme recognition sequence was added to the forward primer and a Ncol site was added to the reverse primer.

IVD5EcoResgen
SEQ ID NO: 57
ATA GAA TTC ATG CAG AGG TTT TTC TCC GC
IVD3EcoResgen
SEQ ID NO: 58
ATA GAA TTC CGA AGA ACG AGA AGA GAA AG
IVD5PmeColic
SEQ ID NO: 59
ATA GTT TAA ACA TGC AGA GGT TTT TCT CCG C
IVD3NcoColic
SEQ ID NO: 60
ATA CCA TGG AAG AGC AAA GGA GAG ACG AAG AAC GAG

[51586] The resulting sequence (SEQ ID NO: 61) amplified from genomic A. thaliana DNA with IVD5EcoResgen and IVD3EcoResgen comprised 81 bp:

(SEQ ID NO: 61)
atgcagaggtttttctccgccagatcgattctcggttacgccgtca
agacgcggaggaggtctttctcttctcgttcttcg

[51587] The resulting sequence (SEQ ID NO: 62) amplified from genomic A. thaliana DNA with IVD5PmeColic and IVD3NcoColic comprised 89 bp:

(SEQ ID NO: 62)
atgcagaggtttttctccgccagatcgattctcggttacgccgtcaa
gacgcggaggaggtctttctcttctcgttcttcgtctctcct

[51588] The PCR fragment derived with the primers IVD5EcoResgen and IVD3EcoResgen was digested with EcoRl and ligated in the vectors VC-MME489-1QCZ and VC-MME301-1QCZ that had also been digested with EcoRl. The correct orientation of the IVD targeting sequence was tested by sequencing. The vectors generated in this ligation step were VC-MME356-1 QCZ and VC-MME462-1 QCZ, respectively.

[51589] The PCR fragment derived with the primers IVD5PmeColic and IVD3NcoColic was digested with Pmel and Ncol and ligated in the vectors VC-MME220-1qcz, VC-MME221-1qcz and VCMME289-1qcz that had been digested with Smal and Ncol. The vectors generated in this ligation step were VC-MME431-1qcz, VC-MME465-1qcz and VC-MME445-1qcz, respectively.

[51590] For mitochondrial-targeted constitutive expression in preferentially green tissues an artificial promoter A(ocs)3AmasPmas promoter (Super promoter) (Ni et al, Plant Journal 7, 661 (1995), WO 95/14098) was used in context of the vector VC-MME356-1 QCZ for ORFs from Saccharomyces cerevisiae and in context of the vector VC-MME431-1qcz for ORFs from Escherichia coli, resulting in each case in an “in-frame” fusion between the IVD sequence and the respective ORFs.

[51591] For mitochondrial-targeted constitutive expression in preferentially seeds the USP promoter (Bäumlein et al., Mol Gen Genet. 225 (3), 459 (1991)) was used in context of the vector VC-MME462-1 QCZ for ORFs from Saccharomyces cerevisiae and in context of the vector VC-MME465-1qcz for ORFs from Escherichia coli, resulting in each case in an “in-frame” fusion between the IVD sequence and the respective ORFs.

[51592] For mitochondrial-targeted constitutive expression in preferentially green tissues and seeds the PcUbi promoter was used in context of the vector VC-MME445-1 qcz for ORFs from Saccharomyces cerevisiae, Escherichia coli, Synechocystis sp., Azotobacter vinelandii, Thermus thermophilus, Arabidopsis thaliana, Brassica napus, Glycine max, Oryza sativa, Physcomitrella patens, or Zea mays, resulting in each case in an “in-frame” fusion between the IVD sequence and the respective ORFs.

[51593] Other useful binary vectors are known to the skilled worker; an overview of binary vectors and their use can be found in Hellens R., Mullineaux P. and Klee H., (Trends in Plant Science, 5 (10), 446 (2000)). Such vectors have to be equally equipped with appropriate promoters and targeting sequences.

### Example 11e

### Cloning of Inventive Sequences as Shown in Table I, Column 5 in the Different Expression Vectors

[51594] For cloning of for example SEQ ID NO: 7686 from Escherichia coli or any other ORF from Escherichia coli, Synechocystis sp., Azotobacter vinelandii, Thermus thermophilus, Arabidopsis thaliana, or Glycine max the vector DNA was treated with the restriction enzymes Pacl and Ncol following the standard protocol (MBI Fermentas).

[51595] For cloning for example the ORFs of SEQ ID NO: 66772 from Saccharomyces cerevisiae or any other ORF from Saccharomyces cerevisiae into vectors containing the Resgen adaptor sequence the respective vector DNA was treated with the restriction enzyme Ncol.

[51596] For cloning of for example ORFs SEQ ID NO: 117352 from Saccharomyces cerevisiae or any other ORF from Saccharomyces cerevisiae into vectors containing the Colic adaptor sequence, the respective vector DNA was treated with the restriction enzymes Pacl and Ncol following the standard protocol (MBI Fermentas).

[51597] In all cases the reaction was stopped by inactivation at 70° C. for 20 minutes and purified over QlAquick or NucleoSpin Extract II columns following the standard protocol (Qiagen or Macherey-Nagel).

[51598] Then the PCR-product representing the amplified ORF with the respective adapter sequences and the vector DNA were treated with T4 DNA polymerase according to the standard protocol

[51599] (MBI Fermentas) to produce single stranded overhangs with the parameters 1 unit T4 DNA polymerase at 37° C. for 2-10 minutes for the vector and 1-2 u T4 DNA polymerase at 15-17° C. for 10-60 minutes for the PCR product representing SEQ ID NO: 7686.

[51600] The reaction was stopped by addition of high-salt buffer and purified over QlAquick or NucleoSpin Extract II columns following the standard protocol (Qiagen or Macherey-Nagel).

[51601] According to this example the skilled person is able to clone all sequences disclosed in Table I, preferably column 5 or column 8, especially the coding region thereof.

[51602] Approximately 30-60 ng of prepared vector and a defined amount of prepared amplificate were mixed and hybridized at 65° C. for 15 minutes followed by 37° C. 0.1° C/1 seconds, followed by 37° C. 10 minutes, followed by 0.1° C/1 seconds, then 4-10° C.

[51603] The ligated constructs were transformed in the same reaction vessel by addition of competent E. coli cells (strain DHSalpha) and incubation for 20 minutes at 1° C. followed by a heat shock for 90 seconds at 42° C. and cooling to 1-4° C. Then, complete medium (SOC) was added and the mixture was incubated for 45 minutes at 37° C. The entire mixture was subsequently plated onto an agar plate with 0.05 mg/ml kanamycin and incubated overnight at 37° C.

[51604] The outcome of the cloning step was verified by amplification with the aid of primers which bind upstream and downstream of the integration site, thus allowing the amplification of the insertion. The amplifications were carried out as described in the protocol of Taq DNA polymerase (Gibco-BRL).

[51605] The amplification cycles were as follows:

[51606] 1 cycle of 1-5 minutes at 94° C., followed by 35 cycles of in each case 15-60 seconds at 94° C., 15-60 seconds at 50-66° C. and 5-15 minutes at 72° C., followed by 1 cycle of 10 minutes at 72° C., then 4-16° C.

[51607] Several colonies were checked, but only one colony for which a PCR product of the expected size was detected was used in the following steps.

[51608] A portion of this positive colony was transferred into a reaction vessel filled with complete medium (LB) supplemented with kanamycin and incubated overnight at 37° C.

[51609] The plasmid preparation was carried out as specified in the Qiaprep or NucleoSpin Multi-96 Plus standard protocol (Qiagen or Macherey-Nagel).

### Example 11f

### Generation of Transgenic Plants which Express Sequences as Shown in Table I, Preferably Column 5

[51610] 1-5 ng of the plasmid DNA isolated was transformed by electroporation or transformation into competent cells of Agrobacterium tumefaciens, of strain GV 3101 pMP90 (Koncz and Schell, Mol. Gen. Gent. 204, 383 (1986)). Thereafter, complete medium (YEP) was added and the mixture was transferred into a fresh reaction vessel for 3 hours at 28° C. Thereafter, all of the reaction mixture was plated onto YEP agar plates supplemented with the respective antibiotics, e.g. rifampicine (0.1 mg/ml), gentamycine (0.025 mg/ml and kanamycin (0.05 mg/ml) and incubated for 48 hours at 28° C.

[51611] The agrobacteria that contains the plasmid construct were then used for the transformation of plants.

[51612] A colony was picked from the agar plate with the aid of a pipette tip and taken up in 3 ml of liquid TB medium, which also contained suitable antibiotics as described above. The preculture was grown for 48 hours at 28° C. and 120 rpm.

[51613] 400 ml of LB medium containing the same antibiotics as above were used for the main culture. The preculture was transferred into the main culture. It was grown for 18 hours at 28° C. and 120 rpm. After centrifugation at 4 000 rpm, the pellet was resuspended in infiltration medium (MS medium, 10% sucrose).

[51614] In order to grow the plants for the transformation, dishes (Piki Saat 80, green, provided with a screen bottom, 30×20×4.5 cm, from Wiesauplast, Kunststofftechnik, Germany) were half-filled with a GS 90 substrate (standard soil, Werkverband E. V., Germany). The dishes were watered overnight with 0.05% Proplant solution (Chimac-Apriphar, Belgium). A. thaliana C24 seeds (Nottingham Arabidopsis Stock Centre, UK; NASC Stock N906) were scattered over the dish, approximately 1 000 seeds per dish. The dishes were covered with a hood and placed in the stratification facility (8 h, 110 μmol m⁻² s⁻¹, 22° C.; 16 h, dark, 6° C.). After 5 days, the dishes were placed into the short-day controlled environment chamber (8 h, 130 μmol m⁻2 s⁻1, 22° C.; 16 h, dark, 20° C.), where they remained for approximately 10 days until the first true leaves had formed.

[51615] The seedlings were transferred into pots containing the same substrate (Teku pots, 7 cm, LC series, manufactured by Pöppelmann GmbH & Co, Germany). Five plants were pricked out into each pot. The pots were then returned into the short-day controlled environment chamber for the plant to continue growing.

[51616] After 10 days, the plants were transferred into the greenhouse cabinet (supplementary illumination, 16 h, 340 μmol m⁻² s⁻¹, 22° C.; 8 h, dark, 20° C.), where they were allowed to grow for further 17 days.

[51617] For the transformation, 6-week-old Arabidopsis plants, which had just started flowering were immersed for 10 seconds into the above-described agrobacterial suspension which had previously been treated with 10 μl Silwett L77 (Crompton S. A., Osi Specialties, Switzerland). The method in question is described by Clough J.C.and Bent A. F. (Plant J. 16, 735 (1998)).

[51618] The plants were subsequently placed for 18 hours into a humid chamber. Thereafter, the pots were returned to the greenhouse for the plants to continue growing. The plants remained in the greenhouse for another 10 weeks until the seeds were ready for harvesting.

[51619] Depending on the tolerance marker used for the selection of the transformed plants the harvested seeds were planted in the greenhouse and subjected to a spray selection or else first sterilized and then grown on agar plates supplemented with the respective selection agent. Since the vector contained the bar gene as the tolerance marker, plantlets were sprayed four times at an interval of 2 to 3 days with 0.02% BASTA® and transformed plants were allowed to set seeds.

[51620] The seeds of the transgenic A. thaliana plants were stored in the freezer (at −20° C.).

### Example 11g

### Plant Culture (Arabidopsis) for Bioanalytical Analyses

[51621] For the bioanalytical analyses of the transgenic plants, the latter were grown uniformly a specific culture facility. To this end the GS-90 substrate as the compost mixture was introduced into the potting machine (Laible System GmbH, Singen, Germany) and filled into the pots. Thereafter, 35 pots were combined in one dish and treated with Previcur. For the treatment, 25 ml of Previcur were taken up in 10 I of tap water. This amount was sufficient for the treatment of approximately 200 pots. The pots were placed into the Previcur solution and additionally irrigated overhead with tap water without Previcur. They were used within four days.

[51622] For the sowing, the seeds, which had been stored in the refrigerator (at −20° C.), were removed from the Eppendorf tubes with the aid of a toothpick and transferred into the pots with the compost. In total, approximately 5 to 12 seeds were distributed in the middle of the pot.

[51623] After the seeds had been sown, the dishes with the pots were covered with matching plastic hood and placed into the stratification chamber for 4 days in the dark at 4° C. The humidity was approximately 90%. After the stratification, the test plants were grown for 22 to 23 days at a 16-h-light, 8-h-dark rhythm at 20° C., an atmospheric humidity of 60% and a CO₂ concentration of approximately 400 ppm. The light sources used were Powerstar HQI-T 250 W/D Daylight lamps from Osram, which generate a light resembling the solar color spectrum with a light intensity of approximately 220 E m²s⁻¹.

[51624] Selection of transgenic plants was depending on the use resistance marker. In case of the bar gene as the resistance marker plantlets were sprayed three times at days 8-10 after sowing with 0.02% BASTA® (Glufosinate ammonium; Bayer CropScience, Germany).The resistant plants were thinned when they had reached the age of 14 days. The plants, which had grown best in the center of the pot were considered the target plants. All the remaining plants were removed carefully with the aid of metal tweezers and discarded.

[51625] During their growth, the plants received overhead irrigation with distilled water (onto the compost) and bottom irrigation into the placement grooves. Once the grown plants had reached the age of 23 days, they were harvested. In case their seeds are desired these had been harvested 10 to 12 weeks after sowing (once they are ripe).

### Example 11h

### Metabolic Analysis of Transformed Plants

[51626] The modifications identified in accordance with the invention, in the content of above-described metabolites, were identified by the following procedure.

### a) Sampling and Storage of the Samples

[51627] Sampling was performed directly in the controlled-environment chamber. The plants, or respective parts thereof, like leafs, were cut using small laboratory scissors, rapidly weighed on laboratory scales, transferred into a pre-cooled extraction sleeve and placed into an aluminum rack cooled by liquid nitrogen. If required, the extraction sleeves can be stored in the freezer at −80° C. The time elapsing between cutting the plant/plant parts to freezing it in liquid nitrogen amounted to not more than 10 to 20 seconds.

### b) Lyophilization

[51628] During the experiment, care was taken that the plants either remained in the deep-frozen state (temperatures <−40° C.) or were freed from water by lyophilization until the first contact with solvents.

[51629] The aluminum rack with the plant samples in the extraction sleeves was placed into the precooled (−40° C.) lyophilization facility. The initial temperature during the main drying phase was −35° C. and the pressure was 0.120 mbar. During the drying phase, the parameters were altered following a pressure and temperature program. The final temperature after 12 hours was +30° C. and the final pressure was 0.001 to 0.004 mbar. After the vacuum pump and the refrigerating machine had been switched off, the system was flushed with air (dried via a drying tube) or argon.

### c) Extraction

### Extraction of Arabidopsis Green Tissue:

[51630] Immediately after the lyophilization apparatus had been flushed, the extraction sleeves with the lyophilized plant material were transferred into the 5 ml extraction cartridges of the ASE device (Accelerated Solvent Extractor ASE 200 with Solvent Controller and AutoASE software (DIONEX)).

[51631] The 24 sample positions of an ASE device (Accelerated Solvent Extractor ASE 200 with Solvent Controller and AutoASE software (DIONEX)) were filled with plant samples, including some samples for testing quality control.

[51632] The polar substances were extracted with approximately 10 ml of methanol/water (80/20, v/v) at T=70° C. and p=140 bar, 5 minutes heating-up phase, 1 minute static extraction. The more lipophilic substances were extracted with approximately 10 ml of methanol/dichloromethane (40/60, v/v) at T=70° C. and p=140 bar, 5 minute heating-up phase, 1 minute static extraction. The two solvent mixtures were extracted into the same glass tubes (centrifuge tubes, 50 ml, equipped with screw cap and pierceable septum for the ASE (DIONEX)).

[51633] The solution was treated with internal standards: ribitol, L-glycine-2,2-d2, L-alanine-2,3,3,3-d₄, methionine-methyl-d₃, and α-methylglucopyranoside and methyl nonadecanoate, methyl undecanoate, methyl tridecanoate, methyl pentadecanoate, methyl nonacosanoate.

[51634] The total extract was treated with 8 ml of water. The solid residue of the plant sample and the extraction sleeve were discarded.

[51635] The extract was shaken and then centrifuged for 5 to 10 minutes at at least 1400 g in order to accelerate phase separation. 1 ml of the supernatant methanol/water phase (“polar phase”, colorless) was removed for the further GC analysis, and 1 ml was removed for the LC analysis. The remainder of the methanol/water phase was discarded. 0.5 ml of the organic phase (“lipid phase”, dark green) was removed for the further GC analysis and 0.5 ml was removed for the LC analysis. All the portions removed were evaporated to dryness using the IR Dancer infrared vacuum evaporator (Hettich). The maximum temperature during the evaporation process did not exceed 40° C. Pressure in the apparatus was not less than 10 mbar.

### Extraction of Arabidopsis Seeds:

[51636] 3 mg of Arabidopsis seeds are transferred into a 1.2-ml-stainless steel grinding jar and ground and extracted with a mixture of 770 μl methanol and 290 μl water. A solution containing commercially available standard substances (ribitol, L-glycine-2,2-d2, L-alanine-2,3,3,3-d4, methionine-methyl-d3, tryptophane-d5, Arginine 13C615N4, Pep3 (Boc-Ala-Gly-Gly-Gly-OH) and α-methylglucopyranoside) is added as internal standard. The extraction is performed using a stainless steel ball and a ball mill (Retsch MM 200, Retsch, Germany) operated at 30 Hz for 3 minutes. After centrifugation at 6000 rpm for 5 minutes 800 μl of the extraction solvent is transferred into a 2-ml-reaction tube (Eppendorf).

[51637] A solution of commercially available internal standard substances (Coenzyme Q1, Coenzyme Q2, Coenzyme Q4, and methyl nonadecanoate, undecanoic acid, tridecanoic acid, pentadecanoic acid, methyl nonacosanoate) is added to the residue as internal standard. For the extraction of lipophilic metabolites, 640 μl methylene chloride and 170 μl methanol are added and the sample is extracted in a ball mill operated at 30 Hz for 3 minutes. After centrifugation at 6000 rpm for 5 minutes 800 μl of the extraction solvent is transferred and combined with the extract of the first extraction step. After the addition of 400 μl of water and a centrifugation step to ensure proper separation of the organic and aqueous layer, two aliquots of 500 μl of the aqueous layer (polar phase) are taken for GC and LC analysis, respectively. Also two aliquots of 100 μl of the organic layer (lipid phase) are take for GC and LC analysis, respectively. All the portions removed were evaporated to dryness using the IR Dancer infrared vacuum evaporator (Hettich). The maximum temperature during the evaporation process did not exceed 40° C. Pressure in the apparatus was not less than 10 mbar.

### Extraction of Rice or Corn Seed Material:

[51638] 20 rice or corn kernels are homogenized with a 50-ml-stainless steel grinding jar and ground with a stainless steel grinding ball using a ball mill (Retsch MM 200, Retsch, Germany) operated at 30 Hz for 3 minutes. The ground samples are lyophilized over night The initial temperature during the main drying phase was −35 ° C. and the pressure was 0.120 mbar. During the drying phase, the parameters were altered following a pressure and temperature program. The final temperature after 12 hours was +30° C. and the final pressure was 0.001 to 0.004 mbar. After the vacuum pump and the refrigerating machine had been switched off, the system was flushed with air (dried via a drying tube) or argon.

[51639] 50 mg of the lyophilized kernel material are weighed into glass fibre extraction thimbles and extracted and further processed as described for the extraction of Arabidopsis green tissue.

### d) Processing the Lipid and Polar Phase for the LC/MS or LC/MS/MS Analysis

[51640] The lipid extract, which had been evaporated to dryness was taken up in mobile phase.

[51641] The polar extract, which had been evaporated to dryness was taken up in mobile phase.

### LC-MS Analysis:

[51642] The LC part was carried out on a commercially available LC/MS system from Agilent Technologies, USA. For polar extracts 10 μl are injected into the system at a flow rate of 200 μl/min. The separation column (Reversed Phase C18) was maintained at 15 ° C. during chromatography. For lipid extracts 5 μl are injected into the system at a flow rate of 200 μl/min. The separation column (Reversed Phase C18) was maintained at 30 ° C. HPLC was performed with gradient elution. The mass spectrometric analysis was performed on an Applied Biosystems API 4000 triple quadrupole instrument with turbo ion spray source. For polar extracts the instrument measured in negative ion mode in MRM-mode and fullscan mode from 100-1000 amu. For lipid extracts the instrument measured in positive ion mode in MRM-mode fullscan mode from 100-1000 amu. MS analysis is described in more detail in patent publication number WO 03/073464.

### e) Derivatization of the Lipid and Polar Phases for the GC/MS Analysis

### Derivatization of the Lipid Phase for the GC/MS Analysis:

[51643] For the transmethanolysis, a mixture of 140 μl of chloroform, 37 μl of hydrochloric acid (37% by weight HCl in water), 320 μl of methanol and 20 μl of toluene was added to the evaporated extract of the lipid phase . The vessel was sealed tightly and heated for 2 hours at 100° C., with shaking. The solution was subsequently evaporated to dryness. The residue was dried completely.

[51644] The methoximation of the carbonyl groups was carried out by reaction with methoxyamine hydrochloride (5 mg/ml in pyridine, 100 μl for 1.5 hours at 60° C.) in a tightly sealed vessel. 20 μl of a solution of odd-numbered, straight-chain fatty acids (solution of each 0.3 mg/ml of fatty acids from 7 to 25 carbon atoms and each 0.6 mg/ml of fatty acids with 27, 29 and 31 carbon atoms in 3/7 (v/v) pyridine/toluene) were added as time standards. Finally, the derivatization with 100 μl of N-methyl-N-(trimethylsilyl)-2,2,2-trifluoroacetamide (MSTFA) was carried out for 30 minutes at 60° C., again in the tightly sealed vessel. The final volume before injection into the GC was 220 μl.

### Derivatization of the Polar Phase for the GC/MS Analysis:

[51645] The methoximation of the carbonyl groups was carried out by reaction with methoxyamine hydrochloride (5 mg/ml in pyridine, 50 μl for 1.5 hours at 60° C.) in a tightly sealed vessel. 10 μl of a solution of odd-numbered, straight-chain fatty acids (solution of each 0.3 mg/ml of fatty acids from 7 to 25 carbon atoms and each 0.6 mg/ml of fatty acids with 27, 29 and 31 carbon atoms in 3/7 (v/v) pyridine/toluene) were added as time standards. Finally, the derivatization with 50 μl of N-methyl-N-(trimethylsilyl)-2,2,2-trifluoroacetamide (MSTFA) was carried out for 30 minutes at 60° C., again in the tightly sealed vessel. The final volume before injection into the GC was 110 μl.

### f) GC-MS Analysis

[51646] The GC-MS systems consisted of an Agilent 6890 GC coupled to an Agilent 5973 MSD. The autosamplers were CompiPal or GCPal from CTC. For the analysis usual commercial capillary separation columns (30 m×0.25 mm×0.25 pm) with different poly-methyl-siloxane stationary phases containing 0% up to 35% of aromatic moieties, depending on the analysed sample materials and fractions from the phase separation step, were used (for example: DB-1ms, HP-5ms, DB-XLB, DB-35ms, Agilent Technologies). Up to 1 μl of the final volume was injected splitless and the oven temperature program was started at 70 ° C. and ended at 340 ° C. with different heating rates depending on the sample material and fraction from the phase separation step in order to achieve a sufficient chromatographic separation and number of scans within each analyte peak. Usual GC-MS standard conditions, for example constant flow with nominal 1 to 1.7 ml/min. and helium as the mobile phase gas were used. Ionisation was done by electron impact with 70 eV, scanning within a m/z range from 15 to 600 with scan rates from 2.5 to 3 scans/sec and standard tune conditions.

### g) Analysis of the Various Plant Samples

[51647] The samples were measured in individual series of 20 to 21 plant or seed samples each (also referred to as sequences), each sequence containing at least 5 wild-type plants or seed samples as controls. Seed samples were from individual plants. The peak area of each analyte was divided by the peak area of the respective internal standard. The data were standardized for the fresh weight established for the plant or seed sample, respectively. The values calculated thus were related to the wild-type control group by being divided by the mean of the corresponding data of the wild-type control group of the same sequence. The values obtained were referred to as ratio_by_WT, they are comparable between sequences and indicate how much the analyte concentration in the transgenic plant sample differs in relation to the wild-type control. Appropriate controls were done before to proof that the vector and transformation procedure itself has no significant influence on the metabolic composition of the plants. Therefore the described changes in comparison with wild types were caused by the introduced gene constructs. At least 3-5 independent lines were analyzed in two independent experiments for each construct.

[51648] The results of the different plant analyses can be seen from the Table d.

[51649] Table d showing results of plant analyses

TABLE d

| SeqID | Target | Locus | Metabolite | Source | Promotor | Method | Min | Max |
|---|---|---|---|---|---|---|---|---|
| 113651 | non- | At1g19670 | linoleic | ARA_LEAF | p-PcUBI | GC | 15 | 24 |
| | targeted | | acid | | | | | |
| 17637 | non- | At1g19800 | linoleic | ARA_LEAF | p-PcUBI | GC | 14 | 29 |
| | targeted | | acid | | | | | |
| 1061 | non- | At1g68320 | linoleic | ARA_LEAF | p-PcUBI | GC | 15 | 79 |
| | targeted | | acid | | | | | |
| 113714 | plastidic | At2g36580 | linoleic | ARA_LEAF | p-PcUBI | GC | 14 | 19 |
| | | | acid | | | | | |
| 1623 | non- | At2g45420 | linoleic | ARA_LEAF | p-PcUBI | GC | 16 | 42 |
| | targeted | | acid | | | | | |
| 68657 | non- | At3g02990 | linoleic | ARA_LEAF | p-PcUBI | GC | 19 | 30 |
| | targeted | | acid | | | | | |
| 22921 | non- | At3g20910 | linoleic | ARA_LEAF | p-PcUBI | GC | 14 | 29 |
| | targeted | | acid | | | | | |
| 2935 | non- | At3g62950 | linoleic | ARA_LEAF | p-PcUBI | GC | 16 | 30 |
| | targeted | | acid | | | | | |
| 109717 | non- | At4g09960 | linoleic | ARA_LEAF | p-PcUBI | GC | 16 | 32 |
| | targeted | | acid | | | | | |
| 23482 | non- | At4g15660 | linoleic | ARA_LEAF | p-PcUBI | GC | 16 | 57 |
| | targeted | | acid | | | | | |
| 3279 | non- | At4g15670 | linoleic | ARA_LEAF | p-PcUBI | GC | 21 | 59 |
| | targeted | | acid | | | | | |
| 68849 | non- | At4g26080 | linoleic | ARA_LEAF | p-PcUBI | GC | 16 | 23 |
| | targeted | | acid | | | | | |
| 4102 | non- | At4g33040 | linoleic | ARA_LEAF | p-PcUBI | GC | 14 | 39 |
| | targeted | | acid | | | | | |
| 24438 | non- | At5g03720 | linoleic | ARA_LEAF | p-PcUBI | GC | 22 | 42 |
| | targeted | | acid | | | | | |
| 25498 | non- | At5g59220 | linoleic | ARA_LEAF | p-PcUBI | GC | 18 | 48 |
| | targeted | | acid | | | | | |
| 114083 | non- | Avin-DRAFT_1788 | linoleic | ARA_LEAF | p-PcUBI | GC | 15 | 27 |
| | targeted | | acid | | | | | |
| 114198 | non- | Avin-DRAFT_2010 | linoleic | ARA_LEAF | p-PcUBI | GC | 15 | 38 |
| | targeted | | acid | | | | | |
| 6040 | non- | Avin-DRAFT_2091 | linoleic | ARA_LEAF | p-PcUBI | GC | 18 | 29 |
| | targeted | | acid | | | | | |
| 29500 | non- | Avin-DRAFT_3253 | linoleic | ARA_LEAF | p-PcUBI | GC | 14 | 44 |
| | targeted | | acid | | | | | |
| 111155 | non- | Avin-DRAFT_3577 | linoleic | ARA_LEAF | p-PcUBI | GC | 15 | 43 |
| | targeted | | acid | | | | | |
| 114231 | non- | Avin-DRAFT_3629 | linoleic | ARA_LEAF | p-PcUBI | GC | 16 | 30 |
| | targeted | | acid | | | | | |
| 6510 | non- | Avin-DRAFT_5103 | linoleic | ARA_LEAF | p-PcUBI | GC | 20 | 36 |
| | targeted | | acid | | | | | |
| 7686 | non- | B0486 | linoleic | ARA_LEAF | p-Super | GC | 16 | 26 |
| | targeted | | acid | | | | | |
| 75807 | non- | B0801 | linoleic | ARA_LEAF | p-Super | GC | 15 | 30 |
| | targeted | | acid | | | | | |
| 114552 | plastidic | B1095 | linoleic | ARA_LEAF | p-Super | GC | 18 | 46 |
| | | | acid | | | | | |
| 114979 | non- | B1102 | linoleic | ARA_LEAF | p-Super | GC | 15 | 21 |
| | targeted | | acid | | | | | |
| 38226 | non- | B1330 | linoleic | ARA_LEAF | p-Super | GC | 15 | 35 |
| | targeted | | acid | | | | | |
| 38266 | plastidic | B1431 | linoleic | ARA_LEAF | p-Super | GC | 15 | 40 |
| | | | acid | | | | | |
| 115056 | non- | B1470 | linoleic | ARA_LEAF | p-Super | GC | 14 | 39 |
| | targeted | | acid | | | | | |
| 78154 | non- | B1589 | linoleic | ARA_LEAF | p-Super | GC | 14 | 33 |
| | targeted | | acid | | | | | |
| 38300 | non- | B1597 | linoleic | ARA_LEAF | p-Super | GC | 14 | 35 |
| | targeted | | acid | | | | | |
| 115064 | plastidic | B1611 | linoleic | ARA_LEAF | p-Super | GC | 14 | 33 |
| | | | acid | | | | | |
| 38345 | non- | B1627 | linoleic | ARA_LEAF | p-Super | GC | 18 | 25 |
| | targeted | | acid | | | | | |
| 78753 | non- | B1670 | linoleic | ARA_LEAF | p-Super | GC | 13 | 33 |
| | targeted | | acid | | | | | |
| 78953 | non- | B1837 | linoleic | ARA_LEAF | p-Super | GC | 13 | 37 |
| | targeted | | acid | | | | | |
| 8920 | non- | B2032 | linoleic | ARA_LEAF | p-Super | GC | 15 | 74 |
| | targeted | | acid | | | | | |
| 112193 | non- | B2043 | linoleic | ARA_LEAF | p-Super | GC | 14 | 27 |
| | targeted | | acid | | | | | |
| 115595 | non- | B2099 | linoleic | ARA_LEAF | p-Super | GC | 16 | 31 |
| | targeted | | acid | | | | | |
| 39002 | non- | B2107 | linoleic | ARA_LEAF | p-Super | GC | 15 | 47 |
| | targeted | | acid | | | | | |
| 39040 | non- | B2178 | linoleic | ARA_LEAF | p-Super | GC | 16 | 40 |
| | targeted | | acid | | | | | |
| 39237 | non- | B2399 | linoleic | ARA_LEAF | p-Super | GC | 24 | 35 |
| | targeted | | acid | | | | | |
| 115628 | non- | B2439 | linoleic | ARA_LEAF | p-Super | GC | 20 | 34 |
| | targeted | | acid | | | | | |
| 40329 | non- | B2474 | linoleic | ARA_LEAF | p-Super | GC | 19 | 39 |
| | targeted | | acid | | | | | |
| 40665 | non- | B2613 | linoleic | ARA_LEAF | p-Super | GC | 14 | 48 |
| | targeted | | acid | | | | | |
| 115655 | non- | B2682 | linoleic | ARA_LEAF | p-Super | GC | 20 | 23 |
| | targeted | | acid | | | | | |
| 115719 | non- | B2790 | linoleic | ARA_LEAF | p-Super | GC | 17 | 25 |
| | targeted | | acid | | | | | |
| 115791 | plastidic | B2836 | linoleic | ARA_LEAF | p-Super | GC | 19 | 43 |
| | | | acid | | | | | |
| 81980 | non- | B2849 | linoleic | ARA_LEAF | p-Super | GC | 15 | 40 |
| | targeted | | acid | | | | | |
| 115864 | non- | B2866 | linoleic | ARA_LEAF | p-Super | GC | 16 | 20 |
| | targeted | | acid | | | | | |
| 41006 | non- | B2909 | linoleic | ARA_LEAF | p-Super | GC | 20 | 28 |
| | targeted | | acid | | | | | |
| 116110 | non- | B3379 | linoleic | ARA_LEAF | p-Super | GC | 16 | 34 |
| | targeted | | acid | | | | | |
| 116172 | plastidic | B3451 | linoleic | ARA_LEAF | p-Super | GC | 14 | 32 |
| | | | acid | | | | | |
| 10726 | non- | B3823 | linoleic | ARA_LEAF | p-Super | GC | 14 | 42 |
| | targeted | | acid | | | | | |
| 100675 | plastidic | B3845 | linoleic | ARA_SEED_2 | p-USP | GC | 11 | 29 |
| | | | acid | | | | | |
| 116312 | non- | GM02LC38418 | linoleic | ARA_LEAF | p-PcUBI | GC | 14 | 23 |
| | targeted | | acid | | | | | |
| 85723 | mitochondrial | Sll1032 | linoleic | ARA_LEAF | p-PcUBI | GC | 16 | 22 |
| | | | acid | | | | | |
| 52660 | plastidic | Sll1056 | linoleic | ARA_LEAF | p-PcUBI | GC | 18 | 40 |
| | | | acid | | | | | |
| 53878 | mitochondrial | Sll1443 | linoleic | ARA_LEAF | p-PcUBI | GC | 15 | 33 |
| | | | acid | | | | | |
| 95047 | non- | Sll1498 | linoleic | ARA_LEAF | p-PcUBI | GC | 18 | 34 |
| | targeted | | acid | | | | | |
| 11471 | mitochondrial | Sll1917 | linoleic | ARA_LEAF | p-PcUBI | GC | 14 | 29 |
| | | | acid | | | | | |
| 55385 | mitochondrial | Sll1920 | linoleic | ARA_LEAF | p-PcUBI | GC | 14 | 22 |
| | | | acid | | | | | |
| 11990 | non- | Slr0338 | linoleic | ARA_LEAF | p-PcUBI | GC | 14 | 42 |
| | targeted | | acid | | | | | |
| 87655 | plastidic | Slr0966 | linoleic | ARA_LEAF | p-PcUBI | GC | 17 | 43 |
| | | | acid | | | | | |
| 116341 | mitochondrial | Slr1099 | linoleic | ARA_LEAF | p-PcUBI | GC | 14 | 44 |
| | | | acid | | | | | |
| 116460 | mitochondrial | Slr1250 | linoleic | ARA_LEAF | p-PcUBI | GC | 14 | 29 |
| | | | acid | | | | | |
| 58058 | non- | Slr1269 | linoleic | ARA_LEAF | p-PcUBI | GC | 18 | 24 |
| | targeted | | acid | | | | | |
| 58324 | non- | Slr1312 | linoleic | ARA_LEAF | p-PcUBI | GC | 14 | 45 |
| | targeted | | acid | | | | | |
| 116713 | non- | Slr1350 | linoleic | ARA_LEAF | p-PcUBI | GC | 14 | 29 |
| | targeted | | acid | | | | | |
| 12341 | mitochondrial | Slr2072 | linoleic | ARA_LEAF | p-PcUBI | GC | 13 | 35 |
| | | | acid | | | | | |
| 116848 | non- | TTC0490 | linoleic | ARA_LEAF | p-PcUBI | GC | 16 | 31 |
| | targeted | | acid | | | | | |
| 61553 | non- | TTC0917 | linoleic | ARA_LEAF | p-PcUBI | GC | 23 | 98 |
| | targeted | | acid | | | | | |
| 61723 | non- | TTC1193 | linoleic | ARA_LEAF | p-PcUBI | GC | 17 | 22 |
| | targeted | | acid | | | | | |
| 116948 | plastidic | Yal044c | linoleic | ARA_LEAF | p-Super | GC | 17 | 29 |
| | | | acid | | | | | |
| 14275 | plastidic | Ydl159w | linoleic | ARA_LEAF | p-Super | GC | 16 | 34 |
| | | | acid | | | | | |
| 117352 | plastidic | Ydr158w | linoleic | ARA_LEAF | p-PcUBI | GC | 14 | 38 |
| | | | acid | | | | | |
| 90165 | non- | Ydr507c | linoleic | ARA_LEAF | Big35S | GC | 14 | 34 |
| | targeted | | acid | | | | | |
| 117482 | non- | Ygr104c | linoleic | ARA_SEED_2 | p-PcUBI | GC | 15 | 19 |
| | targeted | | acid | | | | | |
| 64964 | plastidic | Yjl073w | linoleic | ARA_LEAF | p-Super | GC | 14 | 21 |
| | | | acid | | | | | |
| 66772 | non- | Ylr304c | linoleic | ARA_LEAF | Big35S | GC | 16 | 34 |
| | targeted | | acid | | | | | |
| 117495 | non- | Ynl064c | linoleic | ARA_LEAF | Big35S | GC | 15 | 25 |
| | targeted | | acid | | | | | |
| 118212 | plastidic | Ypl271w | linoleic | ARA_LEAF | p-Super | GC | 14 | 34 |
| | | | acid | | | | | |
| 16883 | plastidic | 59582753_SOYBEAN | linoleic | ARA_LEAF | p-PcUBI | GC | 14 | 37 |
| | | | acid | | | | | |

[51650] Column 1 shows the SEQ ID NO, Column 2 shows the expression type (targeted or non-targeted), Column 3 shows the “gene name” (locus), Column 4 shows the metabolite analyzed, Column 5 indicates the A. thaliana source tissue analyzed, Column 6 indicates the used promoter for expression, Column 7 indicates the analytical method. Columns 8 and 9 show the minimum and the maximum increase of the analyzed metabolite (in percent) in comparison to the wild type (=ratio_by_weight, given as percent increase).

[51651] When the analyses were repeated independently, all results proved to be significant.

### Example 12

### Engineering Arabidopsis Plants with an Increased Production of a Fine Chemical by (Over)Expressing a FCRP-Protein Encoded by a Gene from Saccharomyces Cerevisiae or Synechocystis or E. Coli, Azotobacter Vinelandii, Thermus Thermophilus, Physcomitrella Patens, Arabidopsis. Thaliana, Brassica Napus, Glycine Max, Zea Mays or Oryza Sativa using Tissue-Specific and/or Stress Inducible Promoters

[51652] Transgenic Arabidopsis plants are created as in example 11 to express the FCRP under the control of a tissue-specific and/or stress inducible promoter.

[51653] T2 generation plants are produced and are grown under standard conditions. The fine chemical production is determined after a total time of 29 to 30 days starting with the sowing. The transgenic Arabidopsis plant produces more fine chemical then non-transgenic control plants.

### Example 13

### Engineering Alfalfa Plants with an Increased Production of a Fine Chemical by (Over)Expressing a FCRP-Protein Encoded by a Gene From Saccharomyces Cerevisiae or Synechocystis or E. Coli, Azotobacter Vinelandii, Thermus Thermophilus, Physcomitrella Patens, Arabidopsis. Thaliana, Brassica Napus, Glycine Max, Zea Mays or Oryza Sativa

[51654] A regenerating clone of alfalfa (Medicago sativa) is transformed using the method of (McKersie et al., Plant Physiol 119, 839 (1999)). Regeneration and transformation of alfalfa is genotype dependent and therefore a regenerating plant is required. Methods to obtain regenerating plants have been described. For example, these can be selected from the cultivar Rangelander (Agriculture Canada) or any other commercial alfalfa variety as described by Brown D. C. W. and Atanassov A. (Plant Cell Tissue Organ Culture 4, 111 (1985)). Alternatively, the RA3 variety (University of Wisconsin) is selected for use in tissue culture (Walker et al., Am. J. Bot. 65, 654 (1978)).

[51655] Petiole explants are cocultivated with an overnight culture of Agrobacterium tumefaciens C58C1 pMP90 (McKersie et al., Plant Physiol 119, 839 (1999)) or LBA4404 containing a binary vector. Many different binary vector systems have been described for plant transformation (e.g. G. An, in “Agrobacterium Protocols, Methods in Molecular Biology”, Vol. 44, pp. 47-62, Gartland K. M. A. and Davey M. R., eds. Humana Press, Totowa, N.J.). Many are based on the vector pBI N19 described by Bevan (Nucleic Acid Research. 12, 8711 (1984)) that includes a plant gene expression cassette flanked by the left and right border sequences from the Ti plasmid of Agrobacterium tumefaciens. A plant gene expression cassette consists of at least two genes—a selection marker gene and a plant promoter regulating the transcription of the cDNA or genomic DNA of the trait gene. Various selection marker genes can be used including the Arabidopsis gene encoding a mutated acetohydroxy acid synthase (AHAS) enzyme (U.S. Pat. No. 5,7673,666 and U.S. Pat. No. 6,225,105). Similarly, various promoters can be used to regulate the trait gene that provides constitutive, developmental, tissue or environmental regulation of gene transcription. In this example, the 34S promoter (GenBank Accession numbers M59930 and X16673) is used to provide constitutive expression of the trait gene.

[51656] The explants are cocultivated for 3 days in the dark on SH induction medium containing 288 mg/L Pro, 53 mg/L thioproline, 4.35 g/L K₂SO₄, and 100 μm acetosyringinone. The explants are washed in half-strength Murashige-Skoog medium (Murashige and Skoog, 1962) and plated on the same SH induction medium without acetosyringinone but with a suitable selection agent and suitable antibiotic to inhibit Agrobacterium growth. After several weeks, somatic embryos are transferred to BOi2Y development medium containing no growth regulators, no antibiotics, and 50 g/L sucrose. Somatic embryos are subsequently germinated on half-strength Murashige-Skoog medium. Rooted seedlings are transplanted into pots and grown in a greenhouse.

[51657] T1 or T2 generation plants are produced, grown and processed and evaluated for their fine chemical produced in analogy as described above.

### Example 14

### Engineering Ryegrass Plants with an Increased Production of Fine Chemical by (Over)-Expressing a FCRP encoded by a Gene from Saccharomyces Cerevisiae or Synechocystis or E. Coli, Azotobacter Vinelandii, Thermus Thermophilus, Physcomitrella Patens, Arabidopsis Thaliana, Brassica Napus, Glycine Max, Zea Mays or Oryza Sativa

[51658] Seeds of several different ryegrass varieties may be used as explant sources for transformation, including the commercial variety Gunne available from Svalof Weibull seed company or the variety Affinity. Seeds are surface-sterilized sequentially with 1% Tween-20 for 1 minute, 100% bleach for 60 minutes, 3 rinses with 5 minutes each with deionized and distilled H₂O, and then germinated for 3-4 days on moist, sterile filter paper in the dark. Seedlings are further sterilized for 1 minute with 1% Tween-20, 5 minutes with 75% bleach, and rinsed 3 times with double distilled H₂O, 5 min each.

[51659] Surface-sterilized seeds are placed on the callus induction medium containing Murashige and Skoog basal salts and vitamins, 20 g/L sucrose, 150 mg/L asparagine, 500 mg/L casein hydrolysate, 3 g/L Phytagel, 10 mg/L BAP, and 5 mg/L dicamba. Plates are incubated in the dark at 25° C. for 4 weeks for seed germination and embryogenic callus induction.

[51660] After 4 weeks on the callus induction medium, the shoots and roots of the seedlings are trimmed away, the callus is transferred to fresh media, maintained in culture for another 4 weeks, and then transferred to MSO medium in light for 2 weeks. Several pieces of callus (11-17 weeks old) are either strained through a 10 mesh sieve and put onto callus induction medium, or cultured in 100 ml of liquid ryegrass callus induction media (same medium as for callus induction with agar) in a 250 ml flask. The flask is wrapped in foil and shaken at 175 rpm in the dark at 23° C. for 1 week. Sieving the liquid culture with a 40-mesh sieve collected the cells. The fraction collected on the sieve is plated and cultured on solid ryegrass callus induction medium for 1 week in the dark at 25° C. The callus is then transferred to and cultured on MS medium containing 1% sucrose for 2 weeks.

[51661] Transformation can be accomplished with either Agrobacterium of with particle bombardment methods. An expression vector is created containing a constitutive plant promoter and the cDNA of the gene in a pUC vector. The plasmid DNA is prepared from E. coli cells using with Qiagen kit according to manufacturer's instruction. Approximately 2 g of embryogenic callus is spread in the center of a sterile filter paper in a Petri dish. An aliquot of liquid MSO with 10 g/L sucrose is added to the filter paper. Gold particles (1.0 μm in size) are coated with plasmid DNA according to method of Sanford et al., 1993 and delivered to the embryogenic callus with the following parameters: 500 μg particles and 2 pg DNA per shot, 1300 psi and a target distance of 8.5 cm from stopping plate to plate of callus and 1 shot per plate of callus.

[51662] After the bombardment, calli are transferred back to the fresh callus development medium and maintained in the dark at room temperature for a 1-week period. The callus is then transferred to growth conditions in the light at 25° C. to initiate embryo differentiation with the appropriate selection agent, e.g. 250 nM Arsenal, 5 mg/L PPT or 50 mg/L kanamycin. Shoots resistant to the selection agent are appearing and once rooted are transferred to soil.

[51663] Samples of the primary transgenic plants (T0) are analyzed by PCR to confirm the presence of T-DNA. These results are confirmed by Southern hybridization in which DNA is electrophoresed on a 1% agarose gel and transferred to a positively charged nylon membrane (Roche Diagnostics). The PCR DIG Probe Synthesis Kit (Roche Diagnostics) is used to prepare a digoxigenin-labelled probe by PCR, and used as recommended by the manufacturer.

[51664] Transgenic T0 ryegrass plants are propagated vegetatively by excising tillers. The transplanted tillers are maintained in the greenhouse for 2 months until well established. The shoots are defoliated and allowed to grow for 2 weeks.

[51665] T1 or T2 generation plants are produced, grown and processed and evaluated for their fine chemical produced in analogy as described above to determine the fine chemical content.

### Example 15

### Engineering Soybean Plants with an Increased Production of Fine Chemical by (Over)-Expressing a FCRP Encoded by a Gene from Saccharomyces Cerevisiae or Synechocystis or E. Coli, Azotobacter Vinelandii, Thermus Thermophilus, Physcomitrella Patens, Arabidopsis Thaliana, Brassica Napus, Glycine Max, Zea Mays or Oryza Sativa

[51666] Soybean is transformed according to the following modification of the method described in the Texas A & M U.S. Pat. No. 5,164,310. Several commercial soybean varieties are amenable to transformation by this method. The cultivar Jack (available from the Illinois Seed Foundation) is commonly used for transformation. Seeds are sterilized by immersion in 70% (v/v) ethanol for 6 min and in 25% commercial bleach (NaOCI) supplemented with 0.1% (v/v) Tween for 20 min, followed by rinsing 4 times with sterile double distilled water. Seven-day seedlings are propagated by removing the radicle, hypocotyl and one cotyledon from each seedling. Then, the epicotyl with one cotyledon is transferred to fresh germination media in petri dishes and incubated at 25 ° C. under a 16-h photoperiod (approx. 100 μmol m⁻²s⁻¹) for three weeks. Axillary nodes (approx. 4 mm in length) were cut from 3-4 week-old plants. Axillary nodes are excised and incubated in Agrobacterium LBA4404 culture.

[51667] Many different binary vector systems have been described for plant transformation (e.g. An G., in Agrobacterium Protocols. Methods in Molecular Biology Vol. 44, pp. 47-62, Gartland K. M. A. and Davey M. R. eds. Humana Press, Totowa, N.J.). Many are based on the vector pBI N19 described by Bevan (Nucleic Acid Research. 12, 8711 (1984)) that includes a plant gene expression cassette flanked by the left and right border sequences from the Ti plasmid of Agrobacterium tumefaciens. A plant gene expression cassette consists of at least two genes—a selection marker gene and a plant promoter regulating the transcription of the cDNA or genomic DNA of the trait gene. Various selection marker genes can be used including the Arabidopsis gene encoding a mutated acetohydroxy acid synthase (AHAS) enzyme (U.S. Pat. No. 5,7673,666 and U.S. Pat. No. 6,225,105). Similarly, various promoters can be used to regulate the trait gene to provide constitutive, developmental, tissue or environmental regulation of gene transcription. In this example, the 34S promoter (GenBank Accession numbers M59930 and X16673) can be used to provide constitutive expression of the trait gene.

[51668] After the co-cultivation treatment, the explants are washed and transferred to selection media supplemented with 500 mg/L timentin. Shoots are excised and placed on a shoot elongation medium. Shoots longer than 1 cm are placed on rooting medium for two to four weeks prior to transplanting to soil.

[51669] The primary transgenic plants (TO) are analyzed by PCR to confirm the presence of T-DNA. These results are confirmed by Southern hybridization in which DNA is electrophoresed on a 1% agarose gel and transferred to a positively charged nylon membrane (Roche Diagnostics). The PCR DIG Probe Synthesis Kit (Roche Diagnostics) is used to prepare a digoxigenin-labelled probe by PCR, and used as recommended by the manufacturer.

[51670] T1 or T2 generation plants are produced, grown and processed and evaluated for their fine chemical produced in analogy as described above.

### Example 16

### Engineering Rapeseed/Canola Plants with an Increased Production of Fine Chemical by (Over)-Expressing a FCRP Encoded by a Gene from Saccharomyces Cerevisiae or Synechocystis or E. Coli, Azotobacter Vinelandii, Thermus Thermophilus, Physcomitrella Patens, Arabidopsis. Thaliana, Brassica Napus, Glycine Max, Zea Mays or Oryza Sativa

[51671] Cotyledonary petioles and hypocotyls of 5-6 day-old young seedlings are used as explants for tissue culture and transformed according to Babic et al. (Plant Cell Rep 17, 183 (1998)). The commercial cultivar Westar (Agriculture Canada) is the standard variety used for transformation, but other varieties can be used.

[51672] Agrobacterium tumefaciens LBA4404 containing a binary vector can be used for canola transformation. Many different binary vector systems have been described for plant transformation (e.g. An G., in Agrobacterium Protocols. Methods in Molecular Biology Vol. 44, p. 47-62, Gartland K. M. A.and Davey M. R. eds. Humana Press, Totowa, N.J.). Many are based on the vector pBI N19 described by Bevan (Nucleic Acid Research. 12, 8711(1984)) that includes a plant gene expression cassette flanked by the left and right border sequences from the Ti plasmid of Agrobacterium tumefaciens. A plant gene expression cassette consists of at least two genes—a selection marker gene and a plant promoter regulating the transcription of the cDNA or genomic DNA of the trait gene. Various selection marker genes can be used including the Arabidopsis gene encoding a mutated acetohydroxy acid synthase (AHAS) enzyme (U.S. Pat. No. 5,7673,666 and U.S. Pat. No. 6,225,105). Similarly, various promoters can be used to regulate the trait gene to provide constitutive, developmental, tissue or environmental regulation of gene transcription. In this example, the 34S promoter (GenBank Accession numbers M59930 and X16673) can be used to provide constitutive expression of the trait gene.

[51673] Canola seeds are surface-sterilized in 70% ethanol for 2 min., and then in 30% Clorox with a drop of Tween-20 for 10 min, followed by three rinses with sterilized distilled water. Seeds are then germinated in vitro 5 days on half strength MS medium without hormones, 1% sucrose, 0.7% Phytagar at 23° C., 16 h light. The cotyledon petiole explants with the cotyledon attached are excised from the in vitro seedlings, and inoculated with Agrobacterium by dipping the cut end of the petiole explant into the bacterial suspension. The explants are then cultured for 2 days on MSBAP-3 medium containing 3 mg/L BAP, 3% sucrose, 0.7% Phytagar at 23° C., 16 h light. After two days of co-cultivation with Agrobacterium, the petiole explants are transferred to MSBAP-3 medium containing 3 mg/L BAP, cefotaxime, carbenicillin, or timentin (300 mg/L) for 7 days, and then cultured on MSBAP-3 medium with cefotaxime, carbenicillin, or timentin and selection agent until shoot regeneration. When the shoots were 5-10 mm in length, they are cut and transferred to shoot elongation medium (MSBAP-0.5, containing 0.5 mg/L BAP). Shoots of about 2 cm in length are transferred to the rooting medium (MSO) for root induction.

[51674] Samples of the primary transgenic plants (T0) are analyzed by PCR to confirm the presence of T-DNA. These results are confirmed by Southern hybridization in which DNA is electrophoresed on a 1% agarose gel and transferred to a positively charged nylon membrane (Roche Diagnostics). The PCR DIG Probe Synthesis Kit (Roche Diagnostics) is used to prepare a digoxigenin-labelled probe by PCR, and used as recommended by the manufacturer.

[51675] T1 or T2 generation plants are produced, grown and processed and evaluated for their fine chemical produced in analogy as described above.

### Example 17

### Engineering corn plants with an Increased Production of Fine Chemical by (Over)-Expressing a FCRP Encoded by a Gene from Saccharomyces Cerevisiae or Synechocystis or E. Coli, Azotobacter Vinelandii, Thermus Thermophilus, Physcomitrella Patens, Arabidopsis Thaliana, Brassica Napus, Glycine Max, Zea Mays or Oryza Sativa

[51676] Transformation of maize (Zea Mays L.) is performed with a modification of the method described by Ishida et al. (Nature Biotech 14745 (1996)). Transformation is genotype-dependent in corn and only specific genotypes are amenable to transformation and regeneration. The inbred line A188 (University of Minnesota) or hybrids with A188 as a parent are good sources of donor material for transformation (Fromm et al., Biotech 8, 833 (1990)), but other genotypes can be used successfully as well. Ears are harvested from corn plants at approximately 11 days after pollination (DAP) when the length of immature embryos is about 1 to 1.2 mm. Immature embryos are co-cultivated with Agrobacterium tumefaciens that carry “super binary” vectors and transgenic plants are recovered through organogenesis. The super binary vector system of Japan Tobacco is described in WO patents WO 94/00977 and WO 95/06722. Vectors were constructed as described. Various selection marker genes can be used including the maize gene encoding a mutated acetohydroxy acid synthase (AHAS) enzyme (US patent 6,025,541). Similarly, various promoters can be used to regulate the trait gene to provide constitutive, developmental, tissue or environmental regulation of gene transcription. In this example, the 34S promoter (GenBank Accession numbers M59930 and X16673) was used to provide constitutive expression of the trait gene.

[51677] Excised embryos are grown on callus induction medium, then maize regeneration medium, containing imidazolinone as a selection agent. The Petri plates are incubated in the light at 25 ° C. for 2-3 weeks, or until shoots develop. The green shoots are transferred from each embryo to maize rooting medium and incubated at 25° C. for 2-3 weeks, until roots develop. The rooted shoots are transplanted to soil in the greenhouse. T1 seeds are produced from plants that exhibit tolerance to the imidazolinone herbicides and which are PCR positive for the transgenes.

[51678] The T1 transgenic plants are then evaluated for their fine chemical producted as described above. The T1 generation of single locus insertions of the T-DNA will segregate for the transgene in a 3:1 ratio. Those progeny containing one or two copies of the transgene are tolerant regarding the imidazolinone herbicide, and exhibit an increased fine chemical production then those progeny lacking the transgenes.

[51679] T1 or T2 generation plants are produced, grown, processed and evaluated for their fine chemial produced in analogy as described above. Homozygous T2 plants exhibited similar phenotypes. Hybrid plants (F1 progeny) of homozygous transgenic plants and non-transgenic plants also exhibited enhanced fine chemical production.

### Example 18

### Engineering Wheat Plants with an Increased Production of Fine Chemical by (Over)-Expressing a FCRP Encoded by a Gene from Saccharomyces Cerevisiae or Synechocystis or E. Coli, AzotoBacter Vinelandii, Thermus Thermophilus, Physcomitrella Patens, Arabidopsis Thaliana, Brassica Napus, Glycine Max, Zea Mays or Oryza Sativa

[51680] Transformation of wheat is performed with the method described by Ishida et al. (Nature Biotech. 14745 (1996)). The cultivar Bobwhite (available from CYMMIT, Mexico) is commonly used in transformation. Immature embryos are co-cultivated with Agrobacterium tumefaciens that carry “super binary” vectors, and transgenic plants are recovered through organogenesis. The super binary vector system of Japan Tobacco is described in WO patents WO 94/00977 and WO 95/06722. Vectors were constructed as described. Various selection marker genes can be used including the maize gene encoding a mutated acetohydroxy acid synthase (AHAS) enzyme (U.S. Pat. No. 6,025,541). Similarly, various promoters can be used to regulate the trait gene to provide constitutive, developmental, tissue or environmental regulation of gene transcription. In this example, the 34S promoter (GenBank Accession numbers M59930 and X16673) was used to provide constitutive expression of the trait gene.

[51681] After incubation with Agrobacterium, the embryos are grown on callus induction medium, then regeneration medium, containing imidazolinone as a selection agent. The Petri plates are incubated in the light at 25 ° C. for 2-3 weeks, or until shoots develop. The green shoots are transferred from each embryo to rooting medium and incubated at 25 ° C. for 2-3 weeks, until roots develop. The rooted shoots are transplanted to soil in the greenhouse. T1 seeds are produced from plants that exhibit tolerance to the imidazolinone herbicides and which are PCR positive for the transgenes.

[51682] The T1 transgenic plants are then evaluated for their enhanced production of fine chemical according to the methods described in the previous examples. The T1 generation of single locus insertions of the T-DNA will segregate for the transgene in a 3:1 ratio. Those progeny containing one or two copies of the transgene are tolerant regarding the imidazolinone herbicide, and exhibit an enhanced production of fine chemical then those progeny lacking the transgenes. Homozygous T2 plants exhibited similar phenotypes.

### Example 19

### Engineering Rice Plants with an Increased Production of Fine Chemical by (Over)-Expressing a FCRP Encoded by a Gene from Saccharomyces Cerevisiae or Synechocystis or E. Coli, Azotobacter Vinelandii, Thermus Thermophilus, Physcomitrella Patens, Arabidopsis Thaliana, Brassica Napus, Glycine Max, Zea Mays or Oryza Sativa

[51683] The Agrobacterium containing the expression vector of the invention is used to transform Oryza sativa plants. Mature dry seeds of the rice japonica cultivar Nipponbare are dehusked. Sterilization is carried out by incubating for one minute in 70% ethanol, followed by 30 minutes in 0.2% HgC12, followed by a 6 times 15 minutes can beh with sterile distilled water. The sterile seeds are then germinated on a medium containing 2,4-D (callus induction medium). After incubation in the dark for four weeks, embryogenic, scutellum-derived calli are excised and propagated on the same medium. After two weeks, the calli are multiplied or propagated by subculture on the same medium for another 2 weeks. Embryogenic callus pieces are sub-cultured on fresh medium 3 days before co-cultivation (to boost cell division activity).

[51684] Agrobacterium strain LBA4404 containing the expression vector of the invention is used for cocultivation. Agrobacterium is inoculated on AB medium with the appropriate antibiotics and cultured for 3 days at 28° C. The bacteria are then collected and suspended in liquid co-cultivation medium to a density (0D600) of about 1. The suspension is then transferred to a Petri dish and the calli immersed in the suspension for 15 minutes. The callus tissues are then blotted dry on a filter paper and transferred to solidified, co-cultivation medium and incubated for 3 days in the dark at 25° C. Co-cultivated calli are grown on 2,4-D-containing medium for 4 weeks in the dark at 28° C. in the presence of a selection agent. During this period, rapidly growing resistant callus islands developed. After transfer of this material to a regeneration medium and incubation in the light, the embryogenic potential is released and shoots developed in the next four to five weeks.

[51685] Shoots are excised from the calli and incubated for 2 to 3 weeks on an auxin-containing medium from which they are transferred to soil. Hardened shoots are grown under high humidity and short days in a greenhouse.

[51686] Approximately 35 independent TO rice transformants are generated for one construct. The primary transformants are transferred from a tissue culture chamber to a greenhouse. After a quantitative PCR analysis to verify copy number of the T-DNA insert, only single copy transgenic plants that exhibit tolerance to the selection agent are kept for harvest of T1 seed. Seeds are then harvested three to five months after transplanting. The method yielded single locus transformants at a rate of over 50% (Aldemita and Hodges1996, Chan et al. 1993, Hiei et al. 1994).

[51687] T1 or T2 generation plants are produced, grown, processed and evaluated for their fine chemical produced in analogy as described above

### Example 20

### Identification of Identical and Heterologous Genes

[51688] Gene sequences can be used to identify identical or heterologous genes from cDNA or genomic libraries. Identical genes (e. g. full-length cDNA clones) can be isolated via nucleic acid hybridization using for example cDNA libraries. Depending on the abundance of the gene of interest, 100,000 up to 1,000,000 recombinant bacteriophages are plated and transferred to nylon membranes. After denaturation with alkali, DNA is immobilized on the membrane by e. g. UV cross linking. Hybridization is carried out at high stringency conditions. In aqueous solution, hybridization and washing is performed at an ionic strength of 1 M NaCl and a temperature of 68° C. Hybridization probes are generated by e.g. radioactive (32P) nick transcription labeling (High Prime, Roche, Mannheim, Germany). Signals are detected by autoradiography.

[51689] Partially identical or heterologous genes that are related but not identical can be identified in a manner analogous to the above-described procedure using low stringency hybridization and washing conditions. For aqueous hybridization, the ionic strength is normally kept at 1 M NaCl while the temperature is progressively lowered from 68 to 42° C.

[51690] Isolation of gene sequences with homology (or sequence identity/similarity) only in a distinct domain of (for example 10-20 amino acids) can be carried out by using synthetic radio labeled oligonucleotide probes. Radiolabeled oligonucleotides are prepared by phosphorylation of the 5-prime end of two complementary oligonucleotides with T4 polynucleotide kinase. The complementary oligonucleotides are annealed and ligated to form concatemers. The double stranded concatemers are than radiolabeled by, for example, nick transcription. Hybridization is normally performed at low stringency conditions using high oligonucleotide concentrations.

### Oligonucleotide Hybridization Solution:

[51691] 6×SSC
[51692] 0.01 M sodium phosphate
[51693] 1 mM EDTA (pH 8)
[51694] 0.5% SDS
[51695] 100 pg/ml denatured salmon sperm DNA
[51696] 0.1% nonfat dried milk

[51697] During hybridization, temperature is lowered stepwise to 5-10° C. below the estimated oligonucleotide Tm or down to room temperature followed by washing steps and autoradiography. Washing is performed with low stringency such as 3 washing steps using 4×SSC. Further details are described by Sambrook J. et al., 1989, “Molecular Cloning: A Laboratory Manual,” Cold Spring Harbor Laboratory Press or Ausubel F.M. et al., 1994, “Current Protocols in Molecular Biology,” John Wiley & Sons.

### Example 21

### Identification of Identical Genes by Screening Expression Libraries with Antibodies

[51698] c-DNA clones can be used to produce recombinant polypeptide for example in E. coli (e.g. Qiagen QlAexpress pQE system). Recombinant polypeptides are then normally affinity purified via Ni-NTA affinity chromatography (Qiagen). Recombinant polypeptides are then used to produce specific antibodies for example by using standard techniques for rabbit immunization. Antibodies are affinity purified using a Ni-NTA column saturated with the recombinant antigen as described by Gu et al., BioTechniques 17, 257 (1994). The antibody can than be used to screen expression cDNA libraries to identify identical or heterologous genes via an immunological screening (Sambrook J., et al., “Molecular Cloning: A Laboratory Manual,” Cold Spring Harbor Laboratory Press, 1989, or Ausubel F. M. et al., “Current Protocols in Molecular Biology”, John Wiley & Sons, 1994,).

### FIGURES

[51699] FIG. 1. Vector VC-MME220-1 qcz (SEQ ID NO: 41) used for cloning gene of interest for non-targeted expression.

[51700] FIG. 2. Vector VC-MME221-1qcz (SEQ ID NO: 46) used for cloning gene of interest for non-targeted expression.

[51701] FIG. 3. Vector VC-MME354-1 QCZ (SEQ ID NO: 32) used for cloning gene of interest for plastidic targeted expression.

[51702] FIG. 4. Vector VC-MME432-1qcz (SEQ ID NO: 42) used for cloning gene of interest for plastidic targeted expression.

[51703] FIG. 5. Vector VC-MME489-1 QCZ (SEQ ID NO: 56) used for cloning gene of interest for non-targeted expression and cloning of a targeting sequence.

[51704] FIG. 6. Vector pMTX0270p (SEQ ID NO: 30) used for cloning of a targeting sequence.

[51705] FIG. 7. Vector pMTX155 (SEQ ID NO: 31) used for used for cloning gene of interest for non-targeted expression.

[51706] FIG. 8. Vector VC-MME356-1 QCZ (SEQ ID NO: 34) used for mitochondric targeted expression.

[51707] FIG. 9. Vector VC-MME301-1 QCZ (SEQ ID NO: 36) used for non-targeted expression in preferentially seeds.

[51708] FIG. 10. Vector pMTX461korrp (SEQ ID NO: 37) used for plastidic targeted expression in preferentially seeds.

[51709] FIG. 11. Vector VC-MME462-1 QCZ (SEQ ID NO: 39) used for mitochondric targeted expression in preferentially seeds.

[51710] FIG. 12. Vector VC-MME431-1qcz (SEQ ID NO: 44) used for mitochondric targeted expression.

[51711] FIG. 13. Vector pMTX447korr (SEQ ID NO: 47) used for plastidic targeted expression.

[51712] FIG. 14. Vector VC-MME445-1 qcz (SEQ ID NO: 49) used for mitochondric targeted expression.

[51713] FIG. 15. Vector VC-MME289-1 qcz (SEQ ID NO: 51) used for non targeted expression in preferentially seeds. FIG. 16. Vector VC-MME464-1 qcz (SEQ ID NO: 52) used for plastidic targeted expression in preferentially seeds.

[51714] FIG. 17. Vector VC-MME465-1 qcz (SEQ ID NO: 54) used for mitochondric targeted expression in preferentially seeds.

[51715] In a further embodiment, the present invention relates in paragraphs [0000.1.9.9.] to [0514.1.8.9.] to a further process for the production of the fine chemical linolenic acid as defined below and corresponding embodiments as described herein as follows.

[51716] In a further embodiment, the present invention relates to a further process for the production of the fine chemical linolenic acid as defined below and corrresponding embodiments as described herein as follows.

[51717] [0001.1.8.9] to [008.1.8.9] for the disclosure of these paragraphs see [0001.1.8.8] to [008.1.8.8] above.

[51718] As described above, the essential fatty acids are necessary for humans and many mammals, for example for livestock.Essential fatty acids, such as alpha-linolenic acid, are extremely important for healing as well as maintaining good health. Compounds made from alpha-linolenic acid have been shown to decrease blood clotting and to decrease inflammatory proceses in the boody.

[51719] [0010.1.8.9] to [0011.1.8.9] for the disclosure of these paragraphs see [0010.1.8.8] to [0011.1.8.8] above.

[51720] It is an object of the present invention to develop an inexpensive process for the synthesis of linolenic acid. linolenic acid is one of the fatty acids , which are most frequently limiting.

[51721] for the disclosure of this paragraph see [0013.1.8.8] above.

[51722] Accordingly, in a first embodiment, the invention relates to a process for the production of at least one fine chemical selected from the group consisting of: linolenic acid, or, in other words, of the “fine chemical” or “fine chemical of the invention”.

[51723] The terms “fine chemical of the invention”, “fine chemical” or “the fine chemical” are used herein equally and relate in context of the paragraphs or sections [0014.1.9.9] to [0514.1.8.9] essentially to the metabolite or the metabolites indicated in column 7, application no. 9 of Tables I, II and IV in the respective line.

[51724] Further, the term “in context of any of the paragraphs [0014.1.9.9] to [0514.1.8.9]” as used herein means that for any of said paragraphs [0014.1.9.9] to [0514.1.8.9] the term “the fine chemical” is understood to follow the definition of paragraphs or sections [0014.1.9.9] and [0015.1.9.9], independently whether it refers to any other paragraph or not and whether the reference recites the term “fine chemical” in an other context.

[51725] Thus, in cases where one or more paragraphs or sections are incorporated by reference into any of the present paragraphs [0014.1.9.9] to [0514.1.8.9], e.g. by usage of the term “see paragraph” or the term “for the disclosure of this paragraph see the disclosure of paragraph” or the term “incorporated by reference” or a corresponding term, the incorporated paragraph, section or term “the fine chemical” is also understood to have the meaning according to the definition of paragraph [0014.1.9.9] and [0015.1.9.9].

[51726] Accordingly, in one embodiment, the term “fine chemical of the invention”, “fine chemical” or “the fine chemical” as used herein (alone or in combination, like in FCRP) means “linolenic acid in context of the nucleic acid or polypeptide sequences listed in the respective same line of any one of Tables I to IV of application no. 9 and indicating in column 7 the metabolite “linolenic acid”.

[51727] In one embodiment, the term linolenic acid or the term “fine chemical” mean in context of the paragraphs or sections [0014.1.9.9] to [0514.1.8.9] at least one chemical compound with an activity of the above mentioned linolenic acid, respectively.

[51728] Accordingly, in one embodiment, the terms “fine chemical of the invention”, “fine chemical” or “the fine chemical” mean in context of any of the paragraphs [0014.1.9.9] to

[51729] linolenic acid, its tryglycerides, lipids, oils and/or fats in free form or bound form. In a preferred embodiment, the term “the fine chemical” means linolenic acid in free form or e.g. in form of its tryglycerides, lipids, oils and/or fats. In a preferred embodiment “linolenic acid” means linolenic acid in free form.

[51730] In one embodiment, the term “the fine chemical” or “the respective fine chemical” mean in context of any of the paragraphs [0014.1.9.9] to [0514.1.8.9] linolenic acid and/or tryglycerides, lipids, oils and/or fats of linolenic acid, and its salts, ester, thioester or linolenic acid in free form or bound to other compounds such as triglycerides, glycolipids, phospholipids etc. In a preferred embodiment, the term “the fine chemical” means linolenic acid, in free form or its salts or bound to triglycerides. Triglycerides, lipids, oils, fats or lipid mixture thereof shall mean any triglyceride, lipid, oil and/or fat containing any bound or free linolenic acid for example sphingolipids, phosphoglycerides, lipids, glycolipids such as glycosphingolipids, phospholipids such as phosphatidylethanolamine, phosphatidylcholine, phosphatidylserine, phosphatidylglycerol, phosphatidylinositol or diphosphatidylglycerol, or as monoacylglyceride, diacylglyceride or triacylglyceride or other fatty acid esters such as acetyl-Coenzym A thioester, which contain further saturated or unsaturated fatty acids in the fatty acid molecule.

[51731] In one embodiment, the term “the fine chemical” and the term “the respective fine chemical” mean at least one chemical compound with an activity of the abovementioned fine chemical. Further, the term “in context of any of the paragraphs [0014.1.9.9] to [0514.1.8.9]” as used herein means that for any of said paragraphs [0014.1.9.9] to [0514.1.8.9] the term “the fine chemical” is understood to follow the definition of section [0014.1.9.9] or section [0015.1.9.9], independently whether it refers to any other paragraph or not and whether the reference recites the term “fine chemical” in an other context.

[51732] Thus, in cases where one or more paragraphs or sections are incorporated by reference into any of the present paragraphs [0014.1.9.9] to [0514.1.8.9], e.g. by usage of the term “see paragraph” or the term “for the disclosure of this paragraph see the disclosure of paragraph” or the term “incorporated by reference” or a corresponding term, the incorporated paragraph, section or term “the fine chemical” is also understood to have the meaning according to this definition of this paragraph [0015.1.9.9].

[51733] Further, the term “fine chemicals” as used herein relates to compositions comprising said fine chemical(s), i.e. comprising linolenic acid, respectively.

[51734] Accordingly, the present invention relates to a process for the production of linolenic acid, which comprises
[51735] (a) increasing or generating one or more activities selected from the group consisting of protein phosphatase in a non-human organism or a part thereof, preferably a microorganism, a plant cell, a plant or a part thereof, as compared to a corresponding non-transformed wild type non-human organism or a part thereof; and
[51736] (b) growing the non-human organism or a part thereof under conditions which permit the production of linolenic acid or a composition comprising linolenic acid in said non-human organism or in the culture medium surrounding said non-human organism.

[51737] Accordingly, the present invention relates to a process for the production of linolenic acid, which comprises
[51738] (a) increasing or generating one or more activities selected from the group consisting of transcription factor in a non-human organism or a part thereof, preferably a microorganism, a plant cell, a plant or a part thereof, as compared to a corresponding non-transformed wild type non-human organism or a part thereof; and
[51739] (b) growing the non-human organism or a part thereof under conditions which permit the production of linolenic acid or a composition comprising linolenic acid in said non-human organism or in the culture medium surrounding said non-human organism.

[51740] Accordingly, the present invention relates to a process for the production of linolenic acid, which comprises
[51741] (a) increasing or generating one or more activities selected from the group consisting of protein phosphatase in a non-human organism or a part thereof, preferably a microorganism, a plant cell, a plant or a part thereof, as compared to a corresponding non-transformed wild type non-human organism or a part thereof; and
[51742] (b) growing the non-human organism or a part thereof under conditions which permit the production of linolenic acid or a composition comprising linolenic acid in said non-human organism or in the culture medium surrounding said non-human organism.

[51743] Accordingly, the present invention relates to a process for the production of linolenic acid, which comprises
[51744] (a) increasing or generating one or more activities selected from the group consisting of pyruvate kinase in a non-human organism or a part thereof, preferably a microorganism, a plant cell, a plant or a part thereof, as compared to a corresponding non-transformed wild type non-human organism or a part thereof; and
[51745] (b) growing the non-human organism or a part thereof under conditions which permit the production of linolenic acid or a composition comprising linolenic acid in said non-human organism or in the culture medium surrounding said non-human organism.

[51746] Accordingly, the present invention relates to a process for the production of linolenic acid, which comprises
[51747] (a) increasing or generating one or more activities selected from the group consisting of At2g45420-protein in a non-human organism or a part thereof, preferably a microorganism, a plant cell, a plant or a part thereof, as compared to a corresponding non-transformed wild type non-human organism or a part thereof; and
[51748] (b) growing the non-human organism or a part thereof under conditions which permit the production of linolenic acid or a composition comprising linolenic acid in said non-human organism or in the culture medium surrounding said non-human organism.

[51749] Accordingly, the present invention relates to a process for the production of linolenic acid, which comprises
[51750] (a) increasing or generating one or more activities selected from the group consisting of heat shock transcription factor in a non-human organism or a part thereof, preferably a microorganism, a plant cell, a plant or a part thereof, as compared to a corresponding non-transformed wild type non-human organism or a part thereof; and
[51751] (b) growing the non-human organism or a part thereof under conditions which permit the production of linolenic acid or a composition comprising linolenic acid in said non-human organism or in the culture medium surrounding said non-human organism.

[51752] Accordingly, the present invention relates to a process for the production of linolenic acid, which comprises
[51753] (a) increasing or generating one or more activities selected from the group consisting of glutaredoxin in a non-human organism or a part thereof, preferably a microorganism, a plant cell, a plant or a part thereof, as compared to a corresponding non-transformed wild type non-human organism or a part thereof; and
[51754] (b) growing the non-human organism or a part thereof under conditions which permit the production of linolenic acid or a composition comprising linolenic acid in said non-human organism or in the culture medium surrounding said non-human organism.

[51755] Accordingly, the present invention relates to a process for the production of linolenic acid, which comprises
[51756] (a) increasing or generating one or more activities selected from the group consisting of monothiol glutaredoxin in a non-human organism or a part thereof, preferably a microorganism, a plant cell, a plant or a part thereof, as compared to a corresponding non-transformed wild type non-human organism or a part thereof; and
[51757] (b) growing the non-human organism or a part thereof under conditions which permit the production of linolenic acid or a composition comprising linolenic acid in said non-human organism or in the culture medium surrounding said non-human organism.

[51758] Accordingly, the present invention relates to a process for the production of linolenic acid, which comprises
[51759] (a) increasing or generating one or more activities selected from the group consisting of heat shock transcription factor in a non-human organism or a part thereof, preferably a microorganism, a plant cell, a plant or a part thereof, as compared to a corresponding non-transformed wild type non-human organism or a part thereof; and
[51760] (b) growing the non-human organism or a part thereof under conditions which permit the production of linolenic acid or a composition comprising linolenic acid in said non-human organism or in the culture medium surrounding said non-human organism.

[51761] Accordingly, the present invention relates to a process for the production of linolenic acid, which comprises
[51762] (a) increasing or generating one or more activities selected from the group consisting of protein phosphatase in a non-human organism or a part thereof, preferably a microorganism, a plant cell, a plant or a part thereof, as compared to a corresponding non-transformed wild type non-human organism or a part thereof; and
[51763] (b) growing the non-human organism or a part thereof under conditions which permit the production of linolenic acid or a composition comprising linolenic acid in said non-human organism or in the culture medium surrounding said non-human organism.

[51764] Accordingly, the present invention relates to a process for the production of linolenic acid, which comprises
[51765] (a) increasing or generating one or more activities selected from the group consisting of glutaredoxin in a non-human organism or a part thereof, preferably a microorganism, a plant cell, a plant or a part thereof, as compared to a corresponding non-transformed wild type non-human organism or a part thereof; and
[51766] (b) growing the non-human organism or a part thereof under conditions which permit the production of linolenic acid or a composition comprising linolenic acid in said non-human organism or in the culture medium surrounding said non-human organism.

[51767] Accordingly, the present invention relates to a process for the production of linolenic acid, which comprises
[51768] (a) increasing or generating one or more activities selected from the group consisting of heat shock transcription factor in a non-human organism or a part thereof, preferably a microorganism, a plant cell, a plant or a part thereof, as compared to a corresponding non-transformed wild type non-human organism or a part thereof; and
[51769] (b) growing the non-human organism or a part thereof under conditions which permit the production of linolenic acid or a composition comprising linolenic acid in said non-human organism or in the culture medium surrounding said non-human organism.

[51770] Accordingly, the present invention relates to a process for the production of linolenic acid, which comprises
[51771] (a) increasing or generating one or more activities selected from the group consisting of monothiol glutaredoxin in a non-human organism or a part thereof, preferably a microorganism, a plant cell, a plant or a part thereof, as compared to a corresponding non-transformed wild type non-human organism or a part thereof; and
[51772] (b) growing the non-human organism or a part thereof under conditions which permit the production of linolenic acid or a composition comprising linolenic acid in said non-human organism or in the culture medium surrounding said non-human organism.

[51773] Accordingly, the present invention relates to a process for the production of linolenic acid, which comprises
[51774] (a) increasing or generating one or more activities selected from the group consisting of protein phosphatase in a non-human organism or a part thereof, preferably a microorganism, a plant cell, a plant or a part thereof, as compared to a corresponding non-transformed wild type non-human organism or a part thereof; and
[51775] (b) growing the non-human organism or a part thereof under conditions which permit the production of linolenic acid or a composition comprising linolenic acid in said non-human organism or in the culture medium surrounding said non-human organism.

[51776] Accordingly, the present invention relates to a process for the production of linolenic acid, which comprises
[51777] (a) increasing or generating one or more activities selected from the group consisting of protein phosphatase in a non-human organism or a part thereof, preferably a microorganism, a plant cell, a plant or a part thereof, as compared to a corresponding non-transformed wild type non-human organism or a part thereof; and
[51778] (b) growing the non-human organism or a part thereof under conditions which permit the production of linolenic acid or a composition comprising linolenic acid in said non-human organism or in the culture medium surrounding said non-human organism.

[51779] Accordingly, the present invention relates to a process for the production of linolenic acid, which comprises
[51780] (a) increasing or generating one or more activities selected from the group consisting of secindependent protein translocase in a non-human organism or a part thereof, preferably a microorganism, a plant cell, a plant or a part thereof, as compared to a corresponding non-transformed wild type non-human organism or a part thereof; and
[51781] (b) growing the non-human organism or a part thereof under conditions which permit the production of linolenic acid or a composition comprising linolenic acid in said non-human organism or in the culture medium surrounding said non-human organism.

[51782] Accordingly, the present invention relates to a process for the production of linolenic acid, which comprises
[51783] (a) increasing or generating one or more activities selected from the group consisting of oxidoreductase in a non-human organism or a part thereof, preferably a microorganism, a plant cell, a plant or a part thereof, as compared to a corresponding non-transformed wild type non-human organism or a part thereof; and
[51784] (b) growing the non-human organism or a part thereof under conditions which permit the production of linolenic acid or a composition comprising linolenic acid in said non-human organism or in the culture medium surrounding said non-human organism.

[51785] Accordingly, the present invention relates to a process for the production of linolenic acid, which comprises
[51786] (a) increasing or generating one or more activities selected from the group consisting of acyl-CoA synthase in a non-human organism or a part thereof, preferably a microorganism, a plant cell, a plant or a part thereof, as compared to a corresponding non-transformed wild type non-human organism or a part thereof; and
[51787] (b) growing the non-human organism or a part thereof under conditions which permit the production of linolenic acid or a composition comprising linolenic acid in said non-human organism or in the culture medium surrounding said non-human organism.

[51788] Accordingly, the present invention relates to a process for the production of linolenic acid, which comprises
[51789] (a) increasing or generating one or more activities selected from the group consisting of oxidoreductase in a non-human organism or a part thereof, preferably a microorganism, a plant cell, a plant or a part thereof, as compared to a corresponding non-transformed wild type non-human organism or a part thereof; and
[51790] (b) growing the non-human organism or a part thereof under conditions which permit the production of linolenic acid or a composition comprising linolenic acid in said non-human organism or in the culture medium surrounding said non-human organism.

[51791] Accordingly, the present invention relates to a process for the production of linolenic acid, which comprises
[51792] (a) increasing or generating one or more activities selected from the group consisting of ThiF family protein in a non-human organism or a part thereof, preferably a microorganism, a plant cell, a plant or a part thereof, as compared to a corresponding non-transformed wild type non-human organism or a part thereof; and
[51793] (b) growing the non-human organism or a part thereof under conditions which permit the production of linolenic acid or a composition comprising linolenic acid in said non-human organism or in the culture medium surrounding said non-human organism.

[51794] Accordingly, the present invention relates to a process for the production of linolenic acid, which comprises
[51795] (a) increasing or generating one or more activities selected from the group consisting of CTP synthase in a non-human organism or a part thereof, preferably a microorganism, a plant cell, a plant or a part thereof, as compared to a corresponding non-transformed wild type non-human organism or a part thereof; and
[51796] (b) growing the non-human organism or a part thereof under conditions which permit the production of linolenic acid or a composition comprising linolenic acid in said non-human organism or in the culture medium surrounding said non-human organism.

[51797] Accordingly, the present invention relates to a process for the production of linolenic acid, which comprises
[51798] (a) increasing or generating one or more activities selected from the group consisting of recombinase A in a non-human organism or a part thereof, preferably a microorganism, a plant cell, a plant or a part thereof, as compared to a corresponding non-transformed wild type non-human organism or a part thereof; and
[51799] (b) growing the non-human organism or a part thereof under conditions which permit the production of linolenic acid or a composition comprising linolenic acid in said non-human organism or in the culture medium surrounding said non-human organism.

[51800] Accordingly, the present invention relates to a process for the production of linolenic acid, which comprises
[51801] (a) increasing or generating one or more activities selected from the group consisting of isopropylmalate isomerase large subunit in a non-human organism or a part thereof, preferably a microorganism, a plant cell, a plant or a part thereof, as compared to a corresponding non-transformed wild type non-human organism or a part thereof; and
[51802] (b) growing the non-human organism or a part thereof under conditions which permit the production of linolenic acid or a composition comprising linolenic acid in said non-human organism or in the culture medium surrounding said non-human organism.

[51803] Accordingly, the present invention relates to a process for the production of linolenic acid, which comprises
[51804] (a) increasing or generating one or more activities selected from the group consisting of HesB/YadR/YfhF family protein in a non-human organism or a part thereof, preferably a microorganism, a plant cell, a plant or a part thereof, as compared to a corresponding non-transformed wild type non-human organism or a part thereof; and
[51805] (b) growing the non-human organism or a part thereof under conditions which permit the production of linolenic acid or a composition comprising linolenic acid in said non-human organism or in the culture medium surrounding said non-human organism.

[51806] Accordingly, the present invention relates to a process for the production of linolenic acid, which comprises
[51807] (a) increasing or generating one or more activities selected from the group consisting of b0195-protein in a non-human organism or a part thereof, preferably a microorganism, a plant cell, a plant or a part thereof, as compared to a corresponding non-transformed wild type non-human organism or a part thereof; and
[51808] (b) growing the non-human organism or a part thereof under conditions which permit the production of linolenic acid or a composition comprising linolenic acid in said non-human organism or in the culture medium surrounding said non-human organism.

[51809] Accordingly, the present invention relates to a process for the production of linolenic acid, which comprises
[51810] (a) increasing or generating one or more activities selected from the group consisting of asparaginase in a non-human organism or a part thereof, preferably a microorganism, a plant cell, a plant or a part thereof, as compared to a corresponding non-transformed wild type non-human organism or a part thereof; and
[51811] (b) growing the non-human organism or a part thereof under conditions which permit the production of linolenic acid or a composition comprising linolenic acid in said non-human organism or in the culture medium surrounding said non-human organism.

[51812] Accordingly, the present invention relates to a process for the production of linolenic acid, which comprises
[51813] (a) increasing or generating one or more activities selected from the group consisting of multidrug resistance protein in a non-human organism or a part thereof, preferably a microorganism, a plant cell, a plant or a part thereof, as compared to a corresponding non-transformed wild type non-human organism or a part thereof; and
[51814] (b) growing the non-human organism or a part thereof under conditions which permit the production of linolenic acid or a composition comprising linolenic acid in said non-human organism or in the culture medium surrounding said non-human organism.

[51815] Accordingly, the present invention relates to a process for the production of linolenic acid, which comprises
[51816] (a) increasing or generating one or more activities selected from the group consisting of 3-oxoacyl-[acyl-carrier-protein] reductase in a non-human organism or a part thereof, preferably a microorganism, a plant cell, a plant or a part thereof, as compared to a corresponding non-transformed wild type non-human organism or a part thereof; and
[51817] (b) growing the non-human organism or a part thereof under conditions which permit the production of linolenic acid or a composition comprising linolenic acid in said non-human organism or in the culture medium surrounding said non-human organism.

[51818] Accordingly, the present invention relates to a process for the production of linolenic acid, which comprises
[51819] (a) increasing or generating one or more activities selected from the group consisting of 3-oxoacyl-[acyl-carrier-protein] synthase in a non-human organism or a part thereof, preferably a microorganism, a plant cell, a plant or a part thereof, as compared to a corresponding non-transformed wild type non-human organism or a part thereof; and
[51820] (b) growing the non-human organism or a part thereof under conditions which permit the production of linolenic acid or a composition comprising linolenic acid in said non-human organism or in the culture medium surrounding said non-human organism.

[51821] Accordingly, the present invention relates to a process for the production of linolenic acid, which comprises
[51822] (a) increasing or generating one or more activities selected from the group consisting of b1234-protein in a non-human organism or a part thereof, preferably a microorganism, a plant cell, a plant or a part thereof, as compared to a corresponding non-transformed wild type non-human organism or a part thereof; and
[51823] (b) growing the non-human organism or a part thereof under conditions which permit the production of linolenic acid or a composition comprising linolenic acid in said non-human organism or in the culture medium surrounding said non-human organism.

[51824] Accordingly, the present invention relates to a process for the production of linolenic acid, which comprises
[51825] (a) increasing or generating one or more activities selected from the group consisting of b1248-protein in a non-human organism or a part thereof, preferably a microorganism, a plant cell, a plant or a part thereof, as compared to a corresponding non-transformed wild type non-human organism or a part thereof; and
[51826] (b) growing the non-human organism or a part thereof under conditions which permit the production of linolenic acid or a composition comprising linolenic acid in said non-human organism or in the culture medium surrounding said non-human organism.

[51827] Accordingly, the present invention relates to a process for the production of linolenic acid, which comprises
[51828] (a) increasing or generating one or more activities selected from the group consisting of b1280-protein in a non-human organism or a part thereof, preferably a microorganism, a plant cell, a plant or a part thereof, as compared to a corresponding non-transformed wild type non-human organism or a part thereof; and
[51829] (b) growing the non-human organism or a part thereof under conditions which permit the production of linolenic acid or a composition comprising linolenic acid in said non-human organism or in the culture medium surrounding said non-human organism.

[51830] Accordingly, the present invention relates to a process for the production of linolenic acid, which comprises
[51831] (a) increasing or generating one or more activities selected from the group consisting of b1330-protein in a non-human organism or a part thereof, preferably a microorganism, a plant cell, a plant or a part thereof, as compared to a corresponding non-transformed wild type non-human organism or a part thereof; and
[51832] (b) growing the non-human organism or a part thereof under conditions which permit the production of linolenic acid or a composition comprising linolenic acid in said non-human organism or in the culture medium surrounding said non-human organism.

[51833] Accordingly, the present invention relates to a process for the production of linolenic acid, which comprises
[51834] (a) increasing or generating one or more activities selected from the group consisting of b1470-protein in a non-human organism or a part thereof, preferably a microorganism, a plant cell, a plant or a part thereof, as compared to a corresponding non-transformed wild type non-human organism or a part thereof; and
[51835] (b) growing the non-human organism or a part thereof under conditions which permit the production of linolenic acid or a composition comprising linolenic acid in said non-human organism or in the culture medium surrounding said non-human organism.

[51836] Accordingly, the present invention relates to a process for the production of linolenic acid, which comprises
[51837] (a) increasing or generating one or more activities selected from the group consisting of acid shock protein in a non-human organism or a part thereof, preferably a microorganism, a plant cell, a plant or a part thereof, as compared to a corresponding non-transformed wild type non-human organism or a part thereof; and
[51838] (b) growing the non-human organism or a part thereof under conditions which permit the production of linolenic acid or a composition comprising linolenic acid in said non-human organism or in the culture medium surrounding said non-human organism.

[51839] Accordingly, the present invention relates to a process for the production of linolenic acid, which comprises
[51840] (a) increasing or generating one or more activities selected from the group consisting of fumarate hydratase in a non-human organism or a part thereof, preferably a microorganism, a plant cell, a plant or a part thereof, as compared to a corresponding non-transformed wild type non-human organism or a part thereof; and
[51841] (b) growing the non-human organism or a part thereof under conditions which permit the production of linolenic acid or a composition comprising linolenic acid in said non-human organism or in the culture medium surrounding said non-human organism.

[51842] Accordingly, the present invention relates to a process for the production of linolenic acid, which comprises
[51843] (a) increasing or generating one or more activities selected from the group consisting of electron transport complex protein in a non-human organism or a part thereof, preferably a microorganism, a plant cell, a plant or a part thereof, as compared to a corresponding non-transformed wild type non-human organism or a part thereof; and
[51844] (b) growing the non-human organism or a part thereof under conditions which permit the production of linolenic acid or a composition comprising linolenic acid in said non-human organism or in the culture medium surrounding said non-human organism.

[51845] Accordingly, the present invention relates to a process for the production of linolenic acid, which comprises
[51846] (a) increasing or generating one or more activities selected from the group consisting of b1670-protein in a non-human organism or a part thereof, preferably a microorganism, a plant cell, a plant or a part thereof, as compared to a corresponding non-transformed wild type non-human organism or a part thereof; and
[51847] (b) growing the non-human organism or a part thereof under conditions which permit the production of linolenic acid or a composition comprising linolenic acid in said non-human organism or in the culture medium surrounding said non-human organism.

[51848] Accordingly, the present invention relates to a process for the production of linolenic acid, which comprises
[51849] (a) increasing or generating one or more activities selected from the group consisting of b1672-protein in a non-human organism or a part thereof, preferably a microorganism, a plant cell, a plant or a part thereof, as compared to a corresponding non-transformed wild type non-human organism or a part thereof; and
[51850] (b) growing the non-human organism or a part thereof under conditions which permit the production of linolenic acid or a composition comprising linolenic acid in said non-human organism or in the culture medium surrounding said non-human organism.

[51851] Accordingly, the present invention relates to a process for the production of linolenic acid, which comprises
[51852] (a) increasing or generating one or more activities selected from the group consisting of b1837-protein in a non-human organism or a part thereof, preferably a microorganism, a plant cell, a plant or a part thereof, as compared to a corresponding non-transformed wild type non-human organism or a part thereof; and
[51853] (b) growing the non-human organism or a part thereof under conditions which permit the production of linolenic acid or a composition comprising linolenic acid in said non-human organism or in the culture medium surrounding said non-human organism.

[51854] Accordingly, the present invention relates to a process for the production of linolenic acid, which comprises
[51855] (a) increasing or generating one or more activities selected from the group consisting of b2032-protein in a non-human organism or a part thereof, preferably a microorganism, a plant cell, a plant or a part thereof, as compared to a corresponding non-transformed wild type non-human organism or a part thereof; and
[51856] (b) growing the non-human organism or a part thereof under conditions which permit the production of linolenic acid or a composition comprising linolenic acid in said non-human organism or in the culture medium surrounding said non-human organism.

[51857] Accordingly, the present invention relates to a process for the production of linolenic acid, which comprises
[51858] (a) increasing or generating one or more activities selected from the group consisting of b2107-protein in a non-human organism or a part thereof, preferably a microorganism, a plant cell, a plant or a part thereof, as compared to a corresponding non-transformed wild type non-human organism or a part thereof; and
[51859] (b) growing the non-human organism or a part thereof under conditions which permit the production of linolenic acid or a composition comprising linolenic acid in said non-human organism or in the culture medium surrounding said non-human organism.

[51860] Accordingly, the present invention relates to a process for the production of linolenic acid, which comprises
[51861] (a) increasing or generating one or more activities selected from the group consisting of b2399-protein in a non-human organism or a part thereof, preferably a microorganism, a plant cell, a plant or a part thereof, as compared to a corresponding non-transformed wild type non-human organism or a part thereof; and
[51862] (b) growing the non-human organism or a part thereof under conditions which permit the production of linolenic acid or a composition comprising linolenic acid in said non-human organism or in the culture medium surrounding said non-human organism.

[51863] Accordingly, the present invention relates to a process for the production of linolenic acid, which comprises
[51864] (a) increasing or generating one or more activities selected from the group consisting of ethanolamine utilization protein in a non-human organism or a part thereof, preferably a microorganism, a plant cell, a plant or a part thereof, as compared to a corresponding non-transformed wild type non-human organism or a part thereof; and
[51865] (b) growing the non-human organism or a part thereof under conditions which permit the production of linolenic acid or a composition comprising linolenic acid in said non-human organism or in the culture medium surrounding said non-human organism.

[51866] Accordingly, the present invention relates to a process for the production of linolenic acid, which comprises
[51867] (a) increasing or generating one or more activities selected from the group consisting of b2474-protein in a non-human organism or a part thereof, preferably a microorganism, a plant cell, a plant or a part thereof, as compared to a corresponding non-transformed wild type non-human organism or a part thereof; and
[51868] (b) growing the non-human organism or a part thereof under conditions which permit the production of linolenic acid or a composition comprising linolenic acid in said non-human organism or in the culture medium surrounding said non-human organism.

[51869] Accordingly, the present invention relates to a process for the production of linolenic acid, which comprises
[51870] (a) increasing or generating one or more activities selected from the group consisting of b2613-protein in a non-human organism or a part thereof, preferably a microorganism, a plant cell, a plant or a part thereof, as compared to a corresponding non-transformed wild type non-human organism or a part thereof; and
[51871] (b) growing the non-human organism or a part thereof under conditions which permit the production of linolenic acid or a composition comprising linolenic acid in said non-human organism or in the culture medium surrounding said non-human organism.

[51872] Accordingly, the present invention relates to a process for the production of linolenic acid, which comprises
[51873] (a) increasing or generating one or more activities selected from the group consisting of b2682-protein in a non-human organism or a part thereof, preferably a microorganism, a plant cell, a plant or a part thereof, as compared to a corresponding non-transformed wild type non-human organism or a part thereof; and
[51874] (b) growing the non-human organism or a part thereof under conditions which permit the production of linolenic acid or a composition comprising linolenic acid in said non-human organism or in the culture medium surrounding said non-human organism.

[51875] Accordingly, the present invention relates to a process for the production of linolenic acid, which comprises
[51876] (a) increasing or generating one or more activities selected from the group consisting of flavodoxin in a non-human organism or a part thereof, preferably a microorganism, a plant cell, a plant or a part thereof, as compared to a corresponding non-transformed wild type non-human organism or a part thereof; and
[51877] (b) growing the non-human organism or a part thereof under conditions which permit the production of linolenic acid or a composition comprising linolenic acid in said non-human organism or in the culture medium surrounding said non-human organism.

[51878] Accordingly, the present invention relates to a process for the production of linolenic acid, which comprises
[51879] (a) increasing or generating one or more activities selected from the group consisting of AAS bifunctional protein in a non-human organism or a part thereof, preferably a microorganism, a plant cell, a plant or a part thereof, as compared to a corresponding non-transformed wild type non-human organism or a part thereof; and
[51880] (b) growing the non-human organism or a part thereof under conditions which permit the production of linolenic acid or a composition comprising linolenic acid in said non-human organism or in the culture medium surrounding said non-human organism.

[51881] Accordingly, the present invention relates to a process for the production of linolenic acid, which comprises
[51882] (a) increasing or generating one or more activities selected from the group consisting of phosphotriesterase in a non-human organism or a part thereof, preferably a microorganism, a plant cell, a plant or a part thereof, as compared to a corresponding non-transformed wild type non-human organism or a part thereof; and
[51883] (b) growing the non-human organism or a part thereof under conditions which permit the production of linolenic acid or a composition comprising linolenic acid in said non-human organism or in the culture medium surrounding said non-human organism.

[51884] Accordingly, the present invention relates to a process for the production of linolenic acid, which comprises
[51885] (a) increasing or generating one or more activities selected from the group consisting of b3442-protein in a non-human organism or a part thereof, preferably a microorganism, a plant cell, a plant or a part thereof, as compared to a corresponding non-transformed wild type non-human organism or a part thereof; and
[51886] (b) growing the non-human organism or a part thereof under conditions which permit the production of linolenic acid or a composition comprising linolenic acid in said non-human organism or in the culture medium surrounding said non-human organism.

[51887] Accordingly, the present invention relates to a process for the production of linolenic acid, which comprises
[51888] (a) increasing or generating one or more activities selected from the group consisting of b3534-protein in a non-human organism or a part thereof, preferably a microorganism, a plant cell, a plant or a part thereof, as compared to a corresponding non-transformed wild type non-human organism or a part thereof; and
[51889] (b) growing the non-human organism or a part thereof under conditions which permit the production of linolenic acid or a composition comprising linolenic acid in said non-human organism or in the culture medium surrounding said non-human organism.

[51890] Accordingly, the present invention relates to a process for the production of linolenic acid, which comprises
[51891] (a) increasing or generating one or more activities selected from the group consisting of threonine efflux protein in a non-human organism or a part thereof, preferably a microorganism, a plant cell, a plant or a part thereof, as compared to a corresponding non-transformed wild type non-human organism or a part thereof; and
[51892] (b) growing the non-human organism or a part thereof under conditions which permit the production of linolenic acid or a composition comprising linolenic acid in said non-human organism or in the culture medium surrounding said non-human organism.

[51893] Accordingly, the present invention relates to a process for the production of linolenic acid, which comprises
[51894] (a) increasing or generating one or more activities selected from the group consisting of b4023-protein in a non-human organism or a part thereof, preferably a microorganism, a plant cell, a plant or a part thereof, as compared to a corresponding non-transformed wild type non-human organism or a part thereof; and
[51895] (b) growing the non-human organism or a part thereof under conditions which permit the production of linolenic acid or a composition comprising linolenic acid in said non-human organism or in the culture medium surrounding said non-human organism.

[51896] Accordingly, the present invention relates to a process for the production of linolenic acid, which comprises
[51897] (a) increasing or generating one or more activities selected from the group consisting of glutaredoxin in a non-human organism or a part thereof, preferably a microorganism, a plant cell, a plant or a part thereof, as compared to a corresponding non-transformed wild type non-human organism or a part thereof; and
[51898] (b) growing the non-human organism or a part thereof under conditions which permit the production of linolenic acid or a composition comprising linolenic acid in said non-human organism or in the culture medium surrounding said non-human organism.

[51899] Accordingly, the present invention relates to a process for the production of linolenic acid, which comprises
[51900] (a) increasing or generating one or more activities selected from the group consisting of transcription factor in a non-human organism or a part thereof, preferably a microorganism, a plant cell, a plant or a part thereof, as compared to a corresponding non-transformed wild type non-human organism or a part thereof; and
[51901] (b) growing the non-human organism or a part thereof under conditions which permit the production of linolenic acid or a composition comprising linolenic acid in said non-human organism or in the culture medium surrounding said non-human organism.

[51902] Accordingly, the present invention relates to a process for the production of linolenic acid, which comprises
[51903] (a) increasing or generating one or more activities selected from the group consisting of branched chain amino acid ABC transporter ATP-binding protein in a non-human organism or a part thereof, preferably a microorganism, a plant cell, a plant or a part thereof, as compared to a corresponding non-transformed wild type non-human organism or a part thereof; and
[51904] (b) growing the non-human organism or a part thereof under conditions which permit the production of linolenic acid or a composition comprising linolenic acid in said non-human organism or in the culture medium surrounding said non-human organism.

[51905] Accordingly, the present invention relates to a process for the production of linolenic acid, which comprises
[51906] (a) increasing or generating one or more activities selected from the group consisting of phosphofructokinase in a non-human organism or a part thereof, preferably a microorganism, a plant cell, a plant or a part thereof, as compared to a corresponding non-transformed wild type non-human organism or a part thereof; and
[51907] (b) growing the non-human organism or a part thereof under conditions which permit the production of linolenic acid or a composition comprising linolenic acid in said non-human organism or in the culture medium surrounding said non-human organism.

[51908] Accordingly, the present invention relates to a process for the production of linolenic acid, which comprises
[51909] (a) increasing or generating one or more activities selected from the group consisting of carbon dioxide concentrating mechanism protein in a non-human organism or a part thereof, preferably a microorganism, a plant cell, a plant or a part thereof, as compared to a corresponding non-transformed wild type non-human organism or a part thereof; and
[51910] (b) growing the non-human organism or a part thereof under conditions which permit the production of linolenic acid or a composition comprising linolenic acid in said non-human organism or in the culture medium surrounding said non-human organism.

[51911] Accordingly, the present invention relates to a process for the production of linolenic acid, which comprises
[51912] (a) increasing or generating one or more activities selected from the group consisting of sll1032-protein in a non-human organism or a part thereof, preferably a microorganism, a plant cell, a plant or a part thereof, as compared to a corresponding non-transformed wild type non-human organism or a part thereof; and
[51913] (b) growing the non-human organism or a part thereof under conditions which permit the production of linolenic acid or a composition comprising linolenic acid in said non-human organism or in the culture medium surrounding said non-human organism.

[51914] Accordingly, the present invention relates to a process for the production of linolenic acid, which comprises
[51915] (a) increasing or generating one or more activities selected from the group consisting of CTP synthetase in a non-human organism or a part thereof, preferably a microorganism, a plant cell, a plant or a part thereof, as compared to a corresponding non-transformed wild type non-human organism or a part thereof; and
[51916] (b) growing the non-human organism or a part thereof under conditions which permit the production of linolenic acid or a composition comprising linolenic acid in said non-human organism or in the culture medium surrounding said non-human organism.

[51917] Accordingly, the present invention relates to a process for the production of linolenic acid, which comprises
[51918] (a) increasing or generating one or more activities selected from the group consisting of carbamoyl-phosphate synthase subunit in a non-human organism or a part thereof, preferably a microorganism, a plant cell, a plant or a part thereof, as compared to a corresponding non-transformed wild type non-human organism or a part thereof; and
[51919] (b) growing the non-human organism or a part thereof under conditions which permit the production of linolenic acid or a composition comprising linolenic acid in said non-human organism or in the culture medium surrounding said non-human organism.

[51920] Accordingly, the present invention relates to a process for the production of linolenic acid, which comprises
[51921] (a) increasing or generating one or more activities selected from the group consisting of acyl transferase in a non-human organism or a part thereof, preferably a microorganism, a plant cell, a plant or a part thereof, as compared to a corresponding non-transformed wild type non-human organism or a part thereof; and
[51922] (b) growing the non-human organism or a part thereof under conditions which permit the production of linolenic acid or a composition comprising linolenic acid in said non-human organism or in the culture medium surrounding said non-human organism.

[51923] Accordingly, the present invention relates to a process for the production of linolenic acid, which comprises
[51924] (a) increasing or generating one or more activities selected from the group consisting of coproporphyrinogen III oxidase in a non-human organism or a part thereof, preferably a microorganism, a plant cell, a plant or a part thereof, as compared to a corresponding non-transformed wild type non-human organism or a part thereof; and
[51925] (b) growing the non-human organism or a part thereof under conditions which permit the production of linolenic acid or a composition comprising linolenic acid in said non-human organism or in the culture medium surrounding said non-human organism.

[51926] Accordingly, the present invention relates to a process for the production of linolenic acid, which comprises
[51927] (a) increasing or generating one or more activities selected from the group consisting of cation-transporting ATPase in a non-human organism or a part thereof, preferably a microorganism, a plant cell, a plant or a part thereof, as compared to a corresponding non-transformed wild type non-human organism or a part thereof; and
[51928] (b) growing the non-human organism or a part thereof under conditions which permit the production of linolenic acid or a composition comprising linolenic acid in said non-human organism or in the culture medium surrounding said non-human organism.

[51929] Accordingly, the present invention relates to a process for the production of linolenic acid, which comprises
[51930] (a) increasing or generating one or more activities selected from the group consisting of oxidoreductase in a non-human organism or a part thereof, preferably a microorganism, a plant cell, a plant or a part thereof, as compared to a corresponding non-transformed wild type non-human organism or a part thereof; and
[51931] (b) growing the non-human organism or a part thereof under conditions which permit the production of linolenic acid or a composition comprising linolenic acid in said non-human organism or in the culture medium surrounding said non-human organism.

[51932] Accordingly, the present invention relates to a process for the production of linolenic acid, which comprises
[51933] (a) increasing or generating one or more activities selected from the group consisting of bifunctional purine biosynthesis protein in a non-human organism or a part thereof, preferably a microorganism, a plant cell, a plant or a part thereof, as compared to a corresponding non-transformed wild type non-human organism or a part thereof; and
[51934] (b) growing the non-human organism or a part thereof under conditions which permit the production of linolenic acid or a composition comprising linolenic acid in said non-human organism or in the culture medium surrounding said non-human organism.

[51935] Accordingly, the present invention relates to a process for the production of linolenic acid, which comprises
[51936] (a) increasing or generating one or more activities selected from the group consisting of permease protein of ABC transporter in a non-human organism or a part thereof, preferably a microorganism, a plant cell, a plant or a part thereof, as compared to a corresponding non-transformed wild type non-human organism or a part thereof; and
[51937] (b) growing the non-human organism or a part thereof under conditions which permit the production of linolenic acid or a composition comprising linolenic acid in said non-human organism or in the culture medium surrounding said non-human organism.

[51938] Accordingly, the present invention relates to a process for the production of linolenic acid, which comprises
[51939] (a) increasing or generating one or more activities selected from the group consisting of aromatic acid decarboxylase in a non-human organism or a part thereof, preferably a microorganism, a plant cell, a plant or a part thereof, as compared to a corresponding non-transformed wild type non-human organism or a part thereof; and
[51940] (b) growing the non-human organism or a part thereof under conditions which permit the production of linolenic acid or a composition comprising linolenic acid in said non-human organism or in the culture medium surrounding said non-human organism.

[51941] Accordingly, the present invention relates to a process for the production of linolenic acid, which comprises
[51942] (a) increasing or generating one or more activities selected from the group consisting of phosphate import ATP-binding protein in a non-human organism or a part thereof, preferably a microorganism, a plant cell, a plant or a part thereof, as compared to a corresponding non-transformed wild type non-human organism or a part thereof; and
[51943] (b) growing the non-human organism or a part thereof under conditions which permit the production of linolenic acid or a composition comprising linolenic acid in said non-human organism or in the culture medium surrounding said non-human organism.

[51944] Accordingly, the present invention relates to a process for the production of linolenic acid, which comprises
[51945] (a) increasing or generating one or more activities selected from the group consisting of arginine decarboxylase in a non-human organism or a part thereof, preferably a microorganism, a plant cell, a plant or a part thereof, as compared to a corresponding non-transformed wild type non-human organism or a part thereof; and
[51946] (b) growing the non-human organism or a part thereof under conditions which permit the production of linolenic acid or a composition comprising linolenic acid in said non-human organism or in the culture medium surrounding said non-human organism.

[51947] Accordingly, the present invention relates to a process for the production of linolenic acid, which comprises
[51948] (a) increasing or generating one or more activities selected from the group consisting of phosphoadenosine phosphosulfate reductase in a non-human organism or a part thereof, preferably a microorganism, a plant cell, a plant or a part thereof, as compared to a corresponding non-transformed wild type non-human organism or a part thereof; and
[51949] (b) growing the non-human organism or a part thereof under conditions which permit the production of linolenic acid or a composition comprising linolenic acid in said non-human organism or in the culture medium surrounding said non-human organism.

[51950] Accordingly, the present invention relates to a process for the production of linolenic acid, which comprises
[51951] (a) increasing or generating one or more activities selected from the group consisting of threonine dehydratase in a non-human organism or a part thereof, preferably a microorganism, a plant cell, a plant or a part thereof, as compared to a corresponding non-transformed wild type non-human organism or a part thereof; and
[51952] (b) growing the non-human organism or a part thereof under conditions which permit the production of linolenic acid or a composition comprising linolenic acid in said non-human organism or in the culture medium surrounding said non-human organism.

[51953] Accordingly, the present invention relates to a process for the production of linolenic acid, which comprises
[51954] (a) increasing or generating one or more activities selected from the group consisting of metal-dependent hydrolase in a non-human organism or a part thereof, preferably a microorganism, a plant cell, a plant or a part thereof, as compared to a corresponding non-transformed wild type non-human organism or a part thereof; and
[51955] (b) growing the non-human organism or a part thereof under conditions which permit the production of linolenic acid or a composition comprising linolenic acid in said non-human organism or in the culture medium surrounding said non-human organism.

[51956] Accordingly, the present invention relates to a process for the production of linolenic acid, which comprises
[51957] (a) increasing or generating one or more activities selected from the group consisting of TTC1386-protein in a non-human organism or a part thereof, preferably a microorganism, a plant cell, a plant or a part thereof, as compared to a corresponding non-transformed wild type non-human organism or a part thereof; and
[51958] (b) growing the non-human organism or a part thereof under conditions which permit the production of linolenic acid or a composition comprising linolenic acid in said non-human organism or in the culture medium surrounding said non-human organism.

[51959] Accordingly, the present invention relates to a process for the production of linolenic acid, which comprises
[51960] (a) increasing or generating one or more activities selected from the group consisting of acid phosphatase precursor in a non-human organism or a part thereof, preferably a microorganism, a plant cell, a plant or a part thereof, as compared to a corresponding non-transformed wild type non-human organism or a part thereof; and
[51961] (b) growing the non-human organism or a part thereof under conditions which permit the production of linolenic acid or a composition comprising linolenic acid in said non-human organism or in the culture medium surrounding said non-human organism.

[51962] Accordingly, the present invention relates to a process for the production of linolenic acid, which comprises
[51963] (a) increasing or generating one or more activities selected from the group consisting of glycerol-3-phosphate dehydrogenase in a non-human organism or a part thereof, preferably a microorganism, a plant cell, a plant or a part thereof, as compared to a corresponding non-transformed wild type non-human organism or a part thereof; and
[51964] (b) growing the non-human organism or a part thereof under conditions which permit the production of linolenic acid or a composition comprising linolenic acid in said non-human organism or in the culture medium surrounding said non-human organism.

[51965] Accordingly, the present invention relates to a process for the production of linolenic acid, which comprises
[51966] (a) increasing or generating one or more activities selected from the group consisting of cell division control protein in a non-human organism or a part thereof, preferably a microorganism, a plant cell, a plant or a part thereof, as compared to a corresponding non-transformed wild type non-human organism or a part thereof; and
[51967] (b) growing the non-human organism or a part thereof under conditions which permit the production of linolenic acid or a composition comprising linolenic acid in said non-human organism or in the culture medium surrounding said non-human organism.

[51968] Accordingly, the present invention relates to a process for the production of linolenic acid, which comprises
[51969] (a) increasing or generating one or more activities selected from the group consisting of branched-chain amino acid permease in a non-human organism or a part thereof, preferably a microorganism, a plant cell, a plant or a part thereof, as compared to a corresponding non-transformed wild type non-human organism or a part thereof; and
[51970] (b) growing the non-human organism or a part thereof under conditions which permit the production of linolenic acid or a composition comprising linolenic acid in said non-human organism or in the culture medium surrounding said non-human organism.

[51971] Accordingly, the present invention relates to a process for the production of linolenic acid, which comprises
[51972] (a) increasing or generating one or more activities selected from the group consisting of F-box protein in a non-human organism or a part thereof, preferably a microorganism, a plant cell, a plant or a part thereof, as compared to a corresponding non-transformed wild type non-human organism or a part thereof; and
[51973] (b) growing the non-human organism or a part thereof under conditions which permit the production of linolenic acid or a composition comprising linolenic acid in said non-human organism or in the culture medium surrounding said non-human organism.

[51974] Accordingly, the present invention relates to a process for the production of linolenic acid, which comprises
[51975] (a) increasing or generating one or more activities selected from the group consisting of ydr339c-protein in a non-human organism or a part thereof, preferably a microorganism, a plant cell, a plant or a part thereof, as compared to a corresponding non-transformed wild type non-human organism or a part thereof; and
[51976] (b) growing the non-human organism or a part thereof under conditions which permit the production of linolenic acid or a composition comprising linolenic acid in said non-human organism or in the culture medium surrounding said non-human organism.

[51977] Accordingly, the present invention relates to a process for the production of linolenic acid, which comprises
[51978] (a) increasing or generating one or more activities selected from the group consisting of ydr507c-protein in a non-human organism or a part thereof, preferably a microorganism, a plant cell, a plant or a part thereof, as compared to a corresponding non-transformed wild type non-human organism or a part thereof; and
[51979] (b) growing the non-human organism or a part thereof under conditions which permit the production of linolenic acid or a composition comprising linolenic acid in said non-human organism or in the culture medium surrounding said non-human organism.

[51980] Accordingly, the present invention relates to a process for the production of linolenic acid, which comprises
[51981] (a) increasing or generating one or more activities selected from the group consisting of dihydroxyacetone kinase in a non-human organism or a part thereof, preferably a microorganism, a plant cell, a plant or a part thereof, as compared to a corresponding non-transformed wild type non-human organism or a part thereof; and
[51982] (b) growing the non-human organism or a part thereof under conditions which permit the production of linolenic acid or a composition comprising linolenic acid in said non-human organism or in the culture medium surrounding said non-human organism.

[51983] Accordingly, the present invention relates to a process for the production of linolenic acid, which comprises
[51984] (a) increasing or generating one or more activities selected from the group consisting of oxidoreductase in a non-human organism or a part thereof, preferably a microorganism, a plant cell, a plant or a part thereof, as compared to a corresponding non-transformed wild type non-human organism or a part thereof; and
[51985] (b) growing the non-human organism or a part thereof under conditions which permit the production of linolenic acid or a composition comprising linolenic acid in said non-human organism or in the culture medium surrounding said non-human organism.

[51986] Accordingly, the present invention relates to a process for the production of linolenic acid, which comprises
[51987] (a) increasing or generating one or more activities selected from the group consisting of DnaJ-like chaperone in a non-human organism or a part thereof, preferably a microorganism, a plant cell, a plant or a part thereof, as compared to a corresponding non-transformed wild type non-human organism or a part thereof; and
[51988] (b) growing the non-human organism or a part thereof under conditions which permit the production of linolenic acid or a composition comprising linolenic acid in said non-human organism or in the culture medium surrounding said non-human organism.

[51989] Accordingly, the present invention relates to a process for the production of linolenic acid, which comprises
[51990] (a) increasing or generating one or more activities selected from the group consisting of ymr013c-protein in a non-human organism or a part thereof, preferably a microorganism, a plant cell, a plant or a part thereof, as compared to a corresponding non-transformed wild type non-human organism or a part thereof; and
[51991] (b) growing the non-human organism or a part thereof under conditions which permit the production of linolenic acid or a composition comprising linolenic acid in said non-human organism or in the culture medium surrounding said non-human organism.

[51992] Accordingly, the present invention relates to a process for the production of linolenic acid, which comprises
[51993] (a) increasing or generating one or more activities selected from the group consisting of molecular chaperone in a non-human organism or a part thereof, preferably a microorganism, a plant cell, a plant or a part thereof, as compared to a corresponding non-transformed wild type non-human organism or a part thereof; and
[51994] (b) growing the non-human organism or a part thereof under conditions which permit the production of linolenic acid or a composition comprising linolenic acid in said non-human organism or in the culture medium surrounding said non-human organism.

[51995] Accordingly, the present invention relates to a process for the production of linolenic acid, which comprises
[51996] (a) increasing or generating one or more activities selected from the group consisting of ATPase epsilon subunit in a non-human organism or a part thereof, preferably a microorganism, a plant cell, a plant or a part thereof, as compared to a corresponding non-transformed wild type non-human organism or a part thereof; and
[51997] (b) growing the non-human organism or a part thereof under conditions which permit the production of linolenic acid or a composition comprising linolenic acid in said non-human organism or in the culture medium surrounding said non-human organism.

[51998] Accordingly, the present invention relates to a process for the production of linolenic acid, which comprises
[51999] (a) increasing or generating one or more activities selected from the group consisting of glucose-6-phosphate 1-dehydrogenase in a non-human organism or a part thereof, preferably a microorganism, a plant cell, a plant or a part thereof, as compared to a corresponding non-transformed wild type non-human organism or a part thereof; and
[52000] (b) growing the non-human organism or a part thereof under conditions which permit the production of linolenic acid or a composition comprising linolenic acid in said non-human organism or in the culture medium surrounding said non-human organism.

[52001] An embodiment of the present invention relates to a process for the production of linolenic acid, which comprises
[52002] (a1) increasing or generating the activity of a polypeptide comprising a polypeptide as depicted in a respective line in column 5 or 8 of Table II, application no. 9, or a homolog or a fragment thereof, a consensus sequence or at least one polypeptide motif as depicted in the respective line in column 8 of Table IV, application no. 9; or
[52003] (a2) increasing or generating the activity of an expression product of one or more nucleic acid molecule(s) comprising a polynucleotide as depicted in the respective line in column 5 or 8 of Table I, application no. 9, preferably the coding region thereof, or a homolog or a fragment thereof; or
[52004] (a3) increasing or generating the activity of a functional equivalent of (a1) or (a2); in a non-human organism or a part thereof; preferably a microorganism, a plant cell, a plant or a part thereof, as compared to a corresponding non-transformed wild type non-human organism or a part thereof; and
[52005] (b) growing the non-human organism under conditions which permit the production of linolenic acid or a composition comprising linolenic acid in said non-human organism or in the culture medium surrounding said non-human organism.

[52006] Accordingly, the increase or generation of one or more said activities is for example conferred by one or more expression products of said nucleic acid molecule, e.g. proteins. Accordingly, in the present invention described above, the increase or generation of one or more said activities is for example conferred by one or more protein(s) each comprising a polypeptide selected from the group as depicted in Table II, application no. 9, column 5 and 8, or a homolog or a fragment thereof.

[52007] The process of the invention comprises in one embodiment the following steps:
[52008] (i) increasing or generating of the expression of; and/or
[52009] (ii) increasing or generating the expression of an expression product of; and/or
[52010] (iii) increasing or generating one or more activities of an expression product encoded by;
[52011] at least one nucleic acid molecule (in the following “Fine Chemical Related Protein (FCRP)”encoding gene or “FCRP”-gene) comprising a nucleic acid molecule selected from the group consisting of:
[52012] (a) a nucleic acid molecule encoding the polypeptide shown in column 5 or 8 of Table II, preferably Table II B, application no. 9, or a homolog or a fragment thereof;
[52013] (b) a nucleic acid molecule shown in column 5 or 8 of Table I, preferably Table I B, application no. 9, or a homolog or a fragment thereof (preferably the coding region thereof);
[52014] (c) a nucleic acid molecule, which, as a result of the degeneracy of the genetic code, can be derived from a polypeptide sequence depicted in column 5 or 8 of Table II, preferably Table II B, application no. 9;
[52015] (d) a nucleic acid molecule having at least 30%, in particular at least 50%, 60%, 70%, 80%, 85%, 90%, 95%, 97%, 98%, 99% or 99.5% identity with the nucleic acid molecule sequence of a polynucleotide comprising the nucleic acid molecule shown in column 5 or 8 of Table I, preferably Table I B, application no. 9, or the coding region thereof;
[52016] (e) a nucleic acid molecule encoding a polypeptide having at least 30%, in particular 50%, 60%, 70%, 80%, 85%, 90%, 95%, 97%, 98%, 99% or 99.5% identity with the amino acid sequence of the polypeptide encoded by the nucleic acid molecule of (a), (b), (c) or (d),
[52017] (f) a nucleic acid molecule which hybridizes with a nucleic acid molecule of (a), (b), (c), (d) or (e) under stringent hybridization conditions;
[52018] (g) a nucleic acid molecule encoding a polypeptide which can be isolated with the aid of monoclonal or polyclonal antibodies made against a polypeptide encoded by one of the nucleic acid molecules of (a), (b), (c), (d), (e) or (f);
[52019] (h) a nucleic acid molecule encoding a polypeptide comprising the consensus sequence or one or more polypeptide motifs as shown in column 8 of Table IV, application no. 9;
[52020] (i) a nucleic acid molecule encoding a polypeptide having the activity represented by a respective protein as depicted in column 5 of Table II, application no. 9;
[52021] (j) a nucleic acid molecule which comprises a polynucleotide, which is obtained by amplifying a cDNA library or a genomic library using the primers as depicted in column 8 of Table III, application no. 9; and
[52022] (k) a nucleic acid molecule which is obtainable by screening a suitable nucleic acid library, especially a cDNA library and/or a genomic library, under stringent hybridization conditions with a probe comprising a complementary sequence of a nucleic acid molecule of (a), (b), (c), (d), (e), (f), (g), (h), (i) or (j) or with a fragment thereof, having at least 15 nt, preferably 20 nt, 30 nt, 50 nt, 100 nt, 200 nt, 500 nt, 1000 nt, 1500 nt, 2000 nt or 3000 nt of a nucleic acid molecule complementary to a nucleic acid molecule sequence characterized in (a), (b), (c), (d), (e), (f), (g), (h), (i) or (j);
[52023] or a nucleic acid molecule comprising a sequence which is complementary thereto.
   (All the references to Tables I to IV are references to the corresponding lines of Tables I to IV.)

[52024] The term “increasing or generating of the expression of” may also be interchanged by the term “overexpressing”.

[52025] In a preferred embodiment thereof said nucleic acid molecule encodes a polypeptide which has the activity of the polypeptide represented by a protein comprising a polypeptide as depicted in the corresponding hit in column 5 of Table II, application no. 9.

[52026] In another preferred embodiment thereof said nucleic acid molecule confers a generation or an increase of the respective fine chemical in a non-human organism or a part thereof as compared to a corresponding wild-type non-human organism or part thereof.

[52027] In another preferred embodiment thereof said nucleic acid molecule encodes a polypeptide which has the activity of the polypeptide represented by a protein as depicted in the corresponding hit in column 5 of Table II, application no. 9, and confers a generation or an increase of the respective fine chemical in a non-human organism or a part thereof as compared to a corresponding wild-type non-human organism or part thereof.

[52028] Accordingly, the genes of the present invention or used in accordance with the present invention, which respectively encode a protein having an activity of 3-oxoacyl-[acyl-carrier-protein] reductase, 3-oxoacyl-[acyl-carrier-protein] synthase, AAS bifunctional protein, acid phosphatase precursor, acid shock protein, acyl transferase, acyl-CoA synthase, arginine decarboxylase, aromatic acid decarboxylase, asparaginase, At2g45420-protein, ATPase epsilon subunit, b0195-protein, b1234-protein, b1248-protein, b1280-protein, b1330-protein, b1470-protein, b1670-protein, b1672-protein, b1837-protein, b2032-protein, b2107-protein, b2399-protein, b2474-protein, b2613-protein, b2682-protein, b3442-protein, b3534-protein, b4023-protein, bifunctional purine biosynthesis protein, branched chain amino acid ABC transporter ATP-binding protein, branched-chain amino acid permease, carbamoyl-phosphate synthase subunit, carbon dioxide concentrating mechanism protein, cation-transporting ATPase, cell division control protein, coproporphyrinogen III oxidase, CTP synthase, CTP synthetase, dihydroxyacetone kinase, DnaJ-like chaperone, electron transport complex protein, ethanolamine utilization protein, F-box protein, flavodoxin, fumarate hydratase, glucose-6-phosphate 1-dehydrogenase, glutaredoxin, glycerol-3-phosphate dehydrogenase, heat shock transcription factor, HesB/YadR/YfhF family protein, isopropylmalate isomerase large subunit, metal-dependent hydrolase, molecular chaperone, monothiol glutaredoxin, multidrug resistance protein, oxidoreductase, permease protein of ABC transporter, phosphate import ATP-binding protein, phosphoadenosine phosphosulfate reductase , phosphofructokinase, phosphotriesterase, protein phosphatase, pyruvate kinase, recombinase A, sec-independent protein translocase, sll1032-protein, ThiF family protein, threonine dehydratase, threonine efflux protein, transcription factor, TTC1386-protein, ydr339c-protein, ydr507c-protein, or ymr013c-protein, which respectively encode a protein comprising a polypeptide encoded by a nucleic acid sequence as shown in Table I, application no. 9, column 5 or 8, (preferably the coding region thereof), or a homolog or a fragment thereof, which respectively encode a protein comprising a polypeptide as depicted in Table II, application no. 9, column 5 or 8, or a homolg or a fragment thereof, and/or which respectively can be amplified with the primer set shown in Table III, application no. 9, column 8, are also referred to as “FCRP genes”.

[52029] Proteins or polypeptides encoded by “FCRP-genes” are referred to as “Fine Chemical Related Proteins” or “FCRP”. For the purposes of the description of the present invention, the respective protein having an activity of 3-oxoacyl-[acyl-carrier-protein] reductase, 3-oxoacyl-[acyl-carrier-protein] synthase, AAS bifunctional protein, acid phosphatase precursor, acid shock protein, acyl transferase, acyl-CoA synthase, arginine decarboxylase, aromatic acid decarboxylase, asparaginase, At2g45420-protein, ATPase epsilon subunit, b0195-protein, b1234-protein, b1248-protein, b1280-protein, b1330-protein, b1470-protein, b1670-protein, b1672-protein, b1837-protein, b2032-protein, b2107-protein, b2399-protein, b2474-protein, b2613-protein, b2682-protein, b3442-protein, b3534-protein, b4023-protein, bifunctional purine biosynthesis protein, branched chain amino acid ABC transporter ATP-binding protein, branched-chain amino acid permease, carbamoyl-phosphate synthase subunit, carbon dioxide concentrating mechanism protein, cation-transporting ATPase, cell division control protein, coproporphyrinogen III oxidase, CTP synthase, CTP synthetase, dihydroxyacetone kinase, DnaJ-like chaperone, electron transport complex protein, ethanolamine utilization protein, F-box protein, flavodoxin, fumarate hydratase, glucose-6-phosphate 1-dehydrogenase, glutaredoxin, glycerol-3-phosphate dehydrogenase, heat shock transcription factor, HesB/YadR/YfhF family protein, isopropylmalate isomerase large subunit, metal-dependent hydrolase, molecular chaperone, monothiol glutaredoxin, multidrug resistance protein, oxidoreductase, permease protein of ABC transporter, phosphate import ATP-binding protein, phosphoadenosine phosphosulfate reductase , phosphofructokinase, phosphotriesterase, protein phosphatase, pyruvate kinase, recombinase A, sec-independent protein translocase, sll1032-protein, ThiF family protein, threonine dehydratase, threonine efflux protein, transcription factor, TTC1386-protein, ydr339c-protein, ydr507c-protein, or ymr013c-protein, the respective protein comprising a polypeptide encoded by one or more respective nucleic acid sequences as shown in Table I, application no. 9, column 5 or 8, (preferably the coding region thereof), or a homolog or fragment thereof, the respective protein comprising a respective polypeptide as depicted in Table II, application no. 9, column 5 or 8, or a homolog or fragment thereof, the respective protein comprising a sequence corresponding to the consensus sequence as shown in Table IV, application no. 9, column 8, and/or the respective protein comprising at least one polypeptide motif as shown in Table IV, application no. 9, column 8 is also referred to as Fine Chemical Related Protein” or “FCRP”.

[52030] Thus, in one embodiment, the present invention provides a process of the production of linolenic acid, by increasing or generating one or more activities, especially selected from the group consisting of 3-oxoacyl-[acyl-carrier-protein] reductase, 3-oxoacyl-[acyl-carrier-protein] synthase, AAS bifunctional protein, acid phosphatase precursor, acid shock protein, acyl transferase, acyl-CoA synthase, arginine decarboxylase, aromatic acid decarboxylase, asparaginase, At2g45420-protein, ATPase epsilon subunit, b0195-protein, b1234-protein, b1248-protein, b1280-protein, b1330-protein, b1470-protein, b1670-protein, b1672-protein, b1837-protein, b2032-protein, b2107-protein, b2399-protein, b2474-protein, b2613-protein, b2682-protein, b3442-protein, b3534-protein, b4023-protein, bifunctional purine biosynthesis protein, branched chain amino acid ABC transporter ATP-binding protein, branched-chain amino acid permease, carbamoyl-phosphate synthase subunit, carbon dioxide concentrating mechanism protein, cation-transporting ATPase, cell division control protein, coproporphyrinogen III oxidase, CTP synthase, CTP synthetase, dihydroxyacetone kinase, DnaJ-like chaperone, electron transport complex protein, ethanolamine utilization protein, F-box protein, flavodoxin, fumarate hydratase, glucose-6-phosphate 1-dehydrogenase, glutaredoxin, glycerol-3-phosphate dehydrogenase, heat shock transcription factor, HesB/YadR/YfhF family protein, isopropylmalate isomerase large subunit, metal-dependent hydrolase, molecular chaperone, monothiol glutaredoxin, multidrug resistance protein, oxidoreductase, permease protein of ABC transporter, phosphate import ATP-binding protein, phosphoadenosine phosphosulfate reductase, phosphofructokinase, phosphotriesterase, protein phosphatase, pyruvate kinase, recombinase A, sec-independent protein translocase, sll1032-protein, ThiF family protein, threonine dehydratase, threonine efflux protein, transcription factor, TTC1386-protein, ydr339c-protein, ydr507c-protein, and ymr013c-protein, which is conferred by one or more FCRPs or the gene product of one or more FCRP-genes, for example by the gene product of a nucleic acid sequences comprising a polynucleotide selected from the group as shown in Table I, application no. 9, column 5 or 8, (preferably by the coding region thereof), or a homolog or a fragment thereof, e.g. or by one or more proteins each comprising a polypeptide encoded by one or more nucleic acid sequences selected from the group as shown in Table I, application no. 9, column 5 or 8, (preferably by the coding region thereof), or a homolog or a fragment thereof, or by one or more protein(s) each comprising a polypeptide selected from the group as depicted in Table II, application no. 9, column 5 and 8, or a homolog thereof, or a protein comprising a sequence corresponding to the consensus sequence or comprising at least one polypeptide motif as shown in Table IV, application no. 9, column 8.

[52031] for the disclosure of this paragraph see [0025.1.8.8] above.

[52032] In an embodiment, the process comprises increasing or generating the activity of one or more polypeptides having said activity, e.g.

[52033] by generating or increasing the amount and/or specific activity in the cell or a compartment of a cell of one of more FCRP, especially selected from the group consisting of 3-oxoacyl-[acyl-carrier-protein] reductase, 3-oxoacyl-[acyl-carrier-protein] synthase, AAS bifunctional protein, acid phosphatase precursor, acid shock protein, acyl transferase, acyl-CoA synthase, arginine decarboxylase, aromatic acid decarboxylase, asparaginase, At2g45420-protein, ATPase epsilon subunit, b0195-protein, b1234-protein, b1248-protein, b1280-protein, b1330-protein, b1470-protein, b1670-protein, b1672-protein, b1837-protein, b2032-protein, b2107-protein, b2399-protein, b2474-protein, b2613-protein, b2682-protein, b3442-protein, b3534-protein, b4023-protein, bifunctional purine biosynthesis protein, branched chain amino acid ABC transporter ATP-binding protein, branched-chain amino acid permease, carbamoyl-phosphate synthase subunit, carbon dioxide concentrating mechanism protein, cation-transporting ATPase, cell division control protein, coproporphyrinogen III oxidase, CTP synthase, CTP synthetase, dihydroxyacetone kinase, DnaJ-like chaperone, electron transport complex protein, ethanolamine utilization protein, F-box protein, flavodoxin, fumarate hydratase, glucose-6-phosphate 1-dehydrogenase, glutaredoxin, glycerol-3-phosphate dehydrogenase, heat shock transcription factor, HesB/YadR/YfhF family protein, isopropylmalate isomerase large subunit, metal-dependent hydrolase, molecular chaperone, monothiol glutaredoxin, multidrug resistance protein, oxidoreductase, permease protein of ABC transporter, phosphate import ATP-binding protein, phosphoadenosine phosphosulfate reductase , phosphofructokinase, phosphotriesterase, protein phosphatase, pyruvate kinase, recombinase A, sec-independent protein translocase, sll1032-protein, ThiF family protein, threonine dehydratase, threonine efflux protein, transcription factor, TTC1386-protein, ydr339c-protein, ydr507c-protein, and ymr013c-protein, for example of the respective polypeptide as depicted in Table II, application no. 9, column 5 and 8, or a homolog or a fragment thereof, or the respective polypeptide comprising a sequence corresponding to the consensus sequences as shown in Table IV, application no. 9, column 8, or the respective polypeptide comprising at least one polypeptide motif as depicted in Table IV, application no. 9, column 8.

[52034] A further embodiment of the present invention relates to a process for the production of linolenic acid, which comprises
[52035] (a) increasing or generating the activity of a protein phosphatase non-targeted in a non-human organism or a part thereof, preferably a microorganism, a plant cell, a plant or a part thereof, as compared to a corresponding non-transformed wild type non-human organism or a part thereof; and
[52036] (b) growing the non-human organism or a part thereof under conditions which permit the production of linolenic acid or a composition comprising linolenic acid in said non-human organism or in the culture medium surrounding said non-human organism.

[52037] A further embodiment of the present invention relates to a process for the production of linolenic acid, which comprises
[52038] (a) increasing or generating the activity of a transcription factor non-targeted in a non-human organism or a part thereof, preferably a microorganism, a plant cell, a plant or a part thereof, as compared to a corresponding non-transformed wild type non-human organism or a part thereof; and
[52039] (b) growing the non-human organism or a part thereof under conditions which permit the production of linolenic acid or a composition comprising linolenic acid in said non-human organism or in the culture medium surrounding said non-human organism.

[52040] A further embodiment of the present invention relates to a process for the production of linolenic acid, which comprises
[52041] (a) increasing or generating the activity of a protein phosphatase non-targeted in a non-human organism or a part thereof, preferably a microorganism, a plant cell, a plant or a part thereof, as compared to a corresponding non-transformed wild type non-human organism or a part thereof; and
[52042] (b) growing the non-human organism or a part thereof under conditions which permit the production of linolenic acid or a composition comprising linolenic acid in said non-human organism or in the culture medium surrounding said non-human organism.

[52043] A further embodiment of the present invention relates to a process for the production of linolenic acid, which comprises
[52044] (a) increasing or generating the activity of a pyruvate kinase non-targeted in a non-human organism or a part thereof, preferably a microorganism, a plant cell, a plant or a part thereof, as compared to a corresponding non-transformed wild type non-human organism or a part thereof; and
[52045] (b) growing the non-human organism or a part thereof under conditions which permit the production of linolenic acid or a composition comprising linolenic acid in said non-human organism or in the culture medium surrounding said non-human organism.

[52046] A further embodiment of the present invention relates to a process for the production of linolenic acid, which comprises
[52047] (a) increasing or generating the activity of a At2g45420-protein non-targeted in a non-human organism or a part thereof, preferably a microorganism, a plant cell, a plant or a part thereof, as compared to a corresponding non-transformed wild type non-human organism or a part thereof; and
[52048] (b) growing the non-human organism or a part thereof under conditions which permit the production of linolenic acid or a composition comprising linolenic acid in said non-human organism or in the culture medium surrounding said non-human organism.

[52049] A further embodiment of the present invention relates to a process for the production of linolenic acid, which comprises
[52050] (a) increasing or generating the activity of a heat shock transcription factor non-targeted in a non-human organism or a part thereof, preferably a microorganism, a plant cell, a plant or a part thereof, as compared to a corresponding non-transformed wild type non-human organism or a part thereof; and
[52051] (b) growing the non-human organism or a part thereof under conditions which permit the production of linolenic acid or a composition comprising linolenic acid in said non-human organism or in the culture medium surrounding said non-human organism.

[52052] A further embodiment of the present invention relates to a process for the production of linolenic acid, which comprises
[52053] (a) increasing or generating the activity of a glutaredoxin non-targeted in a non-human organism or a part thereof, preferably a microorganism, a plant cell, a plant or a part thereof, as compared to a corresponding non-transformed wild type non-human organism or a part thereof; and
[52054] (b) growing the non-human organism or a part thereof under conditions which permit the production of linolenic acid or a composition comprising linolenic acid in said non-human organism or in the culture medium surrounding said non-human organism.

[52055] A further embodiment of the present invention relates to a process for the production of linolenic acid, which comprises
[52056] (a) increasing or generating the activity of a monothiol glutaredoxin non-targeted in a non-human organism or a part thereof, preferably a microorganism, a plant cell, a plant or a part thereof, as compared to a corresponding non-transformed wild type non-human organism or a part thereof; and
[52057] (b) growing the non-human organism or a part thereof under conditions which permit the production of linolenic acid or a composition comprising linolenic acid in said non-human organism or in the culture medium surrounding said non-human organism.

[52058] A further embodiment of the present invention relates to a process for the production of linolenic acid, which comprises
[52059] (a) increasing or generating the activity of a heat shock transcription factor non-targeted in a non-human organism or a part thereof, preferably a microorganism, a plant cell, a plant or a part thereof, as compared to a corresponding non-transformed wild type non-human organism or a part thereof; and
[52060] (b) growing the non-human organism or a part thereof under conditions which permit the production of linolenic acid or a composition comprising linolenic acid in said non-human organism or in the culture medium surrounding said non-human organism.

[52061] A further embodiment of the present invention relates to a process for the production of linolenic acid, which comprises
[52062] (a) increasing or generating the activity of a protein phosphatase non-targeted in a non-human organism or a part thereof, preferably a microorganism, a plant cell, a plant or a part thereof, as compared to a corresponding non-transformed wild type non-human organism or a part thereof; and
[52063] (b) growing the non-human organism or a part thereof under conditions which permit the production of linolenic acid or a composition comprising linolenic acid in said non-human organism or in the culture medium surrounding said non-human organism.

[52064] A further embodiment of the present invention relates to a process for the production of linolenic acid, which comprises
[52065] (a) increasing or generating the activity of a glutaredoxin non-targeted in a non-human organism or a part thereof, preferably a microorganism, a plant cell, a plant or a part thereof, as compared to a corresponding non-transformed wild type non-human organism or a part thereof; and
[52066] (b) growing the non-human organism or a part thereof under conditions which permit the production of linolenic acid or a composition comprising linolenic acid in said non-human organism or in the culture medium surrounding said non-human organism.

[52067] A further embodiment of the present invention relates to a process for the production of linolenic acid, which comprises
[52068] (a) increasing or generating the activity of a heat shock transcription factor non-targeted in a non-human organism or a part thereof, preferably a microorganism, a plant cell, a plant or a part thereof, as compared to a corresponding non-transformed wild type non-human organism or a part thereof; and
[52069] (b) growing the non-human organism or a part thereof under conditions which permit the production of linolenic acid or a composition comprising linolenic acid in said non-human organism or in the culture medium surrounding said non-human organism.

[52070] A further embodiment of the present invention relates to a process for the production of linolenic acid, which comprises
[52071] (a) increasing or generating the activity of a monothiol glutaredoxin non-targeted in a non-human organism or a part thereof, preferably a microorganism, a plant cell, a plant or a part thereof, as compared to a corresponding non-transformed wild type non-human organism or a part thereof; and
[52072] (b) growing the non-human organism or a part thereof under conditions which permit the production of linolenic acid or a composition comprising linolenic acid in said non-human organism or in the culture medium surrounding said non-human organism.

[52073] A further embodiment of the present invention relates to a process for the production of linolenic acid, which comprises
[52074] (a) increasing or generating the activity of a protein phosphatase non-targeted in a non-human organism or a part thereof, preferably a microorganism, a plant cell, a plant or a part thereof, as compared to a corresponding non-transformed wild type non-human organism or a part thereof; and
[52075] (b) growing the non-human organism or a part thereof under conditions which permit the production of linolenic acid or a composition comprising linolenic acid in said non-human organism or in the culture medium surrounding said non-human organism.

[52076] A further embodiment of the present invention relates to a process for the production of linolenic acid, which comprises
[52077] (a) increasing or generating the activity of a protein phosphatase non-targeted in a non-human organism or a part thereof, preferably a microorganism, a plant cell, a plant or a part thereof, as compared to a corresponding non-transformed wild type non-human organism or a part thereof; and
[52078] (b) growing the non-human organism or a part thereof under conditions which permit the production of linolenic acid or a composition comprising linolenic acid in said non-human organism or in the culture medium surrounding said non-human organism.

[52079] A further embodiment of the present invention relates to a process for the production of linolenic acid, which comprises
[52080] (a) increasing or generating the activity of a sec-independent protein translocase non-targeted in a non-human organism or a part thereof, preferably a microorganism, a plant cell, a plant or a part thereof, as compared to a corresponding non-transformed wild type non-human organism or a part thereof; and
[52081] (b) growing the non-human organism or a part thereof under conditions which permit the production of linolenic acid or a composition comprising linolenic acid in said non-human organism or in the culture medium surrounding said non-human organism.

[52082] A further embodiment of the present invention relates to a process for the production of linolenic acid, which comprises
[52083] (a) increasing or generating the activity of a oxidoreductase non-targeted in a non-human organism or a part thereof, preferably a microorganism, a plant cell, a plant or a part thereof, as compared to a corresponding non-transformed wild type non-human organism or a part thereof; and
[52084] (b) growing the non-human organism or a part thereof under conditions which permit the production of linolenic acid or a composition comprising linolenic acid in said non-human organism or in the culture medium surrounding said non-human organism.

[52085] A further embodiment of the present invention relates to a process for the production of linolenic acid, which comprises
[52086] (a) increasing or generating the activity of a acyl-CoA synthase non-targeted in a non-human organism or a part thereof, preferably a microorganism, a plant cell, a plant or a part thereof, as compared to a corresponding non-transformed wild type non-human organism or a part thereof; and
[52087] (b) growing the non-human organism or a part thereof under conditions which permit the production of linolenic acid or a composition comprising linolenic acid in said non-human organism or in the culture medium surrounding said non-human organism.

[52088] A further embodiment of the present invention relates to a process for the production of linolenic acid, which comprises
[52089] (a) increasing or generating the activity of a oxidoreductase non-targeted in a non-human organism or a part thereof, preferably a microorganism, a plant cell, a plant or a part thereof, as compared to a corresponding non-transformed wild type non-human organism or a part thereof; and
[52090] (b) growing the non-human organism or a part thereof under conditions which permit the production of linolenic acid or a composition comprising linolenic acid in said non-human organism or in the culture medium surrounding said non-human organism.

[52091] A further embodiment of the present invention relates to a process for the production of linolenic acid, which comprises
[52092] (a) increasing or generating the activity of a ThiF family protein non-targeted in a non-human organism or a part thereof, preferably a microorganism, a plant cell, a plant or a part thereof, as compared to a corresponding non-transformed wild type non-human organism or a part thereof; and
[52093] (b) growing the non-human organism or a part thereof under conditions which permit the production of linolenic acid or a composition comprising linolenic acid in said non-human organism or in the culture medium surrounding said non-human organism.

[52094] A further embodiment of the present invention relates to a process for the production of linolenic acid, which comprises
[52095] (a) increasing or generating the activity of a CTP synthase non-targeted in a non-human organism or a part thereof, preferably a microorganism, a plant cell, a plant or a part thereof, as compared to a corresponding non-transformed wild type non-human organism or a part thereof; and
[52096] (b) growing the non-human organism or a part thereof under conditions which permit the production of linolenic acid or a composition comprising linolenic acid in said non-human organism or in the culture medium surrounding said non-human organism.

[52097] A further embodiment of the present invention relates to a process for the production of linolenic acid, which comprises
[52098] (a) increasing or generating the activity of a recombinase A non-targeted in a non-human organism or a part thereof, preferably a microorganism, a plant cell, a plant or a part thereof, as compared to a corresponding non-transformed wild type non-human organism or a part thereof; and
[52099] (b) growing the non-human organism or a part thereof under conditions which permit the production of linolenic acid or a composition comprising linolenic acid in said non-human organism or in the culture medium surrounding said non-human organism.

[52100] A further embodiment of the present invention relates to a process for the production of linolenic acid, which comprises
[52101] (a) increasing or generating the activity of a isopropylmalate isomerase large subunit non-targeted in a non-human organism or a part thereof, preferably a microorganism, a plant cell, a plant or a part thereof, as compared to a corresponding non-transformed wild type non-human organism or a part thereof; and
[52102] (b) growing the non-human organism or a part thereof under conditions which permit the production of linolenic acid or a composition comprising linolenic acid in said non-human organism or in the culture medium surrounding said non-human organism.

[52103] A further embodiment of the present invention relates to a process for the production of linolenic acid, which comprises
[52104] (a) increasing or generating the activity of a HesB/YadR/YfhF family protein non-targeted in a non-human organism or a part thereof, preferably a microorganism, a plant cell, a plant or a part thereof, as compared to a corresponding non-transformed wild type non-human organism or a part thereof; and
[52105] (b) growing the non-human organism or a part thereof under conditions which permit the production of linolenic acid or a composition comprising linolenic acid in said non-human organism or in the culture medium surrounding said non-human organism.

[52106] A further embodiment of the present invention relates to a process for the production of linolenic acid, which comprises
[52107] (a) increasing or generating the activity of a b0195-protein non-targeted in a non-human organism or a part thereof, preferably a microorganism, a plant cell, a plant or a part thereof, as compared to a corresponding non-transformed wild type non-human organism or a part thereof; and
[52108] (b) growing the non-human organism or a part thereof under conditions which permit the production of linolenic acid or a composition comprising linolenic acid in said non-human organism or in the culture medium surrounding said non-human organism.

[52109] A further embodiment of the present invention relates to a process for the production of linolenic acid, which comprises
[52110] (a) increasing or generating the activity of a asparaginase non-targeted in a non-human organism or a part thereof, preferably a microorganism, a plant cell, a plant or a part thereof, as compared to a corresponding non-transformed wild type non-human organism or a part thereof; and
[52111] (b) growing the non-human organism or a part thereof under conditions which permit the production of linolenic acid or a composition comprising linolenic acid in said non-human organism or in the culture medium surrounding said non-human organism.

[52112] A further embodiment of the present invention relates to a process for the production of linolenic acid, which comprises
[52113] (a) increasing or generating the activity of a multidrug resistance protein non-targeted in a non-human organism or a part thereof, preferably a microorganism, a plant cell, a plant or a part thereof, as compared to a corresponding non-transformed wild type non-human organism or a part thereof; and
[52114] (b) growing the non-human organism or a part thereof under conditions which permit the production of linolenic acid or a composition comprising linolenic acid in said non-human organism or in the culture medium surrounding said non-human organism.

[52115] A further embodiment of the present invention relates to a process for the production of linolenic acid, which comprises
[52116] (a) increasing or generating the activity of a 3-oxoacyl-[acyl-carrier-protein] reductase non-targeted in a non-human organism or a part thereof, preferably a microorganism, a plant cell, a plant or a part thereof, as compared to a corresponding non-transformed wild type non-human organism or a part thereof; and
[52117] (b) growing the non-human organism or a part thereof under conditions which permit the production of linolenic acid or a composition comprising linolenic acid in said non-human organism or in the culture medium surrounding said non-human organism.

[52118] A further embodiment of the present invention relates to a process for the production of linolenic acid, which comprises
[52119] (a) increasing or generating the activity of a 3-oxoacyl-[acyl-carrier-protein] synthase non-targeted in a non-human organism or a part thereof, preferably a microorganism, a plant cell, a plant or a part thereof, as compared to a corresponding non-transformed wild type non-human organism or a part thereof; and
[52120] (b) growing the non-human organism or a part thereof under conditions which permit the production of linolenic acid or a composition comprising linolenic acid in said non-human organism or in the culture medium surrounding said non-human organism.

[52121] A further embodiment of the present invention relates to a process for the production of linolenic acid, which comprises
[52122] (a) increasing or generating the activity of a b1234-protein non-targeted in a non-human organism or a part thereof, preferably a microorganism, a plant cell, a plant or a part thereof, as compared to a corresponding non-transformed wild type non-human organism or a part thereof; and
[52123] (b) growing the non-human organism or a part thereof under conditions which permit the production of linolenic acid or a composition comprising linolenic acid in said non-human organism or in the culture medium surrounding said non-human organism.

[52124] A further embodiment of the present invention relates to a process for the production of linolenic acid, which comprises
[52125] (a) increasing or generating the activity of a b1248-protein non-targeted in a non-human organism or a part thereof, preferably a microorganism, a plant cell, a plant or a part thereof, as compared to a corresponding non-transformed wild type non-human organism or a part thereof; and
[52126] (b) growing the non-human organism or a part thereof under conditions which permit the production of linolenic acid or a composition comprising linolenic acid in said non-human organism or in the culture medium surrounding said non-human organism.

[52127] A further embodiment of the present invention relates to a process for the production of linolenic acid, which comprises
[52128] (a) increasing or generating the activity of a b1280-protein non-targeted in a non-human organism or a part thereof, preferably a microorganism, a plant cell, a plant or a part thereof, as compared to a corresponding non-transformed wild type non-human organism or a part thereof; and
[52129] (b) growing the non-human organism or a part thereof under conditions which permit the production of linolenic acid or a composition comprising linolenic acid in said non-human organism or in the culture medium surrounding said non-human organism.

[52130] A further embodiment of the present invention relates to a process for the production of linolenic acid, which comprises
[52131] (a) increasing or generating the activity of a b1330-protein non-targeted in a non-human organism or a part thereof, preferably a microorganism, a plant cell, a plant or a part thereof, as compared to a corresponding non-transformed wild type non-human organism or a part thereof; and
[52132] (b) growing the non-human organism or a part thereof under conditions which permit the production of linolenic acid or a composition comprising linolenic acid in said non-human organism or in the culture medium surrounding said non-human organism.

[52133] A further embodiment of the present invention relates to a process for the production of linolenic acid, which comprises
[52134] (a) increasing or generating the activity of a b1470-protein non-targeted in a non-human organism or a part thereof, preferably a microorganism, a plant cell, a plant or a part thereof, as compared to a corresponding non-transformed wild type non-human organism or a part thereof; and
[52135] (b) growing the non-human organism or a part thereof under conditions which permit the production of linolenic acid or a composition comprising linolenic acid in said non-human organism or in the culture medium surrounding said non-human organism.

[52136] A further embodiment of the present invention relates to a process for the production of linolenic acid, which comprises
[52137] (a) increasing or generating the activity of a acid shock protein non-targeted in a non-human organism or a part thereof, preferably a microorganism, a plant cell, a plant or a part thereof, as compared to a corresponding non-transformed wild type non-human organism or a part thereof; and
[52138] (b) growing the non-human organism or a part thereof under conditions which permit the production of linolenic acid or a composition comprising linolenic acid in said non-human organism or in the culture medium surrounding said non-human organism.

[52139] A further embodiment of the present invention relates to a process for the production of linolenic acid, which comprises
[52140] (a) increasing or generating the activity of a fumarate hydratase non-targeted in a non-human organism or a part thereof, preferably a microorganism, a plant cell, a plant or a part thereof, as compared to a corresponding non-transformed wild type non-human organism or a part thereof; and
[52141] (b) growing the non-human organism or a part thereof under conditions which permit the production of linolenic acid or a composition comprising linolenic acid in said non-human organism or in the culture medium surrounding said non-human organism.

[52142] A further embodiment of the present invention relates to a process for the production of linolenic acid, which comprises
[52143] (a) increasing or generating the activity of a electron transport complex protein non-targeted in a non-human organism or a part thereof, preferably a microorganism, a plant cell, a plant or a part thereof, as compared to a corresponding non-transformed wild type non-human organism or a part thereof; and
[52144] (b) growing the non-human organism or a part thereof under conditions which permit the production of linolenic acid or a composition comprising linolenic acid in said non-human organism or in the culture medium surrounding said non-human organism.

[52145] A further embodiment of the present invention relates to a process for the production of linolenic acid, which comprises
[52146] (a) increasing or generating the activity of a b1670-protein non-targeted in a non-human organism or a part thereof, preferably a microorganism, a plant cell, a plant or a part thereof, as compared to a corresponding non-transformed wild type non-human organism or a part thereof; and
[52147] (b) growing the non-human organism or a part thereof under conditions which permit the production of linolenic acid or a composition comprising linolenic acid in said non-human organism or in the culture medium surrounding said non-human organism.

[52148] A further embodiment of the present invention relates to a process for the production of linolenic acid, which comprises
[52149] (a) increasing or generating the activity of a b1672-protein non-targeted in a non-human organism or a part thereof, preferably a microorganism, a plant cell, a plant or a part thereof, as compared to a corresponding non-transformed wild type non-human organism or a part thereof; and
[52150] (b) growing the non-human organism or a part thereof under conditions which permit the production of linolenic acid or a composition comprising linolenic acid in said non-human organism or in the culture medium surrounding said non-human organism.

[52151] A further embodiment of the present invention relates to a process for the production of linolenic acid, which comprises
[52152] (a) increasing or generating the activity of a b1837-protein non-targeted in a non-human organism or a part thereof, preferably a microorganism, a plant cell, a plant or a part thereof, as compared to a corresponding non-transformed wild type non-human organism or a part thereof; and
[52153] (b) growing the non-human organism or a part thereof under conditions which permit the production of linolenic acid or a composition comprising linolenic acid in said non-human organism or in the culture medium surrounding said non-human organism.

[52154] A further embodiment of the present invention relates to a process for the production of linolenic acid, which comprises
[52155] (a) increasing or generating the activity of a b2032-protein non-targeted in a non-human organism or a part thereof, preferably a microorganism, a plant cell, a plant or a part thereof, as compared to a corresponding non-transformed wild type non-human organism or a part thereof; and
[52156] (b) growing the non-human organism or a part thereof under conditions which permit the production of linolenic acid or a composition comprising linolenic acid in said non-human organism or in the culture medium surrounding said non-human organism.

[52157] A further embodiment of the present invention relates to a process for the production of linolenic acid, which comprises
[52158] (a) increasing or generating the activity of a b2107-protein non-targeted in a non-human organism or a part thereof, preferably a microorganism, a plant cell, a plant or a part thereof, as compared to a corresponding non-transformed wild type non-human organism or a part thereof; and
[52159] (b) growing the non-human organism or a part thereof under conditions which permit the production of linolenic acid or a composition comprising linolenic acid in said non-human organism or in the culture medium surrounding said non-human organism.

[52160] A further embodiment of the present invention relates to a process for the production of linolenic acid, which comprises
[52161] (a) increasing or generating the activity of a b2399-protein non-targeted in a non-human organism or a part thereof, preferably a microorganism, a plant cell, a plant or a part thereof, as compared to a corresponding non-transformed wild type non-human organism or a part thereof; and
[52162] (b) growing the non-human organism or a part thereof under conditions which permit the production of linolenic acid or a composition comprising linolenic acid in said non-human organism or in the culture medium surrounding said non-human organism.

[52163] A further embodiment of the present invention relates to a process for the production of linolenic acid, which comprises
[52164] (a) increasing or generating the activity of a ethanolamine utilization protein non-targeted in a non-human organism or a part thereof, preferably a microorganism, a plant cell, a plant or a part thereof, as compared to a corresponding non-transformed wild type non-human organism or a part thereof; and
[52165] (b) growing the non-human organism or a part thereof under conditions which permit the production of linolenic acid or a composition comprising linolenic acid in said non-human organism or in the culture medium surrounding said non-human organism.

[52166] A further embodiment of the present invention relates to a process for the production of linolenic acid, which comprises
[52167] (a) increasing or generating the activity of a b2474-protein non-targeted in a non-human organism or a part thereof, preferably a microorganism, a plant cell, a plant or a part thereof, as compared to a corresponding non-transformed wild type non-human organism or a part thereof; and
[52168] (b) growing the non-human organism or a part thereof under conditions which permit the production of linolenic acid or a composition comprising linolenic acid in said non-human organism or in the culture medium surrounding said non-human organism.

[52169] A further embodiment of the present invention relates to a process for the production of linolenic acid, which comprises
[52170] (a) increasing or generating the activity of a b2613-protein non-targeted in a non-human organism or a part thereof, preferably a microorganism, a plant cell, a plant or a part thereof, as compared to a corresponding non-transformed wild type non-human organism or a part thereof; and
[52171] (b) growing the non-human organism or a part thereof under conditions which permit the production of linolenic acid or a composition comprising linolenic acid in said non-human organism or in the culture medium surrounding said non-human organism.

[52172] A further embodiment of the present invention relates to a process for the production of linolenic acid, which comprises
[52173] (a) increasing or generating the activity of a b2682-protein non-targeted in a non-human organism or a part thereof, preferably a microorganism, a plant cell, a plant or a part thereof, as compared to a corresponding non-transformed wild type non-human organism or a part thereof; and
[52174] (b) growing the non-human organism or a part thereof under conditions which permit the production of linolenic acid or a composition comprising linolenic acid in said non-human organism or in the culture medium surrounding said non-human organism.

[52175] A further embodiment of the present invention relates to a process for the production of linolenic acid, which comprises
[52176] (a) increasing or generating the activity of a flavodoxin non-targeted in a non-human organism or a part thereof, preferably a microorganism, a plant cell, a plant or a part thereof, as compared to a corresponding non-transformed wild type non-human organism or a part thereof; and
[52177] (b) growing the non-human organism or a part thereof under conditions which permit the production of linolenic acid or a composition comprising linolenic acid in said non-human organism or in the culture medium surrounding said non-human organism.

[52178] A further embodiment of the present invention relates to a process for the production of linolenic acid, which comprises
[52179] (a) increasing or generating the activity of a AAS bifunctional protein non-targeted in a non-human organism or a part thereof, preferably a microorganism, a plant cell, a plant or a part thereof, as compared to a corresponding non-transformed wild type non-human organism or a part thereof; and
[52180] (b) growing the non-human organism or a part thereof under conditions which permit the production of linolenic acid or a composition comprising linolenic acid in said non-human organism or in the culture medium surrounding said non-human organism.

[52181] A further embodiment of the present invention relates to a process for the production of linolenic acid, which comprises
[52182] (a) increasing or generating the activity of a phosphotriesterase non-targeted in a non-human organism or a part thereof, preferably a microorganism, a plant cell, a plant or a part thereof, as compared to a corresponding non-transformed wild type non-human organism or a part thereof; and
[52183] (b) growing the non-human organism or a part thereof under conditions which permit the production of linolenic acid or a composition comprising linolenic acid in said non-human organism or in the culture medium surrounding said non-human organism.

[52184] A further embodiment of the present invention relates to a process for the production of linolenic acid, which comprises
[52185] (a) increasing or generating the activity of a b3442-protein non-targeted in a non-human organism or a part thereof, preferably a microorganism, a plant cell, a plant or a part thereof, as compared to a corresponding non-transformed wild type non-human organism or a part thereof; and
[52186] (b) growing the non-human organism or a part thereof under conditions which permit the production of linolenic acid or a composition comprising linolenic acid in said non-human organism or in the culture medium surrounding said non-human organism.

[52187] A further embodiment of the present invention relates to a process for the production of linolenic acid, which comprises
[52188] (a) increasing or generating the activity of a b3534-protein non-targeted in a non-human organism or a part thereof, preferably a microorganism, a plant cell, a plant or a part thereof, as compared to a corresponding non-transformed wild type non-human organism or a part thereof; and
[52189] (b) growing the non-human organism or a part thereof under conditions which permit the production of linolenic acid or a composition comprising linolenic acid in said non-human organism or in the culture medium surrounding said non-human organism.

[52190] A further embodiment of the present invention relates to a process for the production of linolenic acid, which comprises
[52191] (a) increasing or generating the activity of a threonine efflux protein non-targeted in a non-human organism or a part thereof, preferably a microorganism, a plant cell, a plant or a part thereof, as compared to a corresponding non-transformed wild type non-human organism or a part thereof; and
[52192] (b) growing the non-human organism or a part thereof under conditions which permit the production of linolenic acid or a composition comprising linolenic acid in said non-human organism or in the culture medium surrounding said non-human organism.

[52193] A further embodiment of the present invention relates to a process for the production of linolenic acid, which comprises
[52194] (a) increasing or generating the activity of a b4023-protein non-targeted in a non-human organism or a part thereof, preferably a microorganism, a plant cell, a plant or a part thereof, as compared to a corresponding non-transformed wild type non-human organism or a part thereof; and
[52195] (b) growing the non-human organism or a part thereof under conditions which permit the production of linolenic acid or a composition comprising linolenic acid in said non-human organism or in the culture medium surrounding said non-human organism.

[52196] A further embodiment of the present invention relates to a process for the production of linolenic acid, which comprises
[52197] (a) increasing or generating the activity of a glutaredoxin non-targeted in a non-human organism or a part thereof, preferably a microorganism, a plant cell, a plant or a part thereof, as compared to a corresponding non-transformed wild type non-human organism or a part thereof; and
[52198] (b) growing the non-human organism or a part thereof under conditions which permit the production of linolenic acid or a composition comprising linolenic acid in said non-human organism or in the culture medium surrounding said non-human organism.

[52199] A further embodiment of the present invention relates to a process for the production of linolenic acid, which comprises
[52200] (a) increasing or generating the activity of a transcription factor non-targeted in a non-human organism or a part thereof, preferably a microorganism, a plant cell, a plant or a part thereof, as compared to a corresponding non-transformed wild type non-human organism or a part thereof; and
[52201] (b) growing the non-human organism or a part thereof under conditions which permit the production of linolenic acid or a composition comprising linolenic acid in said non-human organism or in the culture medium surrounding said non-human organism.

[52202] A further embodiment of the present invention relates to a process for the production of linolenic acid, which comprises
[52203] (a) increasing or generating the activity of a branched chain amino acid ABC transporter

[52204] ATP-binding protein non-targeted in a non-human organism or a part thereof, preferably a microorganism, a plant cell, a plant or a part thereof, as compared to a corresponding non-transformed wild type non-human organism or a part thereof; and
[52205] (b) growing the non-human organism or a part thereof under conditions which permit the production of linolenic acid or a composition comprising linolenic acid in said non-human organism or in the culture medium surrounding said non-human organism.

[52206] A further embodiment of the present invention relates to a process for the production of linolenic acid, which comprises
[52207] (a) increasing or generating the activity of a phosphofructokinase non-targeted in a non-human organism or a part thereof, preferably a microorganism, a plant cell, a plant or a part thereof, as compared to a corresponding non-transformed wild type non-human organism or a part thereof; and
[52208] (b) growing the non-human organism or a part thereof under conditions which permit the production of linolenic acid or a composition comprising linolenic acid in said non-human organism or in the culture medium surrounding said non-human organism.

[52209] A further embodiment of the present invention relates to a process for the production of linolenic acid, which comprises
[52210] (a) increasing or generating the activity of a carbon dioxide concentrating mechanism protein non-targeted in a non-human organism or a part thereof, preferably a microorganism, a plant cell, a plant or a part thereof, as compared to a corresponding non-transformed wild type non-human organism or a part thereof; and
[52211] (b) growing the non-human organism or a part thereof under conditions which permit the production of linolenic acid or a composition comprising linolenic acid in said non-human organism or in the culture medium surrounding said non-human organism.

[52212] A further embodiment of the present invention relates to a process for the production of linolenic acid, which comprises
[52213] (a) increasing or generating the activity of a sill 032-protein non-targeted in a non-human organism or a part thereof, preferably a microorganism, a plant cell, a plant or a part thereof, as compared to a corresponding non-transformed wild type non-human organism or a part thereof; and
[52214] (b) growing the non-human organism or a part thereof under conditions which permit the production of linolenic acid or a composition comprising linolenic acid in said non-human organism or in the culture medium surrounding said non-human organism.

[52215] A further embodiment of the present invention relates to a process for the production of linolenic acid, which comprises
[52216] (a) increasing or generating the activity of a CTP synthetase non-targeted in a non-human organism or a part thereof, preferably a microorganism, a plant cell, a plant or a part thereof, as compared to a corresponding non-transformed wild type non-human organism or a part thereof; and
[52217] (b) growing the non-human organism or a part thereof under conditions which permit the production of linolenic acid or a composition comprising linolenic acid in said non-human organism or in the culture medium surrounding said non-human organism.

[52218] A further embodiment of the present invention relates to a process for the production of linolenic acid, which comprises
[52219] (a) increasing or generating the activity of a carbamoyl-phosphate synthase subunit non-targeted in a non-human organism or a part thereof, preferably a microorganism, a plant cell, a plant or a part thereof, as compared to a corresponding non-transformed wild type non-human organism or a part thereof; and
[52220] (b) growing the non-human organism or a part thereof under conditions which permit the production of linolenic acid or a composition comprising linolenic acid in said non-human organism or in the culture medium surrounding said non-human organism.

[52221] A further embodiment of the present invention relates to a process for the production of linolenic acid, which comprises
[52222] (a) increasing or generating the activity of a acyl transferase non-targeted in a non-human organism or a part thereof, preferably a microorganism, a plant cell, a plant or a part thereof, as compared to a corresponding non-transformed wild type non-human organism or a part thereof; and
[52223] (b) growing the non-human organism or a part thereof under conditions which permit the production of linolenic acid or a composition comprising linolenic acid in said non-human organism or in the culture medium surrounding said non-human organism.

[52224] A further embodiment of the present invention relates to a process for the production of linolenic acid, which comprises
[52225] (a) increasing or generating the activity of a coproporphyrinogen III oxidase non-targeted in a non-human organism or a part thereof, preferably a microorganism, a plant cell, a plant or a part thereof, as compared to a corresponding non-transformed wild type non-human organism or a part thereof; and
[52226] (b) growing the non-human organism or a part thereof under conditions which permit the production of linolenic acid or a composition comprising linolenic acid in said non-human organism or in the culture medium surrounding said non-human organism.

[52227] A further embodiment of the present invention relates to a process for the production of linolenic acid, which comprises
[52228] (a) increasing or generating the activity of a cation-transporting ATPase non-targeted in a non-human organism or a part thereof, preferably a microorganism, a plant cell, a plant or a part thereof, as compared to a corresponding non-transformed wild type non-human organism or a part thereof; and
[52229] (b) growing the non-human organism or a part thereof under conditions which permit the production of linolenic acid or a composition comprising linolenic acid in said non-human organism or in the culture medium surrounding said non-human organism.

[52230] A further embodiment of the present invention relates to a process for the production of linolenic acid, which comprises
[52231] (a) increasing or generating the activity of a oxidoreductase non-targeted in a non-human organism or a part thereof, preferably a microorganism, a plant cell, a plant or a part thereof, as compared to a corresponding non-transformed wild type non-human organism or a part thereof; and
[52232] (b) growing the non-human organism or a part thereof under conditions which permit the production of linolenic acid or a composition comprising linolenic acid in said non-human organism or in the culture medium surrounding said non-human organism.

[52233] A further embodiment of the present invention relates to a process for the production of linolenic acid, which comprises
[52234] (a) increasing or generating the activity of a bifunctional purine biosynthesis protein non-targeted in a non-human organism or a part thereof, preferably a microorganism, a plant cell, a plant or a part thereof, as compared to a corresponding non-transformed wild type non-human organism or a part thereof; and
[52235] (b) growing the non-human organism or a part thereof under conditions which permit the production of linolenic acid or a composition comprising linolenic acid in said non-human organism or in the culture medium surrounding said non-human organism.

[52236] A further embodiment of the present invention relates to a process for the production of linolenic acid, which comprises
[52237] (a) increasing or generating the activity of a permease protein of ABC transporter non-targeted in a non-human organism or a part thereof, preferably a microorganism, a plant cell, a plant or a part thereof, as compared to a corresponding non-transformed wild type non-human organism or a part thereof; and
[52238] (b) growing the non-human organism or a part thereof under conditions which permit the production of linolenic acid or a composition comprising linolenic acid in said non-human organism or in the culture medium surrounding said non-human organism.

[52239] A further embodiment of the present invention relates to a process for the production of linolenic acid, which comprises
[52240] (a) increasing or generating the activity of a aromatic acid decarboxylase non-targeted in a non-human organism or a part thereof, preferably a microorganism, a plant cell, a plant or a part thereof, as compared to a corresponding non-transformed wild type non-human organism or a part thereof; and
[52241] (b) growing the non-human organism or a part thereof under conditions which permit the production of linolenic acid or a composition comprising linolenic acid in said non-human organism or in the culture medium surrounding said non-human organism.

[52242] A further embodiment of the present invention relates to a process for the production of linolenic acid, which comprises
[52243] (a) increasing or generating the activity of a phosphate import ATP-binding protein non-targeted in a non-human organism or a part thereof, preferably a microorganism, a plant cell, a plant or a part thereof, as compared to a corresponding non-transformed wild type non-human organism or a part thereof; and
[52244] (b) growing the non-human organism or a part thereof under conditions which permit the production of linolenic acid or a composition comprising linolenic acid in said non-human organism or in the culture medium surrounding said non-human organism.

[52245] A further embodiment of the present invention relates to a process for the production of linolenic acid, which comprises
[52246] (a) increasing or generating the activity of a arginine decarboxylase non-targeted in a non-human organism or a part thereof, preferably a microorganism, a plant cell, a plant or a part thereof, as compared to a corresponding non-transformed wild type non-human organism or a part thereof; and
[52247] (b) growing the non-human organism or a part thereof under conditions which permit the production of linolenic acid or a composition comprising linolenic acid in said non-human organism or in the culture medium surrounding said non-human organism.

[52248] A further embodiment of the present invention relates to a process for the production of linolenic acid, which comprises
[52249] (a) increasing or generating the activity of a phosphoadenosine phosphosulfate reductase non-targeted in a non-human organism or a part thereof, preferably a microorganism, a plant cell, a plant or a part thereof, as compared to a corresponding non-transformed wild type non-human organism or a part thereof; and
[52250] (b) growing the non-human organism or a part thereof under conditions which permit the production of linolenic acid or a composition comprising linolenic acid in said non-human organism or in the culture medium surrounding said non-human organism.

[52251] A further embodiment of the present invention relates to a process for the production of linolenic acid, which comprises
[52252] (a) increasing or generating the activity of a threonine dehydratase non-targeted in a non-human organism or a part thereof, preferably a microorganism, a plant cell, a plant or a part thereof, as compared to a corresponding non-transformed wild type non-human organism or a part thereof; and
[52253] (b) growing the non-human organism or a part thereof under conditions which permit the production of linolenic acid or a composition comprising linolenic acid in said non-human organism or in the culture medium surrounding said non-human organism.

[52254] A further embodiment of the present invention relates to a process for the production of linolenic acid, which comprises
[52255] (a) increasing or generating the activity of a metal-dependent hydrolase non-targeted in a non-human organism or a part thereof, preferably a microorganism, a plant cell, a plant or a part thereof, as compared to a corresponding non-transformed wild type non-human organism or a part thereof; and
[52256] (b) growing the non-human organism or a part thereof under conditions which permit the production of linolenic acid or a composition comprising linolenic acid in said non-human organism or in the culture medium surrounding said non-human organism.

[52257] A further embodiment of the present invention relates to a process for the production of linolenic acid, which comprises
[52258] (a) increasing or generating the activity of a TTC1386-protein non-targeted in a non-human organism or a part thereof, preferably a microorganism, a plant cell, a plant or a part thereof, as compared to a corresponding non-transformed wild type non-human organism or a part thereof; and
[52259] (b) growing the non-human organism or a part thereof under conditions which permit the production of linolenic acid or a composition comprising linolenic acid in said non-human organism or in the culture medium surrounding said non-human organism.

[52260] A further embodiment of the present invention relates to a process for the production of linolenic acid, which comprises
[52261] (a) increasing or generating the activity of a acid phosphatase precursor non-targeted in a non-human organism or a part thereof, preferably a microorganism, a plant cell, a plant or a part thereof, as compared to a corresponding non-transformed wild type non-human organism or a part thereof; and
[52262] (b) growing the non-human organism or a part thereof under conditions which permit the production of linolenic acid or a composition comprising linolenic acid in said non-human organism or in the culture medium surrounding said non-human organism.

[52263] A further embodiment of the present invention relates to a process for the production of linolenic acid, which comprises
[52264] (a) increasing or generating the activity of a glycerol-3-phosphate dehydrogenase non-targeted in a non-human organism or a part thereof, preferably a microorganism, a plant cell, a plant or a part thereof, as compared to a corresponding non-transformed wild type non-human organism or a part thereof; and
[52265] (b) growing the non-human organism or a part thereof under conditions which permit the production of linolenic acid or a composition comprising linolenic acid in said non-human organism or in the culture medium surrounding said non-human organism.

[52266] A further embodiment of the present invention relates to a process for the production of linolenic acid, which comprises
[52267] (a) increasing or generating the activity of a cell division control protein non-targeted in a non-human organism or a part thereof, preferably a microorganism, a plant cell, a plant or a part thereof, as compared to a corresponding non-transformed wild type non-human organism or a part thereof; and
[52268] (b) growing the non-human organism or a part thereof under conditions which permit the production of linolenic acid or a composition comprising linolenic acid in said non-human organism or in the culture medium surrounding said non-human organism.

[52269] A further embodiment of the present invention relates to a process for the production of linolenic acid, which comprises
[52270] (a) increasing or generating the activity of a branched-chain amino acid permease non-targeted in a non-human organism or a part thereof, preferably a microorganism, a plant cell, a plant or a part thereof, as compared to a corresponding non-transformed wild type non-human organism or a part thereof; and
[52271] (b) growing the non-human organism or a part thereof under conditions which permit the production of linolenic acid or a composition comprising linolenic acid in said non-human organism or in the culture medium surrounding said non-human organism.

[52272] A further embodiment of the present invention relates to a process for the production of linolenic acid, which comprises
[52273] (a) increasing or generating the activity of a F-box protein non-targeted in a non-human organism or a part thereof, preferably a microorganism, a plant cell, a plant or a part thereof, as compared to a corresponding non-transformed wild type non-human organism or a part thereof; and
[52274] (b) growing the non-human organism or a part thereof under conditions which permit the production of linolenic acid or a composition comprising linolenic acid in said non-human organism or in the culture medium surrounding said non-human organism.

[52275] A further embodiment of the present invention relates to a process for the production of linolenic acid, which comprises
[52276] (a) increasing or generating the activity of a ydr339c-protein non-targeted in a non-human organism or a part thereof, preferably a microorganism, a plant cell, a plant or a part thereof, as compared to a corresponding non-transformed wild type non-human organism or a part thereof; and
[52277] (b) growing the non-human organism or a part thereof under conditions which permit the production of linolenic acid or a composition comprising linolenic acid in said non-human organism or in the culture medium surrounding said non-human organism.

[52278] A further embodiment of the present invention relates to a process for the production of linolenic acid, which comprises
[52279] (a) increasing or generating the activity of a ydr507c-protein non-targeted in a non-human organism or a part thereof, preferably a microorganism, a plant cell, a plant or a part thereof, as compared to a corresponding non-transformed wild type non-human organism or a part thereof; and
[52280] (b) growing the non-human organism or a part thereof under conditions which permit the production of linolenic acid or a composition comprising linolenic acid in said non-human organism or in the culture medium surrounding said non-human organism.

[52281] A further embodiment of the present invention relates to a process for the production of linolenic acid, which comprises
[52282] (a) increasing or generating the activity of a dihydroxyacetone kinase non-targeted in a non-human organism or a part thereof, preferably a microorganism, a plant cell, a plant or a part thereof, as compared to a corresponding non-transformed wild type non-human organism or a part thereof; and
[52283] (b) growing the non-human organism or a part thereof under conditions which permit the production of linolenic acid or a composition comprising linolenic acid in said non-human organism or in the culture medium surrounding said non-human organism.

[52284] A further embodiment of the present invention relates to a process for the production of linolenic acid, which comprises
[52285] (a) increasing or generating the activity of a oxidoreductase non-targeted in a non-human organism or a part thereof, preferably a microorganism, a plant cell, a plant or a part thereof, as compared to a corresponding non-transformed wild type non-human organism or a part thereof; and
[52286] (b) growing the non-human organism or a part thereof under conditions which permit the production of linolenic acid or a composition comprising linolenic acid in said non-human organism or in the culture medium surrounding said non-human organism.

[52287] A further embodiment of the present invention relates to a process for the production of linolenic acid, which comprises
[52288] (a) increasing or generating the activity of a DnaJ-like chaperone non-targeted in a non-human organism or a part thereof, preferably a microorganism, a plant cell, a plant or a part thereof, as compared to a corresponding non-transformed wild type non-human organism or a part thereof; and
[52289] (b) growing the non-human organism or a part thereof under conditions which permit the production of linolenic acid or a composition comprising linolenic acid in said non-human organism or in the culture medium surrounding said non-human organism.

[52290] A further embodiment of the present invention relates to a process for the production of linolenic acid, which comprises
[52291] (a) increasing or generating the activity of a ymr013c-protein non-targeted in a non-human organism or a part thereof, preferably a microorganism, a plant cell, a plant or a part thereof, as compared to a corresponding non-transformed wild type non-human organism or a part thereof; and
[52292] (b) growing the non-human organism or a part thereof under conditions which permit the production of linolenic acid or a composition comprising linolenic acid in said non-human organism or in the culture medium surrounding said non-human organism.

[52293] A further embodiment of the present invention relates to a process for the production of linolenic acid, which comprises
[52294] (a) increasing or generating the activity of a molecular chaperone non-targeted in a non-human organism or a part thereof, preferably a microorganism, a plant cell, a plant or a part thereof, as compared to a corresponding non-transformed wild type non-human organism or a part thereof; and
[52295] (b) growing the non-human organism or a part thereof under conditions which permit the production of linolenic acid or a composition comprising linolenic acid in said non-human organism or in the culture medium surrounding said non-human organism.

[52296] A further embodiment of the present invention relates to a process for the production of linolenic acid, which comprises
[52297] (a) increasing or generating the activity of a ATPase epsilon subunit non-targeted in a non-human organism or a part thereof, preferably a microorganism, a plant cell, a plant or a part thereof, as compared to a corresponding non-transformed wild type non-human organism or a part thereof; and
[52298] (b) growing the non-human organism or a part thereof under conditions which permit the production of linolenic acid or a composition comprising linolenic acid in said non-human organism or in the culture medium surrounding said non-human organism.

[52299] A further embodiment of the present invention relates to a process for the production of linolenic acid, which comprises
[52300] (a) increasing or generating the activity of a glucose-6-phosphate 1-dehydrogenase non-targeted in a non-human organism or a part thereof, preferably a microorganism, a plant cell, a plant or a part thereof, as compared to a corresponding non-transformed wild type non-human organism or a part thereof; and
[52301] (b) growing the non-human organism or a part thereof under conditions which permit the production of linolenic acid or a composition comprising linolenic acid in said non-human organism or in the culture medium surrounding said non-human organism.

[52302] A further embodiment of the present invention relates to a process for the production of linolenic acid, which comprises
[52303] (a) increasing or generating the activity of a polypeptide comprising a polypeptide as depicted in the respective line in column 5 or 8 of Table II, application no. 9, or a homolog or a fragment thereof, a consensus sequence or at least one polypeptide motif as depicted in the respective line in column 8 of Table IV, application no. 9; or
[52304] increasing or generating the activity of an expression product of one or more nucleic acid molecule(s) comprising a polynucleotide as depicted in the respective line in column 5 or 8 of Table I, application no. 9, preferably the coding region thereof, or a homolog or a fragment thereof;
[52305] non-targeted in a non-human organism or a part thereof; preferably a microorganism, a plant cell, a plant or a part thereof, as compared to a corresponding non-transformed wild type non-human organism or a part thereof; and
[52306] (b) growing the non-human organism under conditions which permit the production of linolenic acid, or a composition comprising linolenic acid in said non-human organism or in the culture medium surrounding said non-human organism.

[52307] A further embodiment of the present invention relates to a process for the production of linolenic acid, which comprises
[52308] (a) increasing or generating one or more activities selected from the group consisting of protein phosphatase in an organelle, preferably in plastids or mitochondria, especially in plastids, of a non-human organism or a part thereof, preferably a microorganism, a plant cell, a plant or a part thereof, as compared to a corresponding non-transformed wild type non-human organism or a part thereof; and
[52309] (b) growing the non-human organism or a part thereof under conditions which permit the production of linolenic acid or a composition comprising linolenic acid in said non-human organism or in the culture medium surrounding said non-human organism.

[52310] A further embodiment of the present invention relates to a process for the production of linolenic acid, which comprises
[52311] (a) increasing or generating one or more activities selected from the group consisting of transcription factor in an organelle, preferably in plastids or mitochondria, especially in plastids, of a non-human organism or a part thereof, preferably a microorganism, a plant cell, a plant or a part thereof, as compared to a corresponding non-transformed wild type non-human organism or a part thereof; and
[52312] (b) growing the non-human organism or a part thereof under conditions which permit the production of linolenic acid or a composition comprising linolenic acid in said non-human organism or in the culture medium surrounding said non-human organism.

[52313] A further embodiment of the present invention relates to a process for the production of linolenic acid, which comprises
[52314] (a) increasing or generating one or more activities selected from the group consisting of protein phosphatase in an organelle, preferably in plastids or mitochondria, especially in plastids, of a non-human organism or a part thereof, preferably a microorganism, a plant cell, a plant or a part thereof, as compared to a corresponding non-transformed wild type non-human organism or a part thereof; and
[52315] (b) growing the non-human organism or a part thereof under conditions which permit the production of linolenic acid or a composition comprising linolenic acid in said non-human organism or in the culture medium surrounding said non-human organism.

[52316] A further embodiment of the present invention relates to a process for the production of linolenic acid, which comprises
[52317] (a) increasing or generating one or more activities selected from the group consisting of pyruvate kinase in an organelle, preferably in plastids or mitochondria, especially in plastids, of a non-human organism or a part thereof, preferably a microorganism, a plant cell, a plant or a part thereof, as compared to a corresponding non-transformed wild type non-human organism or a part thereof; and
[52318] (b) growing the non-human organism or a part thereof under conditions which permit the production of linolenic acid or a composition comprising linolenic acid in said non-human organism or in the culture medium surrounding said non-human organism.

[52319] A further embodiment of the present invention relates to a process for the production of linolenic acid, which comprises
[52320] (a) increasing or generating one or more activities selected from the group consisting of At2g45420-protein in an organelle, preferably in plastids or mitochondria, especially in plastids, of a non-human organism or a part thereof, preferably a microorganism, a plant cell, a plant or a part thereof, as compared to a corresponding non-transformed wild type non-human organism or a part thereof; and
[52321] (b) growing the non-human organism or a part thereof under conditions which permit the production of linolenic acid or a composition comprising linolenic acid in said non-human organism or in the culture medium surrounding said non-human organism.

[52322] A further embodiment of the present invention relates to a process for the production of linolenic acid, which comprises
[52323] (a) increasing or generating one or more activities selected from the group consisting of heat shock transcription factor in an organelle, preferably in plastids or mitochondria, especially in plastids, of a non-human organism or a part thereof, preferably a microorganism, a plant cell, a plant or a part thereof, as compared to a corresponding non-transformed wild type non-human organism or a part thereof; and
[52324] (b) growing the non-human organism or a part thereof under conditions which permit the production of linolenic acid or a composition comprising linolenic acid in said non-human organism or in the culture medium surrounding said non-human organism.

[52325] A further embodiment of the present invention relates to a process for the production of linolenic acid, which comprises
[52326] (a) increasing or generating one or more activities selected from the group consisting of glutaredoxin in an organelle, preferably in plastids or mitochondria, especially in plastids, of a non-human organism or a part thereof, preferably a microorganism, a plant cell, a plant or a part thereof, as compared to a corresponding non-transformed wild type non-human organism or a part thereof; and
[52327] (b) growing the non-human organism or a part thereof under conditions which permit the production of linolenic acid or a composition comprising linolenic acid in said non-human organism or in the culture medium surrounding said non-human organism.

[52328] A further embodiment of the present invention relates to a process for the production of linolenic acid, which comprises
[52329] (a) increasing or generating one or more activities selected from the group consisting of monothiol glutaredoxin in an organelle, preferably in plastids or mitochondria, especially in plastids, of a non-human organism or a part thereof, preferably a microorganism, a plant cell, a plant or a part thereof, as compared to a corresponding non-transformed wild type non-human organism or a part thereof; and
[52330] (b) growing the non-human organism or a part thereof under conditions which permit the production of linolenic acid or a composition comprising linolenic acid in said non-human organism or in the culture medium surrounding said non-human organism.

[52331] A further embodiment of the present invention relates to a process for the production of linolenic acid, which comprises
[52332] (a) increasing or generating one or more activities selected from the group consisting of heat shock transcription factor in an organelle, preferably in plastids or mitochondria, especially in plastids, of a non-human organism or a part thereof, preferably a microorganism, a plant cell, a plant or a part thereof, as compared to a corresponding non-transformed wild type non-human organism or a part thereof; and
[52333] (b) growing the non-human organism or a part thereof under conditions which permit the production of linolenic acid or a composition comprising linolenic acid in said non-human organism or in the culture medium surrounding said non-human organism.

[52334] A further embodiment of the present invention relates to a process for the production of linolenic acid, which comprises
[52335] (a) increasing or generating one or more activities selected from the group consisting of protein phosphatase in an organelle, preferably in plastids or mitochondria, especially in plastids, of a non-human organism or a part thereof, preferably a microorganism, a plant cell, a plant or a part thereof, as compared to a corresponding non-transformed wild type non-human organism or a part thereof; and
[52336] (b) growing the non-human organism or a part thereof under conditions which permit the production of linolenic acid or a composition comprising linolenic acid in said non-human organism or in the culture medium surrounding said non-human organism.

[52337] A further embodiment of the present invention relates to a process for the production of linolenic acid, which comprises
[52338] (a) increasing or generating one or more activities selected from the group consisting of glutaredoxin in an organelle, preferably in plastids or mitochondria, especially in plastids, of a non-human organism or a part thereof, preferably a microorganism, a plant cell, a plant or a part thereof, as compared to a corresponding non-transformed wild type non-human organism or a part thereof; and
[52339] (b) growing the non-human organism or a part thereof under conditions which permit the production of linolenic acid or a composition comprising linolenic acid in said non-human organism or in the culture medium surrounding said non-human organism.

[52340] A further embodiment of the present invention relates to a process for the production of linolenic acid, which comprises
[52341] (a) increasing or generating one or more activities selected from the group consisting of heat shock transcription factor in an organelle, preferably in plastids or mitochondria, especially in plastids, of a non-human organism or a part thereof, preferably a microorganism, a plant cell, a plant or a part thereof, as compared to a corresponding non-transformed wild type non-human organism or a part thereof; and
[52342] (b) growing the non-human organism or a part thereof under conditions which permit the production of linolenic acid or a composition comprising linolenic acid in said non-human organism or in the culture medium surrounding said non-human organism.

[52343] A further embodiment of the present invention relates to a process for the production of linolenic acid, which comprises
[52344] (a) increasing or generating one or more activities selected from the group consisting of monothiol glutaredoxin in an organelle, preferably in plastids or mitochondria, especially in plastids, of a non-human organism or a part thereof, preferably a microorganism, a plant cell, a plant or a part thereof, as compared to a corresponding non-transformed wild type non-human organism or a part thereof; and
[52345] (b) growing the non-human organism or a part thereof under conditions which permit the production of linolenic acid or a composition comprising linolenic acid in said non-human organism or in the culture medium surrounding said non-human organism.

[52346] A further embodiment of the present invention relates to a process for the production of linolenic acid, which comprises
[52347] (a) increasing or generating one or more activities selected from the group consisting of protein phosphatase in an organelle, preferably in plastids or mitochondria, especially in plastids, of a non-human organism or a part thereof, preferably a microorganism, a plant cell, a plant or a part thereof, as compared to a corresponding non-transformed wild type non-human organism or a part thereof; and
[52348] (b) growing the non-human organism or a part thereof under conditions which permit the production of linolenic acid or a composition comprising linolenic acid in said non-human organism or in the culture medium surrounding said non-human organism.

[52349] A further embodiment of the present invention relates to a process for the production of linolenic acid, which comprises
[52350] (a) increasing or generating one or more activities selected from the group consisting of protein phosphatase in an organelle, preferably in plastids or mitochondria, especially in plastids, of a non-human organism or a part thereof, preferably a microorganism, a plant cell, a plant or a part thereof, as compared to a corresponding non-transformed wild type non-human organism or a part thereof; and
[52351] (b) growing the non-human organism or a part thereof under conditions which permit the production of linolenic acid or a composition comprising linolenic acid in said non-human organism or in the culture medium surrounding said non-human organism.

[52352] A further embodiment of the present invention relates to a process for the production of linolenic acid, which comprises
[52353] (a) increasing or generating one or more activities selected from the group consisting of secindependent protein translocase in an organelle, preferably in plastids or mitochondria, especially in plastids, of a non-human organism or a part thereof, preferably a microorganism, a plant cell, a plant or a part thereof, as compared to a corresponding non-transformed wild type non-human organism or a part thereof; and
[52354] (b) growing the non-human organism or a part thereof under conditions which permit the production of linolenic acid or a composition comprising linolenic acid in said non-human organism or in the culture medium surrounding said non-human organism.

[52355] A further embodiment of the present invention relates to a process for the production of linolenic acid, which comprises
[52356] (a) increasing or generating one or more activities selected from the group consisting of oxidoreductase in an organelle, preferably in plastids or mitochondria, especially in plastids, of a non-human organism or a part thereof, preferably a microorganism, a plant cell, a plant or a part thereof, as compared to a corresponding non-transformed wild type non-human organism or a part thereof; and
[52357] (b) growing the non-human organism or a part thereof under conditions which permit the production of linolenic acid or a composition comprising linolenic acid in said non-human organism or in the culture medium surrounding said non-human organism.

[52358] A further embodiment of the present invention relates to a process for the production of linolenic acid, which comprises
[52359] (a) increasing or generating one or more activities selected from the group consisting of acyl-CoA synthase in an organelle, preferably in plastids or mitochondria, especially in plastids, of a non-human organism or a part thereof, preferably a microorganism, a plant cell, a plant or a part thereof, as compared to a corresponding non-transformed wild type non-human organism or a part thereof; and
[52360] (b) growing the non-human organism or a part thereof under conditions which permit the production of linolenic acid or a composition comprising linolenic acid in said non-human organism or in the culture medium surrounding said non-human organism.

[52361] A further embodiment of the present invention relates to a process for the production of linolenic acid, which comprises
[52362] (a) increasing or generating one or more activities selected from the group consisting of oxidoreductase in an organelle, preferably in plastids or mitochondria, especially in plastids, of a non-human organism or a part thereof, preferably a microorganism, a plant cell, a plant or a part thereof, as compared to a corresponding non-transformed wild type non-human organism or a part thereof; and
[52363] (b) growing the non-human organism or a part thereof under conditions which permit the production of linolenic acid or a composition comprising linolenic acid in said non-human organism or in the culture medium surrounding said non-human organism.

[52364] A further embodiment of the present invention relates to a process for the production of linolenic acid, which comprises
[52365] (a) increasing or generating one or more activities selected from the group consisting of ThiF family protein in an organelle, preferably in plastids or mitochondria, especially in plastids, of a non-human organism or a part thereof, preferably a microorganism, a plant cell, a plant or a part thereof, as compared to a corresponding non-transformed wild type non-human organism or a part thereof; and
[52366] (b) growing the non-human organism or a part thereof under conditions which permit the production of linolenic acid or a composition comprising linolenic acid in said non-human organism or in the culture medium surrounding said non-human organism.

[52367] A further embodiment of the present invention relates to a process for the production of linolenic acid, which comprises
[52368] (a) increasing or generating one or more activities selected from the group consisting of CTP synthase in an organelle, preferably in plastids or mitochondria, especially in plastids, of a non-human organism or a part thereof, preferably a microorganism, a plant cell, a plant or a part thereof, as compared to a corresponding non-transformed wild type non-human organism or a part thereof; and
[52369] (b) growing the non-human organism or a part thereof under conditions which permit the production of linolenic acid or a composition comprising linolenic acid in said non-human organism or in the culture medium surrounding said non-human organism.

[52370] A further embodiment of the present invention relates to a process for the production of linolenic acid, which comprises
[52371] (a) increasing or generating one or more activities selected from the group consisting of recombinase A in an organelle, preferably in plastids or mitochondria, especially in plastids, of a non-human organism or a part thereof, preferably a microorganism, a plant cell, a plant or a part thereof, as compared to a corresponding non-transformed wild type non-human organism or a part thereof; and
[52372] (b) growing the non-human organism or a part thereof under conditions which permit the production of linolenic acid or a composition comprising linolenic acid in said non-human organism or in the culture medium surrounding said non-human organism.

[52373] A further embodiment of the present invention relates to a process for the production of linolenic acid, which comprises
[52374] (a) increasing or generating one or more activities selected from the group consisting of isopropylmalate isomerase large subunit in an organelle, preferably in plastids or mitochondria, especially in plastids, of a non-human organism or a part thereof, preferably a microorganism, a plant cell, a plant or a part thereof, as compared to a corresponding non-transformed wild type non-human organism or a part thereof; and
[52375] (b) growing the non-human organism or a part thereof under conditions which permit the production of linolenic acid or a composition comprising linolenic acid in said non-human organism or in the culture medium surrounding said non-human organism.

[52376] A further embodiment of the present invention relates to a process for the production of linolenic acid, which comprises
[52377] (a) increasing or generating one or more activities selected from the group consisting of HesB/YadR/YfhF family protein in an organelle, preferably in plastids or mitochondria, especially in plastids, of a non-human organism or a part thereof, preferably a microorganism, a plant cell, a plant or a part thereof, as compared to a corresponding non-transformed wild type non-human organism or a part thereof; and
[52378] (b) growing the non-human organism or a part thereof under conditions which permit the production of linolenic acid or a composition comprising linolenic acid in said non-human organism or in the culture medium surrounding said non-human organism.

[52379] A further embodiment of the present invention relates to a process for the production of linolenic acid, which comprises
[52380] (a) increasing or generating one or more activities selected from the group consisting of b0195-protein in an organelle, preferably in plastids or mitochondria, especially in plastids, of a non-human organism or a part thereof, preferably a microorganism, a plant cell, a plant or a part thereof, as compared to a corresponding non-transformed wild type non-human organism or a part thereof; and
[52381] (b) growing the non-human organism or a part thereof under conditions which permit the production of linolenic acid or a composition comprising linolenic acid in said non-human organism or in the culture medium surrounding said non-human organism.

[52382] A further embodiment of the present invention relates to a process for the production of linolenic acid, which comprises
[52383] (a) increasing or generating one or more activities selected from the group consisting of asparaginase in an organelle, preferably in plastids or mitochondria, especially in plastids, of a non-human organism or a part thereof, preferably a microorganism, a plant cell, a plant or a part thereof, as compared to a corresponding non-transformed wild type non-human organism or a part thereof; and
[52384] (b) growing the non-human organism or a part thereof under conditions which permit the production of linolenic acid or a composition comprising linolenic acid in said non-human organism or in the culture medium surrounding said non-human organism.

[52385] A further embodiment of the present invention relates to a process for the production of linolenic acid, which comprises
[52386] (a) increasing or generating one or more activities selected from the group consisting of multidrug resistance protein in an organelle, preferably in plastids or mitochondria, especially in plastids, of a non-human organism or a part thereof, preferably a microorganism, a plant cell, a plant or a part thereof, as compared to a corresponding non-transformed wild type non-human organism or a part thereof; and
[52387] (b) growing the non-human organism or a part thereof under conditions which permit the production of linolenic acid or a composition comprising linolenic acid in said non-human organism or in the culture medium surrounding said non-human organism.

[52388] A further embodiment of the present invention relates to a process for the production of linolenic acid, which comprises
[52389] (a) increasing or generating one or more activities selected from the group consisting of 3-oxoacyl-[acyl-carrier-protein] reductase in an organelle, preferably in plastids or mitochondria, especially in plastids, of a non-human organism or a part thereof, preferably a microorganism, a plant cell, a plant or a part thereof, as compared to a corresponding non-transformed wild type non-human organism or a part thereof; and
[52390] (b) growing the non-human organism or a part thereof under conditions which permit the production of linolenic acid or a composition comprising linolenic acid in said non-human organism or in the culture medium surrounding said non-human organism.

[52391] A further embodiment of the present invention relates to a process for the production of linolenic acid, which comprises
[52392] (a) increasing or generating one or more activities selected from the group consisting of 3-oxoacyl-[acyl-carrier-protein] synthase in an organelle, preferably in plastids or mitochondria, especially in plastids, of a non-human organism or a part thereof, preferably a microorganism, a plant cell, a plant or a part thereof, as compared to a corresponding non-transformed wild type non-human organism or a part thereof; and
[52393] (b) growing the non-human organism or a part thereof under conditions which permit the production of linolenic acid or a composition comprising linolenic acid in said non-human organism or in the culture medium surrounding said non-human organism.

[52394] A further embodiment of the present invention relates to a process for the production of linolenic acid, which comprises
[52395] (a) increasing or generating one or more activities selected from the group consisting of b1234-protein in an organelle, preferably in plastids or mitochondria, especially in plastids, of a non-human organism or a part thereof, preferably a microorganism, a plant cell, a plant or a part thereof, as compared to a corresponding non-transformed wild type non-human organism or a part thereof; and
[52396] (b) growing the non-human organism or a part thereof under conditions which permit the production of linolenic acid or a composition comprising linolenic acid in said non-human organism or in the culture medium surrounding said non-human organism.

[52397] A further embodiment of the present invention relates to a process for the production of linolenic acid, which comprises
[52398] (a) increasing or generating one or more activities selected from the group consisting of b1248-protein in an organelle, preferably in plastids or mitochondria, especially in plastids, of a non-human organism or a part thereof, preferably a microorganism, a plant cell, a plant or a part thereof, as compared to a corresponding non-transformed wild type non-human organism or a part thereof; and
[52399] (b) growing the non-human organism or a part thereof under conditions which permit the production of linolenic acid or a composition comprising linolenic acid in said non-human organism or in the culture medium surrounding said non-human organism.

[52400] A further embodiment of the present invention relates to a process for the production of linolenic acid, which comprises
[52401] (a) increasing or generating one or more activities selected from the group consisting of b1280-protein in an organelle, preferably in plastids or mitochondria, especially in plastids, of a non-human organism or a part thereof, preferably a microorganism, a plant cell, a plant or a part thereof, as compared to a corresponding non-transformed wild type non-human organism or a part thereof; and
[52402] (b) growing the non-human organism or a part thereof under conditions which permit the production of linolenic acid or a composition comprising linolenic acid in said non-human organism or in the culture medium surrounding said non-human organism.

[52403] A further embodiment of the present invention relates to a process for the production of linolenic acid, which comprises
[52404] (a) increasing or generating one or more activities selected from the group consisting of b1330-protein in an organelle, preferably in plastids or mitochondria, especially in plastids, of a non-human organism or a part thereof, preferably a microorganism, a plant cell, a plant or a part thereof, as compared to a corresponding non-transformed wild type non-human organism or a part thereof; and
[52405] (b) growing the non-human organism or a part thereof under conditions which permit the production of linolenic acid or a composition comprising linolenic acid in said non-human organism or in the culture medium surrounding said non-human organism.

[52406] A further embodiment of the present invention relates to a process for the production of linolenic acid, which comprises
[52407] (a) increasing or generating one or more activities selected from the group consisting of b1470-protein in an organelle, preferably in plastids or mitochondria, especially in plastids, of a non-human organism or a part thereof, preferably a microorganism, a plant cell, a plant or a part thereof, as compared to a corresponding non-transformed wild type non-human organism or a part thereof; and
[52408] (b) growing the non-human organism or a part thereof under conditions which permit the production of linolenic acid or a composition comprising linolenic acid in said non-human organism or in the culture medium surrounding said non-human organism.

[52409] A further embodiment of the present invention relates to a process for the production of linolenic acid, which comprises
[52410] (a) increasing or generating one or more activities selected from the group consisting of acid shock protein in an organelle, preferably in plastids or mitochondria, especially in plastids, of a non-human organism or a part thereof, preferably a microorganism, a plant cell, a plant or a part thereof, as compared to a corresponding non-transformed wild type non-human organism or a part thereof; and
[52411] (b) growing the non-human organism or a part thereof under conditions which permit the production of linolenic acid or a composition comprising linolenic acid in said non-human organism or in the culture medium surrounding said non-human organism.

[52412] A further embodiment of the present invention relates to a process for the production of linolenic acid, which comprises
[52413] (a) increasing or generating one or more activities selected from the group consisting of fumarate hydratase in an organelle, preferably in plastids or mitochondria, especially in plastids, of a non-human organism or a part thereof, preferably a microorganism, a plant cell, a plant or a part thereof, as compared to a corresponding non-transformed wild type non-human organism or a part thereof; and
[52414] (b) growing the non-human organism or a part thereof under conditions which permit the production of linolenic acid or a composition comprising linolenic acid in said non-human organism or in the culture medium surrounding said non-human organism.

[52415] A further embodiment of the present invention relates to a process for the production of linolenic acid, which comprises
[52416] (a) increasing or generating one or more activities selected from the group consisting of electron transport complex protein in an organelle, preferably in plastids or mitochondria, especially in plastids, of a non-human organism or a part thereof, preferably a microorganism, a plant cell, a plant or a part thereof, as compared to a corresponding non-transformed wild type non-human organism or a part thereof; and
[52417] (b) growing the non-human organism or a part thereof under conditions which permit the production of linolenic acid or a composition comprising linolenic acid in said non-human organism or in the culture medium surrounding said non-human organism.

[52418] A further embodiment of the present invention relates to a process for the production of linolenic acid, which comprises
[52419] (a) increasing or generating one or more activities selected from the group consisting of b1670-protein in an organelle, preferably in plastids or mitochondria, especially in plastids, of a non-human organism or a part thereof, preferably a microorganism, a plant cell, a plant or a part thereof, as compared to a corresponding non-transformed wild type non-human organism or a part thereof; and
[52420] (b) growing the non-human organism or a part thereof under conditions which permit the production of linolenic acid or a composition comprising linolenic acid in said non-human organism or in the culture medium surrounding said non-human organism.

[52421] A further embodiment of the present invention relates to a process for the production of linolenic acid, which comprises
[52422] (a) increasing or generating one or more activities selected from the group consisting of b1672-protein in an organelle, preferably in plastids or mitochondria, especially in plastids, of a non-human organism or a part thereof, preferably a microorganism, a plant cell, a plant or a part thereof, as compared to a corresponding non-transformed wild type non-human organism or a part thereof; and
[52423] (b) growing the non-human organism or a part thereof under conditions which permit the production of linolenic acid or a composition comprising linolenic acid in said non-human organism or in the culture medium surrounding said non-human organism.

[52424] A further embodiment of the present invention relates to a process for the production of linolenic acid, which comprises
[52425] (a) increasing or generating one or more activities selected from the group consisting of b1837-protein in an organelle, preferably in plastids or mitochondria, especially in plastids, of a non-human organism or a part thereof, preferably a microorganism, a plant cell, a plant or a part thereof, as compared to a corresponding non-transformed wild type non-human organism or a part thereof; and
[52426] (b) growing the non-human organism or a part thereof under conditions which permit the production of linolenic acid or a composition comprising linolenic acid in said non-human organism or in the culture medium surrounding said non-human organism.

[52427] A further embodiment of the present invention relates to a process for the production of linolenic acid, which comprises
[52428] (a) increasing or generating one or more activities selected from the group consisting of b2032-protein in an organelle, preferably in plastids or mitochondria, especially in plastids, of a non-human organism or a part thereof, preferably a microorganism, a plant cell, a plant or a part thereof, as compared to a corresponding non-transformed wild type non-human organism or a part thereof; and
[52429] (b) growing the non-human organism or a part thereof under conditions which permit the production of linolenic acid or a composition comprising linolenic acid in said non-human organism or in the culture medium surrounding said non-human organism.

[52430] A further embodiment of the present invention relates to a process for the production of linolenic acid, which comprises
[52431] (a) increasing or generating one or more activities selected from the group consisting of b2107-protein in an organelle, preferably in plastids or mitochondria, especially in plastids, of a non-human organism or a part thereof, preferably a microorganism, a plant cell, a plant or a part thereof, as compared to a corresponding non-transformed wild type non-human organism or a part thereof; and
[52432] (b) growing the non-human organism or a part thereof under conditions which permit the production of linolenic acid or a composition comprising linolenic acid in said non-human organism or in the culture medium surrounding said non-human organism.

[52433] A further embodiment of the present invention relates to a process for the production of linolenic acid, which comprises
[52434] (a) increasing or generating one or more activities selected from the group consisting of b2399-protein in an organelle, preferably in plastids or mitochondria, especially in plastids, of a non-human organism or a part thereof, preferably a microorganism, a plant cell, a plant or a part thereof, as compared to a corresponding non-transformed wild type non-human organism or a part thereof; and
[52435] (b) growing the non-human organism or a part thereof under conditions which permit the production of linolenic acid or a composition comprising linolenic acid in said non-human organism or in the culture medium surrounding said non-human organism.

[52436] A further embodiment of the present invention relates to a process for the production of linolenic acid, which comprises
[52437] (a) increasing or generating one or more activities selected from the group consisting of ethanolamine utilization protein in an organelle, preferably in plastids or mitochondria, especially in plastids, of a non-human organism or a part thereof, preferably a microorganism, a plant cell, a plant or a part thereof, as compared to a corresponding non-transformed wild type non-human organism or a part thereof; and
[52438] (b) growing the non-human organism or a part thereof under conditions which permit the production of linolenic acid or a composition comprising linolenic acid in said non-human organism or in the culture medium surrounding said non-human organism.

[52439] A further embodiment of the present invention relates to a process for the production of linolenic acid, which comprises
[52440] (a) increasing or generating one or more activities selected from the group consisting of b2474-protein in an organelle, preferably in plastids or mitochondria, especially in plastids, of a non-human organism or a part thereof, preferably a microorganism, a plant cell, a plant or a part thereof, as compared to a corresponding non-transformed wild type non-human organism or a part thereof; and
[52441] (b) growing the non-human organism or a part thereof under conditions which permit the production of linolenic acid or a composition comprising linolenic acid in said non-human organism or in the culture medium surrounding said non-human organism.

[52442] A further embodiment of the present invention relates to a process for the production of linolenic acid, which comprises
[52443] (a) increasing or generating one or more activities selected from the group consisting of b2613-protein in an organelle, preferably in plastids or mitochondria, especially in plastids, of a non-human organism or a part thereof, preferably a microorganism, a plant cell, a plant or a part thereof, as compared to a corresponding non-transformed wild type non-human organism or a part thereof; and
[52444] (b) growing the non-human organism or a part thereof under conditions which permit the production of linolenic acid or a composition comprising linolenic acid in said non-human organism or in the culture medium surrounding said non-human organism.

[52445] A further embodiment of the present invention relates to a process for the production of linolenic acid, which comprises
[52446] (a) increasing or generating one or more activities selected from the group consisting of b2682-protein in an organelle, preferably in plastids or mitochondria, especially in plastids, of a non-human organism or a part thereof, preferably a microorganism, a plant cell, a plant or a part thereof, as compared to a corresponding non-transformed wild type non-human organism or a part thereof; and
[52447] (b) growing the non-human organism or a part thereof under conditions which permit the production of linolenic acid or a composition comprising linolenic acid in said non-human organism or in the culture medium surrounding said non-human organism.

[52448] A further embodiment of the present invention relates to a process for the production of linolenic acid, which comprises
[52449] (a) increasing or generating one or more activities selected from the group consisting of flavodoxin in an organelle, preferably in plastids or mitochondria, especially in plastids, of a non-human organism or a part thereof, preferably a microorganism, a plant cell, a plant or a part thereof, as compared to a corresponding non-transformed wild type non-human organism or a part thereof; and
[52450] (b) growing the non-human organism or a part thereof under conditions which permit the production of linolenic acid or a composition comprising linolenic acid in said non-human organism or in the culture medium surrounding said non-human organism.

[52451] A further embodiment of the present invention relates to a process for the production of linolenic acid, which comprises
[52452] (a) increasing or generating one or more activities selected from the group consisting of AAS bifunctional protein in an organelle, preferably in plastids or mitochondria, especially in plastids, of a non-human organism or a part thereof, preferably a microorganism, a plant cell, a plant or a part thereof, as compared to a corresponding non-transformed wild type non-human organism or a part thereof; and
[52453] (b) growing the non-human organism or a part thereof under conditions which permit the production of linolenic acid or a composition comprising linolenic acid in said non-human organism or in the culture medium surrounding said non-human organism.

[52454] A further embodiment of the present invention relates to a process for the production of linolenic acid, which comprises
[52455] (a) increasing or generating one or more activities selected from the group consisting of phosphotriesterase in an organelle, preferably in plastids or mitochondria, especially in plastids, of a non-human organism or a part thereof, preferably a microorganism, a plant cell, a plant or a part thereof, as compared to a corresponding non-transformed wild type non-human organism or a part thereof; and
[52456] (b) growing the non-human organism or a part thereof under conditions which permit the production of linolenic acid or a composition comprising linolenic acid in said non-human organism or in the culture medium surrounding said non-human organism.

[52457] A further embodiment of the present invention relates to a process for the production of linolenic acid, which comprises
[52458] (a) increasing or generating one or more activities selected from the group consisting of b3442-protein in an organelle, preferably in plastids or mitochondria, especially in plastids, of a non-human organism or a part thereof, preferably a microorganism, a plant cell, a plant or a part thereof, as compared to a corresponding non-transformed wild type non-human organism or a part thereof; and
[52459] (b) growing the non-human organism or a part thereof under conditions which permit the production of linolenic acid or a composition comprising linolenic acid in said non-human organism or in the culture medium surrounding said non-human organism.

[52460] A further embodiment of the present invention relates to a process for the production of linolenic acid, which comprises
[52461] (a) increasing or generating one or more activities selected from the group consisting of b3534-protein in an organelle, preferably in plastids or mitochondria, especially in plastids, of a non-human organism or a part thereof, preferably a microorganism, a plant cell, a plant or a part thereof, as compared to a corresponding non-transformed wild type non-human organism or a part thereof; and
[52462] (b) growing the non-human organism or a part thereof under conditions which permit the production of linolenic acid or a composition comprising linolenic acid in said non-human organism or in the culture medium surrounding said non-human organism.

[52463] A further embodiment of the present invention relates to a process for the production of linolenic acid, which comprises
[52464] (a) increasing or generating one or more activities selected from the group consisting of threonine efflux protein in an organelle, preferably in plastids or mitochondria, especially in plastids, of a non-human organism or a part thereof, preferably a microorganism, a plant cell, a plant or a part thereof, as compared to a corresponding non-transformed wild type non-human organism or a part thereof; and
[52465] (b) growing the non-human organism or a part thereof under conditions which permit the production of linolenic acid or a composition comprising linolenic acid in said non-human organism or in the culture medium surrounding said non-human organism.

[52466] A further embodiment of the present invention relates to a process for the production of linolenic acid, which comprises
[52467] (a) increasing or generating one or more activities selected from the group consisting of b4023-protein in an organelle, preferably in plastids or mitochondria, especially in plastids, of a non-human organism or a part thereof, preferably a microorganism, a plant cell, a plant or a part thereof, as compared to a corresponding non-transformed wild type non-human organism or a part thereof; and
[52468] (b) growing the non-human organism or a part thereof under conditions which permit the production of linolenic acid or a composition comprising linolenic acid in said non-human organism or in the culture medium surrounding said non-human organism.

[52469] A further embodiment of the present invention relates to a process for the production of linolenic acid, which comprises
[52470] (a) increasing or generating one or more activities selected from the group consisting of glutaredoxin in an organelle, preferably in plastids or mitochondria, especially in plastids, of a non-human organism or a part thereof, preferably a microorganism, a plant cell, a plant or a part thereof, as compared to a corresponding non-transformed wild type non-human organism or a part thereof; and
[52471] (b) growing the non-human organism or a part thereof under conditions which permit the production of linolenic acid or a composition comprising linolenic acid in said non-human organism or in the culture medium surrounding said non-human organism.

[52472] A further embodiment of the present invention relates to a process for the production of linolenic acid, which comprises
[52473] (a) increasing or generating one or more activities selected from the group consisting of transcription factor in an organelle, preferably in plastids or mitochondria, especially in plastids, of a non-human organism or a part thereof, preferably a microorganism, a plant cell, a plant or a part thereof, as compared to a corresponding non-transformed wild type non-human organism or a part thereof; and
[52474] (b) growing the non-human organism or a part thereof under conditions which permit the production of linolenic acid or a composition comprising linolenic acid in said non-human organism or in the culture medium surrounding said non-human organism.

[52475] A further embodiment of the present invention relates to a process for the production of linolenic acid, which comprises
[52476] (a) increasing or generating one or more activities selected from the group consisting of branched chain amino acid ABC transporter ATP-binding protein in an organelle, preferably in plastids or mitochondria, especially in plastids, of a non-human organism or a part thereof, preferably a microorganism, a plant cell, a plant or a part thereof, as compared to a corresponding non-transformed wild type non-human organism or a part thereof; and
[52477] (b) growing the non-human organism or a part thereof under conditions which permit the production of linolenic acid or a composition comprising linolenic acid in said non-human organism or in the culture medium surrounding said non-human organism.

[52478] A further embodiment of the present invention relates to a process for the production of linolenic acid, which comprises
[52479] (a) increasing or generating one or more activities selected from the group consisting of phosphofructokinase in an organelle, preferably in plastids or mitochondria, especially in plastids, of a non-human organism or a part thereof, preferably a microorganism, a plant cell, a plant or a part thereof, as compared to a corresponding non-transformed wild type non-human organism or a part thereof; and
[52480] (b) growing the non-human organism or a part thereof under conditions which permit the production of linolenic acid or a composition comprising linolenic acid in said non-human organism or in the culture medium surrounding said non-human organism.

[52481] A further embodiment of the present invention relates to a process for the production of linolenic acid, which comprises
[52482] (a) increasing or generating one or more activities selected from the group consisting of carbon dioxide concentrating mechanism protein in an organelle, preferably in plastids or mitochondria, especially in plastids, of a non-human organism or a part thereof, preferably a microorganism, a plant cell, a plant or a part thereof, as compared to a corresponding non-transformed wild type non-human organism or a part thereof; and
[52483] (b) growing the non-human organism or a part thereof under conditions which permit the production of linolenic acid or a composition comprising linolenic acid in said non-human organism or in the culture medium surrounding said non-human organism.

[52484] A further embodiment of the present invention relates to a process for the production of linolenic acid, which comprises
[52485] (a) increasing or generating one or more activities selected from the group consisting of sll1032-protein in an organelle, preferably in plastids or mitochondria, especially in plastids, of a non-human organism or a part thereof, preferably a microorganism, a plant cell, a plant or a part thereof, as compared to a corresponding non-transformed wild type non-human organism or a part thereof; and
[52486] (b) growing the non-human organism or a part thereof under conditions which permit the production of linolenic acid or a composition comprising linolenic acid in said non-human organism or in the culture medium surrounding said non-human organism.

[52487] A further embodiment of the present invention relates to a process for the production of linolenic acid, which comprises
[52488] (a) increasing or generating one or more activities selected from the group consisting of CTP synthetase in an organelle, preferably in plastids or mitochondria, especially in plastids, of a non-human organism or a part thereof, preferably a microorganism, a plant cell, a plant or a part thereof, as compared to a corresponding non-transformed wild type non-human organism or a part thereof; and
[52489] (b) growing the non-human organism or a part thereof under conditions which permit the production of linolenic acid or a composition comprising linolenic acid in said non-human organism or in the culture medium surrounding said non-human organism.

[52490] A further embodiment of the present invention relates to a process for the production of linolenic acid, which comprises
[52491] (a) increasing or generating one or more activities selected from the group consisting of carbamoyl-phosphate synthase subunit in an organelle, preferably in plastids or mitochondria, especially in plastids, of a non-human organism or a part thereof, preferably a microorganism, a plant cell, a plant or a part thereof, as compared to a corresponding non-transformed wild type non-human organism or a part thereof; and
[52492] (b) growing the non-human organism or a part thereof under conditions which permit the production of linolenic acid or a composition comprising linolenic acid in said non-human organism or in the culture medium surrounding said non-human organism.

[52493] A further embodiment of the present invention relates to a process for the production of linolenic acid, which comprises
[52494] (a) increasing or generating one or more activities selected from the group consisting of acyl transferase in an organelle, preferably in plastids or mitochondria, especially in plastids, of a non-human organism or a part thereof, preferably a microorganism, a plant cell, a plant or a part thereof, as compared to a corresponding non-transformed wild type non-human organism or a part thereof; and
[52495] (b) growing the non-human organism or a part thereof under conditions which permit the production of linolenic acid or a composition comprising linolenic acid in said non-human organism or in the culture medium surrounding said non-human organism.

[52496] A further embodiment of the present invention relates to a process for the production of linolenic acid, which comprises
[52497] (a) increasing or generating one or more activities selected from the group consisting of coproporphyrinogen III oxidase in an organelle, preferably in plastids or mitochondria, especially in plastids, of a non-human organism or a part thereof, preferably a microorganism, a plant cell, a plant or a part thereof, as compared to a corresponding non-transformed wild type non-human organism or a part thereof; and
[52498] (b) growing the non-human organism or a part thereof under conditions which permit the production of linolenic acid or a composition comprising linolenic acid in said non-human organism or in the culture medium surrounding said non-human organism.

[52499] A further embodiment of the present invention relates to a process for the production of linolenic acid, which comprises
[52500] (a) increasing or generating one or more activities selected from the group consisting of cation-transporting ATPase in an organelle, preferably in plastids or mitochondria, especially in plastids, of a non-human organism or a part thereof, preferably a microorganism, a plant cell, a plant or a part thereof, as compared to a corresponding non-transformed wild type non-human organism or a part thereof; and
[52501] (b) growing the non-human organism or a part thereof under conditions which permit the production of linolenic acid or a composition comprising linolenic acid in said non-human organism or in the culture medium surrounding said non-human organism.

[52502] A further embodiment of the present invention relates to a process for the production of linolenic acid, which comprises
[52503] (a) increasing or generating one or more activities selected from the group consisting of oxidoreductase in an organelle, preferably in plastids or mitochondria, especially in plastids, of a non-human organism or a part thereof, preferably a microorganism, a plant cell, a plant or a part thereof, as compared to a corresponding non-transformed wild type non-human organism or a part thereof; and
[52504] (b) growing the non-human organism or a part thereof under conditions which permit the production of linolenic acid or a composition comprising linolenic acid in said non-human organism or in the culture medium surrounding said non-human organism.

[52505] A further embodiment of the present invention relates to a process for the production of linolenic acid, which comprises
[52506] (a) increasing or generating one or more activities selected from the group consisting of bifunctional purine biosynthesis protein in an organelle, preferably in plastids or mitochondria, especially in plastids, of a non-human organism or a part thereof, preferably a microorganism, a plant cell, a plant or a part thereof, as compared to a corresponding non-transformed wild type non-human organism or a part thereof; and
[52507] (b) growing the non-human organism or a part thereof under conditions which permit the production of linolenic acid or a composition comprising linolenic acid in said non-human organism or in the culture medium surrounding said non-human organism.

[52508] A further embodiment of the present invention relates to a process for the production of linolenic acid, which comprises
[52509] (a) increasing or generating one or more activities selected from the group consisting of permease protein of ABC transporter in an organelle, preferably in plastids or mitochondria, especially in plastids, of a non-human organism or a part thereof, preferably a microorganism, a plant cell, a plant or a part thereof, as compared to a corresponding non-transformed wild type non-human organism or a part thereof; and
[52510] (b) growing the non-human organism or a part thereof under conditions which permit the production of linolenic acid or a composition comprising linolenic acid in said non-human organism or in the culture medium surrounding said non-human organism.

[52511] A further embodiment of the present invention relates to a process for the production of linolenic acid, which comprises
[52512] (a) increasing or generating one or more activities selected from the group consisting of aromatic acid decarboxylase in an organelle, preferably in plastids or mitochondria, especially in plastids, of a non-human organism or a part thereof, preferably a microorganism, a plant cell, a plant or a part thereof, as compared to a corresponding non-transformed wild type non-human organism or a part thereof; and
[52513] (b) growing the non-human organism or a part thereof under conditions which permit the production of linolenic acid or a composition comprising linolenic acid in said non-human organism or in the culture medium surrounding said non-human organism.

[52514] A further embodiment of the present invention relates to a process for the production of linolenic acid, which comprises
[52515] (a) increasing or generating one or more activities selected from the group consisting of phosphate import ATP-binding protein in an organelle, preferably in plastids or mitochondria, especially in plastids, of a non-human organism or a part thereof, preferably a microorganism, a plant cell, a plant or a part thereof, as compared to a corresponding non-transformed wild type non-human organism or a part thereof; and
[52516] (b) growing the non-human organism or a part thereof under conditions which permit the production of linolenic acid or a composition comprising linolenic acid in said non-human organism or in the culture medium surrounding said non-human organism.

[52517] A further embodiment of the present invention relates to a process for the production of linolenic acid, which comprises
[52518] (a) increasing or generating one or more activities selected from the group consisting of arginine decarboxylase in an organelle, preferably in plastids or mitochondria, especially in plastids, of a non-human organism or a part thereof, preferably a microorganism, a plant cell, a plant or a part thereof, as compared to a corresponding non-transformed wild type non-human organism or a part thereof; and
[52519] (b) growing the non-human organism or a part thereof under conditions which permit the production of linolenic acid or a composition comprising linolenic acid in said non-human organism or in the culture medium surrounding said non-human organism.

[52520] A further embodiment of the present invention relates to a process for the production of linolenic acid, which comprises
[52521] (a) increasing or generating one or more activities selected from the group consisting of phosphoadenosine phosphosulfate reductase in an organelle, preferably in plastids or mitochondria, especially in plastids, of a non-human organism or a part thereof, preferably a microorganism, a plant cell, a plant or a part thereof, as compared to a corresponding non-transformed wild type non-human organism or a part thereof; and
[52522] (b) growing the non-human organism or a part thereof under conditions which permit the production of linolenic acid or a composition comprising linolenic acid in said non-human organism or in the culture medium surrounding said non-human organism.

[52523] A further embodiment of the present invention relates to a process for the production of linolenic acid, which comprises
[52524] (a) increasing or generating one or more activities selected from the group consisting of threonine dehydratase in an organelle, preferably in plastids or mitochondria, especially in plastids, of a non-human organism or a part thereof, preferably a microorganism, a plant cell, a plant or a part thereof, as compared to a corresponding non-transformed wild type non-human organism or a part thereof; and
[52525] (b) growing the non-human organism or a part thereof under conditions which permit the production of linolenic acid or a composition comprising linolenic acid in said non-human organism or in the culture medium surrounding said non-human organism.

[52526] A further embodiment of the present invention relates to a process for the production of linolenic acid, which comprises
[52527] (a) increasing or generating one or more activities selected from the group consisting of metal-dependent hydrolase in an organelle, preferably in plastids or mitochondria, especially in plastids, of a non-human organism or a part thereof, preferably a microorganism, a plant cell, a plant or a part thereof, as compared to a corresponding non-transformed wild type non-human organism or a part thereof; and
[52528] (b) growing the non-human organism or a part thereof under conditions which permit the production of linolenic acid or a composition comprising linolenic acid in said non-human organism or in the culture medium surrounding said non-human organism.

[52529] A further embodiment of the present invention relates to a process for the production of linolenic acid, which comprises
[52530] (a) increasing or generating one or more activities selected from the group consisting of TTC1386-protein in an organelle, preferably in plastids or mitochondria, especially in plastids, of a non-human organism or a part thereof, preferably a microorganism, a plant cell, a plant or a part thereof, as compared to a corresponding non-transformed wild type non-human organism or a part thereof; and
[52531] (b) growing the non-human organism or a part thereof under conditions which permit the production of linolenic acid or a composition comprising linolenic acid in said non-human organism or in the culture medium surrounding said non-human organism.

[52532] A further embodiment of the present invention relates to a process for the production of linolenic acid, which comprises
[52533] (a) increasing or generating one or more activities selected from the group consisting of acid phosphatase precursor in an organelle, preferably in plastids or mitochondria, especially in plastids, of a non-human organism or a part thereof, preferably a microorganism, a plant cell, a plant or a part thereof, as compared to a corresponding non-transformed wild type non-human organism or a part thereof; and
[52534] (b) growing the non-human organism or a part thereof under conditions which permit the production of linolenic acid or a composition comprising linolenic acid in said non-human organism or in the culture medium surrounding said non-human organism.

[52535] A further embodiment of the present invention relates to a process for the production of linolenic acid, which comprises
[52536] (a) increasing or generating one or more activities selected from the group consisting of glycerol-3-phosphate dehydrogenase in an organelle, preferably in plastids or mitochondria, especially in plastids, of a non-human organism or a part thereof, preferably a microorganism, a plant cell, a plant or a part thereof, as compared to a corresponding non-transformed wild type non-human organism or a part thereof; and
[52537] (b) growing the non-human organism or a part thereof under conditions which permit the production of linolenic acid or a composition comprising linolenic acid in said non-human organism or in the culture medium surrounding said non-human organism.

[52538] A further embodiment of the present invention relates to a process for the production of linolenic acid, which comprises
[52539] (a) increasing or generating one or more activities selected from the group consisting of cell division control protein in an organelle, preferably in plastids or mitochondria, especially in plastids, of a non-human organism or a part thereof, preferably a microorganism, a plant cell, a plant or a part thereof, as compared to a corresponding non-transformed wild type non-human organism or a part thereof; and
[52540] (b) growing the non-human organism or a part thereof under conditions which permit the production of linolenic acid or a composition comprising linolenic acid in said non-human organism or in the culture medium surrounding said non-human organism.

[52541] A further embodiment of the present invention relates to a process for the production of linolenic acid, which comprises
[52542] (a) increasing or generating one or more activities selected from the group consisting of branched-chain amino acid permease in an organelle, preferably in plastids or mitochondria, especially in plastids, of a non-human organism or a part thereof, preferably a microorganism, a plant cell, a plant or a part thereof, as compared to a corresponding non-transformed wild type non-human organism or a part thereof; and
[52543] (b) growing the non-human organism or a part thereof under conditions which permit the production of linolenic acid or a composition comprising linolenic acid in said non-human organism or in the culture medium surrounding said non-human organism.

[52544] A further embodiment of the present invention relates to a process for the production of linolenic acid, which comprises
[52545] (a) increasing or generating one or more activities selected from the group consisting of F-box protein in an organelle, preferably in plastids or mitochondria, especially in plastids, of a non-human organism or a part thereof, preferably a microorganism, a plant cell, a plant or a part thereof, as compared to a corresponding non-transformed wild type non-human organism or a part thereof; and
[52546] (b) growing the non-human organism or a part thereof under conditions which permit the production of linolenic acid or a composition comprising linolenic acid in said non-human organism or in the culture medium surrounding said non-human organism.

[52547] A further embodiment of the present invention relates to a process for the production of linolenic acid, which comprises
[52548] (a) increasing or generating one or more activities selected from the group consisting of ydr339c-protein in an organelle, preferably in plastids or mitochondria, especially in plastids, of a non-human organism or a part thereof, preferably a microorganism, a plant cell, a plant or a part thereof, as compared to a corresponding non-transformed wild type non-human organism or a part thereof; and
[52549] (b) growing the non-human organism or a part thereof under conditions which permit the production of linolenic acid or a composition comprising linolenic acid in said non-human organism or in the culture medium surrounding said non-human organism.

[52550] A further embodiment of the present invention relates to a process for the production of linolenic acid, which comprises
[52551] (a) increasing or generating one or more activities selected from the group consisting of ydr507c-protein in an organelle, preferably in plastids or mitochondria, especially in plastids, of a non-human organism or a part thereof, preferably a microorganism, a plant cell, a plant or a part thereof, as compared to a corresponding non-transformed wild type non-human organism or a part thereof; and
[52552] (b) growing the non-human organism or a part thereof under conditions which permit the production of linolenic acid or a composition comprising linolenic acid in said non-human organism or in the culture medium surrounding said non-human organism.

[52553] A further embodiment of the present invention relates to a process for the production of linolenic acid, which comprises
[52554] (a) increasing or generating one or more activities selected from the group consisting of dihydroxyacetone kinase in an organelle, preferably in plastids or mitochondria, especially in plastids, of a non-human organism or a part thereof, preferably a microorganism, a plant cell, a plant or a part thereof, as compared to a corresponding non-transformed wild type non-human organism or a part thereof; and
[52555] (b) growing the non-human organism or a part thereof under conditions which permit the production of linolenic acid or a composition comprising linolenic acid in said non-human organism or in the culture medium surrounding said non-human organism.

[52556] A further embodiment of the present invention relates to a process for the production of linolenic acid, which comprises
[52557] (a) increasing or generating one or more activities selected from the group consisting of oxidoreductase in an organelle, preferably in plastids or mitochondria, especially in plastids, of a non-human organism or a part thereof, preferably a microorganism, a plant cell, a plant or a part thereof, as compared to a corresponding non-transformed wild type non-human organism or a part thereof; and
[52558] (b) growing the non-human organism or a part thereof under conditions which permit the production of linolenic acid or a composition comprising linolenic acid in said non-human organism or in the culture medium surrounding said non-human organism.

[52559] A further embodiment of the present invention relates to a process for the production of linolenic acid, which comprises
[52560] (a) increasing or generating one or more activities selected from the group consisting of DnaJ-like chaperone in an organelle, preferably in plastids or mitochondria, especially in plastids, of a non-human organism or a part thereof, preferably a microorganism, a plant cell, a plant or a part thereof, as compared to a corresponding non-transformed wild type non-human organism or a part thereof; and
[52561] (b) growing the non-human organism or a part thereof under conditions which permit the production of linolenic acid or a composition comprising linolenic acid in said non-human organism or in the culture medium surrounding said non-human organism.

[52562] A further embodiment of the present invention relates to a process for the production of linolenic acid, which comprises
[52563] (a) increasing or generating one or more activities selected from the group consisting of ymr013c-protein in an organelle, preferably in plastids or mitochondria, especially in plastids, of a non-human organism or a part thereof, preferably a microorganism, a plant cell, a plant or a part thereof, as compared to a corresponding non-transformed wild type non-human organism or a part thereof; and
[52564] (b) growing the non-human organism or a part thereof under conditions which permit the production of linolenic acid or a composition comprising linolenic acid in said non-human organism or in the culture medium surrounding said non-human organism.

[52565] A further embodiment of the present invention relates to a process for the production of linolenic acid, which comprises
[52566] (a) increasing or generating one or more activities selected from the group consisting of molecular chaperone in an organelle, preferably in plastids or mitochondria, especially in plastids, of a non-human organism or a part thereof, preferably a microorganism, a plant cell, a plant or a part thereof, as compared to a corresponding non-transformed wild type non-human organism or a part thereof; and
[52567] (b) growing the non-human organism or a part thereof under conditions which permit the production of linolenic acid or a composition comprising linolenic acid in said non-human organism or in the culture medium surrounding said non-human organism.

[52568] A further embodiment of the present invention relates to a process for the production of linolenic acid, which comprises
[52569] (a) increasing or generating one or more activities selected from the group consisting of ATPase epsilon subunit in an organelle, preferably in plastids or mitochondria, especially in plastids, of a non-human organism or a part thereof, preferably a microorganism, a plant cell, a plant or a part thereof, as compared to a corresponding non-transformed wild type non-human organism or a part thereof; and
[52570] (b) growing the non-human organism or a part thereof under conditions which permit the production of linolenic acid or a composition comprising linolenic acid in said non-human organism or in the culture medium surrounding said non-human organism.

[52571] A further embodiment of the present invention relates to a process for the production of linolenic acid, which comprises
[52572] (a) increasing or generating one or more activities selected from the group consisting of glucose-6-phosphate 1-dehydrogenase in an organelle, preferably in plastids or mitochondria, especially in plastids, of a non-human organism or a part thereof, preferably a microorganism, a plant cell, a plant or a part thereof, as compared to a corresponding non-transformed wild type non-human organism or a part thereof; and
[52573] (b) growing the non-human organism or a part thereof under conditions which permit the production of linolenic acid or a composition comprising linolenic acid in said non-human organism or in the culture medium surrounding said non-human organism.

[52574] A further embodiment of the present invention relates to a process for the production of linolenic acid, which comprises
[52575] (a1) increasing or generating the activity of a polypeptide comprising a polypeptide as depicted in the respective line in column 5 or 8 of Table II, application no. 9, or a homolog or fragment thereof, a consensus sequence or at least one polypeptide motif as depicted in column 8 of Table IV, application no. 9; or
[52576] increasing or generating the activity of an expression product of one or more nucleic acid molecule(s) comprising a polynucleotide as depicted in the respective line in column 5 or 8 of Table I, application no. 9, preferably the coding region thereof, or a homolog or a fragment thereof;
[52577] in an organelle, preferably in plastids or mitochondria, especially in plastids, in a non-human organism or a part thereof; preferably a microorganism, a plant cell, a plant or a part thereof, as compared to a corresponding non-transformed wild type non-human organism or a part thereof; or
[52578] (a2) increasing or generating the activity of a polypeptide comprising a polypeptide as depicted in the respective line in column 5 or 8 of Table II, application no. 9, or a homolog or a fragment thereof, a consensus sequence or at least one polypeptide motif as depicted in the respective line in column 8 of Table IV, application no. 9, which is joined to a transit peptide; or
[52579] increasing or generating the activity of an expression product of one or more nucleic acid molecule(s) comprising a polynucleotide as depicted in the respective line in column 5 or 8 of Table I, application no. 9, preferably the coding region thereof, or a homolog or a fragment thereof, which is joined to a nucleic acid sequence encoding an organelle localization sequence, preferably a plastid or a mitochondrion localization sequence, especially a plastid localization sequence;
[52580] in a non-human organism or a part thereof; preferably a microorganism, a plant cell, a plant or a part thereof, as compared to a corresponding non-transformed wild type non-human organism or a part thereof; or
[52581] (a3) increasing or generating the activity of a polypeptide comprising a polypeptide as depicted in the respective line in column 5 or 8 of Table II, application no. 9, or a homolog or a fragment thereof, a consensus sequence or at least one polypeptide motif as depicted in the respective line in column 8 of Table IV, application no. 9; or increasing or generating the activity of an expression product of one or more nucleic acid molecule(s) comprising a polynucleotide as depicted in the respective line in column 5 or 8 of Table I, application no. 9, preferably the coding region thereof, or a homolog or a fragment thereof;
[52582] in an organelle, preferably in plastids or mitochondria, especially in plastids, in a non-human organism or a part thereof; preferably a microorganism, a plant cell, a plant or a part thereof, through transformation of the organelle, as compared to a corresponding non-transformed wild type non-human organism or a part thereof;
[52583] and
[52584] (b) growing the non-human organism under conditions which permit the production of linolenic acid, or a composition comprising linolenic acid in said non-human organism or in the culture medium surrounding said non-human organism.

[52585] Accordingly, the present invention relates to a process for the production of linolenic acid, which comprises
[52586] (a) increasing or generating the activity of a protein phosphatase in the cytosol of a cell of a non-human organism or a part thereof, preferably a microorganism, a plant cell, a plant or a part thereof, as compared to a corresponding non-transformed wild type non-human organism or a part thereof; and
[52587] (b) growing the non-human organism or a part thereof under conditions which permit the production of linolenic acid or a composition comprising linolenic acid in said non-human organism or in the culture medium surrounding said non-human organism.

[52588] Accordingly, the present invention relates to a process for the production of linolenic acid, which comprises
[52589] (a) increasing or generating the activity of a transcription factor in the cytosol of a cell of a non-human organism or a part thereof, preferably a microorganism, a plant cell, a plant or a part thereof, as compared to a corresponding non-transformed wild type non-human organism or a part thereof; and
[52590] (b) growing the non-human organism or a part thereof under conditions which permit the production of linolenic acid or a composition comprising linolenic acid in said non-human organism or in the culture medium surrounding said non-human organism.

[52591] Accordingly, the present invention relates to a process for the production of linolenic acid, which comprises
[52592] (a) increasing or generating the activity of a protein phosphatase in the cytosol of a cell of a non-human organism or a part thereof, preferably a microorganism, a plant cell, a plant or a part thereof, as compared to a corresponding non-transformed wild type non-human organism or a part thereof; and
[52593] (b) growing the non-human organism or a part thereof under conditions which permit the production of linolenic acid or a composition comprising linolenic acid in said non-human organism or in the culture medium surrounding said non-human organism.

[52594] Accordingly, the present invention relates to a process for the production of linolenic acid, which comprises
[52595] (a) increasing or generating the activity of a pyruvate kinase in the cytosol of a cell of a non-human organism or a part thereof, preferably a microorganism, a plant cell, a plant or a part thereof, as compared to a corresponding non-transformed wild type non-human organism or a part thereof; and
[52596] (b) growing the non-human organism or a part thereof under conditions which permit the production of linolenic acid or a composition comprising linolenic acid in said non-human organism or in the culture medium surrounding said non-human organism.

[52597] Accordingly, the present invention relates to a process for the production of linolenic acid, which comprises
[52598] (a) increasing or generating the activity of a At2g45420-protein in the cytosol of a cell of a non-human organism or a part thereof, preferably a microorganism, a plant cell, a plant or a part thereof, as compared to a corresponding non-transformed wild type non-human organism or a part thereof; and
[52599] (b) growing the non-human organism or a part thereof under conditions which permit the production of linolenic acid or a composition comprising linolenic acid in said non-human organism or in the culture medium surrounding said non-human organism.

[52600] Accordingly, the present invention relates to a process for the production of linolenic acid, which comprises
[52601] (a) increasing or generating the activity of a heat shock transcription factor in the cytosol of a cell of a non-human organism or a part thereof, preferably a microorganism, a plant cell, a plant or a part thereof, as compared to a corresponding non-transformed wild type non-human organism or a part thereof; and
[52602] (b) growing the non-human organism or a part thereof under conditions which permit the production of linolenic acid or a composition comprising linolenic acid in said non-human organism or in the culture medium surrounding said non-human organism.

[52603] Accordingly, the present invention relates to a process for the production of linolenic acid, which comprises
[52604] (a) increasing or generating the activity of a glutaredoxin in the cytosol of a cell of a non-human organism or a part thereof, preferably a microorganism, a plant cell, a plant or a part thereof, as compared to a corresponding non-transformed wild type non-human organism or a part thereof; and
[52605] (b) growing the non-human organism or a part thereof under conditions which permit the production of linolenic acid or a composition comprising linolenic acid in said non-human organism or in the culture medium surrounding said non-human organism.

[52606] Accordingly, the present invention relates to a process for the production of linolenic acid, which comprises
[52607] (a) increasing or generating the activity of a monothiol glutaredoxin in the cytosol of a cell of a non-human organism or a part thereof, preferably a microorganism, a plant cell, a plant or a part thereof, as compared to a corresponding non-transformed wild type non-human organism or a part thereof; and
[52608] (b) growing the non-human organism or a part thereof under conditions which permit the production of linolenic acid or a composition comprising linolenic acid in said non-human organism or in the culture medium surrounding said non-human organism.

[52609] Accordingly, the present invention relates to a process for the production of linolenic acid, which comprises
[52610] (a) increasing or generating the activity of a heat shock transcription factor in the cytosol of a cell of a non-human organism or a part thereof, preferably a microorganism, a plant cell, a plant or a part thereof, as compared to a corresponding non-transformed wild type non-human organism or a part thereof; and
[52611] (b) growing the non-human organism or a part thereof under conditions which permit the production of linolenic acid or a composition comprising linolenic acid in said non-human organism or in the culture medium surrounding said non-human organism.

[52612] Accordingly, the present invention relates to a process for the production of linolenic acid, which comprises
[52613] (a) increasing or generating the activity of a protein phosphatase in the cytosol of a cell of a non-human organism or a part thereof, preferably a microorganism, a plant cell, a plant or a part thereof, as compared to a corresponding non-transformed wild type non-human organism or a part thereof; and
[52614] (b) growing the non-human organism or a part thereof under conditions which permit the production of linolenic acid or a composition comprising linolenic acid in said non-human organism or in the culture medium surrounding said non-human organism.

[52615] Accordingly, the present invention relates to a process for the production of linolenic acid, which comprises
[52616] (a) increasing or generating the activity of a glutaredoxin in the cytosol of a cell of a non-human organism or a part thereof, preferably a microorganism, a plant cell, a plant or a part thereof, as compared to a corresponding non-transformed wild type non-human organism or a part thereof; and
[52617] (b) growing the non-human organism or a part thereof under conditions which permit the production of linolenic acid or a composition comprising linolenic acid in said non-human organism or in the culture medium surrounding said non-human organism.

[52618] Accordingly, the present invention relates to a process for the production of linolenic acid, which comprises
[52619] (a) increasing or generating the activity of a heat shock transcription factor in the cytosol of a cell of a non-human organism or a part thereof, preferably a microorganism, a plant cell, a plant or a part thereof, as compared to a corresponding non-transformed wild type non-human organism or a part thereof; and
[52620] (b) growing the non-human organism or a part thereof under conditions which permit the production of linolenic acid or a composition comprising linolenic acid in said non-human organism or in the culture medium surrounding said non-human organism.

[52621] Accordingly, the present invention relates to a process for the production of linolenic acid, which comprises
[52622] (a) increasing or generating the activity of a monothiol glutaredoxin in the cytosol of a cell of a non-human organism or a part thereof, preferably a microorganism, a plant cell, a plant or a part thereof, as compared to a corresponding non-transformed wild type non-human organism or a part thereof; and
[52623] (b) growing the non-human organism or a part thereof under conditions which permit the production of linolenic acid or a composition comprising linolenic acid in said non-human organism or in the culture medium surrounding said non-human organism.

[52624] Accordingly, the present invention relates to a process for the production of linolenic acid, which comprises
[52625] (a) increasing or generating the activity of a protein phosphatase in the cytosol of a cell of a non-human organism or a part thereof, preferably a microorganism, a plant cell, a plant or a part thereof, as compared to a corresponding non-transformed wild type non-human organism or a part thereof; and
[52626] (b) growing the non-human organism or a part thereof under conditions which permit the production of linolenic acid or a composition comprising linolenic acid in said non-human organism or in the culture medium surrounding said non-human organism.

[52627] Accordingly, the present invention relates to a process for the production of linolenic acid, which comprises
[52628] (a) increasing or generating the activity of a protein phosphatase in the cytosol of a cell of a non-human organism or a part thereof, preferably a microorganism, a plant cell, a plant or a part thereof, as compared to a corresponding non-transformed wild type non-human organism or a part thereof; and
[52629] (b) growing the non-human organism or a part thereof under conditions which permit the production of linolenic acid or a composition comprising linolenic acid in said non-human organism or in the culture medium surrounding said non-human organism.

[52630] Accordingly, the present invention relates to a process for the production of linolenic acid, which comprises
[52631] (a) increasing or generating the activity of a sec-independent protein translocase in the cytosol of a cell of a non-human organism or a part thereof, preferably a microorganism, a plant cell, a plant or a part thereof, as compared to a corresponding non-transformed wild type non-human organism or a part thereof; and
[52632] (b) growing the non-human organism or a part thereof under conditions which permit the production of linolenic acid or a composition comprising linolenic acid in said non-human organism or in the culture medium surrounding said non-human organism.

[52633] Accordingly, the present invention relates to a process for the production of linolenic acid, which comprises
[52634] (a) increasing or generating the activity of a oxidoreductase in the cytosol of a cell of a non-human organism or a part thereof, preferably a microorganism, a plant cell, a plant or a part thereof, as compared to a corresponding non-transformed wild type non-human organism or a part thereof; and
[52635] (b) growing the non-human organism or a part thereof under conditions which permit the production of linolenic acid or a composition comprising linolenic acid in said non-human organism or in the culture medium surrounding said non-human organism.

[52636] Accordingly, the present invention relates to a process for the production of linolenic acid, which comprises
[52637] (a) increasing or generating the activity of a acyl-CoA synthase in the cytosol of a cell of a non-human organism or a part thereof, preferably a microorganism, a plant cell, a plant or a part thereof, as compared to a corresponding non-transformed wild type non-human organism or a part thereof; and
[52638] (b) growing the non-human organism or a part thereof under conditions which permit the production of linolenic acid or a composition comprising linolenic acid in said non-human organism or in the culture medium surrounding said non-human organism.

[52639] Accordingly, the present invention relates to a process for the production of linolenic acid, which comprises
[52640] (a) increasing or generating the activity of a oxidoreductase in the cytosol of a cell of a non-human organism or a part thereof, preferably a microorganism, a plant cell, a plant or a part thereof, as compared to a corresponding non-transformed wild type non-human organism or a part thereof; and
[52641] (b) growing the non-human organism or a part thereof under conditions which permit the production of linolenic acid or a composition comprising linolenic acid in said non-human organism or in the culture medium surrounding said non-human organism.

[52642] Accordingly, the present invention relates to a process for the production of linolenic acid, which comprises
[52643] (a) increasing or generating the activity of a ThiF family protein in the cytosol of a cell of a non-human organism or a part thereof, preferably a microorganism, a plant cell, a plant or a part thereof, as compared to a corresponding non-transformed wild type non-human organism or a part thereof; and
[52644] (b) growing the non-human organism or a part thereof under conditions which permit the production of linolenic acid or a composition comprising linolenic acid in said non-human organism or in the culture medium surrounding said non-human organism.

[52645] Accordingly, the present invention relates to a process for the production of linolenic acid, which comprises
[52646] (a) increasing or generating the activity of a CTP synthase in the cytosol of a cell of a non-human organism or a part thereof, preferably a microorganism, a plant cell, a plant or a part thereof, as compared to a corresponding non-transformed wild type non-human organism or a part thereof; and
[52647] (b) growing the non-human organism or a part thereof under conditions which permit the production of linolenic acid or a composition comprising linolenic acid in said non-human organism or in the culture medium surrounding said non-human organism.

[52648] Accordingly, the present invention relates to a process for the production of linolenic acid, which comprises
[52649] (a) increasing or generating the activity of a recombinase A in the cytosol of a cell of a non-human organism or a part thereof, preferably a microorganism, a plant cell, a plant or a part thereof, as compared to a corresponding non-transformed wild type non-human organism or a part thereof; and
[52650] (b) growing the non-human organism or a part thereof under conditions which permit the production of linolenic acid or a composition comprising linolenic acid in said non-human organism or in the culture medium surrounding said non-human organism.

[52651] Accordingly, the present invention relates to a process for the production of linolenic acid, which comprises
[52652] (a) increasing or generating the activity of a isopropylmalate isomerase large subunit in the cytosol of a cell of a non-human organism or a part thereof, preferably a microorganism, a plant cell, a plant or a part thereof, as compared to a corresponding non-transformed wild type non-human organism or a part thereof; and
[52653] (b) growing the non-human organism or a part thereof under conditions which permit the production of linolenic acid or a composition comprising linolenic acid in said non-human organism or in the culture medium surrounding said non-human organism.

[52654] Accordingly, the present invention relates to a process for the production of linolenic acid, which comprises
[52655] (a) increasing or generating the activity of a HesB/YadR/YfhF family protein in the cytosol of a cell of a non-human organism or a part thereof, preferably a microorganism, a plant cell, a plant or a part thereof, as compared to a corresponding non-transformed wild type non-human organism or a part thereof; and
[52656] (b) growing the non-human organism or a part thereof under conditions which permit the production of linolenic acid or a composition comprising linolenic acid in said non-human organism or in the culture medium surrounding said non-human organism.

[52657] Accordingly, the present invention relates to a process for the production of linolenic acid, which comprises
[52658] (a) increasing or generating the activity of a b0195-protein in the cytosol of a cell of a non-human organism or a part thereof, preferably a microorganism, a plant cell, a plant or a part thereof, as compared to a corresponding non-transformed wild type non-human organism or a part thereof; and
[52659] (b) growing the non-human organism or a part thereof under conditions which permit the production of linolenic acid or a composition comprising linolenic acid in said non-human organism or in the culture medium surrounding said non-human organism.

[52660] Accordingly, the present invention relates to a process for the production of linolenic acid, which comprises
[52661] (a) increasing or generating the activity of a asparaginase in the cytosol of a cell of a non-human organism or a part thereof, preferably a microorganism, a plant cell, a plant or a part thereof, as compared to a corresponding non-transformed wild type non-human organism or a part thereof; and
[52662] (b) growing the non-human organism or a part thereof under conditions which permit the production of linolenic acid or a composition comprising linolenic acid in said non-human organism or in the culture medium surrounding said non-human organism.

[52663] Accordingly, the present invention relates to a process for the production of linolenic acid, which comprises
[52664] (a) increasing or generating the activity of a multidrug resistance protein in the cytosol of a cell of a non-human organism or a part thereof, preferably a microorganism, a plant cell, a plant or a part thereof, as compared to a corresponding non-transformed wild type non-human organism or a part thereof; and
[52665] (b) growing the non-human organism or a part thereof under conditions which permit the production of linolenic acid or a composition comprising linolenic acid in said non-human organism or in the culture medium surrounding said non-human organism.

[52666] Accordingly, the present invention relates to a process for the production of linolenic acid, which comprises
[52667] (a) increasing or generating the activity of a 3-oxoacyl-[acyl-carrier-protein] reductase in the cytosol of a cell of a non-human organism or a part thereof, preferably a microorganism, a plant cell, a plant or a part thereof, as compared to a corresponding non-transformed wild type non-human organism or a part thereof; and
[52668] (b) growing the non-human organism or a part thereof under conditions which permit the production of linolenic acid or a composition comprising linolenic acid in said non-human organism or in the culture medium surrounding said non-human organism.

[52669] Accordingly, the present invention relates to a process for the production of linolenic acid, which comprises
[52670] (a) increasing or generating the activity of a 3-oxoacyl-[acyl-carrier-protein] synthase in the cytosol of a cell of a non-human organism or a part thereof, preferably a microorganism, a plant cell, a plant or a part thereof, as compared to a corresponding non-transformed wild type non-human organism or a part thereof; and
[52671] (b) growing the non-human organism or a part thereof under conditions which permit the production of linolenic acid or a composition comprising linolenic acid in said non-human organism or in the culture medium surrounding said non-human organism.

[52672] Accordingly, the present invention relates to a process for the production of linolenic acid, which comprises
[52673] (a) increasing or generating the activity of a b1234-protein in the cytosol of a cell of a non-human organism or a part thereof, preferably a microorganism, a plant cell, a plant or a part thereof, as compared to a corresponding non-transformed wild type non-human organism or a part thereof; and
[52674] (b) growing the non-human organism or a part thereof under conditions which permit the production of linolenic acid or a composition comprising linolenic acid in said non-human organism or in the culture medium surrounding said non-human organism.

[52675] Accordingly, the present invention relates to a process for the production of linolenic acid, which comprises
[52676] (a) increasing or generating the activity of a b1248-protein in the cytosol of a cell of a non-human organism or a part thereof, preferably a microorganism, a plant cell, a plant or a part thereof, as compared to a corresponding non-transformed wild type non-human organism or a part thereof; and
[52677] (b) growing the non-human organism or a part thereof under conditions which permit the production of linolenic acid or a composition comprising linolenic acid in said non-human organism or in the culture medium surrounding said non-human organism.

[52678] Accordingly, the present invention relates to a process for the production of linolenic acid, which comprises
[52679] (a) increasing or generating the activity of a b1280-protein in the cytosol of a cell of a non-human organism or a part thereof, preferably a microorganism, a plant cell, a plant or a part thereof, as compared to a corresponding non-transformed wild type non-human organism or a part thereof; and
[52680] (b) growing the non-human organism or a part thereof under conditions which permit the production of linolenic acid or a composition comprising linolenic acid in said non-human organism or in the culture medium surrounding said non-human organism.

[52681] Accordingly, the present invention relates to a process for the production of linolenic acid, which comprises
[52682] (a) increasing or generating the activity of a b1330-protein in the cytosol of a cell of a non-human organism or a part thereof, preferably a microorganism, a plant cell, a plant or a part thereof, as compared to a corresponding non-transformed wild type non-human organism or a part thereof; and
[52683] (b) growing the non-human organism or a part thereof under conditions which permit the production of linolenic acid or a composition comprising linolenic acid in said non-human organism or in the culture medium surrounding said non-human organism.

[52684] Accordingly, the present invention relates to a process for the production of linolenic acid, which comprises
[52685] (a) increasing or generating the activity of a b1470-protein in the cytosol of a cell of a non-human organism or a part thereof, preferably a microorganism, a plant cell, a plant or a part thereof, as compared to a corresponding non-transformed wild type non-human organism or a part thereof; and
[52686] (b) growing the non-human organism or a part thereof under conditions which permit the production of linolenic acid or a composition comprising linolenic acid in said non-human organism or in the culture medium surrounding said non-human organism.

[52687] Accordingly, the present invention relates to a process for the production of linolenic acid, which comprises
[52688] (a) increasing or generating the activity of a acid shock protein in the cytosol of a cell of a non-human organism or a part thereof, preferably a microorganism, a plant cell, a plant or a part thereof, as compared to a corresponding non-transformed wild type non-human organism or a part thereof; and
[52689] (b) growing the non-human organism or a part thereof under conditions which permit the production of linolenic acid or a composition comprising linolenic acid in said non-human organism or in the culture medium surrounding said non-human organism.

[52690] Accordingly, the present invention relates to a process for the production of linolenic acid, which comprises
[52691] (a) increasing or generating the activity of a fumarate hydratase in the cytosol of a cell of a non-human organism or a part thereof, preferably a microorganism, a plant cell, a plant or a part thereof, as compared to a corresponding non-transformed wild type non-human organism or a part thereof; and
[52692] (b) growing the non-human organism or a part thereof under conditions which permit the production of linolenic acid or a composition comprising linolenic acid in said non-human organism or in the culture medium surrounding said non-human organism.

[52693] Accordingly, the present invention relates to a process for the production of linolenic acid, which comprises
[52694] (a) increasing or generating the activity of a electron transport complex protein in the cytosol of a cell of a non-human organism or a part thereof, preferably a microorganism, a plant cell, a plant or a part thereof, as compared to a corresponding non-transformed wild type non-human organism or a part thereof; and
[52695] (b) growing the non-human organism or a part thereof under conditions which permit the production of linolenic acid or a composition comprising linolenic acid in said non-human organism or in the culture medium surrounding said non-human organism.

[52696] Accordingly, the present invention relates to a process for the production of linolenic acid, which comprises
[52697] (a) increasing or generating the activity of a b1670-protein in the cytosol of a cell of a non-human organism or a part thereof, preferably a microorganism, a plant cell, a plant or a part thereof, as compared to a corresponding non-transformed wild type non-human organism or a part thereof; and
[52698] (b) growing the non-human organism or a part thereof under conditions which permit the production of linolenic acid or a composition comprising linolenic acid in said non-human organism or in the culture medium surrounding said non-human organism.

[52699] Accordingly, the present invention relates to a process for the production of linolenic acid, which comprises
[52700] (a) increasing or generating the activity of a b1672-protein in the cytosol of a cell of a non-human organism or a part thereof, preferably a microorganism, a plant cell, a plant or a part thereof, as compared to a corresponding non-transformed wild type non-human organism or a part thereof; and
[52701] (b) growing the non-human organism or a part thereof under conditions which permit the production of linolenic acid or a composition comprising linolenic acid in said non-human organism or in the culture medium surrounding said non-human organism.

[52702] Accordingly, the present invention relates to a process for the production of linolenic acid, which comprises
[52703] (a) increasing or generating the activity of a b1837-protein in the cytosol of a cell of a non-human organism or a part thereof, preferably a microorganism, a plant cell, a plant or a part thereof, as compared to a corresponding non-transformed wild type non-human organism or a part thereof; and
[52704] (b) growing the non-human organism or a part thereof under conditions which permit the production of linolenic acid or a composition comprising linolenic acid in said non-human organism or in the culture medium surrounding said non-human organism.

[52705] Accordingly, the present invention relates to a process for the production of linolenic acid, which comprises
[52706] (a) increasing or generating the activity of a b2032-protein in the cytosol of a cell of a non-human organism or a part thereof, preferably a microorganism, a plant cell, a plant or a part thereof, as compared to a corresponding non-transformed wild type non-human organism or a part thereof; and
[52707] (b) growing the non-human organism or a part thereof under conditions which permit the production of linolenic acid or a composition comprising linolenic acid in said non-human organism or in the culture medium surrounding said non-human organism.

[52708] Accordingly, the present invention relates to a process for the production of linolenic acid, which comprises
[52709] (a) increasing or generating the activity of a b2107-protein in the cytosol of a cell of a non-human organism or a part thereof, preferably a microorganism, a plant cell, a plant or a part thereof, as compared to a corresponding non-transformed wild type non-human organism or a part thereof; and
[52710] (b) growing the non-human organism or a part thereof under conditions which permit the production of linolenic acid or a composition comprising linolenic acid in said non-human organism or in the culture medium surrounding said non-human organism.

[52711] Accordingly, the present invention relates to a process for the production of linolenic acid, which comprises
[52712] (a) increasing or generating the activity of a b2399-protein in the cytosol of a cell of a non-human organism or a part thereof, preferably a microorganism, a plant cell, a plant or a part thereof, as compared to a corresponding non-transformed wild type non-human organism or a part thereof; and
[52713] (b) growing the non-human organism or a part thereof under conditions which permit the production of linolenic acid or a composition comprising linolenic acid in said non-human organism or in the culture medium surrounding said non-human organism.

[52714] Accordingly, the present invention relates to a process for the production of linolenic acid, which comprises
[52715] (a) increasing or generating the activity of a ethanolamine utilization protein in the cytosol of a cell of a non-human organism or a part thereof, preferably a microorganism, a plant cell, a plant or a part thereof, as compared to a corresponding non-transformed wild type non-human organism or a part thereof; and
[52716] (b) growing the non-human organism or a part thereof under conditions which permit the production of linolenic acid or a composition comprising linolenic acid in said non-human organism or in the culture medium surrounding said non-human organism.

[52717] Accordingly, the present invention relates to a process for the production of linolenic acid, which comprises
[52718] (a) increasing or generating the activity of a b2474-protein in the cytosol of a cell of a non-human organism or a part thereof, preferably a microorganism, a plant cell, a plant or a part thereof, as compared to a corresponding non-transformed wild type non-human organism or a part thereof; and
[52719] (b) growing the non-human organism or a part thereof under conditions which permit the production of linolenic acid or a composition comprising linolenic acid in said non-human organism or in the culture medium surrounding said non-human organism.

[52720] Accordingly, the present invention relates to a process for the production of linolenic acid, which comprises
[52721] (a) increasing or generating the activity of a b2613-protein in the cytosol of a cell of a non-human organism or a part thereof, preferably a microorganism, a plant cell, a plant or a part thereof, as compared to a corresponding non-transformed wild type non-human organism or a part thereof; and
[52722] (b) growing the non-human organism or a part thereof under conditions which permit the production of linolenic acid or a composition comprising linolenic acid in said non-human organism or in the culture medium surrounding said non-human organism.

[52723] Accordingly, the present invention relates to a process for the production of linolenic acid, which comprises
[52724] (a) increasing or generating the activity of a b2682-protein in the cytosol of a cell of a non-human organism or a part thereof, preferably a microorganism, a plant cell, a plant or a part thereof, as compared to a corresponding non-transformed wild type non-human organism or a part thereof; and
[52725] (b) growing the non-human organism or a part thereof under conditions which permit the production of linolenic acid or a composition comprising linolenic acid in said non-human organism or in the culture medium surrounding said non-human organism.

[52726] Accordingly, the present invention relates to a process for the production of linolenic acid, which comprises
[52727] (a) increasing or generating the activity of a flavodoxin in the cytosol of a cell of a non-human organism or a part thereof, preferably a microorganism, a plant cell, a plant or a part thereof, as compared to a corresponding non-transformed wild type non-human organism or a part thereof; and
[52728] (b) growing the non-human organism or a part thereof under conditions which permit the production of linolenic acid or a composition comprising linolenic acid in said non-human organism or in the culture medium surrounding said non-human organism.

[52729] Accordingly, the present invention relates to a process for the production of linolenic acid, which comprises
[52730] (a) increasing or generating the activity of a AAS bifunctional protein in the cytosol of a cell of a non-human organism or a part thereof, preferably a microorganism, a plant cell, a plant or a part thereof, as compared to a corresponding non-transformed wild type non-human organism or a part thereof; and
[52731] (b) growing the non-human organism or a part thereof under conditions which permit the production of linolenic acid or a composition comprising linolenic acid in said non-human organism or in the culture medium surrounding said non-human organism.

[52732] Accordingly, the present invention relates to a process for the production of linolenic acid, which comprises
[52733] (a) increasing or generating the activity of a phosphotriesterase in the cytosol of a cell of a non-human organism or a part thereof, preferably a microorganism, a plant cell, a plant or a part thereof, as compared to a corresponding non-transformed wild type non-human organism or a part thereof; and
[52734] (b) growing the non-human organism or a part thereof under conditions which permit the production of linolenic acid or a composition comprising linolenic acid in said non-human organism or in the culture medium surrounding said non-human organism.

[52735] Accordingly, the present invention relates to a process for the production of linolenic acid, which comprises
[52736] (a) increasing or generating the activity of a b3442-protein in the cytosol of a cell of a non-human organism or a part thereof, preferably a microorganism, a plant cell, a plant or a part thereof, as compared to a corresponding non-transformed wild type non-human organism or a part thereof; and
[52737] (b) growing the non-human organism or a part thereof under conditions which permit the production of linolenic acid or a composition comprising linolenic acid in said non-human organism or in the culture medium surrounding said non-human organism.

[52738] Accordingly, the present invention relates to a process for the production of linolenic acid, which comprises
[52739] (a) increasing or generating the activity of a b3534-protein in the cytosol of a cell of a non-human organism or a part thereof, preferably a microorganism, a plant cell, a plant or a part thereof, as compared to a corresponding non-transformed wild type non-human organism or a part thereof; and
[52740] (b) growing the non-human organism or a part thereof under conditions which permit the production of linolenic acid or a composition comprising linolenic acid in said non-human organism or in the culture medium surrounding said non-human organism.

[52741] Accordingly, the present invention relates to a process for the production of linolenic acid, which comprises
[52742] (a) increasing or generating the activity of a threonine efflux protein in the cytosol of a cell of a non-human organism or a part thereof, preferably a microorganism, a plant cell, a plant or a part thereof, as compared to a corresponding non-transformed wild type non-human organism or a part thereof; and
[52743] (b) growing the non-human organism or a part thereof under conditions which permit the production of linolenic acid or a composition comprising linolenic acid in said non-human organism or in the culture medium surrounding said non-human organism.

[52744] Accordingly, the present invention relates to a process for the production of linolenic acid, which comprises
[52745] (a) increasing or generating the activity of a b4023-protein in the cytosol of a cell of a non-human organism or a part thereof, preferably a microorganism, a plant cell, a plant or a part thereof, as compared to a corresponding non-transformed wild type non-human organism or a part thereof; and
[52746] (b) growing the non-human organism or a part thereof under conditions which permit the production of linolenic acid or a composition comprising linolenic acid in said non-human organism or in the culture medium surrounding said non-human organism.

[52747] Accordingly, the present invention relates to a process for the production of linolenic acid, which comprises
[52748] (a) increasing or generating the activity of a glutaredoxin in the cytosol of a cell of a non-human organism or a part thereof, preferably a microorganism, a plant cell, a plant or a part thereof, as compared to a corresponding non-transformed wild type non-human organism or a part thereof; and
[52749] (b) growing the non-human organism or a part thereof under conditions which permit the production of linolenic acid or a composition comprising linolenic acid in said non-human organism or in the culture medium surrounding said non-human organism.

[52750] Accordingly, the present invention relates to a process for the production of linolenic acid, which comprises
[52751] (a) increasing or generating the activity of a transcription factor in the cytosol of a cell of a non-human organism or a part thereof, preferably a microorganism, a plant cell, a plant or a part thereof, as compared to a corresponding non-transformed wild type non-human organism or a part thereof; and
[52752] (b) growing the non-human organism or a part thereof under conditions which permit the production of linolenic acid or a composition comprising linolenic acid in said non-human organism or in the culture medium surrounding said non-human organism.

[52753] Accordingly, the present invention relates to a process for the production of linolenic acid, which comprises
[52754] (a) increasing or generating the activity of a branched chain amino acid ABC transporter ATP-binding protein in the cytosol of a cell of a non-human organism or a part thereof, preferably a microorganism, a plant cell, a plant or a part thereof, as compared to a corresponding non-transformed wild type non-human organism or a part thereof; and
[52755] (b) growing the non-human organism or a part thereof under conditions which permit the production of linolenic acid or a composition comprising linolenic acid in said non-human organism or in the culture medium surrounding said non-human organism.

[52756] Accordingly, the present invention relates to a process for the production of linolenic acid, which comprises
[52757] (a) increasing or generating the activity of a phosphofructokinase in the cytosol of a cell of a non-human organism or a part thereof, preferably a microorganism, a plant cell, a plant or a part thereof, as compared to a corresponding non-transformed wild type non-human organism or a part thereof; and
[52758] (b) growing the non-human organism or a part thereof under conditions which permit the production of linolenic acid or a composition comprising linolenic acid in said non-human organism or in the culture medium surrounding said non-human organism.

[52759] Accordingly, the present invention relates to a process for the production of linolenic acid, which comprises
[52760] (a) increasing or generating the activity of a carbon dioxide concentrating mechanism protein in the cytosol of a cell of a non-human organism or a part thereof, preferably a microorganism, a plant cell, a plant or a part thereof, as compared to a corresponding non-transformed wild type non-human organism or a part thereof; and
[52761] (b) growing the non-human organism or a part thereof under conditions which permit the production of linolenic acid or a composition comprising linolenic acid in said non-human organism or in the culture medium surrounding said non-human organism.

[52762] Accordingly, the present invention relates to a process for the production of linolenic acid, which comprises
[52763] (a) increasing or generating the activity of a sll1032-protein in the cytosol of a cell of a non-human organism or a part thereof, preferably a microorganism, a plant cell, a plant or a part thereof, as compared to a corresponding non-transformed wild type non-human organism or a part thereof; and
[52764] (b) growing the non-human organism or a part thereof under conditions which permit the production of linolenic acid or a composition comprising linolenic acid in said non-human organism or in the culture medium surrounding said non-human organism.

[52765] Accordingly, the present invention relates to a process for the production of linolenic acid, which comprises
[52766] (a) increasing or generating the activity of a CTP synthetase in the cytosol of a cell of a non-human organism or a part thereof, preferably a microorganism, a plant cell, a plant or a part thereof, as compared to a corresponding non-transformed wild type non-human organism or a part thereof; and
[52767] (b) growing the non-human organism or a part thereof under conditions which permit the production of linolenic acid or a composition comprising linolenic acid in said non-human organism or in the culture medium surrounding said non-human organism.

[52768] Accordingly, the present invention relates to a process for the production of linolenic acid, which comprises
[52769] (a) increasing or generating the activity of a carbamoyl-phosphate synthase subunit in the cytosol of a cell of a non-human organism or a part thereof, preferably a microorganism, a plant cell, a plant or a part thereof, as compared to a corresponding non-transformed wild type non-human organism or a part thereof; and
[52770] (b) growing the non-human organism or a part thereof under conditions which permit the production of linolenic acid or a composition comprising linolenic acid in said non-human organism or in the culture medium surrounding said non-human organism.

[52771] Accordingly, the present invention relates to a process for the production of linolenic acid, which comprises
[52772] (a) increasing or generating the activity of a acyl transferase in the cytosol of a cell of a non-human organism or a part thereof, preferably a microorganism, a plant cell, a plant or a part thereof, as compared to a corresponding non-transformed wild type non-human organism or a part thereof; and
[52773] (b) growing the non-human organism or a part thereof under conditions which permit the production of linolenic acid or a composition comprising linolenic acid in said non-human organism or in the culture medium surrounding said non-human organism.

[52774] Accordingly, the present invention relates to a process for the production of linolenic acid, which comprises
[52775] (a) increasing or generating the activity of a coproporphyrinogen III oxidase in the cytosol of a cell of a non-human organism or a part thereof, preferably a microorganism, a plant cell, a plant or a part thereof, as compared to a corresponding non-transformed wild type non-human organism or a part thereof; and
[52776] (b) growing the non-human organism or a part thereof under conditions which permit the production of linolenic acid or a composition comprising linolenic acid in said non-human organism or in the culture medium surrounding said non-human organism.

[52777] Accordingly, the present invention relates to a process for the production of linolenic acid, which comprises
[52778] (a) increasing or generating the activity of a cation-transporting ATPase in the cytosol of a cell of a non-human organism or a part thereof, preferably a microorganism, a plant cell, a plant or a part thereof, as compared to a corresponding non-transformed wild type non-human organism or a part thereof; and
[52779] (b) growing the non-human organism or a part thereof under conditions which permit the production of linolenic acid or a composition comprising linolenic acid in said non-human organism or in the culture medium surrounding said non-human organism.

[52780] Accordingly, the present invention relates to a process for the production of linolenic acid, which comprises
[52781] (a) increasing or generating the activity of a oxidoreductase in the cytosol of a cell of a non-human organism or a part thereof, preferably a microorganism, a plant cell, a plant or a part thereof, as compared to a corresponding non-transformed wild type non-human organism or a part thereof; and
[52782] (b) growing the non-human organism or a part thereof under conditions which permit the production of linolenic acid or a composition comprising linolenic acid in said non-human organism or in the culture medium surrounding said non-human organism.

[52783] Accordingly, the present invention relates to a process for the production of linolenic acid, which comprises
[52784] (a) increasing or generating the activity of a bifunctional purine biosynthesis protein in the cytosol of a cell of a non-human organism or a part thereof, preferably a microorganism, a plant cell, a plant or a part thereof, as compared to a corresponding non-transformed wild type non-human organism or a part thereof; and
[52785] (b) growing the non-human organism or a part thereof under conditions which permit the production of linolenic acid or a composition comprising linolenic acid in said non-human organism or in the culture medium surrounding said non-human organism.

[52786] Accordingly, the present invention relates to a process for the production of linolenic acid, which comprises
[52787] (a) increasing or generating the activity of a permease protein of ABC transporter in the cytosol of a cell of a non-human organism or a part thereof, preferably a microorganism, a plant cell, a plant or a part thereof, as compared to a corresponding non-transformed wild type non-human organism or a part thereof; and
[52788] (b) growing the non-human organism or a part thereof under conditions which permit the production of linolenic acid or a composition comprising linolenic acid in said non-human organism or in the culture medium surrounding said non-human organism.

[52789] Accordingly, the present invention relates to a process for the production of linolenic acid, which comprises
[52790] (a) increasing or generating the activity of a aromatic acid decarboxylase in the cytosol of a cell of a non-human organism or a part thereof, preferably a microorganism, a plant cell, a plant or a part thereof, as compared to a corresponding non-transformed wild type non-human organism or a part thereof; and
[52791] (b) growing the non-human organism or a part thereof under conditions which permit the production of linolenic acid or a composition comprising linolenic acid in said non-human organism or in the culture medium surrounding said non-human organism.

[52792] Accordingly, the present invention relates to a process for the production of linolenic acid, which comprises
[52793] (a) increasing or generating the activity of a phosphate import ATP-binding protein in the cytosol of a cell of a non-human organism or a part thereof, preferably a microorganism, a plant cell, a plant or a part thereof, as compared to a corresponding non-transformed wild type non-human organism or a part thereof; and
[52794] (b) growing the non-human organism or a part thereof under conditions which permit the production of linolenic acid or a composition comprising linolenic acid in said non-human organism or in the culture medium surrounding said non-human organism.

[52795] Accordingly, the present invention relates to a process for the production of linolenic acid, which comprises
[52796] (a) increasing or generating the activity of a arginine decarboxylase in the cytosol of a cell of a non-human organism or a part thereof, preferably a microorganism, a plant cell, a plant or a part thereof, as compared to a corresponding non-transformed wild type non-human organism or a part thereof; and
[52797] (b) growing the non-human organism or a part thereof under conditions which permit the production of linolenic acid or a composition comprising linolenic acid in said non-human organism or in the culture medium surrounding said non-human organism.

[52798] Accordingly, the present invention relates to a process for the production of linolenic acid, which comprises
[52799] (a) increasing or generating the activity of a phosphoadenosine phosphosulfate reductase in the cytosol of a cell of a non-human organism or a part thereof, preferably a microorganism, a plant cell, a plant or a part thereof, as compared to a corresponding non-transformed wild type non-human organism or a part thereof; and
[52800] (b) growing the non-human organism or a part thereof under conditions which permit the production of linolenic acid or a composition comprising linolenic acid in said non-human organism or in the culture medium surrounding said non-human organism.

[52801] Accordingly, the present invention relates to a process for the production of linolenic acid, which comprises
[52802] (a) increasing or generating the activity of a threonine dehydratase in the cytosol of a cell of a non-human organism or a part thereof, preferably a microorganism, a plant cell, a plant or a part thereof, as compared to a corresponding non-transformed wild type non-human organism or a part thereof; and
[52803] (b) growing the non-human organism or a part thereof under conditions which permit the production of linolenic acid or a composition comprising linolenic acid in said non-human organism or in the culture medium surrounding said non-human organism.

[52804] Accordingly, the present invention relates to a process for the production of linolenic acid, which comprises
[52805] (a) increasing or generating the activity of a metal-dependent hydrolase in the cytosol of a cell of a non-human organism or a part thereof, preferably a microorganism, a plant cell, a plant or a part thereof, as compared to a corresponding non-transformed wild type non-human organism or a part thereof; and
[52806] (b) growing the non-human organism or a part thereof under conditions which permit the production of linolenic acid or a composition comprising linolenic acid in said non-human organism or in the culture medium surrounding said non-human organism.

[52807] Accordingly, the present invention relates to a process for the production of linolenic acid, which comprises
[52808] (a) increasing or generating the activity of a TTC1386-protein in the cytosol of a cell of a non-human organism or a part thereof, preferably a microorganism, a plant cell, a plant or a part thereof, as compared to a corresponding non-transformed wild type non-human organism or a part thereof; and
[52809] (b) growing the non-human organism or a part thereof under conditions which permit the production of linolenic acid or a composition comprising linolenic acid in said non-human organism or in the culture medium surrounding said non-human organism.

[52810] Accordingly, the present invention relates to a process for the production of linolenic acid, which comprises
[52811] (a) increasing or generating the activity of a acid phosphatase precursor in the cytosol of a cell of a non-human organism or a part thereof, preferably a microorganism, a plant cell, a plant or a part thereof, as compared to a corresponding non-transformed wild type non-human organism or a part thereof; and
[52812] (b) growing the non-human organism or a part thereof under conditions which permit the production of linolenic acid or a composition comprising linolenic acid in said non-human organism or in the culture medium surrounding said non-human organism.

[52813] Accordingly, the present invention relates to a process for the production of linolenic acid, which comprises
[52814] (a) increasing or generating the activity of a glycerol-3-phosphate dehydrogenase in the cytosol of a cell of a non-human organism or a part thereof, preferably a microorganism, a plant cell, a plant or a part thereof, as compared to a corresponding non-transformed wild type non-human organism or a part thereof; and
[52815] (b) growing the non-human organism or a part thereof under conditions which permit the production of linolenic acid or a composition comprising linolenic acid in said non-human organism or in the culture medium surrounding said non-human organism.

[52816] Accordingly, the present invention relates to a process for the production of linolenic acid, which comprises
[52817] (a) increasing or generating the activity of a cell division control protein in the cytosol of a cell of a non-human organism or a part thereof, preferably a microorganism, a plant cell, a plant or a part thereof, as compared to a corresponding non-transformed wild type non-human organism or a part thereof; and
[52818] (b) growing the non-human organism or a part thereof under conditions which permit the production of linolenic acid or a composition comprising linolenic acid in said non-human organism or in the culture medium surrounding said non-human organism.

[52819] Accordingly, the present invention relates to a process for the production of linolenic acid, which comprises
[52820] (a) increasing or generating the activity of a branched-chain amino acid permease in the cytosol of a cell of a non-human organism or a part thereof, preferably a microorganism, a plant cell, a plant or a part thereof, as compared to a corresponding non-transformed wild type non-human organism or a part thereof; and
[52821] (b) growing the non-human organism or a part thereof under conditions which permit the production of linolenic acid or a composition comprising linolenic acid in said non-human organism or in the culture medium surrounding said non-human organism.

[52822] Accordingly, the present invention relates to a process for the production of linolenic acid, which comprises
[52823] (a) increasing or generating the activity of a F-box protein in the cytosol of a cell of a non-human organism or a part thereof, preferably a microorganism, a plant cell, a plant or a part thereof, as compared to a corresponding non-transformed wild type non-human organism or a part thereof; and
[52824] (b) growing the non-human organism or a part thereof under conditions which permit the production of linolenic acid or a composition comprising linolenic acid in said non-human organism or in the culture medium surrounding said non-human organism.

[52825] Accordingly, the present invention relates to a process for the production of linolenic acid, which comprises
[52826] (a) increasing or generating the activity of a ydr339c-protein in the cytosol of a cell of a non-human organism or a part thereof, preferably a microorganism, a plant cell, a plant or a part thereof, as compared to a corresponding non-transformed wild type non-human organism or a part thereof; and
[52827] (b) growing the non-human organism or a part thereof under conditions which permit the production of linolenic acid or a composition comprising linolenic acid in said non-human organism or in the culture medium surrounding said non-human organism.

[52828] Accordingly, the present invention relates to a process for the production of linolenic acid, which comprises
[52829] (a) increasing or generating the activity of a ydr507c-protein in the cytosol of a cell of a non-human organism or a part thereof, preferably a microorganism, a plant cell, a plant or a part thereof, as compared to a corresponding non-transformed wild type non-human organism or a part thereof; and
[52830] (b) growing the non-human organism or a part thereof under conditions which permit the production of linolenic acid or a composition comprising linolenic acid in said non-human organism or in the culture medium surrounding said non-human organism.

[52831] Accordingly, the present invention relates to a process for the production of linolenic acid, which comprises
[52832] (a) increasing or generating the activity of a dihydroxyacetone kinase in the cytosol of a cell of a non-human organism or a part thereof, preferably a microorganism, a plant cell, a plant or a part thereof, as compared to a corresponding non-transformed wild type non-human organism or a part thereof; and
[52833] (b) growing the non-human organism or a part thereof under conditions which permit the production of linolenic acid or a composition comprising linolenic acid in said non-human organism or in the culture medium surrounding said non-human organism.

[52834] Accordingly, the present invention relates to a process for the production of linolenic acid, which comprises
[52835] (a) increasing or generating the activity of a oxidoreductase in the cytosol of a cell of a non-human organism or a part thereof, preferably a microorganism, a plant cell, a plant or a part thereof, as compared to a corresponding non-transformed wild type non-human organism or a part thereof; and
[52836] (b) growing the non-human organism or a part thereof under conditions which permit the production of linolenic acid or a composition comprising linolenic acid in said non-human organism or in the culture medium surrounding said non-human organism.

[52837] Accordingly, the present invention relates to a process for the production of linolenic acid, which comprises
[52838] (a) increasing or generating the activity of a DnaJ-like chaperone in the cytosol of a cell of a non-human organism or a part thereof, preferably a microorganism, a plant cell, a plant or a part thereof, as compared to a corresponding non-transformed wild type non-human organism or a part thereof; and
[52839] (b) growing the non-human organism or a part thereof under conditions which permit the production of linolenic acid or a composition comprising linolenic acid in said non-human organism or in the culture medium surrounding said non-human organism.

[52840] Accordingly, the present invention relates to a process for the production of linolenic acid, which comprises
[52841] (a) increasing or generating the activity of a ymr013c-protein in the cytosol of a cell of a non-human organism or a part thereof, preferably a microorganism, a plant cell, a plant or a part thereof, as compared to a corresponding non-transformed wild type non-human organism or a part thereof; and
[52842] (b) growing the non-human organism or a part thereof under conditions which permit the production of linolenic acid or a composition comprising linolenic acid in said non-human organism or in the culture medium surrounding said non-human organism.

[52843] Accordingly, the present invention relates to a process for the production of linolenic acid, which comprises
[52844] (a) increasing or generating the activity of a molecular chaperone in the cytosol of a cell of a non-human organism or a part thereof, preferably a microorganism, a plant cell, a plant or a part thereof, as compared to a corresponding non-transformed wild type non-human organism or a part thereof; and
[52845] (b) growing the non-human organism or a part thereof under conditions which permit the production of linolenic acid or a composition comprising linolenic acid in said non-human organism or in the culture medium surrounding said non-human organism.

[52846] Accordingly, the present invention relates to a process for the production of linolenic acid, which comprises
[52847] (a) increasing or generating the activity of a ATPase epsilon subunit in the cytosol of a cell of a non-human organism or a part thereof, preferably a microorganism, a plant cell, a plant or a part thereof, as compared to a corresponding non-transformed wild type non-human organism or a part thereof; and
[52848] (b) growing the non-human organism or a part thereof under conditions which permit the production of linolenic acid or a composition comprising linolenic acid in said non-human organism or in the culture medium surrounding said non-human organism.

[52849] Accordingly, the present invention relates to a process for the production of linolenic acid, which comprises
[52850] (a) increasing or generating the activity of a glucose-6-phosphate 1-dehydrogenase in the cytosol of a cell of a non-human organism or a part thereof, preferably a microorganism, a plant cell, a plant or a part thereof, as compared to a corresponding non-transformed wild type non-human organism or a part thereof; and
[52851] (b) growing the non-human organism or a part thereof under conditions which permit the production of linolenic acid or a composition comprising linolenic acid in said non-human organism or in the culture medium surrounding said non-human organism.

[52852] Accordingly, the present invention relates to a process for the production of linolenic acid, which comprises
[52853] (a) increasing or generating the activity of a polypeptide comprising a polypeptide as depicted in the respective line in column 5 or 8 of Table II, application no. 9, or a homolog or a fragment thereof, a consensus sequence or at least one polypeptide motif as depicted in the respective line in column 8 of Table IV, application no. 9; or
[52854] increasing or generating the activity of an expression product of one or more nucleic acid molecule(s) comprising a polynucleotide as depicted in the respective line in column 5 or 8 of Table I, application no. 9, preferably the coding region thereof, or a homolog or a fragment thereof;
[52855] in the cytosol of a cell of a non-human organism or a part thereof; preferably a microorganism, a plant cell, a plant or a part thereof, as compared to a corresponding non-transformed wild type non-human organism or a part thereof; and
[52856] (b) growing the non-human organism under conditions which permit the production of linolenic acid, or a composition comprising linolenic acid in said non-human organism or in the culture medium surrounding said non-human organism.

[52857] In a further embodiment the activity of the polypeptide comprising a polypep-tide as depicted in the respective line in column 5 or 8 of Table II, application no. 9, or a homolog or a fragment thereof, a consensus sequence or at least one polypeptide motif as depicted in the respective line in column 8 of Table IV, application no. 9, is increased or generated non-targeted in the above-mentioned process in a microorganism or plant or a part thereof.

[52858] In a further embodiment said polypeptide has the activity of the respective polypeptide represented by a protein comprising a polypeptide as depicted in the respective line in column 5 of Table II, application no. 9.

[52859] In a further embodiment the activity of the expression product of one or more nucleic acid molecule(s) comprising a polynucleotide as depicted in the respective line in column 5 or 8 of Table I, application no. 9, preferably the coding region thereof, or a homolog or a fragment thereof, is increased or generated non-targeted in the above-mentioned process in a microorganism or plant or a part thereof.

[52860] In a further embodiment the activity of the polypeptide comprising a polypeptide as depicted in the respective line in column 5 or 8 of Table II, application no. 9, or a homolog or a fragment thereof, a consensus sequence or at least one polypeptide motif as depicted in the respective line in column 8 of Table IV, application no. 9, is increased or generated in the above-mentioned process in an organelle preferably in plastids or mitochondria, especially in plastids, of a microorganism or plant.

[52861] In a further embodiment said polypeptide has the activity of the respective polypeptide represented by a protein comprising a polypeptide as depicted in the respective line in column 5 of Table II, application no. 9.

[52862] In a further embodiment the activity of the expression product of one or more nucleic acid molecule(s) comprising a polynucleotide as depicted in the respective line in column 5 or 8 of Table I, application no. 9, preferably the coding region thereof, or a homolog or a fragment thereof, is increased or generated in the above-mentioned process in an organelle, preferably in plasids or mitochondria, especially in plastids, of a microorganism or plant.

[52863] In a further embodiment the activity of the polypeptide comprising a polypeptide as depicted in the respective line in column 5 or 8 of Table II, application no. 9, or a homolog or a fragment thereof, a consensus sequence or at least one polypeptide motif as depicted in the respective line in column 8 of Table IV, application no. 9, is increased or generated in the above-mentioned process in the cyctosol of a cell, of a microorganism or plant.

[52864] In a further embodiment said polypeptide has the activity of the respective polypeptide represented by a protein comprising a polypeptide as depicted in the respective line in column 5 of Table II, application no. 9.

[52865] In a further embodiment the activity of the expression product of one or more nucleic acid molecule(s) comprising a polynucleotide as depicted in the respective line in column 5 or 8 of Table I, application no. 9, preferably the coding region thereof, or a homolog or a fragment thereof, is increased or generated in the above-mentioned process in the cytosol of a cell, of a microorganism or plant.

[52866] [0039.1.8.9] to [0066.1.8.9] for the disclosure of these paragraphs see [0039.1.8.8] to [0066.1.8.8] above.

[52867] As mentioned above the nucleic acid sequences coding for the proteins as shown in Table II, application no. 9, column 5 or 8, or homologs or fragments thereof, are joined to a nucleic acid sequence encoding a plastidic transit peptide, e.g, if for the nucleic acid molecule in Table I, column 6 the term “plastidic” is indicated. This nucleic acid sequence encoding a transit peptide ensures transport of the protein to the organelle. The nucleic acid sequence of the gene to be expressed and the nucleic acid sequence encoding the transit peptide are operably linked. Therefore the transit peptide encoding sequence is fused in frame to the nucleic acid sequence coding for proteins as shown in Table II, application no. 9, column 5 or 8, or homologs or fragments thereof, e.g., if for the nucleic acid molecule in Table I, column 6 the term “plastidic” is indicated.

[52868] [0068.1.8.9] to [0072.1.8.9] for the disclosure of these paragraphs see [0068.1.8.8] to [0072.1.8.8] above.

[52869] As mentioned above the nucleic acid sequences coding for the proteins as shown in the respective line in Table II, application no. 9, column 5 or 8, or homologs or fragments thereof, are joined to a nucleic acid sequence encoding a mitochondric transit peptide, e.g., if for the respective nucleic acid molecule in Table I, column 6 the term “mitochondrial” is indicated. This nucleic acid sequence encoding a transit peptide ensures transport of the protein to the organelle. The nucleic acid sequence of the gene to be expressed and the nucleic acid sequence encoding the transit peptide are operably linked. Therefore the transit peptide encoding sequence is fused in frame to the nucleic acid sequence coding for proteins as shown in the respective line in Table II, application no. 9, column 5 or 8, or homologs or fragments thereof, e.g., if for the nucleic acid molecule in the respective line in Table I, column 6 the term “mitochondrial” is indicated. (For the avoidance of doubt, the term “mitochondric” and “mitochondrial” are interchangeable.)

[52870] [0074.1.8.9] to [0075.1.8.9] for the disclosure of these paragraphs see [0074.1.8.8] to [0075.1.8.8] above.

[52871] Nucleic acid sequences coding for the transit peptides may be chemically synthesized either in part or wholly according to structure of transit peptide sequences disclosed in the prior art. Said natural or chemically synthesized sequences can be directly linked to the sequences encoding the mature protein or via a linker nucleic acid sequence, which may be typically less than 500 base pairs, preferably less than 450, 400, 350, 300, 250 or 200 base pairs, more preferably less than 150, 100, 90, 80, 70, 60, 50, 40 or 30 base pairs and most preferably less than 25, 20, 15, 12, 9, 6 or 3 base pairs in length and are in frame to the coding sequence.

[52872] Furthermore favorable nucleic acid sequences encoding transit peptides may comprise sequences derived from more than one biological and/or chemical source and may include a nucleic acid sequence derived from the amino-terminal region of the mature protein, which in its native state is linked to the transit peptide. In a preferred embodiment of the invention said amino-terminal region of the mature protein is typically less than 150 amino acids, preferably less than 140, 130, 120, 110, 100 or 90 amino acids, more preferably less than 80, 70, 60, 50, 40, 35, 30, 25 or 20 amino acids and most preferably less than 19, 18, 17, 16, 15, 14, 13, 12, 11 or 10 amino acids in length. But even shorter or longer stretches are also possible. In addition target sequences, which facilitate the transport of proteins to other cell compartments such as the vacuole, endoplasmic reticulum, golgi complex, glyoxysomes, peroxisomes, mitochondria (in case of a plastidal transit peptide) or plastids, especially chloroplasts (in case of a mitochondric transit peptide) may be also part of the inventive nucleic acid sequence. The proteins translated from said inventive nucleic acid sequences are a kind of fusion proteins that means the nucleic acid sequences encoding the plastidal transit peptide for example the ones shown in Table a, preferably the last one of the Table a are joint to the respective nucleic acid sequences shown in Table I, application no. 9, columns 5 or 8, especially the coding region thereof, or homologs or fragments thereof, in case of nucleic acid sequences being expressed in plastids, and that means the nucleic acid sequences encoding the mitochondric transit peptide for example the ones shown in Table b, preferably the last one of the Table b are joint to the respective nucleic acid sequences shown in Table I, application no. 9, columns 5 or 8, especially the coding region thereof, or homologs or fragments thereof, in case of nucleic acid sequences being expressed in mitochondria. The person skilled in the art is able to join said sequences in a functional manner. Advantageously the transit peptide part is cleaved off from the protein part shown in Table II, application no. 9, columns 5 or 8, or a homolog or fragment thereof, during or after the transport into the organelles, preferably into the plastids or mitochondria, respectively.

[52873] All products of the cleavage of the preferred transit peptide shown in the last line of Table a have preferably the N-terminal amino acid sequences QIA CSS or QIA EFQLTT in front of the start methionine of the respective protein mentioned in Table II, application no. 9, column 5 or 8. or homologs or fragments thereof. Other short amino acid sequences of an range of 1 to 20 amino acids preferable 2 to 15 amino acids, more preferable 3 to 10 amino acids most preferably 4 to 8 amino acids are also possible in front of the start methionine of the protein mentioned in Table II, application no. 9, columns 5 or 8, or homologs or fragments thereof. In case of the amino acid sequence QIA CSS the three amino acids in front of the start methionine are stemming from the LIC (=ligatation independent cloning) cassette. Said short amino acid sequence is preferred in the case of the expression of E. coli genes. In case of the amino acid sequence QIA EFQLTT the six amino acids in front of the start methionine are stemming from the LIC cassette. Said short amino acid sequence is preferred in the case of the expression of S. cerevisiae genes. The skilled worker knowns that other short sequences are also useful in the expression of the respective nucleic acid molecule comprising a polynucleotide as depicted in Table I, application no. 9, column 5 or 8, preferably the coding region thereof, or a homolog or a fragment thereof. Furthermore the skilled worker is aware of the fact that there is not a need for such short sequences in the expression of the genes.

[52874] [0077.1.8.9] to [0078.1.8.9] for the disclosure of these paragraphs see [0077.1.8.8] to [0078.1.8.8] above.

[52875] Alternatively to the targeting of the respective sequences shown in Table II, application no. 9, columns 5 or 8, or homologs or fragments thereof, preferably of sequences in general encoded in the nucleus with the aid of the targeting sequences mentioned for example in Table a alone, Table b alone, or in combination with other targeting sequences preferably into plastids or mitochondria, respectively, the nucleic acids of the invention can directly be introduced into the plastidal or mitochondrial genome. Therefore in a preferred embodiment the respective nucleic acid sequences shown in the respective line in Table I, application no. 9, columns 5 or 8, preferably the coding region thereof, or homologs or fragments thereof, are directly introduced and expressed in plastids e.g., if for the nucleic acid molecule in the respective line in Table I, column 6, the term “plastidic” is indicated, or are directly introduced and expressed in mitochondria e.g., if for the nucleic acid molecule in the respective line in Table I, column 6 the term “mitochondrial” is indicated.

[52876] The term “introduced” in the context of this specification shall mean the insertion of a nucleic acid sequence into the organism by means of a “transfection”, “transduction” or preferably by “transformation”.

[52877] A plastid, such as a chloroplast, or a mitochondrion, has been “transformed” by an exogenous (preferably foreign) nucleic acid sequence if a nucleic acid sequence has been introduced into the plastid or mitochondrion that means that this sequence has crossed the membrane or the membranes of the plastid or of the mitochondrion. The exogenous, preferably foreign, DNA may be integrated (covalently linked) into plastid or mitochondrial DNA making up the genome of the plastid or mitochondrion, or it may remain unintegrated (e.g., by including a chloroplast origin of replication). “Stably” integrated DNA sequences are those, which are inherited through plastid or mitochondrion replication, thereby transferring new plastids or mitochondria, with the features of the integrated DNA sequence to the progeny.

[52878] [0080.1.8.9] to [0083.1.8.9] for the disclosure of these paragraphs see [0080.1.8.8] to [0083.1.8.8] above.

[52879] For the process of the present invention it may be of great advantage that by transforming the plastids the intraspecies specific transgene flow is blocked, because a lot of species such as corn, cotton and rice have a strict maternal inheritance of plastids. By placing the respective genes specified in the respective line in Table I, application no. 9, columns 5 or 8, preferably the coding region, or homologs or fragments thereof, e.g. if for the nucleic acid molecule in the respective line in column 6 of Table I the term “plastidic” is indicated, in the plastids of plants, these genes will not be present in the pollen of said plants.

[52880] A further preferred embodiment of the invention relates to the use of so called “chloroplast localization sequences”, in which a first RNA sequence or molecule is capable of transporting or “chaperoning” a second RNA sequence, such as a RNA sequence transcribed from the sequences depicted in the respective line in Table I, application no. 9, columns 5 or 8, preferably the coding region thereof, or a homolog or a fragment thereof, or a sequence encoding a protein, as depicted in the respective line in Table II, application no. 9, columns 5 and 8, or a homolog or a fragment thereof, from an external environment inside a cell or outside a plastid into a chloroplast. In one embodiment the chloroplast localization signal is substantially similar or complementary to a complete or intact viroid sequence. The chloroplast localization signal may be encoded by a DNA sequence, which is transcribed into the chloroplast localization RNA. The term “viroid” refers to a naturally occurring single stranded RNA molecule (Flores, C. R. Acad. Sci. III. 324 (10), 943 (2001)). Viroids usually contain about 200-500 nucleotides and generally exist as circular molecules. Examples of viroids that contain chloroplast localization signals include but are not limited to ASBVd, PLMVd, CChMVd and ELVd. The viroid sequence or a functional part of it can be fused to the sequences depicted in the respective line in Table I, application no. 9, columns 5 or 8, preferably the coding region thereof, or a homolog or a fragment thereof, or a sequence encoding a protein, as depicted in the respective line in Table II, application no. 9, columns 5 or 8, or a homolog or a fragment thereof, in such a manner that the viroid sequence transports a sequence transcribed from a sequence as depicted in the respective line in Table I, application no. 9 columns 5 or 8, preferably the coding region thereof, or a homolog or a fragment thereof, or a sequence encoding a protein as depicted in the respective line in Table II, application no. 9 columns 5 or 8, or a homolog or a fragment thereof, into the chloroplasts, e.g. if for the nucleic acid molecule in column 6 of Table I the term “plastidic” is indicated. A preferred embodiment uses a modified ASBVd (Navarro et al., Virology. 268 (1), 218 (2000)).

[52881] In a further specific embodiment the protein to be expressed in the plastids such as the proteins depicted in the respective line in Table II, application no. 9, columns 5 or 8, or a homolog or a fragment thereof, e.g. if for the nucleic acid molecule in the respective line in column 6 of Table I the term “plastidic” is indicated, are encoded by different nucleic acids. Such a method is disclosed in WO 2004/040973, which shall be incorporated by reference. WO 2004/040973 teaches a method, which relates to the translocation of an RNA corresponding to a gene or gene fragment into the chloroplast by means of a chloroplast localization sequence.

[52882] The genes, which should be expressed in the plant or plant cells, are split into nucleic acid fragments, which are introduced into different compartments in the plant e.g. the nucleus, the plastids and/or mitochondria. Additionally plant cells are described in which the chloroplast contains a ribozyme fused at one end to an RNA encoding a fragment of a protein used in the inventive process such that the ribozyme can trans-splice the translocated fusion RNA to the RNA encoding the gene fragment to form and as the case may be reunite the nucleic acid fragments to an intact mRNA encoding a functional protein for example as disclosed in the respective line in Table II, application no. 9, columns 5 or 8, or a homolog or a fragment thereof.

[52883] In a preferred embodiment of the invention the nucleic acid sequences as shown in the respective line in Table I, application no. 9, columns 5 or 8, preferably the coding region thereof, or homologs or fragments thereof, e.g. if for the nucleic acid molecule in the respective line in column 6 of Table I the term “plastidic” is indicated, used in the inventive process are transformed into plastids, which are metabolically active. Those plastids should preferably maintain at a high copy number in the plant or plant tissue of interest, most preferably the chloroplasts found in green plant tissues, such as leaves or cotyledons or in seeds.

[52884] For a good expression in the plastids the nucleic acid sequences as shown in the respective line in Table I, application no. 9, columns 5 or 8, preferably the coding region thereof, or homologs or fragments thereof, e.g. if for the nucleic acid molecule in the respective line in column 6 of Table I the term “plastidic” is indicated, are introduced into an expression cassette using preferably a promoter and terminater, which are active in plastids preferably a chloroplast promoter. Examples of such promoters include the psbA promoter from the gene from spinach or pea, the rbcL promoter, and the atpB promoter from corn.

[52885] [0089.1.8.9] to [0092.1.8.9] for the disclosure of these paragraphs see [0089.1.8.8] to [0092.1.8.8] above.

[52886] Advantageously the process for the production of the fine chemical linolenic acid leads to an enhanced production of the respective fine chemical. The terms “enhanced” or “increase” mean at least a 10%, 20%, 30%, 40% or 50%, preferably at least 60%, 70%, 80%, 90% or 100%, more preferably 150%, 200%, 300%, 400% or 500% higher production of the respective fine chemical linolenic acid in comparison to the wild-type as defined above, e.g. that means in comparison to a non-human organism without the aforementioned modification of the activity of a protein as shown in the respective line in Table II, application no. 9, column 5 or 8, or a fragment or a homolog thereof. The modification of the activity of a protein as shown in the respective line in Table II, application no. 9, column 5 or 8, or a homolog or a fragment thereof, or their combination can be achieved by joining the protein to a respective transit peptide, e.g. if for the respective encoding nucleic acid molecule in column 6 of Table I the term “plastidic” or “mitochondrial” is indicated.

[52887] Surprisingly it was found, that the transgenic expression of a protein as shown in the respective line in Table II, application no. 9, column 5, especially from the Saccaromyces cerevisiae, E. coli, Arabidopsis thaliana, Azotobacter vinelandii, Brassica napus, Glycine max, Oryza sativa, Physcomitrella patens, Synechocystis sp., Thermus thermophilus, Zea mays in a non-human organism, like a plant or a part thereof, such as Arabidopsis thaliana for example, or a microorganism, conferred a production of or an increase in linolenic acid,respectively, to the transgenic non-human organism as compared to a corresponding non-transformed wild type.

[52888] In one embodiment the transgenic expression of a protein as shown in the respective line in Table II, application no. 9, column 5 or 8, or a homolog or a fragment thereof, especially from the Saccaromyces cerevisiae, E. coli, Arabidopsis thaliana, Azotobacter vinelandii, Brassica napus, Glycine max, Oryza sativa, Physcomitrella patens, Synechocystis sp., Thermus thermophilus, Zea mays in a non-human organism, like a plant or a part thereof, such as Arabidopsis thaliana for example, or a microorganism, confers a production of or an increase in linolenic acid,respectively, to the transgenic non-human organism as compared to a corresponding non-transformed wild type.

[52889] Accordingly, in one embodiment, an increase of linolenic acid in a non-human organism, as compared to a corresponding non-transformed wild type non-human organism, is conferred in the process of the invention, if the activity of a polypeptide showing the activity of a protein phosphatase, or if the activity of the polypeptide At1g07430, preferably represented by SEQ ID NO. 17452, or a homolog or fragment thereof, or if the activity of a polypeptide encoded by a nucleic acid molecule comprising the nucleic acid SEQ ID NO. 17451, preferably the coding region thereof, or a homolog or fragment thereof, e.g. derived from Arabidopsis thaliana, is increased or generated. For example the activity of a nucleic acid molecule or a polypeptide comprising the nucleic acid, preferably the coding region thereof, or polypeptide or the consensus sequence or the polypeptide motif, as depicted in Table I, II or IV, application No. 9, column 5 or 8 in the respective same line as the nucleic acid molecule SEQ ID NO. 17451 or polypeptide SEQ ID NO. 17452, respectively, or a homolog or a fragment thereof, is increased or generated, or if the activity protein phosphatase is increased or generated in a non-human organism, like a microorganism or a plant cell, plant or part thereof, especially with non-targeted localization. For example, an increase of the linolenic acid of at least 1 percent, particularly in a range of 12 to 52-percent is conferred as compared to a corresponding non-transformed wild type non-human organism.

[52890] Accordingly, in one embodiment, an increase of linolenic acid in a non-human organism, as compared to a corresponding non-transformed wild type non-human organism, is conferred in the process of the invention, if the activity of a polypeptide showing the activity of a transcription factor, or if the activity of the polypeptide At1g68320, preferably represented by SEQ ID NO. 1062, or a homolog or fragment thereof, or if the activity of a polypeptide encoded by a nucleic acid molecule comprising the nucleic acid SEQ ID NO. 1061, preferably the coding region thereof, or a homolog or fragment thereof, e.g. derived from Arabidopsis thaliana, is increased or generated. For example the activity of a nucleic acid molecule or a polypeptide comprising the nucleic acid, preferably the coding region thereof, or polypeptide or the consensus sequence or the polypeptide motif, as depicted in Table I, II or IV, application No. 9, column 5 or 8 in the respective same line as the nucleic acid molecule SEQ ID NO. 1061 or polypeptide SEQ ID NO. 1062, respectively, or a homolog or a fragment thereof, is increased or generated, or if the activity transcription factor is increased or generated in a non-human organism, like a microorganism or a plant cell, plant or part thereof, especially with non-targeted localization. For example, an increase of the linolenic acid of at least 1 percent, particularly in a range of 15 to 74-percent is conferred as compared to a corresponding non-transformed wild type non-human organism.

[52891] Accordingly, in one embodiment, an increase of linolenic acid in a non-human organism, as compared to a corresponding non-transformed wild type non-human organism, is conferred in the process of the invention, if the activity of a polypeptide showing the activity of a protein phosphatase, or if the activity of the polypeptide At1g72770, preferably represented by SEQ ID NO. 19420, or a homolog or fragment thereof, or if the activity of a polypeptide encoded by a nucleic acid molecule comprising the nucleic acid SEQ ID NO. 19419, preferably the coding region thereof, or a homolog or fragment thereof, e.g. derived from Arabidopsis thaliana, is increased or generated. For example the activity of a nucleic acid molecule or a polypeptide comprising the nucleic acid, preferably the coding region thereof, or polypeptide or the consensus sequence or the polypeptide motif, as depicted in Table I, II or IV, application No. 9, column 5 or 8 in the respective same line as the nucleic acid molecule SEQ ID NO. 19419 or polypeptide SEQ ID NO. 19420, respectively, or a homolog or a fragment thereof, is increased or generated, or if the activity protein phosphatase is increased or generated in a non-human organism, like a microorganism or a plant cell, plant or part thereof, especially with non-targeted localization. For example, an increase of the linolenic acid of at least 1 percent, particularly in a range of 21 to 49-percent is conferred as compared to a corresponding non-transformed wild type non-human organism.

[52892] Accordingly, in one embodiment, an increase of linolenic acid in a non-human organism, as compared to a corresponding non-transformed wild type non-human organism, is conferred in the process of the invention, if the activity of a polypeptide showing the activity of a pyruvate kinase, or if the activity of the polypeptide At2g36580, preferably represented by SEQ ID NO. 113715, or a homolog or fragment thereof, or if the activity of a polypeptide encoded by a nucleic acid molecule comprising the nucleic acid SEQ ID NO. 113714, preferably the coding region thereof, or a homolog or fragment thereof, e.g. derived from Arabidopsis thaliana, is increased or generated. For example the activity of a nucleic acid molecule or a polypeptide comprising the nucleic acid, preferably the coding region thereof, or polypeptide or the consensus sequence or the polypeptide motif, as depicted in Table I, II or IV, application No. 9, column 5 or 8 in the respective same line as the nucleic acid molecule SEQ ID NO. 113714 or polypeptide SEQ ID NO. 113715, respectively, or a homolog or a fragment thereof, is increased or generated, or if the activity pyruvate kinase is increased or generated in a non-human organism, like a microorganism or a plant cell, plant or part thereof, especially with plastidic localization. For example, an increase of the linolenic acid of at least 1 percent, particularly in a range of 12 to 22-percent is conferred as compared to a corresponding non-transformed wild type non-human organism.

[52893] Accordingly, in one embodiment, an increase of linolenic acid in a non-human organism, as compared to a corresponding non-transformed wild type non-human organism, is conferred in the process of the invention, if the activity of a polypeptide showing the activity of a At2g45420-protein, or if the activity of the polypeptide At2g45420, preferably represented by SEQ ID NO. 1624, or a homolog or fragment thereof, or if the activity of a polypeptide encoded by a nucleic acid molecule comprising the nucleic acid SEQ ID NO. 1623, preferably the coding region thereof, or a homolog or fragment thereof, e.g. derived from Arabidopsis thaliana, is increased or generated. For example the activity of a nucleic acid molecule or a polypeptide comprising the nucleic acid, preferably the coding region thereof, or polypeptide or the consensus sequence or the polypeptide motif, as depicted in Table I, II or IV, application No. 9, column 5 or 8 in the respective same line as the nucleic acid molecule SEQ ID NO. 1623 or polypeptide SEQ ID NO. 1624, respectively, or a homolog or a fragment thereof, is increased or generated, or if the activity At2g45420-protein is increased or generated in a non-human organism, like a microorganism or a plant cell, plant or part thereof, especially with non-targeted localization. For example, an increase of the linolenic acid of at least 1 percent, particularly in a range of 13 to 27-percent is conferred as compared to a corresponding non-transformed wild type non-human organism.

[52894] Accordingly, in one embodiment, an increase of linolenic acid in a non-human organism, as compared to a corresponding non-transformed wild type non-human organism, is conferred in the process of the invention, if the activity of a polypeptide showing the activity of a heat shock transcription factor, or if the activity of the polypeptide At3g02990, preferably represented by SEQ ID NO. 68658, or a homolog or fragment thereof, or if the activity of a polypeptide encoded by a nucleic acid molecule comprising the nucleic acid SEQ ID NO. 68657, preferably the coding region thereof, or a homolog or fragment thereof, e.g. derived from Arabidopsis thaliana, is increased or generated. For example the activity of a nucleic acid molecule or a polypeptide comprising the nucleic acid, preferably the coding region thereof, or polypeptide or the consensus sequence or the polypeptide motif, as depicted in Table I, II or IV, application No. 9, column 5 or 8 in the respective same line as the nucleic acid molecule SEQ ID NO. 68657 or polypeptide SEQ ID NO. 68658, respectively, or a homolog or a fragment thereof, is increased or generated, or if the activity heat shock transcription factor is increased or generated in a non-human organism, like a microorganism or a plant cell, plant or part thereof, especially with non-targeted localization. For example, an increase of the linolenic acid of at least 1 percent, particularly in a range of 14 to 39-percent is conferred as compared to a corresponding non-transformed wild type non-human organism.

[52895] Accordingly, in one embodiment, an increase of linolenic acid in a non-human organism, as compared to a corresponding non-transformed wild type non-human organism, is conferred in the process of the invention, if the activity of a polypeptide showing the activity of a glutaredoxin, or if the activity of the polypeptide At3g62950, preferably represented by SEQ ID NO. 2936, or a homolog or fragment thereof, or if the activity of a polypeptide encoded by a nucleic acid molecule comprising the nucleic acid SEQ ID NO. 2935, preferably the coding region thereof, or a homolog or fragment thereof, e.g. derived from Arabidopsis thaliana, is increased or generated. For example the activity of a nucleic acid molecule or a polypeptide comprising the nucleic acid, preferably the coding region thereof, or polypeptide or the consensus sequence or the polypeptide motif, as depicted in Table I, II or IV, application No. 9, column 5 or 8 in the respective same line as the nucleic acid molecule SEQ ID NO. 2935 or polypeptide SEQ ID NO. 2936, respectively, or a homolog or a fragment thereof, is increased or generated, or if the activity glutaredoxin is increased or generated in a non-human organism, like a microorganism or a plant cell, plant or part thereof, especially with non-targeted localization. For example, an increase of the linolenic acid of at least 1 percent, particularly in a range of 14 to 36-percent is conferred as compared to a corresponding non-transformed wild type non-human organism.

[52896] Accordingly, in one embodiment, an increase of linolenic acid in a non-human organism, as compared to a corresponding non-transformed wild type non-human organism, is conferred in the process of the invention, if the activity of a polypeptide showing the activity of a monothiol glutaredoxin, or if the activity of the polypeptide At4g15670, preferably represented by SEQ ID NO. 3280, or a homolog or fragment thereof, or if the activity of a polypeptide encoded by a nucleic acid molecule comprising the nucleic acid SEQ ID NO. 3279, preferably the coding region thereof, or a homolog or fragment thereof, e.g. derived from Arabidopsis thaliana, is increased or generated. For example the activity of a nucleic acid molecule or a polypeptide comprising the nucleic acid, preferably the coding region thereof, or polypeptide or the consensus sequence or the polypeptide motif, as depicted in Table I, II or IV, application No. 9, column 5 or 8 in the respective same line as the nucleic acid molecule SEQ ID NO. 3279 or polypeptide SEQ ID NO. 3280, respectively, or a homolog or a fragment thereof, is increased or generated, or if the activity monothiol glutaredoxin is increased or generated in a non-human organism, like a microorganism or a plant cell, plant or part thereof, especially with non-targeted localization. For example, an increase of the linolenic acid of at least 1 percent, particularly in a range of 13 to 67-percent is conferred as compared to a corresponding non-transformed wild type non-human organism.

[52897] Accordingly, in one embodiment, an increase of linolenic acid in a non-human organism, as compared to a corresponding non-transformed wild type non-human organism, is conferred in the process of the invention, if the activity of a polypeptide showing the activity of a heat shock transcription factor, or if the activity of the polypeptide At4g18880, preferably represented by SEQ ID NO. 24233, or a homolog or fragment thereof, or if the activity of a polypeptide encoded by a nucleic acid molecule comprising the nucleic acid SEQ ID NO. 24232, preferably the coding region thereof, or a homolog or fragment thereof, e.g. derived from Arabidopsis thaliana, is increased or generated. For example the activity of a nucleic acid molecule or a polypeptide comprising the nucleic acid, preferably the coding region thereof, or polypeptide or the consensus sequence or the polypeptide motif, as depicted in Table I, II or IV, application No. 9, column 5 or 8 in the respective same line as the nucleic acid molecule SEQ ID NO. 24232 or polypeptide SEQ ID NO. 24233, respectively, or a homolog or a fragment thereof, is increased or generated, or if the activity heat shock transcription factor is increased or generated in a non-human organism, like a microorganism or a plant cell, plant or part thereof, especially with non-targeted localization. For example, an increase of the linolenic acid of at least 1 percent, particularly in a range of 11 to 18-percent is conferred as compared to a corresponding non-transformed wild type non-human organism.

[52898] Accordingly, in one embodiment, an increase of linolenic acid in a non-human organism, as compared to a corresponding non-transformed wild type non-human organism, is conferred in the process of the invention, if the activity of a polypeptide showing the activity of a protein phosphatase, or if the activity of the polypeptide At4g26080, preferably represented by SEQ ID NO. 68850, or a homolog or fragment thereof, or if the activity of a polypeptide encoded by a nucleic acid molecule comprising the nucleic acid SEQ ID NO. 68849, preferably the coding region thereof, or a homolog or fragment thereof, e.g. derived from Arabidopsis thaliana, is increased or generated. For example the activity of a nucleic acid molecule or a polypeptide comprising the nucleic acid, preferably the coding region thereof, or polypeptide or the consensus sequence or the polypeptide motif, as depicted in Table I, II or IV, application No. 9, column 5 or 8 in the respective same line as the nucleic acid molecule SEQ ID NO. 68849 or polypeptide SEQ ID NO. 68850, respectively, or a homolog or a fragment thereof, is increased or generated, or if the activity protein phosphatase is increased or generated in a non-human organism, like a microorganism or a plant cell, plant or part thereof, especially with non-targeted localization. For example, an increase of the linolenic acid of at least 1 percent, particularly in a range of 14 to 32-percent is conferred as compared to a corresponding non-transformed wild type non-human organism.

[52899] Accordingly, in one embodiment, an increase of linolenic acid in a non-human organism, as compared to a corresponding non-transformed wild type non-human organism, is conferred in the process of the invention, if the activity of a polypeptide showing the activity of a glutaredoxin, or if the activity of the polypeptide At4g33040, preferably represented by SEQ ID NO. 4103, or a homolog or fragment thereof, or if the activity of a polypeptide encoded by a nucleic acid molecule comprising the nucleic acid SEQ ID NO. 4102, preferably the coding region thereof, or a homolog or fragment thereof, e.g. derived from Arabidopsis thaliana, is increased or generated. For example the activity of a nucleic acid molecule or a polypeptide comprising the nucleic acid, preferably the coding region thereof, or polypeptide or the consensus sequence or the polypeptide motif, as depicted in Table I, II or IV, application No. 9, column 5 or 8 in the respective same line as the nucleic acid molecule SEQ ID NO. 4102 or polypeptide SEQ ID NO. 4103, respectively, or a homolog or a fragment thereof, is increased or generated, or if the activity glutaredoxin is increased or generated in a non-human organism, like a microorganism or a plant cell, plant or part thereof, especially with non-targeted localization. For example, an increase of the linolenic acid of at least 1 percent, particularly in a range of 15 to 43-percent is conferred as compared to a corresponding non-transformed wild type non-human organism.

[52900] Accordingly, in one embodiment, an increase of linolenic acid in a non-human organism, as compared to a corresponding non-transformed wild type non-human organism, is conferred in the process of the invention, if the activity of a polypeptide showing the activity of a heat shock transcription factor, or if the activity of the polypeptide At5g03720, preferably represented by SEQ ID NO. 24439, or a homolog or fragment thereof, or if the activity of a polypeptide encoded by a nucleic acid molecule comprising the nucleic acid SEQ ID NO. 24438, preferably the coding region thereof, or a homolog or fragment thereof, e.g. derived from Arabidopsis thaliana, is increased or generated. For example the activity of a nucleic acid molecule or a polypeptide comprising the nucleic acid, preferably the coding region thereof, or polypeptide or the consensus sequence or the polypeptide motif, as depicted in Table I, II or IV, application No. 9, column 5 or 8 in the respective same line as the nucleic acid molecule SEQ ID NO. 24438 or polypeptide SEQ ID NO. 24439, respectively, or a homolog or a fragment thereof, is increased or generated, or if the activity heat shock transcription factor is increased or generated in a non-human organism, like a microorganism or a plant cell, plant or part thereof, especially with non-targeted localization. For example, an increase of the linolenic acid of at least 1 percent, particularly in a range of 13 to 35-percent is conferred as compared to a corresponding non-transformed wild type non-human organism.

[52901] Accordingly, in one embodiment, an increase of linolenic acid in a non-human organism, as compared to a corresponding non-transformed wild type non-human organism, is conferred in the process of the invention, if the activity of a polypeptide showing the activity of a monothiol glutaredoxin, or if the activity of the polypeptide At5g18600, preferably represented by SEQ ID NO. 4905, or a homolog or fragment thereof, or if the activity of a polypeptide encoded by a nucleic acid molecule comprising the nucleic acid SEQ ID NO. 4904, preferably the coding region thereof, or a homolog or fragment thereof, e.g. derived from Arabidopsis thaliana, is increased or generated. For example the activity of a nucleic acid molecule or a polypeptide comprising the nucleic acid, preferably the coding region thereof, or polypeptide or the consensus sequence or the polypeptide motif, as depicted in Table I, II or IV, application No. 9, column 5 or 8 in the respective same line as the nucleic acid molecule SEQ ID NO. 4904 or polypeptide SEQ ID NO. 4905, respectively, or a homolog or a fragment thereof, is increased or generated, or if the activity monothiol glutaredoxin is increased or generated in a non-human organism, like a microorganism or a plant cell, plant or part thereof, especially with non-targeted localization. For example, an increase of the linolenic acid of at least 1 percent, particularly in a range of 13 to 35-percent is conferred as compared to a corresponding non-transformed wild type non-human organism.

[52902] Accordingly, in one embodiment, an increase of linolenic acid in a non-human organism, as compared to a corresponding non-transformed wild type non-human organism, is conferred in the process of the invention, if the activity of a polypeptide showing the activity of a protein phosphatase, or if the activity of the polypeptide At5g57050, preferably represented by SEQ ID NO. 5319, or a homolog or fragment thereof, or if the activity of a polypeptide encoded by a nucleic acid molecule comprising the nucleic acid SEQ ID NO. 5318, preferably the coding region thereof, or a homolog or fragment thereof, e.g. derived from Arabidopsis thaliana, is increased or generated. For example the activity of a nucleic acid molecule or a polypeptide comprising the nucleic acid, preferably the coding region thereof, or polypeptide or the consensus sequence or the polypeptide motif, as depicted in Table I, II or IV, application No. 9, column 5 or 8 in the respective same line as the nucleic acid molecule SEQ ID NO. 5318 or polypeptide SEQ ID NO. 5319, respectively, or a homolog or a fragment thereof, is increased or generated, or if the activity protein phosphatase is increased or generated in a non-human organism, like a microorganism or a plant cell, plant or part thereof, especially with non-targeted localization. For example, an increase of the linolenic acid of at least 1 percent, particularly in a range of 15 to 40-percent is conferred as compared to a corresponding non-transformed wild type non-human organism.

[52903] Accordingly, in one embodiment, an increase of linolenic acid in a non-human organism, as compared to a corresponding non-transformed wild type non-human organism, is conferred in the process of the invention, if the activity of a polypeptide showing the activity of a protein phosphatase, or if the activity of the polypeptide At5g59220, preferably represented by SEQ ID NO. 25499, or a homolog or fragment thereof, or if the activity of a polypeptide encoded by a nucleic acid molecule comprising the nucleic acid SEQ ID NO. 25498, preferably the coding region thereof, or a homolog or fragment thereof, e.g. derived from Arabidopsis thaliana, is increased or generated. For example the activity of a nucleic acid molecule or a polypeptide comprising the nucleic acid, preferably the coding region thereof, or polypeptide or the consensus sequence or the polypeptide motif, as depicted in Table I, II or IV, application No. 9, column 5 or 8 in the respective same line as the nucleic acid molecule SEQ ID NO. 25498 or polypeptide SEQ ID NO. 25499, respectively, or a homolog or a fragment thereof, is increased or generated, or if the activity protein phosphatase is increased or generated in a non-human organism, like a microorganism or a plant cell, plant or part thereof, especially with non-targeted localization. For example, an increase of the linolenic acid of at least 1 percent, particularly in a range of 24 to 60-percent is conferred as compared to a corresponding non-transformed wild type non-human organism.

[52904] Accordingly, in one embodiment, an increase of linolenic acid in a non-human organism, as compared to a corresponding non-transformed wild type non-human organism, is conferred in the process of the invention, if the activity of a polypeptide showing the activity of a sec-independent protein translocase, or if the activity of the polypeptide AvinDRAFT_{—}1624, preferably represented by SEQ ID NO. 26197, or a homolog or fragment thereof, or if the activity of a polypeptide encoded by a nucleic acid molecule comprising the nucleic acid SEQ ID NO. 26196, preferably the coding region thereof, or a homolog or fragment thereof, e.g. derived from Azotobacter vinelandii, is increased or generated. For example the activity of a nucleic acid molecule or a polypeptide comprising the nucleic acid, preferably the coding region thereof, or polypeptide or the consensus sequence or the polypeptide motif, as depicted in Table I, II or IV, application No. 9, column 5 or 8 in the respective same line as the nucleic acid molecule SEQ ID NO. 26196 or polypeptide SEQ ID NO. 26197, respectively, or a homolog or a fragment thereof, is increased or generated, or if the activity sec-independent protein translocase is increased or generated in a non-human organism, like a microorganism or a plant cell, plant or part thereof, especially with non-targeted localization. For example, an increase of the linolenic acid of at least 1 percent, particularly in a range of 11 to 26-percent is conferred as compared to a corresponding non-transformed wild type non-human organism.

[52905] Accordingly, in one embodiment, an increase of linolenic acid in a non-human organism, as compared to a corresponding non-transformed wild type non-human organism, is conferred in the process of the invention, if the activity of a polypeptide showing the activity of a oxidoreductase, or if the activity of the polypeptide AvinDRAFT_{—}1788, preferably represented by SEQ ID NO. 114084, or a homolog or fragment thereof, or if the activity of a polypeptide encoded by a nucleic acid molecule comprising the nucleic acid SEQ ID NO. 114083, preferably the coding region thereof, or a homolog or fragment thereof, e.g. derived from Azotobacter vinelandii, is increased or generated. For example the activity of a nucleic acid molecule or a polypeptide comprising the nucleic acid, preferably the coding region thereof, or polypeptide or the consensus sequence or the polypeptide motif, as depicted in Table I, II or IV, application No. 9, column 5 or 8 in the respective same line as the nucleic acid molecule SEQ ID NO. 114083 or polypeptide SEQ ID NO. 114084, respectively, or a homolog or a fragment thereof, is increased or generated, or if the activity oxidoreductase is increased or generated in a non-human organism, like a microorganism or a plant cell, plant or part thereof, especially with non-targeted localization. For example, an increase of the linolenic acid of at least 1 percent, particularly in a range of 16 to 26-percent is conferred as compared to a corresponding non-transformed wild type non-human organism.

[52906] Accordingly, in one embodiment, an increase of linolenic acid in a non-human organism, as compared to a corresponding non-transformed wild type non-human organism, is conferred in the process of the invention, if the activity of a polypeptide showing the activity of a acyl-CoA synthase, or if the activity of the polypeptide AvinDRAFT_{—}2754, preferably represented by SEQ ID NO. 28041, or a homolog or fragment thereof, or if the activity of a polypeptide encoded by a nucleic acid molecule comprising the nucleic acid SEQ ID NO. 28040, preferably the coding region thereof, or a homolog or fragment thereof, e.g. derived from Azotobacter vinelandii, is increased or generated. For example the activity of a nucleic acid molecule or a polypeptide comprising the nucleic acid, preferably the coding region thereof, or polypeptide or the consensus sequence or the polypeptide motif, as depicted in Table I, II or IV, application No. 9, column 5 or 8 in the respective same line as the nucleic acid molecule SEQ ID NO. 28040 or polypeptide SEQ ID NO. 28041, respectively, or a homolog or a fragment thereof, is increased or generated, or if the activity acyl-CoA synthase is increased or generated in a non-human organism, like a microorganism or a plant cell, plant or part thereof, especially with non-targeted localization. For example, an increase of the linolenic acid of at least 1 percent, particularly in a range of 13 to 26-percent is conferred as compared to a corresponding non-transformed wild type non-human organism.

[52907] Accordingly, in one embodiment, an increase of linolenic acid in a non-human organism, as compared to a corresponding non-transformed wild type non-human organism, is conferred in the process of the invention, if the activity of a polypeptide showing the activity of a oxidoreductase, or if the activity of the polypeptide AvinDRAFT_{—}3253, preferably represented by SEQ ID NO. 29501, or a homolog or fragment thereof, or if the activity of a polypeptide encoded by a nucleic acid molecule comprising the nucleic acid SEQ ID NO. 29500, preferably the coding region thereof, or a homolog or fragment thereof, e.g. derived from Azotobacter vinelandii, is increased or generated. For example the activity of a nucleic acid molecule or a polypeptide comprising the nucleic acid, preferably the coding region thereof, or polypeptide or the consensus sequence or the polypeptide motif, as depicted in Table I, II or IV, application No. 9, column 5 or 8 in the respective same line as the nucleic acid molecule SEQ ID NO. 29500 or polypeptide SEQ ID NO. 29501, respectively, or a homolog or a fragment thereof, is increased or generated, or if the activity oxidoreductase is increased or generated in a non-human organism, like a microorganism or a plant cell, plant or part thereof, especially with non-targeted localization. For example, an increase of the linolenic acid of at least 1 percent, particularly in a range of 14 to 58-percent is conferred as compared to a corresponding non-transformed wild type non-human organism.

[52908] Accordingly, in one embodiment, an increase of linolenic acid in a non-human organism, as compared to a corresponding non-transformed wild type non-human organism, is conferred in the process of the invention, if the activity of a polypeptide showing the activity of a ThiF family protein, or if the activity of the polypeptide AvinDRAFT_{—}3577, preferably represented by SEQ ID NO. 111156, or a homolog or fragment thereof, or if the activity of a polypeptide encoded by a nucleic acid molecule comprising the nucleic acid SEQ ID NO. 111155, preferably the coding region thereof, or a homolog or fragment thereof, e.g. derived from Azotobacter vinelandii, is increased or generated. For example the activity of a nucleic acid molecule or a polypeptide comprising the nucleic acid, preferably the coding region thereof, or polypeptide or the consensus sequence or the polypeptide motif, as depicted in Table I, II or IV, application No. 9, column 5 or 8 in the respective same line as the nucleic acid molecule SEQ ID NO. 111155 or polypeptide SEQ ID NO. 111156, respectively, or a homolog or a fragment thereof, is increased or generated, or if the activity ThiF family protein is increased or generated in a non-human organism, like a microorganism or a plant cell, plant or part thereof, especially with non-targeted localization. For example, an increase of the linolenic acid of at least 1 percent, particularly in a range of 12 to 43-percent is conferred as compared to a corresponding non-transformed wild type non-human organism.

[52909] Accordingly, in one embodiment, an increase of linolenic acid in a non-human organism, as compared to a corresponding non-transformed wild type non-human organism, is conferred in the process of the invention, if the activity of a polypeptide showing the activity of a CTP synthase, or if the activity of the polypeptide AvinDRAFT_{—}3605, preferably represented by SEQ ID NO. 31027, or a homolog or fragment thereof, or if the activity of a polypeptide encoded by a nucleic acid molecule comprising the nucleic acid SEQ ID NO. 31026, preferably the coding region thereof, or a homolog or fragment thereof, e.g. derived from Azotobacter vinelandii, is increased or generated. For example the activity of a nucleic acid molecule or a polypeptide comprising the nucleic acid, preferably the coding region thereof, or polypeptide or the consensus sequence or the polypeptide motif, as depicted in Table I, II or IV, application No. 9, column 5 or 8 in the respective same line as the nucleic acid molecule SEQ ID NO. 31026 or polypeptide SEQ ID NO. 31027, respectively, or a homolog or a fragment thereof, is increased or generated, or if the activity CTP synthase is increased or generated in a non-human organism, like a microorganism or a plant cell, plant or part thereof, especially with non-targeted localization. For example, an increase of the linolenic acid of at least 1 percent, particularly in a range of 11 to 46-percent is conferred as compared to a corresponding non-transformed wild type non-human organism.

[52910] Accordingly, in one embodiment, an increase of linolenic acid in a non-human organism, as compared to a corresponding non-transformed wild type non-human organism, is conferred in the process of the invention, if the activity of a polypeptide showing the activity of a recombinase A, or if the activity of the polypeptide AvinDRAFT_{—}3629, preferably represented by SEQ ID NO. 114232, or a homolog or fragment thereof, or if the activity of a polypeptide encoded by a nucleic acid molecule comprising the nucleic acid SEQ ID NO. 114231, preferably the coding region thereof, or a homolog or fragment thereof, e.g. derived from Azotobacter vinelandii, is increased or generated. For example the activity of a nucleic acid molecule or a polypeptide comprising the nucleic acid, preferably the coding region thereof, or polypeptide or the consensus sequence or the polypeptide motif, as depicted in Table I, II or IV, application No. 9, column 5 or 8 in the respective same line as the nucleic acid molecule SEQ ID NO. 114231 or polypeptide SEQ ID NO. 114232, respectively, or a homolog or a fragment thereof, is increased or generated, or if the activity recombinase A is increased or generated in a non-human organism, like a microorganism or a plant cell, plant or part thereof, especially with non-targeted localization. For example, an increase of the linolenic acid of at least 1 percent, particularly in a range of 15 to 47-percent is conferred as compared to a corresponding non-transformed wild type non-human organism.

[52911] Accordingly, in one embodiment, an increase of linolenic acid in a non-human organism, as compared to a corresponding non-transformed wild type non-human organism, is conferred in the process of the invention, if the activity of a polypeptide showing the activity of a isopropylmalate isomerase large subunit, or if the activity of the polypeptide AvinDRAFT_{—}4847, preferably represented by SEQ ID NO. 102942, or a homolog or fragment thereof, or if the activity of a polypeptide encoded by a nucleic acid molecule comprising the nucleic acid SEQ ID NO. 102941, preferably the coding region thereof, or a homolog or fragment thereof, e.g. derived from Azotobacter vinelandii, is increased or generated. For example the activity of a nucleic acid molecule or a polypeptide comprising the nucleic acid, preferably the coding region thereof, or polypeptide or the consensus sequence or the polypeptide motif, as depicted in Table I, II or IV, application No. 9, column 5 or 8 in the respective same line as the nucleic acid molecule SEQ ID NO. 102941 or polypeptide SEQ ID NO. 102942, respectively, or a homolog or a fragment thereof, is increased or generated, or if the activity isopropylmalate isomerase large subunit is increased or generated in a non-human organism, like a microorganism or a plant cell, plant or part thereof, especially with non-targeted localization. For example, an increase of the linolenic acid of at least 1 percent, particularly in a range of 12 to 26-percent is conferred as compared to a corresponding non-transformed wild type non-human organism.

[52912] Accordingly, in one embodiment, an increase of linolenic acid in a non-human organism, as compared to a corresponding non-transformed wild type non-human organism, is conferred in the process of the invention, if the activity of a polypeptide showing the activity of a HesB/YadR/YfhF family protein, or if the activity of the polypeptide AvinDRAFT_{—}5467, preferably represented by SEQ ID NO. 32649, or a homolog or fragment thereof, or if the activity of a polypeptide encoded by a nucleic acid molecule comprising the nucleic acid SEQ ID NO. 32648, preferably the coding region thereof, or a homolog or fragment thereof, e.g. derived from Azotobacter vinelandii, is increased or generated. For example the activity of a nucleic acid molecule or a polypeptide comprising the nucleic acid, preferably the coding region thereof, or polypeptide or the consensus sequence or the polypeptide motif, as depicted in Table I, II or IV, application No. 9, column 5 or 8 in the respective same line as the nucleic acid molecule SEQ ID NO. 32648 or polypeptide SEQ ID NO. 32649, respectively, or a homolog or a fragment thereof, is increased or generated, or if the activity HesB/YadR/YfhF family protein is increased or generated in a non-human organism, like a microorganism or a plant cell, plant or part thereof, especially with non-targeted localization. For example, an increase of the linolenic acid of at least 1 percent, particularly in a range of 21 to 54-percent is conferred as compared to a corresponding non-transformed wild type non-human organism.

[52913] Accordingly, in one embodiment, an increase of linolenic acid in a non-human organism, as compared to a corresponding non-transformed wild type non-human organism, is conferred in the process of the invention, if the activity of a polypeptide showing the activity of a b0195-protein, or if the activity of the polypeptide B0195, preferably represented by SEQ ID NO. 118239, or a homolog or fragment thereof, or if the activity of a polypeptide encoded by a nucleic acid molecule comprising the nucleic acid SEQ ID NO. 118238, preferably the coding region thereof, or a homolog or fragment thereof, e.g. derived from Escherichia coli, is increased or generated. For example the activity of a nucleic acid molecule or a polypeptide comprising the nucleic acid, preferably the coding region thereof, or polypeptide or the consensus sequence or the polypeptide motif, as depicted in Table I, II or IV, application No. 9, column 5 or 8 in the respective same line as the nucleic acid molecule SEQ ID NO. 118238 or polypeptide SEQ ID NO. 118239, respectively, or a homolog or a fragment thereof, is increased or generated, or if the activity b0195-protein is increased or generated in a non-human organism, like a microorganism or a plant cell, plant or part thereof, especially with plastidic localization. For example, an increase of the linolenic acid of at least 1 percent, particularly in a range of 14 to 31-percent is conferred as compared to a corresponding non-transformed wild type non-human organism.

[52914] Accordingly, in one embodiment, an increase of linolenic acid in a non-human organism, as compared to a corresponding non-transformed wild type non-human organism, is conferred in the process of the invention, if the activity of a polypeptide showing the activity of a asparaginase, or if the activity of the polypeptide B0828, preferably represented by SEQ ID NO. 36300, or a homolog or fragment thereof, or if the activity of a polypeptide encoded by a nucleic acid molecule comprising the nucleic acid SEQ ID NO. 36299, preferably the coding region thereof, or a homolog or fragment thereof, e.g. derived from Escherichia coli, is increased or generated. For example the activity of a nucleic acid molecule or a polypeptide comprising the nucleic acid, preferably the coding region thereof, or polypeptide or the consensus sequence or the polypeptide motif, as depicted in Table I, II or IV, application No. 9, column 5 or 8 in the respective same line as the nucleic acid molecule SEQ ID NO. 36299 or polypeptide SEQ ID NO. 36300, respectively, or a homolog or a fragment thereof, is increased or generated, or if the activity asparaginase is increased or generated in a non-human organism, like a microorganism or a plant cell, plant or part thereof, especially with plastidic localization. For example, an increase of the linolenic acid of at least 1 percent, particularly in a range of 12 to 28-percent is conferred as compared to a corresponding non-transformed wild type non-human organism.

[52915] Accordingly, in one embodiment, an increase of linolenic acid in a non-human organism, as compared to a corresponding non-transformed wild type non-human organism, is conferred in the process of the invention, if the activity of a polypeptide showing the activity of a multidrug resistance protein, or if the activity of the polypeptide B1065, preferably represented by SEQ ID NO. 76033, or a homolog or fragment thereof, or if the activity of a polypeptide encoded by a nucleic acid molecule comprising the nucleic acid SEQ ID NO. 76032, preferably the coding region thereof, or a homolog or fragment thereof, e.g. derived from Escherichia coli, is increased or generated. For example the activity of a nucleic acid molecule or a polypeptide comprising the nucleic acid, preferably the coding region thereof, or polypeptide or the consensus sequence or the polypeptide motif, as depicted in Table I, II or IV, application No. 9, column 5 or 8 in the respective same line as the nucleic acid molecule SEQ ID NO. 76032 or polypeptide SEQ ID NO. 76033, respectively, or a homolog or a fragment thereof, is increased or generated, or if the activity multidrug resistance protein is increased or generated in a non-human organism, like a microorganism or a plant cell, plant or part thereof, especially with plastidic localization. For example, an increase of the linolenic acid of at least 1 percent, particularly in a range of 15 to 48-percent is conferred as compared to a corresponding non-transformed wild type non-human organism.

[52916] Accordingly, in one embodiment, an increase of linolenic acid in a non-human organism, as compared to a corresponding non-transformed wild type non-human organism, is conferred in the process of the invention, if the activity of a polypeptide showing the activity of a 3-oxoacyl-[acyl-carrier-protein] reductase, or if the activity of the polypeptide B1093, preferably represented by SEQ ID NO. 118372, or a homolog or fragment thereof, or if the activity of a polypeptide encoded by a nucleic acid molecule comprising the nucleic acid SEQ ID NO. 118371, preferably the coding region thereof, or a homolog or fragment thereof, e.g. derived from Escherichia coli, is increased or generated. For example the activity of a nucleic acid molecule or a polypeptide comprising the nucleic acid, preferably the coding region thereof, or polypeptide or the consensus sequence or the polypeptide motif, as depicted in Table I, II or IV, application No. 9, column 5 or 8 in the respective same line as the nucleic acid molecule SEQ ID NO. 118371 or polypeptide SEQ ID NO. 118372, respectively, or a homolog or a fragment thereof, is increased or generated, or if the activity 3-oxoacyl-[acyl-carrier-protein] reductase is increased or generated in a non-human organism, like a microorganism or a plant cell, plant or part thereof, especially with non-targeted localization. For example, an increase of the linolenic acid of at least 1 percent, particularly in a range of 11 to 25-percent is conferred as compared to a corresponding non-transformed wild type non-human organism.

[52917] Accordingly, in one embodiment, an increase of linolenic acid in a non-human organism, as compared to a corresponding non-transformed wild type non-human organism, is conferred in the process of the invention, if the activity of a polypeptide showing the activity of a 3-oxoacyl-[acyl-carrier-protein] synthase, or if the activity of the polypeptide B1095, preferably represented by SEQ ID NO. 114553, or a homolog or fragment thereof, or if the activity of a polypeptide encoded by a nucleic acid molecule comprising the nucleic acid SEQ ID NO. 114552, preferably the coding region thereof, or a homolog or fragment thereof, e.g. derived from Escherichia coli, is increased or generated. For example the activity of a nucleic acid molecule or a polypeptide comprising the nucleic acid, preferably the coding region thereof, or polypeptide or the consensus sequence or the polypeptide motif, as depicted in Table I, II or IV, application No. 9, column 5 or 8 in the respective same line as the nucleic acid molecule SEQ ID NO. 114552 or polypeptide SEQ ID NO. 114553, respectively, or a homolog or a fragment thereof, is increased or generated, or if the activity 3-oxoacyl-[acyl-carrier-protein] synthase is increased or generated in a non-human organism, like a microorganism or a plant cell, plant or part thereof, especially with plastidic localization. For example, an increase of the linolenic acid of at least 1 percent, particularly in a range of 12 to 47-percent is conferred as compared to a corresponding non-transformed wild type non-human organism.

[52918] Accordingly, in one embodiment, an increase of linolenic acid in a non-human organism, as compared to a corresponding non-transformed wild type non-human organism, is conferred in the process of the invention, if the activity of a polypeptide showing the activity of a b1234-protein, or if the activity of the polypeptide B1234, preferably represented by SEQ ID NO. 112112, or a homolog or fragment thereof, or if the activity of a polypeptide encoded by a nucleic acid molecule comprising the nucleic acid SEQ ID NO. 112111, preferably the coding region thereof, or a homolog or fragment thereof, e.g. derived from Escherichia coli, is increased or generated. For example the activity of a nucleic acid molecule or a polypeptide comprising the nucleic acid, preferably the coding region thereof, or polypeptide or the consensus sequence or the polypeptide motif, as depicted in Table I, II or IV, application No. 9, column 5 or 8 in the respective same line as the nucleic acid molecule SEQ ID NO. 112111 or polypeptide SEQ ID NO. 112112, respectively, or a homolog or a fragment thereof, is increased or generated, or if the activity b1234-protein is increased or generated in a non-human organism, like a microorganism or a plant cell, plant or part thereof, especially with non-targeted localization. For example, an increase of the linolenic acid of at least 1 percent, particularly in a range of 11 to 30-percent is conferred as compared to a corresponding non-transformed wild type non-human organism.

[52919] Accordingly, in one embodiment, an increase of linolenic acid in a non-human organism, as compared to a corresponding non-transformed wild type non-human organism, is conferred in the process of the invention, if the activity of a polypeptide showing the activity of a b1248-protein, or if the activity of the polypeptide B1248, preferably represented by SEQ ID NO. 119136, or a homolog or fragment thereof, or if the activity of a polypeptide encoded by a nucleic acid molecule comprising the nucleic acid SEQ ID NO. 119135, preferably the coding region thereof, or a homolog or fragment thereof, e.g. derived from Escherichia coli, is increased or generated. For example the activity of a nucleic acid molecule or a polypeptide comprising the nucleic acid, preferably the coding region thereof, or polypeptide or the consensus sequence or the polypeptide motif, as depicted in Table I, II or IV, application No. 9, column 5 or 8 in the respective same line as the nucleic acid molecule SEQ ID NO. 119135 or polypeptide SEQ ID NO. 119136, respectively, or a homolog or a fragment thereof, is increased or generated, or if the activity b1248-protein is increased or generated in a non-human organism, like a microorganism or a plant cell, plant or part thereof, especially with non-targeted localization. For example, an increase of the linolenic acid of at least 1 percent, particularly in a range of 12 to 19-percent is conferred as compared to a corresponding non-transformed wild type non-human organism.

[52920] Accordingly, in one embodiment, an increase of linolenic acid in a non-human organism, as compared to a corresponding non-transformed wild type non-human organism, is conferred in the process of the invention, if the activity of a polypeptide showing the activity of a b1280-protein, or if the activity of the polypeptide B1280, preferably represented by SEQ ID NO. 37574, or a homolog or fragment thereof, or if the activity of a polypeptide encoded by a nucleic acid molecule comprising the nucleic acid SEQ ID NO. 37573, preferably the coding region thereof, or a homolog or fragment thereof, e.g. derived from Escherichia coli, is increased or generated. For example the activity of a nucleic acid molecule or a polypeptide comprising the nucleic acid, preferably the coding region thereof, or polypeptide or the consensus sequence or the polypeptide motif, as depicted in Table I, II or IV, application No. 9, column 5 or 8 in the respective same line as the nucleic acid molecule SEQ ID NO. 37573 or polypeptide SEQ ID NO. 37574, respectively, or a homolog or a fragment thereof, is increased or generated, or if the activity b1280-protein is increased or generated in a non-human organism, like a microorganism or a plant cell, plant or part thereof, especially with non-targeted localization. For example, an increase of the linolenic acid of at least 1 percent, particularly in a range of 13 to 28-percent is conferred as compared to a corresponding non-transformed wild type non-human organism.

[52921] Accordingly, in one embodiment, an increase of linolenic acid in a non-human organism, as compared to a corresponding non-transformed wild type non-human organism, is conferred in the process of the invention, if the activity of a polypeptide showing the activity of a b1330-protein, or if the activity of the polypeptide B1330, preferably represented by SEQ ID NO. 38227, or a homolog or fragment thereof, or if the activity of a polypeptide encoded by a nucleic acid molecule comprising the nucleic acid SEQ ID NO. 38226, preferably the coding region thereof, or a homolog or fragment thereof, e.g. derived from Escherichia coli, is increased or generated. For example the activity of a nucleic acid molecule or a polypeptide comprising the nucleic acid, preferably the coding region thereof, or polypeptide or the consensus sequence or the polypeptide motif, as depicted in Table I, II or IV, application No. 9, column 5 or 8 in the respective same line as the nucleic acid molecule SEQ ID NO. 38226 or polypeptide SEQ ID NO. 38227, respectively, or a homolog or a fragment thereof, is increased or generated, or if the activity b1330-protein is increased or generated in a non-human organism, like a microorganism or a plant cell, plant or part thereof, especially with non-targeted localization. For example, an increase of the linolenic acid of at least 1 percent, particularly in a range of 15 to 29-percent is conferred as compared to a corresponding non-transformed wild type non-human organism.

[52922] Accordingly, in one embodiment, an increase of linolenic acid in a non-human organism, as compared to a corresponding non-transformed wild type non-human organism, is conferred in the process of the invention, if the activity of a polypeptide showing the activity of a b1470-protein, or if the activity of the polypeptide B1470, preferably represented by SEQ ID NO. 115057, or a homolog or fragment thereof, or if the activity of a polypeptide encoded by a nucleic acid molecule comprising the nucleic acid SEQ ID NO. 115056, preferably the coding region thereof, or a homolog or fragment thereof, e.g. derived from Escherichia coli, is increased or generated. For example the activity of a nucleic acid molecule or a polypeptide comprising the nucleic acid, preferably the coding region thereof, or polypeptide or the consensus sequence or the polypeptide motif, as depicted in Table I, II or IV, application No. 9, column 5 or 8 in the respective same line as the nucleic acid molecule SEQ ID NO. 115056 or polypeptide SEQ ID NO. 115057, respectively, or a homolog or a fragment thereof, is increased or generated, or if the activity b1470-protein is increased or generated in a non-human organism, like a microorganism or a plant cell, plant or part thereof, especially with non-targeted localization. For example, an increase of the linolenic acid of at least 1 percent, particularly in a range of 12 to 30-percent is conferred as compared to a corresponding non-transformed wild type non-human organism.

[52923] Accordingly, in one embodiment, an increase of linolenic acid in a non-human organism, as compared to a corresponding non-transformed wild type non-human organism, is conferred in the process of the invention, if the activity of a polypeptide showing the activity of a acid shock protein, or if the activity of the polypeptide B1597, preferably represented by SEQ ID NO. 38301, or a homolog or fragment thereof, or if the activity of a polypeptide encoded by a nucleic acid molecule comprising the nucleic acid SEQ ID NO. 38300, preferably the coding region thereof, or a homolog or fragment thereof, e.g. derived from Escherichia coli, is increased or generated. For example the activity of a nucleic acid molecule or a polypeptide comprising the nucleic acid, preferably the coding region thereof, or polypeptide or the consensus sequence or the polypeptide motif, as depicted in Table I, II or IV, application No. 9, column 5 or 8 in the respective same line as the nucleic acid molecule SEQ ID NO. 38300 or polypeptide SEQ ID NO. 38301, respectively, or a homolog or a fragment thereof, is increased or generated, or if the activity acid shock protein is increased or generated in a non-human organism, like a microorganism or a plant cell, plant or part thereof, especially with non-targeted localization. For example, an increase of the linolenic acid of at least 1 percent, particularly in a range of 17 to 33-percent is conferred as compared to a corresponding non-transformed wild type non-human organism.

[52924] Accordingly, in one embodiment, an increase of linolenic acid in a non-human organism, as compared to a corresponding non-transformed wild type non-human organism, is conferred in the process of the invention, if the activity of a polypeptide showing the activity of a fumarate hydratase, or if the activity of the polypeptide B1611, preferably represented by SEQ ID NO. 115065, or a homolog or fragment thereof, or if the activity of a polypeptide encoded by a nucleic acid molecule comprising the nucleic acid SEQ ID NO. 115064, preferably the coding region thereof, or a homolog or fragment thereof, e.g. derived from Escherichia coli, is increased or generated. For example the activity of a nucleic acid molecule or a polypeptide comprising the nucleic acid, preferably the coding region thereof, or polypeptide or the consensus sequence or the polypeptide motif, as depicted in Table I, II or IV, application No. 9, column 5 or 8 in the respective same line as the nucleic acid molecule SEQ ID NO. 115064 or polypeptide SEQ ID NO. 115065, respectively, or a homolog or a fragment thereof, is increased or generated, or if the activity fumarate hydratase is increased or generated in a non-human organism, like a microorganism or a plant cell, plant or part thereof, especially with plastidic localization. For example, an increase of the linolenic acid of at least 1 percent, particularly in a range of 13 to 43-percent is conferred as compared to a corresponding non-transformed wild type non-human organism.

[52925] Accordingly, in one embodiment, an increase of linolenic acid in a non-human organism, as compared to a corresponding non-transformed wild type non-human organism, is conferred in the process of the invention, if the activity of a polypeptide showing the activity of a electron transport complex protein, or if the activity of the polypeptide B1627, preferably represented by SEQ ID NO. 38346, or a homolog or fragment thereof, or if the activity of a polypeptide encoded by a nucleic acid molecule comprising the nucleic acid SEQ ID NO. 38345, preferably the coding region thereof, or a homolog or fragment thereof, e.g. derived from Escherichia coli, is increased or generated. For example the activity of a nucleic acid molecule or a polypeptide comprising the nucleic acid, preferably the coding region thereof, or polypeptide or the consensus sequence or the polypeptide motif, as depicted in Table I, II or IV, application No. 9, column 5 or 8 in the respective same line as the nucleic acid molecule SEQ ID NO. 38345 or polypeptide SEQ ID NO. 38346, respectively, or a homolog or a fragment thereof, is increased or generated, or if the activity electron transport complex protein is increased or generated in a non-human organism, like a microorganism or a plant cell, plant or part thereof, especially with non-targeted localization. For example, an increase of the linolenic acid of at least 1 percent, particularly in a range of 11 to 19-percent is conferred as compared to a corresponding non-transformed wild type non-human organism.

[52926] Accordingly, in one embodiment, an increase of linolenic acid in a non-human organism, as compared to a corresponding non-transformed wild type non-human organism, is conferred in the process of the invention, if the activity of a polypeptide showing the activity of a b1670-protein, or if the activity of the polypeptide B1670, preferably represented by SEQ ID NO. 78754, or a homolog or fragment thereof, or if the activity of a polypeptide encoded by a nucleic acid molecule comprising the nucleic acid SEQ ID NO. 78753, preferably the coding region thereof, or a homolog or fragment thereof, e.g. derived from Escherichia coli, is increased or generated. For example the activity of a nucleic acid molecule or a polypeptide comprising the nucleic acid, preferably the coding region thereof, or polypeptide or the consensus sequence or the polypeptide motif, as depicted in Table I, II or IV, application No. 9, column 5 or 8 in the respective same line as the nucleic acid molecule SEQ ID NO. 78753 or polypeptide SEQ ID NO. 78754, respectively, or a homolog or a fragment thereof, is increased or generated, or if the activity b1670-protein is increased or generated in a non-human organism, like a microorganism or a plant cell, plant or part thereof, especially with non-targeted localization. For example, an increase of the linolenic acid of at least 1 percent, particularly in a range of 12 to 30-percent is conferred as compared to a corresponding non-transformed wild type non-human organism.

[52927] Accordingly, in one embodiment, an increase of linolenic acid in a non-human organism, as compared to a corresponding non-transformed wild type non-human organism, is conferred in the process of the invention, if the activity of a polypeptide showing the activity of a b1672-protein, or if the activity of the polypeptide B1672, preferably represented by SEQ ID NO. 78772, or a homolog or fragment thereof, or if the activity of a polypeptide encoded by a nucleic acid molecule comprising the nucleic acid SEQ ID NO. 78771, preferably the coding region thereof, or a homolog or fragment thereof, e.g. derived from Escherichia coli, is increased or generated. For example the activity of a nucleic acid molecule or a polypeptide comprising the nucleic acid, preferably the coding region thereof, or polypeptide or the consensus sequence or the polypeptide motif, as depicted in Table I, II or IV, application No. 9, column 5 or 8 in the respective same line as the nucleic acid molecule SEQ ID NO. 78771 or polypeptide SEQ ID NO. 78772, respectively, or a homolog or a fragment thereof, is increased or generated, or if the activity b1672-protein is increased or generated in a non-human organism, like a microorganism or a plant cell, plant or part thereof, especially with non-targeted localization. For example, an increase of the linolenic acid of at least 1 percent, particularly in a range of 12 to 26-percent is conferred as compared to a corresponding non-transformed wild type non-human organism.

[52928] Accordingly, in one embodiment, an increase of linolenic acid in a non-human organism, as compared to a corresponding non-transformed wild type non-human organism, is conferred in the process of the invention, if the activity of a polypeptide showing the activity of a b1837-protein, or if the activity of the polypeptide B1837, preferably represented by SEQ ID NO. 78954, or a homolog or fragment thereof, or if the activity of a polypeptide encoded by a nucleic acid molecule comprising the nucleic acid SEQ ID NO. 78953, preferably the coding region thereof, or a homolog or fragment thereof, e.g. derived from Escherichia coli, is increased or generated. For example the activity of a nucleic acid molecule or a polypeptide comprising the nucleic acid, preferably the coding region thereof, or polypeptide or the consensus sequence or the polypeptide motif, as depicted in Table I, II or IV, application No. 9, column 5 or 8 in the respective same line as the nucleic acid molecule SEQ ID NO. 78953 or polypeptide SEQ ID NO. 78954, respectively, or a homolog or a fragment thereof, is increased or generated, or if the activity b1837-protein is increased or generated in a non-human organism, like a microorganism or a plant cell, plant or part thereof, especially with non-targeted localization. For example, an increase of the linolenic acid of at least 1 percent, particularly in a range of 14 to 32-percent is conferred as compared to a corresponding non-transformed wild type non-human organism.

[52929] Accordingly, in one embodiment, an increase of linolenic acid in a non-human organism, as compared to a corresponding non-transformed wild type non-human organism, is conferred in the process of the invention, if the activity of a polypeptide showing the activity of a b2032-protein, or if the activity of the polypeptide B2032, preferably represented by SEQ ID NO. 8921, or a homolog or fragment thereof, or if the activity of a polypeptide encoded by a nucleic acid molecule comprising the nucleic acid SEQ ID NO. 8920, preferably the coding region thereof, or a homolog or fragment thereof, e.g. derived from Escherichia coli, is increased or generated.

[52930] For example the activity of a nucleic acid molecule or a polypeptide comprising the nucleic acid, preferably the coding region thereof, or polypeptide or the consensus sequence or the polypeptide motif, as depicted in Table I, II or IV, application No. 9, column 5 or 8 in the respective same line as the nucleic acid molecule SEQ ID NO. 8920 or polypeptide SEQ ID NO. 8921, respectively, or a homolog or a fragment thereof, is increased or generated, or if the activity b2032-protein is increased or generated in a non-human organism, like a microorganism or a plant cell, plant or part thereof, especially with non-targeted localization. For example, an increase of the linolenic acid of at least 1 percent, particularly in a range of 12 to 90-percent is conferred as compared to a corresponding non-transformed wild type non-human organism.

[52931] Accordingly, in one embodiment, an increase of linolenic acid in a non-human organism, as compared to a corresponding non-transformed wild type non-human organism, is conferred in the process of the invention, if the activity of a polypeptide showing the activity of a b2107-protein, or if the activity of the polypeptide B2107, preferably represented by SEQ ID NO. 39003, or a homolog or fragment thereof, or if the activity of a polypeptide encoded by a nucleic acid molecule comprising the nucleic acid SEQ ID NO. 39002, preferably the coding region thereof, or a homolog or fragment thereof, e.g. derived from Escherichia coli, is increased or generated. For example the activity of a nucleic acid molecule or a polypeptide comprising the nucleic acid, preferably the coding region thereof, or polypeptide or the consensus sequence or the polypeptide motif, as depicted in Table I, II or IV, application No. 9, column 5 or 8 in the respective same line as the nucleic acid molecule SEQ ID NO. 39002 or polypeptide SEQ ID NO. 39003, respectively, or a homolog or a fragment thereof, is increased or generated, or if the activity b2107-protein is increased or generated in a non-human organism, like a microorganism or a plant cell, plant or part thereof, especially with non-targeted localization. For example, an increase of the linolenic acid of at least 1 percent, particularly in a range of 13 to 31-percent is conferred as compared to a corresponding non-transformed wild type non-human organism.

[52932] Accordingly, in one embodiment, an increase of linolenic acid in a non-human organism, as compared to a corresponding non-transformed wild type non-human organism, is conferred in the process of the invention, if the activity of a polypeptide showing the activity of a b2399-protein, or if the activity of the polypeptide B2399, preferably represented by SEQ ID NO. 39238, or a homolog or fragment thereof, or if the activity of a polypeptide encoded by a nucleic acid molecule comprising the nucleic acid SEQ ID NO. 39237, preferably the coding region thereof, or a homolog or fragment thereof, e.g. derived from Escherichia coli, is increased or generated. For example the activity of a nucleic acid molecule or a polypeptide comprising the nucleic acid, preferably the coding region thereof, or polypeptide or the consensus sequence or the polypeptide motif, as depicted in Table I, II or IV, application No. 9, column 5 or 8 in the respective same line as the nucleic acid molecule SEQ ID NO. 39237 or polypeptide SEQ ID NO. 39238, respectively, or a homolog or a fragment thereof, is increased or generated, or if the activity b2399-protein is increased or generated in a non-human organism, like a microorganism or a plant cell, plant or part thereof, especially with non-targeted localization. For example, an increase of the linolenic acid of at least 1 percent, particularly in a range of 30 to 52-percent is conferred as compared to a corresponding non-transformed wild type non-human organism.

[52933] Accordingly, in one embodiment, an increase of linolenic acid in a non-human organism, as compared to a corresponding non-transformed wild type non-human organism, is conferred in the process of the invention, if the activity of a polypeptide showing the activity of a ethanolamine utilization protein, or if the activity of the polypeptide B2439, preferably represented by SEQ ID NO. 115629, or a homolog or fragment thereof, or if the activity of a polypeptide encoded by a nucleic acid molecule comprising the nucleic acid SEQ ID NO. 115628, preferably the coding region thereof, or a homolog or fragment thereof, e.g. derived from Escherichia coli, is increased or generated. For example the activity of a nucleic acid molecule or a polypeptide comprising the nucleic acid, preferably the coding region thereof, or polypeptide or the consensus sequence or the polypeptide motif, as depicted in Table I, II or IV, application No. 9, column 5 or 8 in the respective same line as the nucleic acid molecule SEQ ID NO. 115628 or polypeptide SEQ ID NO. 115629, respectively, or a homolog or a fragment thereof, is increased or generated, or if the activity ethanolamine utilization protein is increased or generated in a non-human organism, like a microorganism or a plant cell, plant or part thereof, especially with non-targeted localization. For example, an increase of the linolenic acid of at least 1 percent, particularly in a range of 14 to 33-percent is conferred as compared to a corresponding non-transformed wild type non-human organism.

[52934] Accordingly, in one embodiment, an increase of linolenic acid in a non-human organism, as compared to a corresponding non-transformed wild type non-human organism, is conferred in the process of the invention, if the activity of a polypeptide showing the activity of a b2474-protein, or if the activity of the polypeptide B2474, preferably represented by SEQ ID NO. 40330, or a homolog or fragment thereof, or if the activity of a polypeptide encoded by a nucleic acid molecule comprising the nucleic acid SEQ ID NO. 40329, preferably the coding region thereof, or a homolog or fragment thereof, e.g. derived from Escherichia coli, is increased or generated. For example the activity of a nucleic acid molecule or a polypeptide comprising the nucleic acid, preferably the coding region thereof, or polypeptide or the consensus sequence or the polypeptide motif, as depicted in Table I, II or IV, application No. 9, column 5 or 8 in the respective same line as the nucleic acid molecule SEQ ID NO. 40329 or polypeptide SEQ ID NO. 40330, respectively, or a homolog or a fragment thereof, is increased or generated, or if the activity b2474-protein is increased or generated in a non-human organism, like a microorganism or a plant cell, plant or part thereof, especially with non-targeted localization. For example, an increase of the linolenic acid of at least 1 percent, particularly in a range of 12 to 38-percent is conferred as compared to a corresponding non-transformed wild type non-human organism.

[52935] Accordingly, in one embodiment, an increase of linolenic acid in a non-human organism, as compared to a corresponding non-transformed wild type non-human organism, is conferred in the process of the invention, if the activity of a polypeptide showing the activity of a b2613-protein, or if the activity of the polypeptide B2613, preferably represented by SEQ ID NO. 40666, or a homolog or fragment thereof, or if the activity of a polypeptide encoded by a nucleic acid molecule comprising the nucleic acid SEQ ID NO. 40665, preferably the coding region thereof, or a homolog or fragment thereof, e.g. derived from Escherichia coli, is increased or generated. For example the activity of a nucleic acid molecule or a polypeptide comprising the nucleic acid, preferably the coding region thereof, or polypeptide or the consensus sequence or the polypeptide motif, as depicted in Table I, II or IV, application No. 9, column 5 or 8 in the respective same line as the nucleic acid molecule SEQ ID NO. 40665 or polypeptide SEQ ID NO. 40666, respectively, or a homolog or a fragment thereof, is increased or generated, or if the activity b2613-protein is increased or generated in a non-human organism, like a microorganism or a plant cell, plant or part thereof, especially with non-targeted localization. For example, an increase of the linolenic acid of at least 1 percent, particularly in a range of 13 to 50-percent is conferred as compared to a corresponding non-transformed wild type non-human organism.

[52936] Accordingly, in one embodiment, an increase of linolenic acid in a non-human organism, as compared to a corresponding non-transformed wild type non-human organism, is conferred in the process of the invention, if the activity of a polypeptide showing the activity of a b2682-protein, or if the activity of the polypeptide B2682, preferably represented by SEQ ID NO. 115656, or a homolog or fragment thereof, or if the activity of a polypeptide encoded by a nucleic acid molecule comprising the nucleic acid SEQ ID NO. 115655, preferably the coding region thereof, or a homolog or fragment thereof, e.g. derived from Escherichia coli, is increased or generated. For example the activity of a nucleic acid molecule or a polypeptide comprising the nucleic acid, preferably the coding region thereof, or polypeptide or the consensus sequence or the polypeptide motif, as depicted in Table I, II or IV, application No. 9, column 5 or 8 in the respective same line as the nucleic acid molecule SEQ ID NO. 115655 or polypeptide SEQ ID NO. 115656, respectively, or a homolog or a fragment thereof, is increased or generated, or if the activity b2682-protein is increased or generated in a non-human organism, like a microorganism or a plant cell, plant or part thereof, especially with non-targeted localization. For example, an increase of the linolenic acid of at least 1 percent, particularly in a range of 16 to 25-percent is conferred as compared to a corresponding non-transformed wild type non-human organism.

[52937] Accordingly, in one embodiment, an increase of linolenic acid in a non-human organism, as compared to a corresponding non-transformed wild type non-human organism, is conferred in the process of the invention, if the activity of a polypeptide showing the activity of a flavodoxin, or if the activity of the polypeptide B2790, preferably represented by SEQ ID NO. 115720, or a homolog or fragment thereof, or if the activity of a polypeptide encoded by a nucleic acid molecule comprising the nucleic acid SEQ ID NO. 115719, preferably the coding region thereof, or a homolog or fragment thereof, e.g. derived from Escherichia coli, is increased or generated. For example the activity of a nucleic acid molecule or a polypeptide comprising the nucleic acid, preferably the coding region thereof, or polypeptide or the consensus sequence or the polypeptide motif, as depicted in Table I, II or IV, application No. 9, column 5 or 8 in the respective same line as the nucleic acid molecule SEQ ID NO. 115719 or polypeptide SEQ ID NO. 115720, respectively, or a homolog or a fragment thereof, is increased or generated, or if the activity flavodoxin is increased or generated in a non-human organism, like a microorganism or a plant cell, plant or part thereof, especially with non-targeted localization. For example, an increase of the linolenic acid of at least 1 percent, particularly in a range of 18 to 31-percent is conferred as compared to a corresponding non-transformed wild type non-human organism.

[52938] Accordingly, in one embodiment, an increase of linolenic acid in a non-human organism, as compared to a corresponding non-transformed wild type non-human organism, is conferred in the process of the invention, if the activity of a polypeptide showing the activity of a AAS bifunctional protein, or if the activity of the polypeptide B2836, preferably represented by SEQ ID NO. 115792, or a homolog or fragment thereof, or if the activity of a polypeptide encoded by a nucleic acid molecule comprising the nucleic acid SEQ ID NO. 115791, preferably the coding region thereof, or a homolog or fragment thereof, e.g. derived from Escherichia coli, is increased or generated. For example the activity of a nucleic acid molecule or a polypeptide comprising the nucleic acid, preferably the coding region thereof, or polypeptide or the consensus sequence or the polypeptide motif, as depicted in Table I, II or IV, application No. 9, column 5 or 8 in the respective same line as the nucleic acid molecule SEQ ID NO. 115791 or polypeptide SEQ ID NO. 115792, respectively, or a homolog or a fragment thereof, is increased or generated, or if the activity AAS bifunctional protein is increased or generated in a non-human organism, like a microorganism or a plant cell, plant or part thereof, especially with plastidic localization. For example, an increase of the linolenic acid of at least 1 percent, particularly in a range of 14 to 38-percent is conferred as compared to a corresponding non-transformed wild type non-human organism.

[52939] Accordingly, in one embodiment, an increase of linolenic acid in a non-human organism, as compared to a corresponding non-transformed wild type non-human organism, is conferred in the process of the invention, if the activity of a polypeptide showing the activity of a phosphotriesterase, or if the activity of the polypeptide B3379, preferably represented by SEQ ID NO. 116111, or a homolog or fragment thereof, or if the activity of a polypeptide encoded by a nucleic acid molecule comprising the nucleic acid SEQ ID NO. 116110, preferably the coding region thereof, or a homolog or fragment thereof, e.g. derived from Escherichia coli, is increased or generated. For example the activity of a nucleic acid molecule or a polypeptide comprising the nucleic acid, preferably the coding region thereof, or polypeptide or the consensus sequence or the polypeptide motif, as depicted in Table I, II or IV, application No. 9, column 5 or 8 in the respective same line as the nucleic acid molecule SEQ ID NO. 116110 or polypeptide SEQ ID NO. 116111, respectively, or a homolog or a fragment thereof, is increased or generated, or if the activity phosphotriesterase is increased or generated in a non-human organism, like a microorganism or a plant cell, plant or part thereof, especially with non-targeted localization. For example, an increase of the linolenic acid of at least 1 percent, particularly in a range of 11 to 26-percent is conferred as compared to a corresponding non-transformed wild type non-human organism.

[52940] Accordingly, in one embodiment, an increase of linolenic acid in a non-human organism, as compared to a corresponding non-transformed wild type non-human organism, is conferred in the process of the invention, if the activity of a polypeptide showing the activity of a b3442-protein, or if the activity of the polypeptide B3442, preferably represented by SEQ ID NO. 94381, or a homolog or fragment thereof, or if the activity of a polypeptide encoded by a nucleic acid molecule comprising the nucleic acid SEQ ID NO. 94380, preferably the coding region thereof, or a homolog or fragment thereof, e.g. derived from Escherichia coli, is increased or generated. For example the activity of a nucleic acid molecule or a polypeptide comprising the nucleic acid, preferably the coding region thereof, or polypeptide or the consensus sequence or the polypeptide motif, as depicted in Table I, II or IV, application No. 9, column 5 or 8 in the respective same line as the nucleic acid molecule SEQ ID NO. 94380 or polypeptide SEQ ID NO. 94381, respectively, or a homolog or a fragment thereof, is increased or generated, or if the activity b3442-protein is increased or generated in a non-human organism, like a microorganism or a plant cell, plant or part thereof, especially with non-targeted localization. For example, an increase of the linolenic acid of at least 1 percent, particularly in a range of 12 to 33-percent is conferred as compared to a corresponding non-transformed wild type non-human organism.

[52941] Accordingly, in one embodiment, an increase of linolenic acid in a non-human organism, as compared to a corresponding non-transformed wild type non-human organism, is conferred in the process of the invention, if the activity of a polypeptide showing the activity of a b3534-protein, or if the activity of the polypeptide B3534, preferably represented by SEQ ID NO. 119182, or a homolog or fragment thereof, or if the activity of a polypeptide encoded by a nucleic acid molecule comprising the nucleic acid SEQ ID NO. 119181, preferably the coding region thereof, or a homolog or fragment thereof, e.g. derived from Escherichia coli, is increased or generated. For example the activity of a nucleic acid molecule or a polypeptide comprising the nucleic acid, preferably the coding region thereof, or polypeptide or the consensus sequence or the polypeptide motif, as depicted in Table I, II or IV, application No. 9, column 5 or 8 in the respective same line as the nucleic acid molecule SEQ ID NO. 119181 or polypeptide SEQ ID NO. 119182, respectively, or a homolog or a fragment thereof, is increased or generated, or if the activity b3534-protein is increased or generated in a non-human organism, like a microorganism or a plant cell, plant or part thereof, especially with plastidic localization. For ex-ample, an increase of the linolenic acid of at least 1 percent, particularly in a range of 12 to 29-percent is conferred as compared to a corresponding non-transformed wild type non-human organism.

[52942] Accordingly, in one embodiment, an increase of linolenic acid in a non-human organism, as compared to a corresponding non-transformed wild type non-human organism, is conferred in the process of the invention, if the activity of a polypeptide showing the activity of a threonine efflux protein, or if the activity of the polypeptide B3823, preferably represented by SEQ ID NO. 10727, or a homolog or fragment thereof, or if the activity of a polypeptide encoded by a nucleic acid molecule comprising the nucleic acid SEQ ID NO. 10726, preferably the coding region thereof, or a homolog or fragment thereof, e.g. derived from Escherichia coli, is increased or generated. For example the activity of a nucleic acid molecule or a polypeptide comprising the nucleic acid, preferably the coding region thereof, or polypeptide or the consensus sequence or the polypeptide motif, as depicted in Table I, II or IV, application No. 9, column 5 or 8 in the respective same line as the nucleic acid molecule SEQ ID NO. 10726 or polypeptide SEQ ID NO. 10727, respectively, or a homolog or a fragment thereof, is increased or generated, or if the activity threonine efflux protein is increased or generated in a non-human organism, like a microorganism or a plant cell, plant or part thereof, especially with non-targeted localization. For example, an increase of the linolenic acid of at least 1 percent, particularly in a range of 11 to 29-percent is conferred as compared to a corresponding non-transformed wild type non-human organism.

[52943] Accordingly, in one embodiment, an increase of linolenic acid in a non-human organism, as compared to a corresponding non-transformed wild type non-human organism, is conferred in the process of the invention, if the activity of a polypeptide showing the activity of a b4023-protein, or if the activity of the polypeptide B4023, preferably represented by SEQ ID NO. 119210, or a homolog or fragment thereof, or if the activity of a polypeptide encoded by a nucleic acid molecule comprising the nucleic acid SEQ ID NO. 119209, preferably the coding region thereof, or a homolog or fragment thereof, e.g. derived from Escherichia coli, is increased or generated. For example the activity of a nucleic acid molecule or a polypeptide comprising the nucleic acid, preferably the coding region thereof, or polypeptide or the consensus sequence or the polypeptide motif, as depicted in Table I, II or IV, application No. 9, column 5 or 8 in the respective same line as the nucleic acid molecule SEQ ID NO. 119209 or polypeptide SEQ ID NO. 119210, respectively, or a homolog or a fragment thereof, is increased or generated, or if the activity b4023-protein is increased or generated in a non-human organism, like a microorganism or a plant cell, plant or part thereof, especially with non-targeted localization. For example, an increase of the linolenic acid of at least 1 percent, particularly in a range of 13 to 24-percent is conferred as compared to a corresponding non-transformed wild type non-human organism.

[52944] Accordingly, in one embodiment, an increase of linolenic acid in a non-human organism, as compared to a corresponding non-transformed wild type non-human organism, is conferred in the process of the invention, if the activity of a polypeptide showing the activity of a glutaredoxin, or if the activity of the polypeptide GM02LC12622, preferably represented by SEQ ID NO. 10812, or a homolog or fragment thereof, or if the activity of a polypeptide encoded by a nucleic acid molecule comprising the nucleic acid SEQ ID NO. 10811, preferably the coding region thereof, or a homolog or fragment thereof, e.g. derived from Glycine max, is increased or generated. For example the activity of a nucleic acid molecule or a polypeptide comprising the nucleic acid, preferably the coding region thereof, or polypeptide or the consensus sequence or the polypeptide motif, as depicted in Table I, II or IV, application No. 9, column 5 or 8 in the respective same line as the nucleic acid molecule SEQ ID NO. 10811 or polypeptide SEQ ID NO. 10812, respectively, or a homolog or a fragment thereof, is increased or generated, or if the activity glutaredoxin is increased or generated in a non-human organism, like a microorganism or a plant cell, plant or part thereof, especially with non-targeted localization. For example, an increase of the linolenic acid of at least 1 percent, particularly in a range of 13 to 42-percent is conferred as compared to a corresponding non-transformed wild type non-human organism.

[52945] Accordingly, in one embodiment, an increase of linolenic acid in a non-human organism, as compared to a corresponding non-transformed wild type non-human organism, is conferred in the process of the invention, if the activity of a polypeptide showing the activity of a transcription factor, or if the activity of the polypeptide GM02LC19289, preferably represented by SEQ ID NO. 46752, or a homolog or fragment thereof, or if the activity of a polypeptide encoded by a nucleic acid molecule comprising the nucleic acid SEQ ID NO. 46751, preferably the coding region thereof, or a homolog or fragment thereof, e.g. derived from Glycine max, is increased or generated. For example the activity of a nucleic acid molecule or a polypeptide comprising the nucleic acid, preferably the coding region thereof, or polypeptide or the consensus sequence or the polypeptide motif, as depicted in Table I, II or IV, application No. 9, column 5 or 8 in the respective same line as the nucleic acid molecule SEQ ID NO. 46751 or polypeptide SEQ ID NO. 46752, respectively, or a homolog or a fragment thereof, is increased or generated, or if the activity transcription factor is increased or generated in a non-human organism, like a microorganism or a plant cell, plant or part thereof, especially with non-targeted localization. For example, an increase of the linolenic acid of at least 1 percent, particularly in a range of 16 to 89-percent is conferred as compared to a corresponding non-transformed wild type non-human organism.

[52946] Accordingly, in one embodiment, an increase of linolenic acid in a non-human organism, as compared to a corresponding non-transformed wild type non-human organism, is conferred in the process of the invention, if the activity of a polypeptide showing the activity of a branched chain amino acid ABC transporter ATP-binding protein, or if the activity of the polypeptide Sll0374, preferably represented by SEQ ID NO. 94742, or a homolog or fragment thereof, or if the activity of a polypeptide encoded by a nucleic acid molecule comprising the nucleic acid SEQ ID NO. 94741, preferably the coding region thereof, or a homolog or fragment thereof, e.g. derived from Synechocystis sp., is increased or generated. For example the activity of a nucleic acid molecule or a polypeptide comprising the nucleic acid, preferably the coding region thereof, or polypeptide or the consensus sequence or the polypeptide motif, as depicted in Table 1, 11 or IV, application No. 9, column 5 or 8 in the respective same line as the nucleic acid molecule SEQ ID NO. 94741 or polypeptide SEQ ID NO. 94742, respectively, or a homolog or a fragment thereof, is increased or generated, or if the activity branched chain amino acid ABC transporter ATP-binding protein is increased or generated in a non-human organism, like a microorganism or a plant cell, plant or part thereof, especially with plastidic localization. For example, an increase of the linolenic acid of at least 1 percent, particularly in a range of 15 to 18-percent is conferred as compared to a corresponding non-transformed wild type non-human organism.

[52947] Accordingly, in one embodiment, an increase of linolenic acid in a non-human organism, as compared to a corresponding non-transformed wild type non-human organism, is conferred in the process of the invention, if the activity of a polypeptide showing the activity of a phosphofructokinase, or if the activity of the polypeptide Sll0745, preferably represented by SEQ ID NO. 112662, or a homolog or fragment thereof, or if the activity of a polypeptide encoded by a nucleic acid molecule comprising the nucleic acid SEQ ID NO. 112661, preferably the coding region thereof, or a homolog or fragment thereof, e.g. derived from Synechocystis sp., is increased or generated. For example the activity of a nucleic acid molecule or a polypeptide comprising the nucleic acid, preferably the coding region thereof, or polypeptide or the consensus sequence or the polypeptide motif, as depicted in Table I, II or IV, application No. 9, column 5 or 8 in the respective same line as the nucleic acid molecule SEQ ID NO. 112661 or polypeptide SEQ ID NO. 112662, respectively, or a homolog or a fragment thereof, is increased or generated, or if the activity phosphofructokinase is increased or generated in a non-human organism, like a microorganism or a plant cell, plant or part thereof, especially with mitochondrial localization. For example, an increase of the linolenic acid of at least 1 percent, particularly in a range of 13 to 29-percent is conferred as compared to a corresponding non-transformed wild type non-human organism.

[52948] Accordingly, in one embodiment, an increase of linolenic acid in a non-human organism, as compared to a corresponding non-transformed wild type non-human organism, is conferred in the process of the invention, if the activity of a polypeptide showing the activity of a carbon dioxide concentrating mechanism protein, or if the activity of the polypeptide Sll1031, preferably represented by SEQ ID NO. 52635, or a homolog or fragment thereof, or if the activity of a polypeptide encoded by a nucleic acid molecule comprising the nucleic acid SEQ ID NO. 52634, preferably the coding region thereof, or a homolog or fragment thereof, e.g. derived from Synechocystis sp., is increased or generated. For example the activity of a nucleic acid molecule or a polypeptide comprising the nucleic acid, preferably the coding region thereof, or polypeptide or the consensus sequence or the polypeptide motif, as depicted in Table 1, 11 or IV, application No. 9, column 5 or 8 in the respective same line as the nucleic acid molecule SEQ ID NO. 52634 or polypeptide SEQ ID NO. 52635, respectively, or a homolog or a fragment thereof, is increased or generated, or if the activity carbon dioxide concentrating mechanism protein is increased or generated in a non-human organism, like a microorganism or a plant cell, plant or part thereof, especially with mitochondrial localization. For example, an increase of the linolenic acid of at least 1 percent, particularly in a range of 12 to 46-percent is conferred as compared to a corresponding non-transformed wild type non-human organism.

[52949] Accordingly, in one embodiment, an increase of linolenic acid in a non-human organism, as compared to a corresponding non-transformed wild type non-human organism, is conferred in the process of the invention, if the activity of a polypeptide showing the activity of a sll1032-protein, or if the activity of the polypeptide Sll1032, preferably represented by SEQ ID NO. 85724, or a homolog or fragment thereof, or if the activity of a polypeptide encoded by a nucleic acid molecule comprising the nucleic acid SEQ ID NO. 85723, preferably the coding region thereof, or a homolog or fragment thereof, e.g. derived from Synechocystis sp., is increased or generated. For example the activity of a nucleic acid molecule or a polypeptide comprising the nucleic acid, preferably the coding region thereof, or polypeptide or the consensus sequence or the polypeptide motif, as depicted in Table I, 11 or IV, application No. 9, column 5 or 8 in the respective same line as the nucleic acid molecule SEQ ID NO. 85723 or polypeptide SEQ ID NO. 85724, respectively, or a homolog or a fragment thereof, is increased or generated, or if the activity sll1032-protein is increased or generated in a non-human organism, like a microorganism or a plant cell, plant or part thereof, especially with mitochondrial localization. For example, an increase of the linolenic acid of at least 1 percent, particularly in a range of 12 to 30-percent is conferred as compared to a corresponding non-transformed wild type non-human organism.

[52950] Accordingly, in one embodiment, an increase of linolenic acid in a non-human organism, as compared to a corresponding non-transformed wild type non-human organism, is conferred in the process of the invention, if the activity of a polypeptide showing the activity of a CTP synthetase, or if the activity of the poylpeptide Sll1443, preferably represented by SEQ ID NO. 53879, or a homolog or fragment thereof, or if the activity of a polypeptide encoded by a nucleic acid molecule comprising the nucleic acid SEQ ID NO. 53878, preferably the coding region thereof, or a homolog or fragment thereof, e.g. derived from Synechocystis sp., is increased or generated. For example the activity of a nucleic acid molecule or a polypeptide comprising the nucleic acid, preferably the coding region thereof, or polypeptide or the consensus sequence or the polypeptide motif, as depicted in Table I, II or IV, application No. 9, column 5 or 8 in the respective same line as the nucleic acid molecule SEQ ID NO. 53878 or polypeptide SEQ ID NO. 53879, respectively, or a homolog or a fragment thereof, is increased or generated, or if the activity CTP synthetase is increased or generated in a non-human organism, like a microorganism or a plant cell, plant or part thereof, especially with mitochondrial localization. For example, an increase of the linolenic acid of at least 1 percent, particularly in a range of 14 to 33-percent is conferred as compared to a corresponding non-transformed wild type non-human organism.

[52951] Accordingly, in one embodiment, an increase of linolenic acid in a non-human organism, as compared to a corresponding non-transformed wild type non-human organism, is conferred in the process of the invention, if the activity of a polypeptide showing the activity of a carbamoylphosphate synthase subunit, or if the activity of the polypeptide Sll1498, preferably represented by SEQ ID NO. 95048, or a homolog or fragment thereof, or if the activity of a polypeptide encoded by a nucleic acid molecule comprising the nucleic acid SEQ ID NO. 95047, preferably the coding region thereof, or a homolog or fragment thereof, e.g. derived from Synechocystis sp., is increased or generated. For example the activity of a nucleic acid molecule or a polypeptide comprising the nucleic acid, preferably the coding region thereof, or polypeptide or the consensus sequence or the polypeptide motif, as depicted in Table I, 11 or IV, application No. 9, column 5 or 8 in the respective same line as the nucleic acid molecule SEQ ID NO. 95047 or polypeptide SEQ ID NO. 95048, respectively, or a homolog or a fragment thereof, is increased or generated, or if the activity carbamoyl-phosphate synthase subunit is increased or generated in a non-human organism, like a microorganism or a plant cell, plant or part thereof, especially with non-targeted localization. For example, an increase of the linolenic acid of at least 1 percent, particularly in a range of 14 to 30-percent is conferred as compared to a corresponding non-transformed wild type non-human organism.

[52952] Accordingly, in one embodiment, an increase of linolenic acid in a non-human organism, as compared to a corresponding non-transformed wild type non-human organism, is conferred in the process of the invention, if the activity of a polypeptide showing the activity of a acyl transferase, or if the activity of the polypeptide Sll1848, preferably represented by SEQ ID NO. 86448, or a homolog or fragment thereof, or if the activity of a polypeptide encoded by a nucleic acid molecule comprising the nucleic acid SEQ ID NO. 86447, preferably the coding region thereof, or a homolog or fragment thereof, e.g. derived from Synechocystis sp., is increased or generated. For example the activity of a nucleic acid molecule or a polypeptide comprising the nucleic acid, preferably the coding region thereof, or polypeptide or the consensus sequence or the polypeptide motif, as depicted in Table I, II or IV, application No. 9, column 5 or 8 in the respective same line as the nucleic acid molecule SEQ ID NO. 86447 or polypeptide SEQ ID NO. 86448, respectively, or a homolog or a fragment thereof, is increased or generated, or if the activity acyl transferase is increased or generated in a non-human organism, like a microorganism or a plant cell, plant or part thereof, especially with plastidic localization. For example, an increase of the linolenic acid of at least 1 percent, particularly in a range of 17 to 23-percent is conferred as compared to a corresponding non-transformed wild type non-human organism.

[52953] Accordingly, in one embodiment, an increase of linolenic acid in a non-human organism, as compared to a corresponding non-transformed wild type non-human organism, is conferred in the process of the invention, if the activity of a polypeptide showing the activity of a coproporphyrinogen III oxidase, or if the activity of the poylpeptide Sll1917, preferably represented by SEQ ID NO. 11472, or a homolog or fragment thereof, or if the activity of a polypeptide encoded by a nucleic acid molecule comprising the nucleic acid SEQ ID NO. 11471, preferably the coding region thereof, or a homolog or fragment thereof, e.g. derived from Synechocystis sp., is increased or generated. For example the activity of a nucleic acid molecule or a polypeptide comprising the nucleic acid, preferably the coding region thereof, or polypeptide or the consensus sequence or the polypeptide motif, as depicted in Table I, 11 or IV, application No. 9, column 5 or 8 in the respective same line as the nucleic acid molecule SEQ ID NO. 11471 or polypeptide SEQ ID NO. 11472, respectively, or a homolog or a fragment thereof, is increased or generated, or if the activity coproporphyrinogen III oxidase is increased or generated in a non-human organism, like a microorganism or a plant cell, plant or part thereof, especially with mitochondrial localization. For example, an increase of the linolenic acid of at least 1 percent, particularly in a range of 12 to 24-percent is conferred as compared to a corresponding non-transformed wild type non-human organism.

[52954] Accordingly, in one embodiment, an increase of linolenic acid in a non-human organism, as compared to a corresponding non-transformed wild type non-human organism, is conferred in the process of the invention, if the activity of a polypeptide showing the activity of a cation-transporting ATPase, or if the activity of the polypeptide Sll1920, preferably represented by SEQ ID NO. 55386, or a homolog or fragment thereof, or if the activity of a polypeptide encoded by a nucleic acid molecule comprising the nucleic acid SEQ ID NO. 55385, preferably the coding region thereof, or a homolog or fragment thereof, e.g. derived from Synechocystis sp., is increased or generated. For example the activity of a nucleic acid molecule or a polypeptide comprising the nucleic acid, preferably the coding region thereof, or polypeptide or the consensus sequence or the polypeptide motif, as depicted in Table 1, 11 or IV, application No. 9, column 5 or 8 in the respective same line as the nucleic acid molecule SEQ ID NO. 55385 or polypeptide SEQ ID NO. 55386, respectively, or a homolog or a fragment thereof, is increased or generated, or if the activity cation-transporting ATPase is increased or generated in a non-human organism, like a microorganism or a plant cell, plant or part thereof, especially with mitochondrial localization. For example, an increase of the linolenic acid of at least 1 percent, particularly in a range of 14 to 34-percent is conferred as compared to a corresponding non-transformed wild type non-human organism.

[52955] Accordingly, in one embodiment, an increase of linolenic acid in a non-human organism, as compared to a corresponding non-transformed wild type non-human organism, is conferred in the process of the invention, if the activity of a polypeptide showing the activity of a oxidoreductase, or if the activity of the polypeptide Slr0338, preferably represented by SEQ ID NO. 11991, or a homolog or fragment thereof, or if the activity of a polypeptide encoded by a nucleic acid molecule comprising the nucleic acid SEQ ID NO. 11990, preferably the coding region thereof, or a homolog or fragment thereof, e.g. derived from Synechocystis sp., is increased or generated. For example the activity of a nucleic acid molecule or a polypeptide comprising the nucleic acid, preferably the coding region thereof, or polypeptide or the consensus sequence or the polypeptide motif, as depicted in Table I, II or IV, application No. 9, column 5 or 8 in the respective same line as the nucleic acid molecule SEQ ID NO. 11990 or polypeptide SEQ ID NO. 11991, respectively, or a homolog or a fragment thereof, is increased or generated, or if the activity oxidoreductase is increased or generated in a non-human organism, like a microorganism or a plant cell, plant or part thereof, especially with non-targeted localization. For example, an increase of the linolenic acid of at least 1 percent, particularly in a range of 12 to 25-percent is conferred as compared to a corresponding non-transformed wild type non-human organism.

[52956] Accordingly, in one embodiment, an increase of linolenic acid in a non-human organism, as compared to a corresponding non-transformed wild type non-human organism, is conferred in the process of the invention, if the activity of a polypeptide showing the activity of a bifunctional purine biosynthesis protein, or if the activity of the polypeptide Slr0597, preferably represented by SEQ ID NO. 56154, or a homolog or fragment thereof, or if the activity of a polypeptide encoded by a nucleic acid molecule comprising the nucleic acid SEQ ID NO. 56153, preferably the coding region thereof, or a homolog or fragment thereof, e.g. derived from Synechocystis sp., is increased or generated. For example the activity of a nucleic acid molecule or a polypeptide comprising the nucleic acid, preferably the coding region thereof, or polypeptide or the consensus sequence or the polypeptide motif, as depicted in Table I, II or IV, application No. 9, column 5 or 8 in the respective same line as the nucleic acid molecule SEQ ID NO. 56153 or polypeptide SEQ ID NO. 56154, respectively, or a homolog or a fragment thereof, is increased or generated, or if the activity bifunctional purine biosynthesis protein is increased or generated in a non-human organism, like a microorganism or a plant cell, plant or part thereof, especially with plastidic localization. For example, an increase of the linolenic acid of at least 1 percent, particularly in a range of 13 to 36-percent is conferred as compared to a corresponding non-transformed wild type non-human organism.

[52957] Accordingly, in one embodiment, an increase of linolenic acid in a non-human organism, as compared to a corresponding non-transformed wild type non-human organism, is conferred in the process of the invention, if the activity of a polypeptide showing the activity of a permease protein of ABC transporter, or if the activity of the polypeptide Slr0949, preferably represented by SEQ ID NO. 119223, or a homolog or fragment thereof, or if the activity of a polypeptide encoded by a nucleic acid molecule comprising the nucleic acid SEQ ID NO. 119222, preferably the coding region thereof, or a homolog or fragment thereof, e.g. derived from Synechocystis sp., is increased or generated. For example the activity of a nucleic acid molecule or a polypeptide comprising the nucleic acid, preferably the coding region thereof, or polypeptide or the con-sensus sequence or the polypeptide motif, as depicted in Table I, II or IV, application No. 9, column 5 or 8 in the respective same line as the nucleic acid molecule SEQ ID NO. 119222 or polypeptide SEQ ID NO. 119223, respectively, or a homolog or a fragment thereof, is increased or generated, or if the activity permease protein of ABC transporter is increased or generated in a non-human organism, like a microorganism or a plant cell, plant or part thereof, especially with mitochondrial localization. For example, an increase of the linolenic acid of at least 1 percent, particularly in a range of 13 to 26-percent is conferred as compared to a corresponding non-transformed wild type non-human organism.

[52958] Accordingly, in one embodiment, an increase of linolenic acid in a non-human organism, as compared to a corresponding non-transformed wild type non-human organism, is conferred in the process of the invention, if the activity of a polypeptide showing the activity of a aromatic acid decarboxylase, or if the activity of the polypeptide Slr1099, preferably represented by SEQ ID NO. 116342, or a homolog or fragment thereof, or if the activity of a polypeptide encoded by a nucleic acid molecule comprising the nucleic acid SEQ ID NO. 116341, preferably the coding region thereof, or a homolog or fragment thereof, e.g. derived from Synechocystis sp., is increased or generated. For example the activity of a nucleic acid molecule or a polypeptide comprising the nucleic acid, preferably the coding region thereof, or polypeptide or the consensus sequence or the polypeptide motif, as depicted in Table I, II or IV, application No. 9, column 5 or 8 in the respective same line as the nucleic acid molecule SEQ ID NO. 116341 or polypeptide SEQ ID NO. 116342, respectively, or a homolog or a fragment thereof, is increased or generated, or if the activity aromatic acid decarboxylase is increased or generated in a non-human organism, like a microorganism or a plant cell, plant or part thereof, especially with mitochondrial localization. For example, an increase of the linolenic acid of at least 1 percent, particularly in a range of 12 to 41-percent is conferred as compared to a corresponding non-transformed wild type non-human organism.

[52959] Accordingly, in one embodiment, an increase of linolenic acid in a non-human organism, as compared to a corresponding non-transformed wild type non-human organism, is conferred in the process of the invention, if the activity of a polypeptide showing the activity of a phosphate import ATP-binding protein, or if the activity of the polypeptide Slr1250, preferably represented by SEQ ID NO. 116461, or a homolog or fragment thereof, or if the activity of a polypeptide encoded by a nucleic acid molecule comprising the nucleic acid SEQ ID NO. 116460, preferably the coding region thereof, or a homolog or fragment thereof, e.g. derived from Synechocystis sp., is increased or generated. For example the activity of a nucleic acid molecule or a polypeptide comprising the nucleic acid, preferably the coding region thereof, or polypeptide or the con-sensus sequence or the polypeptide motif, as depicted in Table I, II or IV, application No. 9, column 5 or 8 in the respective same line as the nucleic acid molecule SEQ ID NO. 116460 or polypeptide SEQ ID NO. 116461, respectively, or a homolog or a fragment thereof, is increased or generated, or if the activity phosphate import ATP-binding protein is increased or generated in a non-human organism, like a microorganism or a plant cell, plant or part thereof, especially with mitochondrial localization. For example, an increase of the linolenic acid of at least 1 percent, particularly in a range of 13 to 26-percent is conferred as compared to a corresponding non-transformed wild type non-human organism.

[52960] Accordingly, in one embodiment, an increase of linolenic acid in a non-human organism, as compared to a corresponding non-transformed wild type non-human organism, is conferred in the process of the invention, if the activity of a polypeptide showing the activity of a arginine decarboxylase, or if the activity of the polypeptide Slr1312, preferably represented by SEQ ID NO. 58325, or a homolog or fragment thereof, or if the activity of a polypeptide encoded by a nucleic acid molecule comprising the nucleic acid SEQ ID NO. 58324, preferably the coding region thereof, or a homolog or fragment thereof, e.g. derived from Synechocystis sp., is increased or generated. For example the activity of a nucleic acid molecule or a polypeptide comprising the nucleic acid, preferably the coding region thereof, or polypeptide or the consensus sequence or the polypeptide motif, as depicted in Table I, II or IV, application No. 9, column 5 or 8 in the respective same line as the nucleic acid molecule SEQ ID NO. 58324 or polypeptide SEQ ID NO. 58325, respectively, or a homolog or a fragment thereof, is increased or generated, or if the activity arginine decarboxylase is increased or generated in a non-human organism, like a microorganism or a plant cell, plant or part thereof, especially with non-targeted localization. For example, an increase of the linolenic acid of at least 1 percent, particularly in a range of 11 to 19-percent is conferred as compared to a corresponding non-transformed wild type non-human organism.

[52961] Accordingly, in one embodiment, an increase of linolenic acid in a non-human organism, as compared to a corresponding non-transformed wild type non-human organism, is conferred in the process of the invention, if the activity of a polypeptide showing the activity of a phosphoadenosine phosphosulfate reductase , or if the activity of the polypeptide Slr1791, preferably represented by SEQ ID NO. 12141, or a homolog or fragment thereof, or if the activity of a polypeptide encoded by a nucleic acid molecule comprising the nucleic acid SEQ ID NO. 12140, preferably the coding region thereof, or a homolog or fragment thereof, e.g. derived from Synechocystis sp., is increased or generated. For example the activity of a nucleic acid molecule or a polypeptide comprising the nucleic acid, preferably the coding region thereof, or polypeptide or the consensus sequence or the polypeptide motif, as depicted in Table I, II or IV, application No. 9, column 5 or 8 in the respective same line as the nucleic acid molecule SEQ ID NO. 12140 or polypeptide SEQ ID NO. 12141, respectively, or a homolog or a fragment thereof, is increased or generated, or if the activity phosphoadenosine phosphosulfate reductase is increased or generated in a non-human organism, like a microorganism or a plant cell, plant or part thereof, especially with mitochondrial localization. For example, an increase of the linolenic acid of at least 1 percent, particularly in a range of 12 to 25-percent is conferred as compared to a corresponding non-transformed wild type non-human organism.

[52962] Accordingly, in one embodiment, an increase of linolenic acid in a non-human organism, as compared to a corresponding non-transformed wild type non-human organism, is conferred in the process of the invention, if the activity of a polypeptide showing the activity of a threonine dehydratase, or if the activity of the polypeptide Slr2072, preferably represented by SEQ ID NO. 12342, or a homolog or fragment thereof, or if the activity of a polypeptide encoded by a nucleic acid molecule comprising the nucleic acid SEQ ID NO. 12341, preferably the coding region thereof, or a homolog or fragment thereof, e.g. derived from Synechocystis sp., is increased or generated. For example the activity of a nucleic acid molecule or a polypeptide comprising the nucleic acid, preferably the coding region thereof, or polypeptide or the consensus sequence or the polypeptide motif, as depicted in Table I, II or IV, application No. 9, column 5 or 8 in the respective same line as the nucleic acid molecule SEQ ID NO. 12341 or polypeptide SEQ ID NO. 12342, respectively, or a homolog or a fragment thereof, is increased or generated, or if the activity threonine dehydratase is increased or generated in a non-human organism, like a microorganism or a plant cell, plant or part thereof, especially with mitochondrial localization. For example, an increase of the linolenic acid of at least 1 percent, particularly in a range of 18 to 43-percent is conferred as compared to a corresponding non-transformed wild type non-human organism.

[52963] Accordingly, in one embodiment, an increase of linolenic acid in a non-human organism, as compared to a corresponding non-transformed wild type non-human organism, is conferred in the process of the invention, if the activity of a polypeptide showing the activity of a metal-dependent hydrolase, or if the activity of the polypeptide TTC0917, preferably represented by SEQ ID NO. 61554, or a homolog or fragment thereof, or if the activity of a polypeptide encoded by a nucleic acid molecule comprising the nucleic acid SEQ ID NO. 61553, preferably the coding region thereof, or a homolog or fragment thereof, e.g. derived from Thermus thermophilus, is increased or generated. For example the activity of a nucleic acid molecule or a polypeptide comprising the nucleic acid, preferably the coding region thereof, or polypeptide or the consen-sus sequence or the polypeptide motif, as depicted in Table I, II or IV, application No. 9, column 5 or 8 in the respective same line as the nucleic acid molecule SEQ ID NO. 61553 or polypeptide SEQ ID NO. 61554, respectively, or a homolog or a fragment thereof, is increased or generated, or if the activity metal-dependent hydrolase is increased or generated in a non-human organism, like a microorganism or a plant cell, plant or part thereof, especially with non-targeted localization. For example, an increase of the linolenic acid of at least 1 percent, particularly in a range of 15 to 105-percent is conferred as compared to a corresponding non-transformed wild type non-human organism.

[52964] Accordingly, in one embodiment, an increase of linolenic acid in a non-human organism, as compared to a corresponding non-transformed wild type non-human organism, is conferred in the process of the invention, if the activity of a polypeptide showing the activity of a TTC1386-protein, or if the activity of the polypeptide TTC1386, preferably represented by SEQ ID NO. 62080, or a homolog or fragment thereof, or if the activity of a polypeptide encoded by a nucleic acid molecule comprising the nucleic acid SEQ ID NO. 62079, preferably the coding region thereof, or a homolog or fragment thereof, e.g. derived from Thermus thermophilus, is increased or generated. For example the activity of a nucleic acid molecule or a polypeptide comprising the nucleic acid, preferably the coding region thereof, or polypeptide or the consensus sequence or the polypeptide motif, as depicted in Table I, II or IV, application No. 9, column 5 or 8 in the respective same line as the nucleic acid molecule SEQ ID NO. 62079 or polypeptide SEQ ID NO. 62080, respectively, or a homolog or a fragment thereof, is increased or generated, or if the activity TTC1386-protein is increased or generated in a non-human organism, like a microorganism or a plant cell, plant or part thereof, especially with non-targeted localization. For example, an increase of the linolenic acid of at least 1 percent, particularly in a range of 16 to 24-percent is conferred as compared to a corresponding non-transformed wild type non-human organism.

[52965] Accordingly, in one embodiment, an increase of linolenic acid in a non-human organism, as compared to a corresponding non-transformed wild type non-human organism, is conferred in the process of the invention, if the activity of a polypeptide showing the activity of a acid phosphatase precursor, or if the activity of the polypeptide Ybr092c, preferably represented by SEQ ID NO. 119348, or a homolog or fragment thereof, or if the activity of a polypeptide encoded by a nucleic acid molecule comprising the nucleic acid SEQ ID NO. 119347, preferably the coding region thereof, or a homolog or fragment thereof, e.g. derived from Saccharomyces cerevisiae, is increased or generated. For example the activity of a nucleic acid molecule or a polypeptide comprising the nucleic acid, preferably the coding region thereof, or polypeptide or the consensus sequence or the polypeptide motif, as depicted in Table I, II or IV, application No. 9, column 5 or 8 in the respective same line as the nucleic acid molecule SEQ ID NO. 119347 or polypeptide SEQ ID NO. 119348, respectively, or a homolog or a fragment thereof, is increased or generated, or if the activity acid phosphatase precursor is increased or generated in a non-human organism, like a microorganism or a plant cell, plant or part thereof, especially with plastidic localization. For example, an increase of the linolenic acid of at least 1 percent, particularly in a range of 12 to 25-percent is conferred as compared to a corresponding non-transformed wild type non-human organism.

[52966] Accordingly, in one embodiment, an increase of linolenic acid in a non-human organism, as compared to a corresponding non-transformed wild type non-human organism, is conferred in the process of the invention, if the activity of a polypeptide showing the activity of a glycerol-3-phosphate dehydrogenase, or if the activity of the polypeptide Ydl022w, preferably represented by SEQ ID NO. 119409, or a homolog or fragment thereof, or if the activity of a polypeptide encoded by a nucleic acid molecule comprising the nucleic acid SEQ ID NO. 119408, preferably the coding region thereof, or a homolog or fragment thereof, e.g. derived from Saccharomyces cerevisiae, is increased or generated. For example the activity of a nucleic acid molecule or a polypeptide comprising the nucleic acid, preferably the coding region thereof, or polypeptide or the consensus sequence or the polypeptide motif, as depicted in Table I, II or IV, application No. 9, column 5 or 8 in the respective same line as the nucleic acid molecule SEQ ID NO. 119408 or polypeptide SEQ ID NO. 119409, respectively, or a homolog or a fragment thereof, is increased or generated, or if the activity glycerol-3-phosphate dehydrogenase is increased or generated in a non-human organism, like a microorganism or a plant cell, plant or part thereof, especially with non-targeted localization. For example, an increase of the linolenic acid of at least 1 percent, particularly in a range of 13 to 34-percent is conferred as compared to a corresponding non-transformed wild type non-human organism.

[52967] Accordingly, in one embodiment, an increase of linolenic acid in a non-human organism, as compared to a corresponding non-transformed wild type non-human organism, is conferred in the process of the invention, if the activity of a polypeptide showing the activity of a cell division control protein, or if the activity of the polypeptide Yd1126c, preferably represented by SEQ ID NO. 120046, or a homolog or fragment thereof, or if the activity of a polypeptide encoded by a nucleic acid molecule comprising the nucleic acid SEQ ID NO. 120045, preferably the coding region thereof, or a homolog or fragment thereof, e.g. derived from Saccharomyces cerevisiae, is increased or generated. For example the activity of a nucleic acid molecule or a polypeptide comprising the nucleic acid, preferably the coding region thereof, or polypeptide or the consensus sequence or the polypeptide motif, as depicted in Table 1, 11 or IV, application No. 9, column 5 or 8 in the respective same line as the nucleic acid molecule SEQ ID NO. 120045 or polypeptide SEQ ID NO. 120046, respectively, or a homolog or a fragment thereof, is increased or generated, or if the activity cell division control protein is increased or generated in a non-human organism, like a microorganism or a plant cell, plant or part thereof, especially with non-targeted localization. For example, an increase of the linolenic acid of at least 1 percent, particularly in a range of 16 to 16-percent is conferred as compared to a corresponding non-transformed wild type non-human organism.

[52968] Accordingly, in one embodiment, an increase of linolenic acid in a non-human organism, as compared to a corresponding non-transformed wild type non-human organism, is conferred in the process of the invention, if the activity of a polypeptide showing the activity of a branched-chain amino acid permease, or if the activity of the polypeptide Ydr046c, preferably represented by SEQ ID NO. 63545, or a homolog or fragment thereof, or if the activity of a polypeptide encoded by a nucleic acid molecule comprising the nucleic acid SEQ ID NO. 63544, preferably the coding region thereof, or a homolog or fragment thereof, e.g. derived from Saccharomyces cerevisiae, is increased or generated. For example the activity of a nucleic acid molecule or a polypeptide comprising the nucleic acid, preferably the coding region thereof, or polypeptide or the consensus sequence or the polypeptide motif, as depicted in Table I, II or IV, application No. 9, column 5 or 8 in the respective same line as the nucleic acid molecule SEQ ID NO. 63544 or polypeptide SEQ ID NO. 63545, respectively, or a homolog or a fragment thereof, is increased or generated, or if the activity branched-chain amino acid permease is increased or generated in a non-human organism, like a microorganism or a plant cell, plant or part thereof, especially with plastidic localization. For example, an increase of the linolenic acid of at least 1 percent, particularly in a range of 17 to 22-percent is conferred as compared to a corresponding non-transformed wild type non-human organism.

[52969] Accordingly, in one embodiment, an increase of linolenic acid in a non-human organism, as compared to a corresponding non-transformed wild type non-human organism, is conferred in the process of the invention, if the activity of a polypeptide showing the activity of a F-box protein, or if the activity of the polypeptide Ydr131c, preferably represented by SEQ ID NO. 14707, or a homolog or fragment thereof, or if the activity of a polypeptide encoded by a nucleic acid molecule comprising the nucleic acid SEQ ID NO. 14706, preferably the coding region thereof, or a homolog or fragment thereof, e.g. derived from Saccharomyces cerevisiae, is increased or generated. For example the activity of a nucleic acid molecule or a polypeptide comprising the nucleic acid, preferably the coding region thereof, or polypeptide or the consensus sequence or the polypeptide motif, as depicted in Table I, II or IV, application No. 9, column 5 or 8 in the respective same line as the nucleic acid molecule SEQ ID NO. 14706 or polypeptide SEQ ID NO. 14707, respectively, or a homolog or a fragment thereof, is increased or generated, or if the activity F-box protein is increased or generated in a non-human organism, like a microorganism or a plant cell, plant or part thereof, especially with plastidic localization. For example, an increase of the linolenic acid of at least 1 percent, particularly in a range of 19 to 38-percent is conferred as compared to a corresponding non-transformed wild type non-human organism.

[52970] Accordingly, in one embodiment, an increase of linolenic acid in a non-human organism, as compared to a corresponding non-transformed wild type non-human organism, is conferred in the process of the invention, if the activity of a polypeptide showing the activity of a ydr339c-protein, or if the activity of the polypeptide Ydr339c, preferably represented by SEQ ID NO. 120242, or a homolog or fragment thereof, or if the activity of a polypeptide encoded by a nucleic acid molecule comprising the nucleic acid SEQ ID NO. 120241, preferably the coding region thereof, or a homolog or fragment thereof, e.g. derived from Saccharomyces cerevisiae, is increased or generated. For example the activity of a nucleic acid molecule or a polypeptide comprising the nucleic acid, preferably the coding region thereof, or polypeptide or the consensus sequence or the polypeptide motif, as depicted in Table I, II or IV, application No. 9, column 5 or 8 in the respective same line as the nucleic acid molecule SEQ ID NO. 120241 or polypeptide SEQ ID NO. 120242, respectively, or a homolog or a fragment thereof, is increased or generated, or if the activity ydr339c-protein is increased or generated in a non-human organism, like a microorganism or a plant cell, plant or part thereof, especially with plastidic localization. For example, an increase of the linolenic acid of at least 1 percent, particularly in a range of 15 to 18-percent is conferred as compared to a corresponding non-transformed wild type non-human organism.

[52971] Accordingly, in one embodiment, an increase of linolenic acid in a non-human organism, as compared to a corresponding non-transformed wild type non-human organism, is conferred in the process of the invention, if the activity of a polypeptide showing the activity of a ydr507c-protein, or if the activity of the polypeptide Ydr507c, preferably represented by SEQ ID NO. 90166, or a homolog or fragment thereof, or if the activity of a polypeptide encoded by a nucleic acid molecule comprising the nucleic acid SEQ ID NO. 90165, preferably the coding region thereof, or a homolog or fragment thereof, e.g. derived from Saccharomyces cerevisiae, is increased or generated. For example the activity of a nucleic acid molecule or a polypeptide comprising the nucleic acid, preferably the coding region thereof, or polypeptide or the consensus sequence or the polypeptide motif, as depicted in Table I, II or IV, application No. 9, column 5 or 8 in the respective same line as the nucleic acid molecule SEQ ID NO. 90165 or polypeptide SEQ ID NO. 90166, respectively, or a homolog or a fragment thereof, is increased or generated, or if the activity ydr507c-protein is increased or generated in a non-human organism, like a microorganism or a plant cell, plant or part thereof, especially with non-targeted localization. For example, an increase of the linolenic acid of at least 1 percent, particularly in a range of 11 to 45-percent is conferred as compared to a corresponding non-transformed wild type non-human organism.

[52972] Accordingly, in one embodiment, an increase of linolenic acid in a non-human organism, as compared to a corresponding non-transformed wild type non-human organism, is conferred in the process of the invention, if the activity of a polypeptide showing the activity of a dihydroxyacetone kinase, or if the activity of the polypeptide Yf1053w, preferably represented by SEQ ID NO. 120310, or a homolog or fragment thereof, or if the activity of a polypeptide encoded by a nucleic acid molecule comprising the nucleic acid SEQ ID NO. 120309, preferably the coding region thereof, or a homolog or fragment thereof, e.g. derived from Saccharomyces cerevisiae, is increased or generated. For example the activity of a nucleic acid molecule or a polypeptide comprising the nucleic acid, preferably the coding region thereof, or polypeptide or the consensus sequence or the polypeptide motif, as depicted in Table I, II or IV, application No. 9, column 5 or 8 in the respective same line as the nucleic acid molecule SEQ ID NO. 120309 or polypeptide SEQ ID NO. 120310, respectively, or a homolog or a fragment thereof, is increased or generated, or if the activity dihydroxyacetone kinase is increased or generated in a non-human organism, like a microorganism or a plant cell, plant or part thereof, especially with non-targeted localization. For example, an increase of the linolenic acid of at least 1 percent, particularly in a range of 11 to 41-percent is conferred as compared to a corresponding non-transformed wild type non-human organism.

[52973] Accordingly, in one embodiment, an increase of linolenic acid in a non-human organism, as compared to a corresponding non-transformed wild type non-human organism, is conferred in the process of the invention, if the activity of a polypeptide showing the activity of a oxidoreductase, or if the activity of the polypeptide Ygl039w, preferably represented by SEQ ID NO. 120437, or a homolog or fragment thereof, or if the activity of a polypeptide encoded by a nucleic acid molecule comprising the nucleic acid SEQ ID NO. 120436, preferably the coding region thereof, or a homolog or fragment thereof, e.g. derived from Saccharomyces cerevisiae, is increased or generated. For example the activity of a nucleic acid molecule or a polypeptide comprising the nucleic acid, preferably the coding region thereof, or polypeptide or the consensus sequence or the polypeptide motif, as depicted in Table I, 11 or IV, application No. 9, column 5 or 8 in the respective same line as the nucleic acid molecule SEQ ID NO. 120436 or polypeptide SEQ ID NO. 120437, respectively, or a homolog or a fragment thereof, is increased or generated, or if the activity oxidoreductase is increased or generated in a non-human organism, like a microorganism or a plant cell, plant or part thereof, especially with plastidic localization. For example, an increase of the linolenic acid of at least 1 percent, particularly in a range of 17 to 26-percent is conferred as compared to a corresponding non-transformed wild type non-human organism.

[52974] Accordingly, in one embodiment, an increase of linolenic acid in a non-human organism, as compared to a corresponding non-transformed wild type non-human organism, is conferred in the process of the invention, if the activity of a polypeptide showing the activity of a DnaJ-like chaperone, or if the activity of the polypeptide Yj1073w, preferably represented by SEQ ID NO. 64965, or a homolog or fragment thereof, or if the activity of a polypeptide encoded by a nucleic acid molecule comprising the nucleic acid SEQ ID NO. 64964, preferably the coding region thereof, or a homolog or fragment thereof, e.g. derived from Saccharomyces cerevisiae, is increased or generated. For example the activity of a nucleic acid molecule or a polypeptide comprising the nucleic acid, preferably the coding region thereof, or polypeptide or the consensus sequence or the polypeptide motif, as depicted in Table I, II or IV, application No. 9, column 5 or 8 in the respective same line as the nucleic acid molecule SEQ ID NO. 64964 or polypeptide SEQ ID NO. 64965, respectively, or a homolog or a fragment thereof, is increased or generated, or if the activity DnaJ-like chaperone is increased or generated in a non-human organism, like a microorganism or a plant cell, plant or part thereof, especially with plastidic localization. For example, an increase of the linolenic acid of at least 1 percent, particularly in a range of 15 to 27-percent is conferred as compared to a corresponding non-transformed wild type non-human organism.

[52975] Accordingly, in one embodiment, an increase of linolenic acid in a non-human organism, as compared to a corresponding non-transformed wild type non-human organism, is conferred in the process of the invention, if the activity of a polypeptide showing the activity of a ymr013c-protein, or if the activity of the polypeptide Ymr013c, preferably represented by SEQ ID NO. 91959, or a homolog or fragment thereof, or if the activity of a polypeptide encoded by a nucleic acid molecule comprising the nucleic acid SEQ ID NO. 91958, preferably the coding region thereof, or a homolog or fragment thereof, e.g. derived from Saccharomyces cerevisiae, is increased or generated. For example the activity of a nucleic acid molecule or a polypeptide comprising the nucleic acid, preferably the coding region thereof, or polypeptide or the consensus sequence or the polypeptide motif, as depicted in Table I, II or IV, application No. 9, column 5 or 8 in the respective same line as the nucleic acid molecule SEQ ID NO. 91958 or polypeptide SEQ ID NO. 91959, respectively, or a homolog or a fragment thereof, is increased or generated, or if the activity ymr013c-protein is increased or generated in a non-human organism, like a microorganism or a plant cell, plant or part thereof, especially with plastidic localization. For example, an increase of the linolenic acid of at least 1 percent, particularly in a range of 13 to 17-percent is conferred as compared to a corresponding non-transformed wild type non-human organism.

[52976] Accordingly, in one embodiment, an increase of linolenic acid in a non-human organism, as compared to a corresponding non-transformed wild type non-human organism, is conferred in the process of the invention, if the activity of a polypeptide showing the activity of a molecular chaperone, or if the activity of the polypeptide Ynl064c, preferably represented by SEQ ID NO. 117496, or a homolog or fragment thereof, or if the activity of a polypeptide encoded by a nucleic acid molecule comprising the nucleic acid SEQ ID NO. 117495, preferably the coding region thereof, or a homolog or fragment thereof, e.g. derived from Saccharomyces cerevisiae, is increased or generated. For example the activity of a nucleic acid molecule or a polypeptide comprising the nucleic acid, preferably the coding region thereof, or polypeptide or the consensus sequence or the polypeptide motif, as depicted in Table I, II or IV, application No. 9, column 5 or 8 in the respective same line as the nucleic acid molecule SEQ ID NO. 117495 or polypeptide SEQ ID NO. 117496, respectively, or a homolog or a fragment thereof, is increased or generated, or if the activity molecular chaperone is increased or generated in a non-human organism, like a microorganism or a plant cell, plant or part thereof, especially with non-targeted localization. For example, an increase of the linolenic acid of at least 1 percent, particularly in a range of 13 to 24-percent is conferred as compared to a corresponding non-transformed wild type non-human organism.

[52977] Accordingly, in one embodiment, an increase of linolenic acid in a non-human organism, as compared to a corresponding non-transformed wild type non-human organism, is conferred in the process of the invention, if the activity of a polypeptide showing the activity of a ATPase epsilon subunit, or if the activity of the polypeptide Ypl271w, preferably represented by SEQ ID NO. 118213, or a homolog or fragment thereof, or if the activity of a polypeptide encoded by a nucleic acid molecule comprising the nucleic acid SEQ ID NO. 118212, preferably the coding region thereof, or a homolog or fragment thereof, e.g. derived from Saccharomyces cerevisiae, is increased or generated. For example the activity of a nucleic acid molecule or a polypeptide comprising the nucleic acid, preferably the coding region thereof, or polypeptide or the consensus sequence or the polypeptide motif, as depicted in Table I, II or IV, application No. 9, column 5 or 8 in the respective same line as the nucleic acid molecule SEQ ID NO. 118212 or polypeptide SEQ ID NO. 118213, respectively, or a homolog or a fragment thereof, is increased or generated, or if the activity ATPase epsilon subunit is increased or generated in a non-human organism, like a microorganism or a plant cell, plant or part thereof, especially with plastidic localization. For example, an increase of the linolenic acid of at least 1 percent, particularly in a range of 13 to 27-percent is conferred as compared to a corresponding non-transformed wild type non-human organism.

[52978] Accordingly, in one embodiment, an increase of linolenic acid in a non-human organism, as compared to a corresponding non-transformed wild type non-human organism, is conferred in the process of the invention, if the activity of a polypeptide showing the activity of a glucose-6-phosphate 1-dehydrogenase, or if the activity of the polypeptide 59582753_SOYBEAN, preferably represented by SEQ ID NO. 16884, or a homolog or fragment thereof, or if the activity of a polypeptide encoded by a nucleic acid molecule comprising the nucleic acid SEQ ID NO. 16883, preferably the coding region thereof, or a homolog or fragment thereof, e.g. derived from Glycine max, is increased or generated. For example the activity of a nucleic acid molecule or a polypeptide comprising the nucleic acid, preferably the coding region thereof, or polypeptide or the consensus sequence or the polypeptide motif, as depicted in Table I, II or IV, application No. 9, column 5 or 8 in the respective same line as the nucleic acid molecule SEQ ID NO. 16883 or polypeptide SEQ ID NO. 16884, respectively, or a homolog or a fragment thereof, is increased or generated, or if the activity glucose-6-phosphate 1-dehydrogenase is increased or generated in a non-human organism, like a microorganism or a plant cell, plant or part thereof, especially with plastidic localization. For example, an increase of the linolenic acid of at least 1 percent, particularly in a range of 12 to 54-percent is conferred as compared to a corresponding non-transformed wild type non-human organism.

[52979] [0096.1.8.9] to [0103.1.8.9] for the disclosure of these paragraphs see [0096.1.8.8] to [0103.1.8.8] above.

[52980] In this paragraph “A” means “Goffeau et al., Science 274 (5287), 546 (1996)”, “B” means “Blattner et al., Science 277 (5331), 1453 (1997)”, “C” means “Nakamura et al., Nucleic Acids Res. 28(1), 72 (2000)”, “D” means “deposition of the sequences to the EMBL/GenBank/DDBJ databases under “Sequencing of the draft genome assembly of Azotobacter vinelandii AvOP”. in June 2005 by Copeland et al.”, “E” means “Henne et al., Nat. Biotechnol. 22 (5), 547 (2004)”, “F” means “Kaul et al., Nature 408 (6814), 796 (2000)”, and “G” means “Matsumoto et al., Nature 436 (7052), 793 (2005)”.

[52981] The nucleic acid sequence of At1g07430 from Arabidopsis thaliana, e.g. as shown in the respective line in column 5 of Table I, application no. 9, has been published in F. And the activity of the gene product thereof is the activity of protein phosphatase.

[52982] Accordingly, in one embodiment, the process of the present invention for producing linolenic acid in a non-human organism, like a microorganism or a plant or a part thereof, comprises increasing or generating the activity of a gene product with the activity of a gene product conferring the activity of “protein phosphatase”, especially from Arabidopsis thaliana or its functional equivalent or its homolog, e.g. the increase of
[52983] (a) a gene product of a gene comprising the nucleic acid molecule as shown in the respective line in column 5 of Table I, application no. 9, preferably the coding region thereof, or a homolog or a fragment thereof, and being depicted in the same respective line as said At1g07430, or a functional equivalent or a homolog thereof as shown in column 8 of Table I, application no. 9, preferably the coding region thereof, particularly a homolog or functional equivalent as shown in column 8 of Table I B, application no. 9, and being depicted in the same respective line as said At1g07430, and preferably the activity is increased non-targeted, or
[52984] (b) a polypeptide comprising a polypeptide, a consensus sequence or at least a polypeptide motif as shown in the respective line in column 5 of Table II or in column 8 of Table IV, application no. 9, respectively, and being depicted in the same respective line as said At1g07430, or a functional equivalent or a homolog thereof as depicted in column 8 of Table II, application no. 9, preferably a homolog or functional equivalent as depicted in column 8 of Table II B, application no. 9, and being depicted in the same respective line as said At1g07430, and preferably the activity is increased non-targeted.

[52985] Accordingly, in one embodiment, the molecule which activity is to be increased in the process of the invention is the gene product with an activity as a “protein phosphatase”, preferably it is the molecule of section (a) or (b) of this paragraph.

[52986] In particular, it was observed that in plants, especially in Arabidopsis thaliana, increasing or generating the activity of a gene product non-targeted with the activity of a “protein phos-phatase”, preferably being encoded by a gene comprising the nucleic acid sequence SEQ ID NO. 17451, preferably the coding region thereof, conferred the production of or the increase in linolenic acid compared with the wild type control.

[52987] The nucleic acid sequence of At1g68320 from Arabidopsis thaliana, e.g. as shown in the respective line in column 5 of Table I, application no. 9, has been published in F. And the activity of the gene product thereof is the activity of transcription factor.

[52988] Accordingly, in one embodiment, the process of the present invention for producing linolenic acid in a non-human organism, like a microorganism or a plant or a part thereof, comprises increasing or generating the activity of a gene product with the activity of a gene product conferring the activity of “transcription factor”, especially from Arabidopsis thaliana or its functional equivalent or its homolog, e.g. the increase of
[52989] (a) a gene product of a gene comprising the nucleic acid molecule as shown in the respective line in column 5 of Table I, application no. 9, preferably the coding region thereof, or a homolog or a fragment thereof, and being depicted in the same respective line as said At1g68320, or a functional equivalent or a homolog thereof as shown in column 8 of Table I, application no. 9, preferably the coding region thereof, particularly a homolog or functional equivalent as shown in column 8 of Table I B, application no. 9, and being depicted in the same respective line as said At1g68320, and preferably the activity is increased non-targeted, or
[52990] (b) a polypeptide comprising a polypeptide, a consensus sequence or at least a polypeptide motif as shown in the respective line in column 5 of Table II or in column 8 of Table IV, application no. 9, respectively, and being depicted in the same respective line as said At1g68320, or a functional equivalent or a homolog thereof as depicted in column 8 of Table II, application no. 9, preferably a homolog or functional equivalent as depicted in column 8 of Table II B, application no. 9, and being depicted in the same respective line as said At1g68320, and preferably the activity is increased non-targeted.

[52991] Accordingly, in one embodiment, the molecule which activity is to be increased in the process of the invention is the gene product with an activity as a “transcription factor”, preferably it is the molecule of section (a) or (b) of this paragraph.

[52992] In particular, it was observed that in plants, especially in Arabidopsis thaliana, increasing or generating the activity of a gene product non-targeted with the activity of a “transcription factor”, preferably being encoded by a gene comprising the nucleic acid sequence SEQ ID NO. 1061, preferably the coding region thereof, conferred the production of or the increase in linolenic acid compared with the wild type control.

[52993] The nucleic acid sequence of At1g72770 from Arabidopsis thaliana, e.g. as shown in the respective line in column 5 of Table I, application no. 9, has been published in F. And the activity of the gene product thereof is the activity of protein phosphatase.

[52994] Accordingly, in one embodiment, the process of the present invention for producing linolenic acid in a non-human organism, like a microorganism or a plant or a part thereof, comprises increasing or generating the activity of a gene product with the activity of a gene product conferring the activity of “protein phosphatase”, especially from Arabidopsis thaliana or its functional equivalent or its homolog, e.g. the increase of
[52995] (a) a gene product of a gene comprising the nucleic acid molecule as shown in the respective line in column 5 of Table I, application no. 9, preferably the coding region thereof, or a homolog or a fragment thereof, and being depicted in the same respective line as said At1g72770, or a functional equivalent or a homolog thereof as shown in column 8 of Table I, application no. 9, preferably the coding region thereof, particularly a homolog or functional equivalent as shown in column 8 of Table I B, application no. 9, and being depicted in the same respective line as said At1g72770, and preferably the activity is increased non-targeted, or
[52996] (b) a polypeptide comprising a polypeptide, a consensus sequence or at least a polypeptide motif as shown in the respective line in column 5 of Table II or in column 8 of Table IV, application no. 9, respectively, and being depicted in the same respective line as said At1g72770, or a functional equivalent or a homolog thereof as depicted in column 8 of Table II, application no. 9, preferably a homolog or functional equivalent as depicted in column 8 of Table II B, application no. 9, and being depicted in the same respective line as said At1g72770, and preferably the activity is increased non-targeted.

[52997] Accordingly, in one embodiment, the molecule which activity is to be increased in the process of the invention is the gene product with an activity as a “protein phosphatase”, preferably it is the molecule of section (a) or (b) of this paragraph.

[52998] In particular, it was observed that in plants, especially in Arabidopsis thaliana, increasing or generating the activity of a gene product non-targeted with the activity of a “protein phosphatase”, preferably being encoded by a gene comprising the nucleic acid sequence SEQ ID NO. 19419, preferably the coding region thereof, conferred the production of or the increase in linolenic acid compared with the wild type control.

[52999] The nucleic acid sequence of At2g36580 from Arabidopsis thaliana, e.g. as shown in the respective line in column 5 of Table I, application no. 9, has been published in F. And the activity of the gene product thereof is the activity of pyruvate kinase.

[53000] Accordingly, in one embodiment, the process of the present invention for producing linolenic acid in a non-human organism, like a microorganism or a plant or a part thereof, comprises increasing or generating the activity of a gene product with the activity of a gene product conferring the activity of “pyruvate kinase”, especially from Arabidopsis thaliana or its functional equivalent or its homolog, e.g. the increase of
[53001] (a) a gene product of a gene comprising the nucleic acid molecule as shown in the respective line in column 5 of Table I, application no. 9, preferably the coding region thereof, or a homolog or a fragment thereof, and being depicted in the same respective line as said At2g36580, or a functional equivalent or a homolog thereof as shown in column 8 of Table I, application no. 9, preferably the coding region thereof, particularly a homolog or functional equivalent as shown in column 8 of Table I B, application no. 9, and being depicted in the same respective line as said At2g36580, and preferably the activity is increased plastidic, or
[53002] (b) a polypeptide comprising a polypeptide, a consensus sequence or at least a polypeptide motif as shown in the respective line in column 5 of Table II or in column 8 of Table IV, application no. 9, respectively, and being depicted in the same respective line as said At2g36580, or a functional equivalent or a homolog thereof as depicted in column 8 of

[53003] Table II, application no. 9, preferably a homolog or functional equivalent as depicted in column 8 of Table II B, application no. 9, and being depicted in the same respective line as said At2g36580, and preferably the activity is increased plastidic.

[53004] Accordingly, in one embodiment, the molecule which activity is to be increased in the process of the invention is the gene product with an activity as a “pyruvate kinase”, preferably it is the molecule of section (a) or (b) of this paragraph.

[53005] In particular, it was observed that in plants, especially in Arabidopsis thaliana, increasing or generating the activity of a gene product plastidic with the activity of a “pyruvate kinase”, preferably being encoded by a gene comprising the nucleic acid sequence SEQ ID NO. 113714, preferably the coding region thereof, conferred the production of or the increase in linolenic acid compared with the wild type control.

[53006] The nucleic acid sequence of At2g45420 from Arabidopsis thaliana, e.g. as shown in the respective line in column 5 of Table I, application no. 9, has been published in F. And the activity of the gene product thereof is the activity of At2g45420-protein.

[53007] Accordingly, in one embodiment, the process of the present invention for producing linolenic acid in a non-human organism, like a microorganism or a plant or a part thereof, comprises increasing or generating the activity of a gene product with the activity of a gene product conferring the activity of “At2g45420-protein”, especially from Arabidopsis thaliana or its functional equivalent or its homolog, e.g. the increase of
[53008] (a) a gene product of a gene comprising the nucleic acid molecule as shown in the respective line in column 5 of Table I, application no. 9, preferably the coding region thereof, or a homolog or a fragment thereof, and being depicted in the same respective line as said At2g45420, or a functional equivalent or a homolog thereof as shown in column 8 of Table I, application no. 9, preferably the coding region thereof, particularly a homolog or functional equivalent as shown in column 8 of Table I B, application no. 9, and being depicted in the same respective line as said At2g45420, and preferably the activity is increased non-targeted, or
[53009] (b) a polypeptide comprising a polypeptide, a consensus sequence or at least a polypeptide motif as shown in the respective line in column 5 of Table II or in column 8 of Table IV, application no. 9, respectively, and being depicted in the same respective line as said At2g45420, or a functional equivalent or a homolog thereof as depicted in column 8 of Table II, application no. 9, preferably a homolog or functional equivalent as depicted in column 8 of Table II B, application no. 9, and being depicted in the same respective line as said At2g45420, and preferably the activity is increased non-targeted.

[53010] Accordingly, in one embodiment, the molecule which activity is to be increased in the process of the invention is the gene product with an activity as a “At2g45420-protein”, preferably it is the molecule of section (a) or (b) of this paragraph.

[53011] In particular, it was observed that in plants, especially in Arabidopsis thaliana, increasing or generating the activity of a gene product non-targeted with the activity of a “At2g45420-protein”, preferably being encoded by a gene comprising the nucleic acid sequence SEQ ID NO. 1623, preferably the coding region thereof, conferred the production of or the increase in linolenic acid compared with the wild type control.

[53012] The nucleic acid sequence of At3g02990 from Arabidopsis thaliana, e.g. as shown in the respective line in column 5 of Table I, application no. 9, has been published in F. And the activity of the gene product thereof is the activity of heat shock transcription factor.

[53013] Accordingly, in one embodiment, the process of the present invention for producing linolenic acid in a non-human organism, like a microorganism or a plant or a part thereof, comprises increasing or generating the activity of a gene product with the activity of a gene product conferring the activity of “heat shock transcription factor”, especially from Arabidopsis thaliana or its functional equivalent or its homolog, e.g. the increase of
[53014] (a) a gene product of a gene comprising the nucleic acid molecule as shown in the respective line in column 5 of Table I, application no. 9, preferably the coding region thereof, or a homolog or a fragment thereof, and being depicted in the same respective line as said At3g02990, or a functional equivalent or a homolog thereof as shown in column 8 of Table I, application no. 9, preferably the coding region thereof, particularly a homolog or functional equivalent as shown in column 8 of Table I B, application no. 9, and being depicted in the same respective line as said At3g02990, and preferably the activity is increased non-targeted, or
[53015] (b) a polypeptide comprising a polypeptide, a consensus sequence or at least a polypeptide motif as shown in the respective line in column 5 of Table II or in column 8 of Table IV, application no. 9, respectively, and being depicted in the same respective line as said At3g02990, or a functional equivalent or a homolog thereof as depicted in column 8 of Table II, application no. 9, preferably a homolog or functional equivalent as depicted in column 8 of Table II B, application no. 9, and being depicted in the same respective line as said At3g02990, and preferably the activity is increased non-targeted.

[53016] Accordingly, in one embodiment, the molecule which activity is to be increased in the process of the invention is the gene product with an activity as a “heat shock transcription factor”, preferably it is the molecule of section (a) or (b) of this paragraph.

[53017] In particular, it was observed that in plants, especially in Arabidopsis thaliana, increasing or generating the activity of a gene product non-targeted with the activity of a “heat shock transcription factor”, preferably being encoded by a gene comprising the nucleic acid sequence SEQ ID NO. 68657, preferably the coding region thereof, conferred the production of or the increase in linolenic acid compared with the wild type control.

[53018] The nucleic acid sequence of At3g62950 from Arabidopsis thaliana, e.g. as shown in the respective line in column 5 of Table I, application no. 9, has been published in F. And the activity of the gene product thereof is the activity of glutaredoxin.

[53019] Accordingly, in one embodiment, the process of the present invention for producing linolenic acid in a non-human organism, like a microorganism or a plant or a part thereof, comprises increasing or generating the activity of a gene product with the activity of a gene product conferring the activity of “glutaredoxin”, especially from Arabidopsis thaliana or its functional equivalent or its homolog, e.g. the increase of
[53020] (a) a gene product of a gene comprising the nucleic acid molecule as shown in the respective line in column 5 of Table I, application no. 9, preferably the coding region thereof, or a homolog or a fragment thereof, and being depicted in the same respective line as said At3g62950, or a functional equivalent or a homolog thereof as shown in column 8 of Table I, application no. 9, preferably the coding region thereof, particularly a homolog or functional equivalent as shown in column 8 of Table I B, application no. 9, and being depicted in the same respective line as said At3g62950, and preferably the activity is increased non-targeted, or
[53021] (b) a polypeptide comprising a polypeptide, a consensus sequence or at least a polypeptide motif as shown in the respective line in column 5 of Table II or in column 8 of Table IV, application no. 9, respectively, and being depicted in the same respective line as said At3g62950, or a functional equivalent or a homolog thereof as depicted in column 8 of Table II, application no. 9, preferably a homolog or functional equivalent as depicted in column 8 of Table II B, application no. 9, and being depicted in the same respective line as said At3g62950, and preferably the activity is increased non-targeted.

[53022] Accordingly, in one embodiment, the molecule which activity is to be increased in the process of the invention is the gene product with an activity as a “glutaredoxin”, preferably it is the molecule of section (a) or (b) of this paragraph.

[53023] In particular, it was observed that in plants, especially in Arabidopsis thaliana, increasing or generating the activity of a gene product non-targeted with the activity of a “glutaredoxin”, preferably being encoded by a gene comprising the nucleic acid sequence SEQ ID NO. 2935, preferably the coding region thereof, conferred the production of or the increase in linolenic acid compared with the wild type control.

[53024] The nucleic acid sequence of At4g15670 from Arabidopsis thaliana, e.g. as shown in the respective line in column 5 of Table I, application no. 9, has been published in F. And the activity of the gene product thereof is the activity of monothiol glutaredoxin.

[53025] Accordingly, in one embodiment, the process of the present invention for producing linolenic acid in a non-human organism, like a microorganism or a plant or a part thereof, comprises increasing or generating the activity of a gene product with the activity of a gene product conferring the activity of “monothiol glutaredoxin”, especially from Arabidopsis thaliana or its functional equivalent or its homolog, e.g. the increase of
[53026] (a) a gene product of a gene comprising the nucleic acid molecule as shown in the respective line in column 5 of Table I, application no. 9, preferably the coding region thereof, or a homolog or a fragment thereof, and being depicted in the same respective line as said At4g15670, or a functional equivalent or a homolog thereof as shown in column 8 of Table I, application no. 9, preferably the coding region thereof, particularly a homolog or functional equivalent as shown in column 8 of Table I B, application no. 9, and being depicted in the same respective line as said At4g15670, and preferably the activity is increased non-targeted, or
[53027] (b) a polypeptide comprising a polypeptide, a consensus sequence or at least a polypeptide motif as shown in the respective line in column 5 of Table II or in column 8 of Table IV, application no. 9, respectively, and being depicted in the same respective line as said At4g15670, or a functional equivalent or a homolog thereof as depicted in column 8 of

[53028] Table II, application no. 9, preferably a homolog or functional equivalent as depicted in column 8 of Table II B, application no. 9, and being depicted in the same respective line as said At4g15670, and preferably the activity is increased non-targeted.

[53029] Accordingly, in one embodiment, the molecule which activity is to be increased in the process of the invention is the gene product with an activity as a “monothiol glutaredoxin”, preferably it is the molecule of section (a) or (b) of this paragraph.

[53030] In particular, it was observed that in plants, especially in Arabidopsis thaliana, increasing or generating the activity of a gene product non-targeted with the activity of a “monothiol glutare-doxin”, preferably being encoded by a gene comprising the nucleic acid sequence SEQ ID NO. 3279, preferably the coding region thereof, conferred the production of or the increase in linolenic acid compared with the wild type control.

[53031] The nucleic acid sequence of At4g18880 from Arabidopsis thaliana, e.g. as shown in the respective line in column 5 of Table I, application no. 9, has been published in F. And the activity of the gene product thereof is the activity of heat shock transcription factor.

[53032] Accordingly, in one embodiment, the process of the present invention for producing linolenic acid in a non-human organism, like a microorganism or a plant or a part thereof, comprises increasing or generating the activity of a gene product with the activity of a gene product conferring the activity of “heat shock transcription factor”, especially from Arabidopsis thaliana or its functional equivalent or its homolog, e.g. the increase of
[53033] (a) a gene product of a gene comprising the nucleic acid molecule as shown in the respective line in column 5 of Table I, application no. 9, preferably the coding region thereof, or a homolog or a fragment thereof, and being depicted in the same respective line as said At4g18880, or a functional equivalent or a homolog thereof as shown in column 8 of Table I, application no. 9, preferably the coding region thereof, particularly a homolog or functional equivalent as shown in column 8 of Table I B, application no. 9, and being depicted in the same respective line as said At4g18880, and preferably the activity is increased non-targeted, or
[53034] (b) a polypeptide comprising a polypeptide, a consensus sequence or at least a polypeptide motif as shown in the respective line in column 5 of Table II or in column 8 of Table IV, application no. 9, respectively, and being depicted in the same respective line as said At4g18880, or a functional equivalent or a homolog thereof as depicted in column 8 of Table II, application no. 9, preferably a homolog or functional equivalent as depicted in column 8 of Table II B, application no. 9, and being depicted in the same respective line as said At4g18880, and preferably the activity is increased non-targeted.

[53035] Accordingly, in one embodiment, the molecule which activity is to be increased in the process of the invention is the gene product with an activity as a “heat shock transcription factor”, preferably it is the molecule of section (a) or (b) of this paragraph.

[53036] In particular, it was observed that in plants, especially in Arabidopsis thaliana, increasing or generating the activity of a gene product non-targeted with the activity of a “heat shock transcription factor”, preferably being encoded by a gene comprising the nucleic acid sequence SEQ ID NO. 24232, preferably the coding region thereof, conferred the production of or the increase in linolenic acid compared with the wild type control.

[53037] The nucleic acid sequence of At4g26080 from Arabidopsis thaliana, e.g. as shown in the respective line in column 5 of Table I, application no. 9, has been published in F. And the activity of the gene product thereof is the activity of protein phosphatase.

[53038] Accordingly, in one embodiment, the process of the present invention for producing linolenic acid in a non-human organism, like a microorganism or a plant or a part thereof, comprises increasing or generating the activity of a gene product with the activity of a gene product conferring the activity of “protein phosphatase”, especially from Arabidopsis thaliana or its functional equivalent or its homolog, e.g. the increase of
[53039] (a) a gene product of a gene comprising the nucleic acid molecule as shown in the respective line in column 5 of Table I, application no. 9, preferably the coding region thereof, or a homolog or a fragment thereof, and being depicted in the same respective line as said At4g26080, or a functional equivalent or a homolog thereof as shown in column 8 of Table I, application no. 9, preferably the coding region thereof, particularly a homolog or functional equivalent as shown in column 8 of Table I B, application no. 9, and being depicted in the same respective line as said At4g26080, and preferably the activity is increased non-targeted, or
[53040] (b) a polypeptide comprising a polypeptide, a consensus sequence or at least a polypeptide motif as shown in the respective line in column 5 of Table II or in column 8 of Table IV, application no. 9, respectively, and being depicted in the same respective line as said At4g26080, or a functional equivalent or a homolog thereof as depicted in column 8 of Table II, application no. 9, preferably a homolog or functional equivalent as depicted in column 8 of Table II B, application no. 9, and being depicted in the same respective line as said At4g26080, and preferably the activity is increased non-targeted.

[53041] Accordingly, in one embodiment, the molecule which activity is to be increased in the process of the invention is the gene product with an activity as a “protein phosphatase”, preferably it is the molecule of section (a) or (b) of this paragraph.

[53042] In particular, it was observed that in plants, especially in Arabidopsis thaliana, increasing or generating the activity of a gene product non-targeted with the activity of a “protein phosphatase”, preferably being encoded by a gene comprising the nucleic acid sequence SEQ ID NO. 68849, preferably the coding region thereof, conferred the production of or the increase in linolenic acid compared with the wild type control.

[53043] The nucleic acid sequence of At4g33040 from Arabidopsis thaliana, e.g. as shown in the respective line in column 5 of Table I, application no. 9, has been published in F. And the activity of the gene product thereof is the activity of glutaredoxin.

[53044] Accordingly, in one embodiment, the process of the present invention for producing linolenic acid in a non-human organism, like a microorganism or a plant or a part thereof, comprises increasing or generating the activity of a gene product with the activity of a gene product conferring the activity of “glutaredoxin”, especially from Arabidopsis thaliana or its functional equivalent or its homolog, e.g. the increase of
[53045] (a) a gene product of a gene comprising the nucleic acid molecule as shown in the respective line in column 5 of Table I, application no. 9, preferably the coding region thereof, or a homolog or a fragment thereof, and being depicted in the same respective line as said At4g33040, or a functional equivalent or a homolog thereof as shown in column 8 of Table I, application no. 9, preferably the coding region thereof, particularly a homolog or functional equivalent as shown in column 8 of Table I B, application no. 9, and being depicted in the same respective line as said At4g33040, and preferably the activity is increased non-targeted, or
[53046] (b) a polypeptide comprising a polypeptide, a consensus sequence or at least a polypeptide motif as shown in the respective line in column 5 of Table II or in column 8 of Table IV, application no. 9, respectively, and being depicted in the same respective line as said At4g33040, or a functional equivalent or a homolog thereof as depicted in column 8 of Table II, application no. 9, preferably a homolog or functional equivalent as depicted in column 8 of Table II B, application no. 9, and being depicted in the same respective line as said At4g33040, and preferably the activity is increased non-targeted.

[53047] Accordingly, in one embodiment, the molecule which activity is to be increased in the process of the invention is the gene product with an activity as a “glutaredoxin”, preferably it is the molecule of section (a) or (b) of this paragraph.

[53048] In particular, it was observed that in plants, especially in Arabidopsis thaliana, increasing or generating the activity of a gene product non-targeted with the activity of a “glutaredoxin”, preferably being encoded by a gene comprising the nucleic acid sequence SEQ ID NO. 4102, preferably the coding region thereof, conferred the production of or the increase in linolenic acid compared with the wild type control.

[53049] The nucleic acid sequence of At5g03720 from Arabidopsis thaliana, e.g. as shown in the respective line in column 5 of Table I, application no. 9, has been published in F. And the activity of the gene product thereof is the activity of heat shock transcription factor.

[53050] Accordingly, in one embodiment, the process of the present invention for producing linolenic acid in a non-human organism, like a microorganism or a plant or a part thereof, comprises increasing or generating the activity of a gene product with the activity of a gene product conferring the activity of “heat shock transcription factor”, especially from Arabidopsis thaliana or its functional equivalent or its homolog, e.g. the increase of
[53051] (a) a gene product of a gene comprising the nucleic acid molecule as shown in the respective line in column 5 of Table I, application no. 9, preferably the coding region thereof, or a homolog or a fragment thereof, and being depicted in the same respective line as said At5g03720, or a functional equivalent or a homolog thereof as shown in column 8 of Table I, application no. 9, preferably the coding region thereof, particularly a homolog or functional equivalent as shown in column 8 of Table I B, application no. 9, and being depicted in the same respective line as said At5g03720, and preferably the activity is increased non-targeted, or
[53052] (b) a polypeptide comprising a polypeptide, a consensus sequence or at least a polypeptide motif as shown in the respective line in column 5 of Table II or in column 8 of Table IV, application no. 9, respectively, and being depicted in the same respective line as said At5g03720, or a functional equivalent or a homolog thereof as depicted in column 8 of

[53053] Table II, application no. 9, preferably a homolog or functional equivalent as depicted in column 8 of Table II B, application no. 9, and being depicted in the same respective line as said At5g03720, and preferably the activity is increased non-targeted.

[53054] Accordingly, in one embodiment, the molecule which activity is to be increased in the process of the invention is the gene product with an activity as a “heat shock transcription factor”, preferably it is the molecule of section (a) or (b) of this paragraph.

[53055] In particular, it was observed that in plants, especially in Arabidopsis thaliana, increasing or generating the activity of a gene product non-targeted with the activity of a “heat shock transcription factor”, preferably being encoded by a gene comprising the nucleic acid sequence SEQ ID NO. 24438, preferably the coding region thereof, conferred the production of or the increase in linolenic acid compared with the wild type control.

[53056] The nucleic acid sequence of At5g18600 from Arabidopsis thaliana, e.g. as shown in the respective line in column 5 of Table I, application no. 9, has been published in F. And the activity of the gene product thereof is the activity of monothiol glutaredoxin.

[53057] Accordingly, in one embodiment, the process of the present invention for producing linolenic acid in a non-human organism, like a microorganism or a plant or a part thereof, comprises increasing or generating the activity of a gene product with the activity of a gene product conferring the activity of “monothiol glutaredoxin”, especially from Arabidopsis thaliana or its functional equivalent or its homolog, e.g. the increase of
[53058] (a) a gene product of a gene comprising the nucleic acid molecule as shown in the respective line in column 5 of Table I, application no. 9, preferably the coding region thereof, or a homolog or a fragment thereof, and being depicted in the same respective line as said At5g18600, or a functional equivalent or a homolog thereof as shown in column 8 of Table I, application no. 9, preferably the coding region thereof, particularly a homolog or functional equivalent as shown in column 8 of Table I B, application no. 9, and being depicted in the same respective line as said At5g18600, and preferably the activity is increased non-targeted, or
[53059] (b) a polypeptide comprising a polypeptide, a consensus sequence or at least a polypeptide motif as shown in the respective line in column 5 of Table II or in column 8 of Table IV, application no. 9, respectively, and being depicted in the same respective line as said At5g18600, or a functional equivalent or a homolog thereof as depicted in column 8 of Table II, application no. 9, preferably a homolog or functional equivalent as depicted in column 8 of Table II B, application no. 9, and being depicted in the same respective line as said At5g18600, and preferably the activity is increased non-targeted.

[53060] Accordingly, in one embodiment, the molecule which activity is to be increased in the process of the invention is the gene product with an activity as a “monothiol glutaredoxin”, preferably it is the molecule of section (a) or (b) of this paragraph.

[53061] In particular, it was observed that in plants, especially in Arabidopsis thaliana, increasing or generating the activity of a gene product non-targeted with the activity of a “monothiol glutare-doxin”, preferably being encoded by a gene comprising the nucleic acid sequence SEQ ID NO. 4904, preferably the coding region thereof, conferred the production of or the increase in linolenic acid compared with the wild type control.

[53062] The nucleic acid sequence of At5g57050 from Arabidopsis thaliana, e.g. as shown in the respective line in column 5 of Table I, application no. 9, has been published in F. And the activity of the gene product thereof is the activity of protein phosphatase.

[53063] Accordingly, in one embodiment, the process of the present invention for producing linolenic acid in a non-human organism, like a microorganism or a plant or a part thereof, comprises increasing or generating the activity of a gene product with the activity of a gene product conferring the activity of “protein phosphatase”, especially from Arabidopsis thaliana or its functional equivalent or its homolog, e.g. the increase of
[53064] (a) a gene product of a gene comprising the nucleic acid molecule as shown in the respective line in column 5 of Table I, application no. 9, preferably the coding region thereof, or a homolog or a fragment thereof, and being depicted in the same respective line as said At5g57050, or a functional equivalent or a homolog thereof as shown in column 8 of Table I, application no. 9, preferably the coding region thereof, particularly a homolog or functional equivalent as shown in column 8 of Table I B, application no. 9, and being depicted in the same respective line as said At5g57050, and preferably the activity is increased non-targeted, or
[53065] (b) a polypeptide comprising a polypeptide, a consensus sequence or at least a polypeptide motif as shown in the respective line in column 5 of Table II or in column 8 of Table IV, application no. 9, respectively, and being depicted in the same respective line as said At5g57050, or a functional equivalent or a homolog thereof as depicted in column 8 of Table II, application no. 9, preferably a homolog or functional equivalent as depicted in column 8 of Table II B, application no. 9, and being depicted in the same respective line as said At5g57050, and preferably the activity is increased non-targeted.

[53066] Accordingly, in one embodiment, the molecule which activity is to be increased in the process of the invention is the gene product with an activity as a “protein phosphatase”, preferably it is the molecule of section (a) or (b) of this paragraph.

[53067] In particular, it was observed that in plants, especially in Arabidopsis thaliana, increasing or generating the activity of a gene product non-targeted with the activity of a “protein phosphatase”, preferably being encoded by a gene comprising the nucleic acid sequence SEQ ID NO. 5318, preferably the coding region thereof, conferred the production of or the increase in linolenic acid compared with the wild type control.

[53068] The nucleic acid sequence of At5g59220 from Arabidopsis thaliana, e.g. as shown in the respective line in column 5 of Table I, application no. 9, has been published in F. And the activity of the gene product thereof is the activity of protein phosphatase.

[53069] Accordingly, in one embodiment, the process of the present invention for producing linolenic acid in a non-human organism, like a microorganism or a plant or a part thereof, comprises increasing or generating the activity of a gene product with the activity of a gene product conferring the activity of “protein phosphatase”, especially from Arabidopsis thaliana or its functional equivalent or its homolog, e.g. the increase of
[53070] (a) a gene product of a gene comprising the nucleic acid molecule as shown in the respective line in column 5 of Table I, application no. 9, preferably the coding region thereof, or a homolog or a fragment thereof, and being depicted in the same respective line as said At5g59220, or a functional equivalent or a homolog thereof as shown in column 8 of Table I, application no. 9, preferably the coding region thereof, particularly a homolog or functional equivalent as shown in column 8 of Table I B, application no. 9, and being depicted in the same respective line as said At5g59220, and preferably the activity is increased non-targeted, or
[53071] (b) a polypeptide comprising a polypeptide, a consensus sequence or at least a polypeptide motif as shown in the respective line in column 5 of Table II or in column 8 of Table IV, application no. 9, respectively, and being depicted in the same respective line as said At5g59220, or a functional equivalent or a homolog thereof as depicted in column 8 of Table II, application no. 9, preferably a homolog or functional equivalent as depicted in column 8 of Table II B, application no. 9, and being depicted in the same respective line as said At5g59220, and preferably the activity is increased non-targeted.

[53072] Accordingly, in one embodiment, the molecule which activity is to be increased in the process of the invention is the gene product with an activity as a “protein phosphatase”, preferably it is the molecule of section (a) or (b) of this paragraph.

[53073] In particular, it was observed that in plants, especially in Arabidopsis thaliana, increasing or generating the activity of a gene product non-targeted with the activity of a “protein phos-phatase”, preferably being encoded by a gene comprising the nucleic acid sequence SEQ ID NO. 25498, preferably the coding region thereof, conferred the production of or the increase in linolenic acid compared with the wild type control.

[53074] The nucleic acid sequence of AvinDRAFT_{—}1624 from Azotobacter vinelandii, e.g. as shown in the respective line in column 5 of Table I, application no. 9, has been published in D. And the activity of the gene product thereof is the activity of sec-independent protein translocase.

[53075] Accordingly, in one embodiment, the process of the present invention for producing linolenic acid in a non-human organism, like a microorganism or a plant or a part thereof, comprises increasing or generating the activity of a gene product with the activity of a gene product conferring the activity of “sec-independent protein translocase”, especially from Azotobacter vinelandii or its functional equivalent or its homolog, e.g. the increase of
[53076] (a) a gene product of a gene comprising the nucleic acid molecule as shown in the respective line in column 5 of Table I, application no. 9, preferably the coding region thereof, or a homolog or a fragment thereof, and being depicted in the same respective line as said AvinDRAFT_{—}1624, or a functional equivalent or a homolog thereof as shown in column 8 of Table I, application no. 9, preferably the coding region thereof, particularly a homolog or functional equivalent as shown in column 8 of Table I B, application no. 9, and being depicted in the same respective line as said AvinDRAFT_{—}1624, and preferably the activity is increased non-targeted, or
[53077] (b) a polypeptide comprising a polypeptide, a consensus sequence or at least a polypeptide motif as shown in the respective line in column 5 of Table II or in column 8 of Table IV, application no. 9, respectively, and being depicted in the same respective line as said AvinDRAFT_{—}1624, or a functional equivalent or a homolog thereof as depicted in column 8 of Table II, application no. 9, preferably a homolog or functional equivalent as depicted in column 8 of Table II B, application no. 9, and being depicted in the same respective line as said AvinDRAFT_{—}1624, and preferably the activity is increased non-targeted.

[53078] Accordingly, in one embodiment, the molecule which activity is to be increased in the process of the invention is the gene product with an activity as a “sec-independent protein translocase”, preferably it is the molecule of section (a) or (b) of this paragraph.

[53079] In particular, it was observed that in plants, especially in Arabidopsis thaliana, increasing or generating the activity of a gene product non-targeted with the activity of a “sec-independent protein translocase”, preferably being encoded by a gene comprising the nucleic acid sequence SEQ ID NO. 26196, preferably the coding region thereof, conferred the production of or the increase in linolenic acid compared with the wild type control.

[53080] The nucleic acid sequence of AvinDRAFT_{—}1788 from Azotobacter vinelandii, e.g. as shown in the respective line in column 5 of Table I, application no. 9, has been published in D. And the activity of the gene product thereof is the activity of oxidoreductase.

[53081] Accordingly, in one embodiment, the process of the present invention for producing linolenic acid in a non-human organism, like a microorganism or a plant or a part thereof, comprises increasing or generating the activity of a gene product with the activity of a gene product conferring the activity of “oxidoreductase”, especially from Azotobacter vinelandii or its functional equivalent or its homolog, e.g. the increase of
[53082] (a) a gene product of a gene comprising the nucleic acid molecule as shown in the respective line in column 5 of Table I, application no. 9, preferably the coding region thereof, or a homolog or a fragment thereof, and being depicted in the same respective line as said AvinDRAFT_{—}1788, or a functional equivalent or a homolog thereof as shown in column 8 of Table I, application no. 9, preferably the coding region thereof, particularly a homolog or functional equivalent as shown in column 8 of Table I B, application no. 9, and being depicted in the same respective line as said AvinDRAFT_{—}1788, and preferably the activity is increased non-targeted, or
[53083] (b) a polypeptide comprising a polypeptide, a consensus sequence or at least a polypeptide motif as shown in the respective line in column 5 of Table II or in column 8 of Table IV, application no. 9, respectively, and being depicted in the same respective line as said AvinDRAFT_{—}1788, or a functional equivalent or a homolog thereof as depicted in column 8 of Table II, application no. 9, preferably a homolog or functional equivalent as depicted in column 8 of Table II B, application no. 9, and being depicted in the same respective line as said AvinDRAFT_{—}1788, and preferably the activity is increased non-targeted.

[53084] Accordingly, in one embodiment, the molecule which activity is to be increased in the process of the invention is the gene product with an activity as a “oxidoreductase”, preferably it is the molecule of section (a) or (b) of this paragraph.

[53085] In particular, it was observed that in plants, especially in Arabidopsis thaliana, increasing or generating the activity of a gene product non-targeted with the activity of a “oxidoreductase”, preferably being encoded by a gene comprising the nucleic acid sequence SEQ ID NO. 114083, preferably the coding region thereof, conferred the production of or the increase in linolenic acid compared with the wild type control.

[53086] The nucleic acid sequence of AvinDRAFT_{—}2754 from Azotobacter vinelandii, e.g. as shown in the respective line in column 5 of Table I, application no. 9, has been published in D. And the activity of the gene product thereof is the activity of acyl-CoA synthase.

[53087] Accordingly, in one embodiment, the process of the present invention for producing linolenic acid in a non-human organism, like a microorganism or a plant or a part thereof, comprises increasing or generating the activity of a gene product with the activity of a gene product conferring the activity of “acyl-CoA synthase”, especially from Azotobacter vinelandii or its functional equivalent or its homolog, e.g. the increase of
[53088] (a) a gene product of a gene comprising the nucleic acid molecule as shown in the respective line in column 5 of Table I, application no. 9, preferably the coding region thereof, or a homolog or a fragment thereof, and being depicted in the same respective line as said AvinDRAFT_{—}2754, or a functional equivalent or a homolog thereof as shown in column 8 of Table I, application no. 9, preferably the coding region thereof, particularly a homolog or functional equivalent as shown in column 8 of Table I B, application no. 9, and being depicted in the same respective line as said AvinDRAFT_{—}2754, and preferably the activity is increased non-targeted, or
[53089] (b) a polypeptide comprising a polypeptide, a consensus sequence or at least a polypeptide motif as shown in the respective line in column 5 of Table II or in column 8 of Table IV, application no. 9, respectively, and being depicted in the same respective line as said AvinDRAFT_{—}2754, or a functional equivalent or a homolog thereof as depicted in column 8 of Table II, application no. 9, preferably a homolog or functional equivalent as depicted in column 8 of Table II B, application no. 9, and being depicted in the same respective line as said AvinDRAFT_{—}2754, and preferably the activity is increased non-targeted.

[53090] Accordingly, in one embodiment, the molecule which activity is to be increased in the process of the invention is the gene product with an activity as a “acyl-CoA synthase”, preferably it is the molecule of section (a) or (b) of this paragraph.

[53091] In particular, it was observed that in plants, especially in Arabidopsis thaliana, increasing or generating the activity of a gene product non-targeted with the activity of a “acyl-CoA synthase”, preferably being encoded by a gene comprising the nucleic acid sequence SEQ ID NO. 28040, preferably the coding region thereof, conferred the production of or the increase in linolenic acid compared with the wild type control.

[53092] The nucleic acid sequence of AvinDRAFT_{—}3253 from Azotobacter vinelandii, e.g. as shown in the respective line in column 5 of Table I, application no. 9, has been published in D. And the activity of the gene product thereof is the activity of oxidoreductase.

[53093] Accordingly, in one embodiment, the process of the present invention for producing linolenic acid in a non-human organism, like a microorganism or a plant or a part thereof, comprises increasing or generating the activity of a gene product with the activity of a gene product conferring the activity of “oxidoreductase”, especially from Azotobacter vinelandii or its functional equivalent or its homolog, e.g. the increase of
[53094] (a) a gene product of a gene comprising the nucleic acid molecule as shown in the respective line in column 5 of Table I, application no. 9, preferably the coding region thereof, or a homolog or a fragment thereof, and being depicted in the same respective line as said AvinDRAFT_{—}3253, or a functional equivalent or a homolog thereof as shown in column 8 of Table I, application no. 9, preferably the coding region thereof, particularly a homolog or functional equivalent as shown in column 8 of Table I B, application no. 9, and being depicted in the same respective line as said AvinDRAFT_{—}3253, and preferably the activity is increased non-targeted, or
[53095] (b) a polypeptide comprising a polypeptide, a consensus sequence or at least a polypeptide motif as shown in the respective line in column 5 of Table II or in column 8 of Table IV, application no. 9, respectively, and being depicted in the same respective line as said AvinDRAFT_{—}3253, or a functional equivalent or a homolog thereof as depicted in column 8 of Table II, application no. 9, preferably a homolog or functional equivalent as depicted in column 8 of Table II B, application no. 9, and being depicted in the same respective line as said AvinDRAFT_{—}3253, and preferably the activity is increased non-targeted.

[53096] Accordingly, in one embodiment, the molecule which activity is to be increased in the process of the invention is the gene product with an activity as a “oxidoreductase”, preferably it is the molecule of section (a) or (b) of this paragraph.

[53097] In particular, it was observed that in plants, especially in Arabidopsis thaliana, increasing or generating the activity of a gene product non-targeted with the activity of a “oxidoreductase”, preferably being encoded by a gene comprising the nucleic acid sequence SEQ ID NO. 29500, preferably the coding region thereof, conferred the production of or the increase in linolenic acid compared with the wild type control.

[53098] The nucleic acid sequence of AvinDRAFT_{—}3577 from Azotobacter vinelandii, e.g. as shown in the respective line in column 5 of Table I, application no. 9, has been published in D. And the activity of the gene product thereof is the activity of ThiF family protein.

[53099] Accordingly, in one embodiment, the process of the present invention for producing linolenic acid in a non-human organism, like a microorganism or a plant or a part thereof, comprises increasing or generating the activity of a gene product with the activity of a gene product conferring the activity of “ThiF family protein”, especially from Azotobacter vinelandii or its functional equivalent or its homolog, e.g. the increase of
[53100] (a) a gene product of a gene comprising the nucleic acid molecule as shown in the respective line in column 5 of Table I, application no. 9, preferably the coding region thereof, or a homolog or a fragment thereof, and being depicted in the same respective line as said AvinDRAFT_{—}3577, or a functional equivalent or a homolog thereof as shown in column 8 of Table I, application no. 9, preferably the coding region thereof, particularly a homolog or functional equivalent as shown in column 8 of Table I B, application no. 9, and being depicted in the same respective line as said AvinDRAFT_{—}3577, and preferably the activity is increased non-targeted, or
[53101] (b) a polypeptide comprising a polypeptide, a consensus sequence or at least a polypeptide motif as shown in the respective line in column 5 of Table II or in column 8 of Table IV, application no. 9, respectively, and being depicted in the same respective line as said AvinDRAFT_{—}3577, or a functional equivalent or a homolog thereof as depicted in column 8 of Table II, application no. 9, preferably a homolog or functional equivalent as depicted in column 8 of Table II B, application no. 9, and being depicted in the same respective line as said AvinDRAFT_{—}3577, and preferably the activity is increased non-targeted.

[53102] Accordingly, in one embodiment, the molecule which activity is to be increased in the process of the invention is the gene product with an activity as a “ThiF family protein”, preferably it is the molecule of section (a) or (b) of this paragraph.

[53103] In particular, it was observed that in plants, especially in Arabidopsis thaliana, increasing or generating the activity of a gene product non-targeted with the activity of a “ThiF family protein”, preferably being encoded by a gene comprising the nucleic acid sequence SEQ ID NO. 111155, preferably the coding region thereof, conferred the production of or the increase in linolenic acid compared with the wild type control.

[53104] The nucleic acid sequence of AvinDRAFT_{—}3605 from Azotobacter vinelandii, e.g. as shown in the respective line in column 5 of Table I, application no. 9, has been published in D. And the activity of the gene product thereof is the activity of CTP synthase.

[53105] Accordingly, in one embodiment, the process of the present invention for producing linolenic acid in a non-human organism, like a microorganism or a plant or a part thereof, comprises increasing or generating the activity of a gene product with the activity of a gene product conferring the activity of “CTP synthase”, especially from Azotobacter vinelandii or its functional equivalent or its homolog, e.g. the increase of
[53106] (a) a gene product of a gene comprising the nucleic acid molecule as shown in the respective line in column 5 of Table I, application no. 9, preferably the coding region thereof, or a homolog or a fragment thereof, and being depicted in the same respective line as said AvinDRAFT_{—}3605, or a functional equivalent or a homolog thereof as shown in column 8 of Table I, application no. 9, preferably the coding region thereof, particularly a homolog or functional equivalent as shown in column 8 of Table I B, application no. 9, and being depicted in the same respective line as said AvinDRAFT_{—}3605, and preferably the activity is increased non-targeted, or
[53107] (b) a polypeptide comprising a polypeptide, a consensus sequence or at least a polypeptide motif as shown in the respective line in column 5 of Table II or in column 8 of Table IV, application no. 9, respectively, and being depicted in the same respective line as said AvinDRAFT_{—}3605, or a functional equivalent or a homolog thereof as depicted in column 8 of Table II, application no. 9, preferably a homolog or functional equivalent as depicted in column 8 of Table II B, application no. 9, and being depicted in the same respective line as said AvinDRAFT_{—}3605, and preferably the activity is increased non-targeted.

[53108] Accordingly, in one embodiment, the molecule which activity is to be increased in the process of the invention is the gene product with an activity as a “CTP synthase”, preferably it is the molecule of section (a) or (b) of this paragraph.

[53109] In particular, it was observed that in plants, especially in Arabidopsis thaliana, increasing or generating the activity of a gene product non-targeted with the activity of a “CTP synthase”, preferably being encoded by a gene comprising the nucleic acid sequence SEQ ID NO. 31026, preferably the coding region thereof, conferred the production of or the increase in linolenic acid compared with the wild type control.

[53110] The nucleic acid sequence of AvinDRAFT_{—}3629 from Azotobacter vinelandii, e.g. as shown in the respective line in column 5 of Table I, application no. 9, has been published in D. And the activity of the gene product thereof is the activity of recombinase A.

[53111] Accordingly, in one embodiment, the process of the present invention for producing linolenic acid in a non-human organism, like a microorganism or a plant or a part thereof, comprises increasing or generating the activity of a gene product with the activity of a gene product conferring the activity of “recombinase A”, especially from Azotobacter vinelandii or its functional equivalent or its homolog, e.g. the increase of
[53112] (a) a gene product of a gene comprising the nucleic acid molecule as shown in the respective line in column 5 of Table I, application no. 9, preferably the coding region thereof, or a homolog or a fragment thereof, and being depicted in the same respective line as said AvinDRAFT_{—}3629, or a functional equivalent or a homolog thereof as shown in column 8 of Table I, application no. 9, preferably the coding region thereof, particularly a homolog or functional equivalent as shown in column 8 of Table I B, application no. 9, and being depicted in the same respective line as said AvinDRAFT_{—}3629, and preferably the activity is increased non-targeted, or
[53113] (b) a polypeptide comprising a polypeptide, a consensus sequence or at least a polypeptide motif as shown in the respective line in column 5 of Table II or in column 8 of Table IV, application no. 9, respectively, and being depicted in the same respective line as said AvinDRAFT_{—}3629, or a functional equivalent or a homolog thereof as depicted in column 8 of Table II, application no. 9, preferably a homolog or functional equivalent as depicted in column 8 of Table II B, application no. 9, and being depicted in the same respective line as said AvinDRAFT_{—}3629, and preferably the activity is increased non-targeted.

[53114] Accordingly, in one embodiment, the molecule which activity is to be increased in the process of the invention is the gene product with an activity as a “recombinase A”, preferably it is the molecule of section (a) or (b) of this paragraph.

[53115] In particular, it was observed that in plants, especially in Arabidopsis thaliana, increasing or generating the activity of a gene product non-targeted with the activity of a “recombinase A”, preferably being encoded by a gene comprising the nucleic acid sequence SEQ ID NO. 114231, preferably the coding region thereof, conferred the production of or the increase in linolenic acid compared with the wild type control.

[53116] The nucleic acid sequence of AvinDRAFT_{—}4847 from Azotobacter vinelandii, e.g. as shown in the respective line in column 5 of Table I, application no. 9, has been published in D. And the activity of the gene product thereof is the activity of isopropylmalate isomerase large subunit.

[53117] Accordingly, in one embodiment, the process of the present invention for producing linolenic acid in a non-human organism, like a microorganism or a plant or a part thereof, comprises increasing or generating the activity of a gene product with the activity of a gene product conferring the activity of “isopropylmalate isomerase large subunit”, especially from Azotobacter vinelandii or its functional equivalent or its homolog, e.g. the increase of
[53118] (a) a gene product of a gene comprising the nucleic acid molecule as shown in the respective line in column 5 of Table I, application no. 9, preferably the coding region thereof, or a homolog or a fragment thereof, and being depicted in the same respective line as said AvinDRAFT_{—}4847, or a functional equivalent or a homolog thereof as shown in column 8 of Table I, application no. 9, preferably the coding region thereof, particularly a homolog or functional equivalent as shown in column 8 of Table I B, application no. 9, and being depicted in the same respective line as said AvinDRAFT_{—}4847, and preferably the activity is increased non-targeted, or
[53119] (b) a polypeptide comprising a polypeptide, a consensus sequence or at least a polypeptide motif as shown in the respective line in column 5 of Table II or in column 8 of Table IV, application no. 9, respectively, and being depicted in the same respective line as said AvinDRAFT_{—}4847, or a functional equivalent or a homolog thereof as depicted in column 8 of Table II, application no. 9, preferably a homolog or functional equivalent as depicted in column 8 of Table II B, application no. 9, and being depicted in the same respective line as said AvinDRAFT_{—}4847, and preferably the activity is increased non-targeted.

[53120] Accordingly, in one embodiment, the molecule which activity is to be increased in the process of the invention is the gene product with an activity as a “isopropylmalate isomerase large sub-unit”, preferably it is the molecule of section (a) or (b) of this paragraph.

[53121] In particular, it was observed that in plants, especially in Arabidopsis thaliana, increasing or generating the activity of a gene product non-targeted with the activity of a “isopropylmalate isomerase large subunit”, preferably being encoded by a gene comprising the nucleic acid sequence SEQ ID NO. 102941, preferably the coding region thereof, conferred the production of or the increase in linolenic acid compared with the wild type control.

[53122] The nucleic acid sequence of AvinDRAFT_{—}5467 from Azotobacter vinelandii, e.g. as shown in the respective line in column 5 of Table I, application no. 9, has been published in D. And the activity of the gene product thereof is the activity of HesB/YadR/YfhF family protein.

[53123] Accordingly, in one embodiment, the process of the present invention for producing linolenic acid in a non-human organism, like a microorganism or a plant or a part thereof, comprises increasing or generating the activity of a gene product with the activity of a gene product conferring the activity of “HesB/YadR/YfhF family protein”, especially from Azotobacter vinelandii or its functional equivalent or its homolog, e.g. the increase of
[53124] (a) a gene product of a gene comprising the nucleic acid molecule as shown in the respective line in column 5 of Table I, application no. 9, preferably the coding region thereof, or a homolog or a fragment thereof, and being depicted in the same respective line as said AvinDRAFT_{—}5467, or a functional equivalent or a homolog thereof as shown in column 8 of Table I, application no. 9, preferably the coding region thereof, particularly a homolog or functional equivalent as shown in column 8 of Table I B, application no. 9, and being depicted in the same respective line as said AvinDRAFT_{—}5467, and preferably the activity is increased non-targeted, or
[53125] (b) a polypeptide comprising a polypeptide, a consensus sequence or at least a polypeptide motif as shown in the respective line in column 5 of Table II or in column 8 of Table IV, application no. 9, respectively, and being depicted in the same respective line as said AvinDRAFT_{—}5467, or a functional equivalent or a homolog thereof as depicted in column 8 of Table II, application no. 9, preferably a homolog or functional equivalent as depicted in column 8 of Table II B, application no. 9, and being depicted in the same respective line as said AvinDRAFT_{—}5467, and preferably the activity is increased non-targeted.

[53126] Accordingly, in one embodiment, the molecule which activity is to be increased in the process of the invention is the gene product with an activity as a “HesB/YadR/YfhF family protein”, preferably it is the molecule of section (a) or (b) of this paragraph.

[53127] In particular, it was observed that in plants, especially in Arabidopsis thaliana, increasing or generating the activity of a gene product non-targeted with the activity of a “HesB/YadR/YfhF family protein”, preferably being encoded by a gene comprising the nucleic acid sequence SEQ ID NO. 32648, preferably the coding region thereof, conferred the production of or the increase in linolenic acid compared with the wild type control.

[53128] The nucleic acid sequence of B0195 from Escherichia coli, e.g. as shown in the respective line in column 5 of Table I, application no. 9, has been published in B. And the activity of the gene product thereof is the activity of b0195-protein.

[53129] Accordingly, in one embodiment, the process of the present invention for producing linolenic acid in a non-human organism, like a microorganism or a plant or a part thereof, comprises increasing or generating the activity of a gene product with the activity of a gene product conferring the activity of “b0195-protein”, especially from Escherichia coli or its functional equivalent or its homolog, e.g. the increase of
[53130] (a) a gene product of a gene comprising the nucleic acid molecule as shown in the respective line in column 5 of Table I, application no. 9, preferably the coding region thereof, or a homolog or a fragment thereof, and being depicted in the same respective line as said B0195, or a functional equivalent or a homolog thereof as shown in column 8 of Table I, application no. 9, preferably the coding region thereof, particularly a homolog or functional equivalent as shown in column 8 of Table I B, application no. 9, and being depicted in the same respective line as said B0195, and preferably the activity is increased plastidic, or
[53131] (b) a polypeptide comprising a polypeptide, a consensus sequence or at least a polypeptide motif as shown in the respective line in column 5 of Table II or in column 8 of Table IV, application no. 9, respectively, and being depicted in the same respective line as said B0195, or a functional equivalent or a homolog thereof as depicted in column 8 of Table II, application no. 9, preferably a homolog or functional equivalent as depicted in column 8 of Table II B, application no. 9, and being depicted in the same respective line as said B0195, and preferably the activity is increased plastidic.

[53132] Accordingly, in one embodiment, the molecule which activity is to be increased in the process of the invention is the gene product with an activity as a “b0195-protein”, preferably it is the molecule of section (a) or (b) of this paragraph.

[53133] In particular, it was observed that in plants, especially in Arabidopsis thaliana, increasing or generating the activity of a gene product plastidic with the activity of a “b0195-protein”, preferably being encoded by a gene comprising the nucleic acid sequence SEQ ID NO. 118238, preferably the coding region thereof, conferred the production of or the increase in linolenic acid compared with the wild type control.

[53134] The nucleic acid sequence of B0828 from Escherichia coli, e.g. as shown in the respective line in column 5 of Table I, application no. 9, has been published in B. And the activity of the gene product thereof is the activity of asparaginase.

[53135] Accordingly, in one embodiment, the process of the present invention for producing linolenic acid in a non-human organism, like a microorganism or a plant or a part thereof, comprises increasing or generating the activity of a gene product with the activity of a gene product conferring the activity of “asparaginase”, especially from Escherichia coli or its functional equivalent or its homolog, e.g. the increase of
[53136] (a) a gene product of a gene comprising the nucleic acid molecule as shown in the respective line in column 5 of Table I, application no. 9, preferably the coding region thereof, or a homolog or a fragment thereof, and being depicted in the same respective line as said B0828, or a functional equivalent or a homolog thereof as shown in column 8 of Table I, application no. 9, preferably the coding region thereof, particularly a homolog or functional equivalent as shown in column 8 of Table I B, application no. 9, and being depicted in the same respective line as said B0828, and preferably the activity is increased plastidic, or
[53137] (b) a polypeptide comprising a polypeptide, a consensus sequence or at least a polypeptide motif as shown in the respective line in column 5 of Table II or in column 8 of Table IV, application no. 9, respectively, and being depicted in the same respective line as said B0828, or a functional equivalent or a homolog thereof as depicted in column 8 of Table II, application no. 9, preferably a homolog or functional equivalent as depicted in column 8 of Table II B, application no. 9, and being depicted in the same respective line as said B0828, and preferably the activity is increased plastidic.

[53138] Accordingly, in one embodiment, the molecule which activity is to be increased in the process of the invention is the gene product with an activity as a “asparaginase”, preferably it is the molecule of section (a) or (b) of this paragraph.

[53139] In particular, it was observed that in plants, especially in Arabidopsis thaliana, increasing or generating the activity of a gene product plastidic with the activity of a “asparaginase”, preferably being encoded by a gene comprising the nucleic acid sequence SEQ ID NO. 36299, preferably the coding region thereof, conferred the production of or the increase in linolenic acid compared with the wild type control.

[53140] The nucleic acid sequence of B1065 from Escherichia coli, e.g. as shown in the respective line in column 5 of Table I, application no. 9, has been published in B. And the activity of the gene product thereof is the activity of multidrug resistance protein.

[53141] Accordingly, in one embodiment, the process of the present invention for producing linolenic acid in a non-human organism, like a microorganism or a plant or a part thereof, comprises increasing or generating the activity of a gene product with the activity of a gene product conferring the activity of “multidrug resistance protein”, especially from Escherichia coli or its functional equivalent or its homolog, e.g. the increase of
[53142] (a) a gene product of a gene comprising the nucleic acid molecule as shown in the respective line in column 5 of Table I, application no. 9, preferably the coding region thereof, or a homolog or a fragment thereof, and being depicted in the same respective line as said B1065, or a functional equivalent or a homolog thereof as shown in column 8 of Table I, application no. 9, preferably the coding region thereof, particularly a homolog or functional equivalent as shown in column 8 of Table I B, application no. 9, and being depicted in the same respective line as said B1065, and preferably the activity is increased plastidic, or
[53143] (b) a polypeptide comprising a polypeptide, a consensus sequence or at least a polypeptide motif as shown in the respective line in column 5 of Table II or in column 8 of Table IV, application no. 9, respectively, and being depicted in the same respective line as said B1065, or a functional equivalent or a homolog thereof as depicted in column 8 of Table II, application no. 9, preferably a homolog or functional equivalent as depicted in column 8 of Table II B, application no. 9, and being depicted in the same respective line as said B1065, and preferably the activity is increased plastidic.

[53144] Accordingly, in one embodiment, the molecule which activity is to be increased in the process of the invention is the gene product with an activity as a “multidrug resistance protein”, preferably it is the molecule of section (a) or (b) of this paragraph.

[53145] In particular, it was observed that in plants, especially in Arabidopsis thaliana, increasing or generating the activity of a gene product plastidic with the activity of a “multidrug resistance protein”, preferably being encoded by a gene comprising the nucleic acid sequence SEQ ID NO. 76032, preferably the coding region thereof, conferred the production of or the increase in linolenic acid compared with the wild type control.

[53146] The nucleic acid sequence of B1093 from Escherichia coli, e.g. as shown in the respective line in column 5 of Table I, application no. 9, has been published in B. And the activity of the gene product thereof is the activity of 3-oxoacyl-[acyl-carrier-protein] reductase.

[53147] Accordingly, in one embodiment, the process of the present invention for producing linolenic acid in a non-human organism, like a microorganism or a plant or a part thereof, comprises increasing or generating the activity of a gene product with the activity of a gene product conferring the activity of “3-oxoacyl-[acyl-carrier-protein] reductase”, especially from Escherichia coli or its functional equivalent or its homolog, e.g. the increase of
[53148] (a) a gene product of a gene comprising the nucleic acid molecule as shown in the respective line in column 5 of Table I, application no. 9, preferably the coding region thereof, or a homolog or a fragment thereof, and being depicted in the same respective line as said B1093, or a functional equivalent or a homolog thereof as shown in column 8 of Table I, application no. 9, preferably the coding region thereof, particularly a homolog or functional equivalent as shown in column 8 of Table I B, application no. 9, and being depicted in the same respective line as said B1093, and preferably the activity is increased non-targeted, or
[53149] (b) a polypeptide comprising a polypeptide, a consensus sequence or at least a polypeptide motif as shown in the respective line in column 5 of Table II or in column 8 of Table IV, application no. 9, respectively, and being depicted in the same respective line as said B1093, or a functional equivalent or a homolog thereof as depicted in column 8 of Table II, application no. 9, preferably a homolog or functional equivalent as depicted in column 8 of Table II B, application no. 9, and being depicted in the same respective line as said B1093, and preferably the activity is increased non-targeted.

[53150] Accordingly, in one embodiment, the molecule which activity is to be increased in the process of the invention is the gene product with an activity as a “3-oxoacyl-[acyl-carrier-protein] reductase”, preferably it is the molecule of section (a) or (b) of this paragraph.

[53151] In particular, it was observed that in plants, especially in Arabidopsis thaliana, increasing or generating the activity of a gene product non-targeted with the activity of a “3-oxoacyl-[acyl-carrier-protein] reductase”, preferably being encoded by a gene comprising the nucleic acid sequence SEQ ID NO. 118371, preferably the coding region thereof, conferred the production of or the increase in linolenic acid compared with the wild type control.

[53152] The nucleic acid sequence of B1095 from Escherichia coli, e.g. as shown in the respective line in column 5 of Table I, application no. 9, has been published in B. And the activity of the gene product thereof is the activity of 3-oxoacyl-[acyl-carrier-protein] synthase.

[53153] Accordingly, in one embodiment, the process of the present invention for producing linolenic acid in a non-human organism, like a microorganism or a plant or a part thereof, comprises increasing or generating the activity of a gene product with the activity of a gene product conferring the activity of “3-oxoacyl-[acyl-carrier-protein] synthase”, especially from Escherichia coli or its functional equivalent or its homolog, e.g. the increase of
[53154] (a) a gene product of a gene comprising the nucleic acid molecule as shown in the respective line in column 5 of Table I, application no. 9, preferably the coding region thereof, or a homolog or a fragment thereof, and being depicted in the same respective line as said B1095, or a functional equivalent or a homolog thereof as shown in column 8 of Table I, application no. 9, preferably the coding region thereof, particularly a homolog or functional equivalent as shown in column 8 of Table I B, application no. 9, and being depicted in the same respective line as said B1095, and preferably the activity is increased plastidic, or
[53155] (b) a polypeptide comprising a polypeptide, a consensus sequence or at least a polypeptide motif as shown in the respective line in column 5 of Table II or in column 8 of Table IV, application no. 9, respectively, and being depicted in the same respective line as said B1095, or a functional equivalent or a homolog thereof as depicted in column 8 of Table II, application no. 9, preferably a homolog or functional equivalent as depicted in column 8 of Table II B, application no. 9, and being depicted in the same respective line as said B1095, and preferably the activity is increased plastidic.

[53156] Accordingly, in one embodiment, the molecule which activity is to be increased in the process of the invention is the gene product with an activity as a “3-oxoacyl-[acyl-carrier-protein] synthase”, preferably it is the molecule of section (a) or (b) of this paragraph.

[53157] In particular, it was observed that in plants, especially in Arabidopsis thaliana, increasing or generating the activity of a gene product plastidic with the activity of a “3-oxoacyl-[acyl-carrier-protein] synthase”, preferably being encoded by a gene comprising the nucleic acid sequence SEQ ID NO. 114552, preferably the coding region thereof, conferred the production of or the increase in linolenic acid compared with the wild type control.

[53158] The nucleic acid sequence of B1234 from Escherichia coli, e.g. as shown in the respective line in column 5 of Table I, application no. 9, has been published in B. And the activity of the gene product thereof is the activity of b1234-protein.

[53159] Accordingly, in one embodiment, the process of the present invention for producing linolenic acid in a non-human organism, like a microorganism or a plant or a part thereof, comprises increasing or generating the activity of a gene product with the activity of a gene product conferring the activity of “b1234-protein”, especially from Escherichia coli or its functional equivalent or its homolog, e.g. the increase of
[53160] (a) a gene product of a gene comprising the nucleic acid molecule as shown in the respective line in column 5 of Table I, application no. 9, preferably the coding region thereof, or a homolog or a fragment thereof, and being depicted in the same respective line as said B1234, or a functional equivalent or a homolog thereof as shown in column 8 of Table I, application no. 9, preferably the coding region thereof, particularly a homolog or functional equivalent as shown in column 8 of Table I B, application no. 9, and being depicted in the same respective line as said B1234, and preferably the activity is increased non-targeted, or
[53161] (b) a polypeptide comprising a polypeptide, a consensus sequence or at least a polypeptide motif as shown in the respective line in column 5 of Table II or in column 8 of Table IV, application no. 9, respectively, and being depicted in the same respective line as said B1234, or a functional equivalent or a homolog thereof as depicted in column 8 of Table II, application no. 9, preferably a homolog or functional equivalent as depicted in column 8 of Table II B, application no. 9, and being depicted in the same respective line as said B1234, and preferably the activity is increased non-targeted.

[53162] Accordingly, in one embodiment, the molecule which activity is to be increased in the process of the invention is the gene product with an activity as a “b1234-protein”, preferably it is the molecule of section (a) or (b) of this paragraph.

[53163] In particular, it was observed that in plants, especially in Arabidopsis thaliana, increasing or generating the activity of a gene product non-targeted with the activity of a “b1234-protein”, preferably being encoded by a gene comprising the nucleic acid sequence SEQ ID NO. 112111, preferably the coding region thereof, conferred the production of or the increase in linolenic acid compared with the wild type control.

[53164] The nucleic acid sequence of B1248 from Escherichia coli, e.g. as shown in the respective line in column 5 of Table I, application no. 9, has been published in B. And the activity of the gene product thereof is the activity of b1248-protein.

[53165] Accordingly, in one embodiment, the process of the present invention for producing linolenic acid in a non-human organism, like a microorganism or a plant or a part thereof, comprises increasing or generating the activity of a gene product with the activity of a gene product conferring the activity of “b1248-protein”, especially from Escherichia coli or its functional equivalent or its homolog, e.g. the increase of
[53166] (a) a gene product of a gene comprising the nucleic acid molecule as shown in the respective line in column 5 of Table I, application no. 9, preferably the coding region thereof, or a homolog or a fragment thereof, and being depicted in the same respective line as said B1248, or a functional equivalent or a homolog thereof as shown in column 8 of Table I, application no. 9, preferably the coding region thereof, particularly a homolog or functional equivalent as shown in column 8 of Table I B, application no. 9, and being depicted in the same respective line as said B1248, and preferably the activity is increased non-targeted, or
[53167] (b) a polypeptide comprising a polypeptide, a consensus sequence or at least a polypeptide motif as shown in the respective line in column 5 of Table II or in column 8 of Table IV, application no. 9, respectively, and being depicted in the same respective line as said B1248, or a functional equivalent or a homolog thereof as depicted in column 8 of Table II, application no. 9, preferably a homolog or functional equivalent as depicted in column 8 of Table II B, application no. 9, and being depicted in the same respective line as said B1248, and preferably the activity is increased non-targeted.

[53168] Accordingly, in one embodiment, the molecule which activity is to be increased in the process of the invention is the gene product with an activity as a “b1248-protein”, preferably it is the molecule of section (a) or (b) of this paragraph.

[53169] In particular, it was observed that in plants, especially in Arabidopsis thaliana, increasing or generating the activity of a gene product non-targeted with the activity of a “b1248-protein”, preferably being encoded by a gene comprising the nucleic acid sequence SEQ ID NO. 119135, preferably the coding region thereof, conferred the production of or the increase in linolenic acid compared with the wild type control.

[53170] The nucleic acid sequence of B1280 from Escherichia coli, e.g. as shown in the respective line in column 5 of Table I, application no. 9, has been published in B. And the activity of the gene product thereof is the activity of b1280-protein.

[53171] Accordingly, in one embodiment, the process of the present invention for producing linolenic acid in a non-human organism, like a microorganism or a plant or a part thereof, comprises increasing or generating the activity of a gene product with the activity of a gene product conferring the activity of “b1280-protein”, especially from Escherichia coli or its functional equivalent or its homolog, e.g. the increase of
[53172] (a) a gene product of a gene comprising the nucleic acid molecule as shown in the respective line in column 5 of Table I, application no. 9, preferably the coding region thereof, or a homolog or a fragment thereof, and being depicted in the same respective line as said B1280, or a functional equivalent or a homolog thereof as shown in column 8 of Table I, application no. 9, preferably the coding region thereof, particularly a homolog or functional equivalent as shown in column 8 of Table I B, application no. 9, and being depicted in the same respective line as said B1280, and preferably the activity is increased non-targeted, or
[53173] (b) a polypeptide comprising a polypeptide, a consensus sequence or at least a polypeptide motif as shown in the respective line in column 5 of Table II or in column 8 of Table IV, application no. 9, respectively, and being depicted in the same respective line as said B1280, or a functional equivalent or a homolog thereof as depicted in column 8 of Table II, application no. 9, preferably a homolog or functional equivalent as depicted in column 8 of Table II B, application no. 9, and being depicted in the same respective line as said B1280, and preferably the activity is increased non-targeted.

[53174] Accordingly, in one embodiment, the molecule which activity is to be increased in the process of the invention is the gene product with an activity as a “b1280-protein”, preferably it is the molecule of section (a) or (b) of this paragraph.

[53175] In particular, it was observed that in plants, especially in Arabidopsis thaliana, increasing or generating the activity of a gene product non-targeted with the activity of a “b1280-protein”, preferably being encoded by a gene comprising the nucleic acid sequence SEQ ID NO. 37573, preferably the coding region thereof, conferred the production of or the increase in linolenic acid compared with the wild type control.

[53176] The nucleic acid sequence of B1330 from Escherichia coli, e.g. as shown in the respective line in column 5 of Table I, application no. 9, has been published in B. And the activity of the gene product thereof is the activity of b1330-protein.

[53177] Accordingly, in one embodiment, the process of the present invention for producing linolenic acid in a non-human organism, like a microorganism or a plant or a part thereof, comprises increasing or generating the activity of a gene product with the activity of a gene product conferring the activity of “b1330-protein”, especially from Escherichia coli or its functional equivalent or its homolog, e.g. the increase of
[53178] (a) a gene product of a gene comprising the nucleic acid molecule as shown in the respective line in column 5 of Table I, application no. 9, preferably the coding region thereof, or a homolog or a fragment thereof, and being depicted in the same respective line as said B1330, or a functional equivalent or a homolog thereof as shown in column 8 of Table I, application no. 9, preferably the coding region thereof, particularly a homolog or functional equivalent as shown in column 8 of Table I B, application no. 9, and being depicted in the same respective line as said B1330, and preferably the activity is increased non-targeted, or
[53179] (b) a polypeptide comprising a polypeptide, a consensus sequence or at least a polypeptide motif as shown in the respective line in column 5 of Table II or in column 8 of Table IV, application no. 9, respectively, and being depicted in the same respective line as said B1330, or a functional equivalent or a homolog thereof as depicted in column 8 of Table II, application no. 9, preferably a homolog or functional equivalent as depicted in column 8 of Table II B, application no. 9, and being depicted in the same respective line as said B1330, and preferably the activity is increased non-targeted.

[53180] Accordingly, in one embodiment, the molecule which activity is to be increased in the process of the invention is the gene product with an activity as a “b1330-protein”, preferably it is the molecule of section (a) or (b) of this paragraph.

[53181] In particular, it was observed that in plants, especially in Arabidopsis thaliana, increasing or generating the activity of a gene product non-targeted with the activity of a “b1330-protein”, preferably being encoded by a gene comprising the nucleic acid sequence SEQ ID NO. 38226, preferably the coding region thereof, conferred the production of or the increase in linolenic acid compared with the wild type control.

[53182] The nucleic acid sequence of B1470 from Escherichia coli, e.g. as shown in the respective line in column 5 of Table I, application no. 9, has been published in B. And the activity of the gene product thereof is the activity of b1470-protein.

[53183] Accordingly, in one embodiment, the process of the present invention for producing linolenic acid in a non-human organism, like a microorganism or a plant or a part thereof, comprises increasing or generating the activity of a gene product with the activity of a gene product conferring the activity of “b1470-protein”, especially from Escherichia coli or its functional equivalent or its homolog, e.g. the increase of
[53184] (a) a gene product of a gene comprising the nucleic acid molecule as shown in the respective line in column 5 of Table I, application no. 9, preferably the coding region thereof, or a homolog or a fragment thereof, and being depicted in the same respective line as said B1470, or a functional equivalent or a homolog thereof as shown in column 8 of Table I, application no. 9, preferably the coding region thereof, particularly a homolog or functional equivalent as shown in column 8 of Table I B, application no. 9, and being depicted in the same respective line as said B1470, and preferably the activity is increased non-targeted, or
[53185] (b) a polypeptide comprising a polypeptide, a consensus sequence or at least a polypeptide motif as shown in the respective line in column 5 of Table II or in column 8 of Table IV, application no. 9, respectively, and being depicted in the same respective line as said B1470, or a functional equivalent or a homolog thereof as depicted in column 8 of Table II, application no. 9, preferably a homolog or functional equivalent as depicted in column 8 of Table II B, application no. 9, and being depicted in the same respective line as said B1470, and preferably the activity is increased non-targeted.

[53186] Accordingly, in one embodiment, the molecule which activity is to be increased in the process of the invention is the gene product with an activity as a “b1470-protein”, preferably it is the molecule of section (a) or (b) of this paragraph.

[53187] In particular, it was observed that in plants, especially in Arabidopsis thaliana, increasing or generating the activity of a gene product non-targeted with the activity of a “b1470-protein”, preferably being encoded by a gene comprising the nucleic acid sequence SEQ ID NO. 115056, preferably the coding region thereof, conferred the production of or the increase in linolenic acid compared with the wild type control.

[53188] The nucleic acid sequence of B1597 from Escherichia coli, e.g. as shown in the respective line in column 5 of Table I, application no. 9, has been published in B. And the activity of the gene product thereof is the activity of acid shock protein.

[53189] Accordingly, in one embodiment, the process of the present invention for producing linolenic acid in a non-human organism, like a microorganism or a plant or a part thereof, comprises increasing or generating the activity of a gene product with the activity of a gene product conferring the activity of “acid shock protein”, especially from Escherichia coli or its functional equivalent or its homolog, e.g. the increase of
[53190] (a) a gene product of a gene comprising the nucleic acid molecule as shown in the respective line in column 5 of Table I, application no. 9, preferably the coding region thereof, or a homolog or a fragment thereof, and being depicted in the same respective line as said B1597, or a functional equivalent or a homolog thereof as shown in column 8 of Table I, application no. 9, preferably the coding region thereof, particularly a homolog or functional equivalent as shown in column 8 of Table I B, application no. 9, and being depicted in the same respective line as said B1597, and preferably the activity is increased non-targeted, or
[53191] (b) a polypeptide comprising a polypeptide, a consensus sequence or at least a polypeptide motif as shown in the respective line in column 5 of Table II or in column 8 of Table IV, application no. 9, respectively, and being depicted in the same respective line as said B1597, or a functional equivalent or a homolog thereof as depicted in column 8 of Table II, application no. 9, preferably a homolog or functional equivalent as depicted in column 8 of Table II B, application no. 9, and being depicted in the same respective line as said B1597, and preferably the activity is increased non-targeted.

[53192] Accordingly, in one embodiment, the molecule which activity is to be increased in the process of the invention is the gene product with an activity as a “acid shock protein”, preferably it is the molecule of section (a) or (b) of this paragraph.

[53193] In particular, it was observed that in plants, especially in Arabidopsis thaliana, increasing or generating the activity of a gene product non-targeted with the activity of a “acid shock protein”, preferably being encoded by a gene comprising the nucleic acid sequence SEQ ID NO. 38300, preferably the coding region thereof, conferred the production of or the increase in linolenic acid compared with the wild type control.

[53194] The nucleic acid sequence of B1611 from Escherichia coli, e.g. as shown in the respective line in column 5 of Table I, application no. 9, has been published in B. And the activity of the gene product thereof is the activity of fumarate hydratase.

[53195] Accordingly, in one embodiment, the process of the present invention for producing linolenic acid in a non-human organism, like a microorganism or a plant or a part thereof, comprises increasing or generating the activity of a gene product with the activity of a gene product conferring the activity of “fumarate hydratase”, especially from Escherichia coli or its functional equivalent or its homolog, e.g. the increase of
[53196] (a) a gene product of a gene comprising the nucleic acid molecule as shown in the respective line in column 5 of Table I, application no. 9, preferably the coding region thereof, or a homolog or a fragment thereof, and being depicted in the same respective line as said B1611, or a functional equivalent or a homolog thereof as shown in column 8 of Table I, application no. 9, preferably the coding region thereof, particularly a homolog or functional equivalent as shown in column 8 of Table I B, application no. 9, and being depicted in the same respective line as said B1611, and preferably the activity is increased plastidic, or
[53197] (b) a polypeptide comprising a polypeptide, a consensus sequence or at least a polypeptide motif as shown in the respective line in column 5 of Table II or in column 8 of Table IV, application no. 9, respectively, and being depicted in the same respective line as said B1611, or a functional equivalent or a homolog thereof as depicted in column 8 of Table II, application no. 9, preferably a homolog or functional equivalent as depicted in column 8 of Table II B, application no. 9, and being depicted in the same respective line as said B1611, and preferably the activity is increased plastidic.

[53198] Accordingly, in one embodiment, the molecule which activity is to be increased in the process of the invention is the gene product with an activity as a “fumarate hydratase”, preferably it is the molecule of section (a) or (b) of this paragraph.

[53199] In particular, it was observed that in plants, especially in Arabidopsis thaliana, increasing or generating the activity of a gene product plastidic with the activity of a “fumarate hydratase”, preferably being encoded by a gene comprising the nucleic acid sequence SEQ ID NO. 115064, preferably the coding region thereof, conferred the production of or the increase in linolenic acid compared with the wild type control.

[53200] The nucleic acid sequence of B1627 from Escherichia coli, e.g. as shown in the respective line in column 5 of Table I, application no. 9, has been published in B. And the activity of the gene product thereof is the activity of electron transport complex protein.

[53201] Accordingly, in one embodiment, the process of the present invention for producing linolenic acid in a non-human organism, like a microorganism or a plant or a part thereof, comprises increasing or generating the activity of a gene product with the activity of a gene product conferring the activity of “electron transport complex protein”, especially from Escherichia coli or its functional equivalent or its homolog, e.g. the increase of
[53202] (a) a gene product of a gene comprising the nucleic acid molecule as shown in the respective line in column 5 of Table I, application no. 9, preferably the coding region thereof, or a homolog or a fragment thereof, and being depicted in the same respective line as said B1627, or a functional equivalent or a homolog thereof as shown in column 8 of Table I, application no. 9, preferably the coding region thereof, particularly a homolog or functional equivalent as shown in column 8 of Table I B, application no. 9, and being depicted in the same respective line as said B1627, and preferably the activity is increased non-targeted, or
[53203] (b) a polypeptide comprising a polypeptide, a consensus sequence or at least a polypeptide motif as shown in the respective line in column 5 of Table II or in column 8 of Table IV, application no. 9, respectively, and being depicted in the same respective line as said B1627, or a functional equivalent or a homolog thereof as depicted in column 8 of Table II, application no. 9, preferably a homolog or functional equivalent as depicted in column 8 of Table II B, application no. 9, and being depicted in the same respective line as said B1627, and preferably the activity is increased non-targeted.

[53204] Accordingly, in one embodiment, the molecule which activity is to be increased in the process of the invention is the gene product with an activity as a “electron transport complex protein”, preferably it is the molecule of section (a) or (b) of this paragraph.

[53205] In particular, it was observed that in plants, especially in Arabidopsis thaliana, increasing or generating the activity of a gene product non-targeted with the activity of a “electron transport complex protein”, preferably being encoded by a gene comprising the nucleic acid sequence SEQ ID NO. 38345, preferably the coding region thereof, conferred the production of or the increase in linolenic acid compared with the wild type control.

[53206] The nucleic acid sequence of B1670 from Escherichia coli, e.g. as shown in the respective line in column 5 of Table I, application no. 9, has been published in B. And the activity of the gene product thereof is the activity of b1670-protein.

[53207] Accordingly, in one embodiment, the process of the present invention for producing linolenic acid in a non-human organism, like a microorganism or a plant or a part thereof, comprises increasing or generating the activity of a gene product with the activity of a gene product conferring the activity of “b1670-protein”, especially from Escherichia coli or its functional equivalent or its homolog, e.g. the increase of
[53208] (a) a gene product of a gene comprising the nucleic acid molecule as shown in the respective line in column 5 of Table I, application no. 9, preferably the coding region thereof, or a homolog or a fragment thereof, and being depicted in the same respective line as said B1670, or a functional equivalent or a homolog thereof as shown in column 8 of Table I, application no. 9, preferably the coding region thereof, particularly a homolog or functional equivalent as shown in column 8 of Table I B, application no. 9, and being depicted in the same respective line as said B1670, and preferably the activity is increased non-targeted, or
[53209] (b) a polypeptide comprising a polypeptide, a consensus sequence or at least a polypeptide motif as shown in the respective line in column 5 of Table II or in column 8 of Table IV, application no. 9, respectively, and being depicted in the same respective line as said B1670, or a functional equivalent or a homolog thereof as depicted in column 8 of Table II, application no. 9, preferably a homolog or functional equivalent as depicted in column 8 of Table II B, application no. 9, and being depicted in the same respective line as said B1670, and preferably the activity is increased non-targeted.

[53210] Accordingly, in one embodiment, the molecule which activity is to be increased in the process of the invention is the gene product with an activity as a “b1670-protein”, preferably it is the molecule of section (a) or (b) of this paragraph.

[53211] In particular, it was observed that in plants, especially in Arabidopsis thaliana, increasing or generating the activity of a gene product non-targeted with the activity of a “b1670-protein”, preferably being encoded by a gene comprising the nucleic acid sequence SEQ ID NO. 78753, preferably the coding region thereof, conferred the production of or the increase in linolenic acid compared with the wild type control.

[53212] The nucleic acid sequence of B1672 from Escherichia coli, e.g. as shown in the respective line in column 5 of Table I, application no. 9, has been published in B. And the activity of the gene product thereof is the activity of b1672-protein.

[53213] Accordingly, in one embodiment, the process of the present invention for producing linolenic acid in a non-human organism, like a microorganism or a plant or a part thereof, comprises increasing or generating the activity of a gene product with the activity of a gene product conferring the activity of “b1672-protein”, especially from Escherichia coli or its functional equivalent or its homolog, e.g. the increase of
[53214] (a) a gene product of a gene comprising the nucleic acid molecule as shown in the respective line in column 5 of Table I, application no. 9, preferably the coding region thereof, or a homolog or a fragment thereof, and being depicted in the same respective line as said B1672, or a functional equivalent or a homolog thereof as shown in column 8 of Table I, application no. 9, preferably the coding region thereof, particularly a homolog or functional equivalent as shown in column 8 of Table I B, application no. 9, and being depicted in the same respective line as said B1672, and preferably the activity is increased non-targeted, or
[53215] (b) a polypeptide comprising a polypeptide, a consensus sequence or at least a polypeptide motif as shown in the respective line in column 5 of Table II or in column 8 of Table IV, application no. 9, respectively, and being depicted in the same respective line as said B1672, or a functional equivalent or a homolog thereof as depicted in column 8 of Table II, application no. 9, preferably a homolog or functional equivalent as depicted in column 8 of Table II B, application no. 9, and being depicted in the same respective line as said B1672, and preferably the activity is increased non-targeted.

[53216] Accordingly, in one embodiment, the molecule which activity is to be increased in the process of the invention is the gene product with an activity as a “b1672-protein”, preferably it is the molecule of section (a) or (b) of this paragraph.

[53217] In particular, it was observed that in plants, especially in Arabidopsis thaliana, increasing or generating the activity of a gene product non-targeted with the activity of a “b1672-protein”, preferably being encoded by a gene comprising the nucleic acid sequence SEQ ID NO. 78771, preferably the coding region thereof, conferred the production of or the increase in linolenic acid compared with the wild type control.

[53218] The nucleic acid sequence of B1837 from Escherichia coli, e.g. as shown in the respective line in column 5 of Table I, application no. 9, has been published in B. And the activity of the gene product thereof is the activity of b1837-protein.

[53219] Accordingly, in one embodiment, the process of the present invention for producing linolenic acid in a non-human organism, like a microorganism or a plant or a part thereof, comprises increasing or generating the activity of a gene product with the activity of a gene product conferring the activity of “b1837-protein”, especially from Escherichia coli or its functional equivalent or its homolog, e.g. the increase of
[53220] (a) a gene product of a gene comprising the nucleic acid molecule as shown in the respective line in column 5 of Table I, application no. 9, preferably the coding region thereof, or a homolog or a fragment thereof, and being depicted in the same respective line as said B1837, or a functional equivalent or a homolog thereof as shown in column 8 of Table I, application no. 9, preferably the coding region thereof, particularly a homolog or functional equivalent as shown in column 8 of Table I B, application no. 9, and being depicted in the same respective line as said B1837, and preferably the activity is increased non-targeted, or
[53221] (b) a polypeptide comprising a polypeptide, a consensus sequence or at least a polypeptide motif as shown in the respective line in column 5 of Table II or in column 8 of Table IV, application no. 9, respectively, and being depicted in the same respective line as said B1837, or a functional equivalent or a homolog thereof as depicted in column 8 of Table II, application no. 9, preferably a homolog or functional equivalent as depicted in column 8 of Table II B, application no. 9, and being depicted in the same respective line as said B1837, and preferably the activity is increased non-targeted.

[53222] Accordingly, in one embodiment, the molecule which activity is to be increased in the process of the invention is the gene product with an activity as a “b1837-protein”, preferably it is the molecule of section (a) or (b) of this paragraph.

[53223] In particular, it was observed that in plants, especially in Arabidopsis thaliana, increasing or generating the activity of a gene product non-targeted with the activity of a “b1837-protein”, preferably being encoded by a gene comprising the nucleic acid sequence SEQ ID NO. 78953, preferably the coding region thereof, conferred the production of or the increase in linolenic acid compared with the wild type control.

[53224] The nucleic acid sequence of B2032 from Escherichia coli, e.g. as shown in the respective line in column 5 of Table I, application no. 9, has been published in B. And the activity of the gene product thereof is the activity of b2032-protein.

[53225] Accordingly, in one embodiment, the process of the present invention for producing linolenic acid in a non-human organism, like a microorganism or a plant or a part thereof, comprises increasing or generating the activity of a gene product with the activity of a gene product conferring the activity of “b2032-protein”, especially from Escherichia coli or its functional equivalent or its homolog, e.g. the increase of
[53226] (a) a gene product of a gene comprising the nucleic acid molecule as shown in the respective line in column 5 of Table I, application no. 9, preferably the coding region thereof, or a homolog or a fragment thereof, and being depicted in the same respective line as said B2032, or a functional equivalent or a homolog thereof as shown in column 8 of Table I, application no. 9, preferably the coding region thereof, particularly a homolog or functional equivalent as shown in column 8 of Table I B, application no. 9, and being depicted in the same respective line as said B2032, and preferably the activity is increased non-targeted, or
[53227] (b) a polypeptide comprising a polypeptide, a consensus sequence or at least a polypeptide motif as shown in the respective line in column 5 of Table II or in column 8 of Table IV, application no. 9, respectively, and being depicted in the same respective line as said B2032, or a functional equivalent or a homolog thereof as depicted in column 8 of Table II, application no. 9, preferably a homolog or functional equivalent as depicted in column 8 of Table II B, application no. 9, and being depicted in the same respective line as said B2032, and preferably the activity is increased non-targeted.

[53228] Accordingly, in one embodiment, the molecule which activity is to be increased in the process of the invention is the gene product with an activity as a “b2032-protein”, preferably it is the molecule of section (a) or (b) of this paragraph.

[53229] In particular, it was observed that in plants, especially in Arabidopsis thaliana, increasing or generating the activity of a gene product non-targeted with the activity of a “b2032-protein”, preferably being encoded by a gene comprising the nucleic acid sequence SEQ ID NO. 8920, preferably the coding region thereof, conferred the production of or the increase in linolenic acid compared with the wild type control.

[53230] The nucleic acid sequence of B2107 from Escherichia coli, e.g. as shown in the respective line in column 5 of Table I, application no. 9, has been published in B. And the activity of the gene product thereof is the activity of b2107-protein.

[53231] Accordingly, in one embodiment, the process of the present invention for producing linolenic acid in a non-human organism, like a microorganism or a plant or a part thereof, comprises increasing or generating the activity of a gene product with the activity of a gene product conferring the activity of “b2107-protein”, especially from Escherichia coli or its functional equivalent or its homolog, e.g. the increase of
[53232] (a) a gene product of a gene comprising the nucleic acid molecule as shown in the respective line in column 5 of Table I, application no. 9, preferably the coding region thereof, or a homolog or a fragment thereof, and being depicted in the same respective line as said B2107, or a functional equivalent or a homolog thereof as shown in column 8 of Table I, application no. 9, preferably the coding region thereof, particularly a homolog or functional equivalent as shown in column 8 of Table I B, application no. 9, and being depicted in the same respective line as said B2107, and preferably the activity is increased non-targeted, or
[53233] (b) a polypeptide comprising a polypeptide, a consensus sequence or at least a polypeptide motif as shown in the respective line in column 5 of Table II or in column 8 of Table IV, application no. 9, respectively, and being depicted in the same respective line as said B2107, or a functional equivalent or a homolog thereof as depicted in column 8 of Table II, application no. 9, preferably a homolog or functional equivalent as depicted in column 8 of Table II B, application no. 9, and being depicted in the same respective line as said B2107, and preferably the activity is increased non-targeted.

[53234] Accordingly, in one embodiment, the molecule which activity is to be increased in the process of the invention is the gene product with an activity as a “b2107-protein”, preferably it is the molecule of section (a) or (b) of this paragraph.

[53235] In particular, it was observed that in plants, especially in Arabidopsis thaliana, increasing or generating the activity of a gene product non-targeted with the activity of a “b2107-protein”, preferably being encoded by a gene comprising the nucleic acid sequence SEQ ID NO. 39002, preferably the coding region thereof, conferred the production of or the increase in linolenic acid compared with the wild type control.

[53236] The nucleic acid sequence of B2399 from Escherichia coli, e.g. as shown in the respective line in column 5 of Table I, application no. 9, has been published in B. And the activity of the gene product thereof is the activity of b2399-protein.

[53237] Accordingly, in one embodiment, the process of the present invention for producing linolenic acid in a non-human organism, like a microorganism or a plant or a part thereof, comprises increasing or generating the activity of a gene product with the activity of a gene product conferring the activity of “b2399-protein”, especially from Escherichia coli or its functional equivalent or its homolog, e.g. the increase of
[53238] (a) a gene product of a gene comprising the nucleic acid molecule as shown in the respective line in column 5 of Table I, application no. 9, preferably the coding region thereof, or a homolog or a fragment thereof, and being depicted in the same respective line as said B2399, or a functional equivalent or a homolog thereof as shown in column 8 of Table I, application no. 9, preferably the coding region thereof, particularly a homolog or functional equivalent as shown in column 8 of Table I B, application no. 9, and being depicted in the same respective line as said B2399, and preferably the activity is increased non-targeted, or
[53239] (b) a polypeptide comprising a polypeptide, a consensus sequence or at least a polypeptide motif as shown in the respective line in column 5 of Table II or in column 8 of Table IV, application no. 9, respectively, and being depicted in the same respective line as said functional2399, or a functional equivalent or a homolog thereof as depicted in column 8 of Table II, application no. 9, preferably a homolog or functional equivalent as depicted in column 8 of Table II B, application no. 9, and being depicted in the same respective line as said B2399, and preferably the activity is increased non-targeted.

[53240] Accordingly, in one embodiment, the molecule which activity is to be increased in the process of the invention is the gene product with an activity as a “b2399-protein”, preferably it is the molecule of section (a) or (b) of this paragraph.

[53241] In particular, it was observed that in plants, especially in Arabidopsis thaliana, increasing or generating the activity of a gene product non-targeted with the activity of a “b2399-protein”, preferably being encoded by a gene comprising the nucleic acid sequence SEQ ID NO. 39237, preferably the coding region thereof, conferred the production of or the increase in linolenic acid compared with the wild type control.

[53242] The nucleic acid sequence of B2439 from Escherichia coli, e.g. as shown in the respective line in column 5 of Table I, application no. 9, has been published in B. And the activity of the gene product thereof is the activity of ethanolamine utilization protein.

[53243] Accordingly, in one embodiment, the process of the present invention for producing linolenic acid in a non-human organism, like a microorganism or a plant or a part thereof, comprises increasing or generating the activity of a gene product with the activity of a gene product conferring the activity of “ethanolamine utilization protein”, especially from Escherichia coli or its functional equivalent or its homolog, e.g. the increase of
[53244] (a) a gene product of a gene comprising the nucleic acid molecule as shown in the respective line in column 5 of Table I, application no. 9, preferably the coding region thereof, or a homolog or a fragment thereof, and being depicted in the same respective line as said B2439, or a functional equivalent or a homolog thereof as shown in column 8 of Table I, application no. 9, preferably the coding region thereof, particularly a homolog or functional equivalent as shown in column 8 of Table I B, application no. 9, and being depicted in the same respective line as said B2439, and preferably the activity is increased non-targeted, or
[53245] (b) a polypeptide comprising a polypeptide, a consensus sequence or at least a polypeptide motif as shown in the respective line in column 5 of Table II or in column 8 of Table IV, application no. 9, respectively, and being depicted in the same respective line as said B2439, or a functional equivalent or a homolog thereof as depicted in column 8 of Table II, application no. 9, preferably a homolog or functional equivalent as depicted in column 8 of Table II B, application no. 9, and being depicted in the same respective line as said B2439, and preferably the activity is increased non-targeted.

[53246] Accordingly, in one embodiment, the molecule which activity is to be increased in the process of the invention is the gene product with an activity as a “ethanolamine utilization protein”, preferably it is the molecule of section (a) or (b) of this paragraph.

[53247] In particular, it was observed that in plants, especially in Arabidopsis thaliana, increasing or generating the activity of a gene product non-targeted with the activity of a “ethanolamine utilization protein”, preferably being encoded by a gene comprising the nucleic acid sequence SEQ ID NO. 115628, preferably the coding region thereof, conferred the production of or the increase in linolenic acid compared with the wild type control.

[53248] The nucleic acid sequence of B2474 from Escherichia coli, e.g. as shown in the respective line in column 5 of Table I, application no. 9, has been published in B. And the activity of the gene product thereof is the activity of b2474-protein.

[53249] Accordingly, in one embodiment, the process of the present invention for producing linolenic acid in a non-human organism, like a microorganism or a plant or a part thereof, comprises increasing or generating the activity of a gene product with the activity of a gene product conferring the activity of “b2474-protein”, especially from Escherichia coli or its functional equivalent or its homolog, e.g. the increase of
[53250] (a) a gene product of a gene comprising the nucleic acid molecule as shown in the respective line in column 5 of Table I, application no. 9, preferably the coding region thereof, or a homolog or a fragment thereof, and being depicted in the same respective line as said B2474, or a functional equivalent or a homolog thereof as shown in column 8 of Table I, application no. 9, preferably the coding region thereof, particularly a homolog or functional equivalent as shown in column 8 of Table I B, application no. 9, and being depicted in the same respective line as said B2474, and preferably the activity is increased non-targeted, or
[53251] (b) a polypeptide comprising a polypeptide, a consensus sequence or at least a polypeptide motif as shown in the respective line in column 5 of Table II or in column 8 of Table IV, application no. 9, respectively, and being depicted in the same respective line as said B2474, or a functional equivalent or a homolog thereof as depicted in column 8 of Table II, application no. 9, preferably a homolog or functional equivalent as depicted in column 8 of Table II B, application no. 9, and being depicted in the same respective line as said B2474, and preferably the activity is increased non-targeted.

[53252] Accordingly, in one embodiment, the molecule which activity is to be increased in the process of the invention is the gene product with an activity as a “b2474-protein”, preferably it is the molecule of section (a) or (b) of this paragraph.

[53253] In particular, it was observed that in plants, especially in Arabidopsis thaliana, increasing or generating the activity of a gene product non-targeted with the activity of a “b2474-protein”, preferably being encoded by a gene comprising the nucleic acid sequence SEQ ID NO. 40329, preferably the coding region thereof, conferred the production of or the increase in linolenic acid compared with the wild type control.

[53254] The nucleic acid sequence of B2613 from Escherichia coli, e.g. as shown in the respective line in column 5 of Table I, application no. 9, has been published in B. And the activity of the gene product thereof is the activity of b2613-protein.

[53255] Accordingly, in one embodiment, the process of the present invention for producing linolenic acid in a non-human organism, like a microorganism or a plant or a part thereof, comprises increasing or generating the activity of a gene product with the activity of a gene product conferring the activity of “b2613-protein”, especially from Escherichia coli or its functional equivalent or its homolog, e.g. the increase of
[53256] (a) a gene product of a gene comprising the nucleic acid molecule as shown in the respective line in column 5 of Table I, application no. 9, preferably the coding region thereof, or a homolog or a fragment thereof, and being depicted in the same respective line as said B2613, or a functional equivalent or a homolog thereof as shown in column 8 of Table I, application no. 9, preferably the coding region thereof, particularly a homolog or functional equivalent as shown in column 8 of Table I B, application no. 9, and being depicted in the same respective line as said B2613, and preferably the activity is increased non-targeted, or
[53257] (b) a polypeptide comprising a polypeptide, a consensus sequence or at least a polypeptide motif as shown in the respective line in column 5 of Table II or in column 8 of Table IV, application no. 9, respectively, and being depicted in the same respective line as said B2613, or a functional equivalent or a homolog thereof as depicted in column 8 of Table II, application no. 9, preferably a homolog or functional equivalent as depicted in column 8 of Table II B, application no. 9, and being depicted in the same respective line as said B2613, and preferably the activity is increased non-targeted.

[53258] Accordingly, in one embodiment, the molecule which activity is to be increased in the process of the invention is the gene product with an activity as a “b2613-protein”, preferably it is the molecule of section (a) or (b) of this paragraph.

[53259] In particular, it was observed that in plants, especially in Arabidopsis thaliana, increasing or generating the activity of a gene product non-targeted with the activity of a “b2613-protein”, preferably being encoded by a gene comprising the nucleic acid sequence SEQ ID NO. 40665, preferably the coding region thereof, conferred the production of or the increase in linolenic acid compared with the wild type control.

[53260] The nucleic acid sequence of B2682 from Escherichia coli, e.g. as shown in the respective line in column 5 of Table I, application no. 9, has been published in B. And the activity of the gene product thereof is the activity of b2682-protein.

[53261] Accordingly, in one embodiment, the process of the present invention for producing linolenic acid in a non-human organism, like a microorganism or a plant or a part thereof, comprises increasing or generating the activity of a gene product with the activity of a gene product conferring the activity of “b2682-protein”, especially from Escherichia coli or its functional equivalent or its homolog, e.g. the increase of
[53262] (a) a gene product of a gene comprising the nucleic acid molecule as shown in the respective line in column 5 of Table I, application no. 9, preferably the coding region thereof, or a homolog or a fragment thereof, and being depicted in the same respective line as said B2682, or a functional equivalent or a homolog thereof as shown in column 8 of Table I, application no. 9, preferably the coding region thereof, particularly a homolog or functional equivalent as shown in column 8 of Table I B, application no. 9, and being depicted in the same respective line as said B2682, and preferably the activity is increased non-targeted, or
[53263] (b) a polypeptide comprising a polypeptide, a consensus sequence or at least a polypeptide motif as shown in the respective line in column 5 of Table II or in column 8 of Table IV, application no. 9, respectively, and being depicted in the same respective line as said B2682, or a functional equivalent or a homolog thereof as depicted in column 8 of Table II, application no. 9, preferably a homolog or functional equivalent as depicted in column 8 of Table II B, application no. 9, and being depicted in the same respective line as said B2682, and preferably the activity is increased non-targeted.

[53264] Accordingly, in one embodiment, the molecule which activity is to be increased in the process of the invention is the gene product with an activity as a “b2682-protein”, preferably it is the molecule of section (a) or (b) of this paragraph.

[53265] In particular, it was observed that in plants, especially in Arabidopsis thaliana, increasing or generating the activity of a gene product non-targeted with the activity of a “b2682-protein”, preferably being encoded by a gene comprising the nucleic acid sequence SEQ ID NO. 115655, preferably the coding region thereof, conferred the production of or the increase in linolenic acid compared with the wild type control.

[53266] The nucleic acid sequence of B2790 from Escherichia coli, e.g. as shown in the respective line in column 5 of Table I, application no. 9, has been published in B. And the activity of the gene product thereof is the activity of flavodoxin.

[53267] Accordingly, in one embodiment, the process of the present invention for producing linolenic acid in a non-human organism, like a microorganism or a plant or a part thereof, comprises increasing or generating the activity of a gene product with the activity of a gene product conferring the activity of “flavodoxin”, especially from Escherichia coli or its functional equivalent or its homolog, e.g. the increase of
[53268] (a) a gene product of a gene comprising the nucleic acid molecule as shown in the respective line in column 5 of Table I, application no. 9, preferably the coding region thereof, or a homolog or a fragment thereof, and being depicted in the same respective line as said B2790, or a functional equivalent or a homolog thereof as shown in column 8 of Table I, application no. 9, preferably the coding region thereof, particularly a homolog or functional equivalent as shown in column 8 of Table I B, application no. 9, and being depicted in the same respective line as said B2790, and preferably the activity is increased non-targeted, or
[53269] (b) a polypeptide comprising a polypeptide, a consensus sequence or at least a polypeptide motif as shown in the respective line in column 5 of Table II or in column 8 of Table IV, application no. 9, respectively, and being depicted in the same respective line as said B2790, or a functional equivalent or a homolog thereof as depicted in column 8 of Table II, application no. 9, preferably a homolog or functional equivalent as depicted in column 8 of Table II B, application no. 9, and being depicted in the same respective line as said B2790, and preferably the activity is increased non-targeted.

[53270] Accordingly, in one embodiment, the molecule which activity is to be increased in the process of the invention is the gene product with an activity as a “flavodoxin”, preferably it is the molecule of section (a) or (b) of this paragraph.

[53271] In particular, it was observed that in plants, especially in Arabidopsis thaliana, increasing or generating the activity of a gene product non-targeted with the activity of a “flavodoxin”, preferably being encoded by a gene comprising the nucleic acid sequence SEQ ID NO. 115719, preferably the coding region thereof, conferred the production of or the increase in linolenic acid compared with the wild type control.

[53272] The nucleic acid sequence of B2836 from Escherichia coli, e.g. as shown in the respective line in column 5 of Table I, application no. 9, has been published in B. And the activity of the gene product thereof is the activity of AAS bifunctional protein.

[53273] Accordingly, in one embodiment, the process of the present invention for producing linolenic acid in a non-human organism, like a microorganism or a plant or a part thereof, comprises increasing or generating the activity of a gene product with the activity of a gene product conferring the activity of “AAS bifunctional protein”, especially from Escherichia coli or its functional equivalent or its homolog, e.g. the increase of
[53274] (a) a gene product of a gene comprising the nucleic acid molecule as shown in the respective line in column 5 of Table I, application no. 9, preferably the coding region thereof, or a homolog or a fragment thereof, and being depicted in the same respective line as said B2836, or a functional equivalent or a homolog thereof as shown in column 8 of Table I, application no. 9, preferably the coding region thereof, particularly a homolog or functional equivalent as shown in column 8 of Table I B, application no. 9, and being depicted in the same respective line as said B2836, and preferably the activity is increased plastidic, or
[53275] (b) a polypeptide comprising a polypeptide, a consensus sequence or at least a polypeptide motif as shown in the respective line in column 5 of Table II or in column 8 of Table IV, application no. 9, respectively, and being depicted in the same respective line as said B2836, or a functional equivalent or a homolog thereof as depicted in column 8 of Table II, application no. 9, preferably a homolog or functional equivalent as depicted in column 8 of Table II B, application no. 9, and being depicted in the same respective line as said B2836, and preferably the activity is increased plastidic.

[53276] Accordingly, in one embodiment, the molecule which activity is to be increased in the process of the invention is the gene product with an activity as a “AAS bifunctional protein”, preferably it is the molecule of section (a) or (b) of this paragraph.

[53277] In particular, it was observed that in plants, especially in Arabidopsis thaliana, increasing or generating the activity of a gene product plastidic with the activity of a “AAS bifunctional protein”, preferably being encoded by a gene comprising the nucleic acid sequence SEQ ID NO. 115791, preferably the coding region thereof, conferred the production of or the increase in linolenic acid compared with the wild type control.

[53278] The nucleic acid sequence of B3379 from Escherichia coli, e.g. as shown in the respective line in column 5 of Table I, application no. 9, has been published in B. And the activity of the gene product thereof is the activity of phosphotriesterase.

[53279] Accordingly, in one embodiment, the process of the present invention for producing linolenic acid in a non-human organism, like a microorganism or a plant or a part thereof, comprises increasing or generating the activity of a gene product with the activity of a gene product conferring the activity of “phosphotriesterase”, especially from Escherichia coli or its functional equivalent or its homolog, e.g. the increase of
[53280] (a) a gene product of a gene comprising the nucleic acid molecule as shown in the respective line in column 5 of Table I, application no. 9, preferably the coding region thereof, or a homolog or a fragment thereof, and being depicted in the same respective line as said B3379, or a functional equivalent or a homolog thereof as shown in column 8 of Table I, application no. 9, preferably the coding region thereof, particularly a homolog or functional equivalent as shown in column 8 of Table I B, application no. 9, and being depicted in the same respective line as said B3379, and preferably the activity is increased non-targeted, or
[53281] (b) a polypeptide comprising a polypeptide, a consensus sequence or at least a polypeptide motif as shown in the respective line in column 5 of Table II or in column 8 of Table IV, application no. 9, respectively, and being depicted in the same respective line as said B3379, or a functional equivalent or a homolog thereof as depicted in column 8 of Table II, application no. 9, preferably a homolog or functional equivalent as depicted in column 8 of Table II B, application no. 9, and being depicted in the same respective line as said B3379, and preferably the activity is increased non-targeted.

[53282] Accordingly, in one embodiment, the molecule which activity is to be increased in the process of the invention is the gene product with an activity as a “phosphotriesterase”, preferably it is the molecule of section (a) or (b) of this paragraph.

[53283] In particular, it was observed that in plants, especially in Arabidopsis thaliana, increasing or generating the activity of a gene product non-targeted with the activity of a “phosphotriesterase”, preferably being encoded by a gene comprising the nucleic acid sequence SEQ ID NO. 116110, preferably the coding region thereof, conferred the production of or the increase in linolenic acid compared with the wild type control.

[53284] The nucleic acid sequence of B3442 from Escherichia coli, e.g. as shown in the respective line in column 5 of Table I, application no. 9, has been published in B. And the activity of the gene product thereof is the activity of b3442-protein.

[53285] Accordingly, in one embodiment, the process of the present invention for producing linolenic acid in a non-human organism, like a microorganism or a plant or a part thereof, comprises increasing or generating the activity of a gene product with the activity of a gene product conferring the activity of “b3442-protein”, especially from Escherichia coli or its functional equivalent or its homolog, e.g. the increase of
[53286] (a) a gene product of a gene comprising the nucleic acid molecule as shown in the respective line in column 5 of Table I, application no. 9, preferably the coding region thereof, or a homolog or a fragment thereof, and being depicted in the same respective line as said B3442, or a functional equivalent or a homolog thereof as shown in column 8 of Table I, application no. 9, preferably the coding region thereof, particularly a homolog or functional equivalent as shown in column 8 of Table I B, application no. 9, and being depicted in the same respective line as said B3442, and preferably the activity is increased non-targeted, or
[53287] (b) a polypeptide comprising a polypeptide, a consensus sequence or at least a polypeptide motif as shown in the respective line in column 5 of Table II or in column 8 of Table IV, application no. 9, respectively, and being depicted in the same respective line as said B3442, or a functional equivalent or a homolog thereof as depicted in column 8 of Table II, application no. 9, preferably a homolog or functional equivalent as depicted in column 8 of Table II B, application no. 9, and being depicted in the same respective line as said B3442, and preferably the activity is increased non-targeted.

[53288] Accordingly, in one embodiment, the molecule which activity is to be increased in the process of the invention is the gene product with an activity as a “b3442-protein”, preferably it is the molecule of section (a) or (b) of this paragraph.

[53289] In particular, it was observed that in plants, especially in Arabidopsis thaliana, increasing or generating the activity of a gene product non-targeted with the activity of a “b3442-protein”, preferably being encoded by a gene comprising the nucleic acid sequence SEQ ID NO. 94380, preferably the coding region thereof, conferred the production of or the increase in linolenic acid compared with the wild type control.

[53290] The nucleic acid sequence of B3534 from Escherichia coli, e.g. as shown in the respective line in column 5 of Table I, application no. 9, has been published in B. And the activity of the gene product thereof is the activity of b3534-protein.

[53291] Accordingly, in one embodiment, the process of the present invention for producing linolenic acid in a non-human organism, like a microorganism or a plant or a part thereof, comprises increasing or generating the activity of a gene product with the activity of a gene product conferring the activity of “b3534-protein”, especially from Escherichia coli or its functional equivalent or its homolog, e.g. the increase of
[53292] (a) a gene product of a gene comprising the nucleic acid molecule as shown in the respective line in column 5 of Table I, application no. 9, preferably the coding region thereof, or a homolog or a fragment thereof, and being depicted in the same respective line as said B3534, or a functional equivalent or a homolog thereof as shown in column 8 of Table I, application no. 9, preferably the coding region thereof, particularly a homolog or functional equivalent as shown in column 8 of Table I B, application no. 9, and being depicted in the same respective line as said B3534, and preferably the activity is increased plastidic, or
[53293] (b) a polypeptide comprising a polypeptide, a consensus sequence or at least a polypeptide motif as shown in the respective line in column 5 of Table II or in column 8 of Table IV, application no. 9, respectively, and being depicted in the same respective line as said B3534, or a functional equivalent or a homolog thereof as depicted in column 8 of Table II, application no. 9, preferably a homolog or functional equivalent as depicted in column 8 of Table II B, application no. 9, and being depicted in the same respective line as said B3534, and preferably the activity is increased plastidic.

[53294] Accordingly, in one embodiment, the molecule which activity is to be increased in the process of the invention is the gene product with an activity as a “b3534-protein”, preferably it is the molecule of section (a) or (b) of this paragraph.

[53295] In particular, it was observed that in plants, especially in Arabidopsis thaliana, increasing or generating the activity of a gene product plastidic with the activity of a “b3534-protein”, preferably being encoded by a gene comprising the nucleic acid sequence SEQ ID NO. 119181, preferably the coding region thereof, conferred the production of or the increase in linolenic acid compared with the wild type control.

[53296] The nucleic acid sequence of B3823 from Escherichia coli, e.g. as shown in the respective line in column 5 of Table I, application no. 9, has been published in B. And the activity of the gene product thereof is the activity of threonine efflux protein.

[53297] Accordingly, in one embodiment, the process of the present invention for producing linolenic acid in a non-human organism, like a microorganism or a plant or a part thereof, comprises increasing or generating the activity of a gene product with the activity of a gene product conferring the activity of “threonine efflux protein”, especially from Escherichia coli or its functional equivalent or its homolog, e.g. the increase of
[53298] (a) a gene product of a gene comprising the nucleic acid molecule as shown in the respective line in column 5 of Table I, application no. 9, preferably the coding region thereof, or a homolog or a fragment thereof, and being depicted in the same respective line as said B3823, or a functional equivalent or a homolog thereof as shown in column 8 of Table I, application no. 9, preferably the coding region thereof, particularly a homolog or functional equivalent as shown in column 8 of Table I B, application no. 9, and being depicted in the same respective line as said B3823, and preferably the activity is increased non-targeted, or
[53299] (b) a polypeptide comprising a polypeptide, a consensus sequence or at least a polypeptide motif as shown in the respective line in column 5 of Table II or in column 8 of Table IV, application no. 9, respectively, and being depicted in the same respective line as said B3823, or a functional equivalent or a homolog thereof as depicted in column 8 of Table II, application no. 9, preferably a homolog or functional equivalent as depicted in column 8 of Table II B, application no. 9, and being depicted in the same respective line as said B3823, and preferably the activity is increased non-targeted.

[53300] Accordingly, in one embodiment, the molecule which activity is to be increased in the process of the invention is the gene product with an activity as a “threonine efflux protein”, preferably it is the molecule of section (a) or (b) of this paragraph.

[53301] In particular, it was observed that in plants, especially in Arabidopsis thaliana, increasing or generating the activity of a gene product non-targeted with the activity of a “threonine efflux protein”, preferably being encoded by a gene comprising the nucleic acid sequence SEQ ID NO. 10726, preferably the coding region thereof, conferred the production of or the increase in linolenic acid compared with the wild type control.

[53302] The nucleic acid sequence of B4023 from Escherichia coli, e.g. as shown in the respective line in column 5 of Table I, application no. 9, has been published in B. And the activity of the gene product thereof is the activity of b4023-protein.

[53303] Accordingly, in one embodiment, the process of the present invention for producing linolenic acid in a non-human organism, like a microorganism or a plant or a part thereof, comprises increasing or generating the activity of a gene product with the activity of a gene product conferring the activity of “b4023-protein”, especially from Escherichia coli or its functional equivalent or its homolog, e.g. the increase of
[53304] (a) a gene product of a gene comprising the nucleic acid molecule as shown in the respective line in column 5 of Table I, application no. 9, preferably the coding region thereof, or a homolog or a fragment thereof, and being depicted in the same respective line as said B4023, or a functional equivalent or a homolog thereof as shown in column 8 of Table I, application no. 9, preferably the coding region thereof, particularly a homolog or functional equivalent as shown in column 8 of Table I B, application no. 9, and being depicted in the same respective line as said B4023, and preferably the activity is increased non-targeted, or
[53305] (b) a polypeptide comprising a polypeptide, a consensus sequence or at least a polypeptide motif as shown in the respective line in column 5 of Table II or in column 8 of Table IV, application no. 9, respectively, and being depicted in the same respective line as said B4023, or a functional equivalent or a homolog thereof as depicted in column 8 of Table II, application no. 9, preferably a homolog or functional equivalent as depicted in column 8 of Table II B, application no. 9, and being depicted in the same respective line as said B4023, and preferably the activity is increased non-targeted.

[53306] Accordingly, in one embodiment, the molecule which activity is to be increased in the process of the invention is the gene product with an activity as a “b4023-protein”, preferably it is the molecule of section (a) or (b) of this paragraph.

[53307] In particular, it was observed that in plants, especially in Arabidopsis thaliana, increasing or generating the activity of a gene product non-targeted with the activity of a “b4023-protein”, preferably being encoded by a gene comprising the nucleic acid sequence SEQ ID NO. 119209, preferably the coding region thereof, conferred the production of or the increase in linolenic acid compared with the wild type control.

[53308] The nucleic acid sequence of GM02LC12622 from Glycine max, e.g. as shown in the respective line in column 5 of Table I, application no. 9, is unpublished. And the activity of the gene product thereof is the activity of glutaredoxin.

[53309] Accordingly, in one embodiment, the process of the present invention for producing linolenic acid in a non-human organism, like a microorganism or a plant or a part thereof, comprises increasing or generating the activity of a gene product with the activity of a gene product conferring the activity of “glutaredoxin”, especially from Glycine max or its functional equivalent or its homolog, e.g. the increase of
[53310] (a) a gene product of a gene comprising the nucleic acid molecule as shown in the respective line in column 5 of Table I, application no. 9, preferably the coding region thereof, or a homolog or a fragment thereof, and being depicted in the same respective line as said GM02LC12622, or a functional equivalent or a homolog thereof as shown in column 8 of Table I, application no. 9, preferably the coding region thereof, particularly a homolog or functional equivalent as shown in column 8 of Table I B, application no. 9, and being depicted in the same respective line as said GM02LC12622, and preferably the activity is increased non-targeted, or
[53311] (b) a polypeptide comprising a polypeptide, a consensus sequence or at least a polypeptide motif as shown in the respective line in column 5 of Table II or in column 8 of Table IV, application no. 9, respectively, and being depicted in the same respective line as said GM02LC12622, or a functional equivalent or a homolog thereof as depicted in column 8 of Table II, application no. 9, preferably a homolog or functional equivalent as depicted in column 8 of Table II B, application no. 9, and being depicted in the same respective line as said GM02LC12622, and preferably the activity is increased non-targeted.

[53312] Accordingly, in one embodiment, the molecule which activity is to be increased in the process of the invention is the gene product with an activity as a “glutaredoxin”, preferably it is the molecule of section (a) or (b) of this paragraph.

[53313] In particular, it was observed that in plants, especially in Arabidopsis thaliana, increasing or generating the activity of a gene product non-targeted with the activity of a “glutaredoxin”, preferably being encoded by a gene comprising the nucleic acid sequence SEQ ID NO. 10811, preferably the coding region thereof, conferred the production of or the increase in linolenic acid compared with the wild type control.

[53314] The nucleic acid sequence of GM02LC19289 from Glycine max, e.g. as shown in the respective line in column 5 of Table I, application no. 9, is unpublished. And the activity of the gene product thereof is the activity of transcription factor.

[53315] Accordingly, in one embodiment, the process of the present invention for producing linolenic acid in a non-human organism, like a microorganism or a plant or a part thereof, comprises increasing or generating the activity of a gene product with the activity of a gene product conferring the activity of “transcription factor”, especially from Glycine max or its functional equivalent or its homolog, e.g. the increase of
[53316] (a) a gene product of a gene comprising the nucleic acid molecule as shown in the respective line in column 5 of Table I, application no. 9, preferably the coding region thereof, or a homolog or a fragment thereof, and being depicted in the same respective line as said GM02LC19289, or a functional equivalent or a homolog thereof as shown in column 8 of Table I, application no. 9, preferably the coding region thereof, particularly a homolog or functional equivalent as shown in column 8 of Table I B, application no. 9, and being depicted in the same respective line as said GM02LC19289, and preferably the activity is increased non-targeted, or
[53317] (b) a polypeptide comprising a polypeptide, a consensus sequence or at least a polypeptide motif as shown in the respective line in column 5 of Table II or in column 8 of Table IV, application no. 9, respectively, and being depicted in the same respective line as said GM02LC19289, or a functional equivalent or a homolog thereof as depicted in column 8 of Table II, application no. 9, preferably a homolog or functional equivalent as depicted in column 8 of Table II B, application no. 9, and being depicted in the same respective line as said GM02LC19289, and preferably the activity is increased non-targeted.

[53318] Accordingly, in one embodiment, the molecule which activity is to be increased in the process of the invention is the gene product with an activity as a “transcription factor”, preferably it is the molecule of section (a) or (b) of this paragraph.

[53319] In particular, it was observed that in plants, especially in Arabidopsis thaliana, increasing or generating the activity of a gene product non-targeted with the activity of a “transcription factor”, preferably being encoded by a gene comprising the nucleic acid sequence SEQ ID NO. 46751, preferably the coding region thereof, conferred the production of or the increase in linolenic acid compared with the wild type control.

[53320] The nucleic acid sequence of Sll0374 from Synechocystis sp., e.g. as shown in the respective line in column 5 of Table I, application no. 9, has been published in C. And the activity of the gene product thereof is the activity of branched chain amino acid ABC transporter ATP-binding protein

[53321] Accordingly, in one embodiment, the process of the present invention for producing linolenic acid in a non-human organism, like a microorganism or a plant or a part thereof, comprises increasing or generating the activity of a gene product with the activity of a gene product conferring the activity of “branched chain amino acid ABC transporter ATP-binding protein”, especially from Synechocystis sp. or its functional equivalent or its homolog, e.g. the increase of
[53322] (a) a gene product of a gene comprising the nucleic acid molecule as shown in the respective line in column 5 of Table I, application no. 9, preferably the coding region thereof, or a homolog or a fragment thereof, and being depicted in the same respective line as said Sll0374, or a functional equivalent or a homolog thereof as shown in column 8 of Table I, application no. 9, preferably the coding region thereof, particularly a homolog or functional equivalent as shown in column 8 of Table I B, application no. 9, and being depicted in the same respective line as said Sll0374, and preferably the activity is increased plastidic, or
[53323] (b) a polypeptide comprising a polypeptide, a consensus sequence or at least a polypeptide motif as shown in the respective line in column 5 of Table II or in column 8 of Table IV, application no. 9, respectively, and being depicted in the same respective line as said Sll0374, or a functional equivalent or a homolog thereof as depicted in column 8 of Table II, application no. 9, preferably a homolog or functional equivalent as depicted in column 8 of Table II B, application no. 9, and being depicted in the same respective line as said Sll0374, and preferably the activity is increased plastidic.

[53324] Accordingly, in one embodiment, the molecule which activity is to be increased in the process of the invention is the gene product with an activity as a “branched chain amino acid ABC trans-porter ATP-binding protein”, preferably it is the molecule of section (a) or (b) of this paragraph.

[53325] In particular, it was observed that in plants, especially in Arabidopsis thaliana, increasing or generating the activity of a gene product plastidic with the activity of a “branched chain amino acid ABC transporter ATP-binding protein”, preferably being encoded by a gene comprising the nucleic acid sequence SEQ ID NO. 94741, preferably the coding region thereof, conferred the production of or the increase in linolenic acid compared with the wild type control.

[53326] The nucleic acid sequence of Sll0745 from Synechocystis sp., e.g. as shown in the respective line in column 5 of Table I, application no. 9, has been published in C. And the activity of the gene product thereof is the activity of phosphofructokinase.

[53327] Accordingly, in one embodiment, the process of the present invention for producing linolenic acid in a non-human organism, like a microorganism or a plant or a part thereof, comprises increasing or generating the activity of a gene product with the activity of a gene product conferring the activity of “phosphofructokinase”, especially from Synechocystis sp. or its functional equivalent or its homolog, e.g. the increase of
[53328] (a) a gene product of a gene comprising the nucleic acid molecule as shown in the respective line in column 5 of Table I, application no. 9, preferably the coding region thereof, or a homolog or a fragment thereof, and being depicted in the same respective line as said Sll0745, or a functional equivalent or a homolog thereof as shown in column 8 of Table I, application no. 9, preferably the coding region thereof, particularly a homolog or functional equivalent as shown in column 8 of Table I B, application no. 9, and being depicted in the same respective line as said Sll0745, and preferably the activity is increased mitochondrial, or
[53329] (b) a polypeptide comprising a polypeptide, a consensus sequence or at least a polypeptide motif as shown in the respective line in column 5 of Table II or in column 8 of Table IV, application no. 9, respectively, and being depicted in the same respective line as said Sll0745, or a functional equivalent or a homolog thereof as depicted in column 8 of Table II, application no. 9, preferably a homolog or functional equivalent as depicted in column 8 of Table II B, application no. 9, and being depicted in the same respective line as said Sll0745, and preferably the activity is increased mitochondrial.

[53330] Accordingly, in one embodiment, the molecule which activity is to be increased in the process of the invention is the gene product with an activity as a “phosphofructokinase”, preferably it is the molecule of section (a) or (b) of this paragraph.

[53331] In particular, it was observed that in plants, especially in Arabidopsis thaliana, increasing or generating the activity of a gene product mitochondrial with the activity of a “phosphofructokinase”, preferably being encoded by a gene comprising the nucleic acid sequence SEQ ID NO. 112661, preferably the coding region thereof, conferred the production of or the increase in linolenic acid compared with the wild type control.

[53332] The nucleic acid sequence of Sll1031 from Synechocystis sp., e.g. as shown in the respective line in column 5 of Table I, application no. 9, has been published in C. And the activity of the gene product thereof is the activity of carbon dioxide concentrating mechanism protein.

[53333] Accordingly, in one embodiment, the process of the present invention for producing linolenic acid in a non-human organism, like a microorganism or a plant or a part thereof, comprises increasing or generating the activity of a gene product with the activity of a gene product conferring the activity of “carbon dioxide concentrating mechanism protein”, especially from Synechocystis sp. or its functional equivalent or its homolog, e.g. the increase of
[53334] (a) a gene product of a gene comprising the nucleic acid molecule as shown in the respective line in column 5 of Table I, application no. 9, preferably the coding region thereof, or a homolog or a fragment thereof, and being depicted in the same respective line as said Sll1031, or a functional equivalent or a homolog thereof as shown in column 8 of Table I, application no. 9, preferably the coding region thereof, particularly a homolog or functional equivalent as shown in column 8 of Table I B, application no. 9, and being depicted in the same respective line as said Sll1031, and preferably the activity is increased mitochondrial, or
[53335] (b) a polypeptide comprising a polypeptide, a consensus sequence or at least a polypeptide motif as shown in the respective line in column 5 of Table II or in column 8 of Table IV, application no. 9, respectively, and being depicted in the same respective line as said Sll1031, or a functional equivalent or a homolog thereof as depicted in column 8 of Table II, application no. 9, preferably a homolog or functional equivalent as depicted in column 8 of Table II B, application no. 9, and being depicted in the same respective line as said Sll1031, and preferably the activity is increased mitochondrial.

[53336] Accordingly, in one embodiment, the molecule which activity is to be increased in the process of the invention is the gene product with an activity as a “carbon dioxide concentrating mechanism protein”, preferably it is the molecule of section (a) or (b) of this paragraph.

[53337] In particular, it was observed that in plants, especially in Arabidopsis thaliana, increasing or generating the activity of a gene product mitochondrial with the activity of a “carbon dioxide concentrating mechanism protein”, preferably being encoded by a gene comprising the nucleic acid sequence SEQ ID NO. 52634, preferably the coding region thereof, conferred the production of or the increase in linolenic acid compared with the wild type control.

[53338] The nucleic acid sequence of Sll1032 from Synechocystis sp., e.g. as shown in the respective line in column 5 of Table I, application no. 9, has been published in C. And the activity of the gene product thereof is the activity of sll1032-protein.

[53339] Accordingly, in one embodiment, the process of the present invention for producing linolenic acid in a non-human organism, like a microorganism or a plant or a part thereof, comprises increasing or generating the activity of a gene product with the activity of a gene product conferring the activity of “sll1032-protein”, especially from Synechocystis sp. or its functional equivalent or its homolog, e.g. the increase of
[53340] (a) a gene product of a gene comprising the nucleic acid molecule as shown in the respective line in column 5 of Table I, application no. 9, preferably the coding region thereof, or a homolog or a fragment thereof, and being depicted in the same respective line as said Sll1032, or a functional equivalent or a homolog thereof as shown in column 8 of Table I, application no. 9, preferably the coding region thereof, particularly a homolog or functional equivalent as shown in column 8 of Table I B, application no. 9, and being depicted in the same respective line as said Sll1032, and preferably the activity is increased mitochondrial, or
[53341] (b) a polypeptide comprising a polypeptide, a consensus sequence or at least a polypeptide motif as shown in the respective line in column 5 of Table II or in column 8 of Table IV, application no. 9, respectively, and being depicted in the same respective line as said Sll1032, or a functional equivalent or a homolog thereof as depicted in column 8 of Table II, application no. 9, preferably a homolog or functional equivalent as depicted in column 8 of Table II B, application no. 9, and being depicted in the same respective line as said Sll1032, and preferably the activity is increased mitochondrial.

[53342] Accordingly, in one embodiment, the molecule which activity is to be increased in the process of the invention is the gene product with an activity as a “sll1032-protein”, preferably it is the molecule of section (a) or (b) of this paragraph.

[53343] In particular, it was observed that in plants, especially in Arabidopsis thaliana, increasing or generating the activity of a gene product mitochondrial with the activity of a “sll1032-protein”, preferably being encoded by a gene comprising the nucleic acid sequence SEQ ID NO. 85723, preferably the coding region thereof, conferred the production of or the increase in linolenic acid compared with the wild type control.

[53344] The nucleic acid sequence of Sll1443 from Synechocystis sp., e.g. as shown in the respective line in column 5 of Table I, application no. 9, has been published in C. And the activity of the gene product thereof is the activity of CTP synthetase.

[53345] Accordingly, in one embodiment, the process of the present invention for producing linolenic acid in a non-human organism, like a microorganism or a plant or a part thereof, comprises increasing or generating the activity of a gene product with the activity of a gene product conferring the activity of “CTP synthetase”, especially from Synechocystis sp. or its functional equivalent or its homolog, e.g. the increase of
[53346] (a) a gene product of a gene comprising the nucleic acid molecule as shown in the respective line in column 5 of Table I, application no. 9, preferably the coding region thereof, or a homolog or a fragment thereof, and being depicted in the same respective line as said Sll1443, or a functional equivalent or a homolog thereof as shown in column 8 of Table I, application no. 9, preferably the coding region thereof, particularly a homolog or functional equivalent as shown in column 8 of Table I B, application no. 9, and being depicted in the same respective line as said Sll1443, and preferably the activity is increased mitochondrial, or
[53347] (b) a polypeptide comprising a polypeptide, a consensus sequence or at least a polypeptide motif as shown in the respective line in column 5 of Table II or in column 8 of Table IV, application no. 9, respectively, and being depicted in the same respective line as said Sll1443, or a functional equivalent or a homolog thereof as depicted in column 8 of Table II, application no. 9, preferably a homolog or functional equivalent as depicted in column 8 of Table II B, application no. 9, and being depicted in the same respective line as said Sll1443, and preferably the activity is increased mitochondrial.

[53348] Accordingly, in one embodiment, the molecule which activity is to be increased in the process of the invention is the gene product with an activity as a “CTP synthetase”, preferably it is the molecule of section (a) or (b) of this paragraph.

[53349] In particular, it was observed that in plants, especially in Arabidopsis thaliana, increasing or generating the activity of a gene product mitochondrial with the activity of a “CTP synthetase”, preferably being encoded by a gene comprising the nucleic acid sequence SEQ ID NO. 53878, preferably the coding region thereof, conferred the production of or the increase in linolenic acid compared with the wild type control.

[53350] The nucleic acid sequence of Sll1498 from Synechocystis sp., e.g. as shown in the respective line in column 5 of Table I, application no. 9, has been published in C. And the activity of the gene product thereof is the activity of carbamoyl-phosphate synthase subunit.

[53351] Accordingly, in one embodiment, the process of the present invention for producing linolenic acid in a non-human organism, like a microorganism or a plant or a part thereof, comprises increasing or generating the activity of a gene product with the activity of a gene product conferring the activity of “carbamoyl-phosphate synthase subunit”, especially from Synechocystis sp. or its functional equivalent or its homolog, e.g. the increase of
[53352] (a) a gene product of a gene comprising the nucleic acid molecule as shown in the respective line in column 5 of Table I, application no. 9, preferably the coding region thereof, or a homolog or a fragment thereof, and being depicted in the same respective line as said Sll1498, or a functional equivalent or a homolog thereof as shown in column 8 of Table I, application no. 9, preferably the coding region thereof, particularly a homolog or functional equivalent as shown in column 8 of Table I B, application no. 9, and being depicted in the same respective line as said Sll1498, and preferably the activity is increased non-targeted, or
[53353] (b) a polypeptide comprising a polypeptide, a consensus sequence or at least a polypeptide motif as shown in the respective line in column 5 of Table II or in column 8 of Table IV, application no. 9, respectively, and being depicted in the same respective line as said Sll1498, or a functional equivalent or a homolog thereof as depicted in column 8 of Table II, application no. 9, preferably a homolog or functional equivalent as depicted in column 8 of Table II B, application no. 9, and being depicted in the same respective line as said Sll1498, and preferably the activity is increased non-targeted.

[53354] Accordingly, in one embodiment, the molecule which activity is to be increased in the process of the invention is the gene product with an activity as a “carbamoyl-phosphate synthase subunit”, preferably it is the molecule of section (a) or (b) of this paragraph.

[53355] In particular, it was observed that in plants, especially in Arabidopsis thaliana, increasing or generating the activity of a gene product non-targeted with the activity of a “carbamoyl-phosphate synthase subunit”, preferably being encoded by a gene comprising the nucleic acid sequence SEQ ID NO. 95047, preferably the coding region thereof, conferred the production of or the increase in linolenic acid compared with the wild type control.

[53356] The nucleic acid sequence of Sll1848 from Synechocystis sp., e.g. as shown in the respective line in column 5 of Table I, application no. 9, has been published in C. And the activity of the gene product thereof is the activity of acyl transferase.

[53357] Accordingly, in one embodiment, the process of the present invention for producing linolenic acid in a non-human organism, like a microorganism or a plant or a part thereof, comprises increasing or generating the activity of a gene product with the activity of a gene product conferring the activity of “acyl transferase”, especially from Synechocystis sp. or its functional equivalent or its homolog, e.g. the increase of
[53358] (a) a gene product of a gene comprising the nucleic acid molecule as shown in the respective line in column 5 of Table I, application no. 9, preferably the coding region thereof, or a homolog or a fragment thereof, and being depicted in the same respective line as said Sll1848, or a functional equivalent or a homolog thereof as shown in column 8 of Table I, application no. 9, preferably the coding region thereof, particularly a homolog or functional equivalent as shown in column 8 of Table I B, application no. 9, and being depicted in the same respective line as said Sll1848, and preferably the activity is increased plastidic, or
[53359] (b) a polypeptide comprising a polypeptide, a consensus sequence or at least a polypeptide motif as shown in the respective line in column 5 of Table II or in column 8 of Table IV, application no. 9, respectively, and being depicted in the same respective line as said Sll1848, or a functional equivalent or a homolog thereof as depicted in column 8 of Table II, application no. 9, preferably a homolog or functional equivalent as depicted in column 8 of Table II B, application no. 9, and being depicted in the same respective line as said Sll1848, and preferably the activity is increased plastidic.

[53360] Accordingly, in one embodiment, the molecule which activity is to be increased in the process of the invention is the gene product with an activity as a “acyl transferase”, preferably it is the molecule of section (a) or (b) of this paragraph.

[53361] In particular, it was observed that in plants, especially in Arabidopsis thaliana, increasing or generating the activity of a gene product plastidic with the activity of a “acyl transferase”, preferably being encoded by a gene comprising the nucleic acid sequence SEQ ID NO. 86447, preferably the coding region thereof, conferred the production of or the increase in linolenic acid compared with the wild type control.

[53362] The nucleic acid sequence of Sll1917 from Synechocystis sp., e.g. as shown in the respective line in column 5 of Table I, application no. 9, has been published in C. And the activity of the gene product thereof is the activity of coproporphyrinogen III oxidase.

[53363] Accordingly, in one embodiment, the process of the present invention for producing linolenic acid in a non-human organism, like a microorganism or a plant or a part thereof, comprises increasing or generating the activity of a gene product with the activity of a gene product conferring the activity of “coproporphyrinogen III oxidase”, especially from Synechocystis sp. or its functional equivalent or its homolog, e.g. the increase of
[53364] (a) a gene product of a gene comprising the nucleic acid molecule as shown in the respective line in column 5 of Table I, application no. 9, preferably the coding region thereof, or a homolog or a fragment thereof, and being depicted in the same respective line as said Sll11917, or a functional equivalent or a homolog thereof as shown in column 8 of Table I, application no. 9, preferably the coding region thereof, particularly a homolog or functional equivalent as shown in column 8 of Table I B, application no. 9, and being depicted in the same respective line as said Sll1917, and preferably the activity is increased mitochondrial, or
[53365] (b) a polypeptide comprising a polypeptide, a consensus sequence or at least a polypeptide motif as shown in the respective line in column 5 of Table II or in column 8 of Table IV, application no. 9, respectively, and being depicted in the same respective line as said Sll1917, or a functional equivalent or a homolog thereof as depicted in column 8 of Table II, application no. 9, preferably a homolog or functional equivalent as depicted in column 8 of Table II B, application no. 9, and being depicted in the same respective line as said Sll1917, and preferably the activity is increased mitochondrial.

[53366] Accordingly, in one embodiment, the molecule which activity is to be increased in the process of the invention is the gene product with an activity as a “coproporphyrinogen III oxidase”, preferably it is the molecule of section (a) or (b) of this paragraph.

[53367] In particular, it was observed that in plants, especially in Arabidopsis thaliana, increasing or generating the activity of a gene product mitochondrial with the activity of a “coproporphyrinogen III oxidase”, preferably being encoded by a gene comprising the nucleic acid sequence SEQ ID NO. 11471, preferably the coding region thereof, conferred the production of or the increase in linolenic acid compared with the wild type control.

[53368] The nucleic acid sequence of Sll1920 from Synechocystis sp., e.g. as shown in the respective line in column 5 of Table I, application no. 9, has been published in C. And the activity of the gene product thereof is the activity of cation-transporting ATPase.

[53369] Accordingly, in one embodiment, the process of the present invention for producing linolenic acid in a non-human organism, like a microorganism or a plant or a part thereof, comprises increasing or generating the activity of a gene product with the activity of a gene product conferring the activity of “cation-transporting ATPase”, especially from Synechocystis sp. or its functional equivalent or its homolog, e.g. the increase of
[53370] (a) a gene product of a gene comprising the nucleic acid molecule as shown in the respective line in column 5 of Table I, application no. 9, preferably the coding region thereof, or a homolog or a fragment thereof, and being depicted in the same respective line as said Sll1920,or a functional equivalent or a homolog thereof as shown in column 8 of Table I, application no. 9, preferably the coding region thereof, particularly a homolog or functional equivalent as shown in column 8 of Table I B, application no. 9, and being depicted in the same respective line as said SI11920, and preferably the activity is increased mitochondrial, or
[53371] (b) a polypeptide comprising a polypeptide, a consensus sequence or at least a polypeptide motif as shown in the respective line in column 5 of Table II or in column 8 of Table IV, application no. 9, respectively, and being depicted in the same respective line as said Sll1920, or a functional equivalent or a homolog thereof as depicted in column 8 of Table II, application no. 9, preferably a homolog or functional equivalent as depicted in column 8 of Table II B, application no. 9, and being depicted in the same respective line as said Sll1920, and preferably the activity is increased mitochondrial.

[53372] Accordingly, in one embodiment, the molecule which activity is to be increased in the process of the invention is the gene product with an activity as a “cation-transporting ATPase”, preferably it is the molecule of section (a) or (b) of this paragraph.

[53373] In particular, it was observed that in plants, especially in Arabidopsis thaliana, increasing or generating the activity of a gene product mitochondrial with the activity of a “cation-transporting ATPase”, preferably being encoded by a gene comprising the nucleic acid sequence SEQ ID NO. 55385, preferably the coding region thereof, conferred the production of or the increase in linolenic acid compared with the wild type control.

[53374] The nucleic acid sequence of Slr0338 from Synechocystis sp., e.g. as shown in the respective line in column 5 of Table I, application no. 9, has been published in C. And the activity of the gene product thereof is the activity of oxidoreductase.

[53375] Accordingly, in one embodiment, the process of the present invention for producing linolenic acid in a non-human organism, like a microorganism or a plant or a part thereof, comprises increasing or generating the activity of a gene product with the activity of a gene product conferring the activity of “oxidoreductase”, especially from Synechocystis sp. or its functional equivalent or its homolog, e.g. the increase of
[53376] (a) a gene product of a gene comprising the nucleic acid molecule as shown in the respective line in column 5 of Table I, application no. 9, preferably the coding region thereof, or a homolog or a fragment thereof, and being depicted in the same respective line as said Slr0338, or a functional equivalent or a homolog thereof as shown in column 8 of Table I, application no. 9, preferably the coding region thereof, particularly a homolog or functional equivalent as shown in column 8 of Table I B, application no. 9, and being depicted in the same respective line as said Slr0338, and preferably the activity is increased non-targeted, or
[53377] (b) a polypeptide comprising a polypeptide, a consensus sequence or at least a polypeptide motif as shown in the respective line in column 5 of Table II or in column 8 of Table IV, application no. 9, respectively, and being depicted in the same respective line as said Slr0338, or a functional equivalent or a homolog thereof as depicted in column 8 of Table II, application no. 9, preferably a homolog or functional equivalent as depicted in column 8 of Table II B, application no. 9, and being depicted in the same respective line as said Slr0338, and preferably the activity is increased non-targeted.

[53378] Accordingly, in one embodiment, the molecule which activity is to be increased in the process of the invention is the gene product with an activity as a “oxidoreductase”, preferably it is the molecule of section (a) or (b) of this paragraph.

[53379] In particular, it was observed that in plants, especially in Arabidopsis thaliana, increasing or generating the activity of a gene product non-targeted with the activity of a “oxidoreductase”, preferably being encoded by a gene comprising the nucleic acid sequence SEQ ID NO. 11990, preferably the coding region thereof, conferred the production of or the increase in linolenic acid compared with the wild type control.

[53380] The nucleic acid sequence of Slr0597 from Synechocystis sp., e.g. as shown in the respective line in column 5 of Table I, application no. 9, has been published in C. And the activity of the gene product thereof is the activity of bifunctional purine biosynthesis protein.

[53381] Accordingly, in one embodiment, the process of the present invention for producing linolenic acid in a non-human organism, like a microorganism or a plant or a part thereof, comprises increasing or generating the activity of a gene product with the activity of a gene product conferring the activity of “bifunctional purine biosynthesis protein”, especially from Synechocystis sp. or its functional equivalent or its homolog, e.g. the increase of
[53382] (a) a gene product of a gene comprising the nucleic acid molecule as shown in the respective line in column 5 of Table I, application no. 9, preferably the coding region thereof, or a homolog or a fragment thereof, and being depicted in the same respective line as said Slr0597, or a functional equivalent or a homolog thereof as shown in column 8 of Table I, application no. 9, preferably the coding region thereof, particularly a homolog or functional equivalent as shown in column 8 of Table I B, application no. 9, and being depicted in the same respective line as said Slr0597, and preferably the activity is increased plastidic, or
[53383] (b) a polypeptide comprising a polypeptide, a consensus sequence or at least a polypeptide motif as shown in the respective line in column 5 of Table II or in column 8 of Table IV, application no. 9, respectively, and being depicted in the same respective line as said Slr0597, or a functional equivalent or a homolog thereof as depicted in column 8 of Table II, application no. 9, preferably a homolog or functional equivalent as depicted in column 8 of Table II B, application no. 9, and being depicted in the same respective line as said Slr0597, and preferably the activity is increased plastidic.

[53384] Accordingly, in one embodiment, the molecule which activity is to be increased in the process of the invention is the gene product with an activity as a “bifunctional purine biosynthesis protein”, preferably it is the molecule of section (a) or (b) of this paragraph.

[53385] In particular, it was observed that in plants, especially in Arabidopsis thaliana, increasing or generating the activity of a gene product plastidic with the activity of a “bifunctional purine biosynthesis protein”, preferably being encoded by a gene comprising the nucleic acid sequence SEQ ID NO. 56153, preferably the coding region thereof, conferred the production of or the increase in linolenic acid compared with the wild type control.

[53386] The nucleic acid sequence of Slr0949 from Synechocystis sp., e.g. as shown in the respective line in column 5 of Table I, application no. 9, has been published in C. And the activity of the gene product thereof is the activity of permease protein of ABC transporter.

[53387] Accordingly, in one embodiment, the process of the present invention for producing linolenic acid in a non-human organism, like a microorganism or a plant or a part thereof, comprises increasing or generating the activity of a gene product with the activity of a gene product conferring the activity of “permease protein of ABC transporter”, especially from Synechocystis sp. or its functional equivalent or its homolog, e.g. the increase of
[53388] (a) a gene product of a gene comprising the nucleic acid molecule as shown in the respective line in column 5 of Table I, application no. 9, preferably the coding region thereof, or a homolog or a fragment thereof, and being depicted in the same respective line as said Slr0949, or a functional equivalent or a homolog thereof as shown in column 8 of Table I, application no. 9, preferably the coding region thereof, particularly a homolog or functional equivalent as shown in column 8 of Table I B, application no. 9, and being depicted in the same respective line as said Slr0949, and preferably the activity is increased mitochondrial, or
[53389] (b) a polypeptide comprising a polypeptide, a consensus sequence or at least a polypeptide motif as shown in the respective line in column 5 of Table II or in column 8 of Table IV, application no. 9, respectively, and being depicted in the same respective line as said Slr0949, or a functional equivalent or a homolog thereof as depicted in column 8 of Table II, application no. 9, preferably a homolog or functional equivalent as depicted in column 8 of Table II B, application no. 9, and being depicted in the same respective line as said Slr0949, and preferably the activity is increased mitochondrial.

[53390] Accordingly, in one embodiment, the molecule which activity is to be increased in the process of the invention is the gene product with an activity as a “permease protein of ABC transporter”, preferably it is the molecule of section (a) or (b) of this paragraph.

[53391] In particular, it was observed that in plants, especially in Arabidopsis thaliana, increasing or generating the activity of a gene product mitochondrial with the activity of a “permease protein of ABC transporter”, preferably being encoded by a gene comprising the nucleic acid sequence SEQ ID NO. 119222, preferably the coding region thereof, conferred the production of or the increase in linolenic acid compared with the wild type control.

[53392] The nucleic acid sequence of Slr1099 from Synechocystis sp., e.g. as shown in the respective line in column 5 of Table I, application no. 9, has been published in C. And the activity of the gene product thereof is the activity of aromatic acid decarboxylase.

[53393] Accordingly, in one embodiment, the process of the present invention for producing linolenic acid in a non-human organism, like a microorganism or a plant or a part thereof, comprises increasing or generating the activity of a gene product with the activity of a gene product conferring the activity of “aromatic acid decarboxylase”, especially from Synechocystis sp. or its functional equivalent or its homolog, e.g. the increase of
[53394] (a) a gene product of a gene comprising the nucleic acid molecule as shown in the respective line in column 5 of Table I, application no. 9, preferably the coding region thereof, or a homolog or a fragment thereof, and being depicted in the same respective line as said Slr1099, or a functional equivalent or a homolog thereof as shown in column 8 of Table I, application no. 9, preferably the coding region thereof, particularly a homolog or functional equivalent as shown in column 8 of Table I B, application no. 9, and being depicted in the same respective line as said Slr1099, and preferably the activity is increased mitochondrial, or
[53395] (b) a polypeptide comprising a polypeptide, a consensus sequence or at least a polypeptide motif as shown in the respective line in column 5 of Table II or in column 8 of Table IV, application no. 9, respectively, and being depicted in the same respective line as said Slr1099, or a functional equivalent or a homolog thereof as depicted in column 8 of Table II, application no. 9, preferably a homolog or functional equivalent as depicted in column 8 of Table II B, application no. 9, and being depicted in the same respective line as said Slr1099, and preferably the activity is increased mitochondrial.

[53396] Accordingly, in one embodiment, the molecule which activity is to be increased in the process of the invention is the gene product with an activity as a “aromatic acid decarboxylase”, preferably it is the molecule of section (a) or (b) of this paragraph.

[53397] In particular, it was observed that in plants, especially in Arabidopsis thaliana, increasing or generating the activity of a gene product mitochondrial with the activity of a “aromatic acid decarboxylase”, preferably being encoded by a gene comprising the nucleic acid sequence SEQ ID NO. 116341, preferably the coding region thereof, conferred the production of or the increase in linolenic acid compared with the wild type control.

[53398] The nucleic acid sequence of Slr1250 from Synechocystis sp., e.g. as shown in the respective line in column 5 of Table I, application no. 9, has been published in C. And the activity of the gene product thereof is the activity of phosphate import ATP-binding protein.

[53399] Accordingly, in one embodiment, the process of the present invention for producing linolenic acid in a non-human organism, like a microorganism or a plant or a part thereof, comprises increasing or generating the activity of a gene product with the activity of a gene product conferring the activity of “phosphate import ATP-binding protein”, especially from Synechocystis sp. or its functional equivalent or its homolog, e.g. the increase of
[53400] (a) a gene product of a gene comprising the nucleic acid molecule as shown in the respective line in column 5 of Table I, application no. 9, preferably the coding region thereof, or a homolog or a fragment thereof, and being depicted in the same respective line as said Slr1250, or a functional equivalent or a homolog thereof as shown in column 8 of Table I, application no. 9, preferably the coding region thereof, particularly a homolog or functional equivalent as shown in column 8 of Table I B, application no. 9, and being depicted in the same respective line as said Slr1250, and preferably the activity is increased mitochondrial, or
[53401] (b) a polypeptide comprising a polypeptide, a consensus sequence or at least a polypeptide motif as shown in the respective line in column 5 of Table II or in column 8 of Table IV, application no. 9, respectively, and being depicted in the same respective line as said Slr1250, or a functional equivalent or a homolog thereof as depicted in column 8 of Table II, application no. 9, preferably a homolog or functional equivalent as depicted in column 8 of Table II B, application no. 9, and being depicted in the same respective line as said Slr1250, and preferably the activity is increased mitochondrial.

[53402] Accordingly, in one embodiment, the molecule which activity is to be increased in the process of the invention is the gene product with an activity as a “phosphate import ATP-binding protein”, preferably it is the molecule of section (a) or (b) of this paragraph.

[53403] In particular, it was observed that in plants, especially in Arabidopsis thaliana, increasing or generating the activity of a gene product mitochondrial with the activity of a “phosphate import ATP-binding protein”, preferably being encoded by a gene comprising the nucleic acid sequence SEQ ID NO. 116460, preferably the coding region thereof, conferred the production of or the increase in linolenic acid compared with the wild type control.

[53404] The nucleic acid sequence of Slr1312 from Synechocystis sp., e.g. as shown in the respective line in column 5 of Table I, application no. 9, has been published in C. And the activity of the gene product thereof is the activity of arginine decarboxylase.

[53405] Accordingly, in one embodiment, the process of the present invention for producing linolenic acid in a non-human organism, like a microorganism or a plant or a part thereof, comprises increasing or generating the activity of a gene product with the activity of a gene product conferring the activity of “arginine decarboxylase”, especially from Synechocystis sp. or its functional equivalent or its homolog, e.g. the increase of
[53406] (a) a gene product of a gene comprising the nucleic acid molecule as shown in the respective line in column 5 of Table I, application no. 9, preferably the coding region thereof, or a homolog or a fragment thereof, and being depicted in the same respective line as said Slr1312, or a functional equivalent or a homolog thereof as shown in column 8 of Table I, application no. 9, preferably the coding region thereof, particularly a homolog or functional equivalent as shown in column 8 of Table I B, application no. 9, and being depicted in the same respective line as said Slr1312, and preferably the activity is increased non-targeted, or
[53407] (b) a polypeptide comprising a polypeptide, a consensus sequence or at least a polypeptide motif as shown in the respective line in column 5 of Table II or in column 8 of Table IV, application no. 9, respectively, and being depicted in the same respective line as said Slr1312, or a functional equivalent or a homolog thereof as depicted in column 8 of Table II, application no. 9, preferably a homolog or functional equivalent as depicted in column 8 of Table II B, application no. 9, and being depicted in the same respective line as said Slr1312, and preferably the activity is increased non-targeted.

[53408] Accordingly, in one embodiment, the molecule which activity is to be increased in the process of the invention is the gene product with an activity as a “arginine decarboxylase”, preferably it is the molecule of section (a) or (b) of this paragraph.

[53409] In particular, it was observed that in plants, especially in Arabidopsis thaliana, increasing or generating the activity of a gene product non-targeted with the activity of a “arginine decarboxylase”, preferably being encoded by a gene comprising the nucleic acid sequence SEQ ID NO. 58324, preferably the coding region thereof, conferred the production of or the increase in linolenic acid compared with the wild type control.

[53410] The nucleic acid sequence of Slr1791 from Synechocystis sp., e.g. as shown in the respective line in column 5 of Table I, application no. 9, has been published in C. And the activity of the gene product thereof is the activity of phosphoadenosine phosphosulfate reductase.

[53411] Accordingly, in one embodiment, the process of the present invention for producing linolenic acid in a non-human organism, like a microorganism or a plant or a part thereof, comprises increasing or generating the activity of a gene product with the activity of a gene product conferring the activity of “phosphoadenosine phosphosulfate reductase”, especially from Synechocystis sp. or its functional equivalent or its homolog, e.g. the increase of
[53412] (a) a gene product of a gene comprising the nucleic acid molecule as shown in the respective line in column 5 of Table I, application no. 9, preferably the coding region thereof, or a homolog or a fragment thereof, and being depicted in the same respective line as said Slr1791, or a functional equivalent or a homolog thereof as shown in column 8 of Table I, application no. 9, preferably the coding region thereof, particularly a homolog or functional equivalent as shown in column 8 of Table I B, application no. 9, and being depicted in the same respective line as said Slr1791, and preferably the activity is increased mitochondrial, or
[53413] (b) a polypeptide comprising a polypeptide, a consensus sequence or at least a polypeptide motif as shown in the respective line in column 5 of Table II or in column 8 of Table IV, application no. 9, respectively, and being depicted in the same respective line as said Slr1791, or a functional equivalent or a homolog thereof as depicted in column 8 of Table II, application no. 9, preferably a homolog or functional equivalent as depicted in column 8 of Table II B, application no. 9, and being depicted in the same respective line as said Slr1791, and preferably the activity is increased mitochondrial.

[53414] Accordingly, in one embodiment, the molecule which activity is to be increased in the process of the invention is the gene product with an activity as a “phosphoadenosine phosphosulfate reductase”, preferably it is the molecule of section (a) or (b) of this paragraph.

[53415] In particular, it was observed that in plants, especially in Arabidopsis thaliana, increasing or generating the activity of a gene product mitochondrial with the activity of a “phosphoadenosine phosphosulfate reductase”, preferably being encoded by a gene comprising the nucleic acid sequence SEQ ID NO. 12140, preferably the coding region thereof, conferred the production of or the increase in linolenic acid compared with the wild type control.

[53416] The nucleic acid sequence of Slr2072 from Synechocystis sp., e.g. as shown in the respective line in column 5 of Table I, application no. 9, has been published in C. And the activity of the gene product thereof is the activity of threonine dehydratase.

[53417] Accordingly, in one embodiment, the process of the present invention for producing linolenic acid in a non-human organism, like a microorganism or a plant or a part thereof, comprises increasing or generating the activity of a gene product with the activity of a gene product conferring the activity of “threonine dehydratase”, especially from Synechocystis sp. or its functional equivalent or its homolog, e.g. the increase of
[53418] (a) a gene product of a gene comprising the nucleic acid molecule as shown in the respective line in column 5 of Table I, application no. 9, preferably the coding region thereof, or a homolog or a fragment thereof, and being depicted in the same respective line as said Slr2072, or a functional equivalent or a homolog thereof as shown in column 8 of Table I, application no. 9, preferably the coding region thereof, particularly a homolog or functional equivalent as shown in column 8 of Table I B, application no. 9, and being depicted in the same respective line as said Slr2072, and preferably the activity is increased mitochondrial, or
[53419] (b) a polypeptide comprising a polypeptide, a consensus sequence or at least a polypeptide motif as shown in the respective line in column 5 of Table II or in column 8 of Table IV, application no. 9, respectively, and being depicted in the same respective line as said Slr2072, or a functional equivalent or a homolog thereof as depicted in column 8 of Table II, application no. 9, preferably a homolog or functional equivalent as depicted in column 8 of Table II B, application no. 9, and being depicted in the same respective line as said Slr2072, and preferably the activity is increased mitochondrial.

[53420] Accordingly, in one embodiment, the molecule which activity is to be increased in the process of the invention is the gene product with an activity as a “threonine dehydratase”, preferably it is the molecule of section (a) or (b) of this paragraph.

[53421] In particular, it was observed that in plants, especially in Arabidopsis thaliana, increasing or generating the activity of a gene product mitochondrial with the activity of a “threonine dehydratase”, preferably being encoded by a gene comprising the nucleic acid sequence SEQ ID NO. 12341, preferably the coding region thereof, conferred the production of or the increase in linolenic acid compared with the wild type control.

[53422] The nucleic acid sequence of TTC0917 from Thermus thermophilus, e.g. as shown in the respective line in column 5 of Table I, application no. 9, has been published in E. And the activity of the gene product thereof is the activity of metal-dependent hydrolase.

[53423] Accordingly, in one embodiment, the process of the present invention for producing linolenic acid in a non-human organism, like a microorganism or a plant or a part thereof, comprises increasing or generating the activity of a gene product with the activity of a gene product conferring the activity of “metal-dependent hydrolase”, especially from Thermus thermophilus or its functional equivalent or its homolog, e.g. the increase of
[53424] (a) a gene product of a gene comprising the nucleic acid molecule as shown in the respective line in column 5 of Table I, application no. 9, preferably the coding region thereof, or a homolog or a fragment thereof, and being depicted in the same respective line as said TTC0917, or a functional equivalent or a homolog thereof as shown in column 8 of Table I, application no. 9, preferably the coding region thereof, particularly a homolog or functional equivalent as shown in column 8 of Table I B, application no. 9, and being depicted in the same respective line as said TTC0917, and preferably the activity is increased non-targeted, or
[53425] (b) a polypeptide comprising a polypeptide, a consensus sequence or at least a polypeptide motif as shown in the respective line in column 5 of Table II or in column 8 of Table IV, application no. 9, respectively, and being depicted in the same respective line as said TTC0917, or a functional equivalent or a homolog thereof as depicted in column 8 of Table II, application no. 9, preferably a homolog or functional equivalent as depicted in column 8 of Table II B, application no. 9, and being depicted in the same respective line as said TTC0917, and preferably the activity is increased non-targeted.

[53426] Accordingly, in one embodiment, the molecule which activity is to be increased in the process of the invention is the gene product with an activity as a “metal-dependent hydrolase”, preferably it is the molecule of section (a) or (b) of this paragraph.

[53427] In particular, it was observed that in plants, especially in Arabidopsis thaliana, increasing or generating the activity of a gene product non-targeted with the activity of a “metal-dependent hydrolase”, preferably being encoded by a gene comprising the nucleic acid sequence SEQ ID NO. 61553, preferably the coding region thereof, conferred the production of or the increase in linolenic acid compared with the wild type control.

[53428] The nucleic acid sequence of TTC1386 from Thermus thermophilus, e.g. as shown in the respective line in column 5 of Table I, application no. 9, has been published in E. And the activity of the gene product thereof is the activity of TTC1386-protein.

[53429] Accordingly, in one embodiment, the process of the present invention for producing linolenic acid in a non-human organism, like a microorganism or a plant or a part thereof, comprises increasing or generating the activity of a gene product with the activity of a gene product conferring the activity of “TTC1386-protein”, especially from Thermus thermophilus or its functional equivalent or its homolog, e.g. the increase of
[53430] (a) a gene product of a gene comprising the nucleic acid molecule as shown in the respective line in column 5 of Table I, application no. 9, preferably the coding region thereof, or a homolog or a fragment thereof, and being depicted in the same respective line as said TTC1386, or a functional equivalent or a homolog thereof as shown in column 8 of Table I, application no. 9, preferably the coding region thereof, particularly a homolog or functional equivalent as shown in column 8 of Table I B, application no. 9, and being depicted in the same respective line as said TTC1386, and preferably the activity is increased non-targeted, or
[53431] (b) a polypeptide comprising a polypeptide, a consensus sequence or at least a polypeptide motif as shown in the respective line in column 5 of Table II or in column 8 of Table IV, application no. 9, respectively, and being depicted in the same respective line as said TTC1386, or a functional equivalent or a homolog thereof as depicted in column 8 of Table II, application no. 9, preferably a homolog or functional equivalent as depicted in column 8 of Table II B, application no. 9, and being depicted in the same respective line as said TTC1386, and preferably the activity is increased non-targeted.

[53432] Accordingly, in one embodiment, the molecule which activity is to be increased in the process of the invention is the gene product with an activity as a “TTC1386-protein”, preferably it is the molecule of section (a) or (b) of this paragraph.

[53433] In particular, it was observed that in plants, especially in Arabidopsis thaliana, increasing or generating the activity of a gene product non-targeted with the activity of a “TTC1386-protein”, preferably being encoded by a gene comprising the nucleic acid sequence SEQ ID NO. 62079, preferably the coding region thereof, conferred the production of or the increase in linolenic acid compared with the wild type control.

[53434] The nucleic acid sequence of Ybr092c from Saccharomyces cerevisiae, e.g. as shown in the respective line in column 5 of Table I, application no. 9, has been published in A. And the activity of the gene product thereof is the activity of acid phosphatase precursor.

[53435] Accordingly, in one embodiment, the process of the present invention for producing linolenic acid in a non-human organism, like a microorganism or a plant or a part thereof, comprises increasing or generating the activity of a gene product with the activity of a gene product conferring the activity of “acid phosphatase precursor”, especially from Saccharomyces cerevisiae or its functional equivalent or its homolog, e.g. the increase of
[53436] (a) a gene product of a gene comprising the nucleic acid molecule as shown in the respective line in column 5 of Table I, application no. 9, preferably the coding region thereof, or a homolog or a fragment thereof, and being depicted in the same respective line as said Ybr092c, or a functional equivalent or a homolog thereof as shown in column 8 of Table I, application no. 9, preferably the coding region thereof, particularly a homolog or functional equivalent as shown in column 8 of Table I B, application no. 9, and being depicted in the same respective line as said Ybr092c, and preferably the activity is increased plastidic, or
[53437] (b) a polypeptide comprising a polypeptide, a consensus sequence or at least a polypeptide motif as shown in the respective line in column 5 of Table II or in column 8 of Table IV, application no. 9, respectively, and being depicted in the same respective line as said Ybr092c, or a functional equivalent or a homolog thereof as depicted in column 8 of Table II, application no. 9, preferably a homolog or functional equivalent as depicted in column 8 of Table II B, application no. 9, and being depicted in the same respective line as said Ybr092c, and preferably the activity is increased plastidic.

[53438] Accordingly, in one embodiment, the molecule which activity is to be increased in the process of the invention is the gene product with an activity as a “acid phosphatase precursor”, preferably it is the molecule of section (a) or (b) of this paragraph.

[53439] In particular, it was observed that in plants, especially in Arabidopsis thaliana, increasing or generating the activity of a gene product plastidic with the activity of a “acid phosphatase precursor”, preferably being encoded by a gene comprising the nucleic acid sequence SEQ ID NO. 119347, preferably the coding region thereof, conferred the production of or the increase in linolenic acid compared with the wild type control.

[53440] The nucleic acid sequence of Ydl022w from Saccharomyces cerevisiae, e.g. as shown in the respective line in column 5 of Table I, application no. 9, has been published in A. And the activity of the gene product thereof is the activity of glycerol-3-phosphate dehydrogenase.

[53441] Accordingly, in one embodiment, the process of the present invention for producing linolenic acid in a non-human organism, like a microorganism or a plant or a part thereof, comprises increasing or generating the activity of a gene product with the activity of a gene product conferring the activity of “glycerol-3-phosphate dehydrogenase”, especially from Saccharomyces cerevisiae or its functional equivalent or its homolog, e.g. the increase of
[53442] (a) a gene product of a gene comprising the nucleic acid molecule as shown in the respective line in column 5 of Table I, application no. 9, preferably the coding region thereof, or a homolog or a fragment thereof, and being depicted in the same respective line as said Ydl022w, or a functional equivalent or a homolog thereof as shown in column 8 of Table I, application no. 9, preferably the coding region thereof, particularly a homolog or functional equivalent as shown in column 8 of Table I B, application no. 9, and being depicted in the same respective line as said Ydl022w, and preferably the activity is increased non-targeted, or
[53443] (b) a polypeptide comprising a polypeptide, a consensus sequence or at least a polypeptide motif as shown in the respective line in column 5 of Table II or in column 8 of Table IV, application no. 9, respectively, and being depicted in the same respective line as said Ydl022w, or a functional equivalent or a homolog thereof as depicted in column 8 of Table II, application no. 9, preferably a homolog or functional equivalent as depicted in column 8 of Table II B, application no. 9, and being depicted in the same respective line as said Ydl022w, and preferably the activity is increased non-targeted.

[53444] Accordingly, in one embodiment, the molecule which activity is to be increased in the process of the invention is the gene product with an activity as a “glycerol-3-phosphate dehydrogenase”, preferably it is the molecule of section (a) or (b) of this paragraph.

[53445] In particular, it was observed that in plants, especially in Arabidopsis thaliana, increasing or generating the activity of a gene product non-targeted with the activity of a “glycerol-3-phosphate dehydrogenase”, preferably being encoded by a gene comprising the nucleic acid sequence SEQ ID NO. 119408, preferably the coding region thereof, conferred the production of or the increase in linolenic acid compared with the wild type control.

[53446] The nucleic acid sequence of Ydl126c from Saccharomyces cerevisiae, e.g. as shown in the respective line in column 5 of Table I, application no. 9, has been published in A. And the activity of the gene product thereof is the activity of cell division control protein.

[53447] Accordingly, in one embodiment, the process of the present invention for producing linolenic acid in a non-human organism, like a microorganism or a plant or a part thereof, comprises increasing or generating the activity of a gene product with the activity of a gene product conferring the activity of “cell division control protein”, especially from Saccharomyces cerevisiae or its functional equivalent or its homolog, e.g. the increase of
[53448] (a) a gene product of a gene comprising the nucleic acid molecule as shown in the respective line in column 5 of Table I, application no. 9, preferably the coding region thereof, or a homolog or a fragment thereof, and being depicted in the same respective line as said Ydl126c, or a functional equivalent or a homolog thereof as shown in column 8 of Table I, application no. 9, preferably the coding region thereof, particularly a homolog or functional equivalent as shown in column 8 of Table I B, application no. 9, and being depicted in the same respective line as said Ydl126c, and preferably the activity is increased non-targeted, or
[53449] (b) a polypeptide comprising a polypeptide, a consensus sequence or at least a polypeptide motif as shown in the respective line in column 5 of Table II or in column 8 of Table IV, application no. 9, respectively, and being depicted in the same respective line as said Ydl126c, or a functional equivalent or a homolog thereof as depicted in column 8 of Table II, application no. 9, preferably a homolog or functional equivalent as depicted in column 8 of Table II B, application no. 9, and being depicted in the same respective line as said Ydl126c, and preferably the activity is increased non-targeted.

[53450] Accordingly, in one embodiment, the molecule which activity is to be increased in the process of the invention is the gene product with an activity as a “cell division control protein”, preferably it is the molecule of section (a) or (b) of this paragraph.

[53451] In particular, it was observed that in plants, especially in Arabidopsis thaliana, increasing or generating the activity of a gene product non-targeted with the activity of a “cell division control protein”, preferably being encoded by a gene comprising the nucleic acid sequence SEQ ID NO. 120045, preferably the coding region thereof, conferred the production of or the increase in linolenic acid compared with the wild type control.

[53452] The nucleic acid sequence of Ydr046c from Saccharomyces cerevisiae, e.g. as shown in the respective line in column 5 of Table I, application no. 9, has been published in A. And the activity of the gene product thereof is the activity of branched-chain amino acid permease.

[53453] Accordingly, in one embodiment, the process of the present invention for producing linolenic acid in a non-human organism, like a microorganism or a plant or a part thereof, comprises increasing or generating the activity of a gene product with the activity of a gene product conferring the activity of “branched-chain amino acid permease”, especially from Saccharomyces cerevisiae or its functional equivalent or its homolog, e.g. the increase of
[53454] (a) a gene product of a gene comprising the nucleic acid molecule as shown in the respective line in column 5 of Table I, application no. 9, preferably the coding region thereof, or a homolog or a fragment thereof, and being depicted in the same respective line as said Ydr046c, or a functional equivalent or a homolog thereof as shown in column 8 of Table I, application no. 9, preferably the coding region thereof, particularly a homolog or functional equivalent as shown in column 8 of Table I B, application no. 9, and being depicted in the same respective line as said Ydr046c, and preferably the activity is increased plastidic, or
[53455] (b) a polypeptide comprising a polypeptide, a consensus sequence or at least a polypeptide motif as shown in the respective line in column 5 of Table II or in column 8 of Table IV, application no. 9, respectively, and being depicted in the same respective line as said Ydr046c, or a functional equivalent or a homolog thereof as depicted in column 8 of Table II, application no. 9, preferably a homolog or functional equivalent as depicted in column 8 of Table II B, application no. 9, and being depicted in the same respective line as said Ydr046c, and preferably the activity is increased plastidic.

[53456] Accordingly, in one embodiment, the molecule which activity is to be increased in the process of the invention is the gene product with an activity as a “branched-chain amino acid permease”, preferably it is the molecule of section (a) or (b) of this paragraph.

[53457] In particular, it was observed that in plants, especially in Arabidopsis thaliana, increasing or generating the activity of a gene product plastidic with the activity of a “branched-chain amino acid permease”, preferably being encoded by a gene comprising the nucleic acid sequence SEQ ID NO. 63544, preferably the coding region thereof, conferred the production of or the increase in linolenic acid compared with the wild type control.

[53458] The nucleic acid sequence of Ydr131c from Saccharomyces cerevisiae, e.g. as shown in the respective line in column 5 of Table I, application no. 9, has been published in A. And the activity of the gene product thereof is the activity of F-box protein.

[53459] Accordingly, in one embodiment, the process of the present invention for producing linolenic acid in a non-human organism, like a microorganism or a plant or a part thereof, comprises increasing or generating the activity of a gene product with the activity of a gene product conferring the activity of “F-box protein”, especially from Saccharomyces cerevisiae or its functional equivalent or its homolog, e.g. the increase of
[53460] (a) a gene product of a gene comprising the nucleic acid molecule as shown in the respective line in column 5 of Table I, application no. 9, preferably the coding region thereof, or a homolog or a fragment thereof, and being depicted in the same respective line as said Ydr131c, or a functional equivalent or a homolog thereof as shown in column 8 of Table I, application no. 9, preferably the coding region thereof, particularly a homolog or functional equivalent as shown in column 8 of Table I B, application no. 9, and being depicted in the same respective line as said Ydr131c, and preferably the activity is increased plastidic, or
[53461] (b) a polypeptide comprising a polypeptide, a consensus sequence or at least a polypeptide motif as shown in the respective line in column 5 of Table II or in column 8 of Table IV, application no. 9, respectively, and being depicted in the same respective line as said Ydr131c, or a functional equivalent or a homolog thereof as depicted in column 8 of Table II, application no. 9, preferably a homolog or functional equivalent as depicted in column 8 of Table II B, application no. 9, and being depicted in the same respective line as said Ydr131c, and preferably the activity is increased plastidic.

[53462] Accordingly, in one embodiment, the molecule which activity is to be increased in the process of the invention is the gene product with an activity as a “F-box protein”, preferably it is the molecule of section (a) or (b) of this paragraph.

[53463] In particular, it was observed that in plants, especially in Arabidopsis thaliana, increasing or generating the activity of a gene product plastidic with the activity of a “F-box protein”, preferably being encoded by a gene comprising the nucleic acid sequence SEQ ID NO. 14706, preferably the coding region thereof, conferred the production of or the increase in linolenic acid compared with the wild type control.

[53464] The nucleic acid sequence of Ydr339c from Saccharomyces cerevisiae, e.g. as shown in the respective line in column 5 of Table I, application no. 9, has been published in A. And the activity of the gene product thereof is the activity of ydr339c-protein.

[53465] Accordingly, in one embodiment, the process of the present invention for producing linolenic acid in a non-human organism, like a microorganism or a plant or a part thereof, comprises increasing or generating the activity of a gene product with the activity of a gene product conferring the activity of “ydr339c-protein”, especially from Saccharomyces cerevisiae or its functional equivalent or its homolog, e.g. the increase of
[53466] (a) a gene product of a gene comprising the nucleic acid molecule as shown in the respective line in column 5 of Table I, application no. 9, preferably the coding region thereof, or a homolog or a fragment thereof, and being depicted in the same respective line as said Ydr339c, or a functional equivalent or a homolog thereof as shown in column 8 of Table I, application no. 9, preferably the coding region thereof, particularly a homolog or functional equivalent as shown in column 8 of Table I B, application no. 9, and being depicted in the same respective line as said Ydr339c, and preferably the activity is increased plastidic, or
[53467] (b) a polypeptide comprising a polypeptide, a consensus sequence or at least a polypeptide motif as shown in the respective line in column 5 of Table II or in column 8 of Table IV, application no. 9, respectively, and being depicted in the same respective line as said Ydr339c, or a functional equivalent or a homolog thereof as depicted in column 8 of Table II, application no. 9, preferably a homolog or functional equivalent as depicted in column 8 of Table II B, application no. 9, and being depicted in the same respective line as said Ydr339c, and preferably the activity is increased plastidic.

[53468] Accordingly, in one embodiment, the molecule which activity is to be increased in the process of the invention is the gene product with an activity as a “ydr339c-protein”, preferably it is the molecule of section (a) or (b) of this paragraph.

[53469] In particular, it was observed that in plants, especially in Arabidopsis thaliana, increasing or generating the activity of a gene product plastidic with the activity of a “ydr339c-protein”, preferably being encoded by a gene comprising the nucleic acid sequence SEQ ID NO. 120241, preferably the coding region thereof, conferred the production of or the increase in linolenic acid compared with the wild type control.

[53470] The nucleic acid sequence of Ydr507c from Saccharomyces cerevisiae, e.g. as shown in the respective line in column 5 of Table I, application no. 9, has been published in A. And the activity of the gene product thereof is the activity of ydr507c-protein.

[53471] Accordingly, in one embodiment, the process of the present invention for producing linolenic acid in a non-human organism, like a microorganism or a plant or a part thereof, comprises increasing or generating the activity of a gene product with the activity of a gene product conferring the activity of “ydr507c-protein”, especially from Saccharomyces cerevisiae or its functional equivalent or its homolog, e.g. the increase of
[53472] (a) a gene product of a gene comprising the nucleic acid molecule as shown in the respective line in column 5 of Table I, application no. 9, preferably the coding region thereof, or a homolog or a fragment thereof, and being depicted in the same respective line as said Ydr507c, or a functional equivalent or a homolog thereof as shown in column 8 of Table I, application no. 9, preferably the coding region thereof, particularly a homolog or functional equivalent as shown in column 8 of Table I B, application no. 9, and being depicted in the same respective line as said Ydr507c, and preferably the activity is increased non-targeted, or
[53473] (b) a polypeptide comprising a polypeptide, a consensus sequence or at least a polypeptide motif as shown in the respective line in column 5 of Table II or in column 8 of Table IV, application no. 9, respectively, and being depicted in the same respective line as said Ydr507c, or a functional equivalent or a homolog thereof as depicted in column 8 of Table II, application no. 9, preferably a homolog or functional equivalent as depicted in column 8 of Table II B, application no. 9, and being depicted in the same respective line as said Ydr507c, and preferably the activity is increased non-targeted.

[53474] Accordingly, in one embodiment, the molecule which activity is to be increased in the process of the invention is the gene product with an activity as a “ydr507c-protein”, preferably it is the molecule of section (a) or (b) of this paragraph.

[53475] In particular, it was observed that in plants, especially in Arabidopsis thaliana, increasing or generating the activity of a gene product non-targeted with the activity of a “ydr507c-protein”, preferably being encoded by a gene comprising the nucleic acid sequence SEQ ID NO. 90165, preferably the coding region thereof, conferred the production of or the increase in linolenic acid compared with the wild type control.

[53476] The nucleic acid sequence of Yfl053w from Saccharomyces cerevisiae, e.g. as shown in the respective line in column 5 of Table I, application no. 9, has been published in A. And the activity of the gene product thereof is the activity of dihydroxyacetone kinase.

[53477] Accordingly, in one embodiment, the process of the present invention for producing linolenic acid in a non-human organism, like a microorganism or a plant or a part thereof, comprises increasing or generating the activity of a gene product with the activity of a gene product conferring the activity of “dihydroxyacetone kinase”, especially from Saccharomyces cerevisiae or its functional equivalent or its homolog, e.g. the increase of
[53478] (a) a gene product of a gene comprising the nucleic acid molecule as shown in the respective line in column 5 of Table I, application no. 9, preferably the coding region thereof, or a homolog or a fragment thereof, and being depicted in the same respective line as said Yfl053w, or a functional equivalent or a homolog thereof as shown in column 8 of Table I, application no. 9, preferably the coding region thereof, particularly a homolog or functional equivalent as shown in column 8 of Table I B, application no. 9, and being depicted in the same respective line as said Yfl053w, and preferably the activity is increased non-targeted, or
[53479] (b) a polypeptide comprising a polypeptide, a consensus sequence or at least a polypeptide motif as shown in the respective line in column 5 of Table II or in column 8 of Table IV, application no. 9, respectively, and being depicted in the same respective line as said Yfl053w, or a functional equivalent or a homolog thereof as depicted in column 8 of Table II, application no. 9, preferably a homolog or functional equivalent as depicted in column 8 of Table II B, application no. 9, and being depicted in the same respective line as said Yfl053w, and preferably the activity is increased non-targeted.

[53480] Accordingly, in one embodiment, the molecule which activity is to be increased in the process of the invention is the gene product with an activity as a “dihydroxyacetone kinase”, preferably it is the molecule of section (a) or (b) of this paragraph.

[53481] In particular, it was observed that in plants, especially in Arabidopsis thaliana, increasing or generating the activity of a gene product non-targeted with the activity of a “dihydroxyacetone kinase”, preferably being encoded by a gene comprising the nucleic acid sequence SEQ ID NO. 120309, preferably the coding region thereof, conferred the production of or the increase in linolenic acid compared with the wild type control.

[53482] The nucleic acid sequence of Ygl039w from Saccharomyces cerevisiae, e.g. as shown in the respective line in column 5 of Table I, application no. 9, has been published in A. And the activity of the gene product thereof is the activity of oxidoreductase.

[53483] Accordingly, in one embodiment, the process of the present invention for producing linolenic acid in a non-human organism, like a microorganism or a plant or a part thereof, comprises increasing or generating the activity of a gene product with the activity of a gene product conferring the activity of “oxidoreductase”, especially from Saccharomyces cerevisiae or its functional equivalent or its homolog, e.g. the increase of
[53484] (a) a gene product of a gene comprising the nucleic acid molecule as shown in the respective line in column 5 of Table I, application no. 9, preferably the coding region thereof, or a homolog or a fragment thereof, and being depicted in the same respective line as said Ygl039w, or a functional equivalent or a homolog thereof as shown in column 8 of Table I, application no. 9, preferably the coding region thereof, particularly a homolog or functional equivalent as shown in column 8 of Table I B, application no. 9, and being depicted in the same respective line as said Ygl039w, and preferably the activity is increased plastidic, or
[53485] (b) a polypeptide comprising a polypeptide, a consensus sequence or at least a polypeptide motif as shown in the respective line in column 5 of Table II or in column 8 of Table IV, application no. 9, respectively, and being depicted in the same respective line as said Ygl039w, or a functional equivalent or a homolog thereof as depicted in column 8 of Table II, application no. 9, preferably a homolog or functional equivalent as depicted in column 8 of Table II B, application no. 9, and being depicted in the same respective line as said Ygl039w, and preferably the activity is increased plastidic.

[53486] Accordingly, in one embodiment, the molecule which activity is to be increased in the process of the invention is the gene product with an activity as a “oxidoreductase”, preferably it is the molecule of section (a) or (b) of this paragraph.

[53487] In particular, it was observed that in plants, especially in Arabidopsis thaliana, increasing or generating the activity of a gene product plastidic with the activity of a “oxidoreductase”, preferably being encoded by a gene comprising the nucleic acid sequence SEQ ID NO. 120436, preferably the coding region thereof, conferred the production of or the increase in linolenic acid compared with the wild type control.

[53488] The nucleic acid sequence of Yjl073w from Saccharomyces cerevisiae, e.g. as shown in the respective line in column 5 of Table I, application no. 9, has been published in A. And the activity of the gene product thereof is the activity of DnaJ-like chaperone.

[53489] Accordingly, in one embodiment, the process of the present invention for producing linolenic acid in a non-human organism, like a microorganism or a plant or a part thereof, comprises increasing or generating the activity of a gene product with the activity of a gene product conferring the activity of “DnaJ-like chaperone”, especially from Saccharomyces cerevisiae or its functional equivalent or its homolog, e.g. the increase of
[53490] (a) a gene product of a gene comprising the nucleic acid molecule as shown in the respective line in column 5 of Table I, application no. 9, preferably the coding region thereof, or a homolog or a fragment thereof, and being depicted in the same respective line as said Yjl073w, or a functional equivalent or a homolog thereof as shown in column 8 of Table I, application no. 9, preferably the coding region thereof, particularly a homolog or functional equivalent as shown in column 8 of Table I B, application no. 9, and being depicted in the same respective line as said Yjl073w, and preferably the activity is increased plastidic, or
[53491] (b) a polypeptide comprising a polypeptide, a consensus sequence or at least a polypeptide motif as shown in the respective line in column 5 of Table II or in column 8 of Table IV, application no. 9, respectively, and being depicted in the same respective line as said Yjl073w, or a functional equivalent or a homolog thereof as depicted in column 8 of Table II, application no. 9, preferably a homolog or functional equivalent as depicted in column 8 of Table II B, application no. 9, and being depicted in the same respective line as said Yjl073w, and preferably the activity is increased plastidic.

[53492] Accordingly, in one embodiment, the molecule which activity is to be increased in the process of the invention is the gene product with an activity as a “DnaJ-like chaperone”, preferably it is the molecule of section (a) or (b) of this paragraph.

[53493] In particular, it was observed that in plants, especially in Arabidopsis thaliana, increasing or generating the activity of a gene product plastidic with the activity of a “DnaJ-like chaperone”, preferably being encoded by a gene comprising the nucleic acid sequence SEQ ID NO. 64964, preferably the coding region thereof, conferred the production of or the increase in linolenic acid compared with the wild type control.

[53494] The nucleic acid sequence of Ymr013c from Saccharomyces cerevisiae, e.g. as shown in the respective line in column 5 of Table I, application no. 9, has been published in A. And the activity of the gene product thereof is the activity of ymr013c-protein.

[53495] Accordingly, in one embodiment, the process of the present invention for producing linolenic acid in a non-human organism, like a microorganism or a plant or a part thereof, comprises increasing or generating the activity of a gene product with the activity of a gene product conferring the activity of “ymr013c-protein”, especially from Saccharomyces cerevisiae or its functional equivalent or its homolog, e.g. the increase of
[53496] (a) a gene product of a gene comprising the nucleic acid molecule as shown in the respective line in column 5 of Table I, application no. 9, preferably the coding region thereof, or a homolog or a fragment thereof, and being depicted in the same respective line as said Ymr013c, or a functional equivalent or a homolog thereof as shown in column 8 of Table I, application no. 9, preferably the coding region thereof, particularly a homolog or functional equivalent as shown in column 8 of Table I B, application no. 9, and being depicted in the same respective line as said Ymr013c, and preferably the activity is increased plastidic, or
[53497] (b) a polypeptide comprising a polypeptide, a consensus sequence or at least a polypeptide motif as shown in the respective line in column 5 of Table II or in column 8 of Table IV, application no. 9, respectively, and being depicted in the same respective line as said Ymr013c, or a functional equivalent or a homolog thereof as depicted in column 8 of Table II, application no. 9, preferably a homolog or functional equivalent as depicted in column 8 of Table II B, application no. 9, and being depicted in the same respective line as said Ymr013c, and preferably the activity is increased plastidic.

[53498] Accordingly, in one embodiment, the molecule which activity is to be increased in the process of the invention is the gene product with an activity as a “ymr013c-protein”, preferably it is the molecule of section (a) or (b) of this paragraph.

[53499] In particular, it was observed that in plants, especially in Arabidopsis thaliana, increasing or generating the activity of a gene product plastidic with the activity of a “ymr013c-protein”, preferably being encoded by a gene comprising the nucleic acid sequence SEQ ID NO. 91958, preferably the coding region thereof, conferred the production of or the increase in linolenic acid compared with the wild type control.

[53500] The nucleic acid sequence of Ynl064c from Saccharomyces cerevisiae, e.g. as shown in the respective line in column 5 of Table I, application no. 9, has been published in A. And the activity of the gene product thereof is the activity of molecular chaperone.

[53501] Accordingly, in one embodiment, the process of the present invention for producing linolenic acid in a non-human organism, like a microorganism or a plant or a part thereof, comprises increasing or generating the activity of a gene product with the activity of a gene product conferring the activity of “molecular chaperone”, especially from Saccharomyces cerevisiae or its functional equivalent or its homolog, e.g. the increase of
[53502] (a) a gene product of a gene comprising the nucleic acid molecule as shown in the respective line in column 5 of Table I, application no. 9, preferably the coding region thereof, or a homolog or a fragment thereof, and being depicted in the same respective line as said Ynl064c, or a functional equivalent or a homolog thereof as shown in column 8 of Table I, application no. 9, preferably the coding region thereof, particularly a homolog or functional equivalent as shown in column 8 of Table I B, application no. 9, and being depicted in the same respective line as said Ynl064c, and preferably the activity is increased non-targeted, or
[53503] (b) a polypeptide comprising a polypeptide, a consensus sequence or at least a polypeptide motif as shown in the respective line in column 5 of Table II or in column 8 of Table IV, application no. 9, respectively, and being depicted in the same respective line as said Ynl064c, or a functional equivalent or a homolog thereof as depicted in column 8 of Table II, application no. 9, preferably a homolog or functional equivalent as depicted in column 8 of Table II B, application no. 9, and being depicted in the same respective line as said Ynl064c, and preferably the activity is increased non-targeted.

[53504] Accordingly, in one embodiment, the molecule which activity is to be increased in the process of the invention is the gene product with an activity as a “molecular chaperone”, preferably it is the molecule of section (a) or (b) of this paragraph.

[53505] In particular, it was observed that in plants, especially in Arabidopsis thaliana, increasing or generating the activity of a gene product non-targeted with the activity of a “molecular chaperone”, preferably being encoded by a gene comprising the nucleic acid sequence SEQ ID NO. 117495, preferably the coding region thereof, conferred the production of or the increase in linolenic acid compared with the wild type control.

[53506] The nucleic acid sequence of Ypl271w from Saccharomyces cerevisiae, e.g. as shown in the respective line in column 5 of Table I, application no. 9, has been published in A. And the activity of the gene product thereof is the activity of ATPase epsilon subunit.

[53507] Accordingly, in one embodiment, the process of the present invention for producing linolenic acid in a non-human organism, like a microorganism or a plant or a part thereof, comprises increasing or generating the activity of a gene product with the activity of a gene product conferring the activity of “ATPase epsilon subunit”, especially from Saccharomyces cerevisiae or its functional equivalent or its homolog, e.g. the increase of
[53508] (a) a gene product of a gene comprising the nucleic acid molecule as shown in the respective line in column 5 of Table I, application no. 9, preferably the coding region thereof, or a homolog or a fragment thereof, and being depicted in the same respective line as said Ypl271w, or a functional equivalent or a homolog thereof as shown in column 8 of Table I, application no. 9, preferably the coding region thereof, particularly a homolog or functional equivalent as shown in column 8 of Table I B, application no. 9, and being depicted in the same respective line as said YpI271w, and preferably the activity is increased plastidic, or
[53509] (b) a polypeptide comprising a polypeptide, a consensus sequence or at least a polypeptide motif as shown in the respective line in column 5 of Table II or in column 8 of Table IV, application no. 9, respectively, and being depicted in the same respective line as said Ypl271w, or a functional equivalent or a homolog thereof as depicted in column 8 of Table II, application no. 9, preferably a homolog or functional equivalent as depicted in column 8 of Table II B, application no. 9, and being depicted in the same respective line as said Ypl271w, and preferably the activity is increased plastidic.

[53510] Accordingly, in one embodiment, the molecule which activity is to be increased in the process of the invention is the gene product with an activity as a “ATPase epsilon subunit”, preferably it is the molecule of section (a) or (b) of this paragraph.

[53511] In particular, it was observed that in plants, especially in Arabidopsis thaliana, increasing or generating the activity of a gene product plastidic with the activity of a “ATPase epsilon subunit”, preferably being encoded by a gene comprising the nucleic acid sequence SEQ ID NO. 118212, preferably the coding region thereof, conferred the production of or the increase in linolenic acid compared with the wild type control.

[53512] The nucleic acid sequence of 59582753_SOYBEAN from Glycine max, e.g. as shown in the respective line in column 5 of Table I, application no. 9, is unpublished. And the activity of the gene product thereof is the activity of glucose-6-phosphate 1-dehydrogenase.

[53513] Accordingly, in one embodiment, the process of the present invention for producing linolenic acid in a non-human organism, like a microorganism or a plant or a part thereof, comprises increasing or generating the activity of a gene product with the activity of a gene product conferring the activity of “glucose-6-phosphate 1-dehydrogenase”, especially from Glycine max or its functional equivalent or its homolog, e.g. the increase of
[53514] (a) a gene product of a gene comprising the nucleic acid molecule as shown in the respective line in column 5 of Table I, application no. 9, preferably the coding region thereof, or a homolog or a fragment thereof, and being depicted in the same respective line as said 59582753_SOYBEAN, or a functional equivalent or a homolog thereof as shown in column 8 of Table I, application no. 9, preferably the coding region thereof, particularly a homolog or functional equivalent as shown in column 8 of Table I B, application no. 9, and being depicted in the same respective line as said 59582753_SOYBEAN, and preferably the activity is increased plastidic, or
[53515] (b) a polypeptide comprising a polypeptide, a consensus sequence or at least a polypeptide motif as shown in the respective line in column 5 of Table II or in column 8 of Table IV, application no. 9, respectively, and being depicted in the same respective line as said 59582753_SOYBEAN, or a functional equivalent or a homolog thereof as depicted in column 8 of Table II, application no. 9, preferably a homolog or functional equivalent as depicted in column 8 of Table II B, application no. 9, and being depicted in the same respective line as said 59582753_SOYBEAN, and preferably the activity is increased plastidic.

[53516] Accordingly, in one embodiment, the molecule which activity is to be increased in the process of the invention is the gene product with an activity as a “glucose-6-phosphate 1-dehydrogenase”, preferably it is the molecule of section (a) or (b) of this paragraph.

[53517] In particular, it was observed that in plants, especially in Arabidopsis thaliana, increasing or generating the activity of a gene product plastidic with the activity of a “glucose-6-phosphate 1-dehydrogenase”, preferably being encoded by a gene comprising the nucleic acid sequence SEQ ID NO. 16883, preferably the coding region thereof, conferred the production of or the increase in linolenic acid compared with the wild type control.

[53518] [0105.1.8.9] to [0107.1.8.9] for the disclosure of these paragraphs see [0105.1.8.8] to [0107.1.8.8] above.

[53519] A protein having an activity conferring an increase in the amount or level of the fine chemical linolenic acid, upon targeting to the plastids or mitochondria or upon non-targeting, preferably has the structure of the respective polypeptide described herein, in particular of the polypeptides comprising the consensus sequence or at least one polypeptide motifs as shown in the respective line in Table IV, application no. 9, column 8 or of the polypeptide comprising an amino acid sequence as disclosed in the respective line in Table II, application no. 9, columns 5 or 8, or homologs or fragments thereof as described herein, or is encoded by the nucleic acid molecule characterized herein or the nucleic acid molecule according to the invention, for example by the nucleic acid molecule as shown in the respective line in Table I, application no. 9, columns 5 or 8, preferably the coding region thereof, or homologs or fragments thereof and has the herein mentioned activity.

[53520] [0109.1.8.9] to [0110.1.8.9] for the disclosure of these paragraphs see [0109.1.8.8] to [0110.1.8.8] above.

[53521] In one embodiment, the process of the present invention comprises one or more of the following steps
[53522] (a) stabilizing a protein conferring the generation or increased expression of a protein encoded by the nucleic acid molecule of the invention or of the polypeptide of the invention, e.g. of a polypeptide having the activity selected from the group consisting of 3-oxoacyl-[acyl-carrier-protein] reductase, 3-oxoacyl-[acyl-carrier-protein] synthase, AAS bifunctional protein, acid phosphatase precursor, acid shock protein, acyl transferase, acyl-CoA synthase, arginine decarboxylase, aromatic acid decarboxylase, asparaginase, At2g45420-protein, ATPase epsilon subunit, b0195-protein, b1234-protein, b1248-protein, b1280-protein, b1330-protein, b1470-protein, b1670-protein, b1672-protein, b1837-protein, b2032-protein, b2107-protein, b2399-protein, b2474-protein, b2613-protein, b2682-protein, b3442-protein, b3534-protein, b4023-protein, bifunctional purine biosynthesis protein, branched chain amino acid ABC transporter ATP-binding protein, branched-chain amino acid permease, carbamoyl-phosphate synthase subunit, carbon dioxide concentrating mechanism protein, cation-transporting ATPase, cell division control protein, coproporphyrinogen III oxidase, CTP synthase, CTP synthetase, dihydroxyacetone kinase, DnaJ-like chaperone, electron transport complex protein, ethanolamine utilization protein, F-box protein, flavodoxin, fumarate hydratase, glucose-6-phosphate 1-dehydrogenase, glutaredoxin, glycerol-3-phosphate dehydrogenase, heat shock transcription factor, HesB/YadR/YfhF family protein, isopropylmalate isomerase large subunit, metal-dependent hydrolase, molecular chaperone, monothiol glutaredoxin, multidrug resistance protein, oxidoreductase, permease protein of ABC transporter, phosphate import ATP-binding protein, phosphoadenosine phosphosulfate reductase , phosphofructokinase, phosphotriesterase, protein phosphatase, pyruvate kinase, recombinase A, sec-independent protein translocase, sll1032-protein, ThiF family protein, threonine dehydratase, threonine efflux protein, transcription factor, TTC1386-protein, ydr339c-protein, ydr507c-protein, and ymr013c-protein, or of a polypeptide as indicated in the respective line in Table II, application no. 9, columns 5 or 8, or its homologs or fragments, and conferring the production of or an increase in linolenic acid, respectively; and/or
[53523] (b) stabilizing a mRNA conferring the generation or increased expression of a FCRP, e.g. protein encoded by the nucleic acid molecule of the invention or its homologs or fragments, or of a mRNA encoding the polypeptide of the present invention having the herein-mentioned activity selected from the group consisting of said activities mentioned in (a) and conferring the production of or an increase in linolenic acid, respectively; and/or
[53524] (c) increasing the specific activity of a protein conferring the increased expression of a FCRP, e.g. a protein encoded by the nucleic acid molecule of the invention or of the polypeptide of the present invention having herein-mentioned linolenic acid generating or increasing activity, respectively, e.g. of a polypeptide having the activity of a protein as indicated in the respective line in Table II, application no. 9, columns 5 or 8, or its homologs or fragments, or decreasing the inhibitory regulation of the polypeptide of the invention; and/or
[53525] (d) generating or increasing the expression of an endogenous or artificial transcription factor mediating the expression of a protein conferring the generation or increased expression of a FCRP, e.g. a protein encoded by the nucleic acid molecule of the invention or of the polypeptide of the invention having herein-mentioned activity selected from the group consisting of said activities mentioned in (a) and conferring a linolenic acid increasing activity, respectively, e.g. of a polypeptide having the activity of a protein as indicated in the respective line in Table II, application no. 9, columns 5 or 8 or its homologs; and/or
[53526] (e) stimulating activity of a protein conferring the increased expression of a FCRP, e.g. a protein encoded by the nucleic acid molecule of the present invention or a polypeptide of the present invention having herein-mentioned activity selected from the group consisting of said activities mentioned in (a) and conferring a linolenic acid increasing activity, respectively, e.g. of a polypeptide having the activity of a protein as indicated in the respective line in Table II, application no. 9, columns 5 or 8, or its homologs or fragments, by adding one or more exogenous inducing factors to the non-human organism or parts thereof; and/or
[53527] (f) expressing a transgenic gene encoding a protein conferring the increased expression of a FCRP, e.g. a polypeptide encoded by the nucleic acid molecule of the present invention or a polypeptide of the present invention, having herein-mentioned activity selected from the group consisting of said activities mentioned in (a) and conferring a linolenic acid increasing activity, respectively, e.g. of a polypeptide having the activity of a protein as indicated in the respective line in Table II, application no. 9, columns 5 or 8, or its homologs or fragments, and/or
[53528] (g) increasing the copy number of a gene conferring the increased expression of a nucleic acid molecule encoding a FCRP, e.g. a polypeptide encoded by the nucleic acid molecule of the invention or the polypeptide of the invention having herein-mentioned activity selected from the group consisting of said activities mentioned in (a) and conferring a linolenic acid increasing activity, respectively, e.g. of a polypeptide having the activity of a protein as indicated in the respective line in Table II, application no. 9, columns 5 or 8, or its homologs or fragments; and/or
[53529] (h) increasing the expression of the endogenous gene encoding the FCRP, polypeptide of the invention, e.g. a polypeptide encoded by the nucleic acid molecule of the invention or the polypeptide of the invention having herein-mentioned activity selected from the group consisting of said activities mentioned in (a) and conferring a linolenic acid; increasing activity, respectively, e.g. of a polypeptide having the activity of a protein as indicated in the respective line in Table II, application no. 9, columns 5 or 8, or its homologs or fragments, by adding positive expression or removing negative expression elements, e.g. homologous recombination can be used to either introduce positive regulatory elements like for plants the 35S enhancer into the promoter or to remove repressor elements form regulatory regions. Further gene conversion methods can be used to disrupt repressor elements or to enhance to activity of positive elements. Positive elements can be randomly introduced in plants by T-DNA or transposon mutagenesis and lines can be identified in which the positive elements have be integrated near to a gene of the invention, the expression of which is thereby enhanced; and/or
[53530] (i) modulating growth conditions of the non-human organism in such a manner, that the expression or activity of the gene encoding the FCRP, e.g. a protein of the invention or the protein itself is enhanced, for example microorganisms or plants can be grown for example under a higher temperature regime leading to an enhanced expression of heat shock proteins, which can lead to an enhanced linolenic acid production, respectively; and/or
[53531] (j) selecting of non-human organisms with especially high activity of the proteins of the invention from natural or from mutagenized resources and breeding them into the target organisms, e.g. the elite crops; and/or
[53532] (k) directing a protein encoded by the nucleic acid molecule of the invention or of the polypeptide of the present invention having herein-mentioned activity selected from the group consisting of said activities mentioned in (a) and conferring a linolenic acid increasing activity, respectively, e.g. of a polypeptide having the activity of a protein as indicated in the respective line in Table II, application no. 9, columns 5 or 8, or its homologs or fragments, if for the corresponding nucleic acid molecule in the respective line in column 6 of Table I the term “plastidic” is indicated, to the plastids by the addition of a plastidial targeting sequence or if for the corresponding nucleic acid molecule in the respective line in column 6 of Table I the term “mitochondrial” is indicated, to the mitochondria by the addition of a mitochondrial targeting sequence; and/or
[53533] (l) generating the expression of a protein encoded by the nucleic acid molecule of the invention or of the polypeptide of the present invention having herein-mentioned activity selected from the group consisting of said activities mentioned in (a) and conferring a linolenic acid increasing activity, respectively, e.g. of a polypeptide having the activity of a protein as indicated in the respective line in Table II, application no. 9, columns 5 or 8, or its homologs or fragments, if for the corresponding nucleic acid molecule in the respective line in column 6 of Table I the term “plastidic” or “mitochondrial” is indicated, in these organelles by the stable or transient transformation, advantageously stable transformation, of organelles, preferably plastids or mitochondria, with an inventive nucleic acid sequence preferably in form of an expression cassette containing said sequence leading to the expression of the nucleic acids or polypeptides of the invention in the respective organelle; and/or
[53534] (m) generating the expression of a protein encoded by the nucleic acid molecule of the invention or of the polypeptide of the present invention having herein-mentioned activity selected from the group consisting of said activities mentioned in (a) and conferring a linolenic acid increasing activity, respectively, e.g. of a polypeptide having the activity of a protein as indicated in the respective line in Table II, application no. 9, columns 5 or 8, or its homologs or fragments, if for the corresponding nucleic acid molecule in the respective line in column 6 of Table I the term “plastidic” or “mitochondrial” is indicated, in these organelles by integration of a nucleic acid of the invention into the genome of the respective organelle under control of preferable a promoter selective for the respective organelle.

[53535] Preferably, said mRNA is the coding region of the nucleic acid molecule of the present invention and/or the protein conferring the increased expression of a protein encoded by the coding region of the nucleic acid molecule of the present invention alone or linked to a transit nucleic acid sequence or transit peptide encoding nucleic acid sequence or the polypeptide having the herein mentioned activity, e.g. conferring the generation of or increase of linolenic acid, respectively, after increasing the expression or activity of the encoded polypeptide, non-targeted or in organelles such as plastids and/or mitochondria, preferably plastids, or having the activity of a polypeptide having an activity as the protein as shown in the respective line in Table II, application no. 9, column 3, or its homologs. Preferably the increase of linolenic acid, respectively, takes place non-targeted or in plastids and/or mitochondria, preferably non-targeted or in plastids.

[53536] [0113.1.8.9] to [0122.1.8.9] for the disclosure of these paragraphs see [0113.1.8.8] to [0122.1.8.8] above.

[53537] The activation of an endogenous polypeptide having above-mentioned activity, e.g. having the activity of a protein as shown in the respective line in Table II, application no. 9, column 3 or of the polypeptide of the invention, e.g. conferring the increase of the fine chemical linolenic acid, respectively, by increase of expression or activity in the cytoplasm, and/or in the cytosol, and/or in an organelle, such as plastids or mitochondria, can also be increased by introducing a synthetic transcription factor, which binds close to the coding region of the gene encoding the protein as shown in the respective line in Table II, application no. 9, column 5 or 8, or homologs or fragments thereof, and activates its transcription. A chimeric zinc finger protein can be constructed, which comprises a specific DNA-binding domain and an activation domain as e.g. the VP16 domain of Herpes Simplex virus. The specific binding domain can bind to the regulatory region of the gene encoding the protein as shown in the respective line in Table II, application no. 9, column 5 or 8, or homologs or fragments thereof. The expression of the chimeric transcription factor in a non-human organism, in particular in a plant, leads to a specific expression of the protein as shown in the respective line in Table II, application no. 9, column 5 or 8, or homologs or fragments thereof, see e.g. in WO01/52620, Oriz, Proc. Natl. Acad. Sci. USA 99, 13290 (2002), or Guan, Proc. Natl. Acad. Sci. USA 99, 13296 (2002).

[53538] [0124.1.8.9] to [0127.1.8.9] for the disclosure of these paragraphs see [0124.1.8.8] to [0127.1.8.8] above.

[53539] Owing to the introduction of a gene or a plurality of genes conferring the expression of the nucleic acid molecule of the invention or the polypeptide of the invention, for example the nucleic acid construct mentioned below, or encoding the protein as shown in the respective line in Table II, application no. 9, column 5 or 8, or homologs or fragments thereof, into a non-human organism alone or in combination with other genes, it is possible not only to increase the biosynthetic flux towards the end product, but also to increase, modify or create de novo an advantageous, preferably novel metabolites composition in the non-human organism, e.g. an advantageous composition comprising a higher content of (from a viewpoint of nutritional physiology limited) linolenic acid and if desired other fatty acids, and/or other metabolites, in free or bound form.

[53540] for the disclosure of this paragraph see [0129.1.8.8] above.

[53541] Accordingly, in one embodiment, the process according to the invention relates to a process, which comprises:
[53542] (a) providing a non-human organism, preferably a microorganism, a plant cell, a plant tissue, a plant or a part thereof, more preferably a microorganism, a plant tissue, a plant or a part thereof;
[53543] (b) increasing the activity of a protein as shown in the respective line in Table II, application no. 9, column 3 or of a polypeptide being encoded by the respective nucleic acid molecule of the present invention and described below, e.g. conferring an increase of the fine chemical linolenic acid, respectively, in the non-human organism, preferably in the microorganism, the plant cell, the plant tissue, the plant or a part thereof, more preferably a microorganism, a plant tissue, a plant or a part thereof, especially cytoplasmic or in an organelle, like plastids or mitochondria,
[53544] (c) growing the non-human organism, preferably the microorganism, the plant cell, the plant tissue, the plant or a part thereof, under conditions which permit the production of said fine chemical in the non-human organism, preferably the microorganism, the plant cell, the plant tissue, the plant or a part thereof; and
[53545] (d) if desired, recovering, optionally isolating, said fine chemical, in free and/or bound form, and, optionally further free and/or bound fatty acids, and/or other metabolites synthesized by the non-human organism, the microorganism, the plant cell, the plant tissue, the plant or a part thereof.

[53546] [0131.1.8.9] to [0139.1.8.9] for the disclosure of these paragraphs see [0131.1.8.8] to [0139.1.8.8] above.

[53547] In another embodiment, the invention relates to a (isolated) nucleic acid molecule, which comprises a nucleic acid molecule selected from the group consisting of:
[53548] (a) a nucleic acid molecule encoding a polypeptide shown in Table II, application no. 9, column 5 or 8, preferably shown in Table II B, application no. 9, column 8, or a homolog or a fragment thereof;
[53549] (b) a nucleic acid molecule shown in Table I, application no. 9, column 5 or 8, preferably shown in Table I B, application no. 9, column 8, preferably the coding region thereof, or a homolog or a fragment thereof;
[53550] (c) a nucleic acid molecule, which, as a result of the degeneracy of the genetic code, can be derived from a polypeptide sequence depicted in column 5 or 8 of Table II, application no. 9, preferably in column 8 of Table II B, application no. 9;
[53551] (d) a nucleic acid molecule having at least 30% identity, preferably at least 40%, 50%, 60%, 70%, 75%, 80%, 85%, 90%, 95%, 96%, 97%, 98%, 99%, 99.5%, with the nucleic acid molecule sequence of a polynucleotide comprising the nucleic acid molecule shown in column 5 or 8 of Table I, application no. 9, preferably shown in column 8 of Table I B, application no. 9, preferably the coding region thereof;
[53552] (e) a nucleic acid molecule encoding a polypeptide having at least 30% identity, preferably at least 40%, 50% 60%, 70%, 75%, 80%, 85%, 90%, 95%, 96%, 97%, 98%, 99%, 99.5%, identity with the amino acid sequence of the polypeptide encoded by the nucleic acid molecule of (a), (b), (c) or (d);
[53553] (f) a nucleic acid molecule which hybridizes with a nucleic acid molecule of (a), (b), (c), (d) or (e) under stringent hybridization conditions;
[53554] (g) a nucleic acid molecule encoding a polypeptide which can be isolated with the aid of monoclonal or polyclonal antibodies made against a polypeptide encoded by one of the nucleic acid molecules of (a), (b), (c), (d), (e) or (f);
[53555] (h) a nucleic acid molecule encoding a polypeptide comprising the consensus sequence or one or more polypeptide motifs as shown in column 8 of Table IV, application no. 9;
[53556] (i) a nucleic acid molecule encoding a polypeptide having the activity represented by a respective protein as depicted in column 5 of Table II, application no. 9;
[53557] (j) a nucleic acid molecule comprising a polynucleotide which is obtained by amplifying a cDNA library or a genomic library using the primers in Table III, application no. 9, column 8;
[53558] and
[53559] (k) nucleic acid molecule which is obtainable by screening a suitable nucleic acid library, especially a cDNA library and/or a genomic library, under stringent hybridization conditions with a probe comprising one of the sequences of the nucleic acid molecule of (a), (b), (c), (d), (e), (f), (g), (h), (i) or (j) or with a fragment of at least 15 nt, preferably 20 nt, 30 nt, 50 nt, 100 nt, 200 nt,500 nt, 1000 nt, 1500 nt, 2000 nt or 3000 nt of the nucleic acid molecule characterized in (a), (b), (c), (d), (e), (f), (g), (h), (i) or (j);
[53560] or a nucleic acid molecule comprising a sequence which is complementary thereto.
   (All the references to Tables I to IV are references to the corresponding lines of Tables I to IV.)

[53561] In a preferred embodiment thereof said nucleic acid molecule according to (a), (b), (c), (d), (e), (f), (g), (h), (i), (j) or (k) encodes a polypeptide which has the activity of the respective polypeptide represented by a protein comprising a polypeptide as depicted in the respective line in column 5 of Table II, application no. 9.

[53562] In another preferred embodiment thereof said nucleic acid molecule according to (a), (b), (c), (d), (e), (f), (g), (h), (i), (j) or (k) confers a generation or an increase of the respective fine chemical in a non-human organism or a part thereof as compared to a corresponding wild-type non-human organism or part thereof.

[53563] In another preferred embodiment thereof said nucleic acid molecule according to (a), (b), (c), (d), (e), (f), (g), (h), (i), (j) or (k) encodes a polypeptide which has the activity of the respective polypeptide represented by a protein as depicted in the respective line in column 5 of Table II application no. 9 and confers a generation or an increase of the respective fine chemical in a non-human organism or a part thereof as compared to a corresponding wild-type non-human organism or part thereof.

[53564] In another embodiment, the invention relates to a (isolated) nucleic acid molecule, which comprises a nucleic acid molecule selected from the group consisting of:
[53565] (a) a nucleic acid molecule encoding a polypeptide shown in Table II, column 5 or 8, application no. 9, preferably shown in Table II A, application no. 9, in column 5 or in Table II A, application no. 9, column 8 or in Table II B, application no. 9, column 8, or a homolog or a fragment thereof;
[53566] (b) a nucleic acid molecule shown in Table I, application no. 9, column 5 or 8, preferably shown in Table I A, application no. 9, in column 5 or in Table I A, application no. 9, column 8 or in Table I B, application no. 9, column 8, preferably the coding region thereof, or a homolog or a fragment thereof;
[53567] (c) a nucleic acid molecule, which, as a result of the degeneracy of the genetic code, can be derived from a polypeptide sequence depicted in column 5 or 8 of Table II, application no. 9, preferably shown in Table II A, application no. 9, in column 5 or in Table II A, application no. 9, column 8 or in Table II B, application no. 9, column 8;
[53568] (d) a nucleic acid molecule having at least 30% identity, preferably at least 40%, 50%, 60%, 70%, 75%, 80%, 85%, 90%, 95%, 96%, 97%, 98%, 99%, 99.5%, with the nucleic acid molecule sequence of a polynucleotide comprising the nucleic acid molecule shown in column 5 or 8 of Table I, application no. 9, preferably shown in Table I A, application no. 9, in column 5 or in Table I A, application no. 9, column 8 or in Table I B column 8, preferably the coding region thereof;
[53569] (e) a nucleic acid molecule encoding a polypeptide having at least 30% identity, preferably at least 40%, 50% 60%, 70%, 75%, 80%, 85%, 90%, 95%, 96%, 97%, 98%, 99%, 99.5%, identity with the amino acid sequence of the polypeptide encoded by the nucleic acid molecule of (a), (b), (c) or (d);
[53570] (f) a nucleic acid molecule which hybridizes with a nucleic acid molecule of (a), (b), (c), (d) or (e) under stringent hybridization conditions;
[53571] (g) a nucleic acid molecule encoding a polypeptide which can be isolated with the aid of monoclonal or polyclonal antibodies made against a polypeptide encoded by one of the nucleic acid molecules of (a), (b), (c), (d), (e) or (f);
[53572] (h) a nucleic acid molecule encoding a polypeptide comprising the consensus sequence or one or more polypeptide motifs as shown in column 8 of Table IV, application no. 9;
[53573] (i) a nucleic acid molecule encoding a polypeptide having the activity represented by a respective protein as depicted in column 5 of Table II, application no. 9;
[53574] (j) a nucleic acid molecule comprising a polynucleotide which is obtained by amplifying a cDNA library or a genomic library using the primers in Table III, application no. 9, column 8;
[53575] and
[53576] (k) nucleic acid molecule which is obtainable by screening a suitable nucleic acid library, especially a cDNA library and/or a genomic library, under stringent hybridization conditions with a probe comprising one of the sequences of the nucleic acid molecule of (a), (b), (c), (d), (e), (f), (g), (h), (i) or (j) or with a fragment thereof having at least 15 nt, preferably 20 nt, 30 nt, 50 nt, 100 nt, 200 nt,500 nt, 1000 nt, 1500 nt, 2000 nt or 3000 nt of the nucleic acid molecule complementary to a nucleic acid sequence characterized in (a), (b), (c), (d), (e), (f), (g), (h), (i) or (j);
[53577] or a nucleic acid molecule comprising a sequence which is complementary thereto;
   whereby, preferably, the nucleic acid molecule according to (a), (b), (c), (d), (e), (f), (g), (h), (i), (j) or (k) distinguishes over the sequence depicted in Table I A and/or I B, application no. 9, column 5 or 8, or the coding regions thereof, by one or more nucleotides (especially but not exceeding 5%, preferably 4%, 3%, 2%, 1%, 0.5%, 0.2% or 0.1%). In an embodiment, the nucleic acid molecule of the invention does not consist of the sequence shown in Table I A and/or I B, application no. 9, column 5 or 8, or the coding region thereof. In another embodiment, the nucleic acid molecule of the present invention, preferably the coding region thereof, is at least 30%, 40%, 50%, 60%, 70%, 80%, 90%, 95% identical but less than 100%, 99.999%, 99.99%, 99.9%, 99%, 98%, 97%, 96% or 95% identical to the sequence shown in Table I A and/or I B, application no. 9, column 5 or 8, or the coding region thereof, respectively. In a further embodiment the nucleic acid molecule does not encode the polypeptide sequence shown in Table II A and/or II B, application no. 9, column 5 or 8 but homologs thereof. Accordingly, in one embodiment, the nucleic acid molecule of the present invention encodes in one embodiment a polypeptide which differs at least in one or more amino acids (especially but not exceeding 5%, preferably 4%, 3%, 2%, 1%, 0.5%, 0.2% or 0.1%) from the polypeptide shown in Table II, application no. 9, column 5 or 8 and does not encode a protein of the sequence shown in Table II A and/or II B, application no. 9, column 5 or 8. Accordingly, in one embodiment, the protein encoded by a sequence of a nucleic acid according to (a), (b), (c), (d), (e), (f), (g), (h), (i), (j) or (k) does not consist of the sequence shown in Table I A and/or I B, application no. 9, column 5 or 8, or the coding region thereof. In a further embodiment, the protein of the present invention is at least 30%, 40%, 50%, 60%, 70%, 80%, 90%, 95% identical to protein sequence depicted in Table II A and/or II B, application no. 9, column 5 or 8 but less than 100%, preferably less than 99.999%, 99.99%, 99.9%, 99%, 98%, 97%, 96% or 95% identical to the sequence shown in Table II A and/or II B, application no. 9, column 5 or 8.
   (All the references to Tables I to IV are references to the corresponding lines of Tables I to IV.)

[53578] In a preferred embodiment thereof said nucleic acid molecule according to (a), (b), (c), (d), (e), (f), (g), (h), (i), (j) or (k) encodes a polypeptide which has the activity of the respective polypeptide represented by a protein comprising a polypeptide as depicted in the respective line in column 5 of Table II, application no. 9.

[53579] In another preferred embodiment thereof said nucleic acid molecule according to (a), (b), (c), (d), (e), (f), (g), (h), (i), (j) or (k) confers a generation or an increase of the respective fine chemical in a non-human organism or a part thereof as compared to a corresponding wild-type non-human organism or part thereof.

[53580] In another preferred embodiment thereof said nucleic acid molecule according to (a), (b), (c), (d), (e), (f), (g), (h), (i), (j) or (k) encodes a polypeptide which has the activity of the respective polypeptide represented by a protein as depicted in the respective line in column 5 of Table II, application no. 9, and confers a generation or an increase of the respective fine chemical in a non-human organism or a part thereof as compared to a corresponding wild-type non-human organism or part thereof.

[53581] [0144.1.8.9] to [0155.1.8.9] for the disclosure of these paragraphs see [0144.1.8.8] to [0155.1.8.8] above.

[53582] In a preferred embodiment a nucleic acid construct, for example an expression cassette, comprises upstream, i.e. at the 5′ end of the encoding sequence, a promoter and downstream, i.e. at the 3′ end, a polyadenylation signal and optionally other regulatory elements which are operably linked to the intervening encoding sequence with one of the nucleic acids as depicted in the respective line in Table I, application no. 9, column 5 or 8, preferably the coding region thereof, or a homolog or a fragment thereof. By an operable linkage is meant the sequential arrangement of promoter, encoding sequence, terminator, optionally other regulatory elements and optionally targeting sequences in such a way that each of the regulatory elements/targeting sequence can fulfill its function in the expression of the encoding sequence in due manner. In one embodiment the sequences preferred for operable linkage are targeting sequences for ensuring subcellular localization in organelles, like plastids or mitochondria.

[53583] However, targeting sequences for ensuring subcellular localization in the endoplasmic reticulum (=ER), in the nucleus, in oil corpuscles or other compartments may also be employed as well as translation promoters such as the 5′ lead sequence in tobacco mosaic virus (Gallie et al., Nucl. Acids Res. 15, 8693 (1987)).

[53584] for the disclosure of this paragraph see [0157.1.8.8] above.

[53585] In an embodiment, the invention relates to an expression cassette, comprising
[53586] 1) a promoter, preferably a promoter selected from the group consisting of Big35S, PCUbi, Super and USP;
[53587] 2) a nucleic acid molecule selected from the group consisting of
   [53588] (a) a nucleic acid molecule encoding a polypeptide shown in Table II, application no. 9, column 5 or 8, preferably shown in Table II A, application no. 9, column 5, or in Table II A, application no. 9, column 8, or in Table II B, application no. 9, column 8, or a homolog or a fragment thereof;
   [53589] (b) a nucleic acid molecule shown in Table I, application no. 9, column 5 or 8, preferably shown in Table I A, application no. 9, column 5, or in Table I A, application no. 9, column 8, or in Table I B, application no. 9, column 8, preferably the coding region thereof, or a homolog or a fragment thereof;
   [53590] (c) a nucleic acid molecule, which, as a result of the degeneracy of the genetic code, can be derived from a polypeptide sequence depicted in column 5 or 8 of Table II, application no. 9, preferably shown in Table II A, application no. 9, column 5, or in Table II A, application no. 9, column 8, or in Table II B, application no. 9, column 8;
   [53591] (d) a nucleic acid molecule having at least 30% identity, preferably at least 40%, 50%, 60%, 70%, 75%, 80%, 85%, 90%, 95%, 96%, 97%, 98%, 99%, 99.5%, with the nucleic acid molecule sequence of a polynucleotide comprising the nucleic acid molecule shown in column 5 or 8 of Table I, application no. 9, preferably shown in Table I A, application no. 9, column 5, or in Table I A, application no. 9, column 8, or in Table I B, application no. 9, column 8, preferably the coding region thereof;
   [53592] (e) a nucleic acid molecule encoding a polypeptide having at least 30% identity, preferably at least 40%, 50% 60%, 70%, 75%, 80%, 85%, 90%, 95%, 96%, 97%, 98%, 99%, 99.5%, identity with the amino acid sequence of the polypeptide encoded by the nucleic acid molecule of (a), (b), (c) or (d);
   [53593] (f) a nucleic acid molecule which hybridizes with a nucleic acid molecule of (a), (b), (c), (d) or (e) under stringent hybridization conditions;
   [53594] (g) a nucleic acid molecule encoding a polypeptide which can be isolated with the aid of monoclonal or polyclonal antibodies made against a polypeptide encoded by one of the nucleic acid molecules of (a), (b), (c), (d), (e) or (f);
   [53595] (h) a nucleic acid molecule encoding a polypeptide comprising the consensus sequence or one or more polypeptide motifs as shown in column 8 of Table IV, application no. 9;
   [53596] (i) a nucleic acid molecule encoding a polypeptide having the activity represented by a respective protein as depicted in column 5 of Table II, application no. 9;
   [53597] (j) a nucleic acid molecule comprising a polynucleotide which is obtained by amplifying a cDNA library or a genomic library using the primers in Table III, application no. 9, column 8;
   [53598] and
   [53599] (k) nucleic acid molecule which is obtainable by screening a suitable nucleic acid library, especially a cDNA library and/or a genomic library, under stringent hybridization conditions with a probe comprising one of the sequences of the nucleic acid molecule of (a), (b), (c), (d), (e), (f), (g), (h), (i) or (j) or with a fragment of at least 15 nt, preferably 20 nt, 30 nt, 50 nt, 100 nt, 200 nt,500 nt, 1000 nt, 1500 nt, 2000 nt or 3000 nt of the nucleic acid molecule characterized in (a), (b), (c), (d), (e), (f), (g), (h), (i) or (j);
   [53600] or a nucleic acid molecule comprising a sequence which is complementary thereto. and, optionally
[53601] 3) nucleic acid molecule encoding a transit peptide, preferably encoding a plastidal transit peptide or a mitochondrial transit peptide;
   which are operable linked.
   (All the references to Tables I to IV are references to the corresponding lines of Tables I to IV.)

[53602] In a preferred embodiment thereof said nucleic acid molecule according to 2 (a), (b), (c), (d), (e), (f), (g), (h), (i), (j) or (k) encodes a polypeptide which has the activity of the respective polypeptide represented by a protein comprising a polypeptide as depicted in the respective line in column 5 of Table II, application no. 9.

[53603] In another preferred embodiment thereof said nucleic acid molecule according to 2 (a), (b), (c), (d), (e), (f), (g), (h), (i), (j) or (k) confers a generation or an increase of the respective fine chemical in a non-human organism or a part thereof as compared to a corresponding wild-type non-human organism or part thereof.

[53604] In another preferred embodiment thereof said nucleic acid molecule according to 2 (a), (b), (c), (d), (e), (f), (g), (h), (i), (j) or (k) encodes a polypeptide which has the activity of the respective polypeptide represented by a protein as depicted in the respective line in column 5 of Table II application no. 9 and confers a generation or an increase of the respective fine chemical in a non-human organism or a part thereof as compared to a corresponding wild-type non-human organism or part thereof.

[53605] In another embodiment thereof the expression cassette comprises 3) a nucleic acid molecule encoding a transit peptide, preferably encoding a plastidal transit peptide, especially in case in column 6 of Table I, application no. 9, in the same line as of the respective nucleic acid molecule according to 2) “plastidic” is depicted, or encoding a mitochondrial transit peptide, especially in case in column 6 of Table I, application no. 9, in the same line as of the respective nucleic acid molecule according to 2) “mitochondrial” is depicted.

[53606] In another embodiment thereof the expression cassette does not comprise 3) a nucleic acid molecule encoding a transit peptide, especially in case in column 6 of Table I, application no. 9, in the same line as of the respective nucleic acid molecule according to 2) “non-targeted” is depicted.

[53607] In a further embodiment, the invention relates to an expression cassette, comprising
[53608] 1) a promoter, preferably a promoter selected from the group consisting of Big35S, PCUbi, Super and USP;
[53609] 2) a nucleic acid molecule selected from the group consisting of
   [53610] (a) a nucleic acid molecule encoding a polypeptide shown in Table II, application no. 9, column 5 or 8, preferably shown in Table II A, application no. 9, column 5, or in Table II A, application no. 9, column 8, or in Table II B, application no. 9, column 8, or a homolog or a fragment thereof;
   [53611] (b) a nucleic acid molecule shown in Table I, application no. 9, column 5 or 8, preferably shown in Table I A, application no. 9, column 5, or in Table I A, application no. 9, column 8, or in Table I B, application no. 9, column 8, preferably the coding region thereof, or a homolog or a fragment thereof;
   [53612] (c) a nucleic acid molecule, which, as a result of the degeneracy of the genetic code, can be derived from a polypeptide sequence depicted in column 5 or 8 of Table II, application no. 9, preferably shown in Table II A, application no. 9, column 5, or in Table II A, application no. 9, column 8, or in Table II B, application no. 9, column 8;
   [53613] (d) a nucleic acid molecule having at least 30% identity, preferably at least 40%, 50%, 60%, 70%, 75%, 80%, 85%, 90%, 95%, 96%, 97%, 98%, 99%, 99.5%, with the nucleic acid molecule sequence of a polynucleotide comprising the nucleic acid molecule shown in column 5 or 8 of Table I, application no. 9, preferably shown in Table I A, application no. 9, column 5, or in Table I A, application no. 9, column 8, or in Table I B, application no. 9, column 8, preferably the coding region thereof;
   [53614] (e) a nucleic acid molecule encoding a polypeptide having at least 30% identity, preferably at least 40%, 50% 60%, 70%, 75%, 80%, 85%, 90%, 95%, 96%, 97%, 98%, 99%, 99.5%, identity with the amino acid sequence of the polypeptide encoded by the nucleic acid molecule of (a), (b), (c) or (d);
   [53615] (f) a nucleic acid molecule which hybridizes with a nucleic acid molecule of (a), (b), (c), (d) or (e) under stringent hybridization conditions;
   [53616] (g) a nucleic acid molecule encoding a polypeptide which can be isolated with the aid of monoclonal or polyclonal antibodies made against a polypeptide encoded by one of the nucleic acid molecules of (a), (b), (c), (d), (e) or (f);
   [53617] (h) a nucleic acid molecule encoding a polypeptide comprising the consensus sequence or one or more polypeptide motifs as shown in column 8 of Table IV, application no. 9;
   [53618] (i) a nucleic acid molecule encoding a polypeptide having the activity represented by a respective protein as depicted in column 5 of Table II, application no. 9;
   [53619] (j) a nucleic acid molecule comprising a polynucleotide which is obtained by amplifying a cDNA library or a genomic library using the primers in Table III, application no. 9, column 8;
   [53620] and
      (k) nucleic acid molecule which is obtainable by screening a suitable nucleic acid library, especially a cDNA library and/or a genomic library, under stringent hybridization conditions with a probe comprising one of the sequences of the nucleic acid molecule of (a), (b), (c), (d), (e), (f), (g), (h), (i) or (j) or with a fragment of at least 15 nt, preferably 20 nt, 30 nt, 50 nt, 100 nt, 200 nt,500 nt, 1000 nt, 1500 nt, 2000 nt or 3000 nt of the nucleic acid molecule characterized in (a), (b), (c), (d), (e), (f), (g), (h), (i) or (j);
   [53621] or a nucleic acid molecule comprising a sequence which is complementary thereto;
      and, optionally
[53622] 3) nucleic acid molecule encoding a transit peptide, preferably encoding a plastidal transit peptide or a mitochondrial transit peptide;
   which are operable linked and
   whereby, preferably, the nucleic acid molecule according to 2 (a), (b), (c), (d), (e), (f), (g), (h), (i), (j) or (k) distinguishes over the sequence depicted in Table I A and/or I B, application no. 9, column 5 or 8, or the coding region thereof, by one or more nucleotides (especially but not exceeding 5%, preferably 4%, 3%, 2%, 1%, 0.5%, 0.2% or 0.1%). In an embodiment, the nucleic acid molecule of the invention according to 2) does not consist of the sequence shown in Table I A and/or I B, application no. 9, column 5 or 8, or the coding region thereof. In another embodiment, the nucleic acid molecule of the present invention, preferably the coding region thereof, is at least 30%, 40%, 50%, 60%, 70%, 80%, 90%, 95% identical but less than 100%, 99.999%, 99.99%, 99.9%, 99%, 98%, 97%, 96% or 95% identical to the sequence shown in Table I A and/or I B, application no. 9, column 5 or 8, or the coding region thereof, respectively. In a fur-ther embodiment the nucleic acid molecule does not encode the polypeptide sequence shown in Table II A and/or II B, application no. 9, column 5 or 8 but homologs thereof. Accordingly, in one embodiment, the nucleic acid molecule of the present invention encodes in one embodiment a polypeptide which differs at least in one or more amino acids (especially but not exceeding 5%, preferably 4%, 3%, 2%, 1%, 0.5%, 0.2% or 0.1%) from the polypeptide shown in Table II, application no. 9, column 5 or 8 and does not encode a protein of the sequence shown in Table II A and/or II B, application no. 9, column 5 or 8. Accordingly, in one embodiment, the protein encoded by a sequence of a nucleic acid according to 2(a), (b), (c), (d), (e), (f), (g), (h), (i), (j) or (k) does not consist of the sequence shown in Table I A and/or I B, application no. 9, column 5 or 8, or the coding region thereof. In a further embodiment, the protein of the present invention is at least 30%, 40%, 50%, 60%, 70%, 80%, 90%, 95% identical to protein sequence depicted in Table II A and/or II B, application no. 9, column 5 or 8 but less than 100%, 99.999%, 99.99%, 99.9%, 99%, 98%, 97%, 96% or 95% identical to the sequence shown in Table II A and/or II B, application no. 9, column 5 or 8.
   (All the references to Tables I to IV are references to the corresponding lines of Tables I to IV.)

[53623] In a preferred embodiment thereof said nucleic acid molecule according to 2 (a), (b), (c), (d), (e), (f), (g), (h), (i), (j) or (k) encodes a polypeptide which has the activity of the respective polypeptide represented by a protein comprising a polypeptide as depicted in the respective line in column 5 of Table II, application no. 9.

[53624] In another preferred embodiment thereof said nucleic acid molecule according to 2 (a), (b), (c), (d), (e), (f), (g), (h), (i), (j) or (k) confers a generation or an increase of the respective fine chemical in a non-human organism or a part thereof as compared to a corresponding wild-type non-human organism or part thereof.

[53625] In another preferred embodiment thereof said nucleic acid molecule according to 2 (a), (b), (c), (d), (e), (f), (g), (h), (i), (j) or (k) encodes a polypeptide which has the activity of the respective polypeptide represented by a protein as depicted in the respective line in column 5 of Table II application no. 9 and confers a generation or an increase of the respective fine chemical in a non-human organism or a part thereof as compared to a corresponding wild-type non-human organism or part thereof.

[53626] In another embodiment thereof the expression cassette comprises 3) a nucleic acid molecule encoding a transit peptide, preferably encoding a plastidal transit peptide, especially in case in column 6 of Table I, application no. 9, in the same line as of the respective nucleic acid molecule according to 2) “plastidic” is depicted, or encoding a mitochondrial transit peptide, especially in case in column 6 of Table I, application no. 9, in the same line as of the respective nucleic acid molecule according to 2) “mitochondrial” is depicted.

[53627] In another embodiment thereof the expression cassette does not comprise 3) a nucleic acid molecule encoding a transit peptide, especially in case in column 6 of Table I, application no. 9, in the same line as of the respective nucleic acid molecule according to 2) “non-targeted” is depicted.

[53628] In an embodiment the present invention relates to an expresssion cassette comprising a) a promoter, preferably a promoter selected from the group consisting of Big35S, PCUbi, Super and USP, in particular p-PcUBI; and b) the nucleic acid SEQ ID NO. 17451, or a homolog or fragment thereof, or a homolog thereof being depicted in Table I, application no. 9, column 8, in the same line as SEQ ID NO. 17451, preferably the coding region thereof, a ho-molog or a fragment thereof; which are operable linked.

[53629] In an embodiment thereof the expression cassette comprises in addition c) a nucleic acid molecule encoding a transit peptide, especially a plastidal transit petide in case in Table I, application no. 9, in column 6 in the same line as SEQ ID NO. 17451 is depicted, plastidic is mentioned, or a mitochondrial transit peptide in case in Table I, application no. 9, in column 6 in the same line as SEQ ID NO. 17451 is depicted, mitochondrial is mentioned; which is operable linked, too.

[53630] In another embodiment thereof the expression cassette does not comprise an additional transit peptide in case in Table I, application no. 9, in column 6 in the same line as SEQ ID NO. 17451 is depicted, non-targeted is mentioned.

[53631] In an embodiment the present invention relates to an expresssion cassette comprising a) a promoter, preferably a promoter selected from the group consisting of Big35S, PCUbi, Super and USP, in particular p-PcUBI; and b) the nucleic acid SEQ ID NO. 1061, or a homolog or fragment thereof, or a homolog thereof being depicted in Table I, application no. 9, column 8, in the same line as SEQ ID NO. 1061, preferably the coding region thereof, a homolog or a fragment thereof; which are operable linked.

[53632] In an embodiment thereof the expression cassette comprises in addition c) a nucleic acid molecule encoding a transit peptide, especially a plastidal transit petide in case in Table I, application no. 9, in column 6 in the same line as SEQ ID NO. 1061 is depicted, plastidic is mentioned, or a mitochondrial transit peptide in case in Table I, application no. 9, in column 6 in the same line as SEQ ID NO. 1061 is depicted, mitochondrial is mentioned; which is operable linked, too.

[53633] In another embodiment thereof the expression cassette does not comprise an additional transit peptide in case in Table I, application no. 9, in column 6 in the same line as SEQ ID NO. 1061 is depicted, non-targeted is mentioned.

[53634] In an embodiment the present invention relates to an expresssion cassette comprising a) a promoter, preferably a promoter selected from the group consisting of Big35S, PCUbi, Super and USP, in particular p-PcUBI; and b) the nucleic acid SEQ ID NO. 19419, or a homolog or fragment thereof, or a homolog thereof being depicted in Table I, application no. 9, column 8, in the same line as SEQ ID NO. 19419, preferably the coding region thereof, a homolog or a fragment thereof; which are operable linked.

[53635] In an embodiment thereof the expression cassette comprises in addition c) a nucleic acid molecule encoding a transit peptide, especially a plastidal transit petide in case in Table I, application no. 9, in column 6 in the same line as SEQ ID NO. 19419 is depicted, plastidic is mentioned, or a mitochondrial transit peptide in case in Table I, application no. 9, in column 6 in the same line as SEQ ID NO. 19419 is depicted, mitochondrial is mentioned; which is operable linked, too. In another embodiment thereof the expression cassette does not comprise an additional transit peptide in case in Table I, application no. 9, in column 6 in the same line as SEQ ID NO. 19419 is depicted, non-targeted is mentioned.

[53636] In an embodiment the present invention relates to an expresssion cassette comprising a) a promoter, preferably a promoter selected from the group consisting of Big35S, PCUbi, Super and USP, in particular p-PcUBI; and b) the nucleic acid SEQ ID NO. 113714, or a homolog or fragment thereof, or a homolog thereof being depicted in Table I, application no. 9, column 8, in the same line as SEQ ID NO. 113714, preferably the coding region thereof, a homolog or a fragment thereof; which are operable linked.

[53637] In an embodiment thereof the expression cassette comprises in addition c) a nucleic acid molecule encoding a transit peptide, especially a plastidal transit petide in case in Table I, application no. 9, in column 6 in the same line as SEQ ID NO. 113714 is depicted, plastidic is mentioned, or a mitochondrial transit peptide in case in Table I, application no. 9, in column 6 in the same line as SEQ ID NO. 113714 is depicted, mitochondrial is mentioned; which is operable linked, too.

[53638] In another embodiment thereof the expression cassette does not comprise an additional transit peptide in case in Table I, application no. 9, in column 6 in the same line as SEQ ID NO. 113714 is depicted, non-targeted is mentioned.

[53639] In an embodiment the present invention relates to an expresssion cassette comprising a) a promoter, preferably a promoter selected from the group consisting of Big35S, PCUbi, Super and USP, in particular p-PcUBI; and b) the nucleic acid SEQ ID NO. 1623, or a homolog or fragment thereof, or a homolog thereof being depicted in Table I, application no. 9, column 8, in the same line as SEQ ID NO. 1623, preferably the coding region thereof, a homolog or a fragment thereof; which are operable linked.

[53640] In an embodiment thereof the expression cassette comprises in addition c) a nucleic acid molecule encoding a transit peptide, especially a plastidal transit petide in case in Table I, application no. 9, in column 6 in the same line as SEQ ID NO. 1623 is depicted, plastidic is mentioned, or a mitochondrial transit peptide in case in Table I, application no. 9, in column 6 in the same line as SEQ ID NO. 1623 is depicted, mitochondrial is mentioned; which is operable linked, too.

[53641] In another embodiment thereof the expression cassette does not comprise an additional transit peptide in case in Table I, application no. 9, in column 6 in the same line as SEQ ID NO. 1623 is depicted, non-targeted is mentioned.

[53642] In an embodiment the present invention relates to an expresssion cassette comprising a) a promoter, preferably a promoter selected from the group consisting of Big35S, PCUbi, Super and USP, in particular p-PcUBI; and b) the nucleic acid SEQ ID NO. 68657, or a homolog or fragment thereof, or a homolog thereof being depicted in Table I, application no. 9, column 8, in the same line as SEQ ID NO. 68657, preferably the coding region thereof, a homolog or a fragment thereof; which are operable linked.

[53643] In an embodiment thereof the expression cassette comprises in addition c) a nucleic acid molecule encoding a transit peptide, especially a plastidal transit petide in case in Table I, application no. 9, in column 6 in the same line as SEQ ID NO. 68657 is depicted, plastidic is mentioned, or a mitochondrial transit peptide in case in Table I, application no. 9, in column 6 in the same line as SEQ ID NO. 68657 is depicted, mitochondrial is mentioned; which is operable linked, too.

[53644] In another embodiment thereof the expression cassette does not comprise an additional transit peptide in case in Table I, application no. 9, in column 6 in the same line as SEQ ID NO. 68657 is depicted, non-targeted is mentioned.

[53645] In an embodiment the present invention relates to an expresssion cassette comprising a) a promoter, preferably a promoter selected from the group consisting of Big35S, PCUbi, Super and USP, in particular p-PcUBI; and b) the nucleic acid SEQ ID NO. 2935, or a homolog or fragment thereof, or a homolog thereof being depicted in Table I, application no. 9, column 8, in the same line as SEQ ID NO. 2935, preferably the coding region thereof, a homolog or a fragment thereof; which are operable linked.

[53646] In an embodiment thereof the expression cassette comprises in addition c) a nucleic acid molecule encoding a transit peptide, especially a plastidal transit petide in case in Table I, application no. 9, in column 6 in the same line as SEQ ID NO. 2935 is depicted, plastidic is mentioned, or a mitochondrial transit peptide in case in Table I, application no. 9, in column 6 in the same line as SEQ ID NO. 2935 is depicted, mitochondrial is mentioned; which is operable linked, too.

[53647] In another embodiment thereof the expression cassette does not comprise an additional transit peptide in case in Table I, application no. 9, in column 6 in the same line as SEQ ID NO. 2935 is depicted, non-targeted is mentioned.

[53648] In an embodiment the present invention relates to an expresssion cassette comprising a) a promoter, preferably a promoter selected from the group consisting of Big35S, PCUbi, Super and USP, in particular p-PcUBI; and b) the nucleic acid SEQ ID NO. 3279, or a homolog or fragment thereof, or a homolog thereof being depicted in Table I, application no. 9, column 8, in the same line as SEQ ID NO. 3279, preferably the coding region thereof, a homolog or a fragment thereof; which are operable linked.

[53649] In an embodiment thereof the expression cassette comprises in addition c) a nucleic acid molecule encoding a transit peptide, especially a plastidal transit petide in case in Table I, application no. 9, in column 6 in the same line as SEQ ID NO. 3279 is depicted, plastidic is mentioned, or a mitochondrial transit peptide in case in Table I, application no. 9, in column 6 in the same line as SEQ ID NO. 3279 is depicted, mitochondrial is mentioned; which is operable linked, too.

[53650] In another embodiment thereof the expression cassette does not comprise an additional transit peptide in case in Table I, application no. 9, in column 6 in the same line as SEQ ID NO. 3279 is depicted, non-targeted is mentioned.

[53651] In an embodiment the present invention relates to an expresssion cassette comprising a) a promoter, preferably a promoter selected from the group consisting of Big35S, PCUbi, Super and USP, in particular p-PcUBI; and b) the nucleic acid SEQ ID NO. 24232, or a homolog or fragment thereof, or a homolog thereof being depicted in Table I, application no. 9, column 8, in the same line as SEQ ID NO. 24232, preferably the coding region thereof, a homolog or a fragment thereof; which are operable linked.

[53652] In an embodiment thereof the expression cassette comprises in addition c) a nucleic acid molecule encoding a transit peptide, especially a plastidal transit petide in case in Table I, application no. 9, in column 6 in the same line as SEQ ID NO. 24232 is depicted, plastidic is mentioned, or a mitochondrial transit peptide in case in Table I, application no. 9, in column 6 in the same line as SEQ ID NO. 24232 is depicted, mitochondrial is mentioned; which is operable linked, too.

[53653] In another embodiment thereof the expression cassette does not comprise an additional transit peptide in case in Table I, application no. 9, in column 6 in the same line as SEQ ID NO. 24232 is depicted, non-targeted is mentioned.

[53654] In an embodiment the present invention relates to an expresssion cassette comprising a) a promoter, preferably a promoter selected from the group consisting of Big35S, PCUbi, Super and USP, in particular p-PcUBI; and b) the nucleic acid SEQ ID NO. 68849, or a homolog or fragment thereof, or a homolog thereof being depicted in Table I, application no. 9, column 8, in the same line as SEQ ID NO. 68849, preferably the coding region thereof, a homolog or a fragment thereof; which are operable linked.

[53655] In an embodiment thereof the expression cassette comprises in addition c) a nucleic acid molecule encoding a transit peptide, especially a plastidal transit petide in case in Table I, application no. 9, in column 6 in the same line as SEQ ID NO. 68849 is depicted, plastidic is mentioned, or a mitochondrial transit peptide in case in Table I, application no. 9, in column 6 in the same line as SEQ ID NO. 68849 is depicted, mitochondrial is mentioned; which is operable linked, too.

[53656] In another embodiment thereof the expression cassette does not comprise an additional transit peptide in case in Table I, application no. 9, in column 6 in the same line as SEQ ID NO. 68849 is depicted, non-targeted is mentioned.

[53657] In an embodiment the present invention relates to an expresssion cassette comprising a) a promoter, preferably a promoter selected from the group consisting of Big35S, PCUbi, Super and USP, in particular p-PcUBI; and b) the nucleic acid SEQ ID NO. 4102, or a homolog or fragment thereof, or a homolog thereof being depicted in Table I, application no. 9, column 8, in the same line as SEQ ID NO. 4102, preferably the coding region thereof, a homolog or a fragment thereof; which are operable linked.

[53658] In an embodiment thereof the expression cassette comprises in addition c) a nucleic acid molecule encoding a transit peptide, especially a plastidal transit petide in case in Table I, application no. 9, in column 6 in the same line as SEQ ID NO. 4102 is depicted, plastidic is mentioned, or a mitochondrial transit peptide in case in Table I, application no. 9, in column 6 in the same line as SEQ ID NO. 4102 is depicted, mitochondrial is mentioned; which is operable linked, too.

[53659] In another embodiment thereof the expression cassette does not comprise an additional transit peptide in case in Table I, application no. 9, in column 6 in the same line as SEQ ID NO. 4102 is depicted, non-targeted is mentioned.

[53660] In an embodiment the present invention relates to an expresssion cassette comprising a) a promoter, preferably a promoter selected from the group consisting of Big35S, PCUbi, Super and USP, in particular p-PcUBI; and b) the nucleic acid SEQ ID NO. 24438, or a homolog or fragment thereof, or a homolog thereof being depicted in Table I, application no. 9, column 8, in the same line as SEQ ID NO. 24438, preferably the coding region thereof, a homolog or a fragment thereof; which are operable linked.

[53661] In an embodiment thereof the expression cassette comprises in addition c) a nucleic acid molecule encoding a transit peptide, especially a plastidal transit petide in case in Table I, application no. 9, in column 6 in the same line as SEQ ID NO. 24438 is depicted, plastidic is mentioned, or a mitochondrial transit peptide in case in Table I, application no. 9, in column 6 in the same line as SEQ ID NO. 24438 is depicted, mitochondrial is mentioned; which is operable linked, too.

[53662] In another embodiment thereof the expression cassette does not comprise an additional transit peptide in case in Table I, application no. 9, in column 6 in the same line as SEQ ID NO. 24438 is depicted, non-targeted is mentioned.

[53663] In an embodiment the present invention relates to an expresssion cassette comprising a) a promoter, preferably a promoter selected from the group consisting of Big35S, PCUbi, Super and USP, in particular p-PcUBI; and b) the nucleic acid SEQ ID NO. 4904, or a homolog or fragment thereof, or a homolog thereof being depicted in Table I, application no. 9, column 8, in the same line as SEQ ID NO. 4904, preferably the coding region thereof, a homolog or a fragment thereof; which are operable linked.

[53664] In an embodiment thereof the expression cassette comprises in addition c) a nucleic acid molecule encoding a transit peptide, especially a plastidal transit petide in case in Table I, application no. 9, in column 6 in the same line as SEQ ID NO. 4904 is depicted, plastidic is mentioned, or a mitochondrial transit peptide in case in Table I, application no. 9, in column 6 in the same line as SEQ ID NO. 4904 is depicted, mitochondrial is mentioned; which is operable linked, too.

[53665] In another embodiment thereof the expression cassette does not comprise an additional transit peptide in case in Table I, application no. 9, in column 6 in the same line as SEQ ID NO. 4904 is depicted, non-targeted is mentioned.

[53666] In an embodiment the present invention relates to an expresssion cassette comprising a) a promoter, preferably a promoter selected from the group consisting of Big35S, PCUbi, Super and USP, in particular p-PcUBI; and b) the nucleic acid SEQ ID NO. 5318, or a homolog or fragment thereof, or a homolog thereof being depicted in Table I, application no. 9, column 8, in the same line as SEQ ID NO. 5318, preferably the coding region thereof, a homolog or a fragment thereof; which are operable linked.

[53667] In an embodiment thereof the expression cassette comprises in addition c) a nucleic acid molecule encoding a transit peptide, especially a plastidal transit petide in case in Table I, application no. 9, in column 6 in the same line as SEQ ID NO. 5318 is depicted, plastidic is mentioned, or a mitochondrial transit peptide in case in Table I, application no. 9, in column 6 in the same line as SEQ ID NO. 5318 is depicted, mitochondrial is mentioned; which is operable linked, too.

[53668] In another embodiment thereof the expression cassette does not comprise an additional transit peptide in case in Table I, application no. 9, in column 6 in the same line as SEQ ID NO. 5318 is depicted, non-targeted is mentioned.

[53669] In an embodiment the present invention relates to an expresssion cassette comprising a) a promoter, preferably a promoter selected from the group consisting of Big35S, PCUbi, Super and USP, in particular p-PcUBI; and b) the nucleic acid SEQ ID NO. 25498, or a homolog or fragment thereof, or a homolog thereof being depicted in Table I, application no. 9, column 8, in the same line as SEQ ID NO. 25498, preferably the coding region thereof, a homolog or a fragment thereof; which are operable linked.

[53670] In an embodiment thereof the expression cassette comprises in addition c) a nucleic acid molecule encoding a transit peptide, especially a plastidal transit petide in case in Table I, application no. 9, in column 6 in the same line as SEQ ID NO. 25498 is depicted, plastidic is mentioned, or a mitochondrial transit peptide in case in Table I, application no. 9, in column 6 in the same line as SEQ ID NO. 25498 is depicted, mitochondrial is mentioned; which is operable linked, too.

[53671] In another embodiment thereof the expression cassette does not comprise an additional transit peptide in case in Table I, application no. 9, in column 6 in the same line as SEQ ID NO. 25498 is depicted, non-targeted is mentioned.

[53672] In an embodiment the present invention relates to an expresssion cassette comprising a) a promoter, preferably a promoter selected from the group consisting of Big35S, PCUbi, Super and USP, in particular p-PcUBI; and b) the nucleic acid SEQ ID NO. 26196, or a homolog or fragment thereof, or a homolog thereof being depicted in Table I, application no. 9, column 8, in the same line as SEQ ID NO. 26196, preferably the coding region thereof, a homolog or a fragment thereof; which are operable linked.

[53673] In an embodiment thereof the expression cassette comprises in addition c) a nucleic acid molecule encoding a transit peptide, especially a plastidal transit petide in case in Table I, application no. 9, in column 6 in the same line as SEQ ID NO. 26196 is depicted, plastidic is mentioned, or a mitochondrial transit peptide in case in Table I, application no. 9, in column 6 in the same line as SEQ ID NO. 26196 is depicted, mitochondrial is mentioned; which is operable linked, too.

[53674] In another embodiment thereof the expression cassette does not comprise an additional transit peptide in case in Table I, application no. 9, in column 6 in the same line as SEQ ID NO. 26196 is depicted, non-targeted is mentioned.

[53675] In an embodiment the present invention relates to an expresssion cassette comprising a) a promoter, preferably a promoter selected from the group consisting of Big35S, PCUbi, Super and USP, in particular p-PcUBI; and b) the nucleic acid SEQ ID NO. 114083, or a homolog or fragment thereof, or a homolog thereof being depicted in Table I, application no. 9, column 8, in the same line as SEQ ID NO. 114083, preferably the coding region thereof, a homolog or a fragment thereof; which are operable linked.

[53676] In an embodiment thereof the expression cassette comprises in addition c) a nucleic acid molecule encoding a transit peptide, especially a plastidal transit petide in case in Table I, application no. 9, in column 6 in the same line as SEQ ID NO. 114083 is depicted, plastidic is mentioned, or a mitochondrial transit peptide in case in Table I, application no. 9, in column 6 in the same line as SEQ ID NO. 114083 is depicted, mitochondrial is mentioned; which is operable linked, too.

[53677] In another embodiment thereof the expression cassette does not comprise an additional transit peptide in case in Table I, application no. 9, in column 6 in the same line as SEQ ID NO. 114083 is depicted, non-targeted is mentioned.

[53678] In an embodiment the present invention relates to an expresssion cassette comprising a) a promoter, preferably a promoter selected from the group consisting of Big35S, PCUbi, Super and USP, in particular p-PcUBI; and b) the nucleic acid SEQ ID NO. 28040, or a homolog or fragment thereof, or a homolog thereof being depicted in Table I, application no. 9, column 8, in the same line as SEQ ID NO. 28040, preferably the coding region thereof, a homolog or a fragment thereof; which are operable linked.

[53679] In an embodiment thereof the expression cassette comprises in addition c) a nucleic acid molecule encoding a transit peptide, especially a plastidal transit petide in case in Table I, application no. 9, in column 6 in the same line as SEQ ID NO. 28040 is depicted, plastidic is mentioned, or a mitochondrial transit peptide in case in Table I, application no. 9, in column 6 in the same line as SEQ ID NO. 28040 is depicted, mitochondrial is mentioned; which is operable linked, too.

[53680] In another embodiment thereof the expression cassette does not comprise an additional transit peptide in case in Table I, application no. 9, in column 6 in the same line as SEQ ID NO. 28040 is depicted, non-targeted is mentioned.

[53681] In an embodiment the present invention relates to an expresssion cassette comprising a) a promoter, preferably a promoter selected from the group consisting of Big35S, PCUbi, Super and USP, in particular p-PcUBI; and b) the nucleic acid SEQ ID NO. 29500, or a homolog or fragment thereof, or a homolog thereof being depicted in Table I, application no. 9, column 8, in the same line as SEQ ID NO. 29500, preferably the coding region thereof, a homolog or a fragment thereof; which are operable linked.

[53682] In an embodiment thereof the expression cassette comprises in addition c) a nucleic acid molecule encoding a transit peptide, especially a plastidal transit petide in case in Table I, application no. 9, in column 6 in the same line as SEQ ID NO. 29500 is depicted, plastidic is mentioned, or a mitochondrial transit peptide in case in Table I, application no. 9, in column 6 in the same line as SEQ ID NO. 29500 is depicted, mitochondrial is mentioned; which is operable linked, too.

[53683] In another embodiment thereof the expression cassette does not comprise an additional transit peptide in case in Table I, application no. 9, in column 6 in the same line as SEQ ID NO. 29500 is depicted, non-targeted is mentioned.

[53684] In an embodiment the present invention relates to an expresssion cassette comprising a) a promoter, preferably a promoter selected from the group consisting of Big35S, PCUbi, Super and USP, in particular p-PcUBI; and b) the nucleic acid SEQ ID NO. 111155, or a homolog or fragment thereof, or a homolog thereof being depicted in Table I, application no. 9, column 8, in the same line as SEQ ID NO. 111155, preferably the coding region thereof, a homolog or a fragment thereof; which are operable linked.

[53685] In an embodiment thereof the expression cassette comprises in addition c) a nucleic acid molecule encoding a transit peptide, especially a plastidal transit petide in case in Table I, application no. 9, in column 6 in the same line as SEQ ID NO. 111155 is depicted, plastidic is mentioned, or a mitochondrial transit peptide in case in Table I, application no. 9, in column 6 in the same line as SEQ ID NO. 111155 is depicted, mitochondrial is mentioned; which is operable linked, too.

[53686] In another embodiment thereof the expression cassette does not comprise an additional transit peptide in case in Table I, application no. 9, in column 6 in the same line as SEQ ID NO. 111155 is depicted, non-targeted is mentioned.

[53687] In an embodiment the present invention relates to an expresssion cassette comprising a) a promoter, preferably a promoter selected from the group consisting of Big35S, PCUbi, Super and USP, in particular p-PcUBI; and b) the nucleic acid SEQ ID NO. 31026, or a homolog or fragment thereof, or a homolog thereof being depicted in Table I, application no. 9, column 8, in the same line as SEQ ID NO. 31026, preferably the coding region thereof, a homolog or a fragment thereof; which are operable linked.

[53688] In an embodiment thereof the expression cassette comprises in addition c) a nucleic acid molecule encoding a transit peptide, especially a plastidal transit petide in case in Table I, application no. 9, in column 6 in the same line as SEQ ID NO. 31026 is depicted, plastidic is mentioned, or a mitochondrial transit peptide in case in Table I, application no. 9, in column 6 in the same line as SEQ ID NO. 31026 is depicted, mitochondrial is mentioned; which is operable linked, too.

[53689] In another embodiment thereof the expression cassette does not comprise an additional transit peptide in case in Table I, application no. 9, in column 6 in the same line as SEQ ID NO. 31026 is depicted, non-targeted is mentioned.

[53690] In an embodiment the present invention relates to an expresssion cassette comprising a) a promoter, preferably a promoter selected from the group consisting of Big35S, PCUbi, Super and USP, in particular p-PcUBI; and b) the nucleic acid SEQ ID NO. 114231, or a homolog or fragment thereof, or a homolog thereof being depicted in Table I, application no. 9, column 8, in the same line as SEQ ID NO. 114231, preferably the coding region thereof, a homolog or a fragment thereof; which are operable linked.

[53691] In an embodiment thereof the expression cassette comprises in addition c) a nucleic acid molecule encoding a transit peptide, especially a plastidal transit petide in case in Table I, application no. 9, in column 6 in the same line as SEQ ID NO. 114231 is depicted, plastidic is mentioned, or a mitochondrial transit peptide in case in Table I, application no. 9, in column 6 in the same line as SEQ ID NO. 114231 is depicted, mitochondrial is mentioned; which is operable linked, too.

[53692] In another embodiment thereof the expression cassette does not comprise an additional transit peptide in case in Table I, application no. 9, in column 6 in the same line as SEQ ID NO. 114231 is depicted, non-targeted is mentioned.

[53693] In an embodiment the present invention relates to an expresssion cassette comprising a) a promoter, preferably a promoter selected from the group consisting of Big35S, PCUbi, Super and USP, in particular p-PcUBI; and b) the nucleic acid SEQ ID NO. 102941, or a homolog or fragment thereof, or a homolog thereof being depicted in Table I, application no. 9, column 8, in the same line as SEQ ID NO. 102941, preferably the coding region thereof, a homolog or a fragment thereof; which are operable linked.

[53694] In an embodiment thereof the expression cassette comprises in addition c) a nucleic acid molecule encoding a transit peptide, especially a plastidal transit petide in case in Table I, application no. 9, in column 6 in the same line as SEQ ID NO. 102941 is depicted, plastidic is mentioned, or a mitochondrial transit peptide in case in Table I, application no. 9, in column 6 in the same line as SEQ ID NO. 102941 is depicted, mitochondrial is mentioned; which is operable linked, too.

[53695] In another embodiment thereof the expression cassette does not comprise an additional transit peptide in case in Table I, application no. 9, in column 6 in the same line as SEQ ID NO. 102941 is depicted, non-targeted is mentioned.

[53696] In an embodiment the present invention relates to an expresssion cassette comprising a) a promoter, preferably a promoter selected from the group consisting of Big35S, PCUbi, Super and USP, in particular p-PcUBI; and b) the nucleic acid SEQ ID NO. 32648, or a homolog or fragment thereof, or a homolog thereof being depicted in Table I, application no. 9, column 8, in the same line as SEQ ID NO. 32648, preferably the coding region thereof, a homolog or a fragment thereof; which are operable linked.

[53697] In an embodiment thereof the expression cassette comprises in addition c) a nucleic acid molecule encoding a transit peptide, especially a plastidal transit petide in case in Table I, application no. 9, in column 6 in the same line as SEQ ID NO. 32648 is depicted, plastidic is mentioned, or a mitochondrial transit peptide in case in Table I, application no. 9, in column 6 in the same line as SEQ ID NO. 32648 is depicted, mitochondrial is mentioned; which is operable linked, too.

[53698] In another embodiment thereof the expression cassette does not comprise an additional transit peptide in case in Table I, application no. 9, in column 6 in the same line as SEQ ID NO. 32648 is depicted, non-targeted is mentioned.

[53699] In an embodiment the present invention relates to an expresssion cassette comprising a) a promoter, preferably a promoter selected from the group consisting of Big35S, PCUbi, Super and USP, in particular p-Super; and b) the nucleic acid SEQ ID NO. 118238, or a homolog or fragment thereof, or a homolog thereof being depicted in Table I, application no. 9, column 8, in the same line as SEQ ID NO. 118238, preferably the coding region thereof, a homolog or a fragment thereof; which are operable linked.

[53700] In an embodiment thereof the expression cassette comprises in addition c) a nucleic acid molecule encoding a transit peptide, especially a plastidal transit petide in case in Table I, application no. 9, in column 6 in the same line as SEQ ID NO. 118238 is depicted, plastidic is mentioned, or a mitochondrial transit peptide in case in Table I, application no. 9, in column 6 in the same line as SEQ ID NO. 118238 is depicted, mitochondrial is mentioned; which is operable linked, too.

[53701] In another embodiment thereof the expression cassette does not comprise an additional transit peptide in case in Table I, application no. 9, in column 6 in the same line as SEQ ID NO. 118238 is depicted, non-targeted is mentioned.

[53702] In an embodiment the present invention relates to an expresssion cassette comprising a) a promoter, preferably a promoter selected from the group consisting of Big35S, PCUbi, Super and USP, in particular p-USP; and b) the nucleic acid SEQ ID NO. 36299, or a homolog or fragment thereof, or a homolog thereof being depicted in Table I, application no. 9, column 8, in the same line as SEQ ID NO. 36299, preferably the coding region thereof, a homolog or a fragment thereof; which are operable linked.

[53703] In an embodiment thereof the expression cassette comprises in addition c) a nucleic acid molecule encoding a transit peptide, especially a plastidal transit petide in case in Table I, application no. 9, in column 6 in the same line as SEQ ID NO. 36299 is depicted, plastidic is mentioned, or a mitochondrial transit peptide in case in Table I, application no. 9, in column 6 in the same line as SEQ ID NO. 36299 is depicted, mitochondrial is mentioned; which is operable linked, too.

[53704] In another embodiment thereof the expression cassette does not comprise an additional transit peptide in case in Table I, application no. 9, in column 6 in the same line as SEQ ID NO. 36299 is depicted, non-targeted is mentioned.

[53705] In an embodiment the present invention relates to an expresssion cassette comprising a) a promoter, preferably a promoter selected from the group consisting of Big35S, PCUbi, Super and USP, in particular p-Super; and b) the nucleic acid SEQ ID NO. 76032, or a homolog or fragment thereof, or a homolog thereof being depicted in Table I, application no. 9, column 8, in the same line as SEQ ID NO. 76032, preferably the coding region thereof, a homolog or a fragment thereof; which are operable linked.

[53706] In an embodiment thereof the expression cassette comprises in addition c) a nucleic acid molecule encoding a transit peptide, especially a plastidal transit petide in case in Table I, application no. 9, in column 6 in the same line as SEQ ID NO. 76032 is depicted, plastidic is mentioned, or a mitochondrial transit peptide in case in Table I, application no. 9, in column 6 in the same line as SEQ ID NO. 76032 is depicted, mitochondrial is mentioned; which is operable linked, too.

[53707] In another embodiment thereof the expression cassette does not comprise an additional transit peptide in case in Table I, application no. 9, in column 6 in the same line as SEQ ID NO. 76032 is depicted, non-targeted is mentioned.

[53708] In an embodiment the present invention relates to an expresssion cassette comprising a) a promoter, preferably a promoter selected from the group consisting of Big35S, PCUbi, Super and USP, in particular p-Super; and b) the nucleic acid SEQ ID NO. 118371, or a homolog or fragment thereof, or a homolog thereof being depicted in Table I, application no. 9, column 8, in the same line as SEQ ID NO. 118371, preferably the coding region thereof, a homolog or a fragment thereof; which are operable linked.

[53709] In an embodiment thereof the expression cassette comprises in addition c) a nucleic acid molecule encoding a transit peptide, especially a plastidal transit petide in case in Table I, application no. 9, in column 6 in the same line as SEQ ID NO. 118371 is depicted, plastidic is mentioned, or a mitochondrial transit peptide in case in Table I, application no. 9, in column 6 in the same line as SEQ ID NO. 118371 is depicted, mitochondrial is mentioned; which is operable linked, too.

[53710] In another embodiment thereof the expression cassette does not comprise an additional transit peptide in case in Table I, application no. 9, in column 6 in the same line as SEQ ID NO. 118371 is depicted, non-targeted is mentioned.

[53711] In an embodiment the present invention relates to an expresssion cassette comprising a) a promoter, preferably a promoter selected from the group consisting of Big35S, PCUbi, Super and USP, in particular p-Super; and b) the nucleic acid SEQ ID NO. 114552, or a homolog or fragment thereof, or a homolog thereof being depicted in Table I, application no. 9, column 8, in the same line as SEQ ID NO. 114552, preferably the coding region thereof, a homolog or a fragment thereof; which are operable linked.

[53712] In an embodiment thereof the expression cassette comprises in addition c) a nucleic acid molecule encoding a transit peptide, especially a plastidal transit petide in case in Table I, application no. 9, in column 6 in the same line as SEQ ID NO. 114552 is depicted, plastidic is mentioned, or a mitochondrial transit peptide in case in Table I, application no. 9, in column 6 in the same line as SEQ ID NO. 114552 is depicted, mitochondrial is mentioned; which is operable linked, too.

[53713] In another embodiment thereof the expression cassette does not comprise an additional transit peptide in case in Table I, application no. 9, in column 6 in the same line as SEQ ID NO. 114552 is depicted, non-targeted is mentioned.

[53714] In an embodiment the present invention relates to an expresssion cassette comprising a) a promoter, preferably a promoter selected from the group consisting of Big35S, PCUbi, Super and USP, in particular p-Super; and b) the nucleic acid SEQ ID NO. 112111, or a homolog or fragment thereof, or a homolog thereof being depicted in Table I, application no. 9, column 8, in the same line as SEQ ID NO. 112111, preferably the coding region thereof, a homolog or a fragment thereof; which are operable linked.

[53715] In an embodiment thereof the expression cassette comprises in addition c) a nucleic acid molecule encoding a transit peptide, especially a plastidal transit petide in case in Table I, application no. 9, in column 6 in the same line as SEQ ID NO. 112111 is depicted, plastidic is mentioned, or a mitochondrial transit peptide in case in Table I, application no. 9, in column 6 in the same line as SEQ ID NO. 112111 is depicted, mitochondrial is mentioned; which is operable linked, too.

[53716] In another embodiment thereof the expression cassette does not comprise an additional transit peptide in case in Table I, application no. 9, in column 6 in the same line as SEQ ID NO. 112111 is depicted, non-targeted is mentioned.

[53717] In an embodiment the present invention relates to an expresssion cassette comprising a) a promoter, preferably a promoter selected from the group consisting of Big35S, PCUbi, Super and USP, in particular p-Super; and b) the nucleic acid SEQ ID NO. 119135, or a homolog or fragment thereof, or a homolog thereof being depicted in Table I, application no. 9, column 8, in the same line as SEQ ID NO. 119135, preferably the coding region thereof, a homolog or a fragment thereof; which are operable linked.

[53718] In an embodiment thereof the expression cassette comprises in addition c) a nucleic acid molecule encoding a transit peptide, especially a plastidal transit petide in case in Table I, application no. 9, in column 6 in the same line as SEQ ID NO. 119135 is depicted, plastidic is mentioned, or a mitochondrial transit peptide in case in Table I, application no. 9, in column 6 in the same line as SEQ ID NO. 119135 is depicted, mitochondrial is mentioned; which is operable linked, too.

[53719] In another embodiment thereof the expression cassette does not comprise an additional transit peptide in case in Table I, application no. 9, in column 6 in the same line as SEQ ID NO. 119135 is depicted, non-targeted is mentioned.

[53720] In an embodiment the present invention relates to an expresssion cassette comprising a) a promoter, preferably a promoter selected from the group consisting of Big35S, PCUbi, Super and USP, in particular p-Super; and b) the nucleic acid SEQ ID NO. 37573, or a homolog or fragment thereof, or a homolog thereof being depicted in Table I, application no. 9, column 8, in the same line as SEQ ID NO. 37573, preferably the coding region thereof, a homolog or a fragment thereof; which are operable linked.

[53721] In an embodiment thereof the expression cassette comprises in addition c) a nucleic acid molecule encoding a transit peptide, especially a plastidal transit petide in case in Table I, application no. 9, in column 6 in the same line as SEQ ID NO. 37573 is depicted, plastidic is mentioned, or a mitochondrial transit peptide in case in Table I, application no. 9, in column 6 in the same line as SEQ ID NO. 37573 is depicted, mitochondrial is mentioned; which is operable linked, too.

[53722] In another embodiment thereof the expression cassette does not comprise an additional transit peptide in case in Table I, application no. 9, in column 6 in the same line as SEQ ID NO. 37573 is depicted, non-targeted is mentioned.

[53723] In an embodiment the present invention relates to an expresssion cassette comprising a) a promoter, preferably a promoter selected from the group consisting of Big35S, PCUbi, Super and USP, in particular p-Super; and b) the nucleic acid SEQ ID NO. 38226, or a homolog or fragment thereof, or a homolog thereof being depicted in Table I, application no. 9, column 8, in the same line as SEQ ID NO. 38226, preferably the coding region thereof, a homolog or a fragment thereof; which are operable linked.

[53724] In an embodiment thereof the expression cassette comprises in addition c) a nucleic acid molecule encoding a transit peptide, especially a plastidal transit petide in case in Table I, application no. 9, in column 6 in the same line as SEQ ID NO. 38226 is depicted, plastidic is mentioned, or a mitochondrial transit peptide in case in Table I, application no. 9, in column 6 in the same line as SEQ ID NO. 38226 is depicted, mitochondrial is mentioned; which is operable linked, too.

[53725] In another embodiment thereof the expression cassette does not comprise an additional transit peptide in case in Table I, application no. 9, in column 6 in the same line as SEQ ID NO. 38226 is depicted, non-targeted is mentioned.

[53726] In an embodiment the present invention relates to an expresssion cassette comprising a) a promoter, preferably a promoter selected from the group consisting of Big35S, PCUbi, Super and USP, in particular p-Super; and b) the nucleic acid SEQ ID NO. 115056, or a homolog or fragment thereof, or a homolog thereof being depicted in Table I, application no. 9, column 8, in the same line as SEQ ID NO. 115056, preferably the coding region thereof, a homolog or a fragment thereof; which are operable linked.

[53727] In an embodiment thereof the expression cassette comprises in addition c) a nucleic acid molecule encoding a transit peptide, especially a plastidal transit petide in case in Table I, application no. 9, in column 6 in the same line as SEQ ID NO. 115056 is depicted, plastidic is mentioned, or a mitochondrial transit peptide in case in Table I, application no. 9, in column 6 in the same line as SEQ ID NO. 115056 is depicted, mitochondrial is mentioned; which is operable linked, too.

[53728] In another embodiment thereof the expression cassette does not comprise an additional transit peptide in case in Table I, application no. 9, in column 6 in the same line as SEQ ID NO. 115056 is depicted, non-targeted is mentioned.

[53729] In an embodiment the present invention relates to an expresssion cassette comprising a) a promoter, preferably a promoter selected from the group consisting of Big35S, PCUbi, Super and USP, in particular p-Super; and b) the nucleic acid SEQ ID NO. 38300, or a homolog or fragment thereof, or a homolog thereof being depicted in Table I, application no. 9, column 8, in the same line as SEQ ID NO. 38300, preferably the coding region thereof, a homolog or a fragment thereof; which are operable linked.

[53730] In an embodiment thereof the expression cassette comprises in addition c) a nucleic acid molecule encoding a transit peptide, especially a plastidal transit petide in case in Table I, application no. 9, in column 6 in the same line as SEQ ID NO. 38300 is depicted, plastidic is mentioned, or a mitochondrial transit peptide in case in Table I, application no. 9, in column 6 in the same line as SEQ ID NO. 38300 is depicted, mitochondrial is mentioned; which is operable linked, too.

[53731] In another embodiment thereof the expression cassette does not comprise an additional transit peptide in case in Table I, application no. 9, in column 6 in the same line as SEQ ID NO. 38300 is depicted, non-targeted is mentioned.

[53732] In an embodiment the present invention relates to an expresssion cassette comprising a) a promoter, preferably a promoter selected from the group consisting of Big35S, PCUbi, Super and USP, in particular p-Super; and b) the nucleic acid SEQ ID NO. 115064, or a homolog or fragment thereof, or a homolog thereof being depicted in Table I, application no. 9, column 8, in the same line as SEQ ID NO. 115064, preferably the coding region thereof, a homolog or a fragment thereof; which are operable linked.

[53733] In an embodiment thereof the expression cassette comprises in addition c) a nucleic acid molecule encoding a transit peptide, especially a plastidal transit petide in case in Table I, application no. 9, in column 6 in the same line as SEQ ID NO. 115064 is depicted, plastidic is mentioned, or a mitochondrial transit peptide in case in Table I, application no. 9, in column 6 in the same line as SEQ ID NO. 115064 is depicted, mitochondrial is mentioned; which is operable linked, too.

[53734] In another embodiment thereof the expression cassette does not comprise an additional transit peptide in case in Table I, application no. 9, in column 6 in the same line as SEQ ID NO. 115064 is depicted, non-targeted is mentioned.

[53735] In an embodiment the present invention relates to an expresssion cassette comprising a) a promoter, preferably a promoter selected from the group consisting of Big35S, PCUbi, Super and USP, in particular p-Super; and b) the nucleic acid SEQ ID NO. 38345, or a homolog or fragment thereof, or a homolog thereof being depicted in Table I, application no. 9, column 8, in the same line as SEQ ID NO. 38345, preferably the coding region thereof, a homolog or a fragment thereof; which are operable linked.

[53736] In an embodiment thereof the expression cassette comprises in addition c) a nucleic acid molecule encoding a transit peptide, especially a plastidal transit petide in case in Table I, application no. 9, in column 6 in the same line as SEQ ID NO. 38345 is depicted, plastidic is mentioned, or a mitochondrial transit peptide in case in Table I, application no. 9, in column 6 in the same line as SEQ ID NO. 38345 is depicted, mitochondrial is mentioned; which is operable linked, too.

[53737] In another embodiment thereof the expression cassette does not comprise an additional transit peptide in case in Table I, application no. 9, in column 6 in the same line as SEQ ID NO. 38345 is depicted, non-targeted is mentioned.

[53738] In an embodiment the present invention relates to an expresssion cassette comprising a) a promoter, preferably a promoter selected from the group consisting of Big35S, PCUbi, Super and USP, in particular p-Super; and b) the nucleic acid SEQ ID NO. 78753, or a homolog or fragment thereof, or a homolog thereof being depicted in Table I, application no. 9, column 8, in the same line as SEQ ID NO. 78753, preferably the coding region thereof, a homolog or a fragment thereof; which are operable linked.

[53739] In an embodiment thereof the expression cassette comprises in addition c) a nucleic acid molecule encoding a transit peptide, especially a plastidal transit petide in case in Table I, application no. 9, in column 6 in the same line as SEQ ID NO. 78753 is depicted, plastidic is mentioned, or a mitochondrial transit peptide in case in Table I, application no. 9, in column 6 in the same line as SEQ ID NO. 78753 is depicted, mitochondrial is mentioned; which is operable linked, too.

[53740] In another embodiment thereof the expression cassette does not comprise an additional transit peptide in case in Table I, application no. 9, in column 6 in the same line as SEQ ID NO. 78753 is depicted, non-targeted is mentioned.

[53741] In an embodiment the present invention relates to an expresssion cassette comprising a) a promoter, preferably a promoter selected from the group consisting of Big35S, PCUbi, Super and USP, in particular p-Super; and b) the nucleic acid SEQ ID NO. 78771, or a homolog or fragment thereof, or a homolog thereof being depicted in Table I, application no. 9, column 8, in the same line as SEQ ID NO. 78771, preferably the coding region thereof, a homolog or a fragment thereof; which are operable linked.

[53742] In an embodiment thereof the expression cassette comprises in addition c) a nucleic acid molecule encoding a transit peptide, especially a plastidal transit petide in case in Table I, application no. 9, in column 6 in the same line as SEQ ID NO. 78771 is depicted, plastidic is mentioned, or a mitochondrial transit peptide in case in Table I, application no. 9, in column 6 in the same line as SEQ ID NO. 78771 is depicted, mitochondrial is mentioned; which is operable linked, too.

[53743] In another embodiment thereof the expression cassette does not comprise an additional transit peptide in case in Table I, application no. 9, in column 6 in the same line as SEQ ID NO. 78771 is depicted, non-targeted is mentioned.

[53744] In an embodiment the present invention relates to an expresssion cassette comprising a) a promoter, preferably a promoter selected from the group consisting of Big35S, PCUbi, Super and USP, in particular p-Super; and b) the nucleic acid SEQ ID NO. 78953, or a homolog or fragment thereof, or a homolog thereof being depicted in Table I, application no. 9, column 8, in the same line as SEQ ID NO. 78953, preferably the coding region thereof, a homolog or a fragment thereof; which are operable linked.

[53745] In an embodiment thereof the expression cassette comprises in addition c) a nucleic acid molecule encoding a transit peptide, especially a plastidal transit petide in case in Table I, application no. 9, in column 6 in the same line as SEQ ID NO. 78953 is depicted, plastidic is mentioned, or a mitochondrial transit peptide in case in Table I, application no. 9, in column 6 in the same line as SEQ ID NO. 78953 is depicted, mitochondrial is mentioned; which is operable linked, too.

[53746] In another embodiment thereof the expression cassette does not comprise an additional transit peptide in case in Table I, application no. 9, in column 6 in the same line as SEQ ID NO. 78953 is depicted, non-targeted is mentioned.

[53747] In an embodiment the present invention relates to an expresssion cassette comprising a) a promoter, preferably a promoter selected from the group consisting of Big35S, PCUbi, Super and USP, in particular p-Super; and b) the nucleic acid SEQ ID NO. 8920, or a homolog or fragment thereof, or a homolog thereof being depicted in Table I, application no. 9, column 8, in the same line as SEQ ID NO. 8920, preferably the coding region thereof, a homolog or a fragment thereof; which are operable linked.

[53748] In an embodiment thereof the expression cassette comprises in addition c) a nucleic acid molecule encoding a transit peptide, especially a plastidal transit petide in case in Table I, application no. 9, in column 6 in the same line as SEQ ID NO. 8920 is depicted, plastidic is mentioned, or a mitochondrial transit peptide in case in Table I, application no. 9, in column 6 in the same line as SEQ ID NO. 8920 is depicted, mitochondrial is mentioned; which is operable linked, too.

[53749] In another embodiment thereof the expression cassette does not comprise an additional transit peptide in case in Table I, application no. 9, in column 6 in the same line as SEQ ID NO. 8920 is depicted, non-targeted is mentioned.

[53750] In an embodiment the present invention relates to an expresssion cassette comprising a) a promoter, preferably a promoter selected from the group consisting of Big35S, PCUbi, Super and USP, in particular p-Super; and b) the nucleic acid SEQ ID NO. 39002, or a homolog or fragment thereof, or a homolog thereof being depicted in Table I, application no. 9, column 8, in the same line as SEQ ID NO. 39002, preferably the coding region thereof, a homolog or a fragment thereof; which are operable linked.

[53751] In an embodiment thereof the expression cassette comprises in addition c) a nucleic acid molecule encoding a transit peptide, especially a plastidal transit petide in case in Table I, application no. 9, in column 6 in the same line as SEQ ID NO. 39002 is depicted, plastidic is mentioned, or a mitochondrial transit peptide in case in Table I, application no. 9, in column 6 in the same line as SEQ ID NO. 39002 is depicted, mitochondrial is mentioned; which is operable linked, too.

[53752] In another embodiment thereof the expression cassette does not comprise an additional transit peptide in case in Table I, application no. 9, in column 6 in the same line as SEQ ID NO. 39002 is depicted, non-targeted is mentioned.

[53753] In an embodiment the present invention relates to an expresssion cassette comprising a) a promoter, preferably a promoter selected from the group consisting of Big35S, PCUbi, Super and USP, in particular p-Super; and b) the nucleic acid SEQ ID NO. 39237, or a homolog or fragment thereof, or a homolog thereof being depicted in Table I, application no. 9, column 8, in the same line as SEQ ID NO. 39237, preferably the coding region thereof, a homolog or a fragment thereof; which are operable linked.

[53754] In an embodiment thereof the expression cassette comprises in addition c) a nucleic acid molecule encoding a transit peptide, especially a plastidal transit petide in case in Table I, application no. 9, in column 6 in the same line as SEQ ID NO. 39237 is depicted, plastidic is mentioned, or a mitochondrial transit peptide in case in Table I, application no. 9, in column 6 in the same line as SEQ ID NO. 39237 is depicted, mitochondrial is mentioned; which is operable linked, too.

[53755] In another embodiment thereof the expression cassette does not comprise an additional transit peptide in case in Table I, application no. 9, in column 6 in the same line as SEQ ID NO. 39237 is depicted, non-targeted is mentioned.

[53756] In an embodiment the present invention relates to an expresssion cassette comprising a) a promoter, preferably a promoter selected from the group consisting of Big35S, PCUbi, Super and USP, in particular p-Super; and b) the nucleic acid SEQ ID NO. 115628, or a homolog or fragment thereof, or a homolog thereof being depicted in Table I, application no. 9, column 8, in the same line as SEQ ID NO. 115628, preferably the coding region thereof, a homolog or a fragment thereof; which are operable linked.

[53757] In an embodiment thereof the expression cassette comprises in addition c) a nucleic acid molecule encoding a transit peptide, especially a plastidal transit petide in case in Table I, application no. 9, in column 6 in the same line as SEQ ID NO. 115628 is depicted, plastidic is mentioned, or a mitochondrial transit peptide in case in Table I, application no. 9, in column 6 in the same line as SEQ ID NO. 115628 is depicted, mitochondrial is mentioned; which is operable linked, too.

[53758] In another embodiment thereof the expression cassette does not comprise an additional transit peptide in case in Table I, application no. 9, in column 6 in the same line as SEQ ID NO. 115628 is depicted, non-targeted is mentioned.

[53759] In an embodiment the present invention relates to an expresssion cassette comprising a) a promoter, preferably a promoter selected from the group consisting of Big35S, PCUbi, Super and USP, in particular p-Super; and b) the nucleic acid SEQ ID NO. 40329, or a homolog or fragment thereof, or a homolog thereof being depicted in Table I, application no. 9, column 8, in the same line as SEQ ID NO. 40329, preferably the coding region thereof, a homolog or a fragment thereof; which are operable linked.

[53760] In an embodiment thereof the expression cassette comprises in addition c) a nucleic acid molecule encoding a transit peptide, especially a plastidal transit petide in case in Table I, application no. 9, in column 6 in the same line as SEQ ID NO. 40329 is depicted, plastidic is mentioned, or a mitochondrial transit peptide in case in Table I, application no. 9, in column 6 in the same line as SEQ ID NO. 40329 is depicted, mitochondrial is mentioned; which is operable linked, too.

[53761] In another embodiment thereof the expression cassette does not comprise an additional transit peptide in case in Table I, application no. 9, in column 6 in the same line as SEQ ID NO. 40329 is depicted, non-targeted is mentioned.

[53762] In an embodiment the present invention relates to an expresssion cassette comprising a) a promoter, preferably a promoter selected from the group consisting of Big35S, PCUbi, Super and USP, in particular p-Super; and b) the nucleic acid SEQ ID NO. 40665, or a homolog or fragment thereof, or a homolog thereof being depicted in Table I, application no. 9, column 8, in the same line as SEQ ID NO. 40665, preferably the coding region thereof, a homolog or a fragment thereof; which are operable linked.

[53763] In an embodiment thereof the expression cassette comprises in addition c) a nucleic acid molecule encoding a transit peptide, especially a plastidal transit petide in case in Table I, application no. 9, in column 6 in the same line as SEQ ID NO. 40665 is depicted, plastidic is mentioned, or a mitochondrial transit peptide in case in Table I, application no. 9, in column 6 in the same line as SEQ ID NO. 40665 is depicted, mitochondrial is mentioned; which is operable linked, too.

[53764] In another embodiment thereof the expression cassette does not comprise an additional transit peptide in case in Table I, application no. 9, in column 6 in the same line as SEQ ID NO. 40665 is depicted, non-targeted is mentioned.

[53765] In an embodiment the present invention relates to an expresssion cassette comprising a) a promoter, preferably a promoter selected from the group consisting of Big35S, PCUbi, Super and USP, in particular p-Super; and b) the nucleic acid SEQ ID NO. 115655, or a homolog or fragment thereof, or a homolog thereof being depicted in Table I, application no. 9, column 8, in the same line as SEQ ID NO. 115655, preferably the coding region thereof, a homolog or a fragment thereof; which are operable linked.

[53766] In an embodiment thereof the expression cassette comprises in addition c) a nucleic acid molecule encoding a transit peptide, especially a plastidal transit petide in case in Table I, application no. 9, in column 6 in the same line as SEQ ID NO. 115655 is depicted, plastidic is mentioned, or a mitochondrial transit peptide in case in Table I, application no. 9, in column 6 in the same line as SEQ ID NO. 115655 is depicted, mitochondrial is mentioned; which is operable linked, too.

[53767] In another embodiment thereof the expression cassette does not comprise an additional transit peptide in case in Table I, application no. 9, in column 6 in the same line as SEQ ID NO. 115655 is depicted, non-targeted is mentioned.

[53768] In an embodiment the present invention relates to an expresssion cassette comprising a) a promoter, preferably a promoter selected from the group consisting of Big35S, PCUbi, Super and USP, in particular p-Super; and b) the nucleic acid SEQ ID NO. 115719, or a homolog or fragment thereof, or a homolog thereof being depicted in Table I, application no. 9, column 8, in the same line as SEQ ID NO. 115719, preferably the coding region thereof, a homolog or a fragment thereof; which are operable linked.

[53769] In an embodiment thereof the expression cassette comprises in addition c) a nucleic acid molecule encoding a transit peptide, especially a plastidal transit petide in case in Table I, application no. 9, in column 6 in the same line as SEQ ID NO. 115719 is depicted, plastidic is mentioned, or a mitochondrial transit peptide in case in Table I, application no. 9, in column 6 in the same line as SEQ ID NO. 115719 is depicted, mitochondrial is mentioned; which is operable linked, too.

[53770] In another embodiment thereof the expression cassette does not comprise an additional transit peptide in case in Table I, application no. 9, in column 6 in the same line as SEQ ID NO. 115719 is depicted, non-targeted is mentioned.

[53771] In an embodiment the present invention relates to an expresssion cassette comprising a) a promoter, preferably a promoter selected from the group consisting of Big35S, PCUbi, Super and USP, in particular p-Super; and b) the nucleic acid SEQ ID NO. 115791, or a homolog or fragment thereof, or a homolog thereof being depicted in Table I, application no. 9, column 8, in the same line as SEQ ID NO. 115791, preferably the coding region thereof, a homolog or a fragment thereof; which are operable linked.

[53772] In an embodiment thereof the expression cassette comprises in addition c) a nucleic acid molecule encoding a transit peptide, especially a plastidal transit petide in case in Table I, application no. 9, in column 6 in the same line as SEQ ID NO. 115791 is depicted, plastidic is mentioned, or a mitochondrial transit peptide in case in Table I, application no. 9, in column 6 in the same line as SEQ ID NO. 115791 is depicted, mitochondrial is mentioned; which is operable linked, too.

[53773] In another embodiment thereof the expression cassette does not comprise an additional transit peptide in case in Table I, application no. 9, in column 6 in the same line as SEQ ID NO. 115791 is depicted, non-targeted is mentioned.

[53774] In an embodiment the present invention relates to an expresssion cassette comprising a) a promoter, preferably a promoter selected from the group consisting of Big35S, PCUbi, Super and USP, in particular p-Super; and b) the nucleic acid SEQ ID NO. 116110, or a homolog or fragment thereof, or a homolog thereof being depicted in Table I, application no. 9, column 8, in the same line as SEQ ID NO. 116110, preferably the coding region thereof, a homolog or a fragment thereof; which are operable linked.

[53775] In an embodiment thereof the expression cassette comprises in addition c) a nucleic acid molecule encoding a transit peptide, especially a plastidal transit petide in case in Table I, application no. 9, in column 6 in the same line as SEQ ID NO. 116110 is depicted, plastidic is mentioned, or a mitochondrial transit peptide in case in Table I, application no. 9, in column 6 in the same line as SEQ ID NO. 116110 is depicted, mitochondrial is mentioned; which is operable linked, too.

[53776] In another embodiment thereof the expression cassette does not comprise an additional transit peptide in case in Table I, application no. 9, in column 6 in the same line as SEQ ID NO. 116110 is depicted, non-targeted is mentioned.

[53777] In an embodiment the present invention relates to an expresssion cassette comprising a) a promoter, preferably a promoter selected from the group consisting of Big35S, PCUbi, Super and USP, in particular p-Super; and b) the nucleic acid SEQ ID NO. 94380, or a homolog or fragment thereof, or a homolog thereof being depicted in Table I, application no. 9, column 8, in the same line as SEQ ID NO. 94380, preferably the coding region thereof, a homolog or a fragment thereof; which are operable linked.

[53778] In an embodiment thereof the expression cassette comprises in addition c) a nucleic acid molecule encoding a transit peptide, especially a plastidal transit petide in case in Table I, application no. 9, in column 6 in the same line as SEQ ID NO. 94380 is depicted, plastidic is mentioned, or a mitochondrial transit peptide in case in Table I, application no. 9, in column 6 in the same line as SEQ ID NO. 94380 is depicted, mitochondrial is mentioned; which is operable linked, too.

[53779] In another embodiment thereof the expression cassette does not comprise an additional transit peptide in case in Table I, application no. 9, in column 6 in the same line as SEQ ID NO. 94380 is depicted, non-targeted is mentioned.

[53780] In an embodiment the present invention relates to an expresssion cassette comprising a) a promoter, preferably a promoter selected from the group consisting of Big35S, PCUbi, Super and USP, in particular p-Super; and b) the nucleic acid SEQ ID NO. 119181, or a homolog or fragment thereof, or a homolog thereof being depicted in Table I, application no. 9, column 8, in the same line as SEQ ID NO. 119181, preferably the coding region thereof, a homolog or a fragment thereof; which are operable linked.

[53781] In an embodiment thereof the expression cassette comprises in addition c) a nucleic acid molecule encoding a transit peptide, especially a plastidal transit petide in case in Table I, application no. 9, in column 6 in the same line as SEQ ID NO. 119181 is depicted, plastidic is mentioned, or a mitochondrial transit peptide in case in Table I, application no. 9, in column 6 in the same line as SEQ ID NO. 119181 is depicted, mitochondrial is mentioned; which is operable linked, too.

[53782] In another embodiment thereof the expression cassette does not comprise an additional transit peptide in case in Table I, application no. 9, in column 6 in the same line as SEQ ID NO. 119181 is depicted, non-targeted is mentioned.

[53783] In an embodiment the present invention relates to an expresssion cassette comprising a) a promoter, preferably a promoter selected from the group consisting of Big35S, PCUbi, Super and USP, in particular p-Super; and b) the nucleic acid SEQ ID NO. 10726, or a homolog or fragment thereof, or a homolog thereof being depicted in Table I, application no. 9, column 8, in the same line as SEQ ID NO. 10726, preferably the coding region thereof, a homolog or a fragment thereof; which are operable linked.

[53784] In an embodiment thereof the expression cassette comprises in addition c) a nucleic acid molecule encoding a transit peptide, especially a plastidal transit petide in case in Table I, application no. 9, in column 6 in the same line as SEQ ID NO. 10726 is depicted, plastidic is mentioned, or a mitochondrial transit peptide in case in Table I, application no. 9, in column 6 in the same line as SEQ ID NO. 10726 is depicted, mitochondrial is mentioned; which is operable linked, too.

[53785] In another embodiment thereof the expression cassette does not comprise an additional transit peptide in case in Table I, application no. 9, in column 6 in the same line as SEQ ID NO. 10726 is depicted, non-targeted is mentioned.

[53786] In an embodiment the present invention relates to an expresssion cassette comprising a) a promoter, preferably a promoter selected from the group consisting of Big35S, PCUbi, Super and USP, in particular p-Super; and b) the nucleic acid SEQ ID NO. 119209, or a homolog or fragment thereof, or a homolog thereof being depicted in Table I, application no. 9, column 8, in the same line as SEQ ID NO. 119209, preferably the coding region thereof, a homolog or a fragment thereof; which are operable linked.

[53787] In an embodiment thereof the expression cassette comprises in addition c) a nucleic acid molecule encoding a transit peptide, especially a plastidal transit petide in case in Table I, application no. 9, in column 6 in the same line as SEQ ID NO. 119209 is depicted, plastidic is mentioned, or a mitochondrial transit peptide in case in Table I, application no. 9, in column 6 in the same line as SEQ ID NO. 119209 is depicted, mitochondrial is mentioned; which is operable linked, too.

[53788] In another embodiment thereof the expression cassette does not comprise an additional transit peptide in case in Table I, application no. 9, in column 6 in the same line as SEQ ID NO. 119209 is depicted, non-targeted is mentioned.

[53789] In an embodiment the present invention relates to an expresssion cassette comprising a) a promoter, preferably a promoter selected from the group consisting of Big35S, PCUbi, Super and USP, in particular p-PcUBI; and b) the nucleic acid SEQ ID NO. 10811, or a homolog or fragment thereof, or a homolog thereof being depicted in Table I, application no. 9, column 8, in the same line as SEQ ID NO. 10811, preferably the coding region thereof, a homolog or a fragment thereof; which are operable linked.

[53790] In an embodiment thereof the expression cassette comprises in addition c) a nucleic acid molecule encoding a transit peptide, especially a plastidal transit petide in case in Table I, application no. 9, in column 6 in the same line as SEQ ID NO. 10811 is depicted, plastidic is mentioned, or a mitochondrial transit peptide in case in Table I, application no. 9, in column 6 in the same line as SEQ ID NO. 10811 is depicted, mitochondrial is mentioned; which is operable linked, too.

[53791] In another embodiment thereof the expression cassette does not comprise an additional transit peptide in case in Table I, application no. 9, in column 6 in the same line as SEQ ID NO. 10811 is depicted, non-targeted is mentioned.

[53792] In an embodiment the present invention relates to an expresssion cassette comprising a) a promoter, preferably a promoter selected from the group consisting of Big35S, PCUbi, Super and USP, in particular p-PcUBI; and b) the nucleic acid SEQ ID NO. 46751, or a homolog or fragment thereof, or a homolog thereof being depicted in Table I, application no. 9, column 8, in the same line as SEQ ID NO. 46751, preferably the coding region thereof, a homolog or a fragment thereof; which are operable linked.

[53793] In an embodiment thereof the expression cassette comprises in addition c) a nucleic acid molecule encoding a transit peptide, especially a plastidal transit petide in case in Table I, application no. 9, in column 6 in the same line as SEQ ID NO. 46751 is depicted, plastidic is mentioned, or a mitochondrial transit peptide in case in Table I, application no. 9, in column 6 in the same line as SEQ ID NO. 46751 is depicted, mitochondrial is mentioned; which is operable linked, too.

[53794] In another embodiment thereof the expression cassette does not comprise an additional transit peptide in case in Table I, application no. 9, in column 6 in the same line as SEQ ID NO. 46751 is depicted, non-targeted is mentioned.

[53795] In an embodiment the present invention relates to an expresssion cassette comprising a) a promoter, preferably a promoter selected from the group consisting of Big35S, PCUbi, Super and USP, in particular p-PcUBI; and b) the nucleic acid SEQ ID NO. 94741, or a homolog or fragment thereof, or a homolog thereof being depicted in Table I, application no. 9, column 8, in the same line as SEQ ID NO. 94741, preferably the coding region thereof, a homolog or a fragment thereof; which are operable linked.

[53796] In an embodiment thereof the expression cassette comprises in addition c) a nucleic acid molecule encoding a transit peptide, especially a plastidal transit petide in case in Table I, application no. 9, in column 6 in the same line as SEQ ID NO. 94741 is depicted, plastidic is mentioned, or a mitochondrial transit peptide in case in Table I, application no. 9, in column 6 in the same line as SEQ ID NO. 94741 is depicted, mitochondrial is mentioned; which is operable linked, too.

[53797] In another embodiment thereof the expression cassette does not comprise an additional transit peptide in case in Table I, application no. 9, in column 6 in the same line as SEQ ID NO. 94741 is depicted, non-targeted is mentioned.

[53798] In an embodiment the present invention relates to an expresssion cassette comprising a) a promoter, preferably a promoter selected from the group consisting of Big35S, PCUbi, Super and USP, in particular p-PcUBI; and b) the nucleic acid SEQ ID NO. 112661, or a homolog or fragment thereof, or a homolog thereof being depicted in Table I, application no. 9, column 8, in the same line as SEQ ID NO. 112661, preferably the coding region thereof, a homolog or a fragment thereof; which are operable linked.

[53799] In an embodiment thereof the expression cassette comprises in addition c) a nucleic acid molecule encoding a transit peptide, especially a plastidal transit petide in case in Table I, application no. 9, in column 6 in the same line as SEQ ID NO. 112661 is depicted, plastidic is mentioned, or a mitochondrial transit peptide in case in Table I, application no. 9, in column 6 in the same line as SEQ ID NO. 112661 is depicted, mitochondrial is mentioned; which is operable linked, too.

[53800] In another embodiment thereof the expression cassette does not comprise an additional transit peptide in case in Table I, application no. 9, in column 6 in the same line as SEQ ID NO. 112661 is depicted, non-targeted is mentioned.

[53801] In an embodiment the present invention relates to an expresssion cassette comprising a) a promoter, preferably a promoter selected from the group consisting of Big35S, PCUbi, Super and USP, in particular p-PcUBI; and b) the nucleic acid SEQ ID NO. 52634, or a homolog or fragment thereof, or a homolog thereof being depicted in Table I, application no. 9, column 8, in the same line as SEQ ID NO. 52634, preferably the coding region thereof, a homolog or a fragment thereof; which are operable linked.

[53802] In an embodiment thereof the expression cassette comprises in addition c) a nucleic acid molecule encoding a transit peptide, especially a plastidal transit petide in case in Table I, application no. 9, in column 6 in the same line as SEQ ID NO. 52634 is depicted, plastidic is mentioned, or a mitochondrial transit peptide in case in Table I, application no. 9, in column 6 in the same line as SEQ ID NO. 52634 is depicted, mitochondrial is mentioned; which is operable linked, too.

[53803] In another embodiment thereof the expression cassette does not comprise an additional transit peptide in case in Table I, application no. 9, in column 6 in the same line as SEQ ID NO. 52634 is depicted, non-targeted is mentioned.

[53804] In an embodiment the present invention relates to an expresssion cassette comprising a) a promoter, preferably a promoter selected from the group consisting of Big35S, PCUbi, Super and USP, in particular p-PcUBI; and b) the nucleic acid SEQ ID NO. 85723, or a homolog or fragment thereof, or a homolog thereof being depicted in Table I, application no. 9, column 8, in the same line as SEQ ID NO. 85723, preferably the coding region thereof, a homolog or a fragment thereof; which are operable linked.

[53805] In an embodiment thereof the expression cassette comprises in addition c) a nucleic acid molecule encoding a transit peptide, especially a plastidal transit petide in case in Table I, application no. 9, in column 6 in the same line as SEQ ID NO. 85723 is depicted, plastidic is mentioned, or a mitochondrial transit peptide in case in Table I, application no. 9, in column 6 in the same line as SEQ ID NO. 85723 is depicted, mitochondrial is mentioned; which is operable linked, too.

[53806] In another embodiment thereof the expression cassette does not comprise an additional transit peptide in case in Table I, application no. 9, in column 6 in the same line as SEQ ID NO. 85723 is depicted, non-targeted is mentioned.

[53807] In an embodiment the present invention relates to an expresssion cassette comprising a) a promoter, preferably a promoter selected from the group consisting of Big35S, PCUbi, Super and USP, in particular p-PcUBI; and b) the nucleic acid SEQ ID NO. 53878, or a homolog or fragment thereof, or a homolog thereof being depicted in Table I, application no. 9, column 8, in the same line as SEQ ID NO. 53878, preferably the coding region thereof, a homolog or a fragment thereof; which are operable linked.

[53808] In an embodiment thereof the expression cassette comprises in addition c) a nucleic acid molecule encoding a transit peptide, especially a plastidal transit petide in case in Table I, application no. 9, in column 6 in the same line as SEQ ID NO. 53878 is depicted, plastidic is mentioned, or a mitochondrial transit peptide in case in Table I, application no. 9, in column 6 in the same line as SEQ ID NO. 53878 is depicted, mitochondrial is mentioned; which is operable linked, too.

[53809] In another embodiment thereof the expression cassette does not comprise an additional transit peptide in case in Table I, application no. 9, in column 6 in the same line as SEQ ID NO. 53878 is depicted, non-targeted is mentioned.

[53810] In an embodiment the present invention relates to an expresssion cassette comprising a) a promoter, preferably a promoter selected from the group consisting of Big35S, PCUbi, Super and USP, in particular p-PcUBI; and b) the nucleic acid SEQ ID NO. 95047, or a homolog or fragment thereof, or a homolog thereof being depicted in Table I, application no. 9, column 8, in the same line as SEQ ID NO. 95047, preferably the coding region thereof, a homolog or a fragment thereof; which are operable linked.

[53811] In an embodiment thereof the expression cassette comprises in addition c) a nucleic acid molecule encoding a transit peptide, especially a plastidal transit petide in case in Table I, application no. 9, in column 6 in the same line as SEQ ID NO. 95047 is depicted, plastidic is mentioned, or a mitochondrial transit peptide in case in Table I, application no. 9, in column 6 in the same line as SEQ ID NO. 95047 is depicted, mitochondrial is mentioned; which is operable linked, too.

[53812] In another embodiment thereof the expression cassette does not comprise an additional transit peptide in case in Table I, application no. 9, in column 6 in the same line as SEQ ID NO. 95047 is depicted, non-targeted is mentioned.

[53813] In an embodiment the present invention relates to an expresssion cassette comprising a) a promoter, preferably a promoter selected from the group consisting of Big35S, PCUbi, Super and USP, in particular p-PcUBI; and b) the nucleic acid SEQ ID NO. 86447, or a homolog or fragment thereof, or a homolog thereof being depicted in Table I, application no. 9, column 8, in the same line as SEQ ID NO. 86447, preferably the coding region thereof, a homolog or a fragment thereof; which are operable linked.

[53814] In an embodiment thereof the expression cassette comprises in addition c) a nucleic acid molecule encoding a transit peptide, especially a plastidal transit petide in case in Table I, application no. 9, in column 6 in the same line as SEQ ID NO. 86447 is depicted, plastidic is mentioned, or a mitochondrial transit peptide in case in Table I, application no. 9, in column 6 in the same line as SEQ ID NO. 86447 is depicted, mitochondrial is mentioned; which is operable linked, too.

[53815] In another embodiment thereof the expression cassette does not comprise an additional transit peptide in case in Table I, application no. 9, in column 6 in the same line as SEQ ID NO. 86447 is depicted, non-targeted is mentioned.

[53816] In an embodiment the present invention relates to an expresssion cassette comprising a) a promoter, preferably a promoter selected from the group consisting of Big35S, PCUbi, Super and USP, in particular p-PcUBI; and b) the nucleic acid SEQ ID NO. 11471, or a homolog or fragment thereof, or a homolog thereof being depicted in Table I, application no. 9, column 8, in the same line as SEQ ID NO. 11471, preferably the coding region thereof, a homolog or a fragment thereof; which are operable linked.

[53817] In an embodiment thereof the expression cassette comprises in addition c) a nucleic acid molecule encoding a transit peptide, especially a plastidal transit petide in case in Table I, application no. 9, in column 6 in the same line as SEQ ID NO. 11471 is depicted, plastidic is mentioned, or a mitochondrial transit peptide in case in Table I, application no. 9, in column 6 in the same line as SEQ ID NO. 11471 is depicted, mitochondrial is mentioned; which is operable linked, too.

[53818] In another embodiment thereof the expression cassette does not comprise an additional transit peptide in case in Table I, application no. 9, in column 6 in the same line as SEQ ID NO. 11471 is depicted, non-targeted is mentioned.

[53819] In an embodiment the present invention relates to an expresssion cassette comprising a) a promoter, preferably a promoter selected from the group consisting of Big35S, PCUbi, Super and USP, in particular p-PcUBI; and b) the nucleic acid SEQ ID NO. 55385, or a homolog or fragment thereof, or a homolog thereof being depicted in Table I, application no. 9, column 8, in the same line as SEQ ID NO. 55385, preferably the coding region thereof, a homolog or a fragment thereof; which are operable linked.

[53820] In an embodiment thereof the expression cassette comprises in addition c) a nucleic acid molecule encoding a transit peptide, especially a plastidal transit petide in case in Table I, application no. 9, in column 6 in the same line as SEQ ID NO. 55385 is depicted, plastidic is mentioned, or a mitochondrial transit peptide in case in Table I, application no. 9, in column 6 in the same line as SEQ ID NO. 55385 is depicted, mitochondrial is mentioned; which is operable linked, too.

[53821] In another embodiment thereof the expression cassette does not comprise an additional transit peptide in case in Table I, application no. 9, in column 6 in the same line as SEQ ID NO. 55385 is depicted, non-targeted is mentioned.

[53822] In an embodiment the present invention relates to an expresssion cassette comprising a) a promoter, preferably a promoter selected from the group consisting of Big35S, PCUbi, Super and USP, in particular p-PcUBI; and b) the nucleic acid SEQ ID NO. 11990, or a homolog or fragment thereof, or a homolog thereof being depicted in Table I, application no. 9, column 8, in the same line as SEQ ID NO. 11990, preferably the coding region thereof, a homolog or a fragment thereof; which are operable linked.

[53823] In an embodiment thereof the expression cassette comprises in addition c) a nucleic acid molecule encoding a transit peptide, especially a plastidal transit petide in case in Table I, application no. 9, in column 6 in the same line as SEQ ID NO. 11990 is depicted, plastidic is mentioned, or a mitochondrial transit peptide in case in Table I, application no. 9, in column 6 in the same line as SEQ ID NO. 11990 is depicted, mitochondrial is mentioned; which is operable linked, too.

[53824] In another embodiment thereof the expression cassette does not comprise an additional transit peptide in case in Table I, application no. 9, in column 6 in the same line as SEQ ID NO. 11990 is depicted, non-targeted is mentioned.

[53825] In an embodiment the present invention relates to an expresssion cassette comprising a) a promoter, preferably a promoter selected from the group consisting of Big35S, PCUbi, Super and USP, in particular p-PcUBI; and b) the nucleic acid SEQ ID NO. 56153, or a homolog or fragment thereof, or a homolog thereof being depicted in Table I, application no. 9, column 8, in the same line as SEQ ID NO. 56153, preferably the coding region thereof, a homolog or a fragment thereof; which are operable linked.

[53826] In an embodiment thereof the expression cassette comprises in addition c) a nucleic acid molecule encoding a transit peptide, especially a plastidal transit petide in case in Table I, application no. 9, in column 6 in the same line as SEQ ID NO. 56153 is depicted, plastidic is mentioned, or a mitochondrial transit peptide in case in Table I, application no. 9, in column 6 in the same line as SEQ ID NO. 56153 is depicted, mitochondrial is mentioned; which is operable linked, too.

[53827] In another embodiment thereof the expression cassette does not comprise an additional transit peptide in case in Table I, application no. 9, in column 6 in the same line as SEQ ID NO. 56153 is depicted, non-targeted is mentioned.

[53828] In an embodiment the present invention relates to an expresssion cassette comprising a) a promoter, preferably a promoter selected from the group consisting of Big35S, PCUbi, Super and USP, in particular p-PcUBI; and b) the nucleic acid SEQ ID NO. 119222, or a homolog or fragment thereof, or a homolog thereof being depicted in Table I, application no. 9, column 8, in the same line as SEQ ID NO. 119222, preferably the coding region thereof, a homolog or a fragment thereof; which are operable linked.

[53829] In an embodiment thereof the expression cassette comprises in addition c) a nucleic acid molecule encoding a transit peptide, especially a plastidal transit petide in case in Table I, application no. 9, in column 6 in the same line as SEQ ID NO. 119222 is depicted, plastidic is mentioned, or a mitochondrial transit peptide in case in Table I, application no. 9, in column 6 in the same line as SEQ ID NO. 119222 is depicted, mitochondrial is mentioned; which is operable linked, too.

[53830] In another embodiment thereof the expression cassette does not comprise an additional transit peptide in case in Table I, application no. 9, in column 6 in the same line as SEQ ID NO. 119222 is depicted, non-targeted is mentioned.

[53831] In an embodiment the present invention relates to an expresssion cassette comprising a) a promoter, preferably a promoter selected from the group consisting of Big35S, PCUbi, Super and USP, in particular p-PcUBI; and b) the nucleic acid SEQ ID NO. 116341, or a homolog or fragment thereof, or a homolog thereof being depicted in Table I, application no. 9, column 8, in the same line as SEQ ID NO. 116341, preferably the coding region thereof, a homolog or a fragment thereof; which are operable linked.

[53832] In an embodiment thereof the expression cassette comprises in addition c) a nucleic acid molecule encoding a transit peptide, especially a plastidal transit petide in case in Table I, application no. 9, in column 6 in the same line as SEQ ID NO. 116341 is depicted, plastidic is mentioned, or a mitochondrial transit peptide in case in Table I, application no. 9, in column 6 in the same line as SEQ ID NO. 116341 is depicted, mitochondrial is mentioned; which is operable linked, too.

[53833] In another embodiment thereof the expression cassette does not comprise an additional transit peptide in case in Table I, application no. 9, in column 6 in the same line as SEQ ID NO. 116341 is depicted, non-targeted is mentioned.

[53834] In an embodiment the present invention relates to an expresssion cassette comprising a) a promoter, preferably a promoter selected from the group consisting of Big35S, PCUbi, Super and USP, in particular p-PcUBI; and b) the nucleic acid SEQ ID NO. 116460, or a homolog or fragment thereof, or a homolog thereof being depicted in Table I, application no. 9, column 8, in the same line as SEQ ID NO. 116460, preferably the coding region thereof, a homolog or a fragment thereof; which are operable linked.

[53835] In an embodiment thereof the expression cassette comprises in addition c) a nucleic acid molecule encoding a transit peptide, especially a plastidal transit petide in case in Table I, application no. 9, in column 6 in the same line as SEQ ID NO. 116460 is depicted, plastidic is mentioned, or a mitochondrial transit peptide in case in Table I, application no. 9, in column 6 in the same line as SEQ ID NO. 116460 is depicted, mitochondrial is mentioned; which is operable linked, too.

[53836] In another embodiment thereof the expression cassette does not comprise an additional transit peptide in case in Table I, application no. 9, in column 6 in the same line as SEQ ID NO. 116460 is depicted, non-targeted is mentioned.

[53837] In an embodiment the present invention relates to an expresssion cassette comprising a) a promoter, preferably a promoter selected from the group consisting of Big35S, PCUbi, Super and USP, in particular p-PcUBI; and b) the nucleic acid SEQ ID NO. 58324, or a homolog or fragment thereof, or a homolog thereof being depicted in Table I, application no. 9, column 8, in the same line as SEQ ID NO. 58324, preferably the coding region thereof, a homolog or a fragment thereof; which are operable linked.

[53838] In an embodiment thereof the expression cassette comprises in addition c) a nucleic acid molecule encoding a transit peptide, especially a plastidal transit petide in case in Table I, application no. 9, in column 6 in the same line as SEQ ID NO. 58324 is depicted, plastidic is mentioned, or a mitochondrial transit peptide in case in Table I, application no. 9, in column 6 in the same line as SEQ ID NO. 58324 is depicted, mitochondrial is mentioned; which is operable linked, too.

[53839] In another embodiment thereof the expression cassette does not comprise an additional transit peptide in case in Table I, application no. 9, in column 6 in the same line as SEQ ID NO. 58324 is depicted, non-targeted is mentioned.

[53840] In an embodiment the present invention relates to an expresssion cassette comprising a) a promoter, preferably a promoter selected from the group consisting of Big35S, PCUbi, Super and USP, in particular p-PcUBI; and b) the nucleic acid SEQ ID NO. 12140, or a homolog or fragment thereof, or a homolog thereof being depicted in Table I, application no. 9, column 8, in the same line as SEQ ID NO. 12140, preferably the coding region thereof, a homolog or a fragment thereof; which are operable linked.

[53841] In an embodiment thereof the expression cassette comprises in addition c) a nucleic acid molecule encoding a transit peptide, especially a plastidal transit petide in case in Table I, application no. 9, in column 6 in the same line as SEQ ID NO. 12140 is depicted, plastidic is mentioned, or a mitochondrial transit peptide in case in Table I, application no. 9, in column 6 in the same line as SEQ ID NO. 12140 is depicted, mitochondrial is mentioned; which is operable linked, too.

[53842] In another embodiment thereof the expression cassette does not comprise an additional transit peptide in case in Table I, application no. 9, in column 6 in the same line as SEQ ID NO. 12140 is depicted, non-targeted is mentioned.

[53843] In an embodiment the present invention relates to an expresssion cassette comprising a) a promoter, preferably a promoter selected from the group consisting of Big35S, PCUbi, Super and USP, in particular p-PcUBI; and b) the nucleic acid SEQ ID NO. 12341, or a homolog or fragment thereof, or a homolog thereof being depicted in Table I, application no. 9, column 8, in the same line as SEQ ID NO. 12341, preferably the coding region thereof, a homolog or a fragment thereof; which are operable linked.

[53844] In an embodiment thereof the expression cassette comprises in addition c) a nucleic acid molecule encoding a transit peptide, especially a plastidal transit petide in case in Table I, application no. 9, in column 6 in the same line as SEQ ID NO. 12341 is depicted, plastidic is mentioned, or a mitochondrial transit peptide in case in Table I, application no. 9, in column 6 in the same line as SEQ ID NO. 12341 is depicted, mitochondrial is mentioned; which is operable linked, too.

[53845] In another embodiment thereof the expression cassette does not comprise an additional transit peptide in case in Table I, application no. 9, in column 6 in the same line as SEQ ID NO. 12341 is depicted, non-targeted is mentioned.

[53846] In an embodiment the present invention relates to an expresssion cassette comprising a) a promoter, preferably a promoter selected from the group consisting of Big35S, PCUbi, Super and USP, in particular p-PcUBI; and b) the nucleic acid SEQ ID NO. 61553, or a homolog or fragment thereof, or a homolog thereof being depicted in Table I, application no. 9, column 8, in the same line as SEQ ID NO. 61553, preferably the coding region thereof, a homolog or a fragment thereof; which are operable linked.

[53847] In an embodiment thereof the expression cassette comprises in addition c) a nucleic acid molecule encoding a transit peptide, especially a plastidal transit petide in case in Table I, application no. 9, in column 6 in the same line as SEQ ID NO. 61553 is depicted, plastidic is mentioned, or a mitochondrial transit peptide in case in Table I, application no. 9, in column 6 in the same line as SEQ ID NO. 61553 is depicted, mitochondrial is mentioned; which is operable linked, too.

[53848] In another embodiment thereof the expression cassette does not comprise an additional transit peptide in case in Table I, application no. 9, in column 6 in the same line as SEQ ID NO. 61553 is depicted, non-targeted is mentioned.

[53849] In an embodiment the present invention relates to an expresssion cassette comprising a) a promoter, preferably a promoter selected from the group consisting of Big35S, PCUbi, Super and USP, in particular p-PcUBI; and b) the nucleic acid SEQ ID NO. 62079, or a homolog or fragment thereof, or a homolog thereof being depicted in Table I, application no. 9, column 8, in the same line as SEQ ID NO. 62079, preferably the coding region thereof, a homolog or a fragment thereof; which are operable linked.

[53850] In an embodiment thereof the expression cassette comprises in addition c) a nucleic acid molecule encoding a transit peptide, especially a plastidal transit petide in case in Table I, application no. 9, in column 6 in the same line as SEQ ID NO. 62079 is depicted, plastidic is mentioned, or a mitochondrial transit peptide in case in Table I, application no. 9, in column 6 in the same line as SEQ ID NO. 62079 is depicted, mitochondrial is mentioned; which is operable linked, too.

[53851] In another embodiment thereof the expression cassette does not comprise an additional transit peptide in case in Table I, application no. 9, in column 6 in the same line as SEQ ID NO. 62079 is depicted, non-targeted is mentioned.

[53852] In an embodiment the present invention relates to an expresssion cassette comprising a) a promoter, preferably a promoter selected from the group consisting of Big35S, PCUbi, Super and USP, in particular p-Super; and b) the nucleic acid SEQ ID NO. 119347, or a homolog or fragment thereof, or a homolog thereof being depicted in Table I, application no. 9, column 8, in the same line as SEQ ID NO. 119347, preferably the coding region thereof, a homolog or a fragment thereof; which are operable linked.

[53853] In an embodiment thereof the expression cassette comprises in addition c) a nucleic acid molecule encoding a transit peptide, especially a plastidal transit petide in case in Table I, application no. 9, in column 6 in the same line as SEQ ID NO. 119347 is depicted, plastidic is mentioned, or a mitochondrial transit peptide in case in Table I, application no. 9, in column 6 in the same line as SEQ ID NO. 119347 is depicted, mitochondrial is mentioned; which is operable linked, too.

[53854] In another embodiment thereof the expression cassette does not comprise an additional transit peptide in case in Table I, application no. 9, in column 6 in the same line as SEQ ID NO. 119347 is depicted, non-targeted is mentioned.

[53855] In an embodiment the present invention relates to an expresssion cassette comprising a) a promoter, preferably a promoter selected from the group consisting of Big35S, PCUbi, Super and USP, in particular p-PcUBI; and b) the nucleic acid SEQ ID NO. 119408, or a homolog or fragment thereof, or a homolog thereof being depicted in Table I, application no. 9, column 8, in the same line as SEQ ID NO. 119408, preferably the coding region thereof, a homolog or a fragment thereof; which are operable linked.

[53856] In an embodiment thereof the expression cassette comprises in addition c) a nucleic acid molecule encoding a transit peptide, especially a plastidal transit petide in case in Table I, application no. 9, in column 6 in the same line as SEQ ID NO. 119408 is depicted, plastidic is mentioned, or a mitochondrial transit peptide in case in Table I, application no. 9, in column 6 in the same line as SEQ ID NO. 119408 is depicted, mitochondrial is mentioned; which is operable linked, too.

[53857] In another embodiment thereof the expression cassette does not comprise an additional transit peptide in case in Table I, application no. 9, in column 6 in the same line as SEQ ID NO. 119408 is depicted, non-targeted is mentioned.

[53858] In an embodiment the present invention relates to an expresssion cassette comprising a) a promoter, preferably a promoter selected from the group consisting of Big35S, PCUbi, Super and USP, in particular Big35S; and b) the nucleic acid SEQ ID NO. 120045, or a homolog or fragment thereof, or a homolog thereof being depicted in Table I, application no. 9, column 8, in the same line as SEQ ID NO. 120045, preferably the coding region thereof, a homolog or a fragment thereof; which are operable linked.

[53859] In an embodiment thereof the expression cassette comprises in addition c) a nucleic acid molecule encoding a transit peptide, especially a plastidal transit petide in case in Table I, application no. 9, in column 6 in the same line as SEQ ID NO. 120045 is depicted, plastidic is mentioned, or a mitochondrial transit peptide in case in Table I, application no. 9, in column 6 in the same line as SEQ ID NO. 120045 is depicted, mitochondrial is mentioned; which is operable linked, too.

[53860] In another embodiment thereof the expression cassette does not comprise an additional transit peptide in case in Table I, application no. 9, in column 6 in the same line as SEQ ID NO. 120045 is depicted, non-targeted is mentioned.

[53861] In an embodiment the present invention relates to an expresssion cassette comprising a) a promoter, preferably a promoter selected from the group consisting of Big35S, PCUbi, Super and USP, in particular p-Super; and b) the nucleic acid SEQ ID NO. 63544, or a homolog or fragment thereof, or a homolog thereof being depicted in Table I, application no. 9, column 8, in the same line as SEQ ID NO. 63544, preferably the coding region thereof, a homolog or a fragment thereof; which are operable linked.

[53862] In an embodiment thereof the expression cassette comprises in addition c) a nucleic acid molecule encoding a transit peptide, especially a plastidal transit petide in case in Table I, application no. 9, in column 6 in the same line as SEQ ID NO. 63544 is depicted, plastidic is mentioned, or a mitochondrial transit peptide in case in Table I, application no. 9, in column 6 in the same line as SEQ ID NO. 63544 is depicted, mitochondrial is mentioned; which is operable linked, too.

[53863] In another embodiment thereof the expression cassette does not comprise an additional transit peptide in case in Table I, application no. 9, in column 6 in the same line as SEQ ID NO. 63544 is depicted, non-targeted is mentioned.

[53864] In an embodiment the present invention relates to an expresssion cassette comprising a) a promoter, preferably a promoter selected from the group consisting of Big35S, PCUbi, Super and USP, in particular p-Super; and b) the nucleic acid SEQ ID NO. 14706, or a homolog or fragment thereof, or a homolog thereof being depicted in Table I, application no. 9, column 8, in the same line as SEQ ID NO. 14706, preferably the coding region thereof, a homolog or a fragment thereof; which are operable linked.

[53865] In an embodiment thereof the expression cassette comprises in addition c) a nucleic acid molecule encoding a transit peptide, especially a plastidal transit petide in case in Table I, application no. 9, in column 6 in the same line as SEQ ID NO. 14706 is depicted, plastidic is mentioned, or a mitochondrial transit peptide in case in Table I, application no. 9, in column 6 in the same line as SEQ ID NO. 14706 is depicted, mitochondrial is mentioned; which is operable linked, too.

[53866] In another embodiment thereof the expression cassette does not comprise an additional transit peptide in case in Table I, application no. 9, in column 6 in the same line as SEQ ID NO. 14706 is depicted, non-targeted is mentioned.

[53867] In an embodiment the present invention relates to an expresssion cassette comprising a) a promoter, preferably a promoter selected from the group consisting of Big35S, PCUbi, Super and USP, in particular p-Super; and b) the nucleic acid SEQ ID NO. 120241, or a homolog or fragment thereof, or a homolog thereof being depicted in Table I, application no. 9, column 8, in the same line as SEQ ID NO. 120241, preferably the coding region thereof, a homolog or a fragment thereof; which are operable linked.

[53868] In an embodiment thereof the expression cassette comprises in addition c) a nucleic acid molecule encoding a transit peptide, especially a plastidal transit petide in case in Table I, application no. 9, in column 6 in the same line as SEQ ID NO. 120241 is depicted, plastidic is mentioned, or a mitochondrial transit peptide in case in Table I, application no. 9, in column 6 in the same line as SEQ ID NO. 120241 is depicted, mitochondrial is mentioned; which is operable linked, too.

[53869] In another embodiment thereof the expression cassette does not comprise an additional transit peptide in case in Table I, application no. 9, in column 6 in the same line as SEQ ID NO. 120241 is depicted, non-targeted is mentioned.

[53870] In an embodiment the present invention relates to an expresssion cassette comprising a) a promoter, preferably a promoter selected from the group consisting of Big35S, PCUbi, Super and USP, in particular Big35S; and b) the nucleic acid SEQ ID NO. 90165, or a homolog or fragment thereof, or a homolog thereof being depicted in Table I, application no. 9, column 8, in the same line as SEQ ID NO. 90165, preferably the coding region thereof, a homolog or a fragment thereof; which are operable linked.

[53871] In an embodiment thereof the expression cassette comprises in addition c) a nucleic acid molecule encoding a transit peptide, especially a plastidal transit petide in case in Table I, application no. 9, in column 6 in the same line as SEQ ID NO. 90165 is depicted, plastidic is mentioned, or a mitochondrial transit peptide in case in Table I, application no. 9, in column 6 in the same line as SEQ ID NO. 90165 is depicted, mitochondrial is mentioned; which is operable linked, too.

[53872] In another embodiment thereof the expression cassette does not comprise an additional transit peptide in case in Table I, application no. 9, in column 6 in the same line as SEQ ID NO. 90165 is depicted, non-targeted is mentioned.

[53873] In an embodiment the present invention relates to an expresssion cassette comprising a) a promoter, preferably a promoter selected from the group consisting of Big35S, PCUbi, Super and USP, in particular Big35S; and b) the nucleic acid SEQ ID NO. 120309, or a homolog or fragment thereof, or a homolog thereof being depicted in Table I, application no. 9, column 8, in the same line as SEQ ID NO. 120309, preferably the coding region thereof, a homolog or a fragment thereof; which are operable linked.

[53874] In an embodiment thereof the expression cassette comprises in addition c) a nucleic acid molecule encoding a transit peptide, especially a plastidal transit petide in case in Table I, application no. 9, in column 6 in the same line as SEQ ID NO. 120309 is depicted, plastidic is mentioned, or a mitochondrial transit peptide in case in Table I, application no. 9, in column 6 in the same line as SEQ ID NO. 120309 is depicted, mitochondrial is mentioned; which is operable linked, too.

[53875] In another embodiment thereof the expression cassette does not comprise an additional transit peptide in case in Table I, application no. 9, in column 6 in the same line as SEQ ID NO. 120309 is depicted, non-targeted is mentioned.

[53876] In an embodiment the present invention relates to an expresssion cassette comprising a) a promoter, preferably a promoter selected from the group consisting of Big35S, PCUbi, Super and USP, in particular p-PcUBI; and b) the nucleic acid SEQ ID NO. 120436, or a homolog or fragment thereof, or a homolog thereof being depicted in Table I, application no. 9, column 8, in the same line as SEQ ID NO. 120436, preferably the coding region thereof, a homolog or a fragment thereof; which are operable linked.

[53877] In an embodiment thereof the expression cassette comprises in addition c) a nucleic acid molecule encoding a transit peptide, especially a plastidal transit petide in case in Table I, application no. 9, in column 6 in the same line as SEQ ID NO. 120436 is depicted, plastidic is mentioned, or a mitochondrial transit peptide in case in Table I, application no. 9, in column 6 in the same line as SEQ ID NO. 120436 is depicted, mitochondrial is mentioned; which is operable linked, too.

[53878] In another embodiment thereof the expression cassette does not comprise an additional transit peptide in case in Table I, application no. 9, in column 6 in the same line as SEQ ID NO. 120436 is depicted, non-targeted is mentioned.

[53879] In an embodiment the present invention relates to an expresssion cassette comprising a) a promoter, preferably a promoter selected from the group consisting of Big35S, PCUbi, Super and USP, in particular p-Super; and b) the nucleic acid SEQ ID NO. 64964, or a homolog or fragment thereof, or a homolog thereof being depicted in Table I, application no. 9, column 8, in the same line as SEQ ID NO. 64964, preferably the coding region thereof, a homolog or a fragment thereof; which are operable linked.

[53880] In an embodiment thereof the expression cassette comprises in addition c) a nucleic acid molecule encoding a transit peptide, especially a plastidal transit petide in case in Table I, application no. 9, in column 6 in the same line as SEQ ID NO. 64964 is depicted, plastidic is mentioned, or a mitochondrial transit peptide in case in Table I, application no. 9, in column 6 in the same line as SEQ ID NO. 64964 is depicted, mitochondrial is mentioned; which is operable linked, too.

[53881] In another embodiment thereof the expression cassette does not comprise an additional transit peptide in case in Table I, application no. 9, in column 6 in the same line as SEQ ID NO. 64964 is depicted, non-targeted is mentioned.

[53882] In an embodiment the present invention relates to an expresssion cassette comprising a) a promoter, preferably a promoter selected from the group consisting of Big35S, PCUbi, Super and USP, in particular p-Super; and b) the nucleic acid SEQ ID NO. 91958, or a homolog or fragment thereof, or a homolog thereof being depicted in Table I, application no. 9, column 8, in the same line as SEQ ID NO. 91958, preferably the coding region thereof, a homolog or a fragment thereof; which are operable linked.

[53883] In an embodiment thereof the expression cassette comprises in addition c) a nucleic acid molecule encoding a transit peptide, especially a plastidal transit petide in case in Table I, application no. 9, in column 6 in the same line as SEQ ID NO. 91958 is depicted, plastidic is mentioned, or a mitochondrial transit peptide in case in Table I, application no. 9, in column 6 in the same line as SEQ ID NO. 91958 is depicted, mitochondrial is mentioned; which is operable linked, too.

[53884] In another embodiment thereof the expression cassette does not comprise an additional transit peptide in case in Table I, application no. 9, in column 6 in the same line as SEQ ID NO. 91958 is depicted, non-targeted is mentioned.

[53885] In an embodiment the present invention relates to an expresssion cassette comprising a) a promoter, preferably a promoter selected from the group consisting of Big35S, PCUbi, Super and USP, in particular Big35S; and b) the nucleic acid SEQ ID NO. 117495, or a homolog or fragment thereof, or a homolog thereof being depicted in Table I, application no. 9, column 8, in the same line as SEQ ID NO. 117495, preferably the coding region thereof, a homolog or a fragment thereof; which are operable linked.

[53886] In an embodiment thereof the expression cassette comprises in addition c) a nucleic acid molecule encoding a transit peptide, especially a plastidal transit petide in case in Table I, application no. 9, in column 6 in the same line as SEQ ID NO. 117495 is depicted, plastidic is mentioned, or a mitochondrial transit peptide in case in Table I, application no. 9, in column 6 in the same line as SEQ ID NO. 117495 is depicted, mitochondrial is mentioned; which is operable linked, too.

[53887] In another embodiment thereof the expression cassette does not comprise an additional transit peptide in case in Table I, application no. 9, in column 6 in the same line as SEQ ID NO. 117495 is depicted, non-targeted is mentioned.

[53888] In an embodiment the present invention relates to an expresssion cassette comprising a) a promoter, preferably a promoter selected from the group consisting of Big35S, PCUbi, Super and USP, in particular p-Super; and b) the nucleic acid SEQ ID NO. 118212, or a homolog or fragment thereof, or a homolog thereof being depicted in Table I, application no. 9, column 8, in the same line as SEQ ID NO. 118212, preferably the coding region thereof, a homolog or a fragment thereof; which are operable linked.

[53889] In an embodiment thereof the expression cassette comprises in addition c) a nucleic acid molecule encoding a transit peptide, especially a plastidal transit petide in case in Table I, application no. 9, in column 6 in the same line as SEQ ID NO. 118212 is depicted, plastidic is mentioned, or a mitochondrial transit peptide in case in Table I, application no. 9, in column 6 in the same line as SEQ ID NO. 118212 is depicted, mitochondrial is mentioned; which is operable linked, too.

[53890] In another embodiment thereof the expression cassette does not comprise an additional transit peptide in case in Table I, application no. 9, in column 6 in the same line as SEQ ID NO. 118212 is depicted, non-targeted is mentioned.

[53891] In an embodiment the present invention relates to an expresssion cassette comprising a) a promoter, preferably a promoter selected from the group consisting of Big35S, PCUbi, Super and USP, in particular p-PcUBI; and b) the nucleic acid SEQ ID NO. 16883, or a homolog or fragment thereof, or a homolog thereof being depicted in Table I, application no. 9, column 8, in the same line as SEQ ID NO. 16883, preferably the coding region thereof, a homolog or a fragment thereof; which are operable linked.

[53892] In an embodiment thereof the expression cassette comprises in addition c) a nucleic acid molecule encoding a transit peptide, especially a plastidal transit petide in case in Table I, application no. 9, in column 6 in the same line as SEQ ID NO. 16883 is depicted, plastidic is mentioned, or a mitochondrial transit peptide in case in Table I, application no. 9, in column 6 in the same line as SEQ ID NO. 16883 is depicted, mitochondrial is mentioned; which is operable linked, too.

[53893] In another embodiment thereof the expression cassette does not comprise an additional transit peptide in case in Table I, application no. 9, in column 6 in the same line as SEQ ID NO. 16883 is depicted, non-targeted is mentioned.

[53894] [0165.1.8.9] to [0170.1.8.9] for the disclosure of these paragraphs see [0165.1.8.8] to [0170.1.8.8] above.

[53895] The invention further provides a vector, comprising a nucleic acid molecule comprising 1) a nucleic acid molecule selected from the group consisting of:
[53896] (a) a nucleic acid molecule encoding a polypeptide shown in Table II, column 5 or 8, application no. 9, preferably shown in Table II A, application no. 9, in column 5, or in Table II A, application no. 9, column 8, or in Table II B, application no. 9, column 8, or a homolog or a fragment thereof;
[53897] (b) a nucleic acid molecule shown in Table I, application no. 9, column 5 or 8, preferably shown in Table I A, application no. 9, in column 5, or in Table I A, application no. 9, column 8, or in Table I B, application no. 9, column 8, preferably the coding region thereof, or a homolog or a fragment thereof;
[53898] (c) a nucleic acid molecule, which, as a result of the degeneracy of the genetic code, can be derived from a polypeptide sequence depicted in column 5 or 8 of Table II, application no. 9, preferably shown in Table II A, application no. 9, in column 5, or in Table II A, application no. 9, column 8, or in Table II B, application no. 9, column 8;
[53899] (d) a nucleic acid molecule having at least 30% identity, preferably at least 40%, 50%, 60%, 70%, 75%, 80%, 85%, 90%, 95%, 96%, 97%, 98%, 99%, 99.5%, with the nucleic acid molecule sequence of a polynucleotide comprising the nucleic acid molecule shown in column 5 or 8 of Table I, application no. 9, preferably shown in Table I A, application no. 9, in column 5, or in Table I A, application no. 9, column 8, or in Table I B, application no. 9, column 8, preferably the coding region thereof;
[53900] (e) a nucleic acid molecule encoding a polypeptide having at least 30% identity, preferably at least 40%, 50% 60%, 70%, 75%, 80%, 85%, 90%, 95%, 96%, 97%, 98%, 99%, 99.5%, identity with the amino acid sequence of the polypeptide encoded by the nucleic acid molecule of (a), (b), (c), or (d);
[53901] (f) a nucleic acid molecule which hybridizes with a nucleic acid molecule of (a), (b), (c), (d), or (e) under stringent hybridization conditions;
[53902] (g) a nucleic acid molecule encoding a polypeptide which can be isolated with the aid of monoclonal or polyclonal antibodies made against a polypeptide encoded by one of the nucleic acid molecules of (a), (b), (c), (d), (e) or (f);
[53903] (h) a nucleic acid molecule encoding a polypeptide comprising the consensus sequence or one or more polypeptide motifs as shown in column 8 of Table IV, application no. 9;
[53904] (i) a nucleic acid molecule encoding a polypeptide having the activity represented by a protein as depicted in column 5 of Table II, application no. 9;
[53905] (j) a nucleic acid molecule comprising a polynucleotide which is obtained by amplifying a cDNA library or a genomic library using the primers in Table III, application no. 9, column 8;
[53906] and
[53907] (k) nucleic acid molecule which is obtainable by screening a suitable nucleic acid library, especially a cDNA library and/or a genomic library, under stringent hybridization conditions with a probe comprising one of the sequences of the nucleic acid molecule of (a), (b), (c), (d), (e), (f), (g), (h), (i) or (j) or with a fragment thereof having at least 15 nt, preferably 20 nt, 30 nt, 50 nt, 100 nt, 200 nt, 500 nt, 1000 nt, 1500 nt, 2000 nt or 3000 nt of the nucleic acid molecule complementary to a nucleic acid sequence characterized in (a), (b), (c), (d), (e), (f), (g), (h), (i) or (j);
[53908] or a nucleic acid molecule comprising a sequence which is complementary thereto.
   (All the references to Tables I to IV are references to the corresponding lines of Tables I to IV.)

[53909] In a preferred embodiment of said vector said nucleic acid molecule according to 1 (a), (b), (c), (d), (e), (f), (g), (h), (i), (j) or (k) encodes a polypeptide which has the activity of the respective polypeptide represented by a protein comprising a polypeptide as depicted in the respective line in column 5 of Table II, application no. 9.

[53910] In another preferred embodiment of said vector said nucleic acid molecule according to 1 (a), (b), (c), (d), (e), (f), (g), (h), (i), (j) or (k) confers a generation or an increase of the respective fine chemical in a non-human organism or a part thereof as compared to a corresponding wild-type non-human organism or part thereof.

[53911] In another preferred embodiment of said vector said nucleic acid molecule according to 1 (a), (b), (c), (d), (e), (f), (g), (h), (i), (j) or (k) encodes a polypeptide which has the activity of the respective polypeptide represented by a protein as depicted in the respective line in column 5 of

[53912] Table II, application no. 9, and confers a generation or an increase of the respective fine chemical in a non-human organism or a part thereof as compared to a corresponding wild-type non-human organism or part thereof.

[53913] In another embodiment thereof said vector comprises beneath said nucleic acid molecule according to 1 (a), (b), (c), (d), (e), (f), (g), (h), (i), (j) or (k), a promoter, preferably a promoter selected from the group consisting of Big35S, PCUbi, Super and USP, which are operable linked.

[53914] In a preferred embodiment thereof said vector comprises beneath said nucleic acid molecule according to 1 (a), (b), (c), (d), (e), (f), (g), (h), (i), (j) or (k), a promoter, preferably a promoter selected from the group consisting of Big35S, PCUbi, Super and USP, which are operable linked; and said nucleic acid molecule according to 1 (a), (b), (c), (d), (e), (f), (g), (h), (i), (j) or (k) encodes a polypeptide which has the activity of the respective polypeptide represented by a protein comprising a polypeptide as depicted in the respective line in column 5 of Table II, application no. 9.

[53915] In another preferred embodiment thereof said vector comprises beneath said nucleic acid molecule according to 1 (a), (b), (c), (d), (e), (f), (g), (h), (i), (j) or (k), a promoter, preferably a promoter selected from the group consisting of Big35S, PCUbi, Super and USP, which are operable linked; and said nucleic acid molecule according to 1 (a), (b), (c), (d), (e), (f), (g), (h), (i), (j) or (k) confers a generation or an increase of the respective fine chemical in a non-human organism or a part thereof as compared to a corresponding wild-type non-human organism or part thereof.

[53916] In another preferred embodiment thereof said vector comprises beneath said nucleic acid molecule according to 1 (a), (b), (c), (d), (e), (f), (g), (h), (i), (j) or (k), a promoter, preferably a promoter selected from the group consisting of Big35S, PCUbi, Super and USP, which are operable linked; and said nucleic acid molecule according to 1 (a), (b), (c), (d), (e), (f), (g), (h), (i), (j) or (k) encodes a polypeptide which has the activity of the respective polypeptide represented by a protein as depicted in the respective line in column 5 of Table II, application no. 9, and confers a generation or an increase of the respective fine chemical in a non-human organism or a part thereof as compared to a corresponding wild-type non-human organism or part thereof.

[53917] In another embodiment thereof said vector comprises beneath said nucleic acid molecule according to 1 (a), (b), (c), (d), (e), (f), (g), (h), (i), (j) or (k), a nucleic acid molecule encoding a transit peptide, preferably encoding a plastidal transit peptide, especially in case in column 6 of Table I, application no. 9, in the same line as of the respective nucleic acid molecule according to 1) “plastidic” is depicted, or encoding a mitochondrial transit peptide, especially in case in column 6 of Table I, application no. 9, in the same line as of the respective nucleic acid molecule according to 1) “mitochondrial” is depicted, which are operable linked.

[53918] In another embodiment thereof said vector does not comprise beneath said nucleic acid molecule according to 1 (a), (b), (c), (d), (e), (f), (g), (h), (i), (j) or (k), a nucleic acid molecule encoding a transit peptide in case in column 6 of Table I, application no. 9, in the same line as of the respective nucleic acid molecule according to 1) “non-targeted” is depicted.

[53919] In another embodiment thereof said vector comprises beneath said nucleic acid molecule according to 1 (a), (b), (c), (d), (e), (f), (g), (h), (i), (j) or (k), and a promoter, preferably a promoter selected from the group consisting of Big35S, PCUbi, Super and USP; a nucleic acid molecule encoding a transit peptide, preferably encoding a plastidal transit peptide, especially in case in column 6 of Table I, application no. 9, in the same line as of the respective nucleic acid molecule according to 1) “plastidic” is depicted, or encoding a mitochondrial transit peptide, especially in case in column 6 of Table I, application no. 9, in the same line as of the respective nucleic acid molecule according to 1) “mitochondrial” is depicted, which are operable linked.

[53920] In another embodiment thereof said vector does not comprise beneath said nucleic acid molecule according to 1 (a), (b), (c), (d), (e), (f), (g), (h), (i), (j) or (k), and a promoter, preferably a promoter selected from the group consisting of Big35S, PCUbi, Super and USP, which are operable linked; a nucleic acid molecule encoding a transit peptide, especially in case in column 6 of Table I, application no. 9, in the same line as of the respective nucleic acid molecule according to 1) “non-targeted” is depicted.

[53921] In another embodiment thereof said vector comprises beneath said nucleic acid molecule according to 1 (a), (b), (c), (d), (e), (f), (g), (h), (i), (j) or (k), and a promoter, preferably a promoter selected from the group consisting of Big35S, PCUbi, Super and USP; a nucleic acid molecule encoding a transit peptide, preferably encoding a plastidal transit peptide, especially in case in column 6 of Table I, application no. 9, in the same line as of the respective nucleic acid molecule according to 1) “plastidic” is depicted, or encoding a mitochondrial transit peptide, especially in case in column 6 of Table I, application no. 9, in the same line as of the respective nucleic acid molecule according to 1) “mitochondrial” is depicted, which are operable linked; and wherein said nucleic acid molecule according to 1 (a), (b), (c), (d), (e), (f), (g), (h), (i), (j) or (k) encodes a polypeptide which has the activity of the respective polypeptide represented by a protein comprising a polypeptide as depicted in column 5 of Table II, application no. 9 (in the same line).

[53922] In another embodiment thereof said vector does not comprise beneath said nucleic acid molecule according to 1 (a), (b), (c), (d), (e), (f), (g), (h), (i), (j) or (k), and a promoter, preferably a promoter selected from the group consisting of Big35S, PCUbi, Super and USP, which are operatively linked; a nucleic acid molecule encoding a transit peptide, especially in case in column 6 of Table I, application no. 9, in the same line as of the respective nucleic acid molecule according to 1) “non-targeted” is depicted; and wherein said nucleic acid molecule according to 1 (a), (b), (c), (d), (e), (f), (g), (h), (i), (j) or (k) encodes a polypeptide which has the activity of the respective polypeptide represented by a protein comprising a polypeptide as depicted in column 5 of Table II, application no. 9.

[53923] In another embodiment thereof said vector comprises beneath said nucleic acid molecule according to 1 (a), (b), (c), (d), (e), (f), (g), (h), (i), (j) or (k), and a promoter, preferably a promoter selected from the group consisting of Big35S, PCUbi, Super and USP; a nucleic acid molecule encoding a transit peptide, preferably encoding a plastidal transit peptide, especially in case in column 6 of Table I, application no. 9, in the same line as of the respective nucleic acid molecule according to 1) “plastidic” is depicted, or encoding a mitochondrial transit peptide, especially in case in column 6 of Table I, application no. 9, in the same line as of the respective nucleic acid molecule according to 1) “mitochondrial” is depicted, which are operable linked; and wherein said nucleic acid molecule according to 1 (a), (b), (c), (d), (e), (f), (g), (h), (i), (j) or (k) confers a generation or an increase of the respective fine chemical in a non-human organism or a part thereof as compared to a corresponding wild-type non-human organism or part thereof.

[53924] In another embodiment thereof said vector does not comprise beneath said nucleic acid molecule according to 1 (a), (b), (c), (d), (e), (f), (g), (h), (i), (j) or (k), and a promoter, preferably a promoter selected from the group consisting of Big35S, PCUbi, Super and USP, which are operatively linked; a nucleic acid molecule encoding a transit peptide, especially in case in column 6 of Table I, application no. 9, in the same line as of the respective nucleic acid molecule according to 1) “non-targeted” is depicted; and wherein said nucleic acid molecule according to 1 (a), (b), (c), (d), (e), (f), (g), (h), (i), (j) or (k) confers a generation or an increase of the respective fine chemical in a non-human organism or a part thereof as compared to a corresponding wild-type non-human organism or part thereof.

[53925] In another embodiment thereof said vector comprises beneath said nucleic acid molecule according to 1 (a), (b), (c), (d), (e), (f), (g), (h), (i), (j) or (k), and a promoter, preferably a promoter selected from the group consisting of Big35S, PCUbi, Super and USP; a nucleic acid molecule encoding a transit peptide, preferably encoding a plastidal transit peptide, especially in case in column 6 of Table I, application no. 9, in the same line as of the respective nucleic acid molecule according to 1) “plastidic” is depicted, or encoding a mitochondrial transit peptide, especially in case in column 6 of Table I, application no. 9, in the same line as of the respective nucleic acid molecule according to 1) “mitochondrial” is depicted, which are operable linked; and wherein said nucleic acid molecule according to 1 (a), (b), (c), (d), (e), (f), (g), (h), (i), (j) or (k) encodes a polypeptide which has the activity of the respective polypeptide represented by a protein as depicted in column 5 of Table II application no. 9 and confers a generation or an increase of the respective fine chemical in a non-human organism or a part thereof as compared to a corresponding wild-type non-human organism or part thereof.

[53926] In another embodiment thereof said vector does not comprise beneath said nucleic acid molecule according to 1 (a), (b), (c), (d), (e), (f), (g), (h), (i), (j) or (k), and a promoter, preferably a promoter selected from the group consisting of Big35S, PCUbi, Super and USP, which are operatively linked; a nucleic acid molecule encoding a transit peptide, especially in case in column 6 of Table I, application no. 9, in the same line as of the respective nucleic acid molecule according to 1) “non-targeted” is depicted; and wherein said nucleic acid molecule according to 1 (a), (b), (c), (d), (e), (f), (g), (h), (i), (j) or (k) encodes a polypeptide which has the activity of the respective polypeptide represented by a protein as depicted in column 5 of Table II application no. 9 (in the same line) and confers a generation or an increase of the respective fine chemical in a non-human organism or a part thereof as compared to a corresponding wild-type non-human organism or part thereof.

[53927] In a preferred embodiment of said vector said nucleic acid molecule according to 1 (a), (b), (c), (d), (e), (f), (g), (h), (i), (j) or (k), said promoter and optionally said nucleic acid molecule encoding a transit peptide are encompassed in an expression cassette. Accordingly in an embodiment the invention provides a vector comprising an expression cassette comprising said nucleic acid molecule according to 1 (a), (b), (c), (d), (e), (f), (g), (h), (i), (j) or (k), said promoter and optionally said a nucleic acid molecule encoding a transit peptide, operable linked. Said expression cassette may encompass a terminator, too.

[53928] The invention further provides a vector comprising a nucleic acid molecule comprising 1) a nucleic acid molecule selected from the group consisting of:
[53929] (a) a nucleic acid molecule encoding a polypeptide shown in Table II, column 5 or 8, application no. 9, preferably shown in Table II A, application no. 9, in column 5, or in Table II A, application no. 9, column 8, or in Table II B, application no. 9, column 8, or a homolog or a fragment thereof;
[53930] (b) a nucleic acid molecule shown in Table I, application no. 9, column 5 or 8, preferably shown in Table I A, application no. 9, in column 5, or in Table I A, application no. 9, column 8, or in Table I B, application no. 9, column 8, preferably the coding region thereof, or a homolog or a fragment thereof;
[53931] (c) a nucleic acid molecule, which, as a result of the degeneracy of the genetic code, can be derived from a polypeptide sequence depicted in column 5 or 8 of Table II, application no. 9, preferably shown in Table II A, application no. 9, in column 5, or in Table II A, application no. 9, column 8, or in Table II B, application no. 9, column 8;
[53932] (d) a nucleic acid molecule having at least 30% identity, preferably at least 40%, 50%, 60%, 70%, 75%, 80%, 85%, 90%, 95%, 96%, 97%, 98%, 99%, 99.5%, with the nucleic acid molecule sequence of a polynucleotide comprising the nucleic acid molecule shown in column 5 or 8 of Table I, application no. 9, preferably shown in Table I A, application no. 9, in column 5, or in Table I A, application no. 9, column 8, or in Table I B, application no. 9, column 8, preferably the coding region thereof;
[53933] (e) a nucleic acid molecule encoding a polypeptide having at least 30% identity, preferably at least 40%, 50% 60%, 70%, 75%, 80%, 85%, 90%, 95%, 96%, 97%, 98%, 99%, 99.5%, identity with the amino acid sequence of the polypeptide encoded by the nucleic acid molecule of (a), (b), (c), or (d);
[53934] (f) a nucleic acid molecule which hybridizes with a nucleic acid molecule of (a), (b), (c), (d), or (e) under stringent hybridization conditions;
[53935] (g) a nucleic acid molecule encoding a polypeptide which can be isolated with the aid of monoclonal or polyclonal antibodies made against a polypeptide encoded by one of the nucleic acid molecules of (a), (b), (c), (d), (e) or (f);
[53936] (h) a nucleic acid molecule encoding a polypeptide comprising the consensus sequence or one or more polypeptide motifs as shown in column 8 of Table IV, application no. 9;
[53937] (i) a nucleic acid molecule encoding a polypeptide having the activity represented by a protein as depicted in column 5 of Table II, application no. 9;
[53938] (j) a nucleic acid molecule comprising a polynucleotide which is obtained by amplifying a cDNA library or a genomic library using the primers in Table III, application no. 9, column 8;
[53939] and
[53940] (k) nucleic acid molecule which is obtainable by screening a suitable nucleic acid library, especially a cDNA library and/or a genomic library, under stringent hybridization conditions with a probe comprising one of the sequences of the nucleic acid molecule of (a), (b), (c), (d), (e), (f), (g), (h), (i) or (j) or with a fragment thereof having at least 15 nt, preferably 20 nt, 30 nt, 50 nt, 100 nt, 200 nt, 500 nt, 1000 nt, 1500 nt, 2000 nt or 3000 nt of the nucleic acid molecule complementary to a nucleic acid sequence characterized in (a), (b), (c), (d), (e), (f), (g), (h), (i) or (j);
[53941] or a nucleic acid molecule comprising a sequence which is complementary thereto;
   whereby, preferably, the nucleic acid molecule according to 1 (a), (b), (c), (d), (e), (f), (g), (h), (i), (j) or (k) distinguishes over the sequence depicted in Table I A and/or I B, application no. 9, column 5 or 8, or the coding region thereof, by one or more nucleotides (especially but not exceeding 5%, preferably 4%, 3%, 2%, 1%, 0.5%, 0.2% or 0.1%). In an embodiment, the nucleic acid molecule of the invention does not consist of the sequence shown in Table I A and/or I B, application no. 9, column 5 or 8, or the coding region thereof, respectively. In another embodiment, the nucleic acid molecule of the present invention, preferably the coding region thereof, is 30%, 40%, 50%, 60%, 70%, 80%, 90%, 95% identical but less than 100%, 99.999%, 99.99%, 99.9%, 99%, 98%, 97%, 96% or 95% identical to the sequence shown in Table I A and/or I B, application no. 9, column 5 or 8, or the coding region thereof, respectively. In a further embodiment the nucleic acid molecule does not encode the polypeptide sequence shown in Table II A and/or II B, application no. 9, column 5 or 8 but homologs thereof. Accordingly, in one embodiment, the nucleic acid molecule of the present invention encodes in one embodiment a polypeptide which differs at least in one or more amino acids (especially but not exceeding 5%, preferably 4%, 3%, 2%, 1%, 0.5%, 0.2% or 0.1%) from the polypeptide shown in Table II, application no. 9, column 5 or 8 and does not encode a protein of the sequence shown in Table II A and/or II B, application no. 9, column 5 or 8. Accordingly, in one embodiment, the protein encoded by a sequence of a nucleic acid according to (a), (b), (c), (d), (e), (f), (g), (h), (i), (j) or (k) does not consist of the sequence shown in Table I A and/or I B, application no. 9, column 5 and 8, or the coding region thereof. In a further embodiment, the protein of the present invention is at least 30%,40%, 50%, 60%, 70%, 80%, 90%, 95% identical to protein sequence depicted in Table II A and/or II B, application no. 9, column 5 or 8 but less than 100%, preferably less than 99.999%, 99.99% or 99.9%, more preferably less than 99%, 985, 97%, 96% or 95% identical to the sequence shown in Table II A and/or II B, application no. 9, column 5 or 8.
   (All the references to Tables I to IV are references to the corresponding lines of Tables I to IV.)

[53942] In a preferred embodiment of said vector said nucleic acid molecule according to 1 (a), (b), (c), (d), (e), (f), (g), (h), (i), (j) or (k) encodes a polypeptide which has the activity of the respective polypeptide represented by a protein comprising a polypeptide as depicted in the respective line in column 5 of Table II, application no. 9.

[53943] In another preferred embodiment of said vector said nucleic acid molecule according to 1 (a), (b), (c), (d), (e), (f), (g), (h), (i), (j) or (k) confers a generation or an increase of the respective fine chemical in a non-human organism or a part thereof as compared to a corresponding wild-type non-human organism or part thereof.

[53944] In another preferred embodiment of said vector said nucleic acid molecule according to 1 (a), (b), (c), (d), (e), (f), (g), (h), (i), (j) or (k) encodes a polypeptide which has the activity of the respective polypeptide represented by a protein as depicted in the respective line in column 5 of

[53945] Table II, application no. 9, and confers a generation or an increase of the respective fine chemical in a non-human organism or a part thereof as compared to a corresponding wild-type non-human organism or part thereof.

[53946] In another embodiment thereof said vector comprises beneath said nucleic acid molecule according to 1 (a), (b), (c), (d), (e), (f), (g), (h), (i), (j) or (k), a promoter, preferably a promoter selected from the group consisting of Big35S, PCUbi, Super and USP, which are operable linked.

[53947] In a preferred embodiment thereof said vector comprises beneath said nucleic acid molecule according to 1 (a), (b), (c), (d), (e), (f), (g), (h), (i), (j) or (k), a promoter, preferably a promoter selected from the group consisting of Big35S, PCUbi, Super and USP, which are operable linked; and said nucleic acid molecule according to 1 (a), (b), (c), (d), (e), (f), (g), (h), (i), (j) or (k) encodes a polypeptide which has the activity of the respective polypeptide represented by a protein comprising a polypeptide as depicted in the respective line in column 5 of Table II, application no. 9.

[53948] In another preferred embodiment thereof said vector comprises beneath said nucleic acid molecule according to 1 (a), (b), (c), (d), (e), (f), (g), (h), (i), (j) or (k), a promoter, preferably a promoter selected from the group consisting of Big35S, PCUbi, Super and USP, which are operable linked; and said nucleic acid molecule according to 1 (a), (b), (c), (d), (e), (f), (g), (h), (i), (j) or (k) confers a generation or an increase of the respective fine chemical in a non-human organism or a part thereof as compared to a corresponding wild-type non-human organism or part thereof.

[53949] In another preferred embodiment thereof said vector comprises beneath said nucleic acid molecule according to 1 (a), (b), (c), (d), (e), (f), (g), (h), (i), (j) or (k), a promoter, preferably a promoter selected from the group consisting of Big35S, PCUbi, Super and USP, which are operable linked; and said nucleic acid molecule according to 1 (a), (b), (c), (d), (e), (f), (g), (h), (i), (j) or (k) encodes a polypeptide which has the activity of the respective polypeptide represented by a protein as depicted in the respective line in column 5 of Table II, application no. 9, and confers a generation or an increase of the respective fine chemical in a non-human organism or a part thereof as compared to a corresponding wild-type non-human organism or part thereof.

[53950] In another embodiment thereof said vector comprises beneath said nucleic acid molecule according to 1 (a), (b), (c), (d), (e), (f), (g), (h), (i), (j) or (k), a nucleic acid molecule encoding a transit peptide, preferably encoding a plastidal transit peptide, especially in case in column 6 of Table I, application no. 9, in the same line as of the respective nucleic acid molecule according to 1) “plastidic” is depicted, or encoding a mitochondrial transit peptide, especially in case in column 6 of Table I, application no. 9, in the same line as of the respective nucleic acid molecule according to 1) “mitochondrial” is depicted, which are operable linked.

[53951] In another embodiment thereof said vector does not comprise beneath said nucleic acid molecule according to 1 (a), (b), (c), (d), (e), (f), (g), (h), (i), (j) or (k), a nucleic acid molecule encoding a transit peptide in case in column 6 of Table I, application no. 9, in the same line as of the respective nucleic acid molecule according to 1) “non-targeted” is depicted.

[53952] In another embodiment thereof said vector comprises beneath said nucleic acid molecule according to 1 (a), (b), (c), (d), (e), (f), (g), (h), (i), (j) or (k), and a promoter, preferably a promoter selected from the group consisting of Big35S, PCUbi, Super and USP; a nucleic acid molecule encoding a transit peptide, preferably encoding a plastidal transit peptide, especially in case in column 6 of Table I, application no. 9, in the same line as of the respective nucleic acid molecule according to 1) “plastidic” is depicted, or encoding a mitochondrial transit peptide, especially in case in column 6 of Table I, application no. 9, in the same line as of the respective nucleic acid molecule according to 1) “mitochondrial” is depicted, which are operable linked.

[53953] In another embodiment thereof said vector does not comprise beneath said nucleic acid molecule according to 1 (a), (b), (c), (d), (e), (f), (g), (h), (i), (j) or (k), and a promoter, preferably a promoter selected from the group consisting of Big35S, PCUbi, Super and USP, which are operatively linked; a nucleic acid molecule encoding a transit peptide, especially in case in column 6 of Table I, application no. 9, in the same line as of the respective nucleic acid molecule according to 1) “non-targeted” is depicted.

[53954] In another embodiment thereof said vector comprises beneath said nucleic acid molecule according to 1 (a), (b), (c), (d), (e), (f), (g), (h), (i), (j) or (k), and a promoter, preferably a promoter selected from the group consisting of Big35S, PCUbi, Super and USP; a nucleic acid molecule encoding a transit peptide, preferably encoding a plastidal transit peptide, especially in case in column 6 of Table I, application no. 9, in the same line as of the respective nucleic acid molecule according to 1) “plastidic” is depicted, or encoding a mitochondrial transit peptide, especially in case in column 6 of Table I, application no. 9, in the same line as of the respective nucleic acid molecule according to 1) “mitochondrial” is depicted, which are operable linked; and wherein said nucleic acid molecule according to 1 (a), (b), (c), (d), (e), (f), (g), (h), (i), (j) or (k) encodes a polypeptide which has the activity of the respective polypeptide represented by a protein comprising a polypeptide as depicted in column 5 of Table II, application no. 9.

[53955] In another embodiment thereof said vector does not comprise beneath said nucleic acid molecule according to 1 (a), (b), (c), (d), (e), (f), (g), (h), (i), (j) or (k), and a promoter, preferably a promoter selected from the group consisting of Big35S, PCUbi, Super and USP, which are operatively linked; a nucleic acid molecule encoding a transit peptide, especially in case in column 6 of Table I, application no. 9, in the same line as of the respective nucleic acid molecule according to 1) “non-targeted” is depicted; and wherein said nucleic acid molecule according to 1 (a), (b), (c), (d), (e), (f), (g), (h), (i), (j) or (k) encodes a polypeptide which has the activity of the respective polypeptide represented by a protein comprising a polypeptide as depicted in column 5 of Table II, application no. 9.

[53956] In another embodiment thereof said vector comprises beneath said nucleic acid molecule according to 1 (a), (b), (c), (d), (e), (f), (g), (h), (i), (j) or (k), and a promoter, preferably a promoter selected from the group consisting of Big35S, PCUbi, Super and USP; a nucleic acid molecule encoding a transit peptide, preferably encoding a plastidal transit peptide, especially in case in column 6 of Table I, application no. 9, in the same line as of the respective nucleic acid molecule according to 1) “plastidic” is depicted, or encoding a mitochondrial transit peptide, especially in case in column 6 of Table I, application no. 9, in the same line as of the respective nucleic acid molecule according to 1) “mitochondrial” is depicted, which are operable linked; and wherein said nucleic acid molecule according to 1 (a), (b), (c), (d), (e), (f), (g), (h), (i), (j) or (k) confers a generation or an increase of the respective fine chemical in a non-human organism or a part thereof as compared to a corresponding wild-type non-human organism or part thereof.

[53957] In another embodiment thereof said vector does not comprise beneath said nucleic acid molecule according to 1 (a), (b), (c), (d), (e), (f), (g), (h), (i), (j) or (k), and a promoter, preferably a promoter selected from the group consisting of Big35S, PCUbi, Super and USP, which are operatively linked; a nucleic acid molecule encoding a transit peptide, especially in case in column 6 of Table I, application no. 9, in the same line as of the respective nucleic acid molecule according to 1) “non-targeted” is depicted; and wherein said nucleic acid molecule according to 1 (a), (b), (c), (d), (e), (f), (g), (h), (i), (j) or (k) confers a generation or an increase of the respective fine chemical in a non-human organism or a part thereof as compared to a corresponding wild-type non-human organism or part thereof.

[53958] In another embodiment thereof said vector comprises beneath said nucleic acid molecule according to 1 (a), (b), (c), (d), (e), (f), (g), (h), (i), (j) or (k), and a promoter, preferably a promoter selected from the group consisting of Big35S, PCUbi, Super and USP; a nucleic acid molecule encoding a transit peptide, preferably encoding a plastidal transit peptide, especially in case in column 6 of Table I, application no. 9, in the same line as of the respective nucleic acid molecule according to 1) “plastidic” is depicted, or encoding a mitochondrial transit peptide, especially in case in column 6 of Table I, application no. 9, in the same line as of the respective nucleic acid molecule according to 1) “mitochondrial” is depicted, which are operable linked; and wherein said nucleic acid molecule according to 1 (a), (b), (c), (d), (e), (f), (g), (h), (i), (j) or (k) encodes a polypeptide which has the activity of the respective polypeptide represented by a protein as depicted in column 5 of Table II application no. 9 and confers a generation or an increase of the respective fine chemical in a non-human organism or a part thereof as compared to a corresponding wild-type non-human organism or part thereof.

[53959] In another embodiment thereof said vector does not comprise beneath said nucleic acid molecule according to 1 (a), (b), (c), (d), (e), (f), (g), (h), (i), (j) or (k), and a promoter, preferably a promoter selected from the group consisting of Big35S, PCUbi, Super and USP, which are operatively linked; a nucleic acid molecule encoding a transit peptide, especially in case in column 6 of Table I, application no. 9, in the same line as of the respective nucleic acid molecule according to 1) “non-targeted” is depicted; and wherein said nucleic acid molecule according to 1 (a), (b), (c), (d), (e), (f), (g), (h), (i), (j) or (k) encodes a polypeptide which has the activity of the respective polypeptide represented by a protein as depicted in column 5 of Table II application no. 9 and confers a generation or an increase of the respective fine chemical in a non-human organism or a part thereof as compared to a corresponding wild-type non-human organism or part thereof.

[53960] [0181.1.8.9] to [0209.1.8.9] for the disclosure of these paragraphs see [0181.1.8.8] to [0209.1.8.8] above.

[53961] The genes of the invention, coding for an activity selected from the group consisting of 3-oxoacyl-[acyl-carrier-protein] reductase, 3-oxoacyl-[acyl-carrier-protein] synthase, AAS bifunctional protein, acid phosphatase precursor, acid shock protein, acyl transferase, acylCoA synthase, arginine decarboxylase, aromatic acid decarboxylase, asparaginase, At2g45420-protein, ATPase epsilon subunit, b0195-protein, b1234-protein, b1248-protein, b1280-protein, b1330-protein, b1470-protein, b1670-protein, b1672-protein, b1837-protein, b2032-protein, b2107-protein, b2399-protein, b2474-protein, b2613-protein, b2682-protein, b3442-protein, b3534-protein, b4023-protein, bifunctional purine biosynthesis protein, branched chain amino acid ABC transporter ATP-binding protein, branched-chain amino acid permease, carbamoyl-phosphate synthase subunit, carbon dioxide concentrating mechanism protein, cation-transporting ATPase, cell division control protein, coproporphyrinogen III oxidase, CTP synthase, CTP synthetase, dihydroxyacetone kinase, DnaJ-like chaperone, electron transport complex protein, ethanolamine utilization protein, F-box protein, flavodoxin, fumarate hydratase, glucose-6-phosphate 1-dehydrogenase, glutaredoxin, glycerol-3-phosphate dehydrogenase, heat shock transcription factor, HesB/YadR/YfhF family protein, isopropylmalate isomerase large subunit, metal-dependent hydrolase, molecular chaperone, monothiol glutaredoxin, multidrug resistance protein, oxidoreductase, permease protein of ABC transporter, phosphate import ATP-binding protein, phosphoadenosine phosphosulfate reductase , phosphofructokinase, phosphotriesterase, protein phosphatase, pyruvate kinase, recombinase A, sec-independent protein translocase, sll1032-protein, ThiF family protein, threonine dehydratase, threonine efflux protein, transcription factor, TTC1386-protein, ydr339c-protein, ydr507c-protein, and ymr013c-protein are also called “FCRP genes”.

[53962] [0211.1.8.9] to [0225.1.8.9] for the disclosure of these paragraphs see [0211.1.8.8] to [0225.1.8.8] above.

[53963] In addition to the sequence mentioned in Table I, application no. 9, column 5 or 8, preferably the coding region thereof, or its homologs or fragments, it may be advantageous additionally to express and/or mutate further genes in the non-human organisms. Especially advantageously, additionally at least one further gene of the biosynthetic pathway of the fine chemical is expressed in the non-human organisms such as plants or microorganisms. It is also possible that the regulation of the natural genes has been modified advantageously so that the gene and/or its gene product is no longer subject to the regulatory mechanisms which exist in the non-human organisms. This leads to an increased synthesis of the respective fatty acid since, for example, feedback regulations no longer exist to the same extent or not at all. In addition it might be advantageously to combine the nucleic acids sequences of the invention containing the sequences shown in the respective line in Table I, application no. 9, column 5 or 8, preferably the coding region thereof, or homologs or fragments thereof, with genes which generally support or enhance the growth or yield of the target non-human organisms, for example genes which lead to faster growth rate of non human organism like microorganisms or plants or genes which produce stress-, pathogen-, or herbicide-resistant plants.

[53964] [0227.1.8.9] to [0239.1.8.9] for the disclosure of these paragraphs see [0227.1.8.8] to [0239.1.8.8] above.

[53965] In an embodiment of the present invention the nucleic acid construct of the present invention comprises a nucleic acid molecule as depicted in the respective line in Table I, application no. 9, column 5 or 8, preferably the coding region thereof, a fragment or a homolog thereof, and a plant promoter, such as the Big 35S promoter, the DC3 promoter, the PC

[53966] Ubi promoter, the LegB4-promoter, the Super promoter, the USP promoter or the like. In another embodiment the nucleic acid construct of the present invention comprises a nucleic acid molecule as depicted in the respective line in Table I, application no. 9, column 5 or 8, preferably the coding region thereof, a fragment or a homolog thereof, and a plant promoter such as, for example, the USP, the LegB4-, the DC3 promoter or the ubiquitin promoter from parsley or other herein mentioned promoters. In a further embodiment the nucleic acid construct of the present invention comprises a nucleic acid molecule as depicted in the respective line in Table I, application no. 9, column 5 or 8, preferably the coding region thereof, a fragment or a homolog thereof, and a plant promoter, such as the Big 35S promoter, the PC Ubi promoter, the Super promoter, the USP promoter or the like. In addition different terminators may advantageously be used in these nucleic acid constructs; examples for transcriptional termination are polyadenylation signals.

[53967] [0241.1.8.9] to [0245.1.8.9] for the disclosure of these paragraphs see [0241.1.8.8] to [0245.1.8.8] above.

[53968] Other preferred sequences for use in operable linkage in gene expression constructs are targeting sequences, which are required for targeting the gene product into specific cell compartments (for a review, see Kermode, Crit. Rev. Plant Sci. 15 (4), 285 (1996) and references cited therein), for example into the vacuole, the nucleus, all types of plastids, such as amyloplasts, chloroplasts, chromoplasts, the extracellular space, the mitochondria, the endoplasmic reticulum, elaioplasts, peroxisomes, glycosomes, and other compartments of cells or extracellular; preferred are sequences, which are involved in targeting to plastids as mentioned above. Sequences, which must be mentioned in this context are, in particular, the signalpeptideor transit-peptide-encoding sequences which are known per se. For example, plastidtransit-peptide-encoding sequences enable the targeting of the expression product into the plastids of a plant cell. Targeting sequences are also known for eukaryotic and to a lower extent for prokaryotic organisms and can advantageously be operable linked with the nucleic acid molecule of the present invention as shown in Table I, application no. 9, columns 5 and 8, preferably the coding region thereof, or homologs or fragments thereof, and described herein to achieve an expression in one of said compartments or extracellular.

[53969] [0247.1.8.9] to [0266.1.8.9] for the disclosure of these paragraphs see [0247.1.8.8] to [0266.1.8.8] above.

[53970] An embodiment of the invention relates to a vector where the nucleic acid molecule according to the invention is linked operably to regulatory sequences which permit the expression in a prokaryotic or eukaryotic host. A further embodiment of the invention relates to a vector in which a nucleic acid sequence encoding one of the polypeptides shown in the respective line in Table II, application no. 9, columns 5 or 8, or homologs or fragments thereof, is functionally linked to a targeting sequence such as a plastidial or mitochondrial targeting sequence. A further embodiment of the invention relates to a vector in which a nucleic acid sequence encoding one of the polypeptides shown in the respective line in Table II, application no. 9, columns 5 or 8, or homologs or fragments thereof, is functionally linked to (a) regulatory sequence which permit the expression in an organelle, such as plastids or mitochondria, preferably plastids.

[53971] A further embodiment of the invention relates to a vector which comprises a nucleic acid sequence encoding one of the polypeptides shown in the respective line in Table II, application no. 9, columns 5 or 8, or homologs or fragments thereof, but no additional targeting sequence.

[53972] [0268.1.8.9] to [0273.1.8.9] for the disclosure of these paragraphs see [0268.1.8.8] to [0273.1.8.8] above.

[53973] A further object of the invention relates to the use of a nucleic acid construct, e.g. an expression cassette, comprising one or more nucleic acid molecules encoding one or more polypeptides as depicted in the respective line(s) in Table II, application no. 9, columns 5 or 8, or homologs or fragments thereof, or comprising one or more nucleic acid molecules as depicted in the respective line(s) in Table I, application no. 9, columns 5 or 8, preferably the coding region thereof, or homologs or fragments thereof, or comprising a nucleic acid molecule hybridizing therewith for the transformation of a microorganism or a plant cell, plant tissues or a part of a plant.

[53974] In doing so, depending on the choice of promoter, the nucleic acid molecules shown in the respective line in Table I, application no. 9, column 5 or 8, preferably the coding region thereof, or homologs or fragments thereof, or the nucleic acid molecules encoding a polypeptide as depicted in the respective line in Table II, application no. 9, column 5 or 8, or homologs or fragments thereof, can be expressed in the whole plant or specifically e.g. in the leaves, in the seeds, the nodules, in roots, in the stem or other parts of the plant. Those transgenic plants overproducing sequences, e.g. as depicted in the respective line in Table I, application no. 9, column 5 or 8, preferably the coding region thereof, or homologs or fragments thereof, the plant cell, plant tissues, plants, the reproductive material thereof, or parts thereof are a further object of the present invention.

[53975] Within the framework of the present invention, the production of the linolenic acid is due to the generation or over-expression of one or more polypeptides as depicted in the respective line(s) in Table II, application no. 9, column 5 or 8, or homologs or fragments thereof, or encoded by the corresponding nucleic acid molecules as depicted in the respective line(s) in Table I, application no. 9, column 5 or 8, preferably the coding region thereof, or homologs or fragments thereof, in the non-human organism according to the invention, advantageously in the transgenic microorganism or plant according to the invention, at least for the duration of at least one plant generation.

[53976] A constitutive expression of the polypeptide as depicted in the respective line in Table II, application no. 9, column 5 or 8, or homologs or fragments thereof, or encoded by the respective nucleic acid molecule as depicted in the respective line in Table I, application no. 9, column 5 or 8, preferably the coding region thereof, or homologs or fragments thereof, may be advantageous. On the other hand, an inducible expression may also appear desirable. Expression of the polypeptide sequences of the invention can be either directed to the cytosol or to the organelles, such as plastids or mitochondria, preferably the plastids of the host cells, preferably the plant cells, or non-targeted.

[53977] for the disclosure of this paragraph see [0278.1.8.8] above.

[53978] In a further embodiment the invention relates to a transgenic non-human organisms such as transgenic microorganism or transgenic plant comprising a nucleic acid molecule comprising
[53979] [1) a nucleic acid molecule selected from the group consisting of
   [53980] (a) a nucleic acid molecule encoding a polypeptide shown in Table II, application no. 9, column 5 or 8, preferably shown in Table II A, application no. 9, column 5, or in Table II A, application no. 9, column 8, or in Table II B, application no. 9, column 8, or a homolog or a fragment thereof;
   [53981] (b) a nucleic acid molecule shown in Table I, application no. 9, column 5 or 8, preferably shown in Table I A, application no. 9, column 5, or in Table I A, application no. 9, column 8, or in Table I B, application no. 9, column 8, preferably the coding region thereof, or a homolog or a fragment thereof;
   [53982] (c) a nucleic acid molecule, which, as a result of the degeneracy of the genetic code, can be derived from a polypeptide sequence depicted in column 5 or 8 of Table II, application no. 9, preferably shown in Table II A, application no. 9, column 5, or in Table II A, application no. 9, column 8, or in Table II B, application no. 9, column 8;
   [53983] (d) a nucleic acid molecule having at least 30% identity, preferably at least 40%, 50%, 60%, 70%, 75%, 80%, 85%, 90%, 95%, 96%, 97%, 98%, 99%, 99.5%, with the nucleic acid molecule sequence of a polynucleotide comprising the nucleic acid molecule shown in column 5 or 8 of Table I, application no. 9, preferably shown in Table I A, application no. 9, column 5, or in Table I A, application no. 9, column 8, or in Table I B, application no. 9, column 8, preferably the coding region thereof;
   [53984] (e) a nucleic acid molecule encoding a polypeptide having at least 30% identity, preferably at least 40%, 50% 60%, 70%, 75%, 80%, 85%, 90%, 95%, 96%, 97%, 98%, 99%, 99.5%, identity with the amino acid sequence of the polypeptide encoded by the nucleic acid molecule of (a), (b), (c) or (d);
   [53985] (f) a nucleic acid molecule which hybridizes with a nucleic acid molecule of (a), (b), (c), (d) or (e) under stringent hybridization conditions;
   [53986] (g) a nucleic acid molecule encoding a polypeptide which can be isolated with the aid of monoclonal or polyclonal antibodies made against a polypeptide encoded by one of the nucleic acid molecules of (a), (b), (c), (d), (e) or (f);
   [53987] (h) a nucleic acid molecule encoding a polypeptide comprising the consensus sequence or one or more polypeptide motifs as shown in column 8 of Table IV, application no. 9;
   [53988] (i) a nucleic acid molecule encoding a polypeptide having the activity represented by a respective protein as depicted in column 5 of Table II, application no. 9;
   [53989] (j) a nucleic acid molecule comprising a polynucleotide which is obtained by amplifying a cDNA library or a genomic library using the primers in Table III, application no. 9, column 8;
   [53990] and
   [53991] (k) nucleic acid molecule which is obtainable by screening a suitable nucleic acid library, especially a cDNA library and/or a genomic library, under stringent hybridization conditions with a probe comprising one of the sequences of the nucleic acid molecule of (a), (b), (c), (d), (e), (f), (g), (h), (i) or (j) or with a fragment of at least 15 nt, preferably 20 nt, 30 nt, 50 nt, 100 nt, 200 nt,500 nt, 1000 nt, 1500 nt, 2000 nt or 3000 nt of the nucleic acid molecule characterized in (a), (b), (c), (d), (e), (f), (g), (h), (i) or (j);
   [53992] or a nucleic acid molecule comprising a sequence which is complementary thereto;
      and, if desired
[53993] 2) nucleic acid molecule encoding a transit peptide, preferably encoding a plastidal transit peptide or a mitochondrial transit peptide;
   which are operable linked;]
   or comprising an expression cassette comprising
[53994] [0) a promoter, preferably a promoter selected from the group consisting of Big35S, PCUbi, Super and USP; and
[53995] 1) a nucleic acid molecule selected from the group consisting of
   [53996] (a) a nucleic acid molecule encoding a polypeptide shown in Table II, application no. 9, column 5 or 8, preferably shown in Table II A, application no. 9, column 5, or in Table II A, application no. 9, column 8, or in Table II B, application no. 9, column 8, or a homolog or a fragment thereof;
   [53997] (b) a nucleic acid molecule shown in Table I, application no. 9, column 5 or 8, preferably shown in Table I A, application no. 9, column 5, or in Table I A, application no. 9, column 8, or in Table I B, application no. 9, column 8, preferably the coding region thereof, or a homolog or a fragment thereof;
   [53998] (c) a nucleic acid molecule, which, as a result of the degeneracy of the genetic code, can be derived from a polypeptide sequence depicted in column 5 or 8 of Table II, application no. 9, preferably shown in Table II A, application no. 9, column 5, or in Table II A, application no. 9, column 8, or in Table II B, application no. 9, column 8;
   [53999] (d) a nucleic acid molecule having at least 30% identity, preferably at least 40%, 50%, 60%, 70%, 75%, 80%, 85%, 90%, 95%, 96%, 97%, 98%, 99%, 99.5%, with the nucleic acid molecule sequence of a polynucleotide comprising the nucleic acid molecule shown in column 5 or 8 of Table I, application no. 9, preferably shown in Table I A, application no. 9, column 5, or in Table I A, application no. 9, column 8, or in Table I B, application no. 9, column 8, preferably the coding region thereof;
   [54000] (e) a nucleic acid molecule encoding a polypeptide having at least 30% identity, preferably at least 40%, 50% 60%, 70%, 75%, 80%, 85%, 90%, 95%, 96%, 97%, 98%, 99%, 99.5%, identity with the amino acid sequence of the polypeptide encoded by the nucleic acid molecule of (a), (b), (c) or (d);
   [54001] (f) a nucleic acid molecule which hybridizes with a nucleic acid molecule of (a), (b), (c), (d) or (e) under stringent hybridization conditions;
   [54002] (g) a nucleic acid molecule encoding a polypeptide which can be isolated with the aid of monoclonal or polyclonal antibodies made against a polypeptide encoded by one of the nucleic acid molecules of (a), (b), (c), (d), (e) or (f);
   [54003] (h) a nucleic acid molecule encoding a polypeptide comprising the consensus sequence or one or more polypeptide motifs as shown in column 8 of Table IV, application no. 9;
   [54004] (i) a nucleic acid molecule encoding a polypeptide having the activity represented by a respective protein as depicted in column 5 of Table II, application no. 9;
   [54005] (j) a nucleic acid molecule comprising a polynucleotide which is obtained by amplifying a cDNA library or a genomic library using the primers in Table III, application no. 9, column 8;
   [54006] and
   [54007] (k) nucleic acid molecule which is obtainable by screening a suitable nucleic acid library, especially a cDNA library and/or a genomic library, under stringent hybridization conditions with a probe comprising one of the sequences of the nucleic acid molecule of (a), (b), (c), (d), (e), (f), (g), (h), (i) or (j) or with a fragment of at least 15 nt, preferably 20 nt, 30 nt, 50 nt, 100 nt, 200 nt,500 nt, 1000 nt, 1500 nt, 2000 nt or 3000 nt of the nucleic acid molecule characterized in (a), (b), (c), (d), (e), (f), (g), (h), (i) or (j);
   [54008] or a nucleic acid molecule comprising a sequence which is complementary thereto;
      and, if desired
[54009] 2) nucleic acid molecule encoding a transit peptide, preferably encoding a plastidal transit peptide or a mitochondrial transit peptide; which are operable linked;]
   or comprising or being transformed by a vector comprising
[54010] [1) a nucleic acid molecule selected from the group consisting of
   [54011] (a) a nucleic acid molecule encoding a polypeptide shown in Table II, application no. 9, column 5 or 8, preferably shown in Table II A, application no. 9, column 5, or in Table II A, application no. 9, column 8, or in Table II B, application no. 9, column 8, or a homolog or a fragment thereof;
   [54012] (b) a nucleic acid molecule shown in Table I, application no. 9, column 5 or 8, preferably shown in Table I A, application no. 9, column 5, or in Table I A, application no. 9, column 8, or in Table I B, application no. 9, column 8, preferably the coding region thereof, or a homolog or a fragment thereof;
   [54013] (c) a nucleic acid molecule, which, as a result of the degeneracy of the genetic code, can be derived from a polypeptide sequence depicted in column 5 or 8 of Table II, application no. 9, preferably shown in Table II A, application no. 9, column 5, or in Table II A, application no. 9, column 8, or in Table II B, application no. 9, column 8;
   [54014] (d) a nucleic acid molecule having at least 30% identity, preferably at least 40%, 50%, 60%, 70%, 75%, 80%, 85%, 90%, 95%, 96%, 97%, 98%, 99%, 99.5%, with the nucleic acid molecule sequence of a polynucleotide comprising the nucleic acid molecule shown in column 5 or 8 of Table I, application no. 9, preferably shown in Table I A, application no. 9, column 5, or in Table I A, application no. 9, column 8, or in Table I B, application no. 9, column 8, preferably the coding region thereof;
   [54015] (e) a nucleic acid molecule encoding a polypeptide having at least 30% identity, preferably at least 40%, 50% 60%, 70%, 75%, 80%, 85%, 90%, 95%, 96%, 97%, 98%, 99%, 99.5%, identity with the amino acid sequence of the polypeptide encoded by the nucleic acid molecule of (a), (b), (c) or (d);
   [54016] (f) a nucleic acid molecule which hybridizes with a nucleic acid molecule of (a), (b), (c), (d) or (e) under stringent hybridization conditions;
   [54017] (g) a nucleic acid molecule encoding a polypeptide which can be isolated with the aid of monoclonal or polyclonal antibodies made against a polypeptide encoded by one of the nucleic acid molecules of (a), (b), (c), (d), (e) or (f);
   [54018] (h) a nucleic acid molecule encoding a polypeptide comprising the consensus sequence or one or more polypeptide motifs as shown in column 8 of Table IV, application no. 9;
   [54019] (i) a nucleic acid molecule encoding a polypeptide having the activity represented by a respective protein as depicted in column 5 of Table II, application no. 9;
   [54020] (j) a nucleic acid molecule comprising a polynucleotide which is obtained by amplifying a cDNA library or a genomic library using the primers in Table III, application no. 9, column 8;
   [54021] and
   [54022] (k) nucleic acid molecule which is obtainable by screening a suitable nucleic acid library, especially a cDNA library and/or a genomic library, under stringent hybridization conditions with a probe comprising one of the sequences of the nucleic acid molecule of (a), (b), (c), (d), (e), (f), (g), (h), (i) or (j) or with a fragment of at least 15 nt, preferably 20 nt, 30 nt, 50 nt, 100 nt, 200 nt,500 nt, 1000 nt, 1500 nt, 2000 nt or 3000 nt of the nucleic acid molecule characterized in (a), (b), (c), (d), (e), (f), (g), (h), (i) or (j);
   [54023] or a nucleic acid molecule comprising a sequence which is complementary thereto;]
      as well as respective transgenic cells, tissue, parts of such non-human organism, e.g. plant cells, plant tissue, part of plants, like leaves, roots, stems, blossoms, seeds, fruits, pollen and the like.
      (All the references to Tables I to IV are references to the corresponding lines of Tables I to IV.)

[54024] In a preferred embodiment of said transgenic non-human organism said nucleic acid molecule according to 1 (a), (b), (c), (d), (e), (f), (g), (h), (i), (j) or (k) encodes a polypeptide which has the activity of the respective polypeptide represented by a protein comprising a polypeptide as depicted in the respective line in column 5 of Table II, application no. 9.

[54025] In another preferred embodiment of said transgenic non-human organism said nucleic acid molecule according to 1 (a), (b), (c), (d), (e), (f), (g), (h), (i), (j) or (k) confers a generation or an increase of the respective fine chemical in a non-human organism or a part thereof as compared to a corresponding wild-type non-human organism or part thereof.

[54026] In another preferred embodiment of said transgenic non-human organism said nucleic acid molecule according to 1 (a), (b), (c), (d), (e), (f), (g), (h), (i), (j) or (k) encodes a polypeptide which has the activity of the respective polypeptide represented by a protein as depicted in the respective line in column 5 of Table II application no. 9 and confers a generation or an increase of the respective fine chemical in a non-human organism or a part thereof as compared to a corresponding wild-type non-human organism or part thereof.

[54027] In another embodiment of said transgenic non-human organism the expression cassette comprises 2) a nucleic acid molecule encoding a transit peptide, preferably encoding a plastidal transit peptide, especially in case in column 6 of Table I, application no. 9, in the same line as of the respective nucleic acid molecule according to 1) “plastidic” is depicted, or encoding a mitochondrial transit peptide, especially in case in column 6 of Table I, application no. 9, in the same line as of the respective nucleic acid molecule according to 1) “mitochondrial” is depicted.

[54028] In another embodiment of said transgenic non-human organism the expression cassette does not comprise 2) a nucleic acid molecule encoding a transit peptide, especially in case in column 6 of Table I, application no. 9, in the same line as of the respective nucleic acid molecule according to 1) “non-targeted” is depicted.

[54029] In another embodiment of said transgenic non-human organism said vector comprises beneath said nucleic acid molecule according to 1 (a), (b), (c), (d), (e), (f), (g), (h), (i), (j) or (k), a promoter, preferably a promoter selected from the group consisting of Big35S, PCUbi, Super and USP, which are operable linked.

[54030] In a preferred embodiment of said transgenic non-human organism said vector comprises beneath said nucleic acid molecule according to 1 (a), (b), (c), (d), (e), (f), (g), (h), (i), (j) or (k), a promoter, preferably a promoter selected from the group consisting of Big35S, PCUbi, Super and USP, which are operable linked; and said nucleic acid molecule according to 1 (a), (b), (c), (d), (e), (f), (g), (h), (i), (j) or (k) encodes a polypeptide which has the activity of the respective polypeptide represented by a protein comprising a polypeptide as depicted in the respective line in column 5 of Table II, application no. 9.

[54031] In another preferred embodiment of said transgenic non-human organism said vector comprises beneath said nucleic acid molecule according to 1 (a), (b), (c), (d), (e), (f), (g), (h), (i), (j) or (k), a promoter, preferably a promoter selected from the group consisting of Big35S, PCUbi, Super and USP, which are operable linked; and said nucleic acid molecule according to 1 (a), (b), (c), (d), (e), (f), (g), (h), (i), (j) or (k) confers a generation or an increase of the respective fine chemical in a non-human organism or a part thereof as compared to a corresponding wild-type non-human organism or part thereof.

[54032] In another preferred embodiment of said transgenic non-human organism said vector comprises beneath said nucleic acid molecule according to 1 (a), (b), (c), (d), (e), (f), (g), (h), (i), (j) or (k), a promoter, preferably a promoter selected from the group consisting of Big35S, PCUbi, Super and USP, which are operable linked; and said nucleic acid molecule according to 1 (a), (b), (c), (d), (e), (f), (g), (h), (i), (j) or (k) encodes a polypeptide which has the activity of the respective polypeptide represented by a protein as depicted in the respective line in column 5 of Table II, application no. 9, and confers a generation or an increase of the respective fine chemical in a non-human organism or a part thereof as compared to a corresponding wild-type non-human organism or part thereof.

[54033] In another embodiment of said transgenic non-human organism said vector comprises beneath said nucleic acid molecule according to 1 (a), (b), (c), (d), (e), (f), (g), (h), (i), (j) or (k), a nucleic acid molecule encoding a transit peptide, preferably encoding a plastidal transit peptide, especially in case in column 6 of Table I, application no. 9, in the same line as of the respective nucleic acid molecule according to 1) “plastidic” is depicted, or encoding a mitochondrial transit peptide, especially in case in column 6 of Table I, application no. 9, in the same line as of the respective nucleic acid molecule according to 1) “mitochondrial” is depicted, which are operable linked.

[54034] In another embodiment of said transgenic non-human organism said vector does not comprise beneath said nucleic acid molecule according to 1 (a), (b), (c), (d), (e), (f), (g), (h), (i), (j) or (k), a nucleic acid molecule encoding a transit peptide in case in column 6 of Table I, application no. 9, in the same line as of the respective nucleic acid molecule according to 1) “non-targeted” is depicted, which are operable linked.

[54035] In another embodiment of said transgenic non-human organism said vector comprises beneath said nucleic acid molecule according to 1 (a), (b), (c), (d), (e), (f), (g), (h), (i), (j) or (k), and a promoter, preferably a promoter selected from the group consisting of Big35S, PCUbi, Super and USP; a nucleic acid molecule encoding a transit peptide, preferably encoding a plastidal transit peptide, especially in case in column 6 of Table I, application no. 9, in the same line as of the respective nucleic acid molecule according to 1) “plastidic” is depicted, or encoding a mitochondrial transit peptide, especially in case in column 6 of Table I, application no. 9, in the same line as of the respective nucleic acid molecule according to 1) “mitochondrial” is depicted, which are operable linked.

[54036] In another embodiment of said transgenic non-human organism said vector does not comprise beneath said nucleic acid molecule according to 1 (a), (b), (c), (d), (e), (f), (g), (h), (i), (j) or (k), and a promoter, preferably a promoter selected from the group consisting of Big35S, PCUbi, Super and USP; a nucleic acid molecule encoding a transit peptide, especially in case in column 6 of Table I, application no. 9, in the same line as of the respective nucleic acid molecule according to 1) “non-targeted” is depicted, which are operable linked.

[54037] In another embodiment of said transgenic non-human organism said vector comprises beneath said nucleic acid molecule according to 1 (a), (b), (c), (d), (e), (f), (g), (h), (i), (j) or (k), and a promoter, preferably a promoter selected from the group consisting of Big35S, PCUbi, Super and USP; a nucleic acid molecule encoding a transit peptide, preferably encoding a plastidal transit peptide, especially in case in column 6 of Table I, application no. 9, in the same line as of the respective nucleic acid molecule according to 1) “plastidic” is depicted, or encoding a mitochondrial transit peptide, especially in case in column 6 of Table I, application no. 9, in the same line as of the respective nucleic acid molecule according to 1) “mitochondrial” is depicted, which are operable linked; and wherein said nucleic acid molecule according to 1 (a), (b), (c), (d), (e), (f), (g), (h), (i), (j) or (k) encodes a polypeptide which has the activity of the respective polypeptide represented by a protein comprising a polypeptide as depicted in the respective line in column 5 of Table II, application no. 9.

[54038] In another embodiment of said transgenic non-human organism said vector does not comprise beneath said nucleic acid molecule according to 1 (a), (b), (c), (d), (e), (f), (g), (h), (i), (j) or (k), and a promoter, preferably a promoter selected from the group consisting of Big35S, PCUbi, Super and USP; a nucleic acid molecule encoding a transit peptide, especially in case in column 6 of Table I, application no. 9, in the same line as of the respective nucleic acid molecule according to 1) “non-targeted” is depicted, which are operable linked; and wherein said nucleic acid molecule according to 1 (a), (b), (c), (d), (e), (f), (g), (h), (i), (j) or (k) encodes a polypeptide which has the activity of the respective polypeptide represented by a protein comprising a polypeptide as depicted in the respective line in column 5 of Table II, application no. 9.

[54039] In another embodiment of said transgenic non-human organism said vector comprises beneath said nucleic acid molecule according to 1 (a), (b), (c), (d), (e), (f), (g), (h), (i), (j) or (k), and a promoter, preferably a promoter selected from the group consisting of Big35S, PCUbi, Super and USP; a nucleic acid molecule encoding a transit peptide, preferably encoding a plastidal transit peptide, especially in case in column 6 of Table I, application no. 9, in the same line as of the respective nucleic acid molecule according to 1) “plastidic” is depicted, or encoding a mitochondrial transit peptide, especially in case in column 6 of Table I, application no. 9, in the same line as of the respective nucleic acid molecule according to 1) “mitochondrial” is depicted, which are operable linked; and wherein said nucleic acid molecule according to 1 (a), (b), (c), (d), (e), (f), (g), (h), (i), (j) or (k) confers a generation or an increase of the respective fine chemical in a non-human organism or a part thereof as compared to a corresponding wild-type non-human organism or part thereof.

[54040] In another embodiment of said transgenic non-human organism said vector does not comprise beneath said nucleic acid molecule according to 1 (a), (b), (c), (d), (e), (f), (g), (h), (i), (j) or (k), and a promoter, preferably a promoter selected from the group consisting of Big35S, PCUbi, Super and USP; a nucleic acid molecule encoding a transit peptide, especially in case in column 6 of Table I, application no. 9, in the same line as of the respective nucleic acid molecule according to 1) “non-targeted” is depicted, which are operable linked; and wherein said nucleic acid molecule according to 1 (a), (b), (c), (d), (e), (f), (g), (h), (i), (j) or (k) confers a generation or an increase of the respective fine chemical in a non-human organism or a part thereof as compared to a corresponding wild-type non-human organism or part thereof.

[54041] In another embodiment of said transgenic non-human organism said vector comprises beneath said nucleic acid molecule according to 1 (a), (b), (c), (d), (e), (f), (g), (h), (i), (j) or (k), and a promoter, preferably a promoter selected from the group consisting of Big35S, PCUbi, Super and USP; a nucleic acid molecule encoding a transit peptide, preferably encoding a plastidal transit peptide, especially in case in column 6 of Table I, application no. 9, in the same line as of the respective nucleic acid molecule according to 1) “plastidic” is depicted, or encoding a mitochondrial transit peptide, especially in case in column 6 of Table I, application no. 9, in the same line as of the respective nucleic acid molecule according to 1) “mitochondrial” is depicted, which are operable linked; and wherein said nucleic acid molecule according to 1 (a), (b), (c), (d), (e), (f), (g), (h), (i), (j) or (k) encodes a polypeptide which has the activity of the respective polypeptide represented by a protein as depicted in the respective line in column 5 of Table II application no. 9 and confers a generation or an increase of the respective fine chemical in a non-human organism or a part thereof as compared to a corresponding wild-type non-human organism or part thereof.

[54042] In another embodiment of said transgenic non-human organism said vector does not comprise beneath said nucleic acid molecule according to 1 (a), (b), (c), (d), (e), (f), (g), (h), (i), (j) or (k), and a promoter, preferably a promoter selected from the group consisting of Big35S, PCUbi, Super and USP; a nucleic acid molecule encoding a transit peptide, especially in case in column 6 of Table I, application no. 9, in the same line as of the respective nucleic acid molecule according to 1) “non-targeted” is depicted, which are operable linked; and wherein said nucleic acid molecule according to 1 (a), (b), (c), (d), (e), (f), (g), (h), (i), (j) or (k) encodes a polypeptide which has the activity of the respective polypeptide represented by a protein as depicted in the respective line in column 5 of Table II application no. 9 (in the same line) and confers a generation or an increase of the respective fine chemical in a non-human organism or a part thereof as compared to a corresponding wild-type non-human organism or part thereof.

[54043] In a preferred embodiment of said transgenic non-human organism said nucleic acid molecule according to 1 (a), (b), (c), (d), (e), (f), (g), (h), (i), (j) or (k), said promoter and optionally said nucleic acid molecule encoding a transit peptide are encompassed in an expression cassette in said vector. Accordingly an embodiment the invention provides a non-human organism comprising or being transformed by a vector comprising an expression cassette comprising said nucleic acid molecule according to 1 (a), (b), (c), (d), (e), (f), (g), (h), (i), (j) or (k), said promoter and optionally said a nucleic acid molecule encoding a transit peptide, operable linked. Said expression cassette may encompass a terminator, too.

[54044] In a further embodiment the invention relates to a transgenic non-human organisms such as transgenic microorganism or transgenic plant comprising a nucleic acid molecule comprising
[54045] [1) a nucleic acid molecule selected from the group consisting of
   [54046] (a) a nucleic acid molecule encoding a polypeptide shown in Table II, application no. 9, column 5 or 8, preferably shown in Table II A, application no. 9, column 5, or in Table II A, application no. 9, column 8, or in Table II B, application no. 9, column 8, or a homolog or a fragment thereof;
   [54047] (b) a nucleic acid molecule shown in Table I, application no. 9, column 5 or 8, preferably shown in Table I A, application no. 9, column 5, or in Table I A, application no. 9, column 8, or in Table I B, application no. 9, column 8, preferably the coding region thereof, or a homolog or a fragment thereof;
   [54048] (c) a nucleic acid molecule, which, as a result of the degeneracy of the genetic code, can be derived from a polypeptide sequence depicted in column 5 or 8 of Table II, application no. 9, preferably shown in Table II A, application no. 9, column 5, or in Table II A, application no. 9, column 8, or in Table II B, application no. 9, column 8;
   [54049] (d) a nucleic acid molecule having at least 30% identity, preferably at least 40%, 50%, 60%, 70%, 75%, 80%, 85%, 90%, 95%, 96%, 97%, 98%, 99%, 99.5%, with the nucleic acid molecule sequence of a polynucleotide comprising the nucleic acid molecule shown in column 5 or 8 of Table I, application no. 9, preferably shown in Table I A, application no. 9, column 5, or in Table I A, application no. 9, column 8, or in Table I B, application no. 9, column 8, preferably the coding region thereof;
   [54050] (e) a nucleic acid molecule encoding a polypeptide having at least 30% identity, preferably at least 40%, 50% 60%, 70%, 75%, 80%, 85%, 90%, 95%, 96%, 97%, 98%, 99%, 99.5%, identity with the amino acid sequence of the polypeptide encoded by the nucleic acid molecule of (a), (b), (c) or (d);
   [54051] (f) a nucleic acid molecule which hybridizes with a nucleic acid molecule of (a), (b), (c), (d) or (e) under stringent hybridization conditions;
   [54052] (g) a nucleic acid molecule encoding a polypeptide which can be isolated with the aid of monoclonal or polyclonal antibodies made against a polypeptide encoded by one of the nucleic acid molecules of (a), (b), (c), (d), (e) or (f);
   [54053] (h) a nucleic acid molecule encoding a polypeptide comprising the consensus sequence or one or more polypeptide motifs as shown in column 8 of Table IV, application no. 9;
   [54054] (i) a nucleic acid molecule encoding a polypeptide having the activity represented by a respective protein as depicted in column 5 of Table II, application no. 9;
   [54055] (j) a nucleic acid molecule comprising a polynucleotide which is obtained by amplifying a cDNA library or a genomic library using the primers in Table III, application no. 9, column 8;
   [54056] and
   [54057] (k) nucleic acid molecule which is obtainable by screening a suitable nucleic acid library, especially a cDNA library and/or a genomic library, under stringent hybridization conditions with a probe comprising one of the sequences of the nucleic acid molecule of (a), (b), (c), (d), (e), (f), (g), (h), (i) or (j) or with a fragment of at least 15 nt, preferably 20 nt, 30 nt, 50 nt, 100 nt, 200 nt,500 nt, 1000 nt, 1500 nt, 2000 nt or 3000 nt of the nucleic acid molecule characterized in (a), (b), (c), (d), (e), (f), (g), (h), (i) or (j);
   [54058] or a nucleic acid molecule comprising a sequence which is complementary thereto;
      and, if desired
[54059] 2) nucleic acid molecule encoding a transit peptide, preferably encoding a plastidal transit peptide or a mitochondrial transit peptide;
   which are operable linked;]
   or comprising an expression cassette comprising
[54060] [0) a promoter, preferably a promoter selected from the group consisting of Big35S, PCUbi, Super and USP; and
[54061] 1) a nucleic acid molecule selected from the group consisting of
   [54062] (a) a nucleic acid molecule encoding a polypeptide shown in Table II, application no. 9, column 5 or 8, preferably shown in Table II A, application no. 9, column 5, or in Table II A, application no. 9, column 8, or in Table II B, application no. 9, column 8, or a homolog or a fragment thereof;
   [54063] (b) a nucleic acid molecule shown in Table I, application no. 9, column 5 or 8, preferably shown in Table I A, application no. 9, column 5, or in Table I A, application no. 9, column 8, or in Table I B, application no. 9, column 8, preferably the coding region thereof, or a homolog or a fragment thereof;
   [54064] (c) a nucleic acid molecule, which, as a result of the degeneracy of the genetic code, can be derived from a polypeptide sequence depicted in column 5 or 8 of Table II, application no. 9, preferably shown in Table II A, application no. 9, column 5, or in Table II A, application no. 9, column 8, or in Table II B, application no. 9, column 8;
   [54065] (d) a nucleic acid molecule having at least 30% identity, preferably at least 40%, 50%, 60%, 70%, 75%, 80%, 85%, 90%, 95%, 96%, 97%, 98%, 99%, 99.5%, with the nucleic acid molecule sequence of a polynucleotide comprising the nucleic acid molecule shown in column 5 or 8 of Table I, application no. 9, preferably shown in Table I A, application no. 9, column 5, or in Table I A, application no. 9, column 8, or in Table I B, application no. 9, column 8, preferably the coding region thereof;
   [54066] (e) a nucleic acid molecule encoding a polypeptide having at least 30% identity, preferably at least 40%, 50% 60%, 70%, 75%, 80%, 85%, 90%, 95%, 96%, 97%, 98%, 99%, 99.5%, identity with the amino acid sequence of the polypeptide encoded by the nucleic acid molecule of (a), (b), (c) or (d);
   [54067] (f) a nucleic acid molecule which hybridizes with a nucleic acid molecule of (a), (b), (c), (d) or (e) under stringent hybridization conditions;
   [54068] (g) a nucleic acid molecule encoding a polypeptide which can be isolated with the aid of monoclonal or polyclonal antibodies made against a polypeptide encoded by one of the nucleic acid molecules of (a), (b), (c), (d), (e) or (f);
   [54069] (h) a nucleic acid molecule encoding a polypeptide comprising the consensus sequence or one or more polypeptide motifs as shown in column 8 of Table IV, application no. 9;
   [54070] (i) a nucleic acid molecule encoding a polypeptide having the activity represented by a respective protein as depicted in column 5 of Table II, application no. 9;
   [54071] (j) a nucleic acid molecule comprising a polynucleotide which is obtained by amplifying a cDNA library or a genomic library using the primers in Table III, application no. 9, column 8;
   [54072] and
   [54073] (k) nucleic acid molecule which is obtainable by screening a suitable nucleic acid library, especially a cDNA library and/or a genomic library, under stringent hybridization conditions with a probe comprising one of the sequences of the nucleic acid molecule of (a), (b), (c), (d), (e), (f), (g), (h), (i) or (j) or with a fragment of at least 15 nt, preferably 20 nt, 30 nt, 50 nt, 100 nt, 200 nt,500 nt, 1000 nt, 1500 nt, 2000 nt or 3000 nt of the nucleic acid molecule characterized in (a), (b), (c), (d), (e), (f), (g), (h), (i) or (j);
   [54074] or a nucleic acid molecule comprising a sequence which is complementary thereto;]
      and, if desired
[54075] 2) nucleic acid molecule encoding a transit peptide, preferably encoding a plastidal transit peptide or a mitochondrial transit peptide;
   which are operable linked;]
   or comprising or being transformed by a vector comprising
[54076] [1) a nucleic acid molecule selected from the group consisting of
   [54077] (a) a nucleic acid molecule encoding a polypeptide shown in Table II, application no. 9, column 5 or 8, preferably shown in Table II A, application no. 9, column 5, or in Table II A, application no. 9, column 8, or in Table II B, application no. 9, column 8, or a homolog or a fragment thereof;
   [54078] (b) a nucleic acid molecule shown in Table I, application no. 9, column 5 or 8, preferably shown in Table I A, application no. 9, column 5, or in Table I A, application no. 9, column 8, or in Table I B, application no. 9, column 8, preferably the coding region thereof, or a homolog or a fragment thereof;
   [54079] (c) a nucleic acid molecule, which, as a result of the degeneracy of the genetic code, can be derived from a polypeptide sequence depicted in column 5 or 8 of Table II, application no. 9, preferably shown in Table II A, application no. 9, column 5, or in Table II A, application no. 9, column 8, or in Table II B, application no. 9, column 8;
   [54080] (d) a nucleic acid molecule having at least 30% identity, preferably at least 40%, 50%, 60%, 70%, 75%, 80%, 85%, 90%, 95%, 96%, 97%, 98%, 99%, 99.5%, with the nucleic acid molecule sequence of a polynucleotide comprising the nucleic acid molecule shown in column 5 or 8 of Table I, application no. 9, preferably shown in Table I A, application no. 9, column 5, or in Table I A, application no. 9, column 8, or in Table I B, application no. 9, column 8, preferably the coding region thereof;
   [54081] (e) a nucleic acid molecule encoding a polypeptide having at least 30% identity, preferably at least 40%, 50% 60%, 70%, 75%, 80%, 85%, 90%, 95%, 96%, 97%, 98%, 99%, 99.5%, identity with the amino acid sequence of the polypeptide encoded by the nucleic acid molecule of (a), (b), (c) or (d);
   [54082] (f) a nucleic acid molecule which hybridizes with a nucleic acid molecule of (a), (b), (c), (d) or (e) under stringent hybridization conditions;
   [54083] (g) a nucleic acid molecule encoding a polypeptide which can be isolated with the aid of monoclonal or polyclonal antibodies made against a polypeptide encoded by one of the nucleic acid molecules of (a), (b), (c), (d), (e) or (f);
   [54084] (h) a nucleic acid molecule encoding a polypeptide comprising the consensus sequence or one or more polypeptide motifs as shown in column 8 of Table IV, application no. 9;
   [54085] (i) a nucleic acid molecule encoding a polypeptide having the activity represented by a respective protein as depicted in column 5 of Table II, application no. 9;
   [54086] (j) a nucleic acid molecule comprising a polynucleotide which is obtained by amplifying a cDNA library or a genomic library using the primers in Table III, application no. 9, column 8;
   [54087] and
   [54088] (k) nucleic acid molecule which is obtainable by screening a suitable nucleic acid library, especially a cDNA library and/or a genomic library, under stringent hybridization conditions with a probe comprising one of the sequences of the nucleic acid molecule of (a), (b), (c), (d), (e), (f), (g), (h), (i) or (j) or with a fragment of at least 15 nt, preferably 20 nt, 30 nt, 50 nt, 100 nt, 200 nt,500 nt, 1000 nt, 1500 nt, 2000 nt or 3000 nt of the nucleic acid molecule characterized in (a), (b), (c), (d), (e), (f), (g), (h), (i) or (j);
   [54089] or a nucleic acid molecule comprising a sequence which is complementary thereto;]
      whereby, preferably, the nucleic acid molecule according to 1 (a), (b), (c), (d), (e), (f), (g), (h), (i), (j) or (k) distinguishes over the sequence depicted in Table I A and/or I B, application no. 9, column 5 or 8, or the coding regions thereof, by one or more nucleotides (especially but not exceeding 5%, preferably 4%, 3%, 2%, 1%, 0.5%, 0.2% or 0.1%). In an embodiment, the nucleic acid molecule of the invention does not consist of the sequence shown in Table I A and/or

[54090] I B, application no. 9, column 5 or 8, or the coding region thereof. In another embodiment, the nucleic acid molecule of the present invention, preferably the coding region thereof, is at least 30%, 40%, 50%, 60%, 70%, 80%, 90%, 95% identical but less than 100%, 99.999%, 99.99%, 99.9%, 99%, 98%, 97%, 96% or 95% identical to the sequence shown in Table I A and/or I B, application no. 9, column 5 or 8, or the coding region thereof, respectively. In a further embodiment the nucleic acid molecule does not encode the polypeptide sequence shown in Table II A and/or II B, application no. 9, column 5 or 8 but homologs thereof. Accordingly, in one embodiment, the nucleic acid molecule of the present invention encodes in one embodiment a polypeptide which differs at least in one or more amino acids (especially but not exceeding 5%, preferably 4%, 3%, 2%, 1%, 0.5%, 0.2% or 0.1%) from the polypeptide shown in Table II, application no. 9, column 5 or 8 and does not encode a protein of the sequence shown in Table II A and/or II B, application no. 9, column 5 or 8. Accordingly, in one embodiment, the protein encoded by a sequence of a nucleic acid according to 1 (a), (b), (c), (d), (e), (f), (g), (h), (i), (j) or (k) does not consist of the sequence shown in Table I A and/or I B, application no. 9, column 5 or 8, or the coding region thereof. In a further embodiment, the protein of the present invention is at least 30%, 40%, 50%, 60%, 70%, 80%, 90%, 95% identical to protein sequence depicted in Table II A and/or II B, application no. 9, column 5 or 8 but less than 100%, preferably less than 99.999%, 99.99%, 99.9%, 99%, 98%, 97%, 96% or 95% identical to the sequence shown in Table II A and/or II B, application no. 9, column 5 or 8;

as well as respective transgenic cells, tissue, parts of such non-human organism, e.g. plant cells, plant tissue, part of plants, like leaves, roots, stems, blossoms, seeds, fruits, pollen and the like.
(All the references to Tables I to IV are references to the corresponding lines of Tables I to IV.)

[54091] In a preferred embodiment of said transgenic non-human organism said nucleic acid molecule according to 1 (a), (b), (c), (d), (e), (f), (g), (h), (i), (j) or (k) encodes a polypeptide which has the activity of the respective polypeptide represented by a protein comprising a polypeptide as depicted in the respective line in column 5 of Table II, application no. 9.

[54092] In another preferred embodiment of said transgenic non-human organism said nucleic acid molecule according to 1 (a), (b), (c), (d), (e), (f), (g), (h), (i), (j) or (k) confers a generation or an increase of the respective fine chemical in a non-human organism or a part thereof as compared to a corresponding wild-type non-human organism or part thereof.

[54093] In another preferred embodiment of said transgenic non-human organism said nucleic acid molecule according to 1 (a), (b), (c), (d), (e), (f), (g), (h), (i), (j) or (k) encodes a polypeptide which has the activity of the respective polypeptide represented by a protein as depicted in the respective line in column 5 of Table II application no. 9 and confers a generation or an increase of the respective fine chemical in a non-human organism or a part thereof as compared to a corresponding wild-type non-human organism or part thereof.

[54094] In another embodiment of said transgenic non-human organism the expression cassette comprises 2) a nucleic acid molecule encoding a transit peptide, preferably encoding a plastidal transit peptide, especially in case in column 6 of Table I, application no. 9, in the same line as of the respective nucleic acid molecule according to 1) “plastidic” is depicted, or encoding a mitochondrial transit peptide, especially in case in column 6 of Table I, application no. 9, in the same line as of the respective nucleic acid molecule according to 1) “mitochondrial” is depicted.

[54095] In another embodiment thereof the expression cassette does not comprise 2) a nucleic acid molecule encoding a transit peptide, especially in case in column 6 of Table I, application no. 9, in the same line as of the respective nucleic acid molecule according to 1) “non-targeted” is depicted.

[54096] In another embodiment of said transgenic non-human organism said vector comprises beneath said nucleic acid molecule according to 1 (a), (b), (c), (d), (e), (f), (g), (h), (i), (j) or (k), a promoter, preferably a promoter selected from the group consisting of Big35S, PCUbi, Super and USP, which are operable linked.

[54097] In a preferred embodiment of said transgenic non-human organism said vector comprises beneath said nucleic acid molecule according to 1 (a), (b), (c), (d), (e), (f), (g), (h), (i), (j) or (k), a promoter, preferably a promoter selected from the group consisting of Big35S, PCUbi, Super and USP, which are operable linked; and said nucleic acid molecule according to 1 (a), (b), (c), (d), (e), (f), (g), (h), (i), (j) or (k) encodes a polypeptide which has the activity of the respective polypeptide represented by a protein comprising a polypeptide as depicted in the respective line in column 5 of Table II, application no. 9.

[54098] In another preferred embodiment of said transgenic non-human organism said vector comprises beneath said nucleic acid molecule according to 1 (a), (b), (c), (d), (e), (f), (g), (h), (i), (j) or (k), a promoter, preferably a promoter selected from the group consisting of Big35S, PCUbi, Super and USP, which are operable linked; and said nucleic acid molecule according to 1 (a), (b), (c), (d), (e), (f), (g), (h), (i), (j) or (k) confers a generation or an increase of the respective fine chemical in a non-human organism or a part thereof as compared to a corresponding wild-type non-human organism or part thereof.

[54099] In another preferred embodiment of said transgenic non-human organism said vector comprises beneath said nucleic acid molecule according to 1 (a), (b), (c), (d), (e), (f), (g), (h), (i), (j) or (k), a promoter, preferably a promoter selected from the group consisting of Big35S, PCUbi, Super and USP, which are operable linked; and said nucleic acid molecule according to 1 (a), (b), (c), (d), (e), (f), (g), (h), (i), (j) or (k) encodes a polypeptide which has the activity of the respective polypeptide represented by a protein as depicted in the same line in column 5 of Table II, application no. 9, and confers a generation or an increase of the respective fine chemical in a non-human organism or a part thereof as compared to a corresponding wild-type non-human organism or part thereof.

[54100] In another embodiment of said transgenic non-human organism said vector comprises beneath said nucleic acid molecule according to 1 (a), (b), (c), (d), (e), (f), (g), (h), (i), (j) or (k), a nucleic acid molecule encoding a transit peptide, preferably encoding a plastidal transit peptide, especially in case in column 6 of Table I, application no. 9, in the same line as of the respective nucleic acid molecule according to 1) “plastidic” is depicted, or encoding a mitochondrial transit peptide, especially in case in column 6 of Table I, application no. 9, in the same line as of the respective nucleic acid molecule according to 1) “mitochondrial” is depicted, which are operable linked.

[54101] In another embodiment of said transgenic non-human organism said vector does not comprise beneath said nucleic acid molecule according to 1 (a), (b), (c), (d), (e), (f), (g), (h), (i), (j) or (k), a nucleic acid molecule encoding a transit peptide in case in column 6 of Table I, application no. 9, in the same line as of the respective nucleic acid molecule according to 1) “non-targeted” is depicted, which are operable linked.

[54102] In another embodiment of said transgenic non-human organism said vector comprises beneath said nucleic acid molecule according to 1 (a), (b), (c), (d), (e), (f), (g), (h), (i), (j) or (k), and a promoter, preferably a promoter selected from the group consisting of Big35S, PCUbi, Super and USP; a nucleic acid molecule encoding a transit peptide, preferably encoding a plastidal transit peptide, especially in case in column 6 of Table I, application no. 9, in the same line as of the respective nucleic acid molecule according to 1) “plastidic” is depicted, or encoding a mitochondrial transit peptide, especially in case in column 6 of Table I, application no. 9, in the same line as of the respective nucleic acid molecule according to 1) “mitochondrial” is depicted, which are operable linked.

[54103] In another embodiment of said transgenic non-human organism said vector does not comprise beneath said nucleic acid molecule according to 1 (a), (b), (c), (d), (e), (f), (g), (h), (i), (j) or (k), and a promoter, preferably a promoter selected from the group consisting of Big35S, PCUbi, Super and USP; a nucleic acid molecule encoding a transit peptide, especially in case in column 6 of Table I, application no. 9, in the same line as of the respective nucleic acid molecule according to 1) “non-targeted” is depicted, which are operable linked.

[54104] In another embodiment of said transgenic non-human organism said vector comprises beneath said nucleic acid molecule according to 1 (a), (b), (c), (d), (e), (f), (g), (h), (i), (j) or (k), and a promoter, preferably a promoter selected from the group consisting of Big35S, PCUbi, Super and USP; a nucleic acid molecule encoding a transit peptide, preferably encoding a plastidal transit peptide, especially in case in column 6 of Table I, application no. 9, in the same line as of the respective nucleic acid molecule according to 1) “plastidic” is depicted, or encoding a mitochondrial transit peptide, especially in case in column 6 of Table I, application no. 9, in the same line as of the respective nucleic acid molecule according to 1) “mitochondrial” is depicted, which are operable linked; and wherein said nucleic acid molecule according to 1 (a), (b), (c), (d), (e), (f), (g), (h), (i), (j) or (k) encodes a polypeptide which has the activity of the respective polypeptide represented by a protein comprising a polypeptide as depicted in the respective line in column 5 of Table II, application no. 9.

[54105] In another embodiment of said transgenic non-human organism said vector does not comprise beneath said nucleic acid molecule according to 1 (a), (b), (c), (d), (e), (f), (g), (h), (i), (j) or (k), and a promoter, preferably a promoter selected from the group consisting of Big35S, PCUbi, Super and USP; a nucleic acid molecule encoding a transit peptide, especially in case in column 6 of Table I, application no. 9, in the same line as of the respective nucleic acid molecule according to 1) “non-targeted” is depicted, which are operable linked; and wherein said nucleic acid molecule according to 1 (a), (b), (c), (d), (e), (f), (g), (h), (i), (j) or (k) encodes a polypeptide which has the activity of the respective polypeptide represented by a protein comprising a polypeptide as depicted in the respective line in column 5 of Table II, application no. 9.

[54106] In another embodiment of said transgenic non-human organism said vector comprises beneath said nucleic acid molecule according to 1 (a), (b), (c), (d), (e), (f), (g), (h), (i), (j) or (k), and a promoter, preferably a promoter selected from the group consisting of Big35S, PCUbi, Super and USP; a nucleic acid molecule encoding a transit peptide, preferably encoding a plastidal transit peptide, especially in case in column 6 of Table I, application no. 9, in the same line as of the respective nucleic acid molecule according to 1) “plastidic” is depicted, or encoding a mitochondrial transit peptide, especially in case in column 6 of Table I, application no. 9, in the same line as of the respective nucleic acid molecule according to 1) “mitochondrial” is depicted, which are operable linked; and wherein said nucleic acid molecule according to 1 (a), (b), (c), (d), (e), (f), (g), (h), (i), (j) or (k) confers a generation or an increase of the respective fine chemical in a non-human organism or a part thereof as compared to a corresponding wild-type non-human organism or part thereof.

[54107] In another embodiment of said transgenic non-human organism said vector does not comprise beneath said nucleic acid molecule according to 1 (a), (b), (c), (d), (e), (f), (g), (h), (i), (j) or (k), and a promoter, preferably a promoter selected from the group consisting of Big35S, PCUbi, Super and USP; a nucleic acid molecule encoding a transit peptide, especially in case in column 6 of Table I, application no. 9, in the same line as of the respective nucleic acid molecule according to 1) “non-targeted” is depicted, which are operable linked; and wherein said nucleic acid molecule according to 1 (a), (b), (c), (d), (e), (f), (g), (h), (i), (j) or (k) confers a generation or an increase of the respective fine chemical in a non-human organism or a part thereof as compared to a corresponding wild-type non-human organism or part thereof.

[54108] In another embodiment of said transgenic non-human organism said vector comprises beneath said nucleic acid molecule according to 1 (a), (b), (c), (d), (e), (f), (g), (h), (i), (j) or (k), and a promoter, preferably a promoter selected from the group consisting of Big35S, PCUbi, Super and USP; a nucleic acid molecule encoding a transit peptide, preferably encoding a plastidal transit peptide, especially in case in column 6 of Table I, application no. 9, in the same line as of the respective nucleic acid molecule according to 1) “plastidic” is depicted, or encoding a mitochondrial transit peptide, especially in case in column 6 of Table I, application no. 9, in the same line as of the respective nucleic acid molecule according to 1) “mitochondrial” is depicted, which are operable linked; and wherein said nucleic acid molecule according to 1 (a), (b), (c), (d), (e), (f), (g), (h), (i), (j) or (k) encodes a polypeptide which has the activity of the respective polypeptide represented by a protein as depicted in the respective line in column 5 of Table II application no. 9 and confers a generation or an increase of the respective fine chemical in a non-human organism or a part thereof as compared to a corresponding wild-type non-human organism or part thereof.

[54109] In another embodiment of said transgenic non-human organism said vector does not comprise beneath said nucleic acid molecule according to 1 (a), (b), (c), (d), (e), (f), (g), (h), (i), (j) or (k), and a promoter, preferably a promoter selected from the group consisting of Big35S, PCUbi, Super and USP; a nucleic acid molecule encoding a transit peptide, especially in case in column 6 of Table I, application no. 9, in the same line as of the respective nucleic acid molecule according to 1) “non-targeted” is depicted, which are operable linked; and wherein said nucleic acid molecule according to 1 (a), (b), (c), (d), (e), (f), (g), (h), (i), (j) or (k) encodes a polypeptide which has the activity of the respective polypeptide represented by a protein as depicted in the respective line in column 5 of Table II application no. 9 and confers a generation or an increase of the respective fine chemical in a non-human organism or a part thereof as compared to a corresponding wild-type non-human organism or part thereof.

[54110] In a preferred embodiment of said transgenic non-human organism said nucleic acid molecule according to 1 (a), (b), (c), (d), (e), (f), (g), (h), (i), (j) or (k), said promoter and optionally said nucleic acid molecule encoding a transit peptide are encompassed in an expression cassette in said vector. Accordingly an embodiment the invention provides a non-human organism comprising or being transformed by a vector comprising an expression cassette comprising said nucleic acid molecule according to 1 (a), (b), (c), (d), (e), (f), (g), (h), (i), (j) or (k), said promoter and optionally said a nucleic acid molecule encoding a transit peptide, operable linked. Said expression cassette may encompass a terminator, too.

[54111] [0291.1.8.9] to [0299.1.8.9] for the disclosure of these paragraphs see [0291.1.8.8] to [0299.1.8.8] above.

[54112] The term “biological active portion” or “biological activity” means a polypeptide as depicted in the respective line in Table II, application no. 9, column 3 or a portion of said polypeptide which still has at least 10% or 20%, preferably 30%, 40%, 50% or 60%, especially preferably 70%, 75%, 80%, 90% or 95% of the enzymatic or biological activity of the natural or starting enzyme or protein.

[54113] [0301.1.8.9] to [0304.1.8.9] for the disclosure of these paragraphs see [0301.1.8.8] to [0304.1.8.8] above.

[54114] Synthetic oligonucleotide primers for the amplification, e.g. as shown in the respective line in Table III, application no. 9, column 8, by means of polymerase chain reaction can be generated on the basis of a sequence shown herein, for example the sequence shown in the respective line in Table I, application no. 9, columns 5 or 8, or the sequences derived from Table II, application no. 9, columns 5 or 8, respectively.

[54115] Moreover, it is possible to identify a conserved region of a protein from various organism by carrying out protein sequence alignments with the polypeptide encoded by the nucleic acid molecules of the present invention, in particular with the sequences encoded by the nucleic acid molecule shown in the respective line in column 5 or 8 of Table I, application no. 9, from which conserved regions, and in turn, degenerate primers can be derived. Conserved regions are those, which show a very little variation in the amino acid in one particular position of several homologs from different origin. The consensus sequence and polypeptide motifs shown in the respective line in column 8 of Table IV, application no. 9, are derived from such alignments of homologous proteins.

[54116] In an embodiment of the present invention, in the method of the present invention the activity of a polypeptide comprising or consisting of a consensus sequence or at least one polypeptide motif shown in the respective line in Table IV, application no. 9, column 8, is increased. In another embodiment thereof, the method of the present invention relates to a polypeptide comprising or consisting of a consensus sequence shown in the respective line in Table IV, application no. 9, column 8 or comprising at least one polypeptide motif shown in the respective line in Table IV, application no. 9, column 8, whereby not more than 20, 15, 10, 9, 8, 7, 6, 5 4, 3, 2 or 1, or 0 of the amino acid positions indicated can be replaced by any amino acid. In another embodiment thereof, the method of the present invention relates to a polypeptide comprising or consisting of a consensus sequence shown in the respective line in Table IV, application no. 9, column 8 or comprising at least one polypeptide motif shown in the respective line in Table IV, application no. 9, column 8, whereby not more than 15%, 10%, 5%, 4%, 3%, 2% or 1%, or 0% of the amino acid positions defined as distinct specific amino acids are/is replaced by another amino acid. In another embodiment thereof, the method of the present invention relates to a polypeptide comprising or consisting of a consensus sequence shown in the respective line in Table IV, application no. 9, column 8 or comprising at least one polypeptide motif shown in the respective line in Table IV, application no. 9, column 8, whereby not more than 20, 15, 10, 9, 8, 7, 6, 5, 4, 3, 2 or 1, or 0 amino acids are inserted into a consensus sequence or polypeptide motif.

[54117] In an embodiment of the present invention, in the method of the present invention the activity of a polypeptide comprising or consisting of a consensus sequence or at least one polypeptide motif shown in the respective line in Table IV, application no. 9, column 8, is increased, whereby said polypeptide distinguishes over the sequence depicted in Table II, application no. 9, columns 5 or 8 by one or more amino acids.

[54118] In one embodiment, said polypeptide of the invention distinguishes over the sequence shown in the respective line in Table II, application no. 9, columns 5 and 8 by more than 5, 6, 7, 8 or 9 amino acids, preferably by more than 10, 15, 20, 25 or 30 amino acids, even more preferred are more than 40, 50, or 60 amino acids and, preferably, the sequence of the polypeptide of the invention distinguishes from the sequence shown in the respective line in Table II B, application no. 9, columns 5 and 8 by not more than 80%, 70%, 60%, 50%, 40%, 30%, 20%, 10%, 5%, 4%, 3%, 2%, 1% or 0.5%. In another embodiment, said polypeptide of the invention does not consist of the sequence shown in Table II, application no. 9, columns 5 or 8.

[54119] [0309.1.8.9] to [0321.1.8.9] for the disclosure of these paragraphs see [0309.1.8.8] to [0321.1.8.8] above.

[54120] Polypeptides having above-mentioned activity, i.e. conferring the production or the increased production of the fine chemical linolenic acid as compared to a corresponding, e.g. non-transformed, wild type non-human organism, like a microorganism or a plant cell, plant or part thereof, can be encoded by other DNA sequences which hybridize to the sequences shown in the respective line in Table I, application no. 9, columns 5 and 8, preferably the coding region thereof, at least under relaxed hybridization conditions and which encode the expression of polypeptides conferring the production or the increased production of the respective fine chemical linolenic acid as compared to a corresponding, e.g. non-transformed, wild type non-human organism, like a microorganism or a plant cell, plant or part thereof.

[54121] [0323.1.8.9] to [0329.1.8.9] for the disclosure of these paragraphs see [0323.1.8.8] to [0329.1.8.8] above.

[54122] Further, the nucleic acid molecule of the invention comprises a nucleic acid molecule, which is a complement of one of the nucleotide sequences of above-mentioned nucleic acid molecules or a portion thereof. A nucleic acid molecule or its sequence which is complementary to one of the nucleotide molecules or sequences shown in the respective line in Table I, application no. 9, columns 5 or 8, preferably the coding region thereof, homologs or fragments thereof, is one which is sufficiently complementary to one of the nucleotide molecules or sequences shown in the respective line in Table I, application no. 9, columns 5 or 8, preferably the coding region thereof, homologs or fragments thereof, such that it can hybridize to one of the nucleotide sequences shown in Table I, application no. 9, columns 5 or 8, preferably the coding region thereof, homologs or fragments thereof, thereby forming a stable duplex. Preferably, the hybridization is performed under stringent hybridization conditions. However, a complement of one of the herein disclosed sequences is preferably a sequence complement thereto according to the base pairing of nucleic acid molecules well known to the skilled person. For example, the bases A and G undergo base pairing with the bases T and U or C, resp. and visa versa. Modifications of the bases can influence the base-pairing partner.

[54123] The nucleic acid molecule of the invention comprises a nucleotide sequence which is at least about 30%, 35%, 40%, 45%, 50%, 55%, 60%, 65%, 70%, 75%, 80%, 90%, 95%, 96%, 97%, 98%, 99%, 99.5% or more homologous to a nucleotide sequence shown in Table I, application no. 9, columns 5 or 8, preferably the coding region thereof, homologs or fragments thereof, and preferably has above-mentioned activity, in particular conferring the production or the increased production of the fine chemical linolenic acid, respectively, after increasing the activity or an activity of a gene as shown in the respective line in Table I or of a gene product, e.g. as shown in the respective line in Table II, application no. 9, column 5 or 8, by for example in one embodiment expression either in the cytosol or in an organelle such as a plastid or mitochondria or both, preferably in a plastid, or in another embodiment non-targeted or targeted.

[54124] The nucleic acid molecule of the invention comprises a nucleotide sequence or molecule which hybridizes, preferably hybridizes under stringent conditions as defined herein, to one of the nucleic acid molecule shown in the respective line in Table I, preferably Table IB, application no. 9, columns 5 or 8, preferably the coding region thereof, fragments or homologs thereof, and encodes a protein having above-mentioned activity, e.g. conferring the production or the increased production of the respective fine chemical linolenic acid as compared to a corresponding, e.g. non-transformed, wild type non-human organism, like a microorganism or a plant cell, plant or part thereof, by for example in one embodiment expression either in the cytosol or in an organelle such as a plastid or mitochondria or both, preferably in a plastid, or in another embodiment non-targeted or targeted, and optionally, the activity thereof is selected from the group consisting of 3-oxoacyl-[acyl-carrier-protein] reductase, 3-oxoacyl-[acyl-carrier-protein] synthase, AAS bifunctional protein, acid phosphatase precursor, acid shock protein, acyl transferase, acyl-CoA synthase, arginine decarboxylase, aromatic acid decarboxylase, asparaginase, At2g45420-protein, ATPase epsilon subunit, b0195-protein, b1234-protein, b1248-protein, b1280-protein, b1330-protein, b1470-protein, b1670-protein, b1672-protein, b1837-protein, b2032-protein, b2107-protein, b2399-protein, b2474-protein, b2613-protein, b2682-protein, b3442-protein, b3534-protein, b4023-protein, bifunctional purine biosynthesis protein, branched chain amino acid ABC transporter ATP-binding protein, branched-chain amino acid permease, carbamoyl-phosphate synthase subunit, carbon dioxide concentrating mechanism protein, cation-transporting ATPase, cell division control protein, coproporphyrinogen III oxidase, CTP synthase, CTP synthetase, dihydroxyacetone kinase, DnaJ-like chaperone, electron transport complex protein, ethanolamine utilization protein, F-box protein, flavodoxin, fumarate hydratase, glucose-6-phosphate 1-dehydrogenase, glutaredoxin, glycerol-3-phosphate dehydrogenase, heat shock transcription factor, HesB/YadR/YfhF family protein, isopropylmalate isomerase large subunit, metal-dependent hydrolase, molecular chaperone, monothiol glutaredoxin, multidrug resistance protein, oxidoreductase, permease protein of ABC transporter, phosphate import ATP-binding protein, phosphoadenosine phosphosulfate reductase, phosphofructokinase, phosphotriesterase, protein phosphatase, pyruvate kinase, recombinase A, sec-independent protein translocase, sll1032-protein, ThiF family protein, threonine dehydratase, threonine efflux protein, transcription factor, TTC1386-protein, ydr339c-protein, ydr507c-protein, and ymr013c-protein, respectively.

[54125] Moreover, the nucleic acid molecule of the invention can comprise only a portion of the coding region of one of the nucleic acid molecules depicted in Table I, application no. 9, columns 5 or 8, for example a fragment which can be used as a probe or primer or a fragment encoding a biologically active portion of the polypeptide of the present invention or of a polypeptide used in the process of the present invention, i.e. having above-mentioned activity, e.g. conferring the production or the increased production of the respective fine chemical linolenic acid as compared to a corresponding, e.g. non-transformed, wild type non-human organism, like a microorganism or a plant cell, plant or part thereof, by for example in one embodiment expression either in the cytosol or in an organelle such as a plastid or mitochondria or both, preferably in a plastid, or in another embodiment non-targeted or targeted. The nucleotide sequences determined from the cloning of the present protein-according-to-the-inventionencoding gene allows for the generation of probes and primers designed for use in identifying and/or cloning its homologues from other cell types and organisms. The probe/primer typically comprises a substantially purified oligonucleotide. The oligonucleotide typically comprises a region of nucleotide sequence that hybridizes under stringent conditions to at least about 12, 15 preferably about 20 or 25, more preferably about 40, 50 or 75 consecutive nucleotides of a sense strand of one of the sequences set forth, e.g., in the respective line in Table I, application no. 9, column 5 or 8, preferably the coding region thereof, or a homolog or a fragment thereof, an anti-sense sequence of one of the sequences, e.g., set forth in the respective line in Table I, application no. 9, columns 5 or 8, preferably the coding region thereof, or a homolog or a fragment thereof or naturally occurring mutants thereof. Primers based on a nucleic acid molecule of the invention can be used in PCR reactions to clone homologs of the polypeptide of the invention or of the polypeptide used in the process of the invention, e.g. as the primers described in the examples of the present invention, e.g. as shown in the examples. A PCR with the primers shown in the respective line in Table III, column 8 will result in a fragment of the gene product as shown in Table II, application no. 9, column 5.

[54126] Primer sets are interchangeable. The person skilled in the art knows how to design and combine said primers to result in the desired product, e.g. in a full length clone or a partial sequence. Probes based on the sequences of the nucleic acid molecule of the invention or used in the process of the present invention can be used to detect transcripts or genomic sequences encoding the same or homologous proteins. The probe can further comprise a label group attached thereto, e.g. the label group can be a radioisotope, a fluorescent compound, an enzyme, or an enzyme co-factor. Such probes can be used as a part of a genomic marker test kit for identifying cells which express a polypeptide of the invention or used in the process of the present invention, such as by measuring a level of an encoding nucleic acid molecule in a sample of cells, e.g. detecting mRNA levels or determining, whether a genomic gene comprising the sequence of the polynucleotide of the invention or used in the processes of the present invention has been mutated or deleted.

[54127] As the expression of a respective nucleic acids of the invention is related to the synthesis of the respective fine chemical linolenic acid its function as a probe extends to the detection of microorganisms, plant tissues, plants, plant variets, plant ecotypes or plant genera with varying capability or potential for synthesis of the respective fine chemical linolenic acid. Therefore in one embodiment the present invention relates to a method for analyzing the capability or potential of a plant tissue, a plant, a plant variety or plant ecotype to produce the fine chemical linolenic acid by using the nucleic acid of the invention or parts thereof as a probe to detect the amount of the nucleic acid of the invention in the non-human organism or a part thereof in comparison to another non-human organism.

[54128] The nucleic acid molecule of the invention encodes a polypeptide or portion thereof which includes an amino acid sequence which is sufficiently homologous to the amino acid sequence shown in respective line in Table II, application no. 9, columns 5 or 8 such that the protein or portion thereof maintains the ability to confer the production or the increased production of the respective fine chemical linolenic acid as compared to a corresponding, e.g. non-transformed, wild type non-human organism, like a microorganism or a plant cell, plant or part thereof, in particular increasing the activity as mentioned above or as described in the examples in microorganisms or plants.

[54129] As used herein, the language “sufficiently homologous” refers to proteins or portions thereof which have amino acid sequences which include a minimum number of identical or equivalent amino acids (e.g. an amino acid which has a similar side chain as an amino acid in one of the sequences of the polypeptide of the present invention) to an amino acid sequence shown in the respective line in Table II, application no. 9, columns 5 or 8 such that the protein or portion thereof is able to confer the production or the increased production of the respective fine chemical linolenic acid as compared to a corresponding, e.g. non-transformed, wild type non-human organism, like a microorganism or a plant cell, plant or part thereof. For example having the activity of a protein as shown in the respective line in Table II, application no. 9, column 3 and as described herein.

[54130] In an embodiment of the present invention, the nucleic acid molecule of the present invention comprises a nucleic acid molecule that encodes a portion of the protein of the present invention. The protein is at least about 30%, 35%, 40%, 45% 50%, 55%, 60%, 65%, 70%, 75%, 80%, 85%, 90%, 91%, 92%, 93%, 94%, 95%, 96%, 97%, 98%, 99%, 99.5% or more homologous to an entire amino acid sequence shown in the respective line of Table II, application no. 9, column 5 or 8 and has the above-mentioned activity, e.g. conferring the production or the increased production of the respective fine chemical linolenic acid as compared to a corresponding, e.g. non-transformed, wild type non-human organism, like a microorganism or a plant cell, plant or part thereof by, for example in a embodiment expression either in the cytosol or in an organelle such as a plastid or mitochondria or both, preferably in a plastid, or in another embodiment by targeted or non-targeted expression.

[54131] [0338.1.8.9] to [0339.1.8.9] for the disclosure of these paragraphs see [0338.1.8.8] to [0339.1.8.8] above.

[54132] The invention further relates to nucleic acid molecules or methods using said nucleic acid molecules that differ from one of the nucleotide sequences shown in the respective line in Table I, application no. 9, columns 5 or 8, preferably the coding region thereof, or fragments or homologs thereof, due to degeneracy of the genetic code but encode a polypeptide of the present invention, in particular a polypeptide having the above-mentioned activity, e.g. as those polypeptides depicted in the respective line in Table II, application no. 9, columns 5 or 8, fragments or homologs thereof. Advantageously, the nucleic acid molecule of the invention comprises, or in an other embodiment has, a nucleotide sequence encoding a protein comprising, or in an other embodiment having, an amino acid sequence shown in the respective line in Table II, application no. 9, columns 5 or 8, fragments or homologs thereof. In a further embodiment, the nucleic acid molecule of the invention encodes a full length protein which is substantially homologous to an amino acid sequence shown in the respective line in Table II, application no. 9, columns 5 or 8, or homologs thereof. However, in an embodiment, the nucleic acid molecule of the present invention does not consist of the sequence shown in the respective line in Table I, preferably Table IA, application no. 9, columns 5 or 8, preferably the coding region thereof, but the functional homologs thereof.

[54133] [0341.1.8.9] to [0343.1.8.9] for the disclosure of these paragraphs see [0341.1.8.8] to [0343.1.8.8] above.

[54134] Accordingly, in another embodiment, a nucleic acid molecule of the invention is at least 15, 20, 25 or 30 nucleotides in length. Preferably, it hybridizes under stringent conditions to a nucleic acid molecule comprising a nucleotide sequence of the nucleic acid molecule of the present invention or used in the process of the present invention, e.g. comprising the sequence shown in the respective line in Table I, application no. 9, columns 5 or 8, preferably the coding region thereof. In another embodiment the nucleic acid molecule is preferably at least 20, 30, 50, 100, 250 or more nucleotides in length.

[54135] for the disclosure of this paragraph see [0345.1.8.8] above.

[54136] Preferably, a nucleic acid molecule of the invention that hybridizes under stringent conditions to a sequence shown in the respective line in Table I, application no. 9, columns 5 or 8, preferably the coding region thereof, corresponds to a naturally-occurring nucleic acid molecule of the invention. As used herein, a “naturally-occurring” nucleic acid molecule refers to a RNA or DNA molecule having a nucleotide sequence that occurs in nature (e.g. encodes a natural protein). Preferably, the nucleic acid molecule encodes a natural protein having above-mentioned activity, e.g. conferring the production or the increased production of the respective fine chemical linolenic acid as compared to a corresponding, e.g. non-transformed, wild type non-human organism, like a microorganism or a plant cell, plant or part thereof after increasing the expression or activity thereof or the activity of a protein of the invention or used in the process of the invention, in an embodiment for example expression either in the cytosol or in an organelle such as a plastid or mitochondria, preferably in plastids, or, in another embodiment by targeted or non-targeted expression.

[54137] for the disclosure of this paragraph see [0347.1.8.8] above.

[54138] For example, nucleotide substitutions leading to amino acid substitutions at “non-essential” amino acid residues can be made in a sequence of the nucleic acid molecule of the invention or used in the process of the invention, e.g. shown in the respective line in Table I, application no. 9, columns 5 or 8, preferably the coding region thereof, or fragments or homologs thereof.

[54139] [0349.1.8.9] to [0350.1.8.9] for the disclosure of these paragraphs see [0349.1.8.8] to [0350.1.8.8] above.

[54140] Accordingly, the invention relates to nucleic acid molecules encoding a polypeptide having above-mentioned activity, in a non-human organisms or parts thereof by for example expression either in the cytosol or in an organelle such as a plastid or mitochondria or both, preferably in plastids, that contain changes in amino acid residues that are not essential for said activity. Such polypeptides differ in amino acid sequence from a sequence depicted in the respective line in Table II, especially Table IIA, application no. 9, columns 5 or 8, but retain said activity described herein. The nucleic acid molecule can comprise a nucleotide sequence encoding a polypeptide, wherein the polypeptide comprises an amino acid sequence at least about 50% identical to an amino acid sequence shown in the respective line in Table II, application no. 9, columns 5 or 8, and is capable of conferring the production or the increased production of the respective fine chemical linolenic acid as compared to a corresponding, e.g. non-transformed, wild type non-human organism, like a microorganism or a plant cell, plant or part thereof, after increasing its activity for example in an embodiment by expression either in the cytosol or in an organelle such as a plastid or mitochondria or both, preferably in plastids, or, in another embodiment by targeted or non-targeted expression. Preferably, the protein encoded by the nucleic acid molecule is at least about 60%, 70%, 80%, 90%, 95%, 96%, 97%, 98%, 99% or 99.5% identical to the sequence shown in the respective line in Table II, application no. 9, columns 5 or 8.

[54141] [0352.1.8.9] to [0357.1.8.9] for the disclosure of these paragraphs see [0352.1.8.8] to [0357.1.8.8] above.

[54142] Functional equivalents of the nucleic acid molecules according to the present invention and/or used in the process according to the present invention represent an embodiment of homologs. Functional equivalents derived from the nucleic acid molecules as shown in the respective line in Table I, application no. 9, columns 5 or 8, preferably the coding region thereof, according to the invention by substitution, insertion or deletion have at least 30%, 35%, 40%, 45%, 50%, 55%, 60%, 65%, 70%, 75%, 80%, 85%, 90%, 91%, 92%, 93%, 94%, 95%, 96%, 97%, 98%, 99% or 99.5% homology with one of the nucleic acid molecules as shown in the respective line in Table I, application no. 9, columns 5 or 8, preferably the coding region thereof, according to the invention and encode polypeptides having essentially the same properties as the polypeptide as shown in the respective line in Table II, application no. 9, columns 5 or 8.

[54143] Functional equivalents derived from one of the polypeptides as shown in the respective line in Table II, application no. 9, columns 5 or 8 according to the invention by substitution, insertion or deletion have at least 30%, 35%, 40%, 45%, 50%, 55%, 60%, 65%, 70%, 75%, 80%, 85%, 90%, 91%, 92%, 93%, 94%, 95%, 96%, 97%, 98%, 99% or 99.5% homology with one of the polypeptides as shown in the respective line in Table II, application no. 9, columns 5 or 8 according to the invention and having essentially the same properties as the polypeptide as shown in the respective line in Table II, application no. 9, columns 5 or 8.

[54144] for the disclosure of this paragraph see [0359.1.8.8] above.

[54145] A nucleic acid molecule encoding a homolog to a polypeptide depicted in the respective line in Table II, application no. 9, columns 5 or 8 can be created by introducing one or more nucleotide substitutions, additions or deletions into the nucleic acid molecule of the present invention, in particular of Table I, application no. 9, columns 5 or 8, in the respective line, such that one or more amino acid substitutions, additions or deletions are introduced into the encoded protein. Mutations can be introduced into the nucleic acid molecules as depicted in the respective line in Table I, application no. 9, columns 5 or 8, preferably the coding region thereof, by standard techniques, such as site-directed mutagenesis, PCR-mediated mutagenesis or other methods known to the person skilled in the art.

[54146] [0361.1.8.9] to [0363.1.8.9] for the disclosure of these paragraphs see [0361.1.8.8] to [0363.1.8.8] above.

[54147] Homologues of the nucleic acid sequences used, with the sequences shown in the respective line in Table I, application no. 9, columns 5 or 8, preferably the coding region thereof, comprise also allelic variants with at least approximately 30%, 35%, 40%, 45%, 50%, 55%, 60%, 65%, 70%, 75%, 80%, 85%, 90%, 91%, 92%, 93%, 94% 95%. 96%, 97%, 98%, 99%, 99.5% or more % homology with one of the nucleotide sequences shown or the abovementioned derived nucleic acid sequences or their homologues or derivatives or parts of these. Allelic variants encompass in particular functional variants which can be obtained by deletion, insertion or substitution of nucleotides from the sequences shown in the respective line, preferably in Table I, columns 5 or 8, preferably the coding region thereof, or from the derived nucleic acid sequences, the intention being, however, that the enzymatic activity or the biological activity of the resulting proteins synthesized is advantageously retained or increased.

[54148] In one embodiment of the present invention, the nucleic acid molecule of the invention or used in the process of the invention comprises the sequences shown in the respective line in any of the Table I, application no. 9, columns 5 or 8, preferably the coding region thereof, fragments or homologs thereof. It is preferred that the nucleic acid molecule comprises as little as possible other nucleotides not shown in the respective line in any one of Table I, application no. 9, columns 5 or 8, preferably the coding region thereof, fragments or homologs thereof. In one embodiment, the nucleic acid molecule comprises less than 500, 400, 300, 200, 100, 90, 80, 70, 60, 50 or 40 further nucleotides. In a further embodiment, the nucleic acid molecule comprises less than 30, 20 or 10 further nucleotides. In one embodiment, the nucleic acid molecule used in the process of the invention is identical to the sequences shown in the respective line in Table I, application no. 9, columns 5 or 8, preferably the coding region thereof.

[54149] Also preferred is that the nucleic acid molecule used in the process of the invention encodes a polypeptide comprising the sequence shown in the respective line in Table II, application no. 9, columns 5 or 8, fragments or homologs thereof. In one embodiment, the nucleic acid molecule encodes less than 150, 130, 100, 80, 60, 50, 40 or 30 further amino acids. In a further embodiment, the encoded polypeptide comprises less than 20, 15, 10, 9, 8, 7, 6 or 5 further amino acids. In one embodiment used in the inventive process, the encoded polypeptide is identical to the sequences shown in the respective line in Table II, application no. 9, columns 5 or 8.

[54150] In one embodiment, the nucleic acid molecule of the invention or used in the process encodes a polypeptide comprising the sequence shown in the respective line in Table II, application no. 9, columns 5 or 8, or fragments or homologs thereof, and comprises less than 100 further nucleotides. In a further embodiment, said nucleic acid molecule comprises less than 30 further nucleotides. In one embodiment, the nucleic acid molecule used in the process is identical to a coding sequence of the sequences shown in the respective line in Table I, application no. 9, columns 5 or 8.

[54151] Polypeptides (=proteins), which still have the essential biological or enzymatic activity of the polypeptide of the present invention conferring the production or the increased production of the respective fine chemical linolenic acid as compared to a corresponding, e.g. non-transformed, wild type non-human organism, like a microorganism or a plant cell, plant or part thereof, i.e. whose activity is essentially not reduced, are polypeptides with at least 10%, 20%, 30%, 40%, 50%, 60%, 70%, 80%, 90%, 95% or more of the wild type biological activity or enzymatic activity, advantageously, the activity is essentially not reduced in comparison with the activity of a polypeptide shown in the respective line in Table II, application no. 9, columns 5 or 8 expressed under identical conditions.

[54152] Homologues of nucleic acid molecules shown in the respective line in Table I, application no. 9, columns 5 or 8, preferably the coding region thereof, or fragments thereof, or of the derived sequences shown in the respective line in Table II, application no. 9, columns 5 or 8, or fragments thereof, also mean truncated sequences, cDNA, single-stranded DNA or RNA of the coding and noncoding DNA sequence. Homologues of said sequences are also understood as meaning derivatives, which comprise noncoding regions such as, for example, UTRs, introns, terminators, enhancers or promoter variants. The promoters upstream of the nucleotide sequences stated can be modified by one or more nucleotide substitution(s), insertion(s) and/or deletion(s) without, however, interfering with the functionality or activity either of the promoters, the open reading frame (=ORF) or with the 3′-regulatory region such as terminators or other 3′-regulatory regions, which are far away from the ORF. It is furthermore possible that the activity of the promoters is increased by modification of their sequence, or that they are replaced completely by more active promoters, even promoters from heterologous organisms. Appropriate promoters are known to the person skilled in the art and are mentioned herein below.

[54153] [0370.1.8.9] to [0379.1.8.9] for the disclosure of these paragraphs see [0370.1.8.8] to [0379.1.8.8] above.

[54154] Moreover, a native polypeptide conferring the increase of the respective fine chemical linolenic acid in a non-human organism or a part thereof can be isolated from cells (e.g., endothelial cells), for example using the antibody of the present invention as described below, in particular, an antibody against proteins having 3-oxoacyl-[acyl-carrier-protein] reductase, 3-oxoacyl-[acyl-carrier-protein] synthase, AAS bifunctional protein, acid phosphatase precursor, acid shock protein, acyl transferase, acyl-CoA synthase, arginine decarboxylase, aromatic acid decarboxylase, asparaginase, At2g45420-protein, ATPase epsilon subunit, b0195-protein, b1234-protein, b1248-protein, b1280-protein, b1330-protein, b1470-protein, b1670-protein, b1672-protein, b1837-protein, b2032-protein, b2107-protein, b2399-protein, b2474-protein, b2613-protein, b2682-protein, b3442-protein, b3534-protein, b4023-protein, bifunctional purine biosynthesis protein, branched chain amino acid ABC transporter ATP-binding protein, branched-chain amino acid permease, carbamoyl-phosphate synthase subunit, carbon dioxide concentrating mechanism protein, cation-transporting ATPase, cell division control protein, coproporphyrinogen III oxidase, CTP synthase, CTP synthetase, dihydroxyacetone kinase, DnaJ-like chaperone, electron transport complex protein, ethanolamine utilization protein, F-box protein, flavodoxin, fumarate hydratase, glucose-6-phosphate 1-dehydrogenase, glutaredoxin, glycerol-3-phosphate dehydrogenase, heat shock transcription factor, HesB/YadR/YfhF family protein, isopropylmalate isomerase large subunit, metal-dependent hydrolase, molecular chaperone, monothiol glutaredoxin, multidrug resistance protein, oxidoreductase, permease protein of ABC transporter, phosphate import ATP-binding protein, phosphoadenosine phosphosulfate reductase , phosphofructokinase, phosphotriesterase, protein phosphatase, pyruvate kinase, recombinase A, sec-independent protein translocase, sll1032-protein, ThiF family protein, threonine dehydratase, threonine efflux protein, transcription factor, TTC1386-protein, ydr339c-protein, ydr507c-protein, or ymr013c-protein activity, respectively, or an antibody against polypeptides as shown in the respective line in Table II, application no. 9, columns 5 or 8, or fragments or homologs thereof which can be produced by standard techniques utilizing the polypeptid of the present invention or fragment thereof, i.e., the polypeptide of this invention (FCRP). Preferred are monoclonal antibodies.

[54155] for the disclosure of this paragraph see [0381.1.8.8] above.

[54156] In one embodiment, the present invention relates to a polypeptide as depicted in the respective line in Table II, especially in Table IIA or especially in Table IIB, application no. 9, columns 5 or 8, or fragment or homolog thereof or as coded by the nucleic acid molecule shown in the respective line in Table I, especially Table IA or especially Table IB, application no. 9, columns 5 or 8, preferably the coding region thereof, or fragment or homolog thereof.

[54157] In an embodiment, the present invention relates to a polypeptide comprising or consisting of a consensus sequence shown in the respective line in Table IV, application no. 9, column 8 or at least one polypeptide motif shown in the respective line in Table IV, application no. 9, column 8.

[54158] In an embodiment thereof, the present invention relates to a polypeptide comprising or consisting of a consensus sequence shown in the respective line in Table IV, application no. 9, column 8 or comprising at least one polypeptide motif shown in the respective line in Table IV, application no. 9, column 8, whereby not more than 20, 15, 10, 9, 8, 7, 6, 5, 4, 3, 2, or 1, or 0 of the amino acids can be replaced by any amino acid.

[54159] In another embodiment thereof, the present invention relates to a polypeptide comprising or consisting of a consensus sequence shown in the respective line in Table IV, application no. 9, column 8 or comprising at least one polypeptide motif shown in the respective line in Table IV, application no. 9, column 8, whereby not more than 15%, 10%, 5%, 4%, 3%, 2% or1% or 0% of the amino acids defined as distinct specific amino acids are/is replaced by another amino acid.

[54160] In another embodiment thereof, the present invention relates to a polypeptide comprising or consisting of a consensus sequence shown in the respective line in Table IV, application no. 9, column 8 or comprising at least one polypeptide motif shown in the respective line in Table IV, application no. 9, column 8, whereby not more than 20, 15, 10, 9, 8, 7, 6, 5, 4, 3, 2, or 1, or 0 amino acids are inserted into the consensus sequence or polypeptide motif.

[54161] In an embodiment of the present invention, the polypeptide of the present invention comprises or consists of a consensus sequence or at least one polypeptide motif shown in the respective line in Table IV, application no. 9, column 8, whereby said polypeptide distinguishes over the sequence depicted in the respective line in Table II, application no. 9, columns 5 or 8 by one or more amino acids. In one embodiment, said polypeptide of the invention distinguishes over the sequence shown in the respective line in Table II, application no. 9, columns 5 and 8 by more than 5, 6, 7, 8 or 9 amino acids, preferably by more than 10, 15, 20, 25 or 30 amino acids, even more preferred are more than 40, 50, or 60 amino acids and, preferably, the sequence of the polypeptide of the invention distinguishes from the sequence shown in the respective line in Table II, application no. 9, columns 5 and 8 by not more than 80%, 70%, 60%, 50%, 40%, 30%, 20%, 10%, 5%, 4%, 3%, 2%, 1% or 0.5%. In another embodiment, said polypeptide of the invention does not consist of the sequence shown in the respective line in Table II, application no. 9, columns 5 and 8.

[54162] In an embodiment, the invention relates to a polypeptide conferring an increase in the respective fine chemical linolenic acid in a non-human organism, especially a microorganism or a plant, or a part thereof, being encoded by the nucleic acid molecule of the invention or used in the process of the invention and having a sequence which distinguishes over the sequence as shown in the respective line in Table II, application no. 9, columns 5 or 8 by one or more amino acids (but not exceeding 5%, preferably 4%, 3%, 2%, 1%, 0.5%, 0.2% or 0.1%). In an embodiment, said polypeptide of the invention does not comprise or consist of the sequence shown in the respective line in Table II, application no. 9, columns 5 or 8. In an embodiment, said polypeptide of the present invention is less than 100%, 99.999%, 99.99%, 99.9% or 99% identical. In one embodiment, said polypeptide which differs at least in one or more amino acids (but not exceeding 5%, preferably 4%, 3%, 2%, 1%, 0.5%, 0.2% or 0.1%) from the polypeptide shown in the respective line in Table II, application no. 9, columns 5 and 8 does not comprise a protein of the sequence shown in the respective line in Table II A and/or II B, application no. 9, columns 5 or 8.

[54163] In an embodiment, the present invention relates to a polypeptide having the activity of the protein as shown in the respective line in Table II, application no. 9, column 3, which distinguishes over the sequence depicted in the respective line in Table II, application no. 9, columns 5 or 8 by one or more amino acids, preferably by more than 5, 6, 7, 8 or 9 amino acids, preferably by more than 10, 15, 20, 25 or 30 amino acids, even more preferred are more than 40, 50, or 60 amino acids and, preferably, the sequence of the polypeptide of the invention distinguishes from the sequence shown in the respective line in Table II, application no. 9, columns 5 and 8 by not more than 80%, 70%, 60%, 50%, 40%, 30%, 20%, 10%, 5%, 4%, 3%, 2%, 1% or 0.5%.

[54164] In another embodiment the polypeptide of the invention takes the form of a preprotein consisting of a plastidial or mitochondrial transit peptide joint to a polypeptide having the activity of the protein as shown in Table II, column 3, from which the transit peptide is preferably cleaved off upon transport of the preprotein into the organelle for example into the plastid or mitochondrion.

[54165] In another embodiment the polypeptide of the invention takes not the form of a preprotein.

[54166] [0390.1.8.9] to [0391.1.8.9] for the disclosure of these paragraphs see [0390.1.8.8] to [0391.1.8.8] above.

[54167] A polypeptide of the invention can participate in the process of the present invention. The polypeptide or a portion thereof comprises preferably an amino acid sequence, which is sufficiently homologous to an amino acid sequence shown in the respective line in Table II A and/or II B, application no. 9, columns 5 or 8.

[54168] Further, the polypeptide can have an amino acid sequence which is encoded by a nucleotide sequence which hybridizes, preferably hybridizes under stringent conditions as described above, to a nucleotide sequence of the nucleic acid molecule of the present invention. Accordingly, the polypeptide has an amino acid sequence which is encoded by a nucleotide sequence that is at least about 35%, 40%, 45%, 50%, 55%, 60%, 65%, 70%, 75%, 80%, 85%, 90%, 91%, 92%, 93%, 94%, 95%, 96%, 97%, 98%, 99%, 99.5% or more homologous to one of the amino acid sequences as shown in the respective line in Table II A and/or II B, application no. 9, columns 5 or 8, or fragments thereof. The preferred polypeptide of the present invention preferably possesses at least one of the activities according to the invention and described herein. A preferred polypeptide of the present invention includes an amino acid sequence encoded by a nucleotide sequence which hybridizes, preferably hybridizes under stringent conditions, to a nucleotide sequence shown in the respective line in Table I A and/or I B, application no. 9, columns 5 or 8, preferably the coding region thereof, or fragments thereto or which is homologous thereto, as defined above.

[54169] The polypeptide of the present invention can vary from the sequences shown in the respective line in Table II A and/or II B, application no. 9, columns 5 or 8 in amino acid sequence due to natural variation or mutagenesis, as described in detail herein. Accordingly, the polypeptide comprise an amino acid sequence which is at least about 35%, 40%, 45%, 50%, 55%, 60%, 65%, 70%, 75%, 80%, 85% or 90, 91%, 92%, 93%, 94%, 95%, 96%, 97%, 98%, 99%, 99.5% or more homologous to an entire amino acid sequence shown in the respective line in Table II A and/or II B, application no. 9, columns 5 or 8.

[54170] Biologically active portions of a polypeptide of the present invention include peptides comprising amino acid sequences derived from the amino acid sequence of the polypeptide of the present invention or used in the process of the present invention, e.g., the amino acid sequence shown in the respective line in Table II, application no. 9, columns 5 or 8 or the amino acid sequence of a protein homologous thereto, which include fewer amino acids than a full length polypeptide of the present invention or used in the process of the present invention or the full length protein which is homologous to a polypeptide of the present invention or used in the process of the present invention depicted herein, and exhibit at least one activity of a polypeptide of the present invention or used in the process of the present invention.

[54171] for the disclosure of this paragraph see [0396.1.8.8] above.

[54172] Manipulation of the nucleic acid molecule of the invention may result in the production of a protein having differences from the protein as shown in the respective line in Table II, application no. 9, column 5 or 8. Differences shall mean at least one amino acid different from the sequences as shown in the respective line in Table II, application no. 9, column 5 or 8, preferably at least 2, 3, 4, 5, 6, 7, 8, 9 or 10 amino acids (especially but not exceeding 0.1%, preferably 0.2%, 0.5%, 1%, 2%, 3% 4% or 5%), more preferably at least 15, 20, 25, 30, 35, 40, 45 or 50 amino acids (especially but not exceeding 0.5%, preferably 1%, 2%, 3% 4%, 5%, 10% or 25%) different from the sequences as shown in the respective line in Table II, application no. 9, column 5 or 8. These proteins may be improved in efficiency or activity, or may be more stable and therefore present in greater numbers in the cell as compared to the wild-type cell.

[54173] Any mutagenesis strategies for the polypeptide of the present invention or the polypeptide used in the process of the present invention to result in increasing said activity are not meant to be limiting; variations on these strategies will be readily apparent to one skilled in the art. Using such strategies, and incorporating the mechanisms disclosed herein, the nucleic acid molecule and polypeptide of the invention may be utilized to generate algae, ciliates, fungi, other microorganisms like C. glutamicum or plants or parts thereof, expressing proteins as shown in the respective line in Table II, application no. 9, column 5 or 8, or mutated proteins thereof. The nucleic acid molecules and polypeptide molecules of the invention are expressed such that the yield, production, and/or efficiency of production of a desired compound is improved.

[54174] [0399.1.8.9] to [0401.1.8.9] for the disclosure of these paragraphs see [0399.1.8.8] to [0401.1.8.8] above.

[54175] In one embodiment, a protein (=polypeptide) as shown in the respective line in Table II, application no. 9, column 5 or 8 refers to a polypeptide having an amino acid sequence corresponding to the polypeptide of the invention, especially to a polypeptide as shown in Table II, application no. 9, columns 5 or 8 or homologs thereof, or used in the process of the invention, whereas a “non-inventive protein or polypeptide” or “other polypeptide” refers to a polypeptide having an amino acid sequence corresponding to a protein which is not substantially homologous to a polypeptide of the invention, preferably which is not substantially homologous to a polypeptide or protein as shown in the respective line in Table II, application no. 9, column 5 or 8 or homologs thereof, e.g., a protein which does not confer the activity described herein and which is derived from the same or a different organism.

[54176] [0403.1.8.9] to [0409.1.8.9] for the disclosure of these paragraphs see [0403.1.8.8] to [0409.1.8.8] above.

[54177] As the nucleic acid molecules of the invention and/or the expression thereof is related to the synthesis of the respective fine chemical linolenic acid its function as a probe extends to the detection of microorganisms, plant tissues, plants, plant variets, plant ecotypes or plant genera with varying, advantageously increased, capability or potential for synthesis of the respective fine chemical linolenic acid. Therefore in one embodiment the present invention relates to a method for analyzing the capability or potential of a plant tissue, a plant, a plant variety or ecotype to produce the respective fine chemical linolenic acid by using the respective antibody of the invention as a probe to detect the amount of the polypeptide encoded by said nucleic acid molecule of the invention in a non-human organism in comparison to another organism.

[54178] Therefore in one embodiment the invention relates to a method to probe a non-human organism for its capability for the production of the respective fine chemical comprising the steps of
[54179] a) analyzing the sequence and/or the expression of the respective nucleic acid molecule of the invention in least two non-human organisms which differ in the capability to produce the respective fine chemical;
[54180] b) associate the different sequence and/or expression level of the nucleic acid molecules of the invention with their different capability to produce the respective fine chemical;
[54181] c) analyze the sequence and/or the expression of the nucleic acid molecule of the invention in at least a third non-human organism;
[54182] d) predict the capability of the at least third organism to produce the respective fine chemical based by comparing the sequence and/or expression of the nucleic acid of the invention to the sequences and/or expression levels of the nucleic acid molecule of the invention of the at least two organisms analyzed in step a.

[54183] [0411.1.8.9] to [0430.1.8.9] for the disclosure of these paragraphs see [0411.1.8.8] to [0430.1.8.8] above.

[54184] Accordingly the present invention relates to any cell transgenic for any nucleic acid characterized as part of the invention, e.g. conferring the increase of the respective fine chemical linolenic acid in a cell or a non-human organism or a part thereof, e.g. the nucleic acid molecule of the invention, the nucleic acid construct of the invention, the vector of the invention, the expression cassette according to the invention, or a nucleic acid molecule encoding the polypeptide of the invention, e.g. encoding a polypeptide having an activity as the protein as shown in the respective line in Table II, application no. 9, column 3. Due to the abovementioned activity the respective fine chemical linolenic acid content in a cell or a non-human organism is increased. For example, due to modulation or manipulation, the cellular activity is increased, in a preferred embodiment in organelles such as plastids or mitochondria, e.g. due to an increased expression or specific activity or specific targeting of the subject matters of the invention in a cell or a non-human organism or a part thereof especially in organelles such as plastids or mitochondria, or in another embodiment in the cytosol. Transgenic for a polypeptide having a protein or a protein activity means herein that due to modulation or manipulation of the genome, the activity of protein as shown in the respective line in Table II, application no. 9, column 3 or a protein as shown in the respective line in Table II, application no. 9, column 3-like activity is increased in the cell or non-human organism or part thereof, especially in organelles such as plastids or mitochondria, or especially in the cytosol. Examples are described above in context with the process of the invention.

[54185] for the disclosure of this paragraph see [0432.1.8.8] above.

[54186] A naturally occurring expression cassette—for example the naturally occurring combination of the promoter of the gene encoding a protein as shown in the respective line in Table II, application no. 9, column 5 or 8, preferably the coding region thereof, or fragments or homologs thereof with the corresponding encoding gene—becomes a transgenic expression cassette when it is modified by non-natural, synthetic “artificial” methods such as, for example, mutagenesis. Such methods have been described (U.S. Pat. No. 5,565,350; WO 00/15815; also see above).

[54187] [0434.1.8.9] to [0435.1.8.9] for the disclosure of these paragraphs see [0434.1.8.8] to [0435.1.8.8] above.

[54188] Transgenic plants comprising the respective fine chemical(s) synthesized in the process according to the invention can be marketed directly without isolation of the fine chemical synthesized. In the process according to the invention, plants are understood as meaning all plant parts, plant organs such as leaf, stalk, root, tubers or seeds or propagation material or harvested material or the intact plant. In this context, the seed encompasses all parts of the seed such as the seed coats, epidermal cells, seed cells, endosperm or embryonic tissue. The fine chemical produced in the process according to the invention may, however, also be isolated from the plant. In case of linolenic acid this can be in free form or bound to proteins. Fine chemical(s) produced by this process can be harvested by harvesting the non-human organisms either from the culture in which they grow or from the field. For example, this can be done via squeezing, grinding and/or extraction, salt precipitation and/or ion-exchange chromatography of the plant parts, preferably the plant seeds, plant fruits, plant tubers and the like.

[54189] [0437.1.8.9] to [0454.1.8.9] for the disclosure of these paragraphs see [0437.1.8.8] to [0454.1.8.8] above.

[54190] In one embodiment, the present invention relates to a method for the identification of a gene product conferring the production of or an increase in the fine chemical production in a non-human cell, comprising the following steps:
[54191] (a) contacting, e.g. hybridizing, a, some or all nucleic acid molecules of a sample, e.g. cells, tissues, plants or microorganisms or a nucleic acid library, which can contain a candidate gene encoding a gene product conferring the production of or an increase in the fine chemical after expression, with the nucleic acid molecule of the present invention as shown in the respective line in column 5 or 8 of Table I A or B of application no. 9, preferably the coding region thereof, or a fragment or homolog thereof;
[54192] (b) identifying the nucleic acid molecules, which hybridize under relaxed stringent conditions with the nucleic acid molecule of the present invention in particular to the nucleic acid molecule sequence shown in the respective line in Table I, application no. 9, columns 5 or 8, preferably the coding region thereof, of a fragment or a homolog thereof, preferably in Table I B, application no. 9, columns 5 or 8, preferably the coding region thereof, of a fragment or a homolog thereof, and, optionally, isolating the full length cDNA clone or complete genomic clone;
[54193] (c) introducing the candidate nucleic acid molecules or a fragment thereof in host cells, preferably in a plant cell or a microorganism, appropriate for producing the fine chemical;
[54194] (d) expressing the identified nucleic acid molecules in the host cells for which the production of or the increased production of the fine chemical is desired;
[54195] (e) assaying the fine chemical level in the non-human host cells; and
[54196] (f) identifying the nucleic acid molecule and/or its gene product which expression confers the production of or an increase in the fine chemical level in the non-human host cell after expression compared to the wild type.

[54197] for the disclosure of this paragraph see [0456.1.8.8] above.

[54198] In another embodiment, the present invention relates to a method for the identification of a gene product conferring the production of or an increase in the fine chemical production in a cell, comprising the following steps:
[54199] (a) identifying a nucleic acid molecule of a non-human organism, which is at least 20%, 25%, 30%, 35%, 40%, 50%, 60%, 70%, 80%, 90%, 95%, 96%, 97%, 98%, 99%, 99.5% or more homolog to the nucleic acid molecule encoding a polypeptide comprising the polypeptide molecule as shown in the respective line in column 5 or 8 of Table II, application no. 9, or comprising a consensus sequence or a polypeptide motif as shown in the respective line in column 8 of Table IV, application no. 9, or being encoded by a nucleic acid molecule comprising a polynucleotide as shown in the respective line in column 5 or 8 of Table I, application no. 9, preferably the coding region thereof, or a homologue thereof as described herein, for example via homology search in a data bank;
[54200] (b) introducing the candidate nucleic acid molecule in non-human host cells, preferably in a plant cell or a microorganism, appropriate for producing the fine chemical;
[54201] (c) expressing the identified nucleic acid molecule in the non-human host cells;
[54202] (d) assaying the fine chemical level in the non-human host cells; and
[54203] (e) identifying the nucleic acid molecule and its gene product which expression confers the production of or an increase in the fine chemical level in the non-human host cell after expression compared to the wild type.

[54204] for the disclosure of this paragraph see [0458.1.8.8] above.

[54205] Further, the nucleic acid molecules disclosed herein, in particular the nucleic acid molecules shown in the respective line in column 5 or 8 of Table I A or B of application no. 9, may be sufficiently homologous to the sequences of related species such that these nucleic acid molecules may serve as markers for the construction of a genomic map in related organism or for association mapping. Furthermore natural variation in the genomic regions corresponding to nucleic acids disclosed herein, in particular the nucleic acid molecule shown in the respective line in column 5 or 8 of Table I A or B, of application no. 9 or homologous thereof, may lead to variation in the activity of the proteins disclosed herein, in particular the proteins comprising polypeptides as shown in the respective lines in column 5 or 8 of Table II A or B, of application no. 9 or their homologous, or comprising the consensus sequence or the polypeptide motif as shown in the respective line in column 8 of Table IV, and in consequence in a natural variation of an increased fine chemical production.

[54206] In consequence natural variation eventually also exists in form of more active allelic variants leading already to a relative increase in the fine chemical. Different variants of the nucleic acid molecules disclosed herein, in particular the nucleic acid molecules comprising the nucleic acid molecules as shown in the respective line in column 5 or 8 of Table I A or B of application no. 9, preferably the coding region thereof, which corresponds to different levels of increase in fine chemical, e.g. different levels of increase in fine chemical, can be indentified and used for marker assisted breeding for an enhanced production of the fine chemical.

[54207] Natural variation may also exist in the regulatory regions, e.g. the promoters of the natural genes comprising the nucleic acid molecules as shown in the respective line column 5 or 8 of Table I A or B of application no. 9, preferably the coding region thereof, which can similarly correspond to different levels of increase in the fine chemical, e.g. different levels of increase in the fine chemical can be identified and used for marker assisted breeding for an enhanced production of the fine chemical.

[54208] Accordingly, the present invention relates to a method for breeding plants for the production of the fine chemical, comprising
[54209] (a) selecting a first plant variety with an increased production of the fine chemical, e.g. based on an increased expression of a nucleic acid molecule of the invention as disclosed herein, in particular of a nucleic acid molecule comprising a nucleic acid molecule as shown in the respective line in column 5 or 8 of Table I A or B of application no. 9, preferably the coding region thereof, or fragments or homologs thereof, or a polypeptide comprising a polypeptide as shown in the respective line in column 5 or 8 of Table II A or B of application no. 9, or fragments or homologs thereof, or comprising a consensus sequence or a polypeptide motif as shown in the respective line in column 8 of Table IV, or a homolog thereof, as described herein;
[54210] (b) associating the level of increased production of the fine chemical, with the expression level or the genomic structure of a gene encoding said polypeptide or said nucleic acid molecule;
[54211] (c) crossing the first plant variety with a second plant variety, which significantly differs in its level of fine chemical; and
[54212] (d) identifying, which of the offspring varieties has got increased production of the fine chemical by the expression level of said polypeptide or nucleic acid molecule or the genomic structure of the gene(s) encoding said polypeptide or nucleic acid molecule of the invention.

[54213] [0462.1.8.9] to [0482.1.8.9] for the disclosure of these paragraphs see [0462.1.8.8] to [0482.1.8.8] above.

[54214] In a further embodiment the present invention is characterized by the features as disclosed in the following items:

[54215] Item 1. A process for the production of the fine chemical linolenic acid
[54216] (a) increasing or generating one or more activities selected from the group consisting of 3-oxoacyl-[acyl-carrier-protein] reductase, 3-oxoacyl-[acyl-carrier-protein] synthase, AAS bifunctional protein, acid phosphatase precursor, acid shock protein, acyl transferase, acyl-CoA synthase, arginine decarboxylase, aromatic acid decarboxylase, asparaginase, At2g45420-protein, ATPase epsilon subunit, b0195-protein, b1234-protein, b1248-protein, b1280-protein, b1330-protein, b1470-protein, b1670-protein, b1672-protein, b1837-protein, b2032-protein, b2107-protein, b2399-protein, b2474-protein, b2613-protein, b2682-protein, b3442-protein, b3534-protein, b4023-protein, bifunctional purine biosynthesis protein, branched chain amino acid ABC transporter ATP-binding protein, branched-chain amino acid permease, carbamoyl-phosphate synthase subunit, carbon dioxide concentrating mechanism protein, cationtransporting ATPase, cell division control protein, coproporphyrinogen III oxidase, CTP synthase, CTP synthetase, dihydroxyacetone kinase, DnaJ-like chaperone, electron transport complex protein, ethanolamine utilization protein, F-box protein, flavodoxin, fumarate hydratase, glucose-6-phosphate 1-dehydrogenase, glutaredoxin, glycerol-3-phosphate dehydrogenase, heat shock transcription factor, HesB/YadR/YfhF family protein, isopropylmalate isomerase large subunit, metal-dependent hydrolase, molecular chaperone, monothiol glutaredoxin, multidrug resistance protein, oxidoreductase, permease protein of ABC transporter, phosphate import ATP-binding protein, phosphoadenosine phosphosulfate reductase , phosphofructokinase, phosphotriesterase, protein phosphatase, pyruvate kinase, recombinase A, sec-independent protein translocase, sll1032-protein, ThiF family protein, threonine dehydratase, threonine efflux protein, transcription factor, TTC1386-protein, ydr339c-protein, ydr507c-protein, and ymr013c-protein, in a non-human organism or a part thereof, preferably a microorganism, a plant cell, a plant or a part thereof, as compared to a corresponding non-transformed wild type non-human organism or a part thereof; and
[54217] (b) growing the non-human organism or a part thereof under conditions which permit the production of linolenic acid or a composition comprising linolenic acid in said non-human organism or in the culture medium surrounding said non-human organism.

[54218] Item 2. A process for the production of the respective fine chemical linolenic acid, which comprises
[54219] (A)
[54220] (i) increasing or generating of the expression of; and/or
[54221] (ii) increasing or generating the expression of an expression product of; and/or
[54222] (iii) increasing or generating one or more activities of an expression product encoded by;
[54223] at least one respective nucleic acid molecule comprising a nucleic acid molecule selected from the group consisting of:
[54224] (a) a nucleic acid molecule encoding the polypeptide shown in column 5 or 8 of Table II, preferably Table II B, application no.9, or a homolog or a fragment thereof;
[54225] (b) a nucleic acid molecule shown in column 5 or 8 of Table I, preferably Table I B, application no.9, or a homolog or a fragment thereof (preferably the coding region thereof);
[54226] (c) a nucleic acid molecule, which, as a result of the degeneracy of the genetic code, can be derived from a polypeptide sequence depicted in column 5 or 8 of Table II, preferably Table II B, application no.9;
[54227] (d) a nucleic acid molecule having at least 30%, in particular at least 50%, 60%, 70%, 80%, 85%, 90%, 95%, 97%, 98%, 99% or 99.5% identity with the nucleic acid molecule sequence of a polynucleotide comprising the nucleic acid molecule shown in column 5 or 8 of Table I, preferably Table I B, application no. 9, or the coding region thereof;
[54228] (e) a nucleic acid molecule encoding a polypeptide having at least 30%, in particular 50%, 60%, 70%, 80%, 85%, 90%, 95%, 97%, 98%, 99% or 99.5% identity with the amino acid sequence of the polypeptide encoded by the nucleic acid molecule of (a), (b), (c) or (d);
[54229] (f) a nucleic acid molecule which hybridizes with a nucleic acid molecule of (a), (b), (c), (d) or (e) under stringent hybridization conditions;
[54230] (g) a nucleic acid molecule encoding a polypeptide which can be isolated with the aid of monoclonal or polyclonal antibodies made against a polypeptide encoded by one of the nucleic acid molecules of (a), (b), (c), (d), (e) or (f);
[54231] (h) a nucleic acid molecule encoding a polypeptide comprising the consensus sequence or one or more polypeptide motifs as shown in column 8 of Table IV, application no.9;
[54232] (i) a nucleic acid molecule encoding a polypeptide having the activity represented by a respective protein as depicted in column 5 of Table II, application no. 9;
[54233] (j) a nucleic acid molecule which comprises a polynucleotide, which is obtained by amplifying a cDNA library or a genomic library using the primers as depicted in column 8 of Table III, application no. 9; and
[54234] (k) a nucleic acid molecule which is obtainable by screening a suitable nucleic acid library, especially a cDNA library and/or a genomic library, under stringent hybridization conditions with a probe comprising a complementary sequence of a nucleic acid molecule of (a), (b), (c), (d), (e), (f), (g), (h), (i) or (j) or with a fragment thereof, having at least 15 nt, preferably 20 nt, 30 nt, 50 nt, 100 nt, 200 nt, 500 nt, 1000 nt, 1500 nt, 2000 nt or 3000 nt of a nucleic acid molecule complementary to a nucleic acid molecule sequence characterized in (a), (b), (c), (d), (e), (f), (g), (h), (i) or (j);
[54235] or a nucleic acid molecule comprising a sequence which is complementary thereto;
[54236] in a non-human organism or a part thereof, preferably a microorganism, a plant cell, a plant or a part thereof, as compared to a corresponding non-transformed wild type non-human organism or a part thereof; and
[54237] (B) growing the non-human organism or a part thereof under conditions which permit the production of linolenic acid or a composition comprising linolenic acid in said non-human organism or in the culture medium surrounding said non-human organism.

[54238] Item 3. A process of items 1 or 2, comprising of recovering linolenic acid in its free or bound form.

[54239] Item 4. The process of any one of items 1 to 3, comprising the following steps:
[54240] (a) selecting a non-human organism or a part thereof expressing a polypeptide encoded by the nucleic acid molecule characterized in item 2;
[54241] (b) mutagenizing the selected non-human organism or the part thereof;
[54242] (c) comparing the activity or the expression level of said polypeptide in the mutagenized non-human organism or the part thereof with the activity or the expression of said polypeptide of the selected non-human organisms or the part thereof;
[54243] (d) selecting the mutated non-human organisms or parts thereof, which comprise an increased activity or expression level of said polypeptide compared to the selected non-human organism or the part thereof;
[54244] (e) optionally, growing and cultivating the non-human organisms or the parts thereof;
[54245] and
[54246] (f) recovering, and optionally isolating, the free or bound linolenic acid produced by the selected mutated non-human organisms or parts thereof.

[54247] Item 5. The process of any one of items 1 to 4 wherein the activity of said protein or the expression of said nucleic acid molecule is increased or generated transiently or stably.

[54248] Item 6. An isolated nucleic acid molecule comprising a nucleic acid molecule selected from the group consisting of:
[54249] (a) a nucleic acid molecule encoding a polypeptide shown in Table II, application no. 9, column 5 or 8, preferably shown in Table II B, application no. 9, column 8, or a homolog or a fragment thereof;
[54250] (b) a nucleic acid molecule shown in Table I, application no. 9, column 5 or 8, preferably shown in Table I B, application no. 9, column 8, preferably the coding region thereof, or a homolog or a fragment thereof;
[54251] (c) a nucleic acid molecule, which, as a result of the degeneracy of the genetic code, can be derived from a polypeptide sequence depicted in column 5 or 8 of Table II, application no. 9, preferably in column 8 of Table II B, application no. application no.;
[54252] (d) a nucleic acid molecule having at least 30% identity, preferably at least 40%, 50%, 60%, 70%, 75%, 80%, 85%, 90%, 95%, 96%, 97%, 98%, 99%, 99.5%, with the nucleic acid molecule sequence of a polynucleotide comprising the nucleic acid molecule shown in column 5 or 8 of Table I, application no. 3, preferably shown in column 8 of Table I B, application no. 9, preferably the coding region thereof;
[54253] (e) a nucleic acid molecule encoding a polypeptide having at least 30% identity, preferably at least 40%, 50% 60%, 70%, 75%, 80%, 85%, 90%, 95%, 96%, 97%, 98%, 99%, 99.5%, identity with the amino acid sequence of the polypeptide encoded by the nucleic acid molecule of (a), (b), (c) or (d);
[54254] (f) a nucleic acid molecule which hybridizes with a nucleic acid molecule of (a), (b), (c), (d) or (e) under stringent hybridisation conditions;
[54255] (g) a nucleic acid molecule encoding a polypeptide which can be isolated with the aid of monoclonal or polyclonal antibodies made against a polypeptide encoded by one of the nucleic acid molecules of (a), (b), (c), (d), (e) or (f);
[54256] (h) a nucleic acid molecule encoding a polypeptide comprising the consensus sequence or one or more polypeptide motifs as shown in column 8 of Table IV, application no. 9;
[54257] (i) a nucleic acid molecule encoding a polypeptide having the activity represented by a respective protein as depicted in column 5 of Table II, application no. 9;
[54258] (j) a nucleic acid molecule comprising a polynucleotide which is obtained by amplifying a cDNA library or a genomic library using the primers in Table III, application no. 9, column 8;
[54259] and
[54260] (k) nucleic acid molecule which is obtainable by screening a suitable nucleic acid library, especially a cDNA library and/or a genomic library, under stringent hybridization conditions with a probe comprising one of the sequences of the nucleic acid molecule of (a), (b), (c), (d), (e), (f), (g), (h), (i) or (j) or with a fragment of at least 15 nt, preferably 20 nt, 30 nt, 50 nt, 100 nt, 200 nt,500 nt, 1000 nt, 1500 nt, 2000 nt or 3000 nt of the nucleic acid molecule characterized in (a), (b), (c), (d), (e), (f), (g), (h), (i) or (i),
[54261] or a nucleic acid molecule comprising a sequence which is complementary thereto.

[54262] Item 7. A nucleic acid construct which confers the expression of the nucleic acid molecule as defined in item 6, comprising one or more regulatory elements.

[54263] Item 8. An expression cassette comprising
[54264] (a) a promoter, preferably selected from the group consisting of Big35S, PCUbi, Super and USP;
[54265] (b) a nucleic acid molecule as defined in item 6.

[54266] Item 9. A vector comprising the nucleic acid molecule as defined in item 6 or the nucleic acid construct as claimed in item 7 or the expression cassette as claimed in item 8.

[54267] Item 10. A host cell or a plant organelle, which has been transformed with the vector as claimed in item 9 or the nucleic acid molecule as defined in item 6 or the nucleic acid construct as claimed in item 7 or the expression cassette as claimed in item 8.

[54268] Item 11. The host cell of item 10, which is a plant cell or a microorganism.

[54269] Item 12. A process for producing a polypeptide, wherein the polypeptide is expressed in a host cell as claimed in item 10 or 11.

[54270] Item 13. A polypeptide produced by the process as claimed in item 12 or encoded by the nucleic acid molecule as defined in item 6.

[54271] Item 14. An antibody, which binds specifically to the polypeptide as claimed in item 13.

[54272] Item 15. A plant tissue, propagation material, harvested material or a plant comprising the host cell as claimed in item 10 or 11.

[54273] Item 16. A process for the identification of a compound conferring an increase in linolenic acid production in a non-human organism, comprising the steps:
[54274] (a) culturing a plant cell or tissue or microorganism or maintaining a plant expressing the polypeptide encoded by the nucleic acid molecule as defined in item 6 conferring an increase in the amount of linolenic acid in a non-human organism or a part thereof and a readout system capable of interacting with the polypeptide under suitable conditions which permit the interaction of the polypeptide with said readout system in the presence of a compound or a sample comprising a plurality of compounds and capable of providing a detectable signal in response to the binding of a compound to said polypeptide under conditions which permit the expression of said readout system and of the polypeptide encoded by the nucleic acid molecule of item 6 conferring an increase in the amount of linolenic acidin a non-human organism or a part thereof;
[54275] (b) identifying if the compound is an effective agonist by detecting the presence or absence or increase of a signal produced by said readout system.

[54276] Item 17. A method for the production of an agricultural composition comprising the steps of the method of item 16 and formulating the compound identified in item 16 in a form acceptable for an application in agriculture.

[54277] Item 18. A composition comprising the nucleic acid molecule as defined in item 6, the polypeptide as claimed in item 13, the nucleic acid construct as claimed in item 7, the expression cassette as claimed in item 8, the vector as claimed in item 9, the compound as claimed in item 16, the antibody as claimed in item 14, and optionally an agricultural acceptable carrier.

[54278] Item 19. Use of the nucleic acid molecule as defined in item 6 for the identification of a nucleic acid molecule conferring an increase in linolenic acid after expression.

[54279] Item 20. Cosmetic, pharmaceutical, food or feed composition comprising the nucleic acid molecule as defined in item 6, the polypeptide as claimed in item 13, the nucleic acid construct as claimed in item 7, the expression cassette as claimed in item 8, the vector as claimed in item 9, the antibody as claimed in item 14 , the plant or a part thereof, or plant tissue as claimed in item 15, the harvested material or as claimed in item 15 or the host cell of item as claimed in items 10 or 11.

[54280] Item 21. Use of the nuclei acid molecule as defined in item 6, the polypeptide as claimed in item 13, the nucleic acid construct as claimed in item 7, the expression cassette as claimed in item 8, the vector as claimed in claim 9, the plant or plant tissue as claimed in item 15, or the host cell of item 10 to 11 for the production of plant resistant to a herbicide inhibiting the production of linolenic acid.

[54281] [0483.1.8.9] to [0494.1.9.9] for the disclosure of these paragraphs see [0483.1.8.8] to [0494.1.9.8] above.

### Example 11a

### PCR Amplification of the Sequences

[54282] Unless otherwise specified, standard methods as described in Sambrook et al., Molecular Cloning: A laboratory manual, Cold Spring Harbor 1989, Cold Spring Harbor Laboratory Press are used.

[54283] The inventive sequences as shown in the respective line in Table I, column 5, preferably the coding region thereof, were amplified by PCR as described in the protocol of the Pfu Ultra, Pfu Turbo or Herculase DNA polymerase (Stratagene). The composition for the protocol of the Pfu Ultra, Pfu Turbo or Herculase DNA polymerase was as follows: 1× PCR buffer (Stratagene), 0.2 mM of each dNTP, 100 ng genomic DNA of Saccharomyces cerevisiae (strain S288C; Research Genetics, Inc., now Invitrogen), Escherichia coli (strain MG1655; E. coli Genetic Stock Center), Synechocystis sp. (strain PCC6803), Azotobacter vinelandii (strain N.R. Smith,16), Thermus thermophilus (HB8) or 50 ng cDNA from various tissues and development stages of Arabidopsis thaliana (ecotype Columbia), Physcomitrella patens, Glycine max (variety Resnick), Brassica napus, Oryza sativa or Zea mays (variety B73, Mo17, A188), 50 pmol forward primer, 50 pmol reverse primer, with or without 1 M Betaine, 2.5 u Pfu Ultra, Pfu Turbo or Herculase DNA polymerase. The amplification cycles were as follows: 1 cycle of 2-3 minutes at 94-95° C., then 25-36 cycles with 30-60 seconds at 94-95° C., 30-45 seconds at 50-60° C. and 210-480 seconds at 72° C., followed by 1 cycle of 5-10 minutes at 72° C., then 4-16° C.—preferably for Saccharomyces cerevisiae, Escherichia coli, Synechocystis sp., Azotobacter vinelandii, Thermus thermophilus.

[54284] In case of Arabidopsis thaliana, Brassica napus, Glycine max, Oryza sativa, Physcomitrella patens, Zea mays the amplification cycles were as follows: 1 cycle with 30 seconds at 94° C., 30 seconds at 61° C., 15 minutes at 72° C., then 2 cycles with 30 seconds at 94° C., 30 seconds at 60° C., 15 minutes at 72° C., then 3 cycles with 30 seconds at 94° C., 30 seconds at 59° C., 15 minutes at 72° C., then 4 cycles with 30 seconds at 94° C., 30 seconds at 58° C., 15 minutes at 72° C., then 25 cycles with 30 seconds at 94° C., 30 seconds at 57° C., 15 minutes at 72° C., then 1 cycle with 10 minutes at 72° C., then finally 4-16° C.

[54285] RNAs were generated with the RNeasy Plant Kit according to the standard protocol (Qiagen) and Superscript II Reverse Transkriptase was used to produce double stranded cDNA according to the standard protocol (Invitrogen).

[54286] ORF specific primer pairs for the genes to be expressed are shown in the respective line in Table III, column 8. The following adapter sequences were added to Saccharomyces cerevisiae ORF specific primers (see Table III) for cloning purposes:

SEQ ID NO: 20

| | | |
|---|---|---|
| i) | foward primer: | 5′-GGAATTCCAGCTGACCACC-3′ |

SEQ ID NO: 21

| | | |
|---|---|---|
| ii) | reverse primer: | 5′-GATCCCCGGGAATTGCCATG-3′ |

[54287] These adaptor sequences allow cloning of the ORF into the various vectors containing the Resgen adaptors, see table column E of Table c.

[54288] The following adapter sequences were added to Saccharomyces cerevisiae, Escherichia coli, Synechocystis sp., Azotobacter vinelandii, Thermus thermophilus, Arabidopsis thaliana, Brassica napus, Glycine max, Oryza sativa , Physcomitrella patens, or Zea mays ORF specific primers for cloning purposes:

| SEQ ID NO: 22 | | |
|---|---|---|
| iii) | forward primer: | 5′-TTGCTCTTCC- 3′ |
| SEQ ID NO: 23 | | |
| iiii) | reverse primer: | 5′-TTGCTCTTCG-3′ |

[54289] The adaptor sequences allow cloning of the ORF into the various vectors containing the Colic adaptors, see table column E of Table c.

[54290] Therefore for amplification and cloning of Saccharomyces cerevisiae SEQ ID NO: 90165, a primer consisting of the adaptor sequence i) and the ORF specific sequence SEQ ID NO: 90175 and a second primer consisting of the adaptor sequence ii) and the ORF specific sequence SEQ ID NO: 90176 were used.

[54291] For amplification and cloning of Escherichia coli SEQ ID NO: 8920, a primer consisting of the adaptor sequence iii) and the ORF specific sequence SEQ ID NO: 8930 and a second primer consisting of the adaptor sequence iiii) and the ORF specific sequence SEQ ID NO: 8931 were used.

[54292] For amplification and cloning of Synechocystis sp. SEQ ID NO: 11471, a primer consisting of the adaptor sequence iii) and the ORF specific sequence SEQ ID NO: 11983 and a second primer consisting of the adaptor sequence iiii) and the ORF specific sequence SEQ ID NO: 11984 were used.

[54293] For amplification and cloning of Arabidopsis thaliana SEQ ID NO: 1061, a primer consisting of the adaptor sequence iii) and the ORF specific sequence SEQ ID NO: 1293 and a second primer consisting of the adaptor sequence iiii) and the ORF specific sequence SEQ ID NO: 1294 were used.

[54294] For amplification and cloning of Azotobacter vinelandii SEQ ID NO: 26196, a primer consisting of the adaptor sequence iii) and the ORF specific sequence SEQ ID NO: 26428 and a second primer consisting of the adaptor sequence iiii) and the ORF specific sequence SEQ ID NO: 26429 were used.

[54295] For amplification and cloning of Glycine max SEQ ID NO: 10811, a primer consisting of the adaptor sequence iii) and the ORF specific sequence SEQ ID NO: 11207 and a second primer consisting of the adaptor sequence iiii) and the ORF specific sequence SEQ ID NO: 11208 were used.

[54296] For amplification and cloning of Thermus thermophilus SEQ ID NO: 61553, a primer consisting of the adaptor sequence iii) and the ORF specific sequence SEQ ID NO: 61719 and a second primer consisting of the adaptor sequence iiii) and the ORF specific sequence SEQ ID NO: 61720 were used.

[54297] Following these examples every sequence disclosed in Table I, preferably column 5, especially the coding region thereof can be cloned by fusing the adaptor sequences to the respective specific primers sequences as disclosed in Table III, column 8 using the respective vectors shown in Table c.

[54298] [0496.1.8.9] to [0499.1.8.9] for the disclosure of these paragraphs see [0496.1.8.8] to [0499.1.8.8] above.

### Example 11e

### Cloning of Inventive Sequences as Shown in Table I, Column 5 in the Different Expression Vectors

[54299] For cloning of for example SEQ ID NO: 8920 from Escherichia coli or any other ORF from Escherichia coli, Synechocystis sp., Azotobacter vinelandii, Thermus thermophilus, Arabidopsis thaliana, or Glycine max the vector DNA was treated with the restriction enzymes Pacl and Ncol following the standard protocol (MBI Fermentas).

[54300] For cloning for example the ORFs of SEQ ID NO: 90165 from Saccharomyces cerevisiae or any other ORF from Saccharomyces cerevisiae into vectors containing the Resgen adaptor sequence the respective vector DNA was treated with the restriction enzyme Ncol.

[54301] For cloning of for example ORFs SEQ ID NO: 119408 from Saccharomyces cerevisiae or any other ORF from Saccharomyces cerevisiae into vectors containing the Colic adaptor sequence, the respective vector DNA was treated with the restriction enzymes Pacl and Ncol following the standard protocol (MBI Fermentas).

[54302] In all cases the reaction was stopped by inactivation at 70° C. for 20 minutes and purified over QlAquick or NucleoSpin Extract II columns following the standard protocol (Qiagen or Macherey-Nagel).

[54303] Then the PCR-product representing the amplified ORF with the respective adapter sequences and the vector DNA were treated with T4 DNA polymerase according to the standard protocol (MBI Fermentas) to produce single stranded overhangs with the parameters 1 unit T4 DNA polymerase at 37° C. for 2-10 minutes for the vector and 1-2 u T4 DNA polymerase at 15-17° C. for 10-60 minutes for the PCR product representing SEQ ID NO: 8920.

[54304] The reaction was stopped by addition of high-salt buffer and purified over QlAquick or NucleoSpin Extract II columns following the standard protocol (Qiagen or Macherey-Nagel).

[54305] According to this example the skilled person is able to clone all sequences disclosed in Table I, preferably column 5 or column 8, especially the coding region thereof.

[54306] Approximately 30-60 ng of prepared vector and a defined amount of prepared amplificate were mixed and hybridized at 65° C. for 15 minutes followed by 37° C. 0.1 ° C/1 seconds, followed by 37° C. 10 minutes, followed by 0.1 ° C/1 seconds, then 4-10 ° C.

[54307] The ligated constructs were transformed in the same reaction vessel by addition of competent E. coli cells (strain DHSalpha) and incubation for 20 minutes at 1° C. followed by a heat shock for 90 seconds at 42° C. and cooling to 1-4° C. Then, complete medium (SOC) was added and the mixture was incubated for 45 minutes at 37° C. The entire mixture was subsequently plated onto an agar plate with 0.05 mg/ml kanamycin and incubated overnight at 37° C.

[54308] The outcome of the cloning step was verified by amplification with the aid of primers which bind upstream and downstream of the integration site, thus allowing the amplification of the insertion. The amplifications were carried out as described in the protocol of Taq DNA polymerase (Gibco-BRL).

[54309] The amplification cycles were as follows:

[54310] 1 cycle of 1-5 minutes at 94° C., followed by 35 cycles of in each case 15-60 seconds at 94° C., 15-60 seconds at 50-66° C. and 5-15 minutes at 72° C., followed by 1 cycle of 10 minutes at 72° C., then 4-16° C.

[54311] Several colonies were checked, but only one colony for which a PCR product of the expected size was detected was used in the following steps.

[54312] A portion of this positive colony was transferred into a reaction vessel filled with complete medium (LB) supplemented with kanamycin and incubated overnight at 37° C.

[54313] The plasmid preparation was carried out as specified in the Qiaprep or NucleoSpin Multi-96 Plus standard protocol (Qiagen or Macherey-Nagel).

[54314] [501.1.8.9] to [0503.1.8.9] for the disclosure of these paragraphs see [0501.1.8.8] to [0503.1.8.8] above. Table d showing results of plant analyses

TABLE d

| SeqID | Target | Locus | Metabolite | Source | Promotor | Method | Min | Max |
|---|---|---|---|---|---|---|---|---|
| 17451 | non- | At1g07430 | linolenic | ARA_LEAF | p-PcUBI | GC | 12 | 52 |
| | targeted | | acid | | | | | |
| 1061 | non- | At1g68320 | linolenic | ARA_LEAF | p-PcUBI | GC | 15 | 74 |
| | targeted | | acid | | | | | |
| 19419 | non- | At1g72770 | linolenic | ARA_LEAF | p-PcUBI | GC | 21 | 49 |
| | targeted | | acid | | | | | |
| 113714 | plastidic | At2g36580 | linolenic | ARA_LEAF | p-PcUBI | GC | 12 | 22 |
| | | | acid | | | | | |
| 1623 | non- | At2g45420 | linolenic | ARA_LEAF | p-PcUBI | GC | 13 | 27 |
| | targeted | | acid | | | | | |
| 68657 | non- | At3g02990 | linolenic | ARA_LEAF | p-PcUBI | GC | 14 | 39 |
| | targeted | | acid | | | | | |
| 2935 | non- | At3g62950 | linolenic | ARA_LEAF | p-PcUBI | GC | 14 | 36 |
| | targeted | | acid | | | | | |
| 3279 | non- | At4g15670 | linolenic | ARA_LEAF | p-PcUBI | GC | 13 | 67 |
| | targeted | | acid | | | | | |
| 24232 | non- | At4g18880 | linolenic | ARA_LEAF | p-PcUBI | GC | 11 | 18 |
| | targeted | | acid | | | | | |
| 68849 | non- | At4g26080 | linolenic | ARA_LEAF | p-PcUBI | GC | 14 | 32 |
| | targeted | | acid | | | | | |
| 4102 | non- | At4g33040 | linolenic | ARA_LEAF | p-PcUBI | GC | 15 | 43 |
| | targeted | | acid | | | | | |
| 24438 | non- | At5g03720 | linolenic | ARA_LEAF | p-PcUBI | GC | 13 | 35 |
| | targeted | | acid | | | | | |
| 4904 | non- | At5g18600 | linolenic | ARA_LEAF | p-PcUBI | GC | 13 | 35 |
| | targeted | | acid | | | | | |
| 5318 | non- | At5g57050 | linolenic | ARA_LEAF | p-PcUBI | GC | 15 | 40 |
| | targeted | | acid | | | | | |
| 25498 | non- | At5g59220 | linolenic | ARA_LEAF | p-PcUBI | GC | 24 | 60 |
| | targeted | | acid | | | | | |
| 26196 | non- | AvinDRAFT_1624 | linolenic | ARA_LEAF | p-PcUBI | GC | 11 | 26 |
| | targeted | | acid | | | | | |
| 114083 | non- | AvinDRAFT_1788 | linolenic | ARA_LEAF | p-PcUBI | GC | 16 | 26 |
| | targeted | | acid | | | | | |
| 28040 | non- | AvinDRAFT_2754 | linolenic | ARA_LEAF | p-PcUBI | GC | 13 | 26 |
| | targeted | | acid | | | | | |
| 29500 | non- | AvinDRAFT_3253 | linolenic | ARA_LEAF | p-PcUBI | GC | 14 | 58 |
| | targeted | | acid | | | | | |
| 111155 | non- | AvinDRAFT_3577 | linolenic | ARA_LEAF | p-PcUBI | GC | 12 | 43 |
| | targeted | | acid | | | | | |
| 31026 | non- | AvinDRAFT_3605 | linolenic | ARA_LEAF | p-PcUBI | GC | 11 | 46 |
| | targeted | | acid | | | | | |
| 114231 | non- | AvinDRAFT_3629 | linolenic | ARA_LEAF | p-PcUBI | GC | 15 | 47 |
| | targeted | | acid | | | | | |
| 102941 | non- | AvinDRAFT_4847 | linolenic | ARA_LEAF | p-PcUBI | GC | 12 | 26 |
| | targeted | | acid | | | | | |
| 32648 | non- | AvinDRAFT_5467 | linolenic | ARA_LEAF | p-PcUBI | GC | 21 | 54 |
| | targeted | | acid | | | | | |
| 118238 | plastidic | B0195 | linolenic | ARA_LEAF | p-Super | GC | 14 | 31 |
| | | | acid | | | | | |
| 36299 | plastidic | B0828 | linolenic | ARA_SEED_2 | p-USP | GC | 12 | 28 |
| | | | acid | | | | | |
| 76032 | plastidic | B1065 | linolenic | ARA_LEAF | p-Super | GC | 15 | 48 |
| | | | acid | | | | | |
| 118371 | non- | B1093 | linolenic | ARA_LEAF | p-Super | GC | 11 | 25 |
| | targeted | | acid | | | | | |
| 114552 | plastidic | B1095 | linolenic | ARA_LEAF | p-Super | GC | 12 | 47 |
| | | | acid | | | | | |
| 112111 | non- | B1234 | linolenic | ARA_LEAF | p-Super | GC | 11 | 30 |
| | targeted | | acid | | | | | |
| 119135 | non- | B1248 | linolenic | ARA_LEAF | p-Super | GC | 12 | 19 |
| | targeted | | acid | | | | | |
| 37573 | non- | B1280 | linolenic | ARA_LEAF | p-Super | GC | 13 | 28 |
| | targeted | | acid | | | | | |
| 38226 | non- | B1330 | linolenic | ARA_LEAF | p-Super | GC | 15 | 29 |
| | targeted | | acid | | | | | |
| 115056 | non- | B1470 | linolenic | ARA_LEAF | p-Super | GC | 12 | 30 |
| | targeted | | acid | | | | | |
| 38300 | non- | B1597 | linolenic | ARA_LEAF | p-Super | GC | 17 | 33 |
| | targeted | | acid | | | | | |
| 115064 | plastidic | B1611 | linolenic | ARA_LEAF | p-Super | GC | 13 | 43 |
| | | | acid | | | | | |
| 38345 | non- | B1627 | linolenic | ARA_LEAF | p-Super | GC | 11 | 19 |
| | targeted | | acid | | | | | |
| 78753 | non- | B1670 | linolenic | ARA_LEAF | p-Super | GC | 12 | 30 |
| | targeted | | acid | | | | | |
| 78771 | non- | B1672 | linolenic | ARA_LEAF | p-Super | GC | 12 | 26 |
| | targeted | | acid | | | | | |
| 78953 | non- | B1837 | linolenic | ARA_LEAF | p-Super | GC | 14 | 32 |
| | targeted | | acid | | | | | |
| 8920 | non- | B2032 | linolenic | ARA_LEAF | p-Super | GC | 12 | 90 |
| | targeted | | acid | | | | | |
| 39002 | non- | B2107 | linolenic | ARA_LEAF | p-Super | GC | 13 | 31 |
| | targeted | | acid | | | | | |
| 39237 | non- | B2399 | linolenic | ARA_LEAF | p-Super | GC | 30 | 52 |
| | targeted | | acid | | | | | |
| 115628 | non- | B2439 | linolenic | ARA_LEAF | p-Super | GC | 14 | 33 |
| | targeted | | acid | | | | | |
| 40329 | non- | B2474 | linolenic | ARA_LEAF | p-Super | GC | 12 | 38 |
| | targeted | | acid | | | | | |
| 40665 | non- | B2613 | linolenic | ARA_LEAF | p-Super | GC | 13 | 50 |
| | targeted | | acid | | | | | |
| 115655 | non- | B2682 | linolenic | ARA_LEAF | p-Super | GC | 16 | 25 |
| | targeted | | acid | | | | | |
| 115719 | non- | B2790 | linolenic | ARA_LEAF | p-Super | GC | 18 | 31 |
| | targeted | | acid | | | | | |
| 115791 | plastidic | B2836 | linolenic | ARA_LEAF | p-Super | GC | 14 | 38 |
| | | | acid | | | | | |
| 116110 | non- | B3379 | linolenic | ARA_LEAF | p-Super | GC | 11 | 26 |
| | targeted | | acid | | | | | |
| 94380 | non- | B3442 | linolenic | ARA_LEAF | p-Super | GC | 12 | 33 |
| | targeted | | acid | | | | | |
| 119181 | plastidic | B3534 | linolenic | ARA_LEAF | p-Super | GC | 12 | 29 |
| | | | acid | | | | | |
| 10726 | non- | B3823 | linolenic | ARA_LEAF | p-Super | GC | 11 | 29 |
| | targeted | | acid | | | | | |
| 119209 | non- | B4023 | linolenic | ARA_LEAF | p-Super | GC | 13 | 24 |
| | targeted | | acid | | | | | |
| 10811 | non- | GM02LC12622 | linolenic | ARA_LEAF | p-PcUBI | GC | 13 | 42 |
| | targeted | | acid | | | | | |
| 46751 | non- | GM02LC19289 | linolenic | ARA_LEAF | p-PcUBI | GC | 16 | 89 |
| | targeted | | acid | | | | | |
| 94741 | plastidic | Sll0374 | linolenic | ARA_LEAF | p-PcUBI | GC | 15 | 18 |
| | | | acid | | | | | |
| 112661 | mitochondrial | Sll0745 | linolenic | ARA_LEAF | p-PcUBI | GC | 13 | 29 |
| | | | acid | | | | | |
| 52634 | mitochondrial | Sll1031 | linolenic | ARA_LEAF | p-PcUBI | GC | 12 | 46 |
| | | | acid | | | | | |
| 85723 | mitochondrial | Sll1032 | linolenic | ARA_LEAF | p-PcUBI | GC | 12 | 30 |
| | | | acid | | | | | |
| 53878 | mitochondrial | Sll1443 | linolenic | ARA_LEAF | p-PcUBI | GC | 14 | 33 |
| | | | acid | | | | | |
| 95047 | non- | Sll1498 | linolenic | ARA_LEAF | p-PcUBI | GC | 14 | 30 |
| | targeted | | acid | | | | | |
| 86447 | plastidic | Sll1848 | linolenic | ARA_LEAF | p-PcUBI | GC | 17 | 23 |
| | | | acid | | | | | |
| 11471 | mitochondrial | Sll1917 | linolenic | ARA_LEAF | p-PcUBI | GC | 12 | 24 |
| | | | acid | | | | | |
| 55385 | mitochondrial | Sll1920 | linolenic | ARA_LEAF | p-PcUBI | GC | 14 | 34 |
| | | | acid | | | | | |
| 11990 | non- | Slr0338 | linolenic | ARA_LEAF | p-PcUBI | GC | 12 | 25 |
| | targeted | | acid | | | | | |
| 56153 | plastidic | Slr0597 | linolenic | ARA_LEAF | p-PcUBI | GC | 13 | 36 |
| | | | acid | | | | | |
| 119222 | mitochondrial | Slr0949 | linolenic | ARA_LEAF | p-PcUBI | GC | 13 | 26 |
| | | | acid | | | | | |
| 116341 | mitochondrial | Slr1099 | linolenic | ARA_LEAF | p-PcUBI | GC | 12 | 41 |
| | | | acid | | | | | |
| 116460 | mitochondrial | Slr1250 | linolenic | ARA_LEAF | p-PcUBI | GC | 13 | 26 |
| | | | acid | | | | | |
| 58324 | non- | Slr1312 | linolenic | ARA_LEAF | p-PcUBI | GC | 11 | 19 |
| | targeted | | acid | | | | | |
| 12140 | mitochondrial | Slr1791 | linolenic | ARA_LEAF | p-PcUBI | GC | 12 | 25 |
| | | | acid | | | | | |
| 12341 | mitochondrial | Slr2072 | linolenic | ARA_LEAF | p-PcUBI | GC | 18 | 43 |
| | | | acid | | | | | |
| 61553 | non- | TTC0917 | linolenic | ARA_LEAF | p-PcUBI | GC | 15 | 105 |
| | targeted | | acid | | | | | |
| 62079 | non- | TTC1386 | linolenic | ARA_LEAF | p-PcUBI | GC | 16 | 24 |
| | targeted | | acid | | | | | |
| 119347 | plastidic | Ybr092c | linolenic | ARA_LEAF | p-Super | GC | 12 | 25 |
| | | | acid | | | | | |
| 119408 | non- | Ydl022w | linolenic | ARA_SEED_2 | p-PcUBI | GC | 13 | 34 |
| | targeted | | acid | | | | | |
| 120045 | non- | Ydl126c | linolenic | ARA_LEAF | Big35S | GC | 16 | 16 |
| | targeted | | acid | | | | | |
| 63544 | plastidic | Ydr046c | linolenic | ARA_LEAF | p-Super | GC | 17 | 22 |
| | | | acid | | | | | |
| 14706 | plastidic | Ydr131c | linolenic | ARA_LEAF | p-Super | GC | 19 | 38 |
| | | | acid | | | | | |
| 120241 | plastidic | Ydr339c | linolenic | ARA_LEAF | p-Super | GC | 15 | 18 |
| | | | acid | | | | | |
| 90165 | non- | Ydr507c | linolenic | ARA_LEAF | Big35S | GC | 11 | 45 |
| | targeted | | acid | | | | | |
| 120309 | non- | Yfl053w | linolenic | ARA_LEAF | Big35S | GC | 11 | 41 |
| | targeted | | acid | | | | | |
| 120436 | plastidic | Ygl039w | linolenic | ARA_LEAF | p-PcUBI | GC | 17 | 26 |
| | | | acid | | | | | |
| 64964 | plastidic | Yjl073w | linolenic | ARA_LEAF | p-Super | GC | 15 | 27 |
| | | | acid | | | | | |
| 91958 | plastidic | Ymr013c | linolenic | ARA_LEAF | p-Super | GC | 13 | 17 |
| | | | acid | | | | | |
| 117495 | non- | Ynl064c | linolenic | ARA_LEAF | Big35S | GC | 13 | 24 |
| | targeted | | acid | | | | | |
| 118212 | plastidic | Ypl271w | linolenic | ARA_LEAF | p-Super | GC | 13 | 27 |
| | | | acid | | | | | |
| 16883 | plastidic | 59582753_SOYBEAN | linolenic | ARA_LEAF | p-PcUBI | GC | 12 | 54 |
| | | | acid | | | | | |

[54315] Column 1 shows the SEQ ID NO, Column 2 shows the expression type (targeted or non-targeted), Column 3 shows the “gene name” (locus), Column 4 shows the metabolite analyzed, Column 5 indicates the A. thaliana source tissue analyzed, Column 6 indicates the used promoter for expression, Column 7 indicates the analytical method. Columns 8 and 9 show the minimum and the maximum increase of the analyzed metabolite (in percent) in comparison to the wild type (=ratio_by_weight, given as percent increase).

[54316] When the analyses were repeated independently, all results proved to be significant.

[54317] [0505.1.8.9] to [0515.1.8.9] for the disclosure of these paragraphs see [0505.1.8.8] to [0515.1.8.8] above.

[54318] In a further embodiment, the present invention relates in paragraphs [0000.1.8.10.] to [0514.1.8.10.] to a further process for the production of the fine chemical stearic acid as defined below and corrresponding embodiments as described herein as follows.

[54319] for the disclosure of this paragraph see [0001.1.8.8] above.

[54320] Fatty acids and triglycerides have numerous applications in the food and feed industry, in cosmetics and in the drug sector. Depending on whether they are free saturated or unsaturated fatty acids or triglycerides with an increased content of saturated or unsaturated fatty acids, they are suitable for the most varied applications; thus, for example, polyunsaturated fatty acids (=PUFAs) are added to infant formula to increase its nutritional value. The various fatty acids and triglycerides are mainly obtained from microorganisms such as fungi or from oil-producing plants including phytoplankton and algae, such as soybean, oilseed rape, sunflower and others, where they are usually obtained in the form of their triacylglycerides.

[54321] Stearic acid (=octadecanoic acid) is one of the many useful types of saturated fatty acids that comes from many animal and vegetable fats and oils. It is a waxy solid that melts at around 70° C. Commenly stearic acid is either prepared by treating animal fat with water at a high pressure and temperature or starting with vegetable oils by hydrogenation of said oils. It is useful as an ingredient in making candles, soaps, and cosmetics and for softening rubber.

[54322] Principally microorganisms such as Mortierella or oil producing plants such as soybean, rapeseed or sunflower or algae such as Crytocodinium or Phaeodactylum are a common source for oils containing fatty acids, where they are usually obtained in the form of their triacyl glycerides. Alternatively, they are obtained advantageously from animals, such as fish.

[54323] The free fatty acids are prepared advantageously by hydrolysis with a strong base such as potassium or sodium hydroxide.

[54324] for the disclosure of this paragraph see [0005.1.8.8] above.

[54325] Unlike most saturated fats, stearic acid does not seem to increase cholesterol levels in the blood, because liver enzymes convert it to an unsaturated fat during digestion.

[54326] Stearic acid is the most common one of the long-chain fatty acids. It is found in many foods, such as beef fat, and cocoa butter. It is widely used as mentioned above as a lubricant, in soaps, cosmetics, food packaging, deodorant sticks, toothpastes, and as a softener in rubber.

[54327] Encouraging research shows that stearic acid, one of the components of the fat found in the cocoa butter of chocolate, may have some positive effects on platelets. The mechanism believed to be responsible for the potential platelet activation by stearic acid involves Arachidonic metabolism, which includes thromboxane A2, a potent aggregating compound, and prostaglandin I2, a potent anti-aggregating compound.

[54328] As described above, fatty acids are used in a lot of different applications, for example in cosmetics, pharmaceuticals and in feed and food.

[54329] Therefore improving the productivity of such fatty acids and improving the quality of foodstuffs and animal feeds is an important task of the different industries.

[54330] To ensure a high productivity of certain fatty acids in plants or microorganism, it is necessary to manipulate the natural biosynthesis of fatty acids in said organism.

[54331] Accordingly, there is still a great demand for new and more suitable genes which encode enzymes which participate in the biosynthesis of fatty acids and make it possible to produce certain fatty acids specifically on an industrial scale without unwanted byproducts forming. In the selection of genes for biosynthesis two characteristics above all are particularly important. On the one hand, there is as ever a need for improved processes for obtaining the highest possible contents of fatty acids on the other hand as less as possible byproducts should be produced in the production process. It is an object of the present invention to develop an inexpensive process for the synthesis of stearic acid. Stearic acid is one of the fatty acids , which are most frequently limiting.

[54332] for the disclosure of this paragraph see [0013.1.8.8] above.

[54333] Accordingly, in a first embodiment, the invention relates to a process for the production of at least one fine chemical selected from the group consisting of: stearic acid, or, in other words, of the “fine chemical” or “fine chemical of the invention”.

[54334] The terms “fine chemical of the invention”, “fine chemical” or “the fine chemical” are used herein equally and relate in context of the paragraphs or sections [0014.1.10.10] to [0514.1.8.10] essentially to the metabolite or the metabolites indicated in column 7, application no. 10 of Tables I, II and IV in the respective line.

[54335] Further, the term “in context of any of the paragraphs [0014.1.10.10] to [0514.1.8.10]” as used herein means that for any of said paragraphs [0014.1.10.10] to [0514.1.8.10] the term “the fine chemical” is understood to follow the definition of paragraphs or sections [0014.1.10.10] and [0015.1.10.10], independently whether it refers to any other paragraph or not and whether the reference recites the term “fine chemical” in an other context.

[54336] Thus, in cases where one or more paragraphs or sections are incorporated by reference into any of the present paragraphs [0014.1.10.10] to [0514.1.8.10], e.g. by usage of the term “see paragraph” or the term “for the disclosure of this paragraph see the disclosure of paragraph” or the term “incorporated by reference” or a corresponding term, the incorporated paragraph, section or term “the fine chemical” is also understood to have the meaning according to the definition of paragraph [0014.1.10.10] and [0015.1.10.10].

[54337] Accordingly, in one embodiment, the term “fine chemical of the invention”, “fine chemical” or “the fine chemical” as used herein (alone or in combination, like in FCRP) means “stearic acid in context of the nucleic acid or polypeptide sequences listed in the respective same line of any one of Tables I to IV of application no. 10 and indicating in column 7 the metabolite “stearic acid”.

[54338] In one embodiment, the term stearic acid or the term “fine chemical” mean in context of the paragraphs or sections [0014.1.10.10] to [0514.1.8.10] at least one chemical compound with an activity of the above mentioned stearic acid, respectively.

[54339] Accordingly, in one embodiment, the terms “fine chemical of the invention”, “fine chemical” or “the fine chemical” mean in context of any of the paragraphs [0014.1.10.10] to [0514.1.8.10] stearic acid, its tryglycerides, lipids, oils and/or fats in free form or bound form. In a preferred embodiment, the term “the fine chemical” means stearic acidin ftree form or e.g. in form of its tryglycerides, lipids, oils and/or fats. In a preferred embodiment “stearic acid” means stearic acid in free form.

[54340] In one embodiment, the term “the fine chemical” or “the respective fine chemical” mean in context of any of the paragraphs [0014.1.10.10] to [0514.1.8.10] stearic acid. and/or tryglycerides, lipids, oils and/or fats of stearic acid. and its salts, ester, thioester or stearic acid in free form or bound to other compounds such as triglycerides, glycolipids, phospholipids etc. In a preferred embodiment, the term “the fine chemical” means stearic acid., in free form or its salts or bound to triglycerides. Triglycerides, lipids, oils, fats or lipid mixture thereof shall mean any triglyceride, lipid, oil and/or fat containing any bound or free stearic acid for example sphingolipids, phosphoglycerides, lipids, glycolipids such as glycosphingolipids, phospholipids such as phosphatidylethanolamine, phosphatidylcholine, phosphatidylserine, phosphatidylglycerol, phosphatidylinositol or diphosphatidylglycerol, or as monoacylglyceride, diacylglyceride or triacylglyceride or other fatty acid esters such as acetyl-Coenzym A thioester, which contain further saturated or unsaturated fatty acids in the fatty acid molecule.

[54341] In one embodiment, the term “the fine chemical” and the term “the respective fine chemical” mean at least one chemical compound with an activity of the abovementioned fine chemical. Further, the term “in context of any of the paragraphs [0014.1.10.10] to [0514.1.8.10]” as used herein means that for any of said paragraphs [0014.1.10.10] to [0514.1.8.10] the term “the fine chemical” is understood to follow the definition of section [0014.1.10.10] or section [0015.1.10.10], independently whether it refers to any other paragraph or not and whether the reference recites the term “fine chemical” in an other context.

[54342] Thus, in cases where one or more paragraphs or sections are incorporated by reference into any of the present paragraphs [0014.1.10.10] to [0514.1.8.10], e.g. by usage of the term “see paragraph” or the term “for the disclosure of this paragraph see the disclosure of paragraph” or the term “incorporated by reference” or a corresponding term, the incorporated paragraph, section or term “the fine chemical” is also understood to have the meaning according to this definition of this paragraph [0015.1.10.10].

[54343] Further, the term “fine chemicals” as used herein relates to compositions comprising said fine chemical(s), i.e. comprising stearic acid, respectively.

[54344] Accordingly, the present invention relates to a process for the production of stearic acid, which comprises
[54345] (a) increasing or generating one or more activities selected from the group consisting of transcription factor in a non-human organism or a part thereof, preferably a microorganism, a plant cell, a plant or a part thereof, as compared to a corresponding non-transformed wild type non-human organism or a part thereof; and
[54346] (b) growing the non-human organism or a part thereof under conditions which permit the production of stearic acid or a composition comprising stearic acid in said non-human organism or in the culture medium surrounding said non-human organism.

[54347] Accordingly, the present invention relates to a process for the production of stearic acid, which comprises
[54348] (a) increasing or generating one or more activities selected from the group consisting of protein phosphatase in a non-human organism or a part thereof, preferably a microorganism, a plant cell, a plant or a part thereof, as compared to a corresponding non-transformed wild type non-human organism or a part thereof; and
[54349] (b) growing the non-human organism or a part thereof under conditions which permit the production of stearic acid or a composition comprising stearic acid in said non-human organism or in the culture medium surrounding said non-human organism.

[54350] Accordingly, the present invention relates to a process for the production of stearic acid, which comprises
[54351] (a) increasing or generating one or more activities selected from the group consisting of citrate synthase in a non-human organism or a part thereof, preferably a microorganism, a plant cell, a plant or a part thereof, as compared to a corresponding non-transformed wild type non-human organism or a part thereof; and
[54352] (b) growing the non-human organism or a part thereof under conditions which permit the production of stearic acid or a composition comprising stearic acid in said non-human organism or in the culture medium surrounding said non-human organism.

[54353] Accordingly, the present invention relates to a process for the production of stearic acid, which comprises
[54354] (a) increasing or generating one or more activities selected from the group consisting of At2g45420-protein in a non-human organism or a part thereof, preferably a microorganism, a plant cell, a plant or a part thereof, as compared to a corresponding non-transformed wild type non-human organism or a part thereof; and
[54355] (b) growing the non-human organism or a part thereof under conditions which permit the production of stearic acid or a composition comprising stearic acid in said non-human organism or in the culture medium surrounding said non-human organism.

[54356] Accordingly, the present invention relates to a process for the production of stearic acid, which comprises
[54357] (a) increasing or generating one or more activities selected from the group consisting of F-box protein in a non-human organism or a part thereof, preferably a microorganism, a plant cell, a plant or a part thereof, as compared to a corresponding non-transformed wild type non-human organism or a part thereof; and
[54358] (b) growing the non-human organism or a part thereof under conditions which permit the production of stearic acid or a composition comprising stearic acid in said non-human organism or in the culture medium surrounding said non-human organism.

[54359] Accordingly, the present invention relates to a process for the production of stearic acid, which comprises
[54360] (a) increasing or generating one or more activities selected from the group consisting of CCAAT-binding transcription factor in a non-human organism or a part thereof, preferably a microorganism, a plant cell, a plant or a part thereof, as compared to a corresponding non-transformed wild type non-human organism or a part thereof; and
[54361] (b) growing the non-human organism or a part thereof under conditions which permit the production of stearic acid or a composition comprising stearic acid in said non-human organism or in the culture medium surrounding said non-human organism.

[54362] Accordingly, the present invention relates to a process for the production of stearic acid, which comprises
[54363] (a) increasing or generating one or more activities selected from the group consisting of glutaredoxin in a non-human organism or a part thereof, preferably a microorganism, a plant cell, a plant or a part thereof, as compared to a corresponding non-transformed wild type non-human organism or a part thereof; and
[54364] (b) growing the non-human organism or a part thereof under conditions which permit the production of stearic acid or a composition comprising stearic acid in said non-human organism or in the culture medium surrounding said non-human organism.

[54365] Accordingly, the present invention relates to a process for the production of stearic acid, which comprises
[54366] (a) increasing or generating one or more activities selected from the group consisting of monothiol glutaredoxin in a non-human organism or a part thereof, preferably a microorganism, a plant cell, a plant or a part thereof, as compared to a corresponding non-transformed wild type non-human organism or a part thereof; and
[54367] (b) growing the non-human organism or a part thereof under conditions which permit the production of stearic acid or a composition comprising stearic acid in said non-human organism or in the culture medium surrounding said non-human organism.

[54368] Accordingly, the present invention relates to a process for the production of stearic acid, which comprises
[54369] (a) increasing or generating one or more activities selected from the group consisting of monothiol glutaredoxin in a non-human organism or a part thereof, preferably a microorganism, a plant cell, a plant or a part thereof, as compared to a corresponding non-transformed wild type non-human organism or a part thereof; and
[54370] (b) growing the non-human organism or a part thereof under conditions which permit the production of stearic acid or a composition comprising stearic acid in said non-human organism or in the culture medium surrounding said non-human organism.

[54371] Accordingly, the present invention relates to a process for the production of stearic acid, which comprises
[54372] (a) increasing or generating one or more activities selected from the group consisting of heat shock transcription factor in a non-human organism or a part thereof, preferably a microorganism, a plant cell, a plant or a part thereof, as compared to a corresponding non-transformed wild type non-human organism or a part thereof; and
[54373] (b) growing the non-human organism or a part thereof under conditions which permit the production of stearic acid or a composition comprising stearic acid in said non-human organism or in the culture medium surrounding said non-human organism.

[54374] Accordingly, the present invention relates to a process for the production of stearic acid, which comprises
[54375] (a) increasing or generating one or more activities selected from the group consisting of protein phosphatase in a non-human organism or a part thereof, preferably a microorganism, a plant cell, a plant or a part thereof, as compared to a corresponding non-transformed wild type non-human organism or a part thereof; and
[54376] (b) growing the non-human organism or a part thereof under conditions which permit the production of stearic acid or a composition comprising stearic acid in said non-human organism or in the culture medium surrounding said non-human organism.

[54377] Accordingly, the present invention relates to a process for the production of stearic acid, which comprises
[54378] (a) increasing or generating one or more activities selected from the group consisting of glutaredoxin in a non-human organism or a part thereof, preferably a microorganism, a plant cell, a plant or a part thereof, as compared to a corresponding non-transformed wild type non-human organism or a part thereof; and
[54379] (b) growing the non-human organism or a part thereof under conditions which permit the production of stearic acid or a composition comprising stearic acid in said non-human organism or in the culture medium surrounding said non-human organism.

[54380] Accordingly, the present invention relates to a process for the production of stearic acid, which comprises
[54381] (a) increasing or generating one or more activities selected from the group consisting of calcium-dependent protein kinase in a non-human organism or a part thereof, preferably a microorganism, a plant cell, a plant or a part thereof, as compared to a corresponding non-transformed wild type non-human organism or a part thereof; and
[54382] (b) growing the non-human organism or a part thereof under conditions which permit the production of stearic acid or a composition comprising stearic acid in said non-human organism or in the culture medium surrounding said non-human organism.

[54383] Accordingly, the present invention relates to a process for the production of stearic acid, which comprises
[54384] (a) increasing or generating one or more activities selected from the group consisting of protein phosphatase in a non-human organism or a part thereof, preferably a microorganism, a plant cell, a plant or a part thereof, as compared to a corresponding non-transformed wild type non-human organism or a part thereof; and
[54385] (b) growing the non-human organism or a part thereof under conditions which permit the production of stearic acid or a composition comprising stearic acid in said non-human organism or in the culture medium surrounding said non-human organism.

[54386] Accordingly, the present invention relates to a process for the production of stearic acid, which comprises
[54387] (a) increasing or generating one or more activities selected from the group consisting of b0283-protein in a non-human organism or a part thereof, preferably a microorganism, a plant cell, a plant or a part thereof, as compared to a corresponding non-transformed wild type non-human organism or a part thereof; and
[54388] (b) growing the non-human organism or a part thereof under conditions which permit the production of stearic acid or a composition comprising stearic acid in said non-human organism or in the culture medium surrounding said non-human organism.

[54389] Accordingly, the present invention relates to a process for the production of stearic acid, which comprises
[54390] (a) increasing or generating one or more activities selected from the group consisting of betaine aldehyde dehydrogenase in a non-human organism or a part thereof, preferably a microorganism, a plant cell, a plant or a part thereof, as compared to a corresponding non-transformed wild type non-human organism or a part thereof; and
[54391] (b) growing the non-human organism or a part thereof under conditions which permit the production of stearic acid or a composition comprising stearic acid in said non-human organism or in the culture medium surrounding said non-human organism.

[54392] Accordingly, the present invention relates to a process for the production of stearic acid, which comprises
[54393] (a) increasing or generating one or more activities selected from the group consisting of b0371-protein in a non-human organism or a part thereof, preferably a microorganism, a plant cell, a plant or a part thereof, as compared to a corresponding non-transformed wild type non-human organism or a part thereof; and
[54394] (b) growing the non-human organism or a part thereof under conditions which permit the production of stearic acid or a composition comprising stearic acid in said non-human organism or in the culture medium surrounding said non-human organism.

[54395] Accordingly, the present invention relates to a process for the production of stearic acid, which comprises
[54396] (a) increasing or generating one or more activities selected from the group consisting of ATP-binding component of a transport system in a non-human organism or a part thereof, preferably a microorganism, a plant cell, a plant or a part thereof, as compared to a corresponding non-transformed wild type non-human organism or a part thereof; and
[54397] (b) growing the non-human organism or a part thereof under conditions which permit the production of stearic acid or a composition comprising stearic acid in said non-human organism or in the culture medium surrounding said non-human organism.

[54398] Accordingly, the present invention relates to a process for the production of stearic acid, which comprises
[54399] (a) increasing or generating one or more activities selected from the group consisting of sodium/proton antiporter in a non-human organism or a part thereof, preferably a microorganism, a plant cell, a plant or a part thereof, as compared to a corresponding non-transformed wild type non-human organism or a part thereof; and
[54400] (b) growing the non-human organism or a part thereof under conditions which permit the production of stearic acid or a composition comprising stearic acid in said non-human organism or in the culture medium surrounding said non-human organism.

[54401] Accordingly, the present invention relates to a process for the production of stearic acid, which comprises
[54402] (a) increasing or generating one or more activities selected from the group consisting of lipoprotein precursor in a non-human organism or a part thereof, preferably a microorganism, a plant cell, a plant or a part thereof, as compared to a corresponding non-transformed wild type non-human organism or a part thereof; and
[54403] (b) growing the non-human organism or a part thereof under conditions which permit the production of stearic acid or a composition comprising stearic acid in said non-human organism or in the culture medium surrounding said non-human organism.

[54404] Accordingly, the present invention relates to a process for the production of stearic acid, which comprises
[54405] (a) increasing or generating one or more activities selected from the group consisting of acid shock protein in a non-human organism or a part thereof, preferably a microorganism, a plant cell, a plant or a part thereof, as compared to a corresponding non-transformed wild type non-human organism or a part thereof; and
[54406] (b) growing the non-human organism or a part thereof under conditions which permit the production of stearic acid or a composition comprising stearic acid in said non-human organism or in the culture medium surrounding said non-human organism.

[54407] Accordingly, the present invention relates to a process for the production of stearic acid, which comprises
[54408] (a) increasing or generating one or more activities selected from the group consisting of b1672-protein in a non-human organism or a part thereof, preferably a microorganism, a plant cell, a plant or a part thereof, as compared to a corresponding non-transformed wild type non-human organism or a part thereof; and
[54409] (b) growing the non-human organism or a part thereof under conditions which permit the production of stearic acid or a composition comprising stearic acid in said non-human organism or in the culture medium surrounding said non-human organism.

[54410] Accordingly, the present invention relates to a process for the production of stearic acid, which comprises
[54411] (a) increasing or generating one or more activities selected from the group consisting of protease in a non-human organism or a part thereof, preferably a microorganism, a plant cell, a plant or a part thereof, as compared to a corresponding non-transformed wild type non-human organism or a part thereof; and
[54412] (b) growing the non-human organism or a part thereof under conditions which permit the production of stearic acid or a composition comprising stearic acid in said non-human organism or in the culture medium surrounding said non-human organism.

[54413] Accordingly, the present invention relates to a process for the production of stearic acid, which comprises
[54414] (a) increasing or generating one or more activities selected from the group consisting of b2032-protein in a non-human organism or a part thereof, preferably a microorganism, a plant cell, a plant or a part thereof, as compared to a corresponding non-transformed wild type non-human organism or a part thereof; and
[54415] (b) growing the non-human organism or a part thereof under conditions which permit the production of stearic acid or a composition comprising stearic acid in said non-human organism or in the culture medium surrounding said non-human organism.

[54416] Accordingly, the present invention relates to a process for the production of stearic acid, which comprises
[54417] (a) increasing or generating one or more activities selected from the group consisting of b2399-protein in a non-human organism or a part thereof, preferably a microorganism, a plant cell, a plant or a part thereof, as compared to a corresponding non-transformed wild type non-human organism or a part thereof; and
[54418] (b) growing the non-human organism or a part thereof under conditions which permit the production of stearic acid or a composition comprising stearic acid in said non-human organism or in the culture medium surrounding said non-human organism.

[54419] Accordingly, the present invention relates to a process for the production of stearic acid, which comprises
[54420] (a) increasing or generating one or more activities selected from the group consisting of ethanolamine utilization protein in a non-human organism or a part thereof, preferably a microorganism, a plant cell, a plant or a part thereof, as compared to a corresponding non-transformed wild type non-human organism or a part thereof; and
[54421] (b) growing the non-human organism or a part thereof under conditions which permit the production of stearic acid or a composition comprising stearic acid in said non-human organism or in the culture medium surrounding said non-human organism.

[54422] Accordingly, the present invention relates to a process for the production of stearic acid, which comprises
[54423] (a) increasing or generating one or more activities selected from the group consisting of NADH dehydrogenase subunit N in a non-human organism or a part thereof, preferably a microorganism, a plant cell, a plant or a part thereof, as compared to a corresponding non-transformed wild type non-human organism or a part thereof; and
[54424] (b) growing the non-human organism or a part thereof under conditions which permit the production of stearic acid or a composition comprising stearic acid in said non-human organism or in the culture medium surrounding said non-human organism.

[54425] Accordingly, the present invention relates to a process for the production of stearic acid, which comprises
[54426] (a) increasing or generating one or more activities selected from the group consisting of b2513-protein in a non-human organism or a part thereof, preferably a microorganism, a plant cell, a plant or a part thereof, as compared to a corresponding non-transformed wild type non-human organism or a part thereof; and
[54427] (b) growing the non-human organism or a part thereof under conditions which permit the production of stearic acid or a composition comprising stearic acid in said non-human organism or in the culture medium surrounding said non-human organism.

[54428] Accordingly, the present invention relates to a process for the production of stearic acid, which comprises
[54429] (a) increasing or generating one or more activities selected from the group consisting of phospho-2-dehydro-3-deoxyheptonate aldolase in a non-human organism or a part thereof, preferably a microorganism, a plant cell, a plant or a part thereof, as compared to a corresponding non-transformed wild type non-human organism or a part thereof; and
[54430] (b) growing the non-human organism or a part thereof under conditions which permit the production of stearic acid or a composition comprising stearic acid in said non-human organism or in the culture medium surrounding said non-human organism.

[54431] Accordingly, the present invention relates to a process for the production of stearic acid, which comprises
[54432] (a) increasing or generating one or more activities selected from the group consisting of 2-C-methyl-D-erythritol 4-phosphate cytidylyltransferase in a non-human organism or a part thereof, preferably a microorganism, a plant cell, a plant or a part thereof, as compared to a corresponding non-transformed wild type non-human organism or a part thereof; and
[54433] (b) growing the non-human organism or a part thereof under conditions which permit the production of stearic acid or a composition comprising stearic acid in said non-human organism or in the culture medium surrounding said non-human organism.

[54434] Accordingly, the present invention relates to a process for the production of stearic acid, which comprises
[54435] (a) increasing or generating one or more activities selected from the group consisting of b2849-protein in a non-human organism or a part thereof, preferably a microorganism, a plant cell, a plant or a part thereof, as compared to a corresponding non-transformed wild type non-human organism or a part thereof; and
[54436] (b) growing the non-human organism or a part thereof under conditions which permit the production of stearic acid or a composition comprising stearic acid in said non-human organism or in the culture medium surrounding said non-human organism.

[54437] Accordingly, the present invention relates to a process for the production of stearic acid, which comprises
[54438] (a) increasing or generating one or more activities selected from the group consisting of aspartate-ammonia ligase in a non-human organism or a part thereof, preferably a microorganism, a plant cell, a plant or a part thereof, as compared to a corresponding non-transformed wild type non-human organism or a part thereof; and
[54439] (b) growing the non-human organism or a part thereof under conditions which permit the production of stearic acid or a composition comprising stearic acid in said non-human organism or in the culture medium surrounding said non-human organism.

[54440] Accordingly, the present invention relates to a process for the production of stearic acid, which comprises
[54441] (a) increasing or generating one or more activities selected from the group consisting of 3-ketoacyl-CoA thiolase in a non-human organism or a part thereof, preferably a microorganism, a plant cell, a plant or a part thereof, as compared to a corresponding non-transformed wild type non-human organism or a part thereof; and
[54442] (b) growing the non-human organism or a part thereof under conditions which permit the production of stearic acid or a composition comprising stearic acid in said non-human organism or in the culture medium surrounding said non-human organism.

[54443] Accordingly, the present invention relates to a process for the production of stearic acid, which comprises
[54444] (a) increasing or generating one or more activities selected from the group consisting of b3989-protein in a non-human organism or a part thereof, preferably a microorganism, a plant cell, a plant or a part thereof, as compared to a corresponding non-transformed wild type non-human organism or a part thereof; and
[54445] (b) growing the non-human organism or a part thereof under conditions which permit the production of stearic acid or a composition comprising stearic acid in said non-human organism or in the culture medium surrounding said non-human organism.

[54446] Accordingly, the present invention relates to a process for the production of stearic acid, which comprises
[54447] (a) increasing or generating one or more activities selected from the group consisting of b4121-protein in a non-human organism or a part thereof, preferably a microorganism, a plant cell, a plant or a part thereof, as compared to a corresponding non-transformed wild type non-human organism or a part thereof; and
[54448] (b) growing the non-human organism or a part thereof under conditions which permit the production of stearic acid or a composition comprising stearic acid in said non-human organism or in the culture medium surrounding said non-human organism.

[54449] Accordingly, the present invention relates to a process for the production of stearic acid, which comprises
[54450] (a) increasing or generating one or more activities selected from the group consisting of glutaredoxin in a non-human organism or a part thereof, preferably a microorganism, a plant cell, a plant or a part thereof, as compared to a corresponding non-transformed wild type non-human organism or a part thereof; and
[54451] (b) growing the non-human organism or a part thereof under conditions which permit the production of stearic acid or a composition comprising stearic acid in said non-human organism or in the culture medium surrounding said non-human organism.

[54452] Accordingly, the present invention relates to a process for the production of stearic acid, which comprises
[54453] (a) increasing or generating one or more activities selected from the group consisting of transcription factor in a non-human organism or a part thereof, preferably a microorganism, a plant cell, a plant or a part thereof, as compared to a corresponding non-transformed wild type non-human organism or a part thereof; and
[54454] (b) growing the non-human organism or a part thereof under conditions which permit the production of stearic acid or a composition comprising stearic acid in said non-human organism or in the culture medium surrounding said non-human organism.

[54455] Accordingly, the present invention relates to a process for the production of stearic acid, which comprises
[54456] (a) increasing or generating one or more activities selected from the group consisting of glucokinase in a non-human organism or a part thereof, preferably a microorganism, a plant cell, a plant or a part thereof, as compared to a corresponding non-transformed wild type non-human organism or a part thereof; and
[54457] (b) growing the non-human organism or a part thereof under conditions which permit the production of stearic acid or a composition comprising stearic acid in said non-human organism or in the culture medium surrounding said non-human organism.

[54458] Accordingly, the present invention relates to a process for the production of stearic acid, which comprises
[54459] (a) increasing or generating one or more activities selected from the group consisting of sll1032-protein in a non-human organism or a part thereof, preferably a microorganism, a plant cell, a plant or a part thereof, as compared to a corresponding non-transformed wild type non-human organism or a part thereof; and
[54460] (b) growing the non-human organism or a part thereof under conditions which permit the production of stearic acid or a composition comprising stearic acid in said non-human organism or in the culture medium surrounding said non-human organism.

[54461] Accordingly, the present invention relates to a process for the production of stearic acid, which comprises
[54462] (a) increasing or generating one or more activities selected from the group consisting of CTP synthetase in a non-human organism or a part thereof, preferably a microorganism, a plant cell, a plant or a part thereof, as compared to a corresponding non-transformed wild type non-human organism or a part thereof; and
[54463] (b) growing the non-human organism or a part thereof under conditions which permit the production of stearic acid or a composition comprising stearic acid in said non-human organism or in the culture medium surrounding said non-human organism.

[54464] Accordingly, the present invention relates to a process for the production of stearic acid, which comprises
[54465] (a) increasing or generating one or more activities selected from the group consisting of coproporphyrinogen III oxidase in a non-human organism or a part thereof, preferably a microorganism, a plant cell, a plant or a part thereof, as compared to a corresponding non-transformed wild type non-human organism or a part thereof; and
[54466] (b) growing the non-human organism or a part thereof under conditions which permit the production of stearic acid or a composition comprising stearic acid in said non-human organism or in the culture medium surrounding said non-human organism.

[54467] Accordingly, the present invention relates to a process for the production of stearic acid, which comprises
[54468] (a) increasing or generating one or more activities selected from the group consisting of cation-transporting ATPase in a non-human organism or a part thereof, preferably a microorganism, a plant cell, a plant or a part thereof, as compared to a corresponding non-transformed wild type non-human organism or a part thereof; and
[54469] (b) growing the non-human organism or a part thereof under conditions which permit the production of stearic acid or a composition comprising stearic acid in said non-human organism or in the culture medium surrounding said non-human organism.

[54470] Accordingly, the present invention relates to a process for the production of stearic acid, which comprises
[54471] (a) increasing or generating one or more activities selected from the group consisting of oxidoreductase in a non-human organism or a part thereof, preferably a microorganism, a plant cell, a plant or a part thereof, as compared to a corresponding non-transformed wild type non-human organism or a part thereof; and
[54472] (b) growing the non-human organism or a part thereof under conditions which permit the production of stearic acid or a composition comprising stearic acid in said non-human organism or in the culture medium surrounding said non-human organism.

[54473] Accordingly, the present invention relates to a process for the production of stearic acid, which comprises
[54474] (a) increasing or generating one or more activities selected from the group consisting of tryptophan synthase alpha chain in a non-human organism or a part thereof, preferably a microorganism, a plant cell, a plant or a part thereof, as compared to a corresponding non-transformed wild type non-human organism or a part thereof; and
[54475] (b) growing the non-human organism or a part thereof under conditions which permit the production of stearic acid or a composition comprising stearic acid in said non-human organism or in the culture medium surrounding said non-human organism.

[54476] Accordingly, the present invention relates to a process for the production of stearic acid, which comprises
[54477] (a) increasing or generating one or more activities selected from the group consisting of arginine decarboxylase in a non-human organism or a part thereof, preferably a microorganism, a plant cell, a plant or a part thereof, as compared to a corresponding non-transformed wild type non-human organism or a part thereof; and
[54478] (b) growing the non-human organism or a part thereof under conditions which permit the production of stearic acid or a composition comprising stearic acid in said non-human organism or in the culture medium surrounding said non-human organism.

[54479] Accordingly, the present invention relates to a process for the production of stearic acid, which comprises
[54480] (a) increasing or generating one or more activities selected from the group consisting of acetyl-coenzyme A synthetase in a non-human organism or a part thereof, preferably a microorganism, a plant cell, a plant or a part thereof, as compared to a corresponding non-transformed wild type non-human organism or a part thereof; and
[54481] (b) growing the non-human organism or a part thereof under conditions which permit the production of stearic acid or a composition comprising stearic acid in said non-human organism or in the culture medium surrounding said non-human organism.

[54482] Accordingly, the present invention relates to a process for the production of stearic acid, which comprises
[54483] (a) increasing or generating one or more activities selected from the group consisting of 3-deoxy-7-phosphoheptulonate synthase in a non-human organism or a part thereof, preferably a microorganism, a plant cell, a plant or a part thereof, as compared to a corresponding non-transformed wild type non-human organism or a part thereof; and
[54484] (b) growing the non-human organism or a part thereof under conditions which permit the production of stearic acid or a composition comprising stearic acid in said non-human organism or in the culture medium surrounding said non-human organism.

[54485] Accordingly, the present invention relates to a process for the production of stearic acid, which comprises
[54486] (a) increasing or generating one or more activities selected from the group consisting of ycl049c-protein in a non-human organism or a part thereof, preferably a microorganism, a plant cell, a plant or a part thereof, as compared to a corresponding non-transformed wild type non-human organism or a part thereof; and
[54487] (b) growing the non-human organism or a part thereof under conditions which permit the production of stearic acid or a composition comprising stearic acid in said non-human organism or in the culture medium surrounding said non-human organism.

[54488] Accordingly, the present invention relates to a process for the production of stearic acid, which comprises
[54489] (a) increasing or generating one or more activities selected from the group consisting of glycerol-3-phosphate dehydrogenase in a non-human organism or a part thereof, preferably a microorganism, a plant cell, a plant or a part thereof, as compared to a corresponding non-transformed wild type non-human organism or a part thereof; and
[54490] (b) growing the non-human organism or a part thereof under conditions which permit the production of stearic acid or a composition comprising stearic acid in said non-human organism or in the culture medium surrounding said non-human organism.

[54491] Accordingly, the present invention relates to a process for the production of stearic acid, which comprises
[54492] (a) increasing or generating one or more activities selected from the group consisting of isocitrate dehydrogenase in a non-human organism or a part thereof, preferably a microorganism, a plant cell, a plant or a part thereof, as compared to a corresponding non-transformed wild type non-human organism or a part thereof; and
[54493] (b) growing the non-human organism or a part thereof under conditions which permit the production of stearic acid or a composition comprising stearic acid in said non-human organism or in the culture medium surrounding said non-human organism.

[54494] Accordingly, the present invention relates to a process for the production of stearic acid, which comprises
[54495] (a) increasing or generating one or more activities selected from the group consisting of ydr507c-protein in a non-human organism or a part thereof, preferably a microorganism, a plant cell, a plant or a part thereof, as compared to a corresponding non-transformed wild type non-human organism or a part thereof; and
[54496] (b) growing the non-human organism or a part thereof under conditions which permit the production of stearic acid or a composition comprising stearic acid in said non-human organism or in the culture medium surrounding said non-human organism.

[54497] Accordingly, the present invention relates to a process for the production of stearic acid, which comprises
[54498] (a) increasing or generating one or more activities selected from the group consisting of dihydroxyacetone kinase in a non-human organism or a part thereof, preferably a microorganism, a plant cell, a plant or a part thereof, as compared to a corresponding non-transformed wild type non-human organism or a part thereof; and
[54499] (b) growing the non-human organism or a part thereof under conditions which permit the production of stearic acid or a composition comprising stearic acid in said non-human organism or in the culture medium surrounding said non-human organism.

[54500] Accordingly, the present invention relates to a process for the production of stearic acid, which comprises
[54501] (a) increasing or generating one or more activities selected from the group consisting of YGR104C-protein in a non-human organism or a part thereof, preferably a microorganism, a plant cell, a plant or a part thereof, as compared to a corresponding non-transformed wild type non-human organism or a part thereof; and
[54502] (b) growing the non-human organism or a part thereof under conditions which permit the production of stearic acid or a composition comprising stearic acid in said non-human organism or in the culture medium surrounding said non-human organism.

[54503] Accordingly, the present invention relates to a process for the production of stearic acid, which comprises
[54504] (a) increasing or generating one or more activities selected from the group consisting of aconitate hydratase in a non-human organism or a part thereof, preferably a microorganism, a plant cell, a plant or a part thereof, as compared to a corresponding non-transformed wild type non-human organism or a part thereof; and
[54505] (b) growing the non-human organism or a part thereof under conditions which permit the production of stearic acid or a composition comprising stearic acid in said non-human organism or in the culture medium surrounding said non-human organism.

[54506] Accordingly, the present invention relates to a process for the production of stearic acid, which comprises
[54507] (a) increasing or generating one or more activities selected from the group consisting of yor392w-protein in a non-human organism or a part thereof, preferably a microorganism, a plant cell, a plant or a part thereof, as compared to a corresponding non-transformed wild type non-human organism or a part thereof; and
[54508] (b) growing the non-human organism or a part thereof under conditions which permit the production of stearic acid or a composition comprising stearic acid in said non-human organism or in the culture medium surrounding said non-human organism.

[54509] Accordingly, the present invention relates to a process for the production of stearic acid, which comprises
[54510] (a) increasing or generating one or more activities selected from the group consisting of pyruvate kinase in a non-human organism or a part thereof, preferably a microorganism, a plant cell, a plant or a part thereof, as compared to a corresponding non-transformed wild type non-human organism or a part thereof; and
[54511] (b) growing the non-human organism or a part thereof under conditions which permit the production of stearic acid or a composition comprising stearic acid in said non-human organism or in the culture medium surrounding said non-human organism.

[54512] Accordingly, the present invention relates to a process for the production of stearic acid, which comprises
[54513] (a) increasing or generating one or more activities selected from the group consisting of glucose-6-phosphate 1-dehydrogenase in a non-human organism or a part thereof, preferably a microorganism, a plant cell, a plant or a part thereof, as compared to a corresponding non-transformed wild type non-human organism or a part thereof; and
[54514] (b) growing the non-human organism or a part thereof under conditions which permit the production of stearic acid or a composition comprising stearic acid in said non-human organism or in the culture medium surrounding said non-human organism.

[54515] An embodiment of the present invention relates to a process for the production of stearic acid, which comprises
[54516] (a1) increasing or generating the activity of a polypeptide comprising a polypeptide as depicted in a respective line in column 5 or 8 of Table II, application no. 10, or a homolog or a fragment thereof, a consensus sequence or at least one polypeptide motif as depicted in the respective line in column 8 of Table IV, application no. 10; or
[54517] (a2) increasing or generating the activity of an expression product of one or more nucleic acid molecule(s) comprising a polynucleotide as depicted in the respective line in column 5 or 8 of Table I, application no. 10, preferably the coding region thereof, or a homolog or a fragment thereof; or
[54518] (a3) increasing or generating the activity of a functional equivalent of (a1) or (a2); in a non-human organism or a part thereof; preferably a microorganism, a plant cell, a plant or a part thereof, as compared to a corresponding non-transformed wild type non-human organism or a part thereof; and
[54519] (b) growing the non-human organism under conditions which permit the production of stearic acid or a composition comprising stearic acid in said non-human organism or in the culture medium surrounding said non-human organism.

[54520] Accordingly, the increase or generation of one or more said activities is for example conferred by one or more expression products of said nucleic acid molecule, e.g. proteins. Accordingly, in the present invention described above, the increase or generation of one or more said activities is for example conferred by one or more protein(s) each comprising a polypeptide selected from the group as depicted in Table II, application no. 10, column 5 and 8, or a homolog or a fragment thereof.

[54521] The process of the invention comprises in one embodiment the following steps:
[54522] (i) increasing or generating of the expression of; and/or
[54523] (ii) increasing or generating the expression of an expression product of; and/or
[54524] (iii) increasing or generating one or more activities of an expression product encoded by; at least one nucleic acid molecule (in the following “Fine Chemical Related Protein (FCRP)”encoding gene or “FCRP”-gene) comprising a nucleic acid molecule selected from the group consisting of:
[54525] (a) a nucleic acid molecule encoding the polypeptide shown in column 5 or 8 of Table II, preferably Table II B, application no. 10, or a homolog or a fragment thereof;
[54526] (b) a nucleic acid molecule shown in column 5 or 8 of Table I, preferably Table I B, application no. 10, or a homolog or a fragment thereof (preferably the coding region thereof);
[54527] (c) a nucleic acid molecule, which, as a result of the degeneracy of the genetic code, can be derived from a polypeptide sequence depicted in column 5 or 8 of Table II, preferably Table II B, application no. 10;
[54528] (d) a nucleic acid molecule having at least 30%, in particular at least 50%, 60%, 70%, 80%, 85%, 90%, 95%, 97%, 98%, 99% or 99.5% identity with the nucleic acid molecule sequence of a polynucleotide comprising the nucleic acid molecule shown in column 5 or 8 of Table I, preferably Table I B, application no. 10, or the coding region thereof;
[54529] (e) a nucleic acid molecule encoding a polypeptide having at least 30%, in particular 50%, 60%, 70%, 80%, 85%, 90%, 95%, 97%, 98%, 99% or 99.5% identity with the amino acid sequence of the polypeptide encoded by the nucleic acid molecule of (a), (b), (c) or (d),
[54530] (f) a nucleic acid molecule which hybridizes with a nucleic acid molecule of (a), (b), (c), (d) or (e) under stringent hybridization conditions;
[54531] (g) a nucleic acid molecule encoding a polypeptide which can be isolated with the aid of monoclonal or polyclonal antibodies made against a polypeptide encoded by one of the nucleic acid molecules of (a), (b), (c), (d), (e) or (f);
[54532] (h) a nucleic acid molecule encoding a polypeptide comprising the consensus sequence or one or more polypeptide motifs as shown in column 8 of Table IV, application no. 10;
[54533] (i) a nucleic acid molecule encoding a polypeptide having the activity represented by a respective protein as depicted in column 5 of Table II, application no. 10;
[54534] (j) a nucleic acid molecule which comprises a polynucleotide, which is obtained by amplifying a cDNA library or a genomic library using the primers as depicted in column 8 of Table III, application no. 10; and
[54535] (k) a nucleic acid molecule which is obtainable by screening a suitable nucleic acid library, especially a cDNA library and/or a genomic library, under stringent hybridization conditions with a probe comprising a complementary sequence of a nucleic acid molecule of (a), (b), (c), (d), (e), (f), (g), (h), (i) or (j) or with a fragment thereof, having at least 15 nt, preferably 20 nt, 30 nt, 50 nt, 100 nt, 200 nt, 500 nt, 1000 nt, 1500 nt, 2000 nt or 3000 nt of a nucleic acid molecule complementary to a nucleic acid molecule sequence characterized in (a), (b), (c), (d), (e), (f), (g), (h), (i) or (j);
[54536] or a nucleic acid molecule comprising a sequence which is complementary thereto.
   (All the references to Tables I to IV are references to the corresponding lines of Tables I to IV.)

[54537] The term “increasing or generating of the expression of” may also be interchanged by the term “overexpressing”.

[54538] In a preferred embodiment thereof said nucleic acid molecule encodes a polypeptide which has the activity of the polypeptide represented by a protein comprising a polypeptide as depicted in the corresponding hit in column 5 of Table II, application no. 10.

[54539] In another preferred embodiment thereof said nucleic acid molecule confers a generation or an increase of the respective fine chemical in a non-human organism or a part thereof as compared to a corresponding wild-type non-human organism or part thereof.

[54540] In another preferred embodiment thereof said nucleic acid molecule encodes a polypeptide which has the activity of the polypeptide represented by a protein as depicted in the corresponding hit in column 5 of Table II, application no. 10, and confers a generation or an increase of the respective fine chemical in a non-human organism or a part thereof as compared to a corresponding wild-type non-human organism or part thereof.

[54541] Accordingly, the genes of the present invention or used in accordance with the present invention, which respectively encode a protein having an activity of 2-C-methyl-D-erythritol 4-phosphate cytidylyltransferase, 3-deoxy-7-phosphoheptulonate synthase, 3-ketoacyl-CoA thiolase, acetyl-coenzyme A synthetase, acid shock protein, aconitate hydratase, arginine decarboxylase, aspartate-ammonia ligase, At2g45420-protein, ATP-binding component of a transport system, b0283-protein, b0371-protein, b1672-protein, b2032-protein, b2399-protein, b2513-protein, b2849-protein, b3989-protein, b4121-protein, betaine aldehyde dehydrogenase, calcium-dependent protein kinase, cation-transporting ATPase, CCAAT-binding transcription factor, citrate synthase, coproporphyrinogen III oxidase, CTP synthetase, dihydroxyacetone kinase, ethanolamine utilization protein, F-box protein, glucokinase, glucose-6-phosphate 1-dehydrogenase, glutaredoxin, glycerol-3-phosphate dehydrogenase, heat shock transcription factor, isocitrate dehydrogenase, lipoprotein precursor, monothiol glutaredoxin, NADH dehydrogenase subunit N, oxidoreductase, phospho-2-dehydro-3-deoxyheptonate aldolase, protease, protein phosphatase, pyruvate kinase, sll1032-protein, sodium/proton antiporter, transcription factor, tryptophan synthase alpha chain, ycl049c-protein, ydr507c-protein, YGR104C-protein, or yor392w-protein, which respectively encode a protein comprising a polypeptide encoded by a nucleic acid sequence as shown in Table I, application no. 10, column 5 or 8, (preferably the coding region thereof), or a homolog or a fragment thereof, which respectively encode a protein comprising a polypeptide as depicted in Table II, application no. 10, column 5 or 8, or a homolg or a fragment thereof, and/or which respectively can be amplified with the primer set shown in Table III, application no. 10, column 8, are also referred to as “FCRP genes”.

[54542] Proteins or polypeptides encoded by “FCRP-genes” are referred to as “Fine Chemical Related Proteins” or “FCRP”. For the purposes of the description of the present invention, the respective protein having an activity of 2-C-methyl-D-erythritol 4-phosphate cytidylyltransferase, 3-deoxy-7-phosphoheptulonate synthase, 3-ketoacyl-CoA thiolase, acetylcoenzyme A synthetase, acid shock protein, aconitate hydratase, arginine decarboxylase, aspartate-ammonia ligase, At2g45420-protein, ATP-binding component of a transport system, b0283-protein, b0371-protein, b1672-protein, b2032-protein, b2399-protein, b2513-protein, b2849-protein, b3989-protein, b4121-protein, betaine aldehyde dehydrogenase, calcium-dependent protein kinase, cation-transporting ATPase, CCAAT-binding transcription factor, citrate synthase, coproporphyrinogen III oxidase, CTP synthetase, dihydroxyacetone kinase, ethanolamine utilization protein, F-box protein, glucokinase, glucose-6-phosphate 1-dehydrogenase, glutaredoxin, glycerol-3-phosphate dehydrogenase, heat shock transcription factor, isocitrate dehydrogenase, lipoprotein precursor, monothiol glutaredoxin, NADH dehydrogenase subunit N, oxidoreductase, phospho-2-dehydro-3-deoxyheptonate aldolase, protease, protein phosphatase, pyruvate kinase, sll1032-protein, sodium/proton antiporter, transcription factor, tryptophan synthase alpha chain, ycl049c-protein, ydr507c-protein, YGR104C-protein, or yor392w-protein, the respective protein comprising a polypeptide encoded by one or more respective nucleic acid sequences as shown in Table I, application no. 10, column 5 or 8, (preferably the coding region thereof), or a homolog or fragment thereof, the respective protein comprising a respective polypeptide as depicted in Table II, application no. 10, column 5 or 8, or a homolog or fragment thereof, the respective protein comprising a sequence corresponding to the consensus sequence as shown in Table IV, application no. 10, column 8, and/or the respective protein comprising at least one polypeptide motif as shown in Table IV, application no. 10, column 8 is also referred to as Fine Chemical Related Protein” or “FCRP”.

[54543] Thus, in one embodiment, the present invention provides a process of the production of stearic acid, by increasing or generating one or more activities, especially selected from the group consisting of 2-C-methyl-D-erythritol 4-phosphate cytidylyltransferase, 3-deoxy-7-phosphoheptulonate synthase, 3-ketoacyl-CoA thiolase, acetyl-coenzyme A synthetase, acid shock protein, aconitate hydratase, arginine decarboxylase, aspartate-ammonia ligase, At2g45420-protein, ATP-binding component of a transport system, b0283-protein, b0371-protein, b1672-protein, b2032-protein, b2399-protein, b2513-protein, b2849-protein, b3989-protein, b4121-protein, betaine aldehyde dehydrogenase, calcium-dependent protein kinase, cation-transporting ATPase, CCAAT-binding transcription factor, citrate synthase, coproporphyrinogen III oxidase, CTP synthetase, dihydroxyacetone kinase, ethanolamine utilization protein, F-box protein, glucokinase, glucose-6-phosphate 1-dehydrogenase, glutaredoxin, glycerol-3-phosphate dehydrogenase, heat shock transcription factor, isocitrate dehydrogenase, lipoprotein precursor, monothiol glutaredoxin, NADH dehydrogenase subunit N, oxidoreductase, phospho-2-dehydro-3-deoxyheptonate aldolase, protease, protein phosphatase, pyruvate kinase, sll1032-protein, sodium/proton antiporter, transcription factor, tryptophan synthase alpha chain, ycl049c-protein, ydr507c-protein, YGR104C-protein, and yor392w-protein, which is conferred by one or more FCRPs or the gene product of one or more FCRP-genes, for example by the gene product of a nucleic acid sequences comprising a polynucleotide selected from the group as shown in Table I, application no. 10, column 5 or 8, (preferably by the coding region thereof), or a homolog or a fragment thereof, e.g. or by one or more proteins each comprising a polypeptide encoded by one or more nucleic acid sequences selected from the group as shown in Table I, application no. 10, column 5 or 8, (preferably by the coding region thereof), or a homolog or a fragment thereof, or by one or more protein(s) each comprising a polypeptide selected from the group as depicted in Table II, application no. 10, column 5 and 8, or a homolog thereof, or a protein comprising a sequence corresponding to the consensus sequence or comprising at least one polypeptide motif as shown in Table IV, application no. 10, column 8.

[54544] for the disclosure of this paragraph see [0025.1.8.8] above.

[54545] In an embodiment, the process comprises increasing or generating the activity of one or more polypeptides having said activity, e.g. by generating or increasing the amount and/or specific activity in the cell or a compartment of a cell of one of more FCRP, especially selected from the group consisting of 2-C-methyl-D-erythritol 4-phosphate cytidylyltransferase, 3-deoxy-7-phosphoheptulonate synthase, 3-ketoacyl-CoA thiolase, acetyl-coenzyme A synthetase, acid shock protein, aconitate hydratase, arginine decarboxylase, aspartate-ammonia ligase, At2g45420-protein, ATP-binding component of a transport system, b0283-protein, b0371-protein, b1672-protein, b2032-protein, b2399-protein, b2513-protein, b2849-protein, b3989-protein, b4121-protein, betaine aldehyde dehydrogenase, calcium-dependent protein kinase, cation-transporting ATPase, CCAAT-binding transcription factor, citrate synthase, coproporphyrinogen III oxidase, CTP synthetase, dihydroxyacetone kinase, ethanolamine utilization protein, F-box protein, glucokinase, glucose-6-phosphate 1-dehydrogenase, glutaredoxin, glycerol-3-phosphate dehydrogenase, heat shock transcription factor, isocitrate dehydrogenase, lipoprotein precursor, monothiol glutaredoxin, NADH dehydrogenase subunit N, oxidoreductase, phospho-2-dehydro-3-deoxyheptonate aldolase, protease, protein phosphatase, pyruvate kinase, sll1032-protein, sodium/proton antiporter, transcription factor, tryptophan synthase alpha chain, ycl049c-protein, ydr507c-protein, YGR104C-protein, and yor392w-protein, for example of the respective polypeptide as depicted in Table II, application no. 10, column 5 and 8, or a homolog or a fragment thereof, or the respective polypeptide comprising a sequence corresponding to the consensus sequences as shown in Table IV, application no. 10, column 8, or the respective polypeptide comprising at least one polypeptide motif as depicted in Table IV, application no. 10, column 8.

[54546] A further embodiment of the present invention relates to a process for the production of stearic acid, which comprises
[54547] (a) increasing or generating the activity of a transcription factor non-targeted in a non-human organism or a part thereof, preferably a microorganism, a plant cell, a plant or a part thereof, as compared to a corresponding non-transformed wild type non-human organism or a part thereof; and
[54548] (b) growing the non-human organism or a part thereof under conditions which permit the production of stearic acid or a composition comprising stearic acid in said non-human organism or in the culture medium surrounding said non-human organism.

[54549] A further embodiment of the present invention relates to a process for the production of stearic acid, which comprises
[54550] (a) increasing or generating the activity of a protein phosphatase non-targeted in a non-human organism or a part thereof, preferably a microorganism, a plant cell, a plant or a part thereof, as compared to a corresponding non-transformed wild type non-human organism or a part thereof; and
[54551] (b) growing the non-human organism or a part thereof under conditions which permit the production of stearic acid or a composition comprising stearic acid in said non-human organism or in the culture medium surrounding said non-human organism.

[54552] A further embodiment of the present invention relates to a process for the production of stearic acid, which comprises
[54553] (a) increasing or generating the activity of a citrate synthase non-targeted in a non-human organism or a part thereof, preferably a microorganism, a plant cell, a plant or a part thereof, as compared to a corresponding non-transformed wild type non-human organism or a part thereof; and
[54554] (b) growing the non-human organism or a part thereof under conditions which permit the production of stearic acid or a composition comprising stearic acid in said non-human organism or in the culture medium surrounding said non-human organism.

[54555] A further embodiment of the present invention relates to a process for the production of stearic acid, which comprises
[54556] (a) increasing or generating the activity of a At2g45420-protein non-targeted in a non-human organism or a part thereof, preferably a microorganism, a plant cell, a plant or a part thereof, as compared to a corresponding non-transformed wild type non-human organism or a part thereof; and
[54557] (b) growing the non-human organism or a part thereof under conditions which permit the production of stearic acid or a composition comprising stearic acid in said non-human organism or in the culture medium surrounding said non-human organism.

[54558] A further embodiment of the present invention relates to a process for the production of stearic acid, which comprises
[54559] (a) increasing or generating the activity of a F-box protein non-targeted in a non-human organism or a part thereof, preferably a microorganism, a plant cell, a plant or a part thereof, as compared to a corresponding non-transformed wild type non-human organism or a part thereof; and
[54560] (b) growing the non-human organism or a part thereof under conditions which permit the production of stearic acid or a composition comprising stearic acid in said non-human organism or in the culture medium surrounding said non-human organism.

[54561] A further embodiment of the present invention relates to a process for the production of stearic acid, which comprises
[54562] (a) increasing or generating the activity of a CCAAT-binding transcription factor non-targeted in a non-human organism or a part thereof, preferably a microorganism, a plant cell, a plant or a part thereof, as compared to a corresponding non-transformed wild type non-human organism or a part thereof; and
[54563] (b) growing the non-human organism or a part thereof under conditions which permit the production of stearic acid or a composition comprising stearic acid in said non-human organism or in the culture medium surrounding said non-human organism.

[54564] A further embodiment of the present invention relates to a process for the production of stearic acid, which comprises
[54565] (a) increasing or generating the activity of a glutaredoxin non-targeted in a non-human organism or a part thereof, preferably a microorganism, a plant cell, a plant or a part thereof, as compared to a corresponding non-transformed wild type non-human organism or a part thereof; and
[54566] (b) growing the non-human organism or a part thereof under conditions which permit the production of stearic acid or a composition comprising stearic acid in said non-human organism or in the culture medium surrounding said non-human organism.

[54567] A further embodiment of the present invention relates to a process for the production of stearic acid, which comprises
[54568] (a) increasing or generating the activity of a monothiol glutaredoxin non-targeted in a non-human organism or a part thereof, preferably a microorganism, a plant cell, a plant or a part thereof, as compared to a corresponding non-transformed wild type non-human organism or a part thereof; and
[54569] (b) growing the non-human organism or a part thereof under conditions which permit the production of stearic acid or a composition comprising stearic acid in said non-human organism or in the culture medium surrounding said non-human organism.

[54570] A further embodiment of the present invention relates to a process for the production of stearic acid, which comprises
[54571] (a) increasing or generating the activity of a monothiol glutaredoxin non-targeted in a non-human organism or a part thereof, preferably a microorganism, a plant cell, a plant or a part thereof, as compared to a corresponding non-transformed wild type non-human organism or a part thereof; and
[54572] (b) growing the non-human organism or a part thereof under conditions which permit the production of stearic acid or a composition comprising stearic acid in said non-human organism or in the culture medium surrounding said non-human organism.

[54573] A further embodiment of the present invention relates to a process for the production of stearic acid, which comprises
[54574] (a) increasing or generating the activity of a heat shock transcription factor non-targeted in a non-human organism or a part thereof, preferably a microorganism, a plant cell, a plant or a part thereof, as compared to a corresponding non-transformed wild type non-human organism or a part thereof; and
[54575] (b) growing the non-human organism or a part thereof under conditions which permit the production of stearic acid or a composition comprising stearic acid in said non-human organism or in the culture medium surrounding said non-human organism.

[54576] A further embodiment of the present invention relates to a process for the production of stearic acid, which comprises
[54577] (a) increasing or generating the activity of a protein phosphatase non-targeted in a non-human organism or a part thereof, preferably a microorganism, a plant cell, a plant or a part thereof, as compared to a corresponding non-transformed wild type non-human organism or a part thereof; and
[54578] (b) growing the non-human organism or a part thereof under conditions which permit the production of stearic acid or a composition comprising stearic acid in said non-human organism or in the culture medium surrounding said non-human organism.

[54579] A further embodiment of the present invention relates to a process for the production of stearic acid, which comprises
[54580] (a) increasing or generating the activity of a glutaredoxin non-targeted in a non-human organism or a part thereof, preferably a microorganism, a plant cell, a plant or a part thereof, as compared to a corresponding non-transformed wild type non-human organism or a part thereof; and
[54581] (b) growing the non-human organism or a part thereof under conditions which permit the production of stearic acid or a composition comprising stearic acid in said non-human organism or in the culture medium surrounding said non-human organism.

[54582] A further embodiment of the present invention relates to a process for the production of stearic acid, which comprises
[54583] (a) increasing or generating the activity of a calcium-dependent protein kinase non-targeted in a non-human organism or a part thereof, preferably a microorganism, a plant cell, a plant or a part thereof, as compared to a corresponding non-transformed wild type non-human organism or a part thereof; and
[54584] (b) growing the non-human organism or a part thereof under conditions which permit the production of stearic acid or a composition comprising stearic acid in said non-human organism or in the culture medium surrounding said non-human organism.

[54585] A further embodiment of the present invention relates to a process for the production of stearic acid, which comprises
[54586] (a) increasing or generating the activity of a protein phosphatase non-targeted in a non-human organism or a part thereof, preferably a microorganism, a plant cell, a plant or a part thereof, as compared to a corresponding non-transformed wild type non-human organism or a part thereof; and
[54587] (b) growing the non-human organism or a part thereof under conditions which permit the production of stearic acid or a composition comprising stearic acid in said non-human organism or in the culture medium surrounding said non-human organism.

[54588] A further embodiment of the present invention relates to a process for the production of stearic acid, which comprises
[54589] (a) increasing or generating the activity of a b0283-protein non-targeted in a non-human organism or a part thereof, preferably a microorganism, a plant cell, a plant or a part thereof, as compared to a corresponding non-transformed wild type non-human organism or a part thereof; and
[54590] (b) growing the non-human organism or a part thereof under conditions which permit the production of stearic acid or a composition comprising stearic acid in said non-human organism or in the culture medium surrounding said non-human organism.

[54591] A further embodiment of the present invention relates to a process for the production of stearic acid, which comprises
[54592] (a) increasing or generating the activity of a betaine aldehyde dehydrogenase non-targeted in a non-human organism or a part thereof, preferably a microorganism, a plant cell, a plant or a part thereof, as compared to a corresponding non-transformed wild type non-human organism or a part thereof; and
[54593] (b) growing the non-human organism or a part thereof under conditions which permit the production of stearic acid or a composition comprising stearic acid in said non-human organism or in the culture medium surrounding said non-human organism.

[54594] A further embodiment of the present invention relates to a process for the production of stearic acid, which comprises
[54595] (a) increasing or generating the activity of a b0371-protein non-targeted in a non-human organism or a part thereof, preferably a microorganism, a plant cell, a plant or a part thereof, as compared to a corresponding non-transformed wild type non-human organism or a part thereof; and
[54596] (b) growing the non-human organism or a part thereof under conditions which permit the production of stearic acid or a composition comprising stearic acid in said non-human organism or in the culture medium surrounding said non-human organism.

[54597] A further embodiment of the present invention relates to a process for the production of stearic acid, which comprises
[54598] (a) increasing or generating the activity of a ATP-binding component of a transport system non-targeted in a non-human organism or a part thereof, preferably a microorganism, a plant cell, a plant or a part thereof, as compared to a corresponding non-transformed wild type non-human organism or a part thereof; and
[54599] (b) growing the non-human organism or a part thereof under conditions which permit the production of stearic acid or a composition comprising stearic acid in said non-human organism or in the culture medium surrounding said non-human organism.

[54600] A further embodiment of the present invention relates to a process for the production of stearic acid, which comprises
[54601] (a) increasing or generating the activity of a sodium/proton antiporter non-targeted in a non-human organism or a part thereof, preferably a microorganism, a plant cell, a plant or a part thereof, as compared to a corresponding non-transformed wild type non-human organism or a part thereof; and
[54602] (b) growing the non-human organism or a part thereof under conditions which permit the production of stearic acid or a composition comprising stearic acid in said non-human organism or in the culture medium surrounding said non-human organism.

[54603] A further embodiment of the present invention relates to a process for the production of stearic acid, which comprises
[54604] (a) increasing or generating the activity of a lipoprotein precursor non-targeted in a non-human organism or a part thereof, preferably a microorganism, a plant cell, a plant or a part thereof, as compared to a corresponding non-transformed wild type non-human organism or a part thereof; and
[54605] (b) growing the non-human organism or a part thereof under conditions which permit the production of stearic acid or a composition comprising stearic acid in said non-human organism or in the culture medium surrounding said non-human organism.

[54606] A further embodiment of the present invention relates to a process for the production of stearic acid, which comprises
[54607] (a) increasing or generating the activity of a acid shock protein non-targeted in a non-human organism or a part thereof, preferably a microorganism, a plant cell, a plant or a part thereof, as compared to a corresponding non-transformed wild type non-human organism or a part thereof; and
[54608] (b) growing the non-human organism or a part thereof under conditions which permit the production of stearic acid or a composition comprising stearic acid in said non-human organism or in the culture medium surrounding said non-human organism.

[54609] A further embodiment of the present invention relates to a process for the production of stearic acid, which comprises
[54610] (a) increasing or generating the activity of a b1672-protein non-targeted in a non-human organism or a part thereof, preferably a microorganism, a plant cell, a plant or a part thereof, as compared to a corresponding non-transformed wild type non-human organism or a part thereof; and
[54611] (b) growing the non-human organism or a part thereof under conditions which permit the production of stearic acid or a composition comprising stearic acid in said non-human organism or in the culture medium surrounding said non-human organism.

[54612] A further embodiment of the present invention relates to a process for the production of stearic acid, which comprises
[54613] (a) increasing or generating the activity of a protease non-targeted in a non-human organism or a part thereof, preferably a microorganism, a plant cell, a plant or a part thereof, as compared to a corresponding non-transformed wild type non-human organism or a part thereof; and
[54614] (b) growing the non-human organism or a part thereof under conditions which permit the production of stearic acid or a composition comprising stearic acid in said non-human organism or in the culture medium surrounding said non-human organism.

[54615] A further embodiment of the present invention relates to a process for the production of stearic acid, which comprises
[54616] (a) increasing or generating the activity of a b2032-protein non-targeted in a non-human organism or a part thereof, preferably a microorganism, a plant cell, a plant or a part thereof, as compared to a corresponding non-transformed wild type non-human organism or a part thereof; and
[54617] (b) growing the non-human organism or a part thereof under conditions which permit the production of stearic acid or a composition comprising stearic acid in said non-human organism or in the culture medium surrounding said non-human organism.

[54618] A further embodiment of the present invention relates to a process for the production of stearic acid, which comprises
[54619] (a) increasing or generating the activity of a b2399-protein non-targeted in a non-human organism or a part thereof, preferably a microorganism, a plant cell, a plant or a part thereof, as compared to a corresponding non-transformed wild type non-human organism or a part thereof; and
[54620] (b) growing the non-human organism or a part thereof under conditions which permit the production of stearic acid or a composition comprising stearic acid in said non-human organism or in the culture medium surrounding said non-human organism.

[54621] A further embodiment of the present invention relates to a process for the production of stearic acid, which comprises
[54622] (a) increasing or generating the activity of a ethanolamine utilization protein non-targeted in a non-human organism or a part thereof, preferably a microorganism, a plant cell, a plant or a part thereof, as compared to a corresponding non-transformed wild type non-human organism or a part thereof; and
[54623] (b) growing the non-human organism or a part thereof under conditions which permit the production of stearic acid or a composition comprising stearic acid in said non-human organism or in the culture medium surrounding said non-human organism.

[54624] A further embodiment of the present invention relates to a process for the production of stearic acid, which comprises
[54625] (a) increasing or generating the activity of a NADH dehydrogenase subunit N non-targeted in a non-human organism or a part thereof, preferably a microorganism, a plant cell, a plant or a part thereof, as compared to a corresponding non-transformed wild type non-human organism or a part thereof; and
[54626] (b) growing the non-human organism or a part thereof under conditions which permit the production of stearic acid or a composition comprising stearic acid in said non-human organism or in the culture medium surrounding said non-human organism.

[54627] A further embodiment of the present invention relates to a process for the production of stearic acid, which comprises
[54628] (a) increasing or generating the activity of a b2513-protein non-targeted in a non-human organism or a part thereof, preferably a microorganism, a plant cell, a plant or a part thereof, as compared to a corresponding non-transformed wild type non-human organism or a part thereof; and
[54629] (b) growing the non-human organism or a part thereof under conditions which permit the production of stearic acid or a composition comprising stearic acid in said non-human organism or in the culture medium surrounding said non-human organism.

[54630] A further embodiment of the present invention relates to a process for the production of stearic acid, which comprises
[54631] (a) increasing or generating the activity of a phospho-2-dehydro-3-deoxyheptonate aldolase non-targeted in a non-human organism or a part thereof, preferably a microorganism, a plant cell, a plant or a part thereof, as compared to a corresponding non-transformed wild type non-human organism or a part thereof; and
[54632] (b) growing the non-human organism or a part thereof under conditions which permit the production of stearic acid or a composition comprising stearic acid in said non-human organism or in the culture medium surrounding said non-human organism.

[54633] A further embodiment of the present invention relates to a process for the production of stearic acid, which comprises
[54634] (a) increasing or generating the activity of a 2-C-methyl-D-erythritol 4-phosphate cytidylyltransferase non-targeted in a non-human organism or a part thereof, preferably a microorganism, a plant cell, a plant or a part thereof, as compared to a corresponding non-transformed wild type non-human organism or a part thereof; and
[54635] (b) growing the non-human organism or a part thereof under conditions which permit the production of stearic acid or a composition comprising stearic acid in said non-human organism or in the culture medium surrounding said non-human organism.

[54636] A further embodiment of the present invention relates to a process for the production of stearic acid, which comprises
[54637] (a) increasing or generating the activity of a b2849-protein non-targeted in a non-human organism or a part thereof, preferably a microorganism, a plant cell, a plant or a part thereof, as compared to a corresponding non-transformed wild type non-human organism or a part thereof; and
[54638] (b) growing the non-human organism or a part thereof under conditions which permit the production of stearic acid or a composition comprising stearic acid in said non-human organism or in the culture medium surrounding said non-human organism.

[54639] A further embodiment of the present invention relates to a process for the production of stearic acid, which comprises
[54640] (a) increasing or generating the activity of a aspartate-ammonia ligase non-targeted in a non-human organism or a part thereof, preferably a microorganism, a plant cell, a plant or a part thereof, as compared to a corresponding non-transformed wild type non-human organism or a part thereof; and
[54641] (b) growing the non-human organism or a part thereof under conditions which permit the production of stearic acid or a composition comprising stearic acid in said non-human organism or in the culture medium surrounding said non-human organism.

[54642] A further embodiment of the present invention relates to a process for the production of stearic acid, which comprises
[54643] (a) increasing or generating the activity of a 3-ketoacyl-CoA thiolase non-targeted in a non-human organism or a part thereof, preferably a microorganism, a plant cell, a plant or a part thereof, as compared to a corresponding non-transformed wild type non-human organism or a part thereof; and
[54644] (b) growing the non-human organism or a part thereof under conditions which permit the production of stearic acid or a composition comprising stearic acid in said non-human organism or in the culture medium surrounding said non-human organism.

[54645] A further embodiment of the present invention relates to a process for the production of stearic acid, which comprises
[54646] (a) increasing or generating the activity of a b3989-protein non-targeted in a non-human organism or a part thereof, preferably a microorganism, a plant cell, a plant or a part thereof, as compared to a corresponding non-transformed wild type non-human organism or a part thereof; and
[54647] (b) growing the non-human organism or a part thereof under conditions which permit the production of stearic acid or a composition comprising stearic acid in said non-human organism or in the culture medium surrounding said non-human organism.

[54648] A further embodiment of the present invention relates to a process for the production of stearic acid, which comprises
[54649] (a) increasing or generating the activity of a b4121-protein non-targeted in a non-human organism or a part thereof, preferably a microorganism, a plant cell, a plant or a part thereof, as compared to a corresponding non-transformed wild type non-human organism or a part thereof; and
[54650] (b) growing the non-human organism or a part thereof under conditions which permit the production of stearic acid or a composition comprising stearic acid in said non-human organism or in the culture medium surrounding said non-human organism.

[54651] A further embodiment of the present invention relates to a process for the production of stearic acid, which comprises
[54652] (a) increasing or generating the activity of a glutaredoxin non-targeted in a non-human organism or a part thereof, preferably a microorganism, a plant cell, a plant or a part thereof, as compared to a corresponding non-transformed wild type non-human organism or a part thereof; and
[54653] (b) growing the non-human organism or a part thereof under conditions which permit the production of stearic acid or a composition comprising stearic acid in said non-human organism or in the culture medium surrounding said non-human organism.

[54654] A further embodiment of the present invention relates to a process for the production of stearic acid, which comprises
[54655] (a) increasing or generating the activity of a transcription factor non-targeted in a non-human organism or a part thereof, preferably a microorganism, a plant cell, a plant or a part thereof, as compared to a corresponding non-transformed wild type non-human organism or a part thereof; and
[54656] (b) growing the non-human organism or a part thereof under conditions which permit the production of stearic acid or a composition comprising stearic acid in said non-human organism or in the culture medium surrounding said non-human organism.

[54657] A further embodiment of the present invention relates to a process for the production of stearic acid, which comprises
[54658] (a) increasing or generating the activity of a glucokinase non-targeted in a non-human organism or a part thereof, preferably a microorganism, a plant cell, a plant or a part thereof, as compared to a corresponding non-transformed wild type non-human organism or a part thereof; and
[54659] (b) growing the non-human organism or a part thereof under conditions which permit the production of stearic acid or a composition comprising stearic acid in said non-human organism or in the culture medium surrounding said non-human organism.

[54660] A further embodiment of the present invention relates to a process for the production of stearic acid, which comprises
[54661] (a) increasing or generating the activity of a sll1032-protein non-targeted in a non-human organism or a part thereof, preferably a microorganism, a plant cell, a plant or a part thereof, as compared to a corresponding non-transformed wild type non-human organism or a part thereof; and
[54662] (b) growing the non-human organism or a part thereof under conditions which permit the production of stearic acid or a composition comprising stearic acid in said non-human organism or in the culture medium surrounding said non-human organism.

[54663] A further embodiment of the present invention relates to a process for the production of stearic acid, which comprises
[54664] (a) increasing or generating the activity of a CTP synthetase non-targeted in a non-human organism or a part thereof, preferably a microorganism, a plant cell, a plant or a part thereof, as compared to a corresponding non-transformed wild type non-human organism or a part thereof; and
[54665] (b) growing the non-human organism or a part thereof under conditions which permit the production of stearic acid or a composition comprising stearic acid in said non-human organism or in the culture medium surrounding said non-human organism.

[54666] A further embodiment of the present invention relates to a process for the production of stearic acid, which comprises
[54667] (a) increasing or generating the activity of a coproporphyrinogen III oxidase non-targeted in a non-human organism or a part thereof, preferably a microorganism, a plant cell, a plant or a part thereof, as compared to a corresponding non-transformed wild type non-human organism or a part thereof; and
[54668] (b) growing the non-human organism or a part thereof under conditions which permit the production of stearic acid or a composition comprising stearic acid in said non-human organism or in the culture medium surrounding said non-human organism.

[54669] A further embodiment of the present invention relates to a process for the production of stearic acid, which comprises
[54670] (a) increasing or generating the activity of a cation-transporting ATPase non-targeted in a non-human organism or a part thereof, preferably a microorganism, a plant cell, a plant or a part thereof, as compared to a corresponding non-transformed wild type non-human organism or a part thereof; and
[54671] (b) growing the non-human organism or a part thereof under conditions which permit the production of stearic acid or a composition comprising stearic acid in said non-human organism or in the culture medium surrounding said non-human organism.

[54672] A further embodiment of the present invention relates to a process for the production of stearic acid, which comprises
[54673] (a) increasing or generating the activity of a oxidoreductase non-targeted in a non-human organism or a part thereof, preferably a microorganism, a plant cell, a plant or a part thereof, as compared to a corresponding non-transformed wild type non-human organism or a part thereof; and
[54674] (b) growing the non-human organism or a part thereof under conditions which permit the production of stearic acid or a composition comprising stearic acid in said non-human organism or in the culture medium surrounding said non-human organism.

[54675] A further embodiment of the present invention relates to a process for the production of stearic acid, which comprises
[54676] (a) increasing or generating the activity of a tryptophan synthase alpha chain non-targeted in a non-human organism or a part thereof, preferably a microorganism, a plant cell, a plant or a part thereof, as compared to a corresponding non-transformed wild type non-human organism or a part thereof; and
[54677] (b) growing the non-human organism or a part thereof under conditions which permit the production of stearic acid or a composition comprising stearic acid in said non-human organism or in the culture medium surrounding said non-human organism.

[54678] A further embodiment of the present invention relates to a process for the production of stearic acid, which comprises
[54679] (a) increasing or generating the activity of a arginine decarboxylase non-targeted in a non-human organism or a part thereof, preferably a microorganism, a plant cell, a plant or a part thereof, as compared to a corresponding non-transformed wild type non-human organism or a part thereof; and
[54680] (b) growing the non-human organism or a part thereof under conditions which permit the production of stearic acid or a composition comprising stearic acid in said non-human organism or in the culture medium surrounding said non-human organism.

[54681] A further embodiment of the present invention relates to a process for the production of stearic acid, which comprises
[54682] (a) increasing or generating the activity of a acetyl-coenzyme A synthetase non-targeted in a non-human organism or a part thereof, preferably a microorganism, a plant cell, a plant or a part thereof, as compared to a corresponding non-transformed wild type non-human organism or a part thereof; and
[54683] (b) growing the non-human organism or a part thereof under conditions which permit the production of stearic acid or a composition comprising stearic acid in said non-human organism or in the culture medium surrounding said non-human organism.

[54684] A further embodiment of the present invention relates to a process for the production of stearic acid, which comprises
[54685] (a) increasing or generating the activity of a 3-deoxy-7-phosphoheptulonate synthase non-targeted in a non-human organism or a part thereof, preferably a microorganism, a plant cell, a plant or a part thereof, as compared to a corresponding non-transformed wild type non-human organism or a part thereof; and
[54686] (b) growing the non-human organism or a part thereof under conditions which permit the production of stearic acid or a composition comprising stearic acid in said non-human organism or in the culture medium surrounding said non-human organism.

[54687] A further embodiment of the present invention relates to a process for the production of stearic acid, which comprises
[54688] (a) increasing or generating the activity of a ycl049c-protein non-targeted in a non-human organism or a part thereof, preferably a microorganism, a plant cell, a plant or a part thereof, as compared to a corresponding non-transformed wild type non-human organism or a part thereof; and
[54689] (b) growing the non-human organism or a part thereof under conditions which permit the production of stearic acid or a composition comprising stearic acid in said non-human organism or in the culture medium surrounding said non-human organism.

[54690] A further embodiment of the present invention relates to a process for the production of stearic acid, which comprises
[54691] (a) increasing or generating the activity of a glycerol-3-phosphate dehydrogenase non-targeted in a non-human organism or a part thereof, preferably a microorganism, a plant cell, a plant or a part thereof, as compared to a corresponding non-transformed wild type non-human organism or a part thereof; and
[54692] (b) growing the non-human organism or a part thereof under conditions which permit the production of stearic acid or a composition comprising stearic acid in said non-human organism or in the culture medium surrounding said non-human organism.

[54693] A further embodiment of the present invention relates to a process for the production of stearic acid, which comprises
[54694] (a) increasing or generating the activity of a isocitrate dehydrogenase non-targeted in a non-human organism or a part thereof, preferably a microorganism, a plant cell, a plant or a part thereof, as compared to a corresponding non-transformed wild type non-human organism or a part thereof; and
[54695] (b) growing the non-human organism or a part thereof under conditions which permit the production of stearic acid or a composition comprising stearic acid in said non-human organism or in the culture medium surrounding said non-human organism.

[54696] A further embodiment of the present invention relates to a process for the production of stearic acid, which comprises
[54697] (a) increasing or generating the activity of a ydr507c-protein non-targeted in a non-human organism or a part thereof, preferably a microorganism, a plant cell, a plant or a part thereof, as compared to a corresponding non-transformed wild type non-human organism or a part thereof; and
[54698] (b) growing the non-human organism or a part thereof under conditions which permit the production of stearic acid or a composition comprising stearic acid in said non-human organism or in the culture medium surrounding said non-human organism.

[54699] A further embodiment of the present invention relates to a process for the production of stearic acid, which comprises
[54700] (a) increasing or generating the activity of a dihydroxyacetone kinase non-targeted in a non-human organism or a part thereof, preferably a microorganism, a plant cell, a plant or a part thereof, as compared to a corresponding non-transformed wild type non-human organism or a part thereof; and
[54701] (b) growing the non-human organism or a part thereof under conditions which permit the production of stearic acid or a composition comprising stearic acid in said non-human organism or in the culture medium surrounding said non-human organism.

[54702] A further embodiment of the present invention relates to a process for the production of stearic acid, which comprises
[54703] (a) increasing or generating the activity of a YGR104C-protein non-targeted in a non-human organism or a part thereof, preferably a microorganism, a plant cell, a plant or a part thereof, as compared to a corresponding non-transformed wild type non-human organism or a part thereof; and
[54704] (b) growing the non-human organism or a part thereof under conditions which permit the production of stearic acid or a composition comprising stearic acid in said non-human organism or in the culture medium surrounding said non-human organism.

[54705] A further embodiment of the present invention relates to a process for the production of stearic acid, which comprises
[54706] (a) increasing or generating the activity of a aconitate hydratase non-targeted in a non-human organism or a part thereof, preferably a microorganism, a plant cell, a plant or a part thereof, as compared to a corresponding non-transformed wild type non-human organism or a part thereof; and
[54707] (b) growing the non-human organism or a part thereof under conditions which permit the production of stearic acid or a composition comprising stearic acid in said non-human organism or in the culture medium surrounding said non-human organism.

[54708] A further embodiment of the present invention relates to a process for the production of stearic acid, which comprises
[54709] (a) increasing or generating the activity of a yor392w-protein non-targeted in a non-human organism or a part thereof, preferably a microorganism, a plant cell, a plant or a part thereof, as compared to a corresponding non-transformed wild type non-human organism or a part thereof; and
[54710] (b) growing the non-human organism or a part thereof under conditions which permit the production of stearic acid or a composition comprising stearic acid in said non-human organism or in the culture medium surrounding said non-human organism.

[54711] A further embodiment of the present invention relates to a process for the production of stearic acid, which comprises
[54712] (a) increasing or generating the activity of a pyruvate kinase non-targeted in a non-human organism or a part thereof, preferably a microorganism, a plant cell, a plant or a part thereof, as compared to a corresponding non-transformed wild type non-human organism or a part thereof; and
[54713] (b) growing the non-human organism or a part thereof under conditions which permit the production of stearic acid or a composition comprising stearic acid in said non-human organism or in the culture medium surrounding said non-human organism.

[54714] A further embodiment of the present invention relates to a process for the production of stearic acid, which comprises
[54715] (a) increasing or generating the activity of a glucose-6-phosphate 1-dehydrogenase non-targeted in a non-human organism or a part thereof, preferably a microorganism, a plant cell, a plant or a part thereof, as compared to a corresponding non-transformed wild type non-human organism or a part thereof; and
[54716] (b) growing the non-human organism or a part thereof under conditions which permit the production of stearic acid or a composition comprising stearic acid in said non-human organism or in the culture medium surrounding said non-human organism.

[54717] A further embodiment of the present invention relates to a process for the production of stearic acid, which comprises
[54718] (a) increasing or generating the activity of a polypeptide comprising a polypeptide as depicted in the respective line in column 5 or 8 of Table II, application no. 10, or a homolog or a fragment thereof, a consensus sequence or at least one polypeptide motif as depicted in the respective line in column 8 of Table IV, application no. 10; or increasing or generating the activity of an expression product of one or more nucleic acid molecule(s) comprising a polynucleotide as depicted in the respective line in column 5 or 8 of Table I, application no. 10, preferably the coding region thereof, or a homolog or a fragment thereof; non-targeted in a non-human organism or a part thereof; preferably a microorganism, a plant cell, a plant or a part thereof, as compared to a corresponding non-transformed wild type non-human organism or a part thereof; and
[54719] (b) growing the non-human organism under conditions which permit the production of stearic acid, or a composition comprising stearic acid in said non-human organism or in the culture medium surrounding said non-human organism.

[54720] A further embodiment of the present invention relates to a process for the production of stearic acid, which comprises
[54721] (a) increasing or generating one or more activities selected from the group consisting of transcription factor in an organelle, preferably in plastids or mitochondria, especially in plastids, of a non-human organism or a part thereof, preferably a microorganism, a plant cell, a plant or a part thereof, as compared to a corresponding non-transformed wild type non-human organism or a part thereof; and
[54722] (b) growing the non-human organism or a part thereof under conditions which permit the production of stearic acid or a composition comprising stearic acid in said non-human organism or in the culture medium surrounding said non-human organism.

[54723] A further embodiment of the present invention relates to a process for the production of stearic acid, which comprises
[54724] (a) increasing or generating one or more activities selected from the group consisting of protein phosphatase in an organelle, preferably in plastids or mitochondria, especially in plastids, of a non-human organism or a part thereof, preferably a microorganism, a plant cell, a plant or a part thereof, as compared to a corresponding non-transformed wild type non-human organism or a part thereof; and
[54725] (b) growing the non-human organism or a part thereof under conditions which permit the production of stearic acid or a composition comprising stearic acid in said non-human organism or in the culture medium surrounding said non-human organism.

[54726] A further embodiment of the present invention relates to a process for the production of stearic acid, which comprises
[54727] (a) increasing or generating one or more activities selected from the group consisting of citrate synthase in an organelle, preferably in plastids or mitochondria, especially in plastids, of a non-human organism or a part thereof, preferably a microorganism, a plant cell, a plant or a part thereof, as compared to a corresponding non-transformed wild type non-human organism or a part thereof; and
[54728] (b) growing the non-human organism or a part thereof under conditions which permit the production of stearic acid or a composition comprising stearic acid in said non-human organism or in the culture medium surrounding said non-human organism.

[54729] A further embodiment of the present invention relates to a process for the production of stearic acid, which comprises
[54730] (a) increasing or generating one or more activities selected from the group consisting of At2g45420-protein in an organelle, preferably in plastids or mitochondria, especially in plastids, of a non-human organism or a part thereof, preferably a microorganism, a plant cell, a plant or a part thereof, as compared to a corresponding non-transformed wild type non-human organism or a part thereof; and
[54731] (b) growing the non-human organism or a part thereof under conditions which permit the production of stearic acid or a composition comprising stearic acid in said non-human organism or in the culture medium surrounding said non-human organism.

[54732] A further embodiment of the present invention relates to a process for the production of stearic acid, which comprises
[54733] (a) increasing or generating one or more activities selected from the group consisting of F-box protein in an organelle, preferably in plastids or mitochondria, especially in plastids, of a non-human organism or a part thereof, preferably a microorganism, a plant cell, a plant or a part thereof, as compared to a corresponding non-transformed wild type non-human organism or a part thereof; and
[54734] (b) growing the non-human organism or a part thereof under conditions which permit the production of stearic acid or a composition comprising stearic acid in said non-human organism or in the culture medium surrounding said non-human organism.

[54735] A further embodiment of the present invention relates to a process for the production of stearic acid, which comprises
[54736] (a) increasing or generating one or more activities selected from the group consisting of CCAAT-binding transcription factor in an organelle, preferably in plastids or mitochondria, especially in plastids, of a non-human organism or a part thereof, preferably a microorganism, a plant cell, a plant or a part thereof, as compared to a corresponding non-transformed wild type non-human organism or a part thereof; and
[54737] (b) growing the non-human organism or a part thereof under conditions which permit the production of stearic acid or a composition comprising stearic acid in said non-human organism or in the culture medium surrounding said non-human organism.

[54738] A further embodiment of the present invention relates to a process for the production of stearic acid, which comprises
[54739] (a) increasing or generating one or more activities selected from the group consisting of glutaredoxin in an organelle, preferably in plastids or mitochondria, especially in plastids, of a non-human organism or a part thereof, preferably a microorganism, a plant cell, a plant or a part thereof, as compared to a corresponding non-transformed wild type non-human organism or a part thereof; and
[54740] (b) growing the non-human organism or a part thereof under conditions which permit the production of stearic acid or a composition comprising stearic acid in said non-human organism or in the culture medium surrounding said non-human organism.

[54741] A further embodiment of the present invention relates to a process for the production of stearic acid, which comprises
[54742] (a) increasing or generating one or more activities selected from the group consisting of monothiol glutaredoxin in an organelle, preferably in plastids or mitochondria, especially in plastids, of a non-human organism or a part thereof, preferably a microorganism, a plant cell, a plant or a part thereof, as compared to a corresponding non-transformed wild type non-human organism or a part thereof; and
[54743] (b) growing the non-human organism or a part thereof under conditions which permit the production of stearic acid or a composition comprising stearic acid in said non-human organism or in the culture medium surrounding said non-human organism.

[54744] A further embodiment of the present invention relates to a process for the production of stearic acid, which comprises
[54745] (a) increasing or generating one or more activities selected from the group consisting of monothiol glutaredoxin in an organelle, preferably in plastids or mitochondria, especially in plastids, of a non-human organism or a part thereof, preferably a microorganism, a plant cell, a plant or a part thereof, as compared to a corresponding non-transformed wild type non-human organism or a part thereof; and
[54746] (b) growing the non-human organism or a part thereof under conditions which permit the production of stearic acid or a composition comprising stearic acid in said non-human organism or in the culture medium surrounding said non-human organism.

[54747] A further embodiment of the present invention relates to a process for the production of stearic acid, which comprises
[54748] (a) increasing or generating one or more activities selected from the group consisting of heat shock transcription factor in an organelle, preferably in plastids or mitochondria, especially in plastids, of a non-human organism or a part thereof, preferably a microorganism, a plant cell, a plant or a part thereof, as compared to a corresponding non-transformed wild type non-human organism or a part thereof; and
[54749] (b) growing the non-human organism or a part thereof under conditions which permit the production of stearic acid or a composition comprising stearic acid in said non-human organism or in the culture medium surrounding said non-human organism.

[54750] A further embodiment of the present invention relates to a process for the production of stearic acid, which comprises
[54751] (a) increasing or generating one or more activities selected from the group consisting of protein phosphatase in an organelle, preferably in plastids or mitochondria, especially in plastids, of a non-human organism or a part thereof, preferably a microorganism, a plant cell, a plant or a part thereof, as compared to a corresponding non-transformed wild type non-human organism or a part thereof; and
[54752] (b) growing the non-human organism or a part thereof under conditions which permit the production of stearic acid or a composition comprising stearic acid in said non-human organism or in the culture medium surrounding said non-human organism.

[54753] A further embodiment of the present invention relates to a process for the production of stearic acid, which comprises
[54754] (a) increasing or generating one or more activities selected from the group consisting of glutaredoxin in an organelle, preferably in plastids or mitochondria, especially in plastids, of a non-human organism or a part thereof, preferably a microorganism, a plant cell, a plant or a part thereof, as compared to a corresponding non-transformed wild type non-human organism or a part thereof; and
[54755] (b) growing the non-human organism or a part thereof under conditions which permit the production of stearic acid or a composition comprising stearic acid in said non-human organism or in the culture medium surrounding said non-human organism.

[54756] A further embodiment of the present invention relates to a process for the production of stearic acid, which comprises
[54757] (a) increasing or generating one or more activities selected from the group consisting of calcium-dependent protein kinase in an organelle, preferably in plastids or mitochondria, especially in plastids, of a non-human organism or a part thereof, preferably a microorganism, a plant cell, a plant or a part thereof, as compared to a corresponding non-transformed wild type non-human organism or a part thereof; and
[54758] (b) growing the non-human organism or a part thereof under conditions which permit the production of stearic acid or a composition comprising stearic acid in said non-human organism or in the culture medium surrounding said non-human organism.

[54759] A further embodiment of the present invention relates to a process for the production of stearic acid, which comprises
[54760] (a) increasing or generating one or more activities selected from the group consisting of protein phosphatase in an organelle, preferably in plastids or mitochondria, especially in plastids, of a non-human organism or a part thereof, preferably a microorganism, a plant cell, a plant or a part thereof, as compared to a corresponding non-transformed wild type non-human organism or a part thereof; and
[54761] (b) growing the non-human organism or a part thereof under conditions which permit the production of stearic acid or a composition comprising stearic acid in said non-human organism or in the culture medium surrounding said non-human organism.

[54762] A further embodiment of the present invention relates to a process for the production of stearic acid, which comprises
[54763] (a) increasing or generating one or more activities selected from the group consisting of b0283-protein in an organelle, preferably in plastids or mitochondria, especially in plastids, of a non-human organism or a part thereof, preferably a microorganism, a plant cell, a plant or a part thereof, as compared to a corresponding non-transformed wild type non-human organism or a part thereof; and
[54764] (b) growing the non-human organism or a part thereof under conditions which permit the production of stearic acid or a composition comprising stearic acid in said non-human organism or in the culture medium surrounding said non-human organism.

[54765] A further embodiment of the present invention relates to a process for the production of stearic acid, which comprises
[54766] (a) increasing or generating one or more activities selected from the group consisting of betaine aldehyde dehydrogenase in an organelle, preferably in plastids or mitochondria, especially in plastids, of a non-human organism or a part thereof, preferably a microorganism, a plant cell, a plant or a part thereof, as compared to a corresponding non-transformed wild type non-human organism or a part thereof; and
[54767] (b) growing the non-human organism or a part thereof under conditions which permit the production of stearic acid or a composition comprising stearic acid in said non-human organism or in the culture medium surrounding said non-human organism.

[54768] A further embodiment of the present invention relates to a process for the production of stearic acid, which comprises
[54769] (a) increasing or generating one or more activities selected from the group consisting of b0371-protein in an organelle, preferably in plastids or mitochondria, especially in plastids, of a non-human organism or a part thereof, preferably a microorganism, a plant cell, a plant or a part thereof, as compared to a corresponding non-transformed wild type non-human organism or a part thereof; and
[54770] (b) growing the non-human organism or a part thereof under conditions which permit the production of stearic acid or a composition comprising stearic acid in said non-human organism or in the culture medium surrounding said non-human organism.

[54771] A further embodiment of the present invention relates to a process for the production of stearic acid, which comprises
[54772] (a) increasing or generating one or more activities selected from the group consisting of ATP-binding component of a transport system in an organelle, preferably in plastids or mitochondria, especially in plastids, of a non-human organism or a part thereof, preferably a microorganism, a plant cell, a plant or a part thereof, as compared to a corresponding non-transformed wild type non-human organism or a part thereof; and
[54773] (b) growing the non-human organism or a part thereof under conditions which permit the production of stearic acid or a composition comprising stearic acid in said non-human organism or in the culture medium surrounding said non-human organism.

[54774] A further embodiment of the present invention relates to a process for the production of stearic acid, which comprises
[54775] (a) increasing or generating one or more activities selected from the group consisting of sodium/proton antiporter in an organelle, preferably in plastids or mitochondria, especially in plastids, of a non-human organism or a part thereof, preferably a microorganism, a plant cell, a plant or a part thereof, as compared to a corresponding non-transformed wild type non-human organism or a part thereof; and
[54776] (b) growing the non-human organism or a part thereof under conditions which permit the production of stearic acid or a composition comprising stearic acid in said non-human organism or in the culture medium surrounding said non-human organism.

[54777] A further embodiment of the present invention relates to a process for the production of stearic acid, which comprises
[54778] (a) increasing or generating one or more activities selected from the group consisting of lipoprotein precursor in an organelle, preferably in plastids or mitochondria, especially in plastids, of a non-human organism or a part thereof, preferably a microorganism, a plant cell, a plant or a part thereof, as compared to a corresponding non-transformed wild type non-human organism or a part thereof; and
[54779] (b) growing the non-human organism or a part thereof under conditions which permit the production of stearic acid or a composition comprising stearic acid in said non-human organism or in the culture medium surrounding said non-human organism.

[54780] A further embodiment of the present invention relates to a process for the production of stearic acid, which comprises
[54781] (a) increasing or generating one or more activities selected from the group consisting of acid shock protein in an organelle, preferably in plastids or mitochondria, especially in plastids, of a non-human organism or a part thereof, preferably a microorganism, a plant cell, a plant or a part thereof, as compared to a corresponding non-transformed wild type non-human organism or a part thereof; and
[54782] (b) growing the non-human organism or a part thereof under conditions which permit the production of stearic acid or a composition comprising stearic acid in said non-human organism or in the culture medium surrounding said non-human organism.

[54783] A further embodiment of the present invention relates to a process for the production of stearic acid, which comprises
[54784] (a) increasing or generating one or more activities selected from the group consisting of b1672-protein in an organelle, preferably in plastids or mitochondria, especially in plastids, of a non-human organism or a part thereof, preferably a microorganism, a plant cell, a plant or a part thereof, as compared to a corresponding non-transformed wild type non-human organism or a part thereof; and
[54785] (b) growing the non-human organism or a part thereof under conditions which permit the production of stearic acid or a composition comprising stearic acid in said non-human organism or in the culture medium surrounding said non-human organism.

[54786] A further embodiment of the present invention relates to a process for the production of stearic acid, which comprises
[54787] (a) increasing or generating one or more activities selected from the group consisting of protease in an organelle, preferably in plastids or mitochondria, especially in plastids, of a non-human organism or a part thereof, preferably a microorganism, a plant cell, a plant or a part thereof, as compared to a corresponding non-transformed wild type non-human organism or a part thereof; and
[54788] (b) growing the non-human organism or a part thereof under conditions which permit the production of stearic acid or a composition comprising stearic acid in said non-human organism or in the culture medium surrounding said non-human organism.

[54789] A further embodiment of the present invention relates to a process for the production of stearic acid, which comprises
[54790] (a) increasing or generating one or more activities selected from the group consisting of b2032-protein in an organelle, preferably in plastids or mitochondria, especially in plastids, of a non-human organism or a part thereof, preferably a microorganism, a plant cell, a plant or a part thereof, as compared to a corresponding non-transformed wild type non-human organism or a part thereof; and
[54791] (b) growing the non-human organism or a part thereof under conditions which permit the production of stearic acid or a composition comprising stearic acid in said non-human organism or in the culture medium surrounding said non-human organism.

[54792] A further embodiment of the present invention relates to a process for the production of stearic acid, which comprises
[54793] (a) increasing or generating one or more activities selected from the group consisting of b2399-protein in an organelle, preferably in plastids or mitochondria, especially in plastids, of a non-human organism or a part thereof, preferably a microorganism, a plant cell, a plant or a part thereof, as compared to a corresponding non-transformed wild type non-human organism or a part thereof; and
[54794] (b) growing the non-human organism or a part thereof under conditions which permit the production of stearic acid or a composition comprising stearic acid in said non-human organism or in the culture medium surrounding said non-human organism.

[54795] A further embodiment of the present invention relates to a process for the production of stearic acid, which comprises
[54796] (a) increasing or generating one or more activities selected from the group consisting of ethanolamine utilization protein in an organelle, preferably in plastids or mitochondria, especially in plastids, of a non-human organism or a part thereof, preferably a microorganism, a plant cell, a plant or a part thereof, as compared to a corresponding non-transformed wild type non-human organism or a part thereof; and
[54797] (b) growing the non-human organism or a part thereof under conditions which permit the production of stearic acid or a composition comprising stearic acid in said non-human organism or in the culture medium surrounding said non-human organism.

[54798] A further embodiment of the present invention relates to a process for the production of stearic acid, which comprises
[54799] (a) increasing or generating one or more activities selected from the group consisting of NADH dehydrogenase subunit N in an organelle, preferably in plastids or mitochondria, especially in plastids, of a non-human organism or a part thereof, preferably a microorganism, a plant cell, a plant or a part thereof, as compared to a corresponding non-transformed wild type non-human organism or a part thereof; and
[54800] (b) growing the non-human organism or a part thereof under conditions which permit the production of stearic acid or a composition comprising stearic acid in said non-human organism or in the culture medium surrounding said non-human organism.

[54801] A further embodiment of the present invention relates to a process for the production of stearic acid, which comprises
[54802] (a) increasing or generating one or more activities selected from the group consisting of b2513-protein in an organelle, preferably in plastids or mitochondria, especially in plastids, of a non-human organism or a part thereof, preferably a microorganism, a plant cell, a plant or a part thereof, as compared to a corresponding non-transformed wild type non-human organism or a part thereof; and
[54803] (b) growing the non-human organism or a part thereof under conditions which permit the production of stearic acid or a composition comprising stearic acid in said non-human organism or in the culture medium surrounding said non-human organism.

[54804] A further embodiment of the present invention relates to a process for the production of stearic acid, which comprises
[54805] (a) increasing or generating one or more activities selected from the group consisting of phospho-2-dehydro-3-deoxyheptonate aldolase in an organelle, preferably in plastids or mitochondria, especially in plastids, of a non-human organism or a part thereof, preferably a microorganism, a plant cell, a plant or a part thereof, as compared to a corresponding non-transformed wild type non-human organism or a part thereof; and
[54806] (b) growing the non-human organism or a part thereof under conditions which permit the production of stearic acid or a composition comprising stearic acid in said non-human organism or in the culture medium surrounding said non-human organism.

[54807] A further embodiment of the present invention relates to a process for the production of stearic acid, which comprises
[54808] (a) increasing or generating one or more activities selected from the group consisting of 2-C-methyl-D-erythritol 4-phosphate cytidylyltransferase in an organelle, preferably in plastids or mitochondria, especially in plastids, of a non-human organism or a part thereof, preferably a microorganism, a plant cell, a plant or a part thereof, as compared to a corresponding non-transformed wild type non-human organism or a part thereof; and
[54809] (b) growing the non-human organism or a part thereof under conditions which permit the production of stearic acid or a composition comprising stearic acid in said non-human organism or in the culture medium surrounding said non-human organism.

[54810] A further embodiment of the present invention relates to a process for the production of stearic acid, which comprises
[54811] (a) increasing or generating one or more activities selected from the group consisting of b2849-protein in an organelle, preferably in plastids or mitochondria, especially in plastids, of a non-human organism or a part thereof, preferably a microorganism, a plant cell, a plant or a part thereof, as compared to a corresponding non-transformed wild type non-human organism or a part thereof; and
[54812] (b) growing the non-human organism or a part thereof under conditions which permit the production of stearic acid or a composition comprising stearic acid in said non-human organism or in the culture medium surrounding said non-human organism.

[54813] A further embodiment of the present invention relates to a process for the production of stearic acid, which comprises
[54814] (a) increasing or generating one or more activities selected from the group consisting of aspartate-ammonia ligase in an organelle, preferably in plastids or mitochondria, especially in plastids, of a non-human organism or a part thereof, preferably a microorganism, a plant cell, a plant or a part thereof, as compared to a corresponding non-transformed wild type non-human organism or a part thereof; and
[54815] (b) growing the non-human organism or a part thereof under conditions which permit the production of stearic acid or a composition comprising stearic acid in said non-human organism or in the culture medium surrounding said non-human organism.

[54816] A further embodiment of the present invention relates to a process for the production of stearic acid, which comprises
[54817] (a) increasing or generating one or more activities selected from the group consisting of 3-ketoacyl-CoA thiolase in an organelle, preferably in plastids or mitochondria, especially in plastids, of a non-human organism or a part thereof, preferably a microorganism, a plant cell, a plant or a part thereof, as compared to a corresponding non-transformed wild type non-human organism or a part thereof; and
[54818] (b) growing the non-human organism or a part thereof under conditions which permit the production of stearic acid or a composition comprising stearic acid in said non-human organism or in the culture medium surrounding said non-human organism.

[54819] A further embodiment of the present invention relates to a process for the production of stearic acid, which comprises
[54820] (a) increasing or generating one or more activities selected from the group consisting of b3989-protein in an organelle, preferably in plastids or mitochondria, especially in plastids, of a non-human organism or a part thereof, preferably a microorganism, a plant cell, a plant or a part thereof, as compared to a corresponding non-transformed wild type non-human organism or a part thereof; and
[54821] (b) growing the non-human organism or a part thereof under conditions which permit the production of stearic acid or a composition comprising stearic acid in said non-human organism or in the culture medium surrounding said non-human organism.

[54822] A further embodiment of the present invention relates to a process for the production of stearic acid, which comprises
[54823] (a) increasing or generating one or more activities selected from the group consisting of b4121-protein in an organelle, preferably in plastids or mitochondria, especially in plastids, of a non-human organism or a part thereof, preferably a microorganism, a plant cell, a plant or a part thereof, as compared to a corresponding non-transformed wild type non-human organism or a part thereof; and
[54824] (b) growing the non-human organism or a part thereof under conditions which permit the production of stearic acid or a composition comprising stearic acid in said non-human organism or in the culture medium surrounding said non-human organism.

[54825] A further embodiment of the present invention relates to a process for the production of stearic acid, which comprises
[54826] (a) increasing or generating one or more activities selected from the group consisting of glutaredoxin in an organelle, preferably in plastids or mitochondria, especially in plastids, of a non-human organism or a part thereof, preferably a microorganism, a plant cell, a plant or a part thereof, as compared to a corresponding non-transformed wild type non-human organism or a part thereof; and
[54827] (b) growing the non-human organism or a part thereof under conditions which permit the production of stearic acid or a composition comprising stearic acid in said non-human organism or in the culture medium surrounding said non-human organism.

[54828] A further embodiment of the present invention relates to a process for the production of stearic acid, which comprises
[54829] (a) increasing or generating one or more activities selected from the group consisting of transcription factor in an organelle, preferably in plastids or mitochondria, especially in plastids, of a non-human organism or a part thereof, preferably a microorganism, a plant cell, a plant or a part thereof, as compared to a corresponding non-transformed wild type non-human organism or a part thereof; and
[54830] (b) growing the non-human organism or a part thereof under conditions which permit the production of stearic acid or a composition comprising stearic acid in said non-human organism or in the culture medium surrounding said non-human organism.

[54831] A further embodiment of the present invention relates to a process for the production of stearic acid, which comprises
[54832] (a) increasing or generating one or more activities selected from the group consisting of glucokinase in an organelle, preferably in plastids or mitochondria, especially in plastids, of a non-human organism or a part thereof, preferably a microorganism, a plant cell, a plant or a part thereof, as compared to a corresponding non-transformed wild type non-human organism or a part thereof; and
[54833] (b) growing the non-human organism or a part thereof under conditions which permit the production of stearic acid or a composition comprising stearic acid in said non-human organism or in the culture medium surrounding said non-human organism.

[54834] A further embodiment of the present invention relates to a process for the production of stearic acid, which comprises
[54835] (a) increasing or generating one or more activities selected from the group consisting of sll1032-protein in an organelle, preferably in plastids or mitochondria, especially in plastids, of a non-human organism or a part thereof, preferably a microorganism, a plant cell, a plant or a part thereof, as compared to a corresponding non-transformed wild type non-human organism or a part thereof; and
[54836] (b) growing the non-human organism or a part thereof under conditions which permit the production of stearic acid or a composition comprising stearic acid in said non-human organism or in the culture medium surrounding said non-human organism.

[54837] A further embodiment of the present invention relates to a process for the production of stearic acid, which comprises
[54838] (a) increasing or generating one or more activities selected from the group consisting of CTP synthetase in an organelle, preferably in plastids or mitochondria, especially in plastids, of a non-human organism or a part thereof, preferably a microorganism, a plant cell, a plant or a part thereof, as compared to a corresponding non-transformed wild type non-human organism or a part thereof; and
[54839] (b) growing the non-human organism or a part thereof under conditions which permit the production of stearic acid or a composition comprising stearic acid in said non-human organism or in the culture medium surrounding said non-human organism.

[54840] A further embodiment of the present invention relates to a process for the production of stearic acid, which comprises
[54841] (a) increasing or generating one or more activities selected from the group consisting of coproporphyrinogen III oxidase in an organelle, preferably in plastids or mitochondria, especially in plastids, of a non-human organism or a part thereof, preferably a microorganism, a plant cell, a plant or a part thereof, as compared to a corresponding non-transformed wild type non-human organism or a part thereof; and
[54842] (b) growing the non-human organism or a part thereof under conditions which permit the production of stearic acid or a composition comprising stearic acid in said non-human organism or in the culture medium surrounding said non-human organism.

[54843] A further embodiment of the present invention relates to a process for the production of stearic acid, which comprises
[54844] (a) increasing or generating one or more activities selected from the group consisting of cation-transporting ATPase in an organelle, preferably in plastids or mitochondria, especially in plastids, of a non-human organism or a part thereof, preferably a microorganism, a plant cell, a plant or a part thereof, as compared to a corresponding non-transformed wild type non-human organism or a part thereof; and
[54845] (b) growing the non-human organism or a part thereof under conditions which permit the production of stearic acid or a composition comprising stearic acid in said non-human organism or in the culture medium surrounding said non-human organism.

[54846] A further embodiment of the present invention relates to a process for the production of stearic acid, which comprises
[54847] (a) increasing or generating one or more activities selected from the group consisting of oxidoreductase in an organelle, preferably in plastids or mitochondria, especially in plastids, of a non-human organism or a part thereof, preferably a microorganism, a plant cell, a plant or a part thereof, as compared to a corresponding non-transformed wild type non-human organism or a part thereof; and
[54848] (b) growing the non-human organism or a part thereof under conditions which permit the production of stearic acid or a composition comprising stearic acid in said non-human organism or in the culture medium surrounding said non-human organism.

[54849] A further embodiment of the present invention relates to a process for the production of stearic acid, which comprises
[54850] (a) increasing or generating one or more activities selected from the group consisting of tryptophan synthase alpha chain in an organelle, preferably in plastids or mitochondria, especially in plastids, of a non-human organism or a part thereof, preferably a microorganism, a plant cell, a plant or a part thereof, as compared to a corresponding non-transformed wild type non-human organism or a part thereof; and
[54851] (b) growing the non-human organism or a part thereof under conditions which permit the production of stearic acid or a composition comprising stearic acid in said non-human organism or in the culture medium surrounding said non-human organism.

[54852] A further embodiment of the present invention relates to a process for the production of stearic acid, which comprises
[54853] (a) increasing or generating one or more activities selected from the group consisting of arginine decarboxylase in an organelle, preferably in plastids or mitochondria, especially in plastids, of a non-human organism or a part thereof, preferably a microorganism, a plant cell, a plant or a part thereof, as compared to a corresponding non-transformed wild type non-human organism or a part thereof; and
[54854] (b) growing the non-human organism or a part thereof under conditions which permit the production of stearic acid or a composition comprising stearic acid in said non-human organism or in the culture medium surrounding said non-human organism.

[54855] A further embodiment of the present invention relates to a process for the production of stearic acid, which comprises
[54856] (a) increasing or generating one or more activities selected from the group consisting of acetyl-coenzyme A synthetase in an organelle, preferably in plastids or mitochondria, especially in plastids, of a non-human organism or a part thereof, preferably a microorganism, a plant cell, a plant or a part thereof, as compared to a corresponding non-transformed wild type non-human organism or a part thereof; and
[54857] (b) growing the non-human organism or a part thereof under conditions which permit the production of stearic acid or a composition comprising stearic acid in said non-human organism or in the culture medium surrounding said non-human organism.

[54858] A further embodiment of the present invention relates to a process for the production of stearic acid, which comprises
[54859] (a) increasing or generating one or more activities selected from the group consisting of 3-deoxy-7-phosphoheptulonate synthase in an organelle, preferably in plastids or mitochondria, especially in plastids, of a non-human organism or a part thereof, preferably a microorganism, a plant cell, a plant or a part thereof, as compared to a corresponding non-transformed wild type non-human organism or a part thereof; and
[54860] (b) growing the non-human organism or a part thereof under conditions which permit the production of stearic acid or a composition comprising stearic acid in said non-human organism or in the culture medium surrounding said non-human organism.

[54861] A further embodiment of the present invention relates to a process for the production of stearic acid, which comprises
[54862] (a) increasing or generating one or more activities selected from the group consisting of ycl049c-protein in an organelle, preferably in plastids or mitochondria, especially in plastids, of a non-human organism or a part thereof, preferably a microorganism, a plant cell, a plant or a part thereof, as compared to a corresponding non-transformed wild type non-human organism or a part thereof; and
[54863] (b) growing the non-human organism or a part thereof under conditions which permit the production of stearic acid or a composition comprising stearic acid in said non-human organism or in the culture medium surrounding said non-human organism.

[54864] A further embodiment of the present invention relates to a process for the production of stearic acid, which comprises
[54865] (a) increasing or generating one or more activities selected from the group consisting of glycerol-3-phosphate dehydrogenase in an organelle, preferably in plastids or mitochondria, especially in plastids, of a non-human organism or a part thereof, preferably a microorganism, a plant cell, a plant or a part thereof, as compared to a corresponding non-transformed wild type non-human organism or a part thereof; and
[54866] (b) growing the non-human organism or a part thereof under conditions which permit the production of stearic acid or a composition comprising stearic acid in said non-human organism or in the culture medium surrounding said non-human organism.

[54867] A further embodiment of the present invention relates to a process for the production of stearic acid, which comprises
[54868] (a) increasing or generating one or more activities selected from the group consisting of isocitrate dehydrogenase in an organelle, preferably in plastids or mitochondria, especially in plastids, of a non-human organism or a part thereof, preferably a microorganism, a plant cell, a plant or a part thereof, as compared to a corresponding non-transformed wild type non-human organism or a part thereof; and
[54869] (b) growing the non-human organism or a part thereof under conditions which permit the production of stearic acid or a composition comprising stearic acid in said non-human organism or in the culture medium surrounding said non-human organism.

[54870] A further embodiment of the present invention relates to a process for the production of stearic acid, which comprises
[54871] (a) increasing or generating one or more activities selected from the group consisting of ydr507c-protein in an organelle, preferably in plastids or mitochondria, especially in plastids, of a non-human organism or a part thereof, preferably a microorganism, a plant cell, a plant or a part thereof, as compared to a corresponding non-transformed wild type non-human organism or a part thereof; and
[54872] (b) growing the non-human organism or a part thereof under conditions which permit the production of stearic acid or a composition comprising stearic acid in said non-human organism or in the culture medium surrounding said non-human organism.

[54873] A further embodiment of the present invention relates to a process for the production of stearic acid, which comprises
[54874] (a) increasing or generating one or more activities selected from the group consisting of dihydroxyacetone kinase in an organelle, preferably in plastids or mitochondria, especially in plastids, of a non-human organism or a part thereof, preferably a microorganism, a plant cell, a plant or a part thereof, as compared to a corresponding non-transformed wild type non-human organism or a part thereof; and
[54875] (b) growing the non-human organism or a part thereof under conditions which permit the production of stearic acid or a composition comprising stearic acid in said non-human organism or in the culture medium surrounding said non-human organism.

[54876] A further embodiment of the present invention relates to a process for the production of stearic acid, which comprises
[54877] (a) increasing or generating one or more activities selected from the group consisting of YGR104C-protein in an organelle, preferably in plastids or mitochondria, especially in plastids, of a non-human organism or a part thereof, preferably a microorganism, a plant cell, a plant or a part thereof, as compared to a corresponding non-transformed wild type non-human organism or a part thereof; and
[54878] (b) growing the non-human organism or a part thereof under conditions which permit the production of stearic acid or a composition comprising stearic acid in said non-human organism or in the culture medium surrounding said non-human organism.

[54879] A further embodiment of the present invention relates to a process for the production of stearic acid, which comprises
[54880] (a) increasing or generating one or more activities selected from the group consisting of aconitate hydratase in an organelle, preferably in plastids or mitochondria, especially in plastids, of a non-human organism or a part thereof, preferably a microorganism, a plant cell, a plant or a part thereof, as compared to a corresponding non-transformed wild type non-human organism or a part thereof; and
[54881] (b) growing the non-human organism or a part thereof under conditions which permit the production of stearic acid or a composition comprising stearic acid in said non-human organism or in the culture medium surrounding said non-human organism.

[54882] A further embodiment of the present invention relates to a process for the production of stearic acid, which comprises
[54883] (a) increasing or generating one or more activities selected from the group consisting of yor392w-protein in an organelle, preferably in plastids or mitochondria, especially in plastids, of a non-human organism or a part thereof, preferably a microorganism, a plant cell, a plant or a part thereof, as compared to a corresponding non-transformed wild type non-human organism or a part thereof; and
[54884] (b) growing the non-human organism or a part thereof under conditions which permit the production of stearic acid or a composition comprising stearic acid in said non-human organism or in the culture medium surrounding said non-human organism.

[54885] A further embodiment of the present invention relates to a process for the production of stearic acid, which comprises
[54886] (a) increasing or generating one or more activities selected from the group consisting of pyruvate kinase in an organelle, preferably in plastids or mitochondria, especially in plastids, of a non-human organism or a part thereof, preferably a microorganism, a plant cell, a plant or a part thereof, as compared to a corresponding non-transformed wild type non-human organism or a part thereof; and
[54887] (b) growing the non-human organism or a part thereof under conditions which permit the production of stearic acid or a composition comprising stearic acid in said non-human organism or in the culture medium surrounding said non-human organism.

[54888] A further embodiment of the present invention relates to a process for the production of stearic acid, which comprises
[54889] (a) increasing or generating one or more activities selected from the group consisting of glucose-6-phosphate 1-dehydrogenase in an organelle, preferably in plastids or mitochondria, especially in plastids, of a non-human organism or a part thereof, preferably a microorganism, a plant cell, a plant or a part thereof, as compared to a corresponding non-transformed wild type non-human organism or a part thereof; and
[54890] (b) growing the non-human organism or a part thereof under conditions which permit the production of stearic acid or a composition comprising stearic acid in said non-human organism or in the culture medium surrounding said non-human organism.

[54891] A further embodiment of the present invention relates to a process for the production of stearic acid, which comprises
[54892] (a1) increasing or generating the activity of a polypeptide comprising a polypeptide as depicted in the respective line in column 5 or 8 of Table II, application no. 10, or a homolog or fragment thereof, a consensus sequence or at least one polypeptide motif as depicted in column 8 of Table IV, application no. 10; or increasing or generating the activity of an expression product of one or more nucleic acid molecule(s) comprising a polynucleotide as depicted in the respective line in column 5 or 8 of Table I, application no. 10, preferably the coding region thereof, or a homolog or a fragment thereof;
[54893] in an organelle, preferably in plastids or mitochondria, especially in plastids, in a non-human organism or a part thereof; preferably a microorganism, a plant cell, a plant or a part thereof, as compared to a corresponding non-transformed wild type non-human organism or a part thereof; or
[54894] (a2) increasing or generating the activity of a polypeptide comprising a polypeptide as depicted in the respective line in column 5 or 8 of Table II, application no. 10, or a homolog or a fragment thereof, a consensus sequence or at least one polypeptide motif as depicted in the respective line in column 8 of Table IV, application no. 10, which is joined to a transit peptide; or
[54895] increasing or generating the activity of an expression product of one or more nucleic acid molecule(s) comprising a polynucleotide as depicted in the respective line in column 5 or 8 of Table I, application no. 10, preferably the coding region thereof, or a homolog or a fragment thereof, which is joined to a nucleic acid sequence encoding an organelle localization sequence, preferably a plastid or a mitochondrion localization sequence, especially a plastid localization sequence;
[54896] in a non-human organism or a part thereof; preferably a microorganism, a plant cell, a plant or a part thereof, as compared to a corresponding non-transformed wild type non-human organism or a part thereof; or
[54897] (a3) increasing or generating the activity of a polypeptide comprising a polypeptide as depicted in the respective line in column 5 or 8 of Table II, application no. 10, or a homolog or a fragment thereof, a consensus sequence or at least one polypeptide motif as depicted in the respective line in column 8 of Table IV, application no. 10; or increasing or generating the activity of an expression product of one or more nucleic acid molecule(s) comprising a polynucleotide as depicted in the respective line in column 5 or 8 of Table I, application no. 10, preferably the coding region thereof, or a homolog or a fragment thereof;
[54898] in an organelle, preferably in plastids or mitochondria, especially in plastids, in a non-human organism or a part thereof; preferably a microorganism, a plant cell, a plant or a part thereof, through transformation of the organelle, as compared to a corresponding non-transformed wild type non-human organism or a part thereof;
[54899] and
[54900] (b) growing the non-human organism under conditions which permit the production of stearic acid, or a composition comprising stearic acid in said non-human organism or in the culture medium surrounding said non-human organism.

[54901] Accordingly, the present invention relates to a process for the production of stearic acid, which comprises
[54902] (a) increasing or generating the activity of a transcription factor in the cytosol of a cell of a non-human organism or a part thereof, preferably a microorganism, a plant cell, a plant or a part thereof, as compared to a corresponding non-transformed wild type non-human organism or a part thereof; and
[54903] (b) growing the non-human organism or a part thereof under conditions which permit the production of stearic acid or a composition comprising stearic acid in said non-human organism or in the culture medium surrounding said non-human organism.

[54904] Accordingly, the present invention relates to a process for the production of stearic acid, which comprises
[54905] (a) increasing or generating the activity of a protein phosphatase in the cytosol of a cell of a non-human organism or a part thereof, preferably a microorganism, a plant cell, a plant or a part thereof, as compared to a corresponding non-transformed wild type non-human organism or a part thereof; and
[54906] (b) growing the non-human organism or a part thereof under conditions which permit the production of stearic acid or a composition comprising stearic acid in said non-human organism or in the culture medium surrounding said non-human organism.

[54907] Accordingly, the present invention relates to a process for the production of stearic acid, which comprises
[54908] (a) increasing or generating the activity of a citrate synthase in the cytosol of a cell of a non-human organism or a part thereof, preferably a microorganism, a plant cell, a plant or a part thereof, as compared to a corresponding non-transformed wild type non-human organism or a part thereof; and
[54909] (b) growing the non-human organism or a part thereof under conditions which permit the production of stearic acid or a composition comprising stearic acid in said non-human organism or in the culture medium surrounding said non-human organism.

[54910] Accordingly, the present invention relates to a process for the production of stearic acid, which comprises
[54911] (a) increasing or generating the activity of a At2g45420-protein in the cytosol of a cell of a non-human organism or a part thereof, preferably a microorganism, a plant cell, a plant or a part thereof, as compared to a corresponding non-transformed wild type non-human organism or a part thereof; and
[54912] (b) growing the non-human organism or a part thereof under conditions which permit the production of stearic acid or a composition comprising stearic acid in said non-human organism or in the culture medium surrounding said non-human organism.

[54913] Accordingly, the present invention relates to a process for the production of stearic acid, which comprises
[54914] (a) increasing or generating the activity of a F-box protein in the cytosol of a cell of a non-human organism or a part thereof, preferably a microorganism, a plant cell, a plant or a part thereof, as compared to a corresponding non-transformed wild type non-human organism or a part thereof; and
[54915] (b) growing the non-human organism or a part thereof under conditions which permit the production of stearic acid or a composition comprising stearic acid in said non-human organism or in the culture medium surrounding said non-human organism.

[54916] Accordingly, the present invention relates to a process for the production of stearic acid, which comprises
[54917] (a) increasing or generating the activity of a CCAAT-binding transcription factor in the cytosol of a cell of a non-human organism or a part thereof, preferably a microorganism, a plant cell, a plant or a part thereof, as compared to a corresponding non-transformed wild type non-human organism or a part thereof; and
[54918] (b) growing the non-human organism or a part thereof under conditions which permit the production of stearic acid or a composition comprising stearic acid in said non-human organism or in the culture medium surrounding said non-human organism.

[54919] Accordingly, the present invention relates to a process for the production of stearic acid, which comprises
[54920] (a) increasing or generating the activity of a glutaredoxin in the cytosol of a cell of a non-human organism or a part thereof, preferably a microorganism, a plant cell, a plant or a part thereof, as compared to a corresponding non-transformed wild type non-human organism or a part thereof; and
[54921] (b) growing the non-human organism or a part thereof under conditions which permit the production of stearic acid or a composition comprising stearic acid in said non-human organism or in the culture medium surrounding said non-human organism.

[54922] Accordingly, the present invention relates to a process for the production of stearic acid, which comprises
[54923] (a) increasing or generating the activity of a monothiol glutaredoxin in the cytosol of a cell of a non-human organism or a part thereof, preferably a microorganism, a plant cell, a plant or a part thereof, as compared to a corresponding non-transformed wild type non-human organism or a part thereof; and
[54924] (b) growing the non-human organism or a part thereof under conditions which permit the production of stearic acid or a composition comprising stearic acid in said non-human organism or in the culture medium surrounding said non-human organism.

[54925] Accordingly, the present invention relates to a process for the production of stearic acid, which comprises
[54926] (a) increasing or generating the activity of a monothiol glutaredoxin in the cytosol of a cell of a non-human organism or a part thereof, preferably a microorganism, a plant cell, a plant or a part thereof, as compared to a corresponding non-transformed wild type non-human organism or a part thereof; and
[54927] (b) growing the non-human organism or a part thereof under conditions which permit the production of stearic acid or a composition comprising stearic acid in said non-human organism or in the culture medium surrounding said non-human organism.

[54928] Accordingly, the present invention relates to a process for the production of stearic acid, which comprises
[54929] (a) increasing or generating the activity of a heat shock transcription factor in the cytosol of a cell of a non-human organism or a part thereof, preferably a microorganism, a plant cell, a plant or a part thereof, as compared to a corresponding non-transformed wild type non-human organism or a part thereof; and
[54930] (b) growing the non-human organism or a part thereof under conditions which permit the production of stearic acid or a composition comprising stearic acid in said non-human organism or in the culture medium surrounding said non-human organism.

[54931] Accordingly, the present invention relates to a process for the production of stearic acid, which comprises
[54932] (a) increasing or generating the activity of a protein phosphatase in the cytosol of a cell of a non-human organism or a part thereof, preferably a microorganism, a plant cell, a plant or a part thereof, as compared to a corresponding non-transformed wild type non-human organism or a part thereof; and
[54933] (b) growing the non-human organism or a part thereof under conditions which permit the production of stearic acid or a composition comprising stearic acid in said non-human organism or in the culture medium surrounding said non-human organism.

[54934] Accordingly, the present invention relates to a process for the production of stearic acid, which comprises
[54935] (a) increasing or generating the activity of a glutaredoxin in the cytosol of a cell of a non-human organism or a part thereof, preferably a microorganism, a plant cell, a plant or a part thereof, as compared to a corresponding non-transformed wild type non-human organism or a part thereof; and
[54936] (b) growing the non-human organism or a part thereof under conditions which permit the production of stearic acid or a composition comprising stearic acid in said non-human organism or in the culture medium surrounding said non-human organism.

[54937] Accordingly, the present invention relates to a process for the production of stearic acid, which comprises
[54938] (a) increasing or generating the activity of a calcium-dependent protein kinase in the cytosol of a cell of a non-human organism or a part thereof, preferably a microorganism, a plant cell, a plant or a part thereof, as compared to a corresponding non-transformed wild type non-human organism or a part thereof; and
[54939] (b) growing the non-human organism or a part thereof under conditions which permit the production of stearic acid or a composition comprising stearic acid in said non-human organism or in the culture medium surrounding said non-human organism.

[54940] Accordingly, the present invention relates to a process for the production of stearic acid, which comprises
[54941] (a) increasing or generating the activity of a protein phosphatase in the cytosol of a cell of a non-human organism or a part thereof, preferably a microorganism, a plant cell, a plant or a part thereof, as compared to a corresponding non-transformed wild type non-human organism or a part thereof; and
[54942] (b) growing the non-human organism or a part thereof under conditions which permit the production of stearic acid or a composition comprising stearic acid in said non-human organism or in the culture medium surrounding said non-human organism.

[54943] Accordingly, the present invention relates to a process for the production of stearic acid, which comprises
[54944] (a) increasing or generating the activity of a b0283-protein in the cytosol of a cell of a non-human organism or a part thereof, preferably a microorganism, a plant cell, a plant or a part thereof, as compared to a corresponding non-transformed wild type non-human organism or a part thereof; and
[54945] (b) growing the non-human organism or a part thereof under conditions which permit the production of stearic acid or a composition comprising stearic acid in said non-human organism or in the culture medium surrounding said non-human organism.

[54946] Accordingly, the present invention relates to a process for the production of stearic acid, which comprises
[54947] (a) increasing or generating the activity of a betaine aldehyde dehydrogenase in the cytosol of a cell of a non-human organism or a part thereof, preferably a microorganism, a plant cell, a plant or a part thereof, as compared to a corresponding non-transformed wild type non-human organism or a part thereof; and
[54948] (b) growing the non-human organism or a part thereof under conditions which permit the production of stearic acid or a composition comprising stearic acid in said non-human organism or in the culture medium surrounding said non-human organism.

[54949] Accordingly, the present invention relates to a process for the production of stearic acid, which comprises
[54950] (a) increasing or generating the activity of a b0371-protein in the cytosol of a cell of a non-human organism or a part thereof, preferably a microorganism, a plant cell, a plant or a part thereof, as compared to a corresponding non-transformed wild type non-human organism or a part thereof; and
[54951] (b) growing the non-human organism or a part thereof under conditions which permit the production of stearic acid or a composition comprising stearic acid in said non-human organism or in the culture medium surrounding said non-human organism.

[54952] Accordingly, the present invention relates to a process for the production of stearic acid, which comprises
[54953] (a) increasing or generating the activity of a ATP-binding component of a transport system in the cytosol of a cell of a non-human organism or a part thereof, preferably a microorganism, a plant cell, a plant or a part thereof, as compared to a corresponding non-transformed wild type non-human organism or a part thereof; and
[54954] (b) growing the non-human organism or a part thereof under conditions which permit the production of stearic acid or a composition comprising stearic acid in said non-human organism or in the culture medium surrounding said non-human organism.

[54955] Accordingly, the present invention relates to a process for the production of stearic acid, which comprises
[54956] (a) increasing or generating the activity of a sodium/proton antiporter in the cytosol of a cell of a non-human organism or a part thereof, preferably a microorganism, a plant cell, a plant or a part thereof, as compared to a corresponding non-transformed wild type non-human organism or a part thereof; and
[54957] (b) growing the non-human organism or a part thereof under conditions which permit the production of stearic acid or a composition comprising stearic acid in said non-human organism or in the culture medium surrounding said non-human organism.

[54958] Accordingly, the present invention relates to a process for the production of stearic acid, which comprises
[54959] (a) increasing or generating the activity of a lipoprotein precursor in the cytosol of a cell of a non-human organism or a part thereof, preferably a microorganism, a plant cell, a plant or a part thereof, as compared to a corresponding non-transformed wild type non-human organism or a part thereof; and
[54960] (b) growing the non-human organism or a part thereof under conditions which permit the production of stearic acid or a composition comprising stearic acid in said non-human organism or in the culture medium surrounding said non-human organism.

[54961] Accordingly, the present invention relates to a process for the production of stearic acid, which comprises
[54962] (a) increasing or generating the activity of a acid shock protein in the cytosol of a cell of a non-human organism or a part thereof, preferably a microorganism, a plant cell, a plant or a part thereof, as compared to a corresponding non-transformed wild type non-human organism or a part thereof; and
[54963] (b) growing the non-human organism or a part thereof under conditions which permit the production of stearic acid or a composition comprising stearic acid in said non-human organism or in the culture medium surrounding said non-human organism.

[54964] Accordingly, the present invention relates to a process for the production of stearic acid, which comprises
[54965] (a) increasing or generating the activity of a b1672-protein in the cytosol of a cell of a non-human organism or a part thereof, preferably a microorganism, a plant cell, a plant or a part thereof, as compared to a corresponding non-transformed wild type non-human organism or a part thereof; and
[54966] (b) growing the non-human organism or a part thereof under conditions which permit the production of stearic acid or a composition comprising stearic acid in said non-human organism or in the culture medium surrounding said non-human organism.

[54967] Accordingly, the present invention relates to a process for the production of stearic acid, which comprises
[54968] (a) increasing or generating the activity of a protease in the cytosol of a cell of a non-human organism or a part thereof, preferably a microorganism, a plant cell, a plant or a part thereof, as compared to a corresponding non-transformed wild type non-human organism or a part thereof; and
[54969] (b) growing the non-human organism or a part thereof under conditions which permit the production of stearic acid or a composition comprising stearic acid in said non-human organism or in the culture medium surrounding said non-human organism.

[54970] Accordingly, the present invention relates to a process for the production of stearic acid, which comprises
[54971] (a) increasing or generating the activity of a b2032-protein in the cytosol of a cell of a non-human organism or a part thereof, preferably a microorganism, a plant cell, a plant or a part thereof, as compared to a corresponding non-transformed wild type non-human organism or a part thereof; and
[54972] (b) growing the non-human organism or a part thereof under conditions which permit the production of stearic acid or a composition comprising stearic acid in said non-human organism or in the culture medium surrounding said non-human organism.

[54973] Accordingly, the present invention relates to a process for the production of stearic acid, which comprises
[54974] (a) increasing or generating the activity of a b2399-protein in the cytosol of a cell of a non-human organism or a part thereof, preferably a microorganism, a plant cell, a plant or a part thereof, as compared to a corresponding non-transformed wild type non-human organism or a part thereof; and
[54975] (b) growing the non-human organism or a part thereof under conditions which permit the production of stearic acid or a composition comprising stearic acid in said non-human organism or in the culture medium surrounding said non-human organism.

[54976] Accordingly, the present invention relates to a process for the production of stearic acid, which comprises
[54977] (a) increasing or generating the activity of a ethanolamine utilization protein in the cytosol of a cell of a non-human organism or a part thereof, preferably a microorganism, a plant cell, a plant or a part thereof, as compared to a corresponding non-transformed wild type non-human organism or a part thereof; and
[54978] (b) growing the non-human organism or a part thereof under conditions which permit the production of stearic acid or a composition comprising stearic acid in said non-human organism or in the culture medium surrounding said non-human organism.

[54979] Accordingly, the present invention relates to a process for the production of stearic acid, which comprises
[54980] (a) increasing or generating the activity of a NADH dehydrogenase subunit N in the cytosol of a cell of a non-human organism or a part thereof, preferably a microorganism, a plant cell, a plant or a part thereof, as compared to a corresponding non-transformed wild type non-human organism or a part thereof; and
[54981] (b) growing the non-human organism or a part thereof under conditions which permit the production of stearic acid or a composition comprising stearic acid in said non-human organism or in the culture medium surrounding said non-human organism.

[54982] Accordingly, the present invention relates to a process for the production of stearic acid, which comprises
[54983] (a) increasing or generating the activity of a b2513-protein in the cytosol of a cell of a non-human organism or a part thereof, preferably a microorganism, a plant cell, a plant or a part thereof, as compared to a corresponding non-transformed wild type non-human organism or a part thereof; and
[54984] (b) growing the non-human organism or a part thereof under conditions which permit the production of stearic acid or a composition comprising stearic acid in said non-human organism or in the culture medium surrounding said non-human organism.

[54985] Accordingly, the present invention relates to a process for the production of stearic acid, which comprises
[54986] (a) increasing or generating the activity of a phospho-2-dehydro-3-deoxyheptonate aldolase in the cytosol of a cell of a non-human organism or a part thereof, preferably a microorganism, a plant cell, a plant or a part thereof, as compared to a corresponding non-transformed wild type non-human organism or a part thereof; and
[54987] (b) growing the non-human organism or a part thereof under conditions which permit the production of stearic acid or a composition comprising stearic acid in said non-human organism or in the culture medium surrounding said non-human organism.

[54988] Accordingly, the present invention relates to a process for the production of stearic acid, which comprises
[54989] (a) increasing or generating the activity of a 2-C-methyl-D-erythritol 4-phosphate cytidylyltransferase in the cytosol of a cell of a non-human organism or a part thereof, preferably a microorganism, a plant cell, a plant or a part thereof, as compared to a corresponding non-transformed wild type non-human organism or a part thereof; and
[54990] (b) growing the non-human organism or a part thereof under conditions which permit the production of stearic acid or a composition comprising stearic acid in said non-human organism or in the culture medium surrounding said non-human organism.

[54991] Accordingly, the present invention relates to a process for the production of stearic acid, which comprises
[54992] (a) increasing or generating the activity of a b2849-protein in the cytosol of a cell of a non-human organism or a part thereof, preferably a microorganism, a plant cell, a plant or a part thereof, as compared to a corresponding non-transformed wild type non-human organism or a part thereof; and
[54993] (b) growing the non-human organism or a part thereof under conditions which permit the production of stearic acid or a composition comprising stearic acid in said non-human organism or in the culture medium surrounding said non-human organism.

[54994] Accordingly, the present invention relates to a process for the production of stearic acid, which comprises
[54995] (a) increasing or generating the activity of a aspartate-ammonia ligase in the cytosol of a cell of a non-human organism or a part thereof, preferably a microorganism, a plant cell, a plant or a part thereof, as compared to a corresponding non-transformed wild type non-human organism or a part thereof; and
[54996] (b) growing the non-human organism or a part thereof under conditions which permit the production of stearic acid or a composition comprising stearic acid in said non-human organism or in the culture medium surrounding said non-human organism.

[54997] Accordingly, the present invention relates to a process for the production of stearic acid, which comprises
[54998] (a) increasing or generating the activity of a 3-ketoacyl-CoA thiolase in the cytosol of a cell of a non-human organism or a part thereof, preferably a microorganism, a plant cell, a plant or a part thereof, as compared to a corresponding non-transformed wild type non-human organism or a part thereof; and
[54999] (b) growing the non-human organism or a part thereof under conditions which permit the production of stearic acid or a composition comprising stearic acid in said non-human organism or in the culture medium surrounding said non-human organism.

[55000] Accordingly, the present invention relates to a process for the production of stearic acid, which comprises
[55001] (a) increasing or generating the activity of a b3989-protein in the cytosol of a cell of a non-human organism or a part thereof, preferably a microorganism, a plant cell, a plant or a part thereof, as compared to a corresponding non-transformed wild type non-human organism or a part thereof; and
[55002] (b) growing the non-human organism or a part thereof under conditions which permit the production of stearic acid or a composition comprising stearic acid in said non-human organism or in the culture medium surrounding said non-human organism.

[55003] Accordingly, the present invention relates to a process for the production of stearic acid, which comprises
[55004] (a) increasing or generating the activity of a b4121-protein in the cytosol of a cell of a non-human organism or a part thereof, preferably a microorganism, a plant cell, a plant or a part thereof, as compared to a corresponding non-transformed wild type non-human organism or a part thereof; and
[55005] (b) growing the non-human organism or a part thereof under conditions which permit the production of stearic acid or a composition comprising stearic acid in said non-human organism or in the culture medium surrounding said non-human organism.

[55006] Accordingly, the present invention relates to a process for the production of stearic acid, which comprises
[55007] (a) increasing or generating the activity of a glutaredoxin in the cytosol of a cell of a non-human organism or a part thereof, preferably a microorganism, a plant cell, a plant or a part thereof, as compared to a corresponding non-transformed wild type non-human organism or a part thereof; and
[55008] (b) growing the non-human organism or a part thereof under conditions which permit the production of stearic acid or a composition comprising stearic acid in said non-human organism or in the culture medium surrounding said non-human organism.

[55009] Accordingly, the present invention relates to a process for the production of stearic acid, which comprises
[55010] (a) increasing or generating the activity of a transcription factor in the cytosol of a cell of a non-human organism or a part thereof, preferably a microorganism, a plant cell, a plant or a part thereof, as compared to a corresponding non-transformed wild type non-human organism or a part thereof; and
[55011] (b) growing the non-human organism or a part thereof under conditions which permit the production of stearic acid or a composition comprising stearic acid in said non-human organism or in the culture medium surrounding said non-human organism.

[55012] Accordingly, the present invention relates to a process for the production of stearic acid, which comprises
[55013] (a) increasing or generating the activity of a glucokinase in the cytosol of a cell of a non-human organism or a part thereof, preferably a microorganism, a plant cell, a plant or a part thereof, as compared to a corresponding non-transformed wild type non-human organism or a part thereof; and
[55014] (b) growing the non-human organism or a part thereof under conditions which permit the production of stearic acid or a composition comprising stearic acid in said non-human organism or in the culture medium surrounding said non-human organism.

[55015] Accordingly, the present invention relates to a process for the production of stearic acid, which comprises
[55016] (a) increasing or generating the activity of a sll1032-protein in the cytosol of a cell of a non-human organism or a part thereof, preferably a microorganism, a plant cell, a plant or a part thereof, as compared to a corresponding non-transformed wild type non-human organism or a part thereof; and
[55017] (b) growing the non-human organism or a part thereof under conditions which permit the production of stearic acid or a composition comprising stearic acid in said non-human organism or in the culture medium surrounding said non-human organism.

[55018] Accordingly, the present invention relates to a process for the production of stearic acid, which comprises
[55019] (a) increasing or generating the activity of a CTP synthetase in the cytosol of a cell of a non-human organism or a part thereof, preferably a microorganism, a plant cell, a plant or a part thereof, as compared to a corresponding non-transformed wild type non-human organism or a part thereof; and
[55020] (b) growing the non-human organism or a part thereof under conditions which permit the production of stearic acid or a composition comprising stearic acid in said non-human organism or in the culture medium surrounding said non-human organism.

[55021] Accordingly, the present invention relates to a process for the production of stearic acid, which comprises
[55022] (a) increasing or generating the activity of a coproporphyrinogen III oxidase in the cytosol of a cell of a non-human organism or a part thereof, preferably a microorganism, a plant cell, a plant or a part thereof, as compared to a corresponding non-transformed wild type non-human organism or a part thereof; and
[55023] (b) growing the non-human organism or a part thereof under conditions which permit the production of stearic acid or a composition comprising stearic acid in said non-human organism or in the culture medium surrounding said non-human organism.

[55024] Accordingly, the present invention relates to a process for the production of stearic acid, which comprises
[55025] (a) increasing or generating the activity of a cation-transporting ATPase in the cytosol of a cell of a non-human organism or a part thereof, preferably a microorganism, a plant cell, a plant or a part thereof, as compared to a corresponding non-transformed wild type non-human organism or a part thereof; and
[55026] (b) growing the non-human organism or a part thereof under conditions which permit the production of stearic acid or a composition comprising stearic acid in said non-human organism or in the culture medium surrounding said non-human organism.

[55027] Accordingly, the present invention relates to a process for the production of stearic acid, which comprises
[55028] (a) increasing or generating the activity of a oxidoreductase in the cytosol of a cell of a non-human organism or a part thereof, preferably a microorganism, a plant cell, a plant or a part thereof, as compared to a corresponding non-transformed wild type non-human organism or a part thereof; and
[55029] (b) growing the non-human organism or a part thereof under conditions which permit the production of stearic acid or a composition comprising stearic acid in said non-human organism or in the culture medium surrounding said non-human organism.

[55030] Accordingly, the present invention relates to a process for the production of stearic acid, which comprises
[55031] (a) increasing or generating the activity of a tryptophan synthase alpha chain in the cytosol of a cell of a non-human organism or a part thereof, preferably a microorganism, a plant cell, a plant or a part thereof, as compared to a corresponding non-transformed wild type non-human organism or a part thereof; and
[55032] (b) growing the non-human organism or a part thereof under conditions which permit the production of stearic acid or a composition comprising stearic acid in said non-human organism or in the culture medium surrounding said non-human organism.

[55033] Accordingly, the present invention relates to a process for the production of stearic acid, which comprises
[55034] (a) increasing or generating the activity of a arginine decarboxylase in the cytosol of a cell of a non-human organism or a part thereof, preferably a microorganism, a plant cell, a plant or a part thereof, as compared to a corresponding non-transformed wild type non-human organism or a part thereof; and
[55035] (b) growing the non-human organism or a part thereof under conditions which permit the production of stearic acid or a composition comprising stearic acid in said non-human organism or in the culture medium surrounding said non-human organism.

[55036] Accordingly, the present invention relates to a process for the production of stearic acid, which comprises
[55037] (a) increasing or generating the activity of a acetyl-coenzyme A synthetase in the cytosol of a cell of a non-human organism or a part thereof, preferably a microorganism, a plant cell, a plant or a part thereof, as compared to a corresponding non-transformed wild type non-human organism or a part thereof; and
[55038] (b) growing the non-human organism or a part thereof under conditions which permit the production of stearic acid or a composition comprising stearic acid in said non-human organism or in the culture medium surrounding said non-human organism.

[55039] Accordingly, the present invention relates to a process for the production of stearic acid, which comprises
[55040] (a) increasing or generating the activity of a 3-deoxy-7-phosphoheptulonate synthase in the cytosol of a cell of a non-human organism or a part thereof, preferably a microorganism, a plant cell, a plant or a part thereof, as compared to a corresponding non-transformed wild type non-human organism or a part thereof; and
[55041] (b) growing the non-human organism or a part thereof under conditions which permit the production of stearic acid or a composition comprising stearic acid in said non-human organism or in the culture medium surrounding said non-human organism.

[55042] Accordingly, the present invention relates to a process for the production of stearic acid, which comprises
[55043] (a) increasing or generating the activity of a ycl049c-protein in the cytosol of a cell of a non-human organism or a part thereof, preferably a microorganism, a plant cell, a plant or a part thereof, as compared to a corresponding non-transformed wild type non-human organism or a part thereof; and
[55044] (b) growing the non-human organism or a part thereof under conditions which permit the production of stearic acid or a composition comprising stearic acid in said non-human organism or in the culture medium surrounding said non-human organism.

[55045] Accordingly, the present invention relates to a process for the production of stearic acid, which comprises
[55046] (a) increasing or generating the activity of a glycerol-3-phosphate dehydrogenase in the cytosol of a cell of a non-human organism or a part thereof, preferably a microorganism, a plant cell, a plant or a part thereof, as compared to a corresponding non-transformed wild type non-human organism or a part thereof; and
[55047] (b) growing the non-human organism or a part thereof under conditions which permit the production of stearic acid or a composition comprising stearic acid in said non-human organism or in the culture medium surrounding said non-human organism.

[55048] Accordingly, the present invention relates to a process for the production of stearic acid, which comprises
[55049] (a) increasing or generating the activity of a isocitrate dehydrogenase in the cytosol of a cell of a non-human organism or a part thereof, preferably a microorganism, a plant cell, a plant or a part thereof, as compared to a corresponding non-transformed wild type non-human organism or a part thereof; and
[55050] (b) growing the non-human organism or a part thereof under conditions which permit the production of stearic acid or a composition comprising stearic acid in said non-human organism or in the culture medium surrounding said non-human organism.

[55051] Accordingly, the present invention relates to a process for the production of stearic acid, which comprises
[55052] (a) increasing or generating the activity of a ydr507c-protein in the cytosol of a cell of a non-human organism or a part thereof, preferably a microorganism, a plant cell, a plant or a part thereof, as compared to a corresponding non-transformed wild type non-human organism or a part thereof; and
[55053] (b) growing the non-human organism or a part thereof under conditions which permit the production of stearic acid or a composition comprising stearic acid in said non-human organism or in the culture medium surrounding said non-human organism.

[55054] Accordingly, the present invention relates to a process for the production of stearic acid, which comprises
[55055] (a) increasing or generating the activity of a dihydroxyacetone kinase in the cytosol of a cell of a non-human organism or a part thereof, preferably a microorganism, a plant cell, a plant or a part thereof, as compared to a corresponding non-transformed wild type non-human organism or a part thereof; and
[55056] (b) growing the non-human organism or a part thereof under conditions which permit the production of stearic acid or a composition comprising stearic acid in said non-human organism or in the culture medium surrounding said non-human organism.

[55057] Accordingly, the present invention relates to a process for the production of stearic acid, which comprises
[55058] (a) increasing or generating the activity of a YGR104C-protein in the cytosol of a cell of a non-human organism or a part thereof, preferably a microorganism, a plant cell, a plant or a part thereof, as compared to a corresponding non-transformed wild type non-human organism or a part thereof; and
[55059] (b) growing the non-human organism or a part thereof under conditions which permit the production of stearic acid or a composition comprising stearic acid in said non-human organism or in the culture medium surrounding said non-human organism.

[55060] Accordingly, the present invention relates to a process for the production of stearic acid, which comprises
[55061] (a) increasing or generating the activity of a aconitate hydratase in the cytosol of a cell of a non-human organism or a part thereof, preferably a microorganism, a plant cell, a plant or a part thereof, as compared to a corresponding non-transformed wild type non-human organism or a part thereof; and
[55062] (b) growing the non-human organism or a part thereof under conditions which permit the production of stearic acid or a composition comprising stearic acid in said non-human organism or in the culture medium surrounding said non-human organism.

[55063] Accordingly, the present invention relates to a process for the production of stearic acid, which comprises
[55064] (a) increasing or generating the activity of a yor392w-protein in the cytosol of a cell of a non-human organism or a part thereof, preferably a microorganism, a plant cell, a plant or a part thereof, as compared to a corresponding non-transformed wild type non-human organism or a part thereof; and
[55065] (b) growing the non-human organism or a part thereof under conditions which permit the production of stearic acid or a composition comprising stearic acid in said non-human organism or in the culture medium surrounding said non-human organism.

[55066] Accordingly, the present invention relates to a process for the production of stearic acid, which comprises
[55067] (a) increasing or generating the activity of a pyruvate kinase in the cytosol of a cell of a non-human organism or a part thereof, preferably a microorganism, a plant cell, a plant or a part thereof, as compared to a corresponding non-transformed wild type non-human organism or a part thereof; and
[55068] (b) growing the non-human organism or a part thereof under conditions which permit the production of stearic acid or a composition comprising stearic acid in said non-human organism or in the culture medium surrounding said non-human organism.

[55069] Accordingly, the present invention relates to a process for the production of stearic acid, which comprises
[55070] (a) increasing or generating the activity of a glucose-6-phosphate 1-dehydrogenase in the cytosol of a cell of a non-human organism or a part thereof, preferably a microorganism, a plant cell, a plant or a part thereof, as compared to a corresponding non-transformed wild type non-human organism or a part thereof; and
[55071] (b) growing the non-human organism or a part thereof under conditions which permit the production of stearic acid or a composition comprising stearic acid in said non-human organism or in the culture medium surrounding said non-human organism.

[55072] Accordingly, the present invention relates to a process for the production of stearic acid, which comprises
[55073] (a) increasing or generating the activity of a polypeptide comprising a polypeptide as depicted in the respective line in column 5 or 8 of Table II, application no. 10, or a homolog or a fragment thereof, a consensus sequence or at least one polypeptide motif as depicted in the respective line in column 8 of Table IV, application no. 10; or
[55074] increasing or generating the activity of an expression product of one or more nucleic acid molecule(s) comprising a polynucleotide as depicted in the respective line in column 5 or 8 of Table I, application no. 10, preferably the coding region thereof, or a homolog or a fragment thereof;
[55075] in the cytosol of a cell of a non-human organism or a part thereof; preferably a microorganism, a plant cell, a plant or a part thereof, as compared to a corresponding non-transformed wild type non-human organism or a part thereof; and
[55076] (b) growing the non-human organism under conditions which permit the production of stearic acid, or a composition comprising stearic acid in said non-human organism or in the culture medium surrounding said non-human organism.

[55077] In a further embodiment the activity of the polypeptide comprising a polypeptide as depicted in the respective line in column 5 or 8 of Table II, application no. 10, or a homolog or a fragment thereof, a consensus sequence or at least one polypeptide motif as depicted in the respective line in column 8 of Table IV, application no. 10, is increased or generated non-targeted in the above-mentioned process in a microorganism or plant or a part thereof.

[55078] In a further embodiment said polypeptide has the activity of the respective polypeptide represented by a protein comprising a polypeptide as depicted in the respective line in column 5 of Table II, application no. 10.

[55079] In a further embodiment the activity of the expression product of one or more nucleic acid molecule(s) comprising a polynucleotide as depicted in the respective line in column 5 or 8 of Table I, application no. 10, preferably the coding region thereof, or a homolog or a fragment thereof, is increased or generated non-targeted in the above-mentioned process in a microorganism or plant or a part thereof.

[55080] In a further embodiment the activity of the polypeptide comprising a polypeptide as depicted in the respective line in column 5 or 8 of Table II, application no. 10, or a homolog or a fragment thereof, a consensus sequence or at least one polypeptide motif as depicted in the respective line in column 8 of Table IV, application no. 10, is increased or generated in the above-mentioned process in an organelle preferably in plastids or mitochondria, especially in plastids, of a microorganism or plant.

[55081] In a further embodiment said polypeptide has the activity of the respective polypeptide represented by a protein comprising a polypeptide as depicted in the respective line in column 5 of Table II, application no. 10.

[55082] In a further embodiment the activity of the expression product of one or more nucleic acid molecule(s) comprising a polynucleotide as depicted in the respective line in column 5 or 8 of Table I, application no. 10, preferably the coding region thereof, or a homolog or a fragment thereof, is increased or generated in the above-mentioned process in an organelle, preferably in plasids or mitochondria, especially in plastids, of a microorganism or plant.

[55083] In a further embodiment the activity of the polypeptide comprising a polypeptide as depicted in the respective line in column 5 or 8 of Table II, application no. 10, or a homolog or a fragment thereof, a consensus sequence or at least one polypeptide motif as depicted in the respective line in column 8 of Table IV, application no. 10, is increased or generated in the above-mentioned process in the cyctosol of a cell, of a microorganism or plant.

[55084] In a further embodiment said polypeptide has the activity of the respective polypeptide represented by a protein comprising a polypeptide as depicted in the respective line in column 5 of Table II, application no. 10.

[55085] In a further embodiment the activity of the expression product of one or more nucleic acid molecule(s) comprising a polynucleotide as depicted in the respective line in column 5 or 8 of Table I, application no. 10, preferably the coding region thereof, or a homolog or a fragment thereof, is increased or generated in the above-mentioned process in the cytosol of a cell, of a microorganism or plant.

[55086] [0039.1.8.10] to [0066.1.8.10] for the disclosure of these paragraphs see [0039.1.8.8] to [0066.1.8.8] above.

[55087] As mentioned above the nucleic acid sequences coding for the proteins as shown in Table II, application no. 10, column 5 or 8, or homologs or fragments thereof, are joined to a nucleic acid sequence encoding a plastidic transit peptide, e.g, if for the nucleic acid molecule in Table I, column 6 the term “plastidic” is indicated. This nucleic acid sequence encoding a transit peptide ensures transport of the protein to the organelle. The nucleic acid sequence of the gene to be expressed and the nucleic acid sequence encoding the transit peptide are operably linked. Therefore the transit peptide encoding sequence is fused in frame to the nucleic acid sequence coding for proteins as shown in Table II, application no. 10, column 5 or 8, or homologs or fragments thereof, e.g., if for the nucleic acid molecule in Table I, column 6 the term “plastidic” is indicated.

[55088] [0068.1.8.10] to [0072.1.8.10] for the disclosure of these paragraphs see [0068.1.8.8] to [0072.1.8.8] above.

[55089] As mentioned above the nucleic acid sequences coding for the proteins as shown in the respective line in Table II, application no. 10, column 5 or 8, or homologs or fragments thereof, are joined to a nucleic acid sequence encoding a mitochondric transit peptide, e.g., if for the respective nucleic acid molecule in Table I, column 6 the term “mitochondrial” is indicated. This nucleic acid sequence encoding a transit peptide ensures transport of the protein to the organelle. The nucleic acid sequence of the gene to be expressed and the nucleic acid sequence encoding the transit peptide are operably linked. Therefore the transit peptide encoding sequence is fused in frame to the nucleic acid sequence coding for proteins as shown in the respective line in Table II, application no. 10, column 5 or 8, or homologs or fragments thereof, e.g., if for the nucleic acid molecule in the respective line in Table I, column 6 the term “mitochondrial” is indicated. (For th eavoidance ofdoubt, th eterm “mitochondric” and “mitochondrial” are interchangeable.)

[55090] [0074.1.8.10] to [0075.1.8.10] for the disclosure of these paragraphs see [0074.1.8.8] to [0075.1.8.8] above.

[55091] Nucleic acid sequences coding for the transit peptides may be chemically synthesized either in part or wholly according to structure of transit peptide sequences disclosed in the prior art. Said natural or chemically synthesized sequences can be directly linked to the sequences encoding the mature protein or via a linker nucleic acid sequence, which may be typically less than 500 base pairs, preferably less than 450, 400, 350, 300, 250 or 200 base pairs, more preferably less than 150, 100, 90, 80, 70, 60, 50, 40 or 30 base pairs and most preferably less than 25, 20, 15, 12, 9, 6 or 3 base pairs in length and are in frame to the coding sequence. Furthermore favorable nucleic acid sequences encoding transit peptides may comprise sequences derived from more than one biological and/or chemical source and may include a nucleic acid sequence derived from the amino-terminal region of the mature protein, which in its native state is linked to the transit peptide. In a preferred embodiment of the invention said amino-terminal region of the mature protein is typically less than 150 amino acids, preferably less than 140, 130, 120, 110, 100 or 90 amino acids, more preferably less than 80, 70, 60, 50, 40, 35, 30, 25 or 20 amino acids and most preferably less than 19, 18, 17, 16, 15, 14, 13, 12, 11 or 10 amino acids in length. But even shorter or longer stretches are also possible. In addition target sequences, which facilitate the transport of proteins to other cell compartments such as the vacuole, endoplasmic reticulum, golgi complex, glyoxysomes, peroxisomes, mitochondria (in case of a plastidal transit peptide) or plastids, especially chloroplasts (in case of a mitochondric transit peptide) may be also part of the inventive nucleic acid sequence. The proteins translated from said inventive nucleic acid sequences are a kind of fusion proteins that means the nucleic acid sequences encoding the plastidal transit peptide for example the ones shown in Table a, preferably the last one of the Table a are joint to the respective nucleic acid sequences shown in Table I, application no. 10, columns 5 or 8, especially the coding region thereof, or homologs or fragments thereof, in case of nucleic acid sequences being expressed in plastids, and that means the nucleic acid sequences encoding the mitochondric transit peptide for example the ones shown in Table b, preferably the last one of the Table b are joint to the respective nucleic acid sequences shown in Table I, application no. 10, columns 5 or 8, especially the coding region thereof, or homologs or fragments thereof, in case of nucleic acid sequences being expressed in mitochondria. The person skilled in the art is able to join said sequences in a functional manner. Advantageously the transit peptide part is cleaved off from the protein part shown in Table II, application no. 10, columns 5 or 8, or a homolog or fragment thereof, during or after the transport into the organelles, preferably into the plastids or mitochondria, respectively.

[55092] All products of the cleavage of the preferred transit peptide shown in the last line of Table a have preferably the N-terminal amino acid sequences QIA CSS or QIA EFQLTT in front of the start methionine of the respective protein mentioned in Table II, application no. 10, column 5 or 8. or homologs or fragments thereof. Other short amino acid sequences of an range of 1 to 20 amino acids preferable 2 to 15 amino acids, more preferable 3 to 10 amino acids most preferably 4 to 8 amino acids are also possible in front of the start methionine of the protein mentioned in Table II, application no. 10, columns 5 or 8, or homologs or fragments thereof. In case of the amino acid sequence QIA CSS the three amino acids in front of the start methionine are stemming from the LIC (=ligatation independent cloning) cassette. Said short amino acid sequence is preferred in the case of the expression of E. coli genes. In case of the amino acid sequence QIA EFQLTT the six amino acids in front of the start methionine are stemming from the LIC cassette. Said short amino acid sequence is preferred in the case of the expression of S. cerevisiae genes. The skilled worker knowns that other short sequences are also useful in the expression of the respective nucleic acid molecule comprising a polynucleotide as depicted in Table I, application no. 10, column 5 or 8, preferably the coding region thereof, or a homolog or a fragment thereof. Furthermore the skilled worker is aware of the fact that there is not a need for such short sequences in the expression of the genes.

[55093] [0077.1.8.10] to [0078.1.8.10] for the disclosure of these paragraphs see [0077.1.8.8] to [0078.1.8.8] above.

[55094] Alternatively to the targeting of the respective sequences shown in Table II, application no. 10, columns 5 or 8, or homologs or fragments thereof, preferably of sequences in general encoded in the nucleus with the aid of the targeting sequences mentioned for example in Table a alone, Table b alone, or in combination with other targeting sequences preferably into plastids or mitochondria, respectively, the nucleic acids of the invention can directly be introduced into the plastidal or mitochondrial genome. Therefore in a preferred embodiment the respective nucleic acid sequences shown in the respective line in Table I, application no. 10, columns 5 or 8, preferably the coding region thereof, or homologs or fragments thereof, are directly introduced and expressed in plastids e.g., if for the nucleic acid molecule in the respective line in Table I, column 6, the term “plastidic” is indicated, or are directly introduced and expressed in mitochondria e.g., if for the nucleic acid molecule in the respective line in Table I, column 6 the term “mitochondrial” is indicated.

[55095] The term “introduced” in the context of this specification shall mean the insertion of a nucleic acid sequence into the organism by means of a “transfection”, “transduction” or preferably by “transformation”.

[55096] A plastid, such as a chloroplast, or a mitochondrion, has been “transformed” by an exogenous (preferably foreign) nucleic acid sequence if a nucleic acid sequence has been introduced into the plastid or mitochondrion that means that this sequence has crossed the membrane or the membranes of the plastid or of the mitochondrion. The exogenous, preferably foreign, DNA may be integrated (covalently linked) into plastid or mitochondrial DNA making up the genome of the plastid or mitochondrion, or it may remain unintegrated (e.g., by including a chloroplast origin of replication). “Stably” integrated DNA sequences are those, which are inherited through plastid or mitochondrion replication, thereby transferring new plastids or mitochondria, with the features of the integrated DNA sequence to the progeny.

[55097] [0080.1.8.10] to [0083.1.8.10] for the disclosure of these paragraphs see [0080.1.8.8] to [0083.1.8.8] above.

[55098] For the process of the present invention it may be of great advantage that by transforming the plastids the intraspecies specific transgene flow is blocked, because a lot of species such as corn, cotton and rice have a strict maternal inheritance of plastids. By placing the respective genes specified in the respective line in Table I, application no. 10, columns 5 or 8, preferably the coding region, or homologs or fragments thereof, e.g. if for the nucleic acid molecule in the respective line in column 6 of Table I the term “plastidic” is indicated, in the plastids of plants, these genes will not be present in the pollen of said plants.

[55099] A further preferred embodiment of the invention relates to the use of so called “chloroplast localization sequences”, in which a first RNA sequence or molecule is capable of transporting or “chaperoning” a second RNA sequence, such as a RNA sequence transcribed from the sequences depicted in the respective line in Table I, application no. 10, columns 5 or 8, preferably the coding region thereof, or a homolog or a fragment thereof, or a sequence encoding a protein, as depicted in the respective line in Table II, application no. 10, columns 5 and 8, or a homolog or a fragment thereof, from an external environment inside a cell or outside a plastid into a chloroplast. In one embodiment the chloroplast localization signal is substantially similar or complementary to a complete or intact viroid sequence. The chloroplast localization signal may be encoded by a DNA sequence, which is transcribed into the chloroplast localization RNA. The term “viroid” refers to a naturally occurring single stranded RNA molecule (Flores, C. R. Acad. Sci. III. 324 (10), 943 (2001)). Viroids usually contain about 200-500 nucleotides and generally exist as circular molecules. Examples of viroids that contain chloroplast localization signals include but are not limited to ASBVd, PLMVd, CChMVd and ELVd. The viroid sequence or a functional part of it can be fused to the sequences depicted in the respective line in Table I, application no. 10, columns 5 or 8, preferably the coding region thereof, or a homolog or a fragment thereof, or a sequence encoding a protein, as depicted in the respective line in Table II, application no. 10, columns 5 or 8, or a homolog or a fragment thereof, in such a manner that the viroid sequence transports a sequence transcribed from a sequence as depicted in the respective line in Table I, application no. 10 columns 5 or 8, preferably the coding region thereof, or a homolog or a fragment thereof, or a sequence encoding a protein as depicted in the respective line in Table II, application no. 10 columns 5 or 8, or a homolog or a fragment thereof, into the chloroplasts, e.g. if for the nucleic acid molecule in column 6 of Table I the term “plastidic” is indicated. A preferred embodiment uses a modified ASBVd (Navarro et al., Virology. 268 (1), 218 (2000)).

[55100] In a further specific embodiment the protein to be expressed in the plastids such as the proteins depicted in the respective line in Table II, application no. 10, columns 5 or 8, or a homolog or a fragment thereof, e.g. if for the nucleic acid molecule in the respective line in column 6 of Table I the term “plastidic” is indicated, are encoded by different nucleic acids. Such a method is disclosed in WO 2004/040973, which shall be incorporated by reference. WO 2004/040973 teaches a method, which relates to the translocation of an RNA corresponding to a gene or gene fragment into the chloroplast by means of a chloroplast localization sequence. The genes, which should be expressed in the plant or plant cells, are split into nucleic acid fragments, which are introduced into different compartments in the plant e.g. the nucleus, the plastids and/or mitochondria. Additionally plant cells are described in which the chloroplast contains a ribozyme fused at one end to an RNA encoding a fragment of a protein used in the inventive process such that the ribozyme can trans-splice the translocated fusion RNA to the RNA encoding the gene fragment to form and as the case may be reunite the nucleic acid fragments to an intact mRNA encoding a functional protein for example as disclosed in the respective line in Table II, application no. 10, columns 5 or 8, or a homolog or a fragment thereof.

[55101] In a preferred embodiment of the invention the nucleic acid sequences as shown in the respective line in Table I, application no. 10, columns 5 or 8, preferably the coding region thereof, or homologs or fragments thereof, e.g. if for the nucleic acid molecule in the respective line in column 6 of Table I the term “plastidic” is indicated, used in the inventive process are transformed into plastids, which are metabolically active. Those plastids should preferably maintain at a high copy number in the plant or plant tissue of interest, most preferably the chloroplasts found in green plant tissues, such as leaves or cotyledons or in seeds.

[55102] For a good expression in the plastids the nucleic acid sequences as shown in the respective line in Table I, application no. 10, columns 5 or 8, preferably the coding region thereof, or homologs or fragments thereof, e.g. if for the nucleic acid molecule in the respective line in column 6 of Table I the term “plastidic” is indicated, are introduced into an expression cassette using preferably a promoter and terminater, which are active in plastids preferably a chloroplast promoter. Examples of such promoters include the psbA promoter from the gene from spinach or pea, the rbcL promoter, and the atpB promoter from corn.

[55103] [0089.1.8.10] to [0092.1.8.10] for the disclosure of these paragraphs see [0089.1.8.8] to [0092.1.8.8] above.

[55104] Advantageously the process for the production of the fine chemical stearic acid leads to an enhanced production of the respective fine chemical. The terms “enhanced” or “increase” mean at least a 10%, 20%, 30%, 40% or 50%, preferably at least 60%, 70%, 80%, 90% or 100%, more preferably 150%, 200%, 300%, 400% or 500% higher production of the respective fine chemical stearic acid in comparison to the wild-type as defined above, e.g. that means in comparison to a non-human organism without the aforementioned modification of the activity of a protein as shown in the respective line in Table II, application no. 10, column 5 or 8, or a fragment or a homolog thereof. The modification of the activity of a protein as shown in the respective line in Table II, application no. 10, column 5 or 8, or a homolog or a fragment thereof, or their combination can be achieved by joining the protein to a respective transit peptide, e.g. if for the respective encoding nucleic acid molecule in column 6 of Table I the term “plastidic” or “mitochondrial” is indicated.

[55105] Surprisingly it was found, that the transgenic expression of a protein as shown in the respective line in Table II, application no. 10, column 5, especially from the Saccaromyces cerevisiae, E. coli, Arabidopsis thaliana, Azotobacter vinelandii, Brassica napus, Glycine max, Oryza sativa, Physcomitrella patens, Synechocystis sp., Thermus thermophilus, Zea mays in a non-human organism, like a plant or a part thereof, such as Arabidopsis thaliana for example, or a microorganism, conferred a production of or an increase in stearic acid,respectively, to the transgenic non-human organism as compared to a corresponding non-transformed wild type.

[55106] In one embodiment the transgenic expression of a protein as shown in the respective line in Table II, application no. 10, column 5 or 8, or a homolog or a fragment thereof, especially from the Saccaromyces cerevisiae, E. coli, Arabidopsis thaliana, Azotobacter vinelandii, Brassica napus, Glycine max, Oryza sativa, Physcomitrella patens, Synechocystis sp., Thermus thermophilus, Zea mays in a non-human organism, like a plant or a part thereof, such as Arabidopsis thaliana for example, or a microorganism, confers a production of or an increase in stearic acid,respectively, to the transgenic non-human organism as compared to a corresponding non-transformed wild type.

[55107] Accordingly, in one embodiment, an increase of stearic acid in a non-human organism, as compared to a corresponding non-transformed wild type non-human organism, is conferred in the process of the invention, if the activity of a polypeptide showing the activity of a transcription factor, or if the activity of the polypeptide At1g68320, preferably represented by SEQ ID NO. 1062, or a homolog or fragment thereof, or if the activity of a polypeptide encoded by a nucleic acid molecule comprising the nucleic acid SEQ ID NO. 1061, preferably the coding region thereof, or a homolog or fragment thereof, e.g. derived from Arabidopsis thaliana, is increased or generated. For example the activity of a nucleic acid molecule or a polypeptide comprising the nucleic acid, preferably the coding region thereof, or polypeptide or the consensus sequence or the polypeptide motif, as depicted in Table I, II or IV, application No. 10, column 5 or 8 in the respective same line as the nucleic acid molecule SEQ ID NO. 1061 or polypeptide SEQ ID NO. 1062, respectively, or a homolog or a fragment thereof, is increased or generated, or if the activity transcription factor is increased or generated in a non-human organism, like a microorganism or a plant cell, plant or part thereof, especially with non-targeted localization. For example, an increase of the stearic acid of at least 1 percent, particularly in a range of 17 to 84-percent is conferred as compared to a corresponding non-transformed wild type non-human organism.

[55108] Accordingly, in one embodiment, an increase of stearic acid in a non-human organism, as compared to a corresponding non-transformed wild type non-human organism, is conferred in the process of the invention, if the activity of a polypeptide showing the activity of a protein phosphatase, or if the activity of the polypeptide At2g25070, preferably represented by SEQ ID NO. 1299, or a homolog or fragment thereof, or if the activity of a polypeptide encoded by a nucleic acid molecule comprising the nucleic acid SEQ ID NO. 1298, preferably the coding region thereof, or a homolog or fragment thereof, e.g. derived from Arabidopsis thaliana, is increased or generated. For example the activity of a nucleic acid molecule or a polypeptide comprising the nucleic acid, preferably the coding region thereof, or polypeptide or the consensus sequence or the polypeptide motif, as depicted in Table I, II or IV, application No. 10, column 5 or 8 in the respective same line as the nucleic acid molecule SEQ ID NO. 1298 or polypeptide SEQ ID NO. 1299, respectively, or a homolog or a fragment thereof, is increased or generated, or if the activity protein phosphatase is increased or generated in a non-human organism, like a microorganism or a plant cell, plant or part thereof, especially with non-targeted localization. For example, an increase of the stearic acid of at least 1 percent, particularly in a range of 18 to 44-percent is conferred as compared to a corresponding non-transformed wild type non-human organism.

[55109] Accordingly, in one embodiment, an increase of stearic acid in a non-human organism, as compared to a corresponding non-transformed wild type non-human organism, is conferred in the process of the invention, if the activity of a polypeptide showing the activity of a citrate synthase, or if the activity of the polypeptide At2g44350, preferably represented by SEQ ID NO. 120811, or a homolog or fragment thereof, or if the activity of a polypeptide encoded by a nucleic acid molecule comprising the nucleic acid SEQ ID NO. 120810, preferably the coding region thereof, or a homolog or fragment thereof, e.g. derived from Arabidopsis thaliana, is increased or generated. For example the activity of a nucleic acid molecule or a polypeptide comprising the nucleic acid, preferably the coding region thereof, or polypeptide or the consensus sequence or the polypeptide motif, as depicted in Table I, II or IV, application No. 10, column 5 or 8 in the respective same line as the nucleic acid molecule SEQ ID NO. 120810 or polypeptide SEQ ID NO. 120811, respectively, or a homolog or a fragment thereof, is increased or generated, or if the activity citrate synthase is increased or generated in a non-human organism, like a microorganism or a plant cell, plant or part thereof, especially with plastidic localization. For example, an increase of the stearic acid of at least 1 percent, particularly in a range of 17 to 25-percent is conferred as compared to a corresponding non-transformed wild type non-human organism.

[55110] Accordingly, in one embodiment, an increase of stearic acid in a non-human organism, as compared to a corresponding non-transformed wild type non-human organism, is conferred in the process of the invention, if the activity of a polypeptide showing the activity of a At2g45420-protein, or if the activity of the polypeptide At2g45420, preferably represented by SEQ ID NO. 1624, or a homolog or fragment thereof, or if the activity of a polypeptide encoded by a nucleic acid molecule comprising the nucleic acid SEQ ID NO. 1623, preferably the coding region thereof, or a homolog or fragment thereof, e.g. derived from Arabidopsis thaliana, is increased or generated. For example the activity of a nucleic acid molecule or a polypeptide comprising the nucleic acid, preferably the coding region thereof, or polypeptide or the consensus sequence or the polypeptide motif, as depicted in Table I, II or IV, application No. 10, column 5 or 8 in the respective same line as the nucleic acid molecule SEQ ID NO. 1623 or polypeptide SEQ ID NO. 1624, respectively, or a homolog or a fragment thereof, is increased or generated, or if the activity At2g45420-protein is increased or generated in a non-human organism, like a microorganism or a plant cell, plant or part thereof, especially with non-targeted localization. For example, an increase of the stearic acid of at least 1 percent, particularly in a range of 17 to 691-percent is conferred as compared to a corresponding non-transformed wild type non-human organism.

[55111] Accordingly, in one embodiment, an increase of stearic acid in a non-human organism, as compared to a corresponding non-transformed wild type non-human organism, is conferred in the process of the invention, if the activity of a polypeptide showing the activity of a F-box protein, or if the activity of the polypeptide At3g16820, preferably represented by SEQ ID NO. 120953, or a homolog or fragment thereof, or if the activity of a polypeptide encoded by a nucleic acid molecule comprising the nucleic acid SEQ ID NO. 120952, preferably the coding region thereof, or a homolog or fragment thereof, e.g. derived from Arabidopsis thaliana, is increased or generated. For example the activity of a nucleic acid molecule or a polypeptide comprising the nucleic acid, preferably the coding region thereof, or polypeptide or the consensus sequence or the polypeptide motif, as depicted in Table I, II or IV, application No. 10, column 5 or 8 in the respective same line as the nucleic acid molecule SEQ ID NO. 120952 or polypeptide SEQ ID NO. 120953, respectively, or a homolog or a fragment thereof, is increased or generated, or if the activity F-box protein is increased or generated in a non-human organism, like a microorganism or a plant cell, plant or part thereof, especially with non-targeted localization. For example, an increase of the stearic acid of at least 1 percent, particularly in a range of 20 to 28-percent is conferred as compared to a corresponding non-transformed wild type non-human organism.

[55112] Accordingly, in one embodiment, an increase of stearic acid in a non-human organism, as compared to a corresponding non-transformed wild type non-human organism, is conferred in the process of the invention, if the activity of a polypeptide showing the activity of a CCAAT-binding transcription factor, or if the activity of the polypeptide At3g20910, preferably represented by SEQ ID NO. 22922, or a homolog or fragment thereof, or if the activity of a polypeptide encoded by a nucleic acid molecule comprising the nucleic acid SEQ ID NO. 22921, preferably the coding region thereof, or a homolog or fragment thereof, e.g. derived from Arabidopsis thaliana, is increased or generated. For example the activity of a nucleic acid molecule or a polypeptide comprising the nucleic acid, preferably the coding region thereof, or polypeptide or the consensus sequence or the polypeptide motif, as depicted in Table I, II or IV, application No. 10, column 5 or 8 in the respective same line as the nucleic acid molecule SEQ ID NO. 22921 or polypeptide SEQ ID NO. 22922, respectively, or a homolog or a fragment thereof, is increased or generated, or if the activity CCAAT-binding transcription factor is increased or generated in a non-human organism, like a microorganism or a plant cell, plant or part thereof, especially with non-targeted localization. For example, an increase of the stearic acid of at least 1 percent, partitularly in a range of 28 to 60-percent is conferred as compared to a corresponding non-transformed wild type non-human organism.

[55113] Accordingly, in one embodiment, an increase of stearic acid in a non-human organism, as compared to a corresponding non-transformed wild type non-human organism, is conferred in the process of the invention, if the activity of a polypeptide showing the activity of a glutaredoxin, or if the activity of the polypeptide At3g62950, preferably represented by SEQ ID NO. 2936, or a homolog or fragment thereof, or if the activity of a polypeptide encoded by a nucleic acid molecule comprising the nucleic acid SEQ ID NO. 2935, preferably the coding region thereof, or a homolog or fragment thereof, e.g. derived from Arabidopsis thaliana, is increased or generated. For example the activity of a nucleic acid molecule or a polypeptide comprising the nucleic acid, preferably the coding region thereof, or polypeptide or the consensus sequence or the polypeptide motif, as depicted in Table I, II or IV, application No. 10, column 5 or 8 in the respective same line as the nucleic acid molecule SEQ ID NO. 2935 or polypeptide SEQ ID NO. 2936, respectively, or a homolog or a fragment thereof, is increased or generated, or if the activity glutaredoxin is increased or generated in a non-human organism, like a microorganism or a plant cell, plant or part thereof, especially with non-targeted localization. For example, an increase of the stearic acid of at least 1 percent, particularly in a range of 23 to 58-percent is conferred as compared to a corresponding non-transformed wild type non-human organism.

[55114] Accordingly, in one embodiment, an increase of stearic acid in a non-human organism, as compared to a corresponding non-transformed wild type non-human organism, is conferred in the process of the invention, if the activity of a polypeptide showing the activity of a monothiol glutaredoxin, or if the activity of the polypeptide At4g15660, preferably represented by SEQ ID NO. 23483, or a homolog or fragment thereof, or if the activity of a polypeptide encoded by a nucleic acid molecule comprising the nucleic acid SEQ ID NO. 23482, preferably the coding region thereof, or a homolog or fragment thereof, e.g. derived from Arabidopsis thaliana, is increased or generated. For example the activity of a nucleic acid molecule or a polypeptide comprising the nucleic acid, preferably the coding region thereof, or polypeptide or the consensus sequence or the polypeptide motif, as depicted in Table I, II or IV, application No. 10, column 5 or 8 in the respective same line as the nucleic acid molecule SEQ ID NO. 23482 or polypeptide SEQ ID NO. 23483, respectively, or a homolog or a fragment thereof, is increased or generated, or if the activity monothiol glutaredoxin is increased or generated in a non-human organism, like a microorganism or a plant cell, plant or part thereof, especially with non-targeted localization. For example, an increase of the stearic acid of at least 1 percent, particularly in a range of 19 to 79-percent is conferred as compared to a corresponding non-transformed wild type non-human organism

[55115] Accordingly, in one embodiment, an increase of stearic acid in a non-human organism, as compared to a corresponding non-transformed wild type non-human organism, is conferred in the process of the invention, if the activity of a polypeptide showing the activity of a monothiol glutaredoxin, or if the activity of the polypeptide At4g15670, preferably represented by SEQ ID NO. 3280, or a homolog or fragment thereof, or if the activity of a polypeptide encoded by a nucleic acid molecule comprising the nucleic acid SEQ ID NO. 3279, preferably the coding region thereof, or a homolog or fragment thereof, e.g. derived from Arabidopsis thaliana, is increased or generated. For example the activity of a nucleic acid molecule or a polypeptide comprising the nucleic acid, preferably the coding region thereof, or polypeptide or the consensus sequence or the polypeptide motif, as depicted in Table I, II or IV, application No. 10, column 5 or 8 in the respective same line as the nucleic acid molecule SEQ ID NO. 3279 or polypeptide SEQ ID NO. 3280, respectively, or a homolog or a fragment thereof, is increased or generated, or if the activity monothiol glutaredoxin is increased or generated in a non-human organism, like a microorganism or a plant cell, plant or part thereof, especially with non-targeted localization. For example, an increase of the stearic acid of at least 1 percent, particularly in a range of 15 to 89-percent is conferred as compared to a corresponding non-transformed wild type non-human organism.

[55116] Accordingly, in one embodiment, an increase of stearic acid in a non-human organism, as compared to a corresponding non-transformed wild type non-human organism, is conferred in the process of the invention, if the activity of a polypeptide showing the activity of a heat shock transcription factor, or if the activity of the polypeptide At4g18880, preferably represented by SEQ ID NO. 24233, or a homolog or fragment thereof, or if the activity of a polypeptide encoded by a nucleic acid molecule comprising the nucleic acid SEQ ID NO. 24232, preferably the coding region thereof, or a homolog or fragment thereof, e.g. derived from Arabidopsis thaliana, is increased or generated. For example the activity of a nucleic acid molecule or a polypeptide comprising the nucleic acid, preferably the coding region thereof, or polypeptide or the consensus sequence or the polypeptide motif, as depicted in Table I, II or IV, application No. 10, column 5 or 8 in the respective same line as the nucleic acid molecule SEQ ID NO. 24232 or polypeptide SEQ ID NO. 24233, respectively, or a homolog or a fragment thereof, is increased or generated, or if the activity heat shock transcription factor is increased or generated in a non-human organism, like a microorganism or a plant cell, plant or part thereof, especially with non-targeted localization. For example, an increase of the stearic acid of at least 1 percent, particularly in a range of 20 to 28-percent is conferred as compared to a corresponding non-transformed wild type non-human organism.

[55117] Accordingly, in one embodiment, an increase of stearic acid in a non-human organism, as compared to a corresponding non-transformed wild type non-human organism, is conferred in the process of the invention, if the activity of a polypeptide showing the activity of a protein phosphatase, or if the activity of the polypeptide At4g26080, preferably represented by SEQ ID NO. 68850, or a homolog or fragment thereof, or if the activity of a polypeptide encoded by a nucleic acid molecule comprising the nucleic acid SEQ ID NO. 68849, preferably the coding region thereof, or a homolog or fragment thereof, e.g. derived from Arabidopsis thaliana, is increased or generated. For example the activity of a nucleic acid molecule or a polypeptide comprising the nucleic acid, preferably the coding region thereof, or polypeptide or the consensus sequence or the polypeptide motif, as depicted in Table I, II or IV, application No. 10, column 5 or 8 in the respective same line as the nucleic acid molecule SEQ ID NO. 68849 or polypeptide SEQ ID NO. 68850, respectively, or a homolog or a fragment thereof, is increased or generated, or if the activity protein phosphatase is increased or generated in a non-human organism, like a microorganism or a plant cell, plant or part thereof, especially with non-targeted localization. For example, an increase of the stearic acid of at least 1 percent, particularly in a range of 17 to 20-percent is conferred as compared to a corresponding non-transformed wild type non-human organism.

[55118] Accordingly, in one embodiment, an increase of stearic acid in a non-human organism, as compared to a corresponding non-transformed wild type non-human organism, is conferred in the process of the invention, if the activity of a polypeptide showing the activity of a glutaredoxin, or if the activity of the polypeptide At4g33040, preferably represented by SEQ ID NO. 4103, or a homolog or fragment thereof, or if the activity of a polypeptide encoded by a nucleic acid molecule comprising the nucleic acid SEQ ID NO. 4102, preferably the coding region thereof, or a homolog or fragment thereof, e.g. derived from Arabidopsis thaliana, is increased or generated. For example the activity of a nucleic acid molecule or a polypeptide comprising the nucleic acid, preferably the coding region thereof, or polypeptide or the consensus sequence or the polypeptide motif, as depicted in Table I, II or IV, application No. 10, column 5 or 8 in the respective same line as the nucleic acid molecule SEQ ID NO. 4102 or polypeptide SEQ ID NO. 4103, respectively, or a homolog or a fragment thereof, is increased or generated, or if the activity glutaredoxin is increased or generated in a non-human organism, like a microorganism or a plant cell, plant or part thereof, especially with non-targeted localization. For example, an increase of the stearic acid of at least 1 percent, particularly in a range of 21 to 40-percent is conferred as compared to a corresponding non-transformed wild type non-human organism.

[55119] Accordingly, in one embodiment, an increase of stearic acid in a non-human organism, as compared to a corresponding non-transformed wild type non-human organism, is conferred in the process of the invention, if the activity of a polypeptide showing the activity of a calcium-dependent protein kinase, or if the activity of the polypeptide At4g35310, preferably represented by SEQ ID NO. 4349, or a homolog or fragment thereof, or if the activity of a polypeptide encoded by a nucleic acid molecule comprising the nucleic acid SEQ ID NO. 4348, preferably the coding region thereof, or a homolog or fragment thereof, e.g. derived from Arabidopsis thaliana, is increased or generated. For example the activity of a nucleic acid molecule or a polypeptide comprising the nucleic acid, preferably the coding region thereof, or polypeptide or the consensus sequence or the polypeptide motif, as depicted in Table I, II or IV, application No. 10, column 5 or 8 in the respective same line as the nucleic acid molecule SEQ ID NO. 4348 or polypeptide SEQ ID NO. 4349, respectively, or a homolog or a fragment thereof, is increased or generated, or if the activity calcium-dependent protein kinase is increased or generated in a non-human organism, like a microorganism or a plant cell, plant or part thereof, especially with non-targeted localization. For example, an increase of the stearic acid of at least 1 percent, particularly in a range of 99 to 132-percent is conferred as compared to a corresponding non-transformed wild type non-human organism.

[55120] Accordingly, in one embodiment, an increase of stearic acid in a non-human organism, as compared to a corresponding non-transformed wild type non-human organism, is conferred in the process of the invention, if the activity of a polypeptide showing the activity of a protein phosphatase, or if the activity of the polypeptide At5g59220, preferably represented by SEQ ID NO. 25499, or a homolog or fragment thereof, or if the activity of a polypeptide encoded by a nucleic acid molecule comprising the nucleic acid SEQ ID NO. 25498, preferably the coding region thereof, or a homolog or fragment thereof, e.g. derived from Arabidopsis thaliana, is increased or generated. For example the activity of a nucleic acid molecule or a polypeptide comprising the nucleic acid, preferably the coding region thereof, or polypeptide or the consensus sequence or the polypeptide motif, as depicted in Table I, II or IV, application No. 10, column 5 or 8 in the respective same line as the nucleic acid molecule SEQ ID NO. 25498 or polypeptide SEQ ID NO. 25499, respectively, or a homolog or a fragment thereof, is increased or generated, or if the activity protein phosphatase is increased or generated in a non-human organism, like a microorganism or a plant cell, plant or part thereof, especially with non-targeted localization. For example, an increase of the stearic acid of at least 1 percent, particularly in a range of 15 to 38-percent is conferred as compared to a corresponding non-transformed wild type non-human organism.

[55121] Accordingly, in one embodiment, an increase of stearic acid in a non-human organism, as compared to a corresponding non-transformed wild type non-human organism, is conferred in the process of the invention, if the activity of a polypeptide showing the activity of a b0283-protein, or if the activity of the polypeptide B0283, preferably represented by SEQ ID NO. 121077, or a homolog or fragment thereof, or if the activity of a polypeptide encoded by a nucleic acid molecule comprising the nucleic acid SEQ ID NO. 121076, preferably the coding region thereof, or a homolog or fragment thereof, e.g. derived from Escherichia coli, is increased or generated. For example the activity of a nucleic acid molecule or a polypeptide comprising the nucleic acid, preferably the coding region thereof, or polypeptide or the consensus sequence or the polypeptide motif, as depicted in Table I, II or IV, application No. 10, column 5 or 8 in the respective same line as the nucleic acid molecule SEQ ID NO. 121076 or polypeptide SEQ ID NO. 121077, respectively, or a homolog or a fragment thereof, is increased or generated, or if the activity b0283-protein is increased or generated in a non-human organism, like a microorganism or a plant cell, plant or part thereof, especially with plastidic localization. For example, an increase of the stearic acid of at least 1 percent, particularly in a range of 19 to 29-percent is conferred as compared to a corresponding non-transformed wild type non-human organism.

[55122] Accordingly, in one embodiment, an increase of stearic acid in a non-human organism, as compared to a corresponding non-transformed wild type non-human organism, is conferred in the process of the invention, if the activity of a polypeptide showing the activity of a betaine aldehyde dehydrogenase, or if the activity of the polypeptide B0312, preferably represented by SEQ ID NO. 121112, or a homolog or fragment thereof, or if the activity of a polypeptide encoded by a nucleic acid molecule comprising the nucleic acid SEQ ID NO. 121111, preferably the coding region thereof, or a homolog or fragment thereof, e.g. derived from Escherichia coli, is increased or generated. For example the activity of a nucleic acid molecule or a polypeptide comprising the nucleic acid, preferably the coding region thereof, or polypeptide or the consensus sequence or the polypeptide motif, as depicted in Table I, II or IV, application No. 10, column 5 or 8 in the respective same line as the nucleic acid molecule SEQ ID NO. 121111 or polypeptide SEQ ID NO. 121112, respectively, or a homolog or a fragment thereof, is increased or generated, or if the activity betaine aldehyde dehydrogenase is increased or generated in a non-human organism, like a microorganism or a plant cell, plant or part thereof, especially with non-targeted localization. For example, an increase of the stearic acid of at least 1 percent, particularly in a range of 12 to 21-percent is conferred as compared to a corresponding non-transformed wild type non-human organism.

[55123] Accordingly, in one embodiment, an increase of stearic acid in a non-human organism, as compared to a corresponding non-transformed wild type non-human organism, is conferred in the process of the invention, if the activity of a polypeptide showing the activity of a b0371-protein, or if the activity of the polypeptide B0371, preferably represented by SEQ ID NO. 121638, or a homolog or fragment thereof, or if the activity of a polypeptide encoded by a nucleic acid molecule comprising the nucleic acid SEQ ID NO. 121637, preferably the coding region thereof, or a homolog or fragment thereof, e.g. derived from Escherichia coli, is increased or generated. For example the activity of a nucleic acid molecule or a polypeptide comprising the nucleic acid, preferably the coding region thereof, or polypeptide or the consensus sequence or the polypeptide motif, as depicted in Table I, II or IV, application No. 10, column 5 or 8 in the respective same line as the nucleic acid molecule SEQ ID NO. 121637 or polypeptide SEQ ID NO. 121638, respectively, or a homolog or a fragment thereof, is increased or generated, or if the activity b0371-protein is increased or generated in a non-human organism, like a microorganism or a plant cell, plant or part thereof, especially with non-targeted localization. For example, an increase of the stearic acid of at least 1 percent, particularly in a range of 26 to 60-percent is conferred as compared to a corresponding non-transformed wild type non-human organism.

[55124] Accordingly, in one embodiment, an increase of stearic acid in a non-human organism, as compared to a corresponding non-transformed wild type non-human organism, is conferred in the process of the invention, if the activity of a polypeptide showing the activity of a ATP-binding component of a transport system, or if the activity of the polypeptide B0449, preferably represented by SEQ ID NO. 7334, or a homolog or fragment thereof, or if the activity of a polypeptide encoded by a nucleic acid molecule comprising the nucleic acid SEQ ID NO. 7333, preferably the coding region thereof, or a homolog or fragment thereof, e.g. derived from Escherichia coli, is increased or generated. For example the activity of a nucleic acid molecule or a polypeptide comprising the nucleic acid, preferably the coding region thereof, or polypeptide or the consensus sequence or the polypeptide motif, as depicted in Table I, II or IV, application No. 10, column 5 or 8 in the respective same line as the nucleic acid molecule SEQ ID NO. 7333 or polypeptide SEQ ID NO. 7334, respectively, or a homolog or a fragment thereof, is increased or generated, or if the activity ATP-binding component of a transport system is increased or generated in a non-human organism, like a microorganism or a plant cell, plant or part thereof, especially with non-targeted localization. For example, an increase of the stearic acid of at least 1 percent, particularly in a range of 18 to 75-percent is conferred as compared to a corresponding non-transformed wild type non-human organism.

[55125] Accordingly, in one embodiment, an increase of stearic acid in a non-human organism, as compared to a corresponding non-transformed wild type non-human organism, is conferred in the process of the invention, if the activity of a polypeptide showing the activity of a sodium/proton antiporter, or if the activity of the polypeptide B1186, preferably represented by SEQ ID NO. 37401, or a homolog or fragment thereof, or if the activity of a polypeptide encoded by a nucleic acid molecule comprising the nucleic acid SEQ ID NO. 37400, preferably the coding region thereof, or a homolog or fragment thereof, e.g. derived from Escherichia coli, is increased or generated. For example the activity of a nucleic acid molecule or a polypeptide comprising the nucleic acid, preferably the coding region thereof, or polypeptide or the consensus sequence or the polypeptide motif, as depicted in Table I, II or IV, application No. 10, column 5 or 8 in the respective same line as the nucleic acid molecule SEQ ID NO. 37400 or polypeptide SEQ ID NO. 37401, respectively, or a homolog or a fragment thereof, is increased or generated, or if the activity sodium/proton antiporter is increased or generated in a non-human organism, like a microorganism or a plant cell, plant or part thereof, especially with non-targeted localization. For example, an increase of the stearic acid of at least 1 percent, particularly in a range of 15 to 91-percent is conferred as compared to a corresponding non-transformed wild type non-human organism.

[55126] Accordingly, in one embodiment, an increase of stearic acid in a non-human organism, as compared to a corresponding non-transformed wild type non-human organism, is conferred in the process of the invention, if the activity of a polypeptide showing the activity of a lipoprotein precursor, or if the activity of the polypeptide B1431, preferably represented by SEQ ID NO. 38267, or a homolog or fragment thereof, or if the activity of a polypeptide encoded by a nucleic acid molecule comprising the nucleic acid SEQ ID NO. 38266, preferably the coding region thereof, or a homolog or fragment thereof, e.g. derived from Escherichia coli, is increased or generated. For example the activity of a nucleic acid molecule or a polypeptide comprising the nucleic acid, preferably the coding region thereof, or polypeptide or the consensus sequence or the polypeptide motif, as depicted in Table I, II or IV, application No. 10, column 5 or 8 in the respective same line as the nucleic acid molecule SEQ ID NO. 38266 or polypeptide SEQ ID NO. 38267, respectively, or a homolog or a fragment thereof, is increased or generated, or if the activity lipoprotein precursor is increased or generated in a non-human organism, like a microorganism or a plant cell, plant or part thereof, especially with plastidic localization. For example, an increase of the stearic acid of at least 1 percent, particularly in a range of 19 to 31-percent is conferred as compared to a corresponding non-transformed wild type non-human organism.

[55127] Accordingly, in one embodiment, an increase of stearic acid in a non-human organism, as compared to a corresponding non-transformed wild type non-human organism, is conferred in the process of the invention, if the activity of a polypeptide showing the activity of a acid shock protein, or if the activity of the polypeptide B1597, preferably represented by SEQ ID NO. 38301, or a homolog or fragment thereof, or if the activity of a polypeptide encoded by a nucleic acid molecule comprising the nucleic acid SEQ ID NO. 38300, preferably the coding region thereof, or a homolog or fragment thereof, e.g. derived from Escherichia coli, is increased or generated. For example the activity of a nucleic acid molecule or a polypeptide comprising the nucleic acid, preferably the coding region thereof, or polypeptide or the consensus sequence or the polypeptide motif, as depicted in Table I, II or IV, application No. 10, column 5 or 8 in the respective same line as the nucleic acid molecule SEQ ID NO. 38300 or polypeptide SEQ ID NO. 38301, respectively, or a homolog or a fragment thereof, is increased or generated, or if the activity acid shock protein is increased or generated in a non-human organism, like a microorganism or a plant cell, plant or part thereof, especially with non-targeted localization. For example, an increase of the stearic acid of at least 1 percent, particularly in a range of 22 to 178-percent is conferred as compared to a corresponding non-transformed wild type non-human organism.

[55128] Accordingly, in one embodiment, an increase of stearic acid in a non-human organism, as compared to a corresponding non-transformed wild type non-human organism, is conferred in the process of the invention, if the activity of a polypeptide showing the activity of a b1672-protein, or if the activity of the polypeptide B1672, preferably represented by SEQ ID NO. 78772, or a homolog or fragment thereof, or if the activity of a polypeptide encoded by a nucleic acid molecule comprising the nucleic acid SEQ ID NO. 78771, preferably the coding region thereof, or a homolog or fragment thereof, e.g. derived from Escherichia coli, is increased or generated. For example the activity of a nucleic acid molecule or a polypeptide comprising the nucleic acid, preferably the coding region thereof, or polypeptide or the consensus sequence or the polypeptide motif, as depicted in Table I, II or IV, application No. 10, column 5 or 8 in the respective same line as the nucleic acid molecule SEQ ID NO. 78771 or polypeptide SEQ ID NO. 78772, respectively, or a homolog or a fragment thereof, is increased or generated, or if the activity b1672-protein is increased or generated in a non-human organism, like a microorganism or a plant cell, plant or part thereof, especially with non-targeted localization. For example, an increase of the stearic acid of at least 1 percent, particularly in a range of 17 to 30-percent is conferred as compared to a corresponding non-transformed wild type non-human organism.

[55129] Accordingly, in one embodiment, an increase of stearic acid in a non-human organism, as compared to a corresponding non-transformed wild type non-human organism, is conferred in the process of the invention, if the activity of a polypeptide showing the activity of a protease, or if the activity of the polypeptide B1845, preferably represented by SEQ ID NO. 38574, or a homolog or fragment thereof, or if the activity of a polypeptide encoded by a nucleic acid molecule comprising the nucleic acid SEQ ID NO. 38573, preferably the coding region thereof, or a homolog or fragment thereof, e.g. derived from Escherichia coli, is increased or generated. For example the activity of a nucleic acid molecule or a polypeptide comprising the nucleic acid, preferably the coding region thereof, or polypeptide or the consensus sequence or the polypeptide motif, as depicted in Table I, II or IV, application No. 10, column 5 or 8 in the respective same line as the nucleic acid molecule SEQ ID NO. 38573 or polypeptide SEQ ID NO. 38574, respectively, or a homolog or a fragment thereof, is increased or generated, or if the activity protease is increased or generated in a non-human organism, like a microorganism or a plant cell, plant or part thereof, especially with non-targeted localization. For example, an increase of the stearic acid of at least 1 percent, particularly in a range of 22 to 31-percent is conferred as compared to a corresponding non-transformed wild type non-human organism.

[55130] Accordingly, in one embodiment, an increase of stearic acid in a non-human organism, as compared to a corresponding non-transformed wild type non-human organism, is conferred in the process of the invention, if the activity of a polypeptide showing the activity of a b2032-protein, or if the activity of the polypeptide B2032, preferably represented by SEQ ID NO. 8921, or a homolog or fragment thereof, or if the activity of a polypeptide encoded by a nucleic acid molecule comprising the nucleic acid SEQ ID NO. 8920, preferably the coding region thereof, or a homolog or fragment thereof, e.g. derived from Escherichia coli, is increased or generated. For example the activity of a nucleic acid molecule or a polypeptide comprising the nucleic acid, preferably the coding region thereof, or polypeptide or the consensus sequence or the polypeptide motif, as depicted in Table I, II or IV, application No. 10, column 5 or 8 in the respective same line as the nucleic acid molecule SEQ ID NO. 8920 or polypeptide SEQ ID NO. 8921, respectively, or a homolog or a fragment thereof, is increased or generated, or if the activity b2032-protein is increased or generated in a non-human organism, like a microorganism or a plant cell, plant or part thereof, especially with non-targeted localization. For example, an increase of the stearic acid of at least 1 percent, particularly in a range of 18 to 89-percent is conferred as compared to a corresponding non-transformed wild type non-human organism.

[55131] Accordingly, in one embodiment, an increase of stearic acid in a non-human organism, as compared to a corresponding non-transformed wild type non-human organism, is conferred in the process of the invention, if the activity of a polypeptide showing the activity of a b2399-protein, or if the activity of the polypeptide B2399, preferably represented by SEQ ID NO. 39238, or a homolog or fragment thereof, or if the activity of a polypeptide encoded by a nucleic acid molecule comprising the nucleic acid SEQ ID NO. 39237, preferably the coding region thereof, or a homolog or fragment thereof, e.g. derived from Escherichia coli, is increased or generated. For example the activity of a nucleic acid molecule or a polypeptide comprising the nucleic acid, preferably the coding region thereof, or polypeptide or the consensus sequence or the polypeptide motif, as depicted in Table I, II or IV, application No. 10, column 5 or 8 in the respective same line as the nucleic acid molecule SEQ ID NO. 39237 or polypeptide SEQ ID NO. 39238, respectively, or a homolog or a fragment thereof, is increased or generated, or if the activity b2399-protein is increased or generated in a non-human organism, like a microorganism or a plant cell, plant or part thereof, especially with non-targeted localization. For example, an increase of the stearic acid of at least 1 percent, particularly in a range of 18 to 63-percent is conferred as compared to a corresponding non-transformed wild type non-human organism.

[55132] Accordingly, in one embodiment, an increase of stearic acid in a non-human organism, as compared to a corresponding non-transformed wild type non-human organism, is conferred in the process of the invention, if the activity of a polypeptide showing the activity of a ethanolamine utilization protein, or if the activity of the polypeptide B2439, preferably represented by SEQ ID NO. 115629, or a homolog or fragment thereof, or if the activity of a polypeptide encoded by a nucleic acid molecule comprising the nucleic acid SEQ ID NO. 115628, preferably the coding region thereof, or a homolog or fragment thereof, e.g. derived from Escherichia coli, is increased or generated. For example the activity of a nucleic acid molecule or a polypeptide comprising the nucleic acid, preferably the coding region thereof, or polypeptide or the consensus sequence or the polypeptide motif, as depicted in Table I, II or IV, application No. 10, column 5 or 8 in the respective same line as the nucleic acid molecule SEQ ID NO. 115628 or polypeptide SEQ ID NO. 115629, respectively, or a homolog or a fragment thereof, is increased or generated, or if the activity ethanolamine utilization protein is increased or generated in a non-human organism, like a microorganism or a plant cell, plant or part thereof, especially with non-targeted localization. For example, an increase of the stearic acid of at least 1 percent, particularly in a range of 16 to 24-percent is conferred as compared to a corresponding non-transformed wild type non-human organism.

[55133] Accordingly, in one embodiment, an increase of stearic acid in a non-human organism, as compared to a corresponding non-transformed wild type non-human organism, is conferred in the process of the invention, if the activity of a polypeptide showing the activity of a NADH dehydrogenase subunit N, or if the activity of the polypeptide B2482, preferably represented by SEQ ID NO. 79510, or a homolog or fragment thereof, or if the activity of a polypeptide encoded by a nucleic acid molecule comprising the nucleic acid SEQ ID NO. 79509, preferably the coding region thereof, or a homolog or fragment thereof, e.g. derived from Escherichia coli, is increased or generated. For example the activity of a nucleic acid molecule or a polypeptide comprising the nucleic acid, preferably the coding region thereof, or polypeptide or the consensus sequence or the polypeptide motif, as depicted in Table I, II or IV, application No. 10, column 5 or 8 in the respective same line as the nucleic acid molecule SEQ ID NO. 79509 or polypeptide SEQ ID NO. 79510, respectively, or a homolog or a fragment thereof, is increased or generated, or if the activity NADH dehydrogenase subunit N is increased or generated in a non-human organism, like a microorganism or a plant cell, plant or part thereof, especially with non-targeted localization. For example, an increase of the stearic acid of at least 1 percent, particularly in a range of 19 to 73-percent is conferred as compared to a corresponding non-transformed wild type non-human organism.

[55134] Accordingly, in one embodiment, an increase of stearic acid in a non-human organism, as compared to a corresponding non-transformed wild type non-human organism, is conferred in the process of the invention, if the activity of a polypeptide showing the activity of a b2513-protein, or if the activity of the polypeptide B2513, preferably represented by SEQ ID NO. 9168, or a homolog or fragment thereof, or if the activity of a polypeptide encoded by a nucleic acid molecule comprising the nucleic acid SEQ ID NO. 9167, preferably the coding region thereof, or a homolog or fragment thereof, e.g. derived from Escherichia coli, is increased or generated. For example the activity of a nucleic acid molecule or a polypeptide comprising the nucleic acid, preferably the coding region thereof, or polypeptide or the consensus sequence or the polypeptide motif, as depicted in Table I, II or IV, application No. 10, column 5 or 8 in the respective same line as the nucleic acid molecule SEQ ID NO. 9167 or polypeptide SEQ ID NO. 9168, respectively, or a homolog or a fragment thereof, is increased or generated, or if the activity b2513-protein is increased or generated in a non-human organism, like a microorganism or a plant cell, plant or part thereof, especially with non-targeted localization. For example, an increase of the stearic acid of at least 1 percent, particularly in a range of 16 to 121-percent is conferred as compared to a corresponding non-transformed wild type non-human organism.

[55135] Accordingly, in one embodiment, an increase of stearic acid in a non-human organism, as compared to a corresponding non-transformed wild type non-human organism, is conferred in the process of the invention, if the activity of a polypeptide showing the activity of a phospho-2-dehydro-3-deoxyheptonate aldolase, or if the activity of the polypeptide B2601, preferably represented by SEQ ID NO. 121658, or a homolog or fragment thereof, or if the activity of a polypeptide encoded by a nucleic acid molecule comprising the nucleic acid SEQ ID NO. 121657, preferably the coding region thereof, or a homolog or fragment thereof, e.g. derived from Escherichia coli, is increased or generated. For example the activity of a nucleic acid molecule or a polypeptide comprising the nucleic acid, preferably the coding region thereof, or polypeptide or the consensus sequence or the polypeptide motif, as depicted in Table I, II or IV, application No. 10, column 5 or 8 in the respective same line as the nucleic acid molecule SEQ ID NO. 121657 or polypeptide SEQ ID NO. 121658, respectively, or a homolog or a fragment thereof, is increased or generated, or if the activity phospho-2-dehydro-3-deoxyheptonate aldolase is increased or generated in a non-human organism, like a microorganism or a plant cell, plant or part thereof, especially with plastidic localization. For example, an increase of the stearic acid of at least 1 percent, particularly in a range of 11 to 51-percent is conferred as compared to a corresponding non-transformed wild type non-human organism.

[55136] Accordingly, in one embodiment, an increase of stearic acid in a non-human organism, as compared to a corresponding non-transformed wild type non-human organism, is conferred in the process of the invention, if the activity of a polypeptide showing the activity of a 2-C-methyl-Derythritol 4-phosphate cytidylyltransferase, or if the activity of the polypeptide B2747, preferably represented by SEQ ID NO. 81076, or a homolog or fragment thereof, or if the activity of a polypeptide encoded by a nucleic acid molecule comprising the nucleic acid SEQ ID NO. 81075, preferably the coding region thereof, or a homolog or fragment thereof, e.g. derived from Escherichia coli, is increased or generated. For example the activity of a nucleic acid molecule or a polypeptide comprising the nucleic acid, preferably the coding region thereof, or polypeptide or the consensus sequence or the polypeptide motif, as depicted in Table I, II or IV, application No. 10, column 5 or 8 in the respective same line as the nucleic acid molecule SEQ ID NO. 81075 or polypeptide SEQ ID NO. 81076, respectively, or a homolog or a fragment thereof, is increased or generated, or if the activity 2-C-methyl-D-erythritol 4-phosphate cytidylyltransferase is increased or generated in a non-human organism, like a microorganism or a plant cell, plant or part thereof, especially with non-targeted localization. For example, an increase of the stearic acid of at least 1 percent, particularly in a range of 18 to 44-percent is conferred as compared to a corresponding non-transformed wild type non-human organism.

[55137] Accordingly, in one embodiment, an increase of stearic acid in a non-human organism, as compared to a corresponding non-transformed wild type non-human organism, is conferred in the process of the invention, if the activity of a polypeptide showing the activity of a b2849-protein, or if the activity of the polypeptide B2849, preferably represented by SEQ ID NO. 81981, or a homolog or fragment thereof, or if the activity of a polypeptide encoded by a nucleic acid molecule comprising the nucleic acid SEQ ID NO. 81980, preferably the coding region thereof, or a homolog or fragment thereof, e.g. derived from Escherichia coli, is increased or generated. For example the activity of a nucleic acid molecule or a polypeptide comprising the nucleic acid, preferably the coding region thereof, or polypeptide or the consensus sequence or the polypeptide motif, as depicted in Table I, II or IV, application No. 10, column 5 or 8 in the respective same line as the nucleic acid molecule SEQ ID NO. 81980 or polypeptide SEQ ID NO. 81981, respectively, or a homolog or a fragment thereof, is increased or generated, or if the activity b2849-protein is increased or generated in a non-human organism, like a microorganism or a plant cell, plant or part thereof, especially with non-targeted localization. For example, an increase of the stearic acid of at least 1 percent, particularly in a range of 21 to 129-percent is conferred as compared to a corresponding non-transformed wild type non-human organism.

[55138] Accordingly, in one embodiment, an increase of stearic acid in a non-human organism, as compared to a corresponding non-transformed wild type non-human organism, is conferred in the process of the invention, if the activity of a polypeptide showing the activity of a aspartateammonia ligase, or if the activity of the polypeptide B3744, preferably represented by SEQ ID NO. 83658, or a homolog or fragment thereof, or if the activity of a polypeptide encoded by a nucleic acid molecule comprising the nucleic acid SEQ ID NO. 83657, preferably the coding region thereof, or a homolog or fragment thereof, e.g. derived from Escherichia coli, is increased or generated. For example the activity of a nucleic acid molecule or a polypeptide comprising the nucleic acid, preferably the coding region thereof, or polypeptide or the consensus sequence or the polypeptide motif, as depicted in Table I, II or IV, application No. 10, column 5 or 8 in the respective same line as the nucleic acid molecule SEQ ID NO. 83657 or polypeptide SEQ ID NO. 83658, respectively, or a homolog or a fragment thereof, is increased or generated, or if the activity aspartate-ammonia ligase is increased or generated in a non-human organism, like a microorganism or a plant cell, plant or part thereof, especially with plastidic localization. For example, an increase of the stearic acid of at least 1 percent, particularly in a range of 9 to 27-percent is conferred as compared to a corresponding non-transformed wild type non-human organism.

[55139] Accordingly, in one embodiment, an increase of stearic acid in a non-human organism, as compared to a corresponding non-transformed wild type non-human organism, is conferred in the process of the invention, if the activity of a polypeptide showing the activity of a 3-ketoacyl-CoA thiolase, or if the activity of the polypeptide B3845, preferably represented by SEQ ID NO. 100676, or a homolog or fragment thereof, or if the activity of a polypeptide encoded by a nucleic acid molecule comprising the nucleic acid SEQ ID NO. 100675, preferably the coding region thereof, or a homolog or fragment thereof, e.g. derived from Escherichia coli, is increased or generated. For example the activity of a nucleic acid molecule or a polypeptide comprising the nucleic acid, preferably the coding region thereof, or polypeptide or the consensus sequence or the polypeptide motif, as depicted in Table I, II or IV, application No. 10, column 5 or 8 in the respective same line as the nucleic acid molecule SEQ ID NO. 100675 or polypeptide SEQ ID NO. 100676, respectively, or a homolog or a fragment thereof, is increased or generated, or if the activity 3-ketoacyl-CoA thiolase is increased or generated in a non-human organism, like a microorganism or a plant cell, plant or part thereof, especially with plastidic localization. For example, an increase of the stearic acid of at least 1 percent, particularly in a range of 10 to 27-percent is conferred as compared to a corresponding non-transformed wild type non-human organism.

[55140] Accordingly, in one embodiment, an increase of stearic acid in a non-human organism, as compared to a corresponding non-transformed wild type non-human organism, is conferred in the process of the invention, if the activity of a polypeptide showing the activity of a b3989-protein, or if the activity of the polypeptide B3989, preferably represented by SEQ ID NO. 44373, or a homolog or fragment thereof, or if the activity of a polypeptide encoded by a nucleic acid molecule comprising the nucleic acid SEQ ID NO. 44372, preferably the coding region thereof, or a homolog or fragment thereof, e.g. derived from Escherichia coli, is increased or generated. For example the activity of a nucleic acid molecule or a polypeptide comprising the nucleic acid, preferably the coding region thereof, or polypeptide or the consensus sequence or the polypeptide motif, as depicted in Table I, II or IV, application No. 10, column 5 or 8 in the respective same line as the nucleic acid molecule SEQ ID NO. 44372 or polypeptide SEQ ID NO. 44373, respectively, or a homolog or a fragment thereof, is increased or generated, or if the activity b3989-protein is increased or generated in a non-human organism, like a microorganism or a plant cell, plant or part thereof, especially with non-targeted localization. For example, an increase of the stearic acid of at least 1 percent, particularly in a range of 18 to 35-percent is conferred as compared to a corresponding non-transformed wild type non-human organism.

[55141] Accordingly, in one embodiment, an increase of stearic acid in a non-human organism, as compared to a corresponding non-transformed wild type non-human organism, is conferred in the process of the invention, if the activity of a polypeptide showing the activity of a b4121-protein, or if the activity of the polypeptide B4121, preferably represented by SEQ ID NO. 44610, or a homolog or fragment thereof, or if the activity of a polypeptide encoded by a nucleic acid molecule comprising the nucleic acid SEQ ID NO. 44609, preferably the coding region thereof, or a homolog or fragment thereof, e.g. derived from Escherichia coli, is increased or generated. For example the activity of a nucleic acid molecule or a polypeptide comprising the nucleic acid, preferably the coding region thereof, or polypeptide or the consensus sequence or the polypeptide motif, as depicted in Table I, II or IV, application No. 10, column 5 or 8 in the respective same line as the nucleic acid molecule SEQ ID NO. 44609 or polypeptide SEQ ID NO. 44610, respectively, or a homolog or a fragment thereof, is increased or generated, or if the activity b4121-protein is increased or generated in a non-human organism, like a microorganism or a plant cell, plant or part thereof, especially with non-targeted localization. For example, an increase of the stearic acid of at least 1 percent, particularly in a range of 18 to 35-percent is conferred as compared to a corresponding non-transformed wild type non-human organism.

[55142] Accordingly, in one embodiment, an increase of stearic acid in a non-human organism, as compared to a corresponding non-transformed wild type non-human organism, is conferred in the process of the invention, if the activity of a polypeptide showing the activity of a glutaredoxin, or if the activity of the polypeptide GM02LC12622, preferably represented by SEQ ID NO. 10812, or a homolog or fragment thereof, or if the activity of a polypeptide encoded by a nucleic acid molecule comprising the nucleic acid SEQ ID NO. 10811, preferably the coding region thereof, or a homolog or fragment thereof, e.g. derived from Glycine max, is increased or generated. For example the activity of a nucleic acid molecule or a polypeptide comprising the nucleic acid, preferably the coding region thereof, or polypeptide or the consensus sequence or the polypeptide motif, as depicted in Table I, II or IV, application No. 10, column 5 or 8 in the respective same line as the nucleic acid molecule SEQ ID NO. 10811 or polypeptide SEQ ID NO. 10812, respectively, or a homolog or a fragment thereof, is increased or generated, or if the activity glutaredoxin is increased or generated in a non-human organism, like a microorganism or a plant cell, plant or part thereof, especially with non-targeted localization. For example, an increase of the stearic acid of at least 1 percent, particularly in a range of 17 to 99-percent is conferred as compared to a corresponding non-transformed wild type non-human organism.

[55143] Accordingly, in one embodiment, an increase of stearic acid in a non-human organism, as compared to a corresponding non-transformed wild type non-human organism, is conferred in the process of the invention, if the activity of a polypeptide showing the activity of a transcription factor, or if the activity of the polypeptide GM02LC19289, preferably represented by SEQ ID NO. 46752, or a homolog or fragment thereof, or if the activity of a polypeptide encoded by a nucleic acid molecule comprising the nucleic acid SEQ ID NO. 46751, preferably the coding region thereof, or a homolog or fragment thereof, e.g. derived from Glycine max, is increased or generated. For example the activity of a nucleic acid molecule or a polypeptide comprising the nucleic acid, preferably the coding region thereof, or polypeptide or the consensus sequence or the polypeptide motif, as depicted in Table I, II or IV, application No. 10, column 5 or 8 in the respective same line as the nucleic acid molecule SEQ ID NO. 46751 or polypeptide SEQ ID NO. 46752, respectively, or a homolog or a fragment thereof, is increased or generated, or if the activity transcription factor is increased or generated in a non-human organism, like a microorganism or a plant cell, plant or part thereof, especially with non-targeted localization. For example, an increase of the stearic acid of at least 1 percent, particularly in a range of 17 to 41 percent is conferred as compared to a corresponding non-transformed wild type non-human organism.

[55144] Accordingly, in one embodiment, an increase of stearic acid in a non-human organism, as compared to a corresponding non-transformed wild type non-human organism, is conferred in the process of the invention, if the activity of a polypeptide showing the activity of a glucokinase, or if the activity of the polypeptide Sll0593, preferably represented by SEQ ID NO. 85511, or a homolog or fragment thereof, or if the activity of a polypeptide encoded by a nucleic acid molecule comprising the nucleic acid SEQ ID NO. 85510, preferably the coding region thereof, or a homolog or fragment thereof, e.g. derived from Synechocystis sp., is increased or generated. For example the activity of a nucleic acid molecule or a polypeptide comprising the nucleic acid, preferably the coding region thereof, or polypeptide or the consensus sequence or the polypeptide motif, as depicted in Table I, 11 or IV, application No. 10, column 5 or 8 in the respective same line as the nucleic acid molecule SEQ ID NO. 85510 or polypeptide SEQ ID NO. 85511, respectively, or a homolog or a fragment thereof, is increased or generated, or if the activity glucokinase is increased or generated in a non-human organism, like a microorganism or a plant cell, plant or part thereof, especially with plastidic localization. For example, an increase of the stearic acid of at least 1 percent, particularly in a range of 17 to 54-percent is conferred as compared to a corresponding non-transformed wild type non-human organism.

[55145] Accordingly, in one embodiment, an increase of stearic acid in a non-human organism, as compared to a corresponding non-transformed wild type non-human organism, is conferred in the process of the invention, if the activity of a polypeptide showing the activity of a sll1032-protein, or if the activity of the polypeptide Sll1032, preferably represented by SEQ ID NO. 85724, or a homolog or fragment thereof, or if the activity of a polypeptide encoded by a nucleic acid molecule comprising the nucleic acid SEQ ID NO. 85723, preferably the coding region thereof, or a homolog or fragment thereof, e.g. derived from Synechocystis sp., is increased or generated. For example the activity of a nucleic acid molecule or a polypeptide comprising the nucleic acid, preferably the coding region thereof, or polypeptide or the consensus sequence or the polypeptide motif, as depicted in Table I, II or IV, application No. 10, column 5 or 8 in the respective same line as the nucleic acid molecule SEQ ID NO. 85723 or polypeptide SEQ ID NO. 85724, respectively, or a homolog or a fragment thereof, is increased or generated, or if the activity sll1032-protein is increased or generated in a non-human organism, like a microorganism or a plant cell, plant or part thereof, especially with mitochondrial localization. For example, an increase of the stearic acid of at least 1 percent, particularly in a range of 17 to 22-percent is conferred as compared to a corresponding non-transformed wild type non-human organism.

[55146] Accordingly, in one embodiment, an increase of stearic acid in a non-human organism, as compared to a corresponding non-transformed wild type non-human organism, is conferred in the process of the invention, if the activity of a polypeptide showing the activity of a CTP synthetase, or if the activity of the polypeptide Sll1443, preferably represented by SEQ ID NO. 53879, or a homolog or fragment thereof, or if the activity of a polypeptide encoded by a nucleic acid molecule comprising the nucleic acid SEQ ID NO. 53878, preferably the coding region thereof, or a homolog or fragment thereof, e.g. derived from Synechocystis sp., is increased or generated. For example the activity of a nucleic acid molecule or a polypeptide comprising the nucleic acid, preferably the coding region thereof, or polypeptide or the consensus sequence or the polypeptide motif, as depicted in Table I, II or IV, application No. 10, column 5 or 8 in the respective same line as the nucleic acid molecule SEQ ID NO. 53878 or polypeptide SEQ ID NO. 53879, respectively, or a homolog or a fragment thereof, is increased or generated, or if the activity CTP synthetase is increased or generated in a non-human organism, like a microorganism or a plant cell, plant or part thereof, especially with mitochondrial localization. For example, an increase of the stearic acid of at least 1 percent, particularly in a range of 17 to 42-percent is conferred as compared to a corresponding non-transformed wild type non-human organism.

[55147] Accordingly, in one embodiment, an increase of stearic acid in a non-human organism, as compared to a corresponding non-transformed wild type non-human organism, is conferred in the process of the invention, if the activity of a polypeptide showing the activity of a coproporphyrinogen III oxidase, or if the activity of the polypeptide Sll1917, preferably represented by SEQ ID NO. 11472, or a homolog or fragment thereof, or if the activity of a polypeptide encoded by a nucleic acid molecule comprising the nucleic acid SEQ ID NO. 11471, preferably the coding region thereof, or a homolog or fragment thereof, e.g. derived from Synechocystis sp., is increased or generated. For example the activity of a nucleic acid molecule or a polypeptide comprising the nucleic acid, preferably the coding region thereof, or polypeptide or the consensus sequence or the polypeptide motif, as depicted in Table I, II or IV, application No. 10, column 5 or 8 in the respective same line as the nucleic acid molecule SEQ ID NO. 11471 or polypeptide SEQ ID NO. 11472, respectively, or a homolog or a fragment thereof, is increased or generated, or if the activity coproporphyrinogen III oxidase is increased or generated in a non-human organism, like a microorganism or a plant cell, plant or part thereof, especially with mitochondrial localization. For example, an increase of the stearic acid of at least 1 percent, particularly in a range of 17 to 37-percent is conferred as compared to a corresponding non-transformed wild type non-human organism.

[55148] Accordingly, in one embodiment, an increase of stearic acid in a non-human organism, as compared to a corresponding non-transformed wild type non-human organism, is conferred in the process of the invention, if the activity of a polypeptide showing the activity of a cationtransporting ATPase, or if the activity of the polypeptide Sll1920, preferably represented by SEQ ID NO. 55386, or a homolog or fragment thereof, or if the activity of a polypeptide encoded by a nucleic acid molecule comprising the nucleic acid SEQ ID NO. 55385, preferably the coding region thereof, or a homolog or fragment thereof, e.g. derived from Synechocystis sp., is increased or generated. For example the activity of a nucleic acid molecule or a polypeptide comprising the nucleic acid, preferably the coding region thereof, or polypeptide or the consensus sequence or the polypeptide motif, as depicted in Table I, II or IV, application No. 10, column 5 or 8 in the respective same line as the nucleic acid molecule SEQ ID NO. 55385 or polypeptide SEQ ID NO. 55386, respectively, or a homolog or a fragment thereof, is increased or generated, or if the activity cation-transporting ATPase is increased or generated in a non-human organism, like a microorganism or a plant cell, plant or part thereof, especially with mitochondrial localization. For example, an increase of the stearic acid of at least 1 percent, particularly in a range of 15 to 34-percent is conferred as compared to a corresponding non-transformed wild type non-human organism.

[55149] Accordingly, in one embodiment, an increase of stearic acid in a non-human organism, as compared to a corresponding non-transformed wild type non-human organism, is conferred in the process of the invention, if the activity of a polypeptide showing the activity of a oxidoreductase, or if the activity of the polypeptide Slr0338, preferably represented by SEQ ID NO. 11991, or a homolog or fragment thereof, or if the activity of a polypeptide encoded by a nucleic acid molecule comprising the nucleic acid SEQ ID NO. 11990, preferably the coding region thereof, or a homolog or fragment thereof, e.g. derived from Synechocystis sp., is increased or generated. For example the activity of a nucleic acid molecule or a polypeptide comprising the nucleic acid, preferably the coding region thereof, or polypeptide or the consensus sequence or the polypeptide motif, as depicted in Table I, II or IV, application No. 10, column 5 or 8 in the respective same line as the nucleic acid molecule SEQ ID NO. 11990 or polypeptide SEQ ID NO. 11991, respectively, or a homolog or a fragment thereof, is increased or generated, or if the activity oxidoreductase is increased or generated in a non-human organism, like a microorganism or a plant cell, plant or part thereof, especially with plastidic localization. For example, an increase of the stearic acid of at least 1 percent, particularly in a range of 20 to 36-percent is conferred as compared to a corresponding non-transformed wild type non-human organism.

[55150] Accordingly, in one embodiment, an increase of stearic acid in a non-human organism, as compared to a corresponding non-transformed wild type non-human organism, is conferred in the process of the invention, if the activity of a polypeptide showing the activity of a tryptophan synthase alpha chain, or if the activity of the polypeptide Slr0966, preferably represented by SEQ ID NO. 87656, or a homolog or fragment thereof, or if the activity of a polypeptide encoded by a nucleic acid molecule comprising the nucleic acid SEQ ID NO. 87655, preferably the coding region thereof, or a homolog or fragment thereof, e.g. derived from Synechocystis sp., is increased or generated. For example the activity of a nucleic acid molecule or a polypeptide comprising the nucleic acid, preferably the coding region thereof, or polypeptide or the consensus sequence or the polypeptide motif, as depicted in Table I, II or IV, application No. 10, column 5 or 8 in the respective same line as the nucleic acid molecule SEQ ID NO. 87655 or polypeptide SEQ ID NO. 87656, respectively, or a homolog or a fragment thereof, is increased or generated, or if the activity tryptophan synthase alpha chain is increased or generated in a non-human organism, like a microorganism or a plant cell, plant or part thereof, especially with plastidic localization. For example, an increase of the stearic acid of at least 1 percent, particularly in a range of 27 to 48-percent is conferred as compared to a corresponding non-transformed wild type non-human organism.

[55151] Accordingly, in one embodiment, an increase of stearic acid in a non-human organism, as compared to a corresponding non-transformed wild type non-human organism, is conferred in the process of the invention, if the activity of a polypeptide showing the activity of a arginine decarboxylase, or if the activity of the polypeptide Slr1312, preferably represented by SEQ ID NO. 58325, or a homolog or fragment thereof, or if the activity of a polypeptide encoded by a nucleic acid molecule comprising the nucleic acid SEQ ID NO. 58324, preferably the coding region thereof, or a homolog or fragment thereof, e.g. derived from Synechocystis sp., is increased or generated. For example the activity of a nucleic acid molecule or a polypeptide comprising the nucleic acid, preferably the coding region thereof, or polypeptide or the consensus sequence or the polypeptide motif, as depicted in Table I, II or IV, application No. 10, column 5 or 8 in the respective same line as the nucleic acid molecule SEQ ID NO. 58324 or polypeptide SEQ ID NO. 58325, respectively, or a homolog or a fragment thereof, is increased or generated, or if the activity arginine decarboxylase is increased or generated in a non-human organism, like a microorganism or a plant cell, plant or part thereof, especially with non-targeted localization. For example, an increase of the stearic acid of at least 1 percent, particularly in a range of 16 to 70-percent is conferred as compared to a corresponding non-transformed wild type non-human organism.

[55152] Accordingly, in one embodiment, an increase of stearic acid in a non-human organism, as compared to a corresponding non-transformed wild type non-human organism, is conferred in the process of the invention, if the activity of a polypeptide showing the activity of a acetylcoenzyme A synthetase, or if the activity of the polypeptide Ya1054c, preferably represented by SEQ ID NO. 121909, or a homolog or fragment thereof, or if the activity of a polypeptide encoded by a nucleic acid molecule comprising the nucleic acid SEQ ID NO. 121908, preferably the coding region thereof, or a homolog or fragment thereof, e.g. derived from Saccharomyces cerevisiae, is increased or generated. For example the activity of a nucleic acid molecule or a polypeptide comprising the nucleic acid, preferably the coding region thereof, or polypeptide or the consensus sequence or the polypeptide motif, as depicted in Table I, II or IV, application No. 10, column 5 or 8 in the respective same line as the nucleic acid molecule SEQ ID NO. 121908 or polypeptide SEQ ID NO. 121909, respectively, or a homolog or a fragment thereof, is increased or generated, or if the activity acetyl-coenzyme A synthetase is increased or generated in a non-human organism, like a microorganism or a plant cell, plant or part thereof, especially with non-targeted localization. For example, an increase of the stearic acid of at least 1 percent, particularly in a range of 20 to 28-percent is conferred as compared to a corresponding non-transformed wild type non-human organism.

[55153] Accordingly, in one embodiment, an increase of stearic acid in a non-human organism, as compared to a corresponding non-transformed wild type non-human organism, is conferred in the process of the invention, if the activity of a polypeptide showing the activity of a 3-deoxy-7-phosphoheptulonate synthase, or if the activity of the polypeptide Ybr249c, preferably represented by SEQ ID NO. 88880, or a homolog or fragment thereof, or if the activity of a polypeptide encoded by a nucleic acid molecule comprising the nucleic acid SEQ ID NO. 88879, preferably the coding region thereof, or a homolog or fragment thereof, e.g. derived from Saccharomyces cerevisiae, is increased or generated. For example the activity of a nucleic acid molecule or a polypeptide comprising the nucleic acid, preferably the coding region thereof, or polypeptide or the consensus sequence or the polypeptide motif, as depicted in Table I, II or IV, application No. 10, column 5 or 8 in the respective same line as the nucleic acid molecule SEQ ID NO. 88879 or polypeptide SEQ ID NO. 88880, respectively, or a homolog or a fragment thereof, is increased or generated, or if the activity 3-deoxy-7-phosphoheptulonate synthase is increased or generated in a non-human organism, like a microorganism or a plant cell, plant or part thereof, especially with plastidic localization. For example, an increase of the stearic acid of at least 1 percent, particularly in a range of 20 to 109-percent is conferred as compared to a corresponding non-transformed wild type non-human organism.

[55154] Accordingly, in one embodiment, an increase of stearic acid in a non-human organism, as compared to a corresponding non-transformed wild type non-human organism, is conferred in the process of the invention, if the activity of a polypeptide showing the activity of a ycl049c-protein, or if the activity of the polypeptide Yc1049c, preferably represented by SEQ ID NO. 113221, or a homolog or fragment thereof, or if the activity of a polypeptide encoded by a nucleic acid molecule comprising the nucleic acid SEQ ID NO. 113220, preferably the coding region thereof, or a homolog or fragment thereof, e.g. derived from Saccharomyces cerevisiae, is increased or generated. For example the activity of a nucleic acid molecule or a polypeptide comprising the nucleic acid, preferably the coding region thereof, or polypeptide or the consensus sequence or the polypeptide motif, as depicted in Table I, II or IV, application No. 10, column 5 or 8 in the respective same line as the nucleic acid molecule SEQ ID NO. 113220 or polypeptide SEQ ID NO. 113221, respectively, or a homolog or a fragment thereof, is increased or generated, or if the activity ycl049c-protein is increased or generated in a non-human organism, like a microorganism or a plant cell, plant or part thereof, especially with plastidic localization. For example, an increase of the stearic acid of at least 1 percent, particularly in a range of 11 to 17-percent is conferred as compared to a corresponding non-transformed wild type non-human organism.

[55155] Accordingly, in one embodiment, an increase of stearic acid in a non-human organism, as compared to a corresponding non-transformed wild type non-human organism, is conferred in the process of the invention, if the activity of a polypeptide showing the activity of a glycerol-3-phosphate dehydrogenase, or if the activity of the polypeptide Ydl022w, preferably represented by SEQ ID NO. 119409, or a homolog or fragment thereof, or if the activity of a polypeptide encoded by a nucleic acid molecule comprising the nucleic acid SEQ ID NO. 119408, preferably the coding region thereof, or a homolog or fragment thereof, e.g. derived from Saccharomyces cerevisiae, is increased or generated. For example the activity of a nucleic acid molecule or a polypeptide comprising the nucleic acid, preferably the coding region thereof, or polypeptide or the consensus sequence or the polypeptide motif, as depicted in Table I, II or IV, application No. 10, column 5 or 8 in the respective same line as the nucleic acid molecule SEQ ID NO. 119408 or polypeptide SEQ ID NO. 119409, respectively, or a homolog or a fragment thereof, is increased or generated, or if the activity glycerol-3-phosphate dehydrogenase is increased or generated in a non-human organism, like a microorganism or a plant cell, plant or part thereof, especially with non-targeted localization. For example, an increase of the stearic acid of at least 1 percent, particularly in a range of 17 to 35-percent is conferred as compared to a corresponding non-transformed wild type non-human organism.

[55156] Accordingly, in one embodiment, an increase of stearic acid in a non-human organism, as compared to a corresponding non-transformed wild type non-human organism, is conferred in the process of the invention, if the activity of a polypeptide showing the activity of a isocitrate dehydrogenase, or if the activity of the polypeptide Ydl066w, preferably represented by SEQ ID NO. 122229, or a homolog or fragment thereof, or if the activity of a polypeptide encoded by a nucleic acid molecule comprising the nucleic acid SEQ ID NO. 122228, preferably the coding region thereof, or a homolog or fragment thereof, e.g. derived from Saccharomyces cerevisiae, is increased or generated. For example the activity of a nucleic acid molecule or a polypeptide comprising the nucleic acid, preferably the coding region thereof, or polypeptide or the consensus sequence or the polypeptide motif, as depicted in Table I, 11 or IV, application No. 10, column 5 or 8 in the respective same line as the nucleic acid molecule SEQ ID NO. 122228 or polypeptide SEQ ID NO. 122229, respectively, or a homolog or a fragment thereof, is increased or generated, or if the activity isocitrate dehydrogenase is increased or generated in a non-human organism, like a microorganism or a plant cell, plant or part thereof, especially with non-targeted localization. For example, an increase of the stearic acid of at least 1 percent, particularly in a range of 9 to 24-percent is conferred as compared to a corresponding non-transformed wild type non-human organism.

[55157] Accordingly, in one embodiment, an increase of stearic acid in a non-human organism, as compared to a corresponding non-transformed wild type non-human organism, is conferred in the process of the invention, if the activity of a polypeptide showing the activity of a ydr507c-protein, or if the activity of the polypeptide Ydr507c, preferably represented by SEQ ID NO. 90166, or a homolog or fragment thereof, or if the activity of a polypeptide encoded by a nucleic acid molecule comprising the nucleic acid SEQ ID NO. 90165, preferably the coding region thereof, or a homolog or fragment thereof, e.g. derived from Saccharomyces cerevisiae, is increased or generated. For example the activity of a nucleic acid molecule or a polypeptide comprising the nucleic acid, preferably the coding region thereof, or polypeptide or the consensus sequence or the polypeptide motif, as depicted in Table I, II or IV, application No. 10, column 5 or 8 in the respective same line as the nucleic acid molecule SEQ ID NO. 90165 or polypeptide SEQ ID NO. 90166, respectively, or a homolog or a fragment thereof, is increased or generated, or if the activity ydr507c-protein is increased or generated in a non-human organism, like a microorganism or a plant cell, plant or part thereof, especially with non-targeted localization. For example, an increase of the stearic acid of at least 1 percent, particularly in a range of 16 to 51-percent is conferred as compared to a corresponding non-transformed wild type non-human organism.

[55158] Accordingly, in one embodiment, an increase of stearic acid in a non-human organism, as compared to a corresponding non-transformed wild type non-human organism, is conferred in the process of the invention, if the activity of a polypeptide showing the activity of a dihydroxyacetone kinase, or if the activity of the polypeptide Yfl053w, preferably represented by SEQ ID NO. 120310, or a homolog or fragment thereof, or if the activity of a polypeptide encoded by a nucleic acid molecule comprising the nucleic acid SEQ ID NO. 120309, preferably the coding region thereof, or a homolog or fragment thereof, e.g. derived from Saccharomyces cerevisiae, is increased or generated. For example the activity of a nucleic acid molecule or a polypeptide comprising the nucleic acid, preferably the coding region thereof, or polypeptide or the consensus sequence or the polypeptide motif, as depicted in Table I, II or IV, application No. 10, column 5 or 8 in the respective same line as the nucleic acid molecule SEQ ID NO. 120309 or polypeptide SEQ ID NO. 120310, respectively, or a homolog or a fragment thereof, is increased or generated, or if the activity dihydroxyacetone kinase is increased or generated in a non-human organism, like a microorganism or a plant cell, plant or part thereof, especially with non-targeted localization. For example, an increase of the stearic acid of at least 1 percent, particularly in a range of 19 to 37-percent is conferred as compared to a corresponding non-transformed wild type non-human organism.

[55159] Accordingly, in one embodiment, an increase of stearic acid in a non-human organism, as compared to a corresponding non-transformed wild type non-human organism, is conferred in the process of the invention, if the activity of a polypeptide showing the activity of a YGR104C-protein, or if the activity of the polypeptide Ygr104c, preferably represented by SEQ ID NO. 117483, or a homolog or fragment thereof, or if the activity of a polypeptide encoded by a nucleic acid molecule comprising the nucleic acid SEQ ID NO. 117482, preferably the coding region thereof, or a homolog or fragment thereof, e.g. derived from Saccharomyces cerevisiae, is increased or generated. For example the activity of a nucleic acid molecule or a polypeptide comprising the nucleic acid, preferably the coding region thereof, or polypeptide or the consensus sequence or the polypeptide motif, as depicted in Table I, II or IV, application No. 10, column 5 or 8 in the respective same line as the nucleic acid molecule SEQ ID NO. 117482 or polypeptide SEQ ID NO. 117483, respectively, or a homolog or a fragment thereof, is increased or generated, or if the activity YGR104C-protein is increased or generated in a non-human organism, like a microorganism or a plant cell, plant or part thereof, especially with non-targeted localization. For example, an increase of the stearic acid of at least 1 percent, particularly in a range of 14 to 20-percent is conferred as compared to a corresponding non-transformed wild type non-human organism.

[55160] Accordingly, in one embodiment, an increase of stearic acid in a non-human organism, as compared to a corresponding non-transformed wild type non-human organism, is conferred in the process of the invention, if the activity of a polypeptide showing the activity of a aconitate hydratase, or if the activity of the polypeptide Ylr304c, preferably represented by SEQ ID NO. 66773, or a homolog or fragment thereof, or if the activity of a polypeptide encoded by a nucleic acid molecule comprising the nucleic acid SEQ ID NO. 66772, preferably the coding region thereof, or a homolog or fragment thereof, e.g. derived from Saccharomyces cerevisiae, is increased or generated. For example the activity of a nucleic acid molecule or a polypeptide comprising the nucleic acid, preferably the coding region thereof, or polypeptide or the consensus sequence or the polypeptide motif, as depicted in Table I, II or IV, application No. 10, column 5 or 8 in the respective same line as the nucleic acid molecule SEQ ID NO. 66772 or polypeptide SEQ ID NO. 66773, respectively, or a homolog or a fragment thereof, is increased or generated, or if the activity aconitate hydratase is increased or generated in a non-human organism, like a microorganism or a plant cell, plant or part thereof, especially with non-targeted localization. For example, an increase of the stearic acid of at least 1 percent, particularly in a range of 16 to 35-percent is conferred as compared to a corresponding non-transformed wild type non-human organism.

[55161] Accordingly, in one embodiment, an increase of stearic acid in a non-human organism, as compared to a corresponding non-transformed wild type non-human organism, is conferred in the process of the invention, if the activity of a polypeptide showing the activity of a yor392w-protein, or if the activity of the polypeptide Yor392w, preferably represented by SEQ ID NO. 15184, or a homolog or fragment thereof, or if the activity of a polypeptide encoded by a nucleic acid molecule comprising the nucleic acid SEQ ID NO. 15183, preferably the coding region thereof, or a homolog or fragment thereof, e.g. derived from Saccharomyces cerevisiae, is increased or generated. For example the activity of a nucleic acid molecule or a polypeptide comprising the nucleic acid, preferably the coding region thereof, or polypeptide or the consensus sequence or the polypeptide motif, as depicted in Table I, II or IV, application No. 10, column 5 or 8 in the respective same line as the nucleic acid molecule SEQ ID NO. 15183 or polypeptide SEQ ID NO. 15184, respectively, or a homolog or a fragment thereof, is increased or generated, or if the activity yor392w-protein is increased or generated in a non-human organism, like a microorganism or a plant cell, plant or part thereof, especially with plastidic localization. For example, an increase of the stearic acid of at least 1 percent, particularly in a range of 20 to 32-percent is conferred as compared to a corresponding non-transformed wild type non-human organism.

[55162] Accordingly, in one embodiment, an increase of stearic acid in a non-human organism, as compared to a corresponding non-transformed wild type non-human organism, is conferred in the process of the invention, if the activity of a polypeptide showing the activity of a pyruvate kinase, or if the activity of the polypeptide 51340801_CANOLA, preferably represented by SEQ ID NO. 15533, or a homolog or fragment thereof, or if the activity of a polypeptide encoded by a nucleic acid molecule comprising the nucleic acid SEQ ID NO. 15532, preferably the coding region thereof, or a homolog or fragment thereof, e.g. derived from Brassica napus, is increased or generated. For example the activity of a nucleic acid molecule or a polypeptide comprising the nucleic acid, preferably the coding region thereof, or polypeptide or the consensus sequence or the polypeptide motif, as depicted in Table I, II or IV, application No. 10, column 5 or 8 in the respective same line as the nucleic acid molecule SEQ ID NO. 15532 or polypeptide SEQ ID NO. 15533, respectively, or a homolog or a fragment thereof, is increased or generated, or if the activity pyruvate kinase is increased or generated in a non-human organism, like a microorganism or a plant cell, plant or part thereof, especially with plastidic localization. For example, an increase of the stearic acid of at least 1 percent, particularly in a range of 16 to 58-percent is conferred as compared to a corresponding non-transformed wild type non-human organism.

[55163] Accordingly, in one embodiment, an increase of stearic acid in a non-human organism, as compared to a corresponding non-transformed wild type non-human organism, is conferred in the process of the invention, if the activity of a polypeptide showing the activity of a glucose-6-phosphate 1-dehydrogenase, or if the activity of the polypeptide 59582753_SOYBEAN, preferably represented by SEQ ID NO. 16884, or a homolog or fragment thereof, or if the activity of a polypeptide encoded by a nucleic acid molecule comprising the nucleic acid SEQ ID NO. 16883, preferably the coding region thereof, or a homolog or fragment thereof, e.g. derived from Glycine max, is increased or generated. For example the activity of a nucleic acid molecule or a polypeptide comprising the nucleic acid, preferably the coding region thereof, or polypeptide or the consensus sequence or the polypeptide motif, as depicted in Table I, II or IV, application No. 10, column 5 or 8 in the respective same line as the nucleic acid molecule SEQ ID NO. 16883 or polypeptide SEQ ID NO. 16884, respectively, or a homolog or a fragment thereof, is increased or generated, or if the activity glucose-6-phosphate 1-dehydrogenase is increased or generated in a non-human organism, like a microorganism or a plant cell, plant or part thereof, especially with plastidic localization. For example, an increase of the stearic acid of at least 1 percent, particularly in a range of 16 to 42-percent is conferred as compared to a corresponding non-transformed wild type non-human organism.

[55164] [0096.1.8.10] to [0103.1.8.10] for the disclosure of these paragraphs see [0096.1.8.8] to [0103.1.8.8] above.

[55165] In this paragraph “A” means “Goffeau et al., Science 274 (5287), 546 (1996)”, “B” means “Blattner et al., Science 277 (5331), 1453 (1997)”, “C” means “Nakamura et al., Nucleic Acids Res. 28(1), 72 (2000)”, “D” means “deposition of the sequences to the EMBL/GenBank/DDBJ databases under “Sequencing of the draft genome assembly of Azotobacter vinelandii AvOP”. in June 2005 by Copeland et al.”, “E” means “Henne et al., Nat. Biotechnol. 22 (5), 547 (2004)”, “F” means “Kaul et al., Nature 408 (6814), 796 (2000)”, and “G” means “Matsumoto et al., Nature 436 (7052), 793 (2005)”.

[55166] The nucleic acid sequence of At1g68320 from Arabidopsis thaliana, e.g. as shown in the respective line in column 5 of Table I, application no. 10, has been published in F. And the activity of the gene product thereof is the activity of transcription factor.

[55167] Accordingly, in one embodiment, the process of the present invention for producing stearic acid in a non-human organism, like a microorganism or a plant or a part thereof, comprises increasing or generating the activity of a gene product with the activity of a gene product conferring the activity of “transcription factor”, especially from Arabidopsis thaliana or its functional equivalent or its homolog, e.g. the increase of
[55168] (a) a gene product of a gene comprising the nucleic acid molecule as shown in the respective line in column 5 of Table I , application no. 10, preferably the coding region thereof, or a homolog or a fragment thereof, and being depicted in the same respective line as said At1g68320, or a functional equivalent or a homolog thereof as shown in column 8 of Table I, application no. 10, preferably the coding region thereof, particularly a homolog or functional equivalent as shown in column 8 of Table I B, application no. 10, and being depicted in the same respective line as said At1g68320, and preferably the activity is increased non-targeted, or
[55169] (b) a polypeptide comprising a polypeptide, a consensus sequence or at least a polypeptide motif as shown in the respective line in column 5 of Table II or in column 8 of Table IV, application no. 10, respectively, and being depicted in the same respective line as said At1g68320, or a functional equivalent or a homolog thereof as depicted in column 8 of Table II, application no. 10, preferably a homolog or functional equivalent as depicted in column 8 of Table II B, application no. 10, and being depicted in the same respective line as said At1g68320, and preferably the activity is increased non-targeted.

[55170] Accordingly, in one embodiment, the molecule which activity is to be increased in the process of the invention is the gene product with an activity as a “transcription factor”, preferably it is the molecule of section (a) or (b) of this paragraph.

[55171] In particular, it was observed that in plants, especially in Arabidopsis thaliana, increasing or generating the activity of a gene product non-targeted with the activity of a “transcription factor”, preferably being encoded by a gene comprising the nucleic acid sequence SEQ ID NO. 1061, preferably the coding region thereof, conferred the production of or the increase in stearic acid compared with the wild type control.

[55172] The nucleic acid sequence of At2g25070 from Arabidopsis thaliana, e.g. as shown in the respective line in column 5 of Table I, application no. 10, has been published in F. And the activity of the gene product thereof is the activity of protein phosphatase.

[55173] Accordingly, in one embodiment, the process of the present invention for producing stearic acid in a non-human organism, like a microorganism or a plant or a part thereof, comprises increasing or generating the activity of a gene product with the activity of a gene product conferring the activity of “protein phosphatase”, especially from Arabidopsis thaliana or its functional equivalent or its homolog, e.g. the increase of
[55174] (a) a gene product of a gene comprising the nucleic acid molecule as shown in the respective line in column 5 of Table I, application no. 10, preferably the coding region thereof, or a homolog or a fragment thereof, and being depicted in the same respective line as said At2g25070, or a functional equivalent or a homolog thereof as shown in column 8 of Table I, application no. 10, preferably the coding region thereof, particularly a homolog or functional equivalent as shown in column 8 of Table I B, application no. 10, and being depicted in the same respective line as said At2g25070, and preferably the activity is increased non-targeted, or
[55175] (b) a polypeptide comprising a polypeptide, a consensus sequence or at least a polypeptide motif as shown in the respective line in column 5 of Table II or in column 8 of Table IV, application no. 10, respectively, and being depicted in the same respective line as said At2g25070, or a functional equivalent or a homolog thereof as depicted in column 8 of Table II, application no. 10, preferably a homolog or functional equivalent as depicted in column 8 of Table II B, application no. 10, and being depicted in the same respective line as said At2g25070, and preferably the activity is increased non-targeted.

[55176] Accordingly, in one embodiment, the molecule which activity is to be increased in the process of the invention is the gene product with an activity as a “protein phosphatase”, preferably it is the molecule of section (a) or (b) of this paragraph.

[55177] In particular, it was observed that in plants, especially in Arabidopsis thaliana, increasing or generating the activity of a gene product non-targeted with the activity of a “protein phosphatase”, preferably being encoded by a gene comprising the nucleic acid sequence SEQ ID NO. 1298, preferably the coding region thereof, conferred the production of or the increase in stearic acid compared with the wild type control.

[55178] The nucleic acid sequence of At2g44350 from Arabidopsis thaliana, e.g. as shown in the respective line in column 5 of Table I, application no. 10, has been published in F. And the activity of the gene product thereof is the activity of citrate synthase.

[55179] Accordingly, in one embodiment, the process of the present invention for producing stearic acid in a non-human organism, like a microorganism or a plant or a part thereof, comprises increasing or generating the activity of a gene product with the activity of a gene product conferring the activity of “citrate synthase”, especially from Arabidopsis thaliana or its functional equivalent or its homolog, e.g. the increase of
[55180] (a) a gene product of a gene comprising the nucleic acid molecule as shown in the respective line in column 5 of Table I, application no. 10, preferably the coding region thereof, or a homolog or a fragment thereof, and being depicted in the same respective line as said At2g44350, or a functional equivalent or a homolog thereof as shown in column 8 of Table I, application no. 10, preferably the coding region thereof, particularly a homolog or functional equivalent as shown in column 8 of Table I B, application no. 10, and being depicted in the same respective line as said At2g44350, and preferably the activity is increased plastidic, or
[55181] (b) a polypeptide comprising a polypeptide, a consensus sequence or at least a polypeptide motif as shown in the respective line in column 5 of Table II or in column 8 of Table IV, application no. 10, respectively, and being depicted in the same respective line as said At2g44350, or a functional equivalent or a homolog thereof as depicted in column 8 of Table II, application no. 10, preferably a homolog or functional equivalent as depicted in column 8 of Table II B, application no. 10, and being depicted in the same respective line as said At2g44350, and preferably the activity is increased plastidic.

[55182] Accordingly, in one embodiment, the molecule which activity is to be increased in the process of the invention is the gene product with an activity as a “citrate synthase”, preferably it is the molecule of section (a) or (b) of this paragraph.

[55183] In particular, it was observed that in plants, especially in Arabidopsis thaliana, increasing or generating the activity of a gene product plastidic with the activity of a “citrate synthase”, preferably being encoded by a gene comprising the nucleic acid sequence SEQ ID NO. 120810, preferably the coding region thereof, conferred the production of or the increase in stearic acid compared with the wild type control.

[55184] The nucleic acid sequence of At2g45420 from Arabidopsis thaliana, e.g. as shown in the respective line in column 5 of Table I, application no. 10, has been published in F. And the activity of the gene product thereof is the activity of At2g45420-protein.

[55185] Accordingly, in one embodiment, the process of the present invention for producing stearic acid in a non-human organism, like a microorganism or a plant or a part thereof, comprises increasing or generating the activity of a gene product with the activity of a gene product conferring the activity of “At2g45420-protein”, especially from Arabidopsis thaliana or its functional equivalent or its homolog, e.g. the increase of
[55186] (a) a gene product of a gene comprising the nucleic acid molecule as shown in the respective line in column 5 of Table I, application no. 10, preferably the coding region thereof, or a homolog or a fragment thereof, and being depicted in the same respective line as said At2g45420, or a functional equivalent or a homolog thereof as shown in column 8 of Table I, application no. 10, preferably the coding region thereof, particularly a homolog or functional equivalent as shown in column 8 of Table I B, application no. 10, and being depicted in the same respective line as said At2g45420, and preferably the activity is increased non-targeted, or
[55187] (b) a polypeptide comprising a polypeptide, a consensus sequence or at least a polypeptide motif as shown in the respective line in column 5 of Table II or in column 8 of Table IV, application no. 10, respectively, and being depicted in the same respective line as said At2g45420, or a functional equivalent or a homolog thereof as depicted in column 8 of Table II, application no. 10, preferably a homolog or functional equivalent as depicted in column 8 of Table II B, application no. 10, and being depicted in the same respective line as said At2g45420, and preferably the activity is increased non-targeted.

[55188] Accordingly, in one embodiment, the molecule which activity is to be increased in the process of the invention is the gene product with an activity as a “At2g45420-protein”, preferably it is the molecule of section (a) or (b) of this paragraph.

[55189] In particular, it was observed that in plants, especially in Arabidopsis thaliana, increasing or generating the activity of a gene product non-targeted with the activity of a “At2g45420-protein”, preferably being encoded by a gene comprising the nucleic acid sequence SEQ ID NO. 1623, preferably the coding region thereof, conferred the production of or the increase in stearic acid compared with the wild type control.

[55190] The nucleic acid sequence of At3g16820 from Arabidopsis thaliana, e.g. as shown in the respective line in column 5 of Table I, application no. 10, has been published in F. And the activity of the gene product thereof is the activity of F-box protein.

[55191] Accordingly, in one embodiment, the process of the present invention for producing stearic acid in a non-human organism, like a microorganism or a plant or a part thereof, comprises increasing or generating the activity of a gene product with the activity of a gene product conferring the activity of “F-box protein”, especially from Arabidopsis thaliana or its functional equivalent or its homolog, e.g. the increase of
[55192] (a) a gene product of a gene comprising the nucleic acid molecule as shown in the respective line in column 5 of Table I, application no. 10, preferably the coding region thereof, or a homolog or a fragment thereof, and being depicted in the same respective line as said At3g16820, or a functional equivalent or a homolog thereof as shown in column 8 of Table I, application no. 10, preferably the coding region thereof, particularly a homolog or functional equivalent as shown in column 8 of Table I B, application no. 10, and being depicted in the same respective line as said At3g16820, and preferably the activity is increased non-targeted, or
[55193] (b) a polypeptide comprising a polypeptide, a consensus sequence or at least a polypeptide motif as shown in the respective line in column 5 of Table II or in column 8 of Table IV, application no. 10, respectively, and being depicted in the same respective line as said At3g16820, or a functional equivalent or a homolog thereof as depicted in column 8 of Table II, application no. 10, preferably a homolog or functional equivalent as depicted in column 8 of Table II B, application no. 10, and being depicted in the same respective line as said At3g16820, and preferably the activity is increased non-targeted.

[55194] Accordingly, in one embodiment, the molecule which activity is to be increased in the process of the invention is the gene product with an activity as a “F-box protein”, preferably it is the molecule of section (a) or (b) of this paragraph.

[55195] In particular, it was observed that in plants, especially in Arabidopsis thaliana, increasing or generating the activity of a gene product non-targeted with the activity of a “F-box protein”, preferably being encoded by a gene comprising the nucleic acid sequence SEQ ID NO. 120952, preferably the coding region thereof, conferred the production of or the increase in stearic acid compared with the wild type control.

[55196] The nucleic acid sequence of At3g20910 from Arabidopsis thaliana, e.g. as shown in the respective line in column 5 of Table I, application no. 10, has been published in F. And the activity of the gene product thereof is the activity of CCAAT-binding transcription factor.

[55197] Accordingly, in one embodiment, the process of the present invention for producing stearic acid in a non-human organism, like a microorganism or a plant or a part thereof, comprises increasing or generating the activity of a gene product with the activity of a gene product conferring the activity of “CCAAT-binding transcription factor”, especially from Arabidopsis thaliana or its functional equivalent or its homolog, e.g. the increase of
[55198] (a) a gene product of a gene comprising the nucleic acid molecule as shown in the respective line in column 5 of Table I, application no. 10, preferably the coding region thereof, or a homolog or a fragment thereof, and being depicted in the same respective line as said At3g20910, or a functional equivalent or a homolog thereof as shown in column 8 of Table I, application no. 10, preferably the coding region thereof, particularly a homolog or functional equivalent as shown in column 8 of Table I B, application no. 10, and being depicted in the same respective line as said At3g20910, and preferably the activity is increased non-targeted, or
[55199] (b) a polypeptide comprising a polypeptide, a consensus sequence or at least a polypeptide motif as shown in the respective line in column 5 of Table II or in column 8 of Table IV, application no. 10, respectively, and being depicted in the same respective line as said At3g20910, or a functional equivalent or a homolog thereof as depicted in column 8 of Table II, application no. 10, preferably a homolog or functional equivalent as depicted in column 8 of Table II B, application no. 10, and being depicted in the same respective line as said At3g20910, and preferably the activity is increased non-targeted.

[55200] Accordingly, in one embodiment, the molecule which activity is to be increased in the process of the invention is the gene product with an activity as a “CCAAT-binding transcription factor”, preferably it is the molecule of section (a) or (b) of this paragraph.

[55201] In particular, it was observed that in plants, especially in Arabidopsis thaliana, increasing or generating the activity of a gene product non-targeted with the activity of a “CCAAT-binding transcription factor”, preferably being encoded by a gene comprising the nucleic acid sequence SEQ ID NO. 22921, preferably the coding region thereof, conferred the production of or the increase in stearic acid compared with the wild type control.

[55202] The nucleic acid sequence of At3g62950 from Arabidopsis thaliana, e.g. as shown in the respective line in column 5 of Table I, application no. 10, has been published in F. And the activity of the gene product thereof is the activity of glutaredoxin.

[55203] Accordingly, in one embodiment, the process of the present invention for producing stearic acid in a non-human organism, like a microorganism or a plant or a part thereof, comprises increasing or generating the activity of a gene product with the activity of a gene product conferring the activity of “glutaredoxin”, especially from Arabidopsis thaliana or its functional equivalent or its homolog, e.g. the increase of
[55204] (a) a gene product of a gene comprising the nucleic acid molecule as shown in the respective line in column 5 of Table I, application no. 10, preferably the coding region thereof, or a homolog or a fragment thereof, and being depicted in the same respective line as said At3g62950, or a functional equivalent or a homolog thereof as shown in column 8 of Table I, application no. 10, preferably the coding region thereof, particularly a homolog or functional equivalent as shown in column 8 of Table I B, application no. 10, and being depicted in the same respective line as said At3g62950, and preferably the activity is increased non-targeted, or
[55205] (b) a polypeptide comprising a polypeptide, a consensus sequence or at least a polypeptide motif as shown in the respective line in column 5 of Table II or in column 8 of Table IV, application no. 10, respectively, and being depicted in the same respective line as said At3g62950, or a functional equivalent or a homolog thereof as depicted in column 8 of Table II, application no. 10, preferably a homolog or functional equivalent as depicted in column 8 of Table II B, application no. 10, and being depicted in the same respective line as said At3g62950, and preferably the activity is increased non-targeted.

[55206] Accordingly, in one embodiment, the molecule which activity is to be increased in the process of the invention is the gene product with an activity as a “glutaredoxin”, preferably it is the molecule of section (a) or (b) of this paragraph.

[55207] In particular, it was observed that in plants, especially in Arabidopsis thaliana, increasing or generating the activity of a gene product non-targeted with the activity of a “glutaredoxin”, preferably being encoded by a gene comprising the nucleic acid sequence SEQ ID NO. 2935, preferably the coding region thereof, conferred the production of or the increase in stearic acid compared with the wild type control.

[55208] The nucleic acid sequence of At4g15660 from Arabidopsis thaliana, e.g. as shown in the respective line in column 5 of Table I, application no. 10, has been published in F. And the activity of the gene product thereof is the activity of monothiol glutaredoxin.

[55209] Accordingly, in one embodiment, the process of the present invention for producing stearic acid in a non-human organism, like a microorganism or a plant or a part thereof, comprises increasing or generating the activity of a gene product with the activity of a gene product conferring the activity of “monothiol glutaredoxin”, especially from Arabidopsis thaliana or its functional equivalent or its homolog, e.g. the increase of
[55210] (a) a gene product of a gene comprising the nucleic acid molecule as shown in the respective line in column 5 of Table I, application no. 10, preferably the coding region thereof, or a homolog or a fragment thereof, and being depicted in the same respective line as said At4g15660, or a functional equivalent or a homolog thereof as shown in column 8 of Table I, application no. 10, preferably the coding region thereof, particularly a homolog or functional equivalent as shown in column 8 of Table I B, application no. 10, and being depicted in the same respective line as said At4g15660, and preferably the activity is increased non-targeted, or
[55211] (b) a polypeptide comprising a polypeptide, a consensus sequence or at least a polypeptide motif as shown in the respective line in column 5 of Table II or in column 8 of Table IV, application no. 10, respectively, and being depicted in the same respective line as said At4g15660, or a functional equivalent or a homolog thereof as depicted in column 8 of Table II, application no. 10, preferably a homolog or functional equivalent as depicted in column 8 of Table II B, application no. 10, and being depicted in the same respective line as said At4g15660, and preferably the activity is increased non-targeted.

[55212] Accordingly, in one embodiment, the molecule which activity is to be increased in the process of the invention is the gene product with an activity as a “monothiol glutaredoxin”, preferably it is the molecule of section (a) or (b) of this paragraph.

[55213] In particular, it was observed that in plants, especially in Arabidopsis thaliana, increasing or generating the activity of a gene product non-targeted with the activity of a “monothiol glutaredoxin”, preferably being encoded by a gene comprising the nucleic acid sequence SEQ ID NO. 23482, preferably the coding region thereof, conferred the production of or the increase in stearic acid compared with the wild type control.

[55214] The nucleic acid sequence of At4g15670 from Arabidopsis thaliana, e.g. as shown in the respective line in column 5 of Table I, application no. 10, has been published in F. And the activity of the gene product thereof is the activity of monothiol glutaredoxin.

[55215] Accordingly, in one embodiment, the process of the present invention for producing stearic acid in a non-human organism, like a microorganism or a plant or a part thereof, comprises increasing or generating the activity of a gene product with the activity of a gene product conferring the activity of “monothiol glutaredoxin”, especially from Arabidopsis thaliana or its functional equivalent or its homolog, e.g. the increase of
[55216] (a) a gene product of a gene comprising the nucleic acid molecule as shown in the respective line in column 5 of Table I, application no. 10, preferably the coding region thereof, or a homolog or a fragment thereof, and being depicted in the same respective line as said At4g15670, or a functional equivalent or a homolog thereof as shown in column 8 of Table I, application no. 10, preferably the coding region thereof, particularly a homolog or functional equivalent as shown in column 8 of Table I B, application no. 10, and being depicted in the same respective line as said At4g15670, and preferably the activity is increased non-targeted, or
[55217] (b) a polypeptide comprising a polypeptide, a consensus sequence or at least a polypeptide motif as shown in the respective line in column 5 of Table II or in column 8 of Table IV, application no. 10, respectively, and being depicted in the same respective line as said At4g15670, or a functional equivalent or a homolog thereof as depicted in column 8 of Table II, application no. 10, preferably a homolog or functional equivalent as depicted in column 8 of Table II B, application no. 10, and being depicted in the same respective line as said At4g15670, and preferably the activity is increased non-targeted.

[55218] Accordingly, in one embodiment, the molecule which activity is to be increased in the process of the invention is the gene product with an activity as a “monothiol glutaredoxin”, preferably it is the molecule of section (a) or (b) of this paragraph.

[55219] In particular, it was observed that in plants, especially in Arabidopsis thaliana, increasing or generating the activity of a gene product non-targeted with the activity of a “monothiol glutaredoxin”, preferably being encoded by a gene comprising the nucleic acid sequence SEQ ID NO. 3279, preferably the coding region thereof, conferred the production of or the increase in stearic acid compared with the wild type control.

[55220] The nucleic acid sequence of At4g18880 from Arabidopsis thaliana, e.g. as shown in the respective line in column 5 of Table I, application no. 10, has been published in F. And the activity of the gene product thereof is the activity of heat shock transcription factor.

[55221] Accordingly, in one embodiment, the process of the present invention for producing stearic acid in a non-human organism, like a microorganism or a plant or a part thereof, comprises increasing or generating the activity of a gene product with the activity of a gene product conferring the activity of “heat shock transcription factor”, especially from Arabidopsis thaliana or its functional equivalent or its homolog, e.g. the increase of
[55222] (a) a gene product of a gene comprising the nucleic acid molecule as shown in the respective line in column 5 of Table I, application no. 10, preferably the coding region thereof, or a homolog or a fragment thereof, and being depicted in the same respective line as said At4g18880, or a functional equivalent or a homolog thereof as shown in column 8 of Table I, application no. 10, preferably the coding region thereof, particularly a homolog or functional equivalent as shown in column 8 of Table I B, application no. 10, and being depicted in the same respective line as said At4g18880, and preferably the activity is increased non-targeted, or
[55223] (b) a polypeptide comprising a polypeptide, a consensus sequence or at least a polypeptide motif as shown in the respective line in column 5 of Table II or in column 8 of Table IV, application no. 10, respectively, and being depicted in the same respective line as said At4g18880, or a functional equivalent or a homolog thereof as depicted in column 8 of Table II, application no. 10, preferably a homolog or functional equivalent as depicted in column 8 of Table II B, application no. 10, and being depicted in the same respective line as said At4g18880, and preferably the activity is increased non-targeted.

[55224] Accordingly, in one embodiment, the molecule which activity is to be increased in the process of the invention is the gene product with an activity as a “heat shock transcription factor”, preferably it is the molecule of section (a) or (b) of this paragraph.

[55225] In particular, it was observed that in plants, especially in Arabidopsis thaliana, increasing or generating the activity of a gene product non-targeted with the activity of a “heat shock transcription factor”, preferably being encoded by a gene comprising the nucleic acid sequence SEQ ID NO. 24232, preferably the coding region thereof, conferred the production of or the increase in stearic acid compared with the wild type control.

[55226] The nucleic acid sequence of At4g26080 from Arabidopsis thaliana, e.g. as shown in the respective line in column 5 of Table I, application no. 10, has been published in F. And the activity of the gene product thereof is the activity of protein phosphatase.

[55227] Accordingly, in one embodiment, the process of the present invention for producing stearic acid in a non-human organism, like a microorganism or a plant or a part thereof, comprises increasing or generating the activity of a gene product with the activity of a gene product conferring the activity of “protein phosphatase”, especially from Arabidopsis thaliana or its functional equivalent or its homolog, e.g. the increase of
[55228] (a) a gene product of a gene comprising the nucleic acid molecule as shown in the respective line in column 5 of Table I, application no. 10, preferably the coding region thereof, or a homolog or a fragment thereof, and being depicted in the same respective line as said At4g26080, or a functional equivalent or a homolog thereof as shown in column 8 of Table I, application no. 10, preferably the coding region thereof, particularly a homolog or functional equivalent as shown in column 8 of Table I B, application no. 10, and being depicted in the same respective line as said At4g26080, and preferably the activity is increased non-targeted, or
[55229] (b) a polypeptide comprising a polypeptide, a consensus sequence or at least a polypeptide motif as shown in the respective line in column 5 of Table II or in column 8 of Table IV, application no. 10, respectively, and being depicted in the same respective line as said At4g26080, or a functional equivalent or a homolog thereof as depicted in column 8 of Table II, application no. 10, preferably a homolog or functional equivalent as depicted in column 8 of Table II B, application no. 10, and being depicted in the same respective line as said At4g26080, and preferably the activity is increased non-targeted.

[55230] Accordingly, in one embodiment, the molecule which activity is to be increased in the process of the invention is the gene product with an activity as a “protein phosphatase”, preferably it is the molecule of section (a) or (b) of this paragraph.

[55231] In particular, it was observed that in plants, especially in Arabidopsis thaliana, increasing or generating the activity of a gene product non-targeted with the activity of a “protein phosphatase”, preferably being encoded by a gene comprising the nucleic acid sequence SEQ ID NO. 68849, preferably the coding region thereof, conferred the production of or the increase in stearic acid compared with the wild type control.

[55232] The nucleic acid sequence of At4g33040 from Arabidopsis thaliana, e.g. as shown in the respective line in column 5 of Table I, application no. 10, has been published in F. And the activity of the gene product thereof is the activity of glutaredoxin.

[55233] Accordingly, in one embodiment, the process of the present invention for producing stearic acid in a non-human organism, like a microorganism or a plant or a part thereof, comprises increasing or generating the activity of a gene product with the activity of a gene product conferring the activity of “glutaredoxin”, especially from Arabidopsis thaliana or its functional equivalent or its homolog, e.g. the increase of
[55234] (a) a gene product of a gene comprising the nucleic acid molecule as shown in the respective line in column 5 of Table I, application no. 10, preferably the coding region thereof, or a homolog or a fragment thereof, and being depicted in the same respective line as said At4g33040, or a functional equivalent or a homolog thereof as shown in column 8 of Table I, application no. 10, preferably the coding region thereof, particularly a homolog or functional equivalent as shown in column 8 of Table I B, application no. 10, and being depicted in the same respective line as said At4g33040, and preferably the activity is increased non-targeted, or
[55235] (b) a polypeptide comprising a polypeptide, a consensus sequence or at least a polypeptide motif as shown in the respective line in column 5 of Table II or in column 8 of Table IV, application no. 10, respectively, and being depicted in the same respective line as said At4g33040, or a functional equivalent or a homolog thereof as depicted in column 8 of Table II, application no. 10, preferably a homolog or functional equivalent as depicted in column 8 of Table II B, application no. 10, and being depicted in the same respective line as said At4g33040, and preferably the activity is increased non-targeted.

[55236] Accordingly, in one embodiment, the molecule which activity is to be increased in the process of the invention is the gene product with an activity as a “glutaredoxin”, preferably it is the molecule of section (a) or (b) of this paragraph.

[55237] In particular, it was observed that in plants, especially in Arabidopsis thaliana, increasing or generating the activity of a gene product non-targeted with the activity of a “glutaredoxin”, preferably being encoded by a gene comprising the nucleic acid sequence SEQ ID NO. 4102, preferably the coding region thereof, conferred the production of or the increase in stearic acid compared with the wild type control.

[55238] The nucleic acid sequence of At4g35310 from Arabidopsis thaliana, e.g. as shown in the respective line in column 5 of Table I, application no. 10, has been published in F. And the activity of the gene product thereof is the activity of calcium-dependent protein kinase.

[55239] Accordingly, in one embodiment, the process of the present invention for producing stearic acid in a non-human organism, like a microorganism or a plant or a part thereof, comprises increasing or generating the activity of a gene product with the activity of a gene product conferring the activity of “calcium-dependent protein kinase”, especially from Arabidopsis thaliana or its functional equivalent or its homolog, e.g. the increase of
[55240] (a) a gene product of a gene comprising the nucleic acid molecule as shown in the respective line in column 5 of Table I, application no. 10, preferably the coding region thereof, or a homolog or a fragment thereof, and being depicted in the same respective line as said At4g35310, or a functional equivalent or a homolog thereof as shown in column 8 of Table I, application no. 10, preferably the coding region thereof, particularly a homolog or functional equivalent as shown in column 8 of Table I B, application no. 10, and being depicted in the same respective line as said At4g35310, and preferably the activity is increased non-targeted, or
[55241] (b) a polypeptide comprising a polypeptide, a consensus sequence or at least a polypeptide motif as shown in the respective line in column 5 of Table II or in column 8 of Table IV, application no. 10, respectively, and being depicted in the same respective line as said At4g35310, or a functional equivalent or a homolog thereof as depicted in column 8 of Table II, application no. 10, preferably a homolog or functional equivalent as depicted in column 8 of Table II B, application no. 10, and being depicted in the same respective line as said At4g35310, and preferably the activity is increased non-targeted.

[55242] Accordingly, in one embodiment, the molecule which activity is to be increased in the process of the invention is the gene product with an activity as a “calcium-dependent protein kinase”, preferably it is the molecule of section (a) or (b) of this paragraph.

[55243] In particular, it was observed that in plants, especially in Arabidopsis thaliana, increasing or generating the activity of a gene product non-targeted with the activity of a “calcium-dependent protein kinase”, preferably being encoded by a gene comprising the nucleic acid sequence SEQ ID NO. 4348, preferably the coding region thereof, conferred the production of or the increase in stearic acid compared with the wild type control.

[55244] The nucleic acid sequence of At5g59220 from Arabidopsis thaliana, e.g. as shown in the respective line in column 5 of Table I, application no. 10, has been published in F. And the activity of the gene product thereof is the activity of protein phosphatase.

[55245] Accordingly, in one embodiment, the process of the present invention for producing stearic acid in a non-human organism, like a microorganism or a plant or a part thereof, comprises increasing or generating the activity of a gene product with the activity of a gene product conferring the activity of “protein phosphatase”, especially from Arabidopsis thaliana or its functional equivalent or its homolog, e.g. the increase of
[55246] (a) a gene product of a gene comprising the nucleic acid molecule as shown in the respective line in column 5 of Table I, application no. 10, preferably the coding region thereof, or a homolog or a fragment thereof, and being depicted in the same respective line as said At5g59220, or a functional equivalent or a homolog thereof as shown in column 8 of Table I, application no. 10, preferably the coding region thereof, particularly a homolog or functional equivalent as shown in column 8 of Table I B, application no. 10, and being depicted in the same respective line as said At5g59220, and preferably the activity is increased non-targeted, or
[55247] (b) a polypeptide comprising a polypeptide, a consensus sequence or at least a polypeptide motif as shown in the respective line in column 5 of Table II or in column 8 of Table IV, application no. 10, respectively, and being depicted in the same respective line as said At5g59220, or a functional equivalent or a homolog thereof as depicted in column 8 of Table II, application no. 10, preferably a homolog or functional equivalent as depicted in column 8 of Table II B, application no. 10, and being depicted in the same respective line as said At5g59220, and preferably the activity is increased non-targeted.

[55248] Accordingly, in one embodiment, the molecule which activity is to be increased in the process of the invention is the gene product with an activity as a “protein phosphatase”, preferably it is the molecule of section (a) or (b) of this paragraph.

[55249] In particular, it was observed that in plants, especially in Arabidopsis thaliana, increasing or generating the activity of a gene product non-targeted with the activity of a “protein phosphatase”, preferably being encoded by a gene comprising the nucleic acid sequence SEQ ID NO. 25498, preferably the coding region thereof, conferred the production of or the increase in stearic acid compared with the wild type control.

[55250] The nucleic acid sequence of B0283 from Escherichia coli, e.g. as shown in the respective line in column 5 of Table I, application no. 10, has been published in B. And the activity of the gene product thereof is the activity of b0283-protein.

[55251] Accordingly, in one embodiment, the process of the present invention for producing stearic acid in a non-human organism, like a microorganism or a plant or a part thereof, comprises increasing or generating the activity of a gene product with the activity of a gene product conferring the activity of “b0283-protein”, especially from Escherichia coli or its functional equivalent or its homolog, e.g. the increase of
[55252] (a) a gene product of a gene comprising the nucleic acid molecule as shown in the respective line in column 5 of Table I, application no. 10, preferably the coding region thereof, or a homolog or a fragment thereof, and being depicted in the same respective line as said B0283, or a functional equivalent or a homolog thereof as shown in column 8 of Table I, application no. 10, preferably the coding region thereof, particularly a homolog or functional equivalent as shown in column 8 of Table I B, application no. 10, and being depicted in the same respective line as said B0283, and preferably the activity is increased plastidic, or
[55253] (b) a polypeptide comprising a polypeptide, a consensus sequence or at least a polypeptide motif as shown in the respective line in column 5 of Table II or in column 8 of Table IV, application no. 10, respectively, and being depicted in the same respective line as said B0283, or a functional equivalent or a homolog thereof as depicted in column 8 of Table II, application no. 10, preferably a homolog or functional equivalent as depicted in column 8 of Table II B, application no. 10, and being depicted in the same respective line as said B0283, and preferably the activity is increased plastidic.

[55254] Accordingly, in one embodiment, the molecule which activity is to be increased in the process of the invention is the gene product with an activity as a “b0283-protein”, preferably it is the molecule of section (a) or (b) of this paragraph.

[55255] In particular, it was observed that in plants, especially in Arabidopsis thaliana, increasing or generating the activity of a gene product plastidic with the activity of a “b0283-protein”, preferably being encoded by a gene comprising the nucleic acid sequence SEQ ID NO. 121076, preferably the coding region thereof, conferred the production of or the increase in stearic acid compared with the wild type control.

[55256] The nucleic acid sequence of B0312 from Escherichia coli, e.g. as shown in the respective line in column 5 of Table I, application no. 10, has been published in B. And the activity of the gene product thereof is the activity of betaine aldehyde dehydrogenase.

[55257] Accordingly, in one embodiment, the process of the present invention for producing stearic acid in a non-human organism, like a microorganism or a plant or a part thereof, comprises increasing or generating the activity of a gene product with the activity of a gene product conferring the activity of “betaine aldehyde dehydrogenase”, especially from Escherichia coli or its functional equivalent or its homolog, e.g. the increase of
[55258] (a) a gene product of a gene comprising the nucleic acid molecule as shown in the respective line in column 5 of Table I, application no. 10, preferably the coding region thereof, or a homolog or a fragment thereof, and being depicted in the same respective line as said B0312, or a functional equivalent or a homolog thereof as shown in column 8 of Table I, application no. 10, preferably the coding region thereof, particularly a homolog or functional equivalent as shown in column 8 of Table I B, application no. 10, and being depicted in the same respective line as said B0312, and preferably the activity is increased non-targeted, or
[55259] (b) a polypeptide comprising a polypeptide, a consensus sequence or at least a polypeptide motif as shown in the respective line in column 5 of Table II or in column 8 of Table IV, application no. 10, respectively, and being depicted in the same respective line as said B0312, or a functional equivalent or a homolog thereof as depicted in column 8 of Table II, application no. 10, preferably a homolog or functional equivalent as depicted in column 8 of Table II B, application no. 10, and being depicted in the same respective line as said B0312, and preferably the activity is increased non-targeted.

[55260] Accordingly, in one embodiment, the molecule which activity is to be increased in the process of the invention is the gene product with an activity as a “betaine aldehyde dehydrogenase”, preferably it is the molecule of section (a) or (b) of this paragraph.

[55261] In particular, it was observed that in plants, especially in Arabidopsis thaliana, increasing or generating the activity of a gene product non-targeted with the activity of a “betaine aldehyde dehydrogenase”, preferably being encoded by a gene comprising the nucleic acid sequence SEQ ID NO. 121111, preferably the coding region thereof, conferred the production of or the increase in stearic acid compared with the wild type control.

[55262] The nucleic acid sequence of B0371 from Escherichia coli, e.g. as shown in the respective line in column 5 of Table I, application no. 10, has been published in B. And the activity of the gene product thereof is the activity of b0371-protein.

[55263] Accordingly, in one embodiment, the process of the present invention for producing stearic acid in a non-human organism, like a microorganism or a plant or a part thereof, comprises increasing or generating the activity of a gene product with the activity of a gene product conferring the activity of “b0371-protein”, especially from Escherichia coli or its functional equivalent or its homolog, e.g. the increase of
[55264] (a) a gene product of a gene comprising the nucleic acid molecule as shown in the respective line in column 5 of Table I, application no. 10, preferably the coding region thereof, or a homolog or a fragment thereof, and being depicted in the same respective line as said B0371, or a functional equivalent or a homolog thereof as shown in column 8 of Table I, application no. 10, preferably the coding region thereof, particularly a homolog or functional equivalent as shown in column 8 of Table I B, application no. 10, and being depicted in the same respective line as said B0371, and preferably the activity is increased non-targeted, or
[55265] (b) a polypeptide comprising a polypeptide, a consensus sequence or at least a polypeptide motif as shown in the respective line in column 5 of Table II or in column 8 of Table IV, application no. 10, respectively, and being depicted in the same respective line as said B0371, or a functional equivalent or a homolog thereof as depicted in column 8 of Table II, application no. 10, preferably a homolog or functional equivalent as depicted in column 8 of Table II B, application no. 10, and being depicted in the same respective line as said B0371, and preferably the activity is increased non-targeted.

[55266] Accordingly, in one embodiment, the molecule which activity is to be increased in the process of the invention is the gene product with an activity as a “b0371-protein”, preferably it is the molecule of section (a) or (b) of this paragraph.

[55267] In particular, it was observed that in plants, especially in Arabidopsis thaliana, increasing or generating the activity of a gene product non-targeted with the activity of a “b0371-protein”, preferably being encoded by a gene comprising the nucleic acid sequence SEQ ID NO. 121637, preferably the coding region thereof, conferred the production of or the increase in stearic acid compared with the wild type control.

[55268] The nucleic acid sequence of B0449 from Escherichia coli, e.g. as shown in the respective line in column 5 of Table I, application no. 10, has been published in B. And the activity of the gene product thereof is the activity of ATP-binding component of a transport system.

[55269] Accordingly, in one embodiment, the process of the present invention for producing stearic acid in a non-human organism, like a microorganism or a plant or a part thereof, comprises increasing or generating the activity of a gene product with the activity of a gene product conferring the activity of “ATP-binding component of a transport system”, especially from Escherichia coli or its functional equivalent or its homolog, e.g. the increase of
[55270] (a) a gene product of a gene comprising the nucleic acid molecule as shown in the respective line in column 5 of Table I, application no. 10, preferably the coding region thereof, or a homolog or a fragment thereof, and being depicted in the same respective line as said B0449, or a functional equivalent or a homolog thereof as shown in column 8 of Table I, application no. 10, preferably the coding region thereof, particularly a homolog or functional equivalent as shown in column 8 of Table I B, application no. 10, and being depicted in the same respective line as said B0449, and preferably the activity is increased non-targeted, or
[55271] (b) a polypeptide comprising a polypeptide, a consensus sequence or at least a polypeptide motif as shown in the respective line in column 5 of Table II or in column 8 of Table IV, application no. 10, respectively, and being depicted in the same respective line as said B0449, or a functional equivalent or a homolog thereof as depicted in column 8 of Table II, application no. 10, preferably a homolog or functional equivalent as depicted in column 8 of Table II B, application no. 10, and being depicted in the same respective line as said B0449, and preferably the activity is increased non-targeted.

[55272] Accordingly, in one embodiment, the molecule which activity is to be increased in the process of the invention is the gene product with an activity as a “ATP-binding component of a transport system”, preferably it is the molecule of section (a) or (b) of this paragraph.

[55273] In particular, it was observed that in plants, especially in Arabidopsis thaliana, increasing or generating the activity of a gene product non-targeted with the activity of a “ATP-binding component of a transport system”, preferably being encoded by a gene comprising the nucleic acid sequence SEQ ID NO. 7333, preferably the coding region thereof, conferred the production of or the increase in stearic acid compared with the wild type control.

[55274] The nucleic acid sequence of B1186 from Escherichia coli, e.g. as shown in the respective line in column 5 of Table I, application no. 10, has been published in B. And the activity of the gene product thereof is the activity of sodium/proton antiporter.

[55275] Accordingly, in one embodiment, the process of the present invention for producing stearic acid in a non-human organism, like a microorganism or a plant or a part thereof, comprises increasing or generating the activity of a gene product with the activity of a gene product conferring the activity of “sodium/proton antiporter”, especially from Escherichia coli or its functional equivalent or its homolog, e.g. the increase of
[55276] (a) a gene product of a gene comprising the nucleic acid molecule as shown in the respective line in column 5 of Table I, application no. 10, preferably the coding region thereof, or a homolog or a fragment thereof, and being depicted in the same respective line as said B1186, or a functional equivalent or a homolog thereof as shown in column 8 of Table I, application no. 10, preferably the coding region thereof, particularly a homolog or functional equivalent as shown in column 8 of Table I B, application no. 10, and being depicted in the same respective line as said B1186, and preferably the activity is increased non-targeted, or
[55277] (b) a polypeptide comprising a polypeptide, a consensus sequence or at least a polypeptide motif as shown in the respective line in column 5 of Table II or in column 8 of Table IV, application no. 10, respectively, and being depicted in the same respective line as said B1186, or a functional equivalent or a homolog thereof as depicted in column 8 of Table II, application no. 10, preferably a homolog or functional equivalent as depicted in column 8 of Table II B, application no. 10, and being depicted in the same respective line as said B1186, and preferably the activity is increased non-targeted.

[55278] Accordingly, in one embodiment, the molecule which activity is to be increased in the process of the invention is the gene product with an activity as a “sodium/proton antiporter”, preferably it is the molecule of section (a) or (b) of this paragraph.

[55279] In particular, it was observed that in plants, especially in Arabidopsis thaliana, increasing or generating the activity of a gene product non-targeted with the activity of a “sodium/proton antiporter”, preferably being encoded by a gene comprising the nucleic acid sequence SEQ ID NO. 37400, preferably the coding region thereof, conferred the production of or the increase in stearic acid compared with the wild type control.

[55280] The nucleic acid sequence of B1431 from Escherichia coli, e.g. as shown in the respective line in column 5 of Table I, application no. 10, has been published in B. And the activity of the gene product thereof is the activity of lipoprotein precursor.

[55281] Accordingly, in one embodiment, the process of the present invention for producing stearic acid in a non-human organism, like a microorganism or a plant or a part thereof, comprises increasing or generating the activity of a gene product with the activity of a gene product conferring the activity of “lipoprotein precursor”, especially from Escherichia coli or its functional equivalent or its homolog, e.g. the increase of
[55282] (a) a gene product of a gene comprising the nucleic acid molecule as shown in the respective line in column 5 of Table I, application no. 10, preferably the coding region thereof, or a homolog or a fragment thereof, and being depicted in the same respective line as said B1431, or a functional equivalent or a homolog thereof as shown in column 8 of Table I, application no. 10, preferably the coding region thereof, particularly a homolog or functional equivalent as shown in column 8 of Table I B, application no. 10, and being depicted in the same respective line as said B1431, and preferably the activity is increased plastidic, or
[55283] (b) a polypeptide comprising a polypeptide, a consensus sequence or at least a polypeptide motif as shown in the respective line in column 5 of Table II or in column 8 of Table IV, application no. 10, respectively, and being depicted in the same respective line as said B1431, or a functional equivalent or a homolog thereof as depicted in column 8 of Table II, application no. 10, preferably a homolog or functional equivalent as depicted in column 8 of Table II B, application no. 10, and being depicted in the same respective line as said B1431, and preferably the activity is increased plastidic.

[55284] Accordingly, in one embodiment, the molecule which activity is to be increased in the process of the invention is the gene product with an activity as a “lipoprotein precursor”, preferably it is the molecule of section (a) or (b) of this paragraph.

[55285] In particular, it was observed that in plants, especially in Arabidopsis thaliana, increasing or generating the activity of a gene product plastidic with the activity of a “lipoprotein precursor”, preferably being encoded by a gene comprising the nucleic acid sequence SEQ ID NO. 38266, preferably the coding region thereof, conferred the production of or the increase in stearic acid compared with the wild type control.

[55286] The nucleic acid sequence of B1597 from Escherichia coli, e.g. as shown in the respective line in column 5 of Table I, application no. 10, has been published in B. And the activity of the gene product thereof is the activity of acid shock protein.

[55287] Accordingly, in one embodiment, the process of the present invention for producing stearic acid in a non-human organism, like a microorganism or a plant or a part thereof, comprises increasing or generating the activity of a gene product with the activity of a gene product conferring the activity of “acid shock protein”, especially from Escherichia coli or its functional equivalent or its homolog, e.g. the increase of
[55288] (a) a gene product of a gene comprising the nucleic acid molecule as shown in the respective line in column 5 of Table I, application no. 10, preferably the coding region thereof, or a homolog or a fragment thereof, and being depicted in the same respective line as said B1597, or a functional equivalent or a homolog thereof as shown in column 8 of Table I, application no. 10, preferably the coding region thereof, particularly a homolog or functional equivalent as shown in column 8 of Table I B, application no. 10, and being depicted in the same respective line as said B1597, and preferably the activity is increased non-targeted, or
[55289] (b) a polypeptide comprising a polypeptide, a consensus sequence or at least a polypeptide motif as shown in the respective line in column 5 of Table II or in column 8 of Table IV, application no. 10, respectively, and being depicted in the same respective line as said B1597, or a functional equivalent or a homolog thereof as depicted in column 8 of Table II, application no. 10, preferably a homolog or functional equivalent as depicted in column 8 of Table II B, application no. 10, and being depicted in the same respective line as said B1597, and preferably the activity is increased non-targeted.

[55290] Accordingly, in one embodiment, the molecule which activity is to be increased in the process of the invention is the gene product with an activity as a “acid shock protein”, preferably it is the molecule of section (a) or (b) of this paragraph.

[55291] In particular, it was observed that in plants, especially in Arabidopsis thaliana, increasing or generating the activity of a gene product non-targeted with the activity of a “acid shock protein”, preferably being encoded by a gene comprising the nucleic acid sequence SEQ ID NO. 38300, preferably the coding region thereof, conferred the production of or the increase in stearic acid compared with the wild type control.

[55292] The nucleic acid sequence of B1672 from Escherichia coli, e.g. as shown in the respective line in column 5 of Table I, application no. 10, has been published in B. And the activity of the gene product thereof is the activity of b1672-protein.

[55293] Accordingly, in one embodiment, the process of the present invention for producing stearic acid in a non-human organism, like a microorganism or a plant or a part thereof, comprises increasing or generating the activity of a gene product with the activity of a gene product conferring the activity of “b1672-protein”, especially from Escherichia coli or its functional equivalent or its homolog, e.g. the increase of
[55294] (a) a gene product of a gene comprising the nucleic acid molecule as shown in the respective line in column 5 of Table I, application no. 10, preferably the coding region thereof, or a homolog or a fragment thereof, and being depicted in the same respective line as said B1672, or a functional equivalent or a homolog thereof as shown in column 8 of Table I, application no. 10, preferably the coding region thereof, particularly a homolog or functional equivalent as shown in column 8 of Table I B, application no. 10, and being depicted in the same respective line as said B1672, and preferably the activity is increased non-targeted, or
[55295] (b) a polypeptide comprising a polypeptide, a consensus sequence or at least a polypeptide motif as shown in the respective line in column 5 of Table II or in column 8 of Table IV, application no. 10, respectively, and being depicted in the same respective line as said B1672, or a functional equivalent or a homolog thereof as depicted in column 8 of Table II, application no. 10, preferably a homolog or functional equivalent as depicted in column 8 of Table II B, application no. 10, and being depicted in the same respective line as said B1672, and preferably the activity is increased non-targeted.

[55296] Accordingly, in one embodiment, the molecule which activity is to be increased in the process of the invention is the gene product with an activity as a “b1672-protein”, preferably it is the molecule of section (a) or (b) of this paragraph.

[55297] In particular, it was observed that in plants, especially in Arabidopsis thaliana, increasing or generating the activity of a gene product non-targeted with the activity of a “b1672-protein”, preferably being encoded by a gene comprising the nucleic acid sequence SEQ ID NO. 78771, preferably the coding region thereof, conferred the production of or the increase in stearic acid compared with the wild type control.

[55298] The nucleic acid sequence of B1845 from Escherichia coli, e.g. as shown in the respective line in column 5 of Table I, application no. 10, has been published in B. And the activity of the gene product thereof is the activity of protease.

[55299] Accordingly, in one embodiment, the process of the present invention for producing stearic acid in a non-human organism, like a microorganism or a plant or a part thereof, comprises increasing or generating the activity of a gene product with the activity of a gene product conferring the activity of “protease”, especially from Escherichia coli or its functional equivalent or its homolog, e.g. the increase of
[55300] (a) a gene product of a gene comprising the nucleic acid molecule as shown in the respective line in column 5 of Table I, application no. 10, preferably the coding region thereof, or a homolog or a fragment thereof, and being depicted in the same respective line as said B1845, or a functional equivalent or a homolog thereof as shown in column 8 of Table I, application no. 10, preferably the coding region thereof, particularly a homolog or functional equivalent as shown in column 8 of Table I B, application no. 10, and being depicted in the same respective line as said B1845, and preferably the activity is increased non-targeted, or
[55301] (b) a polypeptide comprising a polypeptide, a consensus sequence or at least a polypeptide motif as shown in the respective line in column 5 of Table II or in column 8 of Table IV, application no. 10, respectively, and being depicted in the same respective line as said B1845, or a functional equivalent or a homolog thereof as depicted in column 8 of Table II, application no. 10, preferably a homolog or functional equivalent as depicted in column 8 of Table II B, application no. 10, and being depicted in the same respective line as said B1845, and preferably the activity is increased non-targeted.

[55302] Accordingly, in one embodiment, the molecule which activity is to be increased in the process of the invention is the gene product with an activity as a “protease”, preferably it is the molecule of section (a) or (b) of this paragraph.

[55303] In particular, it was observed that in plants, especially in Arabidopsis thaliana, increasing or generating the activity of a gene product non-targeted with the activity of a “protease”, preferably being encoded by a gene comprising the nucleic acid sequence SEQ ID NO. 38573, preferably the coding region thereof, conferred the production of or the increase in stearic acid compared with the wild type control.

[55304] The nucleic acid sequence of B2032 from Escherichia coli, e.g. as shown in the respective line in column 5 of Table I, application no. 10, has been published in B. And the activity of the gene product thereof is the activity of b2032-protein.

[55305] Accordingly, in one embodiment, the process of the present invention for producing stearic acid in a non-human organism, like a microorganism or a plant or a part thereof, comprises increasing or generating the activity of a gene product with the activity of a gene product conferring the activity of “b2032-protein”, especially from Escherichia coli or its functional equivalent or its homolog, e.g. the increase of
[55306] (a) a gene product of a gene comprising the nucleic acid molecule as shown in the respective line in column 5 of Table I, application no. 10, preferably the coding region thereof, or a homolog or a fragment thereof, and being depicted in the same respective line as said B2032, or a functional equivalent or a homolog thereof as shown in column 8 of Table I, application no. 10, preferably the coding region thereof, particularly a homolog or functional equivalent as shown in column 8 of Table I B, application no. 10, and being depicted in the same respective line as said B2032, and preferably the activity is increased non-targeted, or
[55307] (b) a polypeptide comprising a polypeptide, a consensus sequence or at least a polypeptide motif as shown in the respective line in column 5 of Table II or in column 8 of Table IV, application no. 10, respectively, and being depicted in the same respective line as said B2032, or a functional equivalent or a homolog thereof as depicted in column 8 of Table II, application no. 10, preferably a homolog or functional equivalent as depicted in column 8 of Table II B, application no. 10, and being depicted in the same respective line as said B2032, and preferably the activity is increased non-targeted.

[55308] Accordingly, in one embodiment, the molecule which activity is to be increased in the process of the invention is the gene product with an activity as a “b2032-protein”, preferably it is the molecule of section (a) or (b) of this paragraph.

[55309] In particular, it was observed that in plants, especially in Arabidopsis thaliana, increasing or generating the activity of a gene product non-targeted with the activity of a “b2032-protein”, preferably being encoded by a gene comprising the nucleic acid sequence SEQ ID NO. 8920, preferably the coding region thereof, conferred the production of or the increase in stearic acid compared with the wild type control.

[55310] The nucleic acid sequence of B2399 from Escherichia coli, e.g. as shown in the respective line in column 5 of Table I, application no. 10, has been published in B. And the activity of the gene product thereof is the activity of b2399-protein.

[55311] Accordingly, in one embodiment, the process of the present invention for producing stearic acid in a non-human organism, like a microorganism or a plant or a part thereof, comprises increasing or generating the activity of a gene product with the activity of a gene product conferring the activity of “b2399-protein”, especially from Escherichia coli or its functional equivalent or its homolog, e.g. the increase of
[55312] (a) a gene product of a gene comprising the nucleic acid molecule as shown in the respective line in column 5 of Table I, application no. 10, preferably the coding region thereof, or a homolog or a fragment thereof, and being depicted in the same respective line as said B2399, or a functional equivalent or a homolog thereof as shown in column 8 of Table I, application no. 10, preferably the coding region thereof, particularly a homolog or functional equivalent as shown in column 8 of Table I B, application no. 10, and being depicted in the same respective line as said B2399, and preferably the activity is increased non-targeted, or
[55313] (b) a polypeptide comprising a polypeptide, a consensus sequence or at least a polypeptide motif as shown in the respective line in column 5 of Table II or in column 8 of Table IV, application no. 10, respectively, and being depicted in the same respective line as said B2399, or a functional equivalent or a homolog thereof as depicted in column 8 of Table II, application no. 10, preferably a homolog or functional equivalent as depicted in column 8 of Table II B, application no. 10, and being depicted in the same respective line as said B2399, and preferably the activity is increased non-targeted.

[55314] Accordingly, in one embodiment, the molecule which activity is to be increased in the process of the invention is the gene product with an activity as a “b2399-protein”, preferably it is the molecule of section (a) or (b) of this paragraph.

[55315] In particular, it was observed that in plants, especially in Arabidopsis thaliana, increasing or generating the activity of a gene product non-targeted with the activity of a “b2399-protein”, preferably being encoded by a gene comprising the nucleic acid sequence SEQ ID NO. 39237, preferably the coding region thereof, conferred the production of or the increase in stearic acid compared with the wild type control.

[55316] The nucleic acid sequence of B2439 from Escherichia coli, e.g. as shown in the respective line in column 5 of Table I, application no. 10, has been published in B. And the activity of the gene product thereof is the activity of ethanolamine utilization protein.

[55317] Accordingly, in one embodiment, the process of the present invention for producing stearic acid in a non-human organism, like a microorganism or a plant or a part thereof, comprises increasing or generating the activity of a gene product with the activity of a gene product conferring the activity of “ethanolamine utilization protein”, especially from Escherichia coli or its functional equivalent or its homolog, e.g. the increase of
[55318] (a) a gene product of a gene comprising the nucleic acid molecule as shown in the respective line in column 5 of Table I, application no. 10, preferably the coding region thereof, or a homolog or a fragment thereof, and being depicted in the same respective line as said B2439, or a functional equivalent or a homolog thereof as shown in column 8 of Table I, application no. 10, preferably the coding region thereof, particularly a homolog or functional equivalent as shown in column 8 of Table I B, application no. 10, and being depicted in the same respective line as said B2439, and preferably the activity is increased non-targeted, or
[55319] (b) a polypeptide comprising a polypeptide, a consensus sequence or at least a polypeptide motif as shown in the respective line in column 5 of Table II or in column 8 of Table IV, application no. 10, respectively, and being depicted in the same respective line as said B2439, or a functional equivalent or a homolog thereof as depicted in column 8 of Table II, application no. 10, preferably a homolog or functional equivalent as depicted in column 8 of Table II B, application no. 10, and being depicted in the same respective line as said B2439, and preferably the activity is increased non-targeted.

[55320] Accordingly, in one embodiment, the molecule which activity is to be increased in the process of the invention is the gene product with an activity as a “ethanolamine utilization protein”, preferably it is the molecule of section (a) or (b) of this paragraph.

[55321] In particular, it was observed that in plants, especially in Arabidopsis thaliana, increasing or generating the activity of a gene product non-targeted with the activity of a “ethanolamine utilization protein”, preferably being encoded by a gene comprising the nucleic acid sequence SEQ ID NO. 115628, preferably the coding region thereof, conferred the production of or the increase in stearic acid compared with the wild type control.

[55322] The nucleic acid sequence of B2482 from Escherichia coli, e.g. as shown in the respective line in column 5 of Table I, application no. 10, has been published in B. And the activity of the gene product thereof is the activity of NADH dehydrogenase subunit N.

[55323] Accordingly, in one embodiment, the process of the present invention for producing stearic acid in a non-human organism, like a microorganism or a plant or a part thereof, comprises increasing or generating the activity of a gene product with the activity of a gene product conferring the activity of “NADH dehydrogenase subunit N”, especially from Escherichia coli or its functional equivalent or its homolog, e.g. the increase of
[55324] (a) a gene product of a gene comprising the nucleic acid molecule as shown in the respective line in column 5 of Table I, application no. 10, preferably the coding region thereof, or a homolog or a fragment thereof, and being depicted in the same respective line as said B2482, or a functional equivalent or a homolog thereof as shown in column 8 of Table I, application no. 10, preferably the coding region thereof, particularly a homolog or functional equivalent as shown in column 8 of Table I B, application no. 10, and being depicted in the same respective line as said B2482, and preferably the activity is increased non-targeted, or
[55325] (b) a polypeptide comprising a polypeptide, a consensus sequence or at least a polypeptide motif as shown in the respective line in column 5 of Table II or in column 8 of Table IV, application no. 10, respectively, and being depicted in the same respective line as said B2482, or a functional equivalent or a homolog thereof as depicted in column 8 of Table II, application no. 10, preferably a homolog or functional equivalent as depicted in column 8 of Table II B, application no. 10, and being depicted in the same respective line as said B2482, and preferably the activity is increased non-targeted.

[55326] Accordingly, in one embodiment, the molecule which activity is to be increased in the process of the invention is the gene product with an activity as a “NADH dehydrogenase subunit N”, preferably it is the molecule of section (a) or (b) of this paragraph.

[55327] In particular, it was observed that in plants, especially in Arabidopsis thaliana, increasing or generating the activity of a gene product non-targeted with the activity of a “NADH dehydrogenase subunit N”, preferably being encoded by a gene comprising the nucleic acid sequence SEQ ID NO. 79509, preferably the coding region thereof, conferred the production of or the increase in stearic acid compared with the wild type control.

[55328] The nucleic acid sequence of B2513 from Escherichia coli, e.g. as shown in the respective line in column 5 of Table I, application no. 10, has been published in B. And the activity of the gene product thereof is the activity of b2513-protein.

[55329] Accordingly, in one embodiment, the process of the present invention for producing stearic acid in a non-human organism, like a microorganism or a plant or a part thereof, comprises increasing or generating the activity of a gene product with the activity of a gene product conferring the activity of “b2513-protein”, especially from Escherichia coli or its functional equivalent or its homolog, e.g. the increase of
[55330] (a) a gene product of a gene comprising the nucleic acid molecule as shown in the respective line in column 5 of Table I, application no. 10, preferably the coding region thereof, or a homolog or a fragment thereof, and being depicted in the same respective line as said B2513, or a functional equivalent or a homolog thereof as shown in column 8 of Table I, application no. 10, preferably the coding region thereof, particularly a homolog or functional equivalent as shown in column 8 of Table I B, application no. 10, and being depicted in the same respective line as said B2513, and preferably the activity is increased non-targeted, or
[55331] (b) a polypeptide comprising a polypeptide, a consensus sequence or at least a polypeptide motif as shown in the respective line in column 5 of Table II or in column 8 of Table IV, application no. 10, respectively, and being depicted in the same respective line as said B2513, or a functional equivalent or a homolog thereof as depicted in column 8 of Table II, application no. 10, preferably a homolog or functional equivalent as depicted in column 8 of Table II B, application no. 10, and being depicted in the same respective line as said B2513, and preferably the activity is increased non-targeted.

[55332] Accordingly, in one embodiment, the molecule which activity is to be increased in the process of the invention is the gene product with an activity as a “b2513-protein”, preferably it is the molecule of section (a) or (b) of this paragraph.

[55333] In particular, it was observed that in plants, especially in Arabidopsis thaliana, increasing or generating the activity of a gene product non-targeted with the activity of a “b2513-protein”, preferably being encoded by a gene comprising the nucleic acid sequence SEQ ID NO. 9167, preferably the coding region thereof, conferred the production of or the increase in stearic acid compared with the wild type control.

[55334] The nucleic acid sequence of B2601 from Escherichia coli, e.g. as shown in the respective line in column 5 of Table I, application no. 10, has been published in B. And the activity of the gene product thereof is the activity of phospho-2-dehydro-3-deoxyheptonate aldolase.

[55335] Accordingly, in one embodiment, the process of the present invention for producing stearic acid in a non-human organism, like a microorganism or a plant or a part thereof, comprises increasing or generating the activity of a gene product with the activity of a gene product conferring the activity of “phospho-2-dehydro-3-deoxyheptonate aldolase”, especially from Escherichia coli or its functional equivalent or its homolog, e.g. the increase of
[55336] (a) a gene product of a gene comprising the nucleic acid molecule as shown in the respective line in column 5 of Table I, application no. 10, preferably the coding region thereof, or a homolog or a fragment thereof, and being depicted in the same respective line as said B2601, or a functional equivalent or a homolog thereof as shown in column 8 of Table I, application no. 10, preferably the coding region thereof, particularly a homolog or functional equivalent as shown in column 8 of Table I B, application no. 10, and being depicted in the same respective line as said B2601, and preferably the activity is increased plastidic, or
[55337] (b) a polypeptide comprising a polypeptide, a consensus sequence or at least a polypeptide motif as shown in the respective line in column 5 of Table II or in column 8 of Table IV, application no. 10, respectively, and being depicted in the same respective line as said B2601, or a functional equivalent or a homolog thereof as depicted in column 8 of Table II, application no. 10, preferably a homolog or functional equivalent as depicted in column 8 of Table II B, application no. 10, and being depicted in the same respective line as said B2601, and preferably the activity is increased plastidic.

[55338] Accordingly, in one embodiment, the molecule which activity is to be increased in the process of the invention is the gene product with an activity as a “phospho-2-dehydro-3-deoxyheptonate aldolase”, preferably it is the molecule of section (a) or (b) of this paragraph.

[55339] In particular, it was observed that in plants, especially in Arabidopsis thaliana, increasing or generating the activity of a gene product plastidic with the activity of a “phospho-2-dehydro-3-deoxyheptonate aldolase”, preferably being encoded by a gene comprising the nucleic acid sequence SEQ ID NO. 121657, preferably the coding region thereof, conferred the production of or the increase in stearic acid compared with the wild type control.

[55340] The nucleic acid sequence of B2747 from Escherichia coli, e.g. as shown in the respective line in column 5 of Table I, application no. 10, has been published in B. And the activity of the gene product thereof is the activity of 2-C-methyl-D-erythritol 4-phosphate cytidylyltransferase.

[55341] Accordingly, in one embodiment, the process of the present invention for producing stearic acid in a non-human organism, like a microorganism or a plant or a part thereof, comprises increasing or generating the activity of a gene product with the activity of a gene product conferring the activity of “2-C-methyl-D-erythritol 4-phosphate cytidylyltransferase”, especially from Escherichia coli or its functional equivalent or its homolog, e.g. the increase of
[55342] (a) a gene product of a gene comprising the nucleic acid molecule as shown in the respective line in column 5 of Table I, application no. 10, preferably the coding region thereof, or a homolog or a fragment thereof, and being depicted in the same respective line as said B2747, or a functional equivalent or a homolog thereof as shown in column 8 of Table I, application no. 10, preferably the coding region thereof, particularly a homolog or functional equivalent as shown in column 8 of Table I B, application no. 10, and being depicted in the same respective line as said B2747, and preferably the activity is increased non-targeted, or
[55343] (b) a polypeptide comprising a polypeptide, a consensus sequence or at least a polypeptide motif as shown in the respective line in column 5 of Table II or in column 8 of Table IV, application no. 10, respectively, and being depicted in the same respective line as said B2747, or a functional equivalent or a homolog thereof as depicted in column 8 of Table II, application no. 10, preferably a homolog or functional equivalent as depicted in column 8 of Table II B, application no. 10, and being depicted in the same respective line as said B2747, and preferably the activity is increased non-targeted.

[55344] Accordingly, in one embodiment, the molecule which activity is to be increased in the process of the invention is the gene product with an activity as a “2-C-methyl-D-erythritol 4-phosphate cytidylyltransferase”, preferably it is the molecule of section (a) or (b) of this paragraph.

[55345] In particular, it was observed that in plants, especially in Arabidopsis thaliana, increasing or generating the activity of a gene product non-targeted with the activity of a “2-C-methyl-D-erythritol 4-phosphate cytidylyltransferase”, preferably being encoded by a gene comprising the nucleic acid sequence SEQ ID NO. 81075, preferably the coding region thereof, conferred the production of or the increase in stearic acid compared with the wild type control.

[55346] The nucleic acid sequence of B2849 from Escherichia coli, e.g. as shown in the respective line in column 5 of Table I, application no. 10, has been published in B. And the activity of the gene product thereof is the activity of b2849-protein.

[55347] Accordingly, in one embodiment, the process of the present invention for producing stearic acid in a non-human organism, like a microorganism or a plant or a part thereof, comprises increasing or generating the activity of a gene product with the activity of a gene product conferring the activity of “b2849-protein”, especially from Escherichia coli or its functional equivalent or its homolog, e.g. the increase of
[55348] (a) a gene product of a gene comprising the nucleic acid molecule as shown in the respective line in column 5 of Table I, application no. 10, preferably the coding region thereof, or a homolog or a fragment thereof, and being depicted in the same respective line as said B2849, or a functional equivalent or a homolog thereof as shown in column 8 of Table I, application no. 10, preferably the coding region thereof, particularly a homolog or functional equivalent as shown in column 8 of Table I B, application no. 10, and being depicted in the same respective line as said B2849, and preferably the activity is increased non-targeted, or
[55349] (b) a polypeptide comprising a polypeptide, a consensus sequence or at least a polypeptide motif as shown in the respective line in column 5 of Table II or in column 8 of Table IV, application no. 10, respectively, and being depicted in the same respective line as said B2849, or a functional equivalent or a homolog thereof as depicted in column 8 of Table II, application no. 10, preferably a homolog or functional equivalent as depicted in column 8 of Table II B, application no. 10, and being depicted in the same respective line as said B2849, and preferably the activity is increased non-targeted.

[55350] Accordingly, in one embodiment, the molecule which activity is to be increased in the process of the invention is the gene product with an activity as a “b2849-protein”, preferably it is the molecule of section (a) or (b) of this paragraph.

[55351] In particular, it was observed that in plants, especially in Arabidopsis thaliana, increasing or generating the activity of a gene product non-targeted with the activity of a “b2849-protein”, preferably being encoded by a gene comprising the nucleic acid sequence SEQ ID NO. 81980, preferably the coding region thereof, conferred the production of or the increase in stearic acid compared with the wild type control.

[55352] The nucleic acid sequence of B3744 from Escherichia coli, e.g. as shown in the respective line in column 5 of Table I, application no. 10, has been published in B. And the activity of the gene product thereof is the activity of aspartate-ammonia ligase.

[55353] Accordingly, in one embodiment, the process of the present invention for producing stearic acid in a non-human organism, like a microorganism or a plant or a part thereof, comprises increasing or generating the activity of a gene product with the activity of a gene product conferring the activity of “aspartate-ammonia ligase”, especially from Escherichia coli or its functional equivalent or its homolog, e.g. the increase of
[55354] (a) a gene product of a gene comprising the nucleic acid molecule as shown in the respective line in column 5 of Table I, application no. 10, preferably the coding region thereof, or a homolog or a fragment thereof, and being depicted in the same respective line as said B3744, or a functional equivalent or a homolog thereof as shown in column 8 of Table I, application no. 10, preferably the coding region thereof, particularly a homolog or functional equivalent as shown in column 8 of Table I B, application no. 10, and being depicted in the same respective line as said B3744, and preferably the activity is increased plastidic, or
[55355] (b) a polypeptide comprising a polypeptide, a consensus sequence or at least a polypeptide motif as shown in the respective line in column 5 of Table II or in column 8 of Table IV, application no. 10, respectively, and being depicted in the same respective line as said B3744, or a functional equivalent or a homolog thereof as depicted in column 8 of Table II, application no. 10, preferably a homolog or functional equivalent as depicted in column 8 of Table II B, application no. 10, and being depicted in the same respective line as said B3744, and preferably the activity is increased plastidic.

[55356] Accordingly, in one embodiment, the molecule which activity is to be increased in the process of the invention is the gene product with an activity as a “aspartate-ammonia ligase”, preferably it is the molecule of section (a) or (b) of this paragraph.

[55357] In particular, it was observed that in plants, especially in Arabidopsis thaliana, increasing or generating the activity of a gene product plastidic with the activity of a “aspartate-ammonia ligase”, preferably being encoded by a gene comprising the nucleic acid sequence SEQ ID NO. 83657, preferably the coding region thereof, conferred the production of or the increase in stearic acid compared with the wild type control.

[55358] The nucleic acid sequence of B3845 from Escherichia coli, e.g. as shown in the respective line in column 5 of Table I, application no. 10, has been published in B. And the activity of the gene product thereof is the activity of 3-ketoacyl-CoA thiolase.

[55359] Accordingly, in one embodiment, the process of the present invention for producing stearic acid in a non-human organism, like a microorganism or a plant or a part thereof, comprises increasing or generating the activity of a gene product with the activity of a gene product conferring the activity of “3-ketoacyl-CoA thiolase”, especially from Escherichia coli or its functional equivalent or its homolog, e.g. the increase of
[55360] (a) a gene product of a gene comprising the nucleic acid molecule as shown in the respective line in column 5 of Table I, application no. 10, preferably the coding region thereof, or a homolog or a fragment thereof, and being depicted in the same respective line as said B3845, or a functional equivalent or a homolog thereof as shown in column 8 of Table I, application no. 10, preferably the coding region thereof, particularly a homolog or functional equivalent as shown in column 8 of Table I B, application no. 10, and being depicted in the same respective line as said B3845, and preferably the activity is increased plastidic, or
[55361] (b) a polypeptide comprising a polypeptide, a consensus sequence or at least a polypeptide motif as shown in the respective line in column 5 of Table II or in column 8 of Table IV, application no. 10, respectively, and being depicted in the same respective line as said B3845, or a functional equivalent or a homolog thereof as depicted in column 8 of Table II, application no. 10, preferably a homolog or functional equivalent as depicted in column 8 of Table II B, application no. 10, and being depicted in the same respective line as said B3845, and preferably the activity is increased plastidic.

[55362] Accordingly, in one embodiment, the molecule which activity is to be increased in the process of the invention is the gene product with an activity as a “3-ketoacyl-CoA thiolase”, preferably it is the molecule of section (a) or (b) of this paragraph.

[55363] In particular, it was observed that in plants, especially in Arabidopsis thaliana, increasing or generating the activity of a gene product plastidic with the activity of a “3-ketoacyl-CoA thiolase”, preferably being encoded by a gene comprising the nucleic acid sequence SEQ ID NO. 100675, preferably the coding region thereof, conferred the production of or the increase in stearic acid compared with the wild type control.

[55364] The nucleic acid sequence of B3989 from Escherichia coli, e.g. as shown in the respective line in column 5 of Table I, application no. 10, has been published in B. And the activity of the gene product thereof is the activity of b3989-protein.

[55365] Accordingly, in one embodiment, the process of the present invention for producing stearic acid in a non-human organism, like a microorganism or a plant or a part thereof, comprises increasing or generating the activity of a gene product with the activity of a gene product conferring the activity of “b3989-protein”, especially from Escherichia coli or its functional equivalent or its homolog, e.g. the increase of
[55366] (a) a gene product of a gene comprising the nucleic acid molecule as shown in the respective line in column 5 of Table I, application no. 10, preferably the coding region thereof, or a homolog or a fragment thereof, and being depicted in the same respective line as said B3989, or a functional equivalent or a homolog thereof as shown in column 8 of Table I, application no. 10, preferably the coding region thereof, particularly a homolog or functional equivalent as shown in column 8 of Table I B, application no. 10, and being depicted in the same respective line as said B3989, and preferably the activity is increased non-targeted, or
[55367] (b) a polypeptide comprising a polypeptide, a consensus sequence or at least a polypeptide motif as shown in the respective line in column 5 of Table II or in column 8 of Table IV, application no. 10, respectively, and being depicted in the same respective line as said B3989, or a functional equivalent or a homolog thereof as depicted in column 8 of Table II, application no. 10, preferably a homolog or functional equivalent as depicted in column 8 of Table II B, application no. 10, and being depicted in the same respective line as said B3989, and preferably the activity is increased non-targeted.

[55368] Accordingly, in one embodiment, the molecule which activity is to be increased in the process of the invention is the gene product with an activity as a “b3989-protein”, preferably it is the molecule of section (a) or (b) of this paragraph.

[55369] In particular, it was observed that in plants, especially in Arabidopsis thaliana, increasing or generating the activity of a gene product non-targeted with the activity of a “b3989-protein”, preferably being encoded by a gene comprising the nucleic acid sequence SEQ ID NO. 44372, preferably the coding region thereof, conferred the production of or the increase in stearic acid compared with the wild type control.

[55370] The nucleic acid sequence of B4121 from Escherichia coli, e.g. as shown in the respective line in column 5 of Table I, application no. 10, has been published in B. And the activity of the gene product thereof is the activity of b4121-protein.

[55371] Accordingly, in one embodiment, the process of the present invention for producing stearic acid in a non-human organism, like a microorganism or a plant or a part thereof, comprises increasing or generating the activity of a gene product with the activity of a gene product conferring the activity of “b4121-protein”, especially from Escherichia coli or its functional equivalent or its homolog, e.g. the increase of
[55372] (a) a gene product of a gene comprising the nucleic acid molecule as shown in the respective line in column 5 of Table I, application no. 10, preferably the coding region thereof, or a homolog or a fragment thereof, and being depicted in the same respective line as said B4121, or a functional equivalent or a homolog thereof as shown in column 8 of Table I, application no. 10, preferably the coding region thereof, particularly a homolog or functional equivalent as shown in column 8 of Table I B, application no. 10, and being depicted in the same respective line as said B4121, and preferably the activity is increased non-targeted, or
[55373] (b) a polypeptide comprising a polypeptide, a consensus sequence or at least a polypeptide motif as shown in the respective line in column 5 of Table II or in column 8 of Table IV, application no. 10, respectively, and being depicted in the same respective line as said B4121, or a functional equivalent or a homolog thereof as depicted in column 8 of Table II, application no. 10, preferably a homolog or functional equivalent as depicted in column 8 of Table II B, application no. 10, and being depicted in the same respective line as said B4121, and preferably the activity is increased non-targeted.

[55374] Accordingly, in one embodiment, the molecule which activity is to be increased in the process of the invention is the gene product with an activity as a “b4121-protein”, preferably it is the molecule of section (a) or (b) of this paragraph.

[55375] In particular, it was observed that in plants, especially in Arabidopsis thaliana, increasing or generating the activity of a gene product non-targeted with the activity of a “b4121-protein”, preferably being encoded by a gene comprising the nucleic acid sequence SEQ ID NO. 44609, preferably the coding region thereof, conferred the production of or the increase in stearic acid compared with the wild type control.

[55376] The nucleic acid sequence of GM02LC12622 from Glycine max, e.g. as shown in the respective line in column 5 of Table I, application no. 10, is unpublished. And the activity of the gene product thereof is the activity of glutaredoxin.

[55377] Accordingly, in one embodiment, the process of the present invention for producing stearic acid in a non-human organism, like a microorganism or a plant or a part thereof, comprises increasing or generating the activity of a gene product with the activity of a gene product conferring the activity of “glutaredoxin”, especially from Glycine max or its functional equivalent or its homolog, e.g. the increase of
[55378] (a) a gene product of a gene comprising the nucleic acid molecule as shown in the respective line in column 5 of Table I, application no. 10, preferably the coding region thereof, or a homolog or a fragment thereof, and being depicted in the same respective line as said GM02LC12622, or a functional equivalent or a homolog thereof as shown in column 8 of Table I, application no. 10, preferably the coding region thereof, particularly a homolog or functional equivalent as shown in column 8 of Table I B, application no. 10, and being depicted in the same respective line as said GM02LC12622, and preferably the activity is increased non-targeted, or
[55379] (b) a polypeptide comprising a polypeptide, a consensus sequence or at least a polypeptide motif as shown in the respective line in column 5 of Table II or in column 8 of Table IV, application no. 10, respectively, and being depicted in the same respective line as said GM02LC12622, or a functional equivalent or a homolog thereof as depicted in column 8 of Table II, application no. 10, preferably a homolog or functional equivalent as depicted in column 8 of Table II B, application no. 10, and being depicted in the same respective line as said GM02LC12622, and preferably the activity is increased non-targeted.

[55380] Accordingly, in one embodiment, the molecule which activity is to be increased in the process of the invention is the gene product with an activity as a “glutaredoxin”, preferably it is the molecule of section (a) or (b) of this paragraph.

[55381] In particular, it was observed that in plants, especially in Arabidopsis thaliana, increasing or generating the activity of a gene product non-targeted with the activity of a “glutaredoxin”, preferably being encoded by a gene comprising the nucleic acid sequence SEQ ID NO. 10811, preferably the coding region thereof, conferred the production of or the increase in stearic acid compared with the wild type control.

[55382] The nucleic acid sequence of GM02LC19289 from Glycine max, e.g. as shown in the respective line in column 5 of Table I, application no. 10, is unpublished. And the activity of the gene product thereof is the activity of transcription factor.

[55383] Accordingly, in one embodiment, the process of the present invention for producing stearic acid in a non-human organism, like a microorganism or a plant or a part thereof, comprises increasing or generating the activity of a gene product with the activity of a gene product conferring the activity of “transcription factor”, especially from Glycine max or its functional equivalent or its homolog, e.g. the increase of
[55384] (a) a gene product of a gene comprising the nucleic acid molecule as shown in the respective line in column 5 of Table I, application no. 10, preferably the coding region thereof, or a homolog or a fragment thereof, and being depicted in the same respective line as said GM02LC19289, or a functional equivalent or a homolog thereof as shown in column 8 of Table I, application no. 10, preferably the coding region thereof, particularly a homolog or functional equivalent as shown in column 8 of Table I B, application no. 10, and being depicted in the same respective line as said GM02LC19289, and preferably the activity is increased non-targeted, or
[55385] (b) a polypeptide comprising a polypeptide, a consensus sequence or at least a polypeptide motif as shown in the respective line in column 5 of Table II or in column 8 of Table IV, application no. 10, respectively, and being depicted in the same respective line as said GM02LC19289, or a functional equivalent or a homolog thereof as depicted in column 8 of Table II, application no. 10, preferably a homolog or functional equivalent as depicted in column 8 of Table II B, application no. 10, and being depicted in the same respective line as said GM02LC19289, and preferably the activity is increased non-targeted.

[55386] Accordingly, in one embodiment, the molecule which activity is to be increased in the process of the invention is the gene product with an activity as a “transcription factor”, preferably it is the molecule of section (a) or (b) of this paragraph.

[55387] In particular, it was observed that in plants, especially in Arabidopsis thaliana, increasing or generating the activity of a gene product non-targeted with the activity of a “transcription factor”, preferably being encoded by a gene comprising the nucleic acid sequence SEQ ID NO. 46751, preferably the coding region thereof, conferred the production of or the increase in stearic acid compared with the wild type control.

[55388] The nucleic acid sequence of Sll0593 from Synechocystis sp., e.g. as shown in the respective line in column 5 of Table I, application no. 10, has been published in C. And the activity of the gene product thereof is the activity of glucokinase.

[55389] Accordingly, in one embodiment, the process of the present invention for producing stearic acid in a non-human organism, like a microorganism or a plant or a part thereof, comprises increasing or generating the activity of a gene product with the activity of a gene product conferring the activity of “glucokinase”, especially from Synechocystis sp. or its functional equivalent or its homolog, e.g. the increase of
[55390] (a) a gene product of a gene comprising the nucleic acid molecule as shown in the respective line in column 5 of Table I, application no. 10, preferably the coding region thereof, or a homolog or a fragment thereof, and being depicted in the same respective line as said Sll0593, or a functional equivalent or a homolog thereof as shown in column 8 of Table I, application no. 10, preferably the coding region thereof, particularly a homolog or functional equivalent as shown in column 8 of Table I B, application no. 10, and being depicted in the same respective line as said Sll0593, and preferably the activity is increased plastidic, or
[55391] (b) a polypeptide comprising a polypeptide, a consensus sequence or at least a polypeptide motif as shown in the respective line in column 5 of Table II or in column 8 of Table IV, application no. 10, respectively, and being depicted in the same respective line as said Sll0593, or a functional equivalent or a homolog thereof as depicted in column 8 of Table II, application no. 10, preferably a homolog or functional equivalent as depicted in column 8 of Table II B, application no. 10, and being depicted in the same respective line as said Sll0593, and preferably the activity is increased plastidic.

[55392] Accordingly, in one embodiment, the molecule which activity is to be increased in the process of the invention is the gene product with an activity as a “glucokinase”, preferably it is the molecule of section (a) or (b) of this paragraph.

[55393] In particular, it was observed that in plants, especially in Arabidopsis thaliana, increasing or generating the activity of a gene product plastidic with the activity of a “glucokinase”, preferably being encoded by a gene comprising the nucleic acid sequence SEQ ID NO. 85510, preferably the coding region thereof, conferred the production of or the increase in stearic acid compared with the wild type control.

[55394] The nucleic acid sequence of Sll1032 from Synechocystis sp., e.g. as shown in the respective line in column 5 of Table I, application no. 10, has been published in C. And the activity of the gene product thereof is the activity of sll1032-protein.

[55395] Accordingly, in one embodiment, the process of the present invention for producing stearic acid in a non-human organism, like a microorganism or a plant or a part thereof, comprises increasing or generating the activity of a gene product with the activity of a gene product conferring the activity of “sll1032-protein”, especially from Synechocystis sp. or its functional equivalent or its homolog, e.g. the increase of
[55396] (a) a gene product of a gene comprising the nucleic acid molecule as shown in the respective line in column 5 of Table I, application no. 10, preferably the coding region thereof, or a homolog or a fragment thereof, and being depicted in the same respective line as said Sll1032, or a functional equivalent or a homolog thereof as shown in column 8 of Table I, application no. 10, preferably the coding region thereof, particularly a homolog or functional equivalent as shown in column 8 of Table I B, application no. 10, and being depicted in the same respective line as said Sll1032, and preferably the activity is increased mitochondrial, or
[55397] (b) a polypeptide comprising a polypeptide, a consensus sequence or at least a polypeptide motif as shown in the respective line in column 5 of Table II or in column 8 of Table IV, application no. 10, respectively, and being depicted in the same respective line as said Sll1032, or a functional equivalent or a homolog thereof as depicted in column 8 of Table II, application no. 10, preferably a homolog or functional equivalent as depicted in column 8 of Table II B, application no. 10, and being depicted in the same respective line as said Sll1032, and preferably the activity is increased mitochondrial.

[55398] Accordingly, in one embodiment, the molecule which activity is to be increased in the process of the invention is the gene product with an activity as a “sll1032-protein”, preferably it is the molecule of section (a) or (b) of this paragraph.

[55399] In particular, it was observed that in plants, especially in Arabidopsis thaliana, increasing or generating the activity of a gene product mitochondrial with the activity of a “sll1032-protein”, preferably being encoded by a gene comprising the nucleic acid sequence SEQ ID NO. 85723, preferably the coding region thereof, conferred the production of or the increase in stearic acid compared with the wild type control.

[55400] The nucleic acid sequence of Sll1443 from Synechocystis sp., e.g. as shown in the respective line in column 5 of Table I, application no. 10, has been published in C. And the activity of the gene product thereof is the activity of CTP synthetase.

[55401] Accordingly, in one embodiment, the process of the present invention for producing stearic acid in a non-human organism, like a microorganism or a plant or a part thereof, comprises increasing or generating the activity of a gene product with the activity of a gene product conferring the activity of “CTP synthetase”, especially from Synechocystis sp. or its functional equivalent or its homolog, e.g. the increase of
[55402] (a) a gene product of a gene comprising the nucleic acid molecule as shown in the respective line in column 5 of Table I, application no. 10, preferably the coding region thereof, or a homolog or a fragment thereof, and being depicted in the same respective line as said Sll1443, or a functional equivalent or a homolog thereof as shown in column 8 of Table I, application no. 10, preferably the coding region thereof, particularly a homolog or functional equivalent as shown in column 8 of Table I B, application no. 10, and being depicted in the same respective line as said Sll1443, and preferably the activity is increased mitochondrial, or
[55403] (b) a polypeptide comprising a polypeptide, a consensus sequence or at least a polypeptide motif as shown in the respective line in column 5 of Table II or in column 8 of Table IV, application no. 10, respectively, and being depicted in the same respective line as said Sll1443, or a functional equivalent or a homolog thereof as depicted in column 8 of Table II, application no. 10, preferably a homolog or functional equivalent as depicted in column 8 of Table II B, application no. 10, and being depicted in the same respective line as said Sll1443, and preferably the activity is increased mitochondrial.

[55404] Accordingly, in one embodiment, the molecule which activity is to be increased in the process of the invention is the gene product with an activity as a “CTP synthetase”, preferably it is the molecule of section (a) or (b) of this paragraph.

[55405] In particular, it was observed that in plants, especially in Arabidopsis thaliana, increasing or generating the activity of a gene product mitochondrial with the activity of a “CTP synthetase”, preferably being encoded by a gene comprising the nucleic acid sequence SEQ ID NO. 53878, preferably the coding region thereof, conferred the production of or the increase in stearic acid compared with the wild type control.

[55406] The nucleic acid sequence of Sll1917 from Synechocystis sp., e.g. as shown in the respective line in column 5 of Table I, application no. 10, has been published in C. And the activity of the gene product thereof is the activity of coproporphyrinogen III oxidase.

[55407] Accordingly, in one embodiment, the process of the present invention for producing stearic acid in a non-human organism, like a microorganism or a plant or a part thereof, comprises increasing or generating the activity of a gene product with the activity of a gene product conferring the activity of “coproporphyrinogen III oxidase”, especially from Synechocystis sp. or its functional equivalent or its homolog, e.g. the increase of
[55408] (a) a gene product of a gene comprising the nucleic acid molecule as shown in the respective line in column 5 of Table I, application no. 10, preferably the coding region thereof, or a homolog or a fragment thereof, and being depicted in the same respective line as said Sll1917, or a functional equivalent or a homolog thereof as shown in column 8 of Table I, application no. 10, preferably the coding region thereof, particularly a homolog or functional equivalent as shown in column 8 of Table I B, application no. 10, and being depicted in the same respective line as said Sll1917, and preferably the activity is increased mitochondrial, or
[55409] (b) a polypeptide comprising a polypeptide, a consensus sequence or at least a polypeptide motif as shown in the respective line in column 5 of Table II or in column 8 of Table IV, application no. 10, respectively, and being depicted in the same respective line as said Sll1917, or a functional equivalent or a homolog thereof as depicted in column 8 of Table II, application no. 10, preferably a homolog or functional equivalent as depicted in column 8 of Table II B, application no. 10, and being depicted in the same respective line as said Sll1917, and preferably the activity is increased mitochondrial.

[55410] Accordingly, in one embodiment, the molecule which activity is to be increased in the process of the invention is the gene product with an activity as a “coproporphyrinogen III oxidase”, preferably it is the molecule of section (a) or (b) of this paragraph.

[55411] In particular, it was observed that in plants, especially in Arabidopsis thaliana, increasing or generating the activity of a gene product mitochondrial with the activity of a “coproporphyrinogen III oxidase”, preferably being encoded by a gene comprising the nucleic acid sequence SEQ ID NO. 11471, preferably the coding region thereof, conferred the production of or the increase in stearic acid compared with the wild type control.

[55412] The nucleic acid sequence of Sll1920 from Synechocystis sp., e.g. as shown in the respective line in column 5 of Table I, application no. 10, has been published in C. And the activity of the gene product thereof is the activity of cation-transporting ATPase.

[55413] Accordingly, in one embodiment, the process of the present invention for producing stearic acid in a non-human organism, like a microorganism or a plant or a part thereof, comprises increasing or generating the activity of a gene product with the activity of a gene product conferring the activity of “cation-transporting ATPase”, especially from Synechocystis sp. or its functional equivalent or its homolog, e.g. the increase of
[55414] (a) a gene product of a gene comprising the nucleic acid molecule as shown in the respective line in column 5 of Table I, application no. 10, preferably the coding region thereof, or a homolog or a fragment thereof, and being depicted in the same respective line as said Sll1920, or a functional equivalent or a homolog thereof as shown in column 8 of Table I, application no. 10, preferably the coding region thereof, particularly a homolog or functional equivalent as shown in column 8 of Table I B, application no. 10, and being depicted in the same respective line as said Sll1920, and preferably the activity is increased mitochondrial, or
[55415] (b) a polypeptide comprising a polypeptide, a consensus sequence or at least a polypeptide motif as shown in the respective line in column 5 of Table II or in column 8 of Table IV, application no. 10, respectively, and being depicted in the same respective line as said Sll1920, or a functional equivalent or a homolog thereof as depicted in column 8 of Table II, application no. 10, preferably a homolog or functional equivalent as depicted in column 8 of Table II B, application no. 10, and being depicted in the same respective line as said Sll1920, and preferably the activity is increased mitochondrial.

[55416] Accordingly, in one embodiment, the molecule which activity is to be increased in the process of the invention is the gene product with an activity as a “cation-transporting ATPase”, preferably it is the molecule of section (a) or (b) of this paragraph.

[55417] In particular, it was observed that in plants, especially in Arabidopsis thaliana, increasing or generating the activity of a gene product mitochondrial with the activity of a “cation-transporting ATPase”, preferably being encoded by a gene comprising the nucleic acid sequence SEQ ID NO. 55385, preferably the coding region thereof, conferred the production of or the increase in stearic acid compared with the wild type control.

[55418] The nucleic acid sequence of Slr0338 from Synechocystis sp., e.g. as shown in the respective line in column 5 of Table I, application no. 10, has been published in C. And the activity of the gene product thereof is the activity of oxidoreductase.

[55419] Accordingly, in one embodiment, the process of the present invention for producing stearic acid in a non-human organism, like a microorganism or a plant or a part thereof, comprises increasing or generating the activity of a gene product with the activity of a gene product conferring the activity of “oxidoreductase”, especially from Synechocystis sp. or its functional equivalent or its homolog, e.g. the increase of
[55420] (a) a gene product of a gene comprising the nucleic acid molecule as shown in the respective line in column 5 of Table I, application no. 10, preferably the coding region thereof, or a homolog or a fragment thereof, and being depicted in the same respective line as said Slr0338, or a functional equivalent or a homolog thereof as shown in column 8 of Table I, application no. 10, preferably the coding region thereof, particularly a homolog or functional equivalent as shown in column 8 of Table I B, application no. 10, and being depicted in the same respective line as said Slr0338, and preferably the activity is increased plastidic, or
[55421] (b) a polypeptide comprising a polypeptide, a consensus sequence or at least a polypeptide motif as shown in the respective line in column 5 of Table II or in column 8 of Table IV, application no. 10, respectively, and being depicted in the same respective line as said Slr0338, or a functional equivalent or a homolog thereof as depicted in column 8 of Table II, application no. 10, preferably a homolog or functional equivalent as depicted in column 8 of Table II B, application no. 10, and being depicted in the same respective line as said Slr0338, and preferably the activity is increased plastidic.

[55422] Accordingly, in one embodiment, the molecule which activity is to be increased in the process of the invention is the gene product with an activity as a “oxidoreductase”, preferably it is the molecule of section (a) or (b) of this paragraph.

[55423] In particular, it was observed that in plants, especially in Arabidopsis thaliana, increasing or generating the activity of a gene product plastidic with the activity of a “oxidoreductase”, preferably being encoded by a gene comprising the nucleic acid sequence SEQ ID NO. 11990, preferably the coding region thereof, conferred the production of or the increase in stearic acid compared with the wild type control.

[55424] The nucleic acid sequence of Slr0966 from Synechocystis sp., e.g. as shown in the respective line in column 5 of Table I, application no. 10, has been published in C. And the activity of the gene product thereof is the activity of tryptophan synthase alpha chain.

[55425] Accordingly, in one embodiment, the process of the present invention for producing stearic acid in a non-human organism, like a microorganism or a plant or a part thereof, comprises increasing or generating the activity of a gene product with the activity of a gene product conferring the activity of “tryptophan synthase alpha chain”, especially from Synechocystis sp. or its functional equivalent or its homolog, e.g. the increase of
[55426] (a) a gene product of a gene comprising the nucleic acid molecule as shown in the respective line in column 5 of Table I, application no. 10, preferably the coding region thereof, or a homolog or a fragment thereof, and being depicted in the same respective line as said Slr0966, or a functional equivalent or a homolog thereof as shown in column 8 of Table I, application no. 10, preferably the coding region thereof, particularly a homolog or functional equivalent as shown in column 8 of Table I B, application no. 10, and being depicted in the same respective line as said Slr0966, and preferably the activity is increased plastidic, or
[55427] (b) a polypeptide comprising a polypeptide, a consensus sequence or at least a polypeptide motif as shown in the respective line in column 5 of Table II or in column 8 of Table IV, application no. 10, respectively, and being depicted in the same respective line as said Slr0966, or a functional equivalent or a homolog thereof as depicted in column 8 of Table II, application no. 10, preferably a homolog or functional equivalent as depicted in column 8 of Table II B, application no. 10, and being depicted in the same respective line as said Slr0966, and preferably the activity is increased plastidic.

[55428] Accordingly, in one embodiment, the molecule which activity is to be increased in the process of the invention is the gene product with an activity as a “tryptophan synthase alpha chain”, preferably it is the molecule of section (a) or (b) of this paragraph.

[55429] In particular, it was observed that in plants, especially in Arabidopsis thaliana, increasing or generating the activity of a gene product plastidic with the activity of a “tryptophan synthase alpha chain”, preferably being encoded by a gene comprising the nucleic acid sequence SEQ ID NO. 87655, preferably the coding region thereof, conferred the production of or the increase in stearic acid compared with the wild type control.

[55430] The nucleic acid sequence of Slr1312 from Synechocystis sp., e.g. as shown in the respective line in column 5 of Table I, application no. 10, has been published in C. And the activity of the gene product thereof is the activity of arginine decarboxylase.

[55431] Accordingly, in one embodiment, the process of the present invention for producing stearic acid in a non-human organism, like a microorganism or a plant or a part thereof, comprises increasing or generating the activity of a gene product with the activity of a gene product conferring the activity of “arginine decarboxylase”, especially from Synechocystis sp. or its functional equivalent or its homolog, e.g. the increase of
[55432] (a) a gene product of a gene comprising the nucleic acid molecule as shown in the respective line in column 5 of Table I, application no. 10, preferably the coding region thereof, or a homolog or a fragment thereof, and being depicted in the same respective line as said Slr1312, or a functional equivalent or a homolog thereof as shown in column 8 of Table I, application no. 10, preferably the coding region thereof, particularly a homolog or functional equivalent as shown in column 8 of Table I B, application no. 10, and being depicted in the same respective line as said Slr1312, and preferably the activity is increased non-targeted, or
[55433] (b) a polypeptide comprising a polypeptide, a consensus sequence or at least a polypeptide motif as shown in the respective line in column 5 of Table II or in column 8 of Table IV, application no. 10, respectively, and being depicted in the same respective line as said Slr1312, or a functional equivalent or a homolog thereof as depicted in column 8 of Table II, application no. 10, preferably a homolog or functional equivalent as depicted in column 8 of Table II B, application no. 10, and being depicted in the same respective line as said Slr1312, and preferably the activity is increased non-targeted.

[55434] Accordingly, in one embodiment, the molecule which activity is to be increased in the process of the invention is the gene product with an activity as a “arginine decarboxylase”, preferably it is the molecule of section (a) or (b) of this paragraph.

[55435] In particular, it was observed that in plants, especially in Arabidopsis thaliana, increasing or generating the activity of a gene product non-targeted with the activity of a “arginine decarboxylase”, preferably being encoded by a gene comprising the nucleic acid sequence SEQ ID NO. 58324, preferably the coding region thereof, conferred the production of or the increase in stearic acid compared with the wild type control.

[55436] The nucleic acid sequence of Yal054c from Saccharomyces cerevisiae, e.g. as shown in the respective line in column 5 of Table I, application no. 10, has been published in A. And the activity of the gene product thereof is the activity of acetyl-coenzyme A synthetase.

[55437] Accordingly, in one embodiment, the process of the present invention for producing stearic acid in a non-human organism, like a microorganism or a plant or a part thereof, comprises increasing or generating the activity of a gene product with the activity of a gene product conferring the activity of “acetyl-coenzyme A synthetase”, especially from Saccharomyces cerevisiae or its functional equivalent or its homolog, e.g. the increase of
[55438] (a) a gene product of a gene comprising the nucleic acid molecule as shown in the respective line in column 5 of Table I, application no. 10, preferably the coding region thereof, or a homolog or a fragment thereof, and being depicted in the same respective line as said Yal054c, or a functional equivalent or a homolog thereof as shown in column 8 of Table I, application no. 10, preferably the coding region thereof, particularly a homolog or functional equivalent as shown in column 8 of Table I B, application no. 10, and being depicted in the same respective line as said Yal054c, and preferably the activity is increased non-targeted, or
[55439] (b) a polypeptide comprising a polypeptide, a consensus sequence or at least a polypeptide motif as shown in the respective line in column 5 of Table II or in column 8 of Table IV, application no. 10, respectively, and being depicted in the same respective line as said Yal054c, or a functional equivalent or a homolog thereof as depicted in column 8 of Table II, application no. 10, preferably a homolog or functional equivalent as depicted in column 8 of Table II B, application no. 10, and being depicted in the same respective line as said Yal054c, and preferably the activity is increased non-targeted.

[55440] Accordingly, in one embodiment, the molecule which activity is to be increased in the process of the invention is the gene product with an activity as a “acetyl-coenzyme A synthetase”, preferably it is the molecule of section (a) or (b) of this paragraph.

[55441] In particular, it was observed that in plants, especially in Arabidopsis thaliana, increasing or generating the activity of a gene product non-targeted with the activity of a “acetyl-coenzyme A synthetase”, preferably being encoded by a gene comprising the nucleic acid sequence SEQ ID NO. 121908, preferably the coding region thereof, conferred the production of or the increase in stearic acid compared with the wild type control.

[55442] The nucleic acid sequence of Ybr249c from Saccharomyces cerevisiae, e.g. as shown in the respective line in column 5 of Table I, application no. 10, has been published in A. And the activity of the gene product thereof is the activity of 3-deoxy-7-phosphoheptulonate synthase.

[55443] Accordingly, in one embodiment, the process of the present invention for producing stearic acid in a non-human organism, like a microorganism or a plant or a part thereof, comprises increasing or generating the activity of a gene product with the activity of a gene product conferring the activity of “3-deoxy-7-phosphoheptulonate synthase”, especially from Saccharomyces cerevisiae or its functional equivalent or its homolog, e.g. the increase of
[55444] (a) a gene product of a gene comprising the nucleic acid molecule as shown in the respective line in column 5 of Table I, application no. 10, preferably the coding region thereof, or a homolog or a fragment thereof, and being depicted in the same respective line as said Ybr249c, or a functional equivalent or a homolog thereof as shown in column 8 of Table I, application no. 10, preferably the coding region thereof, particularly a homolog or functional equivalent as shown in column 8 of Table I B, application no. 10, and being depicted in the same respective line as said Ybr249c, and preferably the activity is increased plastidic, or
[55445] (b) a polypeptide comprising a polypeptide, a consensus sequence or at least a polypeptide motif as shown in the respective line in column 5 of Table II or in column 8 of Table IV, application no. 10, respectively, and being depicted in the same respective line as said Ybr249c, or a functional equivalent or a homolog thereof as depicted in column 8 of Table II, application no. 10, preferably a homolog or functional equivalent as depicted in column 8 of Table II B, application no. 10, and being depicted in the same respective line as said Ybr249c, and preferably the activity is increased plastidic.

[55446] Accordingly, in one embodiment, the molecule which activity is to be increased in the process of the invention is the gene product with an activity as a “3-deoxy-7-phosphoheptulonate synthase”, preferably it is the molecule of section (a) or (b) of this paragraph.

[55447] In particular, it was observed that in plants, especially in Arabidopsis thaliana, increasing or generating the activity of a gene product plastidic with the activity of a “3-deoxy-7-phosphoheptulonate synthase”, preferably being encoded by a gene comprising the nucleic acid sequence SEQ ID NO. 88879, preferably the coding region thereof, conferred the production of or the increase in stearic acid compared with the wild type control.

[55448] The nucleic acid sequence of Ycl049c from Saccharomyces cerevisiae, e.g. as shown in the respective line in column 5 of Table I, application no. 10, has been published in A. And the activity of the gene product thereof is the activity of ycl049c-protein.

[55449] Accordingly, in one embodiment, the process of the present invention for producing stearic acid in a non-human organism, like a microorganism or a plant or a part thereof, comprises increasing or generating the activity of a gene product with the activity of a gene product conferring the activity of “ycl049c-protein”, especially from Saccharomyces cerevisiae or its functional equivalent or its homolog, e.g. the increase of
[55450] (a) a gene product of a gene comprising the nucleic acid molecule as shown in the respective line in column 5 of Table I, application no. 10, preferably the coding region thereof, or a homolog or a fragment thereof, and being depicted in the same respective line as said Ycl049c, or a functional equivalent or a homolog thereof as shown in column 8 of Table I, application no. 10, preferably the coding region thereof, particularly a homolog or functional equivalent as shown in column 8 of Table I B, application no. 10, and being depicted in the same respective line as said Ycl049c, and preferably the activity is increased plastidic, or
[55451] (b) a polypeptide comprising a polypeptide, a consensus sequence or at least a polypeptide motif as shown in the respective line in column 5 of Table II or in column 8 of Table IV, application no. 10, respectively, and being depicted in the same respective line as said Ycl049c, or a functional equivalent or a homolog thereof as depicted in column 8 of Table II, application no. 10, preferably a homolog or functional equivalent as depicted in column 8 of Table II B, application no. 10, and being depicted in the same respective line as said Ycl049c, and preferably the activity is increased plastidic.

[55452] Accordingly, in one embodiment, the molecule which activity is to be increased in the process of the invention is the gene product with an activity as a “ycl049c-protein”, preferably it is the molecule of section (a) or (b) of this paragraph.

[55453] In particular, it was observed that in plants, especially in Arabidopsis thaliana, increasing or generating the activity of a gene product plastidic with the activity of a “ycl049c-protein”, preferably being encoded by a gene comprising the nucleic acid sequence SEQ ID NO. 113220, preferably the coding region thereof, conferred the production of or the increase in stearic acid compared with the wild type control.

[55454] The nucleic acid sequence of Ydl022w from Saccharomyces cerevisiae, e.g. as shown in the respective line in column 5 of Table I, application no. 10, has been published in A. And the activity of the gene product thereof is the activity of glycerol-3-phosphate dehydrogenase.

[55455] Accordingly, in one embodiment, the process of the present invention for producing stearic acid in a non-human organism, like a microorganism or a plant or a part thereof, comprises increasing or generating the activity of a gene product with the activity of a gene product conferring the activity of “glycerol-3-phosphate dehydrogenase”, especially from Saccharomyces cerevisiae or its functional equivalent or its homolog, e.g. the increase of
[55456] (a) a gene product of a gene comprising the nucleic acid molecule as shown in the respective line in column 5 of Table I, application no. 10, preferably the coding region thereof, or a homolog or a fragment thereof, and being depicted in the same respective line as said Ydl022w, or a functional equivalent or a homolog thereof as shown in column 8 of Table I, application no. 10, preferably the coding region thereof, particularly a homolog or functional equivalent as shown in column 8 of Table I B, application no. 10, and being depicted in the same respective line as said Ydl022w, and preferably the activity is increased non-targeted, or
[55457] (b) a polypeptide comprising a polypeptide, a consensus sequence or at least a polypeptide motif as shown in the respective line in column 5 of Table II or in column 8 of Table IV, application no. 10, respectively, and being depicted in the same respective line as said Ydl022w, or a functional equivalent or a homolog thereof as depicted in column 8 of Table II, application no. 10, preferably a homolog or functional equivalent as depicted in column 8 of Table II B, application no. 10, and being depicted in the same respective line as said Ydl022w, and preferably the activity is increased non-targeted.

[55458] Accordingly, in one embodiment, the molecule which activity is to be increased in the process of the invention is the gene product with an activity as a “glycerol-3-phosphate dehydrogenase”, preferably it is the molecule of section (a) or (b) of this paragraph.

[55459] In particular, it was observed that in plants, especially in Arabidopsis thaliana, increasing or generating the activity of a gene product non-targeted with the activity of a “glycerol-3-phosphate dehydrogenase”, preferably being encoded by a gene comprising the nucleic acid sequence SEQ ID NO. 119408, preferably the coding region thereof, conferred the production of or the increase in stearic acid compared with the wild type control.

[55460] The nucleic acid sequence of Ydl066w from Saccharomyces cerevisiae, e.g. as shown in the respective line in column 5 of Table I, application no. 10, has been published in A. And the activity of the gene product thereof is the activity of isocitrate dehydrogenase.

[55461] Accordingly, in one embodiment, the process of the present invention for producing stearic acid in a non-human organism, like a microorganism or a plant or a part thereof, comprises increasing or generating the activity of a gene product with the activity of a gene product conferring the activity of “isocitrate dehydrogenase”, especially from Saccharomyces cerevisiae or its functional equivalent or its homolog, e.g. the increase of
[55462] (a) a gene product of a gene comprising the nucleic acid molecule as shown in the respective line in column 5 of Table I, application no. 10, preferably the coding region thereof, or a homolog or a fragment thereof, and being depicted in the same respective line as said Ydl066w, or a functional equivalent or a homolog thereof as shown in column 8 of Table I, application no. 10, preferably the coding region thereof, particularly a homolog or functional equivalent as shown in column 8 of Table I B, application no. 10, and being depicted in the same respective line as said Ydl066w, and preferably the activity is increased non-targeted, or
[55463] (b) a polypeptide comprising a polypeptide, a consensus sequence or at least a polypeptide motif as shown in the respective line in column 5 of Table II or in column 8 of Table IV, application no. 10, respectively, and being depicted in the same respective line as said Ydl066w, or a functional equivalent or a homolog thereof as depicted in column 8 of Table II, application no. 10, preferably a homolog or functional equivalent as depicted in column 8 of Table II B, application no. 10, and being depicted in the same respective line as said Ydl066w, and preferably the activity is increased non-targeted.

[55464] Accordingly, in one embodiment, the molecule which activity is to be increased in the process of the invention is the gene product with an activity as a “isocitrate dehydrogenase”, preferably it is the molecule of section (a) or (b) of this paragraph.

[55465] In particular, it was observed that in plants, especially in Arabidopsis thaliana, increasing or generating the activity of a gene product non-targeted with the activity of a “isocitrate dehydrogenase”, preferably being encoded by a gene comprising the nucleic acid sequence SEQ ID NO. 122228, preferably the coding region thereof, conferred the production of or the increase in stearic acid compared with the wild type control.

[55466] The nucleic acid sequence of Ydr507c from Saccharomyces cerevisiae, e.g. as shown in the respective line in column 5 of Table I, application no. 10, has been published in A. And the activity of the gene product thereof is the activity of ydr507c-protein.

[55467] Accordingly, in one embodiment, the process of the present invention for producing stearic acid in a non-human organism, like a microorganism or a plant or a part thereof, comprises increasing or generating the activity of a gene product with the activity of a gene product conferring the activity of “ydr507c-protein”, especially from Saccharomyces cerevisiae or its functional equivalent or its homolog, e.g. the increase of
[55468] (a) a gene product of a gene comprising the nucleic acid molecule as shown in the respective line in column 5 of Table I, application no. 10, preferably the coding region thereof, or a homolog or a fragment thereof, and being depicted in the same respective line as said Ydr507c, or a functional equivalent or a homolog thereof as shown in column 8 of Table I, application no. 10, preferably the coding region thereof, particularly a homolog or functional equivalent as shown in column 8 of Table I B, application no. 10, and being depicted in the same respective line as said Ydr507c, and preferably the activity is increased non-targeted, or
[55469] (b) a polypeptide comprising a polypeptide, a consensus sequence or at least a polypeptide motif as shown in the respective line in column 5 of Table II or in column 8 of Table IV, application no. 10, respectively, and being depicted in the same respective line as said Ydr507c, or a functional equivalent or a homolog thereof as depicted in column 8 of Table II, application no. 10, preferably a homolog or functional equivalent as depicted in column 8 of Table II B, application no. 10, and being depicted in the same respective line as said Ydr507c, and preferably the activity is increased non-targeted.

[55470] Accordingly, in one embodiment, the molecule which activity is to be increased in the process of the invention is the gene product with an activity as a “ydr507c-protein”, preferably it is the molecule of section (a) or (b) of this paragraph.

[55471] In particular, it was observed that in plants, especially in Arabidopsis thaliana, increasing or generating the activity of a gene product non-targeted with the activity of a “ydr507c-protein”, preferably being encoded by a gene comprising the nucleic acid sequence SEQ ID NO. 90165, preferably the coding region thereof, conferred the production of or the increase in stearic acid compared with the wild type control.

[55472] The nucleic acid sequence of Yfl053w from Saccharomyces cerevisiae, e.g. as shown in the respective line in column 5 of Table I, application no. 10, has been published in A. And the activity of the gene product thereof is the activity of dihydroxyacetone kinase.

[55473] Accordingly, in one embodiment, the process of the present invention for producing stearic acid in a non-human organism, like a microorganism or a plant or a part thereof, comprises increasing or generating the activity of a gene product with the activity of a gene product conferring the activity of “dihydroxyacetone kinase”, especially from Saccharomyces cerevisiae or its functional equivalent or its homolog, e.g. the increase of
[55474] (a) a gene product of a gene comprising the nucleic acid molecule as shown in the respective line in column 5 of Table I, application no. 10, preferably the coding region thereof, or a homolog or a fragment thereof, and being depicted in the same respective line as said Yfl053w, or a functional equivalent or a homolog thereof as shown in column 8 of Table I, application no. 10, preferably the coding region thereof, particularly a homolog or functional equivalent as shown in column 8 of Table I B, application no. 10, and being depicted in the same respective line as said Yfl053w, and preferably the activity is increased non-targeted, or
[55475] (b) a polypeptide comprising a polypeptide, a consensus sequence or at least a polypeptide motif as shown in the respective line in column 5 of Table II or in column 8 of Table IV, application no. 10, respectively, and being depicted in the same respective line as said Yfl053w, or a functional equivalent or a homolog thereof as depicted in column 8 of Table II, application no. 10, preferably a homolog or functional equivalent as depicted in column 8 of Table II B, application no. 10, and being depicted in the same respective line as said Yfl053w, and preferably the activity is increased non-targeted.

[55476] Accordingly, in one embodiment, the molecule which activity is to be increased in the process of the invention is the gene product with an activity as a “dihydroxyacetone kinase”, preferably it is the molecule of section (a) or (b) of this paragraph.

[55477] In particular, it was observed that in plants, especially in Arabidopsis thaliana, increasing or generating the activity of a gene product non-targeted with the activity of a “dihydroxyacetone kinase”, preferably being encoded by a gene comprising the nucleic acid sequence SEQ ID NO. 120309, preferably the coding region thereof, conferred the production of or the increase in stearic acid compared with the wild type control.

[55478] The nucleic acid sequence of Ygr104c from Saccharomyces cerevisiae, e.g. as shown in the respective line in column 5 of Table I, application no. 10, has been published in A. And the activity of the gene product thereof is the activity of YGR104C-protein.

[55479] Accordingly, in one embodiment, the process of the present invention for producing stearic acid in a non-human organism, like a microorganism or a plant or a part thereof, comprises increasing or generating the activity of a gene product with the activity of a gene product conferring the activity of “YGR104C-protein”, especially from Saccharomyces cerevisiae or its functional equivalent or its homolog, e.g. the increase of
[55480] (a) a gene product of a gene comprising the nucleic acid molecule as shown in the respective line in column 5 of Table I, application no. 10, preferably the coding region thereof, or a homolog or a fragment thereof, and being depicted in the same respective line as said Ygr104c, or a functional equivalent or a homolog thereof as shown in column 8 of Table I, application no. 10, preferably the coding region thereof, particularly a homolog or functional equivalent as shown in column 8 of Table I B, application no. 10, and being depicted in the same respective line as said Ygr104c, and preferably the activity is increased non-targeted, or
[55481] (b) a polypeptide comprising a polypeptide, a consensus sequence or at least a polypeptide motif as shown in the respective line in column 5 of Table II or in column 8 of Table IV, application no. 10, respectively, and being depicted in the same respective line as said Ygr104c, or a functional equivalent or a homolog thereof as depicted in column 8 of Table II, application no. 10, preferably a homolog or functional equivalent as depicted in column 8 of Table II B, application no. 10, and being depicted in the same respective line as said Ygr104c, and preferably the activity is increased non-targeted.

[55482] Accordingly, in one embodiment, the molecule which activity is to be increased in the process of the invention is the gene product with an activity as a “YGR104C-protein”, preferably it is the molecule of section (a) or (b) of this paragraph.

[55483] In particular, it was observed that in plants, especially in Arabidopsis thaliana, increasing or generating the activity of a gene product non-targeted with the activity of a “YGR104C-protein”, preferably being encoded by a gene comprising the nucleic acid sequence SEQ ID NO. 117482, preferably the coding region thereof, conferred the production of or the increase in stearic acid compared with the wild type control.

[55484] The nucleic acid sequence of Ylr304c from Saccharomyces cerevisiae, e.g. as shown in the respective line in column 5 of Table I, application no. 10, has been published in A. And the activity of the gene product thereof is the activity of aconitate hydratase.

[55485] Accordingly, in one embodiment, the process of the present invention for producing stearic acid in a non-human organism, like a microorganism or a plant or a part thereof, comprises increasing or generating the activity of a gene product with the activity of a gene product conferring the activity of “aconitate hydratase”, especially from Saccharomyces cerevisiae or its functional equivalent or its homolog, e.g. the increase of
[55486] (a) a gene product of a gene comprising the nucleic acid molecule as shown in the respective line in column 5 of Table I, application no. 10, preferably the coding region thereof, or a homolog or a fragment thereof, and being depicted in the same respective line as said Ylr304c, or a functional equivalent or a homolog thereof as shown in column 8 of Table I, application no. 10, preferably the coding region thereof, particularly a homolog or functional equivalent as shown in column 8 of Table I B, application no. 10, and being depicted in the same respective line as said Ylr304c, and preferably the activity is increased non-targeted, or
[55487] (b) a polypeptide comprising a polypeptide, a consensus sequence or at least a polypeptide motif as shown in the respective line in column 5 of Table II or in column 8 of Table IV, application no. 10, respectively, and being depicted in the same respective line as said Ylr304c, or a functional equivalent or a homolog thereof as depicted in column 8 of Table II, application no. 10, preferably a homolog or functional equivalent as depicted in column 8 of Table II B, application no. 10, and being depicted in the same respective line as said Ylr304c, and preferably the activity is increased non-targeted.

[55488] Accordingly, in one embodiment, the molecule which activity is to be increased in the process of the invention is the gene product with an activity as a “aconitate hydratase”, preferably it is the molecule of section (a) or (b) of this paragraph.

[55489] In particular, it was observed that in plants, especially in Arabidopsis thaliana, increasing or generating the activity of a gene product non-targeted with the activity of a “aconitate hydratase”, preferably being encoded by a gene comprising the nucleic acid sequence SEQ ID NO. 66772, preferably the coding region thereof, conferred the production of or the increase in stearic acid compared with the wild type control.

[55490] The nucleic acid sequence of Yor392w from Saccharomyces cerevisiae, e.g. as shown in the respective line in column 5 of Table I, application no. 10, has been published in A. And the activity of the gene product thereof is the activity of yor392w-protein.

[55491] Accordingly, in one embodiment, the process of the present invention for producing stearic acid in a non-human organism, like a microorganism or a plant or a part thereof, comprises increasing or generating the activity of a gene product with the activity of a gene product conferring the activity of “yor392w-protein”, especially from Saccharomyces cerevisiae or its functional equivalent or its homolog, e.g. the increase of
[55492] (a) a gene product of a gene comprising the nucleic acid molecule as shown in the respective line in column 5 of Table I, application no. 10, preferably the coding region thereof, or a homolog or a fragment thereof, and being depicted in the same respective line as said Yor392w, or a functional equivalent or a homolog thereof as shown in column 8 of Table I, application no. 10, preferably the coding region thereof, particularly a homolog or functional equivalent as shown in column 8 of Table I B, application no. 10, and being depicted in the same respective line as said Yor392w, and preferably the activity is increased plastidic, or
[55493] (b) a polypeptide comprising a polypeptide, a consensus sequence or at least a polypeptide motif as shown in the respective line in column 5 of Table II or in column 8 of Table IV, application no. 10, respectively, and being depicted in the same respective line as said Yor392w, or a functional equivalent or a homolog thereof as depicted in column 8 of Table II, application no. 10, preferably a homolog or functional equivalent as depicted in column 8 of Table II B, application no. 10, and being depicted in the same respective line as said Yor392w, and preferably the activity is increased plastidic.

[55494] Accordingly, in one embodiment, the molecule which activity is to be increased in the process of the invention is the gene product with an activity as a “yor392w-protein”, preferably it is the molecule of section (a) or (b) of this paragraph.

[55495] In particular, it was observed that in plants, especially in Arabidopsis thaliana, increasing or generating the activity of a gene product plastidic with the activity of a “yor392w-protein”, preferably being encoded by a gene comprising the nucleic acid sequence SEQ ID NO. 15183, preferably the coding region thereof, conferred the production of or the increase in stearic acid compared with the wild type control.

[55496] The nucleic acid sequence of 51340801_CANOLA from Brassica napus, e.g. as shown in the respective line in column 5 of Table I, application no. 10, is unpublished. And the activity of the gene product thereof is the activity of pyruvate kinase.

[55497] Accordingly, in one embodiment, the process of the present invention for producing stearic acid in a non-human organism, like a microorganism or a plant or a part thereof, comprises increasing or generating the activity of a gene product with the activity of a gene product conferring the activity of “pyruvate kinase”, especially from Brassica napus or its functional equivalent or its homolog, e.g. the increase of
[55498] (a) a gene product of a gene comprising the nucleic acid molecule as shown in the respective line in column 5 of Table I, application no. 10, preferably the coding region thereof, or a homolog or a fragment thereof, and being depicted in the same respective line as said 51340801_CANOLA, or a functional equivalent or a homolog thereof as shown in column 8 of Table I, application no. 10, preferably the coding region thereof, particularly a homolog or functional equivalent as shown in column 8 of Table I B, application no. 10, and being depicted in the same respective line as said 51340801_CANOLA, and preferably the activity is increased plastidic, or
[55499] (b) a polypeptide comprising a polypeptide, a consensus sequence or at least a polypeptide motif as shown in the respective line in column 5 of Table II or in column 8 of Table IV, application no. 10, respectively, and being depicted in the same respective line as said 51340801_CANOLA, or a functional equivalent or a homolog thereof as depicted in column 8 of Table II, application no. 10, preferably a homolog or functional equivalent as depicted in column 8 of Table II B, application no. 10, and being depicted in the same respective line as said 51340801_CANOLA, and preferably the activity is increased plastidic.

[55500] Accordingly, in one embodiment, the molecule which activity is to be increased in the process of the invention is the gene product with an activity as a “pyruvate kinase”, preferably it is the molecule of section (a) or (b) of this paragraph.

[55501] In particular, it was observed that in plants, especially in Arabidopsis thaliana, increasing or generating the activity of a gene product plastidic with the activity of a “pyruvate kinase”, preferably being encoded by a gene comprising the nucleic acid sequence SEQ ID NO. 15532, preferably the coding region thereof, conferred the production of or the increase in stearic acid compared with the wild type control.

[55502] The nucleic acid sequence of 59582753_SOYBEAN from Glycine max, e.g. as shown in the respective line in column 5 of Table I, application no. 10, is unpublished. And the activity of the gene product thereof is the activity of glucose-6-phosphate 1-dehydrogenase.

[55503] Accordingly, in one embodiment, the process of the present invention for producing stearic acid in a non-human organism, like a microorganism or a plant or a part thereof, comprises increasing or generating the activity of a gene product with the activity of a gene product conferring the activity of “glucose-6-phosphate 1-dehydrogenase”, especially from Glycine max or its functional equivalent or its homolog, e.g. the increase of
[55504] (a) a gene product of a gene comprising the nucleic acid molecule as shown in the respective line in column 5 of Table I, application no. 10, preferably the coding region thereof, or a homolog or a fragment thereof, and being depicted in the same respective line as said 59582753_SOYBEAN, or a functional equivalent or a homolog thereof as shown in column 8 of Table I, application no. 10, preferably the coding region thereof, particularly a homolog or functional equivalent as shown in column 8 of Table I B, application no. 10, and being depicted in the same respective line as said 59582753_SOYBEAN, and preferably the activity is increased plastidic, or
[55505] (b) a polypeptide comprising a polypeptide, a consensus sequence or at least a polypeptide motif as shown in the respective line in column 5 of Table II or in column 8 of Table IV, application no. 10, respectively, and being depicted in the same respective line as said 59582753_SOYBEAN, or a functional equivalent or a homolog thereof as depicted in column 8 of Table II, application no. 10, preferably a homolog or functional equivalent as depicted in column 8 of Table II B, application no. 10, and being depicted in the same respective line as said 59582753_SOYBEAN, and preferably the activity is increased plastidic.

[55506] Accordingly, in one embodiment, the molecule which activity is to be increased in the process of the invention is the gene product with an activity as a “glucose-6-phosphate 1-dehydrogenase”, preferably it is the molecule of section (a) or (b) of this paragraph.

[55507] In particular, it was observed that in plants, especially in Arabidopsis thaliana, increasing or generating the activity of a gene product plastidic with the activity of a “glucose-6-phosphate 1-dehydrogenase”, preferably being encoded by a gene comprising the nucleic acid sequence SEQ ID NO. 16883, preferably the coding region thereof, conferred the production of or the increase in stearic acid compared with the wild type control.

[55508] [0105.1.8.10] to [0107.1.8.10] for the disclosure of these paragraphs see [0105.1.8.8] to [0107.1.8.8] above.

[55509] A protein having an activity conferring an increase in the amount or level of the fine chemical stearic acid, upon targeting to the plastids or mitochondria or upon non-targeting, preferably has the structure of the respective polypeptide described herein, in particular of the polypeptides comprising the consensus sequence or at least one polypeptide motifs as shown in the respective line in Table IV, application no. 10, column 8 or of the polypeptide comprising an amino acid sequence as disclosed in the respective line in Table II, application no. 10, columns 5 or 8, or homologs or fragments thereof as described herein, or is encoded by the nucleic acid molecule characterized herein or the nucleic acid molecule according to the invention, for example by the nucleic acid molecule as shown in the respective line in Table I, application no. 10, columns 5 or 8, preferably the coding region thereof, or homologs or fragments thereof and has the herein mentioned activity.

[55510] [0109.1.8.10] too [0110.1.8.10] for the disclosure of this paragraph see [0109.1.8.8] to 0110.1.8.8] above.

[55511] In one embodiment, the process of the present invention comprises one or more of the following steps
[55512] (a) stabilizing a protein conferring the generation or increased expression of a protein encoded by the nucleic acid molecule of the invention or of the polypeptide of the invention, e.g. of a polypeptide having the activity selected from the group consisting of 2-C-methyl-D-erythritol 4-phosphate cytidylyltransferase, 3-deoxy-7-phosphoheptulonate synthase, 3-ketoacyl-CoA thiolase, acetyl-coenzyme A synthetase, acid shock protein, aconitate hydratase, arginine decarboxylase, aspartate-ammonia ligase, At2g45420-protein, ATP-binding component of a transport system, b0283-protein, b0371-protein, b1672-protein, b2032-protein, b2399-protein, b2513-protein, b2849-protein, b3989-protein, b4121-protein, betaine aldehyde dehydrogenase, calcium-dependent protein kinase, cation-transporting ATPase, CCAAT-binding transcription factor, citrate synthase, coproporphyrinogen III oxidase, CTP synthetase, dihydroxyacetone kinase, ethanolamine utilization protein, F-box protein, glucokinase, glucose-6-phosphate 1-dehydrogenase, glutaredoxin, glycerol-3-phosphate dehydrogenase, heat shock transcription factor, isocitrate dehydrogenase, lipoprotein precursor, monothiol glutaredoxin, NADH dehydrogenase subunit N, oxidoreductase, phospho-2-dehydro-3-deoxyheptonate aldolase, protease, protein phosphatase, pyruvate kinase, sll1032-protein, sodium/proton antiporter, transcription factor, tryptophan synthase alpha chain, ycl049c-protein, ydr507c-protein, YGR104C-protein, and yor392w-protein, or of a polypeptide as indicated in the respective line in Table II, application no. 10, columns 5 or 8, or its homologs or fragments, and conferring the production of or an increase in stearic acid, respectively; and/or
[55513] (b) stabilizing a mRNA conferring the generation or increased expression of a FCRP, e.g. protein encoded by the nucleic acid molecule of the invention or its homologs or fragments, or of a mRNA encoding the polypeptide of the present invention having the hereinmentioned activity selected from the group consisting of said activities mentioned in (a) and conferring the production of or an increase in stearic acid, respectively; and/or
[55514] (c) increasing the specific activity of a protein conferring the increased expression of a FCRP, e.g. a protein encoded by the nucleic acid molecule of the invention or of the polypeptide of the present invention having herein-mentioned stearic acid generating or increasing activity, respectively, e.g. of a polypeptide having the activity of a protein as indicated in the respective line in Table II, application no. 10, columns 5 or 8, or its homologs or fragments, or decreasing the inhibitory regulation of the polypeptide of the invention; and/or
[55515] (d) generating or increasing the expression of an endogenous or artificial transcription factor mediating the expression of a protein conferring the generation or increased expression of a FCRP, e.g. a protein encoded by the nucleic acid molecule of the invention or of the polypeptide of the invention having herein-mentioned activity selected from the group consisting of said activities mentioned in (a) and conferring a stearic acid increasing activity, respectively, e.g. of a polypeptide having the activity of a protein as indicated in the respective line in Table II, application no. 10, columns 5 or 8 or its homologs; and/or
[55516] (e) stimulating activity of a protein conferring the increased expression of a FCRP, e.g. a protein encoded by the nucleic acid molecule of the present invention or a polypeptide of the present invention having herein-mentioned activity selected from the group consisting of said activities mentioned in (a) and conferring a stearic acid increasing activity, respectively, e.g. of a polypeptide having the activity of a protein as indicated in the respective line in Table II, application no. 10, columns 5 or 8, or its homologs or fragments, by adding one or more exogenous inducing factors to the non-human organism or parts thereof; and/or
[55517] (f) expressing a transgenic gene encoding a protein conferring the increased expression of a FCRP, e.g. a polypeptide encoded by the nucleic acid molecule of the present invention or a polypeptide of the present invention, having herein-mentioned activity selected from the group consisting of said activities mentioned in (a) and conferring a stearic acid increasing activity, respectively, e.g. of a polypeptide having the activity of a protein as indicated in the respective line in Table II, application no. 10, columns 5 or 8, or its homologs or fragments, and/or
[55518] (g) increasing the copy number of a gene conferring the increased expression of a nucleic acid molecule encoding a FCRP, e.g. a polypeptide encoded by the nucleic acid molecule of the invention or the polypeptide of the invention having herein-mentioned activity selected from the group consisting of said activities mentioned in (a) and conferring a stearic acid increasing activity, respectively, e.g. of a polypeptide having the activity of a protein as indicated in the respective line in Table II, application no. 10, columns 5 or 8, or its homologs or fragments; and/or
[55519] (h) increasing the expression of the endogenous gene encoding the FCRP, polypeptide of the invention, e.g. a polypeptide encoded by the nucleic acid molecule of the invention or the polypeptide of the invention having herein-mentioned activity selected from the group consisting of said activities mentioned in (a) and conferring a stearic acid; increasing activity, respectively, e.g. of a polypeptide having the activity of a protein as indicated in the respective line in Table II, application no. 10, columns 5 or 8, or its homologs or fragments, by adding positive expression or removing negative expression elements, e.g. homologous recombination can be used to either introduce positive regulatory elements like for plants the 35S enhancer into the promoter or to remove repressor elements form regulatory regions. Further gene conversion methods can be used to disrupt repressor elements or to enhance to activity of positive elements. Positive elements can be randomly introduced in plants by T-DNA or transposon mutagenesis and lines can be identifled in which the positive elements have be integrated near to a gene of the invention, the expression of which is thereby enhanced; and/or
[55520] (i) modulating growth conditions of the non-human organism in such a manner, that the expression or activity of the gene encoding the FCRP, e.g. a protein of the invention or the protein itself is enhanced, for example microorganisms or plants can be grown for example under a higher temperature regime leading to an enhanced expression of heat shock proteins, which can lead to an enhanced stearic acid production, respectively; and/or
[55521] (j) selecting of non-human organisms with especially high activity of the proteins of the invention from natural or from mutagenized resources and breeding them into the target organisms, e.g. the elite crops; and/or
[55522] (k) directing a protein encoded by the nucleic acid molecule of the invention or of the polypeptide of the present invention having herein-mentioned activity selected from the group consisting of said activities mentioned in (a) and conferring a stearic acid increasing activity, respectively, e.g. of a polypeptide having the activity of a protein as indicated in the respective line in Table II, application no. 10, columns 5 or 8, or its homologs or fragments, if for the corresponding nucleic acid molecule in the respective line in column 6 of Table I the term “plastidic” is indicated, to the plastids by the addition of a plastidial targeting sequence or if for the corresponding nucleic acid molecule in the respective line in column 6 of Table I the term “mitochondrial” is indicated, to the mitochondria by the addition of a mitochondrial targeting sequence; and/or
[55523] (l) generating the expression of a protein encoded by the nucleic acid molecule of the invention or of the polypeptide of the present invention having herein-mentioned activity selected from the group consisting of said activities mentioned in (a) and conferring a stearic acid increasing activity, respectively, e.g. of a polypeptide having the activity of a protein as indicated in the respective line in Table II, application no. 10, columns 5 or 8, or its homologs or fragments, if for the corresponding nucleic acid molecule in the respective line in column 6 of Table I the term “plastidic” or “mitochondrial” is indicated, in these organelles by the stable or transient transformation, advantageously stable transformation, of organelles, preferably plastids or mitochondria, with an inventive nucleic acid sequence preferably in form of an expression cassette containing said sequence leading to the expression of the nucleic acids or polypeptides of the invention in the respective organelle; and/or
[55524] (m) generating the expression of a protein encoded by the nucleic acid molecule of the invention or of the polypeptide of the present invention having herein-mentioned activity selected from the group consisting of said activities mentioned in (a) and conferring a stearic acid increasing activity, respectively, e.g. of a polypeptide having the activity of a protein as indicated in the respective line in Table II, application no. 10, columns 5 or 8, or its homologs or fragments, if for the corresponding nucleic acid molecule in the respective line in column 6 of Table I the term “plastidic” or “mitochondrial” is indicated, in these organelles by integration of a nucleic acid of the invention into the genome of the respective organelle under control of preferable a promoter selective for the respective organelle.

[55525] Preferably, said mRNA is the coding region of the nucleic acid molecule of the present invention and/or the protein conferring the increased expression of a protein encoded by the coding region of the nucleic acid molecule of the present invention alone or linked to a transit nucleic acid sequence or transit peptide encoding nucleic acid sequence or the polypeptide having the herein mentioned activity, e.g. conferring the generation of or increase of stearic acid, respectively, after increasing the expression or activity of the encoded polypeptide, non-targeted or in organelles such as plastids and/or mitochondria, preferably plastids, or having the activity of a polypeptide having an activity as the protein as shown in the respective line in Table II, application no. 10, column 3, or its homologs. Preferably the increase of stearic acid, respectively, takes place non-targeted or in plastids and/or mitochondria, preferably non-targeted or in plastids.

[55526] [0113.1.8.10] to [0122.1.8.10] for the disclosure of these paragraphs see [0113.1.8.8] to [0122.1.8.8] above.

[55527] The activation of an endogenous polypeptide having above-mentioned activity, e.g. having the activity of a protein as shown in the respective line in Table II, application no. 10, column 3 or of the polypeptide of the invention, e.g. conferring the increase of the fine chemical stearic acid, respectively, by increase of expression or activity in the cytoplasm, and/or in the cytosol, and/or in an organelle, such as plastids or mitochondria, can also be increased by introducing a synthetic transcription factor, which binds close to the coding region of the gene encoding the protein as shown in the respective line in Table II, application no. 10, column 5 or 8, or homologs or fragments thereof, and activates its transcription. A chimeric zinc finger protein can be constructed, which comprises a specific DNA-binding domain and an activation domain as e.g. the VP16 domain of Herpes Simplex virus. The specific binding domain can bind to the regulatory region of the gene encoding the protein as shown in the respective line in Table II, application no. 10, column 5 or 8, or homologs or fragments thereof. The expression of the chimeric transcription factor in a non-human organism, in particular in a plant, leads to a specific expression of the protein as shown in the respective line in Table II, application no. 10, column 5 or 8, or homologs or fragments thereof, see e.g. in W001/52620, Oriz, Proc. Natl. Acad. Sci. USA 99, 13290 (2002), or Guan, Proc. Natl. Acad. Sci. USA 99, 13296 (2002).

[55528] [0124.1.8.10] to [0127.1.8.10] for the disclosure of these paragraphs see [0124.1.8.8] to [0127.1.8.8] above.

[55529] Owing to the introduction of a gene or a plurality of genes conferring the expression of the nucleic acid molecule of the invention or the polypeptide of the invention, for example the nucleic acid construct mentioned below, or encoding the protein as shown in the respective line in Table II, application no. 10, column 5 or 8, or homologs or fragments thereof, into a non-human organism alone or in combination with other genes, it is possible not only to increase the biosynthetic flux towards the end product, but also to increase, modify or create de novo an advantageous, preferably novel metabolites composition in the non-human organism, e.g. an advantageous composition comprising a higher content of (from a viewpoint of nutritional physiology limited) stearic acid and if desired other fatty acids, and/or other metabolites, in free or bound form.

[55530] for the disclosure of this paragraph see [0129.1.8.8] above.

[55531] Accordingly, in one embodiment, the process according to the invention relates to a process, which comprises:
[55532] (a) providing a non-human organism, preferably a microorganism, a plant cell, a plant tissue, a plant or a part thereof, more preferably a microorganism, a plant tissue, a plant or a part thereof;
[55533] (b) increasing the activity of a protein as shown in the respective line in Table II, application no. 10, column 3 or of a polypeptide being encoded by the respective nucleic acid molecule of the present invention and described below, e.g. conferring an increase of the fine chemical stearic acid, respectively, in the non-human organism, preferably in the microorganism, the plant cell, the plant tissue, the plant or a part thereof, more preferably a microorganism, a plant tissue, a plant or a part thereof, especially cytoplasmic or in an organelle, like plastids or mitochondria,
[55534] (c) growing the non-human organism, preferably the microorganism, the plant cell, the plant tissue, the plant or a part thereof, under conditions which permit the production of said fine chemical in the non-human organism, preferably the microorganism, the plant cell, the plant tissue, the plant or a part thereof; and
[55535] (d) if desired, recovering, optionally isolating, said fine chemical, in free and/or bound form, and, optionally further free and/or bound fatty acids, and/or other metabolites synthesized by the non-human organism, the microorganism, the plant cell, the plant tissue, the plant or a part thereof.

[55536] [0131.1.8.10] to [0139.1.8.10] for the disclosure of these paragraphs see [0131.1.8.8] to [0139.1.8.8] above.

[55537] In another embodiment, the invention relates to a (isolated) nucleic acid molecule, which comprises a nucleic acid molecule selected from the group consisting of:
[55538] (a) a nucleic acid molecule encoding a polypeptide shown in Table II, application no. 10, column 5 or 8, preferably shown in Table II B, application no. 10, column 8, or a homolog or a fragment thereof;
[55539] (b) a nucleic acid molecule shown in Table I, application no. 10, column 5 or 8, preferably shown in Table I B, application no. 10, column 8, preferably the coding region thereof, or a homolog or a fragment thereof;
[55540] (c) a nucleic acid molecule, which, as a result of the degeneracy of the genetic code, can be derived from a polypeptide sequence depicted in column 5 or 8 of Table II, application no. 10, preferably in column 8 of Table II B, application no. 10;
[55541] (d) a nucleic acid molecule having at least 30% identity, preferably at least 40%, 50%, 60%, 70%, 75%, 80%, 85%, 90%, 95%, 96%, 97%, 98%, 99%, 99.5%, with the nucleic acid molecule sequence of a polynucleotide comprising the nucleic acid molecule shown in column 5 or 8 of Table I, application no. 10, preferably shown in column 8 of Table I B, application no. 10, preferably the coding region thereof;
[55542] (e) a nucleic acid molecule encoding a polypeptide having at least 30% identity, preferably at least 40%, 50% 60%, 70%, 75%, 80%, 85%, 90%, 95%, 96%, 97%, 98%, 99%, 99.5%, identity with the amino acid sequence of the polypeptide encoded by the nucleic acid molecule of (a), (b), (c) or (d);
[55543] (f) a nucleic acid molecule which hybridizes with a nucleic acid molecule of (a), (b), (c), (d) or (e) under stringent hybridization conditions;
[55544] (g) a nucleic acid molecule encoding a polypeptide which can be isolated with the aid of monoclonal or polyclonal antibodies made against a polypeptide encoded by one of the nucleic acid molecules of (a), (b), (c), (d), (e) or (f);
[55545] (h) a nucleic acid molecule encoding a polypeptide comprising the consensus sequence or one or more polypeptide motifs as shown in column 8 of Table IV, application no. 10;
[55546] (i) a nucleic acid molecule encoding a polypeptide having the activity represented by a respective protein as depicted in column 5 of Table II, application no. 10;
[55547] (j) a nucleic acid molecule comprising a polynucleotide which is obtained by amplifying a cDNA library or a genomic library using the primers in Table III, application no. 10, column 8;
[55548] and
[55549] (k) nucleic acid molecule which is obtainable by screening a suitable nucleic acid library, especially a cDNA library and/or a genomic library, under stringent hybridization conditions with a probe comprising one of the sequences of the nucleic acid molecule of (a), (b), (c), (d), (e), (f), (g), (h), (i) or (j) or with a fragment of at least 15 nt, preferably 20 nt, 30 nt, 50 nt, 100 nt, 200 nt,500 nt, 1000 nt, 1500 nt, 2000 nt or 3000 nt of the nucleic acid molecule characterized in (a), (b), (c), (d), (e), (f), (g), (h), (i) or (j);
[55550] or a nucleic acid molecule comprising a sequence which is complementary thereto.
   (All the references to Tables I to IV are references to the corresponding lines of Tables I to IV.)

[55551] In a preferred embodiment thereof said nucleic acid molecule according to (a), (b), (c), (d), (e), (f), (g), (h), (i), (j) or (k) encodes a polypeptide which has the activity of the respective polypeptide represented by a protein comprising a polypeptide as depicted in the respective line in column 5 of Table II, application no. 10.

[55552] In another preferred embodiment thereof said nucleic acid molecule according to (a), (b), (c), (d), (e), (f), (g), (h), (i), (j) or (k) confers a generation or an increase of the respective fine chemical in a non-human organism or a part thereof as compared to a corresponding wild-type non-human organism or part thereof.

[55553] In another preferred embodiment thereof said nucleic acid molecule according to (a), (b), (c), (d), (e), (f), (g), (h), (i), (j) or (k) encodes a polypeptide which has the activity of the respective polypeptide represented by a protein as depicted in the respective line in column 5 of Table II application no. 10 and confers a generation or an increase of the respective fine chemical in a non-human organism or a part thereof as compared to a corresponding wild-type non-human organism or part thereof.

[55554] In another embodiment, the invention relates to a (isolated) nucleic acid molecule, which comprises a nucleic acid molecule selected from the group consisting of:
[55555] (a) a nucleic acid molecule encoding a polypeptide shown in Table II, column 5 or 8, application no. 10, preferably shown in Table II A, application no. 10, in column 5 or in Table II A, application no. 10, column 8 or in Table II B, application no. 10, column 8, or a homolog or a fragment thereof;
[55556] (b) a nucleic acid molecule shown in Table I, application no. 10, column 5 or 8, preferably shown in Table I A, application no. 10, in column 5 or in Table I A, application no. 10, column 8 or in Table I B, application no. 10, column 8, preferably the coding region thereof, or a homolog or a fragment thereof;
[55557] (c) a nucleic acid molecule, which, as a result of the degeneracy of the genetic code, can be derived from a polypeptide sequence depicted in column 5 or 8 of Table II, application no. 10, preferably shown in Table II A, application no. 10, in column 5 or in Table II A, application no. 10, column 8 or in Table II B, application no. 10, column 8;
[55558] (d) a nucleic acid molecule having at least 30% identity, preferably at least 40%, 50%, 60%, 70%, 75%, 80%, 85%, 90%, 95%, 96%, 97%, 98%, 99%, 99.5%, with the nucleic acid molecule sequence of a polynucleotide comprising the nucleic acid molecule shown in column 5 or 8 of Table I, application no. 10, preferably shown in Table I A, application no. 10, in column 5 or in Table I A, application no. 10, column 8 or in Table I B column 8, preferably the coding region thereof;
[55559] (e) a nucleic acid molecule encoding a polypeptide having at least 30% identity, preferably at least 40%, 50% 60%, 70%, 75%, 80%, 85%, 90%, 95%, 96%, 97%, 98%, 99%, 99.5%, identity with the amino acid sequence of the polypeptide encoded by the nucleic acid molecule of (a), (b), (c) or (d);
[55560] (f) a nucleic acid molecule which hybridizes with a nucleic acid molecule of (a), (b), (c), (d) or (e) under stringent hybridization conditions;
[55561] (g) a nucleic acid molecule encoding a polypeptide which can be isolated with the aid of monoclonal or polyclonal antibodies made against a polypeptide encoded by one of the nucleic acid molecules of (a), (b), (c), (d), (e) or (f);
[55562] (h) a nucleic acid molecule encoding a polypeptide comprising the consensus sequence or one or more polypeptide motifs as shown in column 8 of Table IV, application no. 10;
[55563] (i) a nucleic acid molecule encoding a polypeptide having the activity represented by a respective protein as depicted in column 5 of Table II, application no. 10;
[55564] (j) a nucleic acid molecule comprising a polynucleotide which is obtained by amplifying a cDNA library or a genomic library using the primers in Table III, application no. 10, column 8;
[55565] and
[55566] (k) nucleic acid molecule which is obtainable by screening a suitable nucleic acid library, especially a cDNA library and/or a genomic library, under stringent hybridization conditions with a probe comprising one of the sequences of the nucleic acid molecule of (a), (b), (c), (d), (e), (f), (g), (h), (i) or (j) or with a fragment thereof having at least 15 nt, preferably 20 nt, 30 nt, 50 nt, 100 nt, 200 nt,500 nt, 1000 nt, 1500 nt, 2000 nt or 3000 nt of the nucleic acid molecule complementary to a nucleic acid sequence characterized in (a), (b), (c), (d), (e), (f), (g), (h), (i) or (j);
[55567] or a nucleic acid molecule comprising a sequence which is complementary thereto;
   whereby, preferably, the nucleic acid molecule according to (a), (b), (c), (d), (e), (f), (g), (h), (i), (j) or (k) distinguishes over the sequence depicted in Table I A and/or I B, application no. 10, column 5 or 8, or the coding regions thereof, by one or more nucleotides (especially but not exceeding 5%, preferably 4%, 3%, 2%, 1%, 0.5%, 0.2% or 0.1%). In an embodiment, the nucleic acid molecule of the invention does not consist of the sequence shown in Table I A and/or I B, application no. 10, column 5 or 8, or the coding region thereof. In another embodiment, the nucleic acid molecule of the present invention, preferably the coding region thereof, is at least 30%, 40%, 50%, 60%, 70%, 80%, 90%, 95% identical but less than 100%, 99.999%, 99.99%, 99.9%, 99%, 98%, 97%, 96% or 95% identical to the sequence shown in Table I A and/or I B, application no. 10, column 5 or 8, or the coding region thereof, respectively. In a further embodiment the nucleic acid molecule does not encode the polypeptide sequence shown in Table II A and/or II B, application no. 10, column 5 or 8 but homologs thereof. Accordingly, in one embodiment, the nucleic acid molecule of the present invention encodes in one embodiment a polypeptide which differs at least in one or more amino acids (especially but not exceeding 5%, preferably 4%, 3%, 2%, 1%, 0.5%, 0.2% or 0.1%) from the polypeptide shown in Table II, application no. 10, column 5 or 8 and does not encode a protein of the sequence shown in Table II A and/or II B, application no. 10, column 5 or 8. Accordingly, in one embodiment, the protein encoded by a sequence of a nucleic acid according to (a), (b), (c), (d), (e), (f), (g), (h), (i), (j) or (k) does not consist of the sequence shown in Table I A and/or I B, application no. 10, column 5 or 8, or the coding region thereof. In a further embodiment, the protein of the present invention is at least 30%, 40%, 50%, 60%, 70%, 80%, 90%, 95% identical to protein sequence depicted in Table II A and/or II B, application no. 10, column 5 or 8 but less than 100%, preferably less than 99.999%, 99.99%, 99.9%, 99%, 98%, 97%, 96% or 95% identical to the sequence shown in Table II A and/or II B, application no. 10, column 5 or 8.
   (All the references to Tables I to IV are references to the corresponding lines of Tables I to IV.)

[55568] In a preferred embodiment thereof said nucleic acid molecule according to (a), (b), (c), (d), (e), (f), (g), (h), (i), (j) or (k) encodes a polypeptide which has the activity of the respective polypeptide represented by a protein comprising a polypeptide as depicted in the respective line in column 5 of Table II, application no. 10.

[55569] In another preferred embodiment thereof said nucleic acid molecule according to (a), (b), (c), (d), (e), (f), (g), (h), (i), (j) or (k) confers a generation or an increase of the respective fine chemical in a non-human organism or a part thereof as compared to a corresponding wild-type non-human organism or part thereof.

[55570] In another preferred embodiment thereof said nucleic acid molecule according to (a), (b), (c), (d), (e), (f), (g), (h), (i), (j) or (k) encodes a polypeptide which has the activity of the respective polypeptide represented by a protein as depicted in the respective line in column 5 of Table II, application no. 10, and confers a generation or an increase of the respective fine chemical in a non-human organism or a part thereof as compared to a corresponding wild-type non-human organism or part thereof.

[55571] [0144.1.8.10] to [0155.1.8.10] for the disclosure of these paragraphs see [0144.1.8.8] to [0155.1.8.8] above.

[55572] In a preferred embodiment a nucleic acid construct, for example an expression cassette, comprises upstream, i.e. at the 5′ end of the encoding sequence, a promoter and downstream, i.e. at the 3′ end, a polyadenylation signal and optionally other regulatory elements which are operably linked to the intervening encoding sequence with one of the nucleic acids as depicted in the respective line in Table I, application no. 10, column 5 or 8, preferably the coding region thereof, or a homolog or a fragment thereof. By an operable linkage is meant the sequential arrangement of promoter, encoding sequence, terminator, optionally other regulatory elements and optionally targeting sequences in such a way that each of the regulatory elements/targeting sequence can fulfill its function in the expression of the encoding sequence in due manner. In one embodiment the sequences preferred for operable linkage are targeting sequences for ensuring subcellular localization in organelles, like plastids or mitochondria. However, targeting sequences for ensuring subcellular localization in the endoplasmic reticulum (=ER), in the nucleus, in oil corpuscles or other compartments may also be employed as well as translation promoters such as the 5′ lead sequence in tobacco mosaic virus (Gallie et al., Nucl. Acids Res. 15, 8693 (1987)).

[55573] for the disclosure of this paragraph see [0157.1.8.8] above.

[55574] In an embodiment, the invention relates to an expression cassette, comprising
[55575] 1) a promoter, preferably a promoter selected from the group consisting of Big35S, PCUbi, Super and USP;
[55576] 2) a nucleic acid molecule selected from the group consisting of
   [55577] (a) a nucleic acid molecule encoding a polypeptide shown in Table II, application no. 10, column 5 or 8, preferably shown in Table II A, application no. 10, column 5, or in Table II A, application no. 10, column 8, or in Table II B, application no. 10, column 8, or a homolog or a fragment thereof;
   [55578] (b) a nucleic acid molecule shown in Table I, application no. 10, column 5 or 8, preferably shown in Table I A, application no. 10, column 5, or in Table I A, application no. 10, column 8, or in Table I B, application no. 10, column 8, preferably the coding region thereof, or a homolog or a fragment thereof;
   [55579] (c) a nucleic acid molecule, which, as a result of the degeneracy of the genetic code, can be derived from a polypeptide sequence depicted in column 5 or 8 of Table II, application no. 10, preferably shown in Table II A, application no. 10, column 5, or in Table II A, application no. 10, column 8, or in Table II B, application no. 10, column 8;
   [55580] (d) a nucleic acid molecule having at least 30% identity, preferably at least 40%, 50%, 60%, 70%, 75%, 80%, 85%, 90%, 95%, 96%, 97%, 98%, 99%, 99.5%, with the nucleic acid molecule sequence of a polynucleotide comprising the nucleic acid molecule shown in column 5 or 8 of Table I, application no. 10, preferably shown in Table I A, application no. 10, column 5, or in Table I A, application no. 10, column 8, or in Table I B, application no. 10, column 8, preferably the coding region thereof;
   [55581] (e) a nucleic acid molecule encoding a polypeptide having at least 30% identity, preferably at least 40%, 50% 60%, 70%, 75%, 80%, 85%, 90%, 95%, 96%, 97%, 98%, 99%, 99.5%, identity with the amino acid sequence of the polypeptide encoded by the nucleic acid molecule of (a), (b), (c) or (d);
   [55582] (f) a nucleic acid molecule which hybridizes with a nucleic acid molecule of (a), (b), (c), (d) or (e) under stringent hybridization conditions;
   [55583] (g) a nucleic acid molecule encoding a polypeptide which can be isolated with the aid of monoclonal or polyclonal antibodies made against a polypeptide encoded by one of the nucleic acid molecules of (a), (b), (c), (d), (e) or (f);
   [55584] (h) a nucleic acid molecule encoding a polypeptide comprising the consensus sequence or one or more polypeptide motifs as shown in column 8 of Table IV, application no. 10;
   [55585] (i) a nucleic acid molecule encoding a polypeptide having the activity represented by a respective protein as depicted in column 5 of Table II, application no. 10;
   [55586] (j) a nucleic acid molecule comprising a polynucleotide which is obtained by amplifying a cDNA library or a genomic library using the primers in Table III, application no. 10, column 8;
   [55587] and
   [55588] (k) nucleic acid molecule which is obtainable by screening a suitable nucleic acid library, especially a cDNA library and/or a genomic library, under stringent hybridization conditions with a probe comprising one of the sequences of the nucleic acid molecule of (a), (b), (c), (d), (e), (f), (g), (h), (i) or (j) or with a fragment of at least 15 nt, preferably 20 nt, 30 nt, 50 nt, 100 nt, 200 nt,500 nt, 1000 nt, 1500 nt, 2000 nt or 3000 nt of the nucleic acid molecule characterized in (a), (b), (c), (d), (e), (f), (g), (h), (i) or (j);
   [55589] or a nucleic acid molecule comprising a sequence which is complementary thereto. and, optionally
[55590] 3) nucleic acid molecule encoding a transit peptide, preferably encoding a plastidal transit peptide or a mitochondrial transit peptide;
   which are operable linked.
   (All the references to Tables I to IV are references to the corresponding lines of Tables I to IV.)

[55591] In a preferred embodiment thereof said nucleic acid molecule according to 2 (a), (b), (c), (d), (e), (f), (g), (h), (i), (j) or (k) encodes a polypeptide which has the activity of the respective polypeptide represented by a protein comprising a polypeptide as depicted in the respective line in column 5 of Table II, application no. 10.

[55592] In another preferred embodiment thereof said nucleic acid molecule according to 2 (a), (b), (c), (d), (e), (f), (g), (h), (i), (j) or (k) confers a generation or an increase of the respective fine chemical in a non-human organism or a part thereof as compared to a corresponding wild-type non-human organism or part thereof.

[55593] In another preferred embodiment thereof said nucleic acid molecule according to 2 (a), (b), (c), (d), (e), (f), (g), (h), (i), (j) or (k) encodes a polypeptide which has the activity of the respective polypeptide represented by a protein as depicted in the respective line in column 5 of Table II application no. 10 and confers a generation or an increase of the respective fine chemical in a non-human organism or a part thereof as compared to a corresponding wild-type non-human organism or part thereof.

[55594] In another embodiment thereof the expression cassette comprises 3) a nucleic acid molecule encoding a transit peptide, preferably encoding a plastidal transit peptide, especially in case in column 6 of Table I, application no. 10, in the same line as of the respective nucleic acid molecule according to 2) “plastidic” is depicted, or encoding a mitochondrial transit peptide, especially in case in column 6 of Table I, application no. 10, in the same line as of the respective nucleic acid molecule according to 2) “mitochondrial” is depicted.

[55595] In another embodiment thereof the expression cassette does not comprise 3) a nucleic acid molecule encoding a transit peptide, especially in case in column 6 of Table I, application no. 10, in the same line as of the respective nucleic acid molecule according to 2) “non-targeted” is depicted.

[55596] In a further embodiment, the invention relates to an expression cassette, comprising
[55597] 1) a promoter, preferably a promoter selected from the group consisting of Big35S, PCUbi, Super and USP;
[55598] 2) a nucleic acid molecule selected from the group consisting of
   [55599] (a) a nucleic acid molecule encoding a polypeptide shown in Table II, application no. 10, column 5 or 8, preferably shown in Table II A, application no. 10, column 5, or in Table II A, application no. 10, column 8, or in Table II B, application no. 10, column 8, or a homolog or a fragment thereof;
   [55600] (b) a nucleic acid molecule shown in Table I, application no. 10, column 5 or 8, preferably shown in Table I A, application no. 10, column 5, or in Table I A, application no. 10, column 8, or in Table I B, application no. 10, column 8, preferably the coding region thereof, or a homolog or a fragment thereof;
   [55601] (c) a nucleic acid molecule, which, as a result of the degeneracy of the genetic code, can be derived from a polypeptide sequence depicted in column 5 or 8 of Table II, application no. 10, preferably shown in Table II A, application no. 10, column 5, or in Table II A, application no. 10, column 8, or in Table II B, application no. 10, column 8;
   [55602] (d) a nucleic acid molecule having at least 30% identity, preferably at least 40%, 50%, 60%, 70%, 75%, 80%, 85%, 90%, 95%, 96%, 97%, 98%, 99%, 99.5%, with the nucleic acid molecule sequence of a polynucleotide comprising the nucleic acid molecule shown in column 5 or 8 of Table I, application no. 10, preferably shown in Table I A, application no. 10, column 5, or in Table I A, application no. 10, column 8,or in Table I B, application no. 10, column 8, preferably the coding region thereof;
   [55603] (e) a nucleic acid molecule encoding a polypeptide having at least 30% identity, preferably at least 40%, 50% 60%, 70%, 75%, 80%, 85%, 90%, 95%, 96%, 97%, 98%, 99%, 99.5%, identity with the amino acid sequence of the polypeptide encoded by the nucleic acid molecule of (a), (b), (c) or (d);
   [55604] (f) a nucleic acid molecule which hybridizes with a nucleic acid molecule of (a), (b), (c), (d) or (e) under stringent hybridization conditions;
   [55605] (g) a nucleic acid molecule encoding a polypeptide which can be isolated with the aid of monoclonal or polyclonal antibodies made against a polypeptide encoded by one of the nucleic acid molecules of (a), (b), (c), (d), (e) or (f);
   [55606] (h) a nucleic acid molecule encoding a polypeptide comprising the consensus sequence or one or more polypeptide motifs as shown in column 8 of Table IV, application no. 10;
   [55607] (i) a nucleic acid molecule encoding a polypeptide having the activity represented by a respective protein as depicted in column 5 of Table II, application no. 10;
   [55608] (j) a nucleic acid molecule comprising a polynucleotide which is obtained by amplifying a cDNA library or a genomic library using the primers in Table III, application no. 10, column 8;
   [55609] and
   [55610] (k) nucleic acid molecule which is obtainable by screening a suitable nucleic acid library, especially a cDNA library and/or a genomic library, under stringent hybridization conditions with a probe comprising one of the sequences of the nucleic acid molecule of (a), (b), (c), (d), (e), (f), (g), (h), (i) or (j) or with a fragment of at least 15 nt, preferably 20 nt, 30 nt, 50 nt, 100 nt, 200 nt,500 nt, 1000 nt, 1500 nt, 2000 nt or 3000 nt of the nucleic acid molecule characterized in (a), (b), (c), (d), (e), (f), (g), (h), (i) or (j);
   [55611] or a nucleic acid molecule comprising a sequence which is complementary thereto; and, optionally
[55612] 3) nucleic acid molecule encoding a transit peptide, preferably encoding a plastidal transit peptide or a mitochondrial transit peptide;
   which are operable linked and
   whereby, preferably, the nucleic acid molecule according to 2 (a), (b), (c), (d), (e), (f), (g), (h), (i), (j) or (k) distinguishes over the sequence depicted in Table I A and/or I B, application no. 10, column 5 or 8, or the coding region thereof, by one or more nucleotides (especially but not exceeding 5%, preferably 4%, 3%, 2%, 1%, 0.5%, 0.2% or 0.1%). In an embodiment, the nucleic acid molecule of the invention according to 2) does not consist of the sequence shown in Table I A and/or I B, application no. 10, column 5 or 8, or the coding region thereof. In another embodiment, the nucleic acid molecule of the present invention, preferably the coding region thereof, is at least 30%, 40%, 50%, 60%, 70%, 80%, 90%, 95% identical but less than 100%, 99.999%, 99.99%, 99.9%, 99%, 98%, 97%, 96% or 95% identical to the sequence shown in Table I A and/or I B, application no. 10, column 5 or 8, or the coding region thereof, respectively. In a further embodiment the nucleic acid molecule does not encode the polypeptide sequence shown in Table II A and/or II B, application no. 10, column 5 or 8 but homologs thereof.

[55613] Accordingly, in one embodiment, the nucleic acid molecule of the present invention encodes in one embodiment a polypeptide which differs at least in one or more amino acids (especially but not exceeding 5%, preferably 4%, 3%, 2%, 1%, 0.5%, 0.2% or 0.1%) from the polypeptide shown in Table II, application no. 10, column 5 or 8 and does not encode a protein of the sequence shown in Table II A and/or II B, application no. 10, column 5 or 8. Accordingly, in one embodiment, the protein encoded by a sequence of a nucleic acid according to 2(a), (b), (c), (d), (e), (f), (g), (h), (i), (j) or (k) does not consist of the sequence shown in Table I A and/or I B, application no. 10, column 5 or 8, or the coding region thereof. In a further embodiment, the protein of the present invention is at least 30%, 40%, 50%, 60%, 70%, 80%, 90%, 95% identical to protein sequence depicted in Table II A and/or II B, application no. 10, column 5 or 8 but less than 100%, 99.999%, 99.99%, 99.9%, 99%, 98%, 97%, 96% or 95% identical to the sequence shown in Table II A and/or II B, application no. 10, column 5 or 8.

(All the references to Tables I to IV are references to the corresponding lines of Tables I to IV.)

[55614] In a preferred embodiment thereof said nucleic acid molecule according to 2 (a), (b), (c), (d), (e), (f), (g), (h), (i), (j) or (k) encodes a polypeptide which has the activity of the respective polypeptide represented by a protein comprising a polypeptide as depicted in the respective line in column 5 of Table II, application no. 10.

[55615] In another preferred embodiment thereof said nucleic acid molecule according to 2 (a), (b), (c), (d), (e), (f), (g), (h), (i), (j) or (k) confers a generation or an increase of the respective fine chemical in a non-human organism or a part thereof as compared to a corresponding wild-type non-human organism or part thereof.

[55616] In another preferred embodiment thereof said nucleic acid molecule according to 2 (a), (b), (c), (d), (e), (f), (g), (h), (i), (j) or (k) encodes a polypeptide which has the activity of the respective polypeptide represented by a protein as depicted in the respective line in column 5 of Table II application no. 10 and confers a generation or an increase of the respective fine chemical in a non-human organism or a part thereof as compared to a corresponding wild-type non-human organism or part thereof.

[55617] In another embodiment thereof the expression cassette comprises 3) a nucleic acid molecule encoding a transit peptide, preferably encoding a plastidal transit peptide, especially in case in column 6 of Table I, application no. 10, in the same line as of the respective nucleic acid molecule according to 2) “plastidic” is depicted, or encoding a mitochondrial transit peptide, especially in case in column 6 of Table I, application no. 10, in the same line as of the respective nucleic acid molecule according to 2) “mitochondrial” is depicted.

[55618] In another embodiment thereof the expression cassette does not comprise 3) a nucleic acid molecule encoding a transit peptide, especially in case in column 6 of Table I, application no. 10, in the same line as of the respective nucleic acid molecule according to 2) “non-targeted” is depicted.

[55619] In an embodiment the present invention relates to an expresssion cassette comprising a) a promoter, preferably a promoter selected from the group consisting of Big35S, PCUbi, Super and USP, in particular p-PcUBI; and b) the nucleic acid SEQ ID NO. 1061, or a homolog or fragment thereof, or a homolog thereof being depicted in Table I, application no. 10, column 8, in the same line as SEQ ID NO. 1061, preferably the coding region thereof, a homolog or a fragment thereof; which are operable linked.

[55620] In an embodiment thereof the expression cassette comprises in addition c) a nucleic acid molecule encoding a transit peptide, especially a plastidal transit petide in case in Table I, application no. 10, in column 6 in the same line as SEQ ID NO. 1061 is depicted, plastidic is mentioned, or a mitochondrial transit peptide in case in Table I, application no. 10, in column 6 in the same line as SEQ ID NO. 1061 is depicted, mitochondrial is mentioned; which is operable linked, too.

[55621] In another embodiment thereof the expression cassette does not comprise an additional transit peptide in case in Table I, application no. 10, in column 6 in the same line as SEQ ID NO. 1061 is depicted, non-targeted is mentioned.

[55622] In an embodiment the present invention relates to an expresssion cassette comprising a) a promoter, preferably a promoter selected from the group consisting of Big35S, PCUbi, Super and USP, in particular p-PcUBI; and b) the nucleic acid SEQ ID NO. 1298, or a homolog or fragment thereof, or a homolog thereof being depicted in Table I, application no. 10, column 8, in the same line as SEQ ID NO. 1298, preferably the coding region thereof, a homolog or a fragment thereof; which are operable linked.

[55623] In an embodiment thereof the expression cassette comprises in addition c) a nucleic acid molecule encoding a transit peptide, especially a plastidal transit petide in case in Table I, application no. 10, in column 6 in the same line as SEQ ID NO. 1298 is depicted, plastidic is mentioned, or a mitochondrial transit peptide in case in Table I, application no. 10, in column 6 in the same line as SEQ ID NO. 1298 is depicted, mitochondrial is mentioned; which is operable linked, too.

[55624] In another embodiment thereof the expression cassette does not comprise an additional transit peptide in case in Table I, application no. 10, in column 6 in the same line as SEQ ID NO. 1298 is depicted, non-targeted is mentioned.

[55625] In an embodiment the present invention relates to an expresssion cassette comprising a) a promoter, preferably a promoter selected from the group consisting of Big35S, PCUbi, Super and USP, in particular p-Super; and b) the nucleic acid SEQ ID NO. 120810, or a homolog or fragment thereof, or a homolog thereof being depicted in Table I, application no. 10, column 8, in the same line as SEQ ID NO. 120810, preferably the coding region thereof, a homolog or a fragment thereof; which are operable linked.

[55626] In an embodiment thereof the expression cassette comprises in addition c) a nucleic acid molecule encoding a transit peptide, especially a plastidal transit petide in case in Table I, application no. 10, in column 6 in the same line as SEQ ID NO. 120810 is depicted, plastidic is mentioned, or a mitochondrial transit peptide in case in Table I, application no. 10, in column 6 in the same line as SEQ ID NO. 120810 is depicted, mitochondrial is mentioned; which is operable linked, too.

[55627] In another embodiment thereof the expression cassette does not comprise an additional transit peptide in case in Table I, application no. 10, in column 6 in the same line as SEQ ID NO. 120810 is depicted, non-targeted is mentioned.

[55628] In an embodiment the present invention relates to an expresssion cassette comprising a) a promoter, preferably a promoter selected from the group consisting of Big35S, PCUbi, Super and USP, in particular p-PcUBI; and b) the nucleic acid SEQ ID NO. 1623, or a homolog or fragment thereof, or a homolog thereof being depicted in Table I, application no. 10, column 8, in the same line as SEQ ID NO. 1623, preferably the coding region thereof, a homolog or a fragment thereof; which are operable linked.

[55629] In an embodiment thereof the expression cassette comprises in addition c) a nucleic acid molecule encoding a transit peptide, especially a plastidal transit petide in case in Table I, application no. 10, in column 6 in the same line as SEQ ID NO. 1623 is depicted, plastidic is mentioned, or a mitochondrial transit peptide in case in Table I, application no. 10, in column 6 in the same line as SEQ ID NO. 1623 is depicted, mitochondrial is mentioned; which is operable linked, too.

[55630] In another embodiment thereof the expression cassette does not comprise an additional transit peptide in case in Table I, application no. 10, in column 6 in the same line as SEQ ID NO. 1623 is depicted, non-targeted is mentioned.

[55631] In an embodiment the present invention relates to an expresssion cassette comprising a) a promoter, preferably a promoter selected from the group consisting of Big35S, PCUbi, Super and USP, in particular p-PcUBI; and b) the nucleic acid SEQ ID NO. 120952, or a homolog or fragment thereof, or a homolog thereof being depicted in Table I, application no. 10, column 8, in the same line as SEQ ID NO. 120952, preferably the coding region thereof, a homolog or a fragment thereof; which are operable linked.

[55632] In an embodiment thereof the expression cassette comprises in addition c) a nucleic acid molecule encoding a transit peptide, especially a plastidal transit petide in case in Table I, application no. 10, in column 6 in the same line as SEQ ID NO. 120952 is depicted, plastidic is mentioned, or a mitochondrial transit peptide in case in Table I, application no. 10, in column 6 in the same line as SEQ ID NO. 120952 is depicted, mitochondrial is mentioned; which is operable linked, too.

[55633] In another embodiment thereof the expression cassette does not comprise an additional transit peptide in case in Table I, application no. 10, in column 6 in the same line as SEQ ID NO. 120952 is depicted, non-targeted is mentioned.

[55634] In an embodiment the present invention relates to an expresssion cassette comprising a) a promoter, preferably a promoter selected from the group consisting of Big35S, PCUbi, Super and USP, in particular p-PcUBI; and b) the nucleic acid SEQ ID NO. 22921, or a homolog or fragment thereof, or a homolog thereof being depicted in Table I, application no. 10, column 8, in the same line as SEQ ID NO. 22921, preferably the coding region thereof, a homolog or a fragment thereof; which are operable linked.

[55635] In an embodiment thereof the expression cassette comprises in addition c) a nucleic acid molecule encoding a transit peptide, especially a plastidal transit petide in case in Table I, application no. 10, in column 6 in the same line as SEQ ID NO. 22921 is depicted, plastidic is mentioned, or a mitochondrial transit peptide in case in Table I, application no. 10, in column 6 in the same line as SEQ ID NO. 22921 is depicted, mitochondrial is mentioned; which is operable linked, too.

[55636] In another embodiment thereof the expression cassette does not comprise an additional transit peptide in case in Table I, application no. 10, in column 6 in the same line as SEQ ID NO. 22921 is depicted, non-targeted is mentioned.

[55637] In an embodiment the present invention relates to an expresssion cassette comprising a) a promoter, preferably a promoter selected from the group consisting of Big35S, PCUbi, Super and USP, in particular p-PcUBI; and b) the nucleic acid SEQ ID NO. 2935, or a homolog or fragment thereof, or a homolog thereof being depicted in Table I, application no. 10, column 8, in the same line as SEQ ID NO. 2935, preferably the coding region thereof, a homolog or a fragment thereof; which are operable linked.

[55638] In an embodiment thereof the expression cassette comprises in addition c) a nucleic acid molecule encoding a transit peptide, especially a plastidal transit petide in case in Table I, application no. 10, in column 6 in the same line as SEQ ID NO. 2935 is depicted, plastidic is mentioned, or a mitochondrial transit peptide in case in Table I, application no. 10, in column 6 in the same line as SEQ ID NO. 2935 is depicted, mitochondrial is mentioned; which is operable linked, too.

[55639] In another embodiment thereof the expression cassette does not comprise an additional transit peptide in case in Table I, application no. 10, in column 6 in the same line as SEQ ID NO. 2935 is depicted, non-targeted is mentioned.

[55640] In an embodiment the present invention relates to an expresssion cassette comprising a) a promoter, preferably a promoter selected from the group consisting of Big35S, PCUbi, Super and USP, in particular p-PcUBI; and b) the nucleic acid SEQ ID NO. 23482, or a homolog or fragment thereof, or a homolog thereof being depicted in Table I, application no. 10, column 8, in the same line as SEQ ID NO. 23482, preferably the coding region thereof, a homolog or a fragment thereof; which are operable linked.

[55641] In an embodiment thereof the expression cassette comprises in addition c) a nucleic acid molecule encoding a transit peptide, especially a plastidal transit petide in case in Table I, application no. 10, in column 6 in the same line as SEQ ID NO. 23482 is depicted, plastidic is mentioned, or a mitochondrial transit peptide in case in Table I, application no. 10, in column 6 in the same line as SEQ ID NO. 23482 is depicted, mitochondrial is mentioned; which is operable linked, too.

[55642] In another embodiment thereof the expression cassette does not comprise an additional transit peptide in case in Table I, application no. 10, in column 6 in the same line as SEQ ID NO. 23482 is depicted, non-targeted is mentioned.

[55643] In an embodiment the present invention relates to an expresssion cassette comprising a) a promoter, preferably a promoter selected from the group consisting of Big35S, PCUbi, Super and USP, in particular p-PcUBI; and b) the nucleic acid SEQ ID NO. 3279, or a homolog or fragment thereof, or a homolog thereof being depicted in Table I, application no. 10, column 8, in the same line as SEQ ID NO. 3279, preferably the coding region thereof, a homolog or a fragment thereof; which are operable linked.

[55644] In an embodiment thereof the expression cassette comprises in addition c) a nucleic acid molecule encoding a transit peptide, especially a plastidal transit petide in case in Table I, application no. 10, in column 6 in the same line as SEQ ID NO. 3279 is depicted, plastidic is mentioned, or a mitochondrial transit peptide in case in Table I, application no. 10, in column 6 in the same line as SEQ ID NO. 3279 is depicted, mitochondrial is mentioned; which is operable linked, too.

[55645] In another embodiment thereof the expression cassette does not comprise an additional transit peptide in case in Table I, application no. 10, in column 6 in the same line as SEQ ID NO. 3279 is depicted, non-targeted is mentioned.

[55646] In an embodiment the present invention relates to an expresssion cassette comprising a) a promoter, preferably a promoter selected from the group consisting of Big35S, PCUbi, Super and USP, in particular p-PcUBI; and b) the nucleic acid SEQ ID NO. 24232, or a homolog or fragment thereof, or a homolog thereof being depicted in Table I, application no. 10, column 8, in the same line as SEQ ID NO. 24232, preferably the coding region thereof, a homolog or a fragment thereof; which are operable linked.

[55647] In an embodiment thereof the expression cassette comprises in addition c) a nucleic acid molecule encoding a transit peptide, especially a plastidal transit petide in case in Table I, application no. 10, in column 6 in the same line as SEQ ID NO. 24232 is depicted, plastidic is mentioned, or a mitochondrial transit peptide in case in Table I, application no. 10, in column 6 in the same line as SEQ ID NO. 24232 is depicted, mitochondrial is mentioned; which is operable linked, too.

[55648] In another embodiment thereof the expression cassette does not comprise an additional transit peptide in case in Table I, application no. 10, in column 6 in the same line as SEQ ID NO. 24232 is depicted, non-targeted is mentioned.

[55649] In an embodiment the present invention relates to an expresssion cassette comprising a) a promoter, preferably a promoter selected from the group consisting of Big35S, PCUbi, Super and USP, in particular p-PcUBI; and b) the nucleic acid SEQ ID NO. 68849, or a homolog or fragment thereof, or a homolog thereof being depicted in Table I, application no. 10, column 8, in the same line as SEQ ID NO. 68849, preferably the coding region thereof, a homolog or a fragment thereof; which are operable linked.

[55650] In an embodiment thereof the expression cassette comprises in addition c) a nucleic acid molecule encoding a transit peptide, especially a plastidal transit petide in case in Table I, application no. 10, in column 6 in the same line as SEQ ID NO. 68849 is depicted, plastidic is mentioned, or a mitochondrial transit peptide in case in Table I, application no. 10, in column 6 in the same line as SEQ ID NO. 68849 is depicted, mitochondrial is mentioned; which is operable linked, too.

[55651] In another embodiment thereof the expression cassette does not comprise an additional transit peptide in case in Table I, application no. 10, in column 6 in the same line as SEQ ID NO. 68849 is depicted, non-targeted is mentioned.

[55652] In an embodiment the present invention relates to an expresssion cassette comprising a) a promoter, preferably a promoter selected from the group consisting of Big35S, PCUbi, Super and USP, in particular p-PcUBI; and b) the nucleic acid SEQ ID NO. 4102, or a homolog or fragment thereof, or a homolog thereof being depicted in Table I, application no. 10, column 8, in the same line as SEQ ID NO. 4102, preferably the coding region thereof, a homolog or a fragment thereof; which are operable linked.

[55653] In an embodiment thereof the expression cassette comprises in addition c) a nucleic acid molecule encoding a transit peptide, especially a plastidal transit petide in case in Table I, application no. 10, in column 6 in the same line as SEQ ID NO. 4102 is depicted, plastidic is mentioned, or a mitochondrial transit peptide in case in Table I, application no. 10, in column 6 in the same line as SEQ ID NO. 4102 is depicted, mitochondrial is mentioned; which is operable linked, too.

[55654] In another embodiment thereof the expression cassette does not comprise an additional transit peptide in case in Table I, application no. 10, in column 6 in the same line as SEQ ID NO. 4102 is depicted, non-targeted is mentioned.

[55655] In an embodiment the present invention relates to an expresssion cassette comprising a) a promoter, preferably a promoter selected from the group consisting of Big35S, PCUbi, Super and USP, in particular p-PcUBI; and b) the nucleic acid SEQ ID NO. 4348, or a homolog or fragment thereof, or a homolog thereof being depicted in Table I, application no. 10, column 8, in the same line as SEQ ID NO. 4348, preferably the coding region thereof, a homolog or a fragment thereof; which are operable linked.

[55656] In an embodiment thereof the expression cassette comprises in addition c) a nucleic acid molecule encoding a transit peptide, especially a plastidal transit petide in case in Table I, application no. 10, in column 6 in the same line as SEQ ID NO. 4348 is depicted, plastidic is mentioned, or a mitochondrial transit peptide in case in Table I, application no. 10, in column 6 in the same line as SEQ ID NO. 4348 is depicted, mitochondrial is mentioned; which is operable linked, too.

[55657] In another embodiment thereof the expression cassette does not comprise an additional transit peptide in case in Table I, application no. 10, in column 6 in the same line as SEQ ID NO. 4348 is depicted, non-targeted is mentioned.

[55658] In an embodiment the present invention relates to an expresssion cassette comprising a) a promoter, preferably a promoter selected from the group consisting of Big35S, PCUbi, Super and USP, in particular p-PcUBI; and b) the nucleic acid SEQ ID NO. 25498, or a homolog or fragment thereof, or a homolog thereof being depicted in Table I, application no. 10, column 8, in the same line as SEQ ID NO. 25498, preferably the coding region thereof, a homolog or a fragment thereof; which are operable linked.

[55659] In an embodiment thereof the expression cassette comprises in addition c) a nucleic acid molecule encoding a transit peptide, especially a plastidal transit petide in case in Table I, application no. 10, in column 6 in the same line as SEQ ID NO. 25498 is depicted, plastidic is mentioned, or a mitochondrial transit peptide in case in Table I, application no. 10, in column 6 in the same line as SEQ ID NO. 25498 is depicted, mitochondrial is mentioned; which is operable linked, too.

[55660] In another embodiment thereof the expression cassette does not comprise an additional transit peptide in case in Table I, application no. 10, in column 6 in the same line as SEQ ID NO. 25498 is depicted, non-targeted is mentioned.

[55661] In an embodiment the present invention relates to an expresssion cassette comprising a) a promoter, preferably a promoter selected from the group consisting of Big35S, PCUbi, Super and USP, in particular p-Super; and b) the nucleic acid SEQ ID NO. 121076, or a homolog or fragment thereof, or a homolog thereof being depicted in Table I, application no. 10, column 8, in the same line as SEQ ID NO. 121076, preferably the coding region thereof, a homolog or a fragment thereof; which are operable linked.

[55662] In an embodiment thereof the expression cassette comprises in addition c) a nucleic acid molecule encoding a transit peptide, especially a plastidal transit petide in case in Table I, application no. 10, in column 6 in the same line as SEQ ID NO. 121076 is depicted, plastidic is mentioned, or a mitochondrial transit peptide in case in Table I, application no. 10, in column 6 in the same line as SEQ ID NO. 121076 is depicted, mitochondrial is mentioned; which is operable linked, too.

[55663] In another embodiment thereof the expression cassette does not comprise an additional transit peptide in case in Table I, application no. 10, in column 6 in the same line as SEQ ID NO. 121076 is depicted, non-targeted is mentioned.

[55664] In an embodiment the present invention relates to an expresssion cassette comprising a) a promoter, preferably a promoter selected from the group consisting of Big35S, PCUbi, Super and USP, in particular p-USP; and b) the nucleic acid SEQ ID NO. 121111, or a homolog or fragment thereof, or a homolog thereof being depicted in Table I, application no. 10, column 8, in the same line as SEQ ID NO. 121111, preferably the coding region thereof, a homolog or a fragment thereof; which are operable linked.

[55665] In an embodiment thereof the expression cassette comprises in addition c) a nucleic acid molecule encoding a transit peptide, especially a plastidal transit petide in case in Table I, application no. 10, in column 6 in the same line as SEQ ID NO. 121111 is depicted, plastidic is mentioned, or a mitochondrial transit peptide in case in Table I, application no. 10, in column 6 in the same line as SEQ ID NO. 121111 is depicted, mitochondrial is mentioned; which is operable linked, too.

[55666] In another embodiment thereof the expression cassette does not comprise an additional transit peptide in case in Table I, application no. 10, in column 6 in the same line as SEQ ID NO. 121111 is depicted, non-targeted is mentioned.

[55667] In an embodiment the present invention relates to an expresssion cassette comprising a) a promoter, preferably a promoter selected from the group consisting of Big35S, PCUbi, Super and USP, in particular p-Super; and b) the nucleic acid SEQ ID NO. 121637, or a homolog or fragment thereof, or a homolog thereof being depicted in Table I, application no. 10, column 8, in the same line as SEQ ID NO. 121637, preferably the coding region thereof, a homolog or a fragment thereof; which are operable linked.

[55668] In an embodiment thereof the expression cassette comprises in addition c) a nucleic acid molecule encoding a transit peptide, especially a plastidal transit petide in case in Table I, application no. 10, in column 6 in the same line as SEQ ID NO. 121637 is depicted, plastidic is mentioned, or a mitochondrial transit peptide in case in Table I, application no. 10, in column 6 in the same line as SEQ ID NO. 121637 is depicted, mitochondrial is mentioned; which is operable linked, too.

[55669] In another embodiment thereof the expression cassette does not comprise an additional transit peptide in case in Table I, application no. 10, in column 6 in the same line as SEQ ID NO. 121637 is depicted, non-targeted is mentioned.

[55670] In an embodiment the present invention relates to an expresssion cassette comprising a) a promoter, preferably a promoter selected from the group consisting of Big35S, PCUbi, Super and USP, in particular p-Super; and b) the nucleic acid SEQ ID NO. 7333, or a homolog or fragment thereof, or a homolog thereof being depicted in Table I, application no. 10, column 8, in the same line as SEQ ID NO. 7333, preferably the coding region thereof, a homolog or a fragment thereof; which are operable linked.

[55671] In an embodiment thereof the expression cassette comprises in addition c) a nucleic acid molecule encoding a transit peptide, especially a plastidal transit petide in case in Table I, application no. 10, in column 6 in the same line as SEQ ID NO. 7333 is depicted, plastidic is mentioned, or a mitochondrial transit peptide in case in Table I, application no. 10, in column 6 in the same line as SEQ ID NO. 7333 is depicted, mitochondrial is mentioned; which is operable linked, too.

[55672] In another embodiment thereof the expression cassette does not comprise an additional transit peptide in case in Table I, application no. 10, in column 6 in the same line as SEQ ID NO. 7333 is depicted, non-targeted is mentioned.

[55673] In an embodiment the present invention relates to an expresssion cassette comprising a) a promoter, preferably a promoter selected from the group consisting of Big35S, PCUbi, Super and USP, in particular p-Super; and b) the nucleic acid SEQ ID NO. 37400, or a homolog or fragment thereof, or a homolog thereof being depicted in Table I, application no. 10, column 8, in the same line as SEQ ID NO. 37400, preferably the coding region thereof, a homolog or a fragment thereof; which are operable linked.

[55674] In an embodiment thereof the expression cassette comprises in addition c) a nucleic acid molecule encoding a transit peptide, especially a plastidal transit petide in case in Table I, application no. 10, in column 6 in the same line as SEQ ID NO. 37400 is depicted, plastidic is mentioned, or a mitochondrial transit peptide in case in Table I, application no. 10, in column 6 in the same line as SEQ ID NO. 37400 is depicted, mitochondrial is mentioned; which is operable linked, too.

[55675] In another embodiment thereof the expression cassette does not comprise an additional transit peptide in case in Table I, application no. 10, in column 6 in the same line as SEQ ID NO. 37400 is depicted, non-targeted is mentioned.

[55676] In an embodiment the present invention relates to an expresssion cassette comprising a) a promoter, preferably a promoter selected from the group consisting of Big35S, PCUbi, Super and USP, in particular p-Super; and b) the nucleic acid SEQ ID NO. 38266, or a homolog or fragment thereof, or a homolog thereof being depicted in Table I, application no. 10, column 8, in the same line as SEQ ID NO. 38266, preferably the coding region thereof, a homolog or a fragment thereof; which are operable linked.

[55677] In an embodiment thereof the expression cassette comprises in addition c) a nucleic acid molecule encoding a transit peptide, especially a plastidal transit petide in case in Table I, application no. 10, in column 6 in the same line as SEQ ID NO. 38266 is depicted, plastidic is mentioned, or a mitochondrial transit peptide in case in Table I, application no. 10, in column 6 in the same line as SEQ ID NO. 38266 is depicted, mitochondrial is mentioned; which is operable linked, too.

[55678] In another embodiment thereof the expression cassette does not comprise an additional transit peptide in case in Table I, application no. 10, in column 6 in the same line as SEQ ID NO. 38266 is depicted, non-targeted is mentioned.

[55679] In an embodiment the present invention relates to an expresssion cassette comprising a) a promoter, preferably a promoter selected from the group consisting of Big35S, PCUbi, Super and USP, in particular p-Super; and b) the nucleic acid SEQ ID NO. 38300, or a homolog or fragment thereof, or a homolog thereof being depicted in Table I, application no. 10, column 8, in the same line as SEQ ID NO. 38300, preferably the coding region thereof, a homolog or a fragment thereof; which are operable linked.

[55680] In an embodiment thereof the expression cassette comprises in addition c) a nucleic acid molecule encoding a transit peptide, especially a plastidal transit petide in case in Table I, application no. 10, in column 6 in the same line as SEQ ID NO. 38300 is depicted, plastidic is mentioned, or a mitochondrial transit peptide in case in Table I, application no. 10, in column 6 in the same line as SEQ ID NO. 38300 is depicted, mitochondrial is mentioned; which is operable linked, too.

[55681] In another embodiment thereof the expression cassette does not comprise an additional transit peptide in case in Table I, application no. 10, in column 6 in the same line as SEQ ID NO. 38300 is depicted, non-targeted is mentioned.

[55682] In an embodiment the present invention relates to an expresssion cassette comprising a) a promoter, preferably a promoter selected from the group consisting of Big35S, PCUbi, Super and USP, in particular p-Super; and b) the nucleic acid SEQ ID NO. 78771, or a homolog or fragment thereof, or a homolog thereof being depicted in Table I, application no. 10, column 8, in the same line as SEQ ID NO. 78771, preferably the coding region thereof, a homolog or a fragment thereof; which are operable linked.

[55683] In an embodiment thereof the expression cassette comprises in addition c) a nucleic acid molecule encoding a transit peptide, especially a plastidal transit petide in case in Table I, application no. 10, in column 6 in the same line as SEQ ID NO. 78771 is depicted, plastidic is mentioned, or a mitochondrial transit peptide in case in Table I, application no. 10, in column 6 in the same line as SEQ ID NO. 78771 is depicted, mitochondrial is mentioned; which is operable linked, too.

[55684] In another embodiment thereof the expression cassette does not comprise an additional transit peptide in case in Table I, application no. 10, in column 6 in the same line as SEQ ID NO. 78771 is depicted, non-targeted is mentioned.

[55685] In an embodiment the present invention relates to an expresssion cassette comprising a) a promoter, preferably a promoter selected from the group consisting of Big35S, PCUbi, Super and USP, in particular p-Super; and b) the nucleic acid SEQ ID NO. 38573, or a homolog or fragment thereof, or a homolog thereof being depicted in Table I, application no. 10, column 8, in the same line as SEQ ID NO. 38573, preferably the coding region thereof, a homolog or a fragment thereof; which are operable linked.

[55686] In an embodiment thereof the expression cassette comprises in addition c) a nucleic acid molecule encoding a transit peptide, especially a plastidal transit petide in case in Table I, application no. 10, in column 6 in the same line as SEQ ID NO. 38573 is depicted, plastidic is mentioned, or a mitochondrial transit peptide in case in Table I, application no. 10, in column 6 in the same line as SEQ ID NO. 38573 is depicted, mitochondrial is mentioned; which is operable linked, too.

[55687] In another embodiment thereof the expression cassette does not comprise an additional transit peptide in case in Table I, application no. 10, in column 6 in the same line as SEQ ID NO. 38573 is depicted, non-targeted is mentioned.

[55688] In an embodiment the present invention relates to an expresssion cassette comprising a) a promoter, preferably a promoter selected from the group consisting of Big35S, PCUbi, Super and USP, in particular p-Super; and b) the nucleic acid SEQ ID NO. 8920, or a homolog or fragment thereof, or a homolog thereof being depicted in Table I, application no. 10, column 8, in the same line as SEQ ID NO. 8920, preferably the coding region thereof, a homolog or a fragment thereof; which are operable linked.

[55689] In an embodiment thereof the expression cassette comprises in addition c) a nucleic acid molecule encoding a transit peptide, especially a plastidal transit petide in case in Table I, application no. 10, in column 6 in the same line as SEQ ID NO. 8920 is depicted, plastidic is mentioned, or a mitochondrial transit peptide in case in Table I, application no. 10, in column 6 in the same line as SEQ ID NO. 8920 is depicted, mitochondrial is mentioned; which is operable linked, too.

[55690] In another embodiment thereof the expression cassette does not comprise an additional transit peptide in case in Table I, application no. 10, in column 6 in the same line as SEQ ID NO. 8920 is depicted, non-targeted is mentioned.

[55691] In an embodiment the present invention relates to an expresssion cassette comprising a) a promoter, preferably a promoter selected from the group consisting of Big35S, PCUbi, Super and USP, in particular p-Super; and b) the nucleic acid SEQ ID NO. 39237, or a homolog or fragment thereof, or a homolog thereof being depicted in Table I, application no. 10, column 8, in the same line as SEQ ID NO. 39237, preferably the coding region thereof, a homolog or a fragment thereof; which are operable linked.

[55692] In an embodiment thereof the expression cassette comprises in addition c) a nucleic acid molecule encoding a transit peptide, especially a plastidal transit petide in case in Table I, application no. 10, in column 6 in the same line as SEQ ID NO. 39237 is depicted, plastidic is mentioned, or a mitochondrial transit peptide in case in Table I, application no. 10, in column 6 in the same line as SEQ ID NO. 39237 is depicted, mitochondrial is mentioned; which is operable linked, too.

[55693] In another embodiment thereof the expression cassette does not comprise an additional transit peptide in case in Table I, application no. 10, in column 6 in the same line as SEQ ID NO. 39237 is depicted, non-targeted is mentioned.

[55694] In an embodiment the present invention relates to an expresssion cassette comprising a) a promoter, preferably a promoter selected from the group consisting of Big35S, PCUbi, Super and USP, in particular p-Super; and b) the nucleic acid SEQ ID NO. 115628, or a homolog or fragment thereof, or a homolog thereof being depicted in Table I, application no. 10, column 8, in the same line as SEQ ID NO. 115628, preferably the coding region thereof, a homolog or a fragment thereof; which are operable linked.

[55695] In an embodiment thereof the expression cassette comprises in addition c) a nucleic acid molecule encoding a transit peptide, especially a plastidal transit petide in case in Table I, application no. 10, in column 6 in the same line as SEQ ID NO. 115628 is depicted, plastidic is mentioned, or a mitochondrial transit peptide in case in Table I, application no. 10, in column 6 in the same line as SEQ ID NO. 115628 is depicted, mitochondrial is mentioned; which is operable linked, too.

[55696] In another embodiment thereof the expression cassette does not comprise an additional transit peptide in case in Table I, application no. 10, in column 6 in the same line as SEQ ID NO. 115628 is depicted, non-targeted is mentioned.

[55697] In an embodiment the present invention relates to an expresssion cassette comprising a) a promoter, preferably a promoter selected from the group consisting of Big35S, PCUbi, Super and USP, in particular p-Super; and b) the nucleic acid SEQ ID NO. 79509, or a homolog or fragment thereof, or a homolog thereof being depicted in Table I, application no. 10, column 8, in the same line as SEQ ID NO. 79509, preferably the coding region thereof, a homolog or a fragment thereof; which are operable linked.

[55698] In an embodiment thereof the expression cassette comprises in addition c) a nucleic acid molecule encoding a transit peptide, especially a plastidal transit petide in case in Table I, application no. 10, in column 6 in the same line as SEQ ID NO. 79509 is depicted, plastidic is mentioned, or a mitochondrial transit peptide in case in Table I, application no. 10, in column 6 in the same line as SEQ ID NO. 79509 is depicted, mitochondrial is mentioned; which is operable linked, too.

[55699] In another embodiment thereof the expression cassette does not comprise an additional transit peptide in case in Table I, application no. 10, in column 6 in the same line as SEQ ID NO. 79509 is depicted, non-targeted is mentioned.

[55700] In an embodiment the present invention relates to an expresssion cassette comprising a) a promoter, preferably a promoter selected from the group consisting of Big35S, PCUbi, Super and USP, in particular p-Super; and b) the nucleic acid SEQ ID NO. 9167, or a homolog or fragment thereof, or a homolog thereof being depicted in Table I, application no. 10, column 8, in the same line as SEQ ID NO. 9167, preferably the coding region thereof, a homolog or a fragment thereof; which are operable linked.

[55701] In an embodiment thereof the expression cassette comprises in addition c) a nucleic acid molecule encoding a transit peptide, especially a plastidal transit petide in case in Table I, application no. 10, in column 6 in the same line as SEQ ID NO. 9167 is depicted, plastidic is mentioned, or a mitochondrial transit peptide in case in Table I, application no. 10, in column 6 in the same line as SEQ ID NO. 9167 is depicted, mitochondrial is mentioned; which is operable linked, too.

[55702] In another embodiment thereof the expression cassette does not comprise an additional transit peptide in case in Table I, application no. 10, in column 6 in the same line as SEQ ID NO. 9167 is depicted, non-targeted is mentioned.

[55703] In an embodiment the present invention relates to an expresssion cassette comprising a) a promoter, preferably a promoter selected from the group consisting of Big35S, PCUbi, Super and USP, in particular p-USP; and b) the nucleic acid SEQ ID NO. 121657, or a homolog or fragment thereof, or a homolog thereof being depicted in Table I, application no. 10, column 8, in the same line as SEQ ID NO. 121657, preferably the coding region thereof, a homolog or a fragment thereof; which are operable linked.

[55704] In an embodiment thereof the expression cassette comprises in addition c) a nucleic acid molecule encoding a transit peptide, especially a plastidal transit petide in case in Table I, application no. 10, in column 6 in the same line as SEQ ID NO. 121657 is depicted, plastidic is mentioned, or a mitochondrial transit peptide in case in Table I, application no. 10, in column 6 in the same line as SEQ ID NO. 121657 is depicted, mitochondrial is mentioned; which is operable linked, too.

[55705] In another embodiment thereof the expression cassette does not comprise an additional transit peptide in case in Table I, application no. 10, in column 6 in the same line as SEQ ID NO. 121657 is depicted, non-targeted is mentioned.

[55706] In an embodiment the present invention relates to an expresssion cassette comprising a) a promoter, preferably a promoter selected from the group consisting of Big35S, PCUbi, Super and USP, in particular p-Super; and b) the nucleic acid SEQ ID NO. 81075, or a homolog or fragment thereof, or a homolog thereof being depicted in Table I, application no. 10, column 8, in the same line as SEQ ID NO. 81075, preferably the coding region thereof, a homolog or a fragment thereof; which are operable linked.

[55707] In an embodiment thereof the expression cassette comprises in addition c) a nucleic acid molecule encoding a transit peptide, especially a plastidal transit petide in case in Table I, application no. 10, in column 6 in the same line as SEQ ID NO. 81075 is depicted, plastidic is mentioned, or a mitochondrial transit peptide in case in Table I, application no. 10, in column 6 in the same line as SEQ ID NO. 81075 is depicted, mitochondrial is mentioned; which is operable linked, too.

[55708] In another embodiment thereof the expression cassette does not comprise an additional transit peptide in case in Table I, application no. 10, in column 6 in the same line as SEQ ID NO. 81075 is depicted, non-targeted is mentioned.

[55709] In an embodiment the present invention relates to an expresssion cassette comprising a) a promoter, preferably a promoter selected from the group consisting of Big35S, PCUbi, Super and USP, in particular p-Super; and b) the nucleic acid SEQ ID NO. 81980, or a homolog or fragment thereof, or a homolog thereof being depicted in Table I, application no. 10, column 8, in the same line as SEQ ID NO. 81980, preferably the coding region thereof, a homolog or a fragment thereof; which are operable linked.

[55710] In an embodiment thereof the expression cassette comprises in addition c) a nucleic acid molecule encoding a transit peptide, especially a plastidal transit petide in case in Table I, application no. 10, in column 6 in the same line as SEQ ID NO. 81980 is depicted, plastidic is mentioned, or a mitochondrial transit peptide in case in Table I, application no. 10, in column 6 in the same line as SEQ ID NO. 81980 is depicted, mitochondrial is mentioned; which is operable linked, too.

[55711] In another embodiment thereof the expression cassette does not comprise an additional transit peptide in case in Table I, application no. 10, in column 6 in the same line as SEQ ID NO. 81980 is depicted, non-targeted is mentioned.

[55712] In an embodiment the present invention relates to an expresssion cassette comprising a) a promoter, preferably a promoter selected from the group consisting of Big35S, PCUbi, Super and USP, in particular p-USP; and b) the nucleic acid SEQ ID NO. 83657, or a homolog or fragment thereof, or a homolog thereof being depicted in Table I, application no. 10, column 8, in the same line as SEQ ID NO. 83657, preferably the coding region thereof, a homolog or a fragment thereof; which are operable linked.

[55713] In an embodiment thereof the expression cassette comprises in addition c) a nucleic acid molecule encoding a transit peptide, especially a plastidal transit petide in case in Table I, application no. 10, in column 6 in the same line as SEQ ID NO. 83657 is depicted, plastidic is mentioned, or a mitochondrial transit peptide in case in Table I, application no. 10, in column 6 in the same line as SEQ ID NO. 83657 is depicted, mitochondrial is mentioned; which is operable linked, too.

[55714] In another embodiment thereof the expression cassette does not comprise an additional transit peptide in case in Table I, application no. 10, in column 6 in the same line as SEQ ID NO. 83657 is depicted, non-targeted is mentioned.

[55715] In an embodiment the present invention relates to an expresssion cassette comprising a) a promoter, preferably a promoter selected from the group consisting of Big35S, PCUbi, Super and USP, in particular p-USP; and b) the nucleic acid SEQ ID NO. 100675, or a homolog or fragment thereof, or a homolog thereof being depicted in Table I, application no. 10, column 8, in the same line as SEQ ID NO. 100675, preferably the coding region thereof, a homolog or a fragment thereof; which are operable linked.

[55716] In an embodiment thereof the expression cassette comprises in addition c) a nucleic acid molecule encoding a transit peptide, especially a plastidal transit petide in case in Table I, application no. 10, in column 6 in the same line as SEQ ID NO. 100675 is depicted, plastidic is mentioned, or a mitochondrial transit peptide in case in Table I, application no. 10, in column 6 in the same line as SEQ ID NO. 100675 is depicted, mitochondrial is mentioned; which is operable linked, too.

[55717] In another embodiment thereof the expression cassette does not comprise an additional transit peptide in case in Table I, application no. 10, in column 6 in the same line as SEQ ID NO. 100675 is depicted, non-targeted is mentioned.

[55718] In an embodiment the present invention relates to an expresssion cassette comprising a) a promoter, preferably a promoter selected from the group consisting of Big35S, PCUbi, Super and USP, in particular p-Super; and b) the nucleic acid SEQ ID NO. 44372, or a homolog or fragment thereof, or a homolog thereof being depicted in Table I, application no. 10, column 8, in the same line as SEQ ID NO. 44372, preferably the coding region thereof, a homolog or a fragment thereof; which are operable linked.

[55719] In an embodiment thereof the expression cassette comprises in addition c) a nucleic acid molecule encoding a transit peptide, especially a plastidal transit petide in case in Table I, application no. 10, in column 6 in the same line as SEQ ID NO. 44372 is depicted, plastidic is mentioned, or a mitochondrial transit peptide in case in Table I, application no. 10, in column 6 in the same line as SEQ ID NO. 44372 is depicted, mitochondrial is mentioned; which is operable linked, too.

[55720] In another embodiment thereof the expression cassette does not comprise an additional transit peptide in case in Table I, application no. 10, in column 6 in the same line as SEQ ID NO. 44372 is depicted, non-targeted is mentioned.

[55721] In an embodiment the present invention relates to an expresssion cassette comprising a) a promoter, preferably a promoter selected from the group consisting of Big35S, PCUbi, Super and USP, in particular p-Super; and b) the nucleic acid SEQ ID NO. 44609, or a homolog or fragment thereof, or a homolog thereof being depicted in Table I, application no. 10, column 8, in the same line as SEQ ID NO. 44609, preferably the coding region thereof, a homolog or a fragment thereof; which are operable linked.

[55722] In an embodiment thereof the expression cassette comprises in addition c) a nucleic acid molecule encoding a transit peptide, especially a plastidal transit petide in case in Table I, application no. 10, in column 6 in the same line as SEQ ID NO. 44609 is depicted, plastidic is mentioned, or a mitochondrial transit peptide in case in Table I, application no. 10, in column 6 in the same line as SEQ ID NO. 44609 is depicted, mitochondrial is mentioned; which is operable linked, too.

[55723] In another embodiment thereof the expression cassette does not comprise an additional transit peptide in case in Table I, application no. 10, in column 6 in the same line as SEQ ID NO. 44609 is depicted, non-targeted is mentioned.

[55724] In an embodiment the present invention relates to an expresssion cassette comprising a) a promoter, preferably a promoter selected from the group consisting of Big35S, PCUbi, Super and USP, in particular p-PcUBI; and b) the nucleic acid SEQ ID NO. 10811, or a homolog or fragment thereof, or a homolog thereof being depicted in Table I, application no. 10, column 8, in the same line as SEQ ID NO. 10811, preferably the coding region thereof, a homolog or a fragment thereof; which are operable linked.

[55725] In an embodiment thereof the expression cassette comprises in addition c) a nucleic acid molecule encoding a transit peptide, especially a plastidal transit petide in case in Table I, application no. 10, in column 6 in the same line as SEQ ID NO. 10811 is depicted, plastidic is mentioned, or a mitochondrial transit peptide in case in Table I, application no. 10, in column 6 in the same line as SEQ ID NO. 10811 is depicted, mitochondrial is mentioned; which is operable linked, too.

[55726] In another embodiment thereof the expression cassette does not comprise an additional transit peptide in case in Table I, application no. 10, in column 6 in the same line as SEQ ID NO. 10811 is depicted, non-targeted is mentioned.

[55727] In an embodiment the present invention relates to an expresssion cassette comprising a) a promoter, preferably a promoter selected from the group consisting of Big35S, PCUbi, Super and USP, in particular p-PcUBI; and b) the nucleic acid SEQ ID NO. 46751, or a homolog or fragment thereof, or a homolog thereof being depicted in Table I, application no. 10, column 8, in the same line as SEQ ID NO. 46751, preferably the coding region thereof, a homolog or a fragment thereof; which are operable linked.

[55728] In an embodiment thereof the expression cassette comprises in addition c) a nucleic acid molecule encoding a transit peptide, especially a plastidal transit petide in case in Table I, application no. 10, in column 6 in the same line as SEQ ID NO. 46751 is depicted, plastidic is mentioned, or a mitochondrial transit peptide in case in Table I, application no. 10, in column 6 in the same line as SEQ ID NO. 46751 is depicted, mitochondrial is mentioned; which is operable linked, too.

[55729] In another embodiment thereof the expression cassette does not comprise an additional transit peptide in case in Table I, application no. 10, in column 6 in the same line as SEQ ID NO. 46751 is depicted, non-targeted is mentioned.

[55730] In an embodiment the present invention relates to an expresssion cassette comprising a) a promoter, preferably a promoter selected from the group consisting of Big35S, PCUbi, Super and USP, in particular p-PcUBI; and b) the nucleic acid SEQ ID NO. 85510, or a homolog or fragment thereof, or a homolog thereof being depicted in Table I, application no. 10, column 8, in the same line as SEQ ID NO. 85510, preferably the coding region thereof, a homolog or a fragment thereof; which are operable linked.

[55731] In an embodiment thereof the expression cassette comprises in addition c) a nucleic acid molecule encoding a transit peptide, especially a plastidal transit petide in case in Table I, application no. 10, in column 6 in the same line as SEQ ID NO. 85510 is depicted, plastidic is mentioned, or a mitochondrial transit peptide in case in Table I, application no. 10, in column 6 in the same line as SEQ ID NO. 85510 is depicted, mitochondrial is mentioned; which is operable linked, too.

[55732] In another embodiment thereof the expression cassette does not comprise an additional transit peptide in case in Table I, application no. 10, in column 6 in the same line as SEQ ID NO. 85510 is depicted, non-targeted is mentioned.

[55733] In an embodiment the present invention relates to an expresssion cassette comprising a) a promoter, preferably a promoter selected from the group consisting of Big35S, PCUbi, Super and USP, in particular p-PcUBI; and b) the nucleic acid SEQ ID NO. 85723, or a homolog or fragment thereof, or a homolog thereof being depicted in Table I, application no. 10, column 8, in the same line as SEQ ID NO. 85723, preferably the coding region thereof, a homolog or a fragment thereof; which are operable linked.

[55734] In an embodiment thereof the expression cassette comprises in addition c) a nucleic acid molecule encoding a transit peptide, especially a plastidal transit petide in case in Table I, application no. 10, in column 6 in the same line as SEQ ID NO. 85723 is depicted, plastidic is mentioned, or a mitochondrial transit peptide in case in Table I, application no. 10, in column 6 in the same line as SEQ ID NO. 85723 is depicted, mitochondrial is mentioned; which is operable linked, too.

[55735] In another embodiment thereof the expression cassette does not comprise an additional transit peptide in case in Table I, application no. 10, in column 6 in the same line as SEQ ID NO. 85723 is depicted, non-targeted is mentioned.

[55736] In an embodiment the present invention relates to an expresssion cassette comprising a) a promoter, preferably a promoter selected from the group consisting of Big35S, PCUbi, Super and USP, in particular p-PcUBI; and b) the nucleic acid SEQ ID NO. 53878, or a homolog or fragment thereof, or a homolog thereof being depicted in Table I, application no. 10, column 8, in the same line as SEQ ID NO. 53878, preferably the coding region thereof, a homolog or a fragment thereof; which are operable linked.

[55737] In an embodiment thereof the expression cassette comprises in addition c) a nucleic acid molecule encoding a transit peptide, especially a plastidal transit petide in case in Table I, application no. 10, in column 6 in the same line as SEQ ID NO. 53878 is depicted, plastidic is mentioned, or a mitochondrial transit peptide in case in Table I, application no. 10, in column 6 in the same line as SEQ ID NO. 53878 is depicted, mitochondrial is mentioned; which is operable linked, too.

[55738] In another embodiment thereof the expression cassette does not comprise an additional transit peptide in case in Table I, application no. 10, in column 6 in the same line as SEQ ID NO. 53878 is depicted, non-targeted is mentioned.

[55739] In an embodiment the present invention relates to an expresssion cassette comprising a) a promoter, preferably a promoter selected from the group consisting of Big35S, PCUbi, Super and USP, in particular p-PcUBI; and b) the nucleic acid SEQ ID NO. 11471, or a homolog or fragment thereof, or a homolog thereof being depicted in Table I, application no. 10, column 8, in the same line as SEQ ID NO. 11471, preferably the coding region thereof, a homolog or a fragment thereof; which are operable linked.

[55740] In an embodiment thereof the expression cassette comprises in addition c) a nucleic acid molecule encoding a transit peptide, especially a plastidal transit petide in case in Table I, application no. 10, in column 6 in the same line as SEQ ID NO. 11471 is depicted, plastidic is mentioned, or a mitochondrial transit peptide in case in Table I, application no. 10, in column 6 in the same line as SEQ ID NO. 11471 is depicted, mitochondrial is mentioned; which is operable linked, too.

[55741] In another embodiment thereof the expression cassette does not comprise an additional transit peptide in case in Table I, application no. 10, in column 6 in the same line as SEQ ID NO. 11471 is depicted, non-targeted is mentioned.

[55742] In an embodiment the present invention relates to an expresssion cassette comprising a) a promoter, preferably a promoter selected from the group consisting of Big35S, PCUbi, Super and USP, in particular p-PcUBI; and b) the nucleic acid SEQ ID NO. 55385, or a homolog or fragment thereof, or a homolog thereof being depicted in Table I, application no. 10, column 8, in the same line as SEQ ID NO. 55385, preferably the coding region thereof, a homolog or a fragment thereof; which are operable linked.

[55743] In an embodiment thereof the expression cassette comprises in addition c) a nucleic acid molecule encoding a transit peptide, especially a plastidal transit petide in case in Table I, application no. 10, in column 6 in the same line as SEQ ID NO. 55385 is depicted, plastidic is mentioned, or a mitochondrial transit peptide in case in Table I, application no. 10, in column 6 in the same line as SEQ ID NO. 55385 is depicted, mitochondrial is mentioned; which is operable linked, too.

[55744] In another embodiment thereof the expression cassette does not comprise an additional transit peptide in case in Table I, application no. 10, in column 6 in the same line as SEQ ID NO. 55385 is depicted, non-targeted is mentioned.

[55745] In an embodiment the present invention relates to an expresssion cassette comprising a) a promoter, preferably a promoter selected from the group consisting of Big35S, PCUbi, Super and USP, in particular p-PcUBI; and b) the nucleic acid SEQ ID NO. 11990, or a homolog or fragment thereof, or a homolog thereof being depicted in Table I, application no. 10, column 8, in the same line as SEQ ID NO. 11990, preferably the coding region thereof, a homolog or a fragment thereof; which are operable linked.

[55746] In an embodiment thereof the expression cassette comprises in addition c) a nucleic acid molecule encoding a transit peptide, especially a plastidal transit petide in case in Table I, application no. 10, in column 6 in the same line as SEQ ID NO. 11990 is depicted, plastidic is mentioned, or a mitochondrial transit peptide in case in Table I, application no. 10, in column 6 in the same line as SEQ ID NO. 11990 is depicted, mitochondrial is mentioned; which is operable linked, too.

[55747] In another embodiment thereof the expression cassette does not comprise an additional transit peptide in case in Table I, application no. 10, in column 6 in the same line as SEQ ID NO. 11990 is depicted, non-targeted is mentioned.

[55748] In an embodiment the present invention relates to an expresssion cassette comprising a) a promoter, preferably a promoter selected from the group consisting of Big35S, PCUbi, Super and USP, in particular p-PcUBI; and b) the nucleic acid SEQ ID NO. 87655, or a homolog or fragment thereof, or a homolog thereof being depicted in Table I, application no. 10, column 8, in the same line as SEQ ID NO. 87655, preferably the coding region thereof, a homolog or a fragment thereof; which are operable linked.

[55749] In an embodiment thereof the expression cassette comprises in addition c) a nucleic acid molecule encoding a transit peptide, especially a plastidal transit petide in case in Table I, application no. 10, in column 6 in the same line as SEQ ID NO. 87655 is depicted, plastidic is mentioned, or a mitochondrial transit peptide in case in Table I, application no. 10, in column 6 in the same line as SEQ ID NO. 87655 is depicted, mitochondrial is mentioned; which is operable linked, too.

[55750] In another embodiment thereof the expression cassette does not comprise an additional transit peptide in case in Table I, application no. 10, in column 6 in the same line as SEQ ID NO. 87655 is depicted, non-targeted is mentioned.

[55751] In an embodiment the present invention relates to an expresssion cassette comprising a) a promoter, preferably a promoter selected from the group consisting of Big35S, PCUbi, Super and USP, in particular p-PcUBI; and b) the nucleic acid SEQ ID NO. 58324, or a homolog or fragment thereof, or a homolog thereof being depicted in Table I, application no. 10, column 8, in the same line as SEQ ID NO. 58324, preferably the coding region thereof, a homolog or a fragment thereof; which are operable linked.

[55752] In an embodiment thereof the expression cassette comprises in addition c) a nucleic acid molecule encoding a transit peptide, especially a plastidal transit petide in case in Table I, application no. 10, in column 6 in the same line as SEQ ID NO. 58324 is depicted, plastidic is mentioned, or a mitochondrial transit peptide in case in Table I, application no. 10, in column 6 in the same line as SEQ ID NO. 58324 is depicted, mitochondrial is mentioned; which is operable linked, too.

[55753] In another embodiment thereof the expression cassette does not comprise an additional transit peptide in case in Table I, application no. 10, in column 6 in the same line as SEQ ID NO. 58324 is depicted, non-targeted is mentioned.

[55754] In an embodiment the present invention relates to an expresssion cassette comprising a) a promoter, preferably a promoter selected from the group consisting of Big35S, PCUbi, Super and USP, in particular p-PcUBI; and b) the nucleic acid SEQ ID NO. 121908, or a homolog or fragment thereof, or a homolog thereof being depicted in Table I, application no. 10, column 8, in the same line as SEQ ID NO. 121908, preferably the coding region thereof, a homolog or a fragment thereof; which are operable linked.

[55755] In an embodiment thereof the expression cassette comprises in addition c) a nucleic acid molecule encoding a transit peptide, especially a plastidal transit petide in case in Table I, application no. 10, in column 6 in the same line as SEQ ID NO. 121908 is depicted, plastidic is mentioned, or a mitochondrial transit peptide in case in Table I, application no. 10, in column 6 in the same line as SEQ ID NO. 121908 is depicted, mitochondrial is mentioned; which is operable linked, too.

[55756] In another embodiment thereof the expression cassette does not comprise an additional transit peptide in case in Table I, application no. 10, in column 6 in the same line as SEQ ID NO. 121908 is depicted, non-targeted is mentioned.

[55757] In an embodiment the present invention relates to an expresssion cassette comprising a) a promoter, preferably a promoter selected from the group consisting of Big35S, PCUbi, Super and USP, in particular p-Super; and b) the nucleic acid SEQ ID NO. 88879, or a homolog or fragment thereof, or a homolog thereof being depicted in Table I, application no. 10, column 8, in the same line as SEQ ID NO. 88879, preferably the coding region thereof, a homolog or a fragment thereof; which are operable linked.

[55758] In an embodiment thereof the expression cassette comprises in addition c) a nucleic acid molecule encoding a transit peptide, especially a plastidal transit petide in case in Table I, application no. 10, in column 6 in the same line as SEQ ID NO. 88879 is depicted, plastidic is mentioned, or a mitochondrial transit peptide in case in Table I, application no. 10, in column 6 in the same line as SEQ ID NO. 88879 is depicted, mitochondrial is mentioned; which is operable linked, too.

[55759] In another embodiment thereof the expression cassette does not comprise an additional transit peptide in case in Table I, application no. 10, in column 6 in the same line as SEQ ID NO. 88879 is depicted, non-targeted is mentioned.

[55760] In an embodiment the present invention relates to an expresssion cassette comprising a) a promoter, preferably a promoter selected from the group consisting of Big35S, PCUbi, Super and USP, in particular p-Super; and b) the nucleic acid SEQ ID NO. 113220, or a homolog or fragment thereof, or a homolog thereof being depicted in Table I, application no. 10, column 8, in the same line as SEQ ID NO. 113220, preferably the coding region thereof, a homolog or a fragment thereof; which are operable linked.

[55761] In an embodiment thereof the expression cassette comprises in addition c) a nucleic acid molecule encoding a transit peptide, especially a plastidal transit petide in case in Table I, application no. 10, in column 6 in the same line as SEQ ID NO. 113220 is depicted, plastidic is mentioned, or a mitochondrial transit peptide in case in Table I, application no. 10, in column 6 in the same line as SEQ ID NO. 113220 is depicted, mitochondrial is mentioned; which is operable linked, too.

[55762] In another embodiment thereof the expression cassette does not comprise an additional transit peptide in case in Table I, application no. 10, in column 6 in the same line as SEQ ID NO. 113220 is depicted, non-targeted is mentioned.

[55763] In an embodiment the present invention relates to an expresssion cassette comprising a) a promoter, preferably a promoter selected from the group consisting of Big35S, PCUbi, Super and USP, in particular p-PcUBI; and b) the nucleic acid SEQ ID NO. 119408, or a homolog or fragment thereof, or a homolog thereof being depicted in Table I, application no. 10, column 8, in the same line as SEQ ID NO. 119408, preferably the coding region thereof, a homolog or a fragment thereof; which are operable linked.

[55764] In an embodiment thereof the expression cassette comprises in addition c) a nucleic acid molecule encoding a transit peptide, especially a plastidal transit petide in case in Table I, application no. 10, in column 6 in the same line as SEQ ID NO. 119408 is depicted, plastidic is mentioned, or a mitochondrial transit peptide in case in Table I, application no. 10, in column 6 in the same line as SEQ ID NO. 119408 is depicted, mitochondrial is mentioned; which is operable linked, too.

[55765] In another embodiment thereof the expression cassette does not comprise an additional transit peptide in case in Table I, application no. 10, in column 6 in the same line as SEQ ID NO. 119408 is depicted, non-targeted is mentioned.

[55766] In an embodiment the present invention relates to an expresssion cassette comprising a) a promoter, preferably a promoter selected from the group consisting of Big35S, PCUbi, Super and USP, in particular p-PcUBI; and b) the nucleic acid SEQ ID NO. 122228, or a homolog or fragment thereof, or a homolog thereof being depicted in Table I, application no. 10, column 8, in the same line as SEQ ID NO. 122228, preferably the coding region thereof, a homolog or a fragment thereof; which are operable linked.

[55767] In an embodiment thereof the expression cassette comprises in addition c) a nucleic acid molecule encoding a transit peptide, especially a plastidal transit petide in case in Table I, application no. 10, in column 6 in the same line as SEQ ID NO. 122228 is depicted, plastidic is mentioned, or a mitochondrial transit peptide in case in Table I, application no. 10, in column 6 in the same line as SEQ ID NO. 122228 is depicted, mitochondrial is mentioned; which is operable linked, too.

[55768] In another embodiment thereof the expression cassette does not comprise an additional transit peptide in case in Table I, application no. 10, in column 6 in the same line as SEQ ID NO. 122228 is depicted, non-targeted is mentioned.

[55769] In an embodiment the present invention relates to an expresssion cassette comprising a) a promoter, preferably a promoter selected from the group consisting of Big35S, PCUbi, Super and USP, in particular Big35S; and b) the nucleic acid SEQ ID NO. 90165, or a homolog or fragment thereof, or a homolog thereof being depicted in Table I, application no. 10, column 8, in the same line as SEQ ID NO. 90165, preferably the coding region thereof, a homolog or a fragment thereof; which are operable linked.

[55770] In an embodiment thereof the expression cassette comprises in addition c) a nucleic acid molecule encoding a transit peptide, especially a plastidal transit petide in case in Table I, application no. 10, in column 6 in the same line as SEQ ID NO. 90165 is depicted, plastidic is mentioned, or a mitochondrial transit peptide in case in Table I, application no. 10, in column 6 in the same line as SEQ ID NO. 90165 is depicted, mitochondrial is mentioned; which is operable linked, too.

[55771] In another embodiment thereof the expression cassette does not comprise an additional transit peptide in case in Table I, application no. 10, in column 6 in the same line as SEQ ID NO. 90165 is depicted, non-targeted is mentioned.

[55772] In an embodiment the present invention relates to an expresssion cassette comprising a) a promoter, preferably a promoter selected from the group consisting of Big35S, PCUbi, Super and USP, in particular Big35S; and b) the nucleic acid SEQ ID NO. 120309, or a homolog or fragment thereof, or a homolog thereof being depicted in Table I, application no. 10, column 8, in the same line as SEQ ID NO. 120309, preferably the coding region thereof, a homolog or a fragment thereof; which are operable linked.

[55773] In an embodiment thereof the expression cassette comprises in addition c) a nucleic acid molecule encoding a transit peptide, especially a plastidal transit petide in case in Table I, application no. 10, in column 6 in the same line as SEQ ID NO. 120309 is depicted, plastidic is mentioned, or a mitochondrial transit peptide in case in Table I, application no. 10, in column 6 in the same line as SEQ ID NO. 120309 is depicted, mitochondrial is mentioned; which is operable linked, too.

[55774] In another embodiment thereof the expression cassette does not comprise an additional transit peptide in case in Table I, application no. 10, in column 6 in the same line as SEQ ID NO. 120309 is depicted, non-targeted is mentioned.

[55775] In an embodiment the present invention relates to an expresssion cassette comprising a) a promoter, preferably a promoter selected from the group consisting of Big35S, PCUbi, Super and USP, in particular p-PcUBI; and b) the nucleic acid SEQ ID NO. 117482, or a homolog or fragment thereof, or a homolog thereof being depicted in Table I, application no. 10, column 8, in the same line as SEQ ID NO. 117482, preferably the coding region thereof, a homolog or a fragment thereof; which are operable linked.

[55776] In an embodiment thereof the expression cassette comprises in addition c) a nucleic acid molecule encoding a transit peptide, especially a plastidal transit petide in case in Table I, application no. 10, in column 6 in the same line as SEQ ID NO. 117482 is depicted, plastidic is mentioned, or a mitochondrial transit peptide in case in Table I, application no. 10, in column 6 in the same line as SEQ ID NO. 117482 is depicted, mitochondrial is mentioned; which is operable linked, too.

[55777] In another embodiment thereof the expression cassette does not comprise an additional transit peptide in case in Table I, application no. 10, in column 6 in the same line as SEQ ID NO. 117482 is depicted, non-targeted is mentioned.

[55778] In an embodiment the present invention relates to an expresssion cassette comprising a) a promoter, preferably a promoter selected from the group consisting of Big35S, PCUbi, Super and USP, in particular Big35S; and b) the nucleic acid SEQ ID NO. 66772, or a homolog or fragment thereof, or a homolog thereof being depicted in Table I, application no. 10, column 8, in the same line as SEQ ID NO. 66772, preferably the coding region thereof, a homolog or a fragment thereof; which are operable linked.

[55779] In an embodiment thereof the expression cassette comprises in addition c) a nucleic acid molecule encoding a transit peptide, especially a plastidal transit petide in case in Table I, application no. 10, in column 6 in the same line as SEQ ID NO. 66772 is depicted, plastidic is mentioned, or a mitochondrial transit peptide in case in Table I, application no. 10, in column 6 in the same line as SEQ ID NO. 66772 is depicted, mitochondrial is mentioned; which is operable linked, too.

[55780] In another embodiment thereof the expression cassette does not comprise an additional transit peptide in case in Table I, application no. 10, in column 6 in the same line as SEQ ID NO. 66772 is depicted, non-targeted is mentioned.

[55781] In an embodiment the present invention relates to an expresssion cassette comprising a) a promoter, preferably a promoter selected from the group consisting of Big35S, PCUbi, Super and USP, in particular p-Super; and b) the nucleic acid SEQ ID NO. 15183, or a homolog or fragment thereof, or a homolog thereof being depicted in Table I, application no. 10, column 8, in the same line as SEQ ID NO. 15183, preferably the coding region thereof, a homolog or a fragment thereof; which are operable linked.

[55782] In an embodiment thereof the expression cassette comprises in addition c) a nucleic acid molecule encoding a transit peptide, especially a plastidal transit petide in case in Table I, application no. 10, in column 6 in the same line as SEQ ID NO. 15183 is depicted, plastidic is mentioned, or a mitochondrial transit peptide in case in Table I, application no. 10, in column 6 in the same line as SEQ ID NO. 15183 is depicted, mitochondrial is mentioned; which is operable linked, too.

[55783] In another embodiment thereof the expression cassette does not comprise an additional transit peptide in case in Table I, application no. 10, in column 6 in the same line as SEQ ID NO. 15183 is depicted, non-targeted is mentioned.

[55784] In an embodiment the present invention relates to an expresssion cassette comprising a) a promoter, preferably a promoter selected from the group consisting of Big35S, PCUbi, Super and USP, in particular p-PcUBI; and b) the nucleic acid SEQ ID NO. 15532, or a homolog or fragment thereof, or a homolog thereof being depicted in Table I, application no. 10, column 8, in the same line as SEQ ID NO. 15532, preferably the coding region thereof, a homolog or a fragment thereof; which are operable linked.

[55785] In an embodiment thereof the expression cassette comprises in addition c) a nucleic acid molecule encoding a transit peptide, especially a plastidal transit petide in case in Table I, application no. 10, in column 6 in the same line as SEQ ID NO. 15532 is depicted, plastidic is mentioned, or a mitochondrial transit peptide in case in Table I, application no. 10, in column 6 in the same line as SEQ ID NO. 15532 is depicted, mitochondrial is mentioned; which is operable linked, too.

[55786] In another embodiment thereof the expression cassette does not comprise an additional transit peptide in case in Table I, application no. 10, in column 6 in the same line as SEQ ID NO. 15532 is depicted, non-targeted is mentioned.

[55787] In an embodiment the present invention relates to an expresssion cassette comprising a) a promoter, preferably a promoter selected from the group consisting of Big35S, PCUbi, Super and USP, in particular p-PcUBI; and b) the nucleic acid SEQ ID NO. 16883, or a homolog or fragment thereof, or a homolog thereof being depicted in Table I, application no. 10, column 8, in the same line as SEQ ID NO. 16883, preferably the coding region thereof, a homolog or a fragment thereof; which are operable linked.

[55788] In an embodiment thereof the expression cassette comprises in addition c) a nucleic acid molecule encoding a transit peptide, especially a plastidal transit petide in case in Table I, application no. 10, in column 6 in the same line as SEQ ID NO. 16883 is depicted, plastidic is mentioned, or a mitochondrial transit peptide in case in Table I, application no. 10, in column 6 in the same line as SEQ ID NO. 16883 is depicted, mitochondrial is mentioned; which is operable linked, too.

[55789] In another embodiment thereof the expression cassette does not comprise an additional transit peptide in case in Table I, application no. 10, in column 6 in the same line as SEQ ID NO. 16883 is depicted, non-targeted is mentioned.

[55790] [0165.1.8.10] to [0170.1.8.10] for the disclosure of these paragraphs see [0165.1.8.8] to [0170.1.8.8] above.

[55791] The invention further provides a vector, comprising a nucleic acid molecule comprising 1) a nucleic acid molecule selected from the group consisting of:
[55792] (a) a nucleic acid molecule encoding a polypeptide shown in Table II, column 5 or 8, application no. 10, preferably shown in Table II A, application no. 10, in column 5, or in Table II A, application no. 10, column 8, or in Table II B, application no. 10, column 8, or a homolog or a fragment thereof;
[55793] (b) a nucleic acid molecule shown in Table I, application no. 10, column 5 or 8, preferably shown in Table I A, application no. 10, in column 5, or in Table I A, application no. 10, column 8, or in Table I B, application no. 10, column 8, preferably the coding region thereof, or a homolog or a fragment thereof;
[55794] (c) a nucleic acid molecule, which, as a result of the degeneracy of the genetic code, can be derived from a polypeptide sequence depicted in column 5 or 8 of Table II, application no. 10, preferably shown in Table II A, application no. 10, in column 5, or in Table II A, application no. 10, column 8, or in Table II B, application no. 10, column 8;
[55795] (d) a nucleic acid molecule having at least 30% identity, preferably at least 40%, 50%, 60%, 70%, 75%, 80%, 85%, 90%, 95%, 96%, 97%, 98%, 99%, 99.5%, with the nucleic acid molecule sequence of a polynucleotide comprising the nucleic acid molecule shown in column 5 or 8 of Table I, application no. 10, preferably shown in Table I A, application no. 10, in column 5, or in Table I A, application no. 10, column 8, or in Table I B, application no. 10, column 8, preferably the coding region thereof;
[55796] (e) a nucleic acid molecule encoding a polypeptide having at least 30% identity, preferably at least 40%, 50% 60%, 70%, 75%, 80%, 85%, 90%, 95%, 96%, 97%, 98%, 99%, 99.5%, identity with the amino acid sequence of the polypeptide encoded by the nucleic acid molecule of (a), (b), (c), or (d);
[55797] (f) a nucleic acid molecule which hybridizes with a nucleic acid molecule of (a), (b), (c), (d), or (e) under stringent hybridization conditions;
[55798] (g) a nucleic acid molecule encoding a polypeptide which can be isolated with the aid of monoclonal or polyclonal antibodies made against a polypeptide encoded by one of the nucleic acid molecules of (a), (b), (c), (d), (e) or (f);
[55799] (h) a nucleic acid molecule encoding a polypeptide comprising the consensus sequence or one or more polypeptide motifs as shown in column 8 of Table IV, application no. 10;
[55800] (i) a nucleic acid molecule encoding a polypeptide having the activity represented by a protein as depicted in column 5 of Table II, application no. 10;
[55801] (j) a nucleic acid molecule comprising a polynucleotide which is obtained by amplifying a cDNA library or a genomic library using the primers in Table III, application no. 10, column 8;
[55802] and
[55803] (k) nucleic acid molecule which is obtainable by screening a suitable nucleic acid library, especially a cDNA library and/or a genomic library, under stringent hybridization conditions with a probe comprising one of the sequences of the nucleic acid molecule of (a), (b), (c), (d), (e), (f), (g), (h), (i) or (j) or with a fragment thereof having at least 15 nt, preferably 20 nt, 30 nt, 50 nt, 100 nt, 200 nt, 500 nt, 1000 nt, 1500 nt, 2000 nt or 3000 nt of the nucleic acid molecule complementary to a nucleic acid sequence characterized in (a), (b), (c), (d), (e), (f), (g), (h), (i) or (j);
[55804] or a nucleic acid molecule comprising a sequence which is complementary thereto.
   (All the references to Tables I to IV are references to the corresponding lines of Tables I to IV.)

[55805] In a preferred embodiment of said vector said nucleic acid molecule according to 1 (a), (b), (c), (d), (e), (f), (g), (h), (i), (j) or (k) encodes a polypeptide which has the activity of the respective polypeptide represented by a protein comprising a polypeptide as depicted in the respective line in column 5 of Table II, application no. 10.

[55806] In another preferred embodiment of said vector said nucleic acid molecule according to 1 (a), (b), (c), (d), (e), (f), (g), (h), (i), (j) or (k) confers a generation or an increase of the respective fine chemical in a non-human organism or a part thereof as compared to a corresponding wild-type non-human organism or part thereof.

[55807] In another preferred embodiment of said vector said nucleic acid molecule according to 1 (a), (b), (c), (d), (e), (f), (g), (h), (i), (j) or (k) encodes a polypeptide which has the activity of the respective polypeptide represented by a protein as depicted in the respective line in column 5 of Table II, application no. 10, and confers a generation or an increase of the respective fine chemical in a non-human organism or a part thereof as compared to a corresponding wild-type non-human organism or part thereof.

[55808] In another embodiment thereof said vector comprises beneath said nucleic acid molecule according to 1 (a), (b), (c), (d), (e), (f), (g), (h), (i), (j) or (k), a promoter, preferably a promoter selected from the group consisting of Big35S, PCUbi, Super and USP, which are operable linked.

[55809] In a preferred embodiment thereof said vector comprises beneath said nucleic acid molecule according to 1 (a), (b), (c), (d), (e), (f), (g), (h), (i), (j) or (k), a promoter, preferably a promoter selected from the group consisting of Big35S, PCUbi, Super and USP, which are operable linked; and said nucleic acid molecule according to 1 (a), (b), (c), (d), (e), (f), (g), (h), (i), (j) or (k) encodes a polypeptide which has the activity of the respective polypeptide represented by a protein comprising a polypeptide as depicted in the respective line in column 5 of Table II, application no. 10.

[55810] In another preferred embodiment thereof said vector comprises beneath said nucleic acid molecule according to 1 (a), (b), (c), (d), (e), (f), (g), (h), (i), (j) or (k), a promoter, preferably a promoter selected from the group consisting of Big35S, PCUbi, Super and USP, which are operable linked; and said nucleic acid molecule according to 1 (a), (b), (c), (d), (e), (f), (g), (h), (i), (j) or (k) confers a generation or an increase of the respective fine chemical in a non-human organism or a part thereof as compared to a corresponding wild-type non-human organism or part thereof.

[55811] In another preferred embodiment thereof said vector comprises beneath said nucleic acid molecule according to 1 (a), (b), (c), (d), (e), (f), (g), (h), (i), (j) or (k), a promoter, preferably a promoter selected from the group consisting of Big35S, PCUbi, Super and USP, which are operable linked; and said nucleic acid molecule according to 1 (a), (b), (c), (d), (e), (f), (g), (h), (i), (j) or (k) encodes a polypeptide which has the activity of the respective polypeptide represented by a protein as depicted in the respective line in column 5 of Table II, application no. 10, and confers a generation or an increase of the respective fine chemical in a non-human organism or a part thereof as compared to a corresponding wild-type non-human organism or part thereof.

[55812] In another embodiment thereof said vector comprises beneath said nucleic acid molecule according to 1 (a), (b), (c), (d), (e), (f), (g), (h), (i), (j) or (k), a nucleic acid molecule encoding a transit peptide, preferably encoding a plastidal transit peptide, especially in case in column 6 of Table I, application no. 10, in the same line as of the respective nucleic acid molecule according to 1) “plastidic” is depicted, or encoding a mitochondrial transit peptide, especially in case in column 6 of Table I, application no. 10, in the same line as of the respective nucleic acid molecule according to 1) “mitochondrial” is depicted, which are operable linked.

[55813] In another embodiment thereof said vector does not comprise beneath said nucleic acid molecule according to 1 (a), (b), (c), (d), (e), (f), (g), (h), (i), (j) or (k), a nucleic acid molecule encoding a transit peptide in case in column 6 of Table I, application no. 10, in the same line as of the respective nucleic acid molecule according to 1) “non-targeted” is depicted.

[55814] In another embodiment thereof said vector comprises beneath said nucleic acid molecule according to 1 (a), (b), (c), (d), (e), (f), (g), (h), (i), (j) or (k), and a promoter, preferably a promoter selected from the group consisting of Big35S, PCUbi, Super and USP; a nucleic acid molecule encoding a transit peptide, preferably encoding a plastidal transit peptide, especially in case in column 6 of Table I, application no. 10, in the same line as of the respective nucleic acid molecule according to 1) “plastidic” is depicted, or encoding a mitochondrial transit peptide, especially in case in column 6 of Table I, application no. 10, in the same line as of the respective nucleic acid molecule according to 1) “mitochondrial” is depicted, which are operable linked.

[55815] In another embodiment thereof said vector does not comprise beneath said nucleic acid molecule according to 1 (a), (b), (c), (d), (e), (f), (g), (h), (i), (j) or (k), and a promoter, preferably a promoter selected from the group consisting of Big35S, PCUbi, Super and USP, which are operable linked; a nucleic acid molecule encoding a transit peptide, especially in case in column 6 of Table I, application no. 10, in the same line as of the respective nucleic acid molecule according to 1) “non-targeted” is depicted.

[55816] In another embodiment thereof said vector comprises beneath said nucleic acid molecule according to 1 (a), (b), (c), (d), (e), (f), (g), (h), (i), (j) or (k), and a promoter, preferably a promoter selected from the group consisting of Big35S, PCUbi, Super and USP; a nucleic acid molecule encoding a transit peptide, preferably encoding a plastidal transit peptide, especially in case in column 6 of Table I, application no. 10, in the same line as of the respective nucleic acid molecule according to 1) “plastidic” is depicted, or encoding a mitochondrial transit peptide, especially in case in column 6 of Table I, application no. 10, in the same line as of the respective nucleic acid molecule according to 1) “mitochondrial” is depicted, which are operable linked; and wherein said nucleic acid molecule according to 1 (a), (b), (c), (d), (e), (f), (g), (h), (i), (j) or (k) encodes a polypeptide which has the activity of the respective polypeptide represented by a protein comprising a polypeptide as depicted in column 5 of Table II, application no. 10 (in the same line).

[55817] In another embodiment thereof said vector does not comprise beneath said nucleic acid molecule according to 1 (a), (b), (c), (d), (e), (f), (g), (h), (i), (j) or (k), and a promoter, preferably a promoter selected from the group consisting of Big35S, PCUbi, Super and USP, which are operatively linked; a nucleic acid molecule encoding a transit peptide, especially in case in column 6 of Table I, application no. 10, in the same line as of the respective nucleic acid molecule according to 1) “non-targeted” is depicted; and wherein said nucleic acid molecule according to 1 (a), (b), (c), (d), (e), (f), (g), (h), (i), (j) or (k) encodes a polypeptide which has the activity of the respective polypeptide represented by a protein comprising a polypeptide as depicted in column 5 of Table II, application no. 10.

[55818] In another embodiment thereof said vector comprises beneath said nucleic acid molecule according to 1 (a), (b), (c), (d), (e), (f), (g), (h), (i), (j) or (k), and a promoter, preferably a promoter selected from the group consisting of Big35S, PCUbi, Super and USP; a nucleic acid molecule encoding a transit peptide, preferably encoding a plastidal transit peptide, especially in case in column 6 of Table I, application no. 10, in the same line as of the respective nucleic acid molecule according to 1) “plastidic” is depicted, or encoding a mitochondrial transit peptide, especially in case in column 6 of Table I, application no. 10, in the same line as of the respective nucleic acid molecule according to 1) “mitochondrial” is depicted, which are operable linked; and wherein said nucleic acid molecule according to 1 (a), (b), (c), (d), (e), (f), (g), (h), (i), (j) or (k) confers a generation or an increase of the respective fine chemical in a non-human organism or a part thereof as compared to a corresponding wild-type non-human organism or part thereof.

[55819] In another embodiment thereof said vector does not comprise beneath said nucleic acid molecule according to 1 (a), (b), (c), (d), (e), (f), (g), (h), (i), (j) or (k), and a promoter, preferably a promoter selected from the group consisting of Big35S, PCUbi, Super and USP, which are operatively linked; a nucleic acid molecule encoding a transit peptide, especially in case in column 6 of Table I, application no. 10, in the same line as of the respective nucleic acid molecule according to 1) “non-targeted” is depicted; and wherein said nucleic acid molecule according to 1 (a), (b), (c), (d), (e), (f), (g), (h), (i), (j) or (k) confers a generation or an increase of the respective fine chemical in a non-human organism or a part thereof as compared to a corresponding wild-type non-human organism or part thereof.

[55820] In another embodiment thereof said vector comprises beneath said nucleic acid molecule according to 1 (a), (b), (c), (d), (e), (f), (g), (h), (i), (j) or (k), and a promoter, preferably a promoter selected from the group consisting of Big35S, PCUbi, Super and USP; a nucleic acid molecule encoding a transit peptide, preferably encoding a plastidal transit peptide, especially in case in column 6 of Table I, application no. 10, in the same line as of the respective nucleic acid molecule according to 1) “plastidic” is depicted, or encoding a mitochondrial transit peptide, especially in case in column 6 of Table I, application no. 10, in the same line as of the respective nucleic acid molecule according to 1) “mitochondrial” is depicted, which are operable linked; and wherein said nucleic acid molecule according to 1 (a), (b), (c), (d), (e), (f), (g), (h), (i), (j) or (k) encodes a polypeptide which has the activity of the respective polypeptide represented by a protein as depicted in column 5 of Table II application no. 10 and confers a generation or an increase of the respective fine chemical in a non-human organism or a part thereof as compared to a corresponding wild-type non-human organism or part thereof.

[55821] In another embodiment thereof said vector does not comprise beneath said nucleic acid molecule according to 1 (a), (b), (c), (d), (e), (f), (g), (h), (i), (j) or (k), and a promoter, preferably a promoter selected from the group consisting of Big35S, PCUbi, Super and USP, which are operatively linked; a nucleic acid molecule encoding a transit peptide, especially in case in column 6 of Table I, application no. 10, in the same line as of the respective nucleic acid molecule according to 1) “non-targeted” is depicted; and wherein said nucleic acid molecule according to 1 (a), (b), (c), (d), (e), (f), (g), (h), (i), (j) or (k) encodes a polypeptide which has the activity of the respective polypeptide represented by a protein as depicted in column 5 of Table II application no. 10 (in the same line) and confers a generation or an increase of the respective fine chemical in a non-human organism or a part thereof as compared to a corresponding wild-type non-human organism or part thereof.

[55822] In a preferred embodiment of said vector said nucleic acid molecule according to 1 (a), (b), (c), (d), (e), (f), (g), (h), (i), (j) or (k), said promoter and optionally said nucleic acid molecule encoding a transit peptide are encompassed in an expression cassette. Accordingly in an embodiment the invention provides a vector comprising an expression cassette comprising said nucleic acid molecule according to 1 (a), (b), (c), (d), (e), (f), (g), (h), (i), (j) or (k), said promoter and optionally said a nucleic acid molecule encoding a transit peptide, operable linked. Said expression cassette may encompass a terminator, too.

[55823] The invention further provides a vector comprising a nucleic acid molecule comprising
[55824] 1) a nucleic acid molecule selected from the group consisting of:
   [55825] (a) a nucleic acid molecule encoding a polypeptide shown in Table II, column 5 or 8, application no. 10, preferably shown in Table II A, application no. 10, in column 5, or in Table II A, application no. 10, column 8, or in Table II B, application no. 10, column 8, or a homolog or a fragment thereof;
   [55826] (b) a nucleic acid molecule shown in Table I, application no. 10, column 5 or 8, preferably shown in Table I A, application no. 10, in column 5, or in Table I A, application no. 10, column 8, or in Table I B, application no. 10, column 8, preferably the coding region thereof, or a homolog or a fragment thereof;
   [55827] (c) a nucleic acid molecule, which, as a result of the degeneracy of the genetic code, can be derived from a polypeptide sequence depicted in column 5 or 8 of Table II, application no. 10, preferably shown in Table II A, application no. 10, in column 5, or in Table II A, application no. 10, column 8, or in Table II B, application no. 10, column 8;
   [55828] (d) a nucleic acid molecule having at least 30% identity, preferably at least 40%, 50%, 60%, 70%, 75%, 80%, 85%, 90%, 95%, 96%, 97%, 98%, 99%, 99.5%, with the nucleic acid molecule sequence of a polynucleotide comprising the nucleic acid molecule shown in column 5 or 8 of Table I, application no. 10, preferably shown in Table I A, application no. 10, in column 5, or in Table I A, application no. 10, column 8, or in Table I B, application no. 10, column 8, preferably the coding region thereof;
   [55829] (e) a nucleic acid molecule encoding a polypeptide having at least 30% identity, preferably at least 40%, 50% 60%, 70%, 75%, 80%, 85%, 90%, 95%, 96%, 97%, 98%, 99%, 99.5%, identity with the amino acid sequence of the polypeptide encoded by the nucleic acid molecule of (a), (b), (c), or (d);
   [55830] (f) a nucleic acid molecule which hybridizes with a nucleic acid molecule of (a), (b), (c), (d), or (e) under stringent hybridization conditions;
   [55831] (g) a nucleic acid molecule encoding a polypeptide which can be isolated with the aid of monoclonal or polyclonal antibodies made against a polypeptide encoded by one of the nucleic acid molecules of (a), (b), (c), (d), (e) or (f);
   [55832] (h) a nucleic acid molecule encoding a polypeptide comprising the consensus sequence or one or more polypeptide motifs as shown in column 8 of Table IV, application no. 10;
   [55833] (i) a nucleic acid molecule encoding a polypeptide having the activity represented by a protein as depicted in column 5 of Table II, application no. 10;
   [55834] (j) a nucleic acid molecule comprising a polynucleotide which is obtained by amplifying a cDNA library or a genomic library using the primers in Table III, application no. 10, column 8;
   [55835] and
   [55836] (k) nucleic acid molecule which is obtainable by screening a suitable nucleic acid library, especially a cDNA library and/or a genomic library, under stringent hybridization conditions with a probe comprising one of the sequences of the nucleic acid molecule of (a), (b), (c), (d), (e), (f), (g), (h), (i) or (j) or with a fragment thereof having at least 15 nt, preferably 20 nt, 30 nt, 50 nt, 100 nt, 200 nt, 500 nt, 1000 nt, 1500 nt, 2000 nt or 3000 nt of the nucleic acid molecule complementary to a nucleic acid sequence characterized in (a), (b), (c), (d), (e), (f), (g), (h), (i) or (j);
   [55837] or a nucleic acid molecule comprising a sequence which is complementary thereto;
      whereby, preferably, the nucleic acid molecule according to 1 (a), (b), (c), (d), (e), (f), (g), (h), (i), (j) or (k) distinguishes over the sequence depicted in Table I A and/or I B, application no. 10, column 5 or 8, or the coding region thereof, by one or more nucleotides (especially but not exceeding 5%, preferably 4%, 3%, 2%, 1%, 0.5%, 0.2% or 0.1%). In an embodiment, the nucleic acid molecule of the invention does not consist of the sequence shown in Table I A and/or I B, application no. 10, column 5 or 8, or the coding region thereof, respectively. In another embodiment, the nucleic acid molecule of the present invention, preferably the coding region thereof, is 30%, 40%, 50%, 60%, 70%, 80%, 90%, 95% identical but less than 100%, 99.999%, 99.99%, 99.9%, 99%, 98%, 97%, 96% or 95% identical to the sequence shown in Table I A and/or I B, application no. 10, column 5 or 8, or the coding region thereof, respectively. In a further embodiment the nucleic acid molecule does not encode the polypeptide sequence shown in Table II A and/or II B, application no. 10, column 5 or 8 but homologs thereof. Accordingly, in one embodiment, the nucleic acid molecule of the present invention encodes in one embodiment a polypeptide which differs at least in one or more amino acids (especially but not exceeding 5%, preferably 4%, 3%, 2%, 1%, 0.5%, 0.2% or 0.1%) from the polypeptide shown in Table II, application no. 10, column 5 or 8 and does not encode a protein of the sequence shown in Table II A and/or II B, application no. 10, column 5 or 8. Accordingly, in one embodiment, the protein encoded by a sequence of a nucleic acid according to (a), (b), (c), (d), (e), (f), (g), (h), (i), (j) or (k) does not consist of the sequence shown in Table I A and/or I B, application no. 10, column 5 and 8, or the coding region thereof. In a further embodiment, the protein of the present invention is at least 30%,40%, 50%, 60%, 70%, 80%, 90%, 95% identical to protein sequence depicted in Table II A and/or II B, application no. 10, column 5 or 8 but less than 100%, preferably less than 99.999%, 99.99% or 99.9%, more preferably less than 99%, 985, 97%, 96% or 95% identical to the sequence shown in Table II A and/or II B, application no. 10, column 5 or 8.
      (All the references to Tables I to IV are references to the corresponding lines of Tables I to IV.)

[55838] In a preferred embodiment of said vector said nucleic acid molecule according to 1 (a), (b), (c), (d), (e), (f), (g), (h), (i), (j) or (k) encodes a polypeptide which has the activity of the respective polypeptide represented by a protein comprising a polypeptide as depicted in the respective line in column 5 of Table II, application no. 10.

[55839] In another preferred embodiment of said vector said nucleic acid molecule according to 1 (a), (b), (c), (d), (e), (f), (g), (h), (i), (j) or (k) confers a generation or an increase of the respective fine chemical in a non-human organism or a part thereof as compared to a corresponding wild-type non-human organism or part thereof.

[55840] In another preferred embodiment of said vector said nucleic acid molecule according to 1 (a), (b), (c), (d), (e), (f), (g), (h), (i), (j) or (k) encodes a polypeptide which has the activity of the respective polypeptide represented by a protein as depicted in the respective line in column 5 of Table II, application no. 10, and confers a generation or an increase of the respective fine chemical in a non-human organism or a part thereof as compared to a corresponding wild-type non-human organism or part thereof.

[55841] In another embodiment thereof said vector comprises beneath said nucleic acid molecule according to 1 (a), (b), (c), (d), (e), (f), (g), (h), (i), (j) or (k), a promoter, preferably a promoter selected from the group consisting of Big35S, PCUbi, Super and USP, which are operable linked.

[55842] In a preferred embodiment thereof said vector comprises beneath said nucleic acid molecule according to 1 (a), (b), (c), (d), (e), (f), (g), (h), (i), (j) or (k), a promoter, preferably a promoter selected from the group consisting of Big35S, PCUbi, Super and USP, which are operable linked; and said nucleic acid molecule according to 1 (a), (b), (c), (d), (e), (f), (g), (h), (i), (j) or (k) encodes a polypeptide which has the activity of the respective polypeptide represented by a protein comprising a polypeptide as depicted in the respective line in column 5 of Table II, application no. 10.

[55843] In another preferred embodiment thereof said vector comprises beneath said nucleic acid molecule according to 1 (a), (b), (c), (d), (e), (f), (g), (h), (i), (j) or (k), a promoter, preferably a promoter selected from the group consisting of Big35S, PCUbi, Super and USP, which are operable linked; and said nucleic acid molecule according to 1 (a), (b), (c), (d), (e), (f), (g), (h), (i), (j) or (k) confers a generation or an increase of the respective fine chemical in a non-human organism or a part thereof as compared to a corresponding wild-type non-human organism or part thereof.

[55844] In another preferred embodiment thereof said vector comprises beneath said nucleic acid molecule according to 1 (a), (b), (c), (d), (e), (f), (g), (h), (i), (j) or (k), a promoter, preferably a promoter selected from the group consisting of Big35S, PCUbi, Super and USP, which are operable linked; and said nucleic acid molecule according to 1 (a), (b), (c), (d), (e), (f), (g), (h), (i), (j) or (k) encodes a polypeptide which has the activity of the respective polypeptide represented by a protein as depicted in the respective line in column 5 of Table II, application no. 10, and confers a generation or an increase of the respective fine chemical in a non-human organism or a part thereof as compared to a corresponding wild-type non-human organism or part thereof.

[55845] In another embodiment thereof said vector comprises beneath said nucleic acid molecule according to 1 (a), (b), (c), (d), (e), (f), (g), (h), (i), (j) or (k), a nucleic acid molecule encoding a transit peptide, preferably encoding a plastidal transit peptide, especially in case in column 6 of Table I, application no. 10, in the same line as of the respective nucleic acid molecule according to 1) “plastidic” is depicted, or encoding a mitochondrial transit peptide, especially in case in column 6 of Table I, application no. 10, in the same line as of the respective nucleic acid molecule according to 1) “mitochondrial” is depicted, which are operable linked.

[55846] In another embodiment thereof said vector does not comprise beneath said nucleic acid molecule according to 1 (a), (b), (c), (d), (e), (f), (g), (h), (i), (j) or (k), a nucleic acid molecule encoding a transit peptide in case in column 6 of Table I, application no. 10, in the same line as of the respective nucleic acid molecule according to 1) “non-targeted” is depicted.

[55847] In another embodiment thereof said vector comprises beneath said nucleic acid molecule according to 1 (a), (b), (c), (d), (e), (f), (g), (h), (i), (j) or (k), and a promoter, preferably a promoter selected from the group consisting of Big35S, PCUbi, Super and USP; a nucleic acid molecule encoding a transit peptide, preferably encoding a plastidal transit peptide, especially in case in column 6 of Table I, application no. 10, in the same line as of the respective nucleic acid molecule according to 1) “plastidic” is depicted, or encoding a mitochondrial transit peptide, especially in case in column 6 of Table I, application no. 10, in the same line as of the respective nucleic acid molecule according to 1) “mitochondrial” is depicted, which are operable linked.

[55848] In another embodiment thereof said vector does not comprise beneath said nucleic acid molecule according to 1 (a), (b), (c), (d), (e), (f), (g), (h), (i), (j) or (k), and a promoter, preferably a promoter selected from the group consisting of Big35S, PCUbi, Super and USP, which are operatively linked; a nucleic acid molecule encoding a transit peptide, especially in case in column 6 of Table I, application no. 10, in the same line as of the respective nucleic acid molecule according to 1) “non-targeted” is depicted.

[55849] In another embodiment thereof said vector comprises beneath said nucleic acid molecule according to 1 (a), (b), (c), (d), (e), (f), (g), (h), (i), (j) or (k), and a promoter, preferably a promoter selected from the group consisting of Big35S, PCUbi, Super and USP; a nucleic acid molecule encoding a transit peptide, preferably encoding a plastidal transit peptide, especially in case in column 6 of Table I, application no. 10, in the same line as of the respective nucleic acid molecule according to 1) “plastidic” is depicted, or encoding a mitochondrial transit peptide, especially in case in column 6 of Table I, application no. 10, in the same line as of the respective nucleic acid molecule according to 1) “mitochondrial” is depicted, which are operable linked; and wherein said nucleic acid molecule according to 1 (a), (b), (c), (d), (e), (f), (g), (h), (i), (j) or (k) encodes a polypeptide which has the activity of the respective polypeptide represented by a protein comprising a polypeptide as depicted in column 5 of Table II, application no. 10.

[55850] In another embodiment thereof said vector does not comprise beneath said nucleic acid molecule according to 1 (a), (b), (c), (d), (e), (f), (g), (h), (i), (j) or (k), and a promoter, preferably a promoter selected from the group consisting of Big35S, PCUbi, Super and USP, which are operatively linked; a nucleic acid molecule encoding a transit peptide, especially in case in column 6 of Table I, application no. 10, in the same line as of the respective nucleic acid molecule according to 1) “non-targeted” is depicted; and wherein said nucleic acid molecule according to 1 (a), (b), (c), (d), (e), (f), (g), (h), (i), (j) or (k) encodes a polypeptide which has the activity of the respective polypeptide represented by a protein comprising a polypeptide as depicted in column 5 of Table II, application no. 10.

[55851] In another embodiment thereof said vector comprises beneath said nucleic acid molecule according to 1 (a), (b), (c), (d), (e), (f), (g), (h), (i), (j) or (k), and a promoter, preferably a promoter selected from the group consisting of Big35S, PCUbi, Super and USP; a nucleic acid molecule encoding a transit peptide, preferably encoding a plastidal transit peptide, especially in case in column 6 of Table I, application no. 10, in the same line as of the respective nucleic acid molecule according to 1) “plastidic” is depicted, or encoding a mitochondrial transit peptide, especially in case in column 6 of Table I, application no. 10, in the same line as of the respective nucleic acid molecule according to 1) “mitochondrial” is depicted, which are operable linked; and wherein said nucleic acid molecule according to 1 (a), (b), (c), (d), (e), (f), (g), (h), (i), (j) or (k) confers a generation or an increase of the respective fine chemical in a non-human organism or a part thereof as compared to a corresponding wild-type non-human organism or part thereof.

[55852] In another embodiment thereof said vector does not comprise beneath said nucleic acid molecule according to 1 (a), (b), (c), (d), (e), (f), (g), (h), (i), (j) or (k), and a promoter, preferably a promoter selected from the group consisting of Big35S, PCUbi, Super and USP, which are operatively linked; a nucleic acid molecule encoding a transit peptide, especially in case in column 6 of Table I, application no. 10, in the same line as of the respective nucleic acid molecule according to 1) “non-targeted” is depicted; and wherein said nucleic acid molecule according to 1 (a), (b), (c), (d), (e), (f), (g), (h), (i), (j) or (k) confers a generation or an increase of the respective fine chemical in a non-human organism or a part thereof as compared to a corresponding wild-type non-human organism or part thereof.

[55853] In another embodiment thereof said vector comprises beneath said nucleic acid molecule according to 1 (a), (b), (c), (d), (e), (f), (g), (h), (i), (j) or (k), and a promoter, preferably a promoter selected from the group consisting of Big35S, PCUbi, Super and USP; a nucleic acid molecule encoding a transit peptide, preferably encoding a plastidal transit peptide, especially in case in column 6 of Table I, application no. 10, in the same line as of the respective nucleic acid molecule according to 1) “plastidic” is depicted, or encoding a mitochondrial transit peptide, especially in case in column 6 of Table I, application no. 10, in the same line as of the respective nucleic acid molecule according to 1) “mitochondrial” is depicted, which are operable linked; and wherein said nucleic acid molecule according to 1 (a), (b), (c), (d), (e), (f), (g), (h), (i), (j) or (k) encodes a polypeptide which has the activity of the respective polypeptide represented by a protein as depicted in column 5 of Table II application no. 10 and confers a generation or an increase of the respective fine chemical in a non-human organism or a part thereof as compared to a corresponding wild-type non-human organism or part thereof.

[55854] In another embodiment thereof said vector does not comprise beneath said nucleic acid molecule according to 1 (a), (b), (c), (d), (e), (f), (g), (h), (i), (j) or (k), and a promoter, preferably a promoter selected from the group consisting of Big35S, PCUbi, Super and USP, which are operatively linked; a nucleic acid molecule encoding a transit peptide, especially in case in column 6 of Table I, application no. 10, in the same line as of the respective nucleic acid molecule according to 1) “non-targeted” is depicted; and wherein said nucleic acid molecule according to 1 (a), (b), (c), (d), (e), (f), (g), (h), (i), (j) or (k) encodes a polypeptide which has the activity of the respective polypeptide represented by a protein as depicted in column 5 of Table II application no. 10 and confers a generation or an increase of the respective fine chemical in a non-human organism or a part thereof as compared to a corresponding wild-type non-human organism or part thereof.

[55855] [0181.1.8.10] to [0209.1.8.10] for the disclosure of these paragraphs see [0181.1.8.8] to [0209.1.8.8] above.

[55856] The genes of the invention, coding for an activity selected from the group consisting of 2-C-methyl-D-erythritol 4-phosphate cytidylyltransferase, 3-deoxy-7-phosphoheptulonate synthase, 3-ketoacyl-CoA thiolase, acetyl-coenzyme A synthetase, acid shock protein, aconitate hydratase, arginine decarboxylase, aspartate-ammonia ligase, At2g45420-protein, ATP-binding component of a transport system, b0283-protein, b0371-protein, b1672-protein, b2032-protein, b2399-protein, b2513-protein, b2849-protein, b3989-protein, b4121-protein, betaine aldehyde dehydrogenase, calcium-dependent protein kinase, cation-transporting ATPase, CCAAT-binding transcription factor, citrate synthase, coproporphyrinogen III oxidase, CTP synthetase, dihydroxyacetone kinase, ethanolamine utilization protein, F-box protein, glucokinase, glucose-6-phosphate 1-dehydrogenase, glutaredoxin, glycerol-3-phosphate dehydrogenase, heat shock transcription factor, isocitrate dehydrogenase, lipoprotein precursor, monothiol glutaredoxin, NADH dehydrogenase subunit N, oxidoreductase, phospho-2-dehydro-3-deoxyheptonate aldolase, protease, protein phosphatase, pyruvate kinase, sll1032-protein, sodium/proton antiporter, transcription factor, tryptophan synthase alpha chain, ycl049c-protein, ydr507c-protein, YGR104C-protein, and yor392w-protein are also called “FCRP genes”.

[55857] [0211.1.8.10] to [0225.1.8.10] for the disclosure of these paragraphs see [0211.1.8.8] to [0225.1.8.8] above.

[55858] In addition to the sequence mentioned in Table I, application no. 10, column 5 or 8, preferably the coding region thereof, or its homologs or fragments, it may be advantageous additionally to express and/or mutate further genes in the non-human organisms. Especially advantageously, additionally at least one further gene of the biosynthetic pathway of the fine chemical is expressed in the non-human organisms such as plants or microorganisms. It is also possible that the regulation of the natural genes has been modified advantageously so that the gene and/or its gene product is no longer subject to the regulatory mechanisms which exist in the non-human organisms. This leads to an increased synthesis of the respective fatty acid since, for example, feedback regulations no longer exist to the same extent or not at all. In addition it might be advantageously to combine the nucleic acids sequences of the invention containing the sequences shown in the respective line in Table I, application no. 10, column 5 or 8, preferably the coding region thereof, or homologs or fragments thereof, with genes which generally support or enhance the growth or yield of the target non-human organisms, for example genes which lead to faster growth rate of non human organism like microorganisms or plants or genes which produce stress-, pathogen-, or herbicide-resistant plants.

[55859] [0227.1.8.10] to [0239.1.8.10] for the disclosure of these paragraphs see [0227.1.8.8] to [0239.1.8.8] above.

[55860] In an embodiment of the present invention the nucleic acid construct of the present invention comprises a nucleic acid molecule as depicted in the respective line in Table I, application no. 10, column 5 or 8, preferably the coding region thereof, a fragment or a homolog thereof, and a plant promoter, such as the Big 35S promoter, the DC3 promoter, the PC Ubi promoter, the LegB4-promoter, the Super promoter, the USP promoter or the like. In another embodiment the nucleic acid construct of the present invention comprises a nucleic acid molecule as depicted in the respective line in Table I, application no. 10, column 5 or 8, preferably the coding region thereof, a fragment or a homolog thereof, and a plant promoter such as, for example, the USP, the LegB4-, the DC3 promoter or the ubiquitin promoter from parsley or other herein mentioned promoters. In a further embodiment the nucleic acid construct of the present invention comprises a nucleic acid molecule as depicted in the respective line in Table I, application no. 10, column 5 or 8, preferably the coding region thereof, a fragment or a homolog thereof, and a plant promoter, such as the Big 35S promoter, the PC Ubi promoter, the Super promoter, the USP promoter or the like. In addition different terminators may advantageously be used in these nucleic acid constructs; examples for transcriptional termination are polyadenylation signals.

[55861] [0241.1.8.10] to [0245.1.8.10] for the disclosure of these paragraphs see [0241.1.8.8] to [0245.1.8.8] above.

[55862] Other preferred sequences for use in operable linkage in gene expression constructs are targeting sequences, which are required for targeting the gene product into specific cell compartments (for a review, see Kermode, Crit. Rev. Plant Sci. 15 (4), 285 (1996) and references cited therein), for example into the vacuole, the nucleus, all types of plastids, such as amyloplasts, chloroplasts, chromoplasts, the extracellular space, the mitochondria, the endoplasmic reticulum, elaioplasts, peroxisomes, glycosomes, and other compartments of cells or extracellular; preferred are sequences, which are involved in targeting to plastids as mentioned above. Sequences, which must be mentioned in this context are, in particular, the signalpeptideor transit-peptide-encoding sequences which are known per se. For example, plastidtransit-peptide-encoding sequences enable the targeting of the expression product into the plastids of a plant cell. Targeting sequences are also known for eukaryotic and to a lower extent for prokaryotic organisms and can advantageously be operable linked with the nucleic acid molecule of the present invention as shown in Table I, application no. 10, columns 5 and 8, preferably the coding region thereof, or homologs or fragments thereof, and described herein to achieve an expression in one of said compartments or extracellular.

[55863] [0247.1.8.10] to [0266.1.8.10] for the disclosure of these paragraphs see [0247.1.8.8] to [0266.1.8.8] above.

[55864] An embodiment of the invention relates to a vector where the nucleic acid molecule according to the invention is linked operably to regulatory sequences which permit the expression in a prokaryotic or eukaryotic host. A further embodiment of the invention relates to a vector in which a nucleic acid sequence encoding one of the polypeptides shown in the respective line in Table II, application no. 10, columns 5 or 8, or homologs or fragments thereof, is functionally linked to a targeting sequence such as a plastidial or mitochondrial targeting sequence. A further embodiment of the invention relates to a vector in which a nucleic acid sequence encoding one of the polypeptides shown in the respective line in Table II, application no. 10, columns 5 or 8, or homologs or fragments thereof, is functionally linked to (a) regulatory sequence which permit the expression in an organelle, such as plastids or mitochondria, preferably plastids.

[55865] A further embodiment of the invention relates to a vector which comprises a nucleic acid sequence encoding one of the polypeptides shown in the respective line in Table II, application no. 10, columns 5 or 8, or homologs or fragments thereof, but no additional targeting sequence.

[55866] [0268.1.8.10] to [0273.1.8.10] for the disclosure of these paragraphs see [0268.1.8.8] to [0273.1.8.9] above.

[55867] A further object of the invention relates to the use of a nucleic acid construct, e.g. an expression cassette, comprising one or more nucleic acid molecules encoding one or more polypeptides as depicted in the respective line(s) in Table II, application no. 10, columns 5 or 8, or homologs or fragments thereof, or comprising one or more nucleic acid molecules as depicted in the respective line(s) in Table I, application no. 10, columns 5 or 8, preferably the coding region thereof, or homologs or fragments thereof, or comprising a nucleic acid molecule hybridizing therewith for the transformation of a microorganism or a plant cell, plant tissues or a part of a plant.

[55868] In doing so, depending on the choice of promoter, the nucleic acid molecules shown in the respective line in Table I, application no. 10, column 5 or 8, preferably the coding region thereof, or homologs or fragments thereof, or the nucleic acid molecules encoding a polypeptide as depicted in the respective line in Table II, application no. 10, column 5 or 8, or homologs or fragments thereof, can be expressed in the whole plant or specifically e.g. in the leaves, in the seeds, the nodules, in roots, in the stem or other parts of the plant. Those transgenic plants overproducing sequences, e.g. as depicted in the respective line in Table I, application no. 10, column 5 or 8, preferably the coding region thereof, or homologs or fragments thereof, the plant cell, plant tissues, plants, the reproductive material thereof, or parts thereof are a further object of the present invention.

[55869] Within the framework of the present invention, the production of the stearic acid is due to the generation or over-expression of one or more polypeptides as depicted in the respective line(s) in Table II, application no. 10, column 5 or 8, or homologs or fragments thereof, or encoded by the corresponding nucleic acid molecules as depicted in the respective line(s) in Table I, application no. 10, column 5 or 8, preferably the coding region thereof, or homologs or fragments thereof, in the non-human organism according to the invention, advantageously in the transgenic microorganism or plant according to the invention, at least for the duration of at least one plant generation.

[55870] A constitutive expression of the polypeptide as depicted in the respective line in Table II, application no. 10, column 5 or 8, or homologs or fragments thereof, or encoded by the respective nucleic acid molecule as depicted in the respective line in Table I, application no. 10, column 5 or 8, preferably the coding region thereof, or homologs or fragments thereof, may be advantageous. On the other hand, an inducible expression may also appear desirable. Expression of the polypeptide sequences of the invention can be either directed to the cytosol or to the organelles, such as plastids or mitochondria, preferably the plastids of the host cells, preferably the plant cells, or non-targeted.

[55871] for the disclosure of this paragraph see [0278.1.8.8] above.

[55872] In a further embodiment the invention relates to a transgenic non-human organisms such as transgenic microorganism or transgenic plant comprising a nucleic acid molecule comprising
[55873] [1) a nucleic acid molecule selected from the group consisting of
   [55874] (a) a nucleic acid molecule encoding a polypeptide shown in Table II, application no. 10, column 5 or 8, preferably shown in Table II A, application no. 10, column 5, or in Table II A, application no. 10, column 8, or in Table II B, application no. 10, column 8, or a homolog or a fragment thereof;
   [55875] (b) a nucleic acid molecule shown in Table I, application no. 10, column 5 or 8, preferably shown in Table I A, application no. 10, column 5, or in Table I A, application no. 10, column 8, or in Table I B, application no. 10, column 8, preferably the coding region thereof, or a homolog or a fragment thereof;
   [55876] (c) a nucleic acid molecule, which, as a result of the degeneracy of the genetic code, can be derived from a polypeptide sequence depicted in column 5 or 8 of Table II, application no. 10, preferably shown in Table II A, application no. 10, column 5, or in Table II A, application no. 10, column 8, or in Table II B, application no. 10, column 8;
   [55877] (d) a nucleic acid molecule having at least 30% identity, preferably at least 40%, 50%, 60%, 70%, 75%, 80%, 85%, 90%, 95%, 96%, 97%, 98%, 99%, 99.5%, with the nucleic acid molecule sequence of a polynucleotide comprising the nucleic acid molecule shown in column 5 or 8 of Table I, application no. 10, preferably shown in Table I A, application no. 10, column 5, or in Table I A, application no. 10, column 8, or in Table I B, application no. 10, column 8, preferably the coding region thereof;
   [55878] (e) a nucleic acid molecule encoding a polypeptide having at least 30% identity, preferably at least 40%, 50% 60%, 70%, 75%, 80%, 85%, 90%, 95%, 96%, 97%, 98%, 99%, 99.5%, identity with the amino acid sequence of the polypeptide encoded by the nucleic acid molecule of (a), (b), (c) or (d);
   [55879] (f) a nucleic acid molecule which hybridizes with a nucleic acid molecule of (a), (b), (c), (d) or (e) under stringent hybridization conditions;
   [55880] (g) a nucleic acid molecule encoding a polypeptide which can be isolated with the aid of monoclonal or polyclonal antibodies made against a polypeptide encoded by one of the nucleic acid molecules of (a), (b), (c), (d), (e) or (f);
   [55881] (h) a nucleic acid molecule encoding a polypeptide comprising the consensus sequence or one or more polypeptide motifs as shown in column 8 of Table IV, application no. 10;
   [55882] (i) a nucleic acid molecule encoding a polypeptide having the activity represented by a respective protein as depicted in column 5 of Table II, application no. 10;
   [55883] (j) a nucleic acid molecule comprising a polynucleotide which is obtained by amplifying a cDNA library or a genomic library using the primers in Table III, application no. 10, column 8;
   [55884] and
   [55885] (k) nucleic acid molecule which is obtainable by screening a suitable nucleic acid library, especially a cDNA library and/or a genomic library, under stringent hybridization conditions with a probe comprising one of the sequences of the nucleic acid molecule of (a), (b), (c), (d), (e), (f), (g), (h), (i) or (j) or with a fragment of at least 15 nt, preferably 20 nt, 30 nt, 50 nt, 100 nt, 200 nt,500 nt, 1000 nt, 1500 nt, 2000 nt or 3000 nt of the nucleic acid molecule characterized in (a), (b), (c), (d), (e), (f), (g), (h), (i) or (j);
   [55886] or a nucleic acid molecule comprising a sequence which is complementary thereto;
      and, if desired
[55887] 2) nucleic acid molecule encoding a transit peptide, preferably encoding a plastidal transit peptide or a mitochondrial transit peptide;
   which are operable linked;]
   or comprising an expression cassette comprising
[55888] [0) a promoter, preferably a promoter selected from the group consisting of Big35S, PCUbi, Super and USP; and
[55889] 1) a nucleic acid molecule selected from the group consisting of
   [55890] (a) a nucleic acid molecule encoding a polypeptide shown in Table II, application no. 10, column 5 or 8, preferably shown in Table II A, application no. 10, column 5, or in Table II A, application no. 10, column 8, or in Table II B, application no. 10, column 8, or a homolog or a fragment thereof;
   [55891] (b) a nucleic acid molecule shown in Table I, application no. 10, column 5 or 8, preferably shown in Table I A, application no. 10, column 5, or in Table I A, application no. 10, column 8, or in Table I B, application no. 10, column 8, preferably the coding region thereof, or a homolog or a fragment thereof;
   [55892] (c) a nucleic acid molecule, which, as a result of the degeneracy of the genetic code, can be derived from a polypeptide sequence depicted in column 5 or 8 of Table II, application no. 10, preferably shown in Table II A, application no. 10, column 5, or in Table II A, application no. 10, column 8, or in Table II B, application no. 10, column 8;
   [55893] (d) a nucleic acid molecule having at least 30% identity, preferably at least 40%, 50%, 60%, 70%, 75%, 80%, 85%, 90%, 95%, 96%, 97%, 98%, 99%, 99.5%, with the nucleic acid molecule sequence of a polynucleotide comprising the nucleic acid molecule shown in column 5 or 8 of Table I, application no. 10, preferably shown in Table I A, application no. 10, column 5, or in Table I A, application no. 10, column 8, or in Table I B, application no. 10, column 8, preferably the coding region thereof;
   [55894] (e) a nucleic acid molecule encoding a polypeptide having at least 30% identity, preferably at least 40%, 50% 60%, 70%, 75%, 80%, 85%, 90%, 95%, 96%, 97%, 98%, 99%, 99.5%, identity with the amino acid sequence of the polypeptide encoded by the nucleic acid molecule of (a), (b), (c) or (d);
   [55895] (f) a nucleic acid molecule which hybridizes with a nucleic acid molecule of (a), (b), (c), (d) or (e) under stringent hybridization conditions;
   [55896] (g) a nucleic acid molecule encoding a polypeptide which can be isolated with the aid of monoclonal or polyclonal antibodies made against a polypeptide encoded by one of the nucleic acid molecules of (a), (b), (c), (d), (e) or (f);
   [55897] (h) a nucleic acid molecule encoding a polypeptide comprising the consensus sequence or one or more polypeptide motifs as shown in column 8 of Table IV, application no. 10;
   [55898] (i) a nucleic acid molecule encoding a polypeptide having the activity represented by a respective protein as depicted in column 5 of Table II, application no. 10;
   [55899] (j) a nucleic acid molecule comprising a polynucleotide which is obtained by amplifying a cDNA library or a genomic library using the primers in Table III, application no. 10, column 8;
   [55900] and
   [55901] (k) nucleic acid molecule which is obtainable by screening a suitable nucleic acid library, especially a cDNA library and/or a genomic library, under stringent hybridization conditions with a probe comprising one of the sequences of the nucleic acid molecule of (a), (b), (c), (d), (e), (f), (g), (h), (i) or (j) or with a fragment of at least 15 nt, preferably 20 nt, 30 nt, 50 nt, 100 nt, 200 nt,500 nt, 1000 nt, 1500 nt, 2000 nt or 3000 nt of the nucleic acid molecule characterized in (a), (b), (c), (d), (e), (f), (g), (h), (i) or (j);
   [55902] or a nucleic acid molecule comprising a sequence which is complementary thereto;
      and, if desired
[55903] 2) nucleic acid molecule encoding a transit peptide, preferably encoding a plastidal transit peptide or a mitochondrial transit peptide;
   which are operable linked;]
   or comprising or being transformed by a vector comprising
[55904] [1) a nucleic acid molecule selected from the group consisting of
   [55905] (a) a nucleic acid molecule encoding a polypeptide shown in Table II, application no. 10, column 5 or 8, preferably shown in Table II A, application no. 10, column 5, or in Table II A, application no. 10, column 8, or in Table II B, application no. 10, column 8, or a homolog or a fragment thereof;
   [55906] (b) a nucleic acid molecule shown in Table I, application no. 10, column 5 or 8, preferably shown in Table I A, application no. 10, column 5, or in Table I A, application no. 10, column 8, or in Table I B, application no. 10, column 8, preferably the coding region thereof, or a homolog or a fragment thereof;
   [55907] (c) a nucleic acid molecule, which, as a result of the degeneracy of the genetic code, can be derived from a polypeptide sequence depicted in column 5 or 8 of Table II, application no. 10, preferably shown in Table II A, application no. 10, column 5, or in Table II A, application no. 10, column 8, or in Table II B, application no. 10, column 8;
   [55908] (d) a nucleic acid molecule having at least 30% identity, preferably at least 40%, 50%, 60%, 70%, 75%, 80%, 85%, 90%, 95%, 96%, 97%, 98%, 99%, 99.5%, with the nucleic acid molecule sequence of a polynucleotide comprising the nucleic acid molecule shown in column 5 or 8 of Table I, application no. 10, preferably shown in Table I A, application no. 10, column 5, or in Table I A, application no. 10, column 8, or in Table I B, application no. 10, column 8, preferably the coding region thereof;
   [55909] (e) a nucleic acid molecule encoding a polypeptide having at least 30% identity, preferably at least 40%, 50% 60%, 70%, 75%, 80%, 85%, 90%, 95%, 96%, 97%, 98%, 99%, 99.5%, identity with the amino acid sequence of the polypeptide encoded by the nucleic acid molecule of (a), (b), (c) or (d);
   [55910] (f) a nucleic acid molecule which hybridizes with a nucleic acid molecule of (a), (b), (c), (d) or (e) under stringent hybridization conditions;
   [55911] (g) a nucleic acid molecule encoding a polypeptide which can be isolated with the aid of monoclonal or polyclonal antibodies made against a polypeptide encoded by one of the nucleic acid molecules of (a), (b), (c), (d), (e) or (f);
   [55912] (h) a nucleic acid molecule encoding a polypeptide comprising the consensus sequence or one or more polypeptide motifs as shown in column 8 of Table IV, application no. 10;
   [55913] (i) a nucleic acid molecule encoding a polypeptide having the activity represented by a respective protein as depicted in column 5 of Table II, application no. 10;
   [55914] (j) a nucleic acid molecule comprising a polynucleotide which is obtained by amplifying a cDNA library or a genomic library using the primers in Table III, application no. 10, column 8;
   [55915] and
   [55916] (k) nucleic acid molecule which is obtainable by screening a suitable nucleic acid library, especially a cDNA library and/or a genomic library, under stringent hybridization conditions with a probe comprising one of the sequences of the nucleic acid molecule of (a), (b), (c), (d), (e), (f), (g), (h), (i) or (j) or with a fragment of at least 15 nt, preferably 20 nt, 30 nt, 50 nt, 100 nt, 200 nt,500 nt, 1000 nt, 1500 nt, 2000 nt or 3000 nt of the nucleic acid molecule characterized in (a), (b), (c), (d), (e), (f), (g), (h), (i) or (j);
   [55917] or a nucleic acid molecule comprising a sequence which is complementary thereto;]
      as well as respective transgenic cells, tissue, parts of such non-human organism, e.g. plant cells, plant tissue, part of plants, like leaves, roots, stems, blossoms, seeds, fruits, pollen and the like.
      (All the references to Tables I to IV are references to the corresponding lines of Tables I to IV.)

[55918] In a preferred embodiment of said transgenic non-human organism said nucleic acid molecule according to 1 (a), (b), (c), (d), (e), (f), (g), (h), (i), (j) or (k) encodes a polypeptide which has the activity of the respective polypeptide represented by a protein comprising a polypeptide as depicted in the respective line in column 5 of Table II, application no. 10.

[55919] In another preferred embodiment of said transgenic non-human organism said nucleic acid molecule according to 1 (a), (b), (c), (d), (e), (f), (g), (h), (i), (j) or (k) confers a generation or an increase of the respective fine chemical in a non-human organism or a part thereof as compared to a corresponding wild-type non-human organism or part thereof.

[55920] In another preferred embodiment of said transgenic non-human organism said nucleic acid molecule according to 1 (a), (b), (c), (d), (e), (f), (g), (h), (i), (j) or (k) encodes a polypeptide which has the activity of the respective polypeptide represented by a protein as depicted in the respective line in column 5 of Table II application no. 10 and confers a generation or an increase of the respective fine chemical in a non-human organism or a part thereof as compared to a corresponding wild-type non-human organism or part thereof.

[55921] In another embodiment of said transgenic non-human organism the expression cassette comprises 2) a nucleic acid molecule encoding a transit peptide, preferably encoding a plastidal transit peptide, especially in case in column 6 of Table I, application no. 10, in the same line as of the respective nucleic acid molecule according to 1) “plastidic” is depicted, or encoding a mitochondrial transit peptide, especially in case in column 6 of Table I, application no. 10, in the same line as of the respective nucleic acid molecule according to 1) “mitochondrial” is depicted.

[55922] In another embodiment of said transgenic non-human organism the expression cassette does not comprise 2) a nucleic acid molecule encoding a transit peptide, especially in case in column 6 of Table I, application no. 10, in the same line as of the respective nucleic acid molecule according to 1) “non-targeted” is depicted.

[55923] [0282.1.10.10] In another embodiment of said transgenic non-human organism said vector comprises beneath said nucleic acid molecule according to 1 (a), (b), (c), (d), (e), (f), (g), (h), (i), (j) or (k), a promoter, preferably a promoter selected from the group consisting of Big35S, PCUbi, Super and USP, which are operable linked.

[55924] In a preferred embodiment of said transgenic non-human organism said vector comprises beneath said nucleic acid molecule according to 1 (a), (b), (c), (d), (e), (f), (g), (h), (i), (j) or (k), a promoter, preferably a promoter selected from the group consisting of Big35S, PCUbi, Super and USP, which are operable linked; and said nucleic acid molecule according to 1 (a), (b), (c), (d), (e), (f), (g), (h), (i), (j) or (k) encodes a polypeptide which has the activity of the respective polypeptide represented by a protein comprising a polypeptide as depicted in the respective line in column 5 of Table II, application no. 10.

[55925] In another preferred embodiment of said transgenic non-human organism said vector comprises beneath said nucleic acid molecule according to 1 (a), (b), (c), (d), (e), (f), (g), (h), (i), (j) or (k), a promoter, preferably a promoter selected from the group consisting of Big35S, PCUbi, Super and USP, which are operable linked; and said nucleic acid molecule according to 1 (a), (b), (c), (d), (e), (f), (g), (h), (i), (j) or (k) confers a generation or an increase of the respective fine chemical in a non-human organism or a part thereof as compared to a corresponding wild-type non-human organism or part thereof.

[55926] In another preferred embodiment of said transgenic non-human organism said vector comprises beneath said nucleic acid molecule according to 1 (a), (b), (c), (d), (e), (f), (g), (h), (i), (j) or (k), a promoter, preferably a promoter selected from the group consisting of Big35S, PCUbi, Super and USP, which are operable linked; and said nucleic acid molecule according to 1 (a), (b), (c), (d), (e), (f), (g), (h), (i), (j) or (k) encodes a polypeptide which has the activity of the respective polypeptide represented by a protein as depicted in the respective line in column 5 of Table II, application no. 10, and confers a generation or an increase of the respective fine chemical in a non-human organism or a part thereof as compared to a corresponding wild-type non-human organism or part thereof.

[55927] In another embodiment of said transgenic non-human organism said vector comprises beneath said nucleic acid molecule according to 1 (a), (b), (c), (d), (e), (f), (g), (h), (i), (j) or (k), a nucleic acid molecule encoding a transit peptide, preferably encoding a plastidal transit peptide, especially in case in column 6 of Table I, application no. 10, in the same line as of the respective nucleic acid molecule according to 1) “plastidic” is depicted, or encoding a mitochondrial transit peptide, especially in case in column 6 of Table I, application no. 10, in the same line as of the respective nucleic acid molecule according to 1) “mitochondrial” is depicted, which are operable linked.

[55928] In another embodiment of said transgenic non-human organism said vector does not comprise beneath said nucleic acid molecule according to 1 (a), (b), (c), (d), (e), (f), (g), (h), (i), (j) or (k), a nucleic acid molecule encoding a transit peptide in case in column 6 of Table I, application no. 10, in the same line as of the respective nucleic acid molecule according to 1) “non-targeted” is depicted, which are operable linked.

[55929] In another embodiment of said transgenic non-human organism said vector comprises beneath said nucleic acid molecule according to 1 (a), (b), (c), (d), (e), (f), (g), (h), (i), (j) or (k), and a promoter, preferably a promoter selected from the group consisting of Big35S, PCUbi, Super and USP; a nucleic acid molecule encoding a transit peptide, preferably encoding a plastidal transit peptide, especially in case in column 6 of Table I, application no. 10, in the same line as of the respective nucleic acid molecule according to 1) “plastidic” is depicted, or encoding a mitochondrial transit peptide, especially in case in column 6 of Table I, application no. 10, in the same line as of the respective nucleic acid molecule according to 1) “mitochondrial” is depicted, which are operable linked.

[55930] In another embodiment of said transgenic non-human organism said vector does not comprise beneath said nucleic acid molecule according to 1 (a), (b), (c), (d), (e), (f), (g), (h), (i), (j) or (k), and a promoter, preferably a promoter selected from the group consisting of Big35S, PCUbi, Super and USP; a nucleic acid molecule encoding a transit peptide, especially in case in column 6 of Table I, application no. 10, in the same line as of the respective nucleic acid molecule according to 1) “non-targeted” is depicted, which are operable linked.

[55931] In another embodiment of said transgenic non-human organism said vector comprises beneath said nucleic acid molecule according to 1 (a), (b), (c), (d), (e), (f), (g), (h), (i), (j) or (k), and a promoter, preferably a promoter selected from the group consisting of Big35S, PCUbi, Super and USP; a nucleic acid molecule encoding a transit peptide, preferably encoding a plastidal transit peptide, especially in case in column 6 of Table I, application no. 10, in the same line as of the respective nucleic acid molecule according to 1) “plastidic” is depicted, or encoding a mitochondrial transit peptide, especially in case in column 6 of Table I, application no. 10, in the same line as of the respective nucleic acid molecule according to 1) “mitochondrial” is depicted, which are operable linked; and wherein said nucleic acid molecule according to 1 (a), (b), (c), (d), (e), (f), (g), (h), (i), (j) or (k) encodes a polypeptide which has the activity of the respective polypeptide represented by a protein comprising a polypeptide as depicted in the respective line in column 5 of Table II, application no. 10.

[55932] In another embodiment of said transgenic non-human organism said vector does not comprise beneath said nucleic acid molecule according to 1 (a), (b), (c), (d), (e), (f), (g), (h), (i), (j) or (k), and a promoter, preferably a promoter selected from the group consisting of Big35S, PCUbi, Super and USP; a nucleic acid molecule encoding a transit peptide, especially in case in column 6 of Table I, application no. 10, in the same line as of the respective nucleic acid molecule according to 1) “non-targeted” is depicted, which are operable linked; and wherein said nucleic acid molecule according to 1 (a), (b), (c), (d), (e), (f), (g), (h), (i), (j) or (k) encodes a polypeptide which has the activity of the respective polypeptide represented by a protein comprising a polypeptide as depicted in the respective line in column 5 of Table II, application no. 10.

[55933] In another embodiment of said transgenic non-human organism said vector comprises beneath said nucleic acid molecule according to 1 (a), (b), (c), (d), (e), (f), (g), (h), (i), (j) or (k), and a promoter, preferably a promoter selected from the group consisting of Big35S, PCUbi, Super and USP; a nucleic acid molecule encoding a transit peptide, preferably encoding a plastidal transit peptide, especially in case in column 6 of Table I, application no. 10, in the same line as of the respective nucleic acid molecule according to 1) “plastidic” is depicted, or encoding a mitochondrial transit peptide, especially in case in column 6 of Table I, application no. 10, in the same line as of the respective nucleic acid molecule according to 1) “mitochondrial” is depicted, which are operable linked; and wherein said nucleic acid molecule according to 1 (a), (b), (c), (d), (e), (f), (g), (h), (i), (j) or (k) confers a generation or an increase of the respective fine chemical in a non-human organism or a part thereof as compared to a corresponding wild-type non-human organism or part thereof.

[55934] In another embodiment of said transgenic non-human organism said vector does not comprise beneath said nucleic acid molecule according to 1 (a), (b), (c), (d), (e), (f), (g), (h), (i), (j) or (k), and a promoter, preferably a promoter selected from the group consisting of Big35S, PCUbi, Super and USP; a nucleic acid molecule encoding a transit peptide, especially in case in column 6 of Table I, application no. 10, in the same line as of the respective nucleic acid molecule according to 1) “non-targeted” is depicted, which are operable linked; and wherein said nucleic acid molecule according to 1 (a), (b), (c), (d), (e), (f), (g), (h), (i), (j) or (k) confers a generation or an increase of the respective fine chemical in a non-human organism or a part thereof as compared to a corresponding wild-type non-human organism or part thereof.

[55935] In another embodiment of said transgenic non-human organism said vector comprises beneath said nucleic acid molecule according to 1 (a), (b), (c), (d), (e), (f), (g), (h), (i), (j) or (k), and a promoter, preferably a promoter selected from the group consisting of Big35S, PCUbi, Super and USP; a nucleic acid molecule encoding a transit peptide, preferably encoding a plastidal transit peptide, especially in case in column 6 of Table I, application no. 10, in the same line as of the respective nucleic acid molecule according to 1) “plastidic” is depicted, or encoding a mitochondrial transit peptide, especially in case in column 6 of Table I, application no. 10, in the same line as of the respective nucleic acid molecule according to 1) “mitochondrial” is depicted, which are operable linked; and wherein said nucleic acid molecule according to 1 (a), (b), (c), (d), (e), (f), (g), (h), (i), (j) or (k) encodes a polypeptide which has the activity of the respective polypeptide represented by a protein as depicted in the respective line in column 5 of Table II application no. 10 and confers a generation or an increase of the respective fine chemical in a non-human organism or a part thereof as compared to a corresponding wild-type non-human organism or part thereof.

[55936] In another embodiment of said transgenic non-human organism said vector does not comprise beneath said nucleic acid molecule according to 1 (a), (b), (c), (d), (e), (f), (g), (h), (i), (j) or (k), and a promoter, preferably a promoter selected from the group consisting of Big35S, PCUbi, Super and USP; a nucleic acid molecule encoding a transit peptide, especially in case in column 6 of Table I, application no. 10, in the same line as of the respective nucleic acid molecule according to 1) “non-targeted” is depicted, which are operable linked; and wherein said nucleic acid molecule according to 1 (a), (b), (c), (d), (e), (f), (g), (h), (i), (j) or (k) encodes a polypeptide which has the activity of the respective polypeptide represented by a protein as depicted in the respective line in column 5 of Table II application no. 10 (in the same line) and confers a generation or an increase of the respective fine chemical in a non-human organism or a part thereof as compared to a corresponding wild-type non-human organism or part thereof.

[55937] In a preferred embodiment of said transgenic non-human organism said nucleic acid molecule according to 1 (a), (b), (c), (d), (e), (f), (g), (h), (i), (j) or (k), said promoter and optionally said nucleic acid molecule encoding a transit peptide are encompassed in an expression cassette in said vector. Accordingly an embodiment the invention provides a non-human organism comprising or being transformed by a vector comprising an expression cassette comprising said nucleic acid molecule according to 1 (a), (b), (c), (d), (e), (f), (g), (h), (i), (j) or (k), said promoter and optionally said a nucleic acid molecule encoding a transit peptide, operable linked. Said expression cassette may encompass a terminator, too.

[55938] In a further embodiment the invention relates to a transgenic non-human organisms such as transgenic microorganism or transgenic plant comprising a nucleic acid molecule comprising
[55939] [1) a nucleic acid molecule selected from the group consisting of
   [55940] (a) a nucleic acid molecule encoding a polypeptide shown in Table II, application no. 10, column 5 or 8, preferably shown in Table II A, application no. 10, column 5, or in Table II A, application no. 10, column 8, or in Table II B, application no. 10, column 8, or a homolog or a fragment thereof;
   [55941] (b) a nucleic acid molecule shown in Table I, application no. 10, column 5 or 8, preferably shown in Table I A, application no. 10, column 5, or in Table I A, application no. 10, column 8, or in Table I B, application no. 10, column 8, preferably the coding region thereof, or a homolog or a fragment thereof;
   [55942] (c) a nucleic acid molecule, which, as a result of the degeneracy of the genetic code, can be derived from a polypeptide sequence depicted in column 5 or 8 of Table II, application no. 10, preferably shown in Table II A, application no. 10, column 5, or in Table II A, application no. 10, column 8, or in Table II B, application no. 10, column 8;
   [55943] (d) a nucleic acid molecule having at least 30% identity, preferably at least 40%, 50%, 60%, 70%, 75%, 80%, 85%, 90%, 95%, 96%, 97%, 98%, 99%, 99.5%, with the nucleic acid molecule sequence of a polynucleotide comprising the nucleic acid molecule shown in column 5 or 8 of Table I, application no. 10, preferably shown in Table I A, application no. 10, column 5, or in Table I A, application no. 10, column 8, or in Table I B, application no. 10, column 8, preferably the coding region thereof;
   [55944] (e) a nucleic acid molecule encoding a polypeptide having at least 30% identity, preferably at least 40%, 50% 60%, 70%, 75%, 80%, 85%, 90%, 95%, 96%, 97%, 98%, 99%, 99.5%, identity with the amino acid sequence of the polypeptide encoded by the nucleic acid molecule of (a), (b), (c) or (d);
   [55945] (f) a nucleic acid molecule which hybridizes with a nucleic acid molecule of (a), (b), (c), (d) or (e) under stringent hybridization conditions;
   [55946] (g) a nucleic acid molecule encoding a polypeptide which can be isolated with the aid of monoclonal or polyclonal antibodies made against a polypeptide encoded by one of the nucleic acid molecules of (a), (b), (c), (d), (e) or (f);
   [55947] (h) a nucleic acid molecule encoding a polypeptide comprising the consensus sequence or one or more polypeptide motifs as shown in column 8 of Table IV, application no. 10;
   [55948] (i) a nucleic acid molecule encoding a polypeptide having the activity represented by a respective protein as depicted in column 5 of Table II, application no. 10;
   [55949] (j) a nucleic acid molecule comprising a polynucleotide which is obtained by amplifying a cDNA library or a genomic library using the primers in Table III, application no. 10, column 8;
   [55950] and
   [55951] (k) nucleic acid molecule which is obtainable by screening a suitable nucleic acid library, especially a cDNA library and/or a genomic library, under stringent hybridization conditions with a probe comprising one of the sequences of the nucleic acid molecule of (a), (b), (c), (d), (e), (f), (g), (h), (i) or (j) or with a fragment of at least 15 nt, preferably 20 nt, 30 nt, 50 nt, 100 nt, 200 nt,500 nt, 1000 nt, 1500 nt, 2000 nt or 3000 nt of the nucleic acid molecule characterized in (a), (b), (c), (d), (e), (f), (g), (h), (i) or (j);
   [55952] or a nucleic acid molecule comprising a sequence which is complementary thereto;
      and, if desired
[55953] 2) nucleic acid molecule encoding a transit peptide, preferably encoding a plastidal transit peptide or a mitochondrial transit peptide;
   which are operable linked;]
   or comprising an expression cassette comprising
[55954] [0) a promoter, preferably a promoter selected from the group consisting of Big35S, PCUbi, Super and USP; and
[55955] 1) a nucleic acid molecule selected from the group consisting of
   [55956] (a) a nucleic acid molecule encoding a polypeptide shown in Table II, application no. 10, column 5 or 8, preferably shown in Table II A, application no. 10, column 5, or in Table II A, application no. 10, column 8, or in Table II B, application no. 10, column 8, or a homolog or a fragment thereof;
   [55957] (b) a nucleic acid molecule shown in Table I, application no. 10, column 5 or 8, preferably shown in Table I A, application no. 10, column 5, or in Table I A, application no. 10, column 8, or in Table I B, application no. 10, column 8, preferably the coding region thereof, or a homolog or a fragment thereof;
   [55958] (c) a nucleic acid molecule, which, as a result of the degeneracy of the genetic code, can be derived from a polypeptide sequence depicted in column 5 or 8 of Table II, application no. 10, preferably shown in Table II A, application no. 10, column 5, or in Table II A, application no. 10, column 8, or in Table II B, application no. 10, column 8;
   [55959] (d) a nucleic acid molecule having at least 30% identity, preferably at least 40%, 50%, 60%, 70%, 75%, 80%, 85%, 90%, 95%, 96%, 97%, 98%, 99%, 99.5%, with the nucleic acid molecule sequence of a polynucleotide comprising the nucleic acid molecule shown in column 5 or 8 of Table I, application no. 10, preferably shown in Table I A, application no. 10, column 5, or in Table I A, application no. 10, column 8, or in Table I B, application no. 10, column 8, preferably the coding region thereof;
   [55960] (e) a nucleic acid molecule encoding a polypeptide having at least 30% identity, preferably at least 40%, 50% 60%, 70%, 75%, 80%, 85%, 90%, 95%, 96%, 97%, 98%, 99%, 99.5%, identity with the amino acid sequence of the polypeptide encoded by the nucleic acid molecule of (a), (b), (c) or (d);
   [55961] (f) a nucleic acid molecule which hybridizes with a nucleic acid molecule of (a), (b), (c), (d) or (e) under stringent hybridization conditions;
   [55962] (g) a nucleic acid molecule encoding a polypeptide which can be isolated with the aid of monoclonal or polyclonal antibodies made against a polypeptide encoded by one of the nucleic acid molecules of (a), (b), (c), (d), (e) or (f);
   [55963] (h) a nucleic acid molecule encoding a polypeptide comprising the consensus sequence or one or more polypeptide motifs as shown in column 8 of Table IV, application no. 10;
   [55964] (i) a nucleic acid molecule encoding a polypeptide having the activity represented by a respective protein as depicted in column 5 of Table II, application no. 10;
   [55965] (j) a nucleic acid molecule comprising a polynucleotide which is obtained by amplifying a cDNA library or a genomic library using the primers in Table III, application no. 10, column 8;
   [55966] and
   [55967] (k) nucleic acid molecule which is obtainable by screening a suitable nucleic acid library, especially a cDNA library and/or a genomic library, under stringent hybridization conditions with a probe comprising one of the sequences of the nucleic acid molecule of (a), (b), (c), (d), (e), (f), (g), (h), (i) or (j) or with a fragment of at least 15 nt, preferably 20 nt, 30 nt, 50 nt, 100 nt, 200 nt,500 nt, 1000 nt, 1500 nt, 2000 nt or 3000 nt of the nucleic acid molecule characterized in (a), (b), (c), (d), (e), (f), (g), (h), (i) or (j);
   [55968] or a nucleic acid molecule comprising a sequence which is complementary thereto;]
      and, if desired
[55969] 2) nucleic acid molecule encoding a transit peptide, preferably encoding a plastidal transit peptide or a mitochondrial transit peptide;
   which are operable linked;]
   or comprising or being transformed by a vector comprising
[55970] [1) a nucleic acid molecule selected from the group consisting of
   [55971] (a) a nucleic acid molecule encoding a polypeptide shown in Table II, application no. 10, column 5 or 8, preferably shown in Table II A, application no. 10, column 5, or in Table II A, application no. 10, column 8, or in Table II B, application no. 10, column 8, or a homolog or a fragment thereof;
   [55972] (b) a nucleic acid molecule shown in Table I, application no. 10, column 5 or 8, preferably shown in Table I A, application no. 10, column 5, or in Table I A, application no. 10, column 8, or in Table I B, application no. 10, column 8, preferably the coding region thereof, or a homolog or a fragment thereof;
   [55973] (c) a nucleic acid molecule, which, as a result of the degeneracy of the genetic code, can be derived from a polypeptide sequence depicted in column 5 or 8 of Table II, application no. 10, preferably shown in Table II A, application no. 10, column 5, or in Table II A, application no. 10, column 8, or in Table II B, application no. 10, column 8;
   [55974] (d) a nucleic acid molecule having at least 30% identity, preferably at least 40%, 50%, 60%, 70%, 75%, 80%, 85%, 90%, 95%, 96%, 97%, 98%, 99%, 99.5%, with the nucleic acid molecule sequence of a polynucleotide comprising the nucleic acid molecule shown in column 5 or 8 of Table I, application no. 10, preferably shown in Table I A, application no. 10, column 5, or in Table I A, application no. 10, column 8, or in Table I B, application no. 10, column 8, preferably the coding region thereof;
   [55975] (e) a nucleic acid molecule encoding a polypeptide having at least 30% identity, preferably at least 40%, 50% 60%, 70%, 75%, 80%, 85%, 90%, 95%, 96%, 97%, 98%, 99%, 99.5%, identity with the amino acid sequence of the polypeptide encoded by the nucleic acid molecule of (a), (b), (c) or (d);
   [55976] (f) a nucleic acid molecule which hybridizes with a nucleic acid molecule of (a), (b), (c), (d) or (e) under stringent hybridization conditions;
   [55977] (g) a nucleic acid molecule encoding a polypeptide which can be isolated with the aid of monoclonal or polyclonal antibodies made against a polypeptide encoded by one of the nucleic acid molecules of (a), (b), (c), (d), (e) or (f);
   [55978] (h) a nucleic acid molecule encoding a polypeptide comprising the consensus sequence or one or more polypeptide motifs as shown in column 8 of Table IV, application no. 10;
   [55979] (i) a nucleic acid molecule encoding a polypeptide having the activity represented by a respective protein as depicted in column 5 of Table II, application no. 10;
   [55980] (j) a nucleic acid molecule comprising a polynucleotide which is obtained by amplifying a cDNA library or a genomic library using the primers in Table III, application no. 10, column 8;
   [55981] and
   [55982] (k) nucleic acid molecule which is obtainable by screening a suitable nucleic acid library, especially a cDNA library and/or a genomic library, under stringent hybridization conditions with a probe comprising one of the sequences of the nucleic acid molecule of (a), (b), (c), (d), (e), (f), (g), (h), (i) or (j) or with a fragment of at least 15 nt, preferably 20 nt, 30 nt, 50 nt, 100 nt, 200 nt,500 nt, 1000 nt, 1500 nt, 2000 nt or 3000 nt of the nucleic acid molecule characterized in (a), (b), (c), (d), (e), (f), (g), (h), (i) or (j);
   [55983] or a nucleic acid molecule comprising a sequence which is complementary thereto;]
      whereby, preferably, the nucleic acid molecule according to 1 (a), (b), (c), (d), (e), (f), (g), (h), (i), (j) or (k) distinguishes over the sequence depicted in Table I A and/or I B, application no. 10, column 5 or 8, or the coding regions thereof, by one or more nucleotides (especially but not exceeding 5%, preferably 4%, 3%, 2%, 1%, 0.5%, 0.2% or 0.1%). In an embodiment, the nucleic acid molecule of the invention does not consist of the sequence shown in Table I A and/or I B, application no. 10, column 5 or 8, or the coding region thereof. In another embodiment, the nucleic acid molecule of the present invention, preferably the coding region thereof, is at least 30%, 40%, 50%, 60%, 70%, 80%, 90%, 95% identical but less than 100%, 99.999%, 99.99%, 99.9%, 99%, 98%, 97%, 96% or 95% identical to the sequence shown in Table I A and/or I B, application no. 10, column 5 or 8, or the coding region thereof, respectively. In a further embodiment the nucleic acid molecule does not encode the polypeptide sequence shown in Table II A and/or II B, application no. 10, column 5 or 8 but homologs thereof. Accordingly, in one embodiment, the nucleic acid molecule of the present invention encodes in one embodiment a polypeptide which differs at least in one or more amino acids (especially but not exceeding 5%, preferably 4%, 3%, 2%, 1%, 0.5%, 0.2% or 0.1%) from the polypeptide shown in Table II, application no. 10, column 5 or 8 and does not encode a protein of the sequence shown in Table II A and/or II B, application no. 10, column 5 or 8. Accordingly, in one embodiment, the protein encoded by a sequence of a nucleic acid according to 1 (a), (b), (c), (d), (e), (f), (g), (h), (i), (j) or (k) does not consist of the sequence shown in Table I A and/or I B, application no. 10, column 5 or 8, or the coding region thereof. In a further embodiment, the protein of the present invention is at least 30%, 40%, 50%, 60%, 70%, 80%, 90%, 95% identical to protein sequence depicted in Table II A and/or II B, application no. 10, column 5 or 8 but less than 100%, preferably less than 99.999%, 99.99%, 99.9%, 99%, 98%, 97%, 96% or 95% identical to the sequence shown in Table II A and/or II B, application no. 10, column 5 or 8;

[55984] as well as respective transgenic cells, tissue, parts of such non-human organism, e.g. plant cells, plant tissue, part of plants, like leaves, roots, stems, blossoms, seeds, fruits, pollen and the like.

(All the references to Tables I to IV are references to the corresponding lines of Tables I to IV.)

[55985] In a preferred embodiment of said transgenic non-human organism said nucleic acid molecule according to 1 (a), (b), (c), (d), (e), (f), (g), (h), (i), (j) or (k) encodes a polypeptide which has the activity of the respective polypeptide represented by a protein comprising a polypeptide as depicted in the respective line in column 5 of Table II, application no. 10.

[55986] In another preferred embodiment of said transgenic non-human organism said nucleic acid molecule according to 1 (a), (b), (c), (d), (e), (f), (g), (h), (i), (j) or (k) confers a generation or an increase of the respective fine chemical in a non-human organism or a part thereof as compared to a corresponding wild-type non-human organism or part thereof.

[55987] In another preferred embodiment of said transgenic non-human organism said nucleic acid molecule according to 1 (a), (b), (c), (d), (e), (f), (g), (h), (i), (j) or (k) encodes a polypeptide which has the activity of the respective polypeptide represented by a protein as depicted in the respective line in column 5 of Table II application no. 10 and confers a generation or an increase of the respective fine chemical in a non-human organism or a part thereof as compared to a corresponding wild-type non-human organism or part thereof.

[55988] In another embodiment of said transgenic non-human organism the expression cassette comprises 2) a nucleic acid molecule encoding a transit peptide, preferably encoding a plastidal transit peptide, especially in case in column 6 of Table I, application no. 10, in the same line as of the respective nucleic acid molecule according to 1) “plastidic” is depicted, or encoding a mitochondrial transit peptide, especially in case in column 6 of Table I, application no. 10, in the same line as of the respective nucleic acid molecule according to 1) “mitochondrial” is depicted.

[55989] In another embodiment thereof the expression cassette does not comprise 2) a nucleic acid molecule encoding a transit peptide, especially in case in column 6 of Table I, application no. 10, in the same line as of the respective nucleic acid molecule according to 1) “non-targeted” is depicted.

[55990] In another embodiment of said transgenic non-human organism said vector comprises beneath said nucleic acid molecule according to 1 (a), (b), (c), (d), (e), (f), (g), (h), (i), (j) or (k), a promoter, preferably a promoter selected from the group consisting of Big35S, PCUbi, Super and USP, which are operable linked.

[55991] In a preferred embodiment of said transgenic non-human organism said vector comprises beneath said nucleic acid molecule according to 1 (a), (b), (c), (d), (e), (f), (g), (h), (i), (j) or (k), a promoter, preferably a promoter selected from the group consisting of Big35S, PCUbi, Super and USP, which are operable linked; and said nucleic acid molecule according to 1 (a), (b), (c), (d), (e), (f), (g), (h), (i), (j) or (k) encodes a polypeptide which has the activity of the respective polypeptide represented by a protein comprising a polypeptide as depicted in the respective line in column 5 of Table II, application no. 10.

[55992] In another preferred embodiment of said transgenic non-human organism said vector comprises beneath said nucleic acid molecule according to 1 (a), (b), (c), (d), (e), (f), (g), (h), (i), (j) or (k), a promoter, preferably a promoter selected from the group consisting of Big35S, PCUbi, Super and USP, which are operable linked; and said nucleic acid molecule according to 1 (a), (b), (c), (d), (e), (f), (g), (h), (i), (j) or (k) confers a generation or an increase of the respective fine chemical in a non-human organism or a part thereof as compared to a corresponding wild-type non-human organism or part thereof.

[55993] In another preferred embodiment of said transgenic non-human organism said vector comprises beneath said nucleic acid molecule according to 1 (a), (b), (c), (d), (e), (f), (g), (h), (i), (j) or (k), a promoter, preferably a promoter selected from the group consisting of Big35S, PCUbi, Super and USP, which are operable linked; and said nucleic acid molecule according to 1 (a), (b), (c), (d), (e), (f), (g), (h), (i), (j) or (k) encodes a polypeptide which has the activity of the respective polypeptide represented by a protein as depicted in the same line in column 5 of Table II, application no. 10, and confers a generation or an increase of the respective fine chemical in a non-human organism or a part thereof as compared to a corresponding wild-type non-human organism or part thereof.

[55994] In another embodiment of said transgenic non-human organism said vector comprises beneath said nucleic acid molecule according to 1 (a), (b), (c), (d), (e), (f), (g), (h), (i), (j) or (k), a nucleic acid molecule encoding a transit peptide, preferably encoding a plastidal transit peptide, especially in case in column 6 of Table I, application no. 10, in the same line as of the respective nucleic acid molecule according to 1) “plastidic” is depicted, or encoding a mitochondrial transit peptide, especially in case in column 6 of Table I, application no. 10, in the same line as of the respective nucleic acid molecule according to 1) “mitochondrial” is depicted, which are operable linked.

[55995] In another embodiment of said transgenic non-human organism said vector does not comprise beneath said nucleic acid molecule according to 1 (a), (b), (c), (d), (e), (f), (g), (h), (i), (j) or (k), a nucleic acid molecule encoding a transit peptide in case in column 6 of Table I, application no. 10, in the same line as of the respective nucleic acid molecule according to 1) “non-targeted” is depicted, which are operable linked.

[55996] In another embodiment of said transgenic non-human organism said vector comprises beneath said nucleic acid molecule according to 1 (a), (b), (c), (d), (e), (f), (g), (h), (i), (j) or (k), and a promoter, preferably a promoter selected from the group consisting of Big35S, PCUbi, Super and USP; a nucleic acid molecule encoding a transit peptide, preferably encoding a plastidal transit peptide, especially in case in column 6 of Table I, application no. 10, in the same line as of the respective nucleic acid molecule according to 1) “plastidic” is depicted, or encoding a mitochondrial transit peptide, especially in case in column 6 of Table I, application no. 10, in the same line as of the respective nucleic acid molecule according to 1) “mitochondrial” is depicted, which are operable linked.

[55997] In another embodiment of said transgenic non-human organism said vector does not comprise beneath said nucleic acid molecule according to 1 (a), (b), (c), (d), (e), (f), (g), (h), (i), (j) or (k), and a promoter, preferably a promoter selected from the group consisting of Big35S, PCUbi, Super and USP; a nucleic acid molecule encoding a transit peptide, especially in case in column 6 of Table I, application no. 10, in the same line as of the respective nucleic acid molecule according to 1) “non-targeted” is depicted, which are operable linked.

[55998] In another embodiment of said transgenic non-human organism said vector comprises beneath said nucleic acid molecule according to 1 (a), (b), (c), (d), (e), (f), (g), (h), (i), (j) or (k), and a promoter, preferably a promoter selected from the group consisting of Big35S, PCUbi, Super and USP; a nucleic acid molecule encoding a transit peptide, preferably encoding a plastidal transit peptide, especially in case in column 6 of Table I, application no. 10, in the same line as of the respective nucleic acid molecule according to 1) “plastidic” is depicted, or encoding a mitochondrial transit peptide, especially in case in column 6 of Table I, application no. 10, in the same line as of the respective nucleic acid molecule according to 1) “mitochondrial” is depicted, which are operable linked; and wherein said nucleic acid molecule according to 1 (a), (b), (c), (d), (e), (f), (g), (h), (i), (j) or (k) encodes a polypeptide which has the activity of the respective polypeptide represented by a protein comprising a polypeptide as depicted in the respective line in column 5 of Table II, application no. 10.

[55999] In another embodiment of said transgenic non-human organism said vector does not comprise beneath said nucleic acid molecule according to 1 (a), (b), (c), (d), (e), (f), (g), (h), (i), (j) or (k), and a promoter, preferably a promoter selected from the group consisting of Big35S, PCUbi, Super and USP; a nucleic acid molecule encoding a transit peptide, especially in case in column 6 of Table I, application no. 10, in the same line as of the respective nucleic acid molecule according to 1) “non-targeted” is depicted, which are operable linked; and wherein said nucleic acid molecule according to 1 (a), (b), (c), (d), (e), (f), (g), (h), (i), (j) or (k) encodes a polypeptide which has the activity of the respective polypeptide represented by a protein comprising a polypeptide as depicted in the respective line in column 5 of Table II, application no. 10.

[56000] In another embodiment of said transgenic non-human organism said vector comprises beneath said nucleic acid molecule according to 1 (a), (b), (c), (d), (e), (f), (g), (h), (i), (j) or (k), and a promoter, preferably a promoter selected from the group consisting of Big35S, PCUbi, Super and USP; a nucleic acid molecule encoding a transit peptide, preferably encoding a plastidal transit peptide, especially in case in column 6 of Table I, application no. 10, in the same line as of the respective nucleic acid molecule according to 1) “plastidic” is depicted, or encoding a mitochondrial transit peptide, especially in case in column 6 of Table I, application no. 10, in the same line as of the respective nucleic acid molecule according to 1) “mitochondrial” is depicted, which are operable linked; and wherein said nucleic acid molecule according to 1 (a), (b), (c), (d), (e), (f), (g), (h), (i), (j) or (k) confers a generation or an increase of the respective fine chemical in a non-human organism or a part thereof as compared to a corresponding wild-type non-human organism or part thereof.

[56001] In another embodiment of said transgenic non-human organism said vector does not comprise beneath said nucleic acid molecule according to 1 (a), (b), (c), (d), (e), (f), (g), (h), (i), (j) or (k), and a promoter, preferably a promoter selected from the group consisting of Big35S, PCUbi, Super and USP; a nucleic acid molecule encoding a transit peptide, especially in case in column 6 of Table I, application no. 10, in the same line as of the respective nucleic acid molecule according to 1) “non-targeted” is depicted, which are operable linked; and wherein said nucleic acid molecule according to 1 (a), (b), (c), (d), (e), (f), (g), (h), (i), (j) or (k) confers a generation or an increase of the respective fine chemical in a non-human organism or a part thereof as compared to a corresponding wild-type non-human organism or part thereof.

[56002] In another embodiment of said transgenic non-human organism said vector comprises beneath said nucleic acid molecule according to 1 (a), (b), (c), (d), (e), (f), (g), (h), (i), (j) or (k), and a promoter, preferably a promoter selected from the group consisting of Big35S, PCUbi, Super and USP; a nucleic acid molecule encoding a transit peptide, preferably encoding a plastidal transit peptide, especially in case in column 6 of Table I, application no. 10, in the same line as of the respective nucleic acid molecule according to 1) “plastidic” is depicted, or encoding a mitochondrial transit peptide, especially in case in column 6 of Table I, application no. 10, in the same line as of the respective nucleic acid molecule according to 1) “mitochondrial” is depicted, which are operable linked; and wherein said nucleic acid molecule according to 1 (a), (b), (c), (d), (e), (f), (g), (h), (i), (j) or (k) encodes a polypeptide which has the activity of the respective polypeptide represented by a protein as depicted in the respective line in column 5 of Table II application no. 10 and confers a generation or an increase of the respective fine chemical in a non-human organism or a part thereof as compared to a corresponding wild-type non-human organism or part thereof.

[56003] In another embodiment of said transgenic non-human organism said vector does not comprise beneath said nucleic acid molecule according to 1 (a), (b), (c), (d), (e), (f), (g), (h), (i), (j) or (k), and a promoter, preferably a promoter selected from the group consisting of Big35S, PCUbi, Super and USP; a nucleic acid molecule encoding a transit peptide, especially in case in column 6 of Table I, application no. 10, in the same line as of the respective nucleic acid molecule according to 1) “non-targeted” is depicted, which are operable linked; and wherein said nucleic acid molecule according to 1 (a), (b), (c), (d), (e), (f), (g), (h), (i), (j) or (k) encodes a polypeptide which has the activity of the respective polypeptide represented by a protein as depicted in the respective line in column 5 of Table II application no. 10 and confers a generation or an increase of the respective fine chemical in a non-human organism or a part thereof as compared to a corresponding wild-type non-human organism or part thereof.

[56004] In a preferred embodiment of said transgenic non-human organism said nucleic acid molecule according to 1 (a), (b), (c), (d), (e), (f), (g), (h), (i), (j) or (k), said promoter and optionally said nucleic acid molecule encoding a transit peptide are encompassed in an expression cassette in said vector. Accordingly an embodiment the invention provides a non-human organism comprising or being transformed by a vector comprising an expression cassette comprising said nucleic acid molecule according to 1 (a), (b), (c), (d), (e), (f), (g), (h), (i), (j) or (k), said promoter and optionally said a nucleic acid molecule encoding a transit peptide, operable linked. Said expression cassette may encompass a terminator, too.

[56005] [0291.1.8.10] to [0299.1.8.10] for the disclosure of these paragraphs see [0291.1.8.8] to [0299.1.8.8] above.

[56006] The term “biological active portion” or “biological activity” means a polypeptide as depicted in the respective line in Table II, application no. 10, column 3 or a portion of said polypeptide which still has at least 10% or 20%, preferably 30%, 40%, 50% or 60%, especially preferably 70%, 75%, 80%, 90% or 95% of the enzymatic or biological activity of the natural or starting enzyme or protein.

[56007] [0301.1.8.10] to [0304.1.8.10] for the disclosure of these paragraphs see [0301.1.8.8] to [0304.1.8.8] above.

[56008] Synthetic oligonucleotide primers for the amplification, e.g. as shown in the respective line in Table III, application no. 10, column 8, by means of polymerase chain reaction can be generated on the basis of a sequence shown herein, for example the sequence shown in the respective line in Table I, application no. 10, columns 5 or 8, or the sequences derived from Table II, application no. 10, columns 5 or 8, respectively.

[56009] Moreover, it is possible to identify a conserved region of a protein from various organism by carrying out protein sequence alignments with the polypeptide encoded by the nucleic acid molecules of the present invention, in particular with the sequences encoded by the nucleic acid molecule shown in the respective line in column 5 or 8 of Table I, application no. 10, from which conserved regions, and in turn, degenerate primers can be derived. Conserved regions are those, which show a very little variation in the amino acid in one particular position of several homologs from different origin. The consensus sequence and polypeptide motifs shown in the respective line in column 8 of Table IV, application no. 10, are derived from such alignments of homologous proteins.

[56010] In an embodiment of the present invention, in the method of the present invention the activity of a polypeptide comprising or consisting of a consensus sequence or at least one polypeptide motif shown in the respective line in Table IV, application no. 10, column 8, is increased. In another embodiment thereof, the method of the present invention relates to a polypeptide comprising or consisting of a consensus sequence shown in the respective line in Table IV, application no. 10, column 8 or comprising at least one polypeptide motif shown in the respective line in Table IV, application no. 10, column 8, whereby not more than 20, 15, 10, 9, 8, 7, 6, 5 4, 3, 2 or 1, or 0 of the amino acid positions indicated can be replaced by any amino acid. In another embodiment thereof, the method of the present invention relates to a polypeptide comprising or consisting of a consensus sequence shown in the respective line in Table IV, application no. 10, column 8 or comprising at least one polypeptide motif shown in the respective line in Table IV, application no. 10, column 8, whereby not more than 15%, 10%, 5%, 4%, 3%, 2% or 1%, or 0% of the amino acid positions defined as distinct specific amino acids are/is replaced by another amino acid. In another embodiment thereof, the method of the present invention relates to a polypeptide comprising or consisting of a consensus sequence shown in the respective line in Table IV, application no. 10, column 8 or comprising at least one polypeptide motif shown in the respective line in Table IV, application no. 10, column 8, whereby not more than 20, 15, 10, 9, 8, 7, 6, 5, 4, 3, 2 or 1, or 0 amino acids are inserted into a consensus sequence or polypeptide motif.

[56011] In an embodiment of the present invention, in the method of the present invention the activity of a polypeptide comprising or consisting of a consensus sequence or at least one polypeptide motif shown in the respective line in Table IV, application no. 10, column 8, is increased, whereby said polypeptide distinguishes over the sequence depicted in Table II, application no. 10, columns 5 or 8 by one or more amino acids.

[56012] In one embodiment, said polypeptide of the invention distinguishes over the sequence shown in the respective line in Table II, application no. 10, columns 5 and 8 by more than 5, 6, 7, 8 or 9 amino acids, preferably by more than 10, 15, 20, 25 or 30 amino acids, even more preferred are more than 40, 50, or 60 amino acids and, preferably, the sequence of the polypeptide of the invention distinguishes from the sequence shown in the respective line in Table II B, application no. 10, columns 5 and 8 by not more than 80%, 70%, 60%, 50%, 40%, 30%, 20%, 10%, 5%, 4%, 3%, 2%, 1% or 0.5%. In another embodiment, said polypeptide of the invention does not consist of the sequence shown in Table II, application no. 10, columns 5 or 8.

[56013] [0309.1.8.10] to [0321.1.8.10] for the disclosure of these paragraphs see [0309.1.8.8] to [0321.1.8.8] above.

[56014] Polypeptides having above-mentioned activity, i.e. conferring the production or the increased production of the fine chemical stearic acid as compared to a corresponding, e.g.

[56015] non-transformed, wild type non-human organism, like a microorganism or a plant cell, plant or part thereof, can be encoded by other DNA sequences which hybridize to the sequences shown in the respective line in Table I, application no. 10, columns 5 and 8, preferably the coding region thereof, at least under relaxed hybridization conditions and which encode the expression of polypeptides conferring the production or the increased production of the respective fine chemical stearic acid as compared to a corresponding, e.g. non-transformed, wild type non-human organism, like a microorganism or a plant cell, plant or part thereof.

[56016] [0323.1.8.10] to [0329.1.8.10] for the disclosure of these paragraphs see [0323.1.8.8] to [0329.1.8.8] above.

[56017] Further, the nucleic acid molecule of the invention comprises a nucleic acid molecule, which is a complement of one of the nucleotide sequences of above-mentioned nucleic acid molecules or a portion thereof. A nucleic acid molecule or its sequence which is complementary to one of the nucleotide molecules or sequences shown in the respective line in Table I, application no. 10, columns 5 or 8, preferably the coding region thereof, homologs or fragments thereof, is one which is sufficiently complementary to one of the nucleotide molecules or sequences shown in the respective line in Table I, application no. 10, columns 5 or 8, preferably the coding region thereof, homologs or fragments thereof, such that it can hybridize to one of the nucleotide sequences shown in Table I, application no. 10, columns 5 or 8, preferably the coding region thereof, homologs or fragments thereof, thereby forming a stable duplex. Preferably, the hybridization is performed under stringent hybridization conditions. However, a complement of one of the herein disclosed sequences is preferably a sequence complement thereto according to the base pairing of nucleic acid molecules well known to the skilled person. For example, the bases A and G undergo base pairing with the bases T and U or C, resp. and visa versa. Modifications of the bases can influence the base-pairing partner.

[56018] The nucleic acid molecule of the invention comprises a nucleotide sequence which is at least about 30%, 35%, 40%, 45%, 50%, 55%, 60%, 65%, 70%, 75%, 80%, 90%, 95%, 96%, 97%, 98%, 99%, 99.5% or more homologous to a nucleotide sequence shown in Table I, application no. 10, columns 5 or 8, preferably the coding region thereof, homologs or fragments thereof, and preferably has above-mentioned activity, in particular conferring the production or the increased production of the fine chemical stearic acid, respectively, after increasing the activity or an activity of a gene as shown in the respective line in Table I or of a gene product, e.g. as shown in the respective line in Table II, application no. 10, column 5 or 8, by for example in one embodiment expression either in the cytosol or in an organelle such as a plastid or mitochondria or both, preferably in a plastid, or in another embodiment non-targeted or targeted.

[56019] The nucleic acid molecule of the invention comprises a nucleotide sequence or molecule which hybridizes, preferably hybridizes under stringent conditions as defined herein, to one of the nucleic acid molecule shown in the respective line in Table I, preferably Table IB, application no. 10, columns 5 or 8, preferably the coding region thereof, fragments or homologs thereof, and encodes a protein having above-mentioned activity, e.g. conferring the production or the increased production of the respective fine chemical stearic acid as compared to a corresponding, e.g. non-transformed, wild type non-human organism, like a microorganism or a plant cell, plant or part thereof, by for example in one embodiment expression either in the cytosol or in an organelle such as a plastid or mitochondria or both, preferably in a plastid, or in another embodiment non-targeted or targeted, and optionally, the activity thereof is selected from the group consisting of 2-C-methyl-D-erythritol 4-phosphate cytidylyltransferase, 3-deoxy7-phosphoheptulonate synthase, 3-ketoacyl-CoA thiolase, acetyl-coenzyme A synthetase, acid shock protein, aconitate hydratase, arginine decarboxylase, aspartate-ammonia ligase, At2g45420-protein, ATP-binding component of a transport system, b0283-protein, b0371-protein, b1672-protein, b2032-protein, b2399-protein, b2513-protein, b2849-protein, b3989-protein, b4121-protein, betaine aldehyde dehydrogenase, calcium-dependent protein kinase, cation-transporting ATPase, CCAAT-binding transcription factor, citrate synthase, coproporphyrinogen III oxidase, CTP synthetase, dihydroxyacetone kinase, ethanolamine utilization protein, F-box protein, glucokinase, glucose-6-phosphate 1-dehydrogenase, glutaredoxin, glycerol-3-phosphate dehydrogenase, heat shock transcription factor, isocitrate dehydrogenase, lipoprotein precursor, monothiol glutaredoxin, NADH dehydrogenase subunit N, oxidoreductase, phospho-2-dehydro-3-deoxyheptonate aldolase, protease, protein phosphatase, pyruvate kinase, sll1032-protein, sodium/proton antiporter, transcription factor, tryptophan synthase alpha chain, ycl049c-protein, ydr507c-protein, YGR104C-protein, and yor392w-protein, respectively.

[56020] Moreover, the nucleic acid molecule of the invention can comprise only a portion of the coding region of one of the nucleic acid molecules depicted in Table I, application no. 10, columns 5 or 8, for example a fragment which can be used as a probe or primer or a fragment encoding a biologically active portion of the polypeptide of the present invention or of a polypeptide used in the process of the present invention, i.e. having above-mentioned activity, e.g. conferring the production or the increased production of the respective fine chemical stearic acid as compared to a corresponding, e.g. non-transformed, wild type non-human organism, like a microorganism or a plant cell, plant or part thereof, by for example in one embodiment expression either in the cytosol or in an organelle such as a plastid or mitochondria or both, preferably in a plastid, or in another embodiment non-targeted or targeted. The nucleotide sequences determined from the cloning of the present protein-according-to-the-invention-encoding gene allows for the generation of probes and primers designed for use in identifying and/or cloning its homologues from other cell types and organisms. The probe/primer typically comprises a substantially purified oligonucleotide. The oligonucleotide typically comprises a region of nucleotide sequence that hybridizes under stringent conditions to at least about 12, 15 preferably about 20 or 25, more preferably about 40, 50 or 75 consecutive nucleotides of a sense strand of one of the sequences set forth, e.g., in the respective line in Table I, application no. 10, column 5 or 8, preferably the coding region thereof, or a homolog or a fragment thereof, an anti-sense sequence of one of the sequences, e.g., set forth in the respective line in Table I, application no. 10, columns 5 or 8, preferably the coding region thereof, or a homolog or a fragment thereof or naturally occurring mutants thereof. Primers based on a nucleic acid molecule of the invention can be used in PCR reactions to clone homologs of the polypeptide of the invention or of the polypeptide used in the process of the invention, e.g. as the primers described in the examples of the present invention, e.g. as shown in the examples. A PCR with the primers shown in the respective line in Table III, column 8 will result in a fragment of the gene product as shown in Table II, application no. 10, column 5.

[56021] Primer sets are interchangeable. The person skilled in the art knows how to design and combine said primers to result in the desired product, e.g. in a full length clone or a partial sequence. Probes based on the sequences of the nucleic acid molecule of the invention or used in the process of the present invention can be used to detect transcripts or genomic sequences encoding the same or homologous proteins. The probe can further comprise a label group attached thereto, e.g. the label group can be a radioisotope, a fluorescent compound, an enzyme, or an enzyme co-factor. Such probes can be used as a part of a genomic marker test kit for identifying cells which express a polypeptide of the invention or used in the process of the present invention, such as by measuring a level of an encoding nucleic acid molecule in a sample of cells, e.g. detecting mRNA levels or determining, whether a genomic gene comprising the sequence of the polynucleotide of the invention or used in the processes of the present invention has been mutated or deleted.

[56022] As the expression of a respective nucleic acids of the invention is related to the synthesis of the respective fine chemical stearic acid its function as a probe extends to the detection of microorganisms, plant tissues, plants, plant variets, plant ecotypes or plant genera with varying capability or potential for synthesis of the respective fine chemical stearic acid. Therefore in one embodiment the present invention relates to a method for analyzing the capability or potential of a plant tissue, a plant, a plant variety or plant ecotype to produce the fine chemical stearic acid by using the nucleic acid of the invention or parts thereof as a probe to detect the amount of the nucleic acid of the invention in the non-human organism or a part thereof in comparison to another non-human organism.

[56023] The nucleic acid molecule of the invention encodes a polypeptide or portion thereof which includes an amino acid sequence which is sufficiently homologous to the amino acid sequence shown in respective line in Table II, application no. 10, columns 5 or 8 such that the protein or portion thereof maintains the ability to confer the production or the increased production of the respective fine chemical stearic acid as compared to a corresponding, e.g. non-transformed, wild type non-human organism, like a microorganism or a plant cell, plant or part thereof, in particular increasing the activity as mentioned above or as described in the examples in microorganisms or plants.

[56024] As used herein, the language “sufficiently homologous” refers to proteins or portions thereof which have amino acid sequences which include a minimum number of identical or equivalent amino acids (e.g. an amino acid which has a similar side chain as an amino acid in one of the sequences of the polypeptide of the present invention) to an amino acid sequence shown in the respective line in Table II, application no. 10, columns 5 or 8 such that the protein or portion thereof is able to confer the production or the increased production of the respective fine chemical stearic acid as compared to a corresponding, e.g. non-transformed, wild type non-human organism, like a microorganism or a plant cell, plant or part thereof. For example having the activity of a protein as shown in the respective line in Table II, application no. 10, column 3 and as described herein.

[56025] In an embodiment of the present invention, the nucleic acid molecule of the present invention comprises a nucleic acid molecule that encodes a portion of the protein of the present invention. The protein is at least about 30%, 35%, 40%, 45% 50%, 55%, 60%, 65%, 70%, 75%, 80%, 85%, 90%, 91%, 92%, 93%, 94%, 95%, 96%, 97%, 98%, 99%, 99.5% or more homologous to an entire amino acid sequence shown in the respective line of Table II, application no. 10, column 5 or 8 and has the above-mentioned activity, e.g. conferring the production or the increased production of the respective fine chemical stearic acid as compared to a corresponding, e.g. non-transformed, wild type non-human organism, like a microorganism or a plant cell, plant or part thereof by, for example in a embodiment expression either in the cytosol or in an organelle such as a plastid or mitochondria or both, preferably in a plastid, or in another embodiment by targeted or non-targeted expression.

[56026] [0338.1.8.10] to [0339.1.8.10] for the disclosure of these paragraphs see [0338.1.8.8] to [0339.1.8.8] above.

[56027] The invention further relates to nucleic acid molecules or methods using said nucleic acid molecules that differ from one of the nucleotide sequences shown in the respective line in Table I, application no. 10, columns 5 or 8, preferably the coding region thereof, or fragments or homologs thereof, due to degeneracy of the genetic code but encode a polypeptide of the present invention, in particular a polypeptide having the above-mentioned activity, e.g. as those polypeptides depicted in the respective line in Table II, application no. 10, columns 5 or 8, fragments or homologs thereof. Advantageously, the nucleic acid molecule of the invention comprises, or in an other embodiment has, a nucleotide sequence encoding a protein comprising, or in an other embodiment having, an amino acid sequence shown in the respective line in Table II, application no. 10, columns 5 or 8, fragments or homologs thereof. In a further embodiment, the nucleic acid molecule of the invention encodes a full length protein which is substantially homologous to an amino acid sequence shown in the respective line in Table II, application no. 10, columns 5 or 8, or homologs thereof. However, in an embodiment, the nucleic acid molecule of the present invention does not consist of the sequence shown in the respective line in Table I, preferably Table IA, application no. 10, columns 5 or 8, preferably the coding region thereof, but the functional homologs thereof.

[56028] [0341.1.8.10] to [0343.1.8.10] for the disclosure of these paragraphs see [0341.1.8.8] to [0343.1.8.8] above.

[56029] Accordingly, in another embodiment, a nucleic acid molecule of the invention is at least 15, 20, 25 or 30 nucleotides in length. Preferably, it hybridizes under stringent conditions to a nucleic acid molecule comprising a nucleotide sequence of the nucleic acid molecule of the present invention or used in the process of the present invention, e.g. comprising the sequence shown in the respective line in Table I, application no. 10, columns 5 or 8, preferably the coding region thereof. In another embodiment the nucleic acid molecule is preferably at least 20, 30, 50, 100, 250 or more nucleotides in length.

[56030] for the disclosure of this paragraph see [0345.1.8.8] above.

[56031] Preferably, a nucleic acid molecule of the invention that hybridizes under stringent conditions to a sequence shown in the respective line in Table I, application no. 10, columns 5 or 8, preferably the coding region thereof, corresponds to a naturally-occurring nucleic acid molecule of the invention. As used herein, a “naturally-occurring” nucleic acid molecule refers to a RNA or DNA molecule having a nucleotide sequence that occurs in nature (e.g. encodes a natural protein). Preferably, the nucleic acid molecule encodes a natural protein having above-mentioned activity, e.g. conferring the production or the increased production of the respective fine chemical stearic acid as compared to a corresponding, e.g. non-transformed, wild type non-human organism, like a microorganism or a plant cell, plant or part thereof after increasing the expression or activity thereof or the activity of a protein of the invention or used in the process of the invention, in an embodiment for example expression either in the cytosol or in an organelle such as a plastid or mitochondria, preferably in plastids, or, in another embodiment by targeted or non-targeted expression.

[56032] for the disclosure of this paragraph see [0347.1.8.8] above.

[56033] For example, nucleotide substitutions leading to amino acid substitutions at “non-essential” amino acid residues can be made in a sequence of the nucleic acid molecule of the invention or used in the process of the invention, e.g. shown in the respective line in Table I, application no. 10, columns 5 or 8, preferably the coding region thereof, or fragments or homologs thereof.

[56034] [0349.1.8.10] to [0350.1.8.10] for the disclosure of these paragraphs see [0349.1.8.8] to [0350.1.8.8] above.

[56035] Accordingly, the invention relates to nucleic acid molecules encoding a polypeptide having above-mentioned activity, in a non-human organisms or parts thereof by for example expression either in the cytosol or in an organelle such as a plastid or mitochondria or both, preferably in plastids, that contain changes in amino acid residues that are not essential for said activity. Such polypeptides differ in amino acid sequence from a sequence depicted in the respective line in Table II, especially Table IIA, application no. 10, columns 5 or 8, but retain said activity described herein. The nucleic acid molecule can comprise a nucleotide sequence encoding a polypeptide, wherein the polypeptide comprises an amino acid sequence at least about 50% identical to an amino acid sequence shown in the respective line in Table II, application no. 10, columns 5 or 8, and is capable of conferring the production or the increased production of the respective fine chemical stearic acid as compared to a corresponding, e.g. non-transformed, wild type non-human organism, like a microorganism or a plant cell, plant or part thereof, after increasing its activity for example in an embodiment by expression either in the cytosol or in an organelle such as a plastid or mitochondria or both, preferably in plastids, or, in another embodiment by targeted or non-targeted expression. Preferably, the protein encoded by the nucleic acid molecule is at least about 60%, 70%, 80%, 90%, 95%, 96%, 97%, 98%, 99% or 99.5% identical to the sequence shown in the respective line in Table II, application no. 10, columns 5 or 8.

[56036] [0352.1.8.10] to [0357.1.8.10] for the disclosure of these paragraphs see [0352.1.8.8] to [0357.1.8.8] above.

[56037] Functional equivalents of the nucleic acid molecules according to the present invention and/or used in the process according to the present invention represent an embodiment of homologs. Functional equivalents derived from the nucleic acid molecules as shown in the respective line in Table I, application no. 10, columns 5 or 8, preferably the coding region thereof, according to the invention by substitution, insertion or deletion have at least 30%, 35%, 40%, 45%, 50%, 55%, 60%, 65%, 70%, 75%, 80%, 85%, 90%, 91%, 92%, 93%, 94%, 95%, 96%, 97%, 98%, 99% or 99.5% homology with one of the nucleic acid molecules as shown in the respective line in Table I, application no. 10, columns 5 or 8, preferably the coding region thereof, according to the invention and encode polypeptides having essentially the same properties as the polypeptide as shown in the respective line in Table II, application no. 10, columns 5 or 8.

[56038] Functional equivalents derived from one of the polypeptides as shown in the respective line in Table II, application no. 10, columns 5 or 8 according to the invention by substitution, insertion or deletion have at least 30%, 35%, 40%, 45%, 50%, 55%, 60%, 65%, 70%, 75%, 80%, 85%, 90%, 91%, 92%, 93%, 94%, 95%, 96%, 97%, 98%, 99% or 99.5% homology with one of the polypeptides as shown in the respective line in Table II, application no. 10, columns 5 or 8 according to the invention and having essentially the same properties as the polypeptide as shown in the respective line in Table II, application no. 10, columns 5 or 8.

[56039] for the disclosure of this paragraph see [0359.1.8.8] above.

[56040] A nucleic acid molecule encoding a homolog to a polypeptide depicted in the respective line in Table II, application no. 10, columns 5 or 8 can be created by introducing one or more nucleotide substitutions, additions or deletions into the nucleic acid molecule of the present invention, in particular of Table I, application no. 10, columns 5 or 8, in the respective line, such that one or more amino acid substitutions, additions or deletions are introduced into the encoded protein. Mutations can be introduced into the nucleic acid molecules as depicted in the respective line in Table I, application no. 10, columns 5 or 8, preferably the coding region thereof, by standard techniques, such as site-directed mutagenesis, PCR-mediated mutagenesis or other methods known to the person skilled in the art.

[56041] [0361.1.8.10] to [0363.1.8.10] for the disclosure of these paragraphs see [0361.1.8.8] to [0363.1.8.8] above.

[56042] Homologues of the nucleic acid sequences used, with the sequences shown in the respective line in Table I, application no. 10, columns 5 or 8, preferably the coding region thereof, comprise also allelic variants with at least approximately 30%, 35%, 40%, 45%, 50%, 55%, 60%, 65%, 70%, 75%, 80%, 85%, 90%, 91%, 92%, 93%, 94% 95%. 96%, 97%, 98%, 99%, 99.5% or more % homology with one of the nucleotide sequences shown or the abovementioned derived nucleic acid sequences or their homologues or derivatives or parts of these. Allelic variants encompass in particular functional variants which can be obtained by deletion, insertion or substitution of nucleotides from the sequences shown in the respective line, preferably in Table I, columns 5 or 8, preferably the coding region thereof, or from the derived nucleic acid sequences, the intention being, however, that the enzymatic activity or the biological activity of the resulting proteins synthesized is advantageously retained or increased.

[56043] In one embodiment of the present invention, the nucleic acid molecule of the invention or used in the process of the invention comprises the sequences shown in the respective line in any of the Table I, application no. 10, columns 5 or 8, preferably the coding region thereof, fragments or homologs thereof. It is preferred that the nucleic acid molecule comprises as little as possible other nucleotides not shown in the respective line in any one of Table I, application no. 10, columns 5 or 8, preferably the coding region thereof, fragments or homologs thereof. In one embodiment, the nucleic acid molecule comprises less than 500, 400, 300, 200, 100, 90, 80, 70, 60, 50 or 40 further nucleotides. In a further embodiment, the nucleic acid molecule comprises less than 30, 20 or 10 further nucleotides. In one embodiment, the nucleic acid molecule used in the process of the invention is identical to the sequences shown in the respective line in Table I, application no. 10, columns 5 or 8, preferably the coding region thereof.

[56044] Also preferred is that the nucleic acid molecule used in the process of the invention encodes a polypeptide comprising the sequence shown in the respective line in Table II, application no. 10, columns 5 or 8, fragments or homologs thereof. In one embodiment, the nucleic acid molecule encodes less than 150, 130, 100, 80, 60, 50, 40 or 30 further amino acids. In a further embodiment, the encoded polypeptide comprises less than 20, 15, 10, 9, 8, 7, 6 or 5 further amino acids. In one embodiment used in the inventive process, the encoded polypeptide is identical to the sequences shown in the respective line in Table II, application no. 10, columns 5 or 8.

[56045] In one embodiment, the nucleic acid molecule of the invention or used in the process encodes a polypeptide comprising the sequence shown in the respective line in Table II, application no. 10, columns 5 or 8, or fragments or homologs thereof, and comprises less than 100 further nucleotides. In a further embodiment, said nucleic acid molecule comprises less than 30 further nucleotides. In one embodiment, the nucleic acid molecule used in the process is identical to a coding sequence of the sequences shown in the respective line in Table I, application no. 10, columns 5 or 8.

[56046] Polypeptides (=proteins), which still have the essential biological or enzymatic activity of the polypeptide of the present invention conferring the production or the increased production of the respective fine chemical stearic acid as compared to a corresponding, e.g. non-transformed, wild type non-human organism, like a microorganism or a plant cell, plant or part thereof, i.e. whose activity is essentially not reduced, are polypeptides with at least 10%, 20%, 30%, 40%, 50%, 60%, 70%, 80%, 90%, 95% or more of the wild type biological activity or enzymatic activity, advantageously, the activity is essentially not reduced in comparison with the activity of a polypeptide shown in the respective line in Table II, application no. 10, columns 5 or 8 expressed under identical conditions.

[56047] Homologues of nucleic acid molecules shown in the respective line in Table I, application no. 10, columns 5 or 8, preferably the coding region thereof, or fragments thereof, or of the derived sequences shown in the respective line in Table II, application no. 10, columns 5 or 8, or fragments thereof, also mean truncated sequences, cDNA, single-stranded DNA or RNA of the coding and noncoding DNA sequence. Homologues of said sequences are also understood as meaning derivatives, which comprise noncoding regions such as, for example, UTRs, introns, terminators, enhancers or promoter variants. The promoters upstream of the nucleotide sequences stated can be modified by one or more nucleotide substitution(s), insertion(s) and/or deletion(s) without, however, interfering with the functionality or activity either of the promoters, the open reading frame (=ORF) or with the 3′-regulatory region such as terminators or other 3′-regulatory regions, which are far away from the ORF. It is furthermore possible that the activity of the promoters is increased by modification of their sequence, or that they are replaced completely by more active promoters, even promoters from heterologous organisms. Appropriate promoters are known to the person skilled in the art and are mentioned herein below.

[56048] [0370.1.8.10] to [0379.1.8.10] for the disclosure of these paragraphs see [0370.1.8.8] to [0379.1.8.8] above.

[56049] Moreover, a native polypeptide conferring the increase of the respective fine chemical stearic acid in a non-human organism or a part thereof can be isolated from cells (e.g., endothelial cells), for example using the antibody of the present invention as described below, in particular, an antibody against proteins having 2-C-methyl-D-erythritol 4-phosphate cytidylyltransferase, 3-deoxy-7-phosphoheptulonate synthase, 3-ketoacyl-CoA thiolase, acetylcoenzyme A synthetase, acid shock protein, aconitate hydratase, arginine decarboxylase, aspartate-ammonia ligase, At2g45420-protein, ATP-binding component of a transport system, b0283-protein, b0371-protein, b1672-protein, b2032-protein, b2399-protein, b2513-protein, b2849-protein, b3989-protein, b4121-protein, betaine aldehyde dehydrogenase, calcium-dependent protein kinase, cation-transporting ATPase, CCAAT-binding transcription factor, citrate synthase, coproporphyrinogen III oxidase, CTP synthetase, dihydroxyacetone kinase, ethanolamine utilization protein, F-box protein, glucokinase, glucose-6-phosphate 1-dehydrogenase, glutaredoxin, glycerol-3-phosphate dehydrogenase, heat shock transcription factor, isocitrate dehydrogenase, lipoprotein precursor, monothiol glutaredoxin, NADH dehydrogenase subunit N, oxidoreductase, phospho-2-dehydro-3-deoxyheptonate aldolase, protease, protein phosphatase, pyruvate kinase, sll1032-protein, sodium/proton antiporter, transcription factor, tryptophan synthase alpha chain, ycl049c-protein, ydr507c-protein, YGR104C-protein, or yor392w-protein activity, respectively, or an antibody against polypeptides as shown in the respective line in Table II, application no. 10, columns 5 or 8, or fragments or homologs thereof which can be produced by standard techniques utilizing the polypeptid of the present invention or fragment thereof, i.e., the polypeptide of this invention (FCRP). Preferred are monoclonal antibodies.

[56050] for the disclosure of this paragraph see [0381.1.8.8] above.

[56051] In one embodiment, the present invention relates to a polypeptide as depicted in the respective line in Table II, especially in Table IIA or especially in Table IIB, application no. 10, columns 5 or 8, or fragment or homolog thereof or as coded by the nucleic acid molecule shown in the respective line in Table I, especially Table IA or especially Table IB, application no. 10, columns 5 or 8, preferably the coding region thereof, or fragment or homolog thereof.

[56052] In an embodiment, the present invention relates to a polypeptide comprising or consisting of a consensus sequence shown in the respective line in Table IV, application no. 10, column 8 or at least one polypeptide motif shown in the respective line in Table IV, application no. 10, column 8.

[56053] In an embodiment thereof, the present invention relates to a polypeptide comprising or consisting of a consensus sequence shown in the respective line in Table IV, application no. 10, column 8 or comprising at least one polypeptide motif shown in the respective line in Table IV, application no. 10, column 8, whereby not more than 20, 15, 10, 9, 8, 7, 6, 5, 4, 3, 2, or 1, or 0 of the amino acids can be replaced by any amino acid.

[56054] In another embodiment thereof, the present invention relates to a polypeptide comprising or consisting of a consensus sequence shown in the respective line in Table IV, application no. 10, column 8 or comprising at least one polypeptide motif shown in the respective line in Table IV, application no. 10, column 8, whereby not more than 15%, 10%, 5%, 4%, 3%, 2% or1% or 0% of the amino acids defined as distinct specific amino acids are/is replaced by another amino acid.

[56055] In another embodiment thereof, the present invention relates to a polypeptide comprising or consisting of a consensus sequence shown in the respective line in Table IV, application no. 10, column 8 or comprising at least one polypeptide motif shown in the respective line in Table IV, application no. 10, column 8, whereby not more than 20, 15, 10, 9, 8, 7, 6, 5, 4, 3, 2, or 1, or 0 amino acids are inserted into the consensus sequence or polypeptide motif.

[56056] In an embodiment of the present invention, the polypeptide of the present invention comprises or consists of a consensus sequence or at least one polypeptide motif shown in the respective line in Table IV, application no. 10, column 8, whereby said polypeptide distinguishes over the sequence depicted in the respective line in Table II, application no. 10, columns 5 or 8 by one or more amino acids. In one embodiment, said polypeptide of the invention distinguishes over the sequence shown in the respective line in Table II, application no. 10, columns 5 and 8 by more than 5, 6, 7, 8 or 9 amino acids, preferably by more than 10, 15, 20, 25 or 30 amino acids, even more preferred are more than 40, 50, or 60 amino acids and, preferably, the sequence of the polypeptide of the invention distinguishes from the sequence shown in the respective line in Table II, application no. 10, columns 5 and 8 by not more than 80%, 70%, 60%, 50%, 40%, 30%, 20%, 10%, 5%, 4%, 3%, 2%, 1% or 0.5%. In another embodiment, said polypeptide of the invention does not consist of the sequence shown in the respective line in Table II, application no. 10, columns 5 and 8.

[56057] In an embodiment, the invention relates to a polypeptide conferring an increase in the respective fine chemical stearic acid in a non-human organism, especially a microorganism or a plant, or a part thereof, being encoded by the nucleic acid molecule of the invention or used in the process of the invention and having a sequence which distinguishes over the sequence as shown in the respective line in Table II, application no. 10, columns 5 or 8 by one or more amino acids (but not exceeding 5%, preferably 4%, 3%, 2%, 1%, 0.5%, 0.2% or 0.1%). In an embodiment, said polypeptide of the invention does not comprise or consist of the sequence shown in the respective line in Table II, application no. 10, columns 5 or 8. In an embodiment, said polypeptide of the present invention is less than 100%, 99.999%, 99.99%, 99.9% or 99% identical. In one embodiment, said polypeptide which differs at least in one or more amino acids (but not exceeding 5%, preferably 4%, 3%, 2%, 1%, 0.5%, 0.2% or 0.1%) from the polypeptide shown in the respective line in Table II, application no. 10, columns 5 and 8 does not comprise a protein of the sequence shown in the respective line in Table II A and/or II B, application no. 10, columns 5 or 8.

[56058] In an embodiment, the present invention relates to a polypeptide having the activity of the protein as shown in the respective line in Table II, application no. 10, column 3, which distinguishes over the sequence depicted in the respective line in Table II, application no. 10, columns 5 or 8 by one or more amino acids, preferably by more than 5, 6, 7, 8 or 9 amino acids, preferably by more than 10, 15, 20, 25 or 30 amino acids, even more preferred are more than 40, 50, or 60 amino acids and, preferably, the sequence of the polypeptide of the invention distinguishes from the sequence shown in the respective line in Table II, application no. 10, columns 5 and 8 by not more than 80%, 70%, 60%, 50%, 40%, 30%, 20%, 10%, 5%, 4%, 3%, 2%, 1% or 0.5%.

[56059] In another embodiment the polypeptide of the invention takes the form of a preprotein consisting of a plastidial or mitochondrial transit peptide joint to a polypeptide having the activity of the protein as shown in Table II, column 3, from which the transit peptide is preferably cleaved off upon transport of the preprotein into the organelle for example into the plastid or mitochondrion.

[56060] In another embodiment the polypeptide of the invention takes not the form of a preprotein.

[56061] [0390.1.8.10] to [0391.1.8.10] for the disclosure of these paragraphs see [0390.1.8.8] to [0391.1.8.8] above.

[56062] A polypeptide of the invention can participate in the process of the present invention. The polypeptide or a portion thereof comprises preferably an amino acid sequence, which is sufficiently homologous to an amino acid sequence shown in the respective line in Table II A and/or II B, application no. 10, columns 5 or 8.

[56063] Further, the polypeptide can have an amino acid sequence which is encoded by a nucleotide sequence which hybridizes, preferably hybridizes under stringent conditions as described above, to a nucleotide sequence of the nucleic acid molecule of the present invention. Accordingly, the polypeptide has an amino acid sequence which is encoded by a nucleotide sequence that is at least about 35%, 40%, 45%, 50%, 55%, 60%, 65%, 70%, 75%, 80%, 85%, 90%, 91%, 92%, 93%, 94%, 95%, 96%, 97%, 98%, 99%, 99.5% or more homologous to one of the amino acid sequences as shown in the respective line in Table II A and/or II B, application no. 10, columns 5 or 8, or fragments thereof. The preferred polypeptide of the present invention preferably possesses at least one of the activities according to the invention and described herein. A preferred polypeptide of the present invention includes an amino acid sequence encoded by a nucleotide sequence which hybridizes, preferably hybridizes under stringent conditions, to a nucleotide sequence shown in the respective line in Table I A and/or I B, application no. 10, columns 5 or 8, preferably the coding region thereof, or fragments thereto or which is homologous thereto, as defined above.

[56064] The polypeptide of the present invention can vary from the sequences shown in the respective line in Table II A and/or II B, application no. 10, columns 5 or 8 in amino acid sequence due to natural variation or mutagenesis, as described in detail herein. Accordingly, the polypeptide comprise an amino acid sequence which is at least about 35%, 40%, 45%, 50%, 55%, 60%, 65%, 70%, 75%, 80%, 85% or 90, 91%, 92%, 93%, 94%, 95%, 96%, 97%, 98%, 99%, 99.5% or more homologous to an entire amino acid sequence shown in the respective line in Table II A and/or II B, application no. 10, columns 5 or 8.

[56065] Biologically active portions of a polypeptide of the present invention include peptides comprising amino acid sequences derived from the amino acid sequence of the polypeptide of the present invention or used in the process of the present invention, e.g., the amino acid sequence shown in the respective line in Table II, application no. 10, columns 5 or 8 or the amino acid sequence of a protein homologous thereto, which include fewer amino acids than a full length polypeptide of the present invention or used in the process of the present invention or the full length protein which is homologous to a polypeptide of the present invention or used in the process of the present invention depicted herein, and exhibit at least one activity of a polypeptide of the present invention or used in the process of the present invention.

[56066] for the disclosure of this paragraph see [0396.1.8.8] above.

[56067] Manipulation of the nucleic acid molecule of the invention may result in the production of a protein having differences from the protein as shown in the respective line in Table II, application no. 10, column 5 or 8. Differences shall mean at least one amino acid different from the sequences as shown in the respective line in Table II, application no. 10, column 5 or 8, preferably at least 2, 3, 4, 5, 6, 7, 8, 9 or 10 amino acids (especially but not exceeding 0.1%, preferably 0.2%, 0.5%, 1%, 2%, 3% 4% or 5%), more preferably at least 15, 20, 25, 30, 35, 40, 45 or 50 amino acids (especially but not exceeding 0.5%, preferably 1%, 2%, 3% 4%, 5%, 10% or 25%) different from the sequences as shown in the respective line in Table II, application no. 10, column 5 or 8. These proteins may be improved in efficiency or activity, or may be more stable and therefore present in greater numbers in the cell as compared to the wild-type cell.

[56068] Any mutagenesis strategies for the polypeptide of the present invention or the polypeptide used in the process of the present invention to result in increasing said activity are not meant to be limiting; variations on these strategies will be readily apparent to one skilled in the art. Using such strategies, and incorporating the mechanisms disclosed herein, the nucleic acid molecule and polypeptide of the invention may be utilized to generate algae, ciliates, fungi, other microorganisms like C. glutamicum or plants or parts thereof, expressing proteins as shown in the respective line in Table II, application no. 10, column 5 or 8, or mutated proteins thereof. The nucleic acid molecules and polypeptide molecules of the invention are expressed such that the yield, production, and/or efficiency of production of a desired compound is improved.

[56069] [0399.1.8.10] to [0401.1.8.10] for the disclosure of these paragraphs see [0399.1.8.8] to [0401.1.8.8] above.

[56070] In one embodiment, a protein (=polypeptide) as shown in the respective line in Table II, application no. 10, column 5 or 8 refers to a polypeptide having an amino acid sequence corresponding to the polypeptide of the invention, especially to a polypeptide as shown in Table II, application no. 10, columns 5 or 8 or homologs thereof, or used in the process of the invention, whereas a “non-inventive protein or polypeptide” or “other polypeptide” refers to a polypeptide having an amino acid sequence corresponding to a protein which is not substantially homologous to a polypeptide of the invention, preferably which is not substantially homologous to a polypeptide or protein as shown in the respective line in Table II, application no. 10, column 5 or 8 or homologs thereof, e.g., a protein which does not confer the activity described herein and which is derived from the same or a different organism.

[56071] [0403.1.8.10] to [0409.1.8.10] for the disclosure of these paragraphs see [0403.1.8.8] to [0409.1.8.8] above.

[56072] As the nucleic acid molecules of the invention and/or the expression thereof is related to the synthesis of the respective fine chemical stearic acid its function as a probe extends to the detection of microorganisms, plant tissues, plants, plant variets, plant ecotypes or plant genera with varying, advantageously increased, capability or potential for synthesis of the respective fine chemical stearic acid. Therefore in one embodiment the present invention relates to a method for analyzing the capability or potential of a plant tissue, a plant, a plant variety or ecotype to produce the respective fine chemical stearic acid by using the respective antibody of the invention as a probe to detect the amount of the polypeptide encoded by said nucleic acid molecule of the invention in a non-human organism in comparison to another organism.

[56073] Therefore in one embodiment the invention relates to a method to probe a non-human organism for its capability for the production of the respective fine chemical comprising the steps of
[56074] a) analyzing the sequence and/or the expression of the respective nucleic acid molecule of the invention in least two non-human organisms which differ in the capability to produce the respective fine chemical;
[56075] b) associate the different sequence and/or expression level of the nucleic acid molecules of the invention with their different capability to produce the respective fine chemical;
[56076] c) analyze the sequence and/or the expression of the nucleic acid molecule of the invention in at least a third non-human organism;
[56077] d) predict the capability of the at least third organism to produce the respective fine chemical based by comparing the sequence and/or expression of the nucleic acid of the invention to the sequences and/or expression levels of the nucleic acid molecule of the invention of the at least two organisms analyzed in step a.

[56078] [0411.1.8.10] to [0430.1.8.10] for the disclosure of these paragraphs see [0411.1.8.8] to [0430.1.8.8] above.

[56079] Accordingly the present invention relates to any cell transgenic for any nucleic acid characterized as part of the invention, e.g. conferring the increase of the respective fine chemical stearic acid in a cell or a non-human organism or a part thereof, e.g. the nucleic acid molecule of the invention, the nucleic acid construct of the invention, the vector of the invention, the expression cassette according to the invention, or a nucleic acid molecule encoding the polypeptide of the invention, e.g. encoding a polypeptide having an activity as the protein as shown in the respective line in Table II, application no. 10, column 3. Due to the abovementioned activity the respective fine chemical stearic acid content in a cell or a non-human organism is increased. For example, due to modulation or manipulation, the cellular activity is increased, in a preferred embodiment in organelles such as plastids or mitochondria, e.g. due to an increased expression or specific activity or specific targeting of the subject matters of the invention in a cell or a non-human organism or a part thereof especially in organelles such as plastids or mitochondria, or in another embodiment in the cytosol. Transgenic for a polypeptide having a protein or a protein activity means herein that due to modulation or manipulation of the genome, the activity of protein as shown in the respective line in Table II, application no. 10, column 3 or a protein as shown in the respective line in Table II, application no. 10, column alike activity is increased in the cell or non-human organism or part thereof, especially in organelles such as plastids or mitochondria, or especially in the cytosol. Examples are described above in context with the process of the invention.

[56080] for the disclosure of this paragraph see [0432.1.8.8] above.

[56081] A naturally occurring expression cassette—for example the naturally occurring combination of the promoter of the gene encoding a protein as shown in the respective line in Table II, application no. 10, column 5 or 8, preferably the coding region thereof, or fragments or homologs thereof with the corresponding encoding gene—becomes a transgenic expression cassette when it is modified by non-natural, synthetic “artificial” methods such as, for example, mutagenesis. Such methods have been described (U.S. Pat. No. 5,565,350; WO 00/15815; also see above).

[56082] [0434.1.8.10] to [0435.1.8.10] for the disclosure of these paragraphs see [0434.1.8.8] to [0435.1.8.8] above.

[56083] Transgenic plants comprising the respective fine chemical(s) synthesized in the process according to the invention can be marketed directly without isolation of the fine chemical synthesized. In the process according to the invention, plants are understood as meaning all plant parts, plant organs such as leaf, stalk, root, tubers or seeds or propagation material or harvested material or the intact plant. In this context, the seed encompasses all parts of the seed such as the seed coats, epidermal cells, seed cells, endosperm or embryonic tissue. The fine chemical produced in the process according to the invention may, however, also be isolated from the plant. In case of stearic acid this can be in free form or bound to proteins. Fine chemical(s) produced by this process can be harvested by harvesting the non-human organisms either from the culture in which they grow or from the field. For example, this can be done via squeezing, grinding and/or extraction, salt precipitation and/or ion-exchange chromatography of the plant parts, preferably the plant seeds, plant fruits, plant tubers and the like.

[56084] [0437.1.8.10] to [0454.1.8.10] for the disclosure of these paragraphs see [0437.1.8.8] to [0454.1.8.8] above above.

[56085] In one embodiment, the present invention relates to a method for the identification of a gene product conferring the production of or an increase in the fine chemical production in a non-human cell, comprising the following steps:
[56086] (a) contacting, e.g. hybridizing, a, some or all nucleic acid molecules of a sample, e.g. cells, tissues, plants or microorganisms or a nucleic acid library, which can contain a candidate gene encoding a gene product conferring the production of or an increase in the fine chemical after expression, with the nucleic acid molecule of the present invention as shown in the respective line in column 5 or 8 of Table I A or B of application no. 10, preferably the coding region thereof, or a fragment or homolog thereof;
[56087] (b) identifying the nucleic acid molecules, which hybridize under relaxed stringent conditions with the nucleic acid molecule of the present invention in particular to the nucleic acid molecule sequence shown in the respective line in Table I, application no. 10, columns 5 or 8, preferably the coding region thereof, of a fragment or a homolog thereof, preferably in Table I B, application no. 10, columns 5 or 8, preferably the coding region thereof, of a fragment or a homolog thereof, and, optionally, isolating the full length cDNA clone or complete genomic clone;
[56088] (c) introducing the candidate nucleic acid molecules or a fragment thereof in host cells, preferably in a plant cell or a microorganism, appropriate for producing the fine chemical;
[56089] (d) expressing the identified nucleic acid molecules in the host cells for which the production of or the increased production of the fine chemical is desired;
[56090] (e) assaying the fine chemical level in the non-human host cells; and
[56091] (f) identifying the nucleic acid molecule and/or its gene product which expression confers the production of or an increase in the fine chemical level in the non-human host cell after expression compared to the wild type.

[56092] for the disclosure of this paragraph see [0456.1.8.8] above.

[56093] In another embodiment, the present invention relates to a method for the identification of a gene product conferring the production of or an increase in the fine chemical production in a cell, comprising the following steps:
[56094] (a) identifying a nucleic acid molecule of a non-human organism, which is at least 20%, 25%, 30%, 35%, 40%, 50%, 60%, 70%, 80%, 90%, 95%, 96%, 97%, 98%, 99%, 99.5% or more homolog to the nucleic acid molecule encoding a polypeptide comprising the polypeptide molecule as shown in the respective line in column 5 or 8 of Table II, application no. 10, or comprising a consensus sequence or a polypeptide motif as shown in the respective line in column 8 of Table IV, application no. 10, or being encoded by a nucleic acid molecule comprising a polynucleotide as shown in the respective line in column 5 or 8 of Table I, application no. 10, preferably the coding region thereof, or a homologue thereof as described herein, for example via homology search in a data bank;
[56095] (b) introducing the candidate nucleic acid molecule in non-human host cells, preferably in a plant cell or a microorganism, appropriate for producing the fine chemical;
[56096] (c) expressing the identified nucleic acid molecule in the non-human host cells;
[56097] (d) assaying the fine chemical level in the non-human host cells; and
[56098] (e) identifying the nucleic acid molecule and its gene product which expression confers the production of or an increase in the fine chemical level in the non-human host cell after expression compared to the wild type.

[56099] for the disclosure of this paragraph see [0458.1.8.8] above.

[56100] Further, the nucleic acid molecules disclosed herein, in particular the nucleic acid molecules shown in the respective line in column 5 or 8 of Table I A or B of application no. 10, may be sufficiently homologous to the sequences of related species such that these nucleic acid molecules may serve as markers for the construction of a genomic map in related organism or for association mapping. Furthermore natural variation in the genomic regions corresponding to nucleic acids disclosed herein, in particular the nucleic acid molecule shown in the respective line in column 5 or 8 of Table I A or B, of application no. 10 or homologous thereof, may lead to variation in the activity of the proteins disclosed herein, in particular the proteins comprising polypeptides as shown in the respective lines in column 5 or 8 of Table II A or B, of application no. 10 or their homologous, or comprising the consensus sequence or the polypeptide motif as shown in the respective line in column 8 of Table IV, and in consequence in a natural variation of an increased fine chemical production.

[56101] In consequence natural variation eventually also exists in form of more active allelic variants leading already to a relative increase in the fine chemical. Different variants of the nucleic acid molecules disclosed herein, in particular the nucleic acid molecules comprising the nucleic acid molecules as shown in the respective line in column 5 or 8 of Table I A or B of application no. 10, preferably the coding region thereof, which corresponds to different levels of increase in fine chemical, e.g. different levels of increase in fine chemical, can be indentified and used for marker assisted breeding for an enhanced production of the fine chemical.

[56102] Natural variation may also exist in the regulatory regions, e.g. the promoters of the natural genes comprising the nucleic acid molecules as shown in the respective line column 5 or 8 of Table I A or B of application no. 10, preferably the coding region thereof, which can similarly correspond to different levels of increase in the fine chemical, e.g. different levels of increase in the fine chemical can be identified and used for marker assisted breeding for an enhanced production of the fine chemical.

[56103] Accordingly, the present invention relates to a method for breeding plants for the production of the fine chemical, comprising
[56104] (a) selecting a first plant variety with an increased production of the fine chemical, e.g. based on an increased expression of a nucleic acid molecule of the invention as disclosed herein, in particular of a nucleic acid molecule comprising a nucleic acid molecule as shown in the respective line in column 5 or 8 of Table I A or B of application no. 10, preferably the coding region thereof, or fragments or homologs thereof, or a polypeptide comprising a polypeptide as shown in the respective line in column 5 or 8 of Table II A or B of application no. 10, or fragments or homologs thereof, or comprising a consensus sequence or a polypeptide motif as shown in the respective line in column 8 of Table IV, or a homolog thereof, as described herein;
[56105] (b) associating the level of increased production of the fine chemical, with the expression level or the genomic structure of a gene encoding said polypeptide or said nucleic acid molecule;
[56106] (c) crossing the first plant variety with a second plant variety, which significantly differs in its level of fine chemical; and
[56107] (d) identifying, which of the offspring varieties has got increased production of the fine chemical by the expression level of said polypeptide or nucleic acid molecule or the genomic structure of the gene(s) encoding said polypeptide or nucleic acid molecule of the invention.

[56108] [0462.1.8.10] to [0482.1.8.10] for the disclosure of these paragraphs see [0462.1.8.8] to [0482.1.8.8] above.

[56109] In a further embodiment the present invention is characterized by the features as disclosed in the following items:

### Items:

[56110] Item 1. A process for the production of the fine chemical stearic acid
[56111] (a) increasing or generating one or more activities selected from the group consisting of 2-C-methyl-D-erythritol 4-phosphate cytidylyltransferase, 3-deoxy-7-phosphoheptulonate synthase, 3-ketoacyl-CoA thiolase, acetyl-coenzyme A synthetase, acid shock protein, aconitate hydratase, arginine decarboxylase, aspartate-ammonia ligase, At2g45420-protein, ATP-binding component of a transport system, b0283-protein, b0371-protein, b1672-protein, b2032-protein, b2399-protein, b2513-protein, b2849-protein, b3989-protein, b4121-protein, betaine aldehyde dehydrogenase, calcium-dependent protein kinase, cation-transporting ATPase, CCAAT-binding transcription factor, citrate synthase, coproporphyrinogen III oxidase, CTP synthetase, dihydroxyacetone kinase, ethanolamine utilization protein, F-box protein, glucokinase, glucose-6-phosphate 1-dehydrogenase, glutaredoxin, glycerol-3-phosphate dehydrogenase, heat shock transcription factor, isocitrate dehydrogenase, lipoprotein precursor, monothiol glutaredoxin, NADH dehydrogenase subunit N, oxidoreductase, phospho-2-dehydro-3-deoxyheptonate aldolase, protease, protein phosphatase, pyruvate kinase, sll1032-protein, sodium/proton antiporter, transcription factor, tryptophan synthase alpha chain, ycl049c-protein, ydr507c-protein, YGR104C-protein, and yor392w-protein, in a non-human organism or a part thereof, preferably a microorganism, a plant cell, a plant or a part thereof, as compared to a corresponding non-transformed wild type non-human organism or a part thereof; and
[56112] (b) growing the non-human organism or a part thereof under conditions which permit the production of stearic acid or a composition comprising stearic acid in said non-human organism or in the culture medium surrounding said non-human organism.

[56113] Item 2. A process for the production of the fine chemical stearic acid, which comprises
[56114] (A)
[56115] (i) increasing or generating of the expression of; and/or
[56116] (ii) increasing or generating the expression of an expression product of; and/or
[56117] (iii) increasing or generating one or more activities of an expression product encoded by;
[56118] at least one respective nucleic acid molecule comprising a nucleic acid molecule selected from the group consisting of:
[56119] (a) a nucleic acid molecule encoding the polypeptide shown in column 5 or 8 of Table II, preferably Table II B, application no.10, or a homolog or a fragment thereof;
[56120] (b) a nucleic acid molecule shown in column 5 or 8 of Table I, preferably Table I B, application no.10, or a homolog or a fragment thereof (preferably the coding region thereof);
[56121] (c) a nucleic acid molecule, which, as a result of the degeneracy of the genetic code, can be derived from a polypeptide sequence depicted in column 5 or 8 of Table II, preferably Table II B, application no.10;
[56122] (d) a nucleic acid molecule having at least 30%, in particular at least 50%, 60%, 70%, 80%, 85%, 90%, 95%, 97%, 98%, 99% or 99.5% identity with the nucleic acid molecule sequence of a polynucleotide comprising the nucleic acid molecule shown in column 5 or 8 of Table I, preferably Table I B, application no. 10, or the coding region thereof;
[56123] (e) a nucleic acid molecule encoding a polypeptide having at least 30%, in particular 50%, 60%, 70%, 80%, 85%, 90%, 95%, 97%, 98%, 99% or 99.5% identity with the amino acid sequence of the polypeptide encoded by the nucleic acid molecule of (a), (b), (c) or (d);
[56124] (f) a nucleic acid molecule which hybridizes with a nucleic acid molecule of (a), (b), (c), (d) or (e) under stringent hybridization conditions;
[56125] (g) a nucleic acid molecule encoding a polypeptide which can be isolated with the aid of monoclonal or polyclonal antibodies made against a polypeptide encoded by one of the nucleic acid molecules of (a), (b), (c), (d), (e) or (f);
[56126] (h) a nucleic acid molecule encoding a polypeptide comprising the consensus sequence or one or more polypeptide motifs as shown in column 8 of Table IV, application no.10;
[56127] (i) a nucleic acid molecule encoding a polypeptide having the activity represented by a respective protein as depicted in column 5 of Table II, application no. 10;
[56128] (j) a nucleic acid molecule which comprises a polynucleotide, which is obtained by amplifying a cDNA library or a genomic library using the primers as depicted in column 8 of Table III, application no. 10; and
[56129] (k) a nucleic acid molecule which is obtainable by screening a suitable nucleic acid library, especially a cDNA library and/or a genomic library, under stringent hybridization conditions with a probe comprising a complementary sequence of a nucleic acid molecule of (a), (b), (c), (d), (e), (f), (g), (h), (i) or (j) or with a fragment thereof, having at least 15 nt, preferably 20 nt, 30 nt, 50 nt, 100 nt, 200 nt, 500 nt, 1000 nt, 1500 nt, 2000 nt or 3000 nt of a nucleic acid molecule complementary to a nucleic acid molecule sequence characterized in (a), (b), (c), (d), (e), (f), (g), (h), (i) or (j);
[56130] or a nucleic acid molecule comprising a sequence which is complementary thereto;
[56131] in a non-human organism or a part thereof, preferably a microorganism, a plant cell, a plant or a part thereof, as compared to a corresponding non-transformed wild type non-human organism or a part thereof; and
[56132] (B) growing the non-human organism or a part thereof under conditions which permit the production of stearic acid or a composition comprising stearic acid in said non-human organism or in the culture medium surrounding said non-human organism.

[56133] Item 3. A process of items 1 or 2, comprising of recovering stearic acid in its free or bound form.

[56134] Item 4. The process of any one of items 1 to 3, comprising the following steps:
[56135] (a) selecting a non-human organism or a part thereof expressing a polypeptide encoded by the nucleic acid molecule characterized in item 2;
[56136] (b) mutagenizing the selected non-human organism or the part thereof;
[56137] (c) comparing the activity or the expression level of said polypeptide in the mutagenized non-human organism or the part thereof with the activity or the expression of said polypeptide of the selected non-human organisms or the part thereof;
[56138] (d) selecting the mutated non-human organisms or parts thereof, which comprise an increased activity or expression level of said polypeptide compared to the selected non-human organism or the part thereof;
[56139] (e) optionally, growing and cultivating the non-human organisms or the parts thereof;
[56140] and
[56141] (f) recovering, and optionally isolating, the free or bound stearic acid produced by the selected mutated non-human organisms or parts thereof.

[56142] Item 5. The process of any one of items 1 to 4 wherein the activity of said protein or the expression of said nucleic acid molecule is increased or generated transiently or stably.

[56143] Item 6. An isolated nucleic acid molecule comprising a nucleic acid molecule selected from the group consisting of:
[56144] (a) a nucleic acid molecule encoding a polypeptide shown in Table II, application no. 10, column 5 or 8, preferably shown in Table II B, application no. 10, column 8, or a homolog or a fragment thereof;
[56145] (b) a nucleic acid molecule shown in Table I, application no. 10, column 5 or 8, preferably shown in Table I B, application no. 10, column 8, preferably the coding region thereof, or a homolog or a fragment thereof;
[56146] (c) a nucleic acid molecule, which, as a result of the degeneracy of the genetic code, can be derived from a polypeptide sequence depicted in column 5 or 8 of Table II, application no. 10, preferably in column 8 of Table II B, application no. application no.,
[56147] (d) a nucleic acid molecule having at least 30% identity, preferably at least 40%, 50%, 60%, 70%, 75%, 80%, 85%, 90%, 95%, 96%, 97%, 98%, 99%, 99.5%, with the nucleic acid molecule sequence of a polynucleotide comprising the nucleic acid molecule shown in column 5 or 8 of Table I, application no. 3, preferably shown in column 8 of Table I B, application no. 10, preferably the coding region thereof;
[56148] (e) a nucleic acid molecule encoding a polypeptide having at least 30% identity, preferably at least 40%, 50% 60%, 70%, 75%, 80%, 85%, 90%, 95%, 96%, 97%, 98%, 99%, 99.5%, identity with the amino acid sequence of the polypeptide encoded by the nucleic acid molecule of (a), (b), (c) or (d);
[56149] (f) a nucleic acid molecule which hybridizes with a nucleic acid molecule of (a), (b), (c), (d) or (e) under stringent hybridisation conditions;
[56150] (g) a nucleic acid molecule encoding a polypeptide which can be isolated with the aid of monoclonal or polyclonal antibodies made against a polypeptide encoded by one of the nucleic acid molecules of (a), (b), (c), (d), (e) or (f);
[56151] (h) a nucleic acid molecule encoding a polypeptide comprising the consensus sequence or one or more polypeptide motifs as shown in column 8 of Table IV, application no. 10;
[56152] (i) a nucleic acid molecule encoding a polypeptide having the activity represented by a respective protein as depicted in column 5 of Table II, application no. 10;
[56153] (j) a nucleic acid molecule comprising a polynucleotide which is obtained by amplifying a cDNA library or a genomic library using the primers in Table III, application no. 10, column 8;
[56154] and
[56155] (k) nucleic acid molecule which is obtainable by screening a suitable nucleic acid library, especially a cDNA library and/or a genomic library, under stringent hybridization conditions with a probe comprising one of the sequences of the nucleic acid molecule of (a), (b), (c), (d), (e), (f), (g), (h), (i) or (j) or with a fragment of at least 15 nt, preferably 20 nt, 30 nt, 50 nt, 100 nt, 200 nt,500 nt, 1000 nt, 1500 nt, 2000 nt or 3000 nt of the nucleic acid molecule characterized in (a), (b), (c), (d), (e), (f), (g), (h), (i) or (i),
[56156] or a nucleic acid molecule comprising a sequence which is complementary thereto.

[56157] Item 7. A nucleic acid construct which confers the expression of the nucleic acid molecule as defined in item 6, comprising one or more regulatory elements.

[56158] Item 8. An expression cassette comprising
[56159] (a) a promoter, preferably selected from the group consisting of Big35S, PCUbi, Super and USP;
[56160] (b) a nucleic acid molecule as defined in item 6.

[56161] Item 9. A vector comprising the nucleic acid molecule as defined in item 6 or the nucleic acid construct as claimed in item 7 or the expression cassette as claimed in item 8.

[56162] Item 10. A host cell or a plant organelle, which has been transformed with the vector as claimed in item 9 or the nucleic acid molecule as defined in item 6 or the nucleic acid construct as claimed in item 7 or the expression cassette as claimed in item 8.

[56163] Item 11. The host cell of item 10, which is a plant cell or a microorganism.

[56164] Item 12. A process for producing a polypeptide, wherein the polypeptide is expressed in a host cell as claimed in item 10 or 11.

[56165] Item 13. A polypeptide produced by the process as claimed in item 12 or encoded by the nucleic acid molecule as defined in item 6.

[56166] Item 14. An antibody, which binds specifically to the polypeptide as claimed in item 13.

[56167] Item 15. A plant tissue, propagation material, harvested material or a plant or a part thereof comprising the host cell as claimed in item 10 or 11.

[56168] Item 16. A process for the identification of a compound conferring an increase in stearic acid production in a non-human organism, comprising the steps:
[56169] (a) culturing a plant cell or tissue or microorganism or maintaining a plant expressing the polypeptide encoded by the nucleic acid molecule as defined in item 6 conferring an increase in the amount of stearic acid in a non-human organism or a part thereof and a readout system capable of interacting with the polypeptide under suitable conditions which permit the interaction of the polypeptide with said readout system in the presence of a compound or a sample comprising a plurality of compounds and capable of providing a detectable signal in response to the binding of a compound to said polypeptide under conditions which permit the expression of said readout system and of the polypeptide encoded by the nucleic acid molecule of item 6 conferring an increase in the amount of stearic acidin a non-human organism or a part thereof;
[56170] (b) identifying if the compound is an effective agonist by detecting the presence or absence or increase of a signal produced by said readout system.

[56171] Item 17. A method for the production of an agricultural composition comprising the steps of the method of item 16 and formulating the compound identified in item 16 in a form acceptable for an application in agriculture.

[56172] Item 18. A composition comprising the nucleic acid molecule as defined in item 6, the polypeptide as claimed in item 13, the nucleic acid construct as claimed in item 7, the expression cassette as claimed in item 8, the vector as claimed in item 9, the compound as claimed in item 16, the antibody as claimed in item 14, and optionally an agricultural acceptable carrier.

[56173] Item 19. Use of the nucleic acid molecule as defined in item 6 for the identification of a nucleic acid molecule conferring an increase in stearic acid after expression.

[56174] Item 20. Cosmetic, pharmaceutical, food or feed composition comprising the nucleic acid molecule as defined in item 6, the polypeptide as claimed in item 13, the nucleic acid construct as claimed in item 7, the expression cassette as claimed in item 8, the vector as claimed in item 9, the antibody as claimed in item 14 , the plant or a part thereof, or plant tissue as claimed in item 15, the harvested material or propagation material as claimed in item 15 or the host cell of item as claimed in items 10 or 11.

[56175] Item 21. Use of the nuclei acid molecule as defined in item 6, the polypeptide as claimed in item 13, the nucleic acid construct as claimed in item 7, the expression cassette as claimed in item 8, the vector as claimed in claim9, the plant or plant tissue as claimed in item 15, or the host cell of item 10 to 11 for the production of plant resistant to a herbicide inhibiting the production of stearic acid.

[56176] [0483.1.8.10] to [0494.1.8.10] for the disclosure of these paragraphs see [0483.1.8.8] to [0494.1.8.8] above.

### Example 11a

### PCR Amplification of the Sequences

[56177] Unless otherwise specified, standard methods as described in Sambrook et al., Molecular Cloning: A laboratory manual, Cold Spring Harbor 1989, Cold Spring Harbor Laboratory Press are used.

[56178] The inventive sequences as shown in the respective line in Table I, column 5, preferably the coding region thereof, were amplified by PCR as described in the protocol of the Pfu Ultra, Pfu Turbo or Herculase DNA polymerase (Stratagene). The composition for the protocol of the Pfu Ultra, Pfu Turbo or Herculase DNA polymerase was as follows: 1×PCR buffer (Stratagene), 0.2 mM of each dNTP, 100 ng genomic DNA of Saccharomyces cerevisiae (strain S288C; Research Genetics, Inc., now Invitrogen), Escherichia coli (strain MG1655; E. coli Genetic Stock Center), Synechocystis sp. (strain PCC6803), Azotobacter vinelandii (strain N.R. Smith,16), Thermus thermophilus (HB8) or 50 ng cDNA from various tissues and development stages of Arabidopsis thaliana (ecotype Columbia), Physcomitrella patens, Glycine max (variety Resnick), Brassica napus, Oryza sativa or Zea mays (variety B73, Mo17, A188), 50 pmol forward primer, 50 pmol reverse primer, with or without 1 M Betaine, 2.5 u Pfu Ultra, Pfu Turbo or Herculase DNA polymerase.

[56179] The amplification cycles were as follows:

[56180] 1 cycle of 2-3 minutes at 94-95° C., then 25-36 cycles with 30-60 seconds at 94-95° C., 30-45 seconds at 50-60° C. and 210-480 seconds at 72° C., followed by 1 cycle of 5-10 minutes at 72° C., then 4-16° C.—preferably for Saccharomyces cerevisiae, Escherichia coli, Synechocystis sp., Azotobacter vinelandii, Thermus thermophilus.

[56181] In case of Arabidopsis thaliana, Brassica napus, Glycine max, Oryza sativa, Physcomitrella patens, Zea mays the amplification cycles were as follows:

[56182] 1 cycle with 30 seconds at 94° C., 30 seconds at 61 ° C., 15 minutes at 72° C., then 2 cycles with 30 seconds at 94° C., 30 seconds at 60° C., 15 minutes at 72° C., then 3 cycles with 30 seconds at 94° C., 30 seconds at 59° C., 15 minutes at 72° C., then 4 cycles with 30 seconds at 94° C., 30 seconds at 58° C., 15 minutes at 72° C., then 25 cycles with 30 seconds at 94° C., 30 seconds at 57° C., 15 minutes at 72° C., then 1 cycle with 10 minutes at 72° C., then finally 4-16° C.

[56183] RNAs were generated with the RNeasy Plant Kit according to the standard protocol (Qiagen) and Superscript II Reverse Transkriptase was used to produce double stranded cDNA according to the standard protocol (Invitrogen).

[56184] ORF specific primer pairs for the genes to be expressed are shown in the respective line in Table III, column 8. The following adapter sequences were added to Saccharomyces cerevisiae ORF specific primers (see Table III) for cloning purposes:

SEQ ID NO: 20

| | | |
|---|---|---|
| i) | foward primer: | 5′-GGAATTCCAGCTGACCACC-3′ |

SEQ ID NO: 21

| | | |
|---|---|---|
| ii) | reverse primer: | 5′-GATCCCCGGGAATTGCCATG-3′ |

[56185] These adaptor sequences allow cloning of the ORF into the various vectors containing the Resgen adaptors, see table column E of Table c.

[56186] The following adapter sequences were added to Saccharomyces cerevisiae, Escherichia coli, Synechocystis sp., Azotobacter vinelandii, Thermus thermophilus, Arabidopsis thaliana, Brassica napus, Glycine max, Oryza sativa , Physcomitrella patens, or Zea mays ORF specific primers for cloning purposes:

| SEQ ID NO: 22 | | |
|---|---|---|
| iii) | forward primer: | 5′-TTGCTCTTCC-3′ |
| SEQ ID NO: 23 | | |
| iiii) | reverse primer: | 5′-TTGCTCTTCG-3′ |

[56187] The adaptor sequences allow cloning of the ORF into the various vectors containing the Colic adaptors, see table column E of Table c.

[56188] Therefore for amplification and cloning of Saccharomyces cerevisiae SEQ ID NO: 66772, a primer consisting of the adaptor sequence i) and the ORF specific sequence SEQ ID NO: 67180 and a second primer consisting of the adaptor sequence ii) and the ORF specific sequence SEQ ID NO: 67181 were used.

[56189] For amplification and cloning of Escherichia coli SEQ ID NO: 7333, a primer consisting of the adaptor sequence iii) and the ORF specific sequence SEQ ID NO: 7679 and a second primer consisting of the adaptor sequence iiii) and the ORF specific sequence SEQ ID NO: 7680 were used.

[56190] For amplification and cloning of Synechocystis sp. SEQ ID NO: 11471, a primer consisting of the adaptor sequence iii) and the ORF specific sequence SEQ ID NO: 11983 and a second primer consisting of the adaptor sequence iiii) and the ORF specific sequence SEQ ID NO: 11984 were used.

[56191] For amplification and cloning of Arabidopsis thaliana SEQ ID NO: 1061, a primer consisting of the adaptor sequence iii) and the ORF specific sequence SEQ ID NO: 1293 and a second primer consisting of the adaptor sequence iiii) and the ORF specific sequence SEQ ID NO: 1294 were used.

[56192] For amplification and cloning of Brassica napus SEQ ID NO: 15532, a primer consisting of the adaptor sequence iii) and the ORF specific sequence SEQ ID NO: 16150 and a second primer consisting of the adaptor sequence iiii) and the ORF specific sequence SEQ ID NO: 16151 were used.

[56193] For amplification and cloning of Glycine max SEQ ID NO: 10811, a primer consisting of the adaptor sequence iii) and the ORF specific sequence SEQ ID NO: 11207 and a second primer consisting of the adaptor sequence iiii) and the ORF specific sequence SEQ ID NO: 11208 were used.

[56194] Following these examples every sequence disclosed in Table I, preferably column 5, especially the coding region thereof can be cloned by fusing the adaptor sequences to the respective specific primers sequences as disclosed in Table III, column 8 using the respective vectors shown in Table c.

[56195] [0496.1.8.10] to [0499.1.8.10] for the disclosure of these paragraphs see [0496.1.8.8] to [0499.1.8.8] above.

### Example 11e

### Cloning of Inventive Sequences as Shown in Table I, Column 5 in the Different Expression Vectors

[56196] For cloning of for example SEQ ID NO: 7333 from Escherichia coli or any other ORF from Escherichia coli, Synechocystis sp., Arabidopsis thaliana, Brassica napus, or Glycine max the vector DNA was treated with the restriction enzymes Pacl and Ncol following the standard protocol (MBI Fermentas).

[56197] For cloning for example the ORFs of SEQ ID NO: 66772 from Saccharomyces cerevisiae or any other ORF from Saccharomyces cerevisiae into vectors containing the Resgen adaptor sequence the respective vector DNA was treated with the restriction enzyme Ncol.

[56198] For cloning of for example ORFs SEQ ID NO: 117482 from Saccharomyces cerevisiae or any other ORF from Saccharomyces cerevisiae into vectors containing the Colic adaptor sequence, the respective vector DNA was treated with the restriction enzymes Pacl and Ncol following the standard protocol (MBI Fermentas).

[56199] In all cases the reaction was stopped by inactivation at 70° C. for 20 minutes and purified over QlAquick or NucleoSpin Extract II columns following the standard protocol (Qiagen or Macherey-Nagel).

[56200] Then the PCR-product representing the amplified ORF with the respective adapter sequences and the vector DNA were treated with T4 DNA polymerase according to the standard protocol (MBI Fermentas) to produce single stranded overhangs with the parameters 1 unit T4 DNA polymerase at 37° C. for 2-10 minutes for the vector and 1-2 u T4 DNA polymerase at 15-17° C. for 10-60 minutes for the PCR product representing SEQ ID NO: 7333.

[56201] The reaction was stopped by addition of high-salt buffer and purified over QlAquick or NucleoSpin Extract II columns following the standard protocol (Qiagen or Macherey-Nagel).

[56202] According to this example the skilled person is able to clone all sequences disclosed in Table I, preferably column 5 or column 8, especially the coding region thereof.

[56203] Approximately 30-60 ng of prepared vector and a defined amount of prepared amplificate were mixed and hybridized at 65° C. for 15 minutes followed by 37° C. 0.1 ° C/1 seconds, followed by 37° C. 10 minutes, followed by 0.1 ° C/1 seconds, then 4-10 ° C.

[56204] The ligated constructs were transformed in the same reaction vessel by addition of competent E. coli cells (strain DHSalpha) and incubation for 20 minutes at 1 ° C. followed by a heat shock for 90 seconds at 42° C. and cooling to 1-4° C. Then, complete medium (SOC) was added and the mixture was incubated for 45 minutes at 37° C. The entire mixture was subsequently plated onto an agar plate with 0.05 mg/ml kanamycin and incubated overnight at 37° C.

[56205] The outcome of the cloning step was verified by amplification with the aid of primers which bind upstream and downstream of the integration site, thus allowing the amplification of the insertion. The amplifications were carried out as described in the protocol of Taq DNA polymerase (Gibco-BRL).

[56206] The amplification cycles were as follows:

[56207] 1 cycle of 1-5 minutes at 94° C., followed by 35 cycles of in each case 15-60 seconds at 94° C., 15-60 seconds at 50-66° C. and 5-15 minutes at 72° C., followed by 1 cycle of 10 minutes at 72° C., then 4-16° C.

[56208] Several colonies were checked, but only one colony for which a PCR product of the expected size was detected was used in the following steps.

[56209] A portion of this positive colony was transferred into a reaction vessel filled with complete medium (LB) supplemented with kanamycin and incubated overnight at 37° C.

[56210] The plasmid preparation was carried out as specified in the Qiaprep or NucleoSpin Multi-96 Plus standard protocol (Qiagen or Macherey-Nagel).

[56211] [0501.1.8.10] to [0503.1.8.10] for the disclosure of these paragraphs see [0501.1.8.8] to [0503.1.8.8] above.

[56212] Table d showing results of plant analyses

TABLE d

| SeqID | Target | Locus | Metabolite | Source | Promotor | Method | Min | Max |
|---|---|---|---|---|---|---|---|---|
| 1061 | non- | At1g68320 | stearic | ARA_LEAF | p-PcUBI | GC | 17 | 84 |
| | targeted | | acid | | | | | |
| 1298 | non- | At2g25070 | stearic | ARA_LEAF | p-PcUBI | GC | 18 | 44 |
| | targeted | | acid | | | | | |
| 120810 | plastidic | At2g44350 | stearic | ARA_LEAF | p-Super | GC | 17 | 25 |
| | | | acid | | | | | |
| 1623 | non- | At2g45420 | stearic | ARA_LEAF | p-PcUBI | GC | 17 | 691 |
| | targeted | | acid | | | | | |
| 120952 | non- | At3g16820 | stearic | ARA_LEAF | p-PcUBI | GC | 20 | 28 |
| | targeted | | acid | | | | | |
| 22921 | non- | At3g20910 | stearic | ARA_LEAF | p-PcUBI | GC | 28 | 60 |
| | targeted | | acid | | | | | |
| 2935 | non- | At3g62950 | stearic | ARA_LEAF | p-PcUBI | GC | 23 | 58 |
| | targeted | | acid | | | | | |
| 23482 | non- | At4g15660 | stearic | ARA_LEAF | p-PcUBI | GC | 19 | 79 |
| | targeted | | acid | | | | | |
| 3279 | non- | At4g15670 | stearic | ARA_LEAF | p-PcUBI | GC | 15 | 89 |
| | targeted | | acid | | | | | |
| 24232 | non- | At4g18880 | stearic | ARA_LEAF | p-PcUBI | GC | 20 | 28 |
| | targeted | | acid | | | | | |
| 68849 | non- | At4g26080 | stearic | ARA_LEAF | p-PcUBI | GC | 17 | 20 |
| | targeted | | acid | | | | | |
| 4102 | non- | At4g33040 | stearic | ARA_LEAF | p-PcUBI | GC | 21 | 40 |
| | targeted | | acid | | | | | |
| 4348 | non- | At4g35310 | stearic | ARA_LEAF | p-PcUBI | GC | 99 | 132 |
| | targeted | | acid | | | | | |
| 25498 | non- | At5g59220 | stearic | ARA_LEAF | p-PcUBI | GC | 15 | 38 |
| | targeted | | acid | | | | | |
| 121076 | plastidic | B0283 | stearic | ARA_LEAF | p-Super | GC | 19 | 29 |
| | | | acid | | | | | |
| 121111 | non- | B0312 | stearic | ARA_SEED_2 | p-USP | GC | 12 | 21 |
| | targeted | | acid | | | | | |
| 121637 | non- | B0371 | stearic | ARA_LEAF | p-Super | GC | 26 | 60 |
| | targeted | | acid | | | | | |
| 7333 | non- | B0449 | stearic | ARA_LEAF | p-Super | GC | 18 | 75 |
| | targeted | | acid | | | | | |
| 37400 | non- | B1186 | stearic | ARA_LEAF | p-Super | GC | 15 | 91 |
| | targeted | | acid | | | | | |
| 38266 | plastidic | B1431 | stearic | ARA_LEAF | p-Super | GC | 19 | 31 |
| | | | acid | | | | | |
| 38300 | non- | B1597 | stearic | ARA_LEAF | p-Super | GC | 22 | 178 |
| | targeted | | acid | | | | | |
| 78771 | non- | B1672 | stearic | ARA_LEAF | p-Super | GC | 17 | 30 |
| | targeted | | acid | | | | | |
| 38573 | non- | B1845 | stearic | ARA_LEAF | p-Super | GC | 22 | 31 |
| | targeted | | acid | | | | | |
| 8920 | non- | B2032 | stearic | ARA_LEAF | p-Super | GC | 18 | 89 |
| | targeted | | acid | | | | | |
| 39237 | non- | B2399 | stearic | ARA_LEAF | p-Super | GC | 18 | 63 |
| | targeted | | acid | | | | | |
| 115628 | non- | B2439 | stearic | ARA_LEAF | p-Super | GC | 16 | 24 |
| | targeted | | acid | | | | | |
| 79509 | non- | B2482 | stearic | ARA_LEAF | p-Super | GC | 19 | 73 |
| | targeted | | acid | | | | | |
| 9167 | non- | B2513 | stearic | ARA_LEAF | p-Super | GC | 16 | 121 |
| | targeted | | acid | | | | | |
| 121657 | plastidic | B2601 | stearic | ARA_SEED_2 | p-USP | GC | 11 | 51 |
| | | | acid | | | | | |
| 81075 | non- | B2747 | stearic | ARA_LEAF | p-Super | GC | 18 | 44 |
| | targeted | | acid | | | | | |
| 81980 | non- | B2849 | stearic | ARA_LEAF | p-Super | GC | 21 | 129 |
| | targeted | | acid | | | | | |
| 83657 | plastidic | B3744 | stearic | ARA_SEED_2 | p-USP | GC | 9 | 27 |
| | | | acid | | | | | |
| 100675 | plastidic | B3845 | stearic | ARA_SEED_2 | p-USP | GC | 10 | 27 |
| | | | acid | | | | | |
| 44372 | non- | B3989 | stearic | ARA_LEAF | p-Super | GC | 18 | 35 |
| | targeted | | acid | | | | | |
| 44609 | non- | B4121 | stearic | ARA_LEAF | p-Super | GC | 18 | 35 |
| | targeted | | acid | | | | | |
| 10811 | non- | GM02LC12622 | stearic | ARA_LEAF | p-PcUBI | GC | 17 | 99 |
| | targeted | | acid | | | | | |
| 46751 | non- | GM02LC19289 | stearic | ARA_LEAF | p-PcUBI | GC | 17 | 41 |
| | targeted | | acid | | | | | |
| 85510 | plastidic | Sll0593 | stearic | ARA_LEAF | p-PcUBI | GC | 17 | 54 |
| | | | acid | | | | | |
| 85723 | mitochondrial | Sll1032 | stearic | ARA_LEAF | p-PcUBI | GC | 17 | 22 |
| | | | acid | | | | | |
| 53878 | mitochondrial | Sll1443 | stearic | ARA_LEAF | p-PcUBI | GC | 17 | 42 |
| | | | acid | | | | | |
| 11471 | mitochondrial | Sll1917 | stearic | ARA_LEAF | p-PcUBI | GC | 17 | 37 |
| | | | acid | | | | | |
| 55385 | mitochondrial | Sll1920 | stearic | ARA_LEAF | p-PcUBI | GC | 15 | 34 |
| | | | acid | | | | | |
| 11990 | plastidic | Slr0338 | stearic | ARA_LEAF | p-PcUBI | GC | 20 | 36 |
| | | | acid | | | | | |
| 87655 | plastidic | Slr0966 | stearic | ARA_LEAF | p-PcUBI | GC | 27 | 48 |
| | | | acid | | | | | |
| 58324 | non- | Slr1312 | stearic | ARA_LEAF | p-PcUBI | GC | 16 | 70 |
| | targeted | | acid | | | | | |
| 121908 | non- | Yal054c | stearic | ARA_LEAF | p-PcUBI | GC | 20 | 28 |
| | targeted | | acid | | | | | |
| 88879 | plastidic | Ybr249c | stearic | ARA_LEAF | p-Super | GC | 20 | 109 |
| | | | acid | | | | | |
| 113220 | plastidic | Ycl049c | stearic | ARA_LEAF | p-Super | GC | 11 | 17 |
| | | | acid | | | | | |
| 119408 | non- | Ydl022w | stearic | ARA_SEED_2 | p-PcUBI | GC | 17 | 35 |
| | targeted | | acid | | | | | |
| 122228 | non- | Ydl066w | stearic | ARA_SEED_2 | p-PcUBI | GC | 9 | 24 |
| | targeted | | acid | | | | | |
| 90165 | non- | Ydr507c | stearic | ARA_LEAF | Big35S | GC | 16 | 51 |
| | targeted | | acid | | | | | |
| 120309 | non- | Yfl053w | stearic | ARA_LEAF | Big35S | GC | 19 | 37 |
| | targeted | | acid | | | | | |
| 117482 | non- | Ygr104c | stearic | ARA_SEED_2 | p-PcUBI | GC | 14 | 20 |
| | targeted | | acid | | | | | |
| 66772 | non- | Ylr304c | stearic | ARA_LEAF | Big35S | GC | 16 | 35 |
| | targeted | | acid | | | | | |
| 15183 | plastidic | Yor392w | stearic | ARA_LEAF | p-Super | GC | 20 | 32 |
| | | | acid | | | | | |
| 15532 | plastidic | 51340801_CANOLA | stearic | ARA_LEAF | p-PcUBI | GC | 16 | 58 |
| | | | acid | | | | | |
| 16883 | plastidic | 59582753_SOYBEAN | stearic | ARA_LEAF | p-PcUBI | GC | 16 | 42 |
| | | | acid | | | | | |

[56213] Column 1 shows the SEQ ID NO, Column 2 shows the expression type (targeted or non-targeted), Column 3 shows the “gene name” (locus), Column 4 shows the metabolite analyzed, Column 5 indicates the A. thaliana source tissue analyzed, Column 6 indicates the used promoter for expression, Column 7 indicates the analytical method. Columns 8 and 9 show the minimum and the maximum increase of the analyzed metabolite (in percent) in comparison to the wild type (=ratio_by_weight, given as percent increase).

[56214] When the analyses were repeated independently, all results proved to be significant.

[56215] [0505.1.8.10] to [0515.1.8.10] for the disclosure of these paragraphs see [0505.1.8.8] to [0515.1.8.8] above.

[56216] In a further embodiment, the present invention relates in paragraphs [0000.1.8.11] to [0514.1.8.11] to a further process for the production of the fine chemical palmitic acid as defined below and corresponding embodiments as described herein as follows.

[56217] [0001.1.8.11] to [0002.1.8.11] for the disclosure of these paragraphs see [0001.1.8.8] to [0002.1.8.8] above.

[56218] Palmitic acid is a major component for manufacturing of soaps, lubricating oils and waterproofing materials. Furhermore it is used for the synthesis of metallic palmitates. Additional applications are as food additive and in the synthesis of food-grade additives; as a constituent of cosmetic formulations. Palmitic acid is a major component of many natural fats and oils in the form of a glyceryl ester, e.g. palm oil, and in most commercial-grade stearic acid products.

[56219] [0004.1.8.11] to [0005.1.8.11] for the disclosure of these paragraphs see [0004.1.8.8] to [0005.1.8.8] above.

[56220] Palmitic acid is as mentioned above the major fat in meat and dairy products.

[56221] Further uses or palmitic acid are as food ingredients raw material for emulsifiers or personal care emulsifier for facial creams and lotions.

[56222] Palmitic acid is also used in shaving cream formulations, waxes or fruit wax formulations.

[56223] [0009.1.11.11] to [0011.1.8.11] for the disclosure of these paragraphs see [0009.1.8.8] to [00011.1.8.8] above.

[56224] It is an object of the present invention to develop an inexpensive process for the synthesis of palmitic acid.

[56225] for the disclosure of this paragraph see [0013.1.8.8] above.

[56226] Accordingly, in a first embodiment, the invention relates to a process for the production of at least one fine chemical selected from the group consisting of: palmitic acid, or, in other words, of the “fine chemical” or “fine chemical of the invention”.

[56227] The terms “fine chemical of the invention”, “fine chemical” or “the fine chemical” are used herein equally and relate in context of the paragraphs or sections [0014.1.11.11] to [0514.1.8.11] essentially to the metabolite or the metabolites indicated in column 7, application no. 11 of Tables I, II and IV in the respective line.

[56228] Further, the term “in context of any of the paragraphs [0014.1.11.11] to [0514.1.8.11]” as used herein means that for any of said paragraphs [0014.1.11.11] to [0514.1.8.11] the term “the fine chemical” is understood to follow the definition of paragraphs or sections [0014.1.11.11] and [0015.1.11.11], independently whether it refers to any other paragraph or not and whether the reference recites the term “fine chemical” in an other context.

[56229] Thus, in cases where one or more paragraphs or sections are incorporated by reference into any of the present paragraphs [0014.1.11.11] to [0514.1.8.11], e.g. by usage of the term “see paragraph” or the term “for the disclosure of this paragraph see the disclosure of paragraph” or the term “incorporated by reference” or a corresponding term, the incorporated paragraph, section or term “the fine chemical” is also understood to have the meaning according to the definition of paragraph [0014.1.11.11] and [0015.1.11.11].

[56230] Accordingly, in one embodiment, the term “fine chemical of the invention”, “fine chemical” or “the fine chemical” as used herein (alone or in combination, like in FCRP) means “palmitic acid in context of the nucleic acid or polypeptide sequences listed in the respective same line of any one of Tables I to IV of application no. 11 and indicating in column 7 the metabolite “palmitic acid”.

[56231] In one embodiment, the term palmitic acid or the term “fine chemical” mean in context of the paragraphs or sections [0014.1.11.11] to [0514.1.8.11] at least one chemical compound with an activity of the above mentioned palmitic acid, respectively.

[56232] Accordingly, in one embodiment, the terms “fine chemical of the invention”, “fine chemical” or “the fine chemical” mean in context of any of the paragraphs [0014.1.11.11] to [0514.1.8.11] palmitic acid, its tryglycerides, lipids, oils and/or fats in free form or bound form. In a preferred embodiment, the term “the fine chemical” means palmitic acid in free form or e.g. in form of its tryglycerides, lipids, oils and/or fats. In a preferred embodiment “palmitic acid” means palmitic acid in free form.

[56233] In one embodiment, the term “the fine chemical” or “the respective fine chemical” mean in context of any of the paragraphs [0014.1.11.11] to [0514.1.8.11] palmitic acid. and/or tryglycerides, lipids, oils and/or fats of palmitic acid. and its salts, ester, thioester or palmitic acid in free form or bound to other compounds such as triglycerides, glycolipids, phospholipids etc. In a preferred embodiment, the term “the fine chemical” means palmitic acid, in free form or its salts or bound to triglycerides. Triglycerides, lipids, oils, fats or lipid mixture thereof shall mean any triglyceride, lipid, oil and/or fat containing any bound or free palmitic acid for example sphingolipids, phosphoglycerides, lipids, glycolipids such as glycosphingolipids, phospholipids such as phosphatidylethanolamine, phosphatidylcholine, phosphatidylserine, phosphatidylglycerol, phosphatidylinositol or diphosphatidylglycerol, or as monoacylglyceride, diacylglyceride or triacylglyceride or other fatty acid esters such as acetyl-Coenzym A thioester, which contain further saturated or unsaturated fatty acids in the fatty acid molecule.

[56234] In one embodiment, the term “the fine chemical” and the term “the respective fine chemical” mean at least one chemical compound with an activity of the abovementioned fine chemical. Further, the term “in context of any of the paragraphs [0014.1.11.11] to [0514.1.8.11]” as used herein means that for any of said paragraphs [0014.1.11.11] to [0514.1.8.11] the term “the fine chemical” is understood to follow the definition of section [0014.1.11.11] or section [0015.1.11.11], independently whether it refers to any other paragraph or not and whether the reference recites the term “fine chemical” in an other context.

[56235] Thus, in cases where one or more paragraphs or sections are incorporated by reference into any of the present paragraphs [0014.1.11.11] to [0514.1.8.11], e.g. by usage of the term “see paragraph” or the term “for the disclosure of this paragraph see the disclosure of paragraph” or the term “incorporated by reference” or a corresponding term, the incorporated paragraph, section or term “the fine chemical” is also understood to have the meaning according to this definition of this paragraph [0015.1.11.11].

[56236] Further, the term “fine chemicals” as used herein relates to compositions comprising said fine chemical(s), i.e. comprising palmitic acid, respectively.

[56237] Accordingly, the present invention relates to a process for the production of palmitic acid, which comprises
[56238] (a) increasing or generating one or more activities selected from the group consisting of protein phosphatase in a non-human organism or a part thereof, preferably a microorganism, a plant cell, a plant or a part thereof, as compared to a corresponding non-transformed wild type non-human organism or a part thereof; and
[56239] (b) growing the non-human organism or a part thereof under conditions which permit the production of palmitic acid or a composition comprising palmitic acid in said non-human organism or in the culture medium surrounding said non-human organism.

[56240] Accordingly, the present invention relates to a process for the production of palmitic acid, which comprises
[56241] (a) increasing or generating one or more activities selected from the group consisting of chlorophyllase in a non-human organism or a part thereof, preferably a microorganism, a plant cell, a plant or a part thereof, as compared to a corresponding non-transformed wild type non-human organism or a part thereof; and
[56242] (b) growing the non-human organism or a part thereof under conditions which permit the production of palmitic acid or a composition comprising palmitic acid in said non-human organism or in the culture medium surrounding said non-human organism.

[56243] Accordingly, the present invention relates to a process for the production of palmitic acid, which comprises
[56244] (a) increasing or generating one or more activities selected from the group consisting of At1g19800-protein in a non-human organism or a part thereof, preferably a microorganism, a plant cell, a plant or a part thereof, as compared to a corresponding non-transformed wild type non-human organism or a part thereof; and
[56245] (b) growing the non-human organism or a part thereof under conditions which permit the production of palmitic acid or a composition comprising palmitic acid in said non-human organism or in the culture medium surrounding said non-human organism.

[56246] Accordingly, the present invention relates to a process for the production of palmitic acid, which comprises
[56247] (a) increasing or generating one or more activities selected from the group consisting of At1g23110-protein in a non-human organism or a part thereof, preferably a microorganism, a plant cell, a plant or a part thereof, as compared to a corresponding non-transformed wild type non-human organism or a part thereof; and
[56248] (b) growing the non-human organism or a part thereof under conditions which permit the production of palmitic acid or a composition comprising palmitic acid in said non-human organism or in the culture medium surrounding said non-human organism.

[56249] Accordingly, the present invention relates to a process for the production of palmitic acid, which comprises
[56250] (a) increasing or generating one or more activities selected from the group consisting of transcription factor in a non-human organism or a part thereof, preferably a microorganism, a plant cell, a plant or a part thereof, as compared to a corresponding non-transformed wild type non-human organism or a part thereof; and
[56251] (b) growing the non-human organism or a part thereof under conditions which permit the production of palmitic acid or a composition comprising palmitic acid in said non-human organism or in the culture medium surrounding said non-human organism.

[56252] Accordingly, the present invention relates to a process for the production of palmitic acid, which comprises
[56253] (a) increasing or generating one or more activities selected from the group consisting of protein phosphatase in a non-human organism or a part thereof, preferably a microorganism, a plant cell, a plant or a part thereof, as compared to a corresponding non-transformed wild type non-human organism or a part thereof; and
[56254] (b) growing the non-human organism or a part thereof under conditions which permit the production of palmitic acid or a composition comprising palmitic acid in said non-human organism or in the culture medium surrounding said non-human organism.

[56255] Accordingly, the present invention relates to a process for the production of palmitic acid, which comprises
[56256] (a) increasing or generating one or more activities selected from the group consisting of At2g45420-protein in a non-human organism or a part thereof, preferably a microorganism, a plant cell, a plant or a part thereof, as compared to a corresponding non-transformed wild type non-human organism or a part thereof; and
[56257] (b) growing the non-human organism or a part thereof under conditions which permit the production of palmitic acid or a composition comprising palmitic acid in said non-human organism or in the culture medium surrounding said non-human organism.

[56258] Accordingly, the present invention relates to a process for the production of palmitic acid, which comprises
[56259] (a) increasing or generating one or more activities selected from the group consisting of heat shock transcription factor in a non-human organism or a part thereof, preferably a microorganism, a plant cell, a plant or a part thereof, as compared to a corresponding non-transformed wild type non-human organism or a part thereof; and
[56260] (b) growing the non-human organism or a part thereof under conditions which permit the production of palmitic acid or a composition comprising palmitic acid in said non-human organism or in the culture medium surrounding said non-human organism.

[56261] Accordingly, the present invention relates to a process for the production of palmitic acid, which comprises
[56262] (a) increasing or generating one or more activities selected from the group consisting of CCAAT-binding transcription factor in a non-human organism or a part thereof, preferably a microorganism, a plant cell, a plant or a part thereof, as compared to a corresponding non-transformed wild type non-human organism or a part thereof; and
[56263] (b) growing the non-human organism or a part thereof under conditions which permit the production of palmitic acid or a composition comprising palmitic acid in said non-human organism or in the culture medium surrounding said non-human organism.

[56264] Accordingly, the present invention relates to a process for the production of palmitic acid, which comprises
[56265] (a) increasing or generating one or more activities selected from the group consisting of glutaredoxin in a non-human organism or a part thereof, preferably a microorganism, a plant cell, a plant or a part thereof, as compared to a corresponding non-transformed wild type non-human organism or a part thereof; and
[56266] (b) growing the non-human organism or a part thereof under conditions which permit the production of palmitic acid or a composition comprising palmitic acid in said non-human organism or in the culture medium surrounding said non-human organism.

[56267] Accordingly, the present invention relates to a process for the production of palmitic acid, which comprises
[56268] (a) increasing or generating one or more activities selected from the group consisting of monothiol glutaredoxin in a non-human organism or a part thereof, preferably a microorganism, a plant cell, a plant or a part thereof, as compared to a corresponding non-transformed wild type non-human organism or a part thereof; and
[56269] (b) growing the non-human organism or a part thereof under conditions which permit the production of palmitic acid or a composition comprising palmitic acid in said non-human organism or in the culture medium surrounding said non-human organism.

[56270] Accordingly, the present invention relates to a process for the production of palmitic acid, which comprises
[56271] (a) increasing or generating one or more activities selected from the group consisting of heat shock transcription factor in a non-human organism or a part thereof, preferably a microorganism, a plant cell, a plant or a part thereof, as compared to a corresponding non-transformed wild type non-human organism or a part thereof; and
[56272] (b) growing the non-human organism or a part thereof under conditions which permit the production of palmitic acid or a composition comprising palmitic acid in said non-human organism or in the culture medium surrounding said non-human organism.

[56273] Accordingly, the present invention relates to a process for the production of palmitic acid, which comprises
[56274] (a) increasing or generating one or more activities selected from the group consisting of protein phosphatase in a non-human organism or a part thereof, preferably a microorganism, a plant cell, a plant or a part thereof, as compared to a corresponding non-transformed wild type non-human organism or a part thereof; and
[56275] (b) growing the non-human organism or a part thereof under conditions which permit the production of palmitic acid or a composition comprising palmitic acid in said non-human organism or in the culture medium surrounding said non-human organism.

[56276] Accordingly, the present invention relates to a process for the production of palmitic acid, which comprises
[56277] (a) increasing or generating one or more activities selected from the group consisting of glutaredoxin in a non-human organism or a part thereof, preferably a microorganism, a plant cell, a plant or a part thereof, as compared to a corresponding non-transformed wild type non-human organism or a part thereof; and
[56278] (b) growing the non-human organism or a part thereof under conditions which permit the production of palmitic acid or a composition comprising palmitic acid in said non-human organism or in the culture medium surrounding said non-human organism.

[56279] Accordingly, the present invention relates to a process for the production of palmitic acid, which comprises
[56280] (a) increasing or generating one or more activities selected from the group consisting of calcium-dependent protein kinase in a non-human organism or a part thereof, preferably a microorganism, a plant cell, a plant or a part thereof, as compared to a corresponding non-transformed wild type non-human organism or a part thereof; and
[56281] (b) growing the non-human organism or a part thereof under conditions which permit the production of palmitic acid or a composition comprising palmitic acid in said non-human organism or in the culture medium surrounding said non-human organism.

[56282] Accordingly, the present invention relates to a process for the production of palmitic acid, which comprises
[56283] (a) increasing or generating one or more activities selected from the group consisting of protein phosphatase in a non-human organism or a part thereof, preferably a microorganism, a plant cell, a plant or a part thereof, as compared to a corresponding non-transformed wild type non-human organism or a part thereof; and
[56284] (b) growing the non-human organism or a part thereof under conditions which permit the production of palmitic acid or a composition comprising palmitic acid in said non-human organism or in the culture medium surrounding said non-human organism.

[56285] Accordingly, the present invention relates to a process for the production of palmitic acid, which comprises
[56286] (a) increasing or generating one or more activities selected from the group consisting of protein phosphatase in a non-human organism or a part thereof, preferably a microorganism, a plant cell, a plant or a part thereof, as compared to a corresponding non-transformed wild type non-human organism or a part thereof; and
[56287] (b) growing the non-human organism or a part thereof under conditions which permit the production of palmitic acid or a composition comprising palmitic acid in said non-human organism or in the culture medium surrounding said non-human organism.

[56288] Accordingly, the present invention relates to a process for the production of palmitic acid, which comprises
[56289] (a) increasing or generating one or more activities selected from the group consisting of oxidoreductase in a non-human organism or a part thereof, preferably a microorganism, a plant cell, a plant or a part thereof, as compared to a corresponding non-transformed wild type non-human organism or a part thereof; and
[56290] (b) growing the non-human organism or a part thereof under conditions which permit the production of palmitic acid or a composition comprising palmitic acid in said non-human organism or in the culture medium surrounding said non-human organism.

[56291] Accordingly, the present invention relates to a process for the production of palmitic acid, which comprises
[56292] (a) increasing or generating one or more activities selected from the group consisting of ThiF family protein in a non-human organism or a part thereof, preferably a microorganism, a plant cell, a plant or a part thereof, as compared to a corresponding non-transformed wild type non-human organism or a part thereof; and
[56293] (b) growing the non-human organism or a part thereof under conditions which permit the production of palmitic acid or a composition comprising palmitic acid in said non-human organism or in the culture medium surrounding said non-human organism.

[56294] Accordingly, the present invention relates to a process for the production of palmitic acid, which comprises
[56295] (a) increasing or generating one or more activities selected from the group consisting of recombinase A in a non-human organism or a part thereof, preferably a microorganism, a plant cell, a plant or a part thereof, as compared to a corresponding non-transformed wild type non-human organism or a part thereof; and
[56296] (b) growing the non-human organism or a part thereof under conditions which permit the production of palmitic acid or a composition comprising palmitic acid in said non-human organism or in the culture medium surrounding said non-human organism.

[56297] Accordingly, the present invention relates to a process for the production of palmitic acid, which comprises
[56298] (a) increasing or generating one or more activities selected from the group consisting of NADH-quinone oxidoreductase subunit in a non-human organism or a part thereof, preferably a microorganism, a plant cell, a plant or a part thereof, as compared to a corresponding non-transformed wild type non-human organism or a part thereof; and
[56299] (b) growing the non-human organism or a part thereof under conditions which permit the production of palmitic acid or a composition comprising palmitic acid in said non-human organism or in the culture medium surrounding said non-human organism.

[56300] Accordingly, the present invention relates to a process for the production of palmitic acid, which comprises
[56301] (a) increasing or generating one or more activities selected from the group consisting of HesB/YadR/YfhF family protein in a non-human organism or a part thereof, preferably a microorganism, a plant cell, a plant or a part thereof, as compared to a corresponding non-transformed wild type non-human organism or a part thereof; and
[56302] (b) growing the non-human organism or a part thereof under conditions which permit the production of palmitic acid or a composition comprising palmitic acid in said non-human organism or in the culture medium surrounding said non-human organism.

[56303] Accordingly, the present invention relates to a process for the production of palmitic acid, which comprises
[56304] (a) increasing or generating one or more activities selected from the group consisting of peptidyl-prolyl cis-trans isomerase in a non-human organism or a part thereof, preferably a microorganism, a plant cell, a plant or a part thereof, as compared to a corresponding non-transformed wild type non-human organism or a part thereof; and
[56305] (b) growing the non-human organism or a part thereof under conditions which permit the production of palmitic acid or a composition comprising palmitic acid in said non-human organism or in the culture medium surrounding said non-human organism.

[56306] Accordingly, the present invention relates to a process for the production of palmitic acid, which comprises
[56307] (a) increasing or generating one or more activities selected from the group consisting of purine nucleoside phosphorylase in a non-human organism or a part thereof, preferably a microorganism, a plant cell, a plant or a part thereof, as compared to a corresponding non-transformed wild type non-human organism or a part thereof; and
[56308] (b) growing the non-human organism or a part thereof under conditions which permit the production of palmitic acid or a composition comprising palmitic acid in said non-human organism or in the culture medium surrounding said non-human organism.

[56309] Accordingly, the present invention relates to a process for the production of palmitic acid, which comprises
[56310] (a) increasing or generating one or more activities selected from the group consisting of b0050-protein in a non-human organism or a part thereof, preferably a microorganism, a plant cell, a plant or a part thereof, as compared to a corresponding non-transformed wild type non-human organism or a part thereof; and
[56311] (b) growing the non-human organism or a part thereof under conditions which permit the production of palmitic acid or a composition comprising palmitic acid in said non-human organism or in the culture medium surrounding said non-human organism.

[56312] Accordingly, the present invention relates to a process for the production of palmitic acid, which comprises
[56313] (a) increasing or generating one or more activities selected from the group consisting of sodium/proton antiporter in a non-human organism or a part thereof, preferably a microorganism, a plant cell, a plant or a part thereof, as compared to a corresponding non-transformed wild type non-human organism or a part thereof; and
[56314] (b) growing the non-human organism or a part thereof under conditions which permit the production of palmitic acid or a composition comprising palmitic acid in said non-human organism or in the culture medium surrounding said non-human organism.

[56315] Accordingly, the present invention relates to a process for the production of palmitic acid, which comprises
[56316] (a) increasing or generating one or more activities selected from the group consisting of b1234-protein in a non-human organism or a part thereof, preferably a microorganism, a plant cell, a plant or a part thereof, as compared to a corresponding non-transformed wild type non-human organism or a part thereof; and
[56317] (b) growing the non-human organism or a part thereof under conditions which permit the production of palmitic acid or a composition comprising palmitic acid in said non-human organism or in the culture medium surrounding said non-human organism.

[56318] Accordingly, the present invention relates to a process for the production of palmitic acid, which comprises
[56319] (a) increasing or generating one or more activities selected from the group consisting of b1248-protein in a non-human organism or a part thereof, preferably a microorganism, a plant cell, a plant or a part thereof, as compared to a corresponding non-transformed wild type non-human organism or a part thereof; and
[56320] (b) growing the non-human organism or a part thereof under conditions which permit the production of palmitic acid or a composition comprising palmitic acid in said non-human organism or in the culture medium surrounding said non-human organism.

[56321] Accordingly, the present invention relates to a process for the production of palmitic acid, which comprises
[56322] (a) increasing or generating one or more activities selected from the group consisting of b1330-protein in a non-human organism or a part thereof, preferably a microorganism, a plant cell, a plant or a part thereof, as compared to a corresponding non-transformed wild type non-human organism or a part thereof; and
[56323] (b) growing the non-human organism or a part thereof under conditions which permit the production of palmitic acid or a composition comprising palmitic acid in said non-human organism or in the culture medium surrounding said non-human organism.

[56324] Accordingly, the present invention relates to a process for the production of palmitic acid, which comprises
[56325] (a) increasing or generating one or more activities selected from the group consisting of lipoprotein precursor in a non-human organism or a part thereof, preferably a microorganism, a plant cell, a plant or a part thereof, as compared to a corresponding non-transformed wild type non-human organism or a part thereof; and
[56326] (b) growing the non-human organism or a part thereof under conditions which permit the production of palmitic acid or a composition comprising palmitic acid in said non-human organism or in the culture medium surrounding said non-human organism.

[56327] Accordingly, the present invention relates to a process for the production of palmitic acid, which comprises
[56328] (a) increasing or generating one or more activities selected from the group consisting of Fe—S subunit of oxidoreductase in a non-human organism or a part thereof, preferably a microorganism, a plant cell, a plant or a part thereof, as compared to a corresponding non-transformed wild type non-human organism or a part thereof; and
[56329] (b) growing the non-human organism or a part thereof under conditions which permit the production of palmitic acid or a composition comprising palmitic acid in said non-human organism or in the culture medium surrounding said non-human organism.

[56330] Accordingly, the present invention relates to a process for the production of palmitic acid, which comprises
[56331] (a) increasing or generating one or more activities selected from the group consisting of acid shock protein in a non-human organism or a part thereof, preferably a microorganism, a plant cell, a plant or a part thereof, as compared to a corresponding non-transformed wild type non-human organism or a part thereof; and
[56332] (b) growing the non-human organism or a part thereof under conditions which permit the production of palmitic acid or a composition comprising palmitic acid in said non-human organism or in the culture medium surrounding said non-human organism.

[56333] Accordingly, the present invention relates to a process for the production of palmitic acid, which comprises
[56334] (a) increasing or generating one or more activities selected from the group consisting of b1670-protein in a non-human organism or a part thereof, preferably a microorganism, a plant cell, a plant or a part thereof, as compared to a corresponding non-transformed wild type non-human organism or a part thereof; and
[56335] (b) growing the non-human organism or a part thereof under conditions which permit the production of palmitic acid or a composition comprising palmitic acid in said non-human organism or in the culture medium surrounding said non-human organism.

[56336] Accordingly, the present invention relates to a process for the production of palmitic acid, which comprises
[56337] (a) increasing or generating one or more activities selected from the group consisting of b1837-protein in a non-human organism or a part thereof, preferably a microorganism, a plant cell, a plant or a part thereof, as compared to a corresponding non-transformed wild type non-human organism or a part thereof; and
[56338] (b) growing the non-human organism or a part thereof under conditions which permit the production of palmitic acid or a composition comprising palmitic acid in said non-human organism or in the culture medium surrounding said non-human organism.

[56339] Accordingly, the present invention relates to a process for the production of palmitic acid, which comprises
[56340] (a) increasing or generating one or more activities selected from the group consisting of b2032-protein in a non-human organism or a part thereof, preferably a microorganism, a plant cell, a plant or a part thereof, as compared to a corresponding non-transformed wild type non-human organism or a part thereof; and
[56341] (b) growing the non-human organism or a part thereof under conditions which permit the production of palmitic acid or a composition comprising palmitic acid in said non-human organism or in the culture medium surrounding said non-human organism.

[56342] Accordingly, the present invention relates to a process for the production of palmitic acid, which comprises
[56343] (a) increasing or generating one or more activities selected from the group consisting of colanic acid biosynthesis protein in a non-human organism or a part thereof, preferably a microorganism, a plant cell, a plant or a part thereof, as compared to a corresponding non-transformed wild type non-human organism or a part thereof; and
[56344] (b) growing the non-human organism or a part thereof under conditions which permit the production of palmitic acid or a composition comprising palmitic acid in said non-human organism or in the culture medium surrounding said non-human organism.

[56345] Accordingly, the present invention relates to a process for the production of palmitic acid, which comprises
[56346] (a) increasing or generating one or more activities selected from the group consisting of b2099-protein in a non-human organism or a part thereof, preferably a microorganism, a plant cell, a plant or a part thereof, as compared to a corresponding non-transformed wild type non-human organism or a part thereof; and
[56347] (b) growing the non-human organism or a part thereof under conditions which permit the production of palmitic acid or a composition comprising palmitic acid in said non-human organism or in the culture medium surrounding said non-human organism.

[56348] Accordingly, the present invention relates to a process for the production of palmitic acid, which comprises
[56349] (a) increasing or generating one or more activities selected from the group consisting of b2107-protein in a non-human organism or a part thereof, preferably a microorganism, a plant cell, a plant or a part thereof, as compared to a corresponding non-transformed wild type non-human organism or a part thereof; and
[56350] (b) growing the non-human organism or a part thereof under conditions which permit the production of palmitic acid or a composition comprising palmitic acid in said non-human organism or in the culture medium surrounding said non-human organism.

[56351] Accordingly, the present invention relates to a process for the production of palmitic acid, which comprises
[56352] (a) increasing or generating one or more activities selected from the group consisting of b2399-protein in a non-human organism or a part thereof, preferably a microorganism, a plant cell, a plant or a part thereof, as compared to a corresponding non-transformed wild type non-human organism or a part thereof; and
[56353] (b) growing the non-human organism or a part thereof under conditions which permit the production of palmitic acid or a composition comprising palmitic acid in said non-human organism or in the culture medium surrounding said non-human organism.

[56354] Accordingly, the present invention relates to a process for the production of palmitic acid, which comprises
[56355] (a) increasing or generating one or more activities selected from the group consisting of ethanolamine utilization protein in a non-human organism or a part thereof, preferably a microorganism, a plant cell, a plant or a part thereof, as compared to a corresponding non-transformed wild type non-human organism or a part thereof; and
[56356] (b) growing the non-human organism or a part thereof under conditions which permit the production of palmitic acid or a composition comprising palmitic acid in said non-human organism or in the culture medium surrounding said non-human organism.

[56357] Accordingly, the present invention relates to a process for the production of palmitic acid, which comprises
[56358] (a) increasing or generating one or more activities selected from the group consisting of b2682-protein in a non-human organism or a part thereof, preferably a microorganism, a plant cell, a plant or a part thereof, as compared to a corresponding non-transformed wild type non-human organism or a part thereof; and
[56359] (b) growing the non-human organism or a part thereof under conditions which permit the production of palmitic acid or a composition comprising palmitic acid in said non-human organism or in the culture medium surrounding said non-human organism.

[56360] Accordingly, the present invention relates to a process for the production of palmitic acid, which comprises
[56361] (a) increasing or generating one or more activities selected from the group consisting of 2-C-methyl-D-erythritol 4-phosphate cytidylyltransferase in a non-human organism or a part thereof, preferably a microorganism, a plant cell, a plant or a part thereof, as compared to a corresponding non-transformed wild type non-human organism or a part thereof; and
[56362] (b) growing the non-human organism or a part thereof under conditions which permit the production of palmitic acid or a composition comprising palmitic acid in said non-human organism or in the culture medium surrounding said non-human organism.

[56363] Accordingly, the present invention relates to a process for the production of palmitic acid, which comprises
[56364] (a) increasing or generating one or more activities selected from the group consisting of flavodoxin in a non-human organism or a part thereof, preferably a microorganism, a plant cell, a plant or a part thereof, as compared to a corresponding non-transformed wild type non-human organism or a part thereof; and
[56365] (b) growing the non-human organism or a part thereof under conditions which permit the production of palmitic acid or a composition comprising palmitic acid in said non-human organism or in the culture medium surrounding said non-human organism.

[56366] Accordingly, the present invention relates to a process for the production of palmitic acid, which comprises
[56367] (a) increasing or generating one or more activities selected from the group consisting of AAS bifunctional protein in a non-human organism or a part thereof, preferably a microorganism, a plant cell, a plant or a part thereof, as compared to a corresponding non-transformed wild type non-human organism or a part thereof; and
[56368] (b) growing the non-human organism or a part thereof under conditions which permit the production of palmitic acid or a composition comprising palmitic acid in said non-human organism or in the culture medium surrounding said non-human organism.

[56369] Accordingly, the present invention relates to a process for the production of palmitic acid, which comprises
[56370] (a) increasing or generating one or more activities selected from the group consisting of b2849-protein in a non-human organism or a part thereof, preferably a microorganism, a plant cell, a plant or a part thereof, as compared to a corresponding non-transformed wild type non-human organism or a part thereof; and
[56371] (b) growing the non-human organism or a part thereof under conditions which permit the production of palmitic acid or a composition comprising palmitic acid in said non-human organism or in the culture medium surrounding said non-human organism.

[56372] Accordingly, the present invention relates to a process for the production of palmitic acid, which comprises
[56373] (a) increasing or generating one or more activities selected from the group consisting of b3814-protein in a non-human organism or a part thereof, preferably a microorganism, a plant cell, a plant or a part thereof, as compared to a corresponding non-transformed wild type non-human organism or a part thereof; and
[56374] (b) growing the non-human organism or a part thereof under conditions which permit the production of palmitic acid or a composition comprising palmitic acid in said non-human organism or in the culture medium surrounding said non-human organism.

[56375] Accordingly, the present invention relates to a process for the production of palmitic acid, which comprises
[56376] (a) increasing or generating one or more activities selected from the group consisting of threonine efflux protein in a non-human organism or a part thereof, preferably a microorganism, a plant cell, a plant or a part thereof, as compared to a corresponding non-transformed wild type non-human organism or a part thereof; and
[56377] (b) growing the non-human organism or a part thereof under conditions which permit the production of palmitic acid or a composition comprising palmitic acid in said non-human organism or in the culture medium surrounding said non-human organism.

[56378] Accordingly, the present invention relates to a process for the production of palmitic acid, which comprises
[56379] (a) increasing or generating one or more activities selected from the group consisting of 3-ketoacyl-CoA thiolase in a non-human organism or a part thereof, preferably a microorganism, a plant cell, a plant or a part thereof, as compared to a corresponding non-transformed wild type non-human organism or a part thereof; and
[56380] (b) growing the non-human organism or a part thereof under conditions which permit the production of palmitic acid or a composition comprising palmitic acid in said non-human organism or in the culture medium surrounding said non-human organism.

[56381] Accordingly, the present invention relates to a process for the production of palmitic acid, which comprises
[56382] (a) increasing or generating one or more activities selected from the group consisting of glutaredoxin in a non-human organism or a part thereof, preferably a microorganism, a plant cell, a plant or a part thereof, as compared to a corresponding non-transformed wild type non-human organism or a part thereof; and
[56383] (b) growing the non-human organism or a part thereof under conditions which permit the production of palmitic acid or a composition comprising palmitic acid in said non-human organism or in the culture medium surrounding said non-human organism.

[56384] Accordingly, the present invention relates to a process for the production of palmitic acid, which comprises
[56385] (a) increasing or generating one or more activities selected from the group consisting of transcription factor in a non-human organism or a part thereof, preferably a microorganism, a plant cell, a plant or a part thereof, as compared to a corresponding non-transformed wild type non-human organism or a part thereof; and
[56386] (b) growing the non-human organism or a part thereof under conditions which permit the production of palmitic acid or a composition comprising palmitic acid in said non-human organism or in the culture medium surrounding said non-human organism.

[56387] Accordingly, the present invention relates to a process for the production of palmitic acid, which comprises
[56388] (a) increasing or generating one or more activities selected from the group consisting of bifunctional protein (phosphoribosyltransferase and regulatory protein) in a non-human organism or a part thereof, preferably a microorganism, a plant cell, a plant or a part thereof, as compared to a corresponding non-transformed wild type non-human organism or a part thereof; and
[56389] (b) growing the non-human organism or a part thereof under conditions which permit the production of palmitic acid or a composition comprising palmitic acid in said non-human organism or in the culture medium surrounding said non-human organism.

[56390] Accordingly, the present invention relates to a process for the production of palmitic acid, which comprises
[56391] (a) increasing or generating one or more activities selected from the group consisting of branched chain amino acid ABC transporter ATP-binding protein in a non-human organism or a part thereof, preferably a microorganism, a plant cell, a plant or a part thereof, as compared to a corresponding non-transformed wild type non-human organism or a part thereof; and
[56392] (b) growing the non-human organism or a part thereof under conditions which permit the production of palmitic acid or a composition comprising palmitic acid in said non-human organism or in the culture medium surrounding said non-human organism.

[56393] Accordingly, the present invention relates to a process for the production of palmitic acid, which comprises
[56394] (a) increasing or generating one or more activities selected from the group consisting of carbon dioxide concentrating mechanism protein in a non-human organism or a part thereof, preferably a microorganism, a plant cell, a plant or a part thereof, as compared to a corresponding non-transformed wild type non-human organism or a part thereof; and
[56395] (b) growing the non-human organism or a part thereof under conditions which permit the production of palmitic acid or a composition comprising palmitic acid in said non-human organism or in the culture medium surrounding said non-human organism.

[56396] Accordingly, the present invention relates to a process for the production of palmitic acid, which comprises
[56397] (a) increasing or generating one or more activities selected from the group consisting of sll1032-protein in a non-human organism or a part thereof, preferably a microorganism, a plant cell, a plant or a part thereof, as compared to a corresponding non-transformed wild type non-human organism or a part thereof; and
[56398] (b) growing the non-human organism or a part thereof under conditions which permit the production of palmitic acid or a composition comprising palmitic acid in said non-human organism or in the culture medium surrounding said non-human organism.

[56399] Accordingly, the present invention relates to a process for the production of palmitic acid, which comprises
[56400] (a) increasing or generating one or more activities selected from the group consisting of phosphoribosylformyl glycinamidine synthase subunit in a non-human organism or a part thereof, preferably a microorganism, a plant cell, a plant or a part thereof, as compared to a corresponding non-transformed wild type non-human organism or a part thereof; and
[56401] (b) growing the non-human organism or a part thereof under conditions which permit the production of palmitic acid or a composition comprising palmitic acid in said non-human organism or in the culture medium surrounding said non-human organism.

[56402] Accordingly, the present invention relates to a process for the production of palmitic acid, which comprises
[56403] (a) increasing or generating one or more activities selected from the group consisting of nitrate/nitrite transport protein in a non-human organism or a part thereof, preferably a microorganism, a plant cell, a plant or a part thereof, as compared to a corresponding non-transformed wild type non-human organism or a part thereof; and
[56404] (b) growing the non-human organism or a part thereof under conditions which permit the production of palmitic acid or a composition comprising palmitic acid in said non-human organism or in the culture medium surrounding said non-human organism.

[56405] Accordingly, the present invention relates to a process for the production of palmitic acid, which comprises
[56406] (a) increasing or generating one or more activities selected from the group consisting of carbamoyl-phosphate synthase subunit in a non-human organism or a part thereof, preferably a microorganism, a plant cell, a plant or a part thereof, as compared to a corresponding non-transformed wild type non-human organism or a part thereof; and
[56407] (b) growing the non-human organism or a part thereof under conditions which permit the production of palmitic acid or a composition comprising palmitic acid in said non-human organism or in the culture medium surrounding said non-human organism.

[56408] Accordingly, the present invention relates to a process for the production of palmitic acid, which comprises
[56409] (a) increasing or generating one or more activities selected from the group consisting of glutathione S-transferase in a non-human organism or a part thereof, preferably a microorganism, a plant cell, a plant or a part thereof, as compared to a corresponding non-transformed wild type non-human organism or a part thereof; and
[56410] (b) growing the non-human organism or a part thereof under conditions which permit the production of palmitic acid or a composition comprising palmitic acid in said non-human organism or in the culture medium surrounding said non-human organism.

[56411] Accordingly, the present invention relates to a process for the production of palmitic acid, which comprises
[56412] (a) increasing or generating one or more activities selected from the group consisting of ABC metal ion transporter substrate-binding protein in a non-human organism or a part thereof, preferably a microorganism, a plant cell, a plant or a part thereof, as compared to a corresponding non-transformed wild type non-human organism or a part thereof; and
[56413] (b) growing the non-human organism or a part thereof under conditions which permit the production of palmitic acid or a composition comprising palmitic acid in said non-human organism or in the culture medium surrounding said non-human organism.

[56414] Accordingly, the present invention relates to a process for the production of palmitic acid, which comprises
[56415] (a) increasing or generating one or more activities selected from the group consisting of acyl transferase in a non-human organism or a part thereof, preferably a microorganism, a plant cell, a plant or a part thereof, as compared to a corresponding non-transformed wild type non-human organism or a part thereof; and
[56416] (b) growing the non-human organism or a part thereof under conditions which permit the production of palmitic acid or a composition comprising palmitic acid in said non-human organism or in the culture medium surrounding said non-human organism.

[56417] Accordingly, the present invention relates to a process for the production of palmitic acid, which comprises
[56418] (a) increasing or generating one or more activities selected from the group consisting of coproporphyrinogen III oxidase in a non-human organism or a part thereof, preferably a microorganism, a plant cell, a plant or a part thereof, as compared to a corresponding non-transformed wild type non-human organism or a part thereof; and
[56419] (b) growing the non-human organism or a part thereof under conditions which permit the production of palmitic acid or a composition comprising palmitic acid in said non-human organism or in the culture medium surrounding said non-human organism.

[56420] Accordingly, the present invention relates to a process for the production of palmitic acid, which comprises
[56421] (a) increasing or generating one or more activities selected from the group consisting of cation-transporting ATPase in a non-human organism or a part thereof, preferably a microorganism, a plant cell, a plant or a part thereof, as compared to a corresponding non-transformed wild type non-human organism or a part thereof; and
[56422] (b) growing the non-human organism or a part thereof under conditions which permit the production of palmitic acid or a composition comprising palmitic acid in said non-human organism or in the culture medium surrounding said non-human organism.

[56423] Accordingly, the present invention relates to a process for the production of palmitic acid, which comprises
[56424] (a) increasing or generating one or more activities selected from the group consisting of permease protein of ABC transporter in a non-human organism or a part thereof, preferably a microorganism, a plant cell, a plant or a part thereof, as compared to a corresponding non-transformed wild type non-human organism or a part thereof; and
[56425] (b) growing the non-human organism or a part thereof under conditions which permit the production of palmitic acid or a composition comprising palmitic acid in said non-human organism or in the culture medium surrounding said non-human organism.

[56426] Accordingly, the present invention relates to a process for the production of palmitic acid, which comprises
[56427] (a) increasing or generating one or more activities selected from the group consisting of aromatic acid decarboxylase in a non-human organism or a part thereof, preferably a microorganism, a plant cell, a plant or a part thereof, as compared to a corresponding non-transformed wild type non-human organism or a part thereof; and
[56428] (b) growing the non-human organism or a part thereof under conditions which permit the production of palmitic acid or a composition comprising palmitic acid in said non-human organism or in the culture medium surrounding said non-human organism.

[56429] Accordingly, the present invention relates to a process for the production of palmitic acid, which comprises
[56430] (a) increasing or generating one or more activities selected from the group consisting of phosphate import ATP-binding protein in a non-human organism or a part thereof, preferably a microorganism, a plant cell, a plant or a part thereof, as compared to a corresponding non-transformed wild type non-human organism or a part thereof; and
[56431] (b) growing the non-human organism or a part thereof under conditions which permit the production of palmitic acid or a composition comprising palmitic acid in said non-human organism or in the culture medium surrounding said non-human organism.

[56432] Accordingly, the present invention relates to a process for the production of palmitic acid, which comprises
[56433] (a) increasing or generating one or more activities selected from the group consisting of arginine decarboxylase in a non-human organism or a part thereof, preferably a microorganism, a plant cell, a plant or a part thereof, as compared to a corresponding non-transformed wild type non-human organism or a part thereof; and
[56434] (b) growing the non-human organism or a part thereof under conditions which permit the production of palmitic acid or a composition comprising palmitic acid in said non-human organism or in the culture medium surrounding said non-human organism.

[56435] Accordingly, the present invention relates to a process for the production of palmitic acid, which comprises
[56436] (a) increasing or generating one or more activities selected from the group consisting of phosphoadenosine phosphosulfate reductase in a non-human organism or a part thereof, preferably a microorganism, a plant cell, a plant or a part thereof, as compared to a corresponding non-transformed wild type non-human organism or a part thereof; and
[56437] (b) growing the non-human organism or a part thereof under conditions which permit the production of palmitic acid or a composition comprising palmitic acid in said non-human organism or in the culture medium surrounding said non-human organism.

[56438] Accordingly, the present invention relates to a process for the production of palmitic acid, which comprises
[56439] (a) increasing or generating one or more activities selected from the group consisting of threonine dehydratase in a non-human organism or a part thereof, preferably a microorganism, a plant cell, a plant or a part thereof, as compared to a corresponding non-transformed wild type non-human organism or a part thereof; and
[56440] (b) growing the non-human organism or a part thereof under conditions which permit the production of palmitic acid or a composition comprising palmitic acid in said non-human organism or in the culture medium surrounding said non-human organism.

[56441] Accordingly, the present invention relates to a process for the production of palmitic acid, which comprises
[56442] (a) increasing or generating one or more activities selected from the group consisting of metal-dependent hydrolase in a non-human organism or a part thereof, preferably a microorganism, a plant cell, a plant or a part thereof, as compared to a corresponding non-transformed wild type non-human organism or a part thereof; and
[56443] (b) growing the non-human organism or a part thereof under conditions which permit the production of palmitic acid or a composition comprising palmitic acid in said non-human organism or in the culture medium surrounding said non-human organism.

[56444] Accordingly, the present invention relates to a process for the production of palmitic acid, which comprises
[56445] (a) increasing or generating one or more activities selected from the group consisting of homocitrate synthase in a non-human organism or a part thereof, preferably a microorganism, a plant cell, a plant or a part thereof, as compared to a corresponding non-transformed wild type non-human organism or a part thereof; and
[56446] (b) growing the non-human organism or a part thereof under conditions which permit the production of palmitic acid or a composition comprising palmitic acid in said non-human organism or in the culture medium surrounding said non-human organism.

[56447] Accordingly, the present invention relates to a process for the production of palmitic acid, which comprises
[56448] (a) increasing or generating one or more activities selected from the group consisting of acid phosphatase precursor in a non-human organism or a part thereof, preferably a microorganism, a plant cell, a plant or a part thereof, as compared to a corresponding non-transformed wild type non-human organism or a part thereof; and
[56449] (b) growing the non-human organism or a part thereof under conditions which permit the production of palmitic acid or a composition comprising palmitic acid in said non-human organism or in the culture medium surrounding said non-human organism.

[56450] Accordingly, the present invention relates to a process for the production of palmitic acid, which comprises
[56451] (a) increasing or generating one or more activities selected from the group consisting of glycerol-3-phosphate dehydrogenase in a non-human organism or a part thereof, preferably a microorganism, a plant cell, a plant or a part thereof, as compared to a corresponding non-transformed wild type non-human organism or a part thereof; and
[56452] (b) growing the non-human organism or a part thereof under conditions which permit the production of palmitic acid or a composition comprising palmitic acid in said non-human organism or in the culture medium surrounding said non-human organism.

[56453] Accordingly, the present invention relates to a process for the production of palmitic acid, which comprises
[56454] (a) increasing or generating one or more activities selected from the group consisting of protein kinase in a non-human organism or a part thereof, preferably a microorganism, a plant cell, a plant or a part thereof, as compared to a corresponding non-transformed wild type non-human organism or a part thereof; and
[56455] (b) growing the non-human organism or a part thereof under conditions which permit the production of palmitic acid or a composition comprising palmitic acid in said non-human organism or in the culture medium surrounding said non-human organism.

[56456] Accordingly, the present invention relates to a process for the production of palmitic acid, which comprises
[56457] (a) increasing or generating one or more activities selected from the group consisting of F-box protein in a non-human organism or a part thereof, preferably a microorganism, a plant cell, a plant or a part thereof, as compared to a corresponding non-transformed wild type non-human organism or a part thereof; and
[56458] (b) growing the non-human organism or a part thereof under conditions which permit the production of palmitic acid or a composition comprising palmitic acid in said non-human organism or in the culture medium surrounding said non-human organism.

[56459] Accordingly, the present invention relates to a process for the production of palmitic acid, which comprises
[56460] (a) increasing or generating one or more activities selected from the group consisting of DnaJ-like chaperone in a non-human organism or a part thereof, preferably a microorganism, a plant cell, a plant or a part thereof, as compared to a corresponding non-transformed wild type non-human organism or a part thereof; and
[56461] (b) growing the non-human organism or a part thereof under conditions which permit the production of palmitic acid or a composition comprising palmitic acid in said non-human organism or in the culture medium surrounding said non-human organism.

[56462] Accordingly, the present invention relates to a process for the production of palmitic acid, which comprises
[56463] (a) increasing or generating one or more activities selected from the group consisting of aconitate hydratase in a non-human organism or a part thereof, preferably a microorganism, a plant cell, a plant or a part thereof, as compared to a corresponding non-transformed wild type non-human organism or a part thereof; and
[56464] (b) growing the non-human organism or a part thereof under conditions which permit the production of palmitic acid or a composition comprising palmitic acid in said non-human organism or in the culture medium surrounding said non-human organism.

[56465] Accordingly, the present invention relates to a process for the production of palmitic acid, which comprises
[56466] (a) increasing or generating one or more activities selected from the group consisting of ymr013c-protein in a non-human organism or a part thereof, preferably a microorganism, a plant cell, a plant or a part thereof, as compared to a corresponding non-transformed wild type non-human organism or a part thereof; and
[56467] (b) growing the non-human organism or a part thereof under conditions which permit the production of palmitic acid or a composition comprising palmitic acid in said non-human organism or in the culture medium surrounding said non-human organism.

[56468] Accordingly, the present invention relates to a process for the production of palmitic acid, which comprises
[56469] (a) increasing or generating one or more activities selected from the group consisting of ATPase epsilon subunit in a non-human organism or a part thereof, preferably a microorganism, a plant cell, a plant or a part thereof, as compared to a corresponding non-transformed wild type non-human organism or a part thereof; and
[56470] (b) growing the non-human organism or a part thereof under conditions which permit the production of palmitic acid or a composition comprising palmitic acid in said non-human organism or in the culture medium surrounding said non-human organism.

[56471] Accordingly, the present invention relates to a process for the production of palmitic acid, which comprises
[56472] (a) increasing or generating one or more activities selected from the group consisting of 49747384_SOYBEAN-protein in a non-human organism or a part thereof, preferably a microorganism, a plant cell, a plant or a part thereof, as compared to a corresponding non-transformed wild type non-human organism or a part thereof; and
[56473] (b) growing the non-human organism or a part thereof under conditions which permit the production of palmitic acid or a composition comprising palmitic acid in said non-human organism or in the culture medium surrounding said non-human organism.

[56474] Accordingly, the present invention relates to a process for the production of palmitic acid, which comprises
[56475] (a) increasing or generating one or more activities selected from the group consisting of glucose-6-phosphate 1-dehydrogenase in a non-human organism or a part thereof, preferably a microorganism, a plant cell, a plant or a part thereof, as compared to a corresponding non-transformed wild type non-human organism or a part thereof; and
[56476] (b) growing the non-human organism or a part thereof under conditions which permit the production of palmitic acid or a composition comprising palmitic acid in said non-human organism or in the culture medium surrounding said non-human organism.

[56477] An embodiment of the present invention relates to a process for the production of palmitic acid, which comprises
[56478] (a1) increasing or generating the activity of a polypeptide comprising a polypeptide as depicted in a respective line in column 5 or 8 of Table II, application no. 11, or a homolog or a fragment thereof, a consensus sequence or at least one polypeptide motif as depicted in the respective line in column 8 of Table IV, application no. 11; or
[56479] (a2) increasing or generating the activity of an expression product of one or more nucleic acid molecule(s) comprising a polynucleotide as depicted in the respective line in column 5 or 8 of Table I, application no. 11, preferably the coding region thereof, or a homolog or a fragment thereof; or
[56480] (a3) increasing or generating the activity of a functional equivalent of (a1) or (a2); in a non-human organism or a part thereof; preferably a microorganism, a plant cell, a plant or a part thereof, as compared to a corresponding non-transformed wild type non-human organism or a part thereof; and
[56481] (b) growing the non-human organism under conditions which permit the production of palmitic acid or a composition comprising palmitic acid in said non-human organism or in the culture medium surrounding said non-human organism.

[56482] Accordingly, the increase or generation of one or more said activities is for example conferred by one or more expression products of said nucleic acid molecule, e.g. proteins. Accordingly, in the present invention described above, the increase or generation of one or more said activities is for example conferred by one or more protein(s) each comprising a polypeptide selected from the group as depicted in Table II, application no. 11, column 5 and 8, or a homolog or a fragment thereof.

[56483] The process of the invention comprises in one embodiment the following steps:
[56484] (i) increasing or generating of the expression of; and/or
[56485] (ii) increasing or generating the expression of an expression product of; and/or
[56486] (iii) increasing or generating one or more activities of an expression product encoded by; at least one nucleic acid molecule (in the following “Fine Chemical Related Protein (FCRP)”encoding gene or “FCRP”-gene) comprising a nucleic acid molecule selected from the group consisting of:
[56487] (a) a nucleic acid molecule encoding the polypeptide shown in column 5 or 8 of Table II, preferably Table II B, application no. 11, or a homolog or a fragment thereof;
[56488] (b) a nucleic acid molecule shown in column 5 or 8 of Table I, preferably Table I B, application no. 11, or a homolog or a fragment thereof (preferably the coding region thereof);
[56489] (c) a nucleic acid molecule, which, as a result of the degeneracy of the genetic code, can be derived from a polypeptide sequence depicted in column 5 or 8 of Table II, preferably Table II B, application no. 11;
[56490] (d) a nucleic acid molecule having at least 30%, in particular at least 50%, 60%, 70%, 80%, 85%, 90%, 95%, 97%, 98%, 99% or 99.5% identity with the nucleic acid molecule sequence of a polynucleotide comprising the nucleic acid molecule shown in column 5 or 8 of Table I, preferably Table I B, application no. 11, or the coding region thereof;
[56491] (e) a nucleic acid molecule encoding a polypeptide having at least 30%, in particular 50%, 60%, 70%, 80%, 85%, 90%, 95%, 97%, 98%, 99% or 99.5% identity with the amino acid sequence of the polypeptide encoded by the nucleic acid molecule of (a), (b), (c) or (d),
[56492] (f) a nucleic acid molecule which hybridizes with a nucleic acid molecule of (a), (b), (c), (d) or (e) under stringent hybridization conditions;
[56493] (g) a nucleic acid molecule encoding a polypeptide which can be isolated with the aid of monoclonal or polyclonal antibodies made against a polypeptide encoded by one of the nucleic acid molecules of (a), (b), (c), (d), (e) or (f);
[56494] (h) a nucleic acid molecule encoding a polypeptide comprising the consensus sequence or one or more polypeptide motifs as shown in column 8 of Table IV, application no. 11;
[56495] (i) a nucleic acid molecule encoding a polypeptide having the activity represented by a respective protein as depicted in column 5 of Table II, application no. 11;
[56496] (j) a nucleic acid molecule which comprises a polynucleotide, which is obtained by amplifying a cDNA library or a genomic library using the primers as depicted in column 8 of Table III, application no. 11; and
[56497] (k) a nucleic acid molecule which is obtainable by screening a suitable nucleic acid library, especially a cDNA library and/or a genomic library, under stringent hybridization conditions with a probe comprising a complementary sequence of a nucleic acid molecule of (a), (b), (c), (d), (e), (f), (g), (h), (i) or (j) or with a fragment thereof, having at least 15 nt, preferably 20 nt, 30 nt, 50 nt, 100 nt, 200 nt, 500 nt, 1000 nt, 1500 nt, 2000 nt or 3000 nt of a nucleic acid molecule complementary to a nucleic acid molecule sequence characterized in (a), (b), (c), (d), (e), (f), (g), (h), (i) or (j);
[56498] or a nucleic acid molecule comprising a sequence which is complementary thereto.
   (All the references to Tables I to IV are references to the corresponding lines of Tables I to IV.)

[56499] The term “increasing or generating of the expression of” may also be interchanged by the term “overexpressing”.

[56500] In a preferred embodiment thereof said nucleic acid molecule encodes a polypeptide which has the activity of the polypeptide represented by a protein comprising a polypeptide as depicted in the corresponding hit in column 5 of Table II, application no. 11. In another preferred embodiment thereof said nucleic acid molecule confers a generation or an increase of the respective fine chemical in a non-human organism or a part thereof as compared to a corresponding wild-type non-human organism or part thereof.

[56501] In another preferred embodiment thereof said nucleic acid molecule encodes a polypeptide which has the activity of the polypeptide represented by a protein as depicted in the corresponding hit in column 5 of Table II, application no. 11, and confers a generation or an increase of the respective fine chemical in a non-human organism or a part thereof as compared to a corresponding wild-type non-human organism or part thereof.

[56502] Accordingly, the genes of the present invention or used in accordance with the present invention, which respectively encode a protein having an activity of 2-C-methyl-D-erythritol 4-phosphate cytidylyltransferase, 3-ketoacyl-CoA thiolase, 49747384_SOYBEAN-protein, AAS bifunctional protein, ABC metal ion transporter substrate-binding protein, acid phosphatase precursor, acid shock protein, aconitate hydratase, acyl transferase, arginine decarboxylase, aromatic acid decarboxylase, At1g19800-protein, At1g23110-protein, At2g45420-protein, ATPase epsilon subunit, b0050-protein, b1234-protein, b1248-protein, b1330-protein, b1670-protein, b1837-protein, b2032-protein, b2099-protein, b2107-protein, b2399-protein, b2682-protein, b2849-protein, b3814-protein, bifunctional protein (phosphoribosyltransferase and regulatory protein), branched chain amino acid ABC transporter ATP-binding protein, calcium-dependent protein kinase, carbamoyl-phosphate synthase subunit, carbon dioxide concentrating mechanism protein, cation-transporting ATPase, CCAAT-binding transcription factor, chlorophyllase, colanic acid biosynthesis protein, coproporphyrinogen III oxidase, DnaJ-like chaperone, ethanolamine utilization protein, F-box protein, Fe—S subunit of oxidoreductase, flavodoxin, glucose-6-phosphate 1-dehydrogenase, glutaredoxin, glutathione S-transferase, glycerol-3-phosphate dehydrogenase, heat shock transcription factor, HesB/YadR/YfhF family protein, homocitrate synthase, lipoprotein precursor, metal-dependent hydrolase, monothiol glutaredoxin, NADH-quinone oxidoreductase subunit, nitrate/nitrite transport protein, oxidoreductase, peptidyl-prolyl cis-trans isomerase, permease protein of ABC transporter, phosphate import ATP-binding protein, phosphoadenosine phosphosulfate reductase , phosphoribosylformyl glycinamidine synthase subunit, protein kinase, protein phosphatase, purine nucleoside phosphorylase, recombinase A, sll1032-protein, sodium/proton antiporter, ThiF family protein, threonine dehydratase, threonine efflux protein, transcription factor, or ymr013c-protein, which respectively encode a protein comprising a polypeptide encoded by a nucleic acid sequence as shown in Table I, application no. 11, column 5 or 8, (preferably the coding region thereof), or a homolog or a fragment thereof, which respectively encode a protein comprising a polypeptide as depicted in Table II, application no. 11, column 5 or 8, or a homolg or a fragment thereof, and/or which respectively can be amplified with the primer set shown in Table III, application no. 11, column 8, are also referred to as “FCRP genes”.

[56503] Proteins or polypeptides encoded by “FCRP-genes” are referred to as “Fine Chemical Related Proteins” or “FCRP”. For the purposes of the description of the present invention, the respective protein having an activity of 2-C-methyl-D-erythritol 4-phosphate cytidylyltransferase, 3-ketoacyl-CoA thiolase, 49747384_SOYBEAN-protein, AAS bifunctional protein, ABC metal ion transporter substrate-binding protein, acid phosphatase precursor, acid shock protein, aconitate hydratase, acyl transferase, arginine decarboxylase, aromatic acid decarboxylase, At1g19800-protein, At1g23110-protein, At2g45420-protein, ATPase epsilon subunit, b0050-protein, b1234-protein, b1248-protein, b1330-protein, b1670-protein, b1837-protein, b2032-protein, b2099-protein, b2107-protein, b2399-protein, b2682-protein, b2849-protein, b3814-protein, bifunctional protein (phosphoribosyltransferase and regulatory protein), branched chain amino acid ABC transporter ATP-binding protein, calcium-dependent protein kinase, carbamoyl-phosphate synthase subunit, carbon dioxide concentrating mechanism protein, cation-transporting ATPase, CCAAT-binding transcription factor, chlorophyllase, colanic acid biosynthesis protein, coproporphyrinogen III oxidase, DnaJ-like chaperone, ethanolamine utilization protein, F-box protein, Fe—S subunit of oxidoreductase, flavodoxin, glucose-6-phosphate 1-dehydrogenase, glutaredoxin, glutathione S-transferase, glycerol-3-phosphate dehydrogenase, heat shock transcription factor, HesB/YadR/YfhF family protein, homocitrate synthase, lipoprotein precursor, metal-dependent hydrolase, monothiol glutaredoxin, NADH-quinone oxidoreductase subunit, nitrate/nitrite transport protein, oxidoreductase, peptidyl-prolyl cis-trans isomerase, permease protein of ABC transporter, phosphate import ATP-binding protein, phosphoadenosine phosphosulfate reductase , phosphoribosylformyl glycinamidine synthase subunit, protein kinase, protein phosphatase, purine nucleoside phosphorylase, recombinase A, sll1032-protein, sodium/proton antiporter, ThiF family protein, threonine dehydratase, threonine efflux protein, transcription factor, or ymr013c-protein, the respective protein comprising a polypeptide encoded by one or more respective nucleic acid sequences as shown in Table 1, application no. 11, column 5 or 8, (preferably the coding region thereof), or a homolog or fragment thereof, the respective protein comprising a respective polypeptide as depicted in Table II, application no. 11, column 5 or 8, or a homolog or fragment thereof, the respective protein comprising a sequence corresponding to the consensus sequence as shown in Table IV, application no. 11, column 8, and/or the respective protein comprising at least one polypeptide motif as shown in Table IV, application no. 11, column 8 is also referred to as Fine Chemical Related Protein” or “FCRP”.

[56504] Thus, in one embodiment, the present invention provides a process of the production of palmitic acid, by increasing or generating one or more activities, especially selected from the group consisting of 2-C-methyl-D-erythritol 4-phosphate cytidylyltransferase, 3-ketoacyl-CoA thiolase, 49747384_SOYBEAN-protein, AAS bifunctional protein, ABC metal ion transporter substrate-binding protein, acid phosphatase precursor, acid shock protein, aconitate hydratase, acyl transferase, arginine decarboxylase, aromatic acid decarboxylase, At1g19800-protein, At1g23110-protein, At2g45420-protein, ATPase epsilon subunit, b0050-protein, b1234-protein, b1248-protein, b1330-protein, b1670-protein, b1837-protein, b2032-protein, b2099-protein, b2107-protein, b2399-protein, b2682-protein, b2849-protein, b3814-protein, bifunctional protein (phosphoribosyltransferase and regulatory protein), branched chain amino acid ABC transporter ATP-binding protein, calcium-dependent protein kinase, carbamoyl-phosphate synthase subunit, carbon dioxide concentrating mechanism protein, cation-transporting ATPase, CCAAT-binding transcription factor, chlorophyllase, colanic acid biosynthesis protein, coproporphyrinogen III oxidase, DnaJ-like chaperone, ethanolamine utilization protein, F-box protein, Fe—S subunit of oxidoreductase, flavodoxin, glucose-6-phosphate 1-dehydrogenase, glutaredoxin, glutathione S-transferase, glycerol-3-phosphate dehydrogenase, heat shock transcription factor, HesB/YadR/YfhF family protein, homocitrate synthase, lipoprotein precursor, metal-dependent hydrolase, monothiol glutaredoxin, NADH-quinone oxidoreductase subunit, nitrate/nitrite transport protein, oxidoreductase, peptidyl-prolyl cis-trans isomerase, permease protein of ABC transporter, phosphate import ATP-binding protein, phosphoadenosine phosphosulfate reductase, phosphoribosylformyl glycinamidine synthase subunit, protein kinase, protein phosphatase, purine nucleoside phosphorylase, recombinase A, sll1032-protein, sodium/proton antiporter, ThiF family protein, threonine dehydratase, threonine efflux protein, transcription factor, and ymr013c-protein, which is conferred by one or more FCRPs or the gene product of one or more FCRP-genes, for example by the gene product of a nucleic acid sequences comprising a polynucleotide selected from the group as shown in Table I, application no. 11, column 5 or 8, (preferably by the coding region thereof), or a homolog or a fragment thereof, e.g. or by one or more proteins each comprising a polypeptide encoded by one or more nucleic acid sequences selected from the group as shown in Table I, application no. 11, column 5 or 8, (preferably by the coding region thereof), or a homolog or a fragment thereof, or by one or more protein(s) each comprising a polypeptide selected from the group as depicted in Table II, application no. 11, column 5 and 8, or a homolog thereof, or a protein comprising a sequence corresponding to the consensus sequence or comprising at least one polypeptide motif as shown in Table IV, application no. 11, column 8.

[56505] for the disclosure of this paragraph see [0025.1.8.8] above.

[56506] In an embodiment, the process comprises increasing or generating the activity of one or more polypeptides having said activity, e.g. by generating or increasing the amount and/or specific activity in the cell or a compartment of a cell of one of more FCRP, especially selected from the group consisting of 2-C-methyl-D-erythritol 4-phosphate cytidylyltransferase, 3-ketoacyl-CoA thiolase, 49747384_SOYBEAN-protein, AAS bifunctional protein, ABC metal ion transporter substrate-binding protein, acid phosphatase precursor, acid shock protein, aconitate hydratase, acyl transferase, arginine decarboxylase, aromatic acid decarboxylase, At1g19800-protein, At1g23110-protein, At2g45420-protein, ATPase epsilon subunit, b0050-protein, b1234-protein, b1248-protein, b1330-protein, b1670-protein, b1837-protein, b2032-protein, b2099-protein, b2107-protein, b2399-protein, b2682-protein, b2849-protein, b3814-protein, bifunctional protein (phosphoribosyltransferase and regulatory protein), branched chain amino acid ABC transporter ATP-binding protein, calcium-dependent protein kinase, carbamoyl-phosphate synthase subunit, carbon dioxide concentrating mechanism protein, cation-transporting ATPase, CCAAT-binding transcription factor, chlorophyllase, colanic acid biosynthesis protein, coproporphyrinogen III oxidase, DnaJ-like chaperone, ethanolamine utilization protein, F-box protein, Fe—S subunit of oxidoreductase, flavodoxin, glucose-6-phosphate 1-dehydrogenase, glutaredoxin, glutathione S-transferase, glycerol-3-phosphate dehydrogenase, heat shock transcription factor, HesB/YadR/YfhF family protein, homocitrate synthase, lipoprotein precursor, metal-dependent hydrolase, monothiol glutaredoxin, NADH-quinone oxidoreductase subunit, nitrate/nitrite transport protein, oxidoreductase, peptidyl-prolyl cis-trans isomerase, permease protein of ABC transporter, phosphate import ATP-binding protein, phosphoadenosine phosphosulfate reductase , phosphoribosylformyl glycinamidine synthase subunit, protein kinase, protein phosphatase, purine nucleoside phosphorylase, recombinase A, sll1032-protein, sodium/proton antiporter, ThiF family protein, threonine dehydratase, threonine efflux protein, transcription factor, and ymr013c-protein, for example of the respective polypeptide as depicted in Table II, application no. 11, column 5 and 8, or a homolog or a fragment thereof, or the respective polypeptide comprising a sequence corresponding to the consensus sequences as shown in Table IV, application no. 11, column 8, or the respective polypeptide comprising at least one polypeptide motif as depicted in Table IV, application no. 11, column 8.

[56507] A further embodiment of the present invention relates to a process for the production of palmitic acid, which comprises
[56508] (a) increasing or generating the activity of a protein phosphatase non-targeted in a non-human organism or a part thereof, preferably a microorganism, a plant cell, a plant or a part thereof, as compared to a corresponding non-transformed wild type non-human organism or a part thereof; and
[56509] (b) growing the non-human organism or a part thereof under conditions which permit the production of palmitic acid or a composition comprising palmitic acid in said non-human organism or in the culture medium surrounding said non-human organism.

[56510] A further embodiment of the present invention relates to a process for the production of palmitic acid, which comprises
[56511] (a) increasing or generating the activity of a chlorophyllase non-targeted in a non-human organism or a part thereof, preferably a microorganism, a plant cell, a plant or a part thereof, as compared to a corresponding non-transformed wild type non-human organism or a part thereof; and
[56512] (b) growing the non-human organism or a part thereof under conditions which permit the production of palmitic acid or a composition comprising palmitic acid in said non-human organism or in the culture medium surrounding said non-human organism.

[56513] A further embodiment of the present invention relates to a process for the production of palmitic acid, which comprises
[56514] (a) increasing or generating the activity of a At1g19800-protein non-targeted in a non-human organism or a part thereof, preferably a microorganism, a plant cell, a plant or a part thereof, as compared to a corresponding non-transformed wild type non-human organism or a part thereof; and
[56515] (b) growing the non-human organism or a part thereof under conditions which permit the production of palmitic acid or a composition comprising palmitic acid in said non-human organism or in the culture medium surrounding said non-human organism.

[56516] A further embodiment of the present invention relates to a process for the production of palmitic acid, which comprises
[56517] (a) increasing or generating the activity of a At1g23110-protein non-targeted in a non-human organism or a part thereof, preferably a microorganism, a plant cell, a plant or a part thereof, as compared to a corresponding non-transformed wild type non-human organism or a part thereof; and
[56518] (b) growing the non-human organism or a part thereof under conditions which permit the production of palmitic acid or a composition comprising palmitic acid in said non-human organism or in the culture medium surrounding said non-human organism.

[56519] A further embodiment of the present invention relates to a process for the production of palmitic acid, which comprises
[56520] (a) increasing or generating the activity of a transcription factor non-targeted in a non-human organism or a part thereof, preferably a microorganism, a plant cell, a plant or a part thereof, as compared to a corresponding non-transformed wild type non-human organism or a part thereof; and
[56521] (b) growing the non-human organism or a part thereof under conditions which permit the production of palmitic acid or a composition comprising palmitic acid in said non-human organism or in the culture medium surrounding said non-human organism.

[56522] A further embodiment of the present invention relates to a process for the production of palmitic acid, which comprises
[56523] (a) increasing or generating the activity of a protein phosphatase non-targeted in a non-human organism or a part thereof, preferably a microorganism, a plant cell, a plant or a part thereof, as compared to a corresponding non-transformed wild type non-human organism or a part thereof; and
[56524] (b) growing the non-human organism or a part thereof under conditions which permit the production of palmitic acid or a composition comprising palmitic acid in said non-human organism or in the culture medium surrounding said non-human organism.

[56525] A further embodiment of the present invention relates to a process for the production of palmitic acid, which comprises
[56526] (a) increasing or generating the activity of a At2g45420-protein non-targeted in a non-human organism or a part thereof, preferably a microorganism, a plant cell, a plant or a part thereof, as compared to a corresponding non-transformed wild type non-human organism or a part thereof; and
[56527] (b) growing the non-human organism or a part thereof under conditions which permit the production of palmitic acid or a composition comprising palmitic acid in said non-human organism or in the culture medium surrounding said non-human organism.

[56528] A further embodiment of the present invention relates to a process for the production of palmitic acid, which comprises
[56529] (a) increasing or generating the activity of a heat shock transcription factor non-targeted in a non-human organism or a part thereof, preferably a microorganism, a plant cell, a plant or a part thereof, as compared to a corresponding non-transformed wild type non-human organism or a part thereof; and
[56530] (b) growing the non-human organism or a part thereof under conditions which permit the production of palmitic acid or a composition comprising palmitic acid in said non-human organism or in the culture medium surrounding said non-human organism.

[56531] A further embodiment of the present invention relates to a process for the production of palmitic acid, which comprises
[56532] (a) increasing or generating the activity of a CCAAT-binding transcription factor non-targeted in a non-human organism or a part thereof, preferably a microorganism, a plant cell, a plant or a part thereof, as compared to a corresponding non-transformed wild type non-human organism or a part thereof; and
[56533] (b) growing the non-human organism or a part thereof under conditions which permit the production of palmitic acid or a composition comprising palmitic acid in said non-human organism or in the culture medium surrounding said non-human organism.

[56534] A further embodiment of the present invention relates to a process for the production of palmitic acid, which comprises
[56535] (a) increasing or generating the activity of a glutaredoxin non-targeted in a non-human organism or a part thereof, preferably a microorganism, a plant cell, a plant or a part thereof, as compared to a corresponding non-transformed wild type non-human organism or a part thereof; and
[56536] (b) growing the non-human organism or a part thereof under conditions which permit the production of palmitic acid or a composition comprising palmitic acid in said non-human organism or in the culture medium surrounding said non-human organism.

[56537] A further embodiment of the present invention relates to a process for the production of palmitic acid, which comprises
[56538] (a) increasing or generating the activity of a monothiol glutaredoxin non-targeted in a non-human organism or a part thereof, preferably a microorganism, a plant cell, a plant or a part thereof, as compared to a corresponding non-transformed wild type non-human organism or a part thereof; and
[56539] (b) growing the non-human organism or a part thereof under conditions which permit the production of palmitic acid or a composition comprising palmitic acid in said non-human organism or in the culture medium surrounding said non-human organism.

[56540] A further embodiment of the present invention relates to a process for the production of palmitic acid, which comprises
[56541] (a) increasing or generating the activity of a heat shock transcription factor non-targeted in a non-human organism or a part thereof, preferably a microorganism, a plant cell, a plant or a part thereof, as compared to a corresponding non-transformed wild type non-human organism or a part thereof; and
[56542] (b) growing the non-human organism or a part thereof under conditions which permit the production of palmitic acid or a composition comprising palmitic acid in said non-human organism or in the culture medium surrounding said non-human organism.

[56543] A further embodiment of the present invention relates to a process for the production of palmitic acid, which comprises
[56544] (a) increasing or generating the activity of a protein phosphatase non-targeted in a non-human organism or a part thereof, preferably a microorganism, a plant cell, a plant or a part thereof, as compared to a corresponding non-transformed wild type non-human organism or a part thereof; and
[56545] (b) growing the non-human organism or a part thereof under conditions which permit the production of palmitic acid or a composition comprising palmitic acid in said non-human organism or in the culture medium surrounding said non-human organism.

[56546] A further embodiment of the present invention relates to a process for the production of palmitic acid, which comprises
[56547] (a) increasing or generating the activity of a glutaredoxin non-targeted in a non-human organism or a part thereof, preferably a microorganism, a plant cell, a plant or a part thereof, as compared to a corresponding non-transformed wild type non-human organism or a part thereof; and
[56548] (b) growing the non-human organism or a part thereof under conditions which permit the production of palmitic acid or a composition comprising palmitic acid in said non-human organism or in the culture medium surrounding said non-human organism.

[56549] A further embodiment of the present invention relates to a process for the production of palmitic acid, which comprises
[56550] (a) increasing or generating the activity of a calcium-dependent protein kinase non-targeted in a non-human organism or a part thereof, preferably a microorganism, a plant cell, a plant or a part thereof, as compared to a corresponding non-transformed wild type non-human organism or a part thereof; and
[56551] (b) growing the non-human organism or a part thereof under conditions which permit the production of palmitic acid or a composition comprising palmitic acid in said non-human organism or in the culture medium surrounding said non-human organism.

[56552] A further embodiment of the present invention relates to a process for the production of palmitic acid, which comprises
[56553] (a) increasing or generating the activity of a protein phosphatase non-targeted in a non-human organism or a part thereof, preferably a microorganism, a plant cell, a plant or a part thereof, as compared to a corresponding non-transformed wild type non-human organism or a part thereof; and
[56554] (b) growing the non-human organism or a part thereof under conditions which permit the production of palmitic acid or a composition comprising palmitic acid in said non-human organism or in the culture medium surrounding said non-human organism.

[56555] A further embodiment of the present invention relates to a process for the production of palmitic acid, which comprises
[56556] (a) increasing or generating the activity of a protein phosphatase non-targeted in a non-human organism or a part thereof, preferably a microorganism, a plant cell, a plant or a part thereof, as compared to a corresponding non-transformed wild type non-human organism or a part thereof; and
[56557] (b) growing the non-human organism or a part thereof under conditions which permit the production of palmitic acid or a composition comprising palmitic acid in said non-human organism or in the culture medium surrounding said non-human organism.

[56558] A further embodiment of the present invention relates to a process for the production of palmitic acid, which comprises
[56559] (a) increasing or generating the activity of a oxidoreductase non-targeted in a non-human organism or a part thereof, preferably a microorganism, a plant cell, a plant or a part thereof, as compared to a corresponding non-transformed wild type non-human organism or a part thereof; and
[56560] (b) growing the non-human organism or a part thereof under conditions which permit the production of palmitic acid or a composition comprising palmitic acid in said non-human organism or in the culture medium surrounding said non-human organism.

[56561] A further embodiment of the present invention relates to a process for the production of palmitic acid, which comprises
[56562] (a) increasing or generating the activity of a ThiF family protein non-targeted in a non-human organism or a part thereof, preferably a microorganism, a plant cell, a plant or a part thereof, as compared to a corresponding non-transformed wild type non-human organism or a part thereof; and
[56563] (b) growing the non-human organism or a part thereof under conditions which permit the production of palmitic acid or a composition comprising palmitic acid in said non-human organism or in the culture medium surrounding said non-human organism.

[56564] A further embodiment of the present invention relates to a process for the production of palmitic acid, which comprises
[56565] (a) increasing or generating the activity of a recombinase A non-targeted in a non-human organism or a part thereof, preferably a microorganism, a plant cell, a plant or a part thereof, as compared to a corresponding non-transformed wild type non-human organism or a part thereof; and
[56566] (b) growing the non-human organism or a part thereof under conditions which permit the production of palmitic acid or a composition comprising palmitic acid in said non-human organism or in the culture medium surrounding said non-human organism.

[56567] A further embodiment of the present invention relates to a process for the production of palmitic acid, which comprises
[56568] (a) increasing or generating the activity of a NADH-quinone oxidoreductase subunit non-targeted in a non-human organism or a part thereof, preferably a microorganism, a plant cell, a plant or a part thereof, as compared to a corresponding non-transformed wild type non-human organism or a part thereof; and
[56569] (b) growing the non-human organism or a part thereof under conditions which permit the production of palmitic acid or a composition comprising palmitic acid in said non-human organism or in the culture medium surrounding said non-human organism.

[56570] A further embodiment of the present invention relates to a process for the production of palmitic acid, which comprises
[56571] (a) increasing or generating the activity of a HesB/YadR/YfhF family protein non-targeted in a non-human organism or a part thereof, preferably a microorganism, a plant cell, a plant or a part thereof, as compared to a corresponding non-transformed wild type non-human organism or a part thereof; and
[56572] (b) growing the non-human organism or a part thereof under conditions which permit the production of palmitic acid or a composition comprising palmitic acid in said non-human organism or in the culture medium surrounding said non-human organism.

[56573] A further embodiment of the present invention relates to a process for the production of palmitic acid, which comprises
[56574] (a) increasing or generating the activity of a peptidyl-prolyl cis-trans isomerase non-targeted in a non-human organism or a part thereof, preferably a microorganism, a plant cell, a plant or a part thereof, as compared to a corresponding non-transformed wild type non-human organism or a part thereof; and
[56575] (b) growing the non-human organism or a part thereof under conditions which permit the production of palmitic acid or a composition comprising palmitic acid in said non-human organism or in the culture medium surrounding said non-human organism.

[56576] A further embodiment of the present invention relates to a process for the production of palmitic acid, which comprises
[56577] (a) increasing or generating the activity of a purine nucleoside phosphorylase non-targeted in a non-human organism or a part thereof, preferably a microorganism, a plant cell, a plant or a part thereof, as compared to a corresponding non-transformed wild type non-human organism or a part thereof; and
[56578] (b) growing the non-human organism or a part thereof under conditions which permit the production of palmitic acid or a composition comprising palmitic acid in said non-human organism or in the culture medium surrounding said non-human organism.

[56579] A further embodiment of the present invention relates to a process for the production of palmitic acid, which comprises
[56580] (a) increasing or generating the activity of a b0050-protein non-targeted in a non-human organism or a part thereof, preferably a microorganism, a plant cell, a plant or a part thereof, as compared to a corresponding non-transformed wild type non-human organism or a part thereof; and
[56581] (b) growing the non-human organism or a part thereof under conditions which permit the production of palmitic acid or a composition comprising palmitic acid in said non-human organism or in the culture medium surrounding said non-human organism.

[56582] A further embodiment of the present invention relates to a process for the production of palmitic acid, which comprises
[56583] (a) increasing or generating the activity of a sodium/proton antiporter non-targeted in a non-human organism or a part thereof, preferably a microorganism, a plant cell, a plant or a part thereof, as compared to a corresponding non-transformed wild type non-human organism or a part thereof; and
[56584] (b) growing the non-human organism or a part thereof under conditions which permit the production of palmitic acid or a composition comprising palmitic acid in said non-human organism or in the culture medium surrounding said non-human organism.

[56585] A further embodiment of the present invention relates to a process for the production of palmitic acid, which comprises
[56586] (a) increasing or generating the activity of a b1234-protein non-targeted in a non-human organism or a part thereof, preferably a microorganism, a plant cell, a plant or a part thereof, as compared to a corresponding non-transformed wild type non-human organism or a part thereof; and
[56587] (b) growing the non-human organism or a part thereof under conditions which permit the production of palmitic acid or a composition comprising palmitic acid in said non-human organism or in the culture medium surrounding said non-human organism.

[56588] A further embodiment of the present invention relates to a process for the production of palmitic acid, which comprises
[56589] (a) increasing or generating the activity of a b1248-protein non-targeted in a non-human organism or a part thereof, preferably a microorganism, a plant cell, a plant or a part thereof, as compared to a corresponding non-transformed wild type non-human organism or a part thereof; and
[56590] (b) growing the non-human organism or a part thereof under conditions which permit the production of palmitic acid or a composition comprising palmitic acid in said non-human organism or in the culture medium surrounding said non-human organism.

[56591] A further embodiment of the present invention relates to a process for the production of palmitic acid, which comprises
[56592] (a) increasing or generating the activity of a b1330-protein non-targeted in a non-human organism or a part thereof, preferably a microorganism, a plant cell, a plant or a part thereof, as compared to a corresponding non-transformed wild type non-human organism or a part thereof; and
[56593] (b) growing the non-human organism or a part thereof under conditions which permit the production of palmitic acid or a composition comprising palmitic acid in said non-human organism or in the culture medium surrounding said non-human organism.

[56594] A further embodiment of the present invention relates to a process for the production of palmitic acid, which comprises
[56595] (a) increasing or generating the activity of a lipoprotein precursor non-targeted in a non-human organism or a part thereof, preferably a microorganism, a plant cell, a plant or a part thereof, as compared to a corresponding non-transformed wild type non-human organism or a part thereof; and
[56596] (b) growing the non-human organism or a part thereof under conditions which permit the production of palmitic acid or a composition comprising palmitic acid in said non-human organism or in the culture medium surrounding said non-human organism.

[56597] A further embodiment of the present invention relates to a process for the production of palmitic acid, which comprises
[56598] (a) increasing or generating the activity of a Fe—S subunit of oxidoreductase non-targeted in a non-human organism or a part thereof, preferably a microorganism, a plant cell, a plant or a part thereof, as compared to a corresponding non-transformed wild type non-human organism or a part thereof; and
[56599] (b) growing the non-human organism or a part thereof under conditions which permit the production of palmitic acid or a composition comprising palmitic acid in said non-human organism or in the culture medium surrounding said non-human organism.

[56600] A further embodiment of the present invention relates to a process for the production of palmitic acid, which comprises
[56601] (a) increasing or generating the activity of a acid shock protein non-targeted in a non-human organism or a part thereof, preferably a microorganism, a plant cell, a plant or a part thereof, as compared to a corresponding non-transformed wild type non-human organism or a part thereof; and
[56602] (b) growing the non-human organism or a part thereof under conditions which permit the production of palmitic acid or a composition comprising palmitic acid in said non-human organism or in the culture medium surrounding said non-human organism.

[56603] A further embodiment of the present invention relates to a process for the production of palmitic acid, which comprises
[56604] (a) increasing or generating the activity of a b1670-protein non-targeted in a non-human organism or a part thereof, preferably a microorganism, a plant cell, a plant or a part thereof, as compared to a corresponding non-transformed wild type non-human organism or a part thereof; and
[56605] (b) growing the non-human organism or a part thereof under conditions which permit the production of palmitic acid or a composition comprising palmitic acid in said non-human organism or in the culture medium surrounding said non-human organism.

[56606] A further embodiment of the present invention relates to a process for the production of palmitic acid, which comprises
[56607] (a) increasing or generating the activity of a b1837-protein non-targeted in a non-human organism or a part thereof, preferably a microorganism, a plant cell, a plant or a part thereof, as compared to a corresponding non-transformed wild type non-human organism or a part thereof; and
[56608] (b) growing the non-human organism or a part thereof under conditions which permit the production of palmitic acid or a composition comprising palmitic acid in said non-human organism or in the culture medium surrounding said non-human organism.

[56609] A further embodiment of the present invention relates to a process for the production of palmitic acid, which comprises
[56610] (a) increasing or generating the activity of a b2032-protein non-targeted in a non-human organism or a part thereof, preferably a microorganism, a plant cell, a plant or a part thereof, as compared to a corresponding non-transformed wild type non-human organism or a part thereof; and
[56611] (b) growing the non-human organism or a part thereof under conditions which permit the production of palmitic acid or a composition comprising palmitic acid in said non-human organism or in the culture medium surrounding said non-human organism.

[56612] A further embodiment of the present invention relates to a process for the production of palmitic acid, which comprises
[56613] (a) increasing or generating the activity of a colanic acid biosynthesis protein non-targeted in a non-human organism or a part thereof, preferably a microorganism, a plant cell, a plant or a part thereof, as compared to a corresponding non-transformed wild type non-human organism or a part thereof; and
[56614] (b) growing the non-human organism or a part thereof under conditions which permit the production of palmitic acid or a composition comprising palmitic acid in said non-human organism or in the culture medium surrounding said non-human organism.

[56615] A further embodiment of the present invention relates to a process for the production of palmitic acid, which comprises
[56616] (a) increasing or generating the activity of a b2099-protein non-targeted in a non-human organism or a part thereof, preferably a microorganism, a plant cell, a plant or a part thereof, as compared to a corresponding non-transformed wild type non-human organism or a part thereof; and
[56617] (b) growing the non-human organism or a part thereof under conditions which permit the production of palmitic acid or a composition comprising palmitic acid in said non-human organism or in the culture medium surrounding said non-human organism.

[56618] A further embodiment of the present invention relates to a process for the production of palmitic acid, which comprises
[56619] (a) increasing or generating the activity of a b2107-protein non-targeted in a non-human organism or a part thereof, preferably a microorganism, a plant cell, a plant or a part thereof, as compared to a corresponding non-transformed wild type non-human organism or a part thereof; and
[56620] (b) growing the non-human organism or a part thereof under conditions which permit the production of palmitic acid or a composition comprising palmitic acid in said non-human organism or in the culture medium surrounding said non-human organism.

[56621] A further embodiment of the present invention relates to a process for the production of palmitic acid, which comprises
[56622] (a) increasing or generating the activity of a b2399-protein non-targeted in a non-human organism or a part thereof, preferably a microorganism, a plant cell, a plant or a part thereof, as compared to a corresponding non-transformed wild type non-human organism or a part thereof; and
[56623] (b) growing the non-human organism or a part thereof under conditions which permit the production of palmitic acid or a composition comprising palmitic acid in said non-human organism or in the culture medium surrounding said non-human organism.

[56624] A further embodiment of the present invention relates to a process for the production of palmitic acid, which comprises
[56625] (a) increasing or generating the activity of a ethanolamine utilization protein non-targeted in a non-human organism or a part thereof, preferably a microorganism, a plant cell, a plant or a part thereof, as compared to a corresponding non-transformed wild type non-human organism or a part thereof; and
[56626] (b) growing the non-human organism or a part thereof under conditions which permit the production of palmitic acid or a composition comprising palmitic acid in said non-human organism or in the culture medium surrounding said non-human organism.

[56627] A further embodiment of the present invention relates to a process for the production of palmitic acid, which comprises
[56628] (a) increasing or generating the activity of a b2682-protein non-targeted in a non-human organism or a part thereof, preferably a microorganism, a plant cell, a plant or a part thereof, as compared to a corresponding non-transformed wild type non-human organism or a part thereof; and
[56629] (b) growing the non-human organism or a part thereof under conditions which permit the production of palmitic acid or a composition comprising palmitic acid in said non-human organism or in the culture medium surrounding said non-human organism.

[56630] A further embodiment of the present invention relates to a process for the production of palmitic acid, which comprises
[56631] (a) increasing or generating the activity of a 2-C-methyl-D-erythritol 4-phosphate cytidylyltransferase non-targeted in a non-human organism or a part thereof, preferably a microorganism, a plant cell, a plant or a part thereof, as compared to a corresponding non-transformed wild type non-human organism or a part thereof; and
[56632] (b) growing the non-human organism or a part thereof under conditions which permit the production of palmitic acid or a composition comprising palmitic acid in said non-human organism or in the culture medium surrounding said non-human organism.

[56633] A further embodiment of the present invention relates to a process for the production of palmitic acid, which comprises
[56634] (a) increasing or generating the activity of a flavodoxin non-targeted in a non-human organism or a part thereof, preferably a microorganism, a plant cell, a plant or a part thereof, as compared to a corresponding non-transformed wild type non-human organism or a part thereof; and
[56635] (b) growing the non-human organism or a part thereof under conditions which permit the production of palmitic acid or a composition comprising palmitic acid in said non-human organism or in the culture medium surrounding said non-human organism.

[56636] A further embodiment of the present invention relates to a process for the production of palmitic acid, which comprises
[56637] (a) increasing or generating the activity of a AAS bifunctional protein non-targeted in a non-human organism or a part thereof, preferably a microorganism, a plant cell, a plant or a part thereof, as compared to a corresponding non-transformed wild type non-human organism or a part thereof; and
[56638] (b) growing the non-human organism or a part thereof under conditions which permit the production of palmitic acid or a composition comprising palmitic acid in said non-human organism or in the culture medium surrounding said non-human organism.

[56639] A further embodiment of the present invention relates to a process for the production of palmitic acid, which comprises
[56640] (a) increasing or generating the activity of a b2849-protein non-targeted in a non-human organism or a part thereof, preferably a microorganism, a plant cell, a plant or a part thereof, as compared to a corresponding non-transformed wild type non-human organism or a part thereof; and
[56641] (b) growing the non-human organism or a part thereof under conditions which permit the production of palmitic acid or a composition comprising palmitic acid in said non-human organism or in the culture medium surrounding said non-human organism.

[56642] A further embodiment of the present invention relates to a process for the production of palmitic acid, which comprises
[56643] (a) increasing or generating the activity of a b3814-protein non-targeted in a non-human organism or a part thereof, preferably a microorganism, a plant cell, a plant or a part thereof, as compared to a corresponding non-transformed wild type non-human organism or a part thereof; and
[56644] (b) growing the non-human organism or a part thereof under conditions which permit the production of palmitic acid or a composition comprising palmitic acid in said non-human organism or in the culture medium surrounding said non-human organism.

[56645] A further embodiment of the present invention relates to a process for the production of palmitic acid, which comprises
[56646] (a) increasing or generating the activity of a threonine efflux protein non-targeted in a non-human organism or a part thereof, preferably a microorganism, a plant cell, a plant or a part thereof, as compared to a corresponding non-transformed wild type non-human organism or a part thereof; and
[56647] (b) growing the non-human organism or a part thereof under conditions which permit the production of palmitic acid or a composition comprising palmitic acid in said non-human organism or in the culture medium surrounding said non-human organism.

[56648] A further embodiment of the present invention relates to a process for the production of palmitic acid, which comprises
[56649] (a) increasing or generating the activity of a 3-ketoacyl-CoA thiolase non-targeted in a non-human organism or a part thereof, preferably a microorganism, a plant cell, a plant or a part thereof, as compared to a corresponding non-transformed wild type non-human organism or a part thereof; and
[56650] (b) growing the non-human organism or a part thereof under conditions which permit the production of palmitic acid or a composition comprising palmitic acid in said non-human organism or in the culture medium surrounding said non-human organism.

[56651] A further embodiment of the present invention relates to a process for the production of palmitic acid, which comprises
[56652] (a) increasing or generating the activity of a glutaredoxin non-targeted in a non-human organism or a part thereof, preferably a microorganism, a plant cell, a plant or a part thereof, as compared to a corresponding non-transformed wild type non-human organism or a part thereof; and
[56653] (b) growing the non-human organism or a part thereof under conditions which permit the production of palmitic acid or a composition comprising palmitic acid in said non-human organism or in the culture medium surrounding said non-human organism.

[56654] A further embodiment of the present invention relates to a process for the production of palmitic acid, which comprises
[56655] (a) increasing or generating the activity of a transcription factor non-targeted in a non-human organism or a part thereof, preferably a microorganism, a plant cell, a plant or a part thereof, as compared to a corresponding non-transformed wild type non-human organism or a part thereof; and
[56656] (b) growing the non-human organism or a part thereof under conditions which permit the production of palmitic acid or a composition comprising palmitic acid in said non-human organism or in the culture medium surrounding said non-human organism.

[56657] A further embodiment of the present invention relates to a process for the production of palmitic acid, which comprises
[56658] (a) increasing or generating the activity of a bifunctional protein (phosphoribosyltransferase and regulatory protein) non-targeted in a non-human organism or a part thereof, preferably a microorganism, a plant cell, a plant or a part thereof, as compared to a corresponding non-transformed wild type non-human organism or a part thereof; and
[56659] (b) growing the non-human organism or a part thereof under conditions which permit the production of palmitic acid or a composition comprising palmitic acid in said non-human organism or in the culture medium surrounding said non-human organism.

[56660] A further embodiment of the present invention relates to a process for the production of palmitic acid, which comprises
[56661] (a) increasing or generating the activity of a branched chain amino acid ABC transporter

[56662] ATP-binding protein non-targeted in a non-human organism or a part thereof, preferably a microorganism, a plant cell, a plant or a part thereof, as compared to a corresponding non-transformed wild type non-human organism or a part thereof; and
[56663] (b) growing the non-human organism or a part thereof under conditions which permit the production of palmitic acid or a composition comprising palmitic acid in said non-human organism or in the culture medium surrounding said non-human organism.

[56664] A further embodiment of the present invention relates to a process for the production of palmitic acid, which comprises
[56665] (a) increasing or generating the activity of a carbon dioxide concentrating mechanism protein non-targeted in a non-human organism or a part thereof, preferably a microorganism, a plant cell, a plant or a part thereof, as compared to a corresponding non-transformed wild type non-human organism or a part thereof; and
[56666] (b) growing the non-human organism or a part thereof under conditions which permit the production of palmitic acid or a composition comprising palmitic acid in said non-human organism or in the culture medium surrounding said non-human organism.

[56667] A further embodiment of the present invention relates to a process for the production of palmitic acid, which comprises
[56668] (a) increasing or generating the activity of a sll1032-protein non-targeted in a non-human organism or a part thereof, preferably a microorganism, a plant cell, a plant or a part thereof, as compared to a corresponding non-transformed wild type non-human organism or a part thereof; and
[56669] (b) growing the non-human organism or a part thereof under conditions which permit the production of palmitic acid or a composition comprising palmitic acid in said non-human organism or in the culture medium surrounding said non-human organism.

[56670] A further embodiment of the present invention relates to a process for the production of palmitic acid, which comprises
[56671] (a) increasing or generating the activity of a phosphoribosylformyl glycinamidine synthase subunit non-targeted in a non-human organism or a part thereof, preferably a microorganism, a plant cell, a plant or a part thereof, as compared to a corresponding non-transformed wild type non-human organism or a part thereof; and
[56672] (b) growing the non-human organism or a part thereof under conditions which permit the production of palmitic acid or a composition comprising palmitic acid in said non-human organism or in the culture medium surrounding said non-human organism.

[56673] A further embodiment of the present invention relates to a process for the production of palmitic acid, which comprises
[56674] (a) increasing or generating the activity of a nitrate/nitrite transport protein non-targeted in a non-human organism or a part thereof, preferably a microorganism, a plant cell, a plant or a part thereof, as compared to a corresponding non-transformed wild type non-human organism or a part thereof; and
[56675] (b) growing the non-human organism or a part thereof under conditions which permit the production of palmitic acid or a composition comprising palmitic acid in said non-human organism or in the culture medium surrounding said non-human organism.

[56676] A further embodiment of the present invention relates to a process for the production of palmitic acid, which comprises
[56677] (a) increasing or generating the activity of a carbamoyl-phosphate synthase subunit non-targeted in a non-human organism or a part thereof, preferably a microorganism, a plant cell, a plant or a part thereof, as compared to a corresponding non-transformed wild type non-human organism or a part thereof; and
[56678] (b) growing the non-human organism or a part thereof under conditions which permit the production of palmitic acid or a composition comprising palmitic acid in said non-human organism or in the culture medium surrounding said non-human organism.

[56679] A further embodiment of the present invention relates to a process for the production of palmitic acid, which comprises
[56680] (a) increasing or generating the activity of a glutathione S-transferase non-targeted in a non-human organism or a part thereof, preferably a microorganism, a plant cell, a plant or a part thereof, as compared to a corresponding non-transformed wild type non-human organism or a part thereof; and
[56681] (b) growing the non-human organism or a part thereof under conditions which permit the production of palmitic acid or a composition comprising palmitic acid in said non-human organism or in the culture medium surrounding said non-human organism.

[56682] A further embodiment of the present invention relates to a process for the production of palmitic acid, which comprises
[56683] (a) increasing or generating the activity of a ABC metal ion transporter substrate-binding protein non-targeted in a non-human organism or a part thereof, preferably a microorganism, a plant cell, a plant or a part thereof, as compared to a corresponding non-transformed wild type non-human organism or a part thereof; and
[56684] (b) growing the non-human organism or a part thereof under conditions which permit the production of palmitic acid or a composition comprising palmitic acid in said non-human organism or in the culture medium surrounding said non-human organism.

[56685] A further embodiment of the present invention relates to a process for the production of palmitic acid, which comprises
[56686] (a) increasing or generating the activity of a acyl transferase non-targeted in a non-human organism or a part thereof, preferably a microorganism, a plant cell, a plant or a part thereof, as compared to a corresponding non-transformed wild type non-human organism or a part thereof; and
[56687] (b) growing the non-human organism or a part thereof under conditions which permit the production of palmitic acid or a composition comprising palmitic acid in said non-human organism or in the culture medium surrounding said non-human organism.

[56688] A further embodiment of the present invention relates to a process for the production of palmitic acid, which comprises
[56689] (a) increasing or generating the activity of a coproporphyrinogen III oxidase non-targeted in a non-human organism or a part thereof, preferably a microorganism, a plant cell, a plant or a part thereof, as compared to a corresponding non-transformed wild type non-human organism or a part thereof; and
[56690] (b) growing the non-human organism or a part thereof under conditions which permit the production of palmitic acid or a composition comprising palmitic acid in said non-human organism or in the culture medium surrounding said non-human organism.

[56691] A further embodiment of the present invention relates to a process for the production of palmitic acid, which comprises
[56692] (a) increasing or generating the activity of a cation-transporting ATPase non-targeted in a non-human organism or a part thereof, preferably a microorganism, a plant cell, a plant or a part thereof, as compared to a corresponding non-transformed wild type non-human organism or a part thereof; and
[56693] (b) growing the non-human organism or a part thereof under conditions which permit the production of palmitic acid or a composition comprising palmitic acid in said non-human organism or in the culture medium surrounding said non-human organism.

[56694] A further embodiment of the present invention relates to a process for the production of palmitic acid, which comprises
[56695] (a) increasing or generating the activity of a permease protein of ABC transporter non-targeted in a non-human organism or a part thereof, preferably a microorganism, a plant cell, a plant or a part thereof, as compared to a corresponding non-transformed wild type non-human organism or a part thereof; and
[56696] (b) growing the non-human organism or a part thereof under conditions which permit the production of palmitic acid or a composition comprising palmitic acid in said non-human organism or in the culture medium surrounding said non-human organism.

[56697] A further embodiment of the present invention relates to a process for the production of palmitic acid, which comprises
[56698] (a) increasing or generating the activity of a aromatic acid decarboxylase non-targeted in a non-human organism or a part thereof, preferably a microorganism, a plant cell, a plant or a part thereof, as compared to a corresponding non-transformed wild type non-human organism or a part thereof; and
[56699] (b) growing the non-human organism or a part thereof under conditions which permit the production of palmitic acid or a composition comprising palmitic acid in said non-human organism or in the culture medium surrounding said non-human organism.

[56700] A further embodiment of the present invention relates to a process for the production of palmitic acid, which comprises
[56701] (a) increasing or generating the activity of a phosphate import ATP-binding protein non-targeted in a non-human organism or a part thereof, preferably a microorganism, a plant cell, a plant or a part thereof, as compared to a corresponding non-transformed wild type non-human organism or a part thereof; and
[56702] (b) growing the non-human organism or a part thereof under conditions which permit the production of palmitic acid or a composition comprising palmitic acid in said non-human organism or in the culture medium surrounding said non-human organism.

[56703] A further embodiment of the present invention relates to a process for the production of palmitic acid, which comprises
[56704] (a) increasing or generating the activity of a arginine decarboxylase non-targeted in a non-human organism or a part thereof, preferably a microorganism, a plant cell, a plant or a part thereof, as compared to a corresponding non-transformed wild type non-human organism or a part thereof; and
[56705] (b) growing the non-human organism or a part thereof under conditions which permit the production of palmitic acid or a composition comprising palmitic acid in said non-human organism or in the culture medium surrounding said non-human organism.

[56706] A further embodiment of the present invention relates to a process for the production of palmitic acid, which comprises
[56707] (a) increasing or generating the activity of a phosphoadenosine phosphosulfate reductase non-targeted in a non-human organism or a part thereof, preferably a microorganism, a plant cell, a plant or a part thereof, as compared to a corresponding non-transformed wild type non-human organism or a part thereof; and
[56708] (b) growing the non-human organism or a part thereof under conditions which permit the production of palmitic acid or a composition comprising palmitic acid in said non-human organism or in the culture medium surrounding said non-human organism.

[56709] A further embodiment of the present invention relates to a process for the production of palmitic acid, which comprises
[56710] (a) increasing or generating the activity of a threonine dehydratase non-targeted in a non-human organism or a part thereof, preferably a microorganism, a plant cell, a plant or a part thereof, as compared to a corresponding non-transformed wild type non-human organism or a part thereof; and
[56711] (b) growing the non-human organism or a part thereof under conditions which permit the production of palmitic acid or a composition comprising palmitic acid in said non-human organism or in the culture medium surrounding said non-human organism.

[56712] A further embodiment of the present invention relates to a process for the production of palmitic acid, which comprises
[56713] (a) increasing or generating the activity of a metal-dependent hydrolase non-targeted in a non-human organism or a part thereof, preferably a microorganism, a plant cell, a plant or a part thereof, as compared to a corresponding non-transformed wild type non-human organism or a part thereof; and
[56714] (b) growing the non-human organism or a part thereof under conditions which permit the production of palmitic acid or a composition comprising palmitic acid in said non-human organism or in the culture medium surrounding said non-human organism.

[56715] A further embodiment of the present invention relates to a process for the production of palmitic acid, which comprises
[56716] (a) increasing or generating the activity of a homocitrate synthase non-targeted in a non-human organism or a part thereof, preferably a microorganism, a plant cell, a plant or a part thereof, as compared to a corresponding non-transformed wild type non-human organism or a part thereof; and
[56717] (b) growing the non-human organism or a part thereof under conditions which permit the production of palmitic acid or a composition comprising palmitic acid in said non-human organism or in the culture medium surrounding said non-human organism.

[56718] A further embodiment of the present invention relates to a process for the production of palmitic acid, which comprises
[56719] (a) increasing or generating the activity of a acid phosphatase precursor non-targeted in a non-human organism or a part thereof, preferably a microorganism, a plant cell, a plant or a part thereof, as compared to a corresponding non-transformed wild type non-human organism or a part thereof; and
[56720] (b) growing the non-human organism or a part thereof under conditions which permit the production of palmitic acid or a composition comprising palmitic acid in said non-human organism or in the culture medium surrounding said non-human organism.

[56721] A further embodiment of the present invention relates to a process for the production of palmitic acid, which comprises
[56722] (a) increasing or generating the activity of a glycerol-3-phosphate dehydrogenase non-targeted in a non-human organism or a part thereof, preferably a microorganism, a plant cell, a plant or a part thereof, as compared to a corresponding non-transformed wild type non-human organism or a part thereof; and
[56723] (b) growing the non-human organism or a part thereof under conditions which permit the production of palmitic acid or a composition comprising palmitic acid in said non-human organism or in the culture medium surrounding said non-human organism.

[56724] A further embodiment of the present invention relates to a process for the production of palmitic acid, which comprises
[56725] (a) increasing or generating the activity of a protein kinase non-targeted in a non-human organism or a part thereof, preferably a microorganism, a plant cell, a plant or a part thereof, as compared to a corresponding non-transformed wild type non-human organism or a part thereof; and
[56726] (b) growing the non-human organism or a part thereof under conditions which permit the production of palmitic acid or a composition comprising palmitic acid in said non-human organism or in the culture medium surrounding said non-human organism.

[56727] A further embodiment of the present invention relates to a process for the production of palmitic acid, which comprises
[56728] (a) increasing or generating the activity of a F-box protein non-targeted in a non-human organism or a part thereof, preferably a microorganism, a plant cell, a plant or a part thereof, as compared to a corresponding non-transformed wild type non-human organism or a part thereof; and
[56729] (b) growing the non-human organism or a part thereof under conditions which permit the production of palmitic acid or a composition comprising palmitic acid in said non-human organism or in the culture medium surrounding said non-human organism.

[56730] A further embodiment of the present invention relates to a process for the production of palmitic acid, which comprises
[56731] (a) increasing or generating the activity of a DnaJ-like chaperone non-targeted in a non-human organism or a part thereof, preferably a microorganism, a plant cell, a plant or a part thereof, as compared to a corresponding non-transformed wild type non-human organism or a part thereof; and
[56732] (b) growing the non-human organism or a part thereof under conditions which permit the production of palmitic acid or a composition comprising palmitic acid in said non-human organism or in the culture medium surrounding said non-human organism.

[56733] A further embodiment of the present invention relates to a process for the production of palmitic acid, which comprises
[56734] (a) increasing or generating the activity of a aconitate hydratase non-targeted in a non-human organism or a part thereof, preferably a microorganism, a plant cell, a plant or a part thereof, as compared to a corresponding non-transformed wild type non-human organism or a part thereof; and
[56735] (b) growing the non-human organism or a part thereof under conditions which permit the production of palmitic acid or a composition comprising palmitic acid in said non-human organism or in the culture medium surrounding said non-human organism.

[56736] A further embodiment of the present invention relates to a process for the production of palmitic acid, which comprises
[56737] (a) increasing or generating the activity of a ymr013c-protein non-targeted in a non-human organism or a part thereof, preferably a microorganism, a plant cell, a plant or a part thereof, as compared to a corresponding non-transformed wild type non-human organism or a part thereof; and
[56738] (b) growing the non-human organism or a part thereof under conditions which permit the production of palmitic acid or a composition comprising palmitic acid in said non-human organism or in the culture medium surrounding said non-human organism.

[56739] A further embodiment of the present invention relates to a process for the production of palmitic acid, which comprises
[56740] (a) increasing or generating the activity of a ATPase epsilon subunit non-targeted in a non-human organism or a part thereof, preferably a microorganism, a plant cell, a plant or a part thereof, as compared to a corresponding non-transformed wild type non-human organism or a part thereof; and
[56741] (b) growing the non-human organism or a part thereof under conditions which permit the production of palmitic acid or a composition comprising palmitic acid in said non-human organism or in the culture medium surrounding said non-human organism.

[56742] A further embodiment of the present invention relates to a process for the production of palmitic acid, which comprises
[56743] (a) increasing or generating the activity of a 49747384_SOYBEAN-protein non-targeted in a non-human organism or a part thereof, preferably a microorganism, a plant cell, a plant or a part thereof, as compared to a corresponding non-transformed wild type non-human organism or a part thereof; and
[56744] (b) growing the non-human organism or a part thereof under conditions which permit the production of palmitic acid or a composition comprising palmitic acid in said non-human organism or in the culture medium surrounding said non-human organism.

[56745] A further embodiment of the present invention relates to a process for the production of palmitic acid, which comprises
[56746] (a) increasing or generating the activity of a glucose-6-phosphate 1-dehydrogenase non-targeted in a non-human organism or a part thereof, preferably a microorganism, a plant cell, a plant or a part thereof, as compared to a corresponding non-transformed wild type non-human organism or a part thereof; and
[56747] (b) growing the non-human organism or a part thereof under conditions which permit the production of palmitic acid or a composition comprising palmitic acid in said non-human organism or in the culture medium surrounding said non-human organism.

[56748] A further embodiment of the present invention relates to a process for the production of palmitic acid, which comprises
[56749] (a) increasing or generating the activity of a polypeptide comprising a polypeptide as depicted in the respective line in column 5 or 8 of Table II, application no. 11, or a homolog or a fragment thereof, a consensus sequence or at least one polypeptide motif as depicted in the respective line in column 8 of Table IV, application no. 11; or
[56750] increasing or generating the activity of an expression product of one or more nucleic acid molecule(s) comprising a polynucleotide as depicted in the respective line in column 5 or 8 of Table I, application no. 11, preferably the coding region thereof, or a homolog or a fragment thereof;
[56751] non-targeted in a non-human organism or a part thereof; preferably a microorganism, a plant cell, a plant or a part thereof, as compared to a corresponding non-transformed wild type non-human organism or a part thereof; and
[56752] (b) growing the non-human organism under conditions which permit the production of palmitic acid, or a composition comprising palmitic acid in said non-human organism or in the culture medium surrounding said non-human organism.

[56753] A further embodiment of the present invention relates to a process for the production of palmitic acid, which comprises
[56754] (a) increasing or generating one or more activities selected from the group consisting of protein phosphatase in an organelle, preferably in plastids or mitochondria, especially in plastids, of a non-human organism or a part thereof, preferably a microorganism, a plant cell, a plant or a part thereof, as compared to a corresponding non-transformed wild type non-human organism or a part thereof; and
[56755] (b) growing the non-human organism or a part thereof under conditions which permit the production of palmitic acid or a composition comprising palmitic acid in said non-human organism or in the culture medium surrounding said non-human organism.

[56756] A further embodiment of the present invention relates to a process for the production of palmitic acid, which comprises
[56757] (a) increasing or generating one or more activities selected from the group consisting of chlorophyllase in an organelle, preferably in plastids or mitochondria, especially in plastids, of a non-human organism or a part thereof, preferably a microorganism, a plant cell, a plant or a part thereof, as compared to a corresponding non-transformed wild type non-human organism or a part thereof; and
[56758] (b) growing the non-human organism or a part thereof under conditions which permit the production of palmitic acid or a composition comprising palmitic acid in said non-human organism or in the culture medium surrounding said non-human organism.

[56759] A further embodiment of the present invention relates to a process for the production of palmitic acid, which comprises
[56760] (a) increasing or generating one or more activities selected from the group consisting of At1g19800-protein in an organelle, preferably in plastids or mitochondria, especially in plastids, of a non-human organism or a part thereof, preferably a microorganism, a plant cell, a plant or a part thereof, as compared to a corresponding non-transformed wild type non-human organism or a part thereof; and
[56761] (b) growing the non-human organism or a part thereof under conditions which permit the production of palmitic acid or a composition comprising palmitic acid in said non-human organism or in the culture medium surrounding said non-human organism.

[56762] A further embodiment of the present invention relates to a process for the production of palmitic acid, which comprises
[56763] (a) increasing or generating one or more activities selected from the group consisting of At1g23110-protein in an organelle, preferably in plastids or mitochondria, especially in plastids, of a non-human organism or a part thereof, preferably a microorganism, a plant cell, a plant or a part thereof, as compared to a corresponding non-transformed wild type non-human organism or a part thereof; and
[56764] (b) growing the non-human organism or a part thereof under conditions which permit the production of palmitic acid or a composition comprising palmitic acid in said non-human organism or in the culture medium surrounding said non-human organism.

[56765] A further embodiment of the present invention relates to a process for the production of palmitic acid, which comprises
[56766] (a) increasing or generating one or more activities selected from the group consisting of transcription factor in an organelle, preferably in plastids or mitochondria, especially in plastids, of a non-human organism or a part thereof, preferably a microorganism, a plant cell, a plant or a part thereof, as compared to a corresponding non-transformed wild type non-human organism or a part thereof; and
[56767] (b) growing the non-human organism or a part thereof under conditions which permit the production of palmitic acid or a composition comprising palmitic acid in said non-human organism or in the culture medium surrounding said non-human organism.

[56768] A further embodiment of the present invention relates to a process for the production of palmitic acid, which comprises
[56769] (a) increasing or generating one or more activities selected from the group consisting of protein phosphatase in an organelle, preferably in plastids or mitochondria, especially in plastids, of a non-human organism or a part thereof, preferably a microorganism, a plant cell, a plant or a part thereof, as compared to a corresponding non-transformed wild type non-human organism or a part thereof; and
[56770] (b) growing the non-human organism or a part thereof under conditions which permit the production of palmitic acid or a composition comprising palmitic acid in said non-human organism or in the culture medium surrounding said non-human organism.

[56771] A further embodiment of the present invention relates to a process for the production of palmitic acid, which comprises
[56772] (a) increasing or generating one or more activities selected from the group consisting of At2g45420-protein in an organelle, preferably in plastids or mitochondria, especially in plastids, of a non-human organism or a part thereof, preferably a microorganism, a plant cell, a plant or a part thereof, as compared to a corresponding non-transformed wild type non-human organism or a part thereof; and
[56773] (b) growing the non-human organism or a part thereof under conditions which permit the production of palmitic acid or a composition comprising palmitic acid in said non-human organism or in the culture medium surrounding said non-human organism.

[56774] A further embodiment of the present invention relates to a process for the production of palmitic acid, which comprises
[56775] (a) increasing or generating one or more activities selected from the group consisting of heat shock transcription factor in an organelle, preferably in plastids or mitochondria, especially in plastids, of a non-human organism or a part thereof, preferably a microorganism, a plant cell, a plant or a part thereof, as compared to a corresponding non-transformed wild type non-human organism or a part thereof; and
[56776] (b) growing the non-human organism or a part thereof under conditions which permit the production of palmitic acid or a composition comprising palmitic acid in said non-human organism or in the culture medium surrounding said non-human organism.

[56777] A further embodiment of the present invention relates to a process for the production of palmitic acid, which comprises
[56778] (a) increasing or generating one or more activities selected from the group consisting of CCAAT-binding transcription factor in an organelle, preferably in plastids or mitochondria, especially in plastids, of a non-human organism or a part thereof, preferably a microorganism, a plant cell, a plant or a part thereof, as compared to a corresponding non-transformed wild type non-human organism or a part thereof; and
[56779] (b) growing the non-human organism or a part thereof under conditions which permit the production of palmitic acid or a composition comprising palmitic acid in said non-human organism or in the culture medium surrounding said non-human organism.

[56780] A further embodiment of the present invention relates to a process for the production of palmitic acid, which comprises
[56781] (a) increasing or generating one or more activities selected from the group consisting of glutaredoxin in an organelle, preferably in plastids or mitochondria, especially in plastids, of a non-human organism or a part thereof, preferably a microorganism, a plant cell, a plant or a part thereof, as compared to a corresponding non-transformed wild type non-human organism or a part thereof; and
[56782] (b) growing the non-human organism or a part thereof under conditions which permit the production of palmitic acid or a composition comprising palmitic acid in said non-human organism or in the culture medium surrounding said non-human organism.

[56783] A further embodiment of the present invention relates to a process for the production of palmitic acid, which comprises
[56784] (a) increasing or generating one or more activities selected from the group consisting of monothiol glutaredoxin in an organelle, preferably in plastids or mitochondria, especially in plastids, of a non-human organism or a part thereof, preferably a microorganism, a plant cell, a plant or a part thereof, as compared to a corresponding non-transformed wild type non-human organism or a part thereof; and
[56785] (b) growing the non-human organism or a part thereof under conditions which permit the production of palmitic acid or a composition comprising palmitic acid in said non-human organism or in the culture medium surrounding said non-human organism.

[56786] A further embodiment of the present invention relates to a process for the production of palmitic acid, which comprises
[56787] (a) increasing or generating one or more activities selected from the group consisting of heat shock transcription factor in an organelle, preferably in plastids or mitochondria, especially in plastids, of a non-human organism or a part thereof, preferably a microorganism, a plant cell, a plant or a part thereof, as compared to a corresponding non-transformed wild type non-human organism or a part thereof; and
[56788] (b) growing the non-human organism or a part thereof under conditions which permit the production of palmitic acid or a composition comprising palmitic acid in said non-human organism or in the culture medium surrounding said non-human organism.

[56789] A further embodiment of the present invention relates to a process for the production of palmitic acid, which comprises
[56790] (a) increasing or generating one or more activities selected from the group consisting of protein phosphatase in an organelle, preferably in plastids or mitochondria, especially in plastids, of a non-human organism or a part thereof, preferably a microorganism, a plant cell, a plant or a part thereof, as compared to a corresponding non-transformed wild type non-human organism or a part thereof; and
[56791] (b) growing the non-human organism or a part thereof under conditions which permit the production of palmitic acid or a composition comprising palmitic acid in said non-human organism or in the culture medium surrounding said non-human organism.

[56792] A further embodiment of the present invention relates to a process for the production of palmitic acid, which comprises
[56793] (a) increasing or generating one or more activities selected from the group consisting of glutaredoxin in an organelle, preferably in plastids or mitochondria, especially in plastids, of a non-human organism or a part thereof, preferably a microorganism, a plant cell, a plant or a part thereof, as compared to a corresponding non-transformed wild type non-human organism or a part thereof; and
[56794] (b) growing the non-human organism or a part thereof under conditions which permit the production of palmitic acid or a composition comprising palmitic acid in said non-human organism or in the culture medium surrounding said non-human organism.

[56795] A further embodiment of the present invention relates to a process for the production of palmitic acid, which comprises
[56796] (a) increasing or generating one or more activities selected from the group consisting of calcium-dependent protein kinase in an organelle, preferably in plastids or mitochondria, especially in plastids, of a non-human organism or a part thereof, preferably a microorganism, a plant cell, a plant or a part thereof, as compared to a corresponding non-transformed wild type non-human organism or a part thereof; and
[56797] (b) growing the non-human organism or a part thereof under conditions which permit the production of palmitic acid or a composition comprising palmitic acid in said non-human organism or in the culture medium surrounding said non-human organism.

[56798] A further embodiment of the present invention relates to a process for the production of palmitic acid, which comprises
[56799] (a) increasing or generating one or more activities selected from the group consisting of protein phosphatase in an organelle, preferably in plastids or mitochondria, especially in plastids, of a non-human organism or a part thereof, preferably a microorganism, a plant cell, a plant or a part thereof, as compared to a corresponding non-transformed wild type non-human organism or a part thereof; and
[56800] (b) growing the non-human organism or a part thereof under conditions which permit the production of palmitic acid or a composition comprising palmitic acid in said non-human organism or in the culture medium surrounding said non-human organism.

[56801] A further embodiment of the present invention relates to a process for the production of palmitic acid, which comprises
[56802] (a) increasing or generating one or more activities selected from the group consisting of protein phosphatase in an organelle, preferably in plastids or mitochondria, especially in plastids, of a non-human organism or a part thereof, preferably a microorganism, a plant cell, a plant or a part thereof, as compared to a corresponding non-transformed wild type non-human organism or a part thereof; and
[56803] (b) growing the non-human organism or a part thereof under conditions which permit the production of palmitic acid or a composition comprising palmitic acid in said non-human organism or in the culture medium surrounding said non-human organism.

[56804] A further embodiment of the present invention relates to a process for the production of palmitic acid, which comprises
[56805] (a) increasing or generating one or more activities selected from the group consisting of oxidoreductase in an organelle, preferably in plastids or mitochondria, especially in plastids, of a non-human organism or a part thereof, preferably a microorganism, a plant cell, a plant or a part thereof, as compared to a corresponding non-transformed wild type non-human organism or a part thereof; and
[56806] (b) growing the non-human organism or a part thereof under conditions which permit the production of palmitic acid or a composition comprising palmitic acid in said non-human organism or in the culture medium surrounding said non-human organism.

[56807] A further embodiment of the present invention relates to a process for the production of palmitic acid, which comprises
[56808] (a) increasing or generating one or more activities selected from the group consisting of ThiF family protein in an organelle, preferably in plastids or mitochondria, especially in plastids, of a non-human organism or a part thereof, preferably a microorganism, a plant cell, a plant or a part thereof, as compared to a corresponding non-transformed wild type non-human organism or a part thereof; and
[56809] (b) growing the non-human organism or a part thereof under conditions which permit the production of palmitic acid or a composition comprising palmitic acid in said non-human organism or in the culture medium surrounding said non-human organism.

[56810] A further embodiment of the present invention relates to a process for the production of palmitic acid, which comprises
[56811] (a) increasing or generating one or more activities selected from the group consisting of recombinase A in an organelle, preferably in plastids or mitochondria, especially in plastids, of a non-human organism or a part thereof, preferably a microorganism, a plant cell, a plant or a part thereof, as compared to a corresponding non-transformed wild type non-human organism or a part thereof; and
[56812] (b) growing the non-human organism or a part thereof under conditions which permit the production of palmitic acid or a composition comprising palmitic acid in said non-human organism or in the culture medium surrounding said non-human organism.

[56813] A further embodiment of the present invention relates to a process for the production of palmitic acid, which comprises
[56814] (a) increasing or generating one or more activities selected from the group consisting of NADH-quinone oxidoreductase subunit in an organelle, preferably in plastids or mitochondria, especially in plastids, of a non-human organism or a part thereof, preferably a microorganism, a plant cell, a plant or a part thereof, as compared to a corresponding non-transformed wild type non-human organism or a part thereof; and
[56815] (b) growing the non-human organism or a part thereof under conditions which permit the production of palmitic acid or a composition comprising palmitic acid in said non-human organism or in the culture medium surrounding said non-human organism.

[56816] A further embodiment of the present invention relates to a process for the production of palmitic acid, which comprises
[56817] (a) increasing or generating one or more activities selected from the group consisting of HesB/YadR/YfhF family protein in an organelle, preferably in plastids or mitochondria, especially in plastids, of a non-human organism or a part thereof, preferably a microorganism, a plant cell, a plant or a part thereof, as compared to a corresponding non-transformed wild type non-human organism or a part thereof; and
[56818] (b) growing the non-human organism or a part thereof under conditions which permit the production of palmitic acid or a composition comprising palmitic acid in said non-human organism or in the culture medium surrounding said non-human organism.

[56819] A further embodiment of the present invention relates to a process for the production of palmitic acid, which comprises
[56820] (a) increasing or generating one or more activities selected from the group consisting of peptidyl-prolyl cis-trans isomerase in an organelle, preferably in plastids or mitochondria, especially in plastids, of a non-human organism or a part thereof, preferably a microorganism, a plant cell, a plant or a part thereof, as compared to a corresponding non-transformed wild type non-human organism or a part thereof; and
[56821] (b) growing the non-human organism or a part thereof under conditions which permit the production of palmitic acid or a composition comprising palmitic acid in said non-human organism or in the culture medium surrounding said non-human organism.

[56822] A further embodiment of the present invention relates to a process for the production of palmitic acid, which comprises
[56823] (a) increasing or generating one or more activities selected from the group consisting of purine nucleoside phosphorylase in an organelle, preferably in plastids or mitochondria, especially in plastids, of a non-human organism or a part thereof, preferably a microorganism, a plant cell, a plant or a part thereof, as compared to a corresponding non-transformed wild type non-human organism or a part thereof; and
[56824] (b) growing the non-human organism or a part thereof under conditions which permit the production of palmitic acid or a composition comprising palmitic acid in said non-human organism or in the culture medium surrounding said non-human organism.

[56825] A further embodiment of the present invention relates to a process for the production of palmitic acid, which comprises
[56826] (a) increasing or generating one or more activities selected from the group consisting of b0050-protein in an organelle, preferably in plastids or mitochondria, especially in plastids, of a non-human organism or a part thereof, preferably a microorganism, a plant cell, a plant or a part thereof, as compared to a corresponding non-transformed wild type non-human organism or a part thereof; and
[56827] (b) growing the non-human organism or a part thereof under conditions which permit the production of palmitic acid or a composition comprising palmitic acid in said non-human organism or in the culture medium surrounding said non-human organism.

[56828] A further embodiment of the present invention relates to a process for the production of palmitic acid, which comprises
[56829] (a) increasing or generating one or more activities selected from the group consisting of sodium/proton antiporter in an organelle, preferably in plastids or mitochondria, especially in plastids, of a non-human organism or a part thereof, preferably a microorganism, a plant cell, a plant or a part thereof, as compared to a corresponding non-transformed wild type non-human organism or a part thereof; and
[56830] (b) growing the non-human organism or a part thereof under conditions which permit the production of palmitic acid or a composition comprising palmitic acid in said non-human organism or in the culture medium surrounding said non-human organism.

[56831] A further embodiment of the present invention relates to a process for the production of palmitic acid, which comprises
[56832] (a) increasing or generating one or more activities selected from the group consisting of b1234-protein in an organelle, preferably in plastids or mitochondria, especially in plastids, of a non-human organism or a part thereof, preferably a microorganism, a plant cell, a plant or a part thereof, as compared to a corresponding non-transformed wild type non-human organism or a part thereof; and
[56833] (b) growing the non-human organism or a part thereof under conditions which permit the production of palmitic acid or a composition comprising palmitic acid in said non-human organism or in the culture medium surrounding said non-human organism.

[56834] A further embodiment of the present invention relates to a process for the production of palmitic acid, which comprises
[56835] (a) increasing or generating one or more activities selected from the group consisting of b1248-protein in an organelle, preferably in plastids or mitochondria, especially in plastids, of a non-human organism or a part thereof, preferably a microorganism, a plant cell, a plant or a part thereof, as compared to a corresponding non-transformed wild type non-human organism or a part thereof; and
[56836] (b) growing the non-human organism or a part thereof under conditions which permit the production of palmitic acid or a composition comprising palmitic acid in said non-human organism or in the culture medium surrounding said non-human organism.

[56837] A further embodiment of the present invention relates to a process for the production of palmitic acid, which comprises
[56838] (a) increasing or generating one or more activities selected from the group consisting of b1330-protein in an organelle, preferably in plastids or mitochondria, especially in plastids, of a non-human organism or a part thereof, preferably a microorganism, a plant cell, a plant or a part thereof, as compared to a corresponding non-transformed wild type non-human organism or a part thereof; and
[56839] (b) growing the non-human organism or a part thereof under conditions which permit the production of palmitic acid or a composition comprising palmitic acid in said non-human organism or in the culture medium surrounding said non-human organism.

[56840] A further embodiment of the present invention relates to a process for the production of palmitic acid, which comprises
[56841] (a) increasing or generating one or more activities selected from the group consisting of lipoprotein precursor in an organelle, preferably in plastids or mitochondria, especially in plastids, of a non-human organism or a part thereof, preferably a microorganism, a plant cell, a plant or a part thereof, as compared to a corresponding non-transformed wild type non-human organism or a part thereof; and
[56842] (b) growing the non-human organism or a part thereof under conditions which permit the production of palmitic acid or a composition comprising palmitic acid in said non-human organism or in the culture medium surrounding said non-human organism.

[56843] A further embodiment of the present invention relates to a process for the production of palmitic acid, which comprises
[56844] (a) increasing or generating one or more activities selected from the group consisting of Fe—S subunit of oxidoreductase in an organelle, preferably in plastids or mitochondria, especially in plastids, of a non-human organism or a part thereof, preferably a microorganism, a plant cell, a plant or a part thereof, as compared to a corresponding non-transformed wild type non-human organism or a part thereof; and
[56845] (b) growing the non-human organism or a part thereof under conditions which permit the production of palmitic acid or a composition comprising palmitic acid in said non-human organism or in the culture medium surrounding said non-human organism.

[56846] A further embodiment of the present invention relates to a process for the production of palmitic acid, which comprises
[56847] (a) increasing or generating one or more activities selected from the group consisting of acid shock protein in an organelle, preferably in plastids or mitochondria, especially in plastids, of a non-human organism or a part thereof, preferably a microorganism, a plant cell, a plant or a part thereof, as compared to a corresponding non-transformed wild type non-human organism or a part thereof; and
[56848] (b) growing the non-human organism or a part thereof under conditions which permit the production of palmitic acid or a composition comprising palmitic acid in said non-human organism or in the culture medium surrounding said non-human organism.

[56849] A further embodiment of the present invention relates to a process for the production of palmitic acid, which comprises
[56850] (a) increasing or generating one or more activities selected from the group consisting of b1670-protein in an organelle, preferably in plastids or mitochondria, especially in plastids, of a non-human organism or a part thereof, preferably a microorganism, a plant cell, a plant or a part thereof, as compared to a corresponding non-transformed wild type non-human organism or a part thereof; and
[56851] (b) growing the non-human organism or a part thereof under conditions which permit the production of palmitic acid or a composition comprising palmitic acid in said non-human organism or in the culture medium surrounding said non-human organism.

[56852] A further embodiment of the present invention relates to a process for the production of palmitic acid, which comprises
[56853] (a) increasing or generating one or more activities selected from the group consisting of b1837-protein in an organelle, preferably in plastids or mitochondria, especially in plastids, of a non-human organism or a part thereof, preferably a microorganism, a plant cell, a plant or a part thereof, as compared to a corresponding non-transformed wild type non-human organism or a part thereof; and
[56854] (b) growing the non-human organism or a part thereof under conditions which permit the production of palmitic acid or a composition comprising palmitic acid in said non-human organism or in the culture medium surrounding said non-human organism.

[56855] A further embodiment of the present invention relates to a process for the production of palmitic acid, which comprises
[56856] (a) increasing or generating one or more activities selected from the group consisting of b2032-protein in an organelle, preferably in plastids or mitochondria, especially in plastids, of a non-human organism or a part thereof, preferably a microorganism, a plant cell, a plant or a part thereof, as compared to a corresponding non-transformed wild type non-human organism or a part thereof; and
[56857] (b) growing the non-human organism or a part thereof under conditions which permit the production of palmitic acid or a composition comprising palmitic acid in said non-human organism or in the culture medium surrounding said non-human organism.

[56858] A further embodiment of the present invention relates to a process for the production of palmitic acid, which comprises
[56859] (a) increasing or generating one or more activities selected from the group consisting of colanic acid biosynthesis protein in an organelle, preferably in plastids or mitochondria, especially in plastids, of a non-human organism or a part thereof, preferably a microorganism, a plant cell, a plant or a part thereof, as compared to a corresponding non-transformed wild type non-human organism or a part thereof; and
[56860] (b) growing the non-human organism or a part thereof under conditions which permit the production of palmitic acid or a composition comprising palmitic acid in said non-human organism or in the culture medium surrounding said non-human organism.

[56861] A further embodiment of the present invention relates to a process for the production of palmitic acid, which comprises
[56862] (a) increasing or generating one or more activities selected from the group consisting of b2099-protein in an organelle, preferably in plastids or mitochondria, especially in plastids, of a non-human organism or a part thereof, preferably a microorganism, a plant cell, a plant or a part thereof, as compared to a corresponding non-transformed wild type non-human organism or a part thereof; and
[56863] (b) growing the non-human organism or a part thereof under conditions which permit the production of palmitic acid or a composition comprising palmitic acid in said non-human organism or in the culture medium surrounding said non-human organism.

[56864] A further embodiment of the present invention relates to a process for the production of palmitic acid, which comprises
[56865] (a) increasing or generating one or more activities selected from the group consisting of b2107-protein in an organelle, preferably in plastids or mitochondria, especially in plastids, of a non-human organism or a part thereof, preferably a microorganism, a plant cell, a plant or a part thereof, as compared to a corresponding non-transformed wild type non-human organism or a part thereof; and
[56866] (b) growing the non-human organism or a part thereof under conditions which permit the production of palmitic acid or a composition comprising palmitic acid in said non-human organism or in the culture medium surrounding said non-human organism.

[56867] A further embodiment of the present invention relates to a process for the production of palmitic acid, which comprises
[56868] (a) increasing or generating one or more activities selected from the group consisting of b2399-protein in an organelle, preferably in plastids or mitochondria, especially in plastids, of a non-human organism or a part thereof, preferably a microorganism, a plant cell, a plant or a part thereof, as compared to a corresponding non-transformed wild type non-human organism or a part thereof; and
[56869] (b) growing the non-human organism or a part thereof under conditions which permit the production of palmitic acid or a composition comprising palmitic acid in said non-human organism or in the culture medium surrounding said non-human organism.

[56870] A further embodiment of the present invention relates to a process for the production of palmitic acid, which comprises
[56871] (a) increasing or generating one or more activities selected from the group consisting of ethanolamine utilization protein in an organelle, preferably in plastids or mitochondria, especially in plastids, of a non-human organism or a part thereof, preferably a microorganism, a plant cell, a plant or a part thereof, as compared to a corresponding non-transformed wild type non-human organism or a part thereof; and
[56872] (b) growing the non-human organism or a part thereof under conditions which permit the production of palmitic acid or a composition comprising palmitic acid in said non-human organism or in the culture medium surrounding said non-human organism.

[56873] A further embodiment of the present invention relates to a process for the production of palmitic acid, which comprises
[56874] (a) increasing or generating one or more activities selected from the group consisting of b2682-protein in an organelle, preferably in plastids or mitochondria, especially in plastids, of a non-human organism or a part thereof, preferably a microorganism, a plant cell, a plant or a part thereof, as compared to a corresponding non-transformed wild type non-human organism or a part thereof; and
[56875] (b) growing the non-human organism or a part thereof under conditions which permit the production of palmitic acid or a composition comprising palmitic acid in said non-human organism or in the culture medium surrounding said non-human organism.

[56876] A further embodiment of the present invention relates to a process for the production of palmitic acid, which comprises
[56877] (a) increasing or generating one or more activities selected from the group consisting of 2-C-methyl-D-erythritol 4-phosphate cytidylyltransferase in an organelle, preferably in plastids or mitochondria, especially in plastids, of a non-human organism or a part thereof, preferably a microorganism, a plant cell, a plant or a part thereof, as compared to a corresponding non-transformed wild type non-human organism or a part thereof; and
[56878] (b) growing the non-human organism or a part thereof under conditions which permit the production of palmitic acid or a composition comprising palmitic acid in said non-human organism or in the culture medium surrounding said non-human organism.

[56879] A further embodiment of the present invention relates to a process for the production of palmitic acid, which comprises
[56880] (a) increasing or generating one or more activities selected from the group consisting of flavodoxin in an organelle, preferably in plastids or mitochondria, especially in plastids, of a non-human organism or a part thereof, preferably a microorganism, a plant cell, a plant or a part thereof, as compared to a corresponding non-transformed wild type non-human organism or a part thereof; and
[56881] (b) growing the non-human organism or a part thereof under conditions which permit the production of palmitic acid or a composition comprising palmitic acid in said non-human organism or in the culture medium surrounding said non-human organism.

[56882] A further embodiment of the present invention relates to a process for the production of palmitic acid, which comprises
[56883] (a) increasing or generating one or more activities selected from the group consisting of AAS bifunctional protein in an organelle, preferably in plastids or mitochondria, especially in plastids, of a non-human organism or a part thereof, preferably a microorganism, a plant cell, a plant or a part thereof, as compared to a corresponding non-transformed wild type non-human organism or a part thereof; and
[56884] (b) growing the non-human organism or a part thereof under conditions which permit the production of palmitic acid or a composition comprising palmitic acid in said non-human organism or in the culture medium surrounding said non-human organism.

[56885] A further embodiment of the present invention relates to a process for the production of palmitic acid, which comprises
[56886] (a) increasing or generating one or more activities selected from the group consisting of b2849-protein in an organelle, preferably in plastids or mitochondria, especially in plastids, of a non-human organism or a part thereof, preferably a microorganism, a plant cell, a plant or a part thereof, as compared to a corresponding non-transformed wild type non-human organism or a part thereof; and
[56887] (b) growing the non-human organism or a part thereof under conditions which permit the production of palmitic acid or a composition comprising palmitic acid in said non-human organism or in the culture medium surrounding said non-human organism.

[56888] A further embodiment of the present invention relates to a process for the production of palmitic acid, which comprises
[56889] (a) increasing or generating one or more activities selected from the group consisting of b3814-protein in an organelle, preferably in plastids or mitochondria, especially in plastids, of a non-human organism or a part thereof, preferably a microorganism, a plant cell, a plant or a part thereof, as compared to a corresponding non-transformed wild type non-human organism or a part thereof; and
[56890] (b) growing the non-human organism or a part thereof under conditions which permit the production of palmitic acid or a composition comprising palmitic acid in said non-human organism or in the culture medium surrounding said non-human organism.

[56891] A further embodiment of the present invention relates to a process for the production of palmitic acid, which comprises
[56892] (a) increasing or generating one or more activities selected from the group consisting of threonine efflux protein in an organelle, preferably in plastids or mitochondria, especially in plastids, of a non-human organism or a part thereof, preferably a microorganism, a plant cell, a plant or a part thereof, as compared to a corresponding non-transformed wild type non-human organism or a part thereof; and
[56893] (b) growing the non-human organism or a part thereof under conditions which permit the production of palmitic acid or a composition comprising palmitic acid in said non-human organism or in the culture medium surrounding said non-human organism.

[56894] A further embodiment of the present invention relates to a process for the production of palmitic acid, which comprises
[56895] (a) increasing or generating one or more activities selected from the group consisting of 3-ketoacyl-CoA thiolase in an organelle, preferably in plastids or mitochondria, especially in plastids, of a non-human organism or a part thereof, preferably a microorganism, a plant cell, a plant or a part thereof, as compared to a corresponding non-transformed wild type non-human organism or a part thereof; and
[56896] (b) growing the non-human organism or a part thereof under conditions which permit the production of palmitic acid or a composition comprising palmitic acid in said non-human organism or in the culture medium surrounding said non-human organism.

[56897] A further embodiment of the present invention relates to a process for the production of palmitic acid, which comprises
[56898] (a) increasing or generating one or more activities selected from the group consisting of glutaredoxin in an organelle, preferably in plastids or mitochondria, especially in plastids, of a non-human organism or a part thereof, preferably a microorganism, a plant cell, a plant or a part thereof, as compared to a corresponding non-transformed wild type non-human organism or a part thereof; and
[56899] (b) growing the non-human organism or a part thereof under conditions which permit the production of palmitic acid or a composition comprising palmitic acid in said non-human organism or in the culture medium surrounding said non-human organism.

[56900] A further embodiment of the present invention relates to a process for the production of palmitic acid, which comprises
[56901] (a) increasing or generating one or more activities selected from the group consisting of transcription factor in an organelle, preferably in plastids or mitochondria, especially in plastids, of a non-human organism or a part thereof, preferably a microorganism, a plant cell, a plant or a part thereof, as compared to a corresponding non-transformed wild type non-human organism or a part thereof; and
[56902] (b) growing the non-human organism or a part thereof under conditions which permit the production of palmitic acid or a composition comprising palmitic acid in said non-human organism or in the culture medium surrounding said non-human organism.

[56903] A further embodiment of the present invention relates to a process for the production of palmitic acid, which comprises
[56904] (a) increasing or generating one or more activities selected from the group consisting of bifunctional protein (phosphoribosyltransferase and regulatory protein) in an organelle, preferably in plastids or mitochondria, especially in plastids, of a non-human organism or a part thereof, preferably a microorganism, a plant cell, a plant or a part thereof, as compared to a corresponding non-transformed wild type non-human organism or a part thereof; and
[56905] (b) growing the non-human organism or a part thereof under conditions which permit the production of palmitic acid or a composition comprising palmitic acid in said non-human organism or in the culture medium surrounding said non-human organism.

[56906] A further embodiment of the present invention relates to a process for the production of palmitic acid, which comprises
[56907] (a) increasing or generating one or more activities selected from the group consisting of branched chain amino acid ABC transporter ATP-binding protein in an organelle, preferably in plastids or mitochondria, especially in plastids, of a non-human organism or a part thereof, preferably a microorganism, a plant cell, a plant or a part thereof, as compared to a corresponding non-transformed wild type non-human organism or a part thereof; and
[56908] (b) growing the non-human organism or a part thereof under conditions which permit the production of palmitic acid or a composition comprising palmitic acid in said non-human organism or in the culture medium surrounding said non-human organism.

[56909] A further embodiment of the present invention relates to a process for the production of palmitic acid, which comprises
[56910] (a) increasing or generating one or more activities selected from the group consisting of carbon dioxide concentrating mechanism protein in an organelle, preferably in plastids or mitochondria, especially in plastids, of a non-human organism or a part thereof, preferably a microorganism, a plant cell, a plant or a part thereof, as compared to a corresponding non-transformed wild type non-human organism or a part thereof; and
[56911] (b) growing the non-human organism or a part thereof under conditions which permit the production of palmitic acid or a composition comprising palmitic acid in said non-human organism or in the culture medium surrounding said non-human organism.

[56912] A further embodiment of the present invention relates to a process for the production of palmitic acid, which comprises
[56913] (a) increasing or generating one or more activities selected from the group consisting of sll1032-protein in an organelle, preferably in plastids or mitochondria, especially in plastids, of a non-human organism or a part thereof, preferably a microorganism, a plant cell, a plant or a part thereof, as compared to a corresponding non-transformed wild type non-human organism or a part thereof; and
[56914] (b) growing the non-human organism or a part thereof under conditions which permit the production of palmitic acid or a composition comprising palmitic acid in said non-human organism or in the culture medium surrounding said non-human organism.

[56915] A further embodiment of the present invention relates to a process for the production of palmitic acid, which comprises
[56916] (a) increasing or generating one or more activities selected from the group consisting of phosphoribosylformyl glycinamidine synthase subunit in an organelle, preferably in plastids or mitochondria, especially in plastids, of a non-human organism or a part thereof, preferably a microorganism, a plant cell, a plant or a part thereof, as compared to a corresponding non-transformed wild type non-human organism or a part thereof; and
[56917] (b) growing the non-human organism or a part thereof under conditions which permit the production of palmitic acid or a composition comprising palmitic acid in said non-human organism or in the culture medium surrounding said non-human organism.

[56918] A further embodiment of the present invention relates to a process for the production of palmitic acid, which comprises
[56919] (a) increasing or generating one or more activities selected from the group consisting of nitrate/nitrite transport protein in an organelle, preferably in plastids or mitochondria, especially in plastids, of a non-human organism or a part thereof, preferably a microorganism, a plant cell, a plant or a part thereof, as compared to a corresponding non-transformed wild type non-human organism or a part thereof; and
[56920] (b) growing the non-human organism or a part thereof under conditions which permit the production of palmitic acid or a composition comprising palmitic acid in said non-human organism or in the culture medium surrounding said non-human organism.

[56921] A further embodiment of the present invention relates to a process for the production of palmitic acid, which comprises
[56922] (a) increasing or generating one or more activities selected from the group consisting of carbamoyl-phosphate synthase subunit in an organelle, preferably in plastids or mitochondria, especially in plastids, of a non-human organism or a part thereof, preferably a microorganism, a plant cell, a plant or a part thereof, as compared to a corresponding non-transformed wild type non-human organism or a part thereof; and
[56923] (b) growing the non-human organism or a part thereof under conditions which permit the production of palmitic acid or a composition comprising palmitic acid in said non-human organism or in the culture medium surrounding said non-human organism.

[56924] A further embodiment of the present invention relates to a process for the production of palmitic acid, which comprises
[56925] (a) increasing or generating one or more activities selected from the group consisting of glutathione S-transferase in an organelle, preferably in plastids or mitochondria, especially in plastids, of a non-human organism or a part thereof, preferably a microorganism, a plant cell, a plant or a part thereof, as compared to a corresponding non-transformed wild type non-human organism or a part thereof; and
[56926] (b) growing the non-human organism or a part thereof under conditions which permit the production of palmitic acid or a composition comprising palmitic acid in said non-human organism or in the culture medium surrounding said non-human organism.

[56927] A further embodiment of the present invention relates to a process for the production of palmitic acid, which comprises
[56928] (a) increasing or generating one or more activities selected from the group consisting of ABC metal ion transporter substrate-binding protein in an organelle, preferably in plastids or mitochondria, especially in plastids, of a non-human organism or a part thereof, preferably a microorganism, a plant cell, a plant or a part thereof, as compared to a corresponding non-transformed wild type non-human organism or a part thereof; and
[56929] (b) growing the non-human organism or a part thereof under conditions which permit the production of palmitic acid or a composition comprising palmitic acid in said non-human organism or in the culture medium surrounding said non-human organism.

[56930] A further embodiment of the present invention relates to a process for the production of palmitic acid, which comprises
[56931] (a) increasing or generating one or more activities selected from the group consisting of acyl transferase in an organelle, preferably in plastids or mitochondria, especially in plastids, of a non-human organism or a part thereof, preferably a microorganism, a plant cell, a plant or a part thereof, as compared to a corresponding non-transformed wild type non-human organism or a part thereof; and
[56932] (b) growing the non-human organism or a part thereof under conditions which permit the production of palmitic acid or a composition comprising palmitic acid in said non-human organism or in the culture medium surrounding said non-human organism.

[56933] A further embodiment of the present invention relates to a process for the production of palmitic acid, which comprises
[56934] (a) increasing or generating one or more activities selected from the group consisting of coproporphyrinogen III oxidase in an organelle, preferably in plastids or mitochondria, especially in plastids, of a non-human organism or a part thereof, preferably a microorganism, a plant cell, a plant or a part thereof, as compared to a corresponding non-transformed wild type non-human organism or a part thereof; and
[56935] (b) growing the non-human organism or a part thereof under conditions which permit the production of palmitic acid or a composition comprising palmitic acid in said non-human organism or in the culture medium surrounding said non-human organism.

[56936] A further embodiment of the present invention relates to a process for the production of palmitic acid, which comprises
[56937] (a) increasing or generating one or more activities selected from the group consisting of cation-transporting ATPase in an organelle, preferably in plastids or mitochondria, especially in plastids, of a non-human organism or a part thereof, preferably a microorganism, a plant cell, a plant or a part thereof, as compared to a corresponding non-transformed wild type non-human organism or a part thereof; and
[56938] (b) growing the non-human organism or a part thereof under conditions which permit the production of palmitic acid or a composition comprising palmitic acid in said non-human organism or in the culture medium surrounding said non-human organism.

[56939] A further embodiment of the present invention relates to a process for the production of palmitic acid, which comprises
[56940] (a) increasing or generating one or more activities selected from the group consisting of permease protein of ABC transporter in an organelle, preferably in plastids or mitochondria, especially in plastids, of a non-human organism or a part thereof, preferably a microorganism, a plant cell, a plant or a part thereof, as compared to a corresponding non-transformed wild type non-human organism or a part thereof; and
[56941] (b) growing the non-human organism or a part thereof under conditions which permit the production of palmitic acid or a composition comprising palmitic acid in said non-human organism or in the culture medium surrounding said non-human organism.

[56942] A further embodiment of the present invention relates to a process for the production of palmitic acid, which comprises
[56943] (a) increasing or generating one or more activities selected from the group consisting of aromatic acid decarboxylase in an organelle, preferably in plastids or mitochondria, especially in plastids, of a non-human organism or a part thereof, preferably a microorganism, a plant cell, a plant or a part thereof, as compared to a corresponding non-transformed wild type non-human organism or a part thereof; and
[56944] (b) growing the non-human organism or a part thereof under conditions which permit the production of palmitic acid or a composition comprising palmitic acid in said non-human organism or in the culture medium surrounding said non-human organism.

[56945] A further embodiment of the present invention relates to a process for the production of palmitic acid, which comprises
[56946] (a) increasing or generating one or more activities selected from the group consisting of phosphate import ATP-binding protein in an organelle, preferably in plastids or mitochondria, especially in plastids, of a non-human organism or a part thereof, preferably a microorganism, a plant cell, a plant or a part thereof, as compared to a corresponding non-transformed wild type non-human organism or a part thereof; and
[56947] (b) growing the non-human organism or a part thereof under conditions which permit the production of palmitic acid or a composition comprising palmitic acid in said non-human organism or in the culture medium surrounding said non-human organism.

[56948] A further embodiment of the present invention relates to a process for the production of palmitic acid, which comprises
[56949] (a) increasing or generating one or more activities selected from the group consisting of arginine decarboxylase in an organelle, preferably in plastids or mitochondria, especially in plastids, of a non-human organism or a part thereof, preferably a microorganism, a plant cell, a plant or a part thereof, as compared to a corresponding non-transformed wild type non-human organism or a part thereof; and
[56950] (b) growing the non-human organism or a part thereof under conditions which permit the production of palmitic acid or a composition comprising palmitic acid in said non-human organism or in the culture medium surrounding said non-human organism.

[56951] A further embodiment of the present invention relates to a process for the production of palmitic acid, which comprises
[56952] (a) increasing or generating one or more activities selected from the group consisting of phosphoadenosine phosphosulfate reductase in an organelle, preferably in plastids or mitochondria, especially in plastids, of a non-human organism or a part thereof, preferably a microorganism, a plant cell, a plant or a part thereof, as compared to a corresponding non-transformed wild type non-human organism or a part thereof; and
[56953] (b) growing the non-human organism or a part thereof under conditions which permit the production of palmitic acid or a composition comprising palmitic acid in said non-human organism or in the culture medium surrounding said non-human organism.

[56954] A further embodiment of the present invention relates to a process for the production of palmitic acid, which comprises
[56955] (a) increasing or generating one or more activities selected from the group consisting of threonine dehydratase in an organelle, preferably in plastids or mitochondria, especially in plastids, of a non-human organism or a part thereof, preferably a microorganism, a plant cell, a plant or a part thereof, as compared to a corresponding non-transformed wild type non-human organism or a part thereof; and
[56956] (b) growing the non-human organism or a part thereof under conditions which permit the production of palmitic acid or a composition comprising palmitic acid in said non-human organism or in the culture medium surrounding said non-human organism.

[56957] A further embodiment of the present invention relates to a process for the production of palmitic acid, which comprises
[56958] (a) increasing or generating one or more activities selected from the group consisting of metal-dependent hydrolase in an organelle, preferably in plastids or mitochondria, especially in plastids, of a non-human organism or a part thereof, preferably a microorganism, a plant cell, a plant or a part thereof, as compared to a corresponding non-transformed wild type non-human organism or a part thereof; and
[56959] (b) growing the non-human organism or a part thereof under conditions which permit the production of palmitic acid or a composition comprising palmitic acid in said non-human organism or in the culture medium surrounding said non-human organism.

[56960] A further embodiment of the present invention relates to a process for the production of palmitic acid, which comprises
[56961] (a) increasing or generating one or more activities selected from the group consisting of homocitrate synthase in an organelle, preferably in plastids or mitochondria, especially in plastids, of a non-human organism or a part thereof, preferably a microorganism, a plant cell, a plant or a part thereof, as compared to a corresponding non-transformed wild type non-human organism or a part thereof; and
[56962] (b) growing the non-human organism or a part thereof under conditions which permit the production of palmitic acid or a composition comprising palmitic acid in said non-human organism or in the culture medium surrounding said non-human organism.

[56963] A further embodiment of the present invention relates to a process for the production of palmitic acid, which comprises
[56964] (a) increasing or generating one or more activities selected from the group consisting of acid phosphatase precursor in an organelle, preferably in plastids or mitochondria, especially in plastids, of a non-human organism or a part thereof, preferably a microorganism, a plant cell, a plant or a part thereof, as compared to a corresponding non-transformed wild type non-human organism or a part thereof; and
[56965] (b) growing the non-human organism or a part thereof under conditions which permit the production of palmitic acid or a composition comprising palmitic acid in said non-human organism or in the culture medium surrounding said non-human organism.

[56966] A further embodiment of the present invention relates to a process for the production of palmitic acid, which comprises
[56967] (a) increasing or generating one or more activities selected from the group consisting of glycerol-3-phosphate dehydrogenase in an organelle, preferably in plastids or mitochondria, especially in plastids, of a non-human organism or a part thereof, preferably a microorganism, a plant cell, a plant or a part thereof, as compared to a corresponding non-transformed wild type non-human organism or a part thereof; and
[56968] (b) growing the non-human organism or a part thereof under conditions which permit the production of palmitic acid or a composition comprising palmitic acid in said non-human organism or in the culture medium surrounding said non-human organism.

[56969] A further embodiment of the present invention relates to a process for the production of palmitic acid, which comprises
[56970] (a) increasing or generating one or more activities selected from the group consisting of protein kinase in an organelle, preferably in plastids or mitochondria, especially in plastids, of a non-human organism or a part thereof, preferably a microorganism, a plant cell, a plant or a part thereof, as compared to a corresponding non-transformed wild type non-human organism or a part thereof; and
[56971] (b) growing the non-human organism or a part thereof under conditions which permit the production of palmitic acid or a composition comprising palmitic acid in said non-human organism or in the culture medium surrounding said non-human organism.

[56972] A further embodiment of the present invention relates to a process for the production of palmitic acid, which comprises
[56973] (a) increasing or generating one or more activities selected from the group consisting of F-box protein in an organelle, preferably in plastids or mitochondria, especially in plastids, of a non-human organism or a part thereof, preferably a microorganism, a plant cell, a plant or a part thereof, as compared to a corresponding non-transformed wild type non-human organism or a part thereof; and
[56974] (b) growing the non-human organism or a part thereof under conditions which permit the production of palmitic acid or a composition comprising palmitic acid in said non-human organism or in the culture medium surrounding said non-human organism.

[56975] A further embodiment of the present invention relates to a process for the production of palmitic acid, which comprises
[56976] (a) increasing or generating one or more activities selected from the group consisting of DnaJ-like chaperone in an organelle, preferably in plastids or mitochondria, especially in plastids, of a non-human organism or a part thereof, preferably a microorganism, a plant cell, a plant or a part thereof, as compared to a corresponding non-transformed wild type non-human organism or a part thereof; and
[56977] (b) growing the non-human organism or a part thereof under conditions which permit the production of palmitic acid or a composition comprising palmitic acid in said non-human organism or in the culture medium surrounding said non-human organism.

[56978] A further embodiment of the present invention relates to a process for the production of palmitic acid, which comprises
[56979] (a) increasing or generating one or more activities selected from the group consisting of aconitate hydratase in an organelle, preferably in plastids or mitochondria, especially in plastids, of a non-human organism or a part thereof, preferably a microorganism, a plant cell, a plant or a part thereof, as compared to a corresponding non-transformed wild type non-human organism or a part thereof; and
[56980] (b) growing the non-human organism or a part thereof under conditions which permit the production of palmitic acid or a composition comprising palmitic acid in said non-human organism or in the culture medium surrounding said non-human organism.

[56981] A further embodiment of the present invention relates to a process for the production of palmitic acid, which comprises
[56982] (a) increasing or generating one or more activities selected from the group consisting of ymr013c-protein in an organelle, preferably in plastids or mitochondria, especially in plastids, of a non-human organism or a part thereof, preferably a microorganism, a plant cell, a plant or a part thereof, as compared to a corresponding non-transformed wild type non-human organism or a part thereof; and
[56983] (b) growing the non-human organism or a part thereof under conditions which permit the production of palmitic acid or a composition comprising palmitic acid in said non-human organism or in the culture medium surrounding said non-human organism.

[56984] A further embodiment of the present invention relates to a process for the production of palmitic acid, which comprises
[56985] (a) increasing or generating one or more activities selected from the group consisting of ATPase epsilon subunit in an organelle, preferably in plastids or mitochondria, especially in plastids, of a non-human organism or a part thereof, preferably a microorganism, a plant cell, a plant or a part thereof, as compared to a corresponding non-transformed wild type non-human organism or a part thereof; and
[56986] (b) growing the non-human organism or a part thereof under conditions which permit the production of palmitic acid or a composition comprising palmitic acid in said non-human organism or in the culture medium surrounding said non-human organism.

[56987] A further embodiment of the present invention relates to a process for the production of palmitic acid, which comprises
[56988] (a) increasing or generating one or more activities selected from the group consisting of 49747384_SOYBEAN-protein in an organelle, preferably in plastids or mitochondria, especially in plastids, of a non-human organism or a part thereof, preferably a microorganism, a plant cell, a plant or a part thereof, as compared to a corresponding non-transformed wild type non-human organism or a part thereof; and
[56989] (b) growing the non-human organism or a part thereof under conditions which permit the production of palmitic acid or a composition comprising palmitic acid in said non-human organism or in the culture medium surrounding said non-human organism.

[56990] A further embodiment of the present invention relates to a process for the production of palmitic acid, which comprises
[56991] (a) increasing or generating one or more activities selected from the group consisting of glucose-6-phosphate 1-dehydrogenase in an organelle, preferably in plastids or mitochondria, especially in plastids, of a non-human organism or a part thereof, preferably a microorganism, a plant cell, a plant or a part thereof, as compared to a corresponding non-transformed wild type non-human organism or a part thereof; and
[56992] (b) growing the non-human organism or a part thereof under conditions which permit the production of palmitic acid or a composition comprising palmitic acid in said non-human organism or in the culture medium surrounding said non-human organism.

[56993] A further embodiment of the present invention relates to a process for the production of palmitic acid, which comprises
[56994] (a1) increasing or generating the activity of a polypeptide comprising a polypeptide as depicted in the respective line in column 5 or 8 of Table II, application no. 11, or a homolog or fragment thereof, a consensus sequence or at least one polypeptide motif as depicted in column 8 of Table IV, application no. 11; or
[56995] increasing or generating the activity of an expression product of one or more nucleic acid molecule(s) comprising a polynucleotide as depicted in the respective line in column 5 or 8 of Table I, application no. 11, preferably the coding region thereof, or a homolog or a fragment thereof;
[56996] in an organelle, preferably in plastids or mitochondria, especially in plastids, in a non-human organism or a part thereof; preferably a microorganism, a plant cell, a plant or a part thereof, as compared to a corresponding non-transformed wild type non-human organism or a part thereof; or
[56997] (a2) increasing or generating the activity of a polypeptide comprising a polypeptide as depicted in the respective line in column 5 or 8 of Table II, application no. 11, or a homolog or a fragment thereof, a consensus sequence or at least one polypeptide motif as depicted in the respective line in column 8 of Table IV, application no. 11, which is joined to a transit peptide; or
[56998] increasing or generating the activity of an expression product of one or more nucleic acid molecule(s) comprising a polynucleotide as depicted in the respective line in column 5 or 8 of Table I, application no. 11, preferably the coding region thereof, or a homolog or a fragment thereof, which is joined to a nucleic acid sequence encoding an organelle localization sequence, preferably a plastid or a mitochondrion localization sequence, especially a plastid localization sequence;
[56999] in a non-human organism or a part thereof; preferably a microorganism, a plant cell, a plant or a part thereof, as compared to a corresponding non-transformed wild type non-human organism or a part thereof; or
[57000] (a3) increasing or generating the activity of a polypeptide comprising a polypeptide as depicted in the respective line in column 5 or 8 of Table II, application no. 11, or a homolog or a fragment thereof, a consensus sequence or at least one polypeptide motif as depicted in the respective line in column 8 of Table IV, application no. 11; or increasing or generating the activity of an expression product of one or more nucleic acid molecule(s) comprising a polynucleotide as depicted in the respective line in column 5 or 8 of Table I, application no. 11, preferably the coding region thereof, or a homolog or a fragment thereof;
[57001] in an organelle, preferably in plastids or mitochondria, especially in plastids, in a non-human organism or a part thereof; preferably a microorganism, a plant cell, a plant or a part thereof, through transformation of the organelle, as compared to a corresponding non-transformed wild type non-human organism or a part thereof;
[57002] and
[57003] (b) growing the non-human organism under conditions which permit the production of palmitic acid, or a composition comprising palmitic acid in said non-human organism or in the culture medium surrounding said non-human organism.

[57004] Accordingly, the present invention relates to a process for the production of palmitic acid, which comprises
[57005] (a) increasing or generating the activity of a protein phosphatase in the cytosol of a cell of a non-human organism or a part thereof, preferably a microorganism, a plant cell, a plant or a part thereof, as compared to a corresponding non-transformed wild type non-human organism or a part thereof; and
[57006] (b) growing the non-human organism or a part thereof under conditions which permit the production of palmitic acid or a composition comprising palmitic acid in said non-human organism or in the culture medium surrounding said non-human organism.

[57007] Accordingly, the present invention relates to a process for the production of palmitic acid, which comprises
[57008] (a) increasing or generating the activity of a chlorophyllase in the cytosol of a cell of a non-human organism or a part thereof, preferably a microorganism, a plant cell, a plant or a part thereof, as compared to a corresponding non-transformed wild type non-human organism or a part thereof; and
[57009] (b) growing the non-human organism or a part thereof under conditions which permit the production of palmitic acid or a composition comprising palmitic acid in said non-human organism or in the culture medium surrounding said non-human organism.

[57010] Accordingly, the present invention relates to a process for the production of palmitic acid, which comprises
[57011] (a) increasing or generating the activity of a At1g19800-protein in the cytosol of a cell of a non-human organism or a part thereof, preferably a microorganism, a plant cell, a plant or a part thereof, as compared to a corresponding non-transformed wild type non-human organism or a part thereof; and
[57012] (b) growing the non-human organism or a part thereof under conditions which permit the production of palmitic acid or a composition comprising palmitic acid in said non-human organism or in the culture medium surrounding said non-human organism.

[57013] Accordingly, the present invention relates to a process for the production of palmitic acid, which comprises
[57014] (a) increasing or generating the activity of a At1g23110-protein in the cytosol of a cell of a non-human organism or a part thereof, preferably a microorganism, a plant cell, a plant or a part thereof, as compared to a corresponding non-transformed wild type non-human organism or a part thereof; and
[57015] (b) growing the non-human organism or a part thereof under conditions which permit the production of palmitic acid or a composition comprising palmitic acid in said non-human organism or in the culture medium surrounding said non-human organism.

[57016] Accordingly, the present invention relates to a process for the production of palmitic acid, which comprises
[57017] (a) increasing or generating the activity of a transcription factor in the cytosol of a cell of a non-human organism or a part thereof, preferably a microorganism, a plant cell, a plant or a part thereof, as compared to a corresponding non-transformed wild type non-human organism or a part thereof; and
[57018] (b) growing the non-human organism or a part thereof under conditions which permit the production of palmitic acid or a composition comprising palmitic acid in said non-human organism or in the culture medium surrounding said non-human organism.

[57019] Accordingly, the present invention relates to a process for the production of palmitic acid, which comprises
[57020] (a) increasing or generating the activity of a protein phosphatase in the cytosol of a cell of a non-human organism or a part thereof, preferably a microorganism, a plant cell, a plant or a part thereof, as compared to a corresponding non-transformed wild type non-human organism or a part thereof; and
[57021] (b) growing the non-human organism or a part thereof under conditions which permit the production of palmitic acid or a composition comprising palmitic acid in said non-human organism or in the culture medium surrounding said non-human organism.

[57022] Accordingly, the present invention relates to a process for the production of palmitic acid, which comprises
[57023] (a) increasing or generating the activity of a At2g45420-protein in the cytosol of a cell of a non-human organism or a part thereof, preferably a microorganism, a plant cell, a plant or a part thereof, as compared to a corresponding non-transformed wild type non-human organism or a part thereof; and
[57024] (b) growing the non-human organism or a part thereof under conditions which permit the production of palmitic acid or a composition comprising palmitic acid in said non-human organism or in the culture medium surrounding said non-human organism.

[57025] Accordingly, the present invention relates to a process for the production of palmitic acid, which comprises
[57026] (a) increasing or generating the activity of a heat shock transcription factor in the cytosol of a cell of a non-human organism or a part thereof, preferably a microorganism, a plant cell, a plant or a part thereof, as compared to a corresponding non-transformed wild type non-human organism or a part thereof; and
[57027] (b) growing the non-human organism or a part thereof under conditions which permit the production of palmitic acid or a composition comprising palmitic acid in said non-human organism or in the culture medium surrounding said non-human organism.

[57028] Accordingly, the present invention relates to a process for the production of palmitic acid, which comprises
[57029] (a) increasing or generating the activity of a CCAAT-binding transcription factor in the cytosol of a cell of a non-human organism or a part thereof, preferably a microorganism, a plant cell, a plant or a part thereof, as compared to a corresponding non-transformed wild type non-human organism or a part thereof; and
[57030] (b) growing the non-human organism or a part thereof under conditions which permit the production of palmitic acid or a composition comprising palmitic acid in said non-human organism or in the culture medium surrounding said non-human organism.

[57031] Accordingly, the present invention relates to a process for the production of palmitic acid, which comprises
[57032] (a) increasing or generating the activity of a glutaredoxin in the cytosol of a cell of a non-human organism or a part thereof, preferably a microorganism, a plant cell, a plant or a part thereof, as compared to a corresponding non-transformed wild type non-human organism or a part thereof; and
[57033] (b) growing the non-human organism or a part thereof under conditions which permit the production of palmitic acid or a composition comprising palmitic acid in said non-human organism or in the culture medium surrounding said non-human organism.

[57034] Accordingly, the present invention relates to a process for the production of palmitic acid, which comprises
[57035] (a) increasing or generating the activity of a monothiol glutaredoxin in the cytosol of a cell of a non-human organism or a part thereof, preferably a microorganism, a plant cell, a plant or a part thereof, as compared to a corresponding non-transformed wild type non-human organism or a part thereof; and
[57036] (b) growing the non-human organism or a part thereof under conditions which permit the production of palmitic acid or a composition comprising palmitic acid in said non-human organism or in the culture medium surrounding said non-human organism.

[57037] Accordingly, the present invention relates to a process for the production of palmitic acid, which comprises
[57038] (a) increasing or generating the activity of a heat shock transcription factor in the cytosol of a cell of a non-human organism or a part thereof, preferably a microorganism, a plant cell, a plant or a part thereof, as compared to a corresponding non-transformed wild type non-human organism or a part thereof; and
[57039] (b) growing the non-human organism or a part thereof under conditions which permit the production of palmitic acid or a composition comprising palmitic acid in said non-human organism or in the culture medium surrounding said non-human organism.

[57040] Accordingly, the present invention relates to a process for the production of palmitic acid, which comprises
[57041] (a) increasing or generating the activity of a protein phosphatase in the cytosol of a cell of a non-human organism or a part thereof, preferably a microorganism, a plant cell, a plant or a part thereof, as compared to a corresponding non-transformed wild type non-human organism or a part thereof; and
[57042] (b) growing the non-human organism or a part thereof under conditions which permit the production of palmitic acid or a composition comprising palmitic acid in said non-human organism or in the culture medium surrounding said non-human organism.

[57043] Accordingly, the present invention relates to a process for the production of palmitic acid, which comprises
[57044] (a) increasing or generating the activity of a glutaredoxin in the cytosol of a cell of a non-human organism or a part thereof, preferably a microorganism, a plant cell, a plant or a part thereof, as compared to a corresponding non-transformed wild type non-human organism or a part thereof; and
[57045] (b) growing the non-human organism or a part thereof under conditions which permit the production of palmitic acid or a composition comprising palmitic acid in said non-human organism or in the culture medium surrounding said non-human organism.

[57046] Accordingly, the present invention relates to a process for the production of palmitic acid, which comprises
[57047] (a) increasing or generating the activity of a calcium-dependent protein kinase in the cytosol of a cell of a non-human organism or a part thereof, preferably a microorganism, a plant cell, a plant or a part thereof, as compared to a corresponding non-transformed wild type non-human organism or a part thereof; and
[57048] (b) growing the non-human organism or a part thereof under conditions which permit the production of palmitic acid or a composition comprising palmitic acid in said non-human organism or in the culture medium surrounding said non-human organism.

[57049] Accordingly, the present invention relates to a process for the production of palmitic acid, which comprises
[57050] (a) increasing or generating the activity of a protein phosphatase in the cytosol of a cell of a non-human organism or a part thereof, preferably a microorganism, a plant cell, a plant or a part thereof, as compared to a corresponding non-transformed wild type non-human organism or a part thereof; and
[57051] (b) growing the non-human organism or a part thereof under conditions which permit the production of palmitic acid or a composition comprising palmitic acid in said non-human organism or in the culture medium surrounding said non-human organism.

[57052] Accordingly, the present invention relates to a process for the production of palmitic acid, which comprises
[57053] (a) increasing or generating the activity of a protein phosphatase in the cytosol of a cell of a non-human organism or a part thereof, preferably a microorganism, a plant cell, a plant or a part thereof, as compared to a corresponding non-transformed wild type non-human organism or a part thereof; and
[57054] (b) growing the non-human organism or a part thereof under conditions which permit the production of palmitic acid or a composition comprising palmitic acid in said non-human organism or in the culture medium surrounding said non-human organism.

[57055] Accordingly, the present invention relates to a process for the production of palmitic acid, which comprises
[57056] (a) increasing or generating the activity of a oxidoreductase in the cytosol of a cell of a non-human organism or a part thereof, preferably a microorganism, a plant cell, a plant or a part thereof, as compared to a corresponding non-transformed wild type non-human organism or a part thereof; and
[57057] (b) growing the non-human organism or a part thereof under conditions which permit the production of palmitic acid or a composition comprising palmitic acid in said non-human organism or in the culture medium surrounding said non-human organism.

[57058] Accordingly, the present invention relates to a process for the production of palmitic acid, which comprises
[57059] (a) increasing or generating the activity of a ThiF family protein in the cytosol of a cell of a non-human organism or a part thereof, preferably a microorganism, a plant cell, a plant or a part thereof, as compared to a corresponding non-transformed wild type non-human organism or a part thereof; and
[57060] (b) growing the non-human organism or a part thereof under conditions which permit the production of palmitic acid or a composition comprising palmitic acid in said non-human organism or in the culture medium surrounding said non-human organism.

[57061] Accordingly, the present invention relates to a process for the production of palmitic acid, which comprises
[57062] (a) increasing or generating the activity of a recombinase A in the cytosol of a cell of a non-human organism or a part thereof, preferably a microorganism, a plant cell, a plant or a part thereof, as compared to a corresponding non-transformed wild type non-human organism or a part thereof; and
[57063] (b) growing the non-human organism or a part thereof under conditions which permit the production of palmitic acid or a composition comprising palmitic acid in said non-human organism or in the culture medium surrounding said non-human organism.

[57064] Accordingly, the present invention relates to a process for the production of palmitic acid, which comprises
[57065] (a) increasing or generating the activity of a NADH-quinone oxidoreductase subunit in the cytosol of a cell of a non-human organism or a part thereof, preferably a microorganism, a plant cell, a plant or a part thereof, as compared to a corresponding non-transformed wild type non-human organism or a part thereof; and
[57066] (b) growing the non-human organism or a part thereof under conditions which permit the production of palmitic acid or a composition comprising palmitic acid in said non-human organism or in the culture medium surrounding said non-human organism.

[57067] Accordingly, the present invention relates to a process for the production of palmitic acid, which comprises
[57068] (a) increasing or generating the activity of a HesB/YadR/YfhF family protein in the cytosol of a cell of a non-human organism or a part thereof, preferably a microorganism, a plant cell, a plant or a part thereof, as compared to a corresponding non-transformed wild type non-human organism or a part thereof; and
[57069] (b) growing the non-human organism or a part thereof under conditions which permit the production of palmitic acid or a composition comprising palmitic acid in said non-human organism or in the culture medium surrounding said non-human organism.

[57070] Accordingly, the present invention relates to a process for the production of palmitic acid, which comprises
[57071] (a) increasing or generating the activity of a peptidyl-prolyl cis-trans isomerase in the cytosol of a cell of a non-human organism or a part thereof, preferably a microorganism, a plant cell, a plant or a part thereof, as compared to a corresponding non-transformed wild type non-human organism or a part thereof; and
[57072] (b) growing the non-human organism or a part thereof under conditions which permit the production of palmitic acid or a composition comprising palmitic acid in said non-human organism or in the culture medium surrounding said non-human organism.

[57073] Accordingly, the present invention relates to a process for the production of palmitic acid, which comprises
[57074] (a) increasing or generating the activity of a purine nucleoside phosphorylase in the cytosol of a cell of a non-human organism or a part thereof, preferably a microorganism, a plant cell, a plant or a part thereof, as compared to a corresponding non-transformed wild type non-human organism or a part thereof; and
[57075] (b) growing the non-human organism or a part thereof under conditions which permit the production of palmitic acid or a composition comprising palmitic acid in said non-human organism or in the culture medium surrounding said non-human organism.

[57076] Accordingly, the present invention relates to a process for the production of palmitic acid, which comprises
[57077] (a) increasing or generating the activity of a b0050-protein in the cytosol of a cell of a non-human organism or a part thereof, preferably a microorganism, a plant cell, a plant or a part thereof, as compared to a corresponding non-transformed wild type non-human organism or a part thereof; and
[57078] (b) growing the non-human organism or a part thereof under conditions which permit the production of palmitic acid or a composition comprising palmitic acid in said non-human organism or in the culture medium surrounding said non-human organism.

[57079] Accordingly, the present invention relates to a process for the production of palmitic acid, which comprises
[57080] (a) increasing or generating the activity of a sodium/proton antiporter in the cytosol of a cell of a non-human organism or a part thereof, preferably a microorganism, a plant cell, a plant or a part thereof, as compared to a corresponding non-transformed wild type non-human organism or a part thereof; and
[57081] (b) growing the non-human organism or a part thereof under conditions which permit the production of palmitic acid or a composition comprising palmitic acid in said non-human organism or in the culture medium surrounding said non-human organism.

[57082] Accordingly, the present invention relates to a process for the production of palmitic acid, which comprises
[57083] (a) increasing or generating the activity of a b1234-protein in the cytosol of a cell of a non-human organism or a part thereof, preferably a microorganism, a plant cell, a plant or a part thereof, as compared to a corresponding non-transformed wild type non-human organism or a part thereof; and
[57084] (b) growing the non-human organism or a part thereof under conditions which permit the production of palmitic acid or a composition comprising palmitic acid in said non-human organism or in the culture medium surrounding said non-human organism.

[57085] Accordingly, the present invention relates to a process for the production of palmitic acid, which comprises
[57086] (a) increasing or generating the activity of a b1248-protein in the cytosol of a cell of a non-human organism or a part thereof, preferably a microorganism, a plant cell, a plant or a part thereof, as compared to a corresponding non-transformed wild type non-human organism or a part thereof; and
[57087] (b) growing the non-human organism or a part thereof under conditions which permit the production of palmitic acid or a composition comprising palmitic acid in said non-human organism or in the culture medium surrounding said non-human organism.

[57088] Accordingly, the present invention relates to a process for the production of palmitic acid, which comprises
[57089] (a) increasing or generating the activity of a b1330-protein in the cytosol of a cell of a non-human organism or a part thereof, preferably a microorganism, a plant cell, a plant or a part thereof, as compared to a corresponding non-transformed wild type non-human organism or a part thereof; and
[57090] (b) growing the non-human organism or a part thereof under conditions which permit the production of palmitic acid or a composition comprising palmitic acid in said non-human organism or in the culture medium surrounding said non-human organism.

[57091] Accordingly, the present invention relates to a process for the production of palmitic acid, which comprises
[57092] (a) increasing or generating the activity of a lipoprotein precursor in the cytosol of a cell of a non-human organism or a part thereof, preferably a microorganism, a plant cell, a plant or a part thereof, as compared to a corresponding non-transformed wild type non-human organism or a part thereof; and
[57093] (b) growing the non-human organism or a part thereof under conditions which permit the production of palmitic acid or a composition comprising palmitic acid in said non-human organism or in the culture medium surrounding said non-human organism.

[57094] Accordingly, the present invention relates to a process for the production of palmitic acid, which comprises
[57095] (a) increasing or generating the activity of a Fe—S subunit of oxidoreductase in the cytosol of a cell of a non-human organism or a part thereof, preferably a microorganism, a plant cell, a plant or a part thereof, as compared to a corresponding non-transformed wild type non-human organism or a part thereof; and
[57096] (b) growing the non-human organism or a part thereof under conditions which permit the production of palmitic acid or a composition comprising palmitic acid in said non-human organism or in the culture medium surrounding said non-human organism.

[57097] Accordingly, the present invention relates to a process for the production of palmitic acid, which comprises
[57098] (a) increasing or generating the activity of a acid shock protein in the cytosol of a cell of a non-human organism or a part thereof, preferably a microorganism, a plant cell, a plant or a part thereof, as compared to a corresponding non-transformed wild type non-human organism or a part thereof; and
[57099] (b) growing the non-human organism or a part thereof under conditions which permit the production of palmitic acid or a composition comprising palmitic acid in said non-human organism or in the culture medium surrounding said non-human organism.

[57100] Accordingly, the present invention relates to a process for the production of palmitic acid, which comprises
[57101] (a) increasing or generating the activity of a b1670-protein in the cytosol of a cell of a non-human organism or a part thereof, preferably a microorganism, a plant cell, a plant or a part thereof, as compared to a corresponding non-transformed wild type non-human organism or a part thereof; and
[57102] (b) growing the non-human organism or a part thereof under conditions which permit the production of palmitic acid or a composition comprising palmitic acid in said non-human organism or in the culture medium surrounding said non-human organism.

[57103] Accordingly, the present invention relates to a process for the production of palmitic acid, which comprises
[57104] (a) increasing or generating the activity of a b1837-protein in the cytosol of a cell of a non-human organism or a part thereof, preferably a microorganism, a plant cell, a plant or a part thereof, as compared to a corresponding non-transformed wild type non-human organism or a part thereof; and
[57105] (b) growing the non-human organism or a part thereof under conditions which permit the production of palmitic acid or a composition comprising palmitic acid in said non-human organism or in the culture medium surrounding said non-human organism.

[57106] Accordingly, the present invention relates to a process for the production of palmitic acid, which comprises
[57107] (a) increasing or generating the activity of a b2032-protein in the cytosol of a cell of a non-human organism or a part thereof, preferably a microorganism, a plant cell, a plant or a part thereof, as compared to a corresponding non-transformed wild type non-human organism or a part thereof; and
[57108] (b) growing the non-human organism or a part thereof under conditions which permit the production of palmitic acid or a composition comprising palmitic acid in said non-human organism or in the culture medium surrounding said non-human organism.

[57109] Accordingly, the present invention relates to a process for the production of palmitic acid, which comprises
[57110] (a) increasing or generating the activity of a colanic acid biosynthesis protein in the cytosol of a cell of a non-human organism or a part thereof, preferably a microorganism, a plant cell, a plant or a part thereof, as compared to a corresponding non-transformed wild type non-human organism or a part thereof; and
[57111] (b) growing the non-human organism or a part thereof under conditions which permit the production of palmitic acid or a composition comprising palmitic acid in said non-human organism or in the culture medium surrounding said non-human organism.

[57112] Accordingly, the present invention relates to a process for the production of palmitic acid, which comprises
[57113] (a) increasing or generating the activity of a b2099-protein in the cytosol of a cell of a non-human organism or a part thereof, preferably a microorganism, a plant cell, a plant or a part thereof, as compared to a corresponding non-transformed wild type non-human organism or a part thereof; and
[57114] (b) growing the non-human organism or a part thereof under conditions which permit the production of palmitic acid or a composition comprising palmitic acid in said non-human organism or in the culture medium surrounding said non-human organism.

[57115] Accordingly, the present invention relates to a process for the production of palmitic acid, which comprises
[57116] (a) increasing or generating the activity of a b2107-protein in the cytosol of a cell of a non-human organism or a part thereof, preferably a microorganism, a plant cell, a plant or a part thereof, as compared to a corresponding non-transformed wild type non-human organism or a part thereof; and
[57117] (b) growing the non-human organism or a part thereof under conditions which permit the production of palmitic acid or a composition comprising palmitic acid in said non-human organism or in the culture medium surrounding said non-human organism.

[57118] Accordingly, the present invention relates to a process for the production of palmitic acid, which comprises
[57119] (a) increasing or generating the activity of a b2399-protein in the cytosol of a cell of a non-human organism or a part thereof, preferably a microorganism, a plant cell, a plant or a part thereof, as compared to a corresponding non-transformed wild type non-human organism or a part thereof; and
[57120] (b) growing the non-human organism or a part thereof under conditions which permit the production of palmitic acid or a composition comprising palmitic acid in said non-human organism or in the culture medium surrounding said non-human organism.

[57121] Accordingly, the present invention relates to a process for the production of palmitic acid, which comprises
[57122] (a) increasing or generating the activity of a ethanolamine utilization protein in the cytosol of a cell of a non-human organism or a part thereof, preferably a microorganism, a plant cell, a plant or a part thereof, as compared to a corresponding non-transformed wild type non-human organism or a part thereof; and
[57123] (b) growing the non-human organism or a part thereof under conditions which permit the production of palmitic acid or a composition comprising palmitic acid in said non-human organism or in the culture medium surrounding said non-human organism.

[57124] Accordingly, the present invention relates to a process for the production of palmitic acid, which comprises
[57125] (a) increasing or generating the activity of a b2682-protein in the cytosol of a cell of a non-human organism or a part thereof, preferably a microorganism, a plant cell, a plant or a part thereof, as compared to a corresponding non-transformed wild type non-human organism or a part thereof; and
[57126] (b) growing the non-human organism or a part thereof under conditions which permit the production of palmitic acid or a composition comprising palmitic acid in said non-human organism or in the culture medium surrounding said non-human organism.

[57127] Accordingly, the present invention relates to a process for the production of palmitic acid, which comprises
[57128] (a) increasing or generating the activity of a 2-C-methyl-D-erythritol 4-phosphate cytidylyltransferase in the cytosol of a cell of a non-human organism or a part thereof, preferably a microorganism, a plant cell, a plant or a part thereof, as compared to a corresponding non-transformed wild type non-human organism or a part thereof; and
[57129] (b) growing the non-human organism or a part thereof under conditions which permit the production of palmitic acid or a composition comprising palmitic acid in said non-human organism or in the culture medium surrounding said non-human organism.

[57130] Accordingly, the present invention relates to a process for the production of palmitic acid, which comprises
[57131] (a) increasing or generating the activity of a flavodoxin in the cytosol of a cell of a non-human organism or a part thereof, preferably a microorganism, a plant cell, a plant or a part thereof, as compared to a corresponding non-transformed wild type non-human organism or a part thereof; and
[57132] (b) growing the non-human organism or a part thereof under conditions which permit the production of palmitic acid or a composition comprising palmitic acid in said non-human organism or in the culture medium surrounding said non-human organism.

[57133] Accordingly, the present invention relates to a process for the production of palmitic acid, which comprises
[57134] (a) increasing or generating the activity of a AAS bifunctional protein in the cytosol of a cell of a non-human organism or a part thereof, preferably a microorganism, a plant cell, a plant or a part thereof, as compared to a corresponding non-transformed wild type non-human organism or a part thereof; and
[57135] (b) growing the non-human organism or a part thereof under conditions which permit the production of palmitic acid or a composition comprising palmitic acid in said non-human organism or in the culture medium surrounding said non-human organism.

[57136] Accordingly, the present invention relates to a process for the production of palmitic acid, which comprises
[57137] (a) increasing or generating the activity of a b2849-protein in the cytosol of a cell of a non-human organism or a part thereof, preferably a microorganism, a plant cell, a plant or a part thereof, as compared to a corresponding non-transformed wild type non-human organism or a part thereof; and
[57138] (b) growing the non-human organism or a part thereof under conditions which permit the production of palmitic acid or a composition comprising palmitic acid in said non-human organism or in the culture medium surrounding said non-human organism.

[57139] Accordingly, the present invention relates to a process for the production of palmitic acid, which comprises
[57140] (a) increasing or generating the activity of a b3814-protein in the cytosol of a cell of a non-human organism or a part thereof, preferably a microorganism, a plant cell, a plant or a part thereof, as compared to a corresponding non-transformed wild type non-human organism or a part thereof; and
[57141] (b) growing the non-human organism or a part thereof under conditions which permit the production of palmitic acid or a composition comprising palmitic acid in said non-human organism or in the culture medium surrounding said non-human organism.

[57142] Accordingly, the present invention relates to a process for the production of palmitic acid, which comprises
[57143] (a) increasing or generating the activity of a threonine efflux protein in the cytosol of a cell of a non-human organism or a part thereof, preferably a microorganism, a plant cell, a plant or a part thereof, as compared to a corresponding non-transformed wild type non-human organism or a part thereof; and
[57144] (b) growing the non-human organism or a part thereof under conditions which permit the production of palmitic acid or a composition comprising palmitic acid in said non-human organism or in the culture medium surrounding said non-human organism.

[57145] Accordingly, the present invention relates to a process for the production of palmitic acid, which comprises
[57146] (a) increasing or generating the activity of a 3-ketoacyl-CoA thiolase in the cytosol of a cell of a non-human organism or a part thereof, preferably a microorganism, a plant cell, a plant or a part thereof, as compared to a corresponding non-transformed wild type non-human organism or a part thereof; and
[57147] (b) growing the non-human organism or a part thereof under conditions which permit the production of palmitic acid or a composition comprising palmitic acid in said non-human organism or in the culture medium surrounding said non-human organism.

[57148] Accordingly, the present invention relates to a process for the production of palmitic acid, which comprises
[57149] (a) increasing or generating the activity of a glutaredoxin in the cytosol of a cell of a non-human organism or a part thereof, preferably a microorganism, a plant cell, a plant or a part thereof, as compared to a corresponding non-transformed wild type non-human organism or a part thereof; and
[57150] (b) growing the non-human organism or a part thereof under conditions which permit the production of palmitic acid or a composition comprising palmitic acid in said non-human organism or in the culture medium surrounding said non-human organism.

[57151] Accordingly, the present invention relates to a process for the production of palmitic acid, which comprises
[57152] (a) increasing or generating the activity of a transcription factor in the cytosol of a cell of a non-human organism or a part thereof, preferably a microorganism, a plant cell, a plant or a part thereof, as compared to a corresponding non-transformed wild type non-human organism or a part thereof; and
[57153] (b) growing the non-human organism or a part thereof under conditions which permit the production of palmitic acid or a composition comprising palmitic acid in said non-human organism or in the culture medium surrounding said non-human organism.

[57154] Accordingly, the present invention relates to a process for the production of palmitic acid, which comprises
[57155] (a) increasing or generating the activity of a bifunctional protein (phosphoribosyltransferase and regulatory protein) in the cytosol of a cell of a non-human organism or a part thereof, preferably a microorganism, a plant cell, a plant or a part thereof, as compared to a corresponding non-transformed wild type non-human organism or a part thereof; and
[57156] (b) growing the non-human organism or a part thereof under conditions which permit the production of palmitic acid or a composition comprising palmitic acid in said non-human organism or in the culture medium surrounding said non-human organism.

[57157] Accordingly, the present invention relates to a process for the production of palmitic acid, which comprises
[57158] (a) increasing or generating the activity of a branched chain amino acid ABC transporter

[57159] ATP-binding protein in the cytosol of a cell of a non-human organism or a part thereof, preferably a microorganism, a plant cell, a plant or a part thereof, as compared to a corresponding non-transformed wild type non-human organism or a part thereof; and
[57160] (b) growing the non-human organism or a part thereof under conditions which permit the production of palmitic acid or a composition comprising palmitic acid in said non-human organism or in the culture medium surrounding said non-human organism.

[57161] Accordingly, the present invention relates to a process for the production of palmitic acid, which comprises
[57162] (a) increasing or generating the activity of a carbon dioxide concentrating mechanism protein in the cytosol of a cell of a non-human organism or a part thereof, preferably a microorganism, a plant cell, a plant or a part thereof, as compared to a corresponding non-transformed wild type non-human organism or a part thereof; and
[57163] (b) growing the non-human organism or a part thereof under conditions which permit the production of palmitic acid or a composition comprising palmitic acid in said non-human organism or in the culture medium surrounding said non-human organism.

[57164] Accordingly, the present invention relates to a process for the production of palmitic acid, which comprises
[57165] (a) increasing or generating the activity of a sll1032-protein in the cytosol of a cell of a non-human organism or a part thereof, preferably a microorganism, a plant cell, a plant or a part thereof, as compared to a corresponding non-transformed wild type non-human organism or a part thereof; and
[57166] (b) growing the non-human organism or a part thereof under conditions which permit the production of palmitic acid or a composition comprising palmitic acid in said non-human organism or in the culture medium surrounding said non-human organism.

[57167] Accordingly, the present invention relates to a process for the production of palmitic acid, which comprises
[57168] (a) increasing or generating the activity of a phosphoribosylformyl glycinamidine synthase subunit in the cytosol of a cell of a non-human organism or a part thereof, preferably a microorganism, a plant cell, a plant or a part thereof, as compared to a corresponding non-transformed wild type non-human organism or a part thereof; and
[57169] (b) growing the non-human organism or a part thereof under conditions which permit the production of palmitic acid or a composition comprising palmitic acid in said non-human organism or in the culture medium surrounding said non-human organism.

[57170] Accordingly, the present invention relates to a process for the production of palmitic acid, which comprises
[57171] (a) increasing or generating the activity of a nitrate/nitrite transport protein in the cytosol of a cell of a non-human organism or a part thereof, preferably a microorganism, a plant cell, a plant or a part thereof, as compared to a corresponding non-transformed wild type non-human organism or a part thereof; and
[57172] (b) growing the non-human organism or a part thereof under conditions which permit the production of palmitic acid or a composition comprising palmitic acid in said non-human organism or in the culture medium surrounding said non-human organism.

[57173] Accordingly, the present invention relates to a process for the production of palmitic acid, which comprises
[57174] (a) increasing or generating the activity of a carbamoyl-phosphate synthase subunit in the cytosol of a cell of a non-human organism or a part thereof, preferably a microorganism, a plant cell, a plant or a part thereof, as compared to a corresponding non-transformed wild type non-human organism or a part thereof; and
[57175] (b) growing the non-human organism or a part thereof under conditions which permit the production of palmitic acid or a composition comprising palmitic acid in said non-human organism or in the culture medium surrounding said non-human organism.

[57176] Accordingly, the present invention relates to a process for the production of palmitic acid, which comprises
[57177] (a) increasing or generating the activity of a glutathione S-transferase in the cytosol of a cell of a non-human organism or a part thereof, preferably a microorganism, a plant cell, a plant or a part thereof, as compared to a corresponding non-transformed wild type non-human organism or a part thereof; and
[57178] (b) growing the non-human organism or a part thereof under conditions which permit the production of palmitic acid or a composition comprising palmitic acid in said non-human organism or in the culture medium surrounding said non-human organism.

[57179] Accordingly, the present invention relates to a process for the production of palmitic acid, which comprises
[57180] (a) increasing or generating the activity of a ABC metal ion transporter substrate-binding protein in the cytosol of a cell of a non-human organism or a part thereof, preferably a microorganism, a plant cell, a plant or a part thereof, as compared to a corresponding non-transformed wild type non-human organism or a part thereof; and
[57181] (b) growing the non-human organism or a part thereof under conditions which permit the production of palmitic acid or a composition comprising palmitic acid in said non-human organism or in the culture medium surrounding said non-human organism.

[57182] Accordingly, the present invention relates to a process for the production of palmitic acid, which comprises
[57183] (a) increasing or generating the activity of a acyl transferase in the cytosol of a cell of a non-human organism or a part thereof, preferably a microorganism, a plant cell, a plant or a part thereof, as compared to a corresponding non-transformed wild type non-human organism or a part thereof; and
[57184] (b) growing the non-human organism or a part thereof under conditions which permit the production of palmitic acid or a composition comprising palmitic acid in said non-human organism or in the culture medium surrounding said non-human organism.

[57185] Accordingly, the present invention relates to a process for the production of palmitic acid, which comprises
[57186] (a) increasing or generating the activity of a coproporphyrinogen III oxidase in the cytosol of a cell of a non-human organism or a part thereof, preferably a microorganism, a plant cell, a plant or a part thereof, as compared to a corresponding non-transformed wild type non-human organism or a part thereof; and
[57187] (b) growing the non-human organism or a part thereof under conditions which permit the production of palmitic acid or a composition comprising palmitic acid in said non-human organism or in the culture medium surrounding said non-human organism.

[57188] Accordingly, the present invention relates to a process for the production of palmitic acid, which comprises
[57189] (a) increasing or generating the activity of a cation-transporting ATPase in the cytosol of a cell of a non-human organism or a part thereof, preferably a microorganism, a plant cell, a plant or a part thereof, as compared to a corresponding non-transformed wild type non-human organism or a part thereof; and
[57190] (b) growing the non-human organism or a part thereof under conditions which permit the production of palmitic acid or a composition comprising palmitic acid in said non-human organism or in the culture medium surrounding said non-human organism.

[57191] Accordingly, the present invention relates to a process for the production of palmitic acid, which comprises
[57192] (a) increasing or generating the activity of a permease protein of ABC transporter in the cytosol of a cell of a non-human organism or a part thereof, preferably a microorganism, a plant cell, a plant or a part thereof, as compared to a corresponding non-transformed wild type non-human organism or a part thereof; and
[57193] (b) growing the non-human organism or a part thereof under conditions which permit the production of palmitic acid or a composition comprising palmitic acid in said non-human organism or in the culture medium surrounding said non-human organism.

[57194] Accordingly, the present invention relates to a process for the production of palmitic acid, which comprises
[57195] (a) increasing or generating the activity of a aromatic acid decarboxylase in the cytosol of a cell of a non-human organism or a part thereof, preferably a microorganism, a plant cell, a plant or a part thereof, as compared to a corresponding non-transformed wild type non-human organism or a part thereof; and
[57196] (b) growing the non-human organism or a part thereof under conditions which permit the production of palmitic acid or a composition comprising palmitic acid in said non-human organism or in the culture medium surrounding said non-human organism.

[57197] Accordingly, the present invention relates to a process for the production of palmitic acid, which comprises
[57198] (a) increasing or generating the activity of a phosphate import ATP-binding protein in the cytosol of a cell of a non-human organism or a part thereof, preferably a microorganism, a plant cell, a plant or a part thereof, as compared to a corresponding non-transformed wild type non-human organism or a part thereof; and
[57199] (b) growing the non-human organism or a part thereof under conditions which permit the production of palmitic acid or a composition comprising palmitic acid in said non-human organism or in the culture medium surrounding said non-human organism.

[57200] Accordingly, the present invention relates to a process for the production of palmitic acid, which comprises
[57201] (a) increasing or generating the activity of a arginine decarboxylase in the cytosol of a cell of a non-human organism or a part thereof, preferably a microorganism, a plant cell, a plant or a part thereof, as compared to a corresponding non-transformed wild type non-human organism or a part thereof; and
[57202] (b) growing the non-human organism or a part thereof under conditions which permit the production of palmitic acid or a composition comprising palmitic acid in said non-human organism or in the culture medium surrounding said non-human organism.

[57203] Accordingly, the present invention relates to a process for the production of palmitic acid, which comprises
[57204] (a) increasing or generating the activity of a phosphoadenosine phosphosulfate reductase in the cytosol of a cell of a non-human organism or a part thereof, preferably a microorganism, a plant cell, a plant or a part thereof, as compared to a corresponding non-transformed wild type non-human organism or a part thereof; and
[57205] (b) growing the non-human organism or a part thereof under conditions which permit the production of palmitic acid or a composition comprising palmitic acid in said non-human organism or in the culture medium surrounding said non-human organism.

[57206] Accordingly, the present invention relates to a process for the production of palmitic acid, which comprises
[57207] (a) increasing or generating the activity of a threonine dehydratase in the cytosol of a cell of a non-human organism or a part thereof, preferably a microorganism, a plant cell, a plant or a part thereof, as compared to a corresponding non-transformed wild type non-human organism or a part thereof; and
[57208] (b) growing the non-human organism or a part thereof under conditions which permit the production of palmitic acid or a composition comprising palmitic acid in said non-human organism or in the culture medium surrounding said non-human organism.

[57209] Accordingly, the present invention relates to a process for the production of palmitic acid, which comprises
[57210] (a) increasing or generating the activity of a metal-dependent hydrolase in the cytosol of a cell of a non-human organism or a part thereof, preferably a microorganism, a plant cell, a plant or a part thereof, as compared to a corresponding non-transformed wild type non-human organism or a part thereof; and
[57211] (b) growing the non-human organism or a part thereof under conditions which permit the production of palmitic acid or a composition comprising palmitic acid in said non-human organism or in the culture medium surrounding said non-human organism.

[57212] Accordingly, the present invention relates to a process for the production of palmitic acid, which comprises
[57213] (a) increasing or generating the activity of a homocitrate synthase in the cytosol of a cell of a non-human organism or a part thereof, preferably a microorganism, a plant cell, a plant or a part thereof, as compared to a corresponding non-transformed wild type non-human organism or a part thereof; and
[57214] (b) growing the non-human organism or a part thereof under conditions which permit the production of palmitic acid or a composition comprising palmitic acid in said non-human organism or in the culture medium surrounding said non-human organism.

[57215] Accordingly, the present invention relates to a process for the production of palmitic acid, which comprises
[57216] (a) increasing or generating the activity of a acid phosphatase precursor in the cytosol of a cell of a non-human organism or a part thereof, preferably a microorganism, a plant cell, a plant or a part thereof, as compared to a corresponding non-transformed wild type non-human organism or a part thereof; and
[57217] (b) growing the non-human organism or a part thereof under conditions which permit the production of palmitic acid or a composition comprising palmitic acid in said non-human organism or in the culture medium surrounding said non-human organism.

[57218] Accordingly, the present invention relates to a process for the production of palmitic acid, which comprises
[57219] (a) increasing or generating the activity of a glycerol-3-phosphate dehydrogenase in the cytosol of a cell of a non-human organism or a part thereof, preferably a microorganism, a plant cell, a plant or a part thereof, as compared to a corresponding non-transformed wild type non-human organism or a part thereof; and
[57220] (b) growing the non-human organism or a part thereof under conditions which permit the production of palmitic acid or a composition comprising palmitic acid in said non-human organism or in the culture medium surrounding said non-human organism.

[57221] Accordingly, the present invention relates to a process for the production of palmitic acid, which comprises
[57222] (a) increasing or generating the activity of a protein kinase in the cytosol of a cell of a non-human organism or a part thereof, preferably a microorganism, a plant cell, a plant or a part thereof, as compared to a corresponding non-transformed wild type non-human organism or a part thereof; and
[57223] (b) growing the non-human organism or a part thereof under conditions which permit the production of palmitic acid or a composition comprising palmitic acid in said non-human organism or in the culture medium surrounding said non-human organism.

[57224] Accordingly, the present invention relates to a process for the production of palmitic acid, which comprises
[57225] (a) increasing or generating the activity of a F-box protein in the cytosol of a cell of a non-human organism or a part thereof, preferably a microorganism, a plant cell, a plant or a part thereof, as compared to a corresponding non-transformed wild type non-human organism or a part thereof; and
[57226] (b) growing the non-human organism or a part thereof under conditions which permit the production of palmitic acid or a composition comprising palmitic acid in said non-human organism or in the culture medium surrounding said non-human organism.

[57227] Accordingly, the present invention relates to a process for the production of palmitic acid, which comprises
[57228] (a) increasing or generating the activity of a DnaJ-like chaperone in the cytosol of a cell of a non-human organism or a part thereof, preferably a microorganism, a plant cell, a plant or a part thereof, as compared to a corresponding non-transformed wild type non-human organism or a part thereof; and
[57229] (b) growing the non-human organism or a part thereof under conditions which permit the production of palmitic acid or a composition comprising palmitic acid in said non-human organism or in the culture medium surrounding said non-human organism.

[57230] Accordingly, the present invention relates to a process for the production of palmitic acid, which comprises
[57231] (a) increasing or generating the activity of a aconitate hydratase in the cytosol of a cell of a non-human organism or a part thereof, preferably a microorganism, a plant cell, a plant or a part thereof, as compared to a corresponding non-transformed wild type non-human organism or a part thereof; and
[57232] (b) growing the non-human organism or a part thereof under conditions which permit the production of palmitic acid or a composition comprising palmitic acid in said non-human organism or in the culture medium surrounding said non-human organism.

[57233] Accordingly, the present invention relates to a process for the production of palmitic acid, which comprises
[57234] (a) increasing or generating the activity of a ymr013c-protein in the cytosol of a cell of a non-human organism or a part thereof, preferably a microorganism, a plant cell, a plant or a part thereof, as compared to a corresponding non-transformed wild type non-human organism or a part thereof; and
[57235] (b) growing the non-human organism or a part thereof under conditions which permit the production of palmitic acid or a composition comprising palmitic acid in said non-human organism or in the culture medium surrounding said non-human organism.

[57236] Accordingly, the present invention relates to a process for the production of palmitic acid, which comprises
[57237] (a) increasing or generating the activity of a ATPase epsilon subunit in the cytosol of a cell of a non-human organism or a part thereof, preferably a microorganism, a plant cell, a plant or a part thereof, as compared to a corresponding non-transformed wild type non-human organism or a part thereof; and
[57238] (b) growing the non-human organism or a part thereof under conditions which permit the production of palmitic acid or a composition comprising palmitic acid in said non-human organism or in the culture medium surrounding said non-human organism.

[57239] Accordingly, the present invention relates to a process for the production of palmitic acid, which comprises
[57240] (a) increasing or generating the activity of a 49747384_SOYBEAN-protein in the cytosol of a cell of a non-human organism or a part thereof, preferably a microorganism, a plant cell, a plant or a part thereof, as compared to a corresponding non-transformed wild type non-human organism or a part thereof; and
[57241] (b) growing the non-human organism or a part thereof under conditions which permit the production of palmitic acid or a composition comprising palmitic acid in said non-human organism or in the culture medium surrounding said non-human organism.

[57242] Accordingly, the present invention relates to a process for the production of palmitic acid, which comprises
[57243] (a) increasing or generating the activity of a glucose-6-phosphate 1-dehydrogenase in the cytosol of a cell of a non-human organism or a part thereof, preferably a microorganism, a plant cell, a plant or a part thereof, as compared to a corresponding non-transformed wild type non-human organism or a part thereof; and
[57244] (b) growing the non-human organism or a part thereof under conditions which permit the production of palmitic acid or a composition comprising palmitic acid in said non-human organism or in the culture medium surrounding said non-human organism.

[57245] Accordingly, the present invention relates to a process for the production of palmitic acid, which comprises
[57246] (a) increasing or generating the activity of a polypeptide comprising a polypeptide as depicted in the respective line in column 5 or 8 of Table II, application no. 11, or a homolog or a fragment thereof, a consensus sequence or at least one polypeptide motif as depicted in the respective line in column 8 of Table IV, application no. 11; or
[57247] increasing or generating the activity of an expression product of one or more nucleic acid molecule(s) comprising a polynucleotide as depicted in the respective line in column 5 or 8 of Table I, application no. 11, preferably the coding region thereof, or a homolog or a fragment thereof;
[57248] in the cytosol of a cell of a non-human organism or a part thereof; preferably a microorganism, a plant cell, a plant or a part thereof, as compared to a corresponding non-transformed wild type non-human organism or a part thereof; and
[57249] (b) growing the non-human organism under conditions which permit the production of palmitic acid, or a composition comprising palmitic acid in said non-human organism or in the culture medium surrounding said non-human organism.

[57250] In a further embodiment the activity of the polypeptide comprising a polypeptide as depicted in the respective line in column 5 or 8 of Table II, application no. 11, or a homolog or a fragment thereof, a consensus sequence or at least one polypeptide motif as depicted in the respective line in column 8 of Table IV, application no. 11, is increased or generated non-targeted in the above-mentioned process in a microorganism or plant or a part thereof.

[57251] In a further embodiment said polypeptide has the activity of the respective polypeptide represented by a protein comprising a polypeptide as depicted in the respective line in column 5 of Table II, application no. 11.

[57252] In a further embodiment the activity of the expression product of one or more nucleic acid molecule(s) comprising a polynucleotide as depicted in the respective line in column 5 or 8 of Table I, application no. 11, preferably the coding region thereof, or a homolog or a fragment thereof, is increased or generated non-targeted in the above-mentioned process in a microorganism or plant or a part thereof.

[57253] In a further embodiment the activity of the polypeptide comprising a polypeptide as depicted in the respective line in column 5 or 8 of Table II, application no. 11, or a homolog or a fragment thereof, a consensus sequence or at least one polypeptide motif as depicted in the respective line in column 8 of Table IV, application no. 11, is increased or generated in the above-mentioned process in an organelle preferably in plastids or mitochondria, especially in plastids, of a microorganism or plant.

[57254] In a further embodiment said polypeptide has the activity of the respective polypeptide represented by a protein comprising a polypeptide as depicted in the respective line in column 5 of Table II, application no. 11.

[57255] In a further embodiment the activity of the expression product of one or more nucleic acid molecule(s) comprising a polynucleotide as depicted in the respective line in column 5 or 8 of Table I, application no. 11, preferably the coding region thereof, or a homolog or a fragment thereof, is increased or generated in the above-mentioned process in an organelle, preferably in plasids or mitochondria, especially in plastids, of a microorganism or plant.

[57256] In a further embodiment the activity of the polypeptide comprising a polypeptide as depicted in the respective line in column 5 or 8 of Table II, application no. 11, or a homolog or a fragment thereof, a consensus sequence or at least one polypeptide motif as depicted in the respective line in column 8 of Table IV, application no. 11, is increased or generated in the above-mentioned process in the cyctosol of a cell, of a microorganism or plant.

[57257] In a further embodiment said polypeptide has the activity of the respective polypeptide represented by a protein comprising a polypeptide as depicted in the respective line in column 5 of Table II, application no. 11.

[57258] In a further embodiment the activity of the expression product of one or more nucleic acid molecule(s) comprising a polynucleotide as depicted in the respective line in column 5 or 8 of Table I, application no. 11, preferably the coding region thereof, or a homolog or a fragment thereof, is increased or generated in the above-mentioned process in the cytosol of a cell, of a microorganism or plant.

[57259] [0039.1.8.11] to [0066.1.8.11] for the disclosure of these paragraphs see [0039.1.8.8] to [0066.1.8.8] above.

[57260] As mentioned above the nucleic acid sequences coding for the proteins as shown in Table II, application no. 11, column 5 or 8, or homologs or fragments thereof, are joined to a nucleic acid sequence encoding a plastidic transit peptide, e.g, if for the nucleic acid molecule in Table I, column 6 the term “plastidic” is indicated. This nucleic acid sequence encoding a transit peptide ensures transport of the protein to the organelle. The nucleic acid sequence of the gene to be expressed and the nucleic acid sequence encoding the transit peptide are operably linked. Therefore the transit peptide encoding sequence is fused in frame to the nucleic acid sequence coding for proteins as shown in Table II, application no. 11, column 5 or 8, or homologs or fragments thereof, e.g., if for the nucleic acid molecule in Table I, column 6 the term “plastidic” is indicated.

[57261] [0068.1.8.11] to [0072.1.8.11] for the disclosure of these paragraphs see [0068.1.8.8] to [0072.1.8.8] above.

[57262] As mentioned above the nucleic acid sequences coding for the proteins as shown in the respective line in Table II, application no. 11, column 5 or 8, or homologs or fragments thereof, are joined to a nucleic acid sequence encoding a mitochondric transit peptide, e.g., if for the respective nucleic acid molecule in Table I, column 6 the term “mitochondrial” is indicated. This nucleic acid sequence encoding a transit peptide ensures transport of the protein to the organelle. The nucleic acid sequence of the gene to be expressed and the nucleic acid sequence encoding the transit peptide are operably linked. Therefore the transit peptide encoding sequence is fused in frame to the nucleic acid sequence coding for proteins as shown in the respective line in Table II, application no. 11, column 5 or 8, or homologs or fragments thereof, e.g., if for the nucleic acid molecule in the respective line in Table I, column 6 the term “mitochondrial” is indicated. (For th eavoidance ofdoubt, th eterm “mitochondric” and “mitochondrial” are interchangeable.)

[57263] [0074.1.8.11] to [0075.1.8.11] for the disclosure of these paragraphs see [0074.1.8.8] to [0075.1.8.8] above.

[57264] Nucleic acid sequences coding for the transit peptides may be chemically synthesized either in part or wholly according to structure of transit peptide sequences disclosed in the prior art. Said natural or chemically synthesized sequences can be directly linked to the sequences encoding the mature protein or via a linker nucleic acid sequence, which may be typically less than 500 base pairs, preferably less than 450, 400, 350, 300, 250 or 200 base pairs, more preferably less than 150, 100, 90, 80, 70, 60, 50, 40 or 30 base pairs and most preferably less than 25, 20, 15, 12, 9, 6 or 3 base pairs in length and are in frame to the coding sequence. Furthermore favorable nucleic acid sequences encoding transit peptides may comprise sequences derived from more than one biological and/or chemical source and may include a nucleic acid sequence derived from the amino-terminal region of the mature protein, which in its native state is linked to the transit peptide. In a preferred embodiment of the invention said amino-terminal region of the mature protein is typically less than 150 amino acids, preferably less than 140, 130, 120, 110, 100 or 90 amino acids, more preferably less than 80, 70, 60, 50, 40, 35, 30, 25 or 20 amino acids and most preferably less than 19, 18, 17, 16, 15, 14, 13, 12, 11 or 10 amino acids in length. But even shorter or longer stretches are also possible. In addition target sequences, which facilitate the transport of proteins to other cell compartments such as the vacuole, endoplasmic reticulum, golgi complex, glyoxysomes, peroxisomes, mitochondria (in case of a plastidal transit peptide) or plastids, especially chloroplasts (in case of a mitochondric transit peptide) may be also part of the inventive nucleic acid sequence. The proteins translated from said inventive nucleic acid sequences are a kind of fusion proteins that means the nucleic acid sequences encoding the plastidal transit peptide for example the ones shown in Table a, preferably the last one of the Table a are joint to the respective nucleic acid sequences shown in Table I, application no. 11, columns 5 or 8, especially the coding region thereof, or homologs or fragments thereof, in case of nucleic acid sequences being expressed in plastids, and that means the nucleic acid sequences encoding the mitochondric transit peptide for example the ones shown in Table b, preferably the last one of the Table b are joint to the respective nucleic acid sequences shown in Table I, application no. 11, columns 5 or 8, especially the coding region thereof, or homologs or fragments thereof, in case of nucleic acid sequences being expressed in mitochondria. The person skilled in the art is able to join said sequences in a functional manner. Advantageously the transit peptide part is cleaved off from the protein part shown in Table II, application no. 11, columns 5 or 8, or a homolog or fragment thereof, during or after the transport into the organelles, preferably into the plastids or mitochondria, respectively.

[57265] All products of the cleavage of the preferred transit peptide shown in the last line of Table a have preferably the N-terminal amino acid sequences QIA CSS or QIA EFQLTT in front of the start methionine of the respective protein mentioned in Table II, application no. 11, column 5 or 8. or homologs or fragments thereof. Other short amino acid sequences of an range of 1 to 20 amino acids preferable 2 to 15 amino acids, more preferable 3 to 10 amino acids most preferably 4 to 8 amino acids are also possible in front of the start methionine of the protein mentioned in Table II, application no. 11, columns 5 or 8, or homologs or fragments thereof. In case of the amino acid sequence QIA CSS the three amino acids in front of the start methionine are stemming from the LIC (=ligatation independent cloning) cassette. Said short amino acid sequence is preferred in the case of the expression of E. coli genes. In case of the amino acid sequence QIA EFQLTT the six amino acids in front of the start methionine are stemming from the LIC cassette. Said short amino acid sequence is preferred in the case of the expression of S. cerevisiae genes. The skilled worker knowns that other short sequences are also useful in the expression of the respective nucleic acid molecule comprising a polynucleotide as depicted in Table I, application no. 11, column 5 or 8, preferably the coding region thereof, or a homolog or a fragment thereof. Furthermore the skilled worker is aware of the fact that there is not a need for such short sequences in the expression of the genes.

[57266] [0077.1.8.11] to [0078.1.8.11] for the disclosure of these paragraphs see [0077.1.8.8] to [0078.1.8.8] above.

[57267] Alternatively to the targeting of the respective sequences shown in Table II, application no. 11, columns 5 or 8, or homologs or fragments thereof, preferably of sequences in general encoded in the nucleus with the aid of the targeting sequences mentioned for example in Table a alone, Table b alone, or in combination with other targeting sequences preferably into plastids or mitochondria, respectively, the nucleic acids of the invention can directly be introduced into the plastidal or mitochondrial genome. Therefore in a preferred embodiment the respective nucleic acid sequences shown in the respective line in Table I, application no. 11, columns 5 or 8, preferably the coding region thereof, or homologs or fragments thereof, are directly introduced and expressed in plastids e.g., if for the nucleic acid molecule in the respective line in Table I, column 6, the term “plastidic” is indicated, or are directly introduced and expressed in mitochondria e.g., if for the nucleic acid molecule in the respective line in Table I, column 6 the term “mitochondrial” is indicated.

[57268] The term “introduced” in the context of this specification shall mean the insertion of a nucleic acid sequence into the organism by means of a “transfection”, “transduction” or preferably by “transformation”.

[57269] A plastid, such as a chloroplast, or a mitochondrion, has been “transformed” by an exogenous (preferably foreign) nucleic acid sequence if a nucleic acid sequence has been introduced into the plastid or mitochondrion that means that this sequence has crossed the membrane or the membranes of the plastid or of the mitochondrion. The exogenous, preferably foreign, DNA may be integrated (covalently linked) into plastid or mitochondrial DNA making up the genome of the plastid or mitochondrion, or it may remain unintegrated (e.g., by including a chloroplast origin of replication). “Stably” integrated DNA sequences are those, which are inherited through plastid or mitochondrion replication, thereby transferring new plastids or mitochondria, with the features of the integrated DNA sequence to the progeny.

[57270] [0080.1.8.11] to [0083.1.8.11] for the disclosure of these paragraphs see [0080.1.8.8] to 0083.1.8.8] above.

[57271] For the process of the present invention it may be of great advantage that by transforming the plastids the intraspecies specific transgene flow is blocked, because a lot of species such as corn, cotton and rice have a strict maternal inheritance of plastids. By placing the respective genes specified in the respective line in Table I, application no. 11, columns 5 or 8, preferably the coding region, or homologs or fragments thereof, e.g. if for the nucleic acid molecule in the respective line in column 6 of Table I the term “plastidic” is indicated, in the plastids of plants, these genes will not be present in the pollen of said plants.

[57272] A further preferred embodiment of the invention relates to the use of so called “chloroplast localization sequences”, in which a first RNA sequence or molecule is capable of transporting or “chaperoning” a second RNA sequence, such as a RNA sequence transcribed from the sequences depicted in the respective line in Table I, application no. 11, columns 5 or 8, preferably the coding region thereof, or a homolog or a fragment thereof, or a sequence encoding a protein, as depicted in the respective line in Table II, application no. 11, columns 5 and 8, or a homolog or a fragment thereof, from an external environment inside a cell or outside a plastid into a chloroplast. In one embodiment the chloroplast localization signal is substantially similar or complementary to a complete or intact viroid sequence. The chloroplast localization signal may be encoded by a DNA sequence, which is transcribed into the chloroplast localization RNA. The term “viroid” refers to a naturally occurring single stranded RNA molecule (Flores, C. R. Acad. Sci. III. 324 (10), 943 (2001)). Viroids usually contain about 200-500 nucleotides and generally exist as circular molecules. Examples of viroids that contain chloroplast localization signals include but are not limited to ASBVd, PLMVd, CChMVd and ELVd. The viroid sequence or a functional part of it can be fused to the sequences depicted in the respective line in Table I, application no. 11, columns 5 or 8, preferably the coding region thereof, or a homolog or a fragment thereof, or a sequence encoding a protein, as depicted in the respective line in Table II, application no. 11, columns 5 or 8, or a homolog or a fragment thereof, in such a manner that the viroid sequence transports a sequence transcribed from a sequence as depicted in the respective line in Table I, application no. 11 columns 5 or 8, preferably the coding region thereof, or a homolog or a fragment thereof, or a sequence encoding a protein as depicted in the respective line in Table II, application no. 11 columns 5 or 8, or a homolog or a fragment thereof, into the chloroplasts, e.g. if for the nucleic acid molecule in column 6 of Table I the term “plastidic” is indicated. A preferred embodiment uses a modified ASBVd (Navarro et al., Virology. 268 (1), 218 (2000)).

[57273] In a further specific embodiment the protein to be expressed in the plastids such as the proteins depicted in the respective line in Table II, application no. 11, columns 5 or 8, or a homolog or a fragment thereof, e.g. if for the nucleic acid molecule in the respective line in column 6 of Table I the term “plastidic” is indicated, are encoded by different nucleic acids. Such a method is disclosed in WO 2004/040973, which shall be incorporated by reference. WO 2004/040973 teaches a method, which relates to the translocation of an RNA corresponding to a gene or gene fragment into the chloroplast by means of a chloroplast localization sequence. The genes, which should be expressed in the plant or plant cells, are split into nucleic acid fragments, which are introduced into different compartments in the plant e.g. the nucleus, the plastids and/or mitochondria. Additionally plant cells are described in which the chloroplast contains a ribozyme fused at one end to an RNA encoding a fragment of a protein used in the inventive process such that the ribozyme can trans-splice the translocated fusion RNA to the RNA encoding the gene fragment to form and as the case may be reunite the nucleic acid fragments to an intact mRNA encoding a functional protein for example as disclosed in the respective line in Table II, application no. 11, columns 5 or 8, or a homolog or a fragment thereof.

[57274] In a preferred embodiment of the invention the nucleic acid sequences as shown in the respective line in Table I, application no. 11, columns 5 or 8, preferably the coding region thereof, or homologs or fragments thereof, e.g. if for the nucleic acid molecule in the respective line in column 6 of Table I the term “plastidic” is indicated, used in the inventive process are transformed into plastids, which are metabolically active. Those plastids should preferably maintain at a high copy number in the plant or plant tissue of interest, most preferably the chloroplasts found in green plant tissues, such as leaves or cotyledons or in seeds.

[57275] For a good expression in the plastids the nucleic acid sequences as shown in the respective line in Table I, application no. 11, columns 5 or 8, preferably the coding region thereof, or homologs or fragments thereof, e.g. if for the nucleic acid molecule in the respective line in column 6 of Table I the term “plastidic” is indicated, are introduced into an expression cassette using preferably a promoter and terminater, which are active in plastids preferably a chloroplast promoter. Examples of such promoters include the psbA promoter from the gene from spinach or pea, the rbcL promoter, and the atpB promoter from corn.

[57276] [0089.1.8.11] to [0092.1.8.11] for the disclosure of these paragraphs see [0089.1.8.8] to [0092.1.8.8] above.

[57277] Advantageously the process for the production of the fine chemical palmitic acid leads to an enhanced production of the respective fine chemical. The terms “enhanced” or “increase” mean at least a 10%, 20%, 30%, 40% or 50%, preferably at least 60%, 70%, 80%, 90% or 100%, more preferably 150%, 200%, 300%, 400% or 500% higher production of the respective fine chemical palmitic acid in comparison to the wild-type as defined above, e.g. that means in comparison to a non-human organism without the aforementioned modification of the activity of a protein as shown in the respective line in Table II, application no. 11, column 5 or 8, or a fragment or a homolog thereof. The modification of the activity of a protein as shown in the respective line in Table II, application no. 11, column 5 or 8, or a homolog or a fragment thereof, or their combination can be achieved by joining the protein to a respective transit peptide, e.g. if for the respective encoding nucleic acid molecule in column 6 of Table I the term “plastidic” or “mitochondrial” is indicated.

[57278] Surprisingly it was found, that the transgenic expression of a protein as shown in the respective line in Table II, application no. 11, column 5, especially from the Saccaromyces cerevisiae, E. coli, Arabidopsis thaliana, Azotobacter vinelandii, Brassica napus, Glycine max, Oryza sativa, Physcomitrella patens, Synechocystis sp., Thermus thermophilus, Zea mays in a non-human organism, like a plant or a part thereof, such as Arabidopsis thaliana for example, or a microorganism, conferred a production of or an increase in palmitic acid,respectively, to the transgenic non-human organism as compared to a corresponding non-transformed wild type.

[57279] In one embodiment the transgenic expression of a protein as shown in the respective line in Table II, application no. 11, column 5 or 8, or a homolog or a fragment thereof, especially from the Saccaromyces cerevisiae, E. coli, Arabidopsis thaliana, Azotobacter vinelandii, Brassica napus, Glycine max, Oryza sativa, Physcomitrella patens, Synechocystis sp., Thermus thermophilus, Zea mays in a non-human organism, like a plant or a part thereof, such as Arabidopsis thaliana for example, or a microorganism, confers a production of or an increase in palmitic acid,respectively, to the transgenic non-human organism as compared to a corresponding non-transformed wild type.

[57280] Accordingly, in one embodiment, an increase of palmitic acid in a non-human organism, as compared to a corresponding non-transformed wild type non-human organism, is conferred in the process of the invention, if the activity of a polypeptide showing the activity of a protein phosphatase, or if the activity of the polypeptide At1g07430, preferably represented by SEQ ID NO. 17452, or a homolog or fragment thereof, or if the activity of a polypeptide encoded by a nucleic acid molecule comprising the nucleic acid SEQ ID NO. 17451, preferably the coding region thereof, or a homolog or fragment thereof, e.g. derived from Arabidopsis thaliana, is increased or generated. For example the activity of a nucleic acid molecule or a polypeptide comprising the nucleic acid, preferably the coding region thereof, or polypeptide or the consensus sequence or the polypeptide motif, as depicted in Table I, II or IV, application No. 11, column 5 or 8 in the respective same line as the nucleic acid molecule SEQ ID NO. 17451 or polypeptide SEQ ID NO. 17452, respectively, or a homolog or a fragment thereof, is increased or generated, or if the activity protein phosphatase is increased or generated in a non-human organism, like a microorganism or a plant cell, plant or part thereof, especially with non-targeted localization. For example, an increase of the palmitic acid of at least 1 percent, particularly in a range of 16 to 36-percent is conferred as compared to a corresponding non-transformed wild type non-human organism.

[57281] Accordingly, in one embodiment, an increase of palmitic acid in a non-human organism, as compared to a corresponding non-transformed wild type non-human organism, is conferred in the process of the invention, if the activity of a polypeptide showing the activity of a chlorophyllase, or if the activity of the polypeptide At1g19670, preferably represented by SEQ ID NO. 113652, or a homolog or fragment thereof, or if the activity of a polypeptide encoded by a nucleic acid molecule comprising the nucleic acid SEQ ID NO. 113651, preferably the coding region thereof, or a homolog or fragment thereof, e.g. derived from Arabidopsis thaliana, is increased or generated. For example the activity of a nucleic acid molecule or a polypeptide comprising the nucleic acid, preferably the coding region thereof, or polypeptide or the consensus sequence or the polypeptide motif, as depicted in Table I, II or IV, application No. 11, column 5 or 8 in the respective same line as the nucleic acid molecule SEQ ID NO. 113651 or polypeptide SEQ ID NO. 113652, respectively, or a homolog or a fragment thereof, is increased or generated, or if the activity chlorophyllase is increased or generated in a non-human organism, like a microorganism or a plant cell, plant or part thereof, especially with non-targeted localization. For example, an increase of the palmitic acid of at least 1 percent, particularly in a range of 15 to 27-percent is conferred as compared to a corresponding non-transformed wild type non-human organism.

[57282] Accordingly, in one embodiment, an increase of palmitic acid in a non-human organism, as compared to a corresponding non-transformed wild type non-human organism, is conferred in the process of the invention, if the activity of a polypeptide showing the activity of a At1g19800-protein, or if the activity of the polypeptide At1g19800, preferably represented by SEQ ID NO. 17638, or a homolog or fragment thereof, or if the activity of a polypeptide encoded by a nucleic acid molecule comprising the nucleic acid SEQ ID NO. 17637, preferably the coding region thereof, or a homolog or fragment thereof, e.g. derived from Arabidopsis thaliana, is increased or generated. For example the activity of a nucleic acid molecule or a polypeptide comprising the nucleic acid, preferably the coding region thereof, or polypeptide or the consensus sequence or the polypeptide motif, as depicted in Table I, II or IV, application No. 11, column 5 or 8 in the respective same line as the nucleic acid molecule SEQ ID NO. 17637 or polypeptide SEQ ID NO. 17638, respectively, or a homolog or a fragment thereof, is increased or generated, or if the activity At1g19800-protein is increased or generated in a non-human organism, like a microorganism or a plant cell, plant or part thereof, especially with non-targeted localization. For example, an increase of the palmitic acid of at least 1 percent, particularly in a range of 18 to 29-percent is conferred as compared to a corresponding non-transformed wild type non-human organism.

[57283] Accordingly, in one embodiment, an increase of palmitic acid in a non-human organism, as compared to a corresponding non-transformed wild type non-human organism, is conferred in the process of the invention, if the activity of a polypeptide showing the activity of a At1g23110-protein, or if the activity of the polypeptide At1g23110, preferably represented by SEQ ID NO. 102087, or a homolog or fragment thereof, or if the activity of a polypeptide encoded by a nucleic acid molecule comprising the nucleic acid SEQ ID NO. 102086, preferably the coding region thereof, or a homolog or fragment thereof, e.g. derived from Arabidopsis thaliana, is increased or generated. For example the activity of a nucleic acid molecule or a polypeptide comprising the nucleic acid, preferably the coding region thereof, or polypeptide or the consensus sequence or the polypeptide motif, as depicted in Table I, II or IV, application No. 11, column 5 or 8 in the respective same line as the nucleic acid molecule SEQ ID NO. 102086 or polypeptide SEQ ID NO. 102087, respectively, or a homolog or a fragment thereof, is increased or generated, or if the activity At1g23110-protein is increased or generated in a non-human organism, like a microorganism or a plant cell, plant or part thereof, especially with non-targeted localization. For example, an increase of the palmitic acid of at least 1 percent, particularly in a range of 24 to 58-percent is conferred as compared to a corresponding non-transformed wild type non-human organism.

[57284] Accordingly, in one embodiment, an increase of palmitic acid in a non-human organism, as compared to a corresponding non-transformed wild type non-human organism, is conferred in the process of the invention, if the activity of a polypeptide showing the activity of a transcription factor, or if the activity of the polypeptide At1g68320, preferably represented by SEQ ID NO. 1062, or a homolog or fragment thereof, or if the activity of a polypeptide encoded by a nucleic acid molecule comprising the nucleic acid SEQ ID NO. 1061, preferably the coding region thereof, or a homolog or fragment thereof, e.g. derived from Arabidopsis thaliana, is increased or generated. For example the activity of a nucleic acid molecule or a polypeptide comprising the nucleic acid, preferably the coding region thereof, or polypeptide or the consensus sequence or the polypeptide motif, as depicted in Table I, II or IV, application No. 11, column 5 or 8 in the respective same line as the nucleic acid molecule SEQ ID NO. 1061 or polypeptide SEQ ID NO. 1062, respectively, or a homolog or a fragment thereof, is increased or generated, or if the activity transcription factor is increased or generated in a non-human organism, like a microorganism or a plant cell, plant or part thereof, especially with non-targeted localization. For example, an increase of the palmitic acid of at least 1 percent, particularly in a range of 16 to 84-percent is conferred as compared to a corresponding non-transformed wild type non-human organism.

[57285] Accordingly, in one embodiment, an increase of palmitic acid in a non-human organism, as compared to a corresponding non-transformed wild type non-human organism, is conferred in the process of the invention, if the activity of a polypeptide showing the activity of a protein phosphatase, or if the activity of the polypeptide At1g72770, preferably represented by SEQ ID NO. 19420, or a homolog or fragment thereof, or if the activity of a polypeptide encoded by a nucleic acid molecule comprising the nucleic acid SEQ ID NO. 19419, preferably the coding region thereof, or a homolog or fragment thereof, e.g. derived from Arabidopsis thaliana, is increased or generated. For example the activity of a nucleic acid molecule or a polypeptide comprising the nucleic acid, preferably the coding region thereof, or polypeptide or the consensus sequence or the polypeptide motif, as depicted in Table I, II or IV, application No. 11, column 5 or 8 in the respective same line as the nucleic acid molecule SEQ ID NO. 19419 or polypeptide SEQ ID NO. 19420, respectively, or a homolog or a fragment thereof, is increased or generated, or if the activity protein phosphatase is increased or generated in a non-human organism, like a microorganism or a plant cell, plant or part thereof, especially with non-targeted localization. For example, an increase of the palmitic acid of at least 1 percent, particularly in a range of 16 to 54-percent is conferred as compared to a corresponding non-transformed wild type non-human organism.

[57286] Accordingly, in one embodiment, an increase of palmitic acid in a non-human organism, as compared to a corresponding non-transformed wild type non-human organism, is conferred in the process of the invention, if the activity of a polypeptide showing the activity of a At2g45420-protein, or if the activity of the polypeptide At2g45420, preferably represented by SEQ ID NO. 1624, or a homolog or fragment thereof, or if the activity of a polypeptide encoded by a nucleic acid molecule comprising the nucleic acid SEQ ID NO. 1623, preferably the coding region thereof, or a homolog or fragment thereof, e.g. derived from Arabidopsis thaliana, is increased or generated. For example the activity of a nucleic acid molecule or a polypeptide comprising the nucleic acid, preferably the coding region thereof, or polypeptide or the consensus sequence or the polypeptide motif, as depicted in Table I, II or IV, application No. 11, column 5 or 8 in the respective same line as the nucleic acid molecule SEQ ID NO. 1623 or polypeptide SEQ ID NO. 1624, respectively, or a homolog or a fragment thereof, is increased or generated, or if the activity At2g45420-protein is increased or generated in a non-human organism, like a microorganism or a plant cell, plant or part thereof, especially with non-targeted localization. For example, an increase of the palmitic acid of at least 1 percent, particularly in a range of 18 to 48-percent is conferred as compared to a corresponding non-transformed wild type non-human organism.

[57287] Accordingly, in one embodiment, an increase of palmitic acid in a non-human organism, as compared to a corresponding non-transformed wild type non-human organism, is conferred in the process of the invention, if the activity of a polypeptide showing the activity of a heat shock transcription factor, or if the activity of the polypeptide At3g02990, preferably represented by SEQ ID NO. 68658, or a homolog or fragment thereof, or if the activity of a polypeptide encoded by a nucleic acid molecule comprising the nucleic acid SEQ ID NO. 68657, preferably the coding region thereof, or a homolog or fragment thereof, e.g. derived from Arabidopsis thaliana, is increased or generated. For example the activity of a nucleic acid molecule or a polypeptide comprising the nucleic acid, preferably the coding region thereof, or polypeptide or the consensus sequence or the polypeptide motif, as depicted in Table I, II or IV, application No. 11, column 5 or 8 in the respective same line as the nucleic acid molecule SEQ ID NO. 68657 or polypeptide SEQ ID NO. 68658, respectively, or a homolog or a fragment thereof, is increased or generated, or if the activity heat shock transcription factor is increased or generated in a non-human organism, like a microorganism or a plant cell, plant or part thereof, especially with non-targeted localization. For example, an increase of the palmitic acid of at least 1 percent, particularly in a range of 15 to 33-percent is conferred as compared to a corresponding non-transformed wild type non-human organism.

[57288] Accordingly, in one embodiment, an increase of palmitic acid in a non-human organism, as compared to a corresponding non-transformed wild type non-human organism, is conferred in the process of the invention, if the activity of a polypeptide showing the activity of a CCAAT-binding transcription factor, or if the activity of the polypeptide At3g20910, preferably represented by SEQ ID NO. 22922, or a homolog or fragment thereof, or if the activity of a polypeptide encoded by a nucleic acid molecule comprising the nucleic acid SEQ ID NO. 22921, preferably the coding region thereof, or a homolog or fragment thereof, e.g. derived from Arabidopsis thaliana, is increased or generated. For example the activity of a nucleic acid molecule or a polypeptide comprising the nucleic acid, preferably the coding region thereof, or polypeptide or the consensus sequence or the polypeptide motif, as depicted in Table I, II or IV, application No. 11, column 5 or 8 in the respective same line as the nucleic acid molecule SEQ ID NO. 22921 or polypeptide SEQ ID NO. 22922, respectively, or a homolog or a fragment thereof, is increased or generated, or if the activity CCAAT-binding transcription factor is increased or generated in a non-human organism, like a microorganism or a plant cell, plant or part thereof, especially with non-targeted localization. For example, an increase of the palmitic acid of at least 1 percent, particularly in a range of 19 to 41-percent is conferred as compared to a corresponding non-transformed wild type non-human organism.

[57289] Accordingly, in one embodiment, an increase of palmitic acid in a non-human organism, as compared to a corresponding non-transformed wild type non-human organism, is conferred in the process of the invention, if the activity of a polypeptide showing the activity of a glutaredoxin, or if the activity of the polypeptide At3g62950, preferably represented by SEQ ID NO. 2936, or a homolog or fragment thereof, or if the activity of a polypeptide encoded by a nucleic acid molecule comprising the nucleic acid SEQ ID NO. 2935, preferably the coding region thereof, or a homolog or fragment thereof, e.g. derived from Arabidopsis thaliana, is increased or generated. For example the activity of a nucleic acid molecule or a polypeptide comprising the nucleic acid, preferably the coding region thereof, or polypeptide or the consensus sequence or the polypeptide motif, as depicted in Table I, II or IV, application No. 11, column 5 or 8 in the respective same line as the nucleic acid molecule SEQ ID NO. 2935 or polypeptide SEQ ID NO. 2936, respectively, or a homolog or a fragment thereof, is increased or generated, or if the activity glutaredoxin is increased or generated in a non-human organism, like a microorganism or a plant cell, plant or part thereof, especially with non-targeted localization. For example, an increase of the palmitic acid of at least 1 percent, particularly in a range of 19 to 40 percent is conferred as compared to a corresponding non-transformed wild type non-human organism.

[57290] Accordingly, in one embodiment, an increase of palmitic acid in a non-human organism, as compared to a corresponding non-transformed wild type non-human organism, is conferred in the process of the invention, if the activity of a polypeptide showing the activity of a monothiol glutaredoxin, or if the activity of the polypeptide At4g15670, preferably represented by SEQ ID NO. 3280, or a homolog or fragment thereof, or if the activity of a polypeptide encoded by a nucleic acid molecule comprising the nucleic acid SEQ ID NO. 3279, preferably the coding region thereof, or a homolog or fragment thereof, e.g. derived from Arabidopsis thaliana, is increased or generated. For example the activity of a nucleic acid molecule or a polypeptide comprising the nucleic acid, preferably the coding region thereof, or polypeptide or the consensus sequence or the polypeptide motif, as depicted in Table I, II or IV, application No. 11, column 5 or 8 in the respective same line as the nucleic acid molecule SEQ ID NO. 3279 or polypeptide SEQ ID NO. 3280, respectively, or a homolog or a fragment thereof, is increased or generated, or if the activity monothiol glutaredoxin is increased or generated in a non-human organism, like a microorganism or a plant cell, plant or part thereof, especially with non-targeted localization. For example, an increase of the palmitic acid of at least 1 percent, particularly in a range of 16 to 75-percent is conferred as compared to a corresponding non-transformed wild type non-human organism.

[57291] Accordingly, in one embodiment, an increase of palmitic acid in a non-human organism, as compared to a corresponding non-transformed wild type non-human organism, is conferred in the process of the invention, if the activity of a polypeptide showing the activity of a heat shock transcription factor, or if the activity of the polypeptide At4g18880, preferably represented by SEQ ID NO. 24233, or a homolog or fragment thereof, or if the activity of a polypeptide encoded by a nucleic acid molecule comprising the nucleic acid SEQ ID NO. 24232, preferably the coding region thereof, or a homolog or fragment thereof, e.g. derived from Arabidopsis thaliana, is increased or generated. For example the activity of a nucleic acid molecule or a polypeptide comprising the nucleic acid, preferably the coding region thereof, or polypeptide or the consensus sequence or the polypeptide motif, as depicted in Table I, II or IV, application No. 11, column 5 or 8 in the respective same line as the nucleic acid molecule SEQ ID NO. 24232 or polypeptide SEQ ID NO. 24233, respectively, or a homolog or a fragment thereof, is increased or generated, or if the activity heat shock transcription factor is increased or generated in a non-human organism, like a microorganism or a plant cell, plant or part thereof, especially with non-targeted localization. For example, an increase of the palmitic acid of at least 1 percent, particularly in a range of 19 to 23-percent is conferred as compared to a corresponding non-transformed wild type non-human organism.

[57292] Accordingly, in one embodiment, an increase of palmitic acid in a non-human organism, as compared to a corresponding non-transformed wild type non-human organism, is conferred in the process of the invention, if the activity of a polypeptide showing the activity of a protein phosphatase, or if the activity of the polypeptide At4g26080, preferably represented by SEQ ID NO. 68850, or a homolog or fragment thereof, or if the activity of a polypeptide encoded by a nucleic acid molecule comprising the nucleic acid SEQ ID NO. 68849, preferably the coding region thereof, or a homolog or fragment thereof, e.g. derived from Arabidopsis thaliana, is increased or generated. For example the activity of a nucleic acid molecule or a polypeptide comprising the nucleic acid, preferably the coding region thereof, or polypeptide or the consensus sequence or the polypeptide motif, as depicted in Table I, II or IV, application No. 11, column 5 or 8 in the respective same line as the nucleic acid molecule SEQ ID NO. 68849 or polypeptide SEQ ID NO. 68850, respectively, or a homolog or a fragment thereof, is increased or generated, or if the activity protein phosphatase is increased or generated in a non-human organism, like a microorganism or a plant cell, plant or part thereof, especially with non-targeted localization. For example, an increase of the palmitic acid of at least 1 percent, particularly in a range of 16 to 18-percent is conferred as compared to a corresponding non-transformed wild type non-human organism.

[57293] Accordingly, in one embodiment, an increase of palmitic acid in a non-human organism, as compared to a corresponding non-transformed wild type non-human organism, is conferred in the process of the invention, if the activity of a polypeptide showing the activity of a glutaredoxin, or if the activity of the polypeptide At4g33040, preferably represented by SEQ ID NO. 4103, or a homolog or fragment thereof, or if the activity of a polypeptide encoded by a nucleic acid molecule comprising the nucleic acid SEQ ID NO. 4102, preferably the coding region thereof, or a homolog or fragment thereof, e.g. derived from Arabidopsis thaliana, is increased or generated. For example the activity of a nucleic acid molecule or a polypeptide comprising the nucleic acid, preferably the coding region thereof, or polypeptide or the consensus sequence or the polypeptide motif, as depicted in Table I, II or IV, application No. 11, column 5 or 8 in the respective same line as the nucleic acid molecule SEQ ID NO. 4102 or polypeptide SEQ ID NO. 4103, respectively, or a homolog or a fragment thereof, is increased or generated, or if the activity glutaredoxin is increased or generated in a non-human organism, like a microorganism or a plant cell, plant or part thereof, especially with non-targeted localization. For example, an increase of the palmitic acid of at least 1 percent, particularly in a range of 19 to 36-percent is conferred as compared to a corresponding non-transformed wild type non-human organism.

[57294] Accordingly, in one embodiment, an increase of palmitic acid in a non-human organism, as compared to a corresponding non-transformed wild type non-human organism, is conferred in the process of the invention, if the activity of a polypeptide showing the activity of a calcium-dependent protein kinase, or if the activity of the polypeptide At4g35310, preferably represented by SEQ ID NO. 4349, or a homolog or fragment thereof, or if the activity of a polypeptide encoded by a nucleic acid molecule comprising the nucleic acid SEQ ID NO. 4348, preferably the coding region thereof, or a homolog or fragment thereof, e.g. derived from Arabidopsis thaliana, is increased or generated. For example the activity of a nucleic acid molecule or a polypeptide comprising the nucleic acid, preferably the coding region thereof, or polypeptide or the consensus sequence or the polypeptide motif, as depicted in Table I, II or IV, application No. 11, column 5 or 8 in the respective same line as the nucleic acid molecule SEQ ID NO. 4348 or polypeptide SEQ ID NO. 4349, respectively, or a homolog or a fragment thereof, is increased or generated, or if the activity calcium-dependent protein kinase is increased or generated in a non-human organism, like a microorganism or a plant cell, plant or part thereof, especially with non-targeted localization. For example, an increase of the palmitic acid of at least 1 percent, particularly in a range of 16 to 40-percent is conferred as compared to a corresponding non-transformed wild type non-human organism.

[57295] Accordingly, in one embodiment, an increase of palmitic acid in a non-human organism, as compared to a corresponding non-transformed wild type non-human organism, is conferred in the process of the invention, if the activity of a polypeptide showing the activity of a protein phosphatase, or if the activity of the polypeptide At5g57050, preferably represented by SEQ ID NO. 5319, or a homolog or fragment thereof, or if the activity of a polypeptide encoded by a nucleic acid molecule comprising the nucleic acid SEQ ID NO. 5318, preferably the coding region thereof, or a homolog or fragment thereof, e.g. derived from Arabidopsis thaliana, is increased or generated. For example the activity of a nucleic acid molecule or a polypeptide comprising the nucleic acid, preferably the coding region thereof, or polypeptide or the consensus sequence or the polypeptide motif, as depicted in Table I, II or IV, application No. 11, column 5 or 8 in the respective same line as the nucleic acid molecule SEQ ID NO. 5318 or polypeptide SEQ ID NO. 5319, respectively, or a homolog or a fragment thereof, is increased or generated, or if the activity protein phosphatase is increased or generated in a non-human organism, like a microorganism or a plant cell, plant or part thereof, especially with non-targeted localization. For example, an increase of the palmitic acid of at least 1 percent, particularly in a range of 17 to 43-percent is conferred as compared to a corresponding non-transformed wild type non-human organism.

[57296] Accordingly, in one embodiment, an increase of palmitic acid in a non-human organism, as compared to a corresponding non-transformed wild type non-human organism, is conferred in the process of the invention, if the activity of a polypeptide showing the activity of a protein phosphatase, or if the activity of the polypeptide At5g59220, preferably represented by SEQ ID NO. 25499, or a homolog or fragment thereof, or if the activity of a polypeptide encoded by a nucleic acid molecule comprising the nucleic acid SEQ ID NO. 25498, preferably the coding region thereof, or a homolog or fragment thereof, e.g. derived from Arabidopsis thaliana, is increased or generated. For example the activity of a nucleic acid molecule or a polypeptide comprising the nucleic acid, preferably the coding region thereof, or polypeptide or the consensus sequence or the polypeptide motif, as depicted in Table I, II or IV, application No. 11, column 5 or 8 in the respective same line as the nucleic acid molecule SEQ ID NO. 25498 or polypeptide SEQ ID NO. 25499, respectively, or a homolog or a fragment thereof, is increased or generated, or if the activity protein phosphatase is increased or generated in a non-human organism, like a microorganism or a plant cell, plant or part thereof, especially with non-targeted localization. For example, an increase of the palmitic acid of at least 1 percent, particularly in a range of 19 to 400-percent is conferred as compared to a corresponding non-transformed wild type non-human organism.

[57297] Accordingly, in one embodiment, an increase of palmitic acid in a non-human organism, as compared to a corresponding non-transformed wild type non-human organism, is conferred in the process of the invention, if the activity of a polypeptide showing the activity of a oxidoreductase, or if the activity of the polypeptide AvinDRAFT_{—}1788, preferably represented by SEQ ID NO. 114084, or a homolog or fragment thereof, or if the activity of a polypeptide encoded by a nucleic acid molecule comprising the nucleic acid SEQ ID NO. 114083, preferably the coding region thereof, or a homolog or fragment thereof, e.g. derived from Azotobacter vinelandii, is increased or generated. For example the activity of a nucleic acid molecule or a polypeptide comprising the nucleic acid, preferably the coding region thereof, or polypeptide or the consensus sequence or the polypeptide motif, as depicted in Table I, II or IV, application No. 11, column 5 or 8 in the respective same line as the nucleic acid molecule SEQ ID NO. 114083 or polypeptide SEQ ID NO. 114084, respectively, or a homolog or a fragment thereof, is increased or generated, or if the activity oxidoreductase is increased or generated in a non-human organism, like a microorganism or a plant cell, plant or part thereof, especially with non-targeted localization. For example, an increase of the palmitic acid of at least 1 percent, particularly in a range of 17 to 33-percent is conferred as compared to a corresponding non-transformed wild type non-human organism.

[57298] Accordingly, in one embodiment, an increase of palmitic acid in a non-human organism, as compared to a corresponding non-transformed wild type non-human organism, is conferred in the process of the invention, if the activity of a polypeptide showing the activity of a ThiF family protein, or if the activity of the polypeptide AvinDRAFT_{—}3577, preferably represented by SEQ ID NO. 111156, or a homolog or fragment thereof, or if the activity of a polypeptide encoded by a nucleic acid molecule comprising the nucleic acid SEQ ID NO. 111155, preferably the coding region thereof, or a homolog or fragment thereof, e.g. derived from Azotobacter vinelandii, is increased or generated. For example the activity of a nucleic acid molecule or a polypeptide comprising the nucleic acid, preferably the coding region thereof, or polypeptide or the consensus sequence or the polypeptide motif, as depicted in Table I, II or IV, application No. 11, column 5 or 8 in the respective same line as the nucleic acid molecule SEQ ID NO. 111155 or polypeptide SEQ ID NO. 111156, respectively, or a homolog or a fragment thereof, is increased or generated, or if the activity ThiF family protein is increased or generated in a non-human organism, like a microorganism or a plant cell, plant or part thereof, especially with non-targeted localization. For example, an increase of the palmitic acid of at least 1 percent, particularly in a range of 18 to 49-percent is conferred as compared to a corresponding non-transformed wild type non-human organism.

[57299] Accordingly, in one embodiment, an increase of palmitic acid in a non-human organism, as compared to a corresponding non-transformed wild type non-human organism, is conferred in the process of the invention, if the activity of a polypeptide showing the activity of a recombinase A, or if the activity of the polypeptide AvinDRAFT_{—}3629, preferably represented by SEQ ID NO. 114232, or a homolog or fragment thereof, or if the activity of a polypeptide encoded by a nucleic acid molecule comprising the nucleic acid SEQ ID NO. 114231, preferably the coding region thereof, or a homolog or fragment thereof, e.g. derived from Azotobacter vinelandii, is increased or generated. For example the activity of a nucleic acid molecule or a polypeptide comprising the nucleic acid, preferably the coding region thereof, or polypeptide or the consensus sequence or the polypeptide motif, as depicted in Table I, II or IV, application No. 11, column 5 or 8 in the respective same line as the nucleic acid molecule SEQ ID NO. 114231 or polypeptide SEQ ID NO. 114232, respectively, or a homolog or a fragment thereof, is increased or generated, or if the activity recombinase A is increased or generated in a non-human organism, like a microorganism or a plant cell, plant or part thereof, especially with non-targeted localization. For example, an increase of the palmitic acid of at least 1 percent, particularly in a range of 16 to 51-percent is conferred as compared to a corresponding non-transformed wild type non-human organism.

[57300] Accordingly, in one embodiment, an increase of palmitic acid in a non-human organism, as compared to a corresponding non-transformed wild type non-human organism, is conferred in the process of the invention, if the activity of a polypeptide showing the activity of a NADH-quinone oxidoreductase subunit, or if the activity of the polypeptide AvinDRAFT_{—}4606, preferably represented by SEQ ID NO. 73720, or a homolog or fragment thereof, or if the activity of a polypeptide encoded by a nucleic acid molecule comprising the nucleic acid SEQ ID NO. 73719, preferably the coding region thereof, or a homolog or fragment thereof, e.g. derived from Azotobacter vinelandii, is increased or generated. For example the activity of a nucleic acid molecule or a polypeptide comprising the nucleic acid, preferably the coding region thereof, or polypeptide or the consensus sequence or the polypeptide motif, as depicted in Table I, II or IV, application No. 11, column 5 or 8 in the respective same line as the nucleic acid molecule SEQ ID NO. 73719 or polypeptide SEQ ID NO. 73720, respectively, or a homolog or a fragment thereof, is increased or generated, or if the activity NADH-quinone oxidoreductase subunit is increased or generated in a non-human organism, like a microorganism or a plant cell, plant or part thereof, especially with non-targeted localization. For example, an increase of the palmitic acid of at least 1 percent, particularly in a range of 18 to 57-percent is conferred as compared to a corresponding non-transformed wild type non-human organism.

[57301] Accordingly, in one embodiment, an increase of palmitic acid in a non-human organism, as compared to a corresponding non-transformed wild type non-human organism, is conferred in the process of the invention, if the activity of a polypeptide showing the activity of a HesB/YadR/YfhF family protein, or if the activity of the polypeptide AvinDRAFT_{—}5467, preferably represented by SEQ ID NO. 32649, or a homolog or fragment thereof, or if the activity of a polypeptide encoded by a nucleic acid molecule comprising the nucleic acid SEQ ID NO. 32648, preferably the coding region thereof, or a homolog or fragment thereof, e.g. derived from Azotobacter vinelandii, is increased or generated. For example the activity of a nucleic acid molecule or a polypeptide comprising the nucleic acid, preferably the coding region thereof, or polypeptide or the consensus sequence or the polypeptide motif, as depicted in Table I, II or IV, application No. 11, column 5 or 8 in the respective same line as the nucleic acid molecule SEQ ID NO. 32648 or polypeptide SEQ ID NO. 32649, respectively, or a homolog or a fragment thereof, is increased or generated, or if the activity HesB/YadR/YfhF family protein is increased or generated in a non-human organism, like a microorganism or a plant cell, plant or part thereof, especially with non-targeted localization. For example, an increase of the palmitic acid of at least 1 percent, particularly in a range of 17 to 61-percent is conferred as compared to a corresponding non-transformed wild type non-human organism.

[57302] Accordingly, in one embodiment, an increase of palmitic acid in a non-human organism, as compared to a corresponding non-transformed wild type non-human organism, is conferred in the process of the invention, if the activity of a polypeptide showing the activity of a peptidyl-prolyl cis-trans isomerase, or if the activity of the polypeptide AvinDRAFT_{—}6075, preferably represented by SEQ ID NO. 6675, or a homolog or fragment thereof, or if the activity of a polypeptide encoded by a nucleic acid molecule comprising the nucleic acid SEQ ID NO. 6674, preferably the coding region thereof, or a homolog or fragment thereof, e.g. derived from Azotobacter vinelandii, is increased or generated. For example the activity of a nucleic acid molecule or a polypeptide comprising the nucleic acid, preferably the coding region thereof, or polypeptide or the consensus sequence or the polypeptide motif, as depicted in Table I, II or IV, application No. 11, column 5 or 8 in the respective same line as the nucleic acid molecule SEQ ID NO. 6674 or polypeptide SEQ ID NO. 6675, respectively, or a homolog or a fragment thereof, is increased or generated, or if the activity peptidyl-prolyl cis-trans isomerase is increased or generated in a non-human organism, like a microorganism or a plant cell, plant or part thereof, especially with non-targeted localization. For example, an increase of the palmitic acid of at least 1 percent, particularly in a range of 18 to 31-percent is conferred as compared to a corresponding non-transformed wild type non-human organism.

[57303] Accordingly, in one embodiment, an increase of palmitic acid in a non-human organism, as compared to a corresponding non-transformed wild type non-human organism, is conferred in the process of the invention, if the activity of a polypeptide showing the activity of a purine nucleoside phosphorylase, or if the activity of the polypeptide AvinDRAFT_{—}6700, preferably represented by SEQ ID NO. 34045, or a homolog or fragment thereof, or if the activity of a polypeptide encoded by a nucleic acid molecule comprising the nucleic acid SEQ ID NO. 34044, preferably the coding region thereof, or a homolog or fragment thereof, e.g. derived from Azotobacter vinelandii, is increased or generated. For example the activity of a nucleic acid molecule or a polypeptide comprising the nucleic acid, preferably the coding region thereof, or polypeptide or the consensus sequence or the polypeptide motif, as depicted in Table I, II or IV, application No. 11, column 5 or 8 in the respective same line as the nucleic acid molecule SEQ ID NO. 34044 or polypeptide SEQ ID NO. 34045, respectively, or a homolog or a fragment thereof, is increased or generated, or if the activity purine nucleoside phosphorylase is increased or generated in a non-human organism, like a microorganism or a plant cell, plant or part thereof, especially with non-targeted localization. For example, an increase of the palmitic acid of at least 1 percent, particularly in a range of 21 to 29-percent is conferred as compared to a corresponding non-transformed wild type non-human organism.

[57304] Accordingly, in one embodiment, an increase of palmitic acid in a non-human organism, as compared to a corresponding non-transformed wild type non-human organism, is conferred in the process of the invention, if the activity of a polypeptide showing the activity of a b0050-protein, or if the activity of the polypeptide B0050, preferably represented by SEQ ID NO. 103959, or a homolog or fragment thereof, or if the activity of a polypeptide encoded by a nucleic acid molecule comprising the nucleic acid SEQ ID NO. 103958, preferably the coding region thereof, or a homolog or fragment thereof, e.g. derived from Escherichia coli, is increased or generated. For example the activity of a nucleic acid molecule or a polypeptide comprising the nucleic acid, preferably the coding region thereof, or polypeptide or the consensus sequence or the polypeptide motif, as depicted in Table I, II or IV, application No. 11, column 5 or 8 in the respective same line as the nucleic acid molecule SEQ ID NO. 103958 or polypeptide SEQ ID NO. 103959, respectively, or a homolog or a fragment thereof, is increased or generated, or if the activity b0050-protein is increased or generated in a non-human organism, like a microorganism or a plant cell, plant or part thereof, especially with non-targeted localization. For example, an increase of the palmitic acid of at least 1 percent, particularly in a range of 16 to 27-percent is conferred as compared to a corresponding non-transformed wild type non-human organism.

[57305] Accordingly, in one embodiment, an increase of palmitic acid in a non-human organism, as compared to a corresponding non-transformed wild type non-human organism, is conferred in the process of the invention, if the activity of a polypeptide showing the activity of a sodium/proton antiporter, or if the activity of the polypeptide B1186, preferably represented by SEQ ID NO. 37401, or a homolog or fragment thereof, or if the activity of a polypeptide encoded by a nucleic acid molecule comprising the nucleic acid SEQ ID NO. 37400, preferably the coding region thereof, or a homolog or fragment thereof, e.g. derived from Escherichia coli, is increased or generated. For example the activity of a nucleic acid molecule or a polypeptide comprising the nucleic acid, preferably the coding region thereof, or polypeptide or the consensus sequence or the polypeptide motif, as depicted in Table I, II or IV, application No. 11, column 5 or 8 in the respective same line as the nucleic acid molecule SEQ ID NO. 37400 or polypeptide SEQ ID NO. 37401, respectively, or a homolog or a fragment thereof, is increased or generated, or if the activity sodium/proton antiporter is increased or generated in a non-human organism, like a microorganism or a plant cell, plant or part thereof, especially with non-targeted localization. For example, an increase of the palmitic acid of at least 1 percent, particularly in a range of 20 to 47-percent is conferred as compared to a corresponding non-transformed wild type non-human organism.

[57306] Accordingly, in one embodiment, an increase of palmitic acid in a non-human organism, as compared to a corresponding non-transformed wild type non-human organism, is conferred in the process of the invention, if the activity of a polypeptide showing the activity of a b1234-protein, or if the activity of the polypeptide B1234, preferably represented by SEQ ID NO. 112112, or a homolog or fragment thereof, or if the activity of a polypeptide encoded by a nucleic acid molecule comprising the nucleic acid SEQ ID NO. 112111, preferably the coding region thereof, or a homolog or fragment thereof, e.g. derived from Escherichia coli, is increased or generated. For example the activity of a nucleic acid molecule or a polypeptide comprising the nucleic acid, preferably the coding region thereof, or polypeptide or the consensus sequence or the polypeptide motif, as depicted in Table I, II or IV, application No. 11, column 5 or 8 in the respective same line as the nucleic acid molecule SEQ ID NO. 112111 or polypeptide SEQ ID NO. 112112, respectively, or a homolog or a fragment thereof, is increased or generated, or if the activity b1234-protein is increased or generated in a non-human organism, like a microorganism or a plant cell, plant or part thereof, especially with non-targeted localization. For example, an increase of the palmitic acid of at least 1 percent, particularly in a range of 16 to 22-percent is conferred as compared to a corresponding non-transformed wild type non-human organism.

[57307] Accordingly, in one embodiment, an increase of palmitic acid in a non-human organism, as compared to a corresponding non-transformed wild type non-human organism, is conferred in the process of the invention, if the activity of a polypeptide showing the activity of a b1248-protein, or if the activity of the polypeptide B1248, preferably represented by SEQ ID NO. 119136, or a homolog or fragment thereof, or if the activity of a polypeptide encoded by a nucleic acid molecule comprising the nucleic acid SEQ ID NO. 119135, preferably the coding region thereof, or a homolog or fragment thereof, e.g. derived from Escherichia coli, is increased or generated. For example the activity of a nucleic acid molecule or a polypeptide comprising the nucleic acid, preferably the coding region thereof, or polypeptide or the consensus sequence or the polypeptide motif, as depicted in Table I, II or IV, application No. 11, column 5 or 8 in the respective same line as the nucleic acid molecule SEQ ID NO. 119135 or polypeptide SEQ ID NO. 119136, respectively, or a homolog or a fragment thereof, is increased or generated, or if the activity b1248-protein is increased or generated in a non-human organism, like a microorganism or a plant cell, plant or part thereof, especially with non-targeted localization. For example, an increase of the palmitic acid of at least 1 percent, particularly in a range of 15 to 22-percent is conferred as compared to a corresponding non-transformed wild type non-human organism.

[57308] Accordingly, in one embodiment, an increase of palmitic acid in a non-human organism, as compared to a corresponding non-transformed wild type non-human organism, is conferred in the process of the invention, if the activity of a polypeptide showing the activity of a b1330-protein, or if the activity of the polypeptide B1330, preferably represented by SEQ ID NO. 38227, or a homolog or fragment thereof, or if the activity of a polypeptide encoded by a nucleic acid molecule comprising the nucleic acid SEQ ID NO. 38226, preferably the coding region thereof, or a homolog or fragment thereof, e.g. derived from Escherichia coli, is increased or generated. For example the activity of a nucleic acid molecule or a polypeptide comprising the nucleic acid, preferably the coding region thereof, or polypeptide or the consensus sequence or the polypeptide motif, as depicted in Table I, II or IV, application No. 11, column 5 or 8 in the respective same line as the nucleic acid molecule SEQ ID NO. 38226 or polypeptide SEQ ID NO. 38227, respectively, or a homolog or a fragment thereof, is increased or generated, or if the activity b1330-protein is increased or generated in a non-human organism, like a microorganism or a plant cell, plant or part thereof, especially with non-targeted localization. For example, an increase of the palmitic acid of at least 1 percent, particularly in a range of 25 to 36-percent is conferred as compared to a corresponding non-transformed wild type non-human organism.

[57309] Accordingly, in one embodiment, an increase of palmitic acid in a non-human organism, as compared to a corresponding non-transformed wild type non-human organism, is conferred in the process of the invention, if the activity of a polypeptide showing the activity of a lipoprotein precursor, or if the activity of the polypeptide B1431, preferably represented by SEQ ID NO. 38267, or a homolog or fragment thereof, or if the activity of a polypeptide encoded by a nucleic acid molecule comprising the nucleic acid SEQ ID NO. 38266, preferably the coding region thereof, or a homolog or fragment thereof, e.g. derived from Escherichia coli, is increased or generated. For example the activity of a nucleic acid molecule or a polypeptide comprising the nucleic acid, preferably the coding region thereof, or polypeptide or the consensus sequence or the polypeptide motif, as depicted in Table I, II or IV, application No. 11, column 5 or 8 in the respective same line as the nucleic acid molecule SEQ ID NO. 38266 or polypeptide SEQ ID NO. 38267, respectively, or a homolog or a fragment thereof, is increased or generated, or if the activity lipoprotein precursor is increased or generated in a non-human organism, like a microorganism or a plant cell, plant or part thereof, especially with plastidic localization. For example, an increase of the palmitic acid of at least 1 percent, particularly in a range of 16 to 25-percent is conferred as compared to a corresponding non-transformed wild type non-human organism.

[57310] Accordingly, in one embodiment, an increase of palmitic acid in a non-human organism, as compared to a corresponding non-transformed wild type non-human organism, is conferred in the process of the invention, if the activity of a polypeptide showing the activity of a Fe—S subunit of oxidoreductase, or if the activity of the polypeptide B1589, preferably represented by SEQ ID NO. 78155, or a homolog or fragment thereof, or if the activity of a polypeptide encoded by a nucleic acid molecule comprising the nucleic acid SEQ ID NO. 78154, preferably the coding region thereof, or a homolog or fragment thereof, e.g. derived from Escherichia coli, is increased or generated. For example the activity of a nucleic acid molecule or a polypeptide comprising the nucleic acid, preferably the coding region thereof, or polypeptide or the consensus sequence or the polypeptide motif, as depicted in Table I, II or IV, application No. 11, column 5 or 8 in the respective same line as the nucleic acid molecule SEQ ID NO. 78154 or polypeptide SEQ ID NO. 78155, respectively, or a homolog or a fragment thereof, is increased or generated, or if the activity Fe—S subunit of oxidoreductase is increased or generated in a non-human organism, like a microorganism or a plant cell, plant or part thereof, especially with non-targeted localization. For example, an increase of the palmitic acid of at least 1 percent, particularly in a range of 16 to 25-percent is conferred as compared to a corresponding non-transformed wild type non-human organism.

[57311] Accordingly, in one embodiment, an increase of palmitic acid in a non-human organism, as compared to a corresponding non-transformed wild type non-human organism, is conferred in the process of the invention, if the activity of a polypeptide showing the activity of a acid shock protein, or if the activity of the polypeptide B1597, preferably represented by SEQ ID NO. 38301, or a homolog or fragment thereof, or if the activity of a polypeptide encoded by a nucleic acid molecule comprising the nucleic acid SEQ ID NO. 38300, preferably the coding region thereof, or a homolog or fragment thereof, e.g. derived from Escherichia coli, is increased or generated. For example the activity of a nucleic acid molecule or a polypeptide comprising the nucleic acid, preferably the coding region thereof, or polypeptide or the consensus sequence or the polypeptide motif, as depicted in Table I, II or IV, application No. 11, column 5 or 8 in the respective same line as the nucleic acid molecule SEQ ID NO. 38300 or polypeptide SEQ ID NO. 38301, respectively, or a homolog or a fragment thereof, is increased or generated, or if the activity acid shock protein is increased or generated in a non-human organism, like a microorganism or a plant cell, plant or part thereof, especially with non-targeted localization. For example, an increase of the palmitic acid of at least 1 percent, particularly in a range of 20 to 44-percent is conferred as compared to a corresponding non-transformed wild type non-human organism.

[57312] Accordingly, in one embodiment, an increase of palmitic acid in a non-human organism, as compared to a corresponding non-transformed wild type non-human organism, is conferred in the process of the invention, if the activity of a polypeptide showing the activity of a b1670-protein, or if the activity of the polypeptide B1670, preferably represented by SEQ ID NO. 78754, or a homolog or fragment thereof, or if the activity of a polypeptide encoded by a nucleic acid molecule comprising the nucleic acid SEQ ID NO. 78753, preferably the coding region thereof, or a homolog or fragment thereof, e.g. derived from Escherichia coli, is increased or generated. For example the activity of a nucleic acid molecule or a polypeptide comprising the nucleic acid, preferably the coding region thereof, or polypeptide or the consensus sequence or the polypeptide motif, as depicted in Table I, II or IV, application No. 11, column 5 or 8 in the respective same line as the nucleic acid molecule SEQ ID NO. 78753 or polypeptide SEQ ID NO. 78754, respectively, or a homolog or a fragment thereof, is increased or generated, or if the activity b1670-protein is increased or generated in a non-human organism, like a microorganism or a plant cell, plant or part thereof, especially with non-targeted localization. For example, an increase of the palmitic acid of at least 1 percent, particularly in a range of 16 to 37-percent is conferred as compared to a corresponding non-transformed wild type non-human organism.

[57313] Accordingly, in one embodiment, an increase of palmitic acid in a non-human organism, as compared to a corresponding non-transformed wild type non-human organism, is conferred in the process of the invention, if the activity of a polypeptide showing the activity of a b1837-protein, or if the activity of the polypeptide B1837, preferably represented by SEQ ID NO. 78954, or a homolog or fragment thereof, or if the activity of a polypeptide encoded by a nucleic acid molecule comprising the nucleic acid SEQ ID NO. 78953, preferably the coding region thereof, or a homolog or fragment thereof, e.g. derived from Escherichia coli, is increased or generated. For example the activity of a nucleic acid molecule or a polypeptide comprising the nucleic acid, preferably the coding region thereof, or polypeptide or the consensus sequence or the polypeptide motif, as depicted in Table I, II or IV, application No. 11, column 5 or 8 in the respective same line as the nucleic acid molecule SEQ ID NO. 78953 or polypeptide SEQ ID NO. 78954, respectively, or a homolog or a fragment thereof, is increased or generated, or if the activity b1837-protein is increased or generated in a non-human organism, like a microorganism or a plant cell, plant or part thereof, especially with non-targeted localization. For example, an increase of the palmitic acid of at least 1 percent, particularly in a range of 16 to 39-percent is conferred as compared to a corresponding non-transformed wild type non-human organism.

[57314] Accordingly, in one embodiment, an increase of palmitic acid in a non-human organism, as compared to a corresponding non-transformed wild type non-human organism, is conferred in the process of the invention, if the activity of a polypeptide showing the activity of a b2032-protein, or if the activity of the polypeptide B2032, preferably represented by SEQ ID NO. 8921, or a homolog or fragment thereof, or if the activity of a polypeptide encoded by a nucleic acid molecule comprising the nucleic acid SEQ ID NO. 8920, preferably the coding region thereof, or a homolog or fragment thereof, e.g. derived from Escherichia coli, is increased or generated. For example the activity of a nucleic acid molecule or a polypeptide comprising the nucleic acid, preferably the coding region thereof, or polypeptide or the consensus sequence or the polypeptide motif, as depicted in Table I, II or IV, application No. 11, column 5 or 8 in the respective same line as the nucleic acid molecule SEQ ID NO. 8920 or polypeptide SEQ ID NO. 8921, respectively, or a homolog or a fragment thereof, is increased or generated, or if the activity b2032-protein is increased or generated in a non-human organism, like a microorganism or a plant cell, plant or part thereof, especially with non-targeted localization. For example, an increase of the palmitic acid of at least 1 percent, particularly in a range of 22 to 83-percent is conferred as compared to a corresponding non-transformed wild type non-human organism.

[57315] Accordingly, in one embodiment, an increase of palmitic acid in a non-human organism, as compared to a corresponding non-transformed wild type non-human organism, is conferred in the process of the invention, if the activity of a polypeptide showing the activity of a colanic acid biosynthesis protein, or if the activity of the polypeptide B2043, preferably represented by SEQ ID NO. 112194, or a homolog or fragment thereof, or if the activity of a polypeptide encoded by a nucleic acid molecule comprising the nucleic acid SEQ ID NO. 112193, preferably the coding region thereof, or a homolog or fragment thereof, e.g. derived from Escherichia coli, is increased or generated. For example the activity of a nucleic acid molecule or a polypeptide comprising the nucleic acid, preferably the coding region thereof, or polypeptide or the consensus sequence or the polypeptide motif, as depicted in Table I, II or IV, application No. 11, column 5 or 8 in the respective same line as the nucleic acid molecule SEQ ID NO. 112193 or polypeptide SEQ ID NO. 112194, respectively, or a homolog or a fragment thereof, is increased or generated, or if the activity colanic acid biosynthesis protein is increased or generated in a non-human organism, like a microorganism or a plant cell, plant or part thereof, especially with non-targeted localization. For example, an increase of the palmitic acid of at least 1 percent, particularly in a range of 16 to 54-percent is conferred as compared to a corresponding non-transformed wild type non-human organism.

[57316] Accordingly, in one embodiment, an increase of palmitic acid in a non-human organism, as compared to a corresponding non-transformed wild type non-human organism, is conferred in the process of the invention, if the activity of a polypeptide showing the activity of a b2099-protein, or if the activity of the polypeptide B2099, preferably represented by SEQ ID NO. 115596, or a homolog or fragment thereof, or if the activity of a polypeptide encoded by a nucleic acid molecule comprising the nucleic acid SEQ ID NO. 115595, preferably the coding region thereof, or a homolog or fragment thereof, e.g. derived from Escherichia coli, is increased or generated. For example the activity of a nucleic acid molecule or a polypeptide comprising the nucleic acid, preferably the coding region thereof, or polypeptide or the consensus sequence or the polypeptide motif, as depicted in Table I, II or IV, application No. 11, column 5 or 8 in the respective same line as the nucleic acid molecule SEQ ID NO. 115595 or polypeptide SEQ ID NO. 115596, respectively, or a homolog or a fragment thereof, is increased or generated, or if the activity b2099-protein is increased or generated in a non-human organism, like a microorganism or a plant cell, plant or part thereof, especially with non-targeted localization. For example, an increase of the palmitic acid of at least 1 percent, particularly in a range of 18 to 27-percent is conferred as compared to a corresponding non-transformed wild type non-human organism.

[57317] Accordingly, in one embodiment, an increase of palmitic acid in a non-human organism, as compared to a corresponding non-transformed wild type non-human organism, is conferred in the process of the invention, if the activity of a polypeptide showing the activity of a b2107-protein, or if the activity of the polypeptide B2107, preferably represented by SEQ ID NO. 39003, or a homolog or fragment thereof, or if the activity of a polypeptide encoded by a nucleic acid molecule comprising the nucleic acid SEQ ID NO. 39002, preferably the coding region thereof, or a homolog or fragment thereof, e.g. derived from Escherichia coli, is increased or generated. For example the activity of a nucleic acid molecule or a polypeptide comprising the nucleic acid, preferably the coding region thereof, or polypeptide or the consensus sequence or the polypeptide motif, as depicted in Table I, II or IV, application No. 11, column 5 or 8 in the respective same line as the nucleic acid molecule SEQ ID NO. 39002 or polypeptide SEQ ID NO. 39003, respectively, or a homolog or a fragment thereof, is increased or generated, or if the activity b2107-protein is increased or generated in a non-human organism, like a microorganism or a plant cell, plant or part thereof, especially with non-targeted localization. For example, an increase of the palmitic acid of at least 1 percent, particularly in a range of 15 to 37-percent is conferred as compared to a corresponding non-transformed wild type non-human organism.

[57318] Accordingly, in one embodiment, an increase of palmitic acid in a non-human organism, as compared to a corresponding non-transformed wild type non-human organism, is conferred in the process of the invention, if the activity of a polypeptide showing the activity of a b2399-protein, or if the activity of the polypeptide B2399, preferably represented by SEQ ID NO. 39238, or a homolog or fragment thereof, or if the activity of a polypeptide encoded by a nucleic acid molecule comprising the nucleic acid SEQ ID NO. 39237, preferably the coding region thereof, or a homolog or fragment thereof, e.g. derived from Escherichia coli, is increased or generated. For example the activity of a nucleic acid molecule or a polypeptide comprising the nucleic acid, preferably the coding region thereof, or polypeptide or the consensus sequence or the polypeptide motif, as depicted in Table I, II or IV, application No. 11, column 5 or 8 in the respective same line as the nucleic acid molecule SEQ ID NO. 39237 or polypeptide SEQ ID NO. 39238, respectively, or a homolog or a fragment thereof, is increased or generated, or if the activity b2399-protein is increased or generated in a non-human organism, like a microorganism or a plant cell, plant or part thereof, especially with non-targeted localization. For example, an increase of the palmitic acid of at least 1 percent, particularly in a range of 19 to 45-percent is conferred as compared to a corresponding non-transformed wild type non-human organism.

[57319] Accordingly, in one embodiment, an increase of palmitic acid in a non-human organism, as compared to a corresponding non-transformed wild type non-human organism, is conferred in the process of the invention, if the activity of a polypeptide showing the activity of a ethanolamine utilization protein, or if the activity of the polypeptide B2439, preferably represented by SEQ ID NO. 115629, or a homolog or fragment thereof, or if the activity of a polypeptide encoded by a nucleic acid molecule comprising the nucleic acid SEQ ID NO. 115628, preferably the coding region thereof, or a homolog or fragment thereof, e.g. derived from Escherichia coli, is increased or generated. For example the activity of a nucleic acid molecule or a polypeptide comprising the nucleic acid, preferably the coding region thereof, or polypeptide or the consensus sequence or the polypeptide motif, as depicted in Table I, II or IV, application No. 11, column 5 or 8 in the respective same line as the nucleic acid molecule SEQ ID NO. 115628 or polypeptide SEQ ID NO. 115629, respectively, or a homolog or a fragment thereof, is increased or generated, or if the activity ethanolamine utilization protein is increased or generated in a non-human organism, like a microorganism or a plant cell, plant or part thereof, especially with non-targeted localization. For example, an increase of the palmitic acid of at least 1 percent, particularly in a range of 16 to 34-percent is conferred as compared to a corresponding non-transformed wild type non-human organism.

[57320] Accordingly, in one embodiment, an increase of palmitic acid in a non-human organism, as compared to a corresponding non-transformed wild type non-human organism, is conferred in the process of the invention, if the activity of a polypeptide showing the activity of a b2682-protein, or if the activity of the polypeptide B2682, preferably represented by SEQ ID NO. 115656, or a homolog or fragment thereof, or if the activity of a polypeptide encoded by a nucleic acid molecule comprising the nucleic acid SEQ ID NO. 115655, preferably the coding region thereof, or a homolog or fragment thereof, e.g. derived from Escherichia coli, is increased or generated. For example the activity of a nucleic acid molecule or a polypeptide comprising the nucleic acid, preferably the coding region thereof, or polypeptide or the consensus sequence or the polypeptide motif, as depicted in Table I, II or IV, application No. 11, column 5 or 8 in the respective same line as the nucleic acid molecule SEQ ID NO. 115655 or polypeptide SEQ ID NO. 115656, respectively, or a homolog or a fragment thereof, is increased or generated, or if the activity b2682-protein is increased or generated in a non-human organism, like a microorganism or a plant cell, plant or part thereof, especially with non-targeted localization. For example, an increase of the palmitic acid of at least 1 percent, particularly in a range of 22 to 28-percent is conferred as compared to a corresponding non-transformed wild type non-human organism.

[57321] Accordingly, in one embodiment, an increase of palmitic acid in a non-human organism, as compared to a corresponding non-transformed wild type non-human organism, is conferred in the process of the invention, if the activity of a polypeptide showing the activity of a 2-C-methyl-D-erythritol 4-phosphate cytidylyltransferase, or if the activity of the polypeptide B2747, preferably represented by SEQ ID NO. 81076, or a homolog or fragment thereof, or if the activity of a polypeptide encoded by a nucleic acid molecule comprising the nucleic acid SEQ ID NO. 81075, preferably the coding region thereof, or a homolog or fragment thereof, e.g. derived from Escherichia coli, is increased or generated. For example the activity of a nucleic acid molecule or a polypeptide comprising the nucleic acid, preferably the coding region thereof, or polypeptide or the consensus sequence or the polypeptide motif, as depicted in Table I, II or IV, application No. 11, column 5 or 8 in the respective same line as the nucleic acid molecule SEQ ID NO. 81075 or polypeptide SEQ ID NO. 81076, respectively, or a homolog or a fragment thereof, is increased or generated, or if the activity 2-C-methyl-D-erythritol 4-phosphate cytidylyltransferase is increased or generated in a non-human organism, like a microorganism or a plant cell, plant or part thereof, especially with non-targeted localization. For example, an increase of the palmitic acid of at least 1 percent, particularly in a range of 23 to 38-percent is conferred as compared to a corresponding non-transformed wild type non-human organism.

[57322] Accordingly, in one embodiment, an increase of palmitic acid in a non-human organism, as compared to a corresponding non-transformed wild type non-human organism, is conferred in the process of the invention, if the activity of a polypeptide showing the activity of a flavodoxin, or if the activity of the polypeptide B2790, preferably represented by SEQ ID NO. 115720, or a homolog or fragment thereof, or if the activity of a polypeptide encoded by a nucleic acid molecule comprising the nucleic acid SEQ ID NO. 115719, preferably the coding region thereof, or a homolog or fragment thereof, e.g. derived from Escherichia coli, is increased or generated. For example the activity of a nucleic acid molecule or a polypeptide comprising the nucleic acid, preferably the coding region thereof, or polypeptide or the consensus sequence or the polypeptide motif, as depicted in Table I, II or IV, application No. 11, column 5 or 8 in the respective same line as the nucleic acid molecule SEQ ID NO. 115719 or polypeptide SEQ ID NO. 115720, respectively, or a homolog or a fragment thereof, is increased or generated, or if the activity flavodoxin is increased or generated in a non-human organism, like a microorganism or a plant cell, plant or part thereof, especially with non-targeted localization. For example, an increase of the palmitic acid of at least 1 percent, particularly in a range of 17 to 34-percent is conferred as compared to a corresponding non-transformed wild type non-human organism.

[57323] Accordingly, in one embodiment, an increase of palmitic acid in a non-human organism, as compared to a corresponding non-transformed wild type non-human organism, is conferred in the process of the invention, if the activity of a polypeptide showing the activity of a AAS bifunctional protein, or if the activity of the polypeptide B2836, preferably represented by SEQ ID NO. 115792, or a homolog or fragment thereof, or if the activity of a polypeptide encoded by a nucleic acid molecule comprising the nucleic acid SEQ ID NO. 115791, preferably the coding region thereof, or a homolog or fragment thereof, e.g. derived from Escherichia coli, is increased or generated. For example the activity of a nucleic acid molecule or a polypeptide comprising the nucleic acid, preferably the coding region thereof, or polypeptide or the consensus sequence or the polypeptide motif, as depicted in Table I, II or IV, application No. 11, column 5 or 8 in the respective same line as the nucleic acid molecule SEQ ID NO. 115791 or polypeptide SEQ ID NO. 115792, respectively, or a homolog or a fragment thereof, is increased or generated, or if the activity AAS bifunctional protein is increased or generated in a non-human organism, like a microorganism or a plant cell, plant or part thereof, especially with plastidic localization. For example, an increase of the palmitic acid of at least 1 percent, particularly in a range of 17 to 32-percent is conferred as compared to a corresponding non-transformed wild type non-human organism.

[57324] Accordingly, in one embodiment, an increase of palmitic acid in a non-human organism, as compared to a corresponding non-transformed wild type non-human organism, is conferred in the process of the invention, if the activity of a polypeptide showing the activity of a b2849-protein, or if the activity of the polypeptide B2849, preferably represented by SEQ ID NO. 81981, or a homolog or fragment thereof, or if the activity of a polypeptide encoded by a nucleic acid molecule comprising the nucleic acid SEQ ID NO. 81980, preferably the coding region thereof, or a homolog or fragment thereof, e.g. derived from Escherichia coli, is increased or generated. For example the activity of a nucleic acid molecule or a polypeptide comprising the nucleic acid, preferably the coding region thereof, or polypeptide or the consensus sequence or the polypeptide motif, as depicted in Table I, II or IV, application No. 11, column 5 or 8 in the respective same line as the nucleic acid molecule SEQ ID NO. 81980 or polypeptide SEQ ID NO. 81981, respectively, or a homolog or a fragment thereof, is increased or generated, or if the activity b2849-protein is increased or generated in a non-human organism, like a microorganism or a plant cell, plant or part thereof, especially with non-targeted localization. For example, an increase of the palmitic acid of at least 1 percent, particularly in a range of 20 to 56-percent is conferred as compared to a corresponding non-transformed wild type non-human organism.

[57325] Accordingly, in one embodiment, an increase of palmitic acid in a non-human organism, as compared to a corresponding non-transformed wild type non-human organism, is conferred in the process of the invention, if the activity of a polypeptide showing the activity of a b3814-protein, or if the activity of the polypeptide B3814, preferably represented by SEQ ID NO. 44197, or a homolog or fragment thereof, or if the activity of a polypeptide encoded by a nucleic acid molecule comprising the nucleic acid SEQ ID NO. 44196, preferably the coding region thereof, or a homolog or fragment thereof, e.g. derived from Escherichia coli, is increased or generated. For example the activity of a nucleic acid molecule or a polypeptide comprising the nucleic acid, preferably the coding region thereof, or polypeptide or the consensus sequence or the polypeptide motif, as depicted in Table I, II or IV, application No. 11, column 5 or 8 in the respective same line as the nucleic acid molecule SEQ ID NO. 44196 or polypeptide SEQ ID NO. 44197, respectively, or a homolog or a fragment thereof, is increased or generated, or if the activity b3814-protein is increased or generated in a non-human organism, like a microorganism or a plant cell, plant or part thereof, especially with non-targeted localization. For example, an increase of the palmitic acid of at least 1 percent, particularly in a range of 19 to 41-percent is conferred as compared to a corresponding non-transformed wild type non-human organism.

[57326] Accordingly, in one embodiment, an increase of palmitic acid in a non-human organism, as compared to a corresponding non-transformed wild type non-human organism, is conferred in the process of the invention, if the activity of a polypeptide showing the activity of a threonine efflux protein, or if the activity of the polypeptide B3823, preferably represented by SEQ ID NO. 10727, or a homolog or fragment thereof, or if the activity of a polypeptide encoded by a nucleic acid molecule comprising the nucleic acid SEQ ID NO. 10726, preferably the coding region thereof, or a homolog or fragment thereof, e.g. derived from Escherichia coli, is increased or generated. For example the activity of a nucleic acid molecule or a polypeptide comprising the nucleic acid, preferably the coding region thereof, or polypeptide or the consensus sequence or the polypeptide motif, as depicted in Table I, II or IV, application No. 11, column 5 or 8 in the respective same line as the nucleic acid molecule SEQ ID NO. 10726 or polypeptide SEQ ID NO. 10727, respectively, or a homolog or a fragment thereof, is increased or generated, or if the activity threonine efflux protein is increased or generated in a non-human organism, like a microorganism or a plant cell, plant or part thereof, especially with non-targeted localization. For example, an increase of the palmitic acid of at least 1 percent, particularly in a range of 21 to 35-percent is conferred as compared to a corresponding non-transformed wild type non-human organism.

[57327] Accordingly, in one embodiment, an increase of palmitic acid in a non-human organism, as compared to a corresponding non-transformed wild type non-human organism, is conferred in the process of the invention, if the activity of a polypeptide showing the activity of a 3-ketoacyl-CoA thiolase, or if the activity of the polypeptide B3845, preferably represented by SEQ ID NO. 100676, or a homolog or fragment thereof, or if the activity of a polypeptide encoded by a nucleic acid molecule comprising the nucleic acid SEQ ID NO. 100675, preferably the coding region thereof, or a homolog or fragment thereof, e.g. derived from Escherichia coli, is increased or generated. For example the activity of a nucleic acid molecule or a polypeptide comprising the nucleic acid, preferably the coding region thereof, or polypeptide or the consensus sequence or the polypeptide motif, as depicted in Table I, II or IV, application No. 11, column 5 or 8 in the respective same line as the nucleic acid molecule SEQ ID NO. 100675 or polypeptide SEQ ID NO. 100676, respectively, or a homolog or a fragment thereof, is increased or generated, or if the activity 3-ketoacyl-CoA thiolase is increased or generated in a non-human organism, like a microorganism or a plant cell, plant or part thereof, especially with plastidic localization. For example, an increase of the palmitic acid of at least 1 percent, particularly in a range of 15 to 31-percent is conferred as compared to a corresponding non-transformed wild type non-human organism.

[57328] Accordingly, in one embodiment, an increase of palmitic acid in a non-human organism, as compared to a corresponding non-transformed wild type non-human organism, is conferred in the process of the invention, if the activity of a polypeptide showing the activity of a glutaredoxin, or if the activity of the polypeptide GM02LC12622, preferably represented by SEQ ID NO. 10812, or a homolog or fragment thereof, or if the activity of a polypeptide encoded by a nucleic acid molecule comprising the nucleic acid SEQ ID NO. 10811, preferably the coding region thereof, or a homolog or fragment thereof, e.g. derived from Glycine max, is increased or generated. For example the activity of a nucleic acid molecule or a polypeptide comprising the nucleic acid, preferably the coding region thereof, or polypeptide or the consensus sequence or the polypeptide motif, as depicted in Table I, II or IV, application No. 11, column 5 or 8 in the respective same line as the nucleic acid molecule SEQ ID NO. 10811 or polypeptide SEQ ID NO. 10812, respectively, or a homolog or a fragment thereof, is increased or generated, or if the activity glutaredoxin is increased or generated in a non-human organism, like a microorganism or a plant cell, plant or part thereof, especially with non-targeted localization. For example, an increase of the palmitic acid of at least 1 percent, particularly in a range of 19 to 45-percent is conferred as compared to a corresponding non-transformed wild type non-human organism.

[57329] Accordingly, in one embodiment, an increase of palmitic acid in a non-human organism, as compared to a corresponding non-transformed wild type non-human organism, is conferred in the process of the invention, if the activity of a polypeptide showing the activity of a transcription factor, or if the activity of the polypeptide GM02LC19289, preferably represented by SEQ ID NO. 46752, or a homolog or fragment thereof, or if the activity of a polypeptide encoded by a nucleic acid molecule comprising the nucleic acid SEQ ID NO. 46751, preferably the coding region thereof, or a homolog or fragment thereof, e.g. derived from Glycine max, is increased or generated. For example the activity of a nucleic acid molecule or a polypeptide comprising the nucleic acid, preferably the coding region thereof, or polypeptide or the consensus sequence or the polypeptide motif, as depicted in Table I, II or IV, application No. 11, column 5 or 8 in the respective same line as the nucleic acid molecule SEQ ID NO. 46751 or polypeptide SEQ ID NO. 46752, respectively, or a homolog or a fragment thereof, is increased or generated, or if the activity transcription factor is increased or generated in a non-human organism, like a microorganism or a plant cell, plant or part thereof, especially with non-targeted localization. For example, an increase of the palmitic acid of at least 1 percent, particularly in a range of 17 to 80-percent is conferred as compared to a corresponding non-transformed wild type non-human organism.

[57330] Accordingly, in one embodiment, an increase of palmitic acid in a non-human organism, as compared to a corresponding non-transformed wild type non-human organism, is conferred in the process of the invention, if the activity of a polypeptide showing the activity of a bifunctional protein (phosphoribosyltransferase and regulatory protein), or if the activity of the polypeptide Sll0368, preferably represented by SEQ ID NO. 106921, or a homolog or fragment thereof, or if the activity of a polypeptide encoded by a nucleic acid molecule comprising the nucleic acid SEQ ID NO. 106920, preferably the coding region thereof, or a homolog or fragment thereof, e.g. derived from Synechocystis sp., is increased or generated. For example the activity of a nucleic acid molecule or a polypeptide comprising the nucleic acid, preferably the coding region thereof, or polypeptide or the consensus sequence or the polypeptide motif, as depicted in Table I, II or IV, application No. 11, column 5 or 8 in the respective same line as the nucleic acid molecule SEQ ID NO. 106920 or polypeptide SEQ ID NO. 106921, respectively, or a homolog or a fragment thereof, is increased or generated, or if the activity bifunctional protein (phosphoribosyltransferase and regulatory protein) is increased or generated in a non-human organism, like a microorganism or a plant cell, plant or part thereof, especially with mitochondrial localization. For example, an increase of the palmitic acid of at least 1 percent, particularly in a range of 20 to 28-percent is conferred as compared to a corresponding non-transformed wild type non-human organism.

[57331] Accordingly, in one embodiment, an increase of palmitic acid in a non-human organism, as compared to a corresponding non-transformed wild type non-human organism, is conferred in the process of the invention, if the activity of a polypeptide showing the activity of a branched chain amino acid ABC transporter ATP-binding protein, or if the activity of the polypeptide Sll0374, preferably represented by SEQ ID NO. 94742, or a homolog or fragment thereof, or if the activity of a polypeptide encoded by a nucleic acid molecule comprising the nucleic acid SEQ ID NO. 94741, preferably the coding region thereof, or a homolog or fragment thereof, e.g. derived from Synechocystis sp., is increased or generated. For example the activity of a nucleic acid molecule or a polypeptide comprising the nucleic acid, preferably the coding region thereof, or polypeptide or the consensus sequence or the polypeptide motif, as depicted in Table I, II or IV, application No. 11, column 5 or 8 in the respective same line as the nucleic acid molecule SEQ ID NO. 94741 or polypeptide SEQ ID NO. 94742, respectively, or a homolog or a fragment thereof, is increased or generated, or if the activity branched chain amino acid ABC transporter ATP-binding protein is increased or generated in a non-human organism, like a microorganism or a plant cell, plant or part thereof, especially with plastidic localization. For example, an increase of the palmitic acid of at least 1 percent, particularly in a range of 20 to 23-percent is conferred as compared to a corresponding non-transformed wild type non-human organism.

[57332] Accordingly, in one embodiment, an increase of palmitic acid in a non-human organism, as compared to a corresponding non-transformed wild type non-human organism, is conferred in the process of the invention, if the activity of a polypeptide showing the activity of a carbon dioxide concentrating mechanism protein, or if the activity of the polypeptide Sll1031, preferably represented by SEQ ID NO. 52635, or a homolog or fragment thereof, or if the activity of a polypeptide encoded by a nucleic acid molecule comprising the nucleic acid SEQ ID NO. 52634, preferably the coding region thereof, or a homolog or fragment thereof, e.g. derived from Synechocystis sp., is increased or generated. For example the activity of a nucleic acid molecule or a polypeptide comprising the nucleic acid, preferably the coding region thereof, or polypeptide or the consensus sequence or the polypeptide motif, as depicted in Table I, 11 or IV, application No. 11, column 5 or 8 in the respective same line as the nucleic acid molecule SEQ ID NO. 52634 or polypeptide SEQ ID NO. 52635, respectively, or a homolog or a fragment thereof, is increased or generated, or if the activity carbon dioxide concentrating mechanism protein is increased or generated in a non-human organism, like a microorganism or a plant cell, plant or part thereof, especially with mitochondrial localization. For example, an increase of the palmitic acid of at least 1 percent, particularly in a range of 18 to 38-percent is conferred as compared to a corresponding non-transformed wild type non-human organism.

[57333] Accordingly, in one embodiment, an increase of palmitic acid in a non-human organism, as compared to a corresponding non-transformed wild type non-human organism, is conferred in the process of the invention, if the activity of a polypeptide showing the activity of a sll1032-protein, or if the activity of the polypeptide Sll1032, preferably represented by SEQ ID NO. 85724, or a homolog or fragment thereof, or if the activity of a polypeptide encoded by a nucleic acid molecule comprising the nucleic acid SEQ ID NO. 85723, preferably the coding region thereof, or a homolog or fragment thereof, e.g. derived from Synechocystis sp., is increased or generated. For example the activity of a nucleic acid molecule or a polypeptide comprising the nucleic acid, preferably the coding region thereof, or polypeptide or the consensus sequence or the polypeptide motif, as depicted in Table I, II or IV, application No. 11, column 5 or 8 in the respective same line as the nucleic acid molecule SEQ ID NO. 85723 or polypeptide SEQ ID NO. 85724, respectively, or a homolog or a fragment thereof, is increased or generated, or if the activity sll1032-protein is increased or generated in a non-human organism, like a microorganism or a plant cell, plant or part thereof, especially with mitochondrial localization. For example, an increase of the palmitic acid of at least 1 percent, particularly in a range of 16 to 27-percent is conferred as compared to a corresponding non-transformed wild type non-human organism.

[57334] Accordingly, in one embodiment, an increase of palmitic acid in a non-human organism, as compared to a corresponding non-transformed wild type non-human organism, is conferred in the process of the invention, if the activity of a polypeptide showing the activity of a phosphoribosylformyl glycinamidine synthase subunit, or if the activity of the poylpeptide Sll1056, preferably represented by SEQ ID NO. 52661, or a homolog or fragment thereof, or if the activity of a polypeptide encoded by a nucleic acid molecule comprising the nucleic acid SEQ ID NO. 52660, preferably the coding region thereof, or a homolog or fragment thereof, e.g. derived from Synechocystis sp., is increased or generated. For example the activity of a nucleic acid molecule or a polypeptide comprising the nucleic acid, preferably the coding region thereof, or polypeptide or the consensus sequence or the polypeptide motif, as depicted in Table I, II or IV, application No. 11, column 5 or 8 in the respective same line as the nucleic acid molecule SEQ ID NO. 52660 or polypeptide SEQ ID NO. 52661, respectively, or a homolog or a fragment thereof, is increased or generated, or if the activity phosphoribosylformyl glycinamidine synthase subunit is increased or generated in a non-human organism, like a microorganism or a plant cell, plant or part thereof, especially with plastidic localization. For example, an increase of the palmitic acid of at least 1 percent, particularly in a range of 21 to 38-percent is conferred as compared to a corresponding non-transformed wild type non-human organism.

[57335] Accordingly, in one embodiment, an increase of palmitic acid in a non-human organism, as compared to a corresponding non-transformed wild type non-human organism, is conferred in the process of the invention, if the activity of a polypeptide showing the activity of a nitrate/nitrite transport protein, or if the activity of the polypeptide Sll1450, preferably represented by SEQ ID NO. 54338, or a homolog or fragment thereof, or if the activity of a polypeptide encoded by a nucleic acid molecule comprising the nucleic acid SEQ ID NO. 54337, preferably the coding region thereof, or a homolog or fragment thereof, e.g. derived from Synechocystis sp., is increased or generated. For example the activity of a nucleic acid molecule or a polypeptide comprising the nucleic acid, preferably the coding region thereof, or polypeptide or the consensus sequence or the polypeptide motif, as depicted in Table I, II or IV, application No. 11, column 5 or 8 in the respective same line as the nucleic acid molecule SEQ ID NO. 54337 or polypeptide SEQ ID NO. 54338, respectively, or a homolog or a fragment thereof, is increased or generated, or if the activity nitrate/nitrite transport protein is increased or generated in a non-human organism, like a microorganism or a plant cell, plant or part thereof, especially with mitochondrial localization. For example, an increase of the palmitic acid of at least 1 percent, particularly in a range of 19 to 29-percent is conferred as compared to a corresponding non-transformed wild type non-human organism.

[57336] Accordingly, in one embodiment, an increase of palmitic acid in a non-human organism, as compared to a corresponding non-transformed wild type non-human organism, is conferred in the process of the invention, if the activity of a polypeptide showing the activity of a carbamoylphosphate synthase subunit, or if the activity of the polypeptide Sll1498, preferably represented by SEQ ID NO. 95048, or a homolog or fragment thereof, or if the activity of a polypeptide encoded by a nucleic acid molecule comprising the nucleic acid SEQ ID NO. 95047, preferably the coding region thereof, or a homolog or fragment thereof, e.g. derived from Synechocystis sp., is increased or generated. For example the activity of a nucleic acid molecule or a polypeptide comprising the nucleic acid, preferably the coding region thereof, or polypeptide or the consensus sequence or the polypeptide motif, as depicted in Table I, II or IV, application No. 11, column 5 or 8 in the respective same line as the nucleic acid molecule SEQ ID NO. 95047 or polypeptide SEQ ID NO. 95048, respectively, or a homolog or a fragment thereof, is increased or generated, or if the activity carbamoyl-phosphate synthase subunit is increased or generated in a non-human organism, like a microorganism or a plant cell, plant or part thereof, especially with non-targeted localization. For example, an increase of the palmitic acid of at least 1 percent, particularly in a range of 18 to 24-percent is conferred as compared to a corresponding non-transformed wild type non-human organism.

[57337] Accordingly, in one embodiment, an increase of palmitic acid in a non-human organism, as compared to a corresponding non-transformed wild type non-human organism, is conferred in the process of the invention, if the activity of a polypeptide showing the activity of a glutathione S-transferase, or if the activity of the polypeptide Sll1545, preferably represented by SEQ ID NO. 11424, or a homolog or fragment thereof, or if the activity of a polypeptide encoded by a nucleic acid molecule comprising the nucleic acid SEQ ID NO. 11423, preferably the coding region thereof, or a homolog or fragment thereof, e.g. derived from Synechocystis sp., is increased or generated. For example the activity of a nucleic acid molecule or a polypeptide comprising the nucleic acid, preferably the coding region thereof, or polypeptide or the consensus sequence or the polypeptide motif, as depicted in Table I, II or IV, application No. 11, column 5 or 8 in the respective same line as the nucleic acid molecule SEQ ID NO. 11423 or polypeptide SEQ ID NO. 11424, respectively, or a homolog or a fragment thereof, is increased or generated, or if the activity glutathione S-transferase is increased or generated in a non-human organism, like a microorganism or a plant cell, plant or part thereof, especially with mitochondrial localization. For example, an increase of the palmitic acid of at least 1 percent, particularly in a range of 15 to 27-percent is conferred as compared to a corresponding non-transformed wild type non-human organism.

[57338] Accordingly, in one embodiment, an increase of palmitic acid in a non-human organism, as compared to a corresponding non-transformed wild type non-human organism, is conferred in the process of the invention, if the activity of a polypeptide showing the activity of a ABC metal ion transporter substrate-binding protein, or if the activity of the polypeptide Sll1598, preferably represented by SEQ ID NO. 85744, or a homolog or fragment thereof, or if the activity of a polypeptide encoded by a nucleic acid molecule comprising the nucleic acid SEQ ID NO. 85743, preferably the coding region thereof, or a homolog or fragment thereof, e.g. derived from Synechocystis sp., is increased or generated. For example the activity of a nucleic acid molecule or a polypeptide comprising the nucleic acid, preferably the coding region thereof, or polypeptide or the consensus sequence or the polypeptide motif, as depicted in Table I, II or IV, application No. 11, column 5 or 8 in the respective same line as the nucleic acid molecule SEQ ID NO. 85743 or polypeptide SEQ ID NO. 85744, respectively, or a homolog or a fragment thereof, is increased or generated, or if the activity ABC metal ion transporter substrate-binding protein is increased or generated in a non-human organism, like a microorganism or a plant cell, plant or part thereof, especially with mitochondrial localization. For example, an increase of the palmitic acid of at least 1 percent, particularly in a range of 17 to 28-percent is conferred as compared to a corresponding non-transformed wild type non-human organism.

[57339] Accordingly, in one embodiment, an increase of palmitic acid in a non-human organism, as compared to a corresponding non-transformed wild type non-human organism, is conferred in the process of the invention, if the activity of a polypeptide showing the activity of a acyl transferase, or if the activity of the poylpeptide Sll1848, preferably represented by SEQ ID NO. 86448, or a homolog or fragment thereof, or if the activity of a polypeptide encoded by a nucleic acid molecule comprising the nucleic acid SEQ ID NO. 86447, preferably the coding region thereof, or a homolog or fragment thereof, e.g. derived from Synechocystis sp., is increased or generated. For example the activity of a nucleic acid molecule or a polypeptide comprising the nucleic acid, preferably the coding region thereof, or polypeptide or the consensus sequence or the polypeptide motif, as depicted in Table I, II or IV, application No. 11, column 5 or 8 in the respective same line as the nucleic acid molecule SEQ ID NO. 86447 or polypeptide SEQ ID NO. 86448, respectively, or a homolog or a fragment thereof, is increased or generated, or if the activity acyl transferase is increased or generated in a non-human organism, like a microorganism or a plant cell, plant or part thereof, especially with plastidic localization. For example, an increase of the palmitic acid of at least 1 percent, particularly in a range of 18 to 115-percent is conferred as compared to a corresponding non-transformed wild type non-human organism.

[57340] Accordingly, in one embodiment, an increase of palmitic acid in a non-human organism, as compared to a corresponding non-transformed wild type non-human organism, is conferred in the process of the invention, if the activity of a polypeptide showing the activity of a coproporphyrinogen III oxidase, or if the activity of the polypeptide Sll1917, preferably represented by SEQ ID NO. 11472, or a homolog or fragment thereof, or if the activity of a polypeptide encoded by a nucleic acid molecule comprising the nucleic acid SEQ ID NO. 11471, preferably the coding region thereof, or a homolog or fragment thereof, e.g. derived from Synechocystis sp., is increased or generated. For example the activity of a nucleic acid molecule or a polypeptide comprising the nucleic acid, preferably the coding region thereof, or polypeptide or the consensus sequence or the polypeptide motif, as depicted in Table I, 11 or IV, application No. 11, column 5 or 8 in the respective same line as the nucleic acid molecule SEQ ID NO. 11471 or polypeptide SEQ ID NO. 11472, respectively, or a homolog or a fragment thereof, is increased or generated, or if the activity coproporphyrinogen III oxidase is increased or generated in a non-human organism, like a microorganism or a plant cell, plant or part thereof, especially with mitochondrial localization. For example, an increase of the palmitic acid of at least 1 percent, particularly in a range of 16 to 23-percent is conferred as compared to a corresponding non-transformed wild type non-human organism.

[57341] Accordingly, in one embodiment, an increase of palmitic acid in a non-human organism, as compared to a corresponding non-transformed wild type non-human organism, is conferred in the process of the invention, if the activity of a polypeptide showing the activity of a cationtransporting ATPase, or if the activity of the polypeptide Sll1920, preferably represented by SEQ ID NO. 55386, or a homolog or fragment thereof, or if the activity of a polypeptide encoded by a nucleic acid molecule comprising the nucleic acid SEQ ID NO. 55385, preferably the coding region thereof, or a homolog or fragment thereof, e.g. derived from Synechocystis sp., is increased or generated. For example the activity of a nucleic acid molecule or a polypeptide comprising the nucleic acid, preferably the coding region thereof, or polypeptide or the consensus sequence or the polypeptide motif, as depicted in Table I, II or IV, application No. 11, column 5 or 8 in the respective same line as the nucleic acid molecule SEQ ID NO. 55385 or polypeptide SEQ ID NO. 55386, respectively, or a homolog or a fragment thereof, is increased or generated, or if the activity cation-transporting ATPase is increased or generated in a non-human organism, like a microorganism or a plant cell, plant or part thereof, especially with mitochondrial localization. For example, an increase of the palmitic acid of at least 1 percent, particularly in a range of 18 to 34-percent is conferred as compared to a corresponding non-transformed wild type non-human organism.

[57342] Accordingly, in one embodiment, an increase of palmitic acid in a non-human organism, as compared to a corresponding non-transformed wild type non-human organism, is conferred in the process of the invention, if the activity of a polypeptide showing the activity of a permease protein of ABC transporter, or if the activity of the polypeptide Slr0949, preferably represented by SEQ ID NO. 119223, or a homolog or fragment thereof, or if the activity of a polypeptide encoded by a nucleic acid molecule comprising the nucleic acid SEQ ID NO. 119222, preferably the coding region thereof, or a homolog or fragment thereof, e.g. derived from Synechocystis sp., is increased or generated. For example the activity of a nucleic acid molecule or a polypeptide comprising the nucleic acid, preferably the coding region thereof, or polypeptide or the consensus sequence or the polypeptide motif, as depicted in Table I, II or IV, application No. 11, column 5 or 8 in the respective same line as the nucleic acid molecule SEQ ID NO. 119222 or polypeptide SEQ ID NO. 119223, respectively, or a homolog or a fragment thereof, is increased or generated, or if the activity permease protein of ABC transporter is increased or generated in a non-human organism, like a microorganism or a plant cell, plant or part thereof, especially with mitochondrial localization. For example, an increase of the palmitic acid of at least 1 percent, particularly in a range of 18 to 25-percent is conferred as compared to a corresponding non-transformed wild type non-human organism.

[57343] Accordingly, in one embodiment, an increase of palmitic acid in a non-human organism, as compared to a corresponding non-transformed wild type non-human organism, is conferred in the process of the invention, if the activity of a polypeptide showing the activity of a aromatic acid decarboxylase, or if the activity of the polypeptide Slr1099, preferably represented by SEQ ID NO. 116342, or a homolog or fragment thereof, or if the activity of a polypeptide encoded by a nucleic acid molecule comprising the nucleic acid SEQ ID NO. 116341, preferably the coding region thereof, or a homolog or fragment thereof, e.g. derived from Synechocystis sp., is increased or generated. For example the activity of a nucleic acid molecule or a polypeptide comprising the nucleic acid, preferably the coding region thereof, or polypeptide or the consensus sequence or the polypeptide motif, as depicted in Table I, II or IV, application No. 11, column 5 or 8 in the respective same line as the nucleic acid molecule SEQ ID NO. 116341 or polypeptide SEQ ID NO. 116342, respectively, or a homolog or a fragment thereof, is increased or generated, or if the activity aromatic acid decarboxylase is increased or generated in a non-human organism, like a microorganism or a plant cell, plant or part thereof, especially with mitochondrial localization. For example, an increase of the palmitic acid of at least 1 percent, particularly in a range of 23 to 39-percent is conferred as compared to a corresponding non-transformed wild type non-human organism.

[57344] Accordingly, in one embodiment, an increase of palmitic acid in a non-human organism, as compared to a corresponding non-transformed wild type non-human organism, is conferred in the process of the invention, if the activity of a polypeptide showing the activity of a phosphate import ATP-binding protein, or if the activity of the polypeptide Slr1250, preferably represented by SEQ ID NO. 116461, or a homolog or fragment thereof, or if the activity of a polypeptide encoded by a nucleic acid molecule comprising the nucleic acid SEQ ID NO. 116460, preferably the coding region thereof, or a homolog or fragment thereof, e.g. derived from Synechocystis sp., is increased or generated. For example the activity of a nucleic acid molecule or a polypeptide comprising the nucleic acid, preferably the coding region thereof, or polypeptide or the consensus sequence or the polypeptide motif, as depicted in Table I, II or IV, application No. 11, column 5 or 8 in the respective same line as the nucleic acid molecule SEQ ID NO. 116460 or polypeptide SEQ ID NO. 116461, respectively, or a homolog or a fragment thereof, is increased or generated, or if the activity phosphate import ATP-binding protein is increased or generated in a non-human organism, like a microorganism or a plant cell, plant or part thereof, especially with mitochondrial localization. For example, an increase of the palmitic acid of at least 1 percent, particularly in a range of 19 to 33-percent is conferred as compared to a corresponding non-transformed wild type non-human organism.

[57345] Accordingly, in one embodiment, an increase of palmitic acid in a non-human organism, as compared to a corresponding non-transformed wild type non-human organism, is conferred in the process of the invention, if the activity of a polypeptide showing the activity of a arginine decarboxylase, or if the activity of the polypeptide Slr1312, preferably represented by SEQ ID NO. 58325, or a homolog or fragment thereof, or if the activity of a polypeptide encoded by a nucleic acid molecule comprising the nucleic acid SEQ ID NO. 58324, preferably the coding region thereof, or a homolog or fragment thereof, e.g. derived from Synechocystis sp., is increased or generated. For example the activity of a nucleic acid molecule or a polypeptide comprising the nucleic acid, preferably the coding region thereof, or polypeptide or the consensus sequence or the polypeptide motif, as depicted in Table I, II or IV, application No. 11, column 5 or 8 in the respective same line as the nucleic acid molecule SEQ ID NO. 58324 or polypeptide SEQ ID NO. 58325, respectively, or a homolog or a fragment thereof, is increased or generated, or if the activity arginine decarboxylase is increased or generated in a non-human organism, like a microorganism or a plant cell, plant or part thereof, especially with non-targeted localization. For example, an increase of the palmitic acid of at least 1 percent, particularly in a range of 21 to 34-percent is conferred as compared to a corresponding non-transformed wild type non-human organism.

[57346] Accordingly, in one embodiment, an increase of palmitic acid in a non-human organism, as compared to a corresponding non-transformed wild type non-human organism, is conferred in the process of the invention, if the activity of a polypeptide showing the activity of a phosphoadenosine phosphosulfate reductase , or if the activity of the polypeptide Slr1791, preferably represented by SEQ ID NO. 12141, or a homolog or fragment thereof, or if the activity of a polypeptide encoded by a nucleic acid molecule comprising the nucleic acid SEQ ID NO. 12140, preferably the coding region thereof, or a homolog or fragment thereof, e.g. derived from Synechocystis sp., is increased or generated. For example the activity of a nucleic acid molecule or a polypeptide comprising the nucleic acid, preferably the coding region thereof, or polypeptide or the consensus sequence or the polypeptide motif, as depicted in Table I, II or IV, application No. 11, column 5 or 8 in the respective same line as the nucleic acid molecule SEQ ID NO. 12140 or polypeptide SEQ ID NO. 12141, respectively, or a homolog or a fragment thereof, is increased or generated, or if the activity phosphoadenosine phosphosulfate reductase is increased or generated in a non-human organism, like a microorganism or a plant cell, plant or part thereof, especially with mitochondrial localization. For example, an increase of the palmitic acid of at least 1 percent, particularly in a range of 16 to 17-percent is conferred as compared to a corresponding non-transformed wild type non-human organism.

[57347] Accordingly, in one embodiment, an increase of palmitic acid in a non-human organism, as compared to a corresponding non-transformed wild type non-human organism, is conferred in the process of the invention, if the activity of a polypeptide showing the activity of a threonine dehydratase, or if the activity of the polypeptide Slr2072, preferably represented by SEQ ID NO. 12342, or a homolog or fragment thereof, or if the activity of a polypeptide encoded by a nucleic acid molecule comprising the nucleic acid SEQ ID NO. 12341, preferably the coding region thereof, or a homolog or fragment thereof, e.g. derived from Synechocystis sp., is increased or generated. For example the activity of a nucleic acid molecule or a polypeptide comprising the nucleic acid, preferably the coding region thereof, or polypeptide or the consensus sequence or the polypeptide motif, as depicted in Table I, II or IV, application No. 11, column 5 or 8 in the respective same line as the nucleic acid molecule SEQ ID NO. 12341 or polypeptide SEQ ID NO. 12342, respectively, or a homolog or a fragment thereof, is increased or generated, or if the activity threonine dehydratase is increased or generated in a non-human organism, like a microorganism or a plant cell, plant or part thereof, especially with mitochondrial localization. For example, an increase of the palmitic acid of at least 1 percent, particularly in a range of 19 to 42-percent is conferred as compared to a corresponding non-transformed wild type non-human organism.

[57348] Accordingly, in one embodiment, an increase of palmitic acid in a non-human organism, as compared to a corresponding non-transformed wild type non-human organism, is conferred in the process of the invention, if the activity of a polypeptide showing the activity of a metaldependent hydrolase, or if the activity of the polypeptide TTC0917, preferably represented by SEQ ID NO. 61554, or a homolog or fragment thereof, or if the activity of a polypeptide encoded by a nucleic acid molecule comprising the nucleic acid SEQ ID NO. 61553, preferably the coding region thereof, or a homolog or fragment thereof, e.g. derived from Thermus thermophilus, is increased or generated. For example the activity of a nucleic acid molecule or a polypeptide comprising the nucleic acid, preferably the coding region thereof, or polypeptide or the consensus sequence or the polypeptide motif, as depicted in Table I, II or IV, application No. 11, column 5 or 8 in the respective same line as the nucleic acid molecule SEQ ID NO. 61553 or polypeptide SEQ ID NO. 61554, respectively, or a homolog or a fragment thereof, is increased or generated, or if the activity metal-dependent hydrolase is increased or generated in a non-human organism, like a microorganism or a plant cell, plant or part thereof, especially with non-targeted localization. For example, an increase of the palmitic acid of at least 1 percent, particularly in a range of 16 to 112-percent is conferred as compared to a corresponding non-transformed wild type non-human organism.

[57349] Accordingly, in one embodiment, an increase of palmitic acid in a non-human organism, as compared to a corresponding non-transformed wild type non-human organism, is conferred in the process of the invention, if the activity of a polypeptide showing the activity of a homocitrate synthase, or if the activity of the polypeptide TTC1550, preferably represented by SEQ ID NO. 12975, or a homolog or fragment thereof, or if the activity of a polypeptide encoded by a nucleic acid molecule comprising the nucleic acid SEQ ID NO. 12974, preferably the coding region thereof, or a homolog or fragment thereof, e.g. derived from Thermus thermophilus, is increased or generated. For example the activity of a nucleic acid molecule or a polypeptide comprising the nucleic acid, preferably the coding region thereof, or polypeptide or the consensus sequence or the polypeptide motif, as depicted in Table I, II or IV, application No. 11, column 5 or 8 in the respective same line as the nucleic acid molecule SEQ ID NO. 12974 or polypeptide SEQ ID NO. 12975, respectively, or a homolog or a fragment thereof, is increased or generated, or if the activity homocitrate synthase is increased or generated in a non-human organism, like a microorganism or a plant cell, plant or part thereof, especially with non-targeted localization. For example, an increase of the palmitic acid of at least 1 percent, particularly in a range of 19 to 35-percent is conferred as compared to a corresponding non-transformed wild type non-human organism.

[57350] Accordingly, in one embodiment, an increase of palmitic acid in a non-human organism, as compared to a corresponding non-transformed wild type non-human organism, is conferred in the process of the invention, if the activity of a polypeptide showing the activity of a acid phosphatase precursor, or if the activity of the polypeptide Ybr092c, preferably represented by SEQ ID NO. 119348, or a homolog or fragment thereof, or if the activity of a polypeptide encoded by a nucleic acid molecule comprising the nucleic acid SEQ ID NO. 119347, preferably the coding region thereof, or a homolog or fragment thereof, e.g. derived from Saccharomyces cerevisiae, is increased or generated. For example the activity of a nucleic acid molecule or a polypeptide comprising the nucleic acid, preferably the coding region thereof, or polypeptide or the consensus sequence or the polypeptide motif, as depicted in Table I, II or IV, application No. 11, column 5 or 8 in the respective same line as the nucleic acid molecule SEQ ID NO. 119347 or polypeptide SEQ ID NO. 119348, respectively, or a homolog or a fragment thereof, is increased or generated, or if the activity acid phosphatase precursor is increased or generated in a non-human organism, like a microorganism or a plant cell, plant or part thereof, especially with plastidic localization. For example, an increase of the palmitic acid of at least 1 percent, particularly in a range of 16 to 31-percent is conferred as compared to a corresponding non-transformed wild type non-human organism.

[57351] Accordingly, in one embodiment, an increase of palmitic acid in a non-human organism, as compared to a corresponding non-transformed wild type non-human organism, is conferred in the process of the invention, if the activity of a polypeptide showing the activity of a glycerol-3-phosphate dehydrogenase, or if the activity of the polypeptide Ydl022w, preferably represented by SEQ ID NO. 119409, or a homolog or fragment thereof, or if the activity of a polypeptide encoded by a nucleic acid molecule comprising the nucleic acid SEQ ID NO. 119408, preferably the coding region thereof, or a homolog or fragment thereof, e.g. derived from Saccharomyces cerevisiae, is increased or generated. For example the activity of a nucleic acid molecule or a polypeptide comprising the nucleic acid, preferably the coding region thereof, or polypeptide or the consensus sequence or the polypeptide motif, as depicted in Table I, II or IV, application No. 11, column 5 or 8 in the respective same line as the nucleic acid molecule SEQ ID NO. 119408 or polypeptide SEQ ID NO. 119409, respectively, or a homolog or a fragment thereof, is increased or generated, or if the activity glycerol-3-phosphate dehydrogenase is increased or generated in a non-human organism, like a microorganism or a plant cell, plant or part thereof, especially with non-targeted localization. For example, an increase of the palmitic acid of at least 1 percent, particularly in a range of 13 to 39-percent is conferred as compared to a corresponding non-transformed wild type non-human organism.

[57352] Accordingly, in one embodiment, an increase of palmitic acid in a non-human organism, as compared to a corresponding non-transformed wild type non-human organism, is conferred in the process of the invention, if the activity of a polypeptide showing the activity of a protein kinase, or if the activity of the polypeptide Ydl101c, preferably represented by SEQ ID NO. 122519, or a homolog or fragment thereof, or if the activity of a polypeptide encoded by a nucleic acid molecule comprising the nucleic acid SEQ ID NO. 122518, preferably the coding region thereof, or a homolog or fragment thereof, e.g. derived from Saccharomyces cerevisiae, is increased or generated. For example the activity of a nucleic acid molecule or a polypeptide comprising the nucleic acid, preferably the coding region thereof, or polypeptide or the consensus sequence or the polypeptide motif, as depicted in Table I, II or IV, application No. 11, column 5 or 8 in the respective same line as the nucleic acid molecule SEQ ID NO. 122518 or polypeptide SEQ ID NO. 122519, respectively, or a homolog or a fragment thereof, is increased or generated, or if the activity protein kinase is increased or generated in a non-human organism, like a microorganism or a plant cell, plant or part thereof, especially with non-targeted localization. For example, an increase of the palmitic acid of at least 1 percent, particularly in a range of 20 to 36-percent is conferred as compared to a corresponding non-transformed wild type non-human organism.

[57353] Accordingly, in one embodiment, an increase of palmitic acid in a non-human organism, as compared to a corresponding non-transformed wild type non-human organism, is conferred in the process of the invention, if the activity of a polypeptide showing the activity of a F-box protein, or if the activity of the polypeptide Ydr131c, preferably represented by SEQ ID NO. 14707, or a homolog or fragment thereof, or if the activity of a polypeptide encoded by a nucleic acid molecule comprising the nucleic acid SEQ ID NO. 14706, preferably the coding region thereof, or a homolog or fragment thereof, e.g. derived from Saccharomyces cerevisiae, is increased or generated. For example the activity of a nucleic acid molecule or a polypeptide comprising the nucleic acid, preferably the coding region thereof, or polypeptide or the consensus sequence or the polypeptide motif, as depicted in Table I, II or IV, application No. 11, column 5 or 8 in the respective same line as the nucleic acid molecule SEQ ID NO. 14706 or polypeptide SEQ ID NO. 14707, respectively, or a homolog or a fragment thereof, is increased or generated, or if the activity F-box protein is increased or generated in a non-human organism, like a microorganism or a plant cell, plant or part thereof, especially with plastidic localization. For example, an increase of the palmitic acid of at least 1 percent, particularly in a range of 19 to 37-percent is conferred as compared to a corresponding non-transformed wild type non-human organism.

[57354] Accordingly, in one embodiment, an increase of palmitic acid in a non-human organism, as compared to a corresponding non-transformed wild type non-human organism, is conferred in the process of the invention, if the activity of a polypeptide showing the activity of a DnaJ-like chaperone, or if the activity of the polypeptide Yjl073w, preferably represented by SEQ ID NO. 64965, or a homolog or fragment thereof, or if the activity of a polypeptide encoded by a nucleic acid molecule comprising the nucleic acid SEQ ID NO. 64964, preferably the coding region thereof, or a homolog or fragment thereof, e.g. derived from Saccharomyces cerevisiae, is increased or generated. For example the activity of a nucleic acid molecule or a polypeptide comprising the nucleic acid, preferably the coding region thereof, or polypeptide or the consensus sequence or the polypeptide motif, as depicted in Table I, II or IV, application No. 11, column 5 or 8 in the respective same line as the nucleic acid molecule SEQ ID NO. 64964 or polypeptide SEQ ID NO. 64965, respectively, or a homolog or a fragment thereof, is increased or generated, or if the activity DnaJ-like chaperone is increased or generated in a non-human organism, like a microorganism or a plant cell, plant or part thereof, especially with plastidic localization. For example, an increase of the palmitic acid of at least 1 percent, particularly in a range of 18 to 39-percent is conferred as compared to a corresponding non-transformed wild type non-human organism.

[57355] Accordingly, in one embodiment, an increase of palmitic acid in a non-human organism, as compared to a corresponding non-transformed wild type non-human organism, is conferred in the process of the invention, if the activity of a polypeptide showing the activity of a aconitate hydratase, or if the activity of the polypeptide Ylr304c, preferably represented by SEQ ID NO. 66773, or a homolog or fragment thereof, or if the activity of a polypeptide encoded by a nucleic acid molecule comprising the nucleic acid SEQ ID NO. 66772, preferably the coding region thereof, or a homolog or fragment thereof, e.g. derived from Saccharomyces cerevisiae, is increased or generated. For example the activity of a nucleic acid molecule or a polypeptide comprising the nucleic acid, preferably the coding region thereof, or polypeptide or the consensus sequence or the polypeptide motif, as depicted in Table I, II or IV, application No. 11, column 5 or 8 in the respective same line as the nucleic acid molecule SEQ ID NO. 66772 or polypeptide SEQ ID NO. 66773, respectively, or a homolog or a fragment thereof, is increased or generated, or if the activity aconitate hydratase is increased or generated in a non-human organism, like a microorganism or a plant cell, plant or part thereof, especially with non-targeted localization. For example, an increase of the palmitic acid of at least 1 percent, particularly in a range of 16 to 38-percent is conferred as compared to a corresponding non-transformed wild type non-human organism.

[57356] Accordingly, in one embodiment, an increase of palmitic acid in a non-human organism, as compared to a corresponding non-transformed wild type non-human organism, is conferred in the process of the invention, if the activity of a polypeptide showing the activity of a ymr013cprotein, or if the activity of the polypeptide Ymr013c, preferably represented by SEQ ID NO. 91959, or a homolog or fragment thereof, or if the activity of a polypeptide encoded by a nucleic acid molecule comprising the nucleic acid SEQ ID NO. 91958, preferably the coding region thereof, or a homolog or fragment thereof, e.g. derived from Saccharomyces cerevisiae, is increased or generated. For example the activity of a nucleic acid molecule or a polypeptide comprising the nucleic acid, preferably the coding region thereof, or polypeptide or the consensus sequence or the polypeptide motif, as depicted in Table I, II or IV, application No. 11, column 5 or 8 in the respective same line as the nucleic acid molecule SEQ ID NO. 91958 or polypeptide SEQ ID NO. 91959, respectively, or a homolog or a fragment thereof, is increased or generated, or if the activity ymr013c-protein is increased or generated in a non-human organism, like a microorganism or a plant cell, plant or part thereof, especially with plastidic localization. For example, an increase of the palmitic acid of at least 1 percent, particularly in a range of 16 to 26-percent is conferred as compared to a corresponding non-transformed wild type non-human organism.

[57357] Accordingly, in one embodiment, an increase of palmitic acid in a non-human organism, as compared to a corresponding non-transformed wild type non-human organism, is conferred in the process of the invention, if the activity of a polypeptide showing the activity of a ATPase epsilon subunit, or if the activity of the polypeptide Ypl271w, preferably represented by SEQ ID NO. 118213, or a homolog or fragment thereof, or if the activity of a polypeptide encoded by a nucleic acid molecule comprising the nucleic acid SEQ ID NO. 118212, preferably the coding region thereof, or a homolog or fragment thereof, e.g. derived from Saccharomyces cerevisiae, is increased or generated. For example the activity of a nucleic acid molecule or a polypeptide comprising the nucleic acid, preferably the coding region thereof, or polypeptide or the consensus sequence or the polypeptide motif, as depicted in Table I, II or IV, application No. 11, column 5 or 8 in the respective same line as the nucleic acid molecule SEQ ID NO. 118212 or polypeptide SEQ ID NO. 118213, respectively, or a homolog or a fragment thereof, is increased or generated, or if the activity ATPase epsilon subunit is increased or generated in a non-human organism, like a microorganism or a plant cell, plant or part thereof, especially with plastidic localization. For example, an increase of the palmitic acid of at least 1 percent, particularly in a range of 19 to 33-percent is conferred as compared to a corresponding non-transformed wild type non-human organism.

[57358] Accordingly, in one embodiment, an increase of palmitic acid in a non-human organism, as compared to a corresponding non-transformed wild type non-human organism, is conferred in the process of the invention, if the activity of a polypeptide showing the activity of a 49747384_SOYBEAN-protein, or if the activity of the polypeptide 49747384_SOYBEAN, preferably represented by SEQ ID NO. 70, or a homolog or fragment thereof, or if the activity of a polypeptide encoded by a nucleic acid molecule comprising the nucleic acid SEQ ID NO. 69, preferably the coding region thereof, or a homolog or fragment thereof, e.g. derived from Glycine max, is increased or generated. For example the activity of a nucleic acid molecule or a polypeptide comprising the nucleic acid, preferably the coding region thereof, or polypeptide or the consensus sequence or the polypeptide motif, as depicted in Table I, II or IV, application No. 11, column 5 or 8 in the respective same line as the nucleic acid molecule SEQ ID NO. 69 or polypeptide SEQ ID NO. 70, respectively, or a homolog or a fragment thereof, is increased or generated, or if the activity 49747384_SOYBEAN-protein is increased or generated in a non-human organism, like a microorganism or a plant cell, plant or part thereof, especially with non-targeted localization. For example, an increase of the palmitic acid of at least 1 percent, particularly in a range of 15 to 29-percent is conferred as compared to a corresponding non-transformed wild type non-human organism.

[57359] Accordingly, in one embodiment, an increase of palmitic acid in a non-human organism, as compared to a corresponding non-transformed wild type non-human organism, is conferred in the process of the invention, if the activity of a polypeptide showing the activity of a glucose-6-phosphate 1-dehydrogenase, or if the activity of the polypeptide 59582753_SOYBEAN, preferably represented by SEQ ID NO. 16884, or a homolog or fragment thereof, or if the activity of a polypeptide encoded by a nucleic acid molecule comprising the nucleic acid SEQ ID NO. 16883, preferably the coding region thereof, or a homolog or fragment thereof, e.g. derived from Glycine max, is increased or generated. For example the activity of a nucleic acid molecule or a polypeptide comprising the nucleic acid, preferably the coding region thereof, or polypeptide or the consensus sequence or the polypeptide motif, as depicted in Table I, II or IV, application No. 11, column 5 or 8 in the respective same line as the nucleic acid molecule SEQ ID NO. 16883 or polypeptide SEQ ID NO. 16884, respectively, or a homolog or a fragment thereof, is increased or generated, or if the activity glucose-6-phosphate 1-dehydrogenase is increased or generated in a non-human organism, like a microorganism or a plant cell, plant or part thereof, especially with plastidic localization. For example, an increase of the palmitic acid of at least 1 percent, particularly in a range of 16 to 42-percent is conferred as compared to a corresponding non-transformed wild type non-human organism.

[57360] [0096.1.8.11] to [0103.1.8.11] for the disclosure of these paragraphs see [0096.1.8.8] to [0103.1.8.8] above.

[57361] In this paragraph “A” means “Goffeau et al., Science 274 (5287), 546 (1996)”, “B” means “Blattner et al., Science 277 (5331), 1453 (1997)”, “C” means “Nakamura et al., Nucleic Acids Res. 28(1), 72 (2000)”, “D” means “deposition of the sequences to the EMBL/GenBank/DDBJ databases under “Sequencing of the draft genome assembly of Azotobacter vinelandii AvOP”. in June 2005 by Copeland et al.”, “E” means “Henne et al., Nat. Biotechnol. 22 (5), 547 (2004)”, “F” means “Kaul et al., Nature 408 (6814), 796 (2000)”, and “G” means “Matsumoto et al., Nature 436 (7052), 793 (2005)”.

[57362] The nucleic acid sequence of At1g07430 from Arabidopsis thaliana, e.g. as shown in the respective line in column 5 of Table I, application no. 11, has been published in F. And the activity of the gene product thereof is the activity of protein phosphatase.

[57363] Accordingly, in one embodiment, the process of the present invention for producing palmitic acid in a non-human organism, like a microorganism or a plant or a part thereof, comprises increasing or generating the activity of a gene product with the activity of a gene product conferring the activity of “protein phosphatase”, especially from Arabidopsis thaliana or its functional equivalent or its homolog, e.g. the increase of
[57364] (a) a gene product of a gene comprising the nucleic acid molecule as shown in the respective line in column 5 of Table I, application no. 11, preferably the coding region thereof, or a homolog or a fragment thereof, and being depicted in the same respective line as said At1g07430,or a functional equivalent or a homolog thereof as shown in column 8 of Table I, application no. 11, preferably the coding region thereof, particularly a homolog or functional equivalent as shown in column 8 of Table I B, application no. 11, and being depicted in the same respective line as said At1g07430, and preferably the activity is increased non-targeted, or
[57365] (b) a polypeptide comprising a polypeptide, a consensus sequence or at least a polypeptide motif as shown in the respective line in column 5 of Table II or in column 8 of Table IV, application no. 11, respectively, and being depicted in the same respective line as said At1g07430, or a functional equivalent or a homolog thereof as depicted in column 8 of Table II, application no. 11, preferably a homolog or functional equivalent as depicted in column 8 of Table II B, application no. 11, and being depicted in the same respective line as said At1g07430, and preferably the activity is increased non-targeted.

[57366] Accordingly, in one embodiment, the molecule which activity is to be increased in the process of the invention is the gene product with an activity as a “protein phosphatase”, preferably it is the molecule of section (a) or (b) of this paragraph.

[57367] In particular, it was observed that in plants, especially in Arabidopsis thaliana, increasing or generating the activity of a gene product non-targeted with the activity of a “protein phosphatase”, preferably being encoded by a gene comprising the nucleic acid sequence SEQ ID NO. 17451, preferably the coding region thereof, conferred the production of or the increase in palmitic acid compared with the wild type control.

[57368] The nucleic acid sequence of At1g19670 from Arabidopsis thaliana, e.g. as shown in the respective line in column 5 of Table I, application no. 11, has been published in F. And the activity of the gene product thereof is the activity of chlorophyllase.

[57369] Accordingly, in one embodiment, the process of the present invention for producing palmitic acid in a non-human organism, like a microorganism or a plant or a part thereof, comprises increasing or generating the activity of a gene product with the activity of a gene product conferring the activity of “chlorophyllase”, especially from Arabidopsis thaliana or its functional equivalent or its homolog, e.g. the increase of
[57370] (a) a gene product of a gene comprising the nucleic acid molecule as shown in the respective line in column 5 of Table I, application no. 11, preferably the coding region thereof, or a homolog or a fragment thereof, and being depicted in the same respective line as said At1g19670, or a functional equivalent or a homolog thereof as shown in column 8 of Table I, application no. 11, preferably the coding region thereof, particularly a homolog or functional equivalent as shown in column 8 of Table I B, application no. 11, and being depicted in the same respective line as said At1g19670, and preferably the activity is increased non-targeted, or
[57371] (b) a polypeptide comprising a polypeptide, a consensus sequence or at least a polypeptide motif as shown in the respective line in column 5 of Table II or in column 8 of Table IV, application no. 11, respectively, and being depicted in the same respective line as said At1g19670, or a functional equivalent or a homolog thereof as depicted in column 8 of Table II, application no. 11, preferably a homolog or functional equivalent as depicted in column 8 of Table II B, application no. 11, and being depicted in the same respective line as said At1g19670, and preferably the activity is increased non-targeted.

[57372] Accordingly, in one embodiment, the molecule which activity is to be increased in the process of the invention is the gene product with an activity as a “chlorophyllase”, preferably it is the molecule of section (a) or (b) of this paragraph.

[57373] In particular, it was observed that in plants, especially in Arabidopsis thaliana, increasing or generating the activity of a gene product non-targeted with the activity of a “chlorophyllase”, preferably being encoded by a gene comprising the nucleic acid sequence SEQ ID NO. 113651, preferably the coding region thereof, conferred the production of or the increase in palmitic acid compared with the wild type control.

[57374] The nucleic acid sequence of At1g19800 from Arabidopsis thaliana, e.g. as shown in the respective line in column 5 of Table I, application no. 11, has been published in F. And the activity of the gene product thereof is the activity of At1g19800-protein.

[57375] Accordingly, in one embodiment, the process of the present invention for producing palmitic acid in a non-human organism, like a microorganism or a plant or a part thereof, comprises increasing or generating the activity of a gene product with the activity of a gene product conferring the activity of “At1g19800-protein”, especially from Arabidopsis thaliana or its functional equivalent or its homolog, e.g. the increase of
[57376] (a) a gene product of a gene comprising the nucleic acid molecule as shown in the respective line in column 5 of Table I, application no. 11, preferably the coding region thereof, or a homolog or a fragment thereof, and being depicted in the same respective line as said At1g19800, or a functional equivalent or a homolog thereof as shown in column 8 of Table I, application no. 11, preferably the coding region thereof, particularly a homolog or functional equivalent as shown in column 8 of Table I B, application no. 11, and being depicted in the same respective line as said At1g19800, and preferably the activity is increased non-targeted, or
[57377] (b) a polypeptide comprising a polypeptide, a consensus sequence or at least a polypeptide motif as shown in the respective line in column 5 of Table II or in column 8 of Table IV, application no. 11, respectively, and being depicted in the same respective line as said At1g19800, or a functional equivalent or a homolog thereof as depicted in column 8 of Table II, application no. 11, preferably a homolog or functional equivalent as depicted in column 8 of Table II B, application no. 11, and being depicted in the same respective line as said At1g19800, and preferably the activity is increased non-targeted.

[57378] Accordingly, in one embodiment, the molecule which activity is to be increased in the process of the invention is the gene product with an activity as a “At1g19800-protein”, preferably it is the molecule of section (a) or (b) of this paragraph.

[57379] In particular, it was observed that in plants, especially in Arabidopsis thaliana, increasing or generating the activity of a gene product non-targeted with the activity of a “At1g19800-protein”, preferably being encoded by a gene comprising the nucleic acid sequence SEQ ID NO. 17637, preferably the coding region thereof, conferred the production of or the increase in palmitic acid compared with the wild type control.

[57380] The nucleic acid sequence of At1g23110 from Arabidopsis thaliana, e.g. as shown in the respective line in column 5 of Table I, application no. 11, has been published in F. And the activity of the gene product thereof is the activity of At1g23110-protein.

[57381] Accordingly, in one embodiment, the process of the present invention for producing palmitic acid in a non-human organism, like a microorganism or a plant or a part thereof, comprises increasing or generating the activity of a gene product with the activity of a gene product conferring the activity of “At1g23110-protein”, especially from Arabidopsis thaliana or its functional equivalent or its homolog, e.g. the increase of
[57382] (a) a gene product of a gene comprising the nucleic acid molecule as shown in the respective line in column 5 of Table I, application no. 11, preferably the coding region thereof, or a homolog or a fragment thereof, and being depicted in the same respective line as said At1g23110, or a functional equivalent or a homolog thereof as shown in column 8 of Table I, application no. 11, preferably the coding region thereof, particularly a homolog or functional equivalent as shown in column 8 of Table I B, application no. 11, and being depicted in the same respective line as said At1g23110, and preferably the activity is increased non-targeted, or
[57383] (b) a polypeptide comprising a polypeptide, a consensus sequence or at least a polypeptide motif as shown in the respective line in column 5 of Table II or in column 8 of Table IV, application no. 11, respectively, and being depicted in the same respective line as said At1g23110, or a functional equivalent or a homolog thereof as depicted in column 8 of Table II, application no. 11, preferably a homolog or functional equivalent as depicted in column 8 of Table II B, application no. 11, and being depicted in the same respective line as said At1g23110, and preferably the activity is increased non-targeted.

[57384] Accordingly, in one embodiment, the molecule which activity is to be increased in the process of the invention is the gene product with an activity as a “At1g23110-protein”, preferably it is the molecule of section (a) or (b) of this paragraph.

[57385] In particular, it was observed that in plants, especially in Arabidopsis thaliana, increasing or generating the activity of a gene product non-targeted with the activity of a “At1g23110-protein”, preferably being encoded by a gene comprising the nucleic acid sequence SEQ ID NO. 102086, preferably the coding region thereof, conferred the production of or the increase in palmitic acid compared with the wild type control.

[57386] The nucleic acid sequence of At1g68320 from Arabidopsis thaliana, e.g. as shown in the respective line in column 5 of Table I, application no. 11, has been published in F. And the activity of the gene product thereof is the activity of transcription factor.

[57387] Accordingly, in one embodiment, the process of the present invention for producing palmitic acid in a non-human organism, like a microorganism or a plant or a part thereof, comprises increasing or generating the activity of a gene product with the activity of a gene product conferring the activity of “transcription factor”, especially from Arabidopsis thaliana or its functional equivalent or its homolog, e.g. the increase of
[57388] (a) a gene product of a gene comprising the nucleic acid molecule as shown in the respective line in column 5 of Table I, application no. 11, preferably the coding region thereof, or a homolog or a fragment thereof, and being depicted in the same respective line as said At1g68320, or a functional equivalent or a homolog thereof as shown in column 8 of Table I, application no. 11, preferably the coding region thereof, particularly a homolog or functional equivalent as shown in column 8 of Table I B, application no. 11, and being depicted in the same respective line as said At1g68320, and preferably the activity is increased non-targeted, or
[57389] (b) a polypeptide comprising a polypeptide, a consensus sequence or at least a polypeptide motif as shown in the respective line in column 5 of Table II or in column 8 of Table IV, application no. 11, respectively, and being depicted in the same respective line as said At1g68320, or a functional equivalent or a homolog thereof as depicted in column 8 of Table II, application no. 11, preferably a homolog or functional equivalent as depicted in column 8 of Table II B, application no. 11, and being depicted in the same respective line as said At1g68320, and preferably the activity is increased non-targeted.

[57390] Accordingly, in one embodiment, the molecule which activity is to be increased in the process of the invention is the gene product with an activity as a “transcription factor”, preferably it is the molecule of section (a) or (b) of this paragraph.

[57391] In particular, it was observed that in plants, especially in Arabidopsis thaliana, increasing or generating the activity of a gene product non-targeted with the activity of a “transcription factor”, preferably being encoded by a gene comprising the nucleic acid sequence SEQ ID NO. 1061, preferably the coding region thereof, conferred the production of or the increase in palmitic acid compared with the wild type control.

[57392] The nucleic acid sequence of At1g72770 from Arabidopsis thaliana, e.g. as shown in the respective line in column 5 of Table I, application no. 11, has been published in F. And the activity of the gene product thereof is the activity of protein phosphatase.

[57393] Accordingly, in one embodiment, the process of the present invention for producing palmitic acid in a non-human organism, like a microorganism or a plant or a part thereof, comprises increasing or generating the activity of a gene product with the activity of a gene product conferring the activity of “protein phosphatase”, especially from Arabidopsis thaliana or its functional equivalent or its homolog, e.g. the increase of
[57394] (a) a gene product of a gene comprising the nucleic acid molecule as shown in the respective line in column 5 of Table I, application no. 11, preferably the coding region thereof, or a homolog or a fragment thereof, and being depicted in the same respective line as said At1g72770, or a functional equivalent or a homolog thereof as shown in column 8 of Table I, application no. 11, preferably the coding region thereof, particularly a homolog or functional equivalent as shown in column 8 of Table I B, application no. 11, and being depicted in the same respective line as said At1g72770, and preferably the activity is increased non-targeted, or
[57395] (b) a polypeptide comprising a polypeptide, a consensus sequence or at least a polypeptide motif as shown in the respective line in column 5 of Table II or in column 8 of Table IV, application no. 11, respectively, and being depicted in the same respective line as said At1g72770, or a functional equivalent or a homolog thereof as depicted in column 8 of Table II, application no. 11, preferably a homolog or functional equivalent as depicted in column 8 of Table II B, application no. 11, and being depicted in the same respective line as said At1g72770, and preferably the activity is increased non-targeted.

[57396] Accordingly, in one embodiment, the molecule which activity is to be increased in the process of the invention is the gene product with an activity as a “protein phosphatase”, preferably it is the molecule of section (a) or (b) of this paragraph.

[57397] In particular, it was observed that in plants, especially in Arabidopsis thaliana, increasing or generating the activity of a gene product non-targeted with the activity of a “protein phosphatase”, preferably being encoded by a gene comprising the nucleic acid sequence SEQ ID NO. 19419, preferably the coding region thereof, conferred the production of or the increase in palmitic acid compared with the wild type control.

[57398] The nucleic acid sequence of At2g45420 from Arabidopsis thaliana, e.g. as shown in the respective line in column 5 of Table I, application no. 11, has been published in F. And the activity of the gene product thereof is the activity of At2g45420-protein.

[57399] Accordingly, in one embodiment, the process of the present invention for producing palmitic acid in a non-human organism, like a microorganism or a plant or a part thereof, comprises increasing or generating the activity of a gene product with the activity of a gene product conferring the activity of “At2g45420-protein”, especially from Arabidopsis thaliana or its functional equivalent or its homolog, e.g. the increase of
[57400] (a) a gene product of a gene comprising the nucleic acid molecule as shown in the respective line in column 5 of Table I, application no. 11, preferably the coding region thereof, or a homolog or a fragment thereof, and being depicted in the same respective line as said At2g45420, or a functional equivalent or a homolog thereof as shown in column 8 of Table I, application no. 11, preferably the coding region thereof, particularly a homolog or functional equivalent as shown in column 8 of Table I B, application no. 11, and being depicted in the same respective line as said At2g45420, and preferably the activity is increased non-targeted, or
[57401] (b) a polypeptide comprising a polypeptide, a consensus sequence or at least a polypeptide motif as shown in the respective line in column 5 of Table II or in column 8 of Table IV, application no. 11, respectively, and being depicted in the same respective line as said At2g45420, or a functional equivalent or a homolog thereof as depicted in column 8 of Table II, application no. 11, preferably a homolog or functional equivalent as depicted in column 8 of Table II B, application no. 11, and being depicted in the same respective line as said At2g45420, and preferably the activity is increased non-targeted.

[57402] Accordingly, in one embodiment, the molecule which activity is to be increased in the process of the invention is the gene product with an activity as a “At2g45420-protein”, preferably it is the molecule of section (a) or (b) of this paragraph.

[57403] In particular, it was observed that in plants, especially in Arabidopsis thaliana, increasing or generating the activity of a gene product non-targeted with the activity of a “At2g45420-protein”, preferably being encoded by a gene comprising the nucleic acid sequence SEQ ID NO. 1623, preferably the coding region thereof, conferred the production of or the increase in palmitic acid compared with the wild type control.

[57404] The nucleic acid sequence of At3g02990 from Arabidopsis thaliana, e.g. as shown in the respective line in column 5 of Table I, application no. 11, has been published in F. And the activity of the gene product thereof is the activity of heat shock transcription factor.

[57405] Accordingly, in one embodiment, the process of the present invention for producing palmitic acid in a non-human organism, like a microorganism or a plant or a part thereof, comprises increasing or generating the activity of a gene product with the activity of a gene product conferring the activity of “heat shock transcription factor”, especially from Arabidopsis thaliana or its functional equivalent or its homolog, e.g. the increase of
[57406] (a) a gene product of a gene comprising the nucleic acid molecule as shown in the respective line in column 5 of Table I, application no. 11, preferably the coding region thereof, or a homolog or a fragment thereof, and being depicted in the same respective line as said At3g02990, or a functional equivalent or a homolog thereof as shown in column 8 of Table I, application no. 11, preferably the coding region thereof, particularly a homolog or functional equivalent as shown in column 8 of Table I B, application no. 11, and being depicted in the same respective line as said At3g02990, and preferably the activity is increased non-targeted, or
[57407] (b) a polypeptide comprising a polypeptide, a consensus sequence or at least a polypeptide motif as shown in the respective line in column 5 of Table II or in column 8 of Table IV, application no. 11, respectively, and being depicted in the same respective line as said At3g02990, or a functional equivalent or a homolog thereof as depicted in column 8 of Table II, application no. 11, preferably a homolog or functional equivalent as depicted in column 8 of Table II B, application no. 11, and being depicted in the same respective line as said At3g02990, and preferably the activity is increased non-targeted.

[57408] Accordingly, in one embodiment, the molecule which activity is to be increased in the process of the invention is the gene product with an activity as a “heat shock transcription factor”, preferably it is the molecule of section (a) or (b) of this paragraph.

[57409] In particular, it was observed that in plants, especially in Arabidopsis thaliana, increasing or generating the activity of a gene product non-targeted with the activity of a “heat shock transcription factor”, preferably being encoded by a gene comprising the nucleic acid sequence SEQ ID NO. 68657, preferably the coding region thereof, conferred the production of or the increase in palmitic acid compared with the wild type control.

[57410] The nucleic acid sequence of At3g20910 from Arabidopsis thaliana, e.g. as shown in the respective line in column 5 of Table I, application no. 11, has been published in F. And the activity of the gene product thereof is the activity of CCAAT-binding transcription factor.

[57411] Accordingly, in one embodiment, the process of the present invention for producing palmitic acid in a non-human organism, like a microorganism or a plant or a part thereof, comprises increasing or generating the activity of a gene product with the activity of a gene product conferring the activity of “CCAAT-binding transcription factor”, especially from Arabidopsis thaliana or its functional equivalent or its homolog, e.g. the increase of
[57412] (a) a gene product of a gene comprising the nucleic acid molecule as shown in the respective line in column 5 of Table I, application no. 11, preferably the coding region thereof, or a homolog or a fragment thereof, and being depicted in the same respective line as said At3g20910, or a functional equivalent or a homolog thereof as shown in column 8 of Table I, application no. 11, preferably the coding region thereof, particularly a homolog or functional equivalent as shown in column 8 of Table I B, application no. 11, and being depicted in the same respective line as said At3g20910, and preferably the activity is increased non-targeted, or
[57413] (b) a polypeptide comprising a polypeptide, a consensus sequence or at least a polypeptide motif as shown in the respective line in column 5 of Table II or in column 8 of Table IV, application no. 11, respectively, and being depicted in the same respective line as said At3g20910, or a functional equivalent or a homolog thereof as depicted in column 8 of Table II, application no. 11, preferably a homolog or functional equivalent as depicted in column 8 of Table II B, application no. 11, and being depicted in the same respective line as said At3g20910, and preferably the activity is increased non-targeted.

[57414] Accordingly, in one embodiment, the molecule which activity is to be increased in the process of the invention is the gene product with an activity as a “CCAAT-binding transcription factor”, preferably it is the molecule of section (a) or (b) of this paragraph.

[57415] In particular, it was observed that in plants, especially in Arabidopsis thaliana, increasing or generating the activity of a gene product non-targeted with the activity of a “CCAAT-binding transcription factor”, preferably being encoded by a gene comprising the nucleic acid sequence SEQ ID NO. 22921, preferably the coding region thereof, conferred the production of or the increase in palmitic acid compared with the wild type control.

[57416] The nucleic acid sequence of At3g62950 from Arabidopsis thaliana, e.g. as shown in the respective line in column 5 of Table I, application no. 11, has been published in F. And the activity of the gene product thereof is the activity of glutaredoxin.

[57417] Accordingly, in one embodiment, the process of the present invention for producing palmitic acid in a non-human organism, like a microorganism or a plant or a part thereof, comprises increasing or generating the activity of a gene product with the activity of a gene product conferring the activity of “glutaredoxin”, especially from Arabidopsis thaliana or its functional equivalent or its homolog, e.g. the increase of
[57418] (a) a gene product of a gene comprising the nucleic acid molecule as shown in the respective line in column 5 of Table I, application no. 11, preferably the coding region thereof, or a homolog or a fragment thereof, and being depicted in the same respective line as said At3g62950, or a functional equivalent or a homolog thereof as shown in column 8 of Table I, application no. 11, preferably the coding region thereof, particularly a homolog or functional equivalent as shown in column 8 of Table I B, application no. 11, and being depicted in the same respective line as said At3g62950, and preferably the activity is increased non-targeted, or
[57419] (b) a polypeptide comprising a polypeptide, a consensus sequence or at least a polypeptide motif as shown in the respective line in column 5 of Table II or in column 8 of Table IV, application no. 11, respectively, and being depicted in the same respective line as said At3g62950, or a functional equivalent or a homolog thereof as depicted in column 8 of Table II, application no. 11, preferably a homolog or functional equivalent as depicted in column 8 of Table II B, application no. 11, and being depicted in the same respective line as said At3g62950, and preferably the activity is increased non-targeted.

[57420] Accordingly, in one embodiment, the molecule which activity is to be increased in the process of the invention is the gene product with an activity as a “glutaredoxin”, preferably it is the molecule of section (a) or (b) of this paragraph.

[57421] In particular, it was observed that in plants, especially in Arabidopsis thaliana, increasing or generating the activity of a gene product non-targeted with the activity of a “glutaredoxin”, preferably being encoded by a gene comprising the nucleic acid sequence SEQ ID NO. 2935, preferably the coding region thereof, conferred the production of or the increase in palmitic acid compared with the wild type control.

[57422] The nucleic acid sequence of At4g15670 from Arabidopsis thaliana, e.g. as shown in the respective line in column 5 of Table I, application no. 11, has been published in F. And the activity of the gene product thereof is the activity of monothiol glutaredoxin.

[57423] Accordingly, in one embodiment, the process of the present invention for producing palmitic acid in a non-human organism, like a microorganism or a plant or a part thereof, comprises increasing or generating the activity of a gene product with the activity of a gene product conferring the activity of “monothiol glutaredoxin”, especially from Arabidopsis thaliana or its functional equivalent or its homolog, e.g. the increase of
[57424] (a) a gene product of a gene comprising the nucleic acid molecule as shown in the respective line in column 5 of Table I, application no. 11, preferably the coding region thereof, or a homolog or a fragment thereof, and being depicted in the same respective line as said At4g15670, or a functional equivalent or a homolog thereof as shown in column 8 of Table I, application no. 11, preferably the coding region thereof, particularly a homolog or functional equivalent as shown in column 8 of Table I B, application no. 11, and being depicted in the same respective line as said At4g15670, and preferably the activity is increased non-targeted, or
[57425] (b) a polypeptide comprising a polypeptide, a consensus sequence or at least a polypeptide motif as shown in the respective line in column 5 of Table II or in column 8 of Table IV, application no. 11, respectively, and being depicted in the same respective line as said At4g15670, or a functional equivalent or a homolog thereof as depicted in column 8 of Table II, application no. 11, preferably a homolog or functional equivalent as depicted in column 8 of Table II B, application no. 11, and being depicted in the same respective line as said At4g15670, and preferably the activity is increased non-targeted.

[57426] Accordingly, in one embodiment, the molecule which activity is to be increased in the process of the invention is the gene product with an activity as a “monothiol glutaredoxin”, preferably it is the molecule of section (a) or (b) of this paragraph.

[57427] In particular, it was observed that in plants, especially in Arabidopsis thaliana, increasing or generating the activity of a gene product non-targeted with the activity of a “monothiol glutaredoxin”, preferably being encoded by a gene comprising the nucleic acid sequence SEQ ID NO. 3279, preferably the coding region thereof, conferred the production of or the increase in palmitic acid compared with the wild type control.

[57428] The nucleic acid sequence of At4g18880 from Arabidopsis thaliana, e.g. as shown in the respective line in column 5 of Table I, application no. 11, has been published in F. And the activity of the gene product thereof is the activity of heat shock transcription factor.

[57429] Accordingly, in one embodiment, the process of the present invention for producing palmitic acid in a non-human organism, like a microorganism or a plant or a part thereof, comprises increasing or generating the activity of a gene product with the activity of a gene product conferring the activity of “heat shock transcription factor”, especially from Arabidopsis thaliana or its functional equivalent or its homolog, e.g. the increase of
[57430] (a) a gene product of a gene comprising the nucleic acid molecule as shown in the respective line in column 5 of Table I, application no. 11, preferably the coding region thereof, or a homolog or a fragment thereof, and being depicted in the same respective line as said At4g18880, or a functional equivalent or a homolog thereof as shown in column 8 of Table I, application no. 11, preferably the coding region thereof, particularly a homolog or functional equivalent as shown in column 8 of Table I B, application no. 11, and being depicted in the same respective line as said At4g18880, and preferably the activity is increased non-targeted, or
[57431] (b) a polypeptide comprising a polypeptide, a consensus sequence or at least a polypeptide motif as shown in the respective line in column 5 of Table II or in column 8 of Table IV, application no. 11, respectively, and being depicted in the same respective line as said At4g18880, or a functional equivalent or a homolog thereof as depicted in column 8 of Table II, application no. 11, preferably a homolog or functional equivalent as depicted in column 8 of Table II B, application no. 11, and being depicted in the same respective line as said At4g18880, and preferably the activity is increased non-targeted.

[57432] Accordingly, in one embodiment, the molecule which activity is to be increased in the process of the invention is the gene product with an activity as a “heat shock transcription factor”, preferably it is the molecule of section (a) or (b) of this paragraph.

[57433] In particular, it was observed that in plants, especially in Arabidopsis thaliana, increasing or generating the activity of a gene product non-targeted with the activity of a “heat shock transcription factor”, preferably being encoded by a gene comprising the nucleic acid sequence SEQ ID NO. 24232, preferably the coding region thereof, conferred the production of or the increase in palmitic acid compared with the wild type control.

[57434] The nucleic acid sequence of At4g26080 from Arabidopsis thaliana, e.g. as shown in the respective line in column 5 of Table I, application no. 11, has been published in F. And the activity of the gene product thereof is the activity of protein phosphatase.

[57435] Accordingly, in one embodiment, the process of the present invention for producing palmitic acid in a non-human organism, like a microorganism or a plant or a part thereof, comprises increasing or generating the activity of a gene product with the activity of a gene product conferring the activity of “protein phosphatase”, especially from Arabidopsis thaliana or its functional equivalent or its homolog, e.g. the increase of
[57436] (a) a gene product of a gene comprising the nucleic acid molecule as shown in the respective line in column 5 of Table I, application no. 11, preferably the coding region thereof, or a homolog or a fragment thereof, and being depicted in the same respective line as said At4g26080, or a functional equivalent or a homolog thereof as shown in column 8 of Table I, application no. 11, preferably the coding region thereof, particularly a homolog or functional equivalent as shown in column 8 of Table I B, application no. 11, and being depicted in the same respective line as said At4g26080, and preferably the activity is increased non-targeted, or
[57437] (b) a polypeptide comprising a polypeptide, a consensus sequence or at least a polypeptide motif as shown in the respective line in column 5 of Table II or in column 8 of Table IV, application no. 11, respectively, and being depicted in the same respective line as said At4g26080, or a functional equivalent or a homolog thereof as depicted in column 8 of Table II, application no. 11, preferably a homolog or functional equivalent as depicted in column 8 of Table II B, application no. 11, and being depicted in the same respective line as said At4g26080, and preferably the activity is increased non-targeted.

[57438] Accordingly, in one embodiment, the molecule which activity is to be increased in the process of the invention is the gene product with an activity as a “protein phosphatase”, preferably it is the molecule of section (a) or (b) of this paragraph.

[57439] In particular, it was observed that in plants, especially in Arabidopsis thaliana, increasing or generating the activity of a gene product non-targeted with the activity of a “protein phosphatase”, preferably being encoded by a gene comprising the nucleic acid sequence SEQ ID NO. 68849, preferably the coding region thereof, conferred the production of or the increase in palmitic acid compared with the wild type control.

[57440] The nucleic acid sequence of At4g33040 from Arabidopsis thaliana, e.g. as shown in the respective line in column 5 of Table I, application no. 11, has been published in F. And the activity of the gene product thereof is the activity of glutaredoxin.

[57441] Accordingly, in one embodiment, the process of the present invention for producing palmitic acid in a non-human organism, like a microorganism or a plant or a part thereof, comprises increasing or generating the activity of a gene product with the activity of a gene product conferring the activity of “glutaredoxin”, especially from Arabidopsis thaliana or its functional equivalent or its homolog, e.g. the increase of
[57442] (a) a gene product of a gene comprising the nucleic acid molecule as shown in the respective line in column 5 of Table I, application no. 11, preferably the coding region thereof, or a homolog or a fragment thereof, and being depicted in the same respective line as said At4g33040, or a functional equivalent or a homolog thereof as shown in column 8 of Table I, application no. 11, preferably the coding region thereof, particularly a homolog or functional equivalent as shown in column 8 of Table I B, application no. 11, and being depicted in the same respective line as said At4g33040, and preferably the activity is increased non-targeted, or
[57443] (b) a polypeptide comprising a polypeptide, a consensus sequence or at least a polypeptide motif as shown in the respective line in column 5 of Table II or in column 8 of Table IV, application no. 11, respectively, and being depicted in the same respective line as said At4g33040, or a functional equivalent or a homolog thereof as depicted in column 8 of Table II, application no. 11, preferably a homolog or functional equivalent as depicted in column 8 of Table II B, application no. 11, and being depicted in the same respective line as said At4g33040, and preferably the activity is increased non-targeted.

[57444] Accordingly, in one embodiment, the molecule which activity is to be increased in the process of the invention is the gene product with an activity as a “glutaredoxin”, preferably it is the molecule of section (a) or (b) of this paragraph.

[57445] In particular, it was observed that in plants, especially in Arabidopsis thaliana, increasing or generating the activity of a gene product non-targeted with the activity of a “glutaredoxin”, preferably being encoded by a gene comprising the nucleic acid sequence SEQ ID NO. 4102, preferably the coding region thereof, conferred the production of or the increase in palmitic acid compared with the wild type control.

[57446] The nucleic acid sequence of At4g35310 from Arabidopsis thaliana, e.g. as shown in the respective line in column 5 of Table I, application no. 11, has been published in F. And the activity of the gene product thereof is the activity of calcium-dependent protein kinase.

[57447] Accordingly, in one embodiment, the process of the present invention for producing palmitic acid in a non-human organism, like a microorganism or a plant or a part thereof, comprises increasing or generating the activity of a gene product with the activity of a gene product conferring the activity of “calcium-dependent protein kinase”, especially from Arabidopsis thaliana or its functional equivalent or its homolog, e.g. the increase of
[57448] (a) a gene product of a gene comprising the nucleic acid molecule as shown in the respective line in column 5 of Table I, application no. 11, preferably the coding region thereof, or a homolog or a fragment thereof, and being depicted in the same respective line as said At4g35310, or a functional equivalent or a homolog thereof as shown in column 8 of Table I, application no. 11, preferably the coding region thereof, particularly a homolog or functional equivalent as shown in column 8 of Table I B, application no. 11, and being depicted in the same respective line as said At4g35310, and preferably the activity is increased non-targeted, or
[57449] (b) a polypeptide comprising a polypeptide, a consensus sequence or at least a polypeptide motif as shown in the respective line in column 5 of Table II or in column 8 of Table IV, application no. 11, respectively, and being depicted in the same respective line as said At4g35310, or a functional equivalent or a homolog thereof as depicted in column 8 of Table II, application no. 11, preferably a homolog or functional equivalent as depicted in column 8 of Table II B, application no. 11, and being depicted in the same respective line as said At4g35310, and preferably the activity is increased non-targeted.

[57450] Accordingly, in one embodiment, the molecule which activity is to be increased in the process of the invention is the gene product with an activity as a “calcium-dependent protein kinase”, preferably it is the molecule of section (a) or (b) of this paragraph.

[57451] In particular, it was observed that in plants, especially in Arabidopsis thaliana, increasing or generating the activity of a gene product non-targeted with the activity of a “calcium-dependent protein kinase”, preferably being encoded by a gene comprising the nucleic acid sequence SEQ ID NO. 4348, preferably the coding region thereof, conferred the production of or the increase in palmitic acid compared with the wild type control.

[57452] The nucleic acid sequence of At5g57050 from Arabidopsis thaliana, e.g. as shown in the respective line in column 5 of Table I, application no. 11, has been published in F. And the activity of the gene product thereof is the activity of protein phosphatase.

[57453] Accordingly, in one embodiment, the process of the present invention for producing palmitic acid in a non-human organism, like a microorganism or a plant or a part thereof, comprises increasing or generating the activity of a gene product with the activity of a gene product conferring the activity of “protein phosphatase”, especially from Arabidopsis thaliana or its functional equivalent or its homolog, e.g. the increase of
[57454] (a) a gene product of a gene comprising the nucleic acid molecule as shown in the respective line in column 5 of Table I, application no. 11, preferably the coding region thereof, or a homolog or a fragment thereof, and being depicted in the same respective line as said At5g57050, or a functional equivalent or a homolog thereof as shown in column 8 of Table I, application no. 11, preferably the coding region thereof, particularly a homolog or functional equivalent as shown in column 8 of Table I B, application no. 11, and being depicted in the same respective line as said At5g57050, and preferably the activity is increased non-targeted, or
[57455] (b) a polypeptide comprising a polypeptide, a consensus sequence or at least a polypeptide motif as shown in the respective line in column 5 of Table II or in column 8 of Table IV, application no. 11, respectively, and being depicted in the same respective line as said At5g57050, or a functional equivalent or a homolog thereof as depicted in column 8 of Table II, application no. 11, preferably a homolog or functional equivalent as depicted in column 8 of Table II B, application no. 11, and being depicted in the same respective line as said At5g57050, and preferably the activity is increased non-targeted.

[57456] Accordingly, in one embodiment, the molecule which activity is to be increased in the process of the invention is the gene product with an activity as a “protein phosphatase”, preferably it is the molecule of section (a) or (b) of this paragraph.

[57457] In particular, it was observed that in plants, especially in Arabidopsis thaliana, increasing or generating the activity of a gene product non-targeted with the activity of a “protein phosphatase”, preferably being encoded by a gene comprising the nucleic acid sequence SEQ ID NO. 5318, preferably the coding region thereof, conferred the production of or the increase in palmitic acid compared with the wild type control.

[57458] The nucleic acid sequence of At5g59220 from Arabidopsis thaliana, e.g. as shown in the respective line in column 5 of Table I, application no. 11, has been published in F. And the activity of the gene product thereof is the activity of protein phosphatase.

[57459] Accordingly, in one embodiment, the process of the present invention for producing palmitic acid in a non-human organism, like a microorganism or a plant or a part thereof, comprises increasing or generating the activity of a gene product with the activity of a gene product conferring the activity of “protein phosphatase”, especially from Arabidopsis thaliana or its functional equivalent or its homolog, e.g. the increase of
[57460] (a) a gene product of a gene comprising the nucleic acid molecule as shown in the respective line in column 5 of Table I, application no. 11, preferably the coding region thereof, or a homolog or a fragment thereof, and being depicted in the same respective line as said At5g59220, or a functional equivalent or a homolog thereof as shown in column 8 of Table I, application no. 11, preferably the coding region thereof, particularly a homolog or functional equivalent as shown in column 8 of Table I B, application no. 11, and being depicted in the same respective line as said At5g59220, and preferably the activity is increased non-targeted, or
[57461] (b) a polypeptide comprising a polypeptide, a consensus sequence or at least a polypeptide motif as shown in the respective line in column 5 of Table II or in column 8 of Table IV, application no. 11, respectively, and being depicted in the same respective line as said At5g59220, or a functional equivalent or a homolog thereof as depicted in column 8 of Table II, application no. 11, preferably a homolog or functional equivalent as depicted in column 8 of Table II B, application no. 11, and being depicted in the same respective line as said At5g59220, and preferably the activity is increased non-targeted.

[57462] Accordingly, in one embodiment, the molecule which activity is to be increased in the process of the invention is the gene product with an activity as a “protein phosphatase”, preferably it is the molecule of section (a) or (b) of this paragraph.

[57463] In particular, it was observed that in plants, especially in Arabidopsis thaliana, increasing or generating the activity of a gene product non-targeted with the activity of a “protein phosphatase”, preferably being encoded by a gene comprising the nucleic acid sequence SEQ ID NO. 25498, preferably the coding region thereof, conferred the production of or the increase in palmitic acid compared with the wild type control.

[57464] The nucleic acid sequence of AvinDRAFT_{—}1788 from Azotobacter vinelandii, e.g. as shown in the respective line in column 5 of Table I, application no. 11, has been published in D. And the activity of the gene product thereof is the activity of oxidoreductase.

[57465] Accordingly, in one embodiment, the process of the present invention for producing palmitic acid in a non-human organism, like a microorganism or a plant or a part thereof, comprises increasing or generating the activity of a gene product with the activity of a gene product conferring the activity of “oxidoreductase”, especially from Azotobacter vinelandii or its functional equivalent or its homolog, e.g. the increase of
[57466] (a) a gene product of a gene comprising the nucleic acid molecule as shown in the respective line in column 5 of Table I, application no. 11, preferably the coding region thereof, or a homolog or a fragment thereof, and being depicted in the same respective line as said AvinDRAFT_{—}1788, or a functional equivalent or a homolog thereof as shown in column 8 of Table I, application no. 11, preferably the coding region thereof, particularly a homolog or functional equivalent as shown in column 8 of Table I B, application no. 11, and being depicted in the same respective line as said AvinDRAFT_{—}1788, and preferably the activity is increased non-targeted, or
[57467] (b) a polypeptide comprising a polypeptide, a consensus sequence or at least a polypeptide motif as shown in the respective line in column 5 of Table II or in column 8 of Table IV, application no. 11, respectively, and being depicted in the same respective line as said AvinDRAFT_{—}1788, or a functional equivalent or a homolog thereof as depicted in column 8 of Table II, application no. 11, preferably a homolog or functional equivalent as depicted in column 8 of Table II B, application no. 11, and being depicted in the same respective line as said AvinDRAFT_{—}1788, and preferably the activity is increased non-targeted.

[57468] Accordingly, in one embodiment, the molecule which activity is to be increased in the process of the invention is the gene product with an activity as a “oxidoreductase”, preferably it is the molecule of section (a) or (b) of this paragraph.

[57469] In particular, it was observed that in plants, especially in Arabidopsis thaliana, increasing or generating the activity of a gene product non-targeted with the activity of a “oxidoreductase”, preferably being encoded by a gene comprising the nucleic acid sequence SEQ ID NO. 114083, preferably the coding region thereof, conferred the production of or the increase in palmitic acid compared with the wild type control.

[57470] The nucleic acid sequence of AvinDRAFT_{—}3577 from Azotobacter vinelandii, e.g. as shown in the respective line in column 5 of Table I, application no. 11, has been published in D. And the activity of the gene product thereof is the activity of ThiF family protein.

[57471] Accordingly, in one embodiment, the process of the present invention for producing palmitic acid in a non-human organism, like a microorganism or a plant or a part thereof, comprises increasing or generating the activity of a gene product with the activity of a gene product conferring the activity of “ThiF family protein”, especially from Azotobacter vinelandii or its functional equivalent or its homolog, e.g. the increase of
[57472] (a) a gene product of a gene comprising the nucleic acid molecule as shown in the respective line in column 5 of Table I, application no. 11, preferably the coding region thereof, or a homolog or a fragment thereof, and being depicted in the same respective line as said AvinDRAFT_{—}3577, or a functional equivalent or a homolog thereof as shown in column 8 of Table I, application no. 11, preferably the coding region thereof, particularly a homolog or functional equivalent as shown in column 8 of Table I B, application no. 11, and being depicted in the same respective line as said AvinDRAFT_{—}3577, and preferably the activity is increased non-targeted, or
[57473] (b) a polypeptide comprising a polypeptide, a consensus sequence or at least a polypeptide motif as shown in the respective line in column 5 of Table II or in column 8 of Table IV, application no. 11, respectively, and being depicted in the same respective line as said AvinDRAFT_{—}3577, or a functional equivalent or a homolog thereof as depicted in column 8 of Table II, application no. 11, preferably a homolog or functional equivalent as depicted in column 8 of Table II B, application no. 11, and being depicted in the same respective line as said AvinDRAFT_{—}3577, and preferably the activity is increased non-targeted.

[57474] Accordingly, in one embodiment, the molecule which activity is to be increased in the process of the invention is the gene product with an activity as a “ThiF family protein”, preferably it is the molecule of section (a) or (b) of this paragraph.

[57475] In particular, it was observed that in plants, especially in Arabidopsis thaliana, increasing or generating the activity of a gene product non-targeted with the activity of a “ThiF family protein”, preferably being encoded by a gene comprising the nucleic acid sequence SEQ ID NO. 111155, preferably the coding region thereof, conferred the production of or the increase in palmitic acid compared with the wild type control.

[57476] The nucleic acid sequence of AvinDRAFT_{—}3629 from Azotobacter vinelandii, e.g. as shown in the respective line in column 5 of Table I, application no. 11, has been published in D. And the activity of the gene product thereof is the activity of recombinase A.

[57477] Accordingly, in one embodiment, the process of the present invention for producing palmitic acid in a non-human organism, like a microorganism or a plant or a part thereof, comprises increasing or generating the activity of a gene product with the activity of a gene product conferring the activity of “recombinase A”, especially from Azotobacter vinelandii or its functional equivalent or its homolog, e.g. the increase of
[57478] (a) a gene product of a gene comprising the nucleic acid molecule as shown in the respective line in column 5 of Table I, application no. 11, preferably the coding region thereof, or a homolog or a fragment thereof, and being depicted in the same respective line as said AvinDRAFT_{—}3629, or a functional equivalent or a homolog thereof as shown in column 8 of Table I, application no. 11, preferably the coding region thereof, particularly a homolog or functional equivalent as shown in column 8 of Table I B, application no. 11, and being depicted in the same respective line as said AvinDRAFT_{—}3629, and preferably the activity is increased non-targeted, or
[57479] (b) a polypeptide comprising a polypeptide, a consensus sequence or at least a polypeptide motif as shown in the respective line in column 5 of Table II or in column 8 of Table IV, application no. 11, respectively, and being depicted in the same respective line as said AvinDRAFT_{—}3629, or a functional equivalent or a homolog thereof as depicted in column 8 of Table II, application no. 11, preferably a homolog or functional equivalent as depicted in column 8 of Table II B, application no. 11, and being depicted in the same respective line as said AvinDRAFT_{—}3629, and preferably the activity is increased non-targeted.

[57480] Accordingly, in one embodiment, the molecule which activity is to be increased in the process of the invention is the gene product with an activity as a “recombinase A”, preferably it is the molecule of section (a) or (b) of this paragraph.

[57481] In particular, it was observed that in plants, especially in Arabidopsis thaliana, increasing or generating the activity of a gene product non-targeted with the activity of a “recombinase A”, preferably being encoded by a gene comprising the nucleic acid sequence SEQ ID NO. 114231, preferably the coding region thereof, conferred the production of or the increase in palmitic acid compared with the wild type control.

[57482] The nucleic acid sequence of AvinDRAFT_{—}4606 from Azotobacter vinelandii, e.g. as shown in the respective line in column 5 of Table I, application no. 11, has been published in D. And the activity of the gene product thereof is the activity of NADH-quinone oxidoreductase subunit.

[57483] Accordingly, in one embodiment, the process of the present invention for producing palmitic acid in a non-human organism, like a microorganism or a plant or a part thereof, comprises increasing or generating the activity of a gene product with the activity of a gene product conferring the activity of “NADH-quinone oxidoreductase subunit”, especially from Azotobacter vinelandii or its functional equivalent or its homolog, e.g. the increase of
[57484] (a) a gene product of a gene comprising the nucleic acid molecule as shown in the respective line in column 5 of Table I, application no. 11, preferably the coding region thereof, or a homolog or a fragment thereof, and being depicted in the same respective line as said AvinDRAFT_{—}4606, or a functional equivalent or a homolog thereof as shown in column 8 of Table I, application no. 11, preferably the coding region thereof, particularly a homolog or functional equivalent as shown in column 8 of Table I B, application no. 11, and being depicted in the same respective line as said AvinDRAFT_{—}4606, and preferably the activity is increased non-targeted, or
[57485] (b) a polypeptide comprising a polypeptide, a consensus sequence or at least a polypeptide motif as shown in the respective line in column 5 of Table II or in column 8 of Table IV, application no. 11, respectively, and being depicted in the same respective line as said AvinDRAFT_{—}4606, or a functional equivalent or a homolog thereof as depicted in column 8 of Table II, application no. 11, preferably a homolog or functional equivalent as depicted in column 8 of Table II B, application no. 11, and being depicted in the same respective line as said AvinDRAFT_{—}4606, and preferably the activity is increased non-targeted.

[57486] Accordingly, in one embodiment, the molecule which activity is to be increased in the process of the invention is the gene product with an activity as a “NADH-quinone oxidoreductase subunit”, preferably it is the molecule of section (a) or (b) of this paragraph.

[57487] In particular, it was observed that in plants, especially in Arabidopsis thaliana, increasing or generating the activity of a gene product non-targeted with the activity of a “NADH-quinone oxidoreductase subunit”, preferably being encoded by a gene comprising the nucleic acid sequence SEQ ID NO. 73719, preferably the coding region thereof, conferred the production of or the increase in palmitic acid compared with the wild type control.

[57488] The nucleic acid sequence of AvinDRAFT_{—}5467 from Azotobacter vinelandii, e.g. as shown in the respective line in column 5 of Table I, application no. 11, has been published in D. And the activity of the gene product thereof is the activity of HesB/YadR/YfhF family protein.

[57489] Accordingly, in one embodiment, the process of the present invention for producing palmitic acid in a non-human organism, like a microorganism or a plant or a part thereof, comprises increasing or generating the activity of a gene product with the activity of a gene product conferring the activity of “HesB/YadR/YfhF family protein”, especially from Azotobacter vinelandii or its functional equivalent or its homolog, e.g. the increase of
[57490] (a) a gene product of a gene comprising the nucleic acid molecule as shown in the respective line in column 5 of Table I, application no. 11, preferably the coding region thereof, or a homolog or a fragment thereof, and being depicted in the same respective line as said AvinDRAFT_{—}5467, or a functional equivalent or a homolog thereof as shown in column 8 of Table I, application no. 11, preferably the coding region thereof, particularly a homolog or functional equivalent as shown in column 8 of Table I B, application no. 11, and being depicted in the same respective line as said AvinDRAFT_{—}5467, and preferably the activity is increased non-targeted, or
[57491] (b) a polypeptide comprising a polypeptide, a consensus sequence or at least a polypeptide motif as shown in the respective line in column 5 of Table II or in column 8 of Table IV, application no. 11, respectively, and being depicted in the same respective line as said AvinDRAFT_{—}5467, or a functional equivalent or a homolog thereof as depicted in column 8 of Table II, application no. 11, preferably a homolog or functional equivalent as depicted in column 8 of Table II B, application no. 11, and being depicted in the same respective line as said AvinDRAFT_{—}5467, and preferably the activity is increased non-targeted.

[57492] Accordingly, in one embodiment, the molecule which activity is to be increased in the process of the invention is the gene product with an activity as a “HesB/YadR/YfhF family protein”, preferably it is the molecule of section (a) or (b) of this paragraph.

[57493] In particular, it was observed that in plants, especially in Arabidopsis thaliana, increasing or generating the activity of a gene product non-targeted with the activity of a “HesB/YadR/YfhF family protein”, preferably being encoded by a gene comprising the nucleic acid sequence SEQ ID NO. 32648, preferably the coding region thereof, conferred the production of or the increase in palmitic acid compared with the wild type control.

[57494] The nucleic acid sequence of AvinDRAFT_{—}6075 from Azotobacter vinelandii, e.g. as shown in the respective line in column 5 of Table I, application no. 11, has been published in D. And the activity of the gene product thereof is the activity of peptidyl-prolyl cis-trans isomerase.

[57495] Accordingly, in one embodiment, the process of the present invention for producing palmitic acid in a non-human organism, like a microorganism or a plant or a part thereof, comprises increasing or generating the activity of a gene product with the activity of a gene product conferring the activity of “peptidyl-prolyl cis-trans isomerase”, especially from Azotobacter vinelandii or its functional equivalent or its homolog, e.g. the increase of
[57496] (a) a gene product of a gene comprising the nucleic acid molecule as shown in the respective line in column 5 of Table I, application no. 11, preferably the coding region thereof, or a homolog or a fragment thereof, and being depicted in the same respective line as said AvinDRAFT_{—}6075, or a functional equivalent or a homolog thereof as shown in column 8 of Table I, application no. 11, preferably the coding region thereof, particularly a homolog or functional equivalent as shown in column 8 of Table I B, application no. 11, and being depicted in the same respective line as said AvinDRAFT_{—}6075, and preferably the activity is increased non-targeted, or
[57497] (b) a polypeptide comprising a polypeptide, a consensus sequence or at least a polypeptide motif as shown in the respective line in column 5 of Table II or in column 8 of Table IV, application no. 11, respectively, and being depicted in the same respective line as said AvinDRAFT_{—}6075, or a functional equivalent or a homolog thereof as depicted in column 8 of Table II, application no. 11, preferably a homolog or functional equivalent as depicted in column 8 of Table II B, application no. 11, and being depicted in the same respective line as said AvinDRAFT_{—}6075, and preferably the activity is increased non-targeted.

[57498] Accordingly, in one embodiment, the molecule which activity is to be increased in the process of the invention is the gene product with an activity as a “peptidyl-prolyl cis-trans isomerase”, preferably it is the molecule of section (a) or (b) of this paragraph.

[57499] In particular, it was observed that in plants, especially in Arabidopsis thaliana, increasing or generating the activity of a gene product non-targeted with the activity of a “peptidyl-prolyl cis-trans isomerase”, preferably being encoded by a gene comprising the nucleic acid sequence SEQ ID NO. 6674, preferably the coding region thereof, conferred the production of or the increase in palmitic acid compared with the wild type control.

[57500] The nucleic acid sequence of AvinDRAFT_{—}6700 from Azotobacter vinelandii, e.g. as shown in the respective line in column 5 of Table I, application no. 11, has been published in D. And the activity of the gene product thereof is the activity of purine nucleoside phosphorylase.

[57501] Accordingly, in one embodiment, the process of the present invention for producing palmitic acid in a non-human organism, like a microorganism or a plant or a part thereof, comprises increasing or generating the activity of a gene product with the activity of a gene product conferring the activity of “purine nucleoside phosphorylase”, especially from Azotobacter vinelandii or its functional equivalent or its homolog, e.g. the increase of
[57502] (a) a gene product of a gene comprising the nucleic acid molecule as shown in the respective line in column 5 of Table I, application no. 11, preferably the coding region thereof, or a homolog or a fragment thereof, and being depicted in the same respective line as said AvinDRAFT_{—}6700, or a functional equivalent or a homolog thereof as shown in column 8 of Table I, application no. 11, preferably the coding region thereof, particularly a homolog or functional equivalent as shown in column 8 of Table I B, application no. 11, and being depicted in the same respective line as said AvinDRAFT_{—}6700, and preferably the activity is increased non-targeted, or
[57503] (b) a polypeptide comprising a polypeptide, a consensus sequence or at least a polypeptide motif as shown in the respective line in column 5 of Table II or in column 8 of Table IV, application no. 11, respectively, and being depicted in the same respective line as said AvinDRAFT_{—}6700, or a functional equivalent or a homolog thereof as depicted in column 8 of Table II, application no. 11, preferably a homolog or functional equivalent as depicted in column 8 of Table II B, application no. 11, and being depicted in the same respective line as said AvinDRAFT_{—}6700, and preferably the activity is increased non-targeted.

[57504] Accordingly, in one embodiment, the molecule which activity is to be increased in the process of the invention is the gene product with an activity as a “purine nucleoside phosphorylase”, preferably it is the molecule of section (a) or (b) of this paragraph.

[57505] In particular, it was observed that in plants, especially in Arabidopsis thaliana, increasing or generating the activity of a gene product non-targeted with the activity of a “purine nucleoside phosphorylase”, preferably being encoded by a gene comprising the nucleic acid sequence SEQ ID NO. 34044, preferably the coding region thereof, conferred the production of or the increase in palmitic acid compared with the wild type control.

[57506] The nucleic acid sequence of B0050 from Escherichia coli, e.g. as shown in the respective line in column 5 of Table I, application no. 11, has been published in B. And the activity of the gene product thereof is the activity of b0050-protein.

[57507] Accordingly, in one embodiment, the process of the present invention for producing palmitic acid in a non-human organism, like a microorganism or a plant or a part thereof, comprises increasing or generating the activity of a gene product with the activity of a gene product conferring the activity of “b0050-protein”, especially from Escherichia coli or its functional equivalent or its homolog, e.g. the increase of
[57508] (a) a gene product of a gene comprising the nucleic acid molecule as shown in the respective line in column 5 of Table I, application no. 11, preferably the coding region thereof, or a homolog or a fragment thereof, and being depicted in the same respective line as said B0050, or a functional equivalent or a homolog thereof as shown in column 8 of Table I, application no. 11, preferably the coding region thereof, particularly a homolog or functional equivalent as shown in column 8 of Table I B, application no. 11, and being depicted in the same respective line as said B0050, and preferably the activity is increased non-targeted, or
[57509] (b) a polypeptide comprising a polypeptide, a consensus sequence or at least a polypeptide motif as shown in the respective line in column 5 of Table II or in column 8 of Table IV, application no. 11, respectively, and being depicted in the same respective line as said B0050, or a functional equivalent or a homolog thereof as depicted in column 8 of Table II, application no. 11, preferably a homolog or functional equivalent as depicted in column 8 of Table II B, application no. 11, and being depicted in the same respective line as said B0050, and preferably the activity is increased non-targeted.

[57510] Accordingly, in one embodiment, the molecule which activity is to be increased in the process of the invention is the gene product with an activity as a “b0050-protein”, preferably it is the molecule of section (a) or (b) of this paragraph.

[57511] In particular, it was observed that in plants, especially in Arabidopsis thaliana, increasing or generating the activity of a gene product non-targeted with the activity of a “b0050-protein”, preferably being encoded by a gene comprising the nucleic acid sequence SEQ ID NO. 103958, preferably the coding region thereof, conferred the production of or the increase in palmitic acid compared with the wild type control.

[57512] The nucleic acid sequence of B1186 from Escherichia coli, e.g. as shown in the respective line in column 5 of Table I, application no. 11, has been published in B. And the activity of the gene product thereof is the activity of sodium/proton antiporter.

[57513] Accordingly, in one embodiment, the process of the present invention for producing palmitic acid in a non-human organism, like a microorganism or a plant or a part thereof, comprises increasing or generating the activity of a gene product with the activity of a gene product conferring the activity of “sodium/proton antiporter”, especially from Escherichia coli or its functional equivalent or its homolog, e.g. the increase of
[57514] (a) a gene product of a gene comprising the nucleic acid molecule as shown in the respective line in column 5 of Table I, application no. 11, preferably the coding region thereof, or a homolog or a fragment thereof, and being depicted in the same respective line as said B1186, or a functional equivalent or a homolog thereof as shown in column 8 of Table I, application no. 11, preferably the coding region thereof, particularly a homolog or functional equivalent as shown in column 8 of Table I B, application no. 11, and being depicted in the same respective line as said B1186, and preferably the activity is increased non-targeted, or
[57515] (b) a polypeptide comprising a polypeptide, a consensus sequence or at least a polypeptide motif as shown in the respective line in column 5 of Table II or in column 8 of Table IV, application no. 11, respectively, and being depicted in the same respective line as said B1186, or a functional equivalent or a homolog thereof as depicted in column 8 of Table II, application no. 11, preferably a homolog or functional equivalent as depicted in column 8 of Table II B, application no. 11, and being depicted in the same respective line as said B1186, and preferably the activity is increased non-targeted.

[57516] Accordingly, in one embodiment, the molecule which activity is to be increased in the process of the invention is the gene product with an activity as a “sodium/proton antiporter”, preferably it is the molecule of section (a) or (b) of this paragraph.

[57517] In particular, it was observed that in plants, especially in Arabidopsis thaliana, increasing or generating the activity of a gene product non-targeted with the activity of a “sodium/proton antiporter”, preferably being encoded by a gene comprising the nucleic acid sequence SEQ ID NO. 37400, preferably the coding region thereof, conferred the production of or the increase in palmitic acid compared with the wild type control.

[57518] The nucleic acid sequence of B1234 from Escherichia coli, e.g. as shown in the respective line in column 5 of Table I, application no. 11, has been published in B. And the activity of the gene product thereof is the activity of b1234-protein.

[57519] Accordingly, in one embodiment, the process of the present invention for producing palmitic acid in a non-human organism, like a microorganism or a plant or a part thereof, comprises increasing or generating the activity of a gene product with the activity of a gene product conferring the activity of “b1234-protein”, especially from Escherichia coli or its functional equivalent or its homolog, e.g. the increase of
[57520] (a) a gene product of a gene comprising the nucleic acid molecule as shown in the respective line in column 5 of Table I, application no. 11, preferably the coding region thereof, or a homolog or a fragment thereof, and being depicted in the same respective line as said B1234, or a functional equivalent or a homolog thereof as shown in column 8 of Table I, application no. 11, preferably the coding region thereof, particularly a homolog or functional equivalent as shown in column 8 of Table I B, application no. 11, and being depicted in the same respective line as said B1234, and preferably the activity is increased non-targeted, or
[57521] (b) a polypeptide comprising a polypeptide, a consensus sequence or at least a polypeptide motif as shown in the respective line in column 5 of Table II or in column 8 of Table IV, application no. 11, respectively, and being depicted in the same respective line as said B1234, or a functional equivalent or a homolog thereof as depicted in column 8 of Table II, application no. 11, preferably a homolog or functional equivalent as depicted in column 8 of Table II B, application no. 11, and being depicted in the same respective line as said B1234, and preferably the activity is increased non-targeted.

[57522] Accordingly, in one embodiment, the molecule which activity is to be increased in the process of the invention is the gene product with an activity as a “b1234-protein”, preferably it is the molecule of section (a) or (b) of this paragraph.

[57523] In particular, it was observed that in plants, especially in Arabidopsis thaliana, increasing or generating the activity of a gene product non-targeted with the activity of a “b1234-protein”, preferably being encoded by a gene comprising the nucleic acid sequence SEQ ID NO. 112111, preferably the coding region thereof, conferred the production of or the increase in palmitic acid compared with the wild type control.

[57524] The nucleic acid sequence of B1248 from Escherichia coli, e.g. as shown in the respective line in column 5 of Table I, application no. 11, has been published in B. And the activity of the gene product thereof is the activity of b1248-protein.

[57525] Accordingly, in one embodiment, the process of the present invention for producing palmitic acid in a non-human organism, like a microorganism or a plant or a part thereof, comprises increasing or generating the activity of a gene product with the activity of a gene product conferring the activity of “b1248-protein”, especially from Escherichia coli or its functional equivalent or its homolog, e.g. the increase of
[57526] (a) a gene product of a gene comprising the nucleic acid molecule as shown in the respective line in column 5 of Table I, application no. 11, preferably the coding region thereof, or a homolog or a fragment thereof, and being depicted in the same respective line as said B1248, or a functional equivalent or a homolog thereof as shown in column 8 of Table I, application no. 11, preferably the coding region thereof, particularly a homolog or functional equivalent as shown in column 8 of Table I B, application no. 11, and being depicted in the same respective line as said B1248, and preferably the activity is increased non-targeted, or
[57527] (b) a polypeptide comprising a polypeptide, a consensus sequence or at least a polypeptide motif as shown in the respective line in column 5 of Table II or in column 8 of Table IV, application no. 11, respectively, and being depicted in the same respective line as said B1248, or a functional equivalent or a homolog thereof as depicted in column 8 of Table II, application no. 11, preferably a homolog or functional equivalent as depicted in column 8 of Table II B, application no. 11, and being depicted in the same respective line as said B1248, and preferably the activity is increased non-targeted.

[57528] Accordingly, in one embodiment, the molecule which activity is to be increased in the process of the invention is the gene product with an activity as a “b1248-protein”, preferably it is the molecule of section (a) or (b) of this paragraph.

[57529] In particular, it was observed that in plants, especially in Arabidopsis thaliana, increasing or generating the activity of a gene product non-targeted with the activity of a “b1248-protein”, preferably being encoded by a gene comprising the nucleic acid sequence SEQ ID NO. 119135, preferably the coding region thereof, conferred the production of or the increase in palmitic acid compared with the wild type control.

[57530] The nucleic acid sequence of B1330 from Escherichia coli, e.g. as shown in the respective line in column 5 of Table I, application no. 11, has been published in B. And the activity of the gene product thereof is the activity of b1330-protein.

[57531] Accordingly, in one embodiment, the process of the present invention for producing palmitic acid in a non-human organism, like a microorganism or a plant or a part thereof, comprises increasing or generating the activity of a gene product with the activity of a gene product conferring the activity of “b1330-protein”, especially from Escherichia coli or its functional equivalent or its homolog, e.g. the increase of
[57532] (a) a gene product of a gene comprising the nucleic acid molecule as shown in the respective line in column 5 of Table I, application no. 11, preferably the coding region thereof, or a homolog or a fragment thereof, and being depicted in the same respective line as said B1330, or a functional equivalent or a homolog thereof as shown in column 8 of Table I, application no. 11, preferably the coding region thereof, particularly a homolog or functional equivalent as shown in column 8 of Table I B, application no. 11, and being depicted in the same respective line as said B1330, and preferably the activity is increased non-targeted, or
[57533] (b) a polypeptide comprising a polypeptide, a consensus sequence or at least a polypeptide motif as shown in the respective line in column 5 of Table II or in column 8 of Table IV, application no. 11, respectively, and being depicted in the same respective line as said B1330, or a functional equivalent or a homolog thereof as depicted in column 8 of Table II, application no. 11, preferably a homolog or functional equivalent as depicted in column 8 of Table II B, application no. 11, and being depicted in the same respective line as said B1330, and preferably the activity is increased non-targeted.

[57534] Accordingly, in one embodiment, the molecule which activity is to be increased in the process of the invention is the gene product with an activity as a “b1330-protein”, preferably it is the molecule of section (a) or (b) of this paragraph.

[57535] In particular, it was observed that in plants, especially in Arabidopsis thaliana, increasing or generating the activity of a gene product non-targeted with the activity of a “b1330-protein”, preferably being encoded by a gene comprising the nucleic acid sequence SEQ ID NO. 38226, preferably the coding region thereof, conferred the production of or the increase in palmitic acid compared with the wild type control.

[57536] The nucleic acid sequence of B1431 from Escherichia coli, e.g. as shown in the respective line in column 5 of Table I, application no. 11, has been published in B. And the activity of the gene product thereof is the activity of lipoprotein precursor.

[57537] Accordingly, in one embodiment, the process of the present invention for producing palmitic acid in a non-human organism, like a microorganism or a plant or a part thereof, comprises increasing or generating the activity of a gene product with the activity of a gene product conferring the activity of “lipoprotein precursor”, especially from Escherichia coli or its functional equivalent or its homolog, e.g. the increase of
[57538] (a) a gene product of a gene comprising the nucleic acid molecule as shown in the respective line in column 5 of Table I, application no. 11, preferably the coding region thereof, or a homolog or a fragment thereof, and being depicted in the same respective line as said B1431, or a functional equivalent or a homolog thereof as shown in column 8 of Table I, application no. 11, preferably the coding region thereof, particularly a homolog or functional equivalent as shown in column 8 of Table I B, application no. 11, and being depicted in the same respective line as said B1431, and preferably the activity is increased plastidic, or
[57539] (b) a polypeptide comprising a polypeptide, a consensus sequence or at least a polypeptide motif as shown in the respective line in column 5 of Table II or in column 8 of Table IV, application no. 11, respectively, and being depicted in the same respective line as said B1431, or a functional equivalent or a homolog thereof as depicted in column 8 of Table II, application no. 11, preferably a homolog or functional equivalent as depicted in column 8 of Table II B, application no. 11, and being depicted in the same respective line as said B1431, and preferably the activity is increased plastidic.

[57540] Accordingly, in one embodiment, the molecule which activity is to be increased in the process of the invention is the gene product with an activity as a “lipoprotein precursor”, preferably it is the molecule of section (a) or (b) of this paragraph.

[57541] In particular, it was observed that in plants, especially in Arabidopsis thaliana, increasing or generating the activity of a gene product plastidic with the activity of a “lipoprotein precursor”, preferably being encoded by a gene comprising the nucleic acid sequence SEQ ID NO. 38266, preferably the coding region thereof, conferred the production of or the increase in palmitic acid compared with the wild type control.

[57542] The nucleic acid sequence of B1589 from Escherichia coli, e.g. as shown in the respective line in column 5 of Table I, application no. 11, has been published in B. And the activity of the gene product thereof is the activity of Fe—S subunit of oxidoreductase.

[57543] Accordingly, in one embodiment, the process of the present invention for producing palmitic acid in a non-human organism, like a microorganism or a plant or a part thereof, comprises increasing or generating the activity of a gene product with the activity of a gene product conferring the activity of “Fe—S subunit of oxidoreductase”, especially from Escherichia coli or its functional equivalent or its homolog, e.g. the increase of
[57544] (a) a gene product of a gene comprising the nucleic acid molecule as shown in the respective line in column 5 of Table I, application no. 11, preferably the coding region thereof, or a homolog or a fragment thereof, and being depicted in the same respective line as said B1589, or a functional equivalent or a homolog thereof as shown in column 8 of Table I, application no. 11, preferably the coding region thereof, particularly a homolog or functional equivalent as shown in column 8 of Table I B, application no. 11, and being depicted in the same respective line as said B1589, and preferably the activity is increased non-targeted, or
[57545] (b) a polypeptide comprising a polypeptide, a consensus sequence or at least a polypeptide motif as shown in the respective line in column 5 of Table II or in column 8 of Table IV, application no. 11, respectively, and being depicted in the same respective line as said B1589, or a functional equivalent or a homolog thereof as depicted in column 8 of Table II, application no. 11, preferably a homolog or functional equivalent as depicted in column 8 of Table II B, application no. 11, and being depicted in the same respective line as said B1589, and preferably the activity is increased non-targeted.

[57546] Accordingly, in one embodiment, the molecule which activity is to be increased in the process of the invention is the gene product with an activity as a “Fe—S subunit of oxidoreductase”, preferably it is the molecule of section (a) or (b) of this paragraph.

[57547] In particular, it was observed that in plants, especially in Arabidopsis thaliana, increasing or generating the activity of a gene product non-targeted with the activity of a “Fe—S subunit of oxidoreductase”, preferably being encoded by a gene comprising the nucleic acid sequence SEQ ID NO. 78154, preferably the coding region thereof, conferred the production of or the increase in palmitic acid compared with the wild type control.

[57548] The nucleic acid sequence of B1597 from Escherichia coli, e.g. as shown in the respective line in column 5 of Table I, application no. 11, has been published in B. And the activity of the gene product thereof is the activity of acid shock protein.

[57549] Accordingly, in one embodiment, the process of the present invention for producing palmitic acid in a non-human organism, like a microorganism or a plant or a part thereof, comprises increasing or generating the activity of a gene product with the activity of a gene product conferring the activity of “acid shock protein”, especially from Escherichia coli or its functional equivalent or its homolog, e.g. the increase of
[57550] (a) a gene product of a gene comprising the nucleic acid molecule as shown in the respective line in column 5 of Table I, application no. 11, preferably the coding region thereof, or a homolog or a fragment thereof, and being depicted in the same respective line as said B1597, or a functional equivalent or a homolog thereof as shown in column 8 of Table I, application no. 11, preferably the coding region thereof, particularly a homolog or functional equivalent as shown in column 8 of Table I B, application no. 11, and being depicted in the same respective line as said B1597, and preferably the activity is increased non-targeted, or
[57551] (b) a polypeptide comprising a polypeptide, a consensus sequence or at least a polypeptide motif as shown in the respective line in column 5 of Table II or in column 8 of Table IV, application no. 11, respectively, and being depicted in the same respective line as said B1597, or a functional equivalent or a homolog thereof as depicted in column 8 of Table II, application no. 11, preferably a homolog or functional equivalent as depicted in column 8 of Table II B, application no. 11, and being depicted in the same respective line as said B1597, and preferably the activity is increased non-targeted.

[57552] Accordingly, in one embodiment, the molecule which activity is to be increased in the process of the invention is the gene product with an activity as a “acid shock protein”, preferably it is the molecule of section (a) or (b) of this paragraph.

[57553] In particular, it was observed that in plants, especially in Arabidopsis thaliana, increasing or generating the activity of a gene product non-targeted with the activity of a “acid shock protein”, preferably being encoded by a gene comprising the nucleic acid sequence SEQ ID NO. 38300, preferably the coding region thereof, conferred the production of or the increase in palmitic acid compared with the wild type control.

[57554] The nucleic acid sequence of B1670 from Escherichia coli, e.g. as shown in the respective line in column 5 of Table I, application no. 11, has been published in B. And the activity of the gene product thereof is the activity of b1670-protein.

[57555] Accordingly, in one embodiment, the process of the present invention for producing palmitic acid in a non-human organism, like a microorganism or a plant or a part thereof, comprises increasing or generating the activity of a gene product with the activity of a gene product conferring the activity of “b1670-protein”, especially from Escherichia coli or its functional equivalent or its homolog, e.g. the increase of
[57556] (a) a gene product of a gene comprising the nucleic acid molecule as shown in the respective line in column 5 of Table I, application no. 11, preferably the coding region thereof, or a homolog or a fragment thereof, and being depicted in the same respective line as said B1670, or a functional equivalent or a homolog thereof as shown in column 8 of Table I, application no. 11, preferably the coding region thereof, particularly a homolog or functional equivalent as shown in column 8 of Table I B, application no. 11, and being depicted in the same respective line as said B1670, and preferably the activity is increased non-targeted, or
[57557] (b) a polypeptide comprising a polypeptide, a consensus sequence or at least a polypeptide motif as shown in the respective line in column 5 of Table II or in column 8 of Table IV, application no. 11, respectively, and being depicted in the same respective line as said B1670, or a functional equivalent or a homolog thereof as depicted in column 8 of Table II, application no. 11, preferably a homolog or functional equivalent as depicted in column 8 of Table II B, application no. 11, and being depicted in the same respective line as said B1670, and preferably the activity is increased non-targeted.

[57558] Accordingly, in one embodiment, the molecule which activity is to be increased in the process of the invention is the gene product with an activity as a “b1670-protein”, preferably it is the molecule of section (a) or (b) of this paragraph.

[57559] In particular, it was observed that in plants, especially in Arabidopsis thaliana, increasing or generating the activity of a gene product non-targeted with the activity of a “b1670-protein”, preferably being encoded by a gene comprising the nucleic acid sequence SEQ ID NO. 78753, preferably the coding region thereof, conferred the production of or the increase in palmitic acid compared with the wild type control.

[57560] The nucleic acid sequence of B1837 from Escherichia coli, e.g. as shown in the respective line in column 5 of Table I, application no. 11, has been published in B. And the activity of the gene product thereof is the activity of b1837-protein.

[57561] Accordingly, in one embodiment, the process of the present invention for producing palmitic acid in a non-human organism, like a microorganism or a plant or a part thereof, comprises increasing or generating the activity of a gene product with the activity of a gene product conferring the activity of “b1837-protein”, especially from Escherichia coli or its functional equivalent or its homolog, e.g. the increase of
[57562] (a) a gene product of a gene comprising the nucleic acid molecule as shown in the respective line in column 5 of Table I, application no. 11, preferably the coding region thereof, or a homolog or a fragment thereof, and being depicted in the same respective line as said B1837, or a functional equivalent or a homolog thereof as shown in column 8 of Table I, application no. 11, preferably the coding region thereof, particularly a homolog or functional equivalent as shown in column 8 of Table I B, application no. 11, and being depicted in the same respective line as said B1837, and preferably the activity is increased non-targeted, or
[57563] (b) a polypeptide comprising a polypeptide, a consensus sequence or at least a polypeptide motif as shown in the respective line in column 5 of Table II or in column 8 of Table IV, application no. 11, respectively, and being depicted in the same respective line as said B1837, or a functional equivalent or a homolog thereof as depicted in column 8 of Table II, application no. 11, preferably a homolog or functional equivalent as depicted in column 8 of Table II B, application no. 11, and being depicted in the same respective line as said B1837, and preferably the activity is increased non-targeted.

[57564] Accordingly, in one embodiment, the molecule which activity is to be increased in the process of the invention is the gene product with an activity as a “b1837-protein”, preferably it is the molecule of section (a) or (b) of this paragraph.

[57565] In particular, it was observed that in plants, especially in Arabidopsis thaliana, increasing or generating the activity of a gene product non-targeted with the activity of a “b1837-protein”, preferably being encoded by a gene comprising the nucleic acid sequence SEQ ID NO. 78953, preferably the coding region thereof, conferred the production of or the increase in palmitic acid compared with the wild type control.

[57566] The nucleic acid sequence of B2032 from Escherichia coli, e.g. as shown in the respective line in column 5 of Table I, application no. 11, has been published in B. And the activity of the gene product thereof is the activity of b2032-protein.

[57567] Accordingly, in one embodiment, the process of the present invention for producing palmitic acid in a non-human organism, like a microorganism or a plant or a part thereof, comprises increasing or generating the activity of a gene product with the activity of a gene product conferring the activity of “b2032-protein”, especially from Escherichia coli or its functional equivalent or its homolog, e.g. the increase of
[57568] (a) a gene product of a gene comprising the nucleic acid molecule as shown in the respective line in column 5 of Table I, application no. 11, preferably the coding region thereof, or a homolog or a fragment thereof, and being depicted in the same respective line as said B2032, or a functional equivalent or a homolog thereof as shown in column 8 of Table I, application no. 11, preferably the coding region thereof, particularly a homolog or functional equivalent as shown in column 8 of Table I B, application no. 11, and being depicted in the same respective line as said B2032, and preferably the activity is increased non-targeted, or
[57569] (b) a polypeptide comprising a polypeptide, a consensus sequence or at least a polypeptide motif as shown in the respective line in column 5 of Table II or in column 8 of Table IV, application no. 11, respectively, and being depicted in the same respective line as said B2032, or a functional equivalent or a homolog thereof as depicted in column 8 of Table II, application no. 11, preferably a homolog or functional equivalent as depicted in column 8 of Table II B, application no. 11, and being depicted in the same respective line as said B2032, and preferably the activity is increased non-targeted.

[57570] Accordingly, in one embodiment, the molecule which activity is to be increased in the process of the invention is the gene product with an activity as a “b2032-protein”, preferably it is the molecule of section (a) or (b) of this paragraph.

[57571] In particular, it was observed that in plants, especially in Arabidopsis thaliana, increasing or generating the activity of a gene product non-targeted with the activity of a “b2032-protein”, preferably being encoded by a gene comprising the nucleic acid sequence SEQ ID NO. 8920, preferably the coding region thereof, conferred the production of or the increase in palmitic acid compared with the wild type control.

[57572] The nucleic acid sequence of B2043 from Escherichia coli, e.g. as shown in the respective line in column 5 of Table I, application no. 11, has been published in B. And the activity of the gene product thereof is the activity of colanic acid biosynthesis protein.

[57573] Accordingly, in one embodiment, the process of the present invention for producing palmitic acid in a non-human organism, like a microorganism or a plant or a part thereof, comprises increasing or generating the activity of a gene product with the activity of a gene product conferring the activity of “colanic acid biosynthesis protein”, especially from Escherichia coli or its functional equivalent or its homolog, e.g. the increase of
[57574] (a) a gene product of a gene comprising the nucleic acid molecule as shown in the respective line in column 5 of Table I, application no. 11, preferably the coding region thereof, or a homolog or a fragment thereof, and being depicted in the same respective line as said B2043, or a functional equivalent or a homolog thereof as shown in column 8 of Table I, application no. 11, preferably the coding region thereof, particularly a homolog or functional equivalent as shown in column 8 of Table I B, application no. 11, and being depicted in the same respective line as said B2043, and preferably the activity is increased non-targeted, or
[57575] (b) a polypeptide comprising a polypeptide, a consensus sequence or at least a polypeptide motif as shown in the respective line in column 5 of Table II or in column 8 of Table IV, application no. 11, respectively, and being depicted in the same respective line as said B2043, or a functional equivalent or a homolog thereof as depicted in column 8 of Table II, application no. 11, preferably a homolog or functional equivalent as depicted in column 8 of Table II B, application no. 11, and being depicted in the same respective line as said B2043, and preferably the activity is increased non-targeted.

[57576] Accordingly, in one embodiment, the molecule which activity is to be increased in the process of the invention is the gene product with an activity as a “colanic acid biosynthesis protein”, preferably it is the molecule of section (a) or (b) of this paragraph.

[57577] In particular, it was observed that in plants, especially in Arabidopsis thaliana, increasing or generating the activity of a gene product non-targeted with the activity of a “colanic acid biosynthesis protein”, preferably being encoded by a gene comprising the nucleic acid sequence SEQ ID NO. 112193, preferably the coding region thereof, conferred the production of or the increase in palmitic acid compared with the wild type control.

[57578] The nucleic acid sequence of B2099 from Escherichia coli, e.g. as shown in the respective line in column 5 of Table I, application no. 11, has been published in B. And the activity of the gene product thereof is the activity of b2099-protein.

[57579] Accordingly, in one embodiment, the process of the present invention for producing palmitic acid in a non-human organism, like a microorganism or a plant or a part thereof, comprises increasing or generating the activity of a gene product with the activity of a gene product conferring the activity of “b2099-protein”, especially from Escherichia coli or its functional equivalent or its homolog, e.g. the increase of
[57580] (a) a gene product of a gene comprising the nucleic acid molecule as shown in the respective line in column 5 of Table I, application no. 11, preferably the coding region thereof, or a homolog or a fragment thereof, and being depicted in the same respective line as said B2099, or a functional equivalent or a homolog thereof as shown in column 8 of Table I, application no. 11, preferably the coding region thereof, particularly a homolog or functional equivalent as shown in column 8 of Table I B, application no. 11, and being depicted in the same respective line as said B2099, and preferably the activity is increased non-targeted, or
[57581] (b) a polypeptide comprising a polypeptide, a consensus sequence or at least a polypeptide motif as shown in the respective line in column 5 of Table II or in column 8 of Table IV, application no. 11, respectively, and being depicted in the same respective line as said B2099, or a functional equivalent or a homolog thereof as depicted in column 8 of Table II, application no. 11, preferably a homolog or functional equivalent as depicted in column 8 of Table II B, application no. 11, and being depicted in the same respective line as said B2099, and preferably the activity is increased non-targeted.

[57582] Accordingly, in one embodiment, the molecule which activity is to be increased in the process of the invention is the gene product with an activity as a “b2099-protein”, preferably it is the molecule of section (a) or (b) of this paragraph.

[57583] In particular, it was observed that in plants, especially in Arabidopsis thaliana, increasing or generating the activity of a gene product non-targeted with the activity of a “b2099-protein”, preferably being encoded by a gene comprising the nucleic acid sequence SEQ ID NO. 115595, preferably the coding region thereof, conferred the production of or the increase in palmitic acid compared with the wild type control.

[57584] The nucleic acid sequence of B2107 from Escherichia coli, e.g. as shown in the respective line in column 5 of Table I, application no. 11, has been published in B. And the activity of the gene product thereof is the activity of b2107-protein.

[57585] Accordingly, in one embodiment, the process of the present invention for producing palmitic acid in a non-human organism, like a microorganism or a plant or a part thereof, comprises increasing or generating the activity of a gene product with the activity of a gene product conferring the activity of “b2107-protein”, especially from Escherichia coli or its functional equivalent or its homolog, e.g. the increase of
[57586] (a) a gene product of a gene comprising the nucleic acid molecule as shown in the respective line in column 5 of Table I, application no. 11, preferably the coding region thereof, or a homolog or a fragment thereof, and being depicted in the same respective line as said B2107, or a functional equivalent or a homolog thereof as shown in column 8 of Table I, application no. 11, preferably the coding region thereof, particularly a homolog or functional equivalent as shown in column 8 of Table I B, application no. 11, and being depicted in the same respective line as said B2107, and preferably the activity is increased non-targeted, or
[57587] (b) a polypeptide comprising a polypeptide, a consensus sequence or at least a polypeptide motif as shown in the respective line in column 5 of Table II or in column 8 of Table IV, application no. 11, respectively, and being depicted in the same respective line as said B2107, or a functional equivalent or a homolog thereof as depicted in column 8 of Table II, application no. 11, preferably a homolog or functional equivalent as depicted in column 8 of Table II B, application no. 11, and being depicted in the same respective line as said B2107, and preferably the activity is increased non-targeted.

[57588] Accordingly, in one embodiment, the molecule which activity is to be increased in the process of the invention is the gene product with an activity as a “b2107-protein”, preferably it is the molecule of section (a) or (b) of this paragraph.

[57589] In particular, it was observed that in plants, especially in Arabidopsis thaliana, increasing or generating the activity of a gene product non-targeted with the activity of a “b2107-protein”, preferably being encoded by a gene comprising the nucleic acid sequence SEQ ID NO. 39002, preferably the coding region thereof, conferred the production of or the increase in palmitic acid compared with the wild type control.

[57590] The nucleic acid sequence of B2399 from Escherichia coli, e.g. as shown in the respective line in column 5 of Table I, application no. 11, has been published in B. And the activity of the gene product thereof is the activity of b2399-protein.

[57591] Accordingly, in one embodiment, the process of the present invention for producing palmitic acid in a non-human organism, like a microorganism or a plant or a part thereof, comprises increasing or generating the activity of a gene product with the activity of a gene product conferring the activity of “b2399-protein”, especially from Escherichia coli or its functional equivalent or its homolog, e.g. the increase of
[57592] (a) a gene product of a gene comprising the nucleic acid molecule as shown in the respective line in column 5 of Table I, application no. 11, preferably the coding region thereof, or a homolog or a fragment thereof, and being depicted in the same respective line as said B2399, or a functional equivalent or a homolog thereof as shown in column 8 of Table I, application no. 11, preferably the coding region thereof, particularly a homolog or functional equivalent as shown in column 8 of Table I B, application no. 11, and being depicted in the same respective line as said B2399, and preferably the activity is increased non-targeted, or
[57593] (b) a polypeptide comprising a polypeptide, a consensus sequence or at least a polypeptide motif as shown in the respective line in column 5 of Table II or in column 8 of Table IV, application no. 11, respectively, and being depicted in the same respective line as said B2399, or a functional equivalent or a homolog thereof as depicted in column 8 of Table II, application no. 11, preferably a homolog or functional equivalent as depicted in column 8 of Table II B, application no. 11, and being depicted in the same respective line as said B2399, and preferably the activity is increased non-targeted.

[57594] Accordingly, in one embodiment, the molecule which activity is to be increased in the process of the invention is the gene product with an activity as a “b2399-protein”, preferably it is the molecule of section (a) or (b) of this paragraph.

[57595] In particular, it was observed that in plants, especially in Arabidopsis thaliana, increasing or generating the activity of a gene product non-targeted with the activity of a “b2399-protein”, preferably being encoded by a gene comprising the nucleic acid sequence SEQ ID NO. 39237, preferably the coding region thereof, conferred the production of or the increase in palmitic acid compared with the wild type control.

[57596] The nucleic acid sequence of B2439 from Escherichia coli, e.g. as shown in the respective line in column 5 of Table I, application no. 11, has been published in B. And the activity of the gene product thereof is the activity of ethanolamine utilization protein.

[57597] Accordingly, in one embodiment, the process of the present invention for producing palmitic acid in a non-human organism, like a microorganism or a plant or a part thereof, comprises increasing or generating the activity of a gene product with the activity of a gene product conferring the activity of “ethanolamine utilization protein”, especially from Escherichia coli or its functional equivalent or its homolog, e.g. the increase of
[57598] (a) a gene product of a gene comprising the nucleic acid molecule as shown in the respective line in column 5 of Table I, application no. 11, preferably the coding region thereof, or a homolog or a fragment thereof, and being depicted in the same respective line as said B2439, or a functional equivalent or a homolog thereof as shown in column 8 of Table I, application no. 11, preferably the coding region thereof, particularly a homolog or functional equivalent as shown in column 8 of Table I B, application no. 11, and being depicted in the same respective line as said B2439, and preferably the activity is increased non-targeted, or
[57599] (b) a polypeptide comprising a polypeptide, a consensus sequence or at least a polypeptide motif as shown in the respective line in column 5 of Table II or in column 8 of Table IV, application no. 11, respectively, and being depicted in the same respective line as said B2439, or a functional equivalent or a homolog thereof as depicted in column 8 of Table II, application no. 11, preferably a homolog or functional equivalent as depicted in column 8 of Table II B, application no. 11, and being depicted in the same respective line as said B2439, and preferably the activity is increased non-targeted.

[57600] Accordingly, in one embodiment, the molecule which activity is to be increased in the process of the invention is the gene product with an activity as a “ethanolamine utilization protein”, preferably it is the molecule of section (a) or (b) of this paragraph.

[57601] In particular, it was observed that in plants, especially in Arabidopsis thaliana, increasing or generating the activity of a gene product non-targeted with the activity of a “ethanolamine utilization protein”, preferably being encoded by a gene comprising the nucleic acid sequence SEQ ID NO. 115628, preferably the coding region thereof, conferred the production of or the increase in palmitic acid compared with the wild type control.

[57602] The nucleic acid sequence of B2682 from Escherichia coli, e.g. as shown in the respective line in column 5 of Table I, application no. 11, has been published in B. And the activity of the gene product thereof is the activity of b2682-protein.

[57603] Accordingly, in one embodiment, the process of the present invention for producing palmitic acid in a non-human organism, like a microorganism or a plant or a part thereof, comprises increasing or generating the activity of a gene product with the activity of a gene product conferring the activity of “b2682-protein”, especially from Escherichia coli or its functional equivalent or its homolog, e.g. the increase of
[57604] (a) a gene product of a gene comprising the nucleic acid molecule as shown in the respective line in column 5 of Table I, application no. 11, preferably the coding region thereof, or a homolog or a fragment thereof, and being depicted in the same respective line as said B2682, or a functional equivalent or a homolog thereof as shown in column 8 of Table I, application no. 11, preferably the coding region thereof, particularly a homolog or functional equivalent as shown in column 8 of Table I B, application no. 11, and being depicted in the same respective line as said B2682, and preferably the activity is increased non-targeted, or
[57605] (b) a polypeptide comprising a polypeptide, a consensus sequence or at least a polypeptide motif as shown in the respective line in column 5 of Table II or in column 8 of Table IV, application no. 11, respectively, and being depicted in the same respective line as said B2682, or a functional equivalent or a homolog thereof as depicted in column 8 of Table II, application no. 11, preferably a homolog or functional equivalent as depicted in column 8 of Table II B, application no. 11, and being depicted in the same respective line as said B2682, and preferably the activity is increased non-targeted.

[57606] Accordingly, in one embodiment, the molecule which activity is to be increased in the process of the invention is the gene product with an activity as a “b2682-protein”, preferably it is the molecule of section (a) or (b) of this paragraph.

[57607] In particular, it was observed that in plants, especially in Arabidopsis thaliana, increasing or generating the activity of a gene product non-targeted with the activity of a “b2682-protein”, preferably being encoded by a gene comprising the nucleic acid sequence SEQ ID NO. 115655, preferably the coding region thereof, conferred the production of or the increase in palmitic acid compared with the wild type control.

[57608] The nucleic acid sequence of B2747 from Escherichia coli, e.g. as shown in the respective line in column 5 of Table I, application no. 11, has been published in B. And the activity of the gene product thereof is the activity of 2-C-methyl-D-erythritol 4-phosphate cytidylyltransferase.

[57609] Accordingly, in one embodiment, the process of the present invention for producing palmitic acid in a non-human organism, like a microorganism or a plant or a part thereof, comprises increasing or generating the activity of a gene product with the activity of a gene product conferring the activity of “2-C-methyl-D-erythritol 4-phosphate cytidylyltransferase”, especially from Escherichia coli or its functional equivalent or its homolog, e.g. the increase of
[57610] (a) a gene product of a gene comprising the nucleic acid molecule as shown in the respective line in column 5 of Table I, application no. 11, preferably the coding region thereof, or a homolog or a fragment thereof, and being depicted in the same respective line as said B2747, or a functional equivalent or a homolog thereof as shown in column 8 of Table I, application no. 11, preferably the coding region thereof, particularly a homolog or functional equivalent as shown in column 8 of Table I B, application no. 11, and being depicted in the same respective line as said B2747, and preferably the activity is increased non-targeted, or
[57611] (b) a polypeptide comprising a polypeptide, a consensus sequence or at least a polypeptide motif as shown in the respective line in column 5 of Table II or in column 8 of Table IV, application no. 11, respectively, and being depicted in the same respective line as said B2747, or a functional equivalent or a homolog thereof as depicted in column 8 of Table II, application no. 11, preferably a homolog or functional equivalent as depicted in column 8 of Table II B, application no. 11, and being depicted in the same respective line as said B2747, and preferably the activity is increased non-targeted.

[57612] Accordingly, in one embodiment, the molecule which activity is to be increased in the process of the invention is the gene product with an activity as a “2-C-methyl-D-erythritol 4-phosphate cytidylyltransferase”, preferably it is the molecule of section (a) or (b) of this paragraph.

[57613] In particular, it was observed that in plants, especially in Arabidopsis thaliana, increasing or generating the activity of a gene product non-targeted with the activity of a “2-C-methyl-D-erythritol 4-phosphate cytidylyltransferase”, preferably being encoded by a gene comprising the nucleic acid sequence SEQ ID NO. 81075, preferably the coding region thereof, conferred the production of or the increase in palmitic acid compared with the wild type control.

[57614] The nucleic acid sequence of B2790 from Escherichia coli, e.g. as shown in the respective line in column 5 of Table I, application no. 11, has been published in B. And the activity of the gene product thereof is the activity of flavodoxin.

[57615] Accordingly, in one embodiment, the process of the present invention for producing palmitic acid in a non-human organism, like a microorganism or a plant or a part thereof, comprises increasing or generating the activity of a gene product with the activity of a gene product conferring the activity of “flavodoxin”, especially from Escherichia coli or its functional equivalent or its homolog, e.g. the increase of
[57616] (a) a gene product of a gene comprising the nucleic acid molecule as shown in the respective line in column 5 of Table I, application no. 11, preferably the coding region thereof, or a homolog or a fragment thereof, and being depicted in the same respective line as said B2790, or a functional equivalent or a homolog thereof as shown in column 8 of Table I, application no. 11, preferably the coding region thereof, particularly a homolog or functional equivalent as shown in column 8 of Table I B, application no. 11, and being depicted in the same respective line as said B2790, and preferably the activity is increased non-targeted, or
[57617] (b) a polypeptide comprising a polypeptide, a consensus sequence or at least a polypeptide motif as shown in the respective line in column 5 of Table II or in column 8 of Table IV, application no. 11, respectively, and being depicted in the same respective line as said B2790, or a functional equivalent or a homolog thereof as depicted in column 8 of Table II, application no. 11, preferably a homolog or functional equivalent as depicted in column 8 of Table II B, application no. 11, and being depicted in the same respective line as said B2790, and preferably the activity is increased non-targeted.

[57618] Accordingly, in one embodiment, the molecule which activity is to be increased in the process of the invention is the gene product with an activity as a “flavodoxin”, preferably it is the molecule of section (a) or (b) of this paragraph.

[57619] In particular, it was observed that in plants, especially in Arabidopsis thaliana, increasing or generating the activity of a gene product non-targeted with the activity of a “flavodoxin”, preferably being encoded by a gene comprising the nucleic acid sequence SEQ ID NO. 115719, preferably the coding region thereof, conferred the production of or the increase in palmitic acid compared with the wild type control.

[57620] The nucleic acid sequence of B2836 from Escherichia coli, e.g. as shown in the respective line in column 5 of Table I, application no. 11, has been published in B. And the activity of the gene product thereof is the activity of AAS bifunctional protein.

[57621] Accordingly, in one embodiment, the process of the present invention for producing palmitic acid in a non-human organism, like a microorganism or a plant or a part thereof, comprises increasing or generating the activity of a gene product with the activity of a gene product conferring the activity of “AAS bifunctional protein”, especially from Escherichia coli or its functional equivalent or its homolog, e.g. the increase of
[57622] (a) a gene product of a gene comprising the nucleic acid molecule as shown in the respective line in column 5 of Table I, application no. 11, preferably the coding region thereof, or a homolog or a fragment thereof, and being depicted in the same respective line as said B2836, or a functional equivalent or a homolog thereof as shown in column 8 of Table I, application no. 11, preferably the coding region thereof, particularly a homolog or functional equivalent as shown in column 8 of Table I B, application no. 11, and being depicted in the same respective line as said B2836, and preferably the activity is increased plastidic, or
[57623] (b) a polypeptide comprising a polypeptide, a consensus sequence or at least a polypeptide motif as shown in the respective line in column 5 of Table II or in column 8 of Table IV, application no. 11, respectively, and being depicted in the same respective line as said B2836, or a functional equivalent or a homolog thereof as depicted in column 8 of Table II, application no. 11, preferably a homolog or functional equivalent as depicted in column 8 of Table II B, application no. 11, and being depicted in the same respective line as said B2836, and preferably the activity is increased plastidic.

[57624] Accordingly, in one embodiment, the molecule which activity is to be increased in the process of the invention is the gene product with an activity as a “AAS bifunctional protein”, preferably it is the molecule of section (a) or (b) of this paragraph.

[57625] In particular, it was observed that in plants, especially in Arabidopsis thaliana, increasing or generating the activity of a gene product plastidic with the activity of a “AAS bifunctional protein”, preferably being encoded by a gene comprising the nucleic acid sequence SEQ ID NO. 115791, preferably the coding region thereof, conferred the production of or the increase in palmitic acid compared with the wild type control.

[57626] The nucleic acid sequence of B2849 from Escherichia coli, e.g. as shown in the respective line in column 5 of Table I, application no. 11, has been published in B. And the activity of the gene product thereof is the activity of b2849-protein.

[57627] Accordingly, in one embodiment, the process of the present invention for producing palmitic acid in a non-human organism, like a microorganism or a plant or a part thereof, comprises increasing or generating the activity of a gene product with the activity of a gene product conferring the activity of “b2849-protein”, especially from Escherichia coli or its functional equivalent or its homolog, e.g. the increase of
[57628] (a) a gene product of a gene comprising the nucleic acid molecule as shown in the respective line in column 5 of Table I, application no. 11, preferably the coding region thereof, or a homolog or a fragment thereof, and being depicted in the same respective line as said B2849, or a functional equivalent or a homolog thereof as shown in column 8 of Table I, application no. 11, preferably the coding region thereof, particularly a homolog or functional equivalent as shown in column 8 of Table I B, application no. 11, and being depicted in the same respective line as said B2849, and preferably the activity is increased non-targeted, or
[57629] (b) a polypeptide comprising a polypeptide, a consensus sequence or at least a polypeptide motif as shown in the respective line in column 5 of Table II or in column 8 of Table IV, application no. 11, respectively, and being depicted in the same respective line as said B2849, or a functional equivalent or a homolog thereof as depicted in column 8 of Table II, application no. 11, preferably a homolog or functional equivalent as depicted in column 8 of Table II B, application no. 11, and being depicted in the same respective line as said B2849, and preferably the activity is increased non-targeted.

[57630] Accordingly, in one embodiment, the molecule which activity is to be increased in the process of the invention is the gene product with an activity as a “b2849-protein”, preferably it is the molecule of section (a) or (b) of this paragraph.

[57631] In particular, it was observed that in plants, especially in Arabidopsis thaliana, increasing or generating the activity of a gene product non-targeted with the activity of a “b2849-protein”, preferably being encoded by a gene comprising the nucleic acid sequence SEQ ID NO. 81980, preferably the coding region thereof, conferred the production of or the increase in palmitic acid compared with the wild type control.

[57632] The nucleic acid sequence of B3814 from Escherichia coli, e.g. as shown in the respective line in column 5 of Table I, application no. 11, has been published in B. And the activity of the gene product thereof is the activity of b3814-protein.

[57633] Accordingly, in one embodiment, the process of the present invention for producing palmitic acid in a non-human organism, like a microorganism or a plant or a part thereof, comprises increasing or generating the activity of a gene product with the activity of a gene product conferring the activity of “b3814-protein”, especially from Escherichia coli or its functional equivalent or its homolog, e.g. the increase of
[57634] (a) a gene product of a gene comprising the nucleic acid molecule as shown in the respective line in column 5 of Table I, application no. 11, preferably the coding region thereof, or a homolog or a fragment thereof, and being depicted in the same respective line as said B3814, or a functional equivalent or a homolog thereof as shown in column 8 of Table I, application no. 11, preferably the coding region thereof, particularly a homolog or functional equivalent as shown in column 8 of Table I B, application no. 11, and being depicted in the same respective line as said B3814, and preferably the activity is increased non-targeted, or
[57635] (b) a polypeptide comprising a polypeptide, a consensus sequence or at least a polypeptide motif as shown in the respective line in column 5 of Table II or in column 8 of Table IV, application no. 11, respectively, and being depicted in the same respective line as said B3814, or a functional equivalent or a homolog thereof as depicted in column 8 of Table II, application no. 11, preferably a homolog or functional equivalent as depicted in column 8 of Table II B, application no. 11, and being depicted in the same respective line as said B3814, and preferably the activity is increased non-targeted.

[57636] Accordingly, in one embodiment, the molecule which activity is to be increased in the process of the invention is the gene product with an activity as a “b3814-protein”, preferably it is the molecule of section (a) or (b) of this paragraph.

[57637] In particular, it was observed that in plants, especially in Arabidopsis thaliana, increasing or generating the activity of a gene product non-targeted with the activity of a “b3814-protein”, preferably being encoded by a gene comprising the nucleic acid sequence SEQ ID NO. 44196, preferably the coding region thereof, conferred the production of or the increase in palmitic acid compared with the wild type control.

[57638] The nucleic acid sequence of B3823 from Escherichia coli, e.g. as shown in the respective line in column 5 of Table I, application no. 11, has been published in B. And the activity of the gene product thereof is the activity of threonine efflux protein.

[57639] Accordingly, in one embodiment, the process of the present invention for producing palmitic acid in a non-human organism, like a microorganism or a plant or a part thereof, comprises increasing or generating the activity of a gene product with the activity of a gene product conferring the activity of “threonine efflux protein”, especially from Escherichia coli or its functional equivalent or its homolog, e.g. the increase of
[57640] (a) a gene product of a gene comprising the nucleic acid molecule as shown in the respective line in column 5 of Table I, application no. 11, preferably the coding region thereof, or a homolog or a fragment thereof, and being depicted in the same respective line as said B3823, or a functional equivalent or a homolog thereof as shown in column 8 of Table I, application no. 11, preferably the coding region thereof, particularly a homolog or functional equivalent as shown in column 8 of Table I B, application no. 11, and being depicted in the same respective line as said B3823, and preferably the activity is increased non-targeted, or
[57641] (b) a polypeptide comprising a polypeptide, a consensus sequence or at least a polypeptide motif as shown in the respective line in column 5 of Table II or in column 8 of Table IV, application no. 11, respectively, and being depicted in the same respective line as said B3823, or a functional equivalent or a homolog thereof as depicted in column 8 of Table II, application no. 11, preferably a homolog or functional equivalent as depicted in column 8 of Table II B, application no. 11, and being depicted in the same respective line as said B3823, and preferably the activity is increased non-targeted.

[57642] Accordingly, in one embodiment, the molecule which activity is to be increased in the process of the invention is the gene product with an activity as a “threonine efflux protein”, preferably it is the molecule of section (a) or (b) of this paragraph.

[57643] In particular, it was observed that in plants, especially in Arabidopsis thaliana, increasing or generating the activity of a gene product non-targeted with the activity of a “threonine efflux protein”, preferably being encoded by a gene comprising the nucleic acid sequence SEQ ID NO. 10726, preferably the coding region thereof, conferred the production of or the increase in palmitic acid compared with the wild type control.

[57644] The nucleic acid sequence of B3845 from Escherichia coli, e.g. as shown in the respective line in column 5 of Table I, application no. 11, has been published in B. And the activity of the gene product thereof is the activity of 3-ketoacyl-CoA thiolase.

[57645] Accordingly, in one embodiment, the process of the present invention for producing palmitic acid in a non-human organism, like a microorganism or a plant or a part thereof, comprises increasing or generating the activity of a gene product with the activity of a gene product conferring the activity of “3-ketoacyl-CoA thiolase”, especially from Escherichia coli or its functional equivalent or its homolog, e.g. the increase of
[57646] (a) a gene product of a gene comprising the nucleic acid molecule as shown in the respective line in column 5 of Table I, application no. 11, preferably the coding region thereof, or a homolog or a fragment thereof, and being depicted in the same respective line as said B3845, or a functional equivalent or a homolog thereof as shown in column 8 of Table I, application no. 11, preferably the coding region thereof, particularly a homolog or functional equivalent as shown in column 8 of Table I B, application no. 11, and being depicted in the same respective line as said B3845, and preferably the activity is increased plastidic, or
[57647] (b) a polypeptide comprising a polypeptide, a consensus sequence or at least a polypeptide motif as shown in the respective line in column 5 of Table II or in column 8 of Table IV, application no. 11, respectively, and being depicted in the same respective line as said B3845, or a functional equivalent or a homolog thereof as depicted in column 8 of Table II, application no. 11, preferably a homolog or functional equivalent as depicted in column 8 of Table II B, application no. 11, and being depicted in the same respective line as said B3845, and preferably the activity is increased plastidic.

[57648] Accordingly, in one embodiment, the molecule which activity is to be increased in the process of the invention is the gene product with an activity as a “3-ketoacyl-CoA thiolase”, preferably it is the molecule of section (a) or (b) of this paragraph.

[57649] In particular, it was observed that in plants, especially in Arabidopsis thaliana, increasing or generating the activity of a gene product plastidic with the activity of a “3-ketoacyl-CoA thiolase”, preferably being encoded by a gene comprising the nucleic acid sequence SEQ ID NO. 100675, preferably the coding region thereof, conferred the production of or the increase in palmitic acid compared with the wild type control.

[57650] The nucleic acid sequence of GM02LC12622 from Glycine max, e.g. as shown in the respective line in column 5 of Table I, application no. 11, is unpublished. And the activity of the gene product thereof is the activity of glutaredoxin.

[57651] Accordingly, in one embodiment, the process of the present invention for producing palmitic acid in a non-human organism, like a microorganism or a plant or a part thereof, comprises increasing or generating the activity of a gene product with the activity of a gene product conferring the activity of “glutaredoxin”, especially from Glycine max or its functional equivalent or its homolog, e.g. the increase of
[57652] (a) a gene product of a gene comprising the nucleic acid molecule as shown in the respective line in column 5 of Table I, application no. 11, preferably the coding region thereof, or a homolog or a fragment thereof, and being depicted in the same respective line as said GM02LC12622, or a functional equivalent or a homolog thereof as shown in column 8 of Table I, application no. 11, preferably the coding region thereof, particularly a homolog or functional equivalent as shown in column 8 of Table I B, application no. 11, and being depicted in the same respective line as said GM02LC12622, and preferably the activity is increased non-targeted, or
[57653] (b) a polypeptide comprising a polypeptide, a consensus sequence or at least a polypeptide motif as shown in the respective line in column 5 of Table II or in column 8 of Table IV, application no. 11, respectively, and being depicted in the same respective line as said GM02LC12622, or a functional equivalent or a homolog thereof as depicted in column 8 of Table II, application no. 11, preferably a homolog or functional equivalent as depicted in column 8 of Table II B, application no. 11, and being depicted in the same respective line as said GM02LC12622, and preferably the activity is increased non-targeted.

[57654] Accordingly, in one embodiment, the molecule which activity is to be increased in the process of the invention is the gene product with an activity as a “glutaredoxin”, preferably it is the molecule of section (a) or (b) of this paragraph.

[57655] In particular, it was observed that in plants, especially in Arabidopsis thaliana, increasing or generating the activity of a gene product non-targeted with the activity of a “glutaredoxin”, preferably being encoded by a gene comprising the nucleic acid sequence SEQ ID NO. 10811, preferably the coding region thereof, conferred the production of or the increase in palmitic acid compared with the wild type control.

[57656] The nucleic acid sequence of GM02LC19289 from Glycine max, e.g. as shown in the respective line in column 5 of Table I, application no. 11, is unpublished. And the activity of the gene product thereof is the activity of transcription factor.

[57657] Accordingly, in one embodiment, the process of the present invention for producing palmitic acid in a non-human organism, like a microorganism or a plant or a part thereof, comprises increasing or generating the activity of a gene product with the activity of a gene product conferring the activity of “transcription factor”, especially from Glycine max or its functional equivalent or its homolog, e.g. the increase of
[57658] (a) a gene product of a gene comprising the nucleic acid molecule as shown in the respective line in column 5 of Table I, application no. 11, preferably the coding region thereof, or a homolog or a fragment thereof, and being depicted in the same respective line as said GM02LC19289, or a functional equivalent or a homolog thereof as shown in column 8 of Table I, application no. 11, preferably the coding region thereof, particularly a homolog or functional equivalent as shown in column 8 of Table I B, application no. 11, and being depicted in the same respective line as said GM02LC19289, and preferably the activity is increased non-targeted, or
[57659] (b) a polypeptide comprising a polypeptide, a consensus sequence or at least a polypeptide motif as shown in the respective line in column 5 of Table II or in column 8 of Table IV, application no. 11, respectively, and being depicted in the same respective line as said GM02LC19289, or a functional equivalent or a homolog thereof as depicted in column 8 of Table II, application no. 11, preferably a homolog or functional equivalent as depicted in column 8 of Table II B, application no. 11, and being depicted in the same respective line as said GM02LC19289, and preferably the activity is increased non-targeted.

[57660] Accordingly, in one embodiment, the molecule which activity is to be increased in the process of the invention is the gene product with an activity as a “transcription factor”, preferably it is the molecule of section (a) or (b) of this paragraph.

[57661] In particular, it was observed that in plants, especially in Arabidopsis thaliana, increasing or generating the activity of a gene product non-targeted with the activity of a “transcription factor”, preferably being encoded by a gene comprising the nucleic acid sequence SEQ ID NO. 46751, preferably the coding region thereof, conferred the production of or the increase in palmitic acid compared with the wild type control.

[57662] The nucleic acid sequence of Sll0368 from Synechocystis sp., e.g. as shown in the respective line in column 5 of Table I, application no. 11, has been published in C. And the activity of the gene product thereof is the activity of bifunctional protein (phosphoribosyltransferase and regulatory protein).

[57663] Accordingly, in one embodiment, the process of the present invention for producing palmitic acid in a non-human organism, like a microorganism or a plant or a part thereof, comprises increasing or generating the activity of a gene product with the activity of a gene product conferring the activity of “bifunctional protein (phosphoribosyltransferase and regulatory protein)”, especially from Synechocystis sp. or its functional equivalent or its homolog, e.g. the increase of
[57664] (a) a gene product of a gene comprising the nucleic acid molecule as shown in the respective line in column 5 of Table I, application no. 11, preferably the coding region thereof, or a homolog or a fragment thereof, and being depicted in the same respective line as said Sll0368, or a functional equivalent or a homolog thereof as shown in column 8 of Table I, application no. 11, preferably the coding region thereof, particularly a homolog or functional equivalent as shown in column 8 of Table I B, application no. 11, and being depicted in the same respective line as said Sll0368, and preferably the activity is increased mitochondrial, or
[57665] (b) a polypeptide comprising a polypeptide, a consensus sequence or at least a polypeptide motif as shown in the respective line in column 5 of Table II or in column 8 of Table IV, application no. 11, respectively, and being depicted in the same respective line as said Sll0368, or a functional equivalent or a homolog thereof as depicted in column 8 of Table II, application no. 11, preferably a homolog or functional equivalent as depicted in column 8 of Table II B, application no. 11, and being depicted in the same respective line as said Sll0368, and preferably the activity is increased mitochondrial.

[57666] Accordingly, in one embodiment, the molecule which activity is to be increased in the process of the invention is the gene product with an activity as a “bifunctional protein (phosphoribosyltransferase and regulatory protein)”, preferably it is the molecule of section (a) or (b) of this paragraph.

[57667] In particular, it was observed that in plants, especially in Arabidopsis thaliana, increasing or generating the activity of a gene product mitochondrial with the activity of a “bifunctional protein (phosphoribosyltransferase and regulatory protein)”, preferably being encoded by a gene comprising the nucleic acid sequence SEQ ID NO. 106920, preferably the coding region thereof, conferred the production of or the increase in palmitic acid compared with the wild type control.

[57668] The nucleic acid sequence of Sll0374 from Synechocystis sp., e.g. as shown in the respective line in column 5 of Table I, application no. 11, has been published in C. And the activity of the gene product thereof is the activity of branched chain amino acid ABC transporter ATP-binding protein

[57669] Accordingly, in one embodiment, the process of the present invention for producing palmitic acid in a non-human organism, like a microorganism or a plant or a part thereof, comprises increasing or generating the activity of a gene product with the activity of a gene product conferring the activity of “branched chain amino acid ABC transporter ATP-binding protein”, especially from Synechocystis sp. or its functional equivalent or its homolog, e.g. the increase of
[57670] (a) a gene product of a gene comprising the nucleic acid molecule as shown in the respective line in column 5 of Table I, application no. 11, preferably the coding region thereof, or a homolog or a fragment thereof, and being depicted in the same respective line as said Sll0374, or a functional equivalent or a homolog thereof as shown in column 8 of Table I, application no. 11, preferably the coding region thereof, particularly a homolog or functional equivalent as shown in column 8 of Table I B, application no. 11, and being depicted in the same respective line as said Sll0374, and preferably the activity is increased plastidic, or
[57671] (b) a polypeptide comprising a polypeptide, a consensus sequence or at least a polypeptide motif as shown in the respective line in column 5 of Table II or in column 8 of Table IV, application no. 11, respectively, and being depicted in the same respective line as said Sll0374, or a functional equivalent or a homolog thereof as depicted in column 8 of Table II, application no. 11, preferably a homolog or functional equivalent as depicted in column 8 of Table II B, application no. 11, and being depicted in the same respective line as said Sll0374, and preferably the activity is increased plastidic.

[57672] Accordingly, in one embodiment, the molecule which activity is to be increased in the process of the invention is the gene product with an activity as a “branched chain amino acid ABC transporter ATP-binding protein”, preferably it is the molecule of section (a) or (b) of this paragraph.

[57673] In particular, it was observed that in plants, especially in Arabidopsis thaliana, increasing or generating the activity of a gene product plastidic with the activity of a “branched chain amino acid ABC transporter ATP-binding protein”, preferably being encoded by a gene comprising the nucleic acid sequence SEQ ID NO. 94741, preferably the coding region thereof, conferred the production of or the increase in palmitic acid compared with the wild type control.

[57674] The nucleic acid sequence of Sll1031 from Synechocystis sp., e.g. as shown in the respective line in column 5 of Table I, application no. 11, has been published in C. And the activity of the gene product thereof is the activity of carbon dioxide concentrating mechanism protein.

[57675] Accordingly, in one embodiment, the process of the present invention for producing palmitic acid in a non-human organism, like a microorganism or a plant or a part thereof, comprises increasing or generating the activity of a gene product with the activity of a gene product conferring the activity of “carbon dioxide concentrating mechanism protein”, especially from Synechocystis sp. or its functional equivalent or its homolog, e.g. the increase of
[57676] (a) a gene product of a gene comprising the nucleic acid molecule as shown in the respective line in column 5 of Table I, application no. 11, preferably the coding region thereof, or a homolog or a fragment thereof, and being depicted in the same respective line as said Sll1031, or a functional equivalent or a homolog thereof as shown in column 8 of Table I, application no. 11, preferably the coding region thereof, particularly a homolog or functional equivalent as shown in column 8 of Table I B, application no. 11, and being depicted in the same respective line as said Sll1031, and preferably the activity is increased mitochondrial, or
[57677] (b) a polypeptide comprising a polypeptide, a consensus sequence or at least a polypeptide motif as shown in the respective line in column 5 of Table II or in column 8 of Table IV, application no. 11, respectively, and being depicted in the same respective line as said Sll1031, or a functional equivalent or a homolog thereof as depicted in column 8 of Table II, application no. 11, preferably a homolog or functional equivalent as depicted in column 8 of Table II B, application no. 11, and being depicted in the same respective line as said Sll1031, and preferably the activity is increased mitochondrial.

[57678] Accordingly, in one embodiment, the molecule which activity is to be increased in the process of the invention is the gene product with an activity as a “carbon dioxide concentrating mechanism protein”, preferably it is the molecule of section (a) or (b) of this paragraph.

[57679] In particular, it was observed that in plants, especially in Arabidopsis thaliana, increasing or generating the activity of a gene product mitochondrial with the activity of a “carbon dioxide concentrating mechanism protein”, preferably being encoded by a gene comprising the nucleic acid sequence SEQ ID NO. 52634, preferably the coding region thereof, conferred the production of or the increase in palmitic acid compared with the wild type control.

[57680] The nucleic acid sequence of Sll1032 from Synechocystis sp., e.g. as shown in the respective line in column 5 of Table I, application no. 11, has been published in C. And the activity of the gene product thereof is the activity of sll1032-protein.

[57681] Accordingly, in one embodiment, the process of the present invention for producing palmitic acid in a non-human organism, like a microorganism or a plant or a part thereof, comprises increasing or generating the activity of a gene product with the activity of a gene product conferring the activity of “sll1032-protein”, especially from Synechocystis sp. or its functional equivalent or its homolog, e.g. the increase of
[57682] (a) a gene product of a gene comprising the nucleic acid molecule as shown in the respective line in column 5 of Table I, application no. 11, preferably the coding region thereof, or a homolog or a fragment thereof, and being depicted in the same respective line as said Sll1032, or a functional equivalent or a homolog thereof as shown in column 8 of Table I, application no. 11, preferably the coding region thereof, particularly a homolog or functional equivalent as shown in column 8 of Table I B, application no. 11, and being depicted in the same respective line as said Sll1032, and preferably the activity is increased mitochondrial, or
[57683] (b) a polypeptide comprising a polypeptide, a consensus sequence or at least a polypeptide motif as shown in the respective line in column 5 of Table II or in column 8 of Table IV, application no. 11, respectively, and being depicted in the same respective line as said Sll1032, or a functional equivalent or a homolog thereof as depicted in column 8 of Table II, application no. 11, preferably a homolog or functional equivalent as depicted in column 8 of Table II B, application no. 11, and being depicted in the same respective line as said Sll1032, and preferably the activity is increased mitochondrial.

[57684] Accordingly, in one embodiment, the molecule which activity is to be increased in the process of the invention is the gene product with an activity as a “sll1032-protein”, preferably it is the molecule of section (a) or (b) of this paragraph.

[57685] In particular, it was observed that in plants, especially in Arabidopsis thaliana, increasing or generating the activity of a gene product mitochondrial with the activity of a “sll1032-protein”, preferably being encoded by a gene comprising the nucleic acid sequence SEQ ID NO. 85723, preferably the coding region thereof, conferred the production of or the increase in palmitic acid compared with the wild type control.

[57686] The nucleic acid sequence of Sll1056 from Synechocystis sp., e.g. as shown in the respective line in column 5 of Table I, application no. 11, has been published in C. And the activity of the gene product thereof is the activity of phosphoribosylformyl glycinamidine synthase subunit.

[57687] Accordingly, in one embodiment, the process of the present invention for producing palmitic acid in a non-human organism, like a microorganism or a plant or a part thereof, comprises increasing or generating the activity of a gene product with the activity of a gene product conferring the activity of “phosphoribosylformyl glycinamidine synthase subunit”, especially from Synechocystis sp. or its functional equivalent or its homolog, e.g. the increase of
[57688] (a) a gene product of a gene comprising the nucleic acid molecule as shown in the respective line in column 5 of Table I, application no. 11, preferably the coding region thereof, or a homolog or a fragment thereof, and being depicted in the same respective line as said Sll1056, or a functional equivalent or a homolog thereof as shown in column 8 of Table I, application no. 11, preferably the coding region thereof, particularly a homolog or functional equivalent as shown in column 8 of Table I B, application no. 11, and being depicted in the same respective line as said Sll1056, and preferably the activity is increased plastidic, or
[57689] (b) a polypeptide comprising a polypeptide, a consensus sequence or at least a polypeptide motif as shown in the respective line in column 5 of Table II or in column 8 of Table IV, application no. 11, respectively, and being depicted in the same respective line as said Sll1056, or a functional equivalent or a homolog thereof as depicted in column 8 of Table II, application no. 11, preferably a homolog or functional equivalent as depicted in column 8 of Table II B, application no. 11, and being depicted in the same respective line as said Sll1056, and preferably the activity is increased plastidic.

[57690] Accordingly, in one embodiment, the molecule which activity is to be increased in the process of the invention is the gene product with an activity as a “phosphoribosylformyl glycinamidine synthase subunit”, preferably it is the molecule of section (a) or (b) of this paragraph.

[57691] In particular, it was observed that in plants, especially in Arabidopsis thaliana, increasing or generating the activity of a gene product plastidic with the activity of a “phosphoribosylformyl glycinamidine synthase subunit”, preferably being encoded by a gene comprising the nucleic acid sequence SEQ ID NO. 52660, preferably the coding region thereof, conferred the production of or the increase in palmitic acid compared with the wild type control.

[57692] The nucleic acid sequence of Sll1450 from Synechocystis sp., e.g. as shown in the respective line in column 5 of Table I, application no. 11, has been published in C. And the activity of the gene product thereof is the activity of nitrate/nitrite transport protein.

[57693] Accordingly, in one embodiment, the process of the present invention for producing palmitic acid in a non-human organism, like a microorganism or a plant or a part thereof, comprises increasing or generating the activity of a gene product with the activity of a gene product conferring the activity of “nitrate/nitrite transport protein”, especially from Synechocystis sp. or its functional equivalent or its homolog, e.g. the increase of
[57694] (a) a gene product of a gene comprising the nucleic acid molecule as shown in the respective line in column 5 of Table I, application no. 11, preferably the coding region thereof, or a homolog or a fragment thereof, and being depicted in the same respective line as said Sll1450, or a functional equivalent or a homolog thereof as shown in column 8 of Table I, application no. 11, preferably the coding region thereof, particularly a homolog or functional equivalent as shown in column 8 of Table I B, application no. 11, and being depicted in the same respective line as said Sll1450, and preferably the activity is increased mitochondrial, or
[57695] (b) a polypeptide comprising a polypeptide, a consensus sequence or at least a polypeptide motif as shown in the respective line in column 5 of Table II or in column 8 of Table IV, application no. 11, respectively, and being depicted in the same respective line as said Sll1450, or a functional equivalent or a homolog thereof as depicted in column 8 of Table II, application no. 11, preferably a homolog or functional equivalent as depicted in column 8 of Table II B, application no. 11, and being depicted in the same respective line as said Sll1450, and preferably the activity is increased mitochondrial.

[57696] Accordingly, in one embodiment, the molecule which activity is to be increased in the process of the invention is the gene product with an activity as a “nitrate/nitrite transport protein”, preferably it is the molecule of section (a) or (b) of this paragraph.

[57697] In particular, it was observed that in plants, especially in Arabidopsis thaliana, increasing or generating the activity of a gene product mitochondrial with the activity of a “nitrate/nitrite transport protein”, preferably being encoded by a gene comprising the nucleic acid sequence SEQ ID NO. 54337, preferably the coding region thereof, conferred the production of or the increase in palmitic acid compared with the wild type control.

[57698] The nucleic acid sequence of Sll1498 from Synechocystis sp., e.g. as shown in the respective line in column 5 of Table I, application no. 11, has been published in C. And the activity of the gene product thereof is the activity of carbamoyl-phosphate synthase subunit.

[57699] Accordingly, in one embodiment, the process of the present invention for producing palmitic acid in a non-human organism, like a microorganism or a plant or a part thereof, comprises increasing or generating the activity of a gene product with the activity of a gene product conferring the activity of “carbamoyl-phosphate synthase subunit”, especially from Synechocystis sp. or its functional equivalent or its homolog, e.g. the increase of
[57700] (a) a gene product of a gene comprising the nucleic acid molecule as shown in the respective line in column 5 of Table I, application no. 11, preferably the coding region thereof, or a homolog or a fragment thereof, and being depicted in the same respective line as said Sll1498, or a functional equivalent or a homolog thereof as shown in column 8 of Table I, application no. 11, preferably the coding region thereof, particularly a homolog or functional equivalent as shown in column 8 of Table I B, application no. 11, and being depicted in the same respective line as said Sll1498, and preferably the activity is increased non-targeted, or
[57701] (b) a polypeptide comprising a polypeptide, a consensus sequence or at least a polypeptide motif as shown in the respective line in column 5 of Table II or in column 8 of Table IV, application no. 11, respectively, and being depicted in the same respective line as said Sll1498, or a functional equivalent or a homolog thereof as depicted in column 8 of Table II, application no. 11, preferably a homolog or functional equivalent as depicted in column 8 of Table II B, application no. 11, and being depicted in the same respective line as said Sll1498, and preferably the activity is increased non-targeted.

[57702] Accordingly, in one embodiment, the molecule which activity is to be increased in the process of the invention is the gene product with an activity as a “carbamoyl-phosphate synthase subunit”, preferably it is the molecule of section (a) or (b) of this paragraph.

[57703] In particular, it was observed that in plants, especially in Arabidopsis thaliana, increasing or generating the activity of a gene product non-targeted with the activity of a “carbamoylphosphate synthase subunit”, preferably being encoded by a gene comprising the nucleic acid sequence SEQ ID NO. 95047, preferably the coding region thereof, conferred the production of or the increase in palmitic acid compared with the wild type control.

[57704] The nucleic acid sequence of Sll1545 from Synechocystis sp., e.g. as shown in the respective line in column 5 of Table I, application no. 11, has been published in C. And the activity of the gene product thereof is the activity of glutathione S-transferase.

[57705] Accordingly, in one embodiment, the process of the present invention for producing palmitic acid in a non-human organism, like a microorganism or a plant or a part thereof, comprises increasing or generating the activity of a gene product with the activity of a gene product conferring the activity of “glutathione S-transferase”, especially from Synechocystis sp. or its functional equivalent or its homolog, e.g. the increase of
[57706] (a) a gene product of a gene comprising the nucleic acid molecule as shown in the respective line in column 5 of Table I, application no. 11, preferably the coding region thereof, or a homolog or a fragment thereof, and being depicted in the same respective line as said Sll1545, or a functional equivalent or a homolog thereof as shown in column 8 of Table I, application no. 11, preferably the coding region thereof, particularly a homolog or functional equivalent as shown in column 8 of Table I B, application no. 11, and being depicted in the same respective line as said Sll1545, and preferably the activity is increased mitochondrial, or
[57707] (b) a polypeptide comprising a polypeptide, a consensus sequence or at least a polypeptide motif as shown in the respective line in column 5 of Table II or in column 8 of Table IV, application no. 11, respectively, and being depicted in the same respective line as said Sll1545, or a functional equivalent or a homolog thereof as depicted in column 8 of Table II, application no. 11, preferably a homolog or functional equivalent as depicted in column 8 of Table II B, application no. 11, and being depicted in the same respective line as said Sll1545, and preferably the activity is increased mitochondrial.

[57708] Accordingly, in one embodiment, the molecule which activity is to be increased in the process of the invention is the gene product with an activity as a “glutathione S-transferase”, preferably it is the molecule of section (a) or (b) of this paragraph.

[57709] In particular, it was observed that in plants, especially in Arabidopsis thaliana, increasing or generating the activity of a gene product mitochondrial with the activity of a “glutathione 5transferase”, preferably being encoded by a gene comprising the nucleic acid sequence SEQ ID NO. 11423, preferably the coding region thereof, conferred the production of or the increase in palmitic acid compared with the wild type control.

[57710] The nucleic acid sequence of Sll1598 from Synechocystis sp., e.g. as shown in the respective line in column 5 of Table I, application no. 11, has been published in C. And the activity of the gene product thereof is the activity of ABC metal ion transporter substrate-binding protein.

[57711] Accordingly, in one embodiment, the process of the present invention for producing palmitic acid in a non-human organism, like a microorganism or a plant or a part thereof, comprises increasing or generating the activity of a gene product with the activity of a gene product conferring the activity of “ABC metal ion transporter substrate-binding protein”, especially from Synechocystis sp. or its functional equivalent or its homolog, e.g. the increase of
[57712] (a) a gene product of a gene comprising the nucleic acid molecule as shown in the respective line in column 5 of Table I, application no. 11, preferably the coding region thereof, or a homolog or a fragment thereof, and being depicted in the same respective line as said Sll1598, or a functional equivalent or a homolog thereof as shown in column 8 of Table I, application no. 11, preferably the coding region thereof, particularly a homolog or functional equivalent as shown in column 8 of Table I B, application no. 11, and being depicted in the same respective line as said Sll1598, and preferably the activity is increased mitochondrial, or
[57713] (b) a polypeptide comprising a polypeptide, a consensus sequence or at least a polypeptide motif as shown in the respective line in column 5 of Table II or in column 8 of Table IV, application no. 11, respectively, and being depicted in the same respective line as said Sll1598, or a functional equivalent or a homolog thereof as depicted in column 8 of Table II, application no. 11, preferably a homolog or functional equivalent as depicted in column 8 of Table II B, application no. 11, and being depicted in the same respective line as said Sll1598, and preferably the activity is increased mitochondrial.

[57714] Accordingly, in one embodiment, the molecule which activity is to be increased in the process of the invention is the gene product with an activity as a “ABC metal ion transporter substratebinding protein”, preferably it is the molecule of section (a) or (b) of this paragraph.

[57715] In particular, it was observed that in plants, especially in Arabidopsis thaliana, increasing or generating the activity of a gene product mitochondrial with the activity of a “ABC metal ion transporter substrate-binding protein”, preferably being encoded by a gene comprising the nucleic acid sequence SEQ ID NO. 85743, preferably the coding region thereof, conferred the production of or the increase in palmitic acid compared with the wild type control.

[57716] The nucleic acid sequence of Sll1848 from Synechocystis sp., e.g. as shown in the respective line in column 5 of Table I, application no. 11, has been published in C. And the activity of the gene product thereof is the activity of acyl transferase.

[57717] Accordingly, in one embodiment, the process of the present invention for producing palmitic acid in a non-human organism, like a microorganism or a plant or a part thereof, comprises increasing or generating the activity of a gene product with the activity of a gene product conferring the activity of “acyl transferase”, especially from Synechocystis sp. or its functional equivalent or its homolog, e.g. the increase of
[57718] (a) a gene product of a gene comprising the nucleic acid molecule as shown in the respective line in column 5 of Table I, application no. 11, preferably the coding region thereof, or a homolog or a fragment thereof, and being depicted in the same respective line as said Sll1848, or a functional equivalent or a homolog thereof as shown in column 8 of Table I, application no. 11, preferably the coding region thereof, particularly a homolog or functional equivalent as shown in column 8 of Table I B, application no. 11, and being depicted in the same respective line as said Sll1848, and preferably the activity is increased plastidic, or
[57719] (b) a polypeptide comprising a polypeptide, a consensus sequence or at least a polypeptide motif as shown in the respective line in column 5 of Table II or in column 8 of Table IV, application no. 11, respectively, and being depicted in the same respective line as said Sll1848, or a functional equivalent or a homolog thereof as depicted in column 8 of Table II, application no. 11, preferably a homolog or functional equivalent as depicted in column 8 of Table II B, application no. 11, and being depicted in the same respective line as said Sll1848, and preferably the activity is increased plastidic.

[57720] Accordingly, in one embodiment, the molecule which activity is to be increased in the process of the invention is the gene product with an activity as a “acyl transferase”, preferably it is the molecule of section (a) or (b) of this paragraph.

[57721] In particular, it was observed that in plants, especially in Arabidopsis thaliana, increasing or generating the activity of a gene product plastidic with the activity of a “acyl transferase”, preferably being encoded by a gene comprising the nucleic acid sequence SEQ ID NO. 86447, preferably the coding region thereof, conferred the production of or the increase in palmitic acid compared with the wild type control.

[57722] The nucleic acid sequence of Sll1917 from Synechocystis sp., e.g. as shown in the respective line in column 5 of Table I, application no. 11, has been published in C. And the activity of the gene product thereof is the activity of coproporphyrinogen III oxidase.

[57723] Accordingly, in one embodiment, the process of the present invention for producing palmitic acid in a non-human organism, like a microorganism or a plant or a part thereof, comprises increasing or generating the activity of a gene product with the activity of a gene product conferring the activity of “coproporphyrinogen III oxidase”, especially from Synechocystis sp. or its functional equivalent or its homolog, e.g. the increase of
[57724] (a) a gene product of a gene comprising the nucleic acid molecule as shown in the respective line in column 5 of Table I, application no. 11, preferably the coding region thereof, or a homolog or a fragment thereof, and being depicted in the same respective line as said Sll1917, or a functional equivalent or a homolog thereof as shown in column 8 of Table I, application no. 11, preferably the coding region thereof, particularly a homolog or functional equivalent as shown in column 8 of Table I B, application no. 11, and being depicted in the same respective line as said Sll1917, and preferably the activity is increased mitochondrial, or
[57725] (b) a polypeptide comprising a polypeptide, a consensus sequence or at least a polypeptide motif as shown in the respective line in column 5 of Table II or in column 8 of Table IV, application no. 11, respectively, and being depicted in the same respective line as said Sll1917, or a functional equivalent or a homolog thereof as depicted in column 8 of Table II, application no. 11, preferably a homolog or functional equivalent as depicted in column 8 of Table II B, application no. 11, and being depicted in the same respective line as said Sll1917, and preferably the activity is increased mitochondrial.

[57726] Accordingly, in one embodiment, the molecule which activity is to be increased in the process of the invention is the gene product with an activity as a “coproporphyrinogen III oxidase”, preferably it is the molecule of section (a) or (b) of this paragraph.

[57727] In particular, it was observed that in plants, especially in Arabidopsis thaliana, increasing or generating the activity of a gene product mitochondrial with the activity of a “coproporphyrinogen III oxidase”, preferably being encoded by a gene comprising the nucleic acid sequence SEQ ID NO. 11471, preferably the coding region thereof, conferred the production of or the increase in palmitic acid compared with the wild type control.

[57728] The nucleic acid sequence of Sll1920 from Synechocystis sp., e.g. as shown in the respective line in column 5 of Table I, application no. 11, has been published in C. And the activity of the gene product thereof is the activity of cation-transporting ATPase.

[57729] Accordingly, in one embodiment, the process of the present invention for producing palmitic acid in a non-human organism, like a microorganism or a plant or a part thereof, comprises increasing or generating the activity of a gene product with the activity of a gene product conferring the activity of “cation-transporting ATPase”, especially from Synechocystis sp. or its functional equivalent or its homolog, e.g. the increase of
[57730] (a) a gene product of a gene comprising the nucleic acid molecule as shown in the respective line in column 5 of Table I, application no. 11, preferably the coding region thereof, or a homolog or a fragment thereof, and being depicted in the same respective line as said Sll1920, or a functional equivalent or a homolog thereof as shown in column 8 of Table I, application no. 11, preferably the coding region thereof, particularly a homolog or functional equivalent as shown in column 8 of Table I B, application no. 11, and being depicted in the same respective line as said Sll1920, and preferably the activity is increased mitochondrial, or
[57731] (b) a polypeptide comprising a polypeptide, a consensus sequence or at least a polypeptide motif as shown in the respective line in column 5 of Table II or in column 8 of Table IV, application no. 11, respectively, and being depicted in the same respective line as said Sll1920, or a functional equivalent or a homolog thereof as depicted in column 8 of Table II, application no. 11, preferably a homolog or functional equivalent as depicted in column 8 of Table II B, application no. 11, and being depicted in the same respective line as said Sll1920, and preferably the activity is increased mitochondrial.

[57732] Accordingly, in one embodiment, the molecule which activity is to be increased in the process of the invention is the gene product with an activity as a “cation-transporting ATPase”, preferably it is the molecule of section (a) or (b) of this paragraph.

[57733] In particular, it was observed that in plants, especially in Arabidopsis thaliana, increasing or generating the activity of a gene product mitochondrial with the activity of a “cation-transporting ATPase”, preferably being encoded by a gene comprising the nucleic acid sequence SEQ ID NO. 55385, preferably the coding region thereof, conferred the production of or the increase in palmitic acid compared with the wild type control.

[57734] The nucleic acid sequence of Slr0949 from Synechocystis sp., e.g. as shown in the respective line in column 5 of Table I, application no. 11, has been published in C. And the activity of the gene product thereof is the activity of permease protein of ABC transporter.

[57735] Accordingly, in one embodiment, the process of the present invention for producing palmitic acid in a non-human organism, like a microorganism or a plant or a part thereof, comprises increasing or generating the activity of a gene product with the activity of a gene product conferring the activity of “permease protein of ABC transporter”, especially from Synechocystis sp. or its functional equivalent or its homolog, e.g. the increase of
[57736] (a) a gene product of a gene comprising the nucleic acid molecule as shown in the respective line in column 5 of Table I, application no. 11, preferably the coding region thereof, or a homolog or a fragment thereof, and being depicted in the same respective line as said Slr0949, or a functional equivalent or a homolog thereof as shown in column 8 of Table I, application no. 11, preferably the coding region thereof, particularly a homolog or functional equivalent as shown in column 8 of Table I B, application no. 11, and being depicted in the same respective line as said Slr0949, and preferably the activity is increased mitochondrial, or
[57737] (b) a polypeptide comprising a polypeptide, a consensus sequence or at least a polypeptide motif as shown in the respective line in column 5 of Table II or in column 8 of Table IV, application no. 11, respectively, and being depicted in the same respective line as said Slr0949, or a functional equivalent or a homolog thereof as depicted in column 8 of Table II, application no. 11, preferably a homolog or functional equivalent as depicted in column 8 of Table II B, application no. 11, and being depicted in the same respective line as said Slr0949, and preferably the activity is increased mitochondrial.

[57738] Accordingly, in one embodiment, the molecule which activity is to be increased in the process of the invention is the gene product with an activity as a “permease protein of ABC transporter”, preferably it is the molecule of section (a) or (b) of this paragraph.

[57739] In particular, it was observed that in plants, especially in Arabidopsis thaliana, increasing or generating the activity of a gene product mitochondrial with the activity of a “permease protein of ABC transporter”, preferably being encoded by a gene comprising the nucleic acid sequence SEQ ID NO. 119222, preferably the coding region thereof, conferred the production of or the increase in palmitic acid compared with the wild type control.

[57740] The nucleic acid sequence of Slr1099 from Synechocystis sp., e.g. as shown in the respective line in column 5 of Table I, application no. 11, has been published in C. And the activity of the gene product thereof is the activity of aromatic acid decarboxylase.

[57741] Accordingly, in one embodiment, the process of the present invention for producing palmitic acid in a non-human organism, like a microorganism or a plant or a part thereof, comprises increasing or generating the activity of a gene product with the activity of a gene product conferring the activity of “aromatic acid decarboxylase”, especially from Synechocystis sp. or its functional equivalent or its homolog, e.g. the increase of
[57742] (a) a gene product of a gene comprising the nucleic acid molecule as shown in the respective line in column 5 of Table I, application no. 11, preferably the coding region thereof, or a homolog or a fragment thereof, and being depicted in the same respective line as said Slr1099, or a functional equivalent or a homolog thereof as shown in column 8 of Table I, application no. 11, preferably the coding region thereof, particularly a homolog or functional equivalent as shown in column 8 of Table I B, application no. 11, and being depicted in the same respective line as said Slr1099, and preferably the activity is increased mitochondrial, or
[57743] (b) a polypeptide comprising a polypeptide, a consensus sequence or at least a polypeptide motif as shown in the respective line in column 5 of Table II or in column 8 of Table IV, application no. 11, respectively, and being depicted in the same respective line as said Slr1099, or a functional equivalent or a homolog thereof as depicted in column 8 of Table II, application no. 11, preferably a homolog or functional equivalent as depicted in column 8 of Table II B, application no. 11, and being depicted in the same respective line as said Slr1099, and preferably the activity is increased mitochondrial.

[57744] Accordingly, in one embodiment, the molecule which activity is to be increased in the process of the invention is the gene product with an activity as a “aromatic acid decarboxylase”, preferably it is the molecule of section (a) or (b) of this paragraph.

[57745] In particular, it was observed that in plants, especially in Arabidopsis thaliana, increasing or generating the activity of a gene product mitochondrial with the activity of a “aromatic acid decarboxylase”, preferably being encoded by a gene comprising the nucleic acid sequence SEQ ID NO. 116341, preferably the coding region thereof, conferred the production of or the increase in palmitic acid compared with the wild type control.

[57746] The nucleic acid sequence of Slr1250 from Synechocystis sp., e.g. as shown in the respective line in column 5 of Table I, application no. 11, has been published in C. And the activity of the gene product thereof is the activity of phosphate import ATP-binding protein.

[57747] Accordingly, in one embodiment, the process of the present invention for producing palmitic acid in a non-human organism, like a microorganism or a plant or a part thereof, comprises increasing or generating the activity of a gene product with the activity of a gene product conferring the activity of “phosphate import ATP-binding protein”, especially from Synechocystis sp. or its functional equivalent or its homolog, e.g. the increase of
[57748] (a) a gene product of a gene comprising the nucleic acid molecule as shown in the respective line in column 5 of Table I, application no. 11, preferably the coding region thereof, or a homolog or a fragment thereof, and being depicted in the same respective line as said Slr1250, or a functional equivalent or a homolog thereof as shown in column 8 of Table I, application no. 11, preferably the coding region thereof, particularly a homolog or functional equivalent as shown in column 8 of Table I B, application no. 11, and being depicted in the same respective line as said Slr1250, and preferably the activity is increased mitochondrial, or
[57749] (b) a polypeptide comprising a polypeptide, a consensus sequence or at least a polypeptide motif as shown in the respective line in column 5 of Table II or in column 8 of Table IV, application no. 11, respectively, and being depicted in the same respective line as said Slr1250, or a functional equivalent or a homolog thereof as depicted in column 8 of Table II, application no. 11, preferably a homolog or functional equivalent as depicted in column 8 of Table II B, application no. 11, and being depicted in the same respective line as said Slr1250, and preferably the activity is increased mitochondrial.

[57750] Accordingly, in one embodiment, the molecule which activity is to be increased in the process of the invention is the gene product with an activity as a “phosphate import ATP-binding protein”, preferably it is the molecule of section (a) or (b) of this paragraph.

[57751] In particular, it was observed that in plants, especially in Arabidopsis thaliana, increasing or generating the activity of a gene product mitochondrial with the activity of a “phosphate import ATP-binding protein”, preferably being encoded by a gene comprising the nucleic acid sequence SEQ ID NO. 116460, preferably the coding region thereof, conferred the production of or the increase in palmitic acid compared with the wild type control.

[57752] The nucleic acid sequence of Slr1312 from Synechocystis sp., e.g. as shown in the respective line in column 5 of Table I, application no. 11, has been published in C. And the activity of the gene product thereof is the activity of arginine decarboxylase.

[57753] Accordingly, in one embodiment, the process of the present invention for producing palmitic acid in a non-human organism, like a microorganism or a plant or a part thereof, comprises increasing or generating the activity of a gene product with the activity of a gene product conferring the activity of “arginine decarboxylase”, especially from Synechocystis sp. or its functional equivalent or its homolog, e.g. the increase of
[57754] (a) a gene product of a gene comprising the nucleic acid molecule as shown in the respective line in column 5 of Table I, application no. 11, preferably the coding region thereof, or a homolog or a fragment thereof, and being depicted in the same respective line as said Slr1312, or a functional equivalent or a homolog thereof as shown in column 8 of Table I, application no. 11, preferably the coding region thereof, particularly a homolog or functional equivalent as shown in column 8 of Table I B, application no. 11, and being depicted in the same respective line as said Slr1312, and preferably the activity is increased non-targeted, or
[57755] (b) a polypeptide comprising a polypeptide, a consensus sequence or at least a polypeptide motif as shown in the respective line in column 5 of Table II or in column 8 of Table IV, application no. 11, respectively, and being depicted in the same respective line as said Slr1312, or a functional equivalent or a homolog thereof as depicted in column 8 of Table II, application no. 11, preferably a homolog or functional equivalent as depicted in column 8 of Table II B, application no. 11, and being depicted in the same respective line as said Slr1312, and preferably the activity is increased non-targeted.

[57756] Accordingly, in one embodiment, the molecule which activity is to be increased in the process of the invention is the gene product with an activity as a “arginine decarboxylase”, preferably it is the molecule of section (a) or (b) of this paragraph.

[57757] In particular, it was observed that in plants, especially in Arabidopsis thaliana, increasing or generating the activity of a gene product non-targeted with the activity of a “arginine decarboxylase”, preferably being encoded by a gene comprising the nucleic acid sequence SEQ ID NO. 58324, preferably the coding region thereof, conferred the production of or the increase in palmitic acid compared with the wild type control.

[57758] The nucleic acid sequence of Slr1791 from Synechocystis sp., e.g. as shown in the respective line in column 5 of Table I, application no. 11, has been published in C. And the activity of the gene product thereof is the activity of phosphoadenosine phosphosulfate reductase .

[57759] Accordingly, in one embodiment, the process of the present invention for producing palmitic acid in a non-human organism, like a microorganism or a plant or a part thereof, comprises increasing or generating the activity of a gene product with the activity of a gene product conferring the activity of “phosphoadenosine phosphosulfate reductase”, especially from Synechocystis sp. or its functional equivalent or its homolog, e.g. the increase of
[57760] (a) a gene product of a gene comprising the nucleic acid molecule as shown in the respective line in column 5 of Table I, application no. 11, preferably the coding region thereof, or a homolog or a fragment thereof, and being depicted in the same respective line as said Slr1791, or a functional equivalent or a homolog thereof as shown in column 8 of Table I, application no. 11, preferably the coding region thereof, particularly a homolog or functional equivalent as shown in column 8 of Table I B, application no. 11, and being depicted in the same respective line as said Slr1791, and preferably the activity is increased mitochondrial, or
[57761] (b) a polypeptide comprising a polypeptide, a consensus sequence or at least a polypeptide motif as shown in the respective line in column 5 of Table II or in column 8 of Table IV, application no. 11, respectively, and being depicted in the same respective line as said Slr1791, or a functional equivalent or a homolog thereof as depicted in column 8 of Table II, application no. 11, preferably a homolog or functional equivalent as depicted in column 8 of Table II B, application no. 11, and being depicted in the same respective line as said Slr1791, and preferably the activity is increased mitochondrial.

[57762] Accordingly, in one embodiment, the molecule which activity is to be increased in the process of the invention is the gene product with an activity as a “phosphoadenosine phosphosulfate reductase”, preferably it is the molecule of section (a) or (b) of this paragraph.

[57763] In particular, it was observed that in plants, especially in Arabidopsis thaliana, increasing or generating the activity of a gene product mitochondrial with the activity of a “phosphoadenosine phosphosulfate reductase”, preferably being encoded by a gene comprising the nucleic acid sequence SEQ ID NO. 12140, preferably the coding region thereof, conferred the production of or the increase in palmitic acid compared with the wild type control.

[57764] The nucleic acid sequence of Slr2072 from Synechocystis sp., e.g. as shown in the respective line in column 5 of Table I, application no. 11, has been published in C. And the activity of the gene product thereof is the activity of threonine dehydratase.

[57765] Accordingly, in one embodiment, the process of the present invention for producing palmitic acid in a non-human organism, like a microorganism or a plant or a part thereof, comprises increasing or generating the activity of a gene product with the activity of a gene product conferring the activity of “threonine dehydratase”, especially from Synechocystis sp. or its functional equivalent or its homolog, e.g. the increase of
[57766] (a) a gene product of a gene comprising the nucleic acid molecule as shown in the respective line in column 5 of Table I, application no. 11, preferably the coding region thereof, or a homolog or a fragment thereof, and being depicted in the same respective line as said Slr2072, or a functional equivalent or a homolog thereof as shown in column 8 of Table I, application no. 11, preferably the coding region thereof, particularly a homolog or functional equivalent as shown in column 8 of Table I B, application no. 11, and being depicted in the same respective line as said Slr2072, and preferably the activity is increased mitochondrial, or
[57767] (b) a polypeptide comprising a polypeptide, a consensus sequence or at least a polypeptide motif as shown in the respective line in column 5 of Table II or in column 8 of Table IV, application no. 11, respectively, and being depicted in the same respective line as said Slr2072, or a functional equivalent or a homolog thereof as depicted in column 8 of Table II, application no. 11, preferably a homolog or functional equivalent as depicted in column 8 of Table II B, application no. 11, and being depicted in the same respective line as said Slr2072, and preferably the activity is increased mitochondrial.

[57768] Accordingly, in one embodiment, the molecule which activity is to be increased in the process of the invention is the gene product with an activity as a “threonine dehydratase”, preferably it is the molecule of section (a) or (b) of this paragraph.

[57769] In particular, it was observed that in plants, especially in Arabidopsis thaliana, increasing or generating the activity of a gene product mitochondrial with the activity of a “threonine dehydratase”, preferably being encoded by a gene comprising the nucleic acid sequence SEQ ID NO. 12341, preferably the coding region thereof, conferred the production of or the increase in palmitic acid compared with the wild type control.

[57770] The nucleic acid sequence of TTC0917 from Thermus thermophilus, e.g. as shown in the respective line in column 5 of Table I, application no. 11, has been published in E. And the activity of the gene product thereof is the activity of metal-dependent hydrolase.

[57771] Accordingly, in one embodiment, the process of the present invention for producing palmitic acid in a non-human organism, like a microorganism or a plant or a part thereof, comprises increasing or generating the activity of a gene product with the activity of a gene product conferring the activity of “metal-dependent hydrolase”, especially from Thermus thermophilus or its functional equivalent or its homolog, e.g. the increase of
[57772] (a) a gene product of a gene comprising the nucleic acid molecule as shown in the respective line in column 5 of Table I, application no. 11, preferably the coding region thereof, or a homolog or a fragment thereof, and being depicted in the same respective line as said TTC0917, or a functional equivalent or a homolog thereof as shown in column 8 of Table I, application no. 11, preferably the coding region thereof, particularly a homolog or functional equivalent as shown in column 8 of Table I B, application no. 11, and being depicted in the same respective line as said TTC0917, and preferably the activity is increased non-targeted, or
[57773] (b) a polypeptide comprising a polypeptide, a consensus sequence or at least a polypeptide motif as shown in the respective line in column 5 of Table II or in column 8 of Table IV, application no. 11, respectively, and being depicted in the same respective line as said TTC0917, or a functional equivalent or a homolog thereof as depicted in column 8 of Table II, application no. 11, preferably a homolog or functional equivalent as depicted in column 8 of Table II B, application no. 11, and being depicted in the same respective line as said TTC0917, and preferably the activity is increased non-targeted.

[57774] Accordingly, in one embodiment, the molecule which activity is to be increased in the process of the invention is the gene product with an activity as a “metal-dependent hydrolase”, preferably it is the molecule of section (a) or (b) of this paragraph.

[57775] In particular, it was observed that in plants, especially in Arabidopsis thaliana, increasing or generating the activity of a gene product non-targeted with the activity of a “metal-dependent hydrolase”, preferably being encoded by a gene comprising the nucleic acid sequence SEQ ID NO. 61553, preferably the coding region thereof, conferred the production of or the increase in palmitic acid compared with the wild type control.

[57776] The nucleic acid sequence of TTC1550 from Thermus thermophilus, e.g. as shown in the respective line in column 5 of Table I, application no. 11, has been published in E. And the activity of the gene product thereof is the activity of homocitrate synthase.

[57777] Accordingly, in one embodiment, the process of the present invention for producing palmitic acid in a non-human organism, like a microorganism or a plant or a part thereof, comprises increasing or generating the activity of a gene product with the activity of a gene product conferring the activity of “homocitrate synthase”, especially from Thermus thermophilus or its functional equivalent or its homolog, e.g. the increase of
[57778] (a) a gene product of a gene comprising the nucleic acid molecule as shown in the respective line in column 5 of Table I, application no. 11, preferably the coding region thereof, or a homolog or a fragment thereof, and being depicted in the same respective line as said TTC1550, or a functional equivalent or a homolog thereof as shown in column 8 of Table I, application no. 11, preferably the coding region thereof, particularly a homolog or functional equivalent as shown in column 8 of Table I B, application no. 11, and being depicted in the same respective line as said TTC1550, and preferably the activity is increased non-targeted, or
[57779] (b) a polypeptide comprising a polypeptide, a consensus sequence or at least a polypeptide motif as shown in the respective line in column 5 of Table II or in column 8 of Table IV, application no. 11, respectively, and being depicted in the same respective line as said TTC1550, or a functional equivalent or a homolog thereof as depicted in column 8 of Table II, application no. 11, preferably a homolog or functional equivalent as depicted in column 8 of Table II B, application no. 11, and being depicted in the same respective line as said TTC1550, and preferably the activity is increased non-targeted.

[57780] Accordingly, in one embodiment, the molecule which activity is to be increased in the process of the invention is the gene product with an activity as a “homocitrate synthase”, preferably it is the molecule of section (a) or (b) of this paragraph.

[57781] In particular, it was observed that in plants, especially in Arabidopsis thaliana, increasing or generating the activity of a gene product non-targeted with the activity of a “homocitrate synthase”, preferably being encoded by a gene comprising the nucleic acid sequence SEQ ID NO. 12974, preferably the coding region thereof, conferred the production of or the increase in palmitic acid compared with the wild type control.

[57782] The nucleic acid sequence of Ybr092c from Saccharomyces cerevisiae, e.g. as shown in the respective line in column 5 of Table I, application no. 11, has been published in A. And the activity of the gene product thereof is the activity of acid phosphatase precursor.

[57783] Accordingly, in one embodiment, the process of the present invention for producing palmitic acid in a non-human organism, like a microorganism or a plant or a part thereof, comprises increasing or generating the activity of a gene product with the activity of a gene product conferring the activity of “acid phosphatase precursor”, especially from Saccharomyces cerevisiae or its functional equivalent or its homolog, e.g. the increase of
[57784] (a) a gene product of a gene comprising the nucleic acid molecule as shown in the respective line in column 5 of Table I, application no. 11, preferably the coding region thereof, or a homolog or a fragment thereof, and being depicted in the same respective line as said Ybr092c, or a functional equivalent or a homolog thereof as shown in column 8 of Table I, application no. 11, preferably the coding region thereof, particularly a homolog or functional equivalent as shown in column 8 of Table I B, application no. 11, and being depicted in the same respective line as said Ybr092c, and preferably the activity is increased plastidic, or
[57785] (b) a polypeptide comprising a polypeptide, a consensus sequence or at least a polypeptide motif as shown in the respective line in column 5 of Table II or in column 8 of Table IV, application no. 11, respectively, and being depicted in the same respective line as said Ybr092c, or a functional equivalent or a homolog thereof as depicted in column 8 of Table II, application no. 11, preferably a homolog or functional equivalent as depicted in column 8 of Table II B, application no. 11, and being depicted in the same respective line as said Ybr092c, and preferably the activity is increased plastidic.

[57786] Accordingly, in one embodiment, the molecule which activity is to be increased in the process of the invention is the gene product with an activity as a “acid phosphatase precursor”, preferably it is the molecule of section (a) or (b) of this paragraph.

[57787] In particular, it was observed that in plants, especially in Arabidopsis thaliana, increasing or generating the activity of a gene product plastidic with the activity of a “acid phosphatase precursor”, preferably being encoded by a gene comprising the nucleic acid sequence SEQ ID NO. 119347, preferably the coding region thereof, conferred the production of or the increase in palmitic acid compared with the wild type control.

[57788] The nucleic acid sequence of Ydl022w from Saccharomyces cerevisiae, e.g. as shown in the respective line in column 5 of Table I, application no. 11, has been published in A. And the activity of the gene product thereof is the activity of glycerol-3-phosphate dehydrogenase.

[57789] Accordingly, in one embodiment, the process of the present invention for producing palmitic acid in a non-human organism, like a microorganism or a plant or a part thereof, comprises increasing or generating the activity of a gene product with the activity of a gene product conferring the activity of “glycerol-3-phosphate dehydrogenase”, especially from Saccharomyces cerevisiae or its functional equivalent or its homolog, e.g. the increase of
[57790] (a) a gene product of a gene comprising the nucleic acid molecule as shown in the respective line in column 5 of Table I, application no. 11, preferably the coding region thereof, or a homolog or a fragment thereof, and being depicted in the same respective line as said Ydl022w, or a functional equivalent or a homolog thereof as shown in column 8 of Table I, application no. 11, preferably the coding region thereof, particularly a homolog or functional equivalent as shown in column 8 of Table I B, application no. 11, and being depicted in the same respective line as said Ydl022w, and preferably the activity is increased non-targeted, or
[57791] (b) a polypeptide comprising a polypeptide, a consensus sequence or at least a polypeptide motif as shown in the respective line in column 5 of Table II or in column 8 of Table IV, application no. 11, respectively, and being depicted in the same respective line as said Ydl022w, or a functional equivalent or a homolog thereof as depicted in column 8 of Table II, application no. 11, preferably a homolog or functional equivalent as depicted in column 8 of Table II B, application no. 11, and being depicted in the same respective line as said Ydl022w, and preferably the activity is increased non-targeted.

[57792] Accordingly, in one embodiment, the molecule which activity is to be increased in the process of the invention is the gene product with an activity as a “glycerol-3-phosphate dehydrogenase”, preferably it is the molecule of section (a) or (b) of this paragraph.

[57793] In particular, it was observed that in plants, especially in Arabidopsis thaliana, increasing or generating the activity of a gene product non-targeted with the activity of a “glycerol-3-phosphate dehydrogenase”, preferably being encoded by a gene comprising the nucleic acid sequence SEQ ID NO. 119408, preferably the coding region thereof, conferred the production of or the increase in palmitic acid compared with the wild type control.

[57794] The nucleic acid sequence of Ydl101c from Saccharomyces cerevisiae, e.g. as shown in the respective line in column 5 of Table I, application no. 11, has been published in A. And the activity of the gene product thereof is the activity of protein kinase.

[57795] Accordingly, in one embodiment, the process of the present invention for producing palmitic acid in a non-human organism, like a microorganism or a plant or a part thereof, comprises increasing or generating the activity of a gene product with the activity of a gene product conferring the activity of “protein kinase”, especially from Saccharomyces cerevisiae or its functional equivalent or its homolog, e.g. the increase of
[57796] (a) a gene product of a gene comprising the nucleic acid molecule as shown in the respective line in column 5 of Table I, application no. 11, preferably the coding region thereof, or a homolog or a fragment thereof, and being depicted in the same respective line as said Ydl101c, or a functional equivalent or a homolog thereof as shown in column 8 of Table I, application no. 11, preferably the coding region thereof, particularly a homolog or functional equivalent as shown in column 8 of Table I B, application no. 11, and being depicted in the same respective line as said Ydl101c, and preferably the activity is increased non-targeted, or
[57797] (b) a polypeptide comprising a polypeptide, a consensus sequence or at least a polypeptide motif as shown in the respective line in column 5 of Table II or in column 8 of Table IV, application no. 11, respectively, and being depicted in the same respective line as said Ydl101c, or a functional equivalent or a homolog thereof as depicted in column 8 of Table II, application no. 11, preferably a homolog or functional equivalent as depicted in column 8 of Table II B, application no. 11, and being depicted in the same respective line as said Ydl101c, and preferably the activity is increased non-targeted.

[57798] Accordingly, in one embodiment, the molecule which activity is to be increased in the process of the invention is the gene product with an activity as a “protein kinase”, preferably it is the molecule of section (a) or (b) of this paragraph.

[57799] In particular, it was observed that in plants, especially in Arabidopsis thaliana, increasing or generating the activity of a gene product non-targeted with the activity of a “protein kinase”, preferably being encoded by a gene comprising the nucleic acid sequence SEQ ID NO. 122518, preferably the coding region thereof, conferred the production of or the increase in palmitic acid compared with the wild type control.

[57800] The nucleic acid sequence of Ydr131c from Saccharomyces cerevisiae, e.g. as shown in the respective line in column 5 of Table I, application no. 11, has been published in A. And the activity of the gene product thereof is the activity of F-box protein.

[57801] Accordingly, in one embodiment, the process of the present invention for producing palmitic acid in a non-human organism, like a microorganism or a plant or a part thereof, comprises increasing or generating the activity of a gene product with the activity of a gene product conferring the activity of “F-box protein”, especially from Saccharomyces cerevisiae or its functional equivalent or its homolog, e.g. the increase of
[57802] (a) a gene product of a gene comprising the nucleic acid molecule as shown in the respective line in column 5 of Table I, application no. 11, preferably the coding region thereof, or a homolog or a fragment thereof, and being depicted in the same respective line as said Ydr131c, or a functional equivalent or a homolog thereof as shown in column 8 of Table I, application no. 11, preferably the coding region thereof, particularly a homolog or functional equivalent as shown in column 8 of Table I B, application no. 11, and being depicted in the same respective line as said Ydr131c, and preferably the activity is increased plastidic, or
[57803] (b) a polypeptide comprising a polypeptide, a consensus sequence or at least a polypeptide motif as shown in the respective line in column 5 of Table II or in column 8 of Table IV, application no. 11, respectively, and being depicted in the same respective line as said Ydr131c, or a functional equivalent or a homolog thereof as depicted in column 8 of Table II, application no. 11, preferably a homolog or functional equivalent as depicted in column 8 of Table II B, application no. 11, and being depicted in the same respective line as said Ydr131c, and preferably the activity is increased plastidic.

[57804] Accordingly, in one embodiment, the molecule which activity is to be increased in the process of the invention is the gene product with an activity as a “F-box protein”, preferably it is the molecule of section (a) or (b) of this paragraph.

[57805] In particular, it was observed that in plants, especially in Arabidopsis thaliana, increasing or generating the activity of a gene product plastidic with the activity of a “F-box protein”, preferably being encoded by a gene comprising the nucleic acid sequence SEQ ID NO. 14706, preferably the coding region thereof, conferred the production of or the increase in palmitic acid compared with the wild type control.

[57806] The nucleic acid sequence of Yjl073w from Saccharomyces cerevisiae, e.g. as shown in the respective line in column 5 of Table I, application no. 11, has been published in A. And the activity of the gene product thereof is the activity of DnaJ-like chaperone.

[57807] Accordingly, in one embodiment, the process of the present invention for producing palmitic acid in a non-human organism, like a microorganism or a plant or a part thereof, comprises increasing or generating the activity of a gene product with the activity of a gene product conferring the activity of “DnaJ-like chaperone”, especially from Saccharomyces cerevisiae or its functional equivalent or its homolog, e.g. the increase of
[57808] (a) a gene product of a gene comprising the nucleic acid molecule as shown in the respective line in column 5 of Table I, application no. 11, preferably the coding region thereof, or a homolog or a fragment thereof, and being depicted in the same respective line as said Yjl073w, or a functional equivalent or a homolog thereof as shown in column 8 of Table I, application no. 11, preferably the coding region thereof, particularly a homolog or functional equivalent as shown in column 8 of Table I B, application no. 11, and being depicted in the same respective line as said Yjl073w, and preferably the activity is increased plastidic, or
[57809] (b) a polypeptide comprising a polypeptide, a consensus sequence or at least a polypeptide motif as shown in the respective line in column 5 of Table II or in column 8 of Table IV, application no. 11, respectively, and being depicted in the same respective line as said Yjl073w, or a functional equivalent or a homolog thereof as depicted in column 8 of Table II, application no. 11, preferably a homolog or functional equivalent as depicted in column 8 of Table II B, application no. 11, and being depicted in the same respective line as said Yjl073w, and preferably the activity is increased plastidic.

[57810] Accordingly, in one embodiment, the molecule which activity is to be increased in the process of the invention is the gene product with an activity as a “DnaJ-like chaperone”, preferably it is the molecule of section (a) or (b) of this paragraph.

[57811] In particular, it was observed that in plants, especially in Arabidopsis thaliana, increasing or generating the activity of a gene product plastidic with the activity of a “DnaJ-like chaperone”, preferably being encoded by a gene comprising the nucleic acid sequence SEQ ID NO. 64964, preferably the coding region thereof, conferred the production of or the increase in palmitic acid compared with the wild type control.

[57812] The nucleic acid sequence of Ylr304c from Saccharomyces cerevisiae, e.g. as shown in the respective line in column 5 of Table I, application no. 11, has been published in A. And the activity of the gene product thereof is the activity of aconitate hydratase.

[57813] Accordingly, in one embodiment, the process of the present invention for producing palmitic acid in a non-human organism, like a microorganism or a plant or a part thereof, comprises increasing or generating the activity of a gene product with the activity of a gene product conferring the activity of “aconitate hydratase”, especially from Saccharomyces cerevisiae or its functional equivalent or its homolog, e.g. the increase of
[57814] (a) a gene product of a gene comprising the nucleic acid molecule as shown in the respective line in column 5 of Table I, application no. 11, preferably the coding region thereof, or a homolog or a fragment thereof, and being depicted in the same respective line as said Ylr304c, or a functional equivalent or a homolog thereof as shown in column 8 of Table I, application no. 11, preferably the coding region thereof, particularly a homolog or functional equivalent as shown in column 8 of Table I B, application no. 11, and being depicted in the same respective line as said Ylr304c, and preferably the activity is increased non-targeted, or
[57815] (b) a polypeptide comprising a polypeptide, a consensus sequence or at least a polypeptide motif as shown in the respective line in column 5 of Table II or in column 8 of Table IV, application no. 11, respectively, and being depicted in the same respective line as said Ylr304c, or a functional equivalent or a homolog thereof as depicted in column 8 of Table II, application no. 11, preferably a homolog or functional equivalent as depicted in column 8 of Table II B, application no. 11, and being depicted in the same respective line as said Ylr304c, and preferably the activity is increased non-targeted.

[57816] Accordingly, in one embodiment, the molecule which activity is to be increased in the process of the invention is the gene product with an activity as a “aconitate hydratase”, preferably it is the molecule of section (a) or (b) of this paragraph.

[57817] In particular, it was observed that in plants, especially in Arabidopsis thaliana, increasing or generating the activity of a gene product non-targeted with the activity of a “aconitate hydratase”, preferably being encoded by a gene comprising the nucleic acid sequence SEQ ID NO. 66772, preferably the coding region thereof, conferred the production of or the increase in palmitic acid compared with the wild type control.

[57818] The nucleic acid sequence of Ymr013c from Saccharomyces cerevisiae, e.g. as shown in the respective line in column 5 of Table I, application no. 11, has been published in A. And the activity of the gene product thereof is the activity of ymr013c-protein.

[57819] Accordingly, in one embodiment, the process of the present invention for producing palmitic acid in a non-human organism, like a microorganism or a plant or a part thereof, comprises increasing or generating the activity of a gene product with the activity of a gene product conferring the activity of “ymr013c-protein”, especially from Saccharomyces cerevisiae or its functional equivalent or its homolog, e.g. the increase of
[57820] (a) a gene product of a gene comprising the nucleic acid molecule as shown in the respective line in column 5 of Table I, application no. 11, preferably the coding region thereof, or a homolog or a fragment thereof, and being depicted in the same respective line as said Ymr013c, or a functional equivalent or a homolog thereof as shown in column 8 of Table I, application no. 11, preferably the coding region thereof, particularly a homolog or functional equivalent as shown in column 8 of Table I B, application no. 11, and being depicted in the same respective line as said Ymr013c, and preferably the activity is increased plastidic, or
[57821] (b) a polypeptide comprising a polypeptide, a consensus sequence or at least a polypeptide motif as shown in the respective line in column 5 of Table II or in column 8 of Table IV, application no. 11, respectively, and being depicted in the same respective line as said Ymr013c, or a functional equivalent or a homolog thereof as depicted in column 8 of Table II, application no. 11, preferably a homolog or functional equivalent as depicted in column 8 of Table II B, application no. 11, and being depicted in the same respective line as said Ymr013c, and preferably the activity is increased plastidic.

[57822] Accordingly, in one embodiment, the molecule which activity is to be increased in the process of the invention is the gene product with an activity as a “ymr013c-protein”, preferably it is the molecule of section (a) or (b) of this paragraph.

[57823] In particular, it was observed that in plants, especially in Arabidopsis thaliana, increasing or generating the activity of a gene product plastidic with the activity of a “ymr013c-protein”, preferably being encoded by a gene comprising the nucleic acid sequence SEQ ID NO. 91958, preferably the coding region thereof, conferred the production of or the increase in palmitic acid compared with the wild type control.

[57824] The nucleic acid sequence of Ypl271w from Saccharomyces cerevisiae, e.g. as shown in the respective line in column 5 of Table I, application no. 11, has been published in A. And the activity of the gene product thereof is the activity of ATPase epsilon subunit.

[57825] Accordingly, in one embodiment, the process of the present invention for producing palmitic acid in a non-human organism, like a microorganism or a plant or a part thereof, comprises increasing or generating the activity of a gene product with the activity of a gene product conferring the activity of “ATPase epsilon subunit”, especially from Saccharomyces cerevisiae or its functional equivalent or its homolog, e.g. the increase of
[57826] (a) a gene product of a gene comprising the nucleic acid molecule as shown in the respective line in column 5 of Table I, application no. 11, preferably the coding region thereof, or a homolog or a fragment thereof, and being depicted in the same respective line as said Ypl271w, or a functional equivalent or a homolog thereof as shown in column 8 of Table I, application no. 11, preferably the coding region thereof, particularly a homolog or functional equivalent as shown in column 8 of Table I B, application no. 11, and being depicted in the same respective line as said Ypl271w, and preferably the activity is increased plastidic, or
[57827] (b) a polypeptide comprising a polypeptide, a consensus sequence or at least a polypeptide motif as shown in the respective line in column 5 of Table II or in column 8 of Table IV, application no. 11, respectively, and being depicted in the same respective line as said Ypl271w, or a functional equivalent or a homolog thereof as depicted in column 8 of Table II, application no. 11, preferably a homolog or functional equivalent as depicted in column 8 of Table II B, application no. 11, and being depicted in the same respective line as said Ypl271w, and preferably the activity is increased plastidic.

[57828] Accordingly, in one embodiment, the molecule which activity is to be increased in the process of the invention is the gene product with an activity as a “ATPase epsilon subunit”, preferably it is the molecule of section (a) or (b) of this paragraph.

[57829] In particular, it was observed that in plants, especially in Arabidopsis thaliana, increasing or generating the activity of a gene product plastidic with the activity of a “ATPase epsilon subunit”, preferably being encoded by a gene comprising the nucleic acid sequence SEQ ID NO. 118212, preferably the coding region thereof, conferred the production of or the increase in palmitic acid compared with the wild type control.

[57830] The nucleic acid sequence of 49747384_SOYBEAN from Glycine max, e.g. as shown in the respective line in column 5 of Table I, application no. 11, is unpublished. And the activity of the gene product thereof is the activity of 49747384_SOYBEAN-protein.

[57831] Accordingly, in one embodiment, the process of the present invention for producing palmitic acid in a non-human organism, like a microorganism or a plant or a part thereof, comprises increasing or generating the activity of a gene product with the activity of a gene product conferring the activity of “49747384_SOYBEAN-protein”, especially from Glycine max or its functional equivalent or its homolog, e.g. the increase of
[57832] (a) a gene product of a gene comprising the nucleic acid molecule as shown in the respective line in column 5 of Table I, application no. 11, preferably the coding region thereof, or a homolog or a fragment thereof, and being depicted in the same respective line as said 49747384_SOYBEAN, or a functional equivalent or a homolog thereof as shown in column 8 of Table I, application no. 11, preferably the coding region thereof, particularly a homolog or functional equivalent as shown in column 8 of Table I B, application no. 11, and being depicted in the same respective line as said 49747384_SOYBEAN, and preferably the activity is increased non-targeted, or
[57833] (b) a polypeptide comprising a polypeptide, a consensus sequence or at least a polypeptide motif as shown in the respective line in column 5 of Table II or in column 8 of Table IV, application no. 11, respectively, and being depicted in the same respective line as said 49747384_SOYBEAN, or a functional equivalent or a homolog thereof as depicted in column 8 of Table II, application no. 11, preferably a homolog or functional equivalent as depicted in column 8 of Table II B, application no. 11, and being depicted in the same respective line as said 49747384_SOYBEAN, and preferably the activity is increased non-targeted.

[57834] Accordingly, in one embodiment, the molecule which activity is to be increased in the process of the invention is the gene product with an activity as a “49747384_SOYBEAN-protein”, preferably it is the molecule of section (a) or (b) of this paragraph.

[57835] In particular, it was observed that in plants, especially in Arabidopsis thaliana, increasing or generating the activity of a gene product non-targeted with the activity of a “49747384_SOYBEAN-protein”, preferably being encoded by a gene comprising the nucleic acid sequence SEQ ID NO. 69, preferably the coding region thereof, conferred the production of or the increase in palmitic acid compared with the wild type control.

[57836] The nucleic acid sequence of 59582753_SOYBEAN from Glycine max, e.g. as shown in the respective line in column 5 of Table I, application no. 11, is unpublished. And the activity of the gene product thereof is the activity of glucose-6-phosphate 1-dehydrogenase.

[57837] Accordingly, in one embodiment, the process of the present invention for producing palmitic acid in a non-human organism, like a microorganism or a plant or a part thereof, comprises increasing or generating the activity of a gene product with the activity of a gene product conferring the activity of “glucose-6-phosphate 1-dehydrogenase”, especially from Glycine max or its functional equivalent or its homolog, e.g. the increase of
[57838] (a) a gene product of a gene comprising the nucleic acid molecule as shown in the respective line in column 5 of Table I, application no. 11, preferably the coding region thereof, or a homolog or a fragment thereof, and being depicted in the same respective line as said 59582753_SOYBEAN, or a functional equivalent or a homolog thereof as shown in column 8 of Table I, application no. 11, preferably the coding region thereof, particularly a homolog or functional equivalent as shown in column 8 of Table I B, application no. 11, and being depicted in the same respective line as said 59582753_SOYBEAN, and preferably the activity is increased plastidic, or
[57839] (b) a polypeptide comprising a polypeptide, a consensus sequence or at least a polypeptide motif as shown in the respective line in column 5 of Table II or in column 8 of Table IV, application no. 11, respectively, and being depicted in the same respective line as said 59582753_SOYBEAN, or a functional equivalent or a homolog thereof as depicted in column 8 of Table II, application no. 11, preferably a homolog or functional equivalent as depicted in column 8 of Table II B, application no. 11, and being depicted in the same respective line as said 59582753_SOYBEAN, and preferably the activity is increased plastidic.

[57840] Accordingly, in one embodiment, the molecule which activity is to be increased in the process of the invention is the gene product with an activity as a “glucose-6-phosphate 1-dehydrogenase”, preferably it is the molecule of section (a) or (b) of this paragraph.

[57841] In particular, it was observed that in plants, especially in Arabidopsis thaliana, increasing or generating the activity of a gene product plastidic with the activity of a “glucose-6-phosphate 1dehydrogenase”, preferably being encoded by a gene comprising the nucleic acid sequence SEQ ID NO. 16883, preferably the coding region thereof, conferred the production of or the increase in palmitic acid compared with the wild type control.

[57842] [0105.1.8.11] to [0107.1.8.11] for the disclosure of these paragraphs see [0105.1.8.8] to [0107.1.8.8] above.

[57843] A protein having an activity conferring an increase in the amount or level of the fine chemical palmitic acid, upon targeting to the plastids or mitochondria or upon non-targeting, preferably has the structure of the respective polypeptide described herein, in particular of the polypeptides comprising the consensus sequence or at least one polypeptide motifs as shown in the respective line in Table IV, application no. 11, column 8 or of the polypeptide comprising an amino acid sequence as disclosed in the respective line in Table II, application no. 11, columns 5 or 8, or homologs or fragments thereof as described herein, or is encoded by the nucleic acid molecule characterized herein or the nucleic acid molecule according to the invention, for example by the nucleic acid molecule as shown in the respective line in Table I, application no. 11, columns 5 or 8, preferably the coding region thereof, or homologs or fragments thereof and has the herein mentioned activity.

[57844] [0109.1.8.11] to [0110.1.8.11] for the disclosure of these paragraphs see [0109.1.8.8] to [0110.1.8.8] above.

[57845] In one embodiment, the process of the present invention comprises one or more of the following steps
[57846] (a) stabilizing a protein conferring the generation or increased expression of a protein encoded by the nucleic acid molecule of the invention or of the polypeptide of the invention, e.g. of a polypeptide having the activity selected from the group consisting of 2-C-methyl-D-erythritol 4-phosphate cytidylyltransferase, 3-ketoacyl-CoA thiolase, 49747384_SOYBEAN-protein, AAS bifunctional protein, ABC metal ion transporter substrate-binding protein, acid phosphatase precursor, acid shock protein, aconitate hydratase, acyl transferase, arginine decarboxylase, aromatic acid decarboxylase, At1g19800-protein, At1g23110-protein, At2g45420-protein, ATPase epsilon subunit, b0050-protein, b1234-protein, b1248-protein, b1330-protein, b1670-protein, b1837-protein, b2032-protein, b2099-protein, b2107-protein, b2399-protein, b2682-protein, b2849-protein, b3814-protein, bifunctional protein (phosphoribosyltransferase and regulatory protein), branched chain amino acid ABC transporter ATP-binding protein, calcium-dependent protein kinase, carbamoyl-phosphate synthase subunit, carbon dioxide concentrating mechanism protein, cation-transporting ATPase, CCAAT-binding transcription factor, chlorophyllase, colanic acid biosynthesis protein, coproporphyrinogen III oxidase, DnaJ-like chaperone, ethanolamine utilization protein, F-box protein, Fe—S subunit of oxidoreductase, flavodoxin, glucose-6-phosphate 1-dehydrogenase, glutaredoxin, glutathione S-transferase, glycerol-3-phosphate dehydrogenase, heat shock transcription factor, HesB/YadR/YfhF family protein, homocitrate synthase, lipoprotein precursor, metal-dependent hydrolase, monothiol glutaredoxin, NADH-quinone oxidoreductase subunit, nitrate/nitrite transport protein, oxidoreductase, peptidyl-prolyl cis-trans isomerase, permease protein of ABC transporter, phosphate import ATP-binding protein, phosphoadenosine phosphosulfate reductase , phosphoribosylformyl glycinamidine synthase subunit, protein kinase, protein phosphatase, purine nucleoside phosphorylase, recombinase A, sll1032-protein, sodium/proton antiporter, ThiF family protein, threonine dehydratase, threonine efflux protein, transcription factor, and ymr013c-protein, or of a polypeptide as indicated in the respective line in Table II, application no. 11, columns 5 or 8, or its homologs or fragments, and conferring the production of or an increase in palmitic acid, respectively; and/or
[57847] (b) stabilizing a mRNA conferring the generation or increased expression of a FCRP, e.g. protein encoded by the nucleic acid molecule of the invention or its homologs or fragments, or of a mRNA encoding the polypeptide of the present invention having the hereinmentioned activity selected from the group consisting of said activities mentioned in (a) and conferring the production of or an increase in palmitic acid, respectively; and/or
[57848] (c) increasing the specific activity of a protein conferring the increased expression of a FCRP, e.g. a protein encoded by the nucleic acid molecule of the invention or of the polypeptide of the present invention having herein-mentioned palmitic acid generating or increasing activity, respectively, e.g. of a polypeptide having the activity of a protein as indicated in the respective line in Table II, application no. 11, columns 5 or 8, or its homologs or fragments, or decreasing the inhibitory regulation of the polypeptide of the invention; and/or
[57849] (d) generating or increasing the expression of an endogenous or artificial transcription factor mediating the expression of a protein conferring the generation or increased expression of a FCRP, e.g. a protein encoded by the nucleic acid molecule of the invention or of the polypeptide of the invention having herein-mentioned activity selected from the group consisting of said activities mentioned in (a) and conferring a palmitic acid increasing activity, respectively, e.g. of a polypeptide having the activity of a protein as indicated in the respective line in Table II, application no. 11, columns 5 or 8 or its homologs; and/or
[57850] (e) stimulating activity of a protein conferring the increased expression of a FCRP, e.g. a protein encoded by the nucleic acid molecule of the present invention or a polypeptide of the present invention having herein-mentioned activity selected from the group consisting of said activities mentioned in (a) and conferring a palmitic acid increasing activity, respectively, e.g. of a polypeptide having the activity of a protein as indicated in the respective line in Table II, application no. 11, columns 5 or 8, or its homologs or fragments, by adding one or more exogenous inducing factors to the non-human organism or parts thereof; and/or
[57851] (f) expressing a transgenic gene encoding a protein conferring the increased expression of a FCRP, e.g. a polypeptide encoded by the nucleic acid molecule of the present invention or a polypeptide of the present invention, having herein-mentioned activity selected from the group consisting of said activities mentioned in (a) and conferring a palmitic acid increasing activity, respectively, e.g. of a polypeptide having the activity of a protein as indicated in the respective line in Table II, application no. 11, columns 5 or 8, or its homologs or fragments, and/or
[57852] (g) increasing the copy number of a gene conferring the increased expression of a nucleic acid molecule encoding a FCRP, e.g. a polypeptide encoded by the nucleic acid molecule of the invention or the polypeptide of the invention having herein-mentioned activity selected from the group consisting of said activities mentioned in (a) and conferring a palmitic acid increasing activity, respectively, e.g. of a polypeptide having the activity of a protein as indicated in the respective line in Table II, application no. 11, columns 5 or 8, or its homologs or fragments; and/or
[57853] (h) increasing the expression of the endogenous gene encoding the FCRP, polypeptide of the invention, e.g. a polypeptide encoded by the nucleic acid molecule of the invention or the polypeptide of the invention having herein-mentioned activity selected from the group consisting of said activities mentioned in (a) and conferring a palmitic acid; increasing activity, respectively, e.g. of a polypeptide having the activity of a protein as indicated in the respective line in Table II, application no. 11, columns 5 or 8, or its homologs or fragments, by adding positive expression or removing negative expression elements, e.g. homologous recombination can be used to either introduce positive regulatory elements like for plants the 35S enhancer into the promoter or to remove repressor elements form regulatory regions. Further gene conversion methods can be used to disrupt repressor elements or to enhance to activity of positive elements. Positive elements can be randomly introduced in plants by T-DNA or transposon mutagenesis and lines can be identified in which the positive elements have be integrated near to a gene of the invention, the expression of which is thereby enhanced; and/or
[57854] (i) modulating growth conditions of the non-human organism in such a manner, that the expression or activity of the gene encoding the FCRP, e.g. a protein of the invention or the protein itself is enhanced, for example microorganisms or plants can be grown for example under a higher temperature regime leading to an enhanced expression of heat shock proteins, which can lead to an enhanced palmitic acid production, respectively; and/or
[57855] (j) selecting of non-human organisms with especially high activity of the proteins of the invention from natural or from mutagenized resources and breeding them into the target organisms, e.g. the elite crops; and/or
[57856] (k) directing a protein encoded by the nucleic acid molecule of the invention or of the polypeptide of the present invention having herein-mentioned activity selected from the group consisting of said activities mentioned in (a) and conferring a palmitic acid increasing activity, respectively, e.g. of a polypeptide having the activity of a protein as indicated in the respective line in Table II, application no. 11, columns 5 or 8, or its homologs or fragments, if for the corresponding nucleic acid molecule in the respective line in column 6 of Table I the term “plastidic” is indicated, to the plastids by the addition of a plastidial targeting sequence or if for the corresponding nucleic acid molecule in the respective line in column 6 of Table I the term “mitochondrial” is indicated, to the mitochondria by the addition of a mitochondrial targeting sequence; and/or
[57857] (l) generating the expression of a protein encoded by the nucleic acid molecule of the invention or of the polypeptide of the present invention having herein-mentioned activity selected from the group consisting of said activities mentioned in (a) and conferring a palmitic acid increasing activity, respectively, e.g. of a polypeptide having the activity of a protein as indicated in the respective line in Table II, application no. 11, columns 5 or 8, or its homologs or fragments, if for the corresponding nucleic acid molecule in the respective line in column 6 of Table I the term “plastidic” or “mitochondrial” is indicated, in these organelles by the stable or transient transformation, advantageously stable transformation, of organelles, preferably plastids or mitochondria, with an inventive nucleic acid sequence preferably in form of an expression cassette containing said sequence leading to the expression of the nucleic acids or polypeptides of the invention in the respective organelle; and/or
[57858] (m) generating the expression of a protein encoded by the nucleic acid molecule of the invention or of the polypeptide of the present invention having herein-mentioned activity selected from the group consisting of said activities mentioned in (a) and conferring a palmitic acid increasing activity, respectively, e.g. of a polypeptide having the activity of a protein as indicated in the respective line in Table II, application no. 11, columns 5 or 8, or its homologs or fragments, if for the corresponding nucleic acid molecule in the respective line in column 6 of Table I the term “plastidic” or “mitochondrial” is indicated, in these organelles by integration of a nucleic acid of the invention into the genome of the respective organelle under control of preferable a promoter selective for the respective organelle.

[57859] Preferably, said mRNA is the coding region of the nucleic acid molecule of the present invention and/or the protein conferring the increased expression of a protein encoded by the coding region of the nucleic acid molecule of the present invention alone or linked to a transit nucleic acid sequence or transit peptide encoding nucleic acid sequence or the polypeptide having the herein mentioned activity, e.g. conferring the generation of or increase of palmitic acid, respectively, after increasing the expression or activity of the encoded polypeptide, non-targeted or in organelles such as plastids and/or mitochondria, preferably plastids, or having the activity of a polypeptide having an activity as the protein as shown in the respective line in Table II, application no. 11, column 3, or its homologs. Preferably the increase of palmitic acid, respectively, takes place non-targeted or in plastids and/or mitochondria, preferably non-targeted or in plastids.

[57860] [0113.1.8.11] to [0122.1.8.11] for the disclosure of these paragraphs see [0113.1.8.8] to [0122.1.8.8] above.

[57861] The activation of an endogenous polypeptide having above-mentioned activity, e.g. having the activity of a protein as shown in the respective line in Table II, application no. 11, column 3 or of the polypeptide of the invention, e.g. conferring the increase of the fine chemical palmitic acid, respectively, by increase of expression or activity in the cytoplasm, and/or in the cytosol, and/or in an organelle, such as plastids or mitochondria, can also be increased by introducing a synthetic transcription factor, which binds close to the coding region of the gene encoding the protein as shown in the respective line in Table II, application no. 11, column 5 or 8, or homologs or fragments thereof, and activates its transcription. A chimeric zinc finger protein can be constructed, which comprises a specific DNA-binding domain and an activation domain as e.g. the VP16 domain of Herpes Simplex virus. The specific binding domain can bind to the regulatory region of the gene encoding the protein as shown in the respective line in Table II, application no. 11, column 5 or 8, or homologs or fragments thereof. The expression of the chimeric transcription factor in a non-human organism, in particular in a plant, leads to a specific expression of the protein as shown in the respective line in Table II, application no. 11, column 5 or 8, or homologs or fragments thereof, see e.g. in WO01/52620, Oriz, Proc. Natl. Acad. Sci. USA 99, 13290 (2002), or Guan, Proc. Natl. Acad. Sci. USA 99, 13296 (2002).

[57862] [0124.1.8.11] to [0127.1.8.11] for the disclosure of these paragraphs see [0124.1.8.8] to [0127.1.8.8] above.

[57863] Owing to the introduction of a gene or a plurality of genes conferring the expression of the nucleic acid molecule of the invention or the polypeptide of the invention, for example the nucleic acid construct mentioned below, or encoding the protein as shown in the respective line in Table II, application no. 11, column 5 or 8, or homologs or fragments thereof, into a non-human organism alone or in combination with other genes, it is possible not only to increase the biosynthetic flux towards the end product, but also to increase, modify or create de novo an advantageous, preferably novel metabolites composition in the non-human organism, e.g. an advantageous composition comprising a higher content of (from a viewpoint of nutritional physiology limited) palmitic acid and if desired other fatty acids, and/or other metabolites, in free or bound form.

[57864] for the disclosure of this paragraph see [0129.1.8.8] above.

[57865] Accordingly, in one embodiment, the process according to the invention relates to a process, which comprises:
[57866] (a) providing a non-human organism, preferably a microorganism, a plant cell, a plant tissue, a plant or a part thereof, more preferably a microorganism, a plant tissue, a plant or a part thereof;
[57867] (b) increasing the activity of a protein as shown in the respective line in Table II, application no. 11, column 3 or of a polypeptide being encoded by the respective nucleic acid molecule of the present invention and described below, e.g. conferring an increase of the fine chemical palmitic acid, respectively, in the non-human organism, preferably in the microorganism, the plant cell, the plant tissue, the plant or a part thereof, more preferably a microorganism, a plant tissue, a plant or a part thereof, especially cytoplasmic or in an organelle, like plastids or mitochondria,
[57868] (c) growing the non-human organism, preferably the microorganism, the plant cell, the plant tissue, the plant or a part thereof, under conditions which permit the production of said fine chemical in the non-human organism, preferably the microorganism, the plant cell, the plant tissue, the plant or a part thereof; and
[57869] (d) if desired, recovering, optionally isolating, said fine chemical, in free and/or bound form, and, optionally further free and/or bound fatty acids, and/or other metabolites synthesized by the non-human organism, the microorganism, the plant cell, the plant tissue, the plant or a part thereof.

[57870] [0131.1.8.11] to [0139.1.8.11] for the disclosure of these paragraphs see [0131.1.8.8] to [0139.1.8.8] above.

[57871] In another embodiment, the invention relates to a (isolated) nucleic acid molecule, which comprises a nucleic acid molecule selected from the group consisting of:
[57872] (a) a nucleic acid molecule encoding a polypeptide shown in Table II, application no. 11, column 5 or 8, preferably shown in Table II B, application no. 11, column 8, or a homolog or a fragment thereof;
[57873] (b) a nucleic acid molecule shown in Table I, application no. 11, column 5 or 8, preferably shown in Table I B, application no. 11, column 8, preferably the coding region thereof, or a homolog or a fragment thereof;
[57874] (c) a nucleic acid molecule, which, as a result of the degeneracy of the genetic code, can be derived from a polypeptide sequence depicted in column 5 or 8 of Table II, application no. 11, preferably in column 8 of Table II B, application no. 11;
[57875] (d) a nucleic acid molecule having at least 30% identity, preferably at least 40%, 50%, 60%, 70%, 75%, 80%, 85%, 90%, 95%, 96%, 97%, 98%, 99%, 99.5%, with the nucleic acid molecule sequence of a polynucleotide comprising the nucleic acid molecule shown in column 5 or 8 of Table I, application no. 11, preferably shown in column 8 of Table I B, application no. 11, preferably the coding region thereof;
[57876] (e) a nucleic acid molecule encoding a polypeptide having at least 30% identity, preferably at least 40%, 50% 60%, 70%, 75%, 80%, 85%, 90%, 95%, 96%, 97%, 98%, 99%, 99.5%, identity with the amino acid sequence of the polypeptide encoded by the nucleic acid molecule of (a), (b), (c) or (d);
[57877] (f) a nucleic acid molecule which hybridizes with a nucleic acid molecule of (a), (b), (c), (d) or (e) under stringent hybridization conditions;
[57878] (g) a nucleic acid molecule encoding a polypeptide which can be isolated with the aid of monoclonal or polyclonal antibodies made against a polypeptide encoded by one of the nucleic acid molecules of (a), (b), (c), (d), (e) or (f);
[57879] (h) a nucleic acid molecule encoding a polypeptide comprising the consensus sequence or one or more polypeptide motifs as shown in column 8 of Table IV, application no. 11;
[57880] (i) a nucleic acid molecule encoding a polypeptide having the activity represented by a respective protein as depicted in column 5 of Table II, application no. 11;
[57881] (j) a nucleic acid molecule comprising a polynucleotide which is obtained by amplifying a cDNA library or a genomic library using the primers in Table III, application no. 11, column 8;
[57882] and
[57883] (k) nucleic acid molecule which is obtainable by screening a suitable nucleic acid library, especially a cDNA library and/or a genomic library, under stringent hybridization conditions with a probe comprising one of the sequences of the nucleic acid molecule of (a), (b), (c), (d), (e), (f), (g), (h), (i) or (j) or with a fragment of at least 15 nt, preferably 20 nt, 30 nt, 50 nt, 100 nt, 200 nt,500 nt, 1000 nt, 1500 nt, 2000 nt or 3000 nt of the nucleic acid molecule characterized in (a), (b), (c), (d), (e), (f), (g), (h), (i) or (j);
[57884] or a nucleic acid molecule comprising a sequence which is complementary thereto.
   (All the references to Tables I to IV are references to the corresponding lines of Tables I to IV.)

[57885] In a preferred embodiment thereof said nucleic acid molecule according to (a), (b), (c), (d), (e), (f), (g), (h), (i), (j) or (k) encodes a polypeptide which has the activity of the respective polypeptide represented by a protein comprising a polypeptide as depicted in the respective line in column 5 of Table II, application no. 11.

[57886] In another preferred embodiment thereof said nucleic acid molecule according to (a), (b), (c), (d), (e), (f), (g), (h), (i), (j) or (k) confers a generation or an increase of the respective fine chemical in a non-human organism or a part thereof as compared to a corresponding wild-type non-human organism or part thereof.

[57887] In another preferred embodiment thereof said nucleic acid molecule according to (a), (b), (c), (d), (e), (f), (g), (h), (i), (j) or (k) encodes a polypeptide which has the activity of the respective polypeptide represented by a protein as depicted in the respective line in column 5 of Table II application no. 11 and confers a generation or an increase of the respective fine chemical in a non-human organism or a part thereof as compared to a corresponding wild-type non-human organism or part thereof.

[57888] In another embodiment, the invention relates to a (isolated) nucleic acid molecule, which comprises a nucleic acid molecule selected from the group consisting of:
[57889] (a) a nucleic acid molecule encoding a polypeptide shown in Table II, column 5 or 8, application no. 11, preferably shown in Table II A, application no. 11, in column 5 or in Table II A, application no. 11, column 8 or in Table II B, application no. 11, column 8, or a homolog or a fragment thereof;
[57890] (b) a nucleic acid molecule shown in Table I, application no. 11, column 5 or 8, preferably shown in Table I A, application no. 11, in column 5 or in Table I A, application no. 11, column 8 or in Table I B, application no. 11, column 8, preferably the coding region thereof, or a homolog or a fragment thereof;
[57891] (c) a nucleic acid molecule, which, as a result of the degeneracy of the genetic code, can be derived from a polypeptide sequence depicted in column 5 or 8 of Table II, application no. 11, preferably shown in Table II A, application no. 11, in column 5 or in Table II A, application no. 11, column 8 or in Table II B, application no. 11, column 8;
[57892] (d) a nucleic acid molecule having at least 30% identity, preferably at least 40%, 50%, 60%, 70%, 75%, 80%, 85%, 90%, 95%, 96%, 97%, 98%, 99%, 99.5%, with the nucleic acid molecule sequence of a polynucleotide comprising the nucleic acid molecule shown in column 5 or 8 of Table I, application no. 11, preferably shown in Table I A, application no. 11, in column 5 or in Table I A, application no. 11, column 8 or in Table I B column 8, preferably the coding region thereof;
[57893] (e) a nucleic acid molecule encoding a polypeptide having at least 30% identity, preferably at least 40%, 50% 60%, 70%, 75%, 80%, 85%, 90%, 95%, 96%, 97%, 98%, 99%, 99.5%, identity with the amino acid sequence of the polypeptide encoded by the nucleic acid molecule of (a), (b), (c) or (d);
[57894] (f) a nucleic acid molecule which hybridizes with a nucleic acid molecule of (a), (b), (c), (d) or (e) under stringent hybridization conditions;
[57895] (g) a nucleic acid molecule encoding a polypeptide which can be isolated with the aid of monoclonal or polyclonal antibodies made against a polypeptide encoded by one of the nucleic acid molecules of (a), (b), (c), (d), (e) or (f);
[57896] (h) a nucleic acid molecule encoding a polypeptide comprising the consensus sequence or one or more polypeptide motifs as shown in column 8 of Table IV, application no. 11;
[57897] (i) a nucleic acid molecule encoding a polypeptide having the activity represented by a respective protein as depicted in column 5 of Table II, application no. 11;
[57898] (j) a nucleic acid molecule comprising a polynucleotide which is obtained by amplifying a cDNA library or a genomic library using the primers in Table III, application no. 11, column 8;
[57899] and
[57900] (k) nucleic acid molecule which is obtainable by screening a suitable nucleic acid library, especially a cDNA library and/or a genomic library, under stringent hybridization conditions with a probe comprising one of the sequences of the nucleic acid molecule of (a), (b), (c), (d), (e), (f), (g), (h), (i) or (j) or with a fragment thereof having at least 15 nt, preferably 20 nt, 30 nt, 50 nt, 100 nt, 200 nt,500 nt, 1000 nt, 1500 nt, 2000 nt or 3000 nt of the nucleic acid molecule complementary to a nucleic acid sequence characterized in (a), (b), (c), (d), (e), (f), (g), (h), (i) or (j);
[57901] or a nucleic acid molecule comprising a sequence which is complementary thereto;
   whereby, preferably, the nucleic acid molecule according to (a), (b), (c), (d), (e), (f), (g), (h), (i), (j) or (k) distinguishes over the sequence depicted in Table I A and/or I B, application no. 11, column 5 or 8, or the coding regions thereof, by one or more nucleotides (especially but not exceeding 5%, preferably 4%, 3%, 2%, 1%, 0.5%, 0.2% or 0.1%). In an embodiment, the nucleic acid molecule of the invention does not consist of the sequence shown in Table I A and/or I B, application no. 11, column 5 or 8, or the coding region thereof. In another embodiment, the nucleic acid molecule of the present invention, preferably the coding region thereof, is at least 30%, 40%, 50%, 60%, 70%, 80%, 90%, 95% identical but less than 100%, 99.999%, 99.99%, 99.9%, 99%, 98%, 97%, 96% or 95% identical to the sequence shown in Table I A and/or I B, application no. 11, column 5 or 8, or the coding region thereof, respectively. In a further embodiment the nucleic acid molecule does not encode the polypeptide sequence shown in Table II A and/or II B, application no. 11, column 5 or 8 but homologs thereof. Accordingly, in one embodiment, the nucleic acid molecule of the present invention encodes in one embodiment a polypeptide which differs at least in one or more amino acids (especially but not exceeding 5%, preferably 4%, 3%, 2%, 1%, 0.5%, 0.2% or 0.1%) from the polypeptide shown in Table II, application no. 11, column 5 or 8 and does not encode a protein of the sequence shown in Table II A and/or II B, application no. 11, column 5 or 8. Accordingly, in one embodiment, the protein encoded by a sequence of a nucleic acid according to (a), (b), (c), (d), (e), (f), (g), (h), (i), (j) or (k) does not consist of the sequence shown in Table I A and/or I B, application no. 11, column 5 or 8, or the coding region thereof. In a further embodiment, the protein of the present invention is at least 30%, 40%, 50%, 60%, 70%, 80%, 90%, 95% identical to protein sequence depicted in Table II A and/or II B, application no. 11, column 5 or 8 but less than 100%, preferably less than 99.999%, 99.99%, 99.9%, 99%, 98%, 97%, 96% or 95% identical to the sequence shown in Table II A and/or II B, application no. 11, column 5 or 8.
   (All the references to Tables I to IV are references to the corresponding lines of Tables I to IV.)

[57902] In a preferred embodiment thereof said nucleic acid molecule according to (a), (b), (c), (d), (e), (f), (g), (h), (i), (j) or (k) encodes a polypeptide which has the activity of the respective polypeptide represented by a protein comprising a polypeptide as depicted in the respective line in column 5 of Table II, application no. 11.

[57903] In another preferred embodiment thereof said nucleic acid molecule according to (a), (b), (c), (d), (e), (f), (g), (h), (i), (j) or (k) confers a generation or an increase of the respective fine chemical in a non-human organism or a part thereof as compared to a corresponding wild-type non-human organism or part thereof.

[57904] In another preferred embodiment thereof said nucleic acid molecule according to (a), (b), (c), (d), (e), (f), (g), (h), (i), (j) or (k) encodes a polypeptide which has the activity of the respective polypeptide represented by a protein as depicted in the respective line in column 5 of Table II, application no. 11, and confers a generation or an increase of the respective fine chemical in a non-human organism or a part thereof as compared to a corresponding wild-type non-human organism or part thereof.

[57905] [0144.1.8.11] to [0155.1.8.11] for the disclosure of these paragraphs see [0144.1.8.8] to [0155.1.8.8] above.

[57906] In a preferred embodiment a nucleic acid construct, for example an expression cassette, comprises upstream, i.e. at the 5′ end of the encoding sequence, a promoter and downstream, i.e. at the 3′ end, a polyadenylation signal and optionally other regulatory elements which are operably linked to the intervening encoding sequence with one of the nucleic acids as depicted in the respective line in Table I, application no. 11, column 5 or 8, preferably the coding region thereof, or a homolog or a fragment thereof. By an operable linkage is meant the sequential arrangement of promoter, encoding sequence, terminator, optionally other regulatory elements and optionally targeting sequences in such a way that each of the regulatory elements/targeting sequence can fulfill its function in the expression of the encoding sequence in due manner. In one embodiment the sequences preferred for operable linkage are targeting sequences for ensuring subcellular localization in organelles, like plastids or mitochondria. However, targeting sequences for ensuring subcellular localization in the endoplasmic reticulum (=ER), in the nucleus, in oil corpuscles or other compartments may also be employed as well as translation promoters such as the 5′ lead sequence in tobacco mosaic virus (Gallie et al., Nucl. Acids Res. 15, 8693 (1987)).

[57907] [0157.1.8.11] for the disclosure of this paragraph see [0157.1.8.8] above.

[57908] In an embodiment, the invention relates to an expression cassette, comprising
[57909] 1) a promoter, preferably a promoter selected from the group consisting of Big35S, PCUbi, Super and USP;
[57910] 2) a nucleic acid molecule selected from the group consisting of
   [57911] (a) a nucleic acid molecule encoding a polypeptide shown in Table II, application no. 11, column 5 or 8, preferably shown in Table II A, application no. 11, column 5, or in Table II A, application no. 11, column 8, or in Table II B, application no. 11, column 8, or a homolog or a fragment thereof;
   [57912] (b) a nucleic acid molecule shown in Table I, application no. 11, column 5 or 8, preferably shown in Table I A, application no. 11, column 5, or in Table I A, application no. 11, column 8, or in Table I B, application no. 11, column 8, preferably the coding region thereof, or a homolog or a fragment thereof;
   [57913] (c) a nucleic acid molecule, which, as a result of the degeneracy of the genetic code, can be derived from a polypeptide sequence depicted in column 5 or 8 of Table II, application no. 11, preferably shown in Table II A, application no. 11, column 5, or in Table II A, application no. 11, column 8, or in Table II B, application no. 11, column 8;
   [57914] (d) a nucleic acid molecule having at least 30% identity, preferably at least 40%, 50%, 60%, 70%, 75%, 80%, 85%, 90%, 95%, 96%, 97%, 98%, 99%, 99.5%, with the nucleic acid molecule sequence of a polynucleotide comprising the nucleic acid molecule shown in column 5 or 8 of Table I, application no. 11, preferably shown in Table I A, application no. 11, column 5, or in Table I A, application no. 11, column 8, or in Table I B, application no. 11, column 8, preferably the coding region thereof;
   [57915] (e) a nucleic acid molecule encoding a polypeptide having at least 30% identity, preferably at least 40%, 50% 60%, 70%, 75%, 80%, 85%, 90%, 95%, 96%, 97%, 98%, 99%, 99.5%, identity with the amino acid sequence of the polypeptide encoded by the nucleic acid molecule of (a), (b), (c) or (d);
   [57916] (f) a nucleic acid molecule which hybridizes with a nucleic acid molecule of (a), (b), (c), (d) or (e) under stringent hybridization conditions;
   [57917] (g) a nucleic acid molecule encoding a polypeptide which can be isolated with the aid of monoclonal or polyclonal antibodies made against a polypeptide encoded by one of the nucleic acid molecules of (a), (b), (c), (d), (e) or (f);
   [57918] (h) a nucleic acid molecule encoding a polypeptide comprising the consensus sequence or one or more polypeptide motifs as shown in column 8 of Table IV, application no. 11;
   [57919] (i) a nucleic acid molecule encoding a polypeptide having the activity represented by a respective protein as depicted in column 5 of Table II, application no. 11;
   [57920] (j) a nucleic acid molecule comprising a polynucleotide which is obtained by amplifying a cDNA library or a genomic library using the primers in Table III, application no. 11, column 8;
   [57921] and
   [57922] (k) nucleic acid molecule which is obtainable by screening a suitable nucleic acid library, especially a cDNA library and/or a genomic library, under stringent hybridization conditions with a probe comprising one of the sequences of the nucleic acid molecule of (a), (b), (c), (d), (e), (f), (g), (h), (i) or (j) or with a fragment of at least 15 nt, preferably 20 nt, 30 nt, 50 nt, 100 nt, 200 nt,500 nt, 1000 nt, 1500 nt, 2000 nt or 3000 nt of the nucleic acid molecule characterized in (a), (b), (c), (d), (e), (f), (g), (h), (i) or (j);
   [57923] or a nucleic acid molecule comprising a sequence which is complementary thereto. and, optionally
[57924] 3) nucleic acid molecule encoding a transit peptide, preferably encoding a plastidal transit peptide or a mitochondrial transit peptide;
   which are operable linked.
   (All the references to Tables I to IV are references to the corresponding lines of Tables I to IV.)

[57925] In a preferred embodiment thereof said nucleic acid molecule according to 2 (a), (b), (c), (d), (e), (f), (g), (h), (i), (j) or (k) encodes a polypeptide which has the activity of the respective polypeptide represented by a protein comprising a polypeptide as depicted in the respective line in column 5 of Table II, application no. 11.

[57926] In another preferred embodiment thereof said nucleic acid molecule according to 2 (a), (b), (c), (d), (e), (f), (g), (h), (i), (j) or (k) confers a generation or an increase of the respective fine chemical in a non-human organism or a part thereof as compared to a corresponding wild-type non-human organism or part thereof.

[57927] In another preferred embodiment thereof said nucleic acid molecule according to 2 (a), (b), (c), (d), (e), (f), (g), (h), (i), (j) or (k) encodes a polypeptide which has the activity of the respective polypeptide represented by a protein as depicted in the respective line in column 5 of Table II application no. 11 and confers a generation or an increase of the respective fine chemical in a non-human organism or a part thereof as compared to a corresponding wild-type non-human organism or part thereof.

[57928] In another embodiment thereof the expression cassette comprises 3) a nucleic acid molecule encoding a transit peptide, preferably encoding a plastidal transit peptide, especially in case in column 6 of Table I, application no. 11, in the same line as of the respective nucleic acid molecule according to 2) “plastidic” is depicted, or encoding a mitochondrial transit peptide, especially in case in column 6 of Table I, application no. 11, in the same line as of the respective nucleic acid molecule according to 2) “mitochondrial” is depicted.

[57929] In another embodiment thereof the expression cassette does not comprise 3) a nucleic acid molecule encoding a transit peptide, especially in case in column 6 of Table I, application no. 11, in the same line as of the respective nucleic acid molecule according to 2) “non-targeted” is depicted.

[57930] In a further embodiment, the invention relates to an expression cassette, comprising
[57931] 1) a promoter, preferably a promoter selected from the group consisting of Big35S, PCUbi, Super and USP;
[57932] 2) a nucleic acid molecule selected from the group consisting of
   [57933] (a) a nucleic acid molecule encoding a polypeptide shown in Table II, application no. 11, column 5 or 8, preferably shown in Table II A, application no. 11, column 5, or in Table II A, application no. 11, column 8, or in Table II B, application no. 11, column 8, or a homolog or a fragment thereof;
   [57934] (b) a nucleic acid molecule shown in Table I, application no. 11, column 5 or 8, preferably shown in Table I A, application no. 11, column 5, or in Table I A, application no. 11, column 8, or in Table I B, application no. 11, column 8, preferably the coding region thereof, or a homolog or a fragment thereof;
   [57935] (c) a nucleic acid molecule, which, as a result of the degeneracy of the genetic code, can be derived from a polypeptide sequence depicted in column 5 or 8 of Table II, application no. 11, preferably shown in Table II A, application no. 11, column 5, or in Table II A, application no. 11, column 8, or in Table II B, application no. 11, column 8;
   [57936] (d) a nucleic acid molecule having at least 30% identity, preferably at least 40%, 50%, 60%, 70%, 75%, 80%, 85%, 90%, 95%, 96%, 97%, 98%, 99%, 99.5%, with the nucleic acid molecule sequence of a polynucleotide comprising the nucleic acid molecule shown in column 5 or 8 of Table I, application no. 11, preferably shown in Table I A, application no. 11, column 5, or in Table I A, application no. 11, column 8,or in Table I B, application no. 11, column 8, preferably the coding region thereof;
   [57937] (e) a nucleic acid molecule encoding a polypeptide having at least 30% identity, preferably at least 40%, 50% 60%, 70%, 75%, 80%, 85%, 90%, 95%, 96%, 97%, 98%, 99%, 99.5%, identity with the amino acid sequence of the polypeptide encoded by the nucleic acid molecule of (a), (b), (c) or (d);
   [57938] (f) a nucleic acid molecule which hybridizes with a nucleic acid molecule of (a), (b), (c), (d) or (e) under stringent hybridization conditions;
   [57939] (g) a nucleic acid molecule encoding a polypeptide which can be isolated with the aid of monoclonal or polyclonal antibodies made against a polypeptide encoded by one of the nucleic acid molecules of (a), (b), (c), (d), (e) or (f);
   [57940] (h) a nucleic acid molecule encoding a polypeptide comprising the consensus sequence or one or more polypeptide motifs as shown in column 8 of Table IV, application no. 11;
   [57941] (i) a nucleic acid molecule encoding a polypeptide having the activity represented by a respective protein as depicted in column 5 of Table II, application no. 11;
   [57942] (j) a nucleic acid molecule comprising a polynucleotide which is obtained by amplifying a cDNA library or a genomic library using the primers in Table III, application no. 11, column 8;
   [57943] and
   [57944] (k) nucleic acid molecule which is obtainable by screening a suitable nucleic acid library, especially a cDNA library and/or a genomic library, under stringent hybridization conditions with a probe comprising one of the sequences of the nucleic acid molecule of (a), (b), (c), (d), (e), (f), (g), (h), (i) or (j) or with a fragment of at least 15 nt, preferably 20 nt, 30 nt, 50 nt, 100 nt, 200 nt,500 nt, 1000 nt, 1500 nt, 2000 nt or 3000 nt of the nucleic acid molecule characterized in (a), (b), (c), (d), (e), (f), (g), (h), (i) or (j);
   [57945] or a nucleic acid molecule comprising a sequence which is complementary thereto;
      and, optionally
[57946] 3) nucleic acid molecule encoding a transit peptide, preferably encoding a plastidal transit peptide or a mitochondrial transit peptide;
   which are operable linked and
   whereby, preferably, the nucleic acid molecule according to 2 (a), (b), (c), (d), (e), (f), (g), (h), (i), (j) or (k) distinguishes over the sequence depicted in Table I A and/or I B, application no. 11, column 5 or 8, or the coding region thereof, by one or more nucleotides (especially but not exceeding 5%, preferably 4%, 3%, 2%, 1%, 0.5%, 0.2% or 0.1%). In an embodiment, the nucleic acid molecule of the invention according to 2) does not consist of the sequence shown in Table I A and/or I B, application no. 11, column 5 or 8, or the coding region thereof. In another embodiment, the nucleic acid molecule of the present invention, preferably the coding region thereof, is at least 30%, 40%, 50%, 60%, 70%, 80%, 90%, 95% identical but less than 100%, 99.999%, 99.99%, 99.9%, 99%, 98%, 97%, 96% or 95% identical to the sequence shown in Table I A and/or I B, application no. 11, column 5 or 8, or the coding region thereof, respectively. In a further embodiment the nucleic acid molecule does not encode the polypeptide sequence shown in Table II A and/or II B, application no. 11, column 5 or 8 but homologs thereof.

[57947] Accordingly, in one embodiment, the nucleic acid molecule of the present invention encodes in one embodiment a polypeptide which differs at least in one or more amino acids (especially but not exceeding 5%, preferably 4%, 3%, 2%, 1%, 0.5%, 0.2% or 0.1%) from the polypeptide shown in Table II, application no. 11, column 5 or 8 and does not encode a protein of the sequence shown in Table II A and/or II B, application no. 11, column 5 or 8. Accordingly, in one embodiment, the protein encoded by a sequence of a nucleic acid according to 2(a), (b), (c), (d), (e), (f), (g), (h), (i), (j) or (k) does not consist of the sequence shown in Table I A and/or I B, application no. 11, column 5 or 8, or the coding region thereof. In a further embodiment, the protein of the present invention is at least 30%, 40%, 50%, 60%, 70%, 80%, 90%, 95% identical to protein sequence depicted in Table II A and/or II B, application no. 11, column 5 or 8 but less than 100%, 99.999%, 99.99%, 99.9%, 99%, 98%, 97%, 96% or 95% identical to the sequence shown in Table II A and/or II B, application no. 11, column 5 or 8.

(All the references to Tables I to IV are references to the corresponding lines of Tables I to IV.)

[57948] In a preferred embodiment thereof said nucleic acid molecule according to 2 (a), (b), (c), (d), (e), (f), (g), (h), (i), (j) or (k) encodes a polypeptide which has the activity of the respective polypeptide represented by a protein comprising a polypeptide as depicted in the respective line in column 5 of Table II, application no. 11.

[57949] In another preferred embodiment thereof said nucleic acid molecule according to 2 (a), (b), (c), (d), (e), (f), (g), (h), (i), (j) or (k) confers a generation or an increase of the respective fine chemical in a non-human organism or a part thereof as compared to a corresponding wild-type non-human organism or part thereof.

[57950] In another preferred embodiment thereof said nucleic acid molecule according to 2 (a), (b), (c), (d), (e), (f), (g), (h), (i), (j) or (k) encodes a polypeptide which has the activity of the respective polypeptide represented by a protein as depicted in the respective line in column 5 of Table II application no. 11 and confers a generation or an increase of the respective fine chemical in a non-human organism or a part thereof as compared to a corresponding wild-type non-human organism or part thereof.

[57951] In another embodiment thereof the expression cassette comprises 3) a nucleic acid molecule encoding a transit peptide, preferably encoding a plastidal transit peptide, especially in case in column 6 of Table I, application no. 11, in the same line as of the respective nucleic acid molecule according to 2) “plastidic” is depicted, or encoding a mitochondrial transit peptide, especially in case in column 6 of Table I, application no. 11, in the same line as of the respective nucleic acid molecule according to 2) “mitochondrial” is depicted.

[57952] In another embodiment thereof the expression cassette does not comprise 3) a nucleic acid molecule encoding a transit peptide, especially in case in column 6 of Table I, application no. 11, in the same line as of the respective nucleic acid molecule according to 2) “non-targeted” is depicted.

[57953] In an embodiment the present invention relates to an expresssion cassette comprising a) a promoter, preferably a promoter selected from the group consisting of Big35S, PCUbi, Super and USP, in particular p-PcUBI; and b) the nucleic acid SEQ ID NO. 17451, or a homolog or fragment thereof, or a homolog thereof being depicted in Table I, application no. 11, column 8, in the same line as SEQ ID NO. 17451, preferably the coding region thereof, a homolog or a fragment thereof; which are operable linked.

[57954] In an embodiment thereof the expression cassette comprises in addition c) a nucleic acid molecule encoding a transit peptide, especially a plastidal transit petide in case in Table I, application no. 11, in column 6 in the same line as SEQ ID NO. 17451 is depicted, plastidic is mentioned, or a mitochondrial transit peptide in case in Table I, application no. 11, in column 6 in the same line as SEQ ID NO. 17451 is depicted, mitochondrial is mentioned; which is operable linked, too.

[57955] In another embodiment thereof the expression cassette does not comprise an additional transit peptide in case in Table I, application no. 11, in column 6 in the same line as SEQ ID NO. 17451 is depicted, non-targeted is mentioned.

[57956] In an embodiment the present invention relates to an expresssion cassette comprising a) a promoter, preferably a promoter selected from the group consisting of Big35S, PCUbi, Super and USP, in particular p-PcUBI; and b) the nucleic acid SEQ ID NO. 113651, or a homolog or fragment thereof, or a homolog thereof being depicted in Table I, application no. 11, column 8, in the same line as SEQ ID NO. 113651, preferably the coding region thereof, a homolog or a fragment thereof; which are operable linked.

[57957] In an embodiment thereof the expression cassette comprises in addition c) a nucleic acid molecule encoding a transit peptide, especially a plastidal transit petide in case in Table I, application no. 11, in column 6 in the same line as SEQ ID NO. 113651 is depicted, plastidic is mentioned, or a mitochondrial transit peptide in case in Table I, application no. 11, in column 6 in the same line as SEQ ID NO. 113651 is depicted, mitochondrial is mentioned; which is operable linked, too.

[57958] In another embodiment thereof the expression cassette does not comprise an additional transit peptide in case in Table I, application no. 11, in column 6 in the same line as SEQ ID NO. 113651 is depicted, non-targeted is mentioned.

[57959] In an embodiment the present invention relates to an expresssion cassette comprising a) a promoter, preferably a promoter selected from the group consisting of Big35S, PCUbi, Super and USP, in particular p-PcUBI; and b) the nucleic acid SEQ ID NO. 17637, or a homolog or fragment thereof, or a homolog thereof being depicted in Table I, application no. 11, column 8, in the same line as SEQ ID NO. 17637, preferably the coding region thereof, a homolog or a fragment thereof; which are operable linked.

[57960] In an embodiment thereof the expression cassette comprises in addition c) a nucleic acid molecule encoding a transit peptide, especially a plastidal transit petide in case in Table I, application no. 11, in column 6 in the same line as SEQ ID NO. 17637 is depicted, plastidic is mentioned, or a mitochondrial transit peptide in case in Table I, application no. 11, in column 6 in the same line as SEQ ID NO. 17637 is depicted, mitochondrial is mentioned; which is operable linked, too.

[57961] In another embodiment thereof the expression cassette does not comprise an additional transit peptide in case in Table I, application no. 11, in column 6 in the same line as SEQ ID NO. 17637 is depicted, non-targeted is mentioned.

[57962] In an embodiment the present invention relates to an expresssion cassette comprising a) a promoter, preferably a promoter selected from the group consisting of Big35S, PCUbi, Super and USP, in particular p-PcUBI; and b) the nucleic acid SEQ ID NO. 102086, or a homolog or fragment thereof, or a homolog thereof being depicted in Table I, application no. 11, column 8, in the same line as SEQ ID NO. 102086, preferably the coding region thereof, a homolog or a fragment thereof; which are operable linked.

[57963] In an embodiment thereof the expression cassette comprises in addition c) a nucleic acid molecule encoding a transit peptide, especially a plastidal transit petide in case in Table I, application no. 11, in column 6 in the same line as SEQ ID NO. 102086 is depicted, plastidic is mentioned, or a mitochondrial transit peptide in case in Table I, application no. 11, in column 6 in the same line as SEQ ID NO. 102086 is depicted, mitochondrial is mentioned; which is operable linked, too.

[57964] In another embodiment thereof the expression cassette does not comprise an additional transit peptide in case in Table I, application no. 11, in column 6 in the same line as SEQ ID NO. 102086 is depicted, non-targeted is mentioned.

[57965] In an embodiment the present invention relates to an expresssion cassette comprising a) a promoter, preferably a promoter selected from the group consisting of Big35S, PCUbi, Super and USP, in particular p-PcUBI; and b) the nucleic acid SEQ ID NO. 1061, or a homolog or fragment thereof, or a homolog thereof being depicted in Table I, application no. 11, column 8, in the same line as SEQ ID NO. 1061, preferably the coding region thereof, a homolog or a fragment thereof; which are operable linked.

[57966] In an embodiment thereof the expression cassette comprises in addition c) a nucleic acid molecule encoding a transit peptide, especially a plastidal transit petide in case in Table I, application no. 11, in column 6 in the same line as SEQ ID NO. 1061 is depicted, plastidic is mentioned, or a mitochondrial transit peptide in case in Table I, application no. 11, in column 6 in the same line as SEQ ID NO. 1061 is depicted, mitochondrial is mentioned; which is operable linked, too.

[57967] In another embodiment thereof the expression cassette does not comprise an additional transit peptide in case in Table I, application no. 11, in column 6 in the same line as SEQ ID NO. 1061 is depicted, non-targeted is mentioned.

[57968] In an embodiment the present invention relates to an expresssion cassette comprising a) a promoter, preferably a promoter selected from the group consisting of Big35S, PCUbi, Super and USP, in particular p-PcUBI; and b) the nucleic acid SEQ ID NO. 19419, or a homolog or fragment thereof, or a homolog thereof being depicted in Table I, application no. 11, column 8, in the same line as SEQ ID NO. 19419, preferably the coding region thereof, a homolog or a fragment thereof; which are operable linked.

[57969] In an embodiment thereof the expression cassette comprises in addition c) a nucleic acid molecule encoding a transit peptide, especially a plastidal transit petide in case in Table I, application no. 11, in column 6 in the same line as SEQ ID NO. 19419 is depicted, plastidic is mentioned, or a mitochondrial transit peptide in case in Table I, application no. 11, in column 6 in the same line as SEQ ID NO. 19419 is depicted, mitochondrial is mentioned; which is operable linked, too.

[57970] In another embodiment thereof the expression cassette does not comprise an additional transit peptide in case in Table I, application no. 11, in column 6 in the same line as SEQ ID NO. 19419 is depicted, non-targeted is mentioned.

[57971] In an embodiment the present invention relates to an expresssion cassette comprising a) a promoter, preferably a promoter selected from the group consisting of Big35S, PCUbi, Super and USP, in particular p-PcUBI; and b) the nucleic acid SEQ ID NO. 1623, or a homolog or fragment thereof, or a homolog thereof being depicted in Table I, application no. 11, column 8, in the same line as SEQ ID NO. 1623, preferably the coding region thereof, a homolog or a fragment thereof; which are operable linked.

[57972] In an embodiment thereof the expression cassette comprises in addition c) a nucleic acid molecule encoding a transit peptide, especially a plastidal transit petide in case in Table I, application no. 11, in column 6 in the same line as SEQ ID NO. 1623 is depicted, plastidic is mentioned, or a mitochondrial transit peptide in case in Table I, application no. 11, in column 6 in the same line as SEQ ID NO. 1623 is depicted, mitochondrial is mentioned; which is operable linked, too.

[57973] In another embodiment thereof the expression cassette does not comprise an additional transit peptide in case in Table I, application no. 11, in column 6 in the same line as SEQ ID NO. 1623 is depicted, non-targeted is mentioned.

[57974] In an embodiment the present invention relates to an expresssion cassette comprising a) a promoter, preferably a promoter selected from the group consisting of Big35S, PCUbi, Super and USP, in particular p-PcUBI; and b) the nucleic acid SEQ ID NO. 68657, or a homolog or fragment thereof, or a homolog thereof being depicted in Table I, application no. 11, column 8, in the same line as SEQ ID NO. 68657, preferably the coding region thereof, a homolog or a fragment thereof; which are operable linked.

[57975] In an embodiment thereof the expression cassette comprises in addition c) a nucleic acid molecule encoding a transit peptide, especially a plastidal transit petide in case in Table I, application no. 11, in column 6 in the same line as SEQ ID NO. 68657 is depicted, plastidic is mentioned, or a mitochondrial transit peptide in case in Table I, application no. 11, in column 6 in the same line as SEQ ID NO. 68657 is depicted, mitochondrial is mentioned; which is operable linked, too.

[57976] In another embodiment thereof the expression cassette does not comprise an additional transit peptide in case in Table I, application no. 11, in column 6 in the same line as SEQ ID NO. 68657 is depicted, non-targeted is mentioned.

[57977] In an embodiment the present invention relates to an expresssion cassette comprising a) a promoter, preferably a promoter selected from the group consisting of Big35S, PCUbi, Super and USP, in particular p-PcUBI; and b) the nucleic acid SEQ ID NO. 22921, or a homolog or fragment thereof, or a homolog thereof being depicted in Table I, application no. 11, column 8, in the same line as SEQ ID NO. 22921, preferably the coding region thereof, a homolog or a fragment thereof; which are operable linked.

[57978] In an embodiment thereof the expression cassette comprises in addition c) a nucleic acid molecule encoding a transit peptide, especially a plastidal transit petide in case in Table I, application no. 11, in column 6 in the same line as SEQ ID NO. 22921 is depicted, plastidic is mentioned, or a mitochondrial transit peptide in case in Table I, application no. 11, in column 6 in the same line as SEQ ID NO. 22921 is depicted, mitochondrial is mentioned; which is operable linked, too.

[57979] In another embodiment thereof the expression cassette does not comprise an additional transit peptide in case in Table I, application no. 11, in column 6 in the same line as SEQ ID NO. 22921 is depicted, non-targeted is mentioned.

[57980] In an embodiment the present invention relates to an expresssion cassette comprising a) a promoter, preferably a promoter selected from the group consisting of Big35S, PCUbi, Super and USP, in particular p-PcUBI; and b) the nucleic acid SEQ ID NO. 2935, or a homolog or fragment thereof, or a homolog thereof being depicted in Table I, application no. 11, column 8, in the same line as SEQ ID NO. 2935, preferably the coding region thereof, a homolog or a fragment thereof; which are operable linked.

[57981] In an embodiment thereof the expression cassette comprises in addition c) a nucleic acid molecule encoding a transit peptide, especially a plastidal transit petide in case in Table I, application no. 11, in column 6 in the same line as SEQ ID NO. 2935 is depicted, plastidic is mentioned, or a mitochondrial transit peptide in case in Table I, application no. 11, in column 6 in the same line as SEQ ID NO. 2935 is depicted, mitochondrial is mentioned; which is operable linked, too.

[57982] In another embodiment thereof the expression cassette does not comprise an additional transit peptide in case in Table I, application no. 11, in column 6 in the same line as SEQ ID NO. 2935 is depicted, non-targeted is mentioned.

[57983] In an embodiment the present invention relates to an expresssion cassette comprising a) a promoter, preferably a promoter selected from the group consisting of Big35S, PCUbi, Super and USP, in particular p-PcUBI; and b) the nucleic acid SEQ ID NO. 3279, or a homolog or fragment thereof, or a homolog thereof being depicted in Table I, application no. 11, column 8, in the same line as SEQ ID NO. 3279, preferably the coding region thereof, a homolog or a fragment thereof; which are operable linked.

[57984] In an embodiment thereof the expression cassette comprises in addition c) a nucleic acid molecule encoding a transit peptide, especially a plastidal transit petide in case in Table I, application no. 11, in column 6 in the same line as SEQ ID NO. 3279 is depicted, plastidic is mentioned, or a mitochondrial transit peptide in case in Table I, application no. 11, in column 6 in the same line as SEQ ID NO. 3279 is depicted, mitochondrial is mentioned; which is operable linked, too.

[57985] In another embodiment thereof the expression cassette does not comprise an additional transit peptide in case in Table I, application no. 11, in column 6 in the same line as SEQ ID NO. 3279 is depicted, non-targeted is mentioned.

[57986] In an embodiment the present invention relates to an expresssion cassette comprising a) a promoter, preferably a promoter selected from the group consisting of Big35S, PCUbi, Super and USP, in particular p-PcUBI; and b) the nucleic acid SEQ ID NO. 24232, or a homolog or fragment thereof, or a homolog thereof being depicted in Table I, application no. 11, column 8, in the same line as SEQ ID NO. 24232, preferably the coding region thereof, a homolog or a fragment thereof; which are operable linked.

[57987] In an embodiment thereof the expression cassette comprises in addition c) a nucleic acid molecule encoding a transit peptide, especially a plastidal transit petide in case in Table I, application no. 11, in column 6 in the same line as SEQ ID NO. 24232 is depicted, plastidic is mentioned, or a mitochondrial transit peptide in case in Table I, application no. 11, in column 6 in the same line as SEQ ID NO. 24232 is depicted, mitochondrial is mentioned; which is operable linked, too.

[57988] In another embodiment thereof the expression cassette does not comprise an additional transit peptide in case in Table I, application no. 11, in column 6 in the same line as SEQ ID NO. 24232 is depicted, non-targeted is mentioned.

[57989] In an embodiment the present invention relates to an expresssion cassette comprising a) a promoter, preferably a promoter selected from the group consisting of Big35S, PCUbi, Super and USP, in particular p-PcUBI; and b) the nucleic acid SEQ ID NO. 68849, or a homolog or fragment thereof, or a homolog thereof being depicted in Table I, application no. 11, column 8, in the same line as SEQ ID NO. 68849, preferably the coding region thereof, a homolog or a fragment thereof; which are operable linked.

[57990] In an embodiment thereof the expression cassette comprises in addition c) a nucleic acid molecule encoding a transit peptide, especially a plastidal transit petide in case in Table I, application no. 11, in column 6 in the same line as SEQ ID NO. 68849 is depicted, plastidic is mentioned, or a mitochondrial transit peptide in case in Table I, application no. 11, in column 6 in the same line as SEQ ID NO. 68849 is depicted, mitochondrial is mentioned; which is operable linked, too.

[57991] In another embodiment thereof the expression cassette does not comprise an additional transit peptide in case in Table I, application no. 11, in column 6 in the same line as SEQ ID NO. 68849 is depicted, non-targeted is mentioned.

[57992] In an embodiment the present invention relates to an expresssion cassette comprising a) a promoter, preferably a promoter selected from the group consisting of Big35S, PCUbi, Super and USP, in particular p-PcUBI; and b) the nucleic acid SEQ ID NO. 4102, or a homolog or fragment thereof, or a homolog thereof being depicted in Table I, application no. 11, column 8, in the same line as SEQ ID NO. 4102, preferably the coding region thereof, a homolog or a fragment thereof; which are operable linked.

[57993] In an embodiment thereof the expression cassette comprises in addition c) a nucleic acid molecule encoding a transit peptide, especially a plastidal transit petide in case in Table I, application no. 11, in column 6 in the same line as SEQ ID NO. 4102 is depicted, plastidic is mentioned, or a mitochondrial transit peptide in case in Table I, application no. 11, in column 6 in the same line as SEQ ID NO. 4102 is depicted, mitochondrial is mentioned; which is operable linked, too.

[57994] In another embodiment thereof the expression cassette does not comprise an additional transit peptide in case in Table I, application no. 11, in column 6 in the same line as SEQ ID NO. 4102 is depicted, non-targeted is mentioned.

[57995] In an embodiment the present invention relates to an expresssion cassette comprising a) a promoter, preferably a promoter selected from the group consisting of Big35S, PCUbi, Super and USP, in particular p-PcUBI; and b) the nucleic acid SEQ ID NO. 4348, or a homolog or fragment thereof, or a homolog thereof being depicted in Table I, application no. 11, column 8, in the same line as SEQ ID NO. 4348, preferably the coding region thereof, a homolog or a fragment thereof; which are operable linked.

[57996] In an embodiment thereof the expression cassette comprises in addition c) a nucleic acid molecule encoding a transit peptide, especially a plastidal transit petide in case in Table I, application no. 11, in column 6 in the same line as SEQ ID NO. 4348 is depicted, plastidic is mentioned, or a mitochondrial transit peptide in case in Table I, application no. 11, in column 6 in the same line as SEQ ID NO. 4348 is depicted, mitochondrial is mentioned; which is operable linked, too.

[57997] In another embodiment thereof the expression cassette does not comprise an additional transit peptide in case in Table I, application no. 11, in column 6 in the same line as SEQ ID NO. 4348 is depicted, non-targeted is mentioned.

[57998] In an embodiment the present invention relates to an expresssion cassette comprising a) a promoter, preferably a promoter selected from the group consisting of Big35S, PCUbi, Super and USP, in particular p-PcUBI; and b) the nucleic acid SEQ ID NO. 5318, or a homolog or fragment thereof, or a homolog thereof being depicted in Table I, application no. 11, column 8, in the same line as SEQ ID NO. 5318, preferably the coding region thereof, a homolog or a fragment thereof; which are operable linked.

[57999] In an embodiment thereof the expression cassette comprises in addition c) a nucleic acid molecule encoding a transit peptide, especially a plastidal transit petide in case in Table I, application no. 11, in column 6 in the same line as SEQ ID NO. 5318 is depicted, plastidic is mentioned, or a mitochondrial transit peptide in case in Table I, application no. 11, in column 6 in the same line as SEQ ID NO. 5318 is depicted, mitochondrial is mentioned; which is operable linked, too.

[58000] In another embodiment thereof the expression cassette does not comprise an additional transit peptide in case in Table I, application no. 11, in column 6 in the same line as SEQ ID NO. 5318 is depicted, non-targeted is mentioned.

[58001] In an embodiment the present invention relates to an expresssion cassette comprising a) a promoter, preferably a promoter selected from the group consisting of Big35S, PCUbi, Super and USP, in particular p-PcUBI; and b) the nucleic acid SEQ ID NO. 25498, or a homolog or fragment thereof, or a homolog thereof being depicted in Table I, application no. 11, column 8, in the same line as SEQ ID NO. 25498, preferably the coding region thereof, a homolog or a fragment thereof; which are operable linked.

[58002] In an embodiment thereof the expression cassette comprises in addition c) a nucleic acid molecule encoding a transit peptide, especially a plastidal transit petide in case in Table I, application no. 11, in column 6 in the same line as SEQ ID NO. 25498 is depicted, plastidic is mentioned, or a mitochondrial transit peptide in case in Table I, application no. 11, in column 6 in the same line as SEQ ID NO. 25498 is depicted, mitochondrial is mentioned; which is operable linked, too.

[58003] In another embodiment thereof the expression cassette does not comprise an additional transit peptide in case in Table I, application no. 11, in column 6 in the same line as SEQ ID NO. 25498 is depicted, non-targeted is mentioned.

[58004] In an embodiment the present invention relates to an expresssion cassette comprising a) a promoter, preferably a promoter selected from the group consisting of Big35S, PCUbi, Super and USP, in particular p-PcUBI; and b) the nucleic acid SEQ ID NO. 114083, or a homolog or fragment thereof, or a homolog thereof being depicted in Table I, application no. 11, column 8, in the same line as SEQ ID NO. 114083, preferably the coding region thereof, a homolog or a fragment thereof; which are operable linked.

[58005] In an embodiment thereof the expression cassette comprises in addition c) a nucleic acid molecule encoding a transit peptide, especially a plastidal transit petide in case in Table I, application no. 11, in column 6 in the same line as SEQ ID NO. 114083 is depicted, plastidic is mentioned, or a mitochondrial transit peptide in case in Table I, application no. 11, in column 6 in the same line as SEQ ID NO. 114083 is depicted, mitochondrial is mentioned; which is operable linked, too.

[58006] In another embodiment thereof the expression cassette does not comprise an additional transit peptide in case in Table I, application no. 11, in column 6 in the same line as SEQ ID NO. 114083 is depicted, non-targeted is mentioned.

[58007] In an embodiment the present invention relates to an expresssion cassette comprising a) a promoter, preferably a promoter selected from the group consisting of Big35S, PCUbi, Super and USP, in particular p-PcUBI; and b) the nucleic acid SEQ ID NO. 111155, or a homolog or fragment thereof, or a homolog thereof being depicted in Table I, application no. 11, column 8, in the same line as SEQ ID NO. 111155, preferably the coding region thereof, a homolog or a fragment thereof; which are operable linked.

[58008] In an embodiment thereof the expression cassette comprises in addition c) a nucleic acid molecule encoding a transit peptide, especially a plastidal transit petide in case in Table I, application no. 11, in column 6 in the same line as SEQ ID NO. 111155 is depicted, plastidic is mentioned, or a mitochondrial transit peptide in case in Table I, application no. 11, in column 6 in the same line as SEQ ID NO. 111155 is depicted, mitochondrial is mentioned; which is operable linked, too.

[58009] In another embodiment thereof the expression cassette does not comprise an additional transit peptide in case in Table I, application no. 11, in column 6 in the same line as SEQ ID NO. 111155 is depicted, non-targeted is mentioned.

[58010] In an embodiment the present invention relates to an expresssion cassette comprising a) a promoter, preferably a promoter selected from the group consisting of Big35S, PCUbi, Super and USP, in particular p-PcUBI; and b) the nucleic acid SEQ ID NO. 114231, or a homolog or fragment thereof, or a homolog thereof being depicted in Table I, application no. 11, column 8, in the same line as SEQ ID NO. 114231, preferably the coding region thereof, a homolog or a fragment thereof; which are operable linked.

[58011] In an embodiment thereof the expression cassette comprises in addition c) a nucleic acid molecule encoding a transit peptide, especially a plastidal transit petide in case in Table I, application no. 11, in column 6 in the same line as SEQ ID NO. 114231 is depicted, plastidic is mentioned, or a mitochondrial transit peptide in case in Table I, application no. 11, in column 6 in the same line as SEQ ID NO. 114231 is depicted, mitochondrial is mentioned; which is operable linked, too.

[58012] In another embodiment thereof the expression cassette does not comprise an additional transit peptide in case in Table I, application no. 11, in column 6 in the same line as SEQ ID NO. 114231 is depicted, non-targeted is mentioned.

[58013] In an embodiment the present invention relates to an expresssion cassette comprising a) a promoter, preferably a promoter selected from the group consisting of Big35S, PCUbi, Super and USP, in particular p-PcUBI; and b) the nucleic acid SEQ ID NO. 73719, or a homolog or fragment thereof, or a homolog thereof being depicted in Table I, application no. 11, column 8, in the same line as SEQ ID NO. 73719, preferably the coding region thereof, a homolog or a fragment thereof; which are operable linked.

[58014] In an embodiment thereof the expression cassette comprises in addition c) a nucleic acid molecule encoding a transit peptide, especially a plastidal transit petide in case in Table I, application no. 11, in column 6 in the same line as SEQ ID NO. 73719 is depicted, plastidic is mentioned, or a mitochondrial transit peptide in case in Table I, application no. 11, in column 6 in the same line as SEQ ID NO. 73719 is depicted, mitochondrial is mentioned; which is operable linked, too.

[58015] In another embodiment thereof the expression cassette does not comprise an additional transit peptide in case in Table I, application no. 11, in column 6 in the same line as SEQ ID NO. 73719 is depicted, non-targeted is mentioned.

[58016] In an embodiment the present invention relates to an expresssion cassette comprising a) a promoter, preferably a promoter selected from the group consisting of Big35S, PCUbi, Super and USP, in particular p-PcUBI; and b) the nucleic acid SEQ ID NO. 32648, or a homolog or fragment thereof, or a homolog thereof being depicted in Table I, application no. 11, column 8, in the same line as SEQ ID NO. 32648, preferably the coding region thereof, a homolog or a fragment thereof; which are operable linked.

[58017] In an embodiment thereof the expression cassette comprises in addition c) a nucleic acid molecule encoding a transit peptide, especially a plastidal transit petide in case in Table I, application no. 11, in column 6 in the same line as SEQ ID NO. 32648 is depicted, plastidic is mentioned, or a mitochondrial transit peptide in case in Table I, application no. 11, in column 6 in the same line as SEQ ID NO. 32648 is depicted, mitochondrial is mentioned; which is operable linked, too.

[58018] In another embodiment thereof the expression cassette does not comprise an additional transit peptide in case in Table I, application no. 11, in column 6 in the same line as SEQ ID NO. 32648 is depicted, non-targeted is mentioned.

[58019] In an embodiment the present invention relates to an expresssion cassette comprising a) a promoter, preferably a promoter selected from the group consisting of Big35S, PCUbi, Super and USP, in particular p-PcUBI; and b) the nucleic acid SEQ ID NO. 6674, or a homolog or fragment thereof, or a homolog thereof being depicted in Table I, application no. 11, column 8, in the same line as SEQ ID NO. 6674, preferably the coding region thereof, a homolog or a fragment thereof; which are operable linked.

[58020] In an embodiment thereof the expression cassette comprises in addition c) a nucleic acid molecule encoding a transit peptide, especially a plastidal transit petide in case in Table I, application no. 11, in column 6 in the same line as SEQ ID NO. 6674 is depicted, plastidic is mentioned, or a mitochondrial transit peptide in case in Table I, application no. 11, in column 6 in the same line as SEQ ID NO. 6674 is depicted, mitochondrial is mentioned; which is operable linked, too.

[58021] In another embodiment thereof the expression cassette does not comprise an additional transit peptide in case in Table I, application no. 11, in column 6 in the same line as SEQ ID NO. 6674 is depicted, non-targeted is mentioned.

[58022] In an embodiment the present invention relates to an expresssion cassette comprising a) a promoter, preferably a promoter selected from the group consisting of Big35S, PCUbi, Super and USP, in particular p-PcUBI; and b) the nucleic acid SEQ ID NO. 34044, or a homolog or fragment thereof, or a homolog thereof being depicted in Table I, application no. 11, column 8, in the same line as SEQ ID NO. 34044, preferably the coding region thereof, a homolog or a fragment thereof; which are operable linked.

[58023] In an embodiment thereof the expression cassette comprises in addition c) a nucleic acid molecule encoding a transit peptide, especially a plastidal transit petide in case in Table I, application no. 11, in column 6 in the same line as SEQ ID NO. 34044 is depicted, plastidic is mentioned, or a mitochondrial transit peptide in case in Table I, application no. 11, in column 6 in the same line as SEQ ID NO. 34044 is depicted, mitochondrial is mentioned; which is operable linked, too.

[58024] In another embodiment thereof the expression cassette does not comprise an additional transit peptide in case in Table I, application no. 11, in column 6 in the same line as SEQ ID NO. 34044 is depicted, non-targeted is mentioned.

[58025] In an embodiment the present invention relates to an expresssion cassette comprising a) a promoter, preferably a promoter selected from the group consisting of Big35S, PCUbi, Super and USP, in particular p-Super; and b) the nucleic acid SEQ ID NO. 103958, or a homolog or fragment thereof, or a homolog thereof being depicted in Table I, application no. 11, column 8, in the same line as SEQ ID NO. 103958, preferably the coding region thereof, a homolog or a fragment thereof; which are operable linked.

[58026] In an embodiment thereof the expression cassette comprises in addition c) a nucleic acid molecule encoding a transit peptide, especially a plastidal transit petide in case in Table I, application no. 11, in column 6 in the same line as SEQ ID NO. 103958 is depicted, plastidic is mentioned, or a mitochondrial transit peptide in case in Table I, application no. 11, in column 6 in the same line as SEQ ID NO. 103958 is depicted, mitochondrial is mentioned; which is operable linked, too.

[58027] In another embodiment thereof the expression cassette does not comprise an additional transit peptide in case in Table I, application no. 11, in column 6 in the same line as SEQ ID NO. 103958 is depicted, non-targeted is mentioned.

[58028] In an embodiment the present invention relates to an expresssion cassette comprising a) a promoter, preferably a promoter selected from the group consisting of Big35S, PCUbi, Super and USP, in particular p-Super; and b) the nucleic acid SEQ ID NO. 37400, or a homolog or fragment thereof, or a homolog thereof being depicted in Table I, application no. 11, column 8, in the same line as SEQ ID NO. 37400, preferably the coding region thereof, a homolog or a fragment thereof; which are operable linked.

[58029] In an embodiment thereof the expression cassette comprises in addition c) a nucleic acid molecule encoding a transit peptide, especially a plastidal transit petide in case in Table I, application no. 11, in column 6 in the same line as SEQ ID NO. 37400 is depicted, plastidic is mentioned, or a mitochondrial transit peptide in case in Table I, application no. 11, in column 6 in the same line as SEQ ID NO. 37400 is depicted, mitochondrial is mentioned; which is operable linked, too.

[58030] In another embodiment thereof the expression cassette does not comprise an additional transit peptide in case in Table I, application no. 11, in column 6 in the same line as SEQ ID NO. 37400 is depicted, non-targeted is mentioned.

[58031] In an embodiment the present invention relates to an expresssion cassette comprising a) a promoter, preferably a promoter selected from the group consisting of Big35S, PCUbi, Super and USP, in particular p-Super; and b) the nucleic acid SEQ ID NO. 112111, or a homolog or fragment thereof, or a homolog thereof being depicted in Table I, application no. 11, column 8, in the same line as SEQ ID NO. 112111, preferably the coding region thereof, a homolog or a fragment thereof; which are operable linked.

[58032] In an embodiment thereof the expression cassette comprises in addition c) a nucleic acid molecule encoding a transit peptide, especially a plastidal transit petide in case in Table I, application no. 11, in column 6 in the same line as SEQ ID NO. 112111 is depicted, plastidic is mentioned, or a mitochondrial transit peptide in case in Table I, application no. 11, in column 6 in the same line as SEQ ID NO. 112111 is depicted, mitochondrial is mentioned; which is operable linked, too.

[58033] In another embodiment thereof the expression cassette does not comprise an additional transit peptide in case in Table I, application no. 11, in column 6 in the same line as SEQ ID NO. 112111 is depicted, non-targeted is mentioned.

[58034] In an embodiment the present invention relates to an expresssion cassette comprising a) a promoter, preferably a promoter selected from the group consisting of Big35S, PCUbi, Super and USP, in particular p-Super; and b) the nucleic acid SEQ ID NO. 119135, or a homolog or fragment thereof, or a homolog thereof being depicted in Table I, application no. 11, column 8, in the same line as SEQ ID NO. 119135, preferably the coding region thereof, a homolog or a fragment thereof; which are operable linked.

[58035] In an embodiment thereof the expression cassette comprises in addition c) a nucleic acid molecule encoding a transit peptide, especially a plastidal transit petide in case in Table I, application no. 11, in column 6 in the same line as SEQ ID NO. 119135 is depicted, plastidic is mentioned, or a mitochondrial transit peptide in case in Table I, application no. 11, in column 6 in the same line as SEQ ID NO. 119135 is depicted, mitochondrial is mentioned; which is operable linked, too.

[58036] In another embodiment thereof the expression cassette does not comprise an additional transit peptide in case in Table I, application no. 11, in column 6 in the same line as SEQ ID NO. 119135 is depicted, non-targeted is mentioned.

[58037] In an embodiment the present invention relates to an expresssion cassette comprising a) a promoter, preferably a promoter selected from the group consisting of Big35S, PCUbi, Super and USP, in particular p-Super; and b) the nucleic acid SEQ ID NO. 38226, or a homolog or fragment thereof, or a homolog thereof being depicted in Table I, application no. 11, column 8, in the same line as SEQ ID NO. 38226, preferably the coding region thereof, a homolog or a fragment thereof; which are operable linked.

[58038] In an embodiment thereof the expression cassette comprises in addition c) a nucleic acid molecule encoding a transit peptide, especially a plastidal transit petide in case in Table I, application no. 11, in column 6 in the same line as SEQ ID NO. 38226 is depicted, plastidic is mentioned, or a mitochondrial transit peptide in case in Table I, application no. 11, in column 6 in the same line as SEQ ID NO. 38226 is depicted, mitochondrial is mentioned; which is operable linked, too.

[58039] In another embodiment thereof the expression cassette does not comprise an additional transit peptide in case in Table I, application no. 11, in column 6 in the same line as SEQ ID NO. 38226 is depicted, non-targeted is mentioned.

[58040] In an embodiment the present invention relates to an expresssion cassette comprising a) a promoter, preferably a promoter selected from the group consisting of Big35S, PCUbi, Super and USP, in particular p-Super; and b) the nucleic acid SEQ ID NO. 38266, or a homolog or fragment thereof, or a homolog thereof being depicted in Table I, application no. 11, column 8, in the same line as SEQ ID NO. 38266, preferably the coding region thereof, a homolog or a fragment thereof; which are operable linked.

[58041] In an embodiment thereof the expression cassette comprises in addition c) a nucleic acid molecule encoding a transit peptide, especially a plastidal transit petide in case in Table I, application no. 11, in column 6 in the same line as SEQ ID NO. 38266 is depicted, plastidic is mentioned, or a mitochondrial transit peptide in case in Table I, application no. 11, in column 6 in the same line as SEQ ID NO. 38266 is depicted, mitochondrial is mentioned; which is operable linked, too.

[58042] In another embodiment thereof the expression cassette does not comprise an additional transit peptide in case in Table I, application no. 11, in column 6 in the same line as SEQ ID NO. 38266 is depicted, non-targeted is mentioned.

[58043] In an embodiment the present invention relates to an expresssion cassette comprising a) a promoter, preferably a promoter selected from the group consisting of Big35S, PCUbi, Super and USP, in particular p-Super; and b) the nucleic acid SEQ ID NO. 78154, or a homolog or fragment thereof, or a homolog thereof being depicted in Table I, application no. 11, column 8, in the same line as SEQ ID NO. 78154, preferably the coding region thereof, a homolog or a fragment thereof; which are operable linked.

[58044] In an embodiment thereof the expression cassette comprises in addition c) a nucleic acid molecule encoding a transit peptide, especially a plastidal transit petide in case in Table I, application no. 11, in column 6 in the same line as SEQ ID NO. 78154 is depicted, plastidic is mentioned, or a mitochondrial transit peptide in case in Table I, application no. 11, in column 6 in the same line as SEQ ID NO. 78154 is depicted, mitochondrial is mentioned; which is operable linked, too.

[58045] In another embodiment thereof the expression cassette does not comprise an additional transit peptide in case in Table I, application no. 11, in column 6 in the same line as SEQ ID NO. 78154 is depicted, non-targeted is mentioned.

[58046] In an embodiment the present invention relates to an expresssion cassette comprising a) a promoter, preferably a promoter selected from the group consisting of Big35S, PCUbi, Super and USP, in particular p-Super; and b) the nucleic acid SEQ ID NO. 38300, or a homolog or fragment thereof, or a homolog thereof being depicted in Table I, application no. 11, column 8, in the same line as SEQ ID NO. 38300, preferably the coding region thereof, a homolog or a fragment thereof; which are operable linked.

[58047] In an embodiment thereof the expression cassette comprises in addition c) a nucleic acid molecule encoding a transit peptide, especially a plastidal transit petide in case in Table I, application no. 11, in column 6 in the same line as SEQ ID NO. 38300 is depicted, plastidic is mentioned, or a mitochondrial transit peptide in case in Table I, application no. 11, in column 6 in the same line as SEQ ID NO. 38300 is depicted, mitochondrial is mentioned; which is operable linked, too.

[58048] In another embodiment thereof the expression cassette does not comprise an additional transit peptide in case in Table I, application no. 11, in column 6 in the same line as SEQ ID NO. 38300 is depicted, non-targeted is mentioned.

[58049] In an embodiment the present invention relates to an expresssion cassette comprising a) a promoter, preferably a promoter selected from the group consisting of Big35S, PCUbi, Super and USP, in particular p-Super; and b) the nucleic acid SEQ ID NO. 78753, or a homolog or fragment thereof, or a homolog thereof being depicted in Table I, application no. 11, column 8, in the same line as SEQ ID NO. 78753, preferably the coding region thereof, a homolog or a fragment thereof; which are operable linked.

[58050] In an embodiment thereof the expression cassette comprises in addition c) a nucleic acid molecule encoding a transit peptide, especially a plastidal transit petide in case in Table I, application no. 11, in column 6 in the same line as SEQ ID NO. 78753 is depicted, plastidic is mentioned, or a mitochondrial transit peptide in case in Table I, application no. 11, in column 6 in the same line as SEQ ID NO. 78753 is depicted, mitochondrial is mentioned; which is operable linked, too.

[58051] In another embodiment thereof the expression cassette does not comprise an additional transit peptide in case in Table I, application no. 11, in column 6 in the same line as SEQ ID NO. 78753 is depicted, non-targeted is mentioned.

[58052] In an embodiment the present invention relates to an expresssion cassette comprising a) a promoter, preferably a promoter selected from the group consisting of Big35S, PCUbi, Super and USP, in particular p-Super; and b) the nucleic acid SEQ ID NO. 78953, or a homolog or fragment thereof, or a homolog thereof being depicted in Table I, application no. 11, column 8, in the same line as SEQ ID NO. 78953, preferably the coding region thereof, a homolog or a fragment thereof; which are operable linked.

[58053] In an embodiment thereof the expression cassette comprises in addition c) a nucleic acid molecule encoding a transit peptide, especially a plastidal transit petide in case in Table I, application no. 11, in column 6 in the same line as SEQ ID NO. 78953 is depicted, plastidic is mentioned, or a mitochondrial transit peptide in case in Table I, application no. 11, in column 6 in the same line as SEQ ID NO. 78953 is depicted, mitochondrial is mentioned; which is operable linked, too.

[58054] In another embodiment thereof the expression cassette does not comprise an additional transit peptide in case in Table I, application no. 11, in column 6 in the same line as SEQ ID NO. 78953 is depicted, non-targeted is mentioned.

[58055] In an embodiment the present invention relates to an expresssion cassette comprising a) a promoter, preferably a promoter selected from the group consisting of Big35S, PCUbi, Super and USP, in particular p-Super; and b) the nucleic acid SEQ ID NO. 8920, or a homolog or fragment thereof, or a homolog thereof being depicted in Table I, application no. 11, column 8, in the same line as SEQ ID NO. 8920, preferably the coding region thereof, a homolog or a fragment thereof; which are operable linked.

[58056] In an embodiment thereof the expression cassette comprises in addition c) a nucleic acid molecule encoding a transit peptide, especially a plastidal transit petide in case in Table I, application no. 11, in column 6 in the same line as SEQ ID NO. 8920 is depicted, plastidic is mentioned, or a mitochondrial transit peptide in case in Table I, application no. 11, in column 6 in the same line as SEQ ID NO. 8920 is depicted, mitochondrial is mentioned; which is operable linked, too.

[58057] In another embodiment thereof the expression cassette does not comprise an additional transit peptide in case in Table I, application no. 11, in column 6 in the same line as SEQ ID NO. 8920 is depicted, non-targeted is mentioned.

[58058] In an embodiment the present invention relates to an expresssion cassette comprising a) a promoter, preferably a promoter selected from the group consisting of Big35S, PCUbi, Super and USP, in particular p-Super; and b) the nucleic acid SEQ ID NO. 112193, or a homolog or fragment thereof, or a homolog thereof being depicted in Table I, application no. 11, column 8, in the same line as SEQ ID NO. 112193, preferably the coding region thereof, a homolog or a fragment thereof; which are operable linked.

[58059] In an embodiment thereof the expression cassette comprises in addition c) a nucleic acid molecule encoding a transit peptide, especially a plastidal transit petide in case in Table I, application no. 11, in column 6 in the same line as SEQ ID NO. 112193 is depicted, plastidic is mentioned, or a mitochondrial transit peptide in case in Table I, application no. 11, in column 6 in the same line as SEQ ID NO. 112193 is depicted, mitochondrial is mentioned; which is operable linked, too.

[58060] In another embodiment thereof the expression cassette does not comprise an additional transit peptide in case in Table I, application no. 11, in column 6 in the same line as SEQ ID NO. 112193 is depicted, non-targeted is mentioned.

[58061] In an embodiment the present invention relates to an expresssion cassette comprising a) a promoter, preferably a promoter selected from the group consisting of Big35S, PCUbi, Super and USP, in particular p-Super; and b) the nucleic acid SEQ ID NO. 115595, or a homolog or fragment thereof, or a homolog thereof being depicted in Table I, application no. 11, column 8, in the same line as SEQ ID NO. 115595, preferably the coding region thereof, a homolog or a fragment thereof; which are operable linked.

[58062] In an embodiment thereof the expression cassette comprises in addition c) a nucleic acid molecule encoding a transit peptide, especially a plastidal transit petide in case in Table I, application no. 11, in column 6 in the same line as SEQ ID NO. 115595 is depicted, plastidic is mentioned, or a mitochondrial transit peptide in case in Table I, application no. 11, in column 6 in the same line as SEQ ID NO. 115595 is depicted, mitochondrial is mentioned; which is operable linked, too.

[58063] In another embodiment thereof the expression cassette does not comprise an additional transit peptide in case in Table I, application no. 11, in column 6 in the same line as SEQ ID NO. 115595 is depicted, non-targeted is mentioned.

[58064] In an embodiment the present invention relates to an expresssion cassette comprising a) a promoter, preferably a promoter selected from the group consisting of Big35S, PCUbi, Super and USP, in particular p-Super; and b) the nucleic acid SEQ ID NO. 39002, or a homolog or fragment thereof, or a homolog thereof being depicted in Table I, application no. 11, column 8, in the same line as SEQ ID NO. 39002, preferably the coding region thereof, a homolog or a fragment thereof; which are operable linked.

[58065] In an embodiment thereof the expression cassette comprises in addition c) a nucleic acid molecule encoding a transit peptide, especially a plastidal transit petide in case in Table I, application no. 11, in column 6 in the same line as SEQ ID NO. 39002 is depicted, plastidic is mentioned, or a mitochondrial transit peptide in case in Table I, application no. 11, in column 6 in the same line as SEQ ID NO. 39002 is depicted, mitochondrial is mentioned; which is operable linked, too.

[58066] In another embodiment thereof the expression cassette does not comprise an additional transit peptide in case in Table I, application no. 11, in column 6 in the same line as SEQ ID NO. 39002 is depicted, non-targeted is mentioned.

[58067] In an embodiment the present invention relates to an expresssion cassette comprising a) a promoter, preferably a promoter selected from the group consisting of Big35S, PCUbi, Super and USP, in particular p-Super; and b) the nucleic acid SEQ ID NO. 39237, or a homolog or fragment thereof, or a homolog thereof being depicted in Table I, application no. 11, column 8, in the same line as SEQ ID NO. 39237, preferably the coding region thereof, a homolog or a fragment thereof; which are operable linked.

[58068] In an embodiment thereof the expression cassette comprises in addition c) a nucleic acid molecule encoding a transit peptide, especially a plastidal transit petide in case in Table I, application no. 11, in column 6 in the same line as SEQ ID NO. 39237 is depicted, plastidic is mentioned, or a mitochondrial transit peptide in case in Table I, application no. 11, in column 6 in the same line as SEQ ID NO. 39237 is depicted, mitochondrial is mentioned; which is operable linked, too.

[58069] In another embodiment thereof the expression cassette does not comprise an additional transit peptide in case in Table I, application no. 11, in column 6 in the same line as SEQ ID NO. 39237 is depicted, non-targeted is mentioned.

[58070] In an embodiment the present invention relates to an expresssion cassette comprising a) a promoter, preferably a promoter selected from the group consisting of Big35S, PCUbi, Super and USP, in particular p-Super; and b) the nucleic acid SEQ ID NO. 115628, or a homolog or fragment thereof, or a homolog thereof being depicted in Table I, application no. 11, column 8, in the same line as SEQ ID NO. 115628, preferably the coding region thereof, a homolog or a fragment thereof; which are operable linked.

[58071] In an embodiment thereof the expression cassette comprises in addition c) a nucleic acid molecule encoding a transit peptide, especially a plastidal transit petide in case in Table I, application no. 11, in column 6 in the same line as SEQ ID NO. 115628 is depicted, plastidic is mentioned, or a mitochondrial transit peptide in case in Table I, application no. 11, in column 6 in the same line as SEQ ID NO. 115628 is depicted, mitochondrial is mentioned; which is operable linked, too.

[58072] In another embodiment thereof the expression cassette does not comprise an additional transit peptide in case in Table I, application no. 11, in column 6 in the same line as SEQ ID NO. 115628 is depicted, non-targeted is mentioned.

[58073] In an embodiment the present invention relates to an expresssion cassette comprising a) a promoter, preferably a promoter selected from the group consisting of Big35S, PCUbi, Super and USP, in particular p-Super; and b) the nucleic acid SEQ ID NO. 115655, or a homolog or fragment thereof, or a homolog thereof being depicted in Table I, application no. 11, column 8, in the same line as SEQ ID NO. 115655, preferably the coding region thereof, a homolog or a fragment thereof; which are operable linked.

[58074] In an embodiment thereof the expression cassette comprises in addition c) a nucleic acid molecule encoding a transit peptide, especially a plastidal transit petide in case in Table I, application no. 11, in column 6 in the same line as SEQ ID NO. 115655 is depicted, plastidic is mentioned, or a mitochondrial transit peptide in case in Table I, application no. 11, in column 6 in the same line as SEQ ID NO. 115655 is depicted, mitochondrial is mentioned; which is operable linked, too.

[58075] In another embodiment thereof the expression cassette does not comprise an additional transit peptide in case in Table I, application no. 11, in column 6 in the same line as SEQ ID NO. 115655 is depicted, non-targeted is mentioned.

[58076] In an embodiment the present invention relates to an expresssion cassette comprising a) a promoter, preferably a promoter selected from the group consisting of Big35S, PCUbi, Super and USP, in particular p-Super; and b) the nucleic acid SEQ ID NO. 81075, or a homolog or fragment thereof, or a homolog thereof being depicted in Table I, application no. 11, column 8, in the same line as SEQ ID NO. 81075, preferably the coding region thereof, a homolog or a fragment thereof; which are operable linked.

[58077] In an embodiment thereof the expression cassette comprises in addition c) a nucleic acid molecule encoding a transit peptide, especially a plastidal transit petide in case in Table I, application no. 11, in column 6 in the same line as SEQ ID NO. 81075 is depicted, plastidic is mentioned, or a mitochondrial transit peptide in case in Table I, application no. 11, in column 6 in the same line as SEQ ID NO. 81075 is depicted, mitochondrial is mentioned; which is operable linked, too.

[58078] In another embodiment thereof the expression cassette does not comprise an additional transit peptide in case in Table I, application no. 11, in column 6 in the same line as SEQ ID NO. 81075 is depicted, non-targeted is mentioned.

[58079] In an embodiment the present invention relates to an expresssion cassette comprising a) a promoter, preferably a promoter selected from the group consisting of Big35S, PCUbi, Super and USP, in particular p-Super; and b) the nucleic acid SEQ ID NO. 115719, or a homolog or fragment thereof, or a homolog thereof being depicted in Table I, application no. 11, column 8, in the same line as SEQ ID NO. 115719, preferably the coding region thereof, a homolog or a fragment thereof; which are operable linked.

[58080] In an embodiment thereof the expression cassette comprises in addition c) a nucleic acid molecule encoding a transit peptide, especially a plastidal transit petide in case in Table I, application no. 11, in column 6 in the same line as SEQ ID NO. 115719 is depicted, plastidic is mentioned, or a mitochondrial transit peptide in case in Table I, application no. 11, in column 6 in the same line as SEQ ID NO. 115719 is depicted, mitochondrial is mentioned; which is operable linked, too.

[58081] In another embodiment thereof the expression cassette does not comprise an additional transit peptide in case in Table I, application no. 11, in column 6 in the same line as SEQ ID NO. 115719 is depicted, non-targeted is mentioned.

[58082] In an embodiment the present invention relates to an expresssion cassette comprising a) a promoter, preferably a promoter selected from the group consisting of Big35S, PCUbi, Super and USP, in particular p-Super; and b) the nucleic acid SEQ ID NO. 115791, or a homolog or fragment thereof, or a homolog thereof being depicted in Table I, application no. 11, column 8, in the same line as SEQ ID NO. 115791, preferably the coding region thereof, a homolog or a fragment thereof; which are operable linked.

[58083] In an embodiment thereof the expression cassette comprises in addition c) a nucleic acid molecule encoding a transit peptide, especially a plastidal transit petide in case in Table I, application no. 11, in column 6 in the same line as SEQ ID NO. 115791 is depicted, plastidic is mentioned, or a mitochondrial transit peptide in case in Table I, application no. 11, in column 6 in the same line as SEQ ID NO. 115791 is depicted, mitochondrial is mentioned; which is operable linked, too.

[58084] In another embodiment thereof the expression cassette does not comprise an additional transit peptide in case in Table I, application no. 11, in column 6 in the same line as SEQ ID NO. 115791 is depicted, non-targeted is mentioned.

[58085] In an embodiment the present invention relates to an expresssion cassette comprising a) a promoter, preferably a promoter selected from the group consisting of Big35S, PCUbi, Super and USP, in particular p-Super; and b) the nucleic acid SEQ ID NO. 81980, or a homolog or fragment thereof, or a homolog thereof being depicted in Table I, application no. 11, column 8, in the same line as SEQ ID NO. 81980, preferably the coding region thereof, a homolog or a fragment thereof; which are operable linked.

[58086] In an embodiment thereof the expression cassette comprises in addition c) a nucleic acid molecule encoding a transit peptide, especially a plastidal transit petide in case in Table I, application no. 11, in column 6 in the same line as SEQ ID NO. 81980 is depicted, plastidic is mentioned, or a mitochondrial transit peptide in case in Table I, application no. 11, in column 6 in the same line as SEQ ID NO. 81980 is depicted, mitochondrial is mentioned; which is operable linked, too.

[58087] In another embodiment thereof the expression cassette does not comprise an additional transit peptide in case in Table I, application no. 11, in column 6 in the same line as SEQ ID NO. 81980 is depicted, non-targeted is mentioned.

[58088] In an embodiment the present invention relates to an expresssion cassette comprising a) a promoter, preferably a promoter selected from the group consisting of Big35S, PCUbi, Super and USP, in particular p-Super; and b) the nucleic acid SEQ ID NO. 44196, or a homolog or fragment thereof, or a homolog thereof being depicted in Table I, application no. 11, column 8, in the same line as SEQ ID NO. 44196, preferably the coding region thereof, a homolog or a fragment thereof; which are operable linked.

[58089] In an embodiment thereof the expression cassette comprises in addition c) a nucleic acid molecule encoding a transit peptide, especially a plastidal transit petide in case in Table I, application no. 11, in column 6 in the same line as SEQ ID NO. 44196 is depicted, plastidic is mentioned, or a mitochondrial transit peptide in case in Table I, application no. 11, in column 6 in the same line as SEQ ID NO. 44196 is depicted, mitochondrial is mentioned; which is operable linked, too.

[58090] In another embodiment thereof the expression cassette does not comprise an additional transit peptide in case in Table I, application no. 11, in column 6 in the same line as SEQ ID NO. 44196 is depicted, non-targeted is mentioned.

[58091] In an embodiment the present invention relates to an expresssion cassette comprising a) a promoter, preferably a promoter selected from the group consisting of Big35S, PCUbi, Super and USP, in particular p-Super; and b) the nucleic acid SEQ ID NO. 10726, or a homolog or fragment thereof, or a homolog thereof being depicted in Table I, application no. 11, column 8, in the same line as SEQ ID NO. 10726, preferably the coding region thereof, a homolog or a fragment thereof; which are operable linked.

[58092] In an embodiment thereof the expression cassette comprises in addition c) a nucleic acid molecule encoding a transit peptide, especially a plastidal transit petide in case in Table I, application no. 11, in column 6 in the same line as SEQ ID NO. 10726 is depicted, plastidic is mentioned, or a mitochondrial transit peptide in case in Table I, application no. 11, in column 6 in the same line as SEQ ID NO. 10726 is depicted, mitochondrial is mentioned; which is operable linked, too.

[58093] In another embodiment thereof the expression cassette does not comprise an additional transit peptide in case in Table I, application no. 11, in column 6 in the same line as SEQ ID NO. 10726 is depicted, non-targeted is mentioned.

[58094] In an embodiment the present invention relates to an expresssion cassette comprising a) a promoter, preferably a promoter selected from the group consisting of Big35S, PCUbi, Super and USP, in particular p-USP; and b) the nucleic acid SEQ ID NO. 100675, or a homolog or fragment thereof, or a homolog thereof being depicted in Table I, application no. 11, column 8, in the same line as SEQ ID NO. 100675, preferably the coding region thereof, a homolog or a fragment thereof; which are operable linked.

[58095] In an embodiment thereof the expression cassette comprises in addition c) a nucleic acid molecule encoding a transit peptide, especially a plastidal transit petide in case in Table I, application no. 11, in column 6 in the same line as SEQ ID NO. 100675 is depicted, plastidic is mentioned, or a mitochondrial transit peptide in case in Table I, application no. 11, in column 6 in the same line as SEQ ID NO. 100675 is depicted, mitochondrial is mentioned; which is operable linked, too.

[58096] In another embodiment thereof the expression cassette does not comprise an additional transit peptide in case in Table I, application no. 11, in column 6 in the same line as SEQ ID NO. 100675 is depicted, non-targeted is mentioned.

[58097] In an embodiment the present invention relates to an expresssion cassette comprising a) a promoter, preferably a promoter selected from the group consisting of Big35S, PCUbi, Super and USP, in particular p-PcUBI; and b) the nucleic acid SEQ ID NO. 10811, or a homolog or fragment thereof, or a homolog thereof being depicted in Table I, application no. 11, column 8, in the same line as SEQ ID NO. 10811, preferably the coding region thereof, a homolog or a fragment thereof; which are operable linked.

[58098] In an embodiment thereof the expression cassette comprises in addition c) a nucleic acid molecule encoding a transit peptide, especially a plastidal transit petide in case in Table I, application no. 11, in column 6 in the same line as SEQ ID NO. 10811 is depicted, plastidic is mentioned, or a mitochondrial transit peptide in case in Table I, application no. 11, in column 6 in the same line as SEQ ID NO. 10811 is depicted, mitochondrial is mentioned; which is operable linked, too.

[58099] In another embodiment thereof the expression cassette does not comprise an additional transit peptide in case in Table I, application no. 11, in column 6 in the same line as SEQ ID NO. 10811 is depicted, non-targeted is mentioned.

[58100] In an embodiment the present invention relates to an expresssion cassette comprising a) a promoter, preferably a promoter selected from the group consisting of Big35S, PCUbi, Super and USP, in particular p-PcUBI; and b) the nucleic acid SEQ ID NO. 46751, or a homolog or fragment thereof, or a homolog thereof being depicted in Table I, application no. 11, column 8, in the same line as SEQ ID NO. 46751, preferably the coding region thereof, a homolog or a fragment thereof; which are operable linked.

[58101] In an embodiment thereof the expression cassette comprises in addition c) a nucleic acid molecule encoding a transit peptide, especially a plastidal transit petide in case in Table I, application no. 11, in column 6 in the same line as SEQ ID NO. 46751 is depicted, plastidic is mentioned, or a mitochondrial transit peptide in case in Table I, application no. 11, in column 6 in the same line as SEQ ID NO. 46751 is depicted, mitochondrial is mentioned; which is operable linked, too.

[58102] In another embodiment thereof the expression cassette does not comprise an additional transit peptide in case in Table I, application no. 11, in column 6 in the same line as SEQ ID NO. 46751 is depicted, non-targeted is mentioned.

[58103] In an embodiment the present invention relates to an expresssion cassette comprising a) a promoter, preferably a promoter selected from the group consisting of Big35S, PCUbi, Super and USP, in particular p-PcUBI; and b) the nucleic acid SEQ ID NO. 106920, or a homolog or fragment thereof, or a homolog thereof being depicted in Table I, application no. 11, column 8, in the same line as SEQ ID NO. 106920, preferably the coding region thereof, a homolog or a fragment thereof; which are operable linked.

[58104] In an embodiment thereof the expression cassette comprises in addition c) a nucleic acid molecule encoding a transit peptide, especially a plastidal transit petide in case in Table I, application no. 11, in column 6 in the same line as SEQ ID NO. 106920 is depicted, plastidic is mentioned, or a mitochondrial transit peptide in case in Table I, application no. 11, in column 6 in the same line as SEQ ID NO. 106920 is depicted, mitochondrial is mentioned; which is operable linked, too.

[58105] In another embodiment thereof the expression cassette does not comprise an additional transit peptide in case in Table I, application no. 11, in column 6 in the same line as SEQ ID NO. 106920 is depicted, non-targeted is mentioned.

[58106] In an embodiment the present invention relates to an expresssion cassette comprising a) a promoter, preferably a promoter selected from the group consisting of Big35S, PCUbi, Super and USP, in particular p-PcUBI; and b) the nucleic acid SEQ ID NO. 94741, or a homolog or fragment thereof, or a homolog thereof being depicted in Table I, application no. 11, column 8, in the same line as SEQ ID NO. 94741, preferably the coding region thereof, a homolog or a fragment thereof; which are operable linked.

[58107] In an embodiment thereof the expression cassette comprises in addition c) a nucleic acid molecule encoding a transit peptide, especially a plastidal transit petide in case in Table I, application no. 11, in column 6 in the same line as SEQ ID NO. 94741 is depicted, plastidic is mentioned, or a mitochondrial transit peptide in case in Table I, application no. 11, in column 6 in the same line as SEQ ID NO. 94741 is depicted, mitochondrial is mentioned; which is operable linked, too.

[58108] In another embodiment thereof the expression cassette does not comprise an additional transit peptide in case in Table I, application no. 11, in column 6 in the same line as SEQ ID NO. 94741 is depicted, non-targeted is mentioned.

[58109] In an embodiment the present invention relates to an expresssion cassette comprising a) a promoter, preferably a promoter selected from the group consisting of Big35S, PCUbi, Super and USP, in particular p-PcUBI; and b) the nucleic acid SEQ ID NO. 52634, or a homolog or fragment thereof, or a homolog thereof being depicted in Table I, application no. 11, column 8, in the same line as SEQ ID NO. 52634, preferably the coding region thereof, a homolog or a fragment thereof; which are operable linked.

[58110] In an embodiment thereof the expression cassette comprises in addition c) a nucleic acid molecule encoding a transit peptide, especially a plastidal transit petide in case in Table I, application no. 11, in column 6 in the same line as SEQ ID NO. 52634 is depicted, plastidic is mentioned, or a mitochondrial transit peptide in case in Table I, application no. 11, in column 6 in the same line as SEQ ID NO. 52634 is depicted, mitochondrial is mentioned; which is operable linked, too.

[58111] In another embodiment thereof the expression cassette does not comprise an additional transit peptide in case in Table I, application no. 11, in column 6 in the same line as SEQ ID NO. 52634 is depicted, non-targeted is mentioned.

[58112] In an embodiment the present invention relates to an expresssion cassette comprising a) a promoter, preferably a promoter selected from the group consisting of Big35S, PCUbi, Super and USP, in particular p-PcUBI; and b) the nucleic acid SEQ ID NO. 85723, or a homolog or fragment thereof, or a homolog thereof being depicted in Table I, application no. 11, column 8, in the same line as SEQ ID NO. 85723, preferably the coding region thereof, a homolog or a fragment thereof; which are operable linked.

[58113] In an embodiment thereof the expression cassette comprises in addition c) a nucleic acid molecule encoding a transit peptide, especially a plastidal transit petide in case in Table I, application no. 11, in column 6 in the same line as SEQ ID NO. 85723 is depicted, plastidic is mentioned, or a mitochondrial transit peptide in case in Table I, application no. 11, in column 6 in the same line as SEQ ID NO. 85723 is depicted, mitochondrial is mentioned; which is operable linked, too.

[58114] In another embodiment thereof the expression cassette does not comprise an additional transit peptide in case in Table I, application no. 11, in column 6 in the same line as SEQ ID NO. 85723 is depicted, non-targeted is mentioned.

[58115] In an embodiment the present invention relates to an expresssion cassette comprising a) a promoter, preferably a promoter selected from the group consisting of Big35S, PCUbi, Super and USP, in particular p-PcUBI; and b) the nucleic acid SEQ ID NO. 52660, or a homolog or fragment thereof, or a homolog thereof being depicted in Table I, application no. 11, column 8, in the same line as SEQ ID NO. 52660, preferably the coding region thereof, a homolog or a fragment thereof; which are operable linked.

[58116] In an embodiment thereof the expression cassette comprises in addition c) a nucleic acid molecule encoding a transit peptide, especially a plastidal transit petide in case in Table I, application no. 11, in column 6 in the same line as SEQ ID NO. 52660 is depicted, plastidic is mentioned, or a mitochondrial transit peptide in case in Table I, application no. 11, in column 6 in the same line as SEQ ID NO. 52660 is depicted, mitochondrial is mentioned; which is operable linked, too.

[58117] In another embodiment thereof the expression cassette does not comprise an additional transit peptide in case in Table I, application no. 11, in column 6 in the same line as SEQ ID NO. 52660 is depicted, non-targeted is mentioned.

[58118] In an embodiment the present invention relates to an expresssion cassette comprising a) a promoter, preferably a promoter selected from the group consisting of Big35S, PCUbi, Super and USP, in particular p-PcUBI; and b) the nucleic acid SEQ ID NO. 54337, or a homolog or fragment thereof, or a homolog thereof being depicted in Table I, application no. 11, column 8, in the same line as SEQ ID NO. 54337, preferably the coding region thereof, a homolog or a fragment thereof; which are operable linked.

[58119] In an embodiment thereof the expression cassette comprises in addition c) a nucleic acid molecule encoding a transit peptide, especially a plastidal transit petide in case in Table I, application no. 11, in column 6 in the same line as SEQ ID NO. 54337 is depicted, plastidic is mentioned, or a mitochondrial transit peptide in case in Table I, application no. 11, in column 6 in the same line as SEQ ID NO. 54337 is depicted, mitochondrial is mentioned; which is operable linked, too.

[58120] In another embodiment thereof the expression cassette does not comprise an additional transit peptide in case in Table I, application no. 11, in column 6 in the same line as SEQ ID NO. 54337 is depicted, non-targeted is mentioned.

[58121] In an embodiment the present invention relates to an expresssion cassette comprising a) a promoter, preferably a promoter selected from the group consisting of Big35S, PCUbi, Super and USP, in particular p-PcUBI; and b) the nucleic acid SEQ ID NO. 95047, or a homolog or fragment thereof, or a homolog thereof being depicted in Table I, application no. 11, column 8, in the same line as SEQ ID NO. 95047, preferably the coding region thereof, a homolog or a fragment thereof; which are operable linked.

[58122] In an embodiment thereof the expression cassette comprises in addition c) a nucleic acid molecule encoding a transit peptide, especially a plastidal transit petide in case in Table I, application no. 11, in column 6 in the same line as SEQ ID NO. 95047 is depicted, plastidic is mentioned, or a mitochondrial transit peptide in case in Table I, application no. 11, in column 6 in the same line as SEQ ID NO. 95047 is depicted, mitochondrial is mentioned; which is operable linked, too.

[58123] In another embodiment thereof the expression cassette does not comprise an additional transit peptide in case in Table I, application no. 11, in column 6 in the same line as SEQ ID NO. 95047 is depicted, non-targeted is mentioned.

[58124] In an embodiment the present invention relates to an expresssion cassette comprising a) a promoter, preferably a promoter selected from the group consisting of Big35S, PCUbi, Super and USP, in particular p-PcUBI; and b) the nucleic acid SEQ ID NO. 11423, or a homolog or fragment thereof, or a homolog thereof being depicted in Table I, application no. 11, column 8, in the same line as SEQ ID NO. 11423, preferably the coding region thereof, a homolog or a fragment thereof; which are operable linked.

[58125] In an embodiment thereof the expression cassette comprises in addition c) a nucleic acid molecule encoding a transit peptide, especially a plastidal transit petide in case in Table I, application no. 11, in column 6 in the same line as SEQ ID NO. 11423 is depicted, plastidic is mentioned, or a mitochondrial transit peptide in case in Table I, application no. 11, in column 6 in the same line as SEQ ID NO. 11423 is depicted, mitochondrial is mentioned; which is operable linked, too.

[58126] In another embodiment thereof the expression cassette does not comprise an additional transit peptide in case in Table I, application no. 11, in column 6 in the same line as SEQ ID NO. 11423 is depicted, non-targeted is mentioned.

[58127] In an embodiment the present invention relates to an expresssion cassette comprising a) a promoter, preferably a promoter selected from the group consisting of Big35S, PCUbi, Super and USP, in particular p-PcUBI; and b) the nucleic acid SEQ ID NO. 85743, or a homolog or fragment thereof, or a homolog thereof being depicted in Table I, application no. 11, column 8, in the same line as SEQ ID NO. 85743, preferably the coding region thereof, a homolog or a fragment thereof; which are operable linked.

[58128] In an embodiment thereof the expression cassette comprises in addition c) a nucleic acid molecule encoding a transit peptide, especially a plastidal transit petide in case in Table I, application no. 11, in column 6 in the same line as SEQ ID NO. 85743 is depicted, plastidic is mentioned, or a mitochondrial transit peptide in case in Table I, application no. 11, in column 6 in the same line as SEQ ID NO. 85743 is depicted, mitochondrial is mentioned; which is operable linked, too.

[58129] In another embodiment thereof the expression cassette does not comprise an additional transit peptide in case in Table I, application no. 11, in column 6 in the same line as SEQ ID NO. 85743 is depicted, non-targeted is mentioned.

[58130] In an embodiment the present invention relates to an expresssion cassette comprising a) a promoter, preferably a promoter selected from the group consisting of Big35S, PCUbi, Super and USP, in particular p-PcUBI; and b) the nucleic acid SEQ ID NO. 86447, or a homolog or fragment thereof, or a homolog thereof being depicted in Table I, application no. 11, column 8, in the same line as SEQ ID NO. 86447, preferably the coding region thereof, a homolog or a fragment thereof; which are operable linked.

[58131] In an embodiment thereof the expression cassette comprises in addition c) a nucleic acid molecule encoding a transit peptide, especially a plastidal transit petide in case in Table I, application no. 11, in column 6 in the same line as SEQ ID NO. 86447 is depicted, plastidic is mentioned, or a mitochondrial transit peptide in case in Table I, application no. 11, in column 6 in the same line as SEQ ID NO. 86447 is depicted, mitochondrial is mentioned; which is operable linked, too.

[58132] In another embodiment thereof the expression cassette does not comprise an additional transit peptide in case in Table I, application no. 11, in column 6 in the same line as SEQ ID NO. 86447 is depicted, non-targeted is mentioned.

[58133] In an embodiment the present invention relates to an expresssion cassette comprising a) a promoter, preferably a promoter selected from the group consisting of Big35S, PCUbi, Super and USP, in particular p-PcUBI; and b) the nucleic acid SEQ ID NO. 11471, or a homolog or fragment thereof, or a homolog thereof being depicted in Table I, application no. 11, column 8, in the same line as SEQ ID NO. 11471, preferably the coding region thereof, a homolog or a fragment thereof; which are operable linked.

[58134] In an embodiment thereof the expression cassette comprises in addition c) a nucleic acid molecule encoding a transit peptide, especially a plastidal transit petide in case in Table I, application no. 11, in column 6 in the same line as SEQ ID NO. 11471 is depicted, plastidic is mentioned, or a mitochondrial transit peptide in case in Table I, application no. 11, in column 6 in the same line as SEQ ID NO. 11471 is depicted, mitochondrial is mentioned; which is operable linked, too.

[58135] In another embodiment thereof the expression cassette does not comprise an additional transit peptide in case in Table I, application no. 11, in column 6 in the same line as SEQ ID NO. 11471 is depicted, non-targeted is mentioned.

[58136] In an embodiment the present invention relates to an expresssion cassette comprising a) a promoter, preferably a promoter selected from the group consisting of Big35S, PCUbi, Super and USP, in particular p-PcUBI; and b) the nucleic acid SEQ ID NO. 55385, or a homolog or fragment thereof, or a homolog thereof being depicted in Table I, application no. 11, column 8, in the same line as SEQ ID NO. 55385, preferably the coding region thereof, a homolog or a fragment thereof; which are operable linked.

[58137] In an embodiment thereof the expression cassette comprises in addition c) a nucleic acid molecule encoding a transit peptide, especially a plastidal transit petide in case in Table I, application no. 11, in column 6 in the same line as SEQ ID NO. 55385 is depicted, plastidic is mentioned, or a mitochondrial transit peptide in case in Table I, application no. 11, in column 6 in the same line as SEQ ID NO. 55385 is depicted, mitochondrial is mentioned; which is operable linked, too.

[58138] In another embodiment thereof the expression cassette does not comprise an additional transit peptide in case in Table I, application no. 11, in column 6 in the same line as SEQ ID NO. 55385 is depicted, non-targeted is mentioned.

[58139] In an embodiment the present invention relates to an expresssion cassette comprising a) a promoter, preferably a promoter selected from the group consisting of Big35S, PCUbi, Super and USP, in particular p-PcUBI; and b) the nucleic acid SEQ ID NO. 119222, or a homolog or fragment thereof, or a homolog thereof being depicted in Table I, application no. 11, column 8, in the same line as SEQ ID NO. 119222, preferably the coding region thereof, a homolog or a fragment thereof; which are operable linked.

[58140] In an embodiment thereof the expression cassette comprises in addition c) a nucleic acid molecule encoding a transit peptide, especially a plastidal transit petide in case in Table I, application no. 11, in column 6 in the same line as SEQ ID NO. 119222 is depicted, plastidic is mentioned, or a mitochondrial transit peptide in case in Table I, application no. 11, in column 6 in the same line as SEQ ID NO. 119222 is depicted, mitochondrial is mentioned; which is operable linked, too.

[58141] In another embodiment thereof the expression cassette does not comprise an additional transit peptide in case in Table I, application no. 11, in column 6 in the same line as SEQ ID NO. 119222 is depicted, non-targeted is mentioned.

[58142] In an embodiment the present invention relates to an expresssion cassette comprising a) a promoter, preferably a promoter selected from the group consisting of Big35S, PCUbi, Super and USP, in particular p-PcUBI; and b) the nucleic acid SEQ ID NO. 116341, or a homolog or fragment thereof, or a homolog thereof being depicted in Table I, application no. 11, column 8, in the same line as SEQ ID NO. 116341, preferably the coding region thereof, a homolog or a fragment thereof; which are operable linked.

[58143] In an embodiment thereof the expression cassette comprises in addition c) a nucleic acid molecule encoding a transit peptide, especially a plastidal transit petide in case in Table I, application no. 11, in column 6 in the same line as SEQ ID NO. 116341 is depicted, plastidic is mentioned, or a mitochondrial transit peptide in case in Table I, application no. 11, in column 6 in the same line as SEQ ID NO. 116341 is depicted, mitochondrial is mentioned; which is operable linked, too.

[58144] In another embodiment thereof the expression cassette does not comprise an additional transit peptide in case in Table I, application no. 11, in column 6 in the same line as SEQ ID NO. 116341 is depicted, non-targeted is mentioned.

[58145] In an embodiment the present invention relates to an expresssion cassette comprising a) a promoter, preferably a promoter selected from the group consisting of Big35S, PCUbi, Super and USP, in particular p-PcUBI; and b) the nucleic acid SEQ ID NO. 116460, or a homolog or fragment thereof, or a homolog thereof being depicted in Table I, application no. 11, column 8, in the same line as SEQ ID NO. 116460, preferably the coding region thereof, a homolog or a fragment thereof; which are operable linked.

[58146] In an embodiment thereof the expression cassette comprises in addition c) a nucleic acid molecule encoding a transit peptide, especially a plastidal transit petide in case in Table I, application no. 11, in column 6 in the same line as SEQ ID NO. 116460 is depicted, plastidic is mentioned, or a mitochondrial transit peptide in case in Table I, application no. 11, in column 6 in the same line as SEQ ID NO. 116460 is depicted, mitochondrial is mentioned; which is operable linked, too.

[58147] In another embodiment thereof the expression cassette does not comprise an additional transit peptide in case in Table I, application no. 11, in column 6 in the same line as SEQ ID NO. 116460 is depicted, non-targeted is mentioned.

[58148] In an embodiment the present invention relates to an expresssion cassette comprising a) a promoter, preferably a promoter selected from the group consisting of Big35S, PCUbi, Super and USP, in particular p-PcUBI; and b) the nucleic acid SEQ ID NO. 58324, or a homolog or fragment thereof, or a homolog thereof being depicted in Table I, application no. 11, column 8, in the same line as SEQ ID NO. 58324, preferably the coding region thereof, a homolog or a fragment thereof; which are operable linked.

[58149] In an embodiment thereof the expression cassette comprises in addition c) a nucleic acid molecule encoding a transit peptide, especially a plastidal transit petide in case in Table I, application no. 11, in column 6 in the same line as SEQ ID NO. 58324 is depicted, plastidic is mentioned, or a mitochondrial transit peptide in case in Table I, application no. 11, in column 6 in the same line as SEQ ID NO. 58324 is depicted, mitochondrial is mentioned; which is operable linked, too.

[58150] In another embodiment thereof the expression cassette does not comprise an additional transit peptide in case in Table I, application no. 11, in column 6 in the same line as SEQ ID NO. 58324 is depicted, non-targeted is mentioned.

[58151] In an embodiment the present invention relates to an expresssion cassette comprising a) a promoter, preferably a promoter selected from the group consisting of Big35S, PCUbi, Super and USP, in particular p-PcUBI; and b) the nucleic acid SEQ ID NO. 12140, or a homolog or fragment thereof, or a homolog thereof being depicted in Table I, application no. 11, column 8, in the same line as SEQ ID NO. 12140, preferably the coding region thereof, a homolog or a fragment thereof; which are operable linked.

[58152] In an embodiment thereof the expression cassette comprises in addition c) a nucleic acid molecule encoding a transit peptide, especially a plastidal transit petide in case in Table I, application no. 11, in column 6 in the same line as SEQ ID NO. 12140 is depicted, plastidic is mentioned, or a mitochondrial transit peptide in case in Table I, application no. 11, in column 6 in the same line as SEQ ID NO. 12140 is depicted, mitochondrial is mentioned; which is operable linked, too.

[58153] In another embodiment thereof the expression cassette does not comprise an additional transit peptide in case in Table I, application no. 11, in column 6 in the same line as SEQ ID NO. 12140 is depicted, non-targeted is mentioned.

[58154] In an embodiment the present invention relates to an expresssion cassette comprising a) a promoter, preferably a promoter selected from the group consisting of Big35S, PCUbi, Super and USP, in particular p-PcUBI; and b) the nucleic acid SEQ ID NO. 12341, or a homolog or fragment thereof, or a homolog thereof being depicted in Table I, application no. 11, column 8, in the same line as SEQ ID NO. 12341, preferably the coding region thereof, a homolog or a fragment thereof; which are operable linked.

[58155] In an embodiment thereof the expression cassette comprises in addition c) a nucleic acid molecule encoding a transit peptide, especially a plastidal transit petide in case in Table I, application no. 11, in column 6 in the same line as SEQ ID NO. 12341 is depicted, plastidic is mentioned, or a mitochondrial transit peptide in case in Table I, application no. 11, in column 6 in the same line as SEQ ID NO. 12341 is depicted, mitochondrial is mentioned; which is operable linked, too.

[58156] In another embodiment thereof the expression cassette does not comprise an additional transit peptide in case in Table I, application no. 11, in column 6 in the same line as SEQ ID NO. 12341 is depicted, non-targeted is mentioned.

[58157] In an embodiment the present invention relates to an expresssion cassette comprising a) a promoter, preferably a promoter selected from the group consisting of Big35S, PCUbi, Super and USP, in particular p-PcUBI; and b) the nucleic acid SEQ ID NO. 61553, or a homolog or fragment thereof, or a homolog thereof being depicted in Table I, application no. 11, column 8, in the same line as SEQ ID NO. 61553, preferably the coding region thereof, a homolog or a fragment thereof; which are operable linked.

[58158] In an embodiment thereof the expression cassette comprises in addition c) a nucleic acid molecule encoding a transit peptide, especially a plastidal transit petide in case in Table I, application no. 11, in column 6 in the same line as SEQ ID NO. 61553 is depicted, plastidic is mentioned, or a mitochondrial transit peptide in case in Table I, application no. 11, in column 6 in the same line as SEQ ID NO. 61553 is depicted, mitochondrial is mentioned; which is operable linked, too.

[58159] In another embodiment thereof the expression cassette does not comprise an additional transit peptide in case in Table I, application no. 11, in column 6 in the same line as SEQ ID NO. 61553 is depicted, non-targeted is mentioned.

[58160] In an embodiment the present invention relates to an expresssion cassette comprising a) a promoter, preferably a promoter selected from the group consisting of Big35S, PCUbi, Super and USP, in particular p-PcUBI; and b) the nucleic acid SEQ ID NO. 12974, or a homolog or fragment thereof, or a homolog thereof being depicted in Table I, application no. 11, column 8, in the same line as SEQ ID NO. 12974, preferably the coding region thereof, a homolog or a fragment thereof; which are operable linked.

[58161] In an embodiment thereof the expression cassette comprises in addition c) a nucleic acid molecule encoding a transit peptide, especially a plastidal transit petide in case in Table I, application no. 11, in column 6 in the same line as SEQ ID NO. 12974 is depicted, plastidic is mentioned, or a mitochondrial transit peptide in case in Table I, application no. 11, in column 6 in the same line as SEQ ID NO. 12974 is depicted, mitochondrial is mentioned; which is operable linked, too.

[58162] In another embodiment thereof the expression cassette does not comprise an additional transit peptide in case in Table I, application no. 11, in column 6 in the same line as SEQ ID NO. 12974 is depicted, non-targeted is mentioned.

[58163] In an embodiment the present invention relates to an expresssion cassette comprising a) a promoter, preferably a promoter selected from the group consisting of Big35S, PCUbi, Super and USP, in particular p-Super; and b) the nucleic acid SEQ ID NO. 119347, or a homolog or fragment thereof, or a homolog thereof being depicted in Table I, application no. 11, column 8, in the same line as SEQ ID NO. 119347, preferably the coding region thereof, a homolog or a fragment thereof; which are operable linked.

[58164] In an embodiment thereof the expression cassette comprises in addition c) a nucleic acid molecule encoding a transit peptide, especially a plastidal transit petide in case in Table I, application no. 11, in column 6 in the same line as SEQ ID NO. 119347 is depicted, plastidic is mentioned, or a mitochondrial transit peptide in case in Table I, application no. 11, in column 6 in the same line as SEQ ID NO. 119347 is depicted, mitochondrial is mentioned; which is operable linked, too.

[58165] In another embodiment thereof the expression cassette does not comprise an additional transit peptide in case in Table I, application no. 11, in column 6 in the same line as SEQ ID NO. 119347 is depicted, non-targeted is mentioned.

[58166] In an embodiment the present invention relates to an expresssion cassette comprising a) a promoter, preferably a promoter selected from the group consisting of Big35S, PCUbi, Super and USP, in particular p-PcUBI; and b) the nucleic acid SEQ ID NO. 119408, or a homolog or fragment thereof, or a homolog thereof being depicted in Table I, application no. 11, column 8, in the same line as SEQ ID NO. 119408, preferably the coding region thereof, a homolog or a fragment thereof; which are operable linked.

[58167] In an embodiment thereof the expression cassette comprises in addition c) a nucleic acid molecule encoding a transit peptide, especially a plastidal transit petide in case in Table I, application no. 11, in column 6 in the same line as SEQ ID NO. 119408 is depicted, plastidic is mentioned, or a mitochondrial transit peptide in case in Table I, application no. 11, in column 6 in the same line as SEQ ID NO. 119408 is depicted, mitochondrial is mentioned; which is operable linked, too.

[58168] In another embodiment thereof the expression cassette does not comprise an additional transit peptide in case in Table I, application no. 11, in column 6 in the same line as SEQ ID NO. 119408 is depicted, non-targeted is mentioned.

[58169] In an embodiment the present invention relates to an expresssion cassette comprising a) a promoter, preferably a promoter selected from the group consisting of Big35S, PCUbi, Super and USP, in particular Big35S; and b) the nucleic acid SEQ ID NO. 122518, or a homolog or fragment thereof, or a homolog thereof being depicted in Table I, application no. 11, column 8, in the same line as SEQ ID NO. 122518, preferably the coding region thereof, a homolog or a fragment thereof; which are operable linked.

[58170] In an embodiment thereof the expression cassette comprises in addition c) a nucleic acid molecule encoding a transit peptide, especially a plastidal transit petide in case in Table I, application no. 11, in column 6 in the same line as SEQ ID NO. 122518 is depicted, plastidic is mentioned, or a mitochondrial transit peptide in case in Table I, application no. 11, in column 6 in the same line as SEQ ID NO. 122518 is depicted, mitochondrial is mentioned; which is operable linked, too.

[58171] In another embodiment thereof the expression cassette does not comprise an additional transit peptide in case in Table I, application no. 11, in column 6 in the same line as SEQ ID NO. 122518 is depicted, non-targeted is mentioned.

[58172] In an embodiment the present invention relates to an expresssion cassette comprising a) a promoter, preferably a promoter selected from the group consisting of Big35S, PCUbi, Super and USP, in particular p-Super; and b) the nucleic acid SEQ ID NO. 14706, or a homolog or fragment thereof, or a homolog thereof being depicted in Table I, application no. 11, column 8, in the same line as SEQ ID NO. 14706, preferably the coding region thereof, a homolog or a fragment thereof; which are operable linked.

[58173] In an embodiment thereof the expression cassette comprises in addition c) a nucleic acid molecule encoding a transit peptide, especially a plastidal transit petide in case in Table I, application no. 11, in column 6 in the same line as SEQ ID NO. 14706 is depicted, plastidic is mentioned, or a mitochondrial transit peptide in case in Table I, application no. 11, in column 6 in the same line as SEQ ID NO. 14706 is depicted, mitochondrial is mentioned; which is operable linked, too.

[58174] In another embodiment thereof the expression cassette does not comprise an additional transit peptide in case in Table I, application no. 11, in column 6 in the same line as SEQ ID NO. 14706 is depicted, non-targeted is mentioned.

[58175] In an embodiment the present invention relates to an expresssion cassette comprising a) a promoter, preferably a promoter selected from the group consisting of Big35S, PCUbi, Super and USP, in particular p-Super; and b) the nucleic acid SEQ ID NO. 64964, or a homolog or fragment thereof, or a homolog thereof being depicted in Table I, application no. 11, column 8, in the same line as SEQ ID NO. 64964, preferably the coding region thereof, a homolog or a fragment thereof; which are operable linked.

[58176] In an embodiment thereof the expression cassette comprises in addition c) a nucleic acid molecule encoding a transit peptide, especially a plastidal transit petide in case in Table I, application no. 11, in column 6 in the same line as SEQ ID NO. 64964 is depicted, plastidic is mentioned, or a mitochondrial transit peptide in case in Table I, application no. 11, in column 6 in the same line as SEQ ID NO. 64964 is depicted, mitochondrial is mentioned; which is operable linked, too.

[58177] In another embodiment thereof the expression cassette does not comprise an additional transit peptide in case in Table I, application no. 11, in column 6 in the same line as SEQ ID NO. 64964 is depicted, non-targeted is mentioned.

[58178] In an embodiment the present invention relates to an expresssion cassette comprising a) a promoter, preferably a promoter selected from the group consisting of Big35S, PCUbi, Super and USP, in particular Big35S; and b) the nucleic acid SEQ ID NO. 66772, or a homolog or fragment thereof, or a homolog thereof being depicted in Table I, application no. 11, column 8, in the same line as SEQ ID NO. 66772, preferably the coding region thereof, a homolog or a fragment thereof; which are operable linked.

[58179] In an embodiment thereof the expression cassette comprises in addition c) a nucleic acid molecule encoding a transit peptide, especially a plastidal transit petide in case in Table I, application no. 11, in column 6 in the same line as SEQ ID NO. 66772 is depicted, plastidic is mentioned, or a mitochondrial transit peptide in case in Table I, application no. 11, in column 6 in the same line as SEQ ID NO. 66772 is depicted, mitochondrial is mentioned; which is operable linked, too.

[58180] In another embodiment thereof the expression cassette does not comprise an additional transit peptide in case in Table I, application no. 11, in column 6 in the same line as SEQ ID NO. 66772 is depicted, non-targeted is mentioned.

[58181] In an embodiment the present invention relates to an expresssion cassette comprising a) a promoter, preferably a promoter selected from the group consisting of Big35S, PCUbi, Super and USP, in particular p-Super; and b) the nucleic acid SEQ ID NO. 91958, or a homolog or fragment thereof, or a homolog thereof being depicted in Table I, application no. 11, column 8, in the same line as SEQ ID NO. 91958, preferably the coding region thereof, a homolog or a fragment thereof; which are operable linked.

[58182] In an embodiment thereof the expression cassette comprises in addition c) a nucleic acid molecule encoding a transit peptide, especially a plastidal transit petide in case in Table I, application no. 11, in column 6 in the same line as SEQ ID NO. 91958 is depicted, plastidic is mentioned, or a mitochondrial transit peptide in case in Table I, application no. 11, in column 6 in the same line as SEQ ID NO. 91958 is depicted, mitochondrial is mentioned; which is operable linked, too.

[58183] In another embodiment thereof the expression cassette does not comprise an additional transit peptide in case in Table I, application no. 11, in column 6 in the same line as SEQ ID NO. 91958 is depicted, non-targeted is mentioned.

[58184] In an embodiment the present invention relates to an expresssion cassette comprising a) a promoter, preferably a promoter selected from the group consisting of Big35S, PCUbi, Super and USP, in particular p-Super; and b) the nucleic acid SEQ ID NO. 118212, or a homolog or fragment thereof, or a homolog thereof being depicted in Table I, application no. 11, column 8, in the same line as SEQ ID NO. 118212, preferably the coding region thereof, a homolog or a fragment thereof; which are operable linked.

[58185] In an embodiment thereof the expression cassette comprises in addition c) a nucleic acid molecule encoding a transit peptide, especially a plastidal transit petide in case in Table I, application no. 11, in column 6 in the same line as SEQ ID NO. 118212 is depicted, plastidic is mentioned, or a mitochondrial transit peptide in case in Table I, application no. 11, in column 6 in the same line as SEQ ID NO. 118212 is depicted, mitochondrial is mentioned; which is operable linked, too.

[58186] In another embodiment thereof the expression cassette does not comprise an additional transit peptide in case in Table I, application no. 11, in column 6 in the same line as SEQ ID NO. 118212 is depicted, non-targeted is mentioned.

[58187] In an embodiment the present invention relates to an expresssion cassette comprising a) a promoter, preferably a promoter selected from the group consisting of Big35S, PCUbi, Super and USP, in particular p-PcUBI; and b) the nucleic acid SEQ ID NO. 69, or a homolog or fragment thereof, or a homolog thereof being depicted in Table I, application no. 11, column 8, in the same line as SEQ ID NO. 69, preferably the coding region thereof, a homolog or a fragment thereof; which are operable linked.

[58188] In an embodiment thereof the expression cassette comprises in addition c) a nucleic acid molecule encoding a transit peptide, especially a plastidal transit petide in case in Table I, application no. 11, in column 6 in the same line as SEQ ID NO. 69 is depicted, plastidic is mentioned, or a mitochondrial transit peptide in case in Table I, application no. 11, in column 6 in the same line as SEQ ID NO. 69 is depicted, mitochondrial is mentioned; which is operable linked, too.

[58189] In another embodiment thereof the expression cassette does not comprise an additional transit peptide in case in Table I, application no. 11, in column 6 in the same line as SEQ ID NO. 69 is depicted, non-targeted is mentioned.

[58190] In an embodiment the present invention relates to an expresssion cassette comprising a) a promoter, preferably a promoter selected from the group consisting of Big35S, PCUbi, Super and USP, in particular p-PcUBI; and b) the nucleic acid SEQ ID NO. 16883, or a homolog or fragment thereof, or a homolog thereof being depicted in Table I, application no. 11, column 8, in the same line as SEQ ID NO. 16883, preferably the coding region thereof, a homolog or a fragment thereof; which are operable linked.

[58191] In an embodiment thereof the expression cassette comprises in addition c) a nucleic acid molecule encoding a transit peptide, especially a plastidal transit petide in case in Table I, application no. 11, in column 6 in the same line as SEQ ID NO. 16883 is depicted, plastidic is mentioned, or a mitochondrial transit peptide in case in Table I, application no. 11, in column 6 in the same line as SEQ ID NO. 16883 is depicted, mitochondrial is mentioned; which is operable linked, too.

[58192] In another embodiment thereof the expression cassette does not comprise an additional transit peptide in case in Table I, application no. 11, in column 6 in the same line as SEQ ID NO. 16883 is depicted, non-targeted is mentioned.

[58193] [0165.1.8.11] to [0170.1.8.11] for the disclosure of these paragraphs see [0165.1.8.8] to [0170.1.8.8] above.

[58194] The invention further provides a vector, comprising a nucleic acid molecule comprising 1) a nucleic acid molecule selected from the group consisting of:
[58195] (a) a nucleic acid molecule encoding a polypeptide shown in Table II, column 5 or 8, application no. 11, preferably shown in Table II A, application no. 11, in column 5, or in Table II A, application no. 11, column 8, or in Table II B, application no. 11, column 8, or a homolog or a fragment thereof;
[58196] (b) a nucleic acid molecule shown in Table I, application no. 11, column 5 or 8, preferably shown in Table I A, application no. 11, in column 5, or in Table I A, application no. 11, column 8, or in Table I B, application no. 11, column 8, preferably the coding region thereof, or a homolog or a fragment thereof;
[58197] (c) a nucleic acid molecule, which, as a result of the degeneracy of the genetic code, can be derived from a polypeptide sequence depicted in column 5 or 8 of Table II, application no. 11, preferably shown in Table II A, application no. 11, in column 5, or in Table II A, application no. 11, column 8, or in Table II B, application no. 11, column 8;
[58198] (d) a nucleic acid molecule having at least 30% identity, preferably at least 40%, 50%, 60%, 70%, 75%, 80%, 85%, 90%, 95%, 96%, 97%, 98%, 99%, 99.5%, with the nucleic acid molecule sequence of a polynucleotide comprising the nucleic acid molecule shown in column 5 or 8 of Table I, application no. 11, preferably shown in Table I A, application no. 11, in column 5, or in Table I A, application no. 11, column 8, or in Table I B, application no. 11, column 8, preferably the coding region thereof;
[58199] (e) a nucleic acid molecule encoding a polypeptide having at least 30% identity, preferably at least 40%, 50% 60%, 70%, 75%, 80%, 85%, 90%, 95%, 96%, 97%, 98%, 99%, 99.5%, identity with the amino acid sequence of the polypeptide encoded by the nucleic acid molecule of (a), (b), (c), or (d);
[58200] (f) a nucleic acid molecule which hybridizes with a nucleic acid molecule of (a), (b), (c), (d), or (e) under stringent hybridization conditions;
[58201] (g) a nucleic acid molecule encoding a polypeptide which can be isolated with the aid of monoclonal or polyclonal antibodies made against a polypeptide encoded by one of the nucleic acid molecules of (a), (b), (c), (d), (e) or (f);
[58202] (h) a nucleic acid molecule encoding a polypeptide comprising the consensus sequence or one or more polypeptide motifs as shown in column 8 of Table IV, application no. 11;
[58203] (i) a nucleic acid molecule encoding a polypeptide having the activity represented by a protein as depicted in column 5 of Table II, application no. 11;
[58204] (j) a nucleic acid molecule comprising a polynucleotide which is obtained by amplifying a cDNA library or a genomic library using the primers in Table III, application no. 11, column 8;
[58205] and
[58206] (k) nucleic acid molecule which is obtainable by screening a suitable nucleic acid library, especially a cDNA library and/or a genomic library, under stringent hybridization conditions with a probe comprising one of the sequences of the nucleic acid molecule of (a), (b), (c), (d), (e), (f), (g), (h), (i) or (j) or with a fragment thereof having at least 15 nt, preferably 20 nt, 30 nt, 50 nt, 100 nt, 200 nt, 500 nt, 1000 nt, 1500 nt, 2000 nt or 3000 nt of the nucleic acid molecule complementary to a nucleic acid sequence characterized in (a), (b), (c), (d), (e), (f), (g), (h), (i) or (j);
[58207] or a nucleic acid molecule comprising a sequence which is complementary thereto.
   (All the references to Tables I to IV are references to the corresponding lines of Tables I to IV.)

[58208] In a preferred embodiment of said vector said nucleic acid molecule according to 1 (a), (b), (c), (d), (e), (f), (g), (h), (i), (j) or (k) encodes a polypeptide which has the activity of the respective polypeptide represented by a protein comprising a polypeptide as depicted in the respective line in column 5 of Table II, application no. 11.

[58209] In another preferred embodiment of said vector said nucleic acid molecule according to 1 (a), (b), (c), (d), (e), (f), (g), (h), (i), (j) or (k) confers a generation or an increase of the respective fine chemical in a non-human organism or a part thereof as compared to a corresponding wild-type non-human organism or part thereof.

[58210] In another preferred embodiment of said vector said nucleic acid molecule according to 1 (a), (b), (c), (d), (e), (f), (g), (h), (i), (j) or (k) encodes a polypeptide which has the activity of the respective polypeptide represented by a protein as depicted in the respective line in column 5 of Table II, application no. 11, and confers a generation or an increase of the respective fine chemical in a non-human organism or a part thereof as compared to a corresponding wild-type non-human organism or part thereof.

[58211] In another embodiment thereof said vector comprises beneath said nucleic acid molecule according to 1 (a), (b), (c), (d), (e), (f), (g), (h), (i), (j) or (k), a promoter, preferably a promoter selected from the group consisting of Big35S, PCUbi, Super and USP, which are operable linked.

[58212] In a preferred embodiment thereof said vector comprises beneath said nucleic acid molecule according to 1 (a), (b), (c), (d), (e), (f), (g), (h), (i), (j) or (k), a promoter, preferably a promoter selected from the group consisting of Big35S, PCUbi, Super and USP, which are operable linked; and said nucleic acid molecule according to 1 (a), (b), (c), (d), (e), (f), (g), (h), (i), (j) or (k) encodes a polypeptide which has the activity of the respective polypeptide represented by a protein comprising a polypeptide as depicted in the respective line in column 5 of Table II, application no. 11.

[58213] In another preferred embodiment thereof said vector comprises beneath said nucleic acid molecule according to 1 (a), (b), (c), (d), (e), (f), (g), (h), (i), (j) or (k), a promoter, preferably a promoter selected from the group consisting of Big35S, PCUbi, Super and USP, which are operable linked; and said nucleic acid molecule according to 1 (a), (b), (c), (d), (e), (f), (g), (h), (i), (j) or (k) confers a generation or an increase of the respective fine chemical in a non-human organism or a part thereof as compared to a corresponding wild-type non-human organism or part thereof.

[58214] In another preferred embodiment thereof said vector comprises beneath said nucleic acid molecule according to 1 (a), (b), (c), (d), (e), (f), (g), (h), (i), (j) or (k), a promoter, preferably a promoter selected from the group consisting of Big35S, PCUbi, Super and USP, which are operable linked; and said nucleic acid molecule according to 1 (a), (b), (c), (d), (e), (f), (g), (h), (i), (j) or (k) encodes a polypeptide which has the activity of the respective polypeptide represented by a protein as depicted in the respective line in column 5 of Table II, application no. 11, and confers a generation or an increase of the respective fine chemical in a non-human organism or a part thereof as compared to a corresponding wild-type non-human organism or part thereof.

[58215] In another embodiment thereof said vector comprises beneath said nucleic acid molecule according to 1 (a), (b), (c), (d), (e), (f), (g), (h), (i), (j) or (k), a nucleic acid molecule encoding a transit peptide, preferably encoding a plastidal transit peptide, especially in case in column 6 of Table I, application no. 11, in the same line as of the respective nucleic acid molecule according to 1) “plastidic” is depicted, or encoding a mitochondrial transit peptide, especially in case in column 6 of Table I, application no. 11, in the same line as of the respective nucleic acid molecule according to 1) “mitochondrial” is depicted, which are operable linked.

[58216] In another embodiment thereof said vector does not comprise beneath said nucleic acid molecule according to 1 (a), (b), (c), (d), (e), (f), (g), (h), (i), (j) or (k), a nucleic acid molecule encoding a transit peptide in case in column 6 of Table I, application no. 11, in the same line as of the respective nucleic acid molecule according to 1) “non-targeted” is depicted.

[58217] In another embodiment thereof said vector comprises beneath said nucleic acid molecule according to 1 (a), (b), (c), (d), (e), (f), (g), (h), (i), (j) or (k), and a promoter, preferably a promoter selected from the group consisting of Big35S, PCUbi, Super and USP; a nucleic acid molecule encoding a transit peptide, preferably encoding a plastidal transit peptide, especially in case in column 6 of Table I, application no. 11, in the same line as of the respective nucleic acid molecule according to 1) “plastidic” is depicted, or encoding a mitochondrial transit peptide, especially in case in column 6 of Table I, application no. 11, in the same line as of the respective nucleic acid molecule according to 1) “mitochondrial” is depicted, which are operable linked.

[58218] In another embodiment thereof said vector does not comprise beneath said nucleic acid molecule according to 1 (a), (b), (c), (d), (e), (f), (g), (h), (i), (j) or (k), and a promoter, preferably a promoter selected from the group consisting of Big35S, PCUbi, Super and USP, which are operable linked; a nucleic acid molecule encoding a transit peptide, especially in case in column 6 of Table I, application no. 11, in the same line as of the respective nucleic acid molecule according to 1) “non-targeted” is depicted.

[58219] In another embodiment thereof said vector comprises beneath said nucleic acid molecule according to 1 (a), (b), (c), (d), (e), (f), (g), (h), (i), (j) or (k), and a promoter, preferably a promoter selected from the group consisting of Big35S, PCUbi, Super and USP; a nucleic acid molecule encoding a transit peptide, preferably encoding a plastidal transit peptide, especially in case in column 6 of Table I, application no. 11, in the same line as of the respective nucleic acid molecule according to 1) “plastidic” is depicted, or encoding a mitochondrial transit peptide, especially in case in column 6 of Table I, application no. 11, in the same line as of the respective nucleic acid molecule according to 1) “mitochondrial” is depicted, which are operable linked; and wherein said nucleic acid molecule according to 1 (a), (b), (c), (d), (e), (f), (g), (h), (i), (j) or (k) encodes a polypeptide which has the activity of the respective polypeptide represented by a protein comprising a polypeptide as depicted in column 5 of Table II, application no. 11 (in the same line).

[58220] In another embodiment thereof said vector does not comprise beneath said nucleic acid molecule according to 1 (a), (b), (c), (d), (e), (f), (g), (h), (i), (j) or (k), and a promoter, preferably a promoter selected from the group consisting of Big35S, PCUbi, Super and USP, which are operatively linked; a nucleic acid molecule encoding a transit peptide, especially in case in column 6 of Table I, application no. 11, in the same line as of the respective nucleic acid molecule according to 1) “non-targeted” is depicted; and wherein said nucleic acid molecule according to 1 (a), (b), (c), (d), (e), (f), (g), (h), (i), (j) or (k) encodes a polypeptide which has the activity of the respective polypeptide represented by a protein comprising a polypeptide as depicted in column 5 of Table II, application no. 11.

[58221] In another embodiment thereof said vector comprises beneath said nucleic acid molecule according to 1 (a), (b), (c), (d), (e), (f), (g), (h), (i), (j) or (k), and a promoter, preferably a promoter selected from the group consisting of Big35S, PCUbi, Super and USP; a nucleic acid molecule encoding a transit peptide, preferably encoding a plastidal transit peptide, especially in case in column 6 of Table I, application no. 11, in the same line as of the respective nucleic acid molecule according to 1) “plastidic” is depicted, or encoding a mitochondrial transit peptide, especially in case in column 6 of Table I, application no. 11, in the same line as of the respective nucleic acid molecule according to 1) “mitochondrial” is depicted, which are operable linked; and wherein said nucleic acid molecule according to 1 (a), (b), (c), (d), (e), (f), (g), (h), (i), (j) or (k) confers a generation or an increase of the respective fine chemical in a non-human organism or a part thereof as compared to a corresponding wild-type non-human organism or part thereof.

[58222] In another embodiment thereof said vector does not comprise beneath said nucleic acid molecule according to 1 (a), (b), (c), (d), (e), (f), (g), (h), (i), (j) or (k), and a promoter, preferably a promoter selected from the group consisting of Big35S, PCUbi, Super and USP, which are operatively linked; a nucleic acid molecule encoding a transit peptide, especially in case in column 6 of Table I, application no. 11, in the same line as of the respective nucleic acid molecule according to 1) “non-targeted” is depicted; and wherein said nucleic acid molecule according to 1 (a), (b), (c), (d), (e), (f), (g), (h), (i), (j) or (k) confers a generation or an increase of the respective fine chemical in a non-human organism or a part thereof as compared to a corresponding wild-type non-human organism or part thereof.

[58223] In another embodiment thereof said vector comprises beneath said nucleic acid molecule according to 1 (a), (b), (c), (d), (e), (f), (g), (h), (i), (j) or (k), and a promoter, preferably a promoter selected from the group consisting of Big35S, PCUbi, Super and USP; a nucleic acid molecule encoding a transit peptide, preferably encoding a plastidal transit peptide, especially in case in column 6 of Table I, application no. 11, in the same line as of the respective nucleic acid molecule according to 1) “plastidic” is depicted, or encoding a mitochondrial transit peptide, especially in case in column 6 of Table I, application no. 11, in the same line as of the respective nucleic acid molecule according to 1) “mitochondrial” is depicted, which are operable linked; and wherein said nucleic acid molecule according to 1 (a), (b), (c), (d), (e), (f), (g), (h), (i), (j) or (k) encodes a polypeptide which has the activity of the respective polypeptide represented by a protein as depicted in column 5 of Table II application no. 11 and confers a generation or an increase of the respective fine chemical in a non-human organism or a part thereof as compared to a corresponding wild-type non-human organism or part thereof.

[58224] In another embodiment thereof said vector does not comprise beneath said nucleic acid molecule according to 1 (a), (b), (c), (d), (e), (f), (g), (h), (i), (j) or (k), and a promoter, preferably a promoter selected from the group consisting of Big35S, PCUbi, Super and USP, which are operatively linked; a nucleic acid molecule encoding a transit peptide, especially in case in column 6 of Table I, application no. 11, in the same line as of the respective nucleic acid molecule according to 1) “non-targeted” is depicted; and wherein said nucleic acid molecule according to 1 (a), (b), (c), (d), (e), (f), (g), (h), (i), (j) or (k) encodes a polypeptide which has the activity of the respective polypeptide represented by a protein as depicted in column 5 of Table II application no. 11 (in the same line) and confers a generation or an increase of the respective fine chemical in a non-human organism or a part thereof as compared to a corresponding wild-type non-human organism or part thereof.

[58225] In a preferred embodiment of said vector said nucleic acid molecule according to 1 (a), (b), (c), (d), (e), (f), (g), (h), (i), (j) or (k), said promoter and optionally said nucleic acid molecule encoding a transit peptide are encompassed in an expression cassette. Accordingly in an embodiment the invention provides a vector comprising an expression cassette comprising said nucleic acid molecule according to 1 (a), (b), (c), (d), (e), (f), (g), (h), (i), (j) or (k), said promoter and optionally said a nucleic acid molecule encoding a transit peptide, operable linked. Said expression cassette may encompass a terminator, too.

[58226] The invention further provides a vector comprising a nucleic acid molecule comprising 1) a nucleic acid molecule selected from the group consisting of:
[58227] (a) a nucleic acid molecule encoding a polypeptide shown in Table II, column 5 or 8, application no. 11, preferably shown in Table II A, application no. 11, in column 5, or in Table II A, application no. 11, column 8, or in Table II B, application no. 11, column 8, or a homolog or a fragment thereof;
[58228] (b) a nucleic acid molecule shown in Table I, application no. 11, column 5 or 8, preferably shown in Table I A, application no. 11, in column 5, or in Table I A, application no. 11, column 8, or in Table I B, application no. 11, column 8, preferably the coding region thereof, or a homolog or a fragment thereof;
[58229] (c) a nucleic acid molecule, which, as a result of the degeneracy of the genetic code, can be derived from a polypeptide sequence depicted in column 5 or 8 of Table II, application no. 11, preferably shown in Table II A, application no. 11, in column 5, or in Table II A, application no. 11, column 8, or in Table II B, application no. 11, column 8;
[58230] (d) a nucleic acid molecule having at least 30% identity, preferably at least 40%, 50%, 60%, 70%, 75%, 80%, 85%, 90%, 95%, 96%, 97%, 98%, 99%, 99.5%, with the nucleic acid molecule sequence of a polynucleotide comprising the nucleic acid molecule shown in column 5 or 8 of Table I, application no. 11, preferably shown in Table I A, application no. 11, in column 5, or in Table I A, application no. 11, column 8, or in Table I B, application no. 11, column 8, preferably the coding region thereof;
[58231] (e) a nucleic acid molecule encoding a polypeptide having at least 30% identity, preferably at least 40%, 50% 60%, 70%, 75%, 80%, 85%, 90%, 95%, 96%, 97%, 98%, 99%, 99.5%, identity with the amino acid sequence of the polypeptide encoded by the nucleic acid molecule of (a), (b), (c), or (d);
[58232] (f) a nucleic acid molecule which hybridizes with a nucleic acid molecule of (a), (b), (c), (d), or (e) under stringent hybridization conditions;
[58233] (g) a nucleic acid molecule encoding a polypeptide which can be isolated with the aid of monoclonal or polyclonal antibodies made against a polypeptide encoded by one of the nucleic acid molecules of (a), (b), (c), (d), (e) or (f);
[58234] (h) a nucleic acid molecule encoding a polypeptide comprising the consensus sequence or one or more polypeptide motifs as shown in column 8 of Table IV, application no. 11;
[58235] (i) a nucleic acid molecule encoding a polypeptide having the activity represented by a protein as depicted in column 5 of Table II, application no. 11;
[58236] (j) a nucleic acid molecule comprising a polynucleotide which is obtained by amplifying a cDNA library or a genomic library using the primers in Table III, application no. 11, column 8;
[58237] and
[58238] (k) nucleic acid molecule which is obtainable by screening a suitable nucleic acid library, especially a cDNA library and/or a genomic library, under stringent hybridization conditions with a probe comprising one of the sequences of the nucleic acid molecule of (a), (b), (c), (d), (e), (f), (g), (h), (i) or (j) or with a fragment thereof having at least 15 nt, preferably 20 nt, 30 nt, 50 nt, 100 nt, 200 nt, 500 nt, 1000 nt, 1500 nt, 2000 nt or 3000 nt of the nucleic acid molecule complementary to a nucleic acid sequence characterized in (a), (b), (c), (d), (e), (f), (g), (h), (i) or (j);
[58239] or a nucleic acid molecule comprising a sequence which is complementary thereto;
   whereby, preferably, the nucleic acid molecule according to 1 (a), (b), (c), (d), (e), (f), (g), (h), (i), (j) or (k) distinguishes over the sequence depicted in Table I A and/or I B, application no. 11, column 5 or 8, or the coding region thereof, by one or more nucleotides (especially but not exceeding 5%, preferably 4%, 3%, 2%, 1%, 0.5%, 0.2% or 0.1%). In an embodiment, the nucleic acid molecule of the invention does not consist of the sequence shown in Table I A and/or I B, application no. 11, column 5 or 8, or the coding region thereof, respectively. In another embodiment, the nucleic acid molecule of the present invention, preferably the coding region thereof, is 30%, 40%, 50%, 60%, 70%, 80%, 90%, 95% identical but less than 100%, 99.999%, 99.99%, 99.9%, 99%, 98%, 97%, 96% or 95% identical to the sequence shown in Table I A and/or I B, application no. 11, column 5 or 8, or the coding region thereof, respectively. In a further embodiment the nucleic acid molecule does not encode the polypeptide sequence shown in Table II A and/or II B, application no. 11, column 5 or 8 but homologs thereof. Accordingly, in one embodiment, the nucleic acid molecule of the present invention encodes in one embodiment a polypeptide which differs at least in one or more amino acids (especially but not exceeding 5%, preferably 4%, 3%, 2%, 1%, 0.5%, 0.2% or 0.1%) from the polypeptide shown in Table II, application no. 11, column 5 or 8 and does not encode a protein of the sequence shown in Table II A and/or II B, application no. 11, column 5 or 8. Accordingly, in one embodiment, the protein encoded by a sequence of a nucleic acid according to (a), (b), (c), (d), (e), (f), (g), (h), (i), (j) or (k) does not consist of the sequence shown in Table I A and/or I B, application no. 11, column 5 and 8, or the coding region thereof. In a further embodiment, the protein of the present invention is at least 30%,40%, 50%, 60%, 70%, 80%, 90%, 95% identical to protein sequence depicted in Table II A and/or II B, application no. 11, column 5 or 8 but less than 100%, preferably less than 99.999%, 99.99% or 99.9%, more preferably less than 99%, 985, 97%, 96% or 95% identical to the sequence shown in Table II A and/or II B, application no. 11, column 5 or 8.
   (All the references to Tables I to IV are references to the corresponding lines of Tables I to IV.)

[58240] In a preferred embodiment of said vector said nucleic acid molecule according to 1 (a), (b), (c), (d), (e), (f), (g), (h), (i), (j) or (k) encodes a polypeptide which has the activity of the respective polypeptide represented by a protein comprising a polypeptide as depicted in the respective line in column 5 of Table II, application no. 11.

[58241] In another preferred embodiment of said vector said nucleic acid molecule according to 1 (a), (b), (c), (d), (e), (f), (g), (h), (i), (j) or (k) confers a generation or an increase of the respective fine chemical in a non-human organism or a part thereof as compared to a corresponding wild-type non-human organism or part thereof.

[58242] In another preferred embodiment of said vector said nucleic acid molecule according to 1 (a), (b), (c), (d), (e), (f), (g), (h), (i), (j) or (k) encodes a polypeptide which has the activity of the respective polypeptide represented by a protein as depicted in the respective line in column 5 of Table II, application no. 11, and confers a generation or an increase of the respective fine chemical in a non-human organism or a part thereof as compared to a corresponding wild-type non-human organism or part thereof.

[58243] In another embodiment thereof said vector comprises beneath said nucleic acid molecule according to 1 (a), (b), (c), (d), (e), (f), (g), (h), (i), (j) or (k), a promoter, preferably a promoter selected from the group consisting of Big35S, PCUbi, Super and USP, which are operable linked.

[58244] In a preferred embodiment thereof said vector comprises beneath said nucleic acid molecule according to 1 (a), (b), (c), (d), (e), (f), (g), (h), (i), (j) or (k), a promoter, preferably a promoter selected from the group consisting of Big35S, PCUbi, Super and USP, which are operable linked; and said nucleic acid molecule according to 1 (a), (b), (c), (d), (e), (f), (g), (h), (i), (j) or (k) encodes a polypeptide which has the activity of the respective polypeptide represented by a protein comprising a polypeptide as depicted in the respective line in column 5 of Table II, application no. 11.

[58245] In another preferred embodiment thereof said vector comprises beneath said nucleic acid molecule according to 1 (a), (b), (c), (d), (e), (f), (g), (h), (i), (j) or (k), a promoter, preferably a promoter selected from the group consisting of Big35S, PCUbi, Super and USP, which are operable linked; and said nucleic acid molecule according to 1 (a), (b), (c), (d), (e), (f), (g), (h), (i), (j) or (k) confers a generation or an increase of the respective fine chemical in a non-human organism or a part thereof as compared to a corresponding wild-type non-human organism or part thereof.

[58246] In another preferred embodiment thereof said vector comprises beneath said nucleic acid molecule according to 1 (a), (b), (c), (d), (e), (f), (g), (h), (i), (j) or (k), a promoter, preferably a promoter selected from the group consisting of Big35S, PCUbi, Super and USP, which are operable linked; and said nucleic acid molecule according to 1 (a), (b), (c), (d), (e), (f), (g), (h), (i), (j) or (k) encodes a polypeptide which has the activity of the respective polypeptide represented by a protein as depicted in the respective line in column 5 of Table II, application no. 11, and confers a generation or an increase of the respective fine chemical in a non-human organism or a part thereof as compared to a corresponding wild-type non-human organism or part thereof.

[58247] In another embodiment thereof said vector comprises beneath said nucleic acid molecule according to 1 (a), (b), (c), (d), (e), (f), (g), (h), (i), (j) or (k), a nucleic acid molecule encoding a transit peptide, preferably encoding a plastidal transit peptide, especially in case in column 6 of Table I, application no. 11, in the same line as of the respective nucleic acid molecule according to 1) “plastidic” is depicted, or encoding a mitochondrial transit peptide, especially in case in column 6 of Table I, application no. 11, in the same line as of the respective nucleic acid molecule according to 1) “mitochondrial” is depicted, which are operable linked.

[58248] In another embodiment thereof said vector does not comprise beneath said nucleic acid molecule according to 1 (a), (b), (c), (d), (e), (f), (g), (h), (i), (j) or (k), a nucleic acid molecule encoding a transit peptide in case in column 6 of Table I, application no. 11, in the same line as of the respective nucleic acid molecule according to 1) “non-targeted” is depicted.

[58249] In another embodiment thereof said vector comprises beneath said nucleic acid molecule according to 1 (a), (b), (c), (d), (e), (f), (g), (h), (i), (j) or (k), and a promoter, preferably a promoter selected from the group consisting of Big35S, PCUbi, Super and USP; a nucleic acid molecule encoding a transit peptide, preferably encoding a plastidal transit peptide, especially in case in column 6 of Table I, application no. 11, in the same line as of the respective nucleic acid molecule according to 1) “plastidic” is depicted, or encoding a mitochondrial transit peptide, especially in case in column 6 of Table I, application no. 11, in the same line as of the respective nucleic acid molecule according to 1) “mitochondrial” is depicted, which are operable linked.

[58250] In another embodiment thereof said vector does not comprise beneath said nucleic acid molecule according to 1 (a), (b), (c), (d), (e), (f), (g), (h), (i), (j) or (k), and a promoter, preferably a promoter selected from the group consisting of Big35S, PCUbi, Super and USP, which are operatively linked; a nucleic acid molecule encoding a transit peptide, especially in case in column 6 of Table I, application no. 11, in the same line as of the respective nucleic acid molecule according to 1) “non-targeted” is depicted.

[58251] In another embodiment thereof said vector comprises beneath said nucleic acid molecule according to 1 (a), (b), (c), (d), (e), (f), (g), (h), (i), (j) or (k), and a promoter, preferably a promoter selected from the group consisting of Big35S, PCUbi, Super and USP; a nucleic acid molecule encoding a transit peptide, preferably encoding a plastidal transit peptide, especially in case in column 6 of Table I, application no. 11, in the same line as of the respective nucleic acid molecule according to 1) “plastidic” is depicted, or encoding a mitochondrial transit peptide, especially in case in column 6 of Table I, application no. 11, in the same line as of the respective nucleic acid molecule according to 1) “mitochondrial” is depicted, which are operable linked; and wherein said nucleic acid molecule according to 1 (a), (b), (c), (d), (e), (f), (g), (h), (i), (j) or (k) encodes a polypeptide which has the activity of the respective polypeptide represented by a protein comprising a polypeptide as depicted in column 5 of Table II, application no. 11.

[58252] In another embodiment thereof said vector does not comprise beneath said nucleic acid molecule according to 1 (a), (b), (c), (d), (e), (f), (g), (h), (i), (j) or (k), and a promoter, preferably a promoter selected from the group consisting of Big35S, PCUbi, Super and USP, which are operatively linked; a nucleic acid molecule encoding a transit peptide, especially in case in column 6 of Table I, application no. 11, in the same line as of the respective nucleic acid molecule according to 1) “non-targeted” is depicted; and wherein said nucleic acid molecule according to 1 (a), (b), (c), (d), (e), (f), (g), (h), (i), (j) or (k) encodes a polypeptide which has the activity of the respective polypeptide represented by a protein comprising a polypeptide as depicted in column 5 of Table II, application no. 11.

[58253] In another embodiment thereof said vector comprises beneath said nucleic acid molecule according to 1 (a), (b), (c), (d), (e), (f), (g), (h), (i), (j) or (k), and a promoter, preferably a promoter selected from the group consisting of Big35S, PCUbi, Super and USP; a nucleic acid molecule encoding a transit peptide, preferably encoding a plastidal transit peptide, especially in case in column 6 of Table I, application no. 11, in the same line as of the respective nucleic acid molecule according to 1) “plastidic” is depicted, or encoding a mitochondrial transit peptide, especially in case in column 6 of Table I, application no. 11, in the same line as of the respective nucleic acid molecule according to 1) “mitochondrial” is depicted, which are operable linked; and wherein said nucleic acid molecule according to 1 (a), (b), (c), (d), (e), (f), (g), (h), (i), (j) or (k) confers a generation or an increase of the respective fine chemical in a non-human organism or a part thereof as compared to a corresponding wild-type non-human organism or part thereof.

[58254] In another embodiment thereof said vector does not comprise beneath said nucleic acid molecule according to 1 (a), (b), (c), (d), (e), (f), (g), (h), (i), (j) or (k), and a promoter, preferably a promoter selected from the group consisting of Big35S, PCUbi, Super and USP, which are operatively linked; a nucleic acid molecule encoding a transit peptide, especially in case in column 6 of Table I, application no. 11, in the same line as of the respective nucleic acid molecule according to 1) “non-targeted” is depicted; and wherein said nucleic acid molecule according to 1 (a), (b), (c), (d), (e), (f), (g), (h), (i), (j) or (k) confers a generation or an increase of the respective fine chemical in a non-human organism or a part thereof as compared to a corresponding wild-type non-human organism or part thereof.

[58255] In another embodiment thereof said vector comprises beneath said nucleic acid molecule according to 1 (a), (b), (c), (d), (e), (f), (g), (h), (i), (j) or (k), and a promoter, preferably a promoter selected from the group consisting of Big35S, PCUbi, Super and USP; a nucleic acid molecule encoding a transit peptide, preferably encoding a plastidal transit peptide, especially in case in column 6 of Table I, application no. 11, in the same line as of the respective nucleic acid molecule according to 1) “plastidic” is depicted, or encoding a mitochondrial transit peptide, especially in case in column 6 of Table I, application no. 11, in the same line as of the respective nucleic acid molecule according to 1) “mitochondrial” is depicted, which are operable linked; and wherein said nucleic acid molecule according to 1 (a), (b), (c), (d), (e), (f), (g), (h), (i), (j) or (k) encodes a polypeptide which has the activity of the respective polypeptide represented by a protein as depicted in column 5 of Table II application no. 11 and confers a generation or an increase of the respective fine chemical in a non-human organism or a part thereof as compared to a corresponding wild-type non-human organism or part thereof.

[58256] In another embodiment thereof said vector does not comprise beneath said nucleic acid molecule according to 1 (a), (b), (c), (d), (e), (f), (g), (h), (i), (j) or (k), and a promoter, preferably a promoter selected from the group consisting of Big35S, PCUbi, Super and USP, which are operatively linked; a nucleic acid molecule encoding a transit peptide, especially in case in column 6 of Table I, application no. 11, in the same line as of the respective nucleic acid molecule according to 1) “non-targeted” is depicted; and wherein said nucleic acid molecule according to 1 (a), (b), (c), (d), (e), (f), (g), (h), (i), (j) or (k) encodes a polypeptide which has the activity of the respective polypeptide represented by a protein as depicted in column 5 of Table II application no. 11 and confers a generation or an increase of the respective fine chemical in a non-human organism or a part thereof as compared to a corresponding wild-type non-human organism or part thereof.

[58257] [0181.1.8.11] to [0209.1.8.11] for the disclosure of these paragraphs see [0181.1.8.8] to [0209.1.8.8] above.

[58258] The genes of the invention, coding for an activity selected from the group consisting of 2-C-methyl-D-erythritol 4-phosphate cytidylyltransferase, 3-ketoacyl-CoA thiolase, 49747384_SOYBEAN-protein, AAS bifunctional protein, ABC metal ion transporter substrate-binding protein, acid phosphatase precursor, acid shock protein, aconitate hydratase, acyl transferase, arginine decarboxylase, aromatic acid decarboxylase, At1g19800-protein, At1g23110-protein, At2g45420-protein, ATPase epsilon subunit, b0050-protein, b1234-protein, b1248-protein, b1330-protein, b1670-protein, b1837-protein, b2032-protein, b2099-protein, b2107-protein, b2399-protein, b2682-protein, b2849-protein, b3814-protein, bifunctional protein (phosphoribosyltransferase and regulatory protein), branched chain amino acid ABC transporter ATP-binding protein, calcium-dependent protein kinase, carbamoyl-phosphate synthase subunit, carbon dioxide concentrating mechanism protein, cation-transporting ATPase, CCAAT-binding transcription factor, chlorophyllase, colanic acid biosynthesis protein, coproporphyrinogen III oxidase, DnaJ-like chaperone, ethanolamine utilization protein, F-box protein, Fe—S subunit of oxidoreductase, flavodoxin, glucose-6-phosphate 1-dehydrogenase, glutaredoxin, glutathione S-transferase, glycerol-3-phosphate dehydrogenase, heat shock transcription factor, HesB/YadR/YfhF family protein, homocitrate synthase, lipoprotein precursor, metal-dependent hydrolase, monothiol glutaredoxin, NADH-quinone oxidoreductase subunit, nitrate/nitrite transport protein, oxidoreductase, peptidyl-prolyl cis-trans isomerase, permease protein of ABC transporter, phosphate import ATP-binding protein, phosphoadenosine phosphosulfate reductase , phosphoribosylformyl glycinamidine synthase subunit, protein kinase, protein phosphatase, purine nucleoside phosphorylase, recombinase A, sll1032-protein, sodium/proton antiporter, ThiF family protein, threonine dehydratase, threonine efflux protein, transcription factor, and ymr013c-protein are also called “FCRP genes”.

[58259] [0211.1.8.11] to [0225.1.8.11] for the disclosure of these paragraphs see [0211.1.8.8] to [0225.1.8.8] above.

[58260] In addition to the sequence mentioned in Table I, application no. 11, column 5 or 8, preferably the coding region thereof, or its homologs or fragments, it may be advantageous additionally to express and/or mutate further genes in the non-human organisms. Especially advantageously, additionally at least one further gene of the biosynthetic pathway of the fine chemical is expressed in the non-human organisms such as plants or microorganisms. It is also possible that the regulation of the natural genes has been modified advantageously so that the gene and/or its gene product is no longer subject to the regulatory mechanisms which exist in the non-human organisms. This leads to an increased synthesis of the respective fatty acid since, for example, feedback regulations no longer exist to the same extent or not at all. In addition it might be advantageously to combine the nucleic acids sequences of the invention containing the sequences shown in the respective line in Table I, application no. 11, column 5 or 8, preferably the coding region thereof, or homologs or fragments thereof, with genes which generally support or enhance the growth or yield of the target non-human organisms, for example genes which lead to faster growth rate of non human organism like microorganisms or plants or genes which produce stress-, pathogen-, or herbicide-resistant plants.

[58261] [0227.1.8.11] to [0239.1.8.11] for the disclosure of these paragraphs see [0227.1.8.8] to [0239.1.8.8] above.

[58262] In an embodiment of the present invention the nucleic acid construct of the present invention comprises a nucleic acid molecule as depicted in the respective line in Table I, application no. 11, column 5 or 8, preferably the coding region thereof, a fragment or a homolog thereof, and a plant promoter, such as the Big 35S promoter, the DC3 promoter, the PC

[58263] Ubi promoter, the LegB4-promoter, the Super promoter, the USP promoter or the like. In another embodiment the nucleic acid construct of the present invention comprises a nucleic acid molecule as depicted in the respective line in Table I, application no. 11, column 5 or 8, preferably the coding region thereof, a fragment or a homolog thereof, and a plant promoter such as, for example, the USP, the LegB4-, the DC3 promoter or the ubiquitin promoter from parsley or other herein mentioned promoters. In a further embodiment the nucleic acid construct of the present invention comprises a nucleic acid molecule as depicted in the respective line in Table I, application no. 11, column 5 or 8, preferably the coding region thereof, a fragment or a homolog thereof, and a plant promoter, such as the Big 35S promoter, the PC Ubi promoter, the Super promoter, the USP promoter or the like. In addition different terminators may advantageously be used in these nucleic acid constructs; examples for transcriptional termination are polyadenylation signals.

[58264] [0241.1.8.11] to [0245.1.8.11] for the disclosure of this paragraph see [0241.1.8.8] to [0245.1.8.8] above.

[58265] Other preferred sequences for use in operable linkage in gene expression constructs are targeting sequences, which are required for targeting the gene product into specific cell compartments (for a review, see Kermode, Crit. Rev. Plant Sci. 15 (4), 285 (1996) and references cited therein), for example into the vacuole, the nucleus, all types of plastids, such as amyloplasts, chloroplasts, chromoplasts, the extracellular space, the mitochondria, the endoplasmic reticulum, elaioplasts, peroxisomes, glycosomes, and other compartments of cells or extracellular; preferred are sequences, which are involved in targeting to plastids as mentioned above. Sequences, which must be mentioned in this context are, in particular, the signal-peptideor transit-peptide-encoding sequences which are known per se. For example, plastidtransit-peptide-encoding sequences enable the targeting of the expression product into the plastids of a plant cell. Targeting sequences are also known for eukaryotic and to a lower extent for prokaryotic organisms and can advantageously be operable linked with the nucleic acid molecule of the present invention as shown in Table I, application no. 11, columns 5 and 8, preferably the coding region thereof, or homologs or fragments thereof, and described herein to achieve an expression in one of said compartments or extracellular.

[58266] [0247.1.8.11] to [0266.1.8.11] for the disclosure of these paragraphs see [0247.1.8.8] to [0266.1.8.8] above.

[58267] An embodiment of the invention relates to a vector where the nucleic acid molecule according to the invention is linked operably to regulatory sequences which permit the expression in a prokaryotic or eukaryotic host. A further embodiment of the invention relates to a vector in which a nucleic acid sequence encoding one of the polypeptides shown in the respective line in Table II, application no. 11, columns 5 or 8, or homologs or fragments thereof, is functionally linked to a targeting sequence such as a plastidial or mitochondrial targeting sequence. A further embodiment of the invention relates to a vector in which a nucleic acid sequence encoding one of the polypeptides shown in the respective line in Table II, application no. 11, columns 5 or 8, or homologs or fragments thereof, is functionally linked to (a) regulatory sequence which permit the expression in an organelle, such as plastids or mitochondria, preferably plastids.

[58268] A further embodiment of the invention relates to a vector which comprises a nucleic acid sequence encoding one of the polypeptides shown in the respective line in Table II, application no. 11, columns 5 or 8, or homologs or fragments thereof, but no additional targeting sequence.

[58269] [0268.1.8.11] to [0273.1.8.11] for the disclosure of these paragraphs see [0268.1.8.8] to [0273.1.8.8] above.

[58270] A further object of the invention relates to the use of a nucleic acid construct, e.g. an expression cassette, comprising one or more nucleic acid molecules encoding one or more polypeptides as depicted in the respective line(s) in Table II, application no. 11, columns 5 or 8, or homologs or fragments thereof, or comprising one or more nucleic acid molecules as depicted in the respective line(s) in Table I, application no. 11, columns 5 or 8, preferably the coding region thereof, or homologs or fragments thereof, or comprising a nucleic acid molecule hybridizing therewith for the transformation of a microorganism or a plant cell, plant tissues or a part of a plant.

[58271] In doing so, depending on the choice of promoter, the nucleic acid molecules shown in the respective line in Table I, application no. 11, column 5 or 8, preferably the coding region thereof, or homologs or fragments thereof, or the nucleic acid molecules encoding a polypeptide as depicted in the respective line in Table II, application no. 11, column 5 or 8, or homologs or fragments thereof, can be expressed in the whole plant or specifically e.g. in the leaves, in the seeds, the nodules, in roots, in the stem or other parts of the plant. Those transgenic plants overproducing sequences, e.g. as depicted in the respective line in Table I, application no. 11, column 5 or 8, preferably the coding region thereof, or homologs or fragments thereof, the plant cell, plant tissues, plants, the reproductive material thereof, or parts thereof are a further object of the present invention.

[58272] Within the framework of the present invention, the production of the palmitic acid is due to the generation or over-expression of one or more polypeptides as depicted in the respective line(s) in Table II, application no. 11, column 5 or 8, or homologs or fragments thereof, or encoded by the corresponding nucleic acid molecules as depicted in the respective line(s) in Table I, application no. 11, column 5 or 8, preferably the coding region thereof, or homologs or fragments thereof, in the non-human organism according to the invention, advantageously in the transgenic microorganism or plant according to the invention, at least for the duration of at least one plant generation.

[58273] A constitutive expression of the polypeptide as depicted in the respective line in Table II, application no. 11, column 5 or 8, or homologs or fragments thereof, or encoded by the respective nucleic acid molecule as depicted in the respective line in Table I, application no. 11, column 5 or 8, preferably the coding region thereof, or homologs or fragments thereof, may be advantageous. On the other hand, an inducible expression may also appear desirable. Expression of the polypeptide sequences of the invention can be either directed to the cytosol or to the organelles, such as plastids or mitochondria, preferably the plastids of the host cells, preferably the plant cells, or non-targeted.

[58274] for the disclosure of this paragraph see [0278.1.8.8] above.

[58275] In a further embodiment the invention relates to a transgenic non-human organisms such as transgenic microorganism or transgenic plant comprising a nucleic acid molecule comprising
[58276] [1) a nucleic acid molecule selected from the group consisting of
   [58277] (a) a nucleic acid molecule encoding a polypeptide shown in Table II, application no. 11, column 5 or 8, preferably shown in Table II A, application no. 11, column 5, or in Table II A, application no. 11, column 8, or in Table II B, application no. 11, column 8, or a homolog or a fragment thereof;
   [58278] (b) a nucleic acid molecule shown in Table I, application no. 11, column 5 or 8, preferably shown in Table I A, application no. 11, column 5, or in Table I A, application no. 11, column 8, or in Table I B, application no. 11, column 8, preferably the coding region thereof, or a homolog or a fragment thereof;
   [58279] (c) a nucleic acid molecule, which, as a result of the degeneracy of the genetic code, can be derived from a polypeptide sequence depicted in column 5 or 8 of Table II, application no. 11, preferably shown in Table II A, application no. 11, column 5, or in Table II A, application no. 11, column 8, or in Table II B, application no. 11, column 8;
   [58280] (d) a nucleic acid molecule having at least 30% identity, preferably at least 40%, 50%, 60%, 70%, 75%, 80%, 85%, 90%, 95%, 96%, 97%, 98%, 99%, 99.5%, with the nucleic acid molecule sequence of a polynucleotide comprising the nucleic acid molecule shown in column 5 or 8 of Table I, application no. 11, preferably shown in Table I A, application no. 11, column 5, or in Table I A, application no. 11, column 8, or in Table I B, application no. 11, column 8, preferably the coding region thereof;
   [58281] (e) a nucleic acid molecule encoding a polypeptide having at least 30% identity, preferably at least 40%, 50% 60%, 70%, 75%, 80%, 85%, 90%, 95%, 96%, 97%, 98%, 99%, 99.5%, identity with the amino acid sequence of the polypeptide encoded by the nucleic acid molecule of (a), (b), (c) or (d);
   [58282] (f) a nucleic acid molecule which hybridizes with a nucleic acid molecule of (a), (b), (c), (d) or (e) under stringent hybridization conditions;
   [58283] (g) a nucleic acid molecule encoding a polypeptide which can be isolated with the aid of monoclonal or polyclonal antibodies made against a polypeptide encoded by one of the nucleic acid molecules of (a), (b), (c), (d), (e) or (f);
   [58284] (h) a nucleic acid molecule encoding a polypeptide comprising the consensus sequence or one or more polypeptide motifs as shown in column 8 of Table IV, application no. 11;
   [58285] (i) a nucleic acid molecule encoding a polypeptide having the activity represented by a respective protein as depicted in column 5 of Table II, application no. 11;
   [58286] (j) a nucleic acid molecule comprising a polynucleotide which is obtained by amplifying a cDNA library or a genomic library using the primers in Table III, application no. 11, column 8;
   [58287] and
   [58288] (k) nucleic acid molecule which is obtainable by screening a suitable nucleic acid library, especially a cDNA library and/or a genomic library, under stringent hybridization conditions with a probe comprising one of the sequences of the nucleic acid molecule of (a), (b), (c), (d), (e), (f), (g), (h), (i) or (j) or with a fragment of at least 15 nt, preferably 20 nt, 30 nt, 50 nt, 100 nt, 200 nt,500 nt, 1000 nt, 1500 nt, 2000 nt or 3000 nt of the nucleic acid molecule characterized in (a), (b), (c), (d), (e), (f), (g), (h), (i) or (j);
   [58289] or a nucleic acid molecule comprising a sequence which is complementary thereto;
      and, if desired
[58290] 2) nucleic acid molecule encoding a transit peptide, preferably encoding a plastidal transit peptide or a mitochondrial transit peptide;
   which are operable linked;]
   or comprising an expression cassette comprising
[58291] [0) a promoter, preferably a promoter selected from the group consisting of Big35S, PCUbi, Super and USP; and
[58292] 1) a nucleic acid molecule selected from the group consisting of
   [58293] (a) a nucleic acid molecule encoding a polypeptide shown in Table II, application no. 11, column 5 or 8, preferably shown in Table II A, application no. 11, column 5, or in Table II A, application no. 11, column 8, or in Table II B, application no. 11, column 8, or a homolog or a fragment thereof;
   [58294] (b) a nucleic acid molecule shown in Table I, application no. 11, column 5 or 8, preferably shown in Table I A, application no. 11, column 5, or in Table I A, application no. 11, column 8, or in Table I B, application no. 11, column 8, preferably the coding region thereof, or a homolog or a fragment thereof;
   [58295] (c) a nucleic acid molecule, which, as a result of the degeneracy of the genetic code, can be derived from a polypeptide sequence depicted in column 5 or 8 of Table II, application no. 11, preferably shown in Table II A, application no. 11, column 5, or in Table II A, application no. 11, column 8, or in Table II B, application no. 11, column 8;
   [58296] (d) a nucleic acid molecule having at least 30% identity, preferably at least 40%, 50%, 60%, 70%, 75%, 80%, 85%, 90%, 95%, 96%, 97%, 98%, 99%, 99.5%, with the nucleic acid molecule sequence of a polynucleotide comprising the nucleic acid molecule shown in column 5 or 8 of Table I, application no. 11, preferably shown in Table I A, application no. 11, column 5, or in Table I A, application no. 11, column 8, or in Table I B, application no. 11, column 8, preferably the coding region thereof;
   [58297] (e) a nucleic acid molecule encoding a polypeptide having at least 30% identity, preferably at least 40%, 50% 60%, 70%, 75%, 80%, 85%, 90%, 95%, 96%, 97%, 98%, 99%, 99.5%, identity with the amino acid sequence of the polypeptide encoded by the nucleic acid molecule of (a), (b), (c) or (d);
   [58298] (f) a nucleic acid molecule which hybridizes with a nucleic acid molecule of (a), (b), (c), (d) or (e) under stringent hybridization conditions;
   [58299] (g) a nucleic acid molecule encoding a polypeptide which can be isolated with the aid of monoclonal or polyclonal antibodies made against a polypeptide encoded by one of the nucleic acid molecules of (a), (b), (c), (d), (e) or (f);
   [58300] (h) a nucleic acid molecule encoding a polypeptide comprising the consensus sequence or one or more polypeptide motifs as shown in column 8 of Table IV, application no. 11;
   [58301] (i) a nucleic acid molecule encoding a polypeptide having the activity represented by a respective protein as depicted in column 5 of Table II, application no. 11;
   [58302] (j) a nucleic acid molecule comprising a polynucleotide which is obtained by amplifying a cDNA library or a genomic library using the primers in Table III, application no. 11, column 8;
   [58303] and
   [58304] (k) nucleic acid molecule which is obtainable by screening a suitable nucleic acid library, especially a cDNA library and/or a genomic library, under stringent hybridization conditions with a probe comprising one of the sequences of the nucleic acid molecule of (a), (b), (c), (d), (e), (f), (g), (h), (i) or (j) or with a fragment of at least 15 nt, preferably 20 nt, 30 nt, 50 nt, 100 nt, 200 nt,500 nt, 1000 nt, 1500 nt, 2000 nt or 3000 nt of the nucleic acid molecule characterized in (a), (b), (c), (d), (e), (f), (g), (h), (i) or (j);
   [58305] or a nucleic acid molecule comprising a sequence which is complementary thereto;
      and, if desired
[58306] 2) nucleic acid molecule encoding a transit peptide, preferably encoding a plastidal transit peptide or a mitochondrial transit peptide;
   which are operable linked;]
   or comprising or being transformed by a vector comprising
[58307] [1) a nucleic acid molecule selected from the group consisting of
   [58308] (a) a nucleic acid molecule encoding a polypeptide shown in Table II, application no. 11, column 5 or 8, preferably shown in Table II A, application no. 11, column 5, or in Table II A, application no. 11, column 8, or in Table II B, application no. 11, column 8, or a homolog or a fragment thereof;
   [58309] (b) a nucleic acid molecule shown in Table I, application no. 11, column 5 or 8, preferably shown in Table I A, application no. 11, column 5, or in Table I A, application no. 11, column 8, or in Table I B, application no. 11, column 8, preferably the coding region thereof, or a homolog or a fragment thereof;
   [58310] (c) a nucleic acid molecule, which, as a result of the degeneracy of the genetic code, can be derived from a polypeptide sequence depicted in column 5 or 8 of Table II, application no. 11, preferably shown in Table II A, application no. 11, column 5, or in Table II A, application no. 11, column 8, or in Table II B, application no. 11, column 8;
   [58311] (d) a nucleic acid molecule having at least 30% identity, preferably at least 40%, 50%, 60%, 70%, 75%, 80%, 85%, 90%, 95%, 96%, 97%, 98%, 99%, 99.5%, with the nucleic acid molecule sequence of a polynucleotide comprising the nucleic acid molecule shown in column 5 or 8 of Table I, application no. 11, preferably shown in Table I A, application no. 11, column 5, or in Table I A, application no. 11, column 8, or in Table I B, application no. 11, column 8, preferably the coding region thereof;
   [58312] (e) a nucleic acid molecule encoding a polypeptide having at least 30% identity, preferably at least 40%, 50% 60%, 70%, 75%, 80%, 85%, 90%, 95%, 96%, 97%, 98%, 99%, 99.5%, identity with the amino acid sequence of the polypeptide encoded by the nucleic acid molecule of (a), (b), (c) or (d);
   [58313] (f) a nucleic acid molecule which hybridizes with a nucleic acid molecule of (a), (b), (c), (d) or (e) under stringent hybridization conditions;
   [58314] (g) a nucleic acid molecule encoding a polypeptide which can be isolated with the aid of monoclonal or polyclonal antibodies made against a polypeptide encoded by one of the nucleic acid molecules of (a), (b), (c), (d), (e) or (f);
   [58315] (h) a nucleic acid molecule encoding a polypeptide comprising the consensus sequence or one or more polypeptide motifs as shown in column 8 of Table IV, application no. 11;
   [58316] (i) a nucleic acid molecule encoding a polypeptide having the activity represented by a respective protein as depicted in column 5 of Table II, application no. 11;
   [58317] (j) a nucleic acid molecule comprising a polynucleotide which is obtained by amplifying a cDNA library or a genomic library using the primers in Table III, application no. 11, column 8;
   [58318] and
   [58319] (k) nucleic acid molecule which is obtainable by screening a suitable nucleic acid library, especially a cDNA library and/or a genomic library, under stringent hybridization conditions with a probe comprising one of the sequences of the nucleic acid molecule of (a), (b), (c), (d), (e), (f), (g), (h), (i) or (j) or with a fragment of at least 15 nt, preferably 20 nt, 30 nt, 50 nt, 100 nt, 200 nt,500 nt, 1000 nt, 1500 nt, 2000 nt or 3000 nt of the nucleic acid molecule characterized in (a), (b), (c), (d), (e), (f), (g), (h), (i) or (j);
   [58320] or a nucleic acid molecule comprising a sequence which is complementary thereto;]
      as well as respective transgenic cells, tissue, parts of such non-human organism, e.g. plant cells, plant tissue, part of plants, like leaves, roots, stems, blossoms, seeds, fruits, pollen and the like.
      (All the references to Tables I to IV are references to the corresponding lines of Tables I to IV.)

[58321] In a preferred embodiment of said transgenic non-human organism said nucleic acid molecule according to 1 (a), (b), (c), (d), (e), (f), (g), (h), (i), (j) or (k) encodes a polypeptide which has the activity of the respective polypeptide represented by a protein comprising a polypeptide as depicted in the respective line in column 5 of Table II, application no. 11.

[58322] In another preferred embodiment of said transgenic non-human organism said nucleic acid molecule according to 1 (a), (b), (c), (d), (e), (f), (g), (h), (i), (j) or (k) confers a generation or an increase of the respective fine chemical in a non-human organism or a part thereof as compared to a corresponding wild-type non-human organism or part thereof.

[58323] In another preferred embodiment of said transgenic non-human organism said nucleic acid molecule according to 1 (a), (b), (c), (d), (e), (f), (g), (h), (i), (j) or (k) encodes a polypeptide which has the activity of the respective polypeptide represented by a protein as depicted in the respective line in column 5 of Table II application no. 11 and confers a generation or an increase of the respective fine chemical in a non-human organism or a part thereof as compared to a corresponding wild-type non-human organism or part thereof.

[58324] In another embodiment of said transgenic non-human organism the expression cassette comprises 2) a nucleic acid molecule encoding a transit peptide, preferably encoding a plastidal transit peptide, especially in case in column 6 of Table I, application no. 11, in the same line as of the respective nucleic acid molecule according to 1) “plastidic” is depicted, or encoding a mitochondrial transit peptide, especially in case in column 6 of Table I, application no. 11, in the same line as of the respective nucleic acid molecule according to 1) “mitochondrial” is depicted.

[58325] In another embodiment of said transgenic non-human organism the expression cassette does not comprise 2) a nucleic acid molecule encoding a transit peptide, especially in case in column 6 of Table I, application no. 11, in the same line as of the respective nucleic acid molecule according to 1) “non-targeted” is depicted.

[58326] In another embodiment of said transgenic non-human organism said vector comprises beneath said nucleic acid molecule according to 1 (a), (b), (c), (d), (e), (f), (g), (h), (i), (j) or (k), a promoter, preferably a promoter selected from the group consisting of Big35S, PCUbi, Super and USP, which are operable linked.

[58327] In a preferred embodiment of said transgenic non-human organism said vector comprises beneath said nucleic acid molecule according to 1 (a), (b), (c), (d), (e), (f), (g), (h), (i), (j) or (k), a promoter, preferably a promoter selected from the group consisting of Big35S, PCUbi, Super and USP, which are operable linked; and said nucleic acid molecule according to 1 (a), (b), (c), (d), (e), (f), (g), (h), (i), (j) or (k) encodes a polypeptide which has the activity of the respective polypeptide represented by a protein comprising a polypeptide as depicted in the respective line in column 5 of Table II, application no. 11.

[58328] In another preferred embodiment of said transgenic non-human organism said vector comprises beneath said nucleic acid molecule according to 1 (a), (b), (c), (d), (e), (f), (g), (h), (i), (j) or (k), a promoter, preferably a promoter selected from the group consisting of Big35S, PCUbi, Super and USP, which are operable linked; and said nucleic acid molecule according to 1 (a), (b), (c), (d), (e), (f), (g), (h), (i), (j) or (k) confers a generation or an increase of the respective fine chemical in a non-human organism or a part thereof as compared to a corresponding wild-type non-human organism or part thereof.

[58329] In another preferred embodiment of said transgenic non-human organism said vector comprises beneath said nucleic acid molecule according to 1 (a), (b), (c), (d), (e), (f), (g), (h), (i), (j) or (k), a promoter, preferably a promoter selected from the group consisting of Big35S, PCUbi, Super and USP, which are operable linked; and said nucleic acid molecule according to 1 (a), (b), (c), (d), (e), (f), (g), (h), (i), (j) or (k) encodes a polypeptide which has the activity of the respective polypeptide represented by a protein as depicted in the respective line in column 5 of Table II, application no. 11, and confers a generation or an increase of the respective fine chemical in a non-human organism or a part thereof as compared to a corresponding wild-type non-human organism or part thereof.

[58330] In another embodiment of said transgenic non-human organism said vector comprises beneath said nucleic acid molecule according to 1 (a), (b), (c), (d), (e), (f), (g), (h), (i), (j) or (k), a nucleic acid molecule encoding a transit peptide, preferably encoding a plastidal transit peptide, especially in case in column 6 of Table I, application no. 11, in the same line as of the respective nucleic acid molecule according to 1) “plastidic” is depicted, or encoding a mitochondrial transit peptide, especially in case in column 6 of Table I, application no. 11, in the same line as of the respective nucleic acid molecule according to 1) “mitochondrial” is depicted, which are operable linked.

[58331] In another embodiment of said transgenic non-human organism said vector does not comprise beneath said nucleic acid molecule according to 1 (a), (b), (c), (d), (e), (f), (g), (h), (i), (j) or (k), a nucleic acid molecule encoding a transit peptide in case in column 6 of Table I, application no. 11, in the same line as of the respective nucleic acid molecule according to 1) “non-targeted” is depicted, which are operable linked.

[58332] In another embodiment of said transgenic non-human organism said vector comprises beneath said nucleic acid molecule according to 1 (a), (b), (c), (d), (e), (f), (g), (h), (i), (j) or (k), and a promoter, preferably a promoter selected from the group consisting of Big35S, PCUbi, Super and USP; a nucleic acid molecule encoding a transit peptide, preferably encoding a plastidal transit peptide, especially in case in column 6 of Table I, application no. 11, in the same line as of the respective nucleic acid molecule according to 1) “plastidic” is depicted, or encoding a mitochondrial transit peptide, especially in case in column 6 of Table I, application no. 11, in the same line as of the respective nucleic acid molecule according to 1) “mitochondrial” is depicted, which are operable linked.

[58333] In another embodiment of said transgenic non-human organism said vector does not comprise beneath said nucleic acid molecule according to 1 (a), (b), (c), (d), (e), (f), (g), (h), (i), (j) or (k), and a promoter, preferably a promoter selected from the group consisting of Big35S, PCUbi, Super and USP; a nucleic acid molecule encoding a transit peptide, especially in case in column 6 of Table I, application no. 11, in the same line as of the respective nucleic acid molecule according to 1) “non-targeted” is depicted, which are operable linked.

[58334] In another embodiment of said transgenic non-human organism said vector comprises beneath said nucleic acid molecule according to 1 (a), (b), (c), (d), (e), (f), (g), (h), (i), (j) or (k), and a promoter, preferably a promoter selected from the group consisting of Big35S, PCUbi, Super and USP; a nucleic acid molecule encoding a transit peptide, preferably encoding a plastidal transit peptide, especially in case in column 6 of Table I, application no. 11, in the same line as of the respective nucleic acid molecule according to 1) “plastidic” is depicted, or encoding a mitochondrial transit peptide, especially in case in column 6 of Table I, application no. 11, in the same line as of the respective nucleic acid molecule according to 1) “mitochondrial” is depicted, which are operable linked; and wherein said nucleic acid molecule according to 1 (a), (b), (c), (d), (e), (f), (g), (h), (i), (j) or (k) encodes a polypeptide which has the activity of the respective polypeptide represented by a protein comprising a polypeptide as depicted in the respective line in column 5 of Table II, application no. 11.

[58335] In another embodiment of said transgenic non-human organism said vector does not comprise beneath said nucleic acid molecule according to 1 (a), (b), (c), (d), (e), (f), (g), (h), (i), (j) or (k), and a promoter, preferably a promoter selected from the group consisting of Big35S, PCUbi, Super and USP; a nucleic acid molecule encoding a transit peptide, especially in case in column 6 of Table I, application no. 11, in the same line as of the respective nucleic acid molecule according to 1) “non-targeted” is depicted, which are operable linked; and wherein said nucleic acid molecule according to 1 (a), (b), (c), (d), (e), (f), (g), (h), (i), (j) or (k) encodes a polypeptide which has the activity of the respective polypeptide represented by a protein comprising a polypeptide as depicted in the respective line in column 5 of Table II, application no. 11.

[58336] In another embodiment of said transgenic non-human organism said vector comprises beneath said nucleic acid molecule according to 1 (a), (b), (c), (d), (e), (f), (g), (h), (i), (j) or (k), and a promoter, preferably a promoter selected from the group consisting of Big35S, PCUbi, Super and USP; a nucleic acid molecule encoding a transit peptide, preferably encoding a plastidal transit peptide, especially in case in column 6 of Table I, application no. 11, in the same line as of the respective nucleic acid molecule according to 1) “plastidic” is depicted, or encoding a mitochondrial transit peptide, especially in case in column 6 of Table I, application no. 11, in the same line as of the respective nucleic acid molecule according to 1) “mitochondrial” is depicted, which are operable linked; and wherein said nucleic acid molecule according to 1 (a), (b), (c), (d), (e), (f), (g), (h), (i), (j) or (k) confers a generation or an increase of the respective fine chemical in a non-human organism or a part thereof as compared to a corresponding wild-type non-human organism or part thereof.

[58337] In another embodiment of said transgenic non-human organism said vector does not comprise beneath said nucleic acid molecule according to 1 (a), (b), (c), (d), (e), (f), (g), (h), (i), (j) or (k), and a promoter, preferably a promoter selected from the group consisting of Big35S, PCUbi, Super and USP; a nucleic acid molecule encoding a transit peptide, especially in case in column 6 of Table I, application no. 11, in the same line as of the respective nucleic acid molecule according to 1) “non-targeted” is depicted, which are operable linked; and wherein said nucleic acid molecule according to 1 (a), (b), (c), (d), (e), (f), (g), (h), (i), (j) or (k) confers a generation or an increase of the respective fine chemical in a non-human organism or a part thereof as compared to a corresponding wild-type non-human organism or part thereof.

[58338] In another embodiment of said transgenic non-human organism said vector comprises beneath said nucleic acid molecule according to 1 (a), (b), (c), (d), (e), (f), (g), (h), (i), (j) or (k), and a promoter, preferably a promoter selected from the group consisting of Big35S, PCUbi, Super and USP; a nucleic acid molecule encoding a transit peptide, preferably encoding a plastidal transit peptide, especially in case in column 6 of Table I, application no. 11, in the same line as of the respective nucleic acid molecule according to 1) “plastidic” is depicted, or encoding a mitochondrial transit peptide, especially in case in column 6 of Table I, application no. 11, in the same line as of the respective nucleic acid molecule according to 1) “mitochondrial” is depicted, which are operable linked; and wherein said nucleic acid molecule according to 1 (a), (b), (c), (d), (e), (f), (g), (h), (i), (j) or (k) encodes a polypeptide which has the activity of the respective polypeptide represented by a protein as depicted in the respective line in column 5 of Table II application no. 11 and confers a generation or an increase of the respective fine chemical in a non-human organism or a part thereof as compared to a corresponding wild-type non-human organism or part thereof.

[58339] In another embodiment of said transgenic non-human organism said vector does not comprise beneath said nucleic acid molecule according to 1 (a), (b), (c), (d), (e), (f), (g), (h), (i), (j) or (k), and a promoter, preferably a promoter selected from the group consisting of Big35S, PCUbi, Super and USP; a nucleic acid molecule encoding a transit peptide, especially in case in column 6 of Table I, application no. 11, in the same line as of the respective nucleic acid molecule according to 1) “non-targeted” is depicted, which are operable linked; and wherein said nucleic acid molecule according to 1 (a), (b), (c), (d), (e), (f), (g), (h), (i), (j) or (k) encodes a polypeptide which has the activity of the respective polypeptide represented by a protein as depicted in the respective line in column 5 of Table II application no. 11 (in the same line) and confers a generation or an increase of the respective fine chemical in a non-human organism or a part thereof as compared to a corresponding wild-type non-human organism or part thereof.

[58340] In a preferred embodiment of said transgenic non-human organism said nucleic acid molecule according to 1 (a), (b), (c), (d), (e), (f), (g), (h), (i), (j) or (k), said promoter and optionally said nucleic acid molecule encoding a transit peptide are encompassed in an expression cassette in said vector. Accordingly an embodiment the invention provides a non-human organism comprising or being transformed by a vector comprising an expression cassette comprising said nucleic acid molecule according to 1 (a), (b), (c), (d), (e), (f), (g), (h), (i), (j) or (k), said promoter and optionally said a nucleic acid molecule encoding a transit peptide, operable linked. Said expression cassette may encompass a terminator, too.

[58341] In a further embodiment the invention relates to a transgenic non-human organisms such as transgenic microorganism or transgenic plant comprising a nucleic acid molecule comprising
[58342] [1) a nucleic acid molecule selected from the group consisting of
   [58343] (a) a nucleic acid molecule encoding a polypeptide shown in Table II, application no. 11, column 5 or 8, preferably shown in Table II A, application no. 11, column 5, or in Table II A, application no. 11, column 8, or in Table II B, application no. 11, column 8, or a homolog or a fragment thereof;
   [58344] (b) a nucleic acid molecule shown in Table I, application no. 11, column 5 or 8, preferably shown in Table I A, application no. 11, column 5, or in Table I A, application no. 11, column 8, or in Table I B, application no. 11, column 8, preferably the coding region thereof, or a homolog or a fragment thereof;
   [58345] (c) a nucleic acid molecule, which, as a result of the degeneracy of the genetic code, can be derived from a polypeptide sequence depicted in column 5 or 8 of Table II, application no. 11, preferably shown in Table II A, application no. 11, column 5, or in Table II A, application no. 11, column 8, or in Table II B, application no. 11, column 8;
   [58346] (d) a nucleic acid molecule having at least 30% identity, preferably at least 40%, 50%, 60%, 70%, 75%, 80%, 85%, 90%, 95%, 96%, 97%, 98%, 99%, 99.5%, with the nucleic acid molecule sequence of a polynucleotide comprising the nucleic acid molecule shown in column 5 or 8 of Table I, application no. 11, preferably shown in Table I A, application no. 11, column 5, or in Table I A, application no. 11, column 8, or in Table I B, application no. 11, column 8, preferably the coding region thereof;
   [58347] (e) a nucleic acid molecule encoding a polypeptide having at least 30% identity, preferably at least 40%, 50% 60%, 70%, 75%, 80%, 85%, 90%, 95%, 96%, 97%, 98%, 99%, 99.5%, identity with the amino acid sequence of the polypeptide encoded by the nucleic acid molecule of (a), (b), (c) or (d);
   [58348] (f) a nucleic acid molecule which hybridizes with a nucleic acid molecule of (a), (b), (c), (d) or (e) under stringent hybridization conditions;
   [58349] (g) a nucleic acid molecule encoding a polypeptide which can be isolated with the aid of monoclonal or polyclonal antibodies made against a polypeptide encoded by one of the nucleic acid molecules of (a), (b), (c), (d), (e) or (f);
   [58350] (h) a nucleic acid molecule encoding a polypeptide comprising the consensus sequence or one or more polypeptide motifs as shown in column 8 of Table IV, application no. 11;
   [58351] (i) a nucleic acid molecule encoding a polypeptide having the activity represented by a respective protein as depicted in column 5 of Table II, application no. 11;
   [58352] (j) a nucleic acid molecule comprising a polynucleotide which is obtained by amplifying a cDNA library or a genomic library using the primers in Table III, application no. 11, column 8;
   [58353] and
   [58354] (k) nucleic acid molecule which is obtainable by screening a suitable nucleic acid library, especially a cDNA library and/or a genomic library, under stringent hybridization conditions with a probe comprising one of the sequences of the nucleic acid molecule of (a), (b), (c), (d), (e), (f), (g), (h), (i) or (j) or with a fragment of at least 15 nt, preferably 20 nt, 30 nt, 50 nt, 100 nt, 200 nt,500 nt, 1000 nt, 1500 nt, 2000 nt or 3000 nt of the nucleic acid molecule characterized in (a), (b), (c), (d), (e), (f), (g), (h), (i) or (j);
   [58355] or a nucleic acid molecule comprising a sequence which is complementary thereto;
      and, if desired
[58356] 2) nucleic acid molecule encoding a transit peptide, preferably encoding a plastidal transit peptide or a mitochondrial transit peptide;
   which are operable linked;]
   or comprising an expression cassette comprising
[58357] [0) a promoter, preferably a promoter selected from the group consisting of Big35S, PCUbi, Super and USP; and
[58358] 1) a nucleic acid molecule selected from the group consisting of
   [58359] (a) a nucleic acid molecule encoding a polypeptide shown in Table II, application no. 11, column 5 or 8, preferably shown in Table II A, application no. 11, column 5, or in Table II A, application no. 11, column 8, or in Table II B, application no. 11, column 8, or a homolog or a fragment thereof;
   [58360] (b) a nucleic acid molecule shown in Table I, application no. 11, column 5 or 8, preferably shown in Table I A, application no. 11, column 5, or in Table I A, application no. 11, column 8, or in Table I B, application no. 11, column 8, preferably the coding region thereof, or a homolog or a fragment thereof;
   [58361] (c) a nucleic acid molecule, which, as a result of the degeneracy of the genetic code, can be derived from a polypeptide sequence depicted in column 5 or 8 of Table II, application no. 11, preferably shown in Table II A, application no. 11, column 5, or in Table II A, application no. 11, column 8, or in Table II B, application no. 11, column 8;
   [58362] (d) a nucleic acid molecule having at least 30% identity, preferably at least 40%, 50%, 60%, 70%, 75%, 80%, 85%, 90%, 95%, 96%, 97%, 98%, 99%, 99.5%, with the nucleic acid molecule sequence of a polynucleotide comprising the nucleic acid molecule shown in column 5 or 8 of Table I, application no. 11, preferably shown in Table I A, application no. 11, column 5, or in Table I A, application no. 11, column 8, or in Table I B, application no. 11, column 8, preferably the coding region thereof;
   [58363] (e) a nucleic acid molecule encoding a polypeptide having at least 30% identity, preferably at least 40%, 50% 60%, 70%, 75%, 80%, 85%, 90%, 95%, 96%, 97%, 98%, 99%, 99.5%, identity with the amino acid sequence of the polypeptide encoded by the nucleic acid molecule of (a), (b), (c) or (d);
   [58364] (f) a nucleic acid molecule which hybridizes with a nucleic acid molecule of (a), (b), (c), (d) or (e) under stringent hybridization conditions;
   [58365] (g) a nucleic acid molecule encoding a polypeptide which can be isolated with the aid of monoclonal or polyclonal antibodies made against a polypeptide encoded by one of the nucleic acid molecules of (a), (b), (c), (d), (e) or (f);
   [58366] (h) a nucleic acid molecule encoding a polypeptide comprising the consensus sequence or one or more polypeptide motifs as shown in column 8 of Table IV, application no. 11;
   [58367] (i) a nucleic acid molecule encoding a polypeptide having the activity represented by a respective protein as depicted in column 5 of Table II, application no. 11;
   [58368] (j) a nucleic acid molecule comprising a polynucleotide which is obtained by amplifying a cDNA library or a genomic library using the primers in Table III, application no. 11, column 8;
   [58369] and
   [58370] (k) nucleic acid molecule which is obtainable by screening a suitable nucleic acid library, especially a cDNA library and/or a genomic library, under stringent hybridization conditions with a probe comprising one of the sequences of the nucleic acid molecule of (a), (b), (c), (d), (e), (f), (g), (h), (i) or (j) or with a fragment of at least 15 nt, preferably 20 nt, 30 nt, 50 nt, 100 nt, 200 nt,500 nt, 1000 nt, 1500 nt, 2000 nt or 3000 nt of the nucleic acid molecule characterized in (a), (b), (c), (d), (e), (f), (g), (h), (i) or (j);
   [58371] or a nucleic acid molecule comprising a sequence which is complementary thereto;]
      and, if desired
[58372] 2) nucleic acid molecule encoding a transit peptide, preferably encoding a plastidal transit peptide or a mitochondrial transit peptide;
   which are operable linked;]
   or comprising or being transformed by a vector comprising
[58373] [1) a nucleic acid molecule selected from the group consisting of
   [58374] (a) a nucleic acid molecule encoding a polypeptide shown in Table II, application no. 11, column 5 or 8, preferably shown in Table II A, application no. 11, column 5, or in Table II A, application no. 11, column 8, or in Table II B, application no. 11, column 8, or a homolog or a fragment thereof;
   [58375] (b) a nucleic acid molecule shown in Table I, application no. 11, column 5 or 8, preferably shown in Table I A, application no. 11, column 5, or in Table I A, application no. 11, column 8, or in Table I B, application no. 11, column 8, preferably the coding region thereof, or a homolog or a fragment thereof;
   [58376] (c) a nucleic acid molecule, which, as a result of the degeneracy of the genetic code, can be derived from a polypeptide sequence depicted in column 5 or 8 of Table II, application no. 11, preferably shown in Table II A, application no. 11, column 5, or in Table II A, application no. 11, column 8, or in Table II B, application no. 11, column 8;
   [58377] (d) a nucleic acid molecule having at least 30% identity, preferably at least 40%, 50%, 60%, 70%, 75%, 80%, 85%, 90%, 95%, 96%, 97%, 98%, 99%, 99.5%, with the nucleic acid molecule sequence of a polynucleotide comprising the nucleic acid molecule shown in column 5 or 8 of Table I, application no. 11, preferably shown in Table I A, application no. 11, column 5, or in Table I A, application no. 11, column 8, or in Table I B, application no. 11, column 8, preferably the coding region thereof;
   [58378] (e) a nucleic acid molecule encoding a polypeptide having at least 30% identity, preferably at least 40%, 50% 60%, 70%, 75%, 80%, 85%, 90%, 95%, 96%, 97%, 98%, 99%, 99.5%, identity with the amino acid sequence of the polypeptide encoded by the nucleic acid molecule of (a), (b), (c) or (d);
   [58379] (f) a nucleic acid molecule which hybridizes with a nucleic acid molecule of (a), (b), (c), (d) or (e) under stringent hybridization conditions;
   [58380] (g) a nucleic acid molecule encoding a polypeptide which can be isolated with the aid of monoclonal or polyclonal antibodies made against a polypeptide encoded by one of the nucleic acid molecules of (a), (b), (c), (d), (e) or (f);
   [58381] (h) a nucleic acid molecule encoding a polypeptide comprising the consensus sequence or one or more polypeptide motifs as shown in column 8 of Table IV, application no. 11;
   [58382] (i) a nucleic acid molecule encoding a polypeptide having the activity represented by a respective protein as depicted in column 5 of Table II, application no. 11;
   [58383] (j) a nucleic acid molecule comprising a polynucleotide which is obtained by amplifying a cDNA library or a genomic library using the primers in Table III, application no. 11, column 8;
   [58384] and
   [58385] (k) nucleic acid molecule which is obtainable by screening a suitable nucleic acid library, especially a cDNA library and/or a genomic library, under stringent hybridization conditions with a probe comprising one of the sequences of the nucleic acid molecule of (a), (b), (c), (d), (e), (f), (g), (h), (i) or (j) or with a fragment of at least 15 nt, preferably 20 nt, 30 nt, 50 nt, 100 nt, 200 nt,500 nt, 1000 nt, 1500 nt, 2000 nt or 3000 nt of the nucleic acid molecule characterized in (a), (b), (c), (d), (e), (f), (g), (h), (i) or (j);
   [58386] or a nucleic acid molecule comprising a sequence which is complementary thereto;]
      whereby, preferably, the nucleic acid molecule according to 1 (a), (b), (c), (d), (e), (f), (g), (h), (i), (j) or (k) distinguishes over the sequence depicted in Table I A and/or I B, application no. 11, column 5 or 8, or the coding regions thereof, by one or more nucleotides (especially but not exceeding 5%, preferably 4%, 3%, 2%, 1%, 0.5%, 0.2% or 0.1%). In an embodiment, the nucleic acid molecule of the invention does not consist of the sequence shown in Table I A and/or I B, application no. 11, column 5 or 8, or the coding region thereof. In another embodiment, the nucleic acid molecule of the present invention, preferably the coding region thereof, is at least 30%, 40%, 50%, 60%, 70%, 80%, 90%, 95% identical but less than 100%, 99.999%, 99.99%, 99.9%, 99%, 98%, 97%, 96% or 95% identical to the sequence shown in Table I A and/or I B, application no. 11, column 5 or 8, or the coding region thereof, respectively. In a further embodiment the nucleic acid molecule does not encode the polypeptide sequence shown in Table II A and/or II B, application no. 11, column 5 or 8 but homologs thereof. Accordingly, in one embodiment, the nucleic acid molecule of the present invention encodes in one embodiment a polypeptide which differs at least in one or more amino acids (especially but not exceeding 5%, preferably 4%, 3%, 2%, 1%, 0.5%, 0.2% or 0.1%) from the polypeptide shown in Table II, application no. 11, column 5 or 8 and does not encode a protein of the sequence shown in Table II A and/or II B, application no. 11, column 5 or 8. Accordingly, in one embodiment, the protein encoded by a sequence of a nucleic acid according to 1 (a), (b), (c), (d), (e), (f), (g), (h), (i), (j) or (k) does not consist of the sequence shown in Table I A and/or I B, application no. 11, column 5 or 8, or the coding region thereof. In a further embodiment, the protein of the present invention is at least 30%, 40%, 50%, 60%, 70%, 80%, 90%, 95% identical to protein sequence depicted in Table II A and/or II B, application no. 11, column 5 or 8 but less than 100%, preferably less than 99.999%, 99.99%, 99.9%, 99%, 98%, 97%, 96% or 95% identical to the sequence shown in Table II A and/or II B, application no. 11, column 5 or 8;
      as well as respective transgenic cells, tissue, parts of such non-human organism, e.g. plant cells, plant tissue, part of plants, like leaves, roots, stems, blossoms, seeds, fruits, pollen and the like.
      (All the references to Tables I to IV are references to the corresponding lines of Tables I to IV.)

[58387] In a preferred embodiment of said transgenic non-human organism said nucleic acid molecule according to 1 (a), (b), (c), (d), (e), (f), (g), (h), (i), (j) or (k) encodes a polypeptide which has the activity of the respective polypeptide represented by a protein comprising a polypeptide as depicted in the respective line in column 5 of Table II, application no. 11.

[58388] In another preferred embodiment of said transgenic non-human organism said nucleic acid molecule according to 1 (a), (b), (c), (d), (e), (f), (g), (h), (i), (j) or (k) confers a generation or an increase of the respective fine chemical in a non-human organism or a part thereof as compared to a corresponding wild-type non-human organism or part thereof.

[58389] In another preferred embodiment of said transgenic non-human organism said nucleic acid molecule according to 1 (a), (b), (c), (d), (e), (f), (g), (h), (i), (j) or (k) encodes a polypeptide which has the activity of the respective polypeptide represented by a protein as depicted in the respective line in column 5 of Table II application no. 11 and confers a generation or an increase of the respective fine chemical in a non-human organism or a part thereof as compared to a corresponding wild-type non-human organism or part thereof.

[58390] In another embodiment of said transgenic non-human organism the expression cassette comprises 2) a nucleic acid molecule encoding a transit peptide, preferably encoding a plastidal transit peptide, especially in case in column 6 of Table I, application no. 11, in the same line as of the respective nucleic acid molecule according to 1) “plastidic” is depicted, or encoding a mitochondrial transit peptide, especially in case in column 6 of Table I, application no. 11, in the same line as of the respective nucleic acid molecule according to 1) “mitochondrial” is depicted.

[58391] In another embodiment thereof the expression cassette does not comprise 2) a nucleic acid molecule encoding a transit peptide, especially in case in column 6 of Table I, application no. 11, in the same line as of the respective nucleic acid molecule according to 1) “non-targeted” is depicted.

[58392] In another embodiment of said transgenic non-human organism said vector comprises beneath said nucleic acid molecule according to 1 (a), (b), (c), (d), (e), (f), (g), (h), (i), (j) or (k), a promoter, preferably a promoter selected from the group consisting of Big35S, PCUbi, Super and USP, which are operable linked.

[58393] In a preferred embodiment of said transgenic non-human organism said vector comprises beneath said nucleic acid molecule according to 1 (a), (b), (c), (d), (e), (f), (g), (h), (i), (j) or (k), a promoter, preferably a promoter selected from the group consisting of Big35S, PCUbi, Super and USP, which are operable linked; and said nucleic acid molecule according to 1 (a), (b), (c), (d), (e), (f), (g), (h), (i), (j) or (k) encodes a polypeptide which has the activity of the respective polypeptide represented by a protein comprising a polypeptide as depicted in the respective line in column 5 of Table II, application no. 11.

[58394] In another preferred embodiment of said transgenic non-human organism said vector comprises beneath said nucleic acid molecule according to 1 (a), (b), (c), (d), (e), (f), (g), (h), (i), (j) or (k), a promoter, preferably a promoter selected from the group consisting of Big35S, PCUbi, Super and USP, which are operable linked; and said nucleic acid molecule according to 1 (a), (b), (c), (d), (e), (f), (g), (h), (i), (j) or (k) confers a generation or an increase of the respective fine chemical in a non-human organism or a part thereof as compared to a corresponding wild-type non-human organism or part thereof.

[58395] In another preferred embodiment of said transgenic non-human organism said vector comprises beneath said nucleic acid molecule according to 1 (a), (b), (c), (d), (e), (f), (g), (h), (i), (j) or (k), a promoter, preferably a promoter selected from the group consisting of Big35S, PCUbi, Super and USP, which are operable linked; and said nucleic acid molecule according to 1 (a), (b), (c), (d), (e), (f), (g), (h), (i), (j) or (k) encodes a polypeptide which has the activity of the respective polypeptide represented by a protein as depicted in the same line in column 5 of Table II, application no. 11, and confers a generation or an increase of the respective fine chemical in a non-human organism or a part thereof as compared to a corresponding wild-type non-human organism or part thereof.

[58396] In another embodiment of said transgenic non-human organism said vector comprises beneath said nucleic acid molecule according to 1 (a), (b), (c), (d), (e), (f), (g), (h), (i), (j) or (k), a nucleic acid molecule encoding a transit peptide, preferably encoding a plastidal transit peptide, especially in case in column 6 of Table I, application no. 11, in the same line as of the respective nucleic acid molecule according to 1) “plastidic” is depicted, or encoding a mitochondrial transit peptide, especially in case in column 6 of Table I, application no. 11, in the same line as of the respective nucleic acid molecule according to 1) “mitochondrial” is depicted, which are operable linked.

[58397] In another embodiment of said transgenic non-human organism said vector does not comprise beneath said nucleic acid molecule according to 1 (a), (b), (c), (d), (e), (f), (g), (h), (i), (j) or (k), a nucleic acid molecule encoding a transit peptide in case in column 6 of Table I, application no. 11, in the same line as of the respective nucleic acid molecule according to 1) “non-targeted” is depicted, which are operable linked.

[58398] In another embodiment of said transgenic non-human organism said vector comprises beneath said nucleic acid molecule according to 1 (a), (b), (c), (d), (e), (f), (g), (h), (i), (j) or (k), and a promoter, preferably a promoter selected from the group consisting of Big35S, PCUbi, Super and USP; a nucleic acid molecule encoding a transit peptide, preferably encoding a plastidal transit peptide, especially in case in column 6 of Table I, application no. 11, in the same line as of the respective nucleic acid molecule according to 1) “plastidic” is depicted, or encoding a mitochondrial transit peptide, especially in case in column 6 of Table I, application no. 11, in the same line as of the respective nucleic acid molecule according to 1) “mitochondrial” is depicted, which are operable linked.

[58399] In another embodiment of said transgenic non-human organism said vector does not comprise beneath said nucleic acid molecule according to 1 (a), (b), (c), (d), (e), (f), (g), (h), (i), (j) or (k), and a promoter, preferably a promoter selected from the group consisting of Big35S, PCUbi, Super and USP; a nucleic acid molecule encoding a transit peptide, especially in case in column 6 of Table I, application no. 11, in the same line as of the respective nucleic acid molecule according to 1) “non-targeted” is depicted, which are operable linked.

[58400] In another embodiment of said transgenic non-human organism said vector comprises beneath said nucleic acid molecule according to 1 (a), (b), (c), (d), (e), (f), (g), (h), (i), (j) or (k), and a promoter, preferably a promoter selected from the group consisting of Big35S, PCUbi, Super and USP; a nucleic acid molecule encoding a transit peptide, preferably encoding a plastidal transit peptide, especially in case in column 6 of Table I, application no. 11, in the same line as of the respective nucleic acid molecule according to 1) “plastidic” is depicted, or encoding a mitochondrial transit peptide, especially in case in column 6 of Table I, application no. 11, in the same line as of the respective nucleic acid molecule according to 1) “mitochondrial” is depicted, which are operable linked; and wherein said nucleic acid molecule according to 1 (a), (b), (c), (d), (e), (f), (g), (h), (i), (j) or (k) encodes a polypeptide which has the activity of the respective polypeptide represented by a protein comprising a polypeptide as depicted in the respective line in column 5 of Table II, application no. 11.

[58401] In another embodiment of said transgenic non-human organism said vector does not comprise beneath said nucleic acid molecule according to 1 (a), (b), (c), (d), (e), (f), (g), (h), (i), (j) or (k), and a promoter, preferably a promoter selected from the group consisting of Big35S, PCUbi, Super and USP; a nucleic acid molecule encoding a transit peptide, especially in case in column 6 of Table I, application no. 11, in the same line as of the respective nucleic acid molecule according to 1) “non-targeted” is depicted, which are operable linked; and wherein said nucleic acid molecule according to 1 (a), (b), (c), (d), (e), (f), (g), (h), (i), (j) or (k) encodes a polypeptide which has the activity of the respective polypeptide represented by a protein comprising a polypeptide as depicted in the respective line in column 5 of Table II, application no. 11.

[58402] In another embodiment of said transgenic non-human organism said vector comprises beneath said nucleic acid molecule according to 1 (a), (b), (c), (d), (e), (f), (g), (h), (i), (j) or (k), and a promoter, preferably a promoter selected from the group consisting of Big35S, PCUbi, Super and USP; a nucleic acid molecule encoding a transit peptide, preferably encoding a plastidal transit peptide, especially in case in column 6 of Table I, application no. 11, in the same line as of the respective nucleic acid molecule according to 1) “plastidic” is depicted, or encoding a mitochondrial transit peptide, especially in case in column 6 of Table I, application no. 11, in the same line as of the respective nucleic acid molecule according to 1) “mitochondrial” is depicted, which are operable linked; and wherein said nucleic acid molecule according to 1 (a), (b), (c), (d), (e), (f), (g), (h), (i), (j) or (k) confers a generation or an increase of the respective fine chemical in a non-human organism or a part thereof as compared to a corresponding wild-type non-human organism or part thereof.

[58403] In another embodiment of said transgenic non-human organism said vector does not comprise beneath said nucleic acid molecule according to 1 (a), (b), (c), (d), (e), (f), (g), (h), (i), (j) or (k), and a promoter, preferably a promoter selected from the group consisting of Big35S, PCUbi, Super and USP; a nucleic acid molecule encoding a transit peptide, especially in case in column 6 of Table I, application no. 11, in the same line as of the respective nucleic acid molecule according to 1) “non-targeted” is depicted, which are operable linked; and wherein said nucleic acid molecule according to 1 (a), (b), (c), (d), (e), (f), (g), (h), (i), (j) or (k) confers a generation or an increase of the respective fine chemical in a non-human organism or a part thereof as compared to a corresponding wild-type non-human organism or part thereof.

[58404] In another embodiment of said transgenic non-human organism said vector comprises beneath said nucleic acid molecule according to 1 (a), (b), (c), (d), (e), (f), (g), (h), (i), (j) or (k), and a promoter, preferably a promoter selected from the group consisting of Big35S, PCUbi, Super and USP; a nucleic acid molecule encoding a transit peptide, preferably encoding a plastidal transit peptide, especially in case in column 6 of Table I, application no. 11, in the same line as of the respective nucleic acid molecule according to 1) “plastidic” is depicted, or encoding a mitochondrial transit peptide, especially in case in column 6 of Table I, application no. 11, in the same line as of the respective nucleic acid molecule according to 1) “mitochondrial” is depicted, which are operable linked; and wherein said nucleic acid molecule according to 1 (a), (b), (c), (d), (e), (f), (g), (h), (i), (j) or (k) encodes a polypeptide which has the activity of the respective polypeptide represented by a protein as depicted in the respective line in column 5 of Table II application no. 11 and confers a generation or an increase of the respective fine chemical in a non-human organism or a part thereof as compared to a corresponding wild-type non-human organism or part thereof.

[58405] In another embodiment of said transgenic non-human organism said vector does not comprise beneath said nucleic acid molecule according to 1 (a), (b), (c), (d), (e), (f), (g), (h), (i), (j) or (k), and a promoter, preferably a promoter selected from the group consisting of Big35S, PCUbi, Super and USP; a nucleic acid molecule encoding a transit peptide, especially in case in column 6 of Table I, application no. 11, in the same line as of the respective nucleic acid molecule according to 1) “non-targeted” is depicted, which are operable linked; and wherein said nucleic acid molecule according to 1 (a), (b), (c), (d), (e), (f), (g), (h), (i), (j) or (k) encodes a polypeptide which has the activity of the respective polypeptide represented by a protein as depicted in the respective line in column 5 of Table II application no. 11 and confers a generation or an increase of the respective fine chemical in a non-human organism or a part thereof as compared to a corresponding wild-type non-human organism or part thereof.

[58406] In a preferred embodiment of said transgenic non-human organism said nucleic acid molecule according to 1 (a), (b), (c), (d), (e), (f), (g), (h), (i), (j) or (k), said promoter and optionally said nucleic acid molecule encoding a transit peptide are encompassed in an expression cassette in said vector. Accordingly an embodiment the invention provides a non-human organism comprising or being transformed by a vector comprising an expression cassette comprising said nucleic acid molecule according to 1 (a), (b), (c), (d), (e), (f), (g), (h), (i), (j) or (k), said promoter and optionally said a nucleic acid molecule encoding a transit peptide, operable linked. Said expression cassette may encompass a terminator, too.

[58407] [0291.1.8.11] to [0299.1.8.11] for the disclosure of these paragraphs see [0291.1.8.8] to [0299.1.8.8] above.

[58408] The term “biological active portion” or “biological activity” means a polypeptide as depicted in the respective line in Table II, application no. 11, column 3 or a portion of said polypeptide which still has at least 10% or 20%, preferably 30%, 40%, 50% or 60%, especially preferably 70%, 75%, 80%, 90% or 95% of the enzymatic or biological activity of the natural or starting enzyme or protein.

[58409] [0301.1.8.11] to [0304.1.8.11] for the disclosure of these paragraphs see [0301.1.8.8] to [0304.1.8.8] above.

[58410] Synthetic oligonucleotide primers for the amplification, e.g. as shown in the respective line in Table III, application no. 11, column 8, by means of polymerase chain reaction can be generated on the basis of a sequence shown herein, for example the sequence shown in the respective line in Table I, application no. 11, columns 5 or 8, or the sequences derived from Table II, application no. 11, columns 5 or 8, respectively.

[58411] Moreover, it is possible to identify a conserved region of a protein from various organism by carrying out protein sequence alignments with the polypeptide encoded by the nucleic acid molecules of the present invention, in particular with the sequences encoded by the nucleic acid molecule shown in the respective line in column 5 or 8 of Table I, application no. 11, from which conserved regions, and in turn, degenerate primers can be derived. Conserved regions are those, which show a very little variation in the amino acid in one particular position of several homologs from different origin. The consensus sequence and polypeptide motifs shown in the respective line in column 8 of Table IV, application no. 11, are derived from such alignments of homologous proteins.

[58412] In an embodiment of the present invention, in the method of the present invention the activity of a polypeptide comprising or consisting of a consensus sequence or at least one polypeptide motif shown in the respective line in Table IV, application no. 11, column 8, is increased. In another embodiment thereof, the method of the present invention relates to a polypeptide comprising or consisting of a consensus sequence shown in the respective line in Table IV, application no. 11, column 8 or comprising at least one polypeptide motif shown in the respective line in Table IV, application no. 11, column 8, whereby not more than 20, 15, 10, 9, 8, 7, 6, 5 4, 3, 2 or 1, or 0 of the amino acid positions indicated can be replaced by any amino acid. In another embodiment thereof, the method of the present invention relates to a polypeptide comprising or consisting of a consensus sequence shown in the respective line in Table IV, application no. 11, column 8 or comprising at least one polypeptide motif shown in the respective line in Table IV, application no. 11, column 8, whereby not more than 15%, 10%, 5%, 4%, 3%, 2% or 1%, or 0% of the amino acid positions defined as distinct specific amino acids are/is replaced by another amino acid. In another embodiment thereof, the method of the present invention relates to a polypeptide comprising or consisting of a consensus sequence shown in the respective line in Table IV, application no. 11, column 8 or comprising at least one polypeptide motif shown in the respective line in Table IV, application no. 11, column 8, whereby not more than 20, 15, 10, 9, 8, 7, 6, 5, 4, 3, 2 or 1, or 0 amino acids are inserted into a consensus sequence or polypeptide motif.

[58413] In an embodiment of the present invention, in the method of the present invention the activity of a polypeptide comprising or consisting of a consensus sequence or at least one polypeptide motif shown in the respective line in Table IV, application no. 11, column 8, is increased, whereby said polypeptide distinguishes over the sequence depicted in Table II, application no. 11, columns 5 or 8 by one or more amino acids.

[58414] In one embodiment, said polypeptide of the invention distinguishes over the sequence shown in the respective line in Table II, application no. 11, columns 5 and 8 by more than 5, 6, 7, 8 or 9 amino acids, preferably by more than 10, 15, 20, 25 or 30 amino acids, even more preferred are more than 40, 50, or 60 amino acids and, preferably, the sequence of the polypeptide of the invention distinguishes from the sequence shown in the respective line in Table II B, application no. 11, columns 5 and 8 by not more than 80%, 70%, 60%, 50%, 40%, 30%, 20%, 10%, 5%, 4%, 3%, 2%, 1% or 0.5%. In another embodiment, said polypeptide of the invention does not consist of the sequence shown in Table II, application no. 11, columns 5 or 8.

[58415] [0309.1.8.11] to [0321.1.8.11] for the disclosure of these paragraphs see [0309.1.8.8] to [0321.1.8.8] above.

[58416] Polypeptides having above-mentioned activity, i.e. conferring the production or the increased production of the fine chemical palmitic acid as compared to a corresponding, e.g. non-transformed, wild type non-human organism, like a microorganism or a plant cell, plant or part thereof, can be encoded by other DNA sequences which hybridize to the sequences shown in the respective line in Table I, application no. 11, columns 5 and 8, preferably the coding region thereof, at least under relaxed hybridization conditions and which encode the expression of polypeptides conferring the production or the increased production of the respective fine chemical palmitic acid as compared to a corresponding, e.g. non-transformed, wild type non-human organism, like a microorganism or a plant cell, plant or part thereof.

[58417] [0323.1.8.11] to for the disclosure of these paragraphs see [0323.1.8.8] to [0329.1.8.8] above [Further, the nucleic acid molecule of the invention comprises a nucleic acid molecule, which is a complement of one of the nucleotide sequences of above-mentioned nucleic acid molecules or a portion thereof. A nucleic acid molecule or its sequence which is complementary to one of the nucleotide molecules or sequences shown in the respective line in Table I, application no. 11, columns 5 or 8, preferably the coding region thereof, homologs or fragments thereof, is one which is sufficiently complementary to one of the nucleotide molecules or sequences shown in the respective line in Table I, application no. 11, columns 5 or 8, preferably the coding region thereof, homologs or fragments thereof, such that it can hybridize to one of the nucleotide sequences shown in Table I, application no. 11, columns 5 or 8, preferably the coding region thereof, homologs or fragments thereof, thereby forming a stable duplex. Preferably, the hybridization is performed under stringent hybridization conditions. However, a complement of one of the herein disclosed sequences is preferably a sequence complement thereto according to the base pairing of nucleic acid molecules well known to the skilled person. For example, the bases A and G undergo base pairing with the bases T and U or C, resp. and visa versa. Modifications of the bases can influence the base-pairing partner.

[58418] The nucleic acid molecule of the invention comprises a nucleotide sequence which is at least about 30%, 35%, 40%, 45%, 50%, 55%, 60%, 65%, 70%, 75%, 80%, 90%, 95%, 96%, 97%, 98%, 99%, 99.5% or more homologous to a nucleotide sequence shown in Table I, application no. 11, columns 5 or 8, preferably the coding region thereof, homologs or fragments thereof, and preferably has above-mentioned activity, in particular conferring the production or the increased production of the fine chemical palmitic acid, respectively, after increasing the activity or an activity of a gene as shown in the respective line in Table I or of a gene product, e.g. as shown in the respective line in Table II, application no. 11, column 5 or 8, by for example in one embodiment expression either in the cytosol or in an organelle such as a plastid or mitochondria or both, preferably in a plastid, or in another embodiment non-targeted or targeted.

[58419] The nucleic acid molecule of the invention comprises a nucleotide sequence or molecule which hybridizes, preferably hybridizes under stringent conditions as defined herein, to one of the nucleic acid molecule shown in the respective line in Table I, preferably Table IB, application no. 11, columns 5 or 8, preferably the coding region thereof, fragments or homologs thereof, and encodes a protein having above-mentioned activity, e.g. conferring the production or the increased production of the respective fine chemical palmitic acid as compared to a corresponding, e.g. non-transformed, wild type non-human organism, like a microorganism or a plant cell, plant or part thereof, by for example in one embodiment expression either in the cytosol or in an organelle such as a plastid or mitochondria or both, preferably in a plastid, or in another embodiment non-targeted or targeted, and optionally, the activity thereof is selected from the group consisting of 2-C-methyl-D-erythritol 4-phosphate cytidylyltransferase, 3-ketoacyl-CoA thiolase, 49747384_SOYBEAN-protein, AAS bifunctional protein, ABC metal ion transporter substrate-binding protein, acid phosphatase precursor, acid shock protein, aconitate hydratase, acyl transferase, arginine decarboxylase, aromatic acid decarboxylase, At1g19800-protein, At1g23110-protein, At2g45420-protein, ATPase epsilon subunit, b0050-protein, b1234-protein, b1248-protein, b1330-protein, b1670-protein, b1837-protein, b2032-protein, b2099-protein, b2107-protein, b2399-protein, b2682-protein, b2849-protein, b3814-protein, bifunctional protein (phosphoribosyltransferase and regulatory protein), branched chain amino acid ABC transporter ATP-binding protein, calcium-dependent protein kinase, carbamoyl-phosphate synthase subunit, carbon dioxide concentrating mechanism protein, cation-transporting ATPase, CCAAT-binding transcription factor, chlorophyllase, colanic acid biosynthesis protein, coproporphyrinogen III oxidase, DnaJ-like chaperone, ethanolamine utilization protein, F-box protein, Fe—S subunit of oxidoreductase, flavodoxin, glucose-6-phosphate 1-dehydrogenase, glutaredoxin, glutathione S-transferase, glycerol-3-phosphate dehydrogenase, heat shock transcription factor, HesB/YadR/YfhF family protein, homocitrate synthase, lipoprotein precursor, metal-dependent hydrolase, monothiol glutaredoxin, NADH-quinone oxidoreductase subunit, nitrate/nitrite transport protein, oxidoreductase, peptidyl-prolyl cis-trans isomerase, permease protein of ABC transporter, phosphate import ATP-binding protein, phosphoadenosine phosphosulfate reductase, phosphoribosylformyl glycinamidine synthase subunit, protein kinase, protein phosphatase, purine nucleoside phosphorylase, recombinase A, sll1032-protein, sodium/proton antiporter, ThiF family protein, threonine dehydratase, threonine efflux protein, transcription factor, and ymr013c-protein, respectively.

[58420] Moreover, the nucleic acid molecule of the invention can comprise only a portion of the coding region of one of the nucleic acid molecules depicted in Table I, application no. 11, columns 5 or 8, for example a fragment which can be used as a probe or primer or a fragment encoding a biologically active portion of the polypeptide of the present invention or of a polypeptide used in the process of the present invention, i.e. having above-mentioned activity, e.g. conferring the production or the increased production of the respective fine chemical palmitic acid as compared to a corresponding, e.g. non-transformed, wild type non-human organism, like a microorganism or a plant cell, plant or part thereof, by for example in one embodiment expression either in the cytosol or in an organelle such as a plastid or mitochondria or both, preferably in a plastid, or in another embodiment non-targeted or targeted. The nucleotide sequences determined from the cloning of the present protein-according-to-the-inventionencoding gene allows for the generation of probes and primers designed for use in identifying and/or cloning its homologues from other cell types and organisms. The probe/primer typically comprises a substantially purified oligonucleotide. The oligonucleotide typically comprises a region of nucleotide sequence that hybridizes under stringent conditions to at least about 12, 15 preferably about 20 or 25, more preferably about 40, 50 or 75 consecutive nucleotides of a sense strand of one of the sequences set forth, e.g., in the respective line in Table I, application no. 11, column 5 or 8, preferably the coding region thereof, or a homolog or a fragment thereof, an anti-sense sequence of one of the sequences, e.g., set forth in the respective line in Table I, application no. 11, columns 5 or 8, preferably the coding region thereof, or a homolog or a fragment thereof or naturally occurring mutants thereof. Primers based on a nucleic acid molecule of the invention can be used in PCR reactions to clone homologs of the polypeptide of the invention or of the polypeptide used in the process of the invention, e.g. as the primers described in the examples of the present invention, e.g. as shown in the examples. A PCR with the primers shown in the respective line in Table III, column 8 will result in a fragment of the gene product as shown in Table II, application no. 11, column 5.

[58421] Primer sets are interchangeable. The person skilled in the art knows how to design and combine said primers to result in the desired product, e.g. in a full length clone or a partial sequence. Probes based on the sequences of the nucleic acid molecule of the invention or used in the process of the present invention can be used to detect transcripts or genomic sequences encoding the same or homologous proteins. The probe can further comprise a label group attached thereto, e.g. the label group can be a radioisotope, a fluorescent compound, an enzyme, or an enzyme co-factor. Such probes can be used as a part of a genomic marker test kit for identifying cells which express a polypeptide of the invention or used in the process of the present invention, such as by measuring a level of an encoding nucleic acid molecule in a sample of cells, e.g. detecting mRNA levels or determining, whether a genomic gene comprising the sequence of the polynucleotide of the invention or used in the processes of the present invention has been mutated or deleted.

[58422] As the expression of a respective nucleic acids of the invention is related to the synthesis of the respective fine chemical palmitic acid its function as a probe extends to the detection of microorganisms, plant tissues, plants, plant variets, plant ecotypes or plant genera with varying capability or potential for synthesis of the respective fine chemical palmitic acid. Therefore in one embodiment the present invention relates to a method for analyzing the capability or potential of a plant tissue, a plant, a plant variety or plant ecotype to produce the fine chemical palmitic acid by using the nucleic acid of the invention or parts thereof as a probe to detect the amount of the nucleic acid of the invention in the non-human organism or a part thereof in comparison to another non-human organism.

[58423] The nucleic acid molecule of the invention encodes a polypeptide or portion thereof which includes an amino acid sequence which is sufficiently homologous to the amino acid sequence shown in respective line in Table II, application no. 11, columns 5 or 8 such that the protein or portion thereof maintains the ability to confer the production or the increased production of the respective fine chemical palmitic acid as compared to a corresponding, e.g. non-transformed, wild type non-human organism, like a microorganism or a plant cell, plant or part thereof, in particular increasing the activity as mentioned above or as described in the examples in microorganisms or plants.

[58424] As used herein, the language “sufficiently homologous” refers to proteins or portions thereof which have amino acid sequences which include a minimum number of identical or equivalent amino acids (e.g. an amino acid which has a similar side chain as an amino acid in one of the sequences of the polypeptide of the present invention) to an amino acid sequence shown in the respective line in Table II, application no. 11, columns 5 or 8 such that the protein or portion thereof is able to confer the production or the increased production of the respective fine chemical palmitic acid as compared to a corresponding, e.g. non-transformed, wild type non-human organism, like a microorganism or a plant cell, plant or part thereof. For example having the activity of a protein as shown in the respective line in Table II, application no. 11, column 3 and as described herein.

[58425] In an embodiment of the present invention, the nucleic acid molecule of the present invention comprises a nucleic acid molecule that encodes a portion of the protein of the present invention. The protein is at least about 30%, 35%, 40%, 45% 50%, 55%, 60%, 65%, 70%, 75%, 80%, 85%, 90%, 91%, 92%, 93%, 94%, 95%, 96%, 97%, 98%, 99%, 99.5% or more homologous to an entire amino acid sequence shown in the respective line of Table II, application no. 11, column 5 or 8 and has the above-mentioned activity, e.g. conferring the production or the increased production of the respective fine chemical palmitic acid as compared to a corresponding, e.g. non-transformed, wild type non-human organism, like a microorganism or a plant cell, plant or part thereof by, for example in a embodiment expression either in the cytosol or in an organelle such as a plastid or mitochondria or both, preferably in a plastid, or in another embodiment by targeted or non-targeted expression.

[58426] [0338.1.8.11] to [0339.1.8.11] for the disclosure of these paragraphs see [0338.1.8.8] to [0339.1.8.8] above.

[58427] The invention further relates to nucleic acid molecules or methods using said nucleic acid molecules that differ from one of the nucleotide sequences shown in the respective line in Table I, application no. 11, columns 5 or 8, preferably the coding region thereof, or fragments or homologs thereof, due to degeneracy of the genetic code but encode a polypeptide of the present invention, in particular a polypeptide having the above-mentioned activity, e.g. as those polypeptides depicted in the respective line in Table II, application no. 11, columns 5 or 8, fragments or homologs thereof. Advantageously, the nucleic acid molecule of the invention comprises, or in an other embodiment has, a nucleotide sequence encoding a protein comprising, or in an other embodiment having, an amino acid sequence shown in the respective line in Table II, application no. 11, columns 5 or 8, fragments or homologs thereof. In a further embodiment, the nucleic acid molecule of the invention encodes a full length protein which is substantially homologous to an amino acid sequence shown in the respective line in Table II, application no. 11, columns 5 or 8, or homologs thereof. However, in an embodiment, the nucleic acid molecule of the present invention does not consist of the sequence shown in the respective line in Table I, preferably Table IA, application no. 11, columns 5 or 8, preferably the coding region thereof, but the functional homologs thereof.

[58428] [0341.1.8.11] to [0343.1.8.11] for the disclosure of these paragraphs see [0341.1.8.8] to [0343.1.8.8] above.

[58429] Accordingly, in another embodiment, a nucleic acid molecule of the invention is at least 15, 20, 25 or 30 nucleotides in length. Preferably, it hybridizes under stringent conditions to a nucleic acid molecule comprising a nucleotide sequence of the nucleic acid molecule of the present invention or used in the process of the present invention, e.g. comprising the sequence shown in the respective line in Table I, application no. 11, columns 5 or 8, preferably the coding region thereof. In another embodiment the nucleic acid molecule is preferably at least 20, 30, 50, 100, 250 or more nucleotides in length.

[58430] for the disclosure of this paragraph see [0345.1.8.8] above.

[58431] Preferably, a nucleic acid molecule of the invention that hybridizes under stringent conditions to a sequence shown in the respective line in Table I, application no. 11, columns 5 or 8, preferably the coding region thereof, corresponds to a naturally-occurring nucleic acid molecule of the invention. As used herein, a “naturally-occurring” nucleic acid molecule refers to a RNA or DNA molecule having a nucleotide sequence that occurs in nature (e.g. encodes a natural protein). Preferably, the nucleic acid molecule encodes a natural protein having above-mentioned activity, e.g. conferring the production or the increased production of the respective fine chemical palmitic acid as compared to a corresponding, e.g. non-transformed, wild type non-human organism, like a microorganism or a plant cell, plant or part thereof after increasing the expression or activity thereof or the activity of a protein of the invention or used in the process of the invention, in an embodiment for example expression either in the cytosol or in an organelle such as a plastid or mitochondria, preferably in plastids, or, in another embodiment by targeted or non-targeted expression.

[58432] for the disclosure of this paragraph see [0347.1.8.8] above.

[58433] For example, nucleotide substitutions leading to amino acid substitutions at “non-essential” amino acid residues can be made in a sequence of the nucleic acid molecule of the invention or used in the process of the invention, e.g. shown in the respective line in Table I, application no. 11, columns 5 or 8, preferably the coding region thereof, or fragments or homologs thereof.

[58434] [0349.1.8.11] to [0350.1.8.11] for the disclosure of these paragraphs see [0349.1.8.8] to [0350.1.8.8] above.

[58435] Accordingly, the invention relates to nucleic acid molecules encoding a polypeptide having above-mentioned activity, in a non-human organisms or parts thereof by for example expression either in the cytosol or in an organelle such as a plastid or mitochondria or both, preferably in plastids, that contain changes in amino acid residues that are not essential for said activity. Such polypeptides differ in amino acid sequence from a sequence depicted in the respective line in Table II, especially Table IIA, application no. 11, columns 5 or 8, but retain said activity described herein. The nucleic acid molecule can comprise a nucleotide sequence encoding a polypeptide, wherein the polypeptide comprises an amino acid sequence at least about 50% identical to an amino acid sequence shown in the respective line in Table II, application no. 11, columns 5 or 8, and is capable of conferring the production or the increased production of the respective fine chemical palmitic acid as compared to a corresponding, e.g. non-transformed, wild type non-human organism, like a microorganism or a plant cell, plant or part thereof, after increasing its activity for example in an embodiment by expression either in the cytosol or in an organelle such as a plastid or mitochondria or both, preferably in plastids, or, in another embodiment by targeted or non-targeted expression. Preferably, the protein encoded by the nucleic acid molecule is at least about 60%, 70%, 80%, 90%, 95%, 96%, 97%, 98%, 99% or 99.5% identical to the sequence shown in the respective line in Table II, application no. 11, columns 5 or 8.

[58436] [0352.1.8.11] to [0357.1.8.11] for the disclosure of these paragraphs see [0352.1.8.8] to [0357.1.8.8] above.

[58437] Functional equivalents of the nucleic acid molecules according to the present invention and/or used in the process according to the present invention represent an embodiment of homologs. Functional equivalents derived from the nucleic acid molecules as shown in the respective line in Table I, application no. 11, columns 5 or 8, preferably the coding region thereof, according to the invention by substitution, insertion or deletion have at least 30%, 35%, 40%, 45%, 50%, 55%, 60%, 65%, 70%, 75%, 80%, 85%, 90%, 91%, 92%, 93%, 94%, 95%, 96%, 97%, 98%, 99% or 99.5% homology with one of the nucleic acid molecules as shown in the respective line in Table I, application no. 11, columns 5 or 8, preferably the coding region thereof, according to the invention and encode polypeptides having essentially the same properties as the polypeptide as shown in the respective line in Table II, application no. 11, columns 5 or 8.

[58438] Functional equivalents derived from one of the polypeptides as shown in the respective line in Table II, application no. 11, columns 5 or 8 according to the invention by substitution, insertion or deletion have at least 30%, 35%, 40%, 45%, 50%, 55%, 60%, 65%, 70%, 75%, 80%, 85%, 90%, 91%, 92%, 93%, 94%, 95%, 96%, 97%, 98%, 99% or 99.5% homology with one of the polypeptides as shown in the respective line in Table II, application no. 11, columns 5 or 8 according to the invention and having essentially the same properties as the polypeptide as shown in the respective line in Table II, application no. 11, columns 5 or 8.

[58439] for the disclosure of this paragraph see [0359.1.8.8] above.

[58440] A nucleic acid molecule encoding a homolog to a polypeptide depicted in the respective line in Table II, application no. 11, columns 5 or 8 can be created by introducing one or more nucleotide substitutions, additions or deletions into the nucleic acid molecule of the present invention, in particular of Table I, application no. 11, columns 5 or 8, in the respective line, such that one or more amino acid substitutions, additions or deletions are introduced into the encoded protein. Mutations can be introduced into the nucleic acid molecules as depicted in the respective line in Table I, application no. 11, columns 5 or 8, preferably the coding region thereof, by standard techniques, such as site-directed mutagenesis, PCR-mediated mutagenesis or other methods known to the person skilled in the art.

[58441] [0361.1.8.11] to [0363.1.8.11] for the disclosure of these paragraphs see [0361.1.8.8] to [0363.1.8.8] above.

[58442] Homologues of the nucleic acid sequences used, with the sequences shown in the respective line in Table I, application no. 11, columns 5 or 8, preferably the coding region thereof, comprise also allelic variants with at least approximately 30%, 35%, 40%, 45%, 50%, 55%, 60%, 65%, 70%, 75%, 80%, 85%, 90%, 91%, 92%, 93%, 94% 95%. 96%, 97%, 98%, 99%, 99.5% or more % homology with one of the nucleotide sequences shown or the abovementioned derived nucleic acid sequences or their homologues or derivatives or parts of these. Allelic variants encompass in particular functional variants which can be obtained by deletion, insertion or substitution of nucleotides from the sequences shown in the respective line, preferably in Table I, columns 5 or 8, preferably the coding region thereof, or from the derived nuoleic acid sequences, the intention being, however, that the enzymatic activity or the biological activity of the resulting proteins synthesized is advantageously retained or increased.

[58443] In one embodiment of the present invention, the nucleic acid molecule of the invention or used in the process of the invention comprises the sequences shown in the respective line in any of the Table I, application no. 11, columns 5 or 8, preferably the coding region thereof, fragments or homologs thereof. It is preferred that the nucleic acid molecule comprises as little as possible other nucleotides not shown in the respective line in any one of Table I, application no. 11, columns 5 or 8, preferably the coding region thereof, fragments or homologs thereof. In one embodiment, the nucleic acid molecule comprises less than 500, 400, 300, 200, 100, 90, 80, 70, 60, 50 or 40 further nucleotides. In a further embodiment, the nucleic acid molecule comprises less than 30, 20 or 10 further nucleotides. In one embodiment, the nucleic acid molecule used in the process of the invention is identical to the sequences shown in the respective line in Table I, application no. 11, columns 5 or 8, preferably the coding region thereof.

[58444] Also preferred is that the nucleic acid molecule used in the process of the invention encodes a polypeptide comprising the sequence shown in the respective line in Table II, application no. 11, columns 5 or 8, fragments or homologs thereof. In one embodiment, the nucleic acid molecule encodes less than 150, 130, 100, 80, 60, 50, 40 or 30 further amino acids. In a further embodiment, the encoded polypeptide comprises less than 20, 15, 10, 9, 8, 7, 6 or 5 further amino acids. In one embodiment used in the inventive process, the encoded polypeptide is identical to the sequences shown in the respective line in Table II, application no. 11, columns 5 or 8.

[58445] In one embodiment, the nucleic acid molecule of the invention or used in the process encodes a polypeptide comprising the sequence shown in the respective line in Table II, application no. 11, columns 5 or 8, or fragments or homologs thereof, and comprises less than 100 further nucleotides. In a further embodiment, said nucleic acid molecule comprises less than 30 further nucleotides. In one embodiment, the nucleic acid molecule used in the process is identical to a coding sequence of the sequences shown in the respective line in Table I, application no. 11, columns 5 or 8.

[58446] Polypeptides (=proteins), which still have the essential biological or enzymatic activity of the polypeptide of the present invention conferring the production or the increased production of the respective fine chemical palmitic acid as compared to a corresponding, e.g. non-transformed, wild type non-human organism, like a microorganism or a plant cell, plant or part thereof, i.e. whose activity is essentially not reduced, are polypeptides with at least 10%, 20%, 30%, 40%, 50%, 60%, 70%, 80%, 90%, 95% or more of the wild type biological activity or enzymatic activity, advantageously, the activity is essentially not reduced in comparison with the activity of a polypeptide shown in the respective line in Table II, application no. 11, columns 5 or 8 expressed under identical conditions.

[58447] Homologues of nucleic acid molecules shown in the respective line in Table I, application no. 11, columns 5 or 8, preferably the coding region thereof, or fragments thereof, or of the derived sequences shown in the respective line in Table II, application no. 11, columns 5 or 8, or fragments thereof, also mean truncated sequences, cDNA, single-stranded DNA or RNA of the coding and noncoding DNA sequence. Homologues of said sequences are also understood as meaning derivatives, which comprise noncoding regions such as, for example, UTRs, introns, terminators, enhancers or promoter variants. The promoters upstream of the nucleotide sequences stated can be modified by one or more nucleotide substitution(s), insertion(s) and/or deletion(s) without, however, interfering with the functionality or activity either of the promoters, the open reading frame (=ORF) or with the 3′-regulatory region such as terminators or other 3′-regulatory regions, which are far away from the ORF. It is furthermore possible that the activity of the promoters is increased by modification of their sequence, or that they are replaced completely by more active promoters, even promoters from heterologous organisms. Appropriate promoters are known to the person skilled in the art and are mentioned herein below.

[58448] [0370.1.8.11] to [0379.1.8.11] for the disclosure of these paragraphs see [0370.1.8.8] to [0379.1.8.8] above.

[58449] Moreover, a native polypeptide conferring the increase of the respective fine chemical palmitic acid in a non-human organism or a part thereof can be isolated from cells (e.g., endothelial cells), for example using the antibody of the present invention as described below, in particular, an antibody against proteins having 2-C-methyl-D-erythritol 4-phosphate cytidylyltransferase, 3-ketoacyl-CoA thiolase, 49747384_SOYBEAN-protein, AAS bifunctional protein, ABC metal ion transporter substrate-binding protein, acid phosphatase precursor, acid shock protein, aconitate hydratase, acyl transferase, arginine decarboxylase, aromatic acid decarboxylase, At1g19800-protein, At1g23110-protein, At2g45420-protein, ATPase epsilon subunit, b0050-protein, b1234-protein, b1248-protein, b1330-protein, b1670-protein, b1837-protein, b2032-protein, b2099-protein, b2107-protein, b2399-protein, b2682-protein, b2849-protein, b3814-protein, bifunctional protein (phosphoribosyltransferase and regulatory protein), branched chain amino acid ABC transporter ATP-binding protein, calcium-dependent protein kinase, carbamoyl-phosphate synthase subunit, carbon dioxide concentrating mechanism protein, cation-transporting ATPase, CCAAT-binding transcription factor, chlorophyllase, colanic acid biosynthesis protein, coproporphyrinogen III oxidase, DnaJ-like chaperone, ethanolamine utilization protein, F-box protein, Fe—S subunit of oxidoreductase, flavodoxin, glucose-6-phosphate 1-dehydrogenase, glutaredoxin, glutathione S-transferase, glycerol-3-phosphate dehydrogenase, heat shock transcription factor, HesB/YadR/YfhF family protein, homocitrate synthase, lipoprotein precursor, metal-dependent hydrolase, monothiol glutaredoxin, NADH-quinone oxidoreductase subunit, nitrate/nitrite transport protein, oxidoreductase, peptidyl-prolyl cis-trans isomerase, permease protein of ABC transporter, phosphate import ATP-binding protein, phosphoadenosine phosphosulfate reductase , phosphoribosylformyl glycinamidine synthase subunit, protein kinase, protein phosphatase, purine nucleoside phosphorylase, recombinase A, sll1032-protein, sodium/proton antiporter, ThiF family protein, threonine dehydratase, threonine efflux protein, transcription factor, or ymr013c-protein activity, respectively, or an antibody against polypeptides as shown in the respective line in Table II, application no. 11, columns 5 or 8, or fragments or homologs thereof which can be produced by standard techniques utilizing the polypeptid of the present invention or fragment thereof, i.e., the polypeptide of this invention (FCRP). Preferred are monoclonal antibodies.

[58450] for the disclosure of this paragraph see [0381.1.8.8] above.

[58451] In one embodiment, the present invention relates to a polypeptide as depicted in the respective line in Table II, especially in Table IIA or especially in Table IIB, application no. 11, columns 5 or 8, or fragment or homolog thereof or as coded by the nucleic acid molecule shown in the respective line in Table I, especially Table IA or especially Table IB, application no. 11, columns 5 or 8, preferably the coding region thereof, or fragment or homolog thereof.

[58452] In an embodiment, the present invention relates to a polypeptide comprising or consisting of a consensus sequence shown in the respective line in Table IV, application no. 11, column 8 or at least one polypeptide motif shown in the respective line in Table IV, application no. 11, column 8.

[58453] In an embodiment thereof, the present invention relates to a polypeptide comprising or consisting of a consensus sequence shown in the respective line in Table IV, application no. 11, column 8 or comprising at least one polypeptide motif shown in the respective line in Table IV, application no. 11, column 8, whereby not more than 20, 15, 10, 9, 8, 7, 6, 5, 4, 3, 2, or 1, or 0 of the amino acids can be replaced by any amino acid.

[58454] In another embodiment thereof, the present invention relates to a polypeptide comprising or consisting of a consensus sequence shown in the respective line in Table IV, application no. 11, column 8 or comprising at least one polypeptide motif shown in the respective line in Table IV, application no. 11, column 8, whereby not more than 15%, 10%, 5%, 4%, 3%, 2% or1% or 0% of the amino acids defined as distinct specific amino acids are/is replaced by another amino acid.

[58455] In another embodiment thereof, the present invention relates to a polypeptide comprising or consisting of a consensus sequence shown in the respective line in Table IV, application no. 11, column 8 or comprising at least one polypeptide motif shown in the respective line in Table IV, application no. 11, column 8, whereby not more than 20, 15, 10, 9, 8, 7, 6, 5, 4, 3, 2, or 1, or 0 amino acids are inserted into the consensus sequence or polypeptide motif.

[58456] In an embodiment of the present invention, the polypeptide of the present invention comprises or consists of a consensus sequence or at least one polypeptide motif shown in the respective line in Table IV, application no. 11, column 8, whereby said polypeptide distinguishes over the sequence depicted in the respective line in Table II, application no. 11, columns 5 or 8 by one or more amino acids. In one embodiment, said polypeptide of the invention distinguishes over the sequence shown in the respective line in Table II, application no. 11, columns 5 and 8 by more than 5, 6, 7, 8 or 9 amino acids, preferably by more than 10, 15, 20, 25 or 30 amino acids, even more preferred are more than 40, 50, or 60 amino acids and, preferably, the sequence of the polypeptide of the invention distinguishes from the sequence shown in the respective line in Table II, application no. 11, columns 5 and 8 by not more than 80%, 70%, 60%, 50%, 40%, 30%, 20%, 10%, 5%, 4%, 3%, 2%, 1% or 0.5%. In another embodiment, said polypeptide of the invention does not consist of the sequence shown in the respective line in Table II, application no. 11, columns 5 and 8.

[58457] In an embodiment, the invention relates to a polypeptide conferring an increase in the respective fine chemical palmitic acid in a non-human organism, especially a microorganism or a plant, or a part thereof, being encoded by the nucleic acid molecule of the invention or used in the process of the invention and having a sequence which distinguishes over the sequence as shown in the respective line in Table II, application no. 11, columns 5 or 8 by one or more amino acids (but not exceeding 5%, preferably 4%, 3%, 2%, 1%, 0.5%, 0.2% or 0.1%). In an embodiment, said polypeptide of the invention does not comprise or consist of the sequence shown in the respective line in Table II, application no. 11, columns 5 or 8. In an embodiment, said polypeptide of the present invention is less than 100%, 99.999%, 99.99%, 99.9% or 99% identical. In one embodiment, said polypeptide which differs at least in one or more amino acids (but not exceeding 5%, preferably 4%, 3%, 2%, 1%, 0.5%, 0.2% or 0.1%) from the polypeptide shown in the respective line in Table II, application no. 11, columns 5 and 8 does not comprise a protein of the sequence shown in the respective line in Table II A and/or II B, application no. 11, columns 5 or 8.

[58458] In an embodiment, the present invention relates to a polypeptide having the activity of the protein as shown in the respective line in Table II, application no. 11, column 3, which distinguishes over the sequence depicted in the respective line in Table II, application no. 11, columns 5 or 8 by one or more amino acids, preferably by more than 5, 6, 7, 8 or 9 amino acids, preferably by more than 10, 15, 20, 25 or 30 amino acids, even more preferred are more than 40, 50, or 60 amino acids and, preferably, the sequence of the polypeptide of the invention distinguishes from the sequence shown in the respective line in Table II, application no. 11, columns 5 and 8 by not more than 80%, 70%, 60%, 50%, 40%, 30%, 20%, 10%, 5%, 4%, 3%, 2%, 1% or 0.5%.

[58459] In another embodiment the polypeptide of the invention takes the form of a preprotein consisting of a plastidial or mitochondrial transit peptide joint to a polypeptide having the activity of the protein as shown in Table II, column 3, from which the transit peptide is preferably cleaved off upon transport of the preprotein into the organelle for example into the plastid or mitochondrion.

[58460] In another embodiment the polypeptide of the invention takes not the form of a preprotein.

[58461] [0390.1.8.11] to [0391.1.8.11] for the disclosure of these paragraphs see [0390.1.8.8] to [0391.1.8.8] above.

[58462] A polypeptide of the invention can participate in the process of the present invention. The polypeptide or a portion thereof comprises preferably an amino acid sequence, which is sufficiently homologous to an amino acid sequence shown in the respective line in Table II A and/or II B, application no. 11, columns 5 or 8.

[58463] Further, the polypeptide can have an amino acid sequence which is encoded by a nucleotide sequence which hybridizes, preferably hybridizes under stringent conditions as described above, to a nucleotide sequence of the nucleic acid molecule of the present invention. Accordingly, the polypeptide has an amino acid sequence which is encoded by a nucleotide sequence that is at least about 35%, 40%, 45%, 50%, 55%, 60%, 65%, 70%, 75%, 80%, 85%, 90%, 91%, 92%, 93%, 94%, 95%, 96%, 97%, 98%, 99%, 99.5% or more homologous to one of the amino acid sequences as shown in the respective line in Table II A and/or II B, application no. 11, columns 5 or 8, or fragments thereof. The preferred polypeptide of the present invention preferably possesses at least one of the activities according to the invention and described herein. A preferred polypeptide of the present invention includes an amino acid sequence encoded by a nucleotide sequence which hybridizes, preferably hybridizes under stringent conditions, to a nucleotide sequence shown in the respective line in Table I A and/or I B, application no. 11, columns 5 or 8, preferably the coding region thereof, or fragments thereto or which is homologous thereto, as defined above.

[58464] The polypeptide of the present invention can vary from the sequences shown in the respective line in Table II A and/or II B, application no. 11, columns 5 or 8 in amino acid sequence due to natural variation or mutagenesis, as described in detail herein. Accordingly, the polypeptide comprise an amino acid sequence which is at least about 35%, 40%, 45%, 50%, 55%, 60%, 65%, 70%, 75%, 80%, 85% or 90, 91%, 92%, 93%, 94%, 95%, 96%, 97%, 98%, 99%, 99.5% or more homologous to an entire amino acid sequence shown in the respective line in Table II A and/or II B, application no. 11, columns 5 or 8.

[58465] Biologically active portions of a polypeptide of the present invention include peptides comprising amino acid sequences derived from the amino acid sequence of the polypeptide of the present invention or used in the process of the present invention, e.g., the amino acid sequence shown in the respective line in Table II, application no. 11, columns 5 or 8 or the amino acid sequence of a protein homologous thereto, which include fewer amino acids than a full length polypeptide of the present invention or used in the process of the present invention or the full length protein which is homologous to a polypeptide of the present invention or used in the process of the present invention depicted herein, and exhibit at least one activity of a polypeptide of the present invention or used in the process of the present invention.

[58466] for the disclosure of this paragraph see [0396.1.8.8] above.

[58467] Manipulation of the nucleic acid molecule of the invention may result in the production of a protein having differences from the protein as shown in the respective line in Table II, application no. 11, column 5 or 8. Differences shall mean at least one amino acid different from the sequences as shown in the respective line in Table II, application no. 11, column 5 or 8, preferably at least 2, 3, 4, 5, 6, 7, 8, 9 or 10 amino acids (especially but not exceeding 0.1%, preferably 0.2%, 0.5%, 1%, 2%, 3% 4% or 5%), more preferably at least 15, 20, 25, 30, 35, 40, 45 or 50 amino acids (especially but not exceeding 0.5%, preferably 1%, 2%, 3% 4%, 5%, 10% or 25%) different from the sequences as shown in the respective line in Table II, application no. 11, column 5 or 8. These proteins may be improved in efficiency or activity, or may be more stable and therefore present in greater numbers in the cell as compared to the wild-type cell.

[58468] Any mutagenesis strategies for the polypeptide of the present invention or the polypeptide used in the process of the present invention to result in increasing said activity are not meant to be limiting; variations on these strategies will be readily apparent to one skilled in the art. Using such strategies, and incorporating the mechanisms disclosed herein, the nucleic acid molecule and polypeptide of the invention may be utilized to generate algae, ciliates, fungi, other microorganisms like C. glutamicum or plants or parts thereof, expressing proteins as shown in the respective line in Table II, application no. 11, column 5 or 8, or mutated proteins thereof. The nucleic acid molecules and polypeptide molecules of the invention are expressed such that the yield, production, and/or efficiency of production of a desired compound is improved.

[58469] [0399.1.8.11] to [0401.1.8.11] for the disclosure of these paragraphs see [0399.1.8.8] to [0401.1.8.8] above.

[58470] In one embodiment, a protein (=polypeptide) as shown in the respective line in Table II, application no. 11, column 5 or 8 refers to a polypeptide having an amino acid sequence corresponding to the polypeptide of the invention, especially to a polypeptide as shown in Table II, application no. 11, columns 5 or 8 or homologs thereof, or used in the process of the invention, whereas a “non- inventive protein or polypeptide” or “other polypeptide” refers to a polypeptide having an amino acid sequence corresponding to a protein which is not substantially homologous to a polypeptide of the invention, preferably which is not substantially homologous to a polypeptide or protein as shown in the respective line in Table II, application no. 11, column 5 or 8 or homologs thereof, e.g., a protein which does not confer the activity described herein and which is derived from the same or a different organism.

[58471] [0403.1.8.11] to [0409.1.8.11] for the disclosure of these paragraphs see [0403.1.8.8] to [0409.1.8.8] above.

[58472] As the nucleic acid molecules of the invention and/or the expression thereof is related to the synthesis of the respective fine chemical palmitic acid its function as a probe extends to the detection of microorganisms, plant tissues, plants, plant variets, plant ecotypes or plant genera with varying, advantageously increased, capability or potential for synthesis of the respective fine chemical palmitic acid. Therefore in one embodiment the present invention relates to a method for analyzing the capability or potential of a plant tissue, a plant, a plant variety or ecotype to produce the respective fine chemical palmitic acid by using the respective antibody of the invention as a probe to detect the amount of the polypeptide encoded by said nucleic acid molecule of the invention in a non-human organism in comparison to another organism.

[58473] Therefore in one embodiment the invention relates to a method to probe a non-human organism for its capability for the production of the respective fine chemical comprising the steps of
[58474] a) analyzing the sequence and/or the expression of the respective nucleic acid molecule of the invention in least two non-human organisms which differ in the capability to produce the respective fine chemical;
[58475] b) associate the different sequence and/or expression level of the nucleic acid molecules of the invention with their different capability to produce the respective fine chemical;
[58476] c) analyze the sequence and/or the expression of the nucleic acid molecule of the invention in at least a third non-human organism;
[58477] d) predict the capability of the at least third organism to produce the respective fine chemical based by comparing the sequence and/or expression of the nucleic acid of the invention to the sequences and/or expression levels of the nucleic acid molecule of the invention of the at least two organisms analyzed in step a.

[58478] [0411.1.8.11] to [0430.1.8.11] for the disclosure of these paragraphs see [0411.1.8.8] to [0430.1.8.8] above.

[58479] Accordingly the present invention relates to any cell transgenic for any nucleic acid characterized as part of the invention, e.g. conferring the increase of the respective fine chemical palmitic acid in a cell or a non-human organism or a part thereof, e.g. the nucleic acid molecule of the invention, the nucleic acid construct of the invention, the vector of the invention, the expression cassette according to the invention, or a nucleic acid molecule encoding the polypeptide of the invention, e.g. encoding a polypeptide having an activity as the protein as shown in the respective line in Table II, application no. 11, column 3. Due to the abovementioned activity the respective fine chemical palmitic acid content in a cell or a non-human organism is increased. For example, due to modulation or manipulation, the cellular activity is increased, in a preferred embodiment in organelles such as plastids or mitochondria, e.g. due to an increased expression or specific activity or specific targeting of the subject matters of the invention in a cell or a non-human organism or a part thereof especially in organelles such as plastids or mitochondria, or in another embodiment in the cytosol. Transgenic for a polypeptide having a protein or a protein activity means herein that due to modulation or manipulation of the genome, the activity of protein as shown in the respective line in Table II, application no. 11, column 3 or a protein as shown in the respective line in Table II, application no. 11, column 3like activity is increased in the cell or non-human organism or part thereof, especially in organelles such as plastids or mitochondria, or especially in the cytosol. Examples are described above in context with the process of the invention.

[58480] for the disclosure of this paragraph see [0432.1.8.8] above.

[58481] A naturally occurring expression cassette—for example the naturally occurring combination of the promoter of the gene encoding a protein as shown in the respective line in Table II, application no. 11, column 5 or 8, preferably the coding region thereof, or fragments or homologs thereof with the corresponding encoding gene—becomes a transgenic expression cassette when it is modified by non-natural, synthetic “artificial” methods such as, for example, mutagenesis. Such methods have been described (U.S. Pat. No. 5,565,350; WO 00/15815; also see above).

[58482] [0434.1.8.11] to [0435.1.8.11] for the disclosure of these paragraphs see [0434.1.8.8] to [0435.1.8.8] above.

[58483] Transgenic plants comprising the respective fine chemical(s) synthesized in the process according to the invention can be marketed directly without isolation of the fine chemical synthesized. In the process according to the invention, plants are understood as meaning all plant parts, plant organs such as leaf, stalk, root, tubers or seeds or propagation material or harvested material or the intact plant. In this context, the seed encompasses all parts of the seed such as the seed coats, epidermal cells, seed cells, endosperm or embryonic tissue. The fine chemical produced in the process according to the invention may, however, also be isolated from the plant. In case of palmitic acid this can be in free form or bound to proteins. Fine chemical(s) produced by this process can be harvested by harvesting the non-human organisms either from the culture in which they grow or from the field. For example, this can be done via squeezing, grinding and/or extraction, salt precipitation and/or ion-exchange chromatography of the plant parts, preferably the plant seeds, plant fruits, plant tubers and the like.

[58484] [0437.1.8.11] to [0454.1.8.11] for the disclosure of these paragraphs see [0437.1.8.8] to [0454.1.8.8] above.

[58485] In one embodiment, the present invention relates to a method for the identification of a gene product conferring the production of or an increase in the fine chemical production in a non-human cell, comprising the following steps:
[58486] (a) contacting, e.g. hybridizing, a, some or all nucleic acid molecules of a sample, e.g. cells, tissues, plants or microorganisms or a nucleic acid library, which can contain a candidate gene encoding a gene product conferring the production of or an increase in the fine chemical after expression, with the nucleic acid molecule of the present invention as shown in the respective line in column 5 or 8 of Table I A or B of application no. 11, preferably the coding region thereof, or a fragment or homolog thereof;
[58487] (b) identifying the nucleic acid molecules, which hybridize under relaxed stringent conditions with the nucleic acid molecule of the present invention in particular to the nucleic acid molecule sequence shown in the respective line in Table I, application no. 11, columns 5 or 8, preferably the coding region thereof, of a fragment or a homolog thereof, preferably in Table I B, application no. 11, columns 5 or 8, preferably the coding region thereof, of a fragment or a homolog thereof, and, optionally, isolating the full length cDNA clone or complete genomic clone;
[58488] (c) introducing the candidate nucleic acid molecules or a fragment thereof in host cells, preferably in a plant cell or a microorganism, appropriate for producing the fine chemical;
[58489] (d) expressing the identified nucleic acid molecules in the host cells for which the production of or the increased production of the fine chemical is desired;
[58490] (e) assaying the fine chemical level in the non-human host cells; and
[58491] (f) identifying the nucleic acid molecule and/or its gene product which expression confers the production of or an increase in the fine chemical level in the non-human host cell after expression compared to the wild type.

[58492] for the disclosure of this paragraph see [0456.1.8.8] above.

[58493] In another embodiment, the present invention relates to a method for the identification of a gene product conferring the production of or an increase in the fine chemical production in a cell, comprising the following steps:
[58494] (a) identifying a nucleic acid molecule of a non-human organism, which is at least 20%, 25%, 30%, 35%, 40%, 50%, 60%, 70%, 80%, 90%, 95%, 96%, 97%, 98%, 99%, 99.5% or more homolog to the nucleic acid molecule encoding a polypeptide comprising the polypeptide molecule as shown in the respective line in column 5 or 8 of Table II, application no. 11, or comprising a consensus sequence or a polypeptide motif as shown in the respective line in column 8 of Table IV, application no. 11, or being encoded by a nucleic acid molecule comprising a polynucleotide as shown in the respective line in column 5 or 8 of Table I, application no. 11, preferably the coding region thereof, or a homologue thereof as described herein, for example via homology search in a data bank;
[58495] (b) introducing the candidate nucleic acid molecule in non-human host cells, preferably in a plant cell or a microorganism, appropriate for producing the fine chemical;
[58496] (c) expressing the identified nucleic acid molecule in the non-human host cells;
[58497] (d) assaying the fine chemical level in the non-human host cells; and
[58498] (e) identifying the nucleic acid molecule and its gene product which expression confers the production of or an increase in the fine chemical level in the non-human host cell after expression compared to the wild type.

[58499] for the disclosure of this paragraph see [0458.1.8.8] above.

[58500] Further, the nucleic acid molecules disclosed herein, in particular the nucleic acid molecules shown in the respective line in column 5 or 8 of Table I A or B of application no. 11, may be sufficiently homologous to the sequences of related species such that these nucleic acid molecules may serve as markers for the construction of a genomic map in related organism or for association mapping. Furthermore natural variation in the genomic regions corresponding to nucleic acids disclosed herein, in particular the nucleic acid molecule shown in the respective line in column 5 or 8 of Table I A or B, of application no. 11 or homologous thereof, may lead to variation in the activity of the proteins disclosed herein, in particular the proteins comprising polypeptides as shown in the respective lines in column 5 or 8 of Table II A or B, of application no. 11 or their homologous, or comprising the consensus sequence or the polypeptide motif as shown in the respective line in column 8 of Table IV, and in consequence in a natural variation of an increased fine chemical production.

[58501] In consequence natural variation eventually also exists in form of more active allelic variants leading already to a relative increase in the fine chemical. Different variants of the nucleic acid molecules disclosed herein, in particular the nucleic acid molecules comprising the nucleic acid molecules as shown in the respective line in column 5 or 8 of Table I A or B of application no. 11, preferably the coding region thereof, which corresponds to different levels of increase in fine chemical, e.g. different levels of increase in fine chemical, can be indentified and used for marker assisted breeding for an enhanced production of the fine chemical.

[58502] Natural variation may also exist in the regulatory regions, e.g. the promoters of the natural genes comprising the nucleic acid molecules as shown in the respective line column 5 or 8 of Table I A or B of application no. 11, preferably the coding region thereof, which can similarly correspond to different levels of increase in the fine chemical, e.g. different levels of increase in the fine chemical can be identified and used for marker assisted breeding for an enhanced production of the fine chemical.

[58503] Accordingly, the present invention relates to a method for breeding plants for the production of the fine chemical, comprising
[58504] (a) selecting a first plant variety with an increased production of the fine chemical, e.g. based on an increased expression of a nucleic acid molecule of the invention as disclosed herein, in particular of a nucleic acid molecule comprising a nucleic acid molecule as shown in the respective line in column 5 or 8 of Table I A or B of application no. 11, preferably the coding region thereof, or fragments or homologs thereof, or a polypeptide comprising a polypeptide as shown in the respective line in column 5 or 8 of Table II A or B of application no. 11, or fragments or homologs thereof, or comprising a consensus sequence or a polypeptide motif as shown in the respective line in column 8 of Table IV, or a homolog thereof, as described herein;
[58505] (b) associating the level of increased production of the fine chemical, with the expression level or the genomic structure of a gene encoding said polypeptide or said nucleic acid molecule;
[58506] (c) crossing the first plant variety with a second plant variety, which significantly differs in its level of fine chemical; and
[58507] (d) identifying, which of the offspring varieties has got increased production of the fine chemical by the expression level of said polypeptide or nucleic acid molecule or the genomic structure of the gene(s) encoding said polypeptide or nucleic acid molecule of the invention.

[58508] [0462.1.8.11] to [0482.1.8.11] for the disclosure of these paragraphs see [0462.1.8.8] to [0482.1.8.8] above.

[58509] In a further embodiment the present invention is characterized by the features as disclosed in the following items:

### Items:

[58510] Item 1. A process for the production of the fine chemical palmitic acid
[58511] (a) increasing or generating one or more activities selected from the group consisting of 2-C-methyl-D-erythritol 4-phosphate cytidylyltransferase, 3-ketoacyl-CoA thiolase, 49747384_SOYBEAN-protein, AAS bifunctional protein, ABC metal ion transporter substrate-binding protein, acid phosphatase precursor, acid shock protein, aconitate hydratase, acyl transferase, arginine decarboxylase, aromatic acid decarboxylase, At1g19800-protein, At1g23110-protein, At2g45420-protein, ATPase epsilon subunit, b0050-protein, b1234-protein, b1248-protein, b1330-protein, b1670-protein, b1837-protein, b2032-protein, b2099-protein, b2107-protein, b2399-protein, b2682-protein, b2849-protein, b3814-protein, bifunctional protein (phosphoribosyltransferase and regulatory protein), branched chain amino acid ABC transporter ATP-binding protein, calcium-dependent protein kinase, carbamoyl-phosphate synthase subunit, carbon dioxide concentrating mechanism protein, cation-transporting ATPase, CCAAT-binding transcription factor, chlorophyllase, colanic acid biosynthesis protein, coproporphyrinogen III oxidase, DnaJ-like chaperone, ethanolamine utilization protein, F-box protein, Fe—S subunit of oxidoreductase, flavodoxin, glucose-6-phosphate 1-dehydrogenase, glutaredoxin, glutathione S-transferase, glycerol-3-phosphate dehydrogenase, heat shock transcription factor, HesB/YadR/YfhF family protein, homocitrate synthase, lipoprotein precursor, metal-dependent hydrolase, monothiol glutaredoxin, NADH-quinone oxidoreductase subunit, nitrate/nitrite transport protein, oxidoreductase, peptidyl-prolyl cis-trans isomerase, permease protein of ABC transporter, phosphate import ATP-binding protein, phosphoadenosine phosphosulfate reductase , phosphoribosylformyl glycinamidine synthase subunit, protein kinase, protein phosphatase, purine nucleoside phosphorylase, recombinase A, sll1032-protein, sodium/proton antiporter, ThiF family protein, threonine dehydratase, threonine efflux protein, transcription factor, and ymr013c-protein, in a non-human organism or a part thereof, preferably a microorganism, a plant cell, a plant or a part thereof, as compared to a corresponding non-transformed wild type non-human organism or a part thereof; and
[58512] (b) growing the non-human organism or a part thereof under conditions which permit the production of palmitic acid or a composition comprising palmitic acid in said non-human organism or in the culture medium surrounding said non-human organism.

[58513] Item 2. A process for the production of the fine chemical palmitic acid, which comprises
[58514] (A)
   [58515] (i) increasing or generating of the expression of; and/or
   [58516] (ii) increasing or generating the expression of an expression product of; and/or
   [58517] (iii) increasing or generating one or more activities of an expression product encoded by;
   [58518] at least one respective nucleic acid molecule comprising a nucleic acid molecule selected from the group consisting of:
   [58519] (a) a nucleic acid molecule encoding the polypeptide shown in column 5 or 8 of Table II, preferably Table II B, application no. 11, or a homolog or a fragment thereof;
   [58520] (b) a nucleic acid molecule shown in column 5 or 8 of Table I, preferably Table I B, application no.11, or a homolog or a fragment thereof (preferably the coding region thereof);
   [58521] (c) a nucleic acid molecule, which, as a result of the degeneracy of the genetic code, can be derived from a polypeptide sequence depicted in column 5 or 8 of Table II, preferably Table II B, application no.11;
   [58522] (d) a nucleic acid molecule having at least 30%, in particular at least 50%, 60%, 70%, 80%, 85%, 90%, 95%, 97%, 98%, 99% or 99.5% identity with the nucleic acid molecule sequence of a polynucleotide comprising the nucleic acid molecule shown in column 5 or 8 of Table I, preferably Table I B, application no. 11, or the coding region thereof;
   [58523] (e) a nucleic acid molecule encoding a polypeptide having at least 30%, in particular 50%, 60%, 70%, 80%, 85%, 90%, 95%, 97%, 98%, 99% or 99.5% identity with the amino acid sequence of the polypeptide encoded by the nucleic acid molecule of (a), (b), (c) or (d);
   [58524] (f) a nucleic acid molecule which hybridizes with a nucleic acid molecule of (a), (b), (c), (d) or (e) under stringent hybridization conditions;
   [58525] (g) a nucleic acid molecule encoding a polypeptide which can be isolated with the aid of monoclonal or polyclonal antibodies made against a polypeptide encoded by one of the nucleic acid molecules of (a), (b), (c), (d), (e) or (f);
   [58526] (h) a nucleic acid molecule encoding a polypeptide comprising the consensus sequence or one or more polypeptide motifs as shown in column 8 of Table IV, application no.11;
   [58527] (i) a nucleic acid molecule encoding a polypeptide having the activity represented by a respective protein as depicted in column 5 of Table II, application no. 11;
   [58528] (j) a nucleic acid molecule which comprises a polynucleotide, which is obtained by amplifying a cDNA library or a genomic library using the primers as depicted in column 8 of Table III, application no. 11; and
   [58529] (k) a nucleic acid molecule which is obtainable by screening a suitable nucleic acid library, especially a cDNA library and/or a genomic library, under stringent hybridization conditions with a probe comprising a complementary sequence of a nucleic acid molecule of (a), (b), (c), (d), (e), (f), (g), (h), (i) or (j) or with a fragment thereof, having at least 15 nt, preferably 20 nt, 30 nt, 50 nt, 100 nt, 200 nt, 500 nt, 1000 nt, 1500 nt, 2000 nt or 3000 nt of a nucleic acid molecule complementary to a nucleic acid molecule sequence characterized in (a), (b), (c), (d), (e), (f), (g), (h), (i) or (j);
   [58530] or a nucleic acid molecule comprising a sequence which is complementary thereto; in a non-human organism or a part thereof, preferably a microorganism, a plant cell, a plant or a part thereof, as compared to a corresponding non-transformed wild type non-human organism or a part thereof; and
[58531] (B) growing the non-human organism or a part thereof under conditions which permit the production of palmitic acid or a composition comprising palmitic acid in said non-human organism or in the culture medium surrounding said non-human organism.

[58532] Item 3. A process of items 1 or 2, comprising of recovering palmitic acid in its free or bound form.

[58533] Item 4. The process of any one of items 1 to 3, comprising the following steps:
[58534] (a) selecting a non-human organism or a part thereof expressing a polypeptide encoded by the nucleic acid molecule characterized in item 2;
[58535] (b) mutagenizing the selected non-human organism or the part thereof;
[58536] (c) comparing the activity or the expression level of said polypeptide in the mutagenized non-human organism or the part thereof with the activity or the expression of said polypeptide of the selected non-human organisms or the part thereof;
[58537] (d) selecting the mutated non-human organisms or parts thereof, which comprise an increased activity or expression level of said polypeptide compared to the selected non-human organism or the part thereof;
[58538] (e) optionally, growing and cultivating the non-human organisms or the parts thereof;
[58539] and
[58540] (f) recovering, and optionally isolating, the free or bound palmitic acid produced by the selected mutated non-human organisms or parts thereof.

[58541] Item 5. The process of any one of items 1 to 4 wherein the activity of said protein or the expression of said nucleic acid molecule is increased or generated transiently or stably.

[58542] Item 6. An isolated nucleic acid molecule comprising a nucleic acid molecule selected from the group consisting of:
[58543] (a) a nucleic acid molecule encoding a polypeptide shown in Table II, application no. 11, column 5 or 8, preferably shown in Table II B, application no. 11, column 8, or a homolog or a fragment thereof;
[58544] (b) a nucleic acid molecule shown in Table I, application no. 11, column 5 or 8, preferably shown in Table I B, application no. 11, column 8, preferably the coding region thereof, or a homolog or a fragment thereof;
[58545] (c) a nucleic acid molecule, which, as a result of the degeneracy of the genetic code, can be derived from a polypeptide sequence depicted in column 5 or 8 of Table II, application no. 11, preferably in column 8 of Table II B, application no. application no.,
[58546] (d) a nucleic acid molecule having at least 30% identity, preferably at least 40%, 50%, 60%, 70%, 75%, 80%, 85%, 90%, 95%, 96%, 97%, 98%, 99%, 99.5%, with the nucleic acid molecule sequence of a polynucleotide comprising the nucleic acid molecule shown in column 5 or 8 of Table I, application no. 3, preferably shown in column 8 of Table I B, application no. 11, preferably the coding region thereof;
[58547] (e) a nucleic acid molecule encoding a polypeptide having at least 30% identity, preferably at least 40%, 50% 60%, 70%, 75%, 80%, 85%, 90%, 95%, 96%, 97%, 98%, 99%, 99.5%, identity with the amino acid sequence of the polypeptide encoded by the nucleic acid molecule of (a), (b), (c) or (d);
[58548] (f) a nucleic acid molecule which hybridizes with a nucleic acid molecule of (a), (b), (c), (d) or (e) under stringent hybridisation conditions;
[58549] (g) a nucleic acid molecule encoding a polypeptide which can be isolated with the aid of monoclonal or polyclonal antibodies made against a polypeptide encoded by one of the nucleic acid molecules of (a), (b), (c), (d), (e) or (f);
[58550] (h) a nucleic acid molecule encoding a polypeptide comprising the consensus sequence or one or more polypeptide motifs as shown in column 8 of Table IV, application no. 11;
[58551] (i) a nucleic acid molecule encoding a polypeptide having the activity represented by a respective protein as depicted in column 5 of Table II, application no. 11;
[58552] (j) a nucleic acid molecule comprising a polynucleotide which is obtained by amplifying a cDNA library or a genomic library using the primers in Table III, application no. 11, column 8;
[58553] and
[58554] (k) nucleic acid molecule which is obtainable by screening a suitable nucleic acid library, especially a cDNA library and/or a genomic library, under stringent hybridization conditions with a probe comprising one of the sequences of the nucleic acid molecule of (a), (b), (c), (d), (e), (f), (g), (h), (i) or (j) or with a fragment of at least 15 nt, preferably 20 nt, 30 nt, 50 nt, 100 nt, 200 nt,500 nt, 1000 nt, 1500 nt, 2000 nt or 3000 nt of the nucleic acid molecule characterized in (a), (b), (c), (d), (e), (f), (g), (h), (i) or (j);
[58555] or a nucleic acid molecule comprising a sequence which is complementary thereto.

[58556] Item 7. A nucleic acid construct which confers the expression of the nucleic acid molecule as defined in item 6, comprising one or more regulatory elements.

[58557] Item 8. An expression cassette comprising
[58558] (a) a promoter, preferably selected from the group consisting of Big35S, PCUbi, Super and USP;
[58559] (b) a nucleic acid molecule as defined in item 6.

[58560] Item 9. A vector comprising the nucleic acid molecule as defined in item 6 or the nucleic acid construct as claimed in item 7 or the expression cassette as claimed in item 8.

[58561] Item 10. A host cell or a plant organelle, which has been transformed with the vector as claimed in item 9 or the nucleic acid molecule as defined in item 6 or the nucleic acid construct as claimed in item 7 or the expression cassette as claimed in item 8.

[58562] Item 11. The host cell of item 10, which is a plant cell or a microorganism.

[58563] Item 12. A process for producing a polypeptide, wherein the polypeptide is expressed in a host cell as claimed in item 10 or 11.

[58564] Item 13. A polypeptide produced by the process as claimed in item 12 or encoded by the nucleic acid molecule as defined in item 6.

[58565] Item 14. An antibody, which binds specifically to the polypeptide as claimed in item 13.

[58566] Item 15. A plant tissue, propagation material, harvested material or a plant or a part thereof comprising the host cell as claimed in item 10 or 11.

[58567] Item 16. A process for the identification of a compound conferring an increase in palmitic acid production in a non-human organism, comprising the steps:
[58568] (a) culturing a plant cell or tissue or microorganism or maintaining a plant expressing the polypeptide encoded by the nucleic acid molecule as defined in item 6 conferring an increase in the amount of palmitic acid in a non-human organism or a part thereof and a readout system capable of interacting with the polypeptide under suitable conditions which permit the interaction of the polypeptide with said readout system in the presence of a compound or a sample comprising a plurality of compounds and capable of providing a detectable signal in response to the binding of a compound to said polypeptide under conditions which permit the expression of said readout system and of the polypeptide encoded by the nucleic acid molecule of item 6 conferring an increase in the amount of palmitic acidin a non-human organism or a part thereof;
[58569] (b) identifying if the compound is an effective agonist by detecting the presence or absence or increase of a signal produced by said readout system.

[58570] Item 17. A method for the production of an agricultural composition comprising the steps of the method of item 16 and formulating the compound identified in item 16 in a form acceptable for an application in agriculture.

[58571] Item 18. A composition comprising the nucleic acid molecule as defined in item 6, the polypeptide as claimed in item 13, the nucleic acid construct as claimed in item 7, the expression cassette as claimed in item 8, the vector as claimed in item 9, the compound as claimed in item 16, the antibody as claimed in item 14, and optionally an agricultural acceptable carrier.

[58572] Item 19. Use of the nucleic acid molecule as defined in item 6 for the identification of a nucleic acid molecule conferring an increase in palmitic acid after expression.

[58573] Item 20. Cosmetic, pharmaceutical, food or feed composition comprising the nucleic acid molecule as defined in item 6, the polypeptide as claimed in item 13, the nucleic acid construct as claimed in item 7, the expression cassette as claimed in item 8, the vector as claimed in item 9, the antibody as claimed in item 14, the plant or a part thereof, or plant tissue as claimed in item 15, the harvested material or propagation material as claimed in item 15 or the host cell as claimed in items 10 or 11.

[58574] Item 21. Use of the nuclei acid molecule as defined in item 6, the polypeptide as claimed in item 13, the nucleic acid construct as claimed in item 7, the expression cassette as claimed in item 8, the vector as claimed in claim 9, the plant or plant tissue as claimed in item 15, or the host cell as claimed in item 10 to 11 for the production of plant resistant to a herbicide inhibiting the production of palmitic acid.

[58575] [0483.1.8.11] to [0494.1.8.11] for the disclosure of this paragraph see [0483.1.8.8] to [0494.1.8.8] above.

### Example 11a

### PCR Amplification of the Sequences

[58576] Unless otherwise specified, standard methods as described in Sambrook et al., Molecular Cloning: A laboratory manual, Cold Spring Harbor 1989, Cold Spring Harbor Laboratory Press are used.

[58577] The inventive sequences as shown in the respective line in Table I, column 5, preferably the coding region thereof, were amplified by PCR as described in the protocol of the Pfu Ultra, Pfu Turbo or Herculase DNA polymerase (Stratagene). The composition for the protocol of the Pfu Ultra, Pfu Turbo or Herculase DNA polymerase was as follows: 1× PCR buffer (Stratagene), 0.2 mM of each dNTP, 100 ng genomic DNA of Saccharomyces cerevisiae (strain S288C; Research Genetics, Inc., now Invitrogen), Escherichia coli (strain MG1655; E. coli Genetic Stock Center), Synechocystis sp. (strain PCC6803), Azotobacter vinelandii (strain N.R. Smith,16), Thermus thermophilus (HB8) or 50 ng cDNA from various tissues and development stages of Arabidopsis thaliana (ecotype Columbia), Physcomitrella patens, Glycine max (variety Resnick), Brassica napus, Oryza sativa or Zea mays (variety B73, Mo17, A188), 50 pmol forward primer, 50 pmol reverse primer, with or without 1 M Betaine, 2.5 u Pfu Ultra, Pfu Turbo or Herculase DNA polymerase.

[58578] The amplification cycles were as follows:

[58579] 1 cycle of 2-3 minutes at 94-95° C., then 25-36 cycles with 30-60 seconds at 94-95° C., 30-45 seconds at 50-60° C. and 210-480 seconds at 72° C., followed by 1 cycle of 5-10 minutes at 72° C., then 4-16° C.—preferably for Saccharomyces cerevisiae, Escherichia coli, Synechocystis sp., Azotobacter vinelandii, Thermus thermophilus.

[58580] In case of Arabidopsis thaliana, Brassica napus, Glycine max, Oryza sativa, Physcomitrella patens, Zea mays the amplification cycles were as follows:

[58581] 1 cycle with 30 seconds at 94° C., 30 seconds at 61° C., 15 minutes at 72° C., then 2 cycles with 30 seconds at 94° C., 30 seconds at 60° C., 15 minutes at 72° C., then 3 cycles with 30 seconds at 94° C., 30 seconds at 59° C., 15 minutes at 72° C., then 4 cycles with 30 seconds at 94° C., 30 seconds at 58° C., 15 minutes at 72° C., then 25 cycles with 30 seconds at 94° C., 30 seconds at 57° C., 15 minutes at 72° C., then 1 cycle with 10 minutes at 72° C., then finally 4-16° C. RNAs were generated with the RNeasy Plant Kit according to the standard protocol (Qiagen) and Superscript II Reverse Transkriptase was used to produce double stranded cDNA according to the standard protocol (Invitrogen).

[58582] ORF specific primer pairs for the genes to be expressed are shown in the respective line in Table III, column 8. The following adapter sequences were added to Saccharomyces cerevisiae ORF specific primers (see Table III) for cloning purposes:

SEQ ID NO: 20

| | | |
|---|---|---|
| i) | foward primer: | 5′-GGAATTCCAGCTGACCACC-3′ |

SEQ ID NO: 21

| | | |
|---|---|---|
| ii) | reverse primer: | 5′-GATCCCCGGGAATTGCCATG-3′ |

[58583] These adaptor sequences allow cloning of the ORF into the various vectors containing the Resgen adaptors, see table column E of Table c.

[58584] The following adapter sequences were added to Saccharomyces cerevisiae, Escherichia coli, Synechocystis sp., Azotobacter vinelandii, Thermus thermophilus, Arabidopsis thaliana, Brassica napus, Glycine max, Oryza sativa, Physcomitrella patens, or Zea mays ORF specific primers for cloning purposes:

| SEQ ID NO: 22 | | |
|---|---|---|
| iii) | forward primer: | 5′-TTGCTCTTCC-3′ |
| SEQ ID NO: 23 | | |
| iiii) | reverse primer: | 5′-TTGCTCTTCG-3′ |

[58585] The adaptor sequences allow cloning of the ORF into the various vectors containing the Colic adaptors, see table column E of Table c.

[58586] Therefore for amplification and cloning of Saccharomyces cerevisiae SEQ ID NO: 66772, a primer consisting of the adaptor sequence i) and the ORF specific sequence SEQ ID NO: 67180 and a second primer consisting of the adaptor sequence ii) and the ORF specific sequence SEQ ID NO: 67181 were used.

[58587] For amplification and cloning of Escherichia coli SEQ ID NO: 8920, a primer consisting of the adaptor sequence iii) and the ORF specific sequence SEQ ID NO: 8930 and a second primer consisting of the adaptor sequence iiii) and the ORF specific sequence SEQ ID NO: 8931 were used.

[58588] For amplification and cloning of Synechocystis sp. SEQ ID NO: 11423, a primer consisting of the adaptor sequence iii) and the ORF specific sequence SEQ ID NO: 11465 and a second primer consisting of the adaptor sequence iiii) and the ORF specific sequence SEQ ID NO: 11466 were used.

[58589] For amplification and cloning of Arabidopsis thaliana SEQ ID NO: 1061, a primer consisting of the adaptor sequence iii) and the ORF specific sequence SEQ ID NO: 1293 and a second primer consisting of the adaptor sequence iiii) and the ORF specific sequence SEQ ID NO: 1294 were used.

[58590] For amplification and cloning of Azotobacter vinelandii SEQ ID NO: 6674, a primer consisting of the adaptor sequence iii) and the ORF specific sequence SEQ ID NO: 6806 and a second primer consisting of the adaptor sequence iiii) and the ORF specific sequence SEQ ID NO: 6807 were used.

[58591] For amplification and cloning of Glycine max SEQ ID NO: 69, a primer consisting of the adaptor sequence iii) and the ORF specific sequence SEQ ID NO: 343 and a second primer consisting of the adaptor sequence iiii) and the ORF specific sequence SEQ ID NO: 344 were used.

[58592] For amplification and cloning of Thermus thermophilus SEQ ID NO: 12974, a primer consisting of the adaptor sequence iii) and the ORF specific sequence SEQ ID NO: 13372 and a second primer consisting of the adaptor sequence iiii) and the ORF specific sequence SEQ ID NO: 13373 were used.

[58593] Following these examples every sequence disclosed in Table I, preferably column 5, especially the coding region thereof can be cloned by fusing the adaptor sequences to the respective specific primers sequences as disclosed in Table III, column 8 using the respective vectors shown in Table c.

[58594] [0496.1.8.11] to [0499.1.8.11] for the disclosure of these paragraphs see [0496.1.8.8] to [0499.1.8.8] above.

### Example 11e

### Cloning of Inventive Sequences as Shown in Table I, Column 5 in the Different Expression Vectors

[58595] For cloning of for example SEQ ID NO: 8920 from Escherichia coli or any other ORF from Escherichia coli, Synechocystis sp., Azotobacter vinelandii, Thermus thermophilus, Arabidopsis thaliana, or Glycine max the vector DNA was treated with the restriction enzymes Pacl and Ncol following the standard protocol (MBI Fermentas).

[58596] For cloning for example the ORFs of SEQ ID NO: 66772 from Saccharomyces cerevisiae or any other ORF from Saccharomyces cerevisiae into vectors containing the Resgen adaptor sequence the respective vector DNA was treated with the restriction enzyme Ncol.

[58597] For cloning of for example ORFs SEQ ID NO: 119408 from Saccharomyces cerevisiae or any other ORF from Saccharomyces cerevisiae into vectors containing the Colic adaptor sequence, the respective vector DNA was treated with the restriction enzymes Pacl and Ncol following the standard protocol (MBI Fermentas).

[58598] In all cases the reaction was stopped by inactivation at 70° C. for 20 minutes and purified over QlAquick or NucleoSpin Extract II columns following the standard protocol (Qiagen or Macherey-Nagel).

[58599] Then the PCR-product representing the amplified ORF with the respective adapter sequences and the vector DNA were treated with T4 DNA polymerase according to the standard protocol (MBI Fermentas) to produce single stranded overhangs with the parameters 1 unit T4 DNA polymerase at 37° C. for 2-10 minutes for the vector and 1-2 u T4 DNA polymerase at 15-17° C. for 10-60 minutes for the PCR product representing SEQ ID NO: 8920.

[58600] The reaction was stopped by addition of high-salt buffer and purified over QlAquick or NucleoSpin Extract II columns following the standard protocol (Qiagen or Macherey-Nagel).

[58601] According to this example the skilled person is able to clone all sequences disclosed in Table I, preferably column 5 or column 8, especially the coding region thereof.

[58602] Approximately 30-60 ng of prepared vector and a defined amount of prepared amplificate were mixed and hybridized at 65° C. for 15 minutes followed by 37° C. 0.1 ° C/1 seconds, followed by 37° C. 10 minutes, followed by 0.1 ° C/1 seconds, then 4-10 ° C.

[58603] The ligated constructs were transformed in the same reaction vessel by addition of competent E. coli cells (strain DHSalpha) and incubation for 20 minutes at 1 ° C. followed by a heat shock for 90 seconds at 42° C. and cooling to 1-4° C. Then, complete medium (SOC) was added and the mixture was incubated for 45 minutes at 37° C. The entire mixture was subsequently plated onto an agar plate with 0.05 mg/ml kanamycin and incubated overnight at 37° C.

[58604] The outcome of the cloning step was verified by amplification with the aid of primers which bind upstream and downstream of the integration site, thus allowing the amplification of the insertion. The amplifications were carried out as described in the protocol of Taq DNA polymerase (Gibco-BRL).

[58605] The amplification cycles were as follows:

[58606] 1 cycle of 1-5 minutes at 94° C., followed by 35 cycles of in each case 15-60 seconds at 94° C., 15-60 seconds at 50-66° C. and 5-15 minutes at 72° C., followed by 1 cycle of 10 minutes at 72° C., then 4-16° C.

[58607] Several colonies were checked, but only one colony for which a PCR product of the expected size was detected was used in the following steps. A portion of this positive colony was transferred into a reaction vessel filled with complete medium (LB) supplemented with kanamycin and incubated overnight at 37° C.

[58608] The plasmid preparation was carried out as specified in the Qiaprep or NucleoSpin Multi-96 Plus standard protocol (Qiagen or Macherey-Nagel).

[58609] [0501.1.8.11] to [0503.1.8.11] for the disclosure of these paragraphs see [0501.1.8.8] to [0503.1.8.8] above.

[58610] Table d showing results of plant analyses

TABLE d

| SeqID | Target | Locus | Metabolite | Source | Promotor | Method | Min | Max |
|---|---|---|---|---|---|---|---|---|
| 17451 | non- | At1g07430 | palmitic | ARA_LEAF | p-PcUBI | GC | 16 | 36 |
| | targeted | | acid | | | | | |
| 113651 | non- | At1g19670 | palmitic | ARA_LEAF | p-PcUBI | GC | 15 | 27 |
| | targeted | | acid | | | | | |
| 17637 | non- | At1g19800 | palmitic | ARA_LEAF | p-PcUBI | GC | 18 | 29 |
| | targeted | | acid | | | | | |
| 102086 | non- | At1g23110 | palmitic | ARA_LEAF | p-PcUBI | GC | 24 | 58 |
| | targeted | | acid | | | | | |
| 1061 | non- | At1g68320 | palmitic | ARA_LEAF | p-PcUBI | GC | 16 | 84 |
| | targeted | | acid | | | | | |
| 19419 | non- | At1g72770 | palmitic | ARA_LEAF | p-PcUBI | GC | 16 | 54 |
| | targeted | | acid | | | | | |
| 1623 | non- | At2g45420 | palmitic | ARA_LEAF | p-PcUBI | GC | 18 | 48 |
| | targeted | | acid | | | | | |
| 68657 | non- | At3g02990 | palmitic | ARA_LEAF | p-PcUBI | GC | 15 | 33 |
| | targeted | | acid | | | | | |
| 22921 | non- | At3g20910 | palmitic | ARA_LEAF | p-PcUBI | GC | 19 | 41 |
| | targeted | | acid | | | | | |
| 2935 | non- | At3g62950 | palmitic | ARA_LEAF | p-PcUBI | GC | 19 | 40 |
| | targeted | | acid | | | | | |
| 3279 | non- | At4g15670 | palmitic | ARA_LEAF | p-PcUBI | GC | 16 | 75 |
| | targeted | | acid | | | | | |
| 24232 | non- | At4g18880 | palmitic | ARA_LEAF | p-PcUBI | GC | 19 | 23 |
| | targeted | | acid | | | | | |
| 68849 | non- | At4g26080 | palmitic | ARA_LEAF | p-PcUBI | GC | 16 | 18 |
| | targeted | | acid | | | | | |
| 4102 | non- | At4g33040 | palmitic | ARA_LEAF | p-PcUBI | GC | 19 | 36 |
| | targeted | | acid | | | | | |
| 4348 | non- | At4g35310 | palmitic | ARA_LEAF | p-PcUBI | GC | 16 | 40 |
| | targeted | | acid | | | | | |
| 5318 | non- | At5g57050 | palmitic | ARA_LEAF | p-PcUBI | GC | 17 | 43 |
| | targeted | | acid | | | | | |
| 25498 | non- | At5g59220 | palmitic | ARA_LEAF | p-PcUBI | GC | 19 | 400 |
| | targeted | | acid | | | | | |
| 114083 | non- | AvinDRAFT_1788 | palmitic | ARA_LEAF | p-PcUBI | GC | 17 | 33 |
| | targeted | | acid | | | | | |
| 111155 | non- | AvinDRAFT_3577 | palmitic | ARA_LEAF | p-PcUBI | GC | 18 | 49 |
| | targeted | | acid | | | | | |
| 114231 | non- | AvinDRAFT_3629 | palmitic | ARA_LEAF | p-PcUBI | GC | 16 | 51 |
| | targeted | | acid | | | | | |
| 73719 | non- | AvinDRAFT_4606 | palmitic | ARA_LEAF | p-PcUBI | GC | 18 | 57 |
| | targeted | | acid | | | | | |
| 32648 | non- | AvinDRAFT_5467 | palmitic | ARA_LEAF | p-PcUBI | GC | 17 | 61 |
| | targeted | | acid | | | | | |
| 6674 | non- | AvinDRAFT_6075 | palmitic | ARA_LEAF | p-PcUBI | GC | 18 | 31 |
| | targeted | | acid | | | | | |
| 34044 | non- | AvinDRAFT_6700 | palmitic | ARA_LEAF | p-PcUBI | GC | 21 | 29 |
| | targeted | | acid | | | | | |
| 103958 | non- | B0050 | palmitic | ARA_LEAF | p-Super | GC | 16 | 27 |
| | targeted | | acid | | | | | |
| 37400 | non- | B1186 | palmitic | ARA_LEAF | p-Super | GC | 20 | 47 |
| | targeted | | acid | | | | | |
| 112111 | non- | B1234 | palmitic | ARA_LEAF | p-Super | GC | 16 | 22 |
| | targeted | | acid | | | | | |
| 119135 | non- | B1248 | palmitic | ARA_LEAF | p-Super | GC | 15 | 22 |
| | targeted | | acid | | | | | |
| 38226 | non- | B1330 | palmitic | ARA_LEAF | p-Super | GC | 25 | 36 |
| | targeted | | acid | | | | | |
| 38266 | plastidic | B1431 | palmitic | ARA_LEAF | p-Super | GC | 16 | 25 |
| | | | acid | | | | | |
| 78154 | non- | B1589 | palmitic | ARA_LEAF | p-Super | GC | 16 | 25 |
| | targeted | | acid | | | | | |
| 38300 | non- | B1597 | palmitic | ARA_LEAF | p-Super | GC | 20 | 44 |
| | targeted | | acid | | | | | |
| 78753 | non- | B1670 | palmitic | ARA_LEAF | p-Super | GC | 16 | 37 |
| | targeted | | acid | | | | | |
| 78953 | non- | B1837 | palmitic | ARA_LEAF | p-Super | GC | 16 | 39 |
| | targeted | | acid | | | | | |
| 8920 | non- | B2032 | palmitic | ARA_LEAF | p-Super | GC | 22 | 83 |
| | targeted | | acid | | | | | |
| 112193 | non- | B2043 | palmitic | ARA_LEAF | p-Super | GC | 16 | 54 |
| | targeted | | acid | | | | | |
| 115595 | non- | B2099 | palmitic | ARA_LEAF | p-Super | GC | 18 | 27 |
| | targeted | | acid | | | | | |
| 39002 | non- | B2107 | palmitic | ARA_LEAF | p-Super | GC | 15 | 37 |
| | targeted | | acid | | | | | |
| 39237 | non- | B2399 | palmitic | ARA_LEAF | p-Super | GC | 19 | 45 |
| | targeted | | acid | | | | | |
| 115628 | non- | B2439 | palmitic | ARA_LEAF | p-Super | GC | 16 | 34 |
| | targeted | | acid | | | | | |
| 115655 | non- | B2682 | palmitic | ARA_LEAF | p-Super | GC | 22 | 28 |
| | targeted | | acid | | | | | |
| 81075 | non- | B2747 | palmitic | ARA_LEAF | p-Super | GC | 23 | 38 |
| | targeted | | acid | | | | | |
| 115719 | non- | B2790 | palmitic | ARA_LEAF | p-Super | GC | 17 | 34 |
| | targeted | | acid | | | | | |
| 115791 | plastidic | B2836 | palmitic | ARA_LEAF | p-Super | GC | 17 | 32 |
| | | | acid | | | | | |
| 81980 | non- | B2849 | palmitic | ARA_LEAF | p-Super | GC | 20 | 56 |
| | targeted | | acid | | | | | |
| 44196 | non- | B3814 | palmitic | ARA_LEAF | p-Super | GC | 19 | 41 |
| | targeted | | acid | | | | | |
| 10726 | non- | B3823 | palmitic | ARA_LEAF | p-Super | GC | 21 | 35 |
| | targeted | | acid | | | | | |
| 100675 | plastidic | B3845 | palmitic | ARA_SEED_2 | p-USP | GC | 15 | 31 |
| | | | acid | | | | | |
| 10811 | non- | GM02LC12622 | palmitic | ARA_LEAF | p-PcUBI | GC | 19 | 45 |
| | targeted | | acid | | | | | |
| 46751 | non- | GM02LC19289 | palmitic | ARA_LEAF | p-PcUBI | GC | 17 | 80 |
| | targeted | | acid | | | | | |
| 106920 | mitochondrial | Sll0368 | palmitic | ARA_LEAF | p-PcUBI | GC | 20 | 28 |
| | | | acid | | | | | |
| 94741 | plastidic | Sll0374 | palmitic | ARA_LEAF | p-PcUBI | GC | 20 | 23 |
| | | | acid | | | | | |
| 52634 | mitochondrial | Sll1031 | palmitic | ARA_LEAF | p-PcUBI | GC | 18 | 38 |
| | | | acid | | | | | |
| 85723 | mitochondrial | Sll1032 | palmitic | ARA_LEAF | p-PcUBI | GC | 16 | 27 |
| | | | acid | | | | | |
| 52660 | plastidic | Sll1056 | palmitic | ARA_LEAF | p-PcUBI | GC | 21 | 38 |
| | | | acid | | | | | |
| 54337 | mitochondrial | Sll1450 | palmitic | ARA_LEAF | p-PcUBI | GC | 19 | 29 |
| | | | acid | | | | | |
| 95047 | non- | Sll1498 | palmitic | ARA_LEAF | p-PcUBI | GC | 18 | 24 |
| | targeted | | acid | | | | | |
| 11423 | mitochondrial | Sll1545 | palmitic | ARA_LEAF | p-PcUBI | GC | 15 | 27 |
| | | | acid | | | | | |
| 85743 | mitochondrial | Sll1598 | palmitic | ARA_LEAF | p-PcUBI | GC | 17 | 28 |
| | | | acid | | | | | |
| 86447 | plastidic | Sll1848 | palmitic | ARA_LEAF | p-PcUBI | GC | 18 | 115 |
| | | | acid | | | | | |
| 11471 | mitochondrial | Sll1917 | palmitic | ARA_LEAF | p-PcUBI | GC | 16 | 23 |
| | | | acid | | | | | |
| 55385 | mitochondrial | Sll1920 | palmitic | ARA_LEAF | p-PcUBI | GC | 18 | 34 |
| | | | acid | | | | | |
| 119222 | mitochondrial | Slr0949 | palmitic | ARA_LEAF | p-PcUBI | GC | 18 | 25 |
| | | | acid | | | | | |
| 116341 | mitochondrial | Slr1099 | palmitic | ARA_LEAF | p-PcUBI | GC | 23 | 39 |
| | | | acid | | | | | |
| 116460 | mitochondrial | Slr1250 | palmitic | ARA_LEAF | p-PcUBI | GC | 19 | 33 |
| | | | acid | | | | | |
| 58324 | non- | Slr1312 | palmitic | ARA_LEAF | p-PcUBI | GC | 21 | 34 |
| | targeted | | acid | | | | | |
| 12140 | mitochondrial | Slr1791 | palmitic | ARA_LEAF | p-PcUBI | GC | 16 | 17 |
| | | | acid | | | | | |
| 12341 | mitochondrial | Slr2072 | palmitic | ARA_LEAF | p-PcUBI | GC | 19 | 42 |
| | | | acid | | | | | |
| 61553 | non- | TTC0917 | palmitic | ARA_LEAF | p-PcUBI | GC | 16 | 112 |
| | targeted | | acid | | | | | |
| 12974 | non- | TTC1550 | palmitic | ARA_LEAF | p-PcUBI | GC | 19 | 35 |
| | targeted | | acid | | | | | |
| 119347 | plastidic | Ybr092c | palmitic | ARA_LEAF | p-Super | GC | 16 | 31 |
| | | | acid | | | | | |
| 119408 | non- | Ydl022w | palmitic | ARA_SEED_2 | p-PcUBI | GC | 13 | 39 |
| | targeted | | acid | | | | | |
| 122518 | non- | Ydl101c | palmitic | ARA_LEAF | Big35S | GC | 20 | 36 |
| | targeted | | acid | | | | | |
| 14706 | plastidic | Ydr131c | palmitic | ARA_LEAF | p-Super | GC | 19 | 37 |
| | | | acid | | | | | |
| 64964 | plastidic | Yjl073w | palmitic | ARA_LEAF | p-Super | GC | 18 | 39 |
| | | | acid | | | | | |
| 66772 | non- | Ylr304c | palmitic | ARA_LEAF | Big35S | GC | 16 | 38 |
| | targeted | | acid | | | | | |
| 91958 | plastidic | Ymr013c | palmitic | ARA_LEAF | p-Super | GC | 16 | 26 |
| | | | acid | | | | | |
| 118212 | plastidic | Ypl271w | palmitic | ARA_LEAF | p-Super | GC | 19 | 33 |
| | | | acid | | | | | |
| 69 | non- | 49747384_SOYBEAN | palmitic | ARA_LEAF | p-PcUBI | GC | 15 | 29 |
| | targeted | | acid | | | | | |
| 16883 | plastidic | 59582753_SOYBEAN | palmitic | ARA_LEAF | p-PcUBI | GC | 16 | 42 |
| | | | acid | | | | | |

[58611] Column 1 shows the SEQ ID NO, Column 2 shows the expression type (targeted or non-targeted), Column 3 shows the “gene name” (locus), Column 4 shows the metabolite analyzed, Column 5 indicates the A. thaliana source tissue analyzed, Column 6 indicates the used promoter for expression, Column 7 indicates the analytical method. Columns 8 and 9 show the minimum and the maximum increase of the analyzed metabolite (in percent) in comparison to the wild type (=ratio_by_weight, given as percent increase).

[58612] When the analyses were repeated independently, all results proved to be significant.

[58613] [0505.1.8.11] to [0515.1.8.11] for the disclosure of these paragraphs see [0505.1.8.8] to [0515.1.8.8] above.

[58614] In a further embodiment, the present invention relates in paragraphs [0000.1.8.12] to [0514.1.8.12] to a further process for the production of the fine chemical selected from the group comprising 2-hydroxybehenic acid, 2-hydroxypalmitic acid, 2-hydroxytetracosenoic acid (preferably 2-hydroxynervonic acid), behenic acid, cerebronic acid, eicosanoic acid, heptadecanoic acid, hexadecadienoic acid, hexadecatrienoic acid, lauric acid, myristic acid, nervonic acid and oleic acid, as defined below and corresponding embodiments as described herein as follows.

[58615] for the disclosure of this paragraph see [0001.1.8.8] above.

[58616] Oils and fats, which chemically are glycerol esters of fatty acids (triacylglycerols (TAGs)), play a major role in nutrition but more and more in nonfood applications such as lubricants, hydraulic oil, biofuel, or oleochemicals for coatings, plasticizer, soaps, and detergents (W. Lohs and W. Friedt, in “Designer Oil Crops”, Ed. D. J. Murphy, (VCH, Weinheirn, Germany, 1993)). The ideal oil for industrial application would consist of a particular type of fatty acid that could be supplied constantly at a competitively low price as compared with raw materials based on mineral oil products. Furthermore, such a fatty acid may have a reactive group in addition to the carboxyl function to provide an additional target for chemical modifications (Töpfer et al., Science 268, 681, (1995)).

[58617] The various fatty acids and triglycerides are mainly obtained from microorganisms such as fungi, from animals such as fish or from oil-producing plants including phytoplankton and algae, such as soybean, oilseed rape, sunflower and others, where they are usually obtained in the form of their triacylglycerides.

[58618] Further sources of fatty acids are membrane lipids of organisms. Preferably lipids are phopholipids and/or glycolipids, more preferably glycerophospholipids, galactolipids and/or sphingolipids.

[58619] The saturated fatty acid with 12 carbon atoms lauric acid is the main fatty acid in coconut oil and in palm kernel oil and is believed to have antimiicrobial properties, It is also found in human, cow's and goat's milk.

[58620] Myristic acid is a saturated fatty acid with forteen carbon atoms and is found in form of its triglyceride in Mysterica fragans, but also in palm kernel oil, cocunut oil and it is a minor component in may animal fats. It is also found in the spermacetin of the sperm whale. The isopropylester of myristic acid is used in cosmetics and topical medical preparations where good absorption through the skin is desired.

[58621] Heptadecanoic (17:0) is occuring in nature only in minor amounts. This fatty acid with an odd number of carbon atoms is present in trace amounts in plants, in triglycerides from brazil-nut oil, Dracocephalum moldavica oil, poppy-seed, palm, almond, sunflower or soybean. It can be isolated from tallow (1%), specially from subcutaneous adipose tissue in subcutaneous fat from lambs.

[58622] Heptadecanoic acid can be ingredient of satiety agents or fungicide composition. It is further used as ingredient in cosmetics, pharmaceuticals and in feed and food, like baking adjuvants as disclosed in US 2003/143312 or according to US 2004/097392 as component in surfactant systems.

[58623] Heptadecanoic acid is mainly used as an internal standard in quantification of fatty acids. It can be further useful in treatment of neurological diseases which may be caused by yeast, fungi or prions based on yeast or fungal etiology (U.S. Pat. No. 6,652,866) or in antikeratolytic-wound healing compositions (U.S. Pat. No. 5,641,814).Heptadecanoic acid was produced up to now in higher amount primarily by organic synthesis.

[58624] Very long chain fatty acids (VLCFAs) such as eicosanoic acid (20:0) and behenic acid (C22:0) are produced by plants. Hereby a membrane-bound fatty acid elongation complex (elongase, FAE) using acyl-CoA substrates is used. The first reaction of elongation involves condensation of malonyl-CoA with a long chain substrate producing a β3-ketoacyl-CoA. Subsequent reactions are reduction of β3-hydroxyacyl-CoA, dehydration to an enoyl-CoA, followed by a second reduction to form the elongated acyl-CoA. The β3-ketoacyl-CoA synthase (KCS) catalyzing the condensation reaction plays a key role in determining the chain length of fatty acid products found in seed oils and is the rate-limiting enzyme for seed VLCFA production (Lassner et al., Plant Cell, 8, 281 (1996)).

[58625] Although such very long chain fatty acids are minor components of the lipid membranes of the body, they undoubtedly perform valuable functions, apparently helping to stabilize membranes, especially those in peripheral nerve cells.

[58626] Eicosanoic acid occurs in appreciable quantities in peanut oil and Behenic acid is a component of rapeseed oil (up to 2%) as well as peanut oil (1-5%). It seems that these two acids are beneath other very-long-chain fatty acid sessential components for the vitality of heigher plants.

[58627] Eicosanoid acid is used as a lubricant and as an emulsifier in industrial applications. Behenic acid is used to give hair conditioners and moisturizers their smoothin properties.

[58628] Due to the interesting physiological roles and the nutritional, cosmetic and agrotechnical potential of these acids there is a need to identify genes encoding enzymes and proteins being involved in th ebiosynthesis of such acids.

[58629] 2-Hydroxy fatty acids are synthesised in animal and plant tissues, and are often major constituents of the sphingolipids. Sphingolipids with 2-hydroxy fatty acid are found in most organisms including plants, yeast, worms, vertebrate animals, and some bacterial species.

[58630] In plants more than 95% of the fatty acid component of the ceramides and sphingolipids is alpha-hydroxylated. The acyl groups of ceramides tend to consist of long-chain (C16 up to C26 but occasionally longer) odd- and even-numbered saturated or monoenoic fatty acids and related 2-D-hydroxy fatty acids, both in plant and animal tissues.

[58631] Typical plant sphingolipids are made up by the long-chain sphingosine backbone which is glycosylated and amide-linked to an usually hydroxylated very-long-chain fatty acid, called cerebroside. Cerebrosides are essential constituents of the plasma membrane involved in various physiological functions including signaling, exocytosis, anchoring of proteins, and vesicular protein transport (Matthes et al., Z. Naturforsch. 57C, 843 (2002)).

[58632] In mammals, 2-hydroxysphingolipids are present abundantly in brain because the major myelin lipids galactosylceramides and sulfatides contain 2-hydroxy fatty acids. In mammals, 2-hydroxy fatty acid-containing sphingolipids are uniquely abundant in nervous and epidermal tissues. In mammalian central and peripheral nervous systems, galactosylceramides and sulfatides (3-sulfate ester of galactosylceramide) are major lipid components of myelin. These glycosphingolipids contain a high proportion (about 50%) of 2-hydroxy fatty acid and are critical components of myelin.

[58633] In the yeast Saccharomyces cerevisiae most sphingolipids contain 2-hydroxy fatty acid. COS7 cells expressing human FA2H contained 3-20-fold higher levels of 2-hydroxyceramides (C16, C18, C24, and C24:1) and 2-hydroxy fatty acids compared with control cells (Alderson et al., J. Biol. Chem. 279 (47) 48562 (2004).

[58634] The 2-hydroxylation occurs during de novo ceramide synthesis and is catalyzed by fatty acid 2-hydroxylase (also known as fatty acid alpha-hydroxylase). No free hydroxy fatty acid or hydroxy fatty acid CoA has ever been reported; the hydroxylated product always appeared as a component of ceramide or cerebroside (Hoshi et al., J. Biol. Chem. 248, 4123 (1973). The alphahydroxylation involves the direct hydroxylation of a sphingolipid-bound fatty acid. (Kayal et al., J. Biol. Chem. 259 (6), 3548 (1984)).

[58635] Hydroxylated fatty acids initiate inflammation in the soft tissues and regulate the immune response.

[58636] The 2-hydroxyl group in sphingolipids has a profound effect in the lipid organization within membranes because of its hydrogenbonding capability.

[58637] Alpha-hydroxy-palmitic acid (OH 16:0) is mainly a building block of plant sphingolipids, for example soy glucosylceramide (GIcCer), which consists predominantly of a 4,8-sphingadiene backbone and alpha-hydroxy-palmitic acid. Soy GIcCer suppress tumorigenesis and gene expression in mice (Symolon et al., J. Nutr. 134(5), 1157 (2004)).

[58638] Another hydroxylated fatty acid being a building block of cerebrosides is the 2-hydroxy-nervonic acid (OH 24:1). 2-hydroxy-15-tetracosenoic acid (hydroxynervonic acid) is constituent of the ceramide part of cerebrosides (glycosphingolipides found mainly in nervous tissue and in little amount in plants). The occurrence of 2-hydroxy nervonic acid is characteristic for the leaf cerebrosides of some chilling-resistant cereals (Sperling et al., BBA 1632, 1 (2003)).

[58639] Further alpha-hydroxylated saturated long chain fatty acids are cerebronic acid and (24:0; OH) and 2-Hydroxy behenic acid (22:0).

[58640] The hydroxylated fatty acids may be used in a method for producing fats or oils according to US 2003/054509 or in lanolin-free cosmetic composition according to US 2004/166130.

[58641] Whether oils with unsaturated or with saturated fatty acids are preferred depends on the intended purpose; thus, for example, lipids with unsaturated fatty acids, specifically polyunsaturated fatty acids, are preferred in human nutrition since they have a positive effect on the cholesterol level in the blood and thus on the possibility of heart disease. They are used in a variety of dietetic foodstuffs or medicaments. In addition PUFAs are commonly used in food, feed and in the cosmetic industry. Poly unsaturated w-3- and/or w-6-fatty acids are an important part of animal feed and human food. Because of the common composition of human food polyunsaturated w-3-fatty acids, which are an essential component of fish oil, should be added to the food to increase the nutritional value of the food; thus, for example, polyunsaturated fatty acids such as DHA or EPA are added as mentioned above to infant formula to increase its nutritional value. The true essential fatty acids linoleic and linolenic fatty acid have a lot of positive effects in the human body such as a positive effect on healthy heart, arteries and skin. They bring for example relieve from eczema, diabetic neuropathy or PMS and cyclical breast pain.

[58642] Further poly unsaturated w-3- and/or w-6-fatty acids important part of animal feed and human food are delta 7, 10 hexadecadienic acid (16:2(n-6)) and delta 7,10,13 hexadecatrienic acid (16:3(n-3)). Hexadecadienic acid is a minor component of some seed and fish oils, and of plant leaves but the precursor of hexadecatrienic acid 16:3(n-3), which is a common constituent of leaf lipids. This acid is known to occur in photosynthetic leaves, such as for example Arabidopsis thaliana, rape leaves, fern lipid, ginko leaves, potato leaves, tomato leaves and spinach. It may also occur in the leaves of Brassicaceae plants, such as horse radish, cabbage, turnip, Chinese mustard, cauliflower and watercress.

[58643] In higher plants, the galactolipids contain a high proportion of polyunsaturated fatty acids, up to 95% of which can be linolenic acid (18:3(n-3)). In this instance, the most abundant molecular species of mono- and digalactosyldiacylglycerols must have 18:3 at both sn-I and sn-2 positions of the glycerol backbone. Plants such as the pea, which have 18:3 as almost the only fatty acid in the monogalactosyldiacylglycerols, have been termed “18:3 plants”. Other species, and Arabidopsis thaliana is an example, contain appreciable amounts of hexadecatrienoic acid (16:3(n-3)) in the monogalactosyldiacylglycerols, and they are termed “16:3 plants”.

[58644] As mentioned, polyunsaturated fatty acid are further used in the cosmetic industry. The application US 20030039672 discloses a cosmetic method for treating aged, sensitive, dry, flaky, wrinkled and/or photodamaged skin through topical application of a composition which comprises an unsaturated C16 fatty acid having at least three double bonds, which may be preferably hexadecatrienoic acid.

[58645] It is an object of the present invention to develop an inexpensive process for the synthesis of 2-hydroxybehenic acid, 2-hydroxypalmitic acid, 2-hydroxytetracosenoic acid, (preferably 2-hydroxynervonic acid), behenic acid, cerebronic acid, eicosanoic acid, heptadecanoic acid, hexadecadienoic acid, hexadecatrienoic acid, lauric acid, myristic acid, nervonic acid, and/or oleic acid.

[58646] for the disclosure of this paragraph see [0013.1.8.8] above.

[58647] Accordingly, in a first embodiment, the invention relates to a process for the production of at least one (preferably a) fine chemical selected from the group consisting of: 2-hydroxybehenic acid, 2-hydroxypalmitic acid, 2-hydroxytetracosenoic acid (preferably 2-hydroxynervonic acid), behenic acid, cerebronic acid, eicosanoic acid, heptadecanoic acid, hexadecadienoic acid, hexadecatrienoic acid, lauric acid, myristic acid, nervonic acid, and oleic acid, or, in other words, of the “fine chemical” or “fine chemical of the invention”.

[58648] The terms “fine chemical of the invention”, “fine chemical” or “the fine chemical” are used herein equally and relate in context of the paragraphs or sections [0014.1.12.12] to [0514.1.8.12] essentially to the metabolite or the metabolites indicated in column 7, application no. 12 of Tables I, II and IV in the respective line.

[58649] Further, the term “in context of any of the paragraphs [0014.1.12.12] to [0514.1.8.12]” as used herein means that for any of said paragraphs [0014.1.12.12] to [0514.1.8.12] the term “the fine chemical” is understood to follow the definition of paragraphs or sections [0014.1.12.12] and [0015.1.12.12], independently whether it refers to any other paragraph or not and whether the reference recites the term “fine chemical” in an other context.

[58650] Thus, in cases where one or more paragraphs or sections are incorporated by reference into any of the present paragraphs [0014.1.12.12] to [0514.1.8.12], e.g. by usage of the term “see paragraph” or the term “for the disclosure of this paragraph see the disclosure of paragraph” or the term “incorporated by reference” or a corresponding term, the incorporated paragraph, section or term “the fine chemical” is also understood to have the meaning according to the definition of paragraph [0014.1.12.12] and [0015.1.12.12].

[58651] Accordingly, in one embodiment, the term “fine chemical of the invention”, “fine chemical” or “the fine chemical” as used herein (alone or in combination, like in FCRP) means “2-hydroxybehenic acid” in context of the nucleic acid or polypeptide sequences listed in the respective same line of any one of Tables I to IV of application no. 12 and indicating in column 7 the metabolite “2-hydroxybehenic acid”.

[58652] In one embodiment, the term 2-hydroxybehenic acid or the term “fine chemical” mean in context of the paragraphs or sections [0014.1.12.12] to [0514.1.8.12] at least one chemical compound with an activity of the above mentioned 2-hydroxybehenic acid, respectively.

[58653] Accordingly, in one embodiment, the term “fine chemical of the invention”, “fine chemical” or “the fine chemical” as used herein (alone or in combination, like in FCRP) means “2-hydroxypalmitic acid” in context of the nucleic acid or polypeptide sequences listed in the respective same line of any one of Tables I to IV of application no. 12 and indicating in column 7 the metabolite “2-hydroxypalmitic acid”.

[58654] In one embodiment, the term 2-hydroxypalmitic acid or the term “fine chemical” mean in context of the paragraphs or sections [0014.1.12.12] to [0514.1.8.12] at least one chemical compound with an activity of the above mentioned 2-hydroxypalmitic acid, respectively.

[58655] Accordingly, in one embodiment, the term “fine chemical of the invention”, “fine chemical” or “the fine chemical” as used herein (alone or in combination, like in FCRP) means “2-hydroxytetracosenoic acid (preferably 2-hydroxynervonic acid)” in context of the nucleic acid or polypeptide sequences listed in the respective same line of any one of Tables I to IV of application no. 12 and indicating in column 7 the metabolite “2-hydroxytetracosenoic acid (preferably 2-hydroxynervonic acid)”.

[58656] In one embodiment, the term 2-hydroxytetracosenoic acid (preferably 2-hydroxynervonic acid) or the term “fine chemical” mean in context of the paragraphs or sections [0014.1.12.12] to [0514.1.8.12] at least one chemical compound with an activity of the above mentioned 2-hydroxytetracosenoic acid (preferably 2-hydroxynervonic acid), respectively.

[58657] Accordingly, in one embodiment, the term “fine chemical of the invention”, “fine chemical” or “the fine chemical” as used herein (alone or in combination, like in FCRP) means “behenic acid” in context of the nucleic acid or polypeptide sequences listed in the respective same line of any one of Tables I to IV of application no. 12 and indicating in column 7 the metabolite “behenic acid”.

[58658] In one embodiment, the term behenic acid or the term “fine chemical” mean in context of the paragraphs or sections [0014.1.12.12] to [0514.1.8.12] at least one chemical compound with an activity of the above mentioned behenic acid, respectively.

[58659] Accordingly, in one embodiment, the term “fine chemical of the invention”, “fine chemical” or “the fine chemical” as used herein (alone or in combination, like in FCRP) means “cerebronic acid” in context of the nucleic acid or polypeptide sequences listed in the respective same line of any one of Tables I to IV of application no. 12 and indicating in column 7 the metabolite “cerebronic acid”.

[58660] In one embodiment, the term cerebronic acid or the term “fine chemical” mean in context of the paragraphs or sections [0014.1.12.12] to [0514.1.8.12] at least one chemical compound with an activity of the above mentioned cerebronic acid, respectively.

[58661] Accordingly, in one embodiment, the term “fine chemical of the invention”, “fine chemical” or “the fine chemical” as used herein (alone or in combination, like in FCRP) means “eicosanoic acid” in context of the nucleic acid or polypeptide sequences listed in the respective same line of any one of Tables I to IV of application no. 12 and indicating in column 7 the metabolite “eicosanoic acid”.

[58662] In one embodiment, the term eicosanoic acid or the term “fine chemical” mean in context of the paragraphs or sections [0014.1.12.12] to [0514.1.8.12] at least one chemical compound with an activity of the above mentioned eicosanoic acid, respectively.

[58663] Accordingly, in one embodiment, the term “fine chemical of the invention”, “fine chemical” or “the fine chemical” as used herein (alone or in combination, like in FCRP) means “heptadecanoic acid” in context of the nucleic acid or polypeptide sequences listed in the respective same line of any one of Tables I to IV of application no. 12 and indicating in column 7 the metabolite “heptadecanoic acid”.

[58664] In one embodiment, the term heptadecanoic acid or the term “fine chemical” mean in context of the paragraphs or sections [0014.1.12.12] to [0514.1.8.12] at least one chemical compound with an activity of the above mentioned heptadecanoic acid, respectively.

[58665] Accordingly, in one embodiment, the term “fine chemical of the invention”, “fine chemical” or “the fine chemical” as used herein (alone or in combination, like in FCRP) means “hexadecadienoic acid” in context of the nucleic acid or polypeptide sequences listed in the respective same line of any one of Tables I to IV of application no. 12 and indicating in column 7 the metabolite “hexadecadienoic acid”.

[58666] In one embodiment, the term hexadecadienoic acid or the term “fine chemical” mean in context of the paragraphs or sections [0014.1.12.12] to [0514.1.8.12] at least one chemical compound with an activity of the above mentioned hexadecadienoic acid, respectively.

[58667] Accordingly, in one embodiment, the term “fine chemical of the invention”, “fine chemical” or “the fine chemical” as used herein (alone or in combination, like in FCRP) means “hexadecatrienoic acid” in context of the nucleic acid or polypeptide sequences listed in the respective same line of any one of Tables I to IV of application no. 12 and indicating in column 7 the metabolite “hexadecatrienoic acid”.

[58668] In one embodiment, the term hexadecatrienoic acid or the term “fine chemical” mean in context of the paragraphs or sections [0014.1.12.12] to [0514.1.8.12] at least one chemical compound with an activity of the above mentioned hexadecatrienoic acid, respectively.

[58669] Accordingly, in one embodiment, the term “fine chemical of the invention”, “fine chemical” or “the fine chemical” as used herein (alone or in combination, like in FCRP) means “lauric acid” in context of the nucleic acid or polypeptide sequences listed in the respective same line of any one of Tables I to IV of application no. 12 and indicating in column 7 the metabolite “lauric acid”.

[58670] In one embodiment, the term lauric acid or the term “fine chemical” mean in context of the paragraphs or sections [0014.1.12.12] to [0514.1.8.12] at least one chemical compound with an activity of the above mentioned lauric acid, respectively.

[58671] Accordingly, in one embodiment, the term “fine chemical of the invention”, “fine chemical” or “the fine chemical” as used herein (alone or in combination, like in FCRP) means “myristic acid” in context of the nucleic acid or polypeptide sequences listed in the respective same line of any one of Tables I to IV of application no. 12 and indicating in column 7 the metabolite “myristic acid”.

[58672] In one embodiment, the term myristic acid or the term “fine chemical” mean in context of the paragraphs or sections [0014.1.12.12] to [0514.1.8.12] at least one chemical compound with an activity of the above mentioned myristic acid, respectively.

[58673] Accordingly, in one embodiment, the term “fine chemical of the invention”, “fine chemical” or “the fine chemical” as used herein (alone or in combination, like in FCRP) means “nervonic acid” in context of the nucleic acid or polypeptide sequences listed in the respective same line of any one of Tables I to IV of application no. 12 and indicating in column 7 the metabolite “nervonic acid”.

[58674] In one embodiment, the term nervonic acid or the term “fine chemical” mean in context of the paragraphs or sections [0014.1.12.12] to [0514.1.8.12] at least one chemical compound with an activity of the above mentioned nervonic acid, respectively.

[58675] Accordingly, in one embodiment, the term “fine chemical of the invention”, “fine chemical” or “the fine chemical” as used herein (alone or in combination, like in FCRP) means “oleic acid” in context of the nucleic acid or polypeptide sequences listed in the respective same line of any one of Tables I to IV of application no. 12 and indicating in column 7 the metabolite “oleic acid”.

[58676] In one embodiment, the term oleic acid or the term “fine chemical” mean in context of the paragraphs or sections [0014.1.12.12] to [0514.1.8.12] at least one chemical compound with an activity of the above mentioned oleic acid, respectively.

[58677] Accordingly, in one embodiment, the terms “fine chemical of the invention”, “fine chemical” or “the fine chemical” mean in context of any of the paragraphs [0014.1.12.12] to [0514.1.8.12] 2-hydroxybehenic acid, its tryglycerides, lipids, oils and/or fats in free form or bound form. In a preferred embodiment, the term “the fine chemical” means 2-hydroxybehenic acid in free form or e.g. in form of its tryglycerides, lipids, oils and/or fats. In a preferred embodiment “2-hydroxybehenic acid” means 2-hydroxybehenic acid in free form.

[58678] Accordingly, in one embodiment, the terms “fine chemical of the invention”, “fine chemical” or “the fine chemical” mean in context of any of the paragraphs [0014.1.12.12] to [0514.1.8.12] 2-hydroxypalmitic acid, its tryglycerides, lipids, oils and/or fats in free form or bound form. In a preferred embodiment, the term “the fine chemical” means 2-hydroxypalmitic acid in free form or e.g. in form of its tryglycerides, lipids, oils and/or fats. In a preferred embodiment “2-hydroxypalmitic acid” means 2-hydroxypalmitic acid in free form.

[58679] Accordingly, in one embodiment, the terms “fine chemical of the invention”, “fine chemical” or “the fine chemical” mean in context of any of the paragraphs [0014.1.12.12] to [0514.1.8.12] 2-hydroxytetracosenoic acid (preferably 2-hydroxynervonic acid), its tryglycerides, lipids, oils and/or fats in free form or bound form. In a preferred embodiment, the term “the fine chemical” means 2-hydroxytetracosenoic acid (preferably 2-hydroxynervonic acid) in free form or e.g. in form of its tryglycerides, lipids, oils and/or fats. In a preferred embodiment “2-hydroxytetracosenoic acid (preferably 2-hydroxynervonic acid)” means 2-hydroxytetracosenoic acid (preferably 2-hydroxynervonic acid) in free form.

[58680] Accordingly, in one embodiment, the terms “fine chemical of the invention”, “fine chemical” or “the fine chemical” mean in context of any of the paragraphs [0014.1.12.12] to [0514.1.8.12] behenic acid, its tryglycerides, lipids, oils and/or fats in free form or bound form. In a preferred embodiment, the term “the fine chemical” means behenic acid in free form or e.g. in form of its its tryglycerides, lipids, oils and/or fats. In a preferred embodiment “behenic acid” means behenic acid in free form.

[58681] Accordingly, in one embodiment, the terms “fine chemical of the invention”, “fine chemical” or “the fine chemical” mean in context of any of the paragraphs [0014.1.12.12] to [0514.1.8.12] cerebronic acid, its tryglycerides, lipids, oils and/or fats in free form or bound form. In a preferred embodiment, the term “the fine chemical” means cerebronic acid in free form or e.g. in form of its tryglycerides, lipids, oils and/or fats. In a preferred embodiment “cerebronic acid” means cerebronic acid in free form.

[58682] Accordingly, in one embodiment, the terms “fine chemical of the invention”, “fine chemical” or “the fine chemical” mean in context of any of the paragraphs [0014.1.12.12] to [0514.1.8.12] eicosanoic acid, its tryglycerides, lipids, oils and/or fats in free form or bound form. In a preferred embodiment, the term “the fine chemical” means eicosanoic acid in free form or e.g. in form of its tryglycerides, lipids, oils and/or fats. In a preferred embodiment “eicosanoic acid” means eicosanoic acid in free form.

[58683] Accordingly, in one embodiment, the terms “fine chemical of the invention”, “fine chemical” or “the fine chemical” mean in context of any of the paragraphs [0014.1.12.12] to [0514.1.8.12] heptadecanoic acid, its tryglycerides, lipids, oils and/or fats in free form or bound form. In a preferred embodiment, the term “the fine chemical” means heptadecanoic acid in free form or e.g in form of its tryglycerides, lipids, oils and/or fats. In a preferred embodiment “heptadecanoic acid” means heptadecanoic acid in free form.

[58684] Accordingly, in one embodiment, the terms “fine chemical of the invention”, “fine chemical” or “the fine chemical” mean in context of any of the paragraphs [0014.1.12.12] to [0514.1.8.12] hexadecadienoic acid, its tryglycerides, lipids, oils and/or fats in free form or bound form. In a preferred embodiment, the term “the fine chemical” means hexadecadienoic acid in free form or e.g. in form of its tryglycerides, lipids, oils and/or fats. In a preferred embodiment “hexadecadienoic acid” means hexadecadienoic acid in free form.

[58685] Accordingly, in one embodiment, the terms “fine chemical of the invention”, “fine chemical” or “the fine chemical” mean in context of any of the paragraphs [0014.1.12.12] to [0514.1.8.12] hexadecatrienoic acid, its tryglycerides, lipids, oils and/or fats in free form or bound form. In a preferred embodiment, the term “the fine chemical” means hexadecatrienoic acid in free form e.g. in form of its tryglycerides, lipids, oils and/or fats. In a preferred embodiment “hexadecatrienoic acid” means hexadecatrienoic acid in free form.

[58686] Accordingly, in one embodiment, the terms “fine chemical of the invention”, “fine chemical” or “the fine chemical” mean in context of any of the paragraphs [0014.1.12.12] to [0514.1.8.12] lauric acid, its tryglycerides, lipids, oils and/or fats in free form or bound form. In a preferred embodiment, the term “the fine chemical” means lauric acid in free form or e.g. in form of its tryglycerides, lipids, oils and/or fats. In a preferred embodiment “lauric acid” means lauric acid in free form.

[58687] Accordingly, in one embodiment, the terms “fine chemical of the invention”, “fine chemical” or “the fine chemical” mean in context of any of the paragraphs [0014.1.12.12] to [0514.1.8.12] myristic acid, its tryglycerides, lipids, oils and/or fats in free form or bound form. In a preferred embodiment, the term “the fine chemical” means myristic acid in free form or e.g. in form of its tryglycerides, lipids, oils and/or fats. In a preferred embodiment “myristic acid” means myristic acid in free form.

[58688] Accordingly, in one embodiment, the terms “fine chemical of the invention”, “fine chemical” or “the fine chemical” mean in context of any of the paragraphs [0014.1.12.12] to [0514.1.8.12] nervonic acid, its tryglycerides, lipids, oils and/or fats in free form or bound form. In a preferred embodiment, the term “the fine chemical” means nervonic acid in free form or e.g. in form of its tryglycerides, lipids, oils and/or fats. In a preferred embodiment “nervonic acid” means nervonic acid in free form.

[58689] Accordingly, in one embodiment, the terms “fine chemical of the invention”, “fine chemical” or “the fine chemical” mean in context of any of the paragraphs [0014.1.12.12] to [0514.1.8.12] oleic acid, its tryglycerides, lipids, oils and/or fats in free form or bound form. In a preferred embodiment, the term “the fine chemical” means oleic acid in free form or e.g. in form of its tryglycerides, lipids, oils and/or fats. In a preferred embodiment “oleic acid” means oleic acid in free form.

[58690] In one embodiment, the term “the fine chemical” or “the respective fine chemical” mean in context of any of the paragraphs [0014.1.12.12] to [0514.1.8.12] 2-hydroxybehenic acid, 2-hydroxypalmitic acid, 2-hydroxytetracosenoic acid (preferably 2-hydroxynervonic acid), behenic acid, cerebronic acid, eicosanoic acid, heptadecanoic acid, hexadecadienoic acid, hexadecatrienoic acid, lauric acid, myristic acid, nervonic acid, and/or oleic acid, respectively and/or tryglycerides, lipids, oils and/or fats of 2-hydroxybehenic acid, 2-hydroxypalmitic acid, 2-hydroxytetracosenoic acid(preferably 2-hydroxynervonic acid), behenic acid, cerebronic acid, eicosanoic acid, heptadecanoic acid, hexadecadienoic acid, hexadecatrienoic acid, lauric acid, myristic acid, nervonic acid, and/or oleic acid, respectively and its salts, ester, thioester or 2-hydroxybehenic acid, 2-hydroxypalmitic acid, 2-hydroxytetracosenoic acid (preferably 2-hydroxynervonic acid), behenic acid, cerebronic acid, eicosanoic acid, heptadecanoic acid, hexadecadienoic acid, hexadecatrienoic acid, lauric acid, myristic acid, nervonic acid, and/or oleic acid in free form or bound to other compounds such as triglycerides, glycolipids, phospholipids etc. In a preferred embodiment, the term “the fine chemical” means 2-hydroxybehenic acid, 2-hydroxypalmitic acid, 2-hydroxytetracosenoic acid (preferably 2-hydroxynervonic acid), behenic acid, cerebronic acid, eicosanoic acid, heptadecanoic acid, hexadecadienoic acid, hexadecatrienoic acid, lauric acid, myristic acid, nervonic acid, and/or oleic acid., respectively, in free form or its salts or bound to triglycerides. Triglycerides, lipids, oils, fats or lipid mixture thereof shall mean any triglyceride, lipid, oil and/or fat containing any bound or free 2-hydroxybehenic acid, 2-hydroxypalmitic acid, 2-hydroxytetracosenoic acid (preferably 2-hydroxynervonic acid), behenic acid, cerebronic acid, eicosanoic acid, heptadecanoic acid, hexadecadienoic acid, hexadecatrienoic acid, lauric acid, myristic acid, nervonic acid, and/or oleic acid, respectively, for example sphingolipids, phosphoglycerides, lipids, glycolipids such as glycosphingolipids, phospholipids such as phosphatidylethanolamine, phosphatidylcholine, phosphatidylserine, phosphatidylglycerol, phosphatidylinositol or diphosphatidylglycerol, or as monoacylglyceride, diacylglyceride or triacylglyceride or other fatty acid esters such as acetyl-Coenzym A thioester, which contain further saturated or unsaturated fatty acids in the fatty acid molecule.

[58691] In one embodiment, the term “the fine chemical” and the term “the respective fine chemical” mean at least one chemical compound with an activity of the abovementioned fine chemical. Further, the term “in context of any of the paragraphs [0014.1.12.12] to [0514.1.8.12]” as used herein means that for any of said paragraphs [0014.1.12.12] to [0514.1.8.12] the term “the fine chemical” is understood to follow the definition of section [0014.1.12.12] or section [0015.1.12.12], independently whether it refers to any other paragraph or not and whether the reference recites the term “fine chemical” in an other context.

[58692] Thus, in cases where one or more paragraphs or sections are incorporated by reference into any of the present paragraphs [0014.1.12.12] to [0514.1.8.12], e.g. by usage of the term “see paragraph” or the term “for the disclosure of this paragraph see the disclosure of paragraph” or the term “incorporated by reference” or a corresponding term, the incorporated paragraph, section or term “the fine chemical” is also understood to have the meaning according to this definition of this paragraph [0015.1.12.12].

[58693] Further, the term “fine chemicals” as used herein relates to compositions comprising said fine chemical(s), i.e. comprising 2-hydroxybehenic acid, 2-hydroxypalmitic acid, 2-hydroxytetracosenoic acid(preferably 2-hydroxynervonic acid), behenic acid, cerebronic acid, eicosanoic acid, heptadecanoic acid, hexadecadienoic acid, hexadecatrienoic acid, lauric acid, myristic acid, nervonic acid, and/or oleic acid, respectively.

[58694] Accordingly, the present invention relates to a process for the production of cerebronic acid, which comprises
[58695] (a) increasing or generating one or more activities selected from the group consisting of chlorophyllase in a non-human organism or a part thereof, preferably a microorganism, a plant cell, a plant or a part thereof, as compared to a corresponding non-transformed wild type non-human organism or a part thereof; and
[58696] (b) growing the non-human organism or a part thereof under conditions which permit the production of cerebronic acid or a composition comprising cerebronic acid in said non-human organism or in the culture medium surrounding said non-human organism.

[58697] Accordingly, the present invention relates to a process for the production of 2-hydroxytetracosenoic acid (preferably 2-hydroxynervonic acid), which comprises
[58698] (a) increasing or generating one or more activities selected from the group consisting of chlorophyllase in a non-human organism or a part thereof, preferably a microorganism, a plant cell, a plant or a part thereof, as compared to a corresponding non-transformed wild type non-human organism or a part thereof; and
[58699] (b) growing the non-human organism or a part thereof under conditions which permit the production of 2-hydroxytetracosenoic acid (preferably 2-hydroxynervonic acid) or a composition comprising 2-hydroxytetracosenoic acid (preferably 2-hydroxynervonic acid) in said non-human organism or in the culture medium surrounding said non-human

[58700] Accordingly, the present invention relates to a process for the production of hexadecatrienoic acid, which comprises
[58701] (a) increasing or generating one or more activities selected from the group consisting of transcription factor in a non-human organism or a part thereof, preferably a microorganism, a plant cell, a plant or a part thereof, as compared to a corresponding non-transformed wild type non-human organism or a part thereof; and
[58702] (b) growing the non-human organism or a part thereof under conditions which permit the production of hexadecatrienoic acid or a composition comprising hexadecatrienoic acid in said non-human organism or in the culture medium surrounding said non-human organism.

[58703] Accordingly, the present invention relates to a process for the production of cerebronic acid, which comprises
[58704] (a) increasing or generating one or more activities selected from the group consisting of protein phosphatase in a non-human organism or a part thereof, preferably a microorganism, a plant cell, a plant or a part thereof, as compared to a corresponding non-transformed wild type non-human organism or a part thereof; and
[58705] (b) growing the non-human organism or a part thereof under conditions which permit the production of cerebronic acid or a composition comprising cerebronic acid in said non-human organism or in the culture medium surrounding said non-human organism.

[58706] Accordingly, the present invention relates to a process for the production of hexadecatrienoic acid, which comprises
[58707] (a) increasing or generating one or more activities selected from the group consisting of protein phosphatase in a non-human organism or a part thereof, preferably a microorganism, a plant cell, a plant or a part thereof, as compared to a corresponding non-transformed wild type non-human organism or a part thereof; and
[58708] (b) growing the non-human organism or a part thereof under conditions which permit the production of hexadecatrienoic acid or a composition comprising hexadecatrienoic acid in said non-human organism or in the culture medium surrounding said non-human organism.

[58709] Accordingly, the present invention relates to a process for the production of 2-hydroxybehenic acid, which comprises
[58710] (a) increasing or generating one or more activities selected from the group consisting of protein phosphatase in a non-human organism or a part thereof, preferably a microorganism, a plant cell, a plant or a part thereof, as compared to a corresponding non-transformed wild type non-human organism or a part thereof; and
[58711] (b) growing the non-human organism or a part thereof under conditions which permit the production of 2-hydroxybehenic acid or a composition comprising 2-hydroxybehenic acid in said non-human organism or in the culture medium surrounding said non-human organism.

[58712] Accordingly, the present invention relates to a process for the production of 2-hydroxypalmitic acid, which comprises
[58713] (a) increasing or generating one or more activities selected from the group consisting of At2g33510-protein in a non-human organism or a part thereof, preferably a microorganism, a plant cell, a plant or a part thereof, as compared to a corresponding non-transformed wild type non-human organism or a part thereof; and
[58714] (b) growing the non-human organism or a part thereof under conditions which permit the production of 2-hydroxypalmitic acid or a composition comprising 2-hydroxypalmitic acid in said non-human organism or in the culture medium surrounding said non-human organism.

[58715] Accordingly, the present invention relates to a process for the production of 2-hydroxytetracosenoic acid (preferably 2-hydroxynervonic acid), which comprises
[58716] (a) increasing or generating one or more activities selected from the group consisting of heat shock transcription factor in a non-human organism or a part thereof, preferably a microorganism, a plant cell, a plant or a part thereof, as compared to a corresponding non-transformed wild type non-human organism or a part thereof; and
[58717] (b) growing the non-human organism or a part thereof under conditions which permit the production of 2-hydroxytetracosenoic acid (preferably 2-hydroxynervonic acid) or a composition comprising 2-hydroxytetracosenoic acid (preferably 2-hydroxynervonic acid) in said non-human organism or in the culture medium surrounding said non-human organism.

[58718] Accordingly, the present invention relates to a process for the production of cerebronic acid, which comprises
[58719] (a) increasing or generating one or more activities selected from the group consisting of adenosine kinase in a non-human organism or a part thereof, preferably a microorganism, a plant cell, a plant or a part thereof, as compared to a corresponding non-transformed wild type non-human organism or a part thereof; and
[58720] (b) growing the non-human organism or a part thereof under conditions which permit the production of cerebronic acid or a composition comprising cerebronic acid in said non-human organism or in the culture medium surrounding said non-human organism.

[58721] Accordingly, the present invention relates to a process for the production of 2-hydroxybehenic acid, which comprises
[58722] (a) increasing or generating one or more activities selected from the group consisting of adenosine kinase in a non-human organism or a part thereof, preferably a microorganism, a plant cell, a plant or a part thereof, as compared to a corresponding non-transformed wild type non-human organism or a part thereof; and
[58723] (b) growing the non-human organism or a part thereof under conditions which permit the production of 2-hydroxybehenic acid or a composition comprising 2-hydroxybehenic acid in said non-human organism or in the culture medium surrounding said non-human organism.

[58724] Accordingly, the present invention relates to a process for the production of 2-hydroxytetracosenoic acid (preferably 2-hydroxynervonic acid), which comprises
[58725] (a) increasing or generating one or more activities selected from the group consisting of DNA mismatch repair protein in a non-human organism or a part thereof, preferably a microorganism, a plant cell, a plant or a part thereof, as compared to a corresponding non-transformed wild type non-human organism or a part thereof; and
[58726] (b) growing the non-human organism or a part thereof under conditions which permit the production of 2-hydroxytetracosenoic acid (preferably 2-hydroxynervonic acid) or a composition comprising 2-hydroxytetracosenoic acid (preferably 2-hydroxynervonic acid) in said non-human organism or in the culture medium surrounding said non-human organism.

[58727] Accordingly, the present invention relates to a process for the production of cerebronic acid, which comprises
[58728] (a) increasing or generating one or more activities selected from the group consisting of glutaredoxin in a non-human organism or a part thereof, preferably a microorganism, a plant cell, a plant or a part thereof, as compared to a corresponding non-transformed wild type non-human organism or a part thereof; and
[58729] (b) growing the non-human organism or a part thereof under conditions which permit the production of cerebronic acid or a composition comprising cerebronic acid in said non-human organism or in the culture medium surrounding said non-human organism.

[58730] Accordingly, the present invention relates to a process for the production of hexadecatrienoic acid, which comprises
[58731] (a) increasing or generating one or more activities selected from the group consisting of glutaredoxin in a non-human organism or a part thereof, preferably a microorganism, a plant cell, a plant or a part thereof, as compared to a corresponding non-transformed wild type non-human organism or a part thereof; and
[58732] (b) growing the non-human organism or a part thereof under conditions which permit the production of hexadecatrienoic acid or a composition comprising hexadecatrienoic acid in said non-human organism or in the culture medium surrounding said non-human organism.

[58733] Accordingly, the present invention relates to a process for the production of 2-hydroxybehenic acid, which comprises
[58734] (a) increasing or generating one or more activities selected from the group consisting of glutaredoxin in a non-human organism or a part thereof, preferably a microorganism, a plant cell, a plant or a part thereof, as compared to a corresponding non-transformed wild type non-human organism or a part thereof; and
[58735] (b) growing the non-human organism or a part thereof under conditions which permit the production of 2-hydroxybehenic acid or a composition comprising 2-hydroxybehenic acid in said non-human organism or in the culture medium surrounding said non-human organism.

[58736] Accordingly, the present invention relates to a process for the production of 2-hydroxypalmitic acid, which comprises
[58737] (a) increasing or generating one or more activities selected from the group consisting of transcription factor in a non-human organism or a part thereof, preferably a microorganism, a plant cell, a plant or a part thereof, as compared to a corresponding non-transformed wild type non-human organism or a part thereof; and
[58738] (b) growing the non-human organism or a part thereof under conditions which permit the production of 2-hydroxypalmitic acid or a composition comprising 2-hydroxypalmitic acid in said non-human organism or in the culture medium surrounding said non-human organism.

[58739] Accordingly, the present invention relates to a process for the production of 2-hydroxybehenic acid, which comprises
[58740] (a) increasing or generating one or more activities selected from the group consisting of monothiol glutaredoxin in a non-human organism or a part thereof, preferably a microorganism, a plant cell, a plant or a part thereof, as compared to a corresponding non-transformed wild type non-human organism or a part thereof; and
[58741] (b) growing the non-human organism or a part thereof under conditions which permit the production of 2-hydroxybehenic acid or a composition comprising 2-hydroxybehenic acid in said non-human organism or in the culture medium surrounding said non-human organism.

[58742] Accordingly, the present invention relates to a process for the production of 2-hydroxypalmitic acid, which comprises
[58743] (a) increasing or generating one or more activities selected from the group consisting of monothiol glutaredoxin in a non-human organism or a part thereof, preferably a microorganism, a plant cell, a plant or a part thereof, as compared to a corresponding non-transformed wild type non-human organism or a part thereof; and
[58744] (b) growing the non-human organism or a part thereof under conditions which permit the production of 2-hydroxypalmitic acid or a composition comprising 2-hydroxypalmitic acid in said non-human organism or in the culture medium surrounding said non-human organism.

[58745] Accordingly, the present invention relates to a process for the production of hexadecatrienoic acid, which comprises
[58746] (a) increasing or generating one or more activities selected from the group consisting of monothiol glutaredoxin in a non-human organism or a part thereof, preferably a microorganism, a plant cell, a plant or a part thereof, as compared to a corresponding non-transformed wild type non-human organism or a part thereof; and
[58747] (b) growing the non-human organism or a part thereof under conditions which permit the production of hexadecatrienoic acid or a composition comprising hexadecatrienoic acid in said non-human organism or in the culture medium surrounding said non-human organism.

[58748] Accordingly, the present invention relates to a process for the production of 2-hydroxybehenic acid, which comprises
[58749] (a) increasing or generating one or more activities selected from the group consisting of monothiol glutaredoxin in a non-human organism or a part thereof, preferably a microorganism, a plant cell, a plant or a part thereof, as compared to a corresponding non-transformed wild type non-human organism or a part thereof; and
[58750] (b) growing the non-human organism or a part thereof under conditions which permit the production of 2-hydroxybehenic acid or a composition comprising 2-hydroxybehenic acid in said non-human organism or in the culture medium surrounding said non-human organism.

[58751] Accordingly, the present invention relates to a process for the production of cerebronic acid, which comprises
[58752] (a) increasing or generating one or more activities selected from the group consisting of monothiol glutaredoxin in a non-human organism or a part thereof, preferably a microorganism, a plant cell, a plant or a part thereof, as compared to a corresponding non-transformed wild type non-human organism or a part thereof; and
[58753] (b) growing the non-human organism or a part thereof under conditions which permit the production of cerebronic acid or a composition comprising cerebronic acid in said non-human organism or in the culture medium surrounding said non-human organism.

[58754] Accordingly, the present invention relates to a process for the production of 2-hydroxybehenic acid, which comprises
[58755] (a) increasing or generating one or more activities selected from the group consisting of protein phosphatase in a non-human organism or a part thereof, preferably a microorganism, a plant cell, a plant or a part thereof, as compared to a corresponding non-transformed wild type non-human organism or a part thereof; and
[58756] (b) growing the non-human organism or a part thereof under conditions which permit the production of 2-hydroxybehenic acid or a composition comprising 2-hydroxybehenic acid in said non-human organism or in the culture medium surrounding said non-human organism.

[58757] Accordingly, the present invention relates to a process for the production of 2-hydroxytetracosenoic acid (preferably 2-hydroxynervonic acid), which comprises
[58758] (a) increasing or generating one or more activities selected from the group consisting of protein phosphatase in a non-human organism or a part thereof, preferably a microorganism, a plant cell, a plant or a part thereof, as compared to a corresponding non-transformed wild type non-human organism or a part thereof; and
[58759] (b) growing the non-human organism or a part thereof under conditions which permit the production of 2-hydroxytetracosenoic acid (preferably 2-hydroxynervonic acid) or a composition comprising 2-hydroxytetracosenoic acid (preferably 2-hydroxynervonic acid) in said non-human organism or in the culture medium surrounding said non-human organism.

[58760] Accordingly, the present invention relates to a process for the production of cerebronic acid, which comprises
[58761] (a) increasing or generating one or more activities selected from the group consisting of glutaredoxin in a non-human organism or a part thereof, preferably a microorganism, a plant cell, a plant or a part thereof, as compared to a corresponding non-transformed wild type non-human organism or a part thereof; and
[58762] (b) growing the non-human organism or a part thereof under conditions which permit the production of cerebronic acid or a composition comprising cerebronic acid in said non-human organism or in the culture medium surrounding said non-human organism.

[58763] Accordingly, the present invention relates to a process for the production of hexadecadienoic acid, which comprises
[58764] (a) increasing or generating one or more activities selected from the group consisting of glutaredoxin in a non-human organism or a part thereof, preferably a microorganism, a plant cell, a plant or a part thereof, as compared to a corresponding non-transformed wild type non-human organism or a part thereof; and
[58765] (b) growing the non-human organism or a part thereof under conditions which permit the production of hexadecadienoic acid or a composition comprising hexadecadienoic acid in said non-human organism or in the culture medium surrounding said non-human organism.

[58766] Accordingly, the present invention relates to a process for the production of hexadecatrienoic acid, which comprises
[58767] (a) increasing or generating one or more activities selected from the group consisting of glutaredoxin in a non-human organism or a part thereof, preferably a microorganism, a plant cell, a plant or a part thereof, as compared to a corresponding non-transformed wild type non-human organism or a part thereof; and
[58768] (b) growing the non-human organism or a part thereof under conditions which permit the production of hexadecatrienoic acid or a composition comprising hexadecatrienoic acid in said non-human organism or in the culture medium surrounding said non-human organism.

[58769] Accordingly, the present invention relates to a process for the production of 2-hydroxybehenic acid, which comprises
[58770] (a) increasing or generating one or more activities selected from the group consisting of calcium-dependent protein kinase in a non-human organism or a part thereof, preferably a microorganism, a plant cell, a plant or a part thereof, as compared to a corresponding non-transformed wild type non-human organism or a part thereof; and
[58771] (b) growing the non-human organism or a part thereof under conditions which permit the production of 2-hydroxybehenic acid or a composition comprising 2-hydroxybehenic acid in said non-human organism or in the culture medium surrounding said non-human organism.

[58772] Accordingly, the present invention relates to a process for the production of 2-hydroxypalmitic acid, which comprises
[58773] (a) increasing or generating one or more activities selected from the group consisting of calcium-dependent protein kinase in a non-human organism or a part thereof, preferably a microorganism, a plant cell, a plant or a part thereof, as compared to a corresponding non-transformed wild type non-human organism or a part thereof; and
[58774] (b) growing the non-human organism or a part thereof under conditions which permit the production of 2-hydroxypalmitic acid or a composition comprising 2-hydroxypalmitic acid in said non-human organism or in the culture medium surrounding said non-human organism.

[58775] Accordingly, the present invention relates to a process for the production of oleic acid, which comprises
[58776] (a) increasing or generating one or more activities selected from the group consisting of acyldesaturase in a non-human organism or a part thereof, preferably a microorganism, a plant cell, a plant or a part thereof, as compared to a corresponding non-transformed wild type non-human organism or a part thereof; and
[58777] (b) growing the non-human organism or a part thereof under conditions which permit the production of oleic acid or a composition comprising oleic acid in said non-human organism or in the culture medium surrounding said non-human organism.

[58778] Accordingly, the present invention relates to a process for the production of hexadecatrienoic acid, which comprises
[58779] (a) increasing or generating one or more activities selected from the group consisting of monothiol glutaredoxin in a non-human organism or a part thereof, preferably a microorganism, a plant cell, a plant or a part thereof, as compared to a corresponding non-transformed wild type non-human organism or a part thereof; and
[58780] (b) growing the non-human organism or a part thereof under conditions which permit the production of hexadecatrienoic acid or a composition comprising hexadecatrienoic acid in said non-human organism or in the culture medium surrounding said non-human organism.

[58781] Accordingly, the present invention relates to a process for the production of hexadecatrienoic acid, which comprises
[58782] (a) increasing or generating one or more activities selected from the group consisting of protein phosphatase in a non-human organism or a part thereof, preferably a microorganism, a plant cell, a plant or a part thereof, as compared to a corresponding non-transformed wild type non-human organism or a part thereof; and
[58783] (b) growing the non-human organism or a part thereof under conditions which permit the production of hexadecatrienoic acid or a composition comprising hexadecatrienoic acid in said non-human organism or in the culture medium surrounding said non-human organism.

[58784] Accordingly, the present invention relates to a process for the production of hexadecadienoic acid, which comprises
[58785] (a) increasing or generating one or more activities selected from the group consisting of protein kinase in a non-human organism or a part thereof, preferably a microorganism, a plant cell, a plant or a part thereof, as compared to a corresponding non-transformed wild type non-human organism or a part thereof; and
[58786] (b) growing the non-human organism or a part thereof under conditions which permit the production of hexadecadienoic acid or a composition comprising hexadecadienoic acid in said non-human organism or in the culture medium surrounding said non-human organism.

[58787] Accordingly, the present invention relates to a process for the production of cerebronic acid, which comprises
[58788] (a) increasing or generating one or more activities selected from the group consisting of CDP-diacylglycerol-serine O-phosphatidyltransferase in a non-human organism or a part thereof, preferably a microorganism, a plant cell, a plant or a part thereof, as compared to a corresponding non-transformed wild type non-human organism or a part thereof; and
[58789] (b) growing the non-human organism or a part thereof under conditions which permit the production of cerebronic acid or a composition comprising cerebronic acid in said non-human organism or in the culture medium surrounding said non-human organism.

[58790] Accordingly, the present invention relates to a process for the production of 2-hydroxybehenic acid, which comprises
[58791] (a) increasing or generating one or more activities selected from the group consisting of

[58792] CDP-diacylglycerol-serine O-phosphatidyltransferase in a non-human organism or a part thereof, preferably a microorganism, a plant cell, a plant or a part thereof, as compared to a corresponding non-transformed wild type non-human organism or a part thereof; and
[58793] (b) growing the non-human organism or a part thereof under conditions which permit the production of 2-hydroxybehenic acid or a composition comprising 2-hydroxybehenic acid in said non-human organism or in the culture medium surrounding said non-human organism.

[58794] Accordingly, the present invention relates to a process for the production of 2-hydroxytetracosenoic acid (preferably 2-hydroxynervonic acid), which comprises
[58795] (a) increasing or generating one or more activities selected from the group consisting of CDP-diacylglycerol-serine O-phosphatidyltransferase in a non-human organism or a part thereof, preferably a microorganism, a plant cell, a plant or a part thereof, as compared to a corresponding non-transformed wild type non-human organism or a part thereof; and
[58796] (b) growing the non-human organism or a part thereof under conditions which permit the production of 2-hydroxytetracosenoic acid (preferably 2-hydroxynervonic acid) or a composition comprising 2-hydroxytetracosenoic acid (preferably 2-hydroxynervonic acid) in said non-human organism or in the culture medium surrounding said non-human organism.

[58797] Accordingly, the present invention relates to a process for the production of 2-hydroxypalmitic acid, which comprises
[58798] (a) increasing or generating one or more activities selected from the group consisting of CDP-diacylglycerol-serine O-phosphatidyltransferase in a non-human organism or a part thereof, preferably a microorganism, a plant cell, a plant or a part thereof, as compared to a corresponding non-transformed wild type non-human organism or a part thereof; and
[58799] (b) growing the non-human organism or a part thereof under conditions which permit the production of 2-hydroxypalmitic acid or a composition comprising 2-hydroxypalmitic acid in said non-human organism or in the culture medium surrounding said non-human organism.

[58800] Accordingly, the present invention relates to a process for the production of hexadecadienoic acid, which comprises
[58801] (a) increasing or generating one or more activities selected from the group consisting of sec-independent protein translocase in a non-human organism or a part thereof, preferably a microorganism, a plant cell, a plant or a part thereof, as compared to a corresponding non-transformed wild type non-human organism or a part thereof; and
[58802] (b) growing the non-human organism or a part thereof under conditions which permit the production of hexadecadienoic acid or a composition comprising hexadecadienoic acid in said non-human organism or in the culture medium surrounding said non-human organism.

[58803] Accordingly, the present invention relates to a process for the production of 2-hydroxytetracosenoic acid (preferably 2-hydroxynervonic acid), which comprises
[58804] (a) increasing or generating one or more activities selected from the group consisting of transcriptional regulator protein in a non-human organism or a part thereof, preferably a microorganism, a plant cell, a plant or a part thereof, as compared to a corresponding non-transformed wild type non-human organism or a part thereof; and
[58805] (b) growing the non-human organism or a part thereof under conditions which permit the production of 2-hydroxytetracosenoic acid (preferably 2-hydroxynervonic acid) or a composition comprising 2-hydroxytetracosenoic acid (preferably 2-hydroxynervonic acid) in said non-human organism or in the culture medium surrounding said non-human

[58806] Accord ivp,iAhre present invention relates to a process for the production of 2-hydroxypalmitic acid, which comprises
[58807] (a) increasing or generating one or more activities selected from the group consisting of beta-hydroxylase in a non-human organism or a part thereof, preferably a microorganism, a plant cell, a plant or a part thereof, as compared to a corresponding non-transformed wild type non-human organism or a part thereof; and
[58808] (b) growing the non-human organism or a part thereof under conditions which permit the production of 2-hydroxypalmitic acid or a composition comprising 2-hydroxypalmitic acid in said non-human organism or in the culture medium surrounding said non-human organism.

[58809] Accordingly, the present invention relates to a process for the production of hexadecadienoic acid, which comprises
[58810] (a) increasing or generating one or more activities selected from the group consisting of 30S ribosomal protein S3 in a non-human organism or a part thereof, preferably a microorganism, a plant cell, a plant or a part thereof, as compared to a corresponding non-transformed wild type non-human organism or a part thereof; and
[58811] (b) growing the non-human organism or a part thereof under conditions which permit the production of hexadecadienoic acid or a composition comprising hexadecadienoic acid in said non-human organism or in the culture medium surrounding said non-human organism.

[58812] Accordingly, the present invention relates to a process for the production of 2-hydroxybehenic acid, which comprises
[58813] (a) increasing or generating one or more activities selected from the group consisting of acyl-CoA synthase in a non-human organism or a part thereof, preferably a microorganism, a plant cell, a plant or a part thereof, as compared to a corresponding non-transformed wild type non-human organism or a part thereof; and
[58814] (b) growing the non-human organism or a part thereof under conditions which permit the production of 2-hydroxybehenic acid or a composition comprising 2-hydroxybehenic acid in said non-human organism or in the culture medium surrounding said non-human organism.

[58815] Accordingly, the present invention relates to a process for the production of 2-hydroxytetracosenoic acid (preferably 2-hydroxynervonic acid), which comprises
[58816] (a) increasing or generating one or more activities selected from the group consisting of heat shock protein in a non-human organism or a part thereof, preferably a microorganism, a plant cell, a plant or a part thereof, as compared to a corresponding non-transformed wild type non-human organism or a part thereof; and
[58817] (b) growing the non-human organism or a part thereof under conditions which permit the production of 2-hydroxytetracosenoic acid (preferably 2-hydroxynervonic acid) or a composition comprising 2-hydroxytetracosenoic acid (preferably 2-hydroxynervonic acid) in said non-human organism or in the culture medium surrounding said non-human

[58818] AccordirgjiNAhre present invention relates to a process for the production of 2-hydroxytetracosenoic acid (preferably 2-hydroxynervonic acid), which comprises
[58819] (a) increasing or generating one or more activities selected from the group consisting of oxidoreductase in a non-human organism or a part thereof, preferably a microorganism, a plant cell, a plant or a part thereof, as compared to a corresponding non-transformed wild type non-human organism or a part thereof; and
[58820] (b) growing the non-human organism or a part thereof under conditions which permit the production of 2-hydroxytetracosenoic acid (preferably 2-hydroxynervonic acid) or a composition comprising 2-hydroxytetracosenoic acid (preferably 2-hydroxynervonic acid) in said non-human organism or in the culture medium surrounding said non-human organism.

[58821] Accordingly, the present invention relates to a process for the production of hexadecadienoic acid, which comprises
[58822] (a) increasing or generating one or more activities selected from the group consisting of recombinase A in a non-human organism or a part thereof, preferably a microorganism, a plant cell, a plant or a part thereof, as compared to a corresponding non-transformed wild type non-human organism or a part thereof; and
[58823] (b) growing the non-human organism or a part thereof under conditions which permit the production of hexadecadienoic acid or a composition comprising hexadecadienoic acid in said non-human organism or in the culture medium surrounding said non-human organism.

[58824] Accordingly, the present invention relates to a process for the production of lauric acid, which comprises
[58825] (a) increasing or generating one or more activities selected from the group consisting of ABC transporter component in a non-human organism or a part thereof, preferably a microorganism, a plant cell, a plant or a part thereof, as compared to a corresponding non-transformed wild type non-human organism or a part thereof; and
[58826] (b) growing the non-human organism or a part thereof under conditions which permit the production of lauric acid or a composition comprising lauric acid in said non-human organism or in the culture medium surrounding said non-human organism.

[58827] Accordingly, the present invention relates to a process for the production of 2-hydroxypalmitic acid, which comprises
[58828] (a) increasing or generating one or more activities selected from the group consisting of hydrolase in a non-human organism or a part thereof, preferably a microorganism, a plant cell, a plant or a part thereof, as compared to a corresponding non-transformed wild type non-human organism or a part thereof; and
[58829] (b) growing the non-human organism or a part thereof under conditions which permit the production of 2-hydroxypalmitic acid or a composition comprising 2-hydroxypalmitic acid in said non-human organism or in the culture medium surrounding said non-human organism.

[58830] Accordingly, the present invention relates to a process for the production of 2-hydroxypalmitic acid, which comprises
[58831] (a) increasing or generating one or more activities selected from the group consisting of glutamate-ammonia-ligase in a non-human organism or a part thereof, preferably a microorganism, a plant cell, a plant or a part thereof, as compared to a corresponding non-transformed wild type non-human organism or a part thereof; and
[58832] (b) growing the non-human organism or a part thereof under conditions which permit the production of 2-hydroxypalmitic acid or a composition comprising 2-hydroxypalmitic acid in said non-human organism or in the culture medium surrounding said non-human organism.

[58833] Accordingly, the present invention relates to a process for the production of 2-hydroxybehenic acid, which comprises
[58834] (a) increasing or generating one or more activities selected from the group consisting of fumarylacetoacetate hydrolase in a non-human organism or a part thereof, preferably a microorganism, a plant cell, a plant or a part thereof, as compared to a corresponding non-transformed wild type non-human organism or a part thereof; and
[58835] (b) growing the non-human organism or a part thereof under conditions which permit the production of 2-hydroxybehenic acid or a composition comprising 2-hydroxybehenic acid in said non-human organism or in the culture medium surrounding said non-human organism.

[58836] Accordingly, the present invention relates to a process for the production of 2-hydroxytetracosenoic acid (preferably 2-hydroxynervonic acid), which comprises
[58837] (a) increasing or generating one or more activities selected from the group consisting of N-acetyl-gamma-glutamyl-phosphate reductase in a non-human organism or a part thereof, preferably a microorganism, a plant cell, a plant or a part thereof, as compared to a corresponding non-transformed wild type non-human organism or a part thereof; and
[58838] (b) growing the non-human organism or a part thereof under conditions which permit the production of 2-hydroxytetracosenoic acid (preferably 2-hydroxynervonic acid) or a composition comprising 2-hydroxytetracosenoic acid (preferably 2-hydroxynervonic acid) in said non-human organism or in the culture medium surrounding said non-human organism.

[58839] Accordingly, the present invention relates to a process for the production of 2-hydroxytetracosenoic acid (preferably 2-hydroxynervonic acid), which comprises
[58840] (a) increasing or generating one or more activities selected from the group consisting of HesB/YadR/YfhF family protein in a non-human organism or a part thereof, preferably a microorganism, a plant cell, a plant or a part thereof, as compared to a corresponding non-transformed wild type non-human organism or a part thereof; and
[58841] (b) growing the non-human organism or a part thereof under conditions which permit the production of 2-hydroxytetracosenoic acid (preferably 2-hydroxynervonic acid) or a composition comprising 2-hydroxytetracosenoic acid (preferably 2-hydroxynervonic acid) in said non-human organism or in the culture medium surrounding said non-human Accord ivp,iAhre present invention relates to a process for the production of 2-hydroxytetracosenoic acid (preferably 2-hydroxynervonic acid), which comprises
[58842] (a) increasing or generating one or more activities selected from the group consisting of purine nucleoside phosphorylase in a non-human organism or a part thereof, preferably a microorganism, a plant cell, a plant or a part thereof, as compared to a corresponding non-transformed wild type non-human organism or a part thereof; and
[58843] (b) growing the non-human organism or a part thereof under conditions which permit the production of 2-hydroxytetracosenoic acid (preferably 2-hydroxynervonic acid) or a composition comprising 2-hydroxytetracosenoic acid (preferably 2-hydroxynervonic acid) in said non-human organism or in the culture medium surrounding said non-human Accord ivp,iAhre present invention relates to a process for the production of 2-hydroxybehenic acid, which comprises
[58844] (a) increasing or generating one or more activities selected from the group consisting of b0050-protein in a non-human organism or a part thereof, preferably a microorganism, a plant cell, a plant or a part thereof, as compared to a corresponding non-transformed wild type non-human organism or a part thereof; and
[58845] (b) growing the non-human organism or a part thereof under conditions which permit the production of 2-hydroxybehenic acid or a composition comprising 2-hydroxybehenic acid in said non-human organism or in the culture medium surrounding said non-human organism.

[58846] Accordingly, the present invention relates to a process for the production of 2-hydroxytetracosenoic acid (preferably 2-hydroxynervonic acid), which comprises
[58847] (a) increasing or generating one or more activities selected from the group consisting of b0050-protein in a non-human organism or a part thereof, preferably a microorganism, a plant cell, a plant or a part thereof, as compared to a corresponding non-transformed wild type non-human organism or a part thereof; and
[58848] (b) growing the non-human organism or a part thereof under conditions which permit the production of 2-hydroxytetracosenoic acid (preferably 2-hydroxynervonic acid) or a composition comprising 2-hydroxytetracosenoic acid (preferably 2-hydroxynervonic acid) in said non-human organism or in the culture medium surrounding said non-human organism.

[58849] Accordingly, the present invention relates to a process for the production of cerebronic acid, which comprises
[58850] (a) increasing or generating one or more activities selected from the group consisting of b0249-protein in a non-human organism or a part thereof, preferably a microorganism, a plant cell, a plant or a part thereof, as compared to a corresponding non-transformed wild type non-human organism or a part thereof; and
[58851] (b) growing the non-human organism or a part thereof under conditions which permit the production of cerebronic acid or a composition comprising cerebronic acid in said non-human organism or in the culture medium surrounding said non-human organism.

[58852] Accordingly, the present invention relates to a process for the production of behenic acid, which comprises
[58853] (a) increasing or generating one or more activities selected from the group consisting of betaine aldehyde dehydrogenase in a non-human organism or a part thereof, preferably a microorganism, a plant cell, a plant or a part thereof, as compared to a corresponding non-transformed wild type non-human organism or a part thereof; and
[58854] (b) growing the non-human organism or a part thereof under conditions which permit the production of behenic acid or a composition comprising behenic acid in said non-human organism or in the culture medium surrounding said non-human organism.

[58855] Accordingly, the present invention relates to a process for the production of eicosanoic acid, which comprises
[58856] (a) increasing or generating one or more activities selected from the group consisting of betaine aldehyde dehydrogenase in a non-human organism or a part thereof, preferably a microorganism, a plant cell, a plant or a part thereof, as compared to a corresponding non-transformed wild type non-human organism or a part thereof; and
[58857] (b) growing the non-human organism or a part thereof under conditions which permit the production of eicosanoic acid or a composition comprising eicosanoic acid in said non-human organism or in the culture medium surrounding said non-human organism.

[58858] Accordingly, the present invention relates to a process for the production of myristic acid, which comprises
[58859] (a) increasing or generating one or more activities selected from the group consisting of 2,3-dihydroxyphenylpropionate 1,2-dioxygenase in a non-human organism or a part thereof, preferably a microorganism, a plant cell, a plant or a part thereof, as compared to a corresponding non-transformed wild type non-human organism or a part thereof; and
[58860] (b) growing the non-human organism or a part thereof under conditions which permit the production of myristic acid or a composition comprising myristic acid in said non-human organism or in the culture medium surrounding said non-human organism.

[58861] Accordingly, the present invention relates to a process for the production of oleic acid, which comprises
[58862] (a) increasing or generating one or more activities selected from the group consisting of 2,3-dihydroxyphenylpropionate 1,2-dioxygenase in a non-human organism or a part thereof, preferably a microorganism, a plant cell, a plant or a part thereof, as compared to a corresponding non-transformed wild type non-human organism or a part thereof; and
[58863] (b) growing the non-human organism or a part thereof under conditions which permit the production of oleic acid or a composition comprising oleic acid in said non-human organism or in the culture medium surrounding said non-human organism.

[58864] Accordingly, the present invention relates to a process for the production of hexadecatrienoic acid, which comprises
[58865] (a) increasing or generating one or more activities selected from the group consisting of b0371-protein in a non-human organism or a part thereof, preferably a microorganism, a plant cell, a plant or a part thereof, as compared to a corresponding non-transformed wild type non-human organism or a part thereof; and
[58866] (b) growing the non-human organism or a part thereof under conditions which permit the production of hexadecatrienoic acid or a composition comprising hexadecatrienoic acid in said non-human organism or in the culture medium surrounding said non-human organism.

[58867] Accordingly, the present invention relates to a process for the production of cerebronic acid, which comprises
[58868] (a) increasing or generating one or more activities selected from the group consisting of ATP-binding component of a transport system in a non-human organism or a part thereof, preferably a microorganism, a plant cell, a plant or a part thereof, as compared to a corresponding non-transformed wild type non-human organism or a part thereof; and
[58869] (b) growing the non-human organism or a part thereof under conditions which permit the production of cerebronic acid or a composition comprising cerebronic acid in said non-human organism or in the culture medium surrounding said non-human organism.

[58870] Accordingly, the present invention relates to a process for the production of 2-hydroxybehenic acid, which comprises
[58871] (a) increasing or generating one or more activities selected from the group consisting of ATP-binding component of a transport system in a non-human organism or a part thereof, preferably a microorganism, a plant cell, a plant or a part thereof, as compared to a corresponding non-transformed wild type non-human organism or a part thereof; and
[58872] (b) growing the non-human organism or a part thereof under conditions which permit the production of 2-hydroxybehenic acid or a composition comprising 2-hydroxybehenic acid in said non-human organism or in the culture medium surrounding said non-human organism.

[58873] Accordingly, the present invention relates to a process for the production of 2-hydroxypalmitic acid, which comprises
[58874] (a) increasing or generating one or more activities selected from the group consisting of ATP-binding component of a transport system in a non-human organism or a part thereof, preferably a microorganism, a plant cell, a plant or a part thereof, as compared to a corresponding non-transformed wild type non-human organism or a part thereof; and
[58875] (b) growing the non-human organism or a part thereof under conditions which permit the production of 2-hydroxypalmitic acid or a composition comprising 2-hydroxypalmitic acid in said non-human organism or in the culture medium surrounding said non-human organism.

[58876] Accordingly, the present invention relates to a process for the production of hexadecadienoic acid, which comprises
[58877] (a) increasing or generating one or more activities selected from the group consisting of b0518-protein in a non-human organism or a part thereof, preferably a microorganism, a plant cell, a plant or a part thereof, as compared to a corresponding non-transformed wild type non-human organism or a part thereof; and
[58878] (b) growing the non-human organism or a part thereof under conditions which permit the production of hexadecadienoic acid or a composition comprising hexadecadienoic acid in said non-human organism or in the culture medium surrounding said non-human organism.

[58879] Accordingly, the present invention relates to a process for the production of 2-hydroxybehenic acid, which comprises
[58880] (a) increasing or generating one or more activities selected from the group consisting of sensor histidine kinase in a non-human organism or a part thereof, preferably a microorganism, a plant cell, a plant or a part thereof, as compared to a corresponding non-transformed wild type non-human organism or a part thereof; and
[58881] (b) growing the non-human organism or a part thereof under conditions which permit the production of 2-hydroxybehenic acid or a composition comprising 2-hydroxybehenic acid in said non-human organism or in the culture medium surrounding said non-human organism.

[58882] Accordingly, the present invention relates to a process for the production of 2-hydroxytetracosenoic acid (preferably 2-hydroxynervonic acid), which comprises
[58883] (a) increasing or generating one or more activities selected from the group consisting of sensor histidine kinase in a non-human organism or a part thereof, preferably a microorganism, a plant cell, a plant or a part thereof, as compared to a corresponding non-transformed wild type non-human organism or a part thereof; and
[58884] (b) growing the non-human organism or a part thereof under conditions which permit the production of 2-hydroxytetracosenoic acid (preferably 2-hydroxynervonic acid) or a composition comprising 2-hydroxytetracosenoic acid (preferably 2-hydroxynervonic acid) in said non-human organism or in the culture medium surrounding said non-human Accord ivp,iAhre present invention relates to a process for the production of cerebronic acid, which comprises
[58885] (a) increasing or generating one or more activities selected from the group consisting of citrate synthase in a non-human organism or a part thereof, preferably a microorganism, a plant cell, a plant or a part thereof, as compared to a corresponding non-transformed wild type non-human organism or a part thereof; and
[58886] (b) growing the non-human organism or a part thereof under conditions which permit the production of cerebronic acid or a composition comprising cerebronic acid in said non-human organism or in the culture medium surrounding said non-human organism.

[58887] Accordingly, the present invention relates to a process for the production of 2-hydroxytetracosenoic acid (preferably 2-hydroxynervonic acid), which comprises
[58888] (a) increasing or generating one or more activities selected from the group consisting of b0801-protein in a non-human organism or a part thereof, preferably a microorganism, a plant cell, a plant or a part thereof, as compared to a corresponding non-transformed wild type non-human organism or a part thereof; and
[58889] (b) growing the non-human organism or a part thereof under conditions which permit the production of 2-hydroxytetracosenoic acid (preferably 2-hydroxynervonic acid) or a composition comprising 2-hydroxytetracosenoic acid (preferably 2-hydroxynervonic acid) in said non-human organism or in the culture medium surrounding said non-human Accordirgjip,iAhre present invention relates to a process for the production of cerebronic acid, which comprises
[58890] (a) increasing or generating one or more activities selected from the group consisting of b1046-protein in a non-human organism or a part thereof, preferably a microorganism, a plant cell, a plant or a part thereof, as compared to a corresponding non-transformed wild type non-human organism or a part thereof; and
[58891] (b) growing the non-human organism or a part thereof under conditions which permit the production of cerebronic acid or a composition comprising cerebronic acid in said non-human organism or in the culture medium surrounding said non-human organism.

[58892] Accordingly, the present invention relates to a process for the production of hexadecatrienoic acid, which comprises
[58893] (a) increasing or generating one or more activities selected from the group consisting of malonyl CoA-acyl carrier protein transacylase in a non-human organism or a part thereof, preferably a microorganism, a plant cell, a plant or a part thereof, as compared to a corresponding non-transformed wild type non-human organism or a part thereof; and
[58894] (b) growing the non-human organism or a part thereof under conditions which permit the production of hexadecatrienoic acid or a composition comprising hexadecatrienoic acid in said non-human organism or in the culture medium surrounding said non-human organism.

[58895] Accordingly, the present invention relates to a process for the production of hexadecadienoic acid, which comprises
[58896] (a) increasing or generating one or more activities selected from the group consisting of 3-oxoacyl-[acyl-carrier-protein] reductase in a non-human organism or a part thereof, preferably a microorganism, a plant cell, a plant or a part thereof, as compared to a corresponding non-transformed wild type non-human organism or a part thereof; and
[58897] (b) growing the non-human organism or a part thereof under conditions which permit the production of hexadecadienoic acid or a composition comprising hexadecadienoic acid in said non-human organism or in the culture medium surrounding said non-human organism.

[58898] Accordingly, the present invention relates to a process for the production of hexadecatrienoic acid, which comprises
[58899] (a) increasing or generating one or more activities selected from the group consisting of 3-oxoacyl-[acyl-carrier-protein] reductase in a non-human organism or a part thereof, preferably a microorganism, a plant cell, a plant or a part thereof, as compared to a corresponding non-transformed wild type non-human organism or a part thereof; and
[58900] (b) growing the non-human organism or a part thereof under conditions which permit the production of hexadecatrienoic acid or a composition comprising hexadecatrienoic acid in said non-human organism or in the culture medium surrounding said non-human organism.

[58901] Accordingly, the present invention relates to a process for the production of hexadecatrienoic acid, which comprises
[58902] (a) increasing or generating one or more activities selected from the group consisting of 3-oxoacyl-[acyl-carrier-protein] synthase in a non-human organism or a part thereof, preferably a microorganism, a plant cell, a plant or a part thereof, as compared to a corresponding non-transformed wild type non-human organism or a part thereof; and
[58903] (b) growing the non-human organism or a part thereof under conditions which permit the production of hexadecatrienoic acid or a composition comprising hexadecatrienoic acid in said non-human organism or in the culture medium surrounding said non-human organism.

[58904] Accordingly, the present invention relates to a process for the production of 2-hydroxybehenic acid, which comprises
[58905] (a) increasing or generating one or more activities selected from the group consisting of 3-oxoacyl-[acyl-carrier-protein] synthase in a non-human organism or a part thereof, preferably a microorganism, a plant cell, a plant or a part thereof, as compared to a corresponding non-transformed wild type non-human organism or a part thereof; and
[58906] (b) growing the non-human organism or a part thereof under conditions which permit the production of 2-hydroxybehenic acid or a composition comprising 2-hydroxybehenic acid in said non-human organism or in the culture medium surrounding said non-human organism.

[58907] Accordingly, the present invention relates to a process for the production of oleic acid, which comprises
[58908] (a) increasing or generating one or more activities selected from the group consisting of sodium/proton antiporter in a non-human organism or a part thereof, preferably a microorganism, a plant cell, a plant or a part thereof, as compared to a corresponding non-transformed wild type non-human organism or a part thereof; and
[58909] (b) growing the non-human organism or a part thereof under conditions which permit the production of oleic acid or a composition comprising oleic acid in said non-human organism or in the culture medium surrounding said non-human organism.

[58910] Accordingly, the present invention relates to a process for the production of 2-hydroxypalmitic acid, which comprises
[58911] (a) increasing or generating one or more activities selected from the group consisting of sodium/proton antiporter in a non-human organism or a part thereof, preferably a microorganism, a plant cell, a plant or a part thereof, as compared to a corresponding non-transformed wild type non-human organism or a part thereof; and
[58912] (b) growing the non-human organism or a part thereof under conditions which permit the production of 2-hydroxypalmitic acid or a composition comprising 2-hydroxypalmitic acid in said non-human organism or in the culture medium surrounding said non-human organism.

[58913] Accordingly, the present invention relates to a process for the production of behenic acid, which comprises
[58914] (a) increasing or generating one or more activities selected from the group consisting of outer-membrane lipoprotein precursor in a non-human organism or a part thereof, preferably a microorganism, a plant cell, a plant or a part thereof, as compared to a corresponding non-transformed wild type non-human organism or a part thereof; and
[58915] (b) growing the non-human organism or a part thereof under conditions which permit the production of behenic acid or a composition comprising behenic acid in said non-human organism or in the culture medium surrounding said non-human organism.

[58916] Accordingly, the present invention relates to a process for the production of behenic acid, which comprises
[58917] (a) increasing or generating one or more activities selected from the group consisting of cardiolipin synthase in a non-human organism or a part thereof, preferably a microorganism, a plant cell, a plant or a part thereof, as compared to a corresponding non-transformed wild type non-human organism or a part thereof; and
[58918] (b) growing the non-human organism or a part thereof under conditions which permit the production of behenic acid or a composition comprising behenic acid in said non-human organism or in the culture medium surrounding said non-human organism.

[58919] Accordingly, the present invention relates to a process for the production of heptadecanoic acid, which comprises
[58920] (a) increasing or generating one or more activities selected from the group consisting of cardiolipin synthase in a non-human organism or a part thereof, preferably a microorganism, a plant cell, a plant or a part thereof, as compared to a corresponding non-transformed wild type non-human organism or a part thereof; and
[58921] (b) growing the non-human organism or a part thereof under conditions which permit the production of heptadecanoic acid or a composition comprising heptadecanoic acid in said non-human organism or in the culture medium surrounding said non-human organism.

[58922] Accordingly, the present invention relates to a process for the production of hexadecatrienoic acid, which comprises
[58923] (a) increasing or generating one or more activities selected from the group consisting of b1346-protein in a non-human organism or a part thereof, preferably a microorganism, a plant cell, a plant or a part thereof, as compared to a corresponding non-transformed wild type non-human organism or a part thereof; and
[58924] (b) growing the non-human organism or a part thereof under conditions which permit the production of hexadecatrienoic acid or a composition comprising hexadecatrienoic acid in said non-human organism or in the culture medium surrounding said non-human organism.

[58925] Accordingly, the present invention relates to a process for the production of lauric acid, which comprises
[58926] (a) increasing or generating one or more activities selected from the group consisting of phage-related repressor protein in a non-human organism or a part thereof, preferably a microorganism, a plant cell, a plant or a part thereof, as compared to a corresponding non-transformed wild type non-human organism or a part thereof; and
[58927] (b) growing the non-human organism or a part thereof under conditions which permit the production of lauric acid or a composition comprising lauric acid in said non-human organism or in the culture medium surrounding said non-human organism.

[58928] Accordingly, the present invention relates to a process for the production of 2-hydroxytetracosenoic acid (preferably 2-hydroxynervonic acid), which comprises
[58929] (a) increasing or generating one or more activities selected from the group consisting of lipoprotein precursor in a non-human organism or a part thereof, preferably a microorganism, a plant cell, a plant or a part thereof, as compared to a corresponding non-transformed wild type non-human organism or a part thereof; and
[58930] (b) growing the non-human organism or a part thereof under conditions which permit the production of 2-hydroxytetracosenoic acid (preferably 2-hydroxynervonic acid) or a composition comprising 2-hydroxytetracosenoic acid (preferably 2-hydroxynervonic acid) in said non-human organism or in the culture medium surrounding said non-human organism.

[58931] Accordingly, the present invention relates to a process for the production of hexadecatrienoic acid, which comprises
[58932] (a) increasing or generating one or more activities selected from the group consisting of b1470-protein in a non-human organism or a part thereof, preferably a microorganism, a plant cell, a plant or a part thereof, as compared to a corresponding non-transformed wild type non-human organism or a part thereof; and
[58933] (b) growing the non-human organism or a part thereof under conditions which permit the production of hexadecatrienoic acid or a composition comprising hexadecatrienoic acid in said non-human organism or in the culture medium surrounding said non-human organism.

[58934] Accordingly, the present invention relates to a process for the production of hexadecatrienoic acid, which comprises
[58935] (a) increasing or generating one or more activities selected from the group consisting of NADP-dependent malic enzyme in a non-human organism or a part thereof, preferably a microorganism, a plant cell, a plant or a part thereof, as compared to a corresponding non-transformed wild type non-human organism or a part thereof; and
[58936] (b) growing the non-human organism or a part thereof under conditions which permit the production of hexadecatrienoic acid or a composition comprising hexadecatrienoic acid in said non-human organism or in the culture medium surrounding said non-human organism.

[58937] Accordingly, the present invention relates to a process for the production of 2-hydroxybehenic acid, which comprises
[58938] (a) increasing or generating one or more activities selected from the group consisting of b1522-protein in a non-human organism or a part thereof, preferably a microorganism, a plant cell, a plant or a part thereof, as compared to a corresponding non-transformed wild type non-human organism or a part thereof; and
[58939] (b) growing the non-human organism or a part thereof under conditions which permit the production of 2-hydroxybehenic acid or a composition comprising 2-hydroxybehenic acid in said non-human organism or in the culture medium surrounding said non-human organism.

[58940] Accordingly, the present invention relates to a process for the production of hexadecatrienoic acid, which comprises
[58941] (a) increasing or generating one or more activities selected from the group consisting of acid shock protein in a non-human organism or a part thereof, preferably a microorganism, a plant cell, a plant or a part thereof, as compared to a corresponding non-transformed wild type non-human organism or a part thereof; and
[58942] (b) growing the non-human organism or a part thereof under conditions which permit the production of hexadecatrienoic acid or a composition comprising hexadecatrienoic acid in said non-human organism or in the culture medium surrounding said non-human organism.

[58943] Accordingly, the present invention relates to a process for the production of 2-hydroxytetracosenoic acid (preferably 2-hydroxynervonic acid), which comprises
[58944] (a) increasing or generating one or more activities selected from the group consisting of transport protein in a non-human organism or a part thereof, preferably a microorganism, a plant cell, a plant or a part thereof, as compared to a corresponding non-transformed wild type non-human organism or a part thereof; and
[58945] (b) growing the non-human organism or a part thereof under conditions which permit the production of 2-hydroxytetracosenoic acid (preferably 2-hydroxynervonic acid) or a composition comprising 2-hydroxytetracosenoic acid (preferably 2-hydroxynervonic acid) in said non-human organism or in the culture medium surrounding said non-human organism.

[58946] Accordingly, the present invention relates to a process for the production of 2-hydroxytetracosenoic acid (preferably 2-hydroxynervonic acid), which comprises
[58947] (a) increasing or generating one or more activities selected from the group consisting of phosphotransferase system component in a non-human organism or a part thereof, preferably a microorganism, a plant cell, a plant or a part thereof, as compared to a corresponding non-transformed wild type non-human organism or a part thereof; and
[58948] (b) growing the non-human organism or a part thereof under conditions which permit the production of 2-hydroxytetracosenoic acid (preferably 2-hydroxynervonic acid) or a composition comprising 2-hydroxytetracosenoic acid (preferably 2-hydroxynervonic acid) in said non-human organism or in the culture medium surrounding said non-human organism.

[58949] Accordingly, the present invention relates to a process for the production of 2-hydroxybehenic acid, which comprises
[58950] (a) increasing or generating one or more activities selected from the group consisting of electron transport complex protein in a non-human organism or a part thereof, preferably a microorganism, a plant cell, a plant or a part thereof, as compared to a corresponding non-transformed wild type non-human organism or a part thereof; and
[58951] (b) growing the non-human organism or a part thereof under conditions which permit the production of 2-hydroxybehenic acid or a composition comprising 2-hydroxybehenic acid in said non-human organism or in the culture medium surrounding said non-human organism.

[58952] Accordingly, the present invention relates to a process for the production of hexadecatrienoic acid, which comprises
[58953] (a) increasing or generating one or more activities selected from the group consisting of pyridoxamine kinase in a non-human organism or a part thereof, preferably a microorganism, a plant cell, a plant or a part thereof, as compared to a corresponding non-transformed wild type non-human organism or a part thereof; and
[58954] (b) growing the non-human organism or a part thereof under conditions which permit the production of hexadecatrienoic acid or a composition comprising hexadecatrienoic acid in said non-human organism or in the culture medium surrounding said non-human organism.

[58955] Accordingly, the present invention relates to a process for the production of 2-hydroxytetracosenoic acid (preferably 2-hydroxynervonic acid), which comprises
[58956] (a) increasing or generating one or more activities selected from the group consisting of b1670-protein in a non-human organism or a part thereof, preferably a microorganism, a plant cell, a plant or a part thereof, as compared to a corresponding non-transformed wild type non-human organism or a part thereof; and
[58957] (b) growing the non-human organism or a part thereof under conditions which permit the production of 2-hydroxytetracosenoic acid (preferably 2-hydroxynervonic acid) or a composition comprising 2-hydroxytetracosenoic acid (preferably 2-hydroxynervonic acid) in said non-human organism or in the culture medium surrounding said non-human organism.

[58958] Accordingly, tre present invention relates to a process for the production of hexadecadienoic acid, which comprises
[58959] (a) increasing or generating one or more activities selected from the group consisting of b1703-protein in a non-human organism or a part thereof, preferably a microorganism, a plant cell, a plant or a part thereof, as compared to a corresponding non-transformed wild type non-human organism or a part thereof; and
[58960] (b) growing the non-human organism or a part thereof under conditions which permit the production of hexadecadienoic acid or a composition comprising hexadecadienoic acid in said non-human organism or in the culture medium surrounding said non-human organism.

[58961] Accordingly, the present invention relates to a process for the production of hexadecatrienoic acid, which comprises
[58962] (a) increasing or generating one or more activities selected from the group consisting of b1703-protein in a non-human organism or a part thereof, preferably a microorganism, a plant cell, a plant or a part thereof, as compared to a corresponding non-transformed wild type non-human organism or a part thereof; and
[58963] (b) growing the non-human organism or a part thereof under conditions which permit the production of hexadecatrienoic acid or a composition comprising hexadecatrienoic acid in said non-human organism or in the culture medium surrounding said non-human organism.

[58964] Accordingly, the present invention relates to a process for the production of hexadecadienoic acid, which comprises
[58965] (a) increasing or generating one or more activities selected from the group consisting of transport protein in a non-human organism or a part thereof, preferably a microorganism, a plant cell, a plant or a part thereof, as compared to a corresponding non-transformed wild type non-human organism or a part thereof; and
[58966] (b) growing the non-human organism or a part thereof under conditions which permit the production of hexadecadienoic acid or a composition comprising hexadecadienoic acid in said non-human organism or in the culture medium surrounding said non-human organism.

[58967] Accordingly, the present invention relates to a process for the production of hexadecadienoic acid, which comprises
[58968] (a) increasing or generating one or more activities selected from the group consisting of b1837-protein in a non-human organism or a part thereof, preferably a microorganism, a plant cell, a plant or a part thereof, as compared to a corresponding non-transformed wild type non-human organism or a part thereof; and
[58969] (b) growing the non-human organism or a part thereof under conditions which permit the production of hexadecadienoic acid or a composition comprising hexadecadienoic acid in said non-human organism or in the culture medium surrounding said non-human organism.

[58970] Accordingly, the present invention relates to a process for the production of hexadecatrienoic acid, which comprises
[58971] (a) increasing or generating one or more activities selected from the group consisting of b1837-protein in a non-human organism or a part thereof, preferably a microorganism, a plant cell, a plant or a part thereof, as compared to a corresponding non-transformed wild type non-human organism or a part thereof; and
[58972] (b) growing the non-human organism or a part thereof under conditions which permit the production of hexadecatrienoic acid or a composition comprising hexadecatrienoic acid in said non-human organism or in the culture medium surrounding said non-human organism.

[58973] Accordingly, the present invention relates to a process for the production of hexadecadienoic acid, which comprises
[58974] (a) increasing or generating one or more activities selected from the group consisting of b2032-protein in a non-human organism or a part thereof, preferably a microorganism, a plant cell, a plant or a part thereof, as compared to a corresponding non-transformed wild type non-human organism or a part thereof; and
[58975] (b) growing the non-human organism or a part thereof under conditions which permit the production of hexadecadienoic acid or a composition comprising hexadecadienoic acid in said non-human organism or in the culture medium surrounding said non-human organism.

[58976] Accordingly, the present invention relates to a process for the production of hexadecadienoic acid, which comprises
[58977] (a) increasing or generating one or more activities selected from the group consisting of b2099-protein in a non-human organism or a part thereof, preferably a microorganism, a plant cell, a plant or a part thereof, as compared to a corresponding non-transformed wild type non-human organism or a part thereof; and
[58978] (b) growing the non-human organism or a part thereof under conditions which permit the production of hexadecadienoic acid or a composition comprising hexadecadienoic acid in said non-human organism or in the culture medium surrounding said non-human organism.

[58979] Accordingly, the present invention relates to a process for the production of hexadecatrienoic acid, which comprises
[58980] (a) increasing or generating one or more activities selected from the group consisting of b2099-protein in a non-human organism or a part thereof, preferably a microorganism, a plant cell, a plant or a part thereof, as compared to a corresponding non-transformed wild type non-human organism or a part thereof; and
[58981] (b) growing the non-human organism or a part thereof under conditions which permit the production of hexadecatrienoic acid or a composition comprising hexadecatrienoic acid in said non-human organism or in the culture medium surrounding said non-human organism.

[58982] Accordingly, the present invention relates to a process for the production of 2-hydroxytetracosenoic acid (preferably 2-hydroxynervonic acid), which comprises
[58983] (a) increasing or generating one or more activities selected from the group consisting of b2107-protein in a non-human organism or a part thereof, preferably a microorganism, a plant cell, a plant or a part thereof, as compared to a corresponding non-transformed wild type non-human organism or a part thereof; and
[58984] (b) growing the non-human organism or a part thereof under conditions which permit the production of 2-hydroxytetracosenoic acid (preferably 2-hydroxynervonic acid) or a composition comprising 2-hydroxytetracosenoic acid (preferably 2-hydroxynervonic acid) in said non-human organism or in the culture medium surrounding said non-human organism.

[58985] Accordingly, the present invention relates to a process for the production of lauric acid, which comprises
[58986] (a) increasing or generating one or more activities selected from the group consisting of b2126-protein in a non-human organism or a part thereof, preferably a microorganism, a plant cell, a plant or a part thereof, as compared to a corresponding non-transformed wild type non-human organism or a part thereof; and
[58987] (b) growing the non-human organism or a part thereof under conditions which permit the production of lauric acid or a composition comprising lauric acid in said non-human organism or in the culture medium surrounding said non-human organism.

[58988] Accordingly, the present invention relates to a process for the production of 2-hydroxypalmitic acid, which comprises
[58989] (a) increasing or generating one or more activities selected from the group consisting of b2139-protein in a non-human organism or a part thereof, preferably a microorganism, a plant cell, a plant or a part thereof, as compared to a corresponding non-transformed wild type non-human organism or a part thereof; and
[58990] (b) growing the non-human organism or a part thereof under conditions which permit the production of 2-hydroxypalmitic acid or a composition comprising 2-hydroxypalmitic acid in said non-human organism or in the culture medium surrounding said non-human organism.

[58991] Accordingly, the present invention relates to a process for the production of hexadecatrienoic acid, which comprises
[58992] (a) increasing or generating one or more activities selected from the group consisting of ABC transporter permease protein in a non-human organism or a part thereof, preferably a microorganism, a plant cell, a plant or a part thereof, as compared to a corresponding non-transformed wild type non-human organism or a part thereof; and
[58993] (b) growing the non-human organism or a part thereof under conditions which permit the production of hexadecatrienoic acid or a composition comprising hexadecatrienoic acid in said non-human organism or in the culture medium surrounding said non-human organism.

[58994] Accordingly, the present invention relates to a process for the production of 2-hydroxybehenic acid, which comprises
[58995] (a) increasing or generating one or more activities selected from the group consisting of sensor kinase in a non-human organism or a part thereof, preferably a microorganism, a plant cell, a plant or a part thereof, as compared to a corresponding non-transformed wild type non-human organism or a part thereof; and
[58996] (b) growing the non-human organism or a part thereof under conditions which permit the production of 2-hydroxybehenic acid or a composition comprising 2-hydroxybehenic acid in said non-human organism or in the culture medium surrounding said non-human organism.

[58997] Accordingly, the present invention relates to a process for the production of 2-hydroxytetracosenoic acid (preferably 2-hydroxynervonic acid), which comprises
[58998] (a) increasing or generating one or more activities selected from the group consisting of b2360-protein in a non-human organism or a part thereof, preferably a microorganism, a plant cell, a plant or a part thereof, as compared to a corresponding non-transformed wild type non-human organism or a part thereof; and
[58999] (b) growing the non-human organism or a part thereof under conditions which permit the production of 2-hydroxytetracosenoic acid (preferably 2-hydroxynervonic acid) or a composition comprising 2-hydroxytetracosenoic acid (preferably 2-hydroxynervonic acid) in said non-human organism or in the culture medium surrounding said non-human organism.

[59000] Accordingly, the present invention relates to a process for the production of 2-hydroxytetracosenoic acid (preferably 2-hydroxynervonic acid), which comprises
[59001] (a) increasing or generating one or more activities selected from the group consisting of cysteine synthase A in a non-human organism or a part thereof, preferably a microorganism, a plant cell, a plant or a part thereof, as compared to a corresponding non-transformed wild type non-human organism or a part thereof; and
[59002] (b) growing the non-human organism or a part thereof under conditions which permit the production of 2-hydroxytetracosenoic acid (preferably 2-hydroxynervonic acid) or a composition comprising 2-hydroxytetracosenoic acid (preferably 2-hydroxynervonic acid) in said non-human organism or in the culture medium surrounding said non-human organism.

[59003] Accordingly, the present invention relates to a process for the production of hexadecadienoic acid, which comprises
[59004] (a) increasing or generating one or more activities selected from the group consisting of ethanolamine utilization protein in a non-human organism or a part thereof, preferably a microorganism, a plant cell, a plant or a part thereof, as compared to a corresponding non-transformed wild type non-human organism or a part thereof; and
[59005] (b) growing the non-human organism or a part thereof under conditions which permit the production of hexadecadienoic acid or a composition comprising hexadecadienoic acid in said non-human organism or in the culture medium surrounding said non-human organism.

[59006] Accordingly, the present invention relates to a process for the production of hexadecatrienoic acid, which comprises
[59007] (a) increasing or generating one or more activities selected from the group consisting of ethanolamine utilization protein in a non-human organism or a part thereof, preferably a microorganism, a plant cell, a plant or a part thereof, as compared to a corresponding non-transformed wild type non-human organism or a part thereof; and
[59008] (b) growing the non-human organism or a part thereof under conditions which permit the production of hexadecatrienoic acid or a composition comprising hexadecatrienoic acid in said non-human organism or in the culture medium surrounding said non-human organism.

[59009] Accordingly, the present invention relates to a process for the production of oleic acid, which comprises
[59010] (a) increasing or generating one or more activities selected from the group consisting of ethanolamine utilization protein in a non-human organism or a part thereof, preferably a microorganism, a plant cell, a plant or a part thereof, as compared to a corresponding non-transformed wild type non-human organism or a part thereof; and
[59011] (b) growing the non-human organism or a part thereof under conditions which permit the production of oleic acid or a composition comprising oleic acid in said non-human organism or in the culture medium surrounding said non-human organism.

[59012] Accordingly, the present invention relates to a process for the production of cerebronic acid, which comprises
[59013] (a) increasing or generating one or more activities selected from the group consisting of b2474-protein in a non-human organism or a part thereof, preferably a microorganism, a plant cell, a plant or a part thereof, as compared to a corresponding non-transformed wild type non-human organism or a part thereof; and
[59014] (b) growing the non-human organism or a part thereof under conditions which permit the production of cerebronic acid or a composition comprising cerebronic acid in said non-human organism or in the culture medium surrounding said non-human organism.

[59015] Accordingly, the present invention relates to a process for the production of hexadecatrienoic acid, which comprises
[59016] (a) increasing or generating one or more activities selected from the group consisting of b2474-protein in a non-human organism or a part thereof, preferably a microorganism, a plant cell, a plant or a part thereof, as compared to a corresponding non-transformed wild type non-human organism or a part thereof; and
[59017] (b) growing the non-human organism or a part thereof under conditions which permit the production of hexadecatrienoic acid or a composition comprising hexadecatrienoic acid in said non-human organism or in the culture medium surrounding said non-human organism.

[59018] Accordingly, the present invention relates to a process for the production of 2-hydroxytetracosenoic acid (preferably 2-hydroxynervonic acid), which comprises
[59019] (a) increasing or generating one or more activities selected from the group consisting of b2474-protein in a non-human organism or a part thereof, preferably a microorganism, a plant cell, a plant or a part thereof, as compared to a corresponding non-transformed wild type non-human organism or a part thereof; and
[59020] (b) growing the non-human organism or a part thereof under conditions which permit the production of 2-hydroxytetracosenoic acid (preferably 2-hydroxynervonic acid) or a composition comprising 2-hydroxytetracosenoic acid (preferably 2-hydroxynervonic acid) in said non-human organism or in the culture medium surrounding said non-human

[59021] Accord ivp,iAhre present invention relates to a process for the production of hexadecadienoic acid, which comprises
[59022] (a) increasing or generating one or more activities selected from the group consisting of b2513-protein in a non-human organism or a part thereof, preferably a microorganism, a plant cell, a plant or a part thereof, as compared to a corresponding non-transformed wild type non-human organism or a part thereof; and
[59023] (b) growing the non-human organism or a part thereof under conditions which permit the production of hexadecadienoic acid or a composition comprising hexadecadienoic acid in said non-human organism or in the culture medium surrounding said non-human organism.

[59024] Accordingly, the present invention relates to a process for the production of hexadecadienoic acid, which comprises
[59025] (a) increasing or generating one or more activities selected from the group consisting of phosphatidylserine synthase in a non-human organism or a part thereof, preferably a microorganism, a plant cell, a plant or a part thereof, as compared to a corresponding non-transformed wild type non-human organism or a part thereof; and
[59026] (b) growing the non-human organism or a part thereof under conditions which permit the production of hexadecadienoic acid or a composition comprising hexadecadienoic acid in said non-human organism or in the culture medium surrounding said non-human organism.

[59027] Accordingly, the present invention relates to a process for the production of 2-hydroxytetracosenoic acid (preferably 2-hydroxynervonic acid), which comprises
[59028] (a) increasing or generating one or more activities selected from the group consisting of b2654-protein in a non-human organism or a part thereof, preferably a microorganism, a plant cell, a plant or a part thereof, as compared to a corresponding non-transformed wild type non-human organism or a part thereof; and
[59029] (b) growing the non-human organism or a part thereof under conditions which permit the production of 2-hydroxytetracosenoic acid (preferably 2-hydroxynervonic acid) or a composition comprising 2-hydroxytetracosenoic acid (preferably 2-hydroxynervonic acid) in said non-human organism or in the culture medium surrounding said non-human organism.

[59030] Accordingly, the present invention relates to a process for the production of hexadecatrienoic acid, which comprises
[59031] (a) increasing or generating one or more activities selected from the group consisting of 2-C-methyl-D-erythritol 4-phosphate cytidylyltransferase in a non-human organism or a part thereof, preferably a microorganism, a plant cell, a plant or a part thereof, as compared to a corresponding non-transformed wild type non-human organism or a part thereof; and
[59032] (b) growing the non-human organism or a part thereof under conditions which permit the production of hexadecatrienoic acid or a composition comprising hexadecatrienoic acid in said non-human organism or in the culture medium surrounding said non-human organism.

[59033] Accordingly, the present invention relates to a process for the production of eicosanoic acid, which comprises
[59034] (a) increasing or generating one or more activities selected from the group consisting of alkaline phosphatase isozyme conversion protein in a non-human organism or a part thereof, preferably a microorganism, a plant cell, a plant or a part thereof, as compared to a corresponding non-transformed wild type non-human organism or a part thereof; and
[59035] (b) growing the non-human organism or a part thereof under conditions which permit the production of eicosanoic acid or a composition comprising eicosanoic acid in said non-human organism or in the culture medium surrounding said non-human organism.

[59036] Accordingly, the present invention relates to a process for the production of 2-hydroxytetracosenoic acid (preferably 2-hydroxynervonic acid), which comprises
[59037] (a) increasing or generating one or more activities selected from the group consisting of murein transglycosylase in a non-human organism or a part thereof, preferably a microorganism, a plant cell, a plant or a part thereof, as compared to a corresponding non-transformed wild type non-human organism or a part thereof; and
[59038] (b) growing the non-human organism or a part thereof under conditions which permit the production of 2-hydroxytetracosenoic acid (preferably 2-hydroxynervonic acid) or a composition comprising 2-hydroxytetracosenoic acid (preferably 2-hydroxynervonic acid) in said non-human organism or in the culture medium surrounding said non-human organism.

[59039] Accordingly, the present invention relates to a process for the production of hexadecadienoic acid, which comprises
[59040] (a) increasing or generating one or more activities selected from the group consisting of b3442-protein in a non-human organism or a part thereof, preferably a microorganism, a plant cell, a plant or a part thereof, as compared to a corresponding non-transformed wild type non-human organism or a part thereof; and
[59041] (b) growing the non-human organism or a part thereof under conditions which permit the production of hexadecadienoic acid or a composition comprising hexadecadienoic acid in said non-human organism or in the culture medium surrounding said non-human organism.

[59042] Accordingly, the present invention relates to a process for the production of cerebronic acid, which comprises
[59043] (a) increasing or generating one or more activities selected from the group consisting of sugar transport system permease protein in a non-human organism or a part thereof, preferably a microorganism, a plant cell, a plant or a part thereof, as compared to a corresponding non-transformed wild type non-human organism or a part thereof; and
[59044] (b) growing the non-human organism or a part thereof under conditions which permit the production of cerebronic acid or a composition comprising cerebronic acid in said non-human organism or in the culture medium surrounding said non-human organism.

[59045] Accordingly, the present invention relates to a process for the production of 2-hydroxybehenic acid, which comprises
[59046] (a) increasing or generating one or more activities selected from the group consisting of b3812-protein in a non-human organism or a part thereof, preferably a microorganism, a plant cell, a plant or a part thereof, as compared to a corresponding non-transformed wild type non-human organism or a part thereof; and
[59047] (b) growing the non-human organism or a part thereof under conditions which permit the production of 2-hydroxybehenic acid or a composition comprising 2-hydroxybehenic acid in said non-human organism or in the culture medium surrounding said non-human organism.

[59048] Accordingly, the present invention relates to a process for the production of hexadecadienoic acid, which comprises
[59049] (a) increasing or generating one or more activities selected from the group consisting of 3-ketoacyl-CoA thiolase in a non-human organism or a part thereof, preferably a microorganism, a plant cell, a plant or a part thereof, as compared to a corresponding non-transformed wild type non-human organism or a part thereof; and
[59050] (b) growing the non-human organism or a part thereof under conditions which permit the production of hexadecadienoic acid or a composition comprising hexadecadienoic acid in said non-human organism or in the culture medium surrounding said non-human organism.

[59051] Accordingly, the present invention relates to a process for the production of oleic acid, which comprises
[59052] (a) increasing or generating one or more activities selected from the group consisting of 3-ketoacyl-CoA thiolase in a non-human organism or a part thereof, preferably a microorganism, a plant cell, a plant or a part thereof, as compared to a corresponding non-transformed wild type non-human organism or a part thereof; and
[59053] (b) growing the non-human organism or a part thereof under conditions which permit the production of oleic acid or a composition comprising oleic acid in said non-human organism or in the culture medium surrounding said non-human organism.

[59054] Accordingly, the present invention relates to a process for the production of hexadecadienoic acid, which comprises
[59055] (a) increasing or generating one or more activities selected from the group consisting of transcriptional regulator in a non-human organism or a part thereof, preferably a microorganism, a plant cell, a plant or a part thereof, as compared to a corresponding non-transformed wild type non-human organism or a part thereof; and
[59056] (b) growing the non-human organism or a part thereof under conditions which permit the production of hexadecadienoic acid or a composition comprising hexadecadienoic acid in said non-human organism or in the culture medium surrounding said non-human organism.

[59057] Accordingly, the present invention relates to a process for the production of hexadecadienoic acid, which comprises
[59058] (a) increasing or generating one or more activities selected from the group consisting of fructose 1,6-bisphosphatase in a non-human organism or a part thereof, preferably a microorganism, a plant cell, a plant or a part thereof, as compared to a corresponding non-transformed wild type non-human organism or a part thereof; and
[59059] (b) growing the non-human organism or a part thereof under conditions which permit the production of hexadecadienoic acid or a composition comprising hexadecadienoic acid in said non-human organism or in the culture medium surrounding said non-human organism.

[59060] Accordingly, the present invention relates to a process for the production of behenic acid, which comprises
[59061] (a) increasing or generating one or more activities selected from the group consisting of cystathionine gamma-synthase in a non-human organism or a part thereof, preferably a microorganism, a plant cell, a plant or a part thereof, as compared to a corresponding non-transformed wild type non-human organism or a part thereof; and
[59062] (b) growing the non-human organism or a part thereof under conditions which permit the production of behenic acid or a composition comprising behenic acid in said non-human organism or in the culture medium surrounding said non-human organism.

[59063] Accordingly, the present invention relates to a process for the production of heptadecanoic acid, which comprises
[59064] (a) increasing or generating one or more activities selected from the group consisting of cystathionine gamma-synthase in a non-human organism or a part thereof, preferably a microorganism, a plant cell, a plant or a part thereof, as compared to a corresponding non-transformed wild type non-human organism or a part thereof; and
[59065] (b) growing the non-human organism or a part thereof under conditions which permit the production of heptadecanoic acid or a composition comprising heptadecanoic acid in said non-human organism or in the culture medium surrounding said non-human organism.

[59066] Accordingly, the present invention relates to a process for the production of oleic acid, which comprises
[59067] (a) increasing or generating one or more activities selected from the group consisting of cystathionine gamma-synthase in a non-human organism or a part thereof, preferably a microorganism, a plant cell, a plant or a part thereof, as compared to a corresponding non-transformed wild type non-human organism or a part thereof; and
[59068] (b) growing the non-human organism or a part thereof under conditions which permit the production of oleic acid or a composition comprising oleic acid in said non-human organism or in the culture medium surrounding said non-human organism.

[59069] Accordingly, the present invention relates to a process for the production of 2-hydroxypalmitic acid, which comprises
[59070] (a) increasing or generating one or more activities selected from the group consisting of b3944-protein in a non-human organism or a part thereof, preferably a microorganism, a plant cell, a plant or a part thereof, as compared to a corresponding non-transformed wild type non-human organism or a part thereof; and
[59071] (b) growing the non-human organism or a part thereof under conditions which permit the production of 2-hydroxypalmitic acid or a composition comprising 2-hydroxypalmitic acid in said non-human organism or in the culture medium surrounding said non-human organism.

[59072] Accordingly, the present invention relates to a process for the production of 2-hydroxybehenic acid, which comprises
[59073] (a) increasing or generating one or more activities selected from the group consisting of ankyrin repeat protein in a non-human organism or a part thereof, preferably a microorganism, a plant cell, a plant or a part thereof, as compared to a corresponding non-transformed wild type non-human organism or a part thereof; and
[59074] (b) growing the non-human organism or a part thereof under conditions which permit the production of 2-hydroxybehenic acid or a composition comprising 2-hydroxybehenic acid in said non-human organism or in the culture medium surrounding said non-human organism.

[59075] Accordingly, the present invention relates to a process for the production of hexadecadienoic acid, which comprises
[59076] (a) increasing or generating one or more activities selected from the group consisting of b4023-protein in a non-human organism or a part thereof, preferably a microorganism, a plant cell, a plant or a part thereof, as compared to a corresponding non-transformed wild type non-human organism or a part thereof; and
[59077] (b) growing the non-human organism or a part thereof under conditions which permit the production of hexadecadienoic acid or a composition comprising hexadecadienoic acid in said non-human organism or in the culture medium surrounding said non-human organism.

[59078] Accordingly, the present invention relates to a process for the production of heptadecanoic acid, which comprises
[59079] (a) increasing or generating one or more activities selected from the group consisting of acetyl-coenzyme A synthetase in a non-human organism or a part thereof, preferably a microorganism, a plant cell, a plant or a part thereof, as compared to a corresponding non-transformed wild type non-human organism or a part thereof; and
[59080] (b) growing the non-human organism or a part thereof under conditions which permit the production of heptadecanoic acid or a composition comprising heptadecanoic acid in said non-human organism or in the culture medium surrounding said non-human organism.

[59081] Accordingly, the present invention relates to a process for the production of 2-hydroxypalmitic acid, which comprises
[59082] (a) increasing or generating one or more activities selected from the group consisting of b4205-protein in a non-human organism or a part thereof, preferably a microorganism, a plant cell, a plant or a part thereof, as compared to a corresponding non-transformed wild type non-human organism or a part thereof; and
[59083] (b) growing the non-human organism or a part thereof under conditions which permit the production of 2-hydroxypalmitic acid or a composition comprising 2-hydroxypalmitic acid in said non-human organism or in the culture medium surrounding said non-human organism.

[59084] Accordingly, the present invention relates to a process for the production of 2-hydroxybehenic acid, which comprises
[59085] (a) increasing or generating one or more activities selected from the group consisting of vacuolar processing enzyme in a non-human organism or a part thereof, preferably a microorganism, a plant cell, a plant or a part thereof, as compared to a corresponding non-transformed wild type non-human organism or a part thereof; and
[59086] (b) growing the non-human organism or a part thereof under conditions which permit the production of 2-hydroxybehenic acid or a composition comprising 2-hydroxybehenic acid in said non-human organism or in the culture medium surrounding said non-human organism.

[59087] Accordingly, the present invention relates to a process for the production of 2-hydroxypalmitic acid, which comprises
[59088] (a) increasing or generating one or more activities selected from the group consisting of glutaredoxin in a non-human organism or a part thereof, preferably a microorganism, a plant cell, a plant or a part thereof, as compared to a corresponding non-transformed wild type non-human organism or a part thereof; and
[59089] (b) growing the non-human organism or a part thereof under conditions which permit the production of 2-hydroxypalmitic acid or a composition comprising 2-hydroxypalmitic acid in said non-human organism or in the culture medium surrounding said non-human organism.

[59090] Accordingly, the present invention relates to a process for the production of cerebronic acid, which comprises
[59091] (a) increasing or generating one or more activities selected from the group consisting of transcription factor in a non-human organism or a part thereof, preferably a microorganism, a plant cell, a plant or a part thereof, as compared to a corresponding non-transformed wild type non-human organism or a part thereof; and
[59092] (b) growing the non-human organism or a part thereof under conditions which permit the production of cerebronic acid or a composition comprising cerebronic acid in said non-human organism or in the culture medium surrounding said non-human organism.

[59093] Accordingly, the present invention relates to a process for the production of hexadecatrienoic acid, which comprises P1 (a) increasing or generating one or more activities selected from the group consisting of transcription factor in a non-human organism or a part thereof, preferably a microorganism, a plant cell, a plant or a part thereof, as compared to a corresponding non-transformed wild type non-human organism or a part thereof; and
[59094] (b) growing the non-human organism or a part thereof under conditions which permit the production of hexadecatrienoic acid or a composition comprising hexadecatrienoic acid in said non-human organism or in the culture medium surrounding said non-human organism.

[59095] Accordingly, the present invention relates to a process for the production of 2-hydroxytetracosenoic acid (preferably 2-hydroxynervonic acid), which comprises
[59096] (a) increasing or generating one or more activities selected from the group consisting of GM02LC38418-protein in a non-human organism or a part thereof, preferably a microorganism, a plant cell, a plant or a part thereof, as compared to a corresponding non-transformed wild type non-human organism or a part thereof; and
[59097] (b) growing the non-human organism or a part thereof under conditions which permit the production of 2-hydroxytetracosenoic acid (preferably 2-hydroxynervonic acid) or a composition comprising 2-hydroxytetracosenoic acid (preferably 2-hydroxynervonic acid) in said non-human organism or in the culture medium surrounding said non-human organism.

[59098] Accordingly, the present invention relates to a process for the production of hexadecadienoic acid, which comprises
[59099] (a) increasing or generating one or more activities selected from the group consisting of sll0281-protein in a non-human organism or a part thereof, preferably a microorganism, a plant cell, a plant or a part thereof, as compared to a corresponding non-transformed wild type non-human organism or a part thereof; and
[59100] (b) growing the non-human organism or a part thereof under conditions which permit the production of hexadecadienoic acid or a composition comprising hexadecadienoic acid in said non-human organism or in the culture medium surrounding said non-human organism.

[59101] Accordingly, the present invention relates to a process for the production of 2-hydroxytetracosenoic acid (preferably 2-hydroxynervonic acid), which comprises
[59102] (a) increasing or generating one or more activities selected from the group consisting of bifunctional protein (phosphoribosyltransferase and regulatory protein) in a non-human organism or a part thereof, preferably a microorganism, a plant cell, a plant or a part thereof, as compared to a corresponding non-transformed wild type non-human organism or a part thereof; and
[59103] (b) growing the non-human organism or a part thereof under conditions which permit the production of 2-hydroxytetracosenoic acid (preferably 2-hydroxynervonic acid) or a composition comprising 2-hydroxytetracosenoic acid (preferably 2-hydroxynervonic acid) in said non-human organism or in the culture medium surrounding said non-human organism.

[59104] Accordingly, the present invention relates to a process for the production of 2-hydroxytetracosenoic acid (preferably 2-hydroxynervonic acid), which comprises
[59105] (a) increasing or generating one or more activities selected from the group consisting of sll0406-protein in a non-human organism or a part thereof, preferably a microorganism, a plant cell, a plant or a part thereof, as compared to a corresponding non-transformed wild type non-human organism or a part thereof; and
[59106] (b) growing the non-human organism or a part thereof under conditions which permit the production of 2-hydroxytetracosenoic acid (preferably 2-hydroxynervonic acid) or a composition comprising 2-hydroxytetracosenoic acid (preferably 2-hydroxynervonic acid) in said non-human organism or in the culture medium surrounding said non-human organism.

[59107] Accordingly, the present invention relates to a process for the production of cerebronic acid, which comprises
[59108] (a) increasing or generating one or more activities selected from the group consisting of binding-protein-dependent transport systems inner membrane component in a non-human organism or a part thereof, preferably a microorganism, a plant cell, a plant or a part thereof, as compared to a corresponding non-transformed wild type non-human organism or a part thereof; and
[59109] (b) growing the non-human organism or a part thereof under conditions which permit the production of cerebronic acid or a composition comprising cerebronic acid in said non-human organism or in the culture medium surrounding said non-human organism.

[59110] Accordingly, the present invention relates to a process for the production of cerebronic acid, which comprises
[59111] (a) increasing or generating one or more activities selected from the group consisting of phosphatase in a non-human organism or a part thereof, preferably a microorganism, a plant cell, a plant or a part thereof, as compared to a corresponding non-transformed wild type non-human organism or a part thereof; and
[59112] (b) growing the non-human organism or a part thereof under conditions which permit the production of cerebronic acid or a composition comprising cerebronic acid in said non-human organism or in the culture medium surrounding said non-human organism.

[59113] Accordingly, the present invention relates to a process for the production of 2-hydroxytetracosenoic acid (preferably 2-hydroxynervonic acid), which comprises
[59114] (a) increasing or generating one or more activities selected from the group consisting of phosphatase in a non-human organism or a part thereof, preferably a microorganism, a plant cell, a plant or a part thereof, as compared to a corresponding non-transformed wild type non-human organism or a part thereof; and
[59115] (b) growing the non-human organism or a part thereof under conditions which permit the production of 2-hydroxytetracosenoic acid (preferably 2-hydroxynervonic acid) or a composition comprising 2-hydroxytetracosenoic acid (preferably 2-hydroxynervonic acid) in said non-human organism or in the culture medium surrounding said non-human organism.

[59116] Accordingly, the present invention relates to a process for the production of hexadecadienoic acid, which comprises
[59117] (a) increasing or generating one or more activities selected from the group consisting of carbon dioxide concentrating mechanism protein in a non-human organism or a part thereof, preferably a microorganism, a plant cell, a plant or a part thereof, as compared to a corresponding non-transformed wild type non-human organism or a part thereof; and
[59118] (b) growing the non-human organism or a part thereof under conditions which permit the production of hexadecadienoic acid or a composition comprising hexadecadienoic acid in said non-human organism or in the culture medium surrounding said non-human organism.

[59119] Accordingly, the present invention relates to a process for the production of hexadecatrienoic acid, which comprises
[59120] (a) increasing or generating one or more activities selected from the group consisting of carbon dioxide concentrating mechanism protein in a non-human organism or a part thereof, preferably a microorganism, a plant cell, a plant or a part thereof, as compared to a corresponding non-transformed wild type non-human organism or a part thereof; and
[59121] (b) growing the non-human organism or a part thereof under conditions which permit the production of hexadecatrienoic acid or a composition comprising hexadecatrienoic acid in said non-human organism or in the culture medium surrounding said non-human organism.

[59122] Accordingly, the present invention relates to a process for the production of cerebronic acid, which comprises
[59123] (a) increasing or generating one or more activities selected from the group consisting of coproporphyrinogen III oxidase in a non-human organism or a part thereof, preferably a microorganism, a plant cell, a plant or a part thereof, as compared to a corresponding non-transformed wild type non-human organism or a part thereof; and
[59124] (b) growing the non-human organism or a part thereof under conditions which permit the production of cerebronic acid or a composition comprising cerebronic acid in said non-human organism or in the culture medium surrounding said non-human organism.

[59125] Accordingly, the present invention relates to a process for the production of 2-hydroxytetracosenoic acid (preferably 2-hydroxynervonic acid), which comprises
[59126] (a) increasing or generating one or more activities selected from the group consisting of coproporphyrinogen III oxidase in a non-human organism or a part thereof, preferably a microorganism, a plant cell, a plant or a part thereof, as compared to a corresponding non-transformed wild type non-human organism or a part thereof; and
[59127] (b) growing the non-human organism or a part thereof under conditions which permit the production of 2-hydroxytetracosenoic acid (preferably 2-hydroxynervonic acid) or a composition comprising 2-hydroxytetracosenoic acid (preferably 2-hydroxynervonic acid) in said non-human organism or in the culture medium surrounding said non-human organism.

[59128] Accordingly, the present invention relates to a process for the production of 2-hydroxypalmitic acid, which comprises
[59129] (a) increasing or generating one or more activities selected from the group consisting of oxidoreductase in a non-human organism or a part thereof, preferably a microorganism, a plant cell, a plant or a part thereof, as compared to a corresponding non-transformed wild type non-human organism or a part thereof; and
[59130] (b) growing the non-human organism or a part thereof under conditions which permit the production of 2-hydroxypalmitic acid or a composition comprising 2-hydroxypalmitic acid in said non-human organism or in the culture medium surrounding said non-human organism.

[59131] Accordingly, the present invention relates to a process for the production of hexadecatrienoic acid, which comprises
[59132] (a) increasing or generating one or more activities selected from the group consisting of bifunctional purine biosynthesis protein in a non-human organism or a part thereof, preferably a microorganism, a plant cell, a plant or a part thereof, as compared to a corresponding non-transformed wild type non-human organism or a part thereof; and
[59133] (b) growing the non-human organism or a part thereof under conditions which permit the production of hexadecatrienoic acid or a composition comprising hexadecatrienoic acid in said non-human organism or in the culture medium surrounding said non-human organism.

[59134] Accordingly, the present invention relates to a process for the production of cerebronic acid, which comprises
[59135] (a) increasing or generating one or more activities selected from the group consisting of malate dehydrogenase in a non-human organism or a part thereof, preferably a microorganism, a plant cell, a plant or a part thereof, as compared to a corresponding non-transformed wild type non-human organism or a part thereof; and
[59136] (b) growing the non-human organism or a part thereof under conditions which permit the production of cerebronic acid or a composition comprising cerebronic acid in said non-human organism or in the culture medium surrounding said non-human organism.

[59137] Accordingly, the present invention relates to a process for the production of hexadecatrienoic acid, which comprises
[59138] (a) increasing or generating one or more activities selected from the group consisting of glycine cleavage system H protein in a non-human organism or a part thereof, preferably a microorganism, a plant cell, a plant or a part thereof, as compared to a corresponding non-transformed wild type non-human organism or a part thereof; and
[59139] (b) growing the non-human organism or a part thereof under conditions which permit the production of hexadecatrienoic acid or a composition comprising hexadecatrienoic acid in said non-human organism or in the culture medium surrounding said non-human organism.

[59140] Accordingly, the present invention relates to a process for the production of 2-hydroxytetracosenoic acid (preferably 2-hydroxynervonic acid), which comprises
[59141] (a) increasing or generating one or more activities selected from the group consisting of permease protein of ABC transporter in a non-human organism or a part thereof, preferably a microorganism, a plant cell, a plant or a part thereof, as compared to a corresponding non-transformed wild type non-human organism or a part thereof; and
[59142] (b) growing the non-human organism or a part thereof under conditions which permit the production of 2-hydroxytetracosenoic acid (preferably 2-hydroxynervonic acid) or a composition comprising 2-hydroxytetracosenoic acid (preferably 2-hydroxynervonic acid) in said non-human organism or in the culture medium surrounding said non-human organism.

[59143] Accordingly, the present invention relates to a process for the production of hexadecadienoic acid, which comprises
[59144] (a) increasing or generating one or more activities selected from the group consisting of tryptophan synthase alpha chain in a non-human organism or a part thereof, preferably a microorganism, a plant cell, a plant or a part thereof, as compared to a corresponding non-transformed wild type non-human organism or a part thereof; and
[59145] (b) growing the non-human organism or a part thereof under conditions which permit the production of hexadecadienoic acid or a composition comprising hexadecadienoic acid in said non-human organism or in the culture medium surrounding said non-human organism.

[59146] Accordingly, the present invention relates to a process for the production of 2-hydroxybehenic acid, which comprises
[59147] (a) increasing or generating one or more activities selected from the group consisting of dihydrolipoamide dehydrogenase in a non-human organism or a part thereof, preferably a microorganism, a plant cell, a plant or a part thereof, as compared to a corresponding non-transformed wild type non-human organism or a part thereof; and
[59148] (b) growing the non-human organism or a part thereof under conditions which permit the production of 2-hydroxybehenic acid or a composition comprising 2-hydroxybehenic acid in said non-human organism or in the culture medium surrounding said non-human organism.

[59149] Accordingly, the present invention relates to a process for the production of 2-hydroxypalmitic acid, which comprises
[59150] (a) increasing or generating one or more activities selected from the group consisting of phosphate import ATP-binding protein in a non-human organism or a part thereof, preferably a microorganism, a plant cell, a plant or a part thereof, as compared to a corresponding non-transformed wild type non-human organism or a part thereof; and
[59151] (b) growing the non-human organism or a part thereof under conditions which permit the production of 2-hydroxypalmitic acid or a composition comprising 2-hydroxypalmitic acid in said non-human organism or in the culture medium surrounding said non-human organism.

[59152] Accordingly, the present invention relates to a process for the production of hexadecatrienoic acid, which comprises
[59153] (a) increasing or generating one or more activities selected from the group consisting of glutamate 5-kinase in a non-human organism or a part thereof, preferably a microorganism, a plant cell, a plant or a part thereof, as compared to a corresponding non-transformed wild type non-human organism or a part thereof; and
[59154] (b) growing the non-human organism or a part thereof under conditions which permit the production of hexadecatrienoic acid or a composition comprising hexadecatrienoic acid in said non-human organism or in the culture medium surrounding said non-human organism.

[59155] Accordingly, the present invention relates to a process for the production of cerebronic acid, which comprises
[59156] (a) increasing or generating one or more activities selected from the group consisting of threonine dehydratase in a non-human organism or a part thereof, preferably a microorganism, a plant cell, a plant or a part thereof, as compared to a corresponding non-transformed wild type non-human organism or a part thereof; and
[59157] (b) growing the non-human organism or a part thereof under conditions which permit the production of cerebronic acid or a composition comprising cerebronic acid in said non-human organism or in the culture medium surrounding said non-human organism.

[59158] Accordingly, the present invention relates to a process for the production of hexadecatrienoic acid, which comprises
[59159] (a) increasing or generating one or more activities selected from the group consisting of threonine dehydratase in a non-human organism or a part thereof, preferably a microorganism, a plant cell, a plant or a part thereof, as compared to a corresponding non-transformed wild type non-human organism or a part thereof; and
[59160] (b) growing the non-human organism or a part thereof under conditions which permit the production of hexadecatrienoic acid or a composition comprising hexadecatrienoic acid in said non-human organism or in the culture medium surrounding said non-human organism.

[59161] Accordingly, the present invention relates to a process for the production of 2-hydroxytetracosenoic acid (preferably 2-hydroxynervonic acid), which comprises
[59162] (a) increasing or generating one or more activities selected from the group consisting of threonine dehydratase in a non-human organism or a part thereof, preferably a microorganism, a plant cell, a plant or a part thereof, as compared to a corresponding non-transformed wild type non-human organism or a part thereof; and
[59163] (b) growing the non-human organism or a part thereof under conditions which permit the production of 2-hydroxytetracosenoic acid (preferably 2-hydroxynervonic acid) or a composition comprising 2-hydroxytetracosenoic acid (preferably 2-hydroxynervonic acid) in said non-human organism or in the culture medium surrounding said non-human organism.

[59164] Accordingly, the present invention relates to a process for the production of 2-hydroxytetracosenoic acid (preferably 2-hydroxynervonic acid), which comprises
[59165] (a) increasing or generating one or more activities selected from the group consisting of ferredoxin in a non-human organism or a part thereof, preferably a microorganism, a plant cell, a plant or a part thereof, as compared to a corresponding non-transformed wild type non-human organism or a part thereof; and
[59166] (b) growing the non-human organism or a part thereof under conditions which permit the production of 2-hydroxytetracosenoic acid (preferably 2-hydroxynervonic acid) or a composition comprising 2-hydroxytetracosenoic acid (preferably 2-hydroxynervonic acid) in said non-human organism or in the culture medium surrounding said non-human organism.

[59167] Accordingly, the present invention relates to a process for the production of 2-hydroxybehenic acid, which comprises
[59168] (a) increasing or generating one or more activities selected from the group consisting of Sec-independent protein translocase subunit in a non-human organism or a part thereof, preferably a microorganism, a plant cell, a plant or a part thereof, as compared to a corresponding non-transformed wild type non-human organism or a part thereof; and
[59169] (b) growing the non-human organism or a part thereof under conditions which permit the production of 2-hydroxybehenic acid or a composition comprising 2-hydroxybehenic acid in said non-human organism or in the culture medium surrounding said non-human organism.

[59170] Accordingly, the present invention relates to a process for the production of 2-hydroxytetracosenoic acid (preferably 2-hydroxynervonic acid), which comprises
[59171] (a) increasing or generating one or more activities selected from the group consisting of amino acid ABC transporter permease protein in a non-human organism or a part thereof, preferably a microorganism, a plant cell, a plant or a part thereof, as compared to a corresponding non-transformed wild type non-human organism or a part thereof; and
[59172] (b) growing the non-human organism or a part thereof under conditions which permit the production of 2-hydroxytetracosenoic acid (preferably 2-hydroxynervonic acid) or a composition comprising 2-hydroxytetracosenoic acid (preferably 2-hydroxynervonic acid) in said non-human organism or in the culture medium surrounding said non-human organism.

[59173] Accordingly, the present invention relates to a process for the production of cerebronic acid, which comprises
[59174] (a) increasing or generating one or more activities selected from the group consisting of metal-dependent hydrolase in a non-human organism or a part thereof, preferably a microorganism, a plant cell, a plant or a part thereof, as compared to a corresponding non-transformed wild type non-human organism or a part thereof; and
[59175] (b) growing the non-human organism or a part thereof under conditions which permit the production of cerebronic acid or a composition comprising cerebronic acid in said non-human organism or in the culture medium surrounding said non-human organism.

[59176] Accordingly, the present invention relates to a process for the production of hexadecadienoic acid, which comprises
[59177] (a) increasing or generating one or more activities selected from the group consisting of metal-dependent hydrolase in a non-human organism or a part thereof, preferably a microorganism, a plant cell, a plant or a part thereof, as compared to a corresponding non-transformed wild type non-human organism or a part thereof; and
[59178] (b) growing the non-human organism or a part thereof under conditions which permit the production of hexadecadienoic acid or a composition comprising hexadecadienoic acid in said non-human organism or in the culture medium surrounding said non-human organism.

[59179] Accordingly, the present invention relates to a process for the production of 2-hydroxybehenic acid, which comprises
[59180] (a) increasing or generating one or more activities selected from the group consisting of multiple antibiotic resistance protein in a non-human organism or a part thereof, preferably a microorganism, a plant cell, a plant or a part thereof, as compared to a corresponding non-transformed wild type non-human organism or a part thereof; and
[59181] (b) growing the non-human organism or a part thereof under conditions which permit the production of 2-hydroxybehenic acid or a composition comprising 2-hydroxybehenic acid in said non-human organism or in the culture medium surrounding said non-human organism.

[59182] Accordingly, the present invention relates to a process for the production of hexadecatrienoic acid, which comprises
[59183] (a) increasing or generating one or more activities selected from the group consisting of TTC1386-protein in a non-human organism or a part thereof, preferably a microorganism, a plant cell, a plant or a part thereof, as compared to a corresponding non-transformed wild type non-human organism or a part thereof; and
[59184] (b) growing the non-human organism or a part thereof under conditions which permit the production of hexadecatrienoic acid or a composition comprising hexadecatrienoic acid in said non-human organism or in the culture medium surrounding said non-human organism.

[59185] Accordingly, the present invention relates to a process for the production of 2-hydroxybehenic acid, which comprises
[59186] (a) increasing or generating one or more activities selected from the group consisting of homocitrate synthase in a non-human organism or a part thereof, preferably a microorganism, a plant cell, a plant or a part thereof, as compared to a corresponding non-transformed wild type non-human organism or a part thereof; and
[59187] (b) growing the non-human organism or a part thereof under conditions which permit the production of 2-hydroxybehenic acid or a composition comprising 2-hydroxybehenic acid in said non-human organism or in the culture medium surrounding said non-human organism.

[59188] Accordingly, the present invention relates to a process for the production of hexadecadienoic acid, which comprises
[59189] (a) increasing or generating one or more activities selected from the group consisting of protein kinase in a non-human organism or a part thereof, preferably a microorganism, a plant cell, a plant or a part thereof, as compared to a corresponding non-transformed wild type non-human organism or a part thereof; and
[59190] (b) growing the non-human organism or a part thereof under conditions which permit the production of hexadecadienoic acid or a composition comprising hexadecadienoic acid in said non-human organism or in the culture medium surrounding said non-human organism.

[59191] Accordingly, the present invention relates to a process for the production of hexadecatrienoic acid, which comprises
[59192] (a) increasing or generating one or more activities selected from the group consisting of protein kinase in a non-human organism or a part thereof, preferably a microorganism, a plant cell, a plant or a part thereof, as compared to a corresponding non-transformed wild type non-human organism or a part thereof; and
[59193] (b) growing the non-human organism or a part thereof under conditions which permit the production of hexadecatrienoic acid or a composition comprising hexadecatrienoic acid in said non-human organism or in the culture medium surrounding said non-human organism.

[59194] Accordingly, the present invention relates to a process for the production of hexadecadienoic acid, which comprises
[59195] (a) increasing or generating one or more activities selected from the group consisting of transcription factor in a non-human organism or a part thereof, preferably a microorganism, a plant cell, a plant or a part thereof, as compared to a corresponding non-transformed wild type non-human organism or a part thereof; and
[59196] (b) growing the non-human organism or a part thereof under conditions which permit the production of hexadecadienoic acid or a composition comprising hexadecadienoic acid in said non-human organism or in the culture medium surrounding said non-human organism.

[59197] Accordingly, the present invention relates to a process for the production of hexadecatrienoic acid, which comprises
[59198] (a) increasing or generating one or more activities selected from the group consisting of transcription factor in a non-human organism or a part thereof, preferably a microorganism, a plant cell, a plant or a part thereof, as compared to a corresponding non-transformed wild type non-human organism or a part thereof; and
[59199] (b) growing the non-human organism or a part thereof under conditions which permit the production of hexadecatrienoic acid or a composition comprising hexadecatrienoic acid in said non-human organism or in the culture medium surrounding said non-human organism.

[59200] Accordingly, the present invention relates to a process for the production of hexadecatrienoic acid, which comprises
[59201] (a) increasing or generating one or more activities selected from the group consisting of cell division control protein in a non-human organism or a part thereof, preferably a microorganism, a plant cell, a plant or a part thereof, as compared to a corresponding non-transformed wild type non-human organism or a part thereof; and
[59202] (b) growing the non-human organism or a part thereof under conditions which permit the production of hexadecatrienoic acid or a composition comprising hexadecatrienoic acid in said non-human organism or in the culture medium surrounding said non-human organism.

[59203] Accordingly, the present invention relates to a process for the production of cerebronic acid, which comprises
[59204] (a) increasing or generating one or more activities selected from the group consisting of ycl027w-protein in a non-human organism or a part thereof, preferably a microorganism, a plant cell, a plant or a part thereof, as compared to a corresponding non-transformed wild type non-human organism or a part thereof; and
[59205] (b) growing the non-human organism or a part thereof under conditions which permit the production of cerebronic acid or a composition comprising cerebronic acid in said non-human organism or in the culture medium surrounding said non-human organism.

[59206] Accordingly, the present invention relates to a process for the production of 2-hydroxytetracosenoic acid (preferably 2-hydroxynervonic acid), which comprises
[59207] (a) increasing or generating one or more activities selected from the group consisting of ycl027w-protein in a non-human organism or a part thereof, preferably a microorganism, a plant cell, a plant or a part thereof, as compared to a corresponding non-transformed wild type non-human organism or a part thereof; and
[59208] (b) growing the non-human organism or a part thereof under conditions which permit the production of 2-hydroxytetracosenoic acid (preferably 2-hydroxynervonic acid) or a composition comprising 2-hydroxytetracosenoic acid (preferably 2-hydroxynervonic acid) in said non-human organism or in the culture medium surrounding said non-human organism.

[59209] Accordingly, the present invention relates to a process for the production of 2-hydroxypalmitic acid, which comprises
[59210] (a) increasing or generating one or more activities selected from the group consisting of ycl049c-protein in a non-human organism or a part thereof, preferably a microorganism, a plant cell, a plant or a part thereof, as compared to a corresponding non-transformed wild type non-human organism or a part thereof; and
[59211] (b) growing the non-human organism or a part thereof under conditions which permit the production of 2-hydroxypalmitic acid or a composition comprising 2-hydroxypalmitic acid in said non-human organism or in the culture medium surrounding said non-human organism.

[59212] Accordingly, the present invention relates to a process for the production of oleic acid, which comprises
[59213] (a) increasing or generating one or more activities selected from the group consisting of glycerol-3-phosphate dehydrogenase in a non-human organism or a part thereof, preferably a microorganism, a plant cell, a plant or a part thereof, as compared to a corresponding non-transformed wild type non-human organism or a part thereof; and
[59214] (b) growing the non-human organism or a part thereof under conditions which permit the production of oleic acid or a composition comprising oleic acid in said non-human organism or in the culture medium surrounding said non-human organism.

[59215] Accordingly, the present invention relates to a process for the production of eicosanoic acid, which comprises
[59216] (a) increasing or generating one or more activities selected from the group consisting of isocitrate dehydrogenase in a non-human organism or a part thereof, preferably a microorganism, a plant cell, a plant or a part thereof, as compared to a corresponding non-transformed wild type non-human organism or a part thereof; and
[59217] (b) growing the non-human organism or a part thereof under conditions which permit the production of eicosanoic acid or a composition comprising eicosanoic acid in said non-human organism or in the culture medium surrounding said non-human organism.

[59218] Accordingly, the present invention relates to a process for the production of heptadecanoic acid, which comprises
[59219] (a) increasing or generating one or more activities selected from the group consisting of isocitrate dehydrogenase in a non-human organism or a part thereof, preferably a microorganism, a plant cell, a plant or a part thereof, as compared to a corresponding non-transformed wild type non-human organism or a part thereof; and
[59220] (b) growing the non-human organism or a part thereof under conditions which permit the production of heptadecanoic acid or a composition comprising heptadecanoic acid in said non-human organism or in the culture medium surrounding said non-human organism.

[59221] Accordingly, the present invention relates to a process for the production of hexadecadienoic acid, which comprises
[59222] (a) increasing or generating one or more activities selected from the group consisting of cell division control protein in a non-human organism or a part thereof, preferably a microorganism, a plant cell, a plant or a part thereof, as compared to a corresponding non-transformed wild type non-human organism or a part thereof; and
[59223] (b) growing the non-human organism or a part thereof under conditions which permit the production of hexadecadienoic acid or a composition comprising hexadecadienoic acid in said non-human organism or in the culture medium surrounding said non-human organism.

[59224] Accordingly, the present invention relates to a process for the production of hexadecatrienoic acid, which comprises
[59225] (a) increasing or generating one or more activities selected from the group consisting of cell division control protein in a non-human organism or a part thereof, preferably a microorganism, a plant cell, a plant or a part thereof, as compared to a corresponding non-transformed wild type non-human organism or a part thereof; and
[59226] (b) growing the non-human organism or a part thereof under conditions which permit the production of hexadecatrienoic acid or a composition comprising hexadecatrienoic acid in said non-human organism or in the culture medium surrounding said non-human organism.

[59227] Accordingly, the present invention relates to a process for the production of 2-hydroxybehenic acid, which comprises
[59228] (a) increasing or generating one or more activities selected from the group consisting of homocitrate synthase in a non-human organism or a part thereof, preferably a microorganism, a plant cell, a plant or a part thereof, as compared to a corresponding non-transformed wild type non-human organism or a part thereof; and
[59229] (b) growing the non-human organism or a part thereof under conditions which permit the production of 2-hydroxybehenic acid or a composition comprising 2-hydroxybehenic acid in said non-human organism or in the culture medium surrounding said non-human organism.

[59230] Accordingly, the present invention relates to a process for the production of behenic acid, which comprises
[59231] (a) increasing or generating one or more activities selected from the group consisting of phospho-2-dehydro-3-deoxyheptonate aldolase in a non-human organism or a part thereof, preferably a microorganism, a plant cell, a plant or a part thereof, as compared to a corresponding non-transformed wild type non-human organism or a part thereof; and
[59232] (b) growing the non-human organism or a part thereof under conditions which permit the production of behenic acid or a composition comprising behenic acid in said non-human organism or in the culture medium surrounding said non-human organism.

[59233] Accordingly, the present invention relates to a process for the production of 2-hydroxytetracosenoic acid (preferably 2-hydroxynervonic acid), which comprises
[59234] (a) increasing or generating one or more activities selected from the group consisting of cell wall protein in a non-human organism or a part thereof, preferably a microorganism, a plant cell, a plant or a part thereof, as compared to a corresponding non-transformed wild type non-human organism or a part thereof; and
[59235] (b) growing the non-human organism or a part thereof under conditions which permit the production of 2-hydroxytetracosenoic acid (preferably 2-hydroxynervonic acid) or a composition comprising 2-hydroxytetracosenoic acid (preferably 2-hydroxynervonic acid) in said non-human organism or in the culture medium surrounding said non-human organism.

[59236] Accordingly, the present invention relates to a process for the production of 2-hydroxytetracosenoic acid (preferably 2-hydroxynervonic acid), which comprises
[59237] (a) increasing or generating one or more activities selected from the group consisting of F-box protein in a non-human organism or a part thereof, preferably a microorganism, a plant cell, a plant or a part thereof, as compared to a corresponding non-transformed wild type non-human organism or a part thereof; and
[59238] (b) growing the non-human organism or a part thereof under conditions which permit the production of 2-hydroxytetracosenoic acid (preferably 2-hydroxynervonic acid) or a composition comprising 2-hydroxytetracosenoic acid (preferably 2-hydroxynervonic acid) in said non-human organism or in the culture medium surrounding said non-human organism.

[59239] Accordingly, the present invention relates to a process for the production of cerebronic acid, which comprises
[59240] (a) increasing or generating one or more activities selected from the group consisting of ydr273w-protein in a non-human organism or a part thereof, preferably a microorganism, a plant cell, a plant or a part thereof, as compared to a corresponding non-transformed wild type non-human organism or a part thereof; and
[59241] (b) growing the non-human organism or a part thereof under conditions which permit the production of cerebronic acid or a composition comprising cerebronic acid in said non-human organism or in the culture medium surrounding said non-human organism.

[59242] Accordingly, the present invention relates to a process for the production of 2-hydroxytetracosenoic acid (preferably 2-hydroxynervonic acid), which comprises
[59243] (a) increasing or generating one or more activities selected from the group consisting of ydr273w-protein in a non-human organism or a part thereof, preferably a microorganism, a plant cell, a plant or a part thereof, as compared to a corresponding non-transformed wild type non-human organism or a part thereof; and
[59244] (b) growing the non-human organism or a part thereof under conditions which permit the production of 2-hydroxytetracosenoic acid (preferably 2-hydroxynervonic acid) or a composition comprising 2-hydroxytetracosenoic acid (preferably 2-hydroxynervonic acid) in said non-human organism or in the culture medium surrounding said non-human Accordirgjip,iAhre present invention relates to a process for the production of hexadecatrienoic acid, which comprises
[59245] (a) increasing or generating one or more activities selected from the group consisting of ydr339c-protein in a non-human organism or a part thereof, preferably a microorganism, a plant cell, a plant or a part thereof, as compared to a corresponding non-transformed wild type non-human organism or a part thereof; and
[59246] (b) growing the non-human organism or a part thereof under conditions which permit the production of hexadecatrienoic acid or a composition comprising hexadecatrienoic acid in said non-human organism or in the culture medium surrounding said non-human organism.

[59247] Accordingly, the present invention relates to a process for the production of heptadecanoic acid, which comprises
[59248] (a) increasing or generating one or more activities selected from the group consisting of aldolase in a non-human organism or a part thereof, preferably a microorganism, a plant cell, a plant or a part thereof, as compared to a corresponding non-transformed wild type non-human organism or a part thereof; and
[59249] (b) growing the non-human organism or a part thereof under conditions which permit the production of heptadecanoic acid or a composition comprising heptadecanoic acid in said non-human organism or in the culture medium surrounding said non-human organism.

[59250] Accordingly, the present invention relates to a process for the production of myristic acid, which comprises
[59251] (a) increasing or generating one or more activities selected from the group consisting of small nuclear ribonucleoprotein in a non-human organism or a part thereof, preferably a microorganism, a plant cell, a plant or a part thereof, as compared to a corresponding non-transformed wild type non-human organism or a part thereof; and
[59252] (b) growing the non-human organism or a part thereof under conditions which permit the production of myristic acid or a composition comprising myristic acid in said non-human organism or in the culture medium surrounding said non-human organism.

[59253] Accordingly, the present invention relates to a process for the production of hexadecadienoic acid, which comprises
[59254] (a) increasing or generating one or more activities selected from the group consisting of molecular chaperone portein in a non-human organism or a part thereof, preferably a microorganism, a plant cell, a plant or a part thereof, as compared to a corresponding non-transformed wild type non-human organism or a part thereof; and
[59255] (b) growing the non-human organism or a part thereof under conditions which permit the production of hexadecadienoic acid or a composition comprising hexadecadienoic acid in said non-human organism or in the culture medium surrounding said non-human organism.

[59256] Accordingly, the present invention relates to a process for the production of hexadecatrienoic acid, which comprises
[59257] (a) increasing or generating one or more activities selected from the group consisting of molecular chaperone portein in a non-human organism or a part thereof, preferably a microorganism, a plant cell, a plant or a part thereof, as compared to a corresponding non-transformed wild type non-human organism or a part thereof; and
[59258] (b) growing the non-human organism or a part thereof under conditions which permit the production of hexadecatrienoic acid or a composition comprising hexadecatrienoic acid in said non-human organism or in the culture medium surrounding said non-human organism.

[59259] Accordingly, the present invention relates to a process for the production of 2-hydroxybehenic acid, which comprises
[59260] (a) increasing or generating one or more activities selected from the group consisting of YFL019C-protein in a non-human organism or a part thereof, preferably a microorganism, a plant cell, a plant or a part thereof, as compared to a corresponding non-transformed wild type non-human organism or a part thereof; and
[59261] (b) growing the non-human organism or a part thereof under conditions which permit the production of 2-hydroxybehenic acid or a composition comprising 2-hydroxybehenic acid in said non-human organism or in the culture medium surrounding said non-human organism.

[59262] Accordingly, the present invention relates to a process for the production of 2-hydroxypalmitic acid, which comprises
[59263] (a) increasing or generating one or more activities selected from the group consisting of YFL019C-protein in a non-human organism or a part thereof, preferably a microorganism, a plant cell, a plant or a part thereof, as compared to a corresponding non-transformed wild type non-human organism or a part thereof; and
[59264] (b) growing the non-human organism or a part thereof under conditions which permit the production of 2-hydroxypalmitic acid or a composition comprising 2-hydroxypalmitic acid in said non-human organism or in the culture medium surrounding said non-human organism.

[59265] Accordingly, the present invention relates to a process for the production of hexadecadienoic acid, which comprises
[59266] (a) increasing or generating one or more activities selected from the group consisting of aminotransferase in a non-human organism or a part thereof, preferably a microorganism, a plant cell, a plant or a part thereof, as compared to a corresponding non-transformed wild type non-human organism or a part thereof; and
[59267] (b) growing the non-human organism or a part thereof under conditions which permit the production of hexadecadienoic acid or a composition comprising hexadecadienoic acid in said non-human organism or in the culture medium surrounding said non-human organism.

[59268] Accordingly, the present invention relates to a process for the production of hexadecatrienoic acid, which comprises
[59269] (a) increasing or generating one or more activities selected from the group consisting of ygl237c-protein in a non-human organism or a part thereof, preferably a microorganism, a plant cell, a plant or a part thereof, as compared to a corresponding non-transformed wild type non-human organism or a part thereof; and
[59270] (b) growing the non-human organism or a part thereof under conditions which permit the production of hexadecatrienoic acid or a composition comprising hexadecatrienoic acid in said non-human organism or in the culture medium surrounding said non-human organism.

[59271] Accordingly, the present invention relates to a process for the production of eicosanoic acid, which comprises
[59272] (a) increasing or generating one or more activities selected from the group consisting of YGR104C-protein in a non-human organism or a part thereof, preferably a microorganism, a plant cell, a plant or a part thereof, as compared to a corresponding non-transformed wild type non-human organism or a part thereof; and
[59273] (b) growing the non-human organism or a part thereof under conditions which permit the production of eicosanoic acid or a composition comprising eicosanoic acid in said non-human organism or in the culture medium surrounding said non-human organism.

[59274] Accordingly, the present invention relates to a process for the production of cerebronic acid, which comprises
[59275] (a) increasing or generating one or more activities selected from the group consisting of squalene monooxygenase in a non-human organism or a part thereof, preferably a microorganism, a plant cell, a plant or a part thereof, as compared to a corresponding non-transformed wild type non-human organism or a part thereof; and
[59276] (b) growing the non-human organism or a part thereof under conditions which permit the production of cerebronic acid or a composition comprising cerebronic acid in said non-human organism or in the culture medium surrounding said non-human organism.

[59277] Accordingly, the present invention relates to a process for the production of hexadecadienoic acid, which comprises
[59278] (a) increasing or generating one or more activities selected from the group consisting of biotin synthase in a non-human organism or a part thereof, preferably a microorganism, a plant cell, a plant or a part thereof, as compared to a corresponding non-transformed wild type non-human organism or a part thereof; and
[59279] (b) growing the non-human organism or a part thereof under conditions which permit the production of hexadecadienoic acid or a composition comprising hexadecadienoic acid in said non-human organism or in the culture medium surrounding said non-human organism.

[59280] Accordingly, the present invention relates to a process for the production of cerebronic acid, which comprises
[59281] (a) increasing or generating one or more activities selected from the group consisting of yhr033w-protein in a non-human organism or a part thereof, preferably a microorganism, a plant cell, a plant or a part thereof, as compared to a corresponding non-transformed wild type non-human organism or a part thereof; and
[59282] (b) growing the non-human organism or a part thereof under conditions which permit the production of cerebronic acid or a composition comprising cerebronic acid in said non-human organism or in the culture medium surrounding said non-human organism.

[59283] Accordingly, the present invention relates to a process for the production of cerebronic acid, which comprises
[59284] (a) increasing or generating one or more activities selected from the group consisting of DnaJ-like chaperone in a non-human organism or a part thereof, preferably a microorganism, a plant cell, a plant or a part thereof, as compared to a corresponding non-transformed wild type non-human organism or a part thereof; and
[59285] (b) growing the non-human organism or a part thereof under conditions which permit the production of cerebronic acid or a composition comprising cerebronic acid in said non-human organism or in the culture medium surrounding said non-human organism.

[59286] Accordingly, the present invention relates to a process for the production of 2-hydroxybehenic acid, which comprises
[59287] (a) increasing or generating one or more activities selected from the group consisting of YJL127W-A-protein in a non-human organism or a part thereof, preferably a microorganism, a plant cell, a plant or a part thereof, as compared to a corresponding non-transformed wild type non-human organism or a part thereof; and
[59288] (b) growing the non-human organism or a part thereof under conditions which permit the production of 2-hydroxybehenic acid or a composition comprising 2-hydroxybehenic acid in said non-human organism or in the culture medium surrounding said non-human organism.

[59289] Accordingly, the present invention relates to a process for the production of 2-hydroxytetracosenoic acid (preferably 2-hydroxynervonic acid), which comprises
[59290] (a) increasing or generating one or more activities selected from the group consisting of cystathionine gamma-synthase in a non-human organism or a part thereof, preferably a microorganism, a plant cell, a plant or a part thereof, as compared to a corresponding non-transformed wild type non-human organism or a part thereof; and
[59291] (b) growing the non-human organism or a part thereof under conditions which permit the production of 2-hydroxytetracosenoic acid (preferably 2-hydroxynervonic acid) or a composition comprising 2-hydroxytetracosenoic acid (preferably 2-hydroxynervonic acid) in said non-human organism or in the culture medium surrounding said non-human organism.

[59292] Accordingly, the present invention relates to a process for the production of 2-hydroxypalmitic acid, which comprises
[59293] (a) increasing or generating one or more activities selected from the group consisting of cystathionine gamma-synthase in a non-human organism or a part thereof, preferably a microorganism, a plant cell, a plant or a part thereof, as compared to a corresponding non-transformed wild type non-human organism or a part thereof; and
[59294] (b) growing the non-human organism or a part thereof under conditions which permit the production of 2-hydroxypalmitic acid or a composition comprising 2-hydroxypalmitic acid in said non-human organism or in the culture medium surrounding said non-human organism.

[59295] Accordingly, the present invention relates to a process for the production of 2-hydroxypalmitic acid, which comprises
[59296] (a) increasing or generating one or more activities selected from the group consisting of polygalacturonase in a non-human organism or a part thereof, preferably a microorganism, a plant cell, a plant or a part thereof, as compared to a corresponding non-transformed wild type non-human organism or a part thereof; and
[59297] (b) growing the non-human organism or a part thereof under conditions which permit the production of 2-hydroxypalmitic acid or a composition comprising 2-hydroxypalmitic acid in said non-human organism or in the culture medium surrounding said non-human organism.

[59298] Accordingly, the present invention relates to a process for the production of hexadecatrienoic acid, which comprises
[59299] (a) increasing or generating one or more activities selected from the group consisting of cyclin in a non-human organism or a part thereof, preferably a microorganism, a plant cell, a plant or a part thereof, as compared to a corresponding non-transformed wild type non-human organism or a part thereof; and
[59300] (b) growing the non-human organism or a part thereof under conditions which permit the production of hexadecatrienoic acid or a composition comprising hexadecatrienoic acid in said non-human organism or in the culture medium surrounding said non-human organism.

[59301] Accordingly, the present invention relates to a process for the production of hexadecadienoic acid, which comprises
[59302] (a) increasing or generating one or more activities selected from the group consisting of ylr326w-protein in a non-human organism or a part thereof, preferably a microorganism, a plant cell, a plant or a part thereof, as compared to a corresponding non-transformed wild type non-human organism or a part thereof; and
[59303] (b) growing the non-human organism or a part thereof under conditions which permit the production of hexadecadienoic acid or a composition comprising hexadecadienoic acid in said non-human organism or in the culture medium surrounding said non-human organism.

[59304] Accordingly, the present invention relates to a process for the production of hexadecatrienoic acid, which comprises
[59305] (a) increasing or generating one or more activities selected from the group consisting of ylr326w-protein in a non-human organism or a part thereof, preferably a microorganism, a plant cell, a plant or a part thereof, as compared to a corresponding non-transformed wild type non-human organism or a part thereof; and
[59306] (b) growing the non-human organism or a part thereof under conditions which permit the production of hexadecatrienoic acid or a composition comprising hexadecatrienoic acid in said non-human organism or in the culture medium surrounding said non-human organism.

[59307] Accordingly, the present invention relates to a process for the production of 2-hydroxybehenic acid, which comprises
[59308] (a) increasing or generating one or more activities selected from the group consisting of yml083c-protein in a non-human organism or a part thereof, preferably a microorganism, a plant cell, a plant or a part thereof, as compared to a corresponding non-transformed wild type non-human organism or a part thereof; and
[59309] (b) growing the non-human organism or a part thereof under conditions which permit the production of 2-hydroxybehenic acid or a composition comprising 2-hydroxybehenic acid in said non-human organism or in the culture medium surrounding said non-human organism.

[59310] Accordingly, the present invention relates to a process for the production of 2-hydroxytetracosenoic acid (preferably 2-hydroxynervonic acid), which comprises
[59311] (a) increasing or generating one or more activities selected from the group consisting of yml084w-protein in a non-human organism or a part thereof, preferably a microorganism, a plant cell, a plant or a part thereof, as compared to a corresponding non-transformed wild type non-human organism or a part thereof; and
[59312] (b) growing the non-human organism or a part thereof under conditions which permit the production of 2-hydroxytetracosenoic acid (preferably 2-hydroxynervonic acid) or a composition comprising 2-hydroxytetracosenoic acid (preferably 2-hydroxynervonic acid) in said non-human organism or in the culture medium surrounding said non-human organism.

[59313] Accordingly, the present invention relates to a process for the production of 2-hydroxypalmitic acid, which comprises
[59314] (a) increasing or generating one or more activities selected from the group consisting of molecular chaperone in a non-human organism or a part thereof, preferably a microorganism, a plant cell, a plant or a part thereof, as compared to a corresponding non-transformed wild type non-human organism or a part thereof; and
[59315] (b) growing the non-human organism or a part thereof under conditions which permit the production of 2-hydroxypalmitic acid or a composition comprising 2-hydroxypalmitic acid in said non-human organism or in the culture medium surrounding said non-human organism.

[59316] Accordingly, the present invention relates to a process for the production of oleic acid, which comprises
[59317] (a) increasing or generating one or more activities selected from the group consisting of phosphotransferase in a non-human organism or a part thereof, preferably a microorganism, a plant cell, a plant or a part thereof, as compared to a corresponding non-transformed wild type non-human organism or a part thereof; and
[59318] (b) growing the non-human organism or a part thereof under conditions which permit the production of oleic acid or a composition comprising oleic acid in said non-human organism or in the culture medium surrounding said non-human organism.

[59319] Accordingly, the present invention relates to a process for the production of 2-hydroxybehenic acid, which comprises
[59320] (a) increasing or generating one or more activities selected from the group consisting of ynl321w-protein in a non-human organism or a part thereof, preferably a microorganism, a plant cell, a plant or a part thereof, as compared to a corresponding non-transformed wild type non-human organism or a part thereof; and
[59321] (b) growing the non-human organism or a part thereof under conditions which permit the production of 2-hydroxybehenic acid or a composition comprising 2-hydroxybehenic acid in said non-human organism or in the culture medium surrounding said non-human organism.

[59322] Accordingly, the present invention relates to a process for the production of hexadecatrienoic acid, which comprises
[59323] (a) increasing or generating one or more activities selected from the group consisting of Elongation factor Tu in a non-human organism or a part thereof, preferably a microorganism, a plant cell, a plant or a part thereof, as compared to a corresponding non-transformed wild type non-human organism or a part thereof; and
[59324] (b) growing the non-human organism or a part thereof under conditions which permit the production of hexadecatrienoic acid or a composition comprising hexadecatrienoic acid in said non-human organism or in the culture medium surrounding said non-human organism.

[59325] Accordingly, the present invention relates to a process for the production of 2-hydroxytetracosenoic acid (preferably 2-hydroxynervonic acid), which comprises
[59326] (a) increasing or generating one or more activities selected from the group consisting of ATPase epsilon subunit in a non-human organism or a part thereof, preferably a microorganism, a plant cell, a plant or a part thereof, as compared to a corresponding non-transformed wild type non-human organism or a part thereof; and
[59327] (b) growing the non-human organism or a part thereof under conditions which permit the production of 2-hydroxytetracosenoic acid (preferably 2-hydroxynervonic acid) or a composition comprising 2-hydroxytetracosenoic acid (preferably 2-hydroxynervonic acid) in said non-human organism or in the culture medium surrounding said non-human organism.

[59328] Accordingly, the present invention relates to a process for the production of 2-hydroxypalmitic acid, which comprises
[59329] (a) increasing or generating one or more activities selected from the group consisting of phosphoadenosine phosphosulfate reductase in a non-human organism or a part thereof, preferably a microorganism, a plant cell, a plant or a part thereof, as compared to a corresponding non-transformed wild type non-human organism or a part thereof; and
[59330] (b) growing the non-human organism or a part thereof under conditions which permit the production of 2-hydroxypalmitic acid or a composition comprising 2-hydroxypalmitic acid in said non-human organism or in the culture medium surrounding said non-human organism.

[59331] Accordingly, the present invention relates to a process for the production of oleic acid, which comprises
[59332] (a) increasing or generating one or more activities selected from the group consisting of 40S ribosomal protein S17 in a non-human organism or a part thereof, preferably a microorganism, a plant cell, a plant or a part thereof, as compared to a corresponding non-transformed wild type non-human organism or a part thereof; and
[59333] (b) growing the non-human organism or a part thereof under conditions which permit the production of oleic acid or a composition comprising oleic acid in said non-human organism or in the culture medium surrounding said non-human organism.

[59334] Accordingly, the present invention relates to a process for the production of 2-hydroxybehenic acid, which comprises
[59335] (a) increasing or generating one or more activities selected from the group consisting of b3644-protein in a non-human organism or a part thereof, preferably a microorganism, a plant cell, a plant or a part thereof, as compared to a corresponding non-transformed wild type non-human organism or a part thereof; and
[59336] (b) growing the non-human organism or a part thereof under conditions which permit the production of 2-hydroxybehenic acid or a composition comprising 2-hydroxybehenic acid in said non-human organism or in the culture medium surrounding said non-human organism.

[59337] Accordingly, the present invention relates to a process for the production of behenic acid, which comprises
[59338] (a) increasing or generating one or more activities selected from the group consisting of b3644-protein in a non-human organism or a part thereof, preferably a microorganism, a plant cell, a plant or a part thereof, as compared to a corresponding non-transformed wild type non-human organism or a part thereof; and
[59339] (b) growing the non-human organism or a part thereof under conditions which permit the production of behenic acid or a composition comprising behenic acid in said non-human organism or in the culture medium surrounding said non-human organism.

[59340] Accordingly, the present invention relates to a process for the production of nervonic acid, which comprises
[59341] (a) increasing or generating one or more activities selected from the group consisting of b3644-protein in a non-human organism or a part thereof, preferably a microorganism, a plant cell, a plant or a part thereof, as compared to a corresponding non-transformed wild type non-human organism or a part thereof; and
[59342] (b) growing the non-human organism or a part thereof under conditions which permit the production of nervonic acid or a composition comprising nervonic acid in said non-human organism or in the culture medium surrounding said non-human organism.

[59343] An embodiment of the present invention relates to a process for the production of 2-hydroxybehenic acid, which comprises
[59344] (a1) increasing or generating the activity of a polypeptide comprising a polypeptide as depicted in a respective line in column 5 or 8 of Table II, application no. 12, or a homolog or a fragment thereof, a consensus sequence or at least one polypeptide motif as depicted in the respective line in column 8 of Table IV, application no. 12, whereby the respective line discloses in column 7 the fine chemical 2-hydroxybehenic acid; or
[59345] (a2) increasing or generating the activity of an expression product of one or more nucleic acid molecule(s) comprising a polynucleotide as depicted in the respective line in column 5 or 8 of Table I, application no. 12, preferably the coding region thereof, or a homolog or a fragment thereof, whereby the respective line discloses in column 7 the fine chemical 2-hydroxybehenic acid; or
[59346] (a3) increasing or generating the activity of a functional equivalent of (a1) or (a2);
[59347] in a non-human organism or a part thereof; preferably a microorganism, a plant cell, a plant or a part thereof, as compared to a corresponding non-transformed wild type non-human organism or a part thereof; and
[59348] (b) growing the non-human organism under conditions which permit the production of 2-hydroxybehenic acid or a composition comprising 2-hydroxybehenic acid in said non-human organism or in the culture medium surrounding said non-human organism.

[59349] An embodiment of the present invention relates to a process for the production of 2-hydroxypalmitic acid, which comprises
[59350] (a1) increasing or generating the activity of a polypeptide comprising a polypeptide as depicted in a respective line in column 5 or 8 of Table II, application no. 12, or a homolog or a fragment thereof, a consensus sequence or at least one polypeptide motif as depicted in the respective line in column 8 of Table IV, application no. 12, whereby the respective line discloses in column 7 the fine chemical 2-hydroxypalmitic acid; or
[59351] (a2) increasing or generating the activity of an expression product of one or more nucleic acid molecule(s) comprising a polynucleotide as depicted in the respective line in column 5 or 8 of Table I, application no. 12, preferably the coding region thereof, or a homolog or a fragment thereof, whereby the respective line discloses in column 7 the fine chemical 2-hydroxypalmitic acid; or
[59352] (a3) increasing or generating the activity of a functional equivalent of (a1) or (a2);
[59353] in a non-human organism or a part thereof; preferably a microorganism, a plant cell, a plant or a part thereof, as compared to a corresponding non-transformed wild type non-human organism or a part thereof; and
[59354] (b) growing the non-human organism under conditions which permit the production of 2-hydroxypalmitic acid or a composition comprising 2-hydroxypalmitic acid in said non-human organism or in the culture medium surrounding said non-human organism.

[59355] An embodiment of the present invention relates to a process for the production of 2-hydroxytetracosenoic acid (preferably 2-hydroxynervonic acid), which comprises
[59356] (a1) increasing or generating the activity of a polypeptide comprising a polypeptide as depicted in a respective line in column 5 or 8 of Table II, application no. 12, or a homolog or a fragment thereof, a consensus sequence or at least one polypeptide motif as depicted in the respective line in column 8 of Table IV, application no. 12, whereby the respective line discloses in column 7 the fine chemical 2-hydroxytetracosenoic acid (preferably 2-hydroxynervonic acid); or
[59357] (a2) increasing or generating the activity of an expression product of one or more nucleic acid molecule(s) comprising a polynucleotide as depicted in the respective line in column 5 or 8 of Table I, application no. 12, preferably the coding region thereof, or a homolog or a fragment thereof, whereby the respective line discloses in column 7 the fine chemical 2-hydroxytetracosenoic acid (preferably 2-hydroxynervonic acid); or
[59358] (a3) increasing or generating the activity of a functional equivalent of (a1) or (a2);
[59359] in a non-human organism or a part thereof; preferably a microorganism, a plant cell, a plant or a part thereof, as compared to a corresponding non-transformed wild type non-human organism or a part thereof; and
[59360] (b) growing the non-human organism under conditions which permit the production of 2-hydroxytetracosenoic acid (preferably 2-hydroxynervonic acid) or a composition comprising 2-hydroxytetracosenoic acid (preferably 2-hydroxynervonic acid) in said non-human organism or in the culture medium surrounding said non-human organism.

[59361] An embodiment of the present invention relates to a process for the production of behenic acid, which comprises
[59362] (a1) increasing or generating the activity of a polypeptide comprising a polypeptide as depicted in a respective line in column 5 or 8 of Table II, application no. 12, or a homolog or a fragment thereof, a consensus sequence or at least one polypeptide motif as depicted in the respective line in column 8 of Table IV, application no. 12, whereby the respective line discloses in column 7 the fine chemical behenic acid; or
[59363] (a2) increasing or generating the activity of an expression product of one or more nucleic acid molecule(s) comprising a polynucleotide as depicted in the respective line in column 5 or 8 of Table I, application no. 12, preferably the coding region thereof, or a homolog or a fragment thereof, whereby the respective line discloses in column 7 the fine chemical behenic acid; or
[59364] (a3) increasing or generating the activity of a functional equivalent of (a1) or (a2);
[59365] in a non-human organism or a part thereof; preferably a microorganism, a plant cell, a plant or a part thereof, as compared to a corresponding non-transformed wild type non-human organism or a part thereof; and
[59366] (b) growing the non-human organism under conditions which permit the production of behenic acid or a composition comprising behenic acid in said non-human organism or in the culture medium surrounding said non-human organism.

[59367] An embodiment of the present invention relates to a process for the production of cerebronic acid, which comprises
[59368] (a1) increasing or generating the activity of a polypeptide comprising a polypeptide as depicted in a respective line in column 5 or 8 of Table II, application no. 12, or a homolog or a fragment thereof, a consensus sequence or at least one polypeptide motif as depicted in the respective line in column 8 of Table IV, application no. 12, whereby the respective line discloses in column 7 the fine chemical cerebronic acid; or
[59369] (a2) increasing or generating the activity of an expression product of one or more nucleic acid molecule(s) comprising a polynucleotide as depicted in the respective line in column 5 or 8 of Table I, application no. 12, preferably the coding region thereof, or a homolog or a fragment thereof, whereby the respective line discloses in column 7 the fine chemical cerebronic acid; or
[59370] (a3) increasing or generating the activity of a functional equivalent of (a1) or (a2); in a non-human organism or a part thereof; preferably a microorganism, a plant cell, a plant or a part thereof, as compared to a corresponding non-transformed wild type non-human organism or a part thereof; and
[59371] (b) growing the non-human organism under conditions which permit the production of cerebronic acid or a composition comprising cerebronic acid in said non-human organism or in the culture medium surrounding said non-human organism.

[59372] An embodiment of the present invention relates to a process for the production of eicosanoic acid, which comprises
[59373] (a1) increasing or generating the activity of a polypeptide comprising a polypeptide as depicted in a respective line in column 5 or 8 of Table II, application no. 12, or a homolog or a fragment thereof, a consensus sequence or at least one polypeptide motif as depicted in the respective line in column 8 of Table IV, application no. 12, whereby the respective line discloses in column 7 the fine chemical eicosanoic acid; or
[59374] (a2) increasing or generating the activity of an expression product of one or more nucleic acid molecule(s) comprising a polynucleotide as depicted in the respective line in column 5 or 8 of Table I, application no. 12, preferably the coding region thereof, or a homolog or a fragment thereof, whereby the respective line discloses in column 7 the fine chemical eicosanoic acid; or
[59375] (a3) increasing or generating the activity of a functional equivalent of (a1) or (a2);
[59376] in a non-human organism or a part thereof; preferably a microorganism, a plant cell, a plant or a part thereof, as compared to a corresponding non-transformed wild type non-human organism or a part thereof; and
[59377] (b) growing the non-human organism under conditions which permit the production of eicosanoic acid or a composition comprising eicosanoic acid in said non-human organism or in the culture medium surrounding said non-human organism.

[59378] An embodiment of the present invention relates to a process for the production of heptadecanoic acid, which comprises
[59379] (a1) increasing or generating the activity of a polypeptide comprising a polypeptide as depicted in a respective line in column 5 or 8 of Table II, application no. 12, or a homolog or a fragment thereof, a consensus sequence or at least one polypeptide motif as depicted in the respective line in column 8 of Table IV, application no. 12, whereby the respective line discloses in column 7 the fine chemical heptadecanoic acid; or
[59380] (a2) increasing or generating the activity of an expression product of one or more nucleic acid molecule(s) comprising a polynucleotide as depicted in the respective line in column 5 or 8 of Table I, application no. 12, preferably the coding region thereof, or a homolog or a fragment thereof, whereby the respective line discloses in column 7 the fine chemical heptadecanoic acid; or
[59381] (a3) increasing or generating the activity of a functional equivalent of (a1) or (a2);
[59382] in a non-human organism or a part thereof; preferably a microorganism, a plant cell, a plant or a part thereof, as compared to a corresponding non-transformed wild type non-human organism or a part thereof; and
[59383] (b) growing the non-human organism under conditions which permit the production of heptadecanoic acid or a composition comprising heptadecanoic acid in said non-human organism or in the culture medium surrounding said non-human organism. An embodiment of the present invention relates to a process for the production of hexadecadienoic acid, which comprises
[59384] (a1) increasing or generating the activity of a polypeptide comprising a polypeptide as depicted in a respective line in column 5 or 8 of Table II, application no. 12, or a homolog or a fragment thereof, a consensus sequence or at least one polypeptide motif as depicted in the respective line in column 8 of Table IV, application no. 12, whereby the respective line discloses in column 7 the fine chemical hexadecadienoic acid; or
[59385] (a2) increasing or generating the activity of an expression product of one or more nucleic acid molecule(s) comprising a polynucleotide as depicted in the respective line in column 5 or 8 of Table I, application no. 12, preferably the coding region thereof, or a homolog or a fragment thereof, whereby the respective line discloses in column 7 the fine chemical hexadecadienoic acid; or
[59386] (a3) increasing or generating the activity of a functional equivalent of (a1) or (a2);
[59387] in a non-human organism or a part thereof; preferably a microorganism, a plant cell, a plant or a part thereof, as compared to a corresponding non-transformed wild type non-human organism or a part thereof; and
[59388] (b) growing the non-human organism under conditions which permit the production of hexadecadienoic acid or a composition comprising hexadecadienoic acid in said non-human organism or in the culture medium surrounding said non-human organism. An embodiment of the present invention relates to a process for the production of hexadecatrienoic acid, which comprises
[59389] (a1) increasing or generating the activity of a polypeptide comprising a polypeptide as depicted in a respective line in column 5 or 8 of Table II, application no. 12, or a homolog or a fragment thereof, a consensus sequence or at least one polypeptide motif as depicted in the respective line in column 8 of Table IV, application no. 12, whereby the respective line discloses in column 7 the fine chemical hexadecatrienoic acid; or
[59390] (a2) increasing or generating the activity of an expression product of one or more nucleic acid molecule(s) comprising a polynucleotide as depicted in the respective line in column 5 or 8 of Table I, application no. 12, preferably the coding region thereof, or a homolog or a fragment thereof, whereby the respective line discloses in column 7 the fine chemical hexadecatrienoic acid; or
[59391] (a3) increasing or generating the activity of a functional equivalent of (a1) or (a2);
[59392] in a non-human organism or a part thereof; preferably a microorganism, a plant cell, a plant or a part thereof, as compared to a corresponding non-transformed wild type non-human organism or a part thereof; and
[59393] (b) growing the non-human organism under conditions which permit the production of hexadecatrienoic acid or a composition comprising hexadecatrienoic acid in said non-human organism or in the culture medium surrounding said non-human organism.

[59394] An embodiment of the present invention relates to a process for the production of lauric acid, which comprises
[59395] (a1) increasing or generating the activity of a polypeptide comprising a polypeptide as depicted in a respective line in column 5 or 8 of Table II, application no. 12, or a homolog or a fragment thereof, a consensus sequence or at least one polypeptide motif as depicted in the respective line in column 8 of Table IV, application no. 12, whereby the respective line discloses in column 7 the fine chemical lauric acid; or
[59396] (a2) increasing or generating the activity of an expression product of one or more nucleic acid molecule(s) comprising a polynucleotide as depicted in the respective line in column 5 or 8 of Table I, application no. 12, preferably the coding region thereof, or a homolog or a fragment thereof, whereby the respective line discloses in column 7 the fine chemical lauric acid; or
[59397] (a3) increasing or generating the activity of a functional equivalent of (a1) or (a2);
[59398] in a non-human organism or a part thereof; preferably a microorganism, a plant cell, a plant or a part thereof, as compared to a corresponding non-transformed wild type non-human organism or a part thereof; and
[59399] (b) growing the non-human organism under conditions which permit the production of lauric acid or a composition comprising lauric acid in said non-human organism or in the culture medium surrounding said non-human organism.

[59400] An embodiment of the present invention relates to a process for the production of myristic acid, which comprises
[59401] (a1) increasing or generating the activity of a polypeptide comprising a polypeptide as depicted in a respective line in column 5 or 8 of Table II, application no. 12, or a homolog or a fragment thereof, a consensus sequence or at least one polypeptide motif as depicted in the respective line in column 8 of Table IV, application no. 12, whereby the respective line discloses in column 7 the fine chemical myristic acid; or
[59402] (a2) increasing or generating the activity of an expression product of one or more nucleic acid molecule(s) comprising a polynucleotide as depicted in the respective line in column 5 or 8 of Table I, application no. 12, preferably the coding region thereof, or a homolog or a fragment thereof, whereby the respective line discloses in column 7 the fine chemical myristic acid; or
[59403] (a3) increasing or generating the activity of a functional equivalent of (a1) or (a2);
[59404] in a non-human organism or a part thereof; preferably a microorganism, a plant cell, a plant or a part thereof, as compared to a corresponding non-transformed wild type non-human organism or a part thereof; and
[59405] (b) growing the non-human organism under conditions which permit the production of myristic acid or a composition comprising myristic acid in said non-human organism or in the culture medium surrounding said non-human organism.

[59406] An embodiment of the present invention relates to a process for the production of nervonic acid, which comprises
[59407] (a1) increasing or generating the activity of a polypeptide comprising a polypeptide as depicted in a respective line in column 5 or 8 of Table II, application no. 12, or a homolog or a fragment thereof, a consensus sequence or at least one polypeptide motif as depicted in the respective line in column 8 of Table IV, application no. 12, whereby the respective line discloses in column 7 the fine chemical nervonic acid; or
[59408] (a2) increasing or generating the activity of an expression product of one or more nucleic acid molecule(s) comprising a polynucleotide as depicted in the respective line in column 5 or 8 of Table I, application no. 12, preferably the coding region thereof, or a homolog or a fragment thereof, whereby the respective line discloses in column 7 the fine chemical nervonic acid; or
[59409] (a3) increasing or generating the activity of a functional equivalent of (a1) or (a2);
[59410] in a non-human organism or a part thereof; preferably a microorganism, a plant cell, a plant or a part thereof, as compared to a corresponding non-transformed wild type non-human organism or a part thereof; and
[59411] (b) growing the non-human organism under conditions which permit the production of nervonic acid or a composition comprising nervonic acid in said non-human organism or in the culture medium surrounding said non-human organism.

[59412] An embodiment of the present invention relates to a process for the production of oleic acid, which comprises
[59413] (a1) increasing or generating the activity of a polypeptide comprising a polypeptide as depicted in a respective line in column 5 or 8 of Table II, application no. 12, or a homolog or a fragment thereof, a consensus sequence or at least one polypeptide motif as depicted in the respective line in column 8 of Table IV, application no. 12, whereby the respective line discloses in column 7 the fine chemical oleic acid; or
[59414] (a2) increasing or generating the activity of an expression product of one or more nucleic acid molecule(s) comprising a polynucleotide as depicted in the respective line in column 5 or 8 of Table I, application no. 12, preferably the coding region thereof, or a homolog or a fragment thereof, whereby the respective line discloses in column 7 the fine chemical oleic acid; or
[59415] (a3) increasing or generating the activity of a functional equivalent of (a1) or (a2);
[59416] in a non-human organism or a part thereof; preferably a microorganism, a plant cell, a plant or a part thereof, as compared to a corresponding non-transformed wild type non-human organism or a part thereof; and
[59417] (b) growing the non-human organism under conditions which permit the production of oleic acid or a composition comprising oleic acid in said non-human organism or in the culture medium surrounding said non-human organism.

[59418] Accordingly, the increase or generation of one or more said activities is for example conferred by one or more expression products of said nucleic acid molecule, e.g. proteins. Accordingly, in the present invention described above, the increase or generation of one or more said activities is for example conferred by one or more protein(s) each comprising a polypeptide selected from the group as depicted in Table II, application no. 12, column 5 and 8, or a homolog or a fragment thereof.

[59419] The process of the invention comprises in one embodiment the following steps:
[59420] (i) increasing or generating of the expression of; and/or
[59421] (ii) increasing or generating the expression of an expression product of; and/or
[59422] (iii) increasing or generating one or more activities of an expression product encoded by; at least one nucleic acid molecule (in the following “Fine Chemical Related Protein (FCRP)”-encoding gene or “FCRP”-gene) comprising a nucleic acid molecule selected from the group consisting of:
[59423] (a) a nucleic acid molecule encoding the polypeptide shown in column 5 or 8 of Table II, preferably Table II B, application no. 12, or a homolog or a fragment thereof;
[59424] (b) a nucleic acid molecule shown in column 5 or 8 of Table I, preferably Table I B, application no. 12, or a homolog or a fragment thereof (preferably the coding region thereof);
[59425] (c) a nucleic acid molecule, which, as a result of the degeneracy of the genetic code, can be derived from a polypeptide sequence depicted in column 5 or 8 of Table II, preferably Table II B, application no. 12;
[59426] (d) a nucleic acid molecule having at least 30%, in particular at least 50%, 60%, 70%, 80%, 85%, 90%, 95%, 97%, 98%, 99% or 99.5% identity with the nucleic acid molecule sequence of a polynucleotide comprising the nucleic acid molecule shown in column 5 or 8 of Table I, preferably Table I B, application no. 12, or the coding region thereof;
[59427] (e) a nucleic acid molecule encoding a polypeptide having at least 30%, in particular 50%, 60%, 70%, 80%, 85%, 90%, 95%, 97%, 98%, 99% or 99.5% identity with the amino acid sequence of the polypeptide encoded by the nucleic acid molecule of (a), (b), (c) or (d),
[59428] (f) a nucleic acid molecule which hybridizes with a nucleic acid molecule of (a), (b), (c), (d) or (e) under stringent hybridization conditions;
[59429] (g) a nucleic acid molecule encoding a polypeptide which can be isolated with the aid of monoclonal or polyclonal antibodies made against a polypeptide encoded by one of the nucleic acid molecules of (a), (b), (c), (d), (e) or (f);
[59430] (h) a nucleic acid molecule encoding a polypeptide comprising the consensus sequence or one or more polypeptide motifs as shown in column 8 of Table IV, application no. 12;
[59431] (i) a nucleic acid molecule encoding a polypeptide having the activity represented by a respective protein as depicted in column 5 of Table II, application no. 12;
[59432] (j) a nucleic acid molecule which comprises a polynucleotide, which is obtained by amplifying a cDNA library or a genomic library using the primers as depicted in column 8 of Table III, application no. 12; and
[59433] (k) a nucleic acid molecule which is obtainable by screening a suitable nucleic acid library, especially a cDNA library and/or a genomic library, under stringent hybridization conditions with a probe comprising a complementary sequence of a nucleic acid molecule of (a), (b), (c), (d), (e), (f), (g), (h), (i) or (j) or with a fragment thereof, having at least 15 nt, preferably 20 nt, 30 nt, 50 nt, 100 nt, 200 nt, 500 nt, 1000 nt, 1500 nt, 2000 nt or 3000 nt of a nucleic acid molecule complementary to a nucleic acid molecule sequence characterized in (a), (b), (c), (d), (e), (f), (g), (h), (i) or (j);
[59434] or a nucleic acid molecule comprising a sequence which is complementary thereto.
   (All the references to Tables I to IV are references to the corresponding lines of Tables I to IV.)

[59435] The term “increasing or generating of the expression of” may also be interchanged by the term “overexpressing”.

[59436] In a preferred embodiment thereof said nucleic acid molecule encodes a polypeptide which has the activity of the polypeptide represented by a protein comprising a polypeptide as depicted in the corresponding hit in column 5 of Table II, application no. 12.

[59437] In another preferred embodiment thereof said nucleic acid molecule confers a generation or an increase of the respective fine chemical in a non-human organism or a part thereof as compared to a corresponding wild-type non-human organism or part thereof.

[59438] In another preferred embodiment thereof said nucleic acid molecule encodes a polypeptide which has the activity of the polypeptide represented by a protein as depicted in the corresponding hit in column 5 of Table II, application no. 12, and confers a generation or an increase of the respective fine chemical in a non-human organism or a part thereof as compared to a corresponding wild-type non-human organism or part thereof.

[59439] Accordingly, the genes of the present invention or used in accordance with the present invention, which respectively encode a protein having an activity of 2,3-dihydroxyphenylpropionate 1,2-dioxygenase, 2-C-methyl-D-erythritol 4-phosphate cytidylyltransferase, 30S ribosomal protein S3, 3-ketoacyl-CoA thiolase, 3-oxoacyl-[acyl-carrier-protein] reductase, 3-oxoacyl-[acyl-carrier-protein] synthase, 40S ribosomal protein S17, ABC transporter component, ABC transporter permease protein, acetyl-coenzyme A synthetase, acid shock protein, acyl-CoA synthase, acyl-desaturase, adenosine kinase, aldolase, alkaline phosphatase isozyme conversion protein, amino acid ABC transporter permease protein, aminotransferase, ankyrin repeat protein, At2g33510-protein, ATPase epsilon subunit, ATP-binding component of a transport system, b0050-protein, b0249-protein, b0371-protein, b0518-protein, b0801-protein, b1046-protein, b1346-protein, b1470-protein, b1522-protein, b1670-protein, b1703-protein, b1837-protein, b2032-protein, b2099-protein, b2107-protein, b2126-protein, b2139-protein, b2360-protein, b2474-protein, b2513-protein, b2654-protein, b3442-protein, b3644-protein, b3812-protein, b3944-protein, b4023-protein, b4205-protein, beta-hydroxylase, betaine aldehyde dehydrogenase, bifunctional protein (phosphoribosyltransferase and regulatory protein), bifunctional purine biosynthesis protein, binding-protein-dependent transport systems inner membrane component, biotin synthase, calcium-dependent protein kinase, carbon dioxide concentrating mechanism protein, cardiolipin synthase, CDP-diacylglycerol-serine O-phosphatidyltransferase, cell division control protein, cell wall protein, chlorophyllase, citrate synthase, coproporphyrinogen III oxidase, cyclin, cystathionine gamma-synthase, cysteine synthase A, dihydrolipoamide dehydrogenase, DNA mismatch repair protein, DnaJ-like chaperone, electron transport complex protein, Elongation factor Tu, ethanolamine utilization protein, F-box protein, ferredoxin, fructose 1,6-bisphosphatase, fumarylacetoacetate hydrolase, glutamate 5-kinase, glutamate-ammonia-ligase, glutaredoxin, glycerol-3-phosphate dehydrogenase, glycine cleavage system H protein, GM02LC38418-protein, heat shock protein, heat shock transcription factor, HesB/YadR/YfhF family protein, homocitrate synthase, hydrolase, isocitrate dehydrogenase, lipoprotein precursor, malate dehydrogenase, malonyl CoA-acyl carrier protein transacylase, metal-dependent hydrolase, molecular chaperone, molecular chaperone portein, monothiol glutaredoxin, multiple antibiotic resistance protein, murein transglycosylase, N-acetyl-gamma-glutamyl-phosphate reductase, NADP-dependent malic enzyme, outer-membrane lipoprotein precursor, oxidoreductase, permease protein of ABC transporter, phage-related repressor protein, phosphatase, phosphate import ATP-binding protein, phosphatidylserine synthase, phospho-2-dehydro-3-deoxyheptonate aldolase, phosphoadenosine phosphosulfate reductase, phosphotransferase, phosphotransferase system component, polygalacturonase, protein kinase, protein phosphatase, purine nucleoside phosphorylase, pyridoxamine kinase, recombinase A, sec-independent protein translocase, Sec-independent protein translocase subunit, sensor histidine kinase, sensor kinase, sll0281-protein, sll0406-protein, small nuclear ribonucleoprotein , sodium/proton antiporter, squalene monooxygenase, sugar transport system permease protein, threonine dehydratase, transcription factor, transcriptional regulator, transcriptional regulator protein, transport protein, tryptophan synthase alpha chain, TTC1386-protein, vacuolar processing enzyme, ycl027w-protein, ycl049c-protein, ydr273w-protein, ydr339c-protein, YFL019C-protein, ygl237c-protein, YGR104C-protein, yhr033w-protein, YJL127W-A-protein, ylr326w-protein, yml083c-protein, yml084w-protein, or ynl321w-protein, which respectively encode a protein comprising a polypeptide encoded by a nucleic acid sequence as shown in Table I, application no. 12, column 5 or 8, (preferably the coding region thereof), or a homolog or a fragment thereof, which respectively encode a protein comprising a polypeptide as depicted in Table II, application no. 12, column 5 or 8, or a homolg or a fragment thereof, and/or which respectively can be amplified with the primer set shown in Table III, application no. 12, column 8, are also referred to as “FCRP genes”.

[59440] Proteins or polypeptides encoded by “FCRP-genes” are referred to as “Fine Chemical Related Proteins” or “FCRP”. For the purposes of the description of the present invention, the respective protein having an activity of 2,3-dihydroxyphenylpropionate 1,2-dioxygenase, 2-C-methyl-D-erythritol 4-phosphate cytidylyltransferase, 30S ribosomal protein S3, 3-ketoacyl-CoA thiolase, 3-oxoacyl-[acyl-carrier-protein] reductase, 3-oxoacyl-[acyl-carrier-protein] synthase, 40S ribosomal protein S17, ABC transporter component, ABC transporter permease protein, acetyl-coenzyme A synthetase, acid shock protein, acyl-CoA synthase, acyldesaturase, adenosine kinase, aldolase, alkaline phosphatase isozyme conversion protein, amino acid ABC transporter permease protein, aminotransferase, ankyrin repeat protein, At2g33510-protein, ATPase epsilon subunit, ATP-binding component of a transport system, b0050-protein, b0249-protein, b0371-protein, b0518-protein, b0801-protein, b1046-protein, b1346-protein, b1470-protein, b1522-protein, b1670-protein, b1703-protein, b1837-protein, b2032-protein, b2099-protein, b2107-protein, b2126-protein, b2139-protein, b2360-protein, b2474-protein, b2513-protein, b2654-protein, b3442-protein, b3644-protein, b3812-protein, b3944-protein, b4023-protein, b4205-protein, beta-hydroxylase, betaine aldehyde dehydrogenase, bifunctional protein (phosphoribosyltransferase and regulatory protein), bifunctional purine biosynthesis protein, binding-protein-dependent transport systems inner membrane component, biotin synthase, calcium-dependent protein kinase, carbon dioxide concentrating mechanism protein, cardiolipin synthase, CDP-diacylglycerol-serine O-phosphatidyltransferase, cell division control protein, cell wall protein, chlorophyllase, citrate synthase, coproporphyrinogen III oxidase, cyclin, cystathionine gamma-synthase, cysteine synthase A, dihydrolipoamide dehydrogenase, DNA mismatch repair protein, DnaJ-like chaperone, electron transport complex protein, Elongation factor Tu, ethanolamine utilization protein, F-box protein, ferredoxin, fructose 1,6-bisphosphatase, fumarylacetoacetate hydrolase, glutamate 5-kinase, glutamate-ammonia-ligase, glutaredoxin, glycerol-3-phosphate dehydrogenase, glycine cleavage system H protein, GM02LC38418-protein, heat shock protein, heat shock transcription factor, HesB/YadR/YfhF family protein, homocitrate synthase, hydrolase, isocitrate dehydrogenase, lipoprotein precursor, malate dehydrogenase, malonyl CoA-acyl carrier protein transacylase, metal-dependent hydrolase, molecular chaperone, molecular chaperone portein, monothiol glutaredoxin, multiple antibiotic resistance protein, murein transglycosylase, N-acetyl-gamma-glutamyl-phosphate reductase, NADP-dependent malic enzyme, outer-membrane lipoprotein precursor, oxidoreductase, permease protein of ABC transporter, phage-related repressor protein, phosphatase, phosphate import ATP-binding protein, phosphatidylserine synthase, phospho-2-dehydro-3-deoxyheptonate aldolase, phosphoadenosine phosphosulfate reductase, phosphotransferase, phosphotransferase system component, polygalacturonase, protein kinase, protein phosphatase, purine nucleoside phosphorylase, pyridoxamine kinase, recombinase A, secindependent protein translocase, Sec-independent protein translocase subunit, sensor histidine kinase, sensor kinase, sll0281-protein, sll0406-protein, small nuclear ribonucleoprotein, sodium/proton antiporter, squalene monooxygenase, sugar transport system permease protein, threonine dehydratase, transcription factor, transcriptional regulator, transcriptional regulator protein, transport protein, tryptophan synthase alpha chain, TTC1386-protein, vacuolar processing enzyme, ycl027w-protein, ycl049c-protein, ydr273w-protein, ydr339c-protein, YFL019C-protein, ygl237c-protein, YGR104C-protein, yhr033w-protein, YJL127W-A-protein, ylr326w-protein, yml083c-protein, yml084w-protein, or ynl321w-protein, the respective protein comprising a polypeptide encoded by one or more respective nucleic acid sequences as shown in Table I, application no. 12, column 5 or 8, (preferably the coding region thereof), or a homolog or fragment thereof, the respective protein comprising a respective polypeptide as depicted in Table II, application no. 12, column 5 or 8, or a homolog or fragment thereof, the respective protein comprising a sequence corresponding to the consensus sequence as shown in Table IV, application no. 12, column 8, and/or the respective protein comprising at least one polypeptide motif as shown in Table IV, application no. 12, column 8 is also referred to as Fine Chemical Related Protein” or “FCRP”.

[59441] Thus, in one embodiment, the present invention provides a process of the production of 2-hydroxybehenic acid, 2-hydroxypalmitic acid, 2-hydroxytetracosenoic acid (preferably 2-hydroxynervonic acid), behenic acid, cerebronic acid, eicosanoic acid, heptadecanoic acid, hexadecadienoic acid, hexadecatrienoic acid, lauric acid, myristic acid, nervonic acid, and/or oleic acid,respectively, by increasing or generating one or more activities, especially selected from the group consisting of 2,3-dihydroxyphenylpropionate 1,2-dioxygenase, 2-C-methyl-D-erythritol 4-phosphate cytidylyltransferase, 30S ribosomal protein S3, 3-ketoacyl-CoA thiolase, 3-oxoacyl-[acyl-carrier-protein] reductase, 3-oxoacyl-[acyl-carrier-protein] synthase, 40S ribosomal protein S17, ABC transporter component, ABC transporter permease protein, acetyl-coenzyme A synthetase, acid shock protein, acyl-CoA synthase, acyl-desaturase, adenosine kinase, aldolase, alkaline phosphatase isozyme conversion protein, amino acid ABC transporter permease protein, aminotransferase, ankyrin repeat protein, At2g33510-protein, ATPase epsilon subunit, ATP-binding component of a transport system, b0050-protein, b0249-protein, b0371-protein, b0518-protein, b0801-protein, b1046-protein, b1346-protein, b1470-protein, b1522-protein, b1670-protein, b1703-protein, b1837-protein, b2032-protein, b2099-protein, b2107-protein, b2126-protein, b2139-protein, b2360-protein, b2474-protein, b2513-protein, b2654-protein, b3442-protein, b3644-protein, b3812-protein, b3944-protein, b4023-protein, b4205-protein, beta-hydroxylase, betaine aldehyde dehydrogenase, bifunctional protein (phosphoribosyltransferase and regulatory protein), bifunctional purine biosynthesis protein, binding-protein-dependent transport systems inner membrane component, biotin synthase, calcium-dependent protein kinase, carbon dioxide concentrating mechanism protein, cardiolipin synthase, CDP-diacylglycerol-serine O-phosphatidyltransferase, cell division control protein, cell wall protein, chlorophyllase, citrate synthase, coproporphyrinogen III oxidase, cyclin, cystathionine gamma-synthase, cysteine synthase A, dihydrolipoamide dehydrogenase, DNA mismatch repair protein, DnaJ-like chaperone, electron transport complex protein, Elongation factor Tu, ethanolamine utilization protein, F-box protein, ferredoxin, fructose 1,6-bisphosphatase, fumarylacetoacetate hydrolase, glutamate 5-kinase, glutamate-ammonia-ligase, glutaredoxin, glycerol-3-phosphate dehydrogenase, glycine cleavage system H protein, GM02LC38418-protein, heat shock protein, heat shock transcription factor, HesB/YadR/YfhF family protein, homocitrate synthase, hydrolase, isocitrate dehydrogenase, lipoprotein precursor, malate dehydrogenase, malonyl CoA-acyl carrier protein transacylase, metal-dependent hydrolase, molecular chaperone, molecular chaperone portein, monothiol glutaredoxin, multiple antibiotic resistance protein, murein transglycosylase, N-acetyl-gamma-glutamyl-phosphate reductase, NADP-dependent malic enzyme, outer-membrane lipoprotein precursor, oxidoreductase, permease protein of ABC transporter, phage-related repressor protein, phosphatase, phosphate import ATP-binding protein, phosphatidylserine synthase, phospho-2-dehydro-3-deoxyheptonate aldolase, phosphoadenosine phosphosulfate reductase, phosphotransferase, phosphotransferase system component, polygalacturonase, protein kinase, protein phosphatase, purine nucleoside phosphorylase, pyridoxamine kinase, recombinase A, sec-independent protein translocase, Sec-independent protein translocase subunit, sensor histidine kinase, sensor kinase, sll0281-protein, sll0406-protein, small nuclear ribonucleoprotein , sodium/proton antiporter, squalene monooxygenase, sugar transport system permease protein, threonine dehydratase, transcription factor, transcriptional regulator, transcriptional regulator protein, transport protein, tryptophan synthase alpha chain, TTC1386-protein, vacuolar processing enzyme, ycl027w-protein, ycl049c-protein, ydr273w-protein, ydr339c-protein, YFL019C-protein, ygl237c-protein, YGR104C-protein, yhr033w-protein, YJL127W-A-protein, ylr326w-protein, yml083c-protein, yml084w-protein, and ynl321w-protein, which is conferred by one or more FCRPs or the gene product of one or more FCRP-genes, for example by the gene product of a nucleic acid sequences comprising a polynucleotide selected from the group as shown in Table I, application no. 12, column 5 or 8, (preferably by the coding region thereof), or a homolog or a fragment thereof, e.g. or by one or more proteins each comprising a polypeptide encoded by one or more nucleic acid sequences selected from the group as shown in Table I, application no. 12, column 5 or 8, (preferably by the coding region thereof), or a homolog or a fragment thereof, or by one or more protein(s) each comprising a polypeptide selected from the group as depicted in Table II, application no. 12, column 5 and 8, or a homolog thereof, or a protein comprising a sequence corresponding to the consensus sequence or comprising at least one polypeptide motif as shown in Table IV, application no. 12, column 8.

[59442] for the disclosure of this paragraph see [0025.1.8.8] above.

[59443] In an embodiment, the process comprises increasing or generating the activity of one or more polypeptides having said activity, e.g. by generating or increasing the amount and/or specific activity in the cell or a compartment of a cell of one of more FCRP, especially selected from the group consisting of 2,3-dihydroxyphenylpropionate 1,2-dioxygenase, 2-C-methyl-D-erythritol 4-phosphate cytidylyltransferase, 30S ribosomal protein S3, 3-ketoacyl-CoA thiolase, 3-oxoacyl-[acyl-carrier-protein] reductase, 3-oxoacyl-[acyl-carrier-protein] synthase, 40S ribosomal protein S17, ABC transporter component, ABC transporter permease protein, acetyl-coenzyme A synthetase, acid shock protein, acyl-CoA synthase, acyl-desaturase, adenosine kinase, aldolase, alkaline phosphatase isozyme conversion protein, amino acid ABC transporter permease protein, aminotransferase, ankyrin repeat protein, At2g33510-protein, ATPase epsilon subunit, ATP-binding component of a transport system, b0050-protein, b0249-protein, b0371-protein, b0518-protein, b0801-protein, b1046-protein, b1346-protein, b1470-protein, b1522-protein, b1670-protein, b1703-protein, b1837-protein, b2032-protein, b2099-protein, b2107-protein, b2126-protein, b2139-protein, b2360-protein, b2474-protein, b2513-protein, b2654-protein, b3442-protein, b3644-protein, b3812-protein, b3944-protein, b4023-protein, b4205-protein, beta-hydroxylase, betaine aldehyde dehydrogenase, bifunctional protein (phosphoribosyltransferase and regulatory protein), bifunctional purine biosynthesis protein, binding-protein-dependent transport systems inner membrane component, biotin synthase, calcium-dependent protein kinase, carbon dioxide concentrating mechanism protein, cardiolipin synthase, CDP-diacylglycerol-serine O-phosphatidyltransferase, cell division control protein, cell wall protein, chlorophyllase, citrate synthase, coproporphyrinogen III oxidase, cyclin, cystathionine gamma-synthase, cysteine synthase A, dihydrolipoamide dehydrogenase, DNA mismatch repair protein, DnaJ-like chaperone, electron transport complex protein, Elongation factor Tu, ethanolamine utilization protein, F-box protein, ferredoxin, fructose 1,6-bisphosphatase, fumarylacetoacetate hydrolase, glutamate 5-kinase, glutamate-ammonia-ligase, glutaredoxin, glycerol-3-phosphate dehydrogenase, glycine cleavage system H protein, GM02LC38418-protein, heat shock protein, heat shock transcription factor, HesB/YadR/YfhF family protein, homocitrate synthase, hydrolase, isocitrate dehydrogenase, lipoprotein precursor, malate dehydrogenase, malonyl CoA-acyl carrier protein transacylase, metal-dependent hydrolase, molecular chaperone, molecular chaperone portein, monothiol glutaredoxin, multiple antibiotic resistance protein, murein transglycosylase, N-acetyl-gamma-glutamyl-phosphate reductase, NADP-dependent malic enzyme, outer-membrane lipoprotein precursor, oxidoreductase, permease protein of ABC transporter, phage-related repressor protein, phosphatase, phosphate import ATP-binding protein, phosphatidylserine synthase, phospho-2-dehydro-3-deoxyheptonate aldolase, phosphoadenosine phosphosulfate reductase, phosphotransferase, phosphotransferase system component, polygalacturonase, protein kinase, protein phosphatase, purine nucleoside phosphorylase, pyridoxamine kinase, recombinase A, sec-independent protein translocase, Sec-independent protein translocase subunit, sensor histidine kinase, sensor kinase, sll0281-protein, sll0406-protein, small nuclear ribonucleoprotein, sodium/proton antiporter, squalene monooxygenase, sugar transport system permease protein, threonine dehydratase, transcription factor, transcriptional regulator, transcriptional regulator protein, transport protein, tryptophan synthase alpha chain, TTC1386-protein, vacuolar processing enzyme, ycl027w-protein, ycl049c-protein, ydr273w-protein, ydr339c-protein, YFL019C-protein, yg1237c-protein, YGR104C-protein, yhr033w-protein, YJL127W-A-protein, ylr326w-protein, yml083c-protein, yml084w-protein, and ynl321w-protein, for example of the respective polypeptide as depicted in Table II, application no. 12, column 5 and 8, or a homolog or a fragment thereof, or the respective polypeptide comprising a sequence corresponding to the consensus sequences as shown in Table IV, application no. 12, column 8, or the respective polypeptide comprising at least one polypeptide motif as depicted in Table IV, application no. 12, column 8.

[59444] A further embodiment of the present invention relates to a process for the production of cerebronic acid, which comprises
[59445] (a) increasing or generating the activity of a chlorophyllase non-targeted in a non-human organism or a part thereof, preferably a microorganism, a plant cell, a plant or a part thereof, as compared to a corresponding non-transformed wild type non-human organism or a part thereof; and
[59446] (b) growing the non-human organism or a part thereof under conditions which permit the production of cerebronic acid or a composition comprising cerebronic acid in said non-human organism or in the culture medium surrounding said non-human organism.

[59447] A further embodiment of the present invention relates to a process for the production of 2-hydroxytetracosenoic acid (preferably 2-hydroxynervonic acid), which comprises
[59448] (a) increasing or generating the activity of a chlorophyllase non-targeted in a non-human organism or a part thereof, preferably a microorganism, a plant cell, a plant or a part thereof, as compared to a corresponding non-transformed wild type non-human organism or a part thereof; and
[59449] (b) growing the non-human organism or a part thereof under conditions which permit the production of 2-hydroxytetracosenoic acid (preferably 2-hydroxynervonic acid) or a composition comprising 2-hydroxytetracosenoic acid (preferably 2-hydroxynervonic acid) in said non-human organism or in the culture medium surrounding said non-human organism.

[59450] A further embodiment of the present invention relates to a process for the production of hexadecatrienoic acid, which comprises
[59451] (a) increasing or generating the activity of a transcription factor non-targeted in a non-human organism or a part thereof, preferably a microorganism, a plant cell, a plant or a part thereof, as compared to a corresponding non-transformed wild type non-human organism or a part thereof; and
[59452] (b) growing the non-human organism or a part thereof under conditions which permit the production of hexadecatrienoic acid or a composition comprising hexadecatrienoic acid in said non-human organism or in the culture medium surrounding said non-human organism.

[59453] A further embodiment of the present invention relates to a process for the production of cerebronic acid, which comprises
[59454] (a) increasing or generating the activity of a protein phosphatase non-targeted in a non-human organism or a part thereof, preferably a microorganism, a plant cell, a plant or a part thereof, as compared to a corresponding non-transformed wild type non-human organism or a part thereof; and
[59455] (b) growing the non-human organism or a part thereof under conditions which permit the production of cerebronic acid or a composition comprising cerebronic acid in said non-human organism or in the culture medium surrounding said non-human organism.

[59456] A further embodiment of the present invention relates to a process for the production of hexadecatrienoic acid, which comprises
[59457] (a) increasing or generating the activity of a protein phosphatase non-targeted in a non-human organism or a part thereof, preferably a microorganism, a plant cell, a plant or a part thereof, as compared to a corresponding non-transformed wild type non-human organism or a part thereof; and
[59458] (b) growing the non-human organism or a part thereof under conditions which permit the production of hexadecatrienoic acid or a composition comprising hexadecatrienoic acid in said non-human organism or in the culture medium surrounding said non-human organism.

[59459] A further embodiment of the present invention relates to a process for the production of 2-hydroxybehenic acid, which comprises
[59460] (a) increasing or generating the activity of a protein phosphatase non-targeted in a non-human organism or a part thereof, preferably a microorganism, a plant cell, a plant or a part thereof, as compared to a corresponding non-transformed wild type non-human organism or a part thereof; and
[59461] (b) growing the non-human organism or a part thereof under conditions which permit the production of 2-hydroxybehenic acid or a composition comprising 2-hydroxybehenic acid in said non-human organism or in the culture medium surrounding said non-human organism.

[59462] A further embodiment of the present invention relates to a process for the production of 2-hydroxypalmitic acid, which comprises
[59463] (a) increasing or generating the activity of a At2g33510-protein non-targeted in a non-human organism or a part thereof, preferably a microorganism, a plant cell, a plant or a part thereof, as compared to a corresponding non-transformed wild type non-human organism or a part thereof; and
[59464] (b) growing the non-human organism or a part thereof under conditions which permit the production of 2-hydroxypalmitic acid or a composition comprising 2-hydroxypalmitic acid in said non-human organism or in the culture medium surrounding said non-human organism.

[59465] A further embodiment of the present invention relates to a process for the production of 2-hydroxytetracosenoic acid (preferably 2-hydroxynervonic acid), which comprises
[59466] (a) increasing or generating the activity of a heat shock transcription factor non-targeted in a non-human organism or a part thereof, preferably a microorganism, a plant cell, a plant or a part thereof, as compared to a corresponding non-transformed wild type non-human organism or a part thereof; and
[59467] (b) growing the non-human organism or a part thereof under conditions which permit the production of 2-hydroxytetracosenoic acid (preferably 2-hydroxynervonic acid) or a composition comprising 2-hydroxytetracosenoic acid (preferably 2-hydroxynervonic acid) in said non-human organism or in the culture medium surrounding said non-human organism.

[59468] A further embodiment of the present invention relates to a process for the production of cerebronic acid, which comprises
[59469] (a) increasing or generating the activity of a adenosine kinase non-targeted in a non-human organism or a part thereof, preferably a microorganism, a plant cell, a plant or a part thereof, as compared to a corresponding non-transformed wild type non-human organism or a part thereof; and
[59470] (b) growing the non-human organism or a part thereof under conditions which permit the production of cerebronic acid or a composition comprising cerebronic acid in said non-human organism or in the culture medium surrounding said non-human organism.

[59471] A further embodiment of the present invention relates to a process for the production of 2-hydroxybehenic acid, which comprises
[59472] (a) increasing or generating the activity of a adenosine kinase non-targeted in a non-human organism or a part thereof, preferably a microorganism, a plant cell, a plant or a part thereof, as compared to a corresponding non-transformed wild type non-human organism or a part thereof; and
[59473] (b) growing the non-human organism or a part thereof under conditions which permit the production of 2-hydroxybehenic acid or a composition comprising 2-hydroxybehenic acid in said non-human organism or in the culture medium surrounding said non-human organism.

[59474] A further embodiment of the present invention relates to a process for the production of 2-hydroxytetracosenoic acid (preferably 2-hydroxynervonic acid), which comprises
[59475] (a) increasing or generating the activity of a DNA mismatch repair protein non-targeted in a non-human organism or a part thereof, preferably a microorganism, a plant cell, a plant or a part thereof, as compared to a corresponding non-transformed wild type non-human organism or a part thereof; and
[59476] (b) growing the non-human organism or a part thereof under conditions which permit the production of 2-hydroxytetracosenoic acid (preferably 2-hydroxynervonic acid) or a composition comprising 2-hydroxytetracosenoic acid (preferably 2-hydroxynervonic acid) in said non-human organism or in the culture medium surrounding said non-human organism.

[59477] A further embodiment of the present invention relates to a process for the production of cerebronic acid, which comprises
[59478] (a) increasing or generating the activity of a glutaredoxin non-targeted in a non-human organism or a part thereof, preferably a microorganism, a plant cell, a plant or a part thereof, as compared to a corresponding non-transformed wild type non-human organism or a part thereof; and
[59479] (b) growing the non-human organism or a part thereof under conditions which permit the production of cerebronic acid or a composition comprising cerebronic acid in said non-human organism or in the culture medium surrounding said non-human organism.

[59480] A further embodiment of the present invention relates to a process for the production of hexadecatrienoic acid, which comprises
[59481] (a) increasing or generating the activity of a glutaredoxin non-targeted in a non-human organism or a part thereof, preferably a microorganism, a plant cell, a plant or a part thereof, as compared to a corresponding non-transformed wild type non-human organism or a part thereof; and
[59482] (b) growing the non-human organism or a part thereof under conditions which permit the production of hexadecatrienoic acid or a composition comprising hexadecatrienoic acid in said non-human organism or in the culture medium surrounding said non-human organism.

[59483] A further embodiment of the present invention relates to a process for the production of 2-hydroxybehenic acid, which comprises
[59484] (a) increasing or generating the activity of a glutaredoxin non-targeted in a non-human organism or a part thereof, preferably a microorganism, a plant cell, a plant or a part thereof, as compared to a corresponding non-transformed wild type non-human organism or a part thereof; and
[59485] (b) growing the non-human organism or a part thereof under conditions which permit the production of 2-hydroxybehenic acid or a composition comprising 2-hydroxybehenic acid in said non-human organism or in the culture medium surrounding said non-human organism.

[59486] A further embodiment of the present invention relates to a process for the production of 2-hydroxypalmitic acid, which comprises
[59487] (a) increasing or generating the activity of a transcription factor non-targeted in a non-human organism or a part thereof, preferably a microorganism, a plant cell, a plant or a part thereof, as compared to a corresponding non-transformed wild type non-human organism or a part thereof; and
[59488] (b) growing the non-human organism or a part thereof under conditions which permit the production of 2-hydroxypalmitic acid or a composition comprising 2-hydroxypalmitic acid in said non-human organism or in the culture medium surrounding said non-human organism.

[59489] A further embodiment of the present invention relates to a process for the production of 2-hydroxybehenic acid, which comprises
[59490] (a) increasing or generating the activity of a monothiol glutaredoxin non-targeted in a non-human organism or a part thereof, preferably a microorganism, a plant cell, a plant or a part thereof, as compared to a corresponding non-transformed wild type non-human organism or a part thereof; and
[59491] (b) growing the non-human organism or a part thereof under conditions which permit the production of 2-hydroxybehenic acid or a composition comprising 2-hydroxybehenic acid in said non-human organism or in the culture medium surrounding said non-human organism.

[59492] A further embodiment of the present invention relates to a process for the production of 2-hydroxypalmitic acid, which comprises
[59493] (a) increasing or generating the activity of a monothiol glutaredoxin non-targeted in a non-human organism or a part thereof, preferably a microorganism, a plant cell, a plant or a part thereof, as compared to a corresponding non-transformed wild type non-human organism or a part thereof; and
[59494] (b) growing the non-human organism or a part thereof under conditions which permit the production of 2-hydroxypalmitic acid or a composition comprising 2-hydroxypalmitic acid in said non-human organism or in the culture medium surrounding said non-human organism.

[59495] A further embodiment of the present invention relates to a process for the production of hexadecatrienoic acid, which comprises
[59496] (a) increasing or generating the activity of a monothiol glutaredoxin non-targeted in a non-human organism or a part thereof, preferably a microorganism, a plant cell, a plant or a part thereof, as compared to a corresponding non-transformed wild type non-human organism or a part thereof; and
[59497] (b) growing the non-human organism or a part thereof under conditions which permit the production of hexadecatrienoic acid or a composition comprising hexadecatrienoic acid in said non-human organism or in the culture medium surrounding said non-human organism.

[59498] A further embodiment of the present invention relates to a process for the production of 2-hydroxybehenic acid, which comprises
[59499] (a) increasing or generating the activity of a monothiol glutaredoxin non-targeted in a non-human organism or a part thereof, preferably a microorganism, a plant cell, a plant or a part thereof, as compared to a corresponding non-transformed wild type non-human organism or a part thereof; and
[59500] (b) growing the non-human organism or a part thereof under conditions which permit the production of 2-hydroxybehenic acid or a composition comprising 2-hydroxybehenic acid in said non-human organism or in the culture medium surrounding said non-human organism.

[59501] A further embodiment of the present invention relates to a process for the production of cerebronic acid, which comprises
[59502] (a) increasing or generating the activity of a monothiol glutaredoxin non-targeted in a non-human organism or a part thereof, preferably a microorganism, a plant cell, a plant or a part thereof, as compared to a corresponding non-transformed wild type non-human organism or a part thereof; and
[59503] (b) growing the non-human organism or a part thereof under conditions which permit the production of cerebronic acid or a composition comprising cerebronic acid in said non-human organism or in the culture medium surrounding said non-human organism.

[59504] A further embodiment of the present invention relates to a process for the production of 2-hydroxybehenic acid, which comprises
[59505] (a) increasing or generating the activity of a protein phosphatase non-targeted in a non-human organism or a part thereof, preferably a microorganism, a plant cell, a plant or a part thereof, as compared to a corresponding non-transformed wild type non-human organism or a part thereof; and
[59506] (b) growing the non-human organism or a part thereof under conditions which permit the production of 2-hydroxybehenic acid or a composition comprising 2-hydroxybehenic acid in said non-human organism or in the culture medium surrounding said non-human organism.

[59507] A further embodiment of the present invention relates to a process for the production of 2-hydroxytetracosenoic acid (preferably 2-hydroxynervonic acid), which comprises
[59508] (a) increasing or generating the activity of a protein phosphatase non-targeted in a non-human organism or a part thereof, preferably a microorganism, a plant cell, a plant or a part thereof, as compared to a corresponding non-transformed wild type non-human organism or a part thereof; and
[59509] (b) growing the non-human organism or a part thereof under conditions which permit the production of 2-hydroxytetracosenoic acid (preferably 2-hydroxynervonic acid) or a composition comprising 2-hydroxytetracosenoic acid (preferably 2-hydroxynervonic acid) in said non-human organism or in the culture medium surrounding said non-human

[59510] A furthogenribardiment of the present invention relates to a process for the production of cerebronic acid, which comprises
[59511] (a) increasing or generating the activity of a glutaredoxin non-targeted in a non-human organism or a part thereof, preferably a microorganism, a plant cell, a plant or a part thereof, as compared to a corresponding non-transformed wild type non-human organism or a part thereof; and
[59512] (b) growing the non-human organism or a part thereof under conditions which permit the production of cerebronic acid or a composition comprising cerebronic acid in said non-human organism or in the culture medium surrounding said non-human organism.

[59513] A further embodiment of the present invention relates to a process for the production of hexadecadienoic acid, which comprises
[59514] (a) increasing or generating the activity of a glutaredoxin non-targeted in a non-human organism or a part thereof, preferably a microorganism, a plant cell, a plant or a part thereof, as compared to a corresponding non-transformed wild type non-human organism or a part thereof; and
[59515] (b) growing the non-human organism or a part thereof under conditions which permit the production of hexadecadienoic acid or a composition comprising hexadecadienoic acid in said non-human organism or in the culture medium surrounding said non-human organism.

[59516] A further embodiment of the present invention relates to a process for the production of hexadecatrienoic acid, which comprises
[59517] (a) increasing or generating the activity of a glutaredoxin non-targeted in a non-human organism or a part thereof, preferably a microorganism, a plant cell, a plant or a part thereof, as compared to a corresponding non-transformed wild type non-human organism or a part thereof; and
[59518] (b) growing the non-human organism or a part thereof under conditions which permit the production of hexadecatrienoic acid or a composition comprising hexadecatrienoic acid in said non-human organism or in the culture medium surrounding said non-human organism.

[59519] A further embodiment of the present invention relates to a process for the production of 2-hydroxybehenic acid, which comprises
[59520] (a) increasing or generating the activity of a calcium-dependent protein kinase non-targeted in a non-human organism or a part thereof, preferably a microorganism, a plant cell, a plant or a part thereof, as compared to a corresponding non-transformed wild type non-human organism or a part thereof; and
[59521] (b) growing the non-human organism or a part thereof under conditions which permit the production of 2-hydroxybehenic acid or a composition comprising 2-hydroxybehenic acid in said non-human organism or in the culture medium surrounding said non-human organism.

[59522] A further embodiment of the present invention relates to a process for the production of 2-hydroxypalmitic acid, which comprises
[59523] (a) increasing or generating the activity of a calcium-dependent protein kinase non-targeted in a non-human organism or a part thereof, preferably a microorganism, a plant cell, a plant or a part thereof, as compared to a corresponding non-transformed wild type non-human organism or a part thereof; and
[59524] (b) growing the non-human organism or a part thereof under conditions which permit the production of 2-hydroxypalmitic acid or a composition comprising 2-hydroxypalmitic acid in said non-human organism or in the culture medium surrounding said non-human organism.

[59525] A further embodiment of the present invention relates to a process for the production of oleic acid, which comprises
[59526] (a) increasing or generating the activity of a acyl-desaturase non-targeted in a non-human organism or a part thereof, preferably a microorganism, a plant cell, a plant or a part thereof, as compared to a corresponding non-transformed wild type non-human organism or a part thereof; and
[59527] (b) growing the non-human organism or a part thereof under conditions which permit the production of oleic acid or a composition comprising oleic acid in said non-human organism or in the culture medium surrounding said non-human organism.

[59528] A further embodiment of the present invention relates to a process for the production of hexadecatrienoic acid, which comprises
[59529] (a) increasing or generating the activity of a monothiol glutaredoxin non-targeted in a non-human organism or a part thereof, preferably a microorganism, a plant cell, a plant or a part thereof, as compared to a corresponding non-transformed wild type non-human organism or a part thereof; and
[59530] (b) growing the non-human organism or a part thereof under conditions which permit the production of hexadecatrienoic acid or a composition comprising hexadecatrienoic acid in said non-human organism or in the culture medium surrounding said non-human organism.

[59531] A further embodiment of the present invention relates to a process for the production of hexadecatrienoic acid, which comprises
[59532] (a) increasing or generating the activity of a protein phosphatase non-targeted in a non-human organism or a part thereof, preferably a microorganism, a plant cell, a plant or a part thereof, as compared to a corresponding non-transformed wild type non-human organism or a part thereof; and
[59533] (b) growing the non-human organism or a part thereof under conditions which permit the production of hexadecatrienoic acid or a composition comprising hexadecatrienoic acid in said non-human organism or in the culture medium surrounding said non-human organism.

[59534] A further embodiment of the present invention relates to a process for the production of hexadecadienoic acid, which comprises
[59535] (a) increasing or generating the activity of a protein kinase non-targeted in a non-human organism or a part thereof, preferably a microorganism, a plant cell, a plant or a part thereof, as compared to a corresponding non-transformed wild type non-human organism or a part thereof; and
[59536] (b) growing the non-human organism or a part thereof under conditions which permit the production of hexadecadienoic acid or a composition comprising hexadecadienoic acid in said non-human organism or in the culture medium surrounding said non-human organism.

[59537] A further embodiment of the present invention relates to a process for the production of cerebronic acid, which comprises
[59538] (a) increasing or generating the activity of a CDP-diacylglycerol-serine O-phosphatidyltransferase non-targeted in a non-human organism or a part thereof, preferably a microorganism, a plant cell, a plant or a part thereof, as compared to a corresponding non-transformed wild type non-human organism or a part thereof; and
[59539] (b) growing the non-human organism or a part thereof under conditions which permit the production of cerebronic acid or a composition comprising cerebronic acid in said non-human organism or in the culture medium surrounding said non-human organism.

[59540] A further embodiment of the present invention relates to a process for the production of 2-hydroxybehenic acid, which comprises
[59541] (a) increasing or generating the activity of a CDP-diacylglycerol-serine O-phosphatidyltransferase non-targeted in a non-human organism or a part thereof, preferably a microorganism, a plant cell, a plant or a part thereof, as compared to a corresponding non-transformed wild type non-human organism or a part thereof; and
[59542] (b) growing the non-human organism or a part thereof under conditions which permit the production of 2-hydroxybehenic acid or a composition comprising 2-hydroxybehenic acid in said non-human organism or in the culture medium surrounding said non-human organism.

[59543] A further embodiment of the present invention relates to a process for the production of 2-hydroxytetracosenoic acid (preferably 2-hydroxynervonic acid), which comprises
[59544] (a) increasing or generating the activity of a CDP-diacylglycerol-serine O-phosphatidyltransferase non-targeted in a non-human organism or a part thereof, preferably a microorganism, a plant cell, a plant or a part thereof, as compared to a corresponding non-transformed wild type non-human organism or a part thereof; and
[59545] (b) growing the non-human organism or a part thereof under conditions which permit the production of 2-hydroxytetracosenoic acid (preferably 2-hydroxynervonic acid) or a composition comprising 2-hydroxytetracosenoic acid (preferably 2-hydroxynervonic acid) in said non-human organism or in the culture medium surrounding said non-human organism.

[59546] A further embodiment of the present invention relates to a process for the production of 2-hydroxypalmitic acid, which comprises
[59547] (a) increasing or generating the activity of a CDP-diacylglycerol-serine O-phosphatidyltransferase non-targeted in a non-human organism or a part thereof, preferably a microorganism, a plant cell, a plant or a part thereof, as compared to a corresponding non-transformed wild type non-human organism or a part thereof; and
[59548] (b) growing the non-human organism or a part thereof under conditions which permit the production of 2-hydroxypalmitic acid or a composition comprising 2-hydroxypalmitic acid in said non-human organism or in the culture medium surrounding said non-human organism.

[59549] A further embodiment of the present invention relates to a process for the production of hexadecadienoic acid, which comprises
[59550] (a) increasing or generating the activity of a sec-independent protein translocase non-targeted in a non-human organism or a part thereof, preferably a microorganism, a plant cell, a plant or a part thereof, as compared to a corresponding non-transformed wild type non-human organism or a part thereof; and
[59551] (b) growing the non-human organism or a part thereof under conditions which permit the production of hexadecadienoic acid or a composition comprising hexadecadienoic acid in said non-human organism or in the culture medium surrounding said non-human organism.

[59552] A further embodiment of the present invention relates to a process for the production of 2-hydroxytetracosenoic acid (preferably 2-hydroxynervonic acid), which comprises
[59553] (a) increasing or generating the activity of a transcriptional regulator protein non-targeted in a non-human organism or a part thereof, preferably a microorganism, a plant cell, a plant or a part thereof, as compared to a corresponding non-transformed wild type non-human organism or a part thereof; and
[59554] (b) growing the non-human organism or a part thereof under conditions which permit the production of 2-hydroxytetracosenoic acid (preferably 2-hydroxynervonic acid) or a composition comprising 2-hydroxytetracosenoic acid (preferably 2-hydroxynervonic acid) in said non-human organism or in the culture medium surrounding said non-human organism.

[59555] A further embodiment of the present invention relates to a process for the production of 2-hydroxypalmitic acid, which comprises
[59556] (a) increasing or generating the activity of a beta-hydroxylase non-targeted in a non-human organism or a part thereof, preferably a microorganism, a plant cell, a plant or a part thereof, as compared to a corresponding non-transformed wild type non-human organism or a part thereof; and
[59557] (b) growing the non-human organism or a part thereof under conditions which permit the production of 2-hydroxypalmitic acid or a composition comprising 2-hydroxypalmitic acid in said non-human organism or in the culture medium surrounding said non-human organism.

[59558] A further embodiment of the present invention relates to a process for the production of hexadecadienoic acid, which comprises
[59559] (a) increasing or generating the activity of a 30S ribosomal protein S3 non-targeted in a non-human organism or a part thereof, preferably a microorganism, a plant cell, a plant or a part thereof, as compared to a corresponding non-transformed wild type non-human organism or a part thereof; and
[59560] (b) growing the non-human organism or a part thereof under conditions which permit the production of hexadecadienoic acid or a composition comprising hexadecadienoic acid in said non-human organism or in the culture medium surrounding said non-human organism.

[59561] A further embodiment of the present invention relates to a process for the production of 2-hydroxybehenic acid, which comprises
[59562] (a) increasing or generating the activity of a acyl-CoA synthase non-targeted in a non-human organism or a part thereof, preferably a microorganism, a plant cell, a plant or a part thereof, as compared to a corresponding non-transformed wild type non-human organism or a part thereof; and
[59563] (b) growing the non-human organism or a part thereof under conditions which permit the production of 2-hydroxybehenic acid or a composition comprising 2-hydroxybehenic acid in said non-human organism or in the culture medium surrounding said non-human organism.

[59564] A further embodiment of the present invention relates to a process for the production of 2-hydroxytetracosenoic acid (preferably 2-hydroxynervonic acid), which comprises
[59565] (a) increasing or generating the activity of a heat shock protein non-targeted in a non-human organism or a part thereof, preferably a microorganism, a plant cell, a plant or a part thereof, as compared to a corresponding non-transformed wild type non-human organism or a part thereof; and
[59566] (b) growing the non-human organism or a part thereof under conditions which permit the production of 2-hydroxytetracosenoic acid (preferably 2-hydroxynervonic acid) or a composition comprising 2-hydroxytetracosenoic acid (preferably 2-hydroxynervonic acid) in said non-human organism or in the culture medium surrounding said non-human organism.

[59567] A further embodiment of the present invention relates to a process for the production of 2-hydroxytetracosenoic acid (preferably 2-hydroxynervonic acid), which comprises
[59568] (a) increasing or generating the activity of a oxidoreductase non-targeted in a non-human organism or a part thereof, preferably a microorganism, a plant cell, a plant or a part thereof, as compared to a corresponding non-transformed wild type non-human organism or a part thereof; and
[59569] (b) growing the non-human organism or a part thereof under conditions which permit the production of 2-hydroxytetracosenoic acid (preferably 2-hydroxynervonic acid) or a composition comprising 2-hydroxytetracosenoic acid (preferably 2-hydroxynervonic acid) in said non-human organism or in the culture medium surrounding said non-human organism.

[59570] A further embodiment of the present invention relates to a process for the production of hexadecadienoic acid, which comprises
[59571] (a) increasing or generating the activity of a recombinase A non-targeted in a non-human organism or a part thereof, preferably a microorganism, a plant cell, a plant or a part thereof, as compared to a corresponding non-transformed wild type non-human organism or a part thereof; and
[59572] (b) growing the non-human organism or a part thereof under conditions which permit the production of hexadecadienoic acid or a composition comprising hexadecadienoic acid in said non-human organism or in the culture medium surrounding said non-human organism.

[59573] A further embodiment of the present invention relates to a process for the production of lauric acid, which comprises
[59574] (a) increasing or generating the activity of a ABC transporter component non-targeted in a non-human organism or a part thereof, preferably a microorganism, a plant cell, a plant or a part thereof, as compared to a corresponding non-transformed wild type non-human organism or a part thereof; and
[59575] (b) growing the non-human organism or a part thereof under conditions which permit the production of lauric acid or a composition comprising lauric acid in said non-human organism or in the culture medium surrounding said non-human organism.

[59576] A further embodiment of the present invention relates to a process for the production of 2-hydroxypalmitic acid, which comprises
[59577] (a) increasing or generating the activity of a hydrolase non-targeted in a non-human organism or a part thereof, preferably a microorganism, a plant cell, a plant or a part thereof, as compared to a corresponding non-transformed wild type non-human organism or a part thereof; and
[59578] (b) growing the non-human organism or a part thereof under conditions which permit the production of 2-hydroxypalmitic acid or a composition comprising 2-hydroxypalmitic acid in said non-human organism or in the culture medium surrounding said non-human organism.

[59579] A further embodiment of the present invention relates to a process for the production of 2-hydroxypalmitic acid, which comprises
[59580] (a) increasing or generating the activity of a glutamate-ammonia-ligase non-targeted in a non-human organism or a part thereof, preferably a microorganism, a plant cell, a plant or a part thereof, as compared to a corresponding non-transformed wild type non-human organism or a part thereof; and
[59581] (b) growing the non-human organism or a part thereof under conditions which permit the production of 2-hydroxypalmitic acid or a composition comprising 2-hydroxypalmitic acid in said non-human organism or in the culture medium surrounding said non-human organism.

[59582] A further embodiment of the present invention relates to a process for the production of 2-hydroxybehenic acid, which comprises
[59583] (a) increasing or generating the activity of a fumarylacetoacetate hydrolase non-targeted in a non-human organism or a part thereof, preferably a microorganism, a plant cell, a plant or a part thereof, as compared to a corresponding non-transformed wild type non-human organism or a part thereof; and
[59584] (b) growing the non-human organism or a part thereof under conditions which permit the production of 2-hydroxybehenic acid or a composition comprising 2-hydroxybehenic acid in said non-human organism or in the culture medium surrounding said non-human organism.

[59585] A further embodiment of the present invention relates to a process for the production of 2-hydroxytetracosenoic acid (preferably 2-hydroxynervonic acid), which comprises
[59586] (a) increasing or generating the activity of a N-acetyl-gamma-glutamyl-phosphate reductase non-targeted in a non-human organism or a part thereof, preferably a microorganism, a plant cell, a plant or a part thereof, as compared to a corresponding non-transformed wild type non-human organism or a part thereof; and
[59587] (b) growing the non-human organism or a part thereof under conditions which permit the production of 2-hydroxytetracosenoic acid (preferably 2-hydroxynervonic acid) or a composition comprising 2-hydroxytetracosenoic acid (preferably 2-hydroxynervonic acid) in said non-human organism or in the culture medium surrounding said non-human organism.

[59588] A further embodiment of the present invention relates to a process for the production of 2-hydroxytetracosenoic acid (preferably 2-hydroxynervonic acid), which comprises
[59589] (a) increasing or generating the activity of a HesB/YadR/YfhF family protein non-targeted in a non-human organism or a part thereof, preferably a microorganism, a plant cell, a plant or a part thereof, as compared to a corresponding non-transformed wild type non-human organism or a part thereof; and
[59590] (b) growing the non-human organism or a part thereof under conditions which permit the production of 2-hydroxytetracosenoic acid (preferably 2-hydroxynervonic acid) or a composition comprising 2-hydroxytetracosenoic acid (preferably 2-hydroxynervonic acid) in said non-human organism or in the culture medium surrounding said non-human organism.

[59591] A further embodiment of the present invention relates to a process for the production of 2-hydroxytetracosenoic acid (preferably 2-hydroxynervonic acid), which comprises
[59592] (a) increasing or generating the activity of a purine nucleoside phosphorylase non-targeted in a non-human organism or a part thereof, preferably a microorganism, a plant cell, a plant or a part thereof, as compared to a corresponding non-transformed wild type non-human organism or a part thereof; and
[59593] (b) growing the non-human organism or a part thereof under conditions which permit the production of 2-hydroxytetracosenoic acid (preferably 2-hydroxynervonic acid) or a composition comprising 2-hydroxytetracosenoic acid (preferably 2-hydroxynervonic acid) in said non-human organism or in the culture medium surrounding said non-human organism.

[59594] A further embodiment of the present invention relates to a process for the production of 2-hydroxybehenic acid, which comprises
[59595] (a) increasing or generating the activity of a b0050-protein non-targeted in a non-human organism or a part thereof, preferably a microorganism, a plant cell, a plant or a part thereof, as compared to a corresponding non-transformed wild type non-human organism or a part thereof; and
[59596] (b) growing the non-human organism or a part thereof under conditions which permit the production of 2-hydroxybehenic acid or a composition comprising 2-hydroxybehenic acid in said non-human organism or in the culture medium surrounding said non-human organism.

[59597] A further embodiment of the present invention relates to a process for the production of 2-hydroxytetracosenoic acid (preferably 2-hydroxynervonic acid), which comprises
[59598] (a) increasing or generating the activity of a b0050-protein non-targeted in a non-human organism or a part thereof, preferably a microorganism, a plant cell, a plant or a part thereof, as compared to a corresponding non-transformed wild type non-human organism or a part thereof; and
[59599] (b) growing the non-human organism or a part thereof under conditions which permit the production of 2-hydroxytetracosenoic acid (preferably 2-hydroxynervonic acid) or a composition comprising 2-hydroxytetracosenoic acid (preferably 2-hydroxynervonic acid) in said non-human organism or in the culture medium surrounding said non-human organism.

[59600] A further embodiment of the present invention relates to a process for the production of cerebronic acid, which comprises
[59601] (a) increasing or generating the activity of a b0249-protein non-targeted in a non-human organism or a part thereof, preferably a microorganism, a plant cell, a plant or a part thereof, as compared to a corresponding non-transformed wild type non-human organism or a part thereof; and
[59602] (b) growing the non-human organism or a part thereof under conditions which permit the production of cerebronic acid or a composition comprising cerebronic acid in said non-human organism or in the culture medium surrounding said non-human organism.

[59603] A further embodiment of the present invention relates to a process for the production of behenic acid, which comprises
[59604] (a) increasing or generating the activity of a betaine aldehyde dehydrogenase non-targeted in a non-human organism or a part thereof, preferably a microorganism, a plant cell, a plant or a part thereof, as compared to a corresponding non-transformed wild type non-human organism or a part thereof; and
[59605] (b) growing the non-human organism or a part thereof under conditions which permit the production of behenic acid or a composition comprising behenic acid in said non-human organism or in the culture medium surrounding said non-human organism.

[59606] A further embodiment of the present invention relates to a process for the production of eicosanoic acid, which comprises
[59607] (a) increasing or generating the activity of a betaine aldehyde dehydrogenase non-targeted in a non-human organism or a part thereof, preferably a microorganism, a plant cell, a plant or a part thereof, as compared to a corresponding non-transformed wild type non-human organism or a part thereof; and
[59608] (b) growing the non-human organism or a part thereof under conditions which permit the production of eicosanoic acid or a composition comprising eicosanoic acid in said non-human organism or in the culture medium surrounding said non-human organism.

[59609] A further embodiment of the present invention relates to a process for the production of myristic acid, which comprises
[59610] (a) increasing or generating the activity of a 2,3-dihydroxyphenylpropionate 1,2-dioxygenase non-targeted in a non-human organism or a part thereof, preferably a microorganism, a plant cell, a plant or a part thereof, as compared to a corresponding non-transformed wild type non-human organism or a part thereof; and
[59611] (b) growing the non-human organism or a part thereof under conditions which permit the production of myristic acid or a composition comprising myristic acid in said non-human organism or in the culture medium surrounding said non-human organism.

[59612] A further embodiment of the present invention relates to a process for the production of oleic acid, which comprises
[59613] (a) increasing or generating the activity of a 2,3-dihydroxyphenylpropionate 1,2-dioxygenase non-targeted in a non-human organism or a part thereof, preferably a microorganism, a plant cell, a plant or a part thereof, as compared to a corresponding non-transformed wild type non-human organism or a part thereof; and
[59614] (b) growing the non-human organism or a part thereof under conditions which permit the production of oleic acid or a composition comprising oleic acid in said non-human organism or in the culture medium surrounding said non-human organism.

[59615] A further embodiment of the present invention relates to a process for the production of hexadecatrienoic acid, which comprises
[59616] (a) increasing or generating the activity of a b0371-protein non-targeted in a non-human organism or a part thereof, preferably a microorganism, a plant cell, a plant or a part thereof, as compared to a corresponding non-transformed wild type non-human organism or a part thereof; and
[59617] (b) growing the non-human organism or a part thereof under conditions which permit the production of hexadecatrienoic acid or a composition comprising hexadecatrienoic acid in said non-human organism or in the culture medium surrounding said non-human organism.

[59618] A further embodiment of the present invention relates to a process for the production of cerebronic acid, which comprises
[59619] (a) increasing or generating the activity of a ATP-binding component of a transport system non-targeted in a non-human organism or a part thereof, preferably a microorganism, a plant cell, a plant or a part thereof, as compared to a corresponding non-transformed wild type non-human organism or a part thereof; and
[59620] (b) growing the non-human organism or a part thereof under conditions which permit the production of cerebronic acid or a composition comprising cerebronic acid in said non-human organism or in the culture medium surrounding said non-human organism.

[59621] A further embodiment of the present invention relates to a process for the production of 2-hydroxybehenic acid, which comprises
[59622] (a) increasing or generating the activity of a ATP-binding component of a transport system non-targeted in a non-human organism or a part thereof, preferably a microorganism, a plant cell, a plant or a part thereof, as compared to a corresponding non-transformed wild type non-human organism or a part thereof; and
[59623] (b) growing the non-human organism or a part thereof under conditions which permit the production of 2-hydroxybehenic acid or a composition comprising 2-hydroxybehenic acid in said non-human organism or in the culture medium surrounding said non-human organism.

[59624] A further embodiment of the present invention relates to a process for the production of 2-hydroxypalmitic acid, which comprises
[59625] (a) increasing or generating the activity of a ATP-binding component of a transport system non-targeted in a non-human organism or a part thereof, preferably a microorganism, a plant cell, a plant or a part thereof, as compared to a corresponding non-transformed wild type non-human organism or a part thereof; and
[59626] (b) growing the non-human organism or a part thereof under conditions which permit the production of 2-hydroxypalmitic acid or a composition comprising 2-hydroxypalmitic acid in said non-human organism or in the culture medium surrounding said non-human organism.

[59627] A further embodiment of the present invention relates to a process for the production of hexadecadienoic acid, which comprises
[59628] (a) increasing or generating the activity of a b0518-protein non-targeted in a non-human organism or a part thereof, preferably a microorganism, a plant cell, a plant or a part thereof, as compared to a corresponding non-transformed wild type non-human organism or a part thereof; and
[59629] (b) growing the non-human organism or a part thereof under conditions which permit the production of hexadecadienoic acid or a composition comprising hexadecadienoic acid in said non-human organism or in the culture medium surrounding said non-human organism.

[59630] A further embodiment of the present invention relates to a process for the production of 2-hydroxybehenic acid, which comprises
[59631] (a) increasing or generating the activity of a sensor histidine kinase non-targeted in a non-human organism or a part thereof, preferably a microorganism, a plant cell, a plant or a part thereof, as compared to a corresponding non-transformed wild type non-human organism or a part thereof; and
[59632] (b) growing the non-human organism or a part thereof under conditions which permit the production of 2-hydroxybehenic acid or a composition comprising 2-hydroxybehenic acid in said non-human organism or in the culture medium surrounding said non-human organism.

[59633] A further embodiment of the present invention relates to a process for the production of 2-hydroxytetracosenoic acid (preferably 2-hydroxynervonic acid), which comprises
[59634] (a) increasing or generating the activity of a sensor histidine kinase non-targeted in a non-human organism or a part thereof, preferably a microorganism, a plant cell, a plant or a part thereof, as compared to a corresponding non-transformed wild type non-human organism or a part thereof; and
[59635] (b) growing the non-human organism or a part thereof under conditions which permit the production of 2-hydroxytetracosenoic acid (preferably 2-hydroxynervonic acid) or a composition comprising 2-hydroxytetracosenoic acid (preferably 2-hydroxynervonic acid) in said non-human organism or in the culture medium surrounding said non-human organism.

[59636] A further embodiment of the present invention relates to a process for the production of cerebronic acid, which comprises
[59637] (a) increasing or generating the activity of a citrate synthase non-targeted in a non-human organism or a part thereof, preferably a microorganism, a plant cell, a plant or a part thereof, as compared to a corresponding non-transformed wild type non-human organism or a part thereof; and
[59638] (b) growing the non-human organism or a part thereof under conditions which permit the production of cerebronic acid or a composition comprising cerebronic acid in said non-human organism or in the culture medium surrounding said non-human organism.

[59639] A further embodiment of the present invention relates to a process for the production of 2-hydroxytetracosenoic acid (preferably 2-hydroxynervonic acid), which comprises
[59640] (a) increasing or generating the activity of a b0801-protein non-targeted in a non-human organism or a part thereof, preferably a microorganism, a plant cell, a plant or a part thereof, as compared to a corresponding non-transformed wild type non-human organism or a part thereof; and
[59641] (b) growing the non-human organism or a part thereof under conditions which permit the production of 2-hydroxytetracosenoic acid (preferably 2-hydroxynervonic acid) or a composition comprising 2-hydroxytetracosenoic acid (preferably 2-hydroxynervonic acid) in said non-human organism or in the culture medium surrounding said non-human organism.

[59642] A further embodiment of the present invention relates to a process for the production of cerebronic acid, which comprises
[59643] (a) increasing or generating the activity of a b1046-protein non-targeted in a non-human organism or a part thereof, preferably a microorganism, a plant cell, a plant or a part thereof, as compared to a corresponding non-transformed wild type non-human organism or a part thereof; and
[59644] (b) growing the non-human organism or a part thereof under conditions which permit the production of cerebronic acid or a composition comprising cerebronic acid in said non-human organism or in the culture medium surrounding said non-human organism.

[59645] A further embodiment of the present invention relates to a process for the production of hexadecatrienoic acid, which comprises
[59646] (a) increasing or generating the activity of a malonyl CoA-acyl carrier protein transacylase non-targeted in a non-human organism or a part thereof, preferably a microorganism, a plant cell, a plant or a part thereof, as compared to a corresponding non-transformed wild type non-human organism or a part thereof; and
[59647] (b) growing the non-human organism or a part thereof under conditions which permit the production of hexadecatrienoic acid or a composition comprising hexadecatrienoic acid in said non-human organism or in the culture medium surrounding said non-human organism.

[59648] A further embodiment of the present invention relates to a process for the production of hexadecadienoic acid, which comprises
[59649] (a) increasing or generating the activity of a 3-oxoacyl-[acyl-carrier-protein] reductase non-targeted in a non-human organism or a part thereof, preferably a microorganism, a plant cell, a plant or a part thereof, as compared to a corresponding non-transformed wild type non-human organism or a part thereof; and
[59650] (b) growing the non-human organism or a part thereof under conditions which permit the production of hexadecadienoic acid or a composition comprising hexadecadienoic acid in said non-human organism or in the culture medium surrounding said non-human organism.

[59651] A further embodiment of the present invention relates to a process for the production of hexadecatrienoic acid, which comprises
[59652] (a) increasing or generating the activity of a 3-oxoacyl-[acyl-carrier-protein] reductase non-targeted in a non-human organism or a part thereof, preferably a microorganism, a plant cell, a plant or a part thereof, as compared to a corresponding non-transformed wild type non-human organism or a part thereof; and
[59653] (b) growing the non-human organism or a part thereof under conditions which permit the production of hexadecatrienoic acid or a composition comprising hexadecatrienoic acid in said non-human organism or in the culture medium surrounding said non-human organism.

[59654] A further embodiment of the present invention relates to a process for the production of hexadecatrienoic acid, which comprises
[59655] (a) increasing or generating the activity of a 3-oxoacyl-[acyl-carrier-protein] synthase non-targeted in a non-human organism or a part thereof, preferably a microorganism, a plant cell, a plant or a part thereof, as compared to a corresponding non-transformed wild type non-human organism or a part thereof; and
[59656] (b) growing the non-human organism or a part thereof under conditions which permit the production of hexadecatrienoic acid or a composition comprising hexadecatrienoic acid in said non-human organism or in the culture medium surrounding said non-human organism.

[59657] A further embodiment of the present invention relates to a process for the production of 2-hydroxybehenic acid, which comprises
[59658] (a) increasing or generating the activity of a 3-oxoacyl-[acyl-carrier-protein] synthase non-targeted in a non-human organism or a part thereof, preferably a microorganism, a plant cell, a plant or a part thereof, as compared to a corresponding non-transformed wild type non-human organism or a part thereof; and
[59659] (b) growing the non-human organism or a part thereof under conditions which permit the production of 2-hydroxybehenic acid or a composition comprising 2-hydroxybehenic acid in said non-human organism or in the culture medium surrounding said non-human organism.

[59660] A further embodiment of the present invention relates to a process for the production of oleic acid, which comprises
[59661] (a) increasing or generating the activity of a sodium/proton antiporter non-targeted in a non-human organism or a part thereof, preferably a microorganism, a plant cell, a plant or a part thereof, as compared to a corresponding non-transformed wild type non-human organism or a part thereof; and
[59662] (b) growing the non-human organism or a part thereof under conditions which permit the production of oleic acid or a composition comprising oleic acid in said non-human organism or in the culture medium surrounding said non-human organism.

[59663] A further embodiment of the present invention relates to a process for the production of 2-hydroxypalmitic acid, which comprises
[59664] (a) increasing or generating the activity of a sodium/proton antiporter non-targeted in a non-human organism or a part thereof, preferably a microorganism, a plant cell, a plant or a part thereof, as compared to a corresponding non-transformed wild type non-human organism or a part thereof; and
[59665] (b) growing the non-human organism or a part thereof under conditions which permit the production of 2-hydroxypalmitic acid or a composition comprising 2-hydroxypalmitic acid in said non-human organism or in the culture medium surrounding said non-human organism.

[59666] A further embodiment of the present invention relates to a process for the production of behenic acid, which comprises
[59667] (a) increasing or generating the activity of a outer-membrane lipoprotein precursor non-targeted in a non-human organism or a part thereof, preferably a microorganism, a plant cell, a plant or a part thereof, as compared to a corresponding non-transformed wild type non-human organism or a part thereof; and
[59668] (b) growing the non-human organism or a part thereof under conditions which permit the production of behenic acid or a composition comprising behenic acid in said non-human organism or in the culture medium surrounding said non-human organism.

[59669] A further embodiment of the present invention relates to a process for the production of behenic acid, which comprises
[59670] (a) increasing or generating the activity of a cardiolipin synthase non-targeted in a non-human organism or a part thereof, preferably a microorganism, a plant cell, a plant or a part thereof, as compared to a corresponding non-transformed wild type non-human organism or a part thereof; and
[59671] (b) growing the non-human organism or a part thereof under conditions which permit the production of behenic acid or a composition comprising behenic acid in said non-human organism or in the culture medium surrounding said non-human organism.

[59672] A further embodiment of the present invention relates to a process for the production of heptadecanoic acid, which comprises
[59673] (a) increasing or generating the activity of a cardiolipin synthase non-targeted in a non-human organism or a part thereof, preferably a microorganism, a plant cell, a plant or a part thereof, as compared to a corresponding non-transformed wild type non-human organism or a part thereof; and
[59674] (b) growing the non-human organism or a part thereof under conditions which permit the production of heptadecanoic acid or a composition comprising heptadecanoic acid in said non-human organism or in the culture medium surrounding said non-human organism.

[59675] A further embodiment of the present invention relates to a process for the production of hexadecatrienoic acid, which comprises
[59676] (a) increasing or generating the activity of a b1346-protein non-targeted in a non-human organism or a part thereof, preferably a microorganism, a plant cell, a plant or a part thereof, as compared to a corresponding non-transformed wild type non-human organism or a part thereof; and
[59677] (b) growing the non-human organism or a part thereof under conditions which permit the production of hexadecatrienoic acid or a composition comprising hexadecatrienoic acid in said non-human organism or in the culture medium surrounding said non-human organism.

[59678] A further embodiment of the present invention relates to a process for the production of lauric acid, which comprises
[59679] (a) increasing or generating the activity of a phage-related repressor protein non-targeted in a non-human organism or a part thereof, preferably a microorganism, a plant cell, a plant or a part thereof, as compared to a corresponding non-transformed wild type non-human organism or a part thereof; and
[59680] (b) growing the non-human organism or a part thereof under conditions which permit the production of lauric acid or a composition comprising lauric acid in said non-human organism or in the culture medium surrounding said non-human organism.

[59681] A further embodiment of the present invention relates to a process for the production of 2-hydroxytetracosenoic acid (preferably 2-hydroxynervonic acid), which comprises
[59682] (a) increasing or generating the activity of a lipoprotein precursor non-targeted in a non-human organism or a part thereof, preferably a microorganism, a plant cell, a plant or a part thereof, as compared to a corresponding non-transformed wild type non-human organism or a part thereof; and
[59683] (b) growing the non-human organism or a part thereof under conditions which permit the production of 2-hydroxytetracosenoic acid (preferably 2-hydroxynervonic acid) or a composition comprising 2-hydroxytetracosenoic acid (preferably 2-hydroxynervonic acid) in said non-human organism or in the culture medium surrounding said non-human organism.

[59684] A further embodiment of the present invention relates to a process for the production of hexadecatrienoic acid, which comprises
[59685] (a) increasing or generating the activity of a b1470-protein non-targeted in a non-human organism or a part thereof, preferably a microorganism, a plant cell, a plant or a part thereof, as compared to a corresponding non-transformed wild type non-human organism or a part thereof; and
[59686] (b) growing the non-human organism or a part thereof under conditions which permit the production of hexadecatrienoic acid or a composition comprising hexadecatrienoic acid in said non-human organism or in the culture medium surrounding said non-human organism.

[59687] A further embodiment of the present invention relates to a process for the production of hexadecatrienoic acid, which comprises
[59688] (a) increasing or generating the activity of a NADP-dependent malic enzyme non-targeted in a non-human organism or a part thereof, preferably a microorganism, a plant cell, a plant or a part thereof, as compared to a corresponding non-transformed wild type non-human organism or a part thereof; and
[59689] (b) growing the non-human organism or a part thereof under conditions which permit the production of hexadecatrienoic acid or a composition comprising hexadecatrienoic acid in said non-human organism or in the culture medium surrounding said non-human organism.

[59690] A further embodiment of the present invention relates to a process for the production of 2-hydroxybehenic acid, which comprises
[59691] (a) increasing or generating the activity of a b1522-protein non-targeted in a non-human organism or a part thereof, preferably a microorganism, a plant cell, a plant or a part thereof, as compared to a corresponding non-transformed wild type non-human organism or a part thereof; and
[59692] (b) growing the non-human organism or a part thereof under conditions which permit the production of 2-hydroxybehenic acid or a composition comprising 2-hydroxybehenic acid in said non-human organism or in the culture medium surrounding said non-human organism.

[59693] A further embodiment of the present invention relates to a process for the production of hexadecatrienoic acid, which comprises
[59694] (a) increasing or generating the activity of a acid shock protein non-targeted in a non-human organism or a part thereof, preferably a microorganism, a plant cell, a plant or a part thereof, as compared to a corresponding non-transformed wild type non-human organism or a part thereof; and
[59695] (b) growing the non-human organism or a part thereof under conditions which permit the production of hexadecatrienoic acid or a composition comprising hexadecatrienoic acid in said non-human organism or in the culture medium surrounding said non-human organism.

[59696] A further embodiment of the present invention relates to a process for the production of 2-hydroxytetracosenoic acid (preferably 2-hydroxynervonic acid), which comprises
[59697] (a) increasing or generating the activity of a transport protein non-targeted in a non-human organism or a part thereof, preferably a microorganism, a plant cell, a plant or a part thereof, as compared to a corresponding non-transformed wild type non-human organism or a part thereof; and
[59698] (b) growing the non-human organism or a part thereof under conditions which permit the production of 2-hydroxytetracosenoic acid (preferably 2-hydroxynervonic acid) or a composition comprising 2-hydroxytetracosenoic acid (preferably 2-hydroxynervonic acid) in said non-human organism or in the culture medium surrounding said non-human organism.

[59699] A further embodiment of the present invention relates to a process for the production of 2-hydroxytetracosenoic acid (preferably 2-hydroxynervonic acid), which comprises
[59700] (a) increasing or generating the activity of a phosphotransferase system component non-targeted in a non-human organism or a part thereof, preferably a microorganism, a plant cell, a plant or a part thereof, as compared to a corresponding non-transformed wild type non-human organism or a part thereof; and
[59701] (b) growing the non-human organism or a part thereof under conditions which permit the production of 2-hydroxytetracosenoic acid (preferably 2-hydroxynervonic acid) or a composition comprising 2-hydroxytetracosenoic acid (preferably 2-hydroxynervonic acid) in said non-human organism or in the culture medium surrounding said non-human organism.

[59702] A further embodiment of the present invention relates to a process for the production of 2-hydroxybehenic acid, which comprises
[59703] (a) increasing or generating the activity of a electron transport complex protein non-targeted in a non-human organism or a part thereof, preferably a microorganism, a plant cell, a plant or a part thereof, as compared to a corresponding non-transformed wild type non-human organism or a part thereof; and
[59704] (b) growing the non-human organism or a part thereof under conditions which permit the production of 2-hydroxybehenic acid or a composition comprising 2-hydroxybehenic acid in said non-human organism or in the culture medium surrounding said non-human organism.

[59705] A further embodiment of the present invention relates to a process for the production of hexadecatrienoic acid, which comprises
[59706] (a) increasing or generating the activity of a pyridoxamine kinase non-targeted in a non-human organism or a part thereof, preferably a microorganism, a plant cell, a plant or a part thereof, as compared to a corresponding non-transformed wild type non-human organism or a part thereof; and
[59707] (b) growing the non-human organism or a part thereof under conditions which permit the production of hexadecatrienoic acid or a composition comprising hexadecatrienoic acid in said non-human organism or in the culture medium surrounding said non-human organism.

[59708] A further embodiment of the present invention relates to a process for the production of 2-hydroxytetracosenoic acid (preferably 2-hydroxynervonic acid), which comprises
[59709] (a) increasing or generating the activity of a b1670-protein non-targeted in a non-human organism or a part thereof, preferably a microorganism, a plant cell, a plant or a part thereof, as compared to a corresponding non-transformed wild type non-human organism or a part thereof; and
[59710] (b) growing the non-human organism or a part thereof under conditions which permit the production of 2-hydroxytetracosenoic acid (preferably 2-hydroxynervonic acid) or a composition comprising 2-hydroxytetracosenoic acid (preferably 2-hydroxynervonic acid) in said non-human organism or in the culture medium surrounding said non-human organism.

[59711] A further embodiment of the present invention relates to a process for the production of hexadecadienoic acid, which comprises
[59712] (a) increasing or generating the activity of a b1703-protein non-targeted in a non-human organism or a part thereof, preferably a microorganism, a plant cell, a plant or a part thereof, as compared to a corresponding non-transformed wild type non-human organism or a part thereof; and
[59713] (b) growing the non-human organism or a part thereof under conditions which permit the production of hexadecadienoic acid or a composition comprising hexadecadienoic acid in said non-human organism or in the culture medium surrounding said non-human organism.

[59714] A further embodiment of the present invention relates to a process for the production of hexadecatrienoic acid, which comprises
[59715] (a) increasing or generating the activity of a b1703-protein non-targeted in a non-human organism or a part thereof, preferably a microorganism, a plant cell, a plant or a part thereof, as compared to a corresponding non-transformed wild type non-human organism or a part thereof; and
[59716] (b) growing the non-human organism or a part thereof under conditions which permit the production of hexadecatrienoic acid or a composition comprising hexadecatrienoic acid in said non-human organism or in the culture medium surrounding said non-human organism.

[59717] A further embodiment of the present invention relates to a process for the production of hexadecadienoic acid, which comprises
[59718] (a) increasing or generating the activity of a transport protein non-targeted in a non-human organism or a part thereof, preferably a microorganism, a plant cell, a plant or a part thereof, as compared to a corresponding non-transformed wild type non-human organism or a part thereof; and
[59719] (b) growing the non-human organism or a part thereof under conditions which permit the production of hexadecadienoic acid or a composition comprising hexadecadienoic acid in said non-human organism or in the culture medium surrounding said non-human organism.

[59720] A further embodiment of the present invention relates to a process for the production of hexadecadienoic acid, which comprises
[59721] (a) increasing or generating the activity of a b1837-protein non-targeted in a non-human organism or a part thereof, preferably a microorganism, a plant cell, a plant or a part thereof, as compared to a corresponding non-transformed wild type non-human organism or a part thereof; and
[59722] (b) growing the non-human organism or a part thereof under conditions which permit the production of hexadecadienoic acid or a composition comprising hexadecadienoic acid in said non-human organism or in the culture medium surrounding said non-human organism.

[59723] A further embodiment of the present invention relates to a process for the production of hexadecatrienoic acid, which comprises
[59724] (a) increasing or generating the activity of a b1837-protein non-targeted in a non-human organism or a part thereof, preferably a microorganism, a plant cell, a plant or a part thereof, as compared to a corresponding non-transformed wild type non-human organism or a part thereof; and
[59725] (b) growing the non-human organism or a part thereof under conditions which permit the production of hexadecatrienoic acid or a composition comprising hexadecatrienoic acid in said non-human organism or in the culture medium surrounding said non-human organism.

[59726] A further embodiment of the present invention relates to a process for the production of hexadecadienoic acid, which comprises
[59727] (a) increasing or generating the activity of a b2032-protein non-targeted in a non-human organism or a part thereof, preferably a microorganism, a plant cell, a plant or a part thereof, as compared to a corresponding non-transformed wild type non-human organism or a part thereof; and
[59728] (b) growing the non-human organism or a part thereof under conditions which permit the production of hexadecadienoic acid or a composition comprising hexadecadienoic acid in said non-human organism or in the culture medium surrounding said non-human organism.

[59729] A further embodiment of the present invention relates to a process for the production of hexadecadienoic acid, which comprises
[59730] (a) increasing or generating the activity of a b2099-protein non-targeted in a non-human organism or a part thereof, preferably a microorganism, a plant cell, a plant or a part thereof, as compared to a corresponding non-transformed wild type non-human organism or a part thereof; and
[59731] (b) growing the non-human organism or a part thereof under conditions which permit the production of hexadecadienoic acid or a composition comprising hexadecadienoic acid in said non-human organism or in the culture medium surrounding said non-human organism.

[59732] A further embodiment of the present invention relates to a process for the production of hexadecatrienoic acid, which comprises
[59733] (a) increasing or generating the activity of a b2099-protein non-targeted in a non-human organism or a part thereof, preferably a microorganism, a plant cell, a plant or a part thereof, as compared to a corresponding non-transformed wild type non-human organism or a part thereof; and
[59734] (b) growing the non-human organism or a part thereof under conditions which permit the production of hexadecatrienoic acid or a composition comprising hexadecatrienoic acid in said non-human organism or in the culture medium surrounding said non-human organism.

[59735] A further embodiment of the present invention relates to a process for the production of 2-hydroxytetracosenoic acid (preferably 2-hydroxynervonic acid), which comprises
[59736] (a) increasing or generating the activity of a b2107-protein non-targeted in a non-human organism or a part thereof, preferably a microorganism, a plant cell, a plant or a part thereof, as compared to a corresponding non-transformed wild type non-human organism or a part thereof; and
[59737] (b) growing the non-human organism or a part thereof under conditions which permit the production of 2-hydroxytetracosenoic acid (preferably 2-hydroxynervonic acid) or a composition comprising 2-hydroxytetracosenoic acid (preferably 2-hydroxynervonic acid) in said non-human organism or in the culture medium surrounding said non-human organism.

[59738] A further embodiment of the present invention relates to a process for the production of lauric acid, which comprises
[59739] (a) increasing or generating the activity of a b2126-protein non-targeted in a non-human organism or a part thereof, preferably a microorganism, a plant cell, a plant or a part thereof, as compared to a corresponding non-transformed wild type non-human organism or a part thereof; and
[59740] (b) growing the non-human organism or a part thereof under conditions which permit the production of lauric acid or a composition comprising lauric acid in said non-human organism or in the culture medium surrounding said non-human organism.

[59741] A further embodiment of the present invention relates to a process for the production of 2-hydroxypalmitic acid, which comprises
[59742] (a) increasing or generating the activity of a b2139-protein non-targeted in a non-human organism or a part thereof, preferably a microorganism, a plant cell, a plant or a part thereof, as compared to a corresponding non-transformed wild type non-human organism or a part thereof; and
[59743] (b) growing the non-human organism or a part thereof under conditions which permit the production of 2-hydroxypalmitic acid or a composition comprising 2-hydroxypalmitic acid in said non-human organism or in the culture medium surrounding said non-human organism.

[59744] A further embodiment of the present invention relates to a process for the production of hexadecatrienoic acid, which comprises
[59745] (a) increasing or generating the activity of a ABC transporter permease protein non-targeted in a non-human organism or a part thereof, preferably a microorganism, a plant cell, a plant or a part thereof, as compared to a corresponding non-transformed wild type non-human organism or a part thereof; and
[59746] (b) growing the non-human organism or a part thereof under conditions which permit the production of hexadecatrienoic acid or a composition comprising hexadecatrienoic acid in said non-human organism or in the culture medium surrounding said non-human organism.

[59747] A further embodiment of the present invention relates to a process for the production of 2-hydroxybehenic acid, which comprises
[59748] (a) increasing or generating the activity of a sensor kinase non-targeted in a non-human organism or a part thereof, preferably a microorganism, a plant cell, a plant or a part thereof, as compared to a corresponding non-transformed wild type non-human organism or a part thereof; and
[59749] (b) growing the non-human organism or a part thereof under conditions which permit the production of 2-hydroxybehenic acid or a composition comprising 2-hydroxybehenic acid in said non-human organism or in the culture medium surrounding said non-human organism.

[59750] A further embodiment of the present invention relates to a process for the production of 2-hydroxytetracosenoic acid (preferably 2-hydroxynervonic acid), which comprises
[59751] (a) increasing or generating the activity of a b2360-protein non-targeted in a non-human organism or a part thereof, preferably a microorganism, a plant cell, a plant or a part thereof, as compared to a corresponding non-transformed wild type non-human organism or a part thereof; and
[59752] (b) growing the non-human organism or a part thereof under conditions which permit the production of 2-hydroxytetracosenoic acid (preferably 2-hydroxynervonic acid) or a composition comprising 2-hydroxytetracosenoic acid (preferably 2-hydroxynervonic acid) in said non-human organism or in the culture medium surrounding said non-human organism.

[59753] A further embodiment of the present invention relates to a process for the production of 2-hydroxytetracosenoic acid (preferably 2-hydroxynervonic acid), which comprises
[59754] (a) increasing or generating the activity of a cysteine synthase A non-targeted in a non-human organism or a part thereof, preferably a microorganism, a plant cell, a plant or a part thereof, as compared to a corresponding non-transformed wild type non-human organism or a part thereof; and
[59755] (b) growing the non-human organism or a part thereof under conditions which permit the production of 2-hydroxytetracosenoic acid (preferably 2-hydroxynervonic acid) or a composition comprising 2-hydroxytetracosenoic acid (preferably 2-hydroxynervonic acid) in said non-human organism or in the culture medium surrounding said non-human organism.

[59756] A further embodiment of the present invention relates to a process for the production of hexadecadienoic acid, which comprises
[59757] (a) increasing or generating the activity of a ethanolamine utilization protein non-targeted in a non-human organism or a part thereof, preferably a microorganism, a plant cell, a plant or a part thereof, as compared to a corresponding non-transformed wild type non-human organism or a part thereof; and
[59758] (b) growing the non-human organism or a part thereof under conditions which permit the production of hexadecadienoic acid or a composition comprising hexadecadienoic acid in said non-human organism or in the culture medium surrounding said non-human organism.

[59759] A further embodiment of the present invention relates to a process for the production of hexadecatrienoic acid, which comprises
[59760] (a) increasing or generating the activity of a ethanolamine utilization protein non-targeted in a non-human organism or a part thereof, preferably a microorganism, a plant cell, a plant or a part thereof, as compared to a corresponding non-transformed wild type non-human organism or a part thereof; and
[59761] (b) growing the non-human organism or a part thereof under conditions which permit the production of hexadecatrienoic acid or a composition comprising hexadecatrienoic acid in said non-human organism or in the culture medium surrounding said non-human organism.

[59762] A further embodiment of the present invention relates to a process for the production of oleic acid, which comprises
[59763] (a) increasing or generating the activity of a ethanolamine utilization protein non-targeted in a non-human organism or a part thereof, preferably a microorganism, a plant cell, a plant or a part thereof, as compared to a corresponding non-transformed wild type non-human organism or a part thereof; and
[59764] (b) growing the non-human organism or a part thereof under conditions which permit the production of oleic acid or a composition comprising oleic acid in said non-human organism or in the culture medium surrounding said non-human organism.

[59765] A further embodiment of the present invention relates to a process for the production of cerebronic acid, which comprises
[59766] (a) increasing or generating the activity of a b2474-protein non-targeted in a non-human organism or a part thereof, preferably a microorganism, a plant cell, a plant or a part thereof, as compared to a corresponding non-transformed wild type non-human organism or a part thereof; and
[59767] (b) growing the non-human organism or a part thereof under conditions which permit the production of cerebronic acid or a composition comprising cerebronic acid in said non-human organism or in the culture medium surrounding said non-human organism.

[59768] A further embodiment of the present invention relates to a process for the production of hexadecatrienoic acid, which comprises
[59769] (a) increasing or generating the activity of a b2474-protein non-targeted in a non-human organism or a part thereof, preferably a microorganism, a plant cell, a plant or a part thereof, as compared to a corresponding non-transformed wild type non-human organism or a part thereof; and
[59770] (b) growing the non-human organism or a part thereof under conditions which permit the production of hexadecatrienoic acid or a composition comprising hexadecatrienoic acid in said non-human organism or in the culture medium surrounding said non-human organism.

[59771] A further embodiment of the present invention relates to a process for the production of 2-hydroxytetracosenoic acid (preferably 2-hydroxynervonic acid), which comprises
[59772] (a) increasing or generating the activity of a b2474-protein non-targeted in a non-human organism or a part thereof, preferably a microorganism, a plant cell, a plant or a part thereof, as compared to a corresponding non-transformed wild type non-human organism or a part thereof; and
[59773] (b) growing the non-human organism or a part thereof under conditions which permit the production of 2-hydroxytetracosenoic acid (preferably 2-hydroxynervonic acid) or a composition comprising 2-hydroxytetracosenoic acid (preferably 2-hydroxynervonic acid) in said non-human organism or in the culture medium surrounding said non-human organism.

[59774] A further embodiment of the present invention relates to a process for the production of hexadecadienoic acid, which comprises
[59775] (a) increasing or generating the activity of a b2513-protein non-targeted in a non-human organism or a part thereof, preferably a microorganism, a plant cell, a plant or a part thereof, as compared to a corresponding non-transformed wild type non-human organism or a part thereof; and
[59776] (b) growing the non-human organism or a part thereof under conditions which permit the production of hexadecadienoic acid or a composition comprising hexadecadienoic acid in said non-human organism or in the culture medium surrounding said non-human organism.

[59777] A further embodiment of the present invention relates to a process for the production of hexadecadienoic acid, which comprises
[59778] (a) increasing or generating the activity of a phosphatidylserine synthase non-targeted in a non-human organism or a part thereof, preferably a microorganism, a plant cell, a plant or a part thereof, as compared to a corresponding non-transformed wild type non-human organism or a part thereof; and
[59779] (b) growing the non-human organism or a part thereof under conditions which permit the production of hexadecadienoic acid or a composition comprising hexadecadienoic acid in said non-human organism or in the culture medium surrounding said non-human organism.

[59780] A further embodiment of the present invention relates to a process for the production of 2-hydroxytetracosenoic acid (preferably 2-hydroxynervonic acid), which comprises
[59781] (a) increasing or generating the activity of a b2654-protein non-targeted in a non-human organism or a part thereof, preferably a microorganism, a plant cell, a plant or a part thereof, as compared to a corresponding non-transformed wild type non-human organism or a part thereof; and
[59782] (b) growing the non-human organism or a part thereof under conditions which permit the production of 2-hydroxytetracosenoic acid (preferably 2-hydroxynervonic acid) or a composition comprising 2-hydroxytetracosenoic acid (preferably 2-hydroxynervonic acid) in said non-human organism or in the culture medium surrounding said non-human organism.

[59783] A further embodiment of the present invention relates to a process for the production of hexadecatrienoic acid, which comprises
[59784] (a) increasing or generating the activity of a 2-C-methyl-D-erythritol 4-phosphate cytidylyltransferase non-targeted in a non-human organism or a part thereof, preferably a microorganism, a plant cell, a plant or a part thereof, as compared to a corresponding non-transformed wild type non-human organism or a part thereof; and
[59785] (b) growing the non-human organism or a part thereof under conditions which permit the production of hexadecatrienoic acid or a composition comprising hexadecatrienoic acid in said non-human organism or in the culture medium surrounding said non-human organism.

[59786] A further embodiment of the present invention relates to a process for the production of eicosanoic acid, which comprises
[59787] (a) increasing or generating the activity of a alkaline phosphatase isozyme conversion protein non-targeted in a non-human organism or a part thereof, preferably a microorganism, a plant cell, a plant or a part thereof, as compared to a corresponding non-transformed wild type non-human organism or a part thereof; and
[59788] (b) growing the non-human organism or a part thereof under conditions which permit the production of eicosanoic acid or a composition comprising eicosanoic acid in said non-human organism or in the culture medium surrounding said non-human organism.

[59789] A further embodiment of the present invention relates to a process for the production of 2-hydroxytetracosenoic acid (preferably 2-hydroxynervonic acid), which comprises
[59790] (a) increasing or generating the activity of a murein transglycosylase non-targeted in a non-human organism or a part thereof, preferably a microorganism, a plant cell, a plant or a part thereof, as compared to a corresponding non-transformed wild type non-human organism or a part thereof; and
[59791] (b) growing the non-human organism or a part thereof under conditions which permit the production of 2-hydroxytetracosenoic acid (preferably 2-hydroxynervonic acid) or a composition comprising 2-hydroxytetracosenoic acid (preferably 2-hydroxynervonic acid) in said non-human organism or in the culture medium surrounding said non-human organism.

[59792] A further embodiment of the present invention relates to a process for the production of hexadecadienoic acid, which comprises
[59793] (a) increasing or generating the activity of a b3442-protein non-targeted in a non-human organism or a part thereof, preferably a microorganism, a plant cell, a plant or a part thereof, as compared to a corresponding non-transformed wild type non-human organism or a part thereof; and
[59794] (b) growing the non-human organism or a part thereof under conditions which permit the production of hexadecadienoic acid or a composition comprising hexadecadienoic acid in said non-human organism or in the culture medium surrounding said non-human organism.

[59795] A further embodiment of the present invention relates to a process for the production of cerebronic acid, which comprises
[59796] (a) increasing or generating the activity of a sugar transport system permease protein non-targeted in a non-human organism or a part thereof, preferably a microorganism, a plant cell, a plant or a part thereof, as compared to a corresponding non-transformed wild type non-human organism or a part thereof; and
[59797] (b) growing the non-human organism or a part thereof under conditions which permit the production of cerebronic acid or a composition comprising cerebronic acid in said non-human organism or in the culture medium surrounding said non-human organism.

[59798] A further embodiment of the present invention relates to a process for the production of 2-hydroxybehenic acid, which comprises
[59799] (a) increasing or generating the activity of a b3812-protein non-targeted in a non-human organism or a part thereof, preferably a microorganism, a plant cell, a plant or a part thereof, as compared to a corresponding non-transformed wild type non-human organism or a part thereof; and
[59800] (b) growing the non-human organism or a part thereof under conditions which permit the production of 2-hydroxybehenic acid or a composition comprising 2-hydroxybehenic acid in said non-human organism or in the culture medium surrounding said non-human organism.

[59801] A further embodiment of the present invention relates to a process for the production of hexadecadienoic acid, which comprises
[59802] (a) increasing or generating the activity of a 3-ketoacyl-CoA thiolase non-targeted in a non-human organism or a part thereof, preferably a microorganism, a plant cell, a plant or a part thereof, as compared to a corresponding non-transformed wild type non-human organism or a part thereof; and
[59803] (b) growing the non-human organism or a part thereof under conditions which permit the production of hexadecadienoic acid or a composition comprising hexadecadienoic acid in said non-human organism or in the culture medium surrounding said non-human organism.

[59804] A further embodiment of the present invention relates to a process for the production of oleic acid, which comprises
[59805] (a) increasing or generating the activity of a 3-ketoacyl-CoA thiolase non-targeted in a non-human organism or a part thereof, preferably a microorganism, a plant cell, a plant or a part thereof, as compared to a corresponding non-transformed wild type non-human organism or a part thereof; and
[59806] (b) growing the non-human organism or a part thereof under conditions which permit the production of oleic acid or a composition comprising oleic acid in said non-human organism or in the culture medium surrounding said non-human organism.

[59807] A further embodiment of the present invention relates to a process for the production of hexadecadienoic acid, which comprises
[59808] (a) increasing or generating the activity of a transcriptional regulator non-targeted in a non-human organism or a part thereof, preferably a microorganism, a plant cell, a plant or a part thereof, as compared to a corresponding non-transformed wild type non-human organism or a part thereof; and
[59809] (b) growing the non-human organism or a part thereof under conditions which permit the production of hexadecadienoic acid or a composition comprising hexadecadienoic acid in said non-human organism or in the culture medium surrounding said non-human organism.

[59810] A further embodiment of the present invention relates to a process for the production of hexadecadienoic acid, which comprises
[59811] (a) increasing or generating the activity of a fructose 1,6-bisphosphatase non-targeted in a non-human organism or a part thereof, preferably a microorganism, a plant cell, a plant or a part thereof, as compared to a corresponding non-transformed wild type non-human organism or a part thereof; and
[59812] (b) growing the non-human organism or a part thereof under conditions which permit the production of hexadecadienoic acid or a composition comprising hexadecadienoic acid in said non-human organism or in the culture medium surrounding said non-human organism.

[59813] A further embodiment of the present invention relates to a process for the production of behenic acid, which comprises
[59814] (a) increasing or generating the activity of a cystathionine gamma-synthase non-targeted in a non-human organism or a part thereof, preferably a microorganism, a plant cell, a plant or a part thereof, as compared to a corresponding non-transformed wild type non-human organism or a part thereof; and
[59815] (b) growing the non-human organism or a part thereof under conditions which permit the production of behenic acid or a composition comprising behenic acid in said non-human organism or in the culture medium surrounding said non-human organism.

[59816] A further embodiment of the present invention relates to a process for the production of heptadecanoic acid, which comprises
[59817] (a) increasing or generating the activity of a cystathionine gamma-synthase non-targeted in a non-human organism or a part thereof, preferably a microorganism, a plant cell, a plant or a part thereof, as compared to a corresponding non-transformed wild type non-human organism or a part thereof; and
[59818] (b) growing the non-human organism or a part thereof under conditions which permit the production of heptadecanoic acid or a composition comprising heptadecanoic acid in said non-human organism or in the culture medium surrounding said non-human organism.

[59819] A further embodiment of the present invention relates to a process for the production of oleic acid, which comprises
[59820] (a) increasing or generating the activity of a cystathionine gamma-synthase non-targeted in a non-human organism or a part thereof, preferably a microorganism, a plant cell, a plant or a part thereof, as compared to a corresponding non-transformed wild type non-human organism or a part thereof; and
[59821] (b) growing the non-human organism or a part thereof under conditions which permit the production of oleic acid or a composition comprising oleic acid in said non-human organism or in the culture medium surrounding said non-human organism.

[59822] A further embodiment of the present invention relates to a process for the production of 2-hydroxypalmitic acid, which comprises
[59823] (a) increasing or generating the activity of a b3944-protein non-targeted in a non-human organism or a part thereof, preferably a microorganism, a plant cell, a plant or a part thereof, as compared to a corresponding non-transformed wild type non-human organism or a part thereof; and
[59824] (b) growing the non-human organism or a part thereof under conditions which permit the production of 2-hydroxypalmitic acid or a composition comprising 2-hydroxypalmitic acid in said non-human organism or in the culture medium surrounding said non-human organism.

[59825] A further embodiment of the present invention relates to a process for the production of 2-hydroxybehenic acid, which comprises
[59826] (a) increasing or generating the activity of a ankyrin repeat protein non-targeted in a non-human organism or a part thereof, preferably a microorganism, a plant cell, a plant or a part thereof, as compared to a corresponding non-transformed wild type non-human organism or a part thereof; and
[59827] (b) growing the non-human organism or a part thereof under conditions which permit the production of 2-hydroxybehenic acid or a composition comprising 2-hydroxybehenic acid in said non-human organism or in the culture medium surrounding said non-human organism.

[59828] A further embodiment of the present invention relates to a process for the production of hexadecadienoic acid, which comprises
[59829] (a) increasing or generating the activity of a b4023-protein non-targeted in a non-human organism or a part thereof, preferably a microorganism, a plant cell, a plant or a part thereof, as compared to a corresponding non-transformed wild type non-human organism or a part thereof; and
[59830] (b) growing the non-human organism or a part thereof under conditions which permit the production of hexadecadienoic acid or a composition comprising hexadecadienoic acid in said non-human organism or in the culture medium surrounding said non-human organism.

[59831] A further embodiment of the present invention relates to a process for the production of heptadecanoic acid, which comprises
[59832] (a) increasing or generating the activity of a acetyl-coenzyme A synthetase non-targeted in a non-human organism or a part thereof, preferably a microorganism, a plant cell, a plant or a part thereof, as compared to a corresponding non-transformed wild type non-human organism or a part thereof; and
[59833] (b) growing the non-human organism or a part thereof under conditions which permit the production of heptadecanoic acid or a composition comprising heptadecanoic acid in said non-human organism or in the culture medium surrounding said non-human organism.

[59834] A further embodiment of the present invention relates to a process for the production of 2-hydroxypalmitic acid, which comprises
[59835] (a) increasing or generating the activity of a b4205-protein non-targeted in a non-human organism or a part thereof, preferably a microorganism, a plant cell, a plant or a part thereof, as compared to a corresponding non-transformed wild type non-human organism or a part thereof; and
[59836] (b) growing the non-human organism or a part thereof under conditions which permit the production of 2-hydroxypalmitic acid or a composition comprising 2-hydroxypalmitic acid in said non-human organism or in the culture medium surrounding said non-human organism.

[59837] A further embodiment of the present invention relates to a process for the production of 2-hydroxybehenic acid, which comprises
[59838] (a) increasing or generating the activity of a vacuolar processing enzyme non-targeted in a non-human organism or a part thereof, preferably a microorganism, a plant cell, a plant or a part thereof, as compared to a corresponding non-transformed wild type non-human organism or a part thereof; and
[59839] (b) growing the non-human organism or a part thereof under conditions which permit the production of 2-hydroxybehenic acid or a composition comprising 2-hydroxybehenic acid in said non-human organism or in the culture medium surrounding said non-human organism.

[59840] A further embodiment of the present invention relates to a process for the production of 2-hydroxypalmitic acid, which comprises
[59841] (a) increasing or generating the activity of a glutaredoxin non-targeted in a non-human organism or a part thereof, preferably a microorganism, a plant cell, a plant or a part thereof, as compared to a corresponding non-transformed wild type non-human organism or a part thereof; and
[59842] (b) growing the non-human organism or a part thereof under conditions which permit the production of 2-hydroxypalmitic acid or a composition comprising 2-hydroxypalmitic acid in said non-human organism or in the culture medium surrounding said non-human organism.

[59843] A further embodiment of the present invention relates to a process for the production of cerebronic acid, which comprises
[59844] (a) increasing or generating the activity of a transcription factor non-targeted in a non-human organism or a part thereof, preferably a microorganism, a plant cell, a plant or a part thereof, as compared to a corresponding non-transformed wild type non-human organism or a part thereof; and
[59845] (b) growing the non-human organism or a part thereof under conditions which permit the production of cerebronic acid or a composition comprising cerebronic acid in said non-human organism or in the culture medium surrounding said non-human organism.

[59846] A further embodiment of the present invention relates to a process for the production of hexadecatrienoic acid, which comprises
[59847] (a) increasing or generating the activity of a transcription factor non-targeted in a non-human organism or a part thereof, preferably a microorganism, a plant cell, a plant or a part thereof, as compared to a corresponding non-transformed wild type non-human organism or a part thereof; and
[59848] (b) growing the non-human organism or a part thereof under conditions which permit the production of hexadecatrienoic acid or a composition comprising hexadecatrienoic acid in said non-human organism or in the culture medium surrounding said non-human organism.

[59849] A further embodiment of the present invention relates to a process for the production of 2-hydroxytetracosenoic acid (preferably 2-hydroxynervonic acid), which comprises
[59850] (a) increasing or generating the activity of a GM02LC38418-protein non-targeted in a non-human organism or a part thereof, preferably a microorganism, a plant cell, a plant or a part thereof, as compared to a corresponding non-transformed wild type non-human organism or a part thereof; and
[59851] (b) growing the non-human organism or a part thereof under conditions which permit the production of 2-hydroxytetracosenoic acid (preferably 2-hydroxynervonic acid) or a composition comprising 2-hydroxytetracosenoic acid (preferably 2-hydroxynervonic acid) in said non-human organism or in the culture medium surrounding said non-human organism.

[59852] A further embodiment of the present invention relates to a process for the production of hexadecadienoic acid, which comprises
[59853] (a) increasing or generating the activity of a sll0281-protein non-targeted in a non-human organism or a part thereof, preferably a microorganism, a plant cell, a plant or a part thereof, as compared to a corresponding non-transformed wild type non-human organism or a part thereof; and
[59854] (b) growing the non-human organism or a part thereof under conditions which permit the production of hexadecadienoic acid or a composition comprising hexadecadienoic acid in said non-human organism or in the culture medium surrounding said non-human organism.

[59855] A further embodiment of the present invention relates to a process for the production of 2-hydroxytetracosenoic acid (preferably 2-hydroxynervonic acid), which comprises
[59856] (a) increasing or generating the activity of a bifunctional protein (phosphoribosyltransferase and regulatory protein) non-targeted in a non-human organism or a part thereof, preferably a microorganism, a plant cell, a plant or a part thereof, as compared to a corresponding non-transformed wild type non-human organism or a part thereof; and
[59857] (b) growing the non-human organism or a part thereof under conditions which permit the production of 2-hydroxytetracosenoic acid (preferably 2-hydroxynervonic acid) or a composition comprising 2-hydroxytetracosenoic acid (preferably 2-hydroxynervonic acid) in said non-human organism or in the culture medium surrounding said non-human organism.

[59858] A further embodiment of the present invention relates to a process for the production of 2-hydroxytetracosenoic acid (preferably 2-hydroxynervonic acid), which comprises
[59859] (a) increasing or generating the activity of a sll0406-protein non-targeted in a non-human organism or a part thereof, preferably a microorganism, a plant cell, a plant or a part thereof, as compared to a corresponding non-transformed wild type non-human organism or a part thereof; and
[59860] (b) growing the non-human organism or a part thereof under conditions which permit the production of 2-hydroxytetracosenoic acid (preferably 2-hydroxynervonic acid) or a composition comprising 2-hydroxytetracosenoic acid (preferably 2-hydroxynervonic acid) in said non-human organism or in the culture medium surrounding said non-human organism.

[59861] A further embodiment of the present invention relates to a process for the production of cerebronic acid, which comprises
[59862] (a) increasing or generating the activity of a binding-protein-dependent transport systems inner membrane component non-targeted in a non-human organism or a part thereof, preferably a microorganism, a plant cell, a plant or a part thereof, as compared to a corresponding non-transformed wild type non-human organism or a part thereof; and
[59863] (b) growing the non-human organism or a part thereof under conditions which permit the production of cerebronic acid or a composition comprising cerebronic acid in said non-human organism or in the culture medium surrounding said non-human organism.

[59864] A further embodiment of the present invention relates to a process for the production of cerebronic acid, which comprises
[59865] (a) increasing or generating the activity of a phosphatase non-targeted in a non-human organism or a part thereof, preferably a microorganism, a plant cell, a plant or a part thereof, as compared to a corresponding non-transformed wild type non-human organism or a part thereof; and
[59866] (b) growing the non-human organism or a part thereof under conditions which permit the production of cerebronic acid or a composition comprising cerebronic acid in said non-human organism or in the culture medium surrounding said non-human organism.

[59867] A further embodiment of the present invention relates to a process for the production of 2-hydroxytetracosenoic acid (preferably 2-hydroxynervonic acid), which comprises
[59868] (a) increasing or generating the activity of a phosphatase non-targeted in a non-human organism or a part thereof, preferably a microorganism, a plant cell, a plant or a part thereof, as compared to a corresponding non-transformed wild type non-human organism or a part thereof; and
[59869] (b) growing the non-human organism or a part thereof under conditions which permit the production of 2-hydroxytetracosenoic acid (preferably 2-hydroxynervonic acid) or a composition comprising 2-hydroxytetracosenoic acid (preferably 2-hydroxynervonic acid) in said non-human organism or in the culture medium surrounding said non-human organism.

[59870] A further embodiment of the present invention relates to a process for the production of hexadecadienoic acid, which comprises
[59871] (a) increasing or generating the activity of a carbon dioxide concentrating mechanism protein non-targeted in a non-human organism or a part thereof, preferably a microorganism, a plant cell, a plant or a part thereof, as compared to a corresponding non-transformed wild type non-human organism or a part thereof; and
[59872] (b) growing the non-human organism or a part thereof under conditions which permit the production of hexadecadienoic acid or a composition comprising hexadecadienoic acid in said non-human organism or in the culture medium surrounding said non-human organism.

[59873] A further embodiment of the present invention relates to a process for the production of hexadecatrienoic acid, which comprises
[59874] (a) increasing or generating the activity of a carbon dioxide concentrating mechanism protein non-targeted in a non-human organism or a part thereof, preferably a microorganism, a plant cell, a plant or a part thereof, as compared to a corresponding non-transformed wild type non-human organism or a part thereof; and
[59875] (b) growing the non-human organism or a part thereof under conditions which permit the production of hexadecatrienoic acid or a composition comprising hexadecatrienoic acid in said non-human organism or in the culture medium surrounding said non-human organism.

[59876] A further embodiment of the present invention relates to a process for the production of cerebronic acid, which comprises
[59877] (a) increasing or generating the activity of a coproporphyrinogen III oxidase non-targeted in a non-human organism or a part thereof, preferably a microorganism, a plant cell, a plant or a part thereof, as compared to a corresponding non-transformed wild type non-human organism or a part thereof; and
[59878] (b) growing the non-human organism or a part thereof under conditions which permit the production of cerebronic acid or a composition comprising cerebronic acid in said non-human organism or in the culture medium surrounding said non-human organism.

[59879] A further embodiment of the present invention relates to a process for the production of 2-hydroxytetracosenoic acid (preferably 2-hydroxynervonic acid), which comprises
[59880] (a) increasing or generating the activity of a coproporphyrinogen III oxidase non-targeted in a non-human organism or a part thereof, preferably a microorganism, a plant cell, a plant or a part thereof, as compared to a corresponding non-transformed wild type non-human organism or a part thereof; and
[59881] (b) growing the non-human organism or a part thereof under conditions which permit the production of 2-hydroxytetracosenoic acid (preferably 2-hydroxynervonic acid) or a composition comprising 2-hydroxytetracosenoic acid (preferably 2-hydroxynervonic acid) in said non-human organism or in the culture medium surrounding said non-human organism.

[59882] A further embodiment of the present invention relates to a process for the production of 2-hydroxypalmitic acid, which comprises
[59883] (a) increasing or generating the activity of a oxidoreductase non-targeted in a non-human organism or a part thereof, preferably a microorganism, a plant cell, a plant or a part thereof, as compared to a corresponding non-transformed wild type non-human organism or a part thereof; and
[59884] (b) growing the non-human organism or a part thereof under conditions which permit the production of 2-hydroxypalmitic acid or a composition comprising 2-hydroxypalmitic acid in said non-human organism or in the culture medium surrounding said non-human organism.

[59885] A further embodiment of the present invention relates to a process for the production of hexadecatrienoic acid, which comprises
[59886] (a) increasing or generating the activity of a bifunctional purine biosynthesis protein non-targeted in a non-human organism or a part thereof, preferably a microorganism, a plant cell, a plant or a part thereof, as compared to a corresponding non-transformed wild type non-human organism or a part thereof; and
[59887] (b) growing the non-human organism or a part thereof under conditions which permit the production of hexadecatrienoic acid or a composition comprising hexadecatrienoic acid in said non-human organism or in the culture medium surrounding said non-human organism.

[59888] A further embodiment of the present invention relates to a process for the production of cerebronic acid, which comprises
[59889] (a) increasing or generating the activity of a malate dehydrogenase non-targeted in a non-human organism or a part thereof, preferably a microorganism, a plant cell, a plant or a part thereof, as compared to a corresponding non-transformed wild type non-human organism or a part thereof; and
[59890] (b) growing the non-human organism or a part thereof under conditions which permit the production of cerebronic acid or a composition comprising cerebronic acid in said non-human organism or in the culture medium surrounding said non-human organism.

[59891] A further embodiment of the present invention relates to a process for the production of hexadecatrienoic acid, which comprises
[59892] (a) increasing or generating the activity of a glycine cleavage system H protein non-targeted in a non-human organism or a part thereof, preferably a microorganism, a plant cell, a plant or a part thereof, as compared to a corresponding non-transformed wild type non-human organism or a part thereof; and
[59893] (b) growing the non-human organism or a part thereof under conditions which permit the production of hexadecatrienoic acid or a composition comprising hexadecatrienoic acid in said non-human organism or in the culture medium surrounding said non-human organism.

[59894] A further embodiment of the present invention relates to a process for the production of 2-hydroxytetracosenoic acid (preferably 2-hydroxynervonic acid), which comprises
[59895] (a) increasing or generating the activity of a permease protein of ABC transporter non-targeted in a non-human organism or a part thereof, preferably a microorganism, a plant cell, a plant or a part thereof, as compared to a corresponding non-transformed wild type non-human organism or a part thereof; and
[59896] (b) growing the non-human organism or a part thereof under conditions which permit the production of 2-hydroxytetracosenoic acid (preferably 2-hydroxynervonic acid) or a composition comprising 2-hydroxytetracosenoic acid (preferably 2-hydroxynervonic acid) in said non-human organism or in the culture medium surrounding said non-human organism.

[59897] A further embodiment of the present invention relates to a process for the production of hexadecadienoic acid, which comprises
[59898] (a) increasing or generating the activity of a tryptophan synthase alpha chain non-targeted in a non-human organism or a part thereof, preferably a microorganism, a plant cell, a plant or a part thereof, as compared to a corresponding non-transformed wild type non-human organism or a part thereof; and
[59899] (b) growing the non-human organism or a part thereof under conditions which permit the production of hexadecadienoic acid or a composition comprising hexadecadienoic acid in said non-human organism or in the culture medium surrounding said non-human organism.

[59900] A further embodiment of the present invention relates to a process for the production of 2-hydroxybehenic acid, which comprises
[59901] (a) increasing or generating the activity of a dihydrolipoamide dehydrogenase non-targeted in a non-human organism or a part thereof, preferably a microorganism, a plant cell, a plant or a part thereof, as compared to a corresponding non-transformed wild type non-human organism or a part thereof; and
[59902] (b) growing the non-human organism or a part thereof under conditions which permit the production of 2-hydroxybehenic acid or a composition comprising 2-hydroxybehenic acid in said non-human organism or in the culture medium surrounding said non-human organism.

[59903] A further embodiment of the present invention relates to a process for the production of 2-hydroxypalmitic acid, which comprises
[59904] (a) increasing or generating the activity of a phosphate import ATP-binding protein non-targeted in a non-human organism or a part thereof, preferably a microorganism, a plant cell, a plant or a part thereof, as compared to a corresponding non-transformed wild type non-human organism or a part thereof; and
[59905] (b) growing the non-human organism or a part thereof under conditions which permit the production of 2-hydroxypalmitic acid or a composition comprising 2-hydroxypalmitic acid in said non-human organism or in the culture medium surrounding said non-human organism.

[59906] A further embodiment of the present invention relates to a process for the production of hexadecatrienoic acid, which comprises
[59907] (a) increasing or generating the activity of a glutamate 5-kinase non-targeted in a non-human organism or a part thereof, preferably a microorganism, a plant cell, a plant or a part thereof, as compared to a corresponding non-transformed wild type non-human organism or a part thereof; and
[59908] (b) growing the non-human organism or a part thereof under conditions which permit the production of hexadecatrienoic acid or a composition comprising hexadecatrienoic acid in said non-human organism or in the culture medium surrounding said non-human organism.

[59909] A further embodiment of the present invention relates to a process for the production of cerebronic acid, which comprises
[59910] (a) increasing or generating the activity of a threonine dehydratase non-targeted in a non-human organism or a part thereof, preferably a microorganism, a plant cell, a plant or a part thereof, as compared to a corresponding non-transformed wild type non-human organism or a part thereof; and
[59911] (b) growing the non-human organism or a part thereof under conditions which permit the production of cerebronic acid or a composition comprising cerebronic acid in said non-human organism or in the culture medium surrounding said non-human organism.

[59912] A further embodiment of the present invention relates to a process for the production of hexadecatrienoic acid, which comprises
[59913] (a) increasing or generating the activity of a threonine dehydratase non-targeted in a non-human organism or a part thereof, preferably a microorganism, a plant cell, a plant or a part thereof, as compared to a corresponding non-transformed wild type non-human organism or a part thereof; and
[59914] (b) growing the non-human organism or a part thereof under conditions which permit the production of hexadecatrienoic acid or a composition comprising hexadecatrienoic acid in said non-human organism or in the culture medium surrounding said non-human organism.

[59915] A further embodiment of the present invention relates to a process for the production of 2-hydroxytetracosenoic acid (preferably 2-hydroxynervonic acid), which comprises
[59916] (a) increasing or generating the activity of a threonine dehydratase non-targeted in a non-human organism or a part thereof, preferably a microorganism, a plant cell, a plant or a part thereof, as compared to a corresponding non-transformed wild type non-human organism or a part thereof; and
[59917] (b) growing the non-human organism or a part thereof under conditions which permit the production of 2-hydroxytetracosenoic acid (preferably 2-hydroxynervonic acid) or a composition comprising 2-hydroxytetracosenoic acid (preferably 2-hydroxynervonic acid) in said non-human organism or in the culture medium surrounding said non-human organism.

[59918] A further embodiment of the present invention relates to a process for the production of 2-hydroxytetracosenoic acid (preferably 2-hydroxynervonic acid), which comprises
[59919] (a) increasing or generating the activity of a ferredoxin non-targeted in a non-human organism or a part thereof, preferably a microorganism, a plant cell, a plant or a part thereof, as compared to a corresponding non-transformed wild type non-human organism or a part thereof; and
[59920] (b) growing the non-human organism or a part thereof under conditions which permit the production of 2-hydroxytetracosenoic acid (preferably 2-hydroxynervonic acid) or a composition comprising 2-hydroxytetracosenoic acid (preferably 2-hydroxynervonic acid) in said non-human organism or in the culture medium surrounding said non-human organism.

[59921] A further embodiment of the present invention relates to a process for the production of 2-hydroxybehenic acid, which comprises
[59922] (a) increasing or generating the activity of a Sec-independent protein translocase subunit non-targeted in a non-human organism or a part thereof, preferably a microorganism, a plant cell, a plant or a part thereof, as compared to a corresponding non-transformed wild type non-human organism or a part thereof; and
[59923] (b) growing the non-human organism or a part thereof under conditions which permit the production of 2-hydroxybehenic acid or a composition comprising 2-hydroxybehenic acid in said non-human organism or in the culture medium surrounding said non-human organism.

[59924] A further embodiment of the present invention relates to a process for the production of 2-hydroxytetracosenoic acid (preferably 2-hydroxynervonic acid), which comprises
[59925] (a) increasing or generating the activity of a amino acid ABC transporter permease protein non-targeted in a non-human organism or a part thereof, preferably a microorganism, a plant cell, a plant or a part thereof, as compared to a corresponding non-transformed wild type non-human organism or a part thereof; and
[59926] (b) growing the non-human organism or a part thereof under conditions which permit the production of 2-hydroxytetracosenoic acid (preferably 2-hydroxynervonic acid) or a composition comprising 2-hydroxytetracosenoic acid (preferably 2-hydroxynervonic acid) in said non-human organism or in the culture medium surrounding said non-human organism.

[59927] A further embodiment of the present invention relates to a process for the production of cerebronic acid, which comprises
[59928] (a) increasing or generating the activity of a metal-dependent hydrolase non-targeted in a non-human organism or a part thereof, preferably a microorganism, a plant cell, a plant or a part thereof, as compared to a corresponding non-transformed wild type non-human organism or a part thereof; and
[59929] (b) growing the non-human organism or a part thereof under conditions which permit the production of cerebronic acid or a composition comprising cerebronic acid in said non-human organism or in the culture medium surrounding said non-human organism.

[59930] A further embodiment of the present invention relates to a process for the production of hexadecadienoic acid, which comprises
[59931] (a) increasing or generating the activity of a metal-dependent hydrolase non-targeted in a non-human organism or a part thereof, preferably a microorganism, a plant cell, a plant or a part thereof, as compared to a corresponding non-transformed wild type non-human organism or a part thereof; and
[59932] (b) growing the non-human organism or a part thereof under conditions which permit the production of hexadecadienoic acid or a composition comprising hexadecadienoic acid in said non-human organism or in the culture medium surrounding said non-human organism.

[59933] A further embodiment of the present invention relates to a process for the production of 2-hydroxybehenic acid, which comprises
[59934] (a) increasing or generating the activity of a multiple antibiotic resistance protein non-targeted in a non-human organism or a part thereof, preferably a microorganism, a plant cell, a plant or a part thereof, as compared to a corresponding non-transformed wild type non-human organism or a part thereof; and
[59935] (b) growing the non-human organism or a part thereof under conditions which permit the production of 2-hydroxybehenic acid or a composition comprising 2-hydroxybehenic acid in said non-human organism or in the culture medium surrounding said non-human organism.

[59936] A further embodiment of the present invention relates to a process for the production of hexadecatrienoic acid, which comprises
[59937] (a) increasing or generating the activity of a TTC1386-protein non-targeted in a non-human organism or a part thereof, preferably a microorganism, a plant cell, a plant or a part thereof, as compared to a corresponding non-transformed wild type non-human organism or a part thereof; and
[59938] (b) growing the non-human organism or a part thereof under conditions which permit the production of hexadecatrienoic acid or a composition comprising hexadecatrienoic acid in said non-human organism or in the culture medium surrounding said non-human organism.

[59939] A further embodiment of the present invention relates to a process for the production of 2-hydroxybehenic acid, which comprises
[59940] (a) increasing or generating the activity of a homocitrate synthase non-targeted in a non-human organism or a part thereof, preferably a microorganism, a plant cell, a plant or a part thereof, as compared to a corresponding non-transformed wild type non-human organism or a part thereof; and
[59941] (b) growing the non-human organism or a part thereof under conditions which permit the production of 2-hydroxybehenic acid or a composition comprising 2-hydroxybehenic acid in said non-human organism or in the culture medium surrounding said non-human organism.

[59942] A further embodiment of the present invention relates to a process for the production of hexadecadienoic acid, which comprises
[59943] (a) increasing or generating the activity of a protein kinase non-targeted in a non-human organism or a part thereof, preferably a microorganism, a plant cell, a plant or a part thereof, as compared to a corresponding non-transformed wild type non-human organism or a part thereof; and
[59944] (b) growing the non-human organism or a part thereof under conditions which permit the production of hexadecadienoic acid or a composition comprising hexadecadienoic acid in said non-human organism or in the culture medium surrounding said non-human organism.

[59945] A further embodiment of the present invention relates to a process for the production of hexadecatrienoic acid, which comprises
[59946] (a) increasing or generating the activity of a protein kinase non-targeted in a non-human organism or a part thereof, preferably a microorganism, a plant cell, a plant or a part thereof, as compared to a corresponding non-transformed wild type non-human organism or a part thereof; and
[59947] (b) growing the non-human organism or a part thereof under conditions which permit the production of hexadecatrienoic acid or a composition comprising hexadecatrienoic acid in said non-human organism or in the culture medium surrounding said non-human organism.

[59948] A further embodiment of the present invention relates to a process for the production of hexadecadienoic acid, which comprises
[59949] (a) increasing or generating the activity of a transcription factor non-targeted in a non-human organism or a part thereof, preferably a microorganism, a plant cell, a plant or a part thereof, as compared to a corresponding non-transformed wild type non-human organism or a part thereof; and
[59950] (b) growing the non-human organism or a part thereof under conditions which permit the production of hexadecadienoic acid or a composition comprising hexadecadienoic acid in said non-human organism or in the culture medium surrounding said non-human organism.

[59951] A further embodiment of the present invention relates to a process for the production of hexadecatrienoic acid, which comprises
[59952] (a) increasing or generating the activity of a transcription factor non-targeted in a non-human organism or a part thereof, preferably a microorganism, a plant cell, a plant or a part thereof, as compared to a corresponding non-transformed wild type non-human organism or a part thereof; and
[59953] (b) growing the non-human organism or a part thereof under conditions which permit the production of hexadecatrienoic acid or a composition comprising hexadecatrienoic acid in said non-human organism or in the culture medium surrounding said non-human organism.

[59954] A further embodiment of the present invention relates to a process for the production of hexadecatrienoic acid, which comprises
[59955] (a) increasing or generating the activity of a cell division control protein non-targeted in a non-human organism or a part thereof, preferably a microorganism, a plant cell, a plant or a part thereof, as compared to a corresponding non-transformed wild type non-human organism or a part thereof; and
[59956] (b) growing the non-human organism or a part thereof under conditions which permit the production of hexadecatrienoic acid or a composition comprising hexadecatrienoic acid in said non-human organism or in the culture medium surrounding said non-human organism.

[59957] A further embodiment of the present invention relates to a process for the production of cerebronic acid, which comprises
[59958] (a) increasing or generating the activity of a ycl027w-protein non-targeted in a non-human organism or a part thereof, preferably a microorganism, a plant cell, a plant or a part thereof, as compared to a corresponding non-transformed wild type non-human organism or a part thereof; and
[59959] (b) growing the non-human organism or a part thereof under conditions which permit the production of cerebronic acid or a composition comprising cerebronic acid in said non-human organism or in the culture medium surrounding said non-human organism.

[59960] A further embodiment of the present invention relates to a process for the production of 2-hydroxytetracosenoic acid (preferably 2-hydroxynervonic acid), which comprises
[59961] (a) increasing or generating the activity of a ycl027w-protein non-targeted in a non-human organism or a part thereof, preferably a microorganism, a plant cell, a plant or a part thereof, as compared to a corresponding non-transformed wild type non-human organism or a part thereof; and
[59962] (b) growing the non-human organism or a part thereof under conditions which permit the production of 2-hydroxytetracosenoic acid (preferably 2-hydroxynervonic acid) or a composition comprising 2-hydroxytetracosenoic acid (preferably 2-hydroxynervonic acid) in said non-human organism or in the culture medium surrounding said non-human organism.

[59963] A further embodiment of the present invention relates to a process for the production of 2-hydroxypalmitic acid, which comprises
[59964] (a) increasing or generating the activity of a ycl049c-protein non-targeted in a non-human organism or a part thereof, preferably a microorganism, a plant cell, a plant or a part thereof, as compared to a corresponding non-transformed wild type non-human organism or a part thereof; and
[59965] (b) growing the non-human organism or a part thereof under conditions which permit the production of 2-hydroxypalmitic acid or a composition comprising 2-hydroxypalmitic acid in said non-human organism or in the culture medium surrounding said non-human organism.

[59966] A further embodiment of the present invention relates to a process for the production of oleic acid, which comprises
[59967] (a) increasing or generating the activity of a glycerol-3-phosphate dehydrogenase non-targeted in a non-human organism or a part thereof, preferably a microorganism, a plant cell, a plant or a part thereof, as compared to a corresponding non-transformed wild type non-human organism or a part thereof; and
[59968] (b) growing the non-human organism or a part thereof under conditions which permit the production of oleic acid or a composition comprising oleic acid in said non-human organism or in the culture medium surrounding said non-human organism.

[59969] A further embodiment of the present invention relates to a process for the production of eicosanoic acid, which comprises
[59970] (a) increasing or generating the activity of a isocitrate dehydrogenase non-targeted in a non-human organism or a part thereof, preferably a microorganism, a plant cell, a plant or a part thereof, as compared to a corresponding non-transformed wild type non-human organism or a part thereof; and
[59971] (b) growing the non-human organism or a part thereof under conditions which permit the production of eicosanoic acid or a composition comprising eicosanoic acid in said non-human organism or in the culture medium surrounding said non-human organism.

[59972] A further embodiment of the present invention relates to a process for the production of heptadecanoic acid, which comprises
[59973] (a) increasing or generating the activity of a isocitrate dehydrogenase non-targeted in a non-human organism or a part thereof, preferably a microorganism, a plant cell, a plant or a part thereof, as compared to a corresponding non-transformed wild type non-human organism or a part thereof; and
[59974] (b) growing the non-human organism or a part thereof under conditions which permit the production of heptadecanoic acid or a composition comprising heptadecanoic acid in said non-human organism or in the culture medium surrounding said non-human organism.

[59975] A further embodiment of the present invention relates to a process for the production of hexadecadienoic acid, which comprises
[59976] (a) increasing or generating the activity of a cell division control protein non-targeted in a non-human organism or a part thereof, preferably a microorganism, a plant cell, a plant or a part thereof, as compared to a corresponding non-transformed wild type non-human organism or a part thereof; and
[59977] (b) growing the non-human organism or a part thereof under conditions which permit the production of hexadecadienoic acid or a composition comprising hexadecadienoic acid in said non-human organism or in the culture medium surrounding said non-human organism.

[59978] A further embodiment of the present invention relates to a process for the production of hexadecatrienoic acid, which comprises
[59979] (a) increasing or generating the activity of a cell division control protein non-targeted in a non-human organism or a part thereof, preferably a microorganism, a plant cell, a plant or a part thereof, as compared to a corresponding non-transformed wild type non-human organism or a part thereof; and
[59980] (b) growing the non-human organism or a part thereof under conditions which permit the production of hexadecatrienoic acid or a composition comprising hexadecatrienoic acid in said non-human organism or in the culture medium surrounding said non-human organism.

[59981] A further embodiment of the present invention relates to a process for the production of 2-hydroxybehenic acid, which comprises
[59982] (a) increasing or generating the activity of a homocitrate synthase non-targeted in a non-human organism or a part thereof, preferably a microorganism, a plant cell, a plant or a part thereof, as compared to a corresponding non-transformed wild type non-human organism or a part thereof; and
[59983] (b) growing the non-human organism or a part thereof under conditions which permit the production of 2-hydroxybehenic acid or a composition comprising 2-hydroxybehenic acid in said non-human organism or in the culture medium surrounding said non-human organism.

[59984] A further embodiment of the present invention relates to a process for the production of behenic acid, which comprises
[59985] (a) increasing or generating the activity of a phospho-2-dehydro-3-deoxyheptonate aldolase non-targeted in a non-human organism or a part thereof, preferably a microorganism, a plant cell, a plant or a part thereof, as compared to a corresponding non-transformed wild type non-human organism or a part thereof; and
[59986] (b) growing the non-human organism or a part thereof under conditions which permit the production of behenic acid or a composition comprising behenic acid in said non-human organism or in the culture medium surrounding said non-human organism.

[59987] A further embodiment of the present invention relates to a process for the production of 2-hydroxytetracosenoic acid (preferably 2-hydroxynervonic acid), which comprises
[59988] (a) increasing or generating the activity of a cell wall protein non-targeted in a non-human organism or a part thereof, preferably a microorganism, a plant cell, a plant or a part thereof, as compared to a corresponding non-transformed wild type non-human organism or a part thereof; and
[59989] (b) growing the non-human organism or a part thereof under conditions which permit the production of 2-hydroxytetracosenoic acid (preferably 2-hydroxynervonic acid) or a composition comprising 2-hydroxytetracosenoic acid (preferably 2-hydroxynervonic acid) in said non-human organism or in the culture medium surrounding said non-human organism.

[59990] A further embodiment of the present invention relates to a process for the production of 2-hydroxytetracosenoic acid (preferably 2-hydroxynervonic acid), which comprises
[59991] (a) increasing or generating the activity of a F-box protein non-targeted in a non-human organism or a part thereof, preferably a microorganism, a plant cell, a plant or a part thereof, as compared to a corresponding non-transformed wild type non-human organism or a part thereof; and
[59992] (b) growing the non-human organism or a part thereof under conditions which permit the production of 2-hydroxytetracosenoic acid (preferably 2-hydroxynervonic acid) or a composition comprising 2-hydroxytetracosenoic acid (preferably 2-hydroxynervonic acid) in said non-human organism or in the culture medium surrounding said non-human organism.

[59993] A further embodiment of the present invention relates to a process for the production of cerebronic acid, which comprises
[59994] (a) increasing or generating the activity of a ydr273w-protein non-targeted in a non-human organism or a part thereof, preferably a microorganism, a plant cell, a plant or a part thereof, as compared to a corresponding non-transformed wild type non-human organism or a part thereof; and
[59995] (b) growing the non-human organism or a part thereof under conditions which permit the production of cerebronic acid or a composition comprising cerebronic acid in said non-human organism or in the culture medium surrounding said non-human organism.

[59996] A further embodiment of the present invention relates to a process for the production of 2-hydroxytetracosenoic acid (preferably 2-hydroxynervonic acid), which comprises
[59997] (a) increasing or generating the activity of a ydr273w-protein non-targeted in a non-human organism or a part thereof, preferably a microorganism, a plant cell, a plant or a part thereof, as compared to a corresponding non-transformed wild type non-human organism or a part thereof; and
[59998] (b) growing the non-human organism or a part thereof under conditions which permit the production of 2-hydroxytetracosenoic acid (preferably 2-hydroxynervonic acid) or a composition comprising 2-hydroxytetracosenoic acid (preferably 2-hydroxynervonic acid) in said non-human organism or in the culture medium surrounding said non-human organism.

[59999] A further embodiment of the present invention relates to a process for the production of hexadecatrienoic acid, which comprises
[60000] (a) increasing or generating the activity of a ydr339c-protein non-targeted in a non-human organism or a part thereof, preferably a microorganism, a plant cell, a plant or a part thereof, as compared to a corresponding non-transformed wild type non-human organism or a part thereof; and
[60001] (b) growing the non-human organism or a part thereof under conditions which permit the production of hexadecatrienoic acid or a composition comprising hexadecatrienoic acid in said non-human organism or in the culture medium surrounding said non-human organism.

[60002] A further embodiment of the present invention relates to a process for the production of heptadecanoic acid, which comprises
[60003] (a) increasing or generating the activity of a aldolase non-targeted in a non-human organism or a part thereof, preferably a microorganism, a plant cell, a plant or a part thereof, as compared to a corresponding non-transformed wild type non-human organism or a part thereof; and
[60004] (b) growing the non-human organism or a part thereof under conditions which permit the production of heptadecanoic acid or a composition comprising heptadecanoic acid in said non-human organism or in the culture medium surrounding said non-human organism.

[60005] A further embodiment of the present invention relates to a process for the production of myristic acid, which comprises
[60006] (a) increasing or generating the activity of a small nuclear ribonucleoprotein non-targeted in a non-human organism or a part thereof, preferably a microorganism, a plant cell, a plant or a part thereof, as compared to a corresponding non-transformed wild type non-human organism or a part thereof; and
[60007] (b) growing the non-human organism or a part thereof under conditions which permit the production of myristic acid or a composition comprising myristic acid in said non-human organism or in the culture medium surrounding said non-human organism.

[60008] A further embodiment of the present invention relates to a process for the production of hexadecadienoic acid, which comprises
[60009] (a) increasing or generating the activity of a molecular chaperone portein non-targeted in a non-human organism or a part thereof, preferably a microorganism, a plant cell, a plant or a part thereof, as compared to a corresponding non-transformed wild type non-human organism or a part thereof; and
[60010] (b) growing the non-human organism or a part thereof under conditions which permit the production of hexadecadienoic acid or a composition comprising hexadecadienoic acid in said non-human organism or in the culture medium surrounding said non-human organism.

[60011] A further embodiment of the present invention relates to a process for the production of hexadecatrienoic acid, which comprises
[60012] (a) increasing or generating the activity of a molecular chaperone portein non-targeted in a non-human organism or a part thereof, preferably a microorganism, a plant cell, a plant or a part thereof, as compared to a corresponding non-transformed wild type non-human organism or a part thereof; and
[60013] (b) growing the non-human organism or a part thereof under conditions which permit the production of hexadecatrienoic acid or a composition comprising hexadecatrienoic acid in said non-human organism or in the culture medium surrounding said non-human organism.

[60014] A further embodiment of the present invention relates to a process for the production of 2-hydroxybehenic acid, which comprises
[60015] (a) increasing or generating the activity of a YFL019C-protein non-targeted in a non-human organism or a part thereof, preferably a microorganism, a plant cell, a plant or a part thereof, as compared to a corresponding non-transformed wild type non-human organism or a part thereof; and
[60016] (b) growing the non-human organism or a part thereof under conditions which permit the production of 2-hydroxybehenic acid or a composition comprising 2-hydroxybehenic acid in said non-human organism or in the culture medium surrounding said non-human organism.

[60017] A further embodiment of the present invention relates to a process for the production of 2-hydroxypalmitic acid, which comprises
[60018] (a) increasing or generating the activity of a YFL019C-protein non-targeted in a non-human organism or a part thereof, preferably a microorganism, a plant cell, a plant or a part thereof, as compared to a corresponding non-transformed wild type non-human organism or a part thereof; and
[60019] (b) growing the non-human organism or a part thereof under conditions which permit the production of 2-hydroxypalmitic acid or a composition comprising 2-hydroxypalmitic acid in said non-human organism or in the culture medium surrounding said non-human organism.

[60020] A further embodiment of the present invention relates to a process for the production of hexadecadienoic acid, which comprises
[60021] (a) increasing or generating the activity of a aminotransferase non-targeted in a non-human organism or a part thereof, preferably a microorganism, a plant cell, a plant or a part thereof, as compared to a corresponding non-transformed wild type non-human organism or a part thereof; and
[60022] (b) growing the non-human organism or a part thereof under conditions which permit the production of hexadecadienoic acid or a composition comprising hexadecadienoic acid in said non-human organism or in the culture medium surrounding said non-human organism.

[60023] A further embodiment of the present invention relates to a process for the production of hexadecatrienoic acid, which comprises
[60024] (a) increasing or generating the activity of a ygl237c-protein non-targeted in a non-human organism or a part thereof, preferably a microorganism, a plant cell, a plant or a part thereof, as compared to a corresponding non-transformed wild type non-human organism or a part thereof; and
[60025] (b) growing the non-human organism or a part thereof under conditions which permit the production of hexadecatrienoic acid or a composition comprising hexadecatrienoic acid in said non-human organism or in the culture medium surrounding said non-human organism.

[60026] A further embodiment of the present invention relates to a process for the production of eicosanoic acid, which comprises
[60027] (a) increasing or generating the activity of a YGR104C-protein non-targeted in a non-human organism or a part thereof, preferably a microorganism, a plant cell, a plant or a part thereof, as compared to a corresponding non-transformed wild type non-human organism or a part thereof; and
[60028] (b) growing the non-human organism or a part thereof under conditions which permit the production of eicosanoic acid or a composition comprising eicosanoic acid in said non-human organism or in the culture medium surrounding said non-human organism.

[60029] A further embodiment of the present invention relates to a process for the production of cerebronic acid, which comprises
[60030] (a) increasing or generating the activity of a squalene monooxygenase non-targeted in a non-human organism or a part thereof, preferably a microorganism, a plant cell, a plant or a part thereof, as compared to a corresponding non-transformed wild type non-human organism or a part thereof; and
[60031] (b) growing the non-human organism or a part thereof under conditions which permit the production of cerebronic acid or a composition comprising cerebronic acid in said non-human organism or in the culture medium surrounding said non-human organism.

[60032] A further embodiment of the present invention relates to a process for the production of hexadecadienoic acid, which comprises
[60033] (a) increasing or generating the activity of a biotin synthase non-targeted in a non-human organism or a part thereof, preferably a microorganism, a plant cell, a plant or a part thereof, as compared to a corresponding non-transformed wild type non-human organism or a part thereof; and
[60034] (b) growing the non-human organism or a part thereof under conditions which permit the production of hexadecadienoic acid or a composition comprising hexadecadienoic acid in said non-human organism or in the culture medium surrounding said non-human organism.

[60035] A further embodiment of the present invention relates to a process for the production of cerebronic acid, which comprises
[60036] (a) increasing or generating the activity of a yhr033w-protein non-targeted in a non-human organism or a part thereof, preferably a microorganism, a plant cell, a plant or a part thereof, as compared to a corresponding non-transformed wild type non-human organism or a part thereof; and
[60037] (b) growing the non-human organism or a part thereof under conditions which permit the production of cerebronic acid or a composition comprising cerebronic acid in said non-human organism or in the culture medium surrounding said non-human organism.

[60038] A further embodiment of the present invention relates to a process for the production of cerebronic acid, which comprises
[60039] (a) increasing or generating the activity of a DnaJ-like chaperone non-targeted in a non-human organism or a part thereof, preferably a microorganism, a plant cell, a plant or a part thereof, as compared to a corresponding non-transformed wild type non-human organism or a part thereof; and
[60040] (b) growing the non-human organism or a part thereof under conditions which permit the production of cerebronic acid or a composition comprising cerebronic acid in said non-human organism or in the culture medium surrounding said non-human organism.

[60041] A further embodiment of the present invention relates to a process for the production of 2-hydroxybehenic acid, which comprises
[60042] (a) increasing or generating the activity of a YJL127W-A-protein non-targeted in a non-human organism or a part thereof, preferably a microorganism, a plant cell, a plant or a part thereof, as compared to a corresponding non-transformed wild type non-human organism or a part thereof; and
[60043] (b) growing the non-human organism or a part thereof under conditions which permit the production of 2-hydroxybehenic acid or a composition comprising 2-hydroxybehenic acid in said non-human organism or in the culture medium surrounding said non-human organism.

[60044] A further embodiment of the present invention relates to a process for the production of 2-hydroxytetracosenoic acid (preferably 2-hydroxynervonic acid), which comprises
[60045] (a) increasing or generating the activity of a cystathionine gamma-synthase non-targeted in a non-human organism or a part thereof, preferably a microorganism, a plant cell, a plant or a part thereof, as compared to a corresponding non-transformed wild type non-human organism or a part thereof; and
[60046] (b) growing the non-human organism or a part thereof under conditions which permit the production of 2-hydroxytetracosenoic acid (preferably 2-hydroxynervonic acid) or a composition comprising 2-hydroxytetracosenoic acid (preferably 2-hydroxynervonic acid) in said non-human organism or in the culture medium surrounding said non-human organism.

[60047] A further embodiment of the present invention relates to a process for the production of 2-hydroxypalmitic acid, which comprises
[60048] (a) increasing or generating the activity of a cystathionine gamma-synthase non-targeted in a non-human organism or a part thereof, preferably a microorganism, a plant cell, a plant or a part thereof, as compared to a corresponding non-transformed wild type non-human organism or a part thereof; and
[60049] (b) growing the non-human organism or a part thereof under conditions which permit the production of 2-hydroxypalmitic acid or a composition comprising 2-hydroxypalmitic acid in said non-human organism or in the culture medium surrounding said non-human organism.

[60050] A further embodiment of the present invention relates to a process for the production of 2-hydroxypalmitic acid, which comprises
[60051] (a) increasing or generating the activity of a polygalacturonase non-targeted in a non-human organism or a part thereof, preferably a microorganism, a plant cell, a plant or a part thereof, as compared to a corresponding non-transformed wild type non-human organism or a part thereof; and
[60052] (b) growing the non-human organism or a part thereof under conditions which permit the production of 2-hydroxypalmitic acid or a composition comprising 2-hydroxypalmitic acid in said non-human organism or in the culture medium surrounding said non-human organism.

[60053] A further embodiment of the present invention relates to a process for the production of hexadecatrienoic acid, which comprises
[60054] (a) increasing or generating the activity of a cyclin non-targeted in a non-human organism or a part thereof, preferably a microorganism, a plant cell, a plant or a part thereof, as compared to a corresponding non-transformed wild type non-human organism or a part thereof; and
[60055] (b) growing the non-human organism or a part thereof under conditions which permit the production of hexadecatrienoic acid or a composition comprising hexadecatrienoic acid in said non-human organism or in the culture medium surrounding said non-human organism.

[60056] A further embodiment of the present invention relates to a process for the production of hexadecadienoic acid, which comprises
[60057] (a) increasing or generating the activity of a ylr326w-protein non-targeted in a non-human organism or a part thereof, preferably a microorganism, a plant cell, a plant or a part thereof, as compared to a corresponding non-transformed wild type non-human organism or a part thereof; and
[60058] (b) growing the non-human organism or a part thereof under conditions which permit the production of hexadecadienoic acid or a composition comprising hexadecadienoic acid in said non-human organism or in the culture medium surrounding said non-human organism.

[60059] A further embodiment of the present invention relates to a process for the production of hexadecatrienoic acid, which comprises
[60060] (a) increasing or generating the activity of a ylr326w-protein non-targeted in a non-human organism or a part thereof, preferably a microorganism, a plant cell, a plant or a part thereof, as compared to a corresponding non-transformed wild type non-human organism or a part thereof; and
[60061] (b) growing the non-human organism or a part thereof under conditions which permit the production of hexadecatrienoic acid or a composition comprising hexadecatrienoic acid in said non-human organism or in the culture medium surrounding said non-human organism.

[60062] A further embodiment of the present invention relates to a process for the production of 2-hydroxybehenic acid, which comprises
[60063] (a) increasing or generating the activity of a yml083c-protein non-targeted in a non-human organism or a part thereof, preferably a microorganism, a plant cell, a plant or a part thereof, as compared to a corresponding non-transformed wild type non-human organism or a part thereof; and
[60064] (b) growing the non-human organism or a part thereof under conditions which permit the production of 2-hydroxybehenic acid or a composition comprising 2-hydroxybehenic acid in said non-human organism or in the culture medium surrounding said non-human organism.

[60065] A further embodiment of the present invention relates to a process for the production of 2-hydroxytetracosenoic acid (preferably 2-hydroxynervonic acid), which comprises
[60066] (a) increasing or generating the activity of a yml084w-protein non-targeted in a non-human organism or a part thereof, preferably a microorganism, a plant cell, a plant or a part thereof, as compared to a corresponding non-transformed wild type non-human organism or a part thereof; and
[60067] (b) growing the non-human organism or a part thereof under conditions which permit the production of 2-hydroxytetracosenoic acid (preferably 2-hydroxynervonic acid) or a composition comprising 2-hydroxytetracosenoic acid (preferably 2-hydroxynervonic acid) in said non-human organism or in the culture medium surrounding said non-human organism.

[60068] A further embodiment of the present invention relates to a process for the production of 2-hydroxypalmitic acid, which comprises
[60069] (a) increasing or generating the activity of a molecular chaperone non-targeted in a non-human organism or a part thereof, preferably a microorganism, a plant cell, a plant or a part thereof, as compared to a corresponding non-transformed wild type non-human organism or a part thereof; and
[60070] (b) growing the non-human organism or a part thereof under conditions which permit the production of 2-hydroxypalmitic acid or a composition comprising 2-hydroxypalmitic acid in said non-human organism or in the culture medium surrounding said non-human organism.

[60071] A further embodiment of the present invention relates to a process for the production of oleic acid, which comprises
[60072] (a) increasing or generating the activity of a phosphotransferase non-targeted in a non-human organism or a part thereof, preferably a microorganism, a plant cell, a plant or a part thereof, as compared to a corresponding non-transformed wild type non-human organism or a part thereof; and
[60073] (b) growing the non-human organism or a part thereof under conditions which permit the production of oleic acid or a composition comprising oleic acid in said non-human organism or in the culture medium surrounding said non-human organism.

[60074] A further embodiment of the present invention relates to a process for the production of 2-hydroxybehenic acid, which comprises
[60075] (a) increasing or generating the activity of a ynl321w-protein non-targeted in a non-human organism or a part thereof, preferably a microorganism, a plant cell, a plant or a part thereof, as compared to a corresponding non-transformed wild type non-human organism or a part thereof; and
[60076] (b) growing the non-human organism or a part thereof under conditions which permit the production of 2-hydroxybehenic acid or a composition comprising 2-hydroxybehenic acid in said non-human organism or in the culture medium surrounding said non-human organism.

[60077] A further embodiment of the present invention relates to a process for the production of hexadecatrienoic acid, which comprises
[60078] (a) increasing or generating the activity of a Elongation factor Tu non-targeted in a non-human organism or a part thereof, preferably a microorganism, a plant cell, a plant or a part thereof, as compared to a corresponding non-transformed wild type non-human organism or a part thereof; and
[60079] (b) growing the non-human organism or a part thereof under conditions which permit the production of hexadecatrienoic acid or a composition comprising hexadecatrienoic acid in said non-human organism or in the culture medium surrounding said non-human organism.

[60080] A further embodiment of the present invention relates to a process for the production of 2-hydroxytetracosenoic acid (preferably 2-hydroxynervonic acid), which comprises
[60081] (a) increasing or generating the activity of a ATPase epsilon subunit non-targeted in a non-human organism or a part thereof, preferably a microorganism, a plant cell, a plant or a part thereof, as compared to a corresponding non-transformed wild type non-human organism or a part thereof; and
[60082] (b) growing the non-human organism or a part thereof under conditions which permit the production of 2-hydroxytetracosenoic acid (preferably 2-hydroxynervonic acid) or a composition comprising 2-hydroxytetracosenoic acid (preferably 2-hydroxynervonic acid) in said non-human organism or in the culture medium surrounding said non-human organism.

[60083] A further embodiment of the present invention relates to a process for the production of 2-hydroxypalmitic acid, which comprises
[60084] (a) increasing or generating the activity of a phosphoadenosine phosphosulfate reductase non-targeted in a non-human organism or a part thereof, preferably a microorganism, a plant cell, a plant or a part thereof, as compared to a corresponding non-transformed wild type non-human organism or a part thereof; and
[60085] (b) growing the non-human organism or a part thereof under conditions which permit the production of 2-hydroxypalmitic acid or a composition comprising 2-hydroxypalmitic acid in said non-human organism or in the culture medium surrounding said non-human organism.

[60086] A further embodiment of the present invention relates to a process for the production of oleic acid, which comprises
[60087] (a) increasing or generating the activity of a 40S ribosomal protein S17 non-targeted in a non-human organism or a part thereof, preferably a microorganism, a plant cell, a plant or a part thereof, as compared to a corresponding non-transformed wild type non-human organism or a part thereof; and
[60088] (b) growing the non-human organism or a part thereof under conditions which permit the production of oleic acid or a composition comprising oleic acid in said non-human organism or in the culture medium surrounding said non-human organism.

[60089] A further embodiment of the present invention relates to a process for the production of 2-hydroxybehenic acid, which comprises
[60090] (a) increasing or generating the activity of a b3644-protein non-targeted in a non-human organism or a part thereof, preferably a microorganism, a plant cell, a plant or a part thereof, as compared to a corresponding non-transformed wild type non-human organism or a part thereof; and
[60091] (b) growing the non-human organism or a part thereof under conditions which permit the production of 2-hydroxybehenic acid or a composition comprising 2-hydroxybehenic acid in said non-human organism or in the culture medium surrounding said non-human organism.

[60092] A further embodiment of the present invention relates to a process for the production of behenic acid, which comprises
[60093] (a) increasing or generating the activity of a b3644-protein non-targeted in a non-human organism or a part thereof, preferably a microorganism, a plant cell, a plant or a part thereof, as compared to a corresponding non-transformed wild type non-human organism or a part thereof; and
[60094] (b) growing the non-human organism or a part thereof under conditions which permit the production of behenic acid or a composition comprising behenic acid in said non-human organism or in the culture medium surrounding said non-human organism.

[60095] A further embodiment of the present invention relates to a process for the production of nervonic acid, which comprises
[60096] (a) increasing or generating the activity of a b3644-protein non-targeted in a non-human organism or a part thereof, preferably a microorganism, a plant cell, a plant or a part thereof, as compared to a corresponding non-transformed wild type non-human organism or a part thereof; and
[60097] (b) growing the non-human organism or a part thereof under conditions which permit the production of nervonic acid or a composition comprising nervonic acid in said non-human organism or in the culture medium surrounding said non-human organism.

[60098] A further embodiment of the present invention relates to a process for the production of 2-hydroxybehenic acid, which comprises
[60099] (a) increasing or generating the activity of a polypeptide comprising a polypeptide as depicted in the respective line in column 5 or 8 of Table II, application no. 12, or a homolog or a fragment thereof, a consensus sequence or at least one polypeptide motif as depicted in the respective line in column 8 of Table IV, application no. 12, whereby the respective line discloses in column 7 the fine chemical 2-hydroxybehenic acid; or
[60100] increasing or generating the activity of an expression product of one or more nucleic acid molecule(s) comprising a polynucleotide as depicted in the respective line in column 5 or 8 of Table I, application no. 12, preferably the coding region thereof, or a homolog or a fragment thereof, whereby the respective line discloses in column 7 the fine chemical 2-hydroxybehenic acid;
[60101] non-targeted in a non-human organism or a part thereof; preferably a microorganism, a plant cell, a plant or a part thereof, as compared to a corresponding non-transformed wild type non-human organism or a part thereof; and
[60102] (b) growing the non-human organism under conditions which permit the production of 2-hydroxybehenic acid, or a composition comprising 2-hydroxybehenic acid in said non-human organism or in the culture medium surrounding said non-human organism.

[60103] A further embodiment of the present invention relates to a process for the production of 2-hydroxypalmitic acid, which comprises
[60104] (a) increasing or generating the activity of a polypeptide comprising a polypeptide as depicted in the respective line in column 5 or 8 of Table II, application no. 12, or a homolog or a fragment thereof, a consensus sequence or at least one polypeptide motif as depicted in the respective line in column 8 of Table IV, application no. 12, whereby the respective line discloses in column 7 the fine chemical 2-hydroxypalmitic acid; or
[60105] increasing or generating the activity of an expression product of one or more nucleic acid molecule(s) comprising a polynucleotide as depicted in the respective line in column 5 or 8 of Table I, application no. 12, preferably the coding region thereof, or a homolog or a fragment thereof, whereby the respective line discloses in column 7 the fine chemical 2-hydroxypalmitic acid;
[60106] non-targeted in a non-human organism or a part thereof; preferably a microorganism, a plant cell, a plant or a part thereof, as compared to a corresponding non-transformed wild type non-human organism or a part thereof; and
[60107] (b) growing the non-human organism under conditions which permit the production of 2-hydroxypalmitic acid, or a composition comprising 2-hydroxypalmitic acid in said non-human organism or in the culture medium surrounding said non-human organism.

[60108] A further embodiment of the present invention relates to a process for the production of 2-hydroxytetracosenoic acid (preferably 2-hydroxynervonic acid), which comprises
[60109] (a) increasing or generating the activity of a polypeptide comprising a polypeptide as depicted in the respective line in column 5 or 8 of Table II, application no. 12, or a homolog or a fragment thereof, a consensus sequence or at least one polypeptide motif as depicted in the respective line in column 8 of Table IV, application no. 12, whereby the respective line discloses in column 7 the fine chemical 2-hydroxytetracosenoic acid (preferably 2-hydroxynervonic acid); or
[60110] increasing or generating the activity of an expression product of one or more nucleic acid molecule(s) comprising a polynucleotide as depicted in the respective line in column 5 or 8 of Table I, application no. 12, preferably the coding region thereof, or a homolog or a fragment thereof, whereby the respective line discloses in column 7 the fine chemical 2-hydroxytetracosenoic acid (preferably 2-hydroxynervonic acid);
[60111] non-targeted in a non-human organism or a part thereof; preferably a microorganism, a plant cell, a plant or a part thereof, as compared to a corresponding non-transformed wild type non-human organism or a part thereof; and
[60112] (b) growing the non-human organism under conditions which permit the production of 2-hydroxytetracosenoic acid (preferably 2-hydroxynervonic acid), or a composition comprising 2-hydroxytetracosenoic acid (preferably 2-hydroxynervonic acid) in said non-human organism or in the culture medium surrounding said non-human organism.

[60113] A further embodiment of the present invention relates to a process for the production of behenic acid, which comprises
[60114] (a) increasing or generating the activity of a polypeptide comprising a polypeptide as depicted in the respective line in column 5 or 8 of Table II, application no. 12, or a homolog or a fragment thereof, a consensus sequence or at least one polypeptide motif as depicted in the respective line in column 8 of Table IV, application no. 12, whereby the respective line discloses in column 7 the fine chemical behenic acid; or
[60115] increasing or generating the activity of an expression product of one or more nucleic acid molecule(s) comprising a polynucleotide as depicted in the respective line in column 5 or 8 of Table I, application no. 12, preferably the coding region thereof, or a homolog or a fragment thereof, whereby the respective line discloses in column 7 the fine chemical behenic acid;
[60116] non-targeted in a non-human organism or a part thereof; preferably a microorganism, a plant cell, a plant or a part thereof, as compared to a corresponding non-transformed wild type non-human organism or a part thereof; and
[60117] (b) growing the non-human organism under conditions which permit the production of behenic acid, or a composition comprising behenic acid in said non-human organism or in the culture medium surrounding said non-human organism.

[60118] A further embodiment of the present invention relates to a process for the production of cerebronic acid, which comprises
[60119] (a) increasing or generating the activity of a polypeptide comprising a polypeptide as depicted in the respective line in column 5 or 8 of Table II, application no. 12, or a homolog or a fragment thereof, a consensus sequence or at least one polypeptide motif as depicted in the respective line in column 8 of Table IV, application no. 12, whereby the respective line discloses in column 7 the fine chemical cerebronic acid; or
[60120] increasing or generating the activity of an expression product of one or more nucleic acid molecule(s) comprising a polynucleotide as depicted in the respective line in column 5 or 8 of Table I, application no. 12, preferably the coding region thereof, or a homolog or a fragment thereof, whereby the respective line discloses in column 7 the fine chemical cerebronic acid;
[60121] non-targeted in a non-human organism or a part thereof; preferably a microorganism, a plant cell, a plant or a part thereof, as compared to a corresponding non-transformed wild type non-human organism or a part thereof; and
[60122] (b) growing the non-human organism under conditions which permit the production of cerebronic acid, or a composition comprising cerebronic acid in said non-human organism or in the culture medium surrounding said non-human organism.

[60123] A further embodiment of the present invention relates to a process for the production of eicosanoic acid, which comprises
[60124] (a) increasing or generating the activity of a polypeptide comprising a polypeptide as depicted in the respective line in column 5 or 8 of Table II, application no. 12, or a homolog or a fragment thereof, a consensus sequence or at least one polypeptide motif as depicted in the respective line in column 8 of Table IV, application no. 12, whereby the respective line discloses in column 7 the fine chemical eicosanoic acid; or
[60125] increasing or generating the activity of an expression product of one or more nucleic acid molecule(s) comprising a polynucleotide as depicted in the respective line in column 5 or 8 of Table I, application no. 12, preferably the coding region thereof, or a homolog or a fragment thereof, whereby the respective line discloses in column 7 the fine chemical eicosanoic acid;
[60126] non-targeted in a non-human organism or a part thereof; preferably a microorganism, a plant cell, a plant or a part thereof, as compared to a corresponding non-transformed wild type non-human organism or a part thereof; and
[60127] (b) growing the non-human organism under conditions which permit the production of eicosanoic acid, or a composition comprising eicosanoic acid in said non-human organism or in the culture medium surrounding said non-human organism.

[60128] A further embodiment of the present invention relates to a process for the production of heptadecanoic acid, which comprises
[60129] (a) increasing or generating the activity of a polypeptide comprising a polypeptide as depicted in the respective line in column 5 or 8 of Table II, application no. 12, or a homolog or a fragment thereof, a consensus sequence or at least one polypeptide motif as depicted in the respective line in column 8 of Table IV, application no. 12, whereby the respective line discloses in column 7 the fine chemical heptadecanoic acid; or
[60130] increasing or generating the activity of an expression product of one or more nucleic acid molecule(s) comprising a polynucleotide as depicted in the respective line in column 5 or 8 of Table I, application no. 12, preferably the coding region thereof, or a homolog or a fragment thereof, whereby the respective line discloses in column 7 the fine chemical heptadecanoic acid;
[60131] non-targeted in a non-human organism or a part thereof; preferably a microorganism, a plant cell, a plant or a part thereof, as compared to a corresponding non-transformed wild type non-human organism or a part thereof; and
[60132] (b) growing the non-human organism under conditions which permit the production of heptadecanoic acid, or a composition comprising heptadecanoic acid in said non-human organism or in the culture medium surrounding said non-human organism.

[60133] A further embodiment of the present invention relates to a process for the production of hexadecadienoic acid, which comprises
[60134] (a) increasing or generating the activity of a polypeptide comprising a polypeptide as depicted in the respective line in column 5 or 8 of Table II, application no. 12, or a homolog or a fragment thereof, a consensus sequence or at least one polypeptide motif as depicted in the respective line in column 8 of Table IV, application no. 12, whereby the respective line discloses in column 7 the fine chemical hexadecadienoic acid; or
[60135] increasing or generating the activity of an expression product of one or more nucleic acid molecule(s) comprising a polynucleotide as depicted in the respective line in column 5 or 8 of Table I, application no. 12, preferably the coding region thereof, or a homolog or a fragment thereof, whereby the respective line discloses in column 7 the fine chemical hexadecadienoic acid;
[60136] non-targeted in a non-human organism or a part thereof; preferably a microorganism, a plant cell, a plant or a part thereof, as compared to a corresponding non-transformed wild type non-human organism or a part thereof; and
[60137] (b) growing the non-human organism under conditions which permit the production of hexadecadienoic acid, or a composition comprising hexadecadienoic acid in said non-human organism or in the culture medium surrounding said non-human organism.

[60138] A further embodiment of the present invention relates to a process for the production of hexadecatrienoic acid, which comprises
[60139] (a) increasing or generating the activity of a polypeptide comprising a polypeptide as depicted in the respective line in column 5 or 8 of Table II, application no. 12, or a homolog or a fragment thereof, a consensus sequence or at least one polypeptide motif as depicted in the respective line in column 8 of Table IV, application no. 12, whereby the respective line discloses in column 7 the fine chemical hexadecatrienoic acid; or
[60140] increasing or generating the activity of an expression product of one or more nucleic acid molecule(s) comprising a polynucleotide as depicted in the respective line in column 5 or 8 of Table I, application no. 12, preferably the coding region thereof, or a homolog or a fragment thereof, whereby the respective line discloses in column 7 the fine chemical hexadecatrienoic acid;
[60141] non-targeted in a non-human organism or a part thereof; preferably a microorganism, a plant cell, a plant or a part thereof, as compared to a corresponding non-transformed wild type non-human organism or a part thereof; and
[60142] (b) growing the non-human organism under conditions which permit the production of hexadecatrienoic acid, or a composition comprising hexadecatrienoic acid in said non-human organism or in the culture medium surrounding said non-human organism.

[60143] A further embodiment of the present invention relates to a process for the production of lauric acid, which comprises
[60144] (a) increasing or generating the activity of a polypeptide comprising a polypeptide as depicted in the respective line in column 5 or 8 of Table II, application no. 12, or a homolog or a fragment thereof, a consensus sequence or at least one polypeptide motif as depicted in the respective line in column 8 of Table IV, application no. 12, whereby the respective line discloses in column 7 the fine chemical lauric acid; or
[60145] increasing or generating the activity of an expression product of one or more nucleic acid molecule(s) comprising a polynucleotide as depicted in the respective line in column 5 or 8 of Table I, application no. 12, preferably the coding region thereof, or a homolog or a fragment thereof, whereby the respective line discloses in column 7 the fine chemical lauric acid;
[60146] non-targeted in a non-human organism or a part thereof; preferably a microorganism, a plant cell, a plant or a part thereof, as compared to a corresponding non-transformed wild type non-human organism or a part thereof; and
[60147] (b) growing the non-human organism under conditions which permit the production of lauric acid, or a composition comprising lauric acid in said non-human organism or in the culture medium surrounding said non-human organism.

[60148] A further embodiment of the present invention relates to a process for the production of myristic acid, which comprises
[60149] (a) increasing or generating the activity of a polypeptide comprising a polypeptide as depicted in the respective line in column 5 or 8 of Table II, application no. 12, or a homolog or a fragment thereof, a consensus sequence or at least one polypeptide motif as depicted in the respective line in column 8 of Table IV, application no. 12, whereby the respective line discloses in column 7 the fine chemical myristic acid; or
[60150] increasing or generating the activity of an expression product of one or more nucleic acid molecule(s) comprising a polynucleotide as depicted in the respective line in column 5 or 8 of Table I, application no. 12, preferably the coding region thereof, or a homolog or a fragment thereof, whereby the respective line discloses in column 7 the fine chemical myristic acid;
[60151] non-targeted in a non-human organism or a part thereof; preferably a microorganism, a plant cell, a plant or a part thereof, as compared to a corresponding non-transformed wild type non-human organism or a part thereof; and
[60152] (b) growing the non-human organism under conditions which permit the production of myristic acid, or a composition comprising myristic acid in said non-human organism or in the culture medium surrounding said non-human organism.

[60153] A further embodiment of the present invention relates to a process for the production of nervonic acid, which comprises
[60154] (a) increasing or generating the activity of a polypeptide comprising a polypeptide as depicted in the respective line in column 5 or 8 of Table II, application no. 12, or a homolog or a fragment thereof, a consensus sequence or at least one polypeptide motif as depicted in the respective line in column 8 of Table IV, application no. 12, whereby the respective line discloses in column 7 the fine chemical nervonic acid; or
[60155] increasing or generating the activity of an expression product of one or more nucleic acid molecule(s) comprising a polynucleotide as depicted in the respective line in column 5 or 8 of Table I, application no. 12, preferably the coding region thereof, or a homolog or a fragment thereof, whereby the respective line discloses in column 7 the fine chemical nervonic acid;
[60156] non-targeted in a non-human organism or a part thereof; preferably a microorganism, a plant cell, a plant or a part thereof, as compared to a corresponding non-transformed wild type non-human organism or a part thereof; and
[60157] (b) growing the non-human organism under conditions which permit the production of nervonic acid, or a composition comprising nervonic acid in said non-human organism or in the culture medium surrounding said non-human organism.

[60158] A further embodiment of the present invention relates to a process for the production of oleic acid, which comprises
[60159] (a) increasing or generating the activity of a polypeptide comprising a polypeptide as depicted in the respective line in column 5 or 8 of Table II, application no. 12, or a homolog or a fragment thereof, a consensus sequence or at least one polypeptide motif as depicted in the respective line in column 8 of Table IV, application no. 12, whereby the respective line discloses in column 7 the fine chemical oleic acid; or
[60160] increasing or generating the activity of an expression product of one or more nucleic acid molecule(s) comprising a polynucleotide as depicted in the respective line in column 5 or 8 of Table I, application no. 12, preferably the coding region thereof, or a homolog or a fragment thereof, whereby the respective line discloses in column 7 the fine chemical oleic acid;
[60161] non-targeted in a non-human organism or a part thereof; preferably a microorganism, a plant cell, a plant or a part thereof, as compared to a corresponding non-transformed wild type non-human organism or a part thereof; and
[60162] (b) growing the non-human organism under conditions which permit the production of oleic acid, or a composition comprising oleic acid in said non-human organism or in the culture medium surrounding said non-human organism.

[60163] A further embodiment of the present invention relates to a process for the production of cerebronic acid, which comprises
[60164] (a) increasing or generating one or more activities selected from the group consisting of chlorophyllase in an organelle, preferably in plastids or mitochondria, especially in plastids, of a non-human organism or a part thereof, preferably a microorganism, a plant cell, a plant or a part thereof, as compared to a corresponding non-transformed wild type non-human organism or a part thereof; and
[60165] (b) growing the non-human organism or a part thereof under conditions which permit the production of cerebronic acid or a composition comprising cerebronic acid in said non-human organism or in the culture medium surrounding said non-human organism.

[60166] A further embodiment of the present invention relates to a process for the production of 2-hydroxytetracosenoic acid (preferably 2-hydroxynervonic acid), which comprises
[60167] (a) increasing or generating one or more activities selected from the group consisting of chlorophyllase in an organelle, preferably in plastids or mitochondria, especially in plastids, of a non-human organism or a part thereof, preferably a microorganism, a plant cell, a plant or a part thereof, as compared to a corresponding non-transformed wild type non-human organism or a part thereof; and
[60168] (b) growing the non-human organism or a part thereof under conditions which permit the production of 2-hydroxytetracosenoic acid (preferably 2-hydroxynervonic acid) or a composition comprising 2-hydroxytetracosenoic acid (preferably 2-hydroxynervonic acid) in said non-human organism or in the culture medium surrounding said non-human organism.

[60169] A further embodiment of the present invention relates to a process for the production of hexadecatrienoic acid, which comprises
[60170] (a) increasing or generating one or more activities selected from the group consisting of transcription factor in an organelle, preferably in plastids or mitochondria, especially in plastids, of a non-human organism or a part thereof, preferably a microorganism, a plant cell, a plant or a part thereof, as compared to a corresponding non-transformed wild type non-human organism or a part thereof; and
[60171] (b) growing the non-human organism or a part thereof under conditions which permit the production of hexadecatrienoic acid or a composition comprising hexadecatrienoic acid in said non-human organism or in the culture medium surrounding said non-human organism.

[60172] A further embodiment of the present invention relates to a process for the production of cerebronic acid, which comprises
[60173] (a) increasing or generating one or more activities selected from the group consisting of protein phosphatase in an organelle, preferably in plastids or mitochondria, especially in plastids, of a non-human organism or a part thereof, preferably a microorganism, a plant cell, a plant or a part thereof, as compared to a corresponding non-transformed wild type non-human organism or a part thereof; and
[60174] (b) growing the non-human organism or a part thereof under conditions which permit the production of cerebronic acid or a composition comprising cerebronic acid in said non-human organism or in the culture medium surrounding said non-human organism.

[60175] A further embodiment of the present invention relates to a process for the production of hexadecatrienoic acid, which comprises
[60176] (a) increasing or generating one or more activities selected from the group consisting of protein phosphatase in an organelle, preferably in plastids or mitochondria, especially in plastids, of a non-human organism or a part thereof, preferably a microorganism, a plant cell, a plant or a part thereof, as compared to a corresponding non-transformed wild type non-human organism or a part thereof; and
[60177] (b) growing the non-human organism or a part thereof under conditions which permit the production of hexadecatrienoic acid or a composition comprising hexadecatrienoic acid in said non-human organism or in the culture medium surrounding said non-human organism.

[60178] A further embodiment of the present invention relates to a process for the production of 2-hydroxybehenic acid, which comprises
[60179] (a) increasing or generating one or more activities selected from the group consisting of protein phosphatase in an organelle, preferably in plastids or mitochondria, especially in plastids, of a non-human organism or a part thereof, preferably a microorganism, a plant cell, a plant or a part thereof, as compared to a corresponding non-transformed wild type non-human organism or a part thereof; and
[60180] (b) growing the non-human organism or a part thereof under conditions which permit the production of 2-hydroxybehenic acid or a composition comprising 2-hydroxybehenic acid in said non-human organism or in the culture medium surrounding said non-human organism.

[60181] A further embodiment of the present invention relates to a process for the production of 2-hydroxypalmitic acid, which comprises
[60182] (a) increasing or generating one or more activities selected from the group consisting of At2g33510-protein in an organelle, preferably in plastids or mitochondria, especially in plastids, of a non-human organism or a part thereof, preferably a microorganism, a plant cell, a plant or a part thereof, as compared to a corresponding non-transformed wild type non-human organism or a part thereof; and
[60183] (b) growing the non-human organism or a part thereof under conditions which permit the production of 2-hydroxypalmitic acid or a composition comprising 2-hydroxypalmitic acid in said non-human organism or in the culture medium surrounding said non-human organism.

[60184] A further embodiment of the present invention relates to a process for the production of 2-hydroxytetracosenoic acid (preferably 2-hydroxynervonic acid), which comprises
[60185] (a) increasing or generating one or more activities selected from the group consisting of heat shock transcription factor in an organelle, preferably in plastids or mitochondria, especially in plastids, of a non-human organism or a part thereof, preferably a microorganism, a plant cell, a plant or a part thereof, as compared to a corresponding non-transformed wild type non-human organism or a part thereof; and
[60186] (b) growing the non-human organism or a part thereof under conditions which permit the production of 2-hydroxytetracosenoic acid (preferably 2-hydroxynervonic acid) or a composition comprising 2-hydroxytetracosenoic acid (preferably 2-hydroxynervonic acid) in said non-human organism or in the culture medium surrounding said non-human organism.

[60187] A further embodiment of the present invention relates to a process for the production of cerebronic acid, which comprises
[60188] (a) increasing or generating one or more activities selected from the group consisting of adenosine kinase in an organelle, preferably in plastids or mitochondria, especially in plastids, of a non-human organism or a part thereof, preferably a microorganism, a plant cell, a plant or a part thereof, as compared to a corresponding non-transformed wild type non-human organism or a part thereof; and
[60189] (b) growing the non-human organism or a part thereof under conditions which permit the production of cerebronic acid or a composition comprising cerebronic acid in said non-human organism or in the culture medium surrounding said non-human organism.

[60190] A further embodiment of the present invention relates to a process for the production of 2-hydroxybehenic acid, which comprises
[60191] (a) increasing or generating one or more activities selected from the group consisting of adenosine kinase in an organelle, preferably in plastids or mitochondria, especially in plastids, of a non-human organism or a part thereof, preferably a microorganism, a plant cell, a plant or a part thereof, as compared to a corresponding non-transformed wild type non-human organism or a part thereof; and
[60192] (b) growing the non-human organism or a part thereof under conditions which permit the production of 2-hydroxybehenic acid or a composition comprising 2-hydroxybehenic acid in said non-human organism or in the culture medium surrounding said non-human organism.

[60193] A further embodiment of the present invention relates to a process for the production of 2-hydroxytetracosenoic acid (preferably 2-hydroxynervonic acid), which comprises
[60194] (a) increasing or generating one or more activities selected from the group consisting of DNA mismatch repair protein in an organelle, preferably in plastids or mitochondria, especially in plastids, of a non-human organism or a part thereof, preferably a microorganism, a plant cell, a plant or a part thereof, as compared to a corresponding non-transformed wild type non-human organism or a part thereof; and
[60195] (b) growing the non-human organism or a part thereof under conditions which permit the production of 2-hydroxytetracosenoic acid (preferably 2-hydroxynervonic acid) or a composition comprising 2-hydroxytetracosenoic acid (preferably 2-hydroxynervonic acid) in said non-human organism or in the culture medium surrounding said non-human organism.

[60196] A further embodiment of the present invention relates to a process for the production of cerebronic acid, which comprises
[60197] (a) increasing or generating one or more activities selected from the group consisting of glutaredoxin in an organelle, preferably in plastids or mitochondria, especially in plastids, of a non-human organism or a part thereof, preferably a microorganism, a plant cell, a plant or a part thereof, as compared to a corresponding non-transformed wild type non-human organism or a part thereof; and
[60198] (b) growing the non-human organism or a part thereof under conditions which permit the production of cerebronic acid or a composition comprising cerebronic acid in said non-human organism or in the culture medium surrounding said non-human organism.

[60199] A further embodiment of the present invention relates to a process for the production of hexadecatrienoic acid, which comprises
[60200] (a) increasing or generating one or more activities selected from the group consisting of glutaredoxin in an organelle, preferably in plastids or mitochondria, especially in plastids, of a non-human organism or a part thereof, preferably a microorganism, a plant cell, a plant or a part thereof, as compared to a corresponding non-transformed wild type non-human organism or a part thereof; and
[60201] (b) growing the non-human organism or a part thereof under conditions which permit the production of hexadecatrienoic acid or a composition comprising hexadecatrienoic acid in said non-human organism or in the culture medium surrounding said non-human organism.

[60202] A further embodiment of the present invention relates to a process for the production of 2-hydroxybehenic acid, which comprises
[60203] (a) increasing or generating one or more activities selected from the group consisting of glutaredoxin in an organelle, preferably in plastids or mitochondria, especially in plastids, of a non-human organism or a part thereof, preferably a microorganism, a plant cell, a plant or a part thereof, as compared to a corresponding non-transformed wild type non-human organism or a part thereof; and
[60204] (b) growing the non-human organism or a part thereof under conditions which permit the production of 2-hydroxybehenic acid or a composition comprising 2-hydroxybehenic acid in said non-human organism or in the culture medium surrounding said non-human organism.

[60205] A further embodiment of the present invention relates to a process for the production of 2-hydroxypalmitic acid, which comprises
[60206] (a) increasing or generating one or more activities selected from the group consisting of transcription factor in an organelle, preferably in plastids or mitochondria, especially in plastids, of a non-human organism or a part thereof, preferably a microorganism, a plant cell, a plant or a part thereof, as compared to a corresponding non-transformed wild type non-human organism or a part thereof; and
[60207] (b) growing the non-human organism or a part thereof under conditions which permit the production of 2-hydroxypalmitic acid or a composition comprising 2-hydroxypalmitic acid in said non-human organism or in the culture medium surrounding said non-human organism.

[60208] A further embodiment of the present invention relates to a process for the production of 2-hydroxybehenic acid, which comprises
[60209] (a) increasing or generating one or more activities selected from the group consisting of monothiol glutaredoxin in an organelle, preferably in plastids or mitochondria, especially in plastids, of a non-human organism or a part thereof, preferably a microorganism, a plant cell, a plant or a part thereof, as compared to a corresponding non-transformed wild type non-human organism or a part thereof; and
[60210] (b) growing the non-human organism or a part thereof under conditions which permit the production of 2-hydroxybehenic acid or a composition comprising 2-hydroxybehenic acid in said non-human organism or in the culture medium surrounding said non-human organism.

[60211] A further embodiment of the present invention relates to a process for the production of 2-hydroxypalmitic acid, which comprises
[60212] (a) increasing or generating one or more activities selected from the group consisting of monothiol glutaredoxin in an organelle, preferably in plastids or mitochondria, especially in plastids, of a non-human organism or a part thereof, preferably a microorganism, a plant cell, a plant or a part thereof, as compared to a corresponding non-transformed wild type non-human organism or a part thereof; and
[60213] (b) growing the non-human organism or a part thereof under conditions which permit the production of 2-hydroxypalmitic acid or a composition comprising 2-hydroxypalmitic acid in said non-human organism or in the culture medium surrounding said non-human organism.

[60214] A further embodiment of the present invention relates to a process for the production of hexadecatrienoic acid, which comprises
[60215] (a) increasing or generating one or more activities selected from the group consisting of monothiol glutaredoxin in an organelle, preferably in plastids or mitochondria, especially in plastids, of a non-human organism or a part thereof, preferably a microorganism, a plant cell, a plant or a part thereof, as compared to a corresponding non-transformed wild type non-human organism or a part thereof; and
[60216] (b) growing the non-human organism or a part thereof under conditions which permit the production of hexadecatrienoic acid or a composition comprising hexadecatrienoic acid in said non-human organism or in the culture medium surrounding said non-human organism.

[60217] A further embodiment of the present invention relates to a process for the production of 2-hydroxybehenic acid, which comprises
[60218] (a) increasing or generating one or more activities selected from the group consisting of monothiol glutaredoxin in an organelle, preferably in plastids or mitochondria, especially in plastids, of a non-human organism or a part thereof, preferably a microorganism, a plant cell, a plant or a part thereof, as compared to a corresponding non-transformed wild type non-human organism or a part thereof; and
[60219] (b) growing the non-human organism or a part thereof under conditions which permit the production of 2-hydroxybehenic acid or a composition comprising 2-hydroxybehenic acid in said non-human organism or in the culture medium surrounding said non-human organism.

[60220] A further embodiment of the present invention relates to a process for the production of cerebronic acid, which comprises
[60221] (a) increasing or generating one or more activities selected from the group consisting of monothiol glutaredoxin in an organelle, preferably in plastids or mitochondria, especially in plastids, of a non-human organism or a part thereof, preferably a microorganism, a plant cell, a plant or a part thereof, as compared to a corresponding non-transformed wild type non-human organism or a part thereof; and
[60222] (b) growing the non-human organism or a part thereof under conditions which permit the production of cerebronic acid or a composition comprising cerebronic acid in said non-human organism or in the culture medium surrounding said non-human organism.

[60223] A further embodiment of the present invention relates to a process for the production of 2-hydroxybehenic acid, which comprises
[60224] (a) increasing or generating one or more activities selected from the group consisting of protein phosphatase in an organelle, preferably in plastids or mitochondria, especially in plastids, of a non-human organism or a part thereof, preferably a microorganism, a plant cell, a plant or a part thereof, as compared to a corresponding non-transformed wild type non-human organism or a part thereof; and
[60225] (b) growing the non-human organism or a part thereof under conditions which permit the production of 2-hydroxybehenic acid or a composition comprising 2-hydroxybehenic acid in said non-human organism or in the culture medium surrounding said non-human organism.

[60226] A further embodiment of the present invention relates to a process for the production of 2-hydroxytetracosenoic acid (preferably 2-hydroxynervonic acid), which comprises
[60227] (a) increasing or generating one or more activities selected from the group consisting of protein phosphatase in an organelle, preferably in plastids or mitochondria, especially in plastids, of a non-human organism or a part thereof, preferably a microorganism, a plant cell, a plant or a part thereof, as compared to a corresponding non-transformed wild type non-human organism or a part thereof; and
[60228] (b) growing the non-human organism or a part thereof under conditions which permit the production of 2-hydroxytetracosenoic acid (preferably 2-hydroxynervonic acid) or a composition comprising 2-hydroxytetracosenoic acid (preferably 2-hydroxynervonic acid) in said non-human organism or in the culture medium surrounding said non-human organism.

[60229] A further embodiment of the present invention relates to a process for the production of cerebronic acid, which comprises
[60230] (a) increasing or generating one or more activities selected from the group consisting of glutaredoxin in an organelle, preferably in plastids or mitochondria, especially in plastids, of a non-human organism or a part thereof, preferably a microorganism, a plant cell, a plant or a part thereof, as compared to a corresponding non-transformed wild type non-human organism or a part thereof; and
[60231] (b) growing the non-human organism or a part thereof under conditions which permit the production of cerebronic acid or a composition comprising cerebronic acid in said non-human organism or in the culture medium surrounding said non-human organism.

[60232] A further embodiment of the present invention relates to a process for the production of hexadecadienoic acid, which comprises
[60233] (a) increasing or generating one or more activities selected from the group consisting of glutaredoxin in an organelle, preferably in plastids or mitochondria, especially in plastids, of a non-human organism or a part thereof, preferably a microorganism, a plant cell, a plant or a part thereof, as compared to a corresponding non-transformed wild type non-human organism or a part thereof; and
[60234] (b) growing the non-human organism or a part thereof under conditions which permit the production of hexadecadienoic acid or a composition comprising hexadecadienoic acid in said non-human organism or in the culture medium surrounding said non-human organism.

[60235] A further embodiment of the present invention relates to a process for the production of hexadecatrienoic acid, which comprises
[60236] (a) increasing or generating one or more activities selected from the group consisting of glutaredoxin in an organelle, preferably in plastids or mitochondria, especially in plastids, of a non-human organism or a part thereof, preferably a microorganism, a plant cell, a plant or a part thereof, as compared to a corresponding non-transformed wild type non-human organism or a part thereof; and
[60237] (b) growing the non-human organism or a part thereof under conditions which permit the production of hexadecatrienoic acid or a composition comprising hexadecatrienoic acid in said non-human organism or in the culture medium surrounding said non-human organism.

[60238] A further embodiment of the present invention relates to a process for the production of 2-hydroxybehenic acid, which comprises
[60239] (a) increasing or generating one or more activities selected from the group consisting of calcium-dependent protein kinase in an organelle, preferably in plastids or mitochondria, especially in plastids, of a non-human organism or a part thereof, preferably a microorganism, a plant cell, a plant or a part thereof, as compared to a corresponding non-transformed wild type non-human organism or a part thereof; and
[60240] (b) growing the non-human organism or a part thereof under conditions which permit the production of 2-hydroxybehenic acid or a composition comprising 2-hydroxybehenic acid in said non-human organism or in the culture medium surrounding said non-human organism.

[60241] A further embodiment of the present invention relates to a process for the production of 2-hydroxypalmitic acid, which comprises
[60242] (a) increasing or generating one or more activities selected from the group consisting of calcium-dependent protein kinase in an organelle, preferably in plastids or mitochondria, especially in plastids, of a non-human organism or a part thereof, preferably a microorganism, a plant cell, a plant or a part thereof, as compared to a corresponding non-transformed wild type non-human organism or a part thereof; and
[60243] (b) growing the non-human organism or a part thereof under conditions which permit the production of 2-hydroxypalmitic acid or a composition comprising 2-hydroxypalmitic acid in said non-human organism or in the culture medium surrounding said non-human organism.

[60244] A further embodiment of the present invention relates to a process for the production of oleic acid, which comprises
[60245] (a) increasing or generating one or more activities selected from the group consisting of acyldesaturase in an organelle, preferably in plastids or mitochondria, especially in plastids, of a non-human organism or a part thereof, preferably a microorganism, a plant cell, a plant or a part thereof, as compared to a corresponding non-transformed wild type non-human organism or a part thereof; and
[60246] (b) growing the non-human organism or a part thereof under conditions which permit the production of oleic acid or a composition comprising oleic acid in said non-human organism or in the culture medium surrounding said non-human organism.

[60247] A further embodiment of the present invention relates to a process for the production of hexadecatrienoic acid, which comprises
[60248] (a) increasing or generating one or more activities selected from the group consisting of monothiol glutaredoxin in an organelle, preferably in plastids or mitochondria, especially in plastids, of a non-human organism or a part thereof, preferably a microorganism, a plant cell, a plant or a part thereof, as compared to a corresponding non-transformed wild type non-human organism or a part thereof; and
[60249] (b) growing the non-human organism or a part thereof under conditions which permit the production of hexadecatrienoic acid or a composition comprising hexadecatrienoic acid in said non-human organism or in the culture medium surrounding said non-human organism.

[60250] A further embodiment of the present invention relates to a process for the production of hexadecatrienoic acid, which comprises
[60251] (a) increasing or generating one or more activities selected from the group consisting of protein phosphatase in an organelle, preferably in plastids or mitochondria, especially in plastids, of a non-human organism or a part thereof, preferably a microorganism, a plant cell, a plant or a part thereof, as compared to a corresponding non-transformed wild type non-human organism or a part thereof; and
[60252] (b) growing the non-human organism or a part thereof under conditions which permit the production of hexadecatrienoic acid or a composition comprising hexadecatrienoic acid in said non-human organism or in the culture medium surrounding said non-human organism.

[60253] A further embodiment of the present invention relates to a process for the production of hexadecadienoic acid, which comprises
[60254] (a) increasing or generating one or more activities selected from the group consisting of protein kinase in an organelle, preferably in plastids or mitochondria, especially in plastids, of a non-human organism or a part thereof, preferably a microorganism, a plant cell, a plant or a part thereof, as compared to a corresponding non-transformed wild type non-human organism or a part thereof; and
[60255] (b) growing the non-human organism or a part thereof under conditions which permit the production of hexadecadienoic acid or a composition comprising hexadecadienoic acid in said non-human organism or in the culture medium surrounding said non-human organism.

[60256] A further embodiment of the present invention relates to a process for the production of cerebronic acid, which comprises
[60257] (a) increasing or generating one or more activities selected from the group consisting of CDP-diacylglycerol-serine O-phosphatidyltransferase in an organelle, preferably in plastids or mitochondria, especially in plastids, of a non-human organism or a part thereof, preferably a microorganism, a plant cell, a plant or a part thereof, as compared to a corresponding non-transformed wild type non-human organism or a part thereof; and
[60258] (b) growing the non-human organism or a part thereof under conditions which permit the production of cerebronic acid or a composition comprising cerebronic acid in said non-human organism or in the culture medium surrounding said non-human organism.

[60259] A further embodiment of the present invention relates to a process for the production of 2-hydroxybehenic acid, which comprises
[60260] (a) increasing or generating one or more activities selected from the group consisting of CDP-diacylglycerol-serine O-phosphatidyltransferase in an organelle, preferably in plastids or mitochondria, especially in plastids, of a non-human organism or a part thereof, preferably a microorganism, a plant cell, a plant or a part thereof, as compared to a corresponding non-transformed wild type non-human organism or a part thereof; and
[60261] (b) growing the non-human organism or a part thereof under conditions which permit the production of 2-hydroxybehenic acid or a composition comprising 2-hydroxybehenic acid in said non-human organism or in the culture medium surrounding said non-human organism.

[60262] A further embodiment of the present invention relates to a process for the production of 2-hydroxytetracosenoic acid (preferably 2-hydroxynervonic acid), which comprises
[60263] (a) increasing or generating one or more activities selected from the group consisting of CDP-diacylglycerol-serine O-phosphatidyltransferase in an organelle, preferably in plastids or mitochondria, especially in plastids, of a non-human organism or a part thereof, preferably a microorganism, a plant cell, a plant or a part thereof, as compared to a corresponding non-transformed wild type non-human organism or a part thereof; and
[60264] (b) growing the non-human organism or a part thereof under conditions which permit the production of 2-hydroxytetracosenoic acid (preferably 2-hydroxynervonic acid) or a composition comprising 2-hydroxytetracosenoic acid (preferably 2-hydroxynervonic acid) in said non-human organism or in the culture medium surrounding said non-human organism.

[60265] A further embodiment of the present invention relates to a process for the production of 2-hydroxypalmitic acid, which comprises
[60266] (a) increasing or generating one or more activities selected from the group consisting of CDP-diacylglycerol-serine O-phosphatidyltransferase in an organelle, preferably in plastids or mitochondria, especially in plastids, of a non-human organism or a part thereof, preferably a microorganism, a plant cell, a plant or a part thereof, as compared to a corresponding non-transformed wild type non-human organism or a part thereof; and
[60267] (b) growing the non-human organism or a part thereof under conditions which permit the production of 2-hydroxypalmitic acid or a composition comprising 2-hydroxypalmitic acid in said non-human organism or in the culture medium surrounding said non-human organism.

[60268] A further embodiment of the present invention relates to a process for the production of hexadecadienoic acid, which comprises
[60269] (a) increasing or generating one or more activities selected from the group consisting of secindependent protein translocase in an organelle, preferably in plastids or mitochondria, especially in plastids, of a non-human organism or a part thereof, preferably a microorganism, a plant cell, a plant or a part thereof, as compared to a corresponding non-transformed wild type non-human organism or a part thereof; and
[60270] (b) growing the non-human organism or a part thereof under conditions which permit the production of hexadecadienoic acid or a composition comprising hexadecadienoic acid in said non-human organism or in the culture medium surrounding said non-human organism.

[60271] A further embodiment of the present invention relates to a process for the production of 2-hydroxytetracosenoic acid (preferably 2-hydroxynervonic acid), which comprises
[60272] (a) increasing or generating one or more activities selected from the group consisting of transcriptional regulator protein in an organelle, preferably in plastids or mitochondria, especially in plastids, of a non-human organism or a part thereof, preferably a microorganism, a plant cell, a plant or a part thereof, as compared to a corresponding non-transformed wild type non-human organism or a part thereof; and
[60273] (b) growing the non-human organism or a part thereof under conditions which permit the production of 2-hydroxytetracosenoic acid (preferably 2-hydroxynervonic acid) or a composition comprising 2-hydroxytetracosenoic acid (preferably 2-hydroxynervonic acid) in said non-human organism or in the culture medium surrounding said non-human organism.

[60274] A further embodiment of the present invention relates to a process for the production of 2-hydroxypalmitic acid, which comprises
[60275] (a) increasing or generating one or more activities selected from the group consisting of betahydroxylase in an organelle, preferably in plastids or mitochondria, especially in plastids, of a non-human organism or a part thereof, preferably a microorganism, a plant cell, a plant or a part thereof, as compared to a corresponding non-transformed wild type non-human organism or a part thereof; and
[60276] (b) growing the non-human organism or a part thereof under conditions which permit the production of 2-hydroxypalmitic acid or a composition comprising 2-hydroxypalmitic acid in said non-human organism or in the culture medium surrounding said non-human organism.

[60277] A further embodiment of the present invention relates to a process for the production of hexadecadienoic acid, which comprises
[60278] (a) increasing or generating one or more activities selected from the group consisting of 30S ribosomal protein S3 in an organelle, preferably in plastids or mitochondria, especially in plastids, of a non-human organism or a part thereof, preferably a microorganism, a plant cell, a plant or a part thereof, as compared to a corresponding non-transformed wild type non-human organism or a part thereof; and
[60279] (b) growing the non-human organism or a part thereof under conditions which permit the production of hexadecadienoic acid or a composition comprising hexadecadienoic acid in said non-human organism or in the culture medium surrounding said non-human organism.

[60280] A further embodiment of the present invention relates to a process for the production of 2-hydroxybehenic acid, which comprises
[60281] (a) increasing or generating one or more activities selected from the group consisting of acylCoA synthase in an organelle, preferably in plastids or mitochondria, especially in plastids, of a non-human organism or a part thereof, preferably a microorganism, a plant cell, a plant or a part thereof, as compared to a corresponding non-transformed wild type non-human organism or a part thereof; and
[60282] (b) growing the non-human organism or a part thereof under conditions which permit the production of 2-hydroxybehenic acid or a composition comprising 2-hydroxybehenic acid in said non-human organism or in the culture medium surrounding said non-human organism.

[60283] A further embodiment of the present invention relates to a process for the production of 2-hydroxytetracosenoic acid (preferably 2-hydroxynervonic acid), which comprises
[60284] (a) increasing or generating one or more activities selected from the group consisting of heat shock protein in an organelle, preferably in plastids or mitochondria, especially in plastids, of a non-human organism or a part thereof, preferably a microorganism, a plant cell, a plant or a part thereof, as compared to a corresponding non-transformed wild type non-human organism or a part thereof; and
[60285] (b) growing the non-human organism or a part thereof under conditions which permit the production of 2-hydroxytetracosenoic acid (preferably 2-hydroxynervonic acid) or a composition comprising 2-hydroxytetracosenoic acid (preferably 2-hydroxynervonic acid) in said non-human organism or in the culture medium surrounding said non-human organism.

[60286] A further embodiment of the present invention relates to a process for the production of 2-hydroxytetracosenoic acid (preferably 2-hydroxynervonic acid), which comprises
[60287] (a) increasing or generating one or more activities selected from the group consisting of oxidoreductase in an organelle, preferably in plastids or mitochondria, especially in plastids, of a non-human organism or a part thereof, preferably a microorganism, a plant cell, a plant or a part thereof, as compared to a corresponding non-transformed wild type non-human organism or a part thereof; and
[60288] (b) growing the non-human organism or a part thereof under conditions which permit the production of 2-hydroxytetracosenoic acid (preferably 2-hydroxynervonic acid) or a composition comprising 2-hydroxytetracosenoic acid (preferably 2-hydroxynervonic acid) in said non-human organism or in the culture medium surrounding said non-human organism.

[60289] A further embodiment of the present invention relates to a process for the production of hexadecadienoic acid, which comprises
[60290] (a) increasing or generating one or more activities selected from the group consisting of recombinase A in an organelle, preferably in plastids or mitochondria, especially in plastids, of a non-human organism or a part thereof, preferably a microorganism, a plant cell, a plant or a part thereof, as compared to a corresponding non-transformed wild type non-human organism or a part thereof; and
[60291] (b) growing the non-human organism or a part thereof under conditions which permit the production of hexadecadienoic acid or a composition comprising hexadecadienoic acid in said non-human organism or in the culture medium surrounding said non-human organism.

[60292] A further embodiment of the present invention relates to a process for the production of lauric acid, which comprises
[60293] (a) increasing or generating one or more activities selected from the group consisting of ABC transporter component in an organelle, preferably in plastids or mitochondria, especially in plastids, of a non-human organism or a part thereof, preferably a microorganism, a plant cell, a plant or a part thereof, as compared to a corresponding non-transformed wild type non-human organism or a part thereof; and
[60294] (b) growing the non-human organism or a part thereof under conditions which permit the production of lauric acid or a composition comprising lauric acid in said non-human organism or in the culture medium surrounding said non-human organism.

[60295] A further embodiment of the present invention relates to a process for the production of 2-hydroxypalmitic acid, which comprises
[60296] (a) increasing or generating one or more activities selected from the group consisting of hydrolase in an organelle, preferably in plastids or mitochondria, especially in plastids, of a non-human organism or a part thereof, preferably a microorganism, a plant cell, a plant or a part thereof, as compared to a corresponding non-transformed wild type non-human organism or a part thereof; and
[60297] (b) growing the non-human organism or a part thereof under conditions which permit the production of 2-hydroxypalmitic acid or a composition comprising 2-hydroxypalmitic acid in said non-human organism or in the culture medium surrounding said non-human organism.

[60298] A further embodiment of the present invention relates to a process for the production of 2-hydroxypalmitic acid, which comprises
[60299] (a) increasing or generating one or more activities selected from the group consisting of glutamate-ammonia-ligase in an organelle, preferably in plastids or mitochondria, especially in plastids, of a non-human organism or a part thereof, preferably a microorganism, a plant cell, a plant or a part thereof, as compared to a corresponding non-transformed wild type non-human organism or a part thereof; and
[60300] (b) growing the non-human organism or a part thereof under conditions which permit the production of 2-hydroxypalmitic acid or a composition comprising 2-hydroxypalmitic acid in said non-human organism or in the culture medium surrounding said non-human organism.

[60301] A further embodiment of the present invention relates to a process for the production of 2-hydroxybehenic acid, which comprises
[60302] (a) increasing or generating one or more activities selected from the group consisting of fumarylacetoacetate hydrolase in an organelle, preferably in plastids or mitochondria, especially in plastids, of a non-human organism or a part thereof, preferably a microorganism, a plant cell, a plant or a part thereof, as compared to a corresponding non-transformed wild type non-human organism or a part thereof; and
[60303] (b) growing the non-human organism or a part thereof under conditions which permit the production of 2-hydroxybehenic acid or a composition comprising 2-hydroxybehenic acid in said non-human organism or in the culture medium surrounding said non-human organism.

[60304] A further embodiment of the present invention relates to a process for the production of 2-hydroxytetracosenoic acid (preferably 2-hydroxynervonic acid), which comprises
[60305] (a) increasing or generating one or more activities selected from the group consisting of N-acetyl-gamma-glutamyl-phosphate reductase in an organelle, preferably in plastids or mitochondria, especially in plastids, of a non-human organism or a part thereof, preferably a microorganism, a plant cell, a plant or a part thereof, as compared to a corresponding non-transformed wild type non-human organism or a part thereof; and
[60306] (b) growing the non-human organism or a part thereof under conditions which permit the production of 2-hydroxytetracosenoic acid (preferably 2-hydroxynervonic acid) or a composition comprising 2-hydroxytetracosenoic acid (preferably 2-hydroxynervonic acid) in said non-human organism or in the culture medium surrounding said non-human organism.

[60307] A further embodiment of the present invention relates to a process for the production of 2-hydroxytetracosenoic acid (preferably 2-hydroxynervonic acid), which comprises
[60308] (a) increasing or generating one or more activities selected from the group consisting of HesB/YadR/YfhF family protein in an organelle, preferably in plastids or mitochondria, especially in plastids, of a non-human organism or a part thereof, preferably a microorganism, a plant cell, a plant or a part thereof, as compared to a corresponding non-transformed wild type non-human organism or a part thereof; and
[60309] (b) growing the non-human organism or a part thereof under conditions which permit the production of 2-hydroxytetracosenoic acid (preferably 2-hydroxynervonic acid) or a composition comprising 2-hydroxytetracosenoic acid (preferably 2-hydroxynervonic acid) in said non-human organism or in the culture medium surrounding said non-human organism.

[60310] A further embodiment of the present invention relates to a process for the production of 2-hydroxytetracosenoic acid (preferably 2-hydroxynervonic acid), which comprises
[60311] (a) increasing or generating one or more activities selected from the group consisting of purine nucleoside phosphorylase in an organelle, preferably in plastids or mitochondria, especially in plastids, of a non-human organism or a part thereof, preferably a microorganism, a plant cell, a plant or a part thereof, as compared to a corresponding non-transformed wild type non-human organism or a part thereof; and
[60312] (b) growing the non-human organism or a part thereof under conditions which permit the production of 2-hydroxytetracosenoic acid (preferably 2-hydroxynervonic acid) or a composition comprising 2-hydroxytetracosenoic acid (preferably 2-hydroxynervonic acid) in said non-human organism or in the culture medium surrounding said non-human organism.

[60313] A further embodiment of the present invention relates to a process for the production of 2-hydroxybehenic acid, which comprises
[60314] (a) increasing or generating one or more activities selected from the group consisting of b0050-protein in an organelle, preferably in plastids or mitochondria, especially in plastids, of a non-human organism or a part thereof, preferably a microorganism, a plant cell, a plant or a part thereof, as compared to a corresponding non-transformed wild type non-human organism or a part thereof; and
[60315] (b) growing the non-human organism or a part thereof under conditions which permit the production of 2-hydroxybehenic acid or a composition comprising 2-hydroxybehenic acid in said non-human organism or in the culture medium surrounding said non-human organism.

[60316] A further embodiment of the present invention relates to a process for the production of 2-hydroxytetracosenoic acid (preferably 2-hydroxynervonic acid), which comprises
[60317] (a) increasing or generating one or more activities selected from the group consisting of b0050-protein in an organelle, preferably in plastids or mitochondria, especially in plastids, of a non-human organism or a part thereof, preferably a microorganism, a plant cell, a plant or a part thereof, as compared to a corresponding non-transformed wild type non-human organism or a part thereof; and
[60318] (b) growing the non-human organism or a part thereof under conditions which permit the production of 2-hydroxytetracosenoic acid (preferably 2-hydroxynervonic acid) or a composition comprising 2-hydroxytetracosenoic acid (preferably 2-hydroxynervonic acid) in said non-human organism or in the culture medium surrounding said non-human organism.

[60319] A further embodiment of the present invention relates to a process for the production of cerebronic acid, which comprises
[60320] (a) increasing or generating one or more activities selected from the group consisting of b0249-protein in an organelle, preferably in plastids or mitochondria, especially in plastids, of a non-human organism or a part thereof, preferably a microorganism, a plant cell, a plant or a part thereof, as compared to a corresponding non-transformed wild type non-human organism or a part thereof; and
[60321] (b) growing the non-human organism or a part thereof under conditions which permit the production of cerebronic acid or a composition comprising cerebronic acid in said non-human organism or in the culture medium surrounding said non-human organism.

[60322] A further embodiment of the present invention relates to a process for the production of behenic acid, which comprises
[60323] (a) increasing or generating one or more activities selected from the group consisting of betaine aldehyde dehydrogenase in an organelle, preferably in plastids or mitochondria, especially in plastids, of a non-human organism or a part thereof, preferably a microorganism, a plant cell, a plant or a part thereof, as compared to a corresponding non-transformed wild type non-human organism or a part thereof; and
[60324] (b) growing the non-human organism or a part thereof under conditions which permit the production of behenic acid or a composition comprising behenic acid in said non-human organism or in the culture medium surrounding said non-human organism.

[60325] A further embodiment of the present invention relates to a process for the production of eicosanoic acid, which comprises
[60326] (a) increasing or generating one or more activities selected from the group consisting of betaine aldehyde dehydrogenase in an organelle, preferably in plastids or mitochondria, especially in plastids, of a non-human organism or a part thereof, preferably a microorganism, a plant cell, a plant or a part thereof, as compared to a corresponding non-transformed wild type non-human organism or a part thereof; and
[60327] (b) growing the non-human organism or a part thereof under conditions which permit the production of eicosanoic acid or a composition comprising eicosanoic acid in said non-human organism or in the culture medium surrounding said non-human organism.

[60328] A further embodiment of the present invention relates to a process for the production of myristic acid, which comprises
[60329] (a) increasing or generating one or more activities selected from the group consisting of 2,3-dihydroxyphenylpropionate 1,2-dioxygenase in an organelle, preferably in plastids or mitochondria, especially in plastids, of a non-human organism or a part thereof, preferably a microorganism, a plant cell, a plant or a part thereof, as compared to a corresponding non-transformed wild type non-human organism or a part thereof; and
[60330] (b) growing the non-human organism or a part thereof under conditions which permit the production of myristic acid or a composition comprising myristic acid in said non-human organism or in the culture medium surrounding said non-human organism.

[60331] A further embodiment of the present invention relates to a process for the production of oleic acid, which comprises
[60332] (a) increasing or generating one or more activities selected from the group consisting of 2,3-dihydroxyphenylpropionate 1,2-dioxygenase in an organelle, preferably in plastids or mitochondria, especially in plastids, of a non-human organism or a part thereof, preferably a microorganism, a plant cell, a plant or a part thereof, as compared to a corresponding non-transformed wild type non-human organism or a part thereof; and
[60333] (b) growing the non-human organism or a part thereof under conditions which permit the production of oleic acid or a composition comprising oleic acid in said non-human organism or in the culture medium surrounding said non-human organism.

[60334] A further embodiment of the present invention relates to a process for the production of hexadecatrienoic acid, which comprises
[60335] (a) increasing or generating one or more activities selected from the group consisting of b0371-protein in an organelle, preferably in plastids or mitochondria, especially in plastids, of a non-human organism or a part thereof, preferably a microorganism, a plant cell, a plant or a part thereof, as compared to a corresponding non-transformed wild type non-human organism or a part thereof; and
[60336] (b) growing the non-human organism or a part thereof under conditions which permit the production of hexadecatrienoic acid or a composition comprising hexadecatrienoic acid in said non-human organism or in the culture medium surrounding said non-human organism.

[60337] A further embodiment of the present invention relates to a process for the production of cerebronic acid, which comprises
[60338] (a) increasing or generating one or more activities selected from the group consisting of ATP-binding component of a transport system in an organelle, preferably in plastids or mitochondria, especially in plastids, of a non-human organism or a part thereof, preferably a microorganism, a plant cell, a plant or a part thereof, as compared to a corresponding non-transformed wild type non-human organism or a part thereof; and
[60339] (b) growing the non-human organism or a part thereof under conditions which permit the production of cerebronic acid or a composition comprising cerebronic acid in said non-human organism or in the culture medium surrounding said non-human organism.

[60340] A further embodiment of the present invention relates to a process for the production of 2-hydroxybehenic acid, which comprises
[60341] (a) increasing or generating one or more activities selected from the group consisting of ATP-binding component of a transport system in an organelle, preferably in plastids or mitochondria, especially in plastids, of a non-human organism or a part thereof, preferably a microorganism, a plant cell, a plant or a part thereof, as compared to a corresponding non-transformed wild type non-human organism or a part thereof; and
[60342] (b) growing the non-human organism or a part thereof under conditions which permit the production of 2-hydroxybehenic acid or a composition comprising 2-hydroxybehenic acid in said non-human organism or in the culture medium surrounding said non-human organism.

[60343] A further embodiment of the present invention relates to a process for the production of 2-hydroxypalmitic acid, which comprises
[60344] (a) increasing or generating one or more activities selected from the group consisting of ATP-binding component of a transport system in an organelle, preferably in plastids or mitochondria, especially in plastids, of a non-human organism or a part thereof, preferably a microorganism, a plant cell, a plant or a part thereof, as compared to a corresponding non-transformed wild type non-human organism or a part thereof; and
[60345] (b) growing the non-human organism or a part thereof under conditions which permit the production of 2-hydroxypalmitic acid or a composition comprising 2-hydroxypalmitic acid in said non-human organism or in the culture medium surrounding said non-human organism.

[60346] A further embodiment of the present invention relates to a process for the production of hexadecadienoic acid, which comprises
[60347] (a) increasing or generating one or more activities selected from the group consisting of b0518-protein in an organelle, preferably in plastids or mitochondria, especially in plastids, of a non-human organism or a part thereof, preferably a microorganism, a plant cell, a plant or a part thereof, as compared to a corresponding non-transformed wild type non-human organism or a part thereof; and
[60348] (b) growing the non-human organism or a part thereof under conditions which permit the production of hexadecadienoic acid or a composition comprising hexadecadienoic acid in said non-human organism or in the culture medium surrounding said non-human organism.

[60349] A further embodiment of the present invention relates to a process for the production of 2-hydroxybehenic acid, which comprises
[60350] (a) increasing or generating one or more activities selected from the group consisting of sensor histidine kinase in an organelle, preferably in plastids or mitochondria, especially in plastids, of a non-human organism or a part thereof, preferably a microorganism, a plant cell, a plant or a part thereof, as compared to a corresponding non-transformed wild type non-human organism or a part thereof; and
[60351] (b) growing the non-human organism or a part thereof under conditions which permit the production of 2-hydroxybehenic acid or a composition comprising 2-hydroxybehenic acid in said non-human organism or in the culture medium surrounding said non-human organism.

[60352] A further embodiment of the present invention relates to a process for the production of 2-hydroxytetracosenoic acid (preferably 2-hydroxynervonic acid), which comprises
[60353] (a) increasing or generating one or more activities selected from the group consisting of sensor histidine kinase in an organelle, preferably in plastids or mitochondria, especially in plastids, of a non-human organism or a part thereof, preferably a microorganism, a plant cell, a plant or a part thereof, as compared to a corresponding non-transformed wild type non-human organism or a part thereof; and
[60354] (b) growing the non-human organism or a part thereof under conditions which permit the production of 2-hydroxytetracosenoic acid (preferably 2-hydroxynervonic acid) or a composition comprising 2-hydroxytetracosenoic acid (preferably 2-hydroxynervonic acid) in said non-human organism or in the culture medium surrounding said non-human organism.

[60355] A further embodiment of the present invention relates to a process for the production of cerebronic acid, which comprises
[60356] (a) increasing or generating one or more activities selected from the group consisting of citrate synthase in an organelle, preferably in plastids or mitochondria, especially in plastids, of a non-human organism or a part thereof, preferably a microorganism, a plant cell, a plant or a part thereof, as compared to a corresponding non-transformed wild type non-human organism or a part thereof; and
[60357] (b) growing the non-human organism or a part thereof under conditions which permit the production of cerebronic acid or a composition comprising cerebronic acid in said non-human organism or in the culture medium surrounding said non-human organism.

[60358] A further embodiment of the present invention relates to a process for the production of 2-hydroxytetracosenoic acid (preferably 2-hydroxynervonic acid), which comprises
[60359] (a) increasing or generating one or more activities selected from the group consisting of b0801-protein in an organelle, preferably in plastids or mitochondria, especially in plastids, of a non-human organism or a part thereof, preferably a microorganism, a plant cell, a plant or a part thereof, as compared to a corresponding non-transformed wild type non-human organism or a part thereof; and
[60360] (b) growing the non-human organism or a part thereof under conditions which permit the production of 2-hydroxytetracosenoic acid (preferably 2-hydroxynervonic acid) or a composition comprising 2-hydroxytetracosenoic acid (preferably 2-hydroxynervonic acid) in said non-human organism or in the culture medium surrounding said non-human organism.

[60361] A further embodiment of the present invention relates to a process for the production of cerebronic acid, which comprises
[60362] (a) increasing or generating one or more activities selected from the group consisting of b1046-protein in an organelle, preferably in plastids or mitochondria, especially in plastids, of a non-human organism or a part thereof, preferably a microorganism, a plant cell, a plant or a part thereof, as compared to a corresponding non-transformed wild type non-human organism or a part thereof; and
[60363] (b) growing the non-human organism or a part thereof under conditions which permit the production of cerebronic acid or a composition comprising cerebronic acid in said non-human organism or in the culture medium surrounding said non-human organism.

[60364] A further embodiment of the present invention relates to a process for the production of hexadecatrienoic acid, which comprises
[60365] (a) increasing or generating one or more activities selected from the group consisting of malonyl CoA-acyl carrier protein transacylase in an organelle, preferably in plastids or mitochondria, especially in plastids, of a non-human organism or a part thereof, preferably a microorganism, a plant cell, a plant or a part thereof, as compared to a corresponding non-transformed wild type non-human organism or a part thereof; and
[60366] (b) growing the non-human organism or a part thereof under conditions which permit the production of hexadecatrienoic acid or a composition comprising hexadecatrienoic acid in said non-human organism or in the culture medium surrounding said non-human organism.

[60367] A further embodiment of the present invention relates to a process for the production of hexadecadienoic acid, which comprises
[60368] (a) increasing or generating one or more activities selected from the group consisting of 3-oxoacyl-[acyl-carrier-protein] reductase in an organelle, preferably in plastids or mitochondria, especially in plastids, of a non-human organism or a part thereof, preferably a microorganism, a plant cell, a plant or a part thereof, as compared to a corresponding non-transformed wild type non-human organism or a part thereof; and
[60369] (b) growing the non-human organism or a part thereof under conditions which permit the production of hexadecadienoic acid or a composition comprising hexadecadienoic acid in said non-human organism or in the culture medium surrounding said non-human organism.

[60370] A further embodiment of the present invention relates to a process for the production of hexadecatrienoic acid, which comprises
[60371] (a) increasing or generating one or more activities selected from the group consisting of 3-oxoacyl-[acyl-carrier-protein] reductase in an organelle, preferably in plastids or mitochondria, especially in plastids, of a non-human organism or a part thereof, preferably a microorganism, a plant cell, a plant or a part thereof, as compared to a corresponding non-transformed wild type non-human organism or a part thereof; and
[60372] (b) growing the non-human organism or a part thereof under conditions which permit the production of hexadecatrienoic acid or a composition comprising hexadecatrienoic acid in said non-human organism or in the culture medium surrounding said non-human organism.

[60373] A further embodiment of the present invention relates to a process for the production of hexadecatrienoic acid, which comprises
[60374] (a) increasing or generating one or more activities selected from the group consisting of 3-oxoacyl-[acyl-carrier-protein] synthase in an organelle, preferably in plastids or mitochondria, especially in plastids, of a non-human organism or a part thereof, preferably a microorganism, a plant cell, a plant or a part thereof, as compared to a corresponding non-transformed wild type non-human organism or a part thereof; and
[60375] (b) growing the non-human organism or a part thereof under conditions which permit the production of hexadecatrienoic acid or a composition comprising hexadecatrienoic acid in said non-human organism or in the culture medium surrounding said non-human organism.

[60376] A further embodiment of the present invention relates to a process for the production of 2-hydroxybehenic acid, which comprises
[60377] (a) increasing or generating one or more activities selected from the group consisting of 3-oxoacyl-[acyl-carrier-protein] synthase in an organelle, preferably in plastids or mitochondria, especially in plastids, of a non-human organism or a part thereof, preferably a microorganism, a plant cell, a plant or a part thereof, as compared to a corresponding non-transformed wild type non-human organism or a part thereof; and
[60378] (b) growing the non-human organism or a part thereof under conditions which permit the production of 2-hydroxybehenic acid or a composition comprising 2-hydroxybehenic acid in said non-human organism or in the culture medium surrounding said non-human organism.

[60379] A further embodiment of the present invention relates to a process for the production of oleic acid, which comprises
[60380] (a) increasing or generating one or more activities selected from the group consisting of sodium/proton antiporter in an organelle, preferably in plastids or mitochondria, especially in plastids, of a non-human organism or a part thereof, preferably a microorganism, a plant cell, a plant or a part thereof, as compared to a corresponding non-transformed wild type non-human organism or a part thereof; and
[60381] (b) growing the non-human organism or a part thereof under conditions which permit the production of oleic acid or a composition comprising oleic acid in said non-human organism or in the culture medium surrounding said non-human organism.

[60382] A further embodiment of the present invention relates to a process for the production of 2-hydroxypalmitic acid, which comprises
[60383] (a) increasing or generating one or more activities selected from the group consisting of sodium/proton antiporter in an organelle, preferably in plastids or mitochondria, especially in plastids, of a non-human organism or a part thereof, preferably a microorganism, a plant cell, a plant or a part thereof, as compared to a corresponding non-transformed wild type non-human organism or a part thereof; and
[60384] (b) growing the non-human organism or a part thereof under conditions which permit the production of 2-hydroxypalmitic acid or a composition comprising 2-hydroxypalmitic acid in said non-human organism or in the culture medium surrounding said non-human organism.

[60385] A further embodiment of the present invention relates to a process for the production of behenic acid, which comprises
[60386] (a) increasing or generating one or more activities selected from the group consisting of outer-membrane lipoprotein precursor in an organelle, preferably in plastids or mitochondria, especially in plastids, of a non-human organism or a part thereof, preferably a microorganism, a plant cell, a plant or a part thereof, as compared to a corresponding non-transformed wild type non-human organism or a part thereof; and
[60387] (b) growing the non-human organism or a part thereof under conditions which permit the production of behenic acid or a composition comprising behenic acid in said non-human organism or in the culture medium surrounding said non-human organism.

[60388] A further embodiment of the present invention relates to a process for the production of behenic acid, which comprises
[60389] (a) increasing or generating one or more activities selected from the group consisting of cardiolipin synthase in an organelle, preferably in plastids or mitochondria, especially in plastids, of a non-human organism or a part thereof, preferably a microorganism, a plant cell, a plant or a part thereof, as compared to a corresponding non-transformed wild type non-human organism or a part thereof; and
[60390] (b) growing the non-human organism or a part thereof under conditions which permit the production of behenic acid or a composition comprising behenic acid in said non-human organism or in the culture medium surrounding said non-human organism.

[60391] A further embodiment of the present invention relates to a process for the production of heptadecanoic acid, which comprises
[60392] (a) increasing or generating one or more activities selected from the group consisting of cardiolipin synthase in an organelle, preferably in plastids or mitochondria, especially in plastids, of a non-human organism or a part thereof, preferably a microorganism, a plant cell, a plant or a part thereof, as compared to a corresponding non-transformed wild type non-human organism or a part thereof; and
[60393] (b) growing the non-human organism or a part thereof under conditions which permit the production of heptadecanoic acid or a composition comprising heptadecanoic acid in said non-human organism or in the culture medium surrounding said non-human organism.

[60394] A further embodiment of the present invention relates to a process for the production of hexadecatrienoic acid, which comprises
[60395] (a) increasing or generating one or more activities selected from the group consisting of b1346-protein in an organelle, preferably in plastids or mitochondria, especially in plastids, of a non-human organism or a part thereof, preferably a microorganism, a plant cell, a plant or a part thereof, as compared to a corresponding non-transformed wild type non-human organism or a part thereof; and
[60396] (b) growing the non-human organism or a part thereof under conditions which permit the production of hexadecatrienoic acid or a composition comprising hexadecatrienoic acid in said non-human organism or in the culture medium surrounding said non-human organism.

[60397] A further embodiment of the present invention relates to a process for the production of lauric acid, which comprises
[60398] (a) increasing or generating one or more activities selected from the group consisting of phage-related repressor protein in an organelle, preferably in plastids or mitochondria, especially in plastids, of a non-human organism or a part thereof, preferably a microorganism, a plant cell, a plant or a part thereof, as compared to a corresponding non-transformed wild type non-human organism or a part thereof; and
[60399] (b) growing the non-human organism or a part thereof under conditions which permit the production of lauric acid or a composition comprising lauric acid in said non-human organism or in the culture medium surrounding said non-human organism.

[60400] A further embodiment of the present invention relates to a process for the production of 2-hydroxytetracosenoic acid (preferably 2-hydroxynervonic acid), which comprises
[60401] (a) increasing or generating one or more activities selected from the group consisting of lipoprotein precursor in an organelle, preferably in plastids or mitochondria, especially in plastids, of a non-human organism or a part thereof, preferably a microorganism, a plant cell, a plant or a part thereof, as compared to a corresponding non-transformed wild type non-human organism or a part thereof; and
[60402] (b) growing the non-human organism or a part thereof under conditions which permit the production of 2-hydroxytetracosenoic acid (preferably 2-hydroxynervonic acid) or a composition comprising 2-hydroxytetracosenoic acid (preferably 2-hydroxynervonic acid) in said non-human organism or in the culture medium surrounding said non-human organism.

[60403] A further embodiment of the present invention relates to a process for the production of hexadecatrienoic acid, which comprises
[60404] (a) increasing or generating one or more activities selected from the group consisting of b1470-protein in an organelle, preferably in plastids or mitochondria, especially in plastids, of a non-human organism or a part thereof, preferably a microorganism, a plant cell, a plant or a part thereof, as compared to a corresponding non-transformed wild type non-human organism or a part thereof; and
[60405] (b) growing the non-human organism or a part thereof under conditions which permit the production of hexadecatrienoic acid or a composition comprising hexadecatrienoic acid in said non-human organism or in the culture medium surrounding said non-human organism.

[60406] A further embodiment of the present invention relates to a process for the production of hexadecatrienoic acid, which comprises
[60407] (a) increasing or generating one or more activities selected from the group consisting of NADP-dependent malic enzyme in an organelle, preferably in plastids or mitochondria, especially in plastids, of a non-human organism or a part thereof, preferably a microorganism, a plant cell, a plant or a part thereof, as compared to a corresponding non-transformed wild type non-human organism or a part thereof; and
[60408] (b) growing the non-human organism or a part thereof under conditions which permit the production of hexadecatrienoic acid or a composition comprising hexadecatrienoic acid in said non-human organism or in the culture medium surrounding said non-human organism.

[60409] A further embodiment of the present invention relates to a process for the production of 2-hydroxybehenic acid, which comprises
[60410] (a) increasing or generating one or more activities selected from the group consisting of b1522-protein in an organelle, preferably in plastids or mitochondria, especially in plastids, of a non-human organism or a part thereof, preferably a microorganism, a plant cell, a plant or a part thereof, as compared to a corresponding non-transformed wild type non-human organism or a part thereof; and
[60411] (b) growing the non-human organism or a part thereof under conditions which permit the production of 2-hydroxybehenic acid or a composition comprising 2-hydroxybehenic acid in said non-human organism or in the culture medium surrounding said non-human organism.

[60412] A further embodiment of the present invention relates to a process for the production of hexadecatrienoic acid, which comprises
[60413] (a) increasing or generating one or more activities selected from the group consisting of acid shock protein in an organelle, preferably in plastids or mitochondria, especially in plastids, of a non-human organism or a part thereof, preferably a microorganism, a plant cell, a plant or a part thereof, as compared to a corresponding non-transformed wild type non-human organism or a part thereof; and
[60414] (b) growing the non-human organism or a part thereof under conditions which permit the production of hexadecatrienoic acid or a composition comprising hexadecatrienoic acid in said non-human organism or in the culture medium surrounding said non-human organism.

[60415] A further embodiment of the present invention relates to a process for the production of 2-hydroxytetracosenoic acid (preferably 2-hydroxynervonic acid), which comprises
[60416] (a) increasing or generating one or more activities selected from the group consisting of transport protein in an organelle, preferably in plastids or mitochondria, especially in plastids, of a non-human organism or a part thereof, preferably a microorganism, a plant cell, a plant or a part thereof, as compared to a corresponding non-transformed wild type non-human organism or a part thereof; and
[60417] (b) growing the non-human organism or a part thereof under conditions which permit the production of 2-hydroxytetracosenoic acid (preferably 2-hydroxynervonic acid) or a composition comprising 2-hydroxytetracosenoic acid (preferably 2-hydroxynervonic acid) in said non-human organism or in the culture medium surrounding said non-human organism.

[60418] A further embodiment of the present invention relates to a process for the production of 2-hydroxytetracosenoic acid (preferably 2-hydroxynervonic acid), which comprises
[60419] (a) increasing or generating one or more activities selected from the group consisting of phosphotransferase system component in an organelle, preferably in plastids or mitochondria, especially in plastids, of a non-human organism or a part thereof, preferably a microorganism, a plant cell, a plant or a part thereof, as compared to a corresponding non-transformed wild type non-human organism or a part thereof; and
[60420] (b) growing the non-human organism or a part thereof under conditions which permit the production of 2-hydroxytetracosenoic acid (preferably 2-hydroxynervonic acid) or a composition comprising 2-hydroxytetracosenoic acid (preferably 2-hydroxynervonic acid) in said non-human organism or in the culture medium surrounding said non-human organism.

[60421] A further embodiment of the present invention relates to a process for the production of 2-hydroxybehenic acid, which comprises
[60422] (a) increasing or generating one or more activities selected from the group consisting of electron transport complex protein in an organelle, preferably in plastids or mitochondria, especially in plastids, of a non-human organism or a part thereof, preferably a microorganism, a plant cell, a plant or a part thereof, as compared to a corresponding non-transformed wild type non-human organism or a part thereof; and
[60423] (b) growing the non-human organism or a part thereof under conditions which permit the production of 2-hydroxybehenic acid or a composition comprising 2-hydroxybehenic acid in said non-human organism or in the culture medium surrounding said non-human organism.

[60424] A further embodiment of the present invention relates to a process for the production of hexadecatrienoic acid, which comprises
[60425] (a) increasing or generating one or more activities selected from the group consisting of pyridoxamine kinase in an organelle, preferably in plastids or mitochondria, especially in plastids, of a non-human organism or a part thereof, preferably a microorganism, a plant cell, a plant or a part thereof, as compared to a corresponding non-transformed wild type non-human organism or a part thereof; and
[60426] (b) growing the non-human organism or a part thereof under conditions which permit the production of hexadecatrienoic acid or a composition comprising hexadecatrienoic acid in said non-human organism or in the culture medium surrounding said non-human organism.

[60427] A further embodiment of the present invention relates to a process for the production of 2-hydroxytetracosenoic acid (preferably 2-hydroxynervonic acid), which comprises
[60428] (a) increasing or generating one or more activities selected from the group consisting of b1670-protein in an organelle, preferably in plastids or mitochondria, especially in plastids, of a non-human organism or a part thereof, preferably a microorganism, a plant cell, a plant or a part thereof, as compared to a corresponding non-transformed wild type non-human organism or a part thereof; and
[60429] (b) growing the non-human organism or a part thereof under conditions which permit the production of 2-hydroxytetracosenoic acid (preferably 2-hydroxynervonic acid) or a composition comprising 2-hydroxytetracosenoic acid (preferably 2-hydroxynervonic acid) in said non-human organism or in the culture medium surrounding said non-human organism.

[60430] A further embodiment of the present invention relates to a process for the production of hexadecadienoic acid, which comprises
[60431] (a) increasing or generating one or more activities selected from the group consisting of b1703-protein in an organelle, preferably in plastids or mitochondria, especially in plastids, of a non-human organism or a part thereof, preferably a microorganism, a plant cell, a plant or a part thereof, as compared to a corresponding non-transformed wild type non-human organism or a part thereof; and
[60432] (b) growing the non-human organism or a part thereof under conditions which permit the production of hexadecadienoic acid or a composition comprising hexadecadienoic acid in said non-human organism or in the culture medium surrounding said non-human organism.

[60433] A further embodiment of the present invention relates to a process for the production of hexadecatrienoic acid, which comprises
[60434] (a) increasing or generating one or more activities selected from the group consisting of b1703-protein in an organelle, preferably in plastids or mitochondria, especially in plastids, of a non-human organism or a part thereof, preferably a microorganism, a plant cell, a plant or a part thereof, as compared to a corresponding non-transformed wild type non-human organism or a part thereof; and
[60435] (b) growing the non-human organism or a part thereof under conditions which permit the production of hexadecatrienoic acid or a composition comprising hexadecatrienoic acid in said non-human organism or in the culture medium surrounding said non-human organism.

[60436] A further embodiment of the present invention relates to a process for the production of hexadecadienoic acid, which comprises
[60437] (a) increasing or generating one or more activities selected from the group consisting of transport protein in an organelle, preferably in plastids or mitochondria, especially in plastids, of a non-human organism or a part thereof, preferably a microorganism, a plant cell, a plant or a part thereof, as compared to a corresponding non-transformed wild type non-human organism or a part thereof; and
[60438] (b) growing the non-human organism or a part thereof under conditions which permit the production of hexadecadienoic acid or a composition comprising hexadecadienoic acid in said non-human organism or in the culture medium surrounding said non-human organism.

[60439] A further embodiment of the present invention relates to a process for the production of hexadecadienoic acid, which comprises
[60440] (a) increasing or generating one or more activities selected from the group consisting of b1837-protein in an organelle, preferably in plastids or mitochondria, especially in plastids, of a non-human organism or a part thereof, preferably a microorganism, a plant cell, a plant or a part thereof, as compared to a corresponding non-transformed wild type non-human organism or a part thereof; and
[60441] (b) growing the non-human organism or a part thereof under conditions which permit the production of hexadecadienoic acid or a composition comprising hexadecadienoic acid in said non-human organism or in the culture medium surrounding said non-human organism.

[60442] A further embodiment of the present invention relates to a process for the production of hexadecatrienoic acid, which comprises
[60443] (a) increasing or generating one or more activities selected from the group consisting of b1837-protein in an organelle, preferably in plastids or mitochondria, especially in plastids, of a non-human organism or a part thereof, preferably a microorganism, a plant cell, a plant or a part thereof, as compared to a corresponding non-transformed wild type non-human organism or a part thereof; and
[60444] (b) growing the non-human organism or a part thereof under conditions which permit the production of hexadecatrienoic acid or a composition comprising hexadecatrienoic acid in said non-human organism or in the culture medium surrounding said non-human organism.

[60445] A further embodiment of the present invention relates to a process for the production of hexadecadienoic acid, which comprises
[60446] (a) increasing or generating one or more activities selected from the group consisting of b2032-protein in an organelle, preferably in plastids or mitochondria, especially in plastids, of a non-human organism or a part thereof, preferably a microorganism, a plant cell, a plant or a part thereof, as compared to a corresponding non-transformed wild type non-human organism or a part thereof; and
[60447] (b) growing the non-human organism or a part thereof under conditions which permit the production of hexadecadienoic acid or a composition comprising hexadecadienoic acid in said non-human organism or in the culture medium surrounding said non-human organism.

[60448] A further embodiment of the present invention relates to a process for the production of hexadecadienoic acid, which comprises
[60449] (a) increasing or generating one or more activities selected from the group consisting of b2099-protein in an organelle, preferably in plastids or mitochondria, especially in plastids, of a non-human organism or a part thereof, preferably a microorganism, a plant cell, a plant or a part thereof, as compared to a corresponding non-transformed wild type non-human organism or a part thereof; and
[60450] (b) growing the non-human organism or a part thereof under conditions which permit the production of hexadecadienoic acid or a composition comprising hexadecadienoic acid in said non-human organism or in the culture medium surrounding said non-human organism.

[60451] A further embodiment of the present invention relates to a process for the production of hexadecatrienoic acid, which comprises
[60452] (a) increasing or generating one or more activities selected from the group consisting of b2099-protein in an organelle, preferably in plastids or mitochondria, especially in plastids, of a non-human organism or a part thereof, preferably a microorganism, a plant cell, a plant or a part thereof, as compared to a corresponding non-transformed wild type non-human organism or a part thereof; and
[60453] (b) growing the non-human organism or a part thereof under conditions which permit the production of hexadecatrienoic acid or a composition comprising hexadecatrienoic acid in said non-human organism or in the culture medium surrounding said non-human organism.

[60454] A further embodiment of the present invention relates to a process for the production of 2-hydroxytetracosenoic acid (preferably 2-hydroxynervonic acid), which comprises
[60455] (a) increasing or generating one or more activities selected from the group consisting of b2107-protein in an organelle, preferably in plastids or mitochondria, especially in plastids, of a non-human organism or a part thereof, preferably a microorganism, a plant cell, a plant or a part thereof, as compared to a corresponding non-transformed wild type non-human organism or a part thereof; and
[60456] (b) growing the non-human organism or a part thereof under conditions which permit the production of 2-hydroxytetracosenoic acid (preferably 2-hydroxynervonic acid) or a composition comprising 2-hydroxytetracosenoic acid (preferably 2-hydroxynervonic acid) in said non-human organism or in the culture medium surrounding said non-human organism.

[60457] A further embodiment of the present invention relates to a process for the production of lauric acid, which comprises
[60458] (a) increasing or generating one or more activities selected from the group consisting of b2126-protein in an organelle, preferably in plastids or mitochondria, especially in plastids, of a non-human organism or a part thereof, preferably a microorganism, a plant cell, a plant or a part thereof, as compared to a corresponding non-transformed wild type non-human organism or a part thereof; and
[60459] (b) growing the non-human organism or a part thereof under conditions which permit the production of lauric acid or a composition comprising lauric acid in said non-human organism or in the culture medium surrounding said non-human organism.

[60460] A further embodiment of the present invention relates to a process for the production of 2-hydroxypalmitic acid, which comprises
[60461] (a) increasing or generating one or more activities selected from the group consisting of b2139-protein in an organelle, preferably in plastids or mitochondria, especially in plastids, of a non-human organism or a part thereof, preferably a microorganism, a plant cell, a plant or a part thereof, as compared to a corresponding non-transformed wild type non-human organism or a part thereof; and
[60462] (b) growing the non-human organism or a part thereof under conditions which permit the production of 2-hydroxypalmitic acid or a composition comprising 2-hydroxypalmitic acid in said non-human organism or in the culture medium surrounding said non-human organism.

[60463] A further embodiment of the present invention relates to a process for the production of hexadecatrienoic acid, which comprises
[60464] (a) increasing or generating one or more activities selected from the group consisting of ABC transporter permease protein in an organelle, preferably in plastids or mitochondria, especially in plastids, of a non-human organism or a part thereof, preferably a microorganism, a plant cell, a plant or a part thereof, as compared to a corresponding non-transformed wild type non-human organism or a part thereof; and
[60465] (b) growing the non-human organism or a part thereof under conditions which permit the production of hexadecatrienoic acid or a composition comprising hexadecatrienoic acid in said non-human organism or in the culture medium surrounding said non-human organism.

[60466] A further embodiment of the present invention relates to a process for the production of 2-hydroxybehenic acid, which comprises
[60467] (a) increasing or generating one or more activities selected from the group consisting of sensor kinase in an organelle, preferably in plastids or mitochondria, especially in plastids, of a non-human organism or a part thereof, preferably a microorganism, a plant cell, a plant or a part thereof, as compared to a corresponding non-transformed wild type non-human organism or a part thereof; and
[60468] (b) growing the non-human organism or a part thereof under conditions which permit the production of 2-hydroxybehenic acid or a composition comprising 2-hydroxybehenic acid in said non-human organism or in the culture medium surrounding said non-human organism.

[60469] A further embodiment of the present invention relates to a process for the production of 2-hydroxytetracosenoic acid (preferably 2-hydroxynervonic acid), which comprises
[60470] (a) increasing or generating one or more activities selected from the group consisting of b2360-protein in an organelle, preferably in plastids or mitochondria, especially in plastids, of a non-human organism or a part thereof, preferably a microorganism, a plant cell, a plant or a part thereof, as compared to a corresponding non-transformed wild type non-human organism or a part thereof; and
[60471] (b) growing the non-human organism or a part thereof under conditions which permit the production of 2-hydroxytetracosenoic acid (preferably 2-hydroxynervonic acid) or a composition comprising 2-hydroxytetracosenoic acid (preferably 2-hydroxynervonic acid) in said non-human organism or in the culture medium surrounding said non-human organism.

[60472] A further embodiment of the present invention relates to a process for the production of 2-hydroxytetracosenoic acid (preferably 2-hydroxynervonic acid), which comprises
[60473] (a) increasing or generating one or more activities selected from the group consisting of cysteine synthase A in an organelle, preferably in plastids or mitochondria, especially in plastids, of a non-human organism or a part thereof, preferably a microorganism, a plant cell, a plant or a part thereof, as compared to a corresponding non-transformed wild type non-human organism or a part thereof; and
[60474] (b) growing the non-human organism or a part thereof under conditions which permit the production of 2-hydroxytetracosenoic acid (preferably 2-hydroxynervonic acid) or a composition comprising 2-hydroxytetracosenoic acid (preferably 2-hydroxynervonic acid) in said non-human organism or in the culture medium surrounding said non-human organism.

[60475] A further embodiment of the present invention relates to a process for the production of hexadecadienoic acid, which comprises
[60476] (a) increasing or generating one or more activities selected from the group consisting of ethanolamine utilization protein in an organelle, preferably in plastids or mitochondria, especially in plastids, of a non-human organism or a part thereof, preferably a microorganism, a plant cell, a plant or a part thereof, as compared to a corresponding non-transformed wild type non-human organism or a part thereof; and
[60477] (b) growing the non-human organism or a part thereof under conditions which permit the production of hexadecadienoic acid or a composition comprising hexadecadienoic acid in said non-human organism or in the culture medium surrounding said non-human organism.

[60478] A further embodiment of the present invention relates to a process for the production of hexadecatrienoic acid, which comprises
[60479] (a) increasing or generating one or more activities selected from the group consisting of ethanolamine utilization protein in an organelle, preferably in plastids or mitochondria, especially in plastids, of a non-human organism or a part thereof, preferably a microorganism, a plant cell, a plant or a part thereof, as compared to a corresponding non-transformed wild type non-human organism or a part thereof; and
[60480] (b) growing the non-human organism or a part thereof under conditions which permit the production of hexadecatrienoic acid or a composition comprising hexadecatrienoic acid in said non-human organism or in the culture medium surrounding said non-human organism.

[60481] A further embodiment of the present invention relates to a process for the production of oleic acid, which comprises
[60482] (a) increasing or generating one or more activities selected from the group consisting of ethanolamine utilization protein in an organelle, preferably in plastids or mitochondria, especially in plastids, of a non-human organism or a part thereof, preferably a microorganism, a plant cell, a plant or a part thereof, as compared to a corresponding non-transformed wild type non-human organism or a part thereof; and
[60483] (b) growing the non-human organism or a part thereof under conditions which permit the production of oleic acid or a composition comprising oleic acid in said non-human organism or in the culture medium surrounding said non-human organism.

[60484] A further embodiment of the present invention relates to a process for the production of cerebronic acid, which comprises
[60485] (a) increasing or generating one or more activities selected from the group consisting of b2474-protein in an organelle, preferably in plastids or mitochondria, especially in plastids, of a non-human organism or a part thereof, preferably a microorganism, a plant cell, a plant or a part thereof, as compared to a corresponding non-transformed wild type non-human organism or a part thereof; and
[60486] (b) growing the non-human organism or a part thereof under conditions which permit the production of cerebronic acid or a composition comprising cerebronic acid in said non-human organism or in the culture medium surrounding said non-human organism.

[60487] A further embodiment of the present invention relates to a process for the production of hexadecatrienoic acid, which comprises
[60488] (a) increasing or generating one or more activities selected from the group consisting of b2474-protein in an organelle, preferably in plastids or mitochondria, especially in plastids, of a non-human organism or a part thereof, preferably a microorganism, a plant cell, a plant or a part thereof, as compared to a corresponding non-transformed wild type non-human organism or a part thereof; and
[60489] (b) growing the non-human organism or a part thereof under conditions which permit the production of hexadecatrienoic acid or a composition comprising hexadecatrienoic acid in said non-human organism or in the culture medium surrounding said non-human organism.

[60490] A further embodiment of the present invention relates to a process for the production of 2-hydroxytetracosenoic acid (preferably 2-hydroxynervonic acid), which comprises
[60491] (a) increasing or generating one or more activities selected from the group consisting of b2474-protein in an organelle, preferably in plastids or mitochondria, especially in plastids, of a non-human organism or a part thereof, preferably a microorganism, a plant cell, a plant or a part thereof, as compared to a corresponding non-transformed wild type non-human organism or a part thereof; and
[60492] (b) growing the non-human organism or a part thereof under conditions which permit the production of 2-hydroxytetracosenoic acid (preferably 2-hydroxynervonic acid) or a composition comprising 2-hydroxytetracosenoic acid (preferably 2-hydroxynervonic acid) in said non-human organism or in the culture medium surrounding said non-human organism.

[60493] A further embodiment of the present invention relates to a process for the production of hexadecadienoic acid, which comprises
[60494] (a) increasing or generating one or more activities selected from the group consisting of b2513-protein in an organelle, preferably in plastids or mitochondria, especially in plastids, of a non-human organism or a part thereof, preferably a microorganism, a plant cell, a plant or a part thereof, as compared to a corresponding non-transformed wild type non-human organism or a part thereof; and
[60495] (b) growing the non-human organism or a part thereof under conditions which permit the production of hexadecadienoic acid or a composition comprising hexadecadienoic acid in said non-human organism or in the culture medium surrounding said non-human organism.

[60496] A further embodiment of the present invention relates to a process for the production of hexadecadienoic acid, which comprises
[60497] (a) increasing or generating one or more activities selected from the group consisting of phosphatidylserine synthase in an organelle, preferably in plastids or mitochondria, especially in plastids, of a non-human organism or a part thereof, preferably a microorganism, a plant cell, a plant or a part thereof, as compared to a corresponding non-transformed wild type non-human organism or a part thereof; and
[60498] (b) growing the non-human organism or a part thereof under conditions which permit the production of hexadecadienoic acid or a composition comprising hexadecadienoic acid in said non-human organism or in the culture medium surrounding said non-human organism.

[60499] A further embodiment of the present invention relates to a process for the production of 2-hydroxytetracosenoic acid (preferably 2-hydroxynervonic acid), which comprises
[60500] (a) increasing or generating one or more activities selected from the group consisting of b2654-protein in an organelle, preferably in plastids or mitochondria, especially in plastids, of a non-human organism or a part thereof, preferably a microorganism, a plant cell, a plant or a part thereof, as compared to a corresponding non-transformed wild type non-human organism or a part thereof; and
[60501] (b) growing the non-human organism or a part thereof under conditions which permit the production of 2-hydroxytetracosenoic acid (preferably 2-hydroxynervonic acid) or a composition comprising 2-hydroxytetracosenoic acid (preferably 2-hydroxynervonic acid) in said non-human organism or in the culture medium surrounding said non-human

[60502] A furthogenribardiment of the present invention relates to a process for the production of hexadecatrienoic acid, which comprises
[60503] (a) increasing or generating one or more activities selected from the group consisting of 2-C-methyl-D-erythritol 4-phosphate cytidylyltransferase in an organelle, preferably in plastids or mitochondria, especially in plastids, of a non-human organism or a part thereof, preferably a microorganism, a plant cell, a plant or a part thereof, as compared to a corresponding non-transformed wild type non-human organism or a part thereof; and
[60504] (b) growing the non-human organism or a part thereof under conditions which permit the production of hexadecatrienoic acid or a composition comprising hexadecatrienoic acid in said non-human organism or in the culture medium surrounding said non-human organism.

[60505] A further embodiment of the present invention relates to a process for the production of eicosanoic acid, which comprises
[60506] (a) increasing or generating one or more activities selected from the group consisting of alkaline phosphatase isozyme conversion protein in an organelle, preferably in plastids or mitochondria, especially in plastids, of a non-human organism or a part thereof, preferably a microorganism, a plant cell, a plant or a part thereof, as compared to a corresponding non-transformed wild type non-human organism or a part thereof; and
[60507] (b) growing the non-human organism or a part thereof under conditions which permit the production of eicosanoic acid or a composition comprising eicosanoic acid in said non-human organism or in the culture medium surrounding said non-human organism.

[60508] A further embodiment of the present invention relates to a process for the production of 2-hydroxytetracosenoic acid (preferably 2-hydroxynervonic acid), which comprises
[60509] (a) increasing or generating one or more activities selected from the group consisting of murein transglycosylase in an organelle, preferably in plastids or mitochondria, especially in plastids, of a non-human organism or a part thereof, preferably a microorganism, a plant cell, a plant or a part thereof, as compared to a corresponding non-transformed wild type non-human organism or a part thereof; and
[60510] (b) growing the non-human organism or a part thereof under conditions which permit the production of 2-hydroxytetracosenoic acid (preferably 2-hydroxynervonic acid) or a composition comprising 2-hydroxytetracosenoic acid (preferably 2-hydroxynervonic acid) in said non-human organism or in the culture medium surrounding said non-human organism.

[60511] A further embodiment of the present invention relates to a process for the production of hexadecadienoic acid, which comprises
[60512] (a) increasing or generating one or more activities selected from the group consisting of b3442-protein in an organelle, preferably in plastids or mitochondria, especially in plastids, of a non-human organism or a part thereof, preferably a microorganism, a plant cell, a plant or a part thereof, as compared to a corresponding non-transformed wild type non-human organism or a part thereof; and
[60513] (b) growing the non-human organism or a part thereof under conditions which permit the production of hexadecadienoic acid or a composition comprising hexadecadienoic acid in said non-human organism or in the culture medium surrounding said non-human organism.

[60514] A further embodiment of the present invention relates to a process for the production of cerebronic acid, which comprises
[60515] (a) increasing or generating one or more activities selected from the group consisting of sugar transport system permease protein in an organelle, preferably in plastids or mitochondria, especially in plastids, of a non-human organism or a part thereof, preferably a microorganism, a plant cell, a plant or a part thereof, as compared to a corresponding non-transformed wild type non-human organism or a part thereof; and
[60516] (b) growing the non-human organism or a part thereof under conditions which permit the production of cerebronic acid or a composition comprising cerebronic acid in said non-human organism or in the culture medium surrounding said non-human organism.

[60517] A further embodiment of the present invention relates to a process for the production of 2-hydroxybehenic acid, which comprises
[60518] (a) increasing or generating one or more activities selected from the group consisting of b3812-protein in an organelle, preferably in plastids or mitochondria, especially in plastids, of a non-human organism or a part thereof, preferably a microorganism, a plant cell, a plant or a part thereof, as compared to a corresponding non-transformed wild type non-human organism or a part thereof; and
[60519] (b) growing the non-human organism or a part thereof under conditions which permit the production of 2-hydroxybehenic acid or a composition comprising 2-hydroxybehenic acid in said non-human organism or in the culture medium surrounding said non-human organism.

[60520] A further embodiment of the present invention relates to a process for the production of hexadecadienoic acid, which comprises
[60521] (a) increasing or generating one or more activities selected from the group consisting of 3-ketoacyl-CoA thiolase in an organelle, preferably in plastids or mitochondria, especially in plastids, of a non-human organism or a part thereof, preferably a microorganism, a plant cell, a plant or a part thereof, as compared to a corresponding non-transformed wild type non-human organism or a part thereof; and
[60522] (b) growing the non-human organism or a part thereof under conditions which permit the production of hexadecadienoic acid or a composition comprising hexadecadienoic acid in said non-human organism or in the culture medium surrounding said non-human organism.

[60523] A further embodiment of the present invention relates to a process for the production of oleic acid, which comprises
[60524] (a) increasing or generating one or more activities selected from the group consisting of 3-ketoacyl-CoA thiolase in an organelle, preferably in plastids or mitochondria, especially in plastids, of a non-human organism or a part thereof, preferably a microorganism, a plant cell, a plant or a part thereof, as compared to a corresponding non-transformed wild type non-human organism or a part thereof; and
[60525] (b) growing the non-human organism or a part thereof under conditions which permit the production of oleic acid or a composition comprising oleic acid in said non-human organism or in the culture medium surrounding said non-human organism.

[60526] A further embodiment of the present invention relates to a process for the production of hexadecadienoic acid, which comprises
[60527] (a) increasing or generating one or more activities selected from the group consisting of transcriptional regulator in an organelle, preferably in plastids or mitochondria, especially in plastids, of a non-human organism or a part thereof, preferably a microorganism, a plant cell, a plant or a part thereof, as compared to a corresponding non-transformed wild type non-human organism or a part thereof; and
[60528] (b) growing the non-human organism or a part thereof under conditions which permit the production of hexadecadienoic acid or a composition comprising hexadecadienoic acid in said non-human organism or in the culture medium surrounding said non-human organism.

[60529] A further embodiment of the present invention relates to a process for the production of hexadecadienoic acid, which comprises
[60530] (a) increasing or generating one or more activities selected from the group consisting of fructose 1,6-bisphosphatase in an organelle, preferably in plastids or mitochondria, especially in plastids, of a non-human organism or a part thereof, preferably a microorganism, a plant cell, a plant or a part thereof, as compared to a corresponding non-transformed wild type non-human organism or a part thereof; and
[60531] (b) growing the non-human organism or a part thereof under conditions which permit the production of hexadecadienoic acid or a composition comprising hexadecadienoic acid in said non-human organism or in the culture medium surrounding said non-human organism.

[60532] A further embodiment of the present invention relates to a process for the production of behenic acid, which comprises
[60533] (a) increasing or generating one or more activities selected from the group consisting of cystathionine gamma-synthase in an organelle, preferably in plastids or mitochondria, especially in plastids, of a non-human organism or a part thereof, preferably a microorganism, a plant cell, a plant or a part thereof, as compared to a corresponding non-transformed wild type non-human organism or a part thereof; and
[60534] (b) growing the non-human organism or a part thereof under conditions which permit the production of behenic acid or a composition comprising behenic acid in said non-human organism or in the culture medium surrounding said non-human organism.

[60535] A further embodiment of the present invention relates to a process for the production of heptadecanoic acid, which comprises
[60536] (a) increasing or generating one or more activities selected from the group consisting of cystathionine gamma-synthase in an organelle, preferably in plastids or mitochondria, especially in plastids, of a non-human organism or a part thereof, preferably a microorganism, a plant cell, a plant or a part thereof, as compared to a corresponding non-transformed wild type non-human organism or a part thereof; and
[60537] (b) growing the non-human organism or a part thereof under conditions which permit the production of heptadecanoic acid or a composition comprising heptadecanoic acid in said non-human organism or in the culture medium surrounding said non-human organism.

[60538] A further embodiment of the present invention relates to a process for the production of oleic acid, which comprises
[60539] (a) increasing or generating one or more activities selected from the group consisting of cystathionine gamma-synthase in an organelle, preferably in plastids or mitochondria, especially in plastids, of a non-human organism or a part thereof, preferably a microorganism, a plant cell, a plant or a part thereof, as compared to a corresponding non-transformed wild type non-human organism or a part thereof; and
[60540] (b) growing the non-human organism or a part thereof under conditions which permit the production of oleic acid or a composition comprising oleic acid in said non-human organism or in the culture medium surrounding said non-human organism.

[60541] A further embodiment of the present invention relates to a process for the production of 2-hydroxypalmitic acid, which comprises
[60542] (a) increasing or generating one or more activities selected from the group consisting of b3944-protein in an organelle, preferably in plastids or mitochondria, especially in plastids, of a non-human organism or a part thereof, preferably a microorganism, a plant cell, a plant or a part thereof, as compared to a corresponding non-transformed wild type non-human organism or a part thereof; and
[60543] (b) growing the non-human organism or a part thereof under conditions which permit the production of 2-hydroxypalmitic acid or a composition comprising 2-hydroxypalmitic acid in said non-human organism or in the culture medium surrounding said non-human organism.

[60544] A further embodiment of the present invention relates to a process for the production of 2-hydroxybehenic acid, which comprises
[60545] (a) increasing or generating one or more activities selected from the group consisting of ankyrin repeat protein in an organelle, preferably in plastids or mitochondria, especially in plastids, of a non-human organism or a part thereof, preferably a microorganism, a plant cell, a plant or a part thereof, as compared to a corresponding non-transformed wild type non-human organism or a part thereof; and
[60546] (b) growing the non-human organism or a part thereof under conditions which permit the production of 2-hydroxybehenic acid or a composition comprising 2-hydroxybehenic acid in said non-human organism or in the culture medium surrounding said non-human organism.

[60547] A further embodiment of the present invention relates to a process for the production of hexadecadienoic acid, which comprises
[60548] (a) increasing or generating one or more activities selected from the group consisting of b4023-protein in an organelle, preferably in plastids or mitochondria, especially in plastids, of a non-human organism or a part thereof, preferably a microorganism, a plant cell, a plant or a part thereof, as compared to a corresponding non-transformed wild type non-human organism or a part thereof; and
[60549] (b) growing the non-human organism or a part thereof under conditions which permit the production of hexadecadienoic acid or a composition comprising hexadecadienoic acid in said non-human organism or in the culture medium surrounding said non-human organism.

[60550] A further embodiment of the present invention relates to a process for the production of heptadecanoic acid, which comprises
[60551] (a) increasing or generating one or more activities selected from the group consisting of acetyl-coenzyme A synthetase in an organelle, preferably in plastids or mitochondria, especially in plastids, of a non-human organism or a part thereof, preferably a microorganism, a plant cell, a plant or a part thereof, as compared to a corresponding non-transformed wild type non-human organism or a part thereof; and
[60552] (b) growing the non-human organism or a part thereof under conditions which permit the production of heptadecanoic acid or a composition comprising heptadecanoic acid in said non-human organism or in the culture medium surrounding said non-human organism.

[60553] A further embodiment of the present invention relates to a process for the production of 2-hydroxypalmitic acid, which comprises
[60554] (a) increasing or generating one or more activities selected from the group consisting of b4205-protein in an organelle, preferably in plastids or mitochondria, especially in plastids, of a non-human organism or a part thereof, preferably a microorganism, a plant cell, a plant or a part thereof, as compared to a corresponding non-transformed wild type non-human organism or a part thereof; and
[60555] (b) growing the non-human organism or a part thereof under conditions which permit the production of 2-hydroxypalmitic acid or a composition comprising 2-hydroxypalmitic acid in said non-human organism or in the culture medium surrounding said non-human organism.

[60556] A further embodiment of the present invention relates to a process for the production of 2-hydroxybehenic acid, which comprises
[60557] (a) increasing or generating one or more activities selected from the group consisting of vacuolar processing enzyme in an organelle, preferably in plastids or mitochondria, especially in plastids, of a non-human organism or a part thereof, preferably a microorganism, a plant cell, a plant or a part thereof, as compared to a corresponding non-transformed wild type non-human organism or a part thereof; and
[60558] (b) growing the non-human organism or a part thereof under conditions which permit the production of 2-hydroxybehenic acid or a composition comprising 2-hydroxybehenic acid in said non-human organism or in the culture medium surrounding said non-human organism.

[60559] A further embodiment of the present invention relates to a process for the production of 2-hydroxypalmitic acid, which comprises
[60560] (a) increasing or generating one or more activities selected from the group consisting of glutaredoxin in an organelle, preferably in plastids or mitochondria, especially in plastids, of a non-human organism or a part thereof, preferably a microorganism, a plant cell, a plant or a part thereof, as compared to a corresponding non-transformed wild type non-human organism or a part thereof; and
[60561] (b) growing the non-human organism or a part thereof under conditions which permit the production of 2-hydroxypalmitic acid or a composition comprising 2-hydroxypalmitic acid in said non-human organism or in the culture medium surrounding said non-human organism.

[60562] A further embodiment of the present invention relates to a process for the production of cerebronic acid, which comprises
[60563] (a) increasing or generating one or more activities selected from the group consisting of transcription factor in an organelle, preferably in plastids or mitochondria, especially in plastids, of a non-human organism or a part thereof, preferably a microorganism, a plant cell, a plant or a part thereof, as compared to a corresponding non-transformed wild type non-human organism or a part thereof; and
[60564] (b) growing the non-human organism or a part thereof under conditions which permit the production of cerebronic acid or a composition comprising cerebronic acid in said non-human organism or in the culture medium surrounding said non-human organism.

[60565] A further embodiment of the present invention relates to a process for the production of hexadecatrienoic acid, which comprises
[60566] (a) increasing or generating one or more activities selected from the group consisting of transcription factor in an organelle, preferably in plastids or mitochondria, especially in plastids, of a non-human organism or a part thereof, preferably a microorganism, a plant cell, a plant or a part thereof, as compared to a corresponding non-transformed wild type non-human organism or a part thereof; and
[60567] (b) growing the non-human organism or a part thereof under conditions which permit the production of hexadecatrienoic acid or a composition comprising hexadecatrienoic acid in said non-human organism or in the culture medium surrounding said non-human organism.

[60568] A further embodiment of the present invention relates to a process for the production of 2-hydroxytetracosenoic acid (preferably 2-hydroxynervonic acid), which comprises
[60569] (a) increasing or generating one or more activities selected from the group consisting of GM02LC38418-protein in an organelle, preferably in plastids or mitochondria, especially in plastids, of a non-human organism or a part thereof, preferably a microorganism, a plant cell, a plant or a part thereof, as compared to a corresponding non-transformed wild type non-human organism or a part thereof; and
[60570] (b) growing the non-human organism or a part thereof under conditions which permit the production of 2-hydroxytetracosenoic acid (preferably 2-hydroxynervonic acid) or a composition comprising 2-hydroxytetracosenoic acid (preferably 2-hydroxynervonic acid) in said non-human organism or in the culture medium surrounding said non-human organism.

[60571] A further embodiment of the present invention relates to a process for the production of hexadecadienoic acid, which comprises
[60572] (a) increasing or generating one or more activities selected from the group consisting of sll0281-protein in an organelle, preferably in plastids or mitochondria, especially in plastids, of a non-human organism or a part thereof, preferably a microorganism, a plant cell, a plant or a part thereof, as compared to a corresponding non-transformed wild type non-human organism or a part thereof; and
[60573] (b) growing the non-human organism or a part thereof under conditions which permit the production of hexadecadienoic acid or a composition comprising hexadecadienoic acid in said non-human organism or in the culture medium surrounding said non-human organism.

[60574] A further embodiment of the present invention relates to a process for the production of 2-hydroxytetracosenoic acid (preferably 2-hydroxynervonic acid), which comprises
[60575] (a) increasing or generating one or more activities selected from the group consisting of bifunctional protein (phosphoribosyltransferase and regulatory protein) in an organelle, preferably in plastids or mitochondria, especially in plastids, of a non-human organism or a part thereof, preferably a microorganism, a plant cell, a plant or a part thereof, as compared to a corresponding non-transformed wild type non-human organism or a part thereof; and
[60576] (b) growing the non-human organism or a part thereof under conditions which permit the production of 2-hydroxytetracosenoic acid (preferably 2-hydroxynervonic acid) or a composition comprising 2-hydroxytetracosenoic acid (preferably 2-hydroxynervonic acid) in said non-human organism or in the culture medium surrounding said non-human organism.

[60577] A further embodiment of the present invention relates to a process for the production of 2-hydroxytetracosenoic acid (preferably 2-hydroxynervonic acid), which comprises
[60578] (a) increasing or generating one or more activities selected from the group consisting of sll0406-protein in an organelle, preferably in plastids or mitochondria, especially in plastids, of a non-human organism or a part thereof, preferably a microorganism, a plant cell, a plant or a part thereof, as compared to a corresponding non-transformed wild type non-human organism or a part thereof; and
[60579] (b) growing the non-human organism or a part thereof under conditions which permit the production of 2-hydroxytetracosenoic acid (preferably 2-hydroxynervonic acid) or a composition comprising 2-hydroxytetracosenoic acid (preferably 2-hydroxynervonic acid) in said non-human organism or in the culture medium surrounding said non-human organism.

[60580] A further embodiment of the present invention relates to a process for the production of cerebronic acid, which comprises
[60581] (a) increasing or generating one or more activities selected from the group consisting of binding-protein-dependent transport systems inner membrane component in an organelle, preferably in plastids or mitochondria, especially in plastids, of a non-human organism or a part thereof, preferably a microorganism, a plant cell, a plant or a part thereof, as compared to a corresponding non-transformed wild type non-human organism or a part thereof; and
[60582] (b) growing the non-human organism or a part thereof under conditions which permit the production of cerebronic acid or a composition comprising cerebronic acid in said non-human organism or in the culture medium surrounding said non-human organism.

[60583] A further embodiment of the present invention relates to a process for the production of cerebronic acid, which comprises
[60584] (a) increasing or generating one or more activities selected from the group consisting of phosphatase in an organelle, preferably in plastids or mitochondria, especially in plastids, of a non-human organism or a part thereof, preferably a microorganism, a plant cell, a plant or a part thereof, as compared to a corresponding non-transformed wild type non-human organism or a part thereof; and
[60585] (b) growing the non-human organism or a part thereof under conditions which permit the production of cerebronic acid or a composition comprising cerebronic acid in said non-human organism or in the culture medium surrounding said non-human organism.

[60586] A further embodiment of the present invention relates to a process for the production of 2-hydroxytetracosenoic acid (preferably 2-hydroxynervonic acid), which comprises
[60587] (a) increasing or generating one or more activities selected from the group consisting of phosphatase in an organelle, preferably in plastids or mitochondria, especially in plastids, of a non-human organism or a part thereof, preferably a microorganism, a plant cell, a plant or a part thereof, as compared to a corresponding non-transformed wild type non-human organism or a part thereof; and
[60588] (b) growing the non-human organism or a part thereof under conditions which permit the production of 2-hydroxytetracosenoic acid (preferably 2-hydroxynervonic acid) or a composition comprising 2-hydroxytetracosenoic acid (preferably 2-hydroxynervonic acid) in said non-human organism or in the culture medium surrounding said non-human organism.

[60589] A further embodiment of the present invention relates to a process for the production of hexadecadienoic acid, which comprises
[60590] (a) increasing or generating one or more activities selected from the group consisting of carbon dioxide concentrating mechanism protein in an organelle, preferably in plastids or mitochondria, especially in plastids, of a non-human organism or a part thereof, preferably a microorganism, a plant cell, a plant or a part thereof, as compared to a corresponding non-transformed wild type non-human organism or a part thereof; and
[60591] (b) growing the non-human organism or a part thereof under conditions which permit the production of hexadecadienoic acid or a composition comprising hexadecadienoic acid in said non-human organism or in the culture medium surrounding said non-human organism.

[60592] A further embodiment of the present invention relates to a process for the production of hexadecatrienoic acid, which comprises
[60593] (a) increasing or generating one or more activities selected from the group consisting of carbon dioxide concentrating mechanism protein in an organelle, preferably in plastids or mitochondria, especially in plastids, of a non-human organism or a part thereof, preferably a microorganism, a plant cell, a plant or a part thereof, as compared to a corresponding non-transformed wild type non-human organism or a part thereof; and
[60594] (b) growing the non-human organism or a part thereof under conditions which permit the production of hexadecatrienoic acid or a composition comprising hexadecatrienoic acid in said non-human organism or in the culture medium surrounding said non-human organism.

[60595] A further embodiment of the present invention relates to a process for the production of cerebronic acid, which comprises
[60596] (a) increasing or generating one or more activities selected from the group consisting of coproporphyrinogen III oxidase in an organelle, preferably in plastids or mitochondria, especially in plastids, of a non-human organism or a part thereof, preferably a microorganism, a plant cell, a plant or a part thereof, as compared to a corresponding non-transformed wild type non-human organism or a part thereof; and
[60597] (b) growing the non-human organism or a part thereof under conditions which permit the production of cerebronic acid or a composition comprising cerebronic acid in said non-human organism or in the culture medium surrounding said non-human organism.

[60598] A further embodiment of the present invention relates to a process for the production of 2-hydroxytetracosenoic acid (preferably 2-hydroxynervonic acid), which comprises
[60599] (a) increasing or generating one or more activities selected from the group consisting of coproporphyrinogen III oxidase in an organelle, preferably in plastids or mitochondria, especially in plastids, of a non-human organism or a part thereof, preferably a microorganism, a plant cell, a plant or a part thereof, as compared to a corresponding non-transformed wild type non-human organism or a part thereof; and
[60600] (b) growing the non-human organism or a part thereof under conditions which permit the production of 2-hydroxytetracosenoic acid (preferably 2-hydroxynervonic acid) or a composition comprising 2-hydroxytetracosenoic acid (preferably 2-hydroxynervonic acid) in said non-human organism or in the culture medium surrounding said non-human organism.

[60601] A further embodiment of the present invention relates to a process for the production of 2-hydroxypalmitic acid, which comprises
[60602] (a) increasing or generating one or more activities selected from the group consisting of oxidoreductase in an organelle, preferably in plastids or mitochondria, especially in plastids, of a non-human organism or a part thereof, preferably a microorganism, a plant cell, a plant or a part thereof, as compared to a corresponding non-transformed wild type non-human organism or a part thereof; and
[60603] (b) growing the non-human organism or a part thereof under conditions which permit the production of 2-hydroxypalmitic acid or a composition comprising 2-hydroxypalmitic acid in said non-human organism or in the culture medium surrounding said non-human organism.

[60604] A further embodiment of the present invention relates to a process for the production of hexadecatrienoic acid, which comprises
[60605] (a) increasing or generating one or more activities selected from the group consisting of bifunctional purine biosynthesis protein in an organelle, preferably in plastids or mitochondria, especially in plastids, of a non-human organism or a part thereof, preferably a microorganism, a plant cell, a plant or a part thereof, as compared to a corresponding non-transformed wild type non-human organism or a part thereof; and
[60606] (b) growing the non-human organism or a part thereof under conditions which permit the production of hexadecatrienoic acid or a composition comprising hexadecatrienoic acid in said non-human organism or in the culture medium surrounding said non-human organism.

[60607] A further embodiment of the present invention relates to a process for the production of cerebronic acid, which comprises
[60608] (a) increasing or generating one or more activities selected from the group consisting of malate dehydrogenase in an organelle, preferably in plastids or mitochondria, especially in plastids, of a non-human organism or a part thereof, preferably a microorganism, a plant cell, a plant or a part thereof, as compared to a corresponding non-transformed wild type non-human organism or a part thereof; and
[60609] (b) growing the non-human organism or a part thereof under conditions which permit the production of cerebronic acid or a composition comprising cerebronic acid in said non-human organism or in the culture medium surrounding said non-human organism.

[60610] A further embodiment of the present invention relates to a process for the production of hexadecatrienoic acid, which comprises
[60611] (a) increasing or generating one or more activities selected from the group consisting of glycine cleavage system H protein in an organelle, preferably in plastids or mitochondria, especially in plastids, of a non-human organism or a part thereof, preferably a microorganism, a plant cell, a plant or a part thereof, as compared to a corresponding non-transformed wild type non-human organism or a part thereof; and
[60612] (b) growing the non-human organism or a part thereof under conditions which permit the production of hexadecatrienoic acid or a composition comprising hexadecatrienoic acid in said non-human organism or in the culture medium surrounding said non-human organism.

[60613] A further embodiment of the present invention relates to a process for the production of 2-hydroxytetracosenoic acid (preferably 2-hydroxynervonic acid), which comprises
[60614] (a) increasing or generating one or more activities selected from the group consisting of permease protein of ABC transporter in an organelle, preferably in plastids or mitochondria, especially in plastids, of a non-human organism or a part thereof, preferably a microorganism, a plant cell, a plant or a part thereof, as compared to a corresponding non-transformed wild type non-human organism or a part thereof; and
[60615] (b) growing the non-human organism or a part thereof under conditions which permit the production of 2-hydroxytetracosenoic acid (preferably 2-hydroxynervonic acid) or a composition comprising 2-hydroxytetracosenoic acid (preferably 2-hydroxynervonic acid) in said non-human organism or in the culture medium surrounding said non-human organism.

[60616] A further embodiment of the present invention relates to a process for the production of hexadecadienoic acid, which comprises
[60617] (a) increasing or generating one or more activities selected from the group consisting of tryptophan synthase alpha chain in an organelle, preferably in plastids or mitochondria, especially in plastids, of a non-human organism or a part thereof, preferably a microorganism, a plant cell, a plant or a part thereof, as compared to a corresponding non-transformed wild type non-human organism or a part thereof; and
[60618] (b) growing the non-human organism or a part thereof under conditions which permit the production of hexadecadienoic acid or a composition comprising hexadecadienoic acid in said non-human organism or in the culture medium surrounding said non-human organism.

[60619] A further embodiment of the present invention relates to a process for the production of 2-hydroxybehenic acid, which comprises
[60620] (a) increasing or generating one or more activities selected from the group consisting of dihydrolipoamide dehydrogenase in an organelle, preferably in plastids or mitochondria, especially in plastids, of a non-human organism or a part thereof, preferably a microorganism, a plant cell, a plant or a part thereof, as compared to a corresponding non-transformed wild type non-human organism or a part thereof; and
[60621] (b) growing the non-human organism or a part thereof under conditions which permit the production of 2-hydroxybehenic acid or a composition comprising 2-hydroxybehenic acid in said non-human organism or in the culture medium surrounding said non-human organism.

[60622] A further embodiment of the present invention relates to a process for the production of 2-hydroxypalmitic acid, which comprises
[60623] (a) increasing or generating one or more activities selected from the group consisting of phosphate import ATP-binding protein in an organelle, preferably in plastids or mitochondria, especially in plastids, of a non-human organism or a part thereof, preferably a microorganism, a plant cell, a plant or a part thereof, as compared to a corresponding non-transformed wild type non-human organism or a part thereof; and
[60624] (b) growing the non-human organism or a part thereof under conditions which permit the production of 2-hydroxypalmitic acid or a composition comprising 2-hydroxypalmitic acid in said non-human organism or in the culture medium surrounding said non-human organism.

[60625] A further embodiment of the present invention relates to a process for the production of hexadecatrienoic acid, which comprises
[60626] (a) increasing or generating one or more activities selected from the group consisting of glutamate 5-kinase in an organelle, preferably in plastids or mitochondria, especially in plastids, of a non-human organism or a part thereof, preferably a microorganism, a plant cell, a plant or a part thereof, as compared to a corresponding non-transformed wild type non-human organism or a part thereof; and
[60627] (b) growing the non-human organism or a part thereof under conditions which permit the production of hexadecatrienoic acid or a composition comprising hexadecatrienoic acid in said non-human organism or in the culture medium surrounding said non-human organism.

[60628] A further embodiment of the present invention relates to a process for the production of cerebronic acid, which comprises
[60629] (a) increasing or generating one or more activities selected from the group consisting of threonine dehydratase in an organelle, preferably in plastids or mitochondria, especially in plastids, of a non-human organism or a part thereof, preferably a microorganism, a plant cell, a plant or a part thereof, as compared to a corresponding non-transformed wild type non-human organism or a part thereof; and
[60630] (b) growing the non-human organism or a part thereof under conditions which permit the production of cerebronic acid or a composition comprising cerebronic acid in said non-human organism or in the culture medium surrounding said non-human organism.

[60631] A further embodiment of the present invention relates to a process for the production of hexadecatrienoic acid, which comprises
[60632] (a) increasing or generating one or more activities selected from the group consisting of threonine dehydratase in an organelle, preferably in plastids or mitochondria, especially in plastids, of a non-human organism or a part thereof, preferably a microorganism, a plant cell, a plant or a part thereof, as compared to a corresponding non-transformed wild type non-human organism or a part thereof; and
[60633] (b) growing the non-human organism or a part thereof under conditions which permit the production of hexadecatrienoic acid or a composition comprising hexadecatrienoic acid in said non-human organism or in the culture medium surrounding said non-human organism.

[60634] A further embodiment of the present invention relates to a process for the production of 2-hydroxytetracosenoic acid (preferably 2-hydroxynervonic acid), which comprises
[60635] (a) increasing or generating one or more activities selected from the group consisting of threonine dehydratase in an organelle, preferably in plastids or mitochondria, especially in plastids, of a non-human organism or a part thereof, preferably a microorganism, a plant cell, a plant or a part thereof, as compared to a corresponding non-transformed wild type non-human organism or a part thereof; and
[60636] (b) growing the non-human organism or a part thereof under conditions which permit the production of 2-hydroxytetracosenoic acid (preferably 2-hydroxynervonic acid) or a composition comprising 2-hydroxytetracosenoic acid (preferably 2-hydroxynervonic acid) in said non-human organism or in the culture medium surrounding said non-human organism.

[60637] A further embodiment of the present invention relates to a process for the production of 2-hydroxytetracosenoic acid (preferably 2-hydroxynervonic acid), which comprises
[60638] (a) increasing or generating one or more activities selected from the group consisting of ferredoxin in an organelle, preferably in plastids or mitochondria, especially in plastids, of a non-human organism or a part thereof, preferably a microorganism, a plant cell, a plant or a part thereof, as compared to a corresponding non-transformed wild type non-human organism or a part thereof; and
[60639] (b) growing the non-human organism or a part thereof under conditions which permit the production of 2-hydroxytetracosenoic acid (preferably 2-hydroxynervonic acid) or a composition comprising 2-hydroxytetracosenoic acid (preferably 2-hydroxynervonic acid) in said non-human organism or in the culture medium surrounding said non-human organism.

[60640] A further embodiment of the present invention relates to a process for the production of 2-hydroxybehenic acid, which comprises
[60641] (a) increasing or generating one or more activities selected from the group consisting of Sec-independent protein translocase subunit in an organelle, preferably in plastids or mitochondria, especially in plastids, of a non-human organism or a part thereof, preferably a microorganism, a plant cell, a plant or a part thereof, as compared to a corresponding non-transformed wild type non-human organism or a part thereof; and
[60642] (b) growing the non-human organism or a part thereof under conditions which permit the production of 2-hydroxybehenic acid or a composition comprising 2-hydroxybehenic acid in said non-human organism or in the culture medium surrounding said non-human organism.

[60643] A further embodiment of the present invention relates to a process for the production of 2-hydroxytetracosenoic acid (preferably 2-hydroxynervonic acid), which comprises
[60644] (a) increasing or generating one or more activities selected from the group consisting of amino acid ABC transporter permease protein in an organelle, preferably in plastids or mitochondria, especially in plastids, of a non-human organism or a part thereof, preferably a microorganism, a plant cell, a plant or a part thereof, as compared to a corresponding non-transformed wild type non-human organism or a part thereof; and
[60645] (b) growing the non-human organism or a part thereof under conditions which permit the production of 2-hydroxytetracosenoic acid (preferably 2-hydroxynervonic acid) or a composition comprising 2-hydroxytetracosenoic acid (preferably 2-hydroxynervonic acid) in said non-human organism or in the culture medium surrounding said non-human organism.

[60646] A further embodiment of the present invention relates to a process for the production of cerebronic acid, which comprises
[60647] (a) increasing or generating one or more activities selected from the group consisting of metal-dependent hydrolase in an organelle, preferably in plastids or mitochondria, especially in plastids, of a non-human organism or a part thereof, preferably a microorganism, a plant cell, a plant or a part thereof, as compared to a corresponding non-transformed wild type non-human organism or a part thereof; and
[60648] (b) growing the non-human organism or a part thereof under conditions which permit the production of cerebronic acid or a composition comprising cerebronic acid in said non-human organism or in the culture medium surrounding said non-human organism.

[60649] A further embodiment of the present invention relates to a process for the production of hexadecadienoic acid, which comprises
[60650] (a) increasing or generating one or more activities selected from the group consisting of metal-dependent hydrolase in an organelle, preferably in plastids or mitochondria, especially in plastids, of a non-human organism or a part thereof, preferably a microorganism, a plant cell, a plant or a part thereof, as compared to a corresponding non-transformed wild type non-human organism or a part thereof; and
[60651] (b) growing the non-human organism or a part thereof under conditions which permit the production of hexadecadienoic acid or a composition comprising hexadecadienoic acid in said non-human organism or in the culture medium surrounding said non-human organism.

[60652] A further embodiment of the present invention relates to a process for the production of 2-hydroxybehenic acid, which comprises
[60653] (a) increasing or generating one or more activities selected from the group consisting of multiple antibiotic resistance protein in an organelle, preferably in plastids or mitochondria, especially in plastids, of a non-human organism or a part thereof, preferably a microorganism, a plant cell, a plant or a part thereof, as compared to a corresponding non-transformed wild type non-human organism or a part thereof; and
[60654] (b) growing the non-human organism or a part thereof under conditions which permit the production of 2-hydroxybehenic acid or a composition comprising 2-hydroxybehenic acid in said non-human organism or in the culture medium surrounding said non-human organism.

[60655] A further embodiment of the present invention relates to a process for the production of hexadecatrienoic acid, which comprises
[60656] (a) increasing or generating one or more activities selected from the group consisting of TTC1386-protein in an organelle, preferably in plastids or mitochondria, especially in plastids, of a non-human organism or a part thereof, preferably a microorganism, a plant cell, a plant or a part thereof, as compared to a corresponding non-transformed wild type non-human organism or a part thereof; and
[60657] (b) growing the non-human organism or a part thereof under conditions which permit the production of hexadecatrienoic acid or a composition comprising hexadecatrienoic acid in said non-human organism or in the culture medium surrounding said non-human organism.

[60658] A further embodiment of the present invention relates to a process for the production of 2-hydroxybehenic acid, which comprises
[60659] (a) increasing or generating one or more activities selected from the group consisting of homocitrate synthase in an organelle, preferably in plastids or mitochondria, especially in plastids, of a non-human organism or a part thereof, preferably a microorganism, a plant cell, a plant or a part thereof, as compared to a corresponding non-transformed wild type non-human organism or a part thereof; and
[60660] (b) growing the non-human organism or a part thereof under conditions which permit the production of 2-hydroxybehenic acid or a composition comprising 2-hydroxybehenic acid in said non-human organism or in the culture medium surrounding said non-human organism.

[60661] A further embodiment of the present invention relates to a process for the production of hexadecadienoic acid, which comprises
[60662] (a) increasing or generating one or more activities selected from the group consisting of protein kinase in an organelle, preferably in plastids or mitochondria, especially in plastids, of a non-human organism or a part thereof, preferably a microorganism, a plant cell, a plant or a part thereof, as compared to a corresponding non-transformed wild type non-human organism or a part thereof; and
[60663] (b) growing the non-human organism or a part thereof under conditions which permit the production of hexadecadienoic acid or a composition comprising hexadecadienoic acid in said non-human organism or in the culture medium surrounding said non-human organism.

[60664] A further embodiment of the present invention relates to a process for the production of hexadecatrienoic acid, which comprises
[60665] (a) increasing or generating one or more activities selected from the group consisting of protein kinase in an organelle, preferably in plastids or mitochondria, especially in plastids, of a non-human organism or a part thereof, preferably a microorganism, a plant cell, a plant or a part thereof, as compared to a corresponding non-transformed wild type non-human organism or a part thereof; and
[60666] (b) growing the non-human organism or a part thereof under conditions which permit the production of hexadecatrienoic acid or a composition comprising hexadecatrienoic acid in said non-human organism or in the culture medium surrounding said non-human organism.

[60667] A further embodiment of the present invention relates to a process for the production of hexadecadienoic acid, which comprises
[60668] (a) increasing or generating one or more activities selected from the group consisting of transcription factor in an organelle, preferably in plastids or mitochondria, especially in plastids, of a non-human organism or a part thereof, preferably a microorganism, a plant cell, a plant or a part thereof, as compared to a corresponding non-transformed wild type non-human organism or a part thereof; and
[60669] (b) growing the non-human organism or a part thereof under conditions which permit the production of hexadecadienoic acid or a composition comprising hexadecadienoic acid in said non-human organism or in the culture medium surrounding said non-human organism.

[60670] A further embodiment of the present invention relates to a process for the production of hexadecatrienoic acid, which comprises
[60671] (a) increasing or generating one or more activities selected from the group consisting of transcription factor in an organelle, preferably in plastids or mitochondria, especially in plastids, of a non-human organism or a part thereof, preferably a microorganism, a plant cell, a plant or a part thereof, as compared to a corresponding non-transformed wild type non-human organism or a part thereof; and
[60672] (b) growing the non-human organism or a part thereof under conditions which permit the production of hexadecatrienoic acid or a composition comprising hexadecatrienoic acid in said non-human organism or in the culture medium surrounding said non-human organism.

[60673] A further embodiment of the present invention relates to a process for the production of hexadecatrienoic acid, which comprises
[60674] (a) increasing or generating one or more activities selected from the group consisting of cell division control protein in an organelle, preferably in plastids or mitochondria, especially in plastids, of a non-human organism or a part thereof, preferably a microorganism, a plant cell, a plant or a part thereof, as compared to a corresponding non-transformed wild type non-human organism or a part thereof; and
[60675] (b) growing the non-human organism or a part thereof under conditions which permit the production of hexadecatrienoic acid or a composition comprising hexadecatrienoic acid in said non-human organism or in the culture medium surrounding said non-human organism.

[60676] A further embodiment of the present invention relates to a process for the production of cerebronic acid, which comprises
[60677] (a) increasing or generating one or more activities selected from the group consisting of ycl027w-protein in an organelle, preferably in plastids or mitochondria, especially in plastids, of a non-human organism or a part thereof, preferably a microorganism, a plant cell, a plant or a part thereof, as compared to a corresponding non-transformed wild type non-human organism or a part thereof; and
[60678] (b) growing the non-human organism or a part thereof under conditions which permit the production of cerebronic acid or a composition comprising cerebronic acid in said non-human organism or in the culture medium surrounding said non-human organism.

[60679] A further embodiment of the present invention relates to a process for the production of 2-hydroxytetracosenoic acid (preferably 2-hydroxynervonic acid), which comprises
[60680] (a) increasing or generating one or more activities selected from the group consisting of ycl027w-protein in an organelle, preferably in plastids or mitochondria, especially in plastids, of a non-human organism or a part thereof, preferably a microorganism, a plant cell, a plant or a part thereof, as compared to a corresponding non-transformed wild type non-human organism or a part thereof; and
[60681] (b) growing the non-human organism or a part thereof under conditions which permit the production of 2-hydroxytetracosenoic acid (preferably 2-hydroxynervonic acid) or a composition comprising 2-hydroxytetracosenoic acid (preferably 2-hydroxynervonic acid) in said non-human organism or in the culture medium surrounding said non-human organism.

[60682] A further embodiment of the present invention relates to a process for the production of 2-hydroxypalmitic acid, which comprises
[60683] (a) increasing or generating one or more activities selected from the group consisting of ycl049c-protein in an organelle, preferably in plastids or mitochondria, especially in plastids, of a non-human organism or a part thereof, preferably a microorganism, a plant cell, a plant or a part thereof, as compared to a corresponding non-transformed wild type non-human organism or a part thereof; and
[60684] (b) growing the non-human organism or a part thereof under conditions which permit the production of 2-hydroxypalmitic acid or a composition comprising 2-hydroxypalmitic acid in said non-human organism or in the culture medium surrounding said non-human organism.

[60685] A further embodiment of the present invention relates to a process for the production of oleic acid, which comprises
[60686] (a) increasing or generating one or more activities selected from the group consisting of glycerol-3-phosphate dehydrogenase in an organelle, preferably in plastids or mitochondria, especially in plastids, of a non-human organism or a part thereof, preferably a microorganism, a plant cell, a plant or a part thereof, as compared to a corresponding non-transformed wild type non-human organism or a part thereof; and
[60687] (b) growing the non-human organism or a part thereof under conditions which permit the production of oleic acid or a composition comprising oleic acid in said non-human organism or in the culture medium surrounding said non-human organism.

[60688] A further embodiment of the present invention relates to a process for the production of eicosanoic acid, which comprises
[60689] (a) increasing or generating one or more activities selected from the group consisting of isocitrate dehydrogenase in an organelle, preferably in plastids or mitochondria, especially in plastids, of a non-human organism or a part thereof, preferably a microorganism, a plant cell, a plant or a part thereof, as compared to a corresponding non-transformed wild type non-human organism or a part thereof; and
[60690] (b) growing the non-human organism or a part thereof under conditions which permit the production of eicosanoic acid or a composition comprising eicosanoic acid in said non-human organism or in the culture medium surrounding said non-human organism.

[60691] A further embodiment of the present invention relates to a process for the production of heptadecanoic acid, which comprises
[60692] (a) increasing or generating one or more activities selected from the group consisting of isocitrate dehydrogenase in an organelle, preferably in plastids or mitochondria, especially in plastids, of a non-human organism or a part thereof, preferably a microorganism, a plant cell, a plant or a part thereof, as compared to a corresponding non-transformed wild type non-human organism or a part thereof; and
[60693] (b) growing the non-human organism or a part thereof under conditions which permit the production of heptadecanoic acid or a composition comprising heptadecanoic acid in said non-human organism or in the culture medium surrounding said non-human organism.

[60694] A further embodiment of the present invention relates to a process for the production of hexadecadienoic acid, which comprises
[60695] (a) increasing or generating one or more activities selected from the group consisting of cell division control protein in an organelle, preferably in plastids or mitochondria, especially in plastids, of a non-human organism or a part thereof, preferably a microorganism, a plant cell, a plant or a part thereof, as compared to a corresponding non-transformed wild type non-human organism or a part thereof; and
[60696] (b) growing the non-human organism or a part thereof under conditions which permit the production of hexadecadienoic acid or a composition comprising hexadecadienoic acid in said non-human organism or in the culture medium surrounding said non-human organism.

[60697] A further embodiment of the present invention relates to a process for the production of hexadecatrienoic acid, which comprises
[60698] (a) increasing or generating one or more activities selected from the group consisting of cell division control protein in an organelle, preferably in plastids or mitochondria, especially in plastids, of a non-human organism or a part thereof, preferably a microorganism, a plant cell, a plant or a part thereof, as compared to a corresponding non-transformed wild type non-human organism or a part thereof; and
[60699] (b) growing the non-human organism or a part thereof under conditions which permit the production of hexadecatrienoic acid or a composition comprising hexadecatrienoic acid in said non-human organism or in the culture medium surrounding said non-human organism.

[60700] A further embodiment of the present invention relates to a process for the production of 2-hydroxybehenic acid, which comprises
[60701] (a) increasing or generating one or more activities selected from the group consisting of homocitrate synthase in an organelle, preferably in plastids or mitochondria, especially in plastids, of a non-human organism or a part thereof, preferably a microorganism, a plant cell, a plant or a part thereof, as compared to a corresponding non-transformed wild type non-human organism or a part thereof; and
[60702] (b) growing the non-human organism or a part thereof under conditions which permit the production of 2-hydroxybehenic acid or a composition comprising 2-hydroxybehenic acid in said non-human organism or in the culture medium surrounding said non-human organism.

[60703] A further embodiment of the present invention relates to a process for the production of behenic acid, which comprises
[60704] (a) increasing or generating one or more activities selected from the group consisting of phospho-2-dehydro-3-deoxyheptonate aldolase in an organelle, preferably in plastids or mitochondria, especially in plastids, of a non-human organism or a part thereof, preferably a microorganism, a plant cell, a plant or a part thereof, as compared to a corresponding non-transformed wild type non-human organism or a part thereof; and
[60705] (b) growing the non-human organism or a part thereof under conditions which permit the production of behenic acid or a composition comprising behenic acid in said non-human organism or in the culture medium surrounding said non-human organism.

[60706] A further embodiment of the present invention relates to a process for the production of 2-hydroxytetracosenoic acid (preferably 2-hydroxynervonic acid), which comprises
[60707] (a) increasing or generating one or more activities selected from the group consisting of cell wall protein in an organelle, preferably in plastids or mitochondria, especially in plastids, of a non-human organism or a part thereof, preferably a microorganism, a plant cell, a plant or a part thereof, as compared to a corresponding non-transformed wild type non-human organism or a part thereof; and
[60708] (b) growing the non-human organism or a part thereof under conditions which permit the production of 2-hydroxytetracosenoic acid (preferably 2-hydroxynervonic acid) or a composition comprising 2-hydroxytetracosenoic acid (preferably 2-hydroxynervonic acid) in said non-human organism or in the culture medium surrounding said non-human organism.

[60709] A further embodiment of the present invention relates to a process for the production of 2-hydroxytetracosenoic acid (preferably 2-hydroxynervonic acid), which comprises
[60710] (a) increasing or generating one or more activities selected from the group consisting of F-box protein in an organelle, preferably in plastids or mitochondria, especially in plastids, of a non-human organism or a part thereof, preferably a microorganism, a plant cell, a plant or a part thereof, as compared to a corresponding non-transformed wild type non-human organism or a part thereof; and
[60711] (b) growing the non-human organism or a part thereof under conditions which permit the production of 2-hydroxytetracosenoic acid (preferably 2-hydroxynervonic acid) or a composition comprising 2-hydroxytetracosenoic acid (preferably 2-hydroxynervonic acid) in said non-human organism or in the culture medium surrounding said non-human organism.

[60712] A further embodiment of the present invention relates to a process for the production of cerebronic acid, which comprises
[60713] (a) increasing or generating one or more activities selected from the group consisting of ydr273w-protein in an organelle, preferably in plastids or mitochondria, especially in plastids, of a non-human organism or a part thereof, preferably a microorganism, a plant cell, a plant or a part thereof, as compared to a corresponding non-transformed wild type non-human organism or a part thereof; and
[60714] (b) growing the non-human organism or a part thereof under conditions which permit the production of cerebronic acid or a composition comprising cerebronic acid in said non-human organism or in the culture medium surrounding said non-human organism.

[60715] A further embodiment of the present invention relates to a process for the production of 2-hydroxytetracosenoic acid (preferably 2-hydroxynervonic acid), which comprises
[60716] (a) increasing or generating one or more activities selected from the group consisting of ydr273w-protein in an organelle, preferably in plastids or mitochondria, especially in plastids, of a non-human organism or a part thereof, preferably a microorganism, a plant cell, a plant or a part thereof, as compared to a corresponding non-transformed wild type non-human organism or a part thereof; and
[60717] (b) growing the non-human organism or a part thereof under conditions which permit the production of 2-hydroxytetracosenoic acid (preferably 2-hydroxynervonic acid) or a composition comprising 2-hydroxytetracosenoic acid (preferably 2-hydroxynervonic acid) in said non-human organism or in the culture medium surrounding said non-human organism.

[60718] A further embodiment of the present invention relates to a process for the production of hexadecatrienoic acid, which comprises
[60719] (a) increasing or generating one or more activities selected from the group consisting of ydr339c-protein in an organelle, preferably in plastids or mitochondria, especially in plastids, of a non-human organism or a part thereof, preferably a microorganism, a plant cell, a plant or a part thereof, as compared to a corresponding non-transformed wild type non-human organism or a part thereof; and
[60720] (b) growing the non-human organism or a part thereof under conditions which permit the production of hexadecatrienoic acid or a composition comprising hexadecatrienoic acid in said non-human organism or in the culture medium surrounding said non-human organism.

[60721] A further embodiment of the present invention relates to a process for the production of heptadecanoic acid, which comprises
[60722] (a) increasing or generating one or more activities selected from the group consisting of aldolase in an organelle, preferably in plastids or mitochondria, especially in plastids, of a non-human organism or a part thereof, preferably a microorganism, a plant cell, a plant or a part thereof, as compared to a corresponding non-transformed wild type non-human organism or a part thereof; and
[60723] (b) growing the non-human organism or a part thereof under conditions which permit the production of heptadecanoic acid or a composition comprising heptadecanoic acid in said non-human organism or in the culture medium surrounding said non-human organism.

[60724] A further embodiment of the present invention relates to a process for the production of myristic acid, which comprises
[60725] (a) increasing or generating one or more activities selected from the group consisting of small nuclear ribonucleoprotein in an organelle, preferably in plastids or mitochondria, especially in plastids, of a non-human organism or a part thereof, preferably a microorganism, a plant cell, a plant or a part thereof, as compared to a corresponding non-transformed wild type non-human organism or a part thereof; and
[60726] (b) growing the non-human organism or a part thereof under conditions which permit the production of myristic acid or a composition comprising myristic acid in said non-human organism or in the culture medium surrounding said non-human organism.

[60727] A further embodiment of the present invention relates to a process for the production of hexadecadienoic acid, which comprises
[60728] (a) increasing or generating one or more activities selected from the group consisting of molecular chaperone portein in an organelle, preferably in plastids or mitochondria, especially in plastids, of a non-human organism or a part thereof, preferably a microorganism, a plant cell, a plant or a part thereof, as compared to a corresponding non-transformed wild type non-human organism or a part thereof; and
[60729] (b) growing the non-human organism or a part thereof under conditions which permit the production of hexadecadienoic acid or a composition comprising hexadecadienoic acid in said non-human organism or in the culture medium surrounding said non-human organism.

[60730] A further embodiment of the present invention relates to a process for the production of hexadecatrienoic acid, which comprises
[60731] (a) increasing or generating one or more activities selected from the group consisting of molecular chaperone portein in an organelle, preferably in plastids or mitochondria, especially in plastids, of a non-human organism or a part thereof, preferably a microorganism, a plant cell, a plant or a part thereof, as compared to a corresponding non-transformed wild type non-human organism or a part thereof; and
[60732] (b) growing the non-human organism or a part thereof under conditions which permit the production of hexadecatrienoic acid or a composition comprising hexadecatrienoic acid in said non-human organism or in the culture medium surrounding said non-human organism.

[60733] A further embodiment of the present invention relates to a process for the production of 2-hydroxybehenic acid, which comprises
[60734] (a) increasing or generating one or more activities selected from the group consisting of YFL019C-protein in an organelle, preferably in plastids or mitochondria, especially in plastids, of a non-human organism or a part thereof, preferably a microorganism, a plant cell, a plant or a part thereof, as compared to a corresponding non-transformed wild type non-human organism or a part thereof; and
[60735] (b) growing the non-human organism or a part thereof under conditions which permit the production of 2-hydroxybehenic acid or a composition comprising 2-hydroxybehenic acid in said non-human organism or in the culture medium surrounding said non-human organism.

[60736] A further embodiment of the present invention relates to a process for the production of 2-hydroxypalmitic acid, which comprises
[60737] (a) increasing or generating one or more activities selected from the group consisting of YFL019C-protein in an organelle, preferably in plastids or mitochondria, especially in plastids, of a non-human organism or a part thereof, preferably a microorganism, a plant cell, a plant or a part thereof, as compared to a corresponding non-transformed wild type non-human organism or a part thereof; and
[60738] (b) growing the non-human organism or a part thereof under conditions which permit the production of 2-hydroxypalmitic acid or a composition comprising 2-hydroxypalmitic acid in said non-human organism or in the culture medium surrounding said non-human organism.

[60739] A further embodiment of the present invention relates to a process for the production of hexadecadienoic acid, which comprises
[60740] (a) increasing or generating one or more activities selected from the group consisting of aminotransferase in an organelle, preferably in plastids or mitochondria, especially in plastids, of a non-human organism or a part thereof, preferably a microorganism, a plant cell, a plant or a part thereof, as compared to a corresponding non-transformed wild type non-human organism or a part thereof; and
[60741] (b) growing the non-human organism or a part thereof under conditions which permit the production of hexadecadienoic acid or a composition comprising hexadecadienoic acid in said non-human organism or in the culture medium surrounding said non-human organism.

[60742] A further embodiment of the present invention relates to a process for the production of hexadecatrienoic acid, which comprises
[60743] (a) increasing or generating one or more activities selected from the group consisting of ygl237c-protein in an organelle, preferably in plastids or mitochondria, especially in plastids, of a non-human organism or a part thereof, preferably a microorganism, a plant cell, a plant or a part thereof, as compared to a corresponding non-transformed wild type non-human organism or a part thereof; and
[60744] (b) growing the non-human organism or a part thereof under conditions which permit the production of hexadecatrienoic acid or a composition comprising hexadecatrienoic acid in said non-human organism or in the culture medium surrounding said non-human organism.

[60745] A further embodiment of the present invention relates to a process for the production of eicosanoic acid, which comprises
[60746] (a) increasing or generating one or more activities selected from the group consisting of YGR104C-protein in an organelle, preferably in plastids or mitochondria, especially in plastids, of a non-human organism or a part thereof, preferably a microorganism, a plant cell, a plant or a part thereof, as compared to a corresponding non-transformed wild type non-human organism or a part thereof; and
[60747] (b) growing the non-human organism or a part thereof under conditions which permit the production of eicosanoic acid or a composition comprising eicosanoic acid in said non-human organism or in the culture medium surrounding said non-human organism.

[60748] A further embodiment of the present invention relates to a process for the production of cerebronic acid, which comprises
[60749] (a) increasing or generating one or more activities selected from the group consisting of squalene monooxygenase in an organelle, preferably in plastids or mitochondria, especially in plastids, of a non-human organism or a part thereof, preferably a microorganism, a plant cell, a plant or a part thereof, as compared to a corresponding non-transformed wild type non-human organism or a part thereof; and
[60750] (b) growing the non-human organism or a part thereof under conditions which permit the production of cerebronic acid or a composition comprising cerebronic acid in said non-human organism or in the culture medium surrounding said non-human organism.

[60751] A further embodiment of the present invention relates to a process for the production of hexadecadienoic acid, which comprises
[60752] (a) increasing or generating one or more activities selected from the group consisting of biotin synthase in an organelle, preferably in plastids or mitochondria, especially in plastids, of a non-human organism or a part thereof, preferably a microorganism, a plant cell, a plant or a part thereof, as compared to a corresponding non-transformed wild type non-human organism or a part thereof; and
[60753] (b) growing the non-human organism or a part thereof under conditions which permit the production of hexadecadienoic acid or a composition comprising hexadecadienoic acid in said non-human organism or in the culture medium surrounding said non-human organism.

[60754] A further embodiment of the present invention relates to a process for the production of cerebronic acid, which comprises
[60755] (a) increasing or generating one or more activities selected from the group consisting of yhr033w-protein in an organelle, preferably in plastids or mitochondria, especially in plastids, of a non-human organism or a part thereof, preferably a microorganism, a plant cell, a plant or a part thereof, as compared to a corresponding non-transformed wild type non-human organism or a part thereof; and
[60756] (b) growing the non-human organism or a part thereof under conditions which permit the production of cerebronic acid or a composition comprising cerebronic acid in said non-human organism or in the culture medium surrounding said non-human organism.

[60757] A further embodiment of the present invention relates to a process for the production of cerebronic acid, which comprises
[60758] (a) increasing or generating one or more activities selected from the group consisting of DnaJ-like chaperone in an organelle, preferably in plastids or mitochondria, especially in plastids, of a non-human organism or a part thereof, preferably a microorganism, a plant cell, a plant or a part thereof, as compared to a corresponding non-transformed wild type non-human organism or a part thereof; and
[60759] (b) growing the non-human organism or a part thereof under conditions which permit the production of cerebronic acid or a composition comprising cerebronic acid in said non-human organism or in the culture medium surrounding said non-human organism.

[60760] A further embodiment of the present invention relates to a process for the production of 2-hydroxybehenic acid, which comprises
[60761] (a) increasing or generating one or more activities selected from the group consisting of YJL127W-A-protein in an organelle, preferably in plastids or mitochondria, especially in plastids, of a non-human organism or a part thereof, preferably a microorganism, a plant cell, a plant or a part thereof, as compared to a corresponding non-transformed wild type non-human organism or a part thereof; and
[60762] (b) growing the non-human organism or a part thereof under conditions which permit the production of 2-hydroxybehenic acid or a composition comprising 2-hydroxybehenic acid in said non-human organism or in the culture medium surrounding said non-human organism.

[60763] A further embodiment of the present invention relates to a process for the production of 2-hydroxytetracosenoic acid (preferably 2-hydroxynervonic acid), which comprises
[60764] (a) increasing or generating one or more activities selected from the group consisting of cystathionine gamma-synthase in an organelle, preferably in plastids or mitochondria, especially in plastids, of a non-human organism or a part thereof, preferably a microorganism, a plant cell, a plant or a part thereof, as compared to a corresponding non-transformed wild type non-human organism or a part thereof; and
[60765] (b) growing the non-human organism or a part thereof under conditions which permit the production of 2-hydroxytetracosenoic acid (preferably 2-hydroxynervonic acid) or a composition comprising 2-hydroxytetracosenoic acid (preferably 2-hydroxynervonic acid) in said non-human organism or in the culture medium surrounding said non-human organism.

[60766] A further embodiment of the present invention relates to a process for the production of 2-hydroxypalmitic acid, which comprises
[60767] (a) increasing or generating one or more activities selected from the group consisting of cystathionine gamma-synthase in an organelle, preferably in plastids or mitochondria, especially in plastids, of a non-human organism or a part thereof, preferably a microorganism, a plant cell, a plant or a part thereof, as compared to a corresponding non-transformed wild type non-human organism or a part thereof; and
[60768] (b) growing the non-human organism or a part thereof under conditions which permit the production of 2-hydroxypalmitic acid or a composition comprising 2-hydroxypalmitic acid in said non-human organism or in the culture medium surrounding said non-human organism.

[60769] A further embodiment of the present invention relates to a process for the production of 2-hydroxypalmitic acid, which comprises
[60770] (a) increasing or generating one or more activities selected from the group consisting of polygalacturonase in an organelle, preferably in plastids or mitochondria, especially in plastids, of a non-human organism or a part thereof, preferably a microorganism, a plant cell, a plant or a part thereof, as compared to a corresponding non-transformed wild type non-human organism or a part thereof; and
[60771] (b) growing the non-human organism or a part thereof under conditions which permit the production of 2-hydroxypalmitic acid or a composition comprising 2-hydroxypalmitic acid in said non-human organism or in the culture medium surrounding said non-human organism.

[60772] A further embodiment of the present invention relates to a process for the production of hexadecatrienoic acid, which comprises
[60773] (a) increasing or generating one or more activities selected from the group consisting of cyclin in an organelle, preferably in plastids or mitochondria, especially in plastids, of a non-human organism or a part thereof, preferably a microorganism, a plant cell, a plant or a part thereof, as compared to a corresponding non-transformed wild type non-human organism or a part thereof; and
[60774] (b) growing the non-human organism or a part thereof under conditions which permit the production of hexadecatrienoic acid or a composition comprising hexadecatrienoic acid in said non-human organism or in the culture medium surrounding said non-human organism.

[60775] A further embodiment of the present invention relates to a process for the production of hexadecadienoic acid, which comprises
[60776] (a) increasing or generating one or more activities selected from the group consisting of ylr326w-protein in an organelle, preferably in plastids or mitochondria, especially in plastids, of a non-human organism or a part thereof, preferably a microorganism, a plant cell, a plant or a part thereof, as compared to a corresponding non-transformed wild type non-human organism or a part thereof; and
[60777] (b) growing the non-human organism or a part thereof under conditions which permit the production of hexadecadienoic acid or a composition comprising hexadecadienoic acid in said non-human organism or in the culture medium surrounding said non-human organism.

[60778] A further embodiment of the present invention relates to a process for the production of hexadecatrienoic acid, which comprises
[60779] (a) increasing or generating one or more activities selected from the group consisting of ylr326w-protein in an organelle, preferably in plastids or mitochondria, especially in plastids, of a non-human organism or a part thereof, preferably a microorganism, a plant cell, a plant or a part thereof, as compared to a corresponding non-transformed wild type non-human organism or a part thereof; and
[60780] (b) growing the non-human organism or a part thereof under conditions which permit the production of hexadecatrienoic acid or a composition comprising hexadecatrienoic acid in said non-human organism or in the culture medium surrounding said non-human organism.

[60781] A further embodiment of the present invention relates to a process for the production of 2-hydroxybehenic acid, which comprises
[60782] (a) increasing or generating one or more activities selected from the group consisting of yml083c-protein in an organelle, preferably in plastids or mitochondria, especially in plastids, of a non-human organism or a part thereof, preferably a microorganism, a plant cell, a plant or a part thereof, as compared to a corresponding non-transformed wild type non-human organism or a part thereof; and
[60783] (b) growing the non-human organism or a part thereof under conditions which permit the production of 2-hydroxybehenic acid or a composition comprising 2-hydroxybehenic acid in said non-human organism or in the culture medium surrounding said non-human organism.

[60784] A further embodiment of the present invention relates to a process for the production of 2-hydroxytetracosenoic acid (preferably 2-hydroxynervonic acid), which comprises
[60785] (a) increasing or generating one or more activities selected from the group consisting of yml084w-protein in an organelle, preferably in plastids or mitochondria, especially in plastids, of a non-human organism or a part thereof, preferably a microorganism, a plant cell, a plant or a part thereof, as compared to a corresponding non-transformed wild type non-human organism or a part thereof; and
[60786] (b) growing the non-human organism or a part thereof under conditions which permit the production of 2-hydroxytetracosenoic acid (preferably 2-hydroxynervonic acid) or a composition comprising 2-hydroxytetracosenoic acid (preferably 2-hydroxynervonic acid) in said non-human organism or in the culture medium surrounding said non-human

[60787] A furthangenribardiment of the present invention relates to a process for the production of 2-hydroxypalmitic acid, which comprises
[60788] (a) increasing or generating one or more activities selected from the group consisting of molecular chaperone in an organelle, preferably in plastids or mitochondria, especially in plastids, of a non-human organism or a part thereof, preferably a microorganism, a plant cell, a plant or a part thereof, as compared to a corresponding non-transformed wild type non-human organism or a part thereof; and
[60789] (b) growing the non-human organism or a part thereof under conditions which permit the production of 2-hydroxypalmitic acid or a composition comprising 2-hydroxypalmitic acid in said non-human organism or in the culture medium surrounding said non-human organism.

[60790] A further embodiment of the present invention relates to a process for the production of oleic acid, which comprises
[60791] (a) increasing or generating one or more activities selected from the group consisting of phosphotransferase in an organelle, preferably in plastids or mitochondria, especially in plastids, of a non-human organism or a part thereof, preferably a microorganism, a plant cell, a plant or a part thereof, as compared to a corresponding non-transformed wild type non-human organism or a part thereof; and
[60792] (b) growing the non-human organism or a part thereof under conditions which permit the production of oleic acid or a composition comprising oleic acid in said non-human organism or in the culture medium surrounding said non-human organism.

[60793] A further embodiment of the present invention relates to a process for the production of 2-hydroxybehenic acid, which comprises
[60794] (a) increasing or generating one or more activities selected from the group consisting of ynl321w-protein in an organelle, preferably in plastids or mitochondria, especially in plastids, of a non-human organism or a part thereof, preferably a microorganism, a plant cell, a plant or a part thereof, as compared to a corresponding non-transformed wild type non-human organism or a part thereof; and
[60795] (b) growing the non-human organism or a part thereof under conditions which permit the production of 2-hydroxybehenic acid or a composition comprising 2-hydroxybehenic acid in said non-human organism or in the culture medium surrounding said non-human organism.

[60796] A further embodiment of the present invention relates to a process for the production of hexadecatrienoic acid, which comprises
[60797] (a) increasing or generating one or more activities selected from the group consisting of Elongation factor Tu in an organelle, preferably in plastids or mitochondria, especially in plastids, of a non-human organism or a part thereof, preferably a microorganism, a plant cell, a plant or a part thereof, as compared to a corresponding non-transformed wild type non-human organism or a part thereof; and
[60798] (b) growing the non-human organism or a part thereof under conditions which permit the production of hexadecatrienoic acid or a composition comprising hexadecatrienoic acid in said non-human organism or in the culture medium surrounding said non-human organism.

[60799] A further embodiment of the present invention relates to a process for the production of 2-hydroxytetracosenoic acid (preferably 2-hydroxynervonic acid), which comprises
[60800] (a) increasing or generating one or more activities selected from the group consisting of ATPase epsilon subunit in an organelle, preferably in plastids or mitochondria, especially in plastids, of a non-human organism or a part thereof, preferably a microorganism, a plant cell, a plant or a part thereof, as compared to a corresponding non-transformed wild type non-human organism or a part thereof; and
[60801] (b) growing the non-human organism or a part thereof under conditions which permit the production of 2-hydroxytetracosenoic acid (preferably 2-hydroxynervonic acid) or a composition comprising 2-hydroxytetracosenoic acid (preferably 2-hydroxynervonic acid) in said non-human organism or in the culture medium surrounding said non-human organism.

[60802] A further embodiment of the present invention relates to a process for the production of 2-hydroxypalmitic acid, which comprises
[60803] (a) increasing or generating one or more activities selected from the group consisting of phosphoadenosine phosphosulfate reductase in an organelle, preferably in plastids or mitochondria, especially in plastids, of a non-human organism or a part thereof, preferably a microorganism, a plant cell, a plant or a part thereof, as compared to a corresponding non-transformed wild type non-human organism or a part thereof; and
[60804] (b) growing the non-human organism or a part thereof under conditions which permit the production of 2-hydroxypalmitic acid or a composition comprising 2-hydroxypalmitic acid in said non-human organism or in the culture medium surrounding said non-human organism.

[60805] A further embodiment of the present invention relates to a process for the production of oleic acid, which comprises
[60806] (a) increasing or generating one or more activities selected from the group consisting of 40S ribosomal protein S17 in an organelle, preferably in plastids or mitochondria, especially in plastids, of a non-human organism or a part thereof, preferably a microorganism, a plant cell, a plant or a part thereof, as compared to a corresponding non-transformed wild type non-human organism or a part thereof; and
[60807] (b) growing the non-human organism or a part thereof under conditions which permit the production of oleic acid or a composition comprising oleic acid in said non-human organism or in the culture medium surrounding said non-human organism.

[60808] A further embodiment of the present invention relates to a process for the production of 2-hydroxybehenic acid, which comprises
[60809] (a) increasing or generating one or more activities selected from the group consisting of b3644-protein in an organelle, preferably in plastids or mitochondria, especially in plastids, of a non-human organism or a part thereof, preferably a microorganism, a plant cell, a plant or a part thereof, as compared to a corresponding non-transformed wild type non-human organism or a part thereof; and
[60810] (b) growing the non-human organism or a part thereof under conditions which permit the production of 2-hydroxybehenic acid or a composition comprising 2-hydroxybehenic acid in said non-human organism or in the culture medium surrounding said non-human organism.

[60811] A further embodiment of the present invention relates to a process for the production of behenic acid, which comprises
[60812] (a) increasing or generating one or more activities selected from the group consisting of b3644-protein in an organelle, preferably in plastids or mitochondria, especially in plastids, of a non-human organism or a part thereof, preferably a microorganism, a plant cell, a plant or a part thereof, as compared to a corresponding non-transformed wild type non-human organism or a part thereof; and
[60813] (b) growing the non-human organism or a part thereof under conditions which permit the production of behenic acid or a composition comprising behenic acid in said non-human organism or in the culture medium surrounding said non-human organism.

[60814] A further embodiment of the present invention relates to a process for the production of nervonic acid, which comprises
[60815] (a) increasing or generating one or more activities selected from the group consisting of b3644-protein in an organelle, preferably in plastids or mitochondria, especially in plastids, of a non-human organism or a part thereof, preferably a microorganism, a plant cell, a plant or a part thereof, as compared to a corresponding non-transformed wild type non-human organism or a part thereof; and
[60816] (b) growing the non-human organism or a part thereof under conditions which permit the production of nervonic acid or a composition comprising nervonic acid in said non-human organism or in the culture medium surrounding said non-human organism.

[60817] A further embodiment of the present invention relates to a process for the production of 2-hydroxybehenic acid, which comprises
[60818] (a1) increasing or generating the activity of a polypeptide comprising a polypeptide as depicted in the respective line in column 5 or 8 of Table II, application no. 12, or a homolog or fragment thereof, a consensus sequence or at least one polypeptide motif as depicted in column 8 of Table IV, application no. 12, whereby the respective line discloses in column 7 the fine chemical 2-hydroxybehenic acid; or
[60819] increasing or generating the activity of an expression product of one or more nucleic acid molecule(s) comprising a polynucleotide as depicted in the respective line in column 5 or 8 of Table I, application no. 12, preferably the coding region thereof, or a homolog or a fragment thereof, whereby the respective line discloses in column 7 the fine chemical 2-hydroxybehenic acid;
[60820] in an organelle, preferably in plastids or mitochondria, especially in plastids, in a non-human organism or a part thereof; preferably a microorganism, a plant cell, a plant or a part thereof, as compared to a corresponding non-transformed wild type non-human organism or a part thereof; or
[60821] (a2) increasing or generating the activity of a polypeptide comprising a polypeptide as depicted in the respective line in column 5 or 8 of Table II, application no. 12, or a homolog or a fragment thereof, a consensus sequence or at least one polypeptide motif as depicted in the respective line in column 8 of Table IV, application no. 12, which is joined to a transit peptide, whereby the respective line discloses in column 7 the fine chemical 2-hydroxybehenic acid; or
[60822] increasing or generating the activity of an expression product of one or more nucleic acid molecule(s) comprising a polynucleotide as depicted in the respective line in column 5 or 8 of Table I, application no. 12, preferably the coding region thereof, or a homolog or a fragment thereof, which is joined to a nucleic acid sequence encoding an organelle localization sequence, preferably a plastid or a mitochondrion localization sequence, especially a plastid localization sequence, whereby the respective line discloses in column 7 the fine chemical 2-hydroxybehenic acid;
[60823] in a non-human organism or a part thereof; preferably a microorganism, a plant cell, a plant or a part thereof, as compared to a corresponding non-transformed wild type non-human organism or a part thereof; or
[60824] (a3) increasing or generating the activity of a polypeptide comprising a polypeptide as depicted in the respective line in column 5 or 8 of Table II, application no. 12, or a homolog or a fragment thereof, a consensus sequence or at least one polypeptide motif as depicted in the respective line in column 8 of Table IV, application no. 12, whereby the respective line discloses in column 7 the fine chemical 2-hydroxybehenic acid; or
[60825] increasing or generating the activity of an expression product of one or more nucleic acid molecule(s) comprising a polynucleotide as depicted in the respective line in column 5 or 8 of Table I, application no. 12, preferably the coding region thereof, or a homolog or a fragment thereof, whereby the respective line discloses in column 7 the fine chemical 2-hydroxybehenic acid;
[60826] in an organelle, preferably in plastids or mitochondria, especially in plastids, in a non-human organism or a part thereof; preferably a microorganism, a plant cell, a plant or a part thereof, through transformation of the organelle, as compared to a corresponding non-transformed wild type non-human organism or a part thereof;
[60827] and
[60828] (b) growing the non-human organism under conditions which permit the production of 2-hydroxybehenic acid, or a composition comprising 2-hydroxybehenic acid in said non-human organism or in the culture medium surrounding said non-human organism.

[60829] A further embodiment of the present invention relates to a process for the production of 2-hydroxypalmitic acid, which comprises
[60830] (a1) increasing or generating the activity of a polypeptide comprising a polypeptide as depicted in the respective line in column 5 or 8 of Table II, application no. 12, or a homolog or fragment thereof, a consensus sequence or at least one polypeptide motif as depicted in column 8 of Table IV, application no. 12, whereby the respective line discloses in column 7 the fine chemical 2-hydroxypalmitic acid; or
[60831] increasing or generating the activity of an expression product of one or more nucleic acid molecule(s) comprising a polynucleotide as depicted in the respective line in column 5 or 8 of Table I, application no. 12, preferably the coding region thereof, or a homolog or a fragment thereof, whereby the respective line discloses in column 7 the fine chemical 2-hydroxypalmitic acid;
[60832] in an organelle, preferably in plastids or mitochondria, especially in plastids, in a non-human organism or a part thereof; preferably a microorganism, a plant cell, a plant or a part thereof, as compared to a corresponding non-transformed wild type non-human organism or a part thereof; or
[60833] (a2) increasing or generating the activity of a polypeptide comprising a polypeptide as depicted in the respective line in column 5 or 8 of Table II, application no. 12, or a homolog or a fragment thereof, a consensus sequence or at least one polypeptide motif as depicted in the respective line in column 8 of Table IV, application no. 12, which is joined to a transit peptide, whereby the respective line discloses in column 7 the fine chemical 2-hydroxypalmitic acid; or
[60834] increasing or generating the activity of an expression product of one or more nucleic acid molecule(s) comprising a polynucleotide as depicted in the respective line in column 5 or 8 of Table I, application no. 12, preferably the coding region thereof, or a homolog or a fragment thereof, which is joined to a nucleic acid sequence encoding an organelle localization sequence, preferably a plastid or a mitochondrion localization sequence, especially a plastid localization sequence, whereby the respective line discloses in column 7 the fine chemical 2-hydroxypalmitic acid;
[60835] in a non-human organism or a part thereof; preferably a microorganism, a plant cell, a plant or a part thereof, as compared to a corresponding non-transformed wild type non-human organism or a part thereof; or
[60836] (a3) increasing or generating the activity of a polypeptide comprising a polypeptide as depicted in the respective line in column 5 or 8 of Table II, application no. 12, or a homolog or a fragment thereof, a consensus sequence or at least one polypeptide motif as depicted in the respective line in column 8 of Table IV, application no. 12, whereby the respective line discloses in column 7 the fine chemical 2-hydroxypalmitic acid; or
[60837] increasing or generating the activity of an expression product of one or more nucleic acid molecule(s) comprising a polynucleotide as depicted in the respective line in column 5 or 8 of Table I, application no. 12, preferably the coding region thereof, or a homolog or a fragment thereof, whereby the respective line discloses in column 7 the fine chemical 2-hydroxypalmitic acid;
[60838] in an organelle, preferably in plastids or mitochondria, especially in plastids, in a non-human organism or a part thereof; preferably a microorganism, a plant cell, a plant or a part thereof, through transformation of the organelle, as compared to a corresponding non-transformed wild type non-human organism or a part thereof;
[60839] and
[60840] (b) growing the non-human organism under conditions which permit the production of 2-hydroxypalmitic acid, or a composition comprising 2-hydroxypalmitic acid in said non-human organism or in the culture medium surrounding said non-human organism.

[60841] A further embodiment of the present invention relates to a process for the production of 2-hydroxytetracosenoic acid (preferably 2-hydroxynervonic acid), which comprises
[60842] (a1) increasing or generating the activity of a polypeptide comprising a polypeptide as depicted in the respective line in column 5 or 8 of Table II, application no. 12, or a homolog or fragment thereof, a consensus sequence or at least one polypeptide motif as depicted in column 8 of Table IV, application no. 12, whereby the respective line discloses in column 7 the fine chemical 2-hydroxytetracosenoic acid (preferably 2-hydroxynervonic acid); or
[60843] increasing or generating the activity of an expression product of one or more nucleic acid molecule(s) comprising a polynucleotide as depicted in the respective line in column 5 or 8 of Table I, application no. 12, preferably the coding region thereof, or a homolog or a fragment thereof, whereby the respective line discloses in column 7 the fine chemical 2-hydroxytetracosenoic acid (preferably 2-hydroxynervonic acid);
[60844] in an organelle, preferably in plastids or mitochondria, especially in plastids, in a non-human organism or a part thereof; preferably a microorganism, a plant cell, a plant or a part thereof, as compared to a corresponding non-transformed wild type non-human organism or a part thereof; or
[60845] (a2) increasing or generating the activity of a polypeptide comprising a polypeptide as depicted in the respective line in column 5 or 8 of Table II, application no. 12, or a homolog or a fragment thereof, a consensus sequence or at least one polypeptide motif as depicted in the respective line in column 8 of Table IV, application no. 12, which is joined to a transit peptide, whereby the respective line discloses in column 7 the fine chemical 2-hydroxytetracosenoic acid (preferably 2-hydroxynervonic acid); or
[60846] increasing or generating the activity of an expression product of one or more nucleic acid molecule(s) comprising a polynucleotide as depicted in the respective line in column 5 or 8 of Table I, application no. 12, preferably the coding region thereof, or a homolog or a fragment thereof, which is joined to a nucleic acid sequence encoding an organelle localization sequence, preferably a plastid or a mitochondrion localization sequence, especially a plastid localization sequence, whereby the respective line discloses in column 7 the fine chemical 2-hydroxytetracosenoic acid (preferably 2-hydroxynervonic acid);
[60847] in a non-human organism or a part thereof; preferably a microorganism, a plant cell, a plant or a part thereof, as compared to a corresponding non-transformed wild type non-human organism or a part thereof; or
[60848] (a3) increasing or generating the activity of a polypeptide comprising a polypeptide as depicted in the respective line in column 5 or 8 of Table II, application no. 12, or a homolog or a fragment thereof, a consensus sequence or at least one polypeptide motif as depicted in the respective line in column 8 of Table IV, application no. 12, whereby the respective line discloses in column 7 the fine chemical 2-hydroxytetracosenoic acid (preferably 2-hydroxynervonic acid); or
[60849] increasing or generating the activity of an expression product of one or more nucleic acid molecule(s) comprising a polynucleotide as depicted in the respective line in column 5 or 8 of Table I, application no. 12, preferably the coding region thereof, or a homolog or a fragment thereof, whereby the respective line discloses in column 7 the fine chemical 2-hydroxytetracosenoic acid (preferably 2-hydroxynervonic acid);
[60850] in an organelle, preferably in plastids or mitochondria, especially in plastids, in a non-human organism or a part thereof; preferably a microorganism, a plant cell, a plant or a part thereof, through transformation of the organelle, as compared to a corresponding non-transformed wild type non-human organism or a part thereof;
[60851] and
[60852] (b) growing the non-human organism under conditions which permit the production of 2-hydroxytetracosenoic acid (preferably 2-hydroxynervonic acid), or a composition comprising 2-hydroxytetracosenoic acid (preferably 2-hydroxynervonic acid) in said non-human organism or in the culture medium surrounding said non-human organism.

[60853] A further embodiment of the present invention relates to a process for the production of behenic acid, which comprises
[60854] (a1) increasing or generating the activity of a polypeptide comprising a polypeptide as depicted in the respective line in column 5 or 8 of Table II, application no. 12, or a homolog or fragment thereof, a consensus sequence or at least one polypeptide motif as depicted in column 8 of Table IV, application no. 12, whereby the respective line discloses in column 7 the fine chemical behenic acid; or
[60855] increasing or generating the activity of an expression product of one or more nucleic acid molecule(s) comprising a polynucleotide as depicted in the respective line in column 5 or 8 of Table I, application no. 12, preferably the coding region thereof, or a homolog or a fragment thereof, whereby the respective line discloses in column 7 the fine chemical behenic acid;
[60856] in an organelle, preferably in plastids or mitochondria, especially in plastids, in a non-human organism or a part thereof; preferably a microorganism, a plant cell, a plant or a part thereof, as compared to a corresponding non-transformed wild type non-human organism or a part thereof; or
[60857] (a2) increasing or generating the activity of a polypeptide comprising a polypeptide as depicted in the respective line in column 5 or 8 of Table II, application no. 12, or a homolog or a fragment thereof, a consensus sequence or at least one polypeptide motif as depicted in the respective line in column 8 of Table IV, application no. 12, which is joined to a transit peptide, whereby the respective line discloses in column 7 the fine chemical behenic acid; or
[60858] increasing or generating the activity of an expression product of one or more nucleic acid molecule(s) comprising a polynucleotide as depicted in the respective line in column 5 or 8 of Table I, application no. 12, preferably the coding region thereof, or a homolog or a fragment thereof, which is joined to a nucleic acid sequence encoding an organelle localization sequence, preferably a plastid or a mitochondrion localization sequence, especially a plastid localization sequence, whereby the respective line discloses in column 7 the fine chemical behenic acid;
[60859] in a non-human organism or a part thereof; preferably a microorganism, a plant cell, a plant or a part thereof, as compared to a corresponding non-transformed wild type non-human organism or a part thereof; or
[60860] (a3) increasing or generating the activity of a polypeptide comprising a polypeptide as depicted in the respective line in column 5 or 8 of Table II, application no. 12, or a homolog or a fragment thereof, a consensus sequence or at least one polypeptide motif as depicted in the respective line in column 8 of Table IV, application no. 12, whereby the respective line discloses in column 7 the fine chemical behenic acid; or
[60861] increasing or generating the activity of an expression product of one or more nucleic acid molecule(s) comprising a polynucleotide as depicted in the respective line in column 5 or 8 of Table I, application no. 12, preferably the coding region thereof, or a homolog or a fragment thereof, whereby the respective line discloses in column 7 the fine chemical behenic acid;
[60862] in an organelle, preferably in plastids or mitochondria, especially in plastids, in a non-human organism or a part thereof; preferably a microorganism, a plant cell, a plant or a part thereof, through transformation of the organelle, as compared to a corresponding non-transformed wild type non-human organism or a part thereof;
[60863] and
[60864] (b) growing the non-human organism under conditions which permit the production of behenic acid, or a composition comprising behenic acid in said non-human organism or in the culture medium surrounding said non-human organism.

[60865] A further embodiment of the present invention relates to a process for the production of cerebronic acid, which comprises
[60866] (a1) increasing or generating the activity of a polypeptide comprising a polypeptide as depicted in the respective line in column 5 or 8 of Table II, application no. 12, or a homolog or fragment thereof, a consensus sequence or at least one polypeptide motif as depicted in column 8 of Table IV, application no. 12, whereby the respective line discloses in column 7 the fine chemical cerebronic acid; or
[60867] increasing or generating the activity of an expression product of one or more nucleic acid molecule(s) comprising a polynucleotide as depicted in the respective line in column 5 or 8 of Table I, application no. 12, preferably the coding region thereof, or a homolog or a fragment thereof, whereby the respective line discloses in column 7 the fine chemical cerebronic acid;
[60868] in an organelle, preferably in plastids or mitochondria, especially in plastids, in a non-human organism or a part thereof; preferably a microorganism, a plant cell, a plant or a part thereof, as compared to a corresponding non-transformed wild type non-human organism or a part thereof; or
[60869] (a2) increasing or generating the activity of a polypeptide comprising a polypeptide as depicted in the respective line in column 5 or 8 of Table II, application no. 12, or a homolog or a fragment thereof, a consensus sequence or at least one polypeptide motif as depicted in the respective line in column 8 of Table IV, application no. 12, which is joined to a transit peptide, whereby the respective line discloses in column 7 the fine chemical cerebronic acid; or
[60870] increasing or generating the activity of an expression product of one or more nucleic acid molecule(s) comprising a polynucleotide as depicted in the respective line in column 5 or 8 of Table I, application no. 12, preferably the coding region thereof, or a homolog or a fragment thereof, which is joined to a nucleic acid sequence encoding an organelle localization sequence, preferably a plastid or a mitochondrion localization sequence, especially a plastid localization sequence, whereby the respective line discloses in column 7 the fine chemical cerebronic acid;
[60871] in a non-human organism or a part thereof; preferably a microorganism, a plant cell, a plant or a part thereof, as compared to a corresponding non-transformed wild type non-human organism or a part thereof; or
[60872] (a3) increasing or generating the activity of a polypeptide comprising a polypeptide as depicted in the respective line in column 5 or 8 of Table II, application no. 12, or a homolog or a fragment thereof, a consensus sequence or at least one polypeptide motif as depicted in the respective line in column 8 of Table IV, application no. 12, whereby the respective line discloses in column 7 the fine chemical cerebronic acid; or
[60873] increasing or generating the activity of an expression product of one or more nucleic acid molecule(s) comprising a polynucleotide as depicted in the respective line in column 5 or 8 of Table I, application no. 12, preferably the coding region thereof, or a homolog or a fragment thereof, whereby the respective line discloses in column 7 the fine chemical cerebronic acid;
[60874] in an organelle, preferably in plastids or mitochondria, especially in plastids, in a non-human organism or a part thereof; preferably a microorganism, a plant cell, a plant or a part thereof, through transformation of the organelle, as compared to a corresponding non-transformed wild type non-human organism or a part thereof;
[60875] and
[60876] (b) growing the non-human organism under conditions which permit the production of cerebronic acid, or a composition comprising cerebronic acid in said non-human organism or in the culture medium surrounding said non-human organism.

[60877] A further embodiment of the present invention relates to a process for the production of eicosanoic acid, which comprises
[60878] (a1) increasing or generating the activity of a polypeptide comprising a polypeptide as depicted in the respective line in column 5 or 8 of Table II, application no. 12, or a homolog or fragment thereof, a consensus sequence or at least one polypeptide motif as depicted in column 8 of Table IV, application no. 12, whereby the respective line discloses in column 7 the fine chemical eicosanoic acid; or
[60879] increasing or generating the activity of an expression product of one or more nucleic acid molecule(s) comprising a polynucleotide as depicted in the respective line in column 5 or 8 of Table I, application no. 12, preferably the coding region thereof, or a homolog or a fragment thereof, whereby the respective line discloses in column 7 the fine chemical eicosanoic acid;
[60880] in an organelle, preferably in plastids or mitochondria, especially in plastids, in a non-human organism or a part thereof; preferably a microorganism, a plant cell, a plant or a part thereof, as compared to a corresponding non-transformed wild type non-human organism or a part thereof; or
[60881] (a2) increasing or generating the activity of a polypeptide comprising a polypeptide as depicted in the respective line in column 5 or 8 of Table II, application no. 12, or a homolog or a fragment thereof, a consensus sequence or at least one polypeptide motif as depicted in the respective line in column 8 of Table IV, application no. 12, which is joined to a transit peptide, whereby the respective line discloses in column 7 the fine chemical eicosanoic acid; or
[60882] increasing or generating the activity of an expression product of one or more nucleic acid molecule(s) comprising a polynucleotide as depicted in the respective line in column 5 or 8 of Table I, application no. 12, preferably the coding region thereof, or a homolog or a fragment thereof, which is joined to a nucleic acid sequence encoding an organelle localization sequence, preferably a plastid or a mitochondrion localization sequence, especially a plastid localization sequence, whereby the respective line discloses in column 7 the fine chemical eicosanoic acid;
[60883] in a non-human organism or a part thereof; preferably a microorganism, a plant cell, a plant or a part thereof, as compared to a corresponding non-transformed wild type non-human organism or a part thereof; or
[60884] (a3) increasing or generating the activity of a polypeptide comprising a polypeptide as depicted in the respective line in column 5 or 8 of Table II, application no. 12, or a homolog or a fragment thereof, a consensus sequence or at least one polypeptide motif as depicted in the respective line in column 8 of Table IV, application no. 12, whereby the respective line discloses in column 7 the fine chemical eicosanoic acid; or
[60885] increasing or generating the activity of an expression product of one or more nucleic acid molecule(s) comprising a polynucleotide as depicted in the respective line in column 5 or 8 of Table I, application no. 12, preferably the coding region thereof, or a homolog or a fragment thereof, whereby the respective line discloses in column 7 the fine chemical eicosanoic acid;
[60886] in an organelle, preferably in plastids or mitochondria, especially in plastids, in a non-human organism or a part thereof; preferably a microorganism, a plant cell, a plant or a part thereof, through transformation of the organelle, as compared to a corresponding non-transformed wild type non-human organism or a part thereof;
[60887] and
[60888] (b) growing the non-human organism under conditions which permit the production of eicosanoic acid, or a composition comprising eicosanoic acid in said non-human organism or in the culture medium surrounding said non-human organism.

[60889] A further embodiment of the present invention relates to a process for the production of heptadecanoic acid, which comprises
[60890] (a1) increasing or generating the activity of a polypeptide comprising a polypeptide as depicted in the respective line in column 5 or 8 of Table II, application no. 12, or a homolog or fragment thereof, a consensus sequence or at least one polypeptide motif as depicted in column 8 of Table IV, application no. 12, whereby the respective line discloses in column 7 the fine chemical heptadecanoic acid; or
[60891] increasing or generating the activity of an expression product of one or more nucleic acid molecule(s) comprising a polynucleotide as depicted in the respective line in column 5 or 8 of Table I, application no. 12, preferably the coding region thereof, or a homolog or a fragment thereof, whereby the respective line discloses in column 7 the fine chemical heptadecanoic acid;
[60892] in an organelle, preferably in plastids or mitochondria, especially in plastids, in a non-human organism or a part thereof; preferably a microorganism, a plant cell, a plant or a part thereof, as compared to a corresponding non-transformed wild type non-human organism or a part thereof; or
[60893] (a2) increasing or generating the activity of a polypeptide comprising a polypeptide as depicted in the respective line in column 5 or 8 of Table II, application no. 12, or a homolog or a fragment thereof, a consensus sequence or at least one polypeptide motif as depicted in the respective line in column 8 of Table IV, application no. 12, which is joined to a transit peptide, whereby the respective line discloses in column 7 the fine chemical heptadecanoic acid; or
[60894] increasing or generating the activity of an expression product of one or more nucleic acid molecule(s) comprising a polynucleotide as depicted in the respective line in column 5 or 8 of Table I, application no. 12, preferably the coding region thereof, or a homolog or a fragment thereof, which is joined to a nucleic acid sequence encoding an organelle localization sequence, preferably a plastid or a mitochondrion localization sequence, especially a plastid localization sequence, whereby the respective line discloses in column 7 the fine chemical heptadecanoic acid;
[60895] in a non-human organism or a part thereof; preferably a microorganism, a plant cell, a plant or a part thereof, as compared to a corresponding non-transformed wild type non-human organism or a part thereof; or
[60896] (a3) increasing or generating the activity of a polypeptide comprising a polypeptide as depicted in the respective line in column 5 or 8 of Table II, application no. 12, or a homolog or a fragment thereof, a consensus sequence or at least one polypeptide motif as depicted in the respective line in column 8 of Table IV, application no. 12, whereby the respective line discloses in column 7 the fine chemical heptadecanoic acid; or
[60897] increasing or generating the activity of an expression product of one or more nucleic acid molecule(s) comprising a polynucleotide as depicted in the respective line in column 5 or 8 of Table I, application no. 12, preferably the coding region thereof, or a homolog or a fragment thereof, whereby the respective line discloses in column 7 the fine chemical heptadecanoic acid;
[60898] in an organelle, preferably in plastids or mitochondria, especially in plastids, in a non-human organism or a part thereof; preferably a microorganism, a plant cell, a plant or a part thereof, through transformation of the organelle, as compared to a corresponding non-transformed wild type non-human organism or a part thereof;
[60899] and
[60900] (b) growing the non-human organism under conditions which permit the production of heptadecanoic acid, or a composition comprising heptadecanoic acid in said non-human organism or in the culture medium surrounding said non-human organism.

[60901] A further embodiment of the present invention relates to a process for the production of hexadecadienoic acid, which comprises
[60902] (a1) increasing or generating the activity of a polypeptide comprising a polypeptide as depicted in the respective line in column 5 or 8 of Table II, application no. 12, or a homolog or fragment thereof, a consensus sequence or at least one polypeptide motif as depicted in column 8 of Table IV, application no. 12, whereby the respective line discloses in column 7 the fine chemical hexadecadienoic acid; or
[60903] increasing or generating the activity of an expression product of one or more nucleic acid molecule(s) comprising a polynucleotide as depicted in the respective line in column 5 or 8 of Table I, application no. 12, preferably the coding region thereof, or a homolog or a fragment thereof, whereby the respective line discloses in column 7 the fine chemical hexadecadienoic acid;
[60904] in an organelle, preferably in plastids or mitochondria, especially in plastids, in a non-human organism or a part thereof; preferably a microorganism, a plant cell, a plant or a part thereof, as compared to a corresponding non-transformed wild type non-human organism or a part thereof; or
[60905] (a2) increasing or generating the activity of a polypeptide comprising a polypeptide as depicted in the respective line in column 5 or 8 of Table II, application no. 12, or a homolog or a fragment thereof, a consensus sequence or at least one polypeptide motif as depicted in the respective line in column 8 of Table IV, application no. 12, which is joined to a transit peptide, whereby the respective line discloses in column 7 the fine chemical hexadecadienoic acid; or
[60906] increasing or generating the activity of an expression product of one or more nucleic acid molecule(s) comprising a polynucleotide as depicted in the respective line in column 5 or 8 of Table I, application no. 12, preferably the coding region thereof, or a homolog or a fragment thereof, which is joined to a nucleic acid sequence encoding an organelle localization sequence, preferably a plastid or a mitochondrion localization sequence, especially a plastid localization sequence, whereby the respective line discloses in column 7 the fine chemical hexadecadienoic acid;
[60907] in a non-human organism or a part thereof; preferably a microorganism, a plant cell, a plant or a part thereof, as compared to a corresponding non-transformed wild type non-human organism or a part thereof; or
[60908] (a3) increasing or generating the activity of a polypeptide comprising a polypeptide as depicted in the respective line in column 5 or 8 of Table II, application no. 12, or a homolog or a fragment thereof, a consensus sequence or at least one polypeptide motif as depicted in the respective line in column 8 of Table IV, application no. 12, whereby the respective line discloses in column 7 the fine chemical hexadecadienoic acid; or
[60909] increasing or generating the activity of an expression product of one or more nucleic acid molecule(s) comprising a polynucleotide as depicted in the respective line in column 5 or 8 of Table I, application no. 12, preferably the coding region thereof, or a homolog or a fragment thereof, whereby the respective line discloses in column 7 the fine chemical hexadecadienoic acid;
[60910] in an organelle, preferably in plastids or mitochondria, especially in plastids, in a non-human organism or a part thereof; preferably a microorganism, a plant cell, a plant or a part thereof, through transformation of the organelle, as compared to a corresponding non-transformed wild type non-human organism or a part thereof;
[60911] and
[60912] (b) growing the non-human organism under conditions which permit the production of hexadecadienoic acid, or a composition comprising hexadecadienoic acid in said non-human organism or in the culture medium surrounding said non-human organism.

[60913] A further embodiment of the present invention relates to a process for the production of hexadecatrienoic acid, which comprises
[60914] (a1) increasing or generating the activity of a polypeptide comprising a polypeptide as depicted in the respective line in column 5 or 8 of Table II, application no. 12, or a homolog or fragment thereof, a consensus sequence or at least one polypeptide motif as depicted in column 8 of Table IV, application no. 12, whereby the respective line discloses
[60915] in column 7 the fine chemical hexadecatrienoic acid; or increasing or generating the activity of an expression product of one or more nucleic acid molecule(s) comprising a polynucleotide as depicted in the respective line in column 5 or 8 of Table I, application no. 12, preferably the coding region thereof, or a homolog or a fragment thereof, whereby the respective line discloses in column 7 the fine chemical hexadecatrienoic acid;
[60916] in an organelle, preferably in plastids or mitochondria, especially in plastids, in a non-human organism or a part thereof; preferably a microorganism, a plant cell, a plant or a part thereof, as compared to a corresponding non-transformed wild type non-human organism or a part thereof; or
[60917] (a2) increasing or generating the activity of a polypeptide comprising a polypeptide as depicted in the respective line in column 5 or 8 of Table II, application no. 12, or a homolog or a fragment thereof, a consensus sequence or at least one polypeptide motif as depicted in the respective line in column 8 of Table IV, application no. 12, which is joined to a transit peptide, whereby the respective line discloses in column 7 the fine chemical hexadecatrienoic acid; or
[60918] increasing or generating the activity of an expression product of one or more nucleic acid molecule(s) comprising a polynucleotide as depicted in the respective line in column 5 or 8 of Table I, application no. 12, preferably the coding region thereof, or a homolog or a fragment thereof, which is joined to a nucleic acid sequence encoding an organelle localization sequence, preferably a plastid or a mitochondrion localization sequence, especially a plastid localization sequence, whereby the respective line discloses in column 7 the fine chemical hexadecatrienoic acid;
[60919] in a non-human organism or a part thereof; preferably a microorganism, a plant cell, a plant or a part thereof, as compared to a corresponding non-transformed wild type non-human organism or a part thereof; or
[60920] (a3) increasing or generating the activity of a polypeptide comprising a polypeptide as depicted in the respective line in column 5 or 8 of Table II, application no. 12, or a homolog or a fragment thereof, a consensus sequence or at least one polypeptide motif as depicted in the respective line in column 8 of Table IV, application no. 12, whereby the respective line discloses in column 7 the fine chemical hexadecatrienoic acid; or
[60921] increasing or generating the activity of an expression product of one or more nucleic acid molecule(s) comprising a polynucleotide as depicted in the respective line in column 5 or 8 of Table I, application no. 12, preferably the coding region thereof, or a homolog or a fragment thereof, whereby the respective line discloses in column 7 the fine chemical hexadecatrienoic acid;
[60922] in an organelle, preferably in plastids or mitochondria, especially in plastids, in a non-human organism or a part thereof; preferably a microorganism, a plant cell, a plant or a part thereof, through transformation of the organelle, as compared to a corresponding non-transformed wild type non-human organism or a part thereof;
[60923] and
[60924] (b) growing the non-human organism under conditions which permit the production of hexadecatrienoic acid, or a composition comprising hexadecatrienoic acid in said non-human organism or in the culture medium surrounding said non-human organism.

[60925] A further embodiment of the present invention relates to a process for the production of lauric acid, which comprises
[60926] (a1) increasing or generating the activity of a polypeptide comprising a polypeptide as depicted in the respective line in column 5 or 8 of Table II, application no. 12, or a homolog or fragment thereof, a consensus sequence or at least one polypeptide motif as depicted in column 8 of Table IV, application no. 12, whereby the respective line discloses in column 7 the fine chemical lauric acid; or
[60927] increasing or generating the activity of an expression product of one or more nucleic acid molecule(s) comprising a polynucleotide as depicted in the respective line in column 5 or 8 of Table I, application no. 12, preferably the coding region thereof, or a homolog or a fragment thereof, whereby the respective line discloses in column 7 the fine chemical lauric acid;
[60928] in an organelle, preferably in plastids or mitochondria, especially in plastids, in a non-human organism or a part thereof; preferably a microorganism, a plant cell, a plant or a part thereof, as compared to a corresponding non-transformed wild type non-human organism or a part thereof; or
[60929] (a2) increasing or generating the activity of a polypeptide comprising a polypeptide as depicted in the respective line in column 5 or 8 of Table II, application no. 12, or a homolog or a fragment thereof, a consensus sequence or at least one polypeptide motif as depicted in the respective line in column 8 of Table IV, application no. 12, which is joined to a transit peptide, whereby the respective line discloses in column 7 the fine chemical lauric acid; or
[60930] increasing or generating the activity of an expression product of one or more nucleic acid molecule(s) comprising a polynucleotide as depicted in the respective line in column 5 or 8 of Table I, application no. 12, preferably the coding region thereof, or a homolog or a fragment thereof, which is joined to a nucleic acid sequence encoding an organelle localization sequence, preferably a plastid or a mitochondrion localization sequence, especially a plastid localization sequence, whereby the respective line discloses in column 7 the fine chemical lauric acid;
[60931] in a non-human organism or a part thereof; preferably a microorganism, a plant cell, a plant or a part thereof, as compared to a corresponding non-transformed wild type non-human organism or a part thereof; or
[60932] (a3) increasing or generating the activity of a polypeptide comprising a polypeptide as depicted in the respective line in column 5 or 8 of Table II, application no. 12, or a homolog or a fragment thereof, a consensus sequence or at least one polypeptide motif as depicted in the respective line in column 8 of Table IV, application no. 12, whereby the respective line discloses in column 7 the fine chemical lauric acid; or
[60933] increasing or generating the activity of an expression product of one or more nucleic acid molecule(s) comprising a polynucleotide as depicted in the respective line in column 5 or 8 of Table I, application no. 12, preferably the coding region thereof, or a homolog or a fragment thereof, whereby the respective line discloses in column 7 the fine chemical lauric acid;
[60934] in an organelle, preferably in plastids or mitochondria, especially in plastids, in a non-human organism or a part thereof; preferably a microorganism, a plant cell, a plant or a part thereof, through transformation of the organelle, as compared to a corresponding non-transformed wild type non-human organism or a part thereof;
[60935] and
[60936] (b) growing the non-human organism under conditions which permit the production of lauric acid, or a composition comprising lauric acid in said non-human organism or in the culture medium surrounding said non-human organism.

[60937] A further embodiment of the present invention relates to a process for the production of myristic acid, which comprises
[60938] (a1) increasing or generating the activity of a polypeptide comprising a polypeptide as depicted in the respective line in column 5 or 8 of Table II, application no. 12, or a homolog or fragment thereof, a consensus sequence or at least one polypeptide motif as depicted in column 8 of Table IV, application no. 12, whereby the respective line discloses in column 7 the fine chemical myristic acid; or
[60939] increasing or generating the activity of an expression product of one or more nucleic acid molecule(s) comprising a polynucleotide as depicted in the respective line in column 5 or 8 of Table I, application no. 12, preferably the coding region thereof, or a homolog or a fragment thereof, whereby the respective line discloses in column 7 the fine chemical myristic acid;
[60940] in an organelle, preferably in plastids or mitochondria, especially in plastids, in a non-human organism or a part thereof; preferably a microorganism, a plant cell, a plant or a part thereof, as compared to a corresponding non-transformed wild type non-human organism or a part thereof; or
[60941] (a2) increasing or generating the activity of a polypeptide comprising a polypeptide as depicted in the respective line in column 5 or 8 of Table II, application no. 12, or a homolog or a fragment thereof, a consensus sequence or at least one polypeptide motif as depicted in the respective line in column 8 of Table IV, application no. 12, which is joined to a transit peptide, whereby the respective line discloses in column 7 the fine chemical myristic acid; or
[60942] increasing or generating the activity of an expression product of one or more nucleic acid molecule(s) comprising a polynucleotide as depicted in the respective line in column 5 or 8 of Table I, application no. 12, preferably the coding region thereof, or a homolog or a fragment thereof, which is joined to a nucleic acid sequence encoding an organelle localization sequence, preferably a plastid or a mitochondrion localization sequence, especially a plastid localization sequence, whereby the respective line discloses in column 7 the fine chemical myristic acid;
[60943] in a non-human organism or a part thereof; preferably a microorganism, a plant cell, a plant or a part thereof, as compared to a corresponding non-transformed wild type non-human organism or a part thereof; or
[60944] (a3) increasing or generating the activity of a polypeptide comprising a polypeptide as depicted in the respective line in column 5 or 8 of Table II, application no. 12, or a homolog or a fragment thereof, a consensus sequence or at least one polypeptide motif as depicted in the respective line in column 8 of Table IV, application no. 12, whereby the respective line discloses in column 7 the fine chemical myristic acid; or
[60945] increasing or generating the activity of an expression product of one or more nucleic acid molecule(s) comprising a polynucleotide as depicted in the respective line in column 5 or 8 of Table I, application no. 12, preferably the coding region thereof, or a homolog or a fragment thereof, whereby the respective line discloses in column 7 the fine chemical myristic acid;
[60946] in an organelle, preferably in plastids or mitochondria, especially in plastids, in a non-human organism or a part thereof; preferably a microorganism, a plant cell, a plant or a part thereof, through transformation of the organelle, as compared to a corresponding non-transformed wild type non-human organism or a part thereof;
[60947] and
[60948] (b) growing the non-human organism under conditions which permit the production of myristic acid, or a composition comprising myristic acid in said non-human organism or in the culture medium surrounding said non-human organism.

[60949] A further embodiment of the present invention relates to a process for the production of nervonic acid, which comprises
[60950] (a1) increasing or generating the activity of a polypeptide comprising a polypeptide as depicted in the respective line in column 5 or 8 of Table II, application no. 12, or a homolog or fragment thereof, a consensus sequence or at least one polypeptide motif as depicted in column 8 of Table IV, application no. 12, whereby the respective line discloses in column 7 the fine chemical nervonic acid; or
[60951] increasing or generating the activity of an expression product of one or more nucleic acid molecule(s) comprising a polynucleotide as depicted in the respective line in column 5 or 8 of Table I, application no. 12, preferably the coding region thereof, or a homolog or a fragment thereof, whereby the respective line discloses in column 7 the fine chemical nervonic acid;
[60952] in an organelle, preferably in plastids or mitochondria, especially in plastids, in a non-human organism or a part thereof; preferably a microorganism, a plant cell, a plant or a part thereof, as compared to a corresponding non-transformed wild type non-human organism or a part thereof; or
[60953] (a2) increasing or generating the activity of a polypeptide comprising a polypeptide as depicted in the respective line in column 5 or 8 of Table II, application no. 12, or a homolog or a fragment thereof, a consensus sequence or at least one polypeptide motif as depicted in the respective line in column 8 of Table IV, application no. 12, which is joined to a transit peptide, whereby the respective line discloses in column 7 the fine chemical nervonic acid; or
[60954] increasing or generating the activity of an expression product of one or more nucleic acid molecule(s) comprising a polynucleotide as depicted in the respective line in column 5 or 8 of Table I, application no. 12, preferably the coding region thereof, or a homolog or a fragment thereof, which is joined to a nucleic acid sequence encoding an organelle localization sequence, preferably a plastid or a mitochondrion localization sequence, especially a plastid localization sequence, whereby the respective line discloses in column 7 the fine chemical nervonic acid;
[60955] in a non-human organism or a part thereof; preferably a microorganism, a plant cell, a plant or a part thereof, as compared to a corresponding non-transformed wild type non-human organism or a part thereof; or
[60956] (a3) increasing or generating the activity of a polypeptide comprising a polypeptide as depicted in the respective line in column 5 or 8 of Table II, application no. 12, or a homolog or a fragment thereof, a consensus sequence or at least one polypeptide motif as depicted in the respective line in column 8 of Table IV, application no. 12, whereby the respective line discloses in column 7 the fine chemical nervonic acid; or
[60957] increasing or generating the activity of an expression product of one or more nucleic acid molecule(s) comprising a polynucleotide as depicted in the respective line in column 5 or 8 of Table I, application no. 12, preferably the coding region thereof, or a homolog or a fragment thereof, whereby the respective line discloses in column 7 the fine chemical nervonic acid;
[60958] in an organelle, preferably in plastids or mitochondria, especially in plastids, in a non-human organism or a part thereof; preferably a microorganism, a plant cell, a plant or a part thereof, through transformation of the organelle, as compared to a corresponding non-transformed wild type non-human organism or a part thereof;
[60959] and
[60960] (b) growing the non-human organism under conditions which permit the production of nervonic acid, or a composition comprising nervonic acid in said non-human organism or in the culture medium surrounding said non-human organism.

[60961] A further embodiment of the present invention relates to a process for the production of oleic acid, which comprises
[60962] (a1) increasing or generating the activity of a polypeptide comprising a polypeptide as depicted in the respective line in column 5 or 8 of Table II, application no. 12, or a homolog or fragment thereof, a consensus sequence or at least one polypeptide motif as depicted in column 8 of Table IV, application no. 12, whereby the respective line discloses in column 7 the fine chemical oleic acid; or
[60963] increasing or generating the activity of an expression product of one or more nucleic acid molecule(s) comprising a polynucleotide as depicted in the respective line in column 5 or 8 of Table I, application no. 12, preferably the coding region thereof, or a homolog or a fragment thereof, whereby the respective line discloses in column 7 the fine chemical oleic acid;
[60964] in an organelle, preferably in plastids or mitochondria, especially in plastids, in a non-human organism or a part thereof; preferably a microorganism, a plant cell, a plant or a part thereof, as compared to a corresponding non-transformed wild type non-human organism or a part thereof; or
[60965] (a2) increasing or generating the activity of a polypeptide comprising a polypeptide as depicted in the respective line in column 5 or 8 of Table II, application no. 12, or a homolog or a fragment thereof, a consensus sequence or at least one polypeptide motif as depicted in the respective line in column 8 of Table IV, application no. 12, which is joined to a transit peptide, whereby the respective line discloses in column 7 the fine chemical oleic acid; or
[60966] increasing or generating the activity of an expression product of one or more nucleic acid molecule(s) comprising a polynucleotide as depicted in the respective line in column 5 or 8 of Table I, application no. 12, preferably the coding region thereof, or a homolog or a fragment thereof, which is joined to a nucleic acid sequence encoding an organelle localization sequence, preferably a plastid or a mitochondrion localization sequence, especially a plastid localization sequence, whereby the respective line discloses in column 7 the fine chemical oleic acid;
[60967] in a non-human organism or a part thereof; preferably a microorganism, a plant cell, a plant or a part thereof, as compared to a corresponding non-transformed wild type non-human organism or a part thereof; or
[60968] (a3) increasing or generating the activity of a polypeptide comprising a polypeptide as depicted in the respective line in column 5 or 8 of Table II, application no. 12, or a homolog or a fragment thereof, a consensus sequence or at least one polypeptide motif as depicted in the respective line in column 8 of Table IV, application no. 12, whereby the respective line discloses in column 7 the fine chemical oleic acid; or
[60969] increasing or generating the activity of an expression product of one or more nucleic acid molecule(s) comprising a polynucleotide as depicted in the respective line in column 5 or 8 of Table I, application no. 12, preferably the coding region thereof, or a homolog or a fragment thereof, whereby the respective line discloses in column 7 the fine chemical oleic acid;
[60970] in an organelle, preferably in plastids or mitochondria, especially in plastids, in a non-human organism or a part thereof; preferably a microorganism, a plant cell, a plant or a part thereof, through transformation of the organelle, as compared to a corresponding non-transformed wild type non-human organism or a part thereof;
[60971] and
[60972] (b) growing the non-human organism under conditions which permit the production of oleic acid, or a composition comprising oleic acid in said non-human organism or in the culture medium surrounding said non-human organism.

[60973] Accordingly, the present invention relates to a process for the production of cerebronic acid, which comprises
[60974] (a) increasing or generating the activity of a chlorophyllase in the cytosol of a cell of a non-human organism or a part thereof, preferably a microorganism, a plant cell, a plant or a part thereof, as compared to a corresponding non-transformed wild type non-human organism or a part thereof; and
[60975] (b) growing the non-human organism or a part thereof under conditions which permit the production of cerebronic acid or a composition comprising cerebronic acid in said non-human organism or in the culture medium surrounding said non-human organism.

[60976] Accordingly, the present invention relates to a process for the production of 2-hydroxytetracosenoic acid (preferably 2-hydroxynervonic acid), which comprises
[60977] (a) increasing or generating the activity of a chlorophyllase in the cytosol of a cell of a non-human organism or a part thereof, preferably a microorganism, a plant cell, a plant or a part thereof, as compared to a corresponding non-transformed wild type non-human organism or a part thereof; and
[60978] (b) growing the non-human organism or a part thereof under conditions which permit the production of 2-hydroxytetracosenoic acid (preferably 2-hydroxynervonic acid) or a composition comprising 2-hydroxytetracosenoic acid (preferably 2-hydroxynervonic acid) in said non-human organism or in the culture medium surrounding said non-human organism.

[60979] Accordingly, the present invention relates to a process for the production of hexadecatrienoic acid, which comprises
[60980] (a) increasing or generating the activity of a transcription factor in the cytosol of a cell of a non-human organism or a part thereof, preferably a microorganism, a plant cell, a plant or a part thereof, as compared to a corresponding non-transformed wild type non-human organism or a part thereof; and
[60981] (b) growing the non-human organism or a part thereof under conditions which permit the production of hexadecatrienoic acid or a composition comprising hexadecatrienoic acid in said non-human organism or in the culture medium surrounding said non-human organism.

[60982] Accordingly, the present invention relates to a process for the production of cerebronic acid, which comprises
[60983] (a) increasing or generating the activity of a protein phosphatase in the cytosol of a cell of a non-human organism or a part thereof, preferably a microorganism, a plant cell, a plant or a part thereof, as compared to a corresponding non-transformed wild type non-human organism or a part thereof; and
[60984] (b) growing the non-human organism or a part thereof under conditions which permit the production of cerebronic acid or a composition comprising cerebronic acid in said non-human organism or in the culture medium surrounding said non-human organism.

[60985] Accordingly, the present invention relates to a process for the production of hexadecatrienoic acid, which comprises
[60986] (a) increasing or generating the activity of a protein phosphatase in the cytosol of a cell of a non-human organism or a part thereof, preferably a microorganism, a plant cell, a plant or a part thereof, as compared to a corresponding non-transformed wild type non-human organism or a part thereof; and
[60987] (b) growing the non-human organism or a part thereof under conditions which permit the production of hexadecatrienoic acid or a composition comprising hexadecatrienoic acid in said non-human organism or in the culture medium surrounding said non-human organism.

[60988] Accordingly, the present invention relates to a process for the production of 2-hydroxybehenic acid, which comprises
[60989] (a) increasing or generating the activity of a protein phosphatase in the cytosol of a cell of a non-human organism or a part thereof, preferably a microorganism, a plant cell, a plant or a part thereof, as compared to a corresponding non-transformed wild type non-human organism or a part thereof; and
[60990] (b) growing the non-human organism or a part thereof under conditions which permit the production of 2-hydroxybehenic acid or a composition comprising 2-hydroxybehenic acid in said non-human organism or in the culture medium surrounding said non-human organism.

[60991] Accordingly, the present invention relates to a process for the production of 2-hydroxypalmitic acid, which comprises
[60992] (a) increasing or generating the activity of a At2g33510-protein in the cytosol of a cell of a non-human organism or a part thereof, preferably a microorganism, a plant cell, a plant or a part thereof, as compared to a corresponding non-transformed wild type non-human organism or a part thereof; and
[60993] (b) growing the non-human organism or a part thereof under conditions which permit the production of 2-hydroxypalmitic acid or a composition comprising 2-hydroxypalmitic acid in said non-human organism or in the culture medium surrounding said non-human organism.

[60994] Accordingly, the present invention relates to a process for the production of 2-hydroxytetracosenoic acid (preferably 2-hydroxynervonic acid), which comprises
[60995] (a) increasing or generating the activity of a heat shock transcription factor in the cytosol of a cell of a non-human organism or a part thereof, preferably a microorganism, a plant cell, a plant or a part thereof, as compared to a corresponding non-transformed wild type non-human organism or a part thereof; and
[60996] (b) growing the non-human organism or a part thereof under conditions which permit the production of 2-hydroxytetracosenoic acid (preferably 2-hydroxynervonic acid) or a composition comprising 2-hydroxytetracosenoic acid (preferably 2-hydroxynervonic acid) in said non-human organism or in the culture medium surrounding said non-human organism.

[60997] Accordingly, the present invention relates to a process for the production of cerebronic acid, which comprises
[60998] (a) increasing or generating the activity of a adenosine kinase in the cytosol of a cell of a non-human organism or a part thereof, preferably a microorganism, a plant cell, a plant or a part thereof, as compared to a corresponding non-transformed wild type non-human organism or a part thereof; and
[60999] (b) growing the non-human organism or a part thereof under conditions which permit the production of cerebronic acid or a composition comprising cerebronic acid in said non-human organism or in the culture medium surrounding said non-human organism.

[61000] Accordingly, the present invention relates to a process for the production of 2-hydroxybehenic acid, which comprises
[61001] (a) increasing or generating the activity of a adenosine kinase in the cytosol of a cell of a non-human organism or a part thereof, preferably a microorganism, a plant cell, a plant or a part thereof, as compared to a corresponding non-transformed wild type non-human organism or a part thereof; and
[61002] (b) growing the non-human organism or a part thereof under conditions which permit the production of 2-hydroxybehenic acid or a composition comprising 2-hydroxybehenic acid in said non-human organism or in the culture medium surrounding said non-human organism.

[61003] Accordingly, the present invention relates to a process for the production of 2-hydroxytetracosenoic acid (preferably 2-hydroxynervonic acid), which comprises
[61004] (a) increasing or generating the activity of a DNA mismatch repair protein in the cytosol of a cell of a non-human organism or a part thereof, preferably a microorganism, a plant cell, a plant or a part thereof, as compared to a corresponding non-transformed wild type non-human organism or a part thereof; and
[61005] (b) growing the non-human organism or a part thereof under conditions which permit the production of 2-hydroxytetracosenoic acid (preferably 2-hydroxynervonic acid) or a composition comprising 2-hydroxytetracosenoic acid (preferably 2-hydroxynervonic acid) in said non-human organism or in the culture medium surrounding said non-human organism.

[61006] Accordingly, the present invention relates to a process for the production of cerebronic acid, which comprises
[61007] (a) increasing or generating the activity of a glutaredoxin in the cytosol of a cell of a non-human organism or a part thereof, preferably a microorganism, a plant cell, a plant or a part thereof, as compared to a corresponding non-transformed wild type non-human organism or a part thereof; and
[61008] (b) growing the non-human organism or a part thereof under conditions which permit the production of cerebronic acid or a composition comprising cerebronic acid in said non-human organism or in the culture medium surrounding said non-human organism.

[61009] Accordingly, the present invention relates to a process for the production of hexadecatrienoic acid, which comprises
[61010] (a) increasing or generating the activity of a glutaredoxin in the cytosol of a cell of a non-human organism or a part thereof, preferably a microorganism, a plant cell, a plant or a part thereof, as compared to a corresponding non-transformed wild type non-human organism or a part thereof; and
[61011] (b) growing the non-human organism or a part thereof under conditions which permit the production of hexadecatrienoic acid or a composition comprising hexadecatrienoic acid in said non-human organism or in the culture medium surrounding said non-human organism.

[61012] Accordingly, the present invention relates to a process for the production of 2-hydroxybehenic acid, which comprises
[61013] (a) increasing or generating the activity of a glutaredoxin in the cytosol of a cell of a non-human organism or a part thereof, preferably a microorganism, a plant cell, a plant or a part thereof, as compared to a corresponding non-transformed wild type non-human organism or a part thereof; and
[61014] (b) growing the non-human organism or a part thereof under conditions which permit the production of 2-hydroxybehenic acid or a composition comprising 2-hydroxybehenic acid in said non-human organism or in the culture medium surrounding said non-human organism.

[61015] Accordingly, the present invention relates to a process for the production of 2-hydroxypalmitic acid, which comprises
[61016] (a) increasing or generating the activity of a transcription factor in the cytosol of a cell of a non-human organism or a part thereof, preferably a microorganism, a plant cell, a plant or a part thereof, as compared to a corresponding non-transformed wild type non-human organism or a part thereof; and
[61017] (b) growing the non-human organism or a part thereof under conditions which permit the production of 2-hydroxypalmitic acid or a composition comprising 2-hydroxypalmitic acid in said non-human organism or in the culture medium surrounding said non-human organism.

[61018] Accordingly, the present invention relates to a process for the production of 2-hydroxybehenic acid, which comprises
[61019] (a) increasing or generating the activity of a monothiol glutaredoxin in the cytosol of a cell of a non-human organism or a part thereof, preferably a microorganism, a plant cell, a plant or a part thereof, as compared to a corresponding non-transformed wild type non-human organism or a part thereof; and
[61020] (b) growing the non-human organism or a part thereof under conditions which permit the production of 2-hydroxybehenic acid or a composition comprising 2-hydroxybehenic acid in said non-human organism or in the culture medium surrounding said non-human organism.

[61021] Accordingly, the present invention relates to a process for the production of 2-hydroxypalmitic acid, which comprises
[61022] (a) increasing or generating the activity of a monothiol glutaredoxin in the cytosol of a cell of a non-human organism or a part thereof, preferably a microorganism, a plant cell, a plant or a part thereof, as compared to a corresponding non-transformed wild type non-human organism or a part thereof; and
[61023] (b) growing the non-human organism or a part thereof under conditions which permit the production of 2-hydroxypalmitic acid or a composition comprising 2-hydroxypalmitic acid in said non-human organism or in the culture medium surrounding said non-human organism.

[61024] Accordingly, the present invention relates to a process for the production of hexadecatrienoic acid, which comprises
[61025] (a) increasing or generating the activity of a monothiol glutaredoxin in the cytosol of a cell of a non-human organism or a part thereof, preferably a microorganism, a plant cell, a plant or a part thereof, as compared to a corresponding non-transformed wild type non-human organism or a part thereof; and
[61026] (b) growing the non-human organism or a part thereof under conditions which permit the production of hexadecatrienoic acid or a composition comprising hexadecatrienoic acid in said non-human organism or in the culture medium surrounding said non-human organism.

[61027] Accordingly, the present invention relates to a process for the production of 2-hydroxybehenic acid, which comprises
[61028] (a) increasing or generating the activity of a monothiol glutaredoxin in the cytosol of a cell of a non-human organism or a part thereof, preferably a microorganism, a plant cell, a plant or a part thereof, as compared to a corresponding non-transformed wild type non-human organism or a part thereof; and
[61029] (b) growing the non-human organism or a part thereof under conditions which permit the production of 2-hydroxybehenic acid or a composition comprising 2-hydroxybehenic acid in said non-human organism or in the culture medium surrounding said non-human organism.

[61030] Accordingly, the present invention relates to a process for the production of cerebronic acid, which comprises
[61031] (a) increasing or generating the activity of a monothiol glutaredoxin in the cytosol of a cell of a non-human organism or a part thereof, preferably a microorganism, a plant cell, a plant or a part thereof, as compared to a corresponding non-transformed wild type non-human organism or a part thereof; and
[61032] (b) growing the non-human organism or a part thereof under conditions which permit the production of cerebronic acid or a composition comprising cerebronic acid in said non-human organism or in the culture medium surrounding said non-human organism.

[61033] Accordingly, the present invention relates to a process for the production of 2-hydroxybehenic acid, which comprises
[61034] (a) increasing or generating the activity of a protein phosphatase in the cytosol of a cell of a non-human organism or a part thereof, preferably a microorganism, a plant cell, a plant or a part thereof, as compared to a corresponding non-transformed wild type non-human organism or a part thereof; and
[61035] (b) growing the non-human organism or a part thereof under conditions which permit the production of 2-hydroxybehenic acid or a composition comprising 2-hydroxybehenic acid in said non-human organism or in the culture medium surrounding said non-human organism.

[61036] Accordingly, the present invention relates to a process for the production of 2-hydroxytetracosenoic acid (preferably 2-hydroxynervonic acid), which comprises
[61037] (a) increasing or generating the activity of a protein phosphatase in the cytosol of a cell of a non-human organism or a part thereof, preferably a microorganism, a plant cell, a plant or a part thereof, as compared to a corresponding non-transformed wild type non-human organism or a part thereof; and
[61038] (b) growing the non-human organism or a part thereof under conditions which permit the production of 2-hydroxytetracosenoic acid (preferably 2-hydroxynervonic acid) or a composition comprising 2-hydroxytetracosenoic acid (preferably 2-hydroxynervonic acid) in said non-human organism or in the culture medium surrounding said non-human organism.

[61039] Accordingly, the present invention relates to a process for the production of cerebronic acid, which comprises
[61040] (a) increasing or generating the activity of a glutaredoxin in the cytosol of a cell of a non-human organism or a part thereof, preferably a microorganism, a plant cell, a plant or a part thereof, as compared to a corresponding non-transformed wild type non-human organism or a part thereof; and
[61041] (b) growing the non-human organism or a part thereof under conditions which permit the production of cerebronic acid or a composition comprising cerebronic acid in said non-human organism or in the culture medium surrounding said non-human organism.

[61042] Accordingly, the present invention relates to a process for the production of hexadecadienoic acid, which comprises
[61043] (a) increasing or generating the activity of a glutaredoxin in the cytosol of a cell of a non-human organism or a part thereof, preferably a microorganism, a plant cell, a plant or a part thereof, as compared to a corresponding non-transformed wild type non-human organism or a part thereof; and
[61044] (b) growing the non-human organism or a part thereof under conditions which permit the production of hexadecadienoic acid or a composition comprising hexadecadienoic acid in said non-human organism or in the culture medium surrounding said non-human organism.

[61045] Accordingly, the present invention relates to a process for the production of hexadecatrienoic acid, which comprises
[61046] (a) increasing or generating the activity of a glutaredoxin in the cytosol of a cell of a non-human organism or a part thereof, preferably a microorganism, a plant cell, a plant or a part thereof, as compared to a corresponding non-transformed wild type non-human organism or a part thereof; and
[61047] (b) growing the non-human organism or a part thereof under conditions which permit the production of hexadecatrienoic acid or a composition comprising hexadecatrienoic acid in said non-human organism or in the culture medium surrounding said non-human organism.

[61048] Accordingly, the present invention relates to a process for the production of 2-hydroxybehenic acid, which comprises
[61049] (a) increasing or generating the activity of a calcium-dependent protein kinase in the cytosol of a cell of a non-human organism or a part thereof, preferably a microorganism, a plant cell, a plant or a part thereof, as compared to a corresponding non-transformed wild type non-human organism or a part thereof; and
[61050] (b) growing the non-human organism or a part thereof under conditions which permit the production of 2-hydroxybehenic acid or a composition comprising 2-hydroxybehenic acid in said non-human organism or in the culture medium surrounding said non-human organism.

[61051] Accordingly, the present invention relates to a process for the production of 2-hydroxypalmitic acid, which comprises
[61052] (a) increasing or generating the activity of a calcium-dependent protein kinase in the cytosol of a cell of a non-human organism or a part thereof, preferably a microorganism, a plant cell, a plant or a part thereof, as compared to a corresponding non-transformed wild type non-human organism or a part thereof; and
[61053] (b) growing the non-human organism or a part thereof under conditions which permit the production of 2-hydroxypalmitic acid or a composition comprising 2-hydroxypalmitic acid in said non-human organism or in the culture medium surrounding said non-human organism.

[61054] Accordingly, the present invention relates to a process for the production of oleic acid, which comprises
[61055] (a) increasing or generating the activity of a acyl-desaturase in the cytosol of a cell of a non-human organism or a part thereof, preferably a microorganism, a plant cell, a plant or a part thereof, as compared to a corresponding non-transformed wild type non-human organism or a part thereof; and
[61056] (b) growing the non-human organism or a part thereof under conditions which permit the production of oleic acid or a composition comprising oleic acid in said non-human organism or in the culture medium surrounding said non-human organism.

[61057] Accordingly, the present invention relates to a process for the production of hexadecatrienoic acid, which comprises
[61058] (a) increasing or generating the activity of a monothiol glutaredoxin in the cytosol of a cell of a non-human organism or a part thereof, preferably a microorganism, a plant cell, a plant or a part thereof, as compared to a corresponding non-transformed wild type non-human organism or a part thereof; and
[61059] (b) growing the non-human organism or a part thereof under conditions which permit the production of hexadecatrienoic acid or a composition comprising hexadecatrienoic acid in said non-human organism or in the culture medium surrounding said non-human organism.

[61060] Accordingly, the present invention relates to a process for the production of hexadecatrienoic acid, which comprises
[61061] (a) increasing or generating the activity of a protein phosphatase in the cytosol of a cell of a non-human organism or a part thereof, preferably a microorganism, a plant cell, a plant or a part thereof, as compared to a corresponding non-transformed wild type non-human organism or a part thereof; and
[61062] (b) growing the non-human organism or a part thereof under conditions which permit the production of hexadecatrienoic acid or a composition comprising hexadecatrienoic acid in said non-human organism or in the culture medium surrounding said non-human organism.

[61063] Accordingly, the present invention relates to a process for the production of hexadecadienoic acid, which comprises
[61064] (a) increasing or generating the activity of a protein kinase in the cytosol of a cell of a non-human organism or a part thereof, preferably a microorganism, a plant cell, a plant or a part thereof, as compared to a corresponding non-transformed wild type non-human organism or a part thereof; and
[61065] (b) growing the non-human organism or a part thereof under conditions which permit the production of hexadecadienoic acid or a composition comprising hexadecadienoic acid in said non-human organism or in the culture medium surrounding said non-human organism.

[61066] Accordingly, the present invention relates to a process for the production of cerebronic acid, which comprises
[61067] (a) increasing or generating the activity of a CDP-diacylglycerol-serine O-phosphatidyltransferase in the cytosol of a cell of a non-human organism or a part thereof, preferably a microorganism, a plant cell, a plant or a part thereof, as compared to a corresponding non-transformed wild type non-human organism or a part thereof; and
[61068] (b) growing the non-human organism or a part thereof under conditions which permit the production of cerebronic acid or a composition comprising cerebronic acid in said non-human organism or in the culture medium surrounding said non-human organism.

[61069] Accordingly, the present invention relates to a process for the production of 2-hydroxybehenic acid, which comprises
[61070] (a) increasing or generating the activity of a CDP-diacylglycerol-serine O-phosphatidyltransferase in the cytosol of a cell of a non-human organism or a part thereof, preferably a microorganism, a plant cell, a plant or a part thereof, as compared to a corresponding non-transformed wild type non-human organism or a part thereof; and
[61071] (b) growing the non-human organism or a part thereof under conditions which permit the production of 2-hydroxybehenic acid or a composition comprising 2-hydroxybehenic acid in said non-human organism or in the culture medium surrounding said non-human organism.

[61072] Accordingly, the present invention relates to a process for the production of 2-hydroxytetracosenoic acid (preferably 2-hydroxynervonic acid), which comprises
[61073] (a) increasing or generating the activity of a CDP-diacylglycerol-serine O-phosphatidyltransferase in the cytosol of a cell of a non-human organism or a part thereof, preferably a microorganism, a plant cell, a plant or a part thereof, as compared to a corresponding non-transformed wild type non-human organism or a part thereof; and
[61074] (b) growing the non-human organism or a part thereof under conditions which permit the production of 2-hydroxytetracosenoic acid (preferably 2-hydroxynervonic acid) or a composition comprising 2-hydroxytetracosenoic acid (preferably 2-hydroxynervonic acid) in said non-human organism or in the culture medium surrounding said non-human organism.

[61075] Accordingly, the present invention relates to a process for the production of 2-hydroxypalmitic acid, which comprises
[61076] (a) increasing or generating the activity of a CDP-diacylglycerol-serine O-phosphatidyltransferase in the cytosol of a cell of a non-human organism or a part thereof, preferably a microorganism, a plant cell, a plant or a part thereof, as compared to a corresponding non-transformed wild type non-human organism or a part thereof; and
[61077] (b) growing the non-human organism or a part thereof under conditions which permit the production of 2-hydroxypalmitic acid or a composition comprising 2-hydroxypalmitic acid in said non-human organism or in the culture medium surrounding said non-human organism.

[61078] Accordingly, the present invention relates to a process for the production of hexadecadienoic acid, which comprises
[61079] (a) increasing or generating the activity of a sec-independent protein translocase in the cytosol of a cell of a non-human organism or a part thereof, preferably a microorganism, a plant cell, a plant or a part thereof, as compared to a corresponding non-transformed wild type non-human organism or a part thereof; and
[61080] (b) growing the non-human organism or a part thereof under conditions which permit the production of hexadecadienoic acid or a composition comprising hexadecadienoic acid in said non-human organism or in the culture medium surrounding said non-human organism.

[61081] Accordingly, the present invention relates to a process for the production of 2-hydroxytetracosenoic acid (preferably 2-hydroxynervonic acid), which comprises
[61082] (a) increasing or generating the activity of a transcriptional regulator protein in the cytosol of a cell of a non-human organism or a part thereof, preferably a microorganism, a plant cell, a plant or a part thereof, as compared to a corresponding non-transformed wild type non-human organism or a part thereof; and
[61083] (b) growing the non-human organism or a part thereof under conditions which permit the production of 2-hydroxytetracosenoic acid (preferably 2-hydroxynervonic acid) or a composition comprising 2-hydroxytetracosenoic acid (preferably 2-hydroxynervonic acid) in said non-human organism or in the culture medium surrounding said non-human organism.

[61084] Accordingly, the present invention relates to a process for the production of 2-hydroxypalmitic acid, which comprises
[61085] (a) increasing or generating the activity of a beta-hydroxylase in the cytosol of a cell of a non-human organism or a part thereof, preferably a microorganism, a plant cell, a plant or a part thereof, as compared to a corresponding non-transformed wild type non-human organism or a part thereof; and
[61086] (b) growing the non-human organism or a part thereof under conditions which permit the production of 2-hydroxypalmitic acid or a composition comprising 2-hydroxypalmitic acid in said non-human organism or in the culture medium surrounding said non-human organism.

[61087] Accordingly, the present invention relates to a process for the production of hexadecadienoic acid, which comprises
[61088] (a) increasing or generating the activity of a 30S ribosomal protein S3 in the cytosol of a cell of a non-human organism or a part thereof, preferably a microorganism, a plant cell, a plant or a part thereof, as compared to a corresponding non-transformed wild type non-human organism or a part thereof; and
[61089] (b) growing the non-human organism or a part thereof under conditions which permit the production of hexadecadienoic acid or a composition comprising hexadecadienoic acid in said non-human organism or in the culture medium surrounding said non-human organism.

[61090] Accordingly, the present invention relates to a process for the production of 2-hydroxybehenic acid, which comprises
[61091] (a) increasing or generating the activity of a acyl-CoA synthase in the cytosol of a cell of a non-human organism or a part thereof, preferably a microorganism, a plant cell, a plant or a part thereof, as compared to a corresponding non-transformed wild type non-human organism or a part thereof; and
[61092] (b) growing the non-human organism or a part thereof under conditions which permit the production of 2-hydroxybehenic acid or a composition comprising 2-hydroxybehenic acid in said non-human organism or in the culture medium surrounding said non-human organism.

[61093] Accordingly, the present invention relates to a process for the production of 2-hydroxytetracosenoic acid (preferably 2-hydroxynervonic acid), which comprises
[61094] (a) increasing or generating the activity of a heat shock protein in the cytosol of a cell of a non-human organism or a part thereof, preferably a microorganism, a plant cell, a plant or a part thereof, as compared to a corresponding non-transformed wild type non-human organism or a part thereof; and
[61095] (b) growing the non-human organism or a part thereof under conditions which permit the production of 2-hydroxytetracosenoic acid (preferably 2-hydroxynervonic acid) or a composition comprising 2-hydroxytetracosenoic acid (preferably 2-hydroxynervonic acid) in said non-human organism or in the culture medium surrounding said non-human organism.

[61096] Accordingly, the present invention relates to a process for the production of 2-hydroxytetracosenoic acid (preferably 2-hydroxynervonic acid), which comprises
[61097] (a) increasing or generating the activity of a oxidoreductase in the cytosol of a cell of a non-human organism or a part thereof, preferably a microorganism, a plant cell, a plant or a part thereof, as compared to a corresponding non-transformed wild type non-human organism or a part thereof; and
[61098] (b) growing the non-human organism or a part thereof under conditions which permit the production of 2-hydroxytetracosenoic acid (preferably 2-hydroxynervonic acid) or a composition comprising 2-hydroxytetracosenoic acid (preferably 2-hydroxynervonic acid) in said non-human organism or in the culture medium surrounding said non-human organism.

[61099] Accordingly, the present invention relates to a process for the production of hexadecadienoic acid, which comprises
[61100] (a) increasing or generating the activity of a recombinase A in the cytosol of a cell of a non-human organism or a part thereof, preferably a microorganism, a plant cell, a plant or a part thereof, as compared to a corresponding non-transformed wild type non-human organism or a part thereof; and
[61101] (b) growing the non-human organism or a part thereof under conditions which permit the production of hexadecadienoic acid or a composition comprising hexadecadienoic acid in said non-human organism or in the culture medium surrounding said non-human organism.

[61102] Accordingly, the present invention relates to a process for the production of lauric acid, which comprises
[61103] (a) increasing or generating the activity of a ABC transporter component in the cytosol of a cell of a non-human organism or a part thereof, preferably a microorganism, a plant cell, a plant or a part thereof, as compared to a corresponding non-transformed wild type non-human organism or a part thereof; and
[61104] (b) growing the non-human organism or a part thereof under conditions which permit the production of lauric acid or a composition comprising lauric acid in said non-human organism or in the culture medium surrounding said non-human organism.

[61105] Accordingly, the present invention relates to a process for the production of 2-hydroxypalmitic acid, which comprises
[61106] (a) increasing or generating the activity of a hydrolase in the cytosol of a cell of a non-human organism or a part thereof, preferably a microorganism, a plant cell, a plant or a part thereof, as compared to a corresponding non-transformed wild type non-human organism or a part thereof; and
[61107] (b) growing the non-human organism or a part thereof under conditions which permit the production of 2-hydroxypalmitic acid or a composition comprising 2-hydroxypalmitic acid in said non-human organism or in the culture medium surrounding said non-human organism.

[61108] Accordingly, the present invention relates to a process for the production of 2-hydroxypalmitic acid, which comprises
[61109] (a) increasing or generating the activity of a glutamate-ammonia-ligase in the cytosol of a cell of a non-human organism or a part thereof, preferably a microorganism, a plant cell, a plant or a part thereof, as compared to a corresponding non-transformed wild type non-human organism or a part thereof; and
[61110] (b) growing the non-human organism or a part thereof under conditions which permit the production of 2-hydroxypalmitic acid or a composition comprising 2-hydroxypalmitic acid in said non-human organism or in the culture medium surrounding said non-human organism.

[61111] Accordingly, the present invention relates to a process for the production of 2-hydroxybehenic acid, which comprises
[61112] (a) increasing or generating the activity of a fumarylacetoacetate hydrolase in the cytosol of a cell of a non-human organism or a part thereof, preferably a microorganism, a plant cell, a plant or a part thereof, as compared to a corresponding non-transformed wild type non-human organism or a part thereof; and
[61113] (b) growing the non-human organism or a part thereof under conditions which permit the production of 2-hydroxybehenic acid or a composition comprising 2-hydroxybehenic acid in said non-human organism or in the culture medium surrounding said non-human organism.

[61114] Accordingly, the present invention relates to a process for the production of 2-hydroxytetracosenoic acid (preferably 2-hydroxynervonic acid), which comprises
[61115] (a) increasing or generating the activity of a N-acetyl-gamma-glutamyl-phosphate reductase in the cytosol of a cell of a non-human organism or a part thereof, preferably a microorganism, a plant cell, a plant or a part thereof, as compared to a corresponding non-transformed wild type non-human organism or a part thereof; and
[61116] (b) growing the non-human organism or a part thereof under conditions which permit the production of 2-hydroxytetracosenoic acid (preferably 2-hydroxynervonic acid) or a composition comprising 2-hydroxytetracosenoic acid (preferably 2-hydroxynervonic acid) in said non-human organism or in the culture medium surrounding said non-human organism.

[61117] Accordingly, the present invention relates to a process for the production of 2-hydroxytetracosenoic acid (preferably 2-hydroxynervonic acid), which comprises
[61118] (a) increasing or generating the activity of a HesB/YadR/YfhF family protein in the cytosol of a cell of a non-human organism or a part thereof, preferably a microorganism, a plant cell, a plant or a part thereof, as compared to a corresponding non-transformed wild type non-human organism or a part thereof; and
[61119] (b) growing the non-human organism or a part thereof under conditions which permit the production of 2-hydroxytetracosenoic acid (preferably 2-hydroxynervonic acid) or a composition comprising 2-hydroxytetracosenoic acid (preferably 2-hydroxynervonic acid) in said non-human organism or in the culture medium surrounding said non-human organism.

[61120] Accordingly, the present invention relates to a process for the production of 2-hydroxytetracosenoic acid (preferably 2-hydroxynervonic acid), which comprises
[61121] (a) increasing or generating the activity of a purine nucleoside phosphorylase in the cytosol of a cell of a non-human organism or a part thereof, preferably a microorganism, a plant cell, a plant or a part thereof, as compared to a corresponding non-transformed wild type non-human organism or a part thereof; and
[61122] (b) growing the non-human organism or a part thereof under conditions which permit the production of 2-hydroxytetracosenoic acid (preferably 2-hydroxynervonic acid) or a composition comprising 2-hydroxytetracosenoic acid (preferably 2-hydroxynervonic acid) in said non-human organism or in the culture medium surrounding said non-human

[61123] Accord ivp,iAhre present invention relates to a process for the production of 2-hydroxybehenic acid, which comprises
[61124] (a) increasing or generating the activity of a b0050-protein in the cytosol of a cell of a non-human organism or a part thereof, preferably a microorganism, a plant cell, a plant or a part thereof, as compared to a corresponding non-transformed wild type non-human organism or a part thereof; and
[61125] (b) growing the non-human organism or a part thereof under conditions which permit the production of 2-hydroxybehenic acid or a composition comprising 2-hydroxybehenic acid in said non-human organism or in the culture medium surrounding said non-human organism.

[61126] Accordingly, the present invention relates to a process for the production of 2-hydroxytetracosenoic acid (preferably 2-hydroxynervonic acid), which comprises
[61127] (a) increasing or generating the activity of a b0050-protein in the cytosol of a cell of a non-human organism or a part thereof, preferably a microorganism, a plant cell, a plant or a part thereof, as compared to a corresponding non-transformed wild type non-human organism or a part thereof; and
[61128] (b) growing the non-human organism or a part thereof under conditions which permit the production of 2-hydroxytetracosenoic acid (preferably 2-hydroxynervonic acid) or a composition comprising 2-hydroxytetracosenoic acid (preferably 2-hydroxynervonic acid) in said non-human organism or in the culture medium surrounding said non-human organism.

[61129] Accordingly, the present invention relates to a process for the production of cerebronic acid, which comprises
[61130] (a) increasing or generating the activity of a b0249-protein in the cytosol of a cell of a non-human organism or a part thereof, preferably a microorganism, a plant cell, a plant or a part thereof, as compared to a corresponding non-transformed wild type non-human organism or a part thereof; and
[61131] (b) growing the non-human organism or a part thereof under conditions which permit the production of cerebronic acid or a composition comprising cerebronic acid in said non-human organism or in the culture medium surrounding said non-human organism.

[61132] Accordingly, the present invention relates to a process for the production of behenic acid, which comprises
[61133] (a) increasing or generating the activity of a betaine aldehyde dehydrogenase in the cytosol of a cell of a non-human organism or a part thereof, preferably a microorganism, a plant cell, a plant or a part thereof, as compared to a corresponding non-transformed wild type non-human organism or a part thereof; and
[61134] (b) growing the non-human organism or a part thereof under conditions which permit the production of behenic acid or a composition comprising behenic acid in said non-human organism or in the culture medium surrounding said non-human organism.

[61135] Accordingly, the present invention relates to a process for the production of eicosanoic acid, which comprises
[61136] (a) increasing or generating the activity of a betaine aldehyde dehydrogenase in the cytosol of a cell of a non-human organism or a part thereof, preferably a microorganism, a plant cell, a plant or a part thereof, as compared to a corresponding non-transformed wild type non-human organism or a part thereof; and
[61137] (b) growing the non-human organism or a part thereof under conditions which permit the production of eicosanoic acid or a composition comprising eicosanoic acid in said non-human organism or in the culture medium surrounding said non-human organism.

[61138] Accordingly, the present invention relates to a process for the production of myristic acid, which comprises
[61139] (a) increasing or generating the activity of a 2,3-dihydroxyphenylpropionate 1,2-dioxygenase in the cytosol of a cell of a non-human organism or a part thereof, preferably a microorganism, a plant cell, a plant or a part thereof, as compared to a corresponding non-transformed wild type non-human organism or a part thereof; and
[61140] (b) growing the non-human organism or a part thereof under conditions which permit the production of myristic acid or a composition comprising myristic acid in said non-human organism or in the culture medium surrounding said non-human organism.

[61141] Accordingly, the present invention relates to a process for the production of oleic acid, which comprises
[61142] (a) increasing or generating the activity of a 2,3-dihydroxyphenylpropionate 1,2-dioxygenase in the cytosol of a cell of a non-human organism or a part thereof, preferably a microorganism, a plant cell, a plant or a part thereof, as compared to a corresponding non-transformed wild type non-human organism or a part thereof; and
[61143] (b) growing the non-human organism or a part thereof under conditions which permit the production of oleic acid or a composition comprising oleic acid in said non-human organism or in the culture medium surrounding said non-human organism.

[61144] Accordingly, the present invention relates to a process for the production of hexadecatrienoic acid, which comprises
[61145] (a) increasing or generating the activity of a b0371-protein in the cytosol of a cell of a non-human organism or a part thereof, preferably a microorganism, a plant cell, a plant or a part thereof, as compared to a corresponding non-transformed wild type non-human organism or a part thereof; and
[61146] (b) growing the non-human organism or a part thereof under conditions which permit the production of hexadecatrienoic acid or a composition comprising hexadecatrienoic acid in said non-human organism or in the culture medium surrounding said non-human organism.

[61147] Accordingly, the present invention relates to a process for the production of cerebronic acid, which comprises
[61148] (a) increasing or generating the activity of a ATP-binding component of a transport system in the cytosol of a cell of a non-human organism or a part thereof, preferably a microorganism, a plant cell, a plant or a part thereof, as compared to a corresponding non-transformed wild type non-human organism or a part thereof; and
[61149] (b) growing the non-human organism or a part thereof under conditions which permit the production of cerebronic acid or a composition comprising cerebronic acid in said non-human organism or in the culture medium surrounding said non-human organism.

[61150] Accordingly, the present invention relates to a process for the production of 2-hydroxybehenic acid, which comprises
[61151] (a) increasing or generating the activity of a ATP-binding component of a transport system in the cytosol of a cell of a non-human organism or a part thereof, preferably a microorganism, a plant cell, a plant or a part thereof, as compared to a corresponding non-transformed wild type non-human organism or a part thereof; and
[61152] (b) growing the non-human organism or a part thereof under conditions which permit the production of 2-hydroxybehenic acid or a composition comprising 2-hydroxybehenic acid in said non-human organism or in the culture medium surrounding said non-human organism.

[61153] Accordingly, the present invention relates to a process for the production of 2-hydroxypalmitic acid, which comprises
[61154] (a) increasing or generating the activity of a ATP-binding component of a transport system in the cytosol of a cell of a non-human organism or a part thereof, preferably a microorganism, a plant cell, a plant or a part thereof, as compared to a corresponding non-transformed wild type non-human organism or a part thereof; and
[61155] (b) growing the non-human organism or a part thereof under conditions which permit the production of 2-hydroxypalmitic acid or a composition comprising 2-hydroxypalmitic acid in said non-human organism or in the culture medium surrounding said non-human organism.

[61156] Accordingly, the present invention relates to a process for the production of hexadecadienoic acid, which comprises
[61157] (a) increasing or generating the activity of a b0518-protein in the cytosol of a cell of a non-human organism or a part thereof, preferably a microorganism, a plant cell, a plant or a part thereof, as compared to a corresponding non-transformed wild type non-human organism or a part thereof; and
[61158] (b) growing the non-human organism or a part thereof under conditions which permit the production of hexadecadienoic acid or a composition comprising hexadecadienoic acid in said non-human organism or in the culture medium surrounding said non-human organism.

[61159] Accordingly, the present invention relates to a process for the production of 2-hydroxybehenic acid, which comprises
[61160] (a) increasing or generating the activity of a sensor histidine kinase in the cytosol of a cell of a non-human organism or a part thereof, preferably a microorganism, a plant cell, a plant or a part thereof, as compared to a corresponding non-transformed wild type non-human organism or a part thereof; and
[61161] (b) growing the non-human organism or a part thereof under conditions which permit the production of 2-hydroxybehenic acid or a composition comprising 2-hydroxybehenic acid in said non-human organism or in the culture medium surrounding said non-human organism.

[61162] Accordingly, the present invention relates to a process for the production of 2-hydroxytetracosenoic acid (preferably 2-hydroxynervonic acid), which comprises
[61163] (a) increasing or generating the activity of a sensor histidine kinase in the cytosol of a cell of a non-human organism or a part thereof, preferably a microorganism, a plant cell, a plant or a part thereof, as compared to a corresponding non-transformed wild type non-human organism or a part thereof; and
[61164] (b) growing the non-human organism or a part thereof under conditions which permit the production of 2-hydroxytetracosenoic acid (preferably 2-hydroxynervonic acid) or a composition comprising 2-hydroxytetracosenoic acid (preferably 2-hydroxynervonic acid) in said non-human organism or in the culture medium surrounding said non-human organism.

[61165] Accordingly, the present invention relates to a process for the production of cerebronic acid, which comprises
[61166] (a) increasing or generating the activity of a citrate synthase in the cytosol of a cell of a non-human organism or a part thereof, preferably a microorganism, a plant cell, a plant or a part thereof, as compared to a corresponding non-transformed wild type non-human organism or a part thereof; and
[61167] (b) growing the non-human organism or a part thereof under conditions which permit the production of cerebronic acid or a composition comprising cerebronic acid in said non-human organism or in the culture medium surrounding said non-human organism.

[61168] Accordingly, the present invention relates to a process for the production of 2-hydroxytetracosenoic acid (preferably 2-hydroxynervonic acid), which comprises
[61169] (a) increasing or generating the activity of a b0801-protein in the cytosol of a cell of a non-human organism or a part thereof, preferably a microorganism, a plant cell, a plant or a part thereof, as compared to a corresponding non-transformed wild type non-human organism or a part thereof; and
[61170] (b) growing the non-human organism or a part thereof under conditions which permit the production of 2-hydroxytetracosenoic acid (preferably 2-hydroxynervonic acid) or a composition comprising 2-hydroxytetracosenoic acid (preferably 2-hydroxynervonic acid) in said non-human organism or in the culture medium surrounding said non-human organism.

[61171] Accordingly, the present invention relates to a process for the production of cerebronic acid, which comprises
[61172] (a) increasing or generating the activity of a b1046-protein in the cytosol of a cell of a non-human organism or a part thereof, preferably a microorganism, a plant cell, a plant or a part thereof, as compared to a corresponding non-transformed wild type non-human organism or a part thereof; and
[61173] (b) growing the non-human organism or a part thereof under conditions which permit the production of cerebronic acid or a composition comprising cerebronic acid in said non-human organism or in the culture medium surrounding said non-human organism.

[61174] Accordingly, the present invention relates to a process for the production of hexadecatrienoic acid, which comprises
[61175] (a) increasing or generating the activity of a malonyl CoA-acyl carrier protein transacylase in the cytosol of a cell of a non-human organism or a part thereof, preferably a microorganism, a plant cell, a plant or a part thereof, as compared to a corresponding non-transformed wild type non-human organism or a part thereof; and
[61176] (b) growing the non-human organism or a part thereof under conditions which permit the production of hexadecatrienoic acid or a composition comprising hexadecatrienoic acid in said non-human organism or in the culture medium surrounding said non-human organism.

[61177] Accordingly, the present invention relates to a process for the production of hexadecadienoic acid, which comprises
[61178] (a) increasing or generating the activity of a 3-oxoacyl-[acyl-carrier-protein] reductase in the cytosol of a cell of a non-human organism or a part thereof, preferably a microorganism, a plant cell, a plant or a part thereof, as compared to a corresponding non-transformed wild type non-human organism or a part thereof; and
[61179] (b) growing the non-human organism or a part thereof under conditions which permit the production of hexadecadienoic acid or a composition comprising hexadecadienoic acid in said non-human organism or in the culture medium surrounding said non-human organism.

[61180] Accordingly, the present invention relates to a process for the production of hexadecatrienoic acid, which comprises
[61181] (a) increasing or generating the activity of a 3-oxoacyl-[acyl-carrier-protein] reductase in the cytosol of a cell of a non-human organism or a part thereof, preferably a microorganism, a plant cell, a plant or a part thereof, as compared to a corresponding non-transformed wild type non-human organism or a part thereof; and
[61182] (b) growing the non-human organism or a part thereof under conditions which permit the production of hexadecatrienoic acid or a composition comprising hexadecatrienoic acid in said non-human organism or in the culture medium surrounding said non-human organism.

[61183] Accordingly, the present invention relates to a process for the production of hexadecatrienoic acid, which comprises
[61184] (a) increasing or generating the activity of a 3-oxoacyl-[acyl-carrier-protein] synthase in the cytosol of a cell of a non-human organism or a part thereof, preferably a microorganism, a plant cell, a plant or a part thereof, as compared to a corresponding non-transformed wild type non-human organism or a part thereof; and
[61185] (b) growing the non-human organism or a part thereof under conditions which permit the production of hexadecatrienoic acid or a composition comprising hexadecatrienoic acid in said non-human organism or in the culture medium surrounding said non-human organism.

[61186] Accordingly, the present invention relates to a process for the production of 2-hydroxybehenic acid, which comprises
[61187] (a) increasing or generating the activity of a 3-oxoacyl-[acyl-carrier-protein] synthase in the cytosol of a cell of a non-human organism or a part thereof, preferably a microorganism, a plant cell, a plant or a part thereof, as compared to a corresponding non-transformed wild type non-human organism or a part thereof; and
[61188] (b) growing the non-human organism or a part thereof under conditions which permit the production of 2-hydroxybehenic acid or a composition comprising 2-hydroxybehenic acid in said non-human organism or in the culture medium surrounding said non-human organism.

[61189] Accordingly, the present invention relates to a process for the production of oleic acid, which comprises
[61190] (a) increasing or generating the activity of a sodium/proton antiporter in the cytosol of a cell of a non-human organism or a part thereof, preferably a microorganism, a plant cell, a plant or a part thereof, as compared to a corresponding non-transformed wild type non-human organism or a part thereof; and
[61191] (b) growing the non-human organism or a part thereof under conditions which permit the production of oleic acid or a composition comprising oleic acid in said non-human organism or in the culture medium surrounding said non-human organism.

[61192] Accordingly, the present invention relates to a process for the production of 2-hydroxypalmitic acid, which comprises
[61193] (a) increasing or generating the activity of a sodium/proton antiporter in the cytosol of a cell of a non-human organism or a part thereof, preferably a microorganism, a plant cell, a plant or a part thereof, as compared to a corresponding non-transformed wild type non-human organism or a part thereof; and
[61194] (b) growing the non-human organism or a part thereof under conditions which permit the production of 2-hydroxypalmitic acid or a composition comprising 2-hydroxypalmitic acid in said non-human organism or in the culture medium surrounding said non-human organism.

[61195] Accordingly, the present invention relates to a process for the production of behenic acid, which comprises
[61196] (a) increasing or generating the activity of a outer-membrane lipoprotein precursor in the cytosol of a cell of a non-human organism or a part thereof, preferably a microorganism, a plant cell, a plant or a part thereof, as compared to a corresponding non-transformed wild type non-human organism or a part thereof; and
[61197] (b) growing the non-human organism or a part thereof under conditions which permit the production of behenic acid or a composition comprising behenic acid in said non-human organism or in the culture medium surrounding said non-human organism.

[61198] Accordingly, the present invention relates to a process for the production of behenic acid, which comprises
[61199] (a) increasing or generating the activity of a cardiolipin synthase in the cytosol of a cell of a non-human organism or a part thereof, preferably a microorganism, a plant cell, a plant or a part thereof, as compared to a corresponding non-transformed wild type non-human organism or a part thereof; and
[61200] (b) growing the non-human organism or a part thereof under conditions which permit the production of behenic acid or a composition comprising behenic acid in said non-human organism or in the culture medium surrounding said non-human organism.

[61201] Accordingly, the present invention relates to a process for the production of heptadecanoic acid, which comprises
[61202] (a) increasing or generating the activity of a cardiolipin synthase in the cytosol of a cell of a non-human organism or a part thereof, preferably a microorganism, a plant cell, a plant or a part thereof, as compared to a corresponding non-transformed wild type non-human organism or a part thereof; and
[61203] (b) growing the non-human organism or a part thereof under conditions which permit the production of heptadecanoic acid or a composition comprising heptadecanoic acid in said non-human organism or in the culture medium surrounding said non-human organism.

[61204] Accordingly, the present invention relates to a process for the production of hexadecatrienoic acid, which comprises
[61205] (a) increasing or generating the activity of a b1346-protein in the cytosol of a cell of a non-human organism or a part thereof, preferably a microorganism, a plant cell, a plant or a part thereof, as compared to a corresponding non-transformed wild type non-human organism or a part thereof; and
[61206] (b) growing the non-human organism or a part thereof under conditions which permit the production of hexadecatrienoic acid or a composition comprising hexadecatrienoic acid in said non-human organism or in the culture medium surrounding said non-human organism.

[61207] Accordingly, the present invention relates to a process for the production of lauric acid, which comprises
[61208] (a) increasing or generating the activity of a phage-related repressor protein in the cytosol of a cell of a non-human organism or a part thereof, preferably a microorganism, a plant cell, a plant or a part thereof, as compared to a corresponding non-transformed wild type non-human organism or a part thereof; and
[61209] (b) growing the non-human organism or a part thereof under conditions which permit the production of lauric acid or a composition comprising lauric acid in said non-human organism or in the culture medium surrounding said non-human organism.

[61210] Accordingly, the present invention relates to a process for the production of 2-hydroxytetracosenoic acid (preferably 2-hydroxynervonic acid), which comprises
[61211] (a) increasing or generating the activity of a lipoprotein precursor in the cytosol of a cell of a non-human organism or a part thereof, preferably a microorganism, a plant cell, a plant or a part thereof, as compared to a corresponding non-transformed wild type non-human organism or a part thereof; and
[61212] (b) growing the non-human organism or a part thereof under conditions which permit the production of 2-hydroxytetracosenoic acid (preferably 2-hydroxynervonic acid) or a composition comprising 2-hydroxytetracosenoic acid (preferably 2-hydroxynervonic acid) in said non-human organism or in the culture medium surrounding said non-human organism.

[61213] Accordingly, the present invention relates to a process for the production of hexadecatrienoic acid, which comprises
[61214] (a) increasing or generating the activity of a b1470-protein in the cytosol of a cell of a non-human organism or a part thereof, preferably a microorganism, a plant cell, a plant or a part thereof, as compared to a corresponding non-transformed wild type non-human organism or a part thereof; and
[61215] (b) growing the non-human organism or a part thereof under conditions which permit the production of hexadecatrienoic acid or a composition comprising hexadecatrienoic acid in said non-human organism or in the culture medium surrounding said non-human organism.

[61216] Accordingly, the present invention relates to a process for the production of hexadecatrienoic acid, which comprises
[61217] (a) increasing or generating the activity of a NADP-dependent malic enzyme in the cytosol of a cell of a non-human organism or a part thereof, preferably a microorganism, a plant cell, a plant or a part thereof, as compared to a corresponding non-transformed wild type non-human organism or a part thereof; and
[61218] (b) growing the non-human organism or a part thereof under conditions which permit the production of hexadecatrienoic acid or a composition comprising hexadecatrienoic acid in said non-human organism or in the culture medium surrounding said non-human organism.

[61219] Accordingly, the present invention relates to a process for the production of 2-hydroxybehenic acid, which comprises
[61220] (a) increasing or generating the activity of a b1522-protein in the cytosol of a cell of a non-human organism or a part thereof, preferably a microorganism, a plant cell, a plant or a part thereof, as compared to a corresponding non-transformed wild type non-human organism or a part thereof; and
[61221] (b) growing the non-human organism or a part thereof under conditions which permit the production of 2-hydroxybehenic acid or a composition comprising 2-hydroxybehenic acid in said non-human organism or in the culture medium surrounding said non-human organism.

[61222] Accordingly, the present invention relates to a process for the production of hexadecatrienoic acid, which comprises
[61223] (a) increasing or generating the activity of a acid shock protein in the cytosol of a cell of a non-human organism or a part thereof, preferably a microorganism, a plant cell, a plant or a part thereof, as compared to a corresponding non-transformed wild type non-human organism or a part thereof; and
[61224] (b) growing the non-human organism or a part thereof under conditions which permit the production of hexadecatrienoic acid or a composition comprising hexadecatrienoic acid in said non-human organism or in the culture medium surrounding said non-human organism.

[61225] Accordingly, the present invention relates to a process for the production of 2-hydroxytetracosenoic acid (preferably 2-hydroxynervonic acid), which comprises
[61226] (a) increasing or generating the activity of a transport protein in the cytosol of a cell of a non-human organism or a part thereof, preferably a microorganism, a plant cell, a plant or a part thereof, as compared to a corresponding non-transformed wild type non-human organism or a part thereof; and
[61227] (b) growing the non-human organism or a part thereof under conditions which permit the production of 2-hydroxytetracosenoic acid (preferably 2-hydroxynervonic acid) or a composition comprising 2-hydroxytetracosenoic acid (preferably 2-hydroxynervonic acid) in said non-human organism or in the culture medium surrounding said non-human organism.

[61228] Accordingly, the present invention relates to a process for the production of 2-hydroxytetracosenoic acid (preferably 2-hydroxynervonic acid), which comprises
[61229] (a) increasing or generating the activity of a phosphotransferase system component in the cytosol of a cell of a non-human organism or a part thereof, preferably a microorganism, a plant cell, a plant or a part thereof, as compared to a corresponding non-transformed wild type non-human organism or a part thereof; and
[61230] (b) growing the non-human organism or a part thereof under conditions which permit the production of 2-hydroxytetracosenoic acid (preferably 2-hydroxynervonic acid) or a composition comprising 2-hydroxytetracosenoic acid (preferably 2-hydroxynervonic acid) in said non-human organism or in the culture medium surrounding said non-human organism.

[61231] Accordingly, the present invention relates to a process for the production of 2-hydroxybehenic acid, which comprises
[61232] (a) increasing or generating the activity of a electron transport complex protein in the cytosol of a cell of a non-human organism or a part thereof, preferably a microorganism, a plant cell, a plant or a part thereof, as compared to a corresponding non-transformed wild type non-human organism or a part thereof; and
[61233] (b) growing the non-human organism or a part thereof under conditions which permit the production of 2-hydroxybehenic acid or a composition comprising 2-hydroxybehenic acid in said non-human organism or in the culture medium surrounding said non-human organism.

[61234] Accordingly, the present invention relates to a process for the production of hexadecatrienoic acid, which comprises
[61235] (a) increasing or generating the activity of a pyridoxamine kinase in the cytosol of a cell of a non-human organism or a part thereof, preferably a microorganism, a plant cell, a plant or a part thereof, as compared to a corresponding non-transformed wild type non-human organism or a part thereof; and
[61236] (b) growing the non-human organism or a part thereof under conditions which permit the production of hexadecatrienoic acid or a composition comprising hexadecatrienoic acid in said non-human organism or in the culture medium surrounding said non-human organism.

[61237] Accordingly, the present invention relates to a process for the production of 2-hydroxytetracosenoic acid (preferably 2-hydroxynervonic acid), which comprises
[61238] (a) increasing or generating the activity of a b1670-protein in the cytosol of a cell of a non-human organism or a part thereof, preferably a microorganism, a plant cell, a plant or a part thereof, as compared to a corresponding non-transformed wild type non-human organism or a part thereof; and
[61239] (b) growing the non-human organism or a part thereof under conditions which permit the production of 2-hydroxytetracosenoic acid (preferably 2-hydroxynervonic acid) or a composition comprising 2-hydroxytetracosenoic acid (preferably 2-hydroxynervonic acid) in said non-human organism or in the culture medium surrounding said non-human organism.

[61240] Accordingly, the present invention relates to a process for the production of hexadecadienoic acid, which comprises
[61241] (a) increasing or generating the activity of a b1703-protein in the cytosol of a cell of a non-human organism or a part thereof, preferably a microorganism, a plant cell, a plant or a part thereof, as compared to a corresponding non-transformed wild type non-human organism or a part thereof; and
[61242] (b) growing the non-human organism or a part thereof under conditions which permit the production of hexadecadienoic acid or a composition comprising hexadecadienoic acid in said non-human organism or in the culture medium surrounding said non-human organism.

[61243] Accordingly, the present invention relates to a process for the production of hexadecatrienoic acid, which comprises
[61244] (a) increasing or generating the activity of a b1703-protein in the cytosol of a cell of a non-human organism or a part thereof, preferably a microorganism, a plant cell, a plant or a part thereof, as compared to a corresponding non-transformed wild type non-human organism or a part thereof; and
[61245] (b) growing the non-human organism or a part thereof under conditions which permit the production of hexadecatrienoic acid or a composition comprising hexadecatrienoic acid in said non-human organism or in the culture medium surrounding said non-human organism.

[61246] Accordingly, the present invention relates to a process for the production of hexadecadienoic acid, which comprises
[61247] (a) increasing or generating the activity of a transport protein in the cytosol of a cell of a non-human organism or a part thereof, preferably a microorganism, a plant cell, a plant or a part thereof, as compared to a corresponding non-transformed wild type non-human organism or a part thereof; and
[61248] (b) growing the non-human organism or a part thereof under conditions which permit the production of hexadecadienoic acid or a composition comprising hexadecadienoic acid in said non-human organism or in the culture medium surrounding said non-human organism.

[61249] Accordingly, the present invention relates to a process for the production of hexadecadienoic acid, which comprises
[61250] (a) increasing or generating the activity of a b1837-protein in the cytosol of a cell of a non-human organism or a part thereof, preferably a microorganism, a plant cell, a plant or a part thereof, as compared to a corresponding non-transformed wild type non-human organism or a part thereof; and
[61251] (b) growing the non-human organism or a part thereof under conditions which permit the production of hexadecadienoic acid or a composition comprising hexadecadienoic acid in said non-human organism or in the culture medium surrounding said non-human organism.

[61252] Accordingly, the present invention relates to a process for the production of hexadecatrienoic acid, which comprises
[61253] (a) increasing or generating the activity of a b1837-protein in the cytosol of a cell of a non-human organism or a part thereof, preferably a microorganism, a plant cell, a plant or a part thereof, as compared to a corresponding non-transformed wild type non-human organism or a part thereof; and
[61254] (b) growing the non-human organism or a part thereof under conditions which permit the production of hexadecatrienoic acid or a composition comprising hexadecatrienoic acid in said non-human organism or in the culture medium surrounding said non-human organism.

[61255] Accordingly, the present invention relates to a process for the production of hexadecadienoic acid, which comprises
[61256] (a) increasing or generating the activity of a b2032-protein in the cytosol of a cell of a non-human organism or a part thereof, preferably a microorganism, a plant cell, a plant or a part thereof, as compared to a corresponding non-transformed wild type non-human organism or a part thereof; and
[61257] (b) growing the non-human organism or a part thereof under conditions which permit the production of hexadecadienoic acid or a composition comprising hexadecadienoic acid in said non-human organism or in the culture medium surrounding said non-human organism.

[61258] Accordingly, the present invention relates to a process for the production of hexadecadienoic acid, which comprises
[61259] (a) increasing or generating the activity of a b2099-protein in the cytosol of a cell of a non-human organism or a part thereof, preferably a microorganism, a plant cell, a plant or a part thereof, as compared to a corresponding non-transformed wild type non-human organism or a part thereof; and
[61260] (b) growing the non-human organism or a part thereof under conditions which permit the production of hexadecadienoic acid or a composition comprising hexadecadienoic acid in said non-human organism or in the culture medium surrounding said non-human organism.

[61261] Accordingly, the present invention relates to a process for the production of hexadecatrienoic acid, which comprises
[61262] (a) increasing or generating the activity of a b2099-protein in the cytosol of a cell of a non-human organism or a part thereof, preferably a microorganism, a plant cell, a plant or a part thereof, as compared to a corresponding non-transformed wild type non-human organism or a part thereof; and
[61263] (b) growing the non-human organism or a part thereof under conditions which permit the production of hexadecatrienoic acid or a composition comprising hexadecatrienoic acid in said non-human organism or in the culture medium surrounding said non-human organism.

[61264] Accordingly, the present invention relates to a process for the production of 2-hydroxytetracosenoic acid (preferably 2-hydroxynervonic acid), which comprises
[61265] (a) increasing or generating the activity of a b2107-protein in the cytosol of a cell of a non-human organism or a part thereof, preferably a microorganism, a plant cell, a plant or a part thereof, as compared to a corresponding non-transformed wild type non-human organism or a part thereof; and
[61266] (b) growing the non-human organism or a part thereof under conditions which permit the production of 2-hydroxytetracosenoic acid (preferably 2-hydroxynervonic acid) or a composition comprising 2-hydroxytetracosenoic acid (preferably 2-hydroxynervonic acid) in said non-human organism or in the culture medium surrounding said non-human organism.

[61267] Accordingly, the present invention relates to a process for the production of lauric acid, which comprises
[61268] (a) increasing or generating the activity of a b2126-protein in the cytosol of a cell of a non-human organism or a part thereof, preferably a microorganism, a plant cell, a plant or a part thereof, as compared to a corresponding non-transformed wild type non-human organism or a part thereof; and
[61269] (b) growing the non-human organism or a part thereof under conditions which permit the production of lauric acid or a composition comprising lauric acid in said non-human organism or in the culture medium surrounding said non-human organism.

[61270] Accordingly, the present invention relates to a process for the production of 2-hydroxypalmitic acid, which comprises
[61271] (a) increasing or generating the activity of a b2139-protein in the cytosol of a cell of a non-human organism or a part thereof, preferably a microorganism, a plant cell, a plant or a part thereof, as compared to a corresponding non-transformed wild type non-human organism or a part thereof; and
[61272] (b) growing the non-human organism or a part thereof under conditions which permit the production of 2-hydroxypalmitic acid or a composition comprising 2-hydroxypalmitic acid in said non-human organism or in the culture medium surrounding said non-human organism.

[61273] Accordingly, the present invention relates to a process for the production of hexadecatrienoic acid, which comprises
[61274] (a) increasing or generating the activity of a ABC transporter permease protein in the cytosol of a cell of a non-human organism or a part thereof, preferably a microorganism, a plant cell, a plant or a part thereof, as compared to a corresponding non-transformed wild type non-human organism or a part thereof; and
[61275] (b) growing the non-human organism or a part thereof under conditions which permit the production of hexadecatrienoic acid or a composition comprising hexadecatrienoic acid in said non-human organism or in the culture medium surrounding said non-human organism.

[61276] Accordingly, the present invention relates to a process for the production of 2-hydroxybehenic acid, which comprises
[61277] (a) increasing or generating the activity of a sensor kinase in the cytosol of a cell of a non-human organism or a part thereof, preferably a microorganism, a plant cell, a plant or a part thereof, as compared to a corresponding non-transformed wild type non-human organism or a part thereof; and
[61278] (b) growing the non-human organism or a part thereof under conditions which permit the production of 2-hydroxybehenic acid or a composition comprising 2-hydroxybehenic acid in said non-human organism or in the culture medium surrounding said non-human organism.

[61279] Accordingly, the present invention relates to a process for the production of 2-hydroxytetracosenoic acid (preferably 2-hydroxynervonic acid), which comprises
[61280] (a) increasing or generating the activity of a b2360-protein in the cytosol of a cell of a non-human organism or a part thereof, preferably a microorganism, a plant cell, a plant or a part thereof, as compared to a corresponding non-transformed wild type non-human organism or a part thereof; and
[61281] (b) growing the non-human organism or a part thereof under conditions which permit the production of 2-hydroxytetracosenoic acid (preferably 2-hydroxynervonic acid) or a composition comprising 2-hydroxytetracosenoic acid (preferably 2-hydroxynervonic acid) in said non-human organism or in the culture medium surrounding said non-human organism.

[61282] Accordingly, the present invention relates to a process for the production of 2-hydroxytetracosenoic acid (preferably 2-hydroxynervonic acid), which comprises
[61283] (a) increasing or generating the activity of a cysteine synthase A in the cytosol of a cell of a non-human organism or a part thereof, preferably a microorganism, a plant cell, a plant or a part thereof, as compared to a corresponding non-transformed wild type non-human organism or a part thereof; and
[61284] (b) growing the non-human organism or a part thereof under conditions which permit the production of 2-hydroxytetracosenoic acid (preferably 2-hydroxynervonic acid) or a composition comprising 2-hydroxytetracosenoic acid (preferably 2-hydroxynervonic acid) in said non-human organism or in the culture medium surrounding said non-human organism.

[61285] Accordingly, the present invention relates to a process for the production of hexadecadienoic acid, which comprises
[61286] (a) increasing or generating the activity of a ethanolamine utilization protein in the cytosol of a cell of a non-human organism or a part thereof, preferably a microorganism, a plant cell, a plant or a part thereof, as compared to a corresponding non-transformed wild type non-human organism or a part thereof; and
[61287] (b) growing the non-human organism or a part thereof under conditions which permit the production of hexadecadienoic acid or a composition comprising hexadecadienoic acid in said non-human organism or in the culture medium surrounding said non-human organism.

[61288] Accordingly, the present invention relates to a process for the production of hexadecatrienoic acid, which comprises
[61289] (a) increasing or generating the activity of a ethanolamine utilization protein in the cytosol of a cell of a non-human organism or a part thereof, preferably a microorganism, a plant cell, a plant or a part thereof, as compared to a corresponding non-transformed wild type non-human organism or a part thereof; and
[61290] (b) growing the non-human organism or a part thereof under conditions which permit the production of hexadecatrienoic acid or a composition comprising hexadecatrienoic acid in said non-human organism or in the culture medium surrounding said non-human organism.

[61291] Accordingly, the present invention relates to a process for the production of oleic acid, which comprises
[61292] (a) increasing or generating the activity of a ethanolamine utilization protein in the cytosol of a cell of a non-human organism or a part thereof, preferably a microorganism, a plant cell, a plant or a part thereof, as compared to a corresponding non-transformed wild type non-human organism or a part thereof; and
[61293] (b) growing the non-human organism or a part thereof under conditions which permit the production of oleic acid or a composition comprising oleic acid in said non-human organism or in the culture medium surrounding said non-human organism.

[61294] Accordingly, the present invention relates to a process for the production of cerebronic acid, which comprises
[61295] (a) increasing or generating the activity of a b2474-protein in the cytosol of a cell of a non-human organism or a part thereof, preferably a microorganism, a plant cell, a plant or a part thereof, as compared to a corresponding non-transformed wild type non-human organism or a part thereof; and
[61296] (b) growing the non-human organism or a part thereof under conditions which permit the production of cerebronic acid or a composition comprising cerebronic acid in said non-human organism or in the culture medium surrounding said non-human organism.

[61297] Accordingly, the present invention relates to a process for the production of hexadecatrienoic acid, which comprises
[61298] (a) increasing or generating the activity of a b2474-protein in the cytosol of a cell of a non-human organism or a part thereof, preferably a microorganism, a plant cell, a plant or a part thereof, as compared to a corresponding non-transformed wild type non-human organism or a part thereof; and
[61299] (b) growing the non-human organism or a part thereof under conditions which permit the production of hexadecatrienoic acid or a composition comprising hexadecatrienoic acid in said non-human organism or in the culture medium surrounding said non-human organism.

[61300] Accordingly, the present invention relates to a process for the production of 2-hydroxytetracosenoic acid (preferably 2-hydroxynervonic acid), which comprises
[61301] (a) increasing or generating the activity of a b2474-protein in the cytosol of a cell of a non-human organism or a part thereof, preferably a microorganism, a plant cell, a plant or a part thereof, as compared to a corresponding non-transformed wild type non-human organism or a part thereof; and
[61302] (b) growing the non-human organism or a part thereof under conditions which permit the production of 2-hydroxytetracosenoic acid (preferably 2-hydroxynervonic acid) or a composition comprising 2-hydroxytetracosenoic acid (preferably 2-hydroxynervonic acid) in said non-human organism or in the culture medium surrounding said non-human organism.

[61303] Accordingly, the present invention relates to a process for the production of hexadecadienoic acid, which comprises
[61304] (a) increasing or generating the activity of a b2513-protein in the cytosol of a cell of a non-human organism or a part thereof, preferably a microorganism, a plant cell, a plant or a part thereof, as compared to a corresponding non-transformed wild type non-human organism or a part thereof; and
[61305] (b) growing the non-human organism or a part thereof under conditions which permit the production of hexadecadienoic acid or a composition comprising hexadecadienoic acid in said non-human organism or in the culture medium surrounding said non-human organism.

[61306] Accordingly, the present invention relates to a process for the production of hexadecadienoic acid, which comprises
[61307] (a) increasing or generating the activity of a phosphatidylserine synthase in the cytosol of a cell of a non-human organism or a part thereof, preferably a microorganism, a plant cell, a plant or a part thereof, as compared to a corresponding non-transformed wild type non-human organism or a part thereof; and
[61308] (b) growing the non-human organism or a part thereof under conditions which permit the production of hexadecadienoic acid or a composition comprising hexadecadienoic acid in said non-human organism or in the culture medium surrounding said non-human organism.

[61309] Accordingly, the present invention relates to a process for the production of 2-hydroxytetracosenoic acid (preferably 2-hydroxynervonic acid), which comprises
[61310] (a) increasing or generating the activity of a b2654-protein in the cytosol of a cell of a non-human organism or a part thereof, preferably a microorganism, a plant cell, a plant or a part thereof, as compared to a corresponding non-transformed wild type non-human organism or a part thereof; and
[61311] (b) growing the non-human organism or a part thereof under conditions which permit the production of 2-hydroxytetracosenoic acid (preferably 2-hydroxynervonic acid) or a composition comprising 2-hydroxytetracosenoic acid (preferably 2-hydroxynervonic acid) in said non-human organism or in the culture medium surrounding said non-human organism.

[61312] Accordingly, the present invention relates to a process for the production of hexadecatrienoic acid, which comprises
[61313] (a) increasing or generating the activity of a 2-C-methyl-D-erythritol 4-phosphate cytidylyltransferase in the cytosol of a cell of a non-human organism or a part thereof, preferably a microorganism, a plant cell, a plant or a part thereof, as compared to a corresponding non-transformed wild type non-human organism or a part thereof; and
[61314] (b) growing the non-human organism or a part thereof under conditions which permit the production of hexadecatrienoic acid or a composition comprising hexadecatrienoic acid in said non-human organism or in the culture medium surrounding said non-human organism.

[61315] Accordingly, the present invention relates to a process for the production of eicosanoic acid, which comprises
[61316] (a) increasing or generating the activity of a alkaline phosphatase isozyme conversion protein in the cytosol of a cell of a non-human organism or a part thereof, preferably a microorganism, a plant cell, a plant or a part thereof, as compared to a corresponding non-transformed wild type non-human organism or a part thereof; and
[61317] (b) growing the non-human organism or a part thereof under conditions which permit the production of eicosanoic acid or a composition comprising eicosanoic acid in said non-human organism or in the culture medium surrounding said non-human organism.

[61318] Accordingly, the present invention relates to a process for the production of 2-hydroxytetracosenoic acid (preferably 2-hydroxynervonic acid), which comprises
[61319] (a) increasing or generating the activity of a murein transglycosylase in the cytosol of a cell of a non-human organism or a part thereof, preferably a microorganism, a plant cell, a plant or a part thereof, as compared to a corresponding non-transformed wild type non-human organism or a part thereof; and
[61320] (b) growing the non-human organism or a part thereof under conditions which permit the production of 2-hydroxytetracosenoic acid (preferably 2-hydroxynervonic acid) or a composition comprising 2-hydroxytetracosenoic acid (preferably 2-hydroxynervonic acid) in said non-human organism or in the culture medium surrounding said non-human organism.

[61321] Accordingly, the present invention relates to a process for the production of hexadecadienoic acid, which comprises
[61322] (a) increasing or generating the activity of a b3442-protein in the cytosol of a cell of a non-human organism or a part thereof, preferably a microorganism, a plant cell, a plant or a part thereof, as compared to a corresponding non-transformed wild type non-human organism or a part thereof; and
[61323] (b) growing the non-human organism or a part thereof under conditions which permit the production of hexadecadienoic acid or a composition comprising hexadecadienoic acid in said non-human organism or in the culture medium surrounding said non-human organism.

[61324] Accordingly, the present invention relates to a process for the production of cerebronic acid, which comprises
[61325] (a) increasing or generating the activity of a sugar transport system permease protein in the cytosol of a cell of a non-human organism or a part thereof, preferably a microorganism, a plant cell, a plant or a part thereof, as compared to a corresponding non-transformed wild type non-human organism or a part thereof; and
[61326] (b) growing the non-human organism or a part thereof under conditions which permit the production of cerebronic acid or a composition comprising cerebronic acid in said non-human organism or in the culture medium surrounding said non-human organism.

[61327] Accordingly, the present invention relates to a process for the production of 2-hydroxybehenic acid, which comprises
[61328] (a) increasing or generating the activity of a b3812-protein in the cytosol of a cell of a non-human organism or a part thereof, preferably a microorganism, a plant cell, a plant or a part thereof, as compared to a corresponding non-transformed wild type non-human organism or a part thereof; and
[61329] (b) growing the non-human organism or a part thereof under conditions which permit the production of 2-hydroxybehenic acid or a composition comprising 2-hydroxybehenic acid in said non-human organism or in the culture medium surrounding said non-human organism.

[61330] Accordingly, the present invention relates to a process for the production of hexadecadienoic acid, which comprises
[61331] (a) increasing or generating the activity of a 3-ketoacyl-CoA thiolase in the cytosol of a cell of a non-human organism or a part thereof, preferably a microorganism, a plant cell, a plant or a part thereof, as compared to a corresponding non-transformed wild type non-human organism or a part thereof; and
[61332] (b) growing the non-human organism or a part thereof under conditions which permit the production of hexadecadienoic acid or a composition comprising hexadecadienoic acid in said non-human organism or in the culture medium surrounding said non-human organism.

[61333] Accordingly, the present invention relates to a process for the production of oleic acid, which comprises
[61334] (a) increasing or generating the activity of a 3-ketoacyl-CoA thiolase in the cytosol of a cell of a non-human organism or a part thereof, preferably a microorganism, a plant cell, a plant or a part thereof, as compared to a corresponding non-transformed wild type non-human organism or a part thereof; and
[61335] (b) growing the non-human organism or a part thereof under conditions which permit the production of oleic acid or a composition comprising oleic acid in said non-human organism or in the culture medium surrounding said non-human organism.

[61336] Accordingly, the present invention relates to a process for the production of hexadecadienoic acid, which comprises
[61337] (a) increasing or generating the activity of a transcriptional regulator in the cytosol of a cell of a non-human organism or a part thereof, preferably a microorganism, a plant cell, a plant or a part thereof, as compared to a corresponding non-transformed wild type non-human organism or a part thereof; and
[61338] (b) growing the non-human organism or a part thereof under conditions which permit the production of hexadecadienoic acid or a composition comprising hexadecadienoic acid in said non-human organism or in the culture medium surrounding said non-human organism.

[61339] Accordingly, the present invention relates to a process for the production of hexadecadienoic acid, which comprises
[61340] (a) increasing or generating the activity of a fructose 1,6-bisphosphatase in the cytosol of a cell of a non-human organism or a part thereof, preferably a microorganism, a plant cell, a plant or a part thereof, as compared to a corresponding non-transformed wild type non-human organism or a part thereof; and
[61341] (b) growing the non-human organism or a part thereof under conditions which permit the production of hexadecadienoic acid or a composition comprising hexadecadienoic acid in said non-human organism or in the culture medium surrounding said non-human organism.

[61342] Accordingly, the present invention relates to a process for the production of behenic acid, which comprises
[61343] (a) increasing or generating the activity of a cystathionine gamma-synthase in the cytosol of a cell of a non-human organism or a part thereof, preferably a microorganism, a plant cell, a plant or a part thereof, as compared to a corresponding non-transformed wild type non-human organism or a part thereof; and
[61344] (b) growing the non-human organism or a part thereof under conditions which permit the production of behenic acid or a composition comprising behenic acid in said non-human organism or in the culture medium surrounding said non-human organism.

[61345] Accordingly, the present invention relates to a process for the production of heptadecanoic acid, which comprises
[61346] (a) increasing or generating the activity of a cystathionine gamma-synthase in the cytosol of a cell of a non-human organism or a part thereof, preferably a microorganism, a plant cell, a plant or a part thereof, as compared to a corresponding non-transformed wild type non-human organism or a part thereof; and
[61347] (b) growing the non-human organism or a part thereof under conditions which permit the production of heptadecanoic acid or a composition comprising heptadecanoic acid in said non-human organism or in the culture medium surrounding said non-human organism.

[61348] Accordingly, the present invention relates to a process for the production of oleic acid, which comprises
[61349] (a) increasing or generating the activity of a cystathionine gamma-synthase in the cytosol of a cell of a non-human organism or a part thereof, preferably a microorganism, a plant cell, a plant or a part thereof, as compared to a corresponding non-transformed wild type non-human organism or a part thereof; and
[61350] (b) growing the non-human organism or a part thereof under conditions which permit the production of oleic acid or a composition comprising oleic acid in said non-human organism or in the culture medium surrounding said non-human organism.

[61351] Accordingly, the present invention relates to a process for the production of 2-hydroxypalmitic acid, which comprises
[61352] (a) increasing or generating the activity of a b3944-protein in the cytosol of a cell of a non-human organism or a part thereof, preferably a microorganism, a plant cell, a plant or a part thereof, as compared to a corresponding non-transformed wild type non-human organism or a part thereof; and
[61353] (b) growing the non-human organism or a part thereof under conditions which permit the production of 2-hydroxypalmitic acid or a composition comprising 2-hydroxypalmitic acid in said non-human organism or in the culture medium surrounding said non-human organism.

[61354] Accordingly, the present invention relates to a process for the production of 2-hydroxybehenic acid, which comprises
[61355] (a) increasing or generating the activity of a ankyrin repeat protein in the cytosol of a cell of a non-human organism or a part thereof, preferably a microorganism, a plant cell, a plant or a part thereof, as compared to a corresponding non-transformed wild type non-human organism or a part thereof; and
[61356] (b) growing the non-human organism or a part thereof under conditions which permit the production of 2-hydroxybehenic acid or a composition comprising 2-hydroxybehenic acid in said non-human organism or in the culture medium surrounding said non-human organism.

[61357] Accordingly, the present invention relates to a process for the production of hexadecadienoic acid, which comprises
[61358] (a) increasing or generating the activity of a b4023-protein in the cytosol of a cell of a non-human organism or a part thereof, preferably a microorganism, a plant cell, a plant or a part thereof, as compared to a corresponding non-transformed wild type non-human organism or a part thereof; and
[61359] (b) growing the non-human organism or a part thereof under conditions which permit the production of hexadecadienoic acid or a composition comprising hexadecadienoic acid in said non-human organism or in the culture medium surrounding said non-human organism.

[61360] Accordingly, the present invention relates to a process for the production of heptadecanoic acid, which comprises
[61361] (a) increasing or generating the activity of a acetyl-coenzyme A synthetase in the cytosol of a cell of a non-human organism or a part thereof, preferably a microorganism, a plant cell, a plant or a part thereof, as compared to a corresponding non-transformed wild type non-human organism or a part thereof; and
[61362] (b) growing the non-human organism or a part thereof under conditions which permit the production of heptadecanoic acid or a composition comprising heptadecanoic acid in said non-human organism or in the culture medium surrounding said non-human organism.

[61363] Accordingly, the present invention relates to a process for the production of 2-hydroxypalmitic acid, which comprises
[61364] (a) increasing or generating the activity of a b4205-protein in the cytosol of a cell of a non-human organism or a part thereof, preferably a microorganism, a plant cell, a plant or a part thereof, as compared to a corresponding non-transformed wild type non-human organism or a part thereof; and
[61365] (b) growing the non-human organism or a part thereof under conditions which permit the production of 2-hydroxypalmitic acid or a composition comprising 2-hydroxypalmitic acid in said non-human organism or in the culture medium surrounding said non-human organism.

[61366] Accordingly, the present invention relates to a process for the production of 2-hydroxybehenic acid, which comprises
[61367] (a) increasing or generating the activity of a vacuolar processing enzyme in the cytosol of a cell of a non-human organism or a part thereof, preferably a microorganism, a plant cell, a plant or a part thereof, as compared to a corresponding non-transformed wild type non-human organism or a part thereof; and
[61368] (b) growing the non-human organism or a part thereof under conditions which permit the production of 2-hydroxybehenic acid or a composition comprising 2-hydroxybehenic acid in said non-human organism or in the culture medium surrounding said non-human organism.

[61369] Accordingly, the present invention relates to a process for the production of 2-hydroxypalmitic acid, which comprises
[61370] (a) increasing or generating the activity of a glutaredoxin in the cytosol of a cell of a non-human organism or a part thereof, preferably a microorganism, a plant cell, a plant or a part thereof, as compared to a corresponding non-transformed wild type non-human organism or a part thereof; and
[61371] (b) growing the non-human organism or a part thereof under conditions which permit the production of 2-hydroxypalmitic acid or a composition comprising 2-hydroxypalmitic acid in said non-human organism or in the culture medium surrounding said non-human organism.

[61372] Accordingly, the present invention relates to a process for the production of cerebronic acid, which comprises
[61373] (a) increasing or generating the activity of a transcription factor in the cytosol of a cell of a non-human organism or a part thereof, preferably a microorganism, a plant cell, a plant or a part thereof, as compared to a corresponding non-transformed wild type non-human organism or a part thereof; and
[61374] (b) growing the non-human organism or a part thereof under conditions which permit the production of cerebronic acid or a composition comprising cerebronic acid in said non-human organism or in the culture medium surrounding said non-human organism.

[61375] Accordingly, the present invention relates to a process for the production of hexadecatrienoic acid, which comprises
[61376] (a) increasing or generating the activity of a transcription factor in the cytosol of a cell of a non-human organism or a part thereof, preferably a microorganism, a plant cell, a plant or a part thereof, as compared to a corresponding non-transformed wild type non-human organism or a part thereof; and
[61377] (b) growing the non-human organism or a part thereof under conditions which permit the production of hexadecatrienoic acid or a composition comprising hexadecatrienoic acid in said non-human organism or in the culture medium surrounding said non-human organism.

[61378] Accordingly, the present invention relates to a process for the production of 2-hydroxytetracosenoic acid (preferably 2-hydroxynervonic acid), which comprises
[61379] (a) increasing or generating the activity of a GM02LC38418-protein in the cytosol of a cell of a non-human organism or a part thereof, preferably a microorganism, a plant cell, a plant or a part thereof, as compared to a corresponding non-transformed wild type non-human organism or a part thereof; and
[61380] (b) growing the non-human organism or a part thereof under conditions which permit the production of 2-hydroxytetracosenoic acid (preferably 2-hydroxynervonic acid) or a composition comprising 2-hydroxytetracosenoic acid (preferably 2-hydroxynervonic acid) in said non-human organism or in the culture medium surrounding said non-human organism.

[61381] Accordingly, the present invention relates to a process for the production of hexadecadienoic acid, which comprises
[61382] (a) increasing or generating the activity of a sll0281-protein in the cytosol of a cell of a non-human organism or a part thereof, preferably a microorganism, a plant cell, a plant or a part thereof, as compared to a corresponding non-transformed wild type non-human organism or a part thereof; and
[61383] (b) growing the non-human organism or a part thereof under conditions which permit the production of hexadecadienoic acid or a composition comprising hexadecadienoic acid in said non-human organism or in the culture medium surrounding said non-human organism.

[61384] Accordingly, the present invention relates to a process for the production of 2-hydroxytetracosenoic acid (preferably 2-hydroxynervonic acid), which comprises
[61385] (a) increasing or generating the activity of a bifunctional protein (phosphoribosyltransferase and regulatory protein) in the cytosol of a cell of a non-human organism or a part thereof, preferably a microorganism, a plant cell, a plant or a part thereof, as compared to a corresponding non-transformed wild type non-human organism or a part thereof; and
[61386] (b) growing the non-human organism or a part thereof under conditions which permit the production of 2-hydroxytetracosenoic acid (preferably 2-hydroxynervonic acid) or a composition comprising 2-hydroxytetracosenoic acid (preferably 2-hydroxynervonic acid) in said non-human organism or in the culture medium surrounding said non-human organism.

[61387] Accordingly, the present invention relates to a process for the production of 2-hydroxytetracosenoic acid (preferably 2-hydroxynervonic acid), which comprises
[61388] (a) increasing or generating the activity of a sll0406-protein in the cytosol of a cell of a non-human organism or a part thereof, preferably a microorganism, a plant cell, a plant or a part thereof, as compared to a corresponding non-transformed wild type non-human organism or a part thereof; and
[61389] (b) growing the non-human organism or a part thereof under conditions which permit the production of 2-hydroxytetracosenoic acid (preferably 2-hydroxynervonic acid) or a composition comprising 2-hydroxytetracosenoic acid (preferably 2-hydroxynervonic acid) in said non-human organism or in the culture medium surrounding said non-human organism.

[61390] Accordingly, the present invention relates to a process for the production of cerebronic acid, which comprises
[61391] (a) increasing or generating the activity of a binding-protein-dependent transport systems inner membrane component in the cytosol of a cell of a non-human organism or a part thereof, preferably a microorganism, a plant cell, a plant or a part thereof, as compared to a corresponding non-transformed wild type non-human organism or a part thereof; and
[61392] (b) growing the non-human organism or a part thereof under conditions which permit the production of cerebronic acid or a composition comprising cerebronic acid in said non-human organism or in the culture medium surrounding said non-human organism.

[61393] Accordingly, the present invention relates to a process for the production of cerebronic acid, which comprises
[61394] (a) increasing or generating the activity of a phosphatase in the cytosol of a cell of a non-human organism or a part thereof, preferably a microorganism, a plant cell, a plant or a part thereof, as compared to a corresponding non-transformed wild type non-human organism or a part thereof; and
[61395] (b) growing the non-human organism or a part thereof under conditions which permit the production of cerebronic acid or a composition comprising cerebronic acid in said non-human organism or in the culture medium surrounding said non-human organism.

[61396] Accordingly, the present invention relates to a process for the production of 2-hydroxytetracosenoic acid (preferably 2-hydroxynervonic acid), which comprises
[61397] (a) increasing or generating the activity of a phosphatase in the cytosol of a cell of a non-human organism or a part thereof, preferably a microorganism, a plant cell, a plant or a part thereof, as compared to a corresponding non-transformed wild type non-human organism or a part thereof; and
[61398] (b) growing the non-human organism or a part thereof under conditions which permit the production of 2-hydroxytetracosenoic acid (preferably 2-hydroxynervonic acid) or a composition comprising 2-hydroxytetracosenoic acid (preferably 2-hydroxynervonic acid) in said non-human organism or in the culture medium surrounding said non-human organism.

[61399] Accordingly, the present invention relates to a process for the production of hexadecadienoic acid, which comprises
[61400] (a) increasing or generating the activity of a carbon dioxide concentrating mechanism protein in the cytosol of a cell of a non-human organism or a part thereof, preferably a microorganism, a plant cell, a plant or a part thereof, as compared to a corresponding non-transformed wild type non-human organism or a part thereof; and
[61401] (b) growing the non-human organism or a part thereof under conditions which permit the production of hexadecadienoic acid or a composition comprising hexadecadienoic acid in said non-human organism or in the culture medium surrounding said non-human organism.

[61402] Accordingly, the present invention relates to a process for the production of hexadecatrienoic acid, which comprises
[61403] (a) increasing or generating the activity of a carbon dioxide concentrating mechanism protein in the cytosol of a cell of a non-human organism or a part thereof, preferably a microorganism, a plant cell, a plant or a part thereof, as compared to a corresponding non-transformed wild type non-human organism or a part thereof; and
[61404] (b) growing the non-human organism or a part thereof under conditions which permit the production of hexadecatrienoic acid or a composition comprising hexadecatrienoic acid in said non-human organism or in the culture medium surrounding said non-human organism.

[61405] Accordingly, the present invention relates to a process for the production of cerebronic acid, which comprises
[61406] (a) increasing or generating the activity of a coproporphyrinogen III oxidase in the cytosol of a cell of a non-human organism or a part thereof, preferably a microorganism, a plant cell, a plant or a part thereof, as compared to a corresponding non-transformed wild type non-human organism or a part thereof; and
[61407] (b) growing the non-human organism or a part thereof under conditions which permit the production of cerebronic acid or a composition comprising cerebronic acid in said non-human organism or in the culture medium surrounding said non-human organism.

[61408] Accordingly, the present invention relates to a process for the production of 2-hydroxytetracosenoic acid (preferably 2-hydroxynervonic acid), which comprises
[61409] (a) increasing or generating the activity of a coproporphyrinogen III oxidase in the cytosol of a cell of a non-human organism or a part thereof, preferably a microorganism, a plant cell, a plant or a part thereof, as compared to a corresponding non-transformed wild type non-human organism or a part thereof; and
[61410] (b) growing the non-human organism or a part thereof under conditions which permit the production of 2-hydroxytetracosenoic acid (preferably 2-hydroxynervonic acid) or a composition comprising 2-hydroxytetracosenoic acid (preferably 2-hydroxynervonic acid) in said non-human organism or in the culture medium surrounding said non-human organism.

[61411] Accordingly, the present invention relates to a process for the production of 2-hydroxypalmitic acid, which comprises
[61412] (a) increasing or generating the activity of a oxidoreductase in the cytosol of a cell of a non-human organism or a part thereof, preferably a microorganism, a plant cell, a plant or a part thereof, as compared to a corresponding non-transformed wild type non-human organism or a part thereof; and
[61413] (b) growing the non-human organism or a part thereof under conditions which permit the production of 2-hydroxypalmitic acid or a composition comprising 2-hydroxypalmitic acid in said non-human organism or in the culture medium surrounding said non-human organism.

[61414] Accordingly, the present invention relates to a process for the production of hexadecatrienoic acid, which comprises
[61415] (a) increasing or generating the activity of a bifunctional purine biosynthesis protein in the cytosol of a cell of a non-human organism or a part thereof, preferably a microorganism, a plant cell, a plant or a part thereof, as compared to a corresponding non-transformed wild type non-human organism or a part thereof; and
[61416] (b) growing the non-human organism or a part thereof under conditions which permit the production of hexadecatrienoic acid or a composition comprising hexadecatrienoic acid in said non-human organism or in the culture medium surrounding said non-human organism.

[61417] Accordingly, the present invention relates to a process for the production of cerebronic acid, which comprises
[61418] (a) increasing or generating the activity of a malate dehydrogenase in the cytosol of a cell of a non-human organism or a part thereof, preferably a microorganism, a plant cell, a plant or a part thereof, as compared to a corresponding non-transformed wild type non-human organism or a part thereof; and
[61419] (b) growing the non-human organism or a part thereof under conditions which permit the production of cerebronic acid or a composition comprising cerebronic acid in said non-human organism or in the culture medium surrounding said non-human organism.

[61420] Accordingly, the present invention relates to a process for the production of hexadecatrienoic acid, which comprises
[61421] (a) increasing or generating the activity of a glycine cleavage system H protein in the cytosol of a cell of a non-human organism or a part thereof, preferably a microorganism, a plant cell, a plant or a part thereof, as compared to a corresponding non-transformed wild type non-human organism or a part thereof; and
[61422] (b) growing the non-human organism or a part thereof under conditions which permit the production of hexadecatrienoic acid or a composition comprising hexadecatrienoic acid in said non-human organism or in the culture medium surrounding said non-human organism.

[61423] Accordingly, the present invention relates to a process for the production of 2-hydroxytetracosenoic acid (preferably 2-hydroxynervonic acid), which comprises
[61424] (a) increasing or generating the activity of a permease protein of ABC transporter in the cytosol of a cell of a non-human organism or a part thereof, preferably a microorganism, a plant cell, a plant or a part thereof, as compared to a corresponding non-transformed wild type non-human organism or a part thereof; and
[61425] (b) growing the non-human organism or a part thereof under conditions which permit the production of 2-hydroxytetracosenoic acid (preferably 2-hydroxynervonic acid) or a composition comprising 2-hydroxytetracosenoic acid (preferably 2-hydroxynervonic acid) in said non-human organism or in the culture medium surrounding said non-human organism.

[61426] Accordingly, the present invention relates to a process for the production of hexadecadienoic acid, which comprises
[61427] (a) increasing or generating the activity of a tryptophan synthase alpha chain in the cytosol of a cell of a non-human organism or a part thereof, preferably a microorganism, a plant cell, a plant or a part thereof, as compared to a corresponding non-transformed wild type non-human organism or a part thereof; and
[61428] (b) growing the non-human organism or a part thereof under conditions which permit the production of hexadecadienoic acid or a composition comprising hexadecadienoic acid in said non-human organism or in the culture medium surrounding said non-human organism.

[61429] Accordingly, the present invention relates to a process for the production of 2-hydroxybehenic acid, which comprises
[61430] (a) increasing or generating the activity of a dihydrolipoamide dehydrogenase in the cytosol of a cell of a non-human organism or a part thereof, preferably a microorganism, a plant cell, a plant or a part thereof, as compared to a corresponding non-transformed wild type non-human organism or a part thereof; and
[61431] (b) growing the non-human organism or a part thereof under conditions which permit the production of 2-hydroxybehenic acid or a composition comprising 2-hydroxybehenic acid in said non-human organism or in the culture medium surrounding said non-human organism.

[61432] Accordingly, the present invention relates to a process for the production of 2-hydroxypalmitic acid, which comprises
[61433] (a) increasing or generating the activity of a phosphate import ATP-binding protein in the cytosol of a cell of a non-human organism or a part thereof, preferably a microorganism, a plant cell, a plant or a part thereof, as compared to a corresponding non-transformed wild type non-human organism or a part thereof; and
[61434] (b) growing the non-human organism or a part thereof under conditions which permit the production of 2-hydroxypalmitic acid or a composition comprising 2-hydroxypalmitic acid in said non-human organism or in the culture medium surrounding said non-human organism.

[61435] Accordingly, the present invention relates to a process for the production of hexadecatrienoic acid, which comprises
[61436] (a) increasing or generating the activity of a glutamate 5-kinase in the cytosol of a cell of a non-human organism or a part thereof, preferably a microorganism, a plant cell, a plant or a part thereof, as compared to a corresponding non-transformed wild type non-human organism or a part thereof; and
[61437] (b) growing the non-human organism or a part thereof under conditions which permit the production of hexadecatrienoic acid or a composition comprising hexadecatrienoic acid in said non-human organism or in the culture medium surrounding said non-human organism.

[61438] Accordingly, the present invention relates to a process for the production of cerebronic acid, which comprises
[61439] (a) increasing or generating the activity of a threonine dehydratase in the cytosol of a cell of a non-human organism or a part thereof, preferably a microorganism, a plant cell, a plant or a part thereof, as compared to a corresponding non-transformed wild type non-human organism or a part thereof; and
[61440] (b) growing the non-human organism or a part thereof under conditions which permit the production of cerebronic acid or a composition comprising cerebronic acid in said non-human organism or in the culture medium surrounding said non-human organism.

[61441] Accordingly, the present invention relates to a process for the production of hexadecatrienoic acid, which comprises
[61442] (a) increasing or generating the activity of a threonine dehydratase in the cytosol of a cell of a non-human organism or a part thereof, preferably a microorganism, a plant cell, a plant or a part thereof, as compared to a corresponding non-transformed wild type non-human organism or a part thereof; and
[61443] (b) growing the non-human organism or a part thereof under conditions which permit the production of hexadecatrienoic acid or a composition comprising hexadecatrienoic acid in said non-human organism or in the culture medium surrounding said non-human organism.

[61444] Accordingly, the present invention relates to a process for the production of 2-hydroxytetracosenoic acid (preferably 2-hydroxynervonic acid), which comprises
[61445] (a) increasing or generating the activity of a threonine dehydratase in the cytosol of a cell of a non-human organism or a part thereof, preferably a microorganism, a plant cell, a plant or a part thereof, as compared to a corresponding non-transformed wild type non-human organism or a part thereof; and
[61446] (b) growing the non-human organism or a part thereof under conditions which permit the production of 2-hydroxytetracosenoic acid (preferably 2-hydroxynervonic acid) or a composition comprising 2-hydroxytetracosenoic acid (preferably 2-hydroxynervonic acid) in said non-human organism or in the culture medium surrounding said non-human organism.

[61447] Accordingly, the present invention relates to a process for the production of 2-hydroxytetracosenoic acid (preferably 2-hydroxynervonic acid), which comprises
[61448] (a) increasing or generating the activity of a ferredoxin in the cytosol of a cell of a non-human organism or a part thereof, preferably a microorganism, a plant cell, a plant or a part thereof, as compared to a corresponding non-transformed wild type non-human organism or a part thereof; and
[61449] (b) growing the non-human organism or a part thereof under conditions which permit the production of 2-hydroxytetracosenoic acid (preferably 2-hydroxynervonic acid) or a composition comprising 2-hydroxytetracosenoic acid (preferably 2-hydroxynervonic acid) in said non-human organism or in the culture medium surrounding said non-human

[61450] Accord ivp,iArre present invention relates to a process for the production of 2-hydroxybehenic acid, which comprises
[61451] (a) increasing or generating the activity of a Sec-independent protein translocase subunit in the cytosol of a cell of a non-human organism or a part thereof, preferably a microorganism, a plant cell, a plant or a part thereof, as compared to a corresponding non-transformed wild type non-human organism or a part thereof; and
[61452] (b) growing the non-human organism or a part thereof under conditions which permit the production of 2-hydroxybehenic acid or a composition comprising 2-hydroxybehenic acid in said non-human organism or in the culture medium surrounding said non-human organism.

[61453] Accordingly, the present invention relates to a process for the production of 2-hydroxytetracosenoic acid (preferably 2-hydroxynervonic acid), which comprises
[61454] (a) increasing or generating the activity of a amino acid ABC transporter permease protein in the cytosol of a cell of a non-human organism or a part thereof, preferably a microorganism, a plant cell, a plant or a part thereof, as compared to a corresponding non-transformed wild type non-human organism or a part thereof; and
[61455] (b) growing the non-human organism or a part thereof under conditions which permit the production of 2-hydroxytetracosenoic acid (preferably 2-hydroxynervonic acid) or a composition comprising 2-hydroxytetracosenoic acid (preferably 2-hydroxynervonic acid) in said non-human organism or in the culture medium surrounding said non-human organism.

[61456] Accordingly, the present invention relates to a process for the production of cerebronic acid, which comprises
[61457] (a) increasing or generating the activity of a metal-dependent hydrolase in the cytosol of a cell of a non-human organism or a part thereof, preferably a microorganism, a plant cell, a plant or a part thereof, as compared to a corresponding non-transformed wild type non-human organism or a part thereof; and
[61458] (b) growing the non-human organism or a part thereof under conditions which permit the production of cerebronic acid or a composition comprising cerebronic acid in said non-human organism or in the culture medium surrounding said non-human organism.

[61459] Accordingly, the present invention relates to a process for the production of hexadecadienoic acid, which comprises
[61460] (a) increasing or generating the activity of a metal-dependent hydrolase in the cytosol of a cell of a non-human organism or a part thereof, preferably a microorganism, a plant cell, a plant or a part thereof, as compared to a corresponding non-transformed wild type non-human organism or a part thereof; and
[61461] (b) growing the non-human organism or a part thereof under conditions which permit the production of hexadecadienoic acid or a composition comprising hexadecadienoic acid in said non-human organism or in the culture medium surrounding said non-human organism.

[61462] Accordingly, the present invention relates to a process for the production of 2-hydroxybehenic acid, which comprises
[61463] (a) increasing or generating the activity of a multiple antibiotic resistance protein in the cytosol of a cell of a non-human organism or a part thereof, preferably a microorganism, a plant cell, a plant or a part thereof, as compared to a corresponding non-transformed wild type non-human organism or a part thereof; and
[61464] (b) growing the non-human organism or a part thereof under conditions which permit the production of 2-hydroxybehenic acid or a composition comprising 2-hydroxybehenic acid in said non-human organism or in the culture medium surrounding said non-human organism.

[61465] Accordingly, the present invention relates to a process for the production of hexadecatrienoic acid, which comprises
[61466] (a) increasing or generating the activity of a TTC1386-protein in the cytosol of a cell of a non-human organism or a part thereof, preferably a microorganism, a plant cell, a plant or a part thereof, as compared to a corresponding non-transformed wild type non-human organism or a part thereof; and
[61467] (b) growing the non-human organism or a part thereof under conditions which permit the production of hexadecatrienoic acid or a composition comprising hexadecatrienoic acid in said non-human organism or in the culture medium surrounding said non-human organism.

[61468] Accordingly, the present invention relates to a process for the production of 2-hydroxybehenic acid, which comprises
[61469] (a) increasing or generating the activity of a homocitrate synthase in the cytosol of a cell of a non-human organism or a part thereof, preferably a microorganism, a plant cell, a plant or a part thereof, as compared to a corresponding non-transformed wild type non-human organism or a part thereof; and
[61470] (b) growing the non-human organism or a part thereof under conditions which permit the production of 2-hydroxybehenic acid or a composition comprising 2-hydroxybehenic acid in said non-human organism or in the culture medium surrounding said non-human organism.

[61471] Accordingly, the present invention relates to a process for the production of hexadecadienoic acid, which comprises
[61472] (a) increasing or generating the activity of a protein kinase in the cytosol of a cell of a non-human organism or a part thereof, preferably a microorganism, a plant cell, a plant or a part thereof, as compared to a corresponding non-transformed wild type non-human organism or a part thereof; and
[61473] (b) growing the non-human organism or a part thereof under conditions which permit the production of hexadecadienoic acid or a composition comprising hexadecadienoic acid in said non-human organism or in the culture medium surrounding said non-human organism.

[61474] Accordingly, the present invention relates to a process for the production of hexadecatrienoic acid, which comprises
[61475] (a) increasing or generating the activity of a protein kinase in the cytosol of a cell of a non-human organism or a part thereof, preferably a microorganism, a plant cell, a plant or a part thereof, as compared to a corresponding non-transformed wild type non-human organism or a part thereof; and
[61476] (b) growing the non-human organism or a part thereof under conditions which permit the production of hexadecatrienoic acid or a composition comprising hexadecatrienoic acid in said non-human organism or in the culture medium surrounding said non-human organism.

[61477] Accordingly, the present invention relates to a process for the production of hexadecadienoic acid, which comprises
[61478] (a) increasing or generating the activity of a transcription factor in the cytosol of a cell of a non-human organism or a part thereof, preferably a microorganism, a plant cell, a plant or a part thereof, as compared to a corresponding non-transformed wild type non-human organism or a part thereof; and
[61479] (b) growing the non-human organism or a part thereof under conditions which permit the production of hexadecadienoic acid or a composition comprising hexadecadienoic acid in said non-human organism or in the culture medium surrounding said non-human organism.

[61480] Accordingly, the present invention relates to a process for the production of hexadecatrienoic acid, which comprises
[61481] (a) increasing or generating the activity of a transcription factor in the cytosol of a cell of a non-human organism or a part thereof, preferably a microorganism, a plant cell, a plant or a part thereof, as compared to a corresponding non-transformed wild type non-human organism or a part thereof; and
[61482] (b) growing the non-human organism or a part thereof under conditions which permit the production of hexadecatrienoic acid or a composition comprising hexadecatrienoic acid in said non-human organism or in the culture medium surrounding said non-human organism.

[61483] Accordingly, the present invention relates to a process for the production of hexadecatrienoic acid, which comprises
[61484] (a) increasing or generating the activity of a cell division control protein in the cytosol of a cell of a non-human organism or a part thereof, preferably a microorganism, a plant cell, a plant or a part thereof, as compared to a corresponding non-transformed wild type non-human organism or a part thereof; and
[61485] (b) growing the non-human organism or a part thereof under conditions which permit the production of hexadecatrienoic acid or a composition comprising hexadecatrienoic acid in said non-human organism or in the culture medium surrounding said non-human organism.

[61486] Accordingly, the present invention relates to a process for the production of cerebronic acid, which comprises
[61487] (a) increasing or generating the activity of a ycl027w-protein in the cytosol of a cell of a non-human organism or a part thereof, preferably a microorganism, a plant cell, a plant or a part thereof, as compared to a corresponding non-transformed wild type non-human organism or a part thereof; and
[61488] (b) growing the non-human organism or a part thereof under conditions which permit the production of cerebronic acid or a composition comprising cerebronic acid in said non-human organism or in the culture medium surrounding said non-human organism.

[61489] Accordingly, the present invention relates to a process for the production of 2-hydroxytetracosenoic acid (preferably 2-hydroxynervonic acid), which comprises
[61490] (a) increasing or generating the activity of a ycl027w-protein in the cytosol of a cell of a non-human organism or a part thereof, preferably a microorganism, a plant cell, a plant or a part thereof, as compared to a corresponding non-transformed wild type non-human organism or a part thereof; and
[61491] (b) growing the non-human organism or a part thereof under conditions which permit the production of 2-hydroxytetracosenoic acid (preferably 2-hydroxynervonic acid) or a composition comprising 2-hydroxytetracosenoic acid (preferably 2-hydroxynervonic acid) in said non-human organism or in the culture medium surrounding said non-human organism.

[61492] Accordingly, the present invention relates to a process for the production of 2-hydroxypalmitic acid, which comprises
[61493] (a) increasing or generating the activity of a ycl049c-protein in the cytosol of a cell of a non-human organism or a part thereof, preferably a microorganism, a plant cell, a plant or a part thereof, as compared to a corresponding non-transformed wild type non-human organism or a part thereof; and
[61494] (b) growing the non-human organism or a part thereof under conditions which permit the production of 2-hydroxypalmitic acid or a composition comprising 2-hydroxypalmitic acid in said non-human organism or in the culture medium surrounding said non-human organism.

[61495] Accordingly, the present invention relates to a process for the production of oleic acid, which comprises
[61496] (a) increasing or generating the activity of a glycerol-3-phosphate dehydrogenase in the cytosol of a cell of a non-human organism or a part thereof, preferably a microorganism, a plant cell, a plant or a part thereof, as compared to a corresponding non-transformed wild type non-human organism or a part thereof; and
[61497] (b) growing the non-human organism or a part thereof under conditions which permit the production of oleic acid or a composition comprising oleic acid in said non-human organism or in the culture medium surrounding said non-human organism.

[61498] Accordingly, the present invention relates to a process for the production of eicosanoic acid, which comprises
[61499] (a) increasing or generating the activity of a isocitrate dehydrogenase in the cytosol of a cell of a non-human organism or a part thereof, preferably a microorganism, a plant cell, a plant or a part thereof, as compared to a corresponding non-transformed wild type non-human organism or a part thereof; and
[61500] (b) growing the non-human organism or a part thereof under conditions which permit the production of eicosanoic acid or a composition comprising eicosanoic acid in said non-human organism or in the culture medium surrounding said non-human organism.

[61501] Accordingly, the present invention relates to a process for the production of heptadecanoic acid, which comprises
[61502] (a) increasing or generating the activity of a isocitrate dehydrogenase in the cytosol of a cell of a non-human organism or a part thereof, preferably a microorganism, a plant cell, a plant or a part thereof, as compared to a corresponding non-transformed wild type non-human organism or a part thereof; and
[61503] (b) growing the non-human organism or a part thereof under conditions which permit the production of heptadecanoic acid or a composition comprising heptadecanoic acid in said non-human organism or in the culture medium surrounding said non-human organism.

[61504] Accordingly, the present invention relates to a process for the production of hexadecadienoic acid, which comprises
[61505] (a) increasing or generating the activity of a cell division control protein in the cytosol of a cell of a non-human organism or a part thereof, preferably a microorganism, a plant cell, a plant or a part thereof, as compared to a corresponding non-transformed wild type non-human organism or a part thereof; and
[61506] (b) growing the non-human organism or a part thereof under conditions which permit the production of hexadecadienoic acid or a composition comprising hexadecadienoic acid in said non-human organism or in the culture medium surrounding said non-human organism.

[61507] Accordingly, the present invention relates to a process for the production of hexadecatrienoic acid, which comprises
[61508] (a) increasing or generating the activity of a cell division control protein in the cytosol of a cell of a non-human organism or a part thereof, preferably a microorganism, a plant cell, a plant or a part thereof, as compared to a corresponding non-transformed wild type non-human organism or a part thereof; and
[61509] (b) growing the non-human organism or a part thereof under conditions which permit the production of hexadecatrienoic acid or a composition comprising hexadecatrienoic acid in said non-human organism or in the culture medium surrounding said non-human organism.

[61510] Accordingly, the present invention relates to a process for the production of 2-hydroxybehenic acid, which comprises
[61511] (a) increasing or generating the activity of a homocitrate synthase in the cytosol of a cell of a non-human organism or a part thereof, preferably a microorganism, a plant cell, a plant or a part thereof, as compared to a corresponding non-transformed wild type non-human organism or a part thereof; and
[61512] (b) growing the non-human organism or a part thereof under conditions which permit the production of 2-hydroxybehenic acid or a composition comprising 2-hydroxybehenic acid in said non-human organism or in the culture medium surrounding said non-human organism.

[61513] Accordingly, the present invention relates to a process for the production of behenic acid, which comprises
[61514] (a) increasing or generating the activity of a phospho-2-dehydro-3-deoxyheptonate aldolase in the cytosol of a cell of a non-human organism or a part thereof, preferably a microorganism, a plant cell, a plant or a part thereof, as compared to a corresponding non-transformed wild type non-human organism or a part thereof; and
[61515] (b) growing the non-human organism or a part thereof under conditions which permit the production of behenic acid or a composition comprising behenic acid in said non-human organism or in the culture medium surrounding said non-human organism.

[61516] Accordingly, the present invention relates to a process for the production of 2-hydroxytetracosenoic acid (preferably 2-hydroxynervonic acid), which comprises
[61517] (a) increasing or generating the activity of a cell wall protein in the cytosol of a cell of a non-human organism or a part thereof, preferably a microorganism, a plant cell, a plant or a part thereof, as compared to a corresponding non-transformed wild type non-human organism or a part thereof; and
[61518] (b) growing the non-human organism or a part thereof under conditions which permit the production of 2-hydroxytetracosenoic acid (preferably 2-hydroxynervonic acid) or a composition comprising 2-hydroxytetracosenoic acid (preferably 2-hydroxynervonic acid) in said non-human organism or in the culture medium surrounding said non-human organism.

[61519] Accordingly, the present invention relates to a process for the production of 2-hydroxytetracosenoic acid (preferably 2-hydroxynervonic acid), which comprises
[61520] (a) increasing or generating the activity of a F-box protein in the cytosol of a cell of a non-human organism or a part thereof, preferably a microorganism, a plant cell, a plant or a part thereof, as compared to a corresponding non-transformed wild type non-human organism or a part thereof; and
[61521] (b) growing the non-human organism or a part thereof under conditions which permit the production of 2-hydroxytetracosenoic acid (preferably 2-hydroxynervonic acid) or a composition comprising 2-hydroxytetracosenoic acid (preferably 2-hydroxynervonic acid) in said non-human organism or in the culture medium surrounding said non-human organism.

[61522] Accordingly, the present invention relates to a process for the production of cerebronic acid, which comprises
[61523] (a) increasing or generating the activity of a ydr273w-protein in the cytosol of a cell of a non-human organism or a part thereof, preferably a microorganism, a plant cell, a plant or a part thereof, as compared to a corresponding non-transformed wild type non-human organism or a part thereof; and
[61524] (b) growing the non-human organism or a part thereof under conditions which permit the production of cerebronic acid or a composition comprising cerebronic acid in said non-human organism or in the culture medium surrounding said non-human organism.

[61525] Accordingly, the present invention relates to a process for the production of 2-hydroxytetracosenoic acid (preferably 2-hydroxynervonic acid), which comprises
[61526] (a) increasing or generating the activity of a ydr273w-protein in the cytosol of a cell of a non-human organism or a part thereof, preferably a microorganism, a plant cell, a plant or a part thereof, as compared to a corresponding non-transformed wild type non-human organism or a part thereof; and
[61527] (b) growing the non-human organism or a part thereof under conditions which permit the production of 2-hydroxytetracosenoic acid (preferably 2-hydroxynervonic acid) or a composition comprising 2-hydroxytetracosenoic acid (preferably 2-hydroxynervonic acid) in said non-human organism or in the culture medium surrounding said non-human

[61528] Accordirgjip,iAhre present invention relates to a process for the production of hexadecatrienoic acid, which comprises
[61529] (a) increasing or generating the activity of a ydr339c-protein in the cytosol of a cell of a non-human organism or a part thereof, preferably a microorganism, a plant cell, a plant or a part thereof, as compared to a corresponding non-transformed wild type non-human organism or a part thereof; and
[61530] (b) growing the non-human organism or a part thereof under conditions which permit the production of hexadecatrienoic acid or a composition comprising hexadecatrienoic acid in said non-human organism or in the culture medium surrounding said non-human organism.

[61531] Accordingly, the present invention relates to a process for the production of heptadecanoic acid, which comprises
[61532] (a) increasing or generating the activity of a aldolase in the cytosol of a cell of a non-human organism or a part thereof, preferably a microorganism, a plant cell, a plant or a part thereof, as compared to a corresponding non-transformed wild type non-human organism or a part thereof; and
[61533] (b) growing the non-human organism or a part thereof under conditions which permit the production of heptadecanoic acid or a composition comprising heptadecanoic acid in said non-human organism or in the culture medium surrounding said non-human organism.

[61534] Accordingly, the present invention relates to a process for the production of myristic acid, which comprises
[61535] (a) increasing or generating the activity of a small nuclear ribonucleoprotein in the cytosol of a cell of a non-human organism or a part thereof, preferably a microorganism, a plant cell, a plant or a part thereof, as compared to a corresponding non-transformed wild type non-human organism or a part thereof; and
[61536] (b) growing the non-human organism or a part thereof under conditions which permit the production of myristic acid or a composition comprising myristic acid in said non-human organism or in the culture medium surrounding said non-human organism.

[61537] Accordingly, the present invention relates to a process for the production of hexadecadienoic acid, which comprises
[61538] (a) increasing or generating the activity of a molecular chaperone portein in the cytosol of a cell of a non-human organism or a part thereof, preferably a microorganism, a plant cell, a plant or a part thereof, as compared to a corresponding non-transformed wild type non-human organism or a part thereof; and
[61539] (b) growing the non-human organism or a part thereof under conditions which permit the production of hexadecadienoic acid or a composition comprising hexadecadienoic acid in said non-human organism or in the culture medium surrounding said non-human organism.

[61540] Accordingly, the present invention relates to a process for the production of hexadecatrienoic acid, which comprises
[61541] (a) increasing or generating the activity of a molecular chaperone portein in the cytosol of a cell of a non-human organism or a part thereof, preferably a microorganism, a plant cell, a plant or a part thereof, as compared to a corresponding non-transformed wild type non-human organism or a part thereof; and
[61542] (b) growing the non-human organism or a part thereof under conditions which permit the production of hexadecatrienoic acid or a composition comprising hexadecatrienoic acid in said non-human organism or in the culture medium surrounding said non-human organism.

[61543] Accordingly, the present invention relates to a process for the production of 2-hydroxybehenic acid, which comprises
[61544] (a) increasing or generating the activity of a YFL019C-protein in the cytosol of a cell of a non-human organism or a part thereof, preferably a microorganism, a plant cell, a plant or a part thereof, as compared to a corresponding non-transformed wild type non-human organism or a part thereof; and
[61545] (b) growing the non-human organism or a part thereof under conditions which permit the production of 2-hydroxybehenic acid or a composition comprising 2-hydroxybehenic acid in said non-human organism or in the culture medium surrounding said non-human organism.

[61546] Accordingly, the present invention relates to a process for the production of 2-hydroxypalmitic acid, which comprises
[61547] (a) increasing or generating the activity of a YFL019C-protein in the cytosol of a cell of a non-human organism or a part thereof, preferably a microorganism, a plant cell, a plant or a part thereof, as compared to a corresponding non-transformed wild type non-human organism or a part thereof; and
[61548] (b) growing the non-human organism or a part thereof under conditions which permit the production of 2-hydroxypalmitic acid or a composition comprising 2-hydroxypalmitic acid in said non-human organism or in the culture medium surrounding said non-human organism.

[61549] Accordingly, the present invention relates to a process for the production of hexadecadienoic acid, which comprises
[61550] (a) increasing or generating the activity of a aminotransferase in the cytosol of a cell of a non-human organism or a part thereof, preferably a microorganism, a plant cell, a plant or a part thereof, as compared to a corresponding non-transformed wild type non-human organism or a part thereof; and
[61551] (b) growing the non-human organism or a part thereof under conditions which permit the production of hexadecadienoic acid or a composition comprising hexadecadienoic acid in said non-human organism or in the culture medium surrounding said non-human organism.

[61552] Accordingly, the present invention relates to a process for the production of hexadecatrienoic acid, which comprises
[61553] (a) increasing or generating the activity of a ygl237c-protein in the cytosol of a cell of a non-human organism or a part thereof, preferably a microorganism, a plant cell, a plant or a part thereof, as compared to a corresponding non-transformed wild type non-human organism or a part thereof; and
[61554] (b) growing the non-human organism or a part thereof under conditions which permit the production of hexadecatrienoic acid or a composition comprising hexadecatrienoic acid in said non-human organism or in the culture medium surrounding said non-human organism.

[61555] Accordingly, the present invention relates to a process for the production of eicosanoic acid, which comprises
[61556] (a) increasing or generating the activity of a YGR104C-protein in the cytosol of a cell of a non-human organism or a part thereof, preferably a microorganism, a plant cell, a plant or a part thereof, as compared to a corresponding non-transformed wild type non-human organism or a part thereof; and
[61557] (b) growing the non-human organism or a part thereof under conditions which permit the production of eicosanoic acid or a composition comprising eicosanoic acid in said non-human organism or in the culture medium surrounding said non-human organism.

[61558] Accordingly, the present invention relates to a process for the production of cerebronic acid, which comprises
[61559] (a) increasing or generating the activity of a squalene monooxygenase in the cytosol of a cell of a non-human organism or a part thereof, preferably a microorganism, a plant cell, a plant or a part thereof, as compared to a corresponding non-transformed wild type non-human organism or a part thereof; and
[61560] (b) growing the non-human organism or a part thereof under conditions which permit the production of cerebronic acid or a composition comprising cerebronic acid in said non-human organism or in the culture medium surrounding said non-human organism.

[61561] Accordingly, the present invention relates to a process for the production of hexadecadienoic acid, which comprises
[61562] (a) increasing or generating the activity of a biotin synthase in the cytosol of a cell of a non-human organism or a part thereof, preferably a microorganism, a plant cell, a plant or a part thereof, as compared to a corresponding non-transformed wild type non-human organism or a part thereof; and
[61563] (b) growing the non-human organism or a part thereof under conditions which permit the production of hexadecadienoic acid or a composition comprising hexadecadienoic acid in said non-human organism or in the culture medium surrounding said non-human organism.

[61564] Accordingly, the present invention relates to a process for the production of cerebronic acid, which comprises
[61565] (a) increasing or generating the activity of a yhr033w-protein in the cytosol of a cell of a non-human organism or a part thereof, preferably a microorganism, a plant cell, a plant or a part thereof, as compared to a corresponding non-transformed wild type non-human organism or a part thereof; and
[61566] (b) growing the non-human organism or a part thereof under conditions which permit the production of cerebronic acid or a composition comprising cerebronic acid in said non-human organism or in the culture medium surrounding said non-human organism.

[61567] Accordingly, the present invention relates to a process for the production of cerebronic acid, which comprises
[61568] (a) increasing or generating the activity of a DnaJ-like chaperone in the cytosol of a cell of a non-human organism or a part thereof, preferably a microorganism, a plant cell, a plant or a part thereof, as compared to a corresponding non-transformed wild type non-human organism or a part thereof; and
[61569] (b) growing the non-human organism or a part thereof under conditions which permit the production of cerebronic acid or a composition comprising cerebronic acid in said non-human organism or in the culture medium surrounding said non-human organism.

[61570] Accordingly, the present invention relates to a process for the production of 2-hydroxybehenic acid, which comprises
[61571] (a) increasing or generating the activity of a YJL127W-A-protein in the cytosol of a cell of a non-human organism or a part thereof, preferably a microorganism, a plant cell, a plant or a part thereof, as compared to a corresponding non-transformed wild type non-human organism or a part thereof; and
[61572] (b) growing the non-human organism or a part thereof under conditions which permit the production of 2-hydroxybehenic acid or a composition comprising 2-hydroxybehenic acid in said non-human organism or in the culture medium surrounding said non-human organism.

[61573] Accordingly, the present invention relates to a process for the production of 2-hydroxytetracosenoic acid (preferably 2-hydroxynervonic acid), which comprises
[61574] (a) increasing or generating the activity of a cystathionine gamma-synthase in the cytosol of a cell of a non-human organism or a part thereof, preferably a microorganism, a plant cell, a plant or a part thereof, as compared to a corresponding non-transformed wild type non-human organism or a part thereof; and
[61575] (b) growing the non-human organism or a part thereof under conditions which permit the production of 2-hydroxytetracosenoic acid (preferably 2-hydroxynervonic acid) or a composition comprising 2-hydroxytetracosenoic acid (preferably 2-hydroxynervonic acid) in said non-human organism or in the culture medium surrounding said non-human organism.

[61576] Accordingly, the present invention relates to a process for the production of 2-hydroxypalmitic acid, which comprises
[61577] (a) increasing or generating the activity of a cystathionine gamma-synthase in the cytosol of a cell of a non-human organism or a part thereof, preferably a microorganism, a plant cell, a plant or a part thereof, as compared to a corresponding non-transformed wild type non-human organism or a part thereof; and
[61578] (b) growing the non-human organism or a part thereof under conditions which permit the production of 2-hydroxypalmitic acid or a composition comprising 2-hydroxypalmitic acid in said non-human organism or in the culture medium surrounding said non-human organism.

[61579] Accordingly, the present invention relates to a process for the production of 2-hydroxypalmitic acid, which comprises
[61580] (a) increasing or generating the activity of a polygalacturonase in the cytosol of a cell of a non-human organism or a part thereof, preferably a microorganism, a plant cell, a plant or a part thereof, as compared to a corresponding non-transformed wild type non-human organism or a part thereof; and
[61581] (b) growing the non-human organism or a part thereof under conditions which permit the production of 2-hydroxypalmitic acid or a composition comprising 2-hydroxypalmitic acid in said non-human organism or in the culture medium surrounding said non-human organism.

[61582] Accordingly, the present invention relates to a process for the production of hexadecatrienoic acid, which comprises
[61583] (a) increasing or generating the activity of a cyclin in the cytosol of a cell of a non-human organism or a part thereof, preferably a microorganism, a plant cell, a plant or a part thereof, as compared to a corresponding non-transformed wild type non-human organism or a part thereof; and
[61584] (b) growing the non-human organism or a part thereof under conditions which permit the production of hexadecatrienoic acid or a composition comprising hexadecatrienoic acid in said non-human organism or in the culture medium surrounding said non-human organism.

[61585] Accordingly, the present invention relates to a process for the production of hexadecadienoic acid, which comprises
[61586] (a) increasing or generating the activity of a ylr326w-protein in the cytosol of a cell of a non-human organism or a part thereof, preferably a microorganism, a plant cell, a plant or a part thereof, as compared to a corresponding non-transformed wild type non-human organism or a part thereof; and
[61587] (b) growing the non-human organism or a part thereof under conditions which permit the production of hexadecadienoic acid or a composition comprising hexadecadienoic acid in said non-human organism or in the culture medium surrounding said non-human organism.

[61588] Accordingly, the present invention relates to a process for the production of hexadecatrienoic acid, which comprises
[61589] (a) increasing or generating the activity of a ylr326w-protein in the cytosol of a cell of a non-human organism or a part thereof, preferably a microorganism, a plant cell, a plant or a part thereof, as compared to a corresponding non-transformed wild type non-human organism or a part thereof; and
[61590] (b) growing the non-human organism or a part thereof under conditions which permit the production of hexadecatrienoic acid or a composition comprising hexadecatrienoic acid in said non-human organism or in the culture medium surrounding said non-human organism.

[61591] Accordingly, the present invention relates to a process for the production of 2-hydroxybehenic acid, which comprises
[61592] (a) increasing or generating the activity of a yml083c-protein in the cytosol of a cell of a non-human organism or a part thereof, preferably a microorganism, a plant cell, a plant or a part thereof, as compared to a corresponding non-transformed wild type non-human organism or a part thereof; and
[61593] (b) growing the non-human organism or a part thereof under conditions which permit the production of 2-hydroxybehenic acid or a composition comprising 2-hydroxybehenic acid in said non-human organism or in the culture medium surrounding said non-human organism.

[61594] Accordingly, the present invention relates to a process for the production of 2-hydroxytetracosenoic acid (preferably 2-hydroxynervonic acid), which comprises
[61595] (a) increasing or generating the activity of a yml084w-protein in the cytosol of a cell of a non-human organism or a part thereof, preferably a microorganism, a plant cell, a plant or a part thereof, as compared to a corresponding non-transformed wild type non-human organism or a part thereof; and
[61596] (b) growing the non-human organism or a part thereof under conditions which permit the production of 2-hydroxytetracosenoic acid (preferably 2-hydroxynervonic acid) or a composition comprising 2-hydroxytetracosenoic acid (preferably 2-hydroxynervonic acid) in said non-human organism or in the culture medium surrounding said non-human organism.

[61597] Accordingly, the present invention relates to a process for the production of 2-hydroxypalmitic acid, which comprises
[61598] (a) increasing or generating the activity of a molecular chaperone in the cytosol of a cell of a non-human organism or a part thereof, preferably a microorganism, a plant cell, a plant or a part thereof, as compared to a corresponding non-transformed wild type non-human organism or a part thereof; and
[61599] (b) growing the non-human organism or a part thereof under conditions which permit the production of 2-hydroxypalmitic acid or a composition comprising 2-hydroxypalmitic acid in said non-human organism or in the culture medium surrounding said non-human organism.

[61600] Accordingly, the present invention relates to a process for the production of oleic acid, which comprises
[61601] (a) increasing or generating the activity of a phosphotransferase in the cytosol of a cell of a non-human organism or a part thereof, preferably a microorganism, a plant cell, a plant or a part thereof, as compared to a corresponding non-transformed wild type non-human organism or a part thereof; and
[61602] (b) growing the non-human organism or a part thereof under conditions which permit the production of oleic acid or a composition comprising oleic acid in said non-human organism or in the culture medium surrounding said non-human organism.

[61603] Accordingly, the present invention relates to a process for the production of 2-hydroxybehenic acid, which comprises
[61604] (a) increasing or generating the activity of a ynl321w-protein in the cytosol of a cell of a non-human organism or a part thereof, preferably a microorganism, a plant cell, a plant or a part thereof, as compared to a corresponding non-transformed wild type non-human organism or a part thereof; and
[61605] (b) growing the non-human organism or a part thereof under conditions which permit the production of 2-hydroxybehenic acid or a composition comprising 2-hydroxybehenic acid in said non-human organism or in the culture medium surrounding said non-human organism.

[61606] Accordingly, the present invention relates to a process for the production of hexadecatrienoic acid, which comprises
[61607] (a) increasing or generating the activity of a Elongation factor Tu in the cytosol of a cell of a non-human organism or a part thereof, preferably a microorganism, a plant cell, a plant or a part thereof, as compared to a corresponding non-transformed wild type non-human organism or a part thereof; and
[61608] (b) growing the non-human organism or a part thereof under conditions which permit the production of hexadecatrienoic acid or a composition comprising hexadecatrienoic acid in said non-human organism or in the culture medium surrounding said non-human organism.

[61609] Accordingly, the present invention relates to a process for the production of 2-hydroxytetracosenoic acid (preferably 2-hydroxynervonic acid), which comprises
[61610] (a) increasing or generating the activity of a ATPase epsilon subunit in the cytosol of a cell of a non-human organism or a part thereof, preferably a microorganism, a plant cell, a plant or a part thereof, as compared to a corresponding non-transformed wild type non-human organism or a part thereof; and
[61611] (b) growing the non-human organism or a part thereof under conditions which permit the production of 2-hydroxytetracosenoic acid (preferably 2-hydroxynervonic acid) or a composition comprising 2-hydroxytetracosenoic acid (preferably 2-hydroxynervonic acid) in said non-human organism or in the culture medium surrounding said non-human organism.

[61612] Accordingly, the present invention relates to a process for the production of 2-hydroxypalmitic acid, which comprises
[61613] (a) increasing or generating the activity of a phosphoadenosine phosphosulfate reductase in the cytosol of a cell of a non-human organism or a part thereof, preferably a microorganism, a plant cell, a plant or a part thereof, as compared to a corresponding non-transformed wild type non-human organism or a part thereof; and
[61614] (b) growing the non-human organism or a part thereof under conditions which permit the production of 2-hydroxypalmitic acid or a composition comprising 2-hydroxypalmitic acid in said non-human organism or in the culture medium surrounding said non-human organism.

[61615] Accordingly, the present invention relates to a process for the production of oleic acid, which comprises
[61616] (a) increasing or generating the activity of a 40S ribosomal protein S17 in the cytosol of a cell of a non-human organism or a part thereof, preferably a microorganism, a plant cell, a plant or a part thereof, as compared to a corresponding non-transformed wild type non-human organism or a part thereof; and
[61617] (b) growing the non-human organism or a part thereof under conditions which permit the production of oleic acid or a composition comprising oleic acid in said non-human organism or in the culture medium surrounding said non-human organism.

[61618] Accordingly, the present invention relates to a process for the production of 2-hydroxybehenic acid, which comprises
[61619] (a) increasing or generating the activity of a b3644-protein in the cytosol of a cell of a non-human organism or a part thereof, preferably a microorganism, a plant cell, a plant or a part thereof, as compared to a corresponding non-transformed wild type non-human organism or a part thereof; and
[61620] (b) growing the non-human organism or a part thereof under conditions which permit the production of 2-hydroxybehenic acid or a composition comprising 2-hydroxybehenic acid in said non-human organism or in the culture medium surrounding said non-human organism.

[61621] Accordingly, the present invention relates to a process for the production of behenic acid, which comprises
[61622] (a) increasing or generating the activity of a b3644-protein in the cytosol of a cell of a non-human organism or a part thereof, preferably a microorganism, a plant cell, a plant or a part thereof, as compared to a corresponding non-transformed wild type non-human organism or a part thereof; and
[61623] (b) growing the non-human organism or a part thereof under conditions which permit the production of behenic acid or a composition comprising behenic acid in said non-human organism or in the culture medium surrounding said non-human organism.

[61624] Accordingly, the present invention relates to a process for the production of nervonic acid, which comprises
[61625] (a) increasing or generating the activity of a b3644-protein in the cytosol of a cell of a non-human organism or a part thereof, preferably a microorganism, a plant cell, a plant or a part thereof, as compared to a corresponding non-transformed wild type non-human organism or a part thereof; and
[61626] (b) growing the non-human organism or a part thereof under conditions which permit the production of nervonic acid or a composition comprising nervonic acid in said non-human organism or in the culture medium surrounding said non-human organism.

[61627] Accordingly, the present invention relates to a process for the production of 2-hydroxybehenic acid, which comprises
[61628] (a) increasing or generating the activity of a polypeptide comprising a polypeptide as depicted in the respective line in column 5 or 8 of Table II, application no. 12, or a homolog or a fragment thereof, a consensus sequence or at least one polypeptide motif as depicted in the respective line in column 8 of Table IV, application no. 12, whereby the respective line discloses in column 7 the fine chemical 2-hydroxybehenic acid; or
[61629] increasing or generating the activity of an expression product of one or more nucleic acid molecule(s) comprising a polynucleotide as depicted in the respective line in column 5 or 8 of Table I, application no. 12, preferably the coding region thereof, or a homolog or a fragment thereof, whereby the respective line discloses in column 7 the fine chemical 2-hydroxybehenic acid;
[61630] in the cytosol of a cell of a non-human organism or a part thereof; preferably a microorganism, a plant cell, a plant or a part thereof, as compared to a corresponding non-transformed wild type non-human organism or a part thereof; and
[61631] (b) growing the non-human organism under conditions which permit the production of 2-hydroxybehenic acid, or a composition comprising 2-hydroxybehenic acid in said non-human organism or in the culture medium surrounding said non-human organism.

[61632] Accordingly, the present invention relates to a process for the production of 2-hydroxypalmitic acid, which comprises
[61633] (a) increasing or generating the activity of a polypeptide comprising a polypeptide as depicted in the respective line in column 5 or 8 of Table II, application no. 12, or a homolog or a fragment thereof, a consensus sequence or at least one polypeptide motif as depicted in the respective line in column 8 of Table IV, application no. 12, whereby the respective line discloses in column 7 the fine chemical 2-hydroxypalmitic acid; or
[61634] increasing or generating the activity of an expression product of one or more nucleic acid molecule(s) comprising a polynucleotide as depicted in the respective line in column 5 or 8 of Table I, application no. 12, preferably the coding region thereof, or a homolog or a fragment thereof, whereby the respective line discloses in column 7 the fine chemical 2-hydroxypalmitic acid;
[61635] in the cytosol of a cell of a non-human organism or a part thereof; preferably a microorganism, a plant cell, a plant or a part thereof, as compared to a corresponding non-transformed wild type non-human organism or a part thereof; and
[61636] (b) growing the non-human organism under conditions which permit the production of 2-hydroxypalmitic acid, or a composition comprising 2-hydroxypalmitic acid in said non-human organism or in the culture medium surrounding said non-human organism.

[61637] Accordingly, the present invention relates to a process for the production of 2-hydroxytetracosenoic acid (preferably 2-hydroxynervonic acid), which comprises
[61638] (a) increasing or generating the activity of a polypeptide comprising a polypeptide as depicted in the respective line in column 5 or 8 of Table II, application no. 12, or a homolog or a fragment thereof, a consensus sequence or at least one polypeptide motif as depicted in the respective line in column 8 of Table IV, application no. 12, whereby the respective line discloses in column 7 the fine chemical 2-hydroxytetracosenoic acid (preferably 2-hydroxynervonic acid); or
[61639] increasing or generating the activity of an expression product of one or more nucleic acid molecule(s) comprising a polynucleotide as depicted in the respective line in column 5 or 8 of Table I, application no. 12, preferably the coding region thereof, or a homolog or a fragment thereof, whereby the respective line discloses in column 7 the fine chemical 2-hydroxytetracosenoic acid (preferably 2-hydroxynervonic acid);
[61640] in the cytosol of a cell of a non-human organism or a part thereof; preferably a microorganism, a plant cell, a plant or a part thereof, as compared to a corresponding non-transformed wild type non-human organism or a part thereof; and
[61641] (b) growing the non-human organism under conditions which permit the production of 2-hydroxytetracosenoic acid (preferably 2-hydroxynervonic acid), or a composition comprising 2-hydroxytetracosenoic acid (preferably 2-hydroxynervonic acid) in said non-human organism or in the culture medium surrounding said non-human organism.

[61642] Accordingly, the present invention relates to a process for the production of behenic acid, which comprises
[61643] (a) increasing or generating the activity of a polypeptide comprising a polypeptide as depicted in the respective line in column 5 or 8 of Table II, application no. 12, or a homolog or a fragment thereof, a consensus sequence or at least one polypeptide motif as depicted in the respective line in column 8 of Table IV, application no. 12, whereby the respective line discloses in column 7 the fine chemical behenic acid; or
[61644] increasing or generating the activity of an expression product of one or more nucleic acid molecule(s) comprising a polynucleotide as depicted in the respective line in column 5 or 8 of Table I, application no. 12, preferably the coding region thereof, or a homolog or a fragment thereof, whereby the respective line discloses in column 7 the fine chemical behenic acid;
[61645] in the cytosol of a cell of a non-human organism or a part thereof; preferably a microorganism, a plant cell, a plant or a part thereof, as compared to a corresponding non-transformed wild type non-human organism or a part thereof; and
[61646] (b) growing the non-human organism under conditions which permit the production of behenic acid, or a composition comprising behenic acid in said non-human organism or in the culture medium surrounding said non-human organism.

[61647] Accordingly, the present invention relates to a process for the production of cerebronic acid, which comprises
[61648] (a) increasing or generating the activity of a polypeptide comprising a polypeptide as depicted in the respective line in column 5 or 8 of Table II, application no. 12, or a homolog or a fragment thereof, a consensus sequence or at least one polypeptide motif as depicted in the respective line in column 8 of Table IV, application no. 12, whereby the respective line discloses in column 7 the fine chemical cerebronic acid; or
[61649] increasing or generating the activity of an expression product of one or more nucleic acid molecule(s) comprising a polynucleotide as depicted in the respective line in column 5 or 8 of Table I, application no. 12, preferably the coding region thereof, or a homolog or a fragment thereof, whereby the respective line discloses in column 7 the fine chemical cerebronic acid;
[61650] in the cytosol of a cell of a non-human organism or a part thereof; preferably a microorganism, a plant cell, a plant or a part thereof, as compared to a corresponding non-transformed wild type non-human organism or a part thereof; and
[61651] (b) growing the non-human organism under conditions which permit the production of cerebronic acid, or a composition comprising cerebronic acid in said non-human organism or in the culture medium surrounding said non-human organism.

[61652] Accordingly, the present invention relates to a process for the production of eicosanoic acid, which comprises
[61653] (a) increasing or generating the activity of a polypeptide comprising a polypeptide as depicted in the respective line in column 5 or 8 of Table II, application no. 12, or a homolog or a fragment thereof, a consensus sequence or at least one polypeptide motif as depicted in the respective line in column 8 of Table IV, application no. 12, whereby the respective line discloses in column 7 the fine chemical eicosanoic acid; or
[61654] increasing or generating the activity of an expression product of one or more nucleic acid molecule(s) comprising a polynucleotide as depicted in the respective line in column 5 or 8 of Table I, application no. 12, preferably the coding region thereof, or a homolog or a fragment thereof, whereby the respective line discloses in column 7 the fine chemical eicosanoic acid;
[61655] in the cytosol of a cell of a non-human organism or a part thereof; preferably a microorganism, a plant cell, a plant or a part thereof, as compared to a corresponding non-transformed wild type non-human organism or a part thereof; and
[61656] (b) growing the non-human organism under conditions which permit the production of eicosanoic acid, or a composition comprising eicosanoic acid in said non-human organism or in the culture medium surrounding said non-human organism.

[61657] Accordingly, the present invention relates to a process for the production of heptadecanoic acid, which comprises
[61658] (a) increasing or generating the activity of a polypeptide comprising a polypeptide as depicted in the respective line in column 5 or 8 of Table II, application no. 12, or a homolog or a fragment thereof, a consensus sequence or at least one polypeptide motif as depicted in the respective line in column 8 of Table IV, application no. 12, whereby the respective line discloses in column 7 the fine chemical heptadecanoic acid; or
[61659] increasing or generating the activity of an expression product of one or more nucleic acid molecule(s) comprising a polynucleotide as depicted in the respective line in column 5 or 8 of Table I, application no. 12, preferably the coding region thereof, or a homolog or a fragment thereof, whereby the respective line discloses in column 7 the fine chemical heptadecanoic acid;
[61660] in the cytosol of a cell of a non-human organism or a part thereof; preferably a microorganism, a plant cell, a plant or a part thereof, as compared to a corresponding non-transformed wild type non-human organism or a part thereof; and
[61661] (b) growing the non-human organism under conditions which permit the production of heptadecanoic acid, or a composition comprising heptadecanoic acid in said non-human organism or in the culture medium surrounding said non-human organism.

[61662] Accordingly, the present invention relates to a process for the production of hexadecadienoic acid, which comprises
[61663] (a) increasing or generating the activity of a polypeptide comprising a polypeptide as depicted in the respective line in column 5 or 8 of Table II, application no. 12, or a homolog or a fragment thereof, a consensus sequence or at least one polypeptide motif as depicted in the respective line in column 8 of Table IV, application no. 12, whereby the respective line discloses in column 7 the fine chemical hexadecadienoic acid; or
[61664] increasing or generating the activity of an expression product of one or more nucleic acid molecule(s) comprising a polynucleotide as depicted in the respective line in column 5 or 8 of Table I, application no. 12, preferably the coding region thereof, or a homolog or a fragment thereof, whereby the respective line discloses in column 7 the fine chemical hexadecadienoic acid;
[61665] in the cytosol of a cell of a non-human organism or a part thereof; preferably a microorganism, a plant cell, a plant or a part thereof, as compared to a corresponding non-transformed wild type non-human organism or a part thereof; and
[61666] (b) growing the non-human organism under conditions which permit the production of hexadecadienoic acid, or a composition comprising hexadecadienoic acid in said non-human organism or in the culture medium surrounding said non-human organism.

[61667] Accordingly, the present invention relates to a process for the production of hexadecatrienoic acid, which comprises
[61668] (a) increasing or generating the activity of a polypeptide comprising a polypeptide as depicted in the respective line in column 5 or 8 of Table II, application no. 12, or a homolog or a fragment thereof, a consensus sequence or at least one polypeptide motif as depicted in the respective line in column 8 of Table IV, application no. 12, whereby the respective line discloses in column 7 the fine chemical hexadecatrienoic acid; or
[61669] increasing or generating the activity of an expression product of one or more nucleic acid molecule(s) comprising a polynucleotide as depicted in the respective line in column 5 or 8 of Table I, application no. 12, preferably the coding region thereof, or a homolog or a fragment thereof, whereby the respective line discloses in column 7 the fine chemical hexadecatrienoic acid;
[61670] in the cytosol of a cell of a non-human organism or a part thereof; preferably a microorganism, a plant cell, a plant or a part thereof, as compared to a corresponding non-transformed wild type non-human organism or a part thereof; and
[61671] (b) growing the non-human organism under conditions which permit the production of hexadecatrienoic acid, or a composition comprising hexadecatrienoic acid in said non-human organism or in the culture medium surrounding said non-human organism.

[61672] Accordingly, the present invention relates to a process for the production of lauric acid, which comprises
[61673] (a) increasing or generating the activity of a polypeptide comprising a polypeptide as depicted in the respective line in column 5 or 8 of Table II, application no. 12, or a homolog or a fragment thereof, a consensus sequence or at least one polypeptide motif as depicted in the respective line in column 8 of Table IV, application no. 12, whereby the respective line discloses in column 7 the fine chemical lauric acid; or
[61674] increasing or generating the activity of an expression product of one or more nucleic acid molecule(s) comprising a polynucleotide as depicted in the respective line in column 5 or 8 of Table I, application no. 12, preferably the coding region thereof, or a homolog or a fragment thereof, whereby the respective line discloses in column 7 the fine chemical lauric acid;
[61675] in the cytosol of a cell of a non-human organism or a part thereof; preferably a microorganism, a plant cell, a plant or a part thereof, as compared to a corresponding non-transformed wild type non-human organism or a part thereof; and
[61676] (b) growing the non-human organism under conditions which permit the production of lauric acid, or a composition comprising lauric acid in said non-human organism or in the culture medium surrounding said non-human organism.

[61677] Accordingly, the present invention relates to a process for the production of myristic acid, which comprises
[61678] (a) increasing or generating the activity of a polypeptide comprising a polypeptide as depicted in the respective line in column 5 or 8 of Table II, application no. 12, or a homolog or a fragment thereof, a consensus sequence or at least one polypeptide motif as depicted in the respective line in column 8 of Table IV, application no. 12, whereby the respective line discloses in column 7 the fine chemical myristic acid; or
[61679] increasing or generating the activity of an expression product of one or more nucleic acid molecule(s) comprising a polynucleotide as depicted in the respective line in column 5 or 8 of Table I, application no. 12, preferably the coding region thereof, or a homolog or a fragment thereof, whereby the respective line discloses in column 7 the fine chemical myristic acid;
[61680] in the cytosol of a cell of a non-human organism or a part thereof; preferably a microorganism, a plant cell, a plant or a part thereof, as compared to a corresponding non-transformed wild type non-human organism or a part thereof; and
[61681] (b) growing the non-human organism under conditions which permit the production of myristic acid, or a composition comprising myristic acid in said non-human organism or in the culture medium surrounding said non-human organism.

[61682] Accordingly, the present invention relates to a process for the production of nervonic acid, which comprises
[61683] (a) increasing or generating the activity of a polypeptide comprising a polypeptide as depicted in the respective line in column 5 or 8 of Table II, application no. 12, or a homolog or a fragment thereof, a consensus sequence or at least one polypeptide motif as depicted in the respective line in column 8 of Table IV, application no. 12, whereby the respective line discloses in column 7 the fine chemical nervonic acid; or
[61684] increasing or generating the activity of an expression product of one or more nucleic acid molecule(s) comprising a polynucleotide as depicted in the respective line in column 5 or 8 of Table I, application no. 12, preferably the coding region thereof, or a homolog or a fragment thereof, whereby the respective line discloses in column 7 the fine chemical nervonic acid;
[61685] in the cytosol of a cell of a non-human organism or a part thereof; preferably a microorganism, a plant cell, a plant or a part thereof, as compared to a corresponding non-transformed wild type non-human organism or a part thereof; and
[61686] (b) growing the non-human organism under conditions which permit the production of nervonic acid, or a composition comprising nervonic acid in said non-human organism or in the culture medium surrounding said non-human organism.

[61687] Accordingly, the present invention relates to a process for the production of oleic acid, which comprises
[61688] (a) increasing or generating the activity of a polypeptide comprising a polypeptide as depicted in the respective line in column 5 or 8 of Table II, application no. 12, or a homolog or a fragment thereof, a consensus sequence or at least one polypeptide motif as depicted in the respective line in column 8 of Table IV, application no. 12, whereby the respective line discloses in column 7 the fine chemical oleic acid; or
[61689] increasing or generating the activity of an expression product of one or more nucleic acid molecule(s) comprising a polynucleotide as depicted in the respective line in column 5 or 8 of Table I, application no. 12, preferably the coding region thereof, or a homolog or a fragment thereof, whereby the respective line discloses in column 7 the fine chemical oleic acid;
[61690] in the cytosol of a cell of a non-human organism or a part thereof; preferably a microorganism, a plant cell, a plant or a part thereof, as compared to a corresponding non-transformed wild type non-human organism or a part thereof; and
[61691] (b) growing the non-human organism under conditions which permit the production of oleic acid, or a composition comprising oleic acid in said non-human organism or in the culture medium surrounding said non-human organism.

[61692] In a further embodiment the activity of the polypeptide comprising a polypeptide as depicted in the respective line in column 5 or 8 of Table II, application no. 12, or a homolog or a fragment thereof, a consensus sequence or at least one polypeptide motif as depicted in the respective line in column 8 of Table IV, application no. 12, is increased or generated non-targeted in the above-mentioned process in a microorganism or plant or a part thereof.

[61693] In a further embodiment said polypeptide has the activity of the respective polypeptide represented by a protein comprising a polypeptide as depicted in the respective line in column 5 of Table II, application no. 12.

[61694] In a further embodiment the activity of the expression product of one or more nucleic acid molecule(s) comprising a polynucleotide as depicted in the respective line in column 5 or 8 of Table I, application no. 12, preferably the coding region thereof, or a homolog or a fragment thereof, is increased or generated non-targeted in the above-mentioned process in a microorganism or plant or a part thereof.

[61695] In a further embodiment the activity of the polypeptide comprising a polypeptide as depicted in the respective line in column 5 or 8 of Table II, application no. 12, or a homolog or a fragment thereof, a consensus sequence or at least one polypeptide motif as depicted in the respective line in column 8 of Table IV, application no. 12, is increased or generated in the above-mentioned process in an organelle preferably in plastids or mitochondria, especially in plastids, of a microorganism or plant.

[61696] In a further embodiment said polypeptide has the activity of the respective polypeptide represented by a protein comprising a polypeptide as depicted in the respective line in column 5 of Table II, application no. 12.

[61697] In a further embodiment the activity of the expression product of one or more nucleic acid molecule(s) comprising a polynucleotide as depicted in the respective line in column 5 or 8 of Table I, application no. 12, preferably the coding region thereof, or a homolog or a fragment thereof, is increased or generated in the above-mentioned process in an organelle, preferably in plasids or mitochondria, especially in plastids, of a microorganism or plant.

[61698] In a further embodiment the activity of the polypeptide comprising a polypeptide as depicted in the respective line in column 5 or 8 of Table II, application no. 12, or a homolog or a fragment thereof, a consensus sequence or at least one polypeptide motif as depicted in the respective line in column 8 of Table IV, application no. 12, is increased or generated in the above-mentioned process in the cyctosol of a cell, of a microorganism or plant.

[61699] In a further embodiment said polypeptide has the activity of the respective polypeptide represented by a protein comprising a polypeptide as depicted in the respective line in column 5 of Table II, application no. 12.

[61700] In a further embodiment the activity of the expression product of one or more nucleic acid molecule(s) comprising a polynucleotide as depicted in the respective line in column 5 or 8 of Table I, application no. 12, preferably the coding region thereof, or a homolog or a fragment thereof, is increased or generated in the above-mentioned process in the cytosol of a cell, of a microorganism or plant.

[61701] [0039.1.8.12] to [0066.1.8.12] for the disclosure of these paragraphs see [0039.1.8.8] to [0066.1.8.8] above.

[61702] As mentioned above the nucleic acid sequences coding for the proteins as shown in Table II, application no. 12, column 5 or 8, or homologs or fragments thereof, are joined to a nucleic acid sequence encoding a plastidic transit peptide, e.g, if for the nucleic acid molecule in Table I, column 6 the term “plastidic” is indicated. This nucleic acid sequence encoding a transit peptide ensures transport of the protein to the organelle. The nucleic acid sequence of the gene to be expressed and the nucleic acid sequence encoding the transit peptide are operably linked. Therefore the transit peptide encoding sequence is fused in frame to the nucleic acid sequence coding for proteins as shown in Table II, application no. 12, column 5 or 8, or homologs or fragments thereof, e.g., if for the nucleic acid molecule in Table I, column 6 the term “plastidic” is indicated.

[61703] [0068.1.8.12] to [0072.1.8.12] for the disclosure of these paragraphs see [0068.1.8.8] to [0072.1.8.8] above.

[61704] As mentioned above the nucleic acid sequences coding for the proteins as shown in the respective line in Table II, application no. 12, column 5 or 8, or homologs or fragments thereof, are joined to a nucleic acid sequence encoding a mitochondric transit peptide, e.g., if for the respective nucleic acid molecule in Table I, column 6 the term “mitochondrial” is indicated. This nucleic acid sequence encoding a transit peptide ensures transport of the protein to the organelle. The nucleic acid sequence of the gene to be expressed and the nucleic acid sequence encoding the transit peptide are operably linked. Therefore the transit peptide encoding sequence is fused in frame to the nucleic acid sequence coding for proteins as shown in the respective line in Table II, application no. 12, column 5 or 8, or homologs or fragments thereof, e.g., if for the nucleic acid molecule in the respective line in Table I, column 6 the term “mitochondrial” is indicated. (For th eavoidance ofdoubt, th eterm “mitochondric” and “mitochondrial” are interchangeable.)

[61705] [0074.1.8.12] to [0075.1.8.12] for the disclosure of these paragraphs see [0074.1.8.8] to 0075.1.8.8] above.

[61706] Nucleic acid sequences coding for the transit peptides may be chemically synthesized either in part or wholly according to structure of transit peptide sequences disclosed in the prior art. Said natural or chemically synthesized sequences can be directly linked to the sequences encoding the mature protein or via a linker nucleic acid sequence, which may be typically less than 500 base pairs, preferably less than 450, 400, 350, 300, 250 or 200 base pairs, more preferably less than 150, 100, 90, 80, 70, 60, 50, 40 or 30 base pairs and most preferably less than 25, 20, 15, 12, 9, 6 or 3 base pairs in length and are in frame to the coding sequence. Furthermore favorable nucleic acid sequences encoding transit peptides may comprise sequences derived from more than one biological and/or chemical source and may include a nucleic acid sequence derived from the amino-terminal region of the mature protein, which in its native state is linked to the transit peptide. In a preferred embodiment of the invention said amino-terminal region of the mature protein is typically less than 150 amino acids, preferably less than 140, 130, 120, 110, 100 or 90 amino acids, more preferably less than 80, 70, 60, 50, 40, 35, 30, 25 or 20 amino acids and most preferably less than 19, 18, 17, 16, 15, 14, 13, 12, 11 or 10 amino acids in length. But even shorter or longer stretches are also possible. In addition target sequences, which facilitate the transport of proteins to other cell compartments such as the vacuole, endoplasmic reticulum, golgi complex, glyoxysomes, peroxisomes, mitochondria (in case of a plastidal transit peptide) or plastids, especially chloroplasts (in case of a mitochondric transit peptide) may be also part of the inventive nucleic acid sequence. The proteins translated from said inventive nucleic acid sequences are a kind of fusion proteins that means the nucleic acid sequences encoding the plastidal transit peptide for example the ones shown in Table a, preferably the last one of the Table a are joint to the respective nucleic acid sequences shown in Table I, application no. 12, columns 5 or 8, especially the coding region thereof, or homologs or fragments thereof, in case of nucleic acid sequences being expressed in plastids, and that means the nucleic acid sequences encoding the mitochondric transit peptide for example the ones shown in Table b, preferably the last one of the Table b are joint to the respective nucleic acid sequences shown in Table I, application no. 12, columns 5 or 8, especially the cod ing region thereof, or homologs or fragments thereof, in case of nucleic acid sequences being expressed in mitochondria. The person skilled in the art is able to join said sequences in a functional manner. Advantageously the transit peptide part is cleaved off from the protein part shown in Table II, application no. 12, columns 5 or 8, or a homolog or fragment thereof, during or after the transport into the organelles, preferably into the plastids or mitochondria, respectively.

[61707] All products of the cleavage of the preferred transit peptide shown in the last line of Table a have preferably the N-terminal amino acid sequences QIA CSS or QIA EFQLTT in front of the start methionine of the respective protein mentioned in Table II, application no. 12, column 5 or 8. or homologs or fragments thereof. Other short amino acid sequences of an range of 1 to 20 amino acids preferable 2 to 15 amino acids, more preferable 3 to 10 amino acids most preferably 4 to 8 amino acids are also possible in front of the start methionine of the protein mentioned in Table II, application no. 12, columns 5 or 8, or homologs or fragments thereof. In case of the amino acid sequence QIA CSS the three amino acids in front of the start methionine are stemming from the LIC (=ligatation independent cloning) cassette. Said short amino acid sequence is preferred in the case of the expression of E. coli genes. In case of the amino acid sequence QIA EFQLTT the six amino acids in front of the start methionine are stemming from the LIC cassette. Said short amino acid sequence is preferred in the case of the expression of S. cerevisiae genes. The skilled worker knowns that other short sequences are also useful in the expression of the respective nucleic acid molecule comprising a polynucleotide as depicted in Table I, application no. 12, column 5 or 8, preferably the coding region thereof, or a homolog or a fragment thereof. Furthermore the skilled worker is aware of the fact that there is not a need for such short sequences in the expression of the genes.

[61708] [0077.1.8.12] to [0078.1.8.12] for the disclosure of these paragraphs see [0077.1.8.8] to [0078.1.8.8] above.

[61709] Alternatively to the targeting of the respective sequences shown in Table II, application no. 12, columns 5 or 8, or homologs or fragments thereof, preferably of sequences in general encoded in the nucleus with the aid of the targeting sequences mentioned for example in Table a alone, Table b alone, or in combination with other targeting sequences preferably into plastids or mitochondria, respectively, the nucleic acids of the invention can directly be introduced into the plastidal or mitochondrial genome. Therefore in a preferred embodiment the respective nucleic acid sequences shown in the respective line in Table I, application no. 12, columns 5 or 8, preferably the coding region thereof, or homologs or fragments thereof, are directly introduced and expressed in plastids e.g., if for the nucleic acid molecule in the respective line in Table I, column 6, the term “plastidic” is indicated, or are directly introduced and expressed in mitochondria e.g., if for the nucleic acid molecule in the respective line in Table I, column 6 the term “mitochondrial” is indicated.

[61710] The term “introduced” in the context of this specification shall mean the insertion of a nucleic acid sequence into the organism by means of a “transfection”, “transduction” or preferably by “transformation”.

[61711] A plastid, such as a chloroplast, or a mitochondrion, has been “transformed” by an exogenous (preferably foreign) nucleic acid sequence if a nucleic acid sequence has been introduced into the plastid or mitochondrion that means that this sequence has crossed the membrane or the membranes of the plastid or of the mitochondrion. The exogenous, preferably foreign, DNA may be integrated (covalently linked) into plastid or mitochondrial DNA making up the genome of the plastid or mitochondrion, or it may remain unintegrated (e.g., by including a chloroplast origin of replication). “Stably” integrated DNA sequences are those, which are inherited through plastid or mitochondrion replication, thereby transferring new plastids or mitochondria, with the features of the integrated DNA sequence to the progeny.

[61712] [0080.1.8.12] to [0083.1.8.12] for the disclosure of these paragraphs see [0080.1.8.8] to [0083.1.8.8] above.

[61713] For the process of the present invention it may be of great advantage that by transforming the plastids the intraspecies specific transgene flow is blocked, because a lot of species such as corn, cotton and rice have a strict maternal inheritance of plastids. By placing the respective genes specified in the respective line in Table I, application no. 12, columns 5 or 8, preferably the coding region, or homologs or fragments thereof, e.g. if for the nucleic acid molecule in the respective line in column 6 of Table I the term “plastidic” is indicated, in the plastids of plants, these genes will not be present in the pollen of said plants.

[61714] A further preferred embodiment of the invention relates to the use of so called “chloroplast localization sequences”, in which a first RNA sequence or molecule is capable of transporting or “chaperoning” a second RNA sequence, such as a RNA sequence transcribed from the sequences depicted in the respective line in Table I, application no. 12, columns 5 or 8, preferably the coding region thereof, or a homolog or a fragment thereof, or a sequence encoding a protein, as depicted in the respective line in Table II, application no. 12, columns 5 and 8, or a homolog or a fragment thereof, from an external environment inside a cell or outside a plastid into a chloroplast. In one embodiment the chloroplast localization signal is substantially similar or complementary to a complete or intact viroid sequence. The chloroplast localization signal may be encoded by a DNA sequence, which is transcribed into the chloroplast localization RNA.

[61715] The term “viroid” refers to a naturally occurring single stranded RNA molecule (Flores, C. R. Acad. Sci. III. 324 (10), 943 (2001)). Viroids usually contain about 200-500 nucleotides and generally exist as circular molecules. Examples of viroids that contain chloroplast localization signals include but are not limited to ASBVd, PLMVd, CChMVd and ELVd. The viroid sequence or a functional part of it can be fused to the sequences depicted in the respective line in Table I, application no. 12, columns 5 or 8, preferably the coding region thereof, or a homolog or a fragment thereof, or a sequence encoding a protein, as depicted in the respective line in Table II, application no. 12, columns 5 or 8, or a homolog or a fragment thereof, in such a manner that the viroid sequence transports a sequence transcribed from a sequence as depicted in the respective line in Table I, application no. 12 columns 5 or 8, preferably the coding region thereof, or a homolog or a fragment thereof, or a sequence encoding a protein as depicted in the respective line in Table II, application no. 12 columns 5 or 8, or a homolog or a fragment thereof, into the chloroplasts, e.g. if for the nucleic acid molecule in column 6 of Table I the term “plastidic” is indicated. A preferred embodiment uses a modified ASBVd (Navarro et al., Virology. 268 (1), 218 (2000)).

[61716] In a further specific embodiment the protein to be expressed in the plastids such as the proteins depicted in the respective line in Table II, application no. 12, columns 5 or 8, or a homolog or a fragment thereof, e.g. if for the nucleic acid molecule in the respective line in column 6 of Table I the term “plastidic” is indicated, are encoded by different nucleic acids. Such a method is disclosed in WO 2004/040973, which shall be incorporated by reference. WO 2004/040973 teaches a method, which relates to the translocation of an RNA corresponding to a gene or gene fragment into the chloroplast by means of a chloroplast localization sequence.

[61717] The genes, which should be expressed in the plant or plant cells, are split into nucleic acid fragments, which are introduced into different compartments in the plant e.g. the nucleus, the plastids and/or mitochondria. Additionally plant cells are described in which the chloroplast contains a ribozyme fused at one end to an RNA encoding a fragment of a protein used in the inventive process such that the ribozyme can trans-splice the translocated fusion RNA to the RNA encoding the gene fragment to form and as the case may be reunite the nucleic acid fragments to an intact mRNA encoding a functional protein for example as disclosed in the respective line in Table II, application no. 12, columns 5 or 8, or a homolog or a fragment thereof.

[61718] In a preferred embodiment of the invention the nucleic acid sequences as shown in the respective line in Table I, application no. 12, columns 5 or 8, preferably the coding region thereof, or homologs or fragments thereof, e.g. if for the nucleic acid molecule in the respective line in column 6 of Table I the term “plastidic” is indicated, used in the inventive process are transformed into plastids, which are metabolically active. Those plastids should preferably maintain at a high copy number in the plant or plant tissue of interest, most preferably the chloroplasts found in green plant tissues, such as leaves or cotyledons or in seeds.

[61719] For a good expression in the plastids the nucleic acid sequences as shown in the respective line in Table I, application no. 12, columns 5 or 8, preferably the coding region thereof, or homologs or fragments thereof, e.g. if for the nucleic acid molecule in the respective line in column 6 of Table I the term “plastidic” is indicated, are introduced into an expression cassette using preferably a promoter and terminater, which are active in plastids preferably a chloroplast promoter. Examples of such promoters include the psbA promoter from the gene from spinach or pea, the rbcL promoter, and the atpB promoter from corn.

[61720] [0089.1.8.12] to [0092.1.8.12] for the disclosure of these paragraphs see [0089.1.8.8] to [0092.1.8.8] above.

[61721] Advantageously the process for the production of the fine chemical 2-hydroxybehenic acid, 2-hydroxypalmitic acid, 2-hydroxytetracosenoic acid (preferably 2-hydroxynervonic acid), behenic acid, cerebronic acid, eicosanoic acid, heptadecanoic acid, hexadecadienoic acid, hexadecatrienoic acid, lauric acid, myristic acid, nervonic acid, and/or oleic acid, respectively, leads to an enhanced production of the respective fine chemical. The terms “enhanced” or “increase” mean at least a 10%, 20%, 30%, 40% or 50%, preferably at least 60%, 70%, 80%, 90% or 100%, more preferably 150%, 200%, 300%, 400% or 500% higher production of the respective fine chemical 2-hydroxybehenic acid, 2-hydroxypalmitic acid, 2-hydroxytetracosenoic acid (preferably 2-hydroxynervonic acid), behenic acid, cerebronic acid, eicosanoic acid, heptadecanoic acid, hexadecadienoic acid, hexadecatrienoic acid, lauric acid, myristic acid, nervonic acid, and/or oleic acid in comparison to the wild-type as defined above, e.g. that means in comparison to a non-human organism without the aforementioned modification of the activity of a protein as shown in the respective line in Table II, application no. 12, column 5 or 8, or a fragment or a homolog thereof. The modification of the activity of a protein as shown in the respective line in Table II, application no. 12, column 5 or 8, or a homolog or a fragment thereof, or their combination can be achieved by joining the protein to a respective transit peptide, e.g. if for the respective encoding nucleic acid molecule in column 6 of Table I the term “plastidic” or “mitochondrial” is indicated.

[61722] Surprisingly it was found, that the transgenic expression of a protein as shown in the respective line in Table II, application no. 12, column 5, especially from the Saccaromyces cerevisiae, E. coli, Arabidopsis thaliana, Azotobacter vinelandii, Brassica napus, Glycine max, Oryza sativa, Physcomitrella patens, Synechocystis sp., Thermus thermophilus, Zea mays in a non-human organism, like a plant or a part thereof, such as Arabidopsis thaliana for example, or a microorganism, conferred a production of or an increase in 2-hydroxybehenic acid, 2-hydroxypalmitic acid, 2-hydroxytetracosenoic acid (preferably 2-hydroxynervonic acid), behenic acid, cerebronic acid, eicosanoic acid, heptadecanoic acid, hexadecadienoic acid, hexadecatrienoic acid, lauric acid, myristic acid, nervonic acid, and/or oleic acid, respectively, to the transgenic non-human organism as compared to a corresponding non-transformed wild type.

[61723] In one embodiment the transgenic expression of a protein as shown in the respective line in Table II, application no. 12, column 5 or 8, or a homolog or a fragment thereof, especially from the Saccaromyces cerevisiae, E. coli, Arabidopsis thaliana, Azotobacter vinelandii, Brassica napus, Glycine max, Oryza sativa, Physcomitrella patens, Synechocystis sp., Thermus thermophilus, Zea mays in a non-human organism, like a plant or a part thereof, such as Arabidopsis thaliana for example, or a microorganism, confers a production of or an increase in 2-hydroxybehenic acid, 2-hydroxypalmitic acid, 2-hydroxytetracosenoic acid (preferably 2-hydroxynervonic acid), behenic acid, cerebronic acid, eicosanoic acid, heptadecanoic acid, hexadecadienoic acid, hexadecatrienoic acid, lauric acid, myristic acid, nervonic acid, and/or oleic acid,respectively, to the transgenic non-human organism as compared to a corresponding non-transformed wild type.

[61724] Accordingly, in one embodiment, an increase of cerebronic acid in a non-human organism, as compared to a corresponding non-transformed wild type non-human organism, is conferred in the process of the invention, if the activity of a polypeptide showing the activity of a chlorophyllase, or if the activity of the polypeptide At1g19670, preferably represented by SEQ ID NO. 113652, or a homolog or fragment thereof, or if the activity of a polypeptide encoded by a nucleic acid molecule comprising the nucleic acid SEQ ID NO. 113651, preferably the coding region thereof, or a homolog or fragment thereof, e.g. derived from Arabidopsis thaliana, is increased or generated. For example the activity of a nucleic acid molecule or a polypeptide comprising the nucleic acid, preferably the coding region thereof, or polypeptide or the consensus sequence or the polypeptide motif, as depicted in Table I, II or IV, application No. 12, column 5 or 8 in the respective same line as the nucleic acid molecule SEQ ID NO. 113651 or polypeptide SEQ ID NO. 113652, respectively, or a homolog or a fragment thereof, is increased or generated, or if the activity chlorophyllase is increased or generated in a non-human organism, like a microorganism or a plant cell, plant or part thereof, especially with non-targeted localization, whereby the respective line discloses in column 7 the fine chemical cerebronic acid. For example, an increase of the cerebronic acid of at least 1 percent, particularly in a range of 25 to 38-percent is conferred as compared to a corresponding non-transformed wild type non-human organism.

[61725] Accordingly, in one embodiment, an increase of 2-hydroxytetracosenoic acid (preferably 2-hydroxynervonic acid) in a non-human organism, as compared to a corresponding non-transformed wild type non-human organism, is conferred in the process of the invention, if the activity of a polypeptide showing the activity of a chlorophyllase, or if the activity of the polypeptide At1g19670, preferably represented by SEQ ID NO. 113652, or a homolog or fragment thereof, or if the activity of a polypeptide encoded by a nucleic acid molecule comprising the nucleic acid SEQ ID NO. 113651, preferably the coding region thereof, or a homolog or fragment thereof, e.g. derived from Arabidopsis thaliana, is increased or generated. For example the activity of a nucleic acid molecule or a polypeptide comprising the nucleic acid, preferably the coding region thereof, or polypeptide or the consensus sequence or the polypeptide motif, as depicted in Table I, II or IV, application No. 12, column 5 or 8 in the respective same line as the nucleic acid molecule SEQ ID NO. 113651 or polypeptide SEQ ID NO. 113652, respectively, or a homolog or a fragment thereof, is increased or generated, or if the activity chlorophyllase is increased or generated in a non-human organism, like a microorganism or a plant cell, plant or part thereof, especially with non-targeted localization, whereby the respective line discloses in column 7 the fine chemical 2-hydroxytetracosenoic acid (preferably 2-hydroxynervonic acid). For example, an increase of the 2-hydroxytetracosenoic acid (preferably 2-hydroxynervonic acid) of at least 1 percent, particularly in a range of 29 to 47-percent is conferred as compared to a corresponding non-transformed wild type non-human organism.

[61726] Accordingly, in one embodiment, an increase of hexadecatrienoic acid in a non-human organism, as compared to a corresponding non-transformed wild type non-human organism, is conferred in the process of the invention, if the activity of a polypeptide showing the activity of a transcription factor, or if the activity of the polypeptide At1g68320, preferably represented by SEQ ID NO. 1062, or a homolog or fragment thereof, or if the activity of a polypeptide encoded by a nucleic acid molecule comprising the nucleic acid SEQ ID NO. 1061, preferably the coding region thereof, or a homolog or fragment thereof, e.g. derived from Arabidopsis thaliana, is increased or generated. For example the activity of a nucleic acid molecule or a polypeptide comprising the nucleic acid, preferably the coding region thereof, or polypeptide or the consensus sequence or the polypeptide motif, as depicted in Table I, II or IV, application No. 12, column 5 or 8 in the respective same line as the nucleic acid molecule SEQ ID NO. 1061 or polypeptide SEQ ID NO. 1062, respectively, or a homolog or a fragment thereof, is increased or generated, or if the activity transcription factor is increased or generated in a non-human organism, like a microorganism or a plant cell, plant or part thereof, especially with non-targeted localization, whereby the respective line discloses in column 7 the fine chemical hexadecatrienoic acid. For example, an increase of the hexadecatrienoic acid of at least 1 percent, particularly in a range of 13 to 69-percent is conferred as compared to a corresponding non-transformed wild type non-human organism.

[61727] Accordingly, in one embodiment, an increase of cerebronic acid in a non-human organism, as compared to a corresponding non-transformed wild type non-human organism, is conferred in the process of the invention, if the activity of a polypeptide showing the activity of a protein phosphatase, or if the activity of the polypeptide At1g72770, preferably represented by SEQ ID NO. 19420, or a homolog or fragment thereof, or if the activity of a polypeptide encoded by a nucleic acid molecule comprising the nucleic acid SEQ ID NO. 19419, preferably the coding region thereof, or a homolog or fragment thereof, e.g. derived from Arabidopsis thaliana, is increased or generated. For example the activity of a nucleic acid molecule or a polypeptide comprising the nucleic acid, preferably the coding region thereof, or polypeptide or the consensus sequence or the polypeptide motif, as depicted in Table I, II or IV, application No. 12, column 5 or 8 in the respective same line as the nucleic acid molecule SEQ ID NO. 19419 or polypeptide SEQ ID NO. 19420, respectively, or a homolog or a fragment thereof, is increased or generated, or if the activity protein phosphatase is increased or generated in a non-human organism, like a microorganism or a plant cell, plant or part thereof, especially with non-targeted localization, whereby the respective line discloses in column 7 the fine chemical cerebronic acid. For example, an increase of the cerebronic acid of at least 1 percent, particularly in a range of 32 to 62-percent is conferred as compared to a corresponding non-transformed wild type non-human organism.

[61728] Accordingly, in one embodiment, an increase of hexadecatrienoic acid in a non-human organism, as compared to a corresponding non-transformed wild type non-human organism, is conferred in the process of the invention, if the activity of a polypeptide showing the activity of a protein phosphatase, or if the activity of the polypeptide At1g72770, preferably represented by SEQ ID NO. 19420, or a homolog or fragment thereof, or if the activity of a polypeptide encoded by a nucleic acid molecule comprising the nucleic acid SEQ ID NO. 19419, preferably the coding region thereof, or a homolog or fragment thereof, e.g. derived from Arabidopsis thaliana, is increased or generated. For example the activity of a nucleic acid molecule or a polypeptide comprising the nucleic acid, preferably the coding region thereof, or polypeptide or the consensus sequence or the polypeptide motif, as depicted in Table I, II or IV, application No. 12, column 5 or 8 in the respective same line as the nucleic acid molecule SEQ ID NO. 19419 or polypeptide SEQ ID NO. 19420, respectively, or a homolog or a fragment thereof, is increased or generated, or if the activity protein phosphatase is increased or generated in a non-human organism, like a microorganism or a plant cell, plant or part thereof, especially with non-targeted localization, whereby the respective line discloses in column 7 the fine chemical hexadecatrienoic acid. For example, an increase of the hexadecatrienoic acid of at least 1 percent, particularly in a range of 14 to 58-percent is conferred as compared to a corresponding non-transformed wild type non-human organism.

[61729] Accordingly, in one embodiment, an increase of 2-hydroxybehenic acid in a non-human organism, as compared to a corresponding non-transformed wild type non-human organism, is conferred in the process of the invention, if the activity of a polypeptide showing the activity of a protein phosphatase, or if the activity of the polypeptide At1g72770, preferably represented by SEQ ID NO. 19420, or a homolog or fragment thereof, or if the activity of a polypeptide encoded by a nucleic acid molecule comprising the nucleic acid SEQ ID NO. 19419, preferably the coding region thereof, or a homolog or fragment thereof, e.g. derived from Arabidopsis thaliana, is increased or generated. For example the activity of a nucleic acid molecule or a polypeptide comprising the nucleic acid, preferably the coding region thereof, or polypeptide or the consensus sequence or the polypeptide motif, as depicted in Table I, II or IV, application No. 12, column 5 or 8 in the respective same line as the nucleic acid molecule SEQ ID NO. 19419 or polypeptide SEQ ID NO. 19420, respectively, or a homolog or a fragment thereof, is increased or generated, or if the activity protein phosphatase is increased or generated in a non-human organism, like a microorganism or a plant cell, plant or part thereof, especially with non-targeted localization, whereby the respective line discloses in column 7 the fine chemical 2-hydroxybehenic acid. For example, an increase of the 2-hydroxybehenic acid of at least 1 percent, particularly in a range of 36 to 74-percent is conferred as compared to a corresponding non-transformed wild type non-human organism.

[61730] Accordingly, in one embodiment, an increase of 2-hydroxypalmitic acid in a non-human organism, as compared to a corresponding non-transformed wild type non-human organism, is conferred in the process of the invention, if the activity of a polypeptide showing the activity of a At2g33510-protein, or if the activity of the polypeptide At2g33510, preferably represented by SEQ ID NO. 98523, or a homolog or fragment thereof, or if the activity of a polypeptide encoded by a nucleic acid molecule comprising the nucleic acid SEQ ID NO. 98522, preferably the coding region thereof, or a homolog or fragment thereof, e.g. derived from Arabidopsis thaliana, is increased or generated. For example the activity of a nucleic acid molecule or a polypeptide comprising the nucleic acid, preferably the coding region thereof, or polypeptide or the consensus sequence or the polypeptide motif, as depicted in Table I, II or IV, application No. 12, column 5 or 8 in the respective same line as the nucleic acid molecule SEQ ID NO. 98522 or polypeptide SEQ ID NO. 98523, respectively, or a homolog or a fragment thereof, is increased or generated, or if the activity At2g33510-protein is increased or generated in a non-human organism, like a microorganism or a plant cell, plant or part thereof, especially with non-targeted localization, whereby the respective line discloses in column 7 the fine chemical 2-hydroxypalmitic acid. For example, an increase of the 2-hydroxypalmitic acid of at least 1 percent, particularly in a range of 20 to 24-percent is conferred as compared to a corresponding non-transformed wild type non-human organism.

[61731] Accordingly, in one embodiment, an increase of 2-hydroxytetracosenoic acid (preferably 2-hydroxynervonic acid) in a non-human organism, as compared to a corresponding non-transformed wild type non-human organism, is conferred in the process of the invention, if the activity of a polypeptide showing the activity of a heat shock transcription factor, or if the activity of the polypeptide At3g02990, preferably represented by SEQ ID NO. 68658, or a homolog or fragment thereof, or if the activity of a polypeptide encoded by a nucleic acid molecule comprising the nucleic acid SEQ ID NO. 68657, preferably the coding region thereof, or a homolog or fragment thereof, e.g. derived from Arabidopsis thaliana, is increased or generated. For example the activity of a nucleic acid molecule or a polypeptide comprising the nucleic acid, preferably the coding region thereof, or polypeptide or the consensus sequence or the polypeptide motif, as depicted in Table I, II or IV, application No. 12, column 5 or 8 in the respective same line as the nucleic acid molecule SEQ ID NO. 68657 or polypeptide SEQ ID NO. 68658, respectively, or a homolog or a fragment thereof, is increased or generated, or if the activity heat shock transcription factor is increased or generated in a non-human organism, like a microorganism or a plant cell, plant or part thereof, especially with non-targeted localization, whereby the respective line discloses in column 7 the fine chemical 2-hydroxytetracosenoic acid (preferably 2-hydroxynervonic acid). For example, an increase of the 2-hydroxytetracosenoic acid (preferably 2-hydroxynervonic acid) of at least 1 percent, particularly in a range of 23 to 71-percent is conferred as compared to a corresponding non-transformed wild type non-human organism.

[61732] Accordingly, in one embodiment, an increase of cerebronic acid in a non-human organism, as compared to a corresponding non-transformed wild type non-human organism, is conferred in the process of the invention, if the activity of a polypeptide showing the activity of a adenosine kinase, or if the activity of the polypeptide At3g09820, preferably represented by SEQ ID NO. 1697, or a homolog or fragment thereof, or if the activity of a polypeptide encoded by a nucleic acid molecule comprising the nucleic acid SEQ ID NO. 1696, preferably the coding region thereof, or a homolog or fragment thereof, e.g. derived from Arabidopsis thaliana, is increased or generated. For example the activity of a nucleic acid molecule or a polypeptide comprising the nucleic acid, preferably the coding region thereof, or polypeptide or the consensus sequence or the polypeptide motif, as depicted in Table I, II or IV, application No. 12, column 5 or 8 in the respective same line as the nucleic acid molecule SEQ ID NO. 1696 or polypeptide SEQ ID NO. 1697, respectively, or a homolog or a fragment thereof, is increased or generated, or if the activity adenosine kinase is increased or generated in a non-human organism, like a microorganism or a plant cell, plant or part thereof, especially with non-targeted localization, whereby the respective line discloses in column 7 the fine chemical cerebronic acid. For example, an increase of the cerebronic acid of at least 1 percent, particularly in a range of 26 to 45-percent is conferred as compared to a corresponding non-transformed wild type non-human organism.

[61733] Accordingly, in one embodiment, an increase of 2-hydroxybehenic acid in a non-human organism, as compared to a corresponding non-transformed wild type non-human organism, is conferred in the process of the invention, if the activity of a polypeptide showing the activity of a adenosine kinase, or if the activity of the polypeptide At3g09820, preferably represented by SEQ ID NO. 1697, or a homolog or fragment thereof, or if the activity of a polypeptide encoded by a nucleic acid molecule comprising the nucleic acid SEQ ID NO. 1696, preferably the coding region thereof, or a homolog or fragment thereof, e.g. derived from Arabidopsis thaliana, is increased or generated. For example the activity of a nucleic acid molecule or a polypeptide comprising the nucleic acid, preferably the coding region thereof, or polypeptide or the consensus sequence or the polypeptide motif, as depicted in Table I, II or IV, application No. 12, column 5 or 8 in the respective same line as the nucleic acid molecule SEQ ID NO. 1696 or polypeptide SEQ ID NO. 1697, respectively, or a homolog or a fragment thereof, is increased or generated, or if the activity adenosine kinase is increased or generated in a non-human organism, like a microorganism or a plant cell, plant or part thereof, especially with non-targeted localization, whereby the respective line discloses in column 7 the fine chemical 2-hydroxybehenic acid. For example, an increase of the 2-hydroxybehenic acid of at least 1 percent, particularly in a range of 25 to 52-percent is conferred as compared to a corresponding non-transformed wild type non-human organism.

[61734] Accordingly, in one embodiment, an increase of 2-hydroxytetracosenoic acid (preferably 2-hydroxynervonic acid) in a non-human organism, as compared to a corresponding non-transformed wild type non-human organism, is conferred in the process of the invention, if the activity of a polypeptide showing the activity of a DNA mismatch repair protein, or if the activity of the polypeptide At3g18524, preferably represented by SEQ ID NO. 22833, or a homolog or fragment thereof, or if the activity of a polypeptide encoded by a nucleic acid molecule comprising the nucleic acid SEQ ID NO. 22832, preferably the coding region thereof, or a homolog or fragment thereof, e.g. derived from Arabidopsis thaliana, is increased or generated. For example the activity of a nucleic acid molecule or a polypeptide comprising the nucleic acid, preferably the coding region thereof, or polypeptide or the consensus sequence or the polypeptide motif, as depicted in Table I, II or IV, application No. 12, column 5 or 8 in the respective same line as the nucleic acid molecule SEQ ID NO. 22832 or polypeptide SEQ ID NO. 22833, respectively, or a homolog or a fragment thereof, is increased or generated, or if the activity DNA mismatch repair protein is increased or generated in a non-human organism, like a microorganism or a plant cell, plant or part thereof, especially with non-targeted localization, whereby the respective line discloses in column 7 the fine chemical 2-hydroxytetracosenoic acid (preferably 2-hydroxynervonic acid). For example, an increase of the 2-hydroxytetracosenoic acid (preferably 2-hydroxynervonic acid) of at least 1 percent, particularly in a range of 25 to 36-percent is conferred as compared to a corresponding non-transformed wild type non-human organism.

[61735] Accordingly, in one embodiment, an increase of cerebronic acid in a non-human organism, as compared to a corresponding non-transformed wild type non-human organism, is conferred in the process of the invention, if the activity of a polypeptide showing the activity of a glutaredoxin, or if the activity of the polypeptide At3g62950, preferably represented by SEQ ID NO. 2936, or a homolog or fragment thereof, or if the activity of a polypeptide encoded by a nucleic acid molecule comprising the nucleic acid SEQ ID NO. 2935, preferably the coding region thereof, or a homolog or fragment thereof, e.g. derived from Arabidopsis thaliana, is increased or generated. For example the activity of a nucleic acid molecule or a polypeptide comprising the nucleic acid, preferably the coding region thereof, or polypeptide or the consensus sequence or the polypeptide motif, as depicted in Table I, II or IV, application No. 12, column 5 or 8 in the respective same line as the nucleic acid molecule SEQ ID NO. 2935 or polypeptide SEQ ID NO. 2936, respectively, or a homolog or a fragment thereof, is increased or generated, or if the activity glutaredoxin is increased or generated in a non-human organism, like a microorganism or a plant cell, plant or part thereof, especially with non-targeted localization, whereby the respective line discloses in column 7 the fine chemical cerebronic acid. For example, an increase of the cerebronic acid of at least 1 percent, particularly in a range of 25 to 61-percent is conferred as compared to a corresponding non-transformed wild type non-human organism.

[61736] Accordingly, in one embodiment, an increase of hexadecatrienoic acid in a non-human organism, as compared to a corresponding non-transformed wild type non-human organism, is conferred in the process of the invention, if the activity of a polypeptide showing the activity of a glutaredoxin, or if the activity of the polypeptide At3g62950, preferably represented by SEQ ID NO. 2936, or a homolog or fragment thereof, or if the activity of a polypeptide encoded by a nucleic acid molecule comprising the nucleic acid SEQ ID NO. 2935, preferably the coding region thereof, or a homolog or fragment thereof, e.g. derived from Arabidopsis thaliana, is increased or generated. For example the activity of a nucleic acid molecule or a polypeptide comprising the nucleic acid, preferably the coding region thereof, or polypeptide or the consensus sequence or the polypeptide motif, as depicted in Table I, II or IV, application No. 12, column 5 or 8 in the respective same line as the nucleic acid molecule SEQ ID NO. 2935 or polypeptide SEQ ID NO. 2936, respectively, or a homolog or a fragment thereof, is increased or generated, or if the activity glutaredoxin is increased or generated in a non-human organism, like a microorganism or a plant cell, plant or part thereof, especially with non-targeted localization, whereby the respective line discloses in column 7 the fine chemical hexadecatrienoic acid. For example, an increase of the hexadecatrienoic acid of at least 1 percent, particularly in a range of 17 to 33-percent is conferred as compared to a corresponding non-transformed wild type non-human organism.

[61737] Accordingly, in one embodiment, an increase of 2-hydroxybehenic acid in a non-human organism, as compared to a corresponding non-transformed wild type non-human organism, is conferred in the process of the invention, if the activity of a polypeptide showing the activity of a glutaredoxin, or if the activity of the polypeptide At3g62950, preferably represented by SEQ ID NO. 2936, or a homolog or fragment thereof, or if the activity of a polypeptide encoded by a nucleic acid molecule comprising the nucleic acid SEQ ID NO. 2935, preferably the coding region thereof, or a homolog or fragment thereof, e.g. derived from Arabidopsis thaliana, is increased or generated. For example the activity of a nucleic acid molecule or a polypeptide comprising the nucleic acid, preferably the coding region thereof, or polypeptide or the consensus sequence or the polypeptide motif, as depicted in Table I, II or IV, application No. 12, column 5 or 8 in the respective same line as the nucleic acid molecule SEQ ID NO. 2935 or polypeptide SEQ ID NO. 2936, respectively, or a homolog or a fragment thereof, is increased or generated, or if the activity glutaredoxin is increased or generated in a non-human organism, like a microorganism or a plant cell, plant or part thereof, especially with non-targeted localization, whereby the respective line discloses in column 7 the fine chemical 2-hydroxybehenic acid. For example, an increase of the 2-hydroxybehenic acid of at least 1 percent, particularly in a range of 29 to 57-percent is conferred as compared to a corresponding non-transformed wild type non-human organism.

[61738] Accordingly, in one embodiment, an increase of 2-hydroxypalmitic acid in a non-human organism, as compared to a corresponding non-transformed wild type non-human organism, is conferred in the process of the invention, if the activity of a polypeptide showing the activity of a transcription factor, or if the activity of the polypeptide At4g09960, preferably represented by SEQ ID NO. 109718, or a homolog or fragment thereof, or if the activity of a polypeptide encoded by a nucleic acid molecule comprising the nucleic acid SEQ ID NO. 109717, preferably the coding region thereof, or a homolog or fragment thereof, e.g. derived from Arabidopsis thaliana, is increased or generated. For example the activity of a nucleic acid molecule or a polypeptide comprising the nucleic acid, preferably the coding region thereof, or polypeptide or the consensus sequence or the polypeptide motif, as depicted in Table I, II or IV, application No. 12, column 5 or 8 in the respective same line as the nucleic acid molecule SEQ ID NO. 109717 or polypeptide SEQ ID NO. 109718, respectively, or a homolog or a fragment thereof, is increased or generated, or if the activity transcription factor is increased or generated in a non-human organism, like a microorganism or a plant cell, plant or part thereof, especially with non-targeted localization, whereby the respective line discloses in column 7 the fine chemical 2-hydroxypalmitic acid. For example, an increase of the 2-hydroxypalmitic acid of at least 1 percent, particularly in a range of 22 to 50-percent is conferred as compared to a corresponding non-transformed wild type non-human organism.

[61739] Accordingly, in one embodiment, an increase of 2-hydroxybehenic acid in a non-human organism, as compared to a corresponding non-transformed wild type non-human organism, is conferred in the process of the invention, if the activity of a polypeptide showing the activity of a monothiol glutaredoxin, or if the activity of the polypeptide At4g15660, preferably represented by SEQ ID NO. 23483, or a homolog or fragment thereof, or if the activity of a polypeptide encoded by a nucleic acid molecule comprising the nucleic acid SEQ ID NO. 23482, preferably the coding region thereof, or a homolog or fragment thereof, e.g. derived from Arabidopsis thaliana, is increased or generated. For example the activity of a nucleic acid molecule or a polypeptide comprising the nucleic acid, preferably the coding region thereof, or polypeptide or the consensus sequence or the polypeptide motif, as depicted in Table I, II or IV, application No. 12, column 5 or 8 in the respective same line as the nucleic acid molecule SEQ ID NO. 23482 or polypeptide SEQ ID NO. 23483, respectively, or a homolog or a fragment thereof, is increased or generated, or if the activity monothiol glutaredoxin is increased or generated in a non-human organism, like a microorganism or a plant cell, plant or part thereof, especially with non-targeted localization, whereby the respective line discloses in column 7 the fine chemical 2-hydroxybehenic acid. For example, an increase of the 2-hydroxybehenic acid of at least 1 percent, particularly in a range of 28 to 59-percent is conferred as compared to a corresponding non-transformed wild type non-human organism.

[61740] Accordingly, in one embodiment, an increase of 2-hydroxypalmitic acid in a non-human organism, as compared to a corresponding non-transformed wild type non-human organism, is conferred in the process of the invention, if the activity of a polypeptide showing the activity of a monothiol glutaredoxin, or if the activity of the polypeptide At4g15660, preferably represented by SEQ ID NO. 23483, or a homolog or fragment thereof, or if the activity of a polypeptide encoded by a nucleic acid molecule comprising the nucleic acid SEQ ID NO. 23482, preferably the coding region thereof, or a homolog or fragment thereof, e.g. derived from Arabidopsis thaliana, is increased or generated. For example the activity of a nucleic acid molecule or a polypeptide comprising the nucleic acid, preferably the coding region thereof, or polypeptide or the consensus sequence or the polypeptide motif, as depicted in Table I, II or IV, application No. 12, column 5 or 8 in the respective same line as the nucleic acid molecule SEQ ID NO. 23482 or polypeptide SEQ ID NO. 23483, respectively, or a homolog or a fragment thereof, is increased or generated, or if the activity monothiol glutaredoxin is increased or generated in a non-human organism, like a microorganism or a plant cell, plant or part thereof, especially with non-targeted localization, whereby the respective line discloses in column 7 the fine chemical 2-hydroxypalmitic acid. For example, an increase of the 2-hydroxypalmitic acid of at least 1 percent, particularly in a range of 23 to 52-percent is conferred as compared to a corresponding non-transformed wild type non-human organism.

[61741] Accordingly, in one embodiment, an increase of hexadecatrienoic acid in a non-human organism, as compared to a corresponding non-transformed wild type non-human organism, is conferred in the process of the invention, if the activity of a polypeptide showing the activity of a monothiol glutaredoxin, or if the activity of the polypeptide At4g15670, preferably represented by SEQ ID NO. 3280, or a homolog or fragment thereof, or if the activity of a polypeptide encoded by a nucleic acid molecule comprising the nucleic acid SEQ ID NO. 3279, preferably the coding region thereof, or a homolog or fragment thereof, e.g. derived from Arabidopsis thaliana, is increased or generated. For example the activity of a nucleic acid molecule or a polypeptide comprising the nucleic acid, preferably the coding region thereof, or polypeptide or the consensus sequence or the polypeptide motif, as depicted in Table I, II or IV, application No. 12, column 5 or 8 in the respective same line as the nucleic acid molecule SEQ ID NO. 3279 or polypeptide SEQ ID NO. 3280, respectively, or a homolog or a fragment thereof, is increased or generated, or if the activity monothiol glutaredoxin is increased or generated in a non-human organism, like a microorganism or a plant cell, plant or part thereof, especially with non-targeted localization, whereby the respective line discloses in column 7 the fine chemical hexadecatrienoic acid. For example, an increase of the hexadecatrienoic acid of at least 1 percent, particularly in a range of 26 to 39-percent is conferred as compared to a corresponding non-transformed wild type non-human organism.

[61742] Accordingly, in one embodiment, an increase of 2-hydroxybehenic acid in a non-human organism, as compared to a corresponding non-transformed wild type non-human organism, is conferred in the process of the invention, if the activity of a polypeptide showing the activity of a monothiol glutaredoxin, or if the activity of the polypeptide At4g15670, preferably represented by SEQ ID NO. 3280, or a homolog or fragment thereof, or if the activity of a polypeptide encoded by a nucleic acid molecule comprising the nucleic acid SEQ ID NO. 3279, preferably the coding region thereof, or a homolog or fragment thereof, e.g. derived from Arabidopsis thaliana, is increased or generated. For example the activity of a nucleic acid molecule or a polypeptide comprising the nucleic acid, preferably the coding region thereof, or polypeptide or the consensus sequence or the polypeptide motif, as depicted in Table I, II or IV, application No. 12, column 5 or 8 in the respective same line as the nucleic acid molecule SEQ ID NO. 3279 or polypeptide SEQ ID NO. 3280, respectively, or a homolog or a fragment thereof, is increased or generated, or if the activity monothiol glutaredoxin is increased or generated in a non-human organism, like a microorganism or a plant cell, plant or part thereof, especially with non-targeted localization, whereby the respective line discloses in column 7 the fine chemical 2-hydroxybehenic acid. For example, an increase of the 2-hydroxybehenic acid of at least 1 percent, particularly in a range of 24 to 104-percent is conferred as compared to a corresponding non-transformed wild type non-human organism.

[61743] Accordingly, in one embodiment, an increase of cerebronic acid in a non-human organism, as compared to a corresponding non-transformed wild type non-human organism, is conferred in the process of the invention, if the activity of a polypeptide showing the activity of a monothiol glutaredoxin, or if the activity of the polypeptide At4g15690, preferably represented by SEQ ID NO. 23845, or a homolog or fragment thereof, or if the activity of a polypeptide encoded by a nucleic acid molecule comprising the nucleic acid SEQ ID NO. 23844, preferably the coding region thereof, or a homolog or fragment thereof, e.g. derived from Arabidopsis thaliana, is increased or generated. For example the activity of a nucleic acid molecule or a polypeptide comprising the nucleic acid, preferably the coding region thereof, or polypeptide or the consensus sequence or the polypeptide motif, as depicted in Table I, II or IV, application No. 12, column 5 or 8 in the respective same line as the nucleic acid molecule SEQ ID NO. 23844 or polypeptide SEQ ID NO. 23845, respectively, or a homolog or a fragment thereof, is increased or generated, or if the activity monothiol glutaredoxin is increased or generated in a non-human organism, like a microorganism or a plant cell, plant or part thereof, especially with non-targeted localization, whereby the respective line discloses in column 7 the fine chemical cerebronic acid. For example, an increase of the cerebronic acid of at least 1 percent, particularly in a range of 23 to 48-percent is conferred as compared to a corresponding non-transformed wild type non-human organism.

[61744] Accordingly, in one embodiment, an increase of 2-hydroxybehenic acid in a non-human organism, as compared to a corresponding non-transformed wild type non-human organism, is conferred in the process of the invention, if the activity of a polypeptide showing the activity of a protein phosphatase, or if the activity of the polypeptide At4g26080, preferably represented by SEQ ID NO. 68850, or a homolog or fragment thereof, or if the activity of a polypeptide encoded by a nucleic acid molecule comprising the nucleic acid SEQ ID NO. 68849, preferably the coding region thereof, or a homolog or fragment thereof, e.g. derived from Arabidopsis thaliana, is increased or generated. For example the activity of a nucleic acid molecule or a polypeptide comprising the nucleic acid, preferably the coding region thereof, or polypeptide or the consensus sequence or the polypeptide motif, as depicted in Table I, II or IV, application No. 12, column 5 or 8 in the respective same line as the nucleic acid molecule SEQ ID NO. 68849 or polypeptide SEQ ID NO. 68850, respectively, or a homolog or a fragment thereof, is increased or generated, or if the activity protein phosphatase is increased or generated in a non-human organism, like a microorganism or a plant cell, plant or part thereof, especially with non-targeted localization, whereby the respective line discloses in column 7 the fine chemical 2-hydroxybehenic acid. For example, an increase of the 2-hydroxybehenic acid of at least 1 percent, particularly in a range of 26 to 48-percent is conferred as compared to a corresponding non-transformed wild type non-human organism.

[61745] Accordingly, in one embodiment, an increase of 2-hydroxytetracosenoic acid (preferably 2-hydroxynervonic acid) in a non-human organism, as compared to a corresponding non-transformed wild type non-human organism, is conferred in the process of the invention, if the activity of a polypeptide showing the activity of a protein phosphatase, or if the activity of the polypeptide At4g26080, preferably represented by SEQ ID NO. 68850, or a homolog or fragment thereof, or if the activity of a polypeptide encoded by a nucleic acid molecule comprising the nucleic acid SEQ ID NO. 68849, preferably the coding region thereof, or a homolog or fragment thereof, e.g. derived from Arabidopsis thaliana, is increased or generated. For example the activity of a nucleic acid molecule or a polypeptide comprising the nucleic acid, preferably the coding region thereof, or polypeptide or the consensus sequence or the polypeptide motif, as depicted in Table I, II or IV, application No. 12, column 5 or 8 in the respective same line as the nucleic acid molecule SEQ ID NO. 68849 or polypeptide SEQ ID NO. 68850, respectively, or a homolog or a fragment thereof, is increased or generated, or if the activity protein phosphatase is increased or generated in a non-human organism, like a microorganism or a plant cell, plant or part thereof, especially with non-targeted localization, whereby the respective line discloses in column 7 the fine chemical 2-hydroxytetracosenoic acid (preferably 2-hydroxynervonic acid). For example, an increase of the 2-hydroxytetracosenoic acid (preferably 2-hydroxynervonic acid) of at least 1 percent, particularly in a range of 21 to 43-percent is conferred as compared to a corresponding non-transformed wild type non-human organism.

[61746] Accordingly, in one embodiment, an increase of cerebronic acid in a non-human organism, as compared to a corresponding non-transformed wild type non-human organism, is conferred in the process of the invention, if the activity of a polypeptide showing the activity of a glutaredoxin, or if the activity of the polypeptide At4g33040, preferably represented by SEQ ID NO. 4103, or a homolog or fragment thereof, or if the activity of a polypeptide encoded by a nucleic acid molecule comprising the nucleic acid SEQ ID NO. 4102, preferably the coding region thereof, or a homolog or fragment thereof, e.g. derived from Arabidopsis thaliana, is increased or generated. For example the activity of a nucleic acid molecule or a polypeptide comprising the nucleic acid, preferably the coding region thereof, or polypeptide or the consensus sequence or the polypeptide motif, as depicted in Table I, II or IV, application No. 12, column 5 or 8 in the respective same line as the nucleic acid molecule SEQ ID NO. 4102 or polypeptide SEQ ID NO. 4103, respectively, or a homolog or a fragment thereof, is increased or generated, or if the activity glutaredoxin is increased or generated in a non-human organism, like a microorganism or a plant cell, plant or part thereof, especially with non-targeted localization, whereby the respective line discloses in column 7 the fine chemical cerebronic acid. For example, an increase of the cerebronic acid of at least 1 percent, particularly in a range of 25 to 58-percent is conferred as compared to a corresponding non-transformed wild type non-human organism.

[61747] Accordingly, in one embodiment, an increase of hexadecadienoic acid in a non-human organism, as compared to a corresponding non-transformed wild type non-human organism, is conferred in the process of the invention, if the activity of a polypeptide showing the activity of a glutaredoxin, or if the activity of the polypeptide At4g33040, preferably represented by SEQ ID NO. 4103, or a homolog or fragment thereof, or if the activity of a polypeptide encoded by a nucleic acid molecule comprising the nucleic acid SEQ ID NO. 4102, preferably the coding region thereof, or a homolog or fragment thereof, e.g. derived from Arabidopsis thaliana, is increased or generated. For example the activity of a nucleic acid molecule or a polypeptide comprising the nucleic acid, preferably the coding region thereof, or polypeptide or the consensus sequence or the polypeptide motif, as depicted in Table I, II or IV, application No. 12, column 5 or 8 in the respective same line as the nucleic acid molecule SEQ ID NO. 4102 or polypeptide SEQ ID NO. 4103, respectively, or a homolog or a fragment thereof, is increased or generated, or if the activity glutaredoxin is increased or generated in a non-human organism, like a microorganism or a plant cell, plant or part thereof, especially with non-targeted localization, whereby the respective line discloses in column 7 the fine chemical hexadecadienoic acid. For example, an increase of the hexadecadienoic acid of at least 1 percent, particularly in a range of 20 to 61-percent is conferred as compared to a corresponding non-transformed wild type non-human organism.

[61748] Accordingly, in one embodiment, an increase of hexadecatrienoic acid in a non-human organism, as compared to a corresponding non-transformed wild type non-human organism, is conferred in the process of the invention, if the activity of a polypeptide showing the activity of a glutaredoxin, or if the activity of the polypeptide At4g33040, preferably represented by SEQ ID NO. 4103, or a homolog or fragment thereof, or if the activity of a polypeptide encoded by a nucleic acid molecule comprising the nucleic acid SEQ ID NO. 4102, preferably the coding region thereof, or a homolog or fragment thereof, e.g. derived from Arabidopsis thaliana, is increased or generated. For example the activity of a nucleic acid molecule or a polypeptide comprising the nucleic acid, preferably the coding region thereof, or polypeptide or the consensus sequence or the polypeptide motif, as depicted in Table I, II or IV, application No. 12, column 5 or 8 in the respective same line as the nucleic acid molecule SEQ ID NO. 4102 or polypeptide SEQ ID NO. 4103, respectively, or a homolog or a fragment thereof, is increased or generated, or if the activity glutaredoxin is increased or generated in a non-human organism, like a microorganism or a plant cell, plant or part thereof, especially with non-targeted localization, whereby the respective line discloses in column 7 the fine chemical hexadecatrienoic acid. For example, an increase of the hexadecatrienoic acid of at least 1 percent, particularly in a range of 13 to 35-percent is conferred as compared to a corresponding non-transformed wild type non-human organism.

[61749] Accordingly, in one embodiment, an increase of 2-hydroxybehenic acid in a non-human organism, as compared to a corresponding non-transformed wild type non-human organism, is conferred in the process of the invention, if the activity of a polypeptide showing the activity of a calcium-dependent protein kinase, or if the activity of the polypeptide At4g35310, preferably represented by SEQ ID NO. 4349, or a homolog or fragment thereof, or if the activity of a polypeptide encoded by a nucleic acid molecule comprising the nucleic acid SEQ ID NO. 4348, preferably the coding region thereof, or a homolog or fragment thereof, e.g. derived from Arabidopsis thaliana, is increased or generated. For example the activity of a nucleic acid molecule or a polypeptide comprising the nucleic acid, preferably the coding region thereof, or polypeptide or the consensus sequence or the polypeptide motif, as depicted in Table I, II or IV, application No. 12, column 5 or 8 in the respective same line as the nucleic acid molecule SEQ ID NO. 4348 or polypeptide SEQ ID NO. 4349, respectively, or a homolog or a fragment thereof, is increased or generated, or if the activity calcium-dependent protein kinase is increased or generated in a non-human organism, like a microorganism or a plant cell, plant or part thereof, especially with non-targeted localization, whereby the respective line discloses in column 7 the fine chemical 2-hydroxybehenic acid. For example, an increase of the 2-hydroxybehenic acid of at least 1 percent, particularly in a range of 32 to 125-percent is conferred as compared to a corresponding non-transformed wild type non-human organism.

[61750] Accordingly, in one embodiment, an increase of 2-hydroxypalmitic acid in a non-human organism, as compared to a corresponding non-transformed wild type non-human organism, is conferred in the process of the invention, if the activity of a polypeptide showing the activity of a calcium-dependent protein kinase, or if the activity of the polypeptide At4g35310, preferably represented by SEQ ID NO. 4349, or a homolog or fragment thereof, or if the activity of a polypeptide encoded by a nucleic acid molecule comprising the nucleic acid SEQ ID NO. 4348, preferably the coding region thereof, or a homolog or fragment thereof, e.g. derived from Arabidopsis thaliana, is increased or generated. For example the activity of a nucleic acid molecule or a polypeptide comprising the nucleic acid, preferably the coding region thereof, or polypeptide or the consensus sequence or the polypeptide motif, as depicted in Table I, II or IV, application No. 12, column 5 or 8 in the respective same line as the nucleic acid molecule SEQ ID NO. 4348 or polypeptide SEQ ID NO. 4349, respectively, or a homolog or a fragment thereof, is increased or generated, or if the activity calcium-dependent protein kinase is increased or generated in a non-human organism, like a microorganism or a plant cell, plant or part thereof, especially with non-targeted localization, whereby the respective line discloses in column 7 the fine chemical 2-hydroxypalmitic acid. For example, an increase of the 2-hydroxypalmitic acid of at least 1 percent, particularly in a range of 18 to 97-percent is conferred as compared to a corresponding non-transformed wild type non-human organism.

[61751] Accordingly, in one embodiment, an increase of oleic acid in a non-human organism, as compared to a corresponding non-transformed wild type non-human organism, is conferred in the process of the invention, if the activity of a polypeptide showing the activity of a acyldesaturase, or if the activity of the polypeptide At5g16230, preferably represented by SEQ ID NO. 122566, or a homolog or fragment thereof, or if the activity of a polypeptide encoded by a nucleic acid molecule comprising the nucleic acid SEQ ID NO. 122565, preferably the coding region thereof, or a homolog or fragment thereof, e.g. derived from Arabidopsis thaliana, is increased or generated. For example the activity of a nucleic acid molecule or a polypeptide comprising the nucleic acid, preferably the coding region thereof, or polypeptide or the consensus sequence or the polypeptide motif, as depicted in Table I, II or IV, application No. 12, column 5 or 8 in the respective same line as the nucleic acid molecule SEQ ID NO. 122565 or polypeptide SEQ ID NO. 122566, respectively, or a homolog or a fragment thereof, is increased or generated, or if the activity acyl-desaturase is increased or generated in a non-human organism, like a microorganism or a plant cell, plant or part thereof, especially with non-targeted localization, whereby the respective line discloses in column 7 the fine chemical oleic acid. For example, an increase of the oleic acid of at least 1 percent, particularly in a range of 137 to 225-percent is conferred as compared to a corresponding non-transformed wild type non-human organism.

[61752] Accordingly, in one embodiment, an increase of hexadecatrienoic acid in a non-human organism, as compared to a corresponding non-transformed wild type non-human organism, is conferred in the process of the invention, if the activity of a polypeptide showing the activity of a monothiol glutaredoxin, or if the activity of the polypeptide At5g18600, preferably represented by SEQ ID NO. 4905, or a homolog or fragment thereof, or if the activity of a polypeptide encoded by a nucleic acid molecule comprising the nucleic acid SEQ ID NO. 4904, preferably the coding region thereof, or a homolog or fragment thereof, e.g. derived from Arabidopsis thaliana, is increased or generated. For example the activity of a nucleic acid molecule or a polypeptide comprising the nucleic acid, preferably the coding region thereof, or polypeptide or the consensus sequence or the polypeptide motif, as depicted in Table I, II or IV, application No. 12, column 5 or 8 in the respective same line as the nucleic acid molecule SEQ ID NO. 4904 or polypeptide SEQ ID NO. 4905, respectively, or a homolog or a fragment thereof, is increased or generated, or if the activity monothiol glutaredoxin is increased or generated in a non-human organism, like a microorganism or a plant cell, plant or part thereof, especially with non-targeted localization, whereby the respective line discloses in column 7 the fine chemical hexadecatrienoic acid. For example, an increase of the hexadecatrienoic acid of at least 1 percent, particularly in a range of 17 to 37-percent is conferred as compared to a corresponding non-transformed wild type non-human organism.

[61753] Accordingly, in one embodiment, an increase of hexadecatrienoic acid in a non-human organism, as compared to a corresponding non-transformed wild type non-human organism, is conferred in the process of the invention, if the activity of a polypeptide showing the activity of a protein phosphatase, or if the activity of the polypeptide At5g57050, preferably represented by SEQ ID NO. 5319, or a homolog or fragment thereof, or if the activity of a polypeptide encoded by a nucleic acid molecule comprising the nucleic acid SEQ ID NO. 5318, preferably the coding region thereof, or a homolog or fragment thereof, e.g. derived from Arabidopsis thaliana, is increased or generated. For example the activity of a nucleic acid molecule or a polypeptide comprising the nucleic acid, preferably the coding region thereof, or polypeptide or the consensus sequence or the polypeptide motif, as depicted in Table I, II or IV, application No. 12, column 5 or 8 in the respective same line as the nucleic acid molecule SEQ ID NO. 5318 or polypeptide SEQ ID NO. 5319, respectively, or a homolog or a fragment thereof, is increased or generated, or if the activity protein phosphatase is increased or generated in a non-human organism, like a microorganism or a plant cell, plant or part thereof, especially with non-targeted localization, whereby the respective line discloses in column 7 the fine chemical hexadecatrienoic acid. For example, an increase of the hexadecatrienoic acid of at least 1 percent, particularly in a range of 15 to 33-percent is conferred as compared to a corresponding non-transformed wild type non-human organism.

[61754] Accordingly, in one embodiment, an increase of hexadecadienoic acid in a non-human organism, as compared to a corresponding non-transformed wild type non-human organism, is conferred in the process of the invention, if the activity of a polypeptide showing the activity of a protein kinase, or if the activity of the polypeptide At5g66710, preferably represented by SEQ ID NO. 122804, or a homolog or fragment thereof, or if the activity of a polypeptide encoded by a nucleic acid molecule comprising the nucleic acid SEQ ID NO. 122803, preferably the coding region thereof, or a homolog or fragment thereof, e.g. derived from Arabidopsis thaliana, is increased or generated. For example the activity of a nucleic acid molecule or a polypeptide comprising the nucleic acid, preferably the coding region thereof, or polypeptide or the consensus sequence or the polypeptide motif, as depicted in Table I, II or IV, application No. 12, column 5 or 8 in the respective same line as the nucleic acid molecule SEQ ID NO. 122803 or polypeptide SEQ ID NO. 122804, respectively, or a homolog or a fragment thereof, is increased or generated, or if the activity protein kinase is increased or generated in a non-human organism, like a microorganism or a plant cell, plant or part thereof, especially with non-targeted localization, whereby the respective line discloses in column 7 the fine chemical hexadecadienoic acid. For example, an increase of the hexadecadienoic acid of at least 1 percent, particularly in a range of 29 to 120-percent is conferred as compared to a corresponding non-transformed wild type non-human organism.

[61755] Accordingly, in one embodiment, an increase of cerebronic acid in a non-human organism, as compared to a corresponding non-transformed wild type non-human organism, is conferred in the process of the invention, if the activity of a polypeptide showing the activity of a CDP-diacylglycerol-serine O-phosphatidyltransferase, or if the activity of the polypeptide AvinDRAFT_{—}0035, preferably represented by SEQ ID NO. 70584, or a homolog or fragment thereof, or if the activity of a polypeptide encoded by a nucleic acid molecule comprising the nucleic acid SEQ ID NO. 70583, preferably the coding region thereof, or a homolog or fragment thereof, e.g. derived from Azotobacter vinelandii, is increased or generated. For example the activity of a nucleic acid molecule or a polypeptide comprising the nucleic acid, preferably the coding region thereof, or polypeptide or the consensus sequence or the polypeptide motif, as depicted in Table I, II or IV, application No. 12, column 5 or 8 in the respective same line as the nucleic acid molecule SEQ ID NO. 70583 or polypeptide SEQ ID NO. 70584, respectively, or a homolog or a fragment thereof, is increased or generated, or if the activity CDP-diacylglycerolserine O-phosphatidyltransferase is increased or generated in a non-human organism, like a microorganism or a plant cell, plant or part thereof, especially with non-targeted localization, whereby the respective line discloses in column 7 the fine chemical cerebronic acid. For example, an increase of the cerebronic acid of at least 1 percent, particularly in a range of 22 to 38-percent is conferred as compared to a corresponding non-transformed wild type non-human organism.

[61756] Accordingly, in one embodiment, an increase of 2-hydroxybehenic acid in a non-human organism, as compared to a corresponding non-transformed wild type non-human organism, is conferred in the process of the invention, if the activity of a polypeptide showing the activity of a CDP-diacylglycerol-serine O-phosphatidyltransferase, or if the activity of the polypeptide AvinDRAFT_{—}0035, preferably represented by SEQ ID NO. 70584, or a homolog or fragment thereof, or if the activity of a polypeptide encoded by a nucleic acid molecule comprising the nucleic acid SEQ ID NO. 70583, preferably the coding region thereof, or a homolog or fragment thereof, e.g. derived from Azotobacter vinelandii, is increased or generated. For example the activity of a nucleic acid molecule or a polypeptide comprising the nucleic acid, preferably the coding region thereof, or polypeptide or the consensus sequence or the polypeptide motif, as depicted in Table I, II or IV, application No. 12, column 5 or 8 in the respective same line as the nucleic acid molecule SEQ ID NO. 70583 or polypeptide SEQ ID NO. 70584, respectively, or a homolog or a fragment thereof, is increased or generated, or if the activity CDP-diacylglycerolserine O-phosphatidyltransferase is increased or generated in a non-human organism, like a microorganism or a plant cell, plant or part thereof, especially with non-targeted localization, whereby the respective line discloses in column 7 the fine chemical 2-hydroxybehenic acid. For example, an increase of the 2-hydroxybehenic acid of at least 1 percent, particularly in a range of 29 to 56-percent is conferred as compared to a corresponding non-transformed wild type non-human organism.

[61757] Accordingly, in one embodiment, an increase of 2-hydroxytetracosenoic acid (preferably 2-hydroxynervonic acid) in a non-human organism, as compared to a corresponding non-transformed wild type non-human organism, is conferred in the process of the invention, if the activity of a polypeptide showing the activity of a CDP-diacylglycerol-serine O-phosphatidyltransferase, or if the activity of the polypeptide AvinDRAFT_{—}0035, preferably represented by SEQ ID NO. 70584, or a homolog or fragment thereof, or if the activity of a polypeptide encoded by a nucleic acid molecule comprising the nucleic acid SEQ ID NO. 70583, preferably the coding region thereof, or a homolog or fragment thereof, e.g. derived from Azotobacter vinelandii, is increased or generated. For example the activity of a nucleic acid molecule or a polypeptide comprising the nucleic acid, preferably the coding region thereof, or polypeptide or the consensus sequence or the polypeptide motif, as depicted in Table I, II or IV, application No. 12, column 5 or 8 in the respective same line as the nucleic acid molecule SEQ ID NO. 70583 or polypeptide SEQ ID NO. 70584, respectively, or a homolog or a fragment thereof, is increased or generated, or if the activity CDP-diacylglycerol-serine O-phosphatidyltransferase is increased or generated in a non-human organism, like a microorganism or a plant cell, plant or part thereof, especially with non-targeted localization, whereby the respective line discloses in column 7 the fine chemical 2-hydroxytetracosenoic acid (preferably 2-hydroxynervonic acid). For example, an increase of the 2-hydroxytetracosenoic acid (preferably 2-hydroxynervonic acid) of at least 1 percent, particularly in a range of 28 to 48-percent is conferred as compared to a corresponding non-transformed wild type non-human organism.

[61758] Accordingly, in one embodiment, an increase of 2-hydroxypalmitic acid in a non-human organism, as compared to a corresponding non-transformed wild type non-human organism, is conferred in the process of the invention, if the activity of a polypeptide showing the activity of a CDP-diacylglycerol-serine O-phosphatidyltransferase, or if the activity of the polypeptide AvinDRAFT_{—}0035, preferably represented by SEQ ID NO. 70584, or a homolog or fragment thereof, or if the activity of a polypeptide encoded by a nucleic acid molecule comprising the nucleic acid SEQ ID NO. 70583, preferably the coding region thereof, or a homolog or fragment thereof, e.g. derived from Azotobacter vinelandii, is increased or generated. For example the activity of a nucleic acid molecule or a polypeptide comprising the nucleic acid, preferably the coding region thereof, or polypeptide or the consensus sequence or the polypeptide motif, as depicted in Table I, II or IV, application No. 12, column 5 or 8 in the respective same line as the nucleic acid molecule SEQ ID NO. 70583 or polypeptide SEQ ID NO. 70584, respectively, or a homolog or a fragment thereof, is increased or generated, or if the activity CDP-diacylglycerolserine O-phosphatidyltransferase is increased or generated in a non-human organism, like a microorganism or a plant cell, plant or part thereof, especially with non-targeted localization, whereby the respective line discloses in column 7 the fine chemical 2-hydroxypalmitic acid. For example, an increase of the 2-hydroxypalmitic acid of at least 1 percent, particularly in a range of 20 to 53-percent is conferred as compared to a corresponding non-transformed wild type non-human organism.

[61759] Accordingly, in one embodiment, an increase of hexadecadienoic acid in a non-human organism, as compared to a corresponding non-transformed wild type non-human organism, is conferred in the process of the invention, if the activity of a polypeptide showing the activity of a sec-independent protein translocase, or if the activity of the polypeptide AvinDRAFT_{—}1624, preferably represented by SEQ ID NO. 26197, or a homolog or fragment thereof, or if the activity of a polypeptide encoded by a nucleic acid molecule comprising the nucleic acid SEQ ID NO. 26196, preferably the coding region thereof, or a homolog or fragment thereof, e.g. derived from Azotobacter vinelandii, is increased or generated. For example the activity of a nucleic acid molecule or a polypeptide comprising the nucleic acid, preferably the coding region thereof, or polypeptide or the consensus sequence or the polypeptide motif, as depicted in Table I, II or IV, application No. 12, column 5 or 8 in the respective same line as the nucleic acid molecule SEQ ID NO. 26196 or polypeptide SEQ ID NO. 26197, respectively, or a homolog or a fragment thereof, is increased or generated, or if the activity sec-independent protein translocase is increased or generated in a non-human organism, like a microorganism or a plant cell, plant or part thereof, especially with non-targeted localization, whereby the respective line discloses in column 7 the fine chemical hexadecadienoic acid. For example, an increase of the hexadecadienoic acid of at least 1 percent, particularly in a range of 22 to 50-percent is conferred as compared to a corresponding non-transformed wild type non-human organism.

[61760] Accordingly, in one embodiment, an increase of 2-hydroxytetracosenoic acid (preferably 2-hydroxynervonic acid) in a non-human organism, as compared to a corresponding non-transformed wild type non-human organism, is conferred in the process of the invention, if the activity of a polypeptide showing the activity of a transcriptional regulator protein, or if the activity of the polypeptide AvinDRAFT_{—}2010, preferably represented by SEQ ID NO. 114199, or a homolog or fragment thereof, or if the activity of a polypeptide encoded by a nucleic acid molecule comprising the nucleic acid SEQ ID NO. 114198, preferably the coding region thereof, or a homolog or fragment thereof, e.g. derived from Azotobacter vinelandii, is increased or generated. For example the activity of a nucleic acid molecule or a polypeptide comprising the nucleic acid, preferably the coding region thereof, or polypeptide or the consensus sequence or the polypeptide motif, as depicted in Table I, II or IV, application No. 12, column 5 or 8 in the respective same line as the nucleic acid molecule SEQ ID NO. 114198 or polypeptide SEQ ID NO. 114199, respectively, or a homolog or a fragment thereof, is increased or generated, or if the activity transcriptional regulator protein is increased or generated in a non-human organism, like a microorganism or a plant cell, plant or part thereof, especially with non-targeted localization, whereby the respective line discloses in column 7 the fine chemical 2-hydroxytetracosenoic acid (preferably 2-hydroxynervonic acid). For example, an increase of the 2-hydroxytetracosenoic acid (preferably 2-hydroxynervonic acid) of at least 1 percent, particularly in a range of 24 to 38-percent is conferred as compared to a corresponding non-transformed wild type non-human organism.

[61761] Accordingly, in one embodiment, an increase of 2-hydroxypalmitic acid in a non-human organism, as compared to a corresponding non-transformed wild type non-human organism, is conferred in the process of the invention, if the activity of a polypeptide showing the activity of a beta-hydroxylase, or if the activity of the polypeptide AvinDRAFT_{—}2091, preferably represented by SEQ ID NO. 6041, or a homolog or fragment thereof, or if the activity of a polypeptide encoded by a nucleic acid molecule comprising the nucleic acid SEQ ID NO. 6040, preferably the coding region thereof, or a homolog or fragment thereof, e.g. derived from Azotobacter vinelandii, is increased or generated. For example the activity of a nucleic acid molecule or a polypeptide comprising the nucleic acid, preferably the coding region thereof, or polypeptide or the consensus sequence or the polypeptide motif, as depicted in Table I, II or IV, application No. 12, column 5 or 8 in the respective same line as the nucleic acid molecule SEQ ID NO. 6040 or polypeptide SEQ ID NO. 6041, respectively, or a homolog or a fragment thereof, is increased or generated, or if the activity beta-hydroxylase is increased or generated in a non-human organism, like a microorganism or a plant cell, plant or part thereof, especially with non-targeted localization, whereby the respective line discloses in column 7 the fine chemical 2-hydroxypalmitic acid. For example, an increase of the 2-hydroxypalmitic acid of at least 1 percent, particularly in a range of 24 to 44-percent is conferred as compared to a corresponding non-transformed wild type non-human organism.

[61762] Accordingly, in one embodiment, an increase of hexadecadienoic acid in a non-human organism, as compared to a corresponding non-transformed wild type non-human organism, is conferred in the process of the invention, if the activity of a polypeptide showing the activity of a 30S ribosomal protein S3, or if the activity of the polypeptide AvinDRAFT_{—}2365, preferably represented by SEQ ID NO. 71326, or a homolog or fragment thereof, or if the activity of a polypeptide encoded by a nucleic acid molecule comprising the nucleic acid SEQ ID NO. 71325, preferably the coding region thereof, or a homolog or fragment thereof, e.g. derived from Azotobacter vinelandii, is increased or generated. For example the activity of a nucleic acid molecule or a polypeptide comprising the nucleic acid, preferably the coding region thereof, or polypeptide or the consensus sequence or the polypeptide motif, as depicted in Table I, II or IV, application No. 12, column 5 or 8 in the respective same line as the nucleic acid molecule SEQ ID NO. 71325 or polypeptide SEQ ID NO. 71326, respectively, or a homolog or a fragment thereof, is increased or generated, or if the activity 30S ribosomal protein S3 is increased or generated in a non-human organism, like a microorganism or a plant cell, plant or part thereof, especially with non-targeted localization, whereby the respective line discloses in column 7 the fine chemical hexadecadienoic acid. For example, an increase of the hexadecadienoic acid of at least 1 percent, particularly in a range of 38 to 99-percent is conferred as compared to a corresponding non-transformed wild type non-human organism.

[61763] Accordingly, in one embodiment, an increase of 2-hydroxybehenic acid in a non-human organism, as compared to a corresponding non-transformed wild type non-human organism, is conferred in the process of the invention, if the activity of a polypeptide showing the activity of a acyl-CoA synthase, or if the activity of the polypeptide AvinDRAFT_{—}2754, preferably represented by SEQ ID NO. 28041, or a homolog or fragment thereof, or if the activity of a polypeptide encoded by a nucleic acid molecule comprising the nucleic acid SEQ ID NO. 28040, preferably the coding region thereof, or a homolog or fragment thereof, e.g. derived from Azotobacter vinelandii, is increased or generated. For example the activity of a nucleic acid molecule or a polypeptide comprising the nucleic acid, preferably the coding region thereof, or polypeptide or the consensus sequence or the polypeptide motif, as depicted in Table I, II or IV, application No. 12, column 5 or 8 in the respective same line as the nucleic acid molecule SEQ ID NO. 28040 or polypeptide SEQ ID NO. 28041, respectively, or a homolog or a fragment thereof, is increased or generated, or if the activity acyl-CoA synthase is increased or generated in a non-human organism, like a microorganism or a plant cell, plant or part thereof, especially with non-targeted localization, whereby the respective line discloses in column 7 the fine chemical 2-hydroxybehenic acid. For example, an increase of the 2-hydroxybehenic acid of at least 1 percent, particularly in a range of 28 to 72-percent is conferred as compared to a corresponding non-transformed wild type non-human organism.

[61764] Accordingly, in one embodiment, an increase of 2-hydroxytetracosenoic acid (preferably 2-hydroxynervonic acid) in a non-human organism, as compared to a corresponding non-transformed wild type non-human organism, is conferred in the process of the invention, if the activity of a polypeptide showing the activity of a heat shock protein, or if the activity of the polypeptide AvinDRAFT_{—}2827, preferably represented by SEQ ID NO. 122949, or a homolog or fragment thereof, or if the activity of a polypeptide encoded by a nucleic acid molecule comprising the nucleic acid SEQ ID NO. 122948, preferably the coding region thereof, or a homolog or fragment thereof, e.g. derived from Azotobacter vinelandii, is increased or generated. For example the activity of a nucleic acid molecule or a polypeptide comprising the nucleic acid, preferably the coding region thereof, or polypeptide or the consensus sequence or the polypeptide motif, as depicted in Table I, II or IV, application No. 12, column 5 or 8 in the respective same line as the nucleic acid molecule SEQ ID NO. 122948 or polypeptide SEQ ID NO. 122949, respectively, or a homolog or a fragment thereof, is increased or generated, or if the activity heat shock protein is increased or generated in a non-human organism, like a microorganism or a plant cell, plant or part thereof, especially with non-targeted localization, whereby the respective line discloses in column 7 the fine chemical 2-hydroxytetracosenoic acid (preferably 2-hydroxynervonic acid). For example, an increase of the 2-hydroxytetracosenoic acid (preferably 2-hydroxynervonic acid) of at least 1 percent, particularly in a range of 23 to 80-percent is conferred as compared to a corresponding non-transformed wild type non-human organism.

[61765] Accordingly, in one embodiment, an increase of 2-hydroxytetracosenoic acid (preferably 2-hydroxynervonic acid) in a non-human organism, as compared to a corresponding non-transformed wild type non-human organism, is conferred in the process of the invention, if the activity of a polypeptide showing the activity of a oxidoreductase, or if the activity of the polypeptide AvinDRAFT_{—}3253, preferably represented by SEQ ID NO. 29501, or a homolog or fragment thereof, or if the activity of a polypeptide encoded by a nucleic acid molecule comprising the nucleic acid SEQ ID NO. 29500, preferably the coding region thereof, or a homolog or fragment thereof, e.g. derived from Azotobacter vinelandii, is increased or generated. For example the activity of a nucleic acid molecule or a polypeptide comprising the nucleic acid, preferably the coding region thereof, or polypeptide or the consensus sequence or the polypeptide motif, as depicted in Table I, II or IV, application No. 12, column 5 or 8 in the respective same line as the nucleic acid molecule SEQ ID NO. 29500 or polypeptide SEQ ID NO. 29501, respectively, or a homolog or a fragment thereof, is increased or generated, or if the activity oxidoreductase is increased or generated in a non-human organism, like a microorganism or a plant cell, plant or part thereof, especially with non-targeted localization, whereby the respective line discloses in column 7 the fine chemical 2-hydroxytetracosenoic acid (preferably 2-hydroxynervonic acid). For example, an increase of the 2-hydroxytetracosenoic acid (preferably 2-hydroxynervonic acid) of at least 1 percent, particularly in a range of 26 to 56-percent is conferred as compared to a corresponding non-transformed wild type non-human organism.

[61766] Accordingly, in one embodiment, an increase of hexadecadienoic acid in a non-human organism, as compared to a corresponding non-transformed wild type non-human organism, is conferred in the process of the invention, if the activity of a polypeptide showing the activity of a recombinase A, or if the activity of the polypeptide AvinDRAFT_{—}3629, preferably represented by SEQ ID NO. 114232, or a homolog or fragment thereof, or if the activity of a polypeptide encoded by a nucleic acid molecule comprising the nucleic acid SEQ ID NO. 114231, preferably the coding region thereof, or a homolog or fragment thereof, e.g. derived from Azotobacter vinelandii, is increased or generated. For example the activity of a nucleic acid molecule or a polypeptide comprising the nucleic acid, preferably the coding region thereof, or polypeptide or the consensus sequence or the polypeptide motif, as depicted in Table I, II or IV, application No. 12, column 5 or 8 in the respective same line as the nucleic acid molecule SEQ ID NO. 114231 or polypeptide SEQ ID NO. 114232, respectively, or a homolog or a fragment thereof, is increased or generated, or if the activity recombinase A is increased or generated in a non-human organism, like a microorganism or a plant cell, plant or part thereof, especially with non-targeted localization, whereby the respective line discloses in column 7 the fine chemical hexadecadienoic acid. For example, an increase of the hexadecadienoic acid of at least 1 percent, particularly in a range of 23 to 113-percent is conferred as compared to a corresponding non-transformed wild type non-human organism.

[61767] Accordingly, in one embodiment, an increase of lauric acid in a non-human organism, as compared to a corresponding non-transformed wild type non-human organism, is conferred in the process of the invention, if the activity of a polypeptide showing the activity of a ABC transporter component, or if the activity of the polypeptide AVINDRAFT_{—}4128, preferably represented by SEQ ID NO. 72521, or a homolog or fragment thereof, or if the activity of a polypeptide encoded by a nucleic acid molecule comprising the nucleic acid SEQ ID NO. 72520, preferably the coding region thereof, or a homolog or fragment thereof, e.g. derived from Azotobacter vinelandii, is increased or generated. For example the activity of a nucleic acid molecule or a polypeptide comprising the nucleic acid, preferably the coding region thereof, or polypeptide or the consensus sequence or the polypeptide motif, as depicted in Table I, II or IV, application No. 12, column 5 or 8 in the respective same line as the nucleic acid molecule SEQ ID NO. 72520 or polypeptide SEQ ID NO. 72521, respectively, or a homolog or a fragment thereof, is increased or generated, or if the activity ABC transporter component is increased or generated in a non-human organism, like a microorganism or a plant cell, plant or part thereof, especially with non-targeted localization, whereby the respective line discloses in column 7 the fine chemical lauric acid. For example, an increase of the lauric acid of at least 1 percent, particularly in a range of 44 to 99-percent is conferred as compared to a corresponding non-transformed wild type non-human organism.

[61768] Accordingly, in one embodiment, an increase of 2-hydroxypalmitic acid in a non-human organism, as compared to a corresponding non-transformed wild type non-human organism, is conferred in the process of the invention, if the activity of a polypeptide showing the activity of a hydrolase, or if the activity of the polypeptide AvinDRAFT_{—}5103, preferably represented by SEQ ID NO. 6511, or a homolog or fragment thereof, or if the activity of a polypeptide encoded by a nucleic acid molecule comprising the nucleic acid SEQ ID NO. 6510, preferably the coding region thereof, or a homolog or fragment thereof, e.g. derived from Azotobacter vinelandii, is increased or generated. For example the activity of a nucleic acid molecule or a polypeptide comprising the nucleic acid, preferably the coding region thereof, or polypeptide or the consensus sequence or the polypeptide motif, as depicted in Table I, II or IV, application No. 12, column 5 or 8 in the respective same line as the nucleic acid molecule SEQ ID NO. 6510 or polypeptide SEQ ID NO. 6511, respectively, or a homolog or a fragment thereof, is increased or generated, or if the activity hydrolase is increased or generated in a non-human organism, like a microorganism or a plant cell, plant or part thereof, especially with non-targeted localization, whereby the respective line discloses in column 7 the fine chemical 2-hydroxypalmitic acid. For example, an increase of the 2-hydroxypalmitic acid of at least 1 percent, particularly in a range of 20 to 76-percent is conferred as compared to a corresponding non-transformed wild type non-human organism.

[61769] Accordingly, in one embodiment, an increase of 2-hydroxypalmitic acid in a non-human organism, as compared to a corresponding non-transformed wild type non-human organism, is conferred in the process of the invention, if the activity of a polypeptide showing the activity of a glutamate-ammonia-ligase, or if the activity of the polypeptide AvinDRAFT_{—}5246, preferably represented by SEQ ID NO. 32038, or a homolog or fragment thereof, or if the activity of a polypeptide encoded by a nucleic acid molecule comprising the nucleic acid SEQ ID NO. 32037, preferably the coding region thereof, or a homolog or fragment thereof, e.g. derived from Azotobacter vinelandii, is increased or generated. For example the activity of a nucleic acid molecule or a polypeptide comprising the nucleic acid, preferably the coding region thereof, or polypeptide or the consensus sequence or the polypeptide motif, as depicted in Table I, II or IV, application No. 12, column 5 or 8 in the respective same line as the nucleic acid molecule SEQ ID NO. 32037 or polypeptide SEQ ID NO. 32038, respectively, or a homolog or a fragment thereof, is increased or generated, or if the activity glutamate-ammonia-ligase is increased or generated in a non-human organism, like a microorganism or a plant cell, plant or part thereof, especially with non-targeted localization, whereby the respective line discloses in column 7 the fine chemical 2-hydroxypalmitic acid. For example, an increase of the 2-hydroxypalmitic acid of at least 1 percent, particularly in a range of 21 to 40-percent is conferred as compared to a corresponding non-transformed wild type non-human organism.

[61770] Accordingly, in one embodiment, an increase of 2-hydroxybehenic acid in a non-human organism, as compared to a corresponding non-transformed wild type non-human organism, is conferred in the process of the invention, if the activity of a polypeptide showing the activity of a fumarylacetoacetate hydrolase, or if the activity of the polypeptide AvinDRAFT_{—}5292, preferably represented by SEQ ID NO. 32309, or a homolog or fragment thereof, or if the activity of a polypeptide encoded by a nucleic acid molecule comprising the nucleic acid SEQ ID NO. 32308, preferably the coding region thereof, or a homolog or fragment thereof, e.g. derived from Azotobacter vinelandii, is increased or generated. For example the activity of a nucleic acid molecule or a polypeptide comprising the nucleic acid, preferably the coding region thereof, or polypeptide or the consensus sequence or the polypeptide motif, as depicted in Table I, II or IV, application No. 12, column 5 or 8 in the respective same line as the nucleic acid molecule SEQ ID NO. 32308 or polypeptide SEQ ID NO. 32309, respectively, or a homolog or a fragment thereof, is increased or generated, or if the activity fumarylacetoacetate hydrolase is increased or generated in a non-human organism, like a microorganism or a plant cell, plant or part thereof, especially with non-targeted localization, whereby the respective line discloses in column 7 the fine chemical 2-hydroxybehenic acid. For example, an increase of the 2-hydroxybehenic acid of at least 1 percent, particularly in a range of 64 to 74-percent is conferred as compared to a corresponding non-transformed wild type non-human organism.

[61771] Accordingly, in one embodiment, an increase of 2-hydroxytetracosenoic acid (preferably 2-hydroxynervonic acid) in a non-human organism, as compared to a corresponding non-transformed wild type non-human organism, is conferred in the process of the invention, if the activity of a polypeptide showing the activity of a N-acetyl-gamma-glutamyl-phosphate reductase, or if the activity of the polypeptide AvinDRAFT_{—}5466, preferably represented by SEQ ID NO. 123088, or a homolog or fragment thereof, or if the activity of a polypeptide encoded by a nucleic acid molecule comprising the nucleic acid SEQ ID NO. 123087, preferably the coding region thereof, or a homolog or fragment thereof, e.g. derived from Azotobacter vinelandii, is increased or generated. For example the activity of a nucleic acid molecule or a polypeptide comprising the nucleic acid, preferably the coding region thereof, or polypeptide or the consensus sequence or the polypeptide motif, as depicted in Table I, II or IV, application No. 12, column 5 or 8 in the respective same line as the nucleic acid molecule SEQ ID NO. 123087 or polypeptide SEQ ID NO. 123088, respectively, or a homolog or a fragment thereof, is increased or generated, or if the activity N-acetyl-gamma-glutamyl-phosphate reductase is increased or generated in a non-human organism, like a microorganism or a plant cell, plant or part thereof, especially with non-targeted localization, whereby the respective line discloses in column 7 the fine chemical 2-hydroxytetracosenoic acid (preferably 2-hydroxynervonic acid). For example, an increase of the 2-hydroxytetracosenoic acid (preferably 2-hydroxynervonic acid) of at least 1 percent, particularly in a range of 22 to 55-percent is conferred as compared to a corresponding non-transformed wild type non-human organism.

[61772] Accordingly, in one embodiment, an increase of 2-hydroxytetracosenoic acid (preferably 2-hydroxynervonic acid) in a non-human organism, as compared to a corresponding non-transformed wild type non-human organism, is conferred in the process of the invention, if the activity of a polypeptide showing the activity of a HesB/YadR/YfhF family protein, or if the activity of the polypeptide AvinDRAFT_{—}5467, preferably represented by SEQ ID NO. 32649, or a homolog or fragment thereof, or if the activity of a polypeptide encoded by a nucleic acid molecule comprising the nucleic acid SEQ ID NO. 32648, preferably the coding region thereof, or a homolog or fragment thereof, e.g. derived from Azotobacter vinelandii, is increased or generated. For example the activity of a nucleic acid molecule or a polypeptide comprising the nucleic acid, preferably the coding region thereof, or polypeptide or the consensus sequence or the polypeptide motif, as depicted in Table I, II or IV, application No. 12, column 5 or 8 in the respective same line as the nucleic acid molecule SEQ ID NO. 32648 or polypeptide SEQ ID NO. 32649, respectively, or a homolog or a fragment thereof, is increased or generated, or if the activity HesB/YadR/YfhF family protein is increased or generated in a non-human organism, like a microorganism or a plant cell, plant or part thereof, especially with non-targeted localization, whereby the respective line discloses in column 7 the fine chemical 2-hydroxytetracosenoic acid (preferably 2-hydroxynervonic acid). For example, an increase of the 2-hydroxytetracosenoic acid (preferably 2-hydroxynervonic acid) of at least 1 percent, particularly in a range of 22 to 32-percent is conferred as compared to a corresponding non-transformed wild type non-human organism.

[61773] Accordingly, in one embodiment, an increase of 2-hydroxytetracosenoic acid (preferably 2-hydroxynervonic acid) in a non-human organism, as compared to a corresponding non-transformed wild type non-human organism, is conferred in the process of the invention, if the activity of a polypeptide showing the activity of a purine nucleoside phosphorylase, or if the activity of the polypeptide AvinDRAFT_{—}6700, preferably represented by SEQ ID NO. 34045, or a homolog or fragment thereof, or if the activity of a polypeptide encoded by a nucleic acid molecule comprising the nucleic acid SEQ ID NO. 34044, preferably the coding region thereof, or a homolog or fragment thereof, e.g. derived from Azotobacter vinelandii, is increased or generated. For example the activity of a nucleic acid molecule or a polypeptide comprising the nucleic acid, preferably the coding region thereof, or polypeptide or the consensus sequence or the polypeptide motif, as depicted in Table I, II or IV, application No. 12, column 5 or 8 in the respective same line as the nucleic acid molecule SEQ ID NO. 34044 or polypeptide SEQ ID NO. 34045, respectively, or a homolog or a fragment thereof, is increased or generated, or if the activity purine nucleoside phosphorylase is increased or generated in a non-human organism, like a microorganism or a plant cell, plant or part thereof, especially with non-targeted localization, whereby the respective line discloses in column 7 the fine chemical 2-hydroxytetracosenoic acid (preferably 2-hydroxynervonic acid). For example, an increase of the 2-hydroxytetracosenoic acid (preferably 2-hydroxynervonic acid) of at least 1 percent, particularly in a range of 25 to 48-percent is conferred as compared to a corresponding non-transformed wild type non-human organism.

[61774] Accordingly, in one embodiment, an increase of 2-hydroxybehenic acid in a non-human organism, as compared to a corresponding non-transformed wild type non-human organism, is conferred in the process of the invention, if the activity of a polypeptide showing the activity of a b0050-protein, or if the activity of the polypeptide B0050, preferably represented by SEQ ID NO. 103959, or a homolog or fragment thereof, or if the activity of a polypeptide encoded by a nucleic acid molecule comprising the nucleic acid SEQ ID NO. 103958, preferably the coding region thereof, or a homolog or fragment thereof, e.g. derived from Escherichia coli, is increased or generated. For example the activity of a nucleic acid molecule or a polypeptide comprising the nucleic acid, preferably the coding region thereof, or polypeptide or the consensus sequence or the polypeptide motif, as depicted in Table I, II or IV, application No. 12, column 5 or 8 in the respective same line as the nucleic acid molecule SEQ ID NO. 103958 or polypeptide SEQ ID NO. 103959, respectively, or a homolog or a fragment thereof, is increased or generated, or if the activity b0050-protein is increased or generated in a non-human organism, like a microorganism or a plant cell, plant or part thereof, especially with non-targeted localization, whereby the respective line discloses in column 7 the fine chemical 2-hydroxybehenic acid. For example, an increase of the 2-hydroxybehenic acid of at least 1 percent, particularly in a range of 33 to 55-percent is conferred as compared to a corresponding non-transformed wild type non-human organism.

[61775] Accordingly, in one embodiment, an increase of 2-hydroxytetracosenoic acid (preferably 2-hydroxynervonic acid) in a non-human organism, as compared to a corresponding non-transformed wild type non-human organism, is conferred in the process of the invention, if the activity of a polypeptide showing the activity of a b0050-protein, or if the activity of the polypeptide B0050, preferably represented by SEQ ID NO. 103959, or a homolog or fragment thereof, or if the activity of a polypeptide encoded by a nucleic acid molecule comprising the nucleic acid SEQ ID NO. 103958, preferably the coding region thereof, or a homolog or fragment thereof, e.g. derived from Escherichia coli, is increased or generated. For example the activity of a nucleic acid molecule or a polypeptide comprising the nucleic acid, preferably the coding region thereof, or polypeptide or the consensus sequence or the polypeptide motif, as depicted in Table I, II or IV, application No. 12, column 5 or 8 in the respective same line as the nucleic acid molecule SEQ ID NO. 103958 or polypeptide SEQ ID NO. 103959, respectively, or a homolog or a fragment thereof, is increased or generated, or if the activity b0050-protein is increased or generated in a non-human organism, like a microorganism or a plant cell, plant or part thereof, especially with non-targeted localization, whereby the respective line discloses in column 7 the fine chemical 2-hydroxytetracosenoic acid (preferably 2-hydroxynervonic acid). For example, an increase of the 2-hydroxytetracosenoic acid (preferably 2-hydroxynervonic acid) of at least 1 percent, particularly in a range of 26 to 38-percent is conferred as compared to a corresponding non-transformed wild type non-human organism.

[61776] Accordingly, in one embodiment, an increase of cerebronic acid in a non-human organism, as compared to a corresponding non-transformed wild type non-human organism, is conferred in the process of the invention, if the activity of a polypeptide showing the activity of a b0249-protein, or if the activity of the polypeptide B0249, preferably represented by SEQ ID NO. 123474, or a homolog or fragment thereof, or if the activity of a polypeptide encoded by a nucleic acid molecule comprising the nucleic acid SEQ ID NO. 123473, preferably the coding region thereof, or a homolog or fragment thereof, e.g. derived from Escherichia coli, is increased or generated. For example the activity of a nucleic acid molecule or a polypeptide comprising the nucleic acid, preferably the coding region thereof, or polypeptide or the consensus sequence or the polypeptide motif, as depicted in Table I, II or IV, application No. 12, column 5 or 8 in the respective same line as the nucleic acid molecule SEQ ID NO. 123473 or polypeptide SEQ ID NO. 123474, respectively, or a homolog or a fragment thereof, is increased or generated, or if the activity b0249-protein is increased or generated in a non-human organism, like a microorganism or a plant cell, plant or part thereof, especially with non-targeted localization, whereby the respective line discloses in column 7 the fine chemical cerebronic acid. For example, an increase of the cerebronic acid of at least 1 percent, particularly in a range of 27 to 48-percent is conferred as compared to a corresponding non-transformed wild type non-human organism.

[61777] Accordingly, in one embodiment, an increase of behenic acid in a non-human organism, as compared to a corresponding non-transformed wild type non-human organism, is conferred in the process of the invention, if the activity of a polypeptide showing the activity of a betaine aldehyde dehydrogenase, or if the activity of the polypeptide B0312, preferably represented by SEQ ID NO. 121112, or a homolog or fragment thereof, or if the activity of a polypeptide encoded by a nucleic acid molecule comprising the nucleic acid SEQ ID NO. 121111, preferably the coding region thereof, or a homolog or fragment thereof, e.g. derived from Escherichia coli, is increased or generated. For example the activity of a nucleic acid molecule or a polypeptide comprising the nucleic acid, preferably the coding region thereof, or polypeptide or the consensus sequence or the polypeptide motif, as depicted in Table I, II or IV, application No. 12, column 5 or 8 in the respective same line as the nucleic acid molecule SEQ ID NO. 121111 or polypeptide SEQ ID NO. 121112, respectively, or a homolog or a fragment thereof, is increased or generated, or if the activity betaine aldehyde dehydrogenase is increased or generated in a non-human organism, like a microorganism or a plant cell, plant or part thereof, especially with non-targeted localization, whereby the respective line discloses in column 7 the fine chemical behenic acid. For example, an increase of the behenic acid of at least 1 percent, particularly in a range of 11 to 14-percent is conferred as compared to a corresponding non-transformed wild type non-human organism.

[61778] Accordingly, in one embodiment, an increase of eicosanoic acid in a non-human organism, as compared to a corresponding non-transformed wild type non-human organism, is conferred in the process of the invention, if the activity of a polypeptide showing the activity of a betaine aldehyde dehydrogenase, or if the activity of the polypeptide B0312, preferably represented by SEQ ID NO. 121112, or a homolog or fragment thereof, or if the activity of a polypeptide encoded by a nucleic acid molecule comprising the nucleic acid SEQ ID NO. 121111, preferably the coding region thereof, or a homolog or fragment thereof, e.g. derived from Escherichia coli, is increased or generated. For example the activity of a nucleic acid molecule or a polypeptide comprising the nucleic acid, preferably the coding region thereof, or polypeptide or the consensus sequence or the polypeptide motif, as depicted in Table I, II or IV, application No. 12, column 5 or 8 in the respective same line as the nucleic acid molecule SEQ ID NO. 121111 or polypeptide SEQ ID NO. 121112, respectively, or a homolog or a fragment thereof, is increased or generated, or if the activity betaine aldehyde dehydrogenase is increased or generated in a non-human organism, like a microorganism or a plant cell, plant or part thereof, especially with non-targeted localization, whereby the respective line discloses in column 7 the fine chemical eicosanoic acid. For example, an increase of the eicosanoic acid of at least 1 percent, particularly in a range of 11 to 14-percent is conferred as compared to a corresponding non-transformed wild type non-human organism.

[61779] Accordingly, in one embodiment, an increase of myristic acid in a non-human organism, as compared to a corresponding non-transformed wild type non-human organism, is conferred in the process of the invention, if the activity of a polypeptide showing the activity of a 2,3-dihydroxyphenylpropionate 1,2-dioxygenase, or if the activity of the polypeptide B0348, preferably represented by SEQ ID NO. 7270, or a homolog or fragment thereof, or if the activity of a polypeptide encoded by a nucleic acid molecule comprising the nucleic acid SEQ ID NO. 7269, preferably the coding region thereof, or a homolog or fragment thereof, e.g. derived from Escherichia coli, is increased or generated. For example the activity of a nucleic acid molecule or a polypeptide comprising the nucleic acid, preferably the coding region thereof, or polypeptide or the consensus sequence or the polypeptide motif, as depicted in Table I, II or IV, application No. 12, column 5 or 8 in the respective same line as the nucleic acid molecule SEQ ID NO. 7269 or polypeptide SEQ ID NO. 7270, respectively, or a homolog or a fragment thereof, is increased or generated, or if the activity 2,3-dihydroxyphenylpropionate 1,2-dioxygenase is increased or generated in a non-human organism, like a microorganism or a plant cell, plant or part thereof, especially with plastidic localization, whereby the respective line discloses in column 7 the fine chemical myristic acid. For example, an increase of the myristic acid of at least 1 percent, particularly in a range of 21 to 39-percent is conferred as compared to a corresponding non-transformed wild type non-human organism.

[61780] Accordingly, in one embodiment, an increase of oleic acid in a non-human organism, as compared to a corresponding non-transformed wild type non-human organism, is conferred in the process of the invention, if the activity of a polypeptide showing the activity of a 2,3-dihydroxyphenylpropionate 1,2-dioxygenase, or if the activity of the polypeptide B0348, preferably represented by SEQ ID NO. 7270, or a homolog or fragment thereof, or if the activity of a polypeptide encoded by a nucleic acid molecule comprising the nucleic acid SEQ ID NO. 7269, preferably the coding region thereof, or a homolog or fragment thereof, e.g. derived from Escherichia coli, is increased or generated. For example the activity of a nucleic acid molecule or a polypeptide comprising the nucleic acid, preferably the coding region thereof, or polypeptide or the consensus sequence or the polypeptide motif, as depicted in Table I, II or IV, application No. 12, column 5 or 8 in the respective same line as the nucleic acid molecule SEQ ID NO. 7269 or polypeptide SEQ ID NO. 7270, respectively, or a homolog or a fragment thereof, is increased or generated, or if the activity 2,3-dihydroxyphenylpropionate 1,2-dioxygenase is increased or generated in a non-human organism, like a microorganism or a plant cell, plant or part thereof, especially with plastidic localization, whereby the respective line discloses in column 7 the fine chemical oleic acid. For example, an increase of the oleic acid of at least 1 percent, particularly in a range of 24 to 43-percent is conferred as compared to a corresponding non-transformed wild type non-human organism.

[61781] Accordingly, in one embodiment, an increase of hexadecatrienoic acid in a non-human organism, as compared to a corresponding non-transformed wild type non-human organism, is conferred in the process of the invention, if the activity of a polypeptide showing the activity of a b0371-protein, or if the activity of the polypeptide B0371, preferably represented by SEQ ID NO. 121638, or a homolog or fragment thereof, or if the activity of a polypeptide encoded by a nucleic acid molecule comprising the nucleic acid SEQ ID NO. 121637, preferably the coding region thereof, or a homolog or fragment thereof, e.g. derived from Escherichia coli, is increased or generated. For example the activity of a nucleic acid molecule or a polypeptide comprising the nucleic acid, preferably the coding region thereof, or polypeptide or the consensus sequence or the polypeptide motif, as depicted in Table I, II or IV, application No. 12, column 5 or 8 in the respective same line as the nucleic acid molecule SEQ ID NO. 121637 or polypeptide SEQ ID NO. 121638, respectively, or a homolog or a fragment thereof, is increased or generated, or if the activity b0371-protein is increased or generated in a non-human organism, like a microorganism or a plant cell, plant or part thereof, especially with non-targeted localization, whereby the respective line discloses in column 7 the fine chemical hexadecatrienoic acid. For example, an increase of the hexadecatrienoic acid of at least 1 percent, particularly in a range of 17 to 32-percent is conferred as compared to a corresponding non-transformed wild type non-human organism.

[61782] Accordingly, in one embodiment, an increase of cerebronic acid in a non-human organism, as compared to a corresponding non-transformed wild type non-human organism, is conferred in the process of the invention, if the activity of a polypeptide showing the activity of a ATP-binding component of a transport system, or if the activity of the polypeptide B0449, preferably represented by SEQ ID NO. 7334, or a homolog or fragment thereof, or if the activity of a polypeptide encoded by a nucleic acid molecule comprising the nucleic acid SEQ ID NO. 7333, preferably the coding region thereof, or a homolog or fragment thereof, e.g. derived from Escherichia coli, is increased or generated. For example the activity of a nucleic acid molecule or a polypeptide comprising the nucleic acid, preferably the coding region thereof, or polypeptide or the consensus sequence or the polypeptide motif, as depicted in Table I, II or IV, application No. 12, column 5 or 8 in the respective same line as the nucleic acid molecule SEQ ID NO. 7333 or polypeptide SEQ ID NO. 7334, respectively, or a homolog or a fragment thereof, is increased or generated, or if the activity ATP-binding component of a transport system is increased or generated in a non-human organism, like a microorganism or a plant cell, plant or part thereof, especially with non-targeted localization, whereby the respective line discloses in column 7 the fine chemical cerebronic acid. For example, an increase of the cerebronic acid of at least 1 percent, particularly in a range of 24 to 205-percent is conferred as compared to a corresponding non-transformed wild type non-human organism.

[61783] Accordingly, in one embodiment, an increase of 2-hydroxybehenic acid in a non-human organism, as compared to a corresponding non-transformed wild type non-human organism, is conferred in the process of the invention, if the activity of a polypeptide showing the activity of a ATP-binding component of a transport system, or if the activity of the polypeptide B0449, preferably represented by SEQ ID NO. 7334, or a homolog or fragment thereof, or if the activity of a polypeptide encoded by a nucleic acid molecule comprising the nucleic acid SEQ ID NO. 7333, preferably the coding region thereof, or a homolog or fragment thereof, e.g. derived from Escherichia coli, is increased or generated. For example the activity of a nucleic acid molecule or a polypeptide comprising the nucleic acid, preferably the coding region thereof, or polypeptide or the consensus sequence or the polypeptide motif, as depicted in Table I, II or IV, application No. 12, column 5 or 8 in the respective same line as the nucleic acid molecule SEQ ID NO. 7333 or polypeptide SEQ ID NO. 7334, respectively, or a homolog or a fragment thereof, is increased or generated, or if the activity ATP-binding component of a transport system is increased or generated in a non-human organism, like a microorganism or a plant cell, plant or part thereof, especially with non-targeted localization, whereby the respective line discloses in column 7 the fine chemical 2-hydroxybehenic acid. For example, an increase of the 2-hydroxybehenic acid of at least 1 percent, particularly in a range of 28 to 193-percent is conferred as compared to a corresponding non-transformed wild type non-human organism.

[61784] Accordingly, in one embodiment, an increase of 2-hydroxypalmitic acid in a non-human organism, as compared to a corresponding non-transformed wild type non-human organism, is conferred in the process of the invention, if the activity of a polypeptide showing the activity of a ATP-binding component of a transport system, or if the activity of the polypeptide B0449, preferably represented by SEQ ID NO. 7334, or a homolog or fragment thereof, or if the activity of a polypeptide encoded by a nucleic acid molecule comprising the nucleic acid SEQ ID NO. 7333, preferably the coding region thereof, or a homolog or fragment thereof, e.g. derived from Escherichia coli, is increased or generated. For example the activity of a nucleic acid molecule or a polypeptide comprising the nucleic acid, preferably the coding region thereof, or polypeptide or the consensus sequence or the polypeptide motif, as depicted in Table I, II or IV, application No. 12, column 5 or 8 in the respective same line as the nucleic acid molecule SEQ ID NO. 7333 or polypeptide SEQ ID NO. 7334, respectively, or a homolog or a fragment thereof, is increased or generated, or if the activity ATP-binding component of a transport system is increased or generated in a non-human organism, like a microorganism or a plant cell, plant or part thereof, especially with non-targeted localization, whereby the respective line discloses in column 7 the fine chemical 2-hydroxypalmitic acid. For example, an increase of the 2-hydroxypalmitic acid of at least 1 percent, particularly in a range of 19 to 207-percent is conferred as compared to a corresponding non-transformed wild type non-human organism.

[61785] Accordingly, in one embodiment, an increase of hexadecadienoic acid in a non-human organism, as compared to a corresponding non-transformed wild type non-human organism, is conferred in the process of the invention, if the activity of a polypeptide showing the activity of a b0518-protein, or if the activity of the polypeptide B0518, preferably represented by SEQ ID NO. 35937, or a homolog or fragment thereof, or if the activity of a polypeptide encoded by a nucleic acid molecule comprising the nucleic acid SEQ ID NO. 35936, preferably the coding region thereof, or a homolog or fragment thereof, e.g. derived from Escherichia coli, is increased or generated. For example the activity of a nucleic acid molecule or a polypeptide comprising the nucleic acid, preferably the coding region thereof, or polypeptide or the consensus sequence or the polypeptide motif, as depicted in Table I, II or IV, application No. 12, column 5 or 8 in the respective same line as the nucleic acid molecule SEQ ID NO. 35936 or polypeptide SEQ ID NO. 35937, respectively, or a homolog or a fragment thereof, is increased or generated, or if the activity b0518-protein is increased or generated in a non-human organism, like a microorganism or a plant cell, plant or part thereof, especially with non-targeted localization, whereby the respective line discloses in column 7 the fine chemical hexadecadienoic acid. For example, an increase of the hexadecadienoic acid of at least 1 percent, particularly in a range of 25 to 64-percent is conferred as compared to a corresponding non-transformed wild type non-human organism.

[61786] Accordingly, in one embodiment, an increase of 2-hydroxybehenic acid in a non-human organism, as compared to a corresponding non-transformed wild type non-human organism, is conferred in the process of the invention, if the activity of a polypeptide showing the activity of a sensor histidine kinase, or if the activity of the polypeptide B0695, preferably represented by SEQ ID NO. 93679, or a homolog or fragment thereof, or if the activity of a polypeptide encoded by a nucleic acid molecule comprising the nucleic acid SEQ ID NO. 93678, preferably the coding region thereof, or a homolog or fragment thereof, e.g. derived from Escherichia coli, is increased or generated. For example the activity of a nucleic acid molecule or a polypeptide comprising the nucleic acid, preferably the coding region thereof, or polypeptide or the consensus sequence or the polypeptide motif, as depicted in Table I, II or IV, application No. 12, column 5 or 8 in the respective same line as the nucleic acid molecule SEQ ID NO. 93678 or polypeptide SEQ ID NO. 93679, respectively, or a homolog or a fragment thereof, is increased or generated, or if the activity sensor histidine kinase is increased or generated in a non-human organism, like a microorganism or a plant cell, plant or part thereof, especially with non-targeted localization, whereby the respective line discloses in column 7 the fine chemical 2-hydroxybehenic acid. For example, an increase of the 2-hydroxybehenic acid of at least 1 percent, particularly in a range of 38 to 63-percent is conferred as compared to a corresponding non-transformed wild type non-human organism.

[61787] Accordingly, in one embodiment, an increase of 2-hydroxytetracosenoic acid (preferably 2-hydroxynervonic acid) in a non-human organism, as compared to a corresponding non-transformed wild type non-human organism, is conferred in the process of the invention, if the activity of a polypeptide showing the activity of a sensor histidine kinase, or if the activity of the polypeptide B0695, preferably represented by SEQ ID NO. 93679, or a homolog or fragment thereof, or if the activity of a polypeptide encoded by a nucleic acid molecule comprising the nucleic acid SEQ ID NO. 93678, preferably the coding region thereof, or a homolog or fragment thereof, e.g. derived from Escherichia coli, is increased or generated. For example the activity of a nucleic acid molecule or a polypeptide comprising the nucleic acid, preferably the coding region thereof, or polypeptide or the consensus sequence or the polypeptide motif, as depicted in Table I, II or IV, application No. 12, column 5 or 8 in the respective same line as the nucleic acid molecule SEQ ID NO. 93678 or polypeptide SEQ ID NO. 93679, respectively, or a homolog or a fragment thereof, is increased or generated, or if the activity sensor histidine kinase is increased or generated in a non-human organism, like a microorganism or a plant cell, plant or part thereof, especially with non-targeted localization, whereby the respective line discloses in column 7 the fine chemical 2-hydroxytetracosenoic acid (preferably 2-hydroxynervonic acid). For example, an increase of the 2-hydroxytetracosenoic acid (preferably 2-hydroxynervonic acid) of at least 1 percent, particularly in a range of 24 to 82-percent is conferred as compared to a corresponding non-transformed wild type non-human organism.

[61788] Accordingly, in one embodiment, an increase of cerebronic acid in a non-human organism, as compared to a corresponding non-transformed wild type non-human organism, is conferred in the process of the invention, if the activity of a polypeptide showing the activity of a citrate synthase, or if the activity of the polypeptide B0720, preferably represented by SEQ ID NO. 123499, or a homolog or fragment thereof, or if the activity of a polypeptide encoded by a nucleic acid molecule comprising the nucleic acid SEQ ID NO. 123498, preferably the coding region thereof, or a homolog or fragment thereof, e.g. derived from Escherichia coli, is increased or generated. For example the activity of a nucleic acid molecule or a polypeptide comprising the nucleic acid, preferably the coding region thereof, or polypeptide or the consensus sequence or the polypeptide motif, as depicted in Table I, II or IV, application No. 12, column 5 or 8 in the respective same line as the nucleic acid molecule SEQ ID NO. 123498 or polypeptide SEQ ID NO. 123499, respectively, or a homolog or a fragment thereof, is increased or generated, or if the activity citrate synthase is increased or generated in a non-human organism, like a microorganism or a plant cell, plant or part thereof, especially with plastidic localization, whereby the respective line discloses in column 7 the fine chemical cerebronic acid. For example, an increase of the cerebronic acid of at least 1 percent, particularly in a range of 22 to 61-percent is conferred as compared to a corresponding non-transformed wild type non-human organism.

[61789] Accordingly, in one embodiment, an increase of 2-hydroxytetracosenoic acid (preferably 2-hydroxynervonic acid) in a non-human organism, as compared to a corresponding non-transformed wild type non-human organism, is conferred in the process of the invention, if the activity of a polypeptide showing the activity of a b0801-protein, or if the activity of the polypeptide B0801, preferably represented by SEQ ID NO. 75808, or a homolog or fragment thereof, or if the activity of a polypeptide encoded by a nucleic acid molecule comprising the nucleic acid SEQ ID NO. 75807, preferably the coding region thereof, or a homolog or fragment thereof, e.g. derived from Escherichia coli, is increased or generated. For example the activity of a nucleic acid molecule or a polypeptide comprising the nucleic acid, preferably the coding region thereof, or polypeptide or the consensus sequence or the polypeptide motif, as depicted in Table I, II or IV, application No. 12, column 5 or 8 in the respective same line as the nucleic acid molecule SEQ ID NO. 75807 or polypeptide SEQ ID NO. 75808, respectively, or a homolog or a fragment thereof, is increased or generated, or if the activity b0801-protein is increased or generated in a non-human organism, like a microorganism or a plant cell, plant or part thereof, especially with non-targeted localization, whereby the respective line discloses in column 7 the fine chemical 2-hydroxytetracosenoic acid (preferably 2-hydroxynervonic acid). For example, an increase of the 2-hydroxytetracosenoic acid (preferably 2-hydroxynervonic acid) of at least 1 percent, particularly in a range of 23 to 41-percent is conferred as compared to a corresponding non-transformed wild type non-human organism.

[61790] Accordingly, in one embodiment, an increase of cerebronic acid in a non-human organism, as compared to a corresponding non-transformed wild type non-human organism, is conferred in the process of the invention, if the activity of a polypeptide showing the activity of a b1046-protein, or if the activity of the polypeptide B1046, preferably represented by SEQ ID NO. 124052, or a homolog or fragment thereof, or if the activity of a polypeptide encoded by a nucleic acid molecule comprising the nucleic acid SEQ ID NO. 124051, preferably the coding region thereof, or a homolog or fragment thereof, e.g. derived from Escherichia coli, is increased or generated. For example the activity of a nucleic acid molecule or a polypeptide comprising the nucleic acid, preferably the coding region thereof, or polypeptide or the consensus sequence or the polypeptide motif, as depicted in Table I, II or IV, application No. 12, column 5 or 8 in the respective same line as the nucleic acid molecule SEQ ID NO. 124051 or polypeptide SEQ ID NO. 124052, respectively, or a homolog or a fragment thereof, is increased or generated, or if the activity b1046-protein is increased or generated in a non-human organism, like a microorganism or a plant cell, plant or part thereof, especially with plastidic localization, whereby the respective line discloses in column 7 the fine chemical cerebronic acid. For example, an increase of the cerebronic acid of at least 1 percent, particularly in a range of 24 to 69-percent is conferred as compared to a corresponding non-transformed wild type non-human organism.

[61791] Accordingly, in one embodiment, an increase of hexadecatrienoic acid in a non-human organism, as compared to a corresponding non-transformed wild type non-human organism, is conferred in the process of the invention, if the activity of a polypeptide showing the activity of a malonyl CoA-acyl carrier protein transacylase, or if the activity of the polypeptide B1092, preferably represented by SEQ ID NO. 124128, or a homolog or fragment thereof, or if the activity of a polypeptide encoded by a nucleic acid molecule comprising the nucleic acid SEQ ID NO. 124127, preferably the coding region thereof, or a homolog or fragment thereof, e.g. derived from Escherichia coli, is increased or generated. For example the activity of a nucleic acid molecule or a polypeptide comprising the nucleic acid, preferably the coding region thereof, or polypeptide or the consensus sequence or the polypeptide motif, as depicted in Table I, II or IV, application No. 12, column 5 or 8 in the respective same line as the nucleic acid molecule SEQ ID NO. 124127 or polypeptide SEQ ID NO. 124128, respectively, or a homolog or a fragment thereof, is increased or generated, or if the activity malonyl CoA-acyl carrier protein transacylase is increased or generated in a non-human organism, like a microorganism or a plant cell, plant or part thereof, especially with plastidic localization, whereby the respective line discloses in column 7 the fine chemical hexadecatrienoic acid. For example, an increase of the hexadecatrienoic acid of at least 1 percent, particularly in a range of 12 to 21-percent is conferred as compared to a corresponding non-transformed wild type non-human organism.

[61792] Accordingly, in one embodiment, an increase of hexadecadienoic acid in a non-human organism, as compared to a corresponding non-transformed wild type non-human organism, is conferred in the process of the invention, if the activity of a polypeptide showing the activity of a 3-oxoacyl-[acyl-carrier-protein] reductase, or if the activity of the polypeptide B1093, preferably represented by SEQ ID NO. 118372, or a homolog or fragment thereof, or if the activity of a polypeptide encoded by a nucleic acid molecule comprising the nucleic acid SEQ ID NO. 118371, preferably the coding region thereof, or a homolog or fragment thereof, e.g. derived from Escherichia coli, is increased or generated. For example the activity of a nucleic acid molecule or a polypeptide comprising the nucleic acid, preferably the coding region thereof, or polypeptide or the consensus sequence or the polypeptide motif, as depicted in Table I, II or IV, application No. 12, column 5 or 8 in the respective same line as the nucleic acid molecule SEQ ID NO. 118371 or polypeptide SEQ ID NO. 118372, respectively, or a homolog or a fragment thereof, is increased or generated, or if the activity 3-oxoacyl-[acyl-carrier-protein] reductase is increased or generated in a non-human organism, like a microorganism or a plant cell, plant or part thereof, especially with non-targeted localization, whereby the respective line discloses in column 7 the fine chemical hexadecadienoic acid. For example, an increase of the hexadecadienoic acid of at least 1 percent, particularly in a range of 23 to 30-percent is conferred as compared to a corresponding non-transformed wild type non-human organism.

[61793] Accordingly, in one embodiment, an increase of hexadecatrienoic acid in a non-human organism, as compared to a corresponding non-transformed wild type non-human organism, is conferred in the process of the invention, if the activity of a polypeptide showing the activity of a 3-oxoacyl-[acyl-carrier-protein] reductase, or if the activity of the polypeptide B1093, preferably represented by SEQ ID NO. 118372, or a homolog or fragment thereof, or if the activity of a polypeptide encoded by a nucleic acid molecule comprising the nucleic acid SEQ ID NO. 118371, preferably the coding region thereof, or a homolog or fragment thereof, e.g. derived from Escherichia coli, is increased or generated. For example the activity of a nucleic acid molecule or a polypeptide comprising the nucleic acid, preferably the coding region thereof, or polypeptide or the consensus sequence or the polypeptide motif, as depicted in Table I, II or IV, application No. 12, column 5 or 8 in the respective same line as the nucleic acid molecule SEQ ID NO. 118371 or polypeptide SEQ ID NO. 118372, respectively, or a homolog or a fragment thereof, is increased or generated, or if the activity 3-oxoacyl-[acyl-carrier-protein] reductase is increased or generated in a non-human organism, like a microorganism or a plant cell, plant or part thereof, especially with non-targeted localization, whereby the respective line discloses in column 7 the fine chemical hexadecatrienoic acid. For example, an increase of the hexadecatrienoic acid of at least 1 percent, particularly in a range of 12 to 18-percent is conferred as compared to a corresponding non-transformed wild type non-human organism.

[61794] Accordingly, in one embodiment, an increase of hexadecatrienoic acid in a non-human organism, as compared to a corresponding non-transformed wild type non-human organism, is conferred in the process of the invention, if the activity of a polypeptide showing the activity of a 3-oxoacyl-[acyl-carrier-protein] synthase, or if the activity of the polypeptide B1095, preferably represented by SEQ ID NO. 114553, or a homolog or fragment thereof, or if the activity of a polypeptide encoded by a nucleic acid molecule comprising the nucleic acid SEQ ID NO. 114552, preferably the coding region thereof, or a homolog or fragment thereof, e.g. derived from Escherichia coli, is increased or generated. For example the activity of a nucleic acid molecule or a polypeptide comprising the nucleic acid, preferably the coding region thereof, or polypeptide or the consensus sequence or the polypeptide motif, as depicted in Table I, II or IV, application No. 12, column 5 or 8 in the respective same line as the nucleic acid molecule SEQ ID NO. 114552 or polypeptide SEQ ID NO. 114553, respectively, or a homolog or a fragment thereof, is increased or generated, or if the activity 3-oxoacyl-[acyl-carrier-protein] synthase is increased or generated in a non-human organism, like a microorganism or a plant cell, plant or part thereof, especially with plastidic localization, whereby the respective line discloses in column 7 the fine chemical hexadecatrienoic acid. For example, an increase of the hexadecatrienoic acid of at least 1 percent, particularly in a range of 15 to 44-percent is conferred as compared to a corresponding non-transformed wild type non-human organism.

[61795] Accordingly, in one embodiment, an increase of 2-hydroxybehenic acid in a non-human organism, as compared to a corresponding non-transformed wild type non-human organism, is conferred in the process of the invention, if the activity of a polypeptide showing the activity of a 3-oxoacyl-[acyl-carrier-protein] synthase, or if the activity of the polypeptide B1095, preferably represented by SEQ ID NO. 114553, or a homolog or fragment thereof, or if the activity of a polypeptide encoded by a nucleic acid molecule comprising the nucleic acid SEQ ID NO. 114552, preferably the coding region thereof, or a homolog or fragment thereof, e.g. derived from Escherichia coli, is increased or generated. For example the activity of a nucleic acid molecule or a polypeptide comprising the nucleic acid, preferably the coding region thereof, or polypeptide or the consensus sequence or the polypeptide motif, as depicted in Table I, II or IV, application No. 12, column 5 or 8 in the respective same line as the nucleic acid molecule SEQ ID NO. 114552 or polypeptide SEQ ID NO. 114553, respectively, or a homolog or a fragment thereof, is increased or generated, or if the activity 3-oxoacyl-[acyl-carrier-protein] synthase is increased or generated in a non-human organism, like a microorganism or a plant cell, plant or part thereof, especially with plastidic localization, whereby the respective line discloses in column 7 the fine chemical 2-hydroxybehenic acid. For example, an increase of the 2-hydroxybehenic acid of at least 1 percent, particularly in a range of 27 to 73-percent is conferred as compared to a corresponding non-transformed wild type non-human organism.

[61796] Accordingly, in one embodiment, an increase of oleic acid in a non-human organism, as compared to a corresponding non-transformed wild type non-human organism, is conferred in the process of the invention, if the activity of a polypeptide showing the activity of a sodium/proton antiporter, or if the activity of the polypeptide B1186, preferably represented by SEQ ID NO. 37401, or a homolog or fragment thereof, or if the activity of a polypeptide encoded by a nucleic acid molecule comprising the nucleic acid SEQ ID NO. 37400, preferably the coding region thereof, or a homolog or fragment thereof, e.g. derived from Escherichia coli, is increased or generated. For example the activity of a nucleic acid molecule or a polypeptide comprising the nucleic acid, preferably the coding region thereof, or polypeptide or the consensus sequence or the polypeptide motif, as depicted in Table I, II or IV, application No. 12, column 5 or 8 in the respective same line as the nucleic acid molecule SEQ ID NO. 37400 or polypeptide SEQ ID NO. 37401, respectively, or a homolog or a fragment thereof, is increased or generated, or if the activity sodium/proton antiporter is increased or generated in a non-human organism, like a microorganism or a plant cell, plant or part thereof, especially with non-targeted localization, whereby the respective line discloses in column 7 the fine chemical oleic acid. For example, an increase of the oleic acid of at least 1 percent, particularly in a range of 26 to 110-percent is conferred as compared to a corresponding non-transformed wild type non-human organism.

[61797] Accordingly, in one embodiment, an increase of 2-hydroxypalmitic acid in a non-human organism, as compared to a corresponding non-transformed wild type non-human organism, is conferred in the process of the invention, if the activity of a polypeptide showing the activity of a sodium/proton antiporter, or if the activity of the polypeptide B1186, preferably represented by SEQ ID NO. 37401, or a homolog or fragment thereof, or if the activity of a polypeptide encoded by a nucleic acid molecule comprising the nucleic acid SEQ ID NO. 37400, preferably the coding region thereof, or a homolog or fragment thereof, e.g. derived from Escherichia coli, is increased or generated. For example the activity of a nucleic acid molecule or a polypeptide comprising the nucleic acid, preferably the coding region thereof, or polypeptide or the consensus sequence or the polypeptide motif, as depicted in Table I, II or IV, application No. 12, column 5 or 8 in the respective same line as the nucleic acid molecule SEQ ID NO. 37400 or polypeptide SEQ ID NO. 37401, respectively, or a homolog or a fragment thereof, is increased or generated, or if the activity sodium/proton antiporter is increased or generated in a non-human organism, like a microorganism or a plant cell, plant or part thereof, especially with non-targeted localization, whereby the respective line discloses in column 7 the fine chemical 2-hydroxypalmitic acid.

[61798] For example, an increase of the 2-hydroxypalmitic acid of at least 1 percent, particularly in a range of 19 to 45-percent is conferred as compared to a corresponding non-transformed wild type non-human organism.

[61799] Accordingly, in one embodiment, an increase of behenic acid in a non-human organism, as compared to a corresponding non-transformed wild type non-human organism, is conferred in the process of the invention, if the activity of a polypeptide showing the activity of a outermembrane lipoprotein precursor, or if the activity of the polypeptide B1209, preferably represented by SEQ ID NO. 124510, or a homolog or fragment thereof, or if the activity of a polypeptide encoded by a nucleic acid molecule comprising the nucleic acid SEQ ID NO. 124509, preferably the coding region thereof, or a homolog or fragment thereof, e.g. derived from Escherichia coli, is increased or generated. For example the activity of a nucleic acid molecule or a polypeptide comprising the nucleic acid, preferably the coding region thereof, or polypeptide or the consensus sequence or the polypeptide motif, as depicted in Table I, II or IV, application No. 12, column 5 or 8 in the respective same line as the nucleic acid molecule SEQ ID NO. 124509 or polypeptide SEQ ID NO. 124510, respectively, or a homolog or a fragment thereof, is increased or generated, or if the activity outer-membrane lipoprotein precursor is increased or generated in a non-human organism, like a microorganism or a plant cell, plant or part thereof, especially with plastidic localization, whereby the respective line discloses in column 7 the fine chemical behenic acid. For example, an increase of the behenic acid of at least 1 percent, particularly in a range of 9 to 16-percent is conferred as compared to a corresponding non-transformed wild type non-human organism.

[61800] Accordingly, in one embodiment, an increase of behenic acid in a non-human organism, as compared to a corresponding non-transformed wild type non-human organism, is conferred in the process of the invention, if the activity of a polypeptide showing the activity of a cardiolipin synthase, or if the activity of the polypeptide B1249, preferably represented by SEQ ID NO. 98779, or a homolog or fragment thereof, or if the activity of a polypeptide encoded by a nucleic acid molecule comprising the nucleic acid SEQ ID NO. 98778, preferably the coding region thereof, or a homolog or fragment thereof, e.g. derived from Escherichia coli, is increased or generated. For example the activity of a nucleic acid molecule or a polypeptide comprising the nucleic acid, preferably the coding region thereof, or polypeptide or the consensus sequence or the polypeptide motif, as depicted in Table I, II or IV, application No. 12, column 5 or 8 in the respective same line as the nucleic acid molecule SEQ ID NO. 98778 or polypeptide SEQ ID NO. 98779, respectively, or a homolog or a fragment thereof, is increased or generated, or if the activity cardiolipin synthase is increased or generated in a non-human organism, like a microorganism or a plant cell, plant or part thereof, especially with plastidic localization, whereby the respective line discloses in column 7 the fine chemical behenic acid. For example, an increase of the behenic acid of at least 1 percent, particularly in a range of 9 to 15-percent is conferred as compared to a corresponding non-transformed wild type non-human organism.

[61801] Accordingly, in one embodiment, an increase of heptadecanoic acid in a non-human organism, as compared to a corresponding non-transformed wild type non-human organism, is conferred in the process of the invention, if the activity of a polypeptide showing the activity of a cardiolipin synthase, or if the activity of the polypeptide B1249, preferably represented by SEQ ID NO. 98779, or a homolog or fragment thereof, or if the activity of a polypeptide encoded by a nucleic acid molecule comprising the nucleic acid SEQ ID NO. 98778, preferably the coding region thereof, or a homolog or fragment thereof, e.g. derived from Escherichia coli, is increased or generated. For example the activity of a nucleic acid molecule or a polypeptide comprising the nucleic acid, preferably the coding region thereof, or polypeptide or the consensus sequence or the polypeptide motif, as depicted in Table I, II or IV, application No. 12, column 5 or 8 in the respective same line as the nucleic acid molecule SEQ ID NO. 98778 or polypeptide SEQ ID NO. 98779, respectively, or a homolog or a fragment thereof, is increased or generated, or if the activity cardiolipin synthase is increased or generated in a non-human organism, like a microorganism or a plant cell, plant or part thereof, especially with plastidic localization, whereby the respective line discloses in column 7 the fine chemical heptadecanoic acid. For example, an increase of the heptadecanoic acid of at least 1 percent, particularly in a range of 13 to 25-percent is conferred as compared to a corresponding non-transformed wild type non-human organism.

[61802] Accordingly, in one embodiment, an increase of hexadecatrienoic acid in a non-human organism, as compared to a corresponding non-transformed wild type non-human organism, is conferred in the process of the invention, if the activity of a polypeptide showing the activity of a b1346-protein, or if the activity of the polypeptide B1346, preferably represented by SEQ ID NO. 99189, or a homolog or fragment thereof, or if the activity of a polypeptide encoded by a nucleic acid molecule comprising the nucleic acid SEQ ID NO. 99188, preferably the coding region thereof, or a homolog or fragment thereof, e.g. derived from Escherichia coli, is increased or generated. For example the activity of a nucleic acid molecule or a polypeptide comprising the nucleic acid, preferably the coding region thereof, or polypeptide or the consensus sequence or the polypeptide motif, as depicted in Table I, II or IV, application No. 12, column 5 or 8 in the respective same line as the nucleic acid molecule SEQ ID NO. 99188 or polypeptide SEQ ID NO. 99189, respectively, or a homolog or a fragment thereof, is increased or generated, or if the activity b1346-protein is increased or generated in a non-human organism, like a microorganism or a plant cell, plant or part thereof, especially with plastidic localization, whereby the respective line discloses in column 7 the fine chemical hexadecatrienoic acid. For example, an increase of the hexadecatrienoic acid of at least 1 percent, particularly in a range of 15 to 43-percent is conferred as compared to a corresponding non-transformed wild type non-human organism.

[61803] Accordingly, in one embodiment, an increase of lauric acid in a non-human organism, as compared to a corresponding non-transformed wild type non-human organism, is conferred in the process of the invention, if the activity of a polypeptide showing the activity of a phage-related repressor protein, or if the activity of the polypeptide B1356, preferably represented by SEQ ID NO. 124558, or a homolog or fragment thereof, or if the activity of a polypeptide encoded by a nucleic acid molecule comprising the nucleic acid SEQ ID NO. 124557, preferably the coding region thereof, or a homolog or fragment thereof, e.g. derived from Escherichia coli, is increased or generated. For example the activity of a nucleic acid molecule or a polypeptide comprising the nucleic acid, preferably the coding region thereof, or polypeptide or the consensus sequence or the polypeptide motif, as depicted in Table I, II or IV, application No. 12, column 5 or 8 in the respective same line as the nucleic acid molecule SEQ ID NO. 124557 or polypeptide SEQ ID NO. 124558, respectively, or a homolog or a fragment thereof, is increased or generated, or if the activity phage-related repressor protein is increased or generated in a non-human organism, like a microorganism or a plant cell, plant or part thereof, especially with non-targeted localization, whereby the respective line discloses in column 7 the fine chemical lauric acid. For example, an increase of the lauric acid of at least 1 percent, particularly in a range of 45 to 61-percent is conferred as compared to a corresponding non-transformed wild type non-human organism.

[61804] Accordingly, in one embodiment, an increase of 2-hydroxytetracosenoic acid (preferably 2-hydroxynervonic acid) in a non-human organism, as compared to a corresponding non-transformed wild type non-human organism, is conferred in the process of the invention, if the activity of a polypeptide showing the activity of a lipoprotein precursor, or if the activity of the polypeptide B1431, preferably represented by SEQ ID NO. 38267, or a homolog or fragment thereof, or if the activity of a polypeptide encoded by a nucleic acid molecule comprising the nucleic acid SEQ ID NO. 38266, preferably the coding region thereof, or a homolog or fragment thereof, e.g. derived from Escherichia coli, is increased or generated. For example the activity of a nucleic acid molecule or a polypeptide comprising the nucleic acid, preferably the coding region thereof, or polypeptide or the consensus sequence or the polypeptide motif, as depicted in Table I, II or IV, application No. 12, column 5 or 8 in the respective same line as the nucleic acid molecule SEQ ID NO. 38266 or polypeptide SEQ ID NO. 38267, respectively, or a homolog or a fragment thereof, is increased or generated, or if the activity lipoprotein precursor is increased or generated in a non-human organism, like a microorganism or a plant cell, plant or part thereof, especially with plastidic localization, whereby the respective line discloses in column 7 the fine chemical 2-hydroxytetracosenoic acid (preferably 2-hydroxynervonic acid). For example, an increase of the 2-hydroxytetracosenoic acid (preferably 2-hydroxynervonic acid) of at least 1 percent, particularly in a range of 25 to 94-percent is conferred as compared to a corresponding non-transformed wild type non-human organism.

[61805] Accordingly, in one embodiment, an increase of hexadecatrienoic acid in a non-human organism, as compared to a corresponding non-transformed wild type non-human organism, is conferred in the process of the invention, if the activity of a polypeptide showing the activity of a b1470-protein, or if the activity of the polypeptide B1470, preferably represented by SEQ ID NO. 115057, or a homolog or fragment thereof, or if the activity of a polypeptide encoded by a nucleic acid molecule comprising the nucleic acid SEQ ID NO. 115056, preferably the coding region thereof, or a homolog or fragment thereof, e.g. derived from Escherichia coli, is increased or generated. For example the activity of a nucleic acid molecule or a polypeptide comprising the nucleic acid, preferably the coding region thereof, or polypeptide or the consensus sequence or the polypeptide motif, as depicted in Table I, II or IV, application No. 12, column 5 or 8 in the respective same line as the nucleic acid molecule SEQ ID NO. 115056 or polypeptide SEQ ID NO. 115057, respectively, or a homolog or a fragment thereof, is increased or generated, or if the activity b1470-protein is increased or generated in a non-human organism, like a microorganism or a plant cell, plant or part thereof, especially with non-targeted localization, whereby the respective line discloses in column 7 the fine chemical hexadecatrienoic acid. For example, an increase of the hexadecatrienoic acid of at least 1 percent, particularly in a range of 16 to 25-percent is conferred as compared to a corresponding non-transformed wild type non-human organism.

[61806] Accordingly, in one embodiment, an increase of hexadecatrienoic acid in a non-human organism, as compared to a corresponding non-transformed wild type non-human organism, is conferred in the process of the invention, if the activity of a polypeptide showing the activity of a NADP-dependent malic enzyme, or if the activity of the polypeptide B1479, preferably represented by SEQ ID NO. 77775, or a homolog or fragment thereof, or if the activity of a polypeptide encoded by a nucleic acid molecule comprising the nucleic acid SEQ ID NO. 77774, preferably the coding region thereof, or a homolog or fragment thereof, e.g. derived from Escherichia coli, is increased or generated. For example the activity of a nucleic acid molecule or a polypeptide comprising the nucleic acid, preferably the coding region thereof, or polypeptide or the consensus sequence or the polypeptide motif, as depicted in Table I, II or IV, application No. 12, column 5 or 8 in the respective same line as the nucleic acid molecule SEQ ID NO. 77774 or polypeptide SEQ ID NO. 77775, respectively, or a homolog or a fragment thereof, is increased or generated, or if the activity NADP-dependent malic enzyme is increased or generated in a non-human organism, like a microorganism or a plant cell, plant or part thereof, especially with non-targeted localization, whereby the respective line discloses in column 7 the fine chemical hexadecatrienoic acid. For example, an increase of the hexadecatrienoic acid of at least 1 percent, particularly in a range of 17 to 49-percent is conferred as compared to a corresponding non-transformed wild type non-human organism.

[61807] Accordingly, in one embodiment, an increase of 2-hydroxybehenic acid in a non-human organism, as compared to a corresponding non-transformed wild type non-human organism, is conferred in the process of the invention, if the activity of a polypeptide showing the activity of a b1522-protein, or if the activity of the polypeptide B1522, preferably represented by SEQ ID NO. 7948, or a homolog or fragment thereof, or if the activity of a polypeptide encoded by a nucleic acid molecule comprising the nucleic acid SEQ ID NO. 7947, preferably the coding region thereof, or a homolog or fragment thereof, e.g. derived from Escherichia coli, is increased or generated. For example the activity of a nucleic acid molecule or a polypeptide comprising the nucleic acid, preferably the coding region thereof, or polypeptide or the consensus sequence or the polypeptide motif, as depicted in Table I, II or IV, application No. 12, column 5 or 8 in the respective same line as the nucleic acid molecule SEQ ID NO. 7947 or polypeptide SEQ ID NO. 7948, respectively, or a homolog or a fragment thereof, is increased or generated, or if the activity b1522-protein is increased or generated in a non-human organism, like a microorganism or a plant cell, plant or part thereof, especially with non-targeted localization, whereby the respective line discloses in column 7 the fine chemical 2-hydroxybehenic acid. For example, an increase of the 2-hydroxybehenic acid of at least 1 percent, particularly in a range of 26 to 81-percent is conferred as compared to a corresponding non-transformed wild type non-human organism.

[61808] Accordingly, in one embodiment, an increase of hexadecatrienoic acid in a non-human organism, as compared to a corresponding non-transformed wild type non-human organism, is conferred in the process of the invention, if the activity of a polypeptide showing the activity of a acid shock protein, or if the activity of the polypeptide B1597, preferably represented by SEQ ID NO. 38301, or a homolog or fragment thereof, or if the activity of a polypeptide encoded by a nucleic acid molecule comprising the nucleic acid SEQ ID NO. 38300, preferably the coding region thereof, or a homolog or fragment thereof, e.g. derived from Escherichia coli, is increased or generated. For example the activity of a nucleic acid molecule or a polypeptide comprising the nucleic acid, preferably the coding region thereof, or polypeptide or the consensus sequence or the polypeptide motif, as depicted in Table I, II or IV, application No. 12, column 5 or 8 in the respective same line as the nucleic acid molecule SEQ ID NO. 38300 or polypeptide SEQ ID NO. 38301, respectively, or a homolog or a fragment thereof, is increased or generated, or if the activity acid shock protein is increased or generated in a non-human organism, like a microorganism or a plant cell, plant or part thereof, especially with non-targeted localization, whereby the respective line discloses in column 7 the fine chemical hexadecatrienoic acid. For example, an increase of the hexadecatrienoic acid of at least 1 percent, particularly in a range of 12 to 48-percent is conferred as compared to a corresponding non-transformed wild type non-human organism.

[61809] Accordingly, in one embodiment, an increase of 2-hydroxytetracosenoic acid (preferably 2-hydroxynervonic acid) in a non-human organism, as compared to a corresponding non-transformed wild type non-human organism, is conferred in the process of the invention, if the activity of a polypeptide showing the activity of a transport protein, or if the activity of the polypeptide B1601, preferably represented by SEQ ID NO. 7993, or a homolog or fragment thereof, or if the activity of a polypeptide encoded by a nucleic acid molecule comprising the nucleic acid SEQ ID NO. 7992, preferably the coding region thereof, or a homolog or fragment thereof, e.g. derived from Escherichia coli, is increased or generated. For example the activity of a nucleic acid molecule or a polypeptide comprising the nucleic acid, preferably the coding region thereof, or polypeptide or the consensus sequence or the polypeptide motif, as depicted in Table I, II or IV, application No. 12, column 5 or 8 in the respective same line as the nucleic acid molecule SEQ ID NO. 7992 or polypeptide SEQ ID NO. 7993, respectively, or a homolog or a fragment thereof, is increased or generated, or if the activity transport protein is increased or generated in a non-human organism, like a microorganism or a plant cell, plant or part thereof, especially with non-targeted localization, whereby the respective line discloses in column 7 the fine chemical 2-hydroxytetracosenoic acid (preferably 2-hydroxynervonic acid). For example, an increase of the 2-hydroxytetracosenoic acid (preferably 2-hydroxynervonic acid) of at least 1 percent, particularly in a range of 22 to 43-percent is conferred as compared to a corresponding non-transformed wild type non-human organism.

[61810] Accordingly, in one embodiment, an increase of 2-hydroxytetracosenoic acid (preferably 2-hydroxynervonic acid) in a non-human organism, as compared to a corresponding non-transformed wild type non-human organism, is conferred in the process of the invention, if the activity of a polypeptide showing the activity of a phosphotransferase system component, or if the activity of the polypeptide B1621, preferably represented by SEQ ID NO. 124572, or a homolog or fragment thereof, or if the activity of a polypeptide encoded by a nucleic acid molecule comprising the nucleic acid SEQ ID NO. 124571, preferably the coding region thereof, or a homolog or fragment thereof, e.g. derived from Escherichia coli, is increased or generated. For example the activity of a nucleic acid molecule or a polypeptide comprising the nucleic acid, preferably the coding region thereof, or polypeptide or the consensus sequence or the polypeptide motif, as depicted in Table I, II or IV, application No. 12, column 5 or 8 in the respective same line as the nucleic acid molecule SEQ ID NO. 124571 or polypeptide SEQ ID NO. 124572, respectively, or a homolog or a fragment thereof, is increased or generated, or if the activity phosphotransferase system component is increased or generated in a non-human organism, like a microorganism or a plant cell, plant or part thereof, especially with plastidic localization, whereby the respective line discloses in column 7 the fine chemical 2-hydroxytetracosenoic acid (preferably 2-hydroxynervonic acid). For example, an increase of the 2-hydroxytetracosenoic acid (preferably 2-hydroxynervonic acid) of at least 1 percent, particularly in a range of 25 to 35-percent is conferred as compared to a corresponding non-transformed wild type non-human organism.

[61811] Accordingly, in one embodiment, an increase of 2-hydroxybehenic acid in a non-human organism, as compared to a corresponding non-transformed wild type non-human organism, is conferred in the process of the invention, if the activity of a polypeptide showing the activity of a electron transport complex protein, or if the activity of the polypeptide B1627, preferably represented by SEQ ID NO. 38346, or a homolog or fragment thereof, or if the activity of a polypeptide encoded by a nucleic acid molecule comprising the nucleic acid SEQ ID NO. 38345, preferably the coding region thereof, or a homolog or fragment thereof, e.g. derived from Escherichia coli, is increased or generated. For example the activity of a nucleic acid molecule or a polypeptide comprising the nucleic acid, preferably the coding region thereof, or polypeptide or the consensus sequence or the polypeptide motif, as depicted in Table I, II or IV, application No. 12, column 5 or 8 in the respective same line as the nucleic acid molecule SEQ ID NO. 38345 or polypeptide SEQ ID NO. 38346, respectively, or a homolog or a fragment thereof, is increased or generated, or if the activity electron transport complex protein is increased or generated in a non-human organism, like a microorganism or a plant cell, plant or part thereof, especially with plastidic localization, whereby the respective line discloses in column 7 the fine chemical 2-hydroxybehenic acid. For example, an increase of the 2-hydroxybehenic acid of at least 1 percent, particularly in a range of 30 to 36-percent is conferred as compared to a corresponding non-transformed wild type non-human organism.

[61812] Accordingly, in one embodiment, an increase of hexadecatrienoic acid in a non-human organism, as compared to a corresponding non-transformed wild type non-human organism, is conferred in the process of the invention, if the activity of a polypeptide showing the activity of a pyridoxamine kinase, or if the activity of the polypeptide B1636, preferably represented by SEQ ID NO. 124806, or a homolog or fragment thereof, or if the activity of a polypeptide encoded by a nucleic acid molecule comprising the nucleic acid SEQ ID NO. 124805, preferably the coding region thereof, or a homolog or fragment thereof, e.g. derived from Escherichia coli, is increased or generated. For example the activity of a nucleic acid molecule or a polypeptide comprising the nucleic acid, preferably the coding region thereof, or polypeptide or the consensus sequence or the polypeptide motif, as depicted in Table I, II or IV, application No. 12, column 5 or 8 in the respective same line as the nucleic acid molecule SEQ ID NO. 124805 or polypeptide SEQ ID NO. 124806, respectively, or a homolog or a fragment thereof, is increased or generated, or if the activity pyridoxamine kinase is increased or generated in a non-human organism, like a microorganism or a plant cell, plant or part thereof, especially with plastidic localization, whereby the respective line discloses in column 7 the fine chemical hexadecatrienoic acid. For example, an increase of the hexadecatrienoic acid of at least 1 percent, particularly in a range of 17 to 28-percent is conferred as compared to a corresponding non-transformed wild type non-human organism.

[61813] Accordingly, in one embodiment, an increase of 2-hydroxytetracosenoic acid (preferably 2-hydroxynervonic acid) in a non-human organism, as compared to a corresponding non-transformed wild type non-human organism, is conferred in the process of the invention, if the activity of a polypeptide showing the activity of a b1670-protein, or if the activity of the polypeptide B1670, preferably represented by SEQ ID NO. 78754, or a homolog or fragment thereof, or if the activity of a polypeptide encoded by a nucleic acid molecule comprising the nucleic acid SEQ ID NO. 78753, preferably the coding region thereof, or a homolog or fragment thereof, e.g. derived from Escherichia coli, is increased or generated. For example the activity of a nucleic acid molecule or a polypeptide comprising the nucleic acid, preferably the coding region thereof, or polypeptide or the consensus sequence or the polypeptide motif, as depicted in Table I, II or IV, application No. 12, column 5 or 8 in the respective same line as the nucleic acid molecule SEQ ID NO. 78753 or polypeptide SEQ ID NO. 78754, respectively, or a homolog or a fragment thereof, is increased or generated, or if the activity b1670-protein is increased or generated in a non-human organism, like a microorganism or a plant cell, plant or part thereof, especially with non-targeted localization, whereby the respective line discloses in column 7 the fine chemical 2-hydroxytetracosenoic acid (preferably 2-hydroxynervonic acid). For example, an increase of the 2-hydroxytetracosenoic acid (preferably 2-hydroxynervonic acid) of at least 1 percent, particularly in a range of 23 to 63-percent is conferred as compared to a corresponding non-transformed wild type non-human organism.

[61814] Accordingly, in one embodiment, an increase of hexadecadienoic acid in a non-human organism, as compared to a corresponding non-transformed wild type non-human organism, is conferred in the process of the invention, if the activity of a polypeptide showing the activity of a b1703-protein, or if the activity of the polypeptide B1703, preferably represented by SEQ ID NO. 124908, or a homolog or fragment thereof, or if the activity of a polypeptide encoded by a nucleic acid molecule comprising the nucleic acid SEQ ID NO. 124907, preferably the coding region thereof, or a homolog or fragment thereof, e.g. derived from Escherichia coli, is increased or generated. For example the activity of a nucleic acid molecule or a polypeptide comprising the nucleic acid, preferably the coding region thereof, or polypeptide or the consensus sequence or the polypeptide motif, as depicted in Table I, II or IV, application No. 12, column 5 or 8 in the respective same line as the nucleic acid molecule SEQ ID NO. 124907 or polypeptide SEQ ID NO. 124908, respectively, or a homolog or a fragment thereof, is increased or generated, or if the activity b1703-protein is increased or generated in a non-human organism, like a microorganism or a plant cell, plant or part thereof, especially with non-targeted localization, whereby the respective line discloses in column 7 the fine chemical hexadecadienoic acid. For example, an increase of the hexadecadienoic acid of at least 1 percent, particularly in a range of 28 to 66-percent is conferred as compared to a corresponding non-transformed wild type non-human organism.

[61815] Accordingly, in one embodiment, an increase of hexadecatrienoic acid in a non-human organism, as compared to a corresponding non-transformed wild type non-human organism, is conferred in the process of the invention, if the activity of a polypeptide showing the activity of a b1703-protein, or if the activity of the polypeptide B1703, preferably represented by SEQ ID NO. 124908, or a homolog or fragment thereof, or if the activity of a polypeptide encoded by a nucleic acid molecule comprising the nucleic acid SEQ ID NO. 124907, preferably the coding region thereof, or a homolog or fragment thereof, e.g. derived from Escherichia coli, is increased or generated. For example the activity of a nucleic acid molecule or a polypeptide comprising the nucleic acid, preferably the coding region thereof, or polypeptide or the consensus sequence or the polypeptide motif, as depicted in Table I, II or IV, application No. 12, column 5 or 8 in the respective same line as the nucleic acid molecule SEQ ID NO. 124907 or polypeptide SEQ ID NO. 124908, respectively, or a homolog or a fragment thereof, is increased or generated, or if the activity b1703-protein is increased or generated in a non-human organism, like a microorganism or a plant cell, plant or part thereof, especially with non-targeted localization, whereby the respective line discloses in column 7 the fine chemical hexadecatrienoic acid. For example, an increase of the hexadecatrienoic acid of at least 1 percent, particularly in a range of 14 to 24-percent is conferred as compared to a corresponding non-transformed wild type non-human organism.

[61816] Accordingly, in one embodiment, an increase of hexadecadienoic acid in a non-human organism, as compared to a corresponding non-transformed wild type non-human organism, is conferred in the process of the invention, if the activity of a polypeptide showing the activity of a transport protein, or if the activity of the polypeptide B1791, preferably represented by SEQ ID NO. 78884, or a homolog or fragment thereof, or if the activity of a polypeptide encoded by a nucleic acid molecule comprising the nucleic acid SEQ ID NO. 78883, preferably the coding region thereof, or a homolog or fragment thereof, e.g. derived from Escherichia coli, is increased or generated. For example the activity of a nucleic acid molecule or a polypeptide comprising the nucleic acid, preferably the coding region thereof, or polypeptide or the consensus sequence or the polypeptide motif, as depicted in Table I, II or IV, application No. 12, column 5 or 8 in the respective same line as the nucleic acid molecule SEQ ID NO. 78883 or polypeptide SEQ ID NO. 78884, respectively, or a homolog or a fragment thereof, is increased or generated, or if the activity transport protein is increased or generated in a non-human organism, like a microorganism or a plant cell, plant or part thereof, especially with non-targeted localization, whereby the respective line discloses in column 7 the fine chemical hexadecadienoic acid. For example, an increase of the hexadecadienoic acid of at least 1 percent, particularly in a range of 46 to 64-percent is conferred as compared to a corresponding non-transformed wild type non-human organism.

[61817] Accordingly, in one embodiment, an increase of hexadecadienoic acid in a non-human organism, as compared to a corresponding non-transformed wild type non-human organism, is conferred in the process of the invention, if the activity of a polypeptide showing the activity of a b1837-protein, or if the activity of the polypeptide B1837, preferably represented by SEQ ID NO. 78954, or a homolog or fragment thereof, or if the activity of a polypeptide encoded by a nucleic acid molecule comprising the nucleic acid SEQ ID NO. 78953, preferably the coding region thereof, or a homolog or fragment thereof, e.g. derived from Escherichia coli, is increased or generated. For example the activity of a nucleic acid molecule or a polypeptide comprising the nucleic acid, preferably the coding region thereof, or polypeptide or the consensus sequence or the polypeptide motif, as depicted in Table I, II or IV, application No. 12, column 5 or 8 in the respective same line as the nucleic acid molecule SEQ ID NO. 78953 or polypeptide SEQ ID NO. 78954, respectively, or a homolog or a fragment thereof, is increased or generated, or if the activity b1837-protein is increased or generated in a non-human organism, like a microorganism or a plant cell, plant or part thereof, especially with non-targeted localization, whereby the respective line discloses in column 7 the fine chemical hexadecadienoic acid. For example, an increase of the hexadecadienoic acid of at least 1 percent, particularly in a range of 31 to 35-percent is conferred as compared to a corresponding non-transformed wild type non-human organism.

[61818] Accordingly, in one embodiment, an increase of hexadecatrienoic acid in a non-human organism, as compared to a corresponding non-transformed wild type non-human organism, is conferred in the process of the invention, if the activity of a polypeptide showing the activity of a b1837-protein, or if the activity of the polypeptide B1837, preferably represented by SEQ ID NO. 78954, or a homolog or fragment thereof, or if the activity of a polypeptide encoded by a nucleic acid molecule comprising the nucleic acid SEQ ID NO. 78953, preferably the coding region thereof, or a homolog or fragment thereof, e.g. derived from Escherichia coli, is increased or generated. For example the activity of a nucleic acid molecule or a polypeptide comprising the nucleic acid, preferably the coding region thereof, or polypeptide or the consensus sequence or the polypeptide motif, as depicted in Table I, II or IV, application No. 12, column 5 or 8 in the respective same line as the nucleic acid molecule SEQ ID NO. 78953 or polypeptide SEQ ID NO. 78954, respectively, or a homolog or a fragment thereof, is increased or generated, or if the activity b1837-protein is increased or generated in a non-human organism, like a microorganism or a plant cell, plant or part thereof, especially with non-targeted localization, whereby the respective line discloses in column 7 the fine chemical hexadecatrienoic acid. For example, an increase of the hexadecatrienoic acid of at least 1 percent, particularly in a range of 15 to 27-percent is conferred as compared to a corresponding non-transformed wild type non-human organism.

[61819] Accordingly, in one embodiment, an increase of hexadecadienoic acid in a non-human organism, as compared to a corresponding non-transformed wild type non-human organism, is conferred in the process of the invention, if the activity of a polypeptide showing the activity of a b2032-protein, or if the activity of the polypeptide B2032, preferably represented by SEQ ID NO. 8921, or a homolog or fragment thereof, or if the activity of a polypeptide encoded by a nucleic acid molecule comprising the nucleic acid SEQ ID NO. 8920, preferably the coding region thereof, or a homolog or fragment thereof, e.g. derived from Escherichia coli, is increased or generated. For example the activity of a nucleic acid molecule or a polypeptide comprising the nucleic acid, preferably the coding region thereof, or polypeptide or the consensus sequence or the polypeptide motif, as depicted in Table I, II or IV, application No. 12, column 5 or 8 in the respective same line as the nucleic acid molecule SEQ ID NO. 8920 or polypeptide SEQ ID NO. 8921, respectively, or a homolog or a fragment thereof, is increased or generated, or if the activity b2032-protein is increased or generated in a non-human organism, like a microorganism or a plant cell, plant or part thereof, especially with non-targeted localization, whereby the respective line discloses in column 7 the fine chemical hexadecadienoic acid. For example, an increase of the hexadecadienoic acid of at least 1 percent, particularly in a range of 57 to 88-percent is conferred as compared to a corresponding non-transformed wild type non-human organism.

[61820] Accordingly, in one embodiment, an increase of hexadecadienoic acid in a non-human organism, as compared to a corresponding non-transformed wild type non-human organism, is conferred in the process of the invention, if the activity of a polypeptide showing the activity of a b2099-protein, or if the activity of the polypeptide B2099, preferably represented by SEQ ID NO. 115596, or a homolog or fragment thereof, or if the activity of a polypeptide encoded by a nucleic acid molecule comprising the nucleic acid SEQ ID NO. 115595, preferably the coding region thereof, or a homolog or fragment thereof, e.g. derived from Escherichia coli, is increased or generated. For example the activity of a nucleic acid molecule or a polypeptide comprising the nucleic acid, preferably the coding region thereof, or polypeptide or the consensus sequence or the polypeptide motif, as depicted in Table I, II or IV, application No. 12, column 5 or 8 in the respective same line as the nucleic acid molecule SEQ ID NO. 115595 or polypeptide SEQ ID NO. 115596, respectively, or a homolog or a fragment thereof, is increased or generated, or if the activity b2099-protein is increased or generated in a non-human organism, like a microorganism or a plant cell, plant or part thereof, especially with non-targeted localization, whereby the respective line discloses in column 7 the fine chemical hexadecadienoic acid. For example, an increase of the hexadecadienoic acid of at least 1 percent, particularly in a range of 36 to 47-percent is conferred as compared to a corresponding non-transformed wild type non-human organism.

[61821] Accordingly, in one embodiment, an increase of hexadecatrienoic acid in a non-human organism, as compared to a corresponding non-transformed wild type non-human organism, is conferred in the process of the invention, if the activity of a polypeptide showing the activity of a b2099-protein, or if the activity of the polypeptide B2099, preferably represented by SEQ ID NO. 115596, or a homolog or fragment thereof, or if the activity of a polypeptide encoded by a nucleic acid molecule comprising the nucleic acid SEQ ID NO. 115595, preferably the coding region thereof, or a homolog or fragment thereof, e.g. derived from Escherichia coli, is increased or generated. For example the activity of a nucleic acid molecule or a polypeptide comprising the nucleic acid, preferably the coding region thereof, or polypeptide or the consensus sequence or the polypeptide motif, as depicted in Table I, II or IV, application No. 12, column 5 or 8 in the respective same line as the nucleic acid molecule SEQ ID NO. 115595 or polypeptide SEQ ID NO. 115596, respectively, or a homolog or a fragment thereof, is increased or generated, or if the activity b2099-protein is increased or generated in a non-human organism, like a microorganism or a plant cell, plant or part thereof, especially with non-targeted localization, whereby the respective line discloses in column 7 the fine chemical hexadecatrienoic acid. For example, an increase of the hexadecatrienoic acid of at least 1 percent, particularly in a range of 18 to 24-percent is conferred as compared to a corresponding non-transformed wild type non-human organism.

[61822] Accordingly, in one embodiment, an increase of 2-hydroxytetracosenoic acid (preferably 2-hydroxynervonic acid) in a non-human organism, as compared to a corresponding non-transformed wild type non-human organism, is conferred in the process of the invention, if the activity of a polypeptide showing the activity of a b2107-protein, or if the activity of the polypeptide B2107, preferably represented by SEQ ID NO. 39003, or a homolog or fragment thereof, or if the activity of a polypeptide encoded by a nucleic acid molecule comprising the nucleic acid SEQ ID NO. 39002, preferably the coding region thereof, or a homolog or fragment thereof, e.g. derived from Escherichia coli, is increased or generated. For example the activity of a nucleic acid molecule or a polypeptide comprising the nucleic acid, preferably the coding region thereof, or polypeptide or the consensus sequence or the polypeptide motif, as depicted in Table I, II or IV, application No. 12, column 5 or 8 in the respective same line as the nucleic acid molecule SEQ ID NO. 39002 or polypeptide SEQ ID NO. 39003, respectively, or a homolog or a fragment thereof, is increased or generated, or if the activity b2107-protein is increased or generated in a non-human organism, like a microorganism or a plant cell, plant or part thereof, especially with non-targeted localization, whereby the respective line discloses in column 7 the fine chemical 2-hydroxytetracosenoic acid (preferably 2-hydroxynervonic acid). For example, an increase of the 2-hydroxytetracosenoic acid (preferably 2-hydroxynervonic acid) of at least 1 percent, particularly in a range of 24 to 39-percent is conferred as compared to a corresponding non-transformed wild type non-human organism.

[61823] Accordingly, in one embodiment, an increase of lauric acid in a non-human organism, as compared to a corresponding non-transformed wild type non-human organism, is conferred in the process of the invention, if the activity of a polypeptide showing the activity of a b2126-protein, or if the activity of the polypeptide B2126, preferably represented by SEQ ID NO. 124993, or a homolog or fragment thereof, or if the activity of a polypeptide encoded by a nucleic acid molecule comprising the nucleic acid SEQ ID NO. 124992, preferably the coding region thereof, or a homolog or fragment thereof, e.g. derived from Escherichia coli, is increased or generated. For example the activity of a nucleic acid molecule or a polypeptide comprising the nucleic acid, preferably the coding region thereof, or polypeptide or the consensus sequence or the polypeptide motif, as depicted in Table I, II or IV, application No. 12, column 5 or 8 in the respective same line as the nucleic acid molecule SEQ ID NO. 124992 or polypeptide SEQ ID NO. 124993, respectively, or a homolog or a fragment thereof, is increased or generated, or if the activity b2126-protein is increased or generated in a non-human organism, like a microorganism or a plant cell, plant or part thereof, especially with plastidic localization, whereby the respective line discloses in column 7 the fine chemical lauric acid. For example, an increase of the lauric acid of at least 1 percent, particularly in a range of 32 to 43-percent is conferred as compared to a corresponding non-transformed wild type non-human organism.

[61824] Accordingly, in one embodiment, an increase of 2-hydroxypalmitic acid in a non-human organism, as compared to a corresponding non-transformed wild type non-human organism, is conferred in the process of the invention, if the activity of a polypeptide showing the activity of a b2139-protein, or if the activity of the polypeptide B2139, preferably represented by SEQ ID NO. 125086, or a homolog or fragment thereof, or if the activity of a polypeptide encoded by a nucleic acid molecule comprising the nucleic acid SEQ ID NO. 125085, preferably the coding region thereof, or a homolog or fragment thereof, e.g. derived from Escherichia coli, is increased or generated. For example the activity of a nucleic acid molecule or a polypeptide comprising the nucleic acid, preferably the coding region thereof, or polypeptide or the consensus sequence or the polypeptide motif, as depicted in Table I, II or IV, application No. 12, column 5 or 8 in the respective same line as the nucleic acid molecule SEQ ID NO. 125085 or polypeptide SEQ ID NO. 125086, respectively, or a homolog or a fragment thereof, is increased or generated, or if the activity b2139-protein is increased or generated in a non-human organism, like a microorganism or a plant cell, plant or part thereof, especially with plastidic localization, whereby the respective line discloses in column 7 the fine chemical 2-hydroxypalmitic acid. For example, an increase of the 2-hydroxypalmitic acid of at least 1 percent, particularly in a range of 20 to 27-percent is conferred as compared to a corresponding non-transformed wild type non-human organism.

[61825] Accordingly, in one embodiment, an increase of hexadecatrienoic acid in a non-human organism, as compared to a corresponding non-transformed wild type non-human organism, is conferred in the process of the invention, if the activity of a polypeptide showing the activity of a ABC transporter permease protein, or if the activity of the polypeptide B2178, preferably represented by SEQ ID NO. 39041, or a homolog or fragment thereof, or if the activity of a polypeptide encoded by a nucleic acid molecule comprising the nucleic acid SEQ ID NO. 39040, preferably the coding region thereof, or a homolog or fragment thereof, e.g. derived from Escherichia coli, is increased or generated. For example the activity of a nucleic acid molecule or a polypeptide comprising the nucleic acid, preferably the coding region thereof, or polypeptide or the consensus sequence or the polypeptide motif, as depicted in Table I, II or IV, application No. 12, column 5 or 8 in the respective same line as the nucleic acid molecule SEQ ID NO. 39040 or polypeptide SEQ ID NO. 39041, respectively, or a homolog or a fragment thereof, is increased or generated, or if the activity ABC transporter permease protein is increased or generated in a non-human organism, like a microorganism or a plant cell, plant or part thereof, especially with non-targeted localization, whereby the respective line discloses in column 7 the fine chemical hexadecatrienoic acid. For example, an increase of the hexadecatrienoic acid of at least 1 percent, particularly in a range of 17 to 34-percent is conferred as compared to a corresponding non-transformed wild type non-human organism.

[61826] Accordingly, in one embodiment, an increase of 2-hydroxybehenic acid in a non-human organism, as compared to a corresponding non-transformed wild type non-human organism, is conferred in the process of the invention, if the activity of a polypeptide showing the activity of a sensor kinase, or if the activity of the polypeptide B2216, preferably represented by SEQ ID NO. 125106, or a homolog or fragment thereof, or if the activity of a polypeptide encoded by a nucleic acid molecule comprising the nucleic acid SEQ ID NO. 125105, preferably the coding region thereof, or a homolog or fragment thereof, e.g. derived from Escherichia coli, is increased or generated. For example the activity of a nucleic acid molecule or a polypeptide comprising the nucleic acid, preferably the coding region thereof, or polypeptide or the consensus sequence or the polypeptide motif, as depicted in Table I, II or IV, application No. 12, column 5 or 8 in the respective same line as the nucleic acid molecule SEQ ID NO. 125105 or polypeptide SEQ ID NO. 125106, respectively, or a homolog or a fragment thereof, is increased or generated, or if the activity sensor kinase is increased or generated in a non-human organism, like a microorganism or a plant cell, plant or part thereof, especially with plastidic localization, whereby the respective line discloses in column 7 the fine chemical 2-hydroxybehenic acid. For example, an increase of the 2-hydroxybehenic acid of at least 1 percent, particularly in a range of 24 to 34-percent is conferred as compared to a corresponding non-transformed wild type non-human organism.

[61827] Accordingly, in one embodiment, an increase of 2-hydroxytetracosenoic acid (preferably 2-hydroxynervonic acid) in a non-human organism, as compared to a corresponding non-transformed wild type non-human organism, is conferred in the process of the invention, if the activity of a polypeptide showing the activity of a b2360-protein, or if the activity of the polypeptide B2360, preferably represented by SEQ ID NO. 39220, or a homolog or fragment thereof, or if the activity of a polypeptide encoded by a nucleic acid molecule comprising the nucleic acid SEQ ID NO. 39219, preferably the coding region thereof, or a homolog or fragment thereof, e.g. derived from Escherichia coli, is increased or generated. For example the activity of a nucleic acid molecule or a polypeptide comprising the nucleic acid, preferably the coding region thereof, or polypeptide or the consensus sequence or the polypeptide motif, as depicted in Table I, II or IV, application No. 12, column 5 or 8 in the respective same line as the nucleic acid molecule SEQ ID NO. 39219 or polypeptide SEQ ID NO. 39220, respectively, or a homolog or a fragment thereof, is increased or generated, or if the activity b2360-protein is increased or generated in a non-human organism, like a microorganism or a plant cell, plant or part thereof, especially with non-targeted localization, whereby the respective line discloses in column 7 the fine chemical 2-hydroxytetracosenoic acid (preferably 2-hydroxynervonic acid). For example, an increase of the 2-hydroxytetracosenoic acid (preferably 2-hydroxynervonic acid) of at least 1 percent, particularly in a range of 33 to 57-percent is conferred as compared to a corresponding non-transformed wild type non-human organism.

[61828] Accordingly, in one embodiment, an increase of 2-hydroxytetracosenoic acid (preferably 2-hydroxynervonic acid) in a non-human organism, as compared to a corresponding non-transformed wild type non-human organism, is conferred in the process of the invention, if the activity of a polypeptide showing the activity of a cysteine synthase A, or if the activity of the polypeptide B2414, preferably represented by SEQ ID NO. 39301, or a homolog or fragment thereof, or if the activity of a polypeptide encoded by a nucleic acid molecule comprising the nucleic acid SEQ ID NO. 39300, preferably the coding region thereof, or a homolog or fragment thereof, e.g. derived from Escherichia coli, is increased or generated. For example the activity of a nucleic acid molecule or a polypeptide comprising the nucleic acid, preferably the coding region thereof, or polypeptide or the consensus sequence or the polypeptide motif, as depicted in Table I, II or IV, application No. 12, column 5 or 8 in the respective same line as the nucleic acid molecule SEQ ID NO. 39300 or polypeptide SEQ ID NO. 39301, respectively, or a homolog or a fragment thereof, is increased or generated, or if the activity cysteine synthase A is increased or generated in a non-human organism, like a microorganism or a plant cell, plant or part thereof, especially with non-targeted localization, whereby the respective line discloses in column 7 the fine chemical 2-hydroxytetracosenoic acid (preferably 2-hydroxynervonic acid). For example, an increase of the 2-hydroxytetracosenoic acid (preferably 2-hydroxynervonic acid) of at least 1 percent, particularly in a range of 31 to 60-percent is conferred as compared to a corresponding non-transformed wild type non-human organism.

[61829] Accordingly, in one embodiment, an increase of hexadecadienoic acid in a non-human organism, as compared to a corresponding non-transformed wild type non-human organism, is conferred in the process of the invention, if the activity of a polypeptide showing the activity of a ethanolamine utilization protein, or if the activity of the polypeptide B2439, preferably represented by SEQ ID NO. 115629, or a homolog or fragment thereof, or if the activity of a polypeptide encoded by a nucleic acid molecule comprising the nucleic acid SEQ ID NO. 115628, preferably the coding region thereof, or a homolog or fragment thereof, e.g. derived from Escherichia coli, is increased or generated. For example the activity of a nucleic acid molecule or a polypeptide comprising the nucleic acid, preferably the coding region thereof, or polypeptide or the consensus sequence or the polypeptide motif, as depicted in Table I, II or IV, application No. 12, column 5 or 8 in the respective same line as the nucleic acid molecule SEQ ID NO. 115628 or polypeptide SEQ ID NO. 115629, respectively, or a homolog or a fragment thereof, is increased or generated, or if the activity ethanolamine utilization protein is increased or generated in a non-human organism, like a microorganism or a plant cell, plant or part thereof, especially with non-targeted localization, whereby the respective line discloses in column 7 the fine chemical hexadecadienoic acid. For example, an increase of the hexadecadienoic acid of at least 1 percent, particularly in a range of 32 to 135-percent is conferred as compared to a corresponding non-transformed wild type non-human organism.

[61830] Accordingly, in one embodiment, an increase of hexadecatrienoic acid in a non-human organism, as compared to a corresponding non-transformed wild type non-human organism, is conferred in the process of the invention, if the activity of a polypeptide showing the activity of a ethanolamine utilization protein, or if the activity of the polypeptide B2439, preferably represented by SEQ ID NO. 115629, or a homolog or fragment thereof, or if the activity of a polypeptide encoded by a nucleic acid molecule comprising the nucleic acid SEQ ID NO. 115628, preferably the coding region thereof, or a homolog or fragment thereof, e.g. derived from Escherichia coli, is increased or generated. For example the activity of a nucleic acid molecule or a polypeptide comprising the nucleic acid, preferably the coding region thereof, or polypeptide or the consensus sequence or the polypeptide motif, as depicted in Table I, II or IV, application No. 12, column 5 or 8 in the respective same line as the nucleic acid molecule SEQ ID NO. 115628 or polypeptide SEQ ID NO. 115629, respectively, or a homolog or a fragment thereof, is increased or generated, or if the activity ethanolamine utilization protein is increased or generated in a non-human organism, like a microorganism or a plant cell, plant or part thereof, especially with non-targeted localization, whereby the respective line discloses in column 7 the fine chemical hexadecatrienoic acid. For example, an increase of the hexadecatrienoic acid of at least 1 percent, particularly in a range of 14 to 27-percent is conferred as compared to a corresponding non-transformed wild type non-human organism.

[61831] Accordingly, in one embodiment, an increase of oleic acid in a non-human organism, as compared to a corresponding non-transformed wild type non-human organism, is conferred in the process of the invention, if the activity of a polypeptide showing the activity of a ethanolamine utilization protein, or if the activity of the polypeptide B2439, preferably represented by SEQ ID NO. 115629, or a homolog or fragment thereof, or if the activity of a polypeptide encoded by a nucleic acid molecule comprising the nucleic acid SEQ ID NO. 115628, preferably the coding region thereof, or a homolog or fragment thereof, e.g. derived from Escherichia coli, is increased or generated. For example the activity of a nucleic acid molecule or a polypeptide comprising the nucleic acid, preferably the coding region thereof, or polypeptide or the consensus sequence or the polypeptide motif, as depicted in Table I, II or IV, application No. 12, column 5 or 8 in the respective same line as the nucleic acid molecule SEQ ID NO. 115628 or polypeptide SEQ ID NO. 115629, respectively, or a homolog or a fragment thereof, is increased or generated, or if the activity ethanolamine utilization protein is increased or generated in a non-human organism, like a microorganism or a plant cell, plant or part thereof, especially with non-targeted localization, whereby the respective line discloses in column 7 the fine chemical oleic acid. For example, an increase of the oleic acid of at least 1 percent, particularly in a range of 42 to 55-percent is conferred as compared to a corresponding non-transformed wild type non-human organism.

[61832] Accordingly, in one embodiment, an increase of cerebronic acid in a non-human organism, as compared to a corresponding non-transformed wild type non-human organism, is conferred in the process of the invention, if the activity of a polypeptide showing the activity of a b2474-protein, or if the activity of the polypeptide B2474, preferably represented by SEQ ID NO. 40330, or a homolog or fragment thereof, or if the activity of a polypeptide encoded by a nucleic acid molecule comprising the nucleic acid SEQ ID NO. 40329, preferably the coding region thereof, or a homolog or fragment thereof, e.g. derived from Escherichia coli, is increased or generated. For example the activity of a nucleic acid molecule or a polypeptide comprising the nucleic acid, preferably the coding region thereof, or polypeptide or the consensus sequence or the polypeptide motif, as depicted in Table I, II or IV, application No. 12, column 5 or 8 in the respective same line as the nucleic acid molecule SEQ ID NO. 40329 or polypeptide SEQ ID NO. 40330, respectively, or a homolog or a fragment thereof, is increased or generated, or if the activity b2474-protein is increased or generated in a non-human organism, like a microorganism or a plant cell, plant or part thereof, especially with non-targeted localization, whereby the respective line discloses in column 7 the fine chemical cerebronic acid. For example, an increase of the cerebronic acid of at least 1 percent, particularly in a range of 25 to 44-percent is conferred as compared to a corresponding non-transformed wild type non-human organism.

[61833] Accordingly, in one embodiment, an increase of hexadecatrienoic acid in a non-human organism, as compared to a corresponding non-transformed wild type non-human organism, is conferred in the process of the invention, if the activity of a polypeptide showing the activity of a b2474-protein, or if the activity of the polypeptide B2474, preferably represented by SEQ ID NO. 40330, or a homolog or fragment thereof, or if the activity of a polypeptide encoded by a nucleic acid molecule comprising the nucleic acid SEQ ID NO. 40329, preferably the coding region thereof, or a homolog or fragment thereof, e.g. derived from Escherichia coli, is increased or generated. For example the activity of a nucleic acid molecule or a polypeptide comprising the nucleic acid, preferably the coding region thereof, or polypeptide or the consensus sequence or the polypeptide motif, as depicted in Table I, II or IV, application No. 12, column 5 or 8 in the respective same line as the nucleic acid molecule SEQ ID NO. 40329 or polypeptide SEQ ID NO. 40330, respectively, or a homolog or a fragment thereof, is increased or generated, or if the activity b2474-protein is increased or generated in a non-human organism, like a microorganism or a plant cell, plant or part thereof, especially with non-targeted localization, whereby the respective line discloses in column 7 the fine chemical hexadecatrienoic acid. For example, an increase of the hexadecatrienoic acid of at least 1 percent, particularly in a range of 20 to 31-percent is conferred as compared to a corresponding non-transformed wild type non-human organism.

[61834] Accordingly, in one embodiment, an increase of 2-hydroxytetracosenoic acid (preferably 2-hydroxynervonic acid) in a non-human organism, as compared to a corresponding non-transformed wild type non-human organism, is conferred in the process of the invention, if the activity of a polypeptide showing the activity of a b2474-protein, or if the activity of the polypeptide B2474, preferably represented by SEQ ID NO. 40330, or a homolog or fragment thereof, or if the activity of a polypeptide encoded by a nucleic acid molecule comprising the nucleic acid SEQ ID NO. 40329, preferably the coding region thereof, or a homolog or fragment thereof, e.g. derived from Escherichia coli, is increased or generated. For example the activity of a nucleic acid molecule or a polypeptide comprising the nucleic acid, preferably the coding region thereof, or polypeptide or the consensus sequence or the polypeptide motif, as depicted in Table I, II or IV, application No. 12, column 5 or 8 in the respective same line as the nucleic acid molecule SEQ ID NO. 40329 or polypeptide SEQ ID NO. 40330, respectively, or a homolog or a fragment thereof, is increased or generated, or if the activity b2474-protein is increased or generated in a non-human organism, like a microorganism or a plant cell, plant or part thereof, especially with non-targeted localization, whereby the respective line discloses in column 7 the fine chemical 2-hydroxytetracosenoic acid (preferably 2-hydroxynervonic acid). For example, an increase of the 2-hydroxytetracosenoic acid (preferably 2-hydroxynervonic acid) of at least 1 percent, particularly in a range of 27 to 43-percent is conferred as compared to a corresponding non-transformed wild type non-human organism.

[61835] Accordingly, in one embodiment, an increase of hexadecadienoic acid in a non-human organism, as compared to a corresponding non-transformed wild type non-human organism, is conferred in the process of the invention, if the activity of a polypeptide showing the activity of a b2513-protein, or if the activity of the polypeptide B2513, preferably represented by SEQ ID NO. 9168, or a homolog or fragment thereof, or if the activity of a polypeptide encoded by a nucleic acid molecule comprising the nucleic acid SEQ ID NO. 9167, preferably the coding region thereof, or a homolog or fragment thereof, e.g. derived from Escherichia coli, is increased or generated. For example the activity of a nucleic acid molecule or a polypeptide comprising the nucleic acid, preferably the coding region thereof, or polypeptide or the consensus sequence or the polypeptide motif, as depicted in Table I, II or IV, application No. 12, column 5 or 8 in the respective same line as the nucleic acid molecule SEQ ID NO. 9167 or polypeptide SEQ ID NO. 9168, respectively, or a homolog or a fragment thereof, is increased or generated, or if the activity b2513-protein is increased or generated in a non-human organism, like a microorganism or a plant cell, plant or part thereof, especially with non-targeted localization, whereby the respective line discloses in column 7 the fine chemical hexadecadienoic acid. For example, an increase of the hexadecadienoic acid of at least 1 percent, particularly in a range of 26 to 81-percent is conferred as compared to a corresponding non-transformed wild type non-human organism.

[61836] Accordingly, in one embodiment, an increase of hexadecadienoic acid in a non-human organism, as compared to a corresponding non-transformed wild type non-human organism, is conferred in the process of the invention, if the activity of a polypeptide showing the activity of a phosphatidylserine synthase, or if the activity of the polypeptide B2585, preferably represented by SEQ ID NO. 125143, or a homolog or fragment thereof, or if the activity of a polypeptide encoded by a nucleic acid molecule comprising the nucleic acid SEQ ID NO. 125142, preferably the coding region thereof, or a homolog or fragment thereof, e.g. derived from Escherichia coli, is increased or generated. For example the activity of a nucleic acid molecule or a polypeptide comprising the nucleic acid, preferably the coding region thereof, or polypeptide or the consensus sequence or the polypeptide motif, as depicted in Table I, II or IV, application No. 12, column 5 or 8 in the respective same line as the nucleic acid molecule SEQ ID NO. 125142 or polypeptide SEQ ID NO. 125143, respectively, or a homolog or a fragment thereof, is increased or generated, or if the activity phosphatidylserine synthase is increased or generated in a non-human organism, like a microorganism or a plant cell, plant or part thereof, especially with non-targeted localization, whereby the respective line discloses in column 7 the fine chemical hexadecadienoic acid. For example, an increase of the hexadecadienoic acid of at least 1 percent, particularly in a range of 21 to 32-percent is conferred as compared to a corresponding non-transformed wild type non-human organism.

[61837] Accordingly, in one embodiment, an increase of 2-hydroxytetracosenoic acid (preferably 2-hydroxynervonic acid) in a non-human organism, as compared to a corresponding non-transformed wild type non-human organism, is conferred in the process of the invention, if the activity of a polypeptide showing the activity of a b2654-protein, or if the activity of the polypeptide B2654, preferably represented by SEQ ID NO. 125227, or a homolog or fragment thereof, or if the activity of a polypeptide encoded by a nucleic acid molecule comprising the nucleic acid SEQ ID NO. 125226, preferably the coding region thereof, or a homolog or fragment thereof, e.g. derived from Escherichia coli, is increased or generated. For example the activity of a nucleic acid molecule or a polypeptide comprising the nucleic acid, preferably the coding region thereof, or polypeptide or the consensus sequence or the polypeptide motif, as depicted in Table I, II or IV, application No. 12, column 5 or 8 in the respective same line as the nucleic acid molecule SEQ ID NO. 125226 or polypeptide SEQ ID NO. 125227, respectively, or a homolog or a fragment thereof, is increased or generated, or if the activity b2654-protein is increased or generated in a non-human organism, like a microorganism or a plant cell, plant or part thereof, especially with non-targeted localization, whereby the respective line discloses in column 7 the fine chemical 2-hydroxytetracosenoic acid (preferably 2-hydroxynervonic acid). For example, an increase of the 2-hydroxytetracosenoic acid (preferably 2-hydroxynervonic acid) of at least 1 percent, particularly in a range of 38 to 41-percent is conferred as compared to a corresponding non-transformed wild type non-human organism.

[61838] Accordingly, in one embodiment, an increase of hexadecatrienoic acid in a non-human organism, as compared to a corresponding non-transformed wild type non-human organism, is conferred in the process of the invention, if the activity of a polypeptide showing the activity of a 2-C-methyl-D-erythritol 4-phosphate cytidylyltransferase, or if the activity of the polypeptide B2747, preferably represented by SEQ ID NO. 81076, or a homolog or fragment thereof, or if the activity of a polypeptide encoded by a nucleic acid molecule comprising the nucleic acid SEQ ID NO. 81075, preferably the coding region thereof, or a homolog or fragment thereof, e.g. derived from Escherichia coli, is increased or generated. For example the activity of a nucleic acid molecule or a polypeptide comprising the nucleic acid, preferably the coding region thereof, or polypeptide or the consensus sequence or the polypeptide motif, as depicted in Table I, II or IV, application No. 12, column 5 or 8 in the respective same line as the nucleic acid molecule SEQ ID NO. 81075 or polypeptide SEQ ID NO. 81076, respectively, or a homolog or a fragment thereof, is increased or generated, or if the activity 2-C-methyl-D-erythritol 4-phosphate cytidylyltransferase is increased or generated in a non-human organism, like a microorganism or a plant cell, plant or part thereof, especially with non-targeted localization, whereby the respective line discloses in column 7 the fine chemical hexadecatrienoic acid. For example, an increase of the hexadecatrienoic acid of at least 1 percent, particularly in a range of 13 to 45-percent is conferred as compared to a corresponding non-transformed wild type non-human organism.

[61839] Accordingly, in one embodiment, an increase of eicosanoic acid in a non-human organism, as compared to a corresponding non-transformed wild type non-human organism, is conferred in the process of the invention, if the activity of a polypeptide showing the activity of a alkaline phosphatase isozyme conversion protein, or if the activity of the polypeptide B2753, preferably represented by SEQ ID NO. 125235, or a homolog or fragment thereof, or if the activity of a polypeptide encoded by a nucleic acid molecule comprising the nucleic acid SEQ ID NO. 125234, preferably the coding region thereof, or a homolog or fragment thereof, e.g. derived from Escherichia coli, is increased or generated. For example the activity of a nucleic acid molecule or a polypeptide comprising the nucleic acid, preferably the coding region thereof, or polypeptide or the consensus sequence or the polypeptide motif, as depicted in Table I, II or IV, application No. 12, column 5 or 8 in the respective same line as the nucleic acid molecule SEQ ID NO. 125234 or polypeptide SEQ ID NO. 125235, respectively, or a homolog or a fragment thereof, is increased or generated, or if the activity alkaline phosphatase isozyme conversion protein is increased or generated in a non-human organism, like a microorganism or a plant cell, plant or part thereof, especially with non-targeted localization, whereby the respective line discloses in column 7 the fine chemical eicosanoic acid. For example, an increase of the eicosanoic acid of at least 1 percent, particularly in a range of 10 to 22-percent is conferred as compared to a corresponding non-transformed wild type non-human organism.

[61840] Accordingly, in one embodiment, an increase of 2-hydroxytetracosenoic acid (preferably 2-hydroxynervonic acid) in a non-human organism, as compared to a corresponding non-transformed wild type non-human organism, is conferred in the process of the invention, if the activity of a polypeptide showing the activity of a murein transglycosylase, or if the activity of the polypeptide B2963, preferably represented by SEQ ID NO. 41733, or a homolog or fragment thereof, or if the activity of a polypeptide encoded by a nucleic acid molecule comprising the nucleic acid SEQ ID NO. 41732, preferably the coding region thereof, or a homolog or fragment thereof, e.g. derived from Escherichia coli, is increased or generated. For example the activity of a nucleic acid molecule or a polypeptide comprising the nucleic acid, preferably the coding region thereof, or polypeptide or the consensus sequence or the polypeptide motif, as depicted in Table I, II or IV, application No. 12, column 5 or 8 in the respective same line as the nucleic acid molecule SEQ ID NO. 41732 or polypeptide SEQ ID NO. 41733, respectively, or a homolog or a fragment thereof, is increased or generated, or if the activity murein transglycosylase is increased or generated in a non-human organism, like a microorganism or a plant cell, plant or part thereof, especially with plastidic localization, whereby the respective line discloses in column 7 the fine chemical 2-hydroxytetracosenoic acid (preferably 2-hydroxynervonic acid). For example, an increase of the 2-hydroxytetracosenoic acid (preferably 2-hydroxynervonic acid) of at least 1 percent, particularly in a range of 25 to 55-percent is conferred as compared to a corresponding non-transformed wild type non-human organism.

[61841] Accordingly, in one embodiment, an increase of hexadecadienoic acid in a non-human organism, as compared to a corresponding non-transformed wild type non-human organism, is conferred in the process of the invention, if the activity of a polypeptide showing the activity of a b3442-protein, or if the activity of the polypeptide B3442, preferably represented by SEQ ID NO. 94381, or a homolog or fragment thereof, or if the activity of a polypeptide encoded by a nucleic acid molecule comprising the nucleic acid SEQ ID NO. 94380, preferably the coding region thereof, or a homolog or fragment thereof, e.g. derived from Escherichia coli, is increased or generated. For example the activity of a nucleic acid molecule or a polypeptide comprising the nucleic acid, preferably the coding region thereof, or polypeptide or the consensus sequence or the polypeptide motif, as depicted in Table I, II or IV, application No. 12, column 5 or 8 in the respective same line as the nucleic acid molecule SEQ ID NO. 94380 or polypeptide SEQ ID NO. 94381, respectively, or a homolog or a fragment thereof, is increased or generated, or if the activity b3442-protein is increased or generated in a non-human organism, like a microorganism or a plant cell, plant or part thereof, especially with non-targeted localization, whereby the respective line discloses in column 7 the fine chemical hexadecadienoic acid. For example, an increase of the hexadecadienoic acid of at least 1 percent, particularly in a range of 26 to 102-percent is conferred as compared to a corresponding non-transformed wild type non-human organism.

[61842] Accordingly, in one embodiment, an increase of cerebronic acid in a non-human organism, as compared to a corresponding non-transformed wild type non-human organism, is conferred in the process of the invention, if the activity of a polypeptide showing the activity of a sugar transport system permease protein, or if the activity of the polypeptide B3568, preferably represented by SEQ ID NO. 125265, or a homolog or fragment thereof, or if the activity of a polypeptide encoded by a nucleic acid molecule comprising the nucleic acid SEQ ID NO. 125264, preferably the coding region thereof, or a homolog or fragment thereof, e.g. derived from Escherichia coli, is increased or generated. For example the activity of a nucleic acid molecule or a polypeptide comprising the nucleic acid, preferably the coding region thereof, or polypeptide or the consensus sequence or the polypeptide motif, as depicted in Table I, II or IV, application No. 12, column 5 or 8 in the respective same line as the nucleic acid molecule SEQ ID NO. 125264 or polypeptide SEQ ID NO. 125265, respectively, or a homolog or a fragment thereof, is increased or generated, or if the activity sugar transport system permease protein is increased or generated in a non-human organism, like a microorganism or a plant cell, plant or part thereof, especially with plastidic localization, whereby the respective line discloses in column 7 the fine chemical cerebronic acid. For example, an increase of the cerebronic acid of at least 1 percent, particularly in a range of 30 to 44-percent is conferred as compared to a corresponding non-transformed wild type non-human organism.

[61843] Accordingly, in one embodiment, an increase of 2-hydroxybehenic acid in a non-human organism, as compared to a corresponding non-transformed wild type non-human organism, is conferred in the process of the invention, if the activity of a polypeptide showing the activity of a b3812-protein, or if the activity of the polypeptide B3812, preferably represented by SEQ ID NO. 125488, or a hornolog or fragment thereof, or if the activity of a polypeptide encoded by a nucleic acid molecule comprising the nucleic acid SEQ ID NO. 125487, preferably the coding region thereof, or a homolog or fragment thereof, e.g. derived from Escherichia coli, is increased or generated. For example the activity of a nucleic acid molecule or a polypeptide comprising the nucleic acid, preferably the coding region thereof, or polypeptide or the consensus sequence or the polypeptide motif, as depicted in Table I, II or IV, application No. 12, column 5 or 8 in the respective same line as the nucleic acid molecule SEQ ID NO. 125487 or polypeptide SEQ ID NO. 125488, respectively, or a homolog or a fragment thereof, is increased or generated, or if the activity b3812-protein is increased or generated in a non-human organism, like a microorganism or a plant cell, plant or part thereof, especially with non-targeted localization, whereby the respective line discloses in column 7 the fine chemical 2-hydroxybehenic acid. For example, an increase of the 2-hydroxybehenic acid of at least 1 percent, particularly in a range of 29 to 65-percent is conferred as compared to a corresponding non-transformed wild type non-human organism.

[61844] Accordingly, in one embodiment, an increase of hexadecadienoic acid in a non-human organism, as compared to a corresponding non-transformed wild type non-human organism, is conferred in the process of the invention, if the activity of a polypeptide showing the activity of a 3-ketoacyl-CoA thiolase, or if the activity of the polypeptide B3845, preferably represented by SEQ ID NO. 100676, or a homolog or fragment thereof, or if the activity of a polypeptide encoded by a nucleic acid molecule comprising the nucleic acid SEQ ID NO. 100675, preferably the coding region thereof, or a homolog or fragment thereof, e.g. derived from Escherichia coli, is increased or generated. For example the activity of a nucleic acid molecule or a polypeptide comprising the nucleic acid, preferably the coding region thereof, or polypeptide or the consensus sequence or the polypeptide motif, as depicted in Table I, II or IV, application No. 12, column 5 or 8 in the respective same line as the nucleic acid molecule SEQ ID NO. 100675 or polypeptide SEQ ID NO. 100676, respectively, or a homolog or a fragment thereof, is increased or generated, or if the activity 3-ketoacyl-CoA thiolase is increased or generated in a non-human organism, like a microorganism or a plant cell, plant or part thereof, especially with non-targeted localization, whereby the respective line discloses in column 7 the fine chemical hexadecadienoic acid. For example, an increase of the hexadecadienoic acid of at least 1 percent, particularly in a range of 20 to 36-percent is conferred as compared to a corresponding non-transformed wild type non-human organism.

[61845] Accordingly, in one embodiment, an increase of oleic acid in a non-human organism, as compared to a corresponding non-transformed wild type non-human organism, is conferred in the process of the invention, if the activity of a polypeptide showing the activity of a 3-ketoacyl-CoA thiolase, or if the activity of the polypeptide B3845, preferably represented by SEQ ID NO. 100676, or a homolog or fragment thereof, or if the activity of a polypeptide encoded by a nucleic acid molecule comprising the nucleic acid SEQ ID NO. 100675, preferably the coding region thereof, or a homolog or fragment thereof, e.g. derived from Escherichia coli, is increased or generated. For example the activity of a nucleic acid molecule or a polypeptide comprising the nucleic acid, preferably the coding region thereof, or polypeptide or the consensus sequence or the polypeptide motif, as depicted in Table I, II or IV, application No. 12, column 5 or 8 in the respective same line as the nucleic acid molecule SEQ ID NO. 100675 or polypeptide SEQ ID NO. 100676, respectively, or a homolog or a fragment thereof, is increased or generated, or if the activity 3-ketoacyl-CoA thiolase is increased or generated in a non-human organism, like a microorganism or a plant cell, plant or part thereof, especially with plastidic localization, whereby the respective line discloses in column 7 the fine chemical oleic acid. For example, an increase of the oleic acid of at least 1 percent, particularly in a range of 26 to 30-percent is conferred as compared to a corresponding non-transformed wild type non-human organism.

[61846] Accordingly, in one embodiment, an increase of hexadecadienoic acid in a non-human organism, as compared to a corresponding non-transformed wild type non-human organism, is conferred in the process of the invention, if the activity of a polypeptide showing the activity of a transcriptional regulator, or if the activity of the polypeptide B3872, preferably represented by SEQ ID NO. 83822, or a homolog or fragment thereof, or if the activity of a polypeptide encoded by a nucleic acid molecule comprising the nucleic acid SEQ ID NO. 83821, preferably the coding region thereof, or a homolog or fragment thereof, e.g. derived from Escherichia coli, is increased or generated. For example the activity of a nucleic acid molecule or a polypeptide comprising the nucleic acid, preferably the coding region thereof, or polypeptide or the consensus sequence or the polypeptide motif, as depicted in Table I, II or IV, application No. 12, column 5 or 8 in the respective same line as the nucleic acid molecule SEQ ID NO. 83821 or polypeptide SEQ ID NO. 83822, respectively, or a homolog or a fragment thereof, is increased or generated, or if the activity transcriptional regulator is increased or generated in a non-human organism, like a microorganism or a plant cell, plant or part thereof, especially with plastidic localization, whereby the respective line discloses in column 7 the fine chemical hexadecadienoic acid. For example, an increase of the hexadecadienoic acid of at least 1 percent, particularly in a range of 28 to 58-percent is conferred as compared to a corresponding non-transformed wild type non-human organism.

[61847] Accordingly, in one embodiment, an increase of hexadecadienoic acid in a non-human organism, as compared to a corresponding non-transformed wild type non-human organism, is conferred in the process of the invention, if the activity of a polypeptide showing the activity of a fructose 1,6-bisphosphatase, or if the activity of the polypeptide B3925, preferably represented by SEQ ID NO. 125542, or a homolog or fragment thereof, or if the activity of a polypeptide encoded by a nucleic acid molecule comprising the nucleic acid SEQ ID NO. 125541, preferably the coding region thereof, or a homolog or fragment thereof, e.g. derived from Escherichia coli, is increased or generated. For example the activity of a nucleic acid molecule or a polypeptide comprising the nucleic acid, preferably the coding region thereof, or polypeptide or the consensus sequence or the polypeptide motif, as depicted in Table I, II or IV, application No. 12, column 5 or 8 in the respective same line as the nucleic acid molecule SEQ ID NO. 125541 or polypeptide SEQ ID NO. 125542, respectively, or a homolog or a fragment thereof, is increased or generated, or if the activity fructose 1,6-bisphosphatase is increased or generated in a non-human organism, like a microorganism or a plant cell, plant or part thereof, especially with non-targeted localization, whereby the respective line discloses in column 7 the fine chemical hexadecadienoic acid. For example, an increase of the hexadecadienoic acid of at least 1 percent, particularly in a range of 25 to 66-percent is conferred as compared to a corresponding non-transformed wild type non-human organism.

[61848] Accordingly, in one embodiment, an increase of behenic acid in a non-human organism, as compared to a corresponding non-transformed wild type non-human organism, is conferred in the process of the invention, if the activity of a polypeptide showing the activity of a cystathionine gamma-synthase, or if the activity of the polypeptide B3939, preferably represented by SEQ ID NO. 125796, or a homolog or fragment thereof, or if the activity of a polypeptide encoded by a nucleic acid molecule comprising the nucleic acid SEQ ID NO. 125795, preferably the coding region thereof, or a homolog or fragment thereof, e.g. derived from Escherichia coli, is increased or generated. For example the activity of a nucleic acid molecule or a polypeptide comprising the nucleic acid, preferably the coding region thereof, or polypeptide or the consensus sequence or the polypeptide motif, as depicted in Table I, II or IV, application No. 12, column 5 or 8 in the respective same line as the nucleic acid molecule SEQ ID NO. 125795 or polypeptide SEQ ID NO. 125796, respectively, or a homolog or a fragment thereof, is increased or generated, or if the activity cystathionine gamma-synthase is increased or generated in a non-human organism, like a microorganism or a plant cell, plant or part thereof, especially with plastidic localization, whereby the respective line discloses in column 7 the fine chemical behenic acid. For example, an increase of the behenic acid of at least 1 percent, particularly in a range of 11 to 25-percent is conferred as compared to a corresponding non-transformed wild type non-human organism.

[61849] Accordingly, in one embodiment, an increase of heptadecanoic acid in a non-human organism, as compared to a corresponding non-transformed wild type non-human organism, is conferred in the process of the invention, if the activity of a polypeptide showing the activity of a cystathionine gamma-synthase, or if the activity of the polypeptide B3939, preferably represented by SEQ ID NO. 125796, or a homolog or fragment thereof, or if the activity of a polypeptide encoded by a nucleic acid molecule comprising the nucleic acid SEQ ID NO. 125795, preferably the coding region thereof, or a homolog or fragment thereof, e.g. derived from Escherichia coli, is increased or generated. For example the activity of a nucleic acid molecule or a polypeptide comprising the nucleic acid, preferably the coding region thereof, or polypeptide or the consensus sequence or the polypeptide motif, as depicted in Table I, II or IV, application No. 12, column 5 or 8 in the respective same line as the nucleic acid molecule SEQ ID NO. 125795 or polypeptide SEQ ID NO. 125796, respectively, or a homolog or a fragment thereof, is increased or generated, or if the activity cystathionine gamma-synthase is increased or generated in a non-human organism, like a microorganism or a plant cell, plant or part thereof, especially with plastidic localization, whereby the respective line discloses in column 7 the fine chemical heptadecanoic acid. For example, an increase of the heptadecanoic acid of at least 1 percent, particularly in a range of 22 to 33-percent is conferred as compared to a corresponding non-transformed wild type non-human organism.

[61850] Accordingly, in one embodiment, an increase of oleic acid in a non-human organism, as compared to a corresponding non-transformed wild type non-human organism, is conferred in the process of the invention, if the activity of a polypeptide showing the activity of a cystathionine gamma-synthase, or if the activity of the polypeptide B3939, preferably represented by SEQ ID NO. 125796, or a homolog or fragment thereof, or if the activity of a polypeptide encoded by a nucleic acid molecule comprising the nucleic acid SEQ ID NO. 125795, preferably the coding region thereof, or a homolog or fragment thereof, e.g. derived from Escherichia coli, is increased or generated. For example the activity of a nucleic acid molecule or a polypeptide comprising the nucleic acid, preferably the coding region thereof, or polypeptide or the consensus sequence or the polypeptide motif, as depicted in Table I, II or IV, application No. 12, column 5 or 8 in the respective same line as the nucleic acid molecule SEQ ID NO. 125795 or polypeptide SEQ ID NO. 125796, respectively, or a homolog or a fragment thereof, is increased or generated, or if the activity cystathionine gamma-synthase is increased or generated in a non-human organism, like a microorganism or a plant cell, plant or part thereof, especially with plastidic localization, whereby the respective line discloses in column 7 the fine chemical oleic acid. For example, an increase of the oleic acid of at least 1 percent, particularly in a range of 25 to 36-percent is conferred as compared to a corresponding non-transformed wild type non-human organism

[61851] Accordingly, in one embodiment, an increase of 2-hydroxypalmitic acid in a non-human organism, as compared to a corresponding non-transformed wild type non-human organism, is conferred in the process of the invention, if the activity of a polypeptide showing the activity of a b3944-protein, or if the activity of the polypeptide B3944, preferably represented by SEQ ID NO. 126378, or a homolog or fragment thereof, or if the activity of a polypeptide encoded by a nucleic acid molecule comprising the nucleic acid SEQ ID NO. 126377, preferably the coding region thereof, or a homolog or fragment thereof, e.g. derived from Escherichia coli, is increased or generated. For example the activity of a nucleic acid molecule or a polypeptide comprising the nucleic acid, preferably the coding region thereof, or polypeptide or the consensus sequence or the polypeptide motif, as depicted in Table I, II or IV, application No. 12, column 5 or 8 in the respective same line as the nucleic acid molecule SEQ ID NO. 126377 or polypeptide SEQ ID NO. 126378, respectively, or a homolog or a fragment thereof, is increased or generated, or if the activity b3944-protein is increased or generated in a non-human organism, like a microorganism or a plant cell, plant or part thereof, especially with plastidic localization, whereby the respective line discloses in column 7 the fine chemical 2-hydroxypalmitic acid. For example, an increase of the 2-hydroxypalmitic acid of at least 1 percent, particularly in a range of 19 to 37-percent is conferred as compared to a corresponding non-transformed wild type non-human organism.

[61852] Accordingly, in one embodiment, an increase of 2-hydroxybehenic acid in a non-human organism, as compared to a corresponding non-transformed wild type non-human organism, is conferred in the process of the invention, if the activity of a polypeptide showing the activity of a ankyrin repeat protein, or if the activity of the polypeptide B4017, preferably represented by SEQ ID NO. 126416, or a homolog or fragment thereof, or if the activity of a polypeptide encoded by a nucleic acid molecule comprising the nucleic acid SEQ ID NO. 126415, preferably the coding region thereof, or a homolog or fragment thereof, e.g. derived from Escherichia coli, is increased or generated. For example the activity of a nucleic acid molecule or a polypeptide comprising the nucleic acid, preferably the coding region thereof, or polypeptide or the consensus sequence or the polypeptide motif, as depicted in Table I, II or IV, application No. 12, column 5 or 8 in the respective same line as the nucleic acid molecule SEQ ID NO. 126415 or polypeptide SEQ ID NO. 126416, respectively, or a homolog or a fragment thereof, is increased or generated, or if the activity ankyrin repeat protein is increased or generated in a non-human organism, like a microorganism or a plant cell, plant or part thereof, especially with plastidic localization, whereby the respective line discloses in column 7 the fine chemical 2-hydroxybehenic acid. For example, an increase of the 2-hydroxybehenic acid of at least 1 percent, particularly in a range of 29 to 49-percent is conferred as compared to a corresponding non-transformed wild type non-human organism.

[61853] Accordingly, in one embodiment, an increase of hexadecadienoic acid in a non-human organism, as compared to a corresponding non-transformed wild type non-human organism, is conferred in the process of the invention, if the activity of a polypeptide showing the activity of a b4023-protein, or if the activity of the polypeptide B4023, preferably represented by SEQ ID NO. 119210, or a homolog or fragment thereof, or if the activity of a polypeptide encoded by a nucleic acid molecule comprising the nucleic acid SEQ ID NO. 119209, preferably the coding region thereof, or a homolog or fragment thereof, e.g. derived from Escherichia coli, is increased or generated. For example the activity of a nucleic acid molecule or a polypeptide comprising the nucleic acid, preferably the coding region thereof, or polypeptide or the consensus sequence or the polypeptide motif, as depicted in Table I, II or IV, application No. 12, column 5 or 8 in the respective same line as the nucleic acid molecule SEQ ID NO. 119209 or polypeptide SEQ ID NO. 119210, respectively, or a homolog or a fragment thereof, is increased or generated, or if the activity b4023-protein is increased or generated in a non-human organism, like a microorganism or a plant cell, plant or part thereof, especially with non-targeted localization, whereby the respective line discloses in column 7 the fine chemical hexadecadienoic acid. For example, an increase of the hexadecadienoic acid of at least 1 percent, particularly in a range of 24 to 57-percent is conferred as compared to a corresponding non-transformed wild type non-human organism.

[61854] Accordingly, in one embodiment, an increase of heptadecanoic acid in a non-human organism, as compared to a corresponding non-transformed wild type non-human organism, is conferred in the process of the invention, if the activity of a polypeptide showing the activity of a acetylcoenzyme A synthetase, or if the activity of the polypeptide B4069, preferably represented by SEQ ID NO. 126422, or a homolog or fragment thereof, or if the activity of a polypeptide encoded by a nucleic acid molecule comprising the nucleic acid SEQ ID NO. 126421, preferably the coding region thereof, or a homolog or fragment thereof, e.g. derived from Escherichia coli, is increased or generated. For example the activity of a nucleic acid molecule or a polypeptide comprising the nucleic acid, preferably the coding region thereof, or polypeptide or the consensus sequence or the polypeptide motif, as depicted in Table I, II or IV, application No. 12, column 5 or 8 in the respective same line as the nucleic acid molecule SEQ ID NO. 126421 or polypeptide SEQ ID NO. 126422, respectively, or a homolog or a fragment thereof, is increased or generated, or if the activity acetyl-coenzyme A synthetase is increased or generated in a non-human organism, like a microorganism or a plant cell, plant or part thereof, especially with plastidic localization, whereby the respective line discloses in column 7 the fine chemical heptadecanoic acid. For example, an increase of the heptadecanoic acid of at least 1 percent, particularly in a range of 14 to 35-percent is conferred as compared to a corresponding non-transformed wild type non-human organism.

[61855] Accordingly, in one embodiment, an increase of 2-hydroxypalmitic acid in a non-human organism, as compared to a corresponding non-transformed wild type non-human organism, is conferred in the process of the invention, if the activity of a polypeptide showing the activity of a b4205-protein, or if the activity of the polypeptide B4205, preferably represented by SEQ ID NO. 126976, or a hornolog or fragment thereof, or if the activity of a polypeptide encoded by a nucleic acid molecule comprising the nucleic acid SEQ ID NO. 126975, preferably the coding region thereof, or a homolog or fragment thereof, e.g. derived from Escherichia coli, is increased or generated. For example the activity of a nucleic acid molecule or a polypeptide comprising the nucleic acid, preferably the coding region thereof, or polypeptide or the consensus sequence or the polypeptide motif, as depicted in Table I, II or IV, application No. 12, column 5 or 8 in the respective same line as the nucleic acid molecule SEQ ID NO. 126975 or polypeptide SEQ ID NO. 126976, respectively, or a homolog or a fragment thereof, is increased or generated, or if the activity b4205-protein is increased or generated in a non-human organism, like a microorganism or a plant cell, plant or part thereof, especially with plastidic localization, whereby the respective line discloses in column 7 the fine chemical 2-hydroxypalmitic acid. For example, an increase of the 2-hydroxypalmitic acid of at least 1 percent, particularly in a range of 20 to 34-percent is conferred as compared to a corresponding non-transformed wild type non-human organism.

[61856] Accordingly, in one embodiment, an increase of 2-hydroxybehenic acid in a non-human organism, as compared to a corresponding non-transformed wild type non-human organism, is conferred in the process of the invention, if the activity of a polypeptide showing the activity of a vacuolar processing enzyme, or if the activity of the polypeptide C_pp032007025r, preferably represented by SEQ ID NO. 126992, or a homolog or fragment thereof, or if the activity of a polypeptide encoded by a nucleic acid molecule comprising the nucleic acid SEQ ID NO. 126991, preferably the coding region thereof, or a homolog or fragment thereof, e.g. derived from Physcomitrella patens, is in creased or generated. For example the activity of a nucleic acid molecule or a polypeptide comprising the nucleic acid, preferably the coding region thereof, or polypeptide or the consensus sequence or the polypeptide motif, as depicted in Table I, II or IV, application No. 12, column 5 or 8 in the respective same line as the nucleic acid molecule SEQ ID NO. 126991 or polypeptide SEQ ID NO. 126992, respectively, or a homolog or a fragment thereof, is increased or generated, or if the activity vacuolar processing enzyme is increased or generated in a non-human organism, like a microorganism or a plant cell, plant or part thereof, especially with non-targeted localization, whereby the respective line discloses in column 7 the fine chemical 2-hydroxybehenic acid. For example, an increase of the 2-hydroxybehenic acid of at least 1 percent, particularly in a range of 31 to 52-percent is conferred as compared to a corresponding non-transformed wild type non-human organism.

[61857] Accordingly, in one embodiment, an increase of 2-hydroxypalmitic acid in a non-human organism, as compared to a corresponding non-transformed wild type non-human organism, is conferred in the process of the invention, if the activity of a polypeptide showing the activity of a glutaredoxin, or if the activity of the polypeptide GM02LC12622, preferably represented by SEQ ID NO. 10812, or a homolog or fragment thereof, or if the activity of a polypeptide encoded by a nucleic acid molecule comprising the nucleic acid SEQ ID NO. 10811, preferably the coding region thereof, or a homolog or fragment thereof, e.g. derived from Glycine max, is increased or generated. For example the activity of a nucleic acid molecule or a polypeptide comprising the nucleic acid, preferably the coding region thereof, or polypeptide or the consensus sequence or the polypeptide motif, as depicted in Table I, II or IV, application No. 12, column 5 or 8 in the respective same line as the nucleic acid molecule SEQ ID NO. 10811 or polypeptide SEQ ID NO. 10812, respectively, or a homolog or a fragment thereof, is increased or generated, or if the activity glutaredoxin is increased or generated in a non-human organism, like a microorganism or a plant cell, plant or part thereof, especially with non-targeted localization, whereby the respective line discloses in column 7 the fine chemical 2-hydroxypalmitic acid. For example, an increase of the 2-hydroxypalmitic acid of at least 1 percent, particularly in a range of 23 to 48-percent is conferred as compared to a corresponding non-transformed wild type non-human organism.

[61858] Accordingly, in one embodiment, an increase of cerebronic acid in a non-human organism, as compared to a corresponding non-transformed wild type non-human organism, is conferred in the process of the invention, if the activity of a polypeptide showing the activity of a transcription factor, or if the activity of the polypeptide GM02LC19289, preferably represented by SEQ ID NO. 46752, or a homolog or fragment thereof, or if the activity of a polypeptide encoded by a nucleic acid molecule comprising the nucleic acid SEQ ID NO. 46751, preferably the coding region thereof, or a homolog or fragment thereof, e.g. derived from Glycine max, is increased or generated. For example the activity of a nucleic acid molecule or a polypeptide comprising the nucleic acid, preferably the coding region thereof, or polypeptide or the consensus sequence or the polypeptide motif, as depicted in Table I, II or IV, application No. 12, column 5 or 8 in the respective same line as the nucleic acid molecule SEQ ID NO. 46751 or polypeptide SEQ ID NO. 46752, respectively, or a homolog or a fragment thereof, is increased or generated, or if the activity transcription factor is increased or generated in a non-human organism, like a microorganism or a plant cell, plant or part thereof, especially with non-targeted localization, whereby the respective line discloses in column 7 the fine chemical cerebronic acid. For example, an increase of the cerebronic acid of at least 1 percent, particularly in a range of 24 to 57-percent is conferred as compared to a corresponding non-transformed wild type non-human organism.

[61859] Accordingly, in one embodiment, an increase of hexadecatrienoic acid in a non-human organism, as compared to a corresponding non-transformed wild type non-human organism, is conferred in the process of the invention, if the activity of a polypeptide showing the activity of a transcription factor, or if the activity of the polypeptide GM02LC19289, preferably represented by SEQ ID NO. 46752, or a homolog or fragment thereof, or if the activity of a polypeptide encoded by a nucleic acid molecule comprising the nucleic acid SEQ ID NO. 46751, preferably the coding region thereof, or a homolog or fragment thereof, e.g. derived from Glycine max, is increased or generated. For example the activity of a nucleic acid molecule or a polypeptide comprising the nucleic acid, preferably the coding region thereof, or polypeptide or the consensus sequence or the polypeptide motif, as depicted in Table I, II or IV, application No. 12, column 5 or 8 in the respective same line as the nucleic acid molecule SEQ ID NO. 46751 or polypeptide SEQ ID NO. 46752, respectively, or a homolog or a fragment thereof, is increased or generated, or if the activity transcription factor is increased or generated in a non-human organism, like a microorganism or a plant cell, plant or part thereof, especially with non-targeted localization, whereby the respective line discloses in column 7 the fine chemical hexadecatrienoic acid. For example, an increase of the hexadecatrienoic acid of at least 1 percent, particularly in a range of 12 to 50-percent is conferred as compared to a corresponding non-transformed wild type non-human organism.

[61860] Accordingly, in one embodiment, an increase of 2-hydroxytetracosenoic acid (preferably 2-hydroxynervonic acid) in a non-human organism, as compared to a corresponding non-transformed wild type non-human organism, is conferred in the process of the invention, if the activity of a polypeptide showing the activity of a GM02LC38418-protein, or if the activity of the polypeptide GM02LC38418, preferably represented by SEQ ID NO. 116313, or a homolog or fragment thereof, or if the activity of a polypeptide encoded by a nucleic acid molecule comprising the nucleic acid SEQ ID NO. 116312, preferably the coding region thereof, or a homolog or fragment thereof, e.g. derived from Glycine max, is increased or generated. For example the activity of a nucleic acid molecule or a polypeptide comprising the nucleic acid, preferably the coding region thereof, or polypeptide or the consensus sequence or the polypeptide motif, as depicted in Table I, II or IV, application No. 12, column 5 or 8 in the respective same line as the nucleic acid molecule SEQ ID NO. 116312 or polypeptide SEQ ID NO. 116313, respectively, or a homolog or a fragment thereof, is increased or generated, or if the activity GM02LC38418-protein is increased or generated in a non-human organism, like a microorganism or a plant cell, plant or part thereof, especially with non-targeted localization, whereby the respective line discloses in column 7 the fine chemical 2-hydroxytetracosenoic acid (preferably 2-hydroxynervonic acid). For example, an increase of the 2-hydroxytetracosenoic acid (preferably 2-hydroxynervonic acid) of at least 1 percent, particularly in a range of 22 to 46-percent is conferred as compared to a corresponding non-transformed wild type non-human organism.

[61861] Accordingly, in one embodiment, an increase of hexadecadienoic acid in a non-human organism, as compared to a corresponding non-transformed wild type non-human organism, is conferred in the process of the invention, if the activity of a polypeptide showing the activity of a sll0281-protein, or if the activity of the polypeptide Sll0281, preferably represented by SEQ ID NO. 84866, or a homolog or fragment thereof, or if the activity of a polypeptide encoded by a nucleic acid molecule comprising the nucleic acid SEQ ID NO. 84865, preferably the coding region thereof, or a homolog or fragment thereof, e.g. derived from Synechocystis sp., is increased or generated. For example the activity of a nucleic acid molecule or a polypeptide comprising the nucleic acid, preferably the coding region thereof, or polypeptide or the consensus sequence or the polypeptide motif, as depicted in Table I, II or IV, application No. 12, column 5 or 8 in the respective same line as the nucleic acid molecule SEQ ID NO. 84865 or polypeptide SEQ ID NO. 84866, respectively, or a homolog or a fragment thereof, is increased or generated, or if the activity sll0281-protein is increased or generated in a non-human organism, like a microorganism or a plant cell, plant or part thereof, especially with plastidic localization, whereby the respective line discloses in column 7 the fine chemical hexadecadienoic acid. For example, an increase of the hexadecadienoic acid of at least 1 percent, particularly in a range of 50 to 62-percent is conferred as compared to a corresponding non-transformed wild type non-human organism.

[61862] Accordingly, in one embodiment, an increase of 2-hydroxytetracosenoic acid (preferably 2-hydroxynervonic acid) in a non-human organism, as compared to a corresponding non-transformed wild type non-human organism, is conferred in the process of the invention, if the activity of a polypeptide showing the activity of a bifunctional protein (phosphoribosyltransferase and regulatory protein), or if the activity of the polypeptide Sll0368, preferably represented by SEQ ID NO. 106921, or a homolog or fragment thereof, or if the activity of a polypeptide encoded by a nucleic acid molecule comprising the nucleic acid SEQ ID NO. 106920, preferably the coding region thereof, or a homolog or fragment thereof, e.g. derived from Synechocystis sp., is increased or generated. For example the activity of a nucleic acid molecule or a polypeptide comprising the nucleic acid, preferably the coding region thereof, or polypeptide or the consensus sequence or the polypeptide motif, as depicted in Table I, II or IV, application No. 12, column 5 or 8 in the respective same line as the nucleic acid molecule SEQ ID NO. 106920 or polypeptide SEQ ID NO. 106921, respectively, or a homolog or a fragment thereof, is increased or generated, or if the activity bifunctional protein (phosphoribosyltransferase and regulatory protein) is increased or generated in a non-human organism, like a microorganism or a plant cell, plant or part thereof, especially with mitochondrial localization, whereby the respective line discloses in column 7 the fine chemical 2-hydroxytetracosenoic acid (preferably 2-hydroxynervonic acid). For example, an increase of the 2-hydroxytetracosenoic acid (preferably 2-hydroxynervonic acid) of at least 1 percent, particularly in a range of 23 to 69-percent is conferred as compared to a corresponding non-transformed wild type non-human organism.

[61863] Accordingly, in one embodiment, an increase of 2-hydroxytetracosenoic acid (preferably 2-hydroxynervonic acid) in a non-human organism, as compared to a corresponding non-transformed wild type non-human organism, is conferred in the process of the invention, if the activity of a polypeptide showing the activity of a sll0406-protein, or if the activity of the polypeptide Sll0406, preferably represented by SEQ ID NO. 127104, or a homolog or fragment thereof, or if the activity of a polypeptide encoded by a nucleic acid molecule comprising the nucleic acid SEQ ID NO. 127103, preferably the coding region thereof, or a homolog or fragment thereof, e.g. derived from Synechocystis sp., is increased or generated. For example the activity of a nucleic acid molecule or a polypeptide comprising the nucleic acid, preferably the coding region thereof, or polypeptide or the consensus sequence or the polypeptide motif, as depicted in Table I, II or IV, application No. 12, column 5 or 8 in the respective same line as the nucleic acid molecule SEQ ID NO. 127103 or polypeptide SEQ ID NO. 127104, respectively, or a homolog or a fragment thereof, is increased or generated, or if the activity sll0406-protein is increased or generated in a non-human organism, like a microorganism or a plant cell, plant or part thereof, especially with non-targeted localization, whereby the respective line discloses in column 7 the fine chemical 2-hydroxytetracosenoic acid (preferably 2-hydroxynervonic acid). For example, an increase of the 2-hydroxytetracosenoic acid (preferably 2-hydroxynervonic acid) of at least 1 percent, particularly in a range of 25 to 43-percent is conferred as compared to a corresponding non-transformed wild type non-human organism.

[61864] Accordingly, in one embodiment, an increase of cerebronic acid in a non-human organism, as compared to a corresponding non-transformed wild type non-human organism, is conferred in the process of the invention, if the activity of a polypeptide showing the activity of a binding-protein-dependent transport systems inner membrane component, or if the activity of the polypeptide Sll0833, preferably represented by SEQ ID NO. 101708, or a homolog or fragment thereof, or if the activity of a polypeptide encoded by a nucleic acid molecule comprising the nucleic acid SEQ ID NO. 101707, preferably the coding region thereof, or a homolog or fragment thereof, e.g. derived from Synechocystis sp., is increased or generated. For example the activity of a nucleic acid molecule or a polypeptide comprising the nucleic acid, preferably the coding region thereof, or polypeptide or the consensus sequence or the polypeptide motif, as depicted in Table I, II or IV, application No. 12, column 5 or 8 in the respective same line as the nucleic acid molecule SEQ ID NO. 101707 or polypeptide SEQ ID NO. 101708, respectively, or a homolog or a fragment thereof, is increased or generated, or if the activity binding-proteindependent transport systems inner membrane component is increased or generated in a non-human organism, like a microorganism or a plant cell, plant or part thereof, especially with non-targeted localization, whereby the respective line discloses in column 7 the fine chemical cerebronic acid. For example, an increase of the cerebronic acid of at least 1 percent, particularly in a range of 28 to 41-percent is conferred as compared to a corresponding non-transformed wild type non-human organism.

[61865] Accordingly, in one embodiment, an increase of cerebronic acid in a non-human organism, as compared to a corresponding non-transformed wild type non-human organism, is conferred in the process of the invention, if the activity of a polypeptide showing the activity of a phosphatase, or if the activity of the polypeptide Sll0895, preferably represented by SEQ ID NO. 127110, or a homolog or fragment thereof, or if the activity of a polypeptide encoded by a nucleic acid molecule comprising the nucleic acid SEQ ID NO. 127109, preferably the coding region thereof, or a homolog or fragment thereof, e.g. derived from Synechocystis sp., is increased or generated. For example the activity of a nucleic acid molecule or a polypeptide comprising the nucleic acid, preferably the coding region thereof, or polypeptide or the consensus sequence or the polypeptide motif, as depicted in Table I, II or IV, application No. 12, column 5 or 8 in the respective same line as the nucleic acid molecule SEQ ID NO. 127109 or polypeptide SEQ ID NO. 127110, respectively, or a homolog or a fragment thereof, is increased or generated, or if the activity phosphatase is increased or generated in a non-human organism, like a microorganism or a plant cell, plant or part thereof, especially with non-targeted localization, whereby the respective line discloses in column 7 the fine chemical cerebronic acid. For example, an increase of the cerebronic acid of at least 1 percent, particularly in a range of 24 to 35-percent is conferred as compared to a corresponding non-transformed wild type non-human organism.

[61866] Accordingly, in one embodiment, an increase of 2-hydroxytetracosenoic acid (preferably 2-hydroxynervonic acid) in a non-human organism, as compared to a corresponding non-transformed wild type non-human organism, is conferred in the process of the invention, if the activity of a polypeptide showing the activity of a phosphatase, or if the activity of the polypeptide Sll0895, preferably represented by SEQ ID NO. 127110, or a homolog or fragment thereof, or if the activity of a polypeptide encoded by a nucleic acid molecule comprising the nucleic acid SEQ ID NO. 127109, preferably the coding region thereof, or a homolog or fragment thereof, e.g. derived from Synechocystis sp., is increased or generated. For example the activity of a nucleic acid molecule or a polypeptide comprising the nucleic acid, preferably the coding region thereof, or polypeptide or the consensus sequence or the polypeptide motif, as depicted in Table 1, 11 or IV, application No. 12, column 5 or 8 in the respective same line as the nucleic acid molecule SEQ ID NO. 127109 or polypeptide SEQ ID NO. 127110, respectively, or a homolog or a fragment thereof, is increased or generated, or if the activity phosphatase is increased or generated in a non-human organism, like a microorganism or a plant cell, plant or part thereof, especially with non-targeted localization, whereby the respective line discloses in column 7 the fine chemical 2-hydroxytetracosenoic acid (preferably 2-hydroxynervonic acid). For example, an increase of the 2-hydroxytetracosenoic acid (preferably 2-hydroxynervonic acid) of at least 1 percent, particularly in a range of 22 to 40-percent is conferred as compared to a corresponding non-transformed wild type non-human organism.

[61867] Accordingly, in one embodiment, an increase of hexadecadienoic acid in a non-human organism, as compared to a corresponding non-transformed wild type non-human organism, is conferred in the process of the invention, if the activity of a polypeptide showing the activity of a carbon dioxide concentrating mechanism protein, or if the activity of the polypeptide Sll1031, preferably represented by SEQ ID NO. 52635, or a homolog or fragment thereof, or if the activity of a polypeptide encoded by a nucleic acid molecule comprising the nucleic acid SEQ ID NO. 52634, preferably the coding region thereof, or a homolog or fragment thereof, e.g. derived from Synechocystis sp., is increased or generated. For example the activity of a nucleic acid molecule or a polypeptide comprising the nucleic acid, preferably the coding region thereof, or polypeptide or the consensus sequence or the polypeptide motif, as depicted in Table I, II or IV, application No. 12, column 5 or 8 in the respective same line as the nucleic acid molecule SEQ ID NO. 52634 or polypeptide SEQ ID NO. 52635, respectively, or a homolog or a fragment thereof, is increased or generated, or if the activity carbon dioxide concentrating mechanism protein is increased or generated in a non-human organism, like a microorganism or a plant cell, plant or part thereof, especially with mitochondrial localization, whereby the respective line discloses in column 7 the fine chemical hexadecadienoic acid. For example, an increase of the hexadecadienoic acid of at least 1 percent, particularly in a range of 21 to 46-percent is conferred as compared to a corresponding non-transformed wild type non-human organism.

[61868] Accordingly, in one embodiment, an increase of hexadecatrienoic acid in a non-human organism, as compared to a corresponding non-transformed wild type non-human organism, is conferred in the process of the invention, if the activity of a polypeptide showing the activity of a carbon dioxide concentrating mechanism protein, or if the activity of the polypeptide Sll1031, preferably represented by SEQ ID NO. 52635, or a homolog or fragment thereof, or if the activity of a polypeptide encoded by a nucleic acid molecule comprising the nucleic acid SEQ ID NO. 52634, preferably the coding region thereof, or a homolog or fragment thereof, e.g. derived from Synechocystis sp., is increased or generated. For example the activity of a nucleic acid molecule or a polypeptide comprising the nucleic acid, preferably the coding region thereof, or polypeptide or the consensus sequence or the polypeptide motif, as depicted in Table I, II or IV, application No. 12, column 5 or 8 in the respective same line as the nucleic acid molecule SEQ ID NO. 52634 or polypeptide SEQ ID NO. 52635, respectively, or a homolog or a fragment thereof, is increased or generated, or if the activity carbon dioxide concentrating mechanism protein is increased or generated in a non-human organism, like a microorganism or a plant cell, plant or part thereof, especially with mitochondrial localization, whereby the respective line discloses in column 7 the fine chemical hexadecatrienoic acid. For example, an increase of the hexadecatrienoic acid of at least 1 percent, particularly in a range of 12 to 44-percent is conferred as compared to a corresponding non-transformed wild type non-human organism.

[61869] Accordingly, in one embodiment, an increase of cerebronic acid in a non-human organism, as compared to a corresponding non-transformed wild type non-human organism, is conferred in the process of the invention, if the activity of a polypeptide showing the activity of a coproporphyrinogen III oxidase, or if the activity of the polypeptide Sll1917, preferably represented by SEQ ID NO. 11472, or a homolog or fragment thereof, or if the activity of a polypeptide encoded by a nucleic acid molecule comprising the nucleic acid SEQ ID NO. 11471, preferably the coding region thereof, or a homolog or fragment thereof, e.g. derived from Synechocystis sp., is increased or generated. For example the activity of a nucleic acid molecule or a polypeptide comprising the nucleic acid, preferably the coding region thereof, or polypeptide or the consensus sequence or the polypeptide motif, as depicted in Table I, II or IV, application No. 12, column 5 or 8 in the respective same line as the nucleic acid molecule SEQ ID NO. 11471 or polypeptide SEQ ID NO. 11472, respectively, or a homolog or a fragment thereof, is increased or generated, or if the activity coproporphyrinogen III oxidase is increased or generated in a non-human organism, like a microorganism or a plant cell, plant or part thereof, especially with mitochondrial localization, whereby the respective line discloses in column 7 the fine chemical cerebronic acid. For example, an increase of the cerebronic acid of at least 1 percent, particularly in a range of 23 to 65-percent is conferred as compared to a corresponding non-transformed wild type non-human organism.

[61870] Accordingly, in one embodiment, an increase of 2-hydroxytetracosenoic acid (preferably 2-hydroxynervonic acid) in a non-human organism, as compared to a corresponding non-transformed wild type non-human organism, is conferred in the process of the invention, if the activity of a polypeptide showing the activity of a coproporphyrinogen III oxidase, or if the activity of the polypeptide Sll1917, preferably represented by SEQ ID NO. 11472, or a homolog or fragment thereof, or if the activity of a polypeptide encoded by a nucleic acid molecule comprising the nucleic acid SEQ ID NO. 11471, preferably the coding region thereof, or a homolog or fragment thereof, e.g. derived from Synechocystis sp., is increased or generated. For example the activity of a nucleic acid molecule or a polypeptide comprising the nucleic acid, preferably the coding region thereof, or polypeptide or the consensus sequence or the polypeptide motif, as depicted in Table I, II or IV, application No. 12, column 5 or 8 in the respective same line as the nucleic acid molecule SEQ ID NO. 11471 or polypeptide SEQ ID NO. 11472, respectively, or a homolog or a fragment thereof, is increased or generated, or if the activity coproporphyrinogen III oxidase is increased or generated in a non-human organism, like a microorganism or a plant cell, plant or part thereof, especially with mitochondrial localization, whereby the respective line discloses in column 7 the fine chemical 2-hydroxytetracosenoic acid (preferably 2-hydroxynervonic acid). For example, an increase of the 2-hydroxytetracosenoic acid (preferably 2-hydroxynervonic acid) of at least 1 percent, particularly in a range of 27 to 73-percent is conferred as compared to a corresponding non-transformed wild type non-human organism.

[61871] Accordingly, in one embodiment, an increase of 2-hydroxypalmitic acid in a non-human organ-ism, as compared to a corresponding non-transformed wild type non-human organism, is conferred in the process of the invention, if the activity of a polypeptide showing the activity of a oxidoreductase, or if the activity of the polypeptide Slr0338, preferably represented by SEQ ID NO. 11991, or a homolog or fragment thereof, or if the activity of a polypeptide encoded by a nucleic acid molecule comprising the nucleic acid SEQ ID NO. 11990, preferably the coding region thereof, or a homolog or fragment thereof, e.g. derived from Synechocystis sp., is increased or generated. For example the activity of a nucleic acid molecule or a polypeptide comprising the nucleic acid, preferably the coding region thereof, or polypeptide or the consensus sequence or the polypeptide motif, as depicted in Table I, II or IV, application No. 12, column 5 or 8 in the respective same line as the nucleic acid molecule SEQ ID NO. 11990 or polypeptide SEQ ID NO. 11991, respectively, or a homolog or a fragment thereof, is increased or generated, or if the activity oxidoreductase is increased or generated in a non-human organism, like a microorganism or a plant cell, plant or part thereof, especially with non-targeted localization, whereby the respective line discloses in column 7 the fine chemical 2-hydroxypalmitic acid. For example, an increase of the 2-hydroxypalmitic acid of at least 1 percent, particularly in a range of 18 to 30-percent is conferred as compared to a corresponding non-transformed wild type non-human organism.

[61872] Accordingly, in one embodiment, an increase of hexadecatrienoic acid in a non-human organism, as compared to a corresponding non-transformed wild type non-human organism, is conferred in the process of the invention, if the activity of a polypeptide showing the activity of a bifunctional purine biosynthesis protein, or if the activity of the polypeptide Slr0597, preferably represented by SEQ ID NO. 56154, or a homolog or fragment thereof, or if the activity of a polypeptide encoded by a nucleic acid molecule comprising the nucleic acid SEQ ID NO. 56153, preferably the coding region thereof, or a homolog or fragment thereof, e.g. derived from Synechocystis sp., is increased or generated. For example the activity of a nucleic acid molecule or a polypeptide comprising the nucleic acid, preferably the coding region thereof, or polypeptide or the consensus sequence or the polypeptide motif, as depicted in Table I, II or IV, application No. 12, column 5 or 8 in the respective same line as the nucleic acid molecule SEQ ID NO. 56153 or polypeptide SEQ ID NO. 56154, respectively, or a homolog or a fragment thereof, is increased or generated, or if the activity bifunctional purine biosynthesis protein is increased or generated in a non-human organism, like a microorganism or a plant cell, plant or part thereof, especially with plastidic localization, whereby the respective line discloses in column 7 the fine chemical hexadecatrienoic acid. For example, an increase of the hexadecatrienoic acid of at least 1 percent, particularly in a range of 21 to 26-percent is conferred as compared to a corresponding non-transformed wild type non-human organism.

[61873] Accordingly, in one embodiment, an increase of cerebronic acid in a non-human organism, as compared to a corresponding non-transformed wild type non-human organism, is conferred in the process of the invention, if the activity of a polypeptide showing the activity of a malate dehydrogenase, or if the activity of the polypeptide Slr0721, preferably represented by SEQ ID NO. 87398, or a homolog or fragment thereof, or if the activity of a polypeptide encoded by a nucleic acid molecule comprising the nucleic acid SEQ ID NO. 87397, preferably the coding region thereof, or a homolog or fragment thereof, e.g. derived from Synechocystis sp., is increased or generated. For example the activity of a nucleic acid molecule or a polypeptide comprising the nucleic acid, preferably the coding region thereof, or polypeptide or the consensus sequence or the polypeptide motif, as depicted in Table I, II or IV, application No. 12, column 5 or 8 in the respective same line as the nucleic acid molecule SEQ ID NO. 87397 or polypeptide SEQ ID NO. 87398, respectively, or a homolog or a fragment thereof, is increased or generated, or if the activity malate dehydrogenase is increased or generated in a non-human organism, like a microorganism or a plant cell, plant or part thereof, especially with plastidic localization, whereby the respective line discloses in column 7 the fine chemical cerebronic acid. For example, an increase of the cerebronic acid of at least 1 percent, particularly in a range of 24 to 37-percent is conferred as compared to a corresponding non-transformed wild type non-human organism.

[61874] Accordingly, in one embodiment, an increase of hexadecatrienoic acid in a non-human organism, as compared to a corresponding non-transformed wild type non-human organism, is conferred in the process of the invention, if the activity of a polypeptide showing the activity of a glycine cleavage system H protein, or if the activity of the polypeptide Slr0879, preferably represented by SEQ ID NO. 127184, or a homolog or fragment thereof, or if the activity of a polypeptide encoded by a nucleic acid molecule comprising the nucleic acid SEQ ID NO. 127183, preferably the coding region thereof, or a homolog or fragment thereof, e.g. derived from Synechocystis sp., is increased or generated. For example the activity of a nucleic acid molecule or a polypeptide comprising the nucleic acid, preferably the coding region thereof, or polypeptide or the consensus sequence or the polypeptide motif, as depicted in Table I, II or IV, application No. 12, column 5 or 8 in the respective same line as the nucleic acid molecule SEQ ID NO. 127183 or polypeptide SEQ ID NO. 127184, respectively, or a homolog or a fragment thereof, is increased or generated, or if the activity glycine cleavage system H protein is increased or generated in a non-human organism, like a microorganism or a plant cell, plant or part thereof, especially with mitochondrial localization, whereby the respective line discloses in column 7 the fine chemical hexadecatrienoic acid. For example, an increase of the hexadecatrienoic acid of at least 1 percent, particularly in a range of 17 to 38-percent is conferred as compared to a corresponding non-transformed wild type non-human organism.

[61875] Accordingly, in one embodiment, an increase of 2-hydroxytetracosenoic acid (preferably 2-hydroxynervonic acid) in a non-human organism, as compared to a corresponding non-transformed wild type non-human organism, is conferred in the process of the invention, if the activity of a polypeptide showing the activity of a permease protein of ABC transporter, or if the activity of the polypeptide Slr0949, preferably represented by SEQ ID NO. 119223, or a homolog or fragment thereof, or if the activity of a polypeptide encoded by a nucleic acid molecule comprising the nucleic acid SEQ ID NO. 119222, preferably the coding region thereof, or a homolog or fragment thereof, e.g. derived from Synechocystis sp., is increased or generated. For example the activity of a nucleic acid molecule or a polypeptide comprising the nucleic acid, preferably the coding region thereof, or polypeptide or the consensus sequence or the polypeptide motif, as depicted in Table I, II or IV, application No. 12, column 5 or 8 in the respective same line as the nucleic acid molecule SEQ ID NO. 119222 or polypeptide SEQ ID NO. 119223, respectively, or a homolog or a fragment thereof, is increased or generated, or if the activity permease protein of ABC transporter is increased or generated in a non-human organism, like a microorganism or a plant cell, plant or part thereof, especially with mitochondrial localization, whereby the respective line discloses in column 7 the fine chemical 2-hydroxytetracosenoic acid (preferably 2-hydroxynervonic acid). For example, an increase of the 2-hydroxytetracosenoic acid (preferably 2-hydroxynervonic acid) of at least 1 percent, particularly in a range of 21 to 92-percent is conferred as compared to a corresponding non-transformed wild type non-human organism.

[61876] Accordingly, in one embodiment, an increase of hexadecadienoic acid in a non-human organism, as compared to a corresponding non-transformed wild type non-human organism, is conferred in the process of the invention, if the activity of a polypeptide showing the activity of a tryptophan synthase alpha chain, or if the activity of the polypeptide Slr0966, preferably represented by SEQ ID NO. 87656, or a homolog or fragment thereof, or if the activity of a polypeptide encoded by a nucleic acid molecule comprising the nucleic acid SEQ ID NO. 87655, preferably the coding region thereof, or a homolog or fragment thereof, e.g. derived from Synechocystis sp., is increased or generated. For example the activity of a nucleic acid molecule or a polypeptide comprising the nucleic acid, preferably the coding region thereof, or polypeptide or the consensus sequence or the polypeptide motif, as depicted in Table I, II or IV, application No. 12, column 5 or 8 in the respective same line as the nucleic acid molecule SEQ ID NO. 87655 or polypeptide SEQ ID NO. 87656, respectively, or a homolog or a fragment thereof, is increased or generated, or if the activity tryptophan synthase alpha chain is increased or generated in a non-human organism, like a microorganism or a plant cell, plant or part thereof, especially with plastidic localization, whereby the respective line discloses in column 7 the fine chemical hexadecadienoic acid. For example, an increase of the hexadecadienoic acid of at least 1 percent, particularly in a range of 35 to 194-percent is conferred as compared to a corresponding non-transformed wild type non-human organism.

[61877] Accordingly, in one embodiment, an increase of 2-hydroxybehenic acid in a non-human organism, as compared to a corresponding non-transformed wild type non-human organism, is conferred in the process of the invention, if the activity of a polypeptide showing the activity of a dihydrolipoamide dehydrogenase, or if the activity of the polypeptide Slr1096, preferably represented by SEQ ID NO. 57735, or a homolog or fragment thereof, or if the activity of a polypeptide encoded by a nucleic acid molecule comprising the nucleic acid SEQ ID NO. 57734, preferably the coding region thereof, or a homolog or fragment thereof, e.g. derived from Synechocystis sp., is increased or generated. For example the activity of a nucleic acid molecule or a polypeptide comprising the nucleic acid, preferably the coding region thereof, or polypeptide or the consensus sequence or the polypeptide motif, as depicted in Table I, II or IV, application No. 12, column 5 or 8 in the respective same line as the nucleic acid molecule SEQ ID NO. 57734 or polypeptide SEQ ID NO. 57735, respectively, or a homolog or a fragment thereof, is increased or generated, or if the activity dihydrolipoamide dehydrogenase is increased or generated in a non-human organism, like a microorganism or a plant cell, plant or part thereof, especially with non-targeted localization, whereby the respective line discloses in column 7 the fine chemical 2-hydroxybehenic acid. For example, an increase of the 2-hydroxybehenic acid of at least 1 percent, particularly in a range of 31 to 55-percent is conferred as compared to a corresponding non-transformed wild type non-human organism.

[61878] Accordingly, in one embodiment, an increase of 2-hydroxypalmitic acid in a non-human organism, as compared to a corresponding non-transformed wild type non-human organism, is conferred in the process of the invention, if the activity of a polypeptide showing the activity of a phosphate import ATP-binding protein, or if the activity of the polypeptide Slr1250, preferably represented by SEQ ID NO. 116461, or a homolog or fragment thereof, or if the activity of a polypeptide encoded by a nucleic acid molecule comprising the nucleic acid SEQ ID NO. 116460, preferably the coding region thereof, or a homolog or fragment thereof, e.g. derived from Synechocystis sp., is increased or generated. For example the activity of a nucleic acid molecule or a polypeptide comprising the nucleic acid, preferably the coding region thereof, or polypeptide or the consensus sequence or the polypeptide motif, as depicted in Table I, II or IV, application No. 12, column 5 or 8 in the respective same line as the nucleic acid molecule SEQ ID NO. 116460 or polypeptide SEQ ID NO. 116461, respectively, or a homolog or a fragment thereof, is increased or generated, or if the activity phosphate import ATP-binding protein is increased or generated in a non-human organism, like a microorganism or a plant cell, plant or part thereof, especially with mitochondrial localization, whereby the respective line discloses in column 7 the fine chemical 2-hydroxypalmitic acid. For example, an increase of the 2-hydroxypalmitic acid of at least 1 percent, particularly in a range of 19 to 38-percent is conferred as compared to a corresponding non-transformed wild type non-human organism.

[61879] Accordingly, in one embodiment, an increase of hexadecatrienoic acid in a non-human organism, as compared to a corresponding non-transformed wild type non-human organism, is conferred in the process of the invention, if the activity of a polypeptide showing the activity of a glutamate 5-kinase, or if the activity of the polypeptide Slr2035, preferably represented by SEQ ID NO. 127522, or a homolog or fragment thereof, or if the activity of a polypeptide encoded by a nucleic acid molecule comprising the nucleic acid SEQ ID NO. 127521, preferably the coding region thereof, or a homolog or fragment thereof, e.g. derived from Synechocystis sp., is increased or generated. For example the activity of a nucleic acid molecule or a polypeptide comprising the nucleic acid, preferably the coding region thereof, or polypeptide or the consensus sequence or the polypeptide motif, as depicted in Table I, II or IV, application No. 12, column 5 or 8 in the respective same line as the nucleic acid molecule SEQ ID NO. 127521 or polypeptide SEQ ID NO. 127522, respectively, or a homolog or a fragment thereof, is increased or generated, or if the activity glutamate 5-kinase is increased or generated in a non-human organism, like a microorganism or a plant cell, plant or part thereof, especially with mitochondrial localization, whereby the respective line discloses in column 7 the fine chemical hexadecatrienoic acid. For example, an increase of the hexadecatrienoic acid of at least 1 percent, particularly in a range of 12 to 23-percent is conferred as compared to a corresponding non-transformed wild type non-human organism.

[61880] Accordingly, in one embodiment, an increase of cerebronic acid in a non-human organism, as compared to a corresponding non-transformed wild type non-human organism, is conferred in the process of the invention, if the activity of a polypeptide showing the activity of a threonine dehydratase, or if the activity of the polypeptide Slr2072, preferably represented by SEQ ID NO. 12342, or a homolog or fragment thereof, or if the activity of a polypeptide encoded by a nucleic acid molecule comprising the nucleic acid SEQ ID NO. 12341, preferably the coding region thereof, or a homolog or fragment thereof, e.g. derived from Synechocystis sp., is increased or generated. For example the activity of a nucleic acid molecule or a polypeptide comprising the nucleic acid, preferably the coding region thereof, or polypeptide or the consensus sequence or the polypeptide motif, as depicted in Table I, II or IV, application No. 12, column 5 or 8 in the respective same line as the nucleic acid molecule SEQ ID NO. 12341 or polypeptide SEQ ID NO. 12342, respectively, or a homolog or a fragment thereof, is increased or generated, or if the activity threonine dehydratase is increased or generated in a non-human organism, like a microorganism or a plant cell, plant or part thereof, especially with mitochondrial localization, whereby the respective line discloses in column 7 the fine chemical cerebronic acid. For example, an increase of the cerebronic acid of at least 1 percent, particularly in a range of 30 to 42-percent is conferred as compared to a corresponding non-transformed wild type non-human organism.

[61881] Accordingly, in one embodiment, an increase of hexadecatrienoic acid in a non-human organism, as compared to a corresponding non-transformed wild type non-human organism, is conferred in the process of the invention, if the activity of a polypeptide showing the activity of a threonine dehydratase, or if the activity of the polypeptide Slr2072, preferably represented by SEQ ID NO. 12342, or a homolog or fragment thereof, or if the activity of a polypeptide encoded by a nucleic acid molecule comprising the nucleic acid SEQ ID NO. 12341, preferably the coding region thereof, or a homolog or fragment thereof, e.g. derived from Synechocystis sp., is increased or generated. For example the activity of a nucleic acid molecule or a polypeptide comprising the nucleic acid, preferably the coding region thereof, or polypeptide or the consensus sequence or the polypeptide motif, as depicted in Table I, II or IV, application No. 12, column 5 or 8 in the respective same line as the nucleic acid molecule SEQ ID NO. 12341 or polypeptide SEQ ID NO. 12342, respectively, or a homolog or a fragment thereof, is increased or generated, or if the activity threonine dehydratase is increased or generated in a non-human organism, like a microorganism or a plant cell, plant or part thereof, especially with mitochondrial localization, whereby the respective line discloses in column 7 the fine chemical hexadecatrienoic acid. For example, an increase of the hexadecatrienoic acid of at least 1 percent, particularly in a range of 15 to 59-percent is conferred as compared to a corresponding non-transformed wild type non-human organism.

[61882] Accordingly, in one embodiment, an increase of 2-hydroxytetracosenoic acid (preferably 2-hydroxynervonic acid) in a non-human organism, as compared to a corresponding non-transformed wild type non-human organism, is conferred in the process of the invention, if the activity of a polypeptide showing the activity of a threonine dehydratase, or if the activity of the polypeptide Slr2072, preferably represented by SEQ ID NO. 12342, or a homolog or fragment thereof, or if the activity of a polypeptide encoded by a nucleic acid molecule comprising the nucleic acid SEQ ID NO. 12341, preferably the coding region thereof, or a homolog or fragment thereof, e.g. derived from Synechocystis sp., is increased or generated. For example the activity of a nucleic acid molecule or a polypeptide comprising the nucleic acid, preferably the coding region thereof, or polypeptide or the consensus sequence or the polypeptide motif, as depicted in Table I, II or IV, application No. 12, column 5 or 8 in the respective same line as the nucleic acid molecule SEQ ID NO. 12341 or polypeptide SEQ ID NO. 12342, respectively, or a homolog or a fragment thereof, is increased or generated, or if the activity threonine dehydratase is increased or generated in a non-human organism, like a microorganism or a plant cell, plant or part thereof, especially with plastidic localization, whereby the respective line discloses in column 7 the fine chemical 2-hydroxytetracosenoic acid (preferably 2-hydroxynervonic acid). For example, an increase of the 2-hydroxytetracosenoic acid (preferably 2-hydroxynervonic acid) of at least 1 percent, particularly in a range of 27 to 38-percent is conferred as compared to a corresponding non-transformed wild type non-human organism.

[61883] Accordingly, in one embodiment, an increase of 2-hydroxytetracosenoic acid (preferably 2-hydroxynervonic acid) in a non-human organism, as compared to a corresponding non-transformed wild type non-human organism, is conferred in the process of the invention, if the activity of a polypeptide showing the activity of a ferredoxin, or if the activity of the polypeptide Ssl3044, preferably represented by SEQ ID NO. 128025, or a homolog or fragment thereof, or if the activity of a polypeptide encoded by a nucleic acid molecule comprising the nucleic acid SEQ ID NO. 128024, preferably the coding region thereof, or a homolog or fragment thereof, e.g. derived from Synechocystis sp., is increased or generated. For example the activity of a nucleic acid molecule or a polypeptide comprising the nucleic acid, preferably the coding region thereof, or polypeptide or the consensus sequence or the polypeptide motif, as depicted in Table I, II or IV, application No. 12, column 5 or 8 in the respective same line as the nucleic acid molecule SEQ ID NO. 128024 or polypeptide SEQ ID NO. 128025, respectively, or a homolog or a fragment thereof, is increased or generated, or if the activity ferredoxin is increased or generated in a non-human organism, like a microorganism or a plant cell, plant or part thereof, especially with plastidic localization, whereby the respective line discloses in column 7 the fine chemical 2-hydroxytetracosenoic acid (preferably 2-hydroxynervonic acid). For example, an increase of the 2-hydroxytetracosenoic acid (preferably 2-hydroxynervonic acid) of at least 1 percent, particularly in a range of 22 to 37-percent is conferred as compared to a corresponding non-transformed wild type non-human organism.

[61884] Accordingly, in one embodiment, an increase of 2-hydroxybehenic acid in a non-human organism, as compared to a corresponding non-transformed wild type non-human organism, is conferred in the process of the invention, if the activity of a polypeptide showing the activity of a Sec-independent protein translocase subunit, or if the activity of the polypeptide TTC0019, preferably represented by SEQ ID NO. 12699, or a homolog or fragment thereof, or if the activity of a polypeptide encoded by a nucleic acid molecule comprising the nucleic acid SEQ ID NO. 12698, preferably the coding region thereof, or a homolog or fragment thereof, e.g. derived from Thermus thermophilus, is increased or generated. For example the activity of a nucleic acid molecule or a polypeptide comprising the nucleic acid, preferably the coding region thereof, or polypeptide or the consensus sequence or the polypeptide motif, as depicted in Table I, II or IV, application No. 12, column 5 or 8 in the respective same line as the nucleic acid molecule SEQ ID NO. 12698 or polypeptide SEQ ID NO. 12699, respectively, or a homolog or a fragment thereof, is increased or generated, or if the activity Sec-independent protein translocase subunit is increased or generated in a non-human organism, like a microorganism or a plant cell, plant or part thereof, especially with non-targeted localization, whereby the respective line discloses in column 7 the fine chemical 2-hydroxybehenic acid. For example, an increase of the 2-hydroxybehenic acid of at least 1 percent, particularly in a range of 31 to 39-percent is conferred as compared to a corresponding non-transformed wild type non-human organism.

[61885] Accordingly, in one embodiment, an increase of 2-hydroxytetracosenoic acid (preferably 2-hydroxynervonic acid) in a non-human organism, as compared to a corresponding non-transformed wild type non-human organism, is conferred in the process of the invention, if the activity of a polypeptide showing the activity of a amino acid ABC transporter permease protein, or if the activity of the polypeptide TTC0337, preferably represented by SEQ ID NO. 61071, or a homolog or fragment thereof, or if the activity of a polypeptide encoded by a nucleic acid molecule comprising the nucleic acid SEQ ID NO. 61070, preferably the coding region thereof, or a homolog or fragment thereof, e.g. derived from Thermus thermophilus, is increased or generated. For example the activity of a nucleic acid molecule or a polypeptide comprising the nucleic acid, preferably the coding region thereof, or polypeptide or the consensus sequence or the polypeptide motif, as depicted in Table I, II or IV, application No. 12, column 5 or 8 in the respective same line as the nucleic acid molecule SEQ ID NO. 61070 or polypeptide SEQ ID NO. 61071, respectively, or a homolog or a fragment thereof, is increased or generated, or if the activity amino acid ABC transporter permease protein is increased or generated in a non-human organism, like a microorganism or a plant cell, plant or part thereof, especially with non-targeted localization, whereby the respective line discloses in column 7 the fine chemical 2-hydroxytetracosenoic acid (preferably 2-hydroxynervonic acid). For example, an increase of the 2-hydroxytetracosenoic acid (preferably 2-hydroxynervonic acid) of at least 1 percent, particularly in a range of 30 to 53-percent is conferred as compared to a corresponding non-transformed wild type non-human organism.

[61886] Accordingly, in one embodiment, an increase of cerebronic acid in a non-human organism, as compared to a corresponding non-transformed wild type non-human organism, is conferred in the process of the invention, if the activity of a polypeptide showing the activity of a metal-dependent hydrolase, or if the activity of the polypeptide TTC0917, preferably represented by SEQ ID NO. 61554, or a homolog or fragment thereof, or if the activity of a polypeptide encoded by a nucleic acid molecule comprising the nucleic acid SEQ ID NO. 61553, preferably the coding region thereof, or a homolog or fragment thereof, e.g. derived from Thermus thermophilus, is increased or generated. For example the activity of a nucleic acid molecule or a polypeptide comprising the nucleic acid, preferably the coding region thereof, or polypeptide or the consensus sequence or the polypeptide motif, as depicted in Table I, II or IV, application No. 12, column 5 or 8 in the respective same line as the nucleic acid molecule SEQ ID NO. 61553 or polypeptide SEQ ID NO. 61554, respectively, or a homolog or a fragment thereof, is increased or generated, or if the activity metal-dependent hydrolase is increased or generated in a non-human organism, like a microorganism or a plant cell, plant or part thereof, especially with non-targeted localization, whereby the respective line discloses in column 7 the fine chemical cerebronic acid. For example, an increase of the cerebronic acid of at least 1 percent, particularly in a range of 27 to 89-percent is conferred as compared to a corresponding non-transformed wild type non-human organism.

[61887] Accordingly, in one embodiment, an increase of hexadecadienoic acid in a non-human organism, as compared to a corresponding non-transformed wild type non-human organism, is conferred in the process of the invention, if the activity of a polypeptide showing the activity of a metal-dependent hydrolase, or if the activity of the polypeptide TTC0917, preferably represented by SEQ ID NO. 61554, or a homolog or fragment thereof, or if the activity of a polypeptide encoded by a nucleic acid molecule comprising the nucleic acid SEQ ID NO. 61553, preferably the coding region thereof, or a homolog or fragment thereof, e.g. derived from Thermus thermophilus, is increased or generated. For example the activity of a nucleic acid molecule or a polypeptide comprising the nucleic acid, preferably the coding region thereof, or polypeptide or the consensus sequence or the polypeptide motif, as depicted in Table I, II or IV, application No. 12, column 5 or 8 in the respective same line as the nucleic acid molecule SEQ ID NO. 61553 or polypeptide SEQ ID NO. 61554, respectively, or a homolog or a fragment thereof, is increased or generated, or if the activity metal-dependent hydrolase is increased or generated in a non-human organism, like a microorganism or a plant cell, plant or part thereof, especially with non-targeted localization, whereby the respective line discloses in column 7 the fine chemical hexadecadienoic acid. For example, an increase of the hexadecadienoic acid of at least 1 percent, particularly in a range of 22 to 139-percent is conferred as compared to a corresponding non-transformed wild type non-human organism.

[61888] Accordingly, in one embodiment, an increase of 2-hydroxybehenic acid in a non-human organism, as compared to a corresponding non-transformed wild type non-human organism, is conferred in the process of the invention, if the activity of a polypeptide showing the activity of a multiple antibiotic resistance protein, or if the activity of the polypeptide TTC1193, preferably represented by SEQ ID NO. 61724, or a homolog or fragment thereof, or if the activity of a polypeptide encoded by a nucleic acid molecule comprising the nucleic acid SEQ ID NO. 61723, preferably the coding region thereof, or a homolog or fragment thereof, e.g. derived from Thermus thermophilus, is increased or generated. For example the activity of a nucleic acid molecule or a polypeptide comprising the nucleic acid, preferably the coding region thereof, or polypeptide or the consensus sequence or the polypeptide motif, as depicted in Table I, II or IV, application No. 12, column 5 or 8 in the respective same line as the nucleic acid molecule SEQ ID NO. 61723 or polypeptide SEQ ID NO. 61724, respectively, or a homolog or a fragment thereof, is increased or generated, or if the activity multiple antibiotic resistance protein is increased or generated in a non-human organism, like a microorganism or a plant cell, plant or part thereof, especially with non-targeted localization, whereby the respective line discloses in column 7 the fine chemical 2-hydroxybehenic acid. For example, an increase of the 2-hydroxybehenic acid of at least 1 percent, particularly in a range of 28 to 35-percent is conferred as compared to a corresponding non-transformed wild type non-human organism.

[61889] Accordingly, in one embodiment, an increase of hexadecatrienoic acid in a non-human organism, as compared to a corresponding non-transformed wild type non-human organism, is conferred in the process of the invention, if the activity of a polypeptide showing the activity of a TTC1386-protein, or if the activity of the polypeptide TTC1386, preferably represented by SEQ ID NO. 62080, or a homolog or fragment thereof, or if the activity of a polypeptide encoded by a nucleic acid molecule comprising the nucleic acid SEQ ID NO. 62079, preferably the coding region thereof, or a homolog or fragment thereof, e.g. derived from Thermus thermophilus, is increased or generated. For example the activity of a nucleic acid molecule or a polypeptide comprising the nucleic acid, preferably the coding region thereof, or polypeptide or the consensus sequence or the polypeptide motif, as depicted in Table I, II or IV, application No. 12, column 5 or 8 in the respective same line as the nucleic acid molecule SEQ ID NO. 62079 or polypeptide SEQ ID NO. 62080, respectively, or a homolog or a fragment thereof, is increased or generated, or if the activity TTC1386-protein is increased or generated in a non-human organism, like a microorganism or a plant cell, plant or part thereof, especially with non-targeted localization, whereby the respective line discloses in column 7 the fine chemical hexadecatrienoic acid. For example, an increase of the hexadecatrienoic acid of at least 1 percent, particularly in a range of 14 to 26-percent is conferred as compared to a corresponding non-transformed wild type non-human organism.

[61890] Accordingly, in one embodiment, an increase of 2-hydroxybehenic acid in a non-human organism, as compared to a corresponding non-transformed wild type non-human organism, is conferred in the process of the invention, if the activity of a polypeptide showing the activity of a homocitrate synthase, or if the activity of the polypeptide TTC1550, preferably represented by SEQ ID NO. 12975, or a homolog or fragment thereof, or if the activity of a polypeptide encoded by a nucleic acid molecule comprising the nucleic acid SEQ ID NO. 12974, preferably the coding region thereof, or a homolog or fragment thereof, e.g. derived from Thermus thermophilus, is increased or generated. For example the activity of a nucleic acid molecule or a polypeptide comprising the nucleic acid, preferably the coding region thereof, or polypeptide or the consensus sequence or the polypeptide motif, as depicted in Table I, II or IV, application No. 12, column 5 or 8 in the respective same line as the nucleic acid molecule SEQ ID NO. 12974 or polypeptide SEQ ID NO. 12975, respectively, or a homolog or a fragment thereof, is increased or generated, or if the activity homocitrate synthase is increased or generated in a non-human organism, like a microorganism or a plant cell, plant or part thereof, especially with non-targeted localization, whereby the respective line discloses in column 7 the fine chemical 2-hydroxybehenic acid. For example, an increase of the 2-hydroxybehenic acid of at least 1 percent, particularly in a range of 26 to 57-percent is conferred as compared to a corresponding non-transformed wild type non-human organism.

[61891] Accordingly, in one embodiment, an increase of hexadecadienoic acid in a non-human organism, as compared to a corresponding non-transformed wild type non-human organism, is conferred in the process of the invention, if the activity of a polypeptide showing the activity of a protein kinase, or if the activity of the polypeptide Yar019c, preferably represented by SEQ ID NO. 128140, or a homolog or fragment thereof, or if the activity of a polypeptide encoded by a nucleic acid molecule comprising the nucleic acid SEQ ID NO. 128139, preferably the coding region thereof, or a homolog or fragment thereof, e.g. derived from Saccharomyces cerevisiae, is increased or generated. For example the activity of a nucleic acid molecule or a polypeptide comprising the nucleic acid, preferably the coding region thereof, or polypeptide or the consensus sequence or the polypeptide motif, as depicted in Table I, II or IV, application No. 12, column 5 or 8 in the respective same line as the nucleic acid molecule SEQ ID NO. 128139 or polypeptide SEQ ID NO. 128140, respectively, or a homolog or a fragment thereof, is increased or generated, or if the activity protein kinase is increased or generated in a non-human organism, like a microorganism or a plant cell, plant or part thereof, especially with non-targeted localization, whereby the respective line discloses in column 7 the fine chemical hexadecadienoic acid. For example, an increase of the hexadecadienoic acid of at least 1 percent, particularly in a range of 21 to 25-percent is conferred as compared to a corresponding non-transformed wild type non-human organism.

[61892] Accordingly, in one embodiment, an increase of hexadecatrienoic acid in a non-human organism, as compared to a corresponding non-transformed wild type non-human organism, is conferred in the process of the invention, if the activity of a polypeptide showing the activity of a protein kinase, or if the activity of the polypeptide Yar019c, preferably represented by SEQ ID NO. 128140, or a homolog or fragment thereof, or if the activity of a polypeptide encoded by a nucleic acid molecule comprising the nucleic acid SEQ ID NO. 128139, preferably the coding region thereof, or a homolog or fragment thereof, e.g. derived from Saccharomyces cerevisiae, is increased or generated. For example the activity of a nucleic acid molecule or a polypeptide comprising the nucleic acid, preferably the coding region thereof, or polypeptide or the consensus sequence or the polypeptide motif, as depicted in Table I, II or IV, application No. 12, column 5 or 8 in the respective same line as the nucleic acid molecule SEQ ID NO. 128139 or polypeptide SEQ ID NO. 128140, respectively, or a homolog or a fragment thereof, is increased or generated, or if the activity protein kinase is increased or generated in a non-human organism, like a microorganism or a plant cell, plant or part thereof, especially with non-targeted localization, whereby the respective line discloses in column 7 the fine chemical hexadecatrienoic acid. For example, an increase of the hexadecatrienoic acid of at least 1 percent, particularly in a range of 13 to 20-percent is conferred as compared to a corresponding non-transformed wild type non-human organism.

[61893] Accordingly, in one embodiment, an increase of hexadecadienoic acid in a non-human organism, as compared to a corresponding non-transformed wild type non-human organism, is conferred in the process of the invention, if the activity of a polypeptide showing the activity of a transcription factor, or if the activity of the polypeptide Ybl021c, preferably represented by SEQ ID NO. 62525, or a homolog or fragment thereof, or if the activity of a polypeptide encoded by a nucleic acid molecule comprising the nucleic acid SEQ ID NO. 62524, preferably the coding region thereof, or a homolog or fragment thereof, e.g. derived from Saccharomyces cerevisiae, is increased or generated. For example the activity of a nucleic acid molecule or a polypeptide comprising the nucleic acid, preferably the coding region thereof, or polypeptide or the consensus sequence or the polypeptide motif, as depicted in Table I, II or IV, application No. 12, column 5 or 8 in the respective same line as the nucleic acid molecule SEQ ID NO. 62524 or polypeptide SEQ ID NO. 62525, respectively, or a homolog or a fragment thereof, is increased or generated, or if the activity transcription factor is increased or generated in a non-human organism, like a microorganism or a plant cell, plant or part thereof, especially with non-targeted localization, whereby the respective line discloses in column 7 the fine chemical hexadecadienoic acid. For example, an increase of the hexadecadienoic acid of at least 1 percent, particularly in a range of 21 to 96-percent is conferred as compared to a corresponding non-transformed wild type non-human organism.

[61894] Accordingly, in one embodiment, an increase of hexadecatrienoic acid in a non-human organism, as compared to a corresponding non-transformed wild type non-human organism, is conferred in the process of the invention, if the activity of a polypeptide showing the activity of a transcription factor, or if the activity of the polypeptide Ybl021c, preferably represented by SEQ ID NO. 62525, or a homolog or fragment thereof, or if the activity of a polypeptide encoded by a nucleic acid molecule comprising the nucleic acid SEQ ID NO. 62524, preferably the coding region thereof, or a homolog or fragment thereof, e.g. derived from Saccharomyces cerevisiae, is increased or generated. For example the activity of a nucleic acid molecule or a polypeptide comprising the nucleic acid, preferably the coding region thereof, or polypeptide or the consensus sequence or the polypeptide motif, as depicted in Table I, II or IV, application No. 12, column 5 or 8 in the respective same line as the nucleic acid molecule SEQ ID NO. 62524 or polypeptide SEQ ID NO. 62525, respectively, or a homolog or a fragment thereof, is increased or generated, or if the activity transcription factor is increased or generated in a non-human organism, like a microorganism or a plant cell, plant or part thereof, especially with non-targeted localization, whereby the respective line discloses in column 7 the fine chemical hexadecatrienoic acid. For example, an increase of the hexadecatrienoic acid of at least 1 percent, particularly in a range of 12 to 23-percent is conferred as compared to a corresponding non-transformed wild type non-human organism.

[61895] Accordingly, in one embodiment, an increase of hexadecatrienoic acid in a non-human organism, as compared to a corresponding non-transformed wild type non-human organism, is conferred in the process of the invention, if the activity of a polypeptide showing the activity of a cell division control protein, or if the activity of the polypeptide Ybr160w, preferably represented by SEQ ID NO. 62718, or a homolog or fragment thereof, or if the activity of a polypeptide encoded by a nucleic acid molecule comprising the nucleic acid SEQ ID NO. 62717, preferably the coding region thereof, or a homolog or fragment thereof, e.g. derived from Saccharomyces cerevisiae, is increased or generated. For example the activity of a nucleic acid molecule or a polypeptide comprising the nucleic acid, preferably the coding region thereof, or polypeptide or the consensus sequence or the polypeptide motif, as depicted in Table I, II or IV, application No. 12, column 5 or 8 in the respective same line as the nucleic acid molecule SEQ ID NO. 62717 or polypeptide SEQ ID NO. 62718, respectively, or a homolog or a fragment thereof, is increased or generated, or if the activity cell division control protein is increased or generated in a non-human organism, like a microorganism or a plant cell, plant or part thereof, especially with non-targeted localization, whereby the respective line discloses in column 7 the fine chemical hexadecatrienoic acid. For example, an increase of the hexadecatrienoic acid of at least 1 percent, particularly in a range of 13 to 54-percent is conferred as compared to a corresponding non-transformed wild type non-human organism.

[61896] Accordingly, in one embodiment, an increase of cerebronic acid in a non-human organism, as compared to a corresponding non-transformed wild type non-human organism, is conferred in the process of the invention, if the activity of a polypeptide showing the activity of a ycl027w-protein, or if the activity of the polypeptide Ycl027w, preferably represented by SEQ ID NO. 96981, or a homolog or fragment thereof, or if the activity of a polypeptide encoded by a nucleic acid molecule comprising the nucleic acid SEQ ID NO. 96980, preferably the coding region thereof, or a homolog or fragment thereof, e.g. derived from Saccharomyces cerevisiae, is increased or generated. For example the activity of a nucleic acid molecule or a polypeptide comprising the nucleic acid, preferably the coding region thereof, or polypeptide or the consensus sequence or the polypeptide motif, as depicted in Table I, II or IV, application No. 12, column 5 or 8 in the respective same line as the nucleic acid molecule SEQ ID NO. 96980 or polypeptide SEQ ID NO. 96981, respectively, or a homolog or a fragment thereof, is increased or generated, or if the activity ycl027w-protein is increased or generated in a non-human organism, like a microorganism or a plant cell, plant or part thereof, especially with plastidic localization, whereby the respective line discloses in column 7 the fine chemical cerebronic acid. For example, an increase of the cerebronic acid of at least 1 percent, particularly in a range of 25 to 46-percent is conferred as compared to a corresponding non-transformed wild type non-human organism.

[61897] Accordingly, in one embodiment, an increase of 2-hydroxytetracosenoic acid (preferably 2-hydroxynervonic acid) in a non-human organism, as compared to a corresponding non-transformed wild type non-human organism, is conferred in the process of the invention, if the activity of a polypeptide showing the activity of a ycl027w-protein, or if the activity of the polypeptide Ycl027w, preferably represented by SEQ ID NO. 96981, or a homolog or fragment thereof, or if the activity of a polypeptide encoded by a nucleic acid molecule comprising the nucleic acid SEQ ID NO. 96980, preferably the coding region thereof, or a homolog or fragment thereof, e.g. derived from Saccharomyces cerevisiae, is increased or generated. For example the activity of a nucleic acid molecule or a polypeptide comprising the nucleic acid, preferably the coding region thereof, or polypeptide or the consensus sequence or the polypeptide motif, as depicted in Table I, II or IV, application No. 12, column 5 or 8 in the respective same line as the nucleic acid molecule SEQ ID NO. 96980 or polypeptide SEQ ID NO. 96981, respectively, or a homolog or a fragment thereof, is increased or generated, or if the activity ycl027w-protein is increased or generated in a non-human organism, like a microorganism or a plant cell, plant or part thereof, especially with plastidic localization, whereby the respective line discloses in column 7 the fine chemical 2-hydroxytetracosenoic acid (preferably 2-hydroxynervonic acid). For example, an increase of the 2-hydroxytetracosenoic acid (preferably 2-hydroxynervonic acid) of at least 1 percent, particularly in a range of 25 to 41-percent is conferred as compared to a corresponding non-transformed wild type non-human organism.

[61898] Accordingly, in one embodiment, an increase of 2-hydroxypalmitic acid in a non-human organism, as compared to a corresponding non-transformed wild type non-human organism, is conferred in the process of the invention, if the activity of a polypeptide showing the activity of a ycl049c-protein, or if the activity of the polypeptide Ycl049c, preferably represented by SEQ ID NO. 113221, or a homolog or fragment thereof, or if the activity of a polypeptide encoded by a nucleic acid molecule comprising the nucleic acid SEQ ID NO. 113220, preferably the coding region thereof, or a homolog or fragment thereof, e.g. derived from Saccharomyces cerevisiae, is increased or generated. For example the activity of a nucleic acid molecule or a polypeptide comprising the nucleic acid, preferably the coding region thereof, or polypeptide or the consensus sequence or the polypeptide motif, as depicted in Table I, II or IV, application No. 12, column 5 or 8 in the respective same line as the nucleic acid molecule SEQ ID NO. 113220 or polypeptide SEQ ID NO. 113221, respectively, or a homolog or a fragment thereof, is increased or generated, or if the activity ycl049c-protein is increased or generated in a non-human organism, like a microorganism or a plant cell, plant or part thereof, especially with plastidic localization, whereby the respective line discloses in column 7 the fine chemical 2-hydroxypalmitic acid. For example, an increase of the 2-hydroxypalmitic acid of at least 1 percent, particularly in a range of 22 to 74-percent is conferred as compared to a corresponding non-transformed wild type non-human organism.

[61899] Accordingly, in one embodiment, an increase of oleic acid in a non-human organism, as compared to a corresponding non-transformed wild type non-human organism, is conferred in the process of the invention, if the activity of a polypeptide showing the activity of a glycerol-3-phosphate dehydrogenase, or if the activity of the polypeptide Ydl022w, preferably represented by SEQ ID NO. 119409, or a homolog or fragment thereof, or if the activity of a polypeptide encoded by a nucleic acid molecule comprising the nucleic acid SEQ ID NO. 119408, preferably the coding region thereof, or a homolog or fragment thereof, e.g. derived from Saccharomyces cerevisiae, is increased or generated. For example the activity of a nucleic acid molecule or a polypeptide comprising the nucleic acid, preferably the coding region thereof, or polypeptide or the consensus sequence or the polypeptide motif, as depicted in Table I, II or IV, application No. 12, column 5 or 8 in the respective same line as the nucleic acid molecule SEQ ID NO. 119408 or polypeptide SEQ ID NO. 119409, respectively, or a homolog or a fragment thereof, is increased or generated, or if the activity glycerol-3-phosphate dehydrogenase is increased or generated in a non-human organism, like a microorganism or a plant cell, plant or part thereof, especially with non-targeted localization, whereby the respective line discloses in column 7 the fine chemical oleic acid. For example, an increase of the oleic acid of at least 1 percent, particularly in a range of 34 to 156-percent is conferred as compared to a corresponding non-transformed wild type non-human organism.

[61900] Accordingly, in one embodiment, an increase of eicosanoic acid in a non-human organism, as compared to a corresponding non-transformed wild type non-human organism, is conferred in the process of the invention, if the activity of a polypeptide showing the activity of a isocitrate dehydrogenase, or if the activity of the polypeptide Ydl066w, preferably represented by SEQ ID NO. 122229, or a homolog or fragment thereof, or if the activity of a polypeptide encoded by a nucleic acid molecule comprising the nucleic acid SEQ ID NO. 122228, preferably the coding region thereof, or a homolog or fragment thereof, e.g. derived from Saccharomyces cerevisiae, is increased or generated. For example the activity of a nucleic acid molecule or a polypeptide comprising the nucleic acid, preferably the coding region thereof, or polypeptide or the consensus sequence or the polypeptide motif, as depicted in Table I, II or IV, application No. 12, column 5 or 8 in the respective same line as the nucleic acid molecule SEQ ID NO. 122228 or polypeptide SEQ ID NO. 122229, respectively, or a homolog or a fragment thereof, is increased or generated, or if the activity isocitrate dehydrogenase is increased or generated in a non-human organism, like a microorganism or a plant cell, plant or part thereof, especially with non-targeted localization, whereby the respective line discloses in column 7 the fine chemical eicosanoic acid. For example, an increase of the eicosanoic acid of at least 1 percent, particularly in a range of 8 to 17-percent is conferred as compared to a corresponding non-transformed wild type non-human organism.

[61901] Accordingly, in one embodiment, an increase of heptadecanoic acid in a non-human organism, as compared to a corresponding non-transformed wild type non-human organism, is conferred in the process of the invention, if the activity of a polypeptide showing the activity of a isocitrate dehydrogenase, or if the activity of the polypeptide Ydl066w, preferably represented by SEQ ID NO. 122229, or a homolog or fragment thereof, or if the activity of a polypeptide encoded by a nucleic acid molecule comprising the nucleic acid SEQ ID NO. 122228, preferably the coding region thereof, or a homolog or fragment thereof, e.g. derived from Saccharomyces cerevisiae, is increased or generated. For example the activity of a nucleic acid molecule or a polypeptide comprising the nucleic acid, preferably the coding region thereof, or polypeptide or the consensus sequence or the polypeptide motif, as depicted in Table I, II or IV, application No. 12, column 5 or 8 in the respective same line as the nucleic acid molecule SEQ ID NO. 122228 or polypeptide SEQ ID NO. 122229, respectively, or a homolog or a fragment thereof, is increased or generated, or if the activity isocitrate dehydrogenase is increased or generated in a non-human organism, like a microorganism or a plant cell, plant or part thereof, especially with non-targeted localization, whereby the respective line discloses in column 7 the fine chemical heptadecanoic acid. For example, an increase of the heptadecanoic acid of at least 1 percent, particularly in a range of 16 to 20-percent is conferred as compared to a corresponding non-transformed wild type non-human organism.

[61902] Accordingly, in one embodiment, an increase of hexadecadienoic acid in a non-human organism, as compared to a corresponding non-transformed wild type non-human organism, is conferred in the process of the invention, if the activity of a polypeptide showing the activity of a cell division control protein, or if the activity of the polypeptide Ydl126c, preferably represented by SEQ ID NO. 120046, or a homolog or fragment thereof, or if the activity of a polypeptide encoded by a nucleic acid molecule comprising the nucleic acid SEQ ID NO. 120045, preferably the coding region thereof, or a homolog or fragment thereof, e.g. derived from Saccharomyces cerevisiae, is increased or generated. For example the activity of a nucleic acid molecule or a polypeptide comprising the nucleic acid, preferably the coding region thereof, or polypeptide or the consensus sequence or the polypeptide motif, as depicted in Table I, II or IV, application No. 12, column 5 or 8 in the respective same line as the nucleic acid molecule SEQ ID NO. 120045 or polypeptide SEQ ID NO. 120046, respectively, or a homolog or a fragment thereof, is increased or generated, or if the activity cell division control protein is increased or generated in a non-human organism, like a microorganism or a plant cell, plant or part thereof, especially with non-targeted localization, whereby the respective line discloses in column 7 the fine chemical hexadecadienoic acid. For example, an increase of the hexadecadienoic acid of at least 1 percent, particularly in a range of 30 to 63-percent is conferred as compared to a corresponding non-transformed wild type non-human organism.

[61903] Accordingly, in one embodiment, an increase of hexadecatrienoic acid in a non-human organism, as compared to a corresponding non-transformed wild type non-human organism, is conferred in the process of the invention, if the activity of a polypeptide showing the activity of a cell division control protein, or if the activity of the polypeptide Ydl126c, preferably represented by SEQ ID NO. 120046, or a homolog or fragment thereof, or if the activity of a polypeptide encoded by a nucleic acid molecule comprising the nucleic acid SEQ ID NO. 120045, preferably the coding region thereof, or a homolog or fragment thereof, e.g. derived from Saccharomyces cerevisiae, is increased or generated. For example the activity of a nucleic acid molecule or a polypeptide comprising the nucleic acid, preferably the coding region thereof, or polypeptide or the consensus sequence or the polypeptide motif, as depicted in Table I, II or IV, application No. 12, column 5 or 8 in the respective same line as the nucleic acid molecule SEQ ID NO. 120045 or polypeptide SEQ ID NO. 120046, respectively, or a homolog or a fragment thereof, is increased or generated, or if the activity cell division control protein is increased or generated in a non-human organism, like a microorganism or a plant cell, plant or part thereof, especially with non-targeted localization, whereby the respective line discloses in column 7 the fine chemical hexadecatrienoic acid. For example, an increase of the hexadecatrienoic acid of at least 1 percent, particularly in a range of 14 to 34-percent is conferred as compared to a corresponding non-transformed wild type non-human organism.

[61904] Accordingly, in one embodiment, an increase of 2-hydroxybehenic acid in a non-human organism, as compared to a corresponding non-transformed wild type non-human organism, is conferred in the process of the invention, if the activity of a polypeptide showing the activity of a homocitrate synthase, or if the activity of the polypeptide Ydl131w, preferably represented by SEQ ID NO. 113225, or a homolog or fragment thereof, or if the activity of a polypeptide encoded by a nucleic acid molecule comprising the nucleic acid SEQ ID NO. 113224, preferably the coding region thereof, or a homolog or fragment thereof, e.g. derived from Saccharomyces cerevisiae, is increased or generated. For example the activity of a nucleic acid molecule or a polypeptide comprising the nucleic acid, preferably the coding region thereof, or polypeptide or the consensus sequence or the polypeptide motif, as depicted in Table I, II or IV, application No. 12, column 5 or 8 in the respective same line as the nucleic acid molecule SEQ ID NO. 113224 or polypeptide SEQ ID NO. 113225, respectively, or a homolog or a fragment thereof, is increased or generated, or if the activity homocitrate synthase is increased or generated in a non-human organism, like a microorganism or a plant cell, plant or part thereof, especially with plastidic localization, whereby the respective line discloses in column 7 the fine chemical 2-hydroxybehenic acid. For example, an increase of the 2-hydroxybehenic acid of at least 1 percent, particularly in a range of 29 to 50-percent is conferred as compared to a corresponding non-transformed wild type non-human organism.

[61905] Accordingly, in one embodiment, an increase of behenic acid in a non-human organism, as compared to a corresponding non-transformed wild type non-human organism, is conferred in the process of the invention, if the activity of a polypeptide showing the activity of a phospho-2-dehydro-3-deoxyheptonate aldolase, or if the activity of the polypeptide Ydr035w, preferably represented by SEQ ID NO. 113331, or a homolog or fragment thereof, or if the activity of a polypeptide encoded by a nucleic acid molecule comprising the nucleic acid SEQ ID NO. 113330, preferably the coding region thereof, or a homolog or fragment thereof, e.g. derived from Saccharomyces cerevisiae, is increased or generated. For example the activity of a nucleic acid molecule or a polypeptide comprising the nucleic acid, preferably the coding region thereof, or polypeptide or the consensus sequence or the polypeptide motif, as depicted in Table I, II or IV, application No. 12, column 5 or 8 in the respective same line as the nucleic acid molecule SEQ ID NO. 113330 or polypeptide SEQ ID NO. 113331, respectively, or a homolog or a fragment thereof, is increased or generated, or if the activity phospho-2-dehydro-3-deoxyheptonate aldolase is increased or generated in a non-human organism, like a microorganism or a plant cell, plant or part thereof, especially with plastidic localization, whereby the respective line discloses in column 7 the fine chemical behenic acid. For example, an increase of the behenic acid of at least 1 percent, particularly in a range of 38 to 128-percent is conferred as compared to a corresponding non-transformed wild type non-human organism.

[61906] Accordingly, in one embodiment, an increase of 2-hydroxytetracosenoic acid (preferably 2-hydroxynervonic acid) in a non-human organism, as compared to a corresponding non-transformed wild type non-human organism, is conferred in the process of the invention, if the activity of a polypeptide showing the activity of a cell wall protein, or if the activity of the polypeptide Ydr077w, preferably represented by SEQ ID NO. 128149, or a homolog or fragment thereof, or if the activity of a polypeptide encoded by a nucleic acid molecule comprising the nucleic acid SEQ ID NO. 128148, preferably the coding region thereof, or a homolog or fragment thereof, e.g. derived from Saccharomyces cerevisiae, is increased or generated. For example the activity of a nucleic acid molecule or a polypeptide comprising the nucleic acid, preferably the coding region thereof, or polypeptide or the consensus sequence or the polypeptide motif, as depicted in Table I, II or IV, application No. 12, column 5 or 8 in the respective same line as the nucleic acid molecule SEQ ID NO. 128148 or polypeptide SEQ ID NO. 128149, respectively, or a homolog or a fragment thereof, is increased or generated, or if the activity cell wall protein is increased or generated in a non-human organism, like a microorganism or a plant cell, plant or part thereof, especially with plastidic localization, whereby the respective line discloses in column 7 the fine chemical 2-hydroxytetracosenoic acid (preferably 2-hydroxynervonic acid). For example, an increase of the 2-hydroxytetracosenoic acid (preferably 2-hydroxynervonic acid) of at least 1 percent, particularly in a range of 22 to 32-percent is conferred as compared to a corresponding non-transformed wild type non-human organism.

[61907] Accordingly, in one embodiment, an increase of 2-hydroxytetracosenoic acid (preferably 2-hydroxynervonic acid) in a non-human organism, as compared to a corresponding non-transformed wild type non-human organism, is conferred in the process of the invention, if the activity of a polypeptide showing the activity of a F-box protein, or if the activity of the polypeptide Ydr131c, preferably represented by SEQ ID NO. 14707, or a homolog or fragment thereof, or if the activity of a polypeptide encoded by a nucleic acid molecule comprising the nucleic acid SEQ ID NO. 14706, preferably the coding region thereof, or a homolog or fragment thereof, e.g. derived from Saccharomyces cerevisiae, is increased or generated. For example the activity of a nucleic acid molecule or a polypeptide comprising the nucleic acid, preferably the coding region thereof, or polypeptide or the consensus sequence or the polypeptide motif, as depicted in Table I, II or IV, application No. 12, column 5 or 8 in the respective same line as the nucleic acid molecule SEQ ID NO. 14706 or polypeptide SEQ ID NO. 14707, respectively, or a homolog or a fragment thereof, is increased or generated, or if the activity F-box protein is increased or generated in a non-human organism, like a microorganism or a plant cell, plant or part thereof, especially with plastidic localization, whereby the respective line discloses in column 7 the fine chemical 2-hydroxytetracosenoic acid (preferably 2-hydroxynervonic acid). For example, an increase of the 2-hydroxytetracosenoic acid (preferably 2-hydroxynervonic acid) of at least 1 percent, particularly in a range of 26 to 66-percent is conferred as compared to a corresponding non-transformed wild type non-human organism.

[61908] Accordingly, in one embodiment, an increase of cerebronic acid in a non-human organism, as compared to a corresponding non-transformed wild type non-human organism, is conferred in the process of the invention, if the activity of a polypeptide showing the activity of a ydr273w-protein, or if the activity of the polypeptide Ydr273w, preferably represented by SEQ ID NO. 90160, or a homolog or fragment thereof, or if the activity of a polypeptide encoded by a nucleic acid molecule comprising the nucleic acid SEQ ID NO. 90159, preferably the coding region thereof, or a homolog or fragment thereof, e.g. derived from Saccharomyces cerevisiae, is increased or generated. For example the activity of a nucleic acid molecule or a polypeptide comprising the nucleic acid, preferably the coding region thereof, or polypeptide or the consensus sequence or the polypeptide motif, as depicted in Table I, II or IV, application No. 12, column 5 or 8 in the respective same line as the nucleic acid molecule SEQ ID NO. 90159 or polypeptide SEQ ID NO. 90160, respectively, or a homolog or a fragment thereof, is increased or generated, or if the activity ydr273w-protein is increased or generated in a non-human organism, like a microorganism or a plant cell, plant or part thereof, especially with plastidic localization, whereby the respective line discloses in column 7 the fine chemical cerebronic acid. For example, an increase of the cerebronic acid of at least 1 percent, particularly in a range of 27 to 30-percent is conferred as compared to a corresponding non-transformed wild type non-human organism.

[61909] Accordingly, in one embodiment, an increase of 2-hydroxytetracosenoic acid (preferably 2-hydroxynervonic acid) in a non-human organism, as compared to a corresponding non-transformed wild type non-human organism, is conferred in the process of the invention, if the activity of a polypeptide showing the activity of a ydr273w-protein, or if the activity of the polypeptide Ydr273w, preferably represented by SEQ ID NO. 90160, or a homolog or fragment thereof, or if the activity of a polypeptide encoded by a nucleic acid molecule comprising the nucleic acid SEQ ID NO. 90159, preferably the coding region thereof, or a homolog or fragment thereof, e.g. derived from Saccharomyces cerevisiae, is increased or generated. For example the activity of a nucleic acid molecule or a polypeptide comprising the nucleic acid, preferably the coding region thereof, or polypeptide or the consensus sequence or the polypeptide motif, as depicted in Table I, II or IV, application No. 12, column 5 or 8 in the respective same line as the nucleic acid molecule SEQ ID NO. 90159 or polypeptide SEQ ID NO. 90160, respectively, or a homolog or a fragment thereof, is increased or generated, or if the activity ydr273w-protein is increased or generated in a non-human organism, like a microorganism or a plant cell, plant or part thereof, especially with plastidic localization, whereby the respective line discloses in column 7 the fine chemical 2-hydroxytetracosenoic acid (preferably 2-hydroxynervonic acid). For example, an increase of the 2-hydroxytetracosenoic acid (preferably 2-hydroxynervonic acid) of at least 1 percent, particularly in a range of 24 to 28-percent is conferred as compared to a corresponding non-transformed wild type non-human organism.

[61910] Accordingly, in one embodiment, an increase of hexadecatrienoic acid in a non-human organism, as compared to a corresponding non-transformed wild type non-human organism, is conferred in the process of the invention, if the activity of a polypeptide showing the activity of a ydr339c-protein, or if the activity of the polypeptide Ydr339c, preferably represented by SEQ ID NO. 120242, or a homolog or fragment thereof, or if the activity of a polypeptide encoded by a nucleic acid molecule comprising the nucleic acid SEQ ID NO. 120241, preferably the coding region thereof, or a homolog or fragment thereof, e.g. derived from Saccharomyces cerevisiae, is increased or generated. For example the activity of a nucleic acid molecule or a polypeptide comprising the nucleic acid, preferably the coding region thereof, or polypeptide or the consensus sequence or the polypeptide motif, as depicted in Table I, II or IV, application No. 12, column 5 or 8 in the respective same line as the nucleic acid molecule SEQ ID NO. 120241 or polypeptide SEQ ID NO. 120242, respectively, or a homolog or a fragment thereof, is increased or generated, or if the activity ydr339c-protein is increased or generated in a non-human organism, like a microorganism or a plant cell, plant or part thereof, especially with plastidic localization, whereby the respective line discloses in column 7 the fine chemical hexadecatrienoic acid. For example, an increase of the hexadecatrienoic acid of at least 1 percent, particularly in a range of 14 to 20-percent is conferred as compared to a corresponding non-transformed wild type non-human organism.

[61911] Accordingly, in one embodiment, an increase of heptadecanoic acid in a non-human organism, as compared to a corresponding non-transformed wild type non-human organism, is conferred in the process of the invention, if the activity of a polypeptide showing the activity of a aldolase, or if the activity of the polypeptide Yel046c, preferably represented by SEQ ID NO. 128512, or a homolog or fragment thereof, or if the activity of a polypeptide encoded by a nucleic acid molecule comprising the nucleic acid SEQ ID NO. 128511, preferably the coding region thereof, or a homolog or fragment thereof, e.g. derived from Saccharomyces cerevisiae, is increased or generated. For example the activity of a nucleic acid molecule or a polypeptide comprising the nucleic acid, preferably the coding region thereof, or polypeptide or the consensus sequence or the polypeptide motif, as depicted in Table I, II or IV, application No. 12, column 5 or 8 in the respective same line as the nucleic acid molecule SEQ ID NO. 128511 or polypeptide SEQ ID NO. 128512, respectively, or a homolog or a fragment thereof, is increased or generated, or if the activity aldolase is increased or generated in a non-human organism, like a microorganism or a plant cell, plant or part thereof, especially with plastidic localization, whereby the respective line discloses in column 7 the fine chemical heptadecanoic acid. For example, an increase of the heptadecanoic acid of at least 1 percent, particularly in a range of 20 to 35-percent is conferred as compared to a corresponding non-transformed wild type non-human organism.

[61912] Accordingly, in one embodiment, an increase of myristic acid in a non-human organism, as compared to a corresponding non-transformed wild type non-human organism, is conferred in the process of the invention, if the activity of a polypeptide showing the activity of a small nuclear ribonucleoprotein , or if the activity of the polypeptide Yer112w, preferably represented by SEQ ID NO. 113599, or a homolog or fragment thereof, or if the activity of a polypeptide encoded by a nucleic acid molecule comprising the nucleic acid SEQ ID NO. 113598, preferably the coding region thereof, or a homolog or fragment thereof, e.g. derived from Saccharomyces cerevisiae, is increased or generated. For example the activity of a nucleic acid molecule or a polypeptide comprising the nucleic acid, preferably the coding region thereof, or polypeptide or the consensus sequence or the polypeptide motif, as depicted in Table I, II or IV, application No. 12, column 5 or 8 in the respective same line as the nucleic acid molecule SEQ ID NO. 113598 or polypeptide SEQ ID NO. 113599, respectively, or a homolog or a fragment thereof, is increased or generated, or if the activity small nuclear ribonucleoprotein is increased or generated in a non-human organism, like a microorganism or a plant cell, plant or part thereof, especially with non-targeted localization, whereby the respective line discloses in column 7 the fine chemical myristic acid. For example, an increase of the myristic acid of at least 1 percent, particularly in a range of 46 to 90-percent is conferred as compared to a corresponding non-transformed wild type non-human organism.

[61913] Accordingly, in one embodiment, an increase of hexadecadienoic acid in a non-human organism, as compared to a corresponding non-transformed wild type non-human organism, is conferred in the process of the invention, if the activity of a polypeptide showing the activity of a molecular chaperone portein, or if the activity of the polypeptide Yfl016c, preferably represented by SEQ ID NO. 63808, or a homolog or fragment thereof, or if the activity of a polypeptide encoded by a nucleic acid molecule comprising the nucleic acid SEQ ID NO. 63807, preferably the coding region thereof, or a homolog or fragment thereof, e.g. derived from Saccharomyces cerevisiae, is increased or generated. For example the activity of a nucleic acid molecule or a polypeptide comprising the nucleic acid, preferably the coding region thereof, or polypeptide or the consensus sequence or the polypeptide motif, as depicted in Table I, II or IV, application No. 12, column 5 or 8 in the respective same line as the nucleic acid molecule SEQ ID NO. 63807 or polypeptide SEQ ID NO. 63808, respectively, or a homolog or a fragment thereof, is increased or generated, or if the activity molecular chaperone portein is increased or generated in a non-human organism, like a microorganism or a plant cell, plant or part thereof, especially with non-targeted localization, whereby the respective line discloses in column 7 the fine chemical hexadecadienoic acid. For example, an increase of the hexadecadienoic acid of at least 1 percent, particularly in a range of 20 to 48-percent is conferred as compared to a corresponding non-transformed wild type non-human organism.

[61914] Accordingly, in one embodiment, an increase of hexadecatrienoic acid in a non-human organism, as compared to a corresponding non-transformed wild type non-human organism, is conferred in the process of the invention, if the activity of a polypeptide showing the activity of a molecular chaperone portein, or if the activity of the polypeptide Yfl016c, preferably represented by SEQ ID NO. 63808, or a homolog or fragment thereof, or if the activity of a polypeptide encoded by a nucleic acid molecule comprising the nucleic acid SEQ ID NO. 63807, preferably the coding region thereof, or a homolog or fragment thereof, e.g. derived from Saccharomyces cerevisiae, is increased or generated. For example the activity of a nucleic acid molecule or a polypeptide comprising the nucleic acid, preferably the coding region thereof, or polypeptide or the consensus sequence or the polypeptide motif, as depicted in Table I, II or IV, application No. 12, column 5 or 8 in the respective same line as the nucleic acid molecule SEQ ID NO. 63807 or polypeptide SEQ ID NO. 63808, respectively, or a homolog or a fragment thereof, is increased or generated, or if the activity molecular chaperone portein is increased or generated in a non-human organism, like a microorganism or a plant cell, plant or part thereof, especially with non-targeted localization, whereby the respective line discloses in column 7 the fine chemical hexadecatrienoic acid. For example, an increase of the hexadecatrienoic acid of at least 1 percent, particularly in a range of 13 to 39-percent is conferred as compared to a corresponding non-transformed wild type non-human organism.

[61915] Accordingly, in one embodiment, an increase of 2-hydroxybehenic acid in a non-human organism, as compared to a corresponding non-transformed wild type non-human organism, is conferred in the process of the invention, if the activity of a polypeptide showing the activity of a YFL019C-protein, or if the activity of the polypeptide Yfl019c, preferably represented by SEQ ID NO. 64145, or a homolog or fragment thereof, or if the activity of a polypeptide encoded by a nucleic acid molecule comprising the nucleic acid SEQ ID NO. 64144, preferably the coding region thereof, or a homolog or fragment thereof, e.g. derived from Saccharomyces cerevisiae, is increased or generated. For example the activity of a nucleic acid molecule or a polypeptide comprising the nucleic acid, preferably the coding region thereof, or polypeptide or the consensus sequence or the polypeptide motif, as depicted in Table I, II or IV, application No. 12, column 5 or 8 in the respective same line as the nucleic acid molecule SEQ ID NO. 64144 or polypeptide SEQ ID NO. 64145, respectively, or a homolog or a fragment thereof, is increased or generated, or if the activity YFL019C-protein is increased or generated in a non-human organism, like a microorganism or a plant cell, plant or part thereof, especially with non-targeted localization, whereby the respective line discloses in column 7 the fine chemical 2-hydroxybehenic acid. For example, an increase of the 2-hydroxybehenic acid of at least 1 percent, particularly in a range of 31 to 108-percent is conferred as compared to a corresponding non-transformed wild type non-human organism.

[61916] Accordingly, in one embodiment, an increase of 2-hydroxypalmitic acid in a non-human organism, as compared to a corresponding non-transformed wild type non-human organism, is conferred in the process of the invention, if the activity of a polypeptide showing the activity of a YFL019C-protein, or if the activity of the polypeptide Yfl019c, preferably represented by SEQ ID NO. 64145, or a homolog or fragment thereof, or if the activity of a polypeptide encoded by a nucleic acid molecule comprising the nucleic acid SEQ ID NO. 64144, preferably the coding region thereof, or a homolog or fragment thereof, e.g. derived from Saccharomyces cerevisiae, is increased or generated. For example the activity of a nucleic acid molecule or a polypeptide comprising the nucleic acid, preferably the coding region thereof, or polypeptide or the consensus sequence or the polypeptide motif, as depicted in Table I, II or IV, application No. 12, column 5 or 8 in the respective same line as the nucleic acid molecule SEQ ID NO. 64144 or polypeptide SEQ ID NO. 64145, respectively, or a homolog or a fragment thereof, is increased or generated, or if the activity YFL019C-protein is increased or generated in a non-human organism, like a microorganism or a plant cell, plant or part thereof, especially with non-targeted localization, whereby the respective line discloses in column 7 the fine chemical 2-hydroxypalmitic acid. For example, an increase of the 2-hydroxypalmitic acid of at least 1 percent, particularly in a range of 21 to 75-percent is conferred as compared to a corresponding non-transformed wild type non-human organism.

[61917] Accordingly, in one embodiment, an increase of hexadecadienoic acid in a non-human organism, as compared to a corresponding non-transformed wild type non-human organism, is conferred in the process of the invention, if the activity of a polypeptide showing the activity of a aminotransferase, or if the activity of the polypeptide Yfl030w, preferably represented by SEQ ID NO. 90190, or a homolog or fragment thereof, or if the activity of a polypeptide encoded by a nucleic acid molecule comprising the nucleic acid SEQ ID NO. 90189, preferably the coding region thereof, or a homolog or fragment thereof, e.g. derived from Saccharomyces cerevisiae, is increased or generated. For example the activity of a nucleic acid molecule or a polypeptide comprising the nucleic acid, preferably the coding region thereof, or polypeptide or the consensus sequence or the polypeptide motif, as depicted in Table I, II or IV, application No. 12, column 5 or 8 in the respective same line as the nucleic acid molecule SEQ ID NO. 90189 or polypeptide SEQ ID NO. 90190, respectively, or a homolog or a fragment thereof, is increased or generated, or if the activity aminotransferase is increased or generated in a non-human organism, like a microorganism or a plant cell, plant or part thereof, especially with plastidic localization, whereby the respective line discloses in column 7 the fine chemical hexadecadienoic acid. For example, an increase of the hexadecadienoic acid of at least 1 percent, particularly in a range of 31 to 53-percent is conferred as compared to a corresponding non-transformed wild type non-human organism.

[61918] Accordingly, in one embodiment, an increase of hexadecatrienoic acid in a non-human organism, as compared to a corresponding non-transformed wild type non-human organism, is conferred in the process of the invention, if the activity of a polypeptide showing the activity of a ygl237c-protein, or if the activity of the polypeptide Ygl237c, preferably represented by SEQ ID NO. 64178, or a homolog or fragment thereof, or if the activity of a polypeptide encoded by a nucleic acid molecule comprising the nucleic acid SEQ ID NO. 64177, preferably the coding region thereof, or a homolog or fragment thereof, e.g. derived from Saccharomyces cerevisiae, is increased or generated. For example the activity of a nucleic acid molecule or a polypeptide comprising the nucleic acid, preferably the coding region thereof, or polypeptide or the consensus sequence or the polypeptide motif, as depicted in Table I, II or IV, application No. 12, column 5 or 8 in the respective same line as the nucleic acid molecule SEQ ID NO. 64177 or polypeptide SEQ ID NO. 64178, respectively, or a homolog or a fragment thereof, is increased or generated, or if the activity ygl237c-protein is increased or generated in a non-human organism, like a microorganism or a plant cell, plant or part thereof, especially with non-targeted localization, whereby the respective line discloses in column 7 the fine chemical hexadecatrienoic acid. For example, an increase of the hexadecatrienoic acid of at least 1 percent, particularly in a range of 13 to 35-percent is conferred as compared to a corresponding non-transformed wild type non-human organism.

[61919] Accordingly, in one embodiment, an increase of eicosanoic acid in a non-human organism, as compared to a corresponding non-transformed wild type non-human organism, is conferred in the process of the invention, if the activity of a polypeptide showing the activity of a YGR104C-protein, or if the activity of the polypeptide Ygr104c, preferably represented by SEQ ID NO. 117483, or a homolog or fragment thereof, or if the activity of a polypeptide encoded by a nucleic acid molecule comprising the nucleic acid SEQ ID NO. 117482, preferably the coding region thereof, or a homolog or fragment thereof, e.g. derived from Saccharomyces cerevisiae, is increased or generated. For example the activity of a nucleic acid molecule or a polypeptide comprising the nucleic acid, preferably the coding region thereof, or polypeptide or the consensus sequence or the polypeptide motif, as depicted in Table I, II or IV, application No. 12, column 5 or 8 in the respective same line as the nucleic acid molecule SEQ ID NO. 117482 or polypeptide SEQ ID NO. 117483, respectively, or a homolog or a fragment thereof, is increased or generated, or if the activity YGR1040-protein is increased or generated in a non-human organism, like a microorganism or a plant cell, plant or part thereof, especially with non-targeted localization, whereby the respective line discloses in column 7 the fine chemical eicosanoic acid. For example, an increase of the eicosanoic acid of at least 1 percent, particularly in a range of 11 to 19-percent is conferred as compared to a corresponding non-transformed wild type non-human organism.

[61920] Accordingly, in one embodiment, an increase of cerebronic acid in a non-human organism, as compared to a corresponding non-transformed wild type non-human organism, is conferred in the process of the invention, if the activity of a polypeptide showing the activity of a squalene monooxygenase, or if the activity of the polypeptide Ygr175c, preferably represented by SEQ ID NO. 64219, or a homolog or fragment thereof, or if the activity of a polypeptide encoded by a nucleic acid molecule comprising the nucleic acid SEQ ID NO. 64218, preferably the coding region thereof, or a homolog or fragment thereof, e.g. derived from Saccharomyces cerevisiae, is increased or generated. For example the activity of a nucleic acid molecule or a polypeptide comprising the nucleic acid, preferably the coding region thereof, or polypeptide or the consensus sequence or the polypeptide motif, as depicted in Table I, II or IV, application No. 12, column 5 or 8 in the respective same line as the nucleic acid molecule SEQ ID NO. 64218 or polypeptide SEQ ID NO. 64219, respectively, or a homolog or a fragment thereof, is increased or generated, or if the activity squalene monooxygenase is increased or generated in a non-human organism, like a microorganism or a plant cell, plant or part thereof, especially with plastidic localization, whereby the respective line discloses in column 7 the fine chemical cerebronic acid. For example, an increase of the cerebronic acid of at least 1 percent, particularly in a range of 24 to 34-percent is conferred as compared to a corresponding non-transformed wild type non-human organism.

[61921] Accordingly, in one embodiment, an increase of hexadecadienoic acid in a non-human organism, as compared to a corresponding non-transformed wild type non-human organism, is conferred in the process of the invention, if the activity of a polypeptide showing the activity of a biotin synthase, or if the activity of the polypeptide Ygr286c, preferably represented by SEQ ID NO. 128656, or a homolog or fragment thereof, or if the activity of a polypeptide encoded by a nucleic acid molecule comprising the nucleic acid SEQ ID NO. 128655, preferably the coding region thereof, or a homolog or fragment thereof, e.g. derived from Saccharomyces cerevisiae, is increased or generated. For example the activity of a nucleic acid molecule or a polypeptide comprising the nucleic acid, preferably the coding region thereof, or polypeptide or the consensus sequence or the polypeptide motif, as depicted in Table I, II or IV, application No. 12, column 5 or 8 in the respective same line as the nucleic acid molecule SEQ ID NO. 128655 or polypeptide SEQ ID NO. 128656, respectively, or a homolog or a fragment thereof, is increased or generated, or if the activity biotin synthase is increased or generated in a non-human organism, like a microorganism or a plant cell, plant or part thereof, especially with plastidic localization, whereby the respective line discloses in column 7 the fine chemical hexadecadienoic acid. For example, an increase of the hexadecadienoic acid of at least 1 percent, particularly in a range of 23 to 46-percent is conferred as compared to a corresponding non-transformed wild type non-human organism.

[61922] Accordingly, in one embodiment, an increase of cerebronic acid in a non-human organism, as compared to a corresponding non-transformed wild type non-human organism, is conferred in the process of the invention, if the activity of a polypeptide showing the activity of a yhr033w-protein, or if the activity of the polypeptide Yhr033w, preferably represented by SEQ ID NO. 128968, or a homolog or fragment thereof, or if the activity of a polypeptide encoded by a nucleic acid molecule comprising the nucleic acid SEQ ID NO. 128967, preferably the coding region thereof, or a homolog or fragment thereof, e.g. derived from Saccharomyces cerevisiae, is increased or generated. For example the activity of a nucleic acid molecule or a polypeptide comprising the nucleic acid, preferably the coding region thereof, or polypeptide or the consensus sequence or the polypeptide motif, as depicted in Table I, II or IV, application No. 12, column 5 or 8 in the respective same line as the nucleic acid molecule SEQ ID NO. 128967 or polypeptide SEQ ID NO. 128968, respectively, or a homolog or a fragment thereof, is increased or generated, or if the activity yhr033w-protein is increased or generated in a non-human organism, like a microorganism or a plant cell, plant or part thereof, especially with plastidic localization, whereby the respective line discloses in column 7 the fine chemical cerebronic acid. For example, an increase of the cerebronic acid of at least 1 percent, particularly in a range of 21 to 27-percent is conferred as compared to a corresponding non-transformed wild type non-human organism.

[61923] Accordingly, in one embodiment, an increase of cerebronic acid in a non-human organism, as compared to a corresponding non-transformed wild type non-human organism, is conferred in the process of the invention, if the activity of a polypeptide showing the activity of a DnaJ-like chaperone, or if the activity of the polypeptide Yjl073w, preferably represented by SEQ ID NO. 64965, or a homolog or fragment thereof, or if the activity of a polypeptide encoded by a nucleic acid molecule comprising the nucleic acid SEQ ID NO. 64964, preferably the coding region thereof, or a homolog or fragment thereof, e.g. derived from Saccharomyces cerevisiae, is increased or generated. For example the activity of a nucleic acid molecule or a polypeptide comprising the nucleic acid, preferably the coding region thereof, or polypeptide or the consensus sequence or the polypeptide motif, as depicted in Table I, II or IV, application No. 12, column 5 or 8 in the respective same line as the nucleic acid molecule SEQ ID NO. 64964 or polypeptide SEQ ID NO. 64965, respectively, or a homolog or a fragment thereof, is increased or generated, or if the activity DnaJ-like chaperone is increased or generated in a non-human organism, like a microorganism or a plant cell, plant or part thereof, especially with plastidic localization, whereby the respective line discloses in column 7 the fine chemical cerebronic acid. For example, an increase of the cerebronic acid of at least 1 percent, particularly in a range of 30 to 45-percent is conferred as compared to a corresponding non-transformed wild type non-human organism.

[61924] Accordingly, in one embodiment, an increase of 2-hydroxybehenic acid in a non-human organism, as compared to a corresponding non-transformed wild type non-human organism, is conferred in the process of the invention, if the activity of a polypeptide showing the activity of a YJL127W-A-protein, or if the activity of the polypeptide Yjl127w-a, preferably represented by SEQ ID NO. 97632, or a homolog or fragment thereof, or if the activity of a polypeptide encoded by a nucleic acid molecule comprising the nucleic acid SEQ ID NO. 97631, preferably the coding region thereof, or a homolog or fragment thereof, e.g. derived from Saccharomyces cerevisiae, is increased or generated. For example the activity of a nucleic acid molecule or a polypeptide comprising the nucleic acid, preferably the coding region thereof, or polypeptide or the consensus sequence or the polypeptide motif, as depicted in Table I, II or IV, application No. 12, column 5 or 8 in the respective same line as the nucleic acid molecule SEQ ID NO. 97631 or polypeptide SEQ ID NO. 97632, respectively, or a homolog or a fragment thereof, is increased or generated, or if the activity YJL127W-A-protein is increased or generated in a non-human organism, like a microorganism or a plant cell, plant or part thereof, especially with non-targeted localization, whereby the respective line discloses in column 7 the fine chemical 2-hydroxybehenic acid. For example, an increase of the 2-hydroxybehenic acid of at least 1 percent, particularly in a range of 26 to 40-percent is conferred as compared to a corresponding non-transformed wild type non-human organism.

[61925] Accordingly, in one embodiment, an increase of 2-hydroxytetracosenoic acid (preferably 2-hydroxynervonic acid) in a non-human organism, as compared to a corresponding non-transformed wild type non-human organism, is conferred in the process of the invention, if the activity of a polypeptide showing the activity of a cystathionine gamma-synthase, or if the activity of the polypeptide Yjr130c, preferably represented by SEQ ID NO. 14844, or a homolog or fragment thereof, or if the activity of a polypeptide encoded by a nucleic acid molecule comprising the nucleic acid SEQ ID NO. 14843, preferably the coding region thereof, or a homolog or fragment thereof, e.g. derived from Saccharomyces cerevisiae, is increased or generated. For example the activity of a nucleic acid molecule or a polypeptide comprising the nucleic acid, preferably the coding region thereof, or polypeptide or the consensus sequence or the polypeptide motif, as depicted in Table I, II or IV, application No. 12, column 5 or 8 in the respective same line as the nucleic acid molecule SEQ ID NO. 14843 or polypeptide SEQ ID NO. 14844, respectively, or a homolog or a fragment thereof, is increased or generated, or if the activity cystathionine gamma-synthase is increased or generated in a non-human organism, like a microorganism or a plant cell, plant or part thereof, especially with non-targeted localization, whereby the respective line discloses in column 7 the fine chemical 2-hydroxytetracosenoic acid (preferably 2-hydroxynervonic acid). For example, an increase of the 2-hydroxytetracosenoic acid (preferably 2-hydroxynervonic acid) of at least 1 percent, particularly in a range of 23 to 70-percent is conferred as compared to a corresponding non-transformed wild type non-human organism.

[61926] Accordingly, in one embodiment, an increase of 2-hydroxypalmitic acid in a non-human organism, as compared to a corresponding non-transformed wild type non-human organism, is conferred in the process of the invention, if the activity of a polypeptide showing the activity of a cystathionine gamma-synthase, or if the activity of the polypeptide Yjr130c, preferably represented by SEQ ID NO. 14844, or a homolog or fragment thereof, or if the activity of a polypeptide encoded by a nucleic acid molecule comprising the nucleic acid SEQ ID NO. 14843, preferably the coding region thereof, or a homolog or fragment thereof, e.g. derived from Saccharomyces cerevisiae, is increased or generated. For example the activity of a nucleic acid molecule or a polypeptide comprising the nucleic acid, preferably the coding region thereof, or polypeptide or the consensus sequence or the polypeptide motif, as depicted in Table I, II or IV, application No. 12, column 5 or 8 in the respective same line as the nucleic acid molecule SEQ ID NO. 14843 or polypeptide SEQ ID NO. 14844, respectively, or a homolog or a fragment thereof, is increased or generated, or if the activity cystathionine gamma-synthase is increased or generated in a non-human organism, like a microorganism or a plant cell, plant or part thereof, especially with non-targeted localization, whereby the respective line discloses in column 7 the fine chemical 2-hydroxypalmitic acid. For example, an increase of the 2-hydroxypalmitic acid of at least 1 percent, particularly in a range of 19 to 106-percent is conferred as compared to a corresponding non-transformed wild type non-human organism.

[61927] Accordingly, in one embodiment, an increase of 2-hydroxypalmitic acid in a non-human organism, as compared to a corresponding non-transformed wild type non-human organism, is conferred in the process of the invention, if the activity of a polypeptide showing the activity of a polygalacturonase, or if the activity of the polypeptide Yjr153w, preferably represented by SEQ ID NO. 66275, or a homolog or fragment thereof, or if the activity of a polypeptide encoded by a nucleic acid molecule comprising the nucleic acid SEQ ID NO. 66274, preferably the coding region thereof, or a homolog or fragment thereof, e.g. derived from Saccharomyces cerevisiae, is increased or generated. For example the activity of a nucleic acid molecule or a polypeptide comprising the nucleic acid, preferably the coding region thereof, or polypeptide or the consensus sequence or the polypeptide motif, as depicted in Table I, II or IV, application No. 12, column 5 or 8 in the respective same line as the nucleic acid molecule SEQ ID NO. 66274 or polypeptide SEQ ID NO. 66275, respectively, or a homolog or a fragment thereof, is increased or generated, or if the activity polygalacturonase is increased or generated in a non-human organism, like a microorganism or a plant cell, plant or part thereof, especially with non-targeted localization, whereby the respective line discloses in column 7 the fine chemical 2-hydroxypalmitic acid. For example, an increase of the 2-hydroxypalmitic acid of at least 1 percent, particularly in a range of 18 to 22-percent is conferred as compared to a corresponding non-transformed wild type non-human organism.

[61928] Accordingly, in one embodiment, an increase of hexadecatrienoic acid in a non-human organism, as compared to a corresponding non-transformed wild type non-human organism, is conferred in the process of the invention, if the activity of a polypeptide showing the activity of a cyclin, or if the activity of the polypeptide Ylr210w, preferably represented by SEQ ID NO. 129066, or a homolog or fragment thereof, or if the activity of a polypeptide encoded by a nucleic acid molecule comprising the nucleic acid SEQ ID NO. 129065, preferably the coding region thereof, or a homolog or fragment thereof, e.g. derived from Saccharomyces cerevisiae, is increased or generated. For example the activity of a nucleic acid molecule or a polypeptide comprising the nucleic acid, preferably the coding region thereof, or polypeptide or the consensus sequence or the polypeptide motif, as depicted in Table I, II or IV, application No. 12, column 5 or 8 in the respective same line as the nucleic acid molecule SEQ ID NO. 129065 or polypeptide SEQ ID NO. 129066, respectively, or a homolog or a fragment thereof, is increased or generated, or if the activity cyclin is increased or generated in a non-human organism, like a microorganism or a plant cell, plant or part thereof, especially with non-targeted localization, whereby the respective line discloses in column 7 the fine chemical hexadecatrienoic acid. For example, an increase of the hexadecatrienoic acid of at least 1 percent, particularly in a range of 13 to 23-percent is conferred as compared to a corresponding non-transformed wild type non-human organism.

[61929] Accordingly, in one embodiment, an increase of hexadecadienoic acid in a non-human organism, as compared to a corresponding non-transformed wild type non-human organism, is conferred in the process of the invention, if the activity of a polypeptide showing the activity of a ylr326w-protein, or if the activity of the polypeptide Ylr326w, preferably represented by SEQ ID NO. 129124, or a homolog or fragment thereof, or if the activity of a polypeptide encoded by a nucleic acid molecule comprising the nucleic acid SEQ ID NO. 129123, preferably the coding region thereof, or a homolog or fragment thereof, e.g. derived from Saccharomyces cerevisiae, is increased or generated. For example the activity of a nucleic acid molecule or a polypeptide comprising the nucleic acid, preferably the coding region thereof, or polypeptide or the consensus sequence or the polypeptide motif, as depicted in Table I, II or IV, application No. 12, column 5 or 8 in the respective same line as the nucleic acid molecule SEQ ID NO. 129123 or polypeptide SEQ ID NO. 129124, respectively, or a homolog or a fragment thereof, is increased or generated, or if the activity ylr326w-protein is increased or generated in a non-human organism, like a microorganism or a plant cell, plant or part thereof, especially with plastidic localization, whereby the respective line discloses in column 7 the fine chemical hexadecadienoic acid. For example, an increase of the hexadecadienoic acid of at least 1 percent, particularly in a range of 21 to 94-percent is conferred as compared to a corresponding non-transformed wild type non-human organism.

[61930] Accordingly, in one embodiment, an increase of hexadecatrienoic acid in a non-human organism, as compared to a corresponding non-transformed wild type non-human organism, is conferred in the process of the invention, if the activity of a polypeptide showing the activity of a ylr326w-protein, or if the activity of the polypeptide Ylr326w, preferably represented by SEQ ID NO. 129124, or a homolog or fragment thereof, or if the activity of a polypeptide encoded by a nucleic acid molecule comprising the nucleic acid SEQ ID NO. 129123, preferably the coding region thereof, or a homolog or fragment thereof, e.g. derived from Saccharomyces cerevisiae, is increased or generated. For example the activity of a nucleic acid molecule or a polypeptide comprising the nucleic acid, preferably the coding region thereof, or polypeptide or the consensus sequence or the polypeptide motif, as depicted in Table I, II or IV, application No. 12, column 5 or 8 in the respective same line as the nucleic acid molecule SEQ ID NO. 129123 or polypeptide SEQ ID NO. 129124, respectively, or a homolog or a fragment thereof, is increased or generated, or if the activity ylr326w-protein is increased or generated in a non-human organism, like a microorganism or a plant cell, plant or part thereof, especially with plastidic localization, whereby the respective line discloses in column 7 the fine chemical hexadecatrienoic acid. For example, an increase of the hexadecatrienoic acid of at least 1 percent, particularly in a range of 13 to 35-percent is conferred as compared to a corresponding non-transformed wild type non-human organism.

[61931] Accordingly, in one embodiment, an increase of 2-hydroxybehenic acid in a non-human organism, as compared to a corresponding non-transformed wild type non-human organism, is conferred in the process of the invention, if the activity of a polypeptide showing the activity of a yml083c-protein, or if the activity of the polypeptide Yml083c, preferably represented by SEQ ID NO. 91782, or a homolog or fragment thereof, or if the activity of a polypeptide encoded by a nucleic acid molecule comprising the nucleic acid SEQ ID NO. 91781, preferably the coding region thereof, or a homolog or fragment thereof, e.g. derived from Saccharomyces cerevisiae, is increased or generated. For example the activity of a nucleic acid molecule or a polypeptide comprising the nucleic acid, preferably the coding region thereof, or polypeptide or the consensus sequence or the polypeptide motif, as depicted in Table I, II or IV, application No. 12, column 5 or 8 in the respective same line as the nucleic acid molecule SEQ ID NO. 91781 or polypeptide SEQ ID NO. 91782, respectively, or a homolog or a fragment thereof, is increased or generated, or if the activity yml083c-protein is increased or generated in a non-human organism, like a microorganism or a plant cell, plant or part thereof, especially with plastidic localization, whereby the respective line discloses in column 7 the fine chemical 2-hydroxybehenic acid. For example, an increase of the 2-hydroxybehenic acid of at least 1 percent, particularly in a range of 28 to 56-percent is conferred as compared to a corresponding non-transformed wild type non-human organism.

[61932] Accordingly, in one embodiment, an increase of 2-hydroxytetracosenoic acid (preferably 2-hydroxynervonic acid) in a non-human organism, as compared to a corresponding non-transformed wild type non-human organism, is conferred in the process of the invention, if the activity of a polypeptide showing the activity of a yml084w-protein, or if the activity of the polypeptide Yml084w, preferably represented by SEQ ID NO. 15176, or a homolog or fragment thereof, or if the activity of a polypeptide encoded by a nucleic acid molecule comprising the nucleic acid SEQ ID NO. 15175, preferably the coding region thereof, or a homolog or fragment thereof, e.g. derived from Saccharomyces cerevisiae, is increased or generated. For example the activity of a nucleic acid molecule or a polypeptide comprising the nucleic acid, preferably the coding region thereof, or polypeptide or the consensus sequence or the polypeptide motif, as depicted in Table I, II or IV, application No. 12, column 5 or 8 in the respective same line as the nucleic acid molecule SEQ ID NO. 15175 or polypeptide SEQ ID NO. 15176, respectively, or a homolog or a fragment thereof, is increased or generated, or if the activity yml084w-protein is increased or generated in a non-human organism, like a microorganism or a plant cell, plant or part thereof, especially with plastidic localization, whereby the respective line discloses in column 7 the fine chemical 2-hydroxytetracosenoic acid (preferably 2-hydroxynervonic acid). For example, an increase of the 2-hydroxytetracosenoic acid (preferably 2-hydroxynervonic acid) of at least 1 percent, particularly in a range of 26 to 59-percent is conferred as compared to a corresponding non-transformed wild type non-human organism.

[61933] Accordingly, in one embodiment, an increase of 2-hydroxypalmitic acid in a non-human organism, as compared to a corresponding non-transformed wild type non-human organism, is conferred in the process of the invention, if the activity of a polypeptide showing the activity of a molecular chaperone, or if the activity of the polypeptide Ymr186w, preferably represented by SEQ ID NO. 129142, or a homolog or fragment thereof, or if the activity of a polypeptide encoded by a nucleic acid molecule comprising the nucleic acid SEQ ID NO. 129141, preferably the coding region thereof, or a homolog or fragment thereof, e.g. derived from Saccharomyces cerevisiae, is increased or generated. For example the activity of a nucleic acid molecule or a polypeptide comprising the nucleic acid, preferably the coding region thereof, or polypeptide or the consensus sequence or the polypeptide motif, as depicted in Table I, II or IV, application No. 12, column 5 or 8 in the respective same line as the nucleic acid molecule SEQ ID NO. 129141 or polypeptide SEQ ID NO. 129142, respectively, or a homolog or a fragment thereof, is increased or generated, or if the activity molecular chaperone is increased or generated in a non-human organism, like a microorganism or a plant cell, plant or part thereof, especially with plastidic localization, whereby the respective line discloses in column 7 the fine chemical 2-hydroxypalmitic acid. For example, an increase of the 2-hydroxypalmitic acid of at least 1 percent, particularly in a range of 18 to 27-percent is conferred as compared to a corresponding non-transformed wild type non-human organism.

[61934] Accordingly, in one embodiment, an increase of oleic acid in a non-human organism, as compared to a corresponding non-transformed wild type non-human organism, is conferred in the process of the invention, if the activity of a polypeptide showing the activity of a phosphotransferase, or if the activity of the polypeptide Ynl130c, preferably represented by SEQ ID NO. 129471, or a homolog or fragment thereof, or if the activity of a polypeptide encoded by a nucleic acid molecule comprising the nucleic acid SEQ ID NO. 129470, preferably the coding region thereof, or a homolog or fragment thereof, e.g. derived from Saccharomyces cerevisiae, is increased or generated. For example the activity of a nucleic acid molecule or a polypeptide comprising the nucleic acid, preferably the coding region thereof, or polypeptide or the consensus sequence or the polypeptide motif, as depicted in Table I, II or IV, application No. 12, column 5 or 8 in the respective same line as the nucleic acid molecule SEQ ID NO. 129470 or polypeptide SEQ ID NO. 129471, respectively, or a homolog or a fragment thereof, is increased or generated, or if the activity phosphotransferase is increased or generated in a non-human organism, like a microorganism or a plant cell, plant or part thereof, especially with mitochondrial localization, whereby the respective line discloses in column 7 the fine chemical oleic acid. For example, an increase of the oleic acid of at least 1 percent, particularly in a range of 23 to 36-percent is conferred as compared to a corresponding non-transformed wild type non-human organism.

[61935] Accordingly, in one embodiment, an increase of 2-hydroxybehenic acid in a non-human organism, as compared to a corresponding non-transformed wild type non-human organism, is conferred in the process of the invention, if the activity of a polypeptide showing the activity of a ynl321w-protein, or if the activity of the polypeptide Ynl321w, preferably represented by SEQ ID NO. 129547, or a homolog or fragment thereof, or if the activity of a polypeptide encoded by a nucleic acid molecule comprising the nucleic acid SEQ ID NO. 129546, preferably the coding region thereof, or a homolog or fragment thereof, e.g. derived from Saccharomyces cerevisiae, is increased or generated. For example the activity of a nucleic acid molecule or a polypeptide comprising the nucleic acid, preferably the coding region thereof, or polypeptide or the consensus sequence or the polypeptide motif, as depicted in Table I, II or IV, application No. 12, column 5 or 8 in the respective same line as the nucleic acid molecule SEQ ID NO. 129546 or polypeptide SEQ ID NO. 129547, respectively, or a homolog or a fragment thereof, is increased or generated, or if the activity ynl321w-protein is increased or generated in a non-human organism, like a microorganism or a plant cell, plant or part thereof, especially with plastidic localization, whereby the respective line discloses in column 7 the fine chemical 2-hydroxybehenic acid. For example, an increase of the 2-hydroxybehenic acid of at least 1 percent, particularly in a range of 26 to 53-percent is conferred as compared to a corresponding non-transformed wild type non-human organism.

[61936] Accordingly, in one embodiment, an increase of hexadecatrienoic acid in a non-human organism, as compared to a corresponding non-transformed wild type non-human organism, is conferred in the process of the invention, if the activity of a polypeptide showing the activity of a Elongation factor Tu, or if the activity of the polypeptide Yor187w, preferably represented by SEQ ID NO. 129575, or a homolog or fragment thereof, or if the activity of a polypeptide encoded by a nucleic acid molecule comprising the nucleic acid SEQ ID NO. 129574, preferably the coding region thereof, or a homolog or fragment thereof, e.g. derived from Saccharomyces cerevisiae, is increased or generated. For example the activity of a nucleic acid molecule or a polypeptide comprising the nucleic acid, preferably the coding region thereof, or polypeptide or the consensus sequence or the polypeptide motif, as depicted in Table I, II or IV, application No. 12, column 5 or 8 in the respective same line as the nucleic acid molecule SEQ ID NO. 129574 or polypeptide SEQ ID NO. 129575, respectively, or a homolog or a fragment thereof, is increased or generated, or if the activity Elongation factor Tu is increased or generated in a non-human organism, like a microorganism or a plant cell, plant or part thereof, especially with non-targeted localization, whereby the respective line discloses in column 7 the fine chemical hexadecatrienoic acid. For example, an increase of the hexadecatrienoic acid of at least 1 percent, particularly in a range of 17 to 27-percent is conferred as compared to a corresponding non-transformed wild type non-human organism.

[61937] Accordingly, in one embodiment, an increase of 2-hydroxytetracosenoic acid (preferably 2-hydroxynervonic acid) in a non-human organism, as compared to a corresponding non-transformed wild type non-human organism, is conferred in the process of the invention, if the activity of a polypeptide showing the activity of a ATPase epsilon subunit, or if the activity of the polypeptide Ypl271w, preferably represented by SEQ ID NO. 118213, or a homolog or fragment thereof, or if the activity of a polypeptide encoded by a nucleic acid molecule comprising the nucleic acid SEQ ID NO. 118212, preferably the coding region thereof, or a homolog or fragment thereof, e.g. derived from Saccharomyces cerevisiae, is increased or generated. For example the activity of a nucleic acid molecule or a polypeptide comprising the nucleic acid, preferably the coding region thereof, or polypeptide or the consensus sequence or the polypeptide motif, as depicted in Table I, II or IV, application No. 12, column 5 or 8 in the respective same line as the nucleic acid molecule SEQ ID NO. 118212 or polypeptide SEQ ID NO. 118213, respectively, or a homolog or a fragment thereof, is increased or generated, or if the activity ATPase epsilon subunit is increased or generated in a non-human organism, like a microorganism or a plant cell, plant or part thereof, especially with plastidic localization, whereby the respective line discloses in column 7 the fine chemical 2-hydroxytetracosenoic acid (preferably 2-hydroxynervonic acid). For example, an increase of the 2-hydroxytetracosenoic acid (preferably 2-hydroxynervonic acid) of at least 1 percent, particularly in a range of 25 to 75-percent is conferred as compared to a corresponding non-transformed wild type non-human organism.

[61938] Accordingly, in one embodiment, an increase of 2-hydroxypalmitic acid in a non-human organism, as compared to a corresponding non-transformed wild type non-human organism, is conferred in the process of the invention, if the activity of a polypeptide showing the activity of a phosphoadenosine phosphosulfate reductase, or if the activity of the polypeptide Ypr167c, preferably represented by SEQ ID NO. 130182, or a homolog or fragment thereof, or if the activity of a polypeptide encoded by a nucleic acid molecule comprising the nucleic acid SEQ ID NO. 130181, preferably the coding region thereof, or a homolog or fragment thereof, e.g. derived from Saccharomyces cerevisiae, is increased or generated. For example the activity of a nucleic acid molecule or a polypeptide comprising the nucleic acid, preferably the coding region thereof, or polypeptide or the consensus sequence or the polypeptide motif, as depicted in Table I, II or IV, application No. 12, column 5 or 8 in the respective same line as the nucleic acid molecule SEQ ID NO. 130181 or polypeptide SEQ ID NO. 130182, respectively, or a homolog or a fragment thereof, is increased or generated, or if the activity phosphoadenosine phosphosulfate reductase is increased or generated in a non-human organism, like a microorganism or a plant cell, plant or part thereof, especially with plastidic localization, whereby the respective line discloses in column 7 the fine chemical 2-hydroxypalmitic acid. For example, an increase of the 2-hydroxypalmitic acid of at least 1 percent, particularly in a range of 66 to 84-percent is conferred as compared to a corresponding non-transformed wild type non-human organism.

[61939] Accordingly, in one embodiment, an increase of oleic acid in a non-human organism, as compared to a corresponding non-transformed wild type non-human organism, is conferred in the process of the invention, if the activity of a polypeptide showing the activity of a 40S ribosomal protein S17, or if the activity of the polypeptide YDR447C, preferably represented by SEQ ID NO. 128162, or a homolog or fragment thereof, or if the activity of a polypeptide encoded by a nucleic acid molecule comprising the nucleic acid SEQ ID NO. 128161, preferably the coding region thereof, or a homolog or fragment thereof, e.g. derived from Saccharomyces cerevisiae, is increased or generated. For example the activity of a nucleic acid molecule or a polypeptide comprising the nucleic acid, preferably the coding region thereof, or polypeptide or the consensus sequence or the polypeptide motif, as depicted in Table I, II or IV, application No. 12, column 5 or 8 in the respective same line as the nucleic acid molecule SEQ ID NO. 128161 or polypeptide SEQ ID NO. 128162, respectively, or a homolog or a fragment thereof, is increased or generated, or if the activity 40S ribosomal protein S17 is increased or generated in a non-human organism, like a microorganism or a plant cell, plant or part thereof, especially with non-targeted localization, whereby the respective line discloses in column 7 the fine chemical oleic acid. For example, an increase of the oleic acid of at least 1 percent, particularly in a range of 25 to 395-percent is conferred as compared to a corresponding non-transformed wild type non-human organism.

[61940] Accordingly, in one embodiment, an increase of 2-hydroxybehenic acid in a non-human organism, as compared to a corresponding non-transformed wild type non-human organism, is conferred in the process of the invention, if the activity of a polypeptide showing the activity of a b3644-protein, or if the activity of the polypeptide B3644, preferably represented by SEQ ID NO. 125349, or a homolog or fragment thereof, or if the activity of a polypeptide encoded by a nucleic acid molecule comprising the nucleic acid SEQ ID NO. 125348, preferably the coding region thereof, or a homolog or fragment thereof, e.g. derived from Escherichia coli, is increased or generated. For example the activity of a nucleic acid molecule or a polypeptide comprising the nucleic acid, preferably the coding region thereof, or polypeptide or the consensus sequence or the polypeptide motif, as depicted in Table I, II or IV, application No. 12, column 5 or 8 in the respective same line as the nucleic acid molecule SEQ ID NO. 125348 or polypeptide SEQ ID NO. 125349, respectively, or a homolog or a fragment thereof, is increased or generated, or if the activity b3644-protein is increased or generated in a non-human organism, like a microorganism or a plant cell, plant or part thereof, especially with non-targeted localization, whereby the respective line discloses in column 7 the fine chemical 2-hydroxybehenic acid. For example, an increase of the 2-hydroxybehenic acid of at least 1 percent, particularly in a range of 2 to 77-percent is conferred as compared to a corresponding non-transformed wild type non-human organism.

[61941] Accordingly, in one embodiment, an increase of behenic acid in a non-human organism, as compared to a corresponding non-transformed wild type non-human organism, is conferred in the process of the invention, if the activity of a polypeptide showing the activity of a b3644-protein, or if the activity of the polypeptide B3644, preferably represented by SEQ ID NO. 125349, or a homolog or fragment thereof, or if the activity of a polypeptide encoded by a nucleic acid molecule comprising the nucleic acid SEQ ID NO. 125348, preferably the coding region thereof, or a homolog or fragment thereof, e.g. derived from Escherichia coli, is increased or generated. For example the activity of a nucleic acid molecule or a polypeptide comprising the nucleic acid, preferably the coding region thereof, or polypeptide or the consensus sequence or the polypeptide motif, as depicted in Table I, II or IV, application No. 12, column 5 or 8 in the respective same line as the nucleic acid molecule SEQ ID NO. 125348 or polypeptide SEQ ID NO. 125349, respectively, or a homolog or a fragment thereof, is increased or generated, or if the activity b3644-protein is increased or generated in a non-human organism, like a microorganism or a plant cell, plant or part thereof, especially with non-targeted localization, whereby the respective line discloses in column 7 the fine chemical behenic acid. For example, an increase of the behenic acid of at least 1 percent, particularly in a range of 0 to 58-percent is conferred as compared to a corresponding non-transformed wild type non-human organism.

[61942] Accordingly, in one embodiment, an increase of nervonic acid in a non-human organism, as compared to a corresponding non-transformed wild type non-human organism, is conferred in the process of the invention, if the activity of a polypeptide showing the activity of a b3644-protein, or if the activity of the polypeptide B3644, preferably represented by SEQ ID NO. 125349, or a homolog or fragment thereof, or if the activity of a polypeptide encoded by a nucleic acid molecule comprising the nucleic acid SEQ ID NO. 125348, preferably the coding region thereof, or a homolog or fragment thereof, e.g. derived from Escherichia coli, is increased or generated. For example the activity of a nucleic acid molecule or a polypeptide comprising the nucleic acid, preferably the coding region thereof, or polypeptide or the consensus sequence or the polypeptide motif, as depicted in Table I, II or IV, application No. 12, column 5 or 8 in the respective same line as the nucleic acid molecule SEQ ID NO. 125348 or polypeptide SEQ ID NO. 125349, respectively, or a homolog or a fragment thereof, is increased or generated, or if the activity b3644-protein is increased or generated in a non-human organism, like a microorganism or a plant cell, plant or part thereof, especially with non-targeted localization, whereby the respective line discloses in column 7 the fine chemical nervonic acid. For example, an increase of the nervonic acid of at least 1 percent, particularly in a range of 12 to 319 percent is conferred as compared to a corresponding non-transformed wild type non-human organism.

[61943] [0096.1.8.12] to [0103.1.8.12] for the disclosure of these paragraphs see [0096.1.8.8] to [0103.1.8.8] above.

[61944] In this paragraph “A” means “Goffeau et al., Science 274 (5287), 546 (1996)”, “B” means “Blattner et al., Science 277 (5331), 1453 (1997)”, “C” means “Nakamura et al., Nucleic Acids Res. 28(1), 72 (2000)”, “D” means “deposition of the sequences to the EMBL/GenBank/DDBJ databases under “Sequencing of the draft genome assembly of Azotobacter vinelandii AvOP”. in June 2005 by Copeland et al.”, “E” means “Henne et al., Nat. Biotechnol. 22 (5), 547 (2004)”, “F” means “Kaul et al., Nature 408 (6814), 796 (2000)”, and “G” means “Matsumoto et al., Nature 436 (7052), 793 (2005)”.

[61945] The nucleic acid sequence of At1g19670 from Arabidopsis thaliana, e.g. as shown in the respective line in column 5 of Table I, application no. 12, has been published in F. And the activity of the gene product thereof is the activity of chlorophyllase.

[61946] Accordingly, in one embodiment, the process of the present invention for producing cerebronic acid in a non-human organism, like a microorganism or a plant or a part thereof, comprises increasing or generating the activity of a gene product with the activity of a gene product conferring the activity of “chlorophyllase”, especially from Arabidopsis thaliana or its functional equivalent or its homolog, e.g. the increase of
[61947] (a) a gene product of a gene comprising the nucleic acid molecule as shown in the respective line in column 5 of Table I (whereby the respective line discloses in column 7 the fine chemical cerebronic acid), application no. 12, preferably the coding region thereof, or a homolog or a fragment thereof, and being depicted in the same respective line as said At1g19670, or a functional equivalent or a homolog thereof as shown in column 8 of Table I, application no. 12, preferably the coding region thereof, particularly a homolog or functional equivalent as shown in column 8 of Table I B, application no. 12, and being depicted in the same respective line as said At1g19670, and preferably the activity is increased non-targeted, or
[61948] (b) a polypeptide comprising a polypeptide, a consensus sequence or at least a polypeptide motif as shown in the respective line in column 5 of Table II or in column 8 of Table IV, application no. 12, respectively, and being depicted in the same respective line as said At1g19670, or a functional equivalent or a homolog thereof as depicted in column 8 of Table II, application no. 12, preferably a homolog or functional equivalent as depicted in column 8 of Table II B, application no. 12, and being depicted in the same respective line as said At1g19670, and preferably the activity is increased non-targeted, whereby the respective line discloses in column 7 the fine chemical cerebronic acid.

[61949] Accordingly, in one embodiment, the molecule which activity is to be increased in the process of the invention is the gene product with an activity as a “chlorophyllase”, preferably it is the molecule of section (a) or (b) of this paragraph.

[61950] In particular, it was observed that in plants, especially in Arabidopsis thaliana, increasing or generating the activity of a gene product non-targeted with the activity of a “chlorophyllase”, preferably being encoded by a gene comprising the nucleic acid sequence SEQ ID NO. 113651, preferably the coding region thereof, conferred the production of or the increase in cerebronic acid compared with the wild type control.

[61951] The nucleic acid sequence of At1g19670 from Arabidopsis thaliana, e.g. as shown in the respective line in column 5 of Table I, application no. 12, has been published in F. And the activity of the gene product thereof is the activity of chlorophyllase.

[61952] Accordingly, in one embodiment, the process of the present invention for producing 2-hydroxytetracosenoic acid (preferably 2-hydroxynervonic acid) in a non-human organism, like a microorganism or a plant or a part thereof, comprises increasing or generating the activity of a gene product with the activity of a gene product conferring the activity of “chlorophyllase”, especially from Arabidopsis thaliana or its functional equivalent or its homolog, e.g. the increase of
[61953] (a) a gene product of a gene comprising the nucleic acid molecule as shown in the respective line in column 5 of Table I (whereby the respective line discloses in column 7 the fine chemical 2-hydroxytetracosenoic acid (preferably 2-hydroxynervonic acid)), application no. 12, preferably the coding region thereof, or a homolog or a fragment thereof, and being depicted in the same respective line as said At1g19670, or a functional equivalent or a homolog thereof as shown in column 8 of Table I, application no. 12, preferably the coding region thereof, particularly a homolog or functional equivalent as shown in column 8 of Table I B, application no. 12, and being depicted in the same respective line as said At1g19670, and preferably the activity is increased non-targeted, or
[61954] (b) a polypeptide comprising a polypeptide, a consensus sequence or at least a polypeptide motif as shown in the respective line in column 5 of Table II or in column 8 of Table IV, application no. 12, respectively, and being depicted in the same respective line as said At1g19670, or a functional equivalent or a homolog thereof as depicted in column 8 of Table II, application no. 12, preferably a homolog or functional equivalent as depicted in column 8 of Table II B, application no. 12, and being depicted in the same respective line as said At1g19670, and preferably the activity is increased non-targeted, whereby the respective line discloses in column 7 the fine chemical 2-hydroxytetracosenoic acid (preferably 2-hydroxynervonic acid).

[61955] Accordingly, in one embodiment, the molecule which activity is to be increased in the process of the invention is the gene product with an activity as a “chlorophyllase”, preferably it is the molecule of section (a) or (b) of this paragraph.

[61956] In particular, it was observed that in plants, especially in Arabidopsis thaliana, increasing or generating the activity of a gene product non-targeted with the activity of a “chlorophyllase”, preferably being encoded by a gene comprising the nucleic acid sequence SEQ ID NO. 113651, preferably the coding region thereof, conferred the production of or the increase in 2-hydroxytetracosenoic acid (preferably 2-hydroxynervonic acid) compared with the wild type control.

[61957] The nucleic acid sequence of At1g68320 from Arabidopsis thaliana, e.g. as shown in the respective line in column 5 of Table I, application no. 12, has been published in F. And the activity of the gene product thereof is the activity of transcription factor.

[61958] Accordingly, in one embodiment, the process of the present invention for producing hexadecatrienoic acid in a non-human organism, like a microorganism or a plant or a part thereof, comprises increasing or generating the activity of a gene product with the activity of a gene product conferring the activity of “transcription factor”, especially from Arabidopsis thaliana or its functional equivalent or its homolog, e.g. the increase of
[61959] (a) a gene product of a gene comprising the nucleic acid molecule as shown in the respective line in column 5 of Table I (whereby the respective line discloses in column 7 the fine chemical hexadecatrienoic acid), application no. 12, preferably the coding region thereof, or a homolog or a fragment thereof, and being depicted in the same respective line as said At1g68320, or a functional equivalent or a homolog thereof as shown in column 8 of Table I, application no. 12, preferably the coding region thereof, particularly a homolog or functional equivalent as shown in column 8 of Table I B, application no. 12, and being depicted in the same respective line as said At1g68320, and preferably the activity is increased non-targeted, or
[61960] (b) a polypeptide comprising a polypeptide, a consensus sequence or at least a polypeptide motif as shown in the respective line in column 5 of Table II or in column 8 of Table IV, application no. 12, respectively, and being depicted in the same respective line as said At1g68320, or a functional equivalent or a homolog thereof as depicted in column 8 of Table II, application no. 12, preferably a homolog or functional equivalent as depicted in column 8 of Table II B, application no. 12, and being depicted in the same respective line as said At1g68320, and preferably the activity is increased non-targeted, whereby the respective line discloses in column 7 the fine chemical hexadecatrienoic acid.

[61961] Accordingly, in one embodiment, the molecule which activity is to be increased in the process of the invention is the gene product with an activity as a “transcription factor”, preferably it is the molecule of section (a) or (b) of this paragraph.

[61962] In particular, it was observed that in plants, especially in Arabidopsis thaliana, increasing or generating the activity of a gene product non-targeted with the activity of a “transcription factor”, preferably being encoded by a gene comprising the nucleic acid sequence SEQ ID NO. 1061, preferably the coding region thereof, conferred the production of or the increase in hexadecatrienoic acid compared with the wild type control.

[61963] The nucleic acid sequence of At1g72770 from Arabidopsis thaliana, e.g. as shown in the respective line in column 5 of Table I, application no. 12, has been published in F. And the activity of the gene product thereof is the activity of protein phosphatase.

[61964] Accordingly, in one embodiment, the process of the present invention for producing cerebronic acid in a non-human organism, like a microorganism or a plant or a part thereof, comprises increasing or generating the activity of a gene product with the activity of a gene product conferring the activity of “protein phosphatase”, especially from Arabidopsis thaliana or its functional equivalent or its homolog, e.g. the increase of
[61965] (a) a gene product of a gene comprising the nucleic acid molecule as shown in the respective line in column 5 of Table I (whereby the respective line discloses in column 7 the fine chemical cerebronic acid), application no. 12, preferably the coding region thereof, or a homolog or a fragment thereof, and being depicted in the same respective line as said At1g72770, or a functional equivalent or a homolog thereof as shown in column 8 of Table I, application no. 12, preferably the coding region thereof, particularly a homolog or functional equivalent as shown in column 8 of Table I B, application no. 12, and being depicted in the same respective line as said At1g72770, and preferably the activity is increased non-targeted, or
[61966] (b) a polypeptide comprising a polypeptide, a consensus sequence or at least a polypeptide motif as shown in the respective line in column 5 of Table II or in column 8 of Table IV, application no. 12, respectively, and being depicted in the same respective line as said At1g72770, or a functional equivalent or a homolog thereof as depicted in column 8 of Table II, application no. 12, preferably a homolog or functional equivalent as depicted in column 8 of Table II B, application no. 12, and being depicted in the same respective line as said At1g72770, and preferably the activity is increased non-targeted, whereby the respective line discloses in column 7 the fine chemical cerebronic acid.

[61967] Accordingly, in one embodiment, the molecule which activity is to be increased in the process of the invention is the gene product with an activity as a “protein phosphatase”, preferably it is the molecule of section (a) or (b) of this paragraph.

[61968] In particular, it was observed that in plants, especially in Arabidopsis thaliana, increasing or generating the activity of a gene product non-targeted with the activity of a “protein phosphatase”, preferably being encoded by a gene comprising the nucleic acid sequence SEQ ID NO. 19419, preferably the coding region thereof, conferred the production of or the increase in cerebronic acid compared with the wild type control.

[61969] The nucleic acid sequence of At1g72770 from Arabidopsis thaliana, e.g. as shown in the respective line in column 5 of Table I, application no. 12, has been published in F. And the activity of the gene product thereof is the activity of protein phosphatase.

[61970] Accordingly, in one embodiment, the process of the present invention for producing hexadecatrienoic acid in a non-human organism, like a microorganism or a plant or a part thereof, comprises increasing or generating the activity of a gene product with the activity of a gene product conferring the activity of “protein phosphatase”, especially from Arabidopsis thaliana or its functional equivalent or its homolog, e.g. the increase of
[61971] (a) a gene product of a gene comprising the nucleic acid molecule as shown in the respective line in column 5 of Table I (whereby the respective line discloses in column 7 the fine chemical hexadecatrienoic acid), application no. 12, preferably the coding region thereof, or a homolog or a fragment thereof, and being depicted in the same respective line as said At1g72770, or a functional equivalent or a homolog thereof as shown in column 8 of Table I, application no. 12, preferably the coding region thereof, particularly a homolog or functional equivalent as shown in column 8 of Table I B, application no. 12, and being depicted in the same respective line as said At1g72770, and preferably the activity is increased non-targeted, or
[61972] (b) a polypeptide comprising a polypeptide, a consensus sequence or at least a polypeptide motif as shown in the respective line in column 5 of Table II or in column 8 of Table IV, application no. 12, respectively, and being depicted in the same respective line as said At1g72770, or a functional equivalent or a homolog thereof as depicted in column 8 of Table II, application no. 12, preferably a homolog or functional equivalent as depicted in column 8 of Table II B, application no. 12, and being depicted in the same respective line as said At1g72770, and preferably the activity is increased non-targeted, whereby the respective line discloses in column 7 the fine chemical hexadecatrienoic acid.

[61973] Accordingly, in one embodiment, the molecule which activity is to be increased in the process of the invention is the gene product with an activity as a “protein phosphatase”, preferably it is the molecule of section (a) or (b) of this paragraph.

[61974] In particular, it was observed that in plants, especially in Arabidopsis thaliana, increasing or generating the activity of a gene product non-targeted with the activity of a “protein phosphatase”, preferably being encoded by a gene comprising the nucleic acid sequence SEQ ID NO. 19419, preferably the coding region thereof, conferred the production of or the increase in hexadecatrienoic acid compared with the wild type control.

[61975] The nucleic acid sequence of At1g72770 from Arabidopsis thaliana, e.g. as shown in the respective line in column 5 of Table I, application no. 12, has been published in F. And the activity of the gene product thereof is the activity of protein phosphatase.

[61976] Accordingly, in one embodiment, the process of the present invention for producing 2-hydroxybehenic acid in a non-human organism, like a microorganism or a plant or a part thereof, comprises increasing or generating the activity of a gene product with the activity of a gene product conferring the activity of “protein phosphatase”, especially from Arabidopsis thaliana or its functional equivalent or its homolog, e.g. the increase of
[61977] (a) a gene product of a gene comprising the nucleic acid molecule as shown in the respective line in column 5 of Table I (whereby the respective line discloses in column 7 the fine chemical 2-hydroxybehenic acid), application no. 12, preferably the coding region thereof, or a homolog or a fragment thereof, and being depicted in the same respective line as said At1g72770, or a functional equivalent or a homolog thereof as shown in column 8 of Table I, application no. 12, preferably the coding region thereof, particularly a homolog or functional equivalent as shown in column 8 of Table I B, application no. 12, and being depicted in the same respective line as said At1g72770, and preferably the activity is increased non-targeted, or
[61978] (b) a polypeptide comprising a polypeptide, a consensus sequence or at least a polypeptide motif as shown in the respective line in column 5 of Table II or in column 8 of Table IV, application no. 12, respectively, and being depicted in the same respective line as said At1g72770, or a functional equivalent or a homolog thereof as depicted in column 8 of Table II, application no. 12, preferably a homolog or functional equivalent as depicted in column 8 of Table II B, application no. 12, and being depicted in the same respective line as said At1g72770, and preferably the activity is increased non-targeted, whereby the respective line discloses in column 7 the fine chemical 2-hydroxybehenic acid.

[61979] Accordingly, in one embodiment, the molecule which activity is to be increased in the process of the invention is the gene product with an activity as a “protein phosphatase”, preferably it is the molecule of section (a) or (b) of this paragraph.

[61980] In particular, it was observed that in plants, especially in Arabidopsis thaliana, increasing or generating the activity of a gene product non-targeted with the activity of a “protein phosphatase”, preferably being encoded by a gene comprising the nucleic acid sequence SEQ ID NO. 19419, preferably the coding region thereof, conferred the production of or the increase in 2-hydroxybehenic acid compared with the wild type control.

[61981] The nucleic acid sequence of At2g33510 from Arabidopsis thaliana, e.g. as shown in the respective line in column 5 of Table I, application no. 12, has been published in F. And the activity of the gene product thereof is the activity of At2g33510-protein.

[61982] Accordingly, in one embodiment, the process of the present invention for producing 2-hydroxypalmitic acid in a non-human organism, like a microorganism or a plant or a part thereof, comprises increasing or generating the activity of a gene product with the activity of a gene product conferring the activity of “At2g33510-protein”, especially from Arabidopsis thaliana or its functional equivalent or its homolog, e.g. the increase of
[61983] (a) a gene product of a gene comprising the nucleic acid molecule as shown in the respective line in column 5 of Table I (whereby the respective line discloses in column 7 the fine chemical 2-hydroxypalmitic acid), application no. 12, preferably the coding region thereof, or a homolog or a fragment thereof, and being depicted in the same respective line as said At2g33510, or a functional equivalent or a homolog thereof as shown in column 8 of Table I, application no. 12, preferably the coding region thereof, particularly a homolog or functional equivalent as shown in column 8 of Table I B, application no. 12, and being depicted in the same respective line as said At2g33510, and preferably the activity is increased non-targeted, or
[61984] (b) a polypeptide comprising a polypeptide, a consensus sequence or at least a polypeptide motif as shown in the respective line in column 5 of Table II or in column 8 of Table IV, application no. 12, respectively, and being depicted in the same respective line as said At2g33510, or a functional equivalent or a homolog thereof as depicted in column 8 of Table II, application no. 12, preferably a homolog or functional equivalent as depicted in column 8 of Table II B, application no. 12, and being depicted in the same respective line as said At2g33510, and preferably the activity is increased non-targeted, whereby the respective line discloses in column 7 the fine chemical 2-hydroxypalmitic acid.

[61985] Accordingly, in one embodiment, the molecule which activity is to be increased in the process of the invention is the gene product with an activity as a “At2g33510-protein”, preferably it is the molecule of section (a) or (b) of this paragraph.

[61986] In particular, it was observed that in plants, especially in Arabidopsis thaliana, increasing or generating the activity of a gene product non-targeted with the activity of a “At2g33510-protein”, preferably being encoded by a gene comprising the nucleic acid sequence SEQ ID NO. 98522, preferably the coding region thereof, conferred the production of or the increase in 2-hydroxypalmitic acid compared with the wild type control.

[61987] The nucleic acid sequence of At3g02990 from Arabidopsis thaliana, e.g. as shown in the respective line in column 5 of Table I, application no. 12, has been published in F. And the activity of the gene product thereof is the activity of heat shock transcription factor.

[61988] Accordingly, in one embodiment, the process of the present invention for producing 2-hydroxytetracosenoic acid (preferably 2-hydroxynervonic acid) in a non-human organism, like a microorganism or a plant or a part thereof, comprises increasing or generating the activity of a gene product with the activity of a gene product conferring the activity of “heat shock transcription factor”, especially from Arabidopsis thaliana or its functional equivalent or its homolog, e.g. the increase of
[61989] (a) a gene product of a gene comprising the nucleic acid molecule as shown in the respective line in column 5 of Table I (whereby the respective line discloses in column 7 the fine chemical 2-hydroxytetracosenoic acid (preferably 2-hydroxynervonic acid)), application no. 12, preferably the coding region thereof, or a homolog or a fragment thereof, and being depicted in the same respective line as said At3g02990, or a functional equivalent or a homolog thereof as shown in column 8 of Table I, application no. 12, preferably the coding region thereof, particularly a homolog or functional equivalent as shown in column 8 of Table I B, application no. 12, and being depicted in the same respective line as said At3g02990, and preferably the activity is increased non-targeted, or
[61990] (b) a polypeptide comprising a polypeptide, a consensus sequence or at least a polypeptide motif as shown in the respective line in column 5 of Table II or in column 8 of Table IV, application no. 12, respectively, and being depicted in the same respective line as said At3g02990, or a functional equivalent or a homolog thereof as depicted in column 8 of Table II, application no. 12, preferably a homolog or functional equivalent as depicted in column 8 of Table II B, application no. 12, and being depicted in the same respective line as said At3g02990, and preferably the activity is increased non-targeted, whereby the respective line discloses in column 7 the fine chemical 2-hydroxytetracosenoic acid (preferably 2-hydroxynervonic acid).

[61991] Accordingly, in one embodiment, the molecule which activity is to be increased in the process of the invention is the gene product with an activity as a “heat shock transcription factor”, preferably it is the molecule of section (a) or (b) of this paragraph.

[61992] In particular, it was observed that in plants, especially in Arabidopsis thaliana, increasing or generating the activity of a gene product non-targeted with the activity of a “heat shock transcription factor”, preferably being encoded by a gene comprising the nucleic acid sequence SEQ ID NO. 68657, preferably the coding region thereof, conferred the production of or the increase in 2-hydroxytetracosenoic acid (preferably 2-hydroxynervonic acid) compared with the wild type control.

[61993] The nucleic acid sequence of At3g09820 from Arabidopsis thaliana, e.g. as shown in the respective line in column 5 of Table I, application no. 12, has been published in F. And the activity of the gene product thereof is the activity of adenosine kinase.

[61994] Accordingly, in one embodiment, the process of the present invention for producing cerebronic acid in a non-human organism, like a microorganism or a plant or a part thereof, comprises increasing or generating the activity of a gene product with the activity of a gene product conferring the activity of “adenosine kinase”, especially from Arabidopsis thaliana or its functional equivalent or its homolog, e.g. the increase of
[61995] (a) a gene product of a gene comprising the nucleic acid molecule as shown in the respective line in column 5 of Table I (whereby the respective line discloses in column 7 the fine chemical cerebronic acid), application no. 12, preferably the coding region thereof, or a homolog or a fragment thereof, and being depicted in the same respective line as said At3g09820, or a functional equivalent or a homolog thereof as shown in column 8 of Table I, application no. 12, preferably the coding region thereof, particularly a homolog or functional equivalent as shown in column 8 of Table I B, application no. 12, and being depicted in the same respective line as said At3g09820, and preferably the activity is increased non-targeted, or
[61996] (b) a polypeptide comprising a polypeptide, a consensus sequence or at least a polypeptide motif as shown in the respective line in column 5 of Table II or in column 8 of Table IV, application no. 12, respectively, and being depicted in the same respective line as said At3g09820, or a functional equivalent or a homolog thereof as depicted in column 8 of Table II, application no. 12, preferably a homolog or functional equivalent as depicted in column 8 of Table II B, application no. 12, and being depicted in the same respective line as said At3g09820, and preferably the activity is increased non-targeted, whereby the respective line discloses in column 7 the fine chemical cerebronic acid.

[61997] Accordingly, in one embodiment, the molecule which activity is to be increased in the process of the invention is the gene product with an activity as a “adenosine kinase”, preferably it is the molecule of section (a) or (b) of this paragraph.

[61998] In particular, it was observed that in plants, especially in Arabidopsis thaliana, increasing or generating the activity of a gene product non-targeted with the activity of a “adenosine kinase”, preferably being encoded by a gene comprising the nucleic acid sequence SEQ ID NO. 1696, preferably the coding region thereof, conferred the production of or the increase in cerebronic acid compared with the wild type control.

[61999] The nucleic acid sequence of At3g09820 from Arabidopsis thaliana, e.g. as shown in the respective line in column 5 of Table I, application no. 12, has been published in F. And the activity of the gene product thereof is the activity of adenosine kinase.

[62000] Accordingly, in one embodiment, the process of the present invention for producing 2-hydroxybehenic acid in a non-human organism, like a microorganism or a plant or a part thereof, comprises increasing or generating the activity of a gene product with the activity of a gene product conferring the activity of “adenosine kinase”, especially from Arabidopsis thaliana or its functional equivalent or its homolog, e.g. the increase of
[62001] (a) a gene product of a gene comprising the nucleic acid molecule as shown in the respective line in column 5 of Table I (whereby the respective line discloses in column 7 the fine chemical 2-hydroxybehenic acid), application no. 12, preferably the coding region thereof, or a homolog or a fragment thereof, and being depicted in the same respective line as said At3g09820, or a functional equivalent or a homolog thereof as shown in column 8 of Table I, application no. 12, preferably the coding region thereof, particularly a homolog or functional equivalent as shown in column 8 of Table I B, application no. 12, and being depicted in the same respective line as said At3g09820, and preferably the activity is increased non-targeted, or
[62002] (b) a polypeptide comprising a polypeptide, a consensus sequence or at least a polypeptide motif as shown in the respective line in column 5 of Table II or in column 8 of Table IV, application no. 12, respectively, and being depicted in the same respective line as said At3g09820, or a functional equivalent or a homolog thereof as depicted in column 8 of Table II, application no. 12, preferably a homolog or functional equivalent as depicted in column 8 of Table II B, application no. 12, and being depicted in the same respective line as said At3g09820, and preferably the activity is increased non-targeted, whereby the respective line discloses in column 7 the fine chemical 2-hydroxybehenic acid.

[62003] Accordingly, in one embodiment, the molecule which activity is to be increased in the process of the invention is the gene product with an activity as a “adenosine kinase”, preferably it is the molecule of section (a) or (b) of this paragraph.

[62004] In particular, it was observed that in plants, especially in Arabidopsis thaliana, increasing or generating the activity of a gene product non-targeted with the activity of a “adenosine kinase”, preferably being encoded by a gene comprising the nucleic acid sequence SEQ ID NO. 1696, preferably the coding region thereof, conferred the production of or the increase in 2-hydroxybehenic acid compared with the wild type control.

[62005] The nucleic acid sequence of At3g18524 from Arabidopsis thaliana, e.g. as shown in the respective line in column 5 of Table I, application no. 12, has been published in F. And the activity of the gene product thereof is the activity of DNA mismatch repair protein.

[62006] Accordingly, in one embodiment, the process of the present invention for producing 2-hydroxytetracosenoic acid (preferably 2-hydroxynervonic acid) in a non-human organism, like a microorganism or a plant or a part thereof, comprises increasing or generating the activity of a gene product with the activity of a gene product conferring the activity of “DNA mismatch repair protein”, especially from Arabidopsis thaliana or its functional equivalent or its homolog, e.g. the increase of
[62007] (a) a gene product of a gene comprising the nucleic acid molecule as shown in the respective line in column 5 of Table I (whereby the respective line discloses in column 7 the fine chemical 2-hydroxytetracosenoic acid (preferably 2-hydroxynervonic acid)), application no. 12, preferably the coding region thereof, or a homolog or a fragment thereof, and being depicted in the same respective line as said At3g18524, or a functional equivalent or a homolog thereof as shown in column 8 of Table I, application no. 12, preferably the coding region thereof, particularly a homolog or functional equivalent as shown in column 8 of Table I B, application no. 12, and being depicted in the same respective line as said At3g18524, and preferably the activity is increased non-targeted, or
[62008] (b) a polypeptide comprising a polypeptide, a consensus sequence or at least a polypeptide motif as shown in the respective line in column 5 of Table II or in column 8 of Table IV, application no. 12, respectively, and being depicted in the same respective line as said At3g18524, or a functional equivalent or a homolog thereof as depicted in column 8 of Table II, application no. 12, preferably a homolog or functional equivalent as depicted in column 8 of Table II B, application no. 12, and being depicted in the same respective line as said At3g18524, and preferably the activity is increased non-targeted, whereby the respective line discloses in column 7 the fine chemical 2-hydroxytetracosenoic acid (preferably 2-hydroxynervonic acid).

[62009] Accordingly, in one embodiment, the molecule which activity is to be increased in the process of the invention is the gene product with an activity as a “DNA mismatch repair protein”, preferably it is the molecule of section (a) or (b) of this paragraph.

[62010] In particular, it was observed that in plants, especially in Arabidopsis thaliana, increasing or generating the activity of a gene product non-targeted with the activity of a “DNA mismatch repair protein”, preferably being encoded by a gene comprising the nucleic acid sequence SEQ ID NO. 22832, preferably the coding region thereof, conferred the production of or the increase in 2-hydroxytetracosenoic acid (preferably 2-hydroxynervonic acid) compared with the wild type control.

[62011] The nucleic acid sequence of At3g62950 from Arabidopsis thaliana, e.g. as shown in the respective line in column 5 of Table I, application no. 12, has been published in F. And the activity of the gene product thereof is the activity of glutaredoxin.

[62012] Accordingly, in one embodiment, the process of the present invention for producing cerebronic acid in a non-human organism, like a microorganism or a plant or a part thereof, comprises increasing or generating the activity of a gene product with the activity of a gene product conferring the activity of “glutaredoxin”, especially from Arabidopsis thaliana or its functional equivalent or its homolog, e.g. the increase of
[62013] (a) a gene product of a gene comprising the nucleic acid molecule as shown in the respective line in column 5 of Table I (whereby the respective line discloses in column 7 the fine chemical cerebronic acid), application no. 12, preferably the coding region thereof, or a homolog or a fragment thereof, and being depicted in the same respective line as said At3g62950, or a functional equivalent or a homolog thereof as shown in column 8 of Table I, application no. 12, preferably the coding region thereof, particularly a homolog or functional equivalent as shown in column 8 of Table I B, application no. 12, and being depicted in the same respective line as said At3g62950, and preferably the activity is increased non-targeted, or
[62014] (b) a polypeptide comprising a polypeptide, a consensus sequence or at least a polypeptide motif as shown in the respective line in column 5 of Table II or in column 8 of Table IV, application no. 12, respectively, and being depicted in the same respective line as said At3g62950, or a functional equivalent or a homolog thereof as depicted in column 8 of Table II, application no. 12, preferably a homolog or functional equivalent as depicted in column 8 of Table II B, application no. 12, and being depicted in the same respective line as said At3g62950, and preferably the activity is increased non-targeted, whereby the respective line discloses in column 7 the fine chemical cerebronic acid.

[62015] Accordingly, in one embodiment, the molecule which activity is to be increased in the process of the invention is the gene product with an activity as a “glutaredoxin”, preferably it is the molecule of section (a) or (b) of this paragraph.

[62016] In particular, it was observed that in plants, especially in Arabidopsis thaliana, increasing or generating the activity of a gene product non-targeted with the activity of a “glutaredoxin”, preferably being encoded by a gene comprising the nucleic acid sequence SEQ ID NO. 2935, preferably the coding region thereof, conferred the production of or the increase in cerebronic acid compared with the wild type control.

[62017] The nucleic acid sequence of At3g62950 from Arabidopsis thaliana, e.g. as shown in the respective line in column 5 of Table I, application no. 12, has been published in F. And the activity of the gene product thereof is the activity of glutaredoxin.

[62018] Accordingly, in one embodiment, the process of the present invention for producing hexadecatrienoic acid in a non-human organism, like a microorganism or a plant or a part thereof, comprises increasing or generating the activity of a gene product with the activity of a gene product conferring the activity of “glutaredoxin”, especially from Arabidopsis thaliana or its functional equivalent or its homolog, e.g. the increase of
[62019] (a) a gene product of a gene comprising the nucleic acid molecule as shown in the respective line in column 5 of Table I (whereby the respective line discloses in column 7 the fine chemical hexadecatrienoic acid), application no. 12, preferably the coding region thereof, or a homolog or a fragment thereof, and being depicted in the same respective line as said At3g62950, or a functional equivalent or a homolog thereof as shown in column 8 of Table I, application no. 12, preferably the coding region thereof, particularly a homolog or functional equivalent as shown in column 8 of Table I B, application no. 12, and being depicted in the same respective line as said At3g62950, and preferably the activity is increased non-targeted, or
[62020] (b) a polypeptide comprising a polypeptide, a consensus sequence or at least a polypeptide motif as shown in the respective line in column 5 of Table II or in column 8 of Table IV, application no. 12, respectively, and being depicted in the same respective line as said At3g62950, or a functional equivalent or a homolog thereof as depicted in column 8 of Table II, application no. 12, preferably a homolog or functional equivalent as depicted in column 8 of Table II B, application no. 12, and being depicted in the same respective line as said At3g62950, and preferably the activity is increased non-targeted, whereby the respective line discloses in column 7 the fine chemical hexadecatrienoic acid.

[62021] Accordingly, in one embodiment, the molecule which activity is to be increased in the process of the invention is the gene product with an activity as a “glutaredoxin”, preferably it is the molecule of section (a) or (b) of this paragraph.

[62022] In particular, it was observed that in plants, especially in Arabidopsis thaliana, increasing or generating the activity of a gene product non-targeted with the activity of a “glutaredoxin”, preferably being encoded by a gene comprising the nucleic acid sequence SEQ ID NO. 2935, preferably the coding region thereof, conferred the production of or the increase in hexadecatrienoic acid compared with the wild type control.

[62023] The nucleic acid sequence of At3g62950 from Arabidopsis thaliana, e.g. as shown in the respective line in column 5 of Table I, application no. 12, has been published in F. And the activity of the gene product thereof is the activity of glutaredoxin.

[62024] Accordingly, in one embodiment, the process of the present invention for producing 2-hydroxybehenic acid in a non-human organism, like a microorganism or a plant or a part thereof, comprises increasing or generating the activity of a gene product with the activity of a gene product conferring the activity of “glutaredoxin”, especially from Arabidopsis thaliana or its functional equivalent or its homolog, e.g. the increase of
[62025] (a) a gene product of a gene comprising the nucleic acid molecule as shown in the respective line in column 5 of Table I (whereby the respective line discloses in column 7 the fine chemical 2-hydroxybehenic acid), application no. 12, preferably the coding region thereof, or a homolog or a fragment thereof, and being depicted in the same respective line as said At3g62950, or a functional equivalent or a homolog thereof as shown in column 8 of Table I, application no. 12, preferably the coding region thereof, particularly a homolog or functional equivalent as shown in column 8 of Table I B, application no. 12, and being depicted in the same respective line as said At3g62950, and preferably the activity is increased non-targeted, or
[62026] (b) a polypeptide comprising a polypeptide, a consensus sequence or at least a polypeptide motif as shown in the respective line in column 5 of Table II or in column 8 of Table IV, application no. 12, respectively, and being depicted in the same respective line as said At3g62950, or a functional equivalent or a homolog thereof as depicted in column 8 of Table II, application no. 12, preferably a homolog or functional equivalent as depicted in column 8 of Table II B, application no. 12, and being depicted in the same respective line as said At3g62950, and preferably the activity is increased non-targeted, whereby the respective line discloses in column 7 the fine chemical 2-hydroxybehenic acid.

[62027] Accordingly, in one embodiment, the molecule which activity is to be increased in the process of the invention is the gene product with an activity as a “glutaredoxin”, preferably it is the molecule of section (a) or (b) of this paragraph.

[62028] In particular, it was observed that in plants, especially in Arabidopsis thaliana, increasing or generating the activity of a gene product non-targeted with the activity of a “glutaredoxin”, preferably being encoded by a gene comprising the nucleic acid sequence SEQ ID NO. 2935, preferably the coding region thereof, conferred the production of or the increase in 2-hydroxybehenic acid compared with the wild type control.

[62029] The nucleic acid sequence of At4g09960 from Arabidopsis thaliana, e.g. as shown in the respective line in column 5 of Table I, application no. 12, has been published in F. And the activity of the gene product thereof is the activity of transcription factor.

[62030] Accordingly, in one embodiment, the process of the present invention for producing 2-hydroxypalmitic acid in a non-human organism, like a microorganism or a plant or a part thereof, comprises increasing or generating the activity of a gene product with the activity of a gene product conferring the activity of “transcription factor”, especially from Arabidopsis thaliana or its functional equivalent or its homolog, e.g. the increase of
[62031] (a) a gene product of a gene comprising the nucleic acid molecule as shown in the respective line in column 5 of Table I (whereby the respective line discloses in column 7 the fine chemical 2-hydroxypalmitic acid), application no. 12, preferably the coding region thereof, or a homolog or a fragment thereof, and being depicted in the same respective line as said At4g09960, or a functional equivalent or a homolog thereof as shown in column 8 of Table I, application no. 12, preferably the coding region thereof, particularly a homolog or functional equivalent as shown in column 8 of Table I B, application no. 12, and being depicted in the same respective line as said At4g09960, and preferably the activity is increased non-targeted, or
[62032] (b) a polypeptide comprising a polypeptide, a consensus sequence or at least a polypeptide motif as shown in the respective line in column 5 of Table II or in column 8 of Table IV, application no. 12, respectively, and being depicted in the same respective line as said At4g09960, or a functional equivalent or a homolog thereof as depicted in column 8 of Table II, application no. 12, preferably a homolog or functional equivalent as depicted in column 8 of Table II B, application no. 12, and being depicted in the same respective line as said At4g09960, and preferably the activity is increased non-targeted, whereby the respective line discloses in column 7 the fine chemical 2-hydroxypalmitic acid.

[62033] Accordingly, in one embodiment, the molecule which activity is to be increased in the process of the invention is the gene product with an activity as a “transcription factor”, preferably it is the molecule of section (a) or (b) of this paragraph.

[62034] In particular, it was observed that in plants, especially in Arabidopsis thaliana, increasing or generating the activity of a gene product non-targeted with the activity of a “transcription factor”, preferably being encoded by a gene comprising the nucleic acid sequence SEQ ID NO. 109717, preferably the coding region thereof, conferred the production of or the increase in 2-hydroxypalmitic acid compared with the wild type control.

[62035] The nucleic acid sequence of At4g15660 from Arabidopsis thaliana, e.g. as shown in the respective line in column 5 of Table I, application no. 12, has been published in F. And the activity of the gene product thereof is the activity of monothiol glutaredoxin.

[62036] Accordingly, in one embodiment, the process of the present invention for producing 2-hydroxybehenic acid in a non-human organism, like a microorganism or a plant or a part thereof, comprises increasing or generating the activity of a gene product with the activity of a gene product conferring the activity of “monothiol glutaredoxin”, especially from Arabidopsis thaliana or its functional equivalent or its homolog, e.g. the increase of
[62037] (a) a gene product of a gene comprising the nucleic acid molecule as shown in the respective line in column 5 of Table I (whereby the respective line discloses in column 7 the fine chemical 2-hydroxybehenic acid), application no. 12, preferably the coding region thereof, or a homolog or a fragment thereof, and being depicted in the same respective line as said At4g15660, or a functional equivalent or a homolog thereof as shown in column 8 of Table I, application no. 12, preferably the coding region thereof, particularly a homolog or functional equivalent as shown in column 8 of Table I B, application no. 12, and being depicted in the same respective line as said At4g15660, and preferably the activity is increased non-targeted, or
[62038] (b) a polypeptide comprising a polypeptide, a consensus sequence or at least a polypeptide motif as shown in the respective line in column 5 of Table II or in column 8 of Table IV, application no. 12, respectively, and being depicted in the same respective line as said At4g15660, or a functional equivalent or a homolog thereof as depicted in column 8 of Table II, application no. 12, preferably a homolog or functional equivalent as depicted in column 8 of Table II B, application no. 12, and being depicted in the same respective line as said At4g15660, and preferably the activity is increased non-targeted, whereby the respective line discloses in column 7 the fine chemical 2-hydroxybehenic acid.

[62039] Accordingly, in one embodiment, the molecule which activity is to be increased in the process of the invention is the gene product with an activity as a “monothiol glutaredoxin”, preferably it is the molecule of section (a) or (b) of this paragraph.

[62040] In particular, it was observed that in plants, especially in Arabidopsis thaliana, increasing or generating the activity of a gene product non-targeted with the activity of a “monothiol glutaredoxin”, preferably being encoded by a gene comprising the nucleic acid sequence SEQ ID NO. 23482, preferably the coding region thereof, conferred the production of or the increase in 2-hydroxybehenic acid compared with the wild type control.

[62041] The nucleic acid sequence of At4g15660 from Arabidopsis thaliana, e.g. as shown in the respective line in column 5 of Table I, application no. 12, has been published in F. And the activity of the gene product thereof is the activity of monothiol glutaredoxin.

[62042] Accordingly, in one embodiment, the process of the present invention for producing 2-hydroxypalmitic acid in a non-human organism, like a microorganism or a plant or a part thereof, comprises increasing or generating the activity of a gene product with the activity of a gene product conferring the activity of “monothiol glutaredoxin”, especially from Arabidopsis thaliana or its functional equivalent or its homolog, e.g. the increase of
[62043] (a) a gene product of a gene comprising the nucleic acid molecule as shown in the respective line in column 5 of Table I (whereby the respective line discloses in column 7 the fine chemical 2-hydroxypalmitic acid), application no. 12, preferably the coding region thereof, or a homolog or a fragment thereof, and being depicted in the same respective line as said At4g15660, or a functional equivalent or a homolog thereof as shown in column 8 of Table I, application no. 12, preferably the coding region thereof, particularly a homolog or functional equivalent as shown in column 8 of Table I B, application no. 12, and being depicted in the same respective line as said At4g15660, and preferably the activity is increased non-targeted, or
[62044] (b) a polypeptide comprising a polypeptide, a consensus sequence or at least a polypeptide motif as shown in the respective line in column 5 of Table II or in column 8 of Table IV, application no. 12, respectively, and being depicted in the same respective line as said At4g15660, or a functional equivalent or a homolog thereof as depicted in column 8 of Table II, application no. 12, preferably a homolog or functional equivalent as depicted in column 8 of Table II B, application no. 12, and being depicted in the same respective line as said At4g15660, and preferably the activity is increased non-targeted, whereby the respective line discloses in column 7 the fine chemical 2-hydroxypalmitic acid.

[62045] Accordingly, in one embodiment, the molecule which activity is to be increased in the process of the invention is the gene product with an activity as a “monothiol glutaredoxin”, preferably it is the molecule of section (a) or (b) of this paragraph.

[62046] In particular, it was observed that in plants, especially in Arabidopsis thaliana, increasing or generating the activity of a gene product non-targeted with the activity of a “monothiol glutaredoxin”, preferably being encoded by a gene comprising the nucleic acid sequence SEQ ID NO. 23482, preferably the coding region thereof, conferred the production of or the increase in 2-hydroxypalmitic acid compared with the wild type control.

[62047] The nucleic acid sequence of At4g15670 from Arabidopsis thaliana, e.g. as shown in the respective line in column 5 of Table I, application no. 12, has been published in F. And the activity of the gene product thereof is the activity of monothiol glutaredoxin.

[62048] Accordingly, in one embodiment, the process of the present invention for producing hexadecatrienoic acid in a non-human organism, like a microorganism or a plant or a part thereof, comprises increasing or generating the activity of a gene product with the activity of a gene product conferring the activity of “monothiol glutaredoxin”, especially from Arabidopsis thaliana or its functional equivalent or its homolog, e.g. the increase of
[62049] (a) a gene product of a gene comprising the nucleic acid molecule as shown in the respective line in column 5 of Table I (whereby the respective line discloses in column 7 the fine chemical hexadecatrienoic acid), application no. 12, preferably the coding region thereof, or a homolog or a fragment thereof, and being depicted in the same respective line as said At4g15670, or a functional equivalent or a homolog thereof as shown in column 8 of Table I, application no. 12, preferably the coding region thereof, particularly a homolog or functional equivalent as shown in column 8 of Table I B, application no. 12, and being depicted in the same respective line as said At4g15670, and preferably the activity is increased non-targeted, or
[62050] (b) a polypeptide comprising a polypeptide, a consensus sequence or at least a polypeptide motif as shown in the respective line in column 5 of Table II or in column 8 of Table IV, application no. 12, respectively, and being depicted in the same respective line as said At4g15670, or a functional equivalent or a homolog thereof as depicted in column 8 of Table II, application no. 12, preferably a homolog or functional equivalent as depicted in column 8 of Table II B, application no. 12, and being depicted in the same respective line as said At4g15670, and preferably the activity is increased non-targeted, whereby the respective line discloses in column 7 the fine chemical hexadecatrienoic acid.

[62051] Accordingly, in one embodiment, the molecule which activity is to be increased in the process of the invention is the gene product with an activity as a “monothiol glutaredoxin”, preferably it is the molecule of section (a) or (b) of this paragraph.

[62052] In particular, it was observed that in plants, especially in Arabidopsis thaliana, increasing or generating the activity of a gene product non-targeted with the activity of a “monothiol glutaredoxin”, preferably being encoded by a gene comprising the nucleic acid sequence SEQ ID NO. 3279, preferably the coding region thereof, conferred the production of or the increase in hexadecatrienoic acid compared with the wild type control.

[62053] The nucleic acid sequence of At4g15670 from Arabidopsis thaliana, e.g. as shown in the respective line in column 5 of Table I, application no. 12, has been published in F. And the activity of the gene product thereof is the activity of monothiol glutaredoxin.

[62054] Accordingly, in one embodiment, the process of the present invention for producing 2-hydroxybehenic acid in a non-human organism, like a microorganism or a plant or a part thereof, comprises increasing or generating the activity of a gene product with the activity of a gene product conferring the activity of “monothiol glutaredoxin”, especially from Arabidopsis thaliana or its functional equivalent or its homolog, e.g. the increase of
[62055] (a) a gene product of a gene comprising the nucleic acid molecule as shown in the respective line in column 5 of Table I (whereby the respective line discloses in column 7 the fine chemical 2-hydroxybehenic acid), application no. 12, preferably the coding region thereof, or a homolog or a fragment thereof, and being depicted in the same respective line as said At4g15670, or a functional equivalent or a homolog thereof as shown in column 8 of Table I, application no. 12, preferably the coding region thereof, particularly a homolog or functional equivalent as shown in column 8 of Table I B, application no. 12, and being depicted in the same respective line as said At4g15670, and preferably the activity is increased non-targeted, or
[62056] (b) a polypeptide comprising a polypeptide, a consensus sequence or at least a polypeptide motif as shown in the respective line in column 5 of Table II or in column 8 of Table IV, application no. 12, respectively, and being depicted in the same respective line as said At4g15670, or a functional equivalent or a homolog thereof as depicted in column 8 of Table II, application no. 12, preferably a homolog or functional equivalent as depicted in column 8 of Table II B, application no. 12, and being depicted in the same respective line as said At4g15670, and preferably the activity is increased non-targeted, whereby the respective line discloses in column 7 the fine chemical 2-hydroxybehenic acid.

[62057] Accordingly, in one embodiment, the molecule which activity is to be increased in the process of the invention is the gene product with an activity as a “monothiol glutaredoxin”, preferably it is the molecule of section (a) or (b) of this paragraph.

[62058] In particular, it was observed that in plants, especially in Arabidopsis thaliana, increasing or generating the activity of a gene product non-targeted with the activity of a “monothiol glutaredoxin”, preferably being encoded by a gene comprising the nucleic acid sequence SEQ ID NO. 3279, preferably the coding region thereof, conferred the production of or the increase in 2-hydroxybehenic acid compared with the wild type control.

[62059] The nucleic acid sequence of At4g15690 from Arabidopsis thaliana, e.g. as shown in the respective line in column 5 of Table I, application no. 12, has been published in F. And the activity of the gene product thereof is the activity of monothiol glutaredoxin.

[62060] Accordingly, in one embodiment, the process of the present invention for producing cerebronic acid in a non-human organism, like a microorganism or a plant or a part thereof, comprises increasing or generating the activity of a gene product with the activity of a gene product conferring the activity of “monothiol glutaredoxin”, especially from Arabidopsis thaliana or its functional equivalent or its homolog, e.g. the increase of
[62061] (a) a gene product of a gene comprising the nucleic acid molecule as shown in the respective line in column 5 of Table I (whereby the respective line discloses in column 7 the fine chemical cerebronic acid), application no. 12, preferably the coding region thereof, or a homolog or a fragment thereof, and being depicted in the same respective line as said At4g15690, or a functional equivalent or a homolog thereof as shown in column 8 of Table I, application no. 12, preferably the coding region thereof, particularly a homolog or functional equivalent as shown in column 8 of Table I B, application no. 12, and being depicted in the same respective line as said At4g15690, and preferably the activity is increased non-targeted, or
[62062] (b) a polypeptide comprising a polypeptide, a consensus sequence or at least a polypeptide motif as shown in the respective line in column 5 of Table II or in column 8 of Table IV, application no. 12, respectively, and being depicted in the same respective line as said At4g15690, or a functional equivalent or a homolog thereof as depicted in column 8 of Table II, application no. 12, preferably a homolog or functional equivalent as depicted in column 8 of Table II B, application no. 12, and being depicted in the same respective line as said At4g15690, and preferably the activity is increased non-targeted, whereby the respective line discloses in column 7 the fine chemical cerebronic acid.

[62063] Accordingly, in one embodiment, the molecule which activity is to be increased in the process of the invention is the gene product with an activity as a “monothiol glutaredoxin”, preferably it is the molecule of section (a) or (b) of this paragraph.

[62064] In particular, it was observed that in plants, especially in Arabidopsis thaliana, increasing or generating the activity of a gene product non-targeted with the activity of a “monothiol glutaredoxin”, preferably being encoded by a gene comprising the nucleic acid sequence SEQ ID NO. 23844, preferably the coding region thereof, conferred the production of or the increase in cerebronic acid compared with the wild type control.

[62065] The nucleic acid sequence of At4g26080 from Arabidopsis thaliana, e.g. as shown in the respective line in column 5 of Table I, application no. 12, has been published in F. And the activity of the gene product thereof is the activity of protein phosphatase.

[62066] Accordingly, in one embodiment, the process of the present invention for producing 2-hydroxybehenic acid in a non-human organism, like a microorganism or a plant or a part thereof, comprises increasing or generating the activity of a gene product with the activity of a gene product conferring the activity of “protein phosphatase”, especially from Arabidopsis thaliana or its functional equivalent or its homolog, e.g. the increase of
[62067] (a) a gene product of a gene comprising the nucleic acid molecule as shown in the respective line in column 5 of Table I (whereby the respective line discloses in column 7 the fine chemical 2-hydroxybehenic acid), application no. 12, preferably the coding region thereof, or a homolog or a fragment thereof, and being depicted in the same respective line as said At4g26080, or a functional equivalent or a homolog thereof as shown in column 8 of Table I, application no. 12, preferably the coding region thereof, particularly a homolog or functional equivalent as shown in column 8 of Table I B, application no. 12, and being depicted in the same respective line as said At4g26080, and preferably the activity is increased non-targeted, or
[62068] (b) a polypeptide comprising a polypeptide, a consensus sequence or at least a polypeptide motif as shown in the respective line in column 5 of Table II or in column 8 of Table IV, application no. 12, respectively, and being depicted in the same respective line as said At4g26080, or a functional equivalent or a homolog thereof as depicted in column 8 of Table II, application no. 12, preferably a homolog or functional equivalent as depicted in column 8 of Table II B, application no. 12, and being depicted in the same respective line as said At4g26080, and preferably the activity is increased non-targeted, whereby the respective line discloses in column 7 the fine chemical 2-hydroxybehenic acid.

[62069] Accordingly, in one embodiment, the molecule which activity is to be increased in the process of the invention is the gene product with an activity as a “protein phosphatase”, preferably it is the molecule of section (a) or (b) of this paragraph.

[62070] In particular, it was observed that in plants, especially in Arabidopsis thaliana, increasing or generating the activity of a gene product non-targeted with the activity of a “protein phosphatase”, preferably being encoded by a gene comprising the nucleic acid sequence SEQ ID NO. 68849, preferably the coding region thereof, conferred the production of or the increase in 2-hydroxybehenic acid compared with the wild type control.

[62071] The nucleic acid sequence of At4g26080 from Arabidopsis thaliana, e.g. as shown in the respective line in column 5 of Table I, application no. 12, has been published in F. And the activity of the gene product thereof is the activity of protein phosphatase.

[62072] Accordingly, in one embodiment, the process of the present invention for producing 2-hydroxytetracosenoic acid (preferably 2-hydroxynervonic acid) in a non-human organism, like a microorganism or a plant or a part thereof, comprises increasing or generating the activity of a gene product with the activity of a gene product conferring the activity of “protein phosphatase”, especially from Arabidopsis thaliana or its functional equivalent or its homolog, e.g. the increase of
[62073] (a) a gene product of a gene comprising the nucleic acid molecule as shown in the respective line in column 5 of Table I (whereby the respective line discloses in column 7 the fine chemical 2-hydroxytetracosenoic acid (preferably 2-hydroxynervonic acid)), application no. 12, preferably the coding region thereof, or a homolog or a fragment thereof, and being depicted in the same respective line as said At4g26080, or a functional equivalent or a homolog thereof as shown in column 8 of Table I, application no. 12, preferably the coding region thereof, particularly a homolog or functional equivalent as shown in column 8 of Table I B, application no. 12, and being depicted in the same respective line as said At4g26080, and preferably the activity is increased non-targeted, or
[62074] (b) a polypeptide comprising a polypeptide, a consensus sequence or at least a polypeptide motif as shown in the respective line in column 5 of Table II or in column 8 of Table IV, application no. 12, respectively, and being depicted in the same respective line as said At4g26080, or a functional equivalent or a homolog thereof as depicted in column 8 of Table II, application no. 12, preferably a homolog or functional equivalent as depicted in column 8 of Table II B, application no. 12, and being depicted in the same respective line as said At4g26080, and preferably the activity is increased non-targeted, whereby the respective line discloses in column 7 the fine chemical 2-hydroxytetracosenoic acid (preferably 2-hydroxynervonic acid).

[62075] Accordingly, in one embodiment, the molecule which activity is to be increased in the process of the invention is the gene product with an activity as a “protein phosphatase”, preferably it is the molecule of section (a) or (b) of this paragraph.

[62076] In particular, it was observed that in plants, especially in Arabidopsis thaliana, increasing or generating the activity of a gene product non-targeted with the activity of a “protein phosphatase”, preferably being encoded by a gene comprising the nucleic acid sequence SEQ ID NO. 68849, preferably the coding region thereof, conferred the production of or the increase in 2-hydroxytetracosenoic acid (preferably 2-hydroxynervonic acid) compared with the wild type control.

[62077] The nucleic acid sequence of At4g33040 from Arabidopsis thaliana, e.g. as shown in the respective line in column 5 of Table I, application no. 12, has been published in F. And the activity of the gene product thereof is the activity of glutaredoxin.

[62078] Accordingly, in one embodiment, the process of the present invention for producing cerebronic acid in a non-human organism, like a microorganism or a plant or a part thereof, comprises increasing or generating the activity of a gene product with the activity of a gene product conferring the activity of “glutaredoxin”, especially from Arabidopsis thaliana or its functional equivalent or its homolog, e.g. the increase of
[62079] (a) a gene product of a gene comprising the nucleic acid molecule as shown in the respective line in column 5 of Table I (whereby the respective line discloses in column 7 the fine chemical cerebronic acid), application no. 12, preferably the coding region thereof, or a homolog or a fragment thereof, and being depicted in the same respective line as said At4g33040, or a functional equivalent or a homolog thereof as shown in column 8 of Table I, application no. 12, preferably the coding region thereof, particularly a homolog or functional equivalent as shown in column 8 of Table I B, application no. 12, and being depicted in the same respective line as said At4g33040, and preferably the activity is increased non-targeted, or
[62080] (b) a polypeptide comprising a polypeptide, a consensus sequence or at least a polypeptide motif as shown in the respective line in column 5 of Table II or in column 8 of Table IV, application no. 12, respectively, and being depicted in the same respective line as said At4g33040, or a functional equivalent or a homolog thereof as depicted in column 8 of Table II, application no. 12, preferably a homolog or functional equivalent as depicted in column 8 of Table II B, application no. 12, and being depicted in the same respective line as said At4g33040, and preferably the activity is increased non-targeted, whereby the respective line discloses in column 7 the fine chemical cerebronic acid.

[62081] Accordingly, in one embodiment, the molecule which activity is to be increased in the process of the invention is the gene product with an activity as a “glutaredoxin”, preferably it is the molecule of section (a) or (b) of this paragraph.

[62082] In particular, it was observed that in plants, especially in Arabidopsis thaliana, increasing or generating the activity of a gene product non-targeted with the activity of a “glutaredoxin”, preferably being encoded by a gene comprising the nucleic acid sequence SEQ ID NO. 4102, preferably the coding region thereof, conferred the production of or the increase in cerebronic acid compared with the wild type control.

[62083] The nucleic acid sequence of At4g33040 from Arabidopsis thaliana, e.g. as shown in the respective line in column 5 of Table I, application no. 12, has been published in F. And the activity of the gene product thereof is the activity of glutaredoxin.

[62084] Accordingly, in one embodiment, the process of the present invention for producing hexadecadienoic acid in a non-human organism, like a microorganism or a plant or a part thereof, comprises increasing or generating the activity of a gene product with the activity of a gene product conferring the activity of “glutaredoxin”, especially from Arabidopsis thaliana or its functional equivalent or its homolog, e.g. the increase of
[62085] (a) a gene product of a gene comprising the nucleic acid molecule as shown in the respective line in column 5 of Table I (whereby the respective line discloses in column 7 the fine chemical hexadecadienoic acid), application no. 12, preferably the coding region thereof, or a homolog or a fragment thereof, and being depicted in the same respective line as said At4g33040, or a functional equivalent or a homolog thereof as shown in column 8 of Table I, application no. 12, preferably the coding region thereof, particularly a homolog or functional equivalent as shown in column 8 of Table I B, application no. 12, and being depicted in the same respective line as said At4g33040, and preferably the activity is increased non-targeted, or
[62086] (b) a polypeptide comprising a polypeptide, a consensus sequence or at least a polypeptide motif as shown in the respective line in column 5 of Table II or in column 8 of Table IV, application no. 12, respectively, and being depicted in the same respective line as said At4g33040, or a functional equivalent or a homolog thereof as depicted in column 8 of Table II, application no. 12, preferably a homolog or functional equivalent as depicted in column 8 of Table II B, application no. 12, and being depicted in the same respective line as said At4g33040, and preferably the activity is increased non-targeted, whereby the respective line discloses in column 7 the fine chemical hexadecadienoic acid.

[62087] Accordingly, in one embodiment, the molecule which activity is to be increased in the process of the invention is the gene product with an activity as a “glutaredoxin”, preferably it is the molecule of section (a) or (b) of this paragraph.

[62088] In particular, it was observed that in plants, especially in Arabidopsis thaliana, increasing or generating the activity of a gene product non-targeted with the activity of a “glutaredoxin”, preferably being encoded by a gene comprising the nucleic acid sequence SEQ ID NO. 4102, preferably the coding region thereof, conferred the production of or the increase in hexadecadienoic acid compared with the wild type control.

[62089] The nucleic acid sequence of At4g33040 from Arabidopsis thaliana, e.g. as shown in the respective line in column 5 of Table I, application no. 12, has been published in F. And the activity of the gene product thereof is the activity of glutaredoxin.

[62090] Accordingly, in one embodiment, the process of the present invention for producing hexadecatrienoic acid in a non-human organism, like a microorganism or a plant or a part thereof, comprises increasing or generating the activity of a gene product with the activity of a gene product conferring the activity of “glutaredoxin”, especially from Arabidopsis thaliana or its functional equivalent or its homolog, e.g. the increase of
[62091] (a) a gene product of a gene comprising the nucleic acid molecule as shown in the respective line in column 5 of Table I (whereby the respective line discloses in column 7 the fine chemical hexadecatrienoic acid), application no. 12, preferably the coding region thereof, or a homolog or a fragment thereof, and being depicted in the same respective line as said At4g33040, or a functional equivalent or a homolog thereof as shown in column 8 of Table I, application no. 12, preferably the coding region thereof, particularly a homolog or functional equivalent as shown in column 8 of Table I B, application no. 12, and being depicted in the same respective line as said At4g33040, and preferably the activity is increased non-targeted, or
[62092] (b) a polypeptide comprising a polypeptide, a consensus sequence or at least a polypeptide motif as shown in the respective line in column 5 of Table II or in column 8 of Table IV, application no. 12, respectively, and being depicted in the same respective line as said At4g33040, or a functional equivalent or a homolog thereof as depicted in column 8 of Table II, application no. 12, preferably a homolog or functional equivalent as depicted in column 8 of Table II B, application no. 12, and being depicted in the same respective line as said At4g33040, and preferably the activity is increased non-targeted, whereby the respective line discloses in column 7 the fine chemical hexadecatrienoic acid.

[62093] Accordingly, in one embodiment, the molecule which activity is to be increased in the process of the invention is the gene product with an activity as a “glutaredoxin”, preferably it is the molecule of section (a) or (b) of this paragraph.

[62094] In particular, it was observed that in plants, especially in Arabidopsis thaliana, increasing or generating the activity of a gene product non-targeted with the activity of a “glutaredoxin”, preferably being encoded by a gene comprising the nucleic acid sequence SEQ ID NO. 4102, preferably the coding region thereof, conferred the production of or the increase in hexadecatrienoic acid compared with the wild type control.

[62095] The nucleic acid sequence of At4g35310 from Arabidopsis thaliana, e.g. as shown in the respective line in column 5 of Table I, application no. 12, has been published in F. And the activity of the gene product thereof is the activity of calcium-dependent protein kinase.

[62096] Accordingly, in one embodiment, the process of the present invention for producing 2-hydroxybehenic acid in a non-human organism, like a microorganism or a plant or a part thereof, comprises increasing or generating the activity of a gene product with the activity of a gene product conferring the activity of “calcium-dependent protein kinase”, especially from Arabidopsis thaliana or its functional equivalent or its homolog, e.g. the increase of
[62097] (a) a gene product of a gene comprising the nucleic acid molecule as shown in the respective line in column 5 of Table I (whereby the respective line discloses in column 7 the fine chemical 2-hydroxybehenic acid), application no. 12, preferably the coding region thereof, or a homolog or a fragment thereof, and being depicted in the same respective line as said At4g35310, or a functional equivalent or a homolog thereof as shown in column 8 of Table I, application no. 12, preferably the coding region thereof, particularly a homolog or functional equivalent as shown in column 8 of Table I B, application no. 12, and being depicted in the same respective line as said At4g35310, and preferably the activity is increased non-targeted, or
[62098] (b) a polypeptide comprising a polypeptide, a consensus sequence or at least a polypeptide motif as shown in the respective line in column 5 of Table II or in column 8 of Table IV, application no. 12, respectively, and being depicted in the same respective line as said At4g35310, or a functional equivalent or a homolog thereof as depicted in column 8 of Table II, application no. 12, preferably a homolog or functional equivalent as depicted in column 8 of Table II B, application no. 12, and being depicted in the same respective line as said At4g35310, and preferably the activity is increased non-targeted, whereby the respective line discloses in column 7 the fine chemical 2-hydroxybehenic acid.

[62099] Accordingly, in one embodiment, the molecule which activity is to be increased in the process of the invention is the gene product with an activity as a “calcium-dependent protein kinase”, preferably it is the molecule of section (a) or (b) of this paragraph.

[62100] In particular, it was observed that in plants, especially in Arabidopsis thaliana, increasing or generating the activity of a gene product non-targeted with the activity of a “calcium-dependent protein kinase”, preferably being encoded by a gene comprising the nucleic acid sequence SEQ ID NO. 4348, preferably the coding region thereof, conferred the production of or the increase in 2-hydroxybehenic acid compared with the wild type control.

[62101] The nucleic acid sequence of At4g35310 from Arabidopsis thaliana, e.g. as shown in the respective line in column 5 of Table I, application no. 12, has been published in F. And the activity of the gene product thereof is the activity of calcium-dependent protein kinase.

[62102] Accordingly, in one embodiment, the process of the present invention for producing 2-hydroxypalmitic acid in a non-human organism, like a microorganism or a plant or a part thereof, comprises increasing or generating the activity of a gene product with the activity of a gene product conferring the activity of “calcium-dependent protein kinase”, especially from Arabidopsis thaliana or its functional equivalent or its homolog, e.g. the increase of
[62103] (a) a gene product of a gene comprising the nucleic acid molecule as shown in the respective line in column 5 of Table I (whereby the respective line discloses in column 7 the fine chemical 2-hydroxypalmitic acid), application no. 12, preferably the coding region thereof, or a homolog or a fragment thereof, and being depicted in the same respective line as said At4g35310, or a functional equivalent or a homolog thereof as shown in column 8 of Table I, application no. 12, preferably the coding region thereof, particularly a homolog or functional equivalent as shown in column 8 of Table I B, application no. 12, and being depicted in the same respective line as said At4g35310, and preferably the activity is increased non-targeted, or
[62104] (b) a polypeptide comprising a polypeptide, a consensus sequence or at least a polypeptide motif as shown in the respective line in column 5 of Table II or in column 8 of Table IV, application no. 12, respectively, and being depicted in the same respective line as said At4g35310, or a functional equivalent or a homolog thereof as depicted in column 8 of Table II, application no. 12, preferably a homolog or functional equivalent as depicted in column 8 of Table II B, application no. 12, and being depicted in the same respective line as said At4g35310, and preferably the activity is increased non-targeted, whereby the respective line discloses in column 7 the fine chemical 2-hydroxypalmitic acid.

[62105] Accordingly, in one embodiment, the molecule which activity is to be increased in the process of the invention is the gene product with an activity as a “calcium-dependent protein kinase”, preferably it is the molecule of section (a) or (b) of this paragraph.

[62106] In particular, it was observed that in plants, especially in Arabidopsis thaliana, increasing or generating the activity of a gene product non-targeted with the activity of a “calcium-dependent protein kinase”, preferably being encoded by a gene comprising the nucleic acid sequence SEQ ID NO. 4348, preferably the coding region thereof, conferred the production of or the increase in 2-hydroxypalmitic acid compared with the wild type control.

[62107] The nucleic acid sequence of At5g16230 from Arabidopsis thaliana, e.g. as shown in the respective line in column 5 of Table I, application no. 12, has been published in F. And the activity of the gene product thereof is the activity of acyl-desaturase.

[62108] Accordingly, in one embodiment, the process of the present invention for producing oleic acid in a non-human organism, like a microorganism or a plant or a part thereof, comprises increasing or generating the activity of a gene product with the activity of a gene product conferring the activity of “acyl-desaturase”, especially from Arabidopsis thaliana or its functional equivalent or its homolog, e.g. the increase of
[62109] (a) a gene product of a gene comprising the nucleic acid molecule as shown in the respective line in column 5 of Table I (whereby the respective line discloses in column 7 the fine chemical oleic acid), application no. 12, preferably the coding region thereof, or a homolog or a fragment thereof, and being depicted in the same respective line as said At5g16230, or a functional equivalent or a homolog thereof as shown in column 8 of Table I, application no. 12, preferably the coding region thereof, particularly a homolog or functional equivalent as shown in column 8 of Table I B, application no. 12, and being depicted in the same respective line as said At5g16230, and preferably the activity is increased non-targeted, or
[62110] (b) a polypeptide comprising a polypeptide, a consensus sequence or at least a polypeptide motif as shown in the respective line in column 5 of Table II or in column 8 of Table IV, application no. 12, respectively, and being depicted in the same respective line as said At5g16230, or a functional equivalent or a homolog thereof as depicted in column 8 of Table II, application no. 12, preferably a homolog or functional equivalent as depicted in column 8 of Table II B, application no. 12, and being depicted in the same respective line as said At5g16230, and preferably the activity is increased non-targeted, whereby the respective line discloses in column 7 the fine chemical oleic acid.

[62111] Accordingly, in one embodiment, the molecule which activity is to be increased in the process of the invention is the gene product with an activity as a “acyl-desaturase”, preferably it is the molecule of section (a) or (b) of this paragraph.

[62112] In particular, it was observed that in plants, especially in Arabidopsis thaliana, increasing or generating the activity of a gene product non-targeted with the activity of a “acyl-desaturase”, preferably being encoded by a gene comprising the nucleic acid sequence SEQ ID NO. 122565, preferably the coding region thereof, conferred the production of or the increase in oleic acid compared with the wild type control.

[62113] The nucleic acid sequence of At5g18600 from Arabidopsis thaliana, e.g. as shown in the respective line in column 5 of Table I, application no. 12, has been published in F. And the activity of the gene product thereof is the activity of monothiol glutaredoxin.

[62114] Accordingly, in one embodiment, the process of the present invention for producing hexadecatrienoic acid in a non-human organism, like a microorganism or a plant or a part thereof, comprises increasing or generating the activity of a gene product with the activity of a gene product conferring the activity of “monothiol glutaredoxin”, especially from Arabidopsis thaliana or its functional equivalent or its homolog, e.g. the increase of
[62115] (a) a gene product of a gene comprising the nucleic acid molecule as shown in the respective line in column 5 of Table I (whereby the respective line discloses in column 7 the fine chemical hexadecatrienoic acid), application no. 12, preferably the coding region thereof, or a homolog or a fragment thereof, and being depicted in the same respective line as said At5g18600, or a functional equivalent or a homolog thereof as shown in column 8 of Table I, application no. 12, preferably the coding region thereof, particularly a homolog or functional equivalent as shown in column 8 of Table I B, application no. 12, and being depicted in the same respective line as said At5g18600, and preferably the activity is increased non-targeted, or
[62116] (b) a polypeptide comprising a polypeptide, a consensus sequence or at least a polypeptide motif as shown in the respective line in column 5 of Table II or in column 8 of Table IV, application no. 12, respectively, and being depicted in the same respective line as said At5g18600, or a functional equivalent or a homolog thereof as depicted in column 8 of Table II, application no. 12, preferably a homolog or functional equivalent as depicted in column 8 of Table II B, application no. 12, and being depicted in the same respective line as said At5g18600, and preferably the activity is increased non-targeted, whereby the respective line discloses in column 7 the fine chemical hexadecatrienoic acid.

[62117] Accordingly, in one embodiment, the molecule which activity is to be increased in the process of the invention is the gene product with an activity as a “monothiol glutaredoxin”, preferably it is the molecule of section (a) or (b) of this paragraph.

[62118] In particular, it was observed that in plants, especially in Arabidopsis thaliana, increasing or generating the activity of a gene product non-targeted with the activity of a “monothiol glutaredoxin”, preferably being encoded by a gene comprising the nucleic acid sequence SEQ ID NO. 4904, preferably the coding region thereof, conferred the production of or the increase in hexadecatrienoic acid compared with the wild type control.

[62119] The nucleic acid sequence of At5g57050 from Arabidopsis thaliana, e.g. as shown in the respective line in column 5 of Table I, application no. 12, has been published in F. And the activity of the gene product thereof is the activity of protein phosphatase.

[62120] Accordingly, in one embodiment, the process of the present invention for producing hexadecatrienoic acid in a non-human organism, like a microorganism or a plant or a part thereof, comprises increasing or generating the activity of a gene product with the activity of a gene product conferring the activity of “protein phosphatase”, especially from Arabidopsis thaliana or its functional equivalent or its homolog, e.g. the increase of
[62121] (a) a gene product of a gene comprising the nucleic acid molecule as shown in the respective line in column 5 of Table I (whereby the respective line discloses in column 7 the fine chemical hexadecatrienoic acid), application no. 12, preferably the coding region thereof, or a homolog or a fragment thereof, and being depicted in the same respective line as said At5g57050, or a functional equivalent or a homolog thereof as shown in column 8 of Table I, application no. 12, preferably the coding region thereof, particularly a homolog or functional equivalent as shown in column 8 of Table I B, application no. 12, and being depicted in the same respective line as said At5g57050, and preferably the activity is increased non-targeted, or
[62122] (b) a polypeptide comprising a polypeptide, a consensus sequence or at least a polypeptide motif as shown in the respective line in column 5 of Table II or in column 8 of Table IV, application no. 12, respectively, and being depicted in the same respective line as said At5g57050, or a functional equivalent or a homolog thereof as depicted in column 8 of Table II, application no. 12, preferably a homolog or functional equivalent as depicted in column 8 of Table II B, application no. 12, and being depicted in the same respective line as said At5g57050, and preferably the activity is increased non-targeted, whereby the respective line discloses in column 7 the fine chemical hexadecatrienoic acid.

[62123] Accordingly, in one embodiment, the molecule which activity is to be increased in the process of the invention is the gene product with an activity as a “protein phosphatase”, preferably it is the molecule of section (a) or (b) of this paragraph.

[62124] In particular, it was observed that in plants, especially in Arabidopsis thaliana, increasing or generating the activity of a gene product non-targeted with the activity of a “protein phosphatase”, preferably being encoded by a gene comprising the nucleic acid sequence SEQ ID NO. 5318, preferably the coding region thereof, conferred the production of or the increase in hexadecatrienoic acid compared with the wild type control.

[62125] The nucleic acid sequence of At5g66710 from Arabidopsis thaliana, e.g. as shown in the respective line in column 5 of Table I, application no. 12, has been published in F. And the activity of the gene product thereof is the activity of protein kinase.

[62126] Accordingly, in one embodiment, the process of the present invention for producing hexadecadienoic acid in a non-human organism, like a microorganism or a plant or a part thereof, comprises increasing or generating the activity of a gene product with the activity of a gene product conferring the activity of “protein kinase”, especially from Arabidopsis thaliana or its functional equivalent or its homolog, e.g. the increase of
[62127] (a) a gene product of a gene comprising the nucleic acid molecule as shown in the respective line in column 5 of Table I (whereby the respective line discloses in column 7 the fine chemical hexadecadienoic acid), application no. 12, preferably the coding region thereof, or a homolog or a fragment thereof, and being depicted in the same respective line as said At5g66710, or a functional equivalent or a homolog thereof as shown in column 8 of Table I, application no. 12, preferably the coding region thereof, particularly a homolog or functional equivalent as shown in column 8 of Table I B, application no. 12, and being depicted in the same respective line as said At5g66710, and preferably the activity is increased non-targeted, or
[62128] (b) a polypeptide comprising a polypeptide, a consensus sequence or at least a polypeptide motif as shown in the respective line in column 5 of Table II or in column 8 of Table IV, application no. 12, respectively, and being depicted in the same respective line as said At5g66710, or a functional equivalent or a homolog thereof as depicted in column 8 of Table II, application no. 12, preferably a homolog or functional equivalent as depicted in column 8 of Table II B, application no. 12, and being depicted in the same respective line as said At5g66710, and preferably the activity is increased non-targeted, whereby the respective line discloses in column 7 the fine chemical hexadecadienoic acid.

[62129] Accordingly, in one embodiment, the molecule which activity is to be increased in the process of the invention is the gene product with an activity as a “protein kinase”, preferably it is the molecule of section (a) or (b) of this paragraph.

[62130] In particular, it was observed that in plants, especially in Arabidopsis thaliana, increasing or generating the activity of a gene product non-targeted with the activity of a “protein kinase”, preferably being encoded by a gene comprising the nucleic acid sequence SEQ ID NO. 122803, preferably the coding region thereof, conferred the production of or the increase in hexadecadienoic acid compared with the wild type control.

[62131] The nucleic acid sequence of AvinDRAFT_{—}0035 from Azotobacter vinelandii, e.g. as shown in the respective line in column 5 of Table I, application no. 12, has been published in D. And the activity of the gene product thereof is the activity of CDP-diacylglycerol-serine O-phosphatidyltransferase.

[62132] Accordingly, in one embodiment, the process of the present invention for producing cerebronic acid in a non-human organism, like a microorganism or a plant or a part thereof, comprises increasing or generating the activity of a gene product with the activity of a gene product conferring the activity of “CDP-diacylglycerol-serine O-phosphatidyltransferase”, especially from Azotobacter vinelandii or its functional equivalent or its homolog, e.g. the increase of
[62133] (a) a gene product of a gene comprising the nucleic acid molecule as shown in the respective line in column 5 of Table I (whereby the respective line discloses in column 7 the fine chemical cerebronic acid), application no. 12, preferably the coding region thereof, or a homolog or a fragment thereof, and being depicted in the same respective line as said AvinDRAFT_{—}0035, or a functional equivalent or a homolog thereof as shown in column 8 of Table I, application no. 12, preferably the coding region thereof, particularly a homolog or functional equivalent as shown in column 8 of Table I B, application no. 12, and being depicted in the same respective line as said AvinDRAFT_{—}0035, and preferably the activity is increased non-targeted, or
[62134] (b) a polypeptide comprising a polypeptide, a consensus sequence or at least a polypeptide motif as shown in the respective line in column 5 of Table II or in column 8 of Table IV, application no. 12, respectively, and being depicted in the same respective line as said AvinDRAFT_{—}0035, or a functional equivalent or a homolog thereof as depicted in column 8 of Table II, application no. 12, preferably a homolog or functional equivalent as depicted in column 8 of Table II B, application no. 12, and being depicted in the same respective line as said AvinDRAFT_{—}0035, and preferably the activity is increased non-targeted, whereby the respective line discloses in column 7 the fine chemical cerebronic acid.

[62135] Accordingly, in one embodiment, the molecule which activity is to be increased in the process of the invention is the gene product with an activity as a “CDP-diacylglycerol-serine O-phosphatidyltransferase”, preferably it is the molecule of section (a) or (b) of this paragraph.

[62136] In particular, it was observed that in plants, especially in Arabidopsis thaliana, increasing or generating the activity of a gene product non-targeted with the activity of a “CDP-diacylglycerol-serine O-phosphatidyltransferase”, preferably being encoded by a gene comprising the nucleic acid sequence SEQ ID NO. 70583, preferably the coding region thereof, conferred the production of or the increase in cerebronic acid compared with the wild type control.

[62137] The nucleic acid sequence of AvinDRAFT_{—}0035 from Azotobacter vinelandii, e.g. as shown in the respective line in column 5 of Table I, application no. 12, has been published in D. And the activity of the gene product thereof is the activity of CDP-diacylglycerol-serine O-phosphatidyltransferase.

[62138] Accordingly, in one embodiment, the process of the present invention for producing 2-hydroxybehenic acid in a non-human organism, like a microorganism or a plant or a part thereof, comprises increasing or generating the activity of a gene product with the activity of a gene product conferring the activity of “CDP-diacylglycerol-serine O-phosphatidyltransferase”, especially from Azotobacter vinelandii or its functional equivalent or its homolog, e.g. the increase of
[62139] (a) a gene product of a gene comprising the nucleic acid molecule as shown in the respective line in column 5 of Table I (whereby the respective line discloses in column 7 the fine chemical 2-hydroxybehenic acid), application no. 12, preferably the coding region thereof, or a homolog or a fragment thereof, and being depicted in the same respective line as said AvinDRAFT_{—}0035, or a functional equivalent or a homolog thereof as shown in column 8 of Table I, application no. 12, preferably the coding region thereof, particularly a homolog or functional equivalent as shown in column 8 of Table I B, application no. 12, and being depicted in the same respective line as said AvinDRAFT_{—}0035, and preferably the activity is increased non-targeted, or
[62140] (b) a polypeptide comprising a polypeptide, a consensus sequence or at least a polypeptide motif as shown in the respective line in column 5 of Table II or in column 8 of Table IV, application no. 12, respectively, and being depicted in the same respective line as said AvinDRAFT_{—}0035, or a functional equivalent or a homolog thereof as depicted in column 8 of Table II, application no. 12, preferably a homolog or functional equivalent as depicted in column 8 of Table II B, application no. 12, and being depicted in the same respective line as said AvinDRAFT_{—}0035, and preferably the activity is increased non-targeted, whereby the respective line discloses in column 7 the fine chemical 2-hydroxybehenic acid.

[62141] Accordingly, in one embodiment, the molecule which activity is to be increased in the process of the invention is the gene product with an activity as a “CDP-diacylglycerol-serine O-phosphatidyltransferase”, preferably it is the molecule of section (a) or (b) of this paragraph.

[62142] In particular, it was observed that in plants, especially in Arabidopsis thaliana, increasing or generating the activity of a gene product non-targeted with the activity of a “CDP-diacylglycerol-serine O-phosphatidyltransferase”, preferably being encoded by a gene comprising the nucleic acid sequence SEQ ID NO. 70583, preferably the coding region thereof, conferred the production of or the increase in 2-hydroxybehenic acid compared with the wild type control.

[62143] The nucleic acid sequence of AvinDRAFT_{—}0035 from Azotobacter vinelandii, e.g. as shown in the respective line in column 5 of Table I, application no. 12, has been published in D. And the activity of the gene product thereof is the activity of CDP-diacylglycerol-serine 0-phosphatidyltransferase.

[62144] Accordingly, in one embodiment, the process of the present invention for producing 2-hydroxytetracosenoic acid (preferably 2-hydroxynervonic acid) in a non-human organism, like a microorganism or a plant or a part thereof, comprises increasing or generating the activity of a gene product with the activity of a gene product conferring the activity of “CDP-diacylglycerol-serine O-phosphatidyltransferase”, especially from Azotobacter vinelandii or its functional equivalent or its homolog, e.g. the increase of
[62145] (a) a gene product of a gene comprising the nucleic acid molecule as shown in the respective line in column 5 of Table I (whereby the respective line discloses in column 7 the fine chemical 2-hydroxytetracosenoic acid (preferably 2-hydroxynervonic acid)), application no. 12, preferably the coding region thereof, or a homolog or a fragment thereof, and being depicted in the same respective line as said AvinDRAFT_{—}0035, or a functional equivalent or a homolog thereof as shown in column 8 of Table I, application no. 12, preferably the coding region thereof, particularly a homolog or functional equivalent as shown in column 8 of Table I B, application no. 12, and being depicted in the same respective line as said AvinDRAFT_{—}0035, and preferably the activity is increased non-targeted, or
[62146] (b) a polypeptide comprising a polypeptide, a consensus sequence or at least a polypeptide motif as shown in the respective line in column 5 of Table II or in column 8 of Table IV, application no. 12, respectively, and being depicted in the same respective line as said AvinDRAFT_{—}0035, or a functional equivalent or a homolog thereof as depicted in column 8 of Table II, application no. 12, preferably a homolog or functional equivalent as depicted in column 8 of Table II B, application no. 12, and being depicted in the same respective line as said AvinDRAFT_{—}0035, and preferably the activity is increased non-targeted, whereby the respective line discloses in column 7 the fine chemical 2-hydroxytetracosenoic acid (preferably 2-hydroxynervonic acid).

[62147] Accordingly, in one embodiment, the molecule which activity is to be increased in the process of the invention is the gene product with an activity as a “CDP-diacylglycerol-serine O-phosphatidyltransferase”, preferably it is the molecule of section (a) or (b) of this paragraph.

[62148] In particular, it was observed that in plants, especially in Arabidopsis thaliana, increasing or generating the activity of a gene product non-targeted with the activity of a “CDP-diacylglycerol-serine O-phosphatidyltransferase”, preferably being encoded by a gene comprising the nucleic acid sequence SEQ ID NO. 70583, preferably the coding region thereof, conferred the production of or the increase in 2-hydroxytetracosenoic acid (preferably 2-hydroxynervonic acid) compared with the wild type control.

[62149] The nucleic acid sequence of AvinDRAFT_{—}0035 from Azotobacter vinelandii, e.g. as shown in the respective line in column 5 of Table I, application no. 12, has been published in D. And the activity of the gene product thereof is the activity of CDP-diacylglycerol-serine O-phosphatidyltransferase.

[62150] Accordingly, in one embodiment, the process of the present invention for producing 2-hydroxypalmitic acid in a non-human organism, like a microorganism or a plant or a part thereof, comprises increasing or generating the activity of a gene product with the activity of a gene product conferring the activity of “CDP-diacylglycerol-serine O-phosphatidyltransferase”, especially from Azotobacter vinelandii or its functional equivalent or its homolog, e.g. the increase of
[62151] (a) a gene product of a gene comprising the nucleic acid molecule as shown in the respective line in column 5 of Table I (whereby the respective line discloses in column 7 the fine chemical 2-hydroxypalmitic acid), application no. 12, preferably the coding region thereof, or a homolog or a fragment thereof, and being depicted in the same respective line as said AvinDRAFT_{—}0035, or a functional equivalent or a homolog thereof as shown in column 8 of Table I, application no. 12, preferably the coding region thereof, particularly a homolog or functional equivalent as shown in column 8 of Table I B, application no. 12, and being depicted in the same respective line as said AvinDRAFT_{—}0035, and preferably the activity is increased non-targeted, or
[62152] (b) a polypeptide comprising a polypeptide, a consensus sequence or at least a polypeptide motif as shown in the respective line in column 5 of Table II or in column 8 of Table IV, application no. 12, respectively, and being depicted in the same respective line as said AvinDRAFT_{—}0035, or a functional equivalent or a homolog thereof as depicted in column 8 of Table II, application no. 12, preferably a homolog or functional equivalent as depicted in column 8 of Table II B, application no. 12, and being depicted in the same respective line as said AvinDRAFT_{—}0035, and preferably the activity is increased non-targeted, whereby the respective line discloses in column 7 the fine chemical 2-hydroxypalmitic acid.

[62153] Accordingly, in one embodiment, the molecule which activity is to be increased in the process of the invention is the gene product with an activity as a “CDP-diacylglycerol-serine O-phosphatidyltransferase”, preferably it is the molecule of section (a) or (b) of this paragraph.

[62154] In particular, it was observed that in plants, especially in Arabidopsis thaliana, increasing or generating the activity of a gene product non-targeted with the activity of a “CDP-diacylglycerol-serine O-phosphatidyltransferase”, preferably being encoded by a gene comprising the nucleic acid sequence SEQ ID NO. 70583, preferably the coding region thereof, conferred the production of or the increase in 2-hydroxypalmitic acid compared with the wild type control.

[62155] The nucleic acid sequence of AvinDRAFT_{—}1624 from Azotobacter vinelandii, e.g. as shown in the respective line in column 5 of Table I, application no. 12, has been published in D. And the activity of the gene product thereof is the activity of sec-independent protein translocase.

[62156] Accordingly, in one embodiment, the process of the present invention for producing hexadecadienoic acid in a non-human organism, like a microorganism or a plant or a part thereof, comprises increasing or generating the activity of a gene product with the activity of a gene product conferring the activity of “sec-independent protein translocase”, especially from Azotobacter vinelandii or its functional equivalent or its homolog, e.g. the increase of
[62157] (a) a gene product of a gene comprising the nucleic acid molecule as shown in the respective line in column 5 of Table I (whereby the respective line discloses in column 7 the fine chemical hexadecadienoic acid), application no. 12, preferably the coding region thereof, or a homolog or a fragment thereof, and being depicted in the same respective line as said AvinDRAFT_{—}1624, or a functional equivalent or a homolog thereof as shown in column 8 of Table I, application no. 12, preferably the coding region thereof, particularly a homolog or functional equivalent as shown in column 8 of Table I B, application no. 12, and being depicted in the same respective line as said AvinDRAFT_{—}1624, and preferably the activity is increased non-targeted, or
[62158] (b) a polypeptide comprising a polypeptide, a consensus sequence or at least a polypeptide motif as shown in the respective line in column 5 of Table II or in column 8 of Table IV, application no. 12, respectively, and being depicted in the same respective line as said AvinDRAFT_{—}1624, or a functional equivalent or a homolog thereof as depicted in column 8 of Table II, application no. 12, preferably a homolog or functional equivalent as depicted in column 8 of Table II B, application no. 12, and being depicted in the same respective line as said AvinDRAFT_{—}1624, and preferably the activity is increased non-targeted, whereby the respective line discloses in column 7 the fine chemical hexadecadienoic acid.

[62159] Accordingly, in one embodiment, the molecule which activity is to be increased in the process of the invention is the gene product with an activity as a “sec-independent protein translocase”, preferably it is the molecule of section (a) or (b) of this paragraph.

[62160] In particular, it was observed that in plants, especially in Arabidopsis thaliana, increasing or generating the activity of a gene product non-targeted with the activity of a “sec-independent protein translocase”, preferably being encoded by a gene comprising the nucleic acid sequence SEQ ID NO. 26196, preferably the coding region thereof, conferred the production of or the increase in hexadecadienoic acid compared with the wild type control.

[62161] The nucleic acid sequence of AvinDRAFT_{—}2010 from Azotobacter vinelandii, e.g. as shown in the respective line in column 5 of Table I, application no. 12, has been published in D. And the activity of the gene product thereof is the activity of transcriptional regulator protein.

[62162] Accordingly, in one embodiment, the process of the present invention for producing 2-hydroxytetracosenoic acid (preferably 2-hydroxynervonic acid) in a non-human organism, like a microorganism or a plant or a part thereof, comprises increasing or generating the activity of a gene product with the activity of a gene product conferring the activity of “transcriptional regulator protein”, especially from Azotobacter vinelandii or its functional equivalent or its homolog, e.g. the increase of
[62163] (a) a gene product of a gene comprising the nucleic acid molecule as shown in the respective line in column 5 of Table I (whereby the respective line discloses in column 7 the fine chemical 2-hydroxytetracosenoic acid (preferably 2-hydroxynervonic acid)), application no. 12, preferably the coding region thereof, or a homolog or a fragment thereof, and being depicted in the same respective line as said AvinDRAFT_{—}2010, or a functional equivalent or a homolog thereof as shown in column 8 of Table I, application no. 12, preferably the coding region thereof, particularly a homolog or functional equivalent as shown in column 8 of Table I B, application no. 12, and being depicted in the same respective line as said AvinDRAFT_{—}2010, and preferably the activity is increased non-targeted, or
[62164] (b) a polypeptide comprising a polypeptide, a consensus sequence or at least a polypeptide motif as shown in the respective line in column 5 of Table II or in column 8 of Table IV, application no. 12, respectively, and being depicted in the same respective line as said AvinDRAFT_{—}2010, or a functional equivalent or a homolog thereof as depicted in column 8 of Table II, application no. 12, preferably a homolog or functional equivalent as depicted in column 8 of Table II B, application no. 12, and being depicted in the same respective line as said AvinDRAFT_{—}2010, and preferably the activity is increased non-targeted, whereby the respective line discloses in column 7 the fine chemical 2-hydroxytetracosenoic acid (preferably 2-hydroxynervonic acid).

[62165] Accordingly, in one embodiment, the molecule which activity is to be increased in the process of the invention is the gene product with an activity as a “transcriptional regulator protein”, preferably it is the molecule of section (a) or (b) of this paragraph.

[62166] In particular, it was observed that in plants, especially in Arabidopsis thaliana, increasing or generating the activity of a gene product non-targeted with the activity of a “transcriptional regulator protein”, preferably being encoded by a gene comprising the nucleic acid sequence SEQ ID NO. 114198, preferably the coding region thereof, conferred the production of or the increase in 2-hydroxytetracosenoic acid (preferably 2-hydroxynervonic acid) compared with the wild type control.

[62167] The nucleic acid sequence of AvinDRAFT_{—}2091 from Azotobacter vinelandii, e.g. as shown in the respective line in column 5 of Table I, application no. 12, has been published in D. And the activity of the gene product thereof is the activity of beta-hydroxylase.

[62168] Accordingly, in one embodiment, the process of the present invention for producing 2-hydroxypalmitic acid in a non-human organism, like a microorganism or a plant or a part thereof, comprises increasing or generating the activity of a gene product with the activity of a gene product conferring the activity of “beta-hydroxylase”, especially from Azotobacter vinelandii or its functional equivalent or its homolog, e.g. the increase of
[62169] (a) a gene product of a gene comprising the nucleic acid molecule as shown in the respective line in column 5 of Table I (whereby the respective line discloses in column 7 the fine chemical 2-hydroxypalmitic acid), application no. 12, preferably the coding region thereof, or a homolog or a fragment thereof, and being depicted in the same respective line as said AvinDRAFT_{—}2091, or a functional equivalent or a homolog thereof as shown in column 8 of Table I, application no. 12, preferably the coding region thereof, particularly a homolog or functional equivalent as shown in column 8 of Table I B, application no. 12, and being depicted in the same respective line as said AvinDRAFT_{—}2091, and preferably the activity is increased non-targeted, or
[62170] (b) a polypeptide comprising a polypeptide, a consensus sequence or at least a polypeptide motif as shown in the respective line in column 5 of Table II or in column 8 of Table IV, application no. 12, respectively, and being depicted in the same respective line as said AvinDRAFT_{—}2091, or a functional equivalent or a homolog thereof as depicted in column 8 of Table II, application no. 12, preferably a homolog or functional equivalent as depicted in column 8 of Table II B, application no. 12, and being depicted in the same respective line as said AvinDRAFT_{—}2091, and preferably the activity is increased non-targeted, whereby the respective line discloses in column 7 the fine chemical 2-hydroxypalmitic acid.

[62171] Accordingly, in one embodiment, the molecule which activity is to be increased in the process of the invention is the gene product with an activity as a “beta-hydroxylase”, preferably it is the molecule of section (a) or (b) of this paragraph.

[62172] In particular, it was observed that in plants, especially in Arabidopsis thaliana, increasing or generating the activity of a gene product non-targeted with the activity of a “beta-hydroxylase”, preferably being encoded by a gene comprising the nucleic acid sequence SEQ ID NO. 6040, preferably the coding region thereof, conferred the production of or the increase in 2-hydroxypalmitic acid compared with the wild type control.

[62173] The nucleic acid sequence of AvinDRAFT_{—}2365 from Azotobacter vinelandii, e.g. as shown in the respective line in column 5 of Table I, application no. 12, has been published in D. And the activity of the gene product thereof is the activity of 30S ribosomal protein S3.

[62174] Accordingly, in one embodiment, the process of the present invention for producing hexadecadienoic acid in a non-human organism, like a microorganism or a plant or a part thereof, comprises increasing or generating the activity of a gene product with the activity of a gene product conferring the activity of “30S ribosomal protein S3”, especially from Azotobacter vinelandii or its functional equivalent or its homolog, e.g. the increase of
[62175] (a) a gene product of a gene comprising the nucleic acid molecule as shown in the respective line in column 5 of Table I (whereby the respective line discloses in column 7 the fine chemical hexadecadienoic acid), application no. 12, preferably the coding region thereof, or a homolog or a fragment thereof, and being depicted in the same respective line as said AvinDRAFT_{—}2365, or a functional equivalent or a homolog thereof as shown in column 8 of Table I, application no. 12, preferably the coding region thereof, particularly a homolog or functional equivalent as shown in column 8 of Table I B, application no. 12, and being depicted in the same respective line as said AvinDRAFT_{—}2365, and preferably the activity is increased non-targeted, or
[62176] (b) a polypeptide comprising a polypeptide, a consensus sequence or at least a polypeptide motif as shown in the respective line in column 5 of Table II or in column 8 of Table IV, application no. 12, respectively, and being depicted in the same respective line as said AvinDRAFT_{—}2365, or a functional equivalent or a homolog thereof as depicted in column 8 of Table II, application no. 12, preferably a homolog or functional equivalent as depicted in column 8 of Table II B, application no. 12, and being depicted in the same respective line as said AvinDRAFT_{—}2365, and preferably the activity is increased non-targeted, whereby the respective line discloses in column 7 the fine chemical hexadecadienoic acid.

[62177] Accordingly, in one embodiment, the molecule which activity is to be increased in the process of the invention is the gene product with an activity as a “305 ribosomal protein S3”, preferably it is the molecule of section (a) or (b) of this paragraph.

[62178] In particular, it was observed that in plants, especially in Arabidopsis thaliana, increasing or generating the activity of a gene product non-targeted with the activity of a “305 ribosomal protein S3”, preferably being encoded by a gene comprising the nucleic acid sequence SEQ ID NO. 71325, preferably the coding region thereof, conferred the production of or the increase in hexadecadienoic acid compared with the wild type control.

[62179] The nucleic acid sequence of AvinDRAFT_{—}2754 from Azotobacter vinelandii, e.g. as shown in the respective line in column 5 of Table I, application no. 12, has been published in D. And the activity of the gene product thereof is the activity of acyl-CoA synthase.

[62180] Accordingly, in one embodiment, the process of the present invention for producing 2-hydroxybehenic acid in a non-human organism, like a microorganism or a plant or a part thereof, comprises increasing or generating the activity of a gene product with the activity of a gene product conferring the activity of “acyl-CoA synthase”, especially from Azotobacter vinelandii or its functional equivalent or its homolog, e.g. the increase of
[62181] (a) a gene product of a gene comprising the nucleic acid molecule as shown in the respective line in column 5 of Table I (whereby the respective line discloses in column 7 the fine chemical 2-hydroxybehenic acid), application no. 12, preferably the coding region thereof, or a homolog or a fragment thereof, and being depicted in the same respective line as said AvinDRAFT_{—}2754, or a functional equivalent or a homolog thereof as shown in column 8 of Table I, application no. 12, preferably the coding region thereof, particularly a homolog or functional equivalent as shown in column 8 of Table I B, application no. 12, and being depicted in the same respective line as said AvinDRAFT_{—}2754, and preferably the activity is increased non-targeted, or
[62182] (b) a polypeptide comprising a polypeptide, a consensus sequence or at least a polypeptide motif as shown in the respective line in column 5 of Table II or in column 8 of Table IV, application no. 12, respectively, and being depicted in the same respective line as said AvinDRAFT_{—}2754, or a functional equivalent or a homolog thereof as depicted in column 8 of Table II, application no. 12, preferably a homolog or functional equivalent as depicted in column 8 of Table II B, application no. 12, and being depicted in the same respective line as said AvinDRAFT_{—}2754, and preferably the activity is increased non-targeted, whereby the respective line discloses in column 7 the fine chemical 2-hydroxybehenic acid.

[62183] Accordingly, in one embodiment, the molecule which activity is to be increased in the process of the invention is the gene product with an activity as a “acyl-CoA synthase”, preferably it is the molecule of section (a) or (b) of this paragraph.

[62184] In particular, it was observed that in plants, especially in Arabidopsis thaliana, increasing or generating the activity of a gene product non-targeted with the activity of a “acyl-CoA synthase”, preferably being encoded by a gene comprising the nucleic acid sequence SEQ ID NO. 28040, preferably the coding region thereof, conferred the production of or the increase in 2-hydroxybehenic acid compared with the wild type control.

[62185] The nucleic acid sequence of AvinDRAFT_{—}2827 from Azotobacter vinelandii, e.g. as shown in the respective line in column 5 of Table I, application no. 12, has been published in D. And the activity of the gene product thereof is the activity of heat shock protein.

[62186] Accordingly, in one embodiment, the process of the present invention for producing 2-hydroxytetracosenoic acid (preferably 2-hydroxynervonic acid) in a non-human organism, like a microorganism or a plant or a part thereof, comprises increasing or generating the activity of a gene product with the activity of a gene product conferring the activity of “heat shock protein”, especially from Azotobacter vinelandii or its functional equivalent or its homolog, e.g. the increase of
[62187] (a) a gene product of a gene comprising the nucleic acid molecule as shown in the respective line in column 5 of Table I (whereby the respective line discloses in column 7 the fine chemical 2-hydroxytetracosenoic acid (preferably 2-hydroxynervonic acid)), application no. 12, preferably the coding region thereof, or a homolog or a fragment thereof, and being depicted in the same respective line as said AvinDRAFT_{—}2827, or a functional equivalent or a homolog thereof as shown in column 8 of Table I, application no. 12, preferably the coding region thereof, particularly a homolog or functional equivalent as shown in column 8 of Table I B, application no. 12, and being depicted in the same respective line as said AvinDRAFT_{—}2827, and preferably the activity is increased non-targeted, or
[62188] (b) a polypeptide comprising a polypeptide, a consensus sequence or at least a polypeptide motif as shown in the respective line in column 5 of Table II or in column 8 of Table IV, application no. 12, respectively, and being depicted in the same respective line as said AvinDRAFT_{—}2827, or a functional equivalent or a homolog thereof as depicted in column 8 of Table II, application no. 12, preferably a homolog or functional equivalent as depicted in column 8 of Table II B, application no. 12, and being depicted in the same respective line as said AvinDRAFT_{—}2827, and preferably the activity is increased non-targeted, whereby the respective line discloses in column 7 the fine chemical 2-hydroxytetracosenoic acid (preferably 2-hydroxynervonic acid).

[62189] Accordingly, in one embodiment, the molecule which activity is to be increased in the process of the invention is the gene product with an activity as a “heat shock protein”, preferably it is the molecule of section (a) or (b) of this paragraph.

[62190] In particular, it was observed that in plants, especially in Arabidopsis thaliana, increasing or generating the activity of a gene product non-targeted with the activity of a “heat shock protein”, preferably being encoded by a gene comprising the nucleic acid sequence SEQ ID NO. 122948, preferably the coding region thereof, conferred the production of or the increase in 2-hydroxytetracosenoic acid (preferably 2-hydroxynervonic acid) compared with the wild type control.

[62191] The nucleic acid sequence of AvinDRAFT_{—}3253 from Azotobacter vinelandii, e.g. as shown in the respective line in column 5 of Table I, application no. 12, has been published in D. And the activity of the gene product thereof is the activity of oxidoreductase.

[62192] Accordingly, in one embodiment, the process of the present invention for producing 2-hydroxytetracosenoic acid (preferably 2-hydroxynervonic acid) in a non-human organism, like a microorganism or a plant or a part thereof, comprises increasing or generating the activity of a gene product with the activity of a gene product conferring the activity of “oxidoreductase”, especially from Azotobacter vinelandii or its functional equivalent or its homolog, e.g. the increase of
[62193] (a) a gene product of a gene comprising the nucleic acid molecule as shown in the respective line in column 5 of Table I (whereby the respective line discloses in column 7 the fine chemical 2-hydroxytetracosenoic acid (preferably 2-hydroxynervonic acid)), application no. 12, preferably the coding region thereof, or a homolog or a fragment thereof, and being depicted in the same respective line as said AvinDRAFT_{—}3253, or a functional equivalent or a homolog thereof as shown in column 8 of Table I, application no. 12, preferably the coding region thereof, particularly a homolog or functional equivalent as shown in column 8 of Table I B, application no. 12, and being depicted in the same respective line as said AvinDRAFT_{—}3253, and preferably the activity is increased non-targeted, or
[62194] (b) a polypeptide comprising a polypeptide, a consensus sequence or at least a polypeptide motif as shown in the respective line in column 5 of Table II or in column 8 of Table IV, application no. 12, respectively, and being depicted in the same respective line as said AvinDRAFT_{—}3253, or a functional equivalent or a homolog thereof as depicted in column 8 of Table II, application no. 12, preferably a homolog or functional equivalent as depicted in column 8 of Table II B, application no. 12, and being depicted in the same respective line as said AvinDRAFT_{—}3253, and preferably the activity is increased non-targeted, whereby the respective line discloses in column 7 the fine chemical 2-hydroxytetracosenoic acid (preferably 2-hydroxynervonic acid).

[62195] Accordingly, in one embodiment, the molecule which activity is to be increased in the process of the invention is the gene product with an activity as a “oxidoreductase”, preferably it is the molecule of section (a) or (b) of this paragraph.

[62196] In particular, it was observed that in plants, especially in Arabidopsis thaliana, increasing or generating the activity of a gene product non-targeted with the activity of a “oxidoreductase”, preferably being encoded by a gene comprising the nucleic acid sequence SEQ ID NO. 29500, preferably the coding region thereof, conferred the production of or the increase in 2-hydroxytetracosenoic acid (preferably 2-hydroxynervonic acid) compared with the wild type control.

[62197] The nucleic acid sequence of AvinDRAFT_{—}3629 from Azotobacter vinelandii, e.g. as shown in the respective line in column 5 of Table I, application no. 12, has been published in D. And the activity of the gene product thereof is the activity of recombinase A.

[62198] Accordingly, in one embodiment, the process of the present invention for producing hexadecadienoic acid in a non-human organism, like a microorganism or a plant or a part thereof, comprises increasing or generating the activity of a gene product with the activity of a gene product conferring the activity of “recombinase A”, especially from Azotobacter vinelandii or its functional equivalent or its homolog, e.g. the increase of
[62199] (a) a gene product of a gene comprising the nucleic acid molecule as shown in the respective line in column 5 of Table I (whereby the respective line discloses in column 7 the fine chemical hexadecadienoic acid), application no. 12, preferably the coding region thereof, or a homolog or a fragment thereof, and being depicted in the same respective line as said AvinDRAFT_{—}3629, or a functional equivalent or a homolog thereof as shown in column 8 of Table I, application no. 12, preferably the coding region thereof, particularly a homolog or functional equivalent as shown in column 8 of Table I B, application no. 12, and being depicted in the same respective line as said AvinDRAFT_{—}3629, and preferably the activity is increased non-targeted, or
[62200] (b) a polypeptide comprising a polypeptide, a consensus sequence or at least a polypeptide motif as shown in the respective line in column 5 of Table II or in column 8 of Table IV, application no. 12, respectively, and being depicted in the same respective line as said AvinDRAFT_{—}3629, or a functional equivalent or a homolog thereof as depicted in column 8 of Table II, application no. 12, preferably a homolog or functional equivalent as depicted in column 8 of Table II B, application no. 12, and being depicted in the same respective line as said AvinDRAFT_{—}3629, and preferably the activity is increased non-targeted, whereby the respective line discloses in column 7 the fine chemical hexadecadienoic acid.

[62201] Accordingly, in one embodiment, the molecule which activity is to be increased in the process of the invention is the gene product with an activity as a “recombinase A”, preferably it is the molecule of section (a) or (b) of this paragraph.

[62202] In particular, it was observed that in plants, especially in Arabidopsis thaliana, increasing or generating the activity of a gene product non-targeted with the activity of a “recombinase A”, preferably being encoded by a gene comprising the nucleic acid sequence SEQ ID NO. 114231, preferably the coding region thereof, conferred the production of or the increase in hexadecadienoic acid compared with the wild type control.

[62203] The nucleic acid sequence of AVINDRAFT_{—}4128 from Azotobacter vinelandii, e.g. as shown in the respective line in column 5 of Table I, application no. 12, has been published in D. And the activity of the gene product thereof is the activity of ABC transporter component.

[62204] Accordingly, in one embodiment, the process of the present invention for producing lauric acid in a non-human organism, like a microorganism or a plant or a part thereof, comprises increasing or generating the activity of a gene product with the activity of a gene product conferring the activity of “ABC transporter component”, especially from Azotobacter vinelandii or its functional equivalent or its homolog, e.g. the increase of
[62205] (a) a gene product of a gene comprising the nucleic acid molecule as shown in the respective line in column 5 of Table I (whereby the respective line discloses in column 7 the fine chemical lauric acid), application no. 12, preferably the coding region thereof, or a homolog or a fragment thereof, and being depicted in the same respective line as said AVINDRAFT_{—}4128, or a functional equivalent or a homolog thereof as shown in column 8 of Table I, application no. 12, preferably the coding region thereof, particularly a homolog or functional equivalent as shown in column 8 of Table I B, application no. 12, and being depicted in the same respective line as said AVINDRAFT_{—}4128, and preferably the activity is increased non-targeted, or
[62206] (b) a polypeptide comprising a polypeptide, a consensus sequence or at least a polypeptide motif as shown in the respective line in column 5 of Table II or in column 8 of Table IV, application no. 12, respectively, and being depicted in the same respective line as said AVINDRAFT_{—}4128, or a functional equivalent or a homolog thereof as depicted in column 8 of Table II, application no. 12, preferably a homolog or functional equivalent as depicted in column 8 of Table II B, application no. 12, and being depicted in the same respective line as said AVINDRAFT_{—}4128, and preferably the activity is increased non-targeted, whereby the respective line discloses in column 7 the fine chemical lauric acid.

[62207] Accordingly, in one embodiment, the molecule which activity is to be increased in the process of the invention is the gene product with an activity as a “ABC transporter component”, preferably it is the molecule of section (a) or (b) of this paragraph.

[62208] In particular, it was observed that in plants, especially in Arabidopsis thaliana, increasing or generating the activity of a gene product non-targeted with the activity of a “ABC transporter component”, preferably being encoded by a gene comprising the nucleic acid sequence SEQ ID NO. 72520, preferably the coding region thereof, conferred the production of or the increase in lauric acid compared with the wild type control.

[62209] The nucleic acid sequence of AvinDRAFT_{—}5103 from Azotobacter vinelandii, e.g. as shown in the respective line in column 5 of Table I, application no. 12, has been published in D. And the activity of the gene product thereof is the activity of hydrolase.

[62210] Accordingly, in one embodiment, the process of the present invention for producing 2-hydroxypalmitic acid in a non-human organism, like a microorganism or a plant or a part thereof, comprises increasing or generating the activity of a gene product with the activity of a gene product conferring the activity of “hydrolase”, especially from Azotobacter vinelandii or its functional equivalent or its homolog, e.g. the increase of
[62211] (a) a gene product of a gene comprising the nucleic acid molecule as shown in the respective line in column 5 of Table I (whereby the respective line discloses in column 7 the fine chemical 2-hydroxypalmitic acid), application no. 12, preferably the coding region thereof, or a homolog or a fragment thereof, and being depicted in the same respective line as said AvinDRAFT_{—}5103, or a functional equivalent or a homolog thereof as shown in column 8 of Table I, application no. 12, preferably the coding region thereof, particularly a homolog or functional equivalent as shown in column 8 of Table I B, application no. 12, and being depicted in the same respective line as said AvinDRAFT_{—}5103, and preferably the activity is increased non-targeted, or
[62212] (b) a polypeptide comprising a polypeptide, a consensus sequence or at least a polypeptide motif as shown in the respective line in column 5 of Table II or in column 8 of Table IV, application no. 12, respectively, and being depicted in the same respective line as said AvinDRAFT_{—}5103, or a functional equivalent or a homolog thereof as depicted in column 8 of Table II, application no. 12, preferably a homolog or functional equivalent as depicted in column 8 of Table II B, application no. 12, and being depicted in the same respective line as said AvinDRAFT_{—}5103, and preferably the activity is increased non-targeted, whereby the respective line discloses in column 7 the fine chemical 2-hydroxypalmitic acid.

[62213] Accordingly, in one embodiment, the molecule which activity is to be increased in the process of the invention is the gene product with an activity as a “hydrolase”, preferably it is the molecule of section (a) or (b) of this paragraph.

[62214] In particular, it was observed that in plants, especially in Arabidopsis thaliana, increasing or generating the activity of a gene product non-targeted with the activity of a “hydrolase”, preferably being encoded by a gene comprising the nucleic acid sequence SEQ ID NO. 6510, preferably the coding region thereof, conferred the production of or the increase in 2-hydroxypalmitic acid compared with the wild type control.

[62215] The nucleic acid sequence of AvinDRAFT_{—}5246 from Azotobacter vinelandii, e.g. as shown in the respective line in column 5 of Table I, application no. 12, has been published in D. And the activity of the gene product thereof is the activity of glutamate-ammonia-ligase.

[62216] Accordingly, in one embodiment, the process of the present invention for producing 2-hydroxypalmitic acid in a non-human organism, like a microorganism or a plant or a part thereof, comprises increasing or generating the activity of a gene product with the activity of a gene product conferring the activity of “glutamate-ammonia-ligase”, especially from Azotobacter vinelandii or its functional equivalent or its homolog, e.g. the increase of
[62217] (a) a gene product of a gene comprising the nucleic acid molecule as shown in the respective line in column 5 of Table I (whereby the respective line discloses in column 7 the fine chemical 2-hydroxypalmitic acid), application no. 12, preferably the coding region thereof, or a homolog or a fragment thereof, and being depicted in the same respective line as said AvinDRAFT_{—}5246, or a functional equivalent or a homolog thereof as shown in column 8 of Table I, application no. 12, preferably the coding region thereof, particularly a homolog or functional equivalent as shown in column 8 of Table I B, application no. 12, and being depicted in the same respective line as said AvinDRAFT_{—}5246, and preferably the activity is increased non-targeted, or
[62218] (b) a polypeptide comprising a polypeptide, a consensus sequence or at least a polypeptide motif as shown in the respective line in column 5 of Table II or in column 8 of Table IV, application no. 12, respectively, and being depicted in the same respective line as said AvinDRAFT_{—}5246, or a functional equivalent or a homolog thereof as depicted in column 8 of Table II, application no. 12, preferably a homolog or functional equivalent as depicted in column 8 of Table II B, application no. 12, and being depicted in the same respective line as said AvinDRAFT_{—}5246, and preferably the activity is increased non-targeted, whereby the respective line discloses in column 7 the fine chemical 2-hydroxypalmitic acid.

[62219] Accordingly, in one embodiment, the molecule which activity is to be increased in the process of the invention is the gene product with an activity as a “glutamate-ammonia-ligase”, preferably it is the molecule of section (a) or (b) of this paragraph.

[62220] In particular, it was observed that in plants, especially in Arabidopsis thaliana, increasing or generating the activity of a gene product non-targeted with the activity of a “glutamate-ammonia-ligase”, preferably being encoded by a gene comprising the nucleic acid sequence SEQ ID NO. 32037, preferably the coding region thereof, conferred the production of or the increase in 2-hydroxypalmitic acid compared with the wild type control.

[62221] The nucleic acid sequence of AvinDRAFT_{—}5292 from Azotobacter vinelandii, e.g. as shown in the respective line in column 5 of Table I, application no. 12, has been published in D. And the activity of the gene product thereof is the activity of fumarylacetoacetate hydrolase.

[62222] Accordingly, in one embodiment, the process of the present invention for producing 2-hydroxybehenic acid in a non-human organism, like a microorganism or a plant or a part thereof, comprises increasing or generating the activity of a gene product with the activity of a gene product conferring the activity of “fumarylacetoacetate hydrolase”, especially from Azotobacter vinelandii or its functional equivalent or its homolog, e.g. the increase of
[62223] (a) a gene product of a gene comprising the nucleic acid molecule as shown in the respective line in column 5 of Table I (whereby the respective line discloses in column 7 the fine chemical 2-hydroxybehenic acid), application no. 12, preferably the coding region thereof, or a homolog or a fragment thereof, and being depicted in the same respective line as said AvinDRAFT_{—}5292, or a functional equivalent or a homolog thereof as shown in column 8 of Table I, application no. 12, preferably the coding region thereof, particularly a homolog or functional equivalent as shown in column 8 of Table I B, application no. 12, and being depicted in the same respective line as said AvinDRAFT_{—}5292, and preferably the activity is increased non-targeted, or
[62224] (b) a polypeptide comprising a polypeptide, a consensus sequence or at least a polypeptide motif as shown in the respective line in column 5 of Table II or in column 8 of Table IV, application no. 12, respectively, and being depicted in the same respective line as said AvinDRAFT_{—}5292, or a functional equivalent or a homolog thereof as depicted in column 8 of Table II, application no. 12, preferably a homolog or functional equivalent as depicted in column 8 of Table II B, application no. 12, and being depicted in the same respective line as said AvinDRAFT_{—}5292, and preferably the activity is increased non-targeted, whereby the respective line discloses in column 7 the fine chemical 2-hydroxybehenic acid.

[62225] Accordingly, in one embodiment, the molecule which activity is to be increased in the process of the invention is the gene product with an activity as a “fumarylacetoacetate hydrolase”, preferably it is the molecule of section (a) or (b) of this paragraph.

[62226] In particular, it was observed that in plants, especially in Arabidopsis thaliana, increasing or generating the activity of a gene product non-targeted with the activity of a “fumarylacetoacetate hydrolase”, preferably being encoded by a gene comprising the nucleic acid sequence SEQ ID NO. 32308, preferably the coding region thereof, conferred the production of or the increase in 2-hydroxybehenic acid compared with the wild type control.

[62227] The nucleic acid sequence of AvinDRAFT_{—}5466 from Azotobacter vinelandii, e.g. as shown in the respective line in column 5 of Table I, application no. 12, has been published in D. And the activity of the gene product thereof is the activity of N-acetyl-gamma-glutamyl-phosphate reductase.

[62228] Accordingly, in one embodiment, the process of the present invention for producing 2-hydroxytetracosenoic acid (preferably 2-hydroxynervonic acid) in a non-human organism, like a microorganism or a plant or a part thereof, comprises increasing or generating the activity of a gene product with the activity of a gene product conferring the activity of “N-acetyl-gamma-glutamyl-phosphate reductase”, especially from Azotobacter vinelandii or its functional equivalent or its homolog, e.g. the increase of
[62229] (a) a gene product of a gene comprising the nucleic acid molecule as shown in the respective line in column 5 of Table I (whereby the respective line discloses in column 7 the fine chemical 2-hydroxytetracosenoic acid (preferably 2-hydroxynervonic acid)), application no. 12, preferably the coding region thereof, or a homolog or a fragment thereof, and being depicted in the same respective line as said AvinDRAFT_{—}5466, or a functional equivalent or a homolog thereof as shown in column 8 of Table I, application no. 12, preferably the coding region thereof, particularly a homolog or functional equivalent as shown in column 8 of Table I B, application no. 12, and being depicted in the same respective line as said AvinDRAFT_{—}5466, and preferably the activity is increased non-targeted, or
[62230] (b) a polypeptide comprising a polypeptide, a consensus sequence or at least a polypeptide motif as shown in the respective line in column 5 of Table II or in column 8 of Table IV, application no. 12, respectively, and being depicted in the same respective line as said AvinDRAFT_{—}5466, or a functional equivalent or a homolog thereof as depicted in column 8 of Table II, application no. 12, preferably a homolog or functional equivalent as depicted in column 8 of Table II B, application no. 12, and being depicted in the same respective line as said AvinDRAFT_{—}5466, and preferably the activity is increased non-targeted, whereby the respective line discloses in column 7 the fine chemical 2-hydroxytetracosenoic acid (preferably 2-hydroxynervonic acid).

[62231] Accordingly, in one embodiment, the molecule which activity is to be increased in the process of the invention is the gene product with an activity as a “N-acetyl-gamma-glutamyl-phosphate reductase”, preferably it is the molecule of section (a) or (b) of this paragraph.

[62232] In particular, it was observed that in plants, especially in Arabidopsis thaliana, increasing or generating the activity of a gene product non-targeted with the activity of a “N-acetyl-gamma-glutamyl-phosphate reductase”, preferably being encoded by a gene comprising the nucleic acid sequence SEQ ID NO. 123087, preferably the coding region thereof, conferred the production of or the increase in 2-hydroxytetracosenoic acid (preferably 2-hydroxynervonic acid) compared with the wild type control.

[62233] The nucleic acid sequence of AvinDRAFT_{—}5467 from Azotobacter vinelandii, e.g. as shown in the respective line in column 5 of Table I, application no. 12, has been published in D. And the activity of the gene product thereof is the activity of HesB/YadR/YfhF family protein.

[62234] Accordingly, in one embodiment, the process of the present invention for producing 2-hydroxytetracosenoic acid (preferably 2-hydroxynervonic acid) in a non-human organism, like a microorganism or a plant or a part thereof, comprises increasing or generating the activity of a gene product with the activity of a gene product conferring the activity of “HesB/YadR/YfhF family protein”, especially from Azotobacter vinelandii or its functional equivalent or its homolog, e.g. the increase of
[62235] (a) a gene product of a gene comprising the nucleic acid molecule as shown in the respective line in column 5 of Table I (whereby the respective line discloses in column 7 the fine chemical 2-hydroxytetracosenoic acid (preferably 2-hydroxynervonic acid)), application no. 12, preferably the coding region thereof, or a homolog or a fragment thereof, and being depicted in the same respective line as said AvinDRAFT_{—}5467, or a functional equivalent or a homolog thereof as shown in column 8 of Table I, application no. 12, preferably the coding region thereof, particularly a homolog or functional equivalent as shown in column 8 of Table I B, application no. 12, and being depicted in the same respective line as said AvinDRAFT_{—}5467, and preferably the activity is increased non-targeted, or
[62236] (b) a polypeptide comprising a polypeptide, a consensus sequence or at least a polypeptide motif as shown in the respective line in column 5 of Table II or in column 8 of Table IV, application no. 12, respectively, and being depicted in the same respective line as said AvinDRAFT_{—}5467, or a functional equivalent or a homolog thereof as depicted in column 8 of Table II, application no. 12, preferably a homolog or functional equivalent as depicted in column 8 of Table II B, application no. 12, and being depicted in the same respective line as said AvinDRAFT_{—}5467, and preferably the activity is increased non-targeted, whereby the respective line discloses in column 7 the fine chemical 2-hydroxytetracosenoic acid (preferably 2-hydroxynervonic acid).

[62237] Accordingly, in one embodiment, the molecule which activity is to be increased in the process of the invention is the gene product with an activity as a “HesB/YadR/YfhF family protein”, preferably it is the molecule of section (a) or (b) of this paragraph.

[62238] In particular, it was observed that in plants, especially in Arabidopsis thaliana, increasing or generating the activity of a gene product non-targeted with the activity of a “HesB/YadR/YfhF family protein”, preferably being encoded by a gene comprising the nucleic acid sequence SEQ ID NO. 32648, preferably the coding region thereof, conferred the production of or the increase in 2-hydroxytetracosenoic acid (preferably 2-hydroxynervonic acid) compared with the wild type control.

[62239] The nucleic acid sequence of AvinDRAFT_{—}6700 from Azotobacter vinelandii, e.g. as shown in the respective line in column 5 of Table I, application no. 12, has been published in D. And the activity of the gene product thereof is the activity of purine nucleoside phosphorylase.

[62240] Accordingly, in one embodiment, the process of the present invention for producing 2-hydroxytetracosenoic acid (preferably 2-hydroxynervonic acid) in a non-human organism, like a microorganism or a plant or a part thereof, comprises increasing or generating the activity of a gene product with the activity of a gene product conferring the activity of “purine nucleoside phosphorylase”, especially from Azotobacter vinelandii or its functional equivalent or its homolog, e.g. the increase of
[62241] (a) a gene product of a gene comprising the nucleic acid molecule as shown in the respective line in column 5 of Table I (whereby the respective line discloses in column 7 the fine chemical 2-hydroxytetracosenoic acid (preferably 2-hydroxynervonic acid)), application no. 12, preferably the coding region thereof, or a homolog or a fragment thereof, and being depicted in the same respective line as said AvinDRAFT_{—}6700, or a functional equivalent or a homolog thereof as shown in column 8 of Table I, application no. 12, preferably the coding region thereof, particularly a homolog or functional equivalent as shown in column 8 of Table I B, application no. 12, and being depicted in the same respective line as said AvinDRAFT_{—}6700, and preferably the activity is increased non-targeted, or
[62242] (b) a polypeptide comprising a polypeptide, a consensus sequence or at least a polypeptide motif as shown in the respective line in column 5 of Table II or in column 8 of Table IV, application no. 12, respectively, and being depicted in the same respective line as said AvinDRAFT_{—}6700, or a functional equivalent or a homolog thereof as depicted in column 8 of Table II, application no. 12, preferably a homolog or functional equivalent as depicted in column 8 of Table II B, application no. 12, and being depicted in the same respective line as said AvinDRAFT_{—}6700, and preferably the activity is increased non-targeted, whereby the respective line discloses in column 7 the fine chemical 2-hydroxytetracosenoic acid (preferably 2-hydroxynervonic acid).

[62243] Accordingly, in one embodiment, the molecule which activity is to be increased in the process of the invention is the gene product with an activity as a “purine nucleoside phosphorylase”, preferably it is the molecule of section (a) or (b) of this paragraph.

[62244] In particular, it was observed that in plants, especially in Arabidopsis thaliana, increasing or generating the activity of a gene product non-targeted with the activity of a “purine nucleoside phosphorylase”, preferably being encoded by a gene comprising the nucleic acid sequence SEQ ID NO. 34044, preferably the coding region thereof, conferred the production of or the increase in 2-hydroxytetracosenoic acid (preferably 2-hydroxynervonic acid) compared with the wild type control.

[62245] The nucleic acid sequence of B0050 from Escherichia coli, e.g. as shown in the respective line in column 5 of Table I, application no. 12, has been published in B. And the activity of the gene product thereof is the activity of b0050-protein.

[62246] Accordingly, in one embodiment, the process of the present invention for producing 2-hydroxybehenic acid in a non-human organism, like a microorganism or a plant or a part thereof, comprises increasing or generating the activity of a gene product with the activity of a gene product conferring the activity of “b0050-protein”, especially from Escherichia coli or its functional equivalent or its homolog, e.g. the increase of
[62247] (a) a gene product of a gene comprising the nucleic acid molecule as shown in the respective line in column 5 of Table I (whereby the respective line discloses in column 7 the fine chemical 2-hydroxybehenic acid), application no. 12, preferably the coding region thereof, or a homolog or a fragment thereof, and being depicted in the same respective line as said B0050, or a functional equivalent or a homolog thereof as shown in column 8 of Table I, application no. 12, preferably the coding region thereof, particularly a homolog or functional equivalent as shown in column 8 of Table I B, application no. 12, and being depicted in the same respective line as said B0050, and preferably the activity is increased non-targeted, or
[62248] (b) a polypeptide comprising a polypeptide, a consensus sequence or at least a polypeptide motif as shown in the respective line in column 5 of Table II or in column 8 of Table IV, application no. 12, respectively, and being depicted in the same respective line as said B0050, or a functional equivalent or a homolog thereof as depicted in column 8 of Table II, application no. 12, preferably a homolog or functional equivalent as depicted in column 8 of Table II B, application no. 12, and being depicted in the same respective line as said B0050, and preferably the activity is increased non-targeted, whereby the respective line discloses in column 7 the fine chemical 2-hydroxybehenic acid.

[62249] Accordingly, in one embodiment, the molecule which activity is to be increased in the process of the invention is the gene product with an activity as a “b0050-protein”, preferably it is the molecule of section (a) or (b) of this paragraph.

[62250] In particular, it was observed that in plants, especially in Arabidopsis thaliana, increasing or generating the activity of a gene product non-targeted with the activity of a “b0050-protein”, preferably being encoded by a gene comprising the nucleic acid sequence SEQ ID NO. 103958, preferably the coding region thereof, conferred the production of or the increase in 2-hydroxybehenic acid compared with the wild type control.

[62251] The nucleic acid sequence of B0050 from Escherichia coli, e.g. as shown in the respective line in column 5 of Table I, application no. 12, has been published in B. And the activity of the gene product thereof is the activity of b0050-protein.

[62252] Accordingly, in one embodiment, the process of the present invention for producing 2-hydroxytetracosenoic acid (preferably 2-hydroxynervonic acid) in a non-human organism, like a microorganism or a plant or a part thereof, comprises increasing or generating the activity of a gene product with the activity of a gene product conferring the activity of “b0050-protein”, especially from Escherichia coli or its functional equivalent or its homolog, e.g. the increase of
[62253] (a) a gene product of a gene comprising the nucleic acid molecule as shown in the respective line in column 5 of Table I (whereby the respective line discloses in column 7 the fine chemical 2-hydroxytetracosenoic acid (preferably 2-hydroxynervonic acid)), application no. 12, preferably the coding region thereof, or a homolog or a fragment thereof, and being depicted in the same respective line as said B0050, or a functional equivalent or a homolog thereof as shown in column 8 of Table I, application no. 12, preferably the coding region thereof, particularly a homolog or functional equivalent as shown in column 8 of Table I B, application no. 12, and being depicted in the same respective line as said B0050, and preferably the activity is increased non-targeted, or
[62254] (b) a polypeptide comprising a polypeptide, a consensus sequence or at least a polypeptide motif as shown in the respective line in column 5 of Table II or in column 8 of Table IV, application no. 12, respectively, and being depicted in the same respective line as said B0050, or a functional equivalent or a homolog thereof as depicted in column 8 of Table II, application no. 12, preferably a homolog or functional equivalent as depicted in column 8 of Table II B, application no. 12, and being depicted in the same respective line as said B0050, and preferably the activity is increased non-targeted, whereby the respective line discloses in column 7 the fine chemical 2-hydroxytetracosenoic acid (preferably 2-hydroxynervonic acid).

[62255] Accordingly, in one embodiment, the molecule which activity is to be increased in the process of the invention is the gene product with an activity as a “b0050-protein”, preferably it is the molecule of section (a) or (b) of this paragraph.

[62256] In particular, it was observed that in plants, especially in Arabidopsis thaliana, increasing or generating the activity of a gene product non-targeted with the activity of a “b0050-protein”, preferably being encoded by a gene comprising the nucleic acid sequence SEQ ID NO. 103958, preferably the coding region thereof, conferred the production of or the increase in 2-hydroxytetracosenoic acid (preferably 2-hydroxynervonic acid) compared with the wild type control.

[62257] The nucleic acid sequence of B0249 from Escherichia coli, e.g. as shown in the respective line in column 5 of Table I, application no. 12, has been published in B. And the activity of the gene product thereof is the activity of b0249-protein.

[62258] Accordingly, in one embodiment, the process of the present invention for producing cerebronic acid in a non-human organism, like a microorganism or a plant or a part thereof, comprises increasing or generating the activity of a gene product with the activity of a gene product conferring the activity of “b0249-protein”, especially from Escherichia coli or its functional equivalent or its homolog, e.g. the increase of
[62259] (a) a gene product of a gene comprising the nucleic acid molecule as shown in the respective line in column 5 of Table I (whereby the respective line discloses in column 7 the fine chemical cerebronic acid), application no. 12, preferably the coding region thereof, or a homolog or a fragment thereof, and being depicted in the same respective line as said B0249, or a functional equivalent or a homolog thereof as shown in column 8 of Table I, application no. 12, preferably the coding region thereof, particularly a homolog or functional equivalent as shown in column 8 of Table I B, application no. 12, and being depicted in the same respective line as said B0249, and preferably the activity is increased non-targeted, or
[62260] (b) a polypeptide comprising a polypeptide, a consensus sequence or at least a polypeptide motif as shown in the respective line in column 5 of Table II or in column 8 of Table IV, application no. 12, respectively, and being depicted in the same respective line as said B0249, or a functional equivalent or a homolog thereof as depicted in column 8 of Table II, application no. 12, preferably a homolog or functional equivalent as depicted in column 8 of Table II B, application no. 12, and being depicted in the same respective line as said B0249, and preferably the activity is increased non-targeted, whereby the respective line discloses in column 7 the fine chemical cerebronic acid.

[62261] Accordingly, in one embodiment, the molecule which activity is to be increased in the process of the invention is the gene product with an activity as a “b0249-protein”, preferably it is the molecule of section (a) or (b) of this paragraph.

[62262] In particular, it was observed that in plants, especially in Arabidopsis thaliana, increasing or generating the activity of a gene product non-targeted with the activity of a “b0249-protein”, preferably being encoded by a gene comprising the nucleic acid sequence SEQ ID NO. 123473, preferably the coding region thereof, conferred the production of or the increase in cerebronic acid compared with the wild type control.

[62263] The nucleic acid sequence of B0312 from Escherichia coli, e.g. as shown in the respective line in column 5 of Table I, application no. 12, has been published in B. And the activity of the gene product thereof is the activity of betaine aldehyde dehydrogenase.

[62264] Accordingly, in one embodiment, the process of the present invention for producing behenic acid in a non-human organism, like a microorganism or a plant or a part thereof, comprises increasing or generating the activity of a gene product with the activity of a gene product conferring the activity of “betaine aldehyde dehydrogenase”, especially from Escherichia coli or its functional equivalent or its homolog, e.g. the increase of
[62265] (a) a gene product of a gene comprising the nucleic acid molecule as shown in the respective line in column 5 of Table I (whereby the respective line discloses in column 7 the fine chemical behenic acid), application no. 12, preferably the coding region thereof, or a homolog or a fragment thereof, and being depicted in the same respective line as said B0312, or a functional equivalent or a homolog thereof as shown in column 8 of Table I, application no. 12, preferably the coding region thereof, particularly a homolog or functional equivalent as shown in column 8 of Table I B, application no. 12, and being depicted in the same respective line as said B0312, and preferably the activity is increased non-targeted, or
[62266] (b) a polypeptide comprising a polypeptide, a consensus sequence or at least a polypeptide motif as shown in the respective line in column 5 of Table II or in column 8 of Table IV, application no. 12, respectively, and being depicted in the same respective line as said B0312, or a functional equivalent or a homolog thereof as depicted in column 8 of Table II, application no. 12, preferably a homolog or functional equivalent as depicted in column 8 of Table II B, application no. 12, and being depicted in the same respective line as said B0312, and preferably the activity is increased non-targeted, whereby the respective line discloses in column 7 the fine chemical behenic acid.

[62267] Accordingly, in one embodiment, the molecule which activity is to be increased in the process of the invention is the gene product with an activity as a “betaine aldehyde dehydrogenase”, preferably it is the molecule of section (a) or (b) of this paragraph.

[62268] In particular, it was observed that in plants, especially in Arabidopsis thaliana, increasing or generating the activity of a gene product non-targeted with the activity of a “betaine aldehyde dehydrogenase”, preferably being encoded by a gene comprising the nucleic acid sequence SEQ ID NO. 121111, preferably the coding region thereof, conferred the production of or the increase in behenic acid compared with the wild type control.

[62269] The nucleic acid sequence of B0312 from Escherichia coli, e.g. as shown in the respective line in column 5 of Table I, application no. 12, has been published in B. And the activity of the gene product thereof is the activity of betaine aldehyde dehydrogenase.

[62270] Accordingly, in one embodiment, the process of the present invention for producing eicosanoic acid in a non-human organism, like a microorganism or a plant or a part thereof, comprises increasing or generating the activity of a gene product with the activity of a gene product conferring the activity of “betaine aldehyde dehydrogenase”, especially from Escherichia coli or its functional equivalent or its homolog, e.g. the increase of
[62271] (a) a gene product of a gene comprising the nucleic acid molecule as shown in the respective line in column 5 of Table I (whereby the respective line discloses in column 7 the fine chemical eicosanoic acid), application no. 12, preferably the coding region thereof, or a homolog or a fragment thereof, and being depicted in the same respective line as said B0312, or a functional equivalent or a homolog thereof as shown in column 8 of Table I, application no. 12, preferably the coding region thereof, particularly a homolog or functional equivalent as shown in column 8 of Table I B, application no. 12, and being depicted in the same respective line as said B0312, and preferably the activity is increased non-targeted, or
[62272] (b) a polypeptide comprising a polypeptide, a consensus sequence or at least a polypeptide motif as shown in the respective line in column 5 of Table II or in column 8 of Table IV, application no. 12, respectively, and being depicted in the same respective line as said B0312, or a functional equivalent or a homolog thereof as depicted in column 8 of Table II, application no. 12, preferably a homolog or functional equivalent as depicted in column 8 of Table II B, application no. 12, and being depicted in the same respective line as said B0312, and preferably the activity is increased non-targeted, whereby the respective line discloses in column 7 the fine chemical eicosanoic acid.

[62273] Accordingly, in one embodiment, the molecule which activity is to be increased in the process of the invention is the gene product with an activity as a “betaine aldehyde dehydrogenase”, preferably it is the molecule of section (a) or (b) of this paragraph.

[62274] In particular, it was observed that in plants, especially in Arabidopsis thaliana, increasing or generating the activity of a gene product non-targeted with the activity of a “betaine aldehyde dehydrogenase”, preferably being encoded by a gene comprising the nucleic acid sequence SEQ ID NO. 121111, preferably the coding region thereof, conferred the production of or the increase in eicosanoic acid compared with the wild type control.

[62275] The nucleic acid sequence of B0348 from Escherichia coli, e.g. as shown in the respective line in column 5 of Table I, application no. 12, has been published in B. And the activity of the gene product thereof is the activity of 2,3-dihydroxyphenylpropionate 1,2-dioxygenase.

[62276] Accordingly, in one embodiment, the process of the present invention for producing myristic acid in a non-human organism, like a microorganism or a plant or a part thereof, comprises increasing or generating the activity of a gene product with the activity of a gene product conferring the activity of “2,3-dihydroxyphenylpropionate 1,2-dioxygenase”, especially from Escherichia coli or its functional equivalent or its homolog, e.g. the increase of
[62277] (a) a gene product of a gene comprising the nucleic acid molecule as shown in the respective line in column 5 of Table I (whereby the respective line discloses in column 7 the fine chemical myristic acid), application no. 12, preferably the coding region thereof, or a homolog or a fragment thereof, and being depicted in the same respective line as said B0348, or a functional equivalent or a homolog thereof as shown in column 8 of Table I, application no. 12, preferably the coding region thereof, particularly a homolog or functional equivalent as shown in column 8 of Table I B, application no. 12, and being depicted in the same respective line as said B0348, and preferably the activity is increased plastidic, or
[62278] (b) a polypeptide comprising a polypeptide, a consensus sequence or at least a polypeptide motif as shown in the respective line in column 5 of Table II or in column 8 of Table IV, application no. 12, respectively, and being depicted in the same respective line as said B0348, or a functional equivalent or a homolog thereof as depicted in column 8 of Table II, application no. 12, preferably a homolog or functional equivalent as depicted in column 8 of Table II B, application no. 12, and being depicted in the same respective line as said B0348, and preferably the activity is increased plastidic, whereby the respective line discloses in column 7 the fine chemical myristic acid.

[62279] Accordingly, in one embodiment, the molecule which activity is to be increased in the process of the invention is the gene product with an activity as a “2,3-dihydroxyphenylpropionate 1,2-dioxygenase”, preferably it is the molecule of section (a) or (b) of this paragraph.

[62280] In particular, it was observed that in plants, especially in Arabidopsis thaliana, increasing or generating the activity of a gene product plastidic with the activity of a “2,3-dihydroxyphenylpropionate 1,2-dioxygenase”, preferably being encoded by a gene comprising the nucleic acid sequence SEQ ID NO. 7269, preferably the coding region thereof, conferred the production of or the increase in myristic acid compared with the wild type control.

[62281] The nucleic acid sequence of B0348 from Escherichia coli, e.g. as shown in the respective line in column 5 of Table I, application no. 12, has been published in B. And the activity of the gene product thereof is the activity of 2,3-dihydroxyphenylpropionate 1,2-dioxygenase.

[62282] Accordingly, in one embodiment, the process of the present invention for producing oleic acid in a non-human organism, like a microorganism or a plant or a part thereof, comprises increasing or generating the activity of a gene product with the activity of a gene product conferring the activity of “2,3-dihydroxyphenylpropionate 1,2-dioxygenase”, especially from Escherichia coli or its functional equivalent or its homolog, e.g. the increase of
[62283] (a) a gene product of a gene comprising the nucleic acid molecule as shown in the respective line in column 5 of Table I (whereby the respective line discloses in column 7 the fine chemical oleic acid), application no. 12, preferably the coding region thereof, or a homolog or a fragment thereof, and being depicted in the same respective line as said B0348, or a functional equivalent or a homolog thereof as shown in column 8 of Table I, application no. 12, preferably the coding region thereof, particularly a homolog or functional equivalent as shown in column 8 of Table I B, application no. 12, and being depicted in the same respective line as said B0348, and preferably the activity is increased plastidic, or
[62284] (b) a polypeptide comprising a polypeptide, a consensus sequence or at least a polypeptide motif as shown in the respective line in column 5 of Table II or in column 8 of Table IV, application no. 12, respectively, and being depicted in the same respective line as said B0348, or a functional equivalent or a homolog thereof as depicted in column 8 of Table II, application no. 12, preferably a homolog or functional equivalent as depicted in column 8 of Table II B, application no. 12, and being depicted in the same respective line as said B0348, and preferably the activity is increased plastidic, whereby the respective line discloses in column 7 the fine chemical oleic acid.

[62285] Accordingly, in one embodiment, the molecule which activity is to be increased in the process of the invention is the gene product with an activity as a “2,3-dihydroxyphenylpropionate 1,2-dioxygenase”, preferably it is the molecule of section (a) or (b) of this paragraph.

[62286] In particular, it was observed that in plants, especially in Arabidopsis thaliana, increasing or generating the activity of a gene product plastidic with the activity of a “2,3-dihydroxyphenylpropionate 1,2-dioxygenase”, preferably being encoded by a gene comprising the nucleic acid sequence SEQ ID NO. 7269, preferably the coding region thereof, conferred the production of or the increase in oleic acid compared with the wild type control.

[62287] The nucleic acid sequence of B0371 from Escherichia coli, e.g. as shown in the respective line in column 5 of Table I, application no. 12, has been published in B. And the activity of the gene product thereof is the activity of b0371-protein.

[62288] Accordingly, in one embodiment, the process of the present invention for producing hexadecatrienoic acid in a non-human organism, like a microorganism or a plant or a part thereof, comprises increasing or generating the activity of a gene product with the activity of a gene product conferring the activity of “b0371-protein”, especially from Escherichia coli or its functional equivalent or its homolog, e.g. the increase of
[62289] (a) a gene product of a gene comprising the nucleic acid molecule as shown in the respective line in column 5 of Table I (whereby the respective line discloses in column 7 the fine chemical hexadecatrienoic acid), application no. 12, preferably the coding region thereof, or a homolog or a fragment thereof, and being depicted in the same respective line as said B0371, or a functional equivalent or a homolog thereof as shown in column 8 of Table I, application no. 12, preferably the coding region thereof, particularly a homolog or functional equivalent as shown in column 8 of Table I B, application no. 12, and being depicted in the same respective line as said B0371, and preferably the activity is increased non-targeted, or
[62290] (b) a polypeptide comprising a polypeptide, a consensus sequence or at least a polypeptide motif as shown in the respective line in column 5 of Table II or in column 8 of Table IV, application no. 12, respectively, and being depicted in the same respective line as said B0371, or a functional equivalent or a homolog thereof as depicted in column 8 of Table II, application no. 12, preferably a homolog or functional equivalent as depicted in column 8 of Table II B, application no. 12, and being depicted in the same respective line as said B0371, and preferably the activity is increased non-targeted, whereby the respective line discloses in column 7 the fine chemical hexadecatrienoic acid.

[62291] Accordingly, in one embodiment, the molecule which activity is to be increased in the process of the invention is the gene product with an activity as a “b0371-protein”, preferably it is the molecule of section (a) or (b) of this paragraph.

[62292] In particular, it was observed that in plants, especially in Arabidopsis thaliana, increasing or generating the activity of a gene product non-targeted with the activity of a “b0371-protein”, preferably being encoded by a gene comprising the nucleic acid sequence SEQ ID NO. 121637, preferably the coding region thereof, conferred the production of or the increase in hexadecatrienoic acid compared with the wild type control.

[62293] The nucleic acid sequence of B0449 from Escherichia coli, e.g. as shown in the respective line in column 5 of Table I, application no. 12, has been published in B. And the activity of the gene product thereof is the activity of ATP-binding component of a transport system.

[62294] Accordingly, in one embodiment, the process of the present invention for producing cerebronic acid in a non-human organism, like a microorganism or a plant or a part thereof, comprises increasing or generating the activity of a gene product with the activity of a gene product conferring the activity of “ATP-binding component of a transport system”, especially from Escherichia coli or its functional equivalent or its homolog, e.g. the increase of
[62295] (a) a gene product of a gene comprising the nucleic acid molecule as shown in the respective line in column 5 of Table I (whereby the respective line discloses in column 7 the fine chemical cerebronic acid), application no. 12, preferably the coding region thereof, or a homolog or a fragment thereof, and being depicted in the same respective line as said B0449, or a functional equivalent or a homolog thereof as shown in column 8 of Table I, application no. 12, preferably the coding region thereof, particularly a homolog or functional equivalent as shown in column 8 of Table I B, application no. 12, and being depicted in the same respective line as said B0449, and preferably the activity is increased non-targeted, or
[62296] (b) a polypeptide comprising a polypeptide, a consensus sequence or at least a polypeptide motif as shown in the respective line in column 5 of Table II or in column 8 of Table IV, application no. 12, respectively, and being depicted in the same respective line as said B0449, or a functional equivalent or a homolog thereof as depicted in column 8 of Table II, application no. 12, preferably a homolog or functional equivalent as depicted in column 8 of Table II B, application no. 12, and being depicted in the same respective line as said B0449, and preferably the activity is increased non-targeted, whereby the respective line discloses in column 7 the fine chemical cerebronic acid.

[62297] Accordingly, in one embodiment, the molecule which activity is to be increased in the process of the invention is the gene product with an activity as a “ATP-binding component of a transport system”, preferably it is the molecule of section (a) or (b) of this paragraph.

[62298] In particular, it was observed that in plants, especially in Arabidopsis thaliana, increasing or generating the activity of a gene product non-targeted with the activity of a “ATP-binding component of a transport system”, preferably being encoded by a gene comprising the nucleic acid sequence SEQ ID NO. 7333, preferably the coding region thereof, conferred the production of or the increase in cerebronic acid compared with the wild type control.

[62299] The nucleic acid sequence of B0449 from Escherichia coli, e.g. as shown in the respective line in column 5 of Table I, application no. 12, has been published in B. And the activity of the gene product thereof is the activity of ATP-binding component of a transport system.

[62300] Accordingly, in one embodiment, the process of the present invention for producing 2-hydroxybehenic acid in a non-human organism, like a microorganism or a plant or a part thereof, comprises increasing or generating the activity of a gene product with the activity of a gene product conferring the activity of “ATP-binding component of a transport system”, especially from Escherichia coli or its functional equivalent or its homolog, e.g. the increase of
[62301] (a) a gene product of a gene comprising the nucleic acid molecule as shown in the respective line in column 5 of Table I (whereby the respective line discloses in column 7 the fine chemical 2-hydroxybehenic acid), application no. 12, preferably the coding region thereof, or a homolog or a fragment thereof, and being depicted in the same respective line as said B0449, or a functional equivalent or a homolog thereof as shown in column 8 of Table I, application no. 12, preferably the coding region thereof, particularly a homolog or functional equivalent as shown in column 8 of Table I B, application no. 12, and being depicted in the same respective line as said B0449, and preferably the activity is increased non-targeted, or
[62302] (b) a polypeptide comprising a polypeptide, a consensus sequence or at least a polypeptide motif as shown in the respective line in column 5 of Table II or in column 8 of Table IV, application no. 12, respectively, and being depicted in the same respective line as said B0449, or a functional equivalent or a homolog thereof as depicted in column 8 of Table II, application no. 12, preferably a homolog or functional equivalent as depicted in column 8 of Table II B, application no. 12, and being depicted in the same respective line as said B0449, and preferably the activity is increased non-targeted, whereby the respective line discloses in column 7 the fine chemical 2-hydroxybehenic acid.

[62303] Accordingly, in one embodiment, the molecule which activity is to be increased in the process of the invention is the gene product with an activity as a “ATP-binding component of a transport system”, preferably it is the molecule of section (a) or (b) of this paragraph.

[62304] In particular, it was observed that in plants, especially in Arabidopsis thaliana, increasing or generating the activity of a gene product non-targeted with the activity of a “ATP-binding component of a transport system”, preferably being encoded by a gene comprising the nucleic acid sequence SEQ ID NO. 7333, preferably the coding region thereof, conferred the production of or the increase in 2-hydroxybehenic acid compared with the wild type control.

[62305] The nucleic acid sequence of B0449 from Escherichia coli, e.g. as shown in the respective line in column 5 of Table I, application no. 12, has been published in B. And the activity of the gene product thereof is the activity of ATP-binding component of a transport system.

[62306] Accordingly, in one embodiment, the process of the present invention for producing 2-hydroxypalmitic acid in a non-human organism, like a microorganism or a plant or a part thereof, comprises increasing or generating the activity of a gene product with the activity of a gene product conferring the activity of “ATP-binding component of a transport system”, especially from Escherichia coli or its functional equivalent or its homolog, e.g. the increase of
[62307] (a) a gene product of a gene comprising the nucleic acid molecule as shown in the respective line in column 5 of Table I (whereby the respective line discloses in column 7 the fine chemical 2-hydroxypalmitic acid), application no. 12, preferably the coding region thereof, or a homolog or a fragment thereof, and being depicted in the same respective line as said B0449, or a functional equivalent or a homolog thereof as shown in column 8 of Table I, application no. 12, preferably the coding region thereof, particularly a homolog or functional equivalent as shown in column 8 of Table I B, application no. 12, and being depicted in the same respective line as said B0449, and preferably the activity is increased non-targeted, or
[62308] (b) a polypeptide comprising a polypeptide, a consensus sequence or at least a polypeptide motif as shown in the respective line in column 5 of Table II or in column 8 of Table IV, application no. 12, respectively, and being depicted in the same respective line as said B0449, or a functional equivalent or a homolog thereof as depicted in column 8 of Table II, application no. 12, preferably a homolog or functional equivalent as depicted in column 8 of Table II B, application no. 12, and being depicted in the same respective line as said B0449, and preferably the activity is increased non-targeted, whereby the respective line discloses in column 7 the fine chemical 2-hydroxypalmitic acid.

[62309] Accordingly, in one embodiment, the molecule which activity is to be increased in the process of the invention is the gene product with an activity as a “ATP-binding component of a transport system”, preferably it is the molecule of section (a) or (b) of this paragraph.

[62310] In particular, it was observed that in plants, especially in Arabidopsis thaliana, increasing or generating the activity of a gene product non-targeted with the activity of a “ATP-binding component of a transport system”, preferably being encoded by a gene comprising the nucleic acid sequence SEQ ID NO. 7333, preferably the coding region thereof, conferred the production of or the increase in 2-hydroxypalmitic acid compared with the wild type control.

[62311] The nucleic acid sequence of B0518 from Escherichia coli, e.g. as shown in the respective line in column 5 of Table I, application no. 12, has been published in B. And the activity of the gene product thereof is the activity of b0518-protein.

[62312] Accordingly, in one embodiment, the process of the present invention for producing hexadecadienoic acid in a non-human organism, like a microorganism or a plant or a part thereof, comprises increasing or generating the activity of a gene product with the activity of a gene product conferring the activity of “b0518-protein”, especially from Escherichia coli or its functional equivalent or its homolog, e.g. the increase of
[62313] (a) a gene product of a gene comprising the nucleic acid molecule as shown in the respective line in column 5 of Table I (whereby the respective line discloses in column 7 the fine chemical hexadecadienoic acid), application no. 12, preferably the coding region thereof, or a homolog or a fragment thereof, and being depicted in the same respective line as said B0518, or a functional equivalent or a homolog thereof as shown in column 8 of Table I, application no. 12, preferably the coding region thereof, particularly a homolog or functional equivalent as shown in column 8 of Table I B, application no. 12, and being depicted in the same respective line as said B0518, and preferably the activity is increased non-targeted, or
[62314] (b) a polypeptide comprising a polypeptide, a consensus sequence or at least a polypeptide motif as shown in the respective line in column 5 of Table II or in column 8 of Table IV, application no. 12, respectively, and being depicted in the same respective line as said B0518, or a functional equivalent or a homolog thereof as depicted in column 8 of Table II, application no. 12, preferably a homolog or functional equivalent as depicted in column 8 of Table II B, application no. 12, and being depicted in the same respective line as said B0518, and preferably the activity is increased non-targeted, whereby the respective line discloses in column 7 the fine chemical hexadecadienoic acid.

[62315] Accordingly, in one embodiment, the molecule which activity is to be increased in the process of the invention is the gene product with an activity as a “b0518-protein”, preferably it is the molecule of section (a) or (b) of this paragraph.

[62316] In particular, it was observed that in plants, especially in Arabidopsis thaliana, increasing or generating the activity of a gene product non-targeted with the activity of a “b0518-protein”, preferably being encoded by a gene comprising the nucleic acid sequence SEQ ID NO. 35936, preferably the coding region thereof, conferred the production of or the increase in hexadecadienoic acid compared with the wild type control.

[62317] The nucleic acid sequence of B0695 from Escherichia coli, e.g. as shown in the respective line in column 5 of Table I, application no. 12, has been published in B. And the activity of the gene product thereof is the activity of sensor histidine kinase.

[62318] Accordingly, in one embodiment, the process of the present invention for producing 2-hydroxybehenic acid in a non-human organism, like a microorganism or a plant or a part thereof, comprises increasing or generating the activity of a gene product with the activity of a gene product conferring the activity of “sensor histidine kinase”, especially from Escherichia coli or its functional equivalent or its homolog, e.g. the increase of
[62319] (a) a gene product of a gene comprising the nucleic acid molecule as shown in the respective line in column 5 of Table I (whereby the respective line discloses in column 7 the fine chemical 2-hydroxybehenic acid), application no. 12, preferably the coding region thereof, or a homolog or a fragment thereof, and being depicted in the same respective line as said B0695, or a functional equivalent or a homolog thereof as shown in column 8 of Table I, application no. 12, preferably the coding region thereof, particularly a homolog or functional equivalent as shown in column 8 of Table I B, application no. 12, and being depicted in the same respective line as said B0695, and preferably the activity is increased non-targeted, or
[62320] (b) a polypeptide comprising a polypeptide, a consensus sequence or at least a polypeptide motif as shown in the respective line in column 5 of Table II or in column 8 of Table IV, application no. 12, respectively, and being depicted in the same respective line as said B0695, or a functional equivalent or a homolog thereof as depicted in column 8 of Table II, application no. 12, preferably a homolog or functional equivalent as depicted in column 8 of Table II B, application no. 12, and being depicted in the same respective line as said B0695, and preferably the activity is increased non-targeted, whereby the respective line discloses in column 7 the fine chemical 2-hydroxybehenic acid.

[62321] Accordingly, in one embodiment, the molecule which activity is to be increased in the process of the invention is the gene product with an activity as a “sensor histidine kinase”, preferably it is the molecule of section (a) or (b) of this paragraph.

[62322] In particular, it was observed that in plants, especially in Arabidopsis thaliana, increasing or generating the activity of a gene product non-targeted with the activity of a “sensor histidine kinase”, preferably being encoded by a gene comprising the nucleic acid sequence SEQ ID NO. 93678, preferably the coding region thereof, conferred the production of or the increase in 2-hydroxybehenic acid compared with the wild type control.

[62323] The nucleic acid sequence of B0695 from Escherichia coli, e.g. as shown in the respective line in column 5 of Table I, application no. 12, has been published in B. And the activity of the gene product thereof is the activity of sensor histidine kinase.

[62324] Accordingly, in one embodiment, the process of the present invention for producing 2-hydroxytetracosenoic acid (preferably 2-hydroxynervonic acid) in a non-human organism, like a microorganism or a plant or a part thereof, comprises increasing or generating the activity of a gene product with the activity of a gene product conferring the activity of “sensor histidine kinase”, especially from Escherichia coli or its functional equivalent or its homolog, e.g. the increase of
[62325] (a) a gene product of a gene comprising the nucleic acid molecule as shown in the respective line in column 5 of Table I (whereby the respective line discloses in column 7 the fine chemical 2-hydroxytetracosenoic acid (preferably 2-hydroxynervonic acid)), application no. 12, preferably the coding region thereof, or a homolog or a fragment thereof, and being depicted in the same respective line as said B0695, or a functional equivalent or a homolog thereof as shown in column 8 of Table I, application no. 12, preferably the coding region thereof, particularly a homolog or functional equivalent as shown in column 8 of Table I B, application no. 12, and being depicted in the same respective line as said B0695, and preferably the activity is increased non-targeted, or
[62326] (b) a polypeptide comprising a polypeptide, a consensus sequence or at least a polypeptide motif as shown in the respective line in column 5 of Table II or in column 8 of Table IV, application no. 12, respectively, and being depicted in the same respective line as said B0695, or a functional equivalent or a homolog thereof as depicted in column 8 of Table II, application no. 12, preferably a homolog or functional equivalent as depicted in column 8 of Table II B, application no. 12, and being depicted in the same respective line as said B0695, and preferably the activity is increased non-targeted, whereby the respective line discloses in column 7 the fine chemical 2-hydroxytetracosenoic acid (preferably 2-hydroxynervonic acid).

[62327] Accordingly, in one embodiment, the molecule which activity is to be increased in the process of the invention is the gene product with an activity as a “sensor histidine kinase”, preferably it is the molecule of section (a) or (b) of this paragraph.

[62328] In particular, it was observed that in plants, especially in Arabidopsis thaliana, increasing or generating the activity of a gene product non-targeted with the activity of a “sensor histidine kinase”, preferably being encoded by a gene comprising the nucleic acid sequence SEQ ID NO. 93678, preferably the coding region thereof, conferred the production of or the increase in 2-hydroxytetracosenoic acid (preferably 2-hydroxynervonic acid) compared with the wild type control.

[62329] The nucleic acid sequence of B0720 from Escherichia coli, e.g. as shown in the respective line in column 5 of Table I, application no. 12, has been published in B. And the activity of the gene product thereof is the activity of citrate synthase.

[62330] Accordingly, in one embodiment, the process of the present invention for producing cerebronic acid in a non-human organism, like a microorganism or a plant or a part thereof, comprises increasing or generating the activity of a gene product with the activity of a gene product conferring the activity of “citrate synthase”, especially from Escherichia coli or its functional equivalent or its homolog, e.g. the increase of
[62331] (a) a gene product of a gene comprising the nucleic acid molecule as shown in the respective line in column 5 of Table I (whereby the respective line discloses in column 7 the fine chemical cerebronic acid), application no. 12, preferably the coding region thereof, or a homolog or a fragment thereof, and being depicted in the same respective line as said B0720, or a functional equivalent or a homolog thereof as shown in column 8 of Table I, application no. 12, preferably the coding region thereof, particularly a homolog or functional equivalent as shown in column 8 of Table I B, application no. 12, and being depicted in the same respective line as said B0720, and preferably the activity is increased plastidic, or
[62332] (b) a polypeptide comprising a polypeptide, a consensus sequence or at least a polypeptide motif as shown in the respective line in column 5 of Table II or in column 8 of Table IV, application no. 12, respectively, and being depicted in the same respective line as said B0720, or a functional equivalent or a homolog thereof as depicted in column 8 of Table II, application no. 12, preferably a homolog or functional equivalent as depicted in column 8 of Table II B, application no. 12, and being depicted in the same respective line as said B0720, and preferably the activity is increased plastidic, whereby the respective line discloses in column 7 the fine chemical cerebronic acid.

[62333] Accordingly, in one embodiment, the molecule which activity is to be increased in the process of the invention is the gene product with an activity as a “citrate synthase”, preferably it is the molecule of section (a) or (b) of this paragraph.

[62334] In particular, it was observed that in plants, especially in Arabidopsis thaliana, increasing or generating the activity of a gene product plastidic with the activity of a “citrate synthase”, preferably being encoded by a gene comprising the nucleic acid sequence SEQ ID NO. 123498, preferably the coding region thereof, conferred the production of or the increase in cerebronic acid compared with the wild type control.

[62335] The nucleic acid sequence of B0801 from Escherichia coli, e.g. as shown in the respective line in column 5 of Table I, application no. 12, has been published in B. And the activity of the gene product thereof is the activity of b0801-protein.

[62336] Accordingly, in one embodiment, the process of the present invention for producing 2-hydroxytetracosenoic acid (preferably 2-hydroxynervonic acid) in a non-human organism, like a microorganism or a plant or a part thereof, comprises increasing or generating the activity of a gene product with the activity of a gene product conferring the activity of “b0801-protein”, especially from Escherichia coli or its functional equivalent or its homolog, e.g. the increase of
[62337] (a) a gene product of a gene comprising the nucleic acid molecule as shown in the respective line in column 5 of Table I (whereby the respective line discloses in column 7 the fine chemical 2-hydroxytetracosenoic acid (preferably 2-hydroxynervonic acid)), application no. 12, preferably the coding region thereof, or a homolog or a fragment thereof, and being depicted in the same respective line as said B0801, or a functional equivalent or a homolog thereof as shown in column 8 of Table I, application no. 12, preferably the coding region thereof, particularly a homolog or functional equivalent as shown in column 8 of Table I B, application no. 12, and being depicted in the same respective line as said B0801, and preferably the activity is increased non-targeted, or
[62338] (b) a polypeptide comprising a polypeptide, a consensus sequence or at least a polypeptide motif as shown in the respective line in column 5 of Table II or in column 8 of Table IV, application no. 12, respectively, and being depicted in the same respective line as said B0801, or a functional equivalent or a homolog thereof as depicted in column 8 of Table II, application no. 12, preferably a homolog or functional equivalent as depicted in column 8 of Table II B, application no. 12, and being depicted in the same respective line as said B0801, and preferably the activity is increased non-targeted, whereby the respective line discloses in column 7 the fine chemical 2-hydroxytetracosenoic acid (preferably 2-hydroxynervonic acid).

[62339] Accordingly, in one embodiment, the molecule which activity is to be increased in the process of the invention is the gene product with an activity as a “b0801-protein”, preferably it is the molecule of section (a) or (b) of this paragraph.

[62340] In particular, it was observed that in plants, especially in Arabidopsis thaliana, increasing or generating the activity of a gene product non-targeted with the activity of a “b0801-protein”, preferably being encoded by a gene comprising the nucleic acid sequence SEQ ID NO. 75807, preferably the coding region thereof, conferred the production of or the increase in 2-hydroxytetracosenoic acid (preferably 2-hydroxynervonic acid) compared with the wild type control.

[62341] The nucleic acid sequence of B1046 from Escherichia coli, e.g. as shown in the respective line in column 5 of Table I, application no. 12, has been published in B. And the activity of the gene product thereof is the activity of b1046-protein.

[62342] Accordingly, in one embodiment, the process of the present invention for producing cerebronic acid in a non-human organism, like a microorganism or a plant or a part thereof, comprises increasing or generating the activity of a gene product with the activity of a gene product conferring the activity of “b1046-protein”, especially from Escherichia coli or its functional equivalent or its homolog, e.g. the increase of
[62343] (a) a gene product of a gene comprising the nucleic acid molecule as shown in the respective line in column 5 of Table I (whereby the respective line discloses in column 7 the fine chemical cerebronic acid), application no. 12, preferably the coding region thereof, or a homolog or a fragment thereof, and being depicted in the same respective line as said B1046, or a functional equivalent or a homolog thereof as shown in column 8 of Table I, application no. 12, preferably the coding region thereof, particularly a homolog or functional equivalent as shown in column 8 of Table I B, application no. 12, and being depicted in the same respective line as said B1046, and preferably the activity is increased plastidic, or
[62344] (b) a polypeptide comprising a polypeptide, a consensus sequence or at least a polypeptide motif as shown in the respective line in column 5 of Table II or in column 8 of Table IV, application no. 12, respectively, and being depicted in the same respective line as said B1046, or a functional equivalent or a homolog thereof as depicted in column 8 of Table II, application no. 12, preferably a homolog or functional equivalent as depicted in column 8 of Table II B, application no. 12, and being depicted in the same respective line as said B1046, and preferably the activity is increased plastidic, whereby the respective line discloses in column 7 the fine chemical cerebronic acid.

[62345] Accordingly, in one embodiment, the molecule which activity is to be increased in the process of the invention is the gene product with an activity as a “b1046-protein”, preferably it is the molecule of section (a) or (b) of this paragraph.

[62346] In particular, it was observed that in plants, especially in Arabidopsis thaliana, increasing or generating the activity of a gene product plastidic with the activity of a “b1046-protein”, preferably being encoded by a gene comprising the nucleic acid sequence SEQ ID NO. 124051, preferably the coding region thereof, conferred the production of or the increase in cerebronic acid compared with the wild type control.

[62347] The nucleic acid sequence of B1092 from Escherichia coli, e.g. as shown in the respective line in column 5 of Table I, application no. 12, has been published in B. And the activity of the gene product thereof is the activity of malonyl CoA-acyl carrier protein transacylase.

[62348] Accordingly, in one embodiment, the process of the present invention for producing hexadecatrienoic acid in a non-human organism, like a microorganism or a plant or a part thereof, comprises increasing or generating the activity of a gene product with the activity of a gene product conferring the activity of “malonyl CoA-acyl carrier protein transacylase”, especially from Escherichia coli or its functional equivalent or its homolog, e.g. the increase of
[62349] (a) a gene product of a gene comprising the nucleic acid molecule as shown in the respective line in column 5 of Table I (whereby the respective line discloses in column 7 the fine chemical hexadecatrienoic acid), application no. 12, preferably the coding region thereof, or a homolog or a fragment thereof, and being depicted in the same respective line as said B1092, or a functional equivalent or a homolog thereof as shown in column 8 of Table I, application no. 12, preferably the coding region thereof, particularly a homolog or functional equivalent as shown in column 8 of Table I B, application no. 12, and being depicted in the same respective line as said B1092, and preferably the activity is increased plastidic, or
[62350] (b) a polypeptide comprising a polypeptide, a consensus sequence or at least a polypeptide motif as shown in the respective line in column 5 of Table II or in column 8 of Table IV, application no. 12, respectively, and being depicted in the same respective line as said B1092, or a functional equivalent or a homolog thereof as depicted in column 8 of Table II, application no. 12, preferably a homolog or functional equivalent as depicted in column 8 of Table II B, application no. 12, and being depicted in the same respective line as said B1092, and preferably the activity is increased plastidic, whereby the respective line discloses in column 7 the fine chemical hexadecatrienoic acid.

[62351] Accordingly, in one embodiment, the molecule which activity is to be increased in the process of the invention is the gene product with an activity as a “malonyl CoA-acyl carrier protein transacylase”, preferably it is the molecule of section (a) or (b) of this paragraph.

[62352] In particular, it was observed that in plants, especially in Arabidopsis thaliana, increasing or generating the activity of a gene product plastidic with the activity of a “malonyl CoA-acyl carrier protein transacylase”, preferably being encoded by a gene comprising the nucleic acid sequence SEQ ID NO. 124127, preferably the coding region thereof, conferred the production of or the increase in hexadecatrienoic acid compared with the wild type control.

[62353] The nucleic acid sequence of B1093 from Escherichia coli, e.g. as shown in the respective line in column 5 of Table I, application no. 12, has been published in B. And the activity of the gene product thereof is the activity of 3-oxoacyl-[acyl-carrier-protein] reductase.

[62354] Accordingly, in one embodiment, the process of the present invention for producing hexadecadienoic acid in a non-human organism, like a microorganism or a plant or a part thereof, comprises increasing or generating the activity of a gene product with the activity of a gene product conferring the activity of “3-oxoacyl-[acyl-carrier-protein] reductase”, especially from Escherichia coli or its functional equivalent or its homolog, e.g. the increase of
[62355] (a) a gene product of a gene comprising the nucleic acid molecule as shown in the respective line in column 5 of Table I (whereby the respective line discloses in column 7 the fine chemical hexadecadienoic acid), application no. 12, preferably the coding region thereof, or a homolog or a fragment thereof, and being depicted in the same respective line as said B1093, or a functional equivalent or a homolog thereof as shown in column 8 of Table I, application no. 12, preferably the coding region thereof, particularly a homolog or functional equivalent as shown in column 8 of Table I B, application no. 12, and being depicted in the same respective line as said B1093, and preferably the activity is increased non-targeted, or
[62356] (b) a polypeptide comprising a polypeptide, a consensus sequence or at least a polypeptide motif as shown in the respective line in column 5 of Table II or in column 8 of Table IV, application no. 12, respectively, and being depicted in the same respective line as said B1093, or a functional equivalent or a homolog thereof as depicted in column 8 of Table II, application no. 12, preferably a homolog or functional equivalent as depicted in column 8 of Table II B, application no. 12, and being depicted in the same respective line as said B1093, and preferably the activity is increased non-targeted, whereby the respective line discloses in column 7 the fine chemical hexadecadienoic acid.

[62357] Accordingly, in one embodiment, the molecule which activity is to be increased in the process of the invention is the gene product with an activity as a “3-oxoacyl-[acyl-carrier-protein] reductase”, preferably it is the molecule of section (a) or (b) of this paragraph.

[62358] In particular, it was observed that in plants, especially in Arabidopsis thaliana, increasing or generating the activity of a gene product non-targeted with the activity of a “3-oxoacyl-[acyl-carrier-protein] reductase”, preferably being encoded by a gene comprising the nucleic acid sequence SEQ ID NO. 118371, preferably the coding region thereof, conferred the production of or the increase in hexadecadienoic acid compared with the wild type control.

[62359] The nucleic acid sequence of B1093 from Escherichia coli, e.g. as shown in the respective line in column 5 of Table I, application no. 12, has been published in B. And the activity of the gene product thereof is the activity of 3-oxoacyl-[acyl-carrier-protein] reductase.

[62360] Accordingly, in one embodiment, the process of the present invention for producing hexadecatrienoic acid in a non-human organism, like a microorganism or a plant or a part thereof, comprises increasing or generating the activity of a gene product with the activity of a gene product conferring the activity of “3-oxoacyl-[acyl-carrier-protein] reductase”, especially from Escherichia coli or its functional equivalent or its homolog, e.g. the increase of
[62361] (a) a gene product of a gene comprising the nucleic acid molecule as shown in the respective line in column 5 of Table I (whereby the respective line discloses in column 7 the fine chemical hexadecatrienoic acid), application no. 12, preferably the coding region thereof, or a homolog or a fragment thereof, and being depicted in the same respective line as said B1093, or a functional equivalent or a homolog thereof as shown in column 8 of Table I, application no. 12, preferably the coding region thereof, particularly a homolog or functional equivalent as shown in column 8 of Table I B, application no. 12, and being depicted in the same respective line as said B1093, and preferably the activity is increased non-targeted, or
[62362] (b) a polypeptide comprising a polypeptide, a consensus sequence or at least a polypeptide motif as shown in the respective line in column 5 of Table II or in column 8 of Table IV, application no. 12, respectively, and being depicted in the same respective line as said B1093, or a functional equivalent or a homolog thereof as depicted in column 8 of Table II, application no. 12, preferably a homolog or functional equivalent as depicted in column 8 of Table II B, application no. 12, and being depicted in the same respective line as said B1093, and preferably the activity is increased non-targeted, whereby the respective line discloses in column 7 the fine chemical hexadecatrienoic acid.

[62363] Accordingly, in one embodiment, the molecule which activity is to be increased in the process of the invention is the gene product with an activity as a “3-oxoacyl-[acyl-carrier-protein] reductase”, preferably it is the molecule of section (a) or (b) of this paragraph.

[62364] In particular, it was observed that in plants, especially in Arabidopsis thaliana, increasing or generating the activity of a gene product non-targeted with the activity of a “3-oxoacyl-[acyl-carrier-protein] reductase”, preferably being encoded by a gene comprising the nucleic acid sequence SEQ ID NO. 118371, preferably the coding region thereof, conferred the production of or the increase in hexadecatrienoic acid compared with the wild type control.

[62365] The nucleic acid sequence of B1095 from Escherichia coli, e.g. as shown in the respective line in column 5 of Table I, application no. 12, has been published in B. And the activity of the gene product thereof is the activity of 3-oxoacyl-[acyl-carrier-protein] synthase.

[62366] Accordingly, in one embodiment, the process of the present invention for producing hexadecatrienoic acid in a non-human organism, like a microorganism or a plant or a part thereof, comprises increasing or generating the activity of a gene product with the activity of a gene product conferring the activity of “3-oxoacyl-[acyl-carrier-protein] synthase”, especially from Escherichia coli or its functional equivalent or its homolog, e.g. the increase of
[62367] (a) a gene product of a gene comprising the nucleic acid molecule as shown in the respective line in column 5 of Table I (whereby the respective line discloses in column 7 the fine chemical hexadecatrienoic acid), application no. 12, preferably the coding region thereof, or a homolog or a fragment thereof, and being depicted in the same respective line as said B1095, or a functional equivalent or a homolog thereof as shown in column 8 of Table I, application no. 12, preferably the coding region thereof, particularly a homolog or functional equivalent as shown in column 8 of Table I B, application no. 12, and being depicted in the same respective line as said B1095, and preferably the activity is increased plastidic, or
[62368] (b) a polypeptide comprising a polypeptide, a consensus sequence or at least a polypeptide motif as shown in the respective line in column 5 of Table II or in column 8 of Table IV, application no. 12, respectively, and being depicted in the same respective line as said B1095, or a functional equivalent or a homolog thereof as depicted in column 8 of Table II, application no. 12, preferably a homolog or functional equivalent as depicted in column 8 of Table II B, application no. 12, and being depicted in the same respective line as said B1095, and preferably the activity is increased plastidic, whereby the respective line discloses in column 7 the fine chemical hexadecatrienoic acid.

[62369] Accordingly, in one embodiment, the molecule which activity is to be increased in the process of the invention is the gene product with an activity as a “3-oxoacyl-[acyl-carrier-protein] synthase”, preferably it is the molecule of section (a) or (b) of this paragraph.

[62370] In particular, it was observed that in plants, especially in Arabidopsis thaliana, increasing or generating the activity of a gene product plastidic with the activity of a “3-oxoacyl-[acyl-carrier-protein] synthase”, preferably being encoded by a gene comprising the nucleic acid sequence SEQ ID NO. 114552, preferably the coding region thereof, conferred the production of or the increase in hexadecatrienoic acid compared with the wild type control.

[62371] The nucleic acid sequence of B1095 from Escherichia coli, e.g. as shown in the respective line in column 5 of Table I, application no. 12, has been published in B. And the activity of the gene product thereof is the activity of 3-oxoacyl-[acyl-carrier-protein] synthase.

[62372] Accordingly, in one embodiment, the process of the present invention for producing 2-hydroxybehenic acid in a non-human organism, like a microorganism or a plant or a part thereof, comprises increasing or generating the activity of a gene product with the activity of a gene product conferring the activity of “3-oxoacyl-[acyl-carrier-protein] synthase”, especially from Escherichia coli or its functional equivalent or its homolog, e.g. the increase of
[62373] (a) a gene product of a gene comprising the nucleic acid molecule as shown in the respective line in column 5 of Table I (whereby the respective line discloses in column 7 the fine chemical 2-hydroxybehenic acid), application no. 12, preferably the coding region thereof, or a homolog or a fragment thereof, and being depicted in the same respective line as said B1095, or a functional equivalent or a homolog thereof as shown in column 8 of Table I, application no. 12, preferably the coding region thereof, particularly a homolog or functional equivalent as shown in column 8 of Table I B, application no. 12, and being depicted in the same respective line as said B1095, and preferably the activity is increased plastidic, or
[62374] (b) a polypeptide comprising a polypeptide, a consensus sequence or at least a polypeptide motif as shown in the respective line in column 5 of Table II or in column 8 of Table IV, application no. 12, respectively, and being depicted in the same respective line as said B1095, or a functional equivalent or a homolog thereof as depicted in column 8 of Table II, application no. 12, preferably a homolog or functional equivalent as depicted in column 8 of Table II B, application no. 12, and being depicted in the same respective line as said B1095, and preferably the activity is increased plastidic, whereby the respective line discloses in column 7 the fine chemical 2-hydroxybehenic acid.

[62375] Accordingly, in one embodiment, the molecule which activity is to be increased in the process of the invention is the gene product with an activity as a “3-oxoacyl-[acyl-carrier-protein] synthase”, preferably it is the molecule of section (a) or (b) of this paragraph.

[62376] In particular, it was observed that in plants, especially in Arabidopsis thaliana, increasing or generating the activity of a gene product plastidic with the activity of a “3-oxoacyl-[acyl-carrier-protein] synthase”, preferably being encoded by a gene comprising the nucleic acid sequence SEQ ID NO. 114552, preferably the coding region thereof, conferred the production of or the increase in 2-hydroxybehenic acid compared with the wild type control.

[62377] The nucleic acid sequence of B1186 from Escherichia coli, e.g. as shown in the respective line in column 5 of Table I, application no. 12, has been published in B. And the activity of the gene product thereof is the activity of sodium/proton antiporter.

[62378] Accordingly, in one embodiment, the process of the present invention for producing oleic acid in a non-human organism, like a microorganism or a plant or a part thereof, comprises increasing or generating the activity of a gene product with the activity of a gene product conferring the activity of “sodium/proton antiporter”, especially from Escherichia coli or its functional equivalent or its homolog, e.g. the increase of
[62379] (a) a gene product of a gene comprising the nucleic acid molecule as shown in the respective line in column 5 of Table I (whereby the respective line discloses in column 7 the fine chemical oleic acid), application no. 12, preferably the coding region thereof, or a homolog or a fragment thereof, and being depicted in the same respective line as said B1186, or a functional equivalent or a homolog thereof as shown in column 8 of Table I, application no. 12, preferably the coding region thereof, particularly a homolog or functional equivalent as shown in column 8 of Table I B, application no. 12, and being depicted in the same respective line as said B1186, and preferably the activity is increased non-targeted, or
[62380] (b) a polypeptide comprising a polypeptide, a consensus sequence or at least a polypeptide motif as shown in the respective line in column 5 of Table II or in column 8 of Table IV, application no. 12, respectively, and being depicted in the same respective line as said B1186, or a functional equivalent or a homolog thereof as depicted in column 8 of Table II, application no. 12, preferably a homolog or functional equivalent as depicted in column 8 of Table II B, application no. 12, and being depicted in the same respective line as said B1186, and preferably the activity is increased non-targeted, whereby the respective line discloses in column 7 the fine chemical oleic acid.

[62381] Accordingly, in one embodiment, the molecule which activity is to be increased in the process of the invention is the gene product with an activity as a “sodium/proton antiporter”, preferably it is the molecule of section (a) or (b) of this paragraph.

[62382] In particular, it was observed that in plants, especially in Arabidopsis thaliana, increasing or generating the activity of a gene product non-targeted with the activity of a “sodium/proton antiporter”, preferably being encoded by a gene comprising the nucleic acid sequence SEQ ID NO. 37400, preferably the coding region thereof, conferred the production of or the increase in oleic acid compared with the wild type control.

[62383] The nucleic acid sequence of B1186 from Escherichia coli, e.g. as shown in the respective line in column 5 of Table I, application no. 12, has been published in B. And the activity of the gene product thereof is the activity of sodium/proton antiporter.

[62384] Accordingly, in one embodiment, the process of the present invention for producing 2-hydroxypalmitic acid in a non-human organism, like a microorganism or a plant or a part thereof, comprises increasing or generating the activity of a gene product with the activity of a gene product conferring the activity of “sodium/proton antiporter”, especially from Escherichia coli or its functional equivalent or its homolog, e.g. the increase of
[62385] (a) a gene product of a gene comprising the nucleic acid molecule as shown in the respective line in column 5 of Table I (whereby the respective line discloses in column 7 the fine chemical 2-hydroxypalmitic acid), application no. 12, preferably the coding region thereof, or a homolog or a fragment thereof, and being depicted in the same respective line as said B1186, or a functional equivalent or a homolog thereof as shown in column 8 of Table I, application no. 12, preferably the coding region thereof, particularly a homolog or functional equivalent as shown in column 8 of Table I B, application no. 12, and being depicted in the same respective line as said B1186, and preferably the activity is increased non-targeted, or
[62386] (b) a polypeptide comprising a polypeptide, a consensus sequence or at least a polypeptide motif as shown in the respective line in column 5 of Table II or in column 8 of Table IV, application no. 12, respectively, and being depicted in the same respective line as said B1186, or a functional equivalent or a homolog thereof as depicted in column 8 of Table II, application no. 12, preferably a homolog or functional equivalent as depicted in column 8 of Table II B, application no. 12, and being depicted in the same respective line as said B1186, and preferably the activity is increased non-targeted, whereby the respective line discloses in column 7 the fine chemical 2-hydroxypalmitic acid.

[62387] Accordingly, in one embodiment, the molecule which activity is to be increased in the process of the invention is the gene product with an activity as a “sodium/proton antiporter”, preferably it is the molecule of section (a) or (b) of this paragraph.

[62388] In particular, it was observed that in plants, especially in Arabidopsis thaliana, increasing or generating the activity of a gene product non-targeted with the activity of a “sodium/proton antiporter”, preferably being encoded by a gene comprising the nucleic acid sequence SEQ ID NO. 37400, preferably the coding region thereof, conferred the production of or the increase in 2-hydroxypalmitic acid compared with the wild type control.

[62389] The nucleic acid sequence of B1209 from Escherichia coli, e.g. as shown in the respective line in column 5 of Table I, application no. 12, has been published in B. And the activity of the gene product thereof is the activity of outer-membrane lipoprotein precursor.

[62390] Accordingly, in one embodiment, the process of the present invention for producing behenic acid in a non-human organism, like a microorganism or a plant or a part thereof, comprises increasing or generating the activity of a gene product with the activity of a gene product conferring the activity of “outer-membrane lipoprotein precursor”, especially from Escherichia coli or its functional equivalent or its homolog, e.g. the increase of
[62391] (a) a gene product of a gene comprising the nucleic acid molecule as shown in the respective line in column 5 of Table I (whereby the respective line discloses in column 7 the fine chemical behenic acid), application no. 12, preferably the coding region thereof, or a homolog or a fragment thereof, and being depicted in the same respective line as said B1209, or a functional equivalent or a homolog thereof as shown in column 8 of Table I, application no. 12, preferably the coding region thereof, particularly a homolog or functional equivalent as shown in column 8 of Table I B, application no. 12, and being depicted in the same respective line as said B1209, and preferably the activity is increased plastidic, or
[62392] (b) a polypeptide comprising a polypeptide, a consensus sequence or at least a polypeptide motif as shown in the respective line in column 5 of Table II or in column 8 of Table IV, application no. 12, respectively, and being depicted in the same respective line as said B1209, or a functional equivalent or a homolog thereof as depicted in column 8 of Table II, application no. 12, preferably a homolog or functional equivalent as depicted in column 8 of Table II B, application no. 12, and being depicted in the same respective line as said B1209, and preferably the activity is increased plastidic, whereby the respective line discloses in column 7 the fine chemical behenic acid.

[62393] Accordingly, in one embodiment, the molecule which activity is to be increased in the process of the invention is the gene product with an activity as a “outer-membrane lipoprotein precursor”, preferably it is the molecule of section (a) or (b) of this paragraph.

[62394] In particular, it was observed that in plants, especially in Arabidopsis thaliana, increasing or generating the activity of a gene product plastidic with the activity of a “outer-membrane lipoprotein precursor”, preferably being encoded by a gene comprising the nucleic acid sequence SEQ ID NO. 124509, preferably the coding region thereof, conferred the production of or the increase in behenic acid compared with the wild type control.

[62395] The nucleic acid sequence of B1249 from Escherichia coli, e.g. as shown in the respective line in column 5 of Table I, application no. 12, has been published in B. And the activity of the gene product thereof is the activity of cardiolipin synthase.

[62396] Accordingly, in one embodiment, the process of the present invention for producing behenic acid in a non-human organism, like a microorganism or a plant or a part thereof, comprises increasing or generating the activity of a gene product with the activity of a gene product conferring the activity of “cardiolipin synthase”, especially from Escherichia coli or its functional equivalent or its homolog, e.g. the increase of
[62397] (a) a gene product of a gene comprising the nucleic acid molecule as shown in the respective line in column 5 of Table I (whereby the respective line discloses in column 7 the fine chemical behenic acid), application no. 12, preferably the coding region thereof, or a homolog or a fragment thereof, and being depicted in the same respective line as said B1249, or a functional equivalent or a homolog thereof as shown in column 8 of Table I, application no. 12, preferably the coding region thereof, particularly a homolog or functional equivalent as shown in column 8 of Table I B, application no. 12, and being depicted in the same respective line as said B1249, and preferably the activity is increased plastidic, or
[62398] (b) a polypeptide comprising a polypeptide, a consensus sequence or at least a polypeptide motif as shown in the respective line in column 5 of Table II or in column 8 of Table IV, application no. 12, respectively, and being depicted in the same respective line as said B1249, or a functional equivalent or a homolog thereof as depicted in column 8 of Table II, application no. 12, preferably a homolog or functional equivalent as depicted in column 8 of Table II B, application no. 12, and being depicted in the same respective line as said B1249, and preferably the activity is increased plastidic, whereby the respective line discloses in column 7 the fine chemical behenic acid.

[62399] Accordingly, in one embodiment, the molecule which activity is to be increased in the process of the invention is the gene product with an activity as a “cardiolipin synthase”, preferably it is the molecule of section (a) or (b) of this paragraph.

[62400] In particular, it was observed that in plants, especially in Arabidopsis thaliana, increasing or generating the activity of a gene product plastidic with the activity of a “cardiolipin synthase”, preferably being encoded by a gene comprising the nucleic acid sequence SEQ ID NO. 98778, preferably the coding region thereof, conferred the production of or the increase in behenic acid compared with the wild type control.

[62401] The nucleic acid sequence of B1249 from Escherichia coli, e.g. as shown in the respective line in column 5 of Table I, application no. 12, has been published in B. And the activity of the gene product thereof is the activity of cardiolipin synthase.

[62402] Accordingly, in one embodiment, the process of the present invention for producing heptadecanoic acid in a non-human organism, like a microorganism or a plant or a part thereof, comprises increasing or generating the activity of a gene product with the activity of a gene product conferring the activity of “cardiolipin synthase”, especially from Escherichia coli or its functional equivalent or its homolog, e.g. the increase of
[62403] (a) a gene product of a gene comprising the nucleic acid molecule as shown in the respective line in column 5 of Table I (whereby the respective line discloses in column 7 the fine chemical heptadecanoic acid), application no. 12, preferably the coding region thereof, or a homolog or a fragment thereof, and being depicted in the same respective line as said B1249, or a functional equivalent or a homolog thereof as shown in column 8 of Table I, application no. 12, preferably the coding region thereof, particularly a homolog or functional equivalent as shown in column 8 of Table I B, application no. 12, and being depicted in the same respective line as said B1249, and preferably the activity is increased plastidic, or
[62404] (b) a polypeptide comprising a polypeptide, a consensus sequence or at least a polypeptide motif as shown in the respective line in column 5 of Table II or in column 8 of Table IV, application no. 12, respectively, and being depicted in the same respective line as said B1249, or a functional equivalent or a homolog thereof as depicted in column 8 of Table II, application no. 12, preferably a homolog or functional equivalent as depicted in column 8 of Table II B, application no. 12, and being depicted in the same respective line as said B1249, and preferably the activity is increased plastidic, whereby the respective line discloses in column 7 the fine chemical heptadecanoic acid.

[62405] Accordingly, in one embodiment, the molecule which activity is to be increased in the process of the invention is the gene product with an activity as a “cardiolipin synthase”, preferably it is the molecule of section (a) or (b) of this paragraph.

[62406] In particular, it was observed that in plants, especially in Arabidopsis thaliana, increasing or generating the activity of a gene product plastidic with the activity of a “cardiolipin synthase”, preferably being encoded by a gene comprising the nucleic acid sequence SEQ ID NO. 98778, preferably the coding region thereof, conferred the production of or the increase in heptadecanoic acid compared with the wild type control.

[62407] The nucleic acid sequence of B1346 from Escherichia coli, e.g. as shown in the respective line in column 5 of Table I, application no. 12, has been published in B. And the activity of the gene product thereof is the activity of b1346-protein.

[62408] Accordingly, in one embodiment, the process of the present invention for producing hexadecatrienoic acid in a non-human organism, like a microorganism or a plant or a part thereof, comprises increasing or generating the activity of a gene product with the activity of a gene product conferring the activity of “b1346-protein”, especially from Escherichia coli or its functional equivalent or its homolog, e.g. the increase of
[62409] (a) a gene product of a gene comprising the nucleic acid molecule as shown in the respective line in column 5 of Table I (whereby the respective line discloses in column 7 the fine chemical hexadecatrienoic acid), application no. 12, preferably the coding region thereof, or a homolog or a fragment thereof, and being depicted in the same respective line as said B1346, or a functional equivalent or a homolog thereof as shown in column 8 of Table I, application no. 12, preferably the coding region thereof, particularly a homolog or functional equivalent as shown in column 8 of Table I B, application no. 12, and being depicted in the same respective line as said B1346, and preferably the activity is increased plastidic, or
[62410] (b) a polypeptide comprising a polypeptide, a consensus sequence or at least a polypeptide motif as shown in the respective line in column 5 of Table II or in column 8 of Table IV, application no. 12, respectively, and being depicted in the same respective line as said B1346, or a functional equivalent or a homolog thereof as depicted in column 8 of Table II, application no. 12, preferably a homolog or functional equivalent as depicted in column 8 of Table II B, application no. 12, and being depicted in the same respective line as said B1346, and preferably the activity is increased plastidic, whereby the respective line discloses in column 7 the fine chemical hexadecatrienoic acid.

[62411] Accordingly, in one embodiment, the molecule which activity is to be increased in the process of the invention is the gene product with an activity as a “b1346-protein”, preferably it is the molecule of section (a) or (b) of this paragraph.

[62412] In particular, it was observed that in plants, especially in Arabidopsis thaliana, increasing or generating the activity of a gene product plastidic with the activity of a “b1346-protein”, preferably being encoded by a gene comprising the nucleic acid sequence SEQ ID NO. 99188, preferably the coding region thereof, conferred the production of or the increase in hexadecatrienoic acid compared with the wild type control.

[62413] The nucleic acid sequence of B1356 from Escherichia coli, e.g. as shown in the respective line in column 5 of Table I, application no. 12, has been published in B. And the activity of the gene product thereof is the activity of phage-related repressor protein.

[62414] Accordingly, in one embodiment, the process of the present invention for producing lauric acid in a non-human organism, like a microorganism or a plant or a part thereof, comprises increasing or generating the activity of a gene product with the activity of a gene product conferring the activity of “phage-related repressor protein”, especially from Escherichia coli or its functional equivalent or its homolog, e.g. the increase of
[62415] (a) a gene product of a gene comprising the nucleic acid molecule as shown in the respective line in column 5 of Table I (whereby the respective line discloses in column 7 the fine chemical lauric acid), application no. 12, preferably the coding region thereof, or a homolog or a fragment thereof, and being depicted in the same respective line as said B1356, or a functional equivalent or a homolog thereof as shown in column 8 of Table I, application no. 12, preferably the coding region thereof, particularly a homolog or functional equivalent as shown in column 8 of Table I B, application no. 12, and being depicted in the same respective line as said B1356, and preferably the activity is increased non-targeted, or
[62416] (b) a polypeptide comprising a polypeptide, a consensus sequence or at least a polypeptide motif as shown in the respective line in column 5 of Table II or in column 8 of Table IV, application no. 12, respectively, and being depicted in the same respective line as said B1356, or a functional equivalent or a homolog thereof as depicted in column 8 of Table II, application no. 12, preferably a homolog or functional equivalent as depicted in column 8 of Table II B, application no. 12, and being depicted in the same respective line as said B1356, and preferably the activity is increased non-targeted, whereby the respective line discloses in column 7 the fine chemical lauric acid.

[62417] Accordingly, in one embodiment, the molecule which activity is to be increased in the process of the invention is the gene product with an activity as a “phage-related repressor protein”, preferably it is the molecule of section (a) or (b) of this paragraph.

[62418] In particular, it was observed that in plants, especially in Arabidopsis thaliana, increasing or generating the activity of a gene product non-targeted with the activity of a “phage-related repressor protein”, preferably being encoded by a gene comprising the nucleic acid sequence SEQ ID NO. 124557, preferably the coding region thereof, conferred the production of or the increase in lauric acid compared with the wild type control.

[62419] The nucleic acid sequence of B1431 from Escherichia coli, e.g. as shown in the respective line in column 5 of Table I, application no. 12, has been published in B. And the activity of the gene product thereof is the activity of lipoprotein precursor.

[62420] Accordingly, in one embodiment, the process of the present invention for producing 2-hydroxytetracosenoic acid (preferably 2-hydroxynervonic acid) in a non-human organism, like a microorganism or a plant or a part thereof, comprises increasing or generating the activity of a gene product with the activity of a gene product conferring the activity of “lipoprotein precursor”, especially from Escherichia coli or its functional equivalent or its homolog, e.g. the increase of
[62421] (a) a gene product of a gene comprising the nucleic acid molecule as shown in the respective line in column 5 of Table I (whereby the respective line discloses in column 7 the fine chemical 2-hydroxytetracosenoic acid (preferably 2-hydroxynervonic acid)), application no. 12, preferably the coding region thereof, or a homolog or a fragment thereof, and being depicted in the same respective line as said B1431, or a functional equivalent or a homolog thereof as shown in column 8 of Table I, application no. 12, preferably the coding region thereof, particularly a homolog or functional equivalent as shown in column 8 of Table I B, application no. 12, and being depicted in the same respective line as said B1431, and preferably the activity is increased plastidic, or
[62422] (b) a polypeptide comprising a polypeptide, a consensus sequence or at least a polypeptide motif as shown in the respective line in column 5 of Table II or in column 8 of Table IV, application no. 12, respectively, and being depicted in the same respective line as said B1431, or a functional equivalent or a homolog thereof as depicted in column 8 of Table II, application no. 12, preferably a homolog or functional equivalent as depicted in column 8 of Table II B, application no. 12, and being depicted in the same respective line as said B1431, and preferably the activity is increased plastidic, whereby the respective line discloses in column 7 the fine chemical 2-hydroxytetracosenoic acid (preferably 2-hydroxynervonic acid).

[62423] Accordingly, in one embodiment, the molecule which activity is to be increased in the process of the invention is the gene product with an activity as a “lipoprotein precursor”, preferably it is the molecule of section (a) or (b) of this paragraph.

[62424] In particular, it was observed that in plants, especially in Arabidopsis thaliana, increasing or generating the activity of a gene product plastidic with the activity of a “lipoprotein precursor”, preferably being encoded by a gene comprising the nucleic acid sequence SEQ ID NO. 38266, preferably the coding region thereof, conferred the production of or the increase in 2-hydroxytetracosenoic acid (preferably 2-hydroxynervonic acid) compared with the wild type control.

[62425] The nucleic acid sequence of B1470 from Escherichia coli, e.g. as shown in the respective line in column 5 of Table I, application no. 12, has been published in B. And the activity of the gene product thereof is the activity of b1470-protein.

[62426] Accordingly, in one embodiment, the process of the present invention for producing hexadecatrienoic acid in a non-human organism, like a microorganism or a plant or a part thereof, comprises increasing or generating the activity of a gene product with the activity of a gene product conferring the activity of “b1470-protein”, especially from Escherichia coli or its functional equivalent or its homolog, e.g. the increase of
[62427] (a) a gene product of a gene comprising the nucleic acid molecule as shown in the respective line in column 5 of Table I (whereby the respective line discloses in column 7 the fine chemical hexadecatrienoic acid), application no. 12, preferably the coding region thereof, or a homolog or a fragment thereof, and being depicted in the same respective line as said B1470, or a functional equivalent or a homolog thereof as shown in column 8 of Table I, application no. 12, preferably the coding region thereof, particularly a homolog or functional equivalent as shown in column 8 of Table I B, application no. 12, and being depicted in the same respective line as said B1470, and preferably the activity is increased non-targeted, or
[62428] (b) a polypeptide comprising a polypeptide, a consensus sequence or at least a polypeptide motif as shown in the respective line in column 5 of Table II or in column 8 of Table IV, application no. 12, respectively, and being depicted in the same respective line as said B1470, or a functional equivalent or a homolog thereof as depicted in column 8 of Table II, application no. 12, preferably a homolog or functional equivalent as depicted in column 8 of Table II B, application no. 12, and being depicted in the same respective line as said B1470, and preferably the activity is increased non-targeted, whereby the respective line discloses in column 7 the fine chemical hexadecatrienoic acid.

[62429] Accordingly, in one embodiment, the molecule which activity is to be increased in the process of the invention is the gene product with an activity as a “b1470-protein”, preferably it is the molecule of section (a) or (b) of this paragraph.

[62430] In particular, it was observed that in plants, especially in Arabidopsis thaliana, increasing or generating the activity of a gene product non-targeted with the activity of a “b1470-protein”, preferably being encoded by a gene comprising the nucleic acid sequence SEQ ID NO. 115056, preferably the coding region thereof, conferred the production of or the increase in hexadecatrienoic acid compared with the wild type control.

[62431] The nucleic acid sequence of B1479 from Escherichia coli, e.g. as shown in the respective line in column 5 of Table I, application no. 12, has been published in B. And the activity of the gene product thereof is the activity of NADP-dependent malic enzyme.

[62432] Accordingly, in one embodiment, the process of the present invention for producing hexadecatrienoic acid in a non-human organism, like a microorganism or a plant or a part thereof, comprises increasing or generating the activity of a gene product with the activity of a gene product conferring the activity of “NADP-dependent malic enzyme”, especially from Escherichia coli or its functional equivalent or its homolog, e.g. the increase of
[62433] (a) a gene product of a gene comprising the nucleic acid molecule as shown in the respective line in column 5 of Table I (whereby the respective line discloses in column 7 the fine chemical hexadecatrienoic acid), application no. 12, preferably the coding region thereof, or a homolog or a fragment thereof, and being depicted in the same respective line as said B1479, or a functional equivalent or a homolog thereof as shown in column 8 of Table I, application no. 12, preferably the coding region thereof, particularly a homolog or functional equivalent as shown in column 8 of Table I B, application no. 12, and being depicted in the same respective line as said B1479, and preferably the activity is increased non-targeted, or
[62434] (b) a polypeptide comprising a polypeptide, a consensus sequence or at least a polypeptide motif as shown in the respective line in column 5 of Table II or in column 8 of Table IV, application no. 12, respectively, and being depicted in the same respective line as said B1479, or a functional equivalent or a homolog thereof as depicted in column 8 of Table II, application no. 12, preferably a homolog or functional equivalent as depicted in column 8 of Table II B, application no. 12, and being depicted in the same respective line as said B1479, and preferably the activity is increased non-targeted, whereby the respective line discloses in column 7 the fine chemical hexadecatrienoic acid.

[62435] Accordingly, in one embodiment, the molecule which activity is to be increased in the process of the invention is the gene product with an activity as a “NADP-dependent malic enzyme”, preferably it is the molecule of section (a) or (b) of this paragraph.

[62436] In particular, it was observed that in plants, especially in Arabidopsis thaliana, increasing or generating the activity of a gene product non-targeted with the activity of a “NADP-dependent malic enzyme”, preferably being encoded by a gene comprising the nucleic acid sequence SEQ ID NO. 77774, preferably the coding region thereof, conferred the production of or the increase in hexadecatrienoic acid compared with the wild type control.

[62437] The nucleic acid sequence of B1522 from Escherichia coli, e.g. as shown in the respective line in column 5 of Table I, application no. 12, has been published in B. And the activity of the gene product thereof is the activity of b1522-protein.

[62438] Accordingly, in one embodiment, the process of the present invention for producing 2-hydroxybehenic acid in a non-human organism, like a microorganism or a plant or a part thereof, comprises increasing or generating the activity of a gene product with the activity of a gene product conferring the activity of “b1522-protein”, especially from Escherichia coli or its functional equivalent or its homolog, e.g. the increase of
[62439] (a) a gene product of a gene comprising the nucleic acid molecule as shown in the respective line in column 5 of Table I (whereby the respective line discloses in column 7 the fine chemical 2-hydroxybehenic acid), application no. 12, preferably the coding region thereof, or a homolog or a fragment thereof, and being depicted in the same respective line as said B1522, or a functional equivalent or a homolog thereof as shown in column 8 of Table I, application no. 12, preferably the coding region thereof, particularly a homolog or functional equivalent as shown in column 8 of Table I B, application no. 12, and being depicted in the same respective line as said B1522, and preferably the activity is increased non-targeted, or
[62440] (b) a polypeptide comprising a polypeptide, a consensus sequence or at least a polypeptide motif as shown in the respective line in column 5 of Table II or in column 8 of Table IV, application no. 12, respectively, and being depicted in the same respective line as said B1522, or a functional equivalent or a homolog thereof as depicted in column 8 of Table II, application no. 12, preferably a homolog or functional equivalent as depicted in column 8 of Table II B, application no. 12, and being depicted in the same respective line as said B1522, and preferably the activity is increased non-targeted, whereby the respective line discloses in column 7 the fine chemical 2-hydroxybehenic acid.

[62441] Accordingly, in one embodiment, the molecule which activity is to be increased in the process of the invention is the gene product with an activity as a “b1522-protein”, preferably it is the molecule of section (a) or (b) of this paragraph.

[62442] In particular, it was observed that in plants, especially in Arabidopsis thaliana, increasing or generating the activity of a gene product non-targeted with the activity of a “b1522-protein”, preferably being encoded by a gene comprising the nucleic acid sequence SEQ ID NO. 7947, preferably the coding region thereof, conferred the production of or the increase in 2-hydroxybehenic acid compared with the wild type control.

[62443] The nucleic acid sequence of B1597 from Escherichia coli, e.g. as shown in the respective line in column 5 of Table I, application no. 12, has been published in B. And the activity of the gene product thereof is the activity of acid shock protein.

[62444] Accordingly, in one embodiment, the process of the present invention for producing hexadecatrienoic acid in a non-human organism, like a microorganism or a plant or a part thereof, comprises increasing or generating the activity of a gene product with the activity of a gene product conferring the activity of “acid shock protein”, especially from Escherichia coli or its functional equivalent or its homolog, e.g. the increase of
[62445] (a) a gene product of a gene comprising the nucleic acid molecule as shown in the respective line in column 5 of Table I (whereby the respective line discloses in column 7 the fine chemical hexadecatrienoic acid), application no. 12, preferably the coding region thereof, or a homolog or a fragment thereof, and being depicted in the same respective line as said B1597, or a functional equivalent or a homolog thereof as shown in column 8 of Table I, application no. 12, preferably the coding region thereof, particularly a homolog or functional equivalent as shown in column 8 of Table I B, application no. 12, and being depicted in the same respective line as said B1597, and preferably the activity is increased non-targeted, or
[62446] (b) a polypeptide comprising a polypeptide, a consensus sequence or at least a polypeptide motif as shown in the respective line in column 5 of Table II or in column 8 of Table IV, application no. 12, respectively, and being depicted in the same respective line as said B1597, or a functional equivalent or a homolog thereof as depicted in column 8 of Table II, application no. 12, preferably a homolog or functional equivalent as depicted in column 8 of Table II B, application no. 12, and being depicted in the same respective line as said B1597, and preferably the activity is increased non-targeted, whereby the respective line discloses in column 7 the fine chemical hexadecatrienoic acid.

[62447] Accordingly, in one embodiment, the molecule which activity is to be increased in the process of the invention is the gene product with an activity as a “acid shock protein”, preferably it is the molecule of section (a) or (b) of this paragraph.

[62448] In particular, it was observed that in plants, especially in Arabidopsis thaliana, increasing or generating the activity of a gene product non-targeted with the activity of a “acid shock protein”, preferably being encoded by a gene comprising the nucleic acid sequence SEQ ID NO. 38300, preferably the coding region thereof, conferred the production of or the increase in hexadecatrienoic acid compared with the wild type control.

[62449] The nucleic acid sequence of B1601 from Escherichia coli, e.g. as shown in the respective line in column 5 of Table I, application no. 12, has been published in B. And the activity of the gene product thereof is the activity of transport protein.

[62450] Accordingly, in one embodiment, the process of the present invention for producing 2-hydroxytetracosenoic acid (preferably 2-hydroxynervonic acid) in a non-human organism, like a microorganism or a plant or a part thereof, comprises increasing or generating the activity of a gene product with the activity of a gene product conferring the activity of “transport protein”, especially from Escherichia coli or its functional equivalent or its homolog, e.g. the increase of
[62451] (a) a gene product of a gene comprising the nucleic acid molecule as shown in the respective line in column 5 of Table I (whereby the respective line discloses in column 7 the fine chemical 2-hydroxytetracosenoic acid (preferably 2-hydroxynervonic acid)), application no. 12, preferably the coding region thereof, or a homolog or a fragment thereof, and being depicted in the same respective line as said B1601, or a functional equivalent or a homolog thereof as shown in column 8 of Table I, application no. 12, preferably the coding region thereof, particularly a homolog or functional equivalent as shown in column 8 of Table I B, application no. 12, and being depicted in the same respective line as said B1601, and preferably the activity is increased non-targeted, or
[62452] (b) a polypeptide comprising a polypeptide, a consensus sequence or at least a polypeptide motif as shown in the respective line in column 5 of Table II or in column 8 of Table IV, application no. 12, respectively, and being depicted in the same respective line as said B1601, or a functional equivalent or a homolog thereof as depicted in column 8 of Table II, application no. 12, preferably a homolog or functional equivalent as depicted in column 8 of Table II B, application no. 12, and being depicted in the same respective line as said B1601, and preferably the activity is increased non-targeted, whereby the respective line discloses in column 7 the fine chemical 2-hydroxytetracosenoic acid (preferably 2-hydroxynervonic acid).

[62453] Accordingly, in one embodiment, the molecule which activity is to be increased in the process of the invention is the gene product with an activity as a “transport protein”, preferably it is the molecule of section (a) or (b) of this paragraph.

[62454] In particular, it was observed that in plants, especially in Arabidopsis thaliana, increasing or generating the activity of a gene product non-targeted with the activity of a “transport protein”, preferably being encoded by a gene comprising the nucleic acid sequence SEQ ID NO. 7992, preferably the coding region thereof, conferred the production of or the increase in 2-hydroxytetracosenoic acid (preferably 2-hydroxynervonic acid) compared with the wild type control.

[62455] The nucleic acid sequence of B1621 from Escherichia coli, e.g. as shown in the respective line in column 5 of Table I, application no. 12, has been published in B. And the activity of the gene product thereof is the activity of phosphotransferase system component.

[62456] Accordingly, in one embodiment, the process of the present invention for producing 2-hydroxytetracosenoic acid (preferably 2-hydroxynervonic acid) in a non-human organism, like a microorganism or a plant or a part thereof, comprises increasing or generating the activity of a gene product with the activity of a gene product conferring the activity of “phosphotransferase system component”, especially from Escherichia coli or its functional equivalent or its homolog, e.g. the increase of
[62457] (a) a gene product of a gene comprising the nucleic acid molecule as shown in the respective line in column 5 of Table I (whereby the respective line discloses in column 7 the fine chemical 2-hydroxytetracosenoic acid (preferably 2-hydroxynervonic acid)), application no. 12, preferably the coding region thereof, or a homolog or a fragment thereof, and being depicted in the same respective line as said B1621, or a functional equivalent or a homolog thereof as shown in column 8 of Table I, application no. 12, preferably the coding region thereof, particularly a homolog or functional equivalent as shown in column 8 of Table I B, application no. 12, and being depicted in the same respective line as said B1621, and preferably the activity is increased plastidic, or
[62458] (b) a polypeptide comprising a polypeptide, a consensus sequence or at least a polypeptide motif as shown in the respective line in column 5 of Table II or in column 8 of Table IV, application no. 12, respectively, and being depicted in the same respective line as said B1621, or a functional equivalent or a homolog thereof as depicted in column 8 of Table II, application no. 12, preferably a homolog or functional equivalent as depicted in column 8 of Table II B, application no. 12, and being depicted in the same respective line as said B1621, and preferably the activity is increased plastidic, whereby the respective line discloses in column 7 the fine chemical 2-hydroxytetracosenoic acid (preferably 2-hydroxynervonic acid).

[62459] Accordingly, in one embodiment, the molecule which activity is to be increased in the process of the invention is the gene product with an activity as a “phosphotransferase system component”, preferably it is the molecule of section (a) or (b) of this paragraph.

[62460] In particular, it was observed that in plants, especially in Arabidopsis thaliana, increasing or generating the activity of a gene product plastidic with the activity of a “phosphotransferase system component”, preferably being encoded by a gene comprising the nucleic acid sequence SEQ ID NO. 124571, preferably the coding region thereof, conferred the production of or the increase in 2-hydroxytetracosenoic acid (preferably 2-hydroxynervonic acid) compared with the wild type control.

[62461] The nucleic acid sequence of B1627 from Escherichia coli, e.g. as shown in the respective line in column 5 of Table I, application no. 12, has been published in B. And the activity of the gene product thereof is the activity of electron transport complex protein.

[62462] Accordingly, in one embodiment, the process of the present invention for producing 2-hydroxybehenic acid in a non-human organism, like a microorganism or a plant or a part thereof, comprises increasing or generating the activity of a gene product with the activity of a gene product conferring the activity of “electron transport complex protein”, especially from Escherichia coli or its functional equivalent or its homolog, e.g. the increase of
[62463] (a) a gene product of a gene comprising the nucleic acid molecule as shown in the respective line in column 5 of Table I (whereby the respective line discloses in column 7 the fine chemical 2-hydroxybehenic acid), application no. 12, preferably the coding region thereof, or a homolog or a fragment thereof, and being depicted in the same respective line as said B1627, or a functional equivalent or a homolog thereof as shown in column 8 of Table I, application no. 12, preferably the coding region thereof, particularly a homolog or functional equivalent as shown in column 8 of Table I B, application no. 12, and being depicted in the same respective line as said B1627, and preferably the activity is increased plastidic, or
[62464] (b) a polypeptide comprising a polypeptide, a consensus sequence or at least a polypeptide motif as shown in the respective line in column 5 of Table II or in column 8 of Table IV, application no. 12, respectively, and being depicted in the same respective line as said B1627, or a functional equivalent or a homolog thereof as depicted in column 8 of Table II, application no. 12, preferably a homolog or functional equivalent as depicted in column 8 of Table II B, application no. 12, and being depicted in the same respective line as said B1627, and preferably the activity is increased plastidic, whereby the respective line discloses in column 7 the fine chemical 2-hydroxybehenic acid.

[62465] Accordingly, in one embodiment, the molecule which activity is to be increased in the process of the invention is the gene product with an activity as a “electron transport complex protein”, preferably it is the molecule of section (a) or (b) of this paragraph.

[62466] In particular, it was observed that in plants, especially in Arabidopsis thaliana, increasing or generating the activity of a gene product plastidic with the activity of a “electron transport complex protein”, preferably being encoded by a gene comprising the nucleic acid sequence SEQ ID NO. 38345, preferably the coding region thereof, conferred the production of or the increase in 2-hydroxybehenic acid compared with the wild type control.

[62467] The nucleic acid sequence of B1636 from Escherichia coli, e.g. as shown in the respective line in column 5 of Table I, application no. 12, has been published in B. And the activity of the gene product thereof is the activity of pyridoxamine kinase.

[62468] Accordingly, in one embodiment, the process of the present invention for producing hexadecatrienoic acid in a non-human organism, like a microorganism or a plant or a part thereof, comprises increasing or generating the activity of a gene product with the activity of a gene product conferring the activity of “pyridoxamine kinase”, especially from Escherichia coli or its functional equivalent or its homolog, e.g. the increase of
[62469] (a) a gene product of a gene comprising the nucleic acid molecule as shown in the respective line in column 5 of Table I (whereby the respective line discloses in column 7 the fine chemical hexadecatrienoic acid), application no. 12, preferably the coding region thereof, or a homolog or a fragment thereof, and being depicted in the same respective line as said B1636, or a functional equivalent or a homolog thereof as shown in column 8 of Table I, application no. 12, preferably the coding region thereof, particularly a homolog or functional equivalent as shown in column 8 of Table I B, application no. 12, and being depicted in the same respective line as said B1636, and preferably the activity is increased plastidic, or
[62470] (b) a polypeptide comprising a polypeptide, a consensus sequence or at least a polypeptide motif as shown in the respective line in column 5 of Table II or in column 8 of Table IV, application no. 12, respectively, and being depicted in the same respective line as said B1636, or a functional equivalent or a homolog thereof as depicted in column 8 of Table II, application no. 12, preferably a homolog or functional equivalent as depicted in column 8 of Table II B, application no. 12, and being depicted in the same respective line as said B1636, and preferably the activity is increased plastidic, whereby the respective line discloses in column 7 the fine chemical hexadecatrienoic acid.

[62471] Accordingly, in one embodiment, the molecule which activity is to be increased in the process of the invention is the gene product with an activity as a “pyridoxamine kinase”, preferably it is the molecule of section (a) or (b) of this paragraph.

[62472] In particular, it was observed that in plants, especially in Arabidopsis thaliana, increasing or generating the activity of a gene product plastidic with the activity of a “pyridoxamine kinase”, preferably being encoded by a gene comprising the nucleic acid sequence SEQ ID NO. 124805, preferably the coding region thereof, conferred the production of or the increase in hexadecatrienoic acid compared with the wild type control.

[62473] The nucleic acid sequence of B1670 from Escherichia coli, e.g. as shown in the respective line in column 5 of Table I, application no. 12, has been published in B. And the activity of the gene product thereof is the activity of b1670-protein.

[62474] Accordingly, in one embodiment, the process of the present invention for producing 2-hydroxytetracosenoic acid (preferably 2-hydroxynervonic acid) in a non-human organism, like a microorganism or a plant or a part thereof, comprises increasing or generating the activity of a gene product with the activity of a gene product conferring the activity of “b1670-protein”, especially from Escherichia coli or its functional equivalent or its homolog, e.g. the increase of
[62475] (a) a gene product of a gene comprising the nucleic acid molecule as shown in the respective line in column 5 of Table I (whereby the respective line discloses in column 7 the fine chemical 2-hydroxytetracosenoic acid (preferably 2-hydroxynervonic acid)), application no. 12, preferably the coding region thereof, or a homolog or a fragment thereof, and being depicted in the same respective line as said B1670, or a functional equivalent or a homolog thereof as shown in column 8 of Table I, application no. 12, preferably the coding region thereof, particularly a homolog or functional equivalent as shown in column 8 of Table I B, application no. 12, and being depicted in the same respective line as said B1670, and preferably the activity is increased non-targeted, or
[62476] (b) a polypeptide comprising a polypeptide, a consensus sequence or at least a polypeptide motif as shown in the respective line in column 5 of Table II or in column 8 of Table IV, application no. 12, respectively, and being depicted in the same respective line as said B1670, or a functional equivalent or a homolog thereof as depicted in column 8 of Table II, application no. 12, preferably a homolog or functional equivalent as depicted in column 8 of Table II B, application no. 12, and being depicted in the same respective line as said B1670, and preferably the activity is increased non-targeted, whereby the respective line discloses in column 7 the fine chemical 2-hydroxytetracosenoic acid (preferably 2-hydroxynervonic acid).

[62477] Accordingly, in one embodiment, the molecule which activity is to be increased in the process of the invention is the gene product with an activity as a “b1670-protein”, preferably it is the molecule of section (a) or (b) of this paragraph.

[62478] In particular, it was observed that in plants, especially in Arabidopsis thaliana, increasing or generating the activity of a gene product non-targeted with the activity of a “b1670-protein”, preferably being encoded by a gene comprising the nucleic acid sequence SEQ ID NO. 78753, preferably the coding region thereof, conferred the production of or the increase in 2-hydroxytetracosenoic acid (preferably 2-hydroxynervonic acid) compared with the wild type control.

[62479] The nucleic acid sequence of B1703 from Escherichia coli, e.g. as shown in the respective line in column 5 of Table I, application no. 12, has been published in B. And the activity of the gene product thereof is the activity of b1703-protein.

[62480] Accordingly, in one embodiment, the process of the present invention for producing hexadecadienoic acid in a non-human organism, like a microorganism or a plant or a part thereof, comprises increasing or generating the activity of a gene product with the activity of a gene product conferring the activity of “b1703-protein”, especially from Escherichia coli or its functional equivalent or its homolog, e.g. the increase of
[62481] (a) a gene product of a gene comprising the nucleic acid molecule as shown in the respective line in column 5 of Table I (whereby the respective line discloses in column 7 the fine chemical hexadecadienoic acid), application no. 12, preferably the coding region thereof, or a homolog or a fragment thereof, and being depicted in the same respective line as said B1703, or a functional equivalent or a homolog thereof as shown in column 8 of Table I, application no. 12, preferably the coding region thereof, particularly a homolog or functional equivalent as shown in column 8 of Table I B, application no. 12, and being depicted in the same respective line as said B1703, and preferably the activity is increased non-targeted, or
[62482] (b) a polypeptide comprising a polypeptide, a consensus sequence or at least a polypeptide motif as shown in the respective line in column 5 of Table II or in column 8 of Table IV, application no. 12, respectively, and being depicted in the same respective line as said B1703, or a functional equivalent or a homolog thereof as depicted in column 8 of Table II, application no. 12, preferably a homolog or functional equivalent as depicted in column 8 of Table II B, application no. 12, and being depicted in the same respective line as said B1703, and preferably the activity is increased non-targeted, whereby the respective line discloses in column 7 the fine chemical hexadecadienoic acid.

[62483] Accordingly, in one embodiment, the molecule which activity is to be increased in the process of the invention is the gene product with an activity as a “b1703-protein”, preferably it is the molecule of section (a) or (b) of this paragraph.

[62484] In particular, it was observed that in plants, especially in Arabidopsis thaliana, increasing or generating the activity of a gene product non-targeted with the activity of a “b1703-protein”, preferably being encoded by a gene comprising the nucleic acid sequence SEQ ID NO. 124907, preferably the coding region thereof, conferred the production of or the increase in hexadecadienoic acid compared with the wild type control.

[62485] The nucleic acid sequence of B1703 from Escherichia coli, e.g. as shown in the respective line in column 5 of Table I, application no. 12, has been published in B. And the activity of the gene product thereof is the activity of b1703-protein.

[62486] Accordingly, in one embodiment, the process of the present invention for producing hexadecatrienoic acid in a non-human organism, like a microorganism or a plant or a part thereof, comprises increasing or generating the activity of a gene product with the activity of a gene product conferring the activity of “b1703-protein”, especially from Escherichia coli or its functional equivalent or its homolog, e.g. the increase of
[62487] (a) a gene product of a gene comprising the nucleic acid molecule as shown in the respective line in column 5 of Table I (whereby the respective line discloses in column 7 the fine chemical hexadecatrienoic acid), application no. 12, preferably the coding region thereof, or a homolog or a fragment thereof, and being depicted in the same respective line as said B1703, or a functional equivalent or a homolog thereof as shown in column 8 of Table I, application no. 12, preferably the coding region thereof, particularly a homolog or functional equivalent as shown in column 8 of Table I B, application no. 12, and being depicted in the same respective line as said B1703, and preferably the activity is increased non-targeted, or
[62488] (b) a polypeptide comprising a polypeptide, a consensus sequence or at least a polypeptide motif as shown in the respective line in column 5 of Table II or in column 8 of Table IV, application no. 12, respectively, and being depicted in the same respective line as said B1703, or a functional equivalent or a homolog thereof as depicted in column 8 of Table II, application no. 12, preferably a homolog or functional equivalent as depicted in column 8 of Table II B, application no. 12, and being depicted in the same respective line as said B1703, and preferably the activity is increased non-targeted, whereby the respective line discloses in column 7 the fine chemical hexadecatrienoic acid.

[62489] Accordingly, in one embodiment, the molecule which activity is to be increased in the process of the invention is the gene product with an activity as a “b1703-protein”, preferably it is the molecule of section (a) or (b) of this paragraph.

[62490] In particular, it was observed that in plants, especially in Arabidopsis thaliana, increasing or generating the activity of a gene product non-targeted with the activity of a “b1703-protein”, preferably being encoded by a gene comprising the nucleic acid sequence SEQ ID NO. 124907, preferably the coding region thereof, conferred the production of or the increase in hexadecatrienoic acid compared with the wild type control.

[62491] The nucleic acid sequence of B1791 from Escherichia coli, e.g. as shown in the respective line in column 5 of Table I, application no. 12, has been published in B. And the activity of the gene product thereof is the activity of transport protein.

[62492] Accordingly, in one embodiment, the process of the present invention for producing hexadecadienoic acid in a non-human organism, like a microorganism or a plant or a part thereof, comprises increasing or generating the activity of a gene product with the activity of a gene product conferring the activity of “transport protein”, especially from Escherichia coli or its functional equivalent or its homolog, e.g. the increase of
[62493] (a) a gene product of a gene comprising the nucleic acid molecule as shown in the respective line in column 5 of Table I (whereby the respective line discloses in column 7 the fine chemical hexadecadienoic acid), application no. 12, preferably the coding region thereof, or a homolog or a fragment thereof, and being depicted in the same respective line as said B1791, or a functional equivalent or a homolog thereof as shown in column 8 of Table I, application no. 12, preferably the coding region thereof, particularly a homolog or functional equivalent as shown in column 8 of Table I B, application no. 12, and being depicted in the same respective line as said B1791, and preferably the activity is increased non-targeted, or
[62494] (b) a polypeptide comprising a polypeptide, a consensus sequence or at least a polypeptide motif as shown in the respective line in column 5 of Table II or in column 8 of Table IV, application no. 12, respectively, and being depicted in the same respective line as said B1791, or a functional equivalent or a homolog thereof as depicted in column 8 of Table II, application no. 12, preferably a homolog or functional equivalent as depicted in column 8 of Table II B, application no. 12, and being depicted in the same respective line as said B1791, and preferably the activity is increased non-targeted, whereby the respective line discloses in column 7 the fine chemical hexadecadienoic acid.

[62495] Accordingly, in one embodiment, the molecule which activity is to be increased in the process of the invention is the gene product with an activity as a “transport protein”, preferably it is the molecule of section (a) or (b) of this paragraph.

[62496] In particular, it was observed that in plants, especially in Arabidopsis thaliana, increasing or generating the activity of a gene product non-targeted with the activity of a “transport protein”, preferably being encoded by a gene comprising the nucleic acid sequence SEQ ID NO. 78883, preferably the coding region thereof, conferred the production of or the increase in hexadecadienoic acid compared with the wild type control.

[62497] The nucleic acid sequence of B1837 from Escherichia coli, e.g. as shown in the respective line in column 5 of Table I, application no. 12, has been published in B. And the activity of the gene product thereof is the activity of b1837-protein.

[62498] Accordingly, in one embodiment, the process of the present invention for producing hexadecadienoic acid in a non-human organism, like a microorganism or a plant or a part thereof, comprises increasing or generating the activity of a gene product with the activity of a gene product conferring the activity of “b1837-protein”, especially from Escherichia coli or its functional equivalent or its homolog, e.g. the increase of
[62499] (a) a gene product of a gene comprising the nucleic acid molecule as shown in the respective line in column 5 of Table I (whereby the respective line discloses in column 7 the fine chemical hexadecadienoic acid), application no. 12, preferably the coding region thereof, or a homolog or a fragment thereof, and being depicted in the same respective line as said B1837, or a functional equivalent or a homolog thereof as shown in column 8 of Table I, application no. 12, preferably the coding region thereof, particularly a homolog or functional equivalent as shown in column 8 of Table I B, application no. 12, and being depicted in the same respective line as said B1837, and preferably the activity is increased non-targeted, or
[62500] (b) a polypeptide comprising a polypeptide, a consensus sequence or at least a polypeptide motif as shown in the respective line in column 5 of Table II or in column 8 of Table IV, application no. 12, respectively, and being depicted in the same respective line as said B1837, or a functional equivalent or a homolog thereof as depicted in column 8 of Table II, application no. 12, preferably a homolog or functional equivalent as depicted in column 8 of Table II B, application no. 12, and being depicted in the same respective line as said B1837, and preferably the activity is increased non-targeted, whereby the respective line discloses in column 7 the fine chemical hexadecadienoic acid.

[62501] Accordingly, in one embodiment, the molecule which activity is to be increased in the process of the invention is the gene product with an activity as a “b1837-protein”, preferably it is the molecule of section (a) or (b) of this paragraph.

[62502] In particular, it was observed that in plants, especially in Arabidopsis thaliana, increasing or generating the activity of a gene product non-targeted with the activity of a “b1837-protein”, preferably being encoded by a gene comprising the nucleic acid sequence SEQ ID NO. 78953, preferably the coding region thereof, conferred the production of or the increase in hexadecadienoic acid compared with the wild type control.

[62503] The nucleic acid sequence of B1837 from Escherichia coli, e.g. as shown in the respective line in column 5 of Table I, application no. 12, has been published in B. And the activity of the gene product thereof is the activity of b1837-protein.

[62504] Accordingly, in one embodiment, the process of the present invention for producing hexadecatrienoic acid in a non-human organism, like a microorganism or a plant or a part thereof, comprises increasing or generating the activity of a gene product with the activity of a gene product conferring the activity of “b1837-protein”, especially from Escherichia coli or its functional equivalent or its homolog, e.g. the increase of
[62505] (a) a gene product of a gene comprising the nucleic acid molecule as shown in the respective line in column 5 of Table I (whereby the respective line discloses in column 7 the fine chemical hexadecatrienoic acid), application no. 12, preferably the coding region thereof, or a homolog or a fragment thereof, and being depicted in the same respective line as said B1837, or a functional equivalent or a homolog thereof as shown in column 8 of Table I, application no. 12, preferably the coding region thereof, particularly a homolog or functional equivalent as shown in column 8 of Table I B, application no. 12, and being depicted in the same respective line as said B1837, and preferably the activity is increased non-targeted, or
[62506] (b) a polypeptide comprising a polypeptide, a consensus sequence or at least a polypeptide motif as shown in the respective line in column 5 of Table II or in column 8 of Table IV, application no. 12, respectively, and being depicted in the same respective line as said B1837, or a functional equivalent or a homolog thereof as depicted in column 8 of Table II, application no. 12, preferably a homolog or functional equivalent as depicted in column 8 of Table II B, application no. 12, and being depicted in the same respective line as said B1837, and preferably the activity is increased non-targeted, whereby the respective line discloses in column 7 the fine chemical hexadecatrienoic acid.

[62507] Accordingly, in one embodiment, the molecule which activity is to be increased in the process of the invention is the gene product with an activity as a “b1837-protein”, preferably it is the molecule of section (a) or (b) of this paragraph.

[62508] In particular, it was observed that in plants, especially in Arabidopsis thaliana, increasing or generating the activity of a gene product non-targeted with the activity of a “b1837-protein”, preferably being encoded by a gene comprising the nucleic acid sequence SEQ ID NO. 78953, preferably the coding region thereof, conferred the production of or the increase in hexadecatrienoic acid compared with the wild type control.

[62509] The nucleic acid sequence of B2032 from Escherichia coli, e.g. as shown in the respective line in column 5 of Table I, application no. 12, has been published in B. And the activity of the gene product thereof is the activity of b2032-protein.

[62510] Accordingly, in one embodiment, the process of the present invention for producing hexadecadienoic acid in a non-human organism, like a microorganism or a plant or a part thereof, comprises increasing or generating the activity of a gene product with the activity of a gene product conferring the activity of “b2032-protein”, especially from Escherichia coli or its functional equivalent or its homolog, e.g. the increase of
[62511] (a) a gene product of a gene comprising the nucleic acid molecule as shown in the respective line in column 5 of Table I (whereby the respective line discloses in column 7 the fine chemical hexadecadienoic acid), application no. 12, preferably the coding region thereof, or a homolog or a fragment thereof, and being depicted in the same respective line as said B2032, or a functional equivalent or a homolog thereof as shown in column 8 of Table I, application no. 12, preferably the coding region thereof, particularly a homolog or functional equivalent as shown in column 8 of Table I B, application no. 12, and being depicted in the same respective line as said B2032, and preferably the activity is increased non-targeted, or
[62512] (b) a polypeptide comprising a polypeptide, a consensus sequence or at least a polypeptide motif as shown in the respective line in column 5 of Table II or in column 8 of Table IV, application no. 12, respectively, and being depicted in the same respective line as said B2032, or a functional equivalent or a homolog thereof as depicted in column 8 of Table II, application no. 12, preferably a homolog or functional equivalent as depicted in column 8 of Table II B, application no. 12, and being depicted in the same respective line as said B2032, and preferably the activity is increased non-targeted, whereby the respective line discloses in column 7 the fine chemical hexadecadienoic acid.

[62513] Accordingly, in one embodiment, the molecule which activity is to be increased in the process of the invention is the gene product with an activity as a “b2032-protein”, preferably it is the molecule of section (a) or (b) of this paragraph.

[62514] In particular, it was observed that in plants, especially in Arabidopsis thaliana, increasing or generating the activity of a gene product non-targeted with the activity of a “b2032-protein”, preferably being encoded by a gene comprising the nucleic acid sequence SEQ ID NO. 8920, preferably the coding region thereof, conferred the production of or the increase in hexadecadienoic acid compared with the wild type control.

[62515] The nucleic acid sequence of B2099 from Escherichia coli, e.g. as shown in the respective line in column 5 of Table I, application no. 12, has been published in B. And the activity of the gene product thereof is the activity of b2099-protein.

[62516] Accordingly, in one embodiment, the process of the present invention for producing hexadecadienoic acid in a non-human organism, like a microorganism or a plant or a part thereof, comprises increasing or generating the activity of a gene product with the activity of a gene product conferring the activity of “b2099-protein”, especially from Escherichia coli or its functional equivalent or its homolog, e.g. the increase of
[62517] (a) a gene product of a gene comprising the nucleic acid molecule as shown in the respective line in column 5 of Table I (whereby the respective line discloses in column 7 the fine chemical hexadecadienoic acid), application no. 12, preferably the coding region thereof, or a homolog or a fragment thereof, and being depicted in the same respective line as said B2099, or a functional equivalent or a homolog thereof as shown in column 8 of Table I, application no. 12, preferably the coding region thereof, particularly a homolog or functional equivalent as shown in column 8 of Table I B, application no. 12, and being depicted in the same respective line as said B2099, and preferably the activity is increased non-targeted, or
[62518] (b) a polypeptide comprising a polypeptide, a consensus sequence or at least a polypeptide motif as shown in the respective line in column 5 of Table II or in column 8 of Table IV, application no. 12, respectively, and being depicted in the same respective line as said B2099, or a functional equivalent or a homolog thereof as depicted in column 8 of Table II, application no. 12, preferably a homolog or functional equivalent as depicted in column 8 of Table II B, application no. 12, and being depicted in the same respective line as said B2099, and preferably the activity is increased non-targeted, whereby the respective line discloses in column 7 the fine chemical hexadecadienoic acid.

[62519] Accordingly, in one embodiment, the molecule which activity is to be increased in the process of the invention is the gene product with an activity as a “b2099-protein”, preferably it is the molecule of section (a) or (b) of this paragraph.

[62520] In particular, it was observed that in plants, especially in Arabidopsis thaliana, increasing or generating the activity of a gene product non-targeted with the activity of a “b2099-protein”, preferably being encoded by a gene comprising the nucleic acid sequence SEQ ID NO. 115595, preferably the coding region thereof, conferred the production of or the increase in hexadecadienoic acid compared with the wild type control.

[62521] The nucleic acid sequence of B2099 from Escherichia coli, e.g. as shown in the respective line in column 5 of Table I, application no. 12, has been published in B. And the activity of the gene product thereof is the activity of b2099-protein.

[62522] Accordingly, in one embodiment, the process of the present invention for producing hexadecatrienoic acid in a non-human organism, like a microorganism or a plant or a part thereof, comprises increasing or generating the activity of a gene product with the activity of a gene product conferring the activity of “b2099-protein”, especially from Escherichia coli or its functional equivalent or its homolog, e.g. the increase of
[62523] (a) a gene product of a gene comprising the nucleic acid molecule as shown in the respective line in column 5 of Table I (whereby the respective line discloses in column 7 the fine chemical hexadecatrienoic acid), application no. 12, preferably the coding region thereof, or a homolog or a fragment thereof, and being depicted in the same respective line as said B2099, or a functional equivalent or a homolog thereof as shown in column 8 of Table I, application no. 12, preferably the coding region thereof, particularly a homolog or functional equivalent as shown in column 8 of Table I B, application no. 12, and being depicted in the same respective line as said B2099, and preferably the activity is increased non-targeted, or
[62524] (b) a polypeptide comprising a polypeptide, a consensus sequence or at least a polypeptide motif as shown in the respective line in column 5 of Table II or in column 8 of Table IV, application no. 12, respectively, and being depicted in the same respective line as said B2099, or a functional equivalent or a homolog thereof as depicted in column 8 of Table II, application no. 12, preferably a homolog or functional equivalent as depicted in column 8 of Table II B, application no. 12, and being depicted in the same respective line as said B2099, and preferably the activity is increased non-targeted, whereby the respective line discloses in column 7 the fine chemical hexadecatrienoic acid.

[62525] Accordingly, in one embodiment, the molecule which activity is to be increased in the process of the invention is the gene product with an activity as a “b2099-protein”, preferably it is the molecule of section (a) or (b) of this paragraph.

[62526] In particular, it was observed that in plants, especially in Arabidopsis thaliana, increasing or generating the activity of a gene product non-targeted with the activity of a “b2099-protein”, preferably being encoded by a gene comprising the nucleic acid sequence SEQ ID NO. 115595, preferably the coding region thereof, conferred the production of or the increase in hexadecatrienoic acid compared with the wild type control.

[62527] The nucleic acid sequence of B2107 from Escherichia coli, e.g. as shown in the respective line in column 5 of Table I, application no. 12, has been published in B. And the activity of the gene product thereof is the activity of b2107-protein.

[62528] Accordingly, in one embodiment, the process of the present invention for producing 2-hydroxytetracosenoic acid (preferably 2-hydroxynervonic acid) in a non-human organism, like a microorganism or a plant or a part thereof, comprises increasing or generating the activity of a gene product with the activity of a gene product conferring the activity of “b2107-protein”, especially from Escherichia coli or its functional equivalent or its homolog, e.g. the increase of
[62529] (a) a gene product of a gene comprising the nucleic acid molecule as shown in the respective line in column 5 of Table I (whereby the respective line discloses in column 7 the fine chemical 2-hydroxytetracosenoic acid (preferably 2-hydroxynervonic acid)), application no. 12, preferably the coding region thereof, or a homolog or a fragment thereof, and being depicted in the same respective line as said B2107, or a functional equivalent or a homolog thereof as shown in column 8 of Table I, application no. 12, preferably the coding region thereof, particularly a homolog or functional equivalent as shown in column 8 of Table I B, application no. 12, and being depicted in the same respective line as said B2107, and preferably the activity is increased non-targeted, or
[62530] (b) a polypeptide comprising a polypeptide, a consensus sequence or at least a polypeptide motif as shown in the respective line in column 5 of Table II or in column 8 of Table IV, application no. 12, respectively, and being depicted in the same respective line as said B2107, or a functional equivalent or a homolog thereof as depicted in column 8 of Table II, application no. 12, preferably a homolog or functional equivalent as depicted in column 8 of Table II B, application no. 12, and being depicted in the same respective line as said B2107, and preferably the activity is increased non-targeted, whereby the respective line discloses in column 7 the fine chemical 2-hydroxytetracosenoic acid (preferably 2-hydroxynervonic acid).

[62531] Accordingly, in one embodiment, the molecule which activity is to be increased in the process of the invention is the gene product with an activity as a “b2107-protein”, preferably it is the molecule of section (a) or (b) of this paragraph.

[62532] In particular, it was observed that in plants, especially in Arabidopsis thaliana, increasing or generating the activity of a gene product non-targeted with the activity of a “b2107-protein”, preferably being encoded by a gene comprising the nucleic acid sequence SEQ ID NO. 39002, preferably the coding region thereof, conferred the production of or the increase in 2-hydroxytetracosenoic acid (preferably 2-hydroxynervonic acid) compared with the wild type control.

[62533] The nucleic acid sequence of B2126 from Escherichia coli, e.g. as shown in the respective line in column 5 of Table I, application no. 12, has been published in B. And the activity of the gene product thereof is the activity of b2126-protein.

[62534] Accordingly, in one embodiment, the process of the present invention for producing lauric acid in a non-human organism, like a microorganism or a plant or a part thereof, comprises increasing or generating the activity of a gene product with the activity of a gene product conferring the activity of “b2126-protein”, especially from Escherichia coli or its functional equivalent or its homolog, e.g. the increase of
[62535] (a) a gene product of a gene comprising the nucleic acid molecule as shown in the respective line in column 5 of Table I (whereby the respective line discloses in column 7 the fine chemical lauric acid), application no. 12, preferably the coding region thereof, or a homolog or a fragment thereof, and being depicted in the same respective line as said B2126, or a functional equivalent or a homolog thereof as shown in column 8 of Table I, application no. 12, preferably the coding region thereof, particularly a homolog or functional equivalent as shown in column 8 of Table I B, application no. 12, and being depicted in the same respective line as said B2126, and preferably the activity is increased plastidic, or
[62536] (b) a polypeptide comprising a polypeptide, a consensus sequence or at least a polypeptide motif as shown in the respective line in column 5 of Table II or in column 8 of Table IV, application no. 12, respectively, and being depicted in the same respective line as said B2126, or a functional equivalent or a homolog thereof as depicted in column 8 of Table II, application no. 12, preferably a homolog or functional equivalent as depicted in column 8 of Table II B, application no. 12, and being depicted in the same respective line as said B2126, and preferably the activity is increased plastidic, whereby the respective line discloses in column 7 the fine chemical lauric acid.

[62537] Accordingly, in one embodiment, the molecule which activity is to be increased in the process of the invention is the gene product with an activity as a “b2126-protein”, preferably it is the molecule of section (a) or (b) of this paragraph.

[62538] In particular, it was observed that in plants, especially in Arabidopsis thaliana, increasing or generating the activity of a gene product plastidic with the activity of a “b2126-protein”, preferably being encoded by a gene comprising the nucleic acid sequence SEQ ID NO. 124992, preferably the coding region thereof, conferred the production of or the increase in lauric acid compared with the wild type control.

[62539] The nucleic acid sequence of B2139 from Escherichia coli, e.g. as shown in the respective line in column 5 of Table I, application no. 12, has been published in B. And the activity of the gene product thereof is the activity of b2139-protein.

[62540] Accordingly, in one embodiment, the process of the present invention for producing 2-hydroxypalmitic acid in a non-human organism, like a microorganism or a plant or a part thereof, comprises increasing or generating the activity of a gene product with the activity of a gene product conferring the activity of “b2139-protein”, especially from Escherichia coli or its functional equivalent or its homolog, e.g. the increase of
[62541] (a) a gene product of a gene comprising the nucleic acid molecule as shown in the respective line in column 5 of Table I (whereby the respective line discloses in column 7 the fine chemical 2-hydroxypalmitic acid), application no. 12, preferably the coding region thereof, or a homolog or a fragment thereof, and being depicted in the same respective line as said B2139, or a functional equivalent or a homolog thereof as shown in column 8 of Table I, application no. 12, preferably the coding region thereof, particularly a homolog or functional equivalent as shown in column 8 of Table I B, application no. 12, and being depicted in the same respective line as said B2139, and preferably the activity is increased plastidic, or
[62542] (b) a polypeptide comprising a polypeptide, a consensus sequence or at least a polypeptide motif as shown in the respective line in column 5 of Table II or in column 8 of Table IV, application no. 12, respectively, and being depicted in the same respective line as said B2139, or a functional equivalent or a homolog thereof as depicted in column 8 of Table II, application no. 12, preferably a homolog or functional equivalent as depicted in column 8 of Table II B, application no. 12, and being depicted in the same respective line as said B2139, and preferably the activity is increased plastidic, whereby the respective line discloses in column 7 the fine chemical 2-hydroxypalmitic acid.

[62543] Accordingly, in one embodiment, the molecule which activity is to be increased in the process of the invention is the gene product with an activity as a “b2139-protein”, preferably it is the molecule of section (a) or (b) of this paragraph.

[62544] In particular, it was observed that in plants, especially in Arabidopsis thaliana, increasing or generating the activity of a gene product plastidic with the activity of a “b2139-protein”, preferably being encoded by a gene comprising the nucleic acid sequence SEQ ID NO. 125085, preferably the coding region thereof, conferred the production of or the increase in 2-hydroxypalmitic acid compared with the wild type control.

[62545] The nucleic acid sequence of B2178 from Escherichia coli, e.g. as shown in the respective line in column 5 of Table I, application no. 12, has been published in B. And the activity of the gene product thereof is the activity of ABC transporter permease protein.

[62546] Accordingly, in one embodiment, the process of the present invention for producing hexadecatrienoic acid in a non-human organism, like a microorganism or a plant or a part thereof, comprises increasing or generating the activity of a gene product with the activity of a gene product conferring the activity of “ABC transporter permease protein”, especially from Escherichia coli or its functional equivalent or its homolog, e.g. the increase of
[62547] (a) a gene product of a gene comprising the nucleic acid molecule as shown in the respective line in column 5 of Table I (whereby the respective line discloses in column 7 the fine chemical hexadecatrienoic acid), application no. 12, preferably the coding region thereof, or a homolog or a fragment thereof, and being depicted in the same respective line as said B2178, or a functional equivalent or a homolog thereof as shown in column 8 of Table I, application no. 12, preferably the coding region thereof, particularly a homolog or functional equivalent as shown in column 8 of Table I B, application no. 12, and being depicted in the same respective line as said B2178, and preferably the activity is increased non-targeted, or
[62548] (b) a polypeptide comprising a polypeptide, a consensus sequence or at least a polypeptide motif as shown in the respective line in column 5 of Table II or in column 8 of Table IV, application no. 12, respectively, and being depicted in the same respective line as said B2178, or a functional equivalent or a homolog thereof as depicted in column 8 of Table II, application no. 12, preferably a homolog or functional equivalent as depicted in column 8 of Table II B, application no. 12, and being depicted in the same respective line as said B2178, and preferably the activity is increased non-targeted, whereby the respective line discloses in column 7 the fine chemical hexadecatrienoic acid.

[62549] Accordingly, in one embodiment, the molecule which activity is to be increased in the process of the invention is the gene product with an activity as a “ABC transporter permease protein”, preferably it is the molecule of section (a) or (b) of this paragraph.

[62550] In particular, it was observed that in plants, especially in Arabidopsis thaliana, increasing or generating the activity of a gene product non-targeted with the activity of a “ABC transporter permease protein”, preferably being encoded by a gene comprising the nucleic acid sequence SEQ ID NO. 39040, preferably the coding region thereof, conferred the production of or the increase in hexadecatrienoic acid compared with the wild type control.

[62551] The nucleic acid sequence of B2216 from Escherichia coli, e.g. as shown in the respective line in column 5 of Table I, application no. 12, has been published in B. And the activity of the gene product thereof is the activity of sensor kinase.

[62552] Accordingly, in one embodiment, the process of the present invention for producing 2-hydroxybehenic acid in a non-human organism, like a microorganism or a plant or a part thereof, comprises increasing or generating the activity of a gene product with the activity of a gene product conferring the activity of “sensor kinase”, especially from Escherichia coli or its functional equivalent or its homolog, e.g. the increase of
[62553] (a) a gene product of a gene comprising the nucleic acid molecule as shown in the respective line in column 5 of Table I (whereby the respective line discloses in column 7 the fine chemical 2-hydroxybehenic acid), application no. 12, preferably the coding region thereof, or a homolog or a fragment thereof, and being depicted in the same respective line as said B2216, or a functional equivalent or a homolog thereof as shown in column 8 of Table I, application no. 12, preferably the coding region thereof, particularly a homolog or functional equivalent as shown in column 8 of Table I B, application no. 12, and being depicted in the same respective line as said B2216, and preferably the activity is increased plastidic, or
[62554] (b) a polypeptide comprising a polypeptide, a consensus sequence or at least a polypeptide motif as shown in the respective line in column 5 of Table II or in column 8 of Table IV, application no. 12, respectively, and being depicted in the same respective line as said B2216, or a functional equivalent or a homolog thereof as depicted in column 8 of Table II, application no. 12, preferably a homolog or functional equivalent as depicted in column 8 of Table II B, application no. 12, and being depicted in the same respective line as said B2216, and preferably the activity is increased plastidic, whereby the respective line discloses in column 7 the fine chemical 2-hydroxybehenic acid.

[62555] Accordingly, in one embodiment, the molecule which activity is to be increased in the process of the invention is the gene product with an activity as a “sensor kinase”, preferably it is the molecule of section (a) or (b) of this paragraph.

[62556] In particular, it was observed that in plants, especially in Arabidopsis thaliana, increasing or generating the activity of a gene product plastidic with the activity of a “sensor kinase”, preferably being encoded by a gene comprising the nucleic acid sequence SEQ ID NO. 125105, preferably the coding region thereof, conferred the production of or the increase in 2-hydroxybehenic acid compared with the wild type control.

[62557] The nucleic acid sequence of B2360 from Escherichia coli, e.g. as shown in the respective line in column 5 of Table I, application no. 12, has been published in B. And the activity of the gene product thereof is the activity of b2360-protein.

[62558] Accordingly, in one embodiment, the process of the present invention for producing 2-hydroxytetracosenoic acid (preferably 2-hydroxynervonic acid) in a non-human organism, like a microorganism or a plant or a part thereof, comprises increasing or generating the activity of a gene product with the activity of a gene product conferring the activity of “b2360-protein”, especially from Escherichia coli or its functional equivalent or its homolog, e.g. the increase of
[62559] (a) a gene product of a gene comprising the nucleic acid molecule as shown in the respective line in column 5 of Table I (whereby the respective line discloses in column 7 the fine chemical 2-hydroxytetracosenoic acid (preferably 2-hydroxynervonic acid)), application no. 12, preferably the coding region thereof, or a homolog or a fragment thereof, and being depicted in the same respective line as said B2360, or a functional equivalent or a homolog thereof as shown in column 8 of Table I, application no. 12, preferably the coding region thereof, particularly a homolog or functional equivalent as shown in column 8 of Table I B, application no. 12, and being depicted in the same respective line as said B2360, and preferably the activity is increased non-targeted, or
[62560] (b) a polypeptide comprising a polypeptide, a consensus sequence or at least a polypeptide motif as shown in the respective line in column 5 of Table II or in column 8 of Table IV, application no. 12, respectively, and being depicted in the same respective line as said B2360, or a functional equivalent or a homolog thereof as depicted in column 8 of Table II, application no. 12, preferably a homolog or functional equivalent as depicted in column 8 of Table II B, application no. 12, and being depicted in the same respective line as said B2360, and preferably the activity is increased non-targeted, whereby the respective line discloses in column 7 the fine chemical 2-hydroxytetracosenoic acid (preferably 2-hydroxynervonic acid).

[62561] Accordingly, in one embodiment, the molecule which activity is to be increased in the process of the invention is the gene product with an activity as a “b2360-protein”, preferably it is the molecule of section (a) or (b) of this paragraph.

[62562] In particular, it was observed that in plants, especially in Arabidopsis thaliana, increasing or generating the activity of a gene product non-targeted with the activity of a “b2360-protein”, preferably being encoded by a gene comprising the nucleic acid sequence SEQ ID NO. 39219, preferably the coding region thereof, conferred the production of or the increase in 2-hydroxytetracosenoic acid (preferably 2-hydroxynervonic acid) compared with the wild type control.

[62563] The nucleic acid sequence of B2414 from Escherichia coli, e.g. as shown in the respective line in column 5 of Table I, application no. 12, has been published in B. And the activity of the gene product thereof is the activity of cysteine synthase A.

[62564] Accordingly, in one embodiment, the process of the present invention for producing 2-hydroxytetracosenoic acid (preferably 2-hydroxynervonic acid) in a non-human organism, like a microorganism or a plant or a part thereof, comprises increasing or generating the activity of a gene product with the activity of a gene product conferring the activity of “cysteine synthase A”, especially from Escherichia coli or its functional equivalent or its homolog, e.g. the increase of
[62565] (a) a gene product of a gene comprising the nucleic acid molecule as shown in the respective line in column 5 of Table I (whereby the respective line discloses in column 7 the fine chemical 2-hydroxytetracosenoic acid (preferably 2-hydroxynervonic acid)), application no. 12, preferably the coding region thereof, or a homolog or a fragment thereof, and being depicted in the same respective line as said B2414, or a functional equivalent or a homolog thereof as shown in column 8 of Table I, application no. 12, preferably the coding region thereof, particularly a homolog or functional equivalent as shown in column 8 of Table I B, application no. 12, and being depicted in the same respective line as said B2414, and preferably the activity is increased non-targeted, or
[62566] (b) a polypeptide comprising a polypeptide, a consensus sequence or at least a polypeptide motif as shown in the respective line in column 5 of Table II or in column 8 of Table IV, application no. 12, respectively, and being depicted in the same respective line as said B2414, or a functional equivalent or a homolog thereof as depicted in column 8 of Table II, application no. 12, preferably a homolog or functional equivalent as depicted in column 8 of Table II B, application no. 12, and being depicted in the same respective line as said B2414, and preferably the activity is increased non-targeted, whereby the respective line discloses in column 7 the fine chemical 2-hydroxytetracosenoic acid (preferably 2-hydroxynervonic acid).

[62567] Accordingly, in one embodiment, the molecule which activity is to be increased in the process of the invention is the gene product with an activity as a “cysteine synthase A”, preferably it is the molecule of section (a) or (b) of this paragraph.

[62568] In particular, it was observed that in plants, especially in Arabidopsis thaliana, increasing or generating the activity of a gene product non-targeted with the activity of a “cysteine synthase A”, preferably being encoded by a gene comprising the nucleic acid sequence SEQ ID NO. 39300, preferably the coding region thereof, conferred the production of or the increase in 2-hydroxytetracosenoic acid (preferably 2-hydroxynervonic acid) compared with the wild type control.

[62569] The nucleic acid sequence of B2439 from Escherichia coli, e.g. as shown in the respective line in column 5 of Table I, application no. 12, has been published in B. And the activity of the gene product thereof is the activity of ethanolamine utilization protein.

[62570] Accordingly, in one embodiment, the process of the present invention for producing hexadecadienoic acid in a non-human organism, like a microorganism or a plant or a part thereof, comprises increasing or generating the activity of a gene product with the activity of a gene product conferring the activity of “ethanolamine utilization protein”, especially from Escherichia coli or its functional equivalent or its homolog, e.g. the increase of
[62571] (a) a gene product of a gene comprising the nucleic acid molecule as shown in the respective line in column 5 of Table I (whereby the respective line discloses in column 7 the fine chemical hexadecadienoic acid), application no. 12, preferably the coding region thereof, or a homolog or a fragment thereof, and being depicted in the same respective line as said B2439, or a functional equivalent or a homolog thereof as shown in column 8 of Table I, application no. 12, preferably the coding region thereof, particularly a homolog or functional equivalent as shown in column 8 of Table I B, application no. 12, and being depicted in the same respective line as said B2439, and preferably the activity is increased non-targeted, or
[62572] (b) a polypeptide comprising a polypeptide, a consensus sequence or at least a polypeptide motif as shown in the respective line in column 5 of Table II or in column 8 of Table IV, application no. 12, respectively, and being depicted in the same respective line as said B2439, or a functional equivalent or a homolog thereof as depicted in column 8 of Table II, application no. 12, preferably a homolog or functional equivalent as depicted in column 8 of Table II B, application no. 12, and being depicted in the same respective line as said B2439, and preferably the activity is increased non-targeted, whereby the respective line discloses in column 7 the fine chemical hexadecadienoic acid.

[62573] Accordingly, in one embodiment, the molecule which activity is to be increased in the process of the invention is the gene product with an activity as a “ethanolamine utilization protein”, preferably it is the molecule of section (a) or (b) of this paragraph.

[62574] In particular, it was observed that in plants, especially in Arabidopsis thaliana, increasing or generating the activity of a gene product non-targeted with the activity of a “ethanolamine utilization protein”, preferably being encoded by a gene comprising the nucleic acid sequence SEQ ID NO. 115628, preferably the coding region thereof, conferred the production of or the increase in hexadecadienoic acid compared with the wild type control.

[62575] The nucleic acid sequence of B2439 from Escherichia coli, e.g. as shown in the respective line in column 5 of Table I, application no. 12, has been published in B. And the activity of the gene product thereof is the activity of ethanolamine utilization protein.

[62576] Accordingly, in one embodiment, the process of the present invention for producing hexadecatrienoic acid in a non-human organism, like a microorganism or a plant or a part thereof, comprises increasing or generating the activity of a gene product with the activity of a gene product conferring the activity of “ethanolamine utilization protein”, especially from Escherichia coli or its functional equivalent or its homolog, e.g. the increase of
[62577] (a) a gene product of a gene comprising the nucleic acid molecule as shown in the respective line in column 5 of Table I (whereby the respective line discloses in column 7 the fine chemical hexadecatrienoic acid), application no. 12, preferably the coding region thereof, or a homolog or a fragment thereof, and being depicted in the same respective line as said B2439, or a functional equivalent or a homolog thereof as shown in column 8 of Table I, application no. 12, preferably the coding region thereof, particularly a homolog or functional equivalent as shown in column 8 of Table I B, application no. 12, and being depicted in the same respective line as said B2439, and preferably the activity is increased non-targeted, or
[62578] (b) a polypeptide comprising a polypeptide, a consensus sequence or at least a polypeptide motif as shown in the respective line in column 5 of Table II or in column 8 of Table IV, application no. 12, respectively, and being depicted in the same respective line as said B2439, or a functional equivalent or a homolog thereof as depicted in column 8 of Table II, application no. 12, preferably a homolog or functional equivalent as depicted in column 8 of Table II B, application no. 12, and being depicted in the same respective line as said B2439, and preferably the activity is increased non-targeted, whereby the respective line discloses in column 7 the fine chemical hexadecatrienoic acid.

[62579] Accordingly, in one embodiment, the molecule which activity is to be increased in the process of the invention is the gene product with an activity as a “ethanolamine utilization protein”, preferably it is the molecule of section (a) or (b) of this paragraph.

[62580] In particular, it was observed that in plants, especially in Arabidopsis thaliana, increasing or generating the activity of a gene product non-targeted with the activity of a “ethanolamine utilization protein”, preferably being encoded by a gene comprising the nucleic acid sequence SEQ ID NO. 115628, preferably the coding region thereof, conferred the production of or the increase in hexadecatrienoic acid compared with the wild type control.

[62581] The nucleic acid sequence of B2439 from Escherichia coli, e.g. as shown in the respective line in column 5 of Table I, application no. 12, has been published in B. And the activity of the gene product thereof is the activity of ethanolamine utilization protein.

[62582] Accordingly, in one embodiment, the process of the present invention for producing oleic acid in a non-human organism, like a microorganism or a plant or a part thereof, comprises increasing or generating the activity of a gene product with the activity of a gene product conferring the activity of “ethanolamine utilization protein”, especially from Escherichia coli or its functional equivalent or its homolog, e.g. the increase of
[62583] (a) a gene product of a gene comprising the nucleic acid molecule as shown in the respective line in column 5 of Table I (whereby the respective line discloses in column 7 the fine chemical oleic acid), application no. 12, preferably the coding region thereof, or a homolog or a fragment thereof, and being depicted in the same respective line as said B2439, or a functional equivalent or a homolog thereof as shown in column 8 of Table I, application no. 12, preferably the coding region thereof, particularly a homolog or functional equivalent as shown in column 8 of Table I B, application no. 12, and being depicted in the same respective line as said B2439, and preferably the activity is increased non-targeted, or
[62584] (b) a polypeptide comprising a polypeptide, a consensus sequence or at least a polypeptide motif as shown in the respective line in column 5 of Table II or in column 8 of Table IV, application no. 12, respectively, and being depicted in the same respective line as said B2439, or a functional equivalent or a homolog thereof as depicted in column 8 of Table II, application no. 12, preferably a homolog or functional equivalent as depicted in column 8 of Table II B, application no. 12, and being depicted in the same respective line as said B2439, and preferably the activity is increased non-targeted, whereby the respective line discloses in column 7 the fine chemical oleic acid.

[62585] Accordingly, in one embodiment, the molecule which activity is to be increased in the process of the invention is the gene product with an activity as a “ethanolamine utilization protein”, preferably it is the molecule of section (a) or (b) of this paragraph.

[62586] In particular, it was observed that in plants, especially in Arabidopsis thaliana, increasing or generating the activity of a gene product non-targeted with the activity of a “ethanolamine utilization protein”, preferably being encoded by a gene comprising the nucleic acid sequence SEQ ID NO. 115628, preferably the coding region thereof, conferred the production of or the increase in oleic acid compared with the wild type control.

[62587] The nucleic acid sequence of B2474 from Escherichia coli, e.g. as shown in the respective line in column 5 of Table I, application no. 12, has been published in B. And the activity of the gene product thereof is the activity of b2474-protein.

[62588] Accordingly, in one embodiment, the process of the present invention for producing cerebronic acid in a non-human organism, like a microorganism or a plant or a part thereof, comprises increasing or generating the activity of a gene product with the activity of a gene product conferring the activity of “b2474-protein”, especially from Escherichia coli or its functional equivalent or its homolog, e.g. the increase of
[62589] (a) a gene product of a gene comprising the nucleic acid molecule as shown in the respective line in column 5 of Table I (whereby the respective line discloses in column 7 the fine chemical cerebronic acid), application no. 12, preferably the coding region thereof, or a homolog or a fragment thereof, and being depicted in the same respective line as said B2474, or a functional equivalent or a homolog thereof as shown in column 8 of Table I, application no. 12, preferably the coding region thereof, particularly a homolog or functional equivalent as shown in column 8 of Table I B, application no. 12, and being depicted in the same respective line as said B2474, and preferably the activity is increased non-targeted, or
[62590] (b) a polypeptide comprising a polypeptide, a consensus sequence or at least a polypeptide motif as shown in the respective line in column 5 of Table II or in column 8 of Table IV, application no. 12, respectively, and being depicted in the same respective line as said B2474, or a functional equivalent or a homolog thereof as depicted in column 8 of Table II, application no. 12, preferably a homolog or functional equivalent as depicted in column 8 of Table II B, application no. 12, and being depicted in the same respective line as said B2474, and preferably the activity is increased non-targeted, whereby the respective line discloses in column 7 the fine chemical cerebronic acid.

[62591] Accordingly, in one embodiment, the molecule which activity is to be increased in the process of the invention is the gene product with an activity as a “b2474-protein”, preferably it is the molecule of section (a) or (b) of this paragraph.

[62592] In particular, it was observed that in plants, especially in Arabidopsis thaliana, increasing or generating the activity of a gene product non-targeted with the activity of a “b2474-protein”, preferably being encoded by a gene comprising the nucleic acid sequence SEQ ID NO. 40329, preferably the coding region thereof, conferred the production of or the increase in cerebronic acid compared with the wild type control.

[62593] The nucleic acid sequence of B2474 from Escherichia coli, e.g. as shown in the respective line in column 5 of Table I, application no. 12, has been published in B. And the activity of the gene product thereof is the activity of b2474-protein.

[62594] Accordingly, in one embodiment, the process of the present invention for producing hexadecatrienoic acid in a non-human organism, like a microorganism or a plant or a part thereof, comprises increasing or generating the activity of a gene product with the activity of a gene product conferring the activity of “b2474-protein”, especially from Escherichia coli or its functional equivalent or its homolog, e.g. the increase of
[62595] (a) a gene product of a gene comprising the nucleic acid molecule as shown in the respective line in column 5 of Table I (whereby the respective line discloses in column 7 the fine chemical hexadecatrienoic acid), application no. 12, preferably the coding region thereof, or a homolog or a fragment thereof, and being depicted in the same respective line as said B2474, or a functional equivalent or a homolog thereof as shown in column 8 of Table I, application no. 12, preferably the coding region thereof, particularly a homolog or functional equivalent as shown in column 8 of Table I B, application no. 12, and being depicted in the same respective line as said B2474, and preferably the activity is increased non-targeted, or
[62596] (b) a polypeptide comprising a polypeptide, a consensus sequence or at least a polypeptide motif as shown in the respective line in column 5 of Table II or in column 8 of Table IV, application no. 12, respectively, and being depicted in the same respective line as said B2474, or a functional equivalent or a homolog thereof as depicted in column 8 of Table II, application no. 12, preferably a homolog or functional equivalent as depicted in column 8 of Table II B, application no. 12, and being depicted in the same respective line as said B2474, and preferably the activity is increased non-targeted, whereby the respective line discloses in column 7 the fine chemical hexadecatrienoic acid.

[62597] Accordingly, in one embodiment, the molecule which activity is to be increased in the process of the invention is the gene product with an activity as a “b2474-protein”, preferably it is the molecule of section (a) or (b) of this paragraph.

[62598] In particular, it was observed that in plants, especially in Arabidopsis thaliana, increasing or generating the activity of a gene product non-targeted with the activity of a “b2474-protein”, preferably being encoded by a gene comprising the nucleic acid sequence SEQ ID NO. 40329, preferably the coding region thereof, conferred the production of or the increase in hexadecatrienoic acid compared with the wild type control.

[62599] The nucleic acid sequence of B2474 from Escherichia coli, e.g. as shown in the respective line in column 5 of Table I, application no. 12, has been published in B. And the activity of the gene product thereof is the activity of b2474-protein.

[62600] Accordingly, in one embodiment, the process of the present invention for producing 2-hydroxytetracosenoic acid (preferably 2-hydroxynervonic acid) in a non-human organism, like a microorganism or a plant or a part thereof, comprises increasing or generating the activity of a gene product with the activity of a gene product conferring the activity of “b2474-protein”, especially from Escherichia coli or its functional equivalent or its homolog, e.g. the increase of
[62601] (a) a gene product of a gene comprising the nucleic acid molecule as shown in the respective line in column 5 of Table I (whereby the respective line discloses in column 7 the fine chemical 2-hydroxytetracosenoic acid (preferably 2-hydroxynervonic acid)), application no. 12, preferably the coding region thereof, or a homolog or a fragment thereof, and being depicted in the same respective line as said B2474, or a functional equivalent or a homolog thereof as shown in column 8 of Table I, application no. 12, preferably the coding region thereof, particularly a homolog or functional equivalent as shown in column 8 of Table I B, application no. 12, and being depicted in the same respective line as said B2474, and preferably the activity is increased non-targeted, or
[62602] (b) a polypeptide comprising a polypeptide, a consensus sequence or at least a polypeptide motif as shown in the respective line in column 5 of Table II or in column 8 of Table IV, application no. 12, respectively, and being depicted in the same respective line as said B2474, or a functional equivalent or a homolog thereof as depicted in column 8 of Table II, application no. 12, preferably a homolog or functional equivalent as depicted in column 8 of Table II B, application no. 12, and being depicted in the same respective line as said B2474, and preferably the activity is increased non-targeted, whereby the respective line discloses in column 7 the fine chemical 2-hydroxytetracosenoic acid (preferably 2-hydroxynervonic acid).

[62603] Accordingly, in one embodiment, the molecule which activity is to be increased in the process of the invention is the gene product with an activity as a “b2474-protein”, preferably it is the molecule of section (a) or (b) of this paragraph.

[62604] In particular, it was observed that in plants, especially in Arabidopsis thaliana, increasing or generating the activity of a gene product non-targeted with the activity of a “b2474-protein”, preferably being encoded by a gene comprising the nucleic acid sequence SEQ ID NO. 40329, preferably the coding region thereof, conferred the production of or the increase in 2-hydroxytetracosenoic acid (preferably 2-hydroxynervonic acid) compared with the wild type control.

[62605] The nucleic acid sequence of B2513 from Escherichia coli, e.g. as shown in the respective line in column 5 of Table I, application no. 12, has been published in B. And the activity of the gene product thereof is the activity of b2513-protein.

[62606] Accordingly, in one embodiment, the process of the present invention for producing hexadecadienoic acid in a non-human organism, like a microorganism or a plant or a part thereof, comprises increasing or generating the activity of a gene product with the activity of a gene product conferring the activity of “b2513-protein”, especially from Escherichia coli or its functional equivalent or its homolog, e.g. the increase of
[62607] (a) a gene product of a gene comprising the nucleic acid molecule as shown in the respective line in column 5 of Table I (whereby the respective line discloses in column 7 the fine chemical hexadecadienoic acid), application no. 12, preferably the coding region thereof, or a homolog or a fragment thereof, and being depicted in the same respective line as said B2513, or a functional equivalent or a homolog thereof as shown in column 8 of Table I, application no. 12, preferably the coding region thereof, particularly a homolog or functional equivalent as shown in column 8 of Table I B, application no. 12, and being depicted in the same respective line as said B2513, and preferably the activity is increased non-targeted, or
[62608] (b) a polypeptide comprising a polypeptide, a consensus sequence or at least a polypeptide motif as shown in the respective line in column 5 of Table II or in column 8 of Table IV, application no. 12, respectively, and being depicted in the same respective line as said B2513, or a functional equivalent or a homolog thereof as depicted in column 8 of Table II, application no. 12, preferably a homolog or functional equivalent as depicted in column 8 of Table II B, application no. 12, and being depicted in the same respective line as said B2513, and preferably the activity is increased non-targeted, whereby the respective line discloses in column 7 the fine chemical hexadecadienoic acid.

[62609] Accordingly, in one embodiment, the molecule which activity is to be increased in the process of the invention is the gene product with an activity as a “b2513-protein”, preferably it is the molecule of section (a) or (b) of this paragraph.

[62610] In particular, it was observed that in plants, especially in Arabidopsis thaliana, increasing or generating the activity of a gene product non-targeted with the activity of a “b2513-protein”, preferably being encoded by a gene comprising the nucleic acid sequence SEQ ID NO. 9167, preferably the coding region thereof, conferred the production of or the increase in hexadecadienoic acid compared with the wild type control.

[62611] The nucleic acid sequence of B2585 from Escherichia coli, e.g. as shown in the respective line in column 5 of Table I, application no. 12, has been published in B. And the activity of the gene product thereof is the activity of phosphatidylserine synthase.

[62612] Accordingly, in one embodiment, the process of the present invention for producing hexadecadienoic acid in a non-human organism, like a microorganism or a plant or a part thereof, comprises increasing or generating the activity of a gene product with the activity of a gene product conferring the activity of “phosphatidylserine synthase”, especially from Escherichia coli or its functional equivalent or its homolog, e.g. the increase of
[62613] (a) a gene product of a gene comprising the nucleic acid molecule as shown in the respective line in column 5 of Table I (whereby the respective line discloses in column 7 the fine chemical hexadecadienoic acid), application no. 12, preferably the coding region thereof, or a homolog or a fragment thereof, and being depicted in the same respective line as said B2585, or a functional equivalent or a homolog thereof as shown in column 8 of Table I, application no. 12, preferably the coding region thereof, particularly a homolog or functional equivalent as shown in column 8 of Table I B, application no. 12, and being depicted in the same respective line as said B2585, and preferably the activity is increased non-targeted, or
[62614] (b) a polypeptide comprising a polypeptide, a consensus sequence or at least a polypeptide motif as shown in the respective line in column 5 of Table II or in column 8 of Table IV, application no. 12, respectively, and being depicted in the same respective line as said B2585, or a functional equivalent or a homolog thereof as depicted in column 8 of Table II, application no. 12, preferably a homolog or functional equivalent as depicted in column 8 of Table II B, application no. 12, and being depicted in the same respective line as said B2585, and preferably the activity is increased non-targeted, whereby the respective line discloses in column 7 the fine chemical hexadecadienoic acid.

[62615] Accordingly, in one embodiment, the molecule which activity is to be increased in the process of the invention is the gene product with an activity as a “phosphatidylserine synthase”, preferably it is the molecule of section (a) or (b) of this paragraph.

[62616] In particular, it was observed that in plants, especially in Arabidopsis thaliana, increasing or generating the activity of a gene product non-targeted with the activity of a “phosphatidylserine synthase”, preferably being encoded by a gene comprising the nucleic acid sequence SEQ ID NO. 125142, preferably the coding region thereof, conferred the production of or the increase in hexadecadienoic acid compared with the wild type control.

[62617] The nucleic acid sequence of B2654 from Escherichia coli, e.g. as shown in the respective line in column 5 of Table I, application no. 12, has been published in B. And the activity of the gene product thereof is the activity of b2654-protein.

[62618] Accordingly, in one embodiment, the process of the present invention for producing 2-hydroxytetracosenoic acid (preferably 2-hydroxynervonic acid) in a non-human organism, like a microorganism or a plant or a part thereof, comprises increasing or generating the activity of a gene product with the activity of a gene product conferring the activity of “b2654-protein”, especially from Escherichia coli or its functional equivalent or its homolog, e.g. the increase of
[62619] (a) a gene product of a gene comprising the nucleic acid molecule as shown in the respective line in column 5 of Table I (whereby the respective line discloses in column 7 the fine chemical 2-hydroxytetracosenoic acid (preferably 2-hydroxynervonic acid)), application no. 12, preferably the coding region thereof, or a homolog or a fragment thereof, and being depicted in the same respective line as said B2654, or a functional equivalent or a homolog thereof as shown in column 8 of Table I, application no. 12, preferably the coding region thereof, particularly a homolog or functional equivalent as shown in column 8 of Table I B, application no. 12, and being depicted in the same respective line as said B2654, and preferably the activity is increased non-targeted, or
[62620] (b) a polypeptide comprising a polypeptide, a consensus sequence or at least a polypeptide motif as shown in the respective line in column 5 of Table II or in column 8 of Table IV, application no. 12, respectively, and being depicted in the same respective line as said B2654, or a functional equivalent or a homolog thereof as depicted in column 8 of Table II, application no. 12, preferably a homolog or functional equivalent as depicted in column 8 of Table II B, application no. 12, and being depicted in the same respective line as said B2654, and preferably the activity is increased non-targeted, whereby the respective line discloses in column 7 the fine chemical 2-hydroxytetracosenoic acid (preferably 2-hydroxynervonic acid).

[62621] Accordingly, in one embodiment, the molecule which activity is to be increased in the process of the invention is the gene product with an activity as a “b2654-protein”, preferably it is the molecule of section (a) or (b) of this paragraph.

[62622] In particular, it was observed that in plants, especially in Arabidopsis thaliana, increasing or generating the activity of a gene product non-targeted with the activity of a “b2654-protein”, preferably being encoded by a gene comprising the nucleic acid sequence SEQ ID NO. 125226, preferably the coding region thereof, conferred the production of or the increase in 2-hydroxytetracosenoic acid (preferably 2-hydroxynervonic acid) compared with the wild type control.

[62623] The nucleic acid sequence of B2747 from Escherichia coli, e.g. as shown in the respective line in column 5 of Table I, application no. 12, has been published in B. And the activity of the gene product thereof is the activity of 2-C-methyl-D-erythritol 4-phosphate cytidylyltransferase.

[62624] Accordingly, in one embodiment, the process of the present invention for producing hexadecatrienoic acid in a non-human organism, like a microorganism or a plant or a part thereof, comprises increasing or generating the activity of a gene product with the activity of a gene product conferring the activity of “2-C-methyl-D-erythritol 4-phosphate cytidylyltransferase”, especially from Escherichia coli or its functional equivalent or its homolog, e.g. the increase of
[62625] (a) a gene product of a gene comprising the nucleic acid molecule as shown in the respective line in column 5 of Table I (whereby the respective line discloses in column 7 the fine chemical hexadecatrienoic acid), application no. 12, preferably the coding region thereof, or a homolog or a fragment thereof, and being depicted in the same respective line as said B2747, or a functional equivalent or a homolog thereof as shown in column 8 of Table I, application no. 12, preferably the coding region thereof, particularly a homolog or functional equivalent as shown in column 8 of Table I B, application no. 12, and being depicted in the same respective line as said B2747, and preferably the activity is increased non-targeted, or
[62626] (b) a polypeptide comprising a polypeptide, a consensus sequence or at least a polypeptide motif as shown in the respective line in column 5 of Table II or in column 8 of Table IV, application no. 12, respectively, and being depicted in the same respective line as said B2747, or a functional equivalent or a homolog thereof as depicted in column 8 of Table II, application no. 12, preferably a homolog or functional equivalent as depicted in column 8 of Table II B, application no. 12, and being depicted in the same respective line as said B2747, and preferably the activity is increased non-targeted, whereby the respective line discloses in column 7 the fine chemical hexadecatrienoic acid.

[62627] Accordingly, in one embodiment, the molecule which activity is to be increased in the process of the invention is the gene product with an activity as a “2-C-methyl-D-erythritol 4-phosphate cytidylyltransferase”, preferably it is the molecule of section (a) or (b) of this paragraph.

[62628] In particular, it was observed that in plants, especially in Arabidopsis thaliana, increasing or generating the activity of a gene product non-targeted with the activity of a “2-C-methyl-D-erythritol 4-phosphate cytidylyltransferase”, preferably being encoded by a gene comprising the nucleic acid sequence SEQ ID NO. 81075, preferably the coding region thereof, conferred the production of or the increase in hexadecatrienoic acid compared with the wild type control.

[62629] The nucleic acid sequence of B2753 from Escherichia coli, e.g. as shown in the respective line in column 5 of Table I, application no. 12, has been published in B. And the activity of the gene product thereof is the activity of alkaline phosphatase isozyme conversion protein.

[62630] Accordingly, in one embodiment, the process of the present invention for producing eicosanoic acid in a non-human organism, like a microorganism or a plant or a part thereof, comprises increasing or generating the activity of a gene product with the activity of a gene product conferring the activity of “alkaline phosphatase isozyme conversion protein”, especially from Escherichia coli or its functional equivalent or its homolog, e.g. the increase of
[62631] (a) a gene product of a gene comprising the nucleic acid molecule as shown in the respective line in column 5 of Table I (whereby the respective line discloses in column 7 the fine chemical eicosanoic acid), application no. 12, preferably the coding region thereof, or a homolog or a fragment thereof, and being depicted in the same respective line as said B2753, or a functional equivalent or a homolog thereof as shown in column 8 of Table I, application no. 12, preferably the coding region thereof, particularly a homolog or functional equivalent as shown in column 8 of Table I B, application no. 12, and being depicted in the same respective line as said B2753, and preferably the activity is increased non-targeted, or
[62632] (b) a polypeptide comprising a polypeptide, a consensus sequence or at least a polypeptide motif as shown in the respective line in column 5 of Table II or in column 8 of Table IV, application no. 12, respectively, and being depicted in the same respective line as said B2753, or a functional equivalent or a homolog thereof as depicted in column 8 of Table II, application no. 12, preferably a homolog or functional equivalent as depicted in column 8 of Table II B, application no. 12, and being depicted in the same respective line as said B2753, and preferably the activity is increased non-targeted, whereby the respective line discloses in column 7 the fine chemical eicosanoic acid.

[62633] Accordingly, in one embodiment, the molecule which activity is to be increased in the process of the invention is the gene product with an activity as a “alkaline phosphatase isozyme conversion protein”, preferably it is the molecule of section (a) or (b) of this paragraph.

[62634] In particular, it was observed that in plants, especially in Arabidopsis thaliana, increasing or generating the activity of a gene product non-targeted with the activity of a “alkaline phosphatase isozyme conversion protein”, preferably being encoded by a gene comprising the nucleic acid sequence SEQ ID NO. 125234, preferably the coding region thereof, conferred the production of or the increase in eicosanoic acid compared with the wild type control.

[62635] The nucleic acid sequence of B2963 from Escherichia coli, e.g. as shown in the respective line in column 5 of Table I, application no. 12, has been published in B. And the activity of the gene product thereof is the activity of murein transglycosylase.

[62636] Accordingly, in one embodiment, the process of the present invention for producing 2-hydroxytetracosenoic acid (preferably 2-hydroxynervonic acid) in a non-human organism, like a microorganism or a plant or a part thereof, comprises increasing or generating the activity of a gene product with the activity of a gene product conferring the activity of “murein transglycosylase”, especially from Escherichia coli or its functional equivalent or its homolog, e.g. the increase of
[62637] (a) a gene product of a gene comprising the nucleic acid molecule as shown in the respective line in column 5 of Table I (whereby the respective line discloses in column 7 the fine chemical 2-hydroxytetracosenoic acid (preferably 2-hydroxynervonic acid)), application no. 12, preferably the coding region thereof, or a homolog or a fragment thereof, and being depicted in the same respective line as said B2963, or a functional equivalent or a homolog thereof as shown in column 8 of Table I, application no. 12, preferably the coding region thereof, particularly a homolog or functional equivalent as shown in column 8 of Table I B, application no. 12, and being depicted in the same respective line as said B2963, and preferably the activity is increased plastidic, or
[62638] (b) a polypeptide comprising a polypeptide, a consensus sequence or at least a polypeptide motif as shown in the respective line in column 5 of Table II or in column 8 of Table IV, application no. 12, respectively, and being depicted in the same respective line as said B2963, or a functional equivalent or a homolog thereof as depicted in column 8 of Table II, application no. 12, preferably a homolog or functional equivalent as depicted in column 8 of Table II B, application no. 12, and being depicted in the same respective line as said B2963, and preferably the activity is increased plastidic, whereby the respective line discloses in column 7 the fine chemical 2-hydroxytetracosenoic acid (preferably 2-hydroxynervonic acid).

[62639] Accordingly, in one embodiment, the molecule which activity is to be increased in the process of the invention is the gene product with an activity as a “murein transglycosylase”, preferably it is the molecule of section (a) or (b) of this paragraph.

[62640] In particular, it was observed that in plants, especially in Arabidopsis thaliana, increasing or generating the activity of a gene product plastidic with the activity of a “murein transglycosylase”, preferably being encoded by a gene comprising the nucleic acid sequence SEQ ID NO. 41732, preferably the coding region thereof, conferred the production of or the increase in 2-hydroxytetracosenoic acid (preferably 2-hydroxynervonic acid) compared with the wild type control.

[62641] The nucleic acid sequence of B3442 from Escherichia coli, e.g. as shown in the respective line in column 5 of Table I, application no. 12, has been published in B. And the activity of the gene product thereof is the activity of b3442-protein.

[62642] Accordingly, in one embodiment, the process of the present invention for producing hexadecadienoic acid in a non-human organism, like a microorganism or a plant or a part thereof, comprises increasing or generating the activity of a gene product with the activity of a gene product conferring the activity of “b3442-protein”, especially from Escherichia coli or its functional equivalent or its homolog, e.g. the increase of
[62643] (a) a gene product of a gene comprising the nucleic acid molecule as shown in the respective line in column 5 of Table I (whereby the respective line discloses in column 7 the fine chemical hexadecadienoic acid), application no. 12, preferably the coding region thereof, or a homolog or a fragment thereof, and being depicted in the same respective line as said B3442, or a functional equivalent or a homolog thereof as shown in column 8 of Table I, application no. 12, preferably the coding region thereof, particularly a homolog or functional equivalent as shown in column 8 of Table I B, application no. 12, and being depicted in the same respective line as said B3442, and preferably the activity is increased non-targeted, or
[62644] (b) a polypeptide comprising a polypeptide, a consensus sequence or at least a polypeptide motif as shown in the respective line in column 5 of Table II or in column 8 of Table IV, application no. 12, respectively, and being depicted in the same respective line as said B3442, or a functional equivalent or a homolog thereof as depicted in column 8 of Table II, application no. 12, preferably a homolog or functional equivalent as depicted in column 8 of Table II B, application no. 12, and being depicted in the same respective line as said B3442, and preferably the activity is increased non-targeted, whereby the respective line discloses in column 7 the fine chemical hexadecadienoic acid.

[62645] Accordingly, in one embodiment, the molecule which activity is to be increased in the process of the invention is the gene product with an activity as a “b3442-protein”, preferably it is the molecule of section (a) or (b) of this paragraph.

[62646] In particular, it was observed that in plants, especially in Arabidopsis thaliana, increasing or generating the activity of a gene product non-targeted with the activity of a “b3442-protein”, preferably being encoded by a gene comprising the nucleic acid sequence SEQ ID NO. 94380, preferably the coding region thereof, conferred the production of or the increase in hexadecadienoic acid compared with the wild type control.

[62647] The nucleic acid sequence of B3568 from Escherichia coli, e.g. as shown in the respective line in column 5 of Table I, application no. 12, has been published in B. And the activity of the gene product thereof is the activity of sugar transport system permease protein.

[62648] Accordingly, in one embodiment, the process of the present invention for producing cerebronic acid in a non-human organism, like a microorganism or a plant or a part thereof, comprises increasing or generating the activity of a gene product with the activity of a gene product conferring the activity of “sugar transport system permease protein”, especially from Escherichia coli or its functional equivalent or its homolog, e.g. the increase of
[62649] (a) a gene product of a gene comprising the nucleic acid molecule as shown in the respective line in column 5 of Table I (whereby the respective line discloses in column 7 the fine chemical cerebronic acid), application no. 12, preferably the coding region thereof, or a homolog or a fragment thereof, and being depicted in the same respective line as said B3568, or a functional equivalent or a homolog thereof as shown in column 8 of Table I, application no. 12, preferably the coding region thereof, particularly a homolog or functional equivalent as shown in column 8 of Table I B, application no. 12, and being depicted in the same respective line as said B3568, and preferably the activity is increased plastidic, or
[62650] (b) a polypeptide comprising a polypeptide, a consensus sequence or at least a polypeptide motif as shown in the respective line in column 5 of Table II or in column 8 of Table IV, application no. 12, respectively, and being depicted in the same respective line as said B3568, or a functional equivalent or a homolog thereof as depicted in column 8 of Table II, application no. 12, preferably a homolog or functional equivalent as depicted in column 8 of Table II B, application no. 12, and being depicted in the same respective line as said B3568, and preferably the activity is increased plastidic, whereby the respective line discloses in column 7 the fine chemical cerebronic acid.

[62651] Accordingly, in one embodiment, the molecule which activity is to be increased in the process of the invention is the gene product with an activity as a “sugar transport system permease protein”, preferably it is the molecule of section (a) or (b) of this paragraph.

[62652] In particular, it was observed that in plants, especially in Arabidopsis thaliana, increasing or generating the activity of a gene product plastidic with the activity of a “sugar transport system permease protein”, preferably being encoded by a gene comprising the nucleic acid sequence SEQ ID NO. 125264, preferably the coding region thereof, conferred the production of or the increase in cerebronic acid compared with the wild type control.

[62653] The nucleic acid sequence of B3812 from Escherichia coli, e.g. as shown in the respective line in column 5 of Table I, application no. 12, has been published in B. And the activity of the gene product thereof is the activity of b3812-protein.

[62654] Accordingly, in one embodiment, the process of the present invention for producing 2-hydroxybehenic acid in a non-human organism, like a microorganism or a plant or a part thereof, comprises increasing or generating the activity of a gene product with the activity of a gene product conferring the activity of “b3812-protein”, especially from Escherichia coli or its functional equivalent or its homolog, e.g. the increase of
[62655] (a) a gene product of a gene comprising the nucleic acid molecule as shown in the respective line in column 5 of Table I (whereby the respective line discloses in column 7 the fine chemical 2-hydroxybehenic acid), application no. 12, preferably the coding region thereof, or a homolog or a fragment thereof, and being depicted in the same respective line as said B3812, or a functional equivalent or a homolog thereof as shown in column 8 of Table I, application no. 12, preferably the coding region thereof, particularly a homolog or functional equivalent as shown in column 8 of Table I B, application no. 12, and being depicted in the same respective line as said B3812, and preferably the activity is increased non-targeted, or
[62656] (b) a polypeptide comprising a polypeptide, a consensus sequence or at least a polypeptide motif as shown in the respective line in column 5 of Table II or in column 8 of Table IV, application no. 12, respectively, and being depicted in the same respective line as said B3812, or a functional equivalent or a homolog thereof as depicted in column 8 of Table II, application no. 12, preferably a homolog or functional equivalent as depicted in column 8 of Table II B, application no. 12, and being depicted in the same respective line as said B3812, and preferably the activity is increased non-targeted, whereby the respective line discloses in column 7 the fine chemical 2-hydroxybehenic acid.

[62657] Accordingly, in one embodiment, the molecule which activity is to be increased in the process of the invention is the gene product with an activity as a “b3812-protein”, preferably it is the molecule of section (a) or (b) of this paragraph.

[62658] In particular, it was observed that in plants, especially in Arabidopsis thaliana, increasing or generating the activity of a gene product non-targeted with the activity of a “b3812-protein”, preferably being encoded by a gene comprising the nucleic acid sequence SEQ ID NO. 125487, preferably the coding region thereof, conferred the production of or the increase in 2-hydroxybehenic acid compared with the wild type control.

[62659] The nucleic acid sequence of B3845 from Escherichia coli, e.g. as shown in the respective line in column 5 of Table I, application no. 12, has been published in B. And the activity of the gene product thereof is the activity of 3-ketoacyl-CoA thiolase.

[62660] Accordingly, in one embodiment, the process of the present invention for producing hexadecadienoic acid in a non-human organism, like a microorganism or a plant or a part thereof, comprises increasing or generating the activity of a gene product with the activity of a gene product conferring the activity of “3-ketoacyl-CoA thiolase”, especially from Escherichia coli or its functional equivalent or its homolog, e.g. the increase of
[62661] (a) a gene product of a gene comprising the nucleic acid molecule as shown in the respective line in column 5 of Table I (whereby the respective line discloses in column 7 the fine chemical hexadecadienoic acid), application no. 12, preferably the coding region thereof, or a homolog or a fragment thereof, and being depicted in the same respective line as said B3845, or a functional equivalent or a homolog thereof as shown in column 8 of Table I, application no. 12, preferably the coding region thereof, particularly a homolog or functional equivalent as shown in column 8 of Table I B, application no. 12, and being depicted in the same respective line as said B3845, and preferably the activity is increased non-targeted, or
[62662] (b) a polypeptide comprising a polypeptide, a consensus sequence or at least a polypeptide motif as shown in the respective line in column 5 of Table II or in column 8 of Table IV, application no. 12, respectively, and being depicted in the same respective line as said B3845, or a functional equivalent or a homolog thereof as depicted in column 8 of Table II, application no. 12, preferably a homolog or functional equivalent as depicted in column 8 of Table II B, application no. 12, and being depicted in the same respective line as said B3845, and preferably the activity is increased non-targeted, whereby the respective line discloses in column 7 the fine chemical hexadecadienoic acid.

[62663] Accordingly, in one embodiment, the molecule which activity is to be increased in the process of the invention is the gene product with an activity as a “3-ketoacyl-CoA thiolase”, preferably it is the molecule of section (a) or (b) of this paragraph.

[62664] In particular, it was observed that in plants, especially in Arabidopsis thaliana, increasing or generating the activity of a gene product non-targeted with the activity of a “3-ketoacyl-CoA thiolase”, preferably being encoded by a gene comprising the nucleic acid sequence SEQ ID NO. 100675, preferably the coding region thereof, conferred the production of or the increase in hexadecadienoic acid compared with the wild type control.

[62665] The nucleic acid sequence of B3845 from Escherichia coli, e.g. as shown in the respective line in column 5 of Table I, application no. 12, has been published in B. And the activity of the gene product thereof is the activity of 3-ketoacyl-CoA thiolase.

[62666] Accordingly, in one embodiment, the process of the present invention for producing oleic acid in a non-human organism, like a microorganism or a plant or a part thereof, comprises increasing or generating the activity of a gene product with the activity of a gene product conferring the activity of “3-ketoacyl-CoA thiolase”, especially from Escherichia coli or its functional equivalent or its homolog, e.g. the increase of
[62667] (a) a gene product of a gene comprising the nucleic acid molecule as shown in the respective line in column 5 of Table I (whereby the respective line discloses in column 7 the fine chemical oleic acid), application no. 12, preferably the coding region thereof, or a homolog or a fragment thereof, and being depicted in the same respective line as said B3845, or a functional equivalent or a homolog thereof as shown in column 8 of Table I, application no. 12, preferably the coding region thereof, particularly a homolog or functional equivalent as shown in column 8 of Table I B, application no. 12, and being depicted in the same respective line as said B3845, and preferably the activity is increased plastidic, or
[62668] (b) a polypeptide comprising a polypeptide, a consensus sequence or at least a polypeptide motif as shown in the respective line in column 5 of Table II or in column 8 of Table IV, application no. 12, respectively, and being depicted in the same respective line as said B3845, or a functional equivalent or a homolog thereof as depicted in column 8 of Table II, application no. 12, preferably a homolog or functional equivalent as depicted in column 8 of Table II B, application no. 12, and being depicted in the same respective line as said B3845, and preferably the activity is increased plastidic, whereby the respective line discloses in column 7 the fine chemical oleic acid.

[62669] Accordingly, in one embodiment, the molecule which activity is to be increased in the process of the invention is the gene product with an activity as a “3-ketoacyl-CoA thiolase”, preferably it is the molecule of section (a) or (b) of this paragraph.

[62670] In particular, it was observed that in plants, especially in Arabidopsis thaliana, increasing or generating the activity of a gene product plastidic with the activity of a “3-ketoacyl-CoA thiolase”, preferably being encoded by a gene comprising the nucleic acid sequence SEQ ID NO. 100675, preferably the coding region thereof, conferred the production of or the increase in oleic acid compared with the wild type control.

[62671] The nucleic acid sequence of B3872 from Escherichia coli, e.g. as shown in the respective line in column 5 of Table I, application no. 12, has been published in B. And the activity of the gene product thereof is the activity of transcriptional regulator.

[62672] Accordingly, in one embodiment, the process of the present invention for producing hexadecadienoic acid in a non-human organism, like a microorganism or a plant or a part thereof, comprises increasing or generating the activity of a gene product with the activity of a gene product conferring the activity of “transcriptional regulator”, especially from Escherichia coli or its functional equivalent or its homolog, e.g. the increase of
[62673] (a) a gene product of a gene comprising the nucleic acid molecule as shown in the respective line in column 5 of Table I (whereby the respective line discloses in column 7 the fine chemical hexadecadienoic acid), application no. 12, preferably the coding region thereof, or a homolog or a fragment thereof, and being depicted in the same respective line as said B3872, or a functional equivalent or a homolog thereof as shown in column 8 of Table I, application no. 12, preferably the coding region thereof, particularly a homolog or functional equivalent as shown in column 8 of Table I B, application no. 12, and being depicted in the same respective line as said B3872, and preferably the activity is increased plastidic, or
[62674] (b) a polypeptide comprising a polypeptide, a consensus sequence or at least a polypeptide motif as shown in the respective line in column 5 of Table II or in column 8 of Table IV, application no. 12, respectively, and being depicted in the same respective line as said B3872, or a functional equivalent or a homolog thereof as depicted in column 8 of Table II, application no. 12, preferably a homolog or functional equivalent as depicted in column 8 of Table II B, application no. 12, and being depicted in the same respective line as said B3872, and preferably the activity is increased plastidic, whereby the respective line discloses in column 7 the fine chemical hexadecadienoic acid.

[62675] Accordingly, in one embodiment, the molecule which activity is to be increased in the process of the invention is the gene product with an activity as a “transcriptional regulator”, preferably it is the molecule of section (a) or (b) of this paragraph.

[62676] In particular, it was observed that in plants, especially in Arabidopsis thaliana, increasing or generating the activity of a gene product plastidic with the activity of a “transcriptional regulator”, preferably being encoded by a gene comprising the nucleic acid sequence SEQ ID NO. 83821, preferably the coding region thereof, conferred the production of or the increase in hexadecadienoic acid compared with the wild type control.

[62677] The nucleic acid sequence of B3925 from Escherichia coli, e.g. as shown in the respective line in column 5 of Table I, application no. 12, has been published in B. And the activity of the gene product thereof is the activity of fructose 1,6-bisphosphatase.

[62678] Accordingly, in one embodiment, the process of the present invention for producing hexadecadienoic acid in a non-human organism, like a microorganism or a plant or a part thereof, comprises increasing or generating the activity of a gene product with the activity of a gene product conferring the activity of “fructose 1,6-bisphosphatase”, especially from Escherichia coli or its functional equivalent or its homolog, e.g. the increase of
[62679] (a) a gene product of a gene comprising the nucleic acid molecule as shown in the respective line in column 5 of Table I (whereby the respective line discloses in column 7 the fine chemical hexadecadienoic acid), application no. 12, preferably the coding region thereof, or a homolog or a fragment thereof, and being depicted in the same respective line as said B3925, or a functional equivalent or a homolog thereof as shown in column 8 of Table I, application no. 12, preferably the coding region thereof, particularly a homolog or functional equivalent as shown in column 8 of Table I B, application no. 12, and being depicted in the same respective line as said B3925, and preferably the activity is increased non-targeted, or
[62680] (b) a polypeptide comprising a polypeptide, a consensus sequence or at least a polypeptide motif as shown in the respective line in column 5 of Table II or in column 8 of Table IV, application no. 12, respectively, and being depicted in the same respective line as said B3925, or a functional equivalent or a homolog thereof as depicted in column 8 of Table II, application no. 12, preferably a homolog or functional equivalent as depicted in column 8 of Table II B, application no. 12, and being depicted in the same respective line as said B3925, and preferably the activity is increased non-targeted, whereby the respective line discloses in column 7 the fine chemical hexadecadienoic acid.

[62681] Accordingly, in one embodiment, the molecule which activity is to be increased in the process of the invention is the gene product with an activity as a “fructose 1,6-bisphosphatase”, preferably it is the molecule of section (a) or (b) of this paragraph.

[62682] In particular, it was observed that in plants, especially in Arabidopsis thaliana, increasing or generating the activity of a gene product non-targeted with the activity of a “fructose 1,6-bisphosphatase”, preferably being encoded by a gene comprising the nucleic acid sequence SEQ ID NO. 125541, preferably the coding region thereof, conferred the production of or the increase in hexadecadienoic acid compared with the wild type control.

[62683] The nucleic acid sequence of B3939 from Escherichia coli, e.g. as shown in the respective line in column 5 of Table I, application no. 12, has been published in B. And the activity of the gene product thereof is the activity of cystathionine gamma-synthase.

[62684] Accordingly, in one embodiment, the process of the present invention for producing behenic acid in a non-human organism, like a microorganism or a plant or a part thereof, comprises increasing or generating the activity of a gene product with the activity of a gene product conferring the activity of “cystathionine gamma-synthase”, especially from Escherichia coli or its functional equivalent or its homolog, e.g. the increase of
[62685] (a) a gene product of a gene comprising the nucleic acid molecule as shown in the respective line in column 5 of Table I (whereby the respective line discloses in column 7 the fine chemical behenic acid), application no. 12, preferably the coding region thereof, or a homolog or a fragment thereof, and being depicted in the same respective line as said B3939, or a functional equivalent or a homolog thereof as shown in column 8 of Table I, application no. 12, preferably the coding region thereof, particularly a homolog or functional equivalent as shown in column 8 of Table I B, application no. 12, and being depicted in the same respective line as said B3939, and preferably the activity is increased plastidic, or
[62686] (b) a polypeptide comprising a polypeptide, a consensus sequence or at least a polypeptide motif as shown in the respective line in column 5 of Table II or in column 8 of Table IV, application no. 12, respectively, and being depicted in the same respective line as said B3939, or a functional equivalent or a homolog thereof as depicted in column 8 of Table II, application no. 12, preferably a homolog or functional equivalent as depicted in column 8 of Table II B, application no. 12, and being depicted in the same respective line as said B3939, and preferably the activity is increased plastidic, whereby the respective line discloses in column 7 the fine chemical behenic acid.

[62687] Accordingly, in one embodiment, the molecule which activity is to be increased in the process of the invention is the gene product with an activity as a “cystathionine gamma-synthase”, preferably it is the molecule of section (a) or (b) of this paragraph.

[62688] In particular, it was observed that in plants, especially in Arabidopsis thaliana, increasing or generating the activity of a gene product plastidic with the activity of a “cystathionine gamma-synthase”, preferably being encoded by a gene comprising the nucleic acid sequence SEQ ID NO. 125795, preferably the coding region thereof, conferred the production of or the increase in behenic acid compared with the wild type control.

[62689] The nucleic acid sequence of B3939 from Escherichia coli, e.g. as shown in the respective line in column 5 of Table I, application no. 12, has been published in B. And the activity of the gene product thereof is the activity of cystathionine gamma-synthase.

[62690] Accordingly, in one embodiment, the process of the present invention for producing heptadecanoic acid in a non-human organism, like a microorganism or a plant or a part thereof, comprises increasing or generating the activity of a gene product with the activity of a gene product conferring the activity of “cystathionine gamma-synthase”, especially from Escherichia coli or its functional equivalent or its homolog, e.g. the increase of
[62691] (a) a gene product of a gene comprising the nucleic acid molecule as shown in the respective line in column 5 of Table I (whereby the respective line discloses in column 7 the fine chemical heptadecanoic acid), application no. 12, preferably the coding region thereof, or a homolog or a fragment thereof, and being depicted in the same respective line as said B3939, or a functional equivalent or a homolog thereof as shown in column 8 of Table I, application no. 12, preferably the coding region thereof, particularly a homolog or functional equivalent as shown in column 8 of Table I B, application no. 12, and being depicted in the same respective line as said B3939, and preferably the activity is increased plastidic, or
[62692] (b) a polypeptide comprising a polypeptide, a consensus sequence or at least a polypeptide motif as shown in the respective line in column 5 of Table II or in column 8 of Table IV, application no. 12, respectively, and being depicted in the same respective line as said B3939, or a functional equivalent or a homolog thereof as depicted in column 8 of Table II, application no. 12, preferably a homolog or functional equivalent as depicted in column 8 of Table II B, application no. 12, and being depicted in the same respective line as said B3939, and preferably the activity is increased plastidic, whereby the respective line discloses in column 7 the fine chemical heptadecanoic acid.

[62693] Accordingly, in one embodiment, the molecule which activity is to be increased in the process of the invention is the gene product with an activity as a “cystathionine gamma-synthase”, preferably it is the molecule of section (a) or (b) of this paragraph.

[62694] In particular, it was observed that in plants, especially in Arabidopsis thaliana, increasing or generating the activity of a gene product plastidic with the activity of a “cystathionine gammasynthase”, preferably being encoded by a gene comprising the nucleic acid sequence SEQ ID NO. 125795, preferably the coding region thereof, conferred the production of or the increase in heptadecanoic acid compared with the wild type control.

[62695] The nucleic acid sequence of B3939 from Escherichia coli, e.g. as shown in the respective line in column 5 of Table I, application no. 12, has been published in B. And the activity of the gene product thereof is the activity of cystathionine gamma-synthase.

[62696] Accordingly, in one embodiment, the process of the present invention for producing oleic acid in a non-human organism, like a microorganism or a plant or a part thereof, comprises increasing or generating the activity of a gene product with the activity of a gene product conferring the activity of “cystathionine gamma-synthase”, especially from Escherichia coli or its functional equivalent or its homolog, e.g. the increase of
[62697] (a) a gene product of a gene comprising the nucleic acid molecule as shown in the respective line in column 5 of Table I (whereby the respective line discloses in column 7 the fine chemical oleic acid), application no. 12, preferably the coding region thereof, or a homolog or a fragment thereof, and being depicted in the same respective line as said B3939, or a functional equivalent or a homolog thereof as shown in column 8 of Table I, application no. 12, preferably the coding region thereof, particularly a homolog or functional equivalent as shown in column 8 of Table I B, application no. 12, and being depicted in the same respective line as said B3939, and preferably the activity is increased plastidic, or
[62698] (b) a polypeptide comprising a polypeptide, a consensus sequence or at least a polypeptide motif as shown in the respective line in column 5 of Table II or in column 8 of Table IV, application no. 12, respectively, and being depicted in the same respective line as said B3939, or a functional equivalent or a homolog thereof as depicted in column 8 of Table II, application no. 12, preferably a homolog or functional equivalent as depicted in column 8 of Table II B, application no. 12, and being depicted in the same respective line as said B3939, and preferably the activity is increased plastidic, whereby the respective line discloses in column 7 the fine chemical oleic acid.

[62699] Accordingly, in one embodiment, the molecule which activity is to be increased in the process of the invention is the gene product with an activity as a “cystathionine gamma-synthase”, preferably it is the molecule of section (a) or (b) of this paragraph.

[62700] In particular, it was observed that in plants, especially in Arabidopsis thaliana, increasing or generating the activity of a gene product plastidic with the activity of a “cystathionine gamma-synthase”, preferably being encoded by a gene comprising the nucleic acid sequence SEQ ID NO. 125795, preferably the coding region thereof, conferred the production of or the increase in oleic acid compared with the wild type control.

[62701] The nucleic acid sequence of B3944 from Escherichia coli, e.g. as shown in the respective line in column 5 of Table I, application no. 12, has been published in B. And the activity of the gene product thereof is the activity of b3944-protein.

[62702] Accordingly, in one embodiment, the process of the present invention for producing 2-hydroxypalmitic acid in a non-human organism, like a microorganism or a plant or a part thereof, comprises increasing or generating the activity of a gene product with the activity of a gene product conferring the activity of “b3944-protein”, especially from Escherichia coli or its functional equivalent or its homolog, e.g. the increase of
[62703] (a) a gene product of a gene comprising the nucleic acid molecule as shown in the respective line in column 5 of Table I (whereby the respective line discloses in column 7 the fine chemical 2-hydroxypalmitic acid), application no. 12, preferably the coding region thereof, or a homolog or a fragment thereof, and being depicted in the same respective line as said B3944, or a functional equivalent or a homolog thereof as shown in column 8 of Table I, application no. 12, preferably the coding region thereof, particularly a homolog or functional equivalent as shown in column 8 of Table I B, application no. 12, and being depicted in the same respective line as said B3944, and preferably the activity is increased plastidic, or
[62704] (b) a polypeptide comprising a polypeptide, a consensus sequence or at least a polypeptide motif as shown in the respective line in column 5 of Table II or in column 8 of Table IV, application no. 12, respectively, and being depicted in the same respective line as said B3944, or a functional equivalent or a homolog thereof as depicted in column 8 of Table II, application no. 12, preferably a homolog or functional equivalent as depicted in column 8 of Table II B, application no. 12, and being depicted in the same respective line as said B3944, and preferably the activity is increased plastidic, whereby the respective line discloses in column 7 the fine chemical 2-hydroxypalmitic acid.

[62705] Accordingly, in one embodiment, the molecule which activity is to be increased in the process of the invention is the gene product with an activity as a “b3944-protein”, preferably it is the molecule of section (a) or (b) of this paragraph.

[62706] In particular, it was observed that in plants, especially in Arabidopsis thaliana, increasing or generating the activity of a gene product plastidic with the activity of a “b3944-protein”, preferably being encoded by a gene comprising the nucleic acid sequence SEQ ID NO. 126377, preferably the coding region thereof, conferred the production of or the increase in 2-hydroxypalmitic acid compared with the wild type control.

[62707] The nucleic acid sequence of B4017 from Escherichia coli, e.g. as shown in the respective line in column 5 of Table I, application no. 12, has been published in B. And the activity of the gene product thereof is the activity of ankyrin repeat protein.

[62708] Accordingly, in one embodiment, the process of the present invention for producing 2-hydroxybehenic acid in a non-human organism, like a microorganism or a plant or a part thereof, comprises increasing or generating the activity of a gene product with the activity of a gene product conferring the activity of “ankyrin repeat protein”, especially from Escherichia coli or its functional equivalent or its homolog, e.g. the increase of
[62709] (a) a gene product of a gene comprising the nucleic acid molecule as shown in the respective line in column 5 of Table I (whereby the respective line discloses in column 7 the fine chemical 2-hydroxybehenic acid), application no. 12, preferably the coding region thereof, or a homolog or a fragment thereof, and being depicted in the same respective line as said B4017, or a functional equivalent or a homolog thereof as shown in column 8 of Table I, application no. 12, preferably the coding region thereof, particularly a homolog or functional equivalent as shown in column 8 of Table I B, application no. 12, and being depicted in the same respective line as said B4017, and preferably the activity is increased plastidic, or
[62710] (b) a polypeptide comprising a polypeptide, a consensus sequence or at least a polypeptide motif as shown in the respective line in column 5 of Table II or in column 8 of Table IV, application no. 12, respectively, and being depicted in the same respective line as said B4017, or a functional equivalent or a homolog thereof as depicted in column 8 of Table II, application no. 12, preferably a homolog or functional equivalent as depicted in column 8 of Table II B, application no. 12, and being depicted in the same respective line as said B4017, and preferably the activity is increased plastidic, whereby the respective line discloses in column 7 the fine chemical 2-hydroxybehenic acid.

[62711] Accordingly, in one embodiment, the molecule which activity is to be increased in the process of the invention is the gene product with an activity as a “ankyrin repeat protein”, preferably it is the molecule of section (a) or (b) of this paragraph.

[62712] In particular, it was observed that in plants, especially in Arabidopsis thaliana, increasing or generating the activity of a gene product plastidic with the activity of a “ankyrin repeat protein”, preferably being encoded by a gene comprising the nucleic acid sequence SEQ ID NO. 126415, preferably the coding region thereof, conferred the production of or the increase in 2-hydroxybehenic acid compared with the wild type control.

[62713] The nucleic acid sequence of B4023 from Escherichia coli, e.g. as shown in the respective line in column 5 of Table I, application no. 12, has been published in B. And the activity of the gene product thereof is the activity of b4023-protein.

[62714] Accordingly, in one embodiment, the process of the present invention for producing hexadecadienoic acid in a non-human organism, like a microorganism or a plant or a part thereof, comprises increasing or generating the activity of a gene product with the activity of a gene product conferring the activity of “b4023-protein”, especially from Escherichia coli or its functional equivalent or its homolog, e.g. the increase of
[62715] (a) a gene product of a gene comprising the nucleic acid molecule as shown in the respective line in column 5 of Table I (whereby the respective line discloses in column 7 the fine chemical hexadecadienoic acid), application no. 12, preferably the coding region thereof, or a homolog or a fragment thereof, and being depicted in the same respective line as said B4023, or a functional equivalent or a homolog thereof as shown in column 8 of Table I, application no. 12, preferably the coding region thereof, particularly a homolog or functional equivalent as shown in column 8 of Table I B, application no. 12, and being depicted in the same respective line as said B4023, and preferably the activity is increased non-targeted, or
[62716] (b) a polypeptide comprising a polypeptide, a consensus sequence or at least a polypeptide motif as shown in the respective line in column 5 of Table II or in column 8 of Table IV, application no. 12, respectively, and being depicted in the same respective line as said B4023, or a functional equivalent or a homolog thereof as depicted in column 8 of Table II, application no. 12, preferably a homolog or functional equivalent as depicted in column 8 of Table II B, application no. 12, and being depicted in the same respective line as said B4023, and preferably the activity is increased non-targeted, whereby the respective line discloses in column 7 the fine chemical hexadecadienoic acid.

[62717] Accordingly, in one embodiment, the molecule which activity is to be increased in the process of the invention is the gene product with an activity as a “b4023-protein”, preferably it is the molecule of section (a) or (b) of this paragraph.

[62718] In particular, it was observed that in plants, especially in Arabidopsis thaliana, increasing or generating the activity of a gene product non-targeted with the activity of a “b4023-protein”, preferably being encoded by a gene comprising the nucleic acid sequence SEQ ID NO. 119209, preferably the coding region thereof, conferred the production of or the increase in hexadecadienoic acid compared with the wild type control.

[62719] The nucleic acid sequence of B4069 from Escherichia coli, e.g. as shown in the respective line in column 5 of Table I, application no. 12, has been published in B. And the activity of the gene product thereof is the activity of acetyl-coenzyme A synthetase.

[62720] Accordingly, in one embodiment, the process of the present invention for producing hepta-decanoic acid in a non-human organism, like a microorganism or a plant or a part thereof, com-prises increasing or generating the activity of a gene product with the activity of a gene product conferring the activity of “acetyl-coenzyme A synthetase”, especially from Escherichia coli or its functional equivalent or its homolog, e.g. the increase of
[62721] (a) a gene product of a gene comprising the nucleic acid molecule as shown in the respective line in column 5 of Table I (whereby the respective line discloses in column 7 the fine chemical heptadecanoic acid), application no. 12, preferably the coding region thereof, or a homolog or a fragment thereof, and being depicted in the same respective line as said B4069, or a functional equivalent or a homolog thereof as shown in column 8 of Table I, application no. 12, preferably the coding region thereof, particularly a homolog or functional equivalent as shown in column 8 of Table I B, application no. 12, and being depicted in the same respective line as said B4069, and preferably the activity is increased plastidic, or
[62722] (b) a polypeptide comprising a polypeptide, a consensus sequence or at least a polypeptide motif as shown in the respective line in column 5 of Table II or in column 8 of Table IV, application no. 12, respectively, and being depicted in the same respective line as said B4069, or a functional equivalent or a homolog thereof as depicted in column 8 of Table II, application no. 12, preferably a homolog or functional equivalent as depicted in column 8 of Table II B, application no. 12, and being depicted in the same respective line as said B4069, and preferably the activity is increased plastidic, whereby the respective line discloses in column 7 the fine chemical heptadecanoic acid.

[62723] Accordingly, in one embodiment, the molecule which activity is to be increased in the process of the invention is the gene product with an activity as a “acetyl-coenzyme A synthetase”, preferably it is the molecule of section (a) or (b) of this paragraph.

[62724] In particular, it was observed that in plants, especially in Arabidopsis thaliana, increasing or generating the activity of a gene product plastidic with the activity of a “acetyl-coenzyme A synthetase”, preferably being encoded by a gene comprising the nucleic acid sequence SEQ ID NO. 126421, preferably the coding region thereof, conferred the production of or the increase in heptadecanoic acid compared with the wild type control.

[62725] The nucleic acid sequence of B4205 from Escherichia coli, e.g. as shown in the respective line in column 5 of Table I, application no. 12, has been published in B. And the activity of the gene product thereof is the activity of b4205-protein.

[62726] Accordingly, in one embodiment, the process of the present invention for producing 2-hydroxypalmitic acid in a non-human organism, like a microorganism or a plant or a part thereof, comprises increasing or generating the activity of a gene product with the activity of a gene product conferring the activity of “b4205-protein”, especially from Escherichia coli or its functional equivalent or its homolog, e.g. the increase of
[62727] (a) a gene product of a gene comprising the nucleic acid molecule as shown in the respective line in column 5 of Table I (whereby the respective line discloses in column 7 the fine chemical 2-hydroxypalmitic acid), application no. 12, preferably the coding region thereof, or a homolog or a fragment thereof, and being depicted in the same respective line as said B4205, or a functional equivalent or a homolog thereof as shown in column 8 of Ta-ble I, application no. 12, preferably the coding region thereof, particularly a homolog or functional equivalent as shown in column 8 of Table I B, application no. 12, and being depicted in the same respective line as said B4205, and preferably the activity is increased plastidic, or
[62728] (b) a polypeptide comprising a polypeptide, a consensus sequence or at least a polypeptide motif as shown in the respective line in column 5 of Table II or in column 8 of Table IV, application no. 12, respectively, and being depicted in the same respective line as said B4205, or a functional equivalent or a homolog thereof as depicted in column 8 of Table II, application no. 12, preferably a homolog or functional equivalent as depicted in column 8 of Table II B, application no. 12, and being depicted in the same respective line as said B4205, and preferably the activity is increased plastidic, whereby the respective line discloses in column 7 the fine chemical 2-hydroxypalmitic acid.

[62729] Accordingly, in one embodiment, the molecule which activity is to be increased in the process of the invention is the gene product with an activity as a “b4205-protein”, preferably it is the molecule of section (a) or (b) of this paragraph.

[62730] In particular, it was observed that in plants, especially in Arabidopsis thaliana, increasing or generating the activity of a gene product plastidic with the activity of a “b4205-protein”, preferably being encoded by a gene comprising the nucleic acid sequence SEQ ID NO. 126975, preferably the coding region thereof, conferred the production of or the increase in 2-hydroxypalmitic acid compared with the wild type control.

[62731] The nucleic acid sequence of C_pp032007025r from Physcomitrella patens, e.g. as shown in the respective line in column 5 of Table I, application no. 12, is unpublished. And the activity of the gene product thereof is the activity of vacuolar processing enzyme.

[62732] Accordingly, in one embodiment, the process of the present invention for producing 2-hydroxybehenic acid in a non-human organism, like a microorganism or a plant or a part thereof, comprises increasing or generating the activity of a gene product with the activity of a gene product conferring the activity of “vacuolar processing enzyme”, especially from Physcomitrella patens or its functional equivalent or its homolog, e.g. the increase of
[62733] (a) a gene product of a gene comprising the nucleic acid molecule as shown in the respective line in column 5 of Table I (whereby the respective line discloses in column 7 the fine chemical 2-hydroxybehenic acid), application no. 12, preferably the coding region thereof, or a homolog or a fragment thereof, and being depicted in the same respective line as said C_pp032007025r, or a functional equivalent or a homolog thereof as shown in column 8 of Table I, application no. 12, preferably the coding region thereof, particularly a homolog or functional equivalent as shown in column 8 of Table I B, application no. 12, and being depicted in the same respective line as said C_pp032007025r, and preferably the activity is increased non-targeted, or
[62734] (b) a polypeptide comprising a polypeptide, a consensus sequence or at least a polypeptide motif as shown in the respective line in column 5 of Table II or in column 8 of Table IV, application no. 12, respectively, and being depicted in the same respective line as said C_pp032007025r, or a functional equivalent or a homolog thereof as depicted in column 8 of Table II, application no. 12, preferably a homolog or functional equivalent as depicted in column 8 of Table II B, application no. 12, and being depicted in the same respective line as said C_pp032007025r, and preferably the activity is increased non-targeted, whereby the respective line discloses in column 7 the fine chemical 2-hydroxybehenic acid.

[62735] Accordingly, in one embodiment, the molecule which activity is to be increased in the process of the invention is the gene product with an activity as a “vacuolar processing enzyme”, preferably it is the molecule of section (a) or (b) of this paragraph.

[62736] In particular, it was observed that in plants, especially in Arabidopsis thaliana, increasing or generating the activity of a gene product non-targeted with the activity of a “vacuolar processing enzyme”, preferably being encoded by a gene comprising the nucleic acid sequence SEQ ID NO. 126991, preferably the coding region thereof, conferred the production of or the increase in 2-hydroxybehenic acid compared with the wild type control.

[62737] The nucleic acid sequence of GM02LC12622 from Glycine max, e.g. as shown in the respective line in column 5 of Table I, application no. 12, is unpublished. And the activity of the gene product thereof is the activity of glutaredoxin.

[62738] Accordingly, in one embodiment, the process of the present invention for producing 2-hydroxypalmitic acid in a non-human organism, like a microorganism or a plant or a part thereof, comprises increasing or generating the activity of a gene product with the activity of a gene product conferring the activity of “glutaredoxin”, especially from Glycine max or its functional equivalent or its homolog, e.g. the increase of
[62739] (a) a gene product of a gene comprising the nucleic acid molecule as shown in the respective line in column 5 of Table I (whereby the respective line discloses in column 7 the fine chemical 2-hydroxypalmitic acid), application no. 12, preferably the coding region thereof, or a homolog or a fragment thereof, and being depicted in the same respective line as said GM02LC12622, or a functional equivalent or a homolog thereof as shown in column 8 of Table I, application no. 12, preferably the coding region thereof, particularly a homolog or functional equivalent as shown in column 8 of Table I B, application no. 12, and being depicted in the same respective line as said GM02LC12622, and preferably the activity is increased non-targeted, or
[62740] (b) a polypeptide comprising a polypeptide, a consensus sequence or at least a polypeptide motif as shown in the respective line in column 5 of Table II or in column 8 of Table IV, application no. 12, respectively, and being depicted in the same respective line as said GM02LC12622, or a functional equivalent or a homolog thereof as depicted in column 8 of Table II, application no. 12, preferably a homolog or functional equivalent as depicted in column 8 of Table II B, application no. 12, and being depicted in the same respective line as said GM02LC12622, and preferably the activity is increased non-targeted, whereby the respective line discloses in column 7 the fine chemical 2-hydroxypalmitic acid.

[62741] Accordingly, in one embodiment, the molecule which activity is to be increased in the process of the invention is the gene product with an activity as a “glutaredoxin”, preferably it is the molecule of section (a) or (b) of this paragraph.

[62742] In particular, it was observed that in plants, especially in Arabidopsis thaliana, increasing or generating the activity of a gene product non-targeted with the activity of a “glutaredoxin”, preferably being encoded by a gene comprising the nucleic acid sequence SEQ ID NO. 10811, preferably the coding region thereof, conferred the production of or the increase in 2-hydroxypalmitic acid compared with the wild type control.

[62743] The nucleic acid sequence of GM02LC19289 from Glycine max, e.g. as shown in the respective line in column 5 of Table I, application no. 12, is unpublished. And the activity of the gene product thereof is the activity of transcription factor.

[62744] Accordingly, in one embodiment, the process of the present invention for producing cerebronic acid in a non-human organism, like a microorganism or a plant or a part thereof, comprises increasing or generating the activity of a gene product with the activity of a gene product conferring the activity of “transcription factor”, especially from Glycine max or its functional equivalent or its homolog, e.g. the increase of
[62745] (a) a gene product of a gene comprising the nucleic acid molecule as shown in the respective line in column 5 of Table I (whereby the respective line discloses in column 7 the fine chemical cerebronic acid), application no. 12, preferably the coding region thereof, or a homolog or a fragment thereof, and being depicted in the same respective line as said GM02LC19289, or a functional equivalent or a homolog thereof as shown in column 8 of Table I, application no. 12, preferably the coding region thereof, particularly a homolog or functional equivalent as shown in column 8 of Table I B, application no. 12, and being depicted in the same respective line as said GM02LC19289, and preferably the activity is increased non-targeted, or
[62746] (b) a polypeptide comprising a polypeptide, a consensus sequence or at least a polypeptide motif as shown in the respective line in column 5 of Table II or in column 8 of Table IV, application no. 12, respectively, and being depicted in the same respective line as said GM02LC19289, or a functional equivalent or a homolog thereof as depicted in column 8 of Table II, application no. 12, preferably a homolog or functional equivalent as depicted in column 8 of Table II B, application no. 12, and being depicted in the same respective line as said GM02LC19289, and preferably the activity is increased non-targeted, whereby the respective line discloses in column 7 the fine chemical cerebronic acid.

[62747] Accordingly, in one embodiment, the molecule which activity is to be increased in the process of the invention is the gene product with an activity as a “transcription factor”, preferably it is the molecule of section (a) or (b) of this paragraph.

[62748] In particular, it was observed that in plants, especially in Arabidopsis thaliana, increasing or generating the activity of a gene product non-targeted with the activity of a “transcription factor”, preferably being encoded by a gene comprising the nucleic acid sequence SEQ ID NO. 46751, preferably the coding region thereof, conferred the production of or the increase in cerebronic acid compared with the wild type control.

[62749] The nucleic acid sequence of GM02LC19289 from Glycine max, e.g. as shown in the respective line in column 5 of Table I, application no. 12, is unpublished. And the activity of the gene product thereof is the activity of transcription factor.

[62750] Accordingly, in one embodiment, the process of the present invention for producing hexadecatrienoic acid in a non-human organism, like a microorganism or a plant or a part thereof, comprises increasing or generating the activity of a gene product with the activity of a gene product conferring the activity of “transcription factor”, especially from Glycine max or its functional equivalent or its homolog, e.g. the increase of
[62751] (a) a gene product of a gene comprising the nucleic acid molecule as shown in the respective line in column 5 of Table I (whereby the respective line discloses in column 7 the fine chemical hexadecatrienoic acid), application no. 12, preferably the coding region thereof, or a homolog or a fragment thereof, and being depicted in the same respective line as said GM02LC19289, or a functional equivalent or a homolog thereof as shown in column 8 of Table I, application no. 12, preferably the coding region thereof, particularly a homolog or functional equivalent as shown in column 8 of Table I B, application no. 12, and being depicted in the same respective line as said GM02LC19289, and preferably the activity is increased non-targeted, or
[62752] (b) a polypeptide comprising a polypeptide, a consensus sequence or at least a polypeptide motif as shown in the respective line in column 5 of Table II or in column 8 of Table IV, application no. 12, respectively, and being depicted in the same respective line as said GM02LC19289, or a functional equivalent or a homolog thereof as depicted in column 8 of Table II, application no. 12, preferably a homolog or functional equivalent as depicted in column 8 of Table II B, application no. 12, and being depicted in the same respective line as said GM02LC19289, and preferably the activity is increased non-targeted, whereby the respective line discloses in column 7 the fine chemical hexadecatrienoic acid.

[62753] Accordingly, in one embodiment, the molecule which activity is to be increased in the process of the invention is the gene product with an activity as a “transcription factor”, preferably it is the molecule of section (a) or (b) of this paragraph.

[62754] In particular, it was observed that in plants, especially in Arabidopsis thaliana, increasing or generating the activity of a gene product non-targeted with the activity of a “transcription factor”, preferably being encoded by a gene comprising the nucleic acid sequence SEQ ID NO. 46751, preferably the coding region thereof, conferred the production of or the increase in hexadecatrienoic acid compared with the wild type control.

[62755] The nucleic acid sequence of GM02LC38418 from Glycine max, e.g. as shown in the respective line in column 5 of Table I, application no. 12, is unpublished. And the activity of the gene product thereof is the activity of GM02LC38418-protein.

[62756] Accordingly, in one embodiment, the process of the present invention for producing 2-hydroxytetracosenoic acid (preferably 2-hydroxynervonic acid) in a non-human organism, like a microorganism or a plant or a part thereof, comprises increasing or generating the activity of a gene product with the activity of a gene product conferring the activity of “GM02LC38418-protein”, especially from Glycine max or its functional equivalent or its homolog, e.g. the increase of
[62757] (a) a gene product of a gene comprising the nucleic acid molecule as shown in the respective line in column 5 of Table I (whereby the respective line discloses in column 7 the fine chemical 2-hydroxytetracosenoic acid (preferably 2-hydroxynervonic acid)), application no. 12, preferably the coding region thereof, or a homolog or a fragment thereof, and being depicted in the same respective line as said GM02LC38418, or a functional equivalent or a homolog thereof as shown in column 8 of Table I, application no. 12, preferably the coding region thereof, particularly a homolog or functional equivalent as shown in column 8 of Table I B, application no. 12, and being depicted in the same respective line as said GM02LC38418, and preferably the activity is increased non-targeted, or
[62758] (b) a polypeptide comprising a polypeptide, a consensus sequence or at least a polypeptide motif as shown in the respective line in column 5 of Table II or in column 8 of Table IV, application no. 12, respectively, and being depicted in the same respective line as said GM02LC38418, or a functional equivalent or a homolog thereof as depicted in column 8 of Table II, application no. 12, preferably a homolog or functional equivalent as depicted in column 8 of Table II B, application no. 12, and being depicted in the same respective line as said GM02LC38418, and preferably the activity is increased non-targeted, whereby the respective line discloses in column 7 the fine chemical 2-hydroxytetracosenoic acid (preferably 2-hydroxynervonic acid).

[62759] Accordingly, in one embodiment, the molecule which activity is to be increased in the process of the invention is the gene product with an activity as a “GM02LC38418-protein”, preferably it is the molecule of section (a) or (b) of this paragraph.

[62760] In particular, it was observed that in plants, especially in Arabidopsis thaliana, increasing or generating the activity of a gene product non-targeted with the activity of a “GM02LC38418-protein”, preferably being encoded by a gene comprising the nucleic acid sequence SEQ ID NO. 116312, preferably the coding region thereof, conferred the production of or the increase in 2-hydroxytetracosenoic acid (preferably 2-hydroxynervonic acid) compared with the wild type control.

[62761] The nucleic acid sequence of Sll0281 from Synechocystis sp., e.g. as shown in the respective line in column 5 of Table I, application no. 12, has been published in C. And the activity of the gene product thereof is the activity of sll0281-protein.

[62762] Accordingly, in one embodiment, the process of the present invention for producing hexadecadienoic acid in a non-human organism, like a microorganism or a plant or a part thereof, comprises increasing or generating the activity of a gene product with the activity of a gene product conferring the activity of “sll0281-protein”, especially from Synechocystis sp. or its functional equivalent or its homolog, e.g. the increase of
[62763] (a) a gene product of a gene comprising the nucleic acid molecule as shown in the respective line in column 5 of Table I (whereby the respective line discloses in column 7 the fine chemical hexadecadienoic acid), application no. 12, preferably the coding region thereof, or a homolog or a fragment thereof, and being depicted in the same respective line as said Sll0281, or a functional equivalent or a homolog thereof as shown in column 8 of Table I, application no. 12, preferably the coding region thereof, particularly a homolog or functional equivalent as shown in column 8 of Table I B, application no. 12, and being depicted in the same respective line as said Sll0281, and preferably the activity is increased plastidic, or
[62764] (b) a polypeptide comprising a polypeptide, a consensus sequence or at least a polypeptide motif as shown in the respective line in column 5 of Table II or in column 8 of Table IV, application no. 12, respectively, and being depicted in the same respective line as said Sll0281, or a functional equivalent or a homolog thereof as depicted in column 8 of Table II, application no. 12, preferably a homolog or functional equivalent as depicted in column 8 of Table II B, application no. 12, and being depicted in the same respective line as said Sll0281, and preferably the activity is increased plastidic, whereby the respective line discloses in column 7 the fine chemical hexadecadienoic acid.

[62765] Accordingly, in one embodiment, the molecule which activity is to be increased in the process of the invention is the gene product with an activity as a “sll0281-protein”, preferably it is the molecule of section (a) or (b) of this paragraph.

[62766] In particular, it was observed that in plants, especially in Arabidopsis thaliana, increasing or generating the activity of a gene product plastidic with the activity of a “sll0281-protein”, preferably being encoded by a gene comprising the nucleic acid sequence SEQ ID NO. 84865, preferably the coding region thereof, conferred the production of or the increase in hexadecadienoic acid compared with the wild type control.

[62767] The nucleic acid sequence of Sll0368 from Synechocystis sp., e.g. as shown in the respective line in column 5 of Table I, application no. 12, has been published in C. And the activity of the gene product thereof is the activity of bifunctional protein (phosphoribosyltransferase and regulatory protein).

[62768] Accordingly, in one embodiment, the process of the present invention for producing 2-hydroxytetracosenoic acid (preferably 2-hydroxynervonic acid) in a non-human organism, like a microorganism or a plant or a part thereof, comprises increasing or generating the activity of a gene product with the activity of a gene product conferring the activity of “bifunctional protein (phosphoribosyltransferase and regulatory protein)”, especially from Synechocystis sp. or its functional equivalent or its homolog, e.g. the increase of
[62769] (a) a gene product of a gene comprising the nucleic acid molecule as shown in the respective line in column 5 of Table I (whereby the respective line discloses in column 7 the fine chemical 2-hydroxytetracosenoic acid (preferably 2-hydroxynervonic acid)), application no. 12, preferably the coding region thereof, or a homolog or a fragment thereof, and being depicted in the same respective line as said Sll0368, or a functional equivalent or a homolog thereof as shown in column 8 of Table I, application no. 12, preferably the coding region thereof, particularly a homolog or functional equivalent as shown in column 8 of Table I B, application no. 12, and being depicted in the same respective line as said Sll0368, and preferably the activity is increased mitochondrial, or
[62770] (b) a polypeptide comprising a polypeptide, a consensus sequence or at least a polypeptide motif as shown in the respective line in column 5 of Table II or in column 8 of Table IV, application no. 12, respectively, and being depicted in the same respective line as said Sll0368, or a functional equivalent or a homolog thereof as depicted in column 8 of Table II, application no. 12, preferably a homolog or functional equivalent as depicted in column 8 of Table II B, application no. 12, and being depicted in the same respective line as said Sll0368, and preferably the activity is increased mitochondrial, whereby the respective line discloses in column 7 the fine chemical 2-hydroxytetracosenoic acid (preferably 2-hydroxynervonic acid).

[62771] Accordingly, in one embodiment, the molecule which activity is to be increased in the process of the invention is the gene product with an activity as a “bifunctional protein (phosphoribosyltransferase and regulatory protein)”, preferably it is the molecule of section (a) or (b) of this paragraph.

[62772] In particular, it was observed that in plants, especially in Arabidopsis thaliana, increasing or generating the activity of a gene product mitochondrial with the activity of a “bifunctional protein (phosphoribosyltransferase and regulatory protein)”, preferably being encoded by a gene comprising the nucleic acid sequence SEQ ID NO. 106920, preferably the coding region thereof, conferred the production of or the increase in 2-hydroxytetracosenoic acid (preferably 2-hydroxynervonic acid) compared with the wild type control.

[62773] The nucleic acid sequence of Sll0406 from Synechocystis sp., e.g. as shown in the respective line in column 5 of Table I, application no. 12, has been published in C. And the activity of the gene product thereof is the activity of sll0406-protein.

[62774] Accordingly, in one embodiment, the process of the present invention for producing 2-hydroxytetracosenoic acid (preferably 2-hydroxynervonic acid) in a non-human organism, like a microorganism or a plant or a part thereof, comprises increasing or generating the activity of a gene product with the activity of a gene product conferring the activity of “sll0406-protein”, especially from Synechocystis sp. or its functional equivalent or its homolog, e.g. the increase of
[62775] (a) a gene product of a gene comprising the nucleic acid molecule as shown in the respective line in column 5 of Table I (whereby the respective line discloses in column 7 the fine chemical 2-hydroxytetracosenoic acid (preferably 2-hydroxynervonic acid)), application no. 12, preferably the coding region thereof, or a homolog or a fragment thereof, and being depicted in the same respective line as said Sll0406, or a functional equivalent or a homolog thereof as shown in column 8 of Table I, application no. 12, preferably the coding region thereof, particularly a homolog or functional equivalent as shown in column 8 of Table I B, application no. 12, and being depicted in the same respective line as said Sll0406, and preferably the activity is increased non-targeted, or
[62776] (b) a polypeptide comprising a polypeptide, a consensus sequence or at least a polypeptide motif as shown in the respective line in column 5 of Table II or in column 8 of Table IV, application no. 12, respectively, and being depicted in the same respective line as said Sll0406, or a functional equivalent or a homolog thereof as depicted in column 8 of Table II, application no. 12, preferably a homolog or functional equivalent as depicted in column 8 of Table II B, application no. 12, and being depicted in the same respective line as said Sll0406, and preferably the activity is increased non-targeted, whereby the respective line discloses in column 7 the fine chemical 2-hydroxytetracosenoic acid (preferably 2-hydroxynervonic acid).

[62777] Accordingly, in one embodiment, the molecule which activity is to be increased in the process of the invention is the gene product with an activity as a “sll0406-protein”, preferably it is the molecule of section (a) or (b) of this paragraph.

[62778] In particular, it was observed that in plants, especially in Arabidopsis thaliana, increasing or generating the activity of a gene product non-targeted with the activity of a “sll0406-protein”, preferably being encoded by a gene comprising the nucleic acid sequence SEQ ID NO. 127103, preferably the coding region thereof, conferred the production of or the increase in 2-hydroxytetracosenoic acid (preferably 2-hydroxynervonic acid) compared with the wild type control.

[62779] The nucleic acid sequence of Sll0833 from Synechocystis sp., e.g. as shown in the respective line in column 5 of Table I, application no. 12, has been published in C. And the activity of the gene product thereof is the activity of binding-protein-dependent transport systems inner membrane component.

[62780] Accordingly, in one embodiment, the process of the present invention for producing cerebronic acid in a non-human organism, like a microorganism or a plant or a part thereof, comprises increasing or generating the activity of a gene product with the activity of a gene product conferring the activity of “binding-protein-dependent transport systems inner membrane component”, especially from Synechocystis sp. or its functional equivalent or its homolog, e.g. the increase of
[62781] (a) a gene product of a gene comprising the nucleic acid molecule as shown in the respective line in column 5 of Table I (whereby the respective line discloses in column 7 the fine chemical cerebronic acid), application no. 12, preferably the coding region thereof, or a homolog or a fragment thereof, and being depicted in the same respective line as said Sll0833, or a functional equivalent or a homolog thereof as shown in column 8 of Table I, application no. 12, preferably the coding region thereof, particularly a homolog or functional equivalent as shown in column 8 of Table I B, application no. 12, and being depicted in the same respective line as said Sll0833, and preferably the activity is increased non-targeted, or
[62782] (b) a polypeptide comprising a polypeptide, a consensus sequence or at least a polypeptide motif as shown in the respective line in column 5 of Table II or in column 8 of Table IV, application no. 12, respectively, and being depicted in the same respective line as said Sll0833, or a functional equivalent or a homolog thereof as depicted in column 8 of Table II, application no. 12, preferably a homolog or functional equivalent as depicted in column 8 of Table II B, application no. 12, and being depicted in the same respective line as said Sll0833, and preferably the activity is increased non-targeted, whereby the respective line discloses in column 7 the fine chemical cerebronic acid.

[62783] Accordingly, in one embodiment, the molecule which activity is to be increased in the process of the invention is the gene product with an activity as a “binding-protein-dependent transport systems inner membrane component”, preferably it is the molecule of section (a) or (b) of this paragraph.

[62784] In particular, it was observed that in plants, especially in Arabidopsis thaliana, increasing or generating the activity of a gene product non-targeted with the activity of a “binding-protein-dependent transport systems inner membrane component”, preferably being encoded by a gene comprising the nucleic acid sequence SEQ ID NO. 101707, preferably the coding region thereof, conferred the production of or the increase in cerebronic acid compared with the wild type control.

[62785] The nucleic acid sequence of Sll0895 from Synechocystis sp., e.g. as shown in the respective line in column 5 of Table I, application no. 12, has been published in C. And the activity of the gene product thereof is the activity of phosphatase.

[62786] Accordingly, in one embodiment, the process of the present invention for producing cerebronic acid in a non-human organism, like a microorganism or a plant or a part thereof, comprises increasing or generating the activity of a gene product with the activity of a gene product conferring the activity of “phosphatase”, especially from Synechocystis sp. or its functional equivalent or its homolog, e.g. the increase of
[62787] (a) a gene product of a gene comprising the nucleic acid molecule as shown in the respective line in column 5 of Table I (whereby the respective line discloses in column 7 the fine chemical cerebronic acid), application no. 12, preferably the coding region thereof, or a homolog or a fragment thereof, and being depicted in the same respective line as said Sll0895, or a functional equivalent or a homolog thereof as shown in column 8 of Table I, application no. 12, preferably the coding region thereof, particularly a homolog or functional equivalent as shown in column 8 of Table I B, application no. 12, and being depicted in the same respective line as said Sll0895, and preferably the activity is increased non-targeted, or
[62788] (b) a polypeptide comprising a polypeptide, a consensus sequence or at least a polypeptide motif as shown in the respective line in column 5 of Table II or in column 8 of Table IV, application no. 12, respectively, and being depicted in the same respective line as said Sll0895, or a functional equivalent or a homolog thereof as depicted in column 8 of Table II, application no. 12, preferably a homolog or functional equivalent as depicted in column 8 of Table II B, application no. 12, and being depicted in the same respective line as said Sll0895, and preferably the activity is increased non-targeted, whereby the respective line discloses in column 7 the fine chemical cerebronic acid.

[62789] Accordingly, in one embodiment, the molecule which activity is to be increased in the process of the invention is the gene product with an activity as a “phosphatase”, preferably it is the molecule of section (a) or (b) of this paragraph.

[62790] In particular, it was observed that in plants, especially in Arabidopsis thaliana, increasing or generating the activity of a gene product non-targeted with the activity of a “phosphatase”, preferably being encoded by a gene comprising the nucleic acid sequence SEQ ID NO. 127109, preferably the coding region thereof, conferred the production of or the increase in cerebronic acid compared with the wild type control.

[62791] The nucleic acid sequence of Sll0895 from Synechocystis sp., e.g. as shown in the respective line in column 5 of Table I, application no. 12, has been published in C. And the activity of the gene product thereof is the activity of phosphatase.

[62792] Accordingly, in one embodiment, the process of the present invention for producing 2-hydroxytetracosenoic acid (preferably 2-hydroxynervonic acid) in a non-human organism, like a microorganism or a plant or a part thereof, comprises increasing or generating the activity of a gene product with the activity of a gene product conferring the activity of “phosphatase”, especially from Synechocystis sp. or its functional equivalent or its homolog, e.g. the increase of
[62793] (a) a gene product of a gene comprising the nucleic acid molecule as shown in the respective line in column 5 of Table I (whereby the respective line discloses in column 7 the fine chemical 2-hydroxytetracosenoic acid (preferably 2-hydroxynervonic acid)), application no. 12, preferably the coding region thereof, or a homolog or a fragment thereof, and being depicted in the same respective line as said Sll0895, or a functional equivalent or a homolog thereof as shown in column 8 of Table I, application no. 12, preferably the coding region thereof, particularly a homolog or functional equivalent as shown in column 8 of Table I B, application no. 12, and being depicted in the same respective line as said Sll0895, and preferably the activity is increased non-targeted, or
[62794] (b) a polypeptide comprising a polypeptide, a consensus sequence or at least a polypeptide motif as shown in the respective line in column 5 of Table II or in column 8 of Table IV, application no. 12, respectively, and being depicted in the same respective line as said Sll0895, or a functional equivalent or a homolog thereof as depicted in column 8 of Table II, application no. 12, preferably a homolog or functional equivalent as depicted in column 8 of Table II B, application no. 12, and being depicted in the same respective line as said Sll0895, and preferably the activity is increased non-targeted, whereby the respective line discloses in column 7 the fine chemical 2-hydroxytetracosenoic acid (preferably 2-hydroxynervonic acid).

[62795] Accordingly, in one embodiment, the molecule which activity is to be increased in the process of the invention is the gene product with an activity as a “phosphatase”, preferably it is the molecule of section (a) or (b) of this paragraph.

[62796] In particular, it was observed that in plants, especially in Arabidopsis thaliana, increasing or generating the activity of a gene product non-targeted with the activity of a “phosphatase”, preferably being encoded by a gene comprising the nucleic acid sequence SEQ ID NO. 127109, preferably the coding region thereof, conferred the production of or the increase in 2-hydroxytetracosenoic acid (preferably 2-hydroxynervonic acid) compared with the wild type control.

[62797] The nucleic acid sequence of Sll1031 from Synechocystis sp., e.g. as shown in the respective line in column 5 of Table I, application no. 12, has been published in C. And the activity of the gene product thereof is the activity of carbon dioxide concentrating mechanism protein.

[62798] Accordingly, in one embodiment, the process of the present invention for producing hexadecadienoic acid in a non-human organism, like a microorganism or a plant or a part thereof, comprises increasing or generating the activity of a gene product with the activity of a gene product conferring the activity of “carbon dioxide concentrating mechanism protein”, especially from Synechocystis sp. or its functional equivalent or its homolog, e.g. the increase of
[62799] (a) a gene product of a gene comprising the nucleic acid molecule as shown in the respective line in column 5 of Table I (whereby the respective line discloses in column 7 the fine chemical hexadecadienoic acid), application no. 12, preferably the coding region thereof, or a homolog or a fragment thereof, and being depicted in the same respective line as said Sll1031, or a functional equivalent or a homolog thereof as shown in column 8 of Table I, application no. 12, preferably the coding region thereof, particularly a homolog or functional equivalent as shown in column 8 of Table I B, application no. 12, and being depicted in the same respective line as said Sll1031, and preferably the activity is increased mitochondrial, or
[62800] (b) a polypeptide comprising a polypeptide, a consensus sequence or at least a polypeptide motif as shown in the respective line in column 5 of Table II or in column 8 of Table IV, application no. 12, respectively, and being depicted in the same respective line as said Sll1031, or a functional equivalent or a homolog thereof as depicted in column 8 of Table II, application no. 12, preferably a homolog or functional equivalent as depicted in column 8 of Table II B, application no. 12, and being depicted in the same respective line as said Sll1031, and preferably the activity is increased mitochondrial, whereby the respective line discloses in column 7 the fine chemical hexadecadienoic acid.

[62801] Accordingly, in one embodiment, the molecule which activity is to be increased in the process of the invention is the gene product with an activity as a “carbon dioxide concentrating mechanism protein”, preferably it is the molecule of section (a) or (b) of this paragraph.

[62802] In particular, it was observed that in plants, especially in Arabidopsis thaliana, increasing or generating the activity of a gene product mitochondrial with the activity of a “carbon dioxide concentrating mechanism protein”, preferably being encoded by a gene comprising the nucleic acid sequence SEQ ID NO. 52634, preferably the coding region thereof, conferred the production of or the increase in hexadecadienoic acid compared with the wild type control.

[62803] The nucleic acid sequence of Sll1031 from Synechocystis sp., e.g. as shown in the respective line in column 5 of Table I, application no. 12, has been published in C. And the activity of the gene product thereof is the activity of carbon dioxide concentrating mechanism protein.

[62804] Accordingly, in one embodiment, the process of the present invention for producing hexadecatrienoic acid in a non-human organism, like a microorganism or a plant or a part thereof, comprises increasing or generating the activity of a gene product with the activity of a gene product conferring the activity of “carbon dioxide concentrating mechanism protein”, especially from Synechocystis sp. or its functional equivalent or its homolog, e.g. the increase of
[62805] (a) a gene product of a gene comprising the nucleic acid molecule as shown in the respective line in column 5 of Table I (whereby the respective line discloses in column 7 the fine chemical hexadecatrienoic acid), application no. 12, preferably the coding region thereof, or a homolog or a fragment thereof, and being depicted in the same respective line as said Sll1031, or a functional equivalent or a homolog thereof as shown in column 8 of Table I, application no. 12, preferably the coding region thereof, particularly a homolog or functional equivalent as shown in column 8 of Table I B, application no. 12, and being depicted in the same respective line as said Sll1031, and preferably the activity is increased mitochondrial, or
[62806] (b) a polypeptide comprising a polypeptide, a consensus sequence or at least a polypeptide motif as shown in the respective line in column 5 of Table II or in column 8 of Table IV, application no. 12, respectively, and being depicted in the same respective line as said Sll1031, or a functional equivalent or a homolog thereof as depicted in column 8 of Table II, application no. 12, preferably a homolog or functional equivalent as depicted in column 8 of Table II B, application no. 12, and being depicted in the same respective line as said Sll1031, and preferably the activity is increased mitochondrial, whereby the respective line discloses in column 7 the fine chemical hexadecatrienoic acid.

[62807] Accordingly, in one embodiment, the molecule which activity is to be increased in the process of the invention is the gene product with an activity as a “carbon dioxide concentrating mechanism protein”, preferably it is the molecule of section (a) or (b) of this paragraph.

[62808] In particular, it was observed that in plants, especially in Arabidopsis thaliana, increasing or generating the activity of a gene product mitochondrial with the activity of a “carbon dioxide concentrating mechanism protein”, preferably being encoded by a gene comprising the nucleic acid sequence SEQ ID NO. 52634, preferably the coding region thereof, conferred the production of or the increase in hexadecatrienoic acid compared with the wild type control.

[62809] The nucleic acid sequence of Sll1917 from Synechocystis sp., e.g. as shown in the respective line in column 5 of Table I, application no. 12, has been published in C. And the activity of the gene product thereof is the activity of coproporphyrinogen III oxidase.

[62810] Accordingly, in one embodiment, the process of the present invention for producing cerebronic acid in a non-human organism, like a microorganism or a plant or a part thereof, comprises increasing or generating the activity of a gene product with the activity of a gene product conferring the activity of “coproporphyrinogen III oxidase”, especially from Synechocystis sp. or its functional equivalent or its homolog, e.g. the increase of
[62811] (a) a gene product of a gene comprising the nucleic acid molecule as shown in the respective line in column 5 of Table I (whereby the respective line discloses in column 7 the fine chemical cerebronic acid), application no. 12, preferably the coding region thereof, or a homolog or a fragment thereof, and being depicted in the same respective line as said Sll1917, or a functional equivalent or a homolog thereof as shown in column 8 of Table I, application no. 12, preferably the coding region thereof, particularly a homolog or functional equivalent as shown in column 8 of Table I B, application no. 12, and being depicted in the same respective line as said Sll1917, and preferably the activity is increased mitochondrial, or
[62812] (b) a polypeptide comprising a polypeptide, a consensus sequence or at least a polypeptide motif as shown in the respective line in column 5 of Table II or in column 8 of Table IV, application no. 12, respectively, and being depicted in the same respective line as said Sll1917, or a functional equivalent or a homolog thereof as depicted in column 8 of Table II, application no. 12, preferably a homolog or functional equivalent as depicted in column 8 of Table II B, application no. 12, and being depicted in the same respective line as said Sll1917, and preferably the activity is increased mitochondrial, whereby the respective line discloses in column 7 the fine chemical cerebronic acid.

[62813] Accordingly, in one embodiment, the molecule which activity is to be increased in the process of the invention is the gene product with an activity as a “coproporphyrinogen III oxidase”, preferably it is the molecule of section (a) or (b) of this paragraph.

[62814] In particular, it was observed that in plants, especially in Arabidopsis thaliana, increasing or generating the activity of a gene product mitochondrial with the activity of a “coproporphyrinogen III oxidase”, preferably being encoded by a gene comprising the nucleic acid sequence SEQ ID NO. 11471, preferably the coding region thereof, conferred the production of or the increase in cerebronic acid compared with the wild type control.

[62815] The nucleic acid sequence of Sll1917 from Synechocystis sp., e.g. as shown in the respective line in column 5 of Table I, application no. 12, has been published in C. And the activity of the gene product thereof is the activity of coproporphyrinogen III oxidase.

[62816] Accordingly, in one embodiment, the process of the present invention for producing 2-hydroxytetracosenoic acid (preferably 2-hydroxynervonic acid) in a non-human organism, like a microorganism or a plant or a part thereof, comprises increasing or generating the activity of a gene product with the activity of a gene product conferring the activity of “coproporphyrinogen III oxidase”, especially from Synechocystis sp. or its functional equivalent or its homolog, e.g. the increase of
[62817] (a) a gene product of a gene comprising the nucleic acid molecule as shown in the respective line in column 5 of Table I (whereby the respective line discloses in column 7 the fine chemical 2-hydroxytetracosenoic acid (preferably 2-hydroxynervonic acid)), application no. 12, preferably the coding region thereof, or a homolog or a fragment thereof, and being depicted in the same respective line as said Sll1917, or a functional equivalent or a homolog thereof as shown in column 8 of Table I, application no. 12, preferably the coding region thereof, particularly a homolog or functional equivalent as shown in column 8 of Table I B, application no. 12, and being depicted in the same respective line as said Sll1917, and preferably the activity is increased mitochondrial, or
[62818] (b) a polypeptide comprising a polypeptide, a consensus sequence or at least a polypeptide motif as shown in the respective line in column 5 of Table II or in column 8 of Table IV, application no. 12, respectively, and being depicted in the same respective line as said Sll1917, or a functional equivalent or a homolog thereof as depicted in column 8 of Table II, application no. 12, preferably a homolog or functional equivalent as depicted in column 8 of Table II B, application no. 12, and being depicted in the same respective line as said SI11917, and preferably the activity is increased mitochondrial, whereby the respective line discloses in column 7 the fine chemical 2-hydroxytetracosenoic acid (preferably 2-hydroxynervonic acid).

[62819] Accordingly, in one embodiment, the molecule which activity is to be increased in the process of the invention is the gene product with an activity as a “coproporphyrinogen III oxidase”, preferably it is the molecule of section (a) or (b) of this paragraph.

[62820] In particular, it was observed that in plants, especially in Arabidopsis thaliana, increasing or generating the activity of a gene product mitochondrial with the activity of a “coproporphyrinogen III oxidase”, preferably being encoded by a gene comprising the nucleic acid sequence SEQ ID NO. 11471, preferably the coding region thereof, conferred the production of or the increase in 2-hydroxytetracosenoic acid (preferably 2-hydroxynervonic acid) compared with the wild type control.

[62821] The nucleic acid sequence of Slr0338 from Synechocystis sp., e.g. as shown in the respective line in column 5 of Table I, application no. 12, has been published in C. And the activity of the gene product thereof is the activity of oxidoreductase.

[62822] Accordingly, in one embodiment, the process of the present invention for producing 2-hydroxypalmitic acid in a non-human organism, like a microorganism or a plant or a part thereof, comprises increasing or generating the activity of a gene product with the activity of a gene product conferring the activity of “oxidoreductase”, especially from Synechocystis sp. or its functional equivalent or its homolog, e.g. the increase of
[62823] (a) a gene product of a gene comprising the nucleic acid molecule as shown in the respective line in column 5 of Table I (whereby the respective line discloses in column 7 the fine chemical 2-hydroxypalmitic acid), application no. 12, preferably the coding region thereof, or a homolog or a fragment thereof, and being depicted in the same respective line as said Slr0338, or a functional equivalent or a homolog thereof as shown in column 8 of Table I, application no. 12, preferably the coding region thereof, particularly a homolog or functional equivalent as shown in column 8 of Table I B, application no. 12, and being depicted in the same respective line as said Slr0338, and preferably the activity is increased non-targeted, or
[62824] (b) a polypeptide comprising a polypeptide, a consensus sequence or at least a polypeptide motif as shown in the respective line in column 5 of Table II or in column 8 of Table IV, application no. 12, respectively, and being depicted in the same respective line as said Slr0338, or a functional equivalent or a homolog thereof as depicted in column 8 of Table II, application no. 12, preferably a homolog or functional equivalent as depicted in column 8 of Table II B, application no. 12, and being depicted in the same respective line as said Slr0338, and preferably the activity is increased non-targeted, whereby the respective line discloses in column 7 the fine chemical 2-hydroxypalmitic acid.

[62825] Accordingly, in one embodiment, the molecule which activity is to be increased in the process of the invention is the gene product with an activity as a “oxidoreductase”, preferably it is the molecule of section (a) or (b) of this paragraph.

[62826] In particular, it was observed that in plants, especially in Arabidopsis thaliana, increasing or generating the activity of a gene product non-targeted with the activity of a “oxidoreductase”, preferably being encoded by a gene comprising the nucleic acid sequence SEQ ID NO. 11990, preferably the coding region thereof, conferred the production of or the increase in 2-hydroxypalmitic acid compared with the wild type control.

[62827] The nucleic acid sequence of Slr0597 from Synechocystis sp., e.g. as shown in the respective line in column 5 of Table I, application no. 12, has been published in C. And the activity of the gene product thereof is the activity of bifunctional purine biosynthesis protein.

[62828] Accordingly, in one embodiment, the process of the present invention for producing hexadecatrienoic acid in a non-human organism, like a microorganism or a plant or a part thereof, comprises increasing or generating the activity of a gene product with the activity of a gene product conferring the activity of “bifunctional purine biosynthesis protein”, especially from Synechocystis sp. or its functional equivalent or its homolog, e.g. the increase of
[62829] (a) a gene product of a gene comprising the nucleic acid molecule as shown in the respective line in column 5 of Table I (whereby the respective line discloses in column 7 the fine chemical hexadecatrienoic acid), application no. 12, preferably the coding region thereof, or a homolog or a fragment thereof, and being depicted in the same respective line as said Slr0597, or a functional equivalent or a homolog thereof as shown in column 8 of Table I, application no. 12, preferably the coding region thereof, particularly a homolog or functional equivalent as shown in column 8 of Table I B, application no. 12, and being depicted in the same respective line as said Slr0597, and preferably the activity is increased plastidic, or
[62830] (b) a polypeptide comprising a polypeptide, a consensus sequence or at least a polypeptide motif as shown in the respective line in column 5 of Table II or in column 8 of Table IV, application no. 12, respectively, and being depicted in the same respective line as said Slr0597, or a functional equivalent or a homolog thereof as depicted in column 8 of Table II, application no. 12, preferably a homolog or functional equivalent as depicted in column 8 of Table II B, application no. 12, and being depicted in the same respective line as said Slr0597, and preferably the activity is increased plastidic, whereby the respective line discloses in column 7 the fine chemical hexadecatrienoic acid.

[62831] Accordingly, in one embodiment, the molecule which activity is to be increased in the process of the invention is the gene product with an activity as a “bifunctional purine biosynthesis protein”, preferably it is the molecule of section (a) or (b) of this paragraph.

[62832] In particular, it was observed that in plants, especially in Arabidopsis thaliana, increasing or generating the activity of a gene product plastidic with the activity of a “bifunctional purine biosynthesis protein”, preferably being encoded by a gene comprising the nucleic acid sequence SEQ ID NO. 56153, preferably the coding region thereof, conferred the production of or the increase in hexadecatrienoic acid compared with the wild type control.

[62833] The nucleic acid sequence of Slr0721 from Synechocystis sp., e.g. as shown in the respective line in column 5 of Table I, application no. 12, has been published in C. And the activity of the gene product thereof is the activity of malate dehydrogenase.

[62834] Accordingly, in one embodiment, the process of the present invention for producing cerebronic acid in a non-human organism, like a microorganism or a plant or a part thereof, comprises increasing or generating the activity of a gene product with the activity of a gene product conferring the activity of “malate dehydrogenase”, especially from Synechocystis sp. or its functional equivalent or its homolog, e.g. the increase of
[62835] (a) a gene product of a gene comprising the nucleic acid molecule as shown in the respective line in column 5 of Table I (whereby the respective line discloses in column 7 the fine chemical cerebronic acid), application no. 12, preferably the coding region thereof, or a homolog or a fragment thereof, and being depicted in the same respective line as said Slr0721, or a functional equivalent or a homolog thereof as shown in column 8 of Table I, application no. 12, preferably the coding region thereof, particularly a homolog or functional equivalent as shown in column 8 of Table I B, application no. 12, and being depicted in the same respective line as said Slr0721, and preferably the activity is increased plastidic, or
[62836] (b) a polypeptide comprising a polypeptide, a consensus sequence or at least a polypeptide motif as shown in the respective line in column 5 of Table II or in column 8 of Table IV, application no. 12, respectively, and being depicted in the same respective line as said Slr0721, or a functional equivalent or a homolog thereof as depicted in column 8 of Table II, application no. 12, preferably a homolog or functional equivalent as depicted in column 8 of Table II B, application no. 12, and being depicted in the same respective line as said Slr0721, and preferably the activity is increased plastidic, whereby the respective line discloses in column 7 the fine chemical cerebronic acid.

[62837] Accordingly, in one embodiment, the molecule which activity is to be increased in the process of the invention is the gene product with an activity as a “malate dehydrogenase”, preferably it is the molecule of section (a) or (b) of this paragraph.

[62838] In particular, it was observed that in plants, especially in Arabidopsis thaliana, increasing or generating the activity of a gene product plastidic with the activity of a “malate dehydrogenase”, preferably being encoded by a gene comprising the nucleic acid sequence SEQ ID NO. 87397, preferably the coding region thereof, conferred the production of or the increase in cerebronic acid compared with the wild type control.

[62839] The nucleic acid sequence of Slr0879 from Synechocystis sp., e.g. as shown in the respective line in column 5 of Table I, application no. 12, has been published in C. And the activity of the gene product thereof is the activity of glycine cleavage system H protein.

[62840] Accordingly, in one embodiment, the process of the present invention for producing hexadecatrienoic acid in a non-human organism, like a microorganism or a plant or a part thereof, comprises increasing or generating the activity of a gene product with the activity of a gene product conferring the activity of “glycine cleavage system H protein”, especially from Synechocystis sp. or its functional equivalent or its homolog, e.g. the increase of
[62841] (a) a gene product of a gene comprising the nucleic acid molecule as shown in the respective line in column 5 of Table I (whereby the respective line discloses in column 7 the fine chemical hexadecatrienoic acid), application no. 12, preferably the coding region thereof, or a homolog or a fragment thereof, and being depicted in the same respective line as said Slr0879, or a functional equivalent or a homolog thereof as shown in column 8 of Table I, application no. 12, preferably the coding region thereof, particularly a homolog or functional equivalent as shown in column 8 of Table I B, application no. 12, and being depicted in the same respective line as said Slr0879, and preferably the activity is increased mitochondrial, or
[62842] (b) a polypeptide comprising a polypeptide, a consensus sequence or at least a polypeptide motif as shown in the respective line in column 5 of Table II or in column 8 of Table IV, application no. 12, respectively, and being depicted in the same respective line as said Slr0879, or a functional equivalent or a homolog thereof as depicted in column 8 of Table II, application no. 12, preferably a homolog or functional equivalent as depicted in column 8 of Table II B, application no. 12, and being depicted in the same respective line as said Slr0879, and preferably the activity is increased mitochondrial, whereby the respective line discloses in column 7 the fine chemical hexadecatrienoic acid.

[62843] Accordingly, in one embodiment, the molecule which activity is to be increased in the process of the invention is the gene product with an activity as a “glycine cleavage system H protein”, preferably it is the molecule of section (a) or (b) of this paragraph.

[62844] In particular, it was observed that in plants, especially in Arabidopsis thaliana, increasing or generating the activity of a gene product mitochondrial with the activity of a “glycine cleavage system H protein”, preferably being encoded by a gene comprising the nucleic acid sequence SEQ ID NO. 127183, preferably the coding region thereof, conferred the production of or the increase in hexadecatrienoic acid compared with the wild type control.

[62845] The nucleic acid sequence of Slr0949 from Synechocystis sp., e.g. as shown in the respective line in column 5 of Table I, application no. 12, has been published in C. And the activity of the gene product thereof is the activity of permease protein of ABC transporter.

[62846] Accordingly, in one embodiment, the process of the present invention for producing 2-hydroxytetracosenoic acid (preferably 2-hydroxynervonic acid) in a non-human organism, like a microorganism or a plant or a part thereof, comprises increasing or generating the activity of a gene product with the activity of a gene product conferring the activity of “permease protein of ABC transporter”, especially from Synechocystis sp. or its functional equivalent or its homolog, e.g. the increase of
[62847] (a) a gene product of a gene comprising the nucleic acid molecule as shown in the respective line in column 5 of Table I (whereby the respective line discloses in column 7 the fine chemical 2-hydroxytetracosenoic acid (preferably 2-hydroxynervonic acid)), application no. 12, preferably the coding region thereof, or a homolog or a fragment thereof, and being depicted in the same respective line as said Slr0949, or a functional equivalent or a homolog thereof as shown in column 8 of Table I, application no. 12, preferably the coding region thereof, particularly a homolog or functional equivalent as shown in column 8 of Table I B, application no. 12, and being depicted in the same respective line as said Slr0949, and preferably the activity is increased mitochondrial, or
[62848] (b) a polypeptide comprising a polypeptide, a consensus sequence or at least a polypeptide motif as shown in the respective line in column 5 of Table II or in column 8 of Table IV, application no. 12, respectively, and being depicted in the same respective line as said Slr0949, or a functional equivalent or a homolog thereof as depicted in column 8 of Table II, application no. 12, preferably a homolog or functional equivalent as depicted in column 8 of Table II B, application no. 12, and being depicted in the same respective line as said Slr0949, and preferably the activity is increased mitochondrial, whereby the respective line discloses in column 7 the fine chemical 2-hydroxytetracosenoic acid (preferably 2-hydroxynervonic acid).

[62849] Accordingly, in one embodiment, the molecule which activity is to be increased in the process of the invention is the gene product with an activity as a “permease protein of ABC transporter”, preferably it is the molecule of section (a) or (b) of this paragraph.

[62850] In particular, it was observed that in plants, especially in Arabidopsis thaliana, increasing or generating the activity of a gene product mitochondrial with the activity of a “permease protein of ABC transporter”, preferably being encoded by a gene comprising the nucleic acid sequence SEQ ID NO. 119222, preferably the coding region thereof, conferred the production of or the increase in 2-hydroxytetracosenoic acid (preferably 2-hydroxynervonic acid) compared with the wild type control.

[62851] The nucleic acid sequence of Slr0966 from Synechocystis sp., e.g. as shown in the respective line in column 5 of Table I, application no. 12, has been published in C. And the activity of the gene product thereof is the activity of tryptophan synthase alpha chain.

[62852] Accordingly, in one embodiment, the process of the present invention for producing hexadecadienoic acid in a non-human organism, like a microorganism or a plant or a part thereof, comprises increasing or generating the activity of a gene product with the activity of a gene product conferring the activity of “tryptophan synthase alpha chain”, especially from Synechocystis sp. or its functional equivalent or its homolog, e.g. the increase of
[62853] (a) a gene product of a gene comprising the nucleic acid molecule as shown in the respective line in column 5 of Table I (whereby the respective line discloses in column 7 the fine chemical hexadecadienoic acid), application no. 12, preferably the coding region thereof, or a homolog or a fragment thereof, and being depicted in the same respective line as said Slr0966, or a functional equivalent or a homolog thereof as shown in column 8 of Table I, application no. 12, preferably the coding region thereof, particularly a homolog or functional equivalent as shown in column 8 of Table I B, application no. 12, and being depicted in the same respective line as said Slr0966, and preferably the activity is increased plastidic, or
[62854] (b) a polypeptide comprising a polypeptide, a consensus sequence or at least a polypeptide motif as shown in the respective line in column 5 of Table II or in column 8 of Table IV, application no. 12, respectively, and being depicted in the same respective line as said Slr0966, or a functional equivalent or a homolog thereof as depicted in column 8 of Table II, application no. 12, preferably a homolog or functional equivalent as depicted in column 8 of Table II B, application no. 12, and being depicted in the same respective line as said Slr0966, and preferably the activity is increased plastidic, whereby the respective line discloses in column 7 the fine chemical hexadecadienoic acid.

[62855] Accordingly, in one embodiment, the molecule which activity is to be increased in the process of the invention is the gene product with an activity as a “tryptophan synthase alpha chain”, preferably it is the molecule of section (a) or (b) of this paragraph.

[62856] In particular, it was observed that in plants, especially in Arabidopsis thaliana, increasing or generating the activity of a gene product plastidic with the activity of a “tryptophan synthase alpha chain”, preferably being encoded by a gene comprising the nucleic acid sequence SEQ ID NO. 87655, preferably the coding region thereof, conferred the production of or the increase in hexadecadienoic acid compared with the wild type control.

[62857] The nucleic acid sequence of Slr1096 from Synechocystis sp., e.g. as shown in the respective line in column 5 of Table I, application no. 12, has been published in C. And the activity of the gene product thereof is the activity of dihydrolipoamide dehydrogenase.

[62858] Accordingly, in one embodiment, the process of the present invention for producing 2-hydroxybehenic acid in a non-human organism, like a microorganism or a plant or a part thereof, comprises increasing or generating the activity of a gene product with the activity of a gene product conferring the activity of “dihydrolipoamide dehydrogenase”, especially from Synechocystis sp. or its functional equivalent or its homolog, e.g. the increase of
[62859] (a) a gene product of a gene comprising the nucleic acid molecule as shown in the respective line in column 5 of Table I (whereby the respective line discloses in column 7 the fine chemical 2-hydroxybehenic acid), application no. 12, preferably the coding region thereof, or a homolog or a fragment thereof, and being depicted in the same respective line as said Slr1096, or a functional equivalent or a homolog thereof as shown in column 8 of Table I, application no. 12, preferably the coding region thereof, particularly a homolog or functional equivalent as shown in column 8 of Table I B, application no. 12, and being depicted in the same respective line as said Slr1096, and preferably the activity is increased non-targeted, or
[62860] (b) a polypeptide comprising a polypeptide, a consensus sequence or at least a polypeptide motif as shown in the respective line in column 5 of Table II or in column 8 of Table IV, application no. 12, respectively, and being depicted in the same respective line as said Slr1096, or a functional equivalent or a homolog thereof as depicted in column 8 of Table II, application no. 12, preferably a homolog or functional equivalent as depicted in column 8 of Table II B, application no. 12, and being depicted in the same respective line as said Slr1096, and preferably the activity is increased non-targeted, whereby the respective line discloses in column 7 the fine chemical 2-hydroxybehenic acid.

[62861] Accordingly, in one embodiment, the molecule which activity is to be increased in the process of the invention is the gene product with an activity as a “dihydrolipoamide dehydrogenase”, preferably it is the molecule of section (a) or (b) of this paragraph.

[62862] In particular, it was observed that in plants, especially in Arabidopsis thaliana, increasing or generating the activity of a gene product non-targeted with the activity of a “dihydrolipoamide dehydrogenase”, preferably being encoded by a gene comprising the nucleic acid sequence SEQ ID NO. 57734, preferably the coding region thereof, conferred the production of or the increase in 2-hydroxybehenic acid compared with the wild type control.

[62863] The nucleic acid sequence of Slr1250 from Synechocystis sp., e.g. as shown in the respective line in column 5 of Table I, application no. 12, has been published in C. And the activity of the gene product thereof is the activity of phosphate import ATP-binding protein.

[62864] Accordingly, in one embodiment, the process of the present invention for producing 2-hydroxypalmitic acid in a non-human organism, like a microorganism or a plant or a part thereof, comprises increasing or generating the activity of a gene product with the activity of a gene product conferring the activity of “phosphate import ATP-binding protein”, especially from Synechocystis sp. or its functional equivalent or its homolog, e.g. the increase of
[62865] (a) a gene product of a gene comprising the nucleic acid molecule as shown in the respective line in column 5 of Table I (whereby the respective line discloses in column 7 the fine chemical 2-hydroxypalmitic acid), application no. 12, preferably the coding region thereof, or a homolog or a fragment thereof, and being depicted in the same respective line as said Slr1250, or a functional equivalent or a homolog thereof as shown in column 8 of Table I, application no. 12, preferably the coding region thereof, particularly a homolog or functional equivalent as shown in column 8 of Table I B, application no. 12, and being depicted in the same respective line as said Slr1250, and preferably the activity is increased mitochondrial, or
[62866] (b) a polypeptide comprising a polypeptide, a consensus sequence or at least a polypeptide motif as shown in the respective line in column 5 of Table II or in column 8 of Table IV, application no. 12, respectively, and being depicted in the same respective line as said Slr1250, or a functional equivalent or a homolog thereof as depicted in column 8 of Table II, application no. 12, preferably a homolog or functional equivalent as depicted in column 8 of Table II B, application no. 12, and being depicted in the same respective line as said Slr1250, and preferably the activity is increased mitochondrial, whereby the respective line discloses in column 7 the fine chemical 2-hydroxypalmitic acid.

[62867] Accordingly, in one embodiment, the molecule which activity is to be increased in the process of the invention is the gene product with an activity as a “phosphate import ATP-binding protein”, preferably it is the molecule of section (a) or (b) of this paragraph.

[62868] In particular, it was observed that in plants, especially in Arabidopsis thaliana, increasing or generating the activity of a gene product mitochondrial with the activity of a “phosphate import ATP-binding protein”, preferably being encoded by a gene comprising the nucleic acid sequence SEQ ID NO. 116460, preferably the coding region thereof, conferred the production of or the increase in 2-hydroxypalmitic acid compared with the wild type control.

[62869] The nucleic acid sequence of Slr2035 from Synechocystis sp., e.g. as shown in the respective line in column 5 of Table I, application no. 12, has been published in C. And the activity of the gene product thereof is the activity of glutamate 5-kinase.

[62870] Accordingly, in one embodiment, the process of the present invention for producing hexadecatrienoic acid in a non-human organism, like a microorganism or a plant or a part thereof, comprises increasing or generating the activity of a gene product with the activity of a gene product conferring the activity of “glutamate 5-kinase”, especially from Synechocystis sp. or its functional equivalent or its homolog, e.g. the increase of
[62871] (a) a gene product of a gene comprising the nucleic acid molecule as shown in the respective line in column 5 of Table I (whereby the respective line discloses in column 7 the fine chemical hexadecatrienoic acid), application no. 12, preferably the coding region thereof, or a homolog or a fragment thereof, and being depicted in the same respective line as said Slr2035, or a functional equivalent or a homolog thereof as shown in column 8 of Table I, application no. 12, preferably the coding region thereof, particularly a homolog or functional equivalent as shown in column 8 of Table I B, application no. 12, and being depicted in the same respective line as said Slr2035, and preferably the activity is increased mitochondrial, or
[62872] (b) a polypeptide comprising a polypeptide, a consensus sequence or at least a polypeptide motif as shown in the respective line in column 5 of Table II or in column 8 of Table IV, application no. 12, respectively, and being depicted in the same respective line as said Slr2035, or a functional equivalent or a homolog thereof as depicted in column 8 of Table II, application no. 12, preferably a homolog or functional equivalent as depicted in column 8 of Table II B, application no. 12, and being depicted in the same respective line as said Slr2035, and preferably the activity is increased mitochondrial, whereby the respective line discloses in column 7 the fine chemical hexadecatrienoic acid.

[62873] Accordingly, in one embodiment, the molecule which activity is to be increased in the process of the invention is the gene product with an activity as a “glutamate 5-kinase”, preferably it is the molecule of section (a) or (b) of this paragraph.

[62874] In particular, it was observed that in plants, especially in Arabidopsis thaliana, increasing or generating the activity of a gene product mitochondrial with the activity of a “glutamate 5-kinase”, preferably being encoded by a gene comprising the nucleic acid sequence SEQ ID NO. 127521, preferably the coding region thereof, conferred the production of or the increase in hexadecatrienoic acid compared with the wild type control.

[62875] The nucleic acid sequence of Slr2072 from Synechocystis sp., e.g. as shown in the respective line in column 5 of Table I, application no. 12, has been published in C. And the activity of the gene product thereof is the activity of threonine dehydratase.

[62876] Accordingly, in one embodiment, the process of the present invention for producing cerebronic acid in a non-human organism, like a microorganism or a plant or a part thereof, comprises increasing or generating the activity of a gene product with the activity of a gene product conferring the activity of “threonine dehydratase”, especially from Synechocystis sp. or its functional equivalent or its homolog, e.g. the increase of
[62877] (a) a gene product of a gene comprising the nucleic acid molecule as shown in the respective line in column 5 of Table I (whereby the respective line discloses in column 7 the fine chemical cerebronic acid), application no. 12, preferably the coding region thereof, or a homolog or a fragment thereof, and being depicted in the same respective line as said Slr2072, or a functional equivalent or a homolog thereof as shown in column 8 of Table I, application no. 12, preferably the coding region thereof, particularly a homolog or functional equivalent as shown in column 8 of Table I B, application no. 12, and being depicted in the same respective line as said Slr2072, and preferably the activity is increased mitochondrial, or
[62878] (b) a polypeptide comprising a polypeptide, a consensus sequence or at least a polypeptide motif as shown in the respective line in column 5 of Table II or in column 8 of Table IV, application no. 12, respectively, and being depicted in the same respective line as said Slr2072, or a functional equivalent or a homolog thereof as depicted in column 8 of Table II, application no. 12, preferably a homolog or functional equivalent as depicted in column 8 of Table II B, application no. 12, and being depicted in the same respective line as said Slr2072, and preferably the activity is increased mitochondrial, whereby the respective line discloses in column 7 the fine chemical cerebronic acid.

[62879] Accordingly, in one embodiment, the molecule which activity is to be increased in the process of the invention is the gene product with an activity as a “threonine dehydratase”, preferably it is the molecule of section (a) or (b) of this paragraph.

[62880] In particular, it was observed that in plants, especially in Arabidopsis thaliana, increasing or generating the activity of a gene product mitochondrial with the activity of a “threonine dehydratase”, preferably being encoded by a gene comprising the nucleic acid sequence SEQ ID NO. 12341, preferably the coding region thereof, conferred the production of or the increase in cerebronic acid compared with the wild type control.

[62881] The nucleic acid sequence of Slr2072 from Synechocystis sp., e.g. as shown in the respective line in column 5 of Table I, application no. 12, has been published in C. And the activity of the gene product thereof is the activity of threonine dehydratase.

[62882] Accordingly, in one embodiment, the process of the present invention for producing hexadecatrienoic acid in a non-human organism, like a microorganism or a plant or a part thereof, comprises increasing or generating the activity of a gene product with the activity of a gene product conferring the activity of “threonine dehydratase”, especially from Synechocystis sp. or its functional equivalent or its homolog, e.g. the increase of
[62883] (a) a gene product of a gene comprising the nucleic acid molecule as shown in the respective line in column 5 of Table I (whereby the respective line discloses in column 7 the fine chemical hexadecatrienoic acid), application no. 12, preferably the coding region thereof, or a homolog or a fragment thereof, and being depicted in the same respective line as said Slr2072, or a functional equivalent or a homolog thereof as shown in column 8 of Table I, application no. 12, preferably the coding region thereof, particularly a homolog or functional equivalent as shown in column 8 of Table I B, application no. 12, and being depicted in the same respective line as said Slr2072, and preferably the activity is increased mitochondrial, or
[62884] (b) a polypeptide comprising a polypeptide, a consensus sequence or at least a polypeptide motif as shown in the respective line in column 5 of Table II or in column 8 of Table IV, application no. 12, respectively, and being depicted in the same respective line as said Slr2072, or a functional equivalent or a homolog thereof as depicted in column 8 of Table II, application no. 12, preferably a homolog or functional equivalent as depicted in column 8 of Table II B, application no. 12, and being depicted in the same respective line as said Slr2072, and preferably the activity is increased mitochondrial, whereby the respective line discloses in column 7 the fine chemical hexadecatrienoic acid.

[62885] Accordingly, in one embodiment, the molecule which activity is to be increased in the process of the invention is the gene product with an activity as a “threonine dehydratase”, preferably it is the molecule of section (a) or (b) of this paragraph.

[62886] In particular, it was observed that in plants, especially in Arabidopsis thaliana, increasing or generating the activity of a gene product mitochondrial with the activity of a “threonine dehydratase”, preferably being encoded by a gene comprising the nucleic acid sequence SEQ ID NO. 12341, preferably the coding region thereof, conferred the production of or the increase in hexadecatrienoic acid compared with the wild type control.

[62887] The nucleic acid sequence of Slr2072 from Synechocystis sp., e.g. as shown in the respective line in column 5 of Table I, application no. 12, has been published in C. And the activity of the gene product thereof is the activity of threonine dehydratase.

[62888] Accordingly, in one embodiment, the process of the present invention for producing 2-hydroxytetracosenoic acid (preferably 2-hydroxynervonic acid) in a non-human organism, like a microorganism or a plant or a part thereof, comprises increasing or generating the activity of a gene product with the activity of a gene product conferring the activity of “threonine dehydratase”, especially from Synechocystis sp. or its functional equivalent or its homolog, e.g. the increase of
[62889] (a) a gene product of a gene comprising the nucleic acid molecule as shown in the respective line in column 5 of Table I (whereby the respective line discloses in column 7 the fine chemical 2-hydroxytetracosenoic acid (preferably 2-hydroxynervonic acid)), application no. 12, preferably the coding region thereof, or a homolog or a fragment thereof, and being depicted in the same respective line as said Slr2072, or a functional equivalent or a homolog thereof as shown in column 8 of Table I, application no. 12, preferably the coding region thereof, particularly a homolog or functional equivalent as shown in column 8 of Table I B, application no. 12, and being depicted in the same respective line as said Slr2072, and preferably the activity is increased plastidic, or
[62890] (b) a polypeptide comprising a polypeptide, a consensus sequence or at least a polypeptide motif as shown in the respective line in column 5 of Table II or in column 8 of Table IV, application no. 12, respectively, and being depicted in the same respective line as said Slr2072, or a functional equivalent or a homolog thereof as depicted in column 8 of Table II, application no. 12, preferably a homolog or functional equivalent as depicted in column 8 of Table II B, application no. 12, and being depicted in the same respective line as said Slr2072, and preferably the activity is increased plastidic, whereby the respective line discloses in column 7 the fine chemical 2-hydroxytetracosenoic acid (preferably 2-hydroxynervonic acid).

[62891] Accordingly, in one embodiment, the molecule which activity is to be increased in the process of the invention is the gene product with an activity as a “threonine dehydratase”, preferably it is the molecule of section (a) or (b) of this paragraph.

[62892] In particular, it was observed that in plants, especially in Arabidopsis thaliana, increasing or generating the activity of a gene product plastidic with the activity of a “threonine dehydratase”, preferably being encoded by a gene comprising the nucleic acid sequence SEQ ID NO. 12341, preferably the coding region thereof, conferred the production of or the increase in 2-hydroxytetracosenoic acid (preferably 2-hydroxynervonic acid) compared with the wild type control.

[62893] The nucleic acid sequence of SsI3044 from Synechocystis sp., e.g. as shown in the respective line in column 5 of Table I, application no. 12, has been published in C. And the activity of the gene product thereof is the activity of ferredoxin.

[62894] Accordingly, in one embodiment, the process of the present invention for producing 2-hydroxytetracosenoic acid (preferably 2-hydroxynervonic acid) in a non-human organism, like a microorganism or a plant or a part thereof, comprises increasing or generating the activity of a gene product with the activity of a gene product conferring the activity of “ferredoxin”, especially from Synechocystis sp. or its functional equivalent or its homolog, e.g. the increase of
[62895] (a) a gene product of a gene comprising the nucleic acid molecule as shown in the respective line in column 5 of Table I (whereby the respective line discloses in column 7 the fine chemical 2-hydroxytetracosenoic acid (preferably 2-hydroxynervonic acid)), application no. 12, preferably the coding region thereof, or a homolog or a fragment thereof, and being depicted in the same respective line as said Ssl3044, or a functional equivalent or a homolog thereof as shown in column 8 of Table I, application no. 12, preferably the coding region thereof, particularly a homolog or functional equivalent as shown in column 8 of Table I B, application no. 12, and being depicted in the same respective line as said Ss13044, and preferably the activity is increased plastidic, or
[62896] (b) a polypeptide comprising a polypeptide, a consensus sequence or at least a polypeptide motif as shown in the respective line in column 5 of Table II or in column 8 of Table IV, application no. 12, respectively, and being depicted in the same respective line as said Ssl3044, or a functional equivalent or a homolog thereof as depicted in column 8 of Table II, application no. 12, preferably a homolog or functional equivalent as depicted in column 8 of Table II B, application no. 12, and being depicted in the same respective line as said Ss13044, and preferably the activity is increased plastidic, whereby the respective line discloses in column 7 the fine chemical 2-hydroxytetracosenoic acid (preferably 2-hydroxynervonic acid).

[62897] Accordingly, in one embodiment, the molecule which activity is to be increased in the process of the invention is the gene product with an activity as a “ferredoxin”, preferably it is the molecule of section (a) or (b) of this paragraph.

[62898] In particular, it was observed that in plants, especially in Arabidopsis thaliana, increasing or generating the activity of a gene product plastidic with the activity of a “ferredoxin”, preferably being encoded by a gene comprising the nucleic acid sequence SEQ ID NO. 128024, preferably the coding region thereof, conferred the production of or the increase in 2-hydroxytetracosenoic acid (preferably 2-hydroxynervonic acid) compared with the wild type control.

[62899] The nucleic acid sequence of TTC0019 from Thermus thermophilus, e.g. as shown in the respective line in column 5 of Table I, application no. 12, has been published in E. And the activity of the gene product thereof is the activity of Sec-independent protein translocase subunit.

[62900] Accordingly, in one embodiment, the process of the present invention for producing 2-hydroxybehenic acid in a non-human organism, like a microorganism or a plant or a part thereof, comprises increasing or generating the activity of a gene product with the activity of a gene product conferring the activity of “Sec-independent protein translocase subunit”, especially from Thermus thermophilus or its functional equivalent or its homolog, e.g. the increase of
[62901] (a) a gene product of a gene comprising the nucleic acid molecule as shown in the respective line in column 5 of Table I (whereby the respective line discloses in column 7 the fine chemical 2-hydroxybehenic acid), application no. 12, preferably the coding region thereof, or a homolog or a fragment thereof, and being depicted in the same respective line as said TTC0019, or a functional equivalent or a homolog thereof as shown in column 8 of Table I, application no. 12, preferably the coding region thereof, particularly a homolog or functional equivalent as shown in column 8 of Table I B, application no. 12, and being depicted in the same respective line as said TTC0019, and preferably the activity is increased non-targeted, or
[62902] (b) a polypeptide comprising a polypeptide, a consensus sequence or at least a polypeptide motif as shown in the respective line in column 5 of Table II or in column 8 of Table IV, application no. 12, respectively, and being depicted in the same respective line as said TTC0019, or a functional equivalent or a homolog thereof as depicted in column 8 of Table II, application no. 12, preferably a homolog or functional equivalent as depicted in column 8 of Table II B, application no. 12, and being depicted in the same respective line as said TTC0019, and preferably the activity is increased non-targeted, whereby the respective line discloses in column 7 the fine chemical 2-hydroxybehenic acid.

[62903] Accordingly, in one embodiment, the molecule which activity is to be increased in the process of the invention is the gene product with an activity as a “Sec-independent protein translocase subunit”, preferably it is the molecule of section (a) or (b) of this paragraph.

[62904] In particular, it was observed that in plants, especially in Arabidopsis thaliana, increasing or generating the activity of a gene product non-targeted with the activity of a “Sec-independent protein translocase subunit”, preferably being encoded by a gene comprising the nucleic acid sequence SEQ ID NO. 12698, preferably the coding region thereof, conferred the production of or the increase in 2-hydroxybehenic acid compared with the wild type control.

[62905] The nucleic acid sequence of TTC0337 from Thermus thermophilus, e.g. as shown in the respective line in column 5 of Table I, application no. 12, has been published in E. And the activity of the gene product thereof is the activity of amino acid ABC transporter permease protein.

[62906] Accordingly, in one embodiment, the process of the present invention for producing 2-hydroxytetracosenoic acid (preferably 2-hydroxynervonic acid) in a non-human organism, like a microorganism or a plant or a part thereof, comprises increasing or generating the activity of a gene product with the activity of a gene product conferring the activity of “amino acid ABC transporter permease protein”, especially from Thermus thermophilus or its functional equivalent or its homolog, e.g. the increase of
[62907] (a) a gene product of a gene comprising the nucleic acid molecule as shown in the respective line in column 5 of Table I (whereby the respective line discloses in column 7 the fine chemical 2-hydroxytetracosenoic acid (preferably 2-hydroxynervonic acid)), application no. 12, preferably the coding region thereof, or a homolog or a fragment thereof, and being depicted in the same respective line as said TTC0337, or a functional equivalent or a homolog thereof as shown in column 8 of Table I, application no. 12, preferably the coding region thereof, particularly a homolog or functional equivalent as shown in column 8 of Table I B, application no. 12, and being depicted in the same respective line as said TTC0337, and preferably the activity is increased non-targeted, or
[62908] (b) a polypeptide comprising a polypeptide, a consensus sequence or at least a polypeptide motif as shown in the respective line in column 5 of Table II or in column 8 of Table IV, application no. 12, respectively, and being depicted in the same respective line as said TTC0337, or a functional equivalent or a homolog thereof as depicted in column 8 of Table II, application no. 12, preferably a homolog or functional equivalent as depicted in column 8 of Table II B, application no. 12, and being depicted in the same respective line as said TTC0337, and preferably the activity is increased non-targeted, whereby the respective line discloses in column 7 the fine chemical 2-hydroxytetracosenoic acid (preferably 2-hydroxynervonic acid).

[62909] Accordingly, in one embodiment, the molecule which activity is to be increased in the process of the invention is the gene product with an activity as a “amino acid ABC transporter permease protein”, preferably it is the molecule of section (a) or (b) of this paragraph.

[62910] In particular, it was observed that in plants, especially in Arabidopsis thaliana, increasing or generating the activity of a gene product non-targeted with the activity of a “amino acid ABC transporter permease protein”, preferably being encoded by a gene comprising the nucleic acid sequence SEQ ID NO. 61070, preferably the coding region thereof, conferred the production of or the increase in 2-hydroxytetracosenoic acid (preferably 2-hydroxynervonic acid) compared with the wild type control.

[62911] The nucleic acid sequence of TTC0917 from Thermus thermophilus, e.g. as shown in the respective line in column 5 of Table I, application no. 12, has been published in E. And the activity of the gene product thereof is the activity of metal-dependent hydrolase.

[62912] Accordingly, in one embodiment, the process of the present invention for producing cerebronic acid in a non-human organism, like a microorganism or a plant or a part thereof, comprises increasing or generating the activity of a gene product with the activity of a gene product conferring the activity of “metal-dependent hydrolase”, especially from Thermus thermophilus or its functional equivalent or its homolog, e.g. the increase of
[62913] (a) a gene product of a gene comprising the nucleic acid molecule as shown in the respective line in column 5 of Table I (whereby the respective line discloses in column 7 the fine chemical cerebronic acid), application no. 12, preferably the coding region thereof, or a homolog or a fragment thereof, and being depicted in the same respective line as said TTC0917, or a functional equivalent or a homolog thereof as shown in column 8 of Table I, application no. 12, preferably the coding region thereof, particularly a homolog or functional equivalent as shown in column 8 of Table I B, application no. 12, and being depicted in the same respective line as said TTC0917, and preferably the activity is increased non-targeted, or
[62914] (b) a polypeptide comprising a polypeptide, a consensus sequence or at least a polypeptide motif as shown in the respective line in column 5 of Table II or in column 8 of Table IV, application no. 12, respectively, and being depicted in the same respective line as said TTC0917, or a functional equivalent or a homolog thereof as depicted in column 8 of Table II, application no. 12, preferably a homolog or functional equivalent as depicted in column 8 of Table II B, application no. 12, and being depicted in the same respective line as said TTC0917, and preferably the activity is increased non-targeted, whereby the respective line discloses in column 7 the fine chemical cerebronic acid.

[62915] Accordingly, in one embodiment, the molecule which activity is to be increased in the process of the invention is the gene product with an activity as a “metal-dependent hydrolase”, preferably it is the molecule of section (a) or (b) of this paragraph.

[62916] In particular, it was observed that in plants, especially in Arabidopsis thaliana, increasing or generating the activity of a gene product non-targeted with the activity of a “metal-dependent hydrolase”, preferably being encoded by a gene comprising the nucleic acid sequence SEQ ID NO. 61553, preferably the coding region thereof, conferred the production of or the increase in cerebronic acid compared with the wild type control.

[62917] The nucleic acid sequence of TTC0917 from Thermus thermophilus, e.g. as shown in the respective line in column 5 of Table I, application no. 12, has been published in E. And the activity of the gene product thereof is the activity of metal-dependent hydrolase.

[62918] Accordingly, in one embodiment, the process of the present invention for producing hexadecadienoic acid in a non-human organism, like a microorganism or a plant or a part thereof, comprises increasing or generating the activity of a gene product with the activity of a gene product conferring the activity of “metal-dependent hydrolase”, especially from Thermus thermophilus or its functional equivalent or its homolog, e.g. the increase of
[62919] (a) a gene product of a gene comprising the nucleic acid molecule as shown in the respective line in column 5 of Table I (whereby the respective line discloses in column 7 the fine chemical hexadecadienoic acid), application no. 12, preferably the coding region thereof, or a homolog or a fragment thereof, and being depicted in the same respective line as said TTC0917, or a functional equivalent or a homolog thereof as shown in column 8 of Table I, application no. 12, preferably the coding region thereof, particularly a homolog or functional equivalent as shown in column 8 of Table I B, application no. 12, and being depicted in the same respective line as said TTC0917, and preferably the activity is increased non-targeted, or
[62920] (b) a polypeptide comprising a polypeptide, a consensus sequence or at least a polypeptide motif as shown in the respective line in column 5 of Table II or in column 8 of Table IV, application no. 12, respectively, and being depicted in the same respective line as said TTC0917, or a functional equivalent or a homolog thereof as depicted in column 8 of Table II, application no. 12, preferably a homolog or functional equivalent as depicted in column 8 of Table II B, application no. 12, and being depicted in the same respective line as said TTC0917, and preferably the activity is increased non-targeted, whereby the respective line discloses in column 7 the fine chemical hexadecadienoic acid.

[62921] Accordingly, in one embodiment, the molecule which activity is to be increased in the process of the invention is the gene product with an activity as a “metal-dependent hydrolase”, preferably it is the molecule of section (a) or (b) of this paragraph.

[62922] In particular, it was observed that in plants, especially in Arabidopsis thaliana, increasing or generating the activity of a gene product non-targeted with the activity of a “metal-dependent hydrolase”, preferably being encoded by a gene comprising the nucleic acid sequence SEQ ID NO. 61553, preferably the coding region thereof, conferred the production of or the increase in hexadecadienoic acid compared with the wild type control.

[62923] The nucleic acid sequence of TTC1193 from Thermus thermophilus, e.g. as shown in the respective line in column 5 of Table I, application no. 12, has been published in E. And the activity of the gene product thereof is the activity of multiple antibiotic resistance protein.

[62924] Accordingly, in one embodiment, the process of the present invention for producing 2-hydroxybehenic acid in a non-human organism, like a microorganism or a plant or a part thereof, comprises increasing or generating the activity of a gene product with the activity of a gene product conferring the activity of “multiple antibiotic resistance protein”, especially from Thermus thermophilus or its functional equivalent or its homolog, e.g. the increase of
[62925] (a) a gene product of a gene comprising the nucleic acid molecule as shown in the respective line in column 5 of Table I (whereby the respective line discloses in column 7 the fine chemical 2-hydroxybehenic acid), application no. 12, preferably the coding region thereof, or a homolog or a fragment thereof, and being depicted in the same respective line as said TTC1193, or a functional equivalent or a homolog thereof as shown in column 8 of Table I, application no. 12, preferably the coding region thereof, particularly a homolog or functional equivalent as shown in column 8 of Table I B, application no. 12, and being depicted in the same respective line as said TTC1193, and preferably the activity is increased non-targeted, or
[62926] (b) a polypeptide comprising a polypeptide, a consensus sequence or at least a polypeptide motif as shown in the respective line in column 5 of Table II or in column 8 of Table IV, application no. 12, respectively, and being depicted in the same respective line as said TTC1193, or a functional equivalent or a homolog thereof as depicted in column 8 of Table II, application no. 12, preferably a homolog or functional equivalent as depicted in column 8 of Table II B, application no. 12, and being depicted in the same respective line as said TTC1193, and preferably the activity is increased non-targeted, whereby the respective line discloses in column 7 the fine chemical 2-hydroxybehenic acid.

[62927] Accordingly, in one embodiment, the molecule which activity is to be increased in the process of the invention is the gene product with an activity as a “multiple antibiotic resistance protein”, preferably it is the molecule of section (a) or (b) of this paragraph.

[62928] In particular, it was observed that in plants, especially in Arabidopsis thaliana, increasing or generating the activity of a gene product non-targeted with the activity of a “multiple antibiotic resistance protein”, preferably being encoded by a gene comprising the nucleic acid sequence SEQ ID NO. 61723, preferably the coding region thereof, conferred the production of or the increase in 2-hydroxybehenic acid compared with the wild type control.

[62929] The nucleic acid sequence of TTC1386 from Thermus thermophilus, e.g. as shown in the respective line in column 5 of Table I, application no. 12, has been published in E. And the activity of the gene product thereof is the activity of TTC1386-protein.

[62930] Accordingly, in one embodiment, the process of the present invention for producing hexadecatrienoic acid in a non-human organism, like a microorganism or a plant or a part thereof, comprises increasing or generating the activity of a gene product with the activity of a gene product conferring the activity of “TTC1386-protein”, especially from Thermus thermophilus or its functional equivalent or its homolog, e.g. the increase of
[62931] (a) a gene product of a gene comprising the nucleic acid molecule as shown in the respective line in column 5 of Table I (whereby the respective line discloses in column 7 the fine chemical hexadecatrienoic acid), application no. 12, preferably the coding region thereof, or a homolog or a fragment thereof, and being depicted in the same respective line as said TTC1386, or a functional equivalent or a homolog thereof as shown in column 8 of Table I, application no. 12, preferably the coding region thereof, particularly a homolog or functional equivalent as shown in column 8 of Table I B, application no. 12, and being depicted in the same respective line as said TTC1386, and preferably the activity is increased non-targeted, or
[62932] (b) a polypeptide comprising a polypeptide, a consensus sequence or at least a polypeptide motif as shown in the respective line in column 5 of Table II or in column 8 of Table IV, application no. 12, respectively, and being depicted in the same respective line as said TTC1386, or a functional equivalent or a homolog thereof as depicted in column 8 of Table II, application no. 12, preferably a homolog or functional equivalent as depicted in column 8 of Table II B, application no. 12, and being depicted in the same respective line as said TTC1386, and preferably the activity is increased non-targeted, whereby the respective line discloses in column 7 the fine chemical hexadecatrienoic acid.

[62933] Accordingly, in one embodiment, the molecule which activity is to be increased in the process of the invention is the gene product with an activity as a “TTC1386-protein”, preferably it is the molecule of section (a) or (b) of this paragraph.

[62934] In particular, it was observed that in plants, especially in Arabidopsis thaliana, increasing or generating the activity of a gene product non-targeted with the activity of a “TTC1386-protein”, preferably being encoded by a gene comprising the nucleic acid sequence SEQ ID NO. 62079, preferably the coding region thereof, conferred the production of or the increase in hexadecatrienoic acid compared with the wild type control.

[62935] The nucleic acid sequence of TTC1550 from Thermus thermophilus, e.g. as shown in the respective line in column 5 of Table I, application no. 12, has been published in E. And the activity of the gene product thereof is the activity of homocitrate synthase.

[62936] Accordingly, in one embodiment, the process of the present invention for producing 2-hydroxybehenic acid in a non-human organism, like a microorganism or a plant or a part thereof, comprises increasing or generating the activity of a gene product with the activity of a gene product conferring the activity of “homocitrate synthase”, especially from Thermus thermophilus or its functional equivalent or its homolog, e.g. the increase of
[62937] (a) a gene product of a gene comprising the nucleic acid molecule as shown in the respective line in column 5 of Table I (whereby the respective line discloses in column 7 the fine chemical 2-hydroxybehenic acid), application no. 12, preferably the coding region thereof, or a homolog or a fragment thereof, and being depicted in the same respective line as said TTC1550, or a functional equivalent or a homolog thereof as shown in column 8 of Table I, application no. 12, preferably the coding region thereof, particularly a homolog or functional equivalent as shown in column 8 of Table I B, application no. 12, and being depicted in the same respective line as said TTC1550, and preferably the activity is increased non-targeted, or
[62938] (b) a polypeptide comprising a polypeptide, a consensus sequence or at least a polypeptide motif as shown in the respective line in column 5 of Table II or in column 8 of Table IV, application no. 12, respectively, and being depicted in the same respective line as said TTC1550, or a functional equivalent or a homolog thereof as depicted in column 8 of Table II, application no. 12, preferably a homolog or functional equivalent as depicted in column 8 of Table II B, application no. 12, and being depicted in the same respective line as said TTC1550, and preferably the activity is increased non-targeted, whereby the respective line discloses in column 7 the fine chemical 2-hydroxybehenic acid.

[62939] Accordingly, in one embodiment, the molecule which activity is to be increased in the process of the invention is the gene product with an activity as a “homocitrate synthase”, preferably it is the molecule of section (a) or (b) of this paragraph.

[62940] In particular, it was observed that in plants, especially in Arabidopsis thaliana, increasing or generating the activity of a gene product non-targeted with the activity of a “homocitrate synthase”, preferably being encoded by a gene comprising the nucleic acid sequence SEQ ID NO. 12974, preferably the coding region thereof, conferred the production of or the increase in 2-hydroxybehenic acid compared with the wild type control.

[62941] The nucleic acid sequence of Yar019c from Saccharomyces cerevisiae, e.g. as shown in the respective line in column 5 of Table I, application no. 12, has been published in A. And the activity of the gene product thereof is the activity of protein kinase.

[62942] Accordingly, in one embodiment, the process of the present invention for producing hexadecadienoic acid in a non-human organism, like a microorganism or a plant or a part thereof, comprises increasing or generating the activity of a gene product with the activity of a gene product conferring the activity of “protein kinase”, especially from Saccharomyces cerevisiae or its functional equivalent or its homolog, e.g. the increase of
[62943] (a) a gene product of a gene comprising the nucleic acid molecule as shown in the respective line in column 5 of Table I (whereby the respective line discloses in column 7 the fine chemical hexadecadienoic acid), application no. 12, preferably the coding region thereof, or a homolog or a fragment thereof, and being depicted in the same respective line as said Yar019c, or a functional equivalent or a homolog thereof as shown in column 8 of Table I, application no. 12, preferably the coding region thereof, particularly a homolog or functional equivalent as shown in column 8 of Table I B, application no. 12, and being depicted in the same respective line as said Yar019c, and preferably the activity is increased non-targeted, or
[62944] (b) a polypeptide comprising a polypeptide, a consensus sequence or at least a polypeptide motif as shown in the respective line in column 5 of Table II or in column 8 of Table IV, application no. 12, respectively, and being depicted in the same respective line as said Yar019c, or a functional equivalent or a homolog thereof as depicted in column 8 of Table II, application no. 12, preferably a homolog or functional equivalent as depicted in column 8 of Table II B, application no. 12, and being depicted in the same respective line as said Yar019c, and preferably the activity is increased non-targeted, whereby the respective line discloses in column 7 the fine chemical hexadecadienoic acid.

[62945] Accordingly, in one embodiment, the molecule which activity is to be increased in the process of the invention is the gene product with an activity as a “protein kinase”, preferably it is the molecule of section (a) or (b) of this paragraph.

[62946] In particular, it was observed that in plants, especially in Arabidopsis thaliana, increasing or generating the activity of a gene product non-targeted with the activity of a “protein kinase”, preferably being encoded by a gene comprising the nucleic acid sequence SEQ ID NO. 128139, preferably the coding region thereof, conferred the production of or the increase in hexadecadienoic acid compared with the wild type control.

[62947] The nucleic acid sequence of Yar019c from Saccharomyces cerevisiae, e.g. as shown in the respective line in column 5 of Table I, application no. 12, has been published in A. And the activity of the gene product thereof is the activity of protein kinase.

[62948] Accordingly, in one embodiment, the process of the present invention for producing hexadecatrienoic acid in a non-human organism, like a microorganism or a plant or a part thereof, comprises increasing or generating the activity of a gene product with the activity of a gene product conferring the activity of “protein kinase”, especially from Saccharomyces cerevisiae or its functional equivalent or its homolog, e.g. the increase of
[62949] (a) a gene product of a gene comprising the nucleic acid molecule as shown in the respective line in column 5 of Table I (whereby the respective line discloses in column 7 the fine chemical hexadecatrienoic acid), application no. 12, preferably the coding region thereof, or a homolog or a fragment thereof, and being depicted in the same respective line as said Yar019c, or a functional equivalent or a homolog thereof as shown in column 8 of Table I, application no. 12, preferably the coding region thereof, particularly a homolog or functional equivalent as shown in column 8 of Table I B, application no. 12, and being depicted in the same respective line as said Yar019c, and preferably the activity is increased non-targeted, or
[62950] (b) a polypeptide comprising a polypeptide, a consensus sequence or at least a polypeptide motif as shown in the respective line in column 5 of Table II or in column 8 of Table IV, application no. 12, respectively, and being depicted in the same respective line as said Yar019c, or a functional equivalent or a homolog thereof as depicted in column 8 of Table II, application no. 12, preferably a homolog or functional equivalent as depicted in column 8 of Table II B, application no. 12, and being depicted in the same respective line as said Yar019c, and preferably the activity is increased non-targeted, whereby the respective line discloses in column 7 the fine chemical hexadecatrienoic acid.

[62951] Accordingly, in one embodiment, the molecule which activity is to be increased in the process of the invention is the gene product with an activity as a “protein kinase”, preferably it is the molecule of section (a) or (b) of this paragraph.

[62952] In particular, it was observed that in plants, especially in Arabidopsis thaliana, increasing or generating the activity of a gene product non-targeted with the activity of a “protein kinase”, preferably being encoded by a gene comprising the nucleic acid sequence SEQ ID NO. 128139, preferably the coding region thereof, conferred the production of or the increase in hexadecatrienoic acid compared with the wild type control.

[62953] The nucleic acid sequence of Ybl021 c from Saccharomyces cerevisiae, e.g. as shown in the respective line in column 5 of Table I, application no. 12, has been published in A. And the activity of the gene product thereof is the activity of transcription factor.

[62954] Accordingly, in one embodiment, the process of the present invention for producing hexadecadienoic acid in a non-human organism, like a microorganism or a plant or a part thereof, comprises increasing or generating the activity of a gene product with the activity of a gene product conferring the activity of “transcription factor”, especially from Saccharomyces cerevisiae or its functional equivalent or its homolog, e.g. the increase of
[62955] (a) a gene product of a gene comprising the nucleic acid molecule as shown in the respective line in column 5 of Table I (whereby the respective line discloses in column 7 the fine chemical hexadecadienoic acid), application no. 12, preferably the coding region thereof, or a homolog or a fragment thereof, and being depicted in the same respective line as said Ybl021 c, or a functional equivalent or a homolog thereof as shown in column 8 of Table I, application no. 12, preferably the coding region thereof, particularly a homolog or functional equivalent as shown in column 8 of Table I B, application no. 12, and being depicted in the same respective line as said Ybl021c, and preferably the activity is increased non-targeted, or
[62956] (b) a polypeptide comprising a polypeptide, a consensus sequence or at least a polypeptide motif as shown in the respective line in column 5 of Table II or in column 8 of Table IV, application no. 12, respectively, and being depicted in the same respective line as said Ybl021c, or a functional equivalent or a homolog thereof as depicted in column 8 of Table II, application no. 12, preferably a homolog or functional equivalent as depicted in column 8 of Table II B, application no. 12, and being depicted in the same respective line as said Ybl021c, and preferably the activity is increased non-targeted, whereby the respective line discloses in column 7 the fine chemical hexadecadienoic acid.

[62957] Accordingly, in one embodiment, the molecule which activity is to be increased in the process of the invention is the gene product with an activity as a “transcription factor”, preferably it is the molecule of section (a) or (b) of this paragraph.

[62958] In particular, it was observed that in plants, especially in Arabidopsis thaliana, increasing or generating the activity of a gene product non-targeted with the activity of a “transcription factor”, preferably being encoded by a gene comprising the nucleic acid sequence SEQ ID NO. 62524, preferably the coding region thereof, conferred the production of or the increase in hexadecadienoic acid compared with the wild type control.

[62959] The nucleic acid sequence of Ybl021 c from Saccharomyces cerevisiae, e.g. as shown in the respective line in column 5 of Table I, application no. 12, has been published in A. And the activity of the gene product thereof is the activity of transcription factor.

[62960] Accordingly, in one embodiment, the process of the present invention for producing hexadecatrienoic acid in a non-human organism, like a microorganism or a plant or a part thereof, comprises increasing or generating the activity of a gene product with the activity of a gene product conferring the activity of “transcription factor”, especially from Saccharomyces cerevisiae or its functional equivalent or its homolog, e.g. the increase of
[62961] (a) a gene product of a gene comprising the nucleic acid molecule as shown in the respective line in column 5 of Table I (whereby the respective line discloses in column 7 the fine chemical hexadecatrienoic acid), application no. 12, preferably the coding region thereof, or a homolog or a fragment thereof, and being depicted in the same respective line as said Ybl021 c, or a functional equivalent or a homolog thereof as shown in column 8 of Table I, application no. 12, preferably the coding region thereof, particularly a homolog or functional equivalent as shown in column 8 of Table I B, application no. 12, and being depicted in the same respective line as said Ybl021c, and preferably the activity is increased non-targeted, or
[62962] (b) a polypeptide comprising a polypeptide, a consensus sequence or at least a polypeptide motif as shown in the respective line in column 5 of Table II or in column 8 of Table IV, application no. 12, respectively, and being depicted in the same respective line as said Ybl021c, or a functional equivalent or a homolog thereof as depicted in column 8 of Table II, application no. 12, preferably a homolog or functional equivalent as depicted in column 8 of Table II B, application no. 12, and being depicted in the same respective line as said Ybl021c, and preferably the activity is increased non-targeted, whereby the respective line discloses in column 7 the fine chemical hexadecatrienoic acid.

[62963] Accordingly, in one embodiment, the molecule which activity is to be increased in the process of the invention is the gene product with an activity as a “transcription factor”, preferably it is the molecule of section (a) or (b) of this paragraph.

[62964] In particular, it was observed that in plants, especially in Arabidopsis thaliana, increasing or generating the activity of a gene product non-targeted with the activity of a “transcription factor”, preferably being encoded by a gene comprising the nucleic acid sequence SEQ ID NO. 62524, preferably the coding region thereof, conferred the production of or the increase in hexadecatrienoic acid compared with the wild type control.

[62965] The nucleic acid sequence of Ybr160w from Saccharomyces cerevisiae, e.g. as shown in the respective line in column 5 of Table I, application no. 12, has been published in A. And the activity of the gene product thereof is the activity of cell division control protein.

[62966] Accordingly, in one embodiment, the process of the present invention for producing hexadecatrienoic acid in a non-human organism, like a microorganism or a plant or a part thereof, comprises increasing or generating the activity of a gene product with the activity of a gene product conferring the activity of “cell division control protein”, especially from Saccharomyces cerevisiae or its functional equivalent or its homolog, e.g. the increase of
[62967] (a) a gene product of a gene comprising the nucleic acid molecule as shown in the respective line in column 5 of Table I (whereby the respective line discloses in column 7 the fine chemical hexadecatrienoic acid), application no. 12, preferably the coding region thereof, or a homolog or a fragment thereof, and being depicted in the same respective line as said Ybr160w, or a functional equivalent or a homolog thereof as shown in column 8 of Table I, application no. 12, preferably the coding region thereof, particularly a homolog or functional equivalent as shown in column 8 of Table I B, application no. 12, and being depicted in the same respective line as said Ybr160w, and preferably the activity is increased non-targeted, or
[62968] (b) a polypeptide comprising a polypeptide, a consensus sequence or at least a polypeptide motif as shown in the respective line in column 5 of Table II or in column 8 of Table IV, application no. 12, respectively, and being depicted in the same respective line as said Ybr160w, or a functional equivalent or a homolog thereof as depicted in column 8 of Table II, application no. 12, preferably a homolog or functional equivalent as depicted in column 8 of Table II B, application no. 12, and being depicted in the same respective line as said Ybr160w, and preferably the activity is increased non-targeted, whereby the respective line discloses in column 7 the fine chemical hexadecatrienoic acid.

[62969] Accordingly, in one embodiment, the molecule which activity is to be increased in the process of the invention is the gene product with an activity as a “cell division control protein”, preferably it is the molecule of section (a) or (b) of this paragraph.

[62970] In particular, it was observed that in plants, especially in Arabidopsis thaliana, increasing or generating the activity of a gene product non-targeted with the activity of a “cell division control protein”, preferably being encoded by a gene comprising the nucleic acid sequence SEQ ID NO. 62717, preferably the coding region thereof, conferred the production of or the increase in hexadecatrienoic acid compared with the wild type control.

[62971] The nucleic acid sequence of Ycl027w from Saccharomyces cerevisiae, e.g. as shown in the respective line in column 5 of Table I, application no. 12, has been published in A. And the activity of the gene product thereof is the activity of ycl027w-protein.

[62972] Accordingly, in one embodiment, the process of the present invention for producing cerebronic acid in a non-human organism, like a microorganism or a plant or a part thereof, comprises increasing or generating the activity of a gene product with the activity of a gene product conferring the activity of “ycl027w-protein”, especially from Saccharomyces cerevisiae or its functional equivalent or its homolog, e.g. the increase of
[62973] (a) a gene product of a gene comprising the nucleic acid molecule as shown in the respective line in column 5 of Table I (whereby the respective line discloses in column 7 the fine chemical cerebronic acid), application no. 12, preferably the coding region thereof, or a homolog or a fragment thereof, and being depicted in the same respective line as said Ycl027w, or a functional equivalent or a homolog thereof as shown in column 8 of Table I, application no. 12, preferably the coding region thereof, particularly a homolog or functional equivalent as shown in column 8 of Table I B, application no. 12, and being depicted in the same respective line as said Ycl027w, and preferably the activity is increased plastidic, or
[62974] (b) a polypeptide comprising a polypeptide, a consensus sequence or at least a polypeptide motif as shown in the respective line in column 5 of Table II or in column 8 of Table IV, application no. 12, respectively, and being depicted in the same respective line as said Ycl027w, or a functional equivalent or a homolog thereof as depicted in column 8 of Table II, application no. 12, preferably a homolog or functional equivalent as depicted in column 8 of Table II B, application no. 12, and being depicted in the same respective line as said Ycl027w, and preferably the activity is increased plastidic, whereby the respective line discloses in column 7 the fine chemical cerebronic acid.

[62975] Accordingly, in one embodiment, the molecule which activity is to be increased in the process of the invention is the gene product with an activity as a “ycl027w-protein”, preferably it is the molecule of section (a) or (b) of this paragraph.

[62976] In particular, it was observed that in plants, especially in Arabidopsis thaliana, increasing or generating the activity of a gene product plastidic with the activity of a “ycl027w-protein”, preferably being encoded by a gene comprising the nucleic acid sequence SEQ ID NO. 96980, preferably the coding region thereof, conferred the production of or the increase in cerebronic acid compared with the wild type control.

[62977] The nucleic acid sequence of Ycl027w from Saccharomyces cerevisiae, e.g. as shown in the respective line in column 5 of Table I, application no. 12, has been published in A. And the activity of the gene product thereof is the activity of ycl027w-protein.

[62978] Accordingly, in one embodiment, the process of the present invention for producing 2-hydroxytetracosenoic acid (preferably 2-hydroxynervonic acid) in a non-human organism, like a microorganism or a plant or a part thereof, comprises increasing or generating the activity of a gene product with the activity of a gene product conferring the activity of “ycl027w-protein”, especially from Saccharomyces cerevisiae or its functional equivalent or its homolog, e.g. the increase of
[62979] (a) a gene product of a gene comprising the nucleic acid molecule as shown in the respective line in column 5 of Table I (whereby the respective line discloses in column 7 the fine chemical 2-hydroxytetracosenoic acid (preferably 2-hydroxynervonic acid)), application no. 12, preferably the coding region thereof, or a homolog or a fragment thereof, and being depicted in the same respective line as said Ycl027w, or a functional equivalent or a homolog thereof as shown in column 8 of Table I, application no. 12, preferably the coding region thereof, particularly a homolog or functional equivalent as shown in column 8 of Table I B, application no. 12, and being depicted in the same respective line as said Ycl027w, and preferably the activity is increased plastidic, or
[62980] (b) a polypeptide comprising a polypeptide, a consensus sequence or at least a polypeptide motif as shown in the respective line in column 5 of Table II or in column 8 of Table IV, application no. 12, respectively, and being depicted in the same respective line as said Ycl027w, or a functional equivalent or a homolog thereof as depicted in column 8 of Table II, application no. 12, preferably a homolog or functional equivalent as depicted in column 8 of Table II B, application no. 12, and being depicted in the same respective line as said Ycl027w, and preferably the activity is increased plastidic, whereby the respective line discloses in column 7 the fine chemical 2-hydroxytetracosenoic acid (preferably 2-hydroxynervonic acid).

[62981] Accordingly, in one embodiment, the molecule which activity is to be increased in the process of the invention is the gene product with an activity as a “ycl027w-protein”, preferably it is the molecule of section (a) or (b) of this paragraph.

[62982] In particular, it was observed that in plants, especially in Arabidopsis thaliana, increasing or generating the activity of a gene product plastidic with the activity of a “ycl027w-protein”, preferably being encoded by a gene comprising the nucleic acid sequence SEQ ID NO. 96980, preferably the coding region thereof, conferred the production of or the increase in 2-hydroxytetracosenoic acid (preferably 2-hydroxynervonic acid) compared with the wild type control.

[62983] The nucleic acid sequence of Ycl049c from Saccharomyces cerevisiae, e.g. as shown in the respective line in column 5 of Table I, application no. 12, has been published in A. And the activity of the gene product thereof is the activity of ycl049c-protein.

[62984] Accordingly, in one embodiment, the process of the present invention for producing 2-hydroxypalmitic acid in a non-human organism, like a microorganism or a plant or a part thereof, comprises increasing or generating the activity of a gene product with the activity of a gene product conferring the activity of “ycl049c-protein”, especially from Saccharomyces cerevisiae or its functional equivalent or its homolog, e.g. the increase of
[62985] (a) a gene product of a gene comprising the nucleic acid molecule as shown in the respective line in column 5 of Table I (whereby the respective line discloses in column 7 the fine chemical 2-hydroxypalmitic acid), application no. 12, preferably the coding region thereof, or a homolog or a fragment thereof, and being depicted in the same respective line as said Ycl049c, or a functional equivalent or a homolog thereof as shown in column 8 of Table I, application no. 12, preferably the coding region thereof, particularly a homolog or functional equivalent as shown in column 8 of Table I B, application no. 12, and being depicted in the same respective line as said Ycl049c, and preferably the activity is increased plastidic, or
[62986] (b) a polypeptide comprising a polypeptide, a consensus sequence or at least a polypeptide motif as shown in the respective line in column 5 of Table II or in column 8 of Table IV, application no. 12, respectively, and being depicted in the same respective line as said Ycl049c, or a functional equivalent or a homolog thereof as depicted in column 8 of Table II, application no. 12, preferably a homolog or functional equivalent as depicted in column 8 of Table II B, application no. 12, and being depicted in the same respective line as said Ycl049c, and preferably the activity is increased plastidic, whereby the respective line discloses in column 7 the fine chemical 2-hydroxypalmitic acid.

[62987] Accordingly, in one embodiment, the molecule which activity is to be increased in the process of the invention is the gene product with an activity as a “ycl049c-protein”, preferably it is the molecule of section (a) or (b) of this paragraph.

[62988] In particular, it was observed that in plants, especially in Arabidopsis thaliana, increasing or generating the activity of a gene product plastidic with the activity of a “ycl049c-protein”, preferably being encoded by a gene comprising the nucleic acid sequence SEQ ID NO. 113220, preferably the coding region thereof, conferred the production of or the increase in 2-hydroxypalmitic acid compared with the wild type control.

[62989] The nucleic acid sequence of Ydl022w from Saccharomyces cerevisiae, e.g. as shown in the respective line in column 5 of Table I, application no. 12, has been published in A. And the activity of the gene product thereof is the activity of glycerol-3-phosphate dehydrogenase.

[62990] Accordingly, in one embodiment, the process of the present invention for producing oleic acid in a non-human organism, like a microorganism or a plant or a part thereof, comprises increasing or generating the activity of a gene product with the activity of a gene product conferring the activity of “glycerol-3-phosphate dehydrogenase”, especially from Saccharomyces cerevisiae or its functional equivalent or its homolog, e.g. the increase of
[62991] (a) a gene product of a gene comprising the nucleic acid molecule as shown in the respective line in column 5 of Table I (whereby the respective line discloses in column 7 the fine chemical oleic acid), application no. 12, preferably the coding region thereof, or a homolog or a fragment thereof, and being depicted in the same respective line as said Ydl022w, or a functional equivalent or a homolog thereof as shown in column 8 of Table I, application no. 12, preferably the coding region thereof, particularly a homolog or functional equivalent as shown in column 8 of Table I B, application no. 12, and being depicted in the same respective line as said Ydl022w, and preferably the activity is increased non-targeted, or
[62992] (b) a polypeptide comprising a polypeptide, a consensus sequence or at least a polypeptide motif as shown in the respective line in column 5 of Table II or in column 8 of Table IV, application no. 12, respectively, and being depicted in the same respective line as said Ydl022w, or a functional equivalent or a homolog thereof as depicted in column 8 of Table II, application no. 12, preferably a homolog or functional equivalent as depicted in column 8 of Table II B, application no. 12, and being depicted in the same respective line as said Ydl022w, and preferably the activity is increased non-targeted, whereby the respective line discloses in column 7 the fine chemical oleic acid.

[62993] Accordingly, in one embodiment, the molecule which activity is to be increased in the process of the invention is the gene product with an activity as a “glycerol-3-phosphate dehydrogenase”, preferably it is the molecule of section (a) or (b) of this paragraph.

[62994] In particular, it was observed that in plants, especially in Arabidopsis thaliana, increasing or generating the activity of a gene product non-targeted with the activity of a “glycerol-3-phosphate dehydrogenase”, preferably being encoded by a gene comprising the nucleic acid sequence SEQ ID NO. 119408, preferably the coding region thereof, conferred the production of or the increase in oleic acid compared with the wild type control.

[62995] The nucleic acid sequence of Ydl066w from Saccharomyces cerevisiae, e.g. as shown in the respective line in column 5 of Table I, application no. 12, has been published in A. And the activity of the gene product thereof is the activity of isocitrate dehydrogenase.

[62996] Accordingly, in one embodiment, the process of the present invention for producing eicosanoic acid in a non-human organism, like a microorganism or a plant or a part thereof, comprises increasing or generating the activity of a gene product with the activity of a gene product conferring the activity of “isocitrate dehydrogenase”, especially from Saccharomyces cerevisiae or its functional equivalent or its homolog, e.g. the increase of
[62997] (a) a gene product of a gene comprising the nucleic acid molecule as shown in the respective line in column 5 of Table I (whereby the respective line discloses in column 7 the fine chemical eicosanoic acid), application no. 12, preferably the coding region thereof, or a homolog or a fragment thereof, and being depicted in the same respective line as said Ydl066w, or a functional equivalent or a homolog thereof as shown in column 8 of Table I, application no. 12, preferably the coding region thereof, particularly a homolog or functional equivalent as shown in column 8 of Table I B, application no. 12, and being depicted in the same respective line as said Ydl066w, and preferably the activity is increased non-targeted, or
[62998] (b) a polypeptide comprising a polypeptide, a consensus sequence or at least a polypeptide motif as shown in the respective line in column 5 of Table II or in column 8 of Table IV, application no. 12, respectively, and being depicted in the same respective line as said Ydl066w, or a functional equivalent or a homolog thereof as depicted in column 8 of Table II, application no. 12, preferably a homolog or functional equivalent as depicted in column 8 of Table II B, application no. 12, and being depicted in the same respective line as said Ydl066w, and preferably the activity is increased non-targeted, whereby the respective line discloses in column 7 the fine chemical eicosanoic acid.

[62999] Accordingly, in one embodiment, the molecule which activity is to be increased in the process of the invention is the gene product with an activity as a “isocitrate dehydrogenase”, preferably it is the molecule of section (a) or (b) of this paragraph.

[63000] In particular, it was observed that in plants, especially in Arabidopsis thaliana, increasing or generating the activity of a gene product non-targeted with the activity of a “isocitrate dehydrogenase”, preferably being encoded by a gene comprising the nucleic acid sequence SEQ ID NO. 122228, preferably the coding region thereof, conferred the production of or the increase in eicosanoic acid compared with the wild type control.

[63001] The nucleic acid sequence of Ydl066w from Saccharomyces cerevisiae, e.g. as shown in the respective line in column 5 of Table I, application no. 12, has been published in A. And the activity of the gene product thereof is the activity of isocitrate dehydrogenase.

[63002] Accordingly, in one embodiment, the process of the present invention for producing heptadecanoic acid in a non-human organism, like a microorganism or a plant or a part thereof, comprises increasing or generating the activity of a gene product with the activity of a gene product conferring the activity of “isocitrate dehydrogenase”, especially from Saccharomyces cerevisiae or its functional equivalent or its homolog, e.g. the increase of
[63003] (a) a gene product of a gene comprising the nucleic acid molecule as shown in the respective line in column 5 of Table I (whereby the respective line discloses in column 7 the fine chemical heptadecanoic acid), application no. 12, preferably the coding region thereof, or a homolog or a fragment thereof, and being depicted in the same respective line as said Ydl066w, or a functional equivalent or a homolog thereof as shown in column 8 of Table I, application no. 12, preferably the coding region thereof, particularly a homolog or functional equivalent as shown in column 8 of Table I B, application no. 12, and being depicted in the same respective line as said Ydl066w, and preferably the activity is increased non-targeted, or
[63004] (b) a polypeptide comprising a polypeptide, a consensus sequence or at least a polypeptide motif as shown in the respective line in column 5 of Table II or in column 8 of Table IV, application no. 12, respectively, and being depicted in the same respective line as said Ydl066w, or a functional equivalent or a homolog thereof as depicted in column 8 of Table II, application no. 12, preferably a homolog or functional equivalent as depicted in column 8 of Table II B, application no. 12, and being depicted in the same respective line as said Ydl066w, and preferably the activity is increased non-targeted, whereby the respective line discloses in column 7 the fine chemical heptadecanoic acid.

[63005] Accordingly, in one embodiment, the molecule which activity is to be increased in the process of the invention is the gene product with an activity as a “isocitrate dehydrogenase”, preferably it is the molecule of section (a) or (b) of this paragraph.

[63006] In particular, it was observed that in plants, especially in Arabidopsis thaliana, increasing or generating the activity of a gene product non-targeted with the activity of a “isocitrate dehydrogenase”, preferably being encoded by a gene comprising the nucleic acid sequence SEQ ID NO. 122228, preferably the coding region thereof, conferred the production of or the increase in heptadecanoic acid compared with the wild type control.

[63007] The nucleic acid sequence of Ydl126c from Saccharomyces cerevisiae, e.g. as shown in the respective line in column 5 of Table I, application no. 12, has been published in A. And the activity of the gene product thereof is the activity of cell division control protein.

[63008] Accordingly, in one embodiment, the process of the present invention for producing hexadecadienoic acid in a non-human organism, like a microorganism or a plant or a part thereof, comprises increasing or generating the activity of a gene product with the activity of a gene product conferring the activity of “cell division control protein”, especially from Saccharomyces cerevisiae or its functional equivalent or its homolog, e.g. the increase of
[63009] (a) a gene product of a gene comprising the nucleic acid molecule as shown in the respective line in column 5 of Table I (whereby the respective line discloses in column 7 the fine chemical hexadecadienoic acid), application no. 12, preferably the coding region thereof, or a homolog or a fragment thereof, and being depicted in the same respective line as said Ydl126c, or a functional equivalent or a homolog thereof as shown in column 8 of Table I, application no. 12, preferably the coding region thereof, particularly a homolog or functional equivalent as shown in column 8 of Table I B, application no. 12, and being depicted in the same respective line as said Ydl126c, and preferably the activity is increased non-targeted, or
[63010] (b) a polypeptide comprising a polypeptide, a consensus sequence or at least a polypeptide motif as shown in the respective line in column 5 of Table II or in column 8 of Table IV, application no. 12, respectively, and being depicted in the same respective line as said Ydl126c, or a functional equivalent or a homolog thereof as depicted in column 8 of Table II, application no. 12, preferably a homolog or functional equivalent as depicted in column 8 of Table II B, application no. 12, and being depicted in the same respective line as said Ydl126c, and preferably the activity is increased non-targeted, whereby the respective line discloses in column 7 the fine chemical hexadecadienoic acid.

[63011] Accordingly, in one embodiment, the molecule which activity is to be increased in the process of the invention is the gene product with an activity as a “cell division control protein”, preferably it is the molecule of section (a) or (b) of this paragraph.

[63012] In particular, it was observed that in plants, especially in Arabidopsis thaliana, increasing or generating the activity of a gene product non-targeted with the activity of a “cell division control protein”, preferably being encoded by a gene comprising the nucleic acid sequence SEQ ID NO. 120045, preferably the coding region thereof, conferred the production of or the increase in hexadecadienoic acid compared with the wild type control.

[63013] The nucleic acid sequence of Ydl126c from Saccharomyces cerevisiae, e.g. as shown in the respective line in column 5 of Table I, application no. 12, has been published in A. And the activity of the gene product thereof is the activity of cell division control protein.

[63014] Accordingly, in one embodiment, the process of the present invention for producing hexadecatrienoic acid in a non-human organism, like a microorganism or a plant or a part thereof, comprises increasing or generating the activity of a gene product with the activity of a gene product conferring the activity of “cell division control protein”, especially from Saccharomyces cerevisiae or its functional equivalent or its homolog, e.g. the increase of
[63015] (a) a gene product of a gene comprising the nucleic acid molecule as shown in the respective line in column 5 of Table I (whereby the respective line discloses in column 7 the fine chemical hexadecatrienoic acid), application no. 12, preferably the coding region thereof, or a homolog or a fragment thereof, and being depicted in the same respective line as said Ydl126c, or a functional equivalent or a homolog thereof as shown in column 8 of Table I, application no. 12, preferably the coding region thereof, particularly a homolog or functional equivalent as shown in column 8 of Table I B, application no. 12, and being depicted in the same respective line as said Ydl126c, and preferably the activity is increased non-targeted, or
[63016] (b) a polypeptide comprising a polypeptide, a consensus sequence or at least a polypeptide motif as shown in the respective line in column 5 of Table II or in column 8 of Table IV, application no. 12, respectively, and being depicted in the same respective line as said Ydl126c, or a functional equivalent or a homolog thereof as depicted in column 8 of Table II, application no. 12, preferably a homolog or functional equivalent as depicted in column 8 of Table II B, application no. 12, and being depicted in the same respective line as said Ydl126c, and preferably the activity is increased non-targeted, whereby the respective line discloses in column 7 the fine chemical hexadecatrienoic acid.

[63017] Accordingly, in one embodiment, the molecule which activity is to be increased in the process of the invention is the gene product with an activity as a “cell division control protein”, preferably it is the molecule of section (a) or (b) of this paragraph.

[63018] In particular, it was observed that in plants, especially in Arabidopsis thaliana, increasing or generating the activity of a gene product non-targeted with the activity of a “cell division control protein”, preferably being encoded by a gene comprising the nucleic acid sequence SEQ ID NO. 120045, preferably the coding region thereof, conferred the production of or the increase in hexadecatrienoic acid compared with the wild type control.

[63019] The nucleic acid sequence of Ydl131w from Saccharomyces cerevisiae, e.g. as shown in the respective line in column 5 of Table I, application no. 12, has been published in A. And the activity of the gene product thereof is the activity of homocitrate synthase.

[63020] Accordingly, in one embodiment, the process of the present invention for producing 2-hydroxybehenic acid in a non-human organism, like a microorganism or a plant or a part thereof, comprises increasing or generating the activity of a gene product with the activity of a gene product conferring the activity of “homocitrate synthase”, especially from Saccharomyces cerevisiae or its functional equivalent or its homolog, e.g. the increase of
[63021] (a) a gene product of a gene comprising the nucleic acid molecule as shown in the respective line in column 5 of Table I (whereby the respective line discloses in column 7 the fine chemical 2-hydroxybehenic acid), application no. 12, preferably the coding region thereof, or a homolog or a fragment thereof, and being depicted in the same respective line as said Ydl131w, or a functional equivalent or a homolog thereof as shown in column 8 of Table I, application no. 12, preferably the coding region thereof, particularly a homolog or functional equivalent as shown in column 8 of Table I B, application no. 12, and being depicted in the same respective line as said Ydl131w, and preferably the activity is increased plastidic, or
[63022] (b) a polypeptide comprising a polypeptide, a consensus sequence or at least a polypeptide motif as shown in the respective line in column 5 of Table II or in column 8 of Table IV, application no. 12, respectively, and being depicted in the same respective line as said Ydl131w, or a functional equivalent or a homolog thereof as depicted in column 8 of Table II, application no. 12, preferably a homolog or functional equivalent as depicted in column 8 of Table II B, application no. 12, and being depicted in the same respective line as said Ydl131w, and preferably the activity is increased plastidic, whereby the respective line discloses in column 7 the fine chemical 2-hydroxybehenic acid.

[63023] Accordingly, in one embodiment, the molecule which activity is to be increased in the process of the invention is the gene product with an activity as a “homocitrate synthase”, preferably it is the molecule of section (a) or (b) of this paragraph.

[63024] In particular, it was observed that in plants, especially in Arabidopsis thaliana, increasing or generating the activity of a gene product plastidic with the activity of a “homocitrate synthase”, preferably being encoded by a gene comprising the nucleic acid sequence SEQ ID NO. 113224, preferably the coding region thereof, conferred the production of or the increase in 2-hydroxybehenic acid compared with the wild type control.

[63025] The nucleic acid sequence of Ydr035w from Saccharomyces cerevisiae, e.g. as shown in the respective line in column 5 of Table I, application no. 12, has been published in A. And the activity of the gene product thereof is the activity of phospho-2-dehydro-3-deoxyheptonate aldolase.

[63026] Accordingly, in one embodiment, the process of the present invention for producing behenic acid in a non-human organism, like a microorganism or a plant or a part thereof, comprises increasing or generating the activity of a gene product with the activity of a gene product conferring the activity of “phospho-2-dehydro-3-deoxyheptonate aldolase”, especially from Saccharomyces cerevisiae or its functional equivalent or its homolog, e.g. the increase of
[63027] (a) a gene product of a gene comprising the nucleic acid molecule as shown in the respective line in column 5 of Table I (whereby the respective line discloses in column 7 the fine chemical behenic acid), application no. 12, preferably the coding region thereof, or a homolog or a fragment thereof, and being depicted in the same respective line as said Ydr035w, or a functional equivalent or a homolog thereof as shown in column 8 of Table I, application no. 12, preferably the coding region thereof, particularly a homolog or functional equivalent as shown in column 8 of Table I B, application no. 12, and being depicted in the same respective line as said Ydr035w, and preferably the activity is increased plastidic, or
[63028] (b) a polypeptide comprising a polypeptide, a consensus sequence or at least a polypeptide motif as shown in the respective line in column 5 of Table II or in column 8 of Table IV, application no. 12, respectively, and being depicted in the same respective line as said Ydr035w, or a functional equivalent or a homolog thereof as depicted in column 8 of Table II, application no. 12, preferably a homolog or functional equivalent as depicted in column 8 of Table II B, application no. 12, and being depicted in the same respective line as said Ydr035w, and preferably the activity is increased plastidic, whereby the respective line discloses in column 7 the fine chemical behenic acid.

[63029] Accordingly, in one embodiment, the molecule which activity is to be increased in the process of the invention is the gene product with an activity as a “phospho-2-dehydro-3-deoxyheptonate aldolase”, preferably it is the molecule of section (a) or (b) of this paragraph.

[63030] In particular, it was observed that in plants, especially in Arabidopsis thaliana, increasing or generating the activity of a gene product plastidic with the activity of a “phospho-2-dehydro-3-deoxyheptonate aldolase”, preferably being encoded by a gene comprising the nucleic acid sequence SEQ ID NO. 113330, preferably the coding region thereof, conferred the production of or the increase in behenic acid compared with the wild type control.

[63031] The nucleic acid sequence of Ydr077w from Saccharomyces cerevisiae, e.g. as shown in the respective line in column 5 of Table I, application no. 12, has been published in A. And the activity of the gene product thereof is the activity of cell wall protein.

[63032] Accordingly, in one embodiment, the process of the present invention for producing 2-hydroxytetracosenoic acid (preferably 2-hydroxynervonic acid) in a non-human organism, like a microorganism or a plant or a part thereof, comprises increasing or generating the activity of a gene product with the activity of a gene product conferring the activity of “cell wall protein”, especially from Saccharomyces cerevisiae or its functional equivalent or its homolog, e.g. the increase of
[63033] (a) a gene product of a gene comprising the nucleic acid molecule as shown in the respective line in column 5 of Table I (whereby the respective line discloses in column 7 the fine chemical 2-hydroxytetracosenoic acid (preferably 2-hydroxynervonic acid)), application no. 12, preferably the coding region thereof, or a homolog or a fragment thereof, and being depicted in the same respective line as said Ydr077w, or a functional equivalent or a homolog thereof as shown in column 8 of Table I, application no. 12, preferably the coding region thereof, particularly a homolog or functional equivalent as shown in column 8 of Table I B, application no. 12, and being depicted in the same respective line as said Ydr077w, and preferably the activity is increased plastidic, or
[63034] (b) a polypeptide comprising a polypeptide, a consensus sequence or at least a polypeptide motif as shown in the respective line in column 5 of Table II or in column 8 of Table IV, application no. 12, respectively, and being depicted in the same respective line as said Ydr077w, or a functional equivalent or a homolog thereof as depicted in column 8 of Table II, application no. 12, preferably a homolog or functional equivalent as depicted in column 8 of Table II B, application no. 12, and being depicted in the same respective line as said Ydr077w, and preferably the activity is increased plastidic, whereby the respective line discloses in column 7 the fine chemical 2-hydroxytetracosenoic acid (preferably 2-hydroxynervonic acid).

[63035] Accordingly, in one embodiment, the molecule which activity is to be increased in the process of the invention is the gene product with an activity as a “cell wall protein”, preferably it is the molecule of section (a) or (b) of this paragraph.

[63036] In particular, it was observed that in plants, especially in Arabidopsis thaliana, increasing or generating the activity of a gene product plastidic with the activity of a “cell wall protein”, preferably being encoded by a gene comprising the nucleic acid sequence SEQ ID NO. 128148, preferably the coding region thereof, conferred the production of or the increase in 2-hydroxytetracosenoic acid (preferably 2-hydroxynervonic acid) compared with the wild type control.

[63037] The nucleic acid sequence of Ydr131c from Saccharomyces cerevisiae, e.g. as shown in the respective line in column 5 of Table I, application no. 12, has been published in A. And the activity of the gene product thereof is the activity of F-box protein.

[63038] Accordingly, in one embodiment, the process of the present invention for producing 2-hydroxytetracosenoic acid (preferably 2-hydroxynervonic acid) in a non-human organism, like a microorganism or a plant or a part thereof, comprises increasing or generating the activity of a gene product with the activity of a gene product conferring the activity of “F-box protein”, especially from Saccharomyces cerevisiae or its functional equivalent or its homolog, e.g. the increase of
[63039] (a) a gene product of a gene comprising the nucleic acid molecule as shown in the respective line in column 5 of Table I (whereby the respective line discloses in column 7 the fine chemical 2-hydroxytetracosenoic acid (preferably 2-hydroxynervonic acid)), application no. 12, preferably the coding region thereof, or a homolog or a fragment thereof, and being depicted in the same respective line as said Ydr131c, or a functional equivalent or a homolog thereof as shown in column 8 of Table I, application no. 12, preferably the coding region thereof, particularly a homolog or functional equivalent as shown in column 8 of Table I B, application no. 12, and being depicted in the same respective line as said Ydr131c, and preferably the activity is increased plastidic, or
[63040] (b) a polypeptide comprising a polypeptide, a consensus sequence or at least a polypeptide motif as shown in the respective line in column 5 of Table II or in column 8 of Table IV, application no. 12, respectively, and being depicted in the same respective line as said Ydr131c, or a functional equivalent or a homolog thereof as depicted in column 8 of Table II, application no. 12, preferably a homolog or functional equivalent as depicted in column 8 of Table II B, application no. 12, and being depicted in the same respective line as said Ydr131c, and preferably the activity is increased plastidic, whereby the respective line discloses in column 7 the fine chemical 2-hydroxytetracosenoic acid (preferably 2-hydroxynervonic acid).

[63041] Accordingly, in one embodiment, the molecule which activity is to be increased in the process of the invention is the gene product with an activity as a “F-box protein”, preferably it is the molecule of section (a) or (b) of this paragraph.

[63042] In particular, it was observed that in plants, especially in Arabidopsis thaliana, increasing or generating the activity of a gene product plastidic with the activity of a “F-box protein”, preferably being encoded by a gene comprising the nucleic acid sequence SEQ ID NO. 14706, preferably the coding region thereof, conferred the production of or the increase in 2-hydroxytetracosenoic acid (preferably 2-hydroxynervonic acid) compared with the wild type control.

[63043] The nucleic acid sequence of Ydr273w from Saccharomyces cerevisiae, e.g. as shown in the respective line in column 5 of Table I, application no. 12, has been published in A. And the activity of the gene product thereof is the activity of ydr273w-protein.

[63044] Accordingly, in one embodiment, the process of the present invention for producing cerebronic acid in a non-human organism, like a microorganism or a plant or a part thereof, comprises increasing or generating the activity of a gene product with the activity of a gene product conferring the activity of “ydr273w-protein”, especially from Saccharomyces cerevisiae or its functional equivalent or its homolog, e.g. the increase of
[63045] (a) a gene product of a gene comprising the nucleic acid molecule as shown in the respective line in column 5 of Table I (whereby the respective line discloses in column 7 the fine chemical cerebronic acid), application no. 12, preferably the coding region thereof, or a homolog or a fragment thereof, and being depicted in the same respective line as said Ydr273w, or a functional equivalent or a homolog thereof as shown in column 8 of Table I, application no. 12, preferably the coding region thereof, particularly a homolog or functional equivalent as shown in column 8 of Table I B, application no. 12, and being depicted in the same respective line as said Ydr273w, and preferably the activity is increased plastidic, or
[63046] (b) a polypeptide comprising a polypeptide, a consensus sequence or at least a polypeptide motif as shown in the respective line in column 5 of Table II or in column 8 of Table IV, application no. 12, respectively, and being depicted in the same respective line as said Ydr273w, or a functional equivalent or a homolog thereof as depicted in column 8 of Table II, application no. 12, preferably a homolog or functional equivalent as depicted in column 8 of Table II B, application no. 12, and being depicted in the same respective line as said Ydr273w, and preferably the activity is increased plastidic, whereby the respective line discloses in column 7 the fine chemical cerebronic acid.

[63047] Accordingly, in one embodiment, the molecule which activity is to be increased in the process of the invention is the gene product with an activity as a “ydr273w-protein”, preferably it is the molecule of section (a) or (b) of this paragraph.

[63048] In particular, it was observed that in plants, especially in Arabidopsis thaliana, increasing or generating the activity of a gene product plastidic with the activity of a “ydr273w-protein”, preferably being encoded by a gene comprising the nucleic acid sequence SEQ ID NO. 90159, preferably the coding region thereof, conferred the production of or the increase in cerebronic acid compared with the wild type control.

[63049] The nucleic acid sequence of Ydr273w from Saccharomyces cerevisiae, e.g. as shown in the respective line in column 5 of Table I, application no. 12, has been published in A. And the activity of the gene product thereof is the activity of ydr273w-protein.

[63050] Accordingly, in one embodiment, the process of the present invention for producing 2-hydroxytetracosenoic acid (preferably 2-hydroxynervonic acid) in a non-human organism, like a microorganism or a plant or a part thereof, comprises increasing or generating the activity of a gene product with the activity of a gene product conferring the activity of “ydr273w-protein”, especially from Saccharomyces cerevisiae or its functional equivalent or its homolog, e.g. the increase of
[63051] (a) a gene product of a gene comprising the nucleic acid molecule as shown in the respective line in column 5 of Table I (whereby the respective line discloses in column 7 the fine chemical 2-hydroxytetracosenoic acid (preferably 2-hydroxynervonic acid)), application no. 12, preferably the coding region thereof, or a homolog or a fragment thereof, and be-ing depicted in the same respective line as said Ydr273w, or a functional equivalent or a homolog thereof as shown in column 8 of Table I, application no. 12, preferably the coding region thereof, particularly a homolog or functional equivalent as shown in column 8 of Table I B, application no. 12, and being depicted in the same respective line as said Ydr273w, and preferably the activity is increased plastidic, or
[63052] (b) a polypeptide comprising a polypeptide, a consensus sequence or at least a polypeptide motif as shown in the respective line in column 5 of Table II or in column 8 of Table IV, application no. 12, respectively, and being depicted in the same respective line as said Ydr273w, or a functional equivalent or a homolog thereof as depicted in column 8 of Table II, application no. 12, preferably a homolog or functional equivalent as depicted in column 8 of Table II B, application no. 12, and being depicted in the same respective line as said Ydr273w, and preferably the activity is increased plastidic, whereby the respective line discloses in column 7 the fine chemical 2-hydroxytetracosenoic acid (preferably 2-hydroxynervonic acid).

[63053] Accordingly, in one embodiment, the molecule which activity is to be increased in the process of the invention is the gene product with an activity as a “ydr273w-protein”, preferably it is the molecule of section (a) or (b) of this paragraph.

[63054] In particular, it was observed that in plants, especially in Arabidopsis thaliana, increasing or generating the activity of a gene product plastidic with the activity of a “ydr273w-protein”, preferably being encoded by a gene comprising the nucleic acid sequence SEQ ID NO. 90159, preferably the coding region thereof, conferred the production of or the increase in 2-hydroxytetracosenoic acid (preferably 2-hydroxynervonic acid) compared with the wild type control.

[63055] The nucleic acid sequence of Ydr339c from Saccharomyces cerevisiae, e.g. as shown in the respective line in column 5 of Table I, application no. 12, has been published in A. And the activity of the gene product thereof is the activity of ydr339c-protein.

[63056] Accordingly, in one embodiment, the process of the present invention for producing hexadecatrienoic acid in a non-human organism, like a microorganism or a plant or a part thereof, comprises increasing or generating the activity of a gene product with the activity of a gene product conferring the activity of “ydr339c-protein”, especially from Saccharomyces cerevisiae or its functional equivalent or its homolog, e.g. the increase of
[63057] (a) a gene product of a gene comprising the nucleic acid molecule as shown in the respective line in column 5 of Table I (whereby the respective line discloses in column 7 the fine chemical hexadecatrienoic acid), application no. 12, preferably the coding region thereof, or a homolog or a fragment thereof, and being depicted in the same respective line as said Ydr339c, or a functional equivalent or a homolog thereof as shown in column 8 of Table I, application no. 12, preferably the coding region thereof, particularly a homolog or functional equivalent as shown in column 8 of Table I B, application no. 12, and being depicted in the same respective line as said Ydr339c, and preferably the activity is increased plastidic, or
[63058] (b) a polypeptide comprising a polypeptide, a consensus sequence or at least a polypeptide motif as shown in the respective line in column 5 of Table II or in column 8 of Table IV, application no. 12, respectively, and being depicted in the same respective line as said Ydr339c, or a functional equivalent or a homolog thereof as depicted in column 8 of Table II, application no. 12, preferably a homolog or functional equivalent as depicted in column 8 of Table II B, application no. 12, and being depicted in the same respective line as said Ydr339c, and preferably the activity is increased plastidic, whereby the respective line discloses in column 7 the fine chemical hexadecatrienoic acid.

[63059] Accordingly, in one embodiment, the molecule which activity is to be increased in the process of the invention is the gene product with an activity as a “ydr339c-protein”, preferably it is the molecule of section (a) or (b) of this paragraph.

[63060] In particular, it was observed that in plants, especially in Arabidopsis thaliana, increasing or generating the activity of a gene product plastidic with the activity of a “ydr339c-protein”, preferably being encoded by a gene comprising the nucleic acid sequence SEQ ID NO. 120241, preferably the coding region thereof, conferred the production of or the increase in hexadecatrienoic acid compared with the wild type control.

[63061] The nucleic acid sequence of Yel046c from Saccharomyces cerevisiae, e.g. as shown in the respective line in column 5 of Table I, application no. 12, has been published in A. And the activity of the gene product thereof is the activity of aldolase.

[63062] Accordingly, in one embodiment, the process of the present invention for producing heptadecanoic acid in a non-human organism, like a microorganism or a plant or a part thereof, comprises increasing or generating the activity of a gene product with the activity of a gene product conferring the activity of “aldolase”, especially from Saccharomyces cerevisiae or its functional equivalent or its homolog, e.g. the increase of
[63063] (a) a gene product of a gene comprising the nucleic acid molecule as shown in the respective line in column 5 of Table I (whereby the respective line discloses in column 7 the fine chemical heptadecanoic acid), application no. 12, preferably the coding region thereof, or a homolog or a fragment thereof, and being depicted in the same respective line as said Yel046c, or a functional equivalent or a homolog thereof as shown in column 8 of Table I, application no. 12, preferably the coding region thereof, particularly a homolog or functional equivalent as shown in column 8 of Table I B, application no. 12, and being depicted in the same respective line as said Yel046c, and preferably the activity is increased plastidic, or
[63064] (b) a polypeptide comprising a polypeptide, a consensus sequence or at least a polypeptide motif as shown in the respective line in column 5 of Table II or in column 8 of Table IV, application no. 12, respectively, and being depicted in the same respective line as said Yel046c, or a functional equivalent or a homolog thereof as depicted in column 8 of Table II, application no. 12, preferably a homolog or functional equivalent as depicted in column 8 of Table II B, application no. 12, and being depicted in the same respective line as said Yel046c, and preferably the activity is increased plastidic, whereby the respective line discloses in column 7 the fine chemical heptadecanoic acid.

[63065] Accordingly, in one embodiment, the molecule which activity is to be increased in the process of the invention is the gene product with an activity as a “aldolase”, preferably it is the molecule of section (a) or (b) of this paragraph.

[63066] In particular, it was observed that in plants, especially in Arabidopsis thaliana, increasing or generating the activity of a gene product plastidic with the activity of a “aldolase”, preferably being encoded by a gene comprising the nucleic acid sequence SEQ ID NO. 128511, preferably the coding region thereof, conferred the production of or the increase in heptadecanoic acid compared with the wild type control.

[63067] The nucleic acid sequence of Yer112w from Saccharomyces cerevisiae, e.g. as shown in the respective line in column 5 of Table I, application no. 12, has been published in A. And the activity of the gene product thereof is the activity of small nuclear ribonucleoprotein .

[63068] Accordingly, in one embodiment, the process of the present invention for producing myristic acid in a non-human organism, like a microorganism or a plant or a part thereof, comprises increasing or generating the activity of a gene product with the activity of a gene product conferring the activity of “small nuclear ribonucleoprotein”, especially from Saccharomyces cerevisiae or its functional equivalent or its homolog, e.g. the increase of
[63069] (a) a gene product of a gene comprising the nucleic acid molecule as shown in the respective line in column 5 of Table I (whereby the respective line discloses in column 7 the fine chemical myristic acid), application no. 12, preferably the coding region thereof, or a homolog or a fragment thereof, and being depicted in the same respective line as said Yer112w, or a functional equivalent or a homolog thereof as shown in column 8 of Table I, application no. 12, preferably the coding region thereof, particularly a homolog or functional equivalent as shown in column 8 of Table I B, application no. 12, and being depicted in the same respective line as said Yer112w, and preferably the activity is increased non-targeted, or
[63070] (b) a polypeptide comprising a polypeptide, a consensus sequence or at least a polypeptide motif as shown in the respective line in column 5 of Table II or in column 8 of Table IV, application no. 12, respectively, and being depicted in the same respective line as said Yer112w, or a functional equivalent or a homolog thereof as depicted in column 8 of Table II, application no. 12, preferably a homolog or functional equivalent as depicted in column 8 of Table II B, application no. 12, and being depicted in the same respective line as said Yer112w, and preferably the activity is increased non-targeted, whereby the respective line discloses in column 7 the fine chemical myristic acid.

[63071] Accordingly, in one embodiment, the molecule which activity is to be increased in the process of the invention is the gene product with an activity as a “small nuclear ribonucleoprotein”, preferably it is the molecule of section (a) or (b) of this paragraph.

[63072] In particular, it was observed that in plants, especially in Arabidopsis thaliana, increasing or generating the activity of a gene product non-targeted with the activity of a “small nuclear ribonucleoprotein”, preferably being encoded by a gene comprising the nucleic acid sequence SEQ ID NO. 113598, preferably the coding region thereof, conferred the production of or the increase in myristic acid compared with the wild type control.

[63073] The nucleic acid sequence of Yfl016c from Saccharomyces cerevisiae, e.g. as shown in the respective line in column 5 of Table I, application no. 12, has been published in A. And the activity of the gene product thereof is the activity of molecular chaperone portein.

[63074] Accordingly, in one embodiment, the process of the present invention for producing hexadecadienoic acid in a non-human organism, like a microorganism or a plant or a part thereof, comprises increasing or generating the activity of a gene product with the activity of a gene product conferring the activity of “molecular chaperone portein”, especially from Saccharomyces cerevisiae or its functional equivalent or its homolog, e.g. the increase of
[63075] (a) a gene product of a gene comprising the nucleic acid molecule as shown in the respective line in column 5 of Table I (whereby the respective line discloses in column 7 the fine chemical hexadecadienoic acid), application no. 12, preferably the coding region thereof, or a homolog or a fragment thereof, and being depicted in the same respective line as said Yfl016c, or a functional equivalent or a homolog thereof as shown in column 8 of Table I, application no. 12, preferably the coding region thereof, particularly a homolog or functional equivalent as shown in column 8 of Table I B, application no. 12, and being depicted in the same respective line as said Yfl016c, and preferably the activity is increased non-targeted, or
[63076] (b) a polypeptide comprising a polypeptide, a consensus sequence or at least a polypeptide motif as shown in the respective line in column 5 of Table II or in column 8 of Table IV, application no. 12, respectively, and being depicted in the same respective line as said Yfl016c, or a functional equivalent or a homolog thereof as depicted in column 8 of Table II, application no. 12, preferably a homolog or functional equivalent as depicted in column 8 of Table II B, application no. 12, and being depicted in the same respective line as said Yfl016c, and preferably the activity is increased non-targeted, whereby the respective line discloses in column 7 the fine chemical hexadecadienoic acid.

[63077] Accordingly, in one embodiment, the molecule which activity is to be increased in the process of the invention is the gene product with an activity as a “molecular chaperone portein”, preferably it is the molecule of section (a) or (b) of this paragraph.

[63078] In particular, it was observed that in plants, especially in Arabidopsis thaliana, increasing or generating the activity of a gene product non-targeted with the activity of a “molecular chaperone portein”, preferably being encoded by a gene comprising the nucleic acid sequence SEQ ID NO. 63807, preferably the coding region thereof, conferred the production of or the increase in hexadecadienoic acid compared with the wild type control.

[63079] The nucleic acid sequence of Yfl016c from Saccharomyces cerevisiae, e.g. as shown in the respective line in column 5 of Table I, application no. 12, has been published in A. And the activity of the gene product thereof is the activity of molecular chaperone portein.

[63080] Accordingly, in one embodiment, the process of the present invention for producing hexadecatrienoic acid in a non-human organism, like a microorganism or a plant or a part thereof, comprises increasing or generating the activity of a gene product with the activity of a gene product conferring the activity of “molecular chaperone portein”, especially from Saccharomyces cerevisiae or its functional equivalent or its homolog, e.g. the increase of
[63081] (a) a gene product of a gene comprising the nucleic acid molecule as shown in the respective line in column 5 of Table I (whereby the respective line discloses in column 7 the fine chemical hexadecatrienoic acid), application no. 12, preferably the coding region thereof, or a homolog or a fragment thereof, and being depicted in the same respective line as said Yfl016c, or a functional equivalent or a homolog thereof as shown in column 8 of Table I, application no. 12, preferably the coding region thereof, particularly a homolog or functional equivalent as shown in column 8 of Table I B, application no. 12, and being depicted in the same respective line as said Yfl016c, and preferably the activity is increased non-targeted, or
[63082] (b) a polypeptide comprising a polypeptide, a consensus sequence or at least a polypeptide motif as shown in the respective line in column 5 of Table II or in column 8 of Table IV, application no. 12, respectively, and being depicted in the same respective line as said Yfl016c, or a functional equivalent or a homolog thereof as depicted in column 8 of Table II, application no. 12, preferably a homolog or functional equivalent as depicted in column 8 of Table II B, application no. 12, and being depicted in the same respective line as said Yfl016c, and preferably the activity is increased non-targeted, whereby the respective line discloses in column 7 the fine chemical hexadecatrienoic acid.

[63083] Accordingly, in one embodiment, the molecule which activity is to be increased in the process of the invention is the gene product with an activity as a “molecular chaperone portein”, preferably it is the molecule of section (a) or (b) of this paragraph.

[63084] In particular, it was observed that in plants, especially in Arabidopsis thaliana, increasing or generating the activity of a gene product non-targeted with the activity of a “molecular chaperone portein”, preferably being encoded by a gene comprising the nucleic acid sequence SEQ ID NO. 63807, preferably the coding region thereof, conferred the production of or the increase in hexadecatrienoic acid compared with the wild type control.

[63085] The nucleic acid sequence of Yfl019c from Saccharomyces cerevisiae, e.g. as shown in the respective line in column 5 of Table I, application no. 12, has been published in A. And the activity of the gene product thereof is the activity of YFL019C-protein.

[63086] Accordingly, in one embodiment, the process of the present invention for producing 2-hydroxybehenic acid in a non-human organism, like a microorganism or a plant or a part thereof, comprises increasing or generating the activity of a gene product with the activity of a gene product conferring the activity of “YFL019C-protein”, especially from Saccharomyces cerevisiae or its functional equivalent or its homolog, e.g. the increase of
[63087] (a) a gene product of a gene comprising the nucleic acid molecule as shown in the respective line in column 5 of Table I (whereby the respective line discloses in column 7 the fine chemical 2-hydroxybehenic acid), application no. 12, preferably the coding region thereof, or a homolog or a fragment thereof, and being depicted in the same respective line as said Yfl019c, or a functional equivalent or a homolog thereof as shown in column 8 of Table I, application no. 12, preferably the coding region thereof, particularly a homolog or functional equivalent as shown in column 8 of Table I B, application no. 12, and being depicted in the same respective line as said Yfl019c, and preferably the activity is increased non-targeted, or
[63088] (b) a polypeptide comprising a polypeptide, a consensus sequence or at least a polypeptide motif as shown in the respective line in column 5 of Table II or in column 8 of Table IV, application no. 12, respectively, and being depicted in the same respective line as said Yfl019c, or a functional equivalent or a homolog thereof as depicted in column 8 of Table II, application no. 12, preferably a homolog or functional equivalent as depicted in column 8 of Table II B, application no. 12, and being depicted in the same respective line as said Yfl019c, and preferably the activity is increased non-targeted, whereby the respective line discloses in column 7 the fine chemical 2-hydroxybehenic acid.

[63089] Accordingly, in one embodiment, the molecule which activity is to be increased in the process of the invention is the gene product with an activity as a “YFL019C-protein”, preferably it is the molecule of section (a) or (b) of this paragraph.

[63090] In particular, it was observed that in plants, especially in Arabidopsis thaliana, increasing or generating the activity of a gene product non-targeted with the activity of a “YFL019C-protein”, preferably being encoded by a gene comprising the nucleic acid sequence SEQ ID NO. 64144, preferably the coding region thereof, conferred the production of or the increase in 2-hydroxybehenic acid compared with the wild type control.

[63091] The nucleic acid sequence of Yfl019c from Saccharomyces cerevisiae, e.g. as shown in the respective line in column 5 of Table I, application no. 12, has been published in A. And the activity of the gene product thereof is the activity of YFL019C-protein.

[63092] Accordingly, in one embodiment, the process of the present invention for producing 2-hydroxypalmitic acid in a non-human organism, like a microorganism or a plant or a part thereof, comprises increasing or generating the activity of a gene product with the activity of a gene product conferring the activity of “YFL0190-protein”, especially from Saccharomyces cerevisiae or its functional equivalent or its homolog, e.g. the increase of
[63093] (a) a gene product of a gene comprising the nucleic acid molecule as shown in the respective line in column 5 of Table I (whereby the respective line discloses in column 7 the fine chemical 2-hydroxypalmitic acid), application no. 12, preferably the coding region thereof, or a homolog or a fragment thereof, and being depicted in the same respective line as said Yfl019c, or a functional equivalent or a homolog thereof as shown in column 8 of Table I, application no. 12, preferably the coding region thereof, particularly a homolog or functional equivalent as shown in column 8 of Table I B, application no. 12, and being depicted in the same respective line as said Yfl019c, and preferably the activity is increased non-targeted, or
[63094] (b) a polypeptide comprising a polypeptide, a consensus sequence or at least a polypeptide motif as shown in the respective line in column 5 of Table II or in column 8 of Table IV, application no. 12, respectively, and being depicted in the same respective line as said Yfl019c, or a functional equivalent or a homolog thereof as depicted in column 8 of Table II, application no. 12, preferably a homolog or functional equivalent as depicted in column 8 of Table II B, application no. 12, and being depicted in the same respective line as said Yfl019c, and preferably the activity is increased non-targeted, whereby the respective line discloses in column 7 the fine chemical 2-hydroxypalmitic acid.

[63095] Accordingly, in one embodiment, the molecule which activity is to be increased in the process of the invention is the gene product with an activity as a “YFL019C-protein”, preferably it is the molecule of section (a) or (b) of this paragraph.

[63096] In particular, it was observed that in plants, especially in Arabidopsis thaliana, increasing or generating the activity of a gene product non-targeted with the activity of a “YFL019C-protein”, preferably being encoded by a gene comprising the nucleic acid sequence SEQ ID NO. 64144, preferably the coding region thereof, conferred the production of or the increase in 2-hydroxypalmitic acid compared with the wild type control.

[63097] The nucleic acid sequence of Yfl030w from Saccharomyces cerevisiae, e.g. as shown in the respective line in column 5 of Table I, application no. 12, has been published in A. And the activity of the gene product thereof is the activity of aminotransferase.

[63098] Accordingly, in one embodiment, the process of the present invention for producing hexadecadienoic acid in a non-human organism, like a microorganism or a plant or a part thereof, comprises increasing or generating the activity of a gene product with the activity of a gene product conferring the activity of “aminotransferase”, especially from Saccharomyces cerevisiae or its functional equivalent or its homolog, e.g. the increase of
[63099] (a) a gene product of a gene comprising the nucleic acid molecule as shown in the respective line in column 5 of Table I (whereby the respective line discloses in column 7 the fine chemical hexadecadienoic acid), application no. 12, preferably the coding region thereof, or a homolog or a fragment thereof, and being depicted in the same respective line as said Yfl030w, or a functional equivalent or a homolog thereof as shown in column 8 of Table I, application no. 12, preferably the coding region thereof, particularly a homolog or functional equivalent as shown in column 8 of Table I B, application no. 12, and being depicted in the same respective line as said Yfl030w, and preferably the activity is increased plastidic, or
[63100] (b) a polypeptide comprising a polypeptide, a consensus sequence or at least a polypeptide motif as shown in the respective line in column 5 of Table II or in column 8 of Table IV, application no. 12, respectively, and being depicted in the same respective line as said Yfl030w, or a functional equivalent or a homolog thereof as depicted in column 8 of Table II, application no. 12, preferably a homolog or functional equivalent as depicted in column 8 of Table II B, application no. 12, and being depicted in the same respective line as said Yfl030w, and preferably the activity is increased plastidic, whereby the respective line discloses in column 7 the fine chemical hexadecadienoic acid.

[63101] Accordingly, in one embodiment, the molecule which activity is to be increased in the process of the invention is the gene product with an activity as a “aminotransferase”, preferably it is the molecule of section (a) or (b) of this paragraph.

[63102] In particular, it was observed that in plants, especially in Arabidopsis thaliana, increasing or generating the activity of a gene product plastidic with the activity of a “aminotransferase”, preferably being encoded by a gene comprising the nucleic acid sequence SEQ ID NO. 90189, preferably the coding region thereof, conferred the production of or the increase in hexadecadienoic acid compared with the wild type control.

[63103] The nucleic acid sequence of Ygl237c from Saccharomyces cerevisiae, e.g. as shown in the respective line in column 5 of Table I, application no. 12, has been published in A. And the activity of the gene product thereof is the activity of ygl237c-protein.

[63104] Accordingly, in one embodiment, the process of the present invention for producing hexadecatrienoic acid in a non-human organism, like a microorganism or a plant or a part thereof, comprises increasing or generating the activity of a gene product with the activity of a gene product conferring the activity of “ygl237c-protein”, especially from Saccharomyces cerevisiae or its functional equivalent or its homolog, e.g. the increase of
[63105] (a) a gene product of a gene comprising the nucleic acid molecule as shown in the respective line in column 5 of Table I (whereby the respective line discloses in column 7 the fine chemical hexadecatrienoic acid), application no. 12, preferably the coding region thereof, or a homolog or a fragment thereof, and being depicted in the same respective line as said Ygl237c, or a functional equivalent or a homolog thereof as shown in column 8 of Table I, application no. 12, preferably the coding region thereof, particularly a homolog or functional equivalent as shown in column 8 of Table I B, application no. 12, and being depicted in the same respective line as said Ygl237c, and preferably the activity is increased non-targeted, or
[63106] (b) a polypeptide comprising a polypeptide, a consensus sequence or at least a polypeptide motif as shown in the respective line in column 5 of Table II or in column 8 of Table IV, application no. 12, respectively, and being depicted in the same respective line as said Ygl237c, or a functional equivalent or a homolog thereof as depicted in column 8 of Table II, application no. 12, preferably a homolog or functional equivalent as depicted in column 8 of Table II B, application no. 12, and being depicted in the same respective line as said Ygl237c, and preferably the activity is increased non-targeted, whereby the respective line discloses in column 7 the fine chemical hexadecatrienoic acid.

[63107] Accordingly, in one embodiment, the molecule which activity is to be increased in the process of the invention is the gene product with an activity as a “ygl237c-protein”, preferably it is the molecule of section (a) or (b) of this paragraph.

[63108] In particular, it was observed that in plants, especially in Arabidopsis thaliana, increasing or generating the activity of a gene product non-targeted with the activity of a “ygl237c-protein”, preferably being encoded by a gene comprising the nucleic acid sequence SEQ ID NO. 64177, preferably the coding region thereof, conferred the production of or the increase in hexadecatrienoic acid compared with the wild type control.

[63109] The nucleic acid sequence of Ygr104c from Saccharomyces cerevisiae, e.g. as shown in the respective line in column 5 of Table I, application no. 12, has been published in A. And the activity of the gene product thereof is the activity of YGR104C-protein.

[63110] Accordingly, in one embodiment, the process of the present invention for producing eicosanoic acid in a non-human organism, like a microorganism or a plant or a part thereof, comprises increasing or generating the activity of a gene product with the activity of a gene product conferring the activity of “YGR104C-protein”, especially from Saccharomyces cerevisiae or its functional equivalent or its homolog, e.g. the increase of
[63111] (a) a gene product of a gene comprising the nucleic acid molecule as shown in the respective line in column 5 of Table I (whereby the respective line discloses in column 7 the fine chemical eicosanoic acid), application no. 12, preferably the coding region thereof, or a homolog or a fragment thereof, and being depicted in the same respective line as said Ygr104c, or a functional equivalent or a homolog thereof as shown in column 8 of Table I, application no. 12, preferably the coding region thereof, particularly a homolog or functional equivalent as shown in column 8 of Table I B, application no. 12, and being depicted in the same respective line as said Ygr104c, and preferably the activity is increased non-targeted, or
[63112] (b) a polypeptide comprising a polypeptide, a consensus sequence or at least a polypeptide motif as shown in the respective line in column 5 of Table II or in column 8 of Table IV, application no. 12, respectively, and being depicted in the same respective line as said Ygr104c, or a functional equivalent or a homolog thereof as depicted in column 8 of Table II, application no. 12, preferably a homolog or functional equivalent as depicted in column 8 of Table II B, application no. 12, and being depicted in the same respective line as said Ygr104c, and preferably the activity is increased non-targeted, whereby the respective line discloses in column 7 the fine chemical eicosanoic acid.

[63113] Accordingly, in one embodiment, the molecule which activity is to be increased in the process of the invention is the gene product with an activity as a “YGR104C-protein”, preferably it is the molecule of section (a) or (b) of this paragraph.

[63114] In particular, it was observed that in plants, especially in Arabidopsis thaliana, increasing or generating the activity of a gene product non-targeted with the activity of a “YGR104C-protein”, preferably being encoded by a gene comprising the nucleic acid sequence SEQ ID NO. 117482, preferably the coding region thereof, conferred the production of or the increase in eicosanoic acid compared with the wild type control.

[63115] The nucleic acid sequence of Ygr175c from Saccharomyces cerevisiae, e.g. as shown in the respective line in column 5 of Table I, application no. 12, has been published in A. And the activity of the gene product thereof is the activity of squalene monooxygenase.

[63116] Accordingly, in one embodiment, the process of the present invention for producing cerebronic acid in a non-human organism, like a microorganism or a plant or a part thereof, comprises increasing or generating the activity of a gene product with the activity of a gene product conferring the activity of “squalene monooxygenase”, especially from Saccharomyces cerevisiae or its functional equivalent or its homolog, e.g. the increase of
[63117] (a) a gene product of a gene comprising the nucleic acid molecule as shown in the respective line in column 5 of Table I (whereby the respective line discloses in column 7 the fine chemical cerebronic acid), application no. 12, preferably the coding region thereof, or a homolog or a fragment thereof, and being depicted in the same respective line as said Ygr175c, or a functional equivalent or a homolog thereof as shown in column 8 of Table I, application no. 12, preferably the coding region thereof, particularly a homolog or functional equivalent as shown in column 8 of Table I B, application no. 12, and being depicted in the same respective line as said Ygr175c, and preferably the activity is increased plastidic, or
[63118] (b) a polypeptide comprising a polypeptide, a consensus sequence or at least a polypeptide motif as shown in the respective line in column 5 of Table II or in column 8 of Table IV, application no. 12, respectively, and being depicted in the same respective line as said Ygr175c, or a functional equivalent or a homolog thereof as depicted in column 8 of Table II, application no. 12, preferably a homolog or functional equivalent as depicted in column 8 of Table II B, application no. 12, and being depicted in the same respective line as said Ygr175c, and preferably the activity is increased plastidic, whereby the respective line discloses in column 7 the fine chemical cerebronic acid.

[63119] Accordingly, in one embodiment, the molecule which activity is to be increased in the process of the invention is the gene product with an activity as a “squalene monooxygenase”, preferably it is the molecule of section (a) or (b) of this paragraph.

[63120] In particular, it was observed that in plants, especially in Arabidopsis thaliana, increasing or generating the activity of a gene product plastidic with the activity of a “squalene monooxygenase”, preferably being encoded by a gene comprising the nucleic acid sequence SEQ ID NO. 64218, preferably the coding region thereof, conferred the production of or the increase in cerebronic acid compared with the wild type control.

[63121] The nucleic acid sequence of Ygr286c from Saccharomyces cerevisiae, e.g. as shown in the respective line in column 5 of Table I, application no. 12, has been published in A. And the activity of the gene product thereof is the activity of biotin synthase.

[63122] Accordingly, in one embodiment, the process of the present invention for producing hexadecadienoic acid in a non-human organism, like a microorganism or a plant or a part thereof, comprises increasing or generating the activity of a gene product with the activity of a gene product conferring the activity of “biotin synthase”, especially from Saccharomyces cerevisiae or its functional equivalent or its homolog, e.g. the increase of
[63123] (a) a gene product of a gene comprising the nucleic acid molecule as shown in the respective line in column 5 of Table I (whereby the respective line discloses in column 7 the fine chemical hexadecadienoic acid), application no. 12, preferably the coding region thereof, or a homolog or a fragment thereof, and being depicted in the same respective line as said Ygr286c, or a functional equivalent or a homolog thereof as shown in column 8 of Table I, application no. 12, preferably the coding region thereof, particularly a homolog or functional equivalent as shown in column 8 of Table I B, application no. 12, and being depicted in the same respective line as said Ygr286c, and preferably the activity is increased plastidic, or
[63124] (b) a polypeptide comprising a polypeptide, a consensus sequence or at least a polypeptide motif as shown in the respective line in column 5 of Table II or in column 8 of Table IV, application no. 12, respectively, and being depicted in the same respective line as said Ygr286c, or a functional equivalent or a homolog thereof as depicted in column 8 of Table II, application no. 12, preferably a homolog or functional equivalent as depicted in column 8 of Table II B, application no. 12, and being depicted in the same respective line as said Ygr286c, and preferably the activity is increased plastidic, whereby the respective line discloses in column 7 the fine chemical hexadecadienoic acid.

[63125] Accordingly, in one embodiment, the molecule which activity is to be increased in the process of the invention is the gene product with an activity as a “biotin synthase”, preferably it is the molecule of section (a) or (b) of this paragraph.

[63126] In particular, it was observed that in plants, especially in Arabidopsis thaliana, increasing or generating the activity of a gene product plastidic with the activity of a “biotin synthase”, preferably being encoded by a gene comprising the nucleic acid sequence SEQ ID NO. 128655, preferably the coding region thereof, conferred the production of or the increase in hexadecadienoic acid compared with the wild type control.

[63127] The nucleic acid sequence of Yhr033w from Saccharomyces cerevisiae, e.g. as shown in the respective line in column 5 of Table I, application no. 12, has been published in A. And the activity of the gene product thereof is the activity of yhr033w-protein.

[63128] Accordingly, in one embodiment, the process of the present invention for producing cerebronic acid in a non-human organism, like a microorganism or a plant or a part thereof, comprises increasing or generating the activity of a gene product with the activity of a gene product conferring the activity of “yhr033w-protein”, especially from Saccharomyces cerevisiae or its functional equivalent or its homolog, e.g. the increase of
[63129] (a) a gene product of a gene comprising the nucleic acid molecule as shown in the respective line in column 5 of Table I (whereby the respective line discloses in column 7 the fine chemical cerebronic acid), application no. 12, preferably the coding region thereof, or a homolog or a fragment thereof, and being depicted in the same respective line as said Yhr033w, or a functional equivalent or a homolog thereof as shown in column 8 of Table I, application no. 12, preferably the coding region thereof, particularly a homolog or functional equivalent as shown in column 8 of Table I B, application no. 12, and being depicted in the same respective line as said Yhr033w, and preferably the activity is increased plastidic, or
[63130] (b) a polypeptide comprising a polypeptide, a consensus sequence or at least a polypeptide motif as shown in the respective line in column 5 of Table II or in column 8 of Table IV, application no. 12, respectively, and being depicted in the same respective line as said Yhr033w, or a functional equivalent or a homolog thereof as depicted in column 8 of Table II, application no. 12, preferably a homolog or functional equivalent as depicted in column 8 of Table II B, application no. 12, and being depicted in the same respective line as said Yhr033w, and preferably the activity is increased plastidic, whereby the respective line discloses in column 7 the fine chemical cerebronic acid.

[63131] Accordingly, in one embodiment, the molecule which activity is to be increased in the process of the invention is the gene product with an activity as a “yhr033w-protein”, preferably it is the molecule of section (a) or (b) of this paragraph.

[63132] In particular, it was observed that in plants, especially in Arabidopsis thaliana, increasing or generating the activity of a gene product plastidic with the activity of a “yhr033w-protein”, preferably being encoded by a gene comprising the nucleic acid sequence SEQ ID NO. 128967, preferably the coding region thereof, conferred the production of or the increase in cerebronic acid compared with the wild type control.

[63133] The nucleic acid sequence of Yjl073w from Saccharomyces cerevisiae, e.g. as shown in the respective line in column 5 of Table I, application no. 12, has been published in A. And the activity of the gene product thereof is the activity of DnaJ-like chaperone.

[63134] Accordingly, in one embodiment, the process of the present invention for producing cerebronic acid in a non-human organism, like a microorganism or a plant or a part thereof, comprises increasing or generating the activity of a gene product with the activity of a gene product conferring the activity of “DnaJ-like chaperone”, especially from Saccharomyces cerevisiae or its functional equivalent or its homolog, e.g. the increase of
[63135] (a) a gene product of a gene comprising the nucleic acid molecule as shown in the respective line in column 5 of Table I (whereby the respective line discloses in column 7 the fine chemical cerebronic acid), application no. 12, preferably the coding region thereof, or a homolog or a fragment thereof, and being depicted in the same respective line as said Yjl073w, or a functional equivalent or a homolog thereof as shown in column 8 of Table I, application no. 12, preferably the coding region thereof, particularly a homolog or functional equivalent as shown in column 8 of Table I B, application no. 12, and being depicted in the same respective line as said Yjl073w, and preferably the activity is increased plastidic, or
[63136] (b) a polypeptide comprising a polypeptide, a consensus sequence or at least a polypeptide motif as shown in the respective line in column 5 of Table II or in column 8 of Table IV, application no. 12, respectively, and being depicted in the same respective line as said Yjl073w, or a functional equivalent or a homolog thereof as depicted in column 8 of Table II, application no. 12, preferably a homolog or functional equivalent as depicted in column 8 of Table II B, application no. 12, and being depicted in the same respective line as said Yjl073w, and preferably the activity is increased plastidic, whereby the respective line discloses in column 7 the fine chemical cerebronic acid.

[63137] Accordingly, in one embodiment, the molecule which activity is to be increased in the process of the invention is the gene product with an activity as a “DnaJ-like chaperone”, preferably it is the molecule of section (a) or (b) of this paragraph.

[63138] In particular, it was observed that in plants, especially in Arabidopsis thaliana, increasing or generating the activity of a gene product plastidic with the activity of a “DnaJ-like chaperone”, preferably being encoded by a gene comprising the nucleic acid sequence SEQ ID NO. 64964, preferably the coding region thereof, conferred the production of or the increase in cerebronic acid compared with the wild type control.

[63139] The nucleic acid sequence of Yjl127w-a from Saccharomyces cerevisiae, e.g. as shown in the respective line in column 5 of Table I, application no. 12, has been published in A. And the activity of the gene product thereof is the activity of YJL127W-A-protein.

[63140] Accordingly, in one embodiment, the process of the present invention for producing 2-hydroxybehenic acid in a non-human organism, like a microorganism or a plant or a part thereof, comprises increasing or generating the activity of a gene product with the activity of a gene product conferring the activity of “YJL127W-A-protein”, especially from Saccharomyces cerevisiae or its functional equivalent or its homolog, e.g. the increase of
[63141] (a) a gene product of a gene comprising the nucleic acid molecule as shown in the respective line in column 5 of Table I (whereby the respective line discloses in column 7 the fine chemical 2-hydroxybehenic acid), application no. 12, preferably the coding region thereof, or a homolog or a fragment thereof, and being depicted in the same respective line as said Yjl127w-a, or a functional equivalent or a homolog thereof as shown in column 8 of Table I, application no. 12, preferably the coding region thereof, particularly a homolog or functional equivalent as shown in column 8 of Table I B, application no. 12, and being depicted in the same respective line as said Yjl127w-a, and preferably the activity is increased non-targeted, or
[63142] (b) a polypeptide comprising a polypeptide, a consensus sequence or at least a polypeptide motif as shown in the respective line in column 5 of Table II or in column 8 of Table IV, application no. 12, respectively, and being depicted in the same respective line as said Yjl127w-a, or a functional equivalent or a homolog thereof as depicted in column 8 of Table II, application no. 12, preferably a homolog or functional equivalent as depicted in column 8 of Table II B, application no. 12, and being depicted in the same respective line as said Yjl127w-a, and preferably the activity is increased non-targeted, whereby the respective line discloses in column 7 the fine chemical 2-hydroxybehenic acid.

[63143] Accordingly, in one embodiment, the molecule which activity is to be increased in the process of the invention is the gene product with an activity as a “YJL127W-A-protein”, preferably it is the molecule of section (a) or (b) of this paragraph.

[63144] In particular, it was observed that in plants, especially in Arabidopsis thaliana, increasing or generating the activity of a gene product non-targeted with the activity of a “YJL127W-A-protein”, preferably being encoded by a gene comprising the nucleic acid sequence SEQ ID NO. 97631, preferably the coding region thereof, conferred the production of or the increase in 2-hydroxybehenic acid compared with the wild type control.

[63145] The nucleic acid sequence of Yjr130c from Saccharomyces cerevisiae, e.g. as shown in the respective line in column 5 of Table I, application no. 12, has been published in A. And the activity of the gene product thereof is the activity of cystathionine gamma-synthase.

[63146] Accordingly, in one embodiment, the process of the present invention for producing 2-hydroxytetracosenoic acid (preferably 2-hydroxynervonic acid) in a non-human organism, like a microorganism or a plant or a part thereof, comprises increasing or generating the activity of a gene product with the activity of a gene product conferring the activity of “cystathionine gamma-synthase”, especially from Saccharomyces cerevisiae or its functional equivalent or its homolog, e.g. the increase of
[63147] (a) a gene product of a gene comprising the nucleic acid molecule as shown in the respective line in column 5 of Table I (whereby the respective line discloses in column 7 the fine chemical 2-hydroxytetracosenoic acid (preferably 2-hydroxynervonic acid)), application no. 12, preferably the coding region thereof, or a homolog or a fragment thereof, and being depicted in the same respective line as said Yjr130c, or a functional equivalent or a homolog thereof as shown in column 8 of Table I, application no. 12, preferably the coding region thereof, particularly a homolog or functional equivalent as shown in column 8 of Table I B, application no. 12, and being depicted in the same respective line as said Yjr130c, and preferably the activity is increased non-targeted, or
[63148] (b) a polypeptide comprising a polypeptide, a consensus sequence or at least a polypeptide motif as shown in the respective line in column 5 of Table II or in column 8 of Table IV, application no. 12, respectively, and being depicted in the same respective line as said Yjr130c, or a functional equivalent or a homolog thereof as depicted in column 8 of Table II, application no. 12, preferably a homolog or functional equivalent as depicted in column 8 of Table II B, application no. 12, and being depicted in the same respective line as said Yjr130c, and preferably the activity is increased non-targeted, whereby the respective line discloses in column 7 the fine chemical 2-hydroxytetracosenoic acid (preferably 2-hydroxynervonic acid).

[63149] Accordingly, in one embodiment, the molecule which activity is to be increased in the process of the invention is the gene product with an activity as a “cystathionine gamma-synthase”, preferably it is the molecule of section (a) or (b) of this paragraph.

[63150] In particular, it was observed that in plants, especially in Arabidopsis thaliana, increasing or generating the activity of a gene product non-targeted with the activity of a “cystathionine gamma-synthase”, preferably being encoded by a gene comprising the nucleic acid sequence SEQ ID NO. 14843, preferably the coding region thereof, conferred the production of or the increase in 2-hydroxytetracosenoic acid (preferably 2-hydroxynervonic acid) compared with the wild type control.

[63151] The nucleic acid sequence of Yjr130c from Saccharomyces cerevisiae, e.g. as shown in the respective line in column 5 of Table I, application no. 12, has been published in A. And the activity of the gene product thereof is the activity of cystathionine gamma-synthase.

[63152] Accordingly, in one embodiment, the process of the present invention for producing 2-hydroxypalmitic acid in a non-human organism, like a microorganism or a plant or a part thereof, comprises increasing or generating the activity of a gene product with the activity of a gene product conferring the activity of “cystathionine gamma-synthase”, especially from Saccharomyces cerevisiae or its functional equivalent or its homolog, e.g. the increase of
[63153] (a) a gene product of a gene comprising the nucleic acid molecule as shown in the respective line in column 5 of Table I (whereby the respective line discloses in column 7 the fine chemical 2-hydroxypalmitic acid), application no. 12, preferably the coding region thereof, or a homolog or a fragment thereof, and being depicted in the same respective line as said Yjr130c, or a functional equivalent or a homolog thereof as shown in column 8 of Table I, application no. 12, preferably the coding region thereof, particularly a homolog or functional equivalent as shown in column 8 of Table I B, application no. 12, and being depicted in the same respective line as said Yjr130c, and preferably the activity is increased non-targeted, or
[63154] (b) a polypeptide comprising a polypeptide, a consensus sequence or at least a polypeptide motif as shown in the respective line in column 5 of Table II or in column 8 of Table IV, application no. 12, respectively, and being depicted in the same respective line as said Yjr130c, or a functional equivalent or a homolog thereof as depicted in column 8 of Table II, application no. 12, preferably a homolog or functional equivalent as depicted in column 8 of Table II B, application no. 12, and being depicted in the same respective line as said Yjr130c, and preferably the activity is increased non-targeted, whereby the respective line discloses in column 7 the fine chemical 2-hydroxypalmitic acid.

[63155] Accordingly, in one embodiment, the molecule which activity is to be increased in the process of the invention is the gene product with an activity as a “cystathionine gamma-synthase”, preferably it is the molecule of section (a) or (b) of this paragraph.

[63156] In particular, it was observed that in plants, especially in Arabidopsis thaliana, increasing or generating the activity of a gene product non-targeted with the activity of a “cystathionine gamma-synthase”, preferably being encoded by a gene comprising the nucleic acid sequence SEQ ID NO. 14843, preferably the coding region thereof, conferred the production of or the increase in 2-hydroxypalmitic acid compared with the wild type control.

[63157] The nucleic acid sequence of Yjr153w from Saccharomyces cerevisiae, e.g. as shown in the respective line in column 5 of Table I, application no. 12, has been published in A. And the activity of the gene product thereof is the activity of polygalacturonase.

[63158] Accordingly, in one embodiment, the process of the present invention for producing 2-hydroxypalmitic acid in a non-human organism, like a microorganism or a plant or a part thereof, comprises increasing or generating the activity of a gene product with the activity of a gene product conferring the activity of “polygalacturonase”, especially from Saccharomyces cerevisiae or its functional equivalent or its homolog, e.g. the increase of
[63159] (a) a gene product of a gene comprising the nucleic acid molecule as shown in the respective line in column 5 of Table I (whereby the respective line discloses in column 7 the fine chemical 2-hydroxypalmitic acid), application no. 12, preferably the coding region thereof, or a homolog or a fragment thereof, and being depicted in the same respective line as said Yjr153w, or a functional equivalent or a homolog thereof as shown in column 8 of Table I, application no. 12, preferably the coding region thereof, particularly a homolog or functional equivalent as shown in column 8 of Table I B, application no. 12, and being depicted in the same respective line as said Yjr153w, and preferably the activity is increased non-targeted, or
[63160] (b) a polypeptide comprising a polypeptide, a consensus sequence or at least a polypeptide motif as shown in the respective line in column 5 of Table II or in column 8 of Table IV, application no. 12, respectively, and being depicted in the same respective line as said Yjr153w, or a functional equivalent or a homolog thereof as depicted in column 8 of Table II, application no. 12, preferably a homolog or functional equivalent as depicted in column 8 of Table II B, application no. 12, and being depicted in the same respective line as said Yjr153w, and preferably the activity is increased non-targeted, whereby the respective line discloses in column 7 the fine chemical 2-hydroxypalmitic acid.

[63161] Accordingly, in one embodiment, the molecule which activity is to be increased in the process of the invention is the gene product with an activity as a “polygalacturonase”, preferably it is the molecule of section (a) or (b) of this paragraph.

[63162] In particular, it was observed that in plants, especially in Arabidopsis thaliana, increasing or generating the activity of a gene product non-targeted with the activity of a “polygalacturonase”, preferably being encoded by a gene comprising the nucleic acid sequence SEQ ID NO. 66274, preferably the coding region thereof, conferred the production of or the increase in 2-hydroxypalmitic acid compared with the wild type control.

[63163] The nucleic acid sequence of Ylr210w from Saccharomyces cerevisiae, e.g. as shown in the respective line in column 5 of Table I, application no. 12, has been published in A. And the activity of the gene product thereof is the activity of cyclin.

[63164] Accordingly, in one embodiment, the process of the present invention for producing hexadecatrienoic acid in a non-human organism, like a microorganism or a plant or a part thereof, comprises increasing or generating the activity of a gene product with the activity of a gene product conferring the activity of “cyclin”, especially from Saccharomyces cerevisiae or its functional equivalent or its homolog, e.g. the increase of
[63165] (a) a gene product of a gene comprising the nucleic acid molecule as shown in the respective line in column 5 of Table I (whereby the respective line discloses in column 7 the fine chemical hexadecatrienoic acid), application no. 12, preferably the coding region thereof, or a homolog or a fragment thereof, and being depicted in the same respective line as said Ylr210w, or a functional equivalent or a homolog thereof as shown in column 8 of Table I, application no. 12, preferably the coding region thereof, particularly a homolog or functional equivalent as shown in column 8 of Table I B, application no. 12, and being depicted in the same respective line as said Ylr210w, and preferably the activity is increased non-targeted, or
[63166] (b) a polypeptide comprising a polypeptide, a consensus sequence or at least a polypeptide motif as shown in the respective line in column 5 of Table II or in column 8 of Table IV, application no. 12, respectively, and being depicted in the same respective line as said Ylr210w, or a functional equivalent or a homolog thereof as depicted in column 8 of Table II, application no. 12, preferably a homolog or functional equivalent as depicted in column 8 of Table II B, application no. 12, and being depicted in the same respective line as said Ylr210w, and preferably the activity is increased non-targeted, whereby the respective line discloses in column 7 the fine chemical hexadecatrienoic acid.

[63167] Accordingly, in one embodiment, the molecule which activity is to be increased in the process of the invention is the gene product with an activity as a “cyclin”, preferably it is the molecule of section (a) or (b) of this paragraph.

[63168] In particular, it was observed that in plants, especially in Arabidopsis thaliana, increasing or generating the activity of a gene product non-targeted with the activity of a “cyclin”, preferably being encoded by a gene comprising the nucleic acid sequence SEQ ID NO. 129065, preferably the coding region thereof, conferred the production of or the increase in hexadecatrienoic acid compared with the wild type control.

[63169] The nucleic acid sequence of Ylr326w from Saccharomyces cerevisiae, e.g. as shown in the respective line in column 5 of Table I, application no. 12, has been published in A. And the activity of the gene product thereof is the activity of ylr326w-protein.

[63170] Accordingly, in one embodiment, the process of the present invention for producing hexadecadienoic acid in a non-human organism, like a microorganism or a plant or a part thereof, comprises increasing or generating the activity of a gene product with the activity of a gene product conferring the activity of “ylr326w-protein”, especially from Saccharomyces cerevisiae or its functional equivalent or its homolog, e.g. the increase of
[63171] (a) a gene product of a gene comprising the nucleic acid molecule as shown in the respective line in column 5 of Table I (whereby the respective line discloses in column 7 the fine chemical hexadecadienoic acid), application no. 12, preferably the coding region thereof, or a homolog or a fragment thereof, and being depicted in the same respective line as said Ylr326w, or a functional equivalent or a homolog thereof as shown in column 8 of Table I, application no. 12, preferably the coding region thereof, particularly a homolog or functional equivalent as shown in column 8 of Table I B, application no. 12, and being depicted in the same respective line as said Ylr326w, and preferably the activity is increased plastidic, or
[63172] (b) a polypeptide comprising a polypeptide, a consensus sequence or at least a polypeptide motif as shown in the respective line in column 5 of Table II or in column 8 of Table IV, application no. 12, respectively, and being depicted in the same respective line as said Ylr326w, or a functional equivalent or a homolog thereof as depicted in column 8 of Table II, application no. 12, preferably a homolog or functional equivalent as depicted in column 8 of Table II B, application no. 12, and being depicted in the same respective line as said Ylr326w, and preferably the activity is increased plastidic, whereby the respective line discloses in column 7 the fine chemical hexadecadienoic acid.

[63173] Accordingly, in one embodiment, the molecule which activity is to be increased in the process of the invention is the gene product with an activity as a “ylr326w-protein”, preferably it is the molecule of section (a) or (b) of this paragraph.

[63174] In particular, it was observed that in plants, especially in Arabidopsis thaliana, increasing or generating the activity of a gene product plastidic with the activity of a “ylr326w-protein”, preferably being encoded by a gene comprising the nucleic acid sequence SEQ ID NO. 129123, preferably the coding region thereof, conferred the production of or the increase in hexadecadienoic acid compared with the wild type control.

[63175] The nucleic acid sequence of Ylr326w from Saccharomyces cerevisiae, e.g. as shown in the respective line in column 5 of Table I, application no. 12, has been published in A. And the activity of the gene product thereof is the activity of ylr326w-protein.

[63176] Accordingly, in one embodiment, the process of the present invention for producing hexadecatrienoic acid in a non-human organism, like a microorganism or a plant or a part thereof, comprises increasing or generating the activity of a gene product with the activity of a gene product conferring the activity of “ylr326w-protein”, especially from Saccharomyces cerevisiae or its functional equivalent or its homolog, e.g. the increase of
[63177] (a) a gene product of a gene comprising the nucleic acid molecule as shown in the respective line in column 5 of Table I (whereby the respective line discloses in column 7 the fine chemical hexadecatrienoic acid), application no. 12, preferably the coding region thereof, or a homolog or a fragment thereof, and being depicted in the same respective line as said Ylr326w, or a functional equivalent or a homolog thereof as shown in column 8 of Table I, application no. 12, preferably the coding region thereof, particularly a homolog or functional equivalent as shown in column 8 of Table I B, application no. 12, and being depicted in the same respective line as said Ylr326w, and preferably the activity is increased plastidic, or
[63178] (b) a polypeptide comprising a polypeptide, a consensus sequence or at least a polypeptide motif as shown in the respective line in column 5 of Table II or in column 8 of Table IV, application no. 12, respectively, and being depicted in the same respective line as said Ylr326w, or a functional equivalent or a homolog thereof as depicted in column 8 of Table II, application no. 12, preferably a homolog or functional equivalent as depicted in column 8 of Table II B, application no. 12, and being depicted in the same respective line as said Ylr326w, and preferably the activity is increased plastidic, whereby the respective line discloses in column 7 the fine chemical hexadecatrienoic acid.

[63179] Accordingly, in one embodiment, the molecule which activity is to be increased in the process of the invention is the gene product with an activity as a “ylr326w-protein”, preferably it is the molecule of section (a) or (b) of this paragraph.

[63180] In particular, it was observed that in plants, especially in Arabidopsis thaliana, increasing or generating the activity of a gene product plastidic with the activity of a “ylr326w-protein”, preferably being encoded by a gene comprising the nucleic acid sequence SEQ ID NO. 129123, preferably the coding region thereof, conferred the production of or the increase in hexadecatrienoic acid compared with the wild type control.

[63181] The nucleic acid sequence of Yml083c from Saccharomyces cerevisiae, e.g. as shown in the respective line in column 5 of Table I, application no. 12, has been published in A. And the activity of the gene product thereof is the activity of yml083c-protein.

[63182] Accordingly, in one embodiment, the process of the present invention for producing 2-hydroxybehenic acid in a non-human organism, like a microorganism or a plant or a part thereof, comprises increasing or generating the activity of a gene product with the activity of a gene product conferring the activity of “yml083c-protein”, especially from Saccharomyces cerevisiae or its functional equivalent or its homolog, e.g. the increase of
[63183] (a) a gene product of a gene comprising the nucleic acid molecule as shown in the respective line in column 5 of Table I (whereby the respective line discloses in column 7 the fine chemical 2-hydroxybehenic acid), application no. 12, preferably the coding region thereof, or a homolog or a fragment thereof, and being depicted in the same respective line as said Yml083c, or a functional equivalent or a homolog thereof as shown in column 8 of Table I, application no. 12, preferably the coding region thereof, particularly a homolog or functional equivalent as shown in column 8 of Table I B, application no. 12, and being depicted in the same respective line as said Yml083c, and preferably the activity is increased plastidic, or
[63184] (b) a polypeptide comprising a polypeptide, a consensus sequence or at least a polypeptide motif as shown in the respective line in column 5 of Table II or in column 8 of Table IV, application no. 12, respectively, and being depicted in the same respective line as said Yml083c, or a functional equivalent or a homolog thereof as depicted in column 8 of Table II, application no. 12, preferably a homolog or functional equivalent as depicted in column 8 of Table II B, application no. 12, and being depicted in the same respective line as said Yml083c, and preferably the activity is increased plastidic, whereby the respective line discloses in column 7 the fine chemical 2-hydroxybehenic acid.

[63185] Accordingly, in one embodiment, the molecule which activity is to be increased in the process of the invention is the gene product with an activity as a “yml083c-protein”, preferably it is the molecule of section (a) or (b) of this paragraph.

[63186] In particular, it was observed that in plants, especially in Arabidopsis thaliana, increasing or generating the activity of a gene product plastidic with the activity of a “yml083c-protein”, preferably being encoded by a gene comprising the nucleic acid sequence SEQ ID NO. 91781, preferably the coding region thereof, conferred the production of or the increase in 2-hydroxybehenic acid compared with the wild type control.

[63187] The nucleic acid sequence of Yml084w from Saccharomyces cerevisiae, e.g. as shown in the respective line in column 5 of Table I, application no. 12, has been published in A. And the activity of the gene product thereof is the activity of yml084w-protein.

[63188] Accordingly, in one embodiment, the process of the present invention for producing 2-hydroxytetracosenoic acid (preferably 2-hydroxynervonic acid) in a non-human organism, like a microorganism or a plant or a part thereof, comprises increasing or generating the activity of a gene product with the activity of a gene product conferring the activity of “yml084w-protein”, especially from Saccharomyces cerevisiae or its functional equivalent or its homolog, e.g. the increase of
[63189] (a) a gene product of a gene comprising the nucleic acid molecule as shown in the respective line in column 5 of Table I (whereby the respective line discloses in column 7 the fine chemical 2-hydroxytetracosenoic acid (preferably 2-hydroxynervonic acid)), application no. 12, preferably the coding region thereof, or a homolog or a fragment thereof, and being depicted in the same respective line as said Yml084w, or a functional equivalent or a homolog thereof as shown in column 8 of Table I, application no. 12, preferably the coding region thereof, particularly a homolog or functional equivalent as shown in column 8 of Table I B, application no. 12, and being depicted in the same respective line as said Yml084w, and preferably the activity is increased plastidic, or
[63190] (b) a polypeptide comprising a polypeptide, a consensus sequence or at least a polypeptide motif as shown in the respective line in column 5 of Table II or in column 8 of Table IV, application no. 12, respectively, and being depicted in the same respective line as said Yml084w, or a functional equivalent or a homolog thereof as depicted in column 8 of Table II, application no. 12, preferably a homolog or functional equivalent as depicted in column 8 of Table II B, application no. 12, and being depicted in the same respective line as said Yml084w, and preferably the activity is increased plastidic, whereby the respective line discloses in column 7 the fine chemical 2-hydroxytetracosenoic acid (preferably 2-hydroxynervonic acid).

[63191] Accordingly, in one embodiment, the molecule which activity is to be increased in the process of the invention is the gene product with an activity as a “yml084w-protein”, preferably it is the molecule of section (a) or (b) of this paragraph.

[63192] In particular, it was observed that in plants, especially in Arabidopsis thaliana, increasing or generating the activity of a gene product plastidic with the activity of a “yml084w-protein”, preferably being encoded by a gene comprising the nucleic acid sequence SEQ ID NO. 15175, preferably the coding region thereof, conferred the production of or the increase in 2-hydroxytetracosenoic acid (preferably 2-hydroxynervonic acid) compared with the wild type control.

[63193] The nucleic acid sequence of Ymr186w from Saccharomyces cerevisiae, e.g. as shown in the respective line in column 5 of Table I, application no. 12, has been published in A. And the activity of the gene product thereof is the activity of molecular chaperone.

[63194] Accordingly, in one embodiment, the process of the present invention for producing 2-hydroxypalmitic acid in a non-human organism, like a microorganism or a plant or a part thereof, comprises increasing or generating the activity of a gene product with the activity of a gene product conferring the activity of “molecular chaperone”, especially from Saccharomyces cerevisiae or its functional equivalent or its homolog, e.g. the increase of
[63195] (a) a gene product of a gene comprising the nucleic acid molecule as shown in the respective line in column 5 of Table I (whereby the respective line discloses in column 7 the fine chemical 2-hydroxypalmitic acid), application no. 12, preferably the coding region thereof, or a homolog or a fragment thereof, and being depicted in the same respective line as said Ymr186w, or a functional equivalent or a homolog thereof as shown in column 8 of Table I, application no. 12, preferably the coding region thereof, particularly a homolog or functional equivalent as shown in column 8 of Table I B, application no. 12, and being depicted in the same respective line as said Ymr186w, and preferably the activity is increased plastidic, or
[63196] (b) a polypeptide comprising a polypeptide, a consensus sequence or at least a polypeptide motif as shown in the respective line in column 5 of Table II or in column 8 of Table IV, application no. 12, respectively, and being depicted in the same respective line as said Ymr186w, or a functional equivalent or a homolog thereof as depicted in column 8 of Table II, application no. 12, preferably a homolog or functional equivalent as depicted in column 8 of Table II B, application no. 12, and being depicted in the same respective line as said Ymr186w, and preferably the activity is increased plastidic, whereby the respective line discloses in column 7 the fine chemical 2-hydroxypalmitic acid.

[63197] Accordingly, in one embodiment, the molecule which activity is to be increased in the process of the invention is the gene product with an activity as a “molecular chaperone”, preferably it is the molecule of section (a) or (b) of this paragraph.

[63198] In particular, it was observed that in plants, especially in Arabidopsis thaliana, increasing or generating the activity of a gene product plastidic with the activity of a “molecular chaperone”, preferably being encoded by a gene comprising the nucleic acid sequence SEQ ID NO. 129141, preferably the coding region thereof, conferred the production of or the increase in 2-hydroxypalmitic acid compared with the wild type control.

[63199] The nucleic acid sequence of Ynl130c from Saccharomyces cerevisiae, e.g. as shown in the respective line in column 5 of Table I, application no. 12, has been published in A. And the activity of the gene product thereof is the activity of phosphotransferase.

[63200] Accordingly, in one embodiment, the process of the present invention for producing oleic acid in a non-human organism, like a microorganism or a plant or a part thereof, comprises increasing or generating the activity of a gene product with the activity of a gene product conferring the activity of “phosphotransferase”, especially from Saccharomyces cerevisiae or its functional equivalent or its homolog, e.g. the increase of
[63201] (a) a gene product of a gene comprising the nucleic acid molecule as shown in the respective line in column 5 of Table I (whereby the respective line discloses in column 7 the fine chemical oleic acid), application no. 12, preferably the coding region thereof, or a homolog or a fragment thereof, and being depicted in the same respective line as said Ynl130c, or a functional equivalent or a homolog thereof as shown in column 8 of Table I, application no. 12, preferably the coding region thereof, particularly a homolog or functional equivalent as shown in column 8 of Table I B, application no. 12, and being depicted in the same respective line as said Ynl130c, and preferably the activity is increased mitochondrial, or
[63202] (b) a polypeptide comprising a polypeptide, a consensus sequence or at least a polypeptide motif as shown in the respective line in column 5 of Table II or in column 8 of Table IV, application no. 12, respectively, and being depicted in the same respective line as said Ynl130c, or a functional equivalent or a homolog thereof as depicted in column 8 of Table II, application no. 12, preferably a homolog or functional equivalent as depicted in column 8 of Table II B, application no. 12, and being depicted in the same respective line as said Ynl130c, and preferably the activity is increased mitochondrial, whereby the respective line discloses in column 7 the fine chemical oleic acid.

[63203] Accordingly, in one embodiment, the molecule which activity is to be increased in the process of the invention is the gene product with an activity as a “phosphotransferase”, preferably it is the molecule of section (a) or (b) of this paragraph.

[63204] In particular, it was observed that in plants, especially in Arabidopsis thaliana, increasing or generating the activity of a gene product mitochondrial with the activity of a “phosphotransferase”, preferably being encoded by a gene comprising the nucleic acid sequence SEQ ID NO. 129470, preferably the coding region thereof, conferred the production of or the increase in oleic acid compared with the wild type control.

[63205] The nucleic acid sequence of Ynl321w from Saccharomyces cerevisiae, e.g. as shown in the respective line in column 5 of Table I, application no. 12, has been published in A. And the activity of the gene product thereof is the activity of ynl321w-protein.

[63206] Accordingly, in one embodiment, the process of the present invention for producing 2-hydroxybehenic acid in a non-human organism, like a microorganism or a plant or a part thereof, comprises increasing or generating the activity of a gene product with the activity of a gene product conferring the activity of “ynl321w-protein”, especially from Saccharomyces cerevisiae or its functional equivalent or its homolog, e.g. the increase of
[63207] (a) a gene product of a gene comprising the nucleic acid molecule as shown in the respective line in column 5 of Table I (whereby the respective line discloses in column 7 the fine chemical 2-hydroxybehenic acid), application no. 12, preferably the coding region thereof, or a homolog or a fragment thereof, and being depicted in the same respective line as said Ynl321w, or a functional equivalent or a homolog thereof as shown in column 8 of Table I, application no. 12, preferably the coding region thereof, particularly a homolog or functional equivalent as shown in column 8 of Table I B, application no. 12, and being depicted in the same respective line as said Ynl321w, and preferably the activity is increased plastidic, or
[63208] (b) a polypeptide comprising a polypeptide, a consensus sequence or at least a polypeptide motif as shown in the respective line in column 5 of Table II or in column 8 of Table IV, application no. 12, respectively, and being depicted in the same respective line as said Ynl321w, or a functional equivalent or a homolog thereof as depicted in column 8 of Table II, application no. 12, preferably a homolog or functional equivalent as depicted in column 8 of Table II B, application no. 12, and being depicted in the same respective line as said Ynl321w, and preferably the activity is increased plastidic, whereby the respective line discloses in column 7 the fine chemical 2-hydroxybehenic acid.

[63209] Accordingly, in one embodiment, the molecule which activity is to be increased in the process of the invention is the gene product with an activity as a “ynl321w-protein”, preferably it is the molecule of section (a) or (b) of this paragraph.

[63210] In particular, it was observed that in plants, especially in Arabidopsis thaliana, increasing or generating the activity of a gene product plastidic with the activity of a “ynl321w-protein”, preferably being encoded by a gene comprising the nucleic acid sequence SEQ ID NO. 129546, preferably the coding region thereof, conferred the production of or the increase in 2-hydroxybehenic acid compared with the wild type control.

[63211] The nucleic acid sequence of Yor187w from Saccharomyces cerevisiae, e.g. as shown in the respective line in column 5 of Table I, application no. 12, has been published in A. And the activity of the gene product thereof is the activity of Elongation factor Tu.

[63212] Accordingly, in one embodiment, the process of the present invention for producing hexadecatrienoic acid in a non-human organism, like a microorganism or a plant or a part thereof, comprises increasing or generating the activity of a gene product with the activity of a gene product conferring the activity of “Elongation factor Tu”, especially from Saccharomyces cerevisiae or its functional equivalent or its homolog, e.g. the increase of
[63213] (a) a gene product of a gene comprising the nucleic acid molecule as shown in the respective line in column 5 of Table I (whereby the respective line discloses in column 7 the fine chemical hexadecatrienoic acid), application no. 12, preferably the coding region thereof, or a homolog or a fragment thereof, and being depicted in the same respective line as said Yor187w, or a functional equivalent or a homolog thereof as shown in column 8 of Table I, application no. 12, preferably the coding region thereof, particularly a homolog or functional equivalent as shown in column 8 of Table I B, application no. 12, and being depicted in the same respective line as said Yor187w, and preferably the activity is increased non-targeted, or
[63214] (b) a polypeptide comprising a polypeptide, a consensus sequence or at least a polypeptide motif as shown in the respective line in column 5 of Table II or in column 8 of Table IV, application no. 12, respectively, and being depicted in the same respective line as said Yor187w, or a functional equivalent or a homolog thereof as depicted in column 8 of Table II, application no. 12, preferably a homolog or functional equivalent as depicted in column 8 of Table II B, application no. 12, and being depicted in the same respective line as said Yor187w, and preferably the activity is increased non-targeted, whereby the respective line discloses in column 7 the fine chemical hexadecatrienoic acid.

[63215] Accordingly, in one embodiment, the molecule which activity is to be increased in the process of the invention is the gene product with an activity as a “Elongation factor Tu”, preferably it is the molecule of section (a) or (b) of this paragraph.

[63216] In particular, it was observed that in plants, especially in Arabidopsis thaliana, increasing or generating the activity of a gene product non-targeted with the activity of a “Elongation factor Tu”, preferably being encoded by a gene comprising the nucleic acid sequence SEQ ID NO. 129574, preferably the coding region thereof, conferred the production of or the increase in hexadecatrienoic acid compared with the wild type control.

[63217] The nucleic acid sequence of Ypl271w from Saccharomyces cerevisiae, e.g. as shown in the respective line in column 5 of Table I, application no. 12, has been published in A. And the activity of the gene product thereof is the activity of ATPase epsilon subunit.

[63218] Accordingly, in one embodiment, the process of the present invention for producing 2-hydroxytetracosenoic acid (preferably 2-hydroxynervonic acid) in a non-human organism, like a microorganism or a plant or a part thereof, comprises increasing or generating the activity of a gene product with the activity of a gene product conferring the activity of “ATPase epsilon subunit”, especially from Saccharomyces cerevisiae or its functional equivalent or its homolog, e.g. the increase of
[63219] (a) a gene product of a gene comprising the nucleic acid molecule as shown in the respective line in column 5 of Table I (whereby the respective line discloses in column 7 the fine chemical 2-hydroxytetracosenoic acid (preferably 2-hydroxynervonic acid)), application no. 12, preferably the coding region thereof, or a homolog or a fragment thereof, and being depicted in the same respective line as said Ypl271w, or a functional equivalent or a homolog thereof as shown in column 8 of Table I, application no. 12, preferably the coding region thereof, particularly a homolog or functional equivalent as shown in column 8 of Table I B, application no. 12, and being depicted in the same respective line as said Ypl271w, and preferably the activity is increased plastidic, or
[63220] (b) a polypeptide comprising a polypeptide, a consensus sequence or at least a polypeptide motif as shown in the respective line in column 5 of Table II or in column 8 of Table IV, application no. 12, respectively, and being depicted in the same respective line as said Ypl271w, or a functional equivalent or a homolog thereof as depicted in column 8 of Table II, application no. 12, preferably a homolog or functional equivalent as depicted in column 8 of Table II B, application no. 12, and being depicted in the same respective line as said Ypl271w, and preferably the activity is increased plastidic, whereby the respective line discloses in column 7 the fine chemical 2-hydroxytetracosenoic acid (preferably 2-hydroxynervonic acid).

[63221] Accordingly, in one embodiment, the molecule which activity is to be increased in the process of the invention is the gene product with an activity as a “ATPase epsilon subunit”, preferably it is the molecule of section (a) or (b) of this paragraph.

[63222] In particular, it was observed that in plants, especially in Arabidopsis thaliana, increasing or generating the activity of a gene product plastidic with the activity of a “ATPase epsilon subunit”, preferably being encoded by a gene comprising the nucleic acid sequence SEQ ID NO. 118212, preferably the coding region thereof, conferred the production of or the increase in 2-hydroxytetracosenoic acid (preferably 2-hydroxynervonic acid) compared with the wild type control.

[63223] The nucleic acid sequence of Ypr167c from Saccharomyces cerevisiae, e.g. as shown in the respective line in column 5 of Table I, application no. 12, has been published in A. And the activity of the gene product thereof is the activity of phosphoadenosine phosphosulfate reductase.

[63224] Accordingly, in one embodiment, the process of the present invention for producing 2-hydroxypalmitic acid in a non-human organism, like a microorganism or a plant or a part thereof, comprises increasing or generating the activity of a gene product with the activity of a gene product conferring the activity of “phosphoadenosine phosphosulfate reductase”, especially from Saccharomyces cerevisiae or its functional equivalent or its homolog, e.g. the increase of
[63225] (a) a gene product of a gene comprising the nucleic acid molecule as shown in the respective line in column 5 of Table I (whereby the respective line discloses in column 7 the fine chemical 2-hydroxypalmitic acid), application no. 12, preferably the coding region thereof, or a homolog or a fragment thereof, and being depicted in the same respective line as said Ypr167c, or a functional equivalent or a homolog thereof as shown in column 8 of Table I, application no. 12, preferably the coding region thereof, particularly a homolog or functional equivalent as shown in column 8 of Table I B, application no. 12, and being depicted in the same respective line as said Ypr167c, and preferably the activity is increased plastidic, or
[63226] (b) a polypeptide comprising a polypeptide, a consensus sequence or at least a polypeptide motif as shown in the respective line in column 5 of Table II or in column 8 of Table IV, application no. 12, respectively, and being depicted in the same respective line as said Ypr167c, or a functional equivalent or a homolog thereof as depicted in column 8 of Table II, application no. 12, preferably a homolog or functional equivalent as depicted in column 8 of Table II B, application no. 12, and being depicted in the same respective line as said Ypr167c, and preferably the activity is increased plastidic, whereby the respective line discloses in column 7 the fine chemical 2-hydroxypalmitic acid.

[63227] Accordingly, in one embodiment, the molecule which activity is to be increased in the process of the invention is the gene product with an activity as a “phosphoadenosine phosphosulfate reductase”, preferably it is the molecule of section (a) or (b) of this paragraph.

[63228] In particular, it was observed that in plants, especially in Arabidopsis thaliana, increasing or generating the activity of a gene product plastidic with the activity of a “phosphoadenosine phosphosulfate reductase”, preferably being encoded by a gene comprising the nucleic acid sequence SEQ ID NO. 130181, preferably the coding region thereof, conferred the production of or the increase in 2-hydroxypalmitic acid compared with the wild type control.

[63229] The nucleic acid sequence of YDR447C from Saccharomyces cerevisiae, e.g. as shown in the respective line in column 5 of Table I, application no. 12, has been published in A. And the activity of the gene product thereof is the activity of 40S ribosomal protein S17.

[63230] Accordingly, in one embodiment, the process of the present invention for producing oleic acid in a non-human organism, like a microorganism or a plant or a part thereof, comprises increasing or generating the activity of a gene product with the activity of a gene product conferring the activity of “40S ribosomal protein S17”, especially from Saccharomyces cerevisiae or its functional equivalent or its homolog, e.g. the increase of
[63231] (a) a gene product of a gene comprising the nucleic acid molecule as shown in the respective line in column 5 of Table I (whereby the respective line discloses in column 7 the fine chemical oleic acid), application no. 12, preferably the coding region thereof, or a homolog or a fragment thereof, and being depicted in the same respective line as said YDR447C, or a functional equivalent or a homolog thereof as shown in column 8 of Table I, application no. 12, preferably the coding region thereof, particularly a homolog or functional equivalent as shown in column 8 of Table I B, application no. 12, and being depicted in the same respective line as said YDR447C, and preferably the activity is increased non-targeted, or
[63232] (b) a polypeptide comprising a polypeptide, a consensus sequence or at least a polypeptide motif as shown in the respective line in column 5 of Table II or in column 8 of Table IV, application no. 12, respectively, and being depicted in the same respective line as said YDR447C, or a functional equivalent or a homolog thereof as depicted in column 8 of Table II, application no. 12, preferably a homolog or functional equivalent as depicted in column 8 of Table II B, application no. 12, and being depicted in the same respective line as said YDR447C, and preferably the activity is increased non-targeted, whereby the respective line discloses in column 7 the fine chemical oleic acid.

[63233] Accordingly, in one embodiment, the molecule which activity is to be increased in the process of the invention is the gene product with an activity as a “405 ribosomal protein S17”, preferably it is the molecule of section (a) or (b) of this paragraph.

[63234] In particular, it was observed that in plants, especially in Arabidopsis thaliana, increasing or generating the activity of a gene product non-targeted with the activity of a “40S ribosomal protein S17”, preferably being encoded by a gene comprising the nucleic acid sequence SEQ ID NO. 128161, preferably the coding region thereof, conferred the production of or the increase in oleic acid compared with the wild type control.

[63235] The nucleic acid sequence of B3644 from Escherichia coli, e.g. as shown in the respective line in column 5 of Table I, application no. 12, has been published in B. And the activity of the gene product thereof is the activity of b3644-protein.

[63236] Accordingly, in one embodiment, the process of the present invention for producing 2-hydroxybehenic acid in a non-human organism, like a microorganism or a plant or a part thereof, comprises increasing or generating the activity of a gene product with the activity of a gene product conferring the activity of “b3644-protein”, especially from Escherichia coli or its functional equivalent or its homolog, e.g. the increase of
[63237] (a) a gene product of a gene comprising the nucleic acid molecule as shown in the respective line in column 5 of Table I (whereby the respective line discloses in column 7 the fine chemical 2-hydroxybehenic acid), application no. 12, preferably the coding region thereof, or a homolog or a fragment thereof, and being depicted in the same respective line as said B3644, or a functional equivalent or a homolog thereof as shown in column 8 of Table I, application no. 12, preferably the coding region thereof, particularly a homolog or functional equivalent as shown in column 8 of Table I B, application no. 12, and being depicted in the same respective line as said B3644, and preferably the activity is increased non-targeted, or
[63238] (b) a polypeptide comprising a polypeptide, a consensus sequence or at least a polypeptide motif as shown in the respective line in column 5 of Table II or in column 8 of Table IV, application no. 12, respectively, and being depicted in the same respective line as said B3644, or a functional equivalent or a homolog thereof as depicted in column 8 of Table II, application no. 12, preferably a homolog or functional equivalent as depicted in column 8 of Table II B, application no. 12, and being depicted in the same respective line as said B3644, and preferably the activity is increased non-targeted, whereby the respective line discloses in column 7 the fine chemical 2-hydroxybehenic acid.

[63239] Accordingly, in one embodiment, the molecule which activity is to be increased in the process of the invention is the gene product with an activity as a “b3644-protein”, preferably it is the molecule of section (a) or (b) of this paragraph.

[63240] In particular, it was observed that in plants, especially in Arabidopsis thaliana, increasing or generating the activity of a gene product non-targeted with the activity of a “b3644-protein”, preferably being encoded by a gene comprising the nucleic acid sequence SEQ ID NO. 125348, preferably the coding region thereof, conferred the production of or the increase in 2-hydroxybehenic acid compared with the wild type control.

[63241] The nucleic acid sequence of B3644 from Escherichia coli, e.g. as shown in the respective line in column 5 of Table I, application no. 12, has been published in B. And the activity of the gene product thereof is the activity of b3644-protein.

[63242] Accordingly, in one embodiment, the process of the present invention for producing behenic acid in a non-human organism, like a microorganism or a plant or a part thereof, comprises increasing or generating the activity of a gene product with the activity of a gene product conferring the activity of “b3644-protein”, especially from Escherichia coli or its functional equivalent or its homolog, e.g. the increase of
[63243] (a) a gene product of a gene comprising the nucleic acid molecule as shown in the respective line in column 5 of Table I (whereby the respective line discloses in column 7 the fine chemical behenic acid), application no. 12, preferably the coding region thereof, or a homolog or a fragment thereof, and being depicted in the same respective line as said B3644, or a functional equivalent or a homolog thereof as shown in column 8 of Table I, application no. 12, preferably the coding region thereof, particularly a homolog or functional equivalent as shown in column 8 of Table I B, application no. 12, and being depicted in the same respective line as said B3644, and preferably the activity is increased non-targeted, or
[63244] (b) a polypeptide comprising a polypeptide, a consensus sequence or at least a polypeptide motif as shown in the respective line in column 5 of Table II or in column 8 of Table IV, application no. 12, respectively, and being depicted in the same respective line as said B3644, or a functional equivalent or a homolog thereof as depicted in column 8 of Table II, application no. 12, preferably a homolog or functional equivalent as depicted in column 8 of Table II B, application no. 12, and being depicted in the same respective line as said B3644, and preferably the activity is increased non-targeted, whereby the respective line discloses in column 7 the fine chemical behenic acid.

[63245] Accordingly, in one embodiment, the molecule which activity is to be increased in the process of the invention is the gene product with an activity as a “b3644-protein”, preferably it is the molecule of section (a) or (b) of this paragraph.

[63246] In particular, it was observed that in plants, especially in Arabidopsis thaliana, increasing or generating the activity of a gene product non-targeted with the activity of a “b3644-protein”, preferably being encoded by a gene comprising the nucleic acid sequence SEQ ID NO. 125348, preferably the coding region thereof, conferred the production of or the increase in behenic acid compared with the wild type control.

[63247] The nucleic acid sequence of B3644 from Escherichia coli, e.g. as shown in the respective line in column 5 of Table I, application no. 12, has been published in B. And the activity of the gene product thereof is the activity of b3644-protein.

[63248] Accordingly, in one embodiment, the process of the present invention for producing nervonic acid in a non-human organism, like a microorganism or a plant or a part thereof, comprises increasing or generating the activity of a gene product with the activity of a gene product conferring the activity of “b3644-protein”, especially from Escherichia coli or its functional equivalent or its homolog, e.g. the increase of
[63249] (a) a gene product of a gene comprising the nucleic acid molecule as shown in the respective line in column 5 of Table I (whereby the respective line discloses in column 7 the fine chemical nervonic acid), application no. 12, preferably the coding region thereof, or a homolog or a fragment thereof, and being depicted in the same respective line as said B3644, or a functional equivalent or a homolog thereof as shown in column 8 of Table I, application no. 12, preferably the coding region thereof, particularly a homolog or functional equivalent as shown in column 8 of Table I B, application no. 12, and being depicted in the same respective line as said B3644, and preferably the activity is increased non-targeted, or
[63250] (b) a polypeptide comprising a polypeptide, a consensus sequence or at least a polypeptide motif as shown in the respective line in column 5 of Table II or in column 8 of Table IV, application no. 12, respectively, and being depicted in the same respective line as said B3644, or a functional equivalent or a homolog thereof as depicted in column 8 of Table II, application no. 12, preferably a homolog or functional equivalent as depicted in column 8 of Table II B, application no. 12, and being depicted in the same respective line as said B3644, and preferably the activity is increased non-targeted, whereby the respective line discloses in column 7 the fine chemical nervonic acid.

[63251] Accordingly, in one embodiment, the molecule which activity is to be increased in the process of the invention is the gene product with an activity as a “b3644-protein”, preferably it is the molecule of section (a) or (b) of this paragraph.

[63252] In particular, it was observed that in plants, especially in Arabidopsis thaliana, increasing or generating the activity of a gene product non-targeted with the activity of a “b3644-protein”, preferably being encoded by a gene comprising the nucleic acid sequence SEQ ID NO. 125348, preferably the coding region thereof, conferred the production of or the increase in nervonic acid compared with the wild type control.

[63253] [0105.1.8.12] to [0107.1.8.12] for the disclosure of these paragraphs see [0105.1.8.8] to [0107.1.8.12] above.

[63254] A protein having an activity conferring an increase in the amount or level of the fine chemical 2-hydroxybehenic acid, 2-hydroxypalmitic acid, 2-hydroxytetracosenoic acid (preferably 2-hydroxynervonic acid), behenic acid, cerebronic acid, eicosanoic acid, heptadecanoic acid, hexadecadienoic acid, hexadecatrienoic acid, lauric acid, myristic acid, nervonic acid, or oleic acid, upon targeting to the plastids or mitochondria or upon non-targeting, preferably has the structure of the respective polypeptide described herein, in particular of the polypeptides comprising the consensus sequence or at least one polypeptide motifs as shown in the respective line in Table IV, application no. 12, column 8 or of the polypeptide comprising an amino acid sequence as disclosed in the respective line in Table II, application no. 12, columns 5 or 8, or homologs or fragments thereof as described herein, or is encoded by the nucleic acid molecule characterized herein or the nucleic acid molecule according to the invention, for example by the nucleic acid molecule as shown in the respective line in Table I, application no. 12, columns 5 or 8, preferably the coding region thereof, or homologs or fragments thereof and has the herein mentioned activity.

[63255] [0109.1.8.12] to [0110.1.8.12] for the disclosure of these paragraphs see [0109.1.8.8] to [0110.1.8.8] above.

[63256] In one embodiment, the process of the present invention comprises one or more of the following steps
[63257] (a) stabilizing a protein conferring the generation or increased expression of a protein encoded by the nucleic acid molecule of the invention or of the polypeptide of the invention, e.g. of a polypeptide having the activity selected from the group consisting of 2,3-dihydroxyphenylpropionate 1,2-dioxygenase, 2-C-methyl-D-erythritol 4-phosphate cytidylyltransferase, 30S ribosomal protein S3, 3-ketoacyl-CoA thiolase, 3-oxoacyl-[acyl-carrier-protein] reductase, 3-oxoacyl-[acyl-carrier-protein] synthase, 40S ribosomal protein S17, ABC transporter component, ABC transporter permease protein, acetyl-coenzyme A synthetase, acid shock protein, acyl-CoA synthase, acyl-desaturase, adenosine kinase, aldolase, alkaline phosphatase isozyme conversion protein, amino acid ABC transporter permease protein, aminotransferase, ankyrin repeat protein, At2g33510-protein, ATPase epsilon subunit, ATP-binding component of a transport system, b0050-protein, b0249-protein, b0371-protein, b0518-protein, b0801-protein, b1046-protein, b1346-protein, b1470-protein, b1522-protein, b1670-protein, b1703-protein, b1837-protein, b2032-protein, b2099-protein, b2107-protein, b2126-protein, b2139-protein, b2360-protein, b2474-protein, b2513-protein, b2654-protein, b3442-protein, b3644-protein, b3812-protein, b3944-protein, b4023-protein, b4205-protein, beta-hydroxylase, betaine aldehyde dehydrogenase, bifunctional protein (phosphoribosyltransferase and regulatory protein), bifunctional purine biosynthesis protein, binding-protein-dependent transport systems inner membrane component, biotin synthase, calcium-dependent protein kinase, carbon dioxide concentrating mechanism protein, cardiolipin synthase, CDP-diacylglycerol-serine O-phosphatidyltransferase, cell division control protein, cell wall protein, chlorophyllase, citrate synthase, coproporphyrinogen III oxidase, cyclin, cystathionine gamma-synthase, cysteine synthase A, dihydrolipoamide dehydrogenase, DNA mismatch repair protein, DnaJ-like chaperone, electron transport complex protein, Elongation factor Tu, ethanolamine utilization protein, F-box protein, ferredoxin, fructose 1,6-bisphosphatase, fumarylacetoacetate hydrolase, glutamate 5-kinase, glutamate-ammonia-ligase, glutaredoxin, glycerol-3-phosphate dehydrogenase, glycine cleavage system H protein, GM02-LC38418-protein, heat shock protein, heat shock transcription factor, HesB/YadR/YfhF family protein, homocitrate synthase, hydrolase, isocitrate dehydrogenase, lipoprotein precursor, malate dehydrogenase, malonyl CoA-acyl carrier protein transacylase, metal-dependent hydrolase, molecular chaperone, molecular chaperone portein, monothiol glutaredoxin, multiple antibiotic resistance protein, murein transglycosylase, N-acetyl-gamma-glutamyl-phosphate reductase, NADP-dependent malic enzyme, outer-membrane lipoprotein precursor, oxidoreductase, permease protein of ABC transporter, phage-related repressor protein, phosphatase, phosphate import ATP-binding protein, phosphatidylserine synthase, phospho-2-dehydro-3-deoxyheptonate aldolase, phosphoadenosine phosphosulfate reductase, phosphotransferase, phosphotransferase system component, polygalacturonase, protein kinase, protein phosphatase, purine nucleoside phosphorylase, pyridoxamine kinase, recombinase A, sec-independent protein translocase, Sec-independent protein translocase subunit, sensor histidine kinase, sensor kinase, sll0281-protein, sll0406-protein, small nuclear ribonucleoprotein, sodium/proton antiporter, squalene monooxygenase, sugar transport system permease protein, threonine dehydratase, transcription factor, transcriptional regulator, transcriptional regulator protein, transport protein, tryptophan synthase alpha chain, TTC1386-protein, vacuolar processing enzyme, ycl027w-protein, ycl049c-protein, ydr273w-protein, ydr339c-protein, YFL019C-protein, ygl237c-protein, YGR104C-protein, yhr033w-protein, YJL127W-A-protein, ylr326w-protein, yml083c-protein, yml084w-protein, and ynl321w-protein, or of a polypeptide as indicated in the respective line in Table II, application no. 12, columns 5 or 8, or its homologs or fragments, and conferring the production of or an increase in 2-hydroxybehenic acid, 2-hydroxypalmitic acid, 2-hydroxytetracosenoic acid (preferably 2-hydroxynervonic acid), behenic acid, cerebronic acid, eicosanoic acid, heptadecanoic acid, hexadecadienoic acid, hexadecatrienoic acid, lauric acid, myristic acid, nervonic acid, or oleic acid, respectively; and/or
[63258] (b) stabilizing a mRNA conferring the generation or increased expression of a FCRP, e.g. protein encoded by the nucleic acid molecule of the invention or its homologs or fragments, or of a mRNA encoding the polypeptide of the present invention having the herein-mentioned activity selected from the group consisting of said activities mentioned in (a) and conferring the production of or an increase in 2-hydroxybehenic acid, 2-hydroxypalmitic acid, 2-hydroxytetracosenoic acid (preferably 2-hydroxynervonic acid), behenic acid, cerebronic acid, eicosanoic acid, heptadecanoic acid, hexadecadienoic acid, hexadecatrienoic acid, lauric acid, myristic acid, nervonic acid, or oleic acid, respectively; and/or
[63259] (c) increasing the specific activity of a protein conferring the increased expression of a FCRP, e.g. a protein encoded by the nucleic acid molecule of the invention or of the polypeptide of the present invention having herein-mentioned 2-hydroxybehenic acid, 2-hydroxypalmitic acid, 2-hydroxytetracosenoic acid (preferably 2-hydroxynervonic acid), behenic acid, cerebronic acid, eicosanoic acid, heptadecanoic acid, hexadecadienoic acid, hexadecatrienoic acid, lauric acid, myristic acid, nervonic acid, or oleic acid generating or increasing activity, respectively, e.g. of a polypeptide having the activity of a protein as indicated in the respective line in Table II, application no. 12, columns 5 or 8, or its homologs or fragments, or decreasing the inhibitory regulation of the polypeptide of the invention; and/or
[63260] (d) generating or increasing the expression of an endogenous or artificial transcription factor mediating the expression of a protein conferring the generation or increased expression of a FCRP, e.g. a protein encoded by the nucleic acid molecule of the invention or of the polypeptide of the invention having herein-mentioned activity selected from the group consisting of said activities mentioned in (a) and conferring a 2-hydroxybehenic acid, 2-hydroxypalmitic acid, 2-hydroxytetracosenoic acid (preferably 2-hydroxynervonic acid), behenic acid, cerebronic acid, eicosanoic acid, heptadecanoic acid, hexadecadienoic acid, hexadecatrienoic acid, lauric acid, myristic acid, nervonic acid, or oleic acid increasing activity, respectively, e.g. of a polypeptide having the activity of a protein as indicated in the respective line in Table II, application no. 12, columns 5 or 8 or its homologs; and/or
[63261] (e) stimulating activity of a protein conferring the increased expression of a FCRP, e.g. a protein encoded by the nucleic acid molecule of the present invention or a polypeptide of the present invention having herein-mentioned activity selected from the group consisting of said activities mentioned in (a) and conferring a 2-hydroxybehenic acid, 2-hydroxypalmitic acid, 2-hydroxytetracosenoic acid (preferably 2-hydroxynervonic acid), behenic acid, cerebronic acid, eicosanoic acid, heptadecanoic acid, hexadecadienoic acid, hexadecatrienoic acid, lauric acid, myristic acid, nervonic acid, or oleic acid increasing activity, respectively, e.g. of a polypeptide having the activity of a protein as indicated in the respective line in Table II, application no. 12, columns 5 or 8, or its homologs or fragments, by adding one or more exogenous inducing factors to the non-human organism or parts thereof; and/or
[63262] (f) expressing a transgenic gene encoding a protein conferring the increased expression of a FCRP, e.g. a polypeptide encoded by the nucleic acid molecule of the present invention or a polypeptide of the present invention, having herein-mentioned activity selected from the group consisting of said activities mentioned in (a) and conferring a 2-hydroxybehenic acid, 2-hydroxypalmitic acid, 2-hydroxytetracosenoic acid (preferably 2-hydroxynervonic acid), behenic acid, cerebronic acid, eicosanoic acid, heptadecanoic acid, hexadecadienoic acid, hexadecatrienoic acid, lauric acid, myristic acid, nervonic acid, or oleic acid increasing activity, respectively, e.g. of a polypeptide having the activity of a protein as indicated in the respective line in Table II, application no. 12, columns 5 or 8, or its homologs or fragments, and/or
[63263] (g) increasing the copy number of a gene conferring the increased expression of a nucleic acid molecule encoding a FCRP, e.g. a polypeptide encoded by the nucleic acid molecule of the invention or the polypeptide of the invention having herein-mentioned activity selected from the group consisting of said activities mentioned in (a) and conferring a 2-hydroxybehenic acid, 2-hydroxypalmitic acid, 2-hydroxytetracosenoic acid (preferably 2-hydroxynervonic acid), behenic acid, cerebronic acid, eicosanoic acid, heptadecanoic acid, hexadecadienoic acid, hexadecatrienoic acid, lauric acid, myristic acid, nervonic acid, or oleic acid increasing activity, respectively, e.g. of a polypeptide having the activity of a protein as indicated in the respective line in Table II, application no. 12, columns 5 or 8, or its homologs or fragments; and/or
[63264] (h) increasing the expression of the endogenous gene encoding the FCRP, polypeptide of the invention, e.g. a polypeptide encoded by the nucleic acid molecule of the invention or the polypeptide of the invention having herein-mentioned activity selected from the group consisting of said activities mentioned in (a) and conferring a 2-hydroxybehenic acid, 2-hydroxypalmitic acid, 2-hydroxytetracosenoic acid (preferably 2-hydroxynervonic acid), behenic acid, cerebronic acid, eicosanoic acid, heptadecanoic acid, hexadecadienoic acid, hexadecatrienoic acid, lauric acid, myristic acid, nervonic acid, or oleic acid; increasing activity, respectively, e.g. of a polypeptide having the activity of a protein as indicated in the respective line in Table II, application no. 12, columns 5 or 8, or its homologs or fragments, by adding positive expression or removing negative expression elements, e.g. homologous recombination can be used to either introduce positive regulatory elements like for plants the 35S enhancer into the promoter or to remove repressor elements form regulatory regions. Further gene conversion methods can be used to disrupt repressor elements or to enhance to activity of positive elements. Positive elements can be randomly introduced in plants by T-DNA or transposon mutagenesis and lines can be identified in which the positive elements have be integrated near to a gene of the invention, the expression of which is thereby enhanced; and/or
[63265] (i) modulating growth conditions of the non-human organism in such a manner, that the expression or activity of the gene encoding the FCRP, e.g. a protein of the invention or the protein itself is enhanced, for example microorganisms or plants can be grown for example under a higher temperature regime leading to an enhanced expression of heat shock proteins, which can lead to an enhanced 2-hydroxybehenic acid, 2-hydroxypalmitic acid, 2-hydroxytetracosenoic acid (preferably 2-hydroxynervonic acid), behenic acid, cerebronic acid, eicosanoic acid, heptadecanoic acid, hexadecadienoic acid, hexadecatrienoic acid, lauric acid, myristic acid, nervonic acid, or oleic acid production, respectively; and/or
[63266] (j) selecting of non-human organisms with especially high activity of the proteins of the invention from natural or from mutagenized resources and breeding them into the target organisms, e.g. the elite crops; and/or
[63267] (k) directing a protein encoded by the nucleic acid molecule of the invention or of the poly-peptide of the present invention having herein-mentioned activity selected from the group consisting of said activities mentioned in (a) and conferring a 2-hydroxybehenic acid, 2-hydroxypalmitic acid, 2-hydroxytetracosenoic acid (preferably 2-hydroxynervonic acid), behenic acid, cerebronic acid, eicosanoic acid, heptadecanoic acid, hexadecadienoic acid, hexadecatrienoic acid, lauric acid, myristic acid, nervonic acid, or oleic acid increasing activity, respectively, e.g. of a polypeptide having the activity of a protein as indicated in the respective line in Table II, application no. 12, columns 5 or 8, or its homologs or fragments, if for the corresponding nucleic acid molecule in the respective line in column 6 of Table I the term “plastidic” is indicated, to the plastids by the addition of a plastidial targeting sequence or if for the corresponding nucleic acid molecule in the respective line in column 6 of Table I the term “mitochondrial” is indicated, to the mitochondria by the addition of a mitochondrial targeting sequence; and/or
[63268] (l) generating the expression of a protein encoded by the nucleic acid molecule of the invention or of the polypeptide of the present invention having herein-mentioned activity selected from the group consisting of said activities mentioned in (a) and conferring a 2-hydroxybehenic acid, 2-hydroxypalmitic acid, 2-hydroxytetracosenoic acid (preferably 2-hydroxynervonic acid), behenic acid, cerebronic acid, eicosanoic acid, heptadecanoic acid, hexadecadienoic acid, hexadecatrienoic acid, lauric acid, myristic acid, nervonic acid, or oleic acid increasing activity, respectively, e.g. of a polypeptide having the activity of a protein as indicated in the respective line in Table II, application no. 12, columns 5 or 8, or its homologs or fragments, if for the corresponding nucleic acid molecule in the respective line in column 6 of Table I the term “plastidic” or “mitochondrial” is indicated, in these organelles by the stable or transient transformation, advantageously stable transformation, of organelles, preferably plastids or mitochondria, with an inventive nucleic acid sequence preferably in form of an expression cassette containing said sequence leading to the expression of the nucleic acids or polypeptides of the invention in the respective organelle; and/or
[63269] (m) generating the expression of a protein encoded by the nucleic acid molecule of the invention or of the polypeptide of the present invention having herein-mentioned activity selected from the group consisting of said activities mentioned in (a) and conferring a 2-hydroxybehenic acid, 2-hydroxypalmitic acid, 2-hydroxytetracosenoic acid (preferably 2-hydroxynervonic acid), behenic acid, cerebronic acid, eicosanoic acid, heptadecanoic acid, hexadecadienoic acid, hexadecatrienoic acid, lauric acid, myristic acid, nervonic acid, and/or oleic acid increasing activity, respectively, e.g. of a polypeptide having the activity of a protein as indicated in the respective line in Table II, application no. 12, columns 5 or 8, or its homologs or fragments, if for the corresponding nucleic acid molecule in the respective line in column 6 of Table I the term “plastidic” or “mitochondrial” is indicated, in these organelles by integration of a nucleic acid of the invention into the genome of the respective organelle under control of preferable a promoter selective for the respective organelle.

[63270] Preferably, said mRNA is the coding region of the nucleic acid molecule of the present invention and/or the protein conferring the increased expression of a protein encoded by the coding region of the nucleic acid molecule of the present invention alone or linked to a transit nucleic acid sequence or transit peptide encoding nucleic acid sequence or the polypeptide having the herein mentioned activity, e.g. conferring the generation of or increase of 2-hydroxybehenic acid, 2-hydroxypalmitic acid, 2-hydroxytetracosenoic acid (preferably 2-hydroxynervonic acid), behenic acid, cerebronic acid, eicosanoic acid, heptadecanoic acid, hexadecadienoic acid, hexadecatrienoic acid, lauric acid, myristic acid, nervonic acid, or oleic acid, respectively, after increasing the expression or activity of the encoded polypeptide, non-targeted or in organelles such as plastids and/or mitochondria, preferably plastids, or having the activity of a polypeptide having an activity as the protein as shown in the respective line in Table II, application no. 12, column 3, or its homologs. Preferably the increase of 2-hydroxybehenic acid, 2-hydroxypalmitic acid, 2-hydroxytetracosenoic acid (preferably 2-hydroxynervonic acid), behenic acid, cerebronic acid, eicosanoic acid, heptadecanoic acid, hexadecadienoic acid, hexadecatrienoic acid, lauric acid, myristic acid, nervonic acid, or oleic acid, respectively, takes place non-targeted or in plastids and/or mitochondria, preferably non-targeted or in plastids.

[63271] [0113.1.8.12] to [0122.1.8.12] for the disclosure of these paragraphs see [0113.1.8.8] to [0122.1.8.8] above.

[63272] The activation of an endogenous polypeptide having above-mentioned activity, e.g. having the activity of a protein as shown in the respective line in Table II, application no. 12, column 3 or of the polypeptide of the invention, e.g. conferring the increase of the fine chemical 2-hydroxybehenic acid, 2-hydroxypalmitic acid, 2-hydroxytetracosenoic acid (preferably 2-hydroxynervonic acid), behenic acid, cerebronic acid, eicosanoic acid, heptadecanoic acid, hexadecadienoic acid, hexadecatrienoic acid, lauric acid, myristic acid, nervonic acid, or oleic acid, respectively, by increase of expression or activity in the cytoplasm, and/or in the cytosol, and/or in an organelle, such as plastids or mitochondria, can also be increased by introducing a synthetic transcription factor, which binds close to the coding region of the gene encoding the protein as shown in the respective line in Table II, application no. 12, column 5 or 8, or homologs or fragments thereof, and activates its transcription. A chimeric zinc finger protein can be constructed, which comprises a specific DNA-binding domain and an activation domain as e.g. the VP16 domain of Herpes Simplex virus. The specific binding domain can bind to the regulatory region of the gene encoding the protein as shown in the respective line in Table II, application no. 12, column 5 or 8, or homologs or fragments thereof. The expression of the chimeric transcription factor in a non-human organism, in particular in a plant, leads to a specific expression of the protein as shown in the respective line in Table II, application no. 12, column 5 or 8, or homologs or fragments thereof, see e.g. in WO01/52620, Oriz, Proc. Natl. Acad. Sci. USA 99, 13290 (2002), or Guan, Proc. Natl. Acad. Sci. USA 99, 13296 (2002).

[63273] [0124.1.8.12] to [0127.1.8.12] for the disclosure of these paragraphs see [0124.1.8.8] to [0127.1.8.8] above.

[63274] Owing to the introduction of a gene or a plurality of genes conferring the expression of the nucleic acid molecule of the invention or the polypeptide of the invention, for example the nucleic acid construct mentioned below, or encoding the protein as shown in the respective line in Table II, application no. 12, column 5 or 8, or homologs or fragments thereof, into a non-human organism alone or in combination with other genes, it is possible not only to increase the biosynthetic flux towards the end product, but also to increase, modify or create de novo an advantageous, preferably novel metabolites composition in the non-human organism, e.g. an advantageous composition comprising a higher content of (from a viewpoint of nutritional physiology limited) 2-hydroxybehenic acid, 2-hydroxypalmitic acid, 2-hydroxytetracosenoic acid (preferably 2-hydroxynervonic acid), behenic acid, cerebronic acid, eicosanoic acid, heptadecanoic acid, hexadecadienoic acid, hexadecatrienoic acid, lauric acid, myristic acid, nervonic acid, or oleic acid and if desired other fatty acids, and/or other metabo-lites, in free or bound form.

[63275] for the disclosure of this paragraph see [0129.1.8.8] above.

[63276] Accordingly, in one embodiment, the process according to the invention relates to a process, which comprises:
[63277] (a) providing a non-human organism, preferably a microorganism, a plant cell, a plant tissue, a plant or a part thereof, more preferably a microorganism, a plant tissue, a plant or a part thereof;
[63278] (b) increasing the activity of a protein as shown in the respective line in Table II, application no. 12, column 3 or of a polypeptide being encoded by the respective nucleic acid molecule of the present invention and described below, e.g. conferring an increase of the fine chemical 2-hydroxybehenic acid, 2-hydroxypalmitic acid, 2-hydroxytetracosenoic acid (preferably 2-hydroxynervonic acid), behenic acid, cerebronic acid, eicosanoic acid, heptadecanoic acid, hexadecadienoic acid, hexadecatrienoic acid, lauric acid, myristic acid, nervonic acid, or oleic acid, respectively, in the non-human organism, preferably in the microorganism, the plant cell, the plant tissue, the plant or a part thereof, more preferably a microorganism, a plant tissue, a plant or a part thereof, especially cytoplasmic or in an organelle, like plastids or mitochondria,
[63279] (c) growing the non-human organism, preferably the microorganism, the plant cell, the plant tissue, the plant or a part thereof, under conditions which permit the production of said fine chemical in the non-human organism, preferably the microorganism, the plant cell, the plant tissue, the plant or a part thereof; and
[63280] (d) if desired, recovering, optionally isolating, said fine chemical, in free and/or bound form, and, optionally further free and/or bound fatty acids, and/or other metabolites synthesized by the non-human organism, the microorganism, the plant cell, the plant tissue, the plant or a part thereof.

[63281] [0131.1.8.12] to [0139.1.8.12] for the disclosure of these paragraphs see [0131.1.8.8] to [0139.1.8.8] above.

[63282] In another embodiment, the invention relates to a (isolated) nucleic acid molecule, which comprises a nucleic acid molecule selected from the group consisting of:
[63283] (a) a nucleic acid molecule encoding a polypeptide shown in Table II, application no. 12, column 5 or 8, preferably shown in Table II B, application no. 12, column 8, or a homolog or a fragment thereof;
[63284] (b) a nucleic acid molecule shown in Table I, application no. 12, column 5 or 8, preferably shown in Table I B, application no. 12, column 8, preferably the coding region thereof, or a homolog or a fragment thereof;
[63285] (c) a nucleic acid molecule, which, as a result of the degeneracy of the genetic code, can be derived from a polypeptide sequence depicted in column 5 or 8 of Table II, application no. 12, preferably in column 8 of Table II B, application no. 12;
[63286] (d) a nucleic acid molecule having at least 30% identity, preferably at least 40%, 50%, 60%, 70%, 75%, 80%, 85%, 90%, 95%, 96%, 97%, 98%, 99%, 99.5%, with the nucleic acid molecule sequence of a polynucleotide comprising the nucleic acid molecule shown in column 5 or 8 of Table I, application no. 12, preferably shown in column 8 of Table I B, application no. 12, preferably the coding region thereof;
[63287] (e) a nucleic acid molecule encoding a polypeptide having at least 30% identity, preferably at least 40%, 50% 60%, 70%, 75%, 80%, 85%, 90%, 95%, 96%, 97%, 98%, 99%, 99.5%, identity with the amino acid sequence of the polypeptide encoded by the nucleic acid molecule of (a), (b), (c) or (d);
[63288] (f) a nucleic acid molecule which hybridizes with a nucleic acid molecule of (a), (b), (c), (d) or (e) under stringent hybridization conditions;
[63289] (g) a nucleic acid molecule encoding a polypeptide which can be isolated with the aid of monoclonal or polyclonal antibodies made against a polypeptide encoded by one of the nucleic acid molecules of (a), (b), (c), (d), (e) or (f);
[63290] (h) a nucleic acid molecule encoding a polypeptide comprising the consensus sequence or one or more polypeptide motifs as shown in column 8 of Table IV, application no. 12;
[63291] (i) a nucleic acid molecule encoding a polypeptide having the activity represented by a respective protein as depicted in column 5 of Table II, application no. 12;
[63292] (j) a nucleic acid molecule comprising a polynucleotide which is obtained by amplifying a cDNA library or a genomic library using the primers in Table III, application no. 12, column 8;
[63293] and
[63294] (k) nucleic acid molecule which is obtainable by screening a suitable nucleic acid library, especially a cDNA library and/or a genomic library, under stringent hybridization conditions with a probe comprising one of the sequences of the nucleic acid molecule of (a), (b), (c), (d), (e), (f), (g), (h), (i) or (j) or with a fragment of at least 15 nt, preferably 20 nt, 30 nt, 50 nt, 100 nt, 200 nt,500 nt, 1000 nt, 1500 nt, 2000 nt or 3000 nt of the nucleic acid molecule characterized in (a), (b), (c), (d), (e), (f), (g), (h), (i) or (j);
[63295] or a nucleic acid molecule comprising a sequence which is complementary thereto.
   (All the references to Tables I to IV are references to the corresponding lines of Tables I to IV.)

[63296] In a preferred embodiment thereof said nucleic acid molecule according to (a), (b), (c), (d), (e), (f), (g), (h), (i), (j) or (k) encodes a polypeptide which has the activity of the respective polypeptide represented by a protein comprising a polypeptide as depicted in the respective line in column 5 of Table II, application no. 12.

[63297] In another preferred embodiment thereof said nucleic acid molecule according to (a), (b), (c), (d), (e), (f), (g), (h), (i), (j) or (k) confers a generation or an increase of the respective fine chemical in a non-human organism or a part thereof as compared to a corresponding wild-type non-human organism or part thereof.

[63298] In another preferred embodiment thereof said nucleic acid molecule according to (a), (b), (c), (d), (e), (f), (g), (h), (i), (j) or (k) encodes a polypeptide which has the activity of the respective polypeptide represented by a protein as depicted in the respective line in column 5 of Table II application no. 12 and confers a generation or an increase of the respective fine chemical in a non-human organism or a part thereof as compared to a corresponding wild-type non-human organism or part thereof.

[63299] In another embodiment, the invention relates to a (isolated) nucleic acid molecule, which comprises a nucleic acid molecule selected from the group consisting of:
[63300] (a) a nucleic acid molecule encoding a polypeptide shown in Table II, column 5 or 8, application no. 12, preferably shown in Table II A, application no. 12, in column 5 or in Table II A, application no. 12, column 8 or in Table II B, application no. 12, column 8, or a homolog or a fragment thereof;
[63301] (b) a nucleic acid molecule shown in Table I, application no. 12, column 5 or 8, preferably shown in Table I A, application no. 12, in column 5 or in Table I A, application no. 12, column 8 or in Table I B, application no. 12, column 8, preferably the coding region thereof, or a homolog or a fragment thereof;
[63302] (c) a nucleic acid molecule, which, as a result of the degeneracy of the genetic code, can be derived from a polypeptide sequence depicted in column 5 or 8 of Table II, application no. 12, preferably shown in Table II A, application no. 12, in column 5 or in Table II A, application no. 12, column 8 or in Table II B, application no. 12, column 8;
[63303] (d) a nucleic acid molecule having at least 30% identity, preferably at least 40%, 50%, 60%, 70%, 75%, 80%, 85%, 90%, 95%, 96%, 97%, 98%, 99%, 99.5%, with the nucleic acid molecule sequence of a polynucleotide comprising the nucleic acid molecule shown in column 5 or 8 of Table I, application no. 12, preferably shown in Table I A, application no. 12, in column 5 or in Table I A, application no. 12, column 8 or in Table I B column 8, preferably the coding region thereof;
[63304] (e) a nucleic acid molecule encoding a polypeptide having at least 30% identity, preferably at least 40%, 50% 60%, 70%, 75%, 80%, 85%, 90%, 95%, 96%, 97%, 98%, 99%, 99.5%, identity with the amino acid sequence of the polypeptide encoded by the nucleic acid molecule of (a), (b), (c) or (d);
[63305] (f) a nucleic acid molecule which hybridizes with a nucleic acid molecule of (a), (b), (c), (d) or (e) under stringent hybridization conditions;
[63306] (g) a nucleic acid molecule encoding a polypeptide which can be isolated with the aid of monoclonal or polyclonal antibodies made against a polypeptide encoded by one of the nucleic acid molecules of (a), (b), (c), (d), (e) or (f);
[63307] (h) a nucleic acid molecule encoding a polypeptide comprising the consensus sequence or one or more polypeptide motifs as shown in column 8 of Table IV, application no. 12;
[63308] (i) a nucleic acid molecule encoding a polypeptide having the activity represented by a respective protein as depicted in column 5 of Table II, application no. 12;
[63309] (j) a nucleic acid molecule comprising a polynucleotide which is obtained by amplifying a cDNA library or a genomic library using the primers in Table III, application no. 12, column 8;
[63310] and
[63311] (k) nucleic acid molecule which is obtainable by screening a suitable nucleic acid library, especially a cDNA library and/or a genomic library, under stringent hybridization conditions with a probe comprising one of the sequences of the nucleic acid molecule of (a), (b), (c), (d), (e), (f), (g), (h), (i) or (j) or with a fragment thereof having at least 15 nt, preferably 20 nt, 30 nt, 50 nt, 100 nt, 200 nt,500 nt, 1000 nt, 1500 nt, 2000 nt or 3000 nt of the nucleic acid molecule complementary to a nucleic acid sequence characterized in (a), (b), (c), (d), (e), (f), (g), (h), (i) or (j);
[63312] or a nucleic acid molecule comprising a sequence which is complementary thereto;
   whereby, preferably, the nucleic acid molecule according to (a), (b), (c), (d), (e), (f), (g), (h), (i), (j) or (k) distinguishes over the sequence depicted in Table I A and/or I B, application no. 12, column 5 or 8, or the coding regions thereof, by one or more nucleotides (especially but not exceeding 5%, preferably 4%, 3%, 2%, 1%, 0.5%, 0.2% or 0.1%). In an embodiment, the nucleic acid molecule of the invention does not consist of the sequence shown in Table I A and/or I B, application no. 12, column 5 or 8, or the coding region thereof. In another embodiment, the nucleic acid molecule of the present invention, preferably the coding region thereof, is at least 30%, 40%, 50%, 60%, 70%, 80%, 90%, 95% identical but less than 100%, 99.999%, 99.99%, 99.9%, 99%, 98%, 97%, 96% or 95% identical to the sequence shown in Table I A and/or I B, application no. 12, column 5 or 8, or the coding region thereof, respectively. In a further embodiment the nucleic acid molecule does not encode the polypeptide sequence shown in Table II A and/or II B, application no. 12, column 5 or 8 but homologs thereof. Accordingly, in one embodiment, the nucleic acid molecule of the present invention encodes in one embodiment a polypeptide which differs at least in one or more amino acids (especially but not exceeding 5%, preferably 4%, 3%, 2%, 1%, 0.5%, 0.2% or 0.1%) from the polypeptide shown in Table II, application no. 12, column 5 or 8 and does not encode a protein of the sequence shown in Table II A and/or II B, application no. 12, column 5 or 8.

[63313] Accordingly, in one embodiment, the protein encoded by a sequence of a nucleic acid according to (a), (b), (c), (d), (e), (f), (g), (h), (i), (j) or (k) does not consist of the sequence shown in Table I A and/or I B, application no. 12, column 5 or 8, or the coding region thereof. In a further embodiment, the protein of the present invention is at least 30%, 40%, 50%, 60%, 70%, 80%, 90%, 95% identical to protein sequence depicted in Table II A and/or II B, application no. 12, column 5 or 8 but less than 100%, preferably less than 99.999%, 99.99%, 99.9%, 99%, 98%, 97%, 96% or 95% identical to the sequence shown in Table II A and/or II B, application no. 12, column 5 or 8.

(All the references to Tables I to IV are references to the corresponding lines of Tables I to IV.)

[63314] In a preferred embodiment thereof said nucleic acid molecule according to (a), (b), (c), (d), (e), (f), (g), (h), (i), (j) or (k) encodes a polypeptide which has the activity of the respective polypeptide represented by a protein comprising a polypeptide as depicted in the respective line in column 5 of Table II, application no. 12.

[63315] In another preferred embodiment thereof said nucleic acid molecule according to (a), (b), (c), (d), (e), (f), (g), (h), (i), (j) or (k) confers a generation or an increase of the respective fine chemical in a non-human organism or a part thereof as compared to a corresponding wild-type non-human organism or part thereof.

[63316] In another preferred embodiment thereof said nucleic acid molecule according to (a), (b), (c), (d), (e), (f), (g), (h), (i), (j) or (k) encodes a polypeptide which has the activity of the respective polypeptide represented by a protein as depicted in the respective line in column 5 of Table II, application no. 12, and confers a generation or an increase of the respective fine chemical in a non-human organism or a part thereof as compared to a corresponding wild-type non-human organism or part thereof.

[63317] [0144.1.8.12] to [0155.1.8.12] for the disclosure of these paragraphs see [0144.1.8.8] to [0155.1.8.8] above.

[63318] In a preferred embodiment a nucleic acid construct, for example an expression cassette, comprises upstream, i.e. at the 5′ end of the encoding sequence, a promoter and downstream, i.e. at the 3′ end, a polyadenylation signal and optionally other regulatory elements which are operably linked to the intervening encoding sequence with one of the nucleic acids as depicted in the respective line in Table I, application no. 12, column 5 or 8, preferably the coding region thereof, or a homolog or a fragment thereof. By an operable linkage is meant the sequential arrangement of promoter, encoding sequence, terminator, optionally other regulatory elements and optionally targeting sequences in such a way that each of the regulatory elements/targeting sequence can fulfill its function in the expression of the encoding sequence in due manner. In one embodiment the sequences preferred for operable linkage are targeting sequences for ensuring subcellular localization in organelles, like plastids or mitochondria. However, targeting sequences for ensuring subcellular localization in the endoplasmic reticulum (=ER), in the nucleus, in oil corpuscles or other compartments may also be employed as well as translation promoters such as the 5′ lead sequence in tobacco mosaic virus (Gallie et al., Nucl. Acids Res. 15, 8693 (1987)).

[63319] for the disclosure of this paragraph see [0157.1.8.8] above

[63320] In an embodiment, the invention relates to an expression cassette, comprising
[63321] 1) a promoter, preferably a promoter selected from the group consisting of Big35S, PCUbi, Super and USP;
[63322] 2) a nucleic acid molecule selected from the group consisting of
   [63323] (a) a nucleic acid molecule encoding a polypeptide shown in Table II, application no. 12, column 5 or 8, preferably shown in Table II A, application no. 12, column 5, or in Table II A, application no. 12, column 8, or in Table II B, application no. 12, column 8, or a homolog or a fragment thereof;
   [63324] (b) a nucleic acid molecule shown in Table I, application no. 12, column 5 or 8, preferably shown in Table I A, application no. 12, column 5, or in Table I A, application no. 12, column 8, or in Table I B, application no. 12, column 8, preferably the coding region thereof, or a homolog or a fragment thereof;
   [63325] (c) a nucleic acid molecule, which, as a result of the degeneracy of the genetic code, can be derived from a polypeptide sequence depicted in column 5 or 8 of Table II, application no. 12, preferably shown in Table II A, application no. 12, column 5, or in Table II A, application no. 12, column 8, or in Table II B, application no. 12, column 8;
   [63326] (d) a nucleic acid molecule having at least 30% identity, preferably at least 40%, 50%, 60%, 70%, 75%, 80%, 85%, 90%, 95%, 96%, 97%, 98%, 99%, 99.5%, with the nucleic acid molecule sequence of a polynucleotide comprising the nucleic acid molecule shown in column 5 or 8 of Table I, application no. 12, preferably shown in Table I A, application no. 12, column 5, or in Table I A, application no. 12, column 8, or in Table I B, application no. 12, column 8, preferably the coding region thereof;
   [63327] (e) a nucleic acid molecule encoding a polypeptide having at least 30% identity, preferably at least 40%, 50% 60%, 70%, 75%, 80%, 85%, 90%, 95%, 96%, 97%, 98%, 99%, 99.5%, identity with the amino acid sequence of the polypeptide encoded by the nucleic acid molecule of (a), (b), (c) or (d);
   [63328] (f) a nucleic acid molecule which hybridizes with a nucleic acid molecule of (a), (b), (c), (d) or (e) under stringent hybridization conditions;
   [63329] (g) a nucleic acid molecule encoding a polypeptide which can be isolated with the aid of monoclonal or polyclonal antibodies made against a polypeptide encoded by one of the nucleic acid molecules of (a), (b), (c), (d), (e) or (f);
   [63330] (h) a nucleic acid molecule encoding a polypeptide comprising the consensus sequence or one or more polypeptide motifs as shown in column 8 of Table IV, application no. 12;
   [63331] (i) a nucleic acid molecule encoding a polypeptide having the activity represented by a respective protein as depicted in column 5 of Table II, application no. 12;
   [63332] (j) a nucleic acid molecule comprising a polynucleotide which is obtained by amplifying a cDNA library or a genomic library using the primers in Table III, application no. 12, column 8;
   [63333] and
   [63334] (k) nucleic acid molecule which is obtainable by screening a suitable nucleic acid library, especially a cDNA library and/or a genomic library, under stringent hybridization conditions with a probe comprising one of the sequences of the nucleic acid molecule of (a), (b), (c), (d), (e), (f), (g), (h), (i) or (j) or with a fragment of at least 15 nt, preferably 20 nt, 30 nt, 50 nt, 100 nt, 200 nt,500 nt, 1000 nt, 1500 nt, 2000 nt or 3000 nt of the nucleic acid molecule characterized in (a), (b), (c), (d), (e), (f), (g), (h), (i) or (j);
   [63335] or a nucleic acid molecule comprising a sequence which is complementary thereto.
      and, optionally
[63336] 3) nucleic acid molecule encoding a transit peptide, preferably encoding a plastidal transit peptide or a mitochondrial transit peptide;
   which are operable linked.
   (All the references to Tables I to IV are references to the corresponding lines of Tables I to IV.)

[63337] In a preferred embodiment thereof said nucleic acid molecule according to 2 (a), (b), (c), (d), (e), (f), (g), (h), (i), (j) or (k) encodes a polypeptide which has the activity of the respective polypeptide represented by a protein comprising a polypeptide as depicted in the respective line in column 5 of Table II, application no. 12.

[63338] In another preferred embodiment thereof said nucleic acid molecule according to 2 (a), (b), (c), (d), (e), (f), (g), (h), (i), (j) or (k) confers a generation or an increase of the respective fine chemical in a non-human organism or a part thereof as compared to a corresponding wild-type non-human organism or part thereof.

[63339] In another preferred embodiment thereof said nucleic acid molecule according to 2 (a), (b), (c), (d), (e), (f), (g), (h), (i), (j) or (k) encodes a polypeptide which has the activity of the respective polypeptide represented by a protein as depicted in the respective line in column 5 of Table II application no. 12 and confers a generation or an increase of the respective fine chemical in a non-human organism or a part thereof as compared to a corresponding wild-type non-human organism or part thereof.

[63340] In another embodiment thereof the expression cassette comprises 3) a nucleic acid molecule encoding a transit peptide, preferably encoding a plastidal transit peptide, especially in case in column 6 of Table I, application no. 12, in the same line as of the respective nucleic acid molecule according to 2) “plastidic” is depicted, or encoding a mitochondrial transit peptide, especially in case in column 6 of Table I, application no. 12, in the same line as of the respective nucleic acid molecule according to 2) “mitochondrial” is depicted.

[63341] In another embodiment thereof the expression cassette does not comprise 3) a nucleic acid molecule encoding a transit peptide, especially in case in column 6 of Table I, application no. 12, in the same line as of the respective nucleic acid molecule according to 2) “non-targeted” is depicted.

[63342] In a further embodiment, the invention relates to an expression cassette, comprising
[63343] 1) a promoter, preferably a promoter selected from the group consisting of Big35S, PCUbi, Super and USP;
[63344] 2) a nucleic acid molecule selected from the group consisting of
   [63345] (a) a nucleic acid molecule encoding a polypeptide shown in Table II, application no. 12, column 5 or 8, preferably shown in Table II A, application no. 12, column 5, or in Table II A, application no. 12, column 8, or in Table II B, application no. 12, column 8, or a homolog or a fragment thereof;
   [63346] (b) a nucleic acid molecule shown in Table I, application no. 12, column 5 or 8, preferably shown in Table I A, application no. 12, column 5, or in Table I A, application no. 12, column 8, or in Table I B, application no. 12, column 8, preferably the coding region thereof, or a homolog or a fragment thereof;
   [63347] (c) a nucleic acid molecule, which, as a result of the degeneracy of the genetic code, can be derived from a polypeptide sequence depicted in column 5 or 8 of Table II, application no. 12, preferably shown in Table II A, application no. 12, column 5, or in Table II A, application no. 12, column 8, or in Table II B, application no. 12, column 8;
   [63348] (d) a nucleic acid molecule having at least 30% identity, preferably at least 40%, 50%, 60%, 70%, 75%, 80%, 85%, 90%, 95%, 96%, 97%, 98%, 99%, 99.5%, with the nucleic acid molecule sequence of a polynucleotide comprising the nucleic acid molecule shown in column 5 or 8 of Table I, application no. 12, preferably shown in Table I A, application no. 12, column 5, or in Table I A, application no. 12, column 8,or in Table I B, application no. 12, column 8, preferably the coding region thereof;
   [63349] (e) a nucleic acid molecule encoding a polypeptide having at least 30% identity, preferably at least 40%, 50% 60%, 70%, 75%, 80%, 85%, 90%, 95%, 96%, 97%, 98%, 99%, 99.5%, identity with the amino acid sequence of the polypeptide encoded by the nucleic acid molecule of (a), (b), (c) or (d);
   [63350] (f) a nucleic acid molecule which hybridizes with a nucleic acid molecule of (a), (b), (c), (d) or (e) under stringent hybridization conditions;
   [63351] (g) a nucleic acid molecule encoding a polypeptide which can be isolated with the aid of monoclonal or polyclonal antibodies made against a polypeptide encoded by one of the nucleic acid molecules of (a), (b), (c), (d), (e) or (f);
   [63352] (h) a nucleic acid molecule encoding a polypeptide comprising the consensus sequence or one or more polypeptide motifs as shown in column 8 of Table IV, application no. 12;
   [63353] (i) a nucleic acid molecule encoding a polypeptide having the activity represented by a respective protein as depicted in column 5 of Table II, application no. 12;
   [63354] (j) a nucleic acid molecule comprising a polynucleotide which is obtained by amplifying a cDNA library or a genomic library using the primers in Table III, application no. 12, column 8;
   [63355] and
   [63356] (k) nucleic acid molecule which is obtainable by screening a suitable nucleic acid library, especially a cDNA library and/or a genomic library, under stringent hybridization conditions with a probe comprising one of the sequences of the nucleic acid molecule of (a), (b), (c), (d), (e), (f), (g), (h), (i) or (j) or with a fragment of at least 15 nt, preferably 20 nt, 30 nt, 50 nt, 100 nt, 200 nt,500 nt, 1000 nt, 1500 nt, 2000 nt or 3000 nt of the nucleic acid molecule characterized in (a), (b), (c), (d), (e), (f), (g), (h), (i) or (j);
   [63357] or a nucleic acid molecule comprising a sequence which is complementary thereto;
      and, optionally
[63358] 3) nucleic acid molecule encoding a transit peptide, preferably encoding a plastidal transit peptide or a mitochondrial transit peptide;
   which are operable linked and
   whereby, preferably, the nucleic acid molecule according to 2 (a), (b), (c), (d), (e), (f), (g), (h), (i), (j) or (k) distinguishes over the sequence depicted in Table I A and/or I B, application no. 12, column 5 or 8, or the coding region thereof, by one or more nucleotides (especially but not exceeding 5%, preferably 4%, 3%, 2%, 1%, 0.5%, 0.2% or 0.1%). In an embodiment, the nucleic acid molecule of the invention according to 2) does not consist of the sequence shown in Table I A and/or I B, application no. 12, column 5 or 8, or the coding region thereof. In another embodiment, the nucleic acid molecule of the present invention, preferably the coding region thereof, is at least 30%, 40%, 50%, 60%, 70%, 80%, 90%, 95% identical but less than 100%, 99.999%, 99.99%, 99.9%, 99%, 98%, 97%, 96% or 95% identical to the sequence shown in Table I A and/or I B, application no. 12, column 5 or 8, or the coding region thereof, respectively. In a further embodiment the nucleic acid molecule does not encode the polypeptide sequence shown in Table II A and/or II B, application no. 12, column 5 or 8 but homologs thereof. Accordingly, in one embodiment, the nucleic acid molecule of the present invention encodes in one embodiment a polypeptide which differs at least in one or more amino acids (especially but not exceeding 5%, preferably 4%, 3%, 2%, 1%, 0.5%, 0.2% or 0.1%) from the polypeptide shown in Table II, application no. 12, column 5 or 8 and does not encode a protein of the sequence shown in Table II A and/or II B, application no. 12, column 5 or 8.

[63359] Accordingly, in one embodiment, the protein encoded by a sequence of a nucleic acid according to 2(a), (b), (c), (d), (e), (f), (g), (h), (i), (j) or (k) does not consist of the sequence shown in Table I A and/or I B, application no. 12, column 5 or 8, or the coding region thereof. In a further embodiment, the protein of the present invention is at least 30%, 40%, 50%, 60%, 70%, 80%, 90%, 95% identical to protein sequence depicted in Table II A and/or II B, application no. 12, column 5 or 8 but less than 100%, 99.999%, 99.99%, 99.9%, 99%, 98%, 97%, 96% or 95% identical to the sequence shown in Table II A and/or II B, application no. 12, column 5 or 8.

(All the references to Tables I to IV are references to the corresponding lines of Tables I to IV.)

[63360] In a preferred embodiment thereof said nucleic acid molecule according to 2 (a), (b), (c), (d), (e), (f), (g), (h), (i), (j) or (k) encodes a polypeptide which has the activity of the respective polypeptide represented by a protein comprising a polypeptide as depicted in the respective line in column 5 of Table II, application no. 12.

[63361] In another preferred embodiment thereof said nucleic acid molecule according to 2 (a), (b), (c), (d), (e), (f), (g), (h), (i), (j) or (k) confers a generation or an increase of the respective fine chemical in a non-human organism or a part thereof as compared to a corresponding wild-type non-human organism or part thereof.

[63362] In another preferred embodiment thereof said nucleic acid molecule according to 2 (a), (b), (c), (d), (e), (f), (g), (h), (i), (j) or (k) encodes a polypeptide which has the activity of the respective polypeptide represented by a protein as depicted in the respective line in column 5 of Table II application no. 12 and confers a generation or an increase of the respective fine chemical in a non-human organism or a part thereof as compared to a corresponding wild-type non-human organism or part thereof.

[63363] In another embodiment thereof the expression cassette comprises 3) a nucleic acid molecule encoding a transit peptide, preferably encoding a plastidal transit peptide, especially in case in column 6 of Table I, application no. 12, in the same line as of the respective nucleic acid molecule according to 2) “plastidic” is depicted, or encoding a mitochondrial transit peptide, especially in case in column 6 of Table I, application no. 12, in the same line as of the respective nucleic acid molecule according to 2) “mitochondrial” is depicted.

[63364] In another embodiment thereof the expression cassette does not comprise 3) a nucleic acid molecule encoding a transit peptide, especially in case in column 6 of Table I, application no. 12, in the same line as of the respective nucleic acid molecule according to 2) “non-targeted” is depicted.

[63365] In an embodiment the present invention relates to an expresssion cassette comprising a) a promoter, preferably a promoter selected from the group consisting of Big35S, PCUbi, Super and USP, in particular p-PcUBI; and b) the nucleic acid SEQ ID NO. 113651, or a homolog or fragment thereof, or a homolog thereof being depicted in Table I, application no. 12, column 8, in the same line as SEQ ID NO. 113651, preferably the coding region thereof, a homolog or a fragment thereof; which are operable linked.

[63366] In an embodiment thereof the expression cassette comprises in addition c) a nucleic acid molecule encoding a transit peptide, especially a plastidal transit petide in case in Table I, application no. 12, in column 6 in the same line as SEQ ID NO. 113651 is depicted, plastidic is mentioned, or a mitochondrial transit peptide in case in Table I, application no. 12, in column 6 in the same line as SEQ ID NO. 113651 is depicted, mitochondrial is mentioned; which is operable linked, too.

[63367] In another embodiment thereof the expression cassette does not comprise an additional transit peptide in case in Table I, application no. 12, in column 6 in the same line as SEQ ID NO. 113651 is depicted, non-targeted is mentioned.

[63368] In an embodiment the present invention relates to an expresssion cassette comprising a) a promoter, preferably a promoter selected from the group consisting of Big35S, PCUbi, Super and USP, in particular p-PcUBI; and b) the nucleic acid SEQ ID NO. 1061, or a homolog or fragment thereof, or a homolog thereof being depicted in Table I, application no. 12, column 8, in the same line as SEQ ID NO. 1061, preferably the coding region thereof, a homolog or a fragment thereof; which are operable linked.

[63369] In an embodiment thereof the expression cassette comprises in addition c) a nucleic acid molecule encoding a transit peptide, especially a plastidal transit petide in case in Table I, application no. 12, in column 6 in the same line as SEQ ID NO. 1061 is depicted, plastidic is mentioned, or a mitochondrial transit peptide in case in Table I, application no. 12, in column 6 in the same line as SEQ ID NO. 1061 is depicted, mitochondrial is mentioned; which is operable linked, too.

[63370] In another embodiment thereof the expression cassette does not comprise an additional transit peptide in case in Table I, application no. 12, in column 6 in the same line as SEQ ID NO. 1061 is depicted, non-targeted is mentioned.

[63371] In an embodiment the present invention relates to an expresssion cassette comprising a) a promoter, preferably a promoter selected from the group consisting of Big35S, PCUbi, Super and USP, in particular p-PcUBI; and b) the nucleic acid SEQ ID NO. 19419, or a homolog or fragment thereof, or a homolog thereof being depicted in Table I, application no. 12, column 8, in the same line as SEQ ID NO. 19419, preferably the coding region thereof, a homolog or a fragment thereof; which are operable linked.

[63372] In an embodiment thereof the expression cassette comprises in addition c) a nucleic acid molecule encoding a transit peptide, especially a plastidal transit petide in case in Table I, application no. 12, in column 6 in the same line as SEQ ID NO. 19419 is depicted, plastidic is mentioned, or a mitochondrial transit peptide in case in Table I, application no. 12, in column 6 in the same line as SEQ ID NO. 19419 is depicted, mitochondrial is mentioned; which is operable linked, too.

[63373] In another embodiment thereof the expression cassette does not comprise an additional transit peptide in case in Table I, application no. 12, in column 6 in the same line as SEQ ID NO. 19419 is depicted, non-targeted is mentioned.

[63374] In an embodiment the present invention relates to an expresssion cassette comprising a) a promoter, preferably a promoter selected from the group consisting of Big35S, PCUbi, Super and USP, in particular p-PcUBI; and b) the nucleic acid SEQ ID NO. 98522, or a homolog or fragment thereof, or a homolog thereof being depicted in Table I, application no. 12, column 8, in the same line as SEQ ID NO. 98522, preferably the coding region thereof, a homolog or a fragment thereof; which are operable linked.

[63375] In an embodiment thereof the expression cassette comprises in addition c) a nucleic acid molecule encoding a transit peptide, especially a plastidal transit petide in case in Table I, application no. 12, in column 6 in the same line as SEQ ID NO. 98522 is depicted, plastidic is mentioned, or a mitochondrial transit peptide in case in Table I, application no. 12, in column 6 in the same line as SEQ ID NO. 98522 is depicted, mitochondrial is mentioned; which is operable linked, too.

[63376] In another embodiment thereof the expression cassette does not comprise an additional transit peptide in case in Table I, application no. 12, in column 6 in the same line as SEQ ID NO. 98522 is depicted, non-targeted is mentioned.

[63377] In an embodiment the present invention relates to an expresssion cassette comprising a) a promoter, preferably a promoter selected from the group consisting of Big35S, PCUbi, Super and USP, in particular p-PcUBI; and b) the nucleic acid SEQ ID NO. 68657, or a homolog or fragment thereof, or a homolog thereof being depicted in Table I, application no. 12, column 8, in the same line as SEQ ID NO. 68657, preferably the coding region thereof, a homolog or a fragment thereof; which are operable linked.

[63378] In an embodiment thereof the expression cassette comprises in addition c) a nucleic acid molecule encoding a transit peptide, especially a plastidal transit petide in case in Table I, application no. 12, in column 6 in the same line as SEQ ID NO. 68657 is depicted, plastidic is mentioned, or a mitochondrial transit peptide in case in Table I, application no. 12, in column 6 in the same line as SEQ ID NO. 68657 is depicted, mitochondrial is mentioned; which is operable linked, too.

[63379] In another embodiment thereof the expression cassette does not comprise an additional transit peptide in case in Table I, application no. 12, in column 6 in the same line as SEQ ID NO. 68657 is depicted, non-targeted is mentioned.

[63380] In an embodiment the present invention relates to an expresssion cassette comprising a) a promoter, preferably a promoter selected from the group consisting of Big35S, PCUbi, Super and USP, in particular p-PcUBI; and b) the nucleic acid SEQ ID NO. 1696, or a homolog or fragment thereof, or a homolog thereof being depicted in Table I, application no. 12, column 8, in the same line as SEQ ID NO. 1696, preferably the coding region thereof, a homolog or a fragment thereof; which are operable linked.

[63381] In an embodiment thereof the expression cassette comprises in addition c) a nucleic acid molecule encoding a transit peptide, especially a plastidal transit petide in case in Table I, application no. 12, in column 6 in the same line as SEQ ID NO. 1696 is depicted, plastidic is mentioned, or a mitochondrial transit peptide in case in Table I, application no. 12, in column 6 in the same line as SEQ ID NO. 1696 is depicted, mitochondrial is mentioned; which is operable linked, too.

[63382] In another embodiment thereof the expression cassette does not comprise an additional transit peptide in case in Table I, application no. 12, in column 6 in the same line as SEQ ID NO. 1696 is depicted, non-targeted is mentioned.

[63383] In an embodiment the present invention relates to an expresssion cassette comprising a) a promoter, preferably a promoter selected from the group consisting of Big35S, PCUbi, Super and USP, in particular p-PcUBI; and b) the nucleic acid SEQ ID NO. 22832, or a homolog or fragment thereof, or a homolog thereof being depicted in Table I, application no. 12, column 8, in the same line as SEQ ID NO. 22832, preferably the coding region thereof, a homolog or a fragment thereof; which are operable linked.

[63384] In an embodiment thereof the expression cassette comprises in addition c) a nucleic acid molecule encoding a transit peptide, especially a plastidal transit petide in case in Table I, application no. 12, in column 6 in the same line as SEQ ID NO. 22832 is depicted, plastidic is mentioned, or a mitochondrial transit peptide in case in Table I, application no. 12, in column 6 in the same line as SEQ ID NO. 22832 is depicted, mitochondrial is mentioned; which is operable linked, too.

[63385] In another embodiment thereof the expression cassette does not comprise an additional transit peptide in case in Table I, application no. 12, in column 6 in the same line as SEQ ID NO. 22832 is depicted, non-targeted is mentioned.

[63386] In an embodiment the present invention relates to an expresssion cassette comprising a) a promoter, preferably a promoter selected from the group consisting of Big35S, PCUbi, Super and USP, in particular p-PcUBI; and b) the nucleic acid SEQ ID NO. 2935, or a homolog or fragment thereof, or a homolog thereof being depicted in Table I, application no. 12, column 8, in the same line as SEQ ID NO. 2935, preferably the coding region thereof, a homolog or a fragment thereof; which are operable linked.

[63387] In an embodiment thereof the expression cassette comprises in addition c) a nucleic acid molecule encoding a transit peptide, especially a plastidal transit petide in case in Table I, application no. 12, in column 6 in the same line as SEQ ID NO. 2935 is depicted, plastidic is mentioned, or a mitochondrial transit peptide in case in Table I, application no. 12, in column 6 in the same line as SEQ ID NO. 2935 is depicted, mitochondrial is mentioned; which is operable linked, too.

[63388] In another embodiment thereof the expression cassette does not comprise an additional transit peptide in case in Table I, application no. 12, in column 6 in the same line as SEQ ID NO. 2935 is depicted, non-targeted is mentioned.

[63389] In an embodiment the present invention relates to an expresssion cassette comprising a) a promoter, preferably a promoter selected from the group consisting of Big35S, PCUbi, Super and USP, in particular p-PcUBI; and b) the nucleic acid SEQ ID NO. 109717, or a homolog or fragment thereof, or a homolog thereof being depicted in Table I, application no. 12, column 8, in the same line as SEQ ID NO. 109717, preferably the coding region thereof, a homolog or a fragment thereof; which are operable linked.

[63390] In an embodiment thereof the expression cassette comprises in addition c) a nucleic acid molecule encoding a transit peptide, especially a plastidal transit petide in case in Table I, application no. 12, in column 6 in the same line as SEQ ID NO. 109717 is depicted, plastidic is mentioned, or a mitochondrial transit peptide in case in Table I, application no. 12, in column 6 in the same line as SEQ ID NO. 109717 is depicted, mitochondrial is mentioned; which is operable linked, too.

[63391] In another embodiment thereof the expression cassette does not comprise an additional transit peptide in case in Table I, application no. 12, in column 6 in the same line as SEQ ID NO. 109717 is depicted, non-targeted is mentioned.

[63392] In an embodiment the present invention relates to an expresssion cassette comprising a) a promoter, preferably a promoter selected from the group consisting of Big35S, PCUbi, Super and USP, in particular p-PcUBI; and b) the nucleic acid SEQ ID NO. 23482, or a homolog or fragment thereof, or a homolog thereof being depicted in Table I, application no. 12, column 8, in the same line as SEQ ID NO. 23482, preferably the coding region thereof, a homolog or a fragment thereof; which are operable linked.

[63393] In an embodiment thereof the expression cassette comprises in addition c) a nucleic acid molecule encoding a transit peptide, especially a plastidal transit petide in case in Table I, application no. 12, in column 6 in the same line as SEQ ID NO. 23482 is depicted, plastidic is mentioned, or a mitochondrial transit peptide in case in Table I, application no. 12, in column 6 in the same line as SEQ ID NO. 23482 is depicted, mitochondrial is mentioned; which is operable linked, too.

[63394] In another embodiment thereof the expression cassette does not comprise an additional transit peptide in case in Table I, application no. 12, in column 6 in the same line as SEQ ID NO. 23482 is depicted, non-targeted is mentioned.

[63395] In an embodiment the present invention relates to an expresssion cassette comprising a) a promoter, preferably a promoter selected from the group consisting of Big35S, PCUbi, Super and USP, in particular p-PcUBI; and b) the nucleic acid SEQ ID NO. 3279, or a homolog or fragment thereof, or a homolog thereof being depicted in Table I, application no. 12, column 8, in the same line as SEQ ID NO. 3279, preferably the coding region thereof, a homolog or a fragment thereof; which are operable linked.

[63396] In an embodiment thereof the expression cassette comprises in addition c) a nucleic acid molecule encoding a transit peptide, especially a plastidal transit petide in case in Table I, application no. 12, in column 6 in the same line as SEQ ID NO. 3279 is depicted, plastidic is mentioned, or a mitochondrial transit peptide in case in Table I, application no. 12, in column 6 in the same line as SEQ ID NO. 3279 is depicted, mitochondrial is mentioned; which is operable linked, too.

[63397] In another embodiment thereof the expression cassette does not comprise an additional transit peptide in case in Table I, application no. 12, in column 6 in the same line as SEQ ID NO. 3279 is depicted, non-targeted is mentioned.

[63398] In an embodiment the present invention relates to an expresssion cassette comprising a) a promoter, preferably a promoter selected from the group consisting of Big35S, PCUbi, Super and USP, in particular p-PcUBI; and b) the nucleic acid SEQ ID NO. 23844, or a homolog or fragment thereof, or a homolog thereof being depicted in Table I, application no. 12, column 8, in the same line as SEQ ID NO. 23844, preferably the coding region thereof, a homolog or a fragment thereof; which are operable linked.

[63399] In an embodiment thereof the expression cassette comprises in addition c) a nucleic acid molecule encoding a transit peptide, especially a plastidal transit petide in case in Table I, application no. 12, in column 6 in the same line as SEQ ID NO. 23844 is depicted, plastidic is mentioned, or a mitochondrial transit peptide in case in Table I, application no. 12, in column 6 in the same line as SEQ ID NO. 23844 is depicted, mitochondrial is mentioned; which is operable linked, too.

[63400] In another embodiment thereof the expression cassette does not comprise an additional transit peptide in case in Table I, application no. 12, in column 6 in the same line as SEQ ID NO. 23844 is depicted, non-targeted is mentioned.

[63401] In an embodiment the present invention relates to an expresssion cassette comprising a) a promoter, preferably a promoter selected from the group consisting of Big35S, PCUbi, Super and USP, in particular p-PcUBI; and b) the nucleic acid SEQ ID NO. 68849, or a homolog or fragment thereof, or a homolog thereof being depicted in Table I, application no. 12, column 8, in the same line as SEQ ID NO. 68849, preferably the coding region thereof, a homolog or a fragment thereof; which are operable linked.

[63402] In an embodiment thereof the expression cassette comprises in addition c) a nucleic acid molecule encoding a transit peptide, especially a plastidal transit petide in case in Table I, application no. 12, in column 6 in the same line as SEQ ID NO. 68849 is depicted, plastidic is mentioned, or a mitochondrial transit peptide in case in Table I, application no. 12, in column 6 in the same line as SEQ ID NO. 68849 is depicted, mitochondrial is mentioned; which is operable linked, too.

[63403] In another embodiment thereof the expression cassette does not comprise an additional transit peptide in case in Table I, application no. 12, in column 6 in the same line as SEQ ID NO. 68849 is depicted, non-targeted is mentioned.

[63404] In an embodiment the present invention relates to an expresssion cassette comprising a) a promoter, preferably a promoter selected from the group consisting of Big35S, PCUbi, Super and USP, in particular p-PcUBI; and b) the nucleic acid SEQ ID NO. 4102, or a homolog or fragment thereof, or a homolog thereof being depicted in Table I, application no. 12, column 8, in the same line as SEQ ID NO. 4102, preferably the coding region thereof, a homolog or a fragment thereof; which are operable linked.

[63405] In an embodiment thereof the expression cassette comprises in addition c) a nucleic acid molecule encoding a transit peptide, especially a plastidal transit petide in case in Table I, application no. 12, in column 6 in the same line as SEQ ID NO. 4102 is depicted, plastidic is mentioned, or a mitochondrial transit peptide in case in Table I, application no. 12, in column 6 in the same line as SEQ ID NO. 4102 is depicted, mitochondrial is mentioned; which is operable linked, too.

[63406] In another embodiment thereof the expression cassette does not comprise an additional transit peptide in case in Table I, application no. 12, in column 6 in the same line as SEQ ID NO. 4102 is depicted, non-targeted is mentioned.

[63407] In an embodiment the present invention relates to an expresssion cassette comprising a) a promoter, preferably a promoter selected from the group consisting of Big35S, PCUbi, Super and USP, in particular p-PcUBI; and b) the nucleic acid SEQ ID NO. 4348, or a homolog or fragment thereof, or a homolog thereof being depicted in Table I, application no. 12, column 8, in the same line as SEQ ID NO. 4348, preferably the coding region thereof, a homolog or a fragment thereof; which are operable linked.

[63408] In an embodiment thereof the expression cassette comprises in addition c) a nucleic acid molecule encoding a transit peptide, especially a plastidal transit petide in case in Table I, application no. 12, in column 6 in the same line as SEQ ID NO. 4348 is depicted, plastidic is mentioned, or a mitochondrial transit peptide in case in Table I, application no. 12, in column 6 in the same line as SEQ ID NO. 4348 is depicted, mitochondrial is mentioned; which is operable linked, too.

[63409] In another embodiment thereof the expression cassette does not comprise an additional transit peptide in case in Table I, application no. 12, in column 6 in the same line as SEQ ID NO. 4348 is depicted, non-targeted is mentioned.

[63410] In an embodiment the present invention relates to an expresssion cassette comprising a) a promoter, preferably a promoter selected from the group consisting of Big35S, PCUbi, Super and USP, in particular p-PcUBI; and b) the nucleic acid SEQ ID NO. 122565, or a homolog or fragment thereof, or a homolog thereof being depicted in Table I, application no. 12, column 8, in the same line as SEQ ID NO. 122565, preferably the coding region thereof, a homolog or a fragment thereof; which are operable linked.

[63411] In an embodiment thereof the expression cassette comprises in addition c) a nucleic acid molecule encoding a transit peptide, especially a plastidal transit petide in case in Table I, application no. 12, in column 6 in the same line as SEQ ID NO. 122565 is depicted, plastidic is mentioned, or a mitochondrial transit peptide in case in Table I, application no. 12, in column 6 in the same line as SEQ ID NO. 122565 is depicted, mitochondrial is mentioned; which is operable linked, too.

[63412] In another embodiment thereof the expression cassette does not comprise an additional transit peptide in case in Table I, application no. 12, in column 6 in the same line as SEQ ID NO. 122565 is depicted, non-targeted is mentioned.

[63413] In an embodiment the present invention relates to an expresssion cassette comprising a) a promoter, preferably a promoter selected from the group consisting of Big35S, PCUbi, Super and USP, in particular p-PcUBI; and b) the nucleic acid SEQ ID NO. 4904, or a homolog or fragment thereof, or a homolog thereof being depicted in Table I, application no. 12, column 8, in the same line as SEQ ID NO. 4904, preferably the coding region thereof, a homolog or a fragment thereof; which are operable linked.

[63414] In an embodiment thereof the expression cassette comprises in addition c) a nucleic acid molecule encoding a transit peptide, especially a plastidal transit petide in case in Table I, application no. 12, in column 6 in the same line as SEQ ID NO. 4904 is depicted, plastidic is mentioned, or a mitochondrial transit peptide in case in Table I, application no. 12, in column 6 in the same line as SEQ ID NO. 4904 is depicted, mitochondrial is mentioned; which is operable linked, too.

[63415] In another embodiment thereof the expression cassette does not comprise an additional transit peptide in case in Table I, application no. 12, in column 6 in the same line as SEQ ID NO. 4904 is depicted, non-targeted is mentioned.

[63416] In an embodiment the present invention relates to an expresssion cassette comprising a) a promoter, preferably a promoter selected from the group consisting of Big35S, PCUbi, Super and USP, in particular p-PcUBI; and b) the nucleic acid SEQ ID NO. 5318, or a homolog or fragment thereof, or a homolog thereof being depicted in Table I, application no. 12, column 8, in the same line as SEQ ID NO. 5318, preferably the coding region thereof, a homolog or a fragment thereof; which are operable linked.

[63417] In an embodiment thereof the expression cassette comprises in addition c) a nucleic acid molecule encoding a transit peptide, especially a plastidal transit petide in case in Table I, application no. 12, in column 6 in the same line as SEQ ID NO. 5318 is depicted, plastidic is mentioned, or a mitochondrial transit peptide in case in Table I, application no. 12, in column 6 in the same line as SEQ ID NO. 5318 is depicted, mitochondrial is mentioned; which is operable linked, too.

[63418] In another embodiment thereof the expression cassette does not comprise an additional transit peptide in case in Table I, application no. 12, in column 6 in the same line as SEQ ID NO. 5318 is depicted, non-targeted is mentioned.

[63419] In an embodiment the present invention relates to an expresssion cassette comprising a) a promoter, preferably a promoter selected from the group consisting of Big35S, PCUbi, Super and USP, in particular p-PcUBI; and b) the nucleic acid SEQ ID NO. 122803, or a homolog or fragment thereof, or a homolog thereof being depicted in Table I, application no. 12, column 8, in the same line as SEQ ID NO. 122803, preferably the coding region thereof, a homolog or a fragment thereof; which are operable linked.

[63420] In an embodiment thereof the expression cassette comprises in addition c) a nucleic acid molecule encoding a transit peptide, especially a plastidal transit petide in case in Table I, application no. 12, in column 6 in the same line as SEQ ID NO. 122803 is depicted, plastidic is mentioned, or a mitochondrial transit peptide in case in Table I, application no. 12, in column 6 in the same line as SEQ ID NO. 122803 is depicted, mitochondrial is mentioned; which is operable linked, too.

[63421] In another embodiment thereof the expression cassette does not comprise an additional transit peptide in case in Table I, application no. 12, in column 6 in the same line as SEQ ID NO. 122803 is depicted, non-targeted is mentioned.

[63422] In an embodiment the present invention relates to an expresssion cassette comprising a) a promoter, preferably a promoter selected from the group consisting of Big35S, PCUbi, Super and USP, in particular p-PcUBI; and b) the nucleic acid SEQ ID NO. 70583, or a homolog or fragment thereof, or a homolog thereof being depicted in Table I, application no. 12, column 8, in the same line as SEQ ID NO. 70583, preferably the coding region thereof, a homolog or a fragment thereof; which are operable linked.

[63423] In an embodiment thereof the expression cassette comprises in addition c) a nucleic acid molecule encoding a transit peptide, especially a plastidal transit petide in case in Table I, application no. 12, in column 6 in the same line as SEQ ID NO. 70583 is depicted, plastidic is mentioned, or a mitochondrial transit peptide in case in Table I, application no. 12, in column 6 in the same line as SEQ ID NO. 70583 is depicted, mitochondrial is mentioned; which is operable linked, too.

[63424] In another embodiment thereof the expression cassette does not comprise an additional transit peptide in case in Table I, application no. 12, in column 6 in the same line as SEQ ID NO. 70583 is depicted, non-targeted is mentioned.

[63425] In an embodiment the present invention relates to an expresssion cassette comprising a) a promoter, preferably a promoter selected from the group consisting of Big35S, PCUbi, Super and USP, in particular p-PcUBI; and b) the nucleic acid SEQ ID NO. 26196, or a homolog or fragment thereof, or a homolog thereof being depicted in Table I, application no. 12, column 8, in the same line as SEQ ID NO. 26196, preferably the coding region thereof, a homolog or a fragment thereof; which are operable linked.

[63426] In an embodiment thereof the expression cassette comprises in addition c) a nucleic acid molecule encoding a transit peptide, especially a plastidal transit petide in case in Table I, application no. 12, in column 6 in the same line as SEQ ID NO. 26196 is depicted, plastidic is mentioned, or a mitochondrial transit peptide in case in Table I, application no. 12, in column 6 in the same line as SEQ ID NO. 26196 is depicted, mitochondrial is mentioned; which is operable linked, too.

[63427] In another embodiment thereof the expression cassette does not comprise an additional transit peptide in case in Table I, application no. 12, in column 6 in the same line as SEQ ID NO. 26196 is depicted, non-targeted is mentioned.

[63428] In an embodiment the present invention relates to an expresssion cassette comprising a) a promoter, preferably a promoter selected from the group consisting of Big35S, PCUbi, Super and USP, in particular p-PcUBI; and b) the nucleic acid SEQ ID NO. 114198, or a homolog or fragment thereof, or a homolog thereof being depicted in Table I, application no. 12, column 8, in the same line as SEQ ID NO. 114198, preferably the coding region thereof, a homolog or a fragment thereof; which are operable linked.

[63429] In an embodiment thereof the expression cassette comprises in addition c) a nucleic acid molecule encoding a transit peptide, especially a plastidal transit petide in case in Table I, application no. 12, in column 6 in the same line as SEQ ID NO. 114198 is depicted, plastidic is mentioned, or a mitochondrial transit peptide in case in Table I, application no. 12, in column 6 in the same line as SEQ ID NO. 114198 is depicted, mitochondrial is mentioned; which is operable linked, too.

[63430] In another embodiment thereof the expression cassette does not comprise an additional transit peptide in case in Table I, application no. 12, in column 6 in the same line as SEQ ID NO. 114198 is depicted, non-targeted is mentioned.

[63431] In an embodiment the present invention relates to an expresssion cassette comprising a) a promoter, preferably a promoter selected from the group consisting of Big35S, PCUbi, Super and USP, in particular p-PcUBI; and b) the nucleic acid SEQ ID NO. 6040, or a homolog or fragment thereof, or a homolog thereof being depicted in Table I, application no. 12, column 8, in the same line as SEQ ID NO. 6040, preferably the coding region thereof, a homolog or a fragment thereof; which are operable linked.

[63432] In an embodiment thereof the expression cassette comprises in addition c) a nucleic acid molecule encoding a transit peptide, especially a plastidal transit petide in case in Table I, application no. 12, in column 6 in the same line as SEQ ID NO. 6040 is depicted, plastidic is mentioned, or a mitochondrial transit peptide in case in Table I, application no. 12, in column 6 in the same line as SEQ ID NO. 6040 is depicted, mitochondrial is mentioned; which is operable linked, too.

[63433] In another embodiment thereof the expression cassette does not comprise an additional transit peptide in case in Table I, application no. 12, in column 6 in the same line as SEQ ID NO. 6040 is depicted, non-targeted is mentioned.

[63434] In an embodiment the present invention relates to an expresssion cassette comprising a) a promoter, preferably a promoter selected from the group consisting of Big35S, PCUbi, Super and USP, in particular p-PcUBI; and b) the nucleic acid SEQ ID NO. 71325, or a homolog or fragment thereof, or a homolog thereof being depicted in Table I, application no. 12, column 8, in the same line as SEQ ID NO. 71325, preferably the coding region thereof, a homolog or a fragment thereof; which are operable linked.

[63435] In an embodiment thereof the expression cassette comprises in addition c) a nucleic acid molecule encoding a transit peptide, especially a plastidal transit petide in case in Table I, application no. 12, in column 6 in the same line as SEQ ID NO. 71325 is depicted, plastidic is mentioned, or a mitochondrial transit peptide in case in Table I, application no. 12, in column 6 in the same line as SEQ ID NO. 71325 is depicted, mitochondrial is mentioned; which is operable linked, too.

[63436] In another embodiment thereof the expression cassette does not comprise an additional transit peptide in case in Table I, application no. 12, in column 6 in the same line as SEQ ID NO. 71325 is depicted, non-targeted is mentioned.

[63437] In an embodiment the present invention relates to an expresssion cassette comprising a) a promoter, preferably a promoter selected from the group consisting of Big35S, PCUbi, Super and USP, in particular p-PcUBI; and b) the nucleic acid SEQ ID NO. 28040, or a homolog or fragment thereof, or a homolog thereof being depicted in Table I, application no. 12, column 8, in the same line as SEQ ID NO. 28040, preferably the coding region thereof, a homolog or a fragment thereof; which are operable linked.

[63438] In an embodiment thereof the expression cassette comprises in addition c) a nucleic acid molecule encoding a transit peptide, especially a plastidal transit petide in case in Table I, application no. 12, in column 6 in the same line as SEQ ID NO. 28040 is depicted, plastidic is mentioned, or a mitochondrial transit peptide in case in Table I, application no. 12, in column 6 in the same line as SEQ ID NO. 28040 is depicted, mitochondrial is mentioned; which is operable linked, too.

[63439] In another embodiment thereof the expression cassette does not comprise an additional transit peptide in case in Table I, application no. 12, in column 6 in the same line as SEQ ID NO. 28040 is depicted, non-targeted is mentioned.

[63440] In an embodiment the present invention relates to an expresssion cassette comprising a) a promoter, preferably a promoter selected from the group consisting of Big35S, PCUbi, Super and USP, in particular p-PcUBI; and b) the nucleic acid SEQ ID NO. 122948, or a homolog or fragment thereof, or a homolog thereof being depicted in Table I, application no. 12, column 8, in the same line as SEQ ID NO. 122948, preferably the coding region thereof, a homolog or a fragment thereof; which are operable linked.

[63441] In an embodiment thereof the expression cassette comprises in addition c) a nucleic acid molecule encoding a transit peptide, especially a plastidal transit petide in case in Table I, application no. 12, in column 6 in the same line as SEQ ID NO. 122948 is depicted, plastidic is mentioned, or a mitochondrial transit peptide in case in Table I, application no. 12, in column 6 in the same line as SEQ ID NO. 122948 is depicted, mitochondrial is mentioned; which is operable linked, too.

[63442] In another embodiment thereof the expression cassette does not comprise an additional transit peptide in case in Table I, application no. 12, in column 6 in the same line as SEQ ID NO. 122948 is depicted, non-targeted is mentioned.

[63443] In an embodiment the present invention relates to an expresssion cassette comprising a) a promoter, preferably a promoter selected from the group consisting of Big35S, PCUbi, Super and USP, in particular p-PcUBI; and b) the nucleic acid SEQ ID NO. 29500, or a homolog or fragment thereof, or a homolog thereof being depicted in Table I, application no. 12, column 8, in the same line as SEQ ID NO. 29500, preferably the coding region thereof, a homolog or a fragment thereof; which are operable linked.

[63444] In an embodiment thereof the expression cassette comprises in addition c) a nucleic acid molecule encoding a transit peptide, especially a plastidal transit petide in case in Table I, application no. 12, in column 6 in the same line as SEQ ID NO. 29500 is depicted, plastidic is mentioned, or a mitochondrial transit peptide in case in Table I, application no. 12, in column 6 in the same line as SEQ ID NO. 29500 is depicted, mitochondrial is mentioned; which is operable linked, too.

[63445] In another embodiment thereof the expression cassette does not comprise an additional transit peptide in case in Table I, application no. 12, in column 6 in the same line as SEQ ID NO. 29500 is depicted, non-targeted is mentioned.

[63446] In an embodiment the present invention relates to an expresssion cassette comprising a) a promoter, preferably a promoter selected from the group consisting of Big35S, PCUbi, Super and USP, in particular p-PcUBI; and b) the nucleic acid SEQ ID NO. 114231, or a homolog or fragment thereof, or a homolog thereof being depicted in Table I, application no. 12, column 8, in the same line as SEQ ID NO. 114231, preferably the coding region thereof, a homolog or a fragment thereof; which are operable linked.

[63447] In an embodiment thereof the expression cassette comprises in addition c) a nucleic acid molecule encoding a transit peptide, especially a plastidal transit petide in case in Table I, application no. 12, in column 6 in the same line as SEQ ID NO. 114231 is depicted, plastidic is mentioned, or a mitochondrial transit peptide in case in Table I, application no. 12, in column 6 in the same line as SEQ ID NO. 114231 is depicted, mitochondrial is mentioned; which is operable linked, too.

[63448] In another embodiment thereof the expression cassette does not comprise an additional transit peptide in case in Table I, application no. 12, in column 6 in the same line as SEQ ID NO. 114231 is depicted, non-targeted is mentioned.

[63449] In an embodiment the present invention relates to an expresssion cassette comprising a) a promoter, preferably a promoter selected from the group consisting of Big35S, PCUbi, Super and USP, in particular p-PcUBI; and b) the nucleic acid SEQ ID NO. 72520, or a homolog or fragment thereof, or a homolog thereof being depicted in Table I, application no. 12, column 8, in the same line as SEQ ID NO. 72520, preferably the coding region thereof, a homolog or a fragment thereof; which are operable linked.

[63450] In an embodiment thereof the expression cassette comprises in addition c) a nucleic acid molecule encoding a transit peptide, especially a plastidal transit petide in case in Table I, application no. 12, in column 6 in the same line as SEQ ID NO. 72520 is depicted, plastidic is mentioned, or a mitochondrial transit peptide in case in Table I, application no. 12, in column 6 in the same line as SEQ ID NO. 72520 is depicted, mitochondrial is mentioned; which is operable linked, too.

[63451] In another embodiment thereof the expression cassette does not comprise an additional transit peptide in case in Table I, application no. 12, in column 6 in the same line as SEQ ID NO. 72520 is depicted, non-targeted is mentioned.

[63452] In an embodiment the present invention relates to an expresssion cassette comprising a) a promoter, preferably a promoter selected from the group consisting of Big35S, PCUbi, Super and USP, in particular p-PcUBI; and b) the nucleic acid SEQ ID NO. 6510, or a homolog or fragment thereof, or a homolog thereof being depicted in Table I, application no. 12, column 8, in the same line as SEQ ID NO. 6510, preferably the coding region thereof, a homolog or a fragment thereof; which are operable linked.

[63453] In an embodiment thereof the expression cassette comprises in addition c) a nucleic acid molecule encoding a transit peptide, especially a plastidal transit petide in case in Table I, application no. 12, in column 6 in the same line as SEQ ID NO. 6510 is depicted, plastidic is mentioned, or a mitochondrial transit peptide in case in Table I, application no. 12, in column 6 in the same line as SEQ ID NO. 6510 is depicted, mitochondrial is mentioned; which is operable linked, too.

[63454] In another embodiment thereof the expression cassette does not comprise an additional transit peptide in case in Table I, application no. 12, in column 6 in the same line as SEQ ID NO. 6510 is depicted, non-targeted is mentioned.

[63455] In an embodiment the present invention relates to an expresssion cassette comprising a) a promoter, preferably a promoter selected from the group consisting of Big35S, PCUbi, Super and USP, in particular p-PcUBI; and b) the nucleic acid SEQ ID NO. 32037, or a homolog or fragment thereof, or a homolog thereof being depicted in Table I, application no. 12, column 8, in the same line as SEQ ID NO. 32037, preferably the coding region thereof, a homolog or a fragment thereof; which are operable linked.

[63456] In an embodiment thereof the expression cassette comprises in addition c) a nucleic acid molecule encoding a transit peptide, especially a plastidal transit petide in case in Table I, application no. 12, in column 6 in the same line as SEQ ID NO. 32037 is depicted, plastidic is mentioned, or a mitochondrial transit peptide in case in Table I, application no. 12, in column 6 in the same line as SEQ ID NO. 32037 is depicted, mitochondrial is mentioned; which is operable linked, too.

[63457] In another embodiment thereof the expression cassette does not comprise an additional transit peptide in case in Table I, application no. 12, in column 6 in the same line as SEQ ID NO. 32037 is depicted, non-targeted is mentioned.

[63458] In an embodiment the present invention relates to an expresssion cassette comprising a) a promoter, preferably a promoter selected from the group consisting of Big35S, PCUbi, Super and USP, in particular p-PcUBI; and b) the nucleic acid SEQ ID NO. 32308, or a homolog or fragment thereof, or a homolog thereof being depicted in Table I, application no. 12, column 8, in the same line as SEQ ID NO. 32308, preferably the coding region thereof, a homolog or a fragment thereof; which are operable linked.

[63459] In an embodiment thereof the expression cassette comprises in addition c) a nucleic acid molecule encoding a transit peptide, especially a plastidal transit petide in case in Table I, application no. 12, in column 6 in the same line as SEQ ID NO. 32308 is depicted, plastidic is mentioned, or a mitochondrial transit peptide in case in Table I, application no. 12, in column 6 in the same line as SEQ ID NO. 32308 is depicted, mitochondrial is mentioned; which is operable linked, too.

[63460] In another embodiment thereof the expression cassette does not comprise an additional transit peptide in case in Table I, application no. 12, in column 6 in the same line as SEQ ID NO. 32308 is depicted, non-targeted is mentioned.

[63461] In an embodiment the present invention relates to an expresssion cassette comprising a) a promoter, preferably a promoter selected from the group consisting of Big35S, PCUbi, Super and USP, in particular p-PcUBI; and b) the nucleic acid SEQ ID NO. 123087, or a homolog or fragment thereof, or a homolog thereof being depicted in Table I, application no. 12, column 8, in the same line as SEQ ID NO. 123087, preferably the coding region thereof, a homolog or a fragment thereof; which are operable linked.

[63462] In an embodiment thereof the expression cassette comprises in addition c) a nucleic acid molecule encoding a transit peptide, especially a plastidal transit petide in case in Table I, application no. 12, in column 6 in the same line as SEQ ID NO. 123087 is depicted, plastidic is mentioned, or a mitochondrial transit peptide in case in Table I, application no. 12, in column 6 in the same line as SEQ ID NO. 123087 is depicted, mitochondrial is mentioned; which is operable linked, too.

[63463] In another embodiment thereof the expression cassette does not comprise an additional transit peptide in case in Table I, application no. 12, in column 6 in the same line as SEQ ID NO. 123087 is depicted, non-targeted is mentioned.

[63464] In an embodiment the present invention relates to an expresssion cassette comprising a) a promoter, preferably a promoter selected from the group consisting of Big35S, PCUbi, Super and USP, in particular p-PcUBI; and b) the nucleic acid SEQ ID NO. 32648, or a homolog or fragment thereof, or a homolog thereof being depicted in Table I, application no. 12, column 8, in the same line as SEQ ID NO. 32648, preferably the coding region thereof, a homolog or a fragment thereof; which are operable linked.

[63465] In an embodiment thereof the expression cassette comprises in addition c) a nucleic acid molecule encoding a transit peptide, especially a plastidal transit petide in case in Table I, application no. 12, in column 6 in the same line as SEQ ID NO. 32648 is depicted, plastidic is mentioned, or a mitochondrial transit peptide in case in Table I, application no. 12, in column 6 in the same line as SEQ ID NO. 32648 is depicted, mitochondrial is mentioned; which is operable linked, too.

[63466] In another embodiment thereof the expression cassette does not comprise an additional transit peptide in case in Table I, application no. 12, in column 6 in the same line as SEQ ID NO. 32648 is depicted, non-targeted is mentioned.

[63467] In an embodiment the present invention relates to an expresssion cassette comprising a) a promoter, preferably a promoter selected from the group consisting of Big35S, PCUbi, Super and USP, in particular p-PcUBI; and b) the nucleic acid SEQ ID NO. 34044, or a homolog or fragment thereof, or a homolog thereof being depicted in Table I, application no. 12, column 8, in the same line as SEQ ID NO. 34044, preferably the coding region thereof, a homolog or a fragment thereof; which are operable linked.

[63468] In an embodiment thereof the expression cassette comprises in addition c) a nucleic acid molecule encoding a transit peptide, especially a plastidal transit petide in case in Table I, application no. 12, in column 6 in the same line as SEQ ID NO. 34044 is depicted, plastidic is mentioned, or a mitochondrial transit peptide in case in Table I, application no. 12, in column 6 in the same line as SEQ ID NO. 34044 is depicted, mitochondrial is mentioned; which is operable linked, too.

[63469] In another embodiment thereof the expression cassette does not comprise an additional transit peptide in case in Table I, application no. 12, in column 6 in the same line as SEQ ID NO. 34044 is depicted, non-targeted is mentioned.

[63470] In an embodiment the present invention relates to an expresssion cassette comprising a) a promoter, preferably a promoter selected from the group consisting of Big35S, PCUbi, Super and USP, in particular p-Super; and b) the nucleic acid SEQ ID NO. 103958, or a homolog or fragment thereof, or a homolog thereof being depicted in Table I, application no. 12, column 8, in the same line as SEQ ID NO. 103958, preferably the coding region thereof, a homolog or a fragment thereof; which are operable linked.

[63471] In an embodiment thereof the expression cassette comprises in addition c) a nucleic acid molecule encoding a transit peptide, especially a plastidal transit petide in case in Table I, application no. 12, in column 6 in the same line as SEQ ID NO. 103958 is depicted, plastidic is mentioned, or a mitochondrial transit peptide in case in Table I, application no. 12, in column 6 in the same line as SEQ ID NO. 103958 is depicted, mitochondrial is mentioned; which is operable linked, too.

[63472] In another embodiment thereof the expression cassette does not comprise an additional transit peptide in case in Table I, application no. 12, in column 6 in the same line as SEQ ID NO. 103958 is depicted, non-targeted is mentioned.

[63473] In an embodiment the present invention relates to an expresssion cassette comprising a) a promoter, preferably a promoter selected from the group consisting of Big35S, PCUbi, Super and USP, in particular p-Super; and b) the nucleic acid SEQ ID NO. 123473, or a homolog or fragment thereof, or a homolog thereof being depicted in Table I, application no. 12, column 8, in the same line as SEQ ID NO. 123473, preferably the coding region thereof, a homolog or a fragment thereof; which are operable linked.

[63474] In an embodiment thereof the expression cassette comprises in addition c) a nucleic acid molecule encoding a transit peptide, especially a plastidal transit petide in case in Table I, application no. 12, in column 6 in the same line as SEQ ID NO. 123473 is depicted, plastidic is mentioned, or a mitochondrial transit peptide in case in Table I, application no. 12, in column 6 in the same line as SEQ ID NO. 123473 is depicted, mitochondrial is mentioned; which is operable linked, too.

[63475] In another embodiment thereof the expression cassette does not comprise an additional transit peptide in case in Table I, application no. 12, in column 6 in the same line as SEQ ID NO. 123473 is depicted, non-targeted is mentioned.

[63476] In an embodiment the present invention relates to an expresssion cassette comprising a) a promoter, preferably a promoter selected from the group consisting of Big35S, PCUbi, Super and USP, in particular p-USP; and b) the nucleic acid SEQ ID NO. 121111, or a homolog or fragment thereof, or a homolog thereof being depicted in Table I, application no. 12, column 8, in the same line as SEQ ID NO. 121111, preferably the coding region thereof, a homolog or a fragment thereof; which are operable linked.

[63477] In an embodiment thereof the expression cassette comprises in addition c) a nucleic acid molecule encoding a transit peptide, especially a plastidal transit petide in case in Table I, application no. 12, in column 6 in the same line as SEQ ID NO. 121111 is depicted, plastidic is mentioned, or a mitochondrial transit peptide in case in Table I, application no. 12, in column 6 in the same line as SEQ ID NO. 121111 is depicted, mitochondrial is mentioned; which is operable linked, too.

[63478] In another embodiment thereof the expression cassette does not comprise an additional transit peptide in case in Table I, application no. 12, in column 6 in the same line as SEQ ID NO. 121111 is depicted, non-targeted is mentioned.

[63479] In an embodiment the present invention relates to an expresssion cassette comprising a) a promoter, preferably a promoter selected from the group consisting of Big35S, PCUbi, Super and USP, in particular p-USP; and b) the nucleic acid SEQ ID NO. 7269, or a homolog or fragment thereof, or a homolog thereof being depicted in Table I, application no. 12, column 8, in the same line as SEQ ID NO. 7269, preferably the coding region thereof, a homolog or a fragment thereof; which are operable linked.

[63480] In an embodiment thereof the expression cassette comprises in addition c) a nucleic acid molecule encoding a transit peptide, especially a plastidal transit petide in case in Table I, application no. 12, in column 6 in the same line as SEQ ID NO. 7269 is depicted, plastidic is mentioned, or a mitochondrial transit peptide in case in Table I, application no. 12, in column 6 in the same line as SEQ ID NO. 7269 is depicted, mitochondrial is mentioned; which is operable linked, too.

[63481] In another embodiment thereof the expression cassette does not comprise an additional transit peptide in case in Table I, application no. 12, in column 6 in the same line as SEQ ID NO. 7269 is depicted, non-targeted is mentioned.

[63482] In an embodiment the present invention relates to an expresssion cassette comprising a) a promoter, preferably a promoter selected from the group consisting of Big35S, PCUbi, Super and USP, in particular p-Super; and b) the nucleic acid SEQ ID NO. 121637, or a homolog or fragment thereof, or a homolog thereof being depicted in Table I, application no. 12, column 8, in the same line as SEQ ID NO. 121637, preferably the coding region thereof, a homolog or a fragment thereof; which are operable linked.

[63483] In an embodiment thereof the expression cassette comprises in addition c) a nucleic acid molecule encoding a transit peptide, especially a plastidal transit petide in case in Table I, application no. 12, in column 6 in the same line as SEQ ID NO. 121637 is depicted, plastidic is mentioned, or a mitochondrial transit peptide in case in Table I, application no. 12, in column 6 in the same line as SEQ ID NO. 121637 is depicted, mitochondrial is mentioned; which is operable linked, too.

[63484] In another embodiment thereof the expression cassette does not comprise an additional transit peptide in case in Table I, application no. 12, in column 6 in the same line as SEQ ID NO. 121637 is depicted, non-targeted is mentioned.

[63485] In an embodiment the present invention relates to an expresssion cassette comprising a) a promoter, preferably a promoter selected from the group consisting of Big35S, PCUbi, Super and USP, in particular p-Super; and b) the nucleic acid SEQ ID NO. 7333, or a homolog or fragment thereof, or a homolog thereof being depicted in Table I, application no. 12, column 8, in the same line as SEQ ID NO. 7333, preferably the coding region thereof, a homolog or a fragment thereof; which are operable linked.

[63486] In an embodiment thereof the expression cassette comprises in addition c) a nucleic acid molecule encoding a transit peptide, especially a plastidal transit petide in case in Table I, application no. 12, in column 6 in the same line as SEQ ID NO. 7333 is depicted, plastidic is mentioned, or a mitochondrial transit peptide in case in Table I, application no. 12, in column 6 in the same line as SEQ ID NO. 7333 is depicted, mitochondrial is mentioned; which is operable linked, too.

[63487] In another embodiment thereof the expression cassette does not comprise an additional transit peptide in case in Table I, application no. 12, in column 6 in the same line as SEQ ID NO. 7333 is depicted, non-targeted is mentioned.

[63488] In an embodiment the present invention relates to an expresssion cassette comprising a) a promoter, preferably a promoter selected from the group consisting of Big35S, PCUbi, Super and USP, in particular p-Super; and b) the nucleic acid SEQ ID NO. 35936, or a homolog or fragment thereof, or a homolog thereof being depicted in Table I, application no. 12, column 8, in the same line as SEQ ID NO. 35936, preferably the coding region thereof, a homolog or a fragment thereof; which are operable linked.

[63489] In an embodiment thereof the expression cassette comprises in addition c) a nucleic acid molecule encoding a transit peptide, especially a plastidal transit petide in case in Table I, application no. 12, in column 6 in the same line as SEQ ID NO. 35936 is depicted, plastidic is mentioned, or a mitochondrial transit peptide in case in Table I, application no. 12, in column 6 in the same line as SEQ ID NO. 35936 is depicted, mitochondrial is mentioned; which is operable linked, too.

[63490] In another embodiment thereof the expression cassette does not comprise an additional transit peptide in case in Table I, application no. 12, in column 6 in the same line as SEQ ID NO. 35936 is depicted, non-targeted is mentioned.

[63491] In an embodiment the present invention relates to an expresssion cassette comprising a) a promoter, preferably a promoter selected from the group consisting of Big35S, PCUbi, Super and USP, in particular p-Super; and b) the nucleic acid SEQ ID NO. 93678, or a homolog or fragment thereof, or a homolog thereof being depicted in Table I, application no. 12, column 8, in the same line as SEQ ID NO. 93678, preferably the coding region thereof, a homolog or a fragment thereof; which are operable linked.

[63492] In an embodiment thereof the expression cassette comprises in addition c) a nucleic acid molecule encoding a transit peptide, especially a plastidal transit petide in case in Table I, application no. 12, in column 6 in the same line as SEQ ID NO. 93678 is depicted, plastidic is mentioned, or a mitochondrial transit peptide in case in Table I, application no. 12, in column 6 in the same line as SEQ ID NO. 93678 is depicted, mitochondrial is mentioned; which is operable linked, too.

[63493] In another embodiment thereof the expression cassette does not comprise an additional transit peptide in case in Table I, application no. 12, in column 6 in the same line as SEQ ID NO. 93678 is depicted, non-targeted is mentioned.

[63494] In an embodiment the present invention relates to an expresssion cassette comprising a) a promoter, preferably a promoter selected from the group consisting of Big35S, PCUbi, Super and USP, in particular p-Super; and b) the nucleic acid SEQ ID NO. 123498, or a homolog or fragment thereof, or a homolog thereof being depicted in Table I, application no. 12, column 8, in the same line as SEQ ID NO. 123498, preferably the coding region thereof, a homolog or a fragment thereof; which are operable linked.

[63495] In an embodiment thereof the expression cassette comprises in addition c) a nucleic acid molecule encoding a transit peptide, especially a plastidal transit petide in case in Table I, application no. 12, in column 6 in the same line as SEQ ID NO. 123498 is depicted, plastidic is mentioned, or a mitochondrial transit peptide in case in Table I, application no. 12, in column 6 in the same line as SEQ ID NO. 123498 is depicted, mitochondrial is mentioned; which is operable linked, too.

[63496] In another embodiment thereof the expression cassette does not comprise an additional transit peptide in case in Table I, application no. 12, in column 6 in the same line as SEQ ID NO. 123498 is depicted, non-targeted is mentioned.

[63497] In an embodiment the present invention relates to an expresssion cassette comprising a) a promoter, preferably a promoter selected from the group consisting of Big35S, PCUbi, Super and USP, in particular p-Super; and b) the nucleic acid SEQ ID NO. 75807, or a homolog or fragment thereof, or a homolog thereof being depicted in Table I, application no. 12, column 8, in the same line as SEQ ID NO. 75807, preferably the coding region thereof, a homolog or a fragment thereof; which are operable linked.

[63498] In an embodiment thereof the expression cassette comprises in addition c) a nucleic acid molecule encoding a transit peptide, especially a plastidal transit petide in case in Table I, application no. 12, in column 6 in the same line as SEQ ID NO. 75807 is depicted, plastidic is mentioned, or a mitochondrial transit peptide in case in Table I, application no. 12, in column 6 in the same line as SEQ ID NO. 75807 is depicted, mitochondrial is mentioned; which is operable linked, too.

[63499] In another embodiment thereof the expression cassette does not comprise an additional transit peptide in case in Table I, application no. 12, in column 6 in the same line as SEQ ID NO. 75807 is depicted, non-targeted is mentioned.

[63500] In an embodiment the present invention relates to an expresssion cassette comprising a) a promoter, preferably a promoter selected from the group consisting of Big35S, PCUbi, Super and USP, in particular p-Super; and b) the nucleic acid SEQ ID NO. 124051, or a homolog or fragment thereof, or a homolog thereof being depicted in Table I, application no. 12, column 8, in the same line as SEQ ID NO. 124051, preferably the coding region thereof, a homolog or a fragment thereof; which are operable linked.

[63501] In an embodiment thereof the expression cassette comprises in addition c) a nucleic acid molecule encoding a transit peptide, especially a plastidal transit petide in case in Table I, application no. 12, in column 6 in the same line as SEQ ID NO. 124051 is depicted, plastidic is mentioned, or a mitochondrial transit peptide in case in Table I, application no. 12, in column 6 in the same line as SEQ ID NO. 124051 is depicted, mitochondrial is mentioned; which is operable linked, too.

[63502] In another embodiment thereof the expression cassette does not comprise an additional transit peptide in case in Table I, application no. 12, in column 6 in the same line as SEQ ID NO. 124051 is depicted, non-targeted is mentioned.

[63503] In an embodiment the present invention relates to an expresssion cassette comprising a) a promoter, preferably a promoter selected from the group consisting of Big35S, PCUbi, Super and USP, in particular p-Super; and b) the nucleic acid SEQ ID NO. 124127, or a homolog or fragment thereof, or a homolog thereof being depicted in Table I, application no. 12, column 8, in the same line as SEQ ID NO. 124127, preferably the coding region thereof, a homolog or a fragment thereof; which are operable linked.

[63504] In an embodiment thereof the expression cassette comprises in addition c) a nucleic acid molecule encoding a transit peptide, especially a plastidal transit petide in case in Table I, application no. 12, in column 6 in the same line as SEQ ID NO. 124127 is depicted, plastidic is mentioned, or a mitochondrial transit peptide in case in Table I, application no. 12, in column 6 in the same line as SEQ ID NO. 124127 is depicted, mitochondrial is mentioned; which is operable linked, too.

[63505] In another embodiment thereof the expression cassette does not comprise an additional transit peptide in case in Table I, application no. 12, in column 6 in the same line as SEQ ID NO. 124127 is depicted, non-targeted is mentioned.

[63506] In an embodiment the present invention relates to an expresssion cassette comprising a) a promoter, preferably a promoter selected from the group consisting of Big35S, PCUbi, Super and USP, in particular p-Super; and b) the nucleic acid SEQ ID NO. 118371, or a homolog or fragment thereof, or a homolog thereof being depicted in Table I, application no. 12, column 8, in the same line as SEQ ID NO. 118371, preferably the coding region thereof, a homolog or a fragment thereof; which are operable linked.

[63507] In an embodiment thereof the expression cassette comprises in addition c) a nucleic acid molecule encoding a transit peptide, especially a plastidal transit petide in case in Table I, application no. 12, in column 6 in the same line as SEQ ID NO. 118371 is depicted, plastidic is mentioned, or a mitochondrial transit peptide in case in Table I, application no. 12, in column 6 in the same line as SEQ ID NO. 118371 is depicted, mitochondrial is mentioned; which is operable linked, too.

[63508] In another embodiment thereof the expression cassette does not comprise an additional transit peptide in case in Table I, application no. 12, in column 6 in the same line as SEQ ID NO. 118371 is depicted, non-targeted is mentioned.

[63509] In an embodiment the present invention relates to an expresssion cassette comprising a) a promoter, preferably a promoter selected from the group consisting of Big35S, PCUbi, Super and USP, in particular p-Super; and b) the nucleic acid SEQ ID NO. 114552, or a homolog or fragment thereof, or a homolog thereof being depicted in Table I, application no. 12, column 8, in the same line as SEQ ID NO. 114552, preferably the coding region thereof, a homolog or a fragment thereof; which are operable linked.

[63510] In an embodiment thereof the expression cassette comprises in addition c) a nucleic acid molecule encoding a transit peptide, especially a plastidal transit petide in case in Table I, application no. 12, in column 6 in the same line as SEQ ID NO. 114552 is depicted, plastidic is mentioned, or a mitochondrial transit peptide in case in Table I, application no. 12, in column 6 in the same line as SEQ ID NO. 114552 is depicted, mitochondrial is mentioned; which is operable linked, too.

[63511] In another embodiment thereof the expression cassette does not comprise an additional transit peptide in case in Table I, application no. 12, in column 6 in the same line as SEQ ID NO. 114552 is depicted, non-targeted is mentioned.

[63512] In an embodiment the present invention relates to an expresssion cassette comprising a) a promoter, preferably a promoter selected from the group consisting of Big35S, PCUbi, Super and USP, in particular p-Super; and b) the nucleic acid SEQ ID NO. 37400, or a homolog or fragment thereof, or a homolog thereof being depicted in Table I, application no. 12, column 8, in the same line as SEQ ID NO. 37400, preferably the coding region thereof, a homolog or a fragment thereof; which are operable linked.

[63513] In an embodiment thereof the expression cassette comprises in addition c) a nucleic acid molecule encoding a transit peptide, especially a plastidal transit petide in case in Table I, application no. 12, in column 6 in the same line as SEQ ID NO. 37400 is depicted, plastidic is mentioned, or a mitochondrial transit peptide in case in Table I, application no. 12, in column 6 in the same line as SEQ ID NO. 37400 is depicted, mitochondrial is mentioned; which is operable linked, too.

[63514] In another embodiment thereof the expression cassette does not comprise an additional transit peptide in case in Table I, application no. 12, in column 6 in the same line as SEQ ID NO. 37400 is depicted, non-targeted is mentioned.

[63515] In an embodiment the present invention relates to an expresssion cassette comprising a) a promoter, preferably a promoter selected from the group consisting of Big35S, PCUbi, Super and USP, in particular p-USP; and b) the nucleic acid SEQ ID NO. 124509, or a homolog or fragment thereof, or a homolog thereof being depicted in Table I, application no. 12, column 8, in the same line as SEQ ID NO. 124509, preferably the coding region thereof, a homolog or a fragment thereof; which are operable linked.

[63516] In an embodiment thereof the expression cassette comprises in addition c) a nucleic acid molecule encoding a transit peptide, especially a plastidal transit petide in case in Table I, application no. 12, in column 6 in the same line as SEQ ID NO. 124509 is depicted, plastidic is mentioned, or a mitochondrial transit peptide in case in Table I, application no. 12, in column 6 in the same line as SEQ ID NO. 124509 is depicted, mitochondrial is mentioned; which is operable linked, too.

[63517] In another embodiment thereof the expression cassette does not comprise an additional transit peptide in case in Table I, application no. 12, in column 6 in the same line as SEQ ID NO. 124509 is depicted, non-targeted is mentioned.

[63518] In an embodiment the present invention relates to an expresssion cassette comprising a) a promoter, preferably a promoter selected from the group consisting of Big35S, PCUbi, Super and USP, in particular p-USP; and b) the nucleic acid SEQ ID NO. 98778, or a homolog or fragment thereof, or a homolog thereof being depicted in Table I, application no. 12, column 8, in the same line as SEQ ID NO. 98778, preferably the coding region thereof, a homolog or a fragment thereof; which are operable linked.

[63519] In an embodiment thereof the expression cassette comprises in addition c) a nucleic acid molecule encoding a transit peptide, especially a plastidal transit petide in case in Table I, application no. 12, in column 6 in the same line as SEQ ID NO. 98778 is depicted, plastidic is mentioned, or a mitochondrial transit peptide in case in Table I, application no. 12, in column 6 in the same line as SEQ ID NO. 98778 is depicted, mitochondrial is mentioned; which is operable linked, too.

[63520] In another embodiment thereof the expression cassette does not comprise an additional transit peptide in case in Table I, application no. 12, in column 6 in the same line as SEQ ID NO. 98778 is depicted, non-targeted is mentioned.

[63521] In an embodiment the present invention relates to an expresssion cassette comprising a) a promoter, preferably a promoter selected from the group consisting of Big35S, PCUbi, Super and USP, in particular p-Super; and b) the nucleic acid SEQ ID NO. 99188, or a homolog or fragment thereof, or a homolog thereof being depicted in Table I, application no. 12, column 8, in the same line as SEQ ID NO. 99188, preferably the coding region thereof, a homolog or a fragment thereof; which are operable linked.

[63522] In an embodiment thereof the expression cassette comprises in addition c) a nucleic acid molecule encoding a transit peptide, especially a plastidal transit petide in case in Table I, application no. 12, in column 6 in the same line as SEQ ID NO. 99188 is depicted, plastidic is mentioned, or a mitochondrial transit peptide in case in Table I, application no. 12, in column 6 in the same line as SEQ ID NO. 99188 is depicted, mitochondrial is mentioned; which is operable linked, too.

[63523] In another embodiment thereof the expression cassette does not comprise an additional transit peptide in case in Table I, application no. 12, in column 6 in the same line as SEQ ID NO. 99188 is depicted, non-targeted is mentioned.

[63524] In an embodiment the present invention relates to an expresssion cassette comprising a) a promoter, preferably a promoter selected from the group consisting of Big35S, PCUbi, Super and USP, in particular p-Super; and b) the nucleic acid SEQ ID NO. 124557, or a homolog or fragment thereof, or a homolog thereof being depicted in Table I, application no. 12, column 8, in the same line as SEQ ID NO. 124557, preferably the coding region thereof, a homolog or a fragment thereof; which are operable linked.

[63525] In an embodiment thereof the expression cassette comprises in addition c) a nucleic acid molecule encoding a transit peptide, especially a plastidal transit petide in case in Table I, application no. 12, in column 6 in the same line as SEQ ID NO. 124557 is depicted, plastidic is mentioned, or a mitochondrial transit peptide in case in Table I, application no. 12, in column 6 in the same line as SEQ ID NO. 124557 is depicted, mitochondrial is mentioned; which is operable linked, too.

[63526] In another embodiment thereof the expression cassette does not comprise an additional transit peptide in case in Table I, application no. 12, in column 6 in the same line as SEQ ID NO. 124557 is depicted, non-targeted is mentioned.

[63527] In an embodiment the present invention relates to an expresssion cassette comprising a) a promoter, preferably a promoter selected from the group consisting of Big35S, PCUbi, Super and USP, in particular p-Super; and b) the nucleic acid SEQ ID NO. 38266, or a homolog or fragment thereof, or a homolog thereof being depicted in Table I, application no. 12, column 8, in the same line as SEQ ID NO. 38266, preferably the coding region thereof, a homolog or a fragment thereof; which are operable linked.

[63528] In an embodiment thereof the expression cassette comprises in addition c) a nucleic acid molecule encoding a transit peptide, especially a plastidal transit petide in case in Table I, application no. 12, in column 6 in the same line as SEQ ID NO. 38266 is depicted, plastidic is mentioned, or a mitochondrial transit peptide in case in Table I, application no. 12, in column 6 in the same line as SEQ ID NO. 38266 is depicted, mitochondrial is mentioned; which is operable linked, too.

[63529] In another embodiment thereof the expression cassette does not comprise an additional transit peptide in case in Table I, application no. 12, in column 6 in the same line as SEQ ID NO. 38266 is depicted, non-targeted is mentioned.

[63530] In an embodiment the present invention relates to an expresssion cassette comprising a) a promoter, preferably a promoter selected from the group consisting of Big35S, PCUbi, Super and USP, in particular p-Super; and b) the nucleic acid SEQ ID NO. 115056, or a homolog or fragment thereof, or a homolog thereof being depicted in Table I, application no. 12, column 8, in the same line as SEQ ID NO. 115056, preferably the coding region thereof, a homolog or a fragment thereof; which are operable linked.

[63531] In an embodiment thereof the expression cassette comprises in addition c) a nucleic acid molecule encoding a transit peptide, especially a plastidal transit petide in case in Table I, application no. 12, in column 6 in the same line as SEQ ID NO. 115056 is depicted, plastidic is mentioned, or a mitochondrial transit peptide in case in Table I, application no. 12, in column 6 in the same line as SEQ ID NO. 115056 is depicted, mitochondrial is mentioned; which is operable linked, too.

[63532] In another embodiment thereof the expression cassette does not comprise an additional transit peptide in case in Table I, application no. 12, in column 6 in the same line as SEQ ID NO. 115056 is depicted, non-targeted is mentioned.

[63533] In an embodiment the present invention relates to an expresssion cassette comprising a) a promoter, preferably a promoter selected from the group consisting of Big35S, PCUbi, Super and USP, in particular p-USP; and b) the nucleic acid SEQ ID NO. 77774, or a homolog or fragment thereof, or a homolog thereof being depicted in Table I, application no. 12, column 8, in the same line as SEQ ID NO. 77774, preferably the coding region thereof, a homolog or a fragment thereof; which are operable linked.

[63534] In an embodiment thereof the expression cassette comprises in addition c) a nucleic acid molecule encoding a transit peptide, especially a plastidal transit petide in case in Table I, application no. 12, in column 6 in the same line as SEQ ID NO. 77774 is depicted, plastidic is mentioned, or a mitochondrial transit peptide in case in Table I, application no. 12, in column 6 in the same line as SEQ ID NO. 77774 is depicted, mitochondrial is mentioned; which is operable linked, too.

[63535] In another embodiment thereof the expression cassette does not comprise an additional transit peptide in case in Table I, application no. 12, in column 6 in the same line as SEQ ID NO. 77774 is depicted, non-targeted is mentioned.

[63536] In an embodiment the present invention relates to an expresssion cassette comprising a) a promoter, preferably a promoter selected from the group consisting of Big35S, PCUbi, Super and USP, in particular p-Super; and b) the nucleic acid SEQ ID NO. 7947, or a homolog or fragment thereof, or a homolog thereof being depicted in Table I, application no. 12, column 8, in the same line as SEQ ID NO. 7947, preferably the coding region thereof, a homolog or a fragment thereof; which are operable linked.

[63537] In an embodiment thereof the expression cassette comprises in addition c) a nucleic acid molecule encoding a transit peptide, especially a plastidal transit petide in case in Table I, application no. 12, in column 6 in the same line as SEQ ID NO. 7947 is depicted, plastidic is mentioned, or a mitochondrial transit peptide in case in Table I, application no. 12, in column 6 in the same line as SEQ ID NO. 7947 is depicted, mitochondrial is mentioned; which is operable linked, too.

[63538] In another embodiment thereof the expression cassette does not comprise an additional transit peptide in case in Table I, application no. 12, in column 6 in the same line as SEQ ID NO. 7947 is depicted, non-targeted is mentioned.

[63539] In an embodiment the present invention relates to an expresssion cassette comprising a) a promoter, preferably a promoter selected from the group consisting of Big35S, PCUbi, Super and USP, in particular p-Super; and b) the nucleic acid SEQ ID NO. 38300, or a homolog or fragment thereof, or a homolog thereof being depicted in Table I, application no. 12, column 8, in the same line as SEQ ID NO. 38300, preferably the coding region thereof, a homolog or a fragment thereof; which are operable linked.

[63540] In an embodiment thereof the expression cassette comprises in addition c) a nucleic acid molecule encoding a transit peptide, especially a plastidal transit petide in case in Table I, application no. 12, in column 6 in the same line as SEQ ID NO. 38300 is depicted, plastidic is mentioned, or a mitochondrial transit peptide in case in Table I, application no. 12, in column 6 in the same line as SEQ ID NO. 38300 is depicted, mitochondrial is mentioned; which is operable linked, too.

[63541] In another embodiment thereof the expression cassette does not comprise an additional transit peptide in case in Table I, application no. 12, in column 6 in the same line as SEQ ID NO. 38300 is depicted, non-targeted is mentioned.

[63542] In an embodiment the present invention relates to an expresssion cassette comprising a) a promoter, preferably a promoter selected from the group consisting of Big35S, PCUbi, Super and USP, in particular p-Super; and b) the nucleic acid SEQ ID NO. 7992, or a homolog or fragment thereof, or a homolog thereof being depicted in Table I, application no. 12, column 8, in the same line as SEQ ID NO. 7992, preferably the coding region thereof, a homolog or a fragment thereof; which are operable linked.

[63543] In an embodiment thereof the expression cassette comprises in addition c) a nucleic acid molecule encoding a transit peptide, especially a plastidal transit petide in case in Table I, application no. 12, in column 6 in the same line as SEQ ID NO. 7992 is depicted, plastidic is mentioned, or a mitochondrial transit peptide in case in Table I, application no. 12, in column 6 in the same line as SEQ ID NO. 7992 is depicted, mitochondrial is mentioned; which is operable linked, too.

[63544] In another embodiment thereof the expression cassette does not comprise an additional transit peptide in case in Table I, application no. 12, in column 6 in the same line as SEQ ID NO. 7992 is depicted, non-targeted is mentioned.

[63545] In an embodiment the present invention relates to an expresssion cassette comprising a) a promoter, preferably a promoter selected from the group consisting of Big35S, PCUbi, Super and USP, in particular p-Super; and b) the nucleic acid SEQ ID NO. 124571, or a homolog or fragment thereof, or a homolog thereof being depicted in Table I, application no. 12, column 8, in the same line as SEQ ID NO. 124571, preferably the coding region thereof, a homolog or a fragment thereof; which are operable linked.

[63546] In an embodiment thereof the expression cassette comprises in addition c) a nucleic acid molecule encoding a transit peptide, especially a plastidal transit petide in case in Table I, application no. 12, in column 6 in the same line as SEQ ID NO. 124571 is depicted, plastidic is mentioned, or a mitochondrial transit peptide in case in Table I, application no. 12, in column 6 in the same line as SEQ ID NO. 124571 is depicted, mitochondrial is mentioned; which is operable linked, too.

[63547] In another embodiment thereof the expression cassette does not comprise an additional transit peptide in case in Table I, application no. 12, in column 6 in the same line as SEQ ID NO. 124571 is depicted, non-targeted is mentioned.

[63548] In an embodiment the present invention relates to an expresssion cassette comprising a) a promoter, preferably a promoter selected from the group consisting of Big35S, PCUbi, Super and USP, in particular p-Super; and b) the nucleic acid SEQ ID NO. 38345, or a homolog or fragment thereof, or a homolog thereof being depicted in Table I, application no. 12, column 8, in the same line as SEQ ID NO. 38345, preferably the coding region thereof, a homolog or a fragment thereof; which are operable linked.

[63549] In an embodiment thereof the expression cassette comprises in addition c) a nucleic acid molecule encoding a transit peptide, especially a plastidal transit petide in case in Table I, application no. 12, in column 6 in the same line as SEQ ID NO. 38345 is depicted, plastidic is mentioned, or a mitochondrial transit peptide in case in Table I, application no. 12, in column 6 in the same line as SEQ ID NO. 38345 is depicted, mitochondrial is mentioned; which is operable linked, too.

[63550] In another embodiment thereof the expression cassette does not comprise an additional transit peptide in case in Table I, application no. 12, in column 6 in the same line as SEQ ID NO. 38345 is depicted, non-targeted is mentioned.

[63551] In an embodiment the present invention relates to an expresssion cassette comprising a) a promoter, preferably a promoter selected from the group consisting of Big35S, PCUbi, Super and USP, in particular p-USP; and b) the nucleic acid SEQ ID NO. 124805, or a homolog or fragment thereof, or a homolog thereof being depicted in Table I, application no. 12, column 8, in the same line as SEQ ID NO. 124805, preferably the coding region thereof, a homolog or a fragment thereof; which are operable linked.

[63552] In an embodiment thereof the expression cassette comprises in addition c) a nucleic acid molecule encoding a transit peptide, especially a plastidal transit petide in case in Table I, application no. 12, in column 6 in the same line as SEQ ID NO. 124805 is depicted, plastidic is mentioned, or a mitochondrial transit peptide in case in Table I, application no. 12, in column 6 in the same line as SEQ ID NO. 124805 is depicted, mitochondrial is mentioned; which is operable linked, too.

[63553] In another embodiment thereof the expression cassette does not comprise an additional transit peptide in case in Table I, application no. 12, in column 6 in the same line as SEQ ID NO. 124805 is depicted, non-targeted is mentioned.

[63554] In an embodiment the present invention relates to an expresssion cassette comprising a) a promoter, preferably a promoter selected from the group consisting of Big35S, PCUbi, Super and USP, in particular p-Super; and b) the nucleic acid SEQ ID NO. 78753, or a homolog or fragment thereof, or a homolog thereof being depicted in Table I, application no. 12, column 8, in the same line as SEQ ID NO. 78753, preferably the coding region thereof, a homolog or a fragment thereof; which are operable linked.

[63555] In an embodiment thereof the expression cassette comprises in addition c) a nucleic acid molecule encoding a transit peptide, especially a plastidal transit petide in case in Table I, application no. 12, in column 6 in the same line as SEQ ID NO. 78753 is depicted, plastidic is mentioned, or a mitochondrial transit peptide in case in Table I, application no. 12, in column 6 in the same line as SEQ ID NO. 78753 is depicted, mitochondrial is mentioned; which is operable linked, too.

[63556] In another embodiment thereof the expression cassette does not comprise an additional transit peptide in case in Table I, application no. 12, in column 6 in the same line as SEQ ID NO. 78753 is depicted, non-targeted is mentioned.

[63557] In an embodiment the present invention relates to an expresssion cassette comprising a) a promoter, preferably a promoter selected from the group consisting of Big35S, PCUbi, Super and USP, in particular p-Super; and b) the nucleic acid SEQ ID NO. 124907, or a homolog or fragment thereof, or a homolog thereof being depicted in Table I, application no. 12, column 8, in the same line as SEQ ID NO. 124907, preferably the coding region thereof, a homolog or a fragment thereof; which are operable linked.

[63558] In an embodiment thereof the expression cassette comprises in addition c) a nucleic acid molecule encoding a transit peptide, especially a plastidal transit petide in case in Table I, application no. 12, in column 6 in the same line as SEQ ID NO. 124907 is depicted, plastidic is mentioned, or a mitochondrial transit peptide in case in Table I, application no. 12, in column 6 in the same line as SEQ ID NO. 124907 is depicted, mitochondrial is mentioned; which is operable linked, too.

[63559] In another embodiment thereof the expression cassette does not comprise an additional transit peptide in case in Table I, application no. 12, in column 6 in the same line as SEQ ID NO. 124907 is depicted, non-targeted is mentioned.

[63560] In an embodiment the present invention relates to an expresssion cassette comprising a) a promoter, preferably a promoter selected from the group consisting of Big35S, PCUbi, Super and USP, in particular p-Super; and b) the nucleic acid SEQ ID NO. 78883, or a homolog or fragment thereof, or a homolog thereof being depicted in Table I, application no. 12, column 8, in the same line as SEQ ID NO. 78883, preferably the coding region thereof, a homolog or a fragment thereof; which are operable linked.

[63561] In an embodiment thereof the expression cassette comprises in addition c) a nucleic acid molecule encoding a transit peptide, especially a plastidal transit petide in case in Table I, application no. 12, in column 6 in the same line as SEQ ID NO. 78883 is depicted, plastidic is mentioned, or a mitochondrial transit peptide in case in Table I, application no. 12, in column 6 in the same line as SEQ ID NO. 78883 is depicted, mitochondrial is mentioned; which is operable linked, too.

[63562] In another embodiment thereof the expression cassette does not comprise an additional transit peptide in case in Table I, application no. 12, in column 6 in the same line as SEQ ID NO. 78883 is depicted, non-targeted is mentioned.

[63563] In an embodiment the present invention relates to an expresssion cassette comprising a) a promoter, preferably a promoter selected from the group consisting of Big35S, PCUbi, Super and USP, in particular p-Super; and b) the nucleic acid SEQ ID NO. 78953, or a homolog or fragment thereof, or a homolog thereof being depicted in Table I, application no. 12, column 8, in the same line as SEQ ID NO. 78953, preferably the coding region thereof, a homolog or a fragment thereof; which are operable linked.

[63564] In an embodiment thereof the expression cassette comprises in addition c) a nucleic acid molecule encoding a transit peptide, especially a plastidal transit petide in case in Table I, application no. 12, in column 6 in the same line as SEQ ID NO. 78953 is depicted, plastidic is mentioned, or a mitochondrial transit peptide in case in Table I, application no. 12, in column 6 in the same line as SEQ ID NO. 78953 is depicted, mitochondrial is mentioned; which is operable linked, too.

[63565] In another embodiment thereof the expression cassette does not comprise an additional transit peptide in case in Table I, application no. 12, in column 6 in the same line as SEQ ID NO. 78953 is depicted, non-targeted is mentioned.

[63566] In an embodiment the present invention relates to an expresssion cassette comprising a) a promoter, preferably a promoter selected from the group consisting of Big35S, PCUbi, Super and USP, in particular p-Super; and b) the nucleic acid SEQ ID NO. 8920, or a homolog or fragment thereof, or a homolog thereof being depicted in Table I, application no. 12, column 8, in the same line as SEQ ID NO. 8920, preferably the coding region thereof, a homolog or a fragment thereof; which are operable linked.

[63567] In an embodiment thereof the expression cassette comprises in addition c) a nucleic acid molecule encoding a transit peptide, especially a plastidal transit petide in case in Table I, application no. 12, in column 6 in the same line as SEQ ID NO. 8920 is depicted, plastidic is mentioned, or a mitochondrial transit peptide in case in Table I, application no. 12, in column 6 in the same line as SEQ ID NO. 8920 is depicted, mitochondrial is mentioned; which is operable linked, too.

[63568] In another embodiment thereof the expression cassette does not comprise an additional transit peptide in case in Table I, application no. 12, in column 6 in the same line as SEQ ID NO. 8920 is depicted, non-targeted is mentioned.

[63569] In an embodiment the present invention relates to an expresssion cassette comprising a) a promoter, preferably a promoter selected from the group consisting of Big35S, PCUbi, Super and USP, in particular p-Super; and b) the nucleic acid SEQ ID NO. 115595, or a homolog or fragment thereof, or a homolog thereof being depicted in Table I, application no. 12, column 8, in the same line as SEQ ID NO. 115595, preferably the coding region thereof, a homolog or a fragment thereof; which are operable linked.

[63570] In an embodiment thereof the expression cassette comprises in addition c) a nucleic acid molecule encoding a transit peptide, especially a plastidal transit petide in case in Table I, application no. 12, in column 6 in the same line as SEQ ID NO. 115595 is depicted, plastidic is mentioned, or a mitochondrial transit peptide in case in Table I, application no. 12, in column 6 in the same line as SEQ ID NO. 115595 is depicted, mitochondrial is mentioned; which is operable linked, too.

[63571] In another embodiment thereof the expression cassette does not comprise an additional transit peptide in case in Table I, application no. 12, in column 6 in the same line as SEQ ID NO. 115595 is depicted, non-targeted is mentioned.

[63572] In an embodiment the present invention relates to an expresssion cassette comprising a) a promoter, preferably a promoter selected from the group consisting of Big35S, PCUbi, Super and USP, in particular p-Super; and b) the nucleic acid SEQ ID NO. 39002, or a homolog or fragment thereof, or a homolog thereof being depicted in Table I, application no. 12, column 8, in the same line as SEQ ID NO. 39002, preferably the coding region thereof, a homolog or a fragment thereof; which are operable linked.

[63573] In an embodiment thereof the expression cassette comprises in addition c) a nucleic acid molecule encoding a transit peptide, especially a plastidal transit petide in case in Table I, application no. 12, in column 6 in the same line as SEQ ID NO. 39002 is depicted, plastidic is mentioned, or a mitochondrial transit peptide in case in Table I, application no. 12, in column 6 in the same line as SEQ ID NO. 39002 is depicted, mitochondrial is mentioned; which is operable linked, too.

[63574] In another embodiment thereof the expression cassette does not comprise an additional transit peptide in case in Table I, application no. 12, in column 6 in the same line as SEQ ID NO. 39002 is depicted, non-targeted is mentioned.

[63575] In an embodiment the present invention relates to an expresssion cassette comprising a) a promoter, preferably a promoter selected from the group consisting of Big35S, PCUbi, Super and USP, in particular p-Super; and b) the nucleic acid SEQ ID NO. 124992, or a homolog or fragment thereof, or a homolog thereof being depicted in Table I, application no. 12, column 8, in the same line as SEQ ID NO. 124992, preferably the coding region thereof, a homolog or a fragment thereof; which are operable linked.

[63576] In an embodiment thereof the expression cassette comprises in addition c) a nucleic acid molecule encoding a transit peptide, especially a plastidal transit petide in case in Table I, application no. 12, in column 6 in the same line as SEQ ID NO. 124992 is depicted, plastidic is mentioned, or a mitochondrial transit peptide in case in Table I, application no. 12, in column 6 in the same line as SEQ ID NO. 124992 is depicted, mitochondrial is mentioned; which is operable linked, too.

[63577] In another embodiment thereof the expression cassette does not comprise an additional transit peptide in case in Table I, application no. 12, in column 6 in the same line as SEQ ID NO. 124992 is depicted, non-targeted is mentioned.

[63578] In an embodiment the present invention relates to an expresssion cassette comprising a) a promoter, preferably a promoter selected from the group consisting of Big35S, PCUbi, Super and USP, in particular p-Super; and b) the nucleic acid SEQ ID NO. 125085, or a homolog or fragment thereof, or a homolog thereof being depicted in Table I, application no. 12, column 8, in the same line as SEQ ID NO. 125085, preferably the coding region thereof, a homolog or a fragment thereof; which are operable linked.

[63579] In an embodiment thereof the expression cassette comprises in addition c) a nucleic acid molecule encoding a transit peptide, especially a plastidal transit petide in case in Table I, application no. 12, in column 6 in the same line as SEQ ID NO. 125085 is depicted, plastidic is mentioned, or a mitochondrial transit peptide in case in Table I, application no. 12, in column 6 in the same line as SEQ ID NO. 125085 is depicted, mitochondrial is mentioned; which is operable linked, too.

[63580] In another embodiment thereof the expression cassette does not comprise an additional transit peptide in case in Table I, application no. 12, in column 6 in the same line as SEQ ID NO. 125085 is depicted, non-targeted is mentioned.

[63581] In an embodiment the present invention relates to an expresssion cassette comprising a) a promoter, preferably a promoter selected from the group consisting of Big35S, PCUbi, Super and USP, in particular p-Super; and b) the nucleic acid SEQ ID NO. 39040, or a homolog or fragment thereof, or a homolog thereof being depicted in Table I, application no. 12, column 8, in the same line as SEQ ID NO. 39040, preferably the coding region thereof, a homolog or a fragment thereof; which are operable linked.

[63582] In an embodiment thereof the expression cassette comprises in addition c) a nucleic acid molecule encoding a transit peptide, especially a plastidal transit petide in case in Table I, application no. 12, in column 6 in the same line as SEQ ID NO. 39040 is depicted, plastidic is mentioned, or a mitochondrial transit peptide in case in Table I, application no. 12, in column 6 in the same line as SEQ ID NO. 39040 is depicted, mitochondrial is mentioned; which is operable linked, too.

[63583] In another embodiment thereof the expression cassette does not comprise an additional transit peptide in case in Table I, application no. 12, in column 6 in the same line as SEQ ID NO. 39040 is depicted, non-targeted is mentioned.

[63584] In an embodiment the present invention relates to an expresssion cassette comprising a) a promoter, preferably a promoter selected from the group consisting of Big35S, PCUbi, Super and USP, in particular p-Super; and b) the nucleic acid SEQ ID NO. 125105, or a homolog or fragment thereof, or a homolog thereof being depicted in Table I, application no. 12, column 8, in the same line as SEQ ID NO. 125105, preferably the coding region thereof, a homolog or a fragment thereof; which are operable linked.

[63585] In an embodiment thereof the expression cassette comprises in addition c) a nucleic acid molecule encoding a transit peptide, especially a plastidal transit petide in case in Table I, application no. 12, in column 6 in the same line as SEQ ID NO. 125105 is depicted, plastidic is mentioned, or a mitochondrial transit peptide in case in Table I, application no. 12, in column 6 in the same line as SEQ ID NO. 125105 is depicted, mitochondrial is mentioned; which is operable linked, too.

[63586] In another embodiment thereof the expression cassette does not comprise an additional transit peptide in case in Table I, application no. 12, in column 6 in the same line as SEQ ID NO. 125105 is depicted, non-targeted is mentioned.

[63587] In an embodiment the present invention relates to an expresssion cassette comprising a) a promoter, preferably a promoter selected from the group consisting of Big35S, PCUbi, Super and USP, in particular p-Super; and b) the nucleic acid SEQ ID NO. 39219, or a homolog or fragment thereof, or a homolog thereof being depicted in Table I, application no. 12, column 8, in the same line as SEQ ID NO. 39219, preferably the coding region thereof, a homolog or a fragment thereof; which are operable linked.

[63588] In an embodiment thereof the expression cassette comprises in addition c) a nucleic acid molecule encoding a transit peptide, especially a plastidal transit petide in case in Table I, application no. 12, in column 6 in the same line as SEQ ID NO. 39219 is depicted, plastidic is mentioned, or a mitochondrial transit peptide in case in Table I, application no. 12, in column 6 in the same line as SEQ ID NO. 39219 is depicted, mitochondrial is mentioned; which is operable linked, too.

[63589] In another embodiment thereof the expression cassette does not comprise an additional transit peptide in case in Table I, application no. 12, in column 6 in the same line as SEQ ID NO. 39219 is depicted, non-targeted is mentioned.

[63590] In an embodiment the present invention relates to an expresssion cassette comprising a) a promoter, preferably a promoter selected from the group consisting of Big35S, PCUbi, Super and USP, in particular p-Super; and b) the nucleic acid SEQ ID NO. 39300, or a homolog or fragment thereof, or a homolog thereof being depicted in Table I, application no. 12, column 8, in the same line as SEQ ID NO. 39300, preferably the coding region thereof, a homolog or a fragment thereof; which are operable linked.

[63591] In an embodiment thereof the expression cassette comprises in addition c) a nucleic acid molecule encoding a transit peptide, especially a plastidal transit petide in case in Table I, application no. 12, in column 6 in the same line as SEQ ID NO. 39300 is depicted, plastidic is mentioned, or a mitochondrial transit peptide in case in Table I, application no. 12, in column 6 in the same line as SEQ ID NO. 39300 is depicted, mitochondrial is mentioned; which is operable linked, too.

[63592] In another embodiment thereof the expression cassette does not comprise an additional transit peptide in case in Table I, application no. 12, in column 6 in the same line as SEQ ID NO. 39300 is depicted, non-targeted is mentioned.

[63593] In an embodiment the present invention relates to an expresssion cassette comprising a) a promoter, preferably a promoter selected from the group consisting of Big35S, PCUbi, Super and USP, in particular p-Super; and b) the nucleic acid SEQ ID NO. 115628, or a homolog or fragment thereof, or a homolog thereof being depicted in Table I, application no. 12, column 8, in the same line as SEQ ID NO. 115628, preferably the coding region thereof, a homolog or a fragment thereof; which are operable linked.

[63594] In an embodiment thereof the expression cassette comprises in addition c) a nucleic acid molecule encoding a transit peptide, especially a plastidal transit petide in case in Table I, application no. 12, in column 6 in the same line as SEQ ID NO. 115628 is depicted, plastidic is mentioned, or a mitochondrial transit peptide in case in Table I, application no. 12, in column 6 in the same line as SEQ ID NO. 115628 is depicted, mitochondrial is mentioned; which is operable linked, too.

[63595] In another embodiment thereof the expression cassette does not comprise an additional transit peptide in case in Table I, application no. 12, in column 6 in the same line as SEQ ID NO. 115628 is depicted, non-targeted is mentioned.

[63596] In an embodiment the present invention relates to an expresssion cassette comprising a) a promoter, preferably a promoter selected from the group consisting of Big35S, PCUbi, Super and USP, in particular p-Super; and b) the nucleic acid SEQ ID NO. 40329, or a homolog or fragment thereof, or a homolog thereof being depicted in Table I, application no. 12, column 8, in the same line as SEQ ID NO. 40329, preferably the coding region thereof, a homolog or a fragment thereof; which are operable linked.

[63597] In an embodiment thereof the expression cassette comprises in addition c) a nucleic acid molecule encoding a transit peptide, especially a plastidal transit petide in case in Table I, application no. 12, in column 6 in the same line as SEQ ID NO. 40329 is depicted, plastidic is mentioned, or a mitochondrial transit peptide in case in Table I, application no. 12, in column 6 in the same line as SEQ ID NO. 40329 is depicted, mitochondrial is mentioned; which is operable linked, too.

[63598] In another embodiment thereof the expression cassette does not comprise an additional transit peptide in case in Table I, application no. 12, in column 6 in the same line as SEQ ID NO. 40329 is depicted, non-targeted is mentioned.

[63599] In an embodiment the present invention relates to an expresssion cassette comprising a) a promoter, preferably a promoter selected from the group consisting of Big35S, PCUbi, Super and USP, in particular p-Super; and b) the nucleic acid SEQ ID NO. 9167, or a homolog or fragment thereof, or a homolog thereof being depicted in Table I, application no. 12, column 8, in the same line as SEQ ID NO. 9167, preferably the coding region thereof, a homolog or a fragment thereof; which are operable linked.

[63600] In an embodiment thereof the expression cassette comprises in addition c) a nucleic acid molecule encoding a transit peptide, especially a plastidal transit petide in case in Table I, application no. 12, in column 6 in the same line as SEQ ID NO. 9167 is depicted, plastidic is mentioned, or a mitochondrial transit peptide in case in Table I, application no. 12, in column 6 in the same line as SEQ ID NO. 9167 is depicted, mitochondrial is mentioned; which is operable linked, too.

[63601] In another embodiment thereof the expression cassette does not comprise an additional transit peptide in case in Table I, application no. 12, in column 6 in the same line as SEQ ID NO. 9167 is depicted, non-targeted is mentioned.

[63602] In an embodiment the present invention relates to an expresssion cassette comprising a) a promoter, preferably a promoter selected from the group consisting of Big35S, PCUbi, Super and USP, in particular p-Super; and b) the nucleic acid SEQ ID NO. 125142, or a homolog or fragment thereof, or a homolog thereof being depicted in Table I, application no. 12, column 8, in the same line as SEQ ID NO. 125142, preferably the coding region thereof, a homolog or a fragment thereof; which are operable linked.

[63603] In an embodiment thereof the expression cassette comprises in addition c) a nucleic acid molecule encoding a transit peptide, especially a plastidal transit petide in case in Table I, application no. 12, in column 6 in the same line as SEQ ID NO. 125142 is depicted, plastidic is mentioned, or a mitochondrial transit peptide in case in Table I, application no. 12, in column 6 in the same line as SEQ ID NO. 125142 is depicted, mitochondrial is mentioned; which is operable linked, too.

[63604] In another embodiment thereof the expression cassette does not comprise an additional transit peptide in case in Table I, application no. 12, in column 6 in the same line as SEQ ID NO. 125142 is depicted, non-targeted is mentioned.

[63605] In an embodiment the present invention relates to an expresssion cassette comprising a) a promoter, preferably a promoter selected from the group consisting of Big35S, PCUbi, Super and USP, in particular p-Super; and b) the nucleic acid SEQ ID NO. 125226, or a homolog or fragment thereof, or a homolog thereof being depicted in Table I, application no. 12, column 8, in the same line as SEQ ID NO. 125226, preferably the coding region thereof, a homolog or a fragment thereof; which are operable linked.

[63606] In an embodiment thereof the expression cassette comprises in addition c) a nucleic acid molecule encoding a transit peptide, especially a plastidal transit petide in case in Table I, application no. 12, in column 6 in the same line as SEQ ID NO. 125226 is depicted, plastidic is mentioned, or a mitochondrial transit peptide in case in Table I, application no. 12, in column 6 in the same line as SEQ ID NO. 125226 is depicted, mitochondrial is mentioned; which is operable linked, too.

[63607] In another embodiment thereof the expression cassette does not comprise an additional transit peptide in case in Table I, application no. 12, in column 6 in the same line as SEQ ID NO. 125226 is depicted, non-targeted is mentioned.

[63608] In an embodiment the present invention relates to an expresssion cassette comprising a) a promoter, preferably a promoter selected from the group consisting of Big35S, PCUbi, Super and USP, in particular p-Super; and b) the nucleic acid SEQ ID NO. 81075, or a homolog or fragment thereof, or a homolog thereof being depicted in Table I, application no. 12, column 8, in the same line as SEQ ID NO. 81075, preferably the coding region thereof, a homolog or a fragment thereof; which are operable linked.

[63609] In an embodiment thereof the expression cassette comprises in addition c) a nucleic acid molecule encoding a transit peptide, especially a plastidal transit petide in case in Table I, application no. 12, in column 6 in the same line as SEQ ID NO. 81075 is depicted, plastidic is mentioned, or a mitochondrial transit peptide in case in Table I, application no. 12, in column 6 in the same line as SEQ ID NO. 81075 is depicted, mitochondrial is mentioned; which is operable linked, too.

[63610] In another embodiment thereof the expression cassette does not comprise an additional transit peptide in case in Table I, application no. 12, in column 6 in the same line as SEQ ID NO. 81075 is depicted, non-targeted is mentioned.

[63611] In an embodiment the present invention relates to an expresssion cassette comprising a) a promoter, preferably a promoter selected from the group consisting of Big35S, PCUbi, Super and USP, in particular p-USP; and b) the nucleic acid SEQ ID NO. 125234, or a homolog or fragment thereof, or a homolog thereof being depicted in Table I, application no. 12, column 8, in the same line as SEQ ID NO. 125234, preferably the coding region thereof, a homolog or a fragment thereof; which are operable linked.

[63612] In an embodiment thereof the expression cassette comprises in addition c) a nucleic acid molecule encoding a transit peptide, especially a plastidal transit petide in case in Table I, application no. 12, in column 6 in the same line as SEQ ID NO. 125234 is depicted, plastidic is mentioned, or a mitochondrial transit peptide in case in Table I, application no. 12, in column 6 in the same line as SEQ ID NO. 125234 is depicted, mitochondrial is mentioned; which is operable linked, too.

[63613] In another embodiment thereof the expression cassette does not comprise an additional transit peptide in case in Table I, application no. 12, in column 6 in the same line as SEQ ID NO. 125234 is depicted, non-targeted is mentioned.

[63614] In an embodiment the present invention relates to an expresssion cassette comprising a) a promoter, preferably a promoter selected from the group consisting of Big35S, PCUbi, Super and USP, in particular p-Super; and b) the nucleic acid SEQ ID NO. 41732, or a homolog or fragment thereof, or a homolog thereof being depicted in Table I, application no. 12, column 8, in the same line as SEQ ID NO. 41732, preferably the coding region thereof, a homolog or a fragment thereof; which are operable linked.

[63615] In an embodiment thereof the expression cassette comprises in addition c) a nucleic acid molecule encoding a transit peptide, especially a plastidal transit petide in case in Table I, application no. 12, in column 6 in the same line as SEQ ID NO. 41732 is depicted, plastidic is mentioned, or a mitochondrial transit peptide in case in Table I, application no. 12, in column 6 in the same line as SEQ ID NO. 41732 is depicted, mitochondrial is mentioned; which is operable linked, too.

[63616] In another embodiment thereof the expression cassette does not comprise an additional transit peptide in case in Table I, application no. 12, in column 6 in the same line as SEQ ID NO. 41732 is depicted, non-targeted is mentioned.

[63617] In an embodiment the present invention relates to an expresssion cassette comprising a) a promoter, preferably a promoter selected from the group consisting of Big35S, PCUbi, Super and USP, in particular p-Super; and b) the nucleic acid SEQ ID NO. 94380, or a homolog or fragment thereof, or a homolog thereof being depicted in Table I, application no. 12, column 8, in the same line as SEQ ID NO. 94380, preferably the coding region thereof, a homolog or a fragment thereof; which are operable linked.

[63618] In an embodiment thereof the expression cassette comprises in addition c) a nucleic acid molecule encoding a transit peptide, especially a plastidal transit petide in case in Table I, application no. 12, in column 6 in the same line as SEQ ID NO. 94380 is depicted, plastidic is mentioned, or a mitochondrial transit peptide in case in Table I, application no. 12, in column 6 in the same line as SEQ ID NO. 94380 is depicted, mitochondrial is mentioned; which is operable linked, too.

[63619] In another embodiment thereof the expression cassette does not comprise an additional transit peptide in case in Table I, application no. 12, in column 6 in the same line as SEQ ID NO. 94380 is depicted, non-targeted is mentioned.

[63620] In an embodiment the present invention relates to an expresssion cassette comprising a) a promoter, preferably a promoter selected from the group consisting of Big35S, PCUbi, Super and USP, in particular p-Super; and b) the nucleic acid SEQ ID NO. 125264, or a homolog or fragment thereof, or a homolog thereof being depicted in Table I, application no. 12, column 8, in the same line as SEQ ID NO. 125264, preferably the coding region thereof, a homolog or a fragment thereof; which are operable linked.

[63621] In an embodiment thereof the expression cassette comprises in addition c) a nucleic acid molecule encoding a transit peptide, especially a plastidal transit petide in case in Table I, application no. 12, in column 6 in the same line as SEQ ID NO. 125264 is depicted, plastidic is mentioned, or a mitochondrial transit peptide in case in Table I, application no. 12, in column 6 in the same line as SEQ ID NO. 125264 is depicted, mitochondrial is mentioned; which is operable linked, too.

[63622] In another embodiment thereof the expression cassette does not comprise an additional transit peptide in case in Table I, application no. 12, in column 6 in the same line as SEQ ID NO. 125264 is depicted, non-targeted is mentioned.

[63623] In an embodiment the present invention relates to an expresssion cassette comprising a) a promoter, preferably a promoter selected from the group consisting of Big35S, PCUbi, Super and USP, in particular p-Super; and b) the nucleic acid SEQ ID NO. 125487, or a homolog or fragment thereof, or a homolog thereof being depicted in Table I, application no. 12, column 8, in the same line as SEQ ID NO. 125487, preferably the coding region thereof, a homolog or a fragment thereof; which are operable linked.

[63624] In an embodiment thereof the expression cassette comprises in addition c) a nucleic acid molecule encoding a transit peptide, especially a plastidal transit petide in case in Table I, application no. 12, in column 6 in the same line as SEQ ID NO. 125487 is depicted, plastidic is mentioned, or a mitochondrial transit peptide in case in Table I, application no. 12, in column 6 in the same line as SEQ ID NO. 125487 is depicted, mitochondrial is mentioned; which is operable linked, too.

[63625] In another embodiment thereof the expression cassette does not comprise an additional transit peptide in case in Table I, application no. 12, in column 6 in the same line as SEQ ID NO. 125487 is depicted, non-targeted is mentioned.

[63626] In an embodiment the present invention relates to an expresssion cassette comprising a) a promoter, preferably a promoter selected from the group consisting of Big35S, PCUbi, Super and USP, in particular p-Super; and b) the nucleic acid SEQ ID NO. 100675, or a homolog or fragment thereof, or a homolog thereof being depicted in Table I, application no. 12, column 8, in the same line as SEQ ID NO. 100675, preferably the coding region thereof, a homolog or a fragment thereof; which are operable linked.

[63627] In an embodiment thereof the expression cassette comprises in addition c) a nucleic acid molecule encoding a transit peptide, especially a plastidal transit petide in case in Table I, application no. 12, in column 6 in the same line as SEQ ID NO. 100675 is depicted, plastidic is mentioned, or a mitochondrial transit peptide in case in Table I, application no. 12, in column 6 in the same line as SEQ ID NO. 100675 is depicted, mitochondrial is mentioned; which is operable linked, too.

[63628] In another embodiment thereof the expression cassette does not comprise an additional transit peptide in case in Table I, application no. 12, in column 6 in the same line as SEQ ID NO. 100675 is depicted, non-targeted is mentioned.

[63629] In an embodiment the present invention relates to an expresssion cassette comprising a) a promoter, preferably a promoter selected from the group consisting of Big35S, PCUbi, Super and USP, in particular p-USP; and b) the nucleic acid SEQ ID NO. 100675, or a homolog or fragment thereof, or a homolog thereof being depicted in Table I, application no. 12, column 8, in the same line as SEQ ID NO. 100675, preferably the coding region thereof, a homolog or a fragment thereof; which are operable linked.

[63630] In an embodiment thereof the expression cassette comprises in addition c) a nucleic acid molecule encoding a transit peptide, especially a plastidal transit petide in case in Table I, application no. 12, in column 6 in the same line as SEQ ID NO. 100675 is depicted, plastidic is mentioned, or a mitochondrial transit peptide in case in Table I, application no. 12, in column 6 in the same line as SEQ ID NO. 100675 is depicted, mitochondrial is mentioned; which is operable linked, too.

[63631] In another embodiment thereof the expression cassette does not comprise an additional transit peptide in case in Table I, application no. 12, in column 6 in the same line as SEQ ID NO. 100675 is depicted, non-targeted is mentioned.

[63632] In an embodiment the present invention relates to an expresssion cassette comprising a) a promoter, preferably a promoter selected from the group consisting of Big35S, PCUbi, Super and USP, in particular p-Super; and b) the nucleic acid SEQ ID NO. 83821, or a homolog or fragment thereof, or a homolog thereof being depicted in Table I, application no. 12, column 8, in the same line as SEQ ID NO. 83821, preferably the coding region thereof, a homolog or a fragment thereof; which are operable linked.

[63633] In an embodiment thereof the expression cassette comprises in addition c) a nucleic acid molecule encoding a transit peptide, especially a plastidal transit petide in case in Table I, application no. 12, in column 6 in the same line as SEQ ID NO. 83821 is depicted, plastidic is mentioned, or a mitochondrial transit peptide in case in Table I, application no. 12, in column 6 in the same line as SEQ ID NO. 83821 is depicted, mitochondrial is mentioned; which is operable linked, too.

[63634] In another embodiment thereof the expression cassette does not comprise an additional transit peptide in case in Table I, application no. 12, in column 6 in the same line as SEQ ID NO. 83821 is depicted, non-targeted is mentioned.

[63635] In an embodiment the present invention relates to an expresssion cassette comprising a) a promoter, preferably a promoter selected from the group consisting of Big35S, PCUbi, Super and USP, in particular p-Super; and b) the nucleic acid SEQ ID NO. 125541, or a homolog or fragment thereof, or a homolog thereof being depicted in Table I, application no. 12, column 8, in the same line as SEQ ID NO. 125541, preferably the coding region thereof, a homolog or a fragment thereof; which are operable linked.

[63636] In an embodiment thereof the expression cassette comprises in addition c) a nucleic acid molecule encoding a transit peptide, especially a plastidal transit petide in case in Table I, application no. 12, in column 6 in the same line as SEQ ID NO. 125541 is depicted, plastidic is mentioned, or a mitochondrial transit peptide in case in Table I, application no. 12, in column 6 in the same line as SEQ ID NO. 125541 is depicted, mitochondrial is mentioned; which is operable linked, too.

[63637] In another embodiment thereof the expression cassette does not comprise an additional transit peptide in case in Table I, application no. 12, in column 6 in the same line as SEQ ID NO. 125541 is depicted, non-targeted is mentioned.

[63638] In an embodiment the present invention relates to an expresssion cassette comprising a) a promoter, preferably a promoter selected from the group consisting of Big35S, PCUbi, Super and USP, in particular p-USP; and b) the nucleic acid SEQ ID NO. 125795, or a homolog or fragment thereof, or a homolog thereof being depicted in Table I, application no. 12, column 8, in the same line as SEQ ID NO. 125795, preferably the coding region thereof, a homolog or a fragment thereof; which are operable linked.

[63639] In an embodiment thereof the expression cassette comprises in addition c) a nucleic acid molecule encoding a transit peptide, especially a plastidal transit petide in case in Table I, application no. 12, in column 6 in the same line as SEQ ID NO. 125795 is depicted, plastidic is mentioned, or a mitochondrial transit peptide in case in Table I, application no. 12, in column 6 in the same line as SEQ ID NO. 125795 is depicted, mitochondrial is mentioned; which is operable linked, too.

[63640] In another embodiment thereof the expression cassette does not comprise an additional transit peptide in case in Table I, application no. 12, in column 6 in the same line as SEQ ID NO. 125795 is depicted, non-targeted is mentioned.

[63641] In an embodiment the present invention relates to an expresssion cassette comprising a) a promoter, preferably a promoter selected from the group consisting of Big35S, PCUbi, Super and USP, in particular p-Super; and b) the nucleic acid SEQ ID NO. 126377, or a homolog or fragment thereof, or a homolog thereof being depicted in Table I, application no. 12, column 8, in the same line as SEQ ID NO. 126377, preferably the coding region thereof, a homolog or a fragment thereof; which are operable linked.

[63642] In an embodiment thereof the expression cassette comprises in addition c) a nucleic acid molecule encoding a transit peptide, especially a plastidal transit petide in case in Table I, application no. 12, in column 6 in the same line as SEQ ID NO. 126377 is depicted, plastidic is mentioned, or a mitochondrial transit peptide in case in Table I, application no. 12, in column 6 in the same line as SEQ ID NO. 126377 is depicted, mitochondrial is mentioned; which is operable linked, too.

[63643] In another embodiment thereof the expression cassette does not comprise an additional transit peptide in case in Table I, application no. 12, in column 6 in the same line as SEQ ID NO. 126377 is depicted, non-targeted is mentioned.

[63644] In an embodiment the present invention relates to an expresssion cassette comprising a) a promoter, preferably a promoter selected from the group consisting of Big35S, PCUbi, Super and USP, in particular p-Super; and b) the nucleic acid SEQ ID NO. 126415, or a homolog or fragment thereof, or a homolog thereof being depicted in Table I, application no. 12, column 8, in the same line as SEQ ID NO. 126415, preferably the coding region thereof, a homolog or a fragment thereof; which are operable linked.

[63645] In an embodiment thereof the expression cassette comprises in addition c) a nucleic acid molecule encoding a transit peptide, especially a plastidal transit petide in case in Table I, application no. 12, in column 6 in the same line as SEQ ID NO. 126415 is depicted, plastidic is mentioned, or a mitochondrial transit peptide in case in Table I, application no. 12, in column 6 in the same line as SEQ ID NO. 126415 is depicted, mitochondrial is mentioned; which is operable linked, too.

[63646] In another embodiment thereof the expression cassette does not comprise an additional transit peptide in case in Table I, application no. 12, in column 6 in the same line as SEQ ID NO. 126415 is depicted, non-targeted is mentioned.

[63647] In an embodiment the present invention relates to an expresssion cassette comprising a) a promoter, preferably a promoter selected from the group consisting of Big35S, PCUbi, Super and USP, in particular p-Super; and b) the nucleic acid SEQ ID NO. 119209, or a homolog or fragment thereof, or a homolog thereof being depicted in Table I, application no. 12, column 8, in the same line as SEQ ID NO. 119209, preferably the coding region thereof, a homolog or a fragment thereof; which are operable linked.

[63648] In an embodiment thereof the expression cassette comprises in addition c) a nucleic acid molecule encoding a transit peptide, especially a plastidal transit petide in case in Table I, application no. 12, in column 6 in the same line as SEQ ID NO. 119209 is depicted, plastidic is mentioned, or a mitochondrial transit peptide in case in Table I, application no. 12, in column 6 in the same line as SEQ ID NO. 119209 is depicted, mitochondrial is mentioned; which is operable linked, too.

[63649] In another embodiment thereof the expression cassette does not comprise an additional transit peptide in case in Table I, application no. 12, in column 6 in the same line as SEQ ID NO. 119209 is depicted, non-targeted is mentioned.

[63650] In an embodiment the present invention relates to an expresssion cassette comprising a) a promoter, preferably a promoter selected from the group consisting of Big35S, PCUbi, Super and USP, in particular p-USP; and b) the nucleic acid SEQ ID NO. 126421, or a homolog or fragment thereof, or a homolog thereof being depicted in Table I, application no. 12, column 8, in the same line as SEQ ID NO. 126421, preferably the coding region thereof, a homolog or a fragment thereof; which are operable linked.

[63651] In an embodiment thereof the expression cassette comprises in addition c) a nucleic acid molecule encoding a transit peptide, especially a plastidal transit petide in case in Table I, application no. 12, in column 6 in the same line as SEQ ID NO. 126421 is depicted, plastidic is mentioned, or a mitochondrial transit peptide in case in Table I, application no. 12, in column 6 in the same line as SEQ ID NO. 126421 is depicted, mitochondrial is mentioned; which is operable linked, too.

[63652] In another embodiment thereof the expression cassette does not comprise an additional transit peptide in case in Table I, application no. 12, in column 6 in the same line as SEQ ID NO. 126421 is depicted, non-targeted is mentioned.

[63653] In an embodiment the present invention relates to an expresssion cassette comprising a) a promoter, preferably a promoter selected from the group consisting of Big35S, PCUbi, Super and USP, in particular p-Super; and b) the nucleic acid SEQ ID NO. 126975, or a homolog or fragment thereof, or a homolog thereof being depicted in Table I, application no. 12, column 8, in the same line as SEQ ID NO. 126975, preferably the coding region thereof, a homolog or a fragment thereof; which are operable linked.

[63654] In an embodiment thereof the expression cassette comprises in addition c) a nucleic acid molecule encoding a transit peptide, especially a plastidal transit petide in case in Table I, application no. 12, in column 6 in the same line as SEQ ID NO. 126975 is depicted, plastidic is mentioned, or a mitochondrial transit peptide in case in Table I, application no. 12, in column 6 in the same line as SEQ ID NO. 126975 is depicted, mitochondrial is mentioned; which is operable linked, too.

[63655] In another embodiment thereof the expression cassette does not comprise an additional transit peptide in case in Table I, application no. 12, in column 6 in the same line as SEQ ID NO. 126975 is depicted, non-targeted is mentioned.

[63656] In an embodiment the present invention relates to an expresssion cassette comprising a) a promoter, preferably a promoter selected from the group consisting of Big35S, PCUbi, Super and USP, in particular p-Super; and b) the nucleic acid SEQ ID NO. 126991, or a homolog or fragment thereof, or a homolog thereof being depicted in Table I, application no. 12, column 8, in the same line as SEQ ID NO. 126991, preferably the coding region thereof, a homolog or a fragment thereof; which are operable linked.

[63657] In an embodiment thereof the expression cassette comprises in addition c) a nucleic acid molecule encoding a transit peptide, especially a plastidal transit petide in case in Table I, application no. 12, in column 6 in the same line as SEQ ID NO. 126991 is depicted, plastidic is mentioned, or a mitochondrial transit peptide in case in Table I, application no. 12, in column 6 in the same line as SEQ ID NO. 126991 is depicted, mitochondrial is mentioned; which is operable linked, too.

[63658] In another embodiment thereof the expression cassette does not comprise an additional transit peptide in case in Table I, application no. 12, in column 6 in the same line as SEQ ID NO. 126991 is depicted, non-targeted is mentioned.

[63659] In an embodiment the present invention relates to an expresssion cassette comprising a) a promoter, preferably a promoter selected from the group consisting of Big35S, PCUbi, Super and USP, in particular p-PcUBI; and b) the nucleic acid SEQ ID NO. 10811, or a homolog or fragment thereof, or a homolog thereof being depicted in Table I, application no. 12, column 8, in the same line as SEQ ID NO. 10811, preferably the coding region thereof, a homolog or a fragment thereof; which are operable linked.

[63660] In an embodiment thereof the expression cassette comprises in addition c) a nucleic acid molecule encoding a transit peptide, especially a plastidal transit petide in case in Table I, application no. 12, in column 6 in the same line as SEQ ID NO. 10811 is depicted, plastidic is mentioned, or a mitochondrial transit peptide in case in Table I, application no. 12, in column 6 in the same line as SEQ ID NO. 10811 is depicted, mitochondrial is mentioned; which is operable linked, too.

[63661] In another embodiment thereof the expression cassette does not comprise an additional transit peptide in case in Table I, application no. 12, in column 6 in the same line as SEQ ID NO. 10811 is depicted, non-targeted is mentioned.

[63662] In an embodiment the present invention relates to an expresssion cassette comprising a) a promoter, preferably a promoter selected from the group consisting of Big35S, PCUbi, Super and USP, in particular p-PcUBI; and b) the nucleic acid SEQ ID NO. 46751, or a homolog or fragment thereof, or a homolog thereof being depicted in Table I, application no. 12, column 8, in the same line as SEQ ID NO. 46751, preferably the coding region thereof, a homolog or a fragment thereof; which are operable linked.

[63663] In an embodiment thereof the expression cassette comprises in addition c) a nucleic acid molecule encoding a transit peptide, especially a plastidal transit petide in case in Table I, application no. 12, in column 6 in the same line as SEQ ID NO. 46751 is depicted, plastidic is mentioned, or a mitochondrial transit peptide in case in Table I, application no. 12, in column 6 in the same line as SEQ ID NO. 46751 is depicted, mitochondrial is mentioned; which is operable linked, too.

[63664] In another embodiment thereof the expression cassette does not comprise an additional transit peptide in case in Table I, application no. 12, in column 6 in the same line as SEQ ID NO. 46751 is depicted, non-targeted is mentioned.

[63665] In an embodiment the present invention relates to an expresssion cassette comprising a) a promoter, preferably a promoter selected from the group consisting of Big35S, PCUbi, Super and USP, in particular p-PcUBI; and b) the nucleic acid SEQ ID NO. 116312, or a homolog or fragment thereof, or a homolog thereof being depicted in Table I, application no. 12, column 8, in the same line as SEQ ID NO. 116312, preferably the coding region thereof, a homolog or a fragment thereof; which are operable linked.

[63666] In an embodiment thereof the expression cassette comprises in addition c) a nucleic acid molecule encoding a transit peptide, especially a plastidal transit petide in case in Table I, application no. 12, in column 6 in the same line as SEQ ID NO. 116312 is depicted, plastidic is mentioned, or a mitochondrial transit peptide in case in Table I, application no. 12, in column 6 in the same line as SEQ ID NO. 116312 is depicted, mitochondrial is mentioned; which is operable linked, too.

[63667] In another embodiment thereof the expression cassette does not comprise an additional transit peptide in case in Table I, application no. 12, in column 6 in the same line as SEQ ID NO. 116312 is depicted, non-targeted is mentioned.

[63668] In an embodiment the present invention relates to an expresssion cassette comprising a) a promoter, preferably a promoter selected from the group consisting of Big35S, PCUbi, Super and USP, in particular p-PcUBI; and b) the nucleic acid SEQ ID NO. 84865, or a homolog or fragment thereof, or a homolog thereof being depicted in Table I, application no. 12, column 8, in the same line as SEQ ID NO. 84865, preferably the coding region thereof, a homolog or a fragment thereof; which are operable linked.

[63669] In an embodiment thereof the expression cassette comprises in addition c) a nucleic acid molecule encoding a transit peptide, especially a plastidal transit petide in case in Table I, application no. 12, in column 6 in the same line as SEQ ID NO. 84865 is depicted, plastidic is mentioned, or a mitochondrial transit peptide in case in Table I, application no. 12, in column 6 in the same line as SEQ ID NO. 84865 is depicted, mitochondrial is mentioned; which is operable linked, too.

[63670] In another embodiment thereof the expression cassette does not comprise an additional transit peptide in case in Table I, application no. 12, in column 6 in the same line as SEQ ID NO. 84865 is depicted, non-targeted is mentioned.

[63671] In an embodiment the present invention relates to an expresssion cassette comprising a) a promoter, preferably a promoter selected from the group consisting of Big35S, PCUbi, Super and USP, in particular p-PcUBI; and b) the nucleic acid SEQ ID NO. 106920, or a homolog or fragment thereof, or a homolog thereof being depicted in Table I, application no. 12, column 8, in the same line as SEQ ID NO. 106920, preferably the coding region thereof, a homolog or a fragment thereof; which are operable linked.

[63672] In an embodiment thereof the expression cassette comprises in addition c) a nucleic acid molecule encoding a transit peptide, especially a plastidal transit petide in case in Table I, application no. 12, in column 6 in the same line as SEQ ID NO. 106920 is depicted, plastidic is mentioned, or a mitochondrial transit peptide in case in Table I, application no. 12, in column 6 in the same line as SEQ ID NO. 106920 is depicted, mitochondrial is mentioned; which is operable linked, too.

[63673] In another embodiment thereof the expression cassette does not comprise an additional transit peptide in case in Table I, application no. 12, in column 6 in the same line as SEQ ID NO. 106920 is depicted, non-targeted is mentioned.

[63674] In an embodiment the present invention relates to an expresssion cassette comprising a) a promoter, preferably a promoter selected from the group consisting of Big35S, PCUbi, Super and USP, in particular p-PcUBI; and b) the nucleic acid SEQ ID NO. 127103, or a homolog or fragment thereof, or a homolog thereof being depicted in Table I, application no. 12, column 8, in the same line as SEQ ID NO. 127103, preferably the coding region thereof, a homolog or a fragment thereof; which are operable linked.

[63675] In an embodiment thereof the expression cassette comprises in addition c) a nucleic acid molecule encoding a transit peptide, especially a plastidal transit petide in case in Table I, application no. 12, in column 6 in the same line as SEQ ID NO. 127103 is depicted, plastidic is mentioned, or a mitochondrial transit peptide in case in Table I, application no. 12, in column 6 in the same line as SEQ ID NO. 127103 is depicted, mitochondrial is mentioned; which is operable linked, too.

[63676] In another embodiment thereof the expression cassette does not comprise an additional transit peptide in case in Table I, application no. 12, in column 6 in the same line as SEQ ID NO. 127103 is depicted, non-targeted is mentioned.

[63677] In an embodiment the present invention relates to an expresssion cassette comprising a) a promoter, preferably a promoter selected from the group consisting of Big35S, PCUbi, Super and USP, in particular p-PcUBI; and b) the nucleic acid SEQ ID NO. 101707, or a homolog or fragment thereof, or a homolog thereof being depicted in Table I, application no. 12, column 8, in the same line as SEQ ID NO. 101707, preferably the coding region thereof, a homolog or a fragment thereof; which are operable linked.

[63678] In an embodiment thereof the expression cassette comprises in addition c) a nucleic acid molecule encoding a transit peptide, especially a plastidal transit petide in case in Table I, application no. 12, in column 6 in the same line as SEQ ID NO. 101707 is depicted, plastidic is mentioned, or a mitochondrial transit peptide in case in Table I, application no. 12, in column 6 in the same line as SEQ ID NO. 101707 is depicted, mitochondrial is mentioned; which is operable linked, too.

[63679] In another embodiment thereof the expression cassette does not comprise an additional transit peptide in case in Table I, application no. 12, in column 6 in the same line as SEQ ID NO. 101707 is depicted, non-targeted is mentioned.

[63680] In an embodiment the present invention relates to an expresssion cassette comprising a) a promoter, preferably a promoter selected from the group consisting of Big35S, PCUbi, Super and USP, in particular p-PcUBI; and b) the nucleic acid SEQ ID NO. 127109, or a homolog or fragment thereof, or a homolog thereof being depicted in Table I, application no. 12, column 8, in the same line as SEQ ID NO. 127109, preferably the coding region thereof, a homolog or a fragment thereof; which are operable linked.

[63681] In an embodiment thereof the expression cassette comprises in addition c) a nucleic acid molecule encoding a transit peptide, especially a plastidal transit petide in case in Table I, application no. 12, in column 6 in the same line as SEQ ID NO. 127109 is depicted, plastidic is mentioned, or a mitochondrial transit peptide in case in Table I, application no. 12, in column 6 in the same line as SEQ ID NO. 127109 is depicted, mitochondrial is mentioned; which is operable linked, too.

[63682] In another embodiment thereof the expression cassette does not comprise an additional transit peptide in case in Table I, application no. 12, in column 6 in the same line as SEQ ID NO. 127109 is depicted, non-targeted is mentioned.

[63683] In an embodiment the present invention relates to an expresssion cassette comprising a) a promoter, preferably a promoter selected from the group consisting of Big35S, PCUbi, Super and USP, in particular p-PcUBI; and b) the nucleic acid SEQ ID NO. 52634, or a homolog or fragment thereof, or a homolog thereof being depicted in Table I, application no. 12, column 8, in the same line as SEQ ID NO. 52634, preferably the coding region thereof, a homolog or a fragment thereof; which are operable linked.

[63684] In an embodiment thereof the expression cassette comprises in addition c) a nucleic acid molecule encoding a transit peptide, especially a plastidal transit petide in case in Table I, application no. 12, in column 6 in the same line as SEQ ID NO. 52634 is depicted, plastidic is mentioned, or a mitochondrial transit peptide in case in Table I, application no. 12, in column 6 in the same line as SEQ ID NO. 52634 is depicted, mitochondrial is mentioned; which is operable linked, too.

[63685] In another embodiment thereof the expression cassette does not comprise an additional transit peptide in case in Table I, application no. 12, in column 6 in the same line as SEQ ID NO. 52634 is depicted, non-targeted is mentioned.

[63686] In an embodiment the present invention relates to an expresssion cassette comprising a) a promoter, preferably a promoter selected from the group consisting of Big35S, PCUbi, Super and USP, in particular p-PcUBI; and b) the nucleic acid SEQ ID NO. 11471, or a homolog or fragment thereof, or a homolog thereof being depicted in Table I, application no. 12, column 8, in the same line as SEQ ID NO. 11471, preferably the coding region thereof, a homolog or a fragment thereof; which are operable linked.

[63687] In an embodiment thereof the expression cassette comprises in addition c) a nucleic acid molecule encoding a transit peptide, especially a plastidal transit petide in case in Table I, application no. 12, in column 6 in the same line as SEQ ID NO. 11471 is depicted, plastidic is mentioned, or a mitochondrial transit peptide in case in Table I, application no. 12, in column 6 in the same line as SEQ ID NO. 11471 is depicted, mitochondrial is mentioned; which is operable linked, too.

[63688] In another embodiment thereof the expression cassette does not comprise an additional transit peptide in case in Table I, application no. 12, in column 6 in the same line as SEQ ID NO. 11471 is depicted, non-targeted is mentioned.

[63689] In an embodiment the present invention relates to an expresssion cassette comprising a) a promoter, preferably a promoter selected from the group consisting of Big35S, PCUbi, Super and USP, in particular p-PcUBI; and b) the nucleic acid SEQ ID NO. 11990, or a homolog or fragment thereof, or a homolog thereof being depicted in Table I, application no. 12, column 8, in the same line as SEQ ID NO. 11990, preferably the coding region thereof, a homolog or a fragment thereof; which are operable linked.

[63690] In an embodiment thereof the expression cassette comprises in addition c) a nucleic acid molecule encoding a transit peptide, especially a plastidal transit petide in case in Table I, application no. 12, in column 6 in the same line as SEQ ID NO. 11990 is depicted, plastidic is mentioned, or a mitochondrial transit peptide in case in Table I, application no. 12, in column 6 in the same line as SEQ ID NO. 11990 is depicted, mitochondrial is mentioned; which is operable linked, too.

[63691] In another embodiment thereof the expression cassette does not comprise an additional transit peptide in case in Table I, application no. 12, in column 6 in the same line as SEQ ID NO. 11990 is depicted, non-targeted is mentioned.

[63692] In an embodiment the present invention relates to an expresssion cassette comprising a) a promoter, preferably a promoter selected from the group consisting of Big35S, PCUbi, Super and USP, in particular p-PcUBI; and b) the nucleic acid SEQ ID NO. 56153, or a homolog or fragment thereof, or a homolog thereof being depicted in Table I, application no. 12, column 8, in the same line as SEQ ID NO. 56153, preferably the coding region thereof, a homolog or a fragment thereof; which are operable linked.

[63693] In an embodiment thereof the expression cassette comprises in addition c) a nucleic acid molecule encoding a transit peptide, especially a plastidal transit petide in case in Table I, application no. 12, in column 6 in the same line as SEQ ID NO. 56153 is depicted, plastidic is mentioned, or a mitochondrial transit peptide in case in Table I, application no. 12, in column 6 in the same line as SEQ ID NO. 56153 is depicted, mitochondrial is mentioned; which is operable linked, too.

[63694] In another embodiment thereof the expression cassette does not comprise an additional transit peptide in case in Table I, application no. 12, in column 6 in the same line as SEQ ID NO. 56153 is depicted, non-targeted is mentioned.

[63695] In an embodiment the present invention relates to an expresssion cassette comprising a) a promoter, preferably a promoter selected from the group consisting of Big35S, PCUbi, Super and USP, in particular p-PcUBI; and b) the nucleic acid SEQ ID NO. 87397, or a homolog or fragment thereof, or a homolog thereof being depicted in Table I, application no. 12, column 8, in the same line as SEQ ID NO. 87397, preferably the coding region thereof, a homolog or a fragment thereof; which are operable linked.

[63696] In an embodiment thereof the expression cassette comprises in addition c) a nucleic acid molecule encoding a transit peptide, especially a plastidal transit petide in case in Table I, application no. 12, in column 6 in the same line as SEQ ID NO. 87397 is depicted, plastidic is mentioned, or a mitochondrial transit peptide in case in Table I, application no. 12, in column 6 in the same line as SEQ ID NO. 87397 is depicted, mitochondrial is mentioned; which is operable linked, too.

[63697] In another embodiment thereof the expression cassette does not comprise an additional transit peptide in case in Table I, application no. 12, in column 6 in the same line as SEQ ID NO. 87397 is depicted, non-targeted is mentioned.

[63698] In an embodiment the present invention relates to an expresssion cassette comprising a) a promoter, preferably a promoter selected from the group consisting of Big35S, PCUbi, Super and USP, in particular p-PcUBI; and b) the nucleic acid SEQ ID NO. 127183, or a homolog or fragment thereof, or a homolog thereof being depicted in Table I, application no. 12, column 8, in the same line as SEQ ID NO. 127183, preferably the coding region thereof, a homolog or a fragment thereof; which are operable linked.

[63699] In an embodiment thereof the expression cassette comprises in addition c) a nucleic acid molecule encoding a transit peptide, especially a plastidal transit petide in case in Table I, application no. 12, in column 6 in the same line as SEQ ID NO. 127183 is depicted, plastidic is mentioned, or a mitochondrial transit peptide in case in Table I, application no. 12, in column 6 in the same line as SEQ ID NO. 127183 is depicted, mitochondrial is mentioned; which is operable linked, too.

[63700] In another embodiment thereof the expression cassette does not comprise an additional transit peptide in case in Table I, application no. 12, in column 6 in the same line as SEQ ID NO. 127183 is depicted, non-targeted is mentioned.

[63701] In an embodiment the present invention relates to an expresssion cassette comprising a) a promoter, preferably a promoter selected from the group consisting of Big35S, PCUbi, Super and USP, in particular p-PcUBI; and b) the nucleic acid SEQ ID NO. 119222, or a homolog or fragment thereof, or a homolog thereof being depicted in Table I, application no. 12, column 8, in the same line as SEQ ID NO. 119222, preferably the coding region thereof, a homolog or a fragment thereof; which are operable linked.

[63702] In an embodiment thereof the expression cassette comprises in addition c) a nucleic acid molecule encoding a transit peptide, especially a plastidal transit petide in case in Table I, application no. 12, in column 6 in the same line as SEQ ID NO. 119222 is depicted, plastidic is mentioned, or a mitochondrial transit peptide in case in Table I, application no. 12, in column 6 in the same line as SEQ ID NO. 119222 is depicted, mitochondrial is mentioned; which is operable linked, too.

[63703] In another embodiment thereof the expression cassette does not comprise an additional transit peptide in case in Table I, application no. 12, in column 6 in the same line as SEQ ID NO. 119222 is depicted, non-targeted is mentioned.

[63704] In an embodiment the present invention relates to an expresssion cassette comprising a) a promoter, preferably a promoter selected from the group consisting of Big35S, PCUbi, Super and USP, in particular p-PcUBI; and b) the nucleic acid SEQ ID NO. 87655, or a homolog or fragment thereof, or a homolog thereof being depicted in Table I, application no. 12, column 8, in the same line as SEQ ID NO. 87655, preferably the coding region thereof, a homolog or a fragment thereof; which are operable linked.

[63705] In an embodiment thereof the expression cassette comprises in addition c) a nucleic acid molecule encoding a transit peptide, especially a plastidal transit petide in case in Table I, application no. 12, in column 6 in the same line as SEQ ID NO. 87655 is depicted, plastidic is mentioned, or a mitochondrial transit peptide in case in Table I, application no. 12, in column 6 in the same line as SEQ ID NO. 87655 is depicted, mitochondrial is mentioned; which is operable linked, too.

[63706] In another embodiment thereof the expression cassette does not comprise an additional transit peptide in case in Table I, application no. 12, in column 6 in the same line as SEQ ID NO. 87655 is depicted, non-targeted is mentioned.

[63707] In an embodiment the present invention relates to an expresssion cassette comprising a) a promoter, preferably a promoter selected from the group consisting of Big35S, PCUbi, Super and USP, in particular p-PcUBI; and b) the nucleic acid SEQ ID NO. 57734, or a homolog or fragment thereof, or a homolog thereof being depicted in Table I, application no. 12, column 8, in the same line as SEQ ID NO. 57734, preferably the coding region thereof, a homolog or a fragment thereof; which are operable linked.

[63708] In an embodiment thereof the expression cassette comprises in addition c) a nucleic acid molecule encoding a transit peptide, especially a plastidal transit petide in case in Table I, application no. 12, in column 6 in the same line as SEQ ID NO. 57734 is depicted, plastidic is mentioned, or a mitochondrial transit peptide in case in Table I, application no. 12, in column 6 in the same line as SEQ ID NO. 57734 is depicted, mitochondrial is mentioned; which is operable linked, too.

[63709] In another embodiment thereof the expression cassette does not comprise an additional transit peptide in case in Table I, application no. 12, in column 6 in the same line as SEQ ID NO. 57734 is depicted, non-targeted is mentioned.

[63710] In an embodiment the present invention relates to an expresssion cassette comprising a) a promoter, preferably a promoter selected from the group consisting of Big35S, PCUbi, Super and USP, in particular p-PcUBI; and b) the nucleic acid SEQ ID NO. 116460, or a homolog or fragment thereof, or a homolog thereof being depicted in Table I, application no. 12, column 8, in the same line as SEQ ID NO. 116460, preferably the coding region thereof, a homolog or a fragment thereof; which are operable linked.

[63711] In an embodiment thereof the expression cassette comprises in addition c) a nucleic acid molecule encoding a transit peptide, especially a plastidal transit petide in case in Table I, application no. 12, in column 6 in the same line as SEQ ID NO. 116460 is depicted, plastidic is mentioned, or a mitochondrial transit peptide in case in Table I, application no. 12, in column 6 in the same line as SEQ ID NO. 116460 is depicted, mitochondrial is mentioned; which is operable linked, too.

[63712] In another embodiment thereof the expression cassette does not comprise an additional transit peptide in case in Table I, application no. 12, in column 6 in the same line as SEQ ID NO. 116460 is depicted, non-targeted is mentioned.

[63713] In an embodiment the present invention relates to an expresssion cassette comprising a) a promoter, preferably a promoter selected from the group consisting of Big35S, PCUbi, Super and USP, in particular p-PcUBI; and b) the nucleic acid SEQ ID NO. 127521, or a homolog or fragment thereof, or a homolog thereof being depicted in Table I, application no. 12, column 8, in the same line as SEQ ID NO. 127521, preferably the coding region thereof, a homolog or a fragment thereof; which are operable linked.

[63714] In an embodiment thereof the expression cassette comprises in addition c) a nucleic acid molecule encoding a transit peptide, especially a plastidal transit petide in case in Table I, application no. 12, in column 6 in the same line as SEQ ID NO. 127521 is depicted, plastidic is mentioned, or a mitochondrial transit peptide in case in Table I, application no. 12, in column 6 in the same line as SEQ ID NO. 127521 is depicted, mitochondrial is mentioned; which is operable linked, too.

[63715] In another embodiment thereof the expression cassette does not comprise an additional transit peptide in case in Table I, application no. 12, in column 6 in the same line as SEQ ID NO. 127521 is depicted, non-targeted is mentioned.

[63716] In an embodiment the present invention relates to an expresssion cassette comprising a) a promoter, preferably a promoter selected from the group consisting of Big35S, PCUbi, Super and USP, in particular p-PcUBI; and b) the nucleic acid SEQ ID NO. 12341, or a homolog or fragment thereof, or a homolog thereof being depicted in Table I, application no. 12, column 8, in the same line as SEQ ID NO. 12341, preferably the coding region thereof, a homolog or a fragment thereof; which are operable linked.

[63717] In an embodiment thereof the expression cassette comprises in addition c) a nucleic acid molecule encoding a transit peptide, especially a plastidal transit petide in case in Table I, application no. 12, in column 6 in the same line as SEQ ID NO. 12341 is depicted, plastidic is mentioned, or a mitochondrial transit peptide in case in Table I, application no. 12, in column 6 in the same line as SEQ ID NO. 12341 is depicted, mitochondrial is mentioned; which is operable linked, too.

[63718] In another embodiment thereof the expression cassette does not comprise an additional transit peptide in case in Table I, application no. 12, in column 6 in the same line as SEQ ID NO. 12341 is depicted, non-targeted is mentioned.

[63719] In an embodiment the present invention relates to an expresssion cassette comprising a) a promoter, preferably a promoter selected from the group consisting of Big35S, PCUbi, Super and USP, in particular p-PcUBI; and b) the nucleic acid SEQ ID NO. 128024, or a homolog or fragment thereof, or a homolog thereof being depicted in Table I, application no. 12, column 8, in the same line as SEQ ID NO. 128024, preferably the coding region thereof, a homolog or a fragment thereof; which are operable linked.

[63720] In an embodiment thereof the expression cassette comprises in addition c) a nucleic acid molecule encoding a transit peptide, especially a plastidal transit petide in case in Table I, application no. 12, in column 6 in the same line as SEQ ID NO. 128024 is depicted, plastidic is mentioned, or a mitochondrial transit peptide in case in Table I, application no. 12, in column 6 in the same line as SEQ ID NO. 128024 is depicted, mitochondrial is mentioned; which is operable linked, too.

[63721] In another embodiment thereof the expression cassette does not comprise an additional transit peptide in case in Table I, application no. 12, in column 6 in the same line as SEQ ID NO. 128024 is depicted, non-targeted is mentioned.

[63722] In an embodiment the present invention relates to an expresssion cassette comprising a) a promoter, preferably a promoter selected from the group consisting of Big35S, PCUbi, Super and USP, in particular p-PcUBI; and b) the nucleic acid SEQ ID NO. 12698, or a homolog or fragment thereof, or a homolog thereof being depicted in Table I, application no. 12, column 8, in the same line as SEQ ID NO. 12698, preferably the coding region thereof, a homolog or a fragment thereof; which are operable linked.

[63723] In an embodiment thereof the expression cassette comprises in addition c) a nucleic acid molecule encoding a transit peptide, especially a plastidal transit petide in case in Table I, application no. 12, in column 6 in the same line as SEQ ID NO. 12698 is depicted, plastidic is mentioned, or a mitochondrial transit peptide in case in Table I, application no. 12, in column 6 in the same line as SEQ ID NO. 12698 is depicted, mitochondrial is mentioned; which is operable linked, too.

[63724] In another embodiment thereof the expression cassette does not comprise an additional transit peptide in case in Table I, application no. 12, in column 6 in the same line as SEQ ID NO. 12698 is depicted, non-targeted is mentioned.

[63725] In an embodiment the present invention relates to an expresssion cassette comprising a) a promoter, preferably a promoter selected from the group consisting of Big35S, PCUbi, Super and USP, in particular p-PcUBI; and b) the nucleic acid SEQ ID NO. 61070, or a homolog or fragment thereof, or a homolog thereof being depicted in Table I, application no. 12, column 8, in the same line as SEQ ID NO. 61070, preferably the coding region thereof, a homolog or a fragment thereof; which are operable linked.

[63726] In an embodiment thereof the expression cassette comprises in addition c) a nucleic acid molecule encoding a transit peptide, especially a plastidal transit petide in case in Table I, application no. 12, in column 6 in the same line as SEQ ID NO. 61070 is depicted, plastidic is mentioned, or a mitochondrial transit peptide in case in Table I, application no. 12, in column 6 in the same line as SEQ ID NO. 61070 is depicted, mitochondrial is mentioned; which is operable linked, too.

[63727] In another embodiment thereof the expression cassette does not comprise an additional transit peptide in case in Table I, application no. 12, in column 6 in the same line as SEQ ID NO. 61070 is depicted, non-targeted is mentioned.

[63728] In an embodiment the present invention relates to an expresssion cassette comprising a) a promoter, preferably a promoter selected from the group consisting of Big35S, PCUbi, Super and USP, in particular p-PcUBI; and b) the nucleic acid SEQ ID NO. 61553, or a homolog or fragment thereof, or a homolog thereof being depicted in Table I, application no. 12, column 8, in the same line as SEQ ID NO. 61553, preferably the coding region thereof, a homolog or a fragment thereof; which are operable linked.

[63729] In an embodiment thereof the expression cassette comprises in addition c) a nucleic acid molecule encoding a transit peptide, especially a plastidal transit petide in case in Table I, application no. 12, in column 6 in the same line as SEQ ID NO. 61553 is depicted, plastidic is mentioned, or a mitochondrial transit peptide in case in Table I, application no. 12, in column 6 in the same line as SEQ ID NO. 61553 is depicted, mitochondrial is mentioned; which is operable linked, too.

[63730] In another embodiment thereof the expression cassette does not comprise an additional transit peptide in case in Table I, application no. 12, in column 6 in the same line as SEQ ID NO. 61553 is depicted, non-targeted is mentioned.

[63731] In an embodiment the present invention relates to an expresssion cassette comprising a) a promoter, preferably a promoter selected from the group consisting of Big35S, PCUbi, Super and USP, in particular p-PcUBI; and b) the nucleic acid SEQ ID NO. 61723, or a homolog or fragment thereof, or a homolog thereof being depicted in Table I, application no. 12, column 8, in the same line as SEQ ID NO. 61723, preferably the coding region thereof, a homolog or a fragment thereof; which are operable linked.

[63732] In an embodiment thereof the expression cassette comprises in addition c) a nucleic acid molecule encoding a transit peptide, especially a plastidal transit petide in case in Table I, application no. 12, in column 6 in the same line as SEQ ID NO. 61723 is depicted, plastidic is mentioned, or a mitochondrial transit peptide in case in Table I, application no. 12, in column 6 in the same line as SEQ ID NO. 61723 is depicted, mitochondrial is mentioned; which is operable linked, too.

[63733] In another embodiment thereof the expression cassette does not comprise an additional transit peptide in case in Table I, application no. 12, in column 6 in the same line as SEQ ID NO. 61723 is depicted, non-targeted is mentioned.

[63734] In an embodiment the present invention relates to an expresssion cassette comprising a) a promoter, preferably a promoter selected from the group consisting of Big35S, PCUbi, Super and USP, in particular p-PcUBI; and b) the nucleic acid SEQ ID NO. 62079, or a homolog or fragment thereof, or a homolog thereof being depicted in Table I, application no. 12, column 8, in the same line as SEQ ID NO. 62079, preferably the coding region thereof, a homolog or a fragment thereof; which are operable linked.

[63735] In an embodiment thereof the expression cassette comprises in addition c) a nucleic acid molecule encoding a transit peptide, especially a plastidal transit petide in case in Table I, application no. 12, in column 6 in the same line as SEQ ID NO. 62079 is depicted, plastidic is mentioned, or a mitochondrial transit peptide in case in Table I, application no. 12, in column 6 in the same line as SEQ ID NO. 62079 is depicted, mitochondrial is mentioned; which is operable linked, too.

[63736] In another embodiment thereof the expression cassette does not comprise an additional transit peptide in case in Table I, application no. 12, in column 6 in the same line as SEQ ID NO. 62079 is depicted, non-targeted is mentioned.

[63737] In an embodiment the present invention relates to an expresssion cassette comprising a) a promoter, preferably a promoter selected from the group consisting of Big35S, PCUbi, Super and USP, in particular p-PcUBI; and b) the nucleic acid SEQ ID NO. 12974, or a homolog or fragment thereof, or a homolog thereof being depicted in Table I, application no. 12, column 8, in the same line as SEQ ID NO. 12974, preferably the coding region thereof, a homolog or a fragment thereof; which are operable linked.

[63738] In an embodiment thereof the expression cassette comprises in addition c) a nucleic acid molecule encoding a transit peptide, especially a plastidal transit petide in case in Table I, application no. 12, in column 6 in the same line as SEQ ID NO. 12974 is depicted, plastidic is mentioned, or a mitochondrial transit peptide in case in Table I, application no. 12, in column 6 in the same line as SEQ ID NO. 12974 is depicted, mitochondrial is mentioned; which is operable linked, too.

[63739] In another embodiment thereof the expression cassette does not comprise an additional transit peptide in case in Table I, application no. 12, in column 6 in the same line as SEQ ID NO. 12974 is depicted, non-targeted is mentioned.

[63740] In an embodiment the present invention relates to an expresssion cassette comprising a) a promoter, preferably a promoter selected from the group consisting of Big35S, PCUbi, Super and USP, in particular Big35S; and b) the nucleic acid SEQ ID NO. 128139, or a homolog or fragment thereof, or a homolog thereof being depicted in Table I, application no. 12, column 8, in the same line as SEQ ID NO. 128139, preferably the coding region thereof, a homolog or a fragment thereof; which are operable linked.

[63741] In an embodiment thereof the expression cassette comprises in addition c) a nucleic acid molecule encoding a transit peptide, especially a plastidal transit petide in case in Table I, application no. 12, in column 6 in the same line as SEQ ID NO. 128139 is depicted, plastidic is mentioned, or a mitochondrial transit peptide in case in Table I, application no. 12, in column 6 in the same line as SEQ ID NO. 128139 is depicted, mitochondrial is mentioned; which is operable linked, too.

[63742] In another embodiment thereof the expression cassette does not comprise an additional transit peptide in case in Table I, application no. 12, in column 6 in the same line as SEQ ID NO. 128139 is depicted, non-targeted is mentioned.

[63743] In an embodiment the present invention relates to an expresssion cassette comprising a) a promoter, preferably a promoter selected from the group consisting of Big35S, PCUbi, Super and USP, in particular Big35S; and b) the nucleic acid SEQ ID NO. 62524, or a homolog or fragment thereof, or a homolog thereof being depicted in Table I, application no. 12, column 8, in the same line as SEQ ID NO. 62524, preferably the coding region thereof, a homolog or a fragment thereof; which are operable linked.

[63744] In an embodiment thereof the expression cassette comprises in addition c) a nucleic acid molecule encoding a transit peptide, especially a plastidal transit petide in case in Table I, application no. 12, in column 6 in the same line as SEQ ID NO. 62524 is depicted, plastidic is mentioned, or a mitochondrial transit peptide in case in Table I, application no. 12, in column 6 in the same line as SEQ ID NO. 62524 is depicted, mitochondrial is mentioned; which is operable linked, too.

[63745] In another embodiment thereof the expression cassette does not comprise an additional transit peptide in case in Table I, application no. 12, in column 6 in the same line as SEQ ID NO. 62524 is depicted, non-targeted is mentioned.

[63746] In an embodiment the present invention relates to an expresssion cassette comprising a) a promoter, preferably a promoter selected from the group consisting of Big35S, PCUbi, Super and USP, in particular Big35S; and b) the nucleic acid SEQ ID NO. 62717, or a homolog or fragment thereof, or a homolog thereof being depicted in Table I, application no. 12, column 8, in the same line as SEQ ID NO. 62717, preferably the coding region thereof, a homolog or a fragment thereof; which are operable linked.

[63747] In an embodiment thereof the expression cassette comprises in addition c) a nucleic acid molecule encoding a transit peptide, especially a plastidal transit petide in case in Table I, application no. 12, in column 6 in the same line as SEQ ID NO. 62717 is depicted, plastidic is mentioned, or a mitochondrial transit peptide in case in Table I, application no. 12, in column 6 in the same line as SEQ ID NO. 62717 is depicted, mitochondrial is mentioned; which is operable linked, too.

[63748] In another embodiment thereof the expression cassette does not comprise an additional transit peptide in case in Table I, application no. 12, in column 6 in the same line as SEQ ID NO. 62717 is depicted, non-targeted is mentioned.

[63749] In an embodiment the present invention relates to an expresssion cassette comprising a) a promoter, preferably a promoter selected from the group consisting of Big35S, PCUbi, Super and USP, in particular p-Super; and b) the nucleic acid SEQ ID NO. 96980, or a homolog or fragment thereof, or a homolog thereof being depicted in Table I, application no. 12, column 8, in the same line as SEQ ID NO. 96980, preferably the coding region thereof, a homolog or a fragment thereof; which are operable linked.

[63750] In an embodiment thereof the expression cassette comprises in addition c) a nucleic acid molecule encoding a transit peptide, especially a plastidal transit petide in case in Table I, application no. 12, in column 6 in the same line as SEQ ID NO. 96980 is depicted, plastidic is mentioned, or a mitochondrial transit peptide in case in Table I, application no. 12, in column 6 in the same line as SEQ ID NO. 96980 is depicted, mitochondrial is mentioned; which is operable linked, too.

[63751] In another embodiment thereof the expression cassette does not comprise an additional transit peptide in case in Table I, application no. 12, in column 6 in the same line as SEQ ID NO. 96980 is depicted, non-targeted is mentioned.

[63752] In an embodiment the present invention relates to an expresssion cassette comprising a) a promoter, preferably a promoter selected from the group consisting of Big35S, PCUbi, Super and USP, in particular p-Super; and b) the nucleic acid SEQ ID NO. 113220, or a homolog or fragment thereof, or a homolog thereof being depicted in Table I, application no. 12, column 8, in the same line as SEQ ID NO. 113220, preferably the coding region thereof, a homolog or a fragment thereof; which are operable linked.

[63753] In an embodiment thereof the expression cassette comprises in addition c) a nucleic acid molecule encoding a transit peptide, especially a plastidal transit petide in case in Table I, application no. 12, in column 6 in the same line as SEQ ID NO. 113220 is depicted, plastidic is mentioned, or a mitochondrial transit peptide in case in Table I, application no. 12, in column 6 in the same line as SEQ ID NO. 113220 is depicted, mitochondrial is mentioned; which is operable linked, too.

[63754] In another embodiment thereof the expression cassette does not comprise an additional transit peptide in case in Table I, application no. 12, in column 6 in the same line as SEQ ID NO. 113220 is depicted, non-targeted is mentioned.

[63755] In an embodiment the present invention relates to an expresssion cassette comprising a) a promoter, preferably a promoter selected from the group consisting of Big35S, PCUbi, Super and USP, in particular p-PcUBI; and b) the nucleic acid SEQ ID NO. 119408, or a homolog or fragment thereof, or a homolog thereof being depicted in Table I, application no. 12, column 8, in the same line as SEQ ID NO. 119408, preferably the coding region thereof, a homolog or a fragment thereof; which are operable linked.

[63756] In an embodiment thereof the expression cassette comprises in addition c) a nucleic acid molecule encoding a transit peptide, especially a plastidal transit petide in case in Table I, application no. 12, in column 6 in the same line as SEQ ID NO. 119408 is depicted, plastidic is mentioned, or a mitochondrial transit peptide in case in Table I, application no. 12, in column 6 in the same line as SEQ ID NO. 119408 is depicted, mitochondrial is mentioned; which is operable linked, too.

[63757] In another embodiment thereof the expression cassette does not comprise an additional transit peptide in case in Table I, application no. 12, in column 6 in the same line as SEQ ID NO. 119408 is depicted, non-targeted is mentioned.

[63758] In an embodiment the present invention relates to an expresssion cassette comprising a) a promoter, preferably a promoter selected from the group consisting of Big35S, PCUbi, Super and USP, in particular p-PcUBI; and b) the nucleic acid SEQ ID NO. 122228, or a homolog or fragment thereof, or a homolog thereof being depicted in Table I, application no. 12, column 8, in the same line as SEQ ID NO. 122228, preferably the coding region thereof, a homolog or a fragment thereof; which are operable linked.

[63759] In an embodiment thereof the expression cassette comprises in addition c) a nucleic acid molecule encoding a transit peptide, especially a plastidal transit petide in case in Table I, application no. 12, in column 6 in the same line as SEQ ID NO. 122228 is depicted, plastidic is mentioned, or a mitochondrial transit peptide in case in Table I, application no. 12, in column 6 in the same line as SEQ ID NO. 122228 is depicted, mitochondrial is mentioned; which is operable linked, too.

[63760] In another embodiment thereof the expression cassette does not comprise an additional transit peptide in case in Table I, application no. 12, in column 6 in the same line as SEQ ID NO. 122228 is depicted, non-targeted is mentioned.

[63761] In an embodiment the present invention relates to an expresssion cassette comprising a) a promoter, preferably a promoter selected from the group consisting of Big35S, PCUbi, Super and USP, in particular Big35S; and b) the nucleic acid SEQ ID NO. 120045, or a homolog or fragment thereof, or a homolog thereof being depicted in Table I, application no. 12, column 8, in the same line as SEQ ID NO. 120045, preferably the coding region thereof, a homolog or a fragment thereof; which are operable linked.

[63762] In an embodiment thereof the expression cassette comprises in addition c) a nucleic acid molecule encoding a transit peptide, especially a plastidal transit petide in case in Table I, application no. 12, in column 6 in the same line as SEQ ID NO. 120045 is depicted, plastidic is mentioned, or a mitochondrial transit peptide in case in Table I, application no. 12, in column 6 in the same line as SEQ ID NO. 120045 is depicted, mitochondrial is mentioned; which is operable linked, too.

[63763] In another embodiment thereof the expression cassette does not comprise an additional transit peptide in case in Table I, application no. 12, in column 6 in the same line as SEQ ID NO. 120045 is depicted, non-targeted is mentioned.

[63764] In an embodiment the present invention relates to an expresssion cassette comprising a) a promoter, preferably a promoter selected from the group consisting of Big35S, PCUbi, Super and USP, in particular p-Super; and b) the nucleic acid SEQ ID NO. 113224, or a homolog or fragment thereof, or a homolog thereof being depicted in Table I, application no. 12, column 8, in the same line as SEQ ID NO. 113224, preferably the coding region thereof, a homolog or a fragment thereof; which are operable linked.

[63765] In an embodiment thereof the expression cassette comprises in addition c) a nucleic acid molecule encoding a transit peptide, especially a plastidal transit petide in case in Table I, application no. 12, in column 6 in the same line as SEQ ID NO. 113224 is depicted, plastidic is mentioned, or a mitochondrial transit peptide in case in Table I, application no. 12, in column 6 in the same line as SEQ ID NO. 113224 is depicted, mitochondrial is mentioned; which is operable linked, too.

[63766] In another embodiment thereof the expression cassette does not comprise an additional transit peptide in case in Table I, application no. 12, in column 6 in the same line as SEQ ID NO. 113224 is depicted, non-targeted is mentioned.

[63767] In an embodiment the present invention relates to an expresssion cassette comprising a) a promoter, preferably a promoter selected from the group consisting of Big35S, PCUbi, Super and USP, in particular p-Super; and b) the nucleic acid SEQ ID NO. 113330, or a homolog or fragment thereof, or a homolog thereof being depicted in Table I, application no. 12, column 8, in the same line as SEQ ID NO. 113330, preferably the coding region thereof, a homolog or a fragment thereof; which are operable linked.

[63768] In an embodiment thereof the expression cassette comprises in addition c) a nucleic acid molecule encoding a transit peptide, especially a plastidal transit petide in case in Table I, application no. 12, in column 6 in the same line as SEQ ID NO. 113330 is depicted, plastidic is mentioned, or a mitochondrial transit peptide in case in Table I, application no. 12, in column 6 in the same line as SEQ ID NO. 113330 is depicted, mitochondrial is mentioned; which is operable linked, too.

[63769] In another embodiment thereof the expression cassette does not comprise an additional transit peptide in case in Table I, application no. 12, in column 6 in the same line as SEQ ID NO. 113330 is depicted, non-targeted is mentioned.

[63770] In an embodiment the present invention relates to an expresssion cassette comprising a) a promoter, preferably a promoter selected from the group consisting of Big35S, PCUbi, Super and USP, in particular p-Super; and b) the nucleic acid SEQ ID NO. 128148, or a homolog or fragment thereof, or a homolog thereof being depicted in Table I, application no. 12, column 8, in the same line as SEQ ID NO. 128148, preferably the coding region thereof, a homolog or a fragment thereof; which are operable linked.

[63771] In an embodiment thereof the expression cassette comprises in addition c) a nucleic acid molecule encoding a transit peptide, especially a plastidal transit petide in case in Table I, application no. 12, in column 6 in the same line as SEQ ID NO. 128148 is depicted, plastidic is mentioned, or a mitochondrial transit peptide in case in Table I, application no. 12, in column 6 in the same line as SEQ ID NO. 128148 is depicted, mitochondrial is mentioned; which is operable linked, too.

[63772] In another embodiment thereof the expression cassette does not comprise an additional transit peptide in case in Table I, application no. 12, in column 6 in the same line as SEQ ID NO. 128148 is depicted, non-targeted is mentioned.

[63773] In an embodiment the present invention relates to an expresssion cassette comprising a) a promoter, preferably a promoter selected from the group consisting of Big35S, PCUbi, Super and USP, in particular p-Super; and b) the nucleic acid SEQ ID NO. 14706, or a homolog or fragment thereof, or a homolog thereof being depicted in Table I, application no. 12, column 8, in the same line as SEQ ID NO. 14706, preferably the coding region thereof, a homolog or a fragment thereof; which are operable linked.

[63774] In an embodiment thereof the expression cassette comprises in addition c) a nucleic acid molecule encoding a transit peptide, especially a plastidal transit petide in case in Table I, application no. 12, in column 6 in the same line as SEQ ID NO. 14706 is depicted, plastidic is mentioned, or a mitochondrial transit peptide in case in Table I, application no. 12, in column 6 in the same line as SEQ ID NO. 14706 is depicted, mitochondrial is mentioned; which is operable linked, too.

[63775] In another embodiment thereof the expression cassette does not comprise an additional transit peptide in case in Table I, application no. 12, in column 6 in the same line as SEQ ID NO. 14706 is depicted, non-targeted is mentioned.

[63776] In an embodiment the present invention relates to an expresssion cassette comprising a) a promoter, preferably a promoter selected from the group consisting of Big35S, PCUbi, Super and USP, in particular p-Super; and b) the nucleic acid SEQ ID NO. 90159, or a homolog or fragment thereof, or a homolog thereof being depicted in Table I, application no. 12, column 8, in the same line as SEQ ID NO. 90159, preferably the coding region thereof, a homolog or a fragment thereof; which are operable linked.

[63777] In an embodiment thereof the expression cassette comprises in addition c) a nucleic acid molecule encoding a transit peptide, especially a plastidal transit petide in case in Table I, application no. 12, in column 6 in the same line as SEQ ID NO. 90159 is depicted, plastidic is mentioned, or a mitochondrial transit peptide in case in Table I, application no. 12, in column 6 in the same line as SEQ ID NO. 90159 is depicted, mitochondrial is mentioned; which is operable linked, too.

[63778] In another embodiment thereof the expression cassette does not comprise an additional transit peptide in case in Table I, application no. 12, in column 6 in the same line as SEQ ID NO. 90159 is depicted, non-targeted is mentioned.

[63779] In an embodiment the present invention relates to an expresssion cassette comprising a) a promoter, preferably a promoter selected from the group consisting of Big35S, PCUbi, Super and USP, in particular p-Super; and b) the nucleic acid SEQ ID NO. 120241, or a homolog or fragment thereof, or a homolog thereof being depicted in Table I, application no. 12, column 8, in the same line as SEQ ID NO. 120241, preferably the coding region thereof, a homolog or a fragment thereof; which are operable linked.

[63780] In an embodiment thereof the expression cassette comprises in addition c) a nucleic acid molecule encoding a transit peptide, especially a plastidal transit petide in case in Table I, application no. 12, in column 6 in the same line as SEQ ID NO. 120241 is depicted, plastidic is mentioned, or a mitochondrial transit peptide in case in Table I, application no. 12, in column 6 in the same line as SEQ ID NO. 120241 is depicted, mitochondrial is mentioned; which is operable linked, too.

[63781] In another embodiment thereof the expression cassette does not comprise an additional transit peptide in case in Table I, application no. 12, in column 6 in the same line as SEQ ID NO. 120241 is depicted, non-targeted is mentioned.

[63782] In an embodiment the present invention relates to an expresssion cassette comprising a) a promoter, preferably a promoter selected from the group consisting of Big35S, PCUbi, Super and USP, in particular p-USP; and b) the nucleic acid SEQ ID NO. 128511, or a homolog or fragment thereof, or a homolog thereof being depicted in Table I, application no. 12, column 8, in the same line as SEQ ID NO. 128511, preferably the coding region thereof, a homolog or a fragment thereof; which are operable linked.

[63783] In an embodiment thereof the expression cassette comprises in addition c) a nucleic acid molecule encoding a transit peptide, especially a plastidal transit petide in case in Table I, application no. 12, in column 6 in the same line as SEQ ID NO. 128511 is depicted, plastidic is mentioned, or a mitochondrial transit peptide in case in Table I, application no. 12, in column 6 in the same line as SEQ ID NO. 128511 is depicted, mitochondrial is mentioned; which is operable linked, too.

[63784] In another embodiment thereof the expression cassette does not comprise an additional transit peptide in case in Table I, application no. 12, in column 6 in the same line as SEQ ID NO. 128511 is depicted, non-targeted is mentioned.

[63785] In an embodiment the present invention relates to an expresssion cassette comprising a) a promoter, preferably a promoter selected from the group consisting of Big35S, PCUbi, Super and USP, in particular Big35S; and b) the nucleic acid SEQ ID NO. 113598, or a homolog or fragment thereof, or a homolog thereof being depicted in Table I, application no. 12, column 8, in the same line as SEQ ID NO. 113598, preferably the coding region thereof, a homolog or a fragment thereof; which are operable linked.

[63786] In an embodiment thereof the expression cassette comprises in addition c) a nucleic acid molecule encoding a transit peptide, especially a plastidal transit petide in case in Table I, application no. 12, in column 6 in the same line as SEQ ID NO. 113598 is depicted, plastidic is mentioned, or a mitochondrial transit peptide in case in Table I, application no. 12, in column 6 in the same line as SEQ ID NO. 113598 is depicted, mitochondrial is mentioned; which is operable linked, too.

[63787] In another embodiment thereof the expression cassette does not comprise an additional transit peptide in case in Table I, application no. 12, in column 6 in the same line as SEQ ID NO. 113598 is depicted, non-targeted is mentioned.

[63788] In an embodiment the present invention relates to an expresssion cassette comprising a) a promoter, preferably a promoter selected from the group consisting of Big35S, PCUbi, Super and USP, in particular Big35S; and b) the nucleic acid SEQ ID NO. 63807, or a homolog or fragment thereof, or a homolog thereof being depicted in Table I, application no. 12, column 8, in the same line as SEQ ID NO. 63807, preferably the coding region thereof, a homolog or a fragment thereof; which are operable linked.

[63789] In an embodiment thereof the expression cassette comprises in addition c) a nucleic acid molecule encoding a transit peptide, especially a plastidal transit petide in case in Table I, application no. 12, in column 6 in the same line as SEQ ID NO. 63807 is depicted, plastidic is mentioned, or a mitochondrial transit peptide in case in Table I, application no. 12, in column 6 in the same line as SEQ ID NO. 63807 is depicted, mitochondrial is mentioned; which is operable linked, too.

[63790] In another embodiment thereof the expression cassette does not comprise an additional transit peptide in case in Table I, application no. 12, in column 6 in the same line as SEQ ID NO. 63807 is depicted, non-targeted is mentioned.

[63791] In an embodiment the present invention relates to an expresssion cassette comprising a) a promoter, preferably a promoter selected from the group consisting of Big35S, PCUbi, Super and USP, in particular Big35S; and b) the nucleic acid SEQ ID NO. 64144, or a homolog or fragment thereof, or a homolog thereof being depicted in Table I, application no. 12, column 8, in the same line as SEQ ID NO. 64144, preferably the coding region thereof, a homolog or a fragment thereof; which are operable linked.

[63792] In an embodiment thereof the expression cassette comprises in addition c) a nucleic acid molecule encoding a transit peptide, especially a plastidal transit petide in case in Table I, application no. 12, in column 6 in the same line as SEQ ID NO. 64144 is depicted, plastidic is mentioned, or a mitochondrial transit peptide in case in Table I, application no. 12, in column 6 in the same line as SEQ ID NO. 64144 is depicted, mitochondrial is mentioned; which is operable linked, too.

[63793] In another embodiment thereof the expression cassette does not comprise an additional transit peptide in case in Table I, application no. 12, in column 6 in the same line as SEQ ID NO. 64144 is depicted, non-targeted is mentioned.

[63794] In an embodiment the present invention relates to an expresssion cassette comprising a) a promoter, preferably a promoter selected from the group consisting of Big35S, PCUbi, Super and USP, in particular p-Super; and b) the nucleic acid SEQ ID NO. 90189, or a homolog or fragment thereof, or a homolog thereof being depicted in Table I, application no. 12, column 8, in the same line as SEQ ID NO. 90189, preferably the coding region thereof, a homolog or a fragment thereof; which are operable linked.

[63795] In an embodiment thereof the expression cassette comprises in addition c) a nucleic acid molecule encoding a transit peptide, especially a plastidal transit petide in case in Table I, application no. 12, in column 6 in the same line as SEQ ID NO. 90189 is depicted, plastidic is mentioned, or a mitochondrial transit peptide in case in Table I, application no. 12, in column 6 in the same line as SEQ ID NO. 90189 is depicted, mitochondrial is mentioned; which is operable linked, too.

[63796] In another embodiment thereof the expression cassette does not comprise an additional transit peptide in case in Table I, application no. 12, in column 6 in the same line as SEQ ID NO. 90189 is depicted, non-targeted is mentioned.

[63797] In an embodiment the present invention relates to an expresssion cassette comprising a) a promoter, preferably a promoter selected from the group consisting of Big35S, PCUbi, Super and USP, in particular Big35S; and b) the nucleic acid SEQ ID NO. 64177, or a homolog or fragment thereof, or a homolog thereof being depicted in Table I, application no. 12, column 8, in the same line as SEQ ID NO. 64177, preferably the coding region thereof, a homolog or a fragment thereof; which are operable linked.

[63798] In an embodiment thereof the expression cassette comprises in addition c) a nucleic acid molecule encoding a transit peptide, especially a plastidal transit petide in case in Table I, application no. 12, in column 6 in the same line as SEQ ID NO. 64177 is depicted, plastidic is mentioned, or a mitochondrial transit peptide in case in Table I, application no. 12, in column 6 in the same line as SEQ ID NO. 64177 is depicted, mitochondrial is mentioned; which is operable linked, too.

[63799] In another embodiment thereof the expression cassette does not comprise an additional transit peptide in case in Table I, application no. 12, in column 6 in the same line as SEQ ID NO. 64177 is depicted, non-targeted is mentioned.

[63800] In an embodiment the present invention relates to an expresssion cassette comprising a) a promoter, preferably a promoter selected from the group consisting of Big35S, PCUbi, Super and USP, in particular p-PcUBI; and b) the nucleic acid SEQ ID NO. 117482, or a homolog or fragment thereof, or a homolog thereof being depicted in Table I, application no. 12, column 8, in the same line as SEQ ID NO. 117482, preferably the coding region thereof, a homolog or a fragment thereof; which are operable linked.

[63801] In an embodiment thereof the expression cassette comprises in addition c) a nucleic acid molecule encoding a transit peptide, especially a plastidal transit petide in case in Table I, application no. 12, in column 6 in the same line as SEQ ID NO. 117482 is depicted, plastidic is mentioned, or a mitochondrial transit peptide in case in Table I, application no. 12, in column 6 in the same line as SEQ ID NO. 117482 is depicted, mitochondrial is mentioned; which is operable linked, too.

[63802] In another embodiment thereof the expression cassette does not comprise an additional transit peptide in case in Table I, application no. 12, in column 6 in the same line as SEQ ID NO. 117482 is depicted, non-targeted is mentioned.

[63803] In an embodiment the present invention relates to an expresssion cassette comprising a) a promoter, preferably a promoter selected from the group consisting of Big35S, PCUbi, Super and USP, in particular p-PcUBI; and b) the nucleic acid SEQ ID NO. 64218, or a homolog or fragment thereof, or a homolog thereof being depicted in Table I, application no. 12, column 8, in the same line as SEQ ID NO. 64218, preferably the coding region thereof, a homolog or a fragment thereof; which are operable linked.

[63804] In an embodiment thereof the expression cassette comprises in addition c) a nucleic acid molecule encoding a transit peptide, especially a plastidal transit petide in case in Table I, application no. 12, in column 6 in the same line as SEQ ID NO. 64218 is depicted, plastidic is mentioned, or a mitochondrial transit peptide in case in Table I, application no. 12, in column 6 in the same line as SEQ ID NO. 64218 is depicted, mitochondrial is mentioned; which is operable linked, too.

[63805] In another embodiment thereof the expression cassette does not comprise an additional transit peptide in case in Table I, application no. 12, in column 6 in the same line as SEQ ID NO. 64218 is depicted, non-targeted is mentioned.

[63806] In an embodiment the present invention relates to an expresssion cassette comprising a) a promoter, preferably a promoter selected from the group consisting of Big35S, PCUbi, Super and USP, in particular p-Super; and b) the nucleic acid SEQ ID NO. 128655, or a homolog or fragment thereof, or a homolog thereof being depicted in Table I, application no. 12, column 8, in the same line as SEQ ID NO. 128655, preferably the coding region thereof, a homolog or a fragment thereof; which are operable linked.

[63807] In an embodiment thereof the expression cassette comprises in addition c) a nucleic acid molecule encoding a transit peptide, especially a plastidal transit petide in case in Table I, application no. 12, in column 6 in the same line as SEQ ID NO. 128655 is depicted, plastidic is mentioned, or a mitochondrial transit peptide in case in Table I, application no. 12, in column 6 in the same line as SEQ ID NO. 128655 is depicted, mitochondrial is mentioned; which is operable linked, too.

[63808] In another embodiment thereof the expression cassette does not comprise an additional transit peptide in case in Table I, application no. 12, in column 6 in the same line as SEQ ID NO. 128655 is depicted, non-targeted is mentioned.

[63809] In an embodiment the present invention relates to an expresssion cassette comprising a) a promoter, preferably a promoter selected from the group consisting of Big35S, PCUbi, Super and USP, in particular p-PcUBI; and b) the nucleic acid SEQ ID NO. 128967, or a homolog or fragment thereof, or a homolog thereof being depicted in Table I, application no. 12, column 8, in the same line as SEQ ID NO. 128967, preferably the coding region thereof, a homolog or a fragment thereof; which are operable linked.

[63810] In an embodiment thereof the expression cassette comprises in addition c) a nucleic acid molecule encoding a transit peptide, especially a plastidal transit petide in case in Table I, application no. 12, in column 6 in the same line as SEQ ID NO. 128967 is depicted, plastidic is mentioned, or a mitochondrial transit peptide in case in Table I, application no. 12, in column 6 in the same line as SEQ ID NO. 128967 is depicted, mitochondrial is mentioned; which is operable linked, too.

[63811] In another embodiment thereof the expression cassette does not comprise an additional transit peptide in case in Table I, application no. 12, in column 6 in the same line as SEQ ID NO. 128967 is depicted, non-targeted is mentioned.

[63812] In an embodiment the present invention relates to an expresssion cassette comprising a) a promoter, preferably a promoter selected from the group consisting of Big35S, PCUbi, Super and USP, in particular p-Super; and b) the nucleic acid SEQ ID NO. 64964, or a homolog or fragment thereof, or a homolog thereof being depicted in Table I, application no. 12, column 8, in the same line as SEQ ID NO. 64964, preferably the coding region thereof, a homolog or a fragment thereof; which are operable linked.

[63813] In an embodiment thereof the expression cassette comprises in addition c) a nucleic acid molecule encoding a transit peptide, especially a plastidal transit petide in case in Table I, application no. 12, in column 6 in the same line as SEQ ID NO. 64964 is depicted, plastidic is mentioned, or a mitochondrial transit peptide in case in Table I, application no. 12, in column 6 in the same line as SEQ ID NO. 64964 is depicted, mitochondrial is mentioned; which is operable linked, too.

[63814] In another embodiment thereof the expression cassette does not comprise an additional transit peptide in case in Table I, application no. 12, in column 6 in the same line as SEQ ID NO. 64964 is depicted, non-targeted is mentioned.

[63815] In an embodiment the present invention relates to an expresssion cassette comprising a) a promoter, preferably a promoter selected from the group consisting of Big35S, PCUbi, Super and USP, in particular Big35S; and b) the nucleic acid SEQ ID NO. 97631, or a homolog or fragment thereof, or a homolog thereof being depicted in Table I, application no. 12, column 8, in the same line as SEQ ID NO. 97631, preferably the coding region thereof, a homolog or a fragment thereof; which are operable linked.

[63816] In an embodiment thereof the expression cassette comprises in addition c) a nucleic acid molecule encoding a transit peptide, especially a plastidal transit petide in case in Table I, application no. 12, in column 6 in the same line as SEQ ID NO. 97631 is depicted, plastidic is mentioned, or a mitochondrial transit peptide in case in Table I, application no. 12, in column 6 in the same line as SEQ ID NO. 97631 is depicted, mitochondrial is mentioned; which is operable linked, too.

[63817] In another embodiment thereof the expression cassette does not comprise an additional transit peptide in case in Table I, application no. 12, in column 6 in the same line as SEQ ID NO. 97631 is depicted, non-targeted is mentioned.

[63818] In an embodiment the present invention relates to an expresssion cassette comprising a) a promoter, preferably a promoter selected from the group consisting of Big35S, PCUbi, Super and USP, in particular Big35S; and b) the nucleic acid SEQ ID NO. 14843, or a homolog or fragment thereof, or a homolog thereof being depicted in Table I, application no. 12, column 8, in the same line as SEQ ID NO. 14843, preferably the coding region thereof, a homolog or a fragment thereof; which are operable linked.

[63819] In an embodiment thereof the expression cassette comprises in addition c) a nucleic acid molecule encoding a transit peptide, especially a plastidal transit petide in case in Table I, application no. 12, in column 6 in the same line as SEQ ID NO. 14843 is depicted, plastidic is mentioned, or a mitochondrial transit peptide in case in Table I, application no. 12, in column 6 in the same line as SEQ ID NO. 14843 is depicted, mitochondrial is mentioned; which is operable linked, too.

[63820] In another embodiment thereof the expression cassette does not comprise an additional transit peptide in case in Table I, application no. 12, in column 6 in the same line as SEQ ID NO. 14843 is depicted, non-targeted is mentioned.

[63821] In an embodiment the present invention relates to an expresssion cassette comprising a) a promoter, preferably a promoter selected from the group consisting of Big35S, PCUbi, Super and USP, in particular p-PcUBI; and b) the nucleic acid SEQ ID NO. 66274, or a homolog or fragment thereof, or a homolog thereof being depicted in Table I, application no. 12, column 8, in the same line as SEQ ID NO. 66274, preferably the coding region thereof, a homolog or a fragment thereof; which are operable linked.

[63822] In an embodiment thereof the expression cassette comprises in addition c) a nucleic acid molecule encoding a transit peptide, especially a plastidal transit petide in case in Table I, application no. 12, in column 6 in the same line as SEQ ID NO. 66274 is depicted, plastidic is mentioned, or a mitochondrial transit peptide in case in Table I, application no. 12, in column 6 in the same line as SEQ ID NO. 66274 is depicted, mitochondrial is mentioned; which is operable linked, too.

[63823] In another embodiment thereof the expression cassette does not comprise an additional transit peptide in case in Table I, application no. 12, in column 6 in the same line as SEQ ID NO. 66274 is depicted, non-targeted is mentioned.

[63824] In an embodiment the present invention relates to an expresssion cassette comprising a) a promoter, preferably a promoter selected from the group consisting of Big35S, PCUbi, Super and USP, in particular Big35S; and b) the nucleic acid SEQ ID NO. 129065, or a homolog or fragment thereof, or a homolog thereof being depicted in Table I, application no. 12, column 8, in the same line as SEQ ID NO. 129065, preferably the coding region thereof, a homolog or a fragment thereof; which are operable linked.

[63825] In an embodiment thereof the expression cassette comprises in addition c) a nucleic acid molecule encoding a transit peptide, especially a plastidal transit petide in case in Table I, application no. 12, in column 6 in the same line as SEQ ID NO. 129065 is depicted, plastidic is mentioned, or a mitochondrial transit peptide in case in Table I, application no. 12, in column 6 in the same line as SEQ ID NO. 129065 is depicted, mitochondrial is mentioned; which is operable linked, too.

[63826] In another embodiment thereof the expression cassette does not comprise an additional transit peptide in case in Table I, application no. 12, in column 6 in the same line as SEQ ID NO. 129065 is depicted, non-targeted is mentioned.

[63827] In an embodiment the present invention relates to an expresssion cassette comprising a) a promoter, preferably a promoter selected from the group consisting of Big35S, PCUbi, Super and USP, in particular p-Super; and b) the nucleic acid SEQ ID NO. 129123, or a homolog or fragment thereof, or a homolog thereof being depicted in Table I, application no. 12, column 8, in the same line as SEQ ID NO. 129123, preferably the coding region thereof, a homolog or a fragment thereof; which are operable linked.

[63828] In an embodiment thereof the expression cassette comprises in addition c) a nucleic acid molecule encoding a transit peptide, especially a plastidal transit petide in case in Table I, application no. 12, in column 6 in the same line as SEQ ID NO. 129123 is depicted, plastidic is mentioned, or a mitochondrial transit peptide in case in Table I, application no. 12, in column 6 in the same line as SEQ ID NO. 129123 is depicted, mitochondrial is mentioned; which is operable linked, too.

[63829] In another embodiment thereof the expression cassette does not comprise an additional transit peptide in case in Table I, application no. 12, in column 6 in the same line as SEQ ID NO. 129123 is depicted, non-targeted is mentioned.

[63830] In an embodiment the present invention relates to an expresssion cassette comprising a) a promoter, preferably a promoter selected from the group consisting of Big35S, PCUbi, Super and USP, in particular p-Super; and b) the nucleic acid SEQ ID NO. 91781, or a homolog or fragment thereof, or a homolog thereof being depicted in Table I, application no. 12, column 8, in the same line as SEQ ID NO. 91781, preferably the coding region thereof, a homolog or a fragment thereof; which are operable linked.

[63831] In an embodiment thereof the expression cassette comprises in addition c) a nucleic acid molecule encoding a transit peptide, especially a plastidal transit petide in case in Table I, application no. 12, in column 6 in the same line as SEQ ID NO. 91781 is depicted, plastidic is mentioned, or a mitochondrial transit peptide in case in Table I, application no. 12, in column 6 in the same line as SEQ ID NO. 91781 is depicted, mitochondrial is mentioned; which is operable linked, too.

[63832] In another embodiment thereof the expression cassette does not comprise an additional transit peptide in case in Table I, application no. 12, in column 6 in the same line as SEQ ID NO. 91781 is depicted, non-targeted is mentioned.

[63833] In an embodiment the present invention relates to an expresssion cassette comprising a) a promoter, preferably a promoter selected from the group consisting of Big35S, PCUbi, Super and USP, in particular p-Super; and b) the nucleic acid SEQ ID NO. 15175, or a homolog or fragment thereof, or a homolog thereof being depicted in Table I, application no. 12, column 8, in the same line as SEQ ID NO. 15175, preferably the coding region thereof, a homolog or a fragment thereof; which are operable linked.

[63834] In an embodiment thereof the expression cassette comprises in addition c) a nucleic acid molecule encoding a transit peptide, especially a plastidal transit petide in case in Table I, application no. 12, in column 6 in the same line as SEQ ID NO. 15175 is depicted, plastidic is mentioned, or a mitochondrial transit peptide in case in Table I, application no. 12, in column 6 in the same line as SEQ ID NO. 15175 is depicted, mitochondrial is mentioned; which is operable linked, too.

[63835] In another embodiment thereof the expression cassette does not comprise an additional transit peptide in case in Table I, application no. 12, in column 6 in the same line as SEQ ID NO. 15175 is depicted, non-targeted is mentioned.

[63836] In an embodiment the present invention relates to an expresssion cassette comprising a) a promoter, preferably a promoter selected from the group consisting of Big35S, PCUbi, Super and USP, in particular p-Super; and b) the nucleic acid SEQ ID NO. 129141, or a homolog or fragment thereof, or a homolog thereof being depicted in Table I, application no. 12, column 8, in the same line as SEQ ID NO. 129141, preferably the coding region thereof, a homolog or a fragment thereof; which are operable linked.

[63837] In an embodiment thereof the expression cassette comprises in addition c) a nucleic acid molecule encoding a transit peptide, especially a plastidal transit petide in case in Table I, application no. 12, in column 6 in the same line as SEQ ID NO. 129141 is depicted, plastidic is mentioned, or a mitochondrial transit peptide in case in Table I, application no. 12, in column 6 in the same line as SEQ ID NO. 129141 is depicted, mitochondrial is mentioned; which is operable linked, too.

[63838] In another embodiment thereof the expression cassette does not comprise an additional transit peptide in case in Table I, application no. 12, in column 6 in the same line as SEQ ID NO. 129141 is depicted, non-targeted is mentioned.

[63839] In an embodiment the present invention relates to an expresssion cassette comprising a) a promoter, preferably a promoter selected from the group consisting of Big35S, PCUbi, Super and USP, in particular p-USP; and b) the nucleic acid SEQ ID NO. 129470, or a homolog or fragment thereof, or a homolog thereof being depicted in Table I, application no. 12, column 8, in the same line as SEQ ID NO. 129470, preferably the coding region thereof, a homolog or a fragment thereof; which are operable linked.

[63840] In an embodiment thereof the expression cassette comprises in addition c) a nucleic acid molecule encoding a transit peptide, especially a plastidal transit petide in case in Table I, application no. 12, in column 6 in the same line as SEQ ID NO. 129470 is depicted, plastidic is mentioned, or a mitochondrial transit peptide in case in Table I, application no. 12, in column 6 in the same line as SEQ ID NO. 129470 is depicted, mitochondrial is mentioned; which is operable linked, too.

[63841] In another embodiment thereof the expression cassette does not comprise an additional transit peptide in case in Table I, application no. 12, in column 6 in the same line as SEQ ID NO. 129470 is depicted, non-targeted is mentioned.

[63842] In an embodiment the present invention relates to an expresssion cassette comprising a) a promoter, preferably a promoter selected from the group consisting of Big35S, PCUbi, Super and USP, in particular p-Super; and b) the nucleic acid SEQ ID NO. 129546, or a homolog or fragment thereof, or a homolog thereof being depicted in Table I, application no. 12, column 8, in the same line as SEQ ID NO. 129546, preferably the coding region thereof, a homolog or a fragment thereof; which are operable linked.

[63843] In an embodiment thereof the expression cassette comprises in addition c) a nucleic acid molecule encoding a transit peptide, especially a plastidal transit petide in case in Table I, application no. 12, in column 6 in the same line as SEQ ID NO. 129546 is depicted, plastidic is mentioned, or a mitochondrial transit peptide in case in Table I, application no. 12, in column 6 in the same line as SEQ ID NO. 129546 is depicted, mitochondrial is mentioned; which is operable linked, too.

[63844] In another embodiment thereof the expression cassette does not comprise an additional transit peptide in case in Table I, application no. 12, in column 6 in the same line as SEQ ID NO. 129546 is depicted, non-targeted is mentioned.

[63845] In an embodiment the present invention relates to an expresssion cassette comprising a) a promoter, preferably a promoter selected from the group consisting of Big35S, PCUbi, Super and USP, in particular Big35S; and b) the nucleic acid SEQ ID NO. 129574, or a homolog or fragment thereof, or a homolog thereof being depicted in Table I, application no. 12, column 8, in the same line as SEQ ID NO. 129574, preferably the coding region thereof, a homolog or a fragment thereof; which are operable linked.

[63846] In an embodiment thereof the expression cassette comprises in addition c) a nucleic acid molecule encoding a transit peptide, especially a plastidal transit petide in case in Table I, application no. 12, in column 6 in the same line as SEQ ID NO. 129574 is depicted, plastidic is mentioned, or a mitochondrial transit peptide in case in Table I, application no. 12, in column 6 in the same line as SEQ ID NO. 129574 is depicted, mitochondrial is mentioned; which is operable linked, too.

[63847] In another embodiment thereof the expression cassette does not comprise an additional transit peptide in case in Table I, application no. 12, in column 6 in the same line as SEQ ID NO. 129574 is depicted, non-targeted is mentioned.

[63848] In an embodiment the present invention relates to an expresssion cassette comprising a) a promoter, preferably a promoter selected from the group consisting of Big35S, PCUbi, Super and USP, in particular p-Super; and b) the nucleic acid SEQ ID NO. 118212, or a homolog or fragment thereof, or a homolog thereof being depicted in Table I, application no. 12, column 8, in the same line as SEQ ID NO. 118212, preferably the coding region thereof, a homolog or a fragment thereof; which are operable linked.

[63849] In an embodiment thereof the expression cassette comprises in addition c) a nucleic acid molecule encoding a transit peptide, especially a plastidal transit petide in case in Table I, application no. 12, in column 6 in the same line as SEQ ID NO. 118212 is depicted, plastidic is mentioned, or a mitochondrial transit peptide in case in Table I, application no. 12, in column 6 in the same line as SEQ ID NO. 118212 is depicted, mitochondrial is mentioned; which is operable linked, too.

[63850] In another embodiment thereof the expression cassette does not comprise an additional transit peptide in case in Table I, application no. 12, in column 6 in the same line as SEQ ID NO. 118212 is depicted, non-targeted is mentioned.

[63851] In an embodiment the present invention relates to an expresssion cassette comprising a) a promoter, preferably a promoter selected from the group consisting of Big35S, PCUbi, Super and USP, in particular p-PcUBI; and b) the nucleic acid SEQ ID NO. 130181, or a homolog or fragment thereof, or a homolog thereof being depicted in Table I, application no. 12, column 8, in the same line as SEQ ID NO. 130181, preferably the coding region thereof, a homolog or a fragment thereof; which are operable linked.

[63852] In an embodiment thereof the expression cassette comprises in addition c) a nucleic acid molecule encoding a transit peptide, especially a plastidal transit petide in case in Table I, application no. 12, in column 6 in the same line as SEQ ID NO. 130181 is depicted, plastidic is mentioned, or a mitochondrial transit peptide in case in Table I, application no. 12, in column 6 in the same line as SEQ ID NO. 130181 is depicted, mitochondrial is mentioned; which is operable linked, too.

[63853] In another embodiment thereof the expression cassette does not comprise an additional transit peptide in case in Table I, application no. 12, in column 6 in the same line as SEQ ID NO. 130181 is depicted, non-targeted is mentioned.

[63854] In an embodiment the present invention relates to an expresssion cassette comprising a) a promoter, preferably a promoter selected from the group consisting of Big35S, PCUbi, Super and USP, in particular Big35S; and b) the nucleic acid SEQ ID NO. 128161, or a homolog or fragment thereof, or a homolog thereof being depicted in Table I, application no. 12, column 8, in the same line as SEQ ID NO. 128161, preferably the coding region thereof, a homolog or a fragment thereof; which are operable linked.

[63855] In an embodiment thereof the expression cassette comprises in addition c) a nucleic acid molecule encoding a transit peptide, especially a plastidal transit petide in case in Table I, application no. 12, in column 6 in the same line as SEQ ID NO. 128161 is depicted, plastidic is mentioned, or a mitochondrial transit peptide in case in Table I, application no. 12, in column 6 in the same line as SEQ ID NO. 128161 is depicted, mitochondrial is mentioned; which is operable linked, too.

[63856] In another embodiment thereof the expression cassette does not comprise an additional transit peptide in case in Table I, application no. 12, in column 6 in the same line as SEQ ID NO. 128161 is depicted, non-targeted is mentioned.

[63857] In an embodiment the present invention relates to an expresssion cassette comprising a) a promoter, preferably a promoter selected from the group consisting of Big35S, PCUbi, Super and USP, in particular p-Super; and b) the nucleic acid SEQ ID NO. 125348, or a homolog or fragment thereof, or a homolog thereof being depicted in Table I, application no. 12, column 8, in the same line as SEQ ID NO. 125348, preferably the coding region thereof, a homolog or a fragment thereof; which are operable linked.

[63858] In an embodiment thereof the expression cassette comprises in addition c) a nucleic acid molecule encoding a transit peptide, especially a plastidal transit petide in case in Table I, application no. 12, in column 6 in the same line as SEQ ID NO. 125348 is depicted, plastidic is mentioned, or a mitochondrial transit peptide in case in Table I, application no. 12, in column 6 in the same line as SEQ ID NO. 125348 is depicted, mitochondrial is mentioned; which is operable linked, too.

[63859] In another embodiment thereof the expression cassette does not comprise an additional transit peptide in case in Table I, application no. 12, in column 6 in the same line as SEQ ID NO. 125348 is depicted, non-targeted is mentioned.

[63860] [0165.1.8.12] to [0170.1.8.12] for the disclosure of these paragraphs see [0165.1.8.8] to [0170.1.8.8] above.

[63861] The invention further provides a vector, comprising a nucleic acid molecule comprising 1) a nucleic acid molecule selected from the group consisting of:
[63862] (a) a nucleic acid molecule encoding a polypeptide shown in Table II, column 5 or 8, application no. 12, preferably shown in Table II A, application no. 12, in column 5, or in Table II A, application no. 12, column 8, or in Table II B, application no. 12, column 8, or a homolog or a fragment thereof;
[63863] (b) a nucleic acid molecule shown in Table I, application no. 12, column 5 or 8, preferably shown in Table I A, application no. 12, in column 5, or in Table I A, application no. 12, column 8, or in Table I B, application no. 12, column 8, preferably the coding region thereof, or a homolog or a fragment thereof;
[63864] (c) a nucleic acid molecule, which, as a result of the degeneracy of the genetic code, can be derived from a polypeptide sequence depicted in column 5 or 8 of Table II, application no. 12, preferably shown in Table II A, application no. 12, in column 5, or in Table II A, application no. 12, column 8, or in Table II B, application no. 12, column 8;
[63865] (d) a nucleic acid molecule having at least 30% identity, preferably at least 40%, 50%, 60%, 70%, 75%, 80%, 85%, 90%, 95%, 96%, 97%, 98%, 99%, 99,5%, with the nucleic acid molecule sequence of a polynucleotide comprising the nucleic acid molecule shown in column 5 or 8 of Table I, application no. 12, preferably shown in Table I A, application no. 12, in column 5, or in Table I A, application no. 12, column 8, or in Table I B, application no. 12, column 8, preferably the coding region thereof;
[63866] (e) a nucleic acid molecule encoding a polypeptide having at least 30% identity, preferably at least 40%, 50% 60%, 70%, 75%, 80%, 85%, 90%, 95%, 96%, 97%, 98%, 99%, 99.5%, identity with the amino acid sequence of the polypeptide encoded by the nucleic acid molecule of (a), (b), (c), or (d);
[63867] (f) a nucleic acid molecule which hybridizes with a nucleic acid molecule of (a), (b), (c), (d), or (e) under stringent hybridization conditions;
[63868] (g) a nucleic acid molecule encoding a polypeptide which can be isolated with the aid of monoclonal or polyclonal antibodies made against a polypeptide encoded by one of the nucleic acid molecules of (a), (b), (c), (d), (e) or (f);
[63869] (h) a nucleic acid molecule encoding a polypeptide comprising the consensus sequence or one or more polypeptide motifs as shown in column 8 of Table IV, application no. 12;
[63870] (i) a nucleic acid molecule encoding a polypeptide having the activity represented by a protein as depicted in column 5 of Table II, application no. 12;
[63871] (j) a nucleic acid molecule comprising a polynucleotide which is obtained by amplifying a cDNA library or a genomic library using the primers in Table III, application no. 12, column 8;
[63872] and
[63873] (k) nucleic acid molecule which is obtainable by screening a suitable nucleic acid library, especially a cDNA library and/or a genomic library, under stringent hybridization conditions with a probe comprising one of the sequences of the nucleic acid molecule of (a), (b), (c), (d), (e), (f), (g), (h), (i) or (j) or with a fragment thereof having at least 15 nt, preferably 20 nt, 30 nt, 50 nt, 100 nt, 200 nt, 500 nt, 1000 nt, 1500 nt, 2000 nt or 3000 nt of the nucleic acid molecule complementary to a nucleic acid sequence characterized in (a), (b), (c), (d), (e), (f), (g), (h), (i) or (j);
[63874] or a nucleic acid molecule comprising a sequence which is complementary thereto.
   (All the references to Tables I to IV are references to the corresponding lines of Tables I to IV.)

[63875] In a preferred embodiment of said vector said nucleic acid molecule according to 1 (a), (b), (c), (d), (e), (f), (g), (h), (i), (j) or (k) encodes a polypeptide which has the activity of the respective polypeptide represented by a protein comprising a polypeptide as depicted in the respective line in column 5 of Table II, application no. 12.

[63876] In another preferred embodiment of said vector said nucleic acid molecule according to 1 (a), (b), (c), (d), (e), (f), (g), (h), (i), (j) or (k) confers a generation or an increase of the respective fine chemical in a non-human organism or a part thereof as compared to a corresponding wild-type non-human organism or part thereof.

[63877] In another preferred embodiment of said vector said nucleic acid molecule according to 1 (a), (b), (c), (d), (e), (f), (g), (h), (i), (j) or (k) encodes a polypeptide which has the activity of the respective polypeptide represented by a protein as depicted in the respective line in column 5 of Table II, application no. 12, and confers a generation or an increase of the respective fine chemical in a non-human organism or a part thereof as compared to a corresponding wild-type non-human organism or part thereof.

[63878] In another embodiment thereof said vector comprises beneath said nucleic acid molecule according to 1 (a), (b), (c), (d), (e), (f), (g), (h), (i), (j) or (k), a promoter, preferably a promoter selected from the group consisting of Big35S, PCUbi, Super and USP, which are operable linked.

[63879] In a preferred embodiment thereof said vector comprises beneath said nucleic acid molecule according to 1 (a), (b), (c), (d), (e), (f), (g), (h), (i), (j) or (k), a promoter, preferably a promoter selected from the group consisting of Big35S, PCUbi, Super and USP, which are operable linked; and said nucleic acid molecule according to 1 (a), (b), (c), (d), (e), (f), (g), (h), (i), (j) or (k) encodes a polypeptide which has the activity of the respective polypeptide represented by a protein comprising a polypeptide as depicted in the respective line in column 5 of Table II, application no. 12.

[63880] In another preferred embodiment thereof said vector comprises beneath said nucleic acid molecule according to 1 (a), (b), (c), (d), (e), (f), (g), (h), (i), (j) or (k), a promoter, preferably a promoter selected from the group consisting of Big35S, PCUbi, Super and USP, which are operable linked; and said nucleic acid molecule according to 1 (a), (b), (c), (d), (e), (f), (g), (h), (i), (j) or (k) confers a generation or an increase of the respective fine chemical in a non-human organism or a part thereof as compared to a corresponding wild-type non-human organism or part thereof.

[63881] In another preferred embodiment thereof said vector comprises beneath said nucleic acid molecule according to 1 (a), (b), (c), (d), (e), (f), (g), (h), (i), (j) or (k), a promoter, preferably a promoter selected from the group consisting of Big35S, PCUbi, Super and USP, which are operable linked; and said nucleic acid molecule according to 1 (a), (b), (c), (d), (e), (f), (g), (h), (i), (j) or (k) encodes a polypeptide which has the activity of the respective polypeptide represented by a protein as depicted in the respective line in column 5 of Table II, application no. 12, and confers a generation or an increase of the respective fine chemical in a non-human organism or a part thereof as compared to a corresponding wild-type non-human organism or part thereof.

[63882] In another embodiment thereof said vector comprises beneath said nucleic acid molecule according to 1 (a), (b), (c), (d), (e), (f), (g), (h), (i), (j) or (k), a nucleic acid molecule encoding a transit peptide, preferably encoding a plastidal transit peptide, especially in case in column 6 of Table I, application no. 12, in the same line as of the respective nucleic acid molecule according to 1) “plastidic” is depicted, or encoding a mitochondrial transit peptide, especially in case in column 6 of Table I, application no. 12, in the same line as of the respective nucleic acid molecule according to 1) “mitochondrial” is depicted, which are operable linked.

[63883] In another embodiment thereof said vector does not comprise beneath said nucleic acid molecule according to 1 (a), (b), (c), (d), (e), (f), (g), (h), (i), (j) or (k), a nucleic acid molecule encoding a transit peptide in case in column 6 of Table I, application no. 12, in the same line as of the respective nucleic acid molecule according to 1) “non-targeted” is depicted.

[63884] In another embodiment thereof said vector comprises beneath said nucleic acid molecule according to 1 (a), (b), (c), (d), (e), (f), (g), (h), (i), (j) or (k), and a promoter, preferably a promoter selected from the group consisting of Big35S, PCUbi, Super and USP; a nucleic acid molecule encoding a transit peptide, preferably encoding a plastidal transit peptide, especially in case in column 6 of Table I, application no. 12, in the same line as of the respective nucleic acid molecule according to 1) “plastidic” is depicted, or encoding a mitochondrial transit peptide, especially in case in column 6 of Table I, application no. 12, in the same line as of the respective nucleic acid molecule according to 1) “mitochondrial” is depicted, which are operable linked.

[63885] In another embodiment thereof said vector does not comprise beneath said nucleic acid molecule according to 1 (a), (b), (c), (d), (e), (f), (g), (h), (i), (j) or (k), and a promoter, preferably a promoter selected from the group consisting of Big35S, PCUbi, Super and USP, which are operable linked; a nucleic acid molecule encoding a transit peptide, especially in case in column 6 of Table I, application no. 12, in the same line as of the respective nucleic acid molecule according to 1) “non-targeted” is depicted.

[63886] In another embodiment thereof said vector comprises beneath said nucleic acid molecule according to 1 (a), (b), (c), (d), (e), (f), (g), (h), (i), (j) or (k), and a promoter, preferably a promoter selected from the group consisting of Big35S, PCUbi, Super and USP; a nucleic acid molecule encoding a transit peptide, preferably encoding a plastidal transit peptide, especially in case in column 6 of Table I, application no. 12, in the same line as of the respective nucleic acid molecule according to 1) “plastidic” is depicted, or encoding a mitochondrial transit peptide, especially in case in column 6 of Table I, application no. 12, in the same line as of the respective nucleic acid molecule according to 1) “mitochondrial” is depicted, which are operable linked; and wherein said nucleic acid molecule according to 1 (a), (b), (c), (d), (e), (f), (g), (h), (i), (j) or (k) encodes a polypeptide which has the activity of the respective polypeptide represented by a protein comprising a polypeptide as depicted in column 5 of Table II, application no. 12 (in the same line).

[63887] In another embodiment thereof said vector does not comprise beneath said nucleic acid molecule according to 1 (a), (b), (c), (d), (e), (f), (g), (h), (i), (j) or (k), and a promoter, preferably a promoter selected from the group consisting of Big35S, PCUbi, Super and USP, which are operatively linked; a nucleic acid molecule encoding a transit peptide, especially in case in column 6 of Table I, application no. 12, in the same line as of the respective nucleic acid molecule according to 1) “non-targeted” is depicted; and wherein said nucleic acid molecule according to 1 (a), (b), (c), (d), (e), (f), (g), (h), (i), (j) or (k) encodes a polypeptide which has the activity of the respective polypeptide represented by a protein comprising a polypeptide as depicted in column 5 of Table II, application no. 12.

[63888] In another embodiment thereof said vector comprises beneath said nucleic acid molecule according to 1 (a), (b), (c), (d), (e), (f), (g), (h), (i), (j) or (k), and a promoter, preferably a promoter selected from the group consisting of Big35S, PCUbi, Super and USP; a nucleic acid molecule encoding a transit peptide, preferably encoding a plastidal transit peptide, especially in case in column 6 of Table I, application no. 12, in the same line as of the respective nucleic acid molecule according to 1) “plastidic” is depicted, or encoding a mitochondrial transit peptide, especially in case in column 6 of Table I, application no. 12, in the same line as of the respective nucleic acid molecule according to 1) “mitochondrial” is depicted, which are operable linked; and wherein said nucleic acid molecule according to 1 (a), (b), (c), (d), (e), (f), (g), (h), (i), (j) or (k) confers a generation or an increase of the respective fine chemical in a non-human organism or a part thereof as compared to a corresponding wild-type non-human organism or part thereof.

[63889] In another embodiment thereof said vector does not comprise beneath said nucleic acid molecule according to 1 (a), (b), (c), (d), (e), (f), (g), (h), (i), (j) or (k), and a promoter, preferably a promoter selected from the group consisting of Big35S, PCUbi, Super and USP, which are operatively linked; a nucleic acid molecule encoding a transit peptide, especially in case in column 6 of Table I, application no. 12, in the same line as of the respective nucleic acid molecule according to 1) “non-targeted” is depicted; and wherein said nucleic acid molecule according to 1 (a), (b), (c), (d), (e), (f), (g), (h), (i), (j) or (k) confers a generation or an increase of the respective fine chemical in a non-human organism or a part thereof as compared to a corresponding wild-type non-human organism or part thereof.

[63890] In another embodiment thereof said vector comprises beneath said nucleic acid molecule according to 1 (a), (b), (c), (d), (e), (f), (g), (h), (i), (j) or (k), and a promoter, preferably a promoter selected from the group consisting of Big35S, PCUbi, Super and USP; a nucleic acid molecule encoding a transit peptide, preferably encoding a plastidal transit peptide, especially in case in column 6 of Table I, application no. 12, in the same line as of the respective nucleic acid molecule according to 1) “plastidic” is depicted, or encoding a mitochondrial transit peptide, especially in case in column 6 of Table I, application no. 12, in the same line as of the respective nucleic acid molecule according to 1) “mitochondrial” is depicted, which are operable linked; and wherein said nucleic acid molecule according to 1 (a), (b), (c), (d), (e), (f), (g), (h), (i), (j) or (k) encodes a polypeptide which has the activity of the respective polypeptide represented by a protein as depicted in column 5 of Table II application no. 12 and confers a generation or an increase of the respective fine chemical in a non-human organism or a part thereof as compared to a corresponding wild-type non-human organism or part thereof.

[63891] In another embodiment thereof said vector does not comprise beneath said nucleic acid molecule according to 1 (a), (b), (c), (d), (e), (f), (g), (h), (i), (j) or (k), and a promoter, preferably a promoter selected from the group consisting of Big35S, PCUbi, Super and USP, which are operatively linked; a nucleic acid molecule encoding a transit peptide, especially in case in column 6 of Table I, application no. 12, in the same line as of the respective nucleic acid molecule according to 1) “non-targeted” is depicted; and wherein said nucleic acid molecule according to 1 (a), (b), (c), (d), (e), (f), (g), (h), (i), (j) or (k) encodes a polypeptide which has the activity of the respective polypeptide represented by a protein as depicted in column 5 of Table II application no. 12 (in the same line) and confers a generation or an increase of the respective fine chemical in a non-human organism or a part thereof as compared to a corresponding wild-type non-human organism or part thereof.

[63892] In a preferred embodiment of said vector said nucleic acid molecule according to 1 (a), (b), (c), (d), (e), (f), (g), (h), (i), (j) or (k), said promoter and optionally said nucleic acid molecule encoding a transit peptide are encompassed in an expression cassette. Accordingly in an embodiment the invention provides a vector comprising an expression cassette comprising said nucleic acid molecule according to 1 (a), (b), (c), (d), (e), (f), (g), (h), (i), (j) or (k), said promoter and optionally said a nucleic acid molecule encoding a transit peptide, operable linked. Said expression cassette may encompass a terminator, too.

[63893] The invention further provides a vector comprising a nucleic acid molecule comprising 1) a nucleic acid molecule selected from the group consisting of:
[63894] (a) a nucleic acid molecule encoding a polypeptide shown in Table II, column 5 or 8, application no. 12, preferably shown in Table II A, application no. 12, in column 5, or in Table II A, application no. 12, column 8, or in Table II B, application no. 12, column 8, or a homolog or a fragment thereof;
[63895] (b) a nucleic acid molecule shown in Table I, application no. 12, column 5 or 8, preferably shown in Table I A, application no. 12, in column 5, or in Table I A, application no. 12, column 8, or in Table I B, application no. 12, column 8, preferably the coding region thereof, or a homolog or a fragment thereof;
[63896] (c) a nucleic acid molecule, which, as a result of the degeneracy of the genetic code, can be derived from a polypeptide sequence depicted in column 5 or 8 of Table II, application no. 12, preferably shown in Table II A, application no. 12, in column 5, or in Table II A, application no. 12, column 8, or in Table II B, application no. 12, column 8;
[63897] (d) a nucleic acid molecule having at least 30% identity, preferably at least 40%, 50%, 60%, 70%, 75%, 80%, 85%, 90%, 95%, 96%, 97%, 98%, 99%, 99.5%, with the nucleic acid molecule sequence of a polynucleotide comprising the nucleic acid molecule shown in column 5 or 8 of Table I, application no. 12, preferably shown in Table I A, application no. 12, in column 5, or in Table I A, application no. 12, column 8, or in Table I B, application no. 12, column 8, preferably the coding region thereof;
[63898] (e) a nucleic acid molecule encoding a polypeptide having at least 30% identity, preferably at least 40%, 50% 60%, 70%, 75%, 80%, 85%, 90%, 95%, 96%, 97%, 98%, 99%, 99.5%, identity with the amino acid sequence of the polypeptide encoded by the nucleic acid molecule of (a), (b), (c), or (d);
[63899] (f) a nucleic acid molecule which hybridizes with a nucleic acid molecule of (a), (b), (c), (d), or (e) under stringent hybridization conditions;
[63900] (g) a nucleic acid molecule encoding a polypeptide which can be isolated with the aid of monoclonal or polyclonal antibodies made against a polypeptide encoded by one of the nucleic acid molecules of (a), (b), (c), (d), (e) or (f);
[63901] (h) a nucleic acid molecule encoding a polypeptide comprising the consensus sequence or one or more polypeptide motifs as shown in column 8 of Table IV, application no. 12;
[63902] (i) a nucleic acid molecule encoding a polypeptide having the activity represented by a protein as depicted in column 5 of Table II, application no. 12;
[63903] (j) a nucleic acid molecule comprising a polynucleotide which is obtained by amplifying a cDNA library or a genomic library using the primers in Table III, application no. 12, column 8;
[63904] and
[63905] (k) nucleic acid molecule which is obtainable by screening a suitable nucleic acid library, especially a cDNA library and/or a genomic library, under stringent hybridization conditions with a probe comprising one of the sequences of the nucleic acid molecule of (a), (b), (c), (d), (e), (f), (g), (h), (i) or (j) or with a fragment thereof having at least 15 nt, preferably 20 nt, 30 nt, 50 nt, 100 nt, 200 nt, 500 nt, 1000 nt, 1500 nt, 2000 nt or 3000 nt of the nucleic acid molecule complementary to a nucleic acid sequence characterized in (a), (b), (c), (d), (e), (f), (g), (h), (i) or (j);
[63906] or a nucleic acid molecule comprising a sequence which is complementary thereto;
   whereby, preferably, the nucleic acid molecule according to 1 (a), (b), (c), (d), (e), (f), (g), (h), (i), (j) or (k) distinguishes over the sequence depicted in Table I A and/or I B, application no. 12, column 5 or 8, or the coding region thereof, by one or more nucleotides (especially but not exceeding 5%, preferably 4%, 3%, 2%, 1%, 0.5%, 0.2% or 0.1%). In an embodiment, the nucleic acid molecule of the invention does not consist of the sequence shown in Table I A and/or I B, application no. 12, column 5 or 8, or the coding region thereof, respectively. In another embodiment, the nucleic acid molecule of the present invention, preferably the coding region thereof, is 30%, 40%, 50%, 60%, 70%, 80%, 90%, 95% identical but less than 100%, 99.999%, 99.99%, 99.9%, 99%, 98%, 97%, 96% or 95% identical to the sequence shown in Table I A and/or I B, application no. 12, column 5 or 8, or the coding region thereof, respectively. In a further embodiment the nucleic acid molecule does not encode the polypeptide sequence shown in Table II A and/or II B, application no. 12, column 5 or 8 but homologs thereof. Accordingly, in one embodiment, the nucleic acid molecule of the present invention encodes in one embodiment a polypeptide which differs at least in one or more amino acids (especially but not exceeding 5%, preferably 4%, 3%, 2%, 1%, 0.5%, 0.2% or 0.1%) from the polypeptide shown in Table II, application no. 12, column 5 or 8 and does not encode a protein of the sequence shown in Table II A and/or II B, application no. 12, column 5 or 8.

[63907] Accordingly, in one embodiment, the protein encoded by a sequence of a nucleic acid according to (a), (b), (c), (d), (e), (f), (g), (h), (i), (j) or (k) does not consist of the sequence shown in Table I A and/or I B, application no. 12, column 5 and 8, or the coding region thereof. In a further embodiment, the protein of the present invention is at least 30%,40%, 50%, 60%, 70%, 80%, 90%, 95% identical to protein sequence depicted in Table II A and/or II B, application no. 12, column 5 or 8 but less than 100%, preferably less than 99.999%, 99.99% or 99.9%, more preferably less than 99%, 985, 97%, 96% or 95% identical to the sequence shown in Table II A and/or II B, application no. 12, column 5 or 8.

(All the references to Tables I to IV are references to the corresponding lines of Tables I to IV.)

[63908] In a preferred embodiment of said vector said nucleic acid molecule according to 1 (a), (b), (c), (d), (e), (f), (g), (h), (i), (j) or (k) encodes a polypeptide which has the activity of the respective polypeptide represented by a protein comprising a polypeptide as depicted in the respective line in column 5 of Table II, application no. 12.

[63909] In another preferred embodiment of said vector said nucleic acid molecule according to 1 (a), (b), (c), (d), (e), (f), (g), (h), (i), (j) or (k) confers a generation or an increase of the respective fine chemical in a non-human organism or a part thereof as compared to a corresponding wild-type non-human organism or part thereof.

[63910] In another preferred embodiment of said vector said nucleic acid molecule according to 1 (a), (b), (c), (d), (e), (f), (g), (h), (i), (j) or (k) encodes a polypeptide which has the activity of the respective polypeptide represented by a protein as depicted in the respective line in column 5 of Table II, application no. 12, and confers a generation or an increase of the respective fine chemical in a non-human organism or a part thereof as compared to a corresponding wild-type non-human organism or part thereof.

[63911] In another embodiment thereof said vector comprises beneath said nucleic acid molecule according to 1 (a), (b), (c), (d), (e), (f), (g), (h), (i), (j) or (k), a promoter, preferably a promoter selected from the group consisting of Big35S, PCUbi, Super and USP, which are operable linked.

[63912] In a preferred embodiment thereof said vector comprises beneath said nucleic acid molecule according to 1 (a), (b), (c), (d), (e), (f), (g), (h), (i), (j) or (k), a promoter, preferably a promoter selected from the group consisting of Big35S, PCUbi, Super and USP, which are operable linked; and said nucleic acid molecule according to 1 (a), (b), (c), (d), (e), (f), (g), (h), (i), (j) or (k) encodes a polypeptide which has the activity of the respective polypeptide represented by a protein comprising a polypeptide as depicted in the respective line in column 5 of Table II, application no. 12.

[63913] In another preferred embodiment thereof said vector comprises beneath said nucleic acid molecule according to 1 (a), (b), (c), (d), (e), (f), (g), (h), (i), (j) or (k), a promoter, preferably a promoter selected from the group consisting of Big35S, PCUbi, Super and USP, which are operable linked; and said nucleic acid molecule according to 1 (a), (b), (c), (d), (e), (f), (g), (h), (i), (j) or (k) confers a generation or an increase of the respective fine chemical in a non-human organism or a part thereof as compared to a corresponding wild-type non-human organism or part thereof.

[63914] In another preferred embodiment thereof said vector comprises beneath said nucleic acid molecule according to 1 (a), (b), (c), (d), (e), (f), (g), (h), (i), (j) or (k), a promoter, preferably a promoter selected from the group consisting of Big35S, PCUbi, Super and USP, which are operable linked; and said nucleic acid molecule according to 1 (a), (b), (c), (d), (e), (f), (g), (h), (i), (j) or (k) encodes a polypeptide which has the activity of the respective polypeptide represented by a protein as depicted in the respective line in column 5 of Table II, application no. 12, and confers a generation or an increase of the respective fine chemical in a non-human organism or a part thereof as compared to a corresponding wild-type non-human organism or part thereof.

[63915] In another embodiment thereof said vector comprises beneath said nucleic acid molecule according to 1 (a), (b), (c), (d), (e), (f), (g), (h), (i), (j) or (k), a nucleic acid molecule encoding a transit peptide, preferably encoding a plastidal transit peptide, especially in case in column 6 of Table I, application no. 12, in the same line as of the respective nucleic acid molecule according to 1) “plastidic” is depicted, or encoding a mitochondrial transit peptide, especially in case in column 6 of Table I, application no. 12, in the same line as of the respective nucleic acid molecule according to 1) “mitochondrial” is depicted, which are operable linked.

[63916] In another embodiment thereof said vector does not comprise beneath said nucleic acid molecule according to 1 (a), (b), (c), (d), (e), (f), (g), (h), (i), (j) or (k), a nucleic acid molecule encoding a transit peptide in case in column 6 of Table I, application no. 12, in the same line as of the respective nucleic acid molecule according to 1) “non-targeted” is depicted.

[63917] In another embodiment thereof said vector comprises beneath said nucleic acid molecule according to 1 (a), (b), (c), (d), (e), (f), (g), (h), (i), (j) or (k), and a promoter, preferably a promoter selected from the group consisting of Big35S, PCUbi, Super and USP; a nucleic acid molecule encoding a transit peptide, preferably encoding a plastidal transit peptide, especially in case in column 6 of Table I, application no. 12, in the same line as of the respective nucleic acid molecule according to 1) “plastidic” is depicted, or encoding a mitochondrial transit peptide, especially in case in column 6 of Table I, application no. 12, in the same line as of the respective nucleic acid molecule according to 1) “mitochondrial” is depicted, which are operable linked.

[63918] In another embodiment thereof said vector does not comprise beneath said nucleic acid molecule according to 1 (a), (b), (c), (d), (e), (f), (g), (h), (i), (j) or (k), and a promoter, preferably a promoter selected from the group consisting of Big35S, PCUbi, Super and USP, which are operatively linked; a nucleic acid molecule encoding a transit peptide, especially in case in column 6 of Table I, application no. 12, in the same line as of the respective nucleic acid molecule according to 1) “non-targeted” is depicted.

[63919] In another embodiment thereof said vector comprises beneath said nucleic acid molecule according to 1 (a), (b), (c), (d), (e), (f), (g), (h), (i), (j) or (k), and a promoter, preferably a promoter selected from the group consisting of Big35S, PCUbi, Super and USP; a nucleic acid molecule encoding a transit peptide, preferably encoding a plastidal transit peptide, especially in case in column 6 of Table I, application no. 12, in the same line as of the respective nucleic acid molecule according to 1) “plastidic” is depicted, or encoding a mitochondrial transit peptide, especially in case in column 6 of Table I, application no. 12, in the same line as of the respective nucleic acid molecule according to 1) “mitochondrial” is depicted, which are operable linked; and wherein said nucleic acid molecule according to 1 (a), (b), (c), (d), (e), (f), (g), (h), (i), (j) or (k) encodes a polypeptide which has the activity of the respective polypeptide represented by a protein comprising a polypeptide as depicted in column 5 of Table II, application no. 12.

[63920] In another embodiment thereof said vector does not comprise beneath said nucleic acid molecule according to 1 (a), (b), (c), (d), (e), (f), (g), (h), (i), (j) or (k), and a promoter, preferably a promoter selected from the group consisting of Big35S, PCUbi, Super and USP, which are operatively linked; a nucleic acid molecule encoding a transit peptide, especially in case in column 6 of Table I, application no. 12, in the same line as of the respective nucleic acid molecule according to 1) “non-targeted” is depicted; and wherein said nucleic acid molecule according to 1 (a), (b), (c), (d), (e), (f), (g), (h), (i), (j) or (k) encodes a polypeptide which has the activity of the respective polypeptide represented by a protein comprising a polypeptide as depicted in column 5 of Table II, application no. 12.

[63921] In another embodiment thereof said vector comprises beneath said nucleic acid molecule according to 1 (a), (b), (c), (d), (e), (f), (g), (h), (i), (j) or (k), and a promoter, preferably a promoter selected from the group consisting of Big35S, PCUbi, Super and USP; a nucleic acid molecule encoding a transit peptide, preferably encoding a plastidal transit peptide, especially in case in column 6 of Table I, application no. 12, in the same line as of the respective nucleic acid molecule according to 1) “plastidic” is depicted, or encoding a mitochondrial transit peptide, especially in case in column 6 of Table I, application no. 12, in the same line as of the respective nucleic acid molecule according to 1) “mitochondrial” is depicted, which are operable linked; and wherein said nucleic acid molecule according to 1 (a), (b), (c), (d), (e), (f), (g), (h), (i), (j) or (k) confers a generation or an increase of the respective fine chemical in a non-human organism or a part thereof as compared to a corresponding wild-type non-human organism or part thereof.

[63922] In another embodiment thereof said vector does not comprise beneath said nucleic acid molecule according to 1 (a), (b), (c), (d), (e), (f), (g), (h), (i), (j) or (k), and a promoter, preferably a promoter selected from the group consisting of Big35S, PCUbi, Super and USP, which are operatively linked; a nucleic acid molecule encoding a transit peptide, especially in case in column 6 of Table I, application no. 12, in the same line as of the respective nucleic acid molecule according to 1) “non-targeted” is depicted; and wherein said nucleic acid molecule according to 1 (a), (b), (c), (d), (e), (f), (g), (h), (i), (j) or (k) confers a generation or an increase of the respective fine chemical in a non-human organism or a part thereof as compared to a corresponding wild-type non-human organism or part thereof.

[63923] In another embodiment thereof said vector comprises beneath said nucleic acid molecule according to 1 (a), (b), (c), (d), (e), (f), (g), (h), (i), (j) or (k), and a promoter, preferably a promoter selected from the group consisting of Big35S, PCUbi, Super and USP; a nucleic acid molecule encoding a transit peptide, preferably encoding a plastidal transit peptide, especially in case in column 6 of Table I, application no. 12, in the same line as of the respective nucleic acid molecule according to 1) “plastidic” is depicted, or encoding a mitochondrial transit peptide, especially in case in column 6 of Table I, application no. 12, in the same line as of the respective nucleic acid molecule according to 1) “mitochondrial” is depicted, which are operable linked; and wherein said nucleic acid molecule according to 1 (a), (b), (c), (d), (e), (f), (g), (h), (i), (j) or (k) encodes a polypeptide which has the activity of the respective polypeptide represented by a protein as depicted in column 5 of Table II application no. 12 and confers a generation or an increase of the respective fine chemical in a non-human organism or a part thereof as compared to a corresponding wild-type non-human organism or part thereof.

[63924] In another embodiment thereof said vector does not comprise beneath said nucleic acid molecule according to 1 (a), (b), (c), (d), (e), (f), (g), (h), (i), (j) or (k), and a promoter, preferably a promoter selected from the group consisting of Big35S, PCUbi, Super and USP, which are operatively linked; a nucleic acid molecule encoding a transit peptide, especially in case in column 6 of Table I, application no. 12, in the same line as of the respective nucleic acid molecule according to 1) “non-targeted” is depicted; and wherein said nucleic acid molecule according to 1 (a), (b), (c), (d), (e), (f), (g), (h), (i), (j) or (k) encodes a polypeptide which has the activity of the respective polypeptide represented by a protein as depicted in column 5 of Table II application no. 12 and confers a generation or an increase of the respective fine chemical in a non-human organism or a part thereof as compared to a corresponding wild-type non-human organism or part thereof.

[63925] [0181.1.8.12] to [0209.1.8.12] for the disclosure of these paragraphs see [0181.1.8.8] to [0209.1.8.8] above.

[63926] The genes of the invention, coding for an activity selected from the group consisting of 2,3-dihydroxyphenylpropionate 1,2-dioxygenase, 2-C-methyl-D-erythritol 4-phosphate cytidylyltransferase, 30S ribosomal protein S3, 3-ketoacyl-CoA thiolase, 3-oxoacyl-[acyl-carrier-protein] reductase, 3-oxoacyl-[acyl-carrier-protein] synthase, 40S ribosomal protein S17, ABC transporter component, ABC transporter permease protein, acetyl-coenzyme A synthetase, acid shock protein, acyl-CoA synthase, acyl-desaturase, adenosine kinase, aldolase, alkaline phosphatase isozyme conversion protein, amino acid ABC transporter permease protein, aminotransferase, ankyrin repeat protein, At2g33510-protein, ATPase epsilon subunit, ATP-binding component of a transport system, b0050-protein, b0249-protein, b0371-protein, b0518-protein, b0801-protein, b1046-protein, b1346-protein, b1470-protein, b1522-protein, b1670-protein, b1703-protein, b1837-protein, b2032-protein, b2099-protein, b2107-protein, b2126-protein, b2139-protein, b2360-protein, b2474-protein, b2513-protein, b2654-protein, b3442-protein, b3644-protein, b3812-protein, b3944-protein, b4023-protein, b4205-protein, beta-hydroxylase, betaine aldehyde dehydrogenase, bifunctional protein (phosphoribosyltransferase and regulatory protein), bifunctional purine biosynthesis protein, binding-protein-dependent transport systerns inner membrane component, biotin synthase, calcium-dependent protein kinase, carbon dioxide concentrating mechanism protein, cardiolipin synthase, CDP-diacylglycerol-serine O-phosphatidyltransferase, cell division control protein, cell wall protein, chlorophyllase, citrate synthase, coproporphyrinogen III oxidase, cyclin, cystathionine gamma-synthase, cysteine syn-thase A, dihydrolipoamide dehydrogenase, DNA mismatch repair protein, DnaJ-like chaperone, electron transport complex protein, Elongation factor Tu, ethanolamine utilization protein, F-box protein, ferredoxin, fructose 1,6-bisphosphatase, fumarylacetoacetate hydrolase, glutamate 5-kinase, glutamate-ammonia-ligase, glutaredoxin, glycerol-3-phosphate dehydrogenase, glycine cleavage system H protein, GM02LC38418-protein, heat shock protein, heat shock transcription factor, HesB/YadR/YfhF family protein, homocitrate synthase, hydrolase, isocitrate dehydrogenase, lipoprotein precursor, malate dehydrogenase, malonyl CoA-acyl carrier protein transacylase, metal-dependent hydrolase, molecular chaperone, molecular chaperone portein, monothiol glutaredoxin, multiple antibiotic resistance protein, murein transglycosylase, N-acetyl-gamma-glutamyl-phosphate reductase, NADP-dependent malic enzyme, outer-membrane lipoprotein precursor, oxidoreductase, permease protein of ABC transporter, phage-related repressor protein, phosphatase, phosphate import ATP-binding protein, phosphatidylserine synthase, phospho-2-dehydro-3-deoxyheptonate aldolase, phosphoadenosine phosphosulfate reductase, phosphotransferase, phosphotransferase system component, polygalacturonase, protein kinase, protein phosphatase, purine nucleoside phosphorylase, pyridoxamine kinase, recombinase A, sec-independent protein translocase, Sec-independent protein translocase subunit, sensor histidine kinase, sensor kinase, sll0281-protein, sll0406-protein, small nuclear ribonucleoprotein, sodium/proton antiporter, squalene monooxygenase, sugar transport system permease protein, threonine dehydratase, transcription factor, transcriptional regulator, transcriptional regulator protein, transport protein, tryptophan synthase alpha chain, TTC1386-protein, vacuolar processing enzyme, ycl027w-protein, ycl049c-protein, ydr273w-protein, ydr339c-protein, YFL019C-protein, ygl237c-protein, YGR104C-protein, yhr033w-protein, YJL127W-A-protein, ylr326w-protein, yml083c-protein, yml084w-protein, and ynl321w-protein are also called “FCRP genes”.

[63927] [0211.1.8.12] to [0225.1.8.12] for the disclosure of these paragraphs see [0211.1.8.8] to [0225.1.8.8] above.

[63928] In addition to the sequence mentioned in Table I, application no. 12, column 5 or 8, preferably the coding region thereof, or its homologs or fragments, it may be advantageous additionally to express and/or mutate further genes in the non-human organisms. Especially advantageously, additionally at least one further gene of the biosynthetic pathway of the fine chemical is expressed in the non-human organisms such as plants or microorganisms. It is also possible that the regulation of the natural genes has been modified advantageously so that the gene and/or its gene product is no longer subject to the regulatory mechanisms which exist in the non-human organisms. This leads to an increased synthesis of the respective fatty acid since, for example, feedback regulations no longer exist to the same extent or not at all. In addition it might be advantageously to combine the nucleic acids sequences of the invention containing the sequences shown in the respective line in Table I, application no. 12, column 5 or 8, preferably the coding region thereof, or homologs or fragments thereof, with genes which generally support or enhance the growth or yield of the target non-human organisms, for example genes which lead to faster growth rate of non human organism like microorganisms or plants or genes which produce stress-, pathogen-, or herbicide-resistant plants.

[63929] [0227.1.8.12] to [0239.1.8.12] for the disclosure of these paragraphs see [0227.1.8.8] to [0239.1.8.8] above.

[63930] In an embodiment of the present invention the nucleic acid construct of the present invention comprises a nucleic acid molecule as depicted in the respective line in Table I, application no. 12, column 5 or 8, preferably the coding region thereof, a fragment or a homolog thereof, and a plant promoter, such as the Big 35S promoter, the DC3 promoter, the PC Ubi promoter, the LegB4-promoter, the Super promoter, the USP promoter or the like. In another embodiment the nucleic acid construct of the present invention comprises a nucleic acid molecule as depicted in the respective line in Table I, application no. 12, column 5 or 8, preferably the coding region thereof, a fragment or a homolog thereof, and a plant promoter such as, for example, the USP, the LegB4-, the DC3 promoter or the ubiquitin promoter from parsley or other herein mentioned promoters. In a further embodiment the nucleic acid construct of the present invention comprises a nucleic acid molecule as depicted in the respective line in Table I, application no. 12, column 5 or 8, preferably the coding region thereof, a fragment or a homolog thereof, and a plant promoter, such as the Big 35S promoter, the PC Ubi promoter, the Super promoter, the USP promoter or the like. In addition different terminators may advantageously be used in these nucleic acid constructs; examples for transcriptional termination are polyadenylation signals.

[63931] [0241.1.8.12] to [0245.1.8.12] for the disclosure of these paragraphs see [0241.1.8.8] to [0245.1.8.8] above.

[63932] Other preferred sequences for use in operable linkage in gene expression constructs are targeting sequences, which are required for targeting the gene product into specific cell compartments (for a review, see Kermode, Crit. Rev. Plant Sci. 15 (4), 285 (1996) and references cited therein), for example into the vacuole, the nucleus, all types of plastids, such as amyloplasts, chloroplasts, chromoplasts, the extracellular space, the mitochondria, the endoplasmic reticulum, elaioplasts, peroxisomes, glycosomes, and other compartments of cells or extracellular; preferred are sequences, which are involved in targeting to plastids as mentioned above. Sequences, which must be mentioned in this context are, in particular, the signal-peptide- or transit-peptide-encoding sequences which are known per se. For example, plastid-transit-peptide-encoding sequences enable the targeting of the expression product into the plastids of a plant cell. Targeting sequences are also known for eukaryotic and to a lower extent for prokaryotic organisms and can advantageously be operable linked with the nucleic acid molecule of the present invention as shown in Table I, application no. 12, columns 5 and 8, preferably the coding region thereof, or homologs or fragments thereof, and described herein to achieve an expression in one of said compartments or extracellular.

[63933] [0247.1.8.12] to [0266.1.8.12] for the disclosure of these paragraphs see [0247.1.8.8] to see [0266.1.8.8] above

[63934] An embodiment of the invention relates to a vector where the nucleic acid molecule according to the invention is linked operably to regulatory sequences which permit the expression in a prokaryotic or eukaryotic host. A further embodiment of the invention relates to a vector in which a nucleic acid sequence encoding one of the polypeptides shown in the respective line in Table II, application no. 12, columns 5 or 8, or homologs or fragments thereof, is functionally linked to a targeting sequence such as a plastidial or mitochondrial targeting sequence. A further embodiment of the invention relates to a vector in which a nucleic acid sequence encoding one of the polypeptides shown in the respective line in Table II, application no. 12, columns 5 or 8, or homologs or fragments thereof, is functionally linked to (a) regulatory sequence which permit the expression in an organelle, such as plastids or mitochondria, preferably plastids.

[63935] A further embodiment of the invention relates to a vector which comprises a nucleic acid sequence encoding one of the polypeptides shown in the respective line in Table II, application no. 12, columns 5 or 8, or homologs or fragments thereof, but no additional targeting sequence.

[63936] [0268.1.8.12] to [0273.1.8.12] for the disclosure of these paragraphs see [0268.1.8.8] to [0273.1.8.8] above.

[63937] A further object of the invention relates to the use of a nucleic acid construct, e.g. an expression cassette, comprising one or more nucleic acid molecules encoding one or more polypeptides as depicted in the respective line(s) in Table II, application no. 12, columns 5 or 8, or homologs or fragments thereof, or comprising one or more nucleic acid molecules as depicted in the respective line(s) in Table I, application no. 12, columns 5 or 8, preferably the coding region thereof, or homologs or fragments thereof, or comprising a nucleic acid molecule hybridizing therewith for the transformation of a microorganism or a plant cell, plant tissues or a part of a plant.

[63938] In doing so, depending on the choice of promoter, the nucleic acid molecules shown in the respective line in Table I, application no. 12, column 5 or 8, preferably the coding region thereof, or homologs or fragments thereof, or the nucleic acid molecules encoding a polypeptide as depicted in the respective line in Table II, application no. 12, column 5 or 8, or homologs or fragments thereof, can be expressed in the whole plant or specifically e.g. in the leaves, in the seeds, the nodules, in roots, in the stem or other parts of the plant. Those transgenic plants overproducing sequences, e.g. as depicted in the respective line in Table I, application no. 12, column 5 or 8, preferably the coding region thereof, or homologs or fragments thereof, the plant cell, plant tissues, plants, the reproductive material thereof, or parts thereof are a further object of the present invention.

[63939] Within the framework of the present invention, the production of the 2-hydroxybehenic acid, 2-hydroxypalmitic acid, 2-hydroxytetracosenoic acid (preferably 2-hydroxynervonic acid), behenic acid, cerebronic acid, eicosanoic acid, heptadecanoic acid, hexadecadienoic acid, hexadecatrienoic acid, lauric acid, myristic acid, nervonic acid, or oleic acid is due to the generation or over-expression of one or more polypeptides as depicted in the respective line(s) in Table II, application no. 12, column 5 or 8, or homologs or fragments thereof, or encoded by the corresponding nucleic acid molecules as depicted in the respective line(s) in Table I, application no. 12, column 5 or 8, preferably the coding region thereof, or homologs or fragments thereof, in the non-human organism according to the invention, advantageously in the transgenic microorganism or plant according to the invention, at least for the duration of at least one plant generation.

[63940] A constitutive expression of the polypeptide as depicted in the respective line in Table II, application no. 12, column 5 or 8, or homologs or fragments thereof, or encoded by the respective nucleic acid molecule as depicted in the respective line in Table I, application no. 12, column 5 or 8, preferably the coding region thereof, or homologs or fragments thereof, may be advantageous. On the other hand, an inducible expression may also appear desirable.

[63941] Expression of the polypeptide sequences of the invention can be either directed to the cytosol or to the organelles, such as plastids or mitochondria, preferably the plastids of the host cells, preferably the plant cells, or non-targeted.

[63942] for the disclosure of this paragraph see [0278.1.8.8] above.

[63943] In a further embodiment the invention relates to a transgenic non-human organisms such as transgenic microorganism or transgenic plant comprising a nucleic acid molecule comprising
[63944] [1) a nucleic acid molecule selected from the group consisting of
   [63945] (a) a nucleic acid molecule encoding a polypeptide shown in Table II, application no. 12, column 5 or 8, preferably shown in Table II A, application no. 12, column 5, or in Table II A, application no. 12, column 8, or in Table II B, application no. 12, column 8, or a homolog or a fragment thereof;
   [63946] (b) a nucleic acid molecule shown in Table I, application no. 12, column 5 or 8, preferably shown in Table I A, application no. 12, column 5, or in Table I A, application no. 12, column 8, or in Table I B, application no. 12, column 8, preferably the coding region thereof, or a homolog or a fragment thereof;
   [63947] (c) a nucleic acid molecule, which, as a result of the degeneracy of the genetic code, can be derived from a polypeptide sequence depicted in column 5 or 8 of Table II, application no. 12, preferably shown in Table II A, application no. 12, column 5, or in Table II A, application no. 12, column 8, or in Table II B, application no. 12, column 8;
   [63948] (d) a nucleic acid molecule having at least 30% identity, preferably at least 40%, 50%, 60%, 70%, 75%, 80%, 85%, 90%, 95%, 96%, 97%, 98%, 99%, 99.5%, with the nucleic acid molecule sequence of a polynucleotide comprising the nucleic acid molecule shown in column 5 or 8 of Table I, application no. 12, preferably shown in Table I A, application no. 12, column 5, or in Table I A, application no. 12, column 8, or in Table I B, application no. 12, column 8, preferably the coding region thereof;
   [63949] (e) a nucleic acid molecule encoding a polypeptide having at least 30% identity, preferably at least 40%, 50% 60%, 70%, 75%, 80%, 85%, 90%, 95%, 96%, 97%, 98%, 99%, 99.5%, identity with the amino acid sequence of the polypeptide encoded by the nucleic acid molecule of (a), (b), (c) or (d);
   [63950] (f) a nucleic acid molecule which hybridizes with a nucleic acid molecule of (a), (b), (c), (d) or (e) under stringent hybridization conditions;
   [63951] (g) a nucleic acid molecule encoding a polypeptide which can be isolated with the aid of monoclonal or polyclonal antibodies made against a polypeptide encoded by one of the nucleic acid molecules of (a), (b), (c), (d), (e) or (f);
   [63952] (h) a nucleic acid molecule encoding a polypeptide comprising the consensus sequence or one or more polypeptide motifs as shown in column 8 of Table IV, application no. 12;
   [63953] (i) a nucleic acid molecule encoding a polypeptide having the activity represented by a respective protein as depicted in column 5 of Table II, application no. 12;
   [63954] (j) a nucleic acid molecule comprising a polynucleotide which is obtained by amplifying a cDNA library or a genomic library using the primers in Table III, application no. 12, column 8;
   [63955] and
   [63956] (k) nucleic acid molecule which is obtainable by screening a suitable nucleic acid library, especially a cDNA library and/or a genomic library, under stringent hybridization conditions with a probe comprising one of the sequences of the nucleic acid molecule of (a), (b), (c), (d), (e), (f), (g), (h), (i) or (j) or with a fragment of at least 15 nt, preferably 20 nt, 30 nt, 50 nt, 100 nt, 200 nt,500 nt, 1000 nt, 1500 nt, 2000 nt or 3000 nt of the nucleic acid molecule characterized in (a), (b), (c), (d), (e), (f), (g), (h), (i) or (j);
   [63957] or a nucleic acid molecule comprising a sequence which is complementary thereto; and, if desired
[63958] 2) nucleic acid molecule encoding a transit peptide, preferably encoding a plastidal transit peptide or a mitochondrial transit peptide;
   which are operable linked;]
   or comprising an expression cassette comprising
[63959] [0) a promoter, preferably a promoter selected from the group consisting of Big35S, PCUbi, Super and USP; and
[63960] 1) a nucleic acid molecule selected from the group consisting of
   [63961] (a) a nucleic acid molecule encoding a polypeptide shown in Table II, application no. 12, column 5 or 8, preferably shown in Table II A, application no. 12, column 5, or in Table II A, application no. 12, column 8, or in Table II B, application no. 12, column 8, or a homolog or a fragment thereof;
   [63962] (b) a nucleic acid molecule shown in Table I, application no. 12, column 5 or 8, preferably shown in Table I A, application no. 12, column 5, or in Table I A, application no. 12, column 8, or in Table I B, application no. 12, column 8, preferably the coding region thereof, or a homolog or a fragment thereof;
   [63963] (c) a nucleic acid molecule, which, as a result of the degeneracy of the genetic code, can be derived from a polypeptide sequence depicted in column 5 or 8 of Table II, application no. 12, preferably shown in Table II A, application no. 12, column 5, or in Table II A, application no. 12, column 8, or in Table II B, application no. 12, column 8;
   [63964] (d) a nucleic acid molecule having at least 30% identity, preferably at least 40%, 50%, 60%, 70%, 75%, 80%, 85%, 90%, 95%, 96%, 97%, 98%, 99%, 99.5%, with the nucleic acid molecule sequence of a polynucleotide comprising the nucleic acid molecule shown in column 5 or 8 of Table I, application no. 12, preferably shown in Table I A, application no. 12, column 5, or in Table I A, application no. 12, column 8, or in Table I B, application no. 12, column 8, preferably the coding region thereof;
   [63965] (e) a nucleic acid molecule encoding a polypeptide having at least 30% identity, preferably at least 40%, 50% 60%, 70%, 75%, 80%, 85%, 90%, 95%, 96%, 97%, 98%, 99%, 99.5%, identity with the amino acid sequence of the polypeptide encoded by the nucleic acid molecule of (a), (b), (c) or (d);
   [63966] (f) a nucleic acid molecule which hybridizes with a nucleic acid molecule of (a), (b), (c), (d) or (e) under stringent hybridization conditions;
   [63967] (g) a nucleic acid molecule encoding a polypeptide which can be isolated with the aid of monoclonal or polyclonal antibodies made against a polypeptide encoded by one of the nucleic acid molecules of (a), (b), (c), (d), (e) or (f);
   [63968] (h) a nucleic acid molecule encoding a polypeptide comprising the consensus sequence or one or more polypeptide motifs as shown in column 8 of Table IV, application no. 12;
   [63969] (i) a nucleic acid molecule encoding a polypeptide having the activity represented by a respective protein as depicted in column 5 of Table II, application no. 12;
   [63970] (j) a nucleic acid molecule comprising a polynucleotide which is obtained by amplifying a cDNA library or a genomic library using the primers in Table III, application no. 12, column 8;
   [63971] and
   [63972] (k) nucleic acid molecule which is obtainable by screening a suitable nucleic acid library, especially a cDNA library and/or a genomic library, under stringent hybridization conditions with a probe comprising one of the sequences of the nucleic acid molecule of (a), (b), (c), (d), (e), (f), (g), (h), (i) or (j) or with a fragment of at least 15 nt, preferably 20 nt, 30 nt, 50 nt, 100 nt, 200 nt,500 nt, 1000 nt, 1500 nt, 2000 nt or 3000 nt of the nucleic acid molecule characterized in (a), (b), (c), (d), (e), (f), (g), (h), (i) or (j);
   [63973] or a nucleic acid molecule comprising a sequence which is complementary thereto;
      and, if desired
[63974] 2) nucleic acid molecule encoding a transit peptide, preferably encoding a plastidal transit peptide or a mitochondrial transit peptide; which are operable linked;]
   or comprising or being transformed by a vector comprising
[63975] [1) a nucleic acid molecule selected from the group consisting of
   [63976] (a) a nucleic acid molecule encoding a polypeptide shown in Table II, application no. 12, column 5 or 8, preferably shown in Table II A, application no. 12, column 5, or in Table II A, application no. 12, column 8, or in Table II B, application no. 12, column 8, or a homolog or a fragment thereof;
   [63977] (b) a nucleic acid molecule shown in Table I, application no. 12, column 5 or 8, preferably shown in Table I A, application no. 12, column 5, or in Table I A, application no. 12, column 8, or in Table I B, application no. 12, column 8, preferably the coding region thereof, or a homolog or a fragment thereof;
   [63978] (c) a nucleic acid molecule, which, as a result of the degeneracy of the genetic code, can be derived from a polypeptide sequence depicted in column 5 or 8 of Table II, application no. 12, preferably shown in Table II A, application no. 12, column 5, or in Table II A, application no. 12, column 8, or in Table II B, application no. 12, column 8;
   [63979] (d) a nucleic acid molecule having at least 30% identity, preferably at least 40%, 50%, 60%, 70%, 75%, 80%, 85%, 90%, 95%, 96%, 97%, 98%, 99%, 99.5%, with the nucleic acid molecule sequence of a polynucleotide comprising the nucleic acid molecule shown in column 5 or 8 of Table I, application no. 12, preferably shown in Table I A, application no. 12, column 5, or in Table I A, application no. 12, column 8, or in Table I B, application no. 12, column 8, preferably the coding region thereof;
   [63980] (e) a nucleic acid molecule encoding a polypeptide having at least 30% identity, preferably at least 40%, 50% 60%, 70%, 75%, 80%, 85%, 90%, 95%, 96%, 97%, 98%, 99%, 99.5%, identity with the amino acid sequence of the polypeptide encoded by the nucleic acid molecule of (a), (b), (c) or (d);
   [63981] (f) a nucleic acid molecule which hybridizes with a nucleic acid molecule of (a), (b), (c), (d) or (e) under stringent hybridization conditions;
   [63982] (g) a nucleic acid molecule encoding a polypeptide which can be isolated with the aid of monoclonal or polyclonal antibodies made against a polypeptide encoded by one of the nucleic acid molecules of (a), (b), (c), (d), (e) or (f);
   [63983] (h) a nucleic acid molecule encoding a polypeptide comprising the consensus sequence or one or more polypeptide motifs as shown in column 8 of Table IV, application no. 12;
   [63984] (i) a nucleic acid molecule encoding a polypeptide having the activity represented by a respective protein as depicted in column 5 of Table II, application no. 12;
   [63985] (j) a nucleic acid molecule comprising a polynucleotide which is obtained by amplifying a cDNA library or a genomic library using the primers in Table III, application no. 12, column 8;
   [63986] and
   [63987] (k) nucleic acid molecule which is obtainable by screening a suitable nucleic acid library, especially a cDNA library and/or a genomic library, under stringent hybridization conditions with a probe comprising one of the sequences of the nucleic acid molecule of (a), (b), (c), (d), (e), (f), (g), (h), (i) or (j) or with a fragment of at least 15 nt, preferably 20 nt, 30 nt, 50 nt, 100 nt, 200 nt,500 nt, 1000 nt, 1500 nt, 2000 nt or 3000 nt of the nucleic acid molecule characterized in (a), (b), (c), (d), (e), (f), (g), (h), (i) or (j);
   [63988] or a nucleic acid molecule comprising a sequence which is complementary thereto;]
      as well as respective transgenic cells, tissue, parts of such non-human organism, e.g. plant cells, plant tissue, part of plants, like leaves, roots, stems, blossoms, seeds, fruits, pollen and the like.
      (All the references to Tables I to IV are references to the corresponding lines of Tables I to IV.)

[63989] In a preferred embodiment of said transgenic non-human organism said nucleic acid molecule according to 1 (a), (b), (c), (d), (e), (f), (g), (h), (i), (j) or (k) encodes a polypeptide which has the activity of the respective polypeptide represented by a protein comprising a polypeptide as depicted in the respective line in column 5 of Table II, application no. 12.

[63990] In another preferred embodiment of said transgenic non-human organism said nucleic acid molecule according to 1 (a), (b), (c), (d), (e), (f), (g), (h), (i), (j) or (k) confers a generation or an increase of the respective fine chemical in a non-human organism or a part thereof as compared to a corresponding wild-type non-human organism or part thereof.

[63991] In another preferred embodiment of said transgenic non-human organism said nucleic acid molecule according to 1 (a), (b), (c), (d), (e), (f), (g), (h), (i), (j) or (k) encodes a polypeptide which has the activity of the respective polypeptide represented by a protein as depicted in the respective line in column 5 of Table II application no. 12 and confers a generation or an increase of the respective fine chemical in a non-human organism or a part thereof as compared to a corresponding wild-type non-human organism or part thereof.

[63992] In another embodiment of said transgenic non-human organism the expression cassette comprises 2) a nucleic acid molecule encoding a transit peptide, preferably encoding a plastidal transit peptide, especially in case in column 6 of Table I, application no. 12, in the same line as of the respective nucleic acid molecule according to 1) “plastidic” is depicted, or encoding a mitochondrial transit peptide, especially in case in column 6 of Table I, application no. 12, in the same line as of the respective nucleic acid molecule according to 1) “mitochondrial” is depicted.

[63993] In another embodiment of said transgenic non-human organism the expression cassette does not comprise 2) a nucleic acid molecule encoding a transit peptide, especially in case in column 6 of Table I, application no. 12, in the same line as of the respective nucleic acid molecule according to 1) “non-targeted” is depicted.

[63994] In another embodiment of said transgenic non-human organism said vector comprises beneath said nucleic acid molecule according to 1 (a), (b), (c), (d), (e), (f), (g), (h), (i), (j) or (k), a promoter, preferably a promoter selected from the group consisting of Big35S, PCUbi, Super and USP, which are operable linked.

[63995] In a preferred embodiment of said transgenic non-human organism said vector comprises beneath said nucleic acid molecule according to 1 (a), (b), (c), (d), (e), (f), (g), (h), (i), (j) or (k), a promoter, preferably a promoter selected from the group consisting of Big35S, PCUbi, Super and USP, which are operable linked; and said nucleic acid molecule according to 1 (a), (b), (c), (d), (e), (f), (g), (h), (i), (j) or (k) encodes a polypeptide which has the activity of the respective polypeptide represented by a protein comprising a polypeptide as depicted in the respective line in column 5 of Table II, application no. 12.

[63996] In another preferred embodiment of said transgenic non-human organism said vector comprises beneath said nucleic acid molecule according to 1 (a), (b), (c), (d), (e), (f), (g), (h), (i), (j) or (k), a promoter, preferably a promoter selected from the group consisting of Big35S, PCUbi, Super and USP, which are operable linked; and said nucleic acid molecule according to 1 (a), (b), (c), (d), (e), (f), (g), (h), (i), (j) or (k) confers a generation or an increase of the respective fine chemical in a non-human organism or a part thereof as compared to a corresponding wild-type non-human organism or part thereof.

[63997] In another preferred embodiment of said transgenic non-human organism said vector comprises beneath said nucleic acid molecule according to 1 (a), (b), (c), (d), (e), (f), (g), (h), (i), (j) or (k), a promoter, preferably a promoter selected from the group consisting of Big35S, PCUbi, Super and USP, which are operable linked; and said nucleic acid molecule according to 1 (a), (b), (c), (d), (e), (f), (g), (h), (i), (j) or (k) encodes a polypeptide which has the activity of the respective polypeptide represented by a protein as depicted in the respective line in column 5 of Table II, application no. 12, and confers a generation or an increase of the respective fine chemical in a non-human organism or a part thereof as compared to a corresponding wild-type non-human organism or part thereof.

[63998] In another embodiment of said transgenic non-human organism said vector comprises beneath said nucleic acid molecule according to 1 (a), (b), (c), (d), (e), (f), (g), (h), (i), (j) or (k), a nucleic acid molecule encoding a transit peptide, preferably encoding a plastidal transit peptide, especially in case in column 6 of Table I, application no. 12, in the same line as of the respective nucleic acid molecule according to 1) “plastidic” is depicted, or encoding a mitochondrial transit peptide, especially in case in column 6 of Table I, application no. 12, in the same line as of the respective nucleic acid molecule according to 1) “mitochondrial” is depicted, which are operable linked.

[63999] In another embodiment of said transgenic non-human organism said vector does not comprise beneath said nucleic acid molecule according to 1 (a), (b), (c), (d), (e), (f), (g), (h), (i), (j) or (k), a nucleic acid molecule encoding a transit peptide in case in column 6 of Table I, application no. 12, in the same line as of the respective nucleic acid molecule according to 1) “non-targeted” is depicted, which are operable linked.

[64000] In another embodiment of said transgenic non-human organism said vector comprises beneath said nucleic acid molecule according to 1 (a), (b), (c), (d), (e), (f), (g), (h), (i), (j) or (k), and a promoter, preferably a promoter selected from the group consisting of Big35S, PCUbi, Super and USP; a nucleic acid molecule encoding a transit peptide, preferably encoding a plastidal transit peptide, especially in case in column 6 of Table I, application no. 12, in the same line as of the respective nucleic acid molecule according to 1) “plastidic” is depicted, or encoding a mitochondrial transit peptide, especially in case in column 6 of Table I, application no. 12, in the same line as of the respective nucleic acid molecule according to 1) “mitochondrial” is depicted, which are operable linked.

[64001] In another embodiment of said transgenic non-human organism said vector does not comprise beneath said nucleic acid molecule according to 1 (a), (b), (c), (d), (e), (f), (g), (h), (i), (j) or (k), and a promoter, preferably a promoter selected from the group consisting of Big35S, PCUbi, Super and USP; a nucleic acid molecule encoding a transit peptide, especially in case in column 6 of Table I, application no. 12, in the same line as of the respective nucleic acid molecule according to 1) “non-targeted” is depicted, which are operable linked.

[64002] In another embodiment of said transgenic non-human organism said vector comprises beneath said nucleic acid molecule according to 1 (a), (b), (c), (d), (e), (f), (g), (h), (i), (j) or (k), and a promoter, preferably a promoter selected from the group consisting of Big35S, PCUbi, Super and USP; a nucleic acid molecule encoding a transit peptide, preferably encoding a plastidal transit peptide, especially in case in column 6 of Table I, application no. 12, in the same line as of the respective nucleic acid molecule according to 1) “plastidic” is depicted, or encoding a mitochondrial transit peptide, especially in case in column 6 of Table I, application no. 12, in the same line as of the respective nucleic acid molecule according to 1) “mitochondrial” is depicted, which are operable linked; and wherein said nucleic acid molecule according to 1 (a), (b), (c), (d), (e), (f), (g), (h), (i), (j) or (k) encodes a polypeptide which has the activity of the respective polypeptide represented by a protein comprising a polypeptide as depicted in the respective line in column 5 of Table II, application no. 12.

[64003] In another embodiment of said transgenic non-human organism said vector does not comprise beneath said nucleic acid molecule according to 1 (a), (b), (c), (d), (e), (f), (g), (h), (i), (j) or (k), and a promoter, preferably a promoter selected from the group consisting of Big35S, PCUbi, Super and USP; a nucleic acid molecule encoding a transit peptide, especially in case in column 6 of Table I, application no. 12, in the same line as of the respective nucleic acid molecule according to 1) “non-targeted” is depicted, which are operable linked; and wherein said nucleic acid molecule according to 1 (a), (b), (c), (d), (e), (f), (g), (h), (i), (j) or (k) encodes a polypeptide which has the activity of the respective polypeptide represented by a protein comprising a polypeptide as depicted in the respective line in column 5 of Table II, application no. 12.

[64004] In another embodiment of said transgenic non-human organism said vector comprises beneath said nucleic acid molecule according to 1 (a), (b), (c), (d), (e), (f), (g), (h), (i), (j) or (k), and a promoter, preferably a promoter selected from the group consisting of Big35S, PCUbi, Super and USP; a nucleic acid molecule encoding a transit peptide, preferably encoding a plastidal transit peptide, especially in case in column 6 of Table I, application no. 12, in the same line as of the respective nucleic acid molecule according to 1) “plastidic” is depicted, or encoding a mitochondrial transit peptide, especially in case in column 6 of Table I, application no. 12, in the same line as of the respective nucleic acid molecule according to 1) “mitochondrial” is depicted, which are operable linked; and wherein said nucleic acid molecule according to 1 (a), (b), (c), (d), (e), (f), (g), (h), (i), (j) or (k) confers a generation or an increase of the respective fine chemical in a non-human organism or a part thereof as compared to a corresponding wild-type non-human organism or part thereof.

[64005] In another embodiment of said transgenic non-human organism said vector does not comprise beneath said nucleic acid molecule according to 1 (a), (b), (c), (d), (e), (f), (g), (h), (i), (j) or (k), and a promoter, preferably a promoter selected from the group consisting of Big35S, PCUbi, Super and USP; a nucleic acid molecule encoding a transit peptide, especially in case in column 6 of Table I, application no. 12, in the same line as of the respective nucleic acid molecule according to 1) “non-targeted” is depicted, which are operable linked; and wherein said nucleic acid molecule according to 1 (a), (b), (c), (d), (e), (f), (g), (h), (i), (j) or (k) confers a generation or an increase of the respective fine chemical in a non-human organism or a part thereof as compared to a corresponding wild-type non-human organism or part thereof.

[64006] In another embodiment of said transgenic non-human organism said vector comprises beneath said nucleic acid molecule according to 1 (a), (b), (c), (d), (e), (f), (g), (h), (i), (j) or (k), and a promoter, preferably a promoter selected from the group consisting of Big35S, PCUbi, Super and USP; a nucleic acid molecule encoding a transit peptide, preferably encoding a plastidal transit peptide, especially in case in column 6 of Table I, application no. 12, in the same line as of the respective nucleic acid molecule according to 1) “plastidic” is depicted, or encoding a mitochondrial transit peptide, especially in case in column 6 of Table I, application no. 12, in the same line as of the respective nucleic acid molecule according to 1) “mitochondrial” is depicted, which are operable linked; and wherein said nucleic acid molecule according to 1 (a), (b), (c), (d), (e), (f), (g), (h), (i), (j) or (k) encodes a polypeptide which has the activity of the respective polypeptide represented by a protein as depicted in the respective line in column 5 of Table II application no. 12 and confers a generation or an increase of the respective fine chemical in a non-human organism or a part thereof as compared to a corresponding wild-type non-human organism or part thereof.

[64007] In another embodiment of said transgenic non-human organism said vector does not comprise beneath said nucleic acid molecule according to 1 (a), (b), (c), (d), (e), (f), (g), (h), (i), (j) or (k), and a promoter, preferably a promoter selected from the group consisting of Big35S, PCUbi, Super and USP; a nucleic acid molecule encoding a transit peptide, especially in case in column 6 of Table I, application no. 12, in the same line as of the respective nucleic acid molecule according to 1) “non-targeted” is depicted, which are operable linked; and wherein said nucleic acid molecule according to 1 (a), (b), (c), (d), (e), (f), (g), (h), (i), (j) or (k) encodes a polypeptide which has the activity of the respective polypeptide represented by a protein as depicted in the respective line in column 5 of Table II application no. 12 (in the same line) and confers a generation or an increase of the respective fine chemical in a non-human organism or a part thereof as compared to a corresponding wild-type non-human organism or part thereof.

[64008] In a preferred embodiment of said transgenic non-human organism said nucleic acid molecule according to 1 (a), (b), (c), (d), (e), (f), (g), (h), (i), (j) or (k), said promoter and optionally said nucleic acid molecule encoding a transit peptide are encompassed in an expression cassette in said vector. Accordingly an embodiment the invention provides a non-human organism comprising or being transformed by a vector comprising an expression cassette comprising said nucleic acid molecule according to 1 (a), (b), (c), (d), (e), (f), (g), (h), (i), (j) or (k), said promoter and optionally said a nucleic acid molecule encoding a transit peptide, operable linked. Said expression cassette may encompass a terminator, too.

[64009] In a further embodiment the invention relates to a transgenic non-human organisms such as transgenic microorganism or transgenic plant comprising a nucleic acid molecule comprising
[64010] [1) a nucleic acid molecule selected from the group consisting of
   [64011] (a) a nucleic acid molecule encoding a polypeptide shown in Table II, application no. 12, column 5 or 8, preferably shown in Table II A, application no. 12, column 5, or in Table II A, application no. 12, column 8, or in Table II B, application no. 12, column 8, or a homolog or a fragment thereof;
   [64012] (b) a nucleic acid molecule shown in Table I, application no. 12, column 5 or 8, preferably shown in Table I A, application no. 12, column 5, or in Table I A, application no. 12, column 8, or in Table I B, application no. 12, column 8, preferably the coding region thereof, or a homolog or a fragment thereof;
   [64013] (c) a nucleic acid molecule, which, as a result of the degeneracy of the genetic code, can be derived from a polypeptide sequence depicted in column 5 or 8 of Table II, application no. 12, preferably shown in Table II A, application no. 12, column 5, or in Table II A, application no. 12, column 8, or in Table II B, application no. 12, column 8;
   [64014] (d) a nucleic acid molecule having at least 30% identity, preferably at least 40%, 50%, 60%, 70%, 75%, 80%, 85%, 90%, 95%, 96%, 97%, 98%, 99%, 99.5%, with the nucleic acid molecule sequence of a polynucleotide comprising the nucleic acid molecule shown in column 5 or 8 of Table I, application no. 12, preferably shown in Table I A, application no. 12, column 5, or in Table I A, application no. 12, column 8, or in Table I B, application no. 12, column 8, preferably the coding region thereof;
   [64015] (e) a nucleic acid molecule encoding a polypeptide having at least 30% identity, preferably at least 40%, 50% 60%, 70%, 75%, 80%, 85%, 90%, 95%, 96%, 97%, 98%, 99%, 99.5%, identity with the amino acid sequence of the polypeptide encoded by the nucleic acid molecule of (a), (b), (c) or (d);
   [64016] (f) a nucleic acid molecule which hybridizes with a nucleic acid molecule of (a), (b), (c), (d) or (e) under stringent hybridization conditions;
   [64017] (g) a nucleic acid molecule encoding a polypeptide which can be isolated with the aid of monoclonal or polyclonal antibodies made against a polypeptide encoded by one of the nucleic acid molecules of (a), (b), (c), (d), (e) or (f);
   [64018] (h) a nucleic acid molecule encoding a polypeptide comprising the consensus sequence or one or more polypeptide motifs as shown in column 8 of Table IV, application no. 12;
   [64019] (i) a nucleic acid molecule encoding a polypeptide having the activity represented by a respective protein as depicted in column 5 of Table II, application no. 12;
   [64020] (j) a nucleic acid molecule comprising a polynucleotide which is obtained by amplifying a cDNA library or a genomic library using the primers in Table III, application no. 12, column 8;
   [64021] and
   [64022] (k) nucleic acid molecule which is obtainable by screening a suitable nucleic acid library, especially a cDNA library and/or a genomic library, under stringent hybridization conditions with a probe comprising one of the sequences of the nucleic acid molecule of (a), (b), (c), (d), (e), (f), (g), (h), (i) or (j) or with a fragment of at least 15 nt, preferably 20 nt, 30 nt, 50 nt, 100 nt, 200 nt,500 nt, 1000 nt, 1500 nt, 2000 nt or 3000 nt of the nucleic acid molecule characterized in (a), (b), (c), (d), (e), (f), (g), (h), (i) or (j);
   [64023] or a nucleic acid molecule comprising a sequence which is complementary thereto;
      and, if desired
[64024] 2) nucleic acid molecule encoding a transit peptide, preferably encoding a plastidal transit peptide or a mitochondrial transit peptide;
   which are operable linked;]
   or comprising an expression cassette comprising
[64025] [0) a promoter, preferably a promoter selected from the group consisting of Big35S, PCUbi, Super and USP; and 1) a nucleic acid molecule selected from the group consisting of
   [64026] (a) a nucleic acid molecule encoding a polypeptide shown in Table II, application no. 12, column 5 or 8, preferably shown in Table II A, application no. 12, column 5, or in Table II A, application no. 12, column 8, or in Table II B, application no. 12, column 8, or a homolog or a fragment thereof;
   [64027] (b) a nucleic acid molecule shown in Table I, application no. 12, column 5 or 8, preferably shown in Table I A, application no. 12, column 5, or in Table I A, application no. 12, column 8, or in Table I B, application no. 12, column 8, preferably the coding region thereof, or a homolog or a fragment thereof;
   [64028] (c) a nucleic acid molecule, which, as a result of the degeneracy of the genetic code, can be derived from a polypeptide sequence depicted in column 5 or 8 of Table II, application no. 12, preferably shown in Table II A, application no. 12, column 5, or in Table II A, application no. 12, column 8, or in Table II B, application no. 12, column 8;
   [64029] (d) a nucleic acid molecule having at least 30% identity, preferably at least 40%, 50%, 60%, 70%, 75%, 80%, 85%, 90%, 95%, 96%, 97%, 98%, 99%, 99.5%, with the nucleic acid molecule sequence of a polynucleotide comprising the nucleic acid molecule shown in column 5 or 8 of Table I, application no. 12, preferably shown in Table I A, application no. 12, column 5, or in Table I A, application no. 12, column 8, or in Table I B, application no. 12, column 8, preferably the coding region thereof;
   [64030] (e) a nucleic acid molecule encoding a polypeptide having at least 30% identity, preferably at least 40%, 50% 60%, 70%, 75%, 80%, 85%, 90%, 95%, 96%, 97%, 98%, 99%, 99.5%, identity with the amino acid sequence of the polypeptide encoded by the nucleic acid molecule of (a), (b), (c) or (d);
   [64031] (f) a nucleic acid molecule which hybridizes with a nucleic acid molecule of (a), (b), (c), (d) or (e) under stringent hybridization conditions;
   [64032] (g) a nucleic acid molecule encoding a polypeptide which can be isolated with the aid of monoclonal or polyclonal antibodies made against a polypeptide encoded by one of the nucleic acid molecules of (a), (b), (c), (d), (e) or (f);
   [64033] (h) a nucleic acid molecule encoding a polypeptide comprising the consensus sequence or one or more polypeptide motifs as shown in column 8 of Table IV, application no. 12;
   [64034] (i) a nucleic acid molecule encoding a polypeptide having the activity represented by a respective protein as depicted in column 5 of Table II, application no. 12;
   [64035] (j) a nucleic acid molecule comprising a polynucleotide which is obtained by amplifying a cDNA library or a genomic library using the primers in Table III, application no. 12, column 8;
   [64036] and
   [64037] (k) nucleic acid molecule which is obtainable by screening a suitable nucleic acid library, especially a cDNA library and/or a genomic library, under stringent hybridization conditions with a probe comprising one of the sequences of the nucleic acid molecule of (a), (b), (c), (d), (e), (f), (g), (h), (i) or (j) or with a fragment of at least 15 nt, preferably 20 nt, 30 nt, 50 nt, 100 nt, 200 nt,500 nt, 1000 nt, 1500 nt, 2000 nt or 3000 nt of the nucleic acid molecule characterized in (a), (b), (c), (d), (e), (f), (g), (h), (i) or (j);
   [64038] or a nucleic acid molecule comprising a sequence which is complementary thereto;]
      and, if desired
[64039] 2) nucleic acid molecule encoding a transit peptide, preferably encoding a plastidal transit peptide or a mitochondrial transit peptide; which are operable linked;]
   or comprising or being transformed by a vector comprising
[64040] [1) a nucleic acid molecule selected from the group consisting of
   [64041] (a) a nucleic acid molecule encoding a polypeptide shown in Table II, application no. 12, column 5 or 8, preferably shown in Table II A, application no. 12, column 5, or in Table II A, application no. 12, column 8, or in Table II B, application no. 12, column 8, or a homolog or a fragment thereof;
   [64042] (b) a nucleic acid molecule shown in Table I, application no. 12, column 5 or 8, preferably shown in Table I A, application no. 12, column 5, or in Table I A, application no. 12, column 8, or in Table I B, application no. 12, column 8, preferably the coding region thereof, or a homolog or a fragment thereof;
   [64043] (c) a nucleic acid molecule, which, as a result of the degeneracy of the genetic code, can be derived from a polypeptide sequence depicted in column 5 or 8 of Table II, application no. 12, preferably shown in Table II A, application no. 12, column 5, or in Table II A, application no. 12, column 8, or in Table II B, application no. 12, column 8;
   [64044] (d) a nucleic acid molecule having at least 30% identity, preferably at least 40%, 50%, 60%, 70%, 75%, 80%, 85%, 90%, 95%, 96%, 97%, 98%, 99%, 99.5%, with the nucleic acid molecule sequence of a polynucleotide comprising the nucleic acid molecule shown in column 5 or 8 of Table I, application no. 12, preferably shown in Table I A, application no. 12, column 5, or in Table I A, application no. 12, column 8, or in Table I B, application no. 12, column 8, preferably the coding region thereof;
   [64045] (e) a nucleic acid molecule encoding a polypeptide having at least 30% identity, preferably at least 40%, 50% 60%, 70%, 75%, 80%, 85%, 90%, 95%, 96%, 97%, 98%, 99%, 99.5%, identity with the amino acid sequence of the polypeptide encoded by the nucleic acid molecule of (a), (b), (c) or (d);
   [64046] (f) a nucleic acid molecule which hybridizes with a nucleic acid molecule of (a), (b), (c), (d) or (e) under stringent hybridization conditions;
   [64047] (g) a nucleic acid molecule encoding a polypeptide which can be isolated with the aid of monoclonal or polyclonal antibodies made against a polypeptide encoded by one of the nucleic acid molecules of (a), (b), (c), (d), (e) or (f);
   [64048] (h) a nucleic acid molecule encoding a polypeptide comprising the consensus sequence or one or more polypeptide motifs as shown in column 8 of Table IV, application no. 12;
   [64049] (i) a nucleic acid molecule encoding a polypeptide having the activity represented by a respective protein as depicted in column 5 of Table II, application no. 12;
   [64050] (j) a nucleic acid molecule comprising a polynucleotide which is obtained by amplifying a cDNA library or a genomic library using the primers in Table III, application no. 12, column 8;
   [64051] and
   [64052] (k) nucleic acid molecule which is obtainable by screening a suitable nucleic acid library, especially a cDNA library and/or a genomic library, under stringent hybridization conditions with a probe comprising one of the sequences of the nucleic acid molecule of (a), (b), (c), (d), (e), (f), (g), (h), (i) or (j) or with a fragment of at least 15 nt, preferably 20 nt, 30 nt, 50 nt, 100 nt, 200 nt,500 nt, 1000 nt, 1500 nt, 2000 nt or 3000 nt of the nucleic acid molecule characterized in (a), (b), (c), (d), (e), (f), (g), (h), (i) or (j);
   [64053] or a nucleic acid molecule comprising a sequence which is complementary thereto;]
      whereby, preferably, the nucleic acid molecule according to 1 (a), (b), (c), (d), (e), (f), (g), (h), (i), (j) or (k) distinguishes over the sequence depicted in Table I A and/or I B, application no. 12, column 5 or 8, or the coding regions thereof, by one or more nucleotides (especially but not exceeding 5%, preferably 4%, 3%, 2%, 1%, 0.5%, 0.2% or 0.1%). In an embodiment, the nucleic acid molecule of the invention does not consist of the sequence shown in Table I A and/or I B, application no. 12, column 5 or 8, or the coding region thereof. In another embodiment, the nucleic acid molecule of the present invention, preferably the coding region thereof, is at least 30%, 40%, 50%, 60%, 70%, 80%, 90%, 95% identical but less than 100%, 99.999%, 99.99%, 99.9%, 99%, 98%, 97%, 96% or 95% identical to the sequence shown in Table I A and/or I B, application no. 12, column 5 or 8, or the coding region thereof, respectively. In a further embodiment the nucleic acid molecule does not encode the polypeptide sequence shown in Table II A and/or II B, application no. 12, column 5 or 8 but homologs thereof. Accordingly, in one embodiment, the nucleic acid molecule of the present invention encodes in one embodiment a polypeptide which differs at least in one or more amino acids (especially but not exceeding 5%, preferably 4%, 3%, 2%, 1%, 0.5%, 0.2% or 0.1%) from the polypeptide shown in Table II, application no. 12, column 5 or 8 and does not encode a protein of the sequence shown in Table II A and/or II B, application no. 12, column 5 or 8. Accordingly, in one embodiment, the protein encoded by a sequence of a nucleic acid according to 1 (a), (b), (c), (d), (e), (f), (g), (h), (i), (j) or (k) does not consist of the sequence shown in Table I A and/or I B, application no. 12, column 5 or 8, or the coding region thereof. In a further embodiment, the protein of the present invention is at least 30%, 40%, 50%, 60%, 70%, 80%, 90%, 95% identical to protein sequence depicted in Table II A and/or II B, application no. 12, column 5 or 8 but less than 100%, preferably less than 99.999%, 99.99%, 99.9%, 99%, 98%, 97%, 96% or 95% identical to the sequence shown in Table II A and/or II B, application no. 12, column 5 or 8;
      as well as respective transgenic cells, tissue, parts of such non-human organism, e.g. plant cells, plant tissue, part of plants, like leaves, roots, stems, blossoms, seeds, fruits, pollen and the like.
      (All the references to Tables I to IV are references to the corresponding lines of Tables I to IV.)

[64054] In a preferred embodiment of said transgenic non-human organism said nucleic acid molecule according to 1 (a), (b), (c), (d), (e), (f), (g), (h), (i), (j) or (k) encodes a polypeptide which has the activity of the respective polypeptide represented by a protein comprising a polypeptide as depicted in the respective line in column 5 of Table II, application no. 12.

[64055] In another preferred embodiment of said transgenic non-human organism said nucleic acid molecule according to 1 (a), (b), (c), (d), (e), (f), (g), (h), (i), (j) or (k) confers a generation or an increase of the respective fine chemical in a non-human organism or a part thereof as compared to a corresponding wild-type non-human organism or part thereof.

[64056] In another preferred embodiment of said transgenic non-human organism said nucleic acid molecule according to 1 (a), (b), (c), (d), (e), (f), (g), (h), (i), (j) or (k) encodes a polypeptide which has the activity of the respective polypeptide represented by a protein as depicted in the respective line in column 5 of Table II application no. 12 and confers a generation or an increase of the respective fine chemical in a non-human organism or a part thereof as compared to a corresponding wild-type non-human organism or part thereof.

[64057] In another embodiment of said transgenic non-human organism the expression cassette comprises 2) a nucleic acid molecule encoding a transit peptide, preferably encoding a plastidal transit peptide, especially in case in column 6 of Table I, application no. 12, in the same line as of the respective nucleic acid molecule according to 1) “plastidic” is depicted, or encoding a mitochondrial transit peptide, especially in case in column 6 of Table I, application no. 12, in the same line as of the respective nucleic acid molecule according to 1) “mitochondrial” is depicted.

[64058] In another embodiment thereof the expression cassette does not comprise 2) a nucleic acid molecule encoding a transit peptide, especially in case in column 6 of Table I, application no. 12, in the same line as of the respective nucleic acid molecule according to 1) “non-targeted” is depicted.

[64059] In another embodiment of said transgenic non-human organism said vector comprises beneath said nucleic acid molecule according to 1 (a), (b), (c), (d), (e), (f), (g), (h), (i), (j) or (k), a promoter, preferably a promoter selected from the group consisting of Big35S, PCUbi, Super and USP, which are operable linked.

[64060] In a preferred embodiment of said transgenic non-human organism said vector comprises beneath said nucleic acid molecule according to 1 (a), (b), (c), (d), (e), (f), (g), (h), (i), (j) or (k), a promoter, preferably a promoter selected from the group consisting of Big35S, PCUbi, Super and USP, which are operable linked; and said nucleic acid molecule according to 1 (a), (b), (c), (d), (e), (f), (g), (h), (i), (j) or (k) encodes a polypeptide which has the activity of the respective polypeptide represented by a protein comprising a polypeptide as depicted in the respective line in column 5 of Table II, application no. 12.

[64061] In another preferred embodiment of said transgenic non-human organism said vector comprises beneath said nucleic acid molecule according to 1 (a), (b), (c), (d), (e), (f), (g), (h), (i), (j) or (k), a promoter, preferably a promoter selected from the group consisting of Big35S, PCUbi, Super and USP, which are operable linked; and said nucleic acid molecule according to 1 (a), (b), (c), (d), (e), (f), (g), (h), (i), (j) or (k) confers a generation or an increase of the respective fine chemical in a non-human organism or a part thereof as compared to a corresponding wild-type non-human organism or part thereof.

[64062] In another preferred embodiment of said transgenic non-human organism said vector comprises beneath said nucleic acid molecule according to 1 (a), (b), (c), (d), (e), (f), (g), (h), (i), (j) or (k), a promoter, preferably a promoter selected from the group consisting of Big35S, PCUbi, Super and USP, which are operable linked; and said nucleic acid molecule according to 1 (a), (b), (c), (d), (e), (f), (g), (h), (i), (j) or (k) encodes a polypeptide which has the activity of the respective polypeptide represented by a protein as depicted in the same line in column 5 of Table II, application no. 12, and confers a generation or an increase of the respective fine chemical in a non-human organism or a part thereof as compared to a corresponding wild-type non-human organism or part thereof.

[64063] In another embodiment of said transgenic non-human organism said vector comprises beneath said nucleic acid molecule according to 1 (a), (b), (c), (d), (e), (f), (g), (h), (i), (j) or (k), a nucleic acid molecule encoding a transit peptide, preferably encoding a plastidal transit peptide, especially in case in column 6 of Table I, application no. 12, in the same line as of the respective nucleic acid molecule according to 1) “plastidic” is depicted, or encoding a mitochondrial transit peptide, especially in case in column 6 of Table I, application no. 12, in the same line as of the respective nucleic acid molecule according to 1) “mitochondrial” is depicted, which are operable linked.

[64064] In another embodiment of said transgenic non-human organism said vector does not comprise beneath said nucleic acid molecule according to 1 (a), (b), (c), (d), (e), (f), (g), (h), (i), (j) or (k), a nucleic acid molecule encoding a transit peptide in case in column 6 of Table I, application no. 12, in the same line as of the respective nucleic acid molecule according to 1) “non-targeted” is depicted, which are operable linked.

[64065] In another embodiment of said transgenic non-human organism said vector comprises beneath said nucleic acid molecule according to 1 (a), (b), (c), (d), (e), (f), (g), (h), (i), (j) or (k), and a promoter, preferably a promoter selected from the group consisting of Big35S, PCUbi, Super and USP; a nucleic acid molecule encoding a transit peptide, preferably encoding a plastidal transit peptide, especially in case in column 6 of Table I, application no. 12, in the same line as of the respective nucleic acid molecule according to 1) “plastidic” is depicted, or encoding a mitochondrial transit peptide, especially in case in column 6 of Table I, application no. 12, in the same line as of the respective nucleic acid molecule according to 1) “mitochondrial” is depicted, which are operable linked.

[64066] In another embodiment of said transgenic non-human organism said vector does not comprise beneath said nucleic acid molecule according to 1 (a), (b), (c), (d), (e), (f), (g), (h), (i), (j) or (k), and a promoter, preferably a promoter selected from the group consisting of Big35S, PCUbi, Super and USP; a nucleic acid molecule encoding a transit peptide, especially in case in column 6 of Table I, application no. 12, in the same line as of the respective nucleic acid molecule according to 1) “non-targeted” is depicted, which are operable linked.

[64067] In another embodiment of said transgenic non-human organism said vector comprises beneath said nucleic acid molecule according to 1 (a), (b), (c), (d), (e), (f), (g), (h), (i), (j) or (k), and a promoter, preferably a promoter selected from the group consisting of Big35S, PCUbi, Super and USP; a nucleic acid molecule encoding a transit peptide, preferably encoding a plastidal transit peptide, especially in case in column 6 of Table I, application no. 12, in the same line as of the respective nucleic acid molecule according to 1) “plastidic” is depicted, or encoding a mitochondrial transit peptide, especially in case in column 6 of Table I, application no. 12, in the same line as of the respective nucleic acid molecule according to 1) “mitochondrial” is depicted, which are operable linked; and wherein said nucleic acid molecule according to 1 (a), (b), (c), (d), (e), (f), (g), (h), (i), (j) or (k) encodes a polypeptide which has the activity of the respective polypeptide represented by a protein comprising a polypeptide as depicted in the respective line in column 5 of Table II, application no. 12.

[64068] In another embodiment of said transgenic non-human organism said vector does not comprise beneath said nucleic acid molecule according to 1 (a), (b), (c), (d), (e), (f), (g), (h), (i), (j) or (k), and a promoter, preferably a promoter selected from the group consisting of Big35S, PCUbi, Super and USP; a nucleic acid molecule encoding a transit peptide, especially in case in column 6 of Table I, application no. 12, in the same line as of the respective nucleic acid molecule according to 1) “non-targeted” is depicted, which are operable linked; and wherein said nucleic acid molecule according to 1 (a), (b), (c), (d), (e), (f), (g), (h), (i), (j) or (k) encodes a polypeptide which has the activity of the respective polypeptide represented by a protein comprising a polypeptide as depicted in the respective line in column 5 of Table II, application no. 12.

[64069] In another embodiment of said transgenic non-human organism said vector comprises beneath said nucleic acid molecule according to 1 (a), (b), (c), (d), (e), (f), (g), (h), (i), (j) or (k), and a promoter, preferably a promoter selected from the group consisting of Big35S, PCUbi, Super and USP; a nucleic acid molecule encoding a transit peptide, preferably encoding a plastidal transit peptide, especially in case in column 6 of Table I, application no. 12, in the same line as of the respective nucleic acid molecule according to 1) “plastidic” is depicted, or encoding a mitochondrial transit peptide, especially in case in column 6 of Table I, application no. 12, in the same line as of the respective nucleic acid molecule according to 1) “mitochondrial” is depicted, which are operable linked; and wherein said nucleic acid molecule according to 1 (a), (b), (c), (d), (e), (f), (g), (h), (i), (j) or (k) confers a generation or an increase of the respective fine chemical in a non-human organism or a part thereof as compared to a corresponding wild-type non-human organism or part thereof.

[64070] In another embodiment of said transgenic non-human organism said vector does not comprise beneath said nucleic acid molecule according to 1 (a), (b), (c), (d), (e), (f), (g), (h), (i), (j) or (k), and a promoter, preferably a promoter selected from the group consisting of Big35S, PCUbi, Super and USP; a nucleic acid molecule encoding a transit peptide, especially in case in column 6 of Table I, application no. 12, in the same line as of the respective nucleic acid molecule according to 1) “non-targeted” is depicted, which are operable linked; and wherein said nucleic acid molecule according to 1 (a), (b), (c), (d), (e), (f), (g), (h), (i), (j) or (k) confers a generation or an increase of the respective fine chemical in a non-human organism or a part thereof as compared to a corresponding wild-type non-human organism or part thereof.

[64071] In another embodiment of said transgenic non-human organism said vector comprises beneath said nucleic acid molecule according to 1 (a), (b), (c), (d), (e), (f), (g), (h), (i), (j) or (k), and a promoter, preferably a promoter selected from the group consisting of Big35S, PCUbi, Super and USP; a nucleic acid molecule encoding a transit peptide, preferably encoding a plastidal transit peptide, especially in case in column 6 of Table I, application no. 12, in the same line as of the respective nucleic acid molecule according to 1) “plastidic” is depicted, or encoding a mitochondrial transit peptide, especially in case in column 6 of Table I, application no. 12, in the same line as of the respective nucleic acid molecule according to 1) “mitochondrial” is depicted, which are operable linked; and wherein said nucleic acid molecule according to 1 (a), (b), (c), (d), (e), (f), (g), (h), (i), (j) or (k) encodes a polypeptide which has the activity of the respective polypeptide represented by a protein as depicted in the respective line in column 5 of Table II application no. 12 and confers a generation or an increase of the respective fine chemical in a non-human organism or a part thereof as compared to a corresponding wild-type non-human organism or part thereof.

[64072] In another embodiment of said transgenic non-human organism said vector does not comprise beneath said nucleic acid molecule according to 1 (a), (b), (c), (d), (e), (f), (g), (h), (i), (j) or (k), and a promoter, preferably a promoter selected from the group consisting of Big35S, PCUbi, Super and USP; a nucleic acid molecule encoding a transit peptide, especially in case in column 6 of Table I, application no. 12, in the same line as of the respective nucleic acid molecule according to 1) “non-targeted” is depicted, which are operable linked; and wherein said nucleic acid molecule according to 1 (a), (b), (c), (d), (e), (f), (g), (h), (i), (j) or (k) encodes a polypeptide which has the activity of the respective polypeptide represented by a protein as depicted in the respective line in column 5 of Table II application no. 12 and confers a generation or an increase of the respective fine chemical in a non-human organism or a part thereof as compared to a corresponding wild-type non-human organism or part thereof.

[64073] In a preferred embodiment of said transgenic non-human organism said nucleic acid molecule according to 1 (a), (b), (c), (d), (e), (f), (g), (h), (i), (j) or (k), said promoter and optionally said nucleic acid molecule encoding a transit peptide are encompassed in an expression cassette in said vector. Accordingly an embodiment the invention provides a non-human organism comprising or being transformed by a vector comprising an expression cassette comprising said nucleic acid molecule according to 1 (a), (b), (c), (d), (e), (f), (g), (h), (i), (j) or (k), said promoter and optionally said a nucleic acid molecule encoding a transit peptide, operable linked. Said expression cassette may encompass a terminator, too.

[64074] [0291.1.8.12] to [0299.1.8.12] for the disclosure of these paragraphs see [0291.1.8.8] to [0299.1.8.8] above.

[64075] The term “biological active portion” or “biological activity” means a polypeptide as depicted in the respective line in Table II, application no. 12, column 3 or a portion of said polypeptide which still has at least 10% or 20%, preferably 30%, 40%, 50% or 60%, especially preferably 70%, 75%, 80%, 90% or 95% of the enzymatic or biological activity of the natural or starting enzyme or protein.

[64076] [0301.1.8.12] to [0304.1.8.12] for the disclosure of these paragraphs see [0301.1.8.8] to [0304.1.8.8] above.

[64077] Synthetic oligonucleotide primers for the amplification, e.g. as shown in the respective line in Table III, application no. 12, column 8, by means of polymerase chain reaction can be generated on the basis of a sequence shown herein, for example the sequence shown in the respective line in Table I, application no. 12, columns 5 or 8, or the sequences derived from Table II, application no. 12, columns 5 or 8, respectively.

[64078] Moreover, it is possible to identify a conserved region of a protein from various organism by carrying out protein sequence alignments with the polypeptide encoded by the nucleic acid molecules of the present invention, in particular with the sequences encoded by the nucleic acid molecule shown in the respective line in column 5 or 8 of Table I, application no. 12, from which conserved regions, and in turn, degenerate primers can be derived. Conserved regions are those, which show a very little variation in the amino acid in one particular position of several homologs from different origin. The consensus sequence and polypeptide motifs shown in the respective line in column 8 of Table IV, application no. 12, are derived from such alignments of homologous proteins.

[64079] In an embodiment of the present invention, in the method of the present invention the activity of a polypeptide comprising or consisting of a consensus sequence or at least one polypeptide motif shown in the respective line in Table IV, application no. 12, column 8, is increased. In another embodiment thereof, the method of the present invention relates to a polypeptide comprising or consisting of a consensus sequence shown in the respective line in Table IV, application no. 12, column 8 or comprising at least one polypeptide motif shown in the respective line in Table IV, application no. 12, column 8, whereby not more than 20, 15, 10, 9, 8, 7, 6, 5 4, 3, 2 or 1, or 0 of the amino acid positions indicated can be replaced by any amino acid. In another embodiment thereof, the method of the present invention relates to a polypeptide comprising or consisting of a consensus sequence shown in the respective line in Table IV, application no. 12, column 8 or comprising at least one polypeptide motif shown in the respective line in Table IV, application no. 12, column 8, whereby not more than 15%, 10%, 5%, 4%, 3%, 2% or 1%, or 0% of the amino acid positions defined as distinct specific amino acids are/is replaced by another amino acid. In another embodiment thereof, the method of the present invention relates to a polypeptide comprising or consisting of a consensus sequence shown in the respective line in Table IV, application no. 12, column 8 or comprising at least one polypeptide motif shown in the respective line in Table IV, application no. 12, column 8, whereby not more than 20, 15, 10, 9, 8, 7, 6, 5, 4, 3, 2 or 1, or 0 amino acids are inserted into a consensus sequence or polypeptide motif.

[64080] In an embodiment of the present invention, in the method of the present invention the activity of a polypeptide comprising or consisting of a consensus sequence or at least one polypeptide motif shown in the respective line in Table IV, application no. 12, column 8, is increased, whereby said polypeptide distinguishes over the sequence depicted in Table II, application no. 12, columns 5 or 8 by one or more amino acids.

[64081] In one embodiment, said polypeptide of the invention distinguishes over the sequence shown in the respective line in Table II, application no. 12, columns 5 and 8 by more than 5, 6, 7, 8 or 9 amino acids, preferably by more than 10, 15, 20, 25 or 30 amino acids, even more preferred are more than 40, 50, or 60 amino acids and, preferably, the sequence of the polypeptide of the invention distinguishes from the sequence shown in the respective line in Table II B, application no. 12, columns 5 and 8 by not more than 80%, 70%, 60%, 50%, 40%, 30%, 20%, 10%, 5%, 4%, 3%, 2%, 1% or 0.5%. In another embodiment, said polypeptide of the invention does not consist of the sequence shown in Table II, application no. 12, columns 5 or 8.

[64082] [0309.1.8.12] to [0321.1.8.12] for the disclosure of these paragraphs see [0309.1.8.8] to [0321.1.8.8] above.

[64083] Polypeptides having above-mentioned activity, i.e. conferring the production or the increased production of the fine chemical 2-hydroxybehenic acid, 2-hydroxypalmitic acid, 2hydroxytetracosenoic acid (preferably 2-hydroxynervonic acid), behenic acid, cerebronic acid, eicosanoic acid, heptadecanoic acid, hexadecadienoic acid, hexadecatrienoic acid, lauric acid, myristic acid, nervonic acid, or oleic acid, respectively, as compared to a corresponding, e.g. non-transformed, wild type non-human organism, like a microorganism or a plant cell, plant or part thereof, can be encoded by other DNA sequences which hybridize to the sequences shown in the respective line in Table I, application no. 12, columns 5 and 8, preferably the coding region thereof, at least under relaxed hybridization conditions and which encode the expression of polypeptides conferring the production or the increased production of the respective fine chemical 2-hydroxybehenic acid, 2-hydroxypalmitic acid, 2-hydroxytetracosenoic acid (preferably 2-hydroxynervonic acid), behenic acid, cerebronic acid, eicosanoic acid, heptadecanoic acid, hexadecadienoic acid, hexadecatrienoic acid, lauric acid, myristic acid, nervonic acid, or oleic acid, respectively, as compared to a corresponding, e.g. non-transformed, wild type non-human organism, like a microorganism or a plant cell, plant or part thereof. [0323.1.8.12] to [0329.1.8.12] for the disclosure of these paragraphs see [0323.1.8.8] to [0329.1.8.8] above.

[64084] Further, the nucleic acid molecule of the invention comprises a nucleic acid molecule, which is a complement of one of the nucleotide sequences of above-mentioned nucleic acid molecules or a portion thereof. A nucleic acid molecule or its sequence which is complementary to one of the nucleotide molecules or sequences shown in the respective line in Table I, application no. 12, columns 5 or 8, preferably the coding region thereof, homologs or fragments thereof, is one which is sufficiently complementary to one of the nucleotide molecules or sequences shown in the respective line in Table I, application no. 12, columns 5 or 8, preferably the coding region thereof, homologs or fragments thereof, such that it can hybridize to one of the nucleotide sequences shown in Table I, application no. 12, columns 5 or 8, preferably the coding region thereof, homologs or fragments thereof, thereby forming a stable duplex. Preferably, the hybridization is performed under stringent hybridization conditions. However, a complement of one of the herein disclosed sequences is preferably a sequence complement thereto according to the base pairing of nucleic acid molecules well known to the skilled person. For example, the bases A and G undergo base pairing with the bases T and U or C, resp. and visa versa. Modifications of the bases can influence the base-pairing partner.

[64085] The nucleic acid molecule of the invention comprises a nucleotide sequence which is at least about 30%, 35%, 40%, 45%, 50%, 55%, 60%, 65%, 70%, 75%, 80%, 90%, 95%, 96%, 97%, 98%, 99%, 99.5% or more homologous to a nucleotide sequence shown in Table I, application no. 12, columns 5 or 8, preferably the coding region thereof, homologs or fragments thereof, and preferably has above-mentioned activity, in particular conferring the pro duction or the increased production of the fine chemical 2-hydroxybehenic acid, 2-hydroxypalmitic acid, 2-hydroxytetracosenoic acid (preferably 2-hydroxynervonic acid), behenic acid, cerebronic acid, eicosanoic acid, heptadecanoic acid, hexadecadienoic acid, hexadecatrienoic acid, lauric acid, myristic acid, nervonic acid, or oleic acid, respectively, after increasing the activity or an activity of a gene as shown in the respective line in Table I or of a gene product, e.g. as shown in the respective line in Table II, application no. 12, column 5 or 8, by for example in one embodiment expression either in the cytosol or in an organelle such as a plastid or mitochondria or both, preferably in a plastid, or in another embodiment non-targeted or targeted.

[64086] The nucleic acid molecule of the invention comprises a nucleotide sequence or molecule which hybridizes, preferably hybridizes under stringent conditions as defined herein, to one of the nucleic acid molecule shown in the respective line in Table I, preferably Table IB, application no. 12, columns 5 or 8, preferably the coding region thereof, fragments or homologs thereof, and encodes a protein having above-mentioned activity, e.g. conferring the production or the increased production of the respective fine chemical 2-hydroxybehenic acid, 2-hydroxypalmitic acid, 2-hydroxytetracosenoic acid (preferably 2-hydroxynervonic acid), behenic acid, cerebronic acid, eicosanoic acid, heptadecanoic acid, hexadecadienoic acid, hexadecatrienoic acid, lauric acid, myristic acid, nervonic acid, or oleic acid as compared to a corresponding, e.g. non-transformed, wild type non-human organism, like a microorganism or a plant cell, plant or part thereof, by for example in one embodiment expression either in the cytosol or in an organelle such as a plastid or mitochondria or both, preferably in a plastid, or in another embodiment non-targeted or targeted, and optionally, the activity thereof is selected from the group consisting of 2,3-dihydroxyphenylpropionate 1,2-dioxygenase, 2-C-methyl-D-erythritol 4-phosphate cytidylyltransferase, 30S ribosomal protein S3, 3-ketoacyl-CoA thiolase, 3-oxoacyl-[acyl-carrier-protein] reductase, 3-oxoacyl-[acyl-carrier-protein] synthase, 40S ribosomal protein S17, ABC transporter component, ABC transporter permease protein, acetyl-coenzyme A synthetase, acid shock protein, acyl-CoA synthase, acyl-desaturase, adenosine kinase, aldolase, alkaline phosphatase isozyme conversion protein, amino acid ABC transporter permease protein, aminotransferase, ankyrin repeat protein, At2g33510-protein, ATPase epsilon subunit, ATP-binding component of a transport system, b0050-protein, b0249-protein, b0371-protein, b0518-protein, b0801-protein, b1046-protein, b1346-protein, b1470-protein, b1522-protein, b1670-protein, b1703-protein, b1837-protein, b2032-protein, b2099-protein, b2107-protein, b2126-protein, b2139-protein, b2360-protein, b2474-protein, b2513-protein, b2654-protein, b3442-protein, b3644-protein, b3812-protein, b3944-protein, b4023-protein, b4205-protein, beta-hydroxylase, betaine aldehyde dehydrogenase, bifunctional protein (phosphoribosyltransferase and regulatory protein), bifunctional purine biosynthesis protein, binding-protein-dependent transport systems inner membrane component, biotin synthase, calcium-dependent protein kinase, carbon dioxide concentrating mechanism protein, cardiolipin synthase, CDP-diacylglycerol-serine O-phosphatidyltransferase, cell division control protein, cell wall protein, chlorophyllase, citrate synthase, coproporphyrinogen III oxidase, cyclin, cystathionine gamma-synthase, cysteine synthase A, dihydrolipoamide dehydrogenase, DNA mismatch repair protein, DnaJ-like chaperone, electron transport complex protein, Elongation factor Tu, ethanolamine utilization protein, F-box protein, ferredoxin, fructose 1,6-bisphosphatase, fumarylacetoacetate hydrolase, glutamate 5-kinase, glutamate-ammonia-ligase, glutaredoxin, glycerol-3-phosphate dehydrogenase, glycine cleavage system H protein, GM02LC38418-protein, heat shock protein, heat shock transcription factor, HesB/YadR/YfhF family protein, homocitrate synthase, hydrolase, isocitrate dehydrogenase, lipoprotein precursor, malate dehydrogenase, malonyl CoAacyl carrier protein transacylase, metal-dependent hydrolase, molecular chaperone, molecular chaperone portein, monothiol glutaredoxin, multiple antibiotic resistance protein, murein transglycosylase, N-acetyl-gamma-glutamyl-phosphate reductase, NADP-dependent malic enzyme, outer-membrane lipoprotein precursor, oxidoreductase, permease protein of ABC transporter, phage-related repressor protein, phosphatase, phosphate import ATP-binding protein, phosphatidylserine synthase, phospho-2-dehydro-3-deoxyheptonate aldolase, phosphoadenosine phosphosulfate reductase, phosphotransferase, phosphotransferase system component, polygalacturonase, protein kinase, protein phosphatase, purine nucleoside phosphorylase, pyridoxamine kinase, recombinase A, sec-independent protein translocase, Sec-independent protein translocase subunit, sensor histidine kinase, sensor kinase, sll0281-protein, sll0406-protein, small nuclear ribonucleoprotein , sodium/proton antiporter, squalene monooxygenase, sugar transport system permease protein, threonine dehydratase, transcription factor, transcriptional regulator, transcriptional regulator protein, transport protein, tryptophan synthase alpha chain, TTC1386-protein, vacuolar processing enzyme, ycl027w-protein, ycl049c-protein, ydr273w-protein, ydr339c-protein, YFL019C-protein, ygl237c-protein, YGR104C-protein, yhr033w-protein, YJL127W-A-protein, ylr326w-protein, yml083c-protein, yml084w-protein, and ynl321w-protein, respectively.

[64087] Moreover, the nucleic acid molecule of the invention can comprise only a portion of the coding region of one of the nucleic acid molecules depicted in Table I, application no. 12, columns 5 or 8, for example a fragment which can be used as a probe or primer or a fragment encoding a biologically active portion of the polypeptide of the present invention or of a polypeptide used in the process of the present invention, i.e. having above-mentioned activity, e.g. conferring the production or the increased production of the respective fine chemical 2-hydroxybehenic acid, 2-hydroxypalmitic acid, 2-hydroxytetracosenoic acid (preferably 2-hydroxynervonic acid), behenic acid, cerebronic acid, eicosanoic acid, heptadecanoic acid, hexadecadienoic acid, hexadecatrienoic acid, lauric acid, myristic acid, nervonic acid, or oleic acid as compared to a corresponding, e.g. non-transformed, wild type non-human organism, like a microorganism or a plant cell, plant or part thereof, by for example in one embodiment expression either in the cytosol or in an organelle such as a plastid or mitochondria or both, preferably in a plastid, or in another embodiment non-targeted or targeted. The nucleotide sequences determined from the cloning of the present protein-according-to-the-invention-encoding gene allows for the generation of probes and primers designed for use in identifying and/or cloning its homologues from other cell types and organisms. The probe/primer typically comprises a substantially purified oligonucleotide. The oligonucleotide typically comprises a region of nucleotide sequence that hybridizes under stringent conditions to at least about 12, 15 preferably about 20 or 25, more preferably about 40, 50 or 75 consecutive nucleotides of a sense strand of one of the sequences set forth, e.g., in the respective line in Table I, application no. 12, column 5 or 8, preferably the coding region thereof, or a homolog or a fragment thereof, an anti-sense sequence of one of the sequences, e.g., set forth in the respective line in Table I, application no. 12, columns 5 or 8, preferably the coding region thereof, or a homolog or a fragment thereof or naturally occurring mutants thereof. Primers based on a nucleic acid molecule of the invention can be used in PCR reactions to clone homologs of the polypeptide of the invention or of the polypeptide used in the process of the invention, e.g. as the primers described in the examples of the present invention, e.g. as shown in the examples. A PCR with the primers shown in the respective line in Table III, column 8 will result in a fragment of the gene product as shown in Table II, application no. 12, column 5.

[64088] Primer sets are interchangeable. The person skilled in the art knows how to design and combine said primers to result in the desired product, e.g. in a full length clone or a partial sequence. Probes based on the sequences of the nucleic acid molecule of the invention or used in the process of the present invention can be used to detect transcripts or genomic sequences encoding the same or homologous proteins. The probe can further comprise a label group attached thereto, e.g. the label group can be a radioisotope, a fluorescent compound, an enzyme, or an enzyme co-factor. Such probes can be used as a part of a genomic marker test kit for identifying cells which express a polypeptide of the invention or used in the process of the present invention, such as by measuring a level of an encoding nucleic acid molecule in a sample of cells, e.g. detecting mRNA levels or determining, whether a genomic gene comprising the sequence of the polynucleotide of the invention or used in the processes of the present invention has been mutated or deleted.

[64089] As the expression of a respective nucleic acids of the invention is related to the synthesis of the respective fine chemical 2-hydroxybehenic acid, 2-hydroxypalmitic acid, 2-hydroxytetracosenoic acid (preferably 2-hydroxynervonic acid), behenic acid, cerebronic acid, eicosanoic acid, heptadecanoic acid, hexadecadienoic acid, hexadecatrienoic acid, lauric acid, myristic acid, nervonic acid, or oleic acid its function as a probe extends to the detection of microorganisms, plant tissues, plants, plant variets, plant ecotypes or plant genera with varying capability or potential for synthesis of the respective fine chemical 2-hydroxybehenic acid, 2-hydroxypalmitic acid, 2-hydroxytetracosenoic acid (preferably 2-hydroxynervonic acid), behenic acid, cerebronic acid, eicosanoic acid, heptadecanoic acid, hexadecadienoic acid, hexadecatrienoic acid, lauric acid, myristic acid, nervonic acid, or oleic acid. Therefore in one embodiment the present invention relates to a method for analyzing the capability or potential of a plant tissue, a plant, a plant variety or plant ecotype to produce the fine chemical 2-hydroxybehenic acid, 2-hydroxypalmitic acid, 2-hydroxytetracosenoic acid (preferably 2-hydroxynervonic acid), behenic acid, cerebronic acid, eicosanoic acid, heptadecanoic acid, hexadecadienoic acid, hexadecatrienoic acid, lauric acid, myristic acid, nervonic acid, or oleic acid by using the nucleic acid of the invention or parts thereof as a probe to detect the amount of the nucleic acid of the invention in the non-human organism or a part thereof in comparison to another non-human organism.

[64090] The nucleic acid molecule of the invention encodes a polypeptide or portion thereof which includes an amino acid sequence which is sufficiently homologous to the amino acid sequence shown in respective line in Table II, application no. 12, columns 5 or 8 such that the protein or portion thereof maintains the ability to confer the production or the increased production of the respective fine chemical 2-hydroxybehenic acid, 2-hydroxypalmitic acid, 2-hydroxytetracosenoic acid (preferably 2-hydroxynervonic acid), behenic acid, cerebronic acid, eicosanoic acid, heptadecanoic acid, hexadecadienoic acid, hexadecatrienoic acid, lauric acid, myristic acid, nervonic acid, or oleic acid as compared to a corresponding, e.g. non-transformed, wild type non-human organism, like a microorganism or a plant cell, plant or part thereof, in particular increasing the activity as mentioned above or as described in the examples in microorganisms or plants.

[64091] As used herein, the language “sufficiently homologous” refers to proteins or portions thereof which have amino acid sequences which include a minimum number of identical or equivalent amino acids (e.g. an amino acid which has a similar side chain as an amino acid in one of the sequences of the polypeptide of the present invention) to an amino acid sequence shown in the respective line in Table II, application no. 12, columns 5 or 8 such that the protein or portion thereof is able to confer the production or the increased production of the respective fine chemical 2-hydroxybehenic acid, 2-hydroxypalmitic acid, 2-hydroxytetracosenoic acid (preferably 2-hydroxynervonic acid), behenic acid, cerebronic acid, eicosanoic acid, heptadecanoic acid, hexadecadienoic acid, hexadecatrienoic acid, lauric acid, myristic acid, nervonic acid, or oleic acid as compared to a corresponding, e.g. non-transformed, wild type non-human organism, like a microorganism or a plant cell, plant or part thereof. For example having the activity of a protein as shown in the respective line in Table II, application no. 12, column 3 and as described herein.

[64092] In an embodiment of the present invention, the nucleic acid molecule of the present invention comprises a nucleic acid molecule that encodes a portion of the protein of the present invention. The protein is at least about 30%, 35%, 40%, 45% 50%, 55%, 60%, 65%, 70%, 75%, 80%, 85%, 90%, 91%, 92%, 93%, 94%, 95%, 96%, 97%, 98%, 99%, 99.5% or more homologous to an entire amino acid sequence shown in the respective line of Table II, application no. 12, column 5 or 8 and has the above-mentioned activity, e.g. conferring the production or the increased production of the respective fine chemical 2-hydroxybehenic acid, 2-hydroxypalmitic acid, 2-hydroxytetracosenoic acid (preferably 2-hydroxynervonic acid), behenic acid, cerebronic acid, eicosanoic acid, heptadecanoic acid, hexadecadienoic acid, hexadecatrienoic acid, lauric acid, myristic acid, nervonic acid, or oleic acid, respectively, as compared to a corresponding, e.g. non-transformed, wild type non-human organism, like a microorganism or a plant cell, plant or part thereof by, for example in a embodiment expression either in the cytosol or in an organelle such as a plastid or mitochondria or both, preferably in a plastid, or in another embodiment by targeted or non-targeted expression.

[64093] [0338.1.8.12] to [0339.1.8.12] for the disclosure of these paragraph see [0338.1.8.8] to [0339.1.8.12] above.

[64094] The invention further relates to nucleic acid molecules or methods using said nucleic acid molecules that differ from one of the nucleotide sequences shown in the respective line in Table I, application no. 12, columns 5 or 8, preferably the coding region thereof, or fragments or homologs thereof, due to degeneracy of the genetic code but encode a polypeptide of the present invention, in particular a polypeptide having the above-mentioned activity, e.g. as those polypeptides depicted in the respective line in Table II, application no. 12, columns 5 or 8, fragments or homologs thereof. Advantageously, the nucleic acid molecule of the invention comprises, or in an other embodiment has, a nucleotide sequence encoding a protein comprising, or in an other embodiment having, an amino acid sequence shown in the respective line in Table II, application no. 12, columns 5 or 8, fragments or homologs thereof. In a further embodiment, the nucleic acid molecule of the invention encodes a full length protein which is substantially homologous to an amino acid sequence shown in the respective line in Table II, application no. 12, columns 5 or 8, or homologs thereof. However, in an embodiment, the nucleic acid molecule of the present invention does not consist of the sequence shown in the respective line in Table I, preferably Table IA, application no. 12, columns 5 or 8, preferably the coding region thereof, but the functional homologs thereof.

[64095] [0341.1.8.12] to [0343.1.8.12] for the disclosure of these paragraphs see [0341.1.8.8] to [0343.1.8.8] above.

[64096] Accordingly, in another embodiment, a nucleic acid molecule of the invention is at least 15, 20, 25 or 30 nucleotides in length. Preferably, it hybridizes under stringent conditions to a nucleic acid molecule comprising a nucleotide sequence of the nucleic acid molecule of the present invention or used in the process of the present invention, e.g. comprising the sequence shown in the respective line in Table I, application no. 12, columns 5 or 8, preferably the coding region thereof. In another embodiment the nucleic acid molecule is preferably at least 20, 30, 50, 100, 250 or more nucleotides in length.

[64097] for the disclosure of this paragraph see [0345.1.8.8] above.

[64098] Preferably, a nucleic acid molecule of the invention that hybridizes under stringent conditions to a sequence shown in the respective line in Table I, application no. 12, columns 5 or 8, preferably the coding region thereof, corresponds to a naturally-occurring nucleic acid molecule of the invention. As used herein, a “naturally-occurring” nucleic acid molecule refers to a RNA or DNA molecule having a nucleotide sequence that occurs in nature (e.g. encodes a natural protein). Preferably, the nucleic acid molecule encodes a natural protein having above-mentioned activity, e.g. conferring the production or the increased production of the respective fine chemical 2-hydroxybehenic acid, 2-hydroxypalmitic acid, 2-hydroxytetracosenoic acid (preferably 2-hydroxynervonic acid), behenic acid, cerebronic acid, eicosanoic acid, heptadecanoic acid, hexadecadienoic acid, hexadecatrienoic acid, lauric acid, myristic acid, nervonic acid, or oleic acid, respectively, as compared to a corresponding, e.g. non-transformed, wild type non-human organism, like a microorganism or a plant cell, plant or part thereof after increasing the expression or activity thereof or the activity of a protein of the invention or used in the process of the invention, in an embodiment for example expression either in the cytosol or in an organelle such as a plastid or mitochondria, preferably in plastids, or, in another embodiment by targeted or non-targeted expression.

[64099] for the disclosure of this paragraph see [0347.1.8.8] above.

[64100] For example, nucleotide substitutions leading to amino acid substitutions at “non-essential” amino acid residues can be made in a sequence of the nucleic acid molecule of the invention or used in the process of the invention, e.g. shown in the respective line in Table I, application no. 12, columns 5 or 8, preferably the coding region thereof, or fragments or homologs thereof.

[64101] [0349.1.8.12] to [0350.1.8.12] for the disclosure of these paragraphs see [0349.1.8.8] to [0350.1.8.8] above.

[64102] Accordingly, the invention relates to nucleic acid molecules encoding a polypeptide having above-mentioned activity, in a non-human organisms or parts thereof by for example expression either in the cytosol or in an organelle such as a plastid or mitochondria or both, preferably in plastids, that contain changes in amino acid residues that are not essential for said activity. Such polypeptides differ in amino acid sequence from a sequence depicted in the respective line in Table II, especially Table IIA, application no. 12, columns 5 or 8, but retain said activity described herein. The nucleic acid molecule can comprise a nucleotide sequence encoding a polypeptide, wherein the polypeptide comprises an amino acid sequence at least about 50% identical to an amino acid sequence shown in the respective line in Table II, application no. 12, columns 5 or 8, and is capable of conferring the production or the increased production of the respective fine chemical 2-hydroxybehenic acid, 2-hydroxypalmitic acid, 2-hydroxytetracosenoic acid (preferably 2-hydroxynervonic acid), behenic acid, cerebronic acid, eicosanoic acid, heptadecanoic acid, hexadecadienoic acid, hexadecatrienoic acid, lauric acid, myristic acid, nervonic acid, or oleic acid, respectively, as compared to a corresponding, e.g. non-transformed, wild type non-human organism, like a microorganism or a plant cell, plant or part thereof, after increasing its activity for example in an embodiment by expression either in the cytosol or in an organelle such as a plastid or mitochondria or both, preferably in plastids, or, in another embodiment by targeted or non-targeted expression. Preferably, the protein encoded by the nucleic acid molecule is at least about 60%, 70%, 80%, 90%, 95%, 96%, 97%, 98%, 99% or 99.5% identical to the sequence shown in the respective line in Table II, application no. 12, columns 5 or 8.

[64103] [0352.1.8.12] to [0357.1.8.12] for the disclosure of these paragraphs see [0352.1.8.8] to [0357.1.8.8] above.

[64104] Functional equivalents of the nucleic acid molecules according to the present invention and/or used in the process according to the present invention represent an embodiment of homologs. Functional equivalents derived from the nucleic acid molecules as shown in the respective line in Table I, application no. 12, columns 5 or 8, preferably the coding region thereof, according to the invention by substitution, insertion or deletion have at least 30%, 35%, 40%, 45%, 50%, 55%, 60%, 65%, 70%, 75%, 80%, 85%, 90%, 91%, 92%, 93%, 94%, 95%, 96%, 97%, 98%, 99% or 99.5% homology with one of the nucleic acid molecules as shown in the respective line in Table I, application no. 12, columns 5 or 8, preferably the coding region thereof, according to the invention and encode polypeptides having essentially the same properties as the polypeptide as shown in the respective line in Table II, application no. 12, columns 5 or 8.

[64105] Functional equivalents derived from one of the polypeptides as shown in the respective line in Table II, application no. 12, columns 5 or 8 according to the invention by substitution, insertion or deletion have at least 30%, 35%, 40%, 45%, 50%, 55%, 60%, 65%, 70%, 75%, 80%, 85%, 90%, 91%, 92%, 93%, 94%, 95%, 96%, 97%, 98%, 99% or 99.5% homology with one of the polypeptides as shown in the respective line in Table II, application no. 12, columns 5 or 8 according to the invention and having essentially the same properties as the polypeptide as shown in the respective line in Table II, application no. 12, columns 5 or 8.

[64106] for the disclosure of this paragraph see [0359.1.8.8] above.

[64107] A nucleic acid molecule encoding a homolog to a polypeptide depicted in the respective line in Table II, application no. 12, columns 5 or 8 can be created by introducing one or more nucleotide substitutions, additions or deletions into the nucleic acid molecule of the present invention, in particular of Table I, application no. 12, columns 5 or 8, in the respective line, such that one or more amino acid substitutions, additions or deletions are introduced into the encoded protein. Mutations can be introduced into the nucleic acid molecules as depicted in the respective line in Table I, application no. 12, columns 5 or 8, preferably the coding region thereof, by standard techniques, such as site-directed mutagenesis, PCR-mediated mutagenesis or other methods known to the person skilled in the art.

[64108] [0361.1.8.12] to [0363.1.8.12] for the disclosure of these paragraphs see [0361.1.8.8] to [0363.1.8.8] above.

[64109] Homologues of the nucleic acid sequences used, with the sequences shown in the respective line in Table I, application no. 12, columns 5 or 8, preferably the coding region thereof, comprise also allelic variants with at least approximately 30%, 35%, 40%, 45%, 50%, 55%, 60%, 65%, 70%, 75%, 80%, 85%, 90%, 91%, 92%, 93%, 94% 95%. 96%, 97%, 98%, 99%, 99.5% or more % homology with one of the nucleotide sequences shown or the abovementioned derived nucleic acid sequences or their homologues or derivatives or parts of these. Allelic variants encompass in particular functional variants which can be obtained by deletion, insertion or substitution of nucleotides from the sequences shown in the respective line, preferably in Table I, columns 5 or 8, preferably the coding region thereof, or from the derived nucleic acid sequences, the intention being, however, that the enzymatic activity or the biological activity of the resulting proteins synthesized is advantageously retained or increased.

[64110] In one embodiment of the present invention, the nucleic acid molecule of the invention or used in the process of the invention comprises the sequences shown in the respective line in any of the Table I, application no. 12, columns 5 or 8, preferably the coding region thereof, fragments or homologs thereof. It is preferred that the nucleic acid molecule comprises as little as possible other nucleotides not shown in the respective line in any one of Table I, application no. 12, columns 5 or 8, preferably the coding region thereof, fragments or homologs thereof. In one embodiment, the nucleic acid molecule comprises less than 500, 400, 300, 200, 100, 90, 80, 70, 60, 50 or 40 further nucleotides. In a further embodiment, the nucleic acid molecule comprises less than 30, 20 or 10 further nucleotides. In one embodiment, the nucleic acid molecule used in the process of the invention is identical to the sequences shown in the respective line in Table I, application no. 12, columns 5 or 8, preferably the coding region thereof.

[64111] Also preferred is that the nucleic acid molecule used in the process of the invention encodes a polypeptide comprising the sequence shown in the respective line in Table II, application no. 12, columns 5 or 8, fragments or homologs thereof. In one embodiment, the nucleic acid molecule encodes less than 150, 130, 100, 80, 60, 50, 40 or 30 further amino acids. In a further embodiment, the encoded polypeptide comprises less than 20, 15, 10, 9, 8, 7, 6 or 5 further amino acids. In one embodiment used in the inventive process, the encoded polypeptide is identical to the sequences shown in the respective line in Table II, application no. 12, columns 5 or 8.

[64112] In one embodiment, the nucleic acid molecule of the invention or used in the process encodes a polypeptide comprising the sequence shown in the respective line in Table II, application no. 12, columns 5 or 8, or fragments or homologs thereof, and comprises less than 100 further nucleotides. In a further embodiment, said nucleic acid molecule comprises less than 30 further nucleotides. In one embodiment, the nucleic acid molecule used in the process is identical to a coding sequence of the sequences shown in the respective line in Table I, application no. 12, columns 5 or 8.

[64113] Polypeptides (=proteins), which still have the essential biological or enzymatic activity of the polypeptide of the present invention conferring the production or the increased production of the respective fine chemical 2-hydroxybehenic acid, 2-hydroxypalmitic acid, 2-hydroxytetracosenoic acid (preferably 2-hydroxynervonic acid), behenic acid, cerebronic acid, eicosanoic acid, heptadecanoic acid, hexadecadienoic acid, hexadecatrienoic acid, lauric acid, myristic acid, nervonic acid, or oleic acid, respectively, as compared to a corresponding, e.g. non-transformed, wild type non-human organism, like a microorganism or a plant cell, plant or part thereof, i.e. whose activity is essentially not reduced, are polypeptides with at least 10%, 20%, 30%, 40%, 50%, 60%, 70%, 80%, 90%, 95% or more of the wild type biological activity or enzymatic activity, advantageously, the activity is essentially not reduced in comparison with the activity of a polypeptide shown in the respective line in Table II, application no. 12, columns 5 or 8 expressed under identical conditions.

[64114] Homologues of nucleic acid molecules shown in the respective line in Table I, application no. 12, columns 5 or 8, preferably the coding region thereof, or fragments thereof, or of the derived sequences shown in the respective line in Table II, application no. 12, columns 5 or 8, or fragments thereof, also mean truncated sequences, cDNA, single-stranded DNA or RNA of the coding and noncoding DNA sequence. Homologues of said sequences are also understood as meaning derivatives, which comprise noncoding regions such as, for example, UTRs, introns, terminators, enhancers or promoter variants. The promoters upstream of the nucleotide sequences stated can be modified by one or more nucleotide substitution(s), insertion(s) and/or deletion(s) without, however, interfering with the functionality or activity either of the promoters, the open reading frame (=ORF) or with the 3′-regulatory region such as terminators or other 3′-regulatory regions, which are far away from the ORF. It is furthermore possible that the activity of the promoters is increased by modification of their sequence, or that they are replaced completely by more active promoters, even promoters from heterologous organisms. Appropriate promoters are known to the person skilled in the art and are mentioned herein below.

[64115] [0370.1.8.12] to [0379.1.8.12] for the disclosure of these paragraphs see [0370.1.8.8] to [0379.1.8.12] above.

[64116] Moreover, a native polypeptide conferring the increase of the respective fine chemical 2-hydroxybehenic acid, 2-hydroxypalmitic acid, 2-hydroxytetracosenoic acid (preferably 2-hydroxynervonic acid), behenic acid, cerebronic acid, eicosanoic acid, heptadecanoic acid, hexadecadienoic acid, hexadecatrienoic acid, lauric acid, myristic acid, nervonic acid, or oleic acid, respectively, in a non-human organism or a part thereof can be isolated from cells (e.g., endothelial cells), for example using the antibody of the present invention as described below, in particular, an antibody against proteins having 2,3-dihydroxyphenylpropionate 1,2-dioxygenase, 2-C-methyl-D-erythritol 4-phosphate cytidylyltransferase, 30S ribosomal protein S3, 3-ketoacyl-CoA thiolase, 3-oxoacyl-[acyl-carrier-protein] reductase, 3-oxoacyl-[acyl-carrier-protein] synthase, 40S ribosomal protein S17, ABC transporter component, ABC transporter permease protein, acetyl-coenzyme A synthetase, acid shock protein, acyl-CoA synthase, acyl-desaturase, adenosine kinase, aldolase, alkaline phosphatase isozyme conversion protein, amino acid ABC transporter permease protein, aminotransferase, ankyrin repeat protein, At2g33510-protein, ATPase epsilon subunit, ATP-binding component of a transport system, b0050-protein, b0249-protein, b0371-protein, b0518-protein, b0801-protein, b1046-protein, b1346-protein, b1470-protein, b1522-protein, b1670-protein, b1703-protein, b1837-protein, b2032-protein, b2099-protein, b2107-protein, b2126-protein, b2139-protein, b2360-protein, b2474-protein, b2513-protein, b2654-protein, b3442-protein, b3644-protein, b3812-protein, b3944-protein, b4023-protein, b4205-protein, beta-hydroxylase, betaine aldehyde dehydrogenase, bifunctional protein (phosphoribosyltransferase and regulatory protein), bifunctional purine biosynthesis protein, binding-protein-dependent transport systems inner membrane component, biotin synthase, calcium-dependent protein kinase, carbon dioxide concentrating mechanism protein, cardiolipin synthase, CDP-diacylglycerol-serine O-phosphatidyltransferase, cell division control protein, cell wall protein, chlorophyllase, citrate synthase, coproporphyrinogen III oxidase, cyclin, cystathionine gamma-synthase, cysteine synthase A, dihydrolipoamide dehydrogenase, DNA mismatch repair protein, DnaJ-like chaperone, electron transport complex protein, Elongation factor Tu, ethanolamine utilization protein, F-box protein, ferredoxin, fructose 1,6-bisphosphatase, fumarylacetoacetate hydrolase, glutamate 5-kinase, glutamate-ammonia-ligase, glutaredoxin, glycerol-3-phosphate dehydrogenase, glycine cleavage system H protein, GM02LC38418-protein, heat shock protein, heat shock transcription factor, HesB/YadR/YfhF family protein, homocitrate synthase, hydrolase, isocitrate dehydrogenase, lipoprotein precursor, malate dehydrogenase, malonyl CoA-acyl carrier protein transacylase, metal-dependent hydrolase, molecular chaperone, molecular chaperone portein, monothiol glutaredoxin, multiple antibiotic resistance protein, murein transglycosylase, N-acetyl-gamma-glutamyl-phosphate reductase, NADP-dependent malic enzyme, outer-membrane lipoprotein precursor, oxidoreductase, permease protein of ABC transporter, phage-related repressor protein, phosphatase, phosphate import ATP-binding protein, phosphatidylserine synthase, phospho-2-dehydro-3-deoxyheptonate aldolase, phosphoadenosine phosphosulfate reductase, phosphotransferase, phosphotransferase system component, polygalacturonase, protein kinase, protein phosphatase, purine nucleoside phosphorylase, pyridoxamine kinase, recombinase A, sec-independent protein translocase, Sec-independent protein translocase subunit, sensor histidine kinase, sensor kinase, sll0281-protein, sll0406-protein, small nuclear ribonucleoprotein , sodium/proton antiporter, squalene monooxygenase, sugar transport system permease protein, threonine dehydratase, transcription factor, transcriptional regulator, transcriptional regulator protein, transport protein, tryptophan synthase alpha chain, TTC1386-protein, vacuolar processing enzyme, ycl027w-protein, ycl049c-protein, ydr273w-protein, ydr339c-protein, YFL019C-protein, ygl237c-protein, YGR104C-protein, yhr033w-protein, YJL127W-A-protein, ylr326w-protein, yml083c-protein, yml084w-protein, or ynl321w-protein activity, respectively, or an antibody against polypeptides as shown in the respective line in Table II, application no. 12, columns 5 or 8, or fragments or homologs thereof which can be produced by standard techniques utilizing the polypeptid of the present invention or fragment thereof, i.e., the polypeptide of this invention (FCRP). Preferred are monoclonal antibodies.

[64117] for the disclosure of this paragraph see [0381.1.8.8] above.

[64118] In one embodiment, the present invention relates to a polypeptide as depicted in the respective line in Table II, especially in Table IIA or especially in Table IIB, application no. 12, columns 5 or 8, or fragment or homolog thereof or as coded by the nucleic acid molecule shown in the respective line in Table I, especially Table IA or especially Table IB, application no. 12, columns 5 or 8, preferably the coding region thereof, or fragment or homolog thereof.

[64119] In an embodiment, the present invention relates to a polypeptide comprising or consisting of a consensus sequence shown in the respective line in Table IV, application no. 12, column 8 or at least one polypeptide motif shown in the respective line in Table IV, application no. 12, column 8.

[64120] In an embodiment thereof, the present invention relates to a polypeptide comprising or consisting of a consensus sequence shown in the respective line in Table IV, application no. 12, column 8 or comprising at least one polypeptide motif shown in the respective line in Table IV, application no. 12, column 8, whereby not more than 20, 15, 10, 9, 8, 7, 6, 5, 4, 3, 2, or 1, or 0 of the amino acids can be replaced by any amino acid.

[64121] In another embodiment thereof, the present invention relates to a polypeptide comprising or consisting of a consensus sequence shown in the respective line in Table IV, application no. 12, column 8 or comprising at least one polypeptide motif shown in the respective line in Table IV, application no. 12, column 8, whereby not more than 15%, 10%, 5%, 4%, 3%, 2% or1% or 0% of the amino acids defined as distinct specific amino acids are/is replaced by another amino acid.

[64122] In another embodiment thereof, the present invention relates to a polypeptide comprising or consisting of a consensus sequence shown in the respective line in Table IV, application no. 12, column 8 or comprising at least one polypeptide motif shown in the respective line in Table IV, application no. 12, column 8, whereby not more than 20, 15, 10, 9, 8, 7, 6, 5, 4, 3, 2, or 1, or 0 amino acids are inserted into the consensus sequence or polypeptide motif.

[64123] In an embodiment of the present invention, the polypeptide of the present invention comprises or consists of a consensus sequence or at least one polypeptide motif shown in the respective line in Table IV, application no. 12, column 8, whereby said polypeptide distinguishes over the sequence depicted in the respective line in Table II, application no. 12, columns 5 or 8 by one or more amino acids. In one embodiment, said polypeptide of the invention distinguishes over the sequence shown in the respective line in Table II, application no. 12, columns 5 and 8 by more than 5, 6, 7, 8 or 9 amino acids, preferably by more than 10, 15, 20, 25 or 30 amino acids, even more preferred are more than 40, 50, or 60 amino acids and, preferably, the sequence of the polypeptide of the invention distinguishes from the sequence shown in the respective line in Table II, application no. 12, columns 5 and 8 by not more than 80%, 70%, 60%, 50%, 40%, 30%, 20%, 10%, 5%, 4%, 3%, 2%, 1% or 0.5%. In another embodiment, said polypeptide of the invention does not consist of the sequence shown in the respective line in Table II, application no. 12, columns 5 and 8.

[64124] In an embodiment, the invention relates to a polypeptide conferring an increase in the respective fine chemical 2-hydroxybehenic acid, 2-hydroxypalmitic acid, 2-hydroxytetracosenoic acid (preferably 2-hydroxynervonic acid), behenic acid, cerebronic acid, eicosanoic acid, heptadecanoic acid, hexadecadienoic acid, hexadecatrienoic acid, lauric acid, myristic acid, nervonic acid, or oleic acid, respectively, in a non-human organism, especially a microorganism or a plant, or a part thereof, being encoded by the nucleic acid molecule of the invention or used in the process of the invention and having a sequence which distinguishes over the sequence as shown in the respective line in Table II, application no. 12, columns 5 or 8 by one or more amino acids (but not exceeding 5%, preferably 4%, 3%, 2%, 1%, 0.5%, 0.2% or 0.1%). In an embodiment, said polypeptide of the invention does not comprise or consist of the sequence shown in the respective line in Table II, application no. 12, columns 5 or 8.

[64125] In an embodiment, said polypeptide of the present invention is less than 100%, 99.999%, 99.99%, 99.9% or 99% identical. In one embodiment, said polypeptide which differs at least in one or more amino acids (but not exceeding 5%, preferably 4%, 3%, 2%, 1%, 0.5%, 0.2% or 0.1%) from the polypeptide shown in the respective line in Table II, application no. 12, columns 5 and 8 does not comprise a protein of the sequence shown in the respective line in Table II A and/or II B, application no. 12, columns 5 or 8.

[64126] In an embodiment, the present invention relates to a polypeptide having the activity of the protein as shown in the respective line in Table II, application no. 12, column 3, which distinguishes over the sequence depicted in the respective line in Table II, application no. 12, columns 5 or 8 by one or more amino acids, preferably by more than 5, 6, 7, 8 or 9 amino acids, preferably by more than 10, 15, 20, 25 or 30 amino acids, even more preferred are more than 40, 50, or 60 amino acids and, preferably, the sequence of the polypeptide of the invention distinguishes from the sequence shown in the respective line in Table II, application no. 12, columns 5 and 8 by not more than 80%, 70%, 60%, 50%, 40%, 30%, 20%, 10%, 5%, 4%, 3%, 2%, 1% or 0.5%.

[64127] In another embodiment the polypeptide of the invention takes the form of a preprotein consisting of a plastidial or mitochondrial transit peptide joint to a polypeptide having the activity of the protein as shown in Table II, column 3, from which the transit peptide is preferably cleaved off upon transport of the preprotein into the organelle for example into the plastid or mitochondrion.

[64128] In another embodiment the polypeptide of the invention takes not the form of a preprotein.

[64129] [0390.1.8.12] to [0391.1.8.12] for the disclosure of these paragraphs see [0390.1.8.8] to [0391.1.8.8] above.

[64130] A polypeptide of the invention can participate in the process of the present invention. The polypeptide or a portion thereof comprises preferably an amino acid sequence, which is sufficiently homologous to an amino acid sequence shown in the respective line in Table II A and/or II B, application no. 12, columns 5 or 8.

[64131] Further, the polypeptide can have an amino acid sequence which is encoded by a nucleotide sequence which hybridizes, preferably hybridizes under stringent conditions as described above, to a nucleotide sequence of the nucleic acid molecule of the present invention. Accordingly, the polypeptide has an amino acid sequence which is encoded by a nucleotide sequence that is at least about 35%, 40%, 45%, 50%, 55%, 60%, 65%, 70%, 75%, 80%, 85%, 90%, 91%, 92%, 93%, 94%, 95%, 96%, 97%, 98%, 99%, 99.5% or more homologous to one of the amino acid sequences as shown in the respective line in Table II A and/or II B, application no. 12, columns 5 or 8, or fragments thereof. The preferred polypeptide of the present invention preferably possesses at least one of the activities according to the invention and described herein. A preferred polypeptide of the present invention includes an amino acid sequence encoded by a nucleotide sequence which hybridizes, preferably hybridizes under stringent conditions, to a nucleotide sequence shown in the respective line in Table I A and/or I B, application no. 12, columns 5 or 8, preferably the coding region thereof, or fragments thereto or which is homologous thereto, as defined above.

[64132] The polypeptide of the present invention can vary from the sequences shown in the respective line in Table II A and/or II B, application no. 12, columns 5 or 8 in amino acid sequence due to natural variation or mutagenesis, as described in detail herein. Accordingly, the polypeptide comprise an amino acid sequence which is at least about 35%, 40%, 45%, 50%, 55%, 60%, 65%, 70%, 75%, 80%, 85% or 90, 91%, 92%, 93%, 94%, 95%, 96%, 97%, 98%, 99%, 99.5% or more homologous to an entire amino acid sequence shown in the respective line in Table II A and/or II B, application no. 12, columns 5 or 8.

[64133] Biologically active portions of a polypeptide of the present invention include peptides comprising amino acid sequences derived from the amino acid sequence of the polypeptide of the present invention or used in the process of the present invention, e.g., the amino acid sequence shown in the respective line in Table II, application no. 12, columns 5 or 8 or the amino acid sequence of a protein homologous thereto, which include fewer amino acids than a full length polypeptide of the present invention or used in the process of the present invention or the full length protein which is homologous to a polypeptide of the present invention or used in the process of the present invention depicted herein, and exhibit at least one activity of a polypeptide of the present invention or used in the process of the present invention.

[64134] for the disclosure of this paragraph see [0396.1.8.8] above.

[64135] Manipulation of the nucleic acid molecule of the invention may result in the production of a protein having differences from the protein as shown in the respective line in Table II, application no. 12, column 5 or 8. Differences shall mean at least one amino acid different from the sequences as shown in the respective line in Table II, application no. 12, column 5 or 8, preferably at least 2, 3, 4, 5, 6, 7, 8, 9 or 10 amino acids (especially but not exceeding 0.1%, preferably 0.2%, 0.5%, 1%, 2%, 3% 4% or 5%), more preferably at least 15, 20, 25, 30, 35, 40, 45 or 50 amino acids (especially but not exceeding 0.5%, preferably 1%, 2%, 3% 4%, 5%, 10% or 25%) different from the sequences as shown in the respective line in Table II, application no. 12, column 5 or 8. These proteins may be improved in efficiency or activity, or may be more stable and therefore present in greater numbers in the cell as compared to the wild-type cell.

[64136] Any mutagenesis strategies for the polypeptide of the present invention or the polypeptide used in the process of the present invention to result in increasing said activity are not meant to be limiting; variations on these strategies will be readily apparent to one skilled in the art. Using such strategies, and incorporating the mechanisms disclosed herein, the nucleic acid molecule and polypeptide of the invention may be utilized to generate algae, ciliates, fungi, other microorganisms like C. glutamicum or plants or parts thereof, expressing proteins as shown in the respective line in Table II, application no. 12, column 5 or 8, or mutated proteins thereof. The nucleic acid molecules and polypeptide molecules of the invention are expressed such that the yield, production, and/or efficiency of production of a desired compound is improved.

[64137] [0399.1.8.12] to [0401.1.8.12] for the disclosure of these paragraphs see [0399.1.8.8] to [0401.1.8.8] above.

[64138] In one embodiment, a protein (=polypeptide) as shown in the respective line in Table II, application no. 12, column 5 or 8 refers to a polypeptide having an amino acid sequence corresponding to the polypeptide of the invention, especially to a polypeptide as shown in Table II, application no. 12, columns 5 or 8 or homologs thereof, or used in the process of the invention, whereas a “non-inventive protein or polypeptide” or “other polypeptide” refers to a polypeptide having an amino acid sequence corresponding to a protein which is not substantially homologous to a polypeptide of the invention, preferably which is not substantially homologous to a polypeptide or protein as shown in the respective line in Table II, application no. 12, column 5 or 8 or homologs thereof, e.g., a protein which does not confer the activity described herein and which is derived from the same or a different organism.

[64139] [0403.1.8.12] to [0409.1.8.12] for the disclosure of these paragraphs see [0403.1.8.8] to [0409.1.8.8] above.

[64140] As the nucleic acid molecules of the invention and/or the expression thereof is related to the synthesis of the respective fine chemical 2-hydroxybehenic acid, 2-hydroxypalmitic acid, 2-hydroxytetracosenoic acid (preferably 2-hydroxynervonic acid), behenic acid, cerebronic acid, eicosanoic acid, heptadecanoic acid, hexadecadienoic acid, hexadecatrienoic acid, lauric acid, myristic acid, nervonic acid, or oleic acid its function as a probe extends to the detection of microorganisms, plant tissues, plants, plant variets, plant ecotypes or plant genera with varying, advantageously increased, capability or potential for synthesis of the respective fine chemical 2-hydroxybehenic acid, 2-hydroxypalmitic acid, 2-hydroxytetracosenoic acid (preferably 2-hydroxynervonic acid), behenic acid, cerebronic acid, eicosanoic acid, heptadecanoic acid, hexadecadienoic acid, hexadecatrienoic acid, lauric acid, myristic acid, nervonic acid, or oleic acid. Therefore in one embodiment the present invention relates to a method for analyzing the capability or potential of a plant tissue, a plant, a plant variety or ecotype to produce the respective fine chemical 2-hydroxybehenic acid, 2-hydroxypalmitic acid, 2-hydroxytetracosenoic acid (preferably 2-hydroxynervonic acid), behenic acid, cerebronic acid, eicosanoic acid, heptadecanoic acid, hexadecadienoic acid, hexadecatrienoic acid, lauric acid, myristic acid, nervonic acid, or oleic acid by using the respective antibody of the invention as a probe to detect the amount of the polypeptide encoded by said nucleic acid molecule of the invention in a non-human organism in comparison to another organism.

[64141] Therefore in one embodiment the invention relates to a method to probe a non-human organism for its capability for the production of the respective fine chemical comprising the steps of
[64142] a) analyzing the sequence and/or the expression of the respective nucleic acid molecule of the invention in least two non-human organisms which differ in the capability to produce the respective fine chemical;
[64143] b) associate the different sequence and/or expression level of the nucleic acid molecules of the invention with their different capability to produce the respective fine chemical;
[64144] c) analyze the sequence and/or the expression of the nucleic acid molecule of the invention in at least a third non-human organism;
[64145] d) predict the capability of the at least third organism to produce the respective fine chemical based by comparing the sequence and/or expression of the nucleic acid of the invention to the sequences and/or expression levels of the nucleic acid molecule of the invention of the at least two organisms analyzed in step a.

[64146] [0411.1.8.12] to [0430.1.8.12] for the disclosure of these paragraphs see [0411.1.8.8] to [0430.1.8.8] above.

[64147] Accordingly the present invention relates to any cell transgenic for any nucleic acid characterized as part of the invention, e.g. conferring the increase of the respective fine chemical 2-hydroxybehenic acid, 2-hydroxypalmitic acid, 2-hydroxytetracosenoic acid (preferably 2-hydroxynervonic acid), behenic acid, cerebronic acid, eicosanoic acid, heptadecanoic acid, hexadecadienoic acid, hexadecatrienoic acid, lauric acid, myristic acid, nervonic acid, or oleic acid in a cell or a non-human organism or a part thereof, e.g. the nucleic acid molecule of the invention, the nucleic acid construct of the invention, the vector of the invention, the expression cassette according to the invention, or a nucleic acid molecule encoding the polypeptide of the invention, e.g. encoding a polypeptide having an activity as the protein as shown in the respective line in Table II, application no. 12, column 3. Due to the above-mentioned activity the respective fine chemical 2-hydroxybehenic acid, 2-hydroxypalmitic acid, 2-hydroxytetracosenoic acid (preferably 2-hydroxynervonic acid), behenic acid, cerebronic acid, eicosanoic acid, heptadecanoic acid, hexadecadienoic acid, hexadecatrienoic acid, lauric acid, myristic acid, nervonic acid, or oleic acid content in a cell or a non-human organism is increased. For example, due to modulation or manipulation, the cellular activity is increased, in a preferred embodiment in organelles such as plastids or mitochondria, e.g. due to an increased expression or specific activity or specific targeting of the subject matters of the invention in a cell or a non-human organism or a part thereof especially in organelles such as plastids or mitochondria, or in another embodiment in the cytosol. Transgenic for a polypeptide having a protein or a protein activity means herein that due to modulation or manipulation of the genome, the activity of protein as shown in the respective line in Table II, application no. 12, column 3 or a protein as shown in the respective line in Table II, application no. 12, column 3-like activity is increased in the cell or non-human organism or part thereof, especially in organelles such as plastids or mitochondria, or especially in the cytosol. Examples are described above in context with the process of the invention.

[64148] for the disclosure of this paragraph see [0432.1.8.8] above.

[64149] A naturally occurring expression cassette—for example the naturally occurring combination of the promoter of the gene encoding a protein as shown in the respective line in Table II, application no. 12, column 5 or 8, preferably the coding region thereof, or fragments or homologs thereof with the corresponding encoding gene—becomes a transgenic expression cassette when it is modified by non-natural, synthetic “artificial” methods such as, for example, mutagenesis. Such methods have been described (U.S. Pat. No. 5,565,350; WO 00/15815; also see above).

[64150] [0434.1.8.12] to [0435.1.8.12] for the disclosure of these paragraphs see [0434.1.8.8] to [0435.1.8.8] above.

[64151] Transgenic plants comprising the respective fine chemical(s) synthesized in the process according to the invention can be marketed directly without isolation of the fine chemical synthesized. In the process according to the invention, plants are understood as meaning all plant parts, plant organs such as leaf, stalk, root, tubers or seeds or propagation material or harvested material or the intact plant. In this context, the seed encompasses all parts of the seed such as the seed coats, epidermal cells, seed cells, endosperm or embryonic tissue. The fine chemical produced in the process according to the invention may, however, also be isolated from the plant. In case of 2-hydroxybehenic acid, 2-hydroxypalmitic acid, 2-hydroxytetracosenoic acid (preferably 2-hydroxynervonic acid), behenic acid, cerebronic acid, eicosanoic acid, heptadecanoic acid, hexadecadienoic acid, hexadecatrienoic acid, lauric acid, myristic acid, nervonic acid, or oleic acid, respectively, this can be in free form or bound to proteins. Fine chemical(s) produced by this process can be harvested by harvesting the non-human organisms either from the culture in which they grow or from the field. For example, this can be done via squeezing, grinding and/or extraction, salt precipitation and/or ion-exchange chromatography of the plant parts, preferably the plant seeds, plant fruits, plant tubers and the like.

[64152] [0437.1.8.12] to [0454.1.8.12] for the disclosure of these paragraphs see [0437.1.8.8] to [0454.1.8.8] above.

[64153] In one embodiment, the present invention relates to a method for the identification of a gene product conferring the production of or an increase in the fine chemical production in a non-human cell, comprising the following steps:
[64154] (a) contacting, e.g. hybridizing, a, some or all nucleic acid molecules of a sample, e.g. cells, tissues, plants or microorganisms or a nucleic acid library, which can contain a candidate gene encoding a gene product conferring the production of or an increase in the fine chemical after expression, with the nucleic acid molecule of the present invention as shown in the respective line in column 5 or 8 of Table I A or B of application no. 12, preferably the coding region thereof, or a fragment or homolog thereof;
[64155] (b) identifying the nucleic acid molecules, which hybridize under relaxed stringent conditions with the nucleic acid molecule of the present invention in particular to the nucleic acid molecule sequence shown in the respective line in Table I, application no. 12, columns 5 or 8, preferably the coding region thereof, of a fragment or a homolog thereof, preferably in Table I B, application no. 12, columns 5 or 8, preferably the coding region thereof, of a fragment or a homolog thereof, and, optionally, isolating the full length cDNA clone or complete genomic clone;
[64156] (c) introducing the candidate nucleic acid molecules or a fragment thereof in host cells, preferably in a plant cell or a microorganism, appropriate for producing the fine chemical;
[64157] (d) expressing the identified nucleic acid molecules in the host cells for which the production of or the increased production of the fine chemical is desired;
[64158] (e) assaying the fine chemical level in the non-human host cells; and
[64159] (f) identifying the nucleic acid molecule and/or its gene product which expression confers the production of or an increase in the fine chemical level in the non-human host cell after expression compared to the wild type.

[64160] for the disclosure of this paragraph see [0456.1.8.8] above.

[64161] In another embodiment, the present invention relates to a method for the identification of a gene product conferring the production of or an increase in the fine chemical production in a cell, comprising the following steps:
[64162] (a) identifying a nucleic acid molecule of a non-human organism, which is at least 20%, 25%, 30%, 35%, 40%, 50%, 60%, 70%, 80%, 90%, 95%, 96%, 97%, 98%, 99%, 99.5% or more homolog to the nucleic acid molecule encoding a polypeptide comprising the polypeptide molecule as shown in the respective line in column 5 or 8 of Table II, application no. 12, or comprising a consensus sequence or a polypeptide motif as shown in the respective line in column 8 of Table IV, application no. 12, or being encoded by a nucleic acid molecule comprising a polynucleotide as shown in the respective line in column 5 or 8 of Table I, application no. 12, preferably the coding region thereof, or a homologue thereof as described herein, for example via homology search in a data bank;
[64163] (b) introducing the candidate nucleic acid molecule in non-human host cells, preferably in a plant cell or a microorganism, appropriate for producing the fine chemical;
[64164] (c) expressing the identified nucleic acid molecule in the non-human host cells;
[64165] (d) assaying the fine chemical level in the non-human host cells; and
[64166] (e) identifying the nucleic acid molecule and its gene product which expression confers the production of or an increase in the fine chemical level in the non-human host cell after expression compared to the wild type.

[64167] for the disclosure of this paragraph see [0458.1.8.8] above.

[64168] Further, the nucleic acid molecules disclosed herein, in particular the nucleic acid molecules shown in the respective line in column 5 or 8 of Table I A or B of application no. 12, may be sufficiently homologous to the sequences of related species such that these nucleic acid molecules may serve as markers for the construction of a genomic map in related organism or for association mapping. Furthermore natural variation in the genomic regions corresponding to nucleic acids disclosed herein, in particular the nucleic acid molecule shown in the respective line in column 5 or 8 of Table I A or B, of application no. 12 or homologous thereof, may lead to variation in the activity of the proteins disclosed herein, in particular the proteins comprising polypeptides as shown in the respective lines in column 5 or 8 of Table II A or B, of application no. 12 or their homologous, or comprising the consensus sequence or the polypeptide motif as shown in the respective line in column 8 of Table IV, and in consequence in a natural variation of an increased fine chemical production.

[64169] In consequence natural variation eventually also exists in form of more active allelic variants leading already to a relative increase in the fine chemical. Different variants of the nucleic acid molecules disclosed herein, in particular the nucleic acid molecules comprising the nucleic acid molecules as shown in the respective line in column 5 or 8 of Table I A or B of application no. 12, preferably the coding region thereof, which corresponds to different levels of increase in fine chemical, e.g. different levels of increase in fine chemical, can be indentified and used for marker assisted breeding for an enhanced production of the fine chemical.

[64170] Natural variation may also exist in the regulatory regions, e.g. the promoters of the natural genes comprising the nucleic acid molecules as shown in the respective line column 5 or 8 of Table I A or B of application no. 12, preferably the coding region thereof, which can similarly correspond to different levels of increase in the fine chemical, e.g. different levels of increase in the fine chemical can be identified and used for marker assisted breeding for an enhanced production of the fine chemical.

[64171] Accordingly, the present invention relates to a method for breeding plants for the production of the fine chemical, comprising
[64172] (a) selecting a first plant variety with an increased production of the fine chemical, e.g. based on an increased expression of a nucleic acid molecule of the invention as disclosed herein, in particular of a nucleic acid molecule comprising a nucleic acid molecule as shown in the respective line in column 5 or 8 of Table I A or B of application no. 12, preferably the coding region thereof, or fragments or homologs thereof, or a polypeptide comprising a polypeptide as shown in the respective line in column 5 or 8 of Table II A or B of application no. 12, or fragments or homologs thereof, or comprising a consensus sequence or a polypeptide motif as shown in the respective line in column 8 of Table IV, or a homolog thereof, as described herein;
[64173] (b) associating the level of increased production of the fine chemical, with the expression level or the genomic structure of a gene encoding said polypeptide or said nucleic acid molecule;
[64174] (c) crossing the first plant variety with a second plant variety, which significantly differs in its level of fine chemical; and
[64175] (d) identifying, which of the offspring varieties has got increased production of the fine chemical by the expression level of said polypeptide or nucleic acid molecule or the genomic structure of the gene(s) encoding said polypeptide or nucleic acid molecule of the invention.

[64176] [0462.1.8.12] to [0482.1.8.12] for the disclosure of these paragraphs see [0462.1.8.8] to [0482.1.8.8] above.

[64177] A special embodiment of this invention is related to genes which increase or generate the production of the fine chemical oleic acid on the one hand and of 2-hydroxy-behenic acid, 2-hydroxytetracosenic acid (preferably 2-hydroxynervonic acid), behenic acid, cerebronic acid and/or nervonic acid on the other hand in plant cells, plants or part thereof. Phenotypes thereto are associated with yield of plants (=yield related phenotypes). In accordance with the invention, therefore, the respective genes identified in Table I, wherein in column 7 oleic acid, 2-hydroxybehenic acid, 2-hydroxytetracosenic acid (preferably 2-hydroxynervonic acid), behenic acid, cerebronic acid or nervonic acid is mentioned, especially the coding region thereof, or homologs or fragments thereof, may be employed to enhance any yield-related phenotype. Increased yield may be determined in field trials of transgenic plants and suitable control plants. Alternatively, a transgene's ability to increase yield may be determined in a model plant. An increased yield phenotype may be determined in the field test or in a model plant by measuring any one or any combination of the following phenotypes, in comparison to a control plant: yield of dry harvestable parts of the plant, yield of dry aerial harvestable parts of the plant, yield of underground dry harvestable parts of the plant, yield of fresh weight harvestable parts of the plant, yield of aerial fresh weight harvestable parts of the plant yield of underground fresh weight harvestable parts of the plant, yield of the plant's fruit (both fresh and dried), grain dry weight, yield of seeds (both fresh and dry), and the like.

[64178] The most basic yield-related phenotype is increased yield associated with the presence of the gene or a homolog or a fragment thereof as a transgene in the plant, i.e., the intrinsic yield of the plant. Intrinsic yield capacity of a plant can be, for example, manifested in a field test or in a model system by demonstrating an improvement of seed yield (e.g. in terms of increased seed/grain size, increased ear number, increased seed number per ear, improvement of seed filling, improvement of seed composition, embryo and/or endosperm improvements, and the like); modification and improvement of inherent growth and development mechanisms of a plant (such as plant height, plant growth rate, pod number, pod position on the plant, number of internodes, incidence of pod shatter, efficiency of nodulation and nitrogen fixation, efficiency of carbon assimilation, improvement of seedling vigour/early vigour, enhanced efficiency of germination (under non-stressed conditions), improvement in plant architecture.

[64179] Increased yield-related phenotypes may also be measured to determine tolerance to abiotic environmental stress. Abiotic stresses include drought, low temperature, salinity, osmotic stress, shade, high plant density, mechanical stresses, and oxidative stress, and yield-related pheno-types are encompassed by tolerance to such abiotic stresses. Additional phenotypes that can be monitored to determine enhanced tolerance to abiotic environmental stress include, without limitation, wilting; leaf browning; loss of turgor, which results in drooping of leaves or needles stems, and flowers; drooping and/or shedding of leaves or needles; the leaves are green but leaf angled slightly toward the ground compared with controls; leaf blades begun to fold (curl) inward; premature senescence of leaves or needles; loss of chlorophyll in leaves or needles and/or yellowing. Any of the yield-related phenotypes described above may be monitored in field tests or in model plants to demonstrate that a transgenic plant has increased tolerance to abiotic environmental stress.

[64180] A polypeptide conferring an yield-increasing activity can be encoded by a respective nucleic acid sequence as shown in Table I, column 5 or 8, and/or comprises or consists of a respective polypeptide as depicted in Table II, column 5 and 8, and/or can be amplified with the respective primer set shown in Table III, column 8, in case in column 7 oleic acid, 2-hydroxybehenic acid, 2-hydroxytetracosenic acid (preferably 2-hydroxynervonic acid), behenic acid, cerebronic acid or nervonic acid is indicated.

[64181] “Improved adaptation” to environmental stress like e.g. freezing and/or chilling temperatures refers to an improved plant performance under environmental stress conditions.

[64182] A modification, i.e. an increase, can be caused by endogenous or exogenous factors. For example, an increase in activity in an organism or a part thereof can be caused by adding a gene product or a precursor or an activator or an agonist to the media or nutrition or can be caused by introducing said subjects into an organism, transient or stable. Furthermore such an increase can be reached by the introduction of the respective inventive nucleic acid sequence or the encoded protein in the correct cell compartment for example into the nucleus or cytoplasmic respectively or into plastids either by transformation and/or targeting.

[64183] The term “yield” as used herein generally refers to a measurable produce from a plant, particularly a crop. Yield and yield increase (in comparison to a non-transformed starting or wild-type plant) can be measured in a number of ways, and it is understood that a skilled person will be able to apply the correct meaning in view of the particular embodiments, the particular crop concerned and the specific purpose or application concerned. The terms “improved yield” or “increased yield” can be used interchangeable.

[64184] As used herein, the term “improved yield” or the term “increased yield” means any improvement in the yield of any measured plant product, such as grain, fruit or fiber. In accordance with the invention, changes in different phenotypic traits may improve yield. For example, and without limitation, parameters such as floral organ development, root initiation, root biomass, seed number, seed weight, harvest index, tolerance to abiotic environmental stress, leaf formation, phototropism, apical dominance, and fruit development, are suitable measurements of improved yield. Any increase in yield is an improved yield in accordance with the invention. For example, the improvement in yield can comprise a 0.1%, 0.5%, 1%, 3%, 5%, 10%, 15%, 20%, 30%, 40%, 50%, 60%, 70%, 80%, 90% or greater increase in any measured parameter. For example, an increase in the bushel/acre yield of soybeans or corn derived from a crop comprising plants which are transgenic for the nucleotides and polypeptides of Table I, in case in column 7 oleic acid, 2-hydroxybehenic acid, 2-hydroxytetracosenic acid (preferably 2-hydroxynervonic acid), behenic acid, cerebronic acid or nervonic acid is mentioned, as compared with the bushel/acre yield from untreated soybeans or corn cultivated under the same conditions, is an improved yield in accordance with the invention. The increased or improved yield can be achieved in the absence or presence of stress conditions.

[64185] For example, enhanced or increased “yield” refers to one or more yield parameters selected from the group consisting of biomass yield, dry biomass yield, aerial dry biomass yield, underground dry biomass yield, fresh-weight biomass yield, aerial fresh-weight biomass yield, underground fresh-weight biomass yield; enhanced yield of harvestable parts, either dry or fresh-weight or both, either aerial or underground or both; enhanced yield of crop fruit, either dry or fresh-weight or both, either aerial or underground or both; and preferably enhanced yield of seeds, either dry or fresh-weight or both, either aerial or underground or both.

[64186] Crop yield is defined herein as the number of bushels of relevant agricultural product (such as grain, forage, or seed) harvested per acre. Crop yield is impacted by abiotic stresses, such as drought, heat, salinity, and cold stress, and by the size (biomass) of the plant. Traditional plant breeding strategies are relatively slow and have in general not been successful in conferring increased tolerance to abiotic stresses. Grain yield improvements by conventional breeding have nearly reached a plateau in maize.

[64187] Accordingly, the yield of a plant can depend on the specific plant/crop of interest as well as its intended application (such as food production, feed production, processed food production, biofuel, biogas or alcohol production, or the like) of interest in each particular case. Thus, in one embodiment, yield is calculated as harvest index (expressed as a ratio of the weight of the respective harvestable parts divided by the total biomass), harvestable parts weight per area (acre, square meter, or the like); and the like. The harvest index, i.e., the ratio of yield biomass to the total cumulative biomass at harvest, in maize has remained essentially unchanged during selective breeding for grain yield over the last hundred years. Accordingly, recent yield improvements that have occurred in maize are the result of the increased total biomass production per unit land area. This increased total biomass has been achieved by increasing planting density, which has led to adaptive phenotypic alterations, such as a reduction in leaf angle, which may reduce shading of lower leaves, and tassel size, which may increase harvest index. Harvest index is relatively stable under many environmental conditions, and so a robust correlation between plant size and grain yield is possible. Plant size and grain yield are intrinsically linked, because the majority of grain biomass is dependent on current or stored photosynthetic productivity by the leaves and stem of the plant. As with abiotic stress tolerance, measurements of plant size in early development, under standardized conditions in a growth chamber or greenhouse, are standard practices to measure potential yield advantages conferred by the presence of a transgene.

[64188] Acccordingly, the yield of a plant can be increased by improving one or more of the yield-related phenotypes.

[64189] Such yield-related phenotypes or traits of a plant the improvement of which results in increased yield comprise, without limitation, the increase of the intrinsic yield capacity of a plant and/or increased stress tolerance, e.g. improved nutrient use efficiency, improved drought tolerance

[64190] For example, yield refers to biomass yield, e.g. to dry weight biomass yield and/or fresh-weight biomass yield. Biomass yield refers to the aerial or underground parts of a plant, depending on the specific circumstances (test conditions, specific crop of interest, application of interest, and the like). In one embodiment, biomass yield refers to the aerial and underground parts. Biomass yield may be calculated as fresh-weight, dry weight or a moisture adjusted basis. Biomass yield may be calculated on a per plant basis or in relation to a specific area (e.g. biomass yield per acre/ square meter/ or the like).

[64191] In other embodiment, “yield” refers to seed yield which can be measured by one or more of the following parameters: number of seeds or number of filled seeds (per plant or per area (acre/square meter/ or the like)); seed filling rate (ratio between number of filled seeds and total number of seeds); number of flowers per plant; seed biomass or total seeds weight (per plant or per area (acre/square meter/ or the like); thousand kernel weight (TKW; extrapolated from the number of filled seeds counted and their total weight; an increase in TKW may be caused by an increased seed size, an increased seed weight, an increased embryo size, and/or an increased endosperm). Other parameters allowing to measure seed yield are also known in the art. Seed yield may be determined on a dry weight or on a fresh weight basis, or typically on a moisture adjusted basis, e.g. at 15.5 percent moisture.

[64192] For example, the term “increased yield” means that the a plant, exhibits an increased growth rate, under conditions of abiotic environmental stress, compared to the corresponding wild-type plant.

[64193] An increased growth rate may be reflected inter alia by or confers an increased biomass production of the whole plant, or an increased biomass production of the aerial parts of a plant, or by an increased biomass production of the underground parts of a plant, or by an increased biomass production of parts of a plant, like stems, leaves, blossoms, fruits, and/or seeds.

[64194] Increased yield includes higher fruit yields, higher seed yields, higher fresh matter production, and/or higher dry matter production.

[64195] The term “increased yield” means that the plant, exhibits a prolonged growth under conditions of abiotic environmental stress, as compared to the corresponding, e.g. non-transformed, wild type organism. A prolonged growth comprises survival and/or continued growth of the plant, at the moment when the non-transformed wild type organism shows visual symptoms of deficiency and/or death.

[64196] When the plant of the invention is a corn plant increased yield for corn plants means, for example, increased seed yield, in particular for corn varieties used for feed or food. Increased seed yield of corn refers to an increased kernel size or weight, an increased kernel per ear, or increased ears per plant. Alternatively or in addition the cob yield may be increased, or the length or size of the cob is increased, or the kernel per cob ratio is improved.

[64197] When the plant of the invention is a soy plant, increased yield for soy plants means increased seed yield, in particular for soy varieties used for feed or food. Increased seed yield of soy refers for example to an increased kernel size or weight, an increased kernel per pod, or increased pods per plant.

[64198] When the plant of the invention is an oil seed rape (OSR) plant, increased yield for OSR plants means increased seed yield, in particular for OSR varieties used for feed or food. Increased seed yield of OSR refers to an increased seed size or weight, an increased seed number per silique, or increased siliques per plant.

[64199] When the plant of the invention is a cotton plant, increased yield for cotton plants means increased lint yield. Increased lint yield of cotton refers in one embodiment to an increased length of lint.

[64200] Said increased yield can typically be achieved by enhancing or improving, one or more yieldrelated traits of the plant. Such yield-related traits of a plant comprise, without limitation, the increase of the intrinsic yield capacity of a plant, improved nutrient use efficiency, and/or increased stress tolerance, like improved nutrient use efficiency, in particular increased abiotic stress tolerance, e.g. improved nutrient use efficiency and/or improved water use efficiency.

[64201] Intrinsic yield capacity of a plant can be, for example, manifested by improving the specific (intrinsic) seed yield (e.g. in terms of increased seed/ grain size, increased ear number, increased seed number per ear, improvement of seed filling, improvement of seed composition, embryo and/or endosperm improvements, or the like); modification and improvement of inherent growth and development mechanisms of a plant (such as plant height, plant growth rate, pod number, pod position on the plant, number of internodes, incidence of pod shatter, efficiency of nodulation and nitrogen fixation, efficiency of carbon assimilation, improvement of seedling vigour/early vigour, enhanced efficiency of germination (under stressed or non-stressed conditions), improvement in plant architecture, cell cycle modifications, photosynthesis modifications, various signaling pathway modifications, modification of transcriptional regulation, modification of translational regulation, modification of enzyme activities, and the like); and/or the like.

[64202] The improvement or increase of stress tolerance of a plant can for example be manifested by improving or increasing a plant's tolerance against stress, particularly abiotic stress. In the present application, abiotic stress refers generally to abiotic environmental conditions a plant is typically confronted with, including, but not limited to, drought (tolerance to drought may be achieved as a result of improved water use efficiency), heat, low temperatures and cold conditions (such as freezing and chilling conditions), nutrient depetion, salinity, osmotic stress, shade, high plant density, mechanical stress, oxidative stress, and the like.

[64203] The increased plant yield can for example be mediated by increasing the “nutrient use efficiency of a plant”, e.g. by improving the use efficiency of nutrients including, but not limited to, phosphorus, potassium, and nitrogen. Further, higher yields may be obtained with current or standard levels of nitrogen use.

[64204] Generally, the term “increased tolerance to stress” can be defined as survival of plants, and/or higher yield production, under stress conditions as compared to a non-transformed wild type or starting plant: For example, the plant of the invention or produced according to the method of the invention is better adapted to the stress conditions. “Improved adaptation” to environmental stress like e.g. drought, heat, nutrient depletion, freezing and/or chilling temperatures refers herein to an improved plant performance resulting in an increased yield, particularly with regard to one or more of the yield related traits as defined in more detail above.

[64205] During its life-cycle, a plant is generally confronted with a diversity of environmental conditions. Any such conditions, which may, under certain circumstances, have an impact on plant yield, are herein referred to as “stress” condition. Environmental stresses may generally be divided into biotic and abiotic (environmental) stresses. Unfavorable nutrient conditions are also referred to as “environmental stress”. The present invention does also contemplate solutions for this kind of environmental stress, e.g. referring to increased nutrient use efficiency.

[64206] For the purposes of the description of the present invention, the terms “enhanced tolerance to abiotic stress”, “enhanced resistance to abiotic environmental stress”, “enhanced tolerance to environmental stress”, “improved adaptation to environmental stress” and other variations and expressions similar in its meaning are used interchangeably and refer, without limitation, to an improvement in tolerance to one or more abiotic environmental stress(es) as described herein and as compared to a corresponding origin or wild type plant or a part thereof.

[64207] The term abiotic stress tolerance(s) refers for example low temperature tolerance, drought tolerance or improved water use efficiency (WUE), heat tolerance, salt stress tolerance, improved nutrient efficiency, like nitrogen use efficiency and others. Studies of a plant's response to desiccation, osmotic shock, and temperature extremes are also employed to determine the plant's tolerance or resistance to abiotic stresses. Water use efficiency (WUE) is a parameter often correlated with drought tolerance. In selecting traits for improving crops, a decrease in water use, without a change in growth would have particular merit in an irrigated agricultural system where the water input costs were high. An increase in growth without a corresponding jump in water use would have applicability to all agricultural systems. In many agricultural systems where water supply is not limiting, an increase in growth, even if it came at the expense of an increase in water use also increases yield. Drought stress means any environmental stress which leads to a lack of water in plants or reduction of water supply to plants, including a secondary stress by low temperature and/or salt, and/or a primary stress during drought or heat, e.g. desiccation etc.

### Specific Embodiments

[64208] Accordingly, this invention provides respective measures and methods to produce plants with increased yield, e.g. genes conferring an increased yield-related trait, for example enhanced tolerance to abiotic environmental stress, for example an increased drought tolerance and/or low temperature tolerance and/or an increased nutrient use efficiency, intrinsic yield and/or another increased yield-related trait, upon expression or over-expression, especially increased intrinsic yield. Accordingly, the present invention provides such genes in case in column 7 of the respective Table “oleic acid” is indicated. In particular, such genes are described in column 5 as well as in column 8 of Tables I, especially the coding region thereof, or homologs or fragments thereof, in case oleic acid is indicated in column 7 or the respective polypeptides are described in column 5 as well as in column 8 of Table II, or homologs or fragments thereof, in case oleic acid is indicated in column 7.

[64209] Accordingly, the present invention provides respective transgenic plants showing one or more improved yield-related traits, especially enhanced intrinsic yield capacity as compared to the corresponding origin or the wild type plant and methods for producing such transgenic plants with increased yield in case in column 7 of the respective Table “oleic” is indicated.

[64210] In one embodiment, one or more of said yield-increasing activities are increased by increasing the amount and/or the specific activity of one or more proteins listed in Table I, column 5 or 8 in a compartment of a cell indicated in Table I, column 6, in case in column 7 of the respective Table “oleic acid” is indicated.

[64211] Accordingly to present invention, the yield of the plant of the invention is increased by improving one or more of the yield-related traits as defined herein. Said increased yield in accordance with the present invention can typically be achieved by enhancing or improving, in comparison to an origin or wild-type plant, one or more yield-related traits of said plant. Such yield-related traits of a plant the improvement of which results in increased yield comprise, without limitation, the increase of the intrinsic yield capacity of a plant, and/or increased stress tolerance, e.g. improved nutrient use efficiency, like nitrogen use efficiency,.

[64212] Accordingly, this invention provides respective measures and methods to produce plants with increased yield, e.g. genes conferring an increased yield-related trait, for example enhanced tolerance to abiotic environmental stress, for example an increased drought tolerance and/or low temperature tolerance and/or an increased nutrient use efficiency, intrinsic yield and/or another increased yield-related trait, upon expression or over-expression, especially enhanced tolerance to abiotic stress, in particular increased water use efficiency/drought tolerance. Accordingly, the present invention provides such genes in case in column 7 of the respective Table “2-hydroxybehenic acid, 2-hydroxytetracosenic acid (preferably 2-hydroxynervonic acid), behenic acid, cerebronic acid or nervonic acid” is indicated. In particular, such genes are described in column 5 as well as in column 8 of Tables I, especially the coding region thereof, or homologs or fragments thereof, in case 2-hydroxybehenic acid, 2-hydroxytetracosenic acid (preferably 2-hydroxynervonic acid), behenic acid, cerebronic acid or nervonic acid is indicated in column 7 or the respective polypeptides are described in column 5 as well as in column 8 of Table II, or homologs or fragments thereof, in case 2-hydroxybehenic acid, 2-hydroxytetracosenic acid (preferably 2-hydroxynervonic acid), behenic acid, cerebronic acid or nervonic acid is indicated in column 7.

[64213] Accordingly, the present invention provides respective transgenic plants showing one or more improved yield-related traits, especially improved water use efficiency/drought tolerance ,as compared to the corresponding origin or the wild type plant and methods for producing such transgenic plants with increased yield in case in column 7 of the respective Table “2-hydroxybehenic acid, 2-hydroxytetracosenic acid (preferably 2-hydroxynervonic acid), behenic acid, cerebronic acid or nervonic acid” is indicated.

[64214] In one embodiment, one or more of said yield-increasing activities are increased by increasing the amount and/or the specific activity of one or more proteins listed in Table I, column 5 or 8 in a compartment of a cell indicated in Table I, column 6, in case in column 7 of the respective Table “2-hydroxybehenic acid, 2-hydroxytetracosenic acid (preferably 2-hydroxynervonic acid), behenic acid, cerebronic acid or nervonic acid” is indicated.

[64215] Accordingly to present invention, the yield of the plant of the invention is increased by improving one or more of the yield-related traits as defined herein. Said increased yield in accordance with the present invention can typically be achieved by enhancing or improving, in comparison to an origin or wild-type plant, one or more yield-related traits of said plant. Such yield-related traits of a plant the improvement of which results in increased yield comprise, without limitation, the increase of the intrinsic yield capacity of a plant, improved nutrient use efficiency, like nitrogen use efficiency, and/or increased stress tolerance, e.g. improved nutrient use efficiency, like nitrogen use efficiency, or improved water use efficiency.

[64216] In a further embodiment the present invention is characterized by the features as disclosed in the following items:

[64217] Item 1. A process for the production of a fine chemical selected from the group consisting of: 2-hydroxybehenic acid, 2-hydroxypalmitic acid, 2-hydroxytetracosenoic acid (preferably 2-hydroxynervonic acid), behenic acid, cerebronic acid, eicosanoic acid, heptadecanoic acid, hexadecadienoic acid, hexadecatrienoic acid, lauric acid, myristic acid, nervonic acid and oleic acid
[64218] (a) increasing or generating one or more activities selected from the group consisting of 2,3-dihydroxyphenylpropionate 1,2-dioxygenase, 2-C-methyl-D-erythritol 4-phosphate cytidylyltransferase, 30S ribosomal protein S3, 3-ketoacyl-CoA thiolase, 3-oxoacyl-[acyl-carrier-protein] reductase, 3-oxoacyl-[acyl-carrier-protein] synthase, 40S ribosomal protein S17, ABC transporter component, ABC transporter permease protein, acetyl-coenzyme A synthetase, acid shock protein, acyl-CoA synthase, acyl-desaturase, adenosine kinase, aldolase, alkaline phosphatase isozyme conversion protein, amino acid ABC transporter permease protein, aminotransferase, ankyrin repeat protein, At2g33510-protein, ATPase epsilon subunit, ATP-binding component of a transport system, b0050-protein, b0249-protein, b0371-protein, b0518-protein, b0801-protein, b1046-protein, b1346-protein, b1470-protein, b1522-protein, b1670-protein, b1703-protein, b1837-protein, b2032-protein, b2099-protein, b2107-protein, b2126-protein, b2139-protein, b2360-protein, b2474-protein, b2513-protein, b2654-protein, b3442-protein, b3644-protein, b3812-protein, b3944-protein, b4023-protein, b4205-protein, beta-hydroxylase, betaine aldehyde dehydrogenase, bifunctional protein (phosphoribosyltransferase and regulatory protein), bifunctional purine biosynthesis protein, binding-protein-dependent transport systems inner membrane component, biotin synthase, calcium-dependent protein kinase, carbon dioxide concentrating mechanism protein, cardiolipin synthase, CDP-diacylglycerol-serine O-phosphatidyltransferase, cell division control protein, cell wall protein, chlorophyllase, citrate synthase, coproporphyrinogen III oxidase, cyclin, cystathionine gamma-synthase, cysteine synthase A, dihydrolipoamide dehydrogenase, DNA mismatch repair protein, DnaJ-like chaperone, electron transport complex protein, Elongation factor Tu, ethanolamine utilization protein, F-box protein, ferredoxin, fructose 1,6-bisphosphatase, fumarylacetoacetate hydrolase, glutamate 5-kinase, glutamate-ammonia-ligase, glutaredoxin, glycerol-3-phosphate dehydrogenase, glycine cleavage system H protein, GM02LC38418-protein, heat shock protein, heat shock transcription factor, H esB/Yad R/YfhF family protein, homocitrate synthase, hydrolase, isocitrate dehydrogenase, lipoprotein precursor, malate dehydrogenase, malonyl CoA-acyl carrier protein transacylase, metal-dependent hydrolase, molecular chaperone, molecular chaperone portein, monothiol glutaredoxin, multiple antibiotic resistance protein, murein transglycosylase, N-acetyl-gamma-glutamyl-phosphate reductase, NADP-dependent malic enzyme, outer-membrane lipoprotein precursor, oxidoreductase, permease protein of ABC transporter, phage-related repressor protein, phosphatase, phosphate import ATP-binding protein, phosphatidylserine synthase, phospho-2-dehydro-3-deoxyheptonate aldolase, phosphoadenosine phosphosulfate reductase, phosphotransferase, phosphotransferase system component, polygalacturonase, protein kinase, protein phosphatase, purine nucleoside phosphorylase, pyridoxamine kinase, recombinase A, sec-independent protein translocase, Sec-independent protein translocase subunit, sensor histidine kinase, sensor kinase, sll0281-protein, sll0406-protein, small nuclear ribonucleoprotein , sodium/proton antiporter, squalene monooxygenase, sugar transport system permease protein, threonine dehydratase, transcription factor, transcriptional regulator, transcriptional regulator protein, transport protein, tryptophan synthase alpha chain, TTC1386-protein, vacuolar processing enzyme, ycl027w-protein, ycl049c-protein, ydr273w-protein, ydr339c-protein, YFL019C-protein, ygl237c-protein, YGR104C-protein, yhr033w-protein, YJL127W-A-protein, ylr326w-protein, yml083c-protein, yml084w-protein, and ynl321w-protein, in a non-human organism or a part thereof, preferably a microorganism, a plant cell, a plant or a part thereof, as compared to a corresponding non-transformed wild type non-human organism or a part thereof; and
[64219] (b) growing the non-human organism or a part thereof under conditions which permit the production of 2-hydroxybehenic acid, 2-hydroxypalmitic acid, 2-hydroxytetracosenoic acid (preferably 2-hydroxynervonic acid), behenic acid, cerebronic acid, eicosanoic acid, heptadecanoic acid, hexadecadienoic acid, hexadecatrienoic acid, lauric acid, myristic acid, nervonic acid or oleic acid, respectively,or a composition comprising 2-hydroxybehenic acid, 2-hydroxypalmitic acid, 2-hydroxytetracosenoic acid (preferably 2-hydroxynervonic acid), behenic acid, cerebronic acid, eicosanoic acid, heptadecanoic acid, hexadecadienoic acid, hexadecatrienoic acid, lauric acid, myristic acid, nervonic acid or oleic acid, respectively, in said non-human organism or in the culture medium surrounding said non-human organism.

[64220] Item 2. A process for the production of a respective fine chemical selected from the group consisting of 2-hydroxybehenic acid, 2-hydroxypalmitic acid, 2-hydroxytetracosenoic acid (preferably 2-hydroxynervonic acid), behenic acid, cerebronic acid, eicosanoic acid, heptadecanoic acid, hexadecadienoic acid, hexadecatrienoic acid, lauric acid, myristic acid, nervonic acid and oleic acid, which comprises
[64221] (A)
   [64222] (i) increasing or generating of the expression of; and/or
   [64223] (ii) increasing or generating the expression of an expression product of; and/or
   [64224] (iii) increasing or generating one or more activities of an expression product encoded by; at least one respective nucleic acid molecule comprising a nucleic acid molecule selected from the group consisting of:
   [64225] (a) a nucleic acid molecule encoding the polypeptide shown in column 5 or 8 of Table II, preferably Table II B, application no.12, or a homolog or a fragment thereof, whereby the respective line discloses in column 7 2-hydroxybehenic acid, 2-hydroxypalmitic acid, 2-hydroxytetracosenoic acid (preferably 2-hydroxynervonic acid), behenic acid, cerebronic acid, eicosanoic acid, heptadecanoic acid, hexadecadienoic acid, hexadecatrienoic acid, lauric acid, myristic acid, nervonic acid or oleic acid, respectively;
   [64226] (b) a nucleic acid molecule shown in column 5 or 8 of Table I, preferably Table I B, application no.12, or a homolog or a fragment thereof (preferably the coding region thereof), whereby the respective line discloses in column 7 2-hydroxybehenic acid, 2-hydroxypalmitic acid, 2-hydroxytetracosenoic acid (preferably 2-hydroxynervonic acid), behenic acid, cerebronic acid, eicosanoic acid, heptadecanoic acid, hexadecadienoic acid, hexadecatrienoic acid, lauric acid, myristic acid, nervonic acid or oleic acid, respectively;
   [64227] (c) a nucleic acid molecule, which, as a result of the degeneracy of the genetic code, can be derived from a polypeptide sequence depicted in column 5 or 8 of Table II, preferably Table II B, application no.12, whereby the respective line discloses in column 7 2-hydroxybehenic acid, 2-hydroxypalmitic acid, 2-hydroxytetracosenoic acid (preferably 2-hydroxynervonic acid), behenic acid, cerebronic acid, eicosanoic acid, heptadecanoic acid, hexadecadienoic acid, hexadecatrienoic acid, lauric acid, myristic acid, nervonic acid or oleic acid, respectively;
   [64228] (d) a nucleic acid molecule having at least 30%, in particular at least 50%, 60%, 70%, 80%, 85%, 90%, 95%, 97%, 98%, 99% or 99.5% identity with the nucleic acid molecule sequence of a polynucleotide comprising the nucleic acid molecule shown in column 5 or 8 of Table I, preferably Table I B, application no. 12, or the coding region thereof, whereby the respective line discloses in column 7 2-hydroxybehenic acid, 2-hydroxypalmitic acid, 2-hydroxytetracosenoic acid (preferably 2-hydroxynervonic acid), behenic acid, cerebronic acid, eicosanoic acid, heptadecanoic acid, hexadecadienoic acid, hexadecatrienoic acid, lauric acid, myristic acid, nervonic acid or oleic acid, respectively;
   [64229] (e) a nucleic acid molecule encoding a polypeptide having at least 30%, in particular 50%, 60%, 70%, 80%, 85%, 90%, 95%, 97%, 98%, 99% or 99.5% identity with the amino acid sequence of the polypeptide encoded by the nucleic acid molecule of (a), (b), (c) or (d);
   [64230] (f) a nucleic acid molecule which hybridizes with a nucleic acid molecule of (a), (b), (c), (d) or (e) under stringent hybridization conditions;
   [64231] (g) a nucleic acid molecule encoding a polypeptide which can be isolated with the aid of monoclonal or polyclonal antibodies made against a polypeptide encoded by one of the nucleic acid molecules of (a), (b), (c), (d), (e) or (f);
   [64232] (h) a nucleic acid molecule encoding a polypeptide comprising the consensus sequence or one or more polypeptide motifs as shown in column 8 of Table IV, application no.12, whereby the respective line discloses in column 7 2-hydroxybehenic acid, 2-hydroxypalmitic acid, 2-hydroxytetracosenoic acid (preferably 2-hydroxynervonic acid), behenic acid, cerebronic acid, eicosanoic acid, heptadecanoic acid, hexadecadienoic acid, hexadecatrienoic acid, lauric acid, myristic acid, nervonic acid or oleic acid, respectively;
   [64233] (i) a nucleic acid molecule encoding a polypeptide having the activity represented by a respective protein as depicted in column 5 of Table II, application no. 12, whereby the respective line discloses in column 7 2-hydroxybehenic acid, 2-hydroxypalmitic acid, 2-hydroxytetracosenoic acid (preferably 2-hydroxy-nervonic acid), behenic acid, cerebronic acid, eicosanoic acid, heptadecanoic acid, hexadecadienoic acid, hexadecatrienoic acid, lauric acid, myristic acid, nervonic acid or oleic acid, respectively;
   [64234] (j) a nucleic acid molecule which comprises a polynucleotide, which is obtained by amplifying a cDNA library or a genomic library using the primers as depicted in column 8 of Table III, application no. 12, whereby the respective line discloses in column 7 2-hydroxybehenic acid, 2-hydroxypalmitic acid, 2-hydroxytetracosenoic acid (preferably 2-hydroxynervonic acid), behenic acid, cerebronic acid, eicosanoic acid, heptadecanoic acid, hexadecadienoic acid, hexadecatrienoic acid, lauric acid, myristic acid, nervonic acid or oleic acid, respectively; and
   [64235] (k) a nucleic acid molecule which is obtainable by screening a suitable nucleic acid library, especially a cDNA library and/or a genomic library, under stringent hybridization conditions with a probe comprising a complementary sequence of a nucleic acid molecule of (a), (b), (c), (d), (e), (f), (g), (h), (i) or (j) or with a fragment thereof, having at least 15 nt, preferably 20 nt, 30 nt, 50 nt, 100 nt, 200 nt, 500 nt, 1000 nt, 1500 nt, 2000 nt or 3000 nt of a nucleic acid molecule complementary to a nucleic acid molecule sequence characterized in (a), (b), (c), (d), (e), (f), (g), (h), (i) or (j);
   [64236] or a nucleic acid molecule comprising a sequence which is complementary thereto;
   [64237] in a non-human organism or a part thereof, preferably a microorganism, a plant cell, a plant or a part thereof, as compared to a corresponding non-transformed wild type non-human organism or a part thereof; and
[64238] (B) growing the non-human organism or a part thereof under conditions which permit the production of 2-hydroxybehenic acid, 2-hydroxypalmitic acid, 2-hydroxytetracosenoic acid (preferably 2-hydroxynervonic acid), behenic acid, cerebronic acid, eicosanoic acid, heptadecanoic acid, hexadecadienoic acid, hexadecatrienoic acid, lauric acid, myristic acid, nervonic acid or oleic acid, respectively, or a composition comprising 2-hydroxybehenic acid, 2-hydroxypalmitic acid, 2-hydroxytetracosenoic acid (preferably 2-hydroxynervonic acid), behenic acid, cerebronic acid, eicosanoic acid, heptadecanoic acid, hexadecadienoic acid, hexadecatrienoic acid, lauric acid, myristic acid, nervonic acid or oleic acid, respectively, in said non-human organism or in the culture medium surrounding said non-human organism.

[64239] Item 3. A process of items 1 or 2, comprising of recovering the respective fine chemical 2-hydroxybehenic acid, 2-hydroxypalmitic acid, 2-hydroxytetracosenoic acid (preferably 2-hydroxynervonic acid), behenic acid, cerebronic acid, eicosanoic acid, heptadecanoic acid, hexadecadienoic acid, hexadecatrienoic acid, lauric acid, myristic acid, nervonic acid, or oleic acid in its free or bound form.

[64240] Item 4. The process of any one of items 1 to 3, comprising the following steps:
[64241] (a) selecting a non-human organism or a part thereof expressing a polypeptide encoded by the nucleic acid molecule characterized in item 2;
[64242] (b) mutagenizing the selected non-human organism or the part thereof;
[64243] (c) comparing the activity or the expression level of said polypeptide in the mutagenized non-human organism or the part thereof with the activity or the expression of said polypeptide of the selected non-human organisms or the part thereof;
[64244] (d) selecting the mutated non-human organisms or parts thereof, which comprise an increased activity or expression level of said polypeptide compared to the selected non-human organism or the part thereof;
[64245] (e) optionally, growing and cultivating the non-human organisms or the parts thereof;
[64246] and
[64247] (f) recovering, and optionally isolating, the free or bound 2-hydroxybehenic acid, 2-hydroxypalmitic acid, 2-hydroxytetracosenoic acid (preferably 2-hydroxynervonic acid), behenic acid, cerebronic acid, eicosanoic acid, heptadecanoic acid, hexadecadienoic acid, hexadecatrienoic acid, lauric acid, myristic acid, nervonic acid or oleic acid, respectively, produced by the selected mutated non-human organisms or parts thereof.

[64248] Item 5. The process of any one of items 1 to 4 wherein the activity of said protein or the expression of said nucleic acid molecule is increased or generated transiently or stably.

[64249] Item 6. An isolated nucleic acid molecule comprising a nucleic acid molecule selected from the group consisting of:
[64250] (a) a nucleic acid molecule encoding a polypeptide shown in Table II, application no. 12, column 5 or 8, preferably shown in Table II B, application no. 12, column 8, or a homolog or a fragment thereof;
[64251] (b) a nucleic acid molecule shown in Table I, application no. 12, column 5 or 8, preferably shown in Table I B, application no. 12, column 8, preferably the coding region thereof, or a homolog or a fragment thereof;
[64252] (c) a nucleic acid molecule, which, as a result of the degeneracy of the genetic code, can be derived from a polypeptide sequence depicted in column 5 or 8 of Table II, application no. 12, preferably in column 8 of Table II B, application no. application no.,
[64253] (d) a nucleic acid molecule having at least 30% identity, preferably at least 40%, 50%, 60%, 70%, 75%, 80%, 85%, 90%, 95%, 96%, 97%, 98%, 99%, 99.5%, with the nucleic acid molecule sequence of a polynucleotide comprising the nucleic acid molecule shown in column 5 or 8 of Table I, application no. 3, preferably shown in column 8 of Table I B, application no. 12, preferably the coding region thereof;
[64254] (e) a nucleic acid molecule encoding a polypeptide having at least 30% identity, preferably at least 40%, 50% 60%, 70%, 75%, 80%, 85%, 90%, 95%, 96%, 97%, 98%, 99%, 99.5%, identity with the amino acid sequence of the polypeptide encoded by the nucleic acid molecule of (a), (b), (c) or (d);
[64255] (f) a nucleic acid molecule which hybridizes with a nucleic acid molecule of (a), (b), (c), (d) or (e) under stringent hybridisation conditions;
[64256] (g) a nucleic acid molecule encoding a polypeptide which can be isolated with the aid of monoclonal or polyclonal antibodies made against a polypeptide encoded by one of the nucleic acid molecules of (a), (b), (c), (d), (e) or (f);
[64257] (h) a nucleic acid molecule encoding a polypeptide comprising the consensus sequence or one or more polypeptide motifs as shown in column 8 of Table IV, application no. 12;
[64258] (i) a nucleic acid molecule encoding a polypeptide having the activity represented by a respective protein as depicted in column 5 of Table II, application no. 12;
[64259] (j) a nucleic acid molecule comprising a polynucleotide which is obtained by amplifying a cDNA library or a genomic library using the primers in Table III, application no. 12, column 8;
[64260] and
[64261] (k) nucleic acid molecule which is obtainable by screening a suitable nucleic acid library, especially a cDNA library and/or a genomic library, under stringent hybridization conditions with a probe comprising one of the sequences of the nucleic acid molecule of (a), (b), (c), (d), (e), (f), (g), (h), (i) or (j) or with a fragment of at least 15 nt, preferably 20 nt, 30 nt, 50 nt, 100 nt, 200 nt,500 nt, 1000 nt, 1500 nt, 2000 nt or 3000 nt of the nucleic acid molecule characterized in (a), (b), (c), (d), (e), (f), (g), (h), (i) or (j);
[64262] or a nucleic acid molecule comprising a sequence which is complementary thereto.

[64263] Item 7. A nucleic acid construct which confers the expression of the nucleic acid molecule as defined in item 6, comprising one or more regulatory elements.

[64264] Item 8. An expression cassette comprising
[64265] (a) a promoter, preferably selected from the group consisting of Big35S, PCUbi, Super and USP;
[64266] (b) a nucleic acid molecule as defined in item 6.

[64267] Item 9. A vector comprising the nucleic acid molecule as defined in item 6 or the nucleic acid construct as claimed in item 7 or the expression cassette as claimed in item 8.

[64268] Item 10. A host cell or a plant organelle, which has been transformed with the vector as claimed in item 9 or the nucleic acid molecule as defined in item 6 or the nucleic acid construct as claimed in item 7 or the expression cassette as claimed in item 8.

[64269] Item 11. The host cell of item 10, which is a plant cell or a microorganism.

[64270] Item 12. A process for producing a polypeptide, wherein the polypeptide is expressed in a host cell as claimed in item 10 or 11.

[64271] Item 13. A polypeptide produced by the process as claimed in item 12 or encoded by the nucleic acid molecule as defined in item 6.

[64272] Item 14. An antibody, which binds specifically to the polypeptide as claimed in item 13.

[64273] Item 15. A plant tissue, propagation material, harvested material or a plant or a part thereof comprising the host cell as claimed in item 10 or 11.

[64274] Item 16. A process for the identification of a compound conferring an increase in 2-hydroxybehenic acid, 2-hydroxypalmitic acid, 2-hydroxytetracosenoic acid (preferably 2-hydroxynervonic acid), behenic acid, cerebronic acid, eicosanoic acid, heptadecanoic acid, hexadecadienoic acid, hexadecatrienoic acid, lauric acid, myristic acid, nervonic acid or oleic acid production, respectively, in a non-human organism, comprising the steps:
[64275] (a) culturing a plant cell or tissue or microorganism or maintaining a plant expressing the polypeptide encoded by the nucleic acid molecule as defined in item 6 conferring an increase in the amount of 2-hydroxybehenic acid, 2-hydroxypalmitic acid, 2-hydroxytetracosenoic acid (preferably 2-hydroxynervonic acid), behenic acid, cerebronic acid, eicosanoic acid, heptadecanoic acid, hexadecadienoic acid, hexadecatrienoic acid, lauric acid, myristic acid, nervonic acid or oleic acid, respectively, in a non-human organism or a part thereof and a readout system capable of interacting with the polypeptide under suitable conditions which permit the interaction of the polypeptide with said readout system in the presence of a compound or a sample comprising a plurality of compounds and capable of providing a detectable signal in response to the binding of a compound to said polypeptide under conditions which permit the expression of said readout system and of the polypeptide encoded by the nucleic acid molecule of item 6 conferring an increase in the amount of 2-hydroxybehenic acid, 2-hydroxypalmitic acid, 2-hydroxytetracosenoic acid (preferably 2-hydroxynervonic acid), behenic acid, cerebronic acid, eicosanoic acid, heptadecanoic acid, hexadecadienoic acid, hexadecatrienoic acid, lauric acid, myristic acid, nervonic acid or oleic acid, respectively, in a non-human organism or a part thereof;
[64276] (b) identifying if the compound is an effective agonist by detecting the presence or absence or increase of a signal produced by said readout system.

[64277] Item 17. A method for the production of an agricultural composition comprising the steps of the method of item 16 and formulating the compound identified in item 16 in a form acceptable for an application in agriculture.

[64278] Item 18. A composition comprising the nucleic acid molecule as defined in item 6, the polypeptide as claimed in item 13, the nucleic acid construct as claimed in item 7, the expression cassette as claimed in item 8, the vector as claimed in item 9, the compound as claimed in item 16, the antibody as claimed in item 14, and optionally an agricultural acceptable carrier.

[64279] Item 19. Use of the nucleic acid molecule as defined in item 6 for the identification of a nucleic acid molecule conferring an increase in 2-hydroxybehenic acid, 2-hydroxypalmitic acid, 2-hydroxytetracosenoic acid (preferably 2-hydroxynervonic acid), behenic acid, cerebronic acid, eicosanoic acid, heptadecanoic acid, hexadecadienoic acid, hexadecatrienoic acid, lauric acid, myristic acid, nervonic acid or oleic acid after expression.

[64280] Item 20. Cosmetic, pharmaceutical, food or feed composition comprising the nucleic acid molecule as defined in item 6, the polypeptide as claimed in item 13, the nucleic acid construct as claimed in item 7, the expression cassette as claimed in item 8, the vector as claimed in item 9, the antibody as claimed in item 14, the plant or part thereof, or plant tissue as claimed in item 15, the harvested material or propagation material as claimed in item 15 or the host cell of items 10 or 11.

[64281] Item 21. Use of the nuclei acid molecule as defined in item 6, the polypeptide as claimed in item 13, the nucleic acid construct as claimed in item 7, the expression cassette as claimed in item 8, the vector as claimed in claim 9, the plant or plant tissue as claimed in

[64282] Item 15, or the host cell of item 10 to 11 for the production of plant resistant to a herbicide inhibiting the production of 2-hydroxybehenic acid, 2-hydroxypalmitic acid, 2-hydroxytetracosenoic acid (preferably 2-hydroxynervonic acid), behenic acid, cerebronic acid, eicosanoic acid, heptadecanoic acid, hexadecadienoic acid, hexadecatrienoic acid, lauric acid, myristic acid, nervonic acid or oleic acid, respectively.

[64283] Item 22. A method for producing a plant with increased yield as compared to a corresponding non-transformed wild type plant, whereby the method comprises
[64284] (i) increasing or generating of the expression of; and/or
[64285] (ii) increasing or generating the expression of an expression product of; and/or
[64286] (iii) increasing or generating one or more activities of an expression product encoded by; at least one respective nucleic acid molecule comprising a nucleic acid molecule selected from the group consisting of:
[64287] (a) a nucleic acid molecule encoding the polypeptide shown in column 5 or 8 of Table II, preferably Table II B, application no. 12, or a homolog or a fragment thereof, in case in column 7 2-hydroxybehenic acid, 2-hydroxytetracosenoic acid (preferably 2hydroxynervonic acid), behenic acid, cerebronic acid, nervonic acid or oleic acid, respectively, is indicated;
[64288] (b) a nucleic acid molecule shown in column 5 or 8 of Table I, preferably Table I B, application no. 12, or a homolog or a fragment thereof (preferably the coding region thereof) , in case in column 7 2-hydroxybehenic acid, 2-hydroxytetracosenoic acid, (preferably 2-hydroxynervonic acid), behenic acid, cerebronic acid, nervonic acid or oleic acid, respectively, is indicated;
[64289] (c) a nucleic acid molecule, which, as a result of the degeneracy of the genetic code, can be derived from a polypeptide sequence depicted in column 5 or 8 of Table II, preferably Table II B, application no. 12, in case in column 7 2-hydroxybehenic acid, 2-hydroxytetracosenoic acid (preferably 2-hydroxynervonic acid), behenic acid, cerebronic acid, nervonic acid or oleic acid, respectively, is indicated;
[64290] (d) a nucleic acid molecule having at least 30%, in particular at least 50%, 60%, 70%, 80%, 85%, 90%, 95%, 97%, 98%, 99% or 99.5% identity with the nucleic acid molecule sequence of a polynucleotide comprising the nucleic acid molecule shown in column 5 or 8 of Table I, preferably Table I B, application no. 12, or the coding region thereof, in case in column 7 2-hydroxybehenic acid, 2-hydroxytetracosenoic acid (preferably 2-hydroxynervonic acid), behenic acid, cerebronic acid, nervonic acid or oleic acid, respectively, is indicated;
[64291] (e) a nucleic acid molecule encoding a polypeptide having at least 30%, in particular 50%, 60%, 70%, 80%, 85%, 90%, 95%, 97%, 98%, 99% or 99.5% identity with the amino acid sequence of the polypeptide encoded by the nucleic acid molecule of (a), (b), (c) or (d);
[64292] (f) a nucleic acid molecule which hybridizes with a nucleic acid molecule of (a), (b), (c), (d) or (e) under stringent hybridization conditions;
[64293] (g) a nucleic acid molecule encoding a polypeptide which can be isolated with the aid of monoclonal or polyclonal antibodies made against a polypeptide encoded by one of the nucleic acid molecules of (a), (b), (c), (d), (e) or (f);
[64294] (h) a nucleic acid molecule encoding a polypeptide comprising the consensus sequence or one or more polypeptide motifs as shown in column 8 of Table IV, application no. 12, in case in column 7 2-hydroxybehenic acid, 2-hydroxytetracosenoic acid (preferably 2-hydroxynervonic acid), behenic acid, cerebronic acid, nervonic acid or oleic acid, respectively, is indicated;
[64295] (i) a nucleic acid molecule encoding a polypeptide having the activity represented by a respective protein as depicted in column 5 of Table II, application no. 12, in case in column 7 2-hydroxybehenic acid, 2-hydroxytetracosenoic acid (preferably 2hydroxynervonic acid), behenic acid, cerebronic acid, nervonic acid or oleic acid, respectively, is indicated;
[64296] (j) a nucleic acid molecule which comprises a polynucleotide, which is obtained by amplifying a cDNA library or a genomic library using the primers as depicted in column 8 of Table III, application no. 12, in case in column 7 2-hydroxybehenic acid, 2-hydroxytetracosenoic acid (preferably 2-hydroxynervonic acid), behenic acid, cerebronic acid, nervonic acid or oleic acid, respectively, is indicated; and
[64297] (k) a nucleic acid molecule which is obtainable by screening a suitable nucleic acid library, especially a cDNA library and/or a genomic library, under stringent hybridization conditions with a probe comprising a complementary sequence of a nucleic acid molecule of (a), (b), (c), (d), (e), (f), (g), (h), (i) or (j) or with a fragment thereof, having at least 15 nt, preferably 20 nt, 30 nt, 50 nt, 100 nt, 200 nt, 500 nt, 1000 nt, 1500 nt, 2000 nt or 3000 nt of a nucleic acid molecule complementary to a nucleic acid molecule sequence characterized in (a), (b), (c), (d), (e), (f), (g), (h), (i) or (k);
[64298] or a nucleic acid molecule comprising a sequence which is complementary thereto; in a plant cell, plant or a part thereof.

[64299] Item 23. A method for producing a plant with increased yield according to item 22, which comprises in addition the regeneration of a plant from such transformed plant cell, plant cell compartment, plant cell nucleus, plant cell or plant tissue with increased yield.

[64300] [0483.1.8.12] to [0494.1.8.12] for the disclosure of these paragraphs see [0483.1.8.8] to [0494.1.8.8] above

### Example 11a

### PCR Amplification of the Sequences

[64301] Unless otherwise specified, standard methods as described in Sambrook et al., Molecular Cloning: A laboratory manual, Cold Spring Harbor 1989, Cold Spring Harbor Laboratory Press are used.

[64302] The inventive sequences as shown in the respective line in Table I, column 5, preferably the coding region thereof, were amplified by PCR as described in the protocol of the Pfu Ultra, Pfu Turbo or Herculase DNA polymerase (Stratagene). The composition for the protocol of the Pfu Ultra, Pfu Turbo or Herculase DNA polymerase was as follows: 1×PCR buffer (Stratagene), 0.2 mM of each dNTP, 100 ng genomic DNA of Saccharomyces cerevisiae (strain S288C; Research Genetics, Inc., now Invitrogen), Escherichia coli (strain MG1655; E. coli Genetic Stock Center), Synechocystis sp. (strain PCC6803), Azotobacter vinelandii (strain N.R. Smith,16), Thermus thermophilus (HB8) or 50 ng cDNA from various tissues and development stages of Arabidopsis thaliana (ecotype Columbia), Physcomitrella patens, Glycine max (variety Resnick), Brassica napus, Oryza sativa or Zea mays (variety B73, Mo17, A188), 50 pmol forward primer, 50 pmol reverse primer, with or without 1 M Betaine, 2.5 u Pfu Ultra, Pfu Turbo or Herculase DNA polymerase.

[64303] The amplification cycles were as follows:

[64304] 1 cycle of 2-3 minutes at 94-95° C., then 25-36 cycles with 30-60 seconds at 94-95° C., 30-45 seconds at 50-60° C. and 210-480 seconds at 72° C., followed by 1 cycle of 5-10 minutes at 72° C., then 4-16° C.—preferably for Saccharomyces cerevisiae, Escherichia coli, Synechocystis sp., Azotobacter vinelandii, Thermus thermophilus.

[64305] In case of Arabidopsis thaliana, Brassica napus, Glycine max, Oryza sativa, Physcomitrella patens, Zea mays the amplification cycles were as follows:

[64306] 1 cycle with 30 seconds at 94° C., 30 seconds at 61° C., 15 minutes at 72° C., then 2 cycles with 30 seconds at 94° C., 30 seconds at 60° C., 15 minutes at 72° C., then 3 cycles with 30 seconds at 94° C., 30 seconds at 59° C., 15 minutes at 72° C., then 4 cycles with 30 seconds at 94° C., 30 seconds at 58° C., 15 minutes at 72° C., then 25 cycles with 30 seconds at 94° C., 30 seconds at 57° C., 15 minutes at 72° C., then 1 cycle with 10 minutes at 72° C., then finally 4-16° C.

[64307] RNAs were generated with the RNeasy Plant Kit according to the standard protocol (Qiagen) and Superscript II Reverse Transkriptase was used to produce double stranded cDNA according to the standard protocol (Invitrogen).

[64308] ORF specific primer pairs for the genes to be expressed are shown in the respective line in Table III, column 8. The following adapter sequences were added to Saccharomyces cerevisiae ORF specific primers (see Table III) for cloning purposes:

SEQ ID NO: 20

foward primer: 5′-GGAATTCCAGCTGACCACC-3′ i)

SEQ ID NO: 21

reverse primer: 5′-GATCCCCGGGAATTGCCATG-3′ ii)

[64309] These adaptor sequences allow cloning of the ORF into the various vectors containing the Resgen adaptors, see table column E of Table c.

[64310] The following adapter sequences were added to Saccharomyces cerevisiae, Escherichia coli, Synechocystis sp., Azotobacter vinelandii, Thermus thermophilus, Arabidopsis thaliana, Brassica napus, Glycine max, Oryza sativa , Physcomitrella patens, or Zea mays ORF specific primers for cloning purposes:

SEQ ID NO: 22

forward primer: 5′-TTGCTCTTCC- 3′ iii)

SEQ ID NO: 23

reverse primer: 5′-TTGCTCTTCG-3″ iiii)

[64311] The adaptor sequences allow cloning of the ORF into the various vectors containing the Colic adaptors, see table column E of Table c.

[64312] Therefore for amplification and cloning of Saccharomyces cerevisiae SEQ ID NO: 14843, a primer consisting of the adaptor sequence i) and the ORF specific sequence SEQ ID NO: 14871 and a second primer consisting of the adaptor sequence ii) and the ORF specific sequence SEQ ID NO: 14872 were used.

[64313] For amplification and cloning of Escherichia coli SEQ ID NO: 7269, a primer consisting of the adaptor sequence iii) and the ORF specific sequence SEQ ID NO: 7323 and a second primer consisting of the adaptor sequence iiii) and the ORF specific sequence SEQ ID NO: 7324 were used.

[64314] For amplification and cloning of Synechocystis sp. SEQ ID NO: 11471, a primer consisting of the adaptor sequence iii) and the ORF specific sequence SEQ ID NO: 11983 and a second primer consisting of the adaptor sequence iiii) and the ORF specific sequence SEQ ID NO: 11984 were used.

[64315] For amplification and cloning of Arabidopsis thaliana SEQ ID NO: 1061, a primer consisting of the adaptor sequence iii) and the ORF specific sequence SEQ ID NO: 1293 and a second primer consisting of the adaptor sequence iiii) and the ORF specific sequence SEQ ID NO: 1294 were used.

[64316] For amplification and cloning of Azotobacter vinelandii SEQ ID NO: 6040, a primer consisting of the adaptor sequence iii) and the ORF specific sequence SEQ ID NO: 6070 and a second primer consisting of the adaptor sequence iiii) and the ORF specific sequence SEQ ID NO: 6071 were used.

[64317] For amplification and cloning of Glycine max SEQ ID NO: 10811, a primer consisting of the adaptor sequence iii) and the ORF specific sequence SEQ ID NO: 11207 and a second primer consisting of the adaptor sequence iiii) and the ORF specific sequence SEQ ID NO: 11208 were used.

[64318] For amplification and cloning of Physcomytrella patens SEQ ID NO: 126991, a primer consisting of the adaptor sequence iii) and the ORF specific sequence SEQ ID NO: 127097 and a second primer consisting of the adaptor sequence iiii) and the ORF specific sequence SEQ ID NO: 127098 were used.

[64319] For amplification and cloning of Thermus thermophilus SEQ ID NO: 12698, a primer consisting of the adaptor sequence iii) and the ORF specific sequence SEQ ID NO: 12970 and a second primer consisting of the adaptor sequence iiii) and the ORF specific sequence SEQ ID NO: 12971 were used.

[64320] Following these examples every sequence disclosed in Table I, preferably column 5, especially the coding region thereof can be cloned by fusing the adaptor sequences to the respective specific primers sequences as disclosed in Table III, column 8 using the respective vectors shown in Table c.

[64321] [0496.1.8.12] to [0499.1.8.12] for the disclosure of these paragraphs see [0496.1.8.8] to [0499.1.8.8] above.

### Example 11e

### Cloning of Inventive Sequences as shown in Table I, Column 5 in the Different Expression Vectors

[64322] For cloning of for example SEQ ID NO: 7269 from Escherichia coli or any other ORF from Escherichia coli, Synechocystis sp., Azotobacter vinelandii, Thermus thermophilus, Arabidopsis thaliana, Glycine max, or Physcomitrella patens the vector DNA was treated with the restriction enzymes Pacl and Ncol following the standard protocol (MBI Fermentas).

[64323] For cloning for example the ORFs of SEQ ID NO: 14843 from Saccharomyces cerevisiae or any other ORF from Saccharomyces cerevisiae into vectors containing the Resgen adaptor sequence the respective vector DNA was treated with the restriction enzyme Ncol.

[64324] For cloning of for example ORFs SEQ ID NO: 64218 from Saccharomyces cerevisiae or any other ORF from Saccharomyces cerevisiae into vectors containing the Colic adaptor sequence, the respective vector DNA was treated with the restriction enzymes Pacl and Ncol following the standard protocol (MBI Fermentas).

[64325] In all cases the reaction was stopped by inactivation at 70° C. for 20 minutes and purified over QlAquick or NucleoSpin Extract II columns following the standard protocol (Qiagen or Macherey-Nagel).

[64326] Then the PCR-product representing the amplified ORF with the respective adapter sequences and the vector DNA were treated with T4 DNA polymerase according to the standard protocol (MBI Fermentas) to produce single stranded overhangs with the parameters 1 unit T4 DNA polymerase at 37° C. for 2-10 minutes for the vector and 1-2 u T4 DNA polymerase at 15-17° C. for 10-60 minutes for the PCR product representing SEQ ID NO: 7269.

[64327] The reaction was stopped by addition of high-salt buffer and purified over QlAquick or NucleoSpin Extract II columns following the standard protocol (Qiagen or Macherey-Nagel).

[64328] According to this example the skilled person is able to clone all sequences disclosed in Table I, preferably column 5 or column 8, especially the coding region thereof.

[64329] Approximately 30-60 ng of prepared vector and a defined amount of prepared amplificate were mixed and hybridized at 65° C. for 15 minutes followed by 37° C. 0.1° C/1 seconds, followed by 37° C. 10 minutes, followed by 0.1° C/1 seconds, then 4-10° C.

[64330] The ligated constructs were transformed in the same reaction vessel by addition of competent E. coli cells (strain DHSalpha) and incubation for 20 minutes at 1° C. followed by a heat shock for 90 seconds at 42° C. and cooling to 1-4° C. Then, complete medium (SOC) was added and the mixture was incubated for 45 minutes at 37° C. The entire mixture was subsequently plated onto an agar plate with 0.05 mg/ml kanamycin and incubated overnight at 37° C.

[64331] The outcome of the cloning step was verified by amplification with the aid of primers which bind upstream and downstream of the integration site, thus allowing the amplification of the insertion. The amplifications were carried out as described in the protocol of Taq DNA polymerase (Gibco-BRL).

[64332] The amplification cycles were as follows:

[64333] 1 cycle of 1-5 minutes at 94° C., followed by 35 cycles of in each case 15-60 seconds at 94° C., 15-60 seconds at 50-66° C. and 5-15 minutes at 72° C., followed by 1 cycle of 10 minutes at 72° C., then 4-16° C.

[64334] Several colonies were checked, but only one colony for which a PCR product of the expected size was detected was used in the following steps.

[64335] A portion of this positive colony was transferred into a reaction vessel filled with complete medium (LB) supplemented with kanamycin and incubated overnight at 37° C.

[64336] The plasmid preparation was carried out as specified in the Qiaprep or NucleoSpin Multi-96 Plus standard protocol (Qiagen or Macherey-Nagel).

[64337] [0501.1.8.12] to [0503.1.8.12] for the disclosure of these paragraphs see [0501.1.8.8] to [0503.1.8.8] above.

[64338] Table d showing results of plant analyses

TABLE d

| SeqID | Target | Locus | Metabolite | Source | Promotor | Method | Min | Max |
|---|---|---|---|---|---|---|---|---|
| 113651 | non- | At1g19670 | cerebronic | ARA_LEAF | p-PcUBI | GC | 25 | 38 |
| | targeted | | acid | | | | | |
| 113651 | non- | At1g19670 | 2-hydroxy- | ARA_LEAF | p-PcUBI | GC | 29 | 47 |
| | targeted | | tetracosenoic | | | | | |
| | | | acid (preferably | | | | | |
| | | | 2-hydroxy- | | | | | |
| | | | nervonic acid) | | | | | |
| 1061 | non- | At1g68320 | hexadecatrienoic | ARA_LEAF | p-PcUBI | GC | 13 | 69 |
| | targeted | | acid | | | | | |
| 19419 | non- | At1g72770 | cerebronic | ARA_LEAF | p-PcUBI | GC | 32 | 62 |
| | targeted | | acid | | | | | |
| 19419 | non- | At1g72770 | hexadecatrienoic | ARA_LEAF | p-PcUBI | GC | 14 | 58 |
| | targeted | | acid | | | | | |
| 19419 | non- | At1g72770 | 2-hydroxy- | ARA_LEAF | p-PcUBI | GC | 36 | 74 |
| | targeted | | behenic acid | | | | | |
| 98522 | non- | At2g33510 | 2-hydroxy- | ARA_LEAF | p-PcUBI | GC | 20 | 24 |
| | targeted | | palmitic acid | | | | | |
| 68657 | non- | At3g02990 | 2-hydroxy- | ARA_LEAF | p-PcUBI | GC | 23 | 71 |
| | targeted | | tetracosenoic | | | | | |
| | | | acid | | | | | |
| | | | (preferably 2- | | | | | |
| | | | [symbol] acid) | | | | | |
| 1696 | non- | At3g09820 | cerebronic | ARA_LEAF | p-PcUBI | GC | 26 | 45 |
| | targeted | | acid | | | | | |
| 1696 | non- | At3g09820 | 2-hydroxy- | ARA_LEAF | p-PcUBI | GC | 25 | 52 |
| | targeted | | behenic acid | | | | | |
| 22832 | non- | At3g18524 | 2-hydroxy- | ARA_LEAF | p-PcUBI | GC | 25 | 36 |
| | targeted | | tetracosenoic | | | | | |
| | | | acid | | | | | |
| | | | (preferably 2- | | | | | |
| | | | hydroxy- | | | | | |
| 2935 | non- | At3g62950 | [symbol] cid) | ARA_LEAF | p-PcUBI | GC | 25 | 61 |
| | targeted | | acid | | | | | |
| 2935 | non- | At3g62950 | hexadecatrienoic | ARA_LEAF | p-PcUBI | GC | 17 | 33 |
| | targeted | | acid | | | | | |
| 2935 | non- | At3g62950 | 2-hydroxy- | ARA_LEAF | p-PcUBI | GC | 29 | 57 |
| | targeted | | behenic acid | | | | | |
| 109717 | non- | At4g09960 | 2-hydroxy- | ARA_LEAF | p-PcUBI | GC | 22 | 50 |
| | targeted | | palmitic acid | | | | | |
| 23482 | non- | At4g15660 | 2-hydroxy- | ARA_LEAF | p-PcUBI | GC | 28 | 59 |
| | targeted | | behenic acid | | | | | |
| 23482 | non- | At4g15660 | 2-hydroxy- | ARA_LEAF | p-PcUBI | GC | 23 | 52 |
| | targeted | | palmitic acid | | | | | |
| 3279 | non- | At4g15670 | hexadecatrienoic | ARA_LEAF | p-PcUBI | GC | 26 | 39 |
| | targeted | | acid | | | | | |
| 3279 | non- | At4g15670 | 2-hydroxy- | ARA_LEAF | p-PcUBI | GC | 24 | 104 |
| | targeted | | behenic acid | | | | | |
| 23844 | non- | At4g15690 | cerebronic | ARA_LEAF | p-PcUBI | GC | 23 | 48 |
| | targeted | | acid | | | | | |
| 68849 | non- | At4g26080 | 2-hydroxy- | ARA_LEAF | p-PcUBI | GC | 26 | 48 |
| | targeted | | behenic acid | | | | | |
| 68849 | non- | At4g26080 | 2-hydroxy- | ARA_LEAF | p-PcUBI | GC | 21 | 43 |
| | targeted | | tetracosenoic | | | | | |
| | | | acid (preferably | | | | | |
| | | | 2-hydroxy- | | | | | |
| | | | nervonic acid) | | | | | |
| 4102 | non- | At4g33040 | cerebronic | ARA_LEAF | p-PcUBI | GC | 25 | 58 |
| | targeted | | acid | | | | | |
| 4102 | non- | At4g33040 | hexadecadienoic | ARA_LEAF | p-PcUBI | GC | 20 | 61 |
| | targeted | | acid | | | | | |
| 4102 | non- | At4g33040 | hexadecatrienoic | ARA_LEAF | p-PcUBI | GC | 13 | 35 |
| | targeted | | acid | | | | | |
| 4348 | non- | At4g35310 | 2-hydroxy- | ARA_LEAF | p-PcUBI | GC | 32 | 125 |
| | targeted | | behenic acid | | | | | |
| 4348 | non- | At4g35310 | 2-hydroxy- | ARA_LEAF | p-PcUBI | GC | 18 | 97 |
| | targeted | | palmitic acid | | | | | |
| 122565 | non- | At5g16230 | oleic acid | ARA_LEAF | p-PcUBI | GC | 137 | 225 |
| | targeted | | | | | | | |
| 4904 | non- | At5g18600 | hexadecatrienoic | ARA_LEAF | p-PcUBI | GC | 17 | 37 |
| | targeted | | acid | | | | | |
| 5318 | non- | At5g57050 | hexadecatrienoic | ARA_LEAF | p-PcUBI | GC | 15 | 33 |
| | targeted | | acid | | | | | |
| 122803 | non- | At5g66710 | hexadecadienoic | ARA_LEAF | p-PcUBI | GC | 29 | 120 |
| | targeted | | acid | | | | | |
| 70583 | non- | AvinDRAFT_0035 | cerebronic | ARA_LEAF | p-PcUBI | GC | 22 | 38 |
| | targeted | | acid | | | | | |
| 70583 | non- | AvinDRAFT_0035 | 2-hydroxy- | ARA_LEAF | p-PcUBI | GC | 29 | 56 |
| | targeted | | behenic acid | | | | | |
| 70583 | non- | AvinDRAFT_0035 | 2-hydroxy- | ARA_LEAF | p-PcUBI | GC | 28 | 48 |
| | targeted | | tetracosenoic | | | | | |
| | | | acid | | | | | |
| | | | (preferably 2- | | | | | |
| | | | hydroxy- | | | | | |
| 70583 | non- | AvinDRAFT_0035 | [symbol] cid) | ARA_LEAF | p-PcUBI | GC | 20 | 53 |
| | targeted | | palmitic acid | | | | | |
| 26196 | non- | AvinDRAFT_1624 | hexadecadienoic | ARA_LEAF | p-PcUBI | GC | 22 | 50 |
| | targeted | | acid | | | | | |
| 114198 | non- | Avin- | 2-hydroxy- | ARA_LEAF | p-PcUBI | GC | 24 | 38 |
| | targeted | DRAFT_2010 | tetracosenoic | | | | | |
| | | | acid (preferably | | | | | |
| | | | 2-hydroxy- | | | | | |
| | | | nervonic acid) | | | | | |
| 6040 | non- | AvinDRAFT_2091 | 2-hydroxy- | ARA_LEAF | p-PcUBI | GC | 24 | 44 |
| | targeted | | palmitic acid | | | | | |
| 71325 | non- | AvinDRAFT_2365 | hexadecadienoic | ARA_LEAF | p-PcUBI | GC | 38 | 99 |
| | targeted | | acid | | | | | |
| 28040 | non- | AvinDRAFT_2754 | 2-hydroxy- | ARA_LEAF | p-PcUBI | GC | 28 | 72 |
| | targeted | | behenic acid | | | | | |
| 122948 | non- | AvinDRAFT_2827 | 2-hydroxy- | ARA_LEAF | p-PcUBI | GC | 23 | 80 |
| | targeted | | tetracosenoic | | | | | |
| | | | acid | | | | | |
| | | | (preferably 2- | | | | | |
| | | | hydroxy- | | | | | |
| 29500 | non- | AvinDRAFT_3253 | [symbol] cid) | ARA_LEAF | p-PcUBI | GC | 26 | 56 |
| | targeted | | tetracosenoic | | | | | |
| | | | acid | | | | | |
| | | | (preferably 2- | | | | | |
| | | | hydroxy- | | | | | |
| 114231 | non- | AvinDRAFT_3629 | he [symbol] | ARA_LEAF | p-PcUBI | GC | 23 | 113 |
| | targeted | | oic acid | | | | | |
| 72520 | non- | AVINDRAFT_4128 | lauric acid | ARA_LEAF | p-PcUBI | GC | 44 | 99 |
| | targeted | | | | | | | |
| 6510 | non- | AvinDRAFT_5103 | 2-hydroxy- | ARA_LEAF | p-PcUBI | GC | 20 | 76 |
| | targeted | | palmitic acid | | | | | |
| 32037 | non- | AvinDRAFT_5246 | 2-hydroxy- | ARA_LEAF | p-PcUBI | GC | 21 | 40 |
| | targeted | | palmitic acid | | | | | |
| 32308 | non- | AvinDRAFT_5292 | 2-hydroxy- | ARA_LEAF | p-PcUBI | GC | 64 | 74 |
| | targeted | | behenic acid | | | | | |
| 123087 | non- | AvinDRAFT_5466 | 2-hydroxy- | ARA_LEAF | p-PcUBI | GC | 22 | 55 |
| | targeted | | tetracosenoic | | | | | |
| | | | acid | | | | | |
| | | | (preferably 2- | | | | | |
| | | | hydroxy- | | | | | |
| | | | nervonic acid) | | | | | |
| 32648 | non- | Avin- | 2-hydroxy- | ARA_LEAF | p-PcUBI | GC | 22 | 32 |
| | targeted | DRAFT_5467 | tetracosenoic | | | | | |
| | | | acid (preferably | | | | | |
| | | | 2-hydroxy- | | | | | |
| | | | nervonic acid) | | | | | |
| 34044 | non- | AvinDRAFT_6700 | 2-hydroxy- | ARA_LEAF | p-PcUBI | GC | 25 | 48 |
| | targeted | | tetracosenoic | | | | | |
| | | | acid | | | | | |
| | | | (preferably 2- | | | | | |
| | | | hydroxy- | | | | | |
| 103958 | non- | B0050 | [symbol] cid) | ARA_LEAF | p-Super | GC | 33 | 55 |
| | targeted | | behenic acid | | | | | |
| 103958 | non- | B0050 | 2-hydroxy- | ARA_LEAF | p-Super | GC | 26 | 38 |
| | targeted | | tetracosenoic | | | | | |
| | | | acid | | | | | |
| | | | (preferably 2- | | | | | |
| | | | hydroxy- | | | | | |
| 123473 | non- | B0249 | [symbol] cid) | ARA_LEAF | p-Super | GC | 27 | 48 |
| | targeted | | acid | | | | | |
| 121111 | non- | B0312 | behenic acid | ARA_SEED_2 | p-USP | GC | 11 | 14 |
| | targeted | | | | | | | |
| 121111 | non- | B0312 | eicosanoic | ARA_SEED_2 | p-USP | GC | 11 | 14 |
| | targeted | | acid | | | | | |
| 7269 | plastidic | B0348 | myristic acid | ARA_SEED_2 | p-USP | GC | 21 | 39 |
| 7269 | plastidic | B0348 | oleic acid | ARA_SEED_2 | p-USP | GC | 24 | 43 |
| 121637 | non- | B0371 | hexadecatrienoic | ARA_LEAF | p-Super | GC | 17 | 32 |
| | targeted | | acid | | | | | |
| 7333 | non- | B0449 | cerebronic | ARA_LEAF | p-Super | GC | 24 | 205 |
| | targeted | | acid | | | | | |
| 7333 | non- | B0449 | 2-hydroxy- | ARA_LEAF | p-Super | GC | 28 | 193 |
| | targeted | | behenic acid | | | | | |
| 7333 | non- | B0449 | 2-hydroxy- | ARA_LEAF | p-Super | GC | 19 | 207 |
| | targeted | | palmitic acid | | | | | |
| 35936 | non- | B0518 | hexadecadienoic | ARA_LEAF | p-Super | GC | 25 | 64 |
| | targeted | | acid | | | | | |
| 93678 | non- | B0695 | 2-hydroxy- | ARA_LEAF | p-Super | GC | 38 | 63 |
| | targeted | | behenic acid | | | | | |
| 93678 | non- | B0695 | 2-hydroxy- | ARA_LEAF | p-Super | GC | 24 | 82 |
| | targeted | | tetracosenoic | | | | | |
| | | | acid (preferably | | | | | |
| | | | 2-hydroxy- | | | | | |
| | | | nervonic acid) | | | | | |
| 123498 | plastidic | B0720 | cerebronic | ARA_LEAF | p-Super | GC | 22 | 61 |
| | | | acid | | | | | |
| 75807 | non- | B0801 | 2-hydroxy- | ARA_LEAF | p-Super | GC | 23 | 41 |
| | targeted | | tetracosenoic | | | | | |
| | | | acid | | | | | |
| | | | (preferably 2- | | | | | |
| | | | hydroxy- | | | | | |
| 124051 | plastidic | B1046 | [symbol] cid) | ARA_LEAF | p-Super | GC | 24 | 69 |
| | | | acid | | | | | |
| 124127 | plastidic | B1092 | hexadecatrienoic | ARA_LEAF | p-Super | GC | 12 | 21 |
| | | | acid | | | | | |
| 118371 | non- | B1093 | hexadecadienoic | ARA_LEAF | p-Super | GC | 23 | 30 |
| | targeted | | acid | | | | | |
| 118371 | non- | B1093 | hexadecatrienoic | ARA_LEAF | p-Super | GC | 12 | 18 |
| | targeted | | acid | | | | | |
| 114552 | plastidic | B1095 | hexadecatrienoic | ARA_LEAF | p-Super | GC | 15 | 44 |
| | | | acid | | | | | |
| 114552 | plastidic | B1095 | 2-hydroxy- | ARA_LEAF | p-Super | GC | 27 | 73 |
| | | | behenic acid | | | | | |
| 37400 | non- | B1186 | oleic acid | ARA_LEAF | p-Super | GC | 26 | 110 |
| | targeted | | | | | | | |
| 37400 | non- | B1186 | 2-hydroxy- | ARA_LEAF | p-Super | GC | 19 | 45 |
| | targeted | | palmitic acid | | | | | |
| 124509 | plastidic | B1209 | behenic acid | ARA_SEED_2 | p-USP | GC | 9 | 16 |
| 98778 | plastidic | B1249 | behenic acid | ARA_SEED_2 | p-USP | GC | 9 | 15 |
| 98778 | plastidic | B1249 | heptadecanoic | ARA_SEED_2 | p-USP | GC | 13 | 25 |
| | | | acid | | | | | |
| 99188 | plastidic | B1346 | hexadecatrienoic | ARA_LEAF | p-Super | GC | 15 | 43 |
| | | | acid | | | | | |
| 124557 | non- | B1356 | lauric acid | ARA_LEAF | p-Super | GC | 45 | 61 |
| | targeted | | | | | | | |
| 38266 | plastidic | B1431 | 2-hydroxy- | ARA_LEAF | p-Super | GC | 25 | 94 |
| | | | tetracosenoic | | | | | |
| | | | acid | | | | | |
| | | | (preferably 2- | | | | | |
| | | | hydroxy- | | | | | |
| 115056 | non- | B1470 | he [symbol] | ARA_LEAF | p-Super | GC | 16 | 25 |
| | targeted | | oic acid | | | | | |
| 77774 | non- | B1479 | hexadecatrienoic | ARA_SEED_2 | p-USP | GC | 17 | 49 |
| | targeted | | acid | | | | | |
| 7947 | non- | B1522 | 2-hydroxy- | ARA_LEAF | p-Super | GC | 26 | 81 |
| | targeted | | behenic acid | | | | | |
| 38300 | non- | B1597 | hexadecatrienoic | ARA_LEAF | p-Super | GC | 12 | 48 |
| | targeted | | acid | | | | | |
| 7992 | non- | B1601 | 2-hydroxy- | ARA_LEAF | p-Super | GC | 22 | 43 |
| | targeted | | tetracosenoic | | | | | |
| | | | acid | | | | | |
| | | | (preferably 2- | | | | | |
| | | | hydroxy- | | | | | |
| 124571 | plastidic | B1621 | [symbol] cid) | ARA_LEAF | p-Super | GC | 25 | 35 |
| | | | tetracosenoic | | | | | |
| | | | acid | | | | | |
| | | | (preferably 2- | | | | | |
| | | | hydroxy- | | | | | |
| 38345 | plastidic | B1627 | [symbol] cid) | ARA_LEAF | p-Super | GC | 30 | 36 |
| | | | behenic acid | | | | | |
| 124805 | plastidic | B1636 | hexadecatrienoic | ARA_SEED_2 | p-USP | GC | 17 | 28 |
| | | | acid | | | | | |
| 78753 | non- | B1670 | 2-hydroxy- | ARA_LEAF | p-Super | GC | 23 | 63 |
| | targeted | | tetracosenoic | | | | | |
| | | | acid | | | | | |
| | | | (preferably 2- | | | | | |
| | | | hydroxy- | | | | | |
| 124907 | non- | B1703 | he [symbol] | ARA_LEAF | p-Super | GC | 28 | 66 |
| | targeted | | oic acid | | | | | |
| 124907 | non- | B1703 | hexadecatrienoic | ARA_LEAF | p-Super | GC | 14 | 24 |
| | targeted | | acid | | | | | |
| 78883 | non- | B1791 | hexadecadienoic | ARA_LEAF | p-Super | GC | 46 | 64 |
| | targeted | | acid | | | | | |
| 78953 | non- | B1837 | hexadecadienoic | ARA_LEAF | p-Super | GC | 31 | 35 |
| | targeted | | acid | | | | | |
| 78953 | non- | B1837 | hexadecatrienoic | ARA_LEAF | p-Super | GC | 15 | 27 |
| | targeted | | acid | | | | | |
| 8920 | non- | B2032 | hexadecadienoic | ARA_LEAF | p-Super | GC | 57 | 88 |
| | targeted | | acid | | | | | |
| 115595 | non- | B2099 | hexadecadienoic | ARA_LEAF | p-Super | GC | 36 | 47 |
| | targeted | | acid | | | | | |
| 115595 | non- | B2099 | hexadecatrienoic | ARA_LEAF | p-Super | GC | 18 | 24 |
| | targeted | | acid | | | | | |
| 39002 | non- | B2107 | 2-hydroxy- | ARA_LEAF | p-Super | GC | 24 | 39 |
| | targeted | | tetracosenoic | | | | | |
| | | | acid (preferably | | | | | |
| | | | 2-hydroxy- | | | | | |
| | | | nervonic acid) | | | | | |
| 124992 | plastidic | B2126 | lauric acid | ARA_LEAF | p-Super | GC | 32 | 43 |
| 125085 | plastidic | B2139 | 2-hydroxy- | ARA_LEAF | p-Super | GC | 20 | 27 |
| | | | palmitic acid | | | | | |
| 39040 | non- | B2178 | hexadecatrienoic | ARA_LEAF | p-Super | GC | 17 | 34 |
| | targeted | | acid | | | | | |
| 125105 | plastidic | B2216 | 2-hydroxy- | ARA_LEAF | p-Super | GC | 24 | 34 |
| | | | behenic acid | | | | | |
| 39219 | non- | B2360 | 2-hydroxy- | ARA_LEAF | p-Super | GC | 33 | 57 |
| | targeted | | tetracosenoic | | | | | |
| | | | acid | | | | | |
| | | | (preferably 2- | | | | | |
| | | | hydroxy- | | | | | |
| 39300 | non- | B2414 | [symbol] cid) | ARA_LEAF | p-Super | GC | 31 | 60 |
| | targeted | | tetracosenoic | | | | | |
| | | | acid | | | | | |
| | | | (preferably 2- | | | | | |
| | | | hydroxy- | | | | | |
| 115628 | non- | B2439 | he [symbol] | ARA_LEAF | p-Super | GC | 32 | 135 |
| | targeted | | oic acid | | | | | |
| 115628 | non- | B2439 | hexadecatrienoic | ARA_LEAF | p-Super | GC | 14 | 27 |
| | targeted | | acid | | | | | |
| 115628 | non- | B2439 | oleic acid | ARA_LEAF | p-Super | GC | 42 | 55 |
| | targeted | | | | | | | |
| 40329 | non- | B2474 | cerebronic | ARA_LEAF | p-Super | GC | 25 | 44 |
| | targeted | | acid | | | | | |
| 40329 | non- | B2474 | hexadecatrienoic | ARA_LEAF | p-Super | GC | 20 | 31 |
| | targeted | | acid | | | | | |
| 40329 | non- | B2474 | 2-hydroxy- | ARA_LEAF | p-Super | GC | 27 | 43 |
| | targeted | | tetracosenoic | | | | | |
| | | | acid | | | | | |
| | | | (preferably 2- | | | | | |
| | | | hydroxy- | | | | | |
| 9167 | non- | B2513 | he [symbol] | ARA_LEAF | p-Super | GC | 26 | 81 |
| | targeted | | oic acid | | | | | |
| 125142 | non- | B2585 | hexadecadienoic | ARA_LEAF | p-Super | GC | 21 | 32 |
| | targeted | | acid | | | | | |
| 125226 | non- | B2654 | 2-hydroxy- | ARA_LEAF | p-Super | GC | 38 | 41 |
| | targeted | | tetracosenoic | | | | | |
| | | | acid | | | | | |
| | | | (preferably 2- | | | | | |
| | | | hydroxy- | | | | | |
| 81075 | non- | B2747 | he [symbol] | ARA_LEAF | p-Super | GC | 13 | 45 |
| | targeted | | noic acid | | | | | |
| 125234 | non- | B2753 | eicosanoic | ARA_SEED_2 | p-USP | GC | 10 | 22 |
| | targeted | | acid | | | | | |
| 41732 | plastidic | B2963 | 2-hydroxy- | ARA_LEAF | p-Super | GC | 25 | 55 |
| | | | tetracosenoic | | | | | |
| | | | acid | | | | | |
| | | | (preferably 2- | | | | | |
| | | | hydroxy- | | | | | |
| 94380 | non- | B3442 | he [symbol] | ARA_LEAF | p-Super | GC | 26 | 102 |
| | targeted | | oic acid | | | | | |
| 125264 | plastidic | B3568 | cerebronic | ARA_LEAF | p-Super | GC | 30 | 44 |
| | | | acid | | | | | |
| 125487 | non- | B3812 | 2-hydroxy- | ARA_LEAF | p-Super | GC | 29 | 65 |
| | targeted | | behenic acid | | | | | |
| 100675 | non- | B3845 | hexadecadienoic | ARA_LEAF | p-Super | GC | 20 | 36 |
| | targeted | | acid | | | | | |
| 100675 | plastidic | B3845 | oleic acid | ARA_SEED_2 | p-USP | GC | 26 | 30 |
| 83821 | plastidic | B3872 | hexadecadienoic | ARA_LEAF | p-Super | GC | 28 | 58 |
| | | | acid | | | | | |
| 125541 | non- | B3925 | hexadecadienoic | ARA_LEAF | p-Super | GC | 25 | 66 |
| | targeted | | acid | | | | | |
| 125795 | plastidic | B3939 | behenic acid | ARA_SEED_2 | p-USP | GC | 11 | 25 |
| 125795 | plastidic | B3939 | heptadecanoic | ARA_SEED_2 | p-USP | GC | 22 | 33 |
| | | | acid | | | | | |
| 125795 | plastidic | B3939 | oleic acid | ARA_SEED_2 | p-USP | GC | 25 | 36 |
| 126377 | plastidic | B3944 | 2-hydroxy- | ARA_LEAF | p-Super | GC | 19 | 37 |
| | | | palmitic acid | | | | | |
| 126415 | plastidic | B4017 | 2-hydroxy- | ARA_LEAF | p-Super | GC | 29 | 49 |
| | | | behenic acid | | | | | |
| 119209 | non- | B4023 | hexadecadienoic | ARA_LEAF | p-Super | GC | 24 | 57 |
| | targeted | | acid | | | | | |
| 126421 | plastidic | B4069 | heptadecanoic | ARA_SEED_2 | p-USP | GC | 14 | 35 |
| | | | acid | | | | | |
| 126975 | plastidic | B4205 | 2-hydroxy- | ARA_LEAF | p-Super | GC | 20 | 34 |
| | | | palmitic acid | | | | | |
| 126991 | non- | C_pp032007025r | 2-hydroxy- | ARA_LEAF | p-Super | GC | 31 | 52 |
| | targeted | | behenic acid | | | | | |
| 10811 | non- | GM02- | 2-hydroxy- | ARA_LEAF | p-PcUBI | GC | 23 | 48 |
| | targeted | LC12622 | palmitic acid | | | | | |
| 46751 | non- | GM02- | cerebronic | ARA_LEAF | p-PcUBI | GC | 24 | 57 |
| | targeted | LC19289 | acid | | | | | |
| 46751 | non- | GM02- | hexadecatrienoic | ARA_LEAF | p-PcUBI | GC | 12 | 50 |
| | targeted | LC19289 | acid | | | | | |
| 116312 | non- | GM02- | 2-hydroxy- | ARA_LEAF | p-PcUBI | GC | 22 | 46 |
| | targeted | LC38418 | tetracosenoic | | | | | |
| | | | acid | | | | | |
| | | | (preferably 2- | | | | | |
| | | | hydroxy- | | | | | |
| 84865 | plastidic | Sll0281 | he [symbol] ) | ARA_LEAF | p-PcUBI | GC | 50 | 62 |
| | | | oic acid | | | | | |
| 106920 | mitochondrial | Sll0368 | 2-hydroxy- | ARA_LEAF | p-PcUBI | GC | 23 | 69 |
| | | | tetracosenoic | | | | | |
| | | | acid | | | | | |
| | | | (preferably 2- | | | | | |
| | | | hydroxy- | | | | | |
| 127103 | non- | Sll0406 | [symbol] cid) | ARA_LEAF | p-PcUBI | GC | 25 | 43 |
| | targeted | | tetracosenoic | | | | | |
| | | | acid | | | | | |
| | | | (preferably 2- | | | | | |
| | | | hydroxy- | | | | | |
| 101707 | non- | Sll0833 | [symbol] cid) | ARA_LEAF | p-PcUBI | GC | 28 | 41 |
| | targeted | | acid | | | | | |
| 127109 | non- | Sll0895 | cerebronic | ARA_LEAF | p-PcUBI | GC | 24 | 35 |
| | targeted | | acid | | | | | |
| 127109 | non- | Sll0895 | 2-hydroxy- | ARA_LEAF | p-PcUBI | GC | 22 | 40 |
| | targeted | | tetracosenoic | | | | | |
| | | | acid | | | | | |
| | | | (preferably 2- | | | | | |
| | | | hydroxy- | | | | | |
| 52634 | mitochondrial | Sll1031 | he [symbol] ) | ARA_LEAF | p-PcUBI | GC | 21 | 46 |
| | | | oic acid | | | | | |
| 52634 | mitochondrial | Sll1031 | hexadecatrienoic | ARA_LEAF | p-PcUBI | GC | 12 | 44 |
| | | | acid | | | | | |
| 11471 | mitochondrial | Sll1917 | cerebronic | ARA_LEAF | p-PcUBI | GC | 23 | 65 |
| | | | acid | | | | | |
| 11471 | mitochondrial | Sll1917 | 2-hydroxy- | ARA_LEAF | p-PcUBI | GC | 27 | 73 |
| | | | tetracosenoic | | | | | |
| | | | acid | | | | | |
| | | | (preferably 2- | | | | | |
| | | | hydroxy- | | | | | |
| 11990 | non- | Slr0338 | [symbol] cid) | ARA_LEAF | p-PcUBI | GC | 18 | 30 |
| | targeted | | palmitic acid | | | | | |
| 56153 | plastidic | Slr0597 | hexadecatrienoic | ARA_LEAF | p-PcUBI | GC | 21 | 26 |
| | | | acid | | | | | |
| 87397 | plastidic | Slr0721 | cerebronic | ARA_LEAF | p-PcUBI | GC | 24 | 37 |
| | | | acid | | | | | |
| 127183 | mitochondrial | Slr0879 | hexadecatrienoic | ARA_LEAF | p-PcUBI | GC | 17 | 38 |
| | | | acid | | | | | |
| 119222 | mitochondrial | Slr0949 | 2-hydroxy- | ARA_LEAF | p-PcUBI | GC | 21 | 92 |
| | | | tetracosenoic | | | | | |
| | | | acid | | | | | |
| | | | (preferably 2- | | | | | |
| | | | hydroxy- | | | | | |
| 87655 | plastidic | Slr0966 | he [symbol] ) | ARA_LEAF | p-PcUBI | GC | 35 | 194 |
| | | | oic acid | | | | | |
| 57734 | non- | Slr1096 | 2-hydroxy- | ARA_LEAF | p-PcUBI | GC | 31 | 55 |
| | targeted | | behenic acid | | | | | |
| 116460 | mitochondrial | Slr1250 | 2-hydroxy- | ARA_LEAF | p-PcUBI | GC | 19 | 38 |
| | | | palmitic acid | | | | | |
| 127521 | mitochondrial | Slr2035 | hexadecatrienoic | ARA_LEAF | p-PcUBI | GC | 12 | 23 |
| | | | acid | | | | | |
| 12341 | mitochondrial | Slr2072 | cerebronic | ARA_LEAF | p-PcUBI | GC | 30 | 42 |
| | | | acid | | | | | |
| 12341 | mitochondrial | Slr2072 | hexadecatrienoic | ARA_LEAF | p-PcUBI | GC | 15 | 59 |
| | | | acid | | | | | |
| 12341 | plastidic | Slr2072 | 2-hydroxy- | ARA_LEAF | p-PcUBI | GC | 27 | 38 |
| | | | tetracosenoic | | | | | |
| | | | acid | | | | | |
| | | | (preferably 2- | | | | | |
| | | | hydroxy- | | | | | |
| 128024 | plastidic | Ssl3044 | [symbol] cid) | ARA_LEAF | p-PcUBI | GC | 22 | 37 |
| | | | tetracosenoic | | | | | |
| | | | acid | | | | | |
| | | | (preferably 2- | | | | | |
| | | | hydroxy- | | | | | |
| 12698 | non- | TTC0019 | [symbol] cid) | ARA_LEAF | p-PcUBI | GC | 31 | 39 |
| | targeted | | behenic acid | | | | | |
| 61070 | non- | TTC0337 | 2-hydroxy- | ARA_LEAF | p-PcUBI | GC | 30 | 53 |
| | targeted | | tetracosenoic | | | | | |
| | | | acid | | | | | |
| | | | (preferably 2- | | | | | |
| | | | hydroxy- | | | | | |
| 61553 | non- | TTC0917 | [symbol] cid) | ARA_LEAF | p-PcUBI | GC | 27 | 89 |
| | targeted | | acid | | | | | |
| 61553 | non- | TTC0917 | hexadecadienoic | ARA_LEAF | p-PcUBI | GC | 22 | 139 |
| | targeted | | acid | | | | | |
| 61723 | non- | TTC1193 | 2-hydroxy- | ARA_LEAF | p-PcUBI | GC | 28 | 35 |
| | targeted | | behenic acid | | | | | |
| 62079 | non- | TTC1386 | hexadecatrienoic | ARA_LEAF | p-PcUBI | GC | 14 | 26 |
| | targeted | | acid | | | | | |
| 12974 | non- | TTC1550 | 2-hydroxy- | ARA_LEAF | p-PcUBI | GC | 26 | 57 |
| | targeted | | behenic acid | | | | | |
| 128139 | non- | Yar019c | hexadecadienoic | ARA_LEAF | Big35S | GC | 21 | 25 |
| | targeted | | acid | | | | | |
| 128139 | non- | Yar019c | hexadecatrienoic | ARA_LEAF | Big35S | GC | 13 | 20 |
| | targeted | | acid | | | | | |
| 62524 | non- | Ybl021c | hexadecadienoic | ARA_LEAF | Big35S | GC | 21 | 96 |
| | targeted | | acid | | | | | |
| 62524 | non- | Ybl021c | hexadecatrienoic | ARA_LEAF | Big35S | GC | 12 | 23 |
| | targeted | | acid | | | | | |
| 62717 | non- | Ybr160w | hexadecatrienoic | ARA_LEAF | Big35S | GC | 13 | 54 |
| | targeted | | acid | | | | | |
| 96980 | plastidic | Ycl027w | cerebronic | ARA_LEAF | p-Super | GC | 25 | 46 |
| | | | acid | | | | | |
| 96980 | plastidic | Ycl027w | 2-hydroxy- | ARA_LEAF | p-Super | GC | 25 | 41 |
| | | | tetracosenoic | | | | | |
| | | | acid | | | | | |
| | | | (preferably 2- | | | | | |
| | | | hydroxy- | | | | | |
| 113220 | plastidic | Ycl049c | [symbol] cid) | ARA_LEAF | p-Super | GC | 22 | 74 |
| | | | palmitic acid | | | | | |
| 119408 | non- | Ydl022w | oleic acid | ARA_SEED_2 | p-PcUBI | GC | 34 | 156 |
| | targeted | | | | | | | |
| 122228 | non- | Ydl066w | eicosanoic | ARA_SEED_2 | p-PcUBI | GC | 8 | 17 |
| | targeted | | acid | | | | | |
| 122228 | non- | Ydl066w | heptadecanoic | ARA_SEED_2 | p-PcUBI | GC | 16 | 20 |
| | targeted | | acid | | | | | |
| 120045 | non- | Ydl126c | hexadecadienoic | ARA_LEAF | Big35S | GC | 30 | 63 |
| | targeted | | acid | | | | | |
| 120045 | non- | Ydl126c | hexadecatrienoic | ARA_LEAF | Big35S | GC | 14 | 34 |
| | targeted | | acid | | | | | |
| 113224 | plastidic | Ydl131w | 2-hydroxy- | ARA_LEAF | p-Super | GC | 29 | 50 |
| | | | behenic acid | | | | | |
| 113330 | plastidic | Ydr035w | behenic acid | ARA_LEAF | p-Super | GC | 38 | 128 |
| 128148 | plastidic | Ydr077w | 2-hydroxy- | ARA_LEAF | p-Super | GC | 22 | 32 |
| | | | tetracosenoic | | | | | |
| | | | acid (preferably | | | | | |
| | | | 2-hydroxy- | | | | | |
| | | | nervonic acid) | | | | | |
| 14706 | plastidic | Ydr131c | 2-hydroxy- | ARA_LEAF | p-Super | GC | 26 | 66 |
| | | | tetracosenoic | | | | | |
| | | | acid | | | | | |
| | | | (preferably 2- | | | | | |
| | | | hydroxy- | | | | | |
| 90159 | plastidic | Ydr273w | [symbol] cid) | ARA_LEAF | p-Super | GC | 27 | 30 |
| | | | acid | | | | | |
| 90159 | plastidic | Ydr273w | 2-hydroxy- | ARA_LEAF | p-Super | GC | 24 | 28 |
| | | | tetracosenoic | | | | | |
| | | | acid | | | | | |
| | | | (preferably 2- | | | | | |
| | | | hydroxy- | | | | | |
| 120241 | plastidic | Ydr339c | he [symbol] ) | ARA_LEAF | p-Super | GC | 14 | 20 |
| | | | oic acid | | | | | |
| 128511 | plastidic | Yel046c | heptadecanoic | ARA_SEED_2 | p-USP | GC | 20 | 35 |
| | | | acid | | | | | |
| 113598 | non- | Yer112w | myristic acid | ARA_LEAF | Big35S | GC | 46 | 90 |
| | targeted | | | | | | | |
| 63807 | non- | Yfl016c | hexadecadienoic | ARA_LEAF | Big35S | GC | 20 | 48 |
| | targeted | | acid | | | | | |
| 63807 | non- | Yfl016c | hexadecatrienoic | ARA_LEAF | Big35S | GC | 13 | 39 |
| | targeted | | acid | | | | | |
| 64144 | non- | Yfl019c | 2-hydroxy- | ARA_LEAF | Big35S | GC | 31 | 108 |
| | targeted | | behenic acid | | | | | |
| 64144 | non- | Yfl019c | 2-hydroxy- | ARA_LEAF | Big35S | GC | 21 | 75 |
| | targeted | | palmitic acid | | | | | |
| 90189 | plastidic | Yfl030w | hexadecadienoic | ARA_LEAF | p-Super | GC | 31 | 53 |
| | | | acid | | | | | |
| 64177 | non- | Ygl237c | hexadecatrienoic | ARA_LEAF | Big35S | GC | 13 | 35 |
| | targeted | | acid | | | | | |
| 117482 | non- | Ygr104c | eicosanoic | ARA_SEED_2 | p-PcUBI | GC | 11 | 19 |
| | targeted | | acid | | | | | |
| 64218 | plastidic | Ygr175c | cerebronic | ARA_LEAF | p-PcUBI | GC | 24 | 34 |
| | | | acid | | | | | |
| 128655 | plastidic | Ygr286c | hexadecadienoic | ARA_LEAF | p-Super | GC | 23 | 46 |
| | | | acid | | | | | |
| 128967 | plastidic | Yhr033w | cerebronic | ARA_LEAF | p-PcUBI | GC | 21 | 27 |
| | | | acid | | | | | |
| 64964 | plastidic | Yjl073w | cerebronic | ARA_LEAF | p-Super | GC | 30 | 45 |
| | | | acid | | | | | |
| 97631 | non- | Yjl127w-a | 2-hydroxy- | ARA_LEAF | Big35S | GC | 26 | 40 |
| | targeted | | behenic acid | | | | | |
| 14843 | non- | Yjr130c | 2-hydroxy- | ARA_LEAF | Big35S | GC | 23 | 70 |
| | targeted | | tetracosenoic | | | | | |
| | | | acid (preferably | | | | | |
| | | | 2-hydroxy- | | | | | |
| | | | nervonic acid) | | | | | |
| 14843 | non- | Yjr130c | 2-hydroxy- | ARA_LEAF | Big35S | GC | 19 | 106 |
| | targeted | | palmitic acid | | | | | |
| 66274 | non- | Yjr153w | 2hydroxypalmitic | ARA_LEAF | p-PcUBI | GC | 18 | 22 |
| | targeted | | acid | | | | | |
| 129065 | non- | Ylr210w | hexadecatrienoic | ARA_LEAF | Big35S | GC | 13 | 23 |
| | targeted | | acid | | | | | |
| 129123 | plastidic | Ylr326w | hexadecadienoic | ARA_LEAF | p-Super | GC | 21 | 94 |
| | | | acid | | | | | |
| 129123 | plastidic | Ylr326w | hexadecatrienoic | ARA_LEAF | p-Super | GC | 13 | 35 |
| | | | acid | | | | | |
| 91781 | plastidic | Yml083c | 2-hydroxy- | ARA_LEAF | p-Super | GC | 28 | 56 |
| | | | behenic acid | | | | | |
| 15175 | plastidic | Yml084w | 2-hydroxy- | ARA_LEAF | p-Super | GC | 26 | 59 |
| | | | tetracosenoic | | | | | |
| | | | acid | | | | | |
| | | | (preferably 2- | | | | | |
| | | | hydroxy- | | | | | |
| 129141 | plastidic | Ymr186w | [symbol] cid) | ARA_LEAF | p-Super | GC | 18 | 27 |
| | | | palmitic acid | | | | | |
| 129470 | mitochondrial | Ynl130c | oleic acid | ARA_SEED_2 | p-USP | GC | 23 | 36 |
| 129546 | plastidic | Ynl321w | 2-hydroxy- | ARA_LEAF | p-Super | GC | 26 | 53 |
| | | | behenic acid | | | | | |
| 129574 | non- | Yor187w | hexadecatrienoic | ARA_LEAF | Big35S | GC | 17 | 27 |
| | targeted | | acid | | | | | |
| 118212 | plastidic | Ypl271w | 2-hydroxy- | ARA_LEAF | p-Super | GC | 25 | 75 |
| | | | tetracosenoic | | | | | |
| | | | acid | | | | | |
| | | | (preferably 2- | | | | | |
| | | | hydroxy- | | | | | |
| 130181 | plastidic | Ypr167c | [symbol] cid) | ARA_LEAF | p-PcUBI | GC | 66 | 84 |
| | | | palmitic acid | | | | | |
| 128161 | non- | YDR447C | oleic acid | ARA_LEAF | Big35S | GC | 25 | 395 |
| | targeted | | | | | | | |
| 125348 | non- | B3644 | 2-hydroxy- | ARA_LEAF | p-Super | GC | 2 | 77 |
| | targeted | | behenic acid | | | | | |
| 125348 | non- | B3644 | behenic acid | ARA_LEAF | p-Super | GC | 0 | 58 |
| | targeted | | | | | | | |
| 125348 | non- | B3644 | nervonic acid | ARA_LEAF | p-Super | GC | 12 | 319 |
| | targeted | | | | | | | |

[symbol]

indicates data missing or illegible when filed

[64339] Column 1 shows the SEQ ID NO, Column 2 shows the expression type (targeted or non-targeted), Column 3 shows the “gene name” (locus), Column 4 shows the metabolite analyzed, Column 5 indicates the A. thaliana source tissue analyzed, Column 6 indicates the used promoter for expression, Column 7 indicates the analytical method. Columns 8 and 9 show the minimum and the maximum increase of the analyzed metabolite (in percent) in comparison to the wild type (=ratio_by_weight, given as percent increase).

[64340] When the analyses were repeated independently, all results proved to be significant.

[64341] [0505.1.8.12] to [0515.1.8.12] for the disclosure of these paragraphs see [0505.1.8.8] to [0515.1.8.8] above.

[64342] In a further embodiment, the present invention relates in paragraphs [0000.1.7.13.] to [0514.1.7.13.] to a further process for the production of the fine chemical abscisic acid, cryptoxanthin, violaxanthin and/or zeaxanthin as defined below and corresponding embodiments as described herein as follows.

[64343] for the disclosure of this paragraph see [0001.1.7.7] above

[64344] Carotenoids are red, yellow and orange pigments that are widely distributed in nature. Although specific carotenoids have been identified in photosynthetic centers in plants, in bird feathers, in crustaceans and in marigold petals, they are especially abundant in yellow-orange fruits and vegetables and dark green, leafy vegetables. Of the more than 700 naturally occurring carotenoids identified thus far, as many as 50 may be absorbed and metabolized by the human body.

[64345] In animals some carotenoids (particularly beta-carotene) serve as dietary precursors to Vitamin A, and many of them may function as fat-soluble antioxidants. In plants carotenes serve for example as antioxidants to protect the highly reactive photosystems and act as accessory photopigments. In vitro experiments have shown that lycopene, alpha-carotene, zeaxanthin, lutein and cryptoxanthin quench singlet oxygen and inhibit lipid peroxidation. The isolation and identification of oxidized metabolites of lutein, zeaxanthin and lycopene provide direct evidence of the antioxidant action of these carotenoids.

[64346] Carotenoids are 40-carbon (C₄₀) terpenoids generally comprising eight isoprene (C₅) units joined together. Linking of the units is reversed at the center of the molecule. “Ketocarotenoid” is a general term for carotenoid pigments that contain a keto group in the ionene ring portion of the molecule, whereas “hydroxycarotenoid” refers to carotenoid pigments that contain a hydroxyl group in the ionene ring. Trivial names and abbreviations will be used throughout this disclosure, with IUPAC-recommended semi-systematic names usually being given in parentheses after first mention of a trivial name.

[64347] Carotenoids are synthesized from a five carbon atom metabolic precursor, isopentenyl pyrophosphate (IPP). There are at least two known biosynthetic pathways in the formation of IPP, the universal isoprene unit. One pathway begins with mevalonic acid, the first specific precursor of terpenoids, formed from acetyl-CoA via HMG-CoA (3-hydroxy-3-methylglutaryl-CoA), that is itself converted to isopentenyl pyrophosphate (IPP). Later, condensation of two geranylgeranyl pyrophosphate (GGPP) molecules with each other produces colorless phytoene, which is the initial carotenoid. Studies have also shown the existence of an alternative, mevalonate-independent pathway for IPP formation that was characterized initially in several species of eubacteria, a green alga, and in the plastids of higher plants. The first reaction in this alternative pathway is the transketolase-type condensation reaction of pyruvate and D-glyceraldehylde-3-phosphate to yield 1-deoxy-D-xylulose-5-phosphate (DXP) as an intermediate.

[64348] Through a series of desaturation reactions, phytoene is converted to phytofluene, ζ-carotene, neurosporene and finally to lycopene. Subsequently, lycopene is converted by a cyclization reaction to β-carotene that contains two [3-ionene rings. One or two hydroxyl group(s) are introduced into each ring of β-carotene to thereby synthesize [3-cryptoxanthin resp. zeaxanthin. By epoxidation of the two rings of zeaxanthin by beta.epoxidase violaxanthin is synthetized. Lycopene is also converted to alpha-carotene. The introduction of one hydroxyl group leads to alpha-cryptoxanthin. A breakdown product of the 9-cis-epoxycarotenoid xanthophylls, 9-cis-violaxanthin and 9′-cis-neoxanthin in green plants is abscisic acid.

[64349] Carotenoids absorb light in the 400-500 nm region of the visible spectrum. This physical property imparts the characteristic red/yellow color of the pigments. A conjugated backbone composed of isoprene units is usually inverted at the center of the molecule, imparting symmetry.

[64350] Changes in geometrical configuration about the double bonds result in the existence of many cis- and trans-isomers. Hydroxylated, oxidized, hydrogenated or ring-containing derivatives also exist. Hydrocarbon carotenoids are classified as carotenes while those containing oxygen are known as xanthophylls.

[64351] In animals, carotenoids are absorbed from the intestine with the aid of dietary fat and incorporated into chylomicrons for transport in the serum. The different structural features possessed by carotenoids account for selective distribution in organ tissue, biological activity and provitamin A potency, or in vivo conversion to vitamin A. Due to the hydrophobic character, carotenoids are associated with lipid portions of human tissues, cells, and membranes. In general, 80-85% of carotenoids are distributed in adipose tissue, with smaller amounts found in the liver, muscle, adrenal glands, and reproductive organs. Approximately 1% circulate in the serum on high and low density lipoproteins. Serum concentrations are fairly constant and slow to change during periods of low intake. The estimated half-life was estimated to be 11-14 days for lycopene, α-carotene, β-carotene, lutein and zeaxanthin. Evidence for the existence of more than one body pool has been published. The major serum carotenoids are α-carotene, β-carotene, lutein, zeaxanthin, lycopene and cryptoxanthin. Smaller amounts of polyenes such as phytoene and phytofluene are also present.

[64352] Human serum levels reflect lifestyle choices and dietary habits within and between cultures. Approximately only 15 circulate in the blood, on HDL and LDL. Variations can be attributed to different intakes, unequal abilities to absorb certain carotenoids, and different rates of metabolism and tissue uptake. Decreased serum levels occur with alcohol consumption, the use of oral contraceptives, smoking and prolonged exposure to UV light.

[64353] α-Carotene, β-carotene and β-cryptoxanthin can be converted to retinol or vitamin A in the intestine and liver by the enzyme 15-15′-b-carotenoid dioxygenase. Such in vivo formation of retinol appears to be homeostatically controlled, such that conversion to retinol is limited in persons having adequate vitamin A status.

[64354] The established efficacy of beta-carotene in quenching singlet oxygen and intercepting deleterious free radicals and reactive oxygen species makes it part of the diverse antioxidant defense system in humans. Reactive oxygen species have been implicated in the development of many diseases, including ischemic heart disease, various cancers, cataracts and macular degeneration. Because the conjugated polyene portion of beta-carotene confers its antioxidant capability and all carotenoids possess this structural feature, research efforts have been directed at evaluating the efficacy of other carotenoids in the prevention of free radical-mediated diseases. Indeed, in vitro experiments have demonstrated that lycopene, alphacarotene, zeaxanthin, lutein and cryptoxanthin quench singlet oxygen and inhibit lipid peroxidation. In addition to antioxidant capability, other biological actions of carotenoids include the ability to enhance immunocompetence and in vitro gap junction communication, reduce or inhibited mutagenesis and inhibit cell transformations in vitro.

[64355] Many epidemiological studies have established an inverse correlation between dietary intake of yellow-orange fruit and dark green, leafy vegetables and the incidence of various cancers, especially those of the mouth, pharynx, larynx, esophagus, lung, stomach, cervix and bladder.

[64356] While a number of protective compounds may be responsible for this observation, the coincidence of carotenoids in these foods has been noted. Because nutritionists and medical professionals currently recognize the occurrence of a large number of distinct carotenoids in food, interest in their functions and biological impact on health is burgeoning.

[64357] Lutein exists in the retina. It functions to protect photoreceptor cells from light-generated oxygen radicals, and thus plays a key role in preventing advanced macular degeneration. In addition to lutein, zeaxanthin exists in the retina and confers protection against macular degeneration. Zeaxanthin is also prevalent in ovaries and adipocyte tissue. This xanthophyll does not possess provitamin A activity.

[64358] Alcohol consumption has been shown to influence lipid peroxidation. Anhydrolutein, an oxidative by-product of lutein and zeaxanthin, was higher in plasma after alcohol ingestion, while concentrations of these xanthophylls were reduced. Lutein and zeaxanthin may therefore have protective effects against LDL oxidation.

[64359] Cryptoxanthin, also known as beta-cryptoxanthin, is a member of the carotenoid family, a group of flavonoids that provide color and flavor to fruits and vegetables. Like alpha- and betacarotene, cryptoxanthin is a powerful antioxidant that can be converted to active retinol, or vitamin A, in the body. Vitamin A is crucial to the maintenance of healthy vision, reproduction, and body tissues. Recent studies have shown that cryptoxanthin also plays an important role in preventing many forms of cancer. Cryptoxanthin may protect against cancer and other diseases associated with aging, including heart disease, skin cancer, prostate cancer, and arthritis. Like other carotenoids, cryptoxanthin almost certainly plays a key role in keeping the eyes healthy and preventing against age-related macular degeneration (AMD) and cataracts. Research also indicates that carotenoids may play a role in the prevention of many other serious health conditions, including Acquired Immunodeficiency Syndrome (AIDS), asthma, chronic yeast infection, and infertility. beta-Cryptoxanthin is capable of quenching singlet oxygen. beta-Cryptoxanthin is used to color butter. beta-Cryptoxanthin exhibits provitamin A activity.

[64360] The all-trans isomer of this carotenoid is the major source of dietary retinoids, due to its high provitamin A activity. One molecule of trans-beta-carotene can theoretically provide two molecules of trans retinaldehyde in vivo. alpha-Carotene is similar to beta-carotene in its biological activity, but quenches singlet oxygen more effectively.

[64361] Alpha-Carotene, beta-carotene and beta-cryptoxanthin can be converted to Vitamin A in the intestine and liver. Vitamin A is essential for the immune response and is also involved in other defenses against infectious agents. Nevertheless, in many individuals, this conversion is slow and ineffectual, particularly for older. Some individuals are known as non or low-responders because they do not convert beta-carotene to Vitamin A at the rate as expected. A number of factors can inhibit this conversion of beta-carotene to Vitamin A. The major reason why so many Americans have a poor vitamin A status is the regular use of excessive alcohol. Intestinal parasites can be a factor. And, any prescription drug that requires liver metabolism will decrease the liver conversion of beta-carotene to retinol in the liver. Diabetics and individuals with hypothyroidism or even borderline hypothyroidism are likely to be low-responders.

[64362] In plants, approximately 80-90% of the carotenoids present in green, leafy vegetables such as broccoli, kale, spinach and brussel sprouts are xanthophylls, whereas 10-20% are carotenes. Conversely, yellow and orange vegetables including carrots, sweet potatoes and squash contain predominantly carotenes. Up to 60% of the xanthophylls and 15% of the carotenes in these foods are destroyed during microwave cooking.

[64363] Dietary sources of Zeaxanthin include peaches, squash, apricots, oranges, papaya, prunes, pumpkin, mango, kale, kiwi, lettuce, honeydew melon and yellow corn.

[64364] Dietary sources of beta-Carotene include mango, cantaloupe, carrots, pumpkin, papaya, peaches, prunes, squash, sweet potato, apricots, cabbage, lima beans, green beans, broccoli, brussel sprouts, kale, kiwi, lettuce, peas, spinach, tomatoes, pink grapefruit, honeydew melon and oranges.

[64365] Some carotenoids occur particularly in a wide variety of marine animals including fish such as salmonids and sea bream, and crustaceans such as crab, lobster, and shrimp. Because animals generally cannot biosynthesize carotenoids, they obtain those carotenoids present in microorganisms or plants upon which they feed.

[64366] Carotenoids e.g. xanthophylls, e.g. as astaxanthin, supplied from biological sources, such as crustaceans, yeast, and green alga is limited by low yield and costly extraction methods when compared with that obtained by organic synthetic methods. Usual synthetic methods, however, produce by-products that can be considered unacceptable. It is therefore desirable to find a relatively inexpensive source of carotenoids, in particular xanthophylls, to be used as a feed supplement in aquaculture and as a valuable chemical for other industrial uses and for diets. Sources of xanthophylls include crustaceans such as a krill in the Antarctic Ocean, cultured products of the yeast Phaffia, cultured products of a green alga Haematococcus pluvialis, and products obtained by organic synthetic methods. However, when crustaceans such as a krill or the like are used, a great deal of work and expense are required for the isolation of xanthophylls from contaminants such as lipids and the like during the harvesting and extraction. Moreover, in the case of the cultured product of the yeast Phaffia, a great deal of expense is required for the gathering and extraction of astaxanthin because the yeast has rigid cell walls and produces xanthophylls only in a low yield. One approach to increase the productivity of some xanthophylls' production in a biological system is to use genetic engineering technology.

[64367] In many plants, lycopene is a branch point in carotenoid biosynthesis. Thus, some of the plant's lycopene is made into beta-carotene and zeaxanthin, and sometimes zeaxanthin diglucoside, whereas remaining portions of lycopene are formed into alpha-carotene and lutein (3,3′-dihydroxy-α-carotene), another hydroxylated compound. Carotenoids in higher plants; i.e., angiosperms, are found in plastids; i.e., chloroplasts and chromoplasts. Plastids are intracellular storage bodies that differ from vacuoles in being surrounded by a double membrane rather than a single membrane. Plastids such as chloroplasts can also contain their own DNA and ribosomes, can reproduce independently and synthesize some of their own proteins. Plastids thus share several characteristics of mitochondria. In leaves, carotenoids are usually present in the grana of chloroplasts where they provide a photoprotective function. Betacarotene and lutein are the predominant carotenoids, with the epoxidized carotenoids violaxanthin and neoxanthin being present in smaller amounts. Carotenoids accumulate in developing chromoplasts of flower petals, usually with the disappearance of chlorophyll. As in flower petals, carotenoids appear in fruit chromoplasts as they develop from chloroplasts. Most enzymes that take part in conversion of phytoene to carotenes and xanthophylls are labile, membrane-associated proteins that lose activity upon solubilization. In maize, cartonoids were present in horny endosperm (74% to 86%), floury endosperm (9%-23%) and in the germ and bran of the kernel.

[64368] At the present time only a few plants are widely used for commercial colored carotenoid production. However, the productivity of colored carotenoid synthesis in most of these plants is relatively low and the resulting carotenoids are expensively produced.

[64369] Dried marigold petals and marigold petal concentrates obtained from so-called xanthophyll marigolds are used as feed additives in the poultry industry to intensify the yellow color of egg yolks and broiler skin. The pigmenting ability of marigold petal meal resides largely in the carotenoid fraction known as the xanthophylls, primarily lutein esters. The xanthophyll zeaxanthin, also found in marigold petals, has been shown to be effective as a broiler pigmenter, producing a highly acceptable yellow to yellow-orange color. Of the xanthophylls, the pigments lutein and zeaxanthin are the most abundant in commercially available hybrids.

[64370] Carotenoids have been found in various higher plants in storage organs and in flower petals. For example, marigold flower petals accumulate large quantities of esterified lutein as their predominant xanthophyll carotenoid (about 75 to more than 90 percent), with smaller amounts of esterified zeaxanthin. Besides lutein and zeaxanthin, marigold flower petals also typically exhibit a small accumulation of β-carotene and epoxidized xanthophylls, but do not produce or accumulate canthaxanthin or astaxanthin because a 4-keto-β-ionene ring-forming enzyme is absent in naturally-occurring marigolds or their hybrids.

[64371] One way to increase the productive capacity of biosynthesis is to apply recombinant DNA technology. Thus, it would be desirable to produce colored carotenoids generally and, with the use of recent advances in determining carotenoid biosynthesis from β-carotene to xanthophylls and abscisic acid or from alpha-carotene to lutein to control the production of carotenoids. That type of production permits control over quality, quantity and selection of the most suitable and efficient producer organisms. The latter is especially important for commercial production economics and therefore availability to consumers.

[64372] Methods of recombinant DNA technology have been used for some years to improve the production of xanthophylls in microorganisms, in particular algae or in plants by amplifying individual xanthophyll biosynthesis genes and investigating the effect on xanthophyll production. It is for example reportet, that the five ketocarotenoids, e.g. the xanthophyll astaxanthin could be produced in the nectaries of transgenic tobacco plants. Those transgenic plants were prepared by Argobacterium tumifaciens-mediated transformation of tobacco plants using a vector that contained a ketolase-encoding gene from H. pluvialis denominated crtO along with the Pds gene from tomato as the promoter and to encode a leader sequence. The Pds gene was said by those workers to direct transcription and expression in chloroplasts and/or chromoplast containing tissues of plants. Those results indicated that about 75 percent of the carotenoids found in the flower of the transformed plant contained a keto group. Further, in maize the phytonene synthase (Psy), Phytone desaturase (Pds), and the ζ-carotene desaturase were identified and it was shown, that PSY activity is an important control point for the regulation of the flux. Genes suitable for conversion of microorganisms have also been reported (U.S. Pat. No. 6,150,130 WO 99/61652). Two different genes that can convert a carotenoid β-ionene ring compound into astaxanthin have been isolated from the green alga Haematococcus pluvialis. Zeaxanthin or ζ-carotene were also found in the marine bacteria Agrobacterium aurantiacum, Alcaligenes PC-1, Erwinia uredovora. An A. aurantiacum crtZ gene was introduced to an E. coli transformant that accumulated all-trans-β-carotene. The transformant so formed produced zeaxanthin. A gene cluster encoding the enzymes for a carotenoid biosynthesis pathway has been also cloned from the purple photosynthetic bacterium Rhodobacter capsulatus. A similar cluster for carotenoid biosynthesis from ubiquitous precursors such as farnesyl pyrophosphate and geranyl pyrophosphate has been cloned from the non-photosynthetic bacteria Erwinia herbicola.

[64373] Yet another carotenoid biosynthesis gene cluster has been cloned from Erwinia uredovora. It is yet unknown and unpredictable as to whether enzymes encoded by other organisms behave similarly to that of A. aurantiacum in vitro or in vivo after transformation into the cells of a higher plant.

[64374] The content of some carotinoids in a cell was also increased by increasing or decreasing certain activities as disclosed in WO2006/069610, WO2007/087815, WO2008/034648 or WO 2008/04505.

[64375] In addition to the above said about the biological importance of carotenoids, e.g. in vision, bone growth, reproduction, immune function, gene expression, emboryonic expression, cell division and cell differation, and respiration, it should be mentioned that in the world, the prevalence of vitamin A deficiency ranges from 100 to 250 million children and an estimated 250.000 to 500.000 children go blind each year from vitamin A deficiency.

[64376] Thus, it would be advantageous if an algae or other microorganism were available who produce large amounts of cryptoxanthin, zeaxanthin, violaxanthin or other carotenoids or abcisic acid.

[64377] Therefore improving the quality of foodstuffs and animal feeds is an important task of the food-and-feed industry. This is necessary since, for example, as mentioned above xanthophylls or abcisic acid, which occur in plants and some microorganisms are limited with regard to the supply of mammals. Especially advantageous for the quality of foodstuffs and animal feeds is as balanced as possible a carotenoids or abcisic acid profile in the diet since a great excess of some carotenoids or abcisic acid above a specific concentration in the food has only some positive effect. Efforts should be taken to optimize the levels of health-promoting compounds in foods. In order to do this, the compositional variation throughout the food chain must be known. The composition of carotenoids differs qualitatively and quantitatively in a given food due to factors such as cultivar or varietal differences, stage of maturity, climatic or geographic effects, part of the plant consumed, conditions during agricultural production, post-harvest handling, processing and storage. Based on this variability, measures must be taken to offer the population foods with higher and uniformly carotenoids and/or abcisic acid concentrations.

[64378] To ensure a high quality of foods and animal feeds, it is therefore necessary to add a plurality of carotenoids or abcisic acid in a balanced manner to suit the respective organism. Accordingly, there is still a great demand for new and more suitable genes, which encode enzymes or regulators, which participate in the biosynthesis of carotenoids or abcisic acid, in particular abscisic acid, cryptoxanthin, violaxanthin, and/or zeaxanthin and make it possible to produce certain carotenoids specifically on an industrial scale without unwanted byproducts being formed. In the selection of genes for biosynthesis or regulation two characteristics above all are particularly important. On the one hand, there is as ever a need for improved processes for obtaining the highest possible contents of carotenoids or abcisic acidand on the other hand as less as possible byproducts should be produced in the production process.

[64379] It is an object of the present invention to develop an inexpensive process for the synthesis of abscisic acid, cryptoxanthin, violaxanthin, and/or zeaxanthin.

[64380] It is a further object of the present invention to develop an inexpensive process for the synthesis of abscisic acid, cryptoxanthin, violaxanthin, and/or zeaxanthin and to assure that the abscisic acid, cryptoxanthin, violaxanthin, and/or zeaxanthin are more accessible and facilely to isolate and recover in an industrial scale from the producing organism, preferably from a plant.

[64381] for the disclosure of this paragraph see [0013.1.7.7] above

[64382] Accordingly, in a first embodiment, the invention relates to a process for the production of at least one fine chemical selected from the group consisting of: abscisic acid, cryptoxanthin, violaxanthin, and zeaxanthin, or, in other words, of the “fine chemical” or “fine chemical of the invention”.

[64383] The terms “fine chemical of the invention”, “fine chemical” or “the fine chemical” are used herein equally and relate in context of the paragraphs or sections [0014.1.13.13] to [515.1.1.13] essentially to the metabolite or the metabolites indicated in column 7, application no. 13 of Tables I, II and IV in the respective line.

[64384] Further, the term “in context of any of the paragraphs [0014.1.13.13] to [515.1.1.13]” as used herein means that for any of said paragraphs [0014.1.13.13] to [515.1.1.13] the term “the fine chemical” is understood to follow the definition of paragraphs or sections [0014.1.13.13] and [0015.1.13.13], independently whether it refers to any other paragraph or not and whether the reference recites the term “fine chemical” in an other context.

[64385] Thus, in cases where one or more paragraphs or sections are incorporated by reference into any of the present paragraphs [0014.1.13.13] to [515.1.1.13], e.g. by usage of the term “see paragraph” or the term “for the disclosure of this paragraph see the disclosure of paragraph” or the term “incorporated by reference” or a corresponding term, the incorporated paragraph, section or term “the fine chemical” is also understood to have the meaning according to the definition of paragraph [0014.1.13.13] and [0015.1.13.13].

[64386] Accordingly, in one embodiment, the term “fine chemical of the invention”, “fine chemical” or “the fine chemical” as used herein (alone or in combination, like in FCRP) means “abscisic acid in context of the nucleic acid or polypeptide sequences listed in the respective same line of any one of Tables I to IV of application no. 13 and indicating in column 7 the metabolite “abscisic acid”.

[64387] In one embodiment, the term abscisic acid or the term “fine chemical” mean in context of the paragraphs or sections [0014.1.13.13] to [515.1.1.13] at least one chemical compound with an activity of the above mentioned abscisic acid, respectively.

[64388] Accordingly, in one embodiment, the term “fine chemical of the invention”, “fine chemical” or “the fine chemical” as used herein (alone or in combination, like in FCRP) means “cryptoxanthin in context of the nucleic acid or polypeptide sequences listed in the respective same line of any one of Tables I to IV of application no. 13 and indicating in column 7 the metabolite “cryptoxanthin”.

[64389] In one embodiment, the term cryptoxanthin or the term “fine chemical” mean in context of the paragraphs or sections [0014.1.13.13] to [515.1.1.13] at least one chemical compound with an activity of the above mentioned cryptoxanthin, respectively.

[64390] Accordingly, in one embodiment, the term “fine chemical of the invention”, “fine chemical” or “the fine chemical” as used herein (alone or in combination, like in FCRP) means “violaxanthin in context of the nucleic acid or polypeptide sequences listed in the respective same line of any one of Tables I to IV of application no. 13 and indicating in column 7 the metabolite “violaxanthin”.

[64391] In one embodiment, the term violaxanthin or the term “fine chemical” mean in context of the paragraphs or sections [0014.1.13.13] to [515.1.1.13] at least one chemical compound with an activity of the above mentioned violaxanthin, respectively.

[64392] Accordingly, in one embodiment, the term “fine chemical of the invention”, “fine chemical” or “the fine chemical” as used herein (alone or in combination, like in FCRP) means “zeaxanthin in context of the nucleic acid or polypeptide sequences listed in the respective same line of any one of Tables I to IV of application no. 13 and indicating in column 7 the metabolite “zeaxanthin”.

[64393] In one embodiment, the term zeaxanthin or the term “fine chemical” mean in context of the paragraphs or sections [0014.1.13.13] to [515.1.1.13] at least one chemical compound with an activity of the above mentioned zeaxanthin, respectively.

[64394] Accordingly, in one embodiment, the terms “fine chemical of the invention”, “fine chemical” or “the fine chemical” mean in context of any of the paragraphs [0014.1.13.13] to [515.1.1.13] abscisic acid, its salts, ester or ether in free form or bound form. In a preferred embodiment, the term “the fine chemical” means abscisic acid or its salts, ester or ether, in free form or bound form. Other synonyms for abcisic acid are ABA, Dormin, [S-(Z,E)]-5-(1-Hydroxy-2,6,6-trimethyl-4-oxo-2-cyclohexen- 1-yl)-3-methyl-2,4-pentanedienoic acid, CAS-No 21293-29-8.

[64395] In a preferred embodiment “abscisic acid” means abscisic acid in free form. In a further embodiment “abscisic acid” means abscisic acid in form of sugar, preferably as abscisic acid glucose ester.

[64396] Accordingly, in one embodiment, the terms “fine chemical of the invention”, “fine chemical” or “the fine chemical” mean in context of any of the paragraphs [0014.1.13.13] to [515.1.1.13] cryptoxanthin, its salts, ester or ether in free form or bound form. In a preferred embodiment, the term “the fine chemical” means cryptoxanthin or its salts, ester or ether, in free form or bound form. Synonyms for cryptoxanthin are (R)-3,5,5-Trimethyl-4[3,7,12,16-tetramethyl-18-(2,6,6-trimethylcyclohex-1-enyl)-octadeca-1,3,5,7,9,11,13,15,17-nonaenyl]-cyclohex-3-enol, (3R)-β,β-Caroten-3-ol, Cryptoxanthol, Caricaxanthin.

[64397] In a preferred embodiment “cryptoxanthin” means cryptoxanthin in free form.

[64398] Accordingly, in one embodiment, the terms “fine chemical of the invention”, “fine chemical” or “the fine chemical” mean in context of any of the paragraphs [0014.1.13.13] to [515.1.1.13] violaxanthin, its salts, ester or ether in free form or bound form. In a preferred embodiment, the term “the fine chemical” means violaxanthin or its salts, ester or ether, in free form or bound form, preferably covalently bound (via ester-linkage) to fatty acids or in glycosylated form. Synonyms for violaxanthin are 1S,4S,6R)-1-[(1E,3E,5E,7E,9E,11E,13E,15E,17E)-18-[(1S,4S,6R)-4-Hydroxy-2,2,6-trimethyl-7-oxabicyclo[4.1.0]heptan-1-yl]-3,7,12,16-tetramethyloctadeca-1,3,5,7,9,11,13,15,17-nonaenyl]-2,2,6-trimethyl-7-oxabicyclo[4.1.0]heptan-4-ol,5,6:5′,6′-Diepoxy-5,5′,6,6′-tetrahydro-β-carotene-3,3′-diol, Zeaxanthin diepoxide, all-trans-Violaxanthin, E161e, CAS-No 126-29-4.

[64399] In a preferred embodiment “violaxanthin” means violaxanthin in free form.

[64400] Accordingly, in one embodiment, the terms “fine chemical of the invention”, “fine chemical” or “the fine chemical” mean in context of any of the paragraphs [0014.1.13.13] to [515.1.1.13] zeaxanthin, its salts, ester or ether in free form or bound form. In a preferred embodiment, the term “the fine chemical” means zeaxanthin or its salts, ester or ether, in free form or bound form, preferably to a glucoside, e.g a diglucoside. Other names for zeaxanthin are for example 4-[18-(4-hydroxy-2,6,6-trimethyl-1-cyclohexenyl)-3,7,12,16-tetramethyl-octadeca-1,3,5,7,9,11,13,15,17-nonaenyl]-3,5,5-trimethyl-cyclohex-3-en-1-ol, β,β-carotene-3,3′-diol.

[64401] In a preferred embodiment “zeaxanthin” means zeaxanthin in free form.

[64402] In one embodiment, the term “xanthophyll” or “the fine chemical” or “the respective fine chemical” mean in context of any of the paragraphs [0014.1.13.13] to [515.1.1.13] at least one chemical compound with xanthophyll activity selected from the group “abscisic acid, cryptoxanthin, violaxanthin, and zeaxanthin”.

[64403] Further, the term “in context of any of the paragraphs [0014.1.13.13] to [515.1.1.13]” as used herein means that for any of said paragraphs [0014.1.13.13] to [515.1.1.13] the term “the fine chemical” is understood to follow the definition of section [0014.1.13.13] or section [independently whether it refers to any other paragraph or not and whether the reference recites the term “fine chemical” in an other context.

[64404] Thus, in cases where one or more paragraphs or sections are incorporated by reference into any of the present paragraphs [0014.1.13.13] to [515.1.1.13], e.g. by usage of the term “see paragraph” or the term “for the disclosure of this paragraph see the disclosure of paragraph” or the term “incorporated by reference” or a corresponding term, the incorporated paragraph, section or term “the fine chemical” is also understood to have the meaning according to this definition of this paragraph [0015.1.13.13].

[64405] Further, the term “fine chemicals” as used herein relates to compositions comprising said fine chemical(s), i.e. comprising abscisic acid, cryptoxanthin, violaxanthin, and/or zeaxanthin, respectively.

[64406] Accordingly, the present invention relates to a process for the production of cryptoxanthin, which comprises
[64407] (a) increasing or generating one or more activities selected from the group consisting of thioredoxin in a non-human organism or a part thereof, preferably a microorganism, a plant cell, a plant or a part thereof, as compared to a corresponding non-transformed wild type non-human organism or a part thereof; and
[64408] (b) growing the non-human organism or a part thereof under conditions which permit the pro-duction of cryptoxanthin or a composition comprising cryptoxanthin in said non-human organism or in the culture medium surrounding said non-human organism.

[64409] Accordingly, the present invention relates to a process for the production of zeaxanthin, which comprises
[64410] (a) increasing or generating one or more activities selected from the group consisting of F-box protein in a non-human organism or a part thereof, preferably a microorganism, a plant cell, a plant or a part thereof, as compared to a corresponding non-transformed wild type non-human organism or a part thereof; and
[64411] (b) growing the non-human organism or a part thereof under conditions which permit the production of zeaxanthin or a composition comprising zeaxanthin in said non-human organism or in the culture medium surrounding said non-human organism.

[64412] Accordingly, the present invention relates to a process for the production of zeaxanthin, which comprises
[64413] (a) increasing or generating one or more activities selected from the group consisting of monthiol glutaredoxin in a non-human organism or a part thereof, preferably a microorganism, a plant cell, a plant or a part thereof, as compared to a corresponding non-transformed wild type non-human organism or a part thereof; and
[64414] (b) growing the non-human organism or a part thereof under conditions which permit the production of zeaxanthin or a composition comprising zeaxanthin in said non-human organism or in the culture medium surrounding said non-human organism.

[64415] Accordingly, the present invention relates to a process for the production of zeaxanthin, which comprises
[64416] (a) increasing or generating one or more activities selected from the group consisting of monothiol glutaredoxin in a non-human organism or a part thereof, preferably a microorganism, a plant cell, a plant or a part thereof, as compared to a corresponding non-transformed wild type non-human organism or a part thereof; and
[64417] (b) growing the non-human organism or a part thereof under conditions which permit the production of zeaxanthin or a composition comprising zeaxanthin in said non-human organism or in the culture medium surrounding said non-human organism.

[64418] Accordingly, the present invention relates to a process for the production of zeaxanthin, which comprises
[64419] (a) increasing or generating one or more activities selected from the group consisting of monothiol glutaredoxin in a non-human organism or a part thereof, preferably a microorganism, a plant cell, a plant or a part thereof, as compared to a corresponding non-transformed wild type non-human organism or a part thereof; and
[64420] (b) growing the non-human organism or a part thereof under conditions which permit the production of zeaxanthin or a composition comprising zeaxanthin in said non-human organism or in the culture medium surrounding said non-human organism.

[64421] Accordingly, the present invention relates to a process for the production of zeaxanthin, which comprises
[64422] (a) increasing or generating one or more activities selected from the group consisting of protein phosphatase in a non-human organism or a part thereof, preferably a microorganism, a plant cell, a plant or a part thereof, as compared to a corresponding non-transformed wild type non-human organism or a part thereof; and
[64423] (b) growing the non-human organism or a part thereof under conditions which permit the production of zeaxanthin or a composition comprising zeaxanthin in said non-human organism or in the culture medium surrounding said non-human organism.

[64424] Accordingly, the present invention relates to a process for the production of cryptoxanthin, which comprises
[64425] (a) increasing or generating one or more activities selected from the group consisting of glutaredoxin in a non-human organism or a part thereof, preferably a microorganism, a plant cell, a plant or a part thereof, as compared to a corresponding non-transformed wild type non-human organism or a part thereof; and
[64426] (b) growing the non-human organism or a part thereof under conditions which permit the production of cryptoxanthin or a composition comprising cryptoxanthin in said non-human organism or in the culture medium surrounding said non-human organism.

[64427] Accordingly, the present invention relates to a process for the production of zeaxanthin, which comprises
[64428] (a) increasing or generating one or more activities selected from the group consisting of MADS-box transcription factor in a non-human organism or a part thereof, preferably a microorganism, a plant cell, a plant or a part thereof, as compared to a corresponding non-transformed wild type non-human organism or a part thereof; and
[64429] (b) growing the non-human organism or a part thereof under conditions which permit the production of zeaxanthin or a composition comprising zeaxanthin in said non-human organism or in the culture medium surrounding said non-human organism.

[64430] Accordingly, the present invention relates to a process for the production of zeaxanthin, which comprises
[64431] (a) increasing or generating one or more activities selected from the group consisting of isopropylmalate isomerase large subunit in a non-human organism or a part thereof, preferably a microorganism, a plant cell, a plant or a part thereof, as compared to a corresponding non-transformed wild type non-human organism or a part thereof; and
[64432] (b) growing the non-human organism or a part thereof under conditions which permit the production of zeaxanthin or a composition comprising zeaxanthin in said non-human organism or in the culture medium surrounding said non-human organism.

[64433] Accordingly, the present invention relates to a process for the production of cryptoxanthin, which comprises
[64434] (a) increasing or generating one or more activities selected from the group consisting of AX653549-protein in a non-human organism or a part thereof, preferably a microorganism, a plant cell, a plant or a part thereof, as compared to a corresponding non-transformed wild type non-human organism or a part thereof; and
[64435] (b) growing the non-human organism or a part thereof under conditions which permit the production of cryptoxanthin or a composition comprising cryptoxanthin in said non-human organism or in the culture medium surrounding said non-human organism.

[64436] Accordingly, the present invention relates to a process for the production of zeaxanthin, which comprises
[64437] (a) increasing or generating one or more activities selected from the group consisting of b1003-protein in a non-human organism or a part thereof, preferably a microorganism, a plant cell, a plant or a part thereof, as compared to a corresponding non-transformed wild type non-human organism or a part thereof; and
[64438] (b) growing the non-human organism or a part thereof under conditions which permit the production of zeaxanthin or a composition comprising zeaxanthin in said non-human organism or in the culture medium surrounding said non-human organism.

[64439] Accordingly, the present invention relates to a process for the production of zeaxanthin, which comprises
[64440] (a) increasing or generating one or more activities selected from the group consisting of lipoprotein precursor in a non-human organism or a part thereof, preferably a microorganism, a plant cell, a plant or a part thereof, as compared to a corresponding non-transformed wild type non-human organism or a part thereof; and
[64441] (b) growing the non-human organism or a part thereof under conditions which permit the production of zeaxanthin or a composition comprising zeaxanthin in said non-human organism or in the culture medium surrounding said non-human organism.

[64442] Accordingly, the present invention relates to a process for the production of zeaxanthin, which comprises
[64443] (a) increasing or generating one or more activities selected from the group consisting of serine/threonine-protein phosphatase in a non-human organism or a part thereof, preferably a microorganism, a plant cell, a plant or a part thereof, as compared to a corresponding non-transformed wild type non-human organism or a part thereof; and
[64444] (b) growing the non-human organism or a part thereof under conditions which permit the production of zeaxanthin or a composition comprising zeaxanthin in said non-human organism or in the culture medium surrounding said non-human organism.

[64445] Accordingly, the present invention relates to a process for the production of zeaxanthin, which comprises
[64446] (a) increasing or generating one or more activities selected from the group consisting of b2032-protein in a non-human organism or a part thereof, preferably a microorganism, a plant cell, a plant or a part thereof, as compared to a corresponding non-transformed wild type non-human organism or a part thereof; and
[64447] (b) growing the non-human organism or a part thereof under conditions which permit the production of zeaxanthin or a composition comprising zeaxanthin in said non-human organism or in the culture medium surrounding said non-human organism.

[64448] Accordingly, the present invention relates to a process for the production of cryptoxanthin, which comprises
[64449] (a) increasing or generating one or more activities selected from the group consisting of b2099-protein in a non-human organism or a part thereof, preferably a microorganism, a plant cell, a plant or a part thereof, as compared to a corresponding non-transformed wild type non-human organism or a part thereof; and
[64450] (b) growing the non-human organism or a part thereof under conditions which permit the production of cryptoxanthin or a composition comprising cryptoxanthin in said non-human organism or in the culture medium surrounding said non-human organism.

[64451] Accordingly, the present invention relates to a process for the production of zeaxanthin, which comprises
[64452] (a) increasing or generating one or more activities selected from the group consisting of b2121-protein in a non-human organism or a part thereof, preferably a microorganism, a plant cell, a plant or a part thereof, as compared to a corresponding non-transformed wild type non-human organism or a part thereof; and
[64453] (b) growing the non-human organism or a part thereof under conditions which permit the production of zeaxanthin or a composition comprising zeaxanthin in said non-human organism or in the culture medium surrounding said non-human organism.

[64454] Accordingly, the present invention relates to a process for the production of zeaxanthin, which comprises
[64455] (a) increasing or generating one or more activities selected from the group consisting of b2474-protein in a non-human organism or a part thereof, preferably a microorganism, a plant cell, a plant or a part thereof, as compared to a corresponding non-transformed wild type non-human organism or a part thereof; and
[64456] (b) growing the non-human organism or a part thereof under conditions which permit the production of zeaxanthin or a composition comprising zeaxanthin in said non-human organism or in the culture medium surrounding said non-human organism.

[64457] Accordingly, the present invention relates to a process for the production of zeaxanthin, which comprises
[64458] (a) increasing or generating one or more activities selected from the group consisting of transcriptional regulator in a non-human organism or a part thereof, preferably a microorganism, a plant cell, a plant or a part thereof, as compared to a corresponding non-transformed wild type non-human organism or a part thereof; and
[64459] (b) growing the non-human organism or a part thereof under conditions which permit the production of zeaxanthin or a composition comprising zeaxanthin in said non-human organism or in the culture medium surrounding said non-human organism.

[64460] Accordingly, the present invention relates to a process for the production of cryptoxanthin, which comprises
[64461] (a) increasing or generating one or more activities selected from the group consisting of flavodoxin in a non-human organism or a part thereof, preferably a microorganism, a plant cell, a plant or a part thereof, as compared to a corresponding non-transformed wild type non-human organism or a part thereof; and
[64462] (b) growing the non-human organism or a part thereof under conditions which permit the production of cryptoxanthin or a composition comprising cryptoxanthin in said non-human organism or in the culture medium surrounding said non-human organism.

[64463] Accordingly, the present invention relates to a process for the production of violaxanthin, which comprises
[64464] (a) increasing or generating one or more activities selected from the group consisting of ribosephosphate isomerase, constitutive in a non-human organism or a part thereof, preferably a microorganism, a plant cell, a plant or a part thereof, as compared to a corresponding non-transformed wild type non-human organism or a part thereof; and
[64465] (b) growing the non-human organism or a part thereof under conditions which permit the production of violaxanthin or a composition comprising violaxanthin in said non-human organism or in the culture medium surrounding said non-human organism.

[64466] Accordingly, the present invention relates to a process for the production of violaxanthin, which comprises
[64467] (a) increasing or generating one or more activities selected from the group consisting of acetyl CoA carboxylase in a non-human organism or a part thereof, preferably a microorganism, a plant cell, a plant or a part thereof, as compared to a corresponding non-transformed wild type non-human organism or a part thereof; and
[64468] (b) growing the non-human organism or a part thereof under conditions which permit the production of violaxanthin or a composition comprising violaxanthin in said non-human organism or in the culture medium surrounding said non-human organism.

[64469] Accordingly, the present invention relates to a process for the production of cryptoxanthin, which comprises
[64470] (a) increasing or generating one or more activities selected from the group consisting of b3346-protein in a non-human organism or a part thereof, preferably a microorganism, a plant cell, a plant or a part thereof, as compared to a corresponding non-transformed wild type non-human organism or a part thereof; and
[64471] (b) growing the non-human organism or a part thereof under conditions which permit the production of cryptoxanthin or a composition comprising cryptoxanthin in said non-human organism or in the culture medium surrounding said non-human organism.

[64472] Accordingly, the present invention relates to a process for the production of violaxanthin, which comprises
[64473] (a) increasing or generating one or more activities selected from the group consisting of ketol-acid reductoisomerase in a non-human organism or a part thereof, preferably a microorganism, a plant cell, a plant or a part thereof, as compared to a corresponding non-transformed wild type non-human organism or a part thereof; and
[64474] (b) growing the non-human organism or a part thereof under conditions which permit the production of violaxanthin or a composition comprising violaxanthin in said non-human organism or in the culture medium surrounding said non-human organism.

[64475] Accordingly, the present invention relates to a process for the production of cryptoxanthin, which comprises
[64476] (a) increasing or generating one or more activities selected from the group consisting of b3817-protein in a non-human organism or a part thereof, preferably a microorganism, a plant cell, a plant or a part thereof, as compared to a corresponding non-transformed wild type non-human organism or a part thereof; and
[64477] (b) growing the non-human organism or a part thereof under conditions which permit the production of cryptoxanthin or a composition comprising cryptoxanthin in said non-human organism or in the culture medium surrounding said non-human organism.

[64478] Accordingly, the present invention relates to a process for the production of violaxanthin, which comprises
[64479] (a) increasing or generating one or more activities selected from the group consisting of superoxide dismutase in a non-human organism or a part thereof, preferably a microorganism, a plant cell, a plant or a part thereof, as compared to a corresponding non-transformed wild type non-human organism or a part thereof; and
[64480] (b) growing the non-human organism or a part thereof under conditions which permit the production of violaxanthin or a composition comprising violaxanthin in said non-human organism or in the culture medium surrounding said non-human organism.

[64481] Accordingly, the present invention relates to a process for the production of violaxanthin, which comprises
[64482] (a) increasing or generating one or more activities selected from the group consisting of acetyltransferase in a non-human organism or a part thereof, preferably a microorganism, a plant cell, a plant or a part thereof, as compared to a corresponding non-transformed wild type non-human organism or a part thereof; and
[64483] (b) growing the non-human organism or a part thereof under conditions which permit the production of violaxanthin or a composition comprising violaxanthin in said non-human organism or in the culture medium surrounding said non-human organism.

[64484] Accordingly, the present invention relates to a process for the production of cryptoxanthin, which comprises
[64485] (a) increasing or generating one or more activities selected from the group consisting of melibiose carrier protein in a non-human organism or a part thereof, preferably a microorganism, a plant cell, a plant or a part thereof, as compared to a corresponding non-transformed wild type non-human organism or a part thereof; and
[64486] (b) growing the non-human organism or a part thereof under conditions which permit the production of cryptoxanthin or a composition comprising cryptoxanthin in said non-human organism or in the culture medium surrounding said non-human organism.

[64487] Accordingly, the present invention relates to a process for the production of zeaxanthin, which comprises
[64488] (a) increasing or generating one or more activities selected from the group consisting of melibiose carrier protein in a non-human organism or a part thereof, preferably a microorganism, a plant cell, a plant or a part thereof, as compared to a corresponding non-transformed wild type non-human organism or a part thereof; and
[64489] (b) growing the non-human organism or a part thereof under conditions which permit the pro-duction of zeaxanthin or a composition comprising zeaxanthin in said non-human organism or in the culture medium surrounding said non-human organism.

[64490] Accordingly, the present invention relates to a process for the production of violaxanthin, which comprises
[64491] (a) increasing or generating one or more activities selected from the group consisting of purine-nucleoside phosphorylase in a non-human organism or a part thereof, preferably a microorganism, a plant cell, a plant or a part thereof, as compared to a corresponding non-transformed wild type non-human organism or a part thereof; and
[64492] (b) growing the non-human organism or a part thereof under conditions which permit the production of violaxanthin or a composition comprising violaxanthin in said non-human organism or in the culture medium surrounding said non-human organism.

[64493] Accordingly, the present invention relates to a process for the production of zeaxanthin, which comprises
[64494] (a) increasing or generating one or more activities selected from the group consisting of transcription factor in a non-human organism or a part thereof, preferably a microorganism, a plant cell, a plant or a part thereof, as compared to a corresponding non-transformed wild type non-human organism or a part thereof; and
[64495] (b) growing the non-human organism or a part thereof under conditions which permit the production of zeaxanthin or a composition comprising zeaxanthin in said non-human organism or in the culture medium surrounding said non-human organism.

[64496] Accordingly, the present invention relates to a process for the production of cryptoxanthin, which comprises
[64497] (a) increasing or generating one or more activities selected from the group consisting of coproporphyrinogen oxidase in a non-human organism or a part thereof, preferably a microorganism, a plant cell, a plant or a part thereof, as compared to a corresponding non-transformed wild type non-human organism or a part thereof; and
[64498] (b) growing the non-human organism or a part thereof under conditions which permit the production of cryptoxanthin or a composition comprising cryptoxanthin in said non-human organism or in the culture medium surrounding said non-human organism.

[64499] Accordingly, the present invention relates to a process for the production of zeaxanthin, which comprises
[64500] (a) increasing or generating one or more activities selected from the group consisting of coproporphyrinogen oxidase in a non-human organism or a part thereof, preferably a microorganism, a plant cell, a plant or a part thereof, as compared to a corresponding non-transformed wild type non-human organism or a part thereof; and
[64501] (b) growing the non-human organism or a part thereof under conditions which permit the production of zeaxanthin or a composition comprising zeaxanthin in said non-human organism or in the culture medium surrounding said non-human organism.

[64502] Accordingly, the present invention relates to a process for the production of zeaxanthin, which comprises
[64503] (a) increasing or generating one or more activities selected from the group consisting of glycerol-3-phosphate dehydrogenase in a non-human organism or a part thereof, preferably a microorganism, a plant cell, a plant or a part thereof, as compared to a corresponding non-transformed wild type non-human organism or a part thereof; and
[64504] (b) growing the non-human organism or a part thereof under conditions which permit the production of zeaxanthin or a composition comprising zeaxanthin in said non-human organism or in the culture medium surrounding said non-human organism.

[64505] Accordingly, the present invention relates to a process for the production of cryptoxanthin, which comprises
[64506] (a) increasing or generating one or more activities selected from the group consisting of YCL026C-A-protein in a non-human organism or a part thereof, preferably a microorganism, a plant cell, a plant or a part thereof, as compared to a corresponding non-transformed wild type non-human organism or a part thereof; and
[64507] (b) growing the non-human organism or a part thereof under conditions which permit the production of cryptoxanthin or a composition comprising cryptoxanthin in said non-human organism or in the culture medium surrounding said non-human organism.

[64508] Accordingly, the present invention relates to a process for the production of cryptoxanthin, which comprises
[64509] (a) increasing or generating one or more activities selected from the group consisting of F-box protein in a non-human organism or a part thereof, preferably a microorganism, a plant cell, a plant or a part thereof, as compared to a corresponding non-transformed wild type non-human organism or a part thereof; and
[64510] (b) growing the non-human organism or a part thereof under conditions which permit the production of cryptoxanthin or a composition comprising cryptoxanthin in said non-human organism or in the culture medium surrounding said non-human organism.

[64511] Accordingly, the present invention relates to a process for the production of cryptoxanthin, which comprises
[64512] (a) increasing or generating one or more activities selected from the group consisting of ygl096w-protein in a non-human organism or a part thereof, preferably a microorganism, a plant cell, a plant or a part thereof, as compared to a corresponding non-transformed wild type non-human organism or a part thereof; and
[64513] (b) growing the non-human organism or a part thereof under conditions which permit the production of cryptoxanthin or a composition comprising cryptoxanthin in said non-human organism or in the culture medium surrounding said non-human organism.

[64514] Accordingly, the present invention relates to a process for the production of cryptoxanthin, which comprises
[64515] (a) increasing or generating one or more activities selected from the group consisting of alcohol dehydrogenase in a non-human organism or a part thereof, preferably a microorganism, a plant cell, a plant or a part thereof, as compared to a corresponding non-transformed wild type non-human organism or a part thereof; and
[64516] (b) growing the non-human organism or a part thereof under conditions which permit the production of cryptoxanthin or a composition comprising cryptoxanthin in said non-human organism or in the culture medium surrounding said non-human organism.

[64517] Accordingly, the present invention relates to a process for the production of cryptoxanthin, which comprises
[64518] (a) increasing or generating one or more activities selected from the group consisting of halotolerance protein in a non-human organism or a part thereof, preferably a microorganism, a plant cell, a plant or a part thereof, as compared to a corresponding non-transformed wild type non-human organism or a part thereof; and
[64519] (b) growing the non-human organism or a part thereof under conditions which permit the production of cryptoxanthin or a composition comprising cryptoxanthin in said non-human organism or in the culture medium surrounding said non-human organism.

[64520] Accordingly, the present invention relates to a process for the production of zeaxanthin, which comprises
[64521] (a) increasing or generating one or more activities selected from the group consisting of halotolerance protein in a non-human organism or a part thereof, preferably a microorganism, a plant cell, a plant or a part thereof, as compared to a corresponding non-transformed wild type non-human organism or a part thereof; and
[64522] (b) growing the non-human organism or a part thereof under conditions which permit the production of zeaxanthin or a composition comprising zeaxanthin in said non-human organism or in the culture medium surrounding said non-human organism.

[64523] Accordingly, the present invention relates to a process for the production of zeaxanthin, which comprises
[64524] (a) increasing or generating one or more activities selected from the group consisting of N-acetylglucosaminylphosphatidylinositoldeacetylase in a non-human organism or a part thereof, preferably a microorganism, a plant cell, a plant or a part thereof, as compared to a corresponding non-transformed wild type non-human organism or a part thereof; and
[64525] (b) growing the non-human organism or a part thereof under conditions which permit the production of zeaxanthin or a composition comprising zeaxanthin in said non-human organism or in the culture medium surrounding said non-human organism.

[64526] Accordingly, the present invention relates to a process for the production of cryptoxanthin, which comprises
[64527] (a) increasing or generating one or more activities selected from the group consisting of ymr324c-protein in a non-human organism or a part thereof, preferably a microorganism, a plant cell, a plant or a part thereof, as compared to a corresponding non-transformed wild type non-human organism or a part thereof; and
[64528] (b) growing the non-human organism or a part thereof under conditions which permit the production of cryptoxanthin or a composition comprising cryptoxanthin in said non-human organism or in the culture medium surrounding said non-human organism.

[64529] Accordingly, the present invention relates to a process for the production of zeaxanthin, which comprises
[64530] (a) increasing or generating one or more activities selected from the group consisting of sterol O-acyltransferase in a non-human organism or a part thereof, preferably a microorganism, a plant cell, a plant or a part thereof, as compared to a corresponding non-transformed wild type non-human organism or a part thereof; and
[64531] (b) growing the non-human organism or a part thereof under conditions which permit the production of zeaxanthin or a composition comprising zeaxanthin in said non-human organism or in the culture medium surrounding said non-human organism.

[64532] Accordingly, the present invention relates to a process for the production of abscisic acid, which comprises
[64533] (a) increasing or generating one or more activities selected from the group consisting of YER184C-protein in a non-human organism or a part thereof, preferably a microorganism, a plant cell, a plant or a part thereof, as compared to a corresponding non-transformed wild type non-human organism or a part thereof; and
[64534] (b) growing the non-human organism or a part thereof under conditions which permit the production of abscisic acid or a composition comprising abscisic acid in said non-human organism or in the culture medium surrounding said non-human organism.

[64535] Accordingly, the present invention relates to a process for the production of abscisic acid, which comprises
[64536] (a) increasing or generating one or more activities selected from the group consisting of YOR044W-protein in a non-human organism or a part thereof, preferably a microorganism, a plant cell, a plant or a part thereof, as compared to a corresponding non-transformed wild type non-human organism or a part thereof; and
[64537] (b) growing the non-human organism or a part thereof under conditions which permit the production of abscisic acid or a composition comprising abscisic acid in said non-human organism or in the culture medium surrounding said non-human organism.

[64538] Accordingly, the present invention relates to a process for the production of abscisic acid, which comprises
[64539] (a) increasing or generating one or more activities selected from the group consisting of gluconate transport system permease 3 in a non-human organism or a part thereof, preferably a microorganism, a plant cell, a plant or a part thereof, as compared to a corresponding non-transformed wild type non-human organism or a part thereof; and
[64540] (b) growing the non-human organism or a part thereof under conditions which permit the production of abscisic acid or a composition comprising abscisic acid in said non-human organism or in the culture medium surrounding said non-human organism.

[64541] Accordingly, the present invention relates to a process for the production of abscisic acid, which comprises
[64542] (a) increasing or generating one or more activities selected from the group consisting of nitrate/nitrite transport protein in a non-human organism or a part thereof, preferably a microorganism, a plant cell, a plant or a part thereof, as compared to a corresponding non-transformed wild type non-human organism or a part thereof; and
[64543] (b) growing the non-human organism or a part thereof under conditions which permit the production of abscisic acid or a composition comprising abscisic acid in said non-human organism or in the culture medium surrounding said non-human organism.

[64544] Accordingly, the present invention relates to a process for the production of abscisic acid, which comprises
[64545] (a) increasing or generating one or more activities selected from the group consisting of acyl transferase in a non-human organism or a part thereof, preferably a microorganism, a plant cell, a plant or a part thereof, as compared to a corresponding non-transformed wild type non-human organism or a part thereof; and
[64546] (b) growing the non-human organism or a part thereof under conditions which permit the production of abscisic acid or a composition comprising abscisic acid in said non-human organism or in the culture medium surrounding said non-human organism.

[64547] Accordingly, the present invention relates to a process for the production of abscisic acid, which comprises
[64548] (a) increasing or generating one or more activities selected from the group consisting of heat shock transcription factor in a non-human organism or a part thereof, preferably a microorganism, a plant cell, a plant or a part thereof, as compared to a corresponding non-transformed wild type non-human organism or a part thereof; and
[64549] (b) growing the non-human organism or a part thereof under conditions which permit the production of abscisic acid or a composition comprising abscisic acid in said non-human organism or in the culture medium surrounding said non-human organism.

[64550] Accordingly, the present invention relates to a process for the production of abscisic acid, which comprises
[64551] (a) increasing or generating one or more activities selected from the group consisting of protein kinase in a non-human organism or a part thereof, preferably a microorganism, a plant cell, a plant or a part thereof, as compared to a corresponding non-transformed wild type non-human organism or a part thereof; and
[64552] (b) growing the non-human organism or a part thereof under conditions which permit the production of abscisic acid or a composition comprising abscisic acid in said non-human organism or in the culture medium surrounding said non-human organism.

[64553] Accordingly, the present invention relates to a process for the production of abscisic acid, which comprises
[64554] (a) increasing or generating one or more activities selected from the group consisting of protein phosphatase in a non-human organism or a part thereof, preferably a microorganism, a plant cell, a plant or a part thereof, as compared to a corresponding non-transformed wild type non-human organism or a part thereof; and
[64555] (b) growing the non-human organism or a part thereof under conditions which permit the production of abscisic acid or a composition comprising abscisic acid in said non-human organism or in the culture medium surrounding said non-human organism.

[64556] Accordingly, the present invention relates to a process for the production of abscisic acid, which comprises
[64557] (a) increasing or generating one or more activities selected from the group consisting of glycine cleavage system T aminomethyltransferase in a non-human organism or a part thereof, preferably a microorganism, a plant cell, a plant or a part thereof, as compared to a corresponding non-transformed wild type non-human organism or a part thereof; and
[64558] (b) growing the non-human organism or a part thereof under conditions which permit the production of abscisic acid or a composition comprising abscisic acid in said non-human organism or in the culture medium surrounding said non-human organism.

[64559] Accordingly, the present invention relates to a process for the production of abscisic acid, which comprises
[64560] (a) increasing or generating one or more activities selected from the group consisting of glutaredoxin in a non-human organism or a part thereof, preferably a microorganism, a plant cell, a plant or a part thereof, as compared to a corresponding non-transformed wild type non-human organism or a part thereof; and
[64561] (b) growing the non-human organism or a part thereof under conditions which permit the production of abscisic acid or a composition comprising abscisic acid in said non-human organism or in the culture medium surrounding said non-human organism.

[64562] An embodiment of the present invention relates to a process for the production of abscisic acid, which comprises
[64563] (a1) increasing or generating the activity of a polypeptide comprising a polypeptide as depicted in a respective line in column 5 or 8 of Table II, application no. 13, or a homolog or a fragment thereof, a consensus sequence or at least one polypeptide motif as depicted in the respective line in column 8 of Table IV, application no. 13, whereby the respective line disclose in column 7 the fine chemical abscisic acid; or
[64564] (a2) increasing or generating the activity of an expression product of one or more nucleic acid molecule(s) comprising a polynucleotide as depicted in the respective line in column 5 or 8 of Table I, application no. 13, preferably the coding region thereof, or a homolog or a fragment thereof, whereby the respective line disclose in column 7 the fine chemical abscisic acid; or
[64565] (a3) increasing or generating the activity of a functional equivalent of (a1) or (a2); in a non-human organism or a part thereof; preferably a microorganism, a plant cell, a plant or a part thereof, as compared to a corresponding non-transformed wild type non-human organism or a part thereof; and
[64566] (b) growing the non-human organism under conditions which permit the production of abscisic acid or a composition comprising abscisic acid in said non-human organism or in the culture medium surrounding said non-human organism.

[64567] An embodiment of the present invention relates to a process for the production of cryptoxanthin, which comprises
[64568] (a1) increasing or generating the activity of a polypeptide comprising a polypeptide as depicted in a respective line in column 5 or 8 of Table II, application no. 13, or a homolog or a fragment thereof, a consensus sequence or at least one polypeptide motif as depicted in the respective line in column 8 of Table IV, application no. 13, whereby the respective line disclose in column 7 the fine chemical cryptoxanthin; or
[64569] (a2) increasing or generating the activity of an expression product of one or more nucleic acid molecule(s) comprising a polynucleotide as depicted in the respective line in column 5 or 8 of Table I, application no. 13, preferably the coding region thereof, or a homolog or a fragment thereof, whereby the respective line disclose in column 7 the fine chemical cryptoxanthin; or
[64570] (a3) increasing or generating the activity of a functional equivalent of (a1) or (a2); in a non-human organism or a part thereof; preferably a microorganism, a plant cell, a plant or a part thereof, as compared to a corresponding non-transformed wild type non-human organism or a part thereof; and
[64571] (b) growing the non-human organism under conditions which permit the production of cryptoxanthin or a composition comprising cryptoxanthin in said non-human organism or in the culture medium surrounding said non-human organism.

[64572] An embodiment of the present invention relates to a process for the production of violaxanthin, which comprises
[64573] (a1) increasing or generating the activity of a polypeptide comprising a polypeptide as depicted in a respective line in column 5 or 8 of Table II, application no. 13, or a homolog or a fragment thereof, a consensus sequence or at least one polypeptide motif as depicted in the respective line in column 8 of Table IV, application no. 13, whereby the respective line disclose in column 7 the fine chemical violaxanthin; or
[64574] (a2) increasing or generating the activity of an expression product of one or more nucleic acid molecule(s) comprising a polynucleotide as depicted in the respective line in column 5 or 8 of Table I, application no. 13, preferably the coding region thereof, or a homolog or a fragment thereof, whereby the respective line disclose in column 7 the fine chemical violaxanthin; or
[64575] (a3) increasing or generating the activity of a functional equivalent of (a1) or (a2); in a non-human organism or a part thereof; preferably a microorganism, a plant cell, a plant or a part thereof, as compared to a corresponding non-transformed wild type non-human organism or a part thereof; and
[64576] (b) growing the non-human organism under conditions which permit the production of violaxanthin or a composition comprising violaxanthin in said non-human organism or in the culture medium surrounding said non-human organism.

[64577] An embodiment of the present invention relates to a process for the production of zeaxanthin, which comprises
[64578] (a1) increasing or generating the activity of a polypeptide comprising a polypeptide as depicted in a respective line in column 5 or 8 of Table II, application no. 13, or a homolog or a fragment thereof, a consensus sequence or at least one polypeptide motif as depicted in the respective line in column 8 of Table IV, application no. 13, whereby the respective line disclose in column 7 the fine chemical zeaxanthin; or
[64579] (a2) increasing or generating the activity of an expression product of one or more nucleic acid molecule(s) comprising a polynucleotide as depicted in the respective line in column 5 or 8 of Table I, application no. 13, preferably the coding region thereof, or a homolog or a fragment thereof, whereby the respective line disclose in column 7 the fine chemical zeaxanthin; or
[64580] (a3) increasing or generating the activity of a functional equivalent of (a1) or (a2); in a non-human organism or a part thereof; preferably a microorganism, a plant cell, a plant or a part thereof, as compared to a corresponding non-transformed wild type non-human organism or a part thereof; and
[64581] (b) growing the non-human organism under conditions which permit the production of zeaxanthin or a composition comprising zeaxanthin in said non-human organism or in the culture medium surrounding said non-human organism.

[64582] Accordingly, the increase or generation of one or more said activities is for example conferred by one or more expression products of said nucleic acid molecule, e.g. proteins. Accordingly, in the present invention described above, the increase or generation of one or more said activities is for example conferred by one or more protein(s) each comprising a polypeptide selected from the group as depicted in Table II, application no. 13, column 5 and 8, or a homolog or a fragment thereof.

[64583] The process of the invention comprises in one embodiment the following steps:
[64584] (i) increasing or generating of the expression of; and/or
[64585] (ii) increasing or generating the expression of an expression product of; and/or
[64586] (iii) increasing or generating one or more activities of an expression product encoded by; at least one nucleic acid molecule (in the following “Fine Chemical Related Protein (FCRP)”-encoding gene or “FCRP”-gene) comprising a nucleic acid molecule selected from the group consisting of:
[64587] (a) a nucleic acid molecule encoding the polypeptide shown in column 5 or 8 of Table II, preferably Table II B, application no. 13, or a homolog or a fragment thereof;
[64588] (b) a nucleic acid molecule shown in column 5 or 8 of Table I, preferably Table I B, application no. 13, or a homolog or a fragment thereof (preferably the coding region thereof);
[64589] (c) a nucleic acid molecule, which, as a result of the degeneracy of the genetic code, can be derived from a polypeptide sequence depicted in column 5 or 8 of Table II, preferably Table II B, application no. 13;
[64590] (d) a nucleic acid molecule having at least 30%, in particular at least 50%, 60%, 70%, 80%, 85%, 90%, 95%, 97%, 98%, 99% or 99.5% identity with the nucleic acid molecule sequence of a polynucleotide comprising the nucleic acid molecule shown in column 5 or 8 of Table I, preferably Table I B, application no. 13, or the coding region thereof;
[64591] (e) a nucleic acid molecule encoding a polypeptide having at least 30%, in particular 50%, 60%, 70%, 80%, 85%, 90%, 95%, 97%, 98%, 99% or 99.5% identity with the amino acid sequence of the polypeptide encoded by the nucleic acid molecule of (a), (b), (c) or (d);
[64592] (f) a nucleic acid molecule which hybridizes with a nucleic acid molecule of (a), (b), (c), (d) or (e) under stringent hybridization conditions;
[64593] (g) a nucleic acid molecule encoding a polypeptide which can be isolated with the aid of monoclonal or polyclonal antibodies made against a polypeptide encoded by one of the nucleic acid molecules of (a), (b), (c), (d), (e) or (f);
[64594] (h) a nucleic acid molecule encoding a polypeptide comprising the consensus sequence or one or more polypeptide motifs as shown in column 8 of Table IV, application no. 13;
[64595] (i) a nucleic acid molecule encoding a polypeptide having the activity represented by a respective protein as depicted in column 5 of Table II, application no. 13;
[64596] (j) a nucleic acid molecule which comprises a polynucleotide, which is obtained by amplifying a cDNA library or a genomic library using the primers as depicted in column 8 of Table III, application no. 13; and
[64597] (k) a nucleic acid molecule which is obtainable by screening a suitable nucleic acid library, especially a cDNA library and/or a genomic library, under stringent hybridization conditions with a probe comprising a complementary sequence of a nucleic acid molecule of (a), (b), (c), (d), (e), (f), (g), (h), (i) or (j) or with a fragment thereof, having at least 15 nt, preferably 20 nt, 30 nt, 50 nt, 100 nt, 200 nt, 500 nt, 1000 nt, 1500 nt, 2000 nt or 3000 nt of a nucleic acid molecule complementary to a nucleic acid molecule sequence characterized in (a), (b), (c), (d), (e), (f), (g), (h), (i) or (j);
[64598] or a nucleic acid molecule comprising a sequence which is complementary thereto.
   (All the references to Tables I to IV are references to the corresponding lines of Tables I to IV.)

[64599] In a preferred embodiment thereof said nucleic acid molecule encodes a polypeptide which has the activity of the polypeptide represented by a protein comprising a polypeptide as depicted in the corresponding hit in column 5 of Table II, application no. 13.

[64600] In another preferred embodiment thereof said nucleic acid molecule confers a generation or an increase of the respective fine chemical in a non-human organism or a part thereof as compared to a corresponding wild-type non-human organism or part thereof.

[64601] In another preferred embodiment thereof said nucleic acid molecule encodes a polypeptide which has the activity of the polypeptide represented by a protein as depicted in the corresponding hit in column 5 of Table II, application no. 13, and confers a generation or an increase of the respective fine chemical in a non-human organism or a part thereof as compared to a corresponding wild-type non-human organism or part thereof.

[64602] Accordingly, the genes of the present invention or used in accordance with the present invention, which respectively encode a protein having an activity of acetyl CoA carboxylase, acetyltransferase, acyl transferase, alcohol dehydrogenase, AX653549-protein, b1003-protein, b2032-protein, b2099-protein, b2121-protein, b2474-protein, b3346-protein, b3817-protein, coproporphyrinogen oxidase, F-box protein, flavodoxin, gluconate transport system permease 3, glutaredoxin, glycerol-3-phosphate dehydrogenase, glycine cleavage system T aminomethyltransferase, halotolerance protein, heat shock transcription factor, isopropylmalate isomerase large subunit, ketol-acid reductoisomerase, lipoprotein precursor, MADS-box transcription factor, melibiose carrier protein, monothiol glutaredoxin, monthiol glutaredoxin, N-acetylglucosaminylphosphatidylinositoldeacetylase, nitrate/nitrite transport protein, protein kinase, protein phosphatase, purine-nucleoside phosphorylase, ribosephosphate isomerase, constitutive, serine/threonine-protein phosphatase, sterol O-acyltransferase, superoxide dismutase, thioredoxin, transcription factor, transcriptional regulator, YCL026C-A-protein, YER184C-protein, ygl096w-protein, ymr324c-protein, or YOR044W-protein, which respectively encode a protein comprising a polypeptide encoded by a nucleic acid sequence as shown in Table I, application no. 13, column 5 or 8, (preferably the coding region thereof), or a homolog or a fragment thereof, which respectively encode a protein comprising a polypeptide as depicted in Table II, application no. 13, column 5 or 8, or a homolg or a fragment thereof, and/or which respectively can be amplified with the primer set shown in Table III, application no. 13, column 8, are also referred to as “FCRP genes”.

[64603] Proteins or polypeptides encoded by “FCRP-genes” are referred to as “Fine Chemical Related Proteins” or “FCRP”. For the purposes of the description of the present invention, the respective protein having an activity of acetyl CoA carboxylase, acetyltransferase, acyl transferase, alcohol dehydrogenase, AX653549-protein, b1003-protein, b2032-protein, b2099-protein, b2121-protein, b2474-protein, b3346-protein, b3817-protein, coproporphyrinogen oxidase, F-box protein, flavodoxin, gluconate transport system permease 3, glutaredoxin, glycerol-3-phosphate dehydrogenase, glycine cleavage system T aminomethyltransferase, halotolerance protein, heat shock transcription factor, isopropylmalate isomerase large subunit, ketolacid reductoisomerase, lipoprotein precursor, MADS-box transcription factor, melibiose carrier protein, monothiol glutaredoxin, monthiol glutaredoxin, N-acetylglucosaminylphosphatidylinositoldeacetylase, nitrate/nitrite transport protein, protein kinase, protein phosphatase, purine-nucleoside phosphorylase, ribosephosphate isomerase, constitutive, serine/threonine-protein phosphatase, sterol O-acyltransferase, superoxide dismutase, thioredoxin, transcription factor, transcriptional regulator, YCL026C-A-protein, YER184C-protein, ygl096w-protein, ymr324c-protein, or YOR044W-protein, the respective protein comprising a polypeptide encoded by one or more respective nucleic acid sequences as shown in Table I, application no. 13, column 5 or 8, (preferably the coding region thereof), or a homolog or fragment thereof, the respective protein comprising a respective polypeptide as depicted in Table II, application no. 13, column 5 or 8, or a homolog or fragment thereof, the respective protein comprising a sequence corresponding to the consensus sequence as shown in Table IV, application no. 13, column 8, and/or the respective protein comprising at least one polypeptide motif as shown in Table IV, application no. 13, column 8 is also referred to as Fine Chemical Related Protein” or “FCRP”.

[64604] Thus, in one embodiment, the present invention provides a process of the production of abscisic acid, cryptoxanthin, violaxanthin, and/or zeaxanthin, by increasing or generating one or more activities, especially selected from the group consisting of acetyl CoA carboxylase, acetyltransferase, acyl transferase, alcohol dehydrogenase, AX653549-protein, b1003-protein, b2032-protein, b2099-protein, b2121-protein, b2474-protein, b3346-protein, b3817-protein, coproporphyrinogen oxidase, F-box protein, flavodoxin, gluconate transport system permease 3, glutaredoxin, glycerol-3-phosphate dehydrogenase, glycine cleavage system T aminomethyltransferase, halotolerance protein, heat shock transcription factor, isopropylmalate isomerase large subunit, ketol-acid reductoisomerase, lipoprotein precursor, MADS-transcription factor, melibiose carrier protein, monothiol glutaredoxin, monthiol glutaredoxin, N-acetylglucosaminylphosphatidylinositoldeacetylase, nitrate/nitrite transport protein, protein kinase, protein phosphatase, purine-nucleoside phosphorylase, ribosephosphate isomerase, constitutive, serine/threonine-protein phosphatase, sterol O-acyltransferase, superoxide dismutase, thioredoxin, transcription factor, transcriptional regulator, YCL026C-A-protein, YER184C-protein, ygl096w-protein, ymr324c-protein, and YOR044W-protein, which is conferred by one or more FCRPs or the gene product of one or more FCRP-genes, for example by the gene product of a nucleic acid sequences comprising a polynucleotide selected from the group as shown in Table I, application no. 13, column 5 or 8, (preferably by the coding region thereof), or a homolog or a fragment thereof, e.g. or by one or more proteins each comprising a polypeptide encoded by one or more nucleic acid sequences selected from the group as shown in Table I, application no. 13, column 5 or 8, (preferably by the coding region thereof), or a homolog or a fragment thereof, or by one or more protein(s) each comprising a polypeptide selected from the group as depicted in Table II, application no. 13, column 5 and 8, or a homolog thereof, or a protein comprising a sequence corresponding to the consensus sequence or comprising at least one polypeptide motif as shown in Table IV, application no. 13, column 8.

[64605] for the disclosure of this paragraph see [0025.1.7.7] above

[64606] In an embodiment, the process comprises increasing or generating the activity of one or more polypeptides having said activity, e.g. by generating or increasing the amount and/or specific activity in the cell or a compartment of a cell of one of more FCRP, especially selected from the group consisting of acetyl CoA carboxylase, acetyltransferase, acyl transferase, alcohol dehydrogenase, AX653549-protein, b1003-protein, b2032-protein, b2099-protein, b2121-protein, b2474-protein, b3346-protein, b3817-protein, coproporphyrinogen oxidase, F-box protein, flavodoxin, gluconate transport system permease 3, glutaredoxin, glycerol-3-phosphate dehydrogenase, glycine cleavage system T aminomethyltransferase, halotolerance protein, heat shock transcription factor, isopropylmalate isomerase large subunit, ketol-acid reductoisomerase, lipoprotein precursor, MADS-box transcription factor, melibiose carrier protein, monothiol glutaredoxin, monthiol glutaredoxin, N-acetylglucosaminylphosphatidylinositoldeacetylase, nitrate/nitrite transport protein, protein kinase, protein phosphatase, purine-nucleoside phosphorylase, ribosephosphate isomerase, constitutive, serine/threonine-protein phosphatase, sterol O-acyltransferase, superoxide dismutase, thioredoxin, transcription factor, transcriptional regulator, YCL026C-A-protein, YER184C-protein, ygl096w-protein, ymr324c-protein, and YOR044W-protein, for example of the respective polypeptide as depicted in Table II, application no. 13, column 5 and 8, or a homolog or a fragment thereof, or the respective polypeptide comprising a sequence corresponding to the consensus sequences as shown in Table IV, application no. 13, column 8, or the respective polypeptide comprising at least one polypeptide motif as depicted in Table IV, application no. 13, column 8.

[64607] A further embodiment of the present invention relates to a process for the production of cryptoxanthin, which comprises
[64608] (a) increasing or generating the activity of a thioredoxin non-targeted in a non-human organism or a part thereof, preferably a microorganism, a plant cell, a plant or a part thereof, as compared to a corresponding non-transformed wild type non-human organism or a part thereof; and
[64609] (b) growing the non-human organism or a part thereof under conditions which permit the production of cryptoxanthin or a composition comprising cryptoxanthin in said non-human organism or in the culture medium surrounding said non-human organism.

[64610] A further embodiment of the present invention relates to a process for the production of zeaxanthin, which comprises
[64611] (a) increasing or generating the activity of a F-box protein non-targeted in a non-human organism or a part thereof, preferably a microorganism, a plant cell, a plant or a part thereof, as compared to a corresponding non-transformed wild type non-human organism or a part thereof; and
[64612] (b) growing the non-human organism or a part thereof under conditions which permit the production of zeaxanthin or a composition comprising zeaxanthin in said non-human organism or in the culture medium surrounding said non-human organism.

[64613] A further embodiment of the present invention relates to a process for the production of zeaxanthin, which comprises
[64614] (a) increasing or generating the activity of a monthiol glutaredoxin non-targeted in a non-human organism or a part thereof, preferably a microorganism, a plant cell, a plant or a part thereof, as compared to a corresponding non-transformed wild type non-human organism or a part thereof; and
[64615] (b) growing the non-human organism or a part thereof under conditions which permit the production of zeaxanthin or a composition comprising zeaxanthin in said non-human organism or in the culture medium surrounding said non-human organism.

[64616] A further embodiment of the present invention relates to a process for the production of zeaxanthin, which comprises
[64617] (a) increasing or generating the activity of a monothiol glutaredoxin non-targeted in a non-human organism or a part thereof, preferably a microorganism, a plant cell, a plant or a part thereof, as compared to a corresponding non-transformed wild type non-human organism or a part thereof; and
[64618] (b) growing the non-human organism or a part thereof under conditions which permit the production of zeaxanthin or a composition comprising zeaxanthin in said non-human organism or in the culture medium surrounding said non-human organism.

[64619] A further embodiment of the present invention relates to a process for the production of zeaxanthin, which comprises
[64620] (a) increasing or generating the activity of a monothiol glutaredoxin non-targeted in a non-human organism or a part thereof, preferably a microorganism, a plant cell, a plant or a part thereof, as compared to a corresponding non-transformed wild type non-human organism or a part thereof; and
[64621] (b) growing the non-human organism or a part thereof under conditions which permit the production of zeaxanthin or a composition comprising zeaxanthin in said non-human organism or in the culture medium surrounding said non-human organism.

[64622] A further embodiment of the present invention relates to a process for the production of zeaxanthin, which comprises
[64623] (a) increasing or generating the activity of a protein phosphatase non-targeted in a non-human organism or a part thereof, preferably a microorganism, a plant cell, a plant or a part thereof, as compared to a corresponding non-transformed wild type non-human organism or a part thereof; and
[64624] (b) growing the non-human organism or a part thereof under conditions which permit the production of zeaxanthin or a composition comprising zeaxanthin in said non-human organism or in the culture medium surrounding said non-human organism.

[64625] A further embodiment of the present invention relates to a process for the production of cryptoxanthin, which comprises
[64626] (a) increasing or generating the activity of a glutaredoxin non-targeted in a non-human organism or a part thereof, preferably a microorganism, a plant cell, a plant or a part thereof, as compared to a corresponding non-transformed wild type non-human organism or a part thereof; and
[64627] (b) growing the non-human organism or a part thereof under conditions which permit the production of cryptoxanthin or a composition comprising cryptoxanthin in said non-human organism or in the culture medium surrounding said non-human organism.

[64628] A further embodiment of the present invention relates to a process for the production of zeaxanthin, which comprises
[64629] (a) increasing or generating the activity of a MADS-box transcription factor non-targeted in a non-human organism or a part thereof, preferably a microorganism, a plant cell, a plant or a part thereof, as compared to a corresponding non-transformed wild type non-human organism or a part thereof; and
[64630] (b) growing the non-human organism or a part thereof under conditions which permit the production of zeaxanthin or a composition comprising zeaxanthin in said non-human organism or in the culture medium surrounding said non-human organism.

[64631] A further embodiment of the present invention relates to a process for the production of zeaxanthin, which comprises
[64632] (a) increasing or generating the activity of a isopropylmalate isomerase large subunit non-targeted in a non-human organism or a part thereof, preferably a microorganism, a plant cell, a plant or a part thereof, as compared to a corresponding non-transformed wild type non-human organism or a part thereof; and
[64633] (b) growing the non-human organism or a part thereof under conditions which permit the production of zeaxanthin or a composition comprising zeaxanthin in said non-human organism or in the culture medium surrounding said non-human organism.

[64634] A further embodiment of the present invention relates to a process for the production of cryptoxanthin, which comprises
[64635] (a) increasing or generating the activity of a AX653549-protein non-targeted in a non-human organism or a part thereof, preferably a microorganism, a plant cell, a plant or a part thereof, as compared to a corresponding non-transformed wild type non-human organism or a part thereof; and
[64636] (b) growing the non-human organism or a part thereof under conditions which permit the production of cryptoxanthin or a composition comprising cryptoxanthin in said non-human organism or in the culture medium surrounding said non-human organism.

[64637] A further embodiment of the present invention relates to a process for the production of zeaxanthin, which comprises
[64638] (a) increasing or generating the activity of a b1003-protein non-targeted in a non-human organism or a part thereof, preferably a microorganism, a plant cell, a plant or a part thereof, as compared to a corresponding non-transformed wild type non-human organism or a part thereof; and
[64639] (b) growing the non-human organism or a part thereof under conditions which permit the production of zeaxanthin or a composition comprising zeaxanthin in said non-human organism or in the culture medium surrounding said non-human organism.

[64640] A further embodiment of the present invention relates to a process for the production of zeaxanthin, which comprises
[64641] (a) increasing or generating the activity of a lipoprotein precursor non-targeted in a non-human organism or a part thereof, preferably a microorganism, a plant cell, a plant or a part thereof, as compared to a corresponding non-transformed wild type non-human organism or a part thereof; and
[64642] (b) growing the non-human organism or a part thereof under conditions which permit the production of zeaxanthin or a composition comprising zeaxanthin in said non-human organism or in the culture medium surrounding said non-human organism.

[64643] A further embodiment of the present invention relates to a process for the production of zeaxanthin, which comprises
[64644] (a) increasing or generating the activity of a serine/threonine-protein phosphatase non-targeted in a non-human organism or a part thereof, preferably a microorganism, a plant cell, a plant or a part thereof, as compared to a corresponding non-transformed wild type non-human organism or a part thereof; and
[64645] (b) growing the non-human organism or a part thereof under conditions which permit the production of zeaxanthin or a composition comprising zeaxanthin in said non-human organism or in the culture medium surrounding said non-human organism.

[64646] A further embodiment of the present invention relates to a process for the production of zeaxanthin, which comprises
[64647] (a) increasing or generating the activity of a b2032-protein non-targeted in a non-human organism or a part thereof, preferably a microorganism, a plant cell, a plant or a part thereof, as compared to a corresponding non-transformed wild type non-human organism or a part thereof; and
[64648] (b) growing the non-human organism or a part thereof under conditions which permit the production of zeaxanthin or a composition comprising zeaxanthin in said non-human organism or in the culture medium surrounding said non-human organism.

[64649] A further embodiment of the present invention relates to a process for the production of cryptoxanthin, which comprises
[64650] (a) increasing or generating the activity of a b2099-protein non-targeted in a non-human organism or a part thereof, preferably a microorganism, a plant cell, a plant or a part thereof, as compared to a corresponding non-transformed wild type non-human organism or a part thereof; and
[64651] (b) growing the non-human organism or a part thereof under conditions which permit the production of cryptoxanthin or a composition comprising cryptoxanthin in said non-human organism or in the culture medium surrounding said non-human organism.

[64652] A further embodiment of the present invention relates to a process for the production of zeaxanthin, which comprises
[64653] (a) increasing or generating the activity of a b2121-protein non-targeted in a non-human organism or a part thereof, preferably a microorganism, a plant cell, a plant or a part thereof, as compared to a corresponding non-transformed wild type non-human organism or a part thereof; and
[64654] (b) growing the non-human organism or a part thereof under conditions which permit the production of zeaxanthin or a composition comprising zeaxanthin in said non-human organism or in the culture medium surrounding said non-human organism.

[64655] A further embodiment of the present invention relates to a process for the production of zeaxanthin, which comprises
[64656] (a) increasing or generating the activity of a b2474-protein non-targeted in a non-human organism or a part thereof, preferably a microorganism, a plant cell, a plant or a part thereof, as compared to a corresponding non-transformed wild type non-human organism or a part thereof; and
[64657] (b) growing the non-human organism or a part thereof under conditions which permit the production of zeaxanthin or a composition comprising zeaxanthin in said non-human organism or in the culture medium surrounding said non-human organism.

[64658] A further embodiment of the present invention relates to a process for the production of zeaxanthin, which comprises
[64659] (a) increasing or generating the activity of a transcriptional regulator non-targeted in a non-human organism or a part thereof, preferably a microorganism, a plant cell, a plant or a part thereof, as compared to a corresponding non-transformed wild type non-human organism or a part thereof; and
[64660] (b) growing the non-human organism or a part thereof under conditions which permit the production of zeaxanthin or a composition comprising zeaxanthin in said non-human organism or in the culture medium surrounding said non-human organism.

[64661] A further embodiment of the present invention relates to a process for the production of cryptoxanthin, which comprises
[64662] (a) increasing or generating the activity of a flavodoxin non-targeted in a non-human organism or a part thereof, preferably a microorganism, a plant cell, a plant or a part thereof, as compared to a corresponding non-transformed wild type non-human organism or a part thereof; and
[64663] (b) growing the non-human organism or a part thereof under conditions which permit the production of cryptoxanthin or a composition comprising cryptoxanthin in said non-human organism or in the culture medium surrounding said non-human organism.

[64664] A further embodiment of the present invention relates to a process for the production of violaxanthin, which comprises
[64665] (a) increasing or generating the activity of a ribosephosphate isomerase, constitutive non-targeted in a non-human organism or a part thereof, preferably a microorganism, a plant cell, a plant or a part thereof, as compared to a corresponding non-transformed wild type non-human organism or a part thereof; and
[64666] (b) growing the non-human organism or a part thereof under conditions which permit the production of violaxanthin or a composition comprising violaxanthin in said non-human organism or in the culture medium surrounding said non-human organism.

[64667] A further embodiment of the present invention relates to a process for the production of violaxanthin, which comprises
[64668] (a) increasing or generating the activity of a acetyl CoA carboxylase non-targeted in a non-human organism or a part thereof, preferably a microorganism, a plant cell, a plant or a part thereof, as compared to a corresponding non-transformed wild type non-human organism or a part thereof; and
[64669] (b) growing the non-human organism or a part thereof under conditions which permit the production of violaxanthin or a composition comprising violaxanthin in said non-human organism or in the culture medium surrounding said non-human organism.

[64670] A further embodiment of the present invention relates to a process for the production of cryptoxanthin, which comprises
[64671] (a) increasing or generating the activity of a b3346-protein non-targeted in a non-human organism or a part thereof, preferably a microorganism, a plant cell, a plant or a part thereof, as compared to a corresponding non-transformed wild type non-human organism or a part thereof; and
[64672] (b) growing the non-human organism or a part thereof under conditions which permit the production of cryptoxanthin or a composition comprising cryptoxanthin in said non-human organism or in the culture medium surrounding said non-human organism.

[64673] A further embodiment of the present invention relates to a process for the production of violaxanthin, which comprises
[64674] (a) increasing or generating the activity of a ketol-acid reductoisomerase non-targeted in a non-human organism or a part thereof, preferably a microorganism, a plant cell, a plant or a part thereof, as compared to a corresponding non-transformed wild type non-human organism or a part thereof; and
[64675] (b) growing the non-human organism or a part thereof under conditions which permit the production of violaxanthin or a composition comprising violaxanthin in said non-human organism or in the culture medium surrounding said non-human organism.

[64676] A further embodiment of the present invention relates to a process for the production of cryptoxanthin, which comprises
[64677] (a) increasing or generating the activity of a b3817-protein non-targeted in a non-human organism or a part thereof, preferably a microorganism, a plant cell, a plant or a part thereof, as compared to a corresponding non-transformed wild type non-human organism or a part thereof; and
[64678] (b) growing the non-human organism or a part thereof under conditions which permit the production of cryptoxanthin or a composition comprising cryptoxanthin in said non-human organism or in the culture medium surrounding said non-human organism.

[64679] A further embodiment of the present invention relates to a process for the production of violaxanthin, which comprises
[64680] (a) increasing or generating the activity of a superoxide dismutase non-targeted in a non-human organism or a part thereof, preferably a microorganism, a plant cell, a plant or a part thereof, as compared to a corresponding non-transformed wild type non-human organism or a part thereof; and
[64681] (b) growing the non-human organism or a part thereof under conditions which permit the production of violaxanthin or a composition comprising violaxanthin in said non-human organism or in the culture medium surrounding said non-human organism.

[64682] A further embodiment of the present invention relates to a process for the production of violaxanthin, which comprises
[64683] (a) increasing or generating the activity of a acetyltransferase non-targeted in a non-human organism or a part thereof, preferably a microorganism, a plant cell, a plant or a part thereof, as compared to a corresponding non-transformed wild type non-human organism or a part thereof; and
[64684] (b) growing the non-human organism or a part thereof under conditions which permit the production of violaxanthin or a composition comprising violaxanthin in said non-human organism or in the culture medium surrounding said non-human organism.

[64685] A further embodiment of the present invention relates to a process for the production of cryptoxanthin, which comprises
[64686] (a) increasing or generating the activity of a melibiose carrier protein non-targeted in a non-human organism or a part thereof, preferably a microorganism, a plant cell, a plant or a part thereof, as compared to a corresponding non-transformed wild type non-human organism or a part thereof; and
[64687] (b) growing the non-human organism or a part thereof under conditions which permit the production of cryptoxanthin or a composition comprising cryptoxanthin in said non-human organism or in the culture medium surrounding said non-human organism.

[64688] A further embodiment of the present invention relates to a process for the production of zeaxanthin, which comprises
[64689] (a) increasing or generating the activity of a melibiose carrier protein non-targeted in a non-human organism or a part thereof, preferably a microorganism, a plant cell, a plant or a part thereof, as compared to a corresponding non-transformed wild type non-human organism or a part thereof; and
[64690] (b) growing the non-human organism or a part thereof under conditions which permit the production of zeaxanthin or a composition comprising zeaxanthin in said non-human organism or in the culture medium surrounding said non-human organism.

[64691] A further embodiment of the present invention relates to a process for the production of violaxanthin, which comprises
[64692] (a) increasing or generating the activity of a purine-nucleoside phosphorylase non-targeted in a non-human organism or a part thereof, preferably a microorganism, a plant cell, a plant or a part thereof, as compared to a corresponding non-transformed wild type non-human organism or a part thereof; and
[64693] (b) growing the non-human organism or a part thereof under conditions which permit the production of violaxanthin or a composition comprising violaxanthin in said non-human organism or in the culture medium surrounding said non-human organism.

[64694] A further embodiment of the present invention relates to a process for the production of zeaxanthin, which comprises
[64695] (a) increasing or generating the activity of a transcription factor non-targeted in a non-human organism or a part thereof, preferably a microorganism, a plant cell, a plant or a part thereof, as compared to a corresponding non-transformed wild type non-human organism or a part thereof; and
[64696] (b) growing the non-human organism or a part thereof under conditions which permit the production of zeaxanthin or a composition comprising zeaxanthin in said non-human organism or in the culture medium surrounding said non-human organism.

[64697] A further embodiment of the present invention relates to a process for the production of cryptoxanthin, which comprises
[64698] (a) increasing or generating the activity of a coproporphyrinogen oxidase non-targeted in a non-human organism or a part thereof, preferably a microorganism, a plant cell, a plant or a part thereof, as compared to a corresponding non-transformed wild type non-human organism or a part thereof; and
[64699] (b) growing the non-human organism or a part thereof under conditions which permit the production of cryptoxanthin or a composition comprising cryptoxanthin in said non-human organism or in the culture medium surrounding said non-human organism.

[64700] A further embodiment of the present invention relates to a process for the production of zeaxanthin, which comprises
[64701] (a) increasing or generating the activity of a coproporphyrinogen oxidase non-targeted in a non-human organism or a part thereof, preferably a microorganism, a plant cell, a plant or a part thereof, as compared to a corresponding non-transformed wild type non-human organism or a part thereof; and
[64702] (b) growing the non-human organism or a part thereof under conditions which permit the production of zeaxanthin or a composition comprising zeaxanthin in said non-human organism or in the culture medium surrounding said non-human organism.

[64703] A further embodiment of the present invention relates to a process for the production of zeaxanthin, which comprises
[64704] (a) increasing or generating the activity of a glycerol-3-phosphate dehydrogenase non-targeted in a non-human organism or a part thereof, preferably a microorganism, a plant cell, a plant or a part thereof, as compared to a corresponding non-transformed wild type non-human organism or a part thereof; and
[64705] (b) growing the non-human organism or a part thereof under conditions which permit the production of zeaxanthin or a composition comprising zeaxanthin in said non-human organism or in the culture medium surrounding said non-human organism.

[64706] A further embodiment of the present invention relates to a process for the production of cryptoxanthin, which comprises
[64707] (a) increasing or generating the activity of a YCL026C-A-protein non-targeted in a non-human organism or a part thereof, preferably a microorganism, a plant cell, a plant or a part thereof, as compared to a corresponding non-transformed wild type non-human organism or a part thereof; and
[64708] (b) growing the non-human organism or a part thereof under conditions which permit the production of cryptoxanthin or a composition comprising cryptoxanthin in said non-human organism or in the culture medium surrounding said non-human organism.

[64709] A further embodiment of the present invention relates to a process for the production of cryptoxanthin, which comprises
[64710] (a) increasing or generating the activity of a F-box protein non-targeted in a non-human organism or a part thereof, preferably a microorganism, a plant cell, a plant or a part thereof, as compared to a corresponding non-transformed wild type non-human organism or a part thereof; and
[64711] (b) growing the non-human organism or a part thereof under conditions which permit the production of cryptoxanthin or a composition comprising cryptoxanthin in said non-human organism or in the culture medium surrounding said non-human organism.

[64712] A further embodiment of the present invention relates to a process for the production of cryptoxanthin, which comprises
[64713] (a) increasing or generating the activity of a ygl096w-protein non-targeted in a non-human organism or a part thereof, preferably a microorganism, a plant cell, a plant or a part thereof, as compared to a corresponding non-transformed wild type non-human organism or a part thereof; and
[64714] (b) growing the non-human organism or a part thereof under conditions which permit the production of cryptoxanthin or a composition comprising cryptoxanthin in said non-human organism or in the culture medium surrounding said non-human organism.

[64715] A further embodiment of the present invention relates to a process for the production of cryptoxanthin, which comprises
[64716] (a) increasing or generating the activity of a alcohol dehydrogenase non-targeted in a non-human organism or a part thereof, preferably a microorganism, a plant cell, a plant or a part thereof, as compared to a corresponding non-transformed wild type non-human organism or a part thereof; and
[64717] (b) growing the non-human organism or a part thereof under conditions which permit the production of cryptoxanthin or a composition comprising cryptoxanthin in said non-human organism or in the culture medium surrounding said non-human organism.

[64718] A further embodiment of the present invention relates to a process for the production of cryptoxanthin, which comprises
[64719] (a) increasing or generating the activity of a halotolerance protein non-targeted in a non-human organism or a part thereof, preferably a microorganism, a plant cell, a plant or a part thereof, as compared to a corresponding non-transformed wild type non-human organism or a part thereof; and
[64720] (b) growing the non-human organism or a part thereof under conditions which permit the production of cryptoxanthin or a composition comprising cryptoxanthin in said non-human organism or in the culture medium surrounding said non-human organism.

[64721] A further embodiment of the present invention relates to a process for the production of zeaxanthin, which comprises
[64722] (a) increasing or generating the activity of a halotolerance protein non-targeted in a non-human organism or a part thereof, preferably a microorganism, a plant cell, a plant or a part thereof, as compared to a corresponding non-transformed wild type non-human organism or a part thereof; and
[64723] (b) growing the non-human organism or a part thereof under conditions which permit the production of zeaxanthin or a composition comprising zeaxanthin in said non-human organism or in the culture medium surrounding said non-human organism.

[64724] A further embodiment of the present invention relates to a process for the production of zeaxanthin, which comprises
[64725] (a) increasing or generating the activity of a N-acetylglucosaminylphosphatidylinositoldeacetylase non-targeted in a non-human organism or a part thereof, preferably a microorganism, a plant cell, a plant or a part thereof, as compared to a corresponding non-transformed wild type non-human organism or a part thereof; and
[64726] (b) growing the non-human organism or a part thereof under conditions which permit the production of zeaxanthin or a composition comprising zeaxanthin in said non-human organism or in the culture medium surrounding said non-human organism.

[64727] A further embodiment of the present invention relates to a process for the production of cryptoxanthin, which comprises
[64728] (a) increasing or generating the activity of a ymr324c-protein non-targeted in a non-human organism or a part thereof, preferably a microorganism, a plant cell, a plant or a part thereof, as compared to a corresponding non-transformed wild type non-human organism or a part thereof; and
[64729] (b) growing the non-human organism or a part thereof under conditions which permit the production of cryptoxanthin or a composition comprising cryptoxanthin in said non-human organism or in the culture medium surrounding said non-human organism.

[64730] A further embodiment of the present invention relates to a process for the production of zeaxanthin, which comprises
[64731] (a) increasing or generating the activity of a sterol O-acyltransferase non-targeted in a non-human organism or a part thereof, preferably a microorganism, a plant cell, a plant or a part thereof, as compared to a corresponding non-transformed wild type non-human organism or a part thereof; and
[64732] (b) growing the non-human organism or a part thereof under conditions which permit the production of zeaxanthin or a composition comprising zeaxanthin in said non-human organism or in the culture medium surrounding said non-human organism.

[64733] A further embodiment of the present invention relates to a process for the production of abscisic acid, which comprises
[64734] (a) increasing or generating the activity of a YER184C-protein non-targeted in a non-human organism or a part thereof, preferably a microorganism, a plant cell, a plant or a part thereof, as compared to a corresponding non-transformed wild type non-human organism or a part thereof; and
[64735] (b) growing the non-human organism or a part thereof under conditions which permit the production of abscisic acid or a composition comprising abscisic acid in said non-human organism or in the culture medium surrounding said non-human organism.

[64736] A further embodiment of the present invention relates to a process for the production of abscisic acid, which comprises
[64737] (a) increasing or generating the activity of a YOR044W-protein non-targeted in a non-human organism or a part thereof, preferably a microorganism, a plant cell, a plant or a part thereof, as compared to a corresponding non-transformed wild type non-human organism or a part thereof; and
[64738] (b) growing the non-human organism or a part thereof under conditions which permit the production of abscisic acid or a composition comprising abscisic acid in said non-human organism or in the culture medium surrounding said non-human organism.

[64739] A further embodiment of the present invention relates to a process for the production of abscisic acid, which comprises
[64740] (a) increasing or generating the activity of a gluconate transport system permease 3 non-targeted in a non-human organism or a part thereof, preferably a microorganism, a plant cell, a plant or a part thereof, as compared to a corresponding non-transformed wild type non-human organism or a part thereof; and
[64741] (b) growing the non-human organism or a part thereof under conditions which permit the production of abscisic acid or a composition comprising abscisic acid in said non-human organism or in the culture medium surrounding said non-human organism.

[64742] A further embodiment of the present invention relates to a process for the production of abscisic acid, which comprises
[64743] (a) increasing or generating the activity of a nitrate/nitrite transport protein non-targeted in a non-human organism or a part thereof, preferably a microorganism, a plant cell, a plant or a part thereof, as compared to a corresponding non-transformed wild type non-human organism or a part thereof; and
[64744] (b) growing the non-human organism or a part thereof under conditions which permit the production of abscisic acid or a composition comprising abscisic acid in said non-human organism or in the culture medium surrounding said non-human organism.

[64745] A further embodiment of the present invention relates to a process for the production of abscisic acid, which comprises
[64746] (a) increasing or generating the activity of a acyl transferase non-targeted in a non-human organism or a part thereof, preferably a microorganism, a plant cell, a plant or a part thereof, as compared to a corresponding non-transformed wild type non-human organism or a part thereof; and
[64747] (b) growing the non-human organism or a part thereof under conditions which permit the production of abscisic acid or a composition comprising abscisic acid in said non-human organism or in the culture medium surrounding said non-human organism.

[64748] A further embodiment of the present invention relates to a process for the production of abscisic acid, which comprises
[64749] (a) increasing or generating the activity of a heat shock transcription factor non-targeted in a non-human organism or a part thereof, preferably a microorganism, a plant cell, a plant or a part thereof, as compared to a corresponding non-transformed wild type non-human organism or a part thereof; and
[64750] (b) growing the non-human organism or a part thereof under conditions which permit the production of abscisic acid or a composition comprising abscisic acid in said non-human organism or in the culture medium surrounding said non-human organism.

[64751] A further embodiment of the present invention relates to a process for the production of abscisic acid, which comprises
[64752] (a) increasing or generating the activity of a protein kinase non-targeted in a non-human organism or a part thereof, preferably a microorganism, a plant cell, a plant or a part thereof, as compared to a corresponding non-transformed wild type non-human organism or a part thereof; and
[64753] (b) growing the non-human organism or a part thereof under conditions which permit the production of abscisic acid or a composition comprising abscisic acid in said non-human organism or in the culture medium surrounding said non-human organism.

[64754] A further embodiment of the present invention relates to a process for the production of abscisic acid, which comprises
[64755] (a) increasing or generating the activity of a protein phosphatase non-targeted in a non-human organism or a part thereof, preferably a microorganism, a plant cell, a plant or a part thereof, as compared to a corresponding non-transformed wild type non-human organism or a part thereof; and
[64756] (b) growing the non-human organism or a part thereof under conditions which permit the production of abscisic acid or a composition comprising abscisic acid in said non-human organism or in the culture medium surrounding said non-human organism.

[64757] A further embodiment of the present invention relates to a process for the production of abscisic acid, which comprises
[64758] (a) increasing or generating the activity of a glycine cleavage system T aminomethyltransferase non-targeted in a non-human organism or a part thereof, preferably a microorganism, a plant cell, a plant or a part thereof, as compared to a corresponding non-transformed wild type non-human organism or a part thereof; and
[64759] (b) growing the non-human organism or a part thereof under conditions which permit the production of abscisic acid or a composition comprising abscisic acid in said non-human organism or in the culture medium surrounding said non-human organism.

[64760] A further embodiment of the present invention relates to a process for the production of abscisic acid, which comprises
[64761] (a) increasing or generating the activity of a glutaredoxin non-targeted in a non-human organism or a part thereof, preferably a microorganism, a plant cell, a plant or a part thereof, as compared to a corresponding non-transformed wild type non-human organism or a part thereof; and
[64762] (b) growing the non-human organism or a part thereof under conditions which permit the production of abscisic acid or a composition comprising abscisic acid in said non-human organism or in the culture medium surrounding said non-human organism.

[64763] A further embodiment of the present invention relates to a process for the production of abscisic acid, which comprises
[64764] (a) increasing or generating the activity of a polypeptide comprising a polypeptide as depicted in the respective line in column 5 or 8 of Table II, application no. 13, or a homolog or a fragment thereof, a consensus sequence or at least one polypeptide motif as depicted in the respective line in column 8 of Table IV, application no. 13, whereby the respective line disclose in column 7 the fine chemical abscisic acid; or
[64765] increasing or generating the activity of an expression product of one or more nucleic acid molecule(s) comprising a polynucleotide as depicted in the respective line in column 5 or 8 of Table I, application no. 13, preferably the coding region thereof, or a homolog or a fragment thereof, whereby the respective line disclose in column 7 the fine chemical abscisic acid;
[64766] non-targeted in a non-human organism or a part thereof; preferably a microorganism, a plant cell, a plant or a part thereof, as compared to a corresponding non-transformed wild type non-human organism or a part thereof; and
[64767] (b) growing the non-human organism under conditions which permit the production of abscisic acid, or a composition comprising abscisic acid in said non-human organism or in the culture medium surrounding said non-human organism.

[64768] A further embodiment of the present invention relates to a process for the production of cryptoxanthin, which comprises
[64769] (a) increasing or generating the activity of a polypeptide comprising a polypeptide as depicted in the respective line in column 5 or 8 of Table II, application no. 13, or a homolog or a fragment thereof, a consensus sequence or at least one polypeptide motif as depicted in the respective line in column 8 of Table IV, application no. 13, whereby the respective line disclose in column 7 the fine chemical cryptoxanthin; or
[64770] increasing or generating the activity of an expression product of one or more nucleic acid molecule(s) comprising a polynucleotide as depicted in the respective line in column 5 or 8 of Table I, application no. 13, preferably the coding region thereof, or a homolog or a fragment thereof, whereby the respective line disclose in column 7 the fine chemical cryptoxanthin;
[64771] non-targeted in a non-human organism or a part thereof; preferably a microorganism, a plant cell, a plant or a part thereof, as compared to a corresponding non-transformed wild type non-human organism or a part thereof; and
[64772] (b) growing the non-human organism under conditions which permit the production of cryptoxanthin, or a composition comprising cryptoxanthin in said non-human organism or in the culture medium surrounding said non-human organism.

[64773] A further embodiment of the present invention relates to a process for the production of violaxanthin, which comprises
[64774] (a) increasing or generating the activity of a polypeptide comprising a polypeptide as depicted in the respective line in column 5 or 8 of Table II, application no. 13, or a homolog or a fragment thereof, a consensus sequence or at least one polypeptide motif as depicted in the respective line in column 8 of Table IV, application no. 13, whereby the respective line disclose in column 7 the fine chemical violaxanthin; or
[64775] increasing or generating the activity of an expression product of one or more nucleic acid molecule(s) comprising a polynucleotide as depicted in the respective line in column 5 or 8 of Table I, application no. 13, preferably the coding region thereof, or a homolog or a fragment thereof, whereby the respective line disclose in column 7 the fine chemical violaxanthin;
[64776] non-targeted in a non-human organism or a part thereof; preferably a microorganism, a plant cell, a plant or a part thereof, as compared to a corresponding non-transformed wild type non-human organism or a part thereof; and
[64777] (b) growing the non-human organism under conditions which permit the production of violaxanthin, or a composition comprising violaxanthin in said non-human organism or in the culture medium surrounding said non-human organism.

[64778] A further embodiment of the present invention relates to a process for the production of zeaxanthin, which comprises
[64779] (a) increasing or generating the activity of a polypeptide comprising a polypeptide as depicted in the respective line in column 5 or 8 of Table II, application no. 13, or a homolog or a fragment thereof, a consensus sequence or at least one polypeptide motif as depicted in the respective line in column 8 of Table IV, application no. 13, whereby the respective line disclose in column 7 the fine chemical zeaxanthin; or
[64780] increasing or generating the activity of an expression product of one or more nucleic acid molecule(s) comprising a polynucleotide as depicted in the respective line in column 5 or 8 of Table I, application no. 13, preferably the coding region thereof, or a homolog or a fragment thereof, whereby the respective line disclose in column 7 the fine chemical zeaxanthin;
[64781] non-targeted in a non-human organism or a part thereof; preferably a microorganism, a plant cell, a plant or a part thereof, as compared to a corresponding non-transformed wild type non-human organism or a part thereof; and
[64782] (b) growing the non-human organism under conditions which permit the production of zeaxanthin, or a composition comprising zeaxanthin in said non-human organism or in the culture medium surrounding said non-human organism.

[64783] A further embodiment of the present invention relates to a process for the production of cryptoxanthin, which comprises
[64784] (a) increasing or generating one or more activities selected from the group consisting of thioredoxin in an organelle, preferably in plastids or mitochondria, especially in plastids, of a non-human organism or a part thereof, preferably a microorganism, a plant cell, a plant or a part thereof, as compared to a corresponding non-transformed wild type non-human organism or a part thereof; and
[64785] (b) growing the non-human organism or a part thereof under conditions which permit the production of cryptoxanthin or a composition comprising cryptoxanthin in said non-human organism or in the culture medium surrounding said non-human organism.

[64786] A further embodiment of the present invention relates to a process for the production of zeaxanthin, which comprises
[64787] (a) increasing or generating one or more activities selected from the group consisting of F-box protein in an organelle, preferably in plastids or mitochondria, especially in plastids, of a non-human organism or a part thereof, preferably a microorganism, a plant cell, a plant or a part thereof, as compared to a corresponding non-transformed wild type non-human organism or a part thereof; and
[64788] (b) growing the non-human organism or a part thereof under conditions which permit the production of zeaxanthin or a composition comprising zeaxanthin in said non-human organism or in the culture medium surrounding said non-human organism.

[64789] A further embodiment of the present invention relates to a process for the production of zeaxanthin, which comprises
[64790] (a) increasing or generating one or more activities selected from the group consisting of monthiol glutaredoxin in an organelle, preferably in plastids or mitochondria, especially in plastids, of a non-human organism or a part thereof, preferably a microorganism, a plant cell, a plant or a part thereof, as compared to a corresponding non-transformed wild type non-human organism or a part thereof; and
[64791] (b) growing the non-human organism or a part thereof under conditions which permit the production of zeaxanthin or a composition comprising zeaxanthin in said non-human organism or in the culture medium surrounding said non-human organism.

[64792] A further embodiment of the present invention relates to a process for the production of zeaxanthin, which comprises
[64793] (a) increasing or generating one or more activities selected from the group consisting of monothiol glutaredoxin in an organelle, preferably in plastids or mitochondria, especially in plastids, of a non-human organism or a part thereof, preferably a microorganism, a plant cell, a plant or a part thereof, as compared to a corresponding non-transformed wild type non-human organism or a part thereof; and
[64794] (b) growing the non-human organism or a part thereof under conditions which permit the production of zeaxanthin or a composition comprising zeaxanthin in said non-human organism or in the culture medium surrounding said non-human organism.

[64795] A further embodiment of the present invention relates to a process for the production of zeaxanthin, which comprises
[64796] (a) increasing or generating one or more activities selected from the group consisting of monothiol glutaredoxin in an organelle, preferably in plastids or mitochondria, especially in plastids, of a non-human organism or a part thereof, preferably a microorganism, a plant cell, a plant or a part thereof, as compared to a corresponding non-transformed wild type non-human organism or a part thereof; and
[64797] (b) growing the non-human organism or a part thereof under conditions which permit the production of zeaxanthin or a composition comprising zeaxanthin in said non-human organism or in the culture medium surrounding said non-human organism.

[64798] A further embodiment of the present invention relates to a process for the production of zeaxanthin, which comprises
[64799] (a) increasing or generating one or more activities selected from the group consisting of protein phosphatase in an organelle, preferably in plastids or mitochondria, especially in plastids, of a non-human organism or a part thereof, preferably a microorganism, a plant cell, a plant or a part thereof, as compared to a corresponding non-transformed wild type non-human organism or a part thereof; and
[64800] (b) growing the non-human organism or a part thereof under conditions which permit the production of zeaxanthin or a composition comprising zeaxanthin in said non-human organism or in the culture medium surrounding said non-human organism.

[64801] A further embodiment of the present invention relates to a process for the production of cryptoxanthin, which comprises
[64802] (a) increasing or generating one or more activities selected from the group consisting of glutaredoxin in an organelle, preferably in plastids or mitochondria, especially in plastids, of a non-human organism or a part thereof, preferably a microorganism, a plant cell, a plant or a part thereof, as compared to a corresponding non-transformed wild type non-human organism or a part thereof; and
[64803] (b) growing the non-human organism or a part thereof under conditions which permit the production of cryptoxanthin or a composition comprising cryptoxanthin in said non-human organism or in the culture medium surrounding said non-human organism.

[64804] A further embodiment of the present invention relates to a process for the production of zeaxanthin, which comprises
[64805] (a) increasing or generating one or more activities selected from the group consisting of MADS-box transcription factor in an organelle, preferably in plastids or mitochondria, especially in plastids, of a non-human organism or a part thereof, preferably a microorganism, a plant cell, a plant or a part thereof, as compared to a corresponding non-transformed wild type non-human organism or a part thereof; and
[64806] (b) growing the non-human organism or a part thereof under conditions which permit the production of zeaxanthin or a composition comprising zeaxanthin in said non-human organism or in the culture medium surrounding said non-human organism.

[64807] A further embodiment of the present invention relates to a process for the production of zeaxanthin, which comprises
[64808] (a) increasing or generating one or more activities selected from the group consisting of isopropylmalate isomerase large subunit in an organelle, preferably in plastids or mitochondria, especially in plastids, of a non-human organism or a part thereof, preferably a microorganism, a plant cell, a plant or a part thereof, as compared to a corresponding non-transformed wild type non-human organism or a part thereof; and
[64809] (b) growing the non-human organism or a part thereof under conditions which permit the production of zeaxanthin or a composition comprising zeaxanthin in said non-human organism or in the culture medium surrounding said non-human organism.

[64810] A further embodiment of the present invention relates to a process for the production of cryptoxanthin, which comprises
[64811] (a) increasing or generating one or more activities selected from the group consisting of AX653549-protein in an organelle, preferably in plastids or mitochondria, especially in plastids, of a non-human organism or a part thereof, preferably a microorganism, a plant cell, a plant or a part thereof, as compared to a corresponding non-transformed wild type non-human organism or a part thereof; and
[64812] (b) growing the non-human organism or a part thereof under conditions which permit the production of cryptoxanthin or a composition comprising cryptoxanthin in said non-human organism or in the culture medium surrounding said non-human organism.

[64813] A further embodiment of the present invention relates to a process for the production of zeaxanthin, which comprises
[64814] (a) increasing or generating one or more activities selected from the group consisting of b1003-protein in an organelle, preferably in plastids or mitochondria, especially in plastids, of a non-human organism or a part thereof, preferably a microorganism, a plant cell, a plant or a part thereof, as compared to a corresponding non-transformed wild type non-human organism or a part thereof; and
[64815] (b) growing the non-human organism or a part thereof under conditions which permit the production of zeaxanthin or a composition comprising zeaxanthin in said non-human organism or in the culture medium surrounding said non-human organism.

[64816] A further embodiment of the present invention relates to a process for the production of zeaxanthin, which comprises
[64817] (a) increasing or generating one or more activities selected from the group consisting of lipoprotein precursor in an organelle, preferably in plastids or mitochondria, especially in plastids, of a non-human organism or a part thereof, preferably a microorganism, a plant cell, a plant or a part thereof, as compared to a corresponding non-transformed wild type non-human organism or a part thereof; and
[64818] (b) growing the non-human organism or a part thereof under conditions which permit the production of zeaxanthin or a composition comprising zeaxanthin in said non-human organism or in the culture medium surrounding said non-human organism.

[64819] A further embodiment of the present invention relates to a process for the production of zeaxanthin, which comprises
[64820] (a) increasing or generating one or more activities selected from the group consisting of serine/threonine-protein phosphatase in an organelle, preferably in plastids or mitochondria, especially in plastids, of a non-human organism or a part thereof, preferably a microorganism, a plant cell, a plant or a part thereof, as compared to a corresponding non-transformed wild type non-human organism or a part thereof; and
[64821] (b) growing the non-human organism or a part thereof under conditions which permit the production of zeaxanthin or a composition comprising zeaxanthin in said non-human organism or in the culture medium surrounding said non-human organism.

[64822] A further embodiment of the present invention relates to a process for the production of zeaxanthin, which comprises
[64823] (a) increasing or generating one or more activities selected from the group consisting of b2032-protein in an organelle, preferably in plastids or mitochondria, especially in plastids, of a non-human organism or a part thereof, preferably a microorganism, a plant cell, a plant or a part thereof, as compared to a corresponding non-transformed wild type non-human organism or a part thereof; and
[64824] (b) growing the non-human organism or a part thereof under conditions which permit the production of zeaxanthin or a composition comprising zeaxanthin in said non-human organism or in the culture medium surrounding said non-human organism.

[64825] A further embodiment of the present invention relates to a process for the production of cryptoxanthin, which comprises
[64826] (a) increasing or generating one or more activities selected from the group consisting of b2099-protein in an organelle, preferably in plastids or mitochondria, especially in plastids, of a non-human organism or a part thereof, preferably a microorganism, a plant cell, a plant or a part thereof, as compared to a corresponding non-transformed wild type non-human organism or a part thereof; and
[64827] (b) growing the non-human organism or a part thereof under conditions which permit the production of cryptoxanthin or a composition comprising cryptoxanthin in said non-human organism or in the culture medium surrounding said non-human organism.

[64828] A further embodiment of the present invention relates to a process for the production of zeaxanthin, which comprises
[64829] (a) increasing or generating one or more activities selected from the group consisting of b2121-protein in an organelle, preferably in plastids or mitochondria, especially in plastids, of a non-human organism or a part thereof, preferably a microorganism, a plant cell, a plant or a part thereof, as compared to a corresponding non-transformed wild type non-human organism or a part thereof; and
[64830] (b) growing the non-human organism or a part thereof under conditions which permit the production of zeaxanthin or a composition comprising zeaxanthin in said non-human organism or in the culture medium surrounding said non-human organism.

[64831] A further embodiment of the present invention relates to a process for the production of zeaxanthin, which comprises
[64832] (a) increasing or generating one or more activities selected from the group consisting of b2474-protein in an organelle, preferably in plastids or mitochondria, especially in plastids, of a non-human organism or a part thereof, preferably a microorganism, a plant cell, a plant or a part thereof, as compared to a corresponding non-transformed wild type non-human organism or a part thereof; and
[64833] (b) growing the non-human organism or a part thereof under conditions which permit the production of zeaxanthin or a composition comprising zeaxanthin in said non-human organism or in the culture medium surrounding said non-human organism.

[64834] A further embodiment of the present invention relates to a process for the production of zeaxanthin, which comprises
[64835] (a) increasing or generating one or more activities selected from the group consisting of transcriptional regulator in an organelle, preferably in plastids or mitochondria, especially in plastids, of a non-human organism or a part thereof, preferably a microorganism, a plant cell, a plant or a part thereof, as compared to a corresponding non-transformed wild type non-human organism or a part thereof; and
[64836] (b) growing the non-human organism or a part thereof under conditions which permit the production of zeaxanthin or a composition comprising zeaxanthin in said non-human organism or in the culture medium surrounding said non-human organism.

[64837] A further embodiment of the present invention relates to a process for the production of cryptoxanthin, which comprises
[64838] (a) increasing or generating one or more activities selected from the group consisting of flavodoxin in an organelle, preferably in plastids or mitochondria, especially in plastids, of a non-human organism or a part thereof, preferably a microorganism, a plant cell, a plant or a part thereof, as compared to a corresponding non-transformed wild type non-human organism or a part thereof; and
[64839] (b) growing the non-human organism or a part thereof under conditions which permit the production of cryptoxanthin or a composition comprising cryptoxanthin in said non-human organism or in the culture medium surrounding said non-human organism.

[64840] A further embodiment of the present invention relates to a process for the production of violaxanthin, which comprises
[64841] (a) increasing or generating one or more activities selected from the group consisting of ribosephosphate isomerase, constitutive in an organelle, preferably in plastids or mitochondria, especially in plastids, of a non-human organism or a part thereof, preferably a microorganism, a plant cell, a plant or a part thereof, as compared to a corresponding non-transformed wild type non-human organism or a part thereof; and
[64842] (b) growing the non-human organism or a part thereof under conditions which permit the production of violaxanthin or a composition comprising violaxanthin in said non-human organism or in the culture medium surrounding said non-human organism.

[64843] A further embodiment of the present invention relates to a process for the production of violaxanthin, which comprises
[64844] (a) increasing or generating one or more activities selected from the group consisting of acetyl CoA carboxylase in an organelle, preferably in plastids or mitochondria, especially in plastids, of a non-human organism or a part thereof, preferably a microorganism, a plant cell, a plant or a part thereof, as compared to a corresponding non-transformed wild type non-human organism or a part thereof; and
[64845] (b) growing the non-human organism or a part thereof under conditions which permit the production of violaxanthin or a composition comprising violaxanthin in said non-human organism or in the culture medium surrounding said non-human organism.

[64846] A further embodiment of the present invention relates to a process for the production of cryptoxanthin, which comprises
[64847] (a) increasing or generating one or more activities selected from the group consisting of b3346-protein in an organelle, preferably in plastids or mitochondria, especially in plastids, of a non-human organism or a part thereof, preferably a microorganism, a plant cell, a plant or a part thereof, as compared to a corresponding non-transformed wild type non-human organism or a part thereof; and
[64848] (b) growing the non-human organism or a part thereof under conditions which permit the production of cryptoxanthin or a composition comprising cryptoxanthin in said non-human organism or in the culture medium surrounding said non-human organism.

[64849] A further embodiment of the present invention relates to a process for the production of violaxanthin, which comprises
[64850] (a) increasing or generating one or more activities selected from the group consisting of ketol-acid reductoisomerase in an organelle, preferably in plastids or mitochondria, especially in plastids, of a non-human organism or a part thereof, preferably a microorganism, a plant cell, a plant or a part thereof, as compared to a corresponding non-transformed wild type non-human organism or a part thereof; and
[64851] (b) growing the non-human organism or a part thereof under conditions which permit the production of violaxanthin or a composition comprising violaxanthin in said non-human organism or in the culture medium surrounding said non-human organism.

[64852] A further embodiment of the present invention relates to a process for the production of cryptoxanthin, which comprises
[64853] (a) increasing or generating one or more activities selected from the group consisting of b3817-protein in an organelle, preferably in plastids or mitochondria, especially in plastids, of a non-human organism or a part thereof, preferably a microorganism, a plant cell, a plant or a part thereof, as compared to a corresponding non-transformed wild type non-human organism or a part thereof; and
[64854] (b) growing the non-human organism or a part thereof under conditions which permit the production of cryptoxanthin or a composition comprising cryptoxanthin in said non-human organism or in the culture medium surrounding said non-human organism.

[64855] A further embodiment of the present invention relates to a process for the production of violaxanthin, which comprises
[64856] (a) increasing or generating one or more activities selected from the group consisting of superoxide dismutase in an organelle, preferably in plastids or mitochondria, especially in plastids, of a non-human organism or a part thereof, preferably a microorganism, a plant cell, a plant or a part thereof, as compared to a corresponding non-transformed wild type non-human organism or a part thereof; and
[64857] (b) growing the non-human organism or a part thereof under conditions which permit the production of violaxanthin or a composition comprising violaxanthin in said non-human organism or in the culture medium surrounding said non-human organism.

[64858] A further embodiment of the present invention relates to a process for the production of violaxanthin, which comprises
[64859] (a) increasing or generating one or more activities selected from the group consisting of acetyltransferase in an organelle, preferably in plastids or mitochondria, especially in plastids, of a non-human organism or a part thereof, preferably a microorganism, a plant cell, a plant or a part thereof, as compared to a corresponding non-transformed wild type non-human organism or a part thereof; and
[64860] (b) growing the non-human organism or a part thereof under conditions which permit the production of violaxanthin or a composition comprising violaxanthin in said non-human organism or in the culture medium surrounding said non-human organism.

[64861] A further embodiment of the present invention relates to a process for the production of cryptoxanthin, which comprises
[64862] (a) increasing or generating one or more activities selected from the group consisting of melibiose carrier protein in an organelle, preferably in plastids or mitochondria, especially in plastids, of a non-human organism or a part thereof, preferably a microorganism, a plant cell, a plant or a part thereof, as compared to a corresponding non-transformed wild type non-human organism or a part thereof; and
[64863] (b) growing the non-human organism or a part thereof under conditions which permit the production of cryptoxanthin or a composition comprising cryptoxanthin in said non-human organism or in the culture medium surrounding said non-human organism.

[64864] A further embodiment of the present invention relates to a process for the production of zeaxanthin, which comprises
[64865] (a) increasing or generating one or more activities selected from the group consisting of melibiose carrier protein in an organelle, preferably in plastids or mitochondria, especially in plastids, of a non-human organism or a part thereof, preferably a microorganism, a plant cell, a plant or a part thereof, as compared to a corresponding non-transformed wild type non-human organism or a part thereof; and
[64866] (b) growing the non-human organism or a part thereof under conditions which permit the production of zeaxanthin or a composition comprising zeaxanthin in said non-human organism or in the culture medium surrounding said non-human organism.

[64867] A further embodiment of the present invention relates to a process for the production of violaxanthin, which comprises
[64868] (a) increasing or generating one or more activities selected from the group consisting of purine-nucleoside phosphorylase in an organelle, preferably in plastids or mitochondria, especially in plastids, of a non-human organism or a part thereof, preferably a microorganism, a plant cell, a plant or a part thereof, as compared to a corresponding non-transformed wild type non-human organism or a part thereof; and
[64869] (b) growing the non-human organism or a part thereof under conditions which permit the production of violaxanthin or a composition comprising violaxanthin in said non-human organism or in the culture medium surrounding said non-human organism.

[64870] A further embodiment of the present invention relates to a process for the production of zeaxanthin, which comprises
[64871] (a) increasing or generating one or more activities selected from the group consisting of transcription factor in an organelle, preferably in plastids or mitochondria, especially in plastids, of a non-human organism or a part thereof, preferably a microorganism, a plant cell, a plant or a part thereof, as compared to a corresponding non-transformed wild type non-human organism or a part thereof; and
[64872] (b) growing the non-human organism or a part thereof under conditions which permit the production of zeaxanthin or a composition comprising zeaxanthin in said non-human organism or in the culture medium surrounding said non-human organism.

[64873] A further embodiment of the present invention relates to a process for the production of cryptoxanthin, which comprises
[64874] (a) increasing or generating one or more activities selected from the group consisting of coproporphyrinogen oxidase in an organelle, preferably in plastids or mitochondria, especially in plastids, of a non-human organism or a part thereof, preferably a microorganism, a plant cell, a plant or a part thereof, as compared to a corresponding non-transformed wild type non-human organism or a part thereof; and
[64875] (b) growing the non-human organism or a part thereof under conditions which permit the production of cryptoxanthin or a composition comprising cryptoxanthin in said non-human organism or in the culture medium surrounding said non-human organism.

[64876] A further embodiment of the present invention relates to a process for the production of zeaxanthin, which comprises
[64877] (a) increasing or generating one or more activities selected from the group consisting of coproporphyrinogen oxidase in an organelle, preferably in plastids or mitochondria, especially in plastids, of a non-human organism or a part thereof, preferably a microorganism, a plant cell, a plant or a part thereof, as compared to a corresponding non-transformed wild type non-human organism or a part thereof; and
[64878] (b) growing the non-human organism or a part thereof under conditions which permit the production of zeaxanthin or a composition comprising zeaxanthin in said non-human organism or in the culture medium surrounding said non-human organism.

[64879] A further embodiment of the present invention relates to a process for the production of zeaxanthin, which comprises
[64880] (a) increasing or generating one or more activities selected from the group consisting of glycerol-3-phosphate dehydrogenase in an organelle, preferably in plastids or mitochondria, especially in plastids, of a non-human organism or a part thereof, preferably a microorganism, a plant cell, a plant or a part thereof, as compared to a corresponding non-transformed wild type non-human organism or a part thereof; and
[64881] (b) growing the non-human organism or a part thereof under conditions which permit the production of zeaxanthin or a composition comprising zeaxanthin in said non-human organism or in the culture medium surrounding said non-human organism.

[64882] A further embodiment of the present invention relates to a process for the production of cryptoxanthin, which comprises
[64883] (a) increasing or generating one or more activities selected from the group consisting of YCL026C-A-protein in an organelle, preferably in plastids or mitochondria, especially in plastids, of a non-human organism or a part thereof, preferably a microorganism, a plant cell, a plant or a part thereof, as compared to a corresponding non-transformed wild type non-human organism or a part thereof; and
[64884] (b) growing the non-human organism or a part thereof under conditions which permit the production of cryptoxanthin or a composition comprising cryptoxanthin in said non-human organism or in the culture medium surrounding said non-human organism.

[64885] A further embodiment of the present invention relates to a process for the production of cryptoxanthin, which comprises
[64886] (a) increasing or generating one or more activities selected from the group consisting of F-box protein in an organelle, preferably in plastids or mitochondria, especially in plastids, of a non-human organism or a part thereof, preferably a microorganism, a plant cell, a plant or a part thereof, as compared to a corresponding non-transformed wild type non-human organism or a part thereof; and
[64887] (b) growing the non-human organism or a part thereof under conditions which permit the production of cryptoxanthin or a composition comprising cryptoxanthin in said non-human organism or in the culture medium surrounding said non-human organism.

[64888] A further embodiment of the present invention relates to a process for the production of cryptoxanthin, which comprises
[64889] (a) increasing or generating one or more activities selected from the group consisting of ygl096w-protein in an organelle, preferably in plastids or mitochondria, especially in plastids, of a non-human organism or a part thereof, preferably a microorganism, a plant cell, a plant or a part thereof, as compared to a corresponding non-transformed wild type non-human organism or a part thereof; and
[64890] (b) growing the non-human organism or a part thereof under conditions which permit the production of cryptoxanthin or a composition comprising cryptoxanthin in said non-human organism or in the culture medium surrounding said non-human organism.

[64891] A further embodiment of the present invention relates to a process for the production of cryptoxanthin, which comprises
[64892] (a) increasing or generating one or more activities selected from the group consisting of alcohol dehydrogenase in an organelle, preferably in plastids or mitochondria, especially in plastids, of a non-human organism or a part thereof, preferably a microorganism, a plant cell, a plant or a part thereof, as compared to a corresponding non-transformed wild type non-human organism or a part thereof; and
[64893] (b) growing the non-human organism or a part thereof under conditions which permit the production of cryptoxanthin or a composition comprising cryptoxanthin in said non-human organism or in the culture medium surrounding said non-human organism.

[64894] A further embodiment of the present invention relates to a process for the production of cryptoxanthin, which comprises
[64895] (a) increasing or generating one or more activities selected from the group consisting of halotolerance protein in an organelle, preferably in plastids or mitochondria, especially in plastids, of a non-human organism or a part thereof, preferably a microorganism, a plant cell, a plant or a part thereof, as compared to a corresponding non-transformed wild type non-human organism or a part thereof; and
[64896] (b) growing the non-human organism or a part thereof under conditions which permit the production of cryptoxanthin or a composition comprising cryptoxanthin in said non-human organism or in the culture medium surrounding said non-human organism.

[64897] A further embodiment of the present invention relates to a process for the production of zeaxanthin, which comprises
[64898] (a) increasing or generating one or more activities selected from the group consisting of halotolerance protein in an organelle, preferably in plastids or mitochondria, especially in plastids, of a non-human organism or a part thereof, preferably a microorganism, a plant cell, a plant or a part thereof, as compared to a corresponding non-transformed wild type non-human organism or a part thereof; and
[64899] (b) growing the non-human organism or a part thereof under conditions which permit the production of zeaxanthin or a composition comprising zeaxanthin in said non-human organism or in the culture medium surrounding said non-human organism.

[64900] A further embodiment of the present invention relates to a process for the production of zeaxanthin, which comprises
[64901] (a) increasing or generating one or more activities selected from the group consisting of N-acetylglucosaminylphosphatidylinositoldeacetylase in an organelle, preferably in plastids or mitochondria, especially in plastids, of a non-human organism or a part thereof, preferably a microorganism, a plant cell, a plant or a part thereof, as compared to a corresponding non-transformed wild type non-human organism or a part thereof; and
[64902] (b) growing the non-human organism or a part thereof under conditions which permit the production of zeaxanthin or a composition comprising zeaxanthin in said non-human organism or in the culture medium surrounding said non-human organism.

[64903] A further embodiment of the present invention relates to a process for the production of cryptoxanthin, which comprises
[64904] (a) increasing or generating one or more activities selected from the group consisting of ymr324c-protein in an organelle, preferably in plastids or mitochondria, especially in plastids, of a non-human organism or a part thereof, preferably a microorganism, a plant cell, a plant or a part thereof, as compared to a corresponding non-transformed wild type non-human organism or a part thereof; and
[64905] (b) growing the non-human organism or a part thereof under conditions which permit the production of cryptoxanthin or a composition comprising cryptoxanthin in said non-human organism or in the culture medium surrounding said non-human organism.

[64906] A further embodiment of the present invention relates to a process for the production of zeaxanthin, which comprises
[64907] (a) increasing or generating one or more activities selected from the group consisting of sterol O-acyltransferase in an organelle, preferably in plastids or mitochondria, especially in plastids, of a non-human organism or a part thereof, preferably a microorganism, a plant cell, a plant or a part thereof, as compared to a corresponding non-transformed wild type non-human organism or a part thereof; and
[64908] (b) growing the non-human organism or a part thereof under conditions which permit the production of zeaxanthin or a composition comprising zeaxanthin in said non-human organism or in the culture medium surrounding said non-human organism.

[64909] A further embodiment of the present invention relates to a process for the production of abscisic acid, which comprises
[64910] (a) increasing or generating one or more activities selected from the group consisting of YER184C-protein in an organelle, preferably in plastids or mitochondria, especially in plastids, of a non-human organism or a part thereof, preferably a microorganism, a plant cell, a plant or a part thereof, as compared to a corresponding non-transformed wild type non-human organism or a part thereof; and
[64911] (b) growing the non-human organism or a part thereof under conditions which permit the production of abscisic acid or a composition comprising abscisic acid in said non-human organism or in the culture medium surrounding said non-human organism.

[64912] A further embodiment of the present invention relates to a process for the production of abscisic acid, which comprises
[64913] (a) increasing or generating one or more activities selected from the group consisting of YOR044W-protein in an organelle, preferably in plastids or mitochondria, especially in plastids, of a non-human organism or a part thereof, preferably a microorganism, a plant cell, a plant or a part thereof, as compared to a corresponding non-transformed wild type non-human organism or a part thereof; and
[64914] (b) growing the non-human organism or a part thereof under conditions which permit the production of abscisic acid or a composition comprising abscisic acid in said non-human organism or in the culture medium surrounding said non-human organism.

[64915] A further embodiment of the present invention relates to a process for the production of abscisic acid, which comprises
[64916] (a) increasing or generating one or more activities selected from the group consisting of gluconate transport system permease 3 in an organelle, preferably in plastids or mitochondria, especially in plastids, of a non-human organism or a part thereof, preferably a microorganism, a plant cell, a plant or a part thereof, as compared to a corresponding non-transformed wild type non-human organism or a part thereof; and
[64917] (b) growing the non-human organism or a part thereof under conditions which permit the production of abscisic acid or a composition comprising abscisic acid in said non-human organism or in the culture medium surrounding said non-human organism.

[64918] A further embodiment of the present invention relates to a process for the production of abscisic acid, which comprises
[64919] (a) increasing or generating one or more activities selected from the group consisting of nitrate/nitrite transport protein in an organelle, preferably in plastids or mitochondria, especially in plastids, of a non-human organism or a part thereof, preferably a microorganism, a plant cell, a plant or a part thereof, as compared to a corresponding non-transformed wild type non-human organism or a part thereof; and
[64920] (b) growing the non-human organism or a part thereof under conditions which permit the production of abscisic acid or a composition comprising abscisic acid in said non-human organism or in the culture medium surrounding said non-human organism.

[64921] A further embodiment of the present invention relates to a process for the production of abscisic acid, which comprises
[64922] (a) increasing or generating one or more activities selected from the group consisting of acyl transferase in an organelle, preferably in plastids or mitochondria, especially in plastids, of a non-human organism or a part thereof, preferably a microorganism, a plant cell, a plant or a part thereof, as compared to a corresponding non-transformed wild type non-human organism or a part thereof; and
[64923] (b) growing the non-human organism or a part thereof under conditions which permit the production of abscisic acid or a composition comprising abscisic acid in said non-human organism or in the culture medium surrounding said non-human organism.

[64924] A further embodiment of the present invention relates to a process for the production of abscisic acid, which comprises
[64925] (a) increasing or generating one or more activities selected from the group consisting of heat shock transcription factor in an organelle, preferably in plastids or mitochondria, especially in plastids, of a non-human organism or a part thereof, preferably a microorganism, a plant cell, a plant or a part thereof, as compared to a corresponding non-transformed wild type non-human organism or a part thereof; and
[64926] (b) growing the non-human organism or a part thereof under conditions which permit the production of abscisic acid or a composition comprising abscisic acid in said non-human organism or in the culture medium surrounding said non-human organism.

[64927] A further embodiment of the present invention relates to a process for the production of abscisic acid, which comprises
[64928] (a) increasing or generating one or more activities selected from the group consisting of protein kinase in an organelle, preferably in plastids or mitochondria, especially in plastids, of a non-human organism or a part thereof, preferably a microorganism, a plant cell, a plant or a part thereof, as compared to a corresponding non-transformed wild type non-human organism or a part thereof; and
[64929] (b) growing the non-human organism or a part thereof under conditions which permit the production of abscisic acid or a composition comprising abscisic acid in said non-human organism or in the culture medium surrounding said non-human organism.

[64930] A further embodiment of the present invention relates to a process for the production of abscisic acid, which comprises
[64931] (a) increasing or generating one or more activities selected from the group consisting of protein phosphatase in an organelle, preferably in plastids or mitochondria, especially in plastids, of a non-human organism or a part thereof, preferably a microorganism, a plant cell, a plant or a part thereof, as compared to a corresponding non-transformed wild type non-human organism or a part thereof; and
[64932] (b) growing the non-human organism or a part thereof under conditions which permit the production of abscisic acid or a composition comprising abscisic acid in said non-human organism or in the culture medium surrounding said non-human organism.

[64933] A further embodiment of the present invention relates to a process for the production of abscisic acid, which comprises
[64934] (a) increasing or generating one or more activities selected from the group consisting of glycine cleavage system T aminomethyltransferase in an organelle, preferably in plastids or mitochondria, especially in plastids, of a non-human organism or a part thereof, preferably a microorganism, a plant cell, a plant or a part thereof, as compared to a corresponding non-transformed wild type non-human organism or a part thereof; and
[64935] (b) growing the non-human organism or a part thereof under conditions which permit the production of abscisic acid or a composition comprising abscisic acid in said non-human organism or in the culture medium surrounding said non-human organism.

[64936] A further embodiment of the present invention relates to a process for the production of abscisic acid, which comprises
[64937] (a) increasing or generating one or more activities selected from the group consisting of glutaredoxin in an organelle, preferably in plastids or mitochondria, especially in plastids, of a non-human organism or a part thereof, preferably a microorganism, a plant cell, a plant or a part thereof, as compared to a corresponding non-transformed wild type non-human organism or a part thereof; and
[64938] (b) growing the non-human organism or a part thereof under conditions which permit the production of abscisic acid or a composition comprising abscisic acid in said non-human organism or in the culture medium surrounding said non-human organism.

[64939] A further embodiment of the present invention relates to a process for the production of abscisic acid, which comprises
[64940] (a1) increasing or generating the activity of a polypeptide comprising a polypeptide as depicted in the respective line in column 5 or 8 of Table II, application no. 13, or a homolog or fragment thereof, a consensus sequence or at least one polypeptide motif as depicted in column 8 of Table IV, application no. 13, whereby the respective line disclose in column 7 the fine chemical abscisic acid; or
[64941] increasing or generating the activity of an expression product of one or more nucleic acid molecule(s) comprising a polynucleotide as depicted in the respective line in column 5 or 8 of Table I, application no. 13, preferably the coding region thereof, or a homolog or a fragment thereof, whereby the respective line disclose in column 7 the fine chemical abscisic acid;
[64942] in an organelle, preferably in plastids or mitochondria, especially in plastids, in a non-human organism or a part thereof; preferably a microorganism, a plant cell, a plant or a part thereof, as compared to a corresponding non-transformed wild type non-human organism or a part thereof; or
[64943] (a2) increasing or generating the activity of a polypeptide comprising a polypeptide as depicted in the respective line in column 5 or 8 of Table II, application no. 13, or a homolog or a fragment thereof, a consensus sequence or at least one polypeptide motif as depicted in the respective line in column 8 of Table IV, application no. 13, which is joined to a transit peptide, whereby the respective line disclose in column 7 the fine chemical abscisic acid; or
[64944] increasing or generating the activity of an expression product of one or more nucleic acid molecule(s) comprising a polynucleotide as depicted in the respective line in column 5 or 8 of Table I, application no. 13, preferably the coding region thereof, or a homolog or a fragment thereof, which is joined to a nucleic acid sequence encoding an organelle localization sequence, preferably a plastid or a mitochondrion localization sequence, especially a plastid localization sequence, whereby the respective line disclose in column 7 the fine chemical abscisic acid;
[64945] in a non-human organism or a part thereof; preferably a microorganism, a plant cell, a plant or a part thereof, as compared to a corresponding non-transformed wild type non-human organism or a part thereof; or
[64946] (a3) increasing or generating the activity of a polypeptide comprising a polypeptide as depicted in the respective line in column 5 or 8 of Table II, application no. 13, or a homolog or a fragment thereof, a consensus sequence or at least one polypeptide motif as depicted in the respective line in column 8 of Table IV, application no. 13, whereby the respective line disclose in column 7 the fine chemical abscisic acid; or
[64947] increasing or generating the activity of an expression product of one or more nucleic acid molecule(s) comprising a polynucleotide as depicted in the respective line in column 5 or 8 of Table I, application no. 13, preferably the coding region thereof, or a homolog or a fragment thereof, whereby the respective line disclose in column 7 the fine chemical abscisic acid,
[64948] in an organelle, preferably in plastids or mitochondria, especially in plastids, in a non-human organism or a part thereof; preferably a microorganism, a plant cell, a plant or a part thereof, through transformation of the organelle, as compared to a corresponding non-transformed wild type non-human organism or a part thereof;
[64949] and
[64950] (b) growing the non-human organism under conditions which permit the production of abscisic acid, or a composition comprising abscisic acid in said non-human organism or in the culture medium surrounding said non-human organism.

[64951] A further embodiment of the present invention relates to a process for the production of cryptoxanthin, which comprises
[64952] (a1) increasing or generating the activity of a polypeptide comprising a polypeptide as depicted in the respective line in column 5 or 8 of Table II, application no. 13, or a homolog or fragment thereof, a consensus sequence or at least one polypeptide motif as depicted in column 8 of Table IV, application no. 13, whereby the respective line disclose in column 7 the fine chemical cryptoxanthin; or
[64953] increasing or generating the activity of an expression product of one or more nucleic acid molecule(s) comprising a polynucleotide as depicted in the respective line in column 5 or 8 of Table I, application no. 13, preferably the coding region thereof, or a homolog or a fragment thereof, whereby the respective line disclose in column 7 the fine chemical cryptoxanthin;
[64954] in an organelle, preferably in plastids or mitochondria, especially in plastids, in a non-human organism or a part thereof; preferably a microorganism, a plant cell, a plant or a part thereof, as compared to a corresponding non-transformed wild type non-human organism or a part thereof; or
[64955] (a2) increasing or generating the activity of a polypeptide comprising a polypeptide as depicted in the respective line in column 5 or 8 of Table II, application no. 13, or a homolog or a fragment thereof, a consensus sequence or at least one polypeptide motif as depicted in the respective line in column 8 of Table IV, application no. 13, which is joined to a transit peptide, whereby the respective line disclose in column 7 the fine chemical cryptoxanthin; or
[64956] increasing or generating the activity of an expression product of one or more nucleic acid molecule(s) comprising a polynucleotide as depicted in the respective line in column 5 or 8 of Table I, application no. 13, preferably the coding region thereof, or a homolog or a fragment thereof, which is joined to a nucleic acid sequence encoding an organelle localization sequence, preferably a plastid or a mitochondrion localization sequence, especially a plastid localization sequence, whereby the respective line disclose in column 7 the fine chemical cryptoxanthin;
[64957] in a non-human organism or a part thereof; preferably a microorganism, a plant cell, a plant or a part thereof, as compared to a corresponding non-transformed wild type non-human organism or a part thereof; or
[64958] (a3) increasing or generating the activity of a polypeptide comprising a polypeptide as depicted in the respective line in column 5 or 8 of Table II, application no. 13, or a homolog or a fragment thereof, a consensus sequence or at least one polypeptide motif as depicted in the respective line in column 8 of Table IV, application no. 13, whereby the respective line disclose in column 7 the fine chemical cryptoxanthin; or
[64959] increasing or generating the activity of an expression product of one or more nucleic acid molecule(s) comprising a polynucleotide as depicted in the respective line in column 5 or 8 of Table I, application no. 13, preferably the coding region thereof, or a homolog or a fragment thereof, whereby the respective line disclose in column 7 the fine chemical cryptoxanthin;
[64960] in an organelle, preferably in plastids or mitochondria, especially in plastids, in a non-human organism or a part thereof; preferably a microorganism, a plant cell, a plant or a part thereof, through transformation of the organelle, as compared to a corresponding non-transformed wild type non-human organism or a part thereof;
[64961] and
[64962] (b) growing the non-human organism under conditions which permit the production of cryptoxanthin, or a composition comprising cryptoxanthin in said non-human organism or in the culture medium surrounding said non-human organism.

[64963] A further embodiment of the present invention relates to a process for the production of violaxanthin, which comprises
[64964] (a1) increasing or generating the activity of a polypeptide comprising a polypeptide as depicted in the respective line in column 5 or 8 of Table II, application no. 13, or a homolog or fragment thereof, a consensus sequence or at least one polypeptide motif as depicted in column 8 of Table IV, application no. 13, whereby the respective line disclose in column 7 the fine chemical violaxanthin; or
[64965] increasing or generating the activity of an expression product of one or more nucleic acid molecule(s) comprising a polynucleotide as depicted in the respective line in column 5 or 8 of Table I, application no. 13, preferably the coding region thereof, or a homolog or a fragment thereof, whereby the respective line disclose in column 7 the fine chemical violaxanthin;
[64966] in an organelle, preferably in plastids or mitochondria, especially in plastids, in a non-human organism or a part thereof; preferably a microorganism, a plant cell, a plant or a part thereof, as compared to a corresponding non-transformed wild type non-human organism or a part thereof; or
[64967] (a2) increasing or generating the activity of a polypeptide comprising a polypeptide as depicted in the respective line in column 5 or 8 of Table II, application no. 13, or a homolog or a fragment thereof, a consensus sequence or at least one polypeptide motif as depicted in the respective line in column 8 of Table IV, application no. 13, which is joined to a transit peptide, whereby the respective line disclose in column 7 the fine chemical violaxanthin; or
[64968] increasing or generating the activity of an expression product of one or more nucleic acid molecule(s) comprising a polynucleotide as depicted in the respective line in column 5 or 8 of Table I, application no. 13, preferably the coding region thereof, or a homolog or a fragment thereof, which is joined to a nucleic acid sequence encoding an organelle localization sequence, preferably a plastid or a mitochondrion localization sequence, especially a plastid localization sequence, whereby the respective line disclose in column 7 the fine chemical violaxanthin;
[64969] in a non-human organism or a part thereof; preferably a microorganism, a plant cell, a plant or a part thereof, as compared to a corresponding non-transformed wild type non-human organism or a part thereof; or
[64970] (a3) increasing or generating the activity of a polypeptide comprising a polypeptide as depicted in the respective line in column 5 or 8 of Table II, application no. 13, or a homolog or a fragment thereof, a consensus sequence or at least one polypeptide motif as depicted in the respective line in column 8 of Table IV, application no. 13, whereby the respective line disclose in column 7 the fine chemical violaxanthin; or
[64971] increasing or generating the activity of an expression product of one or more nucleic acid molecule(s) comprising a polynucleotide as depicted in the respective line in column 5 or 8 of Table I, application no. 13, preferably the coding region thereof, or a homolog or a fragment thereof, whereby the respective line disclose in column 7 the fine chemical violaxanthin;
[64972] in an organelle, preferably in plastids or mitochondria, especially in plastids, in a non-human organism or a part thereof; preferably a microorganism, a plant cell, a plant or a part thereof, through transformation of the organelle, as compared to a corresponding non-transformed wild type non-human organism or a part thereof;
[64973] and
[64974] (b) growing the non-human organism under conditions which permit the production of violaxanthin, or a composition comprising violaxanthin in said non-human organism or in the culture medium surrounding said non-human organism.

[64975] A further embodiment of the present invention relates to a process for the production of zeaxanthin, which comprises
[64976] (a1) increasing or generating the activity of a polypeptide comprising a polypeptide as depicted in the respective line in column 5 or 8 of Table II, application no. 13, or a homolog or fragment thereof, a consensus sequence or at least one polypeptide motif as depicted in column 8 of Table IV, application no. 13, whereby the respective line disclose in column 7 the fine chemical zeaxanthin; or
[64977] increasing or generating the activity of an expression product of one or more nucleic acid molecule(s) comprising a polynucleotide as depicted in the respective line in column 5 or 8 of Table I, application no. 13, preferably the coding region thereof, or a homolog or a fragment thereof, whereby the respective line disclose in column 7 the fine chemical zeaxanthin;
[64978] in an organelle, preferably in plastids or mitochondria, especially in plastids, in a non-human organism or a part thereof; preferably a microorganism, a plant cell, a plant or a part thereof, as compared to a corresponding non-transformed wild type non-human organism or a part thereof; or
[64979] (a2) increasing or generating the activity of a polypeptide comprising a polypeptide as depicted in the respective line in column 5 or 8 of Table II, application no. 13, or a homolog or a fragment thereof, a consensus sequence or at least one polypeptide motif as depicted in the respective line in column 8 of Table IV, application no. 13, which is joined to a transit peptide, whereby the respective line disclose in column 7 the fine chemical zeaxanthin; or
[64980] increasing or generating the activity of an expression product of one or more nucleic acid molecule(s) comprising a polynucleotide as depicted in the respective line in column 5 or 8 of Table I, application no. 13, preferably the coding region thereof, or a homolog or a fragment thereof, which is joined to a nucleic acid sequence encoding an organelle localization sequence, preferably a plastid or a mitochondrion localization sequence, especially a plastid localization sequence, whereby the respective line disclose in column 7 the fine chemical zeaxanthin;
[64981] in a non-human organism or a part thereof; preferably a microorganism, a plant cell, a plant or a part thereof, as compared to a corresponding non-transformed wild type non-human organism or a part thereof; or
[64982] (a3) increasing or generating the activity of a polypeptide comprising a polypeptide as depicted in the respective line in column 5 or 8 of Table II, application no. 13, or a homolog or a fragment thereof, a consensus sequence or at least one polypeptide motif as depicted in the respective line in column 8 of Table IV, application no. 13, whereby the respective line disclose in column 7 the fine chemical zeaxanthin; or
[64983] increasing or generating the activity of an expression product of one or more nucleic acid molecule(s) comprising a polynucleotide as depicted in the respective line in column 5 or 8 of Table I, application no. 13, preferably the coding region thereof, or a homolog or a fragment thereof, whereby the respective line disclose in column 7 the fine chemical zeaxanthin;
[64984] in an organelle, preferably in plastids or mitochondria, especially in plastids, in a non-human organism or a part thereof; preferably a microorganism, a plant cell, a plant or a part thereof, through transformation of the organelle, as compared to a corresponding non-transformed wild type non-human organism or a part thereof;
[64985] and
[64986] (b) growing the non-human organism under conditions which permit the production of zeaxanthin, or a composition comprising zeaxanthin in said non-human organism or in the culture medium surrounding said non-human organism.

[64987] Accordingly, the present invention relates to a process for the production of cryptoxanthin, which comprises
[64988] (a) increasing or generating the activity of a thioredoxin in the cytosol of a cell of a non-human organism or a part thereof, preferably a microorganism, a plant cell, a plant or a part thereof, as compared to a corresponding non-transformed wild type non-human organism or a part thereof; and
[64989] (b) growing the non-human organism or a part thereof under conditions which permit the production of cryptoxanthin or a composition comprising cryptoxanthin in said non-human organism or in the culture medium surrounding said non-human organism.

[64990] Accordingly, the present invention relates to a process for the production of zeaxanthin, which comprises
[64991] (a) increasing or generating the activity of a F-box protein in the cytosol of a cell of a non-human organism or a part thereof, preferably a microorganism, a plant cell, a plant or a part thereof, as compared to a corresponding non-transformed wild type non-human organism or a part thereof; and
[64992] (b) growing the non-human organism or a part thereof under conditions which permit the production of zeaxanthin or a composition comprising zeaxanthin in said non-human organism or in the culture medium surrounding said non-human organism.

[64993] Accordingly, the present invention relates to a process for the production of zeaxanthin, which comprises
[64994] (a) increasing or generating the activity of a monthiol glutaredoxin in the cytosol of a cell of a non-human organism or a part thereof, preferably a microorganism, a plant cell, a plant or a part thereof, as compared to a corresponding non-transformed wild type non-human organism or a part thereof; and
[64995] (b) growing the non-human organism or a part thereof under conditions which permit the production of zeaxanthin or a composition comprising zeaxanthin in said non-human organism or in the culture medium surrounding said non-human organism.

[64996] Accordingly, the present invention relates to a process for the production of zeaxanthin, which comprises
[64997] (a) increasing or generating the activity of a monothiol glutaredoxin in the cytosol of a cell of a non-human organism or a part thereof, preferably a microorganism, a plant cell, a plant or a part thereof, as compared to a corresponding non-transformed wild type non-human organism or a part thereof; and
[64998] (b) growing the non-human organism or a part thereof under conditions which permit the production of zeaxanthin or a composition comprising zeaxanthin in said non-human organism or in the culture medium surrounding said non-human organism.

[64999] Accordingly, the present invention relates to a process for the production of zeaxanthin, which comprises
[65000] (a) increasing or generating the activity of a monothiol glutaredoxin in the cytosol of a cell of a non-human organism or a part thereof, preferably a microorganism, a plant cell, a plant or a part thereof, as compared to a corresponding non-transformed wild type non-human organism or a part thereof; and
[65001] (b) growing the non-human organism or a part thereof under conditions which permit the production of zeaxanthin or a composition comprising zeaxanthin in said non-human organism or in the culture medium surrounding said non-human organism.

[65002] Accordingly, the present invention relates to a process for the production of zeaxanthin, which comprises
[65003] (a) increasing or generating the activity of a protein phosphatase in the cytosol of a cell of a non-human organism or a part thereof, preferably a microorganism, a plant cell, a plant or a part thereof, as compared to a corresponding non-transformed wild type non-human organism or a part thereof; and
[65004] (b) growing the non-human organism or a part thereof under conditions which permit the production of zeaxanthin or a composition comprising zeaxanthin in said non-human organism or in the culture medium surrounding said non-human organism.

[65005] Accordingly, the present invention relates to a process for the production of cryptoxanthin, which comprises
[65006] (a) increasing or generating the activity of a glutaredoxin in the cytosol of a cell of a non-human organism or a part thereof, preferably a microorganism, a plant cell, a plant or a part thereof, as compared to a corresponding non-transformed wild type non-human organism or a part thereof; and
[65007] (b) growing the non-human organism or a part thereof under conditions which permit the production of cryptoxanthin or a composition comprising cryptoxanthin in said non-human organism or in the culture medium surrounding said non-human organism.

[65008] Accordingly, the present invention relates to a process for the production of zeaxanthin, which comprises
[65009] (a) increasing or generating the activity of a MADS-box transcription factor in the cytosol of a cell of a non-human organism or a part thereof, preferably a microorganism, a plant cell, a plant or a part thereof, as compared to a corresponding non-transformed wild type non-human organism or a part thereof; and
[65010] (b) growing the non-human organism or a part thereof under conditions which permit the production of zeaxanthin or a composition comprising zeaxanthin in said non-human organism or in the culture medium surrounding said non-human organism.

[65011] Accordingly, the present invention relates to a process for the production of zeaxanthin, which comprises
[65012] (a) increasing or generating the activity of a isopropylmalate isomerase large subunit in the cytosol of a cell of a non-human organism or a part thereof, preferably a microorganism, a plant cell, a plant or a part thereof, as compared to a corresponding non-transformed wild type non-human organism or a part thereof; and
[65013] (b) growing the non-human organism or a part thereof under conditions which permit the production of zeaxanthin or a composition comprising zeaxanthin in said non-human organism or in the culture medium surrounding said non-human organism.

[65014] Accordingly, the present invention relates to a process for the production of cryptoxanthin, which comprises
[65015] (a) increasing or generating the activity of a AX653549-protein in the cytosol of a cell of a non-human organism or a part thereof, preferably a microorganism, a plant cell, a plant or a part thereof, as compared to a corresponding non-transformed wild type non-human organism or a part thereof; and
[65016] (b) growing the non-human organism or a part thereof under conditions which permit the production of cryptoxanthin or a composition comprising cryptoxanthin in said non-human organism or in the culture medium surrounding said non-human organism.

[65017] Accordingly, the present invention relates to a process for the production of zeaxanthin, which comprises
[65018] (a) increasing or generating the activity of a b1003-protein in the cytosol of a cell of a non-human organism or a part thereof, preferably a microorganism, a plant cell, a plant or a part thereof, as compared to a corresponding non-transformed wild type non-human organism or a part thereof; and
[65019] (b) growing the non-human organism or a part thereof under conditions which permit the production of zeaxanthin or a composition comprising zeaxanthin in said non-human organism or in the culture medium surrounding said non-human organism.

[65020] Accordingly, the present invention relates to a process for the production of zeaxanthin, which comprises
[65021] (a) increasing or generating the activity of a lipoprotein precursor in the cytosol of a cell of a non-human organism or a part thereof, preferably a microorganism, a plant cell, a plant or a part thereof, as compared to a corresponding non-transformed wild type non-human organism or a part thereof; and
[65022] (b) growing the non-human organism or a part thereof under conditions which permit the production of zeaxanthin or a composition comprising zeaxanthin in said non-human organism or in the culture medium surrounding said non-human organism.

[65023] Accordingly, the present invention relates to a process for the production of zeaxanthin, which comprises
[65024] (a) increasing or generating the activity of a serine/threonine-protein phosphatase in the cytosol of a cell of a non-human organism or a part thereof, preferably a microorganism, a plant cell, a plant or a part thereof, as compared to a corresponding non-transformed wild type non-human organism or a part thereof; and
[65025] (b) growing the non-human organism or a part thereof under conditions which permit the production of zeaxanthin or a composition comprising zeaxanthin in said non-human organism or in the culture medium surrounding said non-human organism.

[65026] Accordingly, the present invention relates to a process for the production of zeaxanthin, which comprises
[65027] (a) increasing or generating the activity of a b2032-protein in the cytosol of a cell of a non-human organism or a part thereof, preferably a microorganism, a plant cell, a plant or a part thereof, as compared to a corresponding non-transformed wild type non-human organism or a part thereof; and
[65028] (b) growing the non-human organism or a part thereof under conditions which permit the production of zeaxanthin or a composition comprising zeaxanthin in said non-human organism or in the culture medium surrounding said non-human organism.

[65029] Accordingly, the present invention relates to a process for the production of cryptoxanthin, which comprises
[65030] (a) increasing or generating the activity of a b2099-protein in the cytosol of a cell of a non-human organism or a part thereof, preferably a microorganism, a plant cell, a plant or a part thereof, as compared to a corresponding non-transformed wild type non-human organism or a part thereof; and
[65031] (b) growing the non-human organism or a part thereof under conditions which permit the production of cryptoxanthin or a composition comprising cryptoxanthin in said non-human organism or in the culture medium surrounding said non-human organism.

[65032] Accordingly, the present invention relates to a process for the production of zeaxanthin, which comprises
[65033] (a) increasing or generating the activity of a b2121-protein in the cytosol of a cell of a non-human organism or a part thereof, preferably a microorganism, a plant cell, a plant or a part thereof, as compared to a corresponding non-transformed wild type non-human organism or a part thereof; and
[65034] (b) growing the non-human organism or a part thereof under conditions which permit the production of zeaxanthin or a composition comprising zeaxanthin in said non-human organism or in the culture medium surrounding said non-human organism.

[65035] Accordingly, the present invention relates to a process for the production of zeaxanthin, which comprises
[65036] (a) increasing or generating the activity of a b2474-protein in the cytosol of a cell of a non-human organism or a part thereof, preferably a microorganism, a plant cell, a plant or a part thereof, as compared to a corresponding non-transformed wild type non-human organism or a part thereof; and
[65037] (b) growing the non-human organism or a part thereof under conditions which permit the production of zeaxanthin or a composition comprising zeaxanthin in said non-human organism or in the culture medium surrounding said non-human organism.

[65038] Accordingly, the present invention relates to a process for the production of zeaxanthin, which comprises
[65039] (a) increasing or generating the activity of a transcriptional regulator in the cytosol of a cell of a non-human organism or a part thereof, preferably a microorganism, a plant cell, a plant or a part thereof, as compared to a corresponding non-transformed wild type non-human organism or a part thereof; and
[65040] (b) growing the non-human organism or a part thereof under conditions which permit the production of zeaxanthin or a composition comprising zeaxanthin in said non-human organism or in the culture medium surrounding said non-human organism.

[65041] Accordingly, the present invention relates to a process for the production of cryptoxanthin, which comprises
[65042] (a) increasing or generating the activity of a flavodoxin in the cytosol of a cell of a non-human organism or a part thereof, preferably a microorganism, a plant cell, a plant or a part thereof, as compared to a corresponding non-transformed wild type non-human organism or a part thereof; and
[65043] (b) growing the non-human organism or a part thereof under conditions which permit the production of cryptoxanthin or a composition comprising cryptoxanthin in said non-human organism or in the culture medium surrounding said non-human organism.

[65044] Accordingly, the present invention relates to a process for the production of violaxanthin, which comprises
[65045] (a) increasing or generating the activity of a ribosephosphate isomerase, constitutive in the cytosol of a cell of a non-human organism or a part thereof, preferably a microorganism, a plant cell, a plant or a part thereof, as compared to a corresponding non-transformed wild type non-human organism or a part thereof; and
[65046] (b) growing the non-human organism or a part thereof under conditions which permit the production of violaxanthin or a composition comprising violaxanthin in said non-human organism or in the culture medium surrounding said non-human organism.

[65047] Accordingly, the present invention relates to a process for the production of violaxanthin, which comprises
[65048] (a) increasing or generating the activity of a acetyl CoA carboxylase in the cytosol of a cell of a non-human organism or a part thereof, preferably a microorganism, a plant cell, a plant or a part thereof, as compared to a corresponding non-transformed wild type non-human organism or a part thereof; and
[65049] (b) growing the non-human organism or a part thereof under conditions which permit the production of violaxanthin or a composition comprising violaxanthin in said non-human organism or in the culture medium surrounding said non-human organism.

[65050] Accordingly, the present invention relates to a process for the production of cryptoxanthin, which comprises
[65051] (a) increasing or generating the activity of a b3346-protein in the cytosol of a cell of a non-human organism or a part thereof, preferably a microorganism, a plant cell, a plant or a part thereof, as compared to a corresponding non-transformed wild type non-human organism or a part thereof; and
[65052] (b) growing the non-human organism or a part thereof under conditions which permit the production of cryptoxanthin or a composition comprising cryptoxanthin in said non-human organism or in the culture medium surrounding said non-human organism.

[65053] Accordingly, the present invention relates to a process for the production of violaxanthin, which comprises
[65054] (a) increasing or generating the activity of a ketol-acid reductoisomerase in the cytosol of a cell of a non-human organism or a part thereof, preferably a microorganism, a plant cell, a plant or a part thereof, as compared to a corresponding non-transformed wild type non-human organism or a part thereof; and
[65055] (b) growing the non-human organism or a part thereof under conditions which permit the production of violaxanthin or a composition comprising violaxanthin in said non-human organism or in the culture medium surrounding said non-human organism.

[65056] Accordingly, the present invention relates to a process for the production of cryptoxanthin, which comprises
[65057] (a) increasing or generating the activity of a b3817-protein in the cytosol of a cell of a non-human organism or a part thereof, preferably a microorganism, a plant cell, a plant or a part thereof, as compared to a corresponding non-transformed wild type non-human organism or a part thereof; and
[65058] (b) growing the non-human organism or a part thereof under conditions which permit the production of cryptoxanthin or a composition comprising cryptoxanthin in said non-human organism or in the culture medium surrounding said non-human organism.

[65059] Accordingly, the present invention relates to a process for the production of violaxanthin, which comprises
[65060] (a) increasing or generating the activity of a superoxide dismutase in the cytosol of a cell of a non-human organism or a part thereof, preferably a microorganism, a plant cell, a plant or a part thereof, as compared to a corresponding non-transformed wild type non-human organism or a part thereof; and
[65061] (b) growing the non-human organism or a part thereof under conditions which permit the production of violaxanthin or a composition comprising violaxanthin in said non-human organism or in the culture medium surrounding said non-human organism.

[65062] Accordingly, the present invention relates to a process for the production of violaxanthin, which comprises
[65063] (a) increasing or generating the activity of a acetyltransferase in the cytosol of a cell of a non-human organism or a part thereof, preferably a microorganism, a plant cell, a plant or a part thereof, as compared to a corresponding non-transformed wild type non-human organism or a part thereof; and
[65064] (b) growing the non-human organism or a part thereof under conditions which permit the production of violaxanthin or a composition comprising violaxanthin in said non-human organism or in the culture medium surrounding said non-human organism.

[65065] Accordingly, the present invention relates to a process for the production of cryptoxanthin, which comprises
[65066] (a) increasing or generating the activity of a melibiose carrier protein in the cytosol of a cell of a non-human organism or a part thereof, preferably a microorganism, a plant cell, a plant or a part thereof, as compared to a corresponding non-transformed wild type non-human organism or a part thereof; and
[65067] (b) growing the non-human organism or a part thereof under conditions which permit the production of cryptoxanthin or a composition comprising cryptoxanthin in said non-human organism or in the culture medium surrounding said non-human organism.

[65068] Accordingly, the present invention relates to a process for the production of zeaxanthin, which comprises
[65069] (a) increasing or generating the activity of a melibiose carrier protein in the cytosol of a cell of a non-human organism or a part thereof, preferably a microorganism, a plant cell, a plant or a part thereof, as compared to a corresponding non-transformed wild type non-human organism or a part thereof; and
[65070] (b) growing the non-human organism or a part thereof under conditions which permit the production of zeaxanthin or a composition comprising zeaxanthin in said non-human organism or in the culture medium surrounding said non-human organism.

[65071] Accordingly, the present invention relates to a process for the production of violaxanthin, which comprises
[65072] (a) increasing or generating the activity of a purine-nucleoside phosphorylase in the cytosol of a cell of a non-human organism or a part thereof, preferably a microorganism, a plant cell, a plant or a part thereof, as compared to a corresponding non-transformed wild type non-human organism or a part thereof; and
[65073] (b) growing the non-human organism or a part thereof under conditions which permit the production of violaxanthin or a composition comprising violaxanthin in said non-human organism or in the culture medium surrounding said non-human organism.

[65074] Accordingly, the present invention relates to a process for the production of zeaxanthin, which comprises
[65075] (a) increasing or generating the activity of a transcription factor in the cytosol of a cell of a non-human organism or a part thereof, preferably a microorganism, a plant cell, a plant or a part thereof, as compared to a corresponding non-transformed wild type non-human organism or a part thereof; and
[65076] (b) growing the non-human organism or a part thereof under conditions which permit the production of zeaxanthin or a composition comprising zeaxanthin in said non-human organism or in the culture medium surrounding said non-human organism.

[65077] Accordingly, the present invention relates to a process for the production of cryptoxanthin, which comprises
[65078] (a) increasing or generating the activity of a coproporphyrinogen oxidase in the cytosol of a cell of a non-human organism or a part thereof, preferably a microorganism, a plant cell, a plant or a part thereof, as compared to a corresponding non-transformed wild type non-human organism or a part thereof; and
[65079] (b) growing the non-human organism or a part thereof under conditions which permit the production of cryptoxanthin or a composition comprising cryptoxanthin in said non-human organism or in the culture medium surrounding said non-human organism.

[65080] Accordingly, the present invention relates to a process for the production of zeaxanthin, which comprises
[65081] (a) increasing or generating the activity of a coproporphyrinogen oxidase in the cytosol of a cell of a non-human organism or a part thereof, preferably a microorganism, a plant cell, a plant or a part thereof, as compared to a corresponding non-transformed wild type non-human organism or a part thereof; and
[65082] (b) growing the non-human organism or a part thereof under conditions which permit the production of zeaxanthin or a composition comprising zeaxanthin in said non-human organism or in the culture medium surrounding said non-human organism.

[65083] Accordingly, the present invention relates to a process for the production of zeaxanthin, which comprises
[65084] (a) increasing or generating the activity of a glycerol-3-phosphate dehydrogenase in the cytosol of a cell of a non-human organism or a part thereof, preferably a microorganism, a plant cell, a plant or a part thereof, as compared to a corresponding non-transformed wild type non-human organism or a part thereof; and
[65085] (b) growing the non-human organism or a part thereof under conditions which permit the production of zeaxanthin or a composition comprising zeaxanthin in said non-human organism or in the culture medium surrounding said non-human organism.

[65086] Accordingly, the present invention relates to a process for the production of cryptoxanthin, which comprises
[65087] (a) increasing or generating the activity of a YCL026C-A-protein in the cytosol of a cell of a non-human organism or a part thereof, preferably a microorganism, a plant cell, a plant or a part thereof, as compared to a corresponding non-transformed wild type non-human organism or a part thereof; and
[65088] (b) growing the non-human organism or a part thereof under conditions which permit the production of cryptoxanthin or a composition comprising cryptoxanthin in said non-human organism or in the culture medium surrounding said non-human organism.

[65089] Accordingly, the present invention relates to a process for the production of cryptoxanthin, which comprises
[65090] (a) increasing or generating the activity of a F-box protein in the cytosol of a cell of a non-human organism or a part thereof, preferably a microorganism, a plant cell, a plant or a part thereof, as compared to a corresponding non-transformed wild type non-human organism or a part thereof; and
[65091] (b) growing the non-human organism or a part thereof under conditions which permit the production of cryptoxanthin or a composition comprising cryptoxanthin in said non-human organism or in the culture medium surrounding said non-human organism.

[65092] Accordingly, the present invention relates to a process for the production of cryptoxanthin, which comprises
[65093] (a) increasing or generating the activity of a ygl096w-protein in the cytosol of a cell of a non-human organism or a part thereof, preferably a microorganism, a plant cell, a plant or a part thereof, as compared to a corresponding non-transformed wild type non-human organism or a part thereof; and
[65094] (b) growing the non-human organism or a part thereof under conditions which permit the production of cryptoxanthin or a composition comprising cryptoxanthin in said non-human organism or in the culture medium surrounding said non-human organism.

[65095] Accordingly, the present invention relates to a process for the production of cryptoxanthin, which comprises
[65096] (a) increasing or generating the activity of a alcohol dehydrogenase in the cytosol of a cell of a non-human organism or a part thereof, preferably a microorganism, a plant cell, a plant or a part thereof, as compared to a corresponding non-transformed wild type non-human organism or a part thereof; and
[65097] (b) growing the non-human organism or a part thereof under conditions which permit the production of cryptoxanthin or a composition comprising cryptoxanthin in said non-human organism or in the culture medium surrounding said non-human organism.

[65098] Accordingly, the present invention relates to a process for the production of cryptoxanthin, which comprises
[65099] (a) increasing or generating the activity of a halotolerance protein in the cytosol of a cell of a non-human organism or a part thereof, preferably a microorganism, a plant cell, a plant or a part thereof, as compared to a corresponding non-transformed wild type non-human organism or a part thereof; and
[65100] (b) growing the non-human organism or a part thereof under conditions which permit the production of cryptoxanthin or a composition comprising cryptoxanthin in said non-human organism or in the culture medium surrounding said non-human organism.

[65101] Accordingly, the present invention relates to a process for the production of zeaxanthin, which comprises
[65102] (a) increasing or generating the activity of a halotolerance protein in the cytosol of a cell of a non-human organism or a part thereof, preferably a microorganism, a plant cell, a plant or a part thereof, as compared to a corresponding non-transformed wild type non-human organism or a part thereof; and
[65103] (b) growing the non-human organism or a part thereof under conditions which permit the production of zeaxanthin or a composition comprising zeaxanthin in said non-human organism or in the culture medium surrounding said non-human organism.

[65104] Accordingly, the present invention relates to a process for the production of zeaxanthin, which comprises
[65105] (a) increasing or generating the activity of a N-acetylglucosaminylphosphatidylinositoldeacetylase in the cytosol of a cell of a non-human organism or a part thereof, preferably a microorganism, a plant cell, a plant or a part thereof, as compared to a corresponding non-transformed wild type non-human organism or a part thereof; and
[65106] (b) growing the non-human organism or a part thereof under conditions which permit the production of zeaxanthin or a composition comprising zeaxanthin in said non-human organism or in the culture medium surrounding said non-human organism.

[65107] Accordingly, the present invention relates to a process for the production of cryptoxanthin, which comprises
[65108] (a) increasing or generating the activity of a ymr324c-protein in the cytosol of a cell of a non-human organism or a part thereof, preferably a microorganism, a plant cell, a plant or a part thereof, as compared to a corresponding non-transformed wild type non-human organism or a part thereof; and
[65109] (b) growing the non-human organism or a part thereof under conditions which permit the production of cryptoxanthin or a composition comprising cryptoxanthin in said non-human organism or in the culture medium surrounding said non-human organism.

[65110] Accordingly, the present invention relates to a process for the production of zeaxanthin, which comprises
[65111] (a) increasing or generating the activity of a sterol O-acyltransferase in the cytosol of a cell of a non-human organism or a part thereof, preferably a microorganism, a plant cell, a plant or a part thereof, as compared to a corresponding non-transformed wild type non-human organism or a part thereof; and
[65112] (b) growing the non-human organism or a part thereof under conditions which permit the production of zeaxanthin or a composition comprising zeaxanthin in said non-human organism or in the culture medium surrounding said non-human organism.

[65113] Accordingly, the present invention relates to a process for the production of abscisic acid, which comprises
[65114] (a) increasing or generating the activity of a YER184C-protein in the cytosol of a cell of a non-human organism or a part thereof, preferably a microorganism, a plant cell, a plant or a part thereof, as compared to a corresponding non-transformed wild type non-human organism or a part thereof; and
[65115] (b) growing the non-human organism or a part thereof under conditions which permit the production of abscisic acid or a composition comprising abscisic acid in said non-human organism or in the culture medium surrounding said non-human organism.

[65116] Accordingly, the present invention relates to a process for the production of abscisic acid, which comprises
[65117] (a) increasing or generating the activity of a YOR044W-protein in the cytosol of a cell of a non-human organism or a part thereof, preferably a microorganism, a plant cell, a plant or a part thereof, as compared to a corresponding non-transformed wild type non-human organism or a part thereof; and
[65118] (b) growing the non-human organism or a part thereof under conditions which permit the production of abscisic acid or a composition comprising abscisic acid in said non-human organism or in the culture medium surrounding said non-human organism.

[65119] Accordingly, the present invention relates to a process for the production of abscisic acid, which comprises
[65120] (a) increasing or generating the activity of a gluconate transport system permease 3 in the cytosol of a cell of a non-human organism or a part thereof, preferably a microorganism, a plant cell, a plant or a part thereof, as compared to a corresponding non-transformed wild type non-human organism or a part thereof; and
[65121] (b) growing the non-human organism or a part thereof under conditions which permit the production of abscisic acid or a composition comprising abscisic acid in said non-human organism or in the culture medium surrounding said non-human organism.

[65122] Accordingly, the present invention relates to a process for the production of abscisic acid, which comprises
[65123] (a) increasing or generating the activity of a nitrate/nitrite transport protein in the cytosol of a cell of a non-human organism or a part thereof, preferably a microorganism, a plant cell, a plant or a part thereof, as compared to a corresponding non-transformed wild type non-human organism or a part thereof; and
[65124] (b) growing the non-human organism or a part thereof under conditions which permit the production of abscisic acid or a composition comprising abscisic acid in said non-human organism or in the culture medium surrounding said non-human organism.

[65125] Accordingly, the present invention relates to a process for the production of abscisic acid, which comprises
[65126] (a) increasing or generating the activity of a acyl transferase in the cytosol of a cell of a non-human organism or a part thereof, preferably a microorganism, a plant cell, a plant or a part thereof, as compared to a corresponding non-transformed wild type non-human organism or a part thereof; and
[65127] (b) growing the non-human organism or a part thereof under conditions which permit the production of abscisic acid or a composition comprising abscisic acid in said non-human organism or in the culture medium surrounding said non-human organism.

[65128] Accordingly, the present invention relates to a process for the production of abscisic acid, which comprises
[65129] (a) increasing or generating the activity of a heat shock transcription factor in the cytosol of a cell of a non-human organism or a part thereof, preferably a microorganism, a plant cell, a plant or a part thereof, as compared to a corresponding non-transformed wild type non-human organism or a part thereof; and
[65130] (b) growing the non-human organism or a part thereof under conditions which permit the production of abscisic acid or a composition comprising abscisic acid in said non-human organism or in the culture medium surrounding said non-human organism.

[65131] Accordingly, the present invention relates to a process for the production of abscisic acid, which comprises
[65132] (a) increasing or generating the activity of a protein kinase in the cytosol of a cell of a non-human organism or a part thereof, preferably a microorganism, a plant cell, a plant or a part thereof, as compared to a corresponding non-transformed wild type non-human organism or a part thereof; and
[65133] (b) growing the non-human organism or a part thereof under conditions which permit the production of abscisic acid or a composition comprising abscisic acid in said non-human organism or in the culture medium surrounding said non-human organism.

[65134] Accordingly, the present invention relates to a process for the production of abscisic acid, which comprises
[65135] (a) increasing or generating the activity of a protein phosphatase in the cytosol of a cell of a non-human organism or a part thereof, preferably a microorganism, a plant cell, a plant or a part thereof, as compared to a corresponding non-transformed wild type non-human organism or a part thereof; and
[65136] (b) growing the non-human organism or a part thereof under conditions which permit the production of abscisic acid or a composition comprising abscisic acid in said non-human organism or in the culture medium surrounding said non-human organism.

[65137] Accordingly, the present invention relates to a process for the production of abscisic acid, which comprises
[65138] (a) increasing or generating the activity of a glycine cleavage system T aminomethyltransferase in the cytosol of a cell of a non-human organism or a part thereof, preferably a microorganism, a plant cell, a plant or a part thereof, as compared to a corresponding non-transformed wild type non-human organism or a part thereof; and
[65139] (b) growing the non-human organism or a part thereof under conditions which permit the production of abscisic acid or a composition comprising abscisic acid in said non-human organism or in the culture medium surrounding said non-human organism.

[65140] Accordingly, the present invention relates to a process for the production of abscisic acid, which comprises
[65141] (a) increasing or generating the activity of a glutaredoxin in the cytosol of a cell of a non-human organism or a part thereof, preferably a microorganism, a plant cell, a plant or a part thereof, as compared to a corresponding non-transformed wild type non-human organism or a part thereof; and
[65142] (b) growing the non-human organism or a part thereof under conditions which permit the production of abscisic acid or a composition comprising abscisic acid in said non-human organism or in the culture medium surrounding said non-human organism.

[65143] Accordingly, the present invention relates to a process for the production of abscisic acid, which comprises
[65144] (a) increasing or generating the activity of a polypeptide comprising a polypeptide as depicted in the respective line in column 5 or 8 of Table II, application no. 13, or a homolog or a fragment thereof, a consensus sequence or at least one polypeptide motif as depicted in the respective line in column 8 of Table IV, application no. 13, whereby the respective line disclose in column 7 the fine chemical abscisic acid; or
[65145] increasing or generating the activity of an expression product of one or more nucleic acid molecule(s) comprising a polynucleotide as depicted in the respective line in column 5 or 8 of Table I, application no. 13, preferably the coding region thereof, or a homolog or a fragment thereof, whereby the respective line disclose in column 7 the fine chemical abscisic acid;
[65146] in the cytosol of a cell of a non-human organism or a part thereof; preferably a microorganism, a plant cell, a plant or a part thereof, as compared to a corresponding non-transformed wild type non-human organism or a part thereof; and
[65147] (b) growing the non-human organism under conditions which permit the production of abscisic acid, or a composition comprising abscisic acid in said non-human organism or in the culture medium surrounding said non-human organism.

[65148] Accordingly, the present invention relates to a process for the production of cryptoxanthin, which comprises
[65149] (a) increasing or generating the activity of a polypeptide comprising a polypeptide as depicted in the respective line in column 5 or 8 of Table II, application no. 13, or a homolog or a fragment thereof, a consensus sequence or at least one polypeptide motif as depicted in the respective line in column 8 of Table IV, application no. 13, whereby the respective line disclose in column 7 the fine chemical cryptoxanthin; or
[65150] increasing or generating the activity of an expression product of one or more nucleic acid molecule(s) comprising a polynucleotide as depicted in the respective line in column 5 or 8 of Table I, application no. 13, preferably the coding region thereof, or a homolog or a fragment thereof, whereby the respective line disclose in column 7 the fine chemical cryptoxanthin;
[65151] in the cytosol of a cell of a non-human organism or a part thereof; preferably a microorganism, a plant cell, a plant or a part thereof, as compared to a corresponding non-transformed wild type non-human organism or a part thereof; and
[65152] (b) growing the non-human organism under conditions which permit the production of cryptoxanthin, or a composition comprising cryptoxanthin in said non-human organism or in the culture medium surrounding said non-human organism.

[65153] Accordingly, the present invention relates to a process for the production of violaxanthin, which comprises
[65154] (a) increasing or generating the activity of a polypeptide comprising a polypeptide as depicted in the respective line in column 5 or 8 of Table II, application no. 13, or a homolog or a fragment thereof, a consensus sequence or at least one polypeptide motif as depicted in the respective line in column 8 of Table IV, application no. 13, whereby the respective line disclose in column 7 the fine chemical violaxanthin; or
[65155] increasing or generating the activity of an expression product of one or more nucleic acid molecule(s) comprising a polynucleotide as depicted in the respective line in column 5 or 8 of Table I, application no. 13, preferably the coding region thereof, or a homolog or a fragment thereof, whereby the respective line disclose in column 7 the fine chemical violaxanthin;
[65156] in the cytosol of a cell of a non-human organism or a part thereof; preferably a microorganism, a plant cell, a plant or a part thereof, as compared to a corresponding non-transformed wild type non-human organism or a part thereof; and
[65157] (b) growing the non-human organism under conditions which permit the production of violaxanthin, or a composition comprising violaxanthin in said non-human organism or in the culture medium surrounding said non-human organism.

[65158] Accordingly, the present invention relates to a process for the production of zeaxanthin, which comprises
[65159] (a) increasing or generating the activity of a polypeptide comprising a polypeptide as depicted in the respective line in column 5 or 8 of Table II, application no. 13, or a homolog or a fragment thereof, a consensus sequence or at least one polypeptide motif as depicted in the respective line in column 8 of Table IV, application no. 13, whereby the respective line disclose in column 7 the fine chemical zeaxanthin; or
[65160] increasing or generating the activity of an expression product of one or more nucleic acid molecule(s) comprising a polynucleotide as depicted in the respective line in column 5 or 8 of Table I, application no. 13, preferably the coding region thereof, or a homolog or a fragment thereof, whereby the respective line disclose in column 7 the fine chemical zeaxanthin;
[65161] in the cytosol of a cell of a non-human organism or a part thereof; preferably a microorganism, a plant cell, a plant or a part thereof, as compared to a corresponding non-transformed wild type non-human organism or a part thereof; and
[65162] (b) growing the non-human organism under conditions which permit the production of zeaxanthin, or a composition comprising zeaxanthin in said non-human organism or in the culture medium surrounding said non-human organism.

[65163] In a further embodiment the activity of the polypeptide comprising a polypeptide as depicted in the respective line in column 5 or 8 of Table II, application no. 13, or a homolog or a fragment thereof, a consensus sequence or at least one polypeptide motif as depicted in the respective line in column 8 of Table IV, application no. 13, is increased or generated non-targeted in the above-mentioned process in a microorganism or plant or a part thereof.

[65164] In a further embodiment said polypeptide has the activity of the respective polypeptide represented by a protein comprising a polypeptide as depicted in the respective line in column 5 of Table II, application no. 13.

[65165] In a further embodiment the activity of the expression product of one or more nucleic acid molecule(s) comprising a polynucleotide as depicted in the respective line in column 5 or 8 of Table I, application no. 13, preferably the coding region thereof, or a homolog or a fragment thereof, is increased or generated non-targeted in the above-mentioned process in a microorganism or plant or a part thereof.

[65166] In a further embodiment the activity of the polypeptide comprising a polypeptide as depicted in the respective line in column 5 or 8 of Table II, application no. 13, or a homolog or a fragment thereof, a consensus sequence or at least one polypeptide motif as depicted in the respective line in column 8 of Table IV, application no. 13, is increased or generated in the above-mentioned process in an organelle preferably in plastids or mitochondria, especially in plastids, of a microorganism or plant.

[65167] In a further embodiment said polypeptide has the activity of the respective polypeptide represented by a protein comprising a polypeptide as depicted in the respective line in column 5 of Table II, application no. 13.

[65168] In a further embodiment the activity of the expression product of one or more nucleic acid molecule(s) comprising a polynucleotide as depicted in the respective line in column 5 or 8 of Table I, application no. 13, preferably the coding region thereof, or a homolog or a fragment thereof, is increased or generated in the above-mentioned process in an organelle, preferably in plasids or mitochondria, especially in plastids, of a microorganism or plant.

[65169] In a further embodiment the activity of the polypeptide comprising a polypeptide as depicted in the respective line in column 5 or 8 of Table II, application no. 13, or a homolog or a fragment thereof, a consensus sequence or at least one polypeptide motif as depicted in the respective line in column 8 of Table IV, application no. 13, is increased or generated in the above-mentioned process in the cyctosol of a cell, of a microorganism or plant.

[65170] In a further embodiment said polypeptide has the activity of the respective polypeptide represented by a protein comprising a polypeptide as depicted in the respective line in column 5 of Table II, application no. 13.

[65171] In a further embodiment the activity of the expression product of one or more nucleic acid molecule(s) comprising a polynucleotide as depicted in the respective line in column 5 or 8 of Table I, application no. 13, preferably the coding region thereof, or a homolog or a fragment thereof, is increased or generated in the above-mentioned process in the cytosol of a cell, of a microorganism or plant.

[65172] [0039.1.7.13] to [0066.1.7.13] for the disclosure of these paragraphs see [0039.1.7.7] [0066.1.7.7] above

[65173] As mentioned above the nucleic acid sequences coding for the proteins as shown in Table II, application no. 13, column 5 or 8, or homologs or fragments thereof, are joined to a nucleic acid sequence encoding a plastidic transit peptide, e.g, if for the nucleic acid molecule in Table I, column 6 the term “plastidic” is indicated. This nucleic acid sequence encoding a transit peptide ensures transport of the protein to the organelle. The nucleic acid sequence of the gene to be expressed and the nucleic acid sequence encoding the transit peptide are operably linked. Therefore the transit peptide coding sequence is fused in frame to the nucleic acid sequence coding for proteins as shown in Table II, application no. 13, column 5 or 8, or homologs or fragments thereof, e.g., if for the nucleic acid molecule in Table I, column 6 the term “plastidic” is indicated.

[65174] [0068.1.7.13] to [0072.1.7.13] for the disclosure of these paragraphs see [0068.1.7.7] to [0072.1.7.7] above

[65175] As mentioned above the nucleic acid sequences coding for the proteins as shown in the respective line in Table II, application no. 13, column 5 or 8, or homologs or fragments thereof, are joined to a nucleic acid sequence encoding a mitochondric transit peptide, e.g., if for the respective nucleic acid molecule in Table I, column 6 the term “mitochondric” is indicated. This nucleic acid sequence encoding a transit peptide ensures transport of the protein to the organelle. The nucleic acid sequence of the gene to be expressed and the nucleic acid sequence encoding the transit peptide are operably linked. Therefore the transit peptide encoding sequence is fused in frame to the nucleic acid sequence coding for proteins as shown in the respective line in Table II, application no. 13, column 5 or 8, or homologs or fragments thereof, e.g., if for the nucleic acid molecule in the respective line in Table I, column 6 the term “mitochondric” is indicated.

[65176] for the disclosure of this paragraph see [0074.1.7.7] above

[65177] for the disclosure of this paragraph see [0075.1.7.7] above

[65178] Nucleic acid sequences coding for the transit peptides may be chemically synthesized either in part or wholly according to structure of transit peptide sequences disclosed in the prior art. Said natural or chemically synthesized sequences can be directly linked to the sequences encoding the mature protein or via a linker nucleic acid sequence, which may be typically less than 500 base pairs, preferably less than 450, 400, 350, 300, 250 or 200 base pairs, more preferably less than 150, 100, 90, 80, 70, 60, 50, 40 or 30 base pairs and most preferably less than 25, 20, 15, 12, 9, 6 or 3 base pairs in length and are in frame to the coding sequence. Furthermore favorable nucleic acid sequences encoding transit peptides may comprise sequences derived from more than one biological and/or chemical source and may include a nucleic acid sequence derived from the amino-terminal region of the mature protein, which in its native state is linked to the transit peptide. In a preferred embodiment of the invention said amino-terminal region of the mature protein is typically less than 150 amino acids, preferably less than 140, 130, 120, 110, 100 or 90 amino acids, more preferably less than 80, 70, 60, 50, 40, 35, 30, 25 or 20 amino acids and most preferably less than 19, 18, 17, 16, 15, 14, 13, 12, 11 or 10 amino acids in length. But even shorter or longer stretches are also possible. In addition target sequences, which facilitate the transport of proteins to other cell compartments such as the vacuole, endoplasmic reticulum, golgi complex, glyoxysomes, peroxisomes, mitochondria (in case of a plastidal transit peptide) or plastids, especially chloroplasts (in case of a mitochondric transit peptide) may be also part of the inventive nucleic acid sequence. The proteins translated from said inventive nucleic acid sequences are a kind of fusion proteins that means the nucleic acid sequences encoding the plastidal transit peptide for example the ones shown in Table a, preferably the last one of the Table a are joint to the respective nucleic acid sequences shown in Table I, application no. 13, columns 5 or 8, especially the coding region thereof, or homologs or fragments thereof, in case of nucleic acid sequences being expressed in plastids, and that means the nucleic acid sequences encoding the mitochondric transit peptide for example the ones shown in Table b, preferably the last one of the Table b are joint to the respective nucleic acid sequences shown in Table I, application no. 13, columns 5 or 8, especially the coding region thereof, or homologs or fragments thereof, in case of nucleic acid sequences being expressed in mitochondria. The person skilled in the art is able to join said sequences in a functional manner. Advantageously the transit peptide part is cleaved off from the protein part shown in Table II, application no. 13, columns 5 or 8, or a homolog or fragment thereof, during or after the transport into the organelles, preferably into the plastids or mitochondria, respectively.

[65179] All products of the cleavage of the preferred transit peptide shown in the last line of Table a have preferably the N-terminal amino acid sequences QIA CSS or QIA EFQLTT in front of the start methionine of the respective protein mentioned in Table II, application no. 13, column 5 or 8. or homologs or fragments thereof. Other short amino acid sequences of an range of 1 to 20 amino acids preferable 2 to 15 amino acids, more preferable 3 to 10 amino acids most preferably 4 to 8 amino acids are also possible in front of the start methionine of the protein mentioned in Table II, application no. 13, columns 5 or 8, or homologs or fragments thereof. In case of the amino acid sequence QIA CSS the three amino acids in front of the start methionine are stemming from the LIC (=ligatation independent cloning) cassette. Said short amino acid sequence is preferred in the case of the expression of E. coli genes. In case of the amino acid sequence QIA EFQLTT the six amino acids in front of the start methionine are stemming from the LIC cassette. Said short amino acid sequence is preferred in the case of the expression of S. cerevisiae genes. The skilled worker knowns that other short sequences are also useful in the expression of the respective nucleic acid molecule comprising a polynucleotide as depicted in Table I, application no. 13, column 5 or 8, preferably the coding region thereof, or a homolog or a fragment thereof. Furthermore the skilled worker is aware of the fact that there is not a need for such short sequences in the expression of the genes.

[65180] for the disclosure of this paragraph see [0077.1.7.7] above

[65181] for the disclosure of this paragraph see [0078.1.7.7] above

[65182] Alternatively to the targeting of the respective sequences shown in Table II, application no. 13, columns 5 or 8, or homologs or fragments thereof, preferably of sequences in general encoded in the nucleus with the aid of the targeting sequences mentioned for example in Table a alone, Table b alone, or in combination with other targeting sequences preferably into plastids or mitochondria, respectively, the nucleic acids of the invention can directly be introduced into the plastidal or mitochondrial genome. Therefore in a preferred embodiment the respective nucleic acid sequences shown in the respective line in Table I, application no. 13, columns 5 or 8, preferably the coding region thereof, or homologs or fragments thereof, are directly introduced and expressed in plastids e.g., if for the nucleic acid molecule in the respective line in Table I, column 6, the term “plastidic” is indicated, or are directly introduced and expressed in mitochondria e.g., if for the nucleic acid molecule in the respective line in Table I, column 6 the term “mitochondric” is indicated.

[65183] The term “introduced” in the context of this specification shall mean the insertion of a nucleic acid sequence into the organism by means of a “transfection”, “transduction” or preferably by “transformation”.

[65184] A plastid, such as a chloroplast, or a mitochondrion, has been “transformed” by an exogenous (preferably foreign) nucleic acid sequence if a nucleic acid sequence has been introduced into the plastid or mitochondrion that means that this sequence has crossed the membrane or the membranes of the plastid or of the mitochondrion. The exogenous, preferably foreign, DNA may be integrated (covalently linked) into plastid or mitochondrial DNA making up the genome of the plastid or mitochondrion, or it may remain unintegrated (e.g., by including a chloroplast origin of replication). “Stably” integrated DNA sequences are those, which are inherited through plastid or mitochondrion replication, thereby transferring new plastids or mitochondria, with the features of the integrated DNA sequence to the progeny.

[65185] [0080.1.7.13] to [0083.1.7.13] for the disclosure of these paragraphs see [0080.1.7.7] to [0083.1.7.7] above

[65186] For the process of the present invention it may be of great advantage that by transforming the plastids the intraspecies specific transgene flow is blocked, because a lot of species such as corn, cotton and rice have a strict maternal inheritance of plastids. By placing the respective genes specified in the respective line in Table I, application no. 13, columns 5 or 8, preferably the coding region, or homologs or fragments thereof, e.g. if for the nucleic acid molecule in the respective line in column 6 of Table I the term “plastidic” is indicated, in the plastids of plants, these genes will not be present in the pollen of said plants.

[65187] A further preferred embodiment of the invention relates to the use of so called “chloroplast localization sequences”, in which a first RNA sequence or molecule is capable of transporting or “chaperoning” a second RNA sequence, such as a RNA sequence transcribed from the sequences depicted in the respective line in Table I, application no. 13, columns 5 or 8, preferably the coding region thereof, or a homolog or a fragment thereof, or a sequence encoding a protein, as depicted in the respective line in Table II, application no. 13, columns 5 and 8, or a homolog or a fragment thereof, from an external environment inside a cell or outside a plastid into a chloroplast. In one embodiment the chloroplast localization signal is substantially similar or complementary to a complete or intact viroid sequence. The chloroplast localization signal may be encoded by a DNA sequence, which is transcribed into the chloroplast localization RNA. The term “viroid” refers to a naturally occurring single stranded RNA molecule (Flores, C. R. Acad. Sci. III. 324 (10), 943 (2001)). Viroids usually contain about 200-500 nucleotides and generally exist as circular molecules. Examples of viroids that contain chloroplast localization signals include but are not limited to ASBVd, PLMVd, CChMVd and ELVd. The viroid sequence or a functional part of it can be fused to the sequences depicted in the respective line in Table I, application no. 13, columns 5 or 8, preferably the coding region thereof, or a homolog or a fragment thereof, or a sequence encoding a protein, as depicted in the respective line in Table II, application no. 13, columns 5 or 8, or a homolog or a fragment thereof, in such a manner that the viroid sequence transports a sequence transcribed from a sequence as depicted in the respective line in Table I, application no. 13 columns 5 or 8, preferably the coding region thereof, or a homolog or a fragment thereof, or a sequence encoding a protein as depicted in the respective line in Table II, application no. 13 columns 5 or 8, or a homolog or a fragment thereof, into the chloroplasts, e.g. if for the nucleic acid molecule in column 6 of Table I the term “plastidic” is indicated. A preferred embodiment uses a modified ASBVd (Navarro et al., Virology. 268 (1), 218 (2000)).

[65188] In a further specific embodiment the protein to be expressed in the plastids such as the proteins depicted in the respective line in Table II, application no. 13, columns 5 or 8, or a homolog or a fragment thereof, e.g. if for the nucleic acid molecule in the respective line in column 6 of Table I the term “plastidic” is indicated, are encoded by different nucleic acids. Such a method is disclosed in WO 2004/040973, which shall be incorporated by reference. WO 2004/040973 teaches a method, which relates to the translocation of an RNA corresponding to a gene or gene fragment into the chloroplast by means of a chloroplast localization sequence. The genes, which should be expressed in the plant or plant cells, are split into nucleic acid fragments, which are introduced into different compartments in the plant e.g. the nucleus, the plastids and/or mitochondria. Additionally plant cells are described in which the chloroplast contains a ribozyme fused at one end to an RNA encoding a fragment of a protein used in the inventive process such that the ribozyme can trans-splice the translocated fusion RNA to the RNA encoding the gene fragment to form and as the case may be reunite the nucleic acid fragments to an intact mRNA encoding a functional protein for example as disclosed in the respective line in Table II, application no. 13, columns 5 or 8, or a homolog or a fragment thereof.

[65189] In a preferred embodiment of the invention the nucleic acid sequences as shown in the respective line in Table I, application no. 13, columns 5 or 8, preferably the coding region thereof, or homologs or fragments thereof, e.g. if for the nucleic acid molecule in the respective line in column 6 of Table I the term “plastidic” is indicated, used in the inventive process are transformed into plastids, which are metabolically active. Those plastids should preferably maintain at a high copy number in the plant or plant tissue of interest, most preferably the chloroplasts found in green plant tissues, such as leaves or cotyledons or in seeds.

[65190] For a good expression in the plastids the nucleic acid sequences as shown in the respective line in Table I, application no. 13, columns 5 or 8, preferably the coding region thereof, or homologs or fragments thereof, e.g. if for the nucleic acid molecule in the respective line in column 6 of Table I the term “plastidic” is indicated, are introduced into an expression cassette using preferably a promoter and terminater, which are active in plastids preferably a chloroplast promoter. Examples of such promoters include the psbA promoter from the gene from spinach or pea, the rbcL promoter, and the atpB promoter from corn.

[65191] [0089.1.7.13] to [0092.1.7.13] for the disclosure of these paragraphs see [0089.1.7.7] to [0092.1.7.7] above

[65192] Advantageously the process for the production of the fine chemical abscisic acid, cryptoxanthin, violaxanthin, and/or zeaxanthin leads to an enhanced production of the respective fine chemical. The terms “enhanced” or “increase” mean at least a 10%, 20%, 30%, 40% or 50%, preferably at least 60%, 70%, 80%, 90% or 100%, more preferably 150%, 200%, 300%, 400% or 500% higher production of the respective fine chemical abscisic acid, cryptoxanthin, violaxanthin, and/or zeaxanthin in comparison to the wild-type as defined above, e.g. that means in comparison to a non-human organism without the aforementioned modification of the activity of a protein as shown in the respective line in Table II, application no. 13, column 5 or 8, or a fragment or a homolog thereof. The modification of the activity of a protein as shown in the respective line in Table II, application no. 13, column 5 or 8, or a homolog or a fragment thereof, or their combination can be achieved by joining the protein to a respective transit peptide, e.g. if for the respective encoding nucleic acid molecule in column 6 of Table I the term “plastidic” or “mitochondric” is indicated.

[65193] Surprisingly it was found, that the transgenic expression of a protein as shown in the respective line in Table II, application no. 13, column 5, especially from the Saccaromyces cerevisiae, E. coli, Arabidopsis thaliana, Azotobacter vinelandii, Brassica napus, Glycine max, Oryza sativa, Physcomitrella patens, Synechocystis sp., Thermus thermophilus, Zea mays in a non-human organism, like a plant or a part thereof, such as Arabidopsis thaliana for example, or a microorganism, conferred a production of or an increase in abscisic acid, cryptoxan thin, violaxanthin, and/or zeaxanthin,respectively, to the transgenic non-human organism as compared to a corresponding non-transformed wild type.

[65194] In one embodiment the transgenic expression of a protein as shown in the respective line in Table II, application no. 13, column 5 or 8, or a homolog or a fragment thereof, especially from the Saccaromyces cerevisiae, E. coli, Arabidopsis thaliana, Azotobacter vinelandii, Brassica napus, Glycine max, Oryza sativa, Physcomitrella patens, Synechocystis sp., Thermus thermophilus, Zea mays in a non-human organism, like a plant or a part thereof, such as Arabidopsis thaliana for example, or a microorganism, confers a production of or an increase in abscisic acid, cryptoxanthin, violaxanthin, and/or zeaxanthin,respectively, to the transgenic non-human organism as compared to a corresponding non-transformed wild type.

[65195] Accordingly, in one embodiment, an increase of cryptoxanthin in a non-human organism, as compared to a corresponding non-transformed wild type non-human organism, is conferred in the process of the invention, if the activity of a polypeptide showing the activity of a thioredoxin, or if the activity of the polypeptide At3g15360, preferably represented by SEQ ID NO. 130492, or a homolog or fragment thereof, or if the activity of a polypeptide encoded by a nucleic acid molecule comprising the nucleic acid SEQ ID NO. 130491, preferably the coding region thereof, or a homolog or fragment thereof, e.g. derived from Arabidopsis thaliana, is increased or generated. For example the activity of a nucleic acid molecule or a polypeptide comprising the nucleic acid, preferably the coding region thereof, or polypeptide or the consensus sequence or the polypeptide motif, as depicted in Table I, II or IV, application No. 13, column 5 or 8 in the respective same line as the nucleic acid molecule SEQ ID NO. 130491 or polypeptide SEQ ID NO. 130492, respectively, or a homolog or a fragment thereof, is increased or generated, or if the activity thioredoxin is increased or generated in a non-human organism, like a microorganism or a plant cell, plant or part thereof, especially with non-targeted localization, whereby the respective line disclose in column 7 the fine chemical cryptoxanthin. For example, an increase of the cryptoxanthin of at least 1 percent, particularly in a range of 36 to 59-percent is conferred as compared to a corresponding non-transformed wild type non-human organism.

[65196] Accordingly, in one embodiment, an increase of zeaxanthin in a non-human organism, as compared to a corresponding non-transformed wild type non-human organism, is conferred in the process of the invention, if the activity of a polypeptide showing the activity of a F-box protein, or if the activity of the polypeptide At3g16820, preferably represented by SEQ ID NO. 120953, or a homolog or fragment thereof, or if the activity of a polypeptide encoded by a nucleic acid molecule comprising the nucleic acid SEQ ID NO. 120952, preferably the coding region thereof, or a homolog or fragment thereof, e.g. derived from Arabidopsis thaliana, is increased or generated. For example the activity of a nucleic acid molecule or a polypeptide comprising the nucleic acid, preferably the coding region thereof, or polypeptide or the consensus sequence or the polypeptide motif, as depicted in Table I, II or IV, application No. 13, column 5 or 8 in the respective same line as the nucleic acid molecule SEQ ID NO. 120952 or polypeptide SEQ ID NO. 120953, respectively, or a homolog or a fragment thereof, is increased or generated, or if the activity F-box protein is increased or generated in a non-human organism, like a microorganism or a plant cell, plant or part thereof, especially with non-targeted localization, whereby the respective line disclose in column 7 the fine chemical zeaxanthin. For example, an increase of the zeaxanthin of at least 1 percent, particularly in a range of 24 to 36-percent is conferred as compared to a corresponding non-transformed wild type non-human organism.

[65197] Accordingly, in one embodiment, an increase of zeaxanthin in a non-human organism, as compared to a corresponding non-transformed wild type non-human organism, is conferred in the process of the invention, if the activity of a polypeptide showing the activity of a monthiol glutaredoxin, or if the activity of the polypeptide At3g62930, preferably represented by SEQ ID NO. 2574, or a homolog or fragment thereof, or if the activity of a polypeptide encoded by a nucleic acid molecule comprising the nucleic acid SEQ ID NO. 2573, preferably the coding region thereof, or a homolog or fragment thereof, e.g. derived from Arabidopsis thaliana, is increased or generated. For example the activity of a nucleic acid molecule or a polypeptide comprising the nucleic acid, preferably the coding region thereof, or polypeptide or the consensus sequence or the polypeptide motif, as depicted in Table I, II or IV, application No. 13, column 5 or 8 in the respective same line as the nucleic acid molecule SEQ ID NO. 2573 or polypeptide SEQ ID NO. 2574, respectively, or a homolog or a fragment thereof, is increased or generated, or if the activity monthiol glutaredoxin is increased or generated in a non-human organism, like a microorganism or a plant cell, plant or part thereof, especially with non-targeted localization, whereby the respective line disclose in column 7 the fine chemical zeaxanthin. For example, an increase of the zeaxanthin of at least 1 percent, particularly in a range of 23 to 57-percent is conferred as compared to a corresponding non-transformed wild type non-human organism.

[65198] Accordingly, in one embodiment, an increase of zeaxanthin in a non-human organism, as compared to a corresponding non-transformed wild type non-human organism, is conferred in the process of the invention, if the activity of a polypeptide showing the activity of a monothiol glutaredoxin, or if the activity of the polypeptide At4g15660, preferably represented by SEQ ID NO. 23483, or a homolog or fragment thereof, or if the activity of a polypeptide encoded by a nucleic acid molecule comprising the nucleic acid SEQ ID NO. 23482, preferably the coding region thereof, or a homolog or fragment thereof, e.g. derived from Arabidopsis thaliana, is increased or generated. For example the activity of a nucleic acid molecule or a polypeptide comprising the nucleic acid, preferably the coding region thereof, or polypeptide or the consensus sequence or the polypeptide motif, as depicted in Table I, II or IV, application No. 13, column 5 or 8 in the respective same line as the nucleic acid molecule SEQ ID NO. 23482 or polypeptide SEQ ID NO. 23483, respectively, or a homolog or a fragment thereof, is increased or generated, or if the activity monothiol glutaredoxin is increased or generated in a non-human organism, like a microorganism or a plant cell, plant or part thereof, especially with non-targeted localization, whereby the respective line disclose in column 7 the fine chemical zeaxanthin. For example, an increase of the zeaxanthin of at least 1 percent, particularly in a range of 23 to 53-percent is conferred as compared to a corresponding non-transformed wild type non-human organism. Accordingly, in one embodiment, an increase of zeaxanthin in a non-human organism, as compared to a corresponding non-transformed wild type non-human organism, is conferred in the process of the invention, if the activity of a polypeptide showing the activity of a monothiol glutaredoxin, or if the activity of the polypeptide At4g15670, preferably represented by SEQ ID NO. 3280, or a homolog or fragment thereof, or if the activity of a polypeptide encoded by a nucleic acid molecule comprising the nucleic acid SEQ ID NO. 3279, preferably the coding region thereof, or a homolog or fragment thereof, e.g. derived from Arabidopsis thaliana, is increased or generated. For example the activity of a nucleic acid molecule or a polypeptide comprising the nucleic acid, preferably the coding region thereof, or polypeptide or the consensus sequence or the polypeptide motif, as depicted in Table I, II or IV, application No. 13, column 5 or 8 in the respective same line as the nucleic acid molecule SEQ ID NO. 3279 or polypeptide SEQ ID NO. 3280, respectively, or a homolog or a fragment thereof, is increased or generated, or if the activity monothiol glutaredoxin is increased or generated in a non-human organism, like a microorganism or a plant cell, plant or part thereof, especially with non-targeted localization, whereby the respective line disclose in column 7 the fine chemical zeaxanthin. For example, an increase of the zeaxanthin of at least 1 percent, particularly in a range of 26 to 60-percent is conferred as compared to a corresponding non-transformed wild type non-human organism.

[65199] Accordingly, in one embodiment, an increase of zeaxanthin in a non-human organism, as compared to a corresponding non-transformed wild type non-human organism, is conferred in the process of the invention, if the activity of a polypeptide showing the activity of a protein phosphatase, or if the activity of the polypeptide At4g26080, preferably represented by SEQ ID NO. 68850, or a homolog or fragment thereof, or if the activity of a polypeptide encoded by a nucleic acid molecule comprising the nucleic acid SEQ ID NO. 68849, preferably the coding region thereof, or a homolog or fragment thereof, e.g. derived from Arabidopsis thaliana, is increased or generated. For example the activity of a nucleic acid molecule or a polypeptide comprising the nucleic acid, preferably the coding region thereof, or polypeptide or the consensus sequence or the polypeptide motif, as depicted in Table I, II or IV, application No. 13, column 5 or 8 in the respective same line as the nucleic acid molecule SEQ ID NO. 68849 or polypeptide SEQ ID NO. 68850, respectively, or a homolog or a fragment thereof, is increased or generated, or if the activity protein phosphatase is increased or generated in a non-human organism, like a microorganism or a plant cell, plant or part thereof, especially with non-targeted localization, whereby the respective line disclose in column 7 the fine chemical zeaxanthin. For example, an increase of the zeaxanthin of at least 1 percent, particularly in a range of 23 to 41-percent is conferred as compared to a corresponding non-transformed wild type non-human organism. Accordingly, in one embodiment, an increase of cryptoxanthin in a non-human organism, as compared to a corresponding non-transformed wild type non-human organism, is conferred in the process of the invention, if the activity of a polypeptide showing the activity of a glutaredoxin, or if the activity of the polypeptide At4g33040, preferably represented by SEQ ID NO. 4103, or a homolog or fragment thereof, or if the activity of a polypeptide encoded by a nucleic acid molecule comprising the nucleic acid SEQ ID NO. 4102, preferably the coding region thereof, or a homolog or fragment thereof, e.g. derived from Arabidopsis thaliana, is increased or generated. For example the activity of a nucleic acid molecule or a polypeptide comprising the nucleic acid, preferably the coding region thereof, or polypeptide or the consensus sequence or the polypeptide motif, as depicted in Table I, II or IV, application No. 13, column 5 or 8 in the respective same line as the nucleic acid molecule SEQ ID NO. 4102 or polypeptide SEQ ID NO. 4103, respectively, or a homolog or a fragment thereof, is increased or generated, or if the activity glutaredoxin is increased or generated in a non-human organism, like a microorganism organism or a plant cell, plant or part thereof, especially with non-targeted localization, whereby the respective line disclose in column 7 the fine chemical cryptoxanthin. For example, an increase of the cryptoxanthin of at least 1 percent, particularly in a range of 32 to 64-percent is conferred as compared to a corresponding non-transformed wild type non-human organism.

[65200] Accordingly, in one embodiment, an increase of zeaxanthin in a non-human organism, as compared to a corresponding non-transformed wild type non-human organism, is conferred in the process of the invention, if the activity of a polypeptide showing the activity of a MADS-box transcription factor, or if the activity of the polypeptide At5g60440, preferably represented by SEQ ID NO. 102900, or a homolog or fragment thereof, or if the activity of a polypeptide encoded by a nucleic acid molecule comprising the nucleic acid SEQ ID NO. 102899, preferably the coding region thereof, or a homolog or fragment thereof, e.g. derived from Arabidopsis thaliana, is increased or generated. For example the activity of a nucleic acid molecule or a polypeptide comprising the nucleic acid, preferably the coding region thereof, or polypeptide or the consensus sequence or the polypeptide motif, as depicted in Table I, II or IV, application No. 13, column 5 or 8 in the respective same line as the nucleic acid molecule SEQ ID NO. 102899 or polypeptide SEQ ID NO. 102900, respectively, or a homolog or a fragment thereof, is increased or generated, or if the activity MADS-box transcription factor is increased or generated in a non-human organism, like a microorganism or a plant cell, plant or part thereof, especially with non-targeted localization, whereby the respective line disclose in column 7 the fine chemical zeaxanthin. For example, an increase of the zeaxanthin of at least 1 percent, particularly in a range of 25 to 46-percent is conferred as compared to a corresponding non-transformed wild type non-human organism.

[65201] Accordingly, in one embodiment, an increase of zeaxanthin in a non-human organism, as compared to a corresponding non-transformed wild type non-human organism, is conferred in the process of the invention, if the activity of a polypeptide showing the activity of a isopropylmalate isomerase large subunit, or if the activity of the polypeptide AvinDRAFT_{—}4847, preferably represented by SEQ ID NO. 102942, or a homolog or fragment thereof, or if the activity of a polypeptide encoded by a nucleic acid molecule comprising the nucleic acid SEQ ID NO. 102941, preferably the coding region thereof, or a homolog or fragment thereof, e.g. derived from Azotobacter vinelandii, is increased or generated. For example the activity of a nucleic acid molecule or a polypeptide comprising the nucleic acid, preferably the coding region thereof, or polypeptide or the consensus sequence or the polypeptide motif, as depicted in Table I, II or IV, application No. 13, column 5 or 8 in the respective same line as the nucleic acid molecule SEQ ID NO. 102941 or polypeptide SEQ ID NO. 102942, respectively, or a homolog or a fragment thereof, is increased or generated, or if the activity isopropylmalate isomerase large subunit is increased or generated in a non-human organism, like a microorganism or a plant cell, plant or part thereof, especially with non-targeted localization, whereby the respective line disclose in column 7 the fine chemical zeaxanthin. For example, an increase of the zeaxanthin of at least 1 percent, particularly in a range of 36 to 46-percent is conferred as compared to a corresponding non-transformed wild type non-human organism.

[65202] Accordingly, in one embodiment, an increase of cryptoxanthin in a non-human organism, as compared to a corresponding non-transformed wild type non-human organism, is conferred in the process of the invention, if the activity of a polypeptide showing the activity of a AX653549-protein, or if the activity of the polypeptide AX653549, preferably represented by SEQ ID NO. 34302, or a homolog or fragment thereof, or if the activity of a polypeptide encoded by a nucleic acid molecule comprising the nucleic acid SEQ ID NO. 34301, preferably the coding region thereof, or a homolog or fragment thereof, e.g. derived from Oryza sativa, is increased or generated. For example the activity of a nucleic acid molecule or a polypeptide comprising the nucleic acid, preferably the coding region thereof, or polypeptide or the consensus sequence or the polypeptide motif, as depicted in Table I, II or IV, application No. 13, column 5 or 8 in the respective same line as the nucleic acid molecule SEQ ID NO. 34301 or polypeptide SEQ ID NO. 34302, respectively, or a homolog or a fragment thereof, is increased or generated, or if the activity AX653549-protein is increased or generated in a non-human organism, like a microorganism or a plant cell, plant or part thereof, especially with non-targeted localization, whereby the respective line disclose in column 7 the fine chemical cryptoxanthin. For example, an increase of the cryptoxanthin of at least 1 percent, particularly in a range of 34 to 52-percent is conferred as compared to a corresponding non-transformed wild type non-human organism.

[65203] Accordingly, in one embodiment, an increase of zeaxanthin in a non-human organism, as compared to a corresponding non-transformed wild type non-human organism, is conferred in the process of the invention, if the activity of a polypeptide showing the activity of a b1003-protein, or if the activity of the polypeptide B1003, preferably represented by SEQ ID NO. 7942, or a homolog or fragment thereof, or if the activity of a polypeptide encoded by a nucleic acid molecule comprising the nucleic acid SEQ ID NO. 7941, preferably the coding region thereof, or a homolog or fragment thereof, e.g. derived from Escherichia coli, is increased or generated. For example the activity of a nucleic acid molecule or a polypeptide comprising the nucleic acid, preferably the coding region thereof, or polypeptide or the consensus sequence or the polypeptide motif, as depicted in Table I, II or IV, application No. 13, column 5 or 8 in the respective same line as the nucleic acid molecule SEQ ID NO. 7941 or polypeptide SEQ ID NO. 7942, respectively, or a homolog or a fragment thereof, is increased or generated, or if the activity b1003-protein is increased or generated in a non-human organism, like a microorganism or a plant cell, plant or part thereof, especially with non-targeted localization, whereby the respective line disclose in column 7 the fine chemical zeaxanthin. For example, an increase of the zeaxanthin of at least 1 percent, particularly in a range of 26 to 51-percent is conferred as compared to a corresponding non-transformed wild type non-human organism.

[65204] Accordingly, in one embodiment, an increase of zeaxanthin in a non-human organism, as compared to a corresponding non-transformed wild type non-human organism, is conferred in the process of the invention, if the activity of a polypeptide showing the activity of a lipoprotein precursor, or if the activity of the polypeptide B1023, preferably represented by SEQ ID NO. 36881, or a homolog or fragment thereof, or if the activity of a polypeptide encoded by a nucleic acid molecule comprising the nucleic acid SEQ ID NO. 36880, preferably the coding region thereof, or a homolog or fragment thereof, e.g. derived from Escherichia coli, is increased or generated. For example the activity of a nucleic acid molecule or a polypeptide comprising the nucleic acid, preferably the coding region thereof, or polypeptide or the consensus sequence or the polypeptide motif, as depicted in Table I, II or IV, application No. 13, column 5 or 8 in the respective same line as the nucleic acid molecule SEQ ID NO. 36880 or polypeptide SEQ ID NO. 36881, respectively, or a homolog or a fragment thereof, is increased or generated, or if the activity lipoprotein precursor is increased or generated in a non-human organism, like a microorganism or a plant cell, plant or part thereof, especially with non-targeted localization, whereby the respective line disclose in column 7 the fine chemical zeaxanthin. For example, an increase of the zeaxanthin of at least 1 percent, particularly in a range of 27 to 46-percent is conferred as compared to a corresponding non-transformed wild type non-human organism.

[65205] Accordingly, in one embodiment, an increase of zeaxanthin in a non-human organism, as compared to a corresponding non-transformed wild type non-human organism, is conferred in the process of the invention, if the activity of a polypeptide showing the activity of a serine/threonine-protein phosphatase, or if the activity of the polypeptide B1838, preferably represented by SEQ ID NO. 8317, or a homolog or fragment thereof, or if the activity of a polypeptide encoded by a nucleic acid molecule comprising the nucleic acid SEQ ID NO. 8316, preferably the coding region thereof, or a homolog or fragment thereof, e.g. derived from Escherichia coli, is increased or generated. For example the activity of a nucleic acid molecule or a polypeptide comprising the nucleic acid, preferably the coding region thereof, or polypeptide or the consensus sequence or the polypeptide motif, as depicted in Table I, II or IV, application No. 13, column 5 or 8 in the respective same line as the nucleic acid molecule SEQ ID NO. 8316 or polypeptide SEQ ID NO. 8317, respectively, or a homolog or a fragment thereof, is increased or generated, or if the activity serine/threonine-protein phosphatase is increased or generated in a non-human organism, like a microorganism or a plant cell, plant or part thereof, especially with non-targeted localization, whereby the respective line disclose in column 7 the fine chemical zeaxanthin. For example, an increase of the zeaxanthin of at least 1 percent, particularly in a range of 23 to 47-percent is conferred as compared to a corresponding non-transformed wild type non-human organism.

[65206] Accordingly, in one embodiment, an increase of zeaxanthin in a non-human organism, as compared to a corresponding non-transformed wild type non-human organism, is conferred in the process of the invention, if the activity of a polypeptide showing the activity of a b2032-protein, or if the activity of the polypeptide B2032, preferably represented by SEQ ID NO. 8921, or a homolog or fragment thereof, or if the activity of a polypeptide encoded by a nucleic acid molecule comprising the nucleic acid SEQ ID NO. 8920, preferably the coding region thereof, or a homolog or fragment thereof, e.g. derived from Escherichia coli, is increased or generated. For example the activity of a nucleic acid molecule or a polypeptide comprising the nucleic acid, preferably the coding region thereof, or polypeptide or the consensus sequence or the polypeptide motif, as depicted in Table I, II or IV, application No. 13, column 5 or 8 in the respective same line as the nucleic acid molecule SEQ ID NO. 8920 or polypeptide SEQ ID NO. 8921, respectively, or a homolog or a fragment thereof, is increased or generated, or if the activity b2032-protein is increased or generated in a non-human organism, like a microorganism or a plant cell, plant or part thereof, especially with non-targeted localization, whereby the respective line disclose in column 7 the fine chemical zeaxanthin. For example, an increase of the zeaxanthin of at least 1 percent, particularly in a range of 27 to 59-percent is conferred as compared to a corresponding non-transformed wild type non-human organism.

[65207] Accordingly, in one embodiment, an increase of cryptoxanthin in a non-human organism, as compared to a corresponding non-transformed wild type non-human organism, is conferred in the process of the invention, if the activity of a polypeptide showing the activity of a b2099-protein, or if the activity of the polypeptide B2099, preferably represented by SEQ ID NO. 115596, or a homolog or fragment thereof, or if the activity of a polypeptide encoded by a nucleic acid molecule comprising the nucleic acid SEQ ID NO. 115595, preferably the coding region thereof, or a homolog or fragment thereof, e.g. derived from Escherichia coli, is increased or generated. For example the activity of a nucleic acid molecule or a polypeptide comprising the nucleic acid, preferably the coding region thereof, or polypeptide or the consensus sequence or the polypeptide motif, as depicted in Table I, II or IV, application No. 13, column 5 or 8 in the respective same line as the nucleic acid molecule SEQ ID NO. 115595 or polypeptide SEQ ID NO. 115596, respectively, or a homolog or a fragment thereof, is increased or generated, or if the activity b2099-protein is increased or generated in a non-human organism, like a microorganism or a plant cell, plant or part thereof, especially with non-targeted localization, whereby the respective line disclose in column 7 the fine chemical cryptoxanthin. For example, an increase of the cryptoxanthin of at least 1 percent, particularly in a range of 32 to 53-percent is conferred as compared to a corresponding non-transformed wild type non-human organism.

[65208] Accordingly, in one embodiment, an increase of zeaxanthin in a non-human organism, as compared to a corresponding non-transformed wild type non-human organism, is conferred in the process of the invention, if the activity of a polypeptide showing the activity of a b2121-protein, or if the activity of the polypeptide B2121, preferably represented by SEQ ID NO. 39014, or a homolog or fragment thereof, or if the activity of a polypeptide encoded by a nucleic acid molecule comprising the nucleic acid SEQ ID NO. 39013, preferably the coding region thereof, or a homolog or fragment thereof, e.g. derived from Escherichia coli, is increased or generated. For example the activity of a nucleic acid molecule or a polypeptide comprising the nucleic acid, preferably the coding region thereof, or polypeptide or the consensus sequence or the polypeptide motif, as depicted in Table I, II or IV, application No. 13, column 5 or 8 in the respective same line as the nucleic acid molecule SEQ ID NO. 39013 or polypeptide SEQ ID NO. 39014, respectively, or a homolog or a fragment thereof, is increased or generated, or if the activity b2121-protein is increased or generated in a non-human organism, like a microorganism or a plant cell, plant or part thereof, especially with non-targeted localization, whereby the respective line disclose in column 7 the fine chemical zeaxanthin. For example, an increase of the zeaxanthin of at least 1 percent, particularly in a range of 37 to 40-percent is conferred as compared to a corresponding non-transformed wild type non-human organism.

[65209] Accordingly, in one embodiment, an increase of zeaxanthin in a non-human organism, as compared to a corresponding non-transformed wild type non-human organism, is conferred in the process of the invention, if the activity of a polypeptide showing the activity of a b2474-protein, or if the activity of the polypeptide B2474, preferably represented by SEQ ID NO. 40330, or a homolog or fragment thereof, or if the activity of a polypeptide encoded by a nucleic acid molecule comprising the nucleic acid SEQ ID NO. 40329, preferably the coding region thereof, or a homolog or fragment thereof, e.g. derived from Escherichia coli, is increased or generated. For example the activity of a nucleic acid molecule or a polypeptide comprising the nucleic acid, preferably the coding region thereof, or polypeptide or the consensus sequence or the polypeptide motif, as depicted in Table I, II or IV, application No. 13, column 5 or 8 in the respective same line as the nucleic acid molecule SEQ ID NO. 40329 or polypeptide SEQ ID NO. 40330, respectively, or a homolog or a fragment thereof, is increased or generated, or if the activity b2474-protein is increased or generated in a non-human organism, like a microorganism or a plant cell, plant or part thereof, especially with non-targeted localization, whereby the respective line disclose in column 7 the fine chemical zeaxanthin. For example, an increase of the zeaxanthin of at least 1 percent, particularly in a range of 22 to 42-percent is conferred as compared to a corresponding non-transformed wild type non-human organism.

[65210] Accordingly, in one embodiment, an increase of zeaxanthin in a non-human organism, as compared to a corresponding non-transformed wild type non-human organism, is conferred in the process of the invention, if the activity of a polypeptide showing the activity of a transcriptional regulator, or if the activity of the polypeptide B2714, preferably represented by SEQ ID NO. 40742, or a homolog or fragment thereof, or if the activity of a polypeptide encoded by a nucleic acid molecule comprising the nucleic acid SEQ ID NO. 40741, preferably the coding region thereof, or a homolog or fragment thereof, e.g. derived from Escherichia coli, is increased or generated. For example the activity of a nucleic acid molecule or a polypeptide comprising the nucleic acid, preferably the coding region thereof, or polypeptide or the consensus sequence or the polypeptide motif, as depicted in Table I, II or IV, application No. 13, column 5 or 8 in the respective same line as the nucleic acid molecule SEQ ID NO. 40741 or polypeptide SEQ ID NO. 40742, respectively, or a homolog or a fragment thereof, is increased or generated, or if the activity transcriptional regulator is increased or generated in a non-human organism, like a microorganism or a plant cell, plant or part thereof, especially with non-targeted localization, whereby the respective line disclose in column 7 the fine chemical zeaxanthin. For example, an increase of the zeaxanthin of at least 1 percent, particularly in a range of 23 to 38-percent is conferred as compared to a corresponding non-transformed wild type non-human organism.

[65211] Accordingly, in one embodiment, an increase of cryptoxanthin in a non-human organism, as compared to a corresponding non-transformed wild type non-human organism, is conferred in the process of the invention, if the activity of a polypeptide showing the activity of a flavodoxin, or if the activity of the polypeptide B2790, preferably represented by SEQ ID NO. 115720, or a homolog or fragment thereof, or if the activity of a polypeptide encoded by a nucleic acid molecule comprising the nucleic acid SEQ ID NO. 115719, preferably the coding region thereof, or a homolog or fragment thereof, e.g. derived from Escherichia coli, is increased or generated. For example the activity of a nucleic acid molecule or a polypeptide comprising the nucleic acid, preferably the coding region thereof, or polypeptide or the consensus sequence or the polypeptide motif, as depicted in Table I, II or IV, application No. 13, column 5 or 8 in the respective same line as the nucleic acid molecule SEQ ID NO. 115719 or polypeptide SEQ ID NO. 115720, respectively, or a homolog or a fragment thereof, is increased or generated, or if the activity flavodoxin is increased or generated in a non-human organism, like a microorganism or a plant cell, plant or part thereof, especially with non-targeted localization, whereby the respective line disclose in column 7 the fine chemical cryptoxanthin. For example, an increase of the cryptoxanthin of at least 1 percent, particularly in a range of 29 to 43-percent is conferred as compared to a corresponding non-transformed wild type non-human organism.

[65212] Accordingly, in one embodiment, an increase of violaxanthin in a non-human organism, as compared to a corresponding non-transformed wild type non-human organism, is conferred in the process of the invention, if the activity of a polypeptide showing the activity of a ribosephosphate isomerase, constitutive, or if the activity of the polypeptide B2914, preferably represented by SEQ ID NO. 41074, or a homolog or fragment thereof, or if the activity of a polypeptide encoded by a nucleic acid molecule comprising the nucleic acid SEQ ID NO. 41073, preferably the coding region thereof, or a homolog or fragment thereof, e.g. derived from Escherichia coli, is increased or generated. For example the activity of a nucleic acid molecule or a polypeptide comprising the nucleic acid, preferably the coding region thereof, or polypeptide or the consensus sequence or the polypeptide motif, as depicted in Table I, II or IV, application No. 13, column 5 or 8 in the respective same line as the nucleic acid molecule SEQ ID NO. 41073 or polypeptide SEQ ID NO. 41074, respectively, or a homolog or a fragment thereof, is increased or generated, or if the activity ribosephosphate isomerase, constitutive is increased or generated in a non-human organism, like a microorganism or a plant cell, plant or part thereof, especially with non-targeted localization, whereby the respective line disclose in column 7 the fine chemical violaxanthin. For example, an increase of the violaxanthin of at least 1 percent, particularly in a range of 50 to 220-percent is conferred as compared to a corresponding non-transformed wild type non-human organism.

[65213] Accordingly, in one embodiment, an increase of violaxanthin in a non-human organism, as compared to a corresponding non-transformed wild type non-human organism, is conferred in the process of the invention, if the activity of a polypeptide showing the activity of a acetyl CoA carboxylase, or if the activity of the polypeptide B3256, preferably represented by SEQ ID NO. 9493, or a homolog or fragment thereof, or if the activity of a polypeptide encoded by a nucleic acid molecule comprising the nucleic acid SEQ ID NO. 9492, preferably the coding region thereof, or a homolog or fragment thereof, e.g. derived from Escherichia coli, is increased or generated. For example the activity of a nucleic acid molecule or a polypeptide comprising the nucleic acid, preferably the coding region thereof, or polypeptide or the consensus sequence or the polypeptide motif, as depicted in Table I, II or IV, application No. 13, column 5 or 8 in the respective same line as the nucleic acid molecule SEQ ID NO. 9492 or polypeptide SEQ ID NO. 9493, respectively, or a homolog or a fragment thereof, is increased or generated, or if the activity acetyl CoA carboxylase is increased or generated in a non-human organism, like a microorganism or a plant cell, plant or part thereof, especially with non-targeted localization, whereby the respective line disclose in column 7 the fine chemical violaxanthin. For example, an increase of the violaxanthin of at least 1 percent, particularly in a range of 36 to 220-percent is conferred as compared to a corresponding non-transformed wild type non-human organism.

[65214] Accordingly, in one embodiment, an increase of cryptoxanthin in a non-human organism, as compared to a corresponding non-transformed wild type non-human organism, is conferred in the process of the invention, if the activity of a polypeptide showing the activity of a b3346-protein, or if the activity of the polypeptide B3346, preferably represented by SEQ ID NO. 10105, or a homolog or fragment thereof, or if the activity of a polypeptide encoded by a nucleic acid molecule comprising the nucleic acid SEQ ID NO. 10104, preferably the coding region thereof, or a homolog or fragment thereof, e.g. derived from Escherichia coli, is increased or generated. For example the activity of a nucleic acid molecule or a polypeptide comprising the nucleic acid, preferably the coding region thereof, or polypeptide or the consensus sequence or the polypeptide motif, as depicted in Table I, II or IV, application No. 13, column 5 or 8 in the respective same line as the nucleic acid molecule SEQ ID NO. 10104 or polypeptide SEQ ID NO. 10105, respectively, or a homolog or a fragment thereof, is increased or generated, or if the activity b3346-protein is increased or generated in a non-human organism, like a microorganism or a plant cell, plant or part thereof, especially with non-targeted localization, whereby the respective line disclose in column 7 the fine chemical cryptoxanthin. For example, an increase of the cryptoxanthin of at least 1 percent, particularly in a range of 47 to 60-percent is conferred as compared to a corresponding non-transformed wild type non-human organism.

[65215] Accordingly, in one embodiment, an increase of violaxanthin in a non-human organism, as compared to a corresponding non-transformed wild type non-human organism, is conferred in the process of the invention, if the activity of a polypeptide showing the activity of a ketol-acid reductoisomerase, or if the activity of the polypeptide B3774, preferably represented by SEQ ID NO. 94387, or a homolog or fragment thereof, or if the activity of a polypeptide encoded by a nucleic acid molecule comprising the nucleic acid SEQ ID NO. 94386, preferably the coding region thereof, or a homolog or fragment thereof, e.g. derived from Escherichia coli, is increased or generated. For example the activity of a nucleic acid molecule or a polypeptide comprising the nucleic acid, preferably the coding region thereof, or polypeptide or the consensus sequence or the polypeptide motif, as depicted in Table I, II or IV, application No. 13, column 5 or 8 in the respective same line as the nucleic acid molecule SEQ ID NO. 94386 or polypeptide SEQ ID NO. 94387, respectively, or a homolog or a fragment thereof, is increased or generated, or if the activity ketol-acid reductoisomerase is increased or generated in a non-human organism , like a microorganism or a plant cell, plant or part thereof, especially with non-targeted localization, whereby the respective line disclose in column 7 the fine chemical violaxanthin. For example, an increase of the violaxanthin of at least 1 percent, particularly in a range of 35 to 232-percent is conferred as compared to a corresponding non-transformed wild type non-human organism.

[65216] Accordingly, in one embodiment, an increase of cryptoxanthin in a non-human organism, as compared to a corresponding non-transformed wild type non-human organism, is conferred in the process of the invention, if the activity of a polypeptide showing the activity of a b3817-protein, or if the activity of the polypeptide B3817, preferably represented by SEQ ID NO. 10709, or a homolog or fragment thereof, or if the activity of a polypeptide encoded by a nucleic acid molecule comprising the nucleic acid SEQ ID NO. 10708, preferably the coding region thereof, or a homolog or fragment thereof, e.g. derived from Escherichia coli, is increased or generated. For example the activity of a nucleic acid molecule or a polypeptide comprising the nucleic acid, preferably the coding region thereof, or polypeptide or the consensus sequence or the polypeptide motif, as depicted in Table I, II or IV, application No. 13, column 5 or 8 in the respective same line as the nucleic acid molecule SEQ ID NO. 10708 or polypeptide SEQ ID NO. 10709, respectively, or a homolog or a fragment thereof, is increased or generated, or if the activity b3817-protein is increased or generated in a non-human organism, like a microorganism or a plant cell, plant or part thereof, especially with non-targeted localization, whereby the respective line disclose in column 7 the fine chemical cryptoxanthin. For example, an increase of the cryptoxanthin of at least 1 percent, particularly in a range of 34 to 66-percent is conferred as compared to a corresponding non-transformed wild type non-human organism.

[65217] Accordingly, in one embodiment, an increase of violaxanthin in a non-human organism, as compared to a corresponding non-transformed wild type non-human organism, is conferred in the process of the invention, if the activity of a polypeptide showing the activity of a superoxide dismutase, or if the activity of the polypeptide B3908, preferably represented by SEQ ID NO. 105660, or a homolog or fragment thereof, or if the activity of a polypeptide encoded by a nucleic acid molecule comprising the nucleic acid SEQ ID NO. 105659, preferably the coding region thereof, or a homolog or fragment thereof, e.g. derived from Escherichia coli, is increased or generated. For example the activity of a nucleic acid molecule or a polypeptide comprising the nucleic acid, preferably the coding region thereof, or polypeptide or the consensus sequence or the polypeptide motif, as depicted in Table I, II or IV, application No. 13, column 5 or 8 in the respective same line as the nucleic acid molecule SEQ ID NO. 105659 or polypeptide SEQ ID NO. 105660, respectively, or a homolog or a fragment thereof, is increased or generated, or if the activity superoxide dismutase is increased or generated in a non-human organism, like a microorganism or a plant cell, plant or part thereof, especially with plastidic localization, whereby the respective line disclose in column 7 the fine chemical violaxanthin. For example, an increase of the violaxanthin of at least 1 percent, particularly in a range of 47 to 66-percent is conferred as compared to a corresponding non-transformed wild type non-human organism.

[65218] Accordingly, in one embodiment, an increase of violaxanthin in a non-human organism, as compared to a corresponding non-transformed wild type non-human organism, is conferred in the process of the invention, if the activity of a polypeptide showing the activity of a acetyltransferase, or if the activity of the polypeptide B4012, preferably represented by SEQ ID NO. 44379, or a homolog or fragment thereof, or if the activity of a polypeptide encoded by a nucleic acid molecule comprising the nucleic acid SEQ ID NO. 44378, preferably the coding region thereof, or a homolog or fragment thereof, e.g. derived from Escherichia coli, is increased or generated.

[65219] For example the activity of a nucleic acid molecule or a polypeptide comprising the nucleic acid, preferably the coding region thereof, or polypeptide or the consensus sequence or the polypeptide motif, as depicted in Table I, II or IV, application No. 13, column 5 or 8 in the respective same line as the nucleic acid molecule SEQ ID NO. 44378 or polypeptide SEQ ID NO. 44379, respectively, or a homolog or a fragment thereof, is increased or generated, or if the activity acetyltransferase is increased or generated in a non-human organism, like a microorganism or a plant cell, plant or part thereof, especially with non-targeted localization, whereby the respective line disclose in column 7 the fine chemical violaxanthin. For example, an increase of the violaxanthin of at least 1 percent, particularly in a range of 39 to 118-percent is conferred as compared to a corresponding non-transformed wild type non-human organism.

[65220] Accordingly, in one embodiment, an increase of cryptoxanthin in a non-human organism, as compared to a corresponding non-transformed wild type non-human organism, is conferred in the process of the invention, if the activity of a polypeptide showing the activity of a melibiose carrier protein, or if the activity of the polypeptide B4120, preferably represented by SEQ ID NO. 130674, or a homolog or fragment thereof, or if the activity of a polypeptide encoded by a nucleic acid molecule comprising the nucleic acid SEQ ID NO. 130673, preferably the coding region thereof, or a homolog or fragment thereof, e.g. derived from Escherichia coli, is increased or generated. For example the activity of a nucleic acid molecule or a polypeptide comprising the nucleic acid, preferably the coding region thereof, or polypeptide or the consensus sequence or the polypeptide motif, as depicted in Table I, II or IV, application No. 13, column 5 or 8 in the respective same line as the nucleic acid molecule SEQ ID NO. 130673 or polypeptide SEQ ID NO. 130674, respectively, or a homolog or a fragment thereof, is increased or generated, or if the activity melibiose carrier protein is increased or generated in a non-human organism, like a microorganism or a plant cell, plant or part thereof, especially with non-targeted localization, whereby the respective line disclose in column 7 the fine chemical cryptoxanthin. For example, an increase of the cryptoxanthin of at least 1 percent, particularly in a range of 37 to 74-percent is conferred as compared to a corresponding non-transformed wild type non-human organism.

[65221] Accordingly, in one embodiment, an increase of zeaxanthin in a non-human organism, as compared to a corresponding non-transformed wild type non-human organism, is conferred in the process of the invention, if the activity of a polypeptide showing the activity of a melibiose carrier protein, or if the activity of the polypeptide B4120, preferably represented by SEQ ID NO. 130674, or a homolog or fragment thereof, or if the activity of a polypeptide encoded by a nucleic acid molecule comprising the nucleic acid SEQ ID NO. 130673, preferably the coding region thereof, or a homolog or fragment thereof, e.g. derived from Escherichia coli, is increased or generated. For example the activity of a nucleic acid molecule or a polypeptide comprising the nucleic acid, preferably the coding region thereof, or polypeptide or the consensus sequence or the polypeptide motif, as depicted in Table I, II or IV, application No. 13, column 5 or 8 in the respective same line as the nucleic acid molecule SEQ ID NO. 130673 or polypeptide SEQ ID NO. 130674, respectively, or a homolog or a fragment thereof, is increased or generated, or if the activity melibiose carrier protein is increased or generated in a non-human organism, like a microorganism or a plant cell, plant or part thereof, especially with non-targeted localization, whereby the respective line disclose in column 7 the fine chemical zeaxanthin. For example, an increase of the zeaxanthin of at least 1 percent, particularly in a range of 25 to 30-percent is conferred as compared to a corresponding non-transformed wild type non-human organism.

[65222] Accordingly, in one embodiment, an increase of violaxanthin in a non-human organism, as compared to a corresponding non-transformed wild type non-human organism, is conferred in the process of the invention, if the activity of a polypeptide showing the activity of a purinenucleoside phosphorylase, or if the activity of the polypeptide B4384, preferably represented by SEQ ID NO. 45557, or a homolog or fragment thereof, or if the activity of a polypeptide encoded by a nucleic acid molecule comprising the nucleic acid SEQ ID NO. 45556, preferably the coding region thereof, or a homolog or fragment thereof, e.g. derived from Escherichia coli, is increased or generated. For example the activity of a nucleic acid molecule or a polypeptide comprising the nucleic acid, preferably the coding region thereof, or polypeptide or the consensus sequence or the polypeptide motif, as depicted in Table I, II or IV, application No. 13, column 5 or 8 in the respective same line as the nucleic acid molecule SEQ ID NO. 45556 or polypeptide SEQ ID NO. 45557, respectively, or a homolog or a fragment thereof, is increased or generated, or if the activity purine-nucleoside phosphorylase is increased or generated in a non-human organism, like a microorganism or a plant cell, plant or part thereof, especially with non-targeted localization, whereby the respective line disclose in column 7 the fine chemical violaxanthin. For example, an increase of the violaxanthin of at least 1 percent, particularly in a range of 92 to 324-percent is conferred as compared to a corresponding non-transformed wild type non-human organism.

[65223] Accordingly, in one embodiment, an increase of zeaxanthin in a non-human organism, as compared to a corresponding non-transformed wild type non-human organism, is conferred in the process of the invention, if the activity of a polypeptide showing the activity of a transcription factor, or if the activity of the polypeptide GM02LC19289, preferably represented by SEQ ID NO. 46752, or a homolog or fragment thereof, or if the activity of a polypeptide encoded by a nucleic acid molecule comprising the nucleic acid SEQ ID NO. 46751, preferably the coding region thereof, or a homolog or fragment thereof, e.g. derived from Glycine max, is increased or generated. For example the activity of a nucleic acid molecule or a polypeptide comprising the nucleic acid, preferably the coding region thereof, or polypeptide or the consensus sequence or the polypeptide motif, as depicted in Table I, II or IV, application No. 13, column 5 or 8 in the respective same line as the nucleic acid molecule SEQ ID NO. 46751 or polypeptide SEQ ID NO. 46752, respectively, or a homolog or a fragment thereof, is increased or generated, or if the activity transcription factor is increased or generated in a non-human organism, like a microorganism or a plant cell, plant or part thereof, especially with non-targeted localization, whereby the respective line disclose in column 7 the fine chemical zeaxanthin. For example, an increase of the zeaxanthin of at least 1 percent, particularly in a range of 33 to 36-percent is conferred as compared to a corresponding non-transformed wild type non-human organism.

[65224] Accordingly, in one embodiment, an increase of cryptoxanthin in a non-human organism, as compared to a corresponding non-transformed wild type non-human organism, is conferred in the process of the invention, if the activity of a polypeptide showing the activity of a coproporganism phyrinogen oxidase, or if the activity of the polypeptide Sll1185, preferably represented by SEQ ID NO. 53190, or a homolog or fragment thereof, or if the activity of a polypeptide encoded by a nucleic acid molecule comprising the nucleic acid SEQ ID NO. 53189, preferably the coding region thereof, or a homolog or fragment thereof, e.g. derived from Synechocystis sp., is increased or generated. For example the activity of a nucleic acid molecule or a polypeptide comprising the nucleic acid, preferably the coding region thereof, or polypeptide or the consensus sequence or the polypeptide motif, as depicted in Table I, II or IV, application No. 13, column 5 or 8 in the respective same line as the nucleic acid molecule SEQ ID NO. 53189 or polypeptide SEQ ID NO. 53190, respectively, or a homolog or a fragment thereof, is increased or generated, or if the activity coproporphyrinogen oxidase is increased or generated in a non-human organism, like a microorganism or a plant cell, plant or part thereof, especially with non-targeted localization, whereby the respective line disclose in column 7 the fine chemical cryptoxanthin. For example, an increase of the cryptoxanthin of at least 1 percent, particularly in a range of 35 to 47-percent is conferred as compared to a corresponding non-transformed wild type non-human organism.

[65225] Accordingly, in one embodiment, an increase of zeaxanthin in a non-human organism, as compared to a corresponding non-transformed wild type non-human organism, is conferred in the process of the invention, if the activity of a polypeptide showing the activity of a coproporphyrinogen oxidase, or if the activity of the polypeptide Sll1185, preferably represented by SEQ ID NO. 53190, or a homolog or fragment thereof, or if the activity of a polypeptide encoded by a nucleic acid molecule comprising the nucleic acid SEQ ID NO. 53189, preferably the coding region thereof, or a homolog or fragment thereof, e.g. derived from Synechocystis sp., is increased or generated. For example the activity of a nucleic acid molecule or a polypeptide comprising the nucleic acid, preferably the coding region thereof, or polypeptide or the consensus sequence or the polypeptide motif, as depicted in Table I, II or IV, application No. 13, column 5 or 8 in the respective same line as the nucleic acid molecule SEQ ID NO. 53189 or polypeptide SEQ ID NO. 53190, respectively, or a homolog or a fragment thereof, is increased or generated, or if the activity coproporphyrinogen oxidase is increased or generated in a non-human organism, like a microorganism or a plant cell, plant or part thereof, especially with non-targeted localization, whereby the respective line disclose in column 7 the fine chemical zeaxanthin. For example, an increase of the zeaxanthin of at least 1 percent, particularly in a range of 28 to 48-percent is conferred as compared to a corresponding non-transformed wild type non-human organism.

[65226] Accordingly, in one embodiment, an increase of zeaxanthin in a non-human organism, as compared to a corresponding non-transformed wild type non-human organism, is conferred in the process of the invention, if the activity of a polypeptide showing the activity of a glycerol-3-phosphate dehydrogenase, or if the activity of the polypeptide Slr1755, preferably represented by SEQ ID NO. 58824, or a homolog or fragment thereof, or if the activity of a polypeptide encoded by a nucleic acid molecule comprising the nucleic acid SEQ ID NO. 58823, preferably the coding region thereof, or a homolog or fragment thereof, e.g. derived from Synechocystis sp., is increased or generated. For example the activity of a nucleic acid molecule or a polypeptide comprising the nucleic acid, preferably the coding region thereof, or polypeptide or the consensus sequence or the polypeptide motif, as depicted in Table I, II or IV, application No. 13, column 5 or 8 in the respective same line as the nucleic acid molecule SEQ ID NO. 58823 or polypeptide SEQ ID NO. 58824, respectively, or a homolog or a fragment thereof, is increased or generated, or if the activity glycerol-3-phosphate dehydrogenase is increased or generated in a non-human organism, like a microorganism or a plant cell, plant or part thereof, especially with plastidic localization, whereby the respective line disclose in column 7 the fine chemical zeaxanthin. For example, an increase of the zeaxanthin of at least 1 percent, particularly in a range of 27 to 46-percent is conferred as compared to a corresponding non-transformed wild type non-human organism.

[65227] Accordingly, in one embodiment, an increase of cryptoxanthin in a non-human organism, as compared to a corresponding non-transformed wild type non-human organism, is conferred in the process of the invention, if the activity of a polypeptide showing the activity of a YCL026C-A-protein, or if the activity of the polypeptide Ycl026c-a, preferably represented by SEQ ID NO.

[65228] 63168, or a homolog or fragment thereof, or if the activity of a polypeptide encoded by a nucleic acid molecule comprising the nucleic acid SEQ ID NO. 63167, preferably the coding region thereof, or a homolog or fragment thereof, e.g. derived from Saccharomyces cerevisiae, is increased or generated. For example the activity of a nucleic acid molecule or a polypeptide comprising the nucleic acid, preferably the coding region thereof, or polypeptide or the consensus sequence or the polypeptide motif, as depicted in Table I, II or IV, application No. 13, column 5 or 8 in the respective same line as the nucleic acid molecule SEQ ID NO. 63167 or polypeptide SEQ ID NO. 63168, respectively, or a homolog or a fragment thereof, is increased or generated, or if the activity YCL026C-A-protein is increased or generated in a non-human organism, like a microorganism or a plant cell, plant or part thereof, especially with non-targeted localization, whereby the respective line disclose in column 7 the fine chemical cryptoxanthin. For example, an increase of the cryptoxanthin of at least 1 percent, particularly in a range of 32 to 79-percent is conferred as compared to a corresponding non-transformed wild type non-human organism.

[65229] Accordingly, in one embodiment, an increase of cryptoxanthin in a non-human organism, as compared to a corresponding non-transformed wild type non-human organism, is conferred in the process of the invention, if the activity of a polypeptide showing the activity of a F-box protein, or if the activity of the polypeptide Ydr131c, preferably represented by SEQ ID NO. 14707, or a homolog or fragment thereof, or if the activity of a polypeptide encoded by a nucleic acid molecule comprising the nucleic acid SEQ ID NO. 14706, preferably the coding region thereof, or a homolog or fragment thereof, e.g. derived from Saccharomyces cerevisiae, is increased or generated. For example the activity of a nucleic acid molecule or a polypeptide comprising the nucleic acid, preferably the coding region thereof, or polypeptide or the consensus sequence or the polypeptide motif, as depicted in Table I, II or IV, application No. 13, column 5 or 8 in the respective same line as the nucleic acid molecule SEQ ID NO. 14706 or polypeptide SEQ ID NO. 14707, respectively, or a homolog or a fragment thereof, is increased or generated, or if the activity F-box protein is increased or generated in a non-human organism, like a microorganism or a plant cell, plant or part thereof, especially with plastidic localization, whereby the respective line disclose in column 7 the fine chemical cryptoxanthin. For example, an increase of the cryptoxanthin of at least 1 percent, particularly in a range of 38 to 133-percent is conferred as compared to a corresponding non-transformed wild type non-human organism.

[65230] Accordingly, in one embodiment, an increase of cryptoxanthin in a non-human organism, as compared to a corresponding non-transformed wild type non-human organism, is conferred in the process of the invention, if the activity of a polypeptide showing the activity of a ygl096w-protein, or if the activity of the polypeptide Ygl096w, preferably represented by SEQ ID NO. 90279, or a homolog or fragment thereof, or if the activity of a polypeptide encoded by a nucleic acid molecule comprising the nucleic acid SEQ ID NO. 90278, preferably the coding region thereof, or a homolog or fragment thereof, e.g. derived from Saccharomyces cerevisiae, is increased or generated. For example the activity of a nucleic acid molecule or a polypeptide comprising the nucleic acid, preferably the coding region thereof, or polypeptide or the consensus sequence or the polypeptide motif, as depicted in Table 1, 11 or IV, application No. 13, column 5 or 8 in the respective same line as the nucleic acid molecule SEQ ID NO. 90278 or polypeptide SEQ ID NO. 90279, respectively, or a homolog or a fragment thereof, is increased or generated, or if the activity ygl096w-protein is increased or generated in a non-human organism, like a microorganism or a plant cell, plant or part thereof, especially with plastidic localization, whereby the respective line disclose in column 7 the fine chemical cryptoxanthin. For example, an increase of the cryptoxanthin of at least 1 percent, particularly in a range of 39 to 59-percent is conferred as compared to a corresponding non-transformed wild type non-human organism.

[65231] Accordingly, in one embodiment, an increase of cryptoxanthin in a non-human organism, as compared to a corresponding non-transformed wild type non-human organism, is conferred in the process of the invention, if the activity of a polypeptide showing the activity of a alcohol dehydrogenase, or if the activity of the polypeptide Ygl256w, preferably represented by SEQ ID NO. 130743, or a homolog or fragment thereof, or if the activity of a polypeptide encoded by a nucleic acid molecule comprising the nucleic acid SEQ ID NO. 130742, preferably the coding region thereof, or a homolog or fragment thereof, e.g. derived from Saccharomyces cerevisiae, is increased or generated. For example the activity of a nucleic acid molecule or a polypeptide comprising the nucleic acid, preferably the coding region thereof, or polypeptide or the consensus sequence or the polypeptide motif, as depicted in Table I, II or IV, application No. 13, column 5 or 8 in the respective same line as the nucleic acid molecule SEQ ID NO. 130742 or polypeptide SEQ ID NO. 130743, respectively, or a homolog or a fragment thereof, is increased or generated, or if the activity alcohol dehydrogenase is increased or generated in a non-human organism, like a microorganism or a plant cell, plant or part thereof, especially with plastidic localization, whereby the respective line disclose in column 7 the fine chemical cryptoxanthin. For example, an increase of the cryptoxanthin of at least 1 percent, particularly in a range of 35 to 57-percent is conferred as compared to a corresponding non-transformed wild type non-human organism.

[65232] Accordingly, in one embodiment, an increase of cryptoxanthin in a non-human organism, as compared to a corresponding non-transformed wild type non-human organism, is conferred in the process of the invention, if the activity of a polypeptide showing the activity of a halotolerance protein, or if the activity of the polypeptide Ykr072c, preferably represented by SEQ ID NO. 130904, or a homolog or fragment thereof, or if the activity of a polypeptide encoded by a nucleic acid molecule comprising the nucleic acid SEQ ID NO. 130903, preferably the coding region thereof, or a homolog or fragment thereof, e.g. derived from Saccharomyces cerevisiae, is increased or generated. For example the activity of a nucleic acid molecule or a polypeptide comprising the nucleic acid, preferably the coding region thereof, or polypeptide or the consensus sequence or the polypeptide motif, as depicted in Table I, II or IV, application No. 13, column 5 or 8 in the respective same line as the nucleic acid molecule SEQ ID NO. 130903 or polypeptide SEQ ID NO. 130904, respectively, or a homolog or a fragment thereof, is increased or generated, or if the activity halotolerance protein is increased or generated in a non-human organism, like a microorganism or a plant cell, plant or part thereof, especially with non-targeted localization, whereby the respective line disclose in column 7 the fine chemical cryptoxanthin. For example, an increase of the cryptoxanthin of at least 1 percent, particularly in a range of 50 to 76-percent is conferred as compared to a corresponding non-transformed wild type non-human organism.

[65233] Accordingly, in one embodiment, an increase of zeaxanthin in a non-human organism, as compared to a corresponding non-transformed wild type non-human organism, is conferred in the process of the invention, if the activity of a polypeptide showing the activity of a halotolerance protein, or if the activity of the polypeptide Ykr072c, preferably represented by SEQ ID NO. 130904, or a homolog or fragment thereof, or if the activity of a polypeptide encoded by a nucleic acid molecule comprising the nucleic acid SEQ ID NO. 130903, preferably the coding region thereof, or a homolog or fragment thereof, e.g. derived from Saccharomyces cerevisiae, is increased or generated. For example the activity of a nucleic acid molecule or a polypeptide comprising the nucleic acid, preferably the coding region thereof, or polypeptide or the consensus sequence or the polypeptide motif, as depicted in Table I, II or IV, application No. 13, column 5 or 8 in the respective same line as the nucleic acid molecule SEQ ID NO. 130903 or polypeptide SEQ ID NO. 130904, respectively, or a homolog or a fragment thereof, is increased or generated, or if the activity halotolerance protein is increased or generated in a non-human organism, like a microorganism or a plant cell, plant or part thereof, especially with non-targeted localization, whereby the respective line disclose in column 7 the fine chemical zeaxanthin. For example, an increase of the zeaxanthin of at least 1 percent, particularly in a range of 25 to 52-percent is conferred as compared to a corresponding non-transformed wild type non-human organism.

[65234] Accordingly, in one embodiment, an increase of zeaxanthin in a non-human organism, as compared to a corresponding non-transformed wild type non-human organism, is conferred in the process of the invention, if the activity of a polypeptide showing the activity of a N-acetylglucosaminylphosphatidylinositoldeacetylase, or if the activity of the polypeptide Ymr281w, preferably represented by SEQ ID NO. 130933, or a homolog or fragment thereof, or if the activity of a polypeptide encoded by a nucleic acid molecule comprising the nucleic acid SEQ ID NO. 130932, preferably the coding region thereof, or a homolog or fragment thereof, e.g. derived from Saccharomyces cerevisiae, is increased or generated. For example the activity of a nucleic acid molecule or a polypeptide comprising the nucleic acid, preferably the coding region thereof, or polypeptide or the consensus sequence or the polypeptide motif, as depicted in Table I, II or IV, application No. 13, column 5 or 8 in the respective same line as the nucleic acid molecule SEQ ID NO. 130932 or polypeptide SEQ ID NO. 130933, respectively, or a homolog or a fragment thereof, is increased or generated, or if the activity N-acetylglucosaminylphosphatidylinositoldeacetylase is increased or generated in a non-human organism, like a microorganism or a plant cell, plant or part thereof, especially with plastidic localization, whereby the respective line disclose in column 7 the fine chemical zeaxanthin. For example, an increase of the zeaxanthin of at least 1 percent, particularly in a range of 28 to 81-percent is conferred as compared to a corresponding non-transformed wild type non-human organism.

[65235] Accordingly, in one embodiment, an increase of cryptoxanthin in a non-human organism, as compared to a corresponding non-transformed wild type non-human organism, is conferred in the process of the invention, if the activity of a polypeptide showing the activity of a ymr324c-protein, or if the activity of the polypeptide Ymr324c, preferably represented by SEQ ID NO. 130987, or a homolog or fragment thereof, or if the activity of a polypeptide encoded by a nucleic acid molecule comprising the nucleic acid SEQ ID NO. 130986, preferably the coding region thereof, or a homolog or fragment thereof, e.g. derived from Saccharomyces cerevisiae, is increased or generated. For example the activity of a nucleic acid molecule or a polypeptide comprising the nucleic acid, preferably the coding region thereof, or polypeptide or the consensus sequence or the polypeptide motif, as depicted in Table I, II or IV, application No. 13, column 5 or 8 in the respective same line as the nucleic acid molecule SEQ ID NO. 130986 or polypeptide SEQ ID NO. 130987, respectively, or a homolog or a fragment thereof, is increased or generated, or if the activity ymr324c-protein is increased or generated in a non-human organism, like a microorganism or a plant cell, plant or part thereof, especially with plastidic localization, whereby the respective line disclose in column 7 the fine chemical cryptoxanthin. For example, an increase of the cryptoxanthin of at least 1 percent, particularly in a range of 31 to 49-percent is conferred as compared to a corresponding non-transformed wild type non-human organism.

[65236] Accordingly, in one embodiment, an increase of zeaxanthin in a non-human organism, as compared to a corresponding non-transformed wild type non-human organism, is conferred in the process of the invention, if the activity of a polypeptide showing the activity of a sterol O-acyltransferase, or if the activity of the polypeptide Ynr019w, preferably represented by SEQ ID NO. 67647, or a homolog or fragment thereof, or if the activity of a polypeptide encoded by a nucleic acid molecule comprising the nucleic acid SEQ ID NO. 67646, preferably the coding region thereof, or a homolog or fragment thereof, e.g. derived from Saccharomyces cerevisiae, is increased or generated. For example the activity of a nucleic acid molecule or a polypeptide comprising the nucleic acid, preferably the coding region thereof, or polypeptide or the consensus sequence or the polypeptide motif, as depicted in Table I, II or IV, application No. 13, column 5 or 8 in the respective same line as the nucleic acid molecule SEQ ID NO. 67646 or polypeptide SEQ ID NO. 67647, respectively, or a homolog or a fragment thereof, is increased or generated, or if the activity sterol O-acyltransferase is increased or generated in a non-human organism, like a microorganism or a plant cell, plant or part thereof, especially with plastidic localization, whereby the respective line disclose in column 7 the fine chemical zeaxanthin. For example, an increase of the zeaxanthin of at least 1 percent, particularly in a range of 33 to 49-percent is conferred as compared to a corresponding non-transformed wild type non-human organism.

[65237] Accordingly, in one embodiment, an increase of abscisic acid in a non-human organism, as compared to a corresponding non-transformed wild type non-human organism, is conferred in the process of the invention, if the activity of a polypeptide showing the activity of a YER184C-protein, or if the activity of the polypeptide Yer184c, preferably represented by SEQ ID NO. 130714, or a homolog or fragment thereof, or if the activity of a polypeptide encoded by a nuoleic acid molecule comprising the nucleic acid SEQ ID NO. 130713, preferably the coding region thereof, or a homolog or fragment thereof, e.g. derived from Saccharomyces cerevisiae, is increased or generated. For example the activity of a nucleic acid molecule or a polypeptide comprising the nucleic acid, preferably the coding region thereof, or polypeptide or the consensus sequence or the polypeptide motif, as depicted in Table I, II or IV, application No. 13, column 5 or 8 in the respective same line as the nucleic acid molecule SEQ ID NO. 130713 or polypeptide SEQ ID NO. 130714, respectively, or a homolog or a fragment thereof, is increased or generated, or if the activity YER184C-protein is increased or generated in a non-human organism, like a microorganism or a plant cell, plant or part thereof, especially with non-targeted localization, whereby the respective line disclose in column 7 the fine chemical abscisic acid. For example, an increase of the abscisic acid of at least 1 percent, particularly in a range of 31 to 114-percent is conferred as compared to a corresponding non-transformed wild type non-human organism.

[65238] Accordingly, in one embodiment, an increase of abscisic acid in a non-human organism, as compared to a corresponding non-transformed wild type non-human organism, is conferred in the process of the invention, if the activity of a polypeptide showing the activity of a YOR044W-protein, or if the activity of the polypeptide YOR044W, preferably represented by SEQ ID NO. 131000, or a homolog or fragment thereof, or if the activity of a polypeptide encoded by a nucleic acid molecule comprising the nucleic acid SEQ ID NO. 130999, preferably the coding region thereof, or a homolog or fragment thereof, e.g. derived from Saccharomyces cerevisiae, is increased or generated. For example the activity of a nucleic acid molecule or a polypeptide comprising the nucleic acid, preferably the coding region thereof, or polypeptide or the consensus sequence or the polypeptide motif, as depicted in Table I, II or IV, application No. 13, column 5 or 8 in the respective same line as the nucleic acid molecule SEQ ID NO. 130999 or polypeptide SEQ ID NO. 131000, respectively, or a homolog or a fragment thereof, is increased or generated, or if the activity YOR044W-protein is increased or generated in a non-human organism, like a microorganism or a plant cell, plant or part thereof, especially with non-targeted localization, whereby the respective line disclose in column 7 the fine chemical abscisic acid. For example, an increase of the abscisic acid of at least 1 percent, particularly in a range of 3 to 113-percent is conferred as compared to a corresponding non-transformed wild type non-human organism.

[65239] Accordingly, in one embodiment, an increase of abscisic acid in a non-human organism, as compared to a corresponding non-transformed wild type non-human organism, is conferred in the process of the invention, if the activity of a polypeptide showing the activity of a gluconate transport system permease 3, or if the activity of the polypeptide B4321, preferably represented by SEQ ID NO. 45395, or a homolog or fragment thereof, or if the activity of a polypeptide encoded by a nucleic acid molecule comprising the nucleic acid SEQ ID NO. 45394, preferably the coding region thereof, or a homolog or fragment thereof, e.g. derived from Escherichia coli, is increased or generated. For example the activity of a nucleic acid molecule or a polypeptide comprising the nucleic acid, preferably the coding region thereof, or polypeptide or the consensus sequence or the polypeptide motif, as depicted in Table I, II or IV, application No. 13, column 5 or 8 in the respective same line as the nucleic acid molecule SEQ ID NO. 45394 or polypeptide SEQ ID NO. 45395, respectively, or a homolog or a fragment thereof, is increased or generated, or if the activity gluconate transport system permease 3 is increased or generated in a non-human organism, like a microorganism or a plant cell, plant or part thereof, especially with non-targeted localization, whereby the respective line disclose in column 7 the fine chemical abscisic acid. For example, an increase of the abscisic acid of at least 1 percent, particularly in a range of 25 to 283-percent is conferred as compared to a corresponding non-transformed wild type non-human organism.

[65240] Accordingly, in one embodiment, an increase of abscisic acid in a non-human organism, as compared to a corresponding non-transformed wild type non-human organism, is conferred in the process of the invention, if the activity of a polypeptide showing the activity of a nitrate/nitrite transport protein, or if the activity of the polypeptide Sll1450, preferably represented by SEQ ID NO. 54338, or a homolog or fragment thereof, or if the activity of a polypeptide encoded by a nucleic acid molecule comprising the nucleic acid SEQ ID NO. 54337, preferably the coding region thereof, or a homolog or fragment thereof, e.g. derived from Synechocystis sp., is increased or generated. For example the activity of a nucleic acid molecule or a polypeptide comprising the nucleic acid, preferably the coding region thereof, or polypeptide or the consensus sequence or the polypeptide motif, as depicted in Table 1, 11 or IV, application No. 13, column 5 or 8 in the respective same line as the nucleic acid molecule SEQ ID NO. 54337 or polypeptide SEQ ID NO. 54338, respectively, or a homolog or a fragment thereof, is increased or generated, or if the activity nitrate/nitrite transport protein is increased or generated in a non-human organism, like a microorganism or a plant cell, plant or part thereof, especially with mitochondrial localization, whereby the respective line disclose in column 7 the fine chemical abscisic acid. For example, an increase of the abscisic acid of at least 1 percent, particularly in a range of 22 to 115-percent is conferred as compared to a corresponding non-transformed wild type non-human organism.

[65241] Accordingly, in one embodiment, an increase of abscisic acid in a non-human organism, as compared to a corresponding non-transformed wild type non-human organism, is conferred in the process of the invention, if the activity of a polypeptide showing the activity of a acyl transferase, or if the activity of the polypeptide Sll1848, preferably represented by SEQ ID NO. 86448, or a homolog or fragment thereof, or if the activity of a polypeptide encoded by a nucleic acid molecule comprising the nucleic acid SEQ ID NO. 86447, preferably the coding region thereof, or a homolog or fragment thereof, e.g. derived from Synechocystis sp., is increased or generated. For example the activity of a nucleic acid molecule or a polypeptide comprising the nucleic acid, preferably the coding region thereof, or polypeptide or the consensus sequence or the polypeptide motif, as depicted in Table I, II or IV, application No. 13, column 5 or 8 in the respective same line as the nucleic acid molecule SEQ ID NO. 86447 or polypeptide SEQ ID NO. 86448, respectively, or a homolog or a fragment thereof, is increased or generated, or if the activity acyl transferase is increased or generated in a non-human organism, like a microorganism or a plant cell, plant or part thereof, especially with plastidic localization, whereby the respective line disclose in column 7 the fine chemical abscisic acid. For example, an increase of the abscisic acid of at least 1 percent, particularly in a range of 26 to 364-percent is conferred as compared to a corresponding non-transformed wild type non-human organism.

[65242] Accordingly, in one embodiment, an increase of abscisic acid in a non-human organism, as compared to a corresponding non-transformed wild type non-human organism, is conferred in the process of the invention, if the activity of a polypeptide showing the activity of a heat shock transcription factor, or if the activity of the polypeptide At3g02990, preferably represented by SEQ ID NO. 68658, or a homolog or fragment thereof, or if the activity of a polypeptide encoded by a nucleic acid molecule comprising the nucleic acid SEQ ID NO. 68657, preferably the coding region thereof, or a homolog or fragment thereof, e.g. derived from Arabidopsis thaliana, is increased or generated. For example the activity of a nucleic acid molecule or a polypeptide comprising the nucleic acid, preferably the coding region thereof, or polypeptide or the consensus sequence or the polypeptide motif, as depicted in Table I, II or IV, application No. 13, column 5 or 8 in the respective same line as the nucleic acid molecule SEQ ID NO. 68657 or polypeptide SEQ ID NO. 68658, respectively, or a homolog or a fragment thereof, is increased or generated, or if the activity heat shock transcription factor is increased or generated in a non-human organism, like a microorganism or a plant cell, plant or part thereof, especially with non-targeted localization, whereby the respective line disclose in column 7 the fine chemical abscisic acid. For example, an increase of the abscisic acid of at least 1 percent, particularly in a range of 14 to 231-percent is conferred as compared to a corresponding non-transformed wild type non-human organism.

[65243] Accordingly, in one embodiment, an increase of abscisic acid in a non-human organism, as compared to a corresponding non-transformed wild type non-human organism, is conferred in the process of the invention, if the activity of a polypeptide showing the activity of a protein kinase, or if the activity of the polypeptide At1 g48260, preferably represented by SEQ ID NO. 18236, or a homolog or fragment thereof, or if the activity of a polypeptide encoded by a nucleic acid molecule comprising the nucleic acid SEQ ID NO. 18235, preferably the coding region thereof, or a homolog or fragment thereof, e.g. derived from Arabidopsis thaliana, is increased or generated. For example the activity of a nucleic acid molecule or a polypeptide comprising the nucleic acid, preferably the coding region thereof, or polypeptide or the consensus sequence or the polypeptide motif, as depicted in Table I, II or IV, application No. 13, column 5 or 8 in the respective same line as the nucleic acid molecule SEQ ID NO. 18235 or polypeptide SEQ ID NO. 18236, respectively, or a homolog or a fragment thereof, is increased or generated, or if the activity protein kinase is increased or generated in a non-human organism, like a microorganism or a plant cell, plant or part thereof, especially with non-targeted localization, whereby the respective line disclose in column 7 the fine chemical abscisic acid. For example, an increase of the abscisic acid of at least 1 percent, particularly in a range of 29 to 300-percent is conferred as compared to a corresponding non-transformed wild type non-human organism.

[65244] Accordingly, in one embodiment, an increase of abscisic acid in a non-human organism, as compared to a corresponding non-transformed wild type non-human organism, is conferred in the process of the invention, if the activity of a polypeptide showing the activity of a protein phosphatase, or if the activity of the polypeptide At1g72770, preferably represented by SEQ ID NO. 19420, or a homolog or fragment thereof, or if the activity of a polypeptide encoded by a nucleic acid molecule comprising the nucleic acid SEQ ID NO. 19419, preferably the coding region thereof, or a homolog or fragment thereof, e.g. derived from Arabidopsis thaliana, is increased or generated. For example the activity of a nucleic acid molecule or a polypeptide comprising the nucleic acid, preferably the coding region thereof, or polypeptide or the consensus sequence or the polypeptide motif, as depicted in Table I, II or IV, application No. 13, column 5 or 8 in the respective same line as the nucleic acid molecule SEQ ID NO. 19419 or polypeptide SEQ ID NO. 19420, respectively, or a homolog or a fragment thereof, is increased or generated, or if the activity protein phosphatase is increased or generated in a non-human organism, like a microorganism or a plant cell, plant or part thereof, especially with non-targeted localization, whereby the respective line disclose in column 7 the fine chemical abscisic acid. For example, an increase of the abscisic acid of at least 1 percent, particularly in a range of 124 to 1187-percent is conferred as compared to a corresponding non-transformed wild type non-human organism.

[65245] Accordingly, in one embodiment, an increase of abscisic acid in a non-human organism, as compared to a corresponding non-transformed wild type non-human organism, is conferred in the process of the invention, if the activity of a polypeptide showing the activity of a glycine cleavage system T aminomethyltransferase, or if the activity of the polypeptide AVINDRAFT_{—}0539, preferably represented by SEQ ID NO. 70716, or a homolog or fragment thereof, or if the activity of a polypeptide encoded by a nucleic acid molecule comprising the nucleic acid SEQ ID NO. 70715, preferably the coding region thereof, or a homolog or fragment thereof, e.g. derived from Azotobacter vinelandii, is increased or generated. For example the activity of a nucleic acid molecule or a polypeptide comprising the nucleic acid, preferably the coding region thereof, or polypeptide or the consensus sequence or the polypeptide motif, as depicted in Table I, II or IV, application No. 13, column 5 or 8 in the respective same line as the nucleic acid molecule SEQ ID NO. 70715 or polypeptide SEQ ID NO. 70716, respectively, or a homolog or a fragment thereof, is increased or generated, or if the activity glycine cleavage system T aminomethyltransferase is increased or generated in a non-human organism, like a microorganism or a plant cell, plant or part thereof, especially with non-targeted localization, whereby the respective line disclose in column 7 the fine chemical abscisic acid. For example, an increase of the abscisic acid of at least 1 percent, particularly in a range of 12 to 162-percent is conferred as compared to a corresponding non-transformed wild type non-human organism.

[65246] Accordingly, in one embodiment, an increase of abscisic acid in a non-human organism, as compared to a corresponding non-transformed wild type non-human organism, is conferred in the process of the invention, if the activity of a polypeptide showing the activity of a glutaredoxin, or if the activity of the polypeptide At2g30540, preferably represented by SEQ ID NO. 20347, or a homolog or fragment thereof, or if the activity of a polypeptide encoded by a nucleic acid molecule comprising the nucleic acid SEQ ID NO. 20346, preferably the coding region thereof, or a homolog or fragment thereof, e.g. derived from Arabidopsis thaliana, is increased or generated. For example the activity of a nucleic acid molecule or a polypeptide comprising the nucleic acid, preferably the coding region thereof, or polypeptide or the consensus sequence or the polypeptide motif, as depicted in Table I, II or IV, application No. 13, column 5 or 8 in the respective same line as the nucleic acid molecule SEQ ID NO. 20346 or polypeptide SEQ ID NO. 20347, respectively, or a homolog or a fragment thereof, is increased or generated, or if the activity glutaredoxin is increased or generated in a non-human organism, like a microorganism organism or a plant cell, plant or part thereof, especially with non-targeted localization, whereby the respective line disclose in column 7 the fine chemical abscisic acid. For example, an increase of the abscisic acid of at least 1 percent, particularly in a range of 11 to 152-percent is conferred as compared to a corresponding non-transformed wild type non-human organism.

[65247] [0096.1.7.13] to [0103.1.7.13] for the disclosure of these paragraphs see [0096.1.7.7] to [0103.1.7.7] above

[65248] In this paragraph “A” means “Goffeau et al., Science 274 (5287), 546 (1996)”, “B” means “Blattner et al., Science 277 (5331), 1453 (1997)”, “C” means “Nakamura et al., Nucleic Acids Res. 28(1), 72 (2000)”, “D” means “deposition of the sequences to the EMBL/GenBank/DDBJ databases under “Sequencing of the draft genome assembly of Azotobacter vinelandii AvOP”. in June 2005 by Copeland et al.”, “E” means “Henne et al., Nat. Biotechnol. 22 (5), 547 (2004)”, “F” means “Kaul et al., Nature 408 (6814), 796 (2000)”, and “G” means “Matsumoto et al., Nature 436 (7052), 793 (2005)”.

[65249] The nucleic acid sequence of At3g15360 from Arabidopsis thaliana, e.g. as shown in the respective line in column 5 of Table I, application no. 13, has been published in F. And the activity of the gene product thereof is the activity of thioredoxin.

[65250] Accordingly, in one embodiment, the process of the present invention for producing cryptoxanthin in a non-human organism, like a microorganism or a plant or a part thereof, comprises increasing or generating the activity of a gene product with the activity of a gene product conferring the activity of “thioredoxin”, especially from Arabidopsis thaliana or its functional equivalent or its homolog, e.g. the increase of
[65251] (a) a gene product of a gene comprising the nucleic acid molecule as shown in the respective line in column 5 of Table I (whereby the respective line disclose in column 7 the fine chemical cryptoxanthin), application no. 13, preferably the coding region thereof, or a homolog or a fragment thereof, and being depicted in the same respective line as said At3g15360, or a functional equivalent or a homolog thereof as shown in column 8 of Table I, application no. 13, preferably the coding region thereof, particularly a homolog or functional equivalent as shown in column 8 of Table I B, application no. 13, and being depicted in the same respective line as said At3g15360, and preferably the activity is increased non-targeted, or
[65252] (b) a polypeptide comprising a polypeptide, a consensus sequence or at least a polypeptide motif as shown in the respective line in column 5 of Table II or in column 8 of Table IV, application no. 13, respectively, and being depicted in the same respective line as said At3g15360, or a functional equivalent or a homolog thereof as depicted in column 8 of Table II, application no. 13, preferably a homolog or functional equivalent as depicted in column 8 of Table II B, application no. 13, and being depicted in the same respective line as said At3g15360, and preferably the activity is increased non-targeted, whereby the respective line disclose in column 7 the fine chemical cryptoxanthin.

[65253] Accordingly, in one embodiment, the molecule which activity is to be increased in the process of the invention is the gene product with an activity as a “thioredoxin”, preferably it is the molecule of section (a) or (b) of this paragraph.

[65254] In particular, it was observed that in plants, especially in Arabidopsis thaliana, increasing or generating the activity of a gene product non-targeted with the activity of a “thioredoxin”, preferably being encoded by a gene comprising the nucleic acid sequence SEQ ID NO. 130491, preferably the coding region thereof, conferred the production of or the increase in cryptoxanthin compared with the wild type control.

[65255] The nucleic acid sequence of At3g16820 from Arabidopsis thaliana, e.g. as shown in the respective line in column 5 of Table I, application no. 13, has been published in F. And the activity of the gene product thereof is the activity of F-box protein.

[65256] Accordingly, in one embodiment, the process of the present invention for producing zeaxanthin in a non-human organism, like a microorganism or a plant or a part thereof, comprises increasing or generating the activity of a gene product with the activity of a gene product conferring the activity of “F-box protein”, especially from Arabidopsis thaliana or its functional equivalent or its homolog, e.g. the increase of
[65257] (a) a gene product of a gene comprising the nucleic acid molecule as shown in the respective line in column 5 of Table I (whereby the respective line disclose in column 7 the fine chemical zeaxanthin), application no. 13, preferably the coding region thereof, or a homolog or a fragment thereof, and being depicted in the same respective line as said At3g16820, or a functional equivalent or a homolog thereof as shown in column 8 of Table I, application no. 13, preferably the coding region thereof, particularly a homolog or functional equivalent as shown in column 8 of Table I B, application no. 13, and being depicted in the same respective line as said At3g16820, and preferably the activity is increased non-targeted, or
[65258] (b) a polypeptide comprising a polypeptide, a consensus sequence or at least a polypeptide motif as shown in the respective line in column 5 of Table II or in column 8 of Table IV, application no. 13, respectively, and being depicted in the same respective line as said At3g16820, or a functional equivalent or a homolog thereof as depicted in column 8 of Table II, application no. 13, preferably a homolog or functional equivalent as depicted in column 8 of Table II B, application no. 13, and being depicted in the same respective line as said At3g16820, and preferably the activity is increased non-targeted, whereby the respective line disclose in column 7 the fine chemical zeaxanthin.

[65259] Accordingly, in one embodiment, the molecule which activity is to be increased in the process of the invention is the gene product with an activity as a “F-box protein”, preferably it is the molecule of section (a) or (b) of this paragraph.

[65260] In particular, it was observed that in plants, especially in Arabidopsis thaliana, increasing or generating the activity of a gene product non-targeted with the activity of a “F-box protein”, preferably being encoded by a gene comprising the nucleic acid sequence SEQ ID NO. 120952, preferably the coding region thereof, conferred the production of or the increase in zeaxanthin compared with the wild type control.

[65261] The nucleic acid sequence of At3g62930 from Arabidopsis thaliana, e.g. as shown in the respective line in column 5 of Table I, application no. 13, has been published in F. And the activity of the gene product thereof is the activity of monthiol glutaredoxin.

[65262] Accordingly, in one embodiment, the process of the present invention for producing zeaxanthin in a non-human organism, like a microorganism or a plant or a part thereof, comprises increasing or generating the activity of a gene product with the activity of a gene product conferring the activity of “monthiol glutaredoxin”, especially from Arabidopsis thaliana or its functional equivalent or its homolog, e.g. the increase of
[65263] (a) a gene product of a gene comprising the nucleic acid molecule as shown in the respective line in column 5 of Table I (whereby the respective line disclose in column 7 the fine chemical zeaxanthin), application no. 13, preferably the coding region thereof, or a homolog or a fragment thereof, and being depicted in the same respective line as said At3g62930, or a functional equivalent or a homolog thereof as shown in column 8 of Table I, application no. 13, preferably the coding region thereof, particularly a homolog or functional equivalent as shown in column 8 of Table I B, application no. 13, and being depicted in the same respective line as said At3g62930, and preferably the activity is increased non-targeted, or
[65264] (b) a polypeptide comprising a polypeptide, a consensus sequence or at least a polypeptide motif as shown in the respective line in column 5 of Table II or in column 8 of Table IV, application no. 13, respectively, and being depicted in the same respective line as said At3g62930, or a functional equivalent or a homolog thereof as depicted in column 8 of Table II, application no. 13, preferably a homolog or functional equivalent as depicted in column 8 of Table II B, application no. 13, and being depicted in the same respective line as said At3g62930, and preferably the activity is increased non-targeted, whereby the respective line disclose in column 7 the fine chemical zeaxanthin.

[65265] Accordingly, in one embodiment, the molecule which activity is to be increased in the process of the invention is the gene product with an activity as a “monthiol glutaredoxin”, preferably it is the molecule of section (a) or (b) of this paragraph.

[65266] In particular, it was observed that in plants, especially in Arabidopsis thaliana, increasing or generating the activity of a gene product non-targeted with the activity of a “monthiol glutaredoxin”, preferably being encoded by a gene comprising the nucleic acid sequence SEQ ID NO. 2573, preferably the coding region thereof, conferred the production of or the increase in zeaxanthin compared with the wild type control.

[65267] The nucleic acid sequence of At4g15660 from Arabidopsis thaliana, e.g. as shown in the respective line in column 5 of Table I, application no. 13, has been published in F. And the activity of the gene product thereof is the activity of monothiol glutaredoxin.

[65268] Accordingly, in one embodiment, the process of the present invention for producing zeaxanthin in a non-human organism, like a microorganism or a plant or a part thereof, comprises increasing or generating the activity of a gene product with the activity of a gene product conferring the activity of “monothiol glutaredoxin”, especially from Arabidopsis thaliana or its functional equivalent or its homolog, e.g. the increase of
[65269] (a) a gene product of a gene comprising the nucleic acid molecule as shown in the respective line in column 5 of Table I (whereby the respective line disclose in column 7 the fine chemical zeaxanthin), application no. 13, preferably the coding region thereof, or a homolog or a fragment thereof, and being depicted in the same respective line as said At4g15660, or a functional equivalent or a homolog thereof as shown in column 8 of Table I, application no. 13, preferably the coding region thereof, particularly a homolog or functional equivalent as shown in column 8 of Table I B, application no. 13, and being depicted in the same respective line as said At4g15660, and preferably the activity is increased non-targeted, or
[65270] (b) a polypeptide comprising a polypeptide, a consensus sequence or at least a polypeptide motif as shown in the respective line in column 5 of Table II or in column 8 of Table IV, application no. 13, respectively, and being depicted in the same respective line as said At4g15660, or a functional equivalent or a homolog thereof as depicted in column 8 of Table II, application no. 13, preferably a homolog or functional equivalent as depicted in column 8 of Table II B, application no. 13, and being depicted in the same respective line as said At4g15660, and preferably the activity is increased non-targeted, whereby the respective line disclose in column 7 the fine chemical zeaxanthin.

[65271] Accordingly, in one embodiment, the molecule which activity is to be increased in the process of the invention is the gene product with an activity as a “monothiol glutaredoxin”, preferably it is the molecule of section (a) or (b) of this paragraph.

[65272] In particular, it was observed that in plants, especially in Arabidopsis thaliana, increasing or generating the activity of a gene product non-targeted with the activity of a “monothiol glutaredoxin”, preferably being encoded by a gene comprising the nucleic acid sequence SEQ ID NO. 23482, preferably the coding region thereof, conferred the production of or the increase in zeaxanthin compared with the wild type control.

[65273] The nucleic acid sequence of At4g15670 from Arabidopsis thaliana, e.g. as shown in the respective line in column 5 of Table I, application no. 13, has been published in F. And the activity of the gene product thereof is the activity of monothiol glutaredoxin.

[65274] Accordingly, in one embodiment, the process of the present invention for producing zeaxanthin in a non-human organism, like a microorganism or a plant or a part thereof, comprises increasing or generating the activity of a gene product with the activity of a gene product conferring the activity of “monothiol glutaredoxin”, especially from Arabidopsis thaliana or its functional equivalent or its homolog, e.g. the increase of
[65275] (a) a gene product of a gene comprising the nucleic acid molecule as shown in the respective line in column 5 of Table I (whereby the respective line disclose in column 7 the fine chemical zeaxanthin), application no. 13, preferably the coding region thereof, or a homolog or a fragment thereof, and being depicted in the same respective line as said At4g15670, or a functional equivalent or a homolog thereof as shown in column 8 of Table I, application no. 13, preferably the coding region thereof, particularly a homolog or functional equivalent as shown in column 8 of Table I B, application no. 13, and being depicted in the same respective line as said At4g15670, and preferably the activity is increased non-targeted, or
[65276] (b) a polypeptide comprising a polypeptide, a consensus sequence or at least a polypeptide motif as shown in the respective line in column 5 of Table II or in column 8 of Table IV, application no. 13, respectively, and being depicted in the same respective line as said At4g15670, or a functional equivalent or a homolog thereof as depicted in column 8 of Table II, application no. 13, preferably a homolog or functional equivalent as depicted in column 8 of Table II B, application no. 13, and being depicted in the same respective line as said At4g15670, and preferably the activity is increased non-targeted, whereby the respective line disclose in column 7 the fine chemical zeaxanthin.

[65277] Accordingly, in one embodiment, the molecule which activity is to be increased in the process of the invention is the gene product with an activity as a “monothiol glutaredoxin”, preferably it is the molecule of section (a) or (b) of this paragraph.

[65278] In particular, it was observed that in plants, especially in Arabidopsis thaliana, increasing or generating the activity of a gene product non-targeted with the activity of a “monothiol glutaredoxin”, preferably being encoded by a gene comprising the nucleic acid sequence SEQ ID NO. 3279, preferably the coding region thereof, conferred the production of or the increase in zeaxanthin compared with the wild type control.

[65279] The nucleic acid sequence of At4g26080 from Arabidopsis thaliana, e.g. as shown in the respective line in column 5 of Table I, application no. 13, has been published in F. And the activity of the gene product thereof is the activity of protein phosphatase.

[65280] Accordingly, in one embodiment, the process of the present invention for producing zeaxanthin in a non-human organism, like a microorganism or a plant or a part thereof, comprises increasing or generating the activity of a gene product with the activity of a gene product conferring the activity of “protein phosphatase”, especially from Arabidopsis thaliana or its functional equivalent or its homolog, e.g. the increase of
[65281] (a) a gene product of a gene comprising the nucleic acid molecule as shown in the respective line in column 5 of Table I (whereby the respective line disclose in column 7 the fine chemical zeaxanthin), application no. 13, preferably the coding region thereof, or a homolog or a fragment thereof, and being depicted in the same respective line as said At4g26080, or a functional equivalent or a homolog thereof as shown in column 8 of Table I, application no. 13, preferably the coding region thereof, particularly a homolog or functional equivalent as shown in column 8 of Table I B, application no. 13, and being depicted in the same respective line as said At4g26080, and preferably the activity is increased non-targeted, or
[65282] (b) a polypeptide comprising a polypeptide, a consensus sequence or at least a polypeptide motif as shown in the respective line in column 5 of Table II or in column 8 of Table IV, application no. 13, respectively, and being depicted in the same respective line as said At4g26080, or a functional equivalent or a homolog thereof as depicted in column 8 of Table II, application no. 13, preferably a homolog or functional equivalent as depicted in column 8 of Table II B, application no. 13, and being depicted in the same respective line as said At4g26080, and preferably the activity is increased non-targeted, whereby the respective line disclose in column 7 the fine chemical zeaxanthin.

[65283] Accordingly, in one embodiment, the molecule which activity is to be increased in the process of the invention is the gene product with an activity as a “protein phosphatase”, preferably it is the molecule of section (a) or (b) of this paragraph.

[65284] In particular, it was observed that in plants, especially in Arabidopsis thaliana, increasing or generating the activity of a gene product non-targeted with the activity of a “protein phosphatase”, preferably being encoded by a gene comprising the nucleic acid sequence SEQ ID NO. 68849, preferably the coding region thereof, conferred the production of or the increase in zeaxanthin compared with the wild type control.

[65285] The nucleic acid sequence of At4g33040 from Arabidopsis thaliana, e.g. as shown in the respective line in column 5 of Table I, application no. 13, has been published in F. And the activity of the gene product thereof is the activity of glutaredoxin.

[65286] Accordingly, in one embodiment, the process of the present invention for producing cryptoxanthin in a non-human organism, like a microorganism or a plant or a part thereof, comprises increasing or generating the activity of a gene product with the activity of a gene product conferring the activity of “glutaredoxin”, especially from Arabidopsis thaliana or its functional equivalent or its homolog, e.g. the increase of
[65287] (a) a gene product of a gene comprising the nucleic acid molecule as shown in the respective line in column 5 of Table I (whereby the respective line disclose in column 7 the fine chemical cryptoxanthin), application no. 13, preferably the coding region thereof, or a homolog or a fragment thereof, and being depicted in the same respective line as said At4g33040, or a functional equivalent or a homolog thereof as shown in column 8 of Table I, application no. 13, preferably the coding region thereof, particularly a homolog or functional equivalent as shown in column 8 of Table I B, application no. 13, and being depicted in the same respective line as said At4g33040, and preferably the activity is increased non-targeted, or
[65288] (b) a polypeptide comprising a polypeptide, a consensus sequence or at least a polypeptide motif as shown in the respective line in column 5 of Table II or in column 8 of Table IV, application no. 13, respectively, and being depicted in the same respective line as said At4g33040, or a functional equivalent or a homolog thereof as depicted in column 8 of Table II, application no. 13, preferably a homolog or functional equivalent as depicted in column 8 of Table II B, application no. 13, and being depicted in the same respective line as said At4g33040, and preferably the activity is increased non-targeted, whereby the respective line disclose in column 7 the fine chemical cryptoxanthin.

[65289] Accordingly, in one embodiment, the molecule which activity is to be increased in the process of the invention is the gene product with an activity as a “glutaredoxin”, preferably it is the molecule of section (a) or (b) of this paragraph.

[65290] In particular, it was observed that in plants, especially in Arabidopsis thaliana, increasing or generating the activity of a gene product non-targeted with the activity of a “glutaredoxin”, preferably being encoded by a gene comprising the nucleic acid sequence SEQ ID NO. 4102, preferably the coding region thereof, conferred the production of or the increase in cryptoxanthin compared with the wild type control.

[65291] The nucleic acid sequence of At5g60440 from Arabidopsis thaliana, e.g. as shown in the respective line in column 5 of Table I, application no. 13, has been published in F. And the activity of the gene product thereof is the activity of MADS-box transcription factor.

[65292] Accordingly, in one embodiment, the process of the present invention for producing zeaxanthin in a non-human organism, like a microorganism or a plant or a part thereof, comprises increasing or generating the activity of a gene product with the activity of a gene product conferring the activity of “MADS-box transcription factor”, especially from Arabidopsis thaliana or its functional equivalent or its homolog, e.g. the increase of
[65293] (a) a gene product of a gene comprising the nucleic acid molecule as shown in the respective line in column 5 of Table I (whereby the respective line disclose in column 7 the fine chemical zeaxanthin), application no. 13, preferably the coding region thereof, or a homolog or a fragment thereof, and being depicted in the same respective line as said At5g60440, or a functional equivalent or a homolog thereof as shown in column 8 of Table I, application no. 13, preferably the coding region thereof, particularly a homolog or functional equivalent as shown in column 8 of Table I B, application no. 13, and being depicted in the same respective line as said At5g60440, and preferably the activity is increased non-targeted, or
[65294] (b) a polypeptide comprising a polypeptide, a consensus sequence or at least a polypeptide motif as shown in the respective line in column 5 of Table II or in column 8 of Table IV, application no. 13, respectively, and being depicted in the same respective line as said At5g60440, or a functional equivalent or a homolog thereof as depicted in column 8 of Table II, application no. 13, preferably a homolog or functional equivalent as depicted in column 8 of Table II B, application no. 13, and being depicted in the same respective line as said At5g60440, and preferably the activity is increased non-targeted, whereby the respective line disclose in column 7 the fine chemical zeaxanthin.

[65295] Accordingly, in one embodiment, the molecule which activity is to be increased in the process of the invention is the gene product with an activity as a “MADS-box transcription factor”, preferably it is the molecule of section (a) or (b) of this paragraph.

[65296] In particular, it was observed that in plants, especially in Arabidopsis thaliana, increasing or generating the activity of a gene product non-targeted with the activity of a “MADS-box transcription factor”, preferably being encoded by a gene comprising the nucleic acid sequence SEQ ID NO. 102899, preferably the coding region thereof, conferred the production of or the increase in zeaxanthin compared with the wild type control.

[65297] The nucleic acid sequence of AvinDRAFT_{—}4847 from Azotobacter vinelandii, e.g. as shown in the respective line in column 5 of Table I, application no. 13, has been published in D. And the activity of the gene product thereof is the activity of isopropylmalate isomerase large subunit.

[65298] Accordingly, in one embodiment, the process of the present invention for producing zeaxanthin in a non-human organism, like a microorganism or a plant or a part thereof, comprises increasing or generating the activity of a gene product with the activity of a gene product conferring the activity of “isopropylmalate isomerase large subunit”, especially from Azotobacter vinelandii or its functional equivalent or its homolog, e.g. the increase of
[65299] (a) a gene product of a gene comprising the nucleic acid molecule as shown in the respective line in column 5 of Table I (whereby the respective line disclose in column 7 the fine chemical zeaxanthin), application no. 13, preferably the coding region thereof, or a homolog or a fragment thereof, and being depicted in the same respective line as said AvinDRAFT_{—}4847, or a functional equivalent or a homolog thereof as shown in column 8 of Table I, application no. 13, preferably the coding region thereof, particularly a homolog or functional equivalent as shown in column 8 of Table I B, application no. 13, and being depicted in the same respective line as said AvinDRAFT_{—}4847, and preferably the activity is increased non-targeted, or
[65300] (b) a polypeptide comprising a polypeptide, a consensus sequence or at least a polypeptide motif as shown in the respective line in column 5 of Table II or in column 8 of Table IV, application no. 13, respectively, and being depicted in the same respective line as said AvinDRAFT_{—}4847, or a functional equivalent or a homolog thereof as depicted in column 8 of Table II, application no. 13, preferably a homolog or functional equivalent as depicted in column 8 of Table II B, application no. 13, and being depicted in the same respective line as said AvinDRAFT_{—}4847, and preferably the activity is increased non-targeted, whereby the respective line disclose in column 7 the fine chemical zeaxanthin.

[65301] Accordingly, in one embodiment, the molecule which activity is to be increased in the process of the invention is the gene product with an activity as a “isopropylmalate isomerase large subunit”, preferably it is the molecule of section (a) or (b) of this paragraph.

[65302] In particular, it was observed that in plants, especially in Arabidopsis thaliana, increasing or generating the activity of a gene product non-targeted with the activity of a “isopropylmalate isomerase large subunit”, preferably being encoded by a gene comprising the nucleic acid sequence SEQ ID NO. 102941, preferably the coding region thereof, conferred the production of or the increase in zeaxanthin compared with the wild type control.

[65303] The nucleic acid sequence of AX653549 from Oryza sativa, e.g. as shown in the respective line in column 5 of Table I, application no. 13, has been published in G. And the activity of the gene product thereof is the activity of AX653549-protein.

[65304] Accordingly, in one embodiment, the process of the present invention for producing cryptoxanthin in a non-human organism, like a microorganism or a plant or a part thereof, comprises increasing or generating the activity of a gene product with the activity of a gene product conferring the activity of “AX653549-protein”, especially from Oryza sativa or its functional equivalent or its homolog, e.g. the increase of
[65305] (a) a gene product of a gene comprising the nucleic acid molecule as shown in the respective line in column 5 of Table I (whereby the respective line disclose in column 7 the fine chemical cryptoxanthin), application no. 13, preferably the coding region thereof, or a homolog or a fragment thereof, and being depicted in the same respective line as said AX653549, or a functional equivalent or a homolog thereof as shown in column 8 of Table I, application no. 13, preferably the coding region thereof, particularly a homolog or functional equivalent as shown in column 8 of Table I B, application no. 13, and being depicted in the same respective line as said AX653549, and preferably the activity is increased non-targeted, or
[65306] (b) a polypeptide comprising a polypeptide, a consensus sequence or at least a polypeptide motif as shown in the respective line in column 5 of Table II or in column 8 of Table IV, application no. 13, respectively, and being depicted in the same respective line as said AX653549, or a functional equivalent or a homolog thereof as depicted in column 8 of Table II, application no. 13, preferably a homolog or functional equivalent as depicted in column 8 of Table II B, application no. 13, and being depicted in the same respective line as said AX653549, and preferably the activity is increased non-targeted, whereby the respective line disclose in column 7 the fine chemical cryptoxanthin.

[65307] Accordingly, in one embodiment, the molecule which activity is to be increased in the process of the invention is the gene product with an activity as a “AX653549-protein”, preferably it is the molecule of section (a) or (b) of this paragraph.

[65308] In particular, it was observed that in plants, especially in Arabidopsis thaliana, increasing or generating the activity of a gene product non-targeted with the activity of a “AX653549-protein”, preferably being encoded by a gene comprising the nucleic acid sequence SEQ ID NO. 34301, preferably the coding region thereof, conferred the production of or the increase in cryptoxanthin compared with the wild type control.

[65309] The nucleic acid sequence of B1003 from Escherichia coli, e.g. as shown in the respective line in column 5 of Table I, application no. 13, has been published in B. And the activity of the gene product thereof is the activity of b1003-protein.

[65310] Accordingly, in one embodiment, the process of the present invention for producing zeaxanthin in a non-human organism, like a microorganism or a plant or a part thereof, comprises increasing or generating the activity of a gene product with the activity of a gene product conferring the activity of “b1003-protein”, especially from Escherichia coli or its functional equivalent or its homolog, e.g. the increase of
[65311] (a) a gene product of a gene comprising the nucleic acid molecule as shown in the respective line in column 5 of Table I (whereby the respective line disclose in column 7 the fine chemical zeaxanthin), application no. 13, preferably the coding region thereof, or a homolog or a fragment thereof, and being depicted in the same respective line as said B1003, or a functional equivalent or a homolog thereof as shown in column 8 of Table I, application no. 13, preferably the coding region thereof, particularly a homolog or functional equivalent as shown in column 8 of Table I B, application no. 13, and being depicted in the same respective line as said B1003, and preferably the activity is increased non-targeted, or
[65312] (b) a polypeptide comprising a polypeptide, a consensus sequence or at least a polypeptide motif as shown in the respective line in column 5 of Table II or in column 8 of Table IV, application no. 13, respectively, and being depicted in the same respective line as said B1003, or a functional equivalent or a homolog thereof as depicted in column 8 of Table II, application no. 13, preferably a homolog or functional equivalent as depicted in column 8 of Table II B, application no. 13, and being depicted in the same respective line as said B1003, and preferably the activity is increased non-targeted, whereby the respective line disclose in column 7 the fine chemical zeaxanthin.

[65313] Accordingly, in one embodiment, the molecule which activity is to be increased in the process of the invention is the gene product with an activity as a “b1003-protein”, preferably it is the molecule of section (a) or (b) of this paragraph.

[65314] In particular, it was observed that in plants, especially in Arabidopsis thaliana, increasing or generating the activity of a gene product non-targeted with the activity of a “b1003-protein”, preferably being encoded by a gene comprising the nucleic acid sequence SEQ ID NO. 7941, preferably the coding region thereof, conferred the production of or the increase in zeaxanthin compared with the wild type control.

[65315] The nucleic acid sequence of B1023 from Escherichia coli, e.g. as shown in the respective line in column 5 of Table I, application no. 13, has been published in B. And the activity of the gene product thereof is the activity of lipoprotein precursor.

[65316] Accordingly, in one embodiment, the process of the present invention for producing zeaxanthin in a non-human organism, like a microorganism or a plant or a part thereof, comprises increasing or generating the activity of a gene product with the activity of a gene product conferring the activity of “lipoprotein precursor”, especially from Escherichia coli or its functional equivalent or its homolog, e.g. the increase of
[65317] (a) a gene product of a gene comprising the nucleic acid molecule as shown in the respective line in column 5 of Table I (whereby the respective line disclose in column 7 the fine chemical zeaxanthin), application no. 13, preferably the coding region thereof, or a homolog or a fragment thereof, and being depicted in the same respective line as said B1023, or a functional equivalent or a homolog thereof as shown in column 8 of Table I, application no. 13, preferably the coding region thereof, particularly a homolog or functional equivalent as shown in column 8 of Table I B, application no. 13, and being depicted in the same respective line as said B1023, and preferably the activity is increased non-targeted, or
[65318] (b) a polypeptide comprising a polypeptide, a consensus sequence or at least a polypeptide motif as shown in the respective line in column 5 of Table II or in column 8 of Table IV, application no. 13, respectively, and being depicted in the same respective line as said B1023, or a functional equivalent or a homolog thereof as depicted in column 8 of Table II, application no. 13, preferably a homolog or functional equivalent as depicted in column 8 of Table II B, application no. 13, and being depicted in the same respective line as said B1023, and preferably the activity is increased non-targeted, whereby the respective line disclose in column 7 the fine chemical zeaxanthin.

[65319] Accordingly, in one embodiment, the molecule which activity is to be increased in the process of the invention is the gene product with an activity as a “lipoprotein precursor”, preferably it is the molecule of section (a) or (b) of this paragraph.

[65320] In particular, it was observed that in plants, especially in Arabidopsis thaliana, increasing or generating the activity of a gene product non-targeted with the activity of a “lipoprotein precursor”, preferably being encoded by a gene comprising the nucleic acid sequence SEQ ID NO. 36880, preferably the coding region thereof, conferred the production of or the increase in zeaxanthin compared with the wild type control.

[65321] The nucleic acid sequence of B1838 from Escherichia coli, e.g. as shown in the respective line in column 5 of Table I, application no. 13, has been published in B. And the activity of the gene product thereof is the activity of serine/threonine-protein phosphatase.

[65322] Accordingly, in one embodiment, the process of the present invention for producing zeaxanthin in a non-human organism, like a microorganism or a plant or a part thereof, comprises increasing or generating the activity of a gene product with the activity of a gene product conferring the activity of “serine/threonine-protein phosphatase”, especially from Escherichia coli or its functional equivalent or its homolog, e.g. the increase of
[65323] (a) a gene product of a gene comprising the nucleic acid molecule as shown in the respective line in column 5 of Table I (whereby the respective line disclose in column 7 the fine chemical zeaxanthin), application no. 13, preferably the coding region thereof, or a homolog or a fragment thereof, and being depicted in the same respective line as said B1838, or a functional equivalent or a homolog thereof as shown in column 8 of Table I, application no. 13, preferably the coding region thereof, particularly a homolog or functional equivalent as shown in column 8 of Table I B, application no. 13, and being depicted in the same respective line as said B1838, and preferably the activity is increased non-targeted, or
[65324] (b) a polypeptide comprising a polypeptide, a consensus sequence or at least a polypeptide motif as shown in the respective line in column 5 of Table II or in column 8 of Table IV, application no. 13, respectively, and being depicted in the same respective line as said B1838, or a functional equivalent or a homolog thereof as depicted in column 8 of Table II, application no. 13, preferably a homolog or functional equivalent as depicted in column 8 of Table II B, application no. 13, and being depicted in the same respective line as said B1838, and preferably the activity is increased non-targeted, whereby the respective line disclose in column 7 the fine chemical zeaxanthin.

[65325] Accordingly, in one embodiment, the molecule which activity is to be increased in the process of the invention is the gene product with an activity as a “serine/threonine-protein phosphatase”, preferably it is the molecule of section (a) or (b) of this paragraph.

[65326] In particular, it was observed that in plants, especially in Arabidopsis thaliana, increasing or generating the activity of a gene product non-targeted with the activity of a “serine/threonine-protein phosphatase”, preferably being encoded by a gene comprising the nucleic acid sequence SEQ ID NO. 8316, preferably the coding region thereof, conferred the production of or the increase in zeaxanthin compared with the wild type control.

[65327] The nucleic acid sequence of B2032 from Escherichia coli, e.g. as shown in the respective line in column 5 of Table I, application no. 13, has been published in B. And the activity of the gene product thereof is the activity of b2032-protein.

[65328] Accordingly, in one embodiment, the process of the present invention for producing zeaxanthin in a non-human organism, like a microorganism or a plant or a part thereof, comprises increasing or generating the activity of a gene product with the activity of a gene product conferring the activity of “b2032-protein”, especially from Escherichia coli or its functional equivalent or its homolog, e.g. the increase of
[65329] (a) a gene product of a gene comprising the nucleic acid molecule as shown in the respective line in column 5 of Table I (whereby the respective line disclose in column 7 the fine chemical zeaxanthin), application no. 13, preferably the coding region thereof, or a homolog or a fragment thereof, and being depicted in the same respective line as said B2032, or a functional equivalent or a homolog thereof as shown in column 8 of Table I, application no. 13, preferably the coding region thereof, particularly a homolog or functional equivalent as shown in column 8 of Table I B, application no. 13, and being depicted in the same respective line as said B2032, and preferably the activity is increased non-targeted, or
[65330] (b) a polypeptide comprising a polypeptide, a consensus sequence or at least a polypeptide motif as shown in the respective line in column 5 of Table II or in column 8 of Table IV, application no. 13, respectively, and being depicted in the same respective line as said B2032, or a functional equivalent or a homolog thereof as depicted in column 8 of Table II, application no. 13, preferably a homolog or functional equivalent as depicted in column 8 of Table II B, application no. 13, and being depicted in the same respective line as said B2032, and preferably the activity is increased non-targeted, whereby the respective line disclose in column 7 the fine chemical zeaxanthin.

[65331] Accordingly, in one embodiment, the molecule which activity is to be increased in the process of the invention is the gene product with an activity as a “b2032-protein”, preferably it is the molecule of section (a) or (b) of this paragraph.

[65332] In particular, it was observed that in plants, especially in Arabidopsis thaliana, increasing or generating the activity of a gene product non-targeted with the activity of a “b2032-protein”, preferably being encoded by a gene comprising the nucleic acid sequence SEQ ID NO. 8920, preferably the coding region thereof, conferred the production of or the increase in zeaxanthin compared with the wild type control.

[65333] The nucleic acid sequence of B2099 from Escherichia coli, e.g. as shown in the respective line in column 5 of Table I, application no. 13, has been published in B. And the activity of the gene product thereof is the activity of b2099-protein.

[65334] Accordingly, in one embodiment, the process of the present invention for producing cryptoxanthin in a non-human organism, like a microorganism or a plant or a part thereof, comprises increasing or generating the activity of a gene product with the activity of a gene product conferring the activity of “b2099-protein”, especially from Escherichia coli or its functional equivalent or its homolog, e.g. the increase of
[65335] (a) a gene product of a gene comprising the nucleic acid molecule as shown in the respective line in column 5 of Table I (whereby the respective line disclose in column 7 the fine chemical cryptoxanthin), application no. 13, preferably the coding region thereof, or a homolog or a fragment thereof, and being depicted in the same respective line as said B2099, or a functional equivalent or a homolog thereof as shown in column 8 of Table I, application no. 13, preferably the coding region thereof, particularly a homolog or functional equivalent as shown in column 8 of Table I B, application no. 13, and being depicted in the same respective line as said B2099, and preferably the activity is increased non-targeted, or
[65336] (b) a polypeptide comprising a polypeptide, a consensus sequence or at least a polypeptide motif as shown in the respective line in column 5 of Table II or in column 8 of Table IV, application no. 13, respectively, and being depicted in the same respective line as said B2099, or a functional equivalent or a homolog thereof as depicted in column 8 of Table II, application no. 13, preferably a homolog or functional equivalent as depicted in column 8 of Table II B, application no. 13, and being depicted in the same respective line as said B2099, and preferably the activity is increased non-targeted, whereby the respective line disclose in column 7 the fine chemical cryptoxanthin.

[65337] Accordingly, in one embodiment, the molecule which activity is to be increased in the process of the invention is the gene product with an activity as a “b2099-protein”, preferably it is the molecule of section (a) or (b) of this paragraph.

[65338] In particular, it was observed that in plants, especially in Arabidopsis thaliana, increasing or generating the activity of a gene product non-targeted with the activity of a “b2099-protein”, preferably being encoded by a gene comprising the nucleic acid sequence SEQ ID NO. 115595, preferably the coding region thereof, conferred the production of or the increase in cryptoxanthin compared with the wild type control.

[65339] The nucleic acid sequence of B2121 from Escherichia coli, e.g. as shown in the respective line in column 5 of Table I, application no. 13, has been published in B. And the activity of the gene product thereof is the activity of b2121-protein.

[65340] Accordingly, in one embodiment, the process of the present invention for producing zeaxanthin in a non-human organism, like a microorganism or a plant or a part thereof, comprises increasing or generating the activity of a gene product with the activity of a gene product conferring the activity of “b2121-protein”, especially from Escherichia coli or its functional equivalent or its homolog, e.g. the increase of
[65341] (a) a gene product of a gene comprising the nucleic acid molecule as shown in the respective line in column 5 of Table I (whereby the respective line disclose in column 7 the fine chemical zeaxanthin), application no. 13, preferably the coding region thereof, or a homolog or a fragment thereof, and being depicted in the same respective line as said B2121, or a functional equivalent or a homolog thereof as shown in column 8 of Table I, application no. 13, preferably the coding region thereof, particularly a homolog or functional equivalent as shown in column 8 of Table I B, application no. 13, and being depicted in the same respective line as said B2121, and preferably the activity is increased non-targeted, or
[65342] (b) a polypeptide comprising a polypeptide, a consensus sequence or at least a polypeptide motif as shown in the respective line in column 5 of Table II or in column 8 of Table IV, application no. 13, respectively, and being depicted in the same respective line as said B2121, or a functional equivalent or a homolog thereof as depicted in column 8 of Table II, application no. 13, preferably a homolog or functional equivalent as depicted in column 8 of Table II B, application no. 13, and being depicted in the same respective line as said B2121, and preferably the activity is increased non-targeted, whereby the respective line disclose in column 7 the fine chemical zeaxanthin.

[65343] Accordingly, in one embodiment, the molecule which activity is to be increased in the process of the invention is the gene product with an activity as a “b2121-protein”, preferably it is the molecule of section (a) or (b) of this paragraph.

[65344] In particular, it was observed that in plants, especially in Arabidopsis thaliana, increasing or generating the activity of a gene product non-targeted with the activity of a “b2121-protein”, preferably being encoded by a gene comprising the nucleic acid sequence SEQ ID NO. 39013, preferably the coding region thereof, conferred the production of or the increase in zeaxanthin compared with the wild type control.

[65345] The nucleic acid sequence of B2474 from Escherichia coli, e.g. as shown in the respective line in column 5 of Table I, application no. 13, has been published in B. And the activity of the gene product thereof is the activity of b2474-protein.

[65346] Accordingly, in one embodiment, the process of the present invention for producing zeaxanthin in a non-human organism, like a microorganism or a plant or a part thereof, comprises increasing or generating the activity of a gene product with the activity of a gene product conferring the activity of “b2474-protein”, especially from Escherichia coli or its functional equivalent or its homolog, e.g. the increase of
[65347] (a) a gene product of a gene comprising the nucleic acid molecule as shown in the respective line in column 5 of Table I (whereby the respective line disclose in column 7 the fine chemical zeaxanthin), application no. 13, preferably the coding region thereof, or a homolog or a fragment thereof, and being depicted in the same respective line as said B2474, or a functional equivalent or a homolog thereof as shown in column 8 of Table I, application no. 13, preferably the coding region thereof, particularly a homolog or functional equivalent as shown in column 8 of Table I B, application no. 13, and being depicted in the same respective line as said B2474, and preferably the activity is increased non-targeted, or
[65348] (b) a polypeptide comprising a polypeptide, a consensus sequence or at least a polypeptide motif as shown in the respective line in column 5 of Table II or in column 8 of Table IV, application no. 13, respectively, and being depicted in the same respective line as said B2474, or a functional equivalent or a homolog thereof as depicted in column 8 of Table II, application no. 13, preferably a homolog or functional equivalent as depicted in column 8 of Table II B, application no. 13, and being depicted in the same respective line as said B2474, and preferably the activity is increased non-targeted, whereby the respective line disclose in column 7 the fine chemical zeaxanthin.

[65349] Accordingly, in one embodiment, the molecule which activity is to be increased in the process of the invention is the gene product with an activity as a “b2474-protein”, preferably it is the molecule of section (a) or (b) of this paragraph.

[65350] In particular, it was observed that in plants, especially in Arabidopsis thaliana, increasing or generating the activity of a gene product non-targeted with the activity of a “b2474-protein”, preferably being encoded by a gene comprising the nucleic acid sequence SEQ ID NO. 40329, preferably the coding region thereof, conferred the production of or the increase in zeaxanthin compared with the wild type control.

[65351] The nucleic acid sequence of B2714 from Escherichia coli, e.g. as shown in the respective line in column 5 of Table I, application no. 13, has been published in B. And the activity of the gene product thereof is the activity of transcriptional regulator.

[65352] Accordingly, in one embodiment, the process of the present invention for producing zeaxanthin in a non-human organism, like a microorganism or a plant or a part thereof, comprises increasing or generating the activity of a gene product with the activity of a gene product conferring the activity of “transcriptional regulator”, especially from Escherichia coli or its functional equivalent or its homolog, e.g. the increase of
[65353] (a) a gene product of a gene comprising the nucleic acid molecule as shown in the respective line in column 5 of Table I (whereby the respective line disclose in column 7 the fine chemical zeaxanthin), application no. 13, preferably the coding region thereof, or a homolog or a fragment thereof, and being depicted in the same respective line as said B2714, or a functional equivalent or a homolog thereof as shown in column 8 of Table I, application no. 13, preferably the coding region thereof, particularly a homolog or functional equivalent as shown in column 8 of Table I B, application no. 13, and being depicted in the same respective line as said B2714, and preferably the activity is increased non-targeted, or
[65354] (b) a polypeptide comprising a polypeptide, a consensus sequence or at least a polypeptide motif as shown in the respective line in column 5 of Table II or in column 8 of Table IV, application no. 13, respectively, and being depicted in the same respective line as said B2714, or a functional equivalent or a homolog thereof as depicted in column 8 of Table II, application no. 13, preferably a homolog or functional equivalent as depicted in column 8 of Table II B, application no. 13, and being depicted in the same respective line as said B2714, and preferably the activity is increased non-targeted, whereby the respective line disclose in column 7 the fine chemical zeaxanthin.

[65355] Accordingly, in one embodiment, the molecule which activity is to be increased in the process of the invention is the gene product with an activity as a “transcriptional regulator”, preferably it is the molecule of section (a) or (b) of this paragraph.

[65356] In particular, it was observed that in plants, especially in Arabidopsis thaliana, increasing or generating the activity of a gene product non-targeted with the activity of a “transcriptional regulator”, preferably being encoded by a gene comprising the nucleic acid sequence SEQ ID NO. 40741, preferably the coding region thereof, conferred the production of or the increase in zeaxanthin compared with the wild type control.

[65357] The nucleic acid sequence of B2790 from Escherichia coli, e.g. as shown in the respective line in column 5 of Table I, application no. 13, has been published in B. And the activity of the gene product thereof is the activity of flavodoxin.

[65358] Accordingly, in one embodiment, the process of the present invention for producing cryptoxanthin in a non-human organism, like a microorganism or a plant or a part thereof, comprises increasing or generating the activity of a gene product with the activity of a gene product conferring the activity of “flavodoxin”, especially from Escherichia coli or its functional equivalent or its homolog, e.g. the increase of
[65359] (a) a gene product of a gene comprising the nucleic acid molecule as shown in the respective line in column 5 of Table I (whereby the respective line disclose in column 7 the fine chemical cryptoxanthin), application no. 13, preferably the coding region thereof, or a homolog or a fragment thereof, and being depicted in the same respective line as said B2790, or a functional equivalent or a homolog thereof as shown in column 8 of Table I, application no. 13, preferably the coding region thereof, particularly a homolog or functional equivalent as shown in column 8 of Table I B, application no. 13, and being depicted in the same respective line as said B2790, and preferably the activity is increased non-targeted, or
[65360] (b) a polypeptide comprising a polypeptide, a consensus sequence or at least a polypeptide motif as shown in the respective line in column 5 of Table II or in column 8 of Table IV, application no. 13, respectively, and being depicted in the same respective line as said B2790, or a functional equivalent or a homolog thereof as depicted in column 8 of Table II, application no. 13, preferably a homolog or functional equivalent as depicted in column 8 of Table II B, application no. 13, and being depicted in the same respective line as said B2790, and preferably the activity is increased non-targeted, whereby the respective line disclose in column 7 the fine chemical cryptoxanthin.

[65361] Accordingly, in one embodiment, the molecule which activity is to be increased in the process of the invention is the gene product with an activity as a “flavodoxin”, preferably it is the molecule of section (a) or (b) of this paragraph.

[65362] In particular, it was observed that in plants, especially in Arabidopsis thaliana, increasing or generating the activity of a gene product non-targeted with the activity of a “flavodoxin”, preferably being encoded by a gene comprising the nucleic acid sequence SEQ ID NO. 115719, preferably the coding region thereof, conferred the production of or the increase in cryptoxanthin compared with the wild type control.

[65363] The nucleic acid sequence of B2914 from Escherichia coli, e.g. as shown in the respective line in column 5 of Table I, application no. 13, has been published in B. And the activity of the gene product thereof is the activity of ribosephosphate isomerase, constitutive.

[65364] Accordingly, in one embodiment, the process of the present invention for producing violaxanthin in a non-human organism, like a microorganism or a plant or a part thereof, comprises increasing or generating the activity of a gene product with the activity of a gene product conferring the activity of “ribosephosphate isomerase, constitutive”, especially from Escherichia coli or its functional equivalent or its homolog, e.g. the increase of
[65365] (a) a gene product of a gene comprising the nucleic acid molecule as shown in the respective line in column 5 of Table I (whereby the respective line disclose in column 7 the fine chemical violaxanthin), application no. 13, preferably the coding region thereof, or a homolog or a fragment thereof, and being depicted in the same respective line as said B2914, or a functional equivalent or a homolog thereof as shown in column 8 of Table I, application no. 13, preferably the coding region thereof, particularly a homolog or functional equivalent as shown in column 8 of Table I B, application no. 13, and being depicted in the same respective line as said B2914, and preferably the activity is increased non-targeted, or
[65366] (b) a polypeptide comprising a polypeptide, a consensus sequence or at least a polypeptide motif as shown in the respective line in column 5 of Table II or in column 8 of Table IV, application no. 13, respectively, and being depicted in the same respective line as said B2914, or a functional equivalent or a homolog thereof as depicted in column 8 of Table II, application no. 13, preferably a homolog or functional equivalent as depicted in column 8 of Table II B, application no. 13, and being depicted in the same respective line as said B2914, and preferably the activity is increased non-targeted, whereby the respective line disclose in column 7 the fine chemical violaxanthin.

[65367] Accordingly, in one embodiment, the molecule which activity is to be increased in the process of the invention is the gene product with an activity as a “ribosephosphate isomerase, constitutive”, preferably it is the molecule of section (a) or (b) of this paragraph.

[65368] In particular, it was observed that in plants, especially in Arabidopsis thaliana, increasing or generating the activity of a gene product non-targeted with the activity of a “ribosephosphate isomerase, constitutive”, preferably being encoded by a gene comprising the nucleic acid sequence SEQ ID NO. 41073, preferably the coding region thereof, conferred the production of or the increase in violaxanthin compared with the wild type control.

[65369] The nucleic acid sequence of B3256 from Escherichia coli, e.g. as shown in the respective line in column 5 of Table I, application no. 13, has been published in B. And the activity of the gene product thereof is the activity of acetyl CoA carboxylase.

[65370] Accordingly, in one embodiment, the process of the present invention for producing violaxanthin in a non-human organism, like a microorganism or a plant or a part thereof, comprises increasing or generating the activity of a gene product with the activity of a gene product conferring the activity of “acetyl CoA carboxylase”, especially from Escherichia coli or its functional equivalent or its homolog, e.g. the increase of
[65371] (a) a gene product of a gene comprising the nucleic acid molecule as shown in the respective line in column 5 of Table I (whereby the respective line disclose in column 7 the fine chemical violaxanthin), application no. 13, preferably the coding region thereof, or a homolog or a fragment thereof, and being depicted in the same respective line as said B3256, or a functional equivalent or a homolog thereof as shown in column 8 of Table I, application no. 13, preferably the coding region thereof, particularly a homolog or functional equivalent as shown in column 8 of Table I B, application no. 13, and being depicted in the same respective line as said B3256, and preferably the activity is increased non-targeted, or
[65372] (b) a polypeptide comprising a polypeptide, a consensus sequence or at least a polypeptide motif as shown in the respective line in column 5 of Table II or in column 8 of Table IV, application no. 13, respectively, and being depicted in the same respective line as said B3256, or a functional equivalent or a homolog thereof as depicted in column 8 of Table II, application no. 13, preferably a homolog or functional equivalent as depicted in column 8 of Table II B, application no. 13, and being depicted in the same respective line as said B3256, and preferably the activity is increased non-targeted, whereby the respective line disclose in column 7 the fine chemical violaxanthin.

[65373] Accordingly, in one embodiment, the molecule which activity is to be increased in the process of the invention is the gene product with an activity as a “acetyl CoA carboxylase”, preferably it is the molecule of section (a) or (b) of this paragraph.

[65374] In particular, it was observed that in plants, especially in Arabidopsis thaliana, increasing or generating the activity of a gene product non-targeted with the activity of a “acetyl CoA carboxylase”, preferably being encoded by a gene comprising the nucleic acid sequence SEQ ID NO. 9492, preferably the coding region thereof, conferred the production of or the increase in violaxanthin compared with the wild type control.

[65375] The nucleic acid sequence of B3346 from Escherichia coli, e.g. as shown in the respective line in column 5 of Table I, application no. 13, has been published in B. And the activity of the gene product thereof is the activity of b3346-protein.

[65376] Accordingly, in one embodiment, the process of the present invention for producing cryptoxanthin in a non-human organism, like a microorganism or a plant or a part thereof, comprises increasing or generating the activity of a gene product with the activity of a gene product conferring the activity of “b3346-protein”, especially from Escherichia coli or its functional equivalent or its homolog, e.g. the increase of
[65377] (a) a gene product of a gene comprising the nucleic acid molecule as shown in the respective line in column 5 of Table I (whereby the respective line disclose in column 7 the fine chemical cryptoxanthin), application no. 13, preferably the coding region thereof, or a homolog or a fragment thereof, and being depicted in the same respective line as said B3346, or a functional equivalent or a homolog thereof as shown in column 8 of Table I, application no. 13, preferably the coding region thereof, particularly a homolog or functional equivalent as shown in column 8 of Table I B, application no. 13, and being depicted in the same respective line as said B3346, and preferably the activity is increased non-targeted, or
[65378] (b) a polypeptide comprising a polypeptide, a consensus sequence or at least a polypeptide motif as shown in the respective line in column 5 of Table II or in column 8 of Table IV, application no. 13, respectively, and being depicted in the same respective line as said B3346, or a functional equivalent or a homolog thereof as depicted in column 8 of Table II, application no. 13, preferably a homolog or functional equivalent as depicted in column 8 of Table II B, application no. 13, and being depicted in the same respective line as said B3346, and preferably the activity is increased non-targeted, whereby the respective line disclose in column 7 the fine chemical cryptoxanthin.

[65379] Accordingly, in one embodiment, the molecule which activity is to be increased in the process of the invention is the gene product with an activity as a “b3346-protein”, preferably it is the molecule of section (a) or (b) of this paragraph.

[65380] In particular, it was observed that in plants, especially in Arabidopsis thaliana, increasing or generating the activity of a gene product non-targeted with the activity of a “b3346-protein”, preferably being encoded by a gene comprising the nucleic acid sequence SEQ ID NO. 10104, preferably the coding region thereof, conferred the production of or the increase in cryptoxanthin compared with the wild type control.

[65381] The nucleic acid sequence of B3774 from Escherichia coli, e.g. as shown in the respective line in column 5 of Table I, application no. 13, has been published in B. And the activity of the gene product thereof is the activity of ketol-acid reductoisomerase.

[65382] Accordingly, in one embodiment, the process of the present invention for producing violaxanthin in a non-human organism, like a microorganism or a plant or a part thereof, comprises increasing or generating the activity of a gene product with the activity of a gene product conferring the activity of “ketol-acid reductoisomerase”, especially from Escherichia coli or its functional equivalent or its homolog, e.g. the increase of
[65383] (a) a gene product of a gene comprising the nucleic acid molecule as shown in the respective line in column 5 of Table I (whereby the respective line disclose in column 7 the fine chemical violaxanthin), application no. 13, preferably the coding region thereof, or a homolog or a fragment thereof, and being depicted in the same respective line as said B3774, or a functional equivalent or a homolog thereof as shown in column 8 of Table I, application no. 13, preferably the coding region thereof, particularly a homolog or functional equivalent as shown in column 8 of Table I B, application no. 13, and being depicted in the same respective line as said B3774, and preferably the activity is increased non-targeted, or
[65384] (b) a polypeptide comprising a polypeptide, a consensus sequence or at least a polypeptide motif as shown in the respective line in column 5 of Table II or in column 8 of Table IV, application no. 13, respectively, and being depicted in the same respective line as said B3774, or a functional equivalent or a homolog thereof as depicted in column 8 of Table II, application no. 13, preferably a homolog or functional equivalent as depicted in column 8 of Table II B, application no. 13, and being depicted in the same respective line as said B3774, and preferably the activity is increased non-targeted, whereby the respective line disclose in column 7 the fine chemical violaxanthin.

[65385] Accordingly, in one embodiment, the molecule which activity is to be increased in the process of the invention is the gene product with an activity as a “ketol-acid reductoisomerase”, preferably it is the molecule of section (a) or (b) of this paragraph.

[65386] In particular, it was observed that in plants, especially in Arabidopsis thaliana, increasing or generating the activity of a gene product non-targeted with the activity of a “ketol-acid reductoisomerase”, preferably being encoded by a gene comprising the nucleic acid sequence SEQ ID NO. 94386, preferably the coding region thereof, conferred the production of or the increase in violaxanthin compared with the wild type control.

[65387] The nucleic acid sequence of B3817 from Escherichia coli, e.g. as shown in the respective line in column 5 of Table I, application no. 13, has been published in B. And the activity of the gene product thereof is the activity of b3817-protein.

[65388] Accordingly, in one embodiment, the process of the present invention for producing cryptoxanthin in a non-human organism, like a microorganism or a plant or a part thereof, comprises increasing or generating the activity of a gene product with the activity of a gene product conferring the activity of “b3817-protein”, especially from Escherichia coli or its functional equivalent or its homolog, e.g. the increase of
[65389] (a) a gene product of a gene comprising the nucleic acid molecule as shown in the respective line in column 5 of Table I (whereby the respective line disclose in column 7 the fine chemical cryptoxanthin), application no. 13, preferably the coding region thereof, or a homolog or a fragment thereof, and being depicted in the same respective line as said B3817, or a functional equivalent or a homolog thereof as shown in column 8 of Table I, application no. 13, preferably the coding region thereof, particularly a homolog or functional equivalent as shown in column 8 of Table I B, application no. 13, and being depicted in the same respective line as said B3817, and preferably the activity is increased non-targeted, or
[65390] (b) a polypeptide comprising a polypeptide, a consensus sequence or at least a polypeptide motif as shown in the respective line in column 5 of Table II or in column 8 of Table IV, application no. 13, respectively, and being depicted in the same respective line as said B3817, or a functional equivalent or a homolog thereof as depicted in column 8 of Table II, application no. 13, preferably a homolog or functional equivalent as depicted in column 8 of Table II B, application no. 13, and being depicted in the same respective line as said B3817, and preferably the activity is increased non-targeted, whereby the respective line disclose in column 7 the fine chemical cryptoxanthin.

[65391] Accordingly, in one embodiment, the molecule which activity is to be increased in the process of the invention is the gene product with an activity as a “b3817-protein”, preferably it is the molecule of section (a) or (b) of this paragraph.

[65392] In particular, it was observed that in plants, especially in Arabidopsis thaliana, increasing or generating the activity of a gene product non-targeted with the activity of a “b3817-protein”, preferably being encoded by a gene comprising the nucleic acid sequence SEQ ID NO. 10708, preferably the coding region thereof, conferred the production of or the increase in cryptoxanthin compared with the wild type control.

[65393] The nucleic acid sequence of B3908 from Escherichia coli, e.g. as shown in the respective line in column 5 of Table I, application no. 13, has been published in B. And the activity of the gene product thereof is the activity of superoxide dismutase.

[65394] Accordingly, in one embodiment, the process of the present invention for producing violaxanthin in a non-human organism, like a microorganism or a plant or a part thereof, comprises increasing or generating the activity of a gene product with the activity of a gene product conferring the activity of “superoxide dismutase”, especially from Escherichia coli or its functional equivalent or its homolog, e.g. the increase of
[65395] (a) a gene product of a gene comprising the nucleic acid molecule as shown in the respective line in column 5 of Table I (whereby the respective line disclose in column 7 the fine chemical violaxanthin), application no. 13, preferably the coding region thereof, or a homolog or a fragment thereof, and being depicted in the same respective line as said B3908, or a functional equivalent or a homolog thereof as shown in column 8 of Table I, application no. 13, preferably the coding region thereof, particularly a homolog or functional equivalent as shown in column 8 of Table I B, application no. 13, and being depicted in the same respective line as said B3908, and preferably the activity is increased plastidic, or
[65396] (b) a polypeptide comprising a polypeptide, a consensus sequence or at least a polypeptide motif as shown in the respective line in column 5 of Table II or in column 8 of Table IV, application no. 13, respectively, and being depicted in the same respective line as said B3908, or a functional equivalent or a homolog thereof as depicted in column 8 of Table II, application no. 13, preferably a homolog or functional equivalent as depicted in column 8 of Table II B, application no. 13, and being depicted in the same respective line as said B3908, and preferably the activity is increased plastidic, whereby the respective line disclose in column 7 the fine chemical violaxanthin.

[65397] Accordingly, in one embodiment, the molecule which activity is to be increased in the process of the invention is the gene product with an activity as a “superoxide dismutase”, preferably it is the molecule of section (a) or (b) of this paragraph.

[65398] In particular, it was observed that in plants, especially in Arabidopsis thaliana, increasing or generating the activity of a gene product plastidic with the activity of a “superoxide dismutase”, preferably being encoded by a gene comprising the nucleic acid sequence SEQ ID NO. 105659, preferably the coding region thereof, conferred the production of or the increase in violaxanthin compared with the wild type control.

[65399] The nucleic acid sequence of B4012 from Escherichia coli, e.g. as shown in the respective line in column 5 of Table I, application no. 13, has been published in B. And the activity of the gene product thereof is the activity of acetyltransferase.

[65400] Accordingly, in one embodiment, the process of the present invention for producing violaxanthin in a non-human organism, like a microorganism or a plant or a part thereof, comprises increasing or generating the activity of a gene product with the activity of a gene product conferring the activity of “acetyltransferase”, especially from Escherichia coli or its functional equivalent or its homolog, e.g. the increase of
[65401] (a) a gene product of a gene comprising the nucleic acid molecule as shown in the respective line in column 5 of Table I (whereby the respective line disclose in column 7 the fine chemical violaxanthin), application no. 13, preferably the coding region thereof, or a homolog or a fragment thereof, and being depicted in the same respective line as said B4012, or a functional equivalent or a homolog thereof as shown in column 8 of Table I, application no. 13, preferably the coding region thereof, particularly a homolog or functional equivalent as shown in column 8 of Table I B, application no. 13, and being depicted in the same respective line as said B4012, and preferably the activity is increased non-targeted, or
[65402] (b) a polypeptide comprising a polypeptide, a consensus sequence or at least a polypeptide motif as shown in the respective line in column 5 of Table II or in column 8 of Table IV, application no. 13, respectively, and being depicted in the same respective line as said B4012, or a functional equivalent or a homolog thereof as depicted in column 8 of Table II, application no. 13, preferably a homolog or functional equivalent as depicted in column 8 of Table II B, application no. 13, and being depicted in the same respective line as said B4012, and preferably the activity is increased non-targeted, whereby the respective line disclose in column 7 the fine chemical violaxanthin.

[65403] Accordingly, in one embodiment, the molecule which activity is to be increased in the process of the invention is the gene product with an activity as a “acetyltransferase”, preferably it is the molecule of section (a) or (b) of this paragraph.

[65404] In particular, it was observed that in plants, especially in Arabidopsis thaliana, increasing or generating the activity of a gene product non-targeted with the activity of a “acetyltransferase”, preferably being encoded by a gene comprising the nucleic acid sequence SEQ ID NO. 44378, preferably the coding region thereof, conferred the production of or the increase in violaxanthin compared with the wild type control.

[65405] The nucleic acid sequence of B4120 from Escherichia coli, e.g. as shown in the respective line in column 5 of Table I, application no. 13, has been published in B. And the activity of the gene product thereof is the activity of melibiose carrier protein.

[65406] Accordingly, in one embodiment, the process of the present invention for producing cryptoxanthin in a non-human organism, like a microorganism or a plant or a part thereof, comprises increasing or generating the activity of a gene product with the activity of a gene product conferring the activity of “melibiose carrier protein”, especially from Escherichia coli or its functional equivalent or its homolog, e.g. the increase of
[65407] (a) a gene product of a gene comprising the nucleic acid molecule as shown in the respective line in column 5 of Table I (whereby the respective line disclose in column 7 the fine chemical cryptoxanthin), application no. 13, preferably the coding region thereof, or a homolog or a fragment thereof, and being depicted in the same respective line as said B4120, or a functional equivalent or a homolog thereof as shown in column 8 of Table I, application no. 13, preferably the coding region thereof, particularly a homolog or functional equivalent as shown in column 8 of Table I B, application no. 13, and being depicted in the same respective line as said B4120, and preferably the activity is increased non-targeted, or
[65408] (b) a polypeptide comprising a polypeptide, a consensus sequence or at least a polypeptide motif as shown in the respective line in column 5 of Table II or in column 8 of Table IV, application no. 13, respectively, and being depicted in the same respective line as said B4120, or a functional equivalent or a homolog thereof as depicted in column 8 of Table II, application no. 13, preferably a homolog or functional equivalent as depicted in column 8 of Table II B, application no. 13, and being depicted in the same respective line as said B4120, and preferably the activity is increased non-targeted, whereby the respective line disclose in column 7 the fine chemical cryptoxanthin.

[65409] Accordingly, in one embodiment, the molecule which activity is to be increased in the process of the invention is the gene product with an activity as a “melibiose carrier protein”, preferably it is the molecule of section (a) or (b) of this paragraph.

[65410] In particular, it was observed that in plants, especially in Arabidopsis thaliana, increasing or generating the activity of a gene product non-targeted with the activity of a “melibiose carrier protein”, preferably being encoded by a gene comprising the nucleic acid sequence SEQ ID NO. 130673, preferably the coding region thereof, conferred the production of or the increase in cryptoxanthin compared with the wild type control.

[65411] The nucleic acid sequence of B4120 from Escherichia coli, e.g. as shown in the respective line in column 5 of Table I, application no. 13, has been published in B. And the activity of the gene product thereof is the activity of melibiose carrier protein.

[65412] Accordingly, in one embodiment, the process of the present invention for producing zeaxanthin in a non-human organism, like a microorganism or a plant or a part thereof, comprises increasing or generating the activity of a gene product with the activity of a gene product conferring the activity of “melibiose carrier protein”, especially from Escherichia coli or its functional equivalent or its homolog, e.g. the increase of
[65413] (a) a gene product of a gene comprising the nucleic acid molecule as shown in the respective line in column 5 of Table I (whereby the respective line disclose in column 7 the fine chemical zeaxanthin), application no. 13, preferably the coding region thereof, or a homolog or a fragment thereof, and being depicted in the same respective line as said B4120, or a functional equivalent or a homolog thereof as shown in column 8 of Table I, application no. 13, preferably the coding region thereof, particularly a homolog or functional equivalent as shown in column 8 of Table I B, application no. 13, and being depicted in the same respective line as said B4120, and preferably the activity is increased non-targeted, or
[65414] (b) a polypeptide comprising a polypeptide, a consensus sequence or at least a polypeptide motif as shown in the respective line in column 5 of Table II or in column 8 of Table IV, application no. 13, respectively, and being depicted in the same respective line as said B4120, or a functional equivalent or a homolog thereof as depicted in column 8 of Table II, application no. 13, preferably a homolog or functional equivalent as depicted in column 8 of Table II B, application no. 13, and being depicted in the same respective line as said B4120, and preferably the activity is increased non-targeted, whereby the respective line disclose in column 7 the fine chemical zeaxanthin.

[65415] Accordingly, in one embodiment, the molecule which activity is to be increased in the process of the invention is the gene product with an activity as a “melibiose carrier protein”, preferably it is the molecule of section (a) or (b) of this paragraph.

[65416] In particular, it was observed that in plants, especially in Arabidopsis thaliana, increasing or generating the activity of a gene product non-targeted with the activity of a “melibiose carrier protein”, preferably being encoded by a gene comprising the nucleic acid sequence SEQ ID NO. 130673, preferably the coding region thereof, conferred the production of or the increase in zeaxanthin compared with the wild type control.

[65417] The nucleic acid sequence of B4384 from Escherichia coli, e.g. as shown in the respective line in column 5 of Table I, application no. 13, has been published in B. And the activity of the gene product thereof is the activity of purine-nucleoside phosphorylase.

[65418] Accordingly, in one embodiment, the process of the present invention for producing violaxanthin in a non-human organism, like a microorganism or a plant or a part thereof, comprises increasing or generating the activity of a gene product with the activity of a gene product conferring the activity of “purine-nucleoside phosphorylase”, especially from Escherichia coli or its functional equivalent or its homolog, e.g. the increase of
[65419] (a) a gene product of a gene comprising the nucleic acid molecule as shown in the respective line in column 5 of Table I (whereby the respective line disclose in column 7 the fine chemical violaxanthin), application no. 13, preferably the coding region thereof, or a homolog or a fragment thereof, and being depicted in the same respective line as said B4384, or a functional equivalent or a homolog thereof as shown in column 8 of Table I, application no. 13, preferably the coding region thereof, particularly a homolog or functional equivalent as shown in column 8 of Table I B, application no. 13, and being depicted in the same respective line as said B4384, and preferably the activity is increased non-targeted, or
[65420] (b) a polypeptide comprising a polypeptide, a consensus sequence or at least a polypeptide motif as shown in the respective line in column 5 of Table II or in column 8 of Table IV, application no. 13, respectively, and being depicted in the same respective line as said B4384, or a functional equivalent or a homolog thereof as depicted in column 8 of Table II, application no. 13, preferably a homolog or functional equivalent as depicted in column 8 of Table II B, application no. 13, and being depicted in the same respective line as said B4384, and preferably the activity is increased non-targeted, whereby the respective line disclose in column 7 the fine chemical violaxanthin.

[65421] Accordingly, in one embodiment, the molecule which activity is to be increased in the process of the invention is the gene product with an activity as a “purine-nucleoside phosphorylase”, preferably it is the molecule of section (a) or (b) of this paragraph.

[65422] In particular, it was observed that in plants, especially in Arabidopsis thaliana, increasing or generating the activity of a gene product non-targeted with the activity of a “purine-nucleoside phosphorylase”, preferably being encoded by a gene comprising the nucleic acid sequence SEQ ID NO. 45556, preferably the coding region thereof, conferred the production of or the increase in violaxanthin compared with the wild type control.

[65423] The nucleic acid sequence of GM02LC19289 from Glycine max, e.g. as shown in the respective line in column 5 of Table I, application no. 13, is unpublished. And the activity of the gene product thereof is the activity of transcription factor.

[65424] Accordingly, in one embodiment, the process of the present invention for producing zeaxanthin in a non-human organism, like a microorganism or a plant or a part thereof, comprises increasing or generating the activity of a gene product with the activity of a gene product conferring the activity of “transcription factor”, especially from Glycine max or its functional equivalent or its homolog, e.g. the increase of
[65425] (a) a gene product of a gene comprising the nucleic acid molecule as shown in the respective line in column 5 of Table I (whereby the respective line disclose in column 7 the fine chemical zeaxanthin), application no. 13, preferably the coding region thereof, or a homolog or a fragment thereof, and being depicted in the same respective line as said GM02LC19289, or a functional equivalent or a homolog thereof as shown in column 8 of Table I, application no. 13, preferably the coding region thereof, particularly a homolog or functional equivalent as shown in column 8 of Table I B, application no. 13, and being depicted in the same respective line as said GM02LC19289, and preferably the activity is increased non-targeted, or
[65426] (b) a polypeptide comprising a polypeptide, a consensus sequence or at least a polypeptide motif as shown in the respective line in column 5 of Table II or in column 8 of Table IV, application no. 13, respectively, and being depicted in the same respective line as said GM02LC19289, or a functional equivalent or a homolog thereof as depicted in column 8 of Table II, application no. 13, preferably a homolog or functional equivalent as depicted in column 8 of Table I I B, application no. 13, and being depicted in the same respective line as said GM02LC19289, and preferably the activity is increased non-targeted, whereby the respective line disclose in column 7 the fine chemical zeaxanthin.

[65427] Accordingly, in one embodiment, the molecule which activity is to be increased in the process of the invention is the gene product with an activity as a “transcription factor”, preferably it is the molecule of section (a) or (b) of this paragraph.

[65428] In particular, it was observed that in plants, especially in Arabidopsis thaliana, increasing or generating the activity of a gene product non-targeted with the activity of a “transcription factor”, preferably being encoded by a gene comprising the nucleic acid sequence SEQ ID NO. 46751, preferably the coding region thereof, conferred the production of or the increase in zeaxanthin compared with the wild type control.

[65429] The nucleic acid sequence of Sll1185 from Synechocystis sp., e.g. as shown in the respective line in column 5 of Table I, application no. 13, has been published in C. And the activity of the gene product thereof is the activity of coproporphyrinogen oxidase.

[65430] Accordingly, in one embodiment, the process of the present invention for producing cryptoxanthin in a non-human organism, like a microorganism or a plant or a part thereof, comprises increasing or generating the activity of a gene product with the activity of a gene product conferring the activity of “coproporphyrinogen oxidase”, especially from Synechocystis sp. or its functional equivalent or its homolog, e.g. the increase of
[65431] (a) a gene product of a gene comprising the nucleic acid molecule as shown in the respective line in column 5 of Table I (whereby the respective line disclose in column 7 the fine chemical cryptoxanthin), application no. 13, preferably the coding region thereof, or a homolog or a fragment thereof, and being depicted in the same respective line as said Sll1185, or a functional equivalent or a homolog thereof as shown in column 8 of Table I, application no. 13, preferably the coding region thereof, particularly a homolog or functional equivalent as shown in column 8 of Table I B, application no. 13, and being depicted in the same respective line as said Sll1185, and preferably the activity is increased non-targeted, or
[65432] (b) a polypeptide comprising a polypeptide, a consensus sequence or at least a polypeptide motif as shown in the respective line in column 5 of Table II or in column 8 of Table IV, application no. 13, respectively, and being depicted in the same respective line as said Sll1185, or a functional equivalent or a homolog thereof as depicted in column 8 of Table II, application no. 13, preferably a homolog or functional equivalent as depicted in column 8 of Table II B, application no. 13, and being depicted in the same respective line as said Sll1185, and preferably the activity is increased non-targeted, whereby the respective line disclose in column 7 the fine chemical cryptoxanthin.

[65433] Accordingly, in one embodiment, the molecule which activity is to be increased in the process of the invention is the gene product with an activity as a “coproporphyrinogen oxidase”, preferably it is the molecule of section (a) or (b) of this paragraph.

[65434] In particular, it was observed that in plants, especially in Arabidopsis thaliana, increasing or generating the activity of a gene product non-targeted with the activity of a “coproporphyrinogen oxidase”, preferably being encoded by a gene comprising the nucleic acid sequence SEQ ID NO. 53189, preferably the coding region thereof, conferred the production of or the increase in cryptoxanthin compared with the wild type control.

[65435] The nucleic acid sequence of Sll1185 from Synechocystis sp., e.g. as shown in the respective line in column 5 of Table I, application no. 13, has been published in C. And the activity of the gene product thereof is the activity of coproporphyrinogen oxidase.

[65436] Accordingly, in one embodiment, the process of the present invention for producing zeaxanthin in a non-human organism, like a microorganism or a plant or a part thereof, comprises increasing or generating the activity of a gene product with the activity of a gene product conferring the activity of “coproporphyrinogen oxidase”, especially from Synechocystis sp. or its functional equivalent or its homolog, e.g. the increase of
[65437] (a) a gene product of a gene comprising the nucleic acid molecule as shown in the respective line in column 5 of Table I (whereby the respective line disclose in column 7 the fine chemical zeaxanthin), application no. 13, preferably the coding region thereof, or a homolog or a fragment thereof, and being depicted in the same respective line as said Sll1185, or a functional equivalent or a homolog thereof as shown in column 8 of Table I, application no. 13, preferably the coding region thereof, particularly a homolog or functional equivalent as shown in column 8 of Table I B, application no. 13, and being depicted in the same respective line as said Sll1185, and preferably the activity is increased non-targeted, or
[65438] (b) a polypeptide comprising a polypeptide, a consensus sequence or at least a polypeptide motif as shown in the respective line in column 5 of Table II or in column 8 of Table IV, application no. 13, respectively, and being depicted in the same respective line as said Sll1185, or a functional equivalent or a homolog thereof as depicted in column 8 of Table II, application no. 13, preferably a homolog or functional equivalent as depicted in column 8 of Table II B, application no. 13, and being depicted in the same respective line as said Sll1185, and preferably the activity is increased non-targeted, whereby the respective line disclose in column 7 the fine chemical zeaxanthin.

[65439] Accordingly, in one embodiment, the molecule which activity is to be increased in the process of the invention is the gene product with an activity as a “coproporphyrinogen oxidase”, preferably it is the molecule of section (a) or (b) of this paragraph.

[65440] In particular, it was observed that in plants, especially in Arabidopsis thaliana, increasing or generating the activity of a gene product non-targeted with the activity of a “coproporphyrinogen oxidase”, preferably being encoded by a gene comprising the nucleic acid sequence SEQ ID NO. 53189, preferably the coding region thereof, conferred the production of or the increase in zeaxanthin compared with the wild type control.

[65441] The nucleic acid sequence of Slr1755 from Synechocystis sp., e.g. as shown in the respective line in column 5 of Table I, application no. 13, has been published in C. And the activity of the gene product thereof is the activity of glycerol-3-phosphate dehydrogenase.

[65442] Accordingly, in one embodiment, the process of the present invention for producing zeaxanthin in a non-human organism, like a microorganism or a plant or a part thereof, comprises increasing or generating the activity of a gene product with the activity of a gene product conferring the activity of “glycerol-3-phosphate dehydrogenase”, especially from Synechocystis sp. or its functional equivalent or its homolog, e.g. the increase of
[65443] (a) a gene product of a gene comprising the nucleic acid molecule as shown in the respective line in column 5 of Table I (whereby the respective line disclose in column 7 the fine chemical zeaxanthin), application no. 13, preferably the coding region thereof, or a homolog or a fragment thereof, and being depicted in the same respective line as said Slr1755, or a functional equivalent or a homolog thereof as shown in column 8 of Table I, application no. 13, preferably the coding region thereof, particularly a homolog or functional equivalent as shown in column 8 of Table I B, application no. 13, and being depicted in the same respective line as said Slr1755, and preferably the activity is increased plastidic, or
[65444] (b) a polypeptide comprising a polypeptide, a consensus sequence or at least a polypeptide motif as shown in the respective line in column 5 of Table II or in column 8 of Table IV, application no. 13, respectively, and being depicted in the same respective line as said Slr1755, or a functional equivalent or a homolog thereof as depicted in column 8 of Table II, application no. 13, preferably a homolog or functional equivalent as depicted in column 8 of Table II B, application no. 13, and being depicted in the same respective line as said Slr1755, and preferably the activity is increased plastidic, whereby the respective line disclose in column 7 the fine chemical zeaxanthin.

[65445] Accordingly, in one embodiment, the molecule which activity is to be increased in the process of the invention is the gene product with an activity as a “glycerol-3-phosphate dehydrogenase”, preferably it is the molecule of section (a) or (b) of this paragraph.

[65446] In particular, it was observed that in plants, especially in Arabidopsis thaliana, increasing or generating the activity of a gene product plastidic with the activity of a “glycerol-3-phosphate dehydrogenase”, preferably being encoded by a gene comprising the nucleic acid sequence SEQ ID NO. 58823, preferably the coding region thereof, conferred the production of or the increase in zeaxanthin compared with the wild type control.

[65447] The nucleic acid sequence of YCl026c-a from Saccharomyces cerevisiae, e.g. as shown in the respective line in column 5 of Table I, application no. 13, has been published in A. And the activity of the gene product thereof is the activity of YCL026C-A-protein.

[65448] Accordingly, in one embodiment, the process of the present invention for producing cryptoxanthin in a non-human organism, like a microorganism or a plant or a part thereof, comprises increasing or generating the activity of a gene product with the activity of a gene product conferring the activity of “YCL026C-A-protein”, especially from Saccharomyces cerevisiae or its functional equivalent or its homolog, e.g. the increase of
[65449] (a) a gene product of a gene comprising the nucleic acid molecule as shown in the respective line in column 5 of Table I (whereby the respective line disclose in column 7 the fine chemical cryptoxanthin), application no. 13, preferably the coding region thereof, or a homolog or a fragment thereof, and being depicted in the same respective line as said YCl026c-a, or a functional equivalent or a homolog thereof as shown in column 8 of Table I, application no. 13, preferably the coding region thereof, particularly a homolog or functional equivalent as shown in column 8 of Table I B, application no. 13, and being depicted in the same respective line as said YCl026c-a, and preferably the activity is increased non-targeted, or
[65450] (b) a polypeptide comprising a polypeptide, a consensus sequence or at least a polypeptide motif as shown in the respective line in column 5 of Table II or in column 8 of Table IV, application no. 13, respectively, and being depicted in the same respective line as said YCl026c-a, or a functional equivalent or a homolog thereof as depicted in column 8 of Table II, application no. 13, preferably a homolog or functional equivalent as depicted in column 8 of Table II B, application no. 13, and being depicted in the same respective line as said YCl026c-a, and preferably the activity is increased non-targeted, whereby the respective line disclose in column 7 the fine chemical cryptoxanthin.

[65451] Accordingly, in one embodiment, the molecule which activity is to be increased in the process of the invention is the gene product with an activity as a “YCL026C-A-protein”, preferably it is the molecule of section (a) or (b) of this paragraph.

[65452] In particular, it was observed that in plants, especially in Arabidopsis thaliana, increasing or generating the activity of a gene product non-targeted with the activity of a “YCL026C-A-protein”, preferably being encoded by a gene comprising the nucleic acid sequence SEQ ID NO. 63167, preferably the coding region thereof, conferred the production of or the increase in cryptoxanthin compared with the wild type control.

[65453] The nucleic acid sequence of Ydr131c from Saccharomyces cerevisiae, e.g. as shown in the respective line in column 5 of Table I, application no. 13, has been published in A. And the activity of the gene product thereof is the activity of F-box protein.

[65454] Accordingly, in one embodiment, the process of the present invention for producing cryptoxanthin in a non-human organism, like a microorganism or a plant or a part thereof, comprises increasing or generating the activity of a gene product with the activity of a gene product conferring the activity of “F-box protein”, especially from Saccharomyces cerevisiae or its functional equivalent or its homolog, e.g. the increase of
[65455] (a) a gene product of a gene comprising the nucleic acid molecule as shown in the respective line in column 5 of Table I (whereby the respective line disclose in column 7 the fine chemical cryptoxanthin), application no. 13, preferably the coding region thereof, or a homolog or a fragment thereof, and being depicted in the same respective line as said Ydr131c, or a functional equivalent or a homolog thereof as shown in column 8 of Table I, application no. 13, preferably the coding region thereof, particularly a homolog or functional equivalent as shown in column 8 of Table I B, application no. 13, and being depicted in the same respective line as said Ydr131c, and preferably the activity is increased plastidic, or
[65456] (b) a polypeptide comprising a polypeptide, a consensus sequence or at least a polypeptide motif as shown in the respective line in column 5 of Table II or in column 8 of Table IV, application no. 13, respectively, and being depicted in the same respective line as said Ydr131c, or a functional equivalent or a homolog thereof as depicted in column 8 of Table II, application no. 13, preferably a homolog or functional equivalent as depicted in column 8 of Table II B, application no. 13, and being depicted in the same respective line as said Ydr131c, and preferably the activity is increased plastidic, whereby the respective line disclose in column 7 the fine chemical cryptoxanthin.

[65457] Accordingly, in one embodiment, the molecule which activity is to be increased in the process of the invention is the gene product with an activity as a “F-box protein”, preferably it is the molecule of section (a) or (b) of this paragraph.

[65458] In particular, it was observed that in plants, especially in Arabidopsis thaliana, increasing or generating the activity of a gene product plastidic with the activity of a “F-box protein”, preferably being encoded by a gene comprising the nucleic acid sequence SEQ ID NO. 14706, preferably the coding region thereof, conferred the production of or the increase in cryptoxanthin compared with the wild type control.

[65459] The nucleic acid sequence of Yg1096w from Saccharomyces cerevisiae, e.g. as shown in the respective line in column 5 of Table I, application no. 13, has been published in A. And the activity of the gene product thereof is the activity of ygl096w-protein.

[65460] Accordingly, in one embodiment, the process of the present invention for producing cryptoxanthin in a non-human organism, like a microorganism or a plant or a part thereof, comprises increasing or generating the activity of a gene product with the activity of a gene product conferring the activity of “ygl096w-protein”, especially from Saccharomyces cerevisiae or its functional equivalent or its homolog, e.g. the increase of
[65461] (a) a gene product of a gene comprising the nucleic acid molecule as shown in the respective line in column 5 of Table I (whereby the respective line disclose in column 7 the fine chemical cryptoxanthin), application no. 13, preferably the coding region thereof, or a homolog or a fragment thereof, and being depicted in the same respective line as said Ygl096w, or a functional equivalent or a homolog thereof as shown in column 8 of Table I, application no. 13, preferably the coding region thereof, particularly a homolog or functional equivalent as shown in column 8 of Table I B, application no. 13, and being depicted in the same respective line as said Yg1096w, and preferably the activity is increased plastidic, or
[65462] (b) a polypeptide comprising a polypeptide, a consensus sequence or at least a polypeptide motif as shown in the respective line in column 5 of Table II or in column 8 of Table IV, application no. 13, respectively, and being depicted in the same respective line as said Ygl096w, or a functional equivalent or a homolog thereof as depicted in column 8 of Table II, application no. 13, preferably a homolog or functional equivalent as depicted in column 8 of Table II B, application no. 13, and being depicted in the same respective line as said Ygl096w, and preferably the activity is increased plastidic, whereby the respective line disclose in column 7 the fine chemical cryptoxanthin.

[65463] Accordingly, in one embodiment, the molecule which activity is to be increased in the process of the invention is the gene product with an activity as a “ygl096w-protein”, preferably it is the molecule of section (a) or (b) of this paragraph.

[65464] In particular, it was observed that in plants, especially in Arabidopsis thaliana, increasing or generating the activity of a gene product plastidic with the activity of a “ygl096w-protein”, preferably being encoded by a gene comprising the nucleic acid sequence SEQ ID NO. 90278, preferably the coding region thereof, conferred the production of or the increase in cryptoxanthin compared with the wild type control.

[65465] The nucleic acid sequence of Ygl256w from Saccharomyces cerevisiae, e.g. as shown in the respective line in column 5 of Table I, application no. 13, has been published in A. And the activity of the gene product thereof is the activity of alcohol dehydrogenase.

[65466] Accordingly, in one embodiment, the process of the present invention for producing cryptoxanthin in a non-human organism, like a microorganism or a plant or a part thereof, comprises increasing or generating the activity of a gene product with the activity of a gene product conferring the activity of “alcohol dehydrogenase”, especially from Saccharomyces cerevisiae or its functional equivalent or its homolog, e.g. the increase of
[65467] (a) a gene product of a gene comprising the nucleic acid molecule as shown in the respective line in column 5 of Table I (whereby the respective line disclose in column 7 the fine chemical cryptoxanthin), application no. 13, preferably the coding region thereof, or a homolog or a fragment thereof, and being depicted in the same respective line as said Ygl256w, or a functional equivalent or a homolog thereof as shown in column 8 of Table I, application no. 13, preferably the coding region thereof, particularly a homolog or functional equivalent as shown in column 8 of Table I B, application no. 13, and being depicted in the same respective line as said Ygl256w, and preferably the activity is increased plastidic, or
[65468] (b) a polypeptide comprising a polypeptide, a consensus sequence or at least a polypeptide motif as shown in the respective line in column 5 of Table II or in column 8 of Table IV, application no. 13, respectively, and being depicted in the same respective line as said Ygl256w, or a functional equivalent or a homolog thereof as depicted in column 8 of Table II, application no. 13, preferably a homolog or functional equivalent as depicted in column 8 of Table II B, application no. 13, and being depicted in the same respective line as said Ygl256w, and preferably the activity is increased plastidic, whereby the respective line disclose in column 7 the fine chemical cryptoxanthin.

[65469] Accordingly, in one embodiment, the molecule which activity is to be increased in the process of the invention is the gene product with an activity as a “alcohol dehydrogenase”, preferably it is the molecule of section (a) or (b) of this paragraph.

[65470] In particular, it was observed that in plants, especially in Arabidopsis thaliana, increasing or generating the activity of a gene product plastidic with the activity of a “alcohol dehydrogenase”, preferably being encoded by a gene comprising the nucleic acid sequence SEQ ID NO. 130742, preferably the coding region thereof, conferred the production of or the increase in cryptoxanthin compared with the wild type control.

[65471] The nucleic acid sequence of Ykr072c from Saccharomyces cerevisiae, e.g. as shown in the respective line in column 5 of Table I, application no. 13, has been published in A. And the activity of the gene product thereof is the activity of halotolerance protein.

[65472] Accordingly, in one embodiment, the process of the present invention for producing cryptoxanthin in a non-human organism, like a microorganism or a plant or a part thereof, comprises increasing or generating the activity of a gene product with the activity of a gene product conferring the activity of “halotolerance protein”, especially from Saccharomyces cerevisiae or its functional equivalent or its homolog, e.g. the increase of
[65473] (a) a gene product of a gene comprising the nucleic acid molecule as shown in the respective line in column 5 of Table I (whereby the respective line disclose in column 7 the fine chemical cryptoxanthin), application no. 13, preferably the coding region thereof, or a homolog or a fragment thereof, and being depicted in the same respective line as said Ykr072c, or a functional equivalent or a homolog thereof as shown in column 8 of Table I, application no. 13, preferably the coding region thereof, particularly a homolog or functional equivalent as shown in column 8 of Table I B, application no. 13, and being depicted in the same respective line as said Ykr072c, and preferably the activity is increased non-targeted, or
[65474] (b) a polypeptide comprising a polypeptide, a consensus sequence or at least a polypeptide motif as shown in the respective line in column 5 of Table II or in column 8 of Table IV, application no. 13, respectively, and being depicted in the same respective line as said Ykr072c, or a functional equivalent or a homolog thereof as depicted in column 8 of Table II, application no. 13, preferably a homolog or functional equivalent as depicted in column 8 of Table II B, application no. 13, and being depicted in the same respective line as said Ykr072c, and preferably the activity is increased non-targeted, whereby the respective line disclose in column 7 the fine chemical cryptoxanthin.

[65475] Accordingly, in one embodiment, the molecule which activity is to be increased in the process of the invention is the gene product with an activity as a “halotolerance protein”, preferably it is the molecule of section (a) or (b) of this paragraph.

[65476] In particular, it was observed that in plants, especially in Arabidopsis thaliana, increasing or generating the activity of a gene product non-targeted with the activity of a “halotolerance protein”, preferably being encoded by a gene comprising the nucleic acid sequence SEQ ID NO. 130903, preferably the coding region thereof, conferred the production of or the increase in cryptoxanthin compared with the wild type control.

[65477] The nucleic acid sequence of Ykr072c from Saccharomyces cerevisiae, e.g. as shown in the respective line in column 5 of Table I, application no. 13, has been published in A. And the activity of the gene product thereof is the activity of halotolerance protein.

[65478] Accordingly, in one embodiment, the process of the present invention for producing zeaxanthin in a non-human organism, like a microorganism or a plant or a part thereof, comprises increasing or generating the activity of a gene product with the activity of a gene product conferring the activity of “halotolerance protein”, especially from Saccharomyces cerevisiae or its functional equivalent or its homolog, e.g. the increase of
[65479] (a) a gene product of a gene comprising the nucleic acid molecule as shown in the respective line in column 5 of Table I (whereby the respective line disclose in column 7 the fine chemical zeaxanthin), application no. 13, preferably the coding region thereof, or a homolog or a fragment thereof, and being depicted in the same respective line as said Ykr072c, or a functional equivalent or a homolog thereof as shown in column 8 of Table I, application no. 13, preferably the coding region thereof, particularly a homolog or functional equivalent as shown in column 8 of Table I B, application no. 13, and being depicted in the same respective line as said Ykr072c, and preferably the activity is increased non-targeted, or
[65480] (b) a polypeptide comprising a polypeptide, a consensus sequence or at least a polypeptide motif as shown in the respective line in column 5 of Table II or in column 8 of Table IV, application no. 13, respectively, and being depicted in the same respective line as said Ykr072c, or a functional equivalent or a homolog thereof as depicted in column 8 of Table II, application no. 13, preferably a homolog or functional equivalent as depicted in column 8 of Table II B, application no. 13, and being depicted in the same respective line as said Ykr072c, and preferably the activity is increased non-targeted, whereby the respective line disclose in column 7 the fine chemical zeaxanthin.

[65481] Accordingly, in one embodiment, the molecule which activity is to be increased in the process of the invention is the gene product with an activity as a “halotolerance protein”, preferably it is the molecule of section (a) or (b) of this paragraph.

[65482] In particular, it was observed that in plants, especially in Arabidopsis thaliana, increasing or generating the activity of a gene product non-targeted with the activity of a “halotolerance protein”, preferably being encoded by a gene comprising the nucleic acid sequence SEQ ID NO. 130903, preferably the coding region thereof, conferred the production of or the increase in zeaxanthin compared with the wild type control.

[65483] The nucleic acid sequence of Ymr281w from Saccharomyces cerevisiae, e.g. as shown in the respective line in column 5 of Table I, application no. 13, has been published in A. And the activity of the gene product thereof is the activity of N-acetylglucosaminylphosphatidylinositoldeacetylase.

[65484] Accordingly, in one embodiment, the process of the present invention for producing zeaxanthin in a non-human organism, like a microorganism or a plant or a part thereof, comprises increasing or generating the activity of a gene product with the activity of a gene product conferring the activity of “N-acetylglucosaminylphosphatidylinositoldeacetylase”, especially from Saccharomyces cerevisiae or its functional equivalent or its homolog, e.g. the increase of
[65485] (a) a gene product of a gene comprising the nucleic acid molecule as shown in the respective line in column 5 of Table I (whereby the respective line disclose in column 7 the fine chemical zeaxanthin), application no. 13, preferably the coding region thereof, or a homolog or a fragment thereof, and being depicted in the same respective line as said Ymr281w, or a functional equivalent or a homolog thereof as shown in column 8 of Table I, application no. 13, preferably the coding region thereof, particularly a homolog or functional equivalent as shown in column 8 of Table I B, application no. 13, and being depicted in the same respective line as said Ymr281w, and preferably the activity is increased plastidic, or
[65486] (b) a polypeptide comprising a polypeptide, a consensus sequence or at least a polypeptide motif as shown in the respective line in column 5 of Table II or in column 8 of Table IV, application no. 13, respectively, and being depicted in the same respective line as said Ymr281w, or a functional equivalent or a homolog thereof as depicted in column 8 of Table II, application no. 13, preferably a homolog or functional equivalent as depicted in column 8 of Table II B, application no. 13, and being depicted in the same respective line as said Ymr281w, and preferably the activity is increased plastidic, whereby the respective line disclose in column 7 the fine chemical zeaxanthin.

[65487] Accordingly, in one embodiment, the molecule which activity is to be increased in the process of the invention is the gene product with an activity as a “N-acetylglucosaminylphosphatidylinositoldeacetylase”, preferably it is the molecule of section (a) or (b) of this paragraph.

[65488] In particular, it was observed that in plants, especially in Arabidopsis thaliana, increasing or generating the activity of a gene product plastidic with the activity of a “N-acetylglucosaminylphosphatidylinositoldeacetylase”, preferably being encoded by a gene comprising the nucleic acid sequence SEQ ID NO. 130932, preferably the coding region thereof, conferred the production of or the increase in zeaxanthin compared with the wild type control.

[65489] The nucleic acid sequence of Ymr324c from Saccharomyces cerevisiae, e.g. as shown in the respective line in column 5 of Table I, application no. 13, has been published in A. And the activity of the gene product thereof is the activity of ymr324c-protein.

[65490] Accordingly, in one embodiment, the process of the present invention for producing cryptoxanthin in a non-human organism, like a microorganism or a plant or a part thereof, comprises increasing or generating the activity of a gene product with the activity of a gene product conferring the activity of “ymr324c-protein”, especially from Saccharomyces cerevisiae or its functional equivalent or its homolog, e.g. the increase of
[65491] (a) a gene product of a gene comprising the nucleic acid molecule as shown in the respective line in column 5 of Table I (whereby the respective line disclose in column 7 the fine chemical cryptoxanthin), application no. 13, preferably the coding region thereof, or a homolog or a fragment thereof, and being depicted in the same respective line as said Ymr324c, or a functional equivalent or a homolog thereof as shown in column 8 of Table I, application no. 13, preferably the coding region thereof, particularly a homolog or functional equivalent as shown in column 8 of Table I B, application no. 13, and being depicted in the same respective line as said Ymr324c, and preferably the activity is increased plastidic, or
[65492] (b) a polypeptide comprising a polypeptide, a consensus sequence or at least a polypeptide motif as shown in the respective line in column 5 of Table II or in column 8 of Table IV, application no. 13, respectively, and being depicted in the same respective line as said Ymr324c, or a functional equivalent or a homolog thereof as depicted in column 8 of Table II, application no. 13, preferably a homolog or functional equivalent as depicted in column 8 of Table II B, application no. 13, and being depicted in the same respective line as said Ymr324c, and preferably the activity is increased plastidic, whereby the respective line disclose in column 7 the fine chemical cryptoxanthin.

[65493] Accordingly, in one embodiment, the molecule which activity is to be increased in the process of the invention is the gene product with an activity as a “ymr324c-protein”, preferably it is the molecule of section (a) or (b) of this paragraph.

[65494] In particular, it was observed that in plants, especially in Arabidopsis thaliana, increasing or generating the activity of a gene product plastidic with the activity of a “ymr324c-protein”, preferably being encoded by a gene comprising the nucleic acid sequence SEQ ID NO. 130986, preferably the coding region thereof, conferred the production of or the increase in cryptoxanthin compared with the wild type control.

[65495] The nucleic acid sequence of Ynr019w from Saccharomyces cerevisiae, e.g. as shown in the respective line in column 5 of Table I, application no. 13, has been published in A. And the activity of the gene product thereof is the activity of sterol O-acyltransferase.

[65496] Accordingly, in one embodiment, the process of the present invention for producing zeaxanthin in a non-human organism, like a microorganism or a plant or a part thereof, comprises increasing or generating the activity of a gene product with the activity of a gene product conferring the activity of “sterol O-acyltransferase”, especially from Saccharomyces cerevisiae or its functional equivalent or its homolog, e.g. the increase of
[65497] (a) a gene product of a gene comprising the nucleic acid molecule as shown in the respective line in column 5 of Table I (whereby the respective line disclose in column 7 the fine chemical zeaxanthin), application no. 13, preferably the coding region thereof, or a homolog or a fragment thereof, and being depicted in the same respective line as said Ynr019w, or a functional equivalent or a homolog thereof as shown in column 8 of Table I, application no. 13, preferably the coding region thereof, particularly a homolog or functional equivalent as shown in column 8 of Table I B, application no. 13, and being depicted in the same respective line as said Ynr019w, and preferably the activity is increased plastidic, or
[65498] (b) a polypeptide comprising a polypeptide, a consensus sequence or at least a polypeptide motif as shown in the respective line in column 5 of Table II or in column 8 of Table IV, application no. 13, respectively, and being depicted in the same respective line as said Ynr019w, or a functional equivalent or a homolog thereof as depicted in column 8 of Table II, application no. 13, preferably a homolog or functional equivalent as depicted in column 8 of Table II B, application no. 13, and being depicted in the same respective line as said Ynr019w, and preferably the activity is increased plastidic, whereby the respective line disclose in column 7 the fine chemical zeaxanthin.

[65499] Accordingly, in one embodiment, the molecule which activity is to be increased in the process of the invention is the gene product with an activity as a “sterol O-acyltransferase”, preferably it is the molecule of section (a) or (b) of this paragraph.

[65500] In particular, it was observed that in plants, especially in Arabidopsis thaliana, increasing or generating the activity of a gene product plastidic with the activity of a “sterol O-acyltransferase”, preferably being encoded by a gene comprising the nucleic acid sequence SEQ ID NO. 67646, preferably the coding region thereof, conferred the production of or the increase in zeaxanthin compared with the wild type control.

[65501] The nucleic acid sequence of Yer184c from Saccharomyces cerevisiae, e.g. as shown in the respective line in column 5 of Table I, application no. 13, has been published in A. And the activity of the gene product thereof is the activity of YER184C-protein.

[65502] Accordingly, in one embodiment, the process of the present invention for producing abscisic acid in a non-human organism, like a microorganism or a plant or a part thereof, comprises increasing or generating the activity of a gene product with the activity of a gene product conferring the activity of “YER184C-protein”, especially from Saccharomyces cerevisiae or its functional equivalent or its homolog, e.g. the increase of
[65503] (a) a gene product of a gene comprising the nucleic acid molecule as shown in the respective line in column 5 of Table I (whereby the respective line disclose in column 7 the fine chemical abscisic acid), application no. 13, preferably the coding region thereof, or a homolog or a fragment thereof, and being depicted in the same respective line as said Yer184c, or a functional equivalent or a homolog thereof as shown in column 8 of Table I, application no. 13, preferably the coding region thereof, particularly a homolog or functional equivalent as shown in column 8 of Table I B, application no. 13, and being depicted in the same respective line as said Yer184c, and preferably the activity is increased non-targeted, or
[65504] (b) a polypeptide comprising a polypeptide, a consensus sequence or at least a polypeptide motif as shown in the respective line in column 5 of Table II or in column 8 of Table IV, application no. 13, respectively, and being depicted in the same respective line as said Yer184c, or a functional equivalent or a homolog thereof as depicted in column 8 of Table II, application no. 13, preferably a homolog or functional equivalent as depicted in column 8 of Table II B, application no. 13, and being depicted in the same respective line as said Yer184c, and preferably the activity is increased non-targeted, whereby the respective line disclose in column 7 the fine chemical abscisic acid.

[65505] Accordingly, in one embodiment, the molecule which activity is to be increased in the process of the invention is the gene product with an activity as a “YER184C-protein”, preferably it is the molecule of section (a) or (b) of this paragraph.

[65506] In particular, it was observed that in plants, especially in Arabidopsis thaliana, increasing or generating the activity of a gene product non-targeted with the activity of a “YER184C-protein”, preferably being encoded by a gene comprising the nucleic acid sequence SEQ ID NO. 130713, preferably the coding region thereof, conferred the production of or the increase in abscisic acid compared with the wild type control.

[65507] The nucleic acid sequence of YOR044W from Saccharomyces cerevisiae, e.g. as shown in the respective line in column 5 of Table I, application no. 13, has been published in A. And the activity of the gene product thereof is the activity of YOR044W-protein.

[65508] Accordingly, in one embodiment, the process of the present invention for producing abscisic acid in a non-human organism, like a microorganism or a plant or a part thereof, comprises increasing or generating the activity of a gene product with the activity of a gene product conferring the activity of “YOR044W-protein”, especially from Saccharomyces cerevisiae or its functional equivalent or its homolog, e.g. the increase of
[65509] (a) a gene product of a gene comprising the nucleic acid molecule as shown in the respective line in column 5 of Table I (whereby the respective line disclose in column 7 the fine chemical abscisic acid), application no. 13, preferably the coding region thereof, or a homolog or a fragment thereof, and being depicted in the same respective line as said YOR044W, or a functional equivalent or a homolog thereof as shown in column 8 of Table I, application no. 13, preferably the coding region thereof, particularly a homolog or functional equivalent as shown in column 8 of Table I B, application no. 13, and being depicted in the same respective line as said YOR044W, and preferably the activity is increased non-targeted, or
[65510] (b) a polypeptide comprising a polypeptide, a consensus sequence or at least a polypeptide motif as shown in the respective line in column 5 of Table II or in column 8 of Table IV, application no. 13, respectively, and being depicted in the same respective line as said YOR044W, or a functional equivalent or a homolog thereof as depicted in column 8 of Table II, application no. 13, preferably a homolog or functional equivalent as depicted in column 8 of Table II B, application no. 13, and being depicted in the same respective line as said YOR044W, and preferably the activity is increased non-targeted, whereby the respective line disclose in column 7 the fine chemical abscisic acid.

[65511] Accordingly, in one embodiment, the molecule which activity is to be increased in the process of the invention is the gene product with an activity as a “YOR044W-protein”, preferably it is the molecule of section (a) or (b) of this paragraph.

[65512] In particular, it was observed that in plants, especially in Arabidopsis thaliana, increasing or generating the activity of a gene product non-targeted with the activity of a “YOR044W-protein”, preferably being encoded by a gene comprising the nucleic acid sequence SEQ ID NO. 130999, preferably the coding region thereof, conferred the production of or the increase in abscisic acid compared with the wild type control.

[65513] The nucleic acid sequence of B4321 from Escherichia coli, e.g. as shown in the respective line in column 5 of Table I, application no. 13, has been published in B. And the activity of the gene product thereof is the activity of gluconate transport system permease 3.

[65514] Accordingly, in one embodiment, the process of the present invention for producing abscisic acid in a non-human organism, like a microorganism or a plant or a part thereof, comprises increasing or generating the activity of a gene product with the activity of a gene product conferring the activity of “gluconate transport system permease 3”, especially from Escherichia coli or its functional equivalent or its homolog, e.g. the increase of
[65515] (a) a gene product of a gene comprising the nucleic acid molecule as shown in the respective line in column 5 of Table I (whereby the respective line disclose in column 7 the fine chemical abscisic acid), application no. 13, preferably the coding region thereof, or a homolog or a fragment thereof, and being depicted in the same respective line as said B4321, or a functional equivalent or a homolog thereof as shown in column 8 of Table I, application no. 13, preferably the coding region thereof, particularly a homolog or functional equivalent as shown in column 8 of Table I B, application no. 13, and being depicted in the same respective line as said B4321, and preferably the activity is increased non-targeted, or
[65516] (b) a polypeptide comprising a polypeptide, a consensus sequence or at least a polypeptide motif as shown in the respective line in column 5 of Table II or in column 8 of Table IV, application no. 13, respectively, and being depicted in the same respective line as said B4321, or a functional equivalent or a homolog thereof as depicted in column 8 of Table II, application no. 13, preferably a homolog or functional equivalent as depicted in column 8 of Table II B, application no. 13, and being depicted in the same respective line as said B4321, and preferably the activity is increased non-targeted, whereby the respective line disclose in column 7 the fine chemical abscisic acid.

[65517] Accordingly, in one embodiment, the molecule which activity is to be increased in the process of the invention is the gene product with an activity as a “gluconate transport system permease 3”, preferably it is the molecule of section (a) or (b) of this paragraph.

[65518] In particular, it was observed that in plants, especially in Arabidopsis thaliana, increasing or generating the activity of a gene product non-targeted with the activity of a “gluconate transport system permease 3”, preferably being encoded by a gene comprising the nucleic acid sequence SEQ ID NO. 45394, preferably the coding region thereof, conferred the production of or the increase in abscisic acid compared with the wild type control.

[65519] The nucleic acid sequence of Sll1450 from Synechocystis sp., e.g. as shown in the respective line in column 5 of Table I, application no. 13, has been published in C. And the activity of the gene product thereof is the activity of nitrate/nitrite transport protein.

[65520] Accordingly, in one embodiment, the process of the present invention for producing abscisic acid in a non-human organism, like a microorganism or a plant or a part thereof, comprises increasing or generating the activity of a gene product with the activity of a gene product conferring the activity of “nitrate/nitrite transport protein”, especially from Synechocystis sp. or its functional equivalent or its homolog, e.g. the increase of
[65521] (a) a gene product of a gene comprising the nucleic acid molecule as shown in the respective line in column 5 of Table I (whereby the respective line disclose in column 7 the fine chemical abscisic acid), application no. 13, preferably the coding region thereof, or a homolog or a fragment thereof, and being depicted in the same respective line as said Sll1450, or a functional equivalent or a homolog thereof as shown in column 8 of Table I, application no. 13, preferably the coding region thereof, particularly a homolog or functional equivalent as shown in column 8 of Table I B, application no. 13, and being depicted in the same respective line as said Sll1450, and preferably the activity is increased mitochondrial, or
[65522] (b) a polypeptide comprising a polypeptide, a consensus sequence or at least a polypeptide motif as shown in the respective line in column 5 of Table II or in column 8 of Table IV, application no. 13, respectively, and being depicted in the same respective line as said Sll1450, or a functional equivalent or a homolog thereof as depicted in column 8 of Table II, application no. 13, preferably a homolog or functional equivalent as depicted in column 8 of Table II B, application no. 13, and being depicted in the same respective line as said Sll1450, and preferably the activity is increased mitochondrial, whereby the respective line disclose in column 7 the fine chemical abscisic acid.

[65523] Accordingly, in one embodiment, the molecule which activity is to be increased in the process of the invention is the gene product with an activity as a “nitrate/nitrite transport protein”, preferably it is the molecule of section (a) or (b) of this paragraph.

[65524] In particular, it was observed that in plants, especially in Arabidopsis thaliana, increasing or generating the activity of a gene product mitochondrial with the activity of a “nitrate/nitrite transport protein”, preferably being encoded by a gene comprising the nucleic acid sequence SEQ ID NO. 54337, preferably the coding region thereof, conferred the production of or the increase in abscisic acid compared with the wild type control.

[65525] The nucleic acid sequence of Sll1848 from Synechocystis sp., e.g. as shown in the respective line in column 5 of Table I, application no. 13, has been published in C. And the activity of the gene product thereof is the activity of acyl transferase.

[65526] Accordingly, in one embodiment, the process of the present invention for producing abscisic acid in a non-human organism, like a microorganism or a plant or a part thereof, comprises increasing or generating the activity of a gene product with the activity of a gene product conferring the activity of “acyl transferase”, especially from Synechocystis sp. or its functional equivalent or its homolog, e.g. the increase of
[65527] (a) a gene product of a gene comprising the nucleic acid molecule as shown in the respective line in column 5 of Table I (whereby the respective line disclose in column 7 the fine chemical abscisic acid), application no. 13, preferably the coding region thereof, or a homolog or a fragment thereof, and being depicted in the same respective line as said Sll1848, or a functional equivalent or a homolog thereof as shown in column 8 of Table I, application no. 13, preferably the coding region thereof, particularly a homolog or functional equivalent as shown in column 8 of Table I B, application no. 13, and being depicted in the same respective line as said Sll1848, and preferably the activity is increased plastidic, or
[65528] (b) a polypeptide comprising a polypeptide, a consensus sequence or at least a polypeptide motif as shown in the respective line in column 5 of Table II or in column 8 of Table IV, application no. 13, respectively, and being depicted in the same respective line as said Sll1848, or a functional equivalent or a homolog thereof as depicted in column 8 of Table II, application no. 13, preferably a homolog or functional equivalent as depicted in column 8 of Table II B, application no. 13, and being depicted in the same respective line as said Sll1848, and preferably the activity is increased plastidic, whereby the respective line disclose in column 7 the fine chemical abscisic acid.

[65529] Accordingly, in one embodiment, the molecule which activity is to be increased in the process of the invention is the gene product with an activity as a “acyl transferase”, preferably it is the molecule of section (a) or (b) of this paragraph.

[65530] In particular, it was observed that in plants, especially in Arabidopsis thaliana, increasing or generating the activity of a gene product plastidic with the activity of a “acyl transferase”, preferably being encoded by a gene comprising the nucleic acid sequence SEQ ID NO. 86447, preferably the coding region thereof, conferred the production of or the increase in abscisic acid compared with the wild type control.

[65531] The nucleic acid sequence of At3g02990 from Arabidopsis thaliana, e.g. as shown in the respective line in column 5 of Table I, application no. 13, has been published in F. And the activity of the gene product thereof is the activity of heat shock transcription factor.

[65532] Accordingly, in one embodiment, the process of the present invention for producing abscisic acid in a non-human organism, like a microorganism or a plant or a part thereof, comprises increasing or generating the activity of a gene product with the activity of a gene product conferring the activity of “heat shock transcription factor”, especially from Arabidopsis thaliana or its functional equivalent or its homolog, e.g. the increase of
[65533] (a) a gene product of a gene comprising the nucleic acid molecule as shown in the respective line in column 5 of Table I (whereby the respective line disclose in column 7 the fine chemical abscisic acid), application no. 13, preferably the coding region thereof, or a homolog or a fragment thereof, and being depicted in the same respective line as said At3g02990, or a functional equivalent or a homolog thereof as shown in column 8 of Table I, application no. 13, preferably the coding region thereof, particularly a homolog or functional equivalent as shown in column 8 of Table I B, application no. 13, and being depicted in the same respective line as said At3g02990, and preferably the activity is increased non-targeted, or
[65534] (b) a polypeptide comprising a polypeptide, a consensus sequence or at least a polypeptide motif as shown in the respective line in column 5 of Table II or in column 8 of Table IV, application no. 13, respectively, and being depicted in the same respective line as said At3g02990, or a functional equivalent or a homolog thereof as depicted in column 8 of Table II, application no. 13, preferably a homolog or functional equivalent as depicted in column 8 of Table II B, application no. 13, and being depicted in the same respective line as said At3g02990, and preferably the activity is increased non-targeted, whereby the respective line disclose in column 7 the fine chemical abscisic acid.

[65535] Accordingly, in one embodiment, the molecule which activity is to be increased in the process of the invention is the gene product with an activity as a “heat shock transcription factor”, preferably it is the molecule of section (a) or (b) of this paragraph.

[65536] In particular, it was observed that in plants, especially in Arabidopsis thaliana, increasing or generating the activity of a gene product non-targeted with the activity of a “heat shock transcription factor”, preferably being encoded by a gene comprising the nucleic acid sequence SEQ ID NO. 68657, preferably the coding region thereof, conferred the production of or the increase in abscisic acid compared with the wild type control.

[65537] The nucleic acid sequence of At1g48260 from Arabidopsis thaliana, e.g. as shown in the respective line in column 5 of Table I, application no. 13, has been published in F. And the activity of the gene product thereof is the activity of protein kinase.

[65538] Accordingly, in one embodiment, the process of the present invention for producing abscisic acid in a non-human organism, like a microorganism or a plant or a part thereof, comprises increasing or generating the activity of a gene product with the activity of a gene product conferring the activity of “protein kinase”, especially from Arabidopsis thaliana or its functional equivalent or its homolog, e.g. the increase of
[65539] (a) a gene product of a gene comprising the nucleic acid molecule as shown in the respective line in column 5 of Table I (whereby the respective line disclose in column 7 the fine chemical abscisic acid), application no. 13, preferably the coding region thereof, or a homolog or a fragment thereof, and being depicted in the same respective line as said At1 g48260, or a functional equivalent or a homolog thereof as shown in column 8 of Table I, application no. 13, preferably the coding region thereof, particularly a homolog or functional equivalent as shown in column 8 of Table I B, application no. 13, and being depicted in the same respective line as said At1g48260, and preferably the activity is increased non-targeted, or
[65540] (b) a polypeptide comprising a polypeptide, a consensus sequence or at least a polypeptide motif as shown in the respective line in column 5 of Table II or in column 8 of Table IV, application no. 13, respectively, and being depicted in the same respective line as said At1g48260, or a functional equivalent or a homolog thereof as depicted in column 8 of Table II, application no. 13, preferably a homolog or functional equivalent as depicted in column 8 of Table II B, application no. 13, and being depicted in the same respective line as said At1 g48260, and preferably the activity is increased non-targeted, whereby the respective line disclose in column 7 the fine chemical abscisic acid.

[65541] Accordingly, in one embodiment, the molecule which activity is to be increased in the process of the invention is the gene product with an activity as a “protein kinase”, preferably it is the molecule of section (a) or (b) of this paragraph.

[65542] In particular, it was observed that in plants, especially in Arabidopsis thaliana, increasing or generating the activity of a gene product non-targeted with the activity of a “protein kinase”, preferably being encoded by a gene comprising the nucleic acid sequence SEQ ID NO. 18235, preferably the coding region thereof, conferred the production of or the increase in abscisic acid compared with the wild type control.

[65543] The nucleic acid sequence of At1g72770 from Arabidopsis thaliana, e.g. as shown in the respective line in column 5 of Table I, application no. 13, has been published in F. And the activity of the gene product thereof is the activity of protein phosphatase.

[65544] Accordingly, in one embodiment, the process of the present invention for producing abscisic acid in a non-human organism, like a microorganism or a plant or a part thereof, comprises increasing or generating the activity of a gene product with the activity of a gene product conferring the activity of “protein phosphatase”, especially from Arabidopsis thaliana or its functional equivalent or its homolog, e.g. the increase of
[65545] (a) a gene product of a gene comprising the nucleic acid molecule as shown in the respective line in column 5 of Table I (whereby the respective line disclose in column 7 the fine chemical abscisic acid), application no. 13, preferably the coding region thereof, or a homolog or a fragment thereof, and being depicted in the same respective line as said At1g72770, or a functional equivalent or a homolog thereof as shown in column 8 of Table I, application no. 13, preferably the coding region thereof, particularly a homolog or functional equivalent as shown in column 8 of Table I B, application no. 13, and being depicted in the same respective line as said At1g72770, and preferably the activity is increased non-targeted, or
[65546] (b) a polypeptide comprising a polypeptide, a consensus sequence or at least a polypeptide motif as shown in the respective line in column 5 of Table II or in column 8 of Table IV, application no. 13, respectively, and being depicted in the same respective line as said At1g72770, or a functional equivalent or a homolog thereof as depicted in column 8 of Table II, application no. 13, preferably a homolog or functional equivalent as depicted in column 8 of Table II B, application no. 13, and being depicted in the same respective line as said At1g72770, and preferably the activity is increased non-targeted, whereby the respective line disclose in column 7 the fine chemical abscisic acid.

[65547] Accordingly, in one embodiment, the molecule which activity is to be increased in the process of the invention is the gene product with an activity as a “protein phosphatase”, preferably it is the molecule of section (a) or (b) of this paragraph.

[65548] In particular, it was observed that in plants, especially in Arabidopsis thaliana, increasing or generating the activity of a gene product non-targeted with the activity of a “protein phosphatase”, preferably being encoded by a gene comprising the nucleic acid sequence SEQ ID NO. 19419, preferably the coding region thereof, conferred the production of or the increase in abscisic acid compared with the wild type control.

[65549] The nucleic acid sequence of AVINDRAFT_{—}0539 from Azotobacter vinelandii, e.g. as shown in the respective line in column 5 of Table I, application no. 13, has been published in D. And the activity of the gene product thereof is the activity of glycine cleavage system T aminomethyltransferase.

[65550] Accordingly, in one embodiment, the process of the present invention for producing abscisic acid in a non-human organism, like a microorganism or a plant or a part thereof, comprises increasing or generating the activity of a gene product with the activity of a gene product conferring the activity of “glycine cleavage system T aminomethyltransferase”, especially from Azotobacter vinelandii or its functional equivalent or its homolog, e.g. the increase of
[65551] (a) a gene product of a gene comprising the nucleic acid molecule as shown in the respective line in column 5 of Table I (whereby the respective line disclose in column 7 the fine chemical abscisic acid), application no. 13, preferably the coding region thereof, or a homolog or a fragment thereof, and being depicted in the same respective line as said AVINDRAFT_{—}0539, or a functional equivalent or a homolog thereof as shown in column 8 of Table I, application no. 13, preferably the coding region thereof, particularly a homolog or functional equivalent as shown in column 8 of Table I B, application no. 13, and being depicted in the same respective line as said AVINDRAFT_{—}0539, and preferably the activity is increased non-targeted, or
[65552] (b) a polypeptide comprising a polypeptide, a consensus sequence or at least a polypeptide motif as shown in the respective line in column 5 of Table II or in column 8 of Table IV, application no. 13, respectively, and being depicted in the same respective line as said AVINDRAFT_{—}0539, or a functional equivalent or a homolog thereof as depicted in column 8 of Table II, application no. 13, preferably a homolog or functional equivalent as depicted in column 8 of Table II B, application no. 13, and being depicted in the same respective line as said AVINDRAFT_{—}0539, and preferably the activity is increased non-targeted, whereby the respective line disclose in column 7 the fine chemical abscisic acid.

[65553] Accordingly, in one embodiment, the molecule which activity is to be increased in the process of the invention is the gene product with an activity as a “glycine cleavage system T aminomethyltransferase”, preferably it is the molecule of section (a) or (b) of this paragraph.

[65554] In particular, it was observed that in plants, especially in Arabidopsis thaliana, increasing or generating the activity of a gene product non-targeted with the activity of a “glycine cleavage system T aminomethyltransferase”, preferably being encoded by a gene comprising the nucleic acid sequence SEQ ID NO. 70715, preferably the coding region thereof, conferred the production of or the increase in abscisic acid compared with the wild type control.

[65555] The nucleic acid sequence of At2g30540 from Arabidopsis thaliana, e.g. as shown in the respective line in column 5 of Table I, application no. 13, has been published in F. And the activity of the gene product thereof is the activity of glutaredoxin.

[65556] Accordingly, in one embodiment, the process of the present invention for producing abscisic acid in a non-human organism, like a microorganism or a plant or a part thereof, comprises increasing or generating the activity of a gene product with the activity of a gene product conferring the activity of “glutaredoxin”, especially from Arabidopsis thaliana or its functional equivalent or its homolog, e.g. the increase of
[65557] (a) a gene product of a gene comprising the nucleic acid molecule as shown in the respective line in column 5 of Table I (whereby the respective line disclose in column 7 the fine chemical abscisic acid), application no. 13, preferably the coding region thereof, or a homolog or a fragment thereof, and being depicted in the same respective line as said At2g30540, or a functional equivalent or a homolog thereof as shown in column 8 of Table I, application no. 13, preferably the coding region thereof, particularly a homolog or functional equivalent as shown in column 8 of Table I B, application no. 13, and being depicted in the same respective line as said At2g30540, and preferably the activity is increased non-targeted, or
[65558] (b) a polypeptide comprising a polypeptide, a consensus sequence or at least a polypeptide motif as shown in the respective line in column 5 of Table II or in column 8 of Table IV, application no. 13, respectively, and being depicted in the same respective line as said At2g30540, or a functional equivalent or a homolog thereof as depicted in column 8 of Table II, application no. 13, preferably a homolog or functional equivalent as depicted in column 8 of Table II B, application no. 13, and being depicted in the same respective line as said At2g30540, and preferably the activity is increased non-targeted, whereby the respective line disclose in column 7 the fine chemical abscisic acid.

[65559] Accordingly, in one embodiment, the molecule which activity is to be increased in the process of the invention is the gene product with an activity as a “glutaredoxin”, preferably it is the molecule of section (a) or (b) of this paragraph.

[65560] In particular, it was observed that in plants, especially in Arabidopsis thaliana, increasing or generating the activity of a gene product non-targeted with the activity of a “glutaredoxin”, preferably being encoded by a gene comprising the nucleic acid sequence SEQ ID NO. 20346, preferably the coding region thereof, conferred the production of or the increase in abscisic acid compared with the wild type control.

[65561] [0105.1.7.13] to [0107.1.7.13] for the disclosure of these paragraphs see [0105.1.7.7] to [0107.1.7.7] above

[65562] A protein having an activity conferring an increase in the amount or level of the fine chemical abscisic acid, cryptoxanthin, violaxanthin, or zeaxanthin, upon targeting to the plastids or mitochondria or upon non-targeting, preferably has the structure of the respective polypeptide described herein, in particular of the polypeptides comprising the consensus sequence or at least one polypeptide motifs as shown in the respective line in Table IV, application no. 13, column 8 or of the polypeptide comprising an amino acid sequence as disclosed in the respective line in Table II, application no. 13, columns 5 or 8, or homologs or fragments thereof as described herein, or is encoded by the nucleic acid molecule characterized herein or the nucleic acid molecule according to the invention, for example by the nucleic acid molecule as shown in the respective line in Table I, application no. 13, columns 5 or 8, preferably the coding region thereof, or homologs or fragments thereof and has the herein mentioned activity.

[65563] for the disclosure of this paragraph see [0109.1.7.7] above

[65564] for the disclosure of this paragraph see [0110.1.7.7] above

[65565] In one embodiment, the process of the present invention comprises one or more of the following steps
[65566] (a) stabilizing a protein conferring the generation or increased expression of a protein encoded by the nucleic acid molecule of the invention or of the polypeptide of the invention, e.g. of a polypeptide having the activity selected from the group consisting of acetyl CoA carboxylase, acetyltransferase, acyl transferase, alcohol dehydrogenase, AX653549-protein, b1003-protein, b2032-protein, b2099-protein, b2121-protein, b2474-protein, b3346-protein, b3817-protein, coproporphyrinogen oxidase, F-box protein, flavodoxin, gluconate transport system permease 3, glutaredoxin, glycerol-3-phosphate dehydrogenase, glycine cleavage system T aminomethyltransferase, halotolerance protein, heat shock transcription factor, isopropylmalate isomerase large subunit, ketol-acid reductoisomerase, lipoprotein precursor, MADS-box transcription factor, melibiose carrier protein, monothiol glutaredoxin, monthiol glutaredoxin, N-acetylglucosaminylphosphatidylinositoldeacetylase, nitrate/nitrite transport protein, protein kinase, protein phosphatase, purine-nucleoside phosphorylase, ribosephosphate isomerase, constitutive, serine/threonine-protein phosphatase, sterol O-acyltransferase, superoxide dismutase, thioredoxin, transcription factor, transcriptional regulator, YCL026C-A-protein, YER184C-protein, ygl096w-protein, ymr324c-protein, and YOR044W-protein, or of a polypeptide as indicated in the respective line in Table II, application no. 13, columns 5 or 8, or its homologs or fragments, and conferring the production of or an increase in abscisic acid, cryptoxanthin, violaxanthin, or zeaxanthin, respectively; and/or
[65567] (b) stabilizing a mRNA conferring the generation or increased expression of a FCRP, e.g. protein encoded by the nucleic acid molecule of the invention or its homologs or fragments, or of a mRNA encoding the polypeptide of the present invention having the hereinmentioned activity selected from the group consisting of said activities mentioned in (a) and conferring the production of or an increase in abscisic acid, cryptoxanthin, violaxanthin, or zeaxanthin, respectively; and/or
[65568] (c) increasing the specific activity of a protein conferring the increased expression of a FCRP, e.g. a protein encoded by the nucleic acid molecule of the invention or of the polypeptide of the present invention having herein-mentioned abscisic acid, cryptoxanthin, violaxanthin, or zeaxanthin generating or increasing activity, respectively, e.g. of a polypeptide having the activity of a protein as indicated in the respective line in Table II, application no. 13, columns 5 or 8, or its homologs or fragments, or decreasing the inhibitory regulation of the polypeptide of the invention; and/or
[65569] (d) generating or increasing the expression of an endogenous or artificial transcription factor mediating the expression of a protein conferring the generation or increased expression of a FCRP, e.g. a protein encoded by the nucleic acid molecule of the invention or of the polypeptide of the invention having herein-mentioned activity selected from the group consisting of said activities mentioned in (a) and conferring a abscisic acid, cryptoxanthin, violaxanthin, or zeaxanthin increasing activity, respectively, e.g. of a polypeptide having the activity of a protein as indicated in the respective line in Table II, application no. 13, columns 5 or 8 or its homologs; and/or
[65570] (e) stimulating activity of a protein conferring the increased expression of a FCRP, e.g. a protein encoded by the nucleic acid molecule of the present invention or a polypeptide of the present invention having herein-mentioned activity selected from the group consisting of said activities mentioned in (a) and conferring a abscisic acid, cryptoxanthin, violaxanthin, or zeaxanthin increasing activity, respectively, e.g. of a polypeptide having the activity of a protein as indicated in the respective line in Table II, application no. 13, columns 5 or 8, or its homologs or fragments, by adding one or more exogenous inducing factors to the non-human organism or parts thereof; and/or
[65571] (f) expressing a transgenic gene encoding a protein conferring the increased expression of a FCRP, e.g. a polypeptide encoded by the nucleic acid molecule of the present invention or a polypeptide of the present invention, having herein-mentioned activity selected from the group consisting of said activities mentioned in (a) and conferring a abscisic acid, cryptoxanthin, violaxanthin, or zeaxanthin increasing activity, respectively, e.g. of a polypeptide having the activity of a protein as indicated in the respective line in Table II, application no. 13, columns 5 or 8, or its homologs or fragments, and/or
[65572] (g) increasing the copy number of a gene conferring the increased expression of a nucleic acid molecule encoding a FCRP, e.g. a polypeptide encoded by the nucleic acid molecule of the invention or the polypeptide of the invention having herein-mentioned activity selected from the group consisting of said activities mentioned in (a) and conferring a abscisic acid, cryptoxanthin, violaxanthin, or zeaxanthin increasing activity, respectively, e.g. of a polypeptide having the activity of a protein as indicated in the respective line in Table II, application no. 13, columns 5 or 8, or its homologs or fragments; and/or
[65573] (h) increasing the expression of the endogenous gene encoding the FCRP, polypeptide of the invention, e.g. a polypeptide encoded by the nucleic acid molecule of the invention or the polypeptide of the invention having herein-mentioned activity selected from the group consisting of said activities mentioned in (a) and conferring a abscisic acid, cryptoxanthin, violaxanthin, or zeaxanthin; increasing activity, respectively, e.g. of a polypeptide having the activity of a protein as indicated in the respective line in Table II, application no. 13, columns 5 or 8, or its homologs or fragments, by adding positive expression or removing negative expression elements, e.g. homologous recombination can be used to either introduce positive regulatory elements like for plants the 35S enhancer into the promoter or to remove repressor elements form regulatory regions. Further gene conversion methods can be used to disrupt repressor elements or to enhance to activity of positive elements. Positive elements can be randomly introduced in plants by T-DNA or transposon mutagenesis and lines can be identified in which the positive elements have be integrated near to a gene of the invention, the expression of which is thereby enhanced; and/or
[65574] (i) modulating growth conditions of the non-human organism in such a manner, that the expression or activity of the gene encoding the FCRP, e.g. a protein of the invention or the protein itself is enhanced, for example microorganisms or plants can be grown for example under a higher temperature regime leading to an enhanced expression of heat shock proteins, which can lead to an enhanced abscisic acid, cryptoxanthin, violaxanthin, or zeaxanthin production, respectively; and/or
[65575] (j) selecting of non-human organisms with especially high activity of the proteins of the invention from natural or from mutagenized resources and breeding them into the target organism, e.g. the elite crops; and/or
[65576] (k) directing a protein encoded by the nucleic acid molecule of the invention or of the polypeptide of the present invention having herein-mentioned activity selected from the group consisting of said activities mentioned in (a) and conferring a abscisic acid, cryptoxanthin, violaxanthin, or zeaxanthin increasing activity, respectively, e.g. of a polypeptide having the activity of a protein as indicated in the respective line in Table II, application no. 13, columns 5 or 8, or its homologs or fragments, if for the corresponding nucleic acid molecule in the respective line in column 6 of Table I the term “plastidic” is indicated, to the plastids by the addition of a plastidial targeting sequence or if for the corresponding nucleic acid molecule in the respective line in column 6 of Table I the term “mitochondric” is indicated, to the mitochondria by the addition of a mitochondrial targeting sequence; and/or
[65577] (l) generating the expression of a protein encoded by the nucleic acid molecule of the invention or of the polypeptide of the present invention having herein-mentioned activity selected from the group consisting of said activities mentioned in (a) and conferring a abscisic acid, cryptoxanthin, violaxanthin, or zeaxanthin increasing activity, respectively, e.g. of a polypeptide having the activity of a protein as indicated in the respective line in Table II, application no. 13, columns 5 or 8, or its homologs or fragments, if for the corresponding nucleic acid molecule in the respective line in column 6 of Table I the term “plastidic” or “mitochondric” is indicated, in these organelles by the stable or transient transformation, advantageously stable transformation, of organelles, preferably plastids or mitochondria, with an inventive nucleic acid sequence preferably in form of an expression cassette containing said sequence leading to the expression of the nucleic acids or polypeptides of the invention in the respective organelle; and/or
[65578] (m) generating the expression of a protein encoded by the nucleic acid molecule of the invention or of the polypeptide of the present invention having herein-mentioned activity selected from the group consisting of said activities mentioned in (a) and conferring a abscisic acid, cryptoxanthin, violaxanthin, and/or zeaxanthin increasing activity, respectively, e.g. of a polypeptide having the activity of a protein as indicated in the respective line in Table II, application no. 13, columns 5 or 8, or its homologs or fragments, if for the corresponding nucleic acid molecule in the respective line in column 6 of Table I the term “plastidic” or “mitochondric” is indicated, in these organelles by integration of a nucleic acid of the invention into the genome of the respective organelle under control of preferable a promoter selective for the respective organelle.

[65579] Preferably, said mRNA is the coding region of the nucleic acid molecule of the present invention and/or the protein conferring the increased expression of a protein encoded by the coding region of the nucleic acid molecule of the present invention alone or linked to a transit nucleic acid sequence or transit peptide encoding nucleic acid sequence or the polypeptide having the herein mentioned activity, e.g. conferring the generation of or increase of abscisic acid, cryptoxanthin, violaxanthin, or zeaxanthin, respectively, after increasing the expression or activity of the encoded polypeptide, non-targeted or in organelles such as plastids and/or mitochondria, preferably plastids, or having the activity of a polypeptide having an activity as the protein as shown in the respective line in Table II, application no. 13, column 3, or its homologs. Preferably the increase of abscisic acid, cryptoxanthin, violaxanthin, or zeaxanthin, respectively, takes place non-targeted or in plastids and/or mitochondria, preferably non-targeted or in plastids.

[65580] [0113.1.7.13] to [0122.1.7.13] for the disclosure of these paragraphs see [0113.1.7.7] to [0122.1.7.7] above

[65581] The activation of an endogenous polypeptide having above-mentioned activity, e.g. having the activity of a protein as shown in the respective line in Table II, application no. 13, column 3 or of the polypeptide of the invention, e.g. conferring the increase of the fine chemical abscisic acid, cryptoxanthin, violaxanthin, or zeaxanthin, respectively, by increase of expression or activity in the cytoplasm, and/or in the cytosol, and/or in an organelle, such as plastids or mitochondria, can also be increased by introducing a synthetic transcription factor, which binds close to the coding region of the gene encoding the protein as shown in the respective line in Table II, application no. 13, column 5 or 8, or homologs or fragments thereof, and activates its transcription. A chimeric zinc finger protein can be constructed, which comprises a specific DNA-binding domain and an activation domain as e.g. the VP16 domain of Herpes Simplex virus. The specific binding domain can bind to the regulatory region of the gene encoding the protein as shown in the respective line in Table II, application no. 13, column 5 or 8, or homologs or fragments thereof. The expression of the chimeric transcription factor in a non-human organism, in particular in a plant, leads to a specific expression of the protein as shown in the respective line in Table II, application no. 13, column 5 or 8, or homologs or fragments thereof, see e.g. in WO01/52620, Oriz, Proc. Natl. Acad. Sci. USA 99, 13290 (2002), or Guan, Proc. Natl. Acad. Sci. USA 99, 13296 (2002).

[65582] [0124.1.7.13] to [0127.1.7.13] for the disclosure of these paragraphs see [0124.1.7.7] to [0127.1.7.7] above

[65583] Owing to the introduction of a gene or a plurality of genes conferring the expression of the nucleic acid molecule of the invention or the polypeptide of the invention, for example the nucleic acid construct mentioned below, or encoding the protein as shown in the respective line in Table II, application no. 13, column 5 or 8, or homologs or fragments thereof, into a non-human organism alone or in combination with other genes, it is possible not only to increase the biosynthetic flux towards the end product, but also to increase, modify or create de novo an advantageous, preferably novel metabolites composition in the non-human organism, e.g. an advantageous composition comprising a higher content of (from a viewpoint of nutritional physiology limited) abscisic acid, cryptoxanthin, violaxanthin, or zeaxanthin and if desired other carotenoids, and/or other metabolites, in free or bound form.

[65584] for the disclosure of this paragraph see [0129.1.7.7] above

[65585] Accordingly, in one embodiment, the process according to the invention relates to a process, which comprises:
[65586] (a) providing a non-human organism, preferably a microorganism, a plant cell, a plant tissue, a plant or a part thereof, more preferably a microorganism, a plant tissue, a plant or a part thereof;
[65587] (b) increasing the activity of a protein as shown in the respective line in Table II, application no. 13, column 3 or of a polypeptide being encoded by the respective nucleic acid molecule of the present invention and described below, e.g. conferring an increase of the fine chemical abscisic acid, cryptoxanthin, violaxanthin, or zeaxanthin, respectively, in the non-human organism, preferably in the microorganism, the plant cell, the plant tissue, the plant or a part thereof, more preferably a microorganism, a plant tissue, a plant or a part thereof, especially cytoplasmic or in an organelle, like plastids or mitochondria,
[65588] (c) growing the non-human organism, preferably the microorganism, the plant cell, the plant tissue, the plant or a part thereof, under conditions which permit the production of said chemical in the non-human organism, preferably the microorganism, the plant cell, the plant tissue, the plant or a part thereof; and
[65589] (d) if desired, recovering, optionally isolating, said fine chemical, in free and/or bound form, and, optionally further free and/or bound carotenoids, and/or other metabolites synthesized by the non-human organism, the microorganism, the plant cell, the plant tissue, the plant or a part thereof.

[65590] for the disclosure of this paragraph see [0131.1.7.7] above

[65591] for the disclosure of this paragraph see [0132.1.7.7] above

[65592] for the disclosure of this paragraph see [0133.1.7.7] above

[65593] The non-human organism, in particular the microorganism, plant or part thereof, is advantageously grown in such a way that it is not only possible to recover, if desired to isolate the free or bound fine chemical or the free and bound fine chemical but as option it is also possible to produce, recover and, if desired to isolate, other free or/and bound carotenoids, in particular xanthophylls.

[65594] The organism such as microorganisms or plants or the recovered, and if desired isolated, the respective fine chemical can then be processed further directly into foodstuffs or animal feeds or for other applications, for example according to the disclosures made in U.S. Pat. No. 6,380,442; U.S. Pat. No. U.S. Pat. No. 6,329,557, U.S. Pat. Nos. 6,329,432, 6,316,012, U.S. Pat. No. 6,309,883; U.S. Pat. No. 6,291,533, U.S. Pat. No. 6,291,294, U.S. Pat. No. 6,287,615, U.S. Pat. No. 6,262,284, U.S. Pat. No. 6,262,284, U.S. Pat. No. 6,261,622, U.S. Pat. No. 6,261,598, U.S. Pat. No. 6,235,315, U.S. Pat. No. 6,224,876, U.S. Pat. No. 6,221,417, U.S. Pat. No. 6,221,412, U.S. Pat. No. 6,218,436, U.S. Pat. No. 6,207,409, U.S. Pat. No. 6,319,872, U.S. Pat. No. 6,132,790, U.S. Pat. No. 6,124,113 U.S. Pat. No. 6,110,478, U.S. Pat. No. 6,093,348, U.S. Pat. No. 6,087,152, or U.S. Pat. No. 6,056,962. (Pharmaceutical and other compositions comprising zeaxanthin are e.g. described in: U.S. Pat. Nos. 6,383,523, 6,368,621, U.S. Pat. No. 6,362,221, U.S. Pat. No. 6,348,200, U.S. Pat. No. 6,316,012: Cosmetic or pharmaceutical composition comprising, in combination, a peroxidase and an anti-singlet oxygen agent, U.S. Pat. No. 6,296,880: Pharmaceutical compositions and methods for managing skin conditions, U.S. Pat. No. 6,296,877: Stable, aqueous dispersions and stable, water-dispersible dry xanthophyll powder, their production and use, U.S. Pat. No. 6,261,598: Carotenoid formulations, comprising a mixture of Bcarotens, lycopene and lutein, U.S. Pat. No. 6,248,378: Enhanced food products, U.S. Pat. No. 6,248,374: Stabilized food additive. Processes for the isolation are described e.g. in U.S. Pat. No. 6,380,442, U.S. Pat. No. 6,362,221: Compositions containing natural lycopene and natural tocopherol, U.S. Pat. No. 6,291,204: Fermentative carotenoid production, U.S. Pat. No. 6,262,284: Process for extraction and purification of lutein, zeaxanthin and rare carotenoids from marigold flowers and plants, or U.S. Pat. No. 6,224,876: Isolation and formulations of nutrient-rich carotenoids. The cited literature describe some preferred embodiments. Said applications describe some advantageous embodiments without meant to be limiting. The fermentation broth, fermentation products, plants or plant products can be purified as described in above mentioned applications and other methods known to the person skilled in the art, e.g. as described in Methods in Enzymology: Carotenoids, Part A: Chemistry, Separation, Quantitation and Antioxidation, by John N Abelson or Part B, Metabolism, Genetics, and Biocehmestry, or described herein below. Products of these different work-up procedures are xanthophylls, in particular zeaxanthin or beta-cryptoxanthin or xanthophylls, in particular zeaxanthin or cryptoxanthin comprising compositions which still comprise fermentation broth, plant particles and cell components in different amounts, advantageously in the range of from 0 to 99% by weight, preferably below 80% by weight, especially preferably between below 50% by weight.

[65595] [0135.1.7.13] to [0139.1.7.13] for the disclosure of these paragraphs see [0135.1.7.7] to [0139.1.7.7] above

[65596] In another embodiment, the invention relates to a (isolated) nucleic acid molecule, which comprises a nucleic acid molecule selected from the group consisting of:
[65597] (a) a nucleic acid molecule encoding a polypeptide shown in Table II, application no. 13, column 5 or 8, preferably shown in Table II B, application no. 13, column 8, or a homolog or a fragment thereof;
[65598] (b) a nucleic acid molecule shown in Table I, application no. 13, column 5 or 8, preferably shown in Table I B, application no. 13, column 8, preferably the coding region thereof, or a homolog or a fragment thereof;
[65599] (c) a nucleic acid molecule, which, as a result of the degeneracy of the genetic code, can be derived from a polypeptide sequence depicted in column 5 or 8 of Table II, application no. 13, preferably in column 8 of Table II B, application no. 13;
[65600] (d) a nucleic acid molecule having at least 30% identity, preferably at least 40%, 50%, 60%, 70%, 75%, 80%, 85%, 90%, 95%, 96%, 97%, 98%, 99%, 99.5%, with the nucleic acid molecule sequence of a polynucleotide comprising the nucleic acid molecule shown in column 5 or 8 of Table I, application no. 13, preferably shown in column 8 of Table I B, application no. 13, preferably the coding region thereof;
[65601] (e) a nucleic acid molecule encoding a polypeptide having at least 30% identity, preferably at least 40%, 50% 60%, 70%, 75%, 80%, 85%, 90%, 95%, 96%, 97%, 98%, 99%, 99.5%, identity with the amino acid sequence of the polypeptide encoded by the nucleic acid molecule of (a), (b), (c) or (d);
[65602] (f) a nucleic acid molecule which hybridizes with a nucleic acid molecule of (a), (b), (c), (d) or (e) under stringent hybridization conditions;
[65603] (g) a nucleic acid molecule encoding a polypeptide which can be isolated with the aid of monoclonal or polyclonal antibodies made against a polypeptide encoded by one of the nucleic acid molecules of (a), (b), (c), (d), (e) or (f);
[65604] (h) a nucleic acid molecule encoding a polypeptide comprising the consensus sequence or one or more polypeptide motifs as shown in column 8 of Table IV, application no. 13;
[65605] (i) a nucleic acid molecule encoding a polypeptide having the activity represented by a respective protein as depicted in column 5 of Table II, application no. 13;
[65606] (j) a nucleic acid molecule comprising a polynucleotide which is obtained by amplifying a cDNA library or a genomic library using the primers in Table III, application no. 13, column 8;
[65607] and
[65608] (k) nucleic acid molecule which is obtainable by screening a suitable nucleic acid library, especially a cDNA library and/or a genomic library, under stringent hybridization conditions with a probe comprising one of the sequences of the nucleic acid molecule of (a), (b), (c), (d), (e), (f), (g), (h), (i) or (j) or with a fragment of at least 15 nt, preferably 20 nt, 30 nt, 50 nt, 100 nt, 200 nt,500 nt, 1000 nt, 1500 nt, 2000 nt or 3000 nt of the nucleic acid molecule characterized in (a), (b), (c), (d), (e), (f), (g), (h), (i) or (j);
[65609] or a nucleic acid molecule comprising a sequence which is complementary thereto.
   (All the references to Tables I to IV are references to the corresponding lines of Tables I to IV.)

[65610] In a preferred embodiment thereof said nucleic acid molecule according to (a), (b), (c), (d), (e), (f), (g), (h), (i), (j) or (k) encodes a polypeptide which has the activity of the respective polypeptide represented by a protein comprising a polypeptide as depicted in the respective line in column 5 of Table II, application no. 13.

[65611] In another preferred embodiment thereof said nucleic acid molecule according to (a), (b), (c), (d), (e), (f), (g), (h), (i), (j) or (k) confers a generation or an increase of the respective fine chemical in a non-human organism or a part thereof as compared to a corresponding wild-type non-human organism or part thereof.

[65612] In another preferred embodiment thereof said nucleic acid molecule according to (a), (b), (c), (d), (e), (f), (g), (h), (i), (j) or (k) encodes a polypeptide which has the activity of the respective polypeptide represented by a protein as depicted in the respective line in column 5 of Table II application no. 13 and confers a generation or an increase of the respective fine chemical in a non-human organism or a part thereof as compared to a corresponding wild-type non-human organism or part thereof.

[65613] In another embodiment, the invention relates to a (isolated) nucleic acid molecule, which comprises a nucleic acid molecule selected from the group consisting of:
[65614] (a) a nucleic acid molecule encoding a polypeptide shown in Table II, column 5 or 8, application no. 13, preferably shown in Table II A, application no. 13, in column 5 or in Table II A, application no. 13, column 8 or in Table II B, application no. 13, column 8, or a homolog or a fragment thereof;
[65615] (b) a nucleic acid molecule shown in Table I, application no. 13, column 5 or 8, preferably shown in Table I A, application no. 13, in column 5 or in Table I A, application no. 13, column 8 or in Table I B, application no. 13, column 8, preferably the coding region thereof, or a homolog or a fragment thereof;
[65616] (c) a nucleic acid molecule, which, as a result of the degeneracy of the genetic code, can be derived from a polypeptide sequence depicted in column 5 or 8 of Table II, application no. 13, preferably shown in Table II A, application no. 13, in column 5 or in Table II A, application no. 13, column 8 or in Table II B, application no. 13, column 8;
[65617] (d) a nucleic acid molecule having at least 30% identity, preferably at least 40%, 50%, 60%, 70%, 75%, 80%, 85%, 90%, 95%, 96%, 97%, 98%, 99%, 99.5%, with the nucleic acid molecule sequence of a polynucleotide comprising the nucleic acid molecule shown in column 5 or 8 of Table I, application no. 13, preferably shown in Table I A, application no. 13, in column 5 or in Table I A, application no. 13, column 8 or in Table I B column 8, preferably the coding region thereof;
[65618] (e) a nucleic acid molecule encoding a polypeptide having at least 30% identity, preferably at least 40%, 50% 60%, 70%, 75%, 80%, 85%, 90%, 95%, 96%, 97%, 98%, 99%, 99.5%, identity with the amino acid sequence of the polypeptide encoded by the nucleic acid molecule of (a), (b), (c) or (d);
[65619] (f) a nucleic acid molecule which hybridizes with a nucleic acid molecule of (a), (b), (c), (d) or (e) under stringent hybridization conditions;
[65620] (g) a nucleic acid molecule encoding a polypeptide which can be isolated with the aid of monoclonal or polyclonal antibodies made against a polypeptide encoded by one of the nucleic acid molecules of (a), (b), (c), (d), (e) or (f);
[65621] (h) a nucleic acid molecule encoding a polypeptide comprising the consensus sequence or one or more polypeptide motifs as shown in column 8 of Table IV, application no. 13;
[65622] (i) a nucleic acid molecule encoding a polypeptide having the activity represented by a respective protein as depicted in column 5 of Table II, application no. 13;
[65623] (j) a nucleic acid molecule comprising a polynucleotide which is obtained by amplifying a cDNA library or a genomic library using the primers in Table III, application no. 13, column 8;
[65624] and
[65625] (k) nucleic acid molecule which is obtainable by screening a suitable nucleic acid library, especially a cDNA library and/or a genomic library, under stringent hybridization conditions with a probe comprising one of the sequences of the nucleic acid molecule of (a), (b), (c), (d), (e), (f), (g), (h), (i) or (j) or with a fragment thereof having at least 15 nt, preferably 20 nt, 30 nt, 50 nt, 100 nt, 200 nt,500 nt, 1000 nt, 1500 nt, 2000 nt or 3000 nt of the nucleic acid molecule complementary to a nucleic acid sequence characterized in (a), (b), (c), (d), (e), (f), (g), (h), (i) or (j);
[65626] or a nucleic acid molecule comprising a sequence which is complementary thereto;
   whereby, preferably, the nucleic acid molecule according to (a), (b), (c), (d), (e), (f), (g), (h), (i), (j) or (k) distinguishes over the sequence depicted in Table I A and/or I B, application no. 13, column 5 or 8, or the coding regions thereof, by one or more nucleotides (especially but not exceeding 5%, preferably 4%, 3%, 2%, 1%, 0.5%, 0.2% or 0.1%). In an embodiment, the nucleic acid molecule of the invention does not consist of the sequence shown in Table I A and/or I B, application no. 13, column 5 or 8, or the coding region thereof. In another embodiment, the nucleic acid molecule of the present invention, preferably the coding region thereof, is at least 30%, 40%, 50%, 60%, 70%, 80%, 90%, 95% identical but less than 100%, 99.999%, 99.99%, 99.9%, 99%, 98%, 97%, 96% or 95% identical to the sequence shown in Table I A and/or I B, application no. 13, column 5 or 8, or the coding region thereof, respectively. In a further embodiment the nucleic acid molecule does not encode the polypeptide sequence shown in Table II A and/or II B, application no. 13, column 5 or 8 but homologs thereof. Accordingly, in one embodiment, the nucleic acid molecule of the present invention encodes in one embodiment a polypeptide which differs at least in one or more amino acids (especially but not exceeding 5%, preferably 4%, 3%, 2%, 1%, 0.5%, 0.2% or 0.1%) from the polypeptide shown in Table II, application no. 13, column 5 or 8 and does not encode a protein of the sequence shown in Table II A and/or II B, application no. 13, column 5 or 8. Accordingly, in one embodiment, the protein encoded by a sequence of a nucleic acid according to (a), (b), (c), (d), (e), (f), (g), (h), (i), (j) or (k) does not consist of the sequence shown in Table I A and/or I B, application no. 13, column 5 or 8, or the coding region thereof. In a further embodiment, the protein of the present invention is at least 30%, 40%, 50%, 60%, 70%, 80%, 90%, 95% identical to protein sequence depicted in Table II A and/or II B, application no. 13, column 5 or 8 but less than 100%, preferably less than 99.999%, 99.99%, 99.9%, 99%, 98%, 97%, 96% or 95% identical to the sequence shown in Table II A and/or II B, application no. 13, column 5 or 8.
   (All the references to Tables I to IV are references to the corresponding lines of Tables I to IV.) [0143.1.13.13] In a preferred embodiment thereof said nucleic acid molecule according to (a), (b), (c), (d), (e), (f), (g), (h), (i), (j) or (k) encodes a polypeptide which has the activity of the respective polypeptide represented by a protein comprising a polypeptide as depicted in the respective line in column 5 of Table II, application no. 13.

[65627] In another preferred embodiment thereof said nucleic acid molecule according to (a), (b), (c), (d), (e), (f), (g), (h), (i), (j) or (k) confers a generation or an increase of the respective fine chemical in a non-human organism or a part thereof as compared to a corresponding wild-type non-human organism or part thereof.

[65628] In another preferred embodiment thereof said nucleic acid molecule according to (a), (b), (c), (d), (e), (f), (g), (h), (i), (j) or (k) encodes a polypeptide which has the activity of the respective polypeptide represented by a protein as depicted in the respective line in column 5 of Table II, application no. 13, and confers a generation or an increase of the respective fine chemical in a non-human organism or a part thereof as compared to a corresponding wild-type non-human organism or part thereof.

[65629] [0144.1.7.13] to [0155.1.7.13] for the disclosure of these paragraphs see [0144.1.7.7] to [0155.1.7.7] above

[65630] In a preferred embodiment a nucleic acid construct, for example an expression cassette, comprises upstream, i.e. at the 5′ end of the encoding sequence, a promoter and downstream, i.e. at the 3′ end, a polyadenylation signal and optionally other regulatory elements which are operably linked to the intervening encoding sequence with one of the nucleic acids as depicted in the respective line in Table I, application no. 13, column 5 or 8, preferably the coding region thereof, or a homolog or a fragment thereof. By an operable linkage is meant the sequential arrangement of promoter, encoding sequence, terminator, optionally other regulatory elements and optionally targeting sequences in such a way that each of the regulatory elements/targeting sequence can fulfill its function in the expression of the encoding sequence in due manner. In one embodiment the sequences preferred for operable linkage are targeting sequences for ensuring subcellular localization in organelles, like plastids or mitochondria. However, targeting sequences for ensuring subcellular localization in the endoplasmic reticulum (=ER), in the nucleus, in oil corpuscles or other compartments may also be employed as well as translation promoters such as the 5′ lead sequence in tobacco mosaic virus (Gallie et al., Nucl. Acids Res. 15, 8693 (1987)).

[65631] for the disclosure of this paragraph see [0157.1.7.7] above

[65632] In an embodiment, the invention relates to an expression cassette, comprising
[65633] 1) a promoter, preferably a promoter selected from the group consisting of Big35S, PCUbi, Super and USP;
[65634] 2) a nucleic acid molecule selected from the group consisting of
   [65635] (a) a nucleic acid molecule encoding a polypeptide shown in Table II, application no. 13, column 5 or 8, preferably shown in Table II A, application no. 13, column 5, or in Table II A, application no. 13, column 8, or in Table II B, application no. 13, column 8, or a homolog or a fragment thereof;
   [65636] (b) a nucleic acid molecule shown in Table I, application no. 13, column 5 or 8, preferably shown in Table I A, application no. 13, column 5, or in Table I A, application no. 13, column 8, or in Table I B, application no. 13, column 8, preferably the coding region thereof, or a homolog or a fragment thereof;
   [65637] (c) a nucleic acid molecule, which, as a result of the degeneracy of the genetic code, can be derived from a polypeptide sequence depicted in column 5 or 8 of Table II, application no. 13, preferably shown in Table II A, application no. 13, column 5, or in Table II A, application no. 13, column 8, or in Table II B, application no. 13, column 8;
   [65638] (d) a nucleic acid molecule having at least 30% identity, preferably at least 40%, 50%, 60%, 70%, 75%, 80%, 85%, 90%, 95%, 96%, 97%, 98%, 99%, 99.5%, with the nucleic acid molecule sequence of a polynucleotide comprising the nucleic acid molecule shown in column 5 or 8 of Table I, application no. 13, preferably shown in Table I A, application no. 13, column 5, or in Table I A, application no. 13, column 8, or in Table I B, application no. 13, column 8, preferably the coding region thereof;
   [65639] (e) a nucleic acid molecule encoding a polypeptide having at least 30% identity, preferably at least 40%, 50% 60%, 70%, 75%, 80%, 85%, 90%, 95%, 96%, 97%, 98%, 99%, 99.5%, identity with the amino acid sequence of the polypeptide encoded by the nucleic acid molecule of (a), (b), (c) or (d);
   [65640] (f) a nucleic acid molecule which hybridizes with a nucleic acid molecule of (a), (b), (c), (d) or (e) under stringent hybridization conditions;
   [65641] (g) a nucleic acid molecule encoding a polypeptide which can be isolated with the aid of monoclonal or polyclonal antibodies made against a polypeptide encoded by one of the nucleic acid molecules of (a), (b), (c), (d), (e) or (f);
   [65642] (h) a nucleic acid molecule encoding a polypeptide comprising the consensus sequence or one or more polypeptide motifs as shown in column 8 of Table IV, application no. 13;
   [65643] (i) a nucleic acid molecule encoding a polypeptide having the activity represented by a respective protein as depicted in column 5 of Table II, application no. 13;
   [65644] (j) a nucleic acid molecule comprising a polynucleotide which is obtained by amplifying a cDNA library or a genomic library using the primers in Table III, application no.

[65645] 13, column 8;
[65646] and
[65647] (k) nucleic acid molecule which is obtainable by screening a suitable nucleic acid library, especially a cDNA library and/or a genomic library, under stringent hybridization conditions with a probe comprising one of the sequences of the nucleic acid molecule of (a), (b), (c), (d), (e), (f), (g), (h), (i) or (j) or with a fragment of at least 15 nt, preferably 20 nt, 30 nt, 50 nt, 100 nt, 200 nt,500 nt, 1000 nt, 1500 nt, 2000 nt or 3000 nt of the nucleic acid molecule characterized in (a), (b), (c), (d), (e), (f), (g), (h), (i) or (j);
[65648] or a nucleic acid molecule comprising a sequence which is complementary thereto.
   and, optionally
[65649] 3) nucleic acid molecule encoding a transit peptide, preferably encoding a plastidal transit peptide or a mitochondrial transit peptide;
   which are operable linked.
   (All the references to Tables I to IV are references to the corresponding lines of Tables I to IV.)

[65650] In a preferred embodiment thereof said nucleic acid molecule according to 2 (a), (b), (c), (d), (e), (f), (g), (h), (i), (j) or (k) encodes a polypeptide which has the activity of the respective polypeptide represented by a protein comprising a polypeptide as depicted in the respective line in column 5 of Table II, application no. 13.

[65651] In another preferred embodiment thereof said nucleic acid molecule according to 2 (a), (b), (c), (d), (e), (f), (g), (h), (i), (j) or (k) confers a generation or an increase of the respective fine chemical in a non-human organism or a part thereof as compared to a corresponding wild-type non-human organism or part thereof.

[65652] In another preferred embodiment thereof said nucleic acid molecule according to 2 (a), (b), (c), (d), (e), (f), (g), (h), (i), (j) or (k) encodes a polypeptide which has the activity of the respective polypeptide represented by a protein as depicted in the respective line in column 5 of Table II application no. 13 and confers a generation or an increase of the respective fine chemical in a non-human organism or a part thereof as compared to a corresponding wild-type non-human organism or part thereof.

[65653] In another embodiment thereof the expression cassette comprises 3) a nucleic acid molecule encoding a transit peptide, preferably encoding a plastidal transit peptide, especially in case in column 6 of Table I, application no. 13, in the same line as of the respective nucleic acid molecule according to 2) “plastidic” is depicted, or encoding a mitochondrial transit peptide, especially in case in column 6 of Table I, application no. 13, in the same line as of the respective nucleic acid molecule according to 2) “mitochondric” is depicted.

[65654] In another embodiment thereof the expression cassette does not comprise 3) a nucleic acid molecule encoding a transit peptide, especially in case in column 6 of Table I, application no. 13, in the same line as of the respective nucleic acid molecule according to 2) “non-targeted” is depicted.

[65655] In a further embodiment, the invention relates to an expression cassette, comprising
[65656] 1) a promoter, preferably a promoter selected from the group consisting of Big35S, PCUbi, Super and USP;
[65657] 2) a nucleic acid molecule selected from the group consisting of
   [65658] (a) a nucleic acid molecule encoding a polypeptide shown in Table II, application no. 13, column 5 or 8, preferably shown in Table II A, application no. 13, column 5, or in Table II A, application no. 13, column 8, or in Table II B, application no. 13, column 8, or a homolog or a fragment thereof;
   [65659] (b) a nucleic acid molecule shown in Table I, application no. 13, column 5 or 8, preferably shown in Table I A, application no. 13, column 5, or in Table I A, application no. 13, column 8, or in Table I B, application no. 13, column 8, preferably the coding region thereof, or a homolog or a fragment thereof;
   [65660] (c) a nucleic acid molecule, which, as a result of the degeneracy of the genetic code, can be derived from a polypeptide sequence depicted in column 5 or 8 of Table II, application no. 13, preferably shown in Table II A, application no. 13, column 5, or in Table II A, application no. 13, column 8, or in Table II B, application no. 13, column 8;
   [65661] (d) a nucleic acid molecule having at least 30% identity, preferably at least 40%, 50%, 60%, 70%, 75%, 80%, 85%, 90%, 95%, 96%, 97%, 98%, 99%, 99.5%, with the nucleic acid molecule sequence of a polynucleotide comprising the nucleic acid molecule shown in column 5 or 8 of Table I, application no. 13, preferably shown in Table I A, application no. 13, column 5, or in Table I A, application no. 13, column 8,or in Table I B, application no. 13, column 8, preferably the coding region thereof;
   [65662] (e) a nucleic acid molecule encoding a polypeptide having at least 30% identity, preferably at least 40%, 50% 60%, 70%, 75%, 80%, 85%, 90%, 95%, 96%, 97%, 98%, 99%, 99.5%, identity with the amino acid sequence of the polypeptide encoded by the nucleic acid molecule of (a), (b), (c) or (d);
   [65663] (f) a nucleic acid molecule which hybridizes with a nucleic acid molecule of (a), (b), (c), (d) or (e) under stringent hybridization conditions;
   [65664] (g) a nucleic acid molecule encoding a polypeptide which can be isolated with the aid of monoclonal or polyclonal antibodies made against a polypeptide encoded by one of the nucleic acid molecules of (a), (b), (c), (d), (e) or (f);
   [65665] (h) a nucleic acid molecule encoding a polypeptide comprising the consensus sequence or one or more polypeptide motifs as shown in column 8 of Table IV, application no. 13;
   [65666] (i) a nucleic acid molecule encoding a polypeptide having the activity represented by a respective protein as depicted in column 5 of Table II, application no. 13;
   [65667] (j) a nucleic acid molecule comprising a polynucleotide which is obtained by amplifying a cDNA library or a genomic library using the primers in Table III, application no. 13, column 8;
   [65668] and
   [65669] (k) nucleic acid molecule which is obtainable by screening a suitable nucleic acid library, especially a cDNA library and/or a genomic library, under stringent hybridization conditions with a probe comprising one of the sequences of the nucleic acid molecule of (a), (b), (c), (d), (e), (f), (g), (h), (i) or (j) or with a fragment of at least 15 nt, preferably 20 nt, 30 nt, 50 nt, 100 nt, 200 nt,500 nt, 1000 nt, 1500 nt, 2000 nt or 3000 nt of the nucleic acid molecule characterized in (a), (b), (c), (d), (e), (f), (g), (h), (i) or (j);
   [65670] or a nucleic acid molecule comprising a sequence which is complementary thereto;
      and, optionally
[65671] 3) nucleic acid molecule encoding a transit peptide, preferably encoding a plastidal transit peptide or a mitochondrial transit peptide;
   which are operable linked and
   whereby, preferably, the nucleic acid molecule according to 2 (a), (b), (c), (d), (e), (f), (g), (h), (i), (j) or (k) distinguishes over the sequence depicted in Table I A and/or I B, application no. 13, column 5 or 8, or the coding region thereof, by one or more nucleotides (especially but not exceeding 5%, preferably 4%, 3%, 2%, 1%, 0.5%, 0.2% or 0.1%). In an embodiment, the nucleic acid molecule of the invention according to 2) does not consist of the sequence shown in Table I A and/or I B, application no. 13, column 5 or 8, or the coding region thereof. In another embodiment, the nucleic acid molecule of the present invention, preferably the coding region thereof, is at least 30%, 40%, 50%, 60%, 70%, 80%, 90%, 95% identical but less than 100%, 99.999%, 99.99%, 99.9%, 99%, 98%, 97%, 96% or 95% identical to the sequence shown in Table I A and/or I B, application no. 13, column 5 or 8, or the coding region thereof, respectively. In a further embodiment the nucleic acid molecule does not encode the polypeptide sequence shown in Table II A and/or II B, application no. 13, column 5 or 8 but homologs thereof.

[65672] Accordingly, in one embodiment, the nucleic acid molecule of the present invention encodes in one embodiment a polypeptide which differs at least in one or more amino acids (especially but not exceeding 5%, preferably 4%, 3%, 2%, 1%, 0.5%, 0.2% or 0.1%) from the polypeptide shown in Table II, application no. 13, column 5 or 8 and does not encode a protein of the sequence shown in Table II A and/or II B, application no. 13, column 5 or 8. Accordingly, in one embodiment, the protein encoded by a sequence of a nucleic acid according to 2(a), (b), (c), (d), (e), (f), (g), (h), (i), (j) or (k) does not consist of the sequence shown in Table I A and/or I B, application no. 13, column 5 or 8, or the coding region thereof. In a further embodiment, the protein of the present invention is at least 30%, 40%, 50%, 60%, 70%, 80%, 90%, 95% identical to protein sequence depicted in Table II A and/or II B, application no. 13, column 5 or 8 but less than 100%, 99.999%, 99.99%, 99.9%, 99%, 98%, 97%, 96% or 95% identical to the sequence shown in Table II A and/or II B, application no. 13, column 5 or 8.

(All the references to Tables I to IV are references to the corresponding lines of Tables I to IV.)

[65673] In a preferred embodiment thereof said nucleic acid molecule according to 2 (a), (b), (c), (d), (e), (f), (g), (h), (i), (j) or (k) encodes a polypeptide which has the activity of the respective polypeptide represented by a protein comprising a polypeptide as depicted in the respective line in column 5 of Table II, application no. 13.

[65674] In another preferred embodiment thereof said nucleic acid molecule according to 2 (a), (b), (c), (d), (e), (f), (g), (h), (i), (j) or (k) confers a generation or an increase of the respective fine chemical in a non-human organism or a part thereof as compared to a corresponding wild-type non-human organism or part thereof.

[65675] In another preferred embodiment thereof said nucleic acid molecule according to 2 (a), (b), (c), (d), (e), (f), (g), (h), (i), (j) or (k) encodes a polypeptide which has the activity of the respective polypeptide represented by a protein as depicted in the respective line in column 5 of Table II application no. 13 and confers a generation or an increase of the respective fine chemical in a non-human organism or a part thereof as compared to a corresponding wild-type non-human organism or part thereof.

[65676] In another embodiment thereof the expression cassette comprises 3) a nucleic acid molecule encoding a transit peptide, preferably encoding a plastidal transit peptide, especially in case in column 6 of Table I, application no. 13, in the same line as of the respective nucleic acid molecule according to 2) “plastidic” is depicted, or encoding a mitochondrial transit peptide, especially in case in column 6 of Table I, application no. 13, in the same line as of the respective nucleic acid molecule according to 2) “mitochondric” is depicted.

[65677] In another embodiment thereof the expression cassette does not comprise 3) a nucleic acid molecule encoding a transit peptide, especially in case in column 6 of Table I, application no. 13, in the same line as of the respective nucleic acid molecule according to 2) “non-targeted” is depicted.

[65678] In an embodiment the present invention relates to an expresssion cassette comprising a) a promoter, preferably a promoter selected from the group consisting of Big35S, PCUbi, Super and USP, in particular p-PcUBI; and b) the nucleic acid SEQ ID NO. 130491, or a homolog or fragment thereof, or a homolog thereof being depicted in Table I, application no. 13, column 8, in the same line as SEQ ID NO. 130491, preferably the coding region thereof, a homolog or a fragment thereof; which are operable linked.

[65679] In an embodiment thereof the expression cassette comprises in addition c) a nucleic acid molecule encoding a transit peptide, especially a plastidal transit petide in case in Table I, application no. 13, in column 6 in the same line as SEQ ID NO. 130491 is depicted, plastidic is mentioned, or a mitochondrial transit peptide in case in Table I, application no. 13, in column 6 in the same line as SEQ ID NO. 130491 is depicted, mitochondric is mentioned; which is operable linked, too.

[65680] In another embodiment thereof the expression cassette does not comprise an additional transit peptide in case in Table I, application no. 13, in column 6 in the same line as SEQ ID NO. 130491 is depicted, non-targeted is mentioned.

[65681] In an embodiment the present invention relates to an expresssion cassette comprising a) a promoter, preferably a promoter selected from the group consisting of Big35S, PCUbi, Super and USP, in particular p-PcUBI; and b) the nucleic acid SEQ ID NO. 120952, or a homolog or fragment thereof, or a homolog thereof being depicted in Table I, application no. 13, column 8, in the same line as SEQ ID NO. 120952, preferably the coding region thereof, a homolog or a fragment thereof; which are operable linked.

[65682] In an embodiment thereof the expression cassette comprises in addition c) a nucleic acid molecule encoding a transit peptide, especially a plastidal transit petide in case in Table I, application no. 13, in column 6 in the same line as SEQ ID NO. 120952 is depicted, plastidic is mentioned, or a mitochondrial transit peptide in case in Table I, application no. 13, in column 6 in the same line as SEQ ID NO. 120952 is depicted, mitochondric is mentioned; which is operable linked, too.

[65683] In another embodiment thereof the expression cassette does not comprise an additional transit peptide in case in Table I, application no. 13, in column 6 in the same line as SEQ ID NO. 120952 is depicted, non-targeted is mentioned.

[65684] In an embodiment the present invention relates to an expresssion cassette comprising a) a promoter, preferably a promoter selected from the group consisting of Big35S, PCUbi, Super and USP, in particular p-PcUBI; and b) the nucleic acid SEQ ID NO. 2573, or a homolog or fragment thereof, or a homolog thereof being depicted in Table I, application no. 13, column 8, in the same line as SEQ ID NO. 2573, preferably the coding region thereof, a homolog or a fragment thereof; which are operable linked.

[65685] In an embodiment thereof the expression cassette comprises in addition c) a nucleic acid molecule encoding a transit peptide, especially a plastidal transit petide in case in Table I, application no. 13, in column 6 in the same line as SEQ ID NO. 2573 is depicted, plastidic is mentioned, or a mitochondrial transit peptide in case in Table I, application no. 13, in column 6 in the same line as SEQ ID NO. 2573 is depicted, mitochondric is mentioned; which is operable linked, too.

[65686] In another embodiment thereof the expression cassette does not comprise an additional transit peptide in case in Table I, application no. 13, in column 6 in the same line as SEQ ID NO. 2573 is depicted, non-targeted is mentioned.

[65687] In an embodiment the present invention relates to an expresssion cassette comprising a) a promoter, preferably a promoter selected from the group consisting of Big35S, PCUbi, Super and USP, in particular p-PcUBI; and b) the nucleic acid SEQ ID NO. 23482, or a homolog or fragment thereof, or a homolog thereof being depicted in Table I, application no. 13, column 8, in the same line as SEQ ID NO. 23482, preferably the coding region thereof, a homolog or a fragment thereof; which are operable linked.

[65688] In an embodiment thereof the expression cassette comprises in addition c) a nucleic acid molecule encoding a transit peptide, especially a plastidal transit petide in case in Table I, application no. 13, in column 6 in the same line as SEQ ID NO. 23482 is depicted, plastidic is mentioned, or a mitochondrial transit peptide in case in Table I, application no. 13, in column 6 in the same line as SEQ ID NO. 23482 is depicted, mitochondric is mentioned; which is operable linked, too.

[65689] In another embodiment thereof the expression cassette does not comprise an additional transit peptide in case in Table I, application no. 13, in column 6 in the same line as SEQ ID NO. 23482 is depicted, non-targeted is mentioned.

[65690] In an embodiment the present invention relates to an expresssion cassette comprising a) a promoter, preferably a promoter selected from the group consisting of Big35S, PCUbi, Super and USP, in particular p-PcUBI; and b) the nucleic acid SEQ ID NO. 3279, or a homolog or fragment thereof, or a homolog thereof being depicted in Table I, application no. 13, column 8, in the same line as SEQ ID NO. 3279, preferably the coding region thereof, a homolog or a fragment thereof; which are operable linked.

[65691] In an embodiment thereof the expression cassette comprises in addition c) a nucleic acid molecule encoding a transit peptide, especially a plastidal transit petide in case in Table I, application no. 13, in column 6 in the same line as SEQ ID NO. 3279 is depicted, plastidic is mentioned, or a mitochondrial transit peptide in case in Table I, application no. 13, in column 6 in the same line as SEQ ID NO. 3279 is depicted, mitochondric is mentioned; which is operable linked, too.

[65692] In another embodiment thereof the expression cassette does not comprise an additional transit peptide in case in Table I, application no. 13, in column 6 in the same line as SEQ ID NO. 3279 is depicted, non-targeted is mentioned.

[65693] In an embodiment the present invention relates to an expresssion cassette comprising a) a promoter, preferably a promoter selected from the group consisting of Big35S, PCUbi, Super and USP, in particular p-PcUBI; and b) the nucleic acid SEQ ID NO. 68849, or a homolog or fragment thereof, or a homolog thereof being depicted in Table I, application no. 13, column 8, in the same line as SEQ ID NO. 68849, preferably the coding region thereof, a homolog or a fragment thereof; which are operable linked.

[65694] In an embodiment thereof the expression cassette comprises in addition c) a nucleic acid molecule encoding a transit peptide, especially a plastidal transit petide in case in Table I, application no. 13, in column 6 in the same line as SEQ ID NO. 68849 is depicted, plastidic is mentioned, or a mitochondrial transit peptide in case in Table I, application no. 13, in column 6 in the same line as SEQ ID NO. 68849 is depicted, mitochondric is mentioned; which is operable linked, too.

[65695] In another embodiment thereof the expression cassette does not comprise an additional transit peptide in case in Table I, application no. 13, in column 6 in the same line as SEQ ID NO. 68849 is depicted, non-targeted is mentioned.

[65696] In an embodiment the present invention relates to an expresssion cassette comprising a) a promoter, preferably a promoter selected from the group consisting of Big35S, PCUbi, Super and USP, in particular p-PcUBI; and b) the nucleic acid SEQ ID NO. 4102, or a homolog or fragment thereof, or a homolog thereof being depicted in Table I, application no. 13, column 8, in the same line as SEQ ID NO. 4102, preferably the coding region thereof, a homolog or a fragment thereof; which are operable linked.

[65697] In an embodiment thereof the expression cassette comprises in addition c) a nucleic acid molecule encoding a transit peptide, especially a plastidal transit petide in case in Table I, application no. 13, in column 6 in the same line as SEQ ID NO. 4102 is depicted, plastidic is mentioned, or a mitochondrial transit peptide in case in Table I, application no. 13, in column 6 in the same line as SEQ ID NO. 4102 is depicted, mitochondric is mentioned; which is operable linked, too.

[65698] In another embodiment thereof the expression cassette does not comprise an additional transit peptide in case in Table I, application no. 13, in column 6 in the same line as SEQ ID NO. 4102 is depicted, non-targeted is mentioned.

[65699] In an embodiment the present invention relates to an expresssion cassette comprising a) a promoter, preferably a promoter selected from the group consisting of Big35S, PCUbi, Super and USP, in particular p-PcUBI; and b) the nucleic acid SEQ ID NO. 102899, or a homolog or fragment thereof, or a homolog thereof being depicted in Table I, application no. 13, column 8, in the same line as SEQ ID NO. 102899, preferably the coding region thereof, a homolog or a fragment thereof; which are operable linked.

[65700] In an embodiment thereof the expression cassette comprises in addition c) a nucleic acid molecule encoding a transit peptide, especially a plastidal transit petide in case in Table I, application no. 13, in column 6 in the same line as SEQ ID NO. 102899 is depicted, plastidic is mentioned, or a mitochondrial transit peptide in case in Table I, application no. 13, in column 6 in the same line as SEQ ID NO. 102899 is depicted, mitochondric is mentioned; which is operable linked, too.

[65701] In another embodiment thereof the expression cassette does not comprise an additional transit peptide in case in Table I, application no. 13, in column 6 in the same line as SEQ ID NO. 102899 is depicted, non-targeted is mentioned.

[65702] In an embodiment the present invention relates to an expresssion cassette comprising a) a promoter, preferably a promoter selected from the group consisting of Big35S, PCUbi, Super and USP, in particular p-PcUBI; and b) the nucleic acid SEQ ID NO. 102941, or a homolog or fragment thereof, or a homolog thereof being depicted in Table I, application no. 13, column 8, in the same line as SEQ ID NO. 102941, preferably the coding region thereof, a homolog or a fragment thereof; which are operable linked.

[65703] In an embodiment thereof the expression cassette comprises in addition c) a nucleic acid molecule encoding a transit peptide, especially a plastidal transit petide in case in Table I, application no. 13, in column 6 in the same line as SEQ ID NO. 102941 is depicted, plastidic is mentioned, or a mitochondrial transit peptide in case in Table I, application no. 13, in column 6 in the same line as SEQ ID NO. 102941 is depicted, mitochondric is mentioned; which is operable linked, too.

[65704] In another embodiment thereof the expression cassette does not comprise an additional transit peptide in case in Table I, application no. 13, in column 6 in the same line as SEQ ID NO. 102941 is depicted, non-targeted is mentioned.

[65705] In an embodiment the present invention relates to an expresssion cassette comprising a) a promoter, preferably a promoter selected from the group consisting of Big35S, PCUbi, Super and USP, in particular p-PcUBI; and b) the nucleic acid SEQ ID NO. 34301, or a homolog or fragment thereof, or a homolog thereof being depicted in Table I, application no. 13, column 8, in the same line as SEQ ID NO. 34301, preferably the coding region thereof, a homolog or a fragment thereof; which are operable linked.

[65706] In an embodiment thereof the expression cassette comprises in addition c) a nucleic acid molecule encoding a transit peptide, especially a plastidal transit petide in case in Table I, application no. 13, in column 6 in the same line as SEQ ID NO. 34301 is depicted, plastidic is mentioned, or a mitochondrial transit peptide in case in Table I, application no. 13, in column 6 in the same line as SEQ ID NO. 34301 is depicted, mitochondric is mentioned; which is operable linked, too.

[65707] In another embodiment thereof the expression cassette does not comprise an additional transit peptide in case in Table I, application no. 13, in column 6 in the same line as SEQ ID NO. 34301 is depicted, non-targeted is mentioned.

[65708] In an embodiment the present invention relates to an expresssion cassette comprising a) a promoter, preferably a promoter selected from the group consisting of Big35S, PCUbi, Super and USP, in particular p-Super; and b) the nucleic acid SEQ ID NO. 7941, or a homolog or fragment thereof, or a homolog thereof being depicted in Table I, application no. 13, column 8, in the same line as SEQ ID NO. 7941, preferably the coding region thereof, a homolog or a fragment thereof; which are operable linked.

[65709] In an embodiment thereof the expression cassette comprises in addition c) a nucleic acid molecule encoding a transit peptide, especially a plastidal transit petide in case in Table I, application no. 13, in column 6 in the same line as SEQ ID NO. 7941 is depicted, plastidic is mentioned, or a mitochondrial transit peptide in case in Table I, application no. 13, in column 6 in the same line as SEQ ID NO. 7941 is depicted, mitochondric is mentioned; which is operable linked, too.

[65710] In another embodiment thereof the expression cassette does not comprise an additional transit peptide in case in Table I, application no. 13, in column 6 in the same line as SEQ ID NO. 7941 is depicted, non-targeted is mentioned.

[65711] In an embodiment the present invention relates to an expresssion cassette comprising a) a promoter, preferably a promoter selected from the group consisting of Big35S, PCUbi, Super and USP, in particular p-Super; and b) the nucleic acid SEQ ID NO. 36880, or a homolog or fragment thereof, or a homolog thereof being depicted in Table I, application no. 13, column 8, in the same line as SEQ ID NO. 36880, preferably the coding region thereof, a homolog or a fragment thereof; which are operable linked.

[65712] In an embodiment thereof the expression cassette comprises in addition c) a nucleic acid molecule encoding a transit peptide, especially a plastidal transit petide in case in Table I, application no. 13, in column 6 in the same line as SEQ ID NO. 36880 is depicted, plastidic is mentioned, or a mitochondrial transit peptide in case in Table I, application no. 13, in column 6 in the same line as SEQ ID NO. 36880 is depicted, mitochondric is mentioned; which is operable linked, too.

[65713] In another embodiment thereof the expression cassette does not comprise an additional transit peptide in case in Table I, application no. 13, in column 6 in the same line as SEQ ID NO. 36880 is depicted, non-targeted is mentioned.

[65714] In an embodiment the present invention relates to an expresssion cassette comprising a) a promoter, preferably a promoter selected from the group consisting of Big35S, PCUbi, Super and USP, in particular p-Super; and b) the nucleic acid SEQ ID NO. 8316, or a homolog or fragment thereof, or a homolog thereof being depicted in Table I, application no. 13, column 8, in the same line as SEQ ID NO. 8316, preferably the coding region thereof, a homolog or a fragment thereof; which are operable linked.

[65715] In an embodiment thereof the expression cassette comprises in addition c) a nucleic acid molecule encoding a transit peptide, especially a plastidal transit petide in case in Table I, application no. 13, in column 6 in the same line as SEQ ID NO. 8316 is depicted, plastidic is mentioned, or a mitochondrial transit peptide in case in Table I, application no. 13, in column 6 in the same line as SEQ ID NO. 8316 is depicted, mitochondric is mentioned; which is operable linked, too.

[65716] In another embodiment thereof the expression cassette does not comprise an additional transit peptide in case in Table I, application no. 13, in column 6 in the same line as SEQ ID NO. 8316 is depicted, non-targeted is mentioned.

[65717] In an embodiment the present invention relates to an expresssion cassette comprising a) a promoter, preferably a promoter selected from the group consisting of Big35S, PCUbi, Super and USP, in particular p-Super; and b) the nucleic acid SEQ ID NO. 8920, or a homolog or fragment thereof, or a homolog thereof being depicted in Table I, application no. 13, column 8, in the same line as SEQ ID NO. 8920, preferably the coding region thereof, a homolog or a fragment thereof; which are operable linked.

[65718] In an embodiment thereof the expression cassette comprises in addition c) a nucleic acid molecule encoding a transit peptide, especially a plastidal transit petide in case in Table I, application no. 13, in column 6 in the same line as SEQ ID NO. 8920 is depicted, plastidic is mentioned, or a mitochondrial transit peptide in case in Table I, application no. 13, in column 6 in the same line as SEQ ID NO. 8920 is depicted, mitochondric is mentioned; which is operable linked, too.

[65719] In another embodiment thereof the expression cassette does not comprise an additional transit peptide in case in Table I, application no. 13, in column 6 in the same line as SEQ ID NO. 8920 is depicted, non-targeted is mentioned.

[65720] In an embodiment the present invention relates to an expresssion cassette comprising a) a promoter, preferably a promoter selected from the group consisting of Big35S, PCUbi, Super and USP, in particular p-Super; and b) the nucleic acid SEQ ID NO. 115595, or a homolog or fragment thereof, or a homolog thereof being depicted in Table I, application no. 13, column 8, in the same line as SEQ ID NO. 115595, preferably the coding region thereof, a homolog or a fragment thereof; which are operable linked.

[65721] In an embodiment thereof the expression cassette comprises in addition c) a nucleic acid molecule encoding a transit peptide, especially a plastidal transit petide in case in Table I, application no. 13, in column 6 in the same line as SEQ ID NO. 115595 is depicted, plastidic is mentioned, or a mitochondrial transit peptide in case in Table I, application no. 13, in column 6 in the same line as SEQ ID NO. 115595 is depicted, mitochondric is mentioned; which is operable linked, too.

[65722] In another embodiment thereof the expression cassette does not comprise an additional transit peptide in case in Table I, application no. 13, in column 6 in the same line as SEQ ID NO. 115595 is depicted, non-targeted is mentioned.

[65723] In an embodiment the present invention relates to an expresssion cassette comprising a) a promoter, preferably a promoter selected from the group consisting of Big35S, PCUbi, Super and USP, in particular p-Super; and b) the nucleic acid SEQ ID NO. 39013, or a homolog or fragment thereof, or a homolog thereof being depicted in Table I, application no. 13, column 8, in the same line as SEQ ID NO. 39013, preferably the coding region thereof, a homolog or a fragment thereof; which are operable linked.

[65724] In an embodiment thereof the expression cassette comprises in addition c) a nucleic acid molecule encoding a transit peptide, especially a plastidal transit petide in case in Table I, application no. 13, in column 6 in the same line as SEQ ID NO. 39013 is depicted, plastidic is mentioned, or a mitochondrial transit peptide in case in Table I, application no. 13, in column 6 in the same line as SEQ ID NO. 39013 is depicted, mitochondric is mentioned; which is operable linked, too.

[65725] In another embodiment thereof the expression cassette does not comprise an additional transit peptide in case in Table I, application no. 13, in column 6 in the same line as SEQ ID NO. 39013 is depicted, non-targeted is mentioned.

[65726] In an embodiment the present invention relates to an expresssion cassette comprising a) a promoter, preferably a promoter selected from the group consisting of Big35S, PCUbi, Super and USP, in particular p-Super; and b) the nucleic acid SEQ ID NO. 40329, or a homolog or fragment thereof, or a homolog thereof being depicted in Table I, application no. 13, column 8, in the same line as SEQ ID NO. 40329, preferably the coding region thereof, a homolog or a fragment thereof; which are operable linked.

[65727] In an embodiment thereof the expression cassette comprises in addition c) a nucleic acid molecule encoding a transit peptide, especially a plastidal transit petide in case in Table I, application no. 13, in column 6 in the same line as SEQ ID NO. 40329 is depicted, plastidic is mentioned, or a mitochondrial transit peptide in case in Table I, application no. 13, in column 6 in the same line as SEQ ID NO. 40329 is depicted, mitochondric is mentioned; which is operable linked, too.

[65728] In another embodiment thereof the expression cassette does not comprise an additional transit peptide in case in Table I, application no. 13, in column 6 in the same line as SEQ ID NO. 40329 is depicted, non-targeted is mentioned.

[65729] In an embodiment the present invention relates to an expresssion cassette comprising a) a promoter, preferably a promoter selected from the group consisting of Big35S, PCUbi, Super and USP, in particular p-Super; and b) the nucleic acid SEQ ID NO. 40741, or a homolog or fragment thereof, or a homolog thereof being depicted in Table I, application no. 13, column 8, in the same line as SEQ ID NO. 40741, preferably the coding region thereof, a homolog or a fragment thereof; which are operable linked.

[65730] In an embodiment thereof the expression cassette comprises in addition c) a nucleic acid molecule encoding a transit peptide, especially a plastidal transit petide in case in Table I, application no. 13, in column 6 in the same line as SEQ ID NO. 40741 is depicted, plastidic is mentioned, or a mitochondrial transit peptide in case in Table I, application no. 13, in column 6 in the same line as SEQ ID NO. 40741 is depicted, mitochondric is mentioned; which is operable linked, too.

[65731] In another embodiment thereof the expression cassette does not comprise an additional transit peptide in case in Table I, application no. 13, in column 6 in the same line as SEQ ID NO. 40741 is depicted, non-targeted is mentioned.

[65732] In an embodiment the present invention relates to an expresssion cassette comprising a) a promoter, preferably a promoter selected from the group consisting of Big35S, PCUbi, Super and USP, in particular p-Super; and b) the nucleic acid SEQ ID NO. 115719, or a homolog or fragment thereof, or a homolog thereof being depicted in Table I, application no. 13, column 8, in the same line as SEQ ID NO. 115719, preferably the coding region thereof, a homolog or a fragment thereof; which are operable linked.

[65733] In an embodiment thereof the expression cassette comprises in addition c) a nucleic acid molecule encoding a transit peptide, especially a plastidal transit petide in case in Table I, application no. 13, in column 6 in the same line as SEQ ID NO. 115719 is depicted, plastidic is mentioned, or a mitochondrial transit peptide in case in Table I, application no. 13, in column 6 in the same line as SEQ ID NO. 115719 is depicted, mitochondric is mentioned; which is operable linked, too.

[65734] In another embodiment thereof the expression cassette does not comprise an additional transit peptide in case in Table I, application no. 13, in column 6 in the same line as SEQ ID NO. 115719 is depicted, non-targeted is mentioned.

[65735] In an embodiment the present invention relates to an expresssion cassette comprising a) a promoter, preferably a promoter selected from the group consisting of Big35S, PCUbi, Super and USP, in particular p-USP; and b) the nucleic acid SEQ ID NO. 41073, or a homolog or fragment thereof, or a homolog thereof being depicted in Table I, application no. 13, column 8, in the same line as SEQ ID NO. 41073, preferably the coding region thereof, a homolog or a fragment thereof; which are operable linked.

[65736] In an embodiment thereof the expression cassette comprises in addition c) a nucleic acid molecule encoding a transit peptide, especially a plastidal transit petide in case in Table I, application no. 13, in column 6 in the same line as SEQ ID NO. 41073 is depicted, plastidic is mentioned, or a mitochondrial transit peptide in case in Table I, application no. 13, in column 6 in the same line as SEQ ID NO. 41073 is depicted, mitochondric is mentioned; which is operable linked, too.

[65737] In another embodiment thereof the expression cassette does not comprise an additional transit peptide in case in Table I, application no. 13, in column 6 in the same line as SEQ ID NO. 41073 is depicted, non-targeted is mentioned.

[65738] In an embodiment the present invention relates to an expresssion cassette comprising a) a promoter, preferably a promoter selected from the group consisting of Big35S, PCUbi, Super and USP, in particular p-USP; and b) the nucleic acid SEQ ID NO. 9492, or a homolog or fragment thereof, or a homolog thereof being depicted in Table I, application no. 13, column 8, in the same line as SEQ ID NO. 9492, preferably the coding region thereof, a homolog or a fragment thereof; which are operable linked.

[65739] In an embodiment thereof the expression cassette comprises in addition c) a nucleic acid molecule encoding a transit peptide, especially a plastidal transit petide in case in Table I, application no. 13, in column 6 in the same line as SEQ ID NO. 9492 is depicted, plastidic is mentioned, or a mitochondrial transit peptide in case in Table I, application no. 13, in column 6 in the same line as SEQ ID NO. 9492 is depicted, mitochondric is mentioned; which is operable linked, too.

[65740] In another embodiment thereof the expression cassette does not comprise an additional transit peptide in case in Table I, application no. 13, in column 6 in the same line as SEQ ID NO. 9492 is depicted, non-targeted is mentioned.

[65741] In an embodiment the present invention relates to an expresssion cassette comprising a) a promoter, preferably a promoter selected from the group consisting of Big35S, PCUbi, Super and USP, in particular p-Super; and b) the nucleic acid SEQ ID NO. 10104, or a homolog or fragment thereof, or a homolog thereof being depicted in Table I, application no. 13, column 8, in the same line as SEQ ID NO. 10104, preferably the coding region thereof, a homolog or a fragment thereof; which are operable linked.

[65742] In an embodiment thereof the expression cassette comprises in addition c) a nucleic acid molecule encoding a transit peptide, especially a plastidal transit petide in case in Table I, application no. 13, in column 6 in the same line as SEQ ID NO. 10104 is depicted, plastidic is mentioned, or a mitochondrial transit peptide in case in Table I, application no. 13, in column 6 in the same line as SEQ ID NO. 10104 is depicted, mitochondric is mentioned; which is operable linked, too.

[65743] In another embodiment thereof the expression cassette does not comprise an additional transit peptide in case in Table I, application no. 13, in column 6 in the same line as SEQ ID NO. 10104 is depicted, non-targeted is mentioned.

[65744] In an embodiment the present invention relates to an expresssion cassette comprising a) a promoter, preferably a promoter selected from the group consisting of Big35S, PCUbi, Super and USP, in particular p-USP; and b) the nucleic acid SEQ ID NO. 94386, or a homolog or fragment thereof, or a homolog thereof being depicted in Table I, application no. 13, column 8, in the same line as SEQ ID NO. 94386, preferably the coding region thereof, a homolog or a fragment thereof; which are operable linked.

[65745] In an embodiment thereof the expression cassette comprises in addition c) a nucleic acid molecule encoding a transit peptide, especially a plastidal transit petide in case in Table I, application no. 13, in column 6 in the same line as SEQ ID NO. 94386 is depicted, plastidic is mentioned, or a mitochondrial transit peptide in case in Table I, application no. 13, in column 6 in the same line as SEQ ID NO. 94386 is depicted, mitochondric is mentioned; which is operable linked, too.

[65746] In another embodiment thereof the expression cassette does not comprise an additional transit peptide in case in Table I, application no. 13, in column 6 in the same line as SEQ ID NO. 94386 is depicted, non-targeted is mentioned.

[65747] In an embodiment the present invention relates to an expresssion cassette comprising a) a promoter, preferably a promoter selected from the group consisting of Big35S, PCUbi, Super and USP, in particular p-Super; and b) the nucleic acid SEQ ID NO. 10708, or a homolog or fragment thereof, or a homolog thereof being depicted in Table I, application no. 13, column 8, in the same line as SEQ ID NO. 10708, preferably the coding region thereof, a homolog or a fragment thereof; which are operable linked.

[65748] In an embodiment thereof the expression cassette comprises in addition c) a nucleic acid molecule encoding a transit peptide, especially a plastidal transit petide in case in Table I, application no. 13, in column 6 in the same line as SEQ ID NO. 10708 is depicted, plastidic is mentioned, or a mitochondrial transit peptide in case in Table I, application no. 13, in column 6 in the same line as SEQ ID NO. 10708 is depicted, mitochondric is mentioned; which is operable linked, too.

[65749] In another embodiment thereof the expression cassette does not comprise an additional transit peptide in case in Table I, application no. 13, in column 6 in the same line as SEQ ID NO. 10708 is depicted, non-targeted is mentioned.

[65750] In an embodiment the present invention relates to an expresssion cassette comprising a) a promoter, preferably a promoter selected from the group consisting of Big35S, PCUbi, Super and USP, in particular p-USP; and b) the nucleic acid SEQ ID NO. 105659, or a homolog or fragment thereof, or a homolog thereof being depicted in Table I, application no. 13, column 8, in the same line as SEQ ID NO. 105659, preferably the coding region thereof, a homolog or a fragment thereof; which are operable linked.

[65751] In an embodiment thereof the expression cassette comprises in addition c) a nucleic acid molecule encoding a transit peptide, especially a plastidal transit petide in case in Table I, application no. 13, in column 6 in the same line as SEQ ID NO. 105659 is depicted, plastidic is mentioned, or a mitochondrial transit peptide in case in Table I, application no. 13, in column 6 in the same line as SEQ ID NO. 105659 is depicted, mitochondric is mentioned; which is operable linked, too.

[65752] In another embodiment thereof the expression cassette does not comprise an additional transit peptide in case in Table I, application no. 13, in column 6 in the same line as SEQ ID NO. 105659 is depicted, non-targeted is mentioned.

[65753] In an embodiment the present invention relates to an expresssion cassette comprising a) a promoter, preferably a promoter selected from the group consisting of Big35S, PCUbi, Super and USP, in particular p-USP; and b) the nucleic acid SEQ ID NO. 44378, or a homolog or fragment thereof, or a homolog thereof being depicted in Table I, application no. 13, column 8, in the same line as SEQ ID NO. 44378, preferably the coding region thereof, a homolog or a fragment thereof; which are operable linked.

[65754] In an embodiment thereof the expression cassette comprises in addition c) a nucleic acid molecule encoding a transit peptide, especially a plastidal transit petide in case in Table I, application no. 13, in column 6 in the same line as SEQ ID NO. 44378 is depicted, plastidic is mentioned, or a mitochondrial transit peptide in case in Table I, application no. 13, in column 6 in the same line as SEQ ID NO. 44378 is depicted, mitochondric is mentioned; which is operable linked, too.

[65755] In another embodiment thereof the expression cassette does not comprise an additional transit peptide in case in Table I, application no. 13, in column 6 in the same line as SEQ ID NO. 44378 is depicted, non-targeted is mentioned.

[65756] In an embodiment the present invention relates to an expresssion cassette comprising a) a promoter, preferably a promoter selected from the group consisting of Big35S, PCUbi, Super and USP, in particular p-Super; and b) the nucleic acid SEQ ID NO. 130673, or a homolog or fragment thereof, or a homolog thereof being depicted in Table I, application no. 13, column 8, in the same line as SEQ ID NO. 130673, preferably the coding region thereof, a homolog or a fragment thereof; which are operable linked.

[65757] In an embodiment thereof the expression cassette comprises in addition c) a nucleic acid molecule encoding a transit peptide, especially a plastidal transit petide in case in Table I, application no. 13, in column 6 in the same line as SEQ ID NO. 130673 is depicted, plastidic is mentioned, or a mitochondrial transit peptide in case in Table I, application no. 13, in column 6 in the same line as SEQ ID NO. 130673 is depicted, mitochondric is mentioned; which is operable linked, too.

[65758] In another embodiment thereof the expression cassette does not comprise an additional transit peptide in case in Table I, application no. 13, in column 6 in the same line as SEQ ID NO. 130673 is depicted, non-targeted is mentioned.

[65759] In an embodiment the present invention relates to an expresssion cassette comprising a) a promoter, preferably a promoter selected from the group consisting of Big35S, PCUbi, Super and USP, in particular p-USP; and b) the nucleic acid SEQ ID NO. 45556, or a homolog or fragment thereof, or a homolog thereof being depicted in Table I, application no. 13, column 8, in the same line as SEQ ID NO. 45556, preferably the coding region thereof, a homolog or a fragment thereof; which are operable linked.

[65760] In an embodiment thereof the expression cassette comprises in addition c) a nucleic acid molecule encoding a transit peptide, especially a plastidal transit petide in case in Table I, application no. 13, in column 6 in the same line as SEQ ID NO. 45556 is depicted, plastidic is mentioned, or a mitochondrial transit peptide in case in Table I, application no. 13, in column 6 in the same line as SEQ ID NO. 45556 is depicted, mitochondric is mentioned; which is operable linked, too.

[65761] In another embodiment thereof the expression cassette does not comprise an additional transit peptide in case in Table I, application no. 13, in column 6 in the same line as SEQ ID NO. 45556 is depicted, non-targeted is mentioned.

[65762] In an embodiment the present invention relates to an expresssion cassette comprising a) a promoter, preferably a promoter selected from the group consisting of Big35S, PCUbi, Super and USP, in particular p-PcUBI; and b) the nucleic acid SEQ ID NO. 46751, or a homolog or fragment thereof, or a homolog thereof being depicted in Table I, application no. 13, column 8, in the same line as SEQ ID NO. 46751, preferably the coding region thereof, a homolog or a fragment thereof; which are operable linked.

[65763] In an embodiment thereof the expression cassette comprises in addition c) a nucleic acid molecule encoding a transit peptide, especially a plastidal transit petide in case in Table I, application no. 13, in column 6 in the same line as SEQ ID NO. 46751 is depicted, plastidic is mentioned, or a mitochondrial transit peptide in case in Table I, application no. 13, in column 6 in the same line as SEQ ID NO. 46751 is depicted, mitochondric is mentioned; which is operable linked, too.

[65764] In another embodiment thereof the expression cassette does not comprise an additional transit peptide in case in Table I, application no. 13, in column 6 in the same line as SEQ ID NO. 46751 is depicted, non-targeted is mentioned.

[65765] In an embodiment the present invention relates to an expresssion cassette comprising a) a promoter, preferably a promoter selected from the group consisting of Big35S, PCUbi, Super and USP, in particular p-PcUBI; and b) the nucleic acid SEQ ID NO. 53189, or a homolog or fragment thereof, or a homolog thereof being depicted in Table I, application no. 13, column 8, in the same line as SEQ ID NO. 53189, preferably the coding region thereof, a homolog or a fragment thereof; which are operable linked.

[65766] In an embodiment thereof the expression cassette comprises in addition c) a nucleic acid molecule encoding a transit peptide, especially a plastidal transit petide in case in Table I, application no. 13, in column 6 in the same line as SEQ ID NO. 53189 is depicted, plastidic is mentioned, or a mitochondrial transit peptide in case in Table I, application no. 13, in column 6 in the same line as SEQ ID NO. 53189 is depicted, mitochondric is mentioned; which is operable linked, too.

[65767] In another embodiment thereof the expression cassette does not comprise an additional transit peptide in case in Table I, application no. 13, in column 6 in the same line as SEQ ID NO. 53189 is depicted, non-targeted is mentioned.

[65768] In an embodiment the present invention relates to an expresssion cassette comprising a) a promoter, preferably a promoter selected from the group consisting of Big35S, PCUbi, Super and USP, in particular p-PcUBI; and b) the nucleic acid SEQ ID NO. 58823, or a homolog or fragment thereof, or a homolog thereof being depicted in Table I, application no. 13, column 8, in the same line as SEQ ID NO. 58823, preferably the coding region thereof, a homolog or a fragment thereof; which are operable linked.

[65769] In an embodiment thereof the expression cassette comprises in addition c) a nucleic acid molecule encoding a transit peptide, especially a plastidal transit petide in case in Table I, application no. 13, in column 6 in the same line as SEQ ID NO. 58823 is depicted, plastidic is mentioned, or a mitochondrial transit peptide in case in Table I, application no. 13, in column 6 in the same line as SEQ ID NO. 58823 is depicted, mitochondric is mentioned; which is operable linked, too.

[65770] In another embodiment thereof the expression cassette does not comprise an additional transit peptide in case in Table I, application no. 13, in column 6 in the same line as SEQ ID NO. 58823 is depicted, non-targeted is mentioned.

[65771] In an embodiment the present invention relates to an expresssion cassette comprising a) a promoter, preferably a promoter selected from the group consisting of Big35S, PCUbi, Super and USP, in particular Big35S; and b) the nucleic acid SEQ ID NO. 63167, or a homolog or fragment thereof, or a homolog thereof being depicted in Table I, application no. 13, column 8, in the same line as SEQ ID NO. 63167, preferably the coding region thereof, a homolog or a fragment thereof; which are operable linked.

[65772] In an embodiment thereof the expression cassette comprises in addition c) a nucleic acid molecule encoding a transit peptide, especially a plastidal transit petide in case in Table I, application no. 13, in column 6 in the same line as SEQ ID NO. 63167 is depicted, plastidic is mentioned, or a mitochondrial transit peptide in case in Table I, application no. 13, in column 6 in the same line as SEQ ID NO. 63167 is depicted, mitochondric is mentioned; which is operable linked, too.

[65773] In another embodiment thereof the expression cassette does not comprise an additional transit peptide in case in Table I, application no. 13, in column 6 in the same line as SEQ ID NO. 63167 is depicted, non-targeted is mentioned.

[65774] In an embodiment the present invention relates to an expresssion cassette comprising a) a promoter, preferably a promoter selected from the group consisting of Big35S, PCUbi, Super and USP, in particular p-Super; and b) the nucleic acid SEQ ID NO. 14706, or a homolog or fragment thereof, or a homolog thereof being depicted in Table I, application no. 13, column 8, in the same line as SEQ ID NO. 14706, preferably the coding region thereof, a homolog or a fragment thereof; which are operable linked.

[65775] In an embodiment thereof the expression cassette comprises in addition c) a nucleic acid molecule encoding a transit peptide, especially a plastidal transit petide in case in Table I, application no. 13, in column 6 in the same line as SEQ ID NO. 14706 is depicted, plastidic is mentioned, or a mitochondrial transit peptide in case in Table I, application no. 13, in column 6 in the same line as SEQ ID NO. 14706 is depicted, mitochondric is mentioned; which is operable linked, too.

[65776] In another embodiment thereof the expression cassette does not comprise an additional transit peptide in case in Table I, application no. 13, in column 6 in the same line as SEQ ID NO. 14706 is depicted, non-targeted is mentioned.

[65777] In an embodiment the present invention relates to an expresssion cassette comprising a) a promoter, preferably a promoter selected from the group consisting of Big35S, PCUbi, Super and USP, in particular p-Super; and b) the nucleic acid SEQ ID NO. 90278, or a homolog or fragment thereof, or a homolog thereof being depicted in Table I, application no. 13, column 8, in the same line as SEQ ID NO. 90278, preferably the coding region thereof, a homolog or a fragment thereof; which are operable linked.

[65778] In an embodiment thereof the expression cassette comprises in addition c) a nucleic acid molecule encoding a transit peptide, especially a plastidal transit petide in case in Table I, application no. 13, in column 6 in the same line as SEQ ID NO. 90278 is depicted, plastidic is mentioned, or a mitochondrial transit peptide in case in Table I, application no. 13, in column 6 in the same line as SEQ ID NO. 90278 is depicted, mitochondric is mentioned; which is operable linked, too.

[65779] In another embodiment thereof the expression cassette does not comprise an additional transit peptide in case in Table I, application no. 13, in column 6 in the same line as SEQ ID NO. 90278 is depicted, non-targeted is mentioned.

[65780] In an embodiment the present invention relates to an expresssion cassette comprising a) a promoter, preferably a promoter selected from the group consisting of Big35S, PCUbi, Super and USP, in particular p-Super; and b) the nucleic acid SEQ ID NO. 130742, or a homolog or fragment thereof, or a homolog thereof being depicted in Table I, application no. 13, column 8, in the same line as SEQ ID NO. 130742, preferably the coding region thereof, a homolog or a fragment thereof; which are operable linked.

[65781] In an embodiment thereof the expression cassette comprises in addition c) a nucleic acid molecule encoding a transit peptide, especially a plastidal transit petide in case in Table I, application no. 13, in column 6 in the same line as SEQ ID NO. 130742 is depicted, plastidic is mentioned, or a mitochondrial transit peptide in case in Table I, application no. 13, in column 6 in the same line as SEQ ID NO. 130742 is depicted, mitochondric is mentioned; which is operable linked, too.

[65782] In another embodiment thereof the expression cassette does not comprise an additional transit peptide in case in Table I, application no. 13, in column 6 in the same line as SEQ ID NO. 130742 is depicted, non-targeted is mentioned.

[65783] In an embodiment the present invention relates to an expresssion cassette comprising a) a promoter, preferably a promoter selected from the group consisting of Big35S, PCUbi, Super and USP, in particular Big35S; and b) the nucleic acid SEQ ID NO. 130903, or a homolog or fragment thereof, or a homolog thereof being depicted in Table I, application no. 13, column 8, in the same line as SEQ ID NO. 130903, preferably the coding region thereof, a homolog or a fragment thereof; which are operable linked.

[65784] In an embodiment thereof the expression cassette comprises in addition c) a nucleic acid molecule encoding a transit peptide, especially a plastidal transit petide in case in Table I, application no. 13, in column 6 in the same line as SEQ ID NO. 130903 is depicted, plastidic is mentioned, or a mitochondrial transit peptide in case in Table I, application no. 13, in column 6 in the same line as SEQ ID NO. 130903 is depicted, mitochondric is mentioned; which is operable linked, too.

[65785] In another embodiment thereof the expression cassette does not comprise an additional transit peptide in case in Table I, application no. 13, in column 6 in the same line as SEQ ID NO. 130903 is depicted, non-targeted is mentioned.

[65786] In an embodiment the present invention relates to an expresssion cassette comprising a) a promoter, preferably a promoter selected from the group consisting of Big35S, PCUbi, Super and USP, in particular p-Super; and b) the nucleic acid SEQ ID NO. 130932, or a homolog or fragment thereof, or a homolog thereof being depicted in Table I, application no. 13, column 8, in the same line as SEQ ID NO. 130932, preferably the coding region thereof, a homolog or a fragment thereof; which are operable linked.

[65787] In an embodiment thereof the expression cassette comprises in addition c) a nucleic acid molecule encoding a transit peptide, especially a plastidal transit petide in case in Table I, application no. 13, in column 6 in the same line as SEQ ID NO. 130932 is depicted, plastidic is mentioned, or a mitochondrial transit peptide in case in Table I, application no. 13, in column 6 in the same line as SEQ ID NO. 130932 is depicted, mitochondric is mentioned; which is operable linked, too.

[65788] In another embodiment thereof the expression cassette does not comprise an additional transit peptide in case in Table I, application no. 13, in column 6 in the same line as SEQ ID NO. 130932 is depicted, non-targeted is mentioned.

[65789] In an embodiment the present invention relates to an expresssion cassette comprising a) a promoter, preferably a promoter selected from the group consisting of Big35S, PCUbi, Super and USP, in particular p-Super; and b) the nucleic acid SEQ ID NO. 130986, or a homolog or fragment thereof, or a homolog thereof being depicted in Table I, application no. 13, column 8, in the same line as SEQ ID NO. 130986, preferably the coding region thereof, a homolog or a fragment thereof; which are operable linked.

[65790] In an embodiment thereof the expression cassette comprises in addition c) a nucleic acid molecule encoding a transit peptide, especially a plastidal transit petide in case in Table I, application no. 13, in column 6 in the same line as SEQ ID NO. 130986 is depicted, plastidic is mentioned, or a mitochondrial transit peptide in case in Table I, application no. 13, in column 6 in the same line as SEQ ID NO. 130986 is depicted, mitochondric is mentioned; which is operable linked, too.

[65791] In another embodiment thereof the expression cassette does not comprise an additional transit peptide in case in Table I, application no. 13, in column 6 in the same line as SEQ ID NO. 130986 is depicted, non-targeted is mentioned.

[65792] In an embodiment the present invention relates to an expresssion cassette comprising a) a promoter, preferably a promoter selected from the group consisting of Big35S, PCUbi, Super and USP, in particular p-PcUBI; and b) the nucleic acid SEQ ID NO. 67646, or a homolog or fragment thereof, or a homolog thereof being depicted in Table I, application no. 13, column 8, in the same line as SEQ ID NO. 67646, preferably the coding region thereof, a homolog or a fragment thereof; which are operable linked.

[65793] In an embodiment thereof the expression cassette comprises in addition c) a nucleic acid molecule encoding a transit peptide, especially a plastidal transit petide in case in Table I, application no. 13, in column 6 in the same line as SEQ ID NO. 67646 is depicted, plastidic is mentioned, or a mitochondrial transit peptide in case in Table I, application no. 13, in column 6 in the same line as SEQ ID NO. 67646 is depicted, mitochondric is mentioned; which is operable linked, too.

[65794] In another embodiment thereof the expression cassette does not comprise an additional transit peptide in case in Table I, application no. 13, in column 6 in the same line as SEQ ID NO. 67646 is depicted, non-targeted is mentioned.

[65795] In an embodiment the present invention relates to an expresssion cassette comprising a) a promoter, preferably a promoter selected from the group consisting of Big35S, PCUbi, Super and USP, in particular Big35S; and b) the nucleic acid SEQ ID NO. 130713, or a homolog or fragment thereof, or a homolog thereof being depicted in Table I, application no. 13, column 8, in the same line as SEQ ID NO. 130713, preferably the coding region thereof, a homolog or a fragment thereof; which are operable linked.

[65796] In an embodiment thereof the expression cassette comprises in addition c) a nucleic acid molecule encoding a transit peptide, especially a plastidal transit petide in case in Table I, application no. 13, in column 6 in the same line as SEQ ID NO. 130713 is depicted, plastidic is mentioned, or a mitochondrial transit peptide in case in Table I, application no. 13, in column 6 in the same line as SEQ ID NO. 130713 is depicted, mitochondric is mentioned; which is operable linked, too.

[65797] In another embodiment thereof the expression cassette does not comprise an additional transit peptide in case in Table I, application no. 13, in column 6 in the same line as SEQ ID NO. 130713 is depicted, non-targeted is mentioned.

[65798] In an embodiment the present invention relates to an expresssion cassette comprising a) a promoter, preferably a promoter selected from the group consisting of Big35S, PCUbi, Super and USP, in particular Big35S; and b) the nucleic acid SEQ ID NO. 130999, or a homolog or fragment thereof, or a homolog thereof being depicted in Table I, application no. 13, column 8, in the same line as SEQ ID NO. 130999, preferably the coding region thereof, a homolog or a fragment thereof; which are operable linked.

[65799] In an embodiment thereof the expression cassette comprises in addition c) a nucleic acid molecule encoding a transit peptide, especially a plastidal transit petide in case in Table I, application no. 13, in column 6 in the same line as SEQ ID NO. 130999 is depicted, plastidic is mentioned, or a mitochondrial transit peptide in case in Table I, application no. 13, in column 6 in the same line as SEQ ID NO. 130999 is depicted, mitochondric is mentioned; which is operable linked, too.

[65800] In another embodiment thereof the expression cassette does not comprise an additional transit peptide in case in Table I, application no. 13, in column 6 in the same line as SEQ ID NO. 130999 is depicted, non-targeted is mentioned.

[65801] In an embodiment the present invention relates to an expresssion cassette comprising a) a promoter, preferably a promoter selected from the group consisting of Big35S, PCUbi, Super and USP, in particular p-Super; and b) the nucleic acid SEQ ID NO. 45394, or a homolog or fragment thereof, or a homolog thereof being depicted in Table I, application no. 13, column 8, in the same line as SEQ ID NO. 45394, preferably the coding region thereof, a homolog or a fragment thereof; which are operable linked.

[65802] In an embodiment thereof the expression cassette comprises in addition c) a nucleic acid molecule encoding a transit peptide, especially a plastidal transit petide in case in Table I, application no. 13, in column 6 in the same line as SEQ ID NO. 45394 is depicted, plastidic is mentioned, or a mitochondrial transit peptide in case in Table I, application no. 13, in column 6 in the same line as SEQ ID NO. 45394 is depicted, mitochondric is mentioned; which is operable linked, too.

[65803] In another embodiment thereof the expression cassette does not comprise an additional transit peptide in case in Table I, application no. 13, in column 6 in the same line as SEQ ID NO. 45394 is depicted, non-targeted is mentioned.

[65804] In an embodiment the present invention relates to an expresssion cassette comprising a) a promoter, preferably a promoter selected from the group consisting of Big35S, PCUbi, Super and USP, in particular p-PcUBI; and b) the nucleic acid SEQ ID NO. 54337, or a homolog or fragment thereof, or a homolog thereof being depicted in Table I, application no. 13, column 8, in the same line as SEQ ID NO. 54337, preferably the coding region thereof, a homolog or a fragment thereof; which are operable linked.

[65805] In an embodiment thereof the expression cassette comprises in addition c) a nucleic acid molecule encoding a transit peptide, especially a plastidal transit petide in case in Table I, application no. 13, in column 6 in the same line as SEQ ID NO. 54337 is depicted, plastidic is mentioned, or a mitochondrial transit peptide in case in Table I, application no. 13, in column 6 in the same line as SEQ ID NO. 54337 is depicted, mitochondric is mentioned; which is operable linked, too.

[65806] In another embodiment thereof the expression cassette does not comprise an additional transit peptide in case in Table I, application no. 13, in column 6 in the same line as SEQ ID NO. 54337 is depicted, non-targeted is mentioned.

[65807] In an embodiment the present invention relates to an expresssion cassette comprising a) a promoter, preferably a promoter selected from the group consisting of Big35S, PCUbi, Super and USP, in particular p-PcUBI; and b) the nucleic acid SEQ ID NO. 86447, or a homolog or fragment thereof, or a homolog thereof being depicted in Table I, application no. 13, column 8, in the same line as SEQ ID NO. 86447, preferably the coding region thereof, a homolog or a fragment thereof; which are operable linked.

[65808] In an embodiment thereof the expression cassette comprises in addition c) a nucleic acid molecule encoding a transit peptide, especially a plastidal transit petide in case in Table I, application no. 13, in column 6 in the same line as SEQ ID NO. 86447 is depicted, plastidic is mentioned, or a mitochondrial transit peptide in case in Table I, application no. 13, in column 6 in the same line as SEQ ID NO. 86447 is depicted, mitochondric is mentioned; which is operable linked, too.

[65809] In another embodiment thereof the expression cassette does not comprise an additional transit peptide in case in Table I, application no. 13, in column 6 in the same line as SEQ ID NO. 86447 is depicted, non-targeted is mentioned.

[65810] In an embodiment the present invention relates to an expresssion cassette comprising a) a promoter, preferably a promoter selected from the group consisting of Big35S, PCUbi, Super and USP, in particular p-PcUBI; and b) the nucleic acid SEQ ID NO. 68657, or a homolog or fragment thereof, or a homolog thereof being depicted in Table I, application no. 13, column 8, in the same line as SEQ ID NO. 68657, preferably the coding region thereof, a homolog or a fragment thereof; which are operable linked.

[65811] In an embodiment thereof the expression cassette comprises in addition c) a nucleic acid molecule encoding a transit peptide, especially a plastidal transit petide in case in Table I, application no. 13, in column 6 in the same line as SEQ ID NO. 68657 is depicted, plastidic is mentioned, or a mitochondrial transit peptide in case in Table I, application no. 13, in column 6 in the same line as SEQ ID NO. 68657 is depicted, mitochondric is mentioned; which is operable linked, too.

[65812] In another embodiment thereof the expression cassette does not comprise an additional transit peptide in case in Table I, application no. 13, in column 6 in the same line as SEQ ID NO. 68657 is depicted, non-targeted is mentioned.

[65813] In an embodiment the present invention relates to an expresssion cassette comprising a) a promoter, preferably a promoter selected from the group consisting of Big35S, PCUbi, Super and USP, in particular p-PcUBI; and b) the nucleic acid SEQ ID NO. 18235, or a homolog or fragment thereof, or a homolog thereof being depicted in Table I, application no. 13, column 8, in the same line as SEQ ID NO. 18235, preferably the coding region thereof, a homolog or a fragment thereof; which are operable linked.

[65814] In an embodiment thereof the expression cassette comprises in addition c) a nucleic acid molecule encoding a transit peptide, especially a plastidal transit petide in case in Table I, application no. 13, in column 6 in the same line as SEQ ID NO. 18235 is depicted, plastidic is mentioned, or a mitochondrial transit peptide in case in Table I, application no. 13, in column 6 in the same line as SEQ ID NO. 18235 is depicted, mitochondric is mentioned; which is operable linked, too.

[65815] In another embodiment thereof the expression cassette does not comprise an additional transit peptide in case in Table I, application no. 13, in column 6 in the same line as SEQ ID NO. 18235 is depicted, non-targeted is mentioned.

[65816] In an embodiment the present invention relates to an expresssion cassette comprising a) a promoter, preferably a promoter selected from the group consisting of Big35S, PCUbi, Super and USP, in particular p-PcUBI; and b) the nucleic acid SEQ ID NO. 19419, or a homolog or fragment thereof, or a homolog thereof being depicted in Table I, application no. 13, column 8, in the same line as SEQ ID NO. 19419, preferably the coding region thereof, a homolog or a fragment thereof; which are operable linked.

[65817] In an embodiment thereof the expression cassette comprises in addition c) a nucleic acid molecule encoding a transit peptide, especially a plastidal transit petide in case in Table I, application no. 13, in column 6 in the same line as SEQ ID NO. 19419 is depicted, plastidic is mentioned, or a mitochondrial transit peptide in case in Table I, application no. 13, in column 6 in the same line as SEQ ID NO. 19419 is depicted, mitochondric is mentioned; which is operable linked, too.

[65818] In another embodiment thereof the expression cassette does not comprise an additional transit peptide in case in Table I, application no. 13, in column 6 in the same line as SEQ ID NO. 19419 is depicted, non-targeted is mentioned.

[65819] In an embodiment the present invention relates to an expresssion cassette comprising a) a promoter, preferably a promoter selected from the group consisting of Big35S, PCUbi, Super and USP, in particular p-PcUBI; and b) the nucleic acid SEQ ID NO. 70715, or a homolog or fragment thereof, or a homolog thereof being depicted in Table I, application no. 13, column 8, in the same line as SEQ ID NO. 70715, preferably the coding region thereof, a homolog or a fragment thereof; which are operable linked.

[65820] In an embodiment thereof the expression cassette comprises in addition c) a nucleic acid molecule encoding a transit peptide, especially a plastidal transit petide in case in Table I, application no. 13, in column 6 in the same line as SEQ ID NO. 70715 is depicted, plastidic is mentioned, or a mitochondrial transit peptide in case in Table I, application no. 13, in column 6 in the same line as SEQ ID NO. 70715 is depicted, mitochondric is mentioned; which is operable linked, too.

[65821] In another embodiment thereof the expression cassette does not comprise an additional transit peptide in case in Table I, application no. 13, in column 6 in the same line as SEQ ID NO. 70715 is depicted, non-targeted is mentioned.

[65822] In an embodiment the present invention relates to an expresssion cassette comprising a) a promoter, preferably a promoter selected from the group consisting of Big35S, PCUbi, Super and USP, in particular p-PcUBI; and b) the nucleic acid SEQ ID NO. 20346, or a homolog or fragment thereof, or a homolog thereof being depicted in Table I, application no. 13, column 8, in the same line as SEQ ID NO. 20346, preferably the coding region thereof, a homolog or a fragment thereof; which are operable linked.

[65823] In an embodiment thereof the expression cassette comprises in addition c) a nucleic acid molecule encoding a transit peptide, especially a plastidal transit petide in case in Table I, application no. 13, in column 6 in the same line as SEQ ID NO. 20346 is depicted, plastidic is mentioned, or a mitochondrial transit peptide in case in Table I, application no. 13, in column 6 in the same line as SEQ ID NO. 20346 is depicted, mitochondric is mentioned; which is operable linked, too.

[65824] In another embodiment thereof the expression cassette does not comprise an additional transit peptide in case in Table I, application no. 13, in column 6 in the same line as SEQ ID NO. 20346 is depicted, non-targeted is mentioned.

[65825] [0165.1.7.13] to [0170.1.7.13] for the disclosure of these paragraphs see [0165.1.7.7] to [0170.1.7.7] above

[65826] The invention further provides a vector, comprising a nucleic acid molecule comprising 1) a nucleic acid molecule selected from the group consisting of:
[65827] (a) a nucleic acid molecule encoding a polypeptide shown in Table II, column 5 or 8, application no. 13, preferably shown in Table II A, application no. 13, in column 5, or in Table II A, application no. 13, column 8, or in Table II B, application no. 13, column 8, or a homolog or a fragment thereof;
[65828] (b) a nucleic acid molecule shown in Table I, application no. 13, column 5 or 8, preferably shown in Table I A, application no. 13, in column 5, or in Table I A, application no. 13, column 8, or in Table I B, application no. 13, column 8, preferably the coding region thereof, or a homolog or a fragment thereof;
[65829] (c) a nucleic acid molecule, which, as a result of the degeneracy of the genetic code, can be derived from a polypeptide sequence depicted in column 5 or 8 of Table II, application no. 13, preferably shown in Table II A, application no. 13, in column 5, or in Table II A, application no. 13, column 8, or in Table II B, application no. 13, column 8;
[65830] (d) a nucleic acid molecule having at least 30% identity, preferably at least 40%, 50%, 60%, 70%, 75%, 80%, 85%, 90%, 95%, 96%, 97%, 98%, 99%, 99.5%, with the nucleic acid molecule sequence of a polynucleotide comprising the nucleic acid molecule shown in column 5 or 8 of Table I, application no. 13, preferably shown in Table I A, application no. 13, in column 5, or in Table I A, application no. 13, column 8, or in Table I B, application no. 13, column 8, preferably the coding region thereof;
[65831] (e) a nucleic acid molecule encoding a polypeptide having at least 30% identity, preferably at least 40%, 50% 60%, 70%, 75%, 80%, 85%, 90%, 95%, 96%, 97%, 98%, 99%, 99.5%, identity with the amino acid sequence of the polypeptide encoded by the nucleic acid molecule of (a), (b), (c), or (d);
[65832] (f) a nucleic acid molecule which hybridizes with a nucleic acid molecule of (a), (b), (c), (d), or (e) under stringent hybridization conditions;
[65833] (g) a nucleic acid molecule encoding a polypeptide which can be isolated with the aid of monoclonal or polyclonal antibodies made against a polypeptide encoded by one of the nucleic acid molecules of (a), (b), (c), (d), (e) or (f);
[65834] (h) a nucleic acid molecule encoding a polypeptide comprising the consensus sequence or one or more polypeptide motifs as shown in column 8 of Table IV, application no. 13;
[65835] (i) a nucleic acid molecule encoding a polypeptide having the activity represented by a protein as depicted in column 5 of Table II, application no. 13;
[65836] (j) a nucleic acid molecule comprising a polynucleotide which is obtained by amplifying a cDNA library or a genomic library using the primers in Table III, application no. 13, column 8;
[65837] and
[65838] (k) nucleic acid molecule which is obtainable by screening a suitable nucleic acid library, especially a cDNA library and/or a genomic library, under stringent hybridization conditions with a probe comprising one of the sequences of the nucleic acid molecule of (a), (b), (c), (d), (e), (f), (g), (h), (i) or (j) or with a fragment thereof having at least 15 nt, preferably 20 nt, 30 nt, 50 nt, 100 nt, 200 nt, 500 nt, 1000 nt, 1500 nt, 2000 nt or 3000 nt of the nucleic acid molecule complementary to a nucleic acid sequence characterized in (a), (b), (c), (d), (e), (f), (g), (h), (i) or (j);
[65839] or a nucleic acid molecule comprising a sequence which is complementary thereto.
   (All the references to Tables I to IV are references to the corresponding lines of Tables I to IV.)

[65840] In a preferred embodiment of said vector said nucleic acid molecule according to 1 (a), (b), (c), (d), (e), (f), (g), (h), (i), (j) or (k) encodes a polypeptide which has the activity of the respective polypeptide represented by a protein comprising a polypeptide as depicted in the respective line in column 5 of Table II, application no. 13.

[65841] In another preferred embodiment of said vector said nucleic acid molecule according to 1 (a), (b), (c), (d), (e), (f), (g), (h), (i), (j) or (k) confers a generation or an increase of the respective fine chemical in a non-human organism or a part thereof as compared to a corresponding wild-type non-human organism or part thereof.

[65842] In another preferred embodiment of said vector said nucleic acid molecule according to 1 (a), (b), (c), (d), (e), (f), (g), (h), (i), (j) or (k) encodes a polypeptide which has the activity of the respective polypeptide represented by a protein as depicted in the respective line in column 5 of Table II, application no. 13, and confers a generation or an increase of the respective fine chemical in a non-human organism or a part thereof as compared to a corresponding wild-type non-human organism or part thereof.

[65843] In another embodiment thereof said vector comprises beneath said nucleic acid molecule according to 1 (a), (b), (c), (d), (e), (f), (g), (h), (i), (j) or (k), a promoter, preferably a promoter selected from the group consisting of Big35S, PCUbi, Super and USP, which are operable linked.

[65844] In a preferred embodiment thereof said vector comprises beneath said nucleic acid molecule according to 1 (a), (b), (c), (d), (e), (f), (g), (h), (i), (j) or (k), a promoter, preferably a promoter selected from the group consisting of Big35S, PCUbi, Super and USP, which are operable linked; and said nucleic acid molecule according to 1 (a), (b), (c), (d), (e), (f), (g), (h), (i), (j) or (k) encodes a polypeptide which has the activity of the respective polypeptide represented by a protein comprising a polypeptide as depicted in the respective line in column 5 of Table II, application no. 13.

[65845] In another preferred embodiment thereof said vector comprises beneath said nucleic acid molecule according to 1 (a), (b), (c), (d), (e), (f), (g), (h), (i), (j) or (k), a promoter, preferably a promoter selected from the group consisting of Big35S, PCUbi, Super and USP, which are operable linked; and said nucleic acid molecule according to 1 (a), (b), (c), (d), (e), (f), (g), (h), (i), (j) or (k) confers a generation or an increase of the respective fine chemical in a non-human organism or a part thereof as compared to a corresponding wild-type non-human organism or part thereof.

[65846] In another preferred embodiment thereof said vector comprises beneath said nucleic acid molecule according to 1 (a), (b), (c), (d), (e), (f), (g), (h), (i), (j) or (k), a promoter, preferably a promoter selected from the group consisting of Big35S, PCUbi, Super and USP, which are operable linked; and said nucleic acid molecule according to 1 (a), (b), (c), (d), (e), (f), (g), (h), (i), (j) or (k) encodes a polypeptide which has the activity of the respective polypeptide represented by a protein as depicted in the respective line in column 5 of Table II, application no. 13, and confers a generation or an increase of the respective fine chemical in a non-human organism or a part thereof as compared to a corresponding wild-type non-human organism or part thereof.

[65847] In another embodiment thereof said vector comprises beneath said nucleic acid molecule according to 1 (a), (b), (c), (d), (e), (f), (g), (h), (i), (j) or (k), a nucleic acid molecule encoding a transit peptide, preferably encoding a plastidal transit peptide, especially in case in column 6 of Table I, application no. 13, in the same line as of the respective nucleic acid molecule according to 1) “plastidic” is depicted, or encoding a mitochondrial transit peptide, especially in case in column 6 of Table I, application no. 13, in the same line as of the respective nucleic acid molecule according to 1) “mitochondric” is depicted, which are operable linked.

[65848] In another embodiment thereof said vector does not comprise beneath said nucleic acid molecule according to 1 (a), (b), (c), (d), (e), (f), (g), (h), (i), (j) or (k), a nucleic acid molecule encoding a transit peptide in case in column 6 of Table I, application no. 13, in the same line as of the respective nucleic acid molecule according to 1) “non-targeted” is depicted.

[65849] In another embodiment thereof said vector comprises beneath said nucleic acid molecule according to 1 (a), (b), (c), (d), (e), (f), (g), (h), (i), (j) or (k), and a promoter, preferably a promoter selected from the group consisting of Big35S, PCUbi, Super and USP; a nucleic acid molecule encoding a transit peptide, preferably encoding a plastidal transit peptide, especially in case in column 6 of Table I, application no. 13, in the same line as of the respective nucleic acid molecule according to 1) “plastidic” is depicted, or encoding a mitochondrial transit peptide, especially in case in column 6 of Table I, application no. 13, in the same line as of the respective nucleic acid molecule according to 1) “mitochondric” is depicted, which are operable linked.

[65850] In another embodiment thereof said vector does not comprise beneath said nucleic acid molecule according to 1 (a), (b), (c), (d), (e), (f), (g), (h), (i), (j) or (k), and a promoter, preferably a promoter selected from the group consisting of Big35S, PCUbi, Super and USP, which are operable linked; a nucleic acid molecule encoding a transit peptide, especially in case in column 6 of Table I, application no. 13, in the same line as of the respective nucleic acid molecule according to 1) “non-targeted” is depicted.

[65851] In another embodiment thereof said vector comprises beneath said nucleic acid molecule according to 1 (a), (b), (c), (d), (e), (f), (g), (h), (i), (j) or (k), and a promoter, preferably a promoter selected from the group consisting of Big35S, PCUbi, Super and USP; a nucleic acid molecule encoding a transit peptide, preferably encoding a plastidal transit peptide, especially in case in column 6 of Table I, application no. 13, in the same line as of the respective nucleic acid molecule according to 1) “plastidic” is depicted, or encoding a mitochondrial transit peptide, especially in case in column 6 of Table I, application no. 13, in the same line as of the respective nucleic acid molecule according to 1) “mitochondric” is depicted, which are operable linked; and wherein said nucleic acid molecule according to 1 (a), (b), (c), (d), (e), (f), (g), (h), (i), (j) or (k) encodes a polypeptide which has the activity of the respective polypeptide represented by a protein comprising a polypeptide as depicted in column 5 of Table II, application no. 13 (in the same line).

[65852] In another embodiment thereof said vector does not comprise beneath said nucleic acid molecule according to 1 (a), (b), (c), (d), (e), (f), (g), (h), (i), (j) or (k), and a promoter, preferably a promoter selected from the group consisting of Big35S, PCUbi, Super and USP, which are operatively linked; a nucleic acid molecule encoding a transit peptide, especially in case in column 6 of Table I, application no. 13, in the same line as of the respective nucleic acid molecule according to 1) “non-targeted” is depicted; and wherein said nucleic acid molecule according to 1 (a), (b), (c), (d), (e), (f), (g), (h), (i), (j) or (k) encodes a polypeptide which has the activity of the respective polypeptide represented by a protein comprising a polypeptide as depicted in column 5 of Table II, application no. 13.

[65853] In another embodiment thereof said vector comprises beneath said nucleic acid molecule according to 1 (a), (b), (c), (d), (e), (f), (g), (h), (i), (j) or (k), and a promoter, preferably a promoter selected from the group consisting of Big35S, PCUbi, Super and USP; a nucleic acid molecule encoding a transit peptide, preferably encoding a plastidal transit peptide, especially in case in column 6 of Table I, application no. 13, in the same line as of the respective nucleic acid molecule according to 1) “plastidic” is depicted, or encoding a mitochondrial transit peptide, especially in case in column 6 of Table I, application no. 13, in the same line as of the respective nucleic acid molecule according to 1) “mitochondric” is depicted, which are operable linked; and wherein said nucleic acid molecule according to 1 (a), (b), (c), (d), (e), (f), (g), (h), (i), (j) or (k) confers a generation or an increase of the respective fine chemical in a non-human organism or a part thereof as compared to a corresponding wild-type non-human organism or part thereof.

[65854] In another embodiment thereof said vector does not comprise beneath said nucleic acid molecule according to 1 (a), (b), (c), (d), (e), (f), (g), (h), (i), (j) or (k), and a promoter, preferably a promoter selected from the group consisting of Big35S, PCUbi, Super and USP, which are operatively linked; a nucleic acid molecule encoding a transit peptide, especially in case in column 6 of Table I, application no. 13, in the same line as of the respective nucleic acid molecule according to 1) “non-targeted” is depicted; and wherein said nucleic acid molecule according to 1 (a), (b), (c), (d), (e), (f), (g), (h), (i), (j) or (k) confers a generation or an increase of the respective fine chemical in a non-human organism or a part thereof as compared to a corresponding wild-type non-human organism or part thereof.

[65855] In another embodiment thereof said vector comprises beneath said nucleic acid molecule according to 1 (a), (b), (c), (d), (e), (f), (g), (h), (i), (j) or (k), and a promoter, preferably a promoter selected from the group consisting of Big35S, PCUbi, Super and USP; a nucleic acid molecule encoding a transit peptide, preferably encoding a plastidal transit peptide, especially in case in column 6 of Table I, application no. 13, in the same line as of the respective nucleic acid molecule according to 1) “plastidic” is depicted, or encoding a mitochondrial transit peptide, especially in case in column 6 of Table I, application no. 13, in the same line as of the respective nucleic acid molecule according to 1) “mitochondric” is depicted, which are operable linked; and wherein said nucleic acid molecule according to 1 (a), (b), (c), (d), (e), (f), (g), (h), (i), (j) or (k) encodes a polypeptide which has the activity of the respective polypeptide represented by a protein as depicted in column 5 of Table II application no. 13 and confers a generation or an increase of the respective fine chemical in a non-human organism or a part thereof as compared to a corresponding wild-type non-human organism or part thereof.

[65856] In another embodiment thereof said vector does not comprise beneath said nucleic acid molecule according to 1 (a), (b), (c), (d), (e), (f), (g), (h), (i), (j) or (k), and a promoter, preferably a promoter selected from the group consisting of Big35S, PCUbi, Super and USP, which are operatively linked; a nucleic acid molecule encoding a transit peptide, especially in case in column 6 of Table I, application no. 13, in the same line as of the respective nucleic acid molecule according to 1) “non-targeted” is depicted; and wherein said nucleic acid molecule according to 1 (a), (b), (c), (d), (e), (f), (g), (h), (i), (j) or (k) encodes a polypeptide which has the activity of the respective polypeptide represented by a protein as depicted in column 5 of Table II application no. 13 (in the same line) and confers a generation or an increase of the respective fine chemical in a non-human organism or a part thereof as compared to a corresponding wild-type non-human organism or part thereof.

[65857] In a preferred embodiment of said vector said nucleic acid molecule according to 1 (a), (b), (c), (d), (e), (f), (g), (h), (i), (j) or (k), said promoter and optionally said nucleic acid molecule encoding a transit peptide are encompassed in an expression cassette. Accordingly in an embodiment the invention provides a vector comprising an expression cassette comprising said nucleic acid molecule according to 1 (a), (b), (c), (d), (e), (f), (g), (h), (i), (j) or (k), said promoter and optionally said a nucleic acid molecule encoding a transit peptide, operable linked. Said expression cassette may encompass a terminator, too.

[65858] The invention further provides a vector comprising a nucleic acid molecule comprising 1) a nucleic acid molecule selected from the group consisting of:
[65859] (a) a nucleic acid molecule encoding a polypeptide shown in Table II, column 5 or 8, application no. 13, preferably shown in Table II A, application no. 13, in column 5, or in Table II A, application no. 13, column 8, or in Table II B, application no. 13, column 8, or a homolog or a fragment thereof;
[65860] (b) a nucleic acid molecule shown in Table I, application no. 13, column 5 or 8, preferably shown in Table I A, application no. 13, in column 5, or in Table I A, application no. 13, column 8, or in Table I B, application no. 13, column 8, preferably the coding region thereof, or a homolog or a fragment thereof;
[65861] (c) a nucleic acid molecule, which, as a result of the degeneracy of the genetic code, can be derived from a polypeptide sequence depicted in column 5 or 8 of Table II, application no. 13, preferably shown in Table II A, application no. 13, in column 5, or in Table II A, application no. 13, column 8, or in Table II B, application no. 13, column 8;
[65862] (d) a nucleic acid molecule having at least 30% identity, preferably at least 40%, 50%, 60%, 70%, 75%, 80%, 85%, 90%, 95%, 96%, 97%, 98%, 99%, 99.5%, with the nucleic acid molecule sequence of a polynucleotide comprising the nucleic acid molecule shown in column 5 or 8 of Table I, application no. 13, preferably shown in Table I A, application no. 13, in column 5, or in Table I A, application no. 13, column 8, or in Table I B, application no. 13, column 8, preferably the coding region thereof;
[65863] (e) a nucleic acid molecule encoding a polypeptide having at least 30% identity, preferably at least 40%, 50% 60%, 70%, 75%, 80%, 85%, 90%, 95%, 96%, 97%, 98%, 99%, 99.5%, identity with the amino acid sequence of the polypeptide encoded by the nucleic acid molecule of (a), (b), (c), or (d);
[65864] (f) a nucleic acid molecule which hybridizes with a nucleic acid molecule of (a), (b), (c), (d), or (e) under stringent hybridization conditions;
[65865] (g) a nucleic acid molecule encoding a polypeptide which can be isolated with the aid of monoclonal or polyclonal antibodies made against a polypeptide encoded by one of the nucleic acid molecules of (a), (b), (c), (d), (e) or (f);
[65866] (h) a nucleic acid molecule encoding a polypeptide comprising the consensus sequence or one or more polypeptide motifs as shown in column 8 of Table IV, application no. 13;
[65867] (i) a nucleic acid molecule encoding a polypeptide having the activity represented by a protein as depicted in column 5 of Table II, application no. 13;
[65868] (j) a nucleic acid molecule comprising a polynucleotide which is obtained by amplifying a cDNA library or a genomic library using the primers in Table III, application no. 13, column 8;
[65869] and
[65870] (k) nucleic acid molecule which is obtainable by screening a suitable nucleic acid library, especially a cDNA library and/or a genomic library, under stringent hybridization conditions with a probe comprising one of the sequences of the nucleic acid molecule of (a), (b), (c), (d), (e), (f), (g), (h), (i) or (j) or with a fragment thereof having at least 15 nt, preferably 20 nt, 30 nt, 50 nt, 100 nt, 200 nt, 500 nt, 1000 nt, 1500 nt, 2000 nt or 3000 nt of the nucleic acid molecule complementary to a nucleic acid sequence characterized in (a), (b), (c), (d), (e), (f), (g), (h), (i) or (j);
[65871] or a nucleic acid molecule comprising a sequence which is complementary thereto;
   whereby, preferably, the nucleic acid molecule according to 1 (a), (b), (c), (d), (e), (f), (g), (h), (i), (j) or (k) distinguishes over the sequence depicted in Table I A and/or I B, application no. 13, column 5 or 8, or the coding region thereof, by one or more nucleotides (especially but not exceeding 5%, preferably 4%, 3%, 2%, 1%, 0.5%, 0.2% or 0.1%). In an embodiment, the nucleic acid molecule of the invention does not consist of the sequence shown in Table I A and/or I B, application no. 13, column 5 or 8, or the coding region thereof, respectively. In another embodiment, the nucleic acid molecule of the present invention, preferably the coding region thereof, is 30%, 40%, 50%, 60%, 70%, 80%, 90%, 95% identical but less than 100%, 99.999%, 99.99%, 99.9%, 99%, 98%, 97%, 96% or 95% identical to the sequence shown in Table I A and/or I B, application no. 13, column 5 or 8, or the coding region thereof, respectively. In a further embodiment the nucleic acid molecule does not encode the polypeptide sequence shown in Table II A and/or II B, application no. 13, column 5 or 8 but homologs thereof. Accordingly, in one embodiment, the nucleic acid molecule of the present invention encodes in one embodiment a polypeptide which differs at least in one or more amino acids (especially but not exceeding 5%, preferably 4%, 3%, 2%, 1%, 0.5%, 0.2% or 0.1%) from the polypeptide shown in Table II, application no. 13, column 5 or 8 and does not encode a protein of the sequence shown in Table II A and/or II B, application no. 13, column 5 or 8. Accordingly, in one embodiment, the protein encoded by a sequence of a nucleic acid according to (a), (b), (c), (d), (e), (f), (g), (h), (i), (j) or (k) does not consist of the sequence shown in Table I A and/or I B, application no. 13, column 5 and 8, or the coding region thereof. In a further embodiment, the protein of the present invention is at least 30%,40%, 50%, 60%, 70%, 80%, 90%, 95% identical to protein sequence depicted in Table II A and/or II B, application no. 13, column 5 or 8 but less than 100%, preferably less than 99.999%, 99.99% or 99.9%, more preferably less than 99%, 985, 97%, 96% or 95% identical to the sequence shown in Table II A and/or II B, application no. 13, column 5 or 8.
   (All the references to Tables I to IV are references to the corresponding lines of Tables I to IV.)

[65872] In a preferred embodiment of said vector said nucleic acid molecule according to 1 (a), (b), (c), (d), (e), (f), (g), (h), (i), (j) or (k) encodes a polypeptide which has the activity of the respective polypeptide represented by a protein comprising a polypeptide as depicted in the respective line in column 5 of Table II, application no. 13.

[65873] In another preferred embodiment of said vector said nucleic acid molecule according to 1 (a), (b), (c), (d), (e), (f), (g), (h), (i), (j) or (k) confers a generation or an increase of the respective fine chemical in a non-human organism or a part thereof as compared to a corresponding wild-type non-human organism or part thereof.

[65874] In another preferred embodiment of said vector said nucleic acid molecule according to 1 (a), (b), (c), (d), (e), (f), (g), (h), (i), (j) or (k) encodes a polypeptide which has the activity of the respective polypeptide represented by a protein as depicted in the respective line in column 5 of Table II, application no. 13, and confers a generation or an increase of the respective fine chemical in a non-human organism or a part thereof as compared to a corresponding wild-type non-human organism or part thereof.

[65875] In another embodiment thereof said vector comprises beneath said nucleic acid molecule according to 1 (a), (b), (c), (d), (e), (f), (g), (h), (i), (j) or (k), a promoter, preferably a promoter selected from the group consisting of Big35S, PCUbi, Super and USP, which are operable linked.

[65876] In a preferred embodiment thereof said vector comprises beneath said nucleic acid molecule according to 1 (a), (b), (c), (d), (e), (f), (g), (h), (i), (j) or (k), a promoter, preferably a promoter selected from the group consisting of Big35S, PCUbi, Super and USP, which are operable linked; and said nucleic acid molecule according to 1 (a), (b), (c), (d), (e), (f), (g), (h), (i), (j) or (k) encodes a polypeptide which has the activity of the respective polypeptide represented by a protein comprising a polypeptide as depicted in the respective line in column 5 of Table II, application no. 13.

[65877] In another preferred embodiment thereof said vector comprises beneath said nucleic acid molecule according to 1 (a), (b), (c), (d), (e), (f), (g), (h), (i), (j) or (k), a promoter, preferably a promoter selected from the group consisting of Big35S, PCUbi, Super and USP, which are operable linked; and said nucleic acid molecule according to 1 (a), (b), (c), (d), (e), (f), (g), (h), (i), (j) or (k) confers a generation or an increase of the respective fine chemical in a non-human organism or a part thereof as compared to a corresponding wild-type non-human organism or part thereof.

[65878] In another preferred embodiment thereof said vector comprises beneath said nucleic acid molecule according to 1 (a), (b), (c), (d), (e), (f), (g), (h), (i), (j) or (k), a promoter, preferably a promoter selected from the group consisting of Big35S, PCUbi, Super and USP, which are operable linked; and said nucleic acid molecule according to 1 (a), (b), (c), (d), (e), (f), (g), (h), (i), (j) or (k) encodes a polypeptide which has the activity of the respective polypeptide represented by a protein as depicted in the respective line in column 5 of Table II, application no. 13, and confers a generation or an increase of the respective fine chemical in a non-human organism or a part thereof as compared to a corresponding wild-type non-human organism or part thereof.

[65879] In another embodiment thereof said vector comprises beneath said nucleic acid molecule according to 1 (a), (b), (c), (d), (e), (f), (g), (h), (i), (j) or (k), a nucleic acid molecule encoding a transit peptide, preferably encoding a plastidal transit peptide, especially in case in column 6 of Table I, application no. 13, in the same line as of the respective nucleic acid molecule according to 1) “plastidic” is depicted, or encoding a mitochondrial transit peptide, especially in case in column 6 of Table I, application no. 13, in the same line as of the respective nucleic acid molecule according to 1) “mitochondric” is depicted, which are operable linked.

[65880] In another embodiment thereof said vector does not comprise beneath said nucleic acid molecule according to 1 (a), (b), (c), (d), (e), (f), (g), (h), (i), (j) or (k), a nucleic acid molecule encoding a transit peptide in case in column 6 of Table I, application no. 13, in the same line as of the respective nucleic acid molecule according to 1) “non-targeted” is depicted.

[65881] In another embodiment thereof said vector comprises beneath said nucleic acid molecule according to 1 (a), (b), (c), (d), (e), (f), (g), (h), (i), (j) or (k), and a promoter, preferably a promoter selected from the group consisting of Big35S, PCUbi, Super and USP; a nucleic acid molecule encoding a transit peptide, preferably encoding a plastidal transit peptide, especially in case in column 6 of Table I, application no. 13, in the same line as of the respective nucleic acid molecule according to 1) “plastidic” is depicted, or encoding a mitochondrial transit peptide, especially in case in column 6 of Table I, application no. 13, in the same line as of the respective nucleic acid molecule according to 1) “mitochondric” is depicted, which are operable linked.

[65882] In another embodiment thereof said vector does not comprise beneath said nucleic acid molecule according to 1 (a), (b), (c), (d), (e), (f), (g), (h), (i), (j) or (k), and a promoter, preferably a promoter selected from the group consisting of Big35S, PCUbi, Super and USP, which are operatively linked; a nucleic acid molecule encoding a transit peptide, especially in case in column 6 of Table I, application no. 13, in the same line as of the respective nucleic acid molecule according to 1) “non-targeted” is depicted.

[65883] In another embodiment thereof said vector comprises beneath said nucleic acid molecule according to 1 (a), (b), (c), (d), (e), (f), (g), (h), (i), (j) or (k), and a promoter, preferably a promoter selected from the group consisting of Big35S, PCUbi, Super and USP; a nucleic acid molecule encoding a transit peptide, preferably encoding a plastidal transit peptide, especially in case in column 6 of Table I, application no. 13, in the same line as of the respective nucleic acid molecule according to 1) “plastidic” is depicted, or encoding a mitochondrial transit peptide, especially in case in column 6 of Table I, application no. 13, in the same line as of the respective nucleic acid molecule according to 1) “mitochondric” is depicted, which are operable linked; and wherein said nucleic acid molecule according to 1 (a), (b), (c), (d), (e), (f), (g), (h), (i), (j) or (k) encodes a polypeptide which has the activity of the respective polypeptide represented by a protein comprising a polypeptide as depicted in column 5 of Table II, application no. 13.

[65884] In another embodiment thereof said vector does not comprise beneath said nucleic acid molecule according to 1 (a), (b), (c), (d), (e), (f), (g), (h), (i), (j) or (k), and a promoter, preferably a promoter selected from the group consisting of Big35S, PCUbi, Super and USP, which are operatively linked; a nucleic acid molecule encoding a transit peptide, especially in case in column 6 of Table I, application no. 13, in the same line as of the respective nucleic acid molecule according to 1) “non-targeted” is depicted; and wherein said nucleic acid molecule according to 1 (a), (b), (c), (d), (e), (f), (g), (h), (i), (j) or (k) encodes a polypeptide which has the activity of the respective polypeptide represented by a protein comprising a polypeptide as depicted in column 5 of Table II, application no. 13.

[65885] In another embodiment thereof said vector comprises beneath said nucleic acid molecule according to 1 (a), (b), (c), (d), (e), (f), (g), (h), (i), (j) or (k), and a promoter, preferably a promoter selected from the group consisting of Big35S, PCUbi, Super and USP; a nucleic acid molecule encoding a transit peptide, preferably encoding a plastidal transit peptide, especially in case in column 6 of Table I, application no. 13, in the same line as of the respective nucleic acid molecule according to 1) “plastidic” is depicted, or encoding a mitochondrial transit peptide, especially in case in column 6 of Table I, application no. 13, in the same line as of the respective nucleic acid molecule according to 1) “mitochondric” is depicted, which are operable linked; and wherein said nucleic acid molecule according to 1 (a), (b), (c), (d), (e), (f), (g), (h), (i), (j) or (k) confers a generation or an increase of the respective fine chemical in a non-human organism or a part thereof as compared to a corresponding wild-type non-human organism or part thereof.

[65886] In another embodiment thereof said vector does not comprise beneath said nucleic acid molecule according to 1 (a), (b), (c), (d), (e), (f), (g), (h), (i), (j) or (k), and a promoter, preferably a promoter selected from the group consisting of Big35S, PCUbi, Super and USP, which are operatively linked; a nucleic acid molecule encoding a transit peptide, especially in case in column 6 of Table I, application no. 13, in the same line as of the respective nucleic acid molecule according to 1) “non-targeted” is depicted; and wherein said nucleic acid molecule according to 1 (a), (b), (c), (d), (e), (f), (g), (h), (i), (j) or (k) confers a generation or an increase of the respective fine chemical in a non-human organism or a part thereof as compared to a corresponding wild-type non-human organism or part thereof.

[65887] In another embodiment thereof said vector comprises beneath said nucleic acid molecule according to 1 (a), (b), (c), (d), (e), (f), (g), (h), (i), (j) or (k), and a promoter, preferably a promoter selected from the group consisting of Big35S, PCUbi, Super and USP; a nucleic acid molecule encoding a transit peptide, preferably encoding a plastidal transit peptide, especially in case in column 6 of Table I, application no. 13, in the same line as of the respective nucleic acid molecule according to 1) “plastidic” is depicted, or encoding a mitochondrial transit peptide, especially in case in column 6 of Table I, application no. 13, in the same line as of the respective nucleic acid molecule according to 1) “mitochondric” is depicted, which are operable linked; and wherein said nucleic acid molecule according to 1 (a), (b), (c), (d), (e), (f), (g), (h), (i), (j) or (k) encodes a polypeptide which has the activity of the respective polypeptide represented by a protein as depicted in column 5 of Table II application no. 13 and confers a generation or an increase of the respective fine chemical in a non-human organism or a part thereof as compared to a corresponding wild-type non-human organism or part thereof.

[65888] In another embodiment thereof said vector does not comprise beneath said nucleic acid molecule according to 1 (a), (b), (c), (d), (e), (f), (g), (h), (i), (j) or (k), and a promoter, preferably a promoter selected from the group consisting of Big35S, PCUbi, Super and USP, which are operatively linked; a nucleic acid molecule encoding a transit peptide, especially in case in column 6 of Table I, application no. 13, in the same line as of the respective nucleic acid molecule according to 1) “non-targeted” is depicted; and wherein said nucleic acid molecule according to 1 (a), (b), (c), (d), (e), (f), (g), (h), (i), (j) or (k) encodes a polypeptide which has the activity of the respective polypeptide represented by a protein as depicted in column 5 of Table II application no. 13 and confers a generation or an increase of the respective fine chemical in a non-human organism or a part thereof as compared to a corresponding wild-type non-human organism or part thereof.

[65889] [0181.1.7.13] to [0209.1.7.13] for the disclosure of these paragraphs see [0181.1.7.7] to [0209.1.7.7] above

[65890] The genes of the invention, coding in one embodiment for an activity selected from the group consisting of acetyl CoA carboxylase, acetyltransferase, acyl transferase, alcohol dehydrogenase, AX653549-protein, b1003-protein, b2032-protein, b2099-protein, b2121-protein, b2474-protein, b3346-protein, b3817-protein, coproporphyrinogen oxidase, F-box protein, flavodoxin, gluconate transport system permease 3, glutaredoxin, glycerol-3-phosphate dehydrogenase, glycine cleavage system T aminomethyltransferase, halotolerance protein, heat shock transcription factor, isopropylmalate isomerase large subunit, ketol-acid reductoisomerase, lipoprotein precursor, MADS-box transcription factor, melibiose carrier protein, monothiol glutaredoxin, monthiol glutaredoxin, N-acetylglucosaminylphosphatidylinositoldeacetylase, nitrate/nitrite transport protein, protein kinase, protein phosphatase, purine-nucleoside phosphorylase, ribosephosphate isomerase, constitutive, serine/threonine-protein phosphatase, sterol O-acyltransferase, superoxide dismutase, thioredoxin, transcription factor, transcriptional regulator, YCL026C-A-protein, YER184C-protein, ygl096w-protein, ymr324c-protein, and YOR044W-protein are also called “FCRP genes”.

[65891] [0211.1.7.13] to [0225.1.7.13] for the disclosure of these paragraphs see [0211.1.7.7] to [0225.1.7.7] above

[65892] In addition to the sequence mentioned in Table I, application no. 13, column 5 or 8, preferably the coding region thereof, or its homologs or fragments, it may be advantageous additionally to express and/or mutate further genes in the non-human organisms. Especially advantageously, additionally at least one further gene of the biosynthetic pathway of the fine chemical is expressed in the non-human organisms such as plants or microorganisms. It is also possible that the regulation of the natural genes has been modified advantageously so that the gene and/or its gene product is no longer subject to the regulatory mechanisms which exist in the non-human organisms. This leads to an increased synthesis of the respective fine chemical since, for example, feedback regulations no longer exist to the same extent or not at all. In addition it might be advantageously to combine the nucleic acids sequences of the invention containing the sequences shown in the respective line in Table I, application no. 13, column 5 or 8, preferably the coding region thereof, or homologs or fragments thereof, with genes which generally support or enhance the growth or yield of the target non-human organisms, for example genes which lead to faster growth rate of non human organism like microorganisms or plants or genes which produce stress-, pathogen-, or herbicide-resistant plants.

[65893] Further advantageous nucleic acid sequences which can be expressed in combination with the sequences used in the process and/or the abovementioned biosynthesis genes are the sequences encoding further genes of the carotenoids biosynthetic pathway, such as phytoene synthase (Psy), which is an important control point for the regulation of the flux (Fraser et al., 2002), phytoene desaturase (Pds), z-carotene desaturase, above mentioned enzymes (s. introduction of the application), e.g. hydroxylases such as beta-carotene hydroxylase (U.S. Pat. No. 6,214,575), ketolases, or cyclases such as the beta-cyclase (U.S. Pat. No. 6,232,530) or oxygenases such as the beta-C4-oxygenase described in U.S. Pat. No. 6,218,599 or homologs thereof, astaxanthin synthase (U.S. Pat. No. 6,365,386), or other genes as described in U.S. Pat. No. 6,150,130.

[65894] Other sequences which can be expressed in combination with the sequences used in the process and/or the abovementioned biosynthesis genes are the sequences encoding further genes of the carotenoid biosynthesis pathways, e.g. carotene 7,8-desaturase (EC 1.14.99.30), lycopene β-cyclase (EC:1.14.-.-), β-carotene hydroxylase, zeaxanthin epoxidase (EC:1.14.13.90),

[65895] If not an increase in violaxanthin contend alone is desired, but the increase in this importand protective compound is intended to enhance plant health, overexpression of then genes of the xanthophyll cycle might be of interest, e.g.: zeaxanthin epoxidase (E.C. 1.14.13.90), antheraxanthin epoxidase (E.C. 1.14.13.90), violaxanthin deepoxidase (E.C. 1.10.99.3).

[65896] Other sequences which can be expressed in combination with the sequences used in the process and/or the abovementioned biosynthesis genes are the sequences encoding further genes of the carotenoid biosynthesis pathways, e.g. 9-cis-epoxycarotenoid dioxygenase (NCED, EC: 1.13.11.51), catalysing the oxidative cleavage of 9-cis-violoxanthin or 9-cis-neoxanthin (synthesized from all-trans-violoxanthin) to produce 9-cis-xanthoxin.

[65897] In addition, for increased ABA content, genes from the carotenoid biosynthesis pathway could be overexpressed, e.g.: carotene 7,8-desaturase (EC 1.14.99.30), lycopene β-cyclase (EC 1.14.-.-), β-carotene hydroxylase, zeaxanthin epoxidase (EC 1.14.13.90), neoxanthin synthase (EC 5.3.99.9)

[65898] These genes can lead to an increased synthesis of the essential carotenoids, in particular xanthophylls.

[65899] [0228.1.7.13] to [0239.1.7.13] for the disclosure of these paragraphs see [0228.1.7.7] to [0239.1.7.7] above

[65900] In an embodiment of the present invention the nucleic acid construct of the present invention comprises a nucleic acid molecule as depicted in the respective line in Table I, application no. 13, column 5 or 8, preferably the coding region thereof, a fragment or a homolog thereof, and a plant promoter, such as the Big 35S promoter, the DC3 promoter, the PC Ubi promoter, the LegB4-promoter, the Super promoter, the USP promoter or the like. In another embodiment the nucleic acid construct of the present invention comprises a nucleic acid molecule as depicted in the respective line in Table I, application no. 13, column 5 or 8, preferably the coding region thereof, a fragment or a homolog thereof, and a plant promoter such as, for example, the USP, the LegB4-, the DC3 promoter or the ubiquitin promoter from parsley or other herein mentioned promoters. In a further embodiment the nucleic acid construct of the present invention comprises a nucleic acid molecule as depicted in the respective line in Table I, application no. 13, column 5 or 8, preferably the coding region thereof, a fragment or a homolog thereof, and a plant promoter, such as the Big 35S promoter, the PC Ubi promoter, the Super promoter, the USP promoter or the like. In addition different terminators may advantageously be used in these nucleic acid constructs; examples for transcriptional termination are polyadenylation signals.

[65901] [0241.1.7.13] to [0245.1.7.13] for the disclosure of these paragraphs see [0241.1.7.7] to [0245.1.7.7] above

[65902] Other preferred sequences for use in operable linkage in gene expression constructs are targeting sequences, which are required for targeting the gene product into specific cell compartments (for a review, see Kermode, Crit. Rev. Plant Sci. 15 (4), 285 (1996) and references cited therein), for example into the vacuole, the nucleus, all types of plastids, such as amyloplasts, chloroplasts, chromoplasts, the extracellular space, the mitochondria, the endoplasmic reticulum, elaioplasts, peroxisomes, glycosomes, and other compartments of cells or extracellular; preferred are sequences, which are involved in targeting to plastids as mentioned above. Sequences, which must be mentioned in this context are, in particular, the signal-peptide- or transit-peptide-encoding sequences which are known per se. For example, plastid-transit-peptide-encoding sequences enable the targeting of the expression product into the plastids of a plant cell. Targeting sequences are also known for eukaryotic and to a lower extent for prokaryotic organisms and can advantageously be operable linked with the nucleic acid molecule of the present invention as shown in Table I, application no. 13, columns 5 and 8, preferably the coding region thereof, or homologs or fragments thereof, and described herein to achieve an expression in one of said compartments or extracellular.

[65903] [0247.1.7.13] to [0249.1.7.13] for the disclosure of these paragraphs see [0247.1.7.7] to [0249.1.7.7] above

[65904] Preferred promoters are in particular those which bring about gene expression in tissues and organs, such as leaves, roots, seeds, pollen or xylem. Examples of tissue preferred or organ preferred promoters include, but are not limited to fruit-preferred, ovule-preferred, male tissue-preferred, seed-preferred, pollen-preferred integument-preferred, tuber-preferred, stalk-preferred, pericarp-preferred, leaf-preferred, stigma-preferred, pollen-preferred, anther-preferred, petal-preferred, sepal-preferred, pedicel-preferred, silique-preferred, stem-preferred, root-preferred promoters, and the like. Especially those promoters are preferred which bring about gene expression in tissues and organs in which the biosynthesis of xanthophylls and/or abscisic acid resp., in particular, of abscisic acid, cryptoxanthin, violaxanthin, or zeaxanthin takes place, like in seed cells, such as endosperm cells and cells of the developing embryo. Seed promoters are preferentially expressed during seed development and/or germination. For example, seed preferred promoters can be embryo-preferred, endosperm preferred and seed coat-preferred (see Thompson et al., BioEssays 10, 108 (1989)). Examples of seed preferred promoters include, but are not limited to, cellulose synthase (celA), Cim1, gammazein, globulin-1, maize 19 kD zein (cZ19B1), and the like. Other suitable promoters are the oilseed rape napin gene promoter (U.S. Pat. No. 5,608,152), the Vicia faba USP promoter (Baeumlein et al., Mol Gen Genet, 225 (3), 459 (1991)), the Arabidopsis oleosin promoter (WO 98/45461), the Phaseolus vulgaris phaseolin promoter (U.S. Pat. No. 5,504,200), the Brassica Bce4 promoter (WO 91/13980), the bean arc5 promoter, the carrot DcG3 promoter, or the Legumin B4 promoter (LeB4) (Baeumlein et al., Plant Journal, 2 (2), 233 (1992)), and promoters which bring about the seed-specific expression in monocotyledonous plants such as maize, barley, wheat, rye, rice and the like. Advantageous seed-specific promoters are the sucrose binding protein promoter (WO 00/26388), the phaseolin promoter and the napin promoter. Suitable promoters which must be considered are the barley Ipt2 or Ipt1 gene promoter (WO 95/15389 and WO 95/23230), and the promoters described in WO 99/16890 (promoters from the barley hordein gene, the rice glutelin gene, the rice oryzin gene, the rice prolamin gene, the wheat gliadin gene, the wheat glutelin gene, the maize zein gene, the oat glutelin gene, the sorghum kasirin gene and the rye secalin gene). Further suitable promoters are Amy32b, Amy 6-6 and Aleurain (U.S. Pat. No. 5,677,474), Bce4 (oilseed rape) (U.S. Pat. No. 5,530,149), glycinin (soya) (EP 571 741], phosphoenolpyruvate carboxylase (soya) (JP 06/62870), ADR12-2 (soya) (WO 98/08962), isocitrate lyase (oilseed rape) (U.S. Pat. No. 5,689,040]) or α-amylase (barley) (EP 781 8499. Other promoters which are available for the expression of genes in plants are leaf-specific promoters such as those described in DE-A 19 644 478 or light-regulated promoters such as, for example, the pea petE promoter.

[65905] [0251.1.7.13] to [0266.1.7.13] for the disclosure of these paragraphs see [0251.1.7.7] to [0266.1.7.7] above

[65906] An embodiment of the invention relates to a vector where the nucleic acid molecule according to the invention is linked operably to regulatory sequences which permit the expression in a prokaryotic or eukaryotic host. A further embodiment of the invention relates to a vector in which a nucleic acid sequence encoding one of the polypeptides shown in the respective line in Table II, application no. 13, columns 5 or 8, or homologs or fragments thereof, is functionally linked to a targeting sequence such as a plastidial or mitochondrial targeting sequence.

[65907] A further embodiment of the invention relates to a vector in which a nucleic acid sequence encoding one of the polypeptides shown in the respective line in Table II, application no. 13, columns 5 or 8, or homologs or fragments thereof, is functionally linked to (a) regulatory sequence which permit the expression in an organelle, such as plastids or mitochondria, preferably plastids.

[65908] A further embodiment of the invention relates to a vector which comprises a nucleic acid sequence encoding one of the polypeptides shown in the respective line in Table II, application no. 13, columns 5 or 8, or homologs or fragments thereof, but no additional targeting sequence.

[65909] [0268.1.7.13] to [0273.1.7.13] for the disclosure of these paragraphs see [0268.1.7.7] to [0273.1.7.7] above

[65910] A further object of the invention relates to the use of a nucleic acid construct, e.g. an expression cassette, comprising one or more nucleic acid molecules encoding one or more polypeptides as depicted in the respective line(s) in Table II, application no. 13, columns 5 or 8, or homologs or fragments thereof, or comprising one or more nucleic acid molecules as depicted in the respective line(s) in Table I, application no. 13, columns 5 or 8, preferably the coding region thereof, or homologs or fragments thereof, or comprising a nucleic acid molecule hybridizing therewith for the transformation of a microorganism or a plant cell, plant tissues or a part of a plant

[65911] In doing so, depending on the choice of promoter, the nucleic acid molecules shown in the respective line in Table I, application no. 13, column 5 or 8, preferably the coding region thereof, or homologs or fragments thereof, or the nucleic acid molecules encoding a polypeptide as depicted in the respective line in Table II, application no. 13, column 5 or 8, or homologs or fragments thereof, can be expressed in the whole plant or specifically e.g. in the leaves, in the seeds, the nodules, in roots, in the stem or other parts of the plant. Those transgenic plants overproducing sequences, e.g. as depicted in the respective line in Table I, application no. 13, column 5 or 8, preferably the coding region thereof, or homologs or fragments thereof, the plant cell, plant tissues, plants, the reproductive material thereof, or parts thereof are a further object of the present invention.

[65912] Within the framework of the present invention, the production of the abscisic acid, cryptoxanthin, violaxanthin, or zeaxanthin is due to the generation or over-expression of one or more polypeptides as depicted in the respective line(s) in Table II, application no. 13, column 5 or 8, or homologs or fragments thereof, or encoded by the corresponding nucleic acid molecules as depicted in the respective line(s) in Table I, application no. 13, column 5 or 8, preferably the coding region thereof, or homologs or fragments thereof, in the non-human organism according to the invention, advantageously in the transgenic microorganism or plant according to the invention, at least for the duration of at least one plant generation.

[65913] A constitutive expression of the polypeptide as depicted in the respective line in Table II, application no. 13, column 5 or 8, or homologs or fragments thereof, or encoded by the respective nucleic acid molecule as depicted in the respective line in Table I, application no. 13, column 5 or 8, preferably the coding region thereof, or homologs or fragments thereof, may be advantageous. On the other hand, an inducible expression may also appear desirable. Expression of the polypeptide sequences of the invention can be either directed to the cytosol or to the organelles, such as plastids or mitochondria, preferably the plastids of the host cells, preferably the plant cells, or non-targeted.

[65914] for the disclosure of this paragraph see [0278.1.7.7] above

[65915] In a further embodiment the invention relates to a transgenic non-human organisms such as transgenic microorganism or transgenic plant comprising a nucleic acid molecule comprising
[65916] [1) a nucleic acid molecule selected from the group consisting of
   [65917] (a) a nucleic acid molecule encoding a polypeptide shown in Table II, application no. 13, column 5 or 8, preferably shown in Table II A, application no. 13, column 5, or in Table II A, application no. 13, column 8, or in Table II B, application no. 13, column 8, or a homolog or a fragment thereof;
   [65918] (b) a nucleic acid molecule shown in Table I, application no. 13, column 5 or 8, preferably shown in Table I A, application no. 13, column 5, or in Table I A, application no. 13, column 8, or in Table I B, application no. 13, column 8, preferably the coding region thereof, or a homolog or a fragment thereof;
   [65919] (c) a nucleic acid molecule, which, as a result of the degeneracy of the genetic code, can be derived from a polypeptide sequence depicted in column 5 or 8 of Table II, application no. 13, preferably shown in Table II A, application no. 13, column 5, or in Table II A, application no. 13, column 8, or in Table II B, application no. 13, column 8;
   [65920] (d) a nucleic acid molecule having at least 30% identity, preferably at least 40%, 50%, 60%, 70%, 75%, 80%, 85%, 90%, 95%, 96%, 97%, 98%, 99%, 99.5%, with the nucleic acid molecule sequence of a polynucleotide comprising the nucleic acid molecule shown in column 5 or 8 of Table I, application no. 13, preferably shown in Table I A, application no. 13, column 5, or in Table I A, application no. 13, column 8, or in Table I B, application no. 13, column 8, preferably the coding region thereof;
   [65921] (e) a nucleic acid molecule encoding a polypeptide having at least 30% identity, preferably at least 40%, 50% 60%, 70%, 75%, 80%, 85%, 90%, 95%, 96%, 97%, 98%, 99%, 99.5%, identity with the amino acid sequence of the polypeptide encoded by the nucleic acid molecule of (a), (b), (c) or (d);
   [65922] (f) a nucleic acid molecule which hybridizes with a nucleic acid molecule of (a), (b), (c), (d) or (e) under stringent hybridization conditions;
   [65923] (g) a nucleic acid molecule encoding a polypeptide which can be isolated with the aid of monoclonal or polyclonal antibodies made against a polypeptide encoded by one of the nucleic acid molecules of (a), (b), (c), (d), (e) or (f);
   [65924] (h) a nucleic acid molecule encoding a polypeptide comprising the consensus sequence or one or more polypeptide motifs as shown in column 8 of Table IV, application no. 13;
   [65925] (i) a nucleic acid molecule encoding a polypeptide having the activity represented by a respective protein as depicted in column 5 of Table II, application no. 13;
   [65926] (j) a nucleic acid molecule comprising a polynucleotide which is obtained by amplifying a cDNA library or a genomic library using the primers in Table III, application no. 13, column 8;
   [65927] and
   [65928] (k) nucleic acid molecule which is obtainable by screening a suitable nucleic acid library, especially a cDNA library and/or a genomic library, under stringent hybridization conditions with a probe comprising one of the sequences of the nucleic acid molecule of (a), (b), (c), (d), (e), (f), (g), (h), (i) or (j) or with a fragment of at least 15 nt, preferably 20 nt, 30 nt, 50 nt, 100 nt, 200 nt,500 nt, 1000 nt, 1500 nt, 2000 nt or 3000 nt of the nucleic acid molecule characterized in (a), (b), (c), (d), (e), (f), (g), (h), (i) or (j);
   [65929] or a nucleic acid molecule comprising a sequence which is complementary thereto;
      and, if desired
[65930] 2) nucleic acid molecule encoding a transit peptide, preferably encoding a plastidal transit peptide or a mitochondrial transit peptide;
   which are operable linked;]
   or comprising an expression cassette comprising
[65931] [0) a promoter, preferably a promoter selected from the group consisting of Big35S, PCUbi, Super and USP; and
[65932] 1) a nucleic acid molecule selected from the group consisting of
   [65933] (a) a nucleic acid molecule encoding a polypeptide shown in Table II, application no. 13, column 5 or 8, preferably shown in Table II A, application no. 13, column 5, or in Table II A, application no. 13, column 8, or in Table II B, application no. 13, column 8, or a homolog or a fragment thereof;
   [65934] (b) a nucleic acid molecule shown in Table I, application no. 13, column 5 or 8, preferably shown in Table I A, application no. 13, column 5, or in Table I A, application no. 13, column 8, or in Table I B, application no. 13, column 8, preferably the coding region thereof, or a homolog or a fragment thereof;
   [65935] (c) a nucleic acid molecule, which, as a result of the degeneracy of the genetic code, can be derived from a polypeptide sequence depicted in column 5 or 8 of Table II, application no. 13, preferably shown in Table II A, application no. 13, column 5, or in Table II A, application no. 13, column 8, or in Table II B, application no. 13, column 8;
   [65936] (d) a nucleic acid molecule having at least 30% identity, preferably at least 40%, 50%, 60%, 70%, 75%, 80%, 85%, 90%, 95%, 96%, 97%, 98%, 99%, 99.5%, with the nucleic acid molecule sequence of a polynucleotide comprising the nucleic acid molecule shown in column 5 or 8 of Table I, application no. 13, preferably shown in Table I A, application no. 13, column 5, or in Table I A, application no. 13, column 8, or in Table I B, application no. 13, column 8, preferably the coding region thereof;
   [65937] (e) a nucleic acid molecule encoding a polypeptide having at least 30% identity, preferably at least 40%, 50% 60%, 70%, 75%, 80%, 85%, 90%, 95%, 96%, 97%, 98%, 99%, 99.5%, identity with the amino acid sequence of the polypeptide encoded by the nucleic acid molecule of (a), (b), (c) or (d);
   [65938] (f) a nucleic acid molecule which hybridizes with a nucleic acid molecule of (a), (b), (c), (d) or (e) under stringent hybridization conditions;
   [65939] (g) a nucleic acid molecule encoding a polypeptide which can be isolated with the aid of monoclonal or polyclonal antibodies made against a polypeptide encoded by one of the nucleic acid molecules of (a), (b), (c), (d), (e) or (f);
   [65940] (h) a nucleic acid molecule encoding a polypeptide comprising the consensus sequence or one or more polypeptide motifs as shown in column 8 of Table IV, application no. 13;
   [65941] (i) a nucleic acid molecule encoding a polypeptide having the activity represented by a respective protein as depicted in column 5 of Table II, application no. 13;
   [65942] (j) a nucleic acid molecule comprising a polynucleotide which is obtained by amplifying a cDNA library or a genomic library using the primers in Table III, application no. 13, column 8;
   [65943] and
   [65944] (k) nucleic acid molecule which is obtainable by screening a suitable nucleic acid library, especially a cDNA library and/or a genomic library, under stringent hybridization conditions with a probe comprising one of the sequences of the nucleic acid molecule of (a), (b), (c), (d), (e), (f), (g), (h), (i) or (j) or with a fragment of at least 15 nt, preferably 20 nt, 30 nt, 50 nt, 100 nt, 200 nt,500 nt, 1000 nt, 1500 nt, 2000 nt or 3000 nt of the nucleic acid molecule characterized in (a), (b), (c), (d), (e), (f), (g), (h), (i) or (j);
   [65945] or a nucleic acid molecule comprising a sequence which is complementary thereto;
      and, if desired
[65946] 2) nucleic acid molecule encoding a transit peptide, preferably encoding a plastidal transit peptide or a mitochondrial transit peptide;
   which are operable linked;]
   or comprising or being transformed by a vector comprising
[65947] [1) a nucleic acid molecule selected from the group consisting of
   [65948] (a) a nucleic acid molecule encoding a polypeptide shown in Table II, application no. 13, column 5 or 8, preferably shown in Table II A, application no. 13, column 5, or in Table II A, application no. 13, column 8, or in Table II B, application no. 13, column 8, or a homolog or a fragment thereof;
   [65949] (b) a nucleic acid molecule shown in Table I, application no. 13, column 5 or 8, preferably shown in Table I A, application no. 13, column 5, or in Table I A, application no. 13, column 8, or in Table I B, application no. 13, column 8, preferably the coding region thereof, or a homolog or a fragment thereof;
   [65950] (c) a nucleic acid molecule, which, as a result of the degeneracy of the genetic code, can be derived from a polypeptide sequence depicted in column 5 or 8 of Table II, application no. 13, preferably shown in Table II A, application no. 13, column 5, or in Table II A, application no. 13, column 8, or in Table II B, application no. 13, column 8;
   [65951] (d) a nucleic acid molecule having at least 30% identity, preferably at least 40%, 50%, 60%, 70%, 75%, 80%, 85%, 90%, 95%, 96%, 97%, 98%, 99%, 99.5%, with the nucleic acid molecule sequence of a polynucleotide comprising the nucleic acid molecule shown in column 5 or 8 of Table I, application no. 13, preferably shown in Table I A, application no. 13, column 5, or in Table I A, application no. 13, column 8, or in Table I B, application no. 13, column 8, preferably the coding region thereof;
   [65952] (e) a nucleic acid molecule encoding a polypeptide having at least 30% identity, preferably at least 40%, 50% 60%, 70%, 75%, 80%, 85%, 90%, 95%, 96%, 97%, 98%, 99%, 99.5%, identity with the amino acid sequence of the polypeptide encoded by the nucleic acid molecule of (a), (b), (c) or (d);
   [65953] (f) a nucleic acid molecule which hybridizes with a nucleic acid molecule of (a), (b), (c), (d) or (e) under stringent hybridization conditions;
   [65954] (g) a nucleic acid molecule encoding a polypeptide which can be isolated with the aid of monoclonal or polyclonal antibodies made against a polypeptide encoded by one of the nucleic acid molecules of (a), (b), (c), (d), (e) or (f);
   [65955] (h) a nucleic acid molecule encoding a polypeptide comprising the consensus sequence or one or more polypeptide motifs as shown in column 8 of Table IV, application no. 13;
   [65956] (i) a nucleic acid molecule encoding a polypeptide having the activity represented by a respective protein as depicted in column 5 of Table II, application no. 13;
   [65957] (j) a nucleic acid molecule comprising a polynucleotide which is obtained by amplifying a cDNA library or a genomic library using the primers in Table III, application no. 13, column 8;
   [65958] and
   [65959] (k) nucleic acid molecule which is obtainable by screening a suitable nucleic acid library, especially a cDNA library and/or a genomic library, under stringent hybridization conditions with a probe comprising one of the sequences of the nucleic acid molecule of (a), (b), (c), (d), (e), (f), (g), (h), (i) or (j) or with a fragment of at least 15 nt, preferably 20 nt, 30 nt, 50 nt, 100 nt, 200 nt,500 nt, 1000 nt, 1500 nt, 2000 nt or 3000 nt of the nucleic acid molecule characterized in (a), (b), (c), (d), (e), (f), (g), (h), (i) or (j);
   [65960] or a nucleic acid molecule comprising a sequence which is complementary thereto;]
      as well as respective transgenic cells, tissue, parts of such non-human organism, e.g. plant cells, plant tissue, part of plants, like leaves, roots, stems, blossoms, seeds, fruits, pollen and the like.
      (All the references to Tables I to IV are references to the corresponding lines of Tables I to IV.)

[65961] In a preferred embodiment of said transgenic non-human organism said nucleic acid molecule according to 1 (a), (b), (c), (d), (e), (f), (g), (h), (i), (j) or (k) encodes a polypeptide which has the activity of the respective polypeptide represented by a protein comprising a polypeptide as depicted in the respective line in column 5 of Table II, application no. 13.

[65962] In another preferred embodiment of said transgenic non-human organism said nucleic acid molecule according to 1 (a), (b), (c), (d), (e), (f), (g), (h), (i), (j) or (k) confers a generation or an increase of the respective fine chemical in a non-human organism or a part thereof as compared to a corresponding wild-type non-human organism or part thereof.

[65963] In another preferred embodiment of said transgenic non-human organism said nucleic acid molecule according to 1 (a), (b), (c), (d), (e), (f), (g), (h), (i), (j) or (k) encodes a polypeptide which has the activity of the respective polypeptide represented by a protein as depicted in the respective line in column 5 of Table II application no. 13 and confers a generation or an increase of the respective fine chemical in a non-human organism or a part thereof as compared to a corresponding wild-type non-human organism or part thereof.

[65964] In another embodiment of said transgenic non-human organism the expression cassette comprises 2) a nucleic acid molecule encoding a transit peptide, preferably encoding a plastidal transit peptide, especially in case in column 6 of Table I, application no. 13, in the same line as of the respective nucleic acid molecule according to 1) “plastidic” is depicted, or encoding a mitochondrial transit peptide, especially in case in column 6 of Table I, application no. 13, in the same line as of the respective nucleic acid molecule according to 1) “mitochondric” is depicted.

[65965] In another embodiment of said transgenic non-human organism the expression cassette does not comprise 2) a nucleic acid molecule encoding a transit peptide, especially in case in column 6 of Table I, application no. 13, in the same line as of the respective nucleic acid molecule according to 1) “non-targeted” is depicted.

[65966] In another embodiment of said transgenic non-human organism said vector comprises beneath said nucleic acid molecule according to 1 (a), (b), (c), (d), (e), (f), (g), (h), (i), (j) or (k), a promoter, preferably a promoter selected from the group consisting of Big35S, PCUbi, Super and USP, which are operable linked.

[65967] In a preferred embodiment of said transgenic non-human organism said vector comprises beneath said nucleic acid molecule according to 1 (a), (b), (c), (d), (e), (f), (g), (h), (i), (j) or (k), a promoter, preferably a promoter selected from the group consisting of Big35S, PCUbi, Super and USP, which are operable linked; and said nucleic acid molecule according to 1 (a), (b), (c), (d), (e), (f), (g), (h), (i), (j) or (k) encodes a polypeptide which has the activity of the respective polypeptide represented by a protein comprising a polypeptide as depicted in the respective line in column 5 of Table II, application no. 13.

[65968] In another preferred embodiment of said transgenic non-human organism said vector comprises beneath said nucleic acid molecule according to 1 (a), (b), (c), (d), (e), (f), (g), (h), (i), (j) or (k), a promoter, preferably a promoter selected from the group consisting of Big35S, PCUbi, Super and USP, which are operable linked; and said nucleic acid molecule according to 1 (a), (b), (c), (d), (e), (f), (g), (h), (i), (j) or (k) confers a generation or an increase of the respective fine chemical in a non-human organism or a part thereof as compared to a corresponding wild-type non-human organism or part thereof.

[65969] In another preferred embodiment of said transgenic non-human organism said vector comprises beneath said nucleic acid molecule according to 1 (a), (b), (c), (d), (e), (f), (g), (h), (i), (j) or (k), a promoter, preferably a promoter selected from the group consisting of Big35S, PCUbi, Super and USP, which are operable linked; and said nucleic acid molecule according to 1 (a), (b), (c), (d), (e), (f), (g), (h), (i), (j) or (k) encodes a polypeptide which has the activity of the respective polypeptide represented by a protein as depicted in the respective line in column 5 of Table II, application no. 13, and confers a generation or an increase of the respective fine chemical in a non-human organism or a part thereof as compared to a corresponding wild-type non-human organism or part thereof.

[65970] In another embodiment of said transgenic non-human organism said vector comprises beneath said nucleic acid molecule according to 1 (a), (b), (c), (d), (e), (f), (g), (h), (i), (j) or (k), a nucleic acid molecule encoding a transit peptide, preferably encoding a plastidal transit peptide, especially in case in column 6 of Table I, application no. 13, in the same line as of the respective nucleic acid molecule according to 1) “plastidic” is depicted, or encoding a mitochondrial transit peptide, especially in case in column 6 of Table I, application no. 13, in the same line as of the respective nucleic acid molecule according to 1) “mitochondric” is depicted, which are operable linked.

[65971] In another embodiment of said transgenic non-human organism said vector does not comprise beneath said nucleic acid molecule according to 1 (a), (b), (c), (d), (e), (f), (g), (h), (i), (j) or (k), a nucleic acid molecule encoding a transit peptide in case in column 6 of Table I, application no. 13, in the same line as of the respective nucleic acid molecule according to 1) “non-targeted” is depicted, which are operable linked.

[65972] In another embodiment of said transgenic non-human organism said vector comprises beneath said nucleic acid molecule according to 1 (a), (b), (c), (d), (e), (f), (g), (h), (i), (j) or (k), and a promoter, preferably a promoter selected from the group consisting of Big35S, PCUbi, Super and USP; a nucleic acid molecule encoding a transit peptide, preferably encoding a plastidal transit peptide, especially in case in column 6 of Table I, application no. 13, in the same line as of the respective nucleic acid molecule according to 1) “plastidic” is depicted, or encoding a mitochondrial transit peptide, especially in case in column 6 of Table I, application no. 13, in the same line as of the respective nucleic acid molecule according to 1) “mitochondric” is depicted, which are operable linked.

[65973] In another embodiment of said transgenic non-human organism said vector does not comprise beneath said nucleic acid molecule according to 1 (a), (b), (c), (d), (e), (f), (g), (h), (i), (j) or (k), and a promoter, preferably a promoter selected from the group consisting of Big35S, PCUbi, Super and USP; a nucleic acid molecule encoding a transit peptide, especially in case in column 6 of Table I, application no. 13, in the same line as of the respective nucleic acid molecule according to 1) “non-targeted” is depicted, which are operable linked.

[65974] In another embodiment of said transgenic non-human organism said vector comprises beneath said nucleic acid molecule according to 1 (a), (b), (c), (d), (e), (f), (g), (h), (i), (j) or (k), and a promoter, preferably a promoter selected from the group consisting of Big35S, PCUbi, Super and USP; a nucleic acid molecule encoding a transit peptide, preferably encoding a plastidal transit peptide, especially in case in column 6 of Table I, application no. 13, in the same line as of the respective nucleic acid molecule according to 1) “plastidic” is depicted, or encoding a mitochondrial transit peptide, especially in case in column 6 of Table I, application no. 13, in the same line as of the respective nucleic acid molecule according to 1) “mitochondric” is depicted, which are operable linked; and wherein said nucleic acid molecule according to 1 (a), (b), (c), (d), (e), (f), (g), (h), (i), (j) or (k) encodes a polypeptide which has the activity of the respective polypeptide represented by a protein comprising a polypeptide as depicted in the respective line in column 5 of Table II, application no. 13.

[65975] In another embodiment of said transgenic non-human organism said vector does not comprise beneath said nucleic acid molecule according to 1 (a), (b), (c), (d), (e), (f), (g), (h), (i), (j) or (k), and a promoter, preferably a promoter selected from the group consisting of Big35S, PCUbi,

[65976] Super and USP; a nucleic acid molecule encoding a transit peptide, especially in case in column 6 of Table I, application no. 13, in the same line as of the respective nucleic acid molecule according to 1) “non-targeted” is depicted, which are operable linked; and wherein said nucleic acid molecule according to 1 (a), (b), (c), (d), (e), (f), (g), (h), (i), (j) or (k) encodes a polypeptide which has the activity of the respective polypeptide represented by a protein comprising a polypeptide as depicted in the respective line in column 5 of Table II, application no. 13.

[65977] In another embodiment of said transgenic non-human organism said vector comprises beneath said nucleic acid molecule according to 1 (a), (b), (c), (d), (e), (f), (g), (h), (i), (j) or (k), and a promoter, preferably a promoter selected from the group consisting of Big35S, PCUbi, Super and USP; a nucleic acid molecule encoding a transit peptide, preferably encoding a plastidal transit peptide, especially in case in column 6 of Table I, application no. 13, in the same line as of the respective nucleic acid molecule according to 1) “plastidic” is depicted, or encoding a mitochondrial transit peptide, especially in case in column 6 of Table I, application no. 13, in the same line as of the respective nucleic acid molecule according to 1) “mitochondric” is depicted, which are operable linked; and wherein said nucleic acid molecule according to 1 (a), (b), (c), (d), (e), (f), (g), (h), (i), (j) or (k) confers a generation or an increase of the respective fine chemical in a non-human organism or a part thereof as compared to a corresponding wild-type non-human organism or part thereof.

[65978] In another embodiment of said transgenic non-human organism said vector does not comprise beneath said nucleic acid molecule according to 1 (a), (b), (c), (d), (e), (f), (g), (h), (i), (j) or (k), and a promoter, preferably a promoter selected from the group consisting of Big35S, PCUbi, Super and USP; a nucleic acid molecule encoding a transit peptide, especially in case in column 6 of Table I, application no. 13, in the same line as of the respective nucleic acid molecule according to 1) “non-targeted” is depicted, which are operable linked; and wherein said nucleic acid molecule according to 1 (a), (b), (c), (d), (e), (f), (g), (h), (i), (j) or (k) confers a generation or an increase of the respective fine chemical in a non-human organism or a part thereof as compared to a corresponding wild-type non-human organism or part thereof.

[65979] In another embodiment of said transgenic non-human organism said vector comprises beneath said nucleic acid molecule according to 1 (a), (b), (c), (d), (e), (f), (g), (h), (i), (j) or (k), and a promoter, preferably a promoter selected from the group consisting of Big35S, PCUbi, Super and USP; a nucleic acid molecule encoding a transit peptide, preferably encoding a plastidal transit peptide, especially in case in column 6 of Table I, application no. 13, in the same line as of the respective nucleic acid molecule according to 1) “plastidic” is depicted, or encoding a mitochondrial transit peptide, especially in case in column 6 of Table I, application no. 13, in the same line as of the respective nucleic acid molecule according to 1) “mitochondric” is depicted, which are operable linked; and wherein said nucleic acid molecule according to 1 (a), (b), (c), (d), (e), (f), (g), (h), (i), (j) or (k) encodes a polypeptide which has the activity of the respective polypeptide represented by a protein as depicted in the respective line in column 5 of Table II application no. 13 and confers a generation or an increase of the respective fine chemical in a non-human organism or a part thereof as compared to a corresponding wild-type non-human organism or part thereof.

[65980] In another embodiment of said transgenic non-human organism said vector does not comprise beneath said nucleic acid molecule according to 1 (a), (b), (c), (d), (e), (f), (g), (h), (i), (j) or (k), and a promoter, preferably a promoter selected from the group consisting of Big35S, PCUbi, Super and USP; a nucleic acid molecule encoding a transit peptide, especially in case in column 6 of Table I, application no. 13, in the same line as of the respective nucleic acid molecule according to 1) “non-targeted” is depicted, which are operable linked; and wherein said nucleic acid molecule according to 1 (a), (b), (c), (d), (e), (f), (g), (h), (i), (j) or (k) encodes a polypeptide which has the activity of the respective polypeptide represented by a protein as depicted in the respective line in column 5 of Table II application no. 13 (in the same line) and confers a generation or an increase of the respective fine chemical in a non-human organism or a part thereof as compared to a corresponding wild-type non-human organism or part thereof.

[65981] In a preferred embodiment of said transgenic non-human organism said nucleic acid molecule according to 1 (a), (b), (c), (d), (e), (f), (g), (h), (i), (j) or (k), said promoter and optionally said nucleic acid molecule encoding a transit peptide are encompassed in an expression cassette in said vector. Accordingly an embodiment the invention provides a non-human organism comprising or being transformed by a vector comprising an expression cassette comprising said nucleic acid molecule according to 1 (a), (b), (c), (d), (e), (f), (g), (h), (i), (j) or (k), said promoter and optionally said a nucleic acid molecule encoding a transit peptide, operable linked. Said expression cassette may encompass a terminator, too.

[65982] In a further embodiment the invention relates to a transgenic non-human organisms such as transgenic microorganism or transgenic plant comprising a nucleic acid molecule comprising
[65983] [1) a nucleic acid molecule selected from the group consisting of
   [65984] (a) a nucleic acid molecule encoding a polypeptide shown in Table II, application no. 13, column 5 or 8, preferably shown in Table II A, application no. 13, column 5, or in Table II A, application no. 13, column 8, or in Table II B, application no. 13, column 8, or a homolog or a fragment thereof;
   [65985] (b) a nucleic acid molecule shown in Table I, application no. 13, column 5 or 8, preferably shown in Table I A, application no. 13, column 5, or in Table I A, application no. 13, column 8, or in Table I B, application no. 13, column 8, preferably the coding region thereof, or a homolog or a fragment thereof;
   [65986] (c) a nucleic acid molecule, which, as a result of the degeneracy of the genetic code, can be derived from a polypeptide sequence depicted in column 5 or 8 of Table II, application no. 13, preferably shown in Table II A, application no. 13, column 5, or in Table II A, application no. 13, column 8, or in Table II B, application no. 13, column 8;
   [65987] (d) a nucleic acid molecule having at least 30% identity, preferably at least 40%, 50%, 60%, 70%, 75%, 80%, 85%, 90%, 95%, 96%, 97%, 98%, 99%, 99.5%, with the nucleic acid molecule sequence of a polynucleotide comprising the nucleic acid molecule shown in column 5 or 8 of Table I, application no. 13, preferably shown in Table I A, application no. 13, column 5, or in Table I A, application no. 13, column 8, or in Table I B, application no. 13, column 8, preferably the coding region thereof;
   [65988] (e) a nucleic acid molecule encoding a polypeptide having at least 30% identity, preferably at least 40%, 50% 60%, 70%, 75%, 80%, 85%, 90%, 95%, 96%, 97%, 98%, 99%, 99.5%, identity with the amino acid sequence of the polypeptide encoded by the nucleic acid molecule of (a), (b), (c) or (d);
   [65989] (f) a nucleic acid molecule which hybridizes with a nucleic acid molecule of (a), (b), (c), (d) or (e) under stringent hybridization conditions;
   [65990] (g) a nucleic acid molecule encoding a polypeptide which can be isolated with the aid of monoclonal or polyclonal antibodies made against a polypeptide encoded by one of the nucleic acid molecules of (a), (b), (c), (d), (e) or (f);
   [65991] (h) a nucleic acid molecule encoding a polypeptide comprising the consensus sequence or one or more polypeptide motifs as shown in column 8 of Table IV, application no. 13;
   [65992] (i) a nucleic acid molecule encoding a polypeptide having the activity represented by a respective protein as depicted in column 5 of Table II, application no. 13;
   [65993] (j) a nucleic acid molecule comprising a polynucleotide which is obtained by amplifying a cDNA library or a genomic library using the primers in Table III, application no. 13, column 8;
   [65994] and
   [65995] (k) nucleic acid molecule which is obtainable by screening a suitable nucleic acid library, especially a cDNA library and/or a genomic library, under stringent hybridization conditions with a probe comprising one of the sequences of the nucleic acid molecule of (a), (b), (c), (d), (e), (f), (g), (h), (i) or (j) or with a fragment of at least 15 nt, preferably 20 nt, 30 nt, 50 nt, 100 nt, 200 nt,500 nt, 1000 nt, 1500 nt, 2000 nt or 3000 nt of the nucleic acid molecule characterized in (a), (b), (c), (d), (e), (f), (g), (h), (i) or (j);
   [65996] or a nucleic acid molecule comprising a sequence which is complementary thereto;
      and, if desired
[65997] 2) nucleic acid molecule encoding a transit peptide, preferably encoding a plastidal transit peptide or a mitochondrial transit peptide;
   which are operable linked;]
   or comprising an expression cassette comprising
[65998] [0) a promoter, preferably a promoter selected from the group consisting of Big35S, PCUbi, Super and USP; and
[65999] 1) a nucleic acid molecule selected from the group consisting of
   [66000] (a) a nucleic acid molecule encoding a polypeptide shown in Table II, application no. 13, column 5 or 8, preferably shown in Table II A, application no. 13, column 5, or in Table II A, application no. 13, column 8, or in Table II B, application no. 13, column 8, or a homolog or a fragment thereof;
   [66001] (b) a nucleic acid molecule shown in Table I, application no. 13, column 5 or 8, preferably shown in Table I A, application no. 13, column 5, or in Table I A, application no. 13, column 8, or in Table I B, application no. 13, column 8, preferably the coding region thereof, or a homolog or a fragment thereof;
   [66002] (c) a nucleic acid molecule, which, as a result of the degeneracy of the genetic code, can be derived from a polypeptide sequence depicted in column 5 or 8 of Table II, application no. 13, preferably shown in Table II A, application no. 13, column 5, or in Table II A, application no. 13, column 8, or in Table II B, application no. 13, column 8;
   [66003] (d) a nucleic acid molecule having at least 30% identity, preferably at least 40%, 50%, 60%, 70%, 75%, 80%, 85%, 90%, 95%, 96%, 97%, 98%, 99%, 99.5%, with the nucleic acid molecule sequence of a polynucleotide comprising the nucleic acid molecule shown in column 5 or 8 of Table I, application no. 13, preferably shown in Table I A, application no. 13, column 5, or in Table I A, application no. 13, column 8, or in Table I B, application no. 13, column 8, preferably the coding region thereof;
   [66004] (e) a nucleic acid molecule encoding a polypeptide having at least 30% identity, preferably at least 40%, 50% 60%, 70%, 75%, 80%, 85%, 90%, 95%, 96%, 97%, 98%, 99%, 99.5%, identity with the amino acid sequence of the polypeptide encoded by the nucleic acid molecule of (a), (b), (c) or (d);
   [66005] (f) a nucleic acid molecule which hybridizes with a nucleic acid molecule of (a), (b), (c), (d) or (e) under stringent hybridization conditions;
   [66006] (g) a nucleic acid molecule encoding a polypeptide which can be isolated with the aid of monoclonal or polyclonal antibodies made against a polypeptide encoded by one of the nucleic acid molecules of (a), (b), (c), (d), (e) or (f);
   [66007] (h) a nucleic acid molecule encoding a polypeptide comprising the consensus sequence or one or more polypeptide motifs as shown in column 8 of Table IV, application no. 13;
   [66008] (i) a nucleic acid molecule encoding a polypeptide having the activity represented by a respective protein as depicted in column 5 of Table II, application no. 13;
   [66009] (j) a nucleic acid molecule comprising a polynucleotide which is obtained by amplifying a cDNA library or a genomic library using the primers in Table III, application no. 13, column 8;
   [66010] and
   [66011] (k) nucleic acid molecule which is obtainable by screening a suitable nucleic acid library, especially a cDNA library and/or a genomic library, under stringent hybridization conditions with a probe comprising one of the sequences of the nucleic acid molecule of (a), (b), (c), (d), (e), (f), (g), (h), (i) or (j) or with a fragment of at least 15 nt, preferably 20 nt, 30 nt, 50 nt, 100 nt, 200 nt,500 nt, 1000 nt, 1500 nt, 2000 nt or 3000 nt of the nucleic acid molecule characterized in (a), (b), (c), (d), (e), (f), (g), (h), (i) or (j);
   [66012] or a nucleic acid molecule comprising a sequence which is complementary thereto;]
      and, if desired
[66013] 2) nucleic acid molecule encoding a transit peptide, preferably encoding a plastidal transit peptide or a mitochondrial transit peptide;
   which are operable linked;]
   or comprising or being transformed by a vector comprising
[66014] [1) a nucleic acid molecule selected from the group consisting of
   [66015] (a) a nucleic acid molecule encoding a polypeptide shown in Table II, application no. 13, column 5 or 8, preferably shown in Table II A, application no. 13, column 5, or in Table II A, application no. 13, column 8, or in Table II B, application no. 13, column 8, or a homolog or a fragment thereof;
   [66016] (b) a nucleic acid molecule shown in Table I, application no. 13, column 5 or 8, preferably shown in Table I A, application no. 13, column 5, or in Table I A, application no. 13, column 8, or in Table I B, application no. 13, column 8, preferably the coding region thereof, or a homolog or a fragment thereof;
   [66017] (c) a nucleic acid molecule, which, as a result of the degeneracy of the genetic code, can be derived from a polypeptide sequence depicted in column 5 or 8 of Table II, application no. 13, preferably shown in Table II A, application no. 13, column 5, or in Table II A, application no. 13, column 8, or in Table II B, application no. 13, column 8;
   [66018] (d) a nucleic acid molecule having at least 30% identity, preferably at least 40%, 50%, 60%, 70%, 75%, 80%, 85%, 90%, 95%, 96%, 97%, 98%, 99%, 99.5%, with the nucleic acid molecule sequence of a polynucleotide comprising the nucleic acid molecule shown in column 5 or 8 of Table I, application no. 13, preferably shown in Table I A, application no. 13, column 5, or in Table I A, application no. 13, column 8, or in Table I B, application no. 13, column 8, preferably the coding region thereof;
   [66019] (e) a nucleic acid molecule encoding a polypeptide having at least 30% identity, preferably at least 40%, 50% 60%, 70%, 75%, 80%, 85%, 90%, 95%, 96%, 97%, 98%, 99%, 99.5%, identity with the amino acid sequence of the polypeptide encoded by the nucleic acid molecule of (a), (b), (c) or (d);
   [66020] (f) a nucleic acid molecule which hybridizes with a nucleic acid molecule of (a), (b), (c), (d) or (e) under stringent hybridization conditions;
   [66021] (g) a nucleic acid molecule encoding a polypeptide which can be isolated with the aid of monoclonal or polyclonal antibodies made against a polypeptide encoded by one of the nucleic acid molecules of (a), (b), (c), (d), (e) or (f);
   [66022] (h) a nucleic acid molecule encoding a polypeptide comprising the consensus sequence or one or more polypeptide motifs as shown in column 8 of Table IV, application no. 13;
   [66023] (i) a nucleic acid molecule encoding a polypeptide having the activity represented by a respective protein as depicted in column 5 of Table II, application no. 13;
   [66024] (j) a nucleic acid molecule comprising a polynucleotide which is obtained by amplifying a cDNA library or a genomic library using the primers in Table III, application no. 13, column 8;
   [66025] and
   [66026] (k) nucleic acid molecule which is obtainable by screening a suitable nucleic acid library, especially a cDNA library and/or a genomic library, under stringent hybridization conditions with a probe comprising one of the sequences of the nucleic acid molecule of (a), (b), (c), (d), (e), (f), (g), (h), (i) or (j) or with a fragment of at least 15 nt, preferably 20 nt, 30 nt, 50 nt, 100 nt, 200 nt,500 nt, 1000 nt, 1500 nt, 2000 nt or 3000 nt of the nucleic acid molecule characterized in (a), (b), (c), (d), (e), (f), (g), (h), (i) or (j);
   [66027] or a nucleic acid molecule comprising a sequence which is complementary thereto;]
      whereby, preferably, the nucleic acid molecule according to 1 (a), (b), (c), (d), (e), (f), (g), (h), (i), (j) or (k) distinguishes over the sequence depicted in Table I A and/or I B, application no. 13, column 5 or 8, or the coding regions thereof, by one or more nucleotides (especially but not exceeding 5%, preferably 4%, 3%, 2%, 1%, 0.5%, 0.2% or 0.1%). In an embodiment, the nucleic acid molecule of the invention does not consist of the sequence shown in Table I A and/or I B, application no. 13, column 5 or 8, or the coding region thereof. In another embodiment, the nucleic acid molecule of the present invention, preferably the coding region thereof, is at least 30%, 40%, 50%, 60%, 70%, 80%, 90%, 95% identical but less than 100%, 99.999%, 99.99%, 99.9%, 99%, 98%, 97%, 96% or 95% identical to the sequence shown in Table I A and/or I B, application no. 13, column 5 or 8, or the coding region thereof, respectively. In a further embodiment the nucleic acid molecule does not encode the polypeptide sequence shown in Table II A and/or II B, application no. 13, column 5 or 8 but homologs thereof. Accordingly, in one embodiment, the nucleic acid molecule of the present invention encodes in one embodiment a polypeptide which differs at least in one or more amino acids (especially but not exceeding 5%, preferably 4%, 3%, 2%, 1%, 0.5%, 0.2% or 0.1%) from the polypeptide shown in Table II, application no. 13, column 5 or 8 and does not encode a protein of the sequence shown in Table II A and/or II B, application no. 13, column 5 or 8. Accordingly, in one embodiment, the protein encoded by a sequence of a nucleic acid according to 1 (a), (b), (c), (d), (e), (f), (g), (h), (i), (j) or (k) does not consist of the sequence shown in Table I A and/or I B, application no. 13, column 5 or 8, or the coding region thereof. In a further embodiment, the protein of the present invention is at least 30%, 40%, 50%, 60%, 70%, 80%, 90%, 95% identical to protein sequence depicted in Table II A and/or II B, application no. 13, column 5 or 8 but less than 100%, preferably less than 99.999%, 99.99%, 99.9%, 99%, 98%, 97%, 96% or 95% identical to the sequence shown in Table II A and/or II B, application no. 13, column 5 or 8;
      as well as respective transgenic cells, tissue, parts of such non-human organism, e.g. plant cells, plant tissue, part of plants, like leaves, roots, stems, blossoms, seeds, fruits, pollen and the like.
      (All the references to Tables I to IV are references to the corresponding lines of Tables I to IV.)

[66028] In a preferred embodiment of said transgenic non-human organism said nucleic acid molecule according to 1 (a), (b), (c), (d), (e), (f), (g), (h), (i), (j) or (k) encodes a polypeptide which has the activity of the respective polypeptide represented by a protein comprising a polypeptide as depicted in the respective line in column 5 of Table II, application no. 13.

[66029] In another preferred embodiment of said transgenic non-human organism said nucleic acid molecule according to 1 (a), (b), (c), (d), (e), (f), (g), (h), (i), (j) or (k) confers a generation or an increase of the respective fine chemical in a non-human organism or a part thereof as compared to a corresponding wild-type non-human organism or part thereof.

[66030] In another preferred embodiment of said transgenic non-human organism said nucleic acid molecule according to 1 (a), (b), (c), (d), (e), (f), (g), (h), (i), (j) or (k) encodes a polypeptide which has the activity of the respective polypeptide represented by a protein as depicted in the respective line in column 5 of Table II application no. 13 and confers a generation or an increase of the respective fine chemical in a non-human organism or a part thereof as compared to a corresponding wild-type non-human organism or part thereof.

[66031] In another embodiment of said transgenic non-human organism the expression cassette comprises 2) a nucleic acid molecule encoding a transit peptide, preferably encoding a plastidal transit peptide, especially in case in column 6 of Table I, application no. 13, in the same line as of the respective nucleic acid molecule according to 1) “plastidic” is depicted, or encoding a mitochondrial transit peptide, especially in case in column 6 of Table I, application no. 13, in the same line as of the respective nucleic acid molecule according to 1) “mitochondric” is depicted.

[66032] In another embodiment thereof the expression cassette does not comprise 2) a nucleic acid molecule encoding a transit peptide, especially in case in column 6 of Table I, application no. 13, in the same line as of the respective nucleic acid molecule according to 1) “non-targeted” is depicted.

[66033] In another embodiment of said transgenic non-human organism said vector comprises beneath said nucleic acid molecule according to 1 (a), (b), (c), (d), (e), (f), (g), (h), (i), (j) or (k), a promoter, preferably a promoter selected from the group consisting of Big35S, PCUbi, Super and USP, which are operable linked.

[66034] In a preferred embodiment of said transgenic non-human organism said vector comprises beneath said nucleic acid molecule according to 1 (a), (b), (c), (d), (e), (f), (g), (h), (i), (j) or (k), a promoter, preferably a promoter selected from the group consisting of Big35S, PCUbi, Super and USP, which are operable linked; and said nucleic acid molecule according to 1 (a), (b), (c), (d), (e), (f), (g), (h), (i), (j) or (k) encodes a polypeptide which has the activity of the respective polypeptide represented by a protein comprising a polypeptide as depicted in the respective line in column 5 of Table II, application no. 13.

[66035] In another preferred embodiment of said transgenic non-human organism said vector comprises beneath said nucleic acid molecule according to 1 (a), (b), (c), (d), (e), (f), (g), (h), (i), (j) or (k), a promoter, preferably a promoter selected from the group consisting of Big35S, PCUbi, Super and USP, which are operable linked; and said nucleic acid molecule according to 1 (a), (b), (c), (d), (e), (f), (g), (h), (i), (j) or (k) confers a generation or an increase of the respective fine chemical in a non-human organism or a part thereof as compared to a corresponding wild-type non-human organism or part thereof.

[66036] In another preferred embodiment of said transgenic non-human organism said vector comprises beneath said nucleic acid molecule according to 1 (a), (b), (c), (d), (e), (f), (g), (h), (i), (j) or (k), a promoter, preferably a promoter selected from the group consisting of Big35S, PCUbi, Super and USP, which are operable linked; and said nucleic acid molecule according to 1 (a), (b), (c), (d), (e), (f), (g), (h), (i), (j) or (k) encodes a polypeptide which has the activity of the respective polypeptide represented by a protein as depicted in the same line in column 5 of Table II, application no. 13, and confers a generation or an increase of the respective fine chemical in a non-human organism or a part thereof as compared to a corresponding wild-type non-human organism or part thereof.

[66037] In another embodiment of said transgenic non-human organism said vector comprises beneath said nucleic acid molecule according to 1 (a), (b), (c), (d), (e), (f), (g), (h), (i), (j) or (k), a nucleic acid molecule encoding a transit peptide, preferably encoding a plastidal transit peptide, especially in case in column 6 of Table I, application no. 13, in the same line as of the respective nucleic acid molecule according to 1) “plastidic” is depicted, or encoding a mitochondrial transit peptide, especially in case in column 6 of Table I, application no. 13, in the same line as of the respective nucleic acid molecule according to 1) “mitochondric” is depicted, which are operable linked.

[66038] In another embodiment of said transgenic non-human organism said vector does not comprise beneath said nucleic acid molecule according to 1 (a), (b), (c), (d), (e), (f), (g), (h), (i), (j) or (k), a nucleic acid molecule encoding a transit peptide in case in column 6 of Table I, application no. 13, in the same line as of the respective nucleic acid molecule according to 1) “non-targeted” is depicted, which are operable linked.

[66039] In another embodiment of said transgenic non-human organism said vector comprises beneath said nucleic acid molecule according to 1 (a), (b), (c), (d), (e), (f), (g), (h), (i), (j) or (k), and a promoter, preferably a promoter selected from the group consisting of Big35S, PCUbi, Super and USP; a nucleic acid molecule encoding a transit peptide, preferably encoding a plastidal transit peptide, especially in case in column 6 of Table I, application no. 13, in the same line as of the respective nucleic acid molecule according to 1) “plastidic” is depicted, or encoding a mitochondrial transit peptide, especially in case in column 6 of Table I, application no. 13, in the same line as of the respective nucleic acid molecule according to 1) “mitochondric” is depicted, which are operable linked.

[66040] In another embodiment of said transgenic non-human organism said vector does not comprise beneath said nucleic acid molecule according to 1 (a), (b), (c), (d), (e), (f), (g), (h), (i), (j) or (k), and a promoter, preferably a promoter selected from the group consisting of Big35S, PCUbi, Super and USP; a nucleic acid molecule encoding a transit peptide, especially in case in column 6 of Table I, application no. 13, in the same line as of the respective nucleic acid molecule according to 1) “non-targeted” is depicted, which are operable linked.

[66041] In another embodiment of said transgenic non-human organism said vector comprises beneath said nucleic acid molecule according to 1 (a), (b), (c), (d), (e), (f), (g), (h), (i), (j) or (k), and a promoter, preferably a promoter selected from the group consisting of Big35S, PCUbi, Super and USP; a nucleic acid molecule encoding a transit peptide, preferably encoding a plastidal transit peptide, especially in case in column 6 of Table I, application no. 13, in the same line as of the respective nucleic acid molecule according to 1) “plastidic” is depicted, or encoding a mitochondrial transit peptide, especially in case in column 6 of Table I, application no. 13, in the same line as of the respective nucleic acid molecule according to 1) “mitochondric” is depicted, which are operable linked; and wherein said nucleic acid molecule according to 1 (a), (b), (c), (d), (e), (f), (g), (h), (i), (j) or (k) encodes a polypeptide which has the activity of the respective polypeptide represented by a protein comprising a polypeptide as depicted in the respective line in column 5 of Table II, application no. 13.

[66042] In another embodiment of said transgenic non-human organism said vector does not comprise beneath said nucleic acid molecule according to 1 (a), (b), (c), (d), (e), (f), (g), (h), (i), (j) or (k), and a promoter, preferably a promoter selected from the group consisting of Big35S, PCUbi, Super and USP; a nucleic acid molecule encoding a transit peptide, especially in case in column 6 of Table I, application no. 13, in the same line as of the respective nucleic acid molecule according to 1) “non-targeted” is depicted, which are operable linked; and wherein said nucleic acid molecule according to 1 (a), (b), (c), (d), (e), (f), (g), (h), (i), (j) or (k) encodes a polypeptide which has the activity of the respective polypeptide represented by a protein comprising a polypeptide as depicted in the respective line in column 5 of Table II, application no. 13.

[66043] In another embodiment of said transgenic non-human organism said vector comprises beneath said nucleic acid molecule according to 1 (a), (b), (c), (d), (e), (f), (g), (h), (i), (j) or (k), and a promoter, preferably a promoter selected from the group consisting of Big35S, PCUbi, Super and USP; a nucleic acid molecule encoding a transit peptide, preferably encoding a plastidal transit peptide, especially in case in column 6 of Table I, application no. 13, in the same line as of the respective nucleic acid molecule according to 1) “plastidic” is depicted, or encoding a mitochondrial transit peptide, especially in case in column 6 of Table I, application no. 13, in the same line as of the respective nucleic acid molecule according to 1) “mitochondric” is depicted, which are operable linked; and wherein said nucleic acid molecule according to 1 (a), (b), (c), (d), (e), (f), (g), (h), (i), (j) or (k) confers a generation or an increase of the respective fine chemical in a non-human organism or a part thereof as compared to a corresponding wild-type non-human organism or part thereof.

[66044] In another embodiment of said transgenic non-human organism said vector does not comprise beneath said nucleic acid molecule according to 1 (a), (b), (c), (d), (e), (f), (g), (h), (i), (j) or (k), and a promoter, preferably a promoter selected from the group consisting of Big35S, PCUbi, Super and USP; a nucleic acid molecule encoding a transit peptide, especially in case in column 6 of Table I, application no. 13, in the same line as of the respective nucleic acid molecule according to 1) “non-targeted” is depicted, which are operable linked; and wherein said nucleic acid molecule according to 1 (a), (b), (c), (d), (e), (f), (g), (h), (i), (j) or (k) confers a generation or an increase of the respective fine chemical in a non-human organism or a part thereof as compared to a corresponding wild-type non-human organism or part thereof.

[66045] In another embodiment of said transgenic non-human organism said vector comprises beneath said nucleic acid molecule according to 1 (a), (b), (c), (d), (e), (f), (g), (h), (i), (j) or (k), and a promoter, preferably a promoter selected from the group consisting of Big35S, PCUbi, Super and USP; a nucleic acid molecule encoding a transit peptide, preferably encoding a plastidal transit peptide, especially in case in column 6 of Table I, application no. 13, in the same line as of the respective nucleic acid molecule according to 1) “plastidic” is depicted, or encoding a mitochondrial transit peptide, especially in case in column 6 of Table I, application no. 13, in the same line as of the respective nucleic acid molecule according to 1) “mitochondric” is depicted, which are operable linked; and wherein said nucleic acid molecule according to 1 (a), (b), (c), (d), (e), (f), (g), (h), (i), (j) or (k) encodes a polypeptide which has the activity of the respective polypeptide represented by a protein as depicted in the respective line in column 5 of Table II application no. 13 and confers a generation or an increase of the respective fine chemical in a non-human organism or a part thereof as compared to a corresponding wild-type non-human organism or part thereof.

[66046] In another embodiment of said transgenic non-human organism said vector does not comprise beneath said nucleic acid molecule according to 1 (a), (b), (c), (d), (e), (f), (g), (h), (i), (j) or (k), and a promoter, preferably a promoter selected from the group consisting of Big35S, PCUbi, Super and USP; a nucleic acid molecule encoding a transit peptide, especially in case in column 6 of Table I, application no. 13, in the same line as of the respective nucleic acid molecule according to 1) “non-targeted” is depicted, which are operable linked; and wherein said nucleic acid molecule according to 1 (a), (b), (c), (d), (e), (f), (g), (h), (i), (j) or (k) encodes a polypeptide which has the activity of the respective polypeptide represented by a protein as depicted in the respective line in column 5 of Table II application no. 13 and confers a generation or an increase of the respective fine chemical in a non-human organism or a part thereof as compared to a corresponding wild-type non-human organism or part thereof.

[66047] In a preferred embodiment of said transgenic non-human organism said nucleic acid molecule according to 1 (a), (b), (c), (d), (e), (f), (g), (h), (i), (j) or (k), said promoter and optionally said nucleic acid molecule encoding a transit peptide are encompassed in an expression cassette in said vector. Accordingly an embodiment the invention provides a non-human organism comprising or being transformed by a vector comprising an expression cassette comprising said nucleic acid molecule according to 1 (a), (b), (c), (d), (e), (f), (g), (h), (i), (j) or (k), said promoter and optionally said a nucleic acid molecule encoding a transit peptide, operable linked. Said expression cassette may encompass a terminator, too.

[66048] [0291.1.7.13] to [0299.1.7.13] for the disclosure of these paragraphs see [0291.1.7.7] to [0299.1.7.7] above

[66049] The term “biological active portion” or “biological activity” means a polypeptide as depicted in the respective line in Table II, application no. 13, column 3 or a portion of said polypeptide which still has at least 10% or 20%, preferably 30%, 40%, 50% or 60%, especially preferably 70%, 75%, 80%, 90% or 95% of the enzymatic or biological activity of the natural or starting enzyme or protein.

[66050] [0301.1.7.13] to [0304.1.7.13] for the disclosure of these paragraphs see [0301.1.7.7] to [0304.1.7.7] above

[66051] Synthetic oligonucleotide primers for the amplification, e.g. as shown in the respective line in Table III, application no. 13, column 8, by means of polymerase chain reaction can be generated on the basis of a sequence shown herein, for example the sequence shown in the respective line in Table I, application no. 13, columns 5 or 8, or the sequences derived from Table II, application no. 13, columns 5 or 8, respectively.

[66052] Moreover, it is possible to identify a conserved region of a protein from various organism by carrying out protein sequence alignments with the polypeptide encoded by the nucleic acid molecules of the present invention, in particular with the sequences encoded by the nucleic acid molecule shown in the respective line in column 5 or 8 of Table I, application no. 13, from which conserved regions, and in turn, degenerate primers can be derived. Conserved regions are those, which show a very little variation in the amino acid in one particular position of several homologs from different origin. The consensus sequence and polypeptide motifs shown in the respective line in column 8 of Table IV, application no. 13, are derived from such alignments of homologous proteins.

[66053] In an embodiment of the present invention, in the method of the present invention the activity of a polypeptide comprising or consisting of a consensus sequence or at least one polypeptide motif shown in the respective line in Table IV, application no. 13, column 8, is increased. In another embodiment thereof, the method of the present invention relates to a polypeptide comprising or consisting of a consensus sequence shown in the respective line in Table IV, application no. 13, column 8 or comprising at least one polypeptide motif shown in the respective line in Table IV, application no. 13, column 8, whereby not more than 20, 15, 10, 9, 8, 7, 6, 5 4, 3, 2 or 1, or 0 of the amino acid positions indicated can be replaced by any amino acid. In another embodiment thereof, the method of the present invention relates to a polypeptide comprising or consisting of a consensus sequence shown in the respective line in Table IV, application no. 13, column 8 or comprising at least one polypeptide motif shown in the respective line in Table IV, application no. 13, column 8, whereby not more than 15%, 10%, 5%, 4%, 3%, 2% or 1%, or 0% of the amino acid positions defined as distinct specific amino acids are/is replaced by another amino acid. In another embodiment thereof, the method of the present invention relates to a polypeptide comprising or consisting of a consensus sequence shown in the respective line in Table IV, application no. 13, column 8 or comprising at least one polypeptide motif shown in the respective line in Table IV, application no. 13, column 8, whereby not more than 20, 15, 10, 9, 8, 7, 6, 5, 4, 3, 2 or 1, or 0 amino acids are inserted into a consensus sequence or polypeptide motif.

[66054] In an embodiment of the present invention, in the method of the present invention the activity of a polypeptide comprising or consisting of a consensus sequence or at least one polypeptide motif shown in the respective line in Table IV, application no. 13, column 8, is increased, whereby said polypeptide distinguishes over the sequence depicted in Table II, application no. 13, columns 5 or 8 by one or more amino acids.

[66055] In one embodiment, said polypeptide of the invention distinguishes over the sequence shown in the respective line in Table II, application no. 13, columns 5 and 8 by more than 5, 6, 7, 8 or 9 amino acids, preferably by more than 10, 15, 20, 25 or 30 amino acids, even more preferred are more than 40, 50, or 60 amino acids and, preferably, the sequence of the polypeptide of the invention distinguishes from the sequence shown in the respective line in Table II B, application no. 13, columns 5 and 8 by not more than 80%, 70%, 60%, 50%, 40%, 30%, 20%, 10%, 5%, 4%, 3%, 2%, 1% or 0.5%. In another embodiment, said polypeptide of the invention does not consist of the sequence shown in Table II, application no. 13, columns 5 or 8.

[66056] [0309.1.7.13] to for the disclosure of these paragraphs see [0309.1.7.7] to [0321.1.7.7] above

[66057] Polypeptides having above-mentioned activity, i.e. conferring the production or the increased production of the fine chemical abscisic acid, cryptoxanthin, violaxanthin, or zeaxanthin as compared to a corresponding, e.g. non-transformed, wild type non-human organism, like a microorganism or a plant cell, plant or part thereof, can be encoded by other DNA sequences which hybridize to the sequences shown in the respective line in Table I, application no. 13, columns 5 and 8, preferably the coding region thereof, at least under relaxed hybridization conditions and which encode the expression of polypeptides conferring the production or the increased production of the respective fine chemical abscisic acid, cryptoxanthin, violaxanthin, or zeaxanthin as compared to a corresponding, e.g. non-transformed, wild type non-human organism, like a microorganism or a plant cell, plant or part thereof.

[66058] [0323.1.7.13] to for the disclosure of these paragraphs see [0323.1.7.7] to [0329.1.7.7] above

[66059] Further, the nucleic acid molecule of the invention comprises a nucleic acid molecule, which is a complement of one of the nucleotide sequences of above-mentioned nucleic acid molecules or a portion thereof. A nucleic acid molecule or its sequence which is complementary to one of the nucleotide molecules or sequences shown in the respective line in Table I, application no. 13, columns 5 or 8, preferably the coding region thereof, homologs or fragments thereof, is one which is sufficiently complementary to one of the nucleotide molecules or sequences shown in the respective line in Table I, application no. 13, columns 5 or 8, preferably the coding region thereof, homologs or fragments thereof, such that it can hybridize to one of the nucleotide sequences shown in Table I, application no. 13, columns 5 or 8, preferably the coding region thereof, homologs or fragments thereof, thereby forming a stable duplex.

[66060] Preferably, the hybridization is performed under stringent hybridization conditions. However, a complement of one of the herein disclosed sequences is preferably a sequence complement thereto according to the base pairing of nucleic acid molecules well known to the skilled person. For example, the bases A and G undergo base pairing with the bases T and U or C, resp. and visa versa. Modifications of the bases can influence the base-pairing partner.

[66061] The nucleic acid molecule of the invention comprises a nucleotide sequence which is at least about 30%, 35%, 40%, 45%, 50%, 55%, 60%, 65%, 70%, 75%, 80%, 90%, 95%, 96%, 97%, 98%, 99%, 99.5% or more homologous to a nucleotide sequence shown in Table I, application no. 13, columns 5 or 8, preferably the coding region thereof, homologs or fragments thereof, and preferably has above-mentioned activity, in particular conferring the production or the increased production of the fine chemical abscisic acid, cryptoxanthin, violaxanthin, or zeaxanthin, respectively, after increasing the activity or an activity of a gene as shown in the respective line in Table I or of a gene product, e.g. as shown in the respective line in Table II, application no. 13, column 5 or 8, by for example in one embodiment expression either in the cytosol or in an organelle such as a plastid or mitochondria or both, preferably in a plastid, or in another embodiment non-targeted or targeted.

[66062] The nucleic acid molecule of the invention comprises a nucleotide sequence or molecule which hybridizes, preferably hybridizes under stringent conditions as defined herein, to one of the nucleic acid molecule shown in the respective line in Table I, preferably Table IB, application no. 13, columns 5 or 8, preferably the coding region thereof, fragments or homologs thereof, and encodes a protein having above-mentioned activity, e.g. conferring the production or the increased production of the respective fine chemical abscisic acid, cryptoxanthin, violaxanthin, or zeaxanthin as compared to a corresponding, e.g. non-transformed, wild type non-human organism, like a microorganism or a plant cell, plant or part thereof, by for example in one embodiment expression either in the cytosol or in an organelle such as a plastid or mitochondria or both, preferably in a plastid, or in another embodiment non-targeted or targeted, and optionally, the activity thereof is selected from the group consisting of acetyl CoA carboxylase, acetyltransferase, acyl transferase, alcohol dehydrogenase, AX653549-protein, b1003-protein, b2032-protein, b2099-protein, b2121-protein, b2474-protein, b3346-protein, b3817-protein, coproporphyrinogen oxidase, F-box protein, flavodoxin, gluconate transport system permease 3, glutaredoxin, glycerol-3-phosphate dehydrogenase, glycine cleavage system T aminomethyltransferase, halotolerance protein, heat shock transcription factor, isopropylmalate isomerase large subunit, ketol-acid reductoisomerase, lipoprotein precursor, MADS-box transcription factor, melibiose carrier protein, monothiol glutaredoxin, monthiol glutaredoxin, N-acetylglucosaminylphosphatidylinositoldeacetylase, nitrate/nitrite transport protein, protein kinase, protein phosphatase, purine-nucleoside phosphorylase, ribosephosphate isomerase, constitutive, serine/threonine-protein phosphatase, sterol O-acyltransferase, superoxide dismutase, thioredoxin, transcription factor, transcriptional regulator, YCL026C-A-protein, YER184C-protein, ygl096w-protein, ymr324c-protein, and YOR044W-protein, respectively.

[66063] Moreover, the nucleic acid molecule of the invention can comprise only a porganism tion of the coding region of one of the nucleic acid molecules depicted in Table I, application no. 13, columns 5 or 8, for example a fragment which can be used as a probe or primer or a fragment encoding a biologically active portion of the polypeptide of the present invention or of a polypeptide used in the process of the present invention, i.e. having above-mentioned activity, e.g. conferring the production or the increased production of the respective fine chemical abscisic acid, cryptoxanthin, violaxanthin, or zeaxanthin as compared to a corresponding, e.g. non-transformed, wild type non-human organism, like a microorganism or a plant cell, plant or part thereof, by for example in one embodiment expression either in the cytosol or in an organism elle such as a plastid or mitochondria or both, preferably in a plastid, or in another embodiment non-targeted or targeted. The nucleotide sequences determined from the cloning of the present protein-according-to-the-invention-encoding gene allows for the generation of probes and primers designed for use in identifying and/or cloning its homologues from other cell types and organisms. The probe/primer typically comprises a substantially purified oligonucleotide. The oligonucleotide typically comprises a region of nucleotide sequence that hybridizes under stringent conditions to at least about 12, 15 preferably about 20 or 25, more preferably about 40, 50 or 75 consecutive nucleotides of a sense strand of one of the sequences set forth, e.g., in the respective line in Table I, application no. 13, column 5 or 8, preferably the coding region thereof, or a homolog or a fragment thereof, an anti-sense sequence of one of the sequences, e.g., set forth in the respective line in Table I, application no. 13, columns 5 or 8, preferably the coding region thereof, or a homolog or a fragment thereof or naturally occurring mutants thereof. Primers based on a nucleic acid molecule of invention can be used in PCR reactions to clone homologs of the polypeptide of the invention or of the polypeptide used in the process of the invention, e.g. as the primers described in the examples of the present invention, e.g. as shown in the examples. A PCR with the primers shown in the respective line in Table III, column 8 will result in a fragment of the gene product as shown in Table II, application no. 13, column 5.

[66064] Primer sets are interchangeable. The person skilled in the art knows how to design and combine said primers to result in the desired product, e.g. in a full length clone or a partial sequence. Probes based on the sequences of the nucleic acid molecule of the invention or used in the process of the present invention can be used to detect transcripts or genomic sequences encoding the same or homologous proteins. The probe can further comprise a label group attached thereto, e.g. the label group can be a radioisotope, a fluorescent compound, an enzyme, or an enzyme co-factor. Such probes can be used as a part of a genomic marker test kit for identifying cells which express a polypeptide of the invention or used in the process of the present invention, such as by measuring a level of an encoding nucleic acid molecule in a sample of cells, e.g. detecting mRNA levels or determining, whether a genomic gene comprising the sequence of the polynucleotide of the invention or used in the processes of the present invention has been mutated or deleted.

[66065] As the expression of a respective nucleic acids of the invention is related to the synthesis of the respective fine chemical abscisic acid, cryptoxanthin, violaxanthin, or zeaxanthin its function as a probe extends to the detection of microorganisms, plant tissues, plants, plant variets, plant ecotypes or plant genera with varying capability or potential for synthesis of the respective fine chemical abscisic acid, cryptoxanthin, violaxanthin, or zeaxanthin. Therefore in one embodiment the present invention relates to a method for analyzing the capability or potential of a plant tissue, a plant, a plant variety or plant ecotype to produce the fine chemical abscisic acid, cryptoxanthin, violaxanthin, or zeaxanthin by using the nucleic acid of the invention or parts thereof as a probe to detect the amount of the nucleic acid of the invention in the non-human organism or a part thereof in comparison to another non-human organism.

[66066] The nucleic acid molecule of the invention encodes a polypeptide or portion thereof which includes an amino acid sequence which is sufficiently homologous to the amino acid sequence shown in respective line in Table II, application no. 13, columns 5 or 8 such that the protein or portion thereof maintains the ability to confer the production or the increased production of the respective fine chemical abscisic acid, cryptoxanthin, violaxanthin, or zeaxanthin as compared to a corresponding, e.g. non-transformed, wild type non-human organism, like a microorganism or a plant cell, plant or part thereof, in particular increasing the activity as mentioned above or as described in the examples in microorganisms or plants.

[66067] As used herein, the language “sufficiently homologous” refers to proteins or portions thereof which have amino acid sequences which include a minimum number of identical or equivalent amino acids (e.g. an amino acid which has a similar side chain as an amino acid in one of the sequences of the polypeptide of the present invention) to an amino acid sequence shown in the respective line in Table II, application no. 13, columns 5 or 8 such that the protein or portion thereof is able to confer the production or the increased production of the respective fine chemical abscisic acid, cryptoxanthin, violaxanthin, or zeaxanthin as compared to a corresponding, e.g. non-transformed, wild type non-human organism, like a microorganism or a plant cell, plant or part thereof. For example having the activity of a protein as shown in the respective line in Table II, application no. 13, column 3 and as described herein.

[66068] In an embodiment of the present invention, the nucleic acid molecule of the present invention comprises a nucleic acid molecule that encodes a portion of the protein of the present invention. The protein is at least about 30%, 35%, 40%, 45% 50%, 55%, 60%, 65%, 70%, 75%, 80%, 85%, 90%, 91%, 92%, 93%, 94%, 95%, 96%, 97%, 98%, 99%, 99.5% or more homologous to an entire amino acid sequence shown in the respective line of Table II, application no. 13, column 5 or 8 and has the above-mentioned activity, e.g. conferring the production or the increased production of the respective fine chemical abscisic acid, cryptoxanthin, violaxanthin, or zeaxanthin as compared to a corresponding, e.g. non-transformed, wild type non-human organism, like a microorganism or a plant cell, plant or part thereof by, for example in a embodiment expression either in the cytosol or in an organelle such as a plastid or mitochondria or both, preferably in a plastid, or in another embodiment by targeted or non-targeted expression.

[66069] for the disclosure of this paragraph see [0338.1.7.7] above

[66070] for the disclosure of this paragraph see [0339.1.7.7] above

[66071] The invention further relates to nucleic acid molecules or methods using said nucleic acid molecules that differ from one of the nucleotide sequences shown in the respective line in Table I, application no. 13, columns 5 or 8, preferably the coding region thereof, or fragments or homologs thereof, due to degeneracy of the genetic code but encode a polypeptide of the present invention, in particular a polypeptide having the above-mentioned activity, e.g. as those polypeptides depicted in the respective line in Table II, application no. 13, columns 5 or 8, fragments or homologs thereof. Advantageously, the nucleic acid molecule of the invention comprises, or in an other embodiment has, a nucleotide sequence encoding a protein comprising, or in an other embodiment having, an amino acid sequence shown in the respective line in Table II, application no. 13, columns 5 or 8, fragments or homologs thereof. In a further embodiment, the nucleic acid molecule of the invention encodes a full length protein which is substantially homologous to an amino acid sequence shown in the respective line in Table II, application no. 13, columns 5 or 8, or homologs thereof. However, in an embodiment, the nucleic acid molecule of the present invention does not consist of the sequence shown in the respective line in Table I, preferably Table IA, application no. 13, columns 5 or 8, preferably the coding region thereof, but the functional homologs thereof.

[66072] [0341.1.7.13] to [0343.1.7.13] for the disclosure of these paragraphs see [0341.1.7.7] to [0343.1.7.7] above

[66073] Accordingly, in another embodiment, a nucleic acid molecule of the invention is at least 15, 20, 25 or 30 nucleotides in length. Preferably, it hybridizes under stringent conditions to a nucleic acid molecule comprising a nucleotide sequence of the nucleic acid molecule of the present invention or used in the process of the present invention, e.g. comprising the sequence shown in the respective line in Table I, application no. 13, columns 5 or 8, preferably the coding region thereof. In another embodiment the nucleic acid molecule is preferably at least 20, 30, 50, 100, 250 or more nucleotides in length.

[66074] for the disclosure of this paragraph see [0345.1.7.7] above

[66075] Preferably, a nucleic acid molecule of the invention that hybridizes under stringent conditions to a sequence shown in the respective line in Table I, application no. 13, columns 5 or 8, preferably the coding region thereof, corresponds to a naturally-occurring nucleic acid molecule of the invention. As used herein, a “naturally-occurring” nucleic acid molecule refers to a RNA or DNA molecule having a nucleotide sequence that occurs in nature (e.g. encodes a natural protein). Preferably, the nucleic acid molecule encodes a natural protein having above-mentioned activity, e.g. conferring the production or the increased production of the respective fine chemical abscisic acid, cryptoxanthin, violaxanthin, or zeaxanthin as compared to a corresponding, e.g. non-transformed, wild type non-human organism, like a microorganism or a plant cell, plant or part thereof after increasing the expression or activity thereof or the activity of a protein of the invention or used in the process of the invention, in an embodiment for example expression either in the cytosol or in an organelle such as a plastid or mitochondria, preferably in plastids, or, in another embodiment by targeted or non-targeted expression.

[66076] for the disclosure of this paragraph see [0347.1.7.7] above

[66077] For example, nucleotide substitutions leading to amino acid substitutions at “non-essential” amino acid residues can be made in a sequence of the nucleic acid molecule of the invention or used in the process of the invention, e.g. shown in the respective line in Table I, application no. 13, columns 5 or 8, preferably the coding region thereof, or fragments or homologs thereof.

[66078] for the disclosure of this paragraph see [0349.1.7.7] above

[66079] for the disclosure of this paragraph see [0350.1.7.7] above

[66080] Accordingly, the invention relates to nucleic acid molecules encoding a polypeptide having above-mentioned activity, in a non-human organisms or parts thereof by for example expression either in the cytosol or in an organelle such as a plastid or mitochondria or both, preferably in plastids, that contain changes in amino acid residues that are not essential for said activity. Such polypeptides differ in amino acid sequence from a sequence depicted in the respective line in Table II, especially Table IIA, application no. 13, columns 5 or 8, but retain said activity described herein. The nucleic acid molecule can comprise a nucleotide sequence encoding a polypeptide, wherein the polypeptide comprises an amino acid sequence at least about 50% identical to an amino acid sequence shown in the respective line in Table II, application no. 13, columns 5 or 8, and is capable of conferring the production or the increased production of the respective fine chemical abscisic acid, cryptoxanthin, violaxanthin, or zeaxanthin as compared to a corresponding, e.g. non-transformed, wild type non-human organism, like a microorganism or a plant cell, plant or part thereof, after increasing its activity for example in an embodiment by expression either in the cytosol or in an organelle such as a plastid or mitochondria or both, preferably in plastids, or, in another embodiment by targeted or non-targeted expression. Preferably, the protein encoded by the nucleic acid molecule is at least about 60%, 70%, 80%, 90%, 95%, 96%, 97%, 98%, 99% or 99.5% identical to the sequence shown in the respective line in Table II, application no. 13, columns 5 or 8.

[66081] [0352.1.7.13] to [0357.1.7.13] for the disclosure of these paragraphs see [0352.1.7.7] to [0357.1.7.7] above

[66082] Functional equivalents of the nucleic acid molecules according to the present invention and/or used in the process according to the present invention represent an embodiment of homologs. Functional equivalents derived from the nucleic acid molecules as shown in the respective line in Table I, application no. 13, columns 5 or 8, preferably the coding region thereof, according to the invention by substitution, insertion or deletion have at least 30%, 35%, 40%, 45%, 50%, 55%, 60%, 65%, 70%, 75%, 80%, 85%, 90%, 91%, 92%, 93%, 94%, 95%, 96%, 97%, 98%, 99% or 99.5% homology with one of the nucleic acid molecules as shown in the respective line in Table I, application no. 13, columns 5 or 8, preferably the coding region thereof, according to the invention and encode polypeptides having essentially the same properties as the polypeptide as shown in the respective line in Table II, application no. 13, columns 5 or 8.

[66083] Functional equivalents derived from one of the polypeptides as shown in the respective line in Table II, application no. 13, columns 5 or 8 according to the invention by substitution, insertion or deletion have at least 30%, 35%, 40%, 45%, 50%, 55%, 60%, 65%, 70%, 75%, 80%, 85%, 90%, 91%, 92%, 93%, 94%, 95%, 96%, 97%, 98%, 99% or 99.5% homology with one of the polypeptides as shown in the respective line in Table II, application no. 13, columns 5 or 8 according to the invention and having essentially the same properties as the polypeptide as shown in the respective line in Table II, application no. 13, columns 5 or 8.

[66084] for the disclosure of this paragraph see [0359.1.7.7] above

[66085] A nucleic acid molecule encoding a homolog to a polypeptide depicted in the respective line in Table II, application no. 13, columns 5 or 8 can be created by introducing one or more nucleotide substitutions, additions or deletions into the nucleic acid molecule of the present invention, in particular of Table I, application no. 13, columns 5 or 8, in the respective line, such that one or more amino acid substitutions, additions or deletions are introduced into the encoded protein. Mutations can be introduced into the nucleic acid molecules as depicted in the respective line in Table I, application no. 13, columns 5 or 8, preferably the coding region thereof, by standard techniques, such as site-directed mutagenesis, PCR-mediated mutagenesis or other methods known to the person skilled in the art.

[66086] [0361.1.7.13] to [0363.1.7.13] for the disclosure of these paragraphs see [0361.1.7.7] to [0363.1.7.7] above

[66087] Homologues of the nucleic acid sequences used, with the sequences shown in the respective line in Table I, application no. 13, columns 5 or 8, preferably the coding region thereof, comprise also allelic variants with at least approximately 30%, 35%, 40%, 45%, 50%, 55%, 60%, 65%, 70%, 75%, 80%, 85%, 90%, 91%, 92%, 93%, 94% 95%. 96%, 97%, 98%, 99%, 99.5% or more % homology with one of the nucleotide sequences shown or the abovementioned derived nucleic acid sequences or their homologues or derivatives or parts of these. Allelic variants encompass in particular functional variants which can be obtained by deletion, insertion or substitution of nucleotides from the sequences shown in the respective line, preferably in Table I, columns 5 or 8, preferably the coding region thereof, or from the derived nucleic acid sequences, the intention being, however, that the enzymatic activity or the biological activity of the resulting proteins synthesized is advantageously retained or increased.

[66088] In one embodiment of the present invention, the nucleic acid molecule of the invention or used in the process of the invention comprises the sequences shown in the respective line in any of the Table I, application no. 13, columns 5 or 8, preferably the coding region thereof, fragments or homologs thereof. It is preferred that the nucleic acid molecule comprises as little as possible other nucleotides not shown in the respective line in any one of Table I, application no. 13, columns 5 or 8, preferably the coding region thereof, fragments or homologs thereof. In one embodiment, the nucleic acid molecule comprises less than 500, 400, 300, 200, 100, 90, 80, 70, 60, 50 or 40 further nucleotides. In a further embodiment, the nucleic acid molecule comprises less than 30, 20 or 10 further nucleotides. In one embodiment, the nucleic acid molecule used in the process of the invention is identical to the sequences shown in the respective line in Table I, application no. 13, columns 5 or 8, preferably the coding region thereof.

[66089] Also preferred is that the nucleic acid molecule used in the process of the invention encodes a polypeptide comprising the sequence shown in the respective line in Table II, application no. 13, columns 5 or 8, fragments or homologs thereof. In one embodiment, the nucleic acid molecule encodes less than 150, 130, 100, 80, 60, 50, 40 or 30 further amino acids. In a further embodiment, the encoded polypeptide comprises less than 20, 15, 10, 9, 8, 7, 6 or 5 further amino acids. In one embodiment used in the inventive process, the encoded polypeptide is identical to the sequences shown in the respective line in Table II, application no. 13, columns 5 or 8.

[66090] In one embodiment, the nucleic acid molecule of the invention or used in the process encodes a polypeptide comprising the sequence shown in the respective line in Table II, application no. 13, columns 5 or 8, or fragments or homologs thereof, and comprises less than 100 further nucleotides. In a further embodiment, said nucleic acid molecule comprises less than 30 further nucleotides. In one embodiment, the nucleic acid molecule used in the process is identical to a coding sequence of the sequences shown in the respective line in Table I, application no. 13, columns 5 or 8.

[66091] Polypeptides (=proteins), which still have the essential biological or enzymatic activity of the polypeptide of the present invention conferring the production or the increased production of the respective fine chemical abscisic acid, cryptoxanthin, violaxanthin, or zeaxanthin as compared to a corresponding, e.g. non-transformed, wild type non-human organism, like a microorganism or a plant cell, plant or part thereof, i.e. whose activity is essentially not reduced, are polypeptides with at least 10%, 20%, 30%, 40%, 50%, 60%, 70%, 80%, 90%, 95% or more of the wild type biological activity or enzymatic activity, advantageously, the activity is essentially not reduced in comparison with the activity of a polypeptide shown in the respective line in Table II, application no. 13, columns 5 or 8 expressed under identical conditions.

[66092] [0369.1.13.13] Homologues of nucleic acid molecules shown in the respective line in Table I, application no. 13, columns 5 or 8, preferably the coding region thereof, or fragments thereof, or of the derived sequences shown in the respective line in Table II, application no. 13, columns 5 or 8, or fragments thereof, also mean truncated sequences, cDNA, single-stranded DNA or RNA of the coding and noncoding DNA sequence. Homologues of said sequences are also understood as meaning derivatives, which comprise noncoding regions such as, for example, UTRs, introns, terminators, enhancers or promoter variants. The promoters upstream of the nucleotide sequences stated can be modified by one or more nucleotide substitution(s), insertion(s) and/or deletion(s) without, however, interfering with the functionality or activity either of the promoters, the open reading frame (=ORF) or with the 3′-regulatory region such as terminators or other 3′-regulatory regions, which are far away from the ORF. It is furthermore possible that the activity of the promoters is increased by modification of their sequence, or that they are replaced completely by more active promoters, even promoters from heterologous organisms.

[66093] Appropriate promoters are known to the person skilled in the art and are mentioned herein below.

[66094] [0370.1.7.13] to [0379.1.7.13] for the disclosure of these paragraphs see [0370.1.7.7] to [0379.1.7.7] above [0380.1.13.13] Moreover, a native polypeptide conferring the increase of the respective fine chemical abscisic acid, cryptoxanthin, violaxanthin, or zeaxanthin in a non-human organism or a part thereof can be isolated from cells (e.g., endothelial cells), for example using the antibody of the present invention as described below, in particular, an antibody against proteins having acetyl CoA carboxylase, acetyltransferase, acyl transferase, alcohol dehydrogenase, AX653549-protein, b1003-protein, b2032-protein, b2099-protein, b2121-protein, b2474-protein, b3346-protein, b3817-protein, coproporphyrinogen oxidase, F-box protein, flavodoxin, gluconate transport system permease 3, glutaredoxin, glycerol-3-phosphate dehydrogenase, glycine cleavage system T aminomethyltransferase, halotolerance protein, heat shock transcription factor, isopropylmalate isomerase large subunit, ketol-acid reductoisomerase, lipoprotein precursor, MADS-box transcription factor, melibiose carrier protein, monothiol glutaredoxin, monthiol glutaredoxin, N-acetylglucosaminylphosphatidylinositoldeacetylase, nitrate/nitrite transport protein, protein kinase, protein phosphatase, purine-nucleoside phosphorylase, ribosephosphate isomerase, constitutive, serine/threonine-protein phosphatase, sterol O-acyltransferase, superoxide dismutase, thioredoxin, transcription factor, transcriptional regulator, YCL026C-A-protein, YER184C-protein, ygl096w-protein, ymr324c-protein, or YOR044W-protein activity, respectively, or an antibody against polypeptides as shown in the respective line in Table II, application no. 13, columns 5 or 8, or fragments or homologs thereof which can be produced by standard techniques utilizing the polypeptid of the present invention or fragment thereof, i.e., the polypeptide of this invention (FCRP). Preferred are monoclonal antibodies.

[66095] for the disclosure of this paragraph see [0381.1.7.7] above

[66096] In one embodiment, the present invention relates to a polypeptide as depicted in the respective line in Table II, especially in Table IIA or especially in Table IIB, application no. 13, columns 5 or 8, or fragment or homolog thereof or as coded by the nucleic acid molecule shown in the respective line in Table I, especially Table IA or especially Table IB, application no. 13, columns 5 or 8, preferably the coding region thereof, or fragment or homolog thereof.

[66097] In an embodiment, the present invention relates to a polypeptide comprising or consisting of a consensus sequence shown in the respective line in Table IV, application no. 13, column 8 or at least one polypeptide motif shown in the respective line in Table IV, application no. 13, column 8.

[66098] In an embodiment thereof, the present invention relates to a polypeptide comprising or consisting of a consensus sequence shown in the respective line in Table IV, application no. 13, column 8 or comprising at least one polypeptide motif shown in the respective line in Table IV, application no. 13, column 8, whereby not more than 20, 15, 10, 9, 8, 7, 6, 5, 4, 3, 2, or 1, or 0 of the amino acids can be replaced by any amino acid.

[66099] In another embodiment thereof, the present invention relates to a polypeptide comprising or consisting of a consensus sequence shown in the respective line in Table IV, application no. 13, column 8 or comprising at least one polypeptide motif shown in the respective line in Table IV, application no. 13, column 8, whereby not more than 15%, 10%, 5%, 4%, 3%, 2% or1% or 0% of the amino acids defined as distinct specific amino acids are/is replaced by another amino acid.

[66100] In another embodiment thereof, the present invention relates to a polypeptide comprising or consisting of a consensus sequence shown in the respective line in Table IV, application no. 13, column 8 or comprising at least one polypeptide motif shown in the respective line in Table IV, application no. 13, column 8, whereby not more than 20, 15, 10, 9, 8, 7, 6, 5, 4, 3, 2, or 1, or 0 amino acids are inserted into the consensus sequence or polypeptide motif.

[66101] In an embodiment of the present invention, the polypeptide of the present invention comprises or consists of a consensus sequence or at least one polypeptide motif shown in the respective line in Table IV, application no. 13, column 8, whereby said polypeptide distinguishes over the sequence depicted in the respective line in Table II, application no. 13, columns 5 or 8 by one or more amino acids. In one embodiment, said polypeptide of the invention distinguishes over the sequence shown in the respective line in Table II, application no. 13, columns 5 and 8 by more than 5, 6, 7, 8 or 9 amino acids, preferably by more than 10, 15, 20, 25 or 30 amino acids, even more preferred are more than 40, 50, or 60 amino acids and, preferably, the sequence of the polypeptide of the invention distinguishes from the sequence shown in the respective line in Table II, application no. 13, columns 5 and 8 by not more than 80%, 70%, 60%, 50%, 40%, 30%, 20%, 10%, 5%, 4%, 3%, 2%, 1% or 0.5%. In another embodiment, said polypeptide of the invention does not consist of the sequence shown in the respective line in Table II, application no. 13, columns 5 and 8.

[66102] In an embodiment, the invention relates to a polypeptide conferring an increase in the respective fine chemical abscisic acid, cryptoxanthin, violaxanthin, or zeaxanthin in a non-human organism, especially a microorganism or a plant, or a part thereof, being encoded by the nucleic acid molecule of the invention or used in the process of the invention and having a sequence which distinguishes over the sequence as shown in the respective line in Table II, application no. 13, columns 5 or 8 by one or more amino acids (but not exceeding 5%, preferably 4%, 3%, 2%, 1%, 0.5%, 0.2% or 0.1%). In an embodiment, said polypeptide of the invention does not comprise or consist of the sequence shown in the respective line in Table II, application no. 13, columns 5 or 8. In an embodiment, said polypeptide of the present invention is less than 100%, 99.999%, 99.99%, 99.9% or 99% identical. In one embodiment, said polypeptide which differs at least in one or more amino acids (but not exceeding 5%, preferably 4%, 3%, 2%, 1%, 0.5%, 0.2% or 0.1%) from the polypeptide shown in the respective line in Table II, application no. 13, columns 5 and 8 does not comprise a protein of the sequence shown in the respective line in Table II A and/or II B, application no. 13, columns 5 or 8.

[66103] In an embodiment, the present invention relates to a polypeptide having the activity of the protein as shown in the respective line in Table II, application no. 13, column 3, which distinguishes over the sequence depicted in the respective line in Table II, application no. 13, columns 5 or 8 by one or more amino acids, preferably by more than 5, 6, 7, 8 or 9 amino acids, preferably by more than 10, 15, 20, 25 or 30 amino acids, even more preferred are more than 40, 50, or 60 amino acids and, preferably, the sequence of the polypeptide of the invention distinguishes from the sequence shown in the respective line in Table II, application no. 13, columns 5 and 8 by not more than 80%, 70%, 60%, 50%, 40%, 30%, 20%, 10%, 5%, 4%, 3%, 2%, 1% or 0.5%.

[66104] In another embodiment the polypeptide of the invention takes the form of a preprotein consisting of a plastidial or mitochondrial transit peptide joint to a polypeptide having the activity of the protein as shown in Table II, column 3, from which the transit peptide is preferably cleaved off upon transport of the preprotein into the organelle for example into the plastid or mitochondrion.

[66105] In another embodiment the polypeptide of the invention takes not the form of a preprotein.

[66106] for the disclosure of this paragraph see [0390.1.7.7] above

[66107] for the disclosure of this paragraph see [0391.1.7.7] above

[66108] A polypeptide of the invention can participate in the process of the present invention. The polypeptide or a portion thereof comprises preferably an amino acid sequence, which is sufficiently homologous to an amino acid sequence shown in the respective line in Table II A and/or II B, application no. 13, columns 5 or 8.

[66109] Further, the polypeptide can have an amino acid sequence which is encoded by a nucleotide sequence which hybridizes, preferably hybridizes under stringent conditions as described above, to a nucleotide sequence of the nucleic acid molecule of the present invention. Accordingly, the polypeptide has an amino acid sequence which is encoded by a nucleotide sequence that is at least about 35%, 40%, 45%, 50%, 55%, 60%, 65%, 70%, 75%, 80%, 85%, 90%, 91%, 92%, 93%, 94%, 95%, 96%, 97%, 98%, 99%, 99.5% or more homologous to one of the amino acid sequences as shown in the respective line in Table II A and/or II B, application no. 13, columns 5 or 8, or fragments thereof. The preferred polypeptide of the present invention preferably possesses at least one of the activities according to the invention and described herein. A preferred polypeptide of the present invention includes an amino acid sequence encoded by a nucleotide sequence which hybridizes, preferably hybridizes under stringent conditions, to a nucleotide sequence shown in the respective line in Table I A and/or I B, application no. 13, columns 5 or 8, preferably the coding region thereof, or fragments thereto or which is homologous thereto, as defined above

[66110] The polypeptide of the present invention can vary from the sequences shown in the respective line in Table II A and/or II B, application no. 13, columns 5 or 8 in amino acid sequence due to natural variation or mutagenesis, as described in detail herein. Accordingly, the polypeptide comprise an amino acid sequence which is at least about 35%, 40%, 45%, 50%, 55%, 60%, 65%, 70%, 75%, 80%, 85% or 90, 91%, 92%, 93%, 94%, 95%, 96%, 97%, 98%, 99%, 99.5% or more homologous to an entire amino acid sequence shown in the respective line in Table II A and/or II B, application no. 13, columns 5 or 8.

[66111] Biologically active portions of a polypeptide of the present invention include peptides comprising amino acid sequences derived from the amino acid sequence of the polypeptide of the present invention or used in the process of the present invention, e.g., the amino acid sequence shown in the respective line in Table II, application no. 13, columns 5 or 8 or the amino acid sequence of a protein homologous thereto, which include fewer amino acids than a full length polypeptide of the present invention or used in the process of the present invention or the full length protein which is homologous to a polypeptide of the present invention or used in the process of the present invention depicted herein, and exhibit at least one activity of a polypeptide of the present invention or used in the process of the present invention.

[66112] for the disclosure of this paragraph see [0396.1.7.7] above

[66113] Manipulation of the nucleic acid molecule of the invention may result in the production of a protein having differences from the protein as shown in the respective line in Table II, application no. 13, column 5 or 8. Differences shall mean at least one amino acid different from the sequences as shown in the respective line in Table II, application no. 13, column 5 or 8, preferably at least 2, 3, 4, 5, 6, 7, 8, 9 or 10 amino acids (especially but not exceeding 0.1%, preferably 0.2%, 0.5%, 1%, 2%, 3% 4% or 5%), more preferably at least 15, 20, 25, 30, 35, 40, 45 or 50 amino acids (especially but not exceeding 0.5%, preferably 1%, 2%, 3% 4%, 5%, 10% or 25%) different from the sequences as shown in the respective line in Table II, application no. 13, column 5 or 8. These proteins may be improved in efficiency or activity, or may be more stable and therefore present in greater numbers in the cell as compared to the wild-type cell.

[66114] Any mutagenesis strategies for the polypeptide of the present invention or the polypeptide used in the process of the present invention to result in increasing said activity are not meant to be limiting; variations on these strategies will be readily apparent to one skilled in the art. Using such strategies, and incorporating the mechanisms disclosed herein, the nucleic acid molecule and polypeptide of the invention may be utilized to generate algae, ciliates, fungi, other microorganisms like C. glutamicum or plants or parts thereof, expressing proteins as shown in the respective line in Table II, application no. 13, column 5 or 8, or mutated proteins thereof. The nucleic acid molecules and polypeptide molecules of the invention are expressed such that the yield, production, and/or efficiency of production of a desired compound is improved.

[66115] [0399.1.7.13] to [0401.1.7.13] for the disclosure of these paragraphs see [0399.1.7.7] to [0401.1.7.7] above

[66116] In one embodiment, a protein (=polypeptide) as shown in the respective line in Table II, application no. 13, column 5 or 8 refers to a polypeptide having an amino acid sequence corresponding to the polypeptide of the invention, especially to a polypeptide as shown in Table II, application no. 13, columns 5 or 8 or homologs thereof, or used in the process of the invention, whereas a “non-inventive protein or polypeptide” or “other polypeptide” refers to a polypeptide having an amino acid sequence corresponding to a protein which is not substantially homologous to a polypeptide of the invention, preferably which is not substantially homologous to a polypeptide or protein as shown in the respective line in Table II, application no. 13, column 5 or 8 or homologs thereof, e.g., a protein which does not confer the activity described herein and which is derived from the same or a different organism.

[66117] [0403.1.7.13] to [0409.1.7.13] for the disclosure of these paragraphs see [0403.1.7.7] to [0409.1.7.7] above

[66118] As the nucleic acid molecules of the invention and/or the expression thereof is related to the synthesis of the respective fine chemical abscisic acid, cryptoxanthin, violaxanthin, or zeaxanthin its function as a probe extends to the detection of microorganisms, plant tissues, plants, plant variets, plant ecotypes or plant genera with varying, advantageously increased, capability or potential for synthesis of the respective fine chemical abscisic acid, cryptoxanthin, violaxanthin, or zeaxanthin. Therefore in one embodiment the present invention relates to a method for analyzing the capability or potential of a plant tissue, a plant, a plant variety or ecotype to produce the respective fine chemical abscisic acid, cryptoxanthin, violaxanthin, or zeaxanthin by using the respective antibody of the invention as a probe to detect the amount of the polypeptide encoded by said nucleic acid molecule of the invention in a non-human organism in comparison to another organism.

[66119] Therefore in one embodiment the invention relates to a method to probe a non-human organism for its capability for the production of the respective fine chemical comprising the steps of
[66120] a) analyzing the sequence and/or the expression of the respective nucleic acid molecule of the invention in least two non-human organisms which differ in the capability to produce the respective fine chemical;
[66121] b) associate the different sequence and/or expression level of the nucleic acid molecules of the invention with their different capability to produce the respective fine chemical;
[66122] c) analyze the sequence and/or the expression of the nucleic acid molecule of the invention in at least a third non-human organism;
[66123] d) predict the capability of the at least third organism to produce the respective fine chemical based by comparing the sequence and/or expression of the nucleic acid of the invention to the sequences and/or expression levels of the nucleic acid molecule of the invention of the at least two organisms analyzed in step a.

[66124] [0411.1.7.13] to [0430.1.7.13] for the disclosure of these paragraphs see [0411.1.7.7] to [0430.1.7.7] above

[66125] Accordingly the present invention relates to any cell transgenic for any nucleic acid characterized as part of the invention, e.g. conferring the increase of the respective fine chemical abscisic acid, cryptoxanthin, violaxanthin, or zeaxanthin in a cell or a non-human organism or a part thereof, e.g. the nucleic acid molecule of the invention, the nucleic acid construct of the invention, the vector of the invention, the expression cassette according to the invention, or a nucleic acid molecule encoding the polypeptide of the invention, e.g. encoding a polypeptide having an activity as the protein as shown in the respective line in Table II, application no. 13, column 3. Due to the above-mentioned activity the respective fine chemical abscisic acid, cryptoxanthin, violaxanthin, or zeaxanthin content in a cell or a non-human organism is increased. For example, due to modulation or manipulation, the cellular activity is increased, in a preferred embodiment in organelles such as plastids or mitochondria, e.g. due to an increased expression or specific activity or specific targeting of the subject matters of the invention in a cell or a non-human organism or a part thereof especially in organelles such as plastids or mitochondria, or in another embodiment in the cytosol. Transgenic for a polypeptide having a protein or a protein activity means herein that due to modulation or manipulation of the genome, the activity of protein as shown in the respective line in Table II, application no. 13, column 3 or a protein as shown in the respective line in Table II, application no. 13, column 3-like activity is increased in the cell or non-human organism or part thereof, especially in organelles such as plastids or mitochondria, or especially in the cytosol. Examples are described above in context with the process of the invention.

[66126] for the disclosure of this paragraph see [0432.1.7.7] above

[66127] A naturally occurring expression cassette—for example the naturally occurring combination of the promoter of the gene encoding a protein as shown in the respective line in Table II, application no. 13, column 5 or 8, preferably the coding region thereof, or fragments or homologs thereof with the corresponding encoding gene—becomes a transgenic expression cassette when it is modified by non-natural, synthetic “artificial” methods such as, for example, mutagenesis. Such methods have been described (U.S. Pat. No. 5,565,350; WO 00/15815; also see above).

[66128] [0434.1.7.13] for the disclosure of this paragraph see [0434.1.7.7] above

[66129] for the disclosure of this paragraph see [0435.1.7.7] above

[66130] Transgenic plants comprising the respective fine chemical(s) synthesized in the process according to the invention can be marketed directly without isolation of the fine chemical synthesized. In the process according to the invention, plants are understood as meaning all plant parts, plant organs such as leaf, stalk, root, tubers or seeds or propagation material or harvested material or the intact plant. In this context, the seed encompasses all parts of the seed such as the seed coats, epidermal cells, seed cells, endosperm or embryonic tissue. The fine chemical produced in the process according to the invention may, however, also be isolated from the plant. In case of abscisic acid, cryptoxanthin, violaxanthin, or zeaxanthin this can be in free form or bound to proteins. Fine chemical(s) produced by this process can be harvested by harvesting the non-human organisms either from the culture in which they grow or from the field. For example, this can be done via squeezing, grinding and/or extraction, salt precipitation and/or ion-exchange chromatography of the plant parts, preferably the plant seeds, plant fruits, plant tubers and the like.

[66131] [0437.1.7.13] to [0447.1.7.13] for the disclosure of these paragraphs see [0437.1.7.7] to [0447.1.7.7] above

[66132] The identity and purity of the compound(s) isolated can be determined by priorganism art techniques. They encompass high-performance liquid chromatography (HPLC), gas chromatography (GC), spectroscopic methods, mass spectrometry (MS), staining methods, thin-layer chromatography, NIRS, enzyme assays or microbiological assays. These analytical methods are compiled in: Patek et al. (1994) Appl. Environ. Microbiol. 60:133-140; Malakhova et al. (1996) Biotekhnologiya 11 27-32; and Schmidt et al. (1998) Bioprocess Engineer. 19:67-70. Ulmann's Encyclopedia of Industrial Chemistry (1996) Bd. A27, VCH Weinheim, pp. 89-90, pp. 521-540, pp. 540-547, pp. 559-566, 575-581 and pp. 581-587; Michal, G (1999) Biochemical Pathways: An Atlas of Biochemistry and Molecular Biology, John Wiley and Sons; Fallon, A. et al. (1987) Applications of HPLC in Biochemistry in: Laboratory Techniques in Biochemistry and Molecular Biology, vol. 17.

[66133] Xanthophylls, in particular beta-cryptoxanthin or zeaxanthin can for example be detected advantageously via HPLC, LC or GC separation methods. The unambiguous detection for the presence of xanthophylls, in particular beta-cryptoxanthin or zeaxanthin containing products can be obtained by analyzing recombinant organisms using analytical standard methods: LC, LC-MS, MS or TLC). The material to be analyzed can be disrupted by sonication, grinding in a glass mill, liquid nitrogen and grinding, cooking, or via other applicable methods

[66134] For HPLC, e.g. chromatograph on Spherisorb ODS-2 columns with a solvent system consisting of water, acetonitrile and and isopropanol and detection at 436 nm can be used (Li and Walton, Plant Physiol. (1990) 92, 551-559), specially for violaxanthin.

[66135] The xanthophylls, in particular the respective fine chemicals obtained in the process are suitable as starting material for the synthesis of further products of value. For example, they can be used in combination with each other or alone for the production of pharmaceuticals, health products, foodstuffs, animal feeds, nutrients or cosmetics. Accordingly, the present invention relates a method for the production of pharmaceuticals, health products, food stuff, animal feeds, nutrients or cosmetics comprising the steps of the process according to the invention, including the isolation of the carotenoids containing, in particular xanthophylls and/or abcisic acid containing composition produced or the respective fine chemical produced if desired and formulating the product with a pharmaceutical acceptable carrier or formulating the product in a form acceptable for an application in agriculture. A further embodiment according to the invention is the use of the carentoids or xanthophylls or abcisic acid produced in the process or of the transgenic organisms in animal feeds, foodstuffs, medicines, food supplements, cosmetics or pharmaceuticals or for the production of astaxanthin, e.g. in after isolation of the respective fine chemical or without, e.g. in situ, e.g in the organism used for the process for the production of the respective fine chemical.

[66136] [0450.1.7.13] to [0452.1.7.13] for the disclosure of these paragraphs see [0450.1.7.7] to [0452.1.7.7] above

[66137] Further in another embodiment, the present invention relates to the use of the nucleic acid molecule of the invention or used in the method of the invention alone or in combination with other genes of the respective fine chemical synthesis for example of the carotenoids, preferably xanthophylls or abcisic acid resp., in particular, of abscisic acid, cryptoxanthin, violaxanthin, and/or zeaxanthin biosynthesis, the polypeptide of the invention or used in the method of the invention, the nucleic acid construct of the invention, the expression cassette of the invention, the vector of the invention, the plant or plant tissue or the host cell of the invention, for the production of plant resistant to a herbicide inhibiting eventually the production of the fine chemical.

[66138] for the disclosure of this paragraph see [0454.1.7.7] above

[66139] In one embodiment, the present invention relates to a method for the identification of a gene product conferring the production of or an increase in the fine chemical production in a non-human cell, comprising the following steps:
[66140] (a) contacting, e.g. hybridizing, a, some or all nucleic acid molecules of a sample, e.g. cells, tissues, plants or microorganisms or a nucleic acid library, which can contain a candidate gene encoding a gene product conferring the production of or an increase in the fine chemical after expression, with the nucleic acid molecule of the present invention as shown in the respective line in column 5 or 8 of Table I A or B of application no. 13, preferably the coding region thereof, or a fragment or homolog thereof;
[66141] (b) identifying the nucleic acid molecules, which hybridize under relaxed stringent conditions with the nucleic acid molecule of the present invention in particular to the nucleic acid molecule sequence shown in the respective line in Table I, application no. 13, columns 5 or 8, preferably the coding region thereof, of a fragment or a homolog thereof, preferably in Table I B, application no. 13, columns 5 or 8, preferably the coding region thereof, of a fragment or a homolog thereof, and, optionally, isolating the full length cDNA clone or complete genomic clone;
[66142] (c) introducing the candidate nucleic acid molecules or a fragment thereof in host cells, preferably in a plant cell or a microorganism, appropriate for producing the fine chemical;
[66143] (d) expressing the identified nucleic acid molecules in the host cells for which the production of or the increased production of the fine chemical is desired;
[66144] (e) assaying the fine chemical level in the non-human host cells; and
[66145] (f) identifying the nucleic acid molecule and/or its gene product which expression confers the production of or an increase in the fine chemical level in the non-human host cell after expression compared to the wild type.

[66146] for the disclosure of this paragraph see [0456.1.7.7] above

[66147] In another embodiment, the present invention relates to a method for the identification of a gene product conferring the production of or an increase in the fine chemical production in a cell, comprising the following steps:
[66148] (a) identifying a nucleic acid molecule of a non-human organism, which is at least 20%, 25%, 30%, 35%, 40%, 50%, 60%, 70%, 80%, 90%, 95%, 96%, 97%, 98%, 99%, 99.5% or more homolog to the nucleic acid molecule encoding a polypeptide comprising the polypeptide molecule as shown in the respective line in column 5 or 8 of Table II, application no. 13, or comprising a consensus sequence or a polypeptide motif as shown in the respective line in column 8 of Table IV, application no. 13, or being encoded by a nucleic acid molecule comprising a polynucleotide as shown in the respective line in column 5 or 8 of Table I, application no. 13, preferably the coding region thereof, or a homologue thereof as described herein, for example via homology search in a data bank;
[66149] (b) introducing the candidate nucleic acid molecule in non-human host cells, preferably in a plant cell or a microorganism, appropriate for producing the fine chemical;
[66150] (c) expressing the identified nucleic acid molecule in the non-human host cells;
[66151] (d) assaying the fine chemical level in the non-human host cells; and
[66152] (e) identifying the nucleic acid molecule and its gene product which expression confers the production of or an increase in the fine chemical level in the non-human host cell after expression compared to the wild type.

[66153] for the disclosure of this paragraph see [0458.1.7.7] above

[66154] Further, the nucleic acid molecules disclosed herein, in particular the nucleic acid molecules shown in the respective line in column 5 or 8 of Table I A or B of application no. 13, may be sufficiently homologous to the sequences of related species such that these nucleic acid molecules may serve as markers for the construction of a genomic map in related organism or for association mapping. Furthermore natural variation in the genomic regions corresponding to nucleic acids disclosed herein, in particular the nucleic acid molecule shown in the respective line in column 5 or 8 of Table I A or B, of application no. 13 or homologous thereof, may lead to variation in the activity of the proteins disclosed herein, in particular the proteins comprising polypeptides as shown in the respective lines in column 5 or 8 of Table II A or B, of application no. 13 or their homologous, or comprising the consensus sequence or the polypeptide motif as shown in the respective line in column 8 of Table IV, and in consequence in a natural variation of an increased fine chemical production.

[66155] In consequence natural variation eventually also exists in form of more active allelic variants leading already to a relative increase in the fine chemical. Different variants of the nucleic acid molecules disclosed herein, in particular the nucleic acid molecules comprising the nucleic acid molecules as shown in the respective line in column 5 or 8 of Table I A or B of application no. 13, preferably the coding region thereof, which corresponds to different levels of increase in fine chemical, e.g. different levels of increase in fine chemical, can be indentified and used for marker assisted breeding for an enhanced production of the fine chemical.

[66156] Natural variation may also exist in the regulatory regions, e.g. the promoters of the natural genes comprising the nucleic acid molecules as shown in the respective line column 5 or 8 of Table I A or B of application no. 13, preferably the coding region thereof, which can similarly correspond to different levels of increase in the fine chemical, e.g. different levels of increase in the fine chemical can be identified and used for marker assisted breeding for an enhanced production of the fine chemical.

[66157] Accordingly, the present invention relates to a method for breeding plants for the production of the fine chemical, comprising
[66158] (a) selecting a first plant variety with an increased production of the fine chemical, e.g. based on an increased expression of a nucleic acid molecule of the invention as disclosed herein, in particular of a nucleic acid molecule comprising a nucleic acid molecule as shown in the respective line in column 5 or 8 of Table I A or B of application no. 13, preferably the coding region thereof, or fragments or homologs thereof, or a polypeptide comprising a polypeptide as shown in the respective line in column 5 or 8 of Table II A or B of application no. 13, or fragments or homologs thereof, or comprising a consensus sequence or a polypeptide motif as shown in the respective line in column 8 of Table IV, or a homolog thereof, as described herein;
[66159] (b) associating the level of increased production of the fine chemical, with the expression level or the genomic structure of a gene encoding said polypeptide or said nucleic acid molecule;
[66160] (c) crossing the first plant variety with a second plant variety, which significantly differs in its level of fine chemical; and
[66161] (d) identifying, which of the offspring varieties has got increased production of the fine chemical by the expression level of said polypeptide or nucleic acid molecule or the genomic structure of the gene(s) encoding said polypeptide or nucleic acid molecule of the invention.

[66162] [0462.1.7.13] to [0479.1.7.13] for the disclosure of these paragraphs see [0462.1.7.7] to [0479.1.7.7] above

[66163] In a further embodiment the nucleic acid molecule of the invention, the polypeptide of the invention, the nucleic acid construct of the invention, the expression cassette of the invention, the non-human organisms, the non-human host cell, the microorganisms, the plant, plant cell, or the part thereof, of the invention, the vector of the invention, the agonist identified with the method of the invention, the nucleic acid molecule identified with the method of the present invention, can be used for the production of the fine chemical or of the fine chemical and one or more other carotenoids, preferably zeaxanthin (E161h, used for food coloring) capsanthin (E160c, used for food coloring), astaxanthin (E 161j, used as food suplement for human diet and in fish breeding; used also in sun-protectives) or lutein (E 161b, used for food coloring).

[66164] Accordingly, the nucleic acid molecule of the invention, or the nucleic acid molecule identified with the method of the present invention or the complement sequences thereof, the polypeptide of the invention, the nucleic acid construct of the invention, the expression cassette of the invention, the non-human organism, the non-human host cell, the microorganism, the plant, plant cell, or the part thereof of the invention, the vector of the invention, the agonist identified with the method of the invention, the antibody of the present invention, can be used for the production of or the increase in the fine chemical in a non-human organism or part thereof, e.g. in a cell.

[66165] for the disclosure of this paragraph see [0481.1.7.7] above

[66166] for the disclosure of this paragraph see [0482.1.7.7] above

[66167] A special embodiment of this invention is related to genes which increase or generate the production of the fine chemical abscisic acid in plant cells, plants or part thereof. Phenotypes thereto are associated with yield of plants (=yield related phenotypes). In accorganism dance with the invention, therefore, the respective genes identified in Table I, wherein in column 7 abscisic acid are mentioned, especially the coding region thereof, or homologs or fragments thereof, may be employed to enhance any yield-related phenotype. Increased yield may be determined in field trials of transgenic plants and suitable control plants. Alternatively, a transgene's ability to increase yield may be determined in a model plant. An increased yield phenotype may be determined in the field test or in a model plant by measuring any one or any combination of the following phenotypes, in comparison to a control plant: yield of dry harvestable parts of the plant, yield of dry aerial harvestable parts of the plant, yield of underground dry harvestable parts of the plant, yield of fresh weight harvestable parts of the plant, yield of aerial fresh weight harvestable parts of the plant yield of underground fresh weight harvestable parts of the plant, yield of the plant's fruit (both fresh and dried), grain dry weight, yield of seeds (both fresh and dry), and the like.

[66168] The most basic yield-related phenotype is increased yield associated with the presence of the gene or a homolog or a fragment thereof as a transgene in the plant, i.e., the intrinsic yield of the plant. Intrinsic yield capacity of a plant can be, for example, manifested in a field test or in a model system by demonstrating an improvement of seed yield (e.g. in terms of increased seed/grain size, increased ear number, increased seed number per ear, improvement of seed filling, improvement of seed composition, embryo and/or endosperm improvements, and the like); modification and improvement of inherent growth and development mechanisms of a plant (such as plant height, plant growth rate, pod number, pod position on the plant, number of internodes, incidence of pod shatter, efficiency of nodulation and nitrogen fixation, efficiency of carbon assimilation, improvement of seedling vigour/early vigour, enhanced efficiency of germination (under non-stressed conditions), improvement in plant architecture.

[66169] Increased yield-related phenotypes may also be measured to determine tolerance to abiotic environmental stress. Abiotic stresses include drought, low temperature, salinity, osmotic stress, shade, high plant density, mechanical stresses, and oxidative stress, and yield-related phenotypes are encompassed by tolerance to such abiotic stresses. Additional phenotypes that can be monitored to determine enhanced tolerance to abiotic environmental stress include, without limitation, wilting; leaf browning; loss of turgor, which results in drooping of leaves or needles stems, and flowers; drooping and/or shedding of leaves or needles; the leaves are green but leaf angled slightly toward the ground compared with controls; leaf blades begun to fold (curl) inward; premature senescence of leaves or needles; loss of chlorophyll in leaves or needles and/or yellowing. Any of the yield-related phenotypes described above may be monitored in field tests or in model plants to demonstrate that a transgenic plant has increased tolerance to abiotic environmental stress. In accordance with the invention, the respective genes identified in Table 1, in case in column 7 abscisic acid is indicated, especially the coding region thereof, or homologs or fragments thereof, may be employed to enhance tolerance to abiotic environmental stress in a plant means that the plant, when confronted with abiotic environmental stress.

[66170] A polypeptide conferring an yield-increasing activity can be encoded by a respective nucleic acid sequence as shown in Table I, column 5 or 8, and/or comprises or consists of a respective polypeptide as depicted in Table II, column 5 and 8, and/or can be amplified with the respective primer set shown in Table III, column 8, in case in column 7 abscisic acid is indicated. “Improved adaptation” to environmental stress like e.g. freezing and/or chilling temperatures refers to an improved plant performance under environmental stress conditions.

[66171] A modification, i.e. an increase, can be caused by endogenous or exogenous factors. For example, an increase in activity in an organism or a part thereof can be caused by adding a gene product or a precursor or an activator or an agonist to the media or nutrition or can be caused by introducing said subjects into an organism, transient or stable. Furthermore such an increase can be reached by the introduction of the respective inventive nucleic acid sequence or the encoded protein in the correct cell compartment for example into the nucleus or cytoplasmic respectively or into plastids either by transformation and/or targeting.

[66172] The term “yield” as used herein generally refers to a measurable produce from a plant, particularly a crop. Yield and yield increase (in comparison to a non-transformed starting or wild-type plant) can be measured in a number of ways, and it is understood that a skilled person will be able to apply the correct meaning in view of the particular embodiments, the particular crop concerned and the specific purpose or application concerned. The terms “improved yield” or “increased yield” can be used interchangeable.

[66173] As used herein, the term “improved yield” or the term “increased yield” means any improvement in the yield of any measured plant product, such as grain, fruit or fiber. In accordance with the invention, changes in different phenotypic traits may improve yield. For example, and without limitation, parameters such as floral organ development, root initiation, root biomass, seed number, seed weight, harvest index, tolerance to abiotic environmental stress, leaf formation, phototropism, apical dominance, and fruit development, are suitable measurements of improved yield. Any increase in yield is an improved yield in accordance with the invention. For example, the improvement in yield can comprise a 0.1%, 0.5%, 1%, 3%, 5%, 10%, 15%, 20%, 30%, 40%, 50%, 60%, 70%, 80%, 90% or greater increase in any measured parameter. For example, an increase in the bushel/acre yield of soybeans or corn derived from a crop comprising plants which are transgenic for the nucleotides and polypeptides of Table I, in case in column 7 abscisic acid is mentioned, as compared with the bushel/acre yield from untreated soybeans or corn cultivated under the same conditions, is an improved yield in accordance with the invention. The increased or improved yield can be achieved in the absence or presence of stress conditions.

[66174] For example, enhanced or increased “yield” refers to one or more yield parameters selected from the group consisting of biomass yield, dry biomass yield, aerial dry biomass yield, underground dry biomass yield, fresh-weight biomass yield, aerial fresh-weight biomass yield, underground fresh-weight biomass yield; enhanced yield of harvestable parts, either dry or freshweight or both, either aerial or underground or both; enhanced yield of crop fruit, either dry or fresh-weight or both, either aerial or underground or both; and preferably enhanced yield of seeds, either dry or fresh-weight or both, either aerial or underground or both.

[66175] Crop yield is defined herein as the number of bushels of relevant agricultural product (such as grain, forage, or seed) harvested per acre. Crop yield is impacted by abiotic stresses, such as drought, heat, salinity, and cold stress, and by the size (biomass) of the plant. Traditional plant breeding strategies are relatively slow and have in general not been successful in conferring increased tolerance to abiotic stresses. Grain yield improvements by conventional breeding have nearly reached a plateau in maize.

[66176] Accordingly, the yield of a plant can depend on the specific plant/crop of interest as well as its intended application (such as food production, feed production, processed food production, biofuel, biogas or alcohol production, or the like) of interest in each particular case. Thus, in one embodiment, yield is calculated as harvest index (expressed as a ratio of the weight of the respective harvestable parts divided by the total biomass), harvestable parts weight per area (acre, square meter, or the like); and the like. The harvest index, i.e., the ratio of yield biomass to the total cumulative biomass at harvest, in maize has remained essentially unchanged during selective breeding for grain yield over the last hundred years. Accordingly, recent yield improvements that have occurred in maize are the result of the increased total biomass production per unit land area. This increased total biomass has been achieved by increasing planting density, which has led to adaptive phenotypic alterations, such as a reduction in leaf angle, which may reduce shading of lower leaves, and tassel size, which may increase harvest index. Harvest index is relatively stable under many environmental conditions, and so a robust correlation between plant size and grain yield is possible. Plant size and grain yield are intrinsically linked, because the majority of grain biomass is dependent on current or stored photosynthetic productivity by the leaves and stem of the plant. As with abiotic stress tolerance, measurements of plant size in early development, under standardized conditions in a growth chamber or greenhouse, are standard practices to measure potential yield advantages conferred by the presence of a transgene.

[66177] Acccordingly, the yield of a plant can be increased by improving one or more of the yield-related phenotypes.

[66178] Such yield-related phenotypes or traits of a plant the improvement of which results in increased yield comprise, without limitation, the increase of the intrinsic yield capacity of a plant, improved nutrient use efficiency, and/or increased stress tolerance.

[66179] For example, yield refers to biomass yield, e.g. to dry weight biomass yield and/or fresh-weight biomass yield. Biomass yield refers to the aerial or underground parts of a plant, depending on the specific circumstances (test conditions, specific crop of interest, application of interest, and the like). In one embodiment, biomass yield refers to the aerial and underground parts. Biomass yield may be calculated as fresh-weight, dry weight or a moisture adjusted basis. Biomass yield may be calculated on a per plant basis or in relation to a specific area (e.g. biomass yield per acre/ square meter/ or the like).

[66180] In other embodiment, “yield” refers to seed yield which can be measured by one or more of the following parameters: number of seeds or number of filled seeds (per plant or per area (acre/square meter/ or the like)); seed filling rate (ratio between number of filled seeds and total number of seeds); number of flowers per plant; seed biomass or total seeds weight (per plant or per area (acre/square meter/ or the like); thousand kernel weight (TKW; extrapolated from the number of filled seeds counted and their total weight; an increase in TKW may be caused by an increased seed size, an increased seed weight, an increased embryo size, and/or an increased endosperm). Other parameters allowing to measure seed yield are also known in the art. Seed yield may be determined on a dry weight or on a fresh weight basis, or typically on a moisture adjusted basis, e.g. at 15.5 percent moisture.

[66181] For example, the term “increased yield” means that the plant, exhibits an increased growth rate, under conditions of abiotic environmental stress, compared to the corresponding wild-type plant.

[66182] An increased growth rate may be reflected inter alia by or confers an increased biomass production of the whole plant, or an increased biomass production of the aerial parts of a plant, or by an increased biomass production of the underground parts of a plant, or by an increased biomass production of parts of a plant, like stems, leaves, blossoms, fruits, and/or seeds.

[66183] Increased yield includes higher fruit yields, higher seed yields, higher fresh matter production, and/or higher dry matter production.

[66184] The term “increased yield” means that the plant, exhibits a prolonged growth under conditions of abiotic environmental stress, as compared to the corresponding, e.g. non-transformed, wild type organism. A prolonged growth comprises survival and/or continued growth of the plant, at the moment when the non-transformed wild type organism shows visual symptoms of deficiency and/or death.

[66185] When the plant of the invention is a corn plant increased yield for corn plants means, for example, increased seed yield, in particular for corn varieties used for feed or food. Increased seed yield of corn refers to an increased kernel size or weight, an increased kernel per ear, or increased ears per plant. Alternatively or in addition the cob yield may be increased, or the length or size of the cob is increased, or the kernel per cob ratio is improved.

[66186] When the plant of the invention is a soy plant, increased yield for soy plants means increased seed yield, in particular for soy varieties used for feed or food. Increased seed yield of soy refers for example to an increased kernel size or weight, an increased kernel per pod, or increased pods per plant.

[66187] When the plant of the invention is an oil seed rape (OSR) plant, increased yield for OSR plants means increased seed yield, in particular for OSR varieties used for feed or food. Increased seed yield of OSR refers to an increased seed size or weight, an increased seed number per silique, or increased siliques per plant.

[66188] When the plant of the invention is a cotton plant,increased yield for cotton plants means increased lint yield. Increased lint yield of cotton refers in one embodiment to an increased length of lint.

[66189] When the plant of the invention is a wheat plant increased yield for wheat plants means, for example, increased seed yield, in particular for wheat varieties used for feed or food. Increased seed yield of wheat refers to an increased kernel size or weight, an increased kernel per ear, or increased ears per plant. Increased seed yield of wheat refers to an increased grain size or weight, an increased number of grains per spike, or an increased number of spikes per plant. Additionally or as an alternative increased seed yield of wheat refers to an increased 1000 grain weight, an increased length of spikes, or an increased number of spikelets per spikes, or an increased number of spikes per square meter, or or an increased flag leaf area (flag leaf is the leaf directly below the spike).

[66190] Said increased yield can typically be achieved by enhancing or improving, one or more yieldrelated traits of the plant. Such yield-related traits of a plant comprise, without limitation, the increase of the intrinsic yield capacity of a plant, improved nutrient use efficiency, and/or increased stress tolerance, in particular increased abiotic stress tolerance.

[66191] Intrinsic yield capacity of a plant can be, for example, manifested by improving the specific (intrinsic) seed yield (e.g. in terms of increased seed/ grain size, increased ear number, increased seed number per ear, improvement of seed filling, improvement of seed composition, embryo and/or endosperm improvements, or the like); modification and improvement of inherent growth and development mechanisms of a plant (such as plant height, plant growth rate, pod number, pod position on the plant, number of internodes, incidence of pod shatter, efficiency of nodulation and nitrogen fixation, efficiency of carbon assimilation, improvement of seedling vigour/early vigour, enhanced efficiency of germination (under stressed or non-stressed conditions), improvement in plant architecture, cell cycle modifications, photosynthesis modifications, various signaling pathway modifications, modification of transcriptional regulation, modification of translational regulation, modification of enzyme activities, and the like); and/or the like.

[66192] The improvement or increase of stress tolerance of a plant can for example be manifested by improving or increasing a plant's tolerance against stress, particularly abiotic stress. In the present application, abiotic stress refers generally to abiotic environmental conditions a plant is typically confronted with, including, but not limited to, drought (tolerance to drought may be achieved as a result of improved water use efficiency), heat, low temperatures and cold conditions (such as freezing and chilling conditions), salinity, osmotic stress , shade, high plant density, mechanical stress, oxidative stress, and the like.

[66193] The increased plant yield can also be mediated by increasing the “nutrient use efficiency of a plant”, e.g. by improving the use efficiency of nutrients including, but not limited to, phosphorus, potassium, and nitrogen. Further, higher yields may be obtained with current or standard levels of nitrogen use.

[66194] Generally, the term “increased tolerance to stress” can be defined as survival of plants, and/or higher yield production, under stress conditions as compared to a non-transformed wild type or starting plant: For example, the plant of the invention or produced according to the method of the invention is better adapted to the stress conditions. “Improved adaptation” to environmental stress like e.g. drought, heat, nutrient depletion, freezing and/or chilling temperatures refers herein to an improved plant performance resulting in an increased yield, particularly with regard to one or more of the yield related traits as defined in more detail above.

[66195] During its life-cycle, a plant is generally confronted with a diversity of environmental conditions. Any such conditions, which may, under certain circumstances, have an impact on plant yield, are herein referred to as “stress” condition. Environmental stresses may generally be divided into biotic and abiotic (environmental) stresses. Unfavorable nutrient conditions are sometimes also referred to as “environmental stress”. The present invention does also contemplate solutions for this kind of environmental stress, e.g. referring to increased nutrient use efficiency.

[66196] For the purposes of the description of the present invention, the terms “enhanced tolerance to abiotic stress”, “enhanced resistance to abiotic environmental stress”, “enhanced tolerance to environmental stress”, “improved adaptation to environmental stress” and other variations and expressions similar in its meaning are used interchangeably and refer, without limitation, to an improvement in tolerance to one or more abiotic environmental stress(es) as described herein and as compared to a corresponding origin or wild type plant or a part thereof. The term abiotic stress tolerance(s) refers for example low temperature tolerance, drought tolerance or improved water use efficiency (WUE), heat tolerance, salt stress tolerance and others. Studies of a plant's response to desiccation, osmotic shock, and temperature extremes are also employed to determine the plant's tolerance or resistance to abiotic stresses. Water use efficiency (WUE) is a parameter often correlated with drought tolerance. In selecting traits for improving crops, a decrease in water use, without a change in growth would have particular merit in an irrigated agricultural system where the water input costs were high. An increase in growth without a corresponding jump in water use would have applicability to all agricultural systems. In many agricultural systems where water supply is not limiting, an increase in growth, even if it came at the expense of an increase in water use also increases yield.

[66197] Drought stress means any environmental stress which leads to a lack of water in plants or reduction of water supply to plants, including a secondary stress by low temperature and/or salt, and/or a primary stress during drought or heat, e.g. desiccation etc.

[66198] Accordingly, this invention provides respective measures and methods to produce plants with increased yield, e.g. genes conferring an increased yield-related trait, for example enhanced tolerance to abiotic environmental stress, for example an increased drought tolerance and/or low temperature tolerance, intrinsic yield and/or another increased yield-related trait, upon expression or over-expression. Accordingly, the present invention provides such genes in case in column 7 of the respective Table or abscisic acid is indicated. In particular, such genes are described in column 5 as well as in column 8 of Tables I, especially the coding region thereof, or homologs or fragments thereof, in case abscisic acid are indicated in column 7 or the respective polypeptides are described in column 5 as well as in column 8 of Table II, or homologs or fragments thereof, in case abscisic acid are indicated in column 7.

[66199] Accordingly, the present invention provides respective transgenic plants showing one or more improved yield-related traits as compared to the corresponding origin or the wild type plant and methods for producing such transgenic plants with increased yield in case in column 7 of the respective Table “abscisic acid” is indicated.

[66200] In one embodiment, one or more of said yield-increasing activities are increased by increasing the amount and/or the specific activity of one or more proteins listed in Table II, column 5 or 8 in a compartment of a cell indicated in Table II, column 6, in case in column 7 of the respective Table “abscisic acid” is indicated.

[66201] Accordingly to present invention, the yield of the plant of the invention is increased by improving one or more of the yield-related traits as defined herein. Said increased yield in accordance with the present invention can typically be achieved by enhancing or improving, in comparison to an origin or wild-type plant, one or more yield-related traits of said plant. Such yield-related traits of a plant the improvement of which results in increased yield comprise, without limitation, the increase of the intrinsic yield capacity of a plant, improved nutrient use efficiency, and/or increased stress tolerance, preferably an increased drought tolerance.

[66202] In one embodiment, the present invention provides respective transgenic plants showing one or more improved yield-related traits, preferably increased drought tolerance as compared to the corresponding origin or the wild type plant and methods for producing such transgenic plants with increased yield in case in column 7 of the respective Table “abscisic acid” is indicated.

[66203] In a further embodiment the present invention is characterized by the features as disclosed in the following items:

[66204] Item 1. A process for the production of a fine chemical selected from the group consisting of: abscisic acid, cryptoxanthin, violaxanthin and/or zeaxanthin
[66205] (a) increasing or generating one or more activities selected from the group consisting of acetyl CoA carboxylase, acetyltransferase, acyl transferase, alcohol dehydrogenase, AX653549-protein, b1003-protein, b2032-protein, b2099-protein, b2121-protein, b2474-protein, b3346-protein, b3817-protein, coproporphyrinogen oxidase, F-box protein, flavodoxin, gluconate transport system permease 3, glutaredoxin, glycerol-3-phosphate dehydrogenase, Glycine cleavage system T aminomethyltransferase, halotolerance protein, heat shock transcription factor, isopropylmalate isomerase large subunit, ketol-acid reductoisomerase, lipoprotein precursor, MADS-box transcription factor, melibiose carrier protein, monothiol glutaredoxin, monthiol glutaredoxin, N-acetylglucosaminylphosphatidylinositoldeacetylase, nitrate/nitrite transport protein, protein kinase, protein phosphatase, purine-nucleoside phosphorylase, ribosephosphate isomerase, constitutive, serine/threonine-protein phosphatase, sterol O-acyltransferase, superoxide dismutase, thioredoxin, transcription factor, transcriptional regulator, YCL026C-A-protein, YER184C-protein, ygl096w-protein, ymr324c-protein and YOR044W-protein, in a non-human organism or a part thereof, preferably a microorganism, a plant cell, a plant or a part thereof, as compared to a corresponding non-transformed wild type non-human organism or a part thereof; and
[66206] (b) growing the non-human organism or a part thereof under conditions which permit the production of abscisic acid, cryptoxanthin, violaxanthin and/or zeaxanthin or a composition comprising abscisic acid, cryptoxanthin, violaxanthin, and/or zeaxanthin in said non-human organism or in the culture medium surrounding said non-human organism.

[66207] Item 2. A process for the production of a fine chemical selected from the group consisting of: abscisic acid, cryptoxanthin, violaxanthin and/or zeaxanthin, which comprises
[66208] (A)
   [66209] (i) increasing or generating of the expression of; and/or
   [66210] (ii) increasing or generating the expression of an expression product of; and/or
   [66211] (iii) increasing or generating one or more activities of an expression product encoded by;
      at least one respective nucleic acid molecule comprising a nucleic acid molecule selected from the group consisting of:
   [66212] (a) a nucleic acid molecule encoding the polypeptide shown in column 5 or 8 of Table II, preferably Table II B, application no.13, or a homolog or a fragment thereof;
   [66213] (b) a nucleic acid molecule shown in column 5 or 8 of Table I, preferably Table I B, application no.13, or a homolog or a fragment thereof (preferably the coding region thereof);
   [66214] (c) a nucleic acid molecule, which, as a result of the degeneracy of the genetic code, can be derived from a polypeptide sequence depicted in column 5 or 8 of Table II, preferably Table II B, application no.13;
   [66215] (d) a nucleic acid molecule having at least 30%, in particular at least 50%, 60%, 70%, 80%, 85%, 90%, 95%, 97%, 98%, 99% or 99.5% identity with the nucleic acid molecule sequence of a polynucleotide comprising the nucleic acid molecule shown in column 5 or 8 of Table I, preferably Table I B, application no. 13, or the coding region thereof;
   [66216] (e) a nucleic acid molecule encoding a polypeptide having at least 30%, in particular 50%, 60%, 70%, 80%, 85%, 90%, 95%, 97%, 98%, 99% or 99.5% identity with the amino acid sequence of the polypeptide encoded by the nucleic acid molecule of (a), (b), (c) or (d);
   [66217] (f) a nucleic acid molecule which hybridizes with a nucleic acid molecule of (a), (b), (c), (d) or (e) under stringent hybridization conditions;
   [66218] (g) a nucleic acid molecule encoding a polypeptide which can be isolated with the aid of monoclonal or polyclonal antibodies made against a polypeptide encoded by one of the nucleic acid molecules of (a), (b), (c), (d), (e) or (f);
   [66219] (h) a nucleic acid molecule encoding a polypeptide comprising the consensus sequence or one or more polypeptide motifs as shown in column 8 of Table IV, application no.13;
   [66220] (i) a nucleic acid molecule encoding a polypeptide having the activity represented by a respective protein as depicted in column 5 of Table II, application no. 13;
   [66221] (j) a nucleic acid molecule which comprises a polynucleotide, which is obtained by amplifying a cDNA library or a genomic library using the primers as depicted in column 8 of Table III, application no. 13; and
   [66222] (k) a nucleic acid molecule which is obtainable by screening a suitable nucleic acid library, especially a cDNA library and/or a genomic library, under stringent hybridization conditions with a probe comprising a complementary sequence of a nucleic acid molecule of (a), (b), (c), (d), (e), (f), (g), (h), (i) or (j) or with a fragment thereof, having at least 15 nt, preferably 20 nt, 30 nt, 50 nt, 100 nt, 200 nt, 500 nt, 1000 nt, 1500 nt, 2000 nt or 3000 nt of a nucleic acid molecule complementary to a nucleic acid molecule sequence characterized in (a), (b), (c), (d), (e), (f), (g), (h), (i) or (j);
   [66223] or a nucleic acid molecule comprising a sequence which is complementary thereto;
   [66224] in a non-human organism or a part thereof, preferably a microorganism, a plant cell, a plant or a part thereof, as compared to a corresponding non-transformed wild type non-human organism or a part thereof; and
[66225] (B) growing the non-human organism or a part thereof under conditions which permit the production of abscisic acid, cryptoxanthin, violaxanthin and/or zeaxanthin or a composition comprising abscisic acid, cryptoxanthin, violaxanthin and/or zeaxanthin in said non-human organism or in the culture medium surrounding said non-human organism.

[66226] Item 3. A process of items 1 or 2, comprising of recovering abscisic acid, cryptoxanthin, violaxanthin and/or zeaxanthin in its free or bound form.

[66227] Item 4. The process of any one of items 1 to 3, comprising the folowing steps:
[66228] (a) selecting a non-human organism or a part thereof expressing a polypeptide encoded by the nucleic acid molecule characterized in item 2;
[66229] (b) mutagenizing the selected non-human organism or the part thereof;
[66230] (c) comparing the activity or the expression level of said polypeptide in the mutagenized non-human organism or the part thereof with the activity or the expression of said polypeptide of the selected non-human organisms or the part thereof;
[66231] (d) selecting the mutated non-human organisms or parts thereof, which comprise an increased activity or expression level of said polypeptide compared to the selected non-human organism or the part thereof;
[66232] (e) optionally, growing and cultivating the non-human organisms or the parts thereof;
[66233] and
[66234] (f) recovering, and optionally isolating, the free or bound abscisic acid, cryptoxanthin, violaxanthin and/or zeaxanthin produced by the selected mutated non-human organisms or parts thereof.

[66235] Item 5. The process of any one of items 1 to 4 wherein the activity of said protein or the expression of said nucleic acid molecule is increased or generated transiently or stably.

[66236] Item 6. An isolated nucleic acid molecule comprising a nucleic acid molecule selected from the group consisting of:
[66237] (a) a nucleic acid molecule encoding a polypeptide shown in Table II, application no. 13, column 5 or 8, preferably shown in Table II B, application no. 13, column 8, or a homolog or a fragment thereof;
[66238] (b) a nucleic acid molecule shown in Table I, application no. 13, column 5 or 8, preferably shown in Table I B, application no. 13, column 8, preferably the coding region thereof, or a homolog or a fragment thereof;
[66239] (c) a nucleic acid molecule, which, as a result of the degeneracy of the genetic code, can be derived from a polypeptide sequence depicted in column 5 or 8 of Table II, application no. 13, preferably in column 8 of Table II B, application no. 13;
[66240] (d) a nucleic acid molecule having at least 30% identity, preferably at least 40%, 50%, 60%, 70%, 75%, 80%, 85%, 90%, 95%, 96%, 97%, 98%, 99%, 99.5%, with the nucleic acid molecule sequence of a polynucleotide comprising the nucleic acid molecule shown in column 5 or 8 of Table I, application no. 13, preferably shown in column 8 of Table I B, application no. 13, preferably the coding region thereof;
[66241] (e) a nucleic acid molecule encoding a polypeptide having at least 30% identity, preferably at least 40%, 50% 60%, 70%, 75%, 80%, 85%, 90%, 95%, 96%, 97%, 98%, 99%, 99.5%, identity with the amino acid sequence of the polypeptide encoded by the nucleic acid molecule of (a), (b), (c) or (d);
[66242] (f) a nucleic acid molecule which hybridizes with a nucleic acid molecule of (a), (b), (c), (d) or (e) under stringent hybridisation conditions;
[66243] (g) a nucleic acid molecule encoding a polypeptide which can be isolated with the aid of monoclonal or polyclonal antibodies made against a polypeptide encoded by one of the nucleic acid molecules of (a), (b), (c), (d), (e) or (f);
[66244] (h) a nucleic acid molecule encoding a polypeptide comprising the consensus sequence or one or more polypeptide motifs as shown in column 8 of Table IV, application no. 13;
[66245] (i) a nucleic acid molecule encoding a polypeptide having the activity represented by a respective protein as depicted in column 5 of Table II, application no. 13;
[66246] (j) a nucleic acid molecule comprising a polynucleotide which is obtained by amplifying a cDNA library or a genomic library using the primers in Table III, application no. 13, column 8;
[66247] and
[66248] (k) nucleic acid molecule which is obtainable by screening a suitable nucleic acid library, especially a cDNA library and/or a genomic library, under stringent hybridization conditions with a probe comprising one of the sequences of the nucleic acid molecule of (a), (b), (c), (d), (e), (f), (g), (h), (i) or (j) or with a fragment of at least 15 nt, preferably 20 nt, 30 nt, 50 nt, 100 nt, 200 nt,500 nt, 1000 nt, 1500 nt, 2000 nt or 3000 nt of the nucleic acid molecule characterized in (a), (b), (c), (d), (e), (f), (g), (h), (i) or (i) ,
[66249] or a nucleic acid molecule comprising a sequence which is complementary thereto.

[66250] Item 7. A nucleic acid construct which confers the expression of the nucleic acid molecule as defined in item 6, comprising one or more regulatory elements.

[66251] Item 8. An expression cassette comprising
[66252] (a) a promoter, preferably selected from the group consisting of Big35S, PCUbi, Super and USP;
[66253] (b) a nucleic acid molecule as defined in item 6.

[66254] Item 9. A vector comprising the nucleic acid molecule as defined in item 6 or the nucleic acid construct as claimed in item 7 or the expression cassette as claimed in item 8.

[66255] Item 10. A host cell or a plant organelle, which has been transformed with the vector as claimed in item 9 or the nucleic acid molecule as defined in item 6 or the nucleic acid construct as claimed in item 7 or the expression cassette as claimed in item 8.

[66256] Item 11. The host cell of item 10, which is a plant cell or a microorganism.

[66257] Item 12. A process for producing a polypeptide, wherein the polypeptide is expressed in a host cell as claimed in item 10 or 11.

[66258] Item 13. A polypeptide produced by the process as claimed in item 12 or encoded by the nucleic acid molecule as defined in item 6.

[66259] Item 14. An antibody, which binds specifically to the polypeptide as claimed in item 13.

[66260] Item 15. A plant tissue, propagation material, harvested material or a plant comprising the host cell as claimed in item 10 or 11.

[66261] Item 16. A process for the identification of a compound conferring an increase in abscisic acid, cryptoxanthin, violaxanthin and/or zeaxanthin production in a non-human organism, comprising the steps:
[66262] (a) culturing a plant cell or tissue or microorganism or maintaining a plant expressing the polypeptide encoded by the nucleic acid molecule as defined in item 6 conferring an increase in the amount of abscisic acid, cryptoxanthin, violaxanthin and/or zeaxanthin in a non-human organism or a part thereof and a readout system capable of interacting with the polypeptide under suitable conditions which permit the interaction of the polypeptide with said readout system in the presence of a compound or a sample comprising a plurality of compounds and capable of providing a detectable signal in response to the binding of a compound to said polypeptide under conditions which permit the expression of said readout system and of the polypeptide encoded by the nucleic acid molecule of item 6 conferring an increase in the amount of abscisic acid, cryptoxanthin, violaxanthin and/or zeaxanthinin a non-human organism or a part thereof;
[66263] (b) identifying if the compound is an effective agonist by detecting the presence or absence or increase of a signal produced by said readout system.

[66264] Item 17. A method for the production of an agricultural composition comprising the steps of the method of item 16 and formulating the compound identified in item 16 in a form acceptable for an application in agriculture.

[66265] Item 18. A composition comprising the nucleic acid molecule as defined in item 6, the polypeptide as claimed in item 13, the nucleic acid construct as claimed in item 7, the expression cassette as claimed in item 8, the vector as claimed in item 9, the compound as claimed in item 16, the antibody as claimed in item 14, and optionally an agricultural acceptable carrier.

[66266] Item 19. Use of the nucleic acid molecule as defined in item 6 for the identification of a nucleic acid molecule conferring an increase in abscisic acid, cryptoxanthin, violaxanthin and/or zeaxanthin after expression.

[66267] Item 20. Cosmetic, pharmaceutical, food or feed composition comprising the nucleic acid moleculeas defined in item 6, the polypeptide as claimed in item 13, the nucleic acid construct as claimed in item 7, the expression cassette as claimed in item 8, the vector as claimed in item 9, the antibody as claimed in item 14 , the plant or plant tissue as claimed in item 15, the harvested material as claimed in item 15 or the host cell of item as claimed in items 10 or 11.

[66268] Item 21. Use of the nuclei acid molecule as defined in item 6, the polypeptide as claimed in item 13, the nucleic acid construct as claimed in item 7, the expression cassette as claimed in item 8, the vector as claimed in item 9, the plant or plant tissue as claimed in item 15, or the host cell of item 10 to 11 for the production of plant resistant to a herbicide inhibiting the production of abscisic acid, cryptoxanthin, violaxanthin and/or zeaxanthin.

[66269] Item 22. A method for producing a plant with increased yield as compared to a corresponding non-transformed wild type plant, whereby the method comprises
[66270] (i) increasing or generating of the expression of; and/or
[66271] (ii) increasing or generating the expression of an expression product of; and/or
[66272] (iii) increasing or generating one or more activities of an expression product encoded by;
   at least one respective nucleic acid molecule comprising a nucleic acid molecule selected from the group consisting of:
[66273] (a) a nucleic acid molecule encoding the polypeptide shown in column 5 or 8 of Table II, preferably Table II B, application no. 13, or a homolog or a fragment thereof, in case in column 7 abscisic acid is indicated;
[66274] (b) a nucleic acid molecule shown in column 5 or 8 of Table I, preferably Table I B, application no. 13, or a homolog or a fragment thereof (preferably the coding region thereof) , in case in column 7 abscisic acid is indicated;
[66275] (c) a nucleic acid molecule, which, as a result of the degeneracy of the genetic code, can be derived from a polypeptide sequence depicted in column 5 or 8 of Table II, preferably Table II B, application no. 13, in case in column 7 abscisic acid is indicated;
[66276] (d) a nucleic acid molecule having at least 30%, in particular at least 50%, 60%, 70%, 80%, 85%, 90%, 95%, 97%, 98%, 99% or 99.5% identity with the nucleic acid molecule sequence of a polynucleotide comprising the nucleic acid molecule shown in column 5 or 8 of Table I, preferably Table I B, application no. 13, or the coding region thereof, in case in column 7 abscisic acid is indicated;
[66277] (e) a nucleic acid molecule encoding a polypeptide having at least 30%, in particular 50%, 60%, 70%, 80%, 85%, 90%, 95%, 97%, 98%, 99% or 99.5% identity with the amino acid sequence of the polypeptide encoded by the nucleic acid molecule of (a), (b), (c) or (d);
[66278] (f) a nucleic acid molecule which hybridizes with a nucleic acid molecule of (a), (b), (c), (d) or (e) under stringent hybridization conditions;
[66279] (g) a nucleic acid molecule encoding a polypeptide which can be isolated with the aid of monoclonal or polyclonal antibodies made against a polypeptide encoded by one of the nucleic acid molecules of (a), (b), (c), (d), (e) or (f);
[66280] (h) a nucleic acid molecule encoding a polypeptide comprising the consensus sequence or one or more polypeptide motifs as shown in column 8 of Table IV, application no. 13, in case in column 7 abscisic acid is indicated;
[66281] (i) a nucleic acid molecule encoding a polypeptide having the activity represented by a respective protein as depicted in column 5 of Table II, application no. 13, in case in column 7 abscisic acid is indicated;
[66282] (j) a nucleic acid molecule which comprises a polynucleotide, which is obtained by amplifying a cDNA library or a genomic library using the primers as depicted in column 8 of Table III, application no. 13, in case in column 7 abscisic acid is indicated; and
[66283] (k) a nucleic acid molecule which is obtainable by screening a suitable nucleic acid library, especially a cDNA library and/or a genomic library, under stringent hybridization conditions with a probe comprising a complementary sequence of a nucleic acid molecule of (a), (b), (c), (d), (e), (f), (g), (h), (i) or (j) or with a fragment thereof, having at least 15 nt, preferably 20 nt, 30 nt, 50 nt, 100 nt, 200 nt, 500 nt, 1000 nt, 1500 nt, 2000 nt or 3000 nt of a nucleic acid molecule complementary to a nucleic acid molecule sequence characterized in (a), (b), (c), (d), (e), (f), (g), (h), (i) or (j);
[66284] or a nucleic acid molecule comprising a sequence which is complementary thereto;
   in a plant cell, plant or a part thereof.

[66285] Item 23. A method for producing a plant with increased yield according to item 22, which comprises in addition the regeneration of a plant from such transformed plant cell, plant cell compartment, plant cell nucleus, plant cell or plant tissue with increased yield.

[66286] [0483.1.7.13] to [0492.1.7.13] for the disclosure of these paragraphs see [0483.1.7.7] to [0492.1.7.7] above

### Example 10

### Purification of the Xanthophylls and/or Abcisic Acid and Determination of the Carotenoids Content

### Abbreviations:

[66287] GC-MS, gas liquid chromatography/mass spectrometry; TLC, thin-layer chromatography. The unambiguous detection for the presence of xanthophylls can be obtained by analyzing recombinant organisms using analytical standard methods: LC, LC-MSMS or TLC, as described

[66288] The total xanthophylls produced in the organism for example in algae used in the inventive process can be analysed for example according to the following procedure:

[66289] The material such as algae or plants to be analyzed can be disrupted by sonication, grinding in a glass mill, liquid nitrogen and grinding or via other applicable methods.

[66290] Plant material is initially homogenized mechanically by comminuting in a pestle and mortar to make it more amenable to extraction. [0494.1.7.13] for the disclosure of this paragraph see [0494.1.7.7] above

### Example 11a

### PCR Amplification of the Sequences

[66291] Unless otherwise specified, standard methods as described in Sambrook et al., Molecular Cloning: A laboratory manual, Cold Spring Harbor 1989, Cold Spring Harbor Laboratory Press are used.

[66292] The inventive sequences as shown in the respective line in Table I, column 5, preferably the coding region thereof, were amplified by PCR as described in the protocol of the Pfu Ultra, Pfu Turbo or Herculase DNA polymerase (Stratagene). The composition for the protocol of the Pfu Ultra, Pfu Turbo or Herculase DNA polymerase was as follows: 1×PCR buffer (Stratagene), 0.2 mM of each dNTP, 100 ng genomic DNA of Saccharomyces cerevisiae (strain S288C; Research Genetics, Inc., now Invitrogen), Escherichia coli (strain MG1655; E. coli Genetic Stock Center), Synechocystis sp. (strain PCC6803), Azotobacter vinelandii (strain N.R. Smith,16), Thermus thermophilus (HB8) or 50 ng cDNA from various tissues and development stages of Arabidopsis thaliana (ecotype Columbia), Physcomitrella patens, Glycine max (variety Resnick), Brassica napus, Oryza sativa or Zea mays (variety B73, Mo17, A188), 50 pmol forward primer, 50 pmol reverse primer, with or without 1 M Betaine, 2.5 u Pfu Ultra, Pfu Turbo or Herculase DNA polymerase.

[66293] The amplification cycles were as follows:

[66294] 1 cycle of 2-3 minutes at 94-95° C., then 25-36 cycles with 30-60 seconds at 94-95° C., 30-45 seconds at 50-60° C. and 210-480 seconds at 72° C., followed by 1 cycle of 5-10 minutes at 72° C., then 4-16° C.—preferably for Saccharomyces cerevisiae, Escherichia coli, Synechocystis sp., Azotobacter vinelandii, Thermus thermophilus.

[66295] In case of Arabidopsis thaliana, Brassica napus, Glycine max, Oryza sativa, Physcomitrella patens, Zea mays the amplification cycles were as follows:

[66296] 1 cycle with 30 seconds at 94° C., 30 seconds at 61° C., 15 minutes at 72° C., then 2 cycles with 30 seconds at 94° C., 30 seconds at 60° C., 15 minutes at 72° C., then 3 cycles with 30 seconds at 94° C., 30 seconds at 59° C., 15 minutes at 72° C., then 4 cycles with 30 seconds at 94° C., 30 seconds at 58° C., 15 minutes at 72° C., then 25 cycles with 30 seconds at 94° C., 30 seconds at 57° C., 15 minutes at 72° C., then 1 cycle with 10 minutes at 72° C., then finally 4-16° C.

[66297] RNAs were generated with the RNeasy Plant Kit according to the standard protocol (Qiagen) and Superscript II Reverse Transkriptase was used to produce double stranded cDNA according to the standard protocol (Invitrogen).

[66298] ORF specific primer pairs for the genes to be expressed are shown in the respective line in Table III, column 8. The following adapter sequences were added to Saccharomyces cerevisiae ORF specific primers (see Table III) for cloning purposes:

SEQ ID NO: 20

| | | |
|---|---|---|
| i) | foward primer: | 5′-GGAATTCCAGCTGACCACC-3′ |

SEQ ID NO: 21

| | | |
|---|---|---|
| ii) | reverse primer: | 5′-GATCCCCGGGAATTGCCATG-3′ |

[66299] These adaptor sequences allow cloning of the ORF into the various vectors containing the Resgen adaptors, see table column E of Table c.

[66300] The following adapter sequences were added to Saccharomyces cerevisiae, Escherichia coli, Synechocystis sp., Azotobacter vinelandii, Thermus thermophilus, Arabidopsis thaliana, Brassica napus, Glycine max, Oryza sativa , Physcomitrella patens, or Zea mays ORF specific primers for cloning purposes:

| SEQ ID NO: 22 | | |
|---|---|---|
| iii) | forward primer: | 5′-TTGCTCTTCC-3′ |
| SEQ ID NO: 23 | | |
| iiii) | reverse primer: | 5′-TTGCTCTTCG-3′ |

[66301] The adaptor sequences allow cloning of the ORF into the various vectors containing the Colic adaptors, see table column E of Table c.

[66302] Therefore for amplification and cloning of Saccharomyces cerevisiae SEQ ID NO: 63167, a primer consisting of the adaptor sequence i) and the ORF specific sequence SEQ ID NO: 63259 and a second primer consisting of the adaptor sequence ii) and the ORF specific sequence SEQ ID NO: 63260 were used.

[66303] For amplification and cloning of Escherichia coli SEQ ID NO: 7941, a primer consisting of the adaptor sequence iii) and the ORF specific sequence SEQ ID NO: 7945 and a second primer consisting of the adaptor sequence iiii) and the ORF specific sequence SEQ ID NO: 7946 were used.

[66304] For amplification and cloning of Synechocystis sp. SEQ ID NO: 53189, a primer consisting of the adaptor sequence iii) and the ORF specific sequence SEQ ID NO: 53447 and a second primer consisting of the adaptor sequence iiii) and the ORF specific sequence SEQ ID NO: 53448 were used.

[66305] For amplification and cloning of Arabidopsis thaliana SEQ ID NO: 2573, a primer consisting of the adaptor sequence iii) and the ORF specific sequence SEQ ID NO: 2931 and a second primer consisting of the adaptor sequence iiii) and the ORF specific sequence SEQ ID NO: 2932 were used.

[66306] For amplification and cloning of Azotobacter vinelandii SEQ ID NO: 70715, a primer consisting of the adaptor sequence iii) and the ORF specific sequence SEQ ID NO: 71321 and a second primer consisting of the adaptor sequence iiii) and the ORF specific sequence SEQ ID NO: 71322 were used.

[66307] For amplification and cloning of Glycine max SEQ ID NO: 46751, a primer consisting of the adaptor sequence iii) and the ORF specific sequence SEQ ID NO: 46841 and a second primer consisting of the adaptor sequence iiii) and the ORF specific sequence SEQ ID NO: 46842 were used.

[66308] For amplification and cloning of Oryza sativa SEQ ID NO: 34301, a primer consisting of the adaptor sequence iii) and the ORF specific sequence SEQ ID NO: 34595 and a second primer consisting of the adaptor sequence iiii) and the ORF specific sequence SEQ ID NO: 34596were used.

[66309] Following these examples every sequence disclosed in Table I, preferably column 5, especially the coding region thereof can be cloned by fusing the adaptor sequences to the respective specific primers sequences as disclosed in Table III, column 8 using the respective vectors shown in Table c.

[66310] [0496.1.7.13] to [0499.1.7.13] for the disclosure of these paragraphs see [0496.1.7.7] to [0499.1.7.7] above

### Example 11e

### Cloning of Inventive Sequences as Shown in Table I, Column 5 in the Different Expression Vectors

[66311] For cloning of for example SEQ ID NO: 7941 from Escherichia coli or any other ORF from Escherichia coli, Synechocystis sp., Azotobacter vinelandii, Arabidopsis thaliana, Glycine max, or Oryza sativa the vector DNA was treated with the restriction enzymes Pacl and Ncol following the standard protocol (MBI Fermentas).

[66312] For cloning for example the ORFs of SEQ ID NO: 63168 from Saccharomyces cerevisiae or any other ORF from Saccharomyces cerevisiae into vectors containing the Resgen adaptor sequence the respective vector DNA was treated with the restriction enzyme Ncol.

[66313] For cloning of for example ORFs SEQ ID NO: 67647 from Saccharomyces cerevisiae or any other ORF from Saccharomyces cerevisiae into vectors containing the Colic adaptor sequence, the respective vector DNA was treated with the restriction enzymes Pacl and Ncol following the standard protocol (MBI Fermentas).

[66314] In all cases the reaction was stopped by inactivation at 70° C. for 20 minutes and purified over QlAquick or NucleoSpin Extract II columns following the standard protocol (Qiagen or Macherey-Nagel).

[66315] Then the PCR-product representing the amplified ORF with the respective adapter sequences and the vector DNA were treated with T4 DNA polymerase according to the standard protocol (MBI Fermentas) to produce single stranded overhangs with the parameters 1 unit T4 DNA polymerase at 37° C. for 2-10 minutes for the vector and 1-2 u T4 DNA polymerase at 15-17° C. for 10-60 minutes for the PCR product representing SEQ ID NO: 7941.

[66316] The reaction was stopped by addition of high-salt buffer and purified over QlAquick or N ucleoSpin Extract II columns following the standard protocol (Qiagen or Macherey-Nagel).

[66317] According to this example the skilled person is able to clone all sequences disclosed in Table I, preferably column 5 or column 8, especially the coding region thereof.

[66318] Approximately 30-60 ng of prepared vector and a defined amount of prepared amplificate were mixed and hybridized at 65° C. for 15 minutes followed by 37° C. 0.1° C/1 seconds, followed by 37° C. 10 minutes, followed by 0.1° C/1 seconds, then 4-10° C.

[66319] The ligated constructs were transformed in the same reaction vessel by addition of competent E. coli cells (strain DHSalpha) and incubation for 20 minutes at 1° C. followed by a heat shock for 90 seconds at 42° C. and cooling to 1-4° C. Then, complete medium (SOC) was added and the mixture was incubated for 45 minutes at 37° C. The entire mixture was subsequently plated onto an agar plate with 0.05 mg/ml kanamycin and incubated overnight at 37° C.

[66320] The outcome of the cloning step was verified by amplification with the aid of primers which bind upstream and downstream of the integration site, thus allowing the amplification of the insertion. The amplifications were carried out as described in the protocol of Taq DNA polymerase (Gibco-BRL).

[66321] The amplification cycles were as follows:

[66322] 1 cycle of 1-5 minutes at 94° C., followed by 35 cycles of in each case 15-60 seconds at 94° C., 15-60 seconds at 50-66° C. and 5-15 minutes at 72° C., followed by 1 cycle of 10 minutes at 72° C., then 4-16° C.

[66323] Several colonies were checked, but only one colony for which a PCR product of the expected size was detected was used in the following steps.

[66324] A portion of this positive colony was transferred into a reaction vessel filled with complete medium (LB) supplemented with kanamycin and incubated overnight at 37° C.

[66325] The plasmid preparation was carried out as specified in the Qiaprep or NucleoSpin Multi-96 Plus standard protocol (Qiagen or Macherey-Nagel).

[66326] [0501.1.7.13] to [0503.1.7.13] for the disclosure of these paragraph see [0501.1.7.7] to [0503.1.7.7] above

[66327] Table d showing results of plant analyses

TABLE d

| SeqID | Target | Locus | Metabolite | Source | Promotor | Method | Min | Max |
|---|---|---|---|---|---|---|---|---|
| 130491 | non-targ | At3g15360 | cryptoxanthin | ARA_LEAF | p-PcUBI | LC | 36 | 59 |
| 120952 | non-targ | At3g16820 | zeaxanthin | ARA_LEAF | p-PcUBI | LC | 24 | 36 |
| 2573 | non-targ | At3g62930 | zeaxanthin | ARA_LEAF | p-PcUBI | LC | 23 | 57 |
| 23482 | non-targ | At4g15660 | zeaxanthin | ARA_LEAF | p-PcUBI | LC | 23 | 53 |
| 3279 | non-targ | At4g15670 | zeaxanthin | ARA_LEAF | p-PcUBI | LC | 26 | 60 |
| 68849 | non-targ | At4g26080 | zeaxanthin | ARA_LEAF | p-PcUBI | LC | 23 | 41 |
| 4102 | non-targ | At4g33040 | cryptoxanthin | ARA_LEAF | p-PcUBI | LC | 32 | 64 |
| 102899 | non-targ | At5g60440 | zeaxanthin | ARA_LEAF | p-PcUBI | LC | 25 | 46 |
| 102941 | non-targ | Avin- | zeaxanthin | ARA_LEAF | p-PcUBI | LC | 36 | 46 |
| | | DRAFT_4847 | | | | | | |
| 34301 | non-targ | AX653549 | cryptoxanthin | ARA_LEAF | p-PcUBI | LC | 34 | 52 |
| 7941 | non-targ | B1003 | zeaxanthin | ARA_LEAF | p-Super | LC | 26 | 51 |
| 36880 | non-targ | B1023 | zeaxanthin | ARA_LEAF | p-Super | LC | 27 | 46 |
| 8316 | non-targ | B1838 | zeaxanthin | ARA_LEAF | p-Super | LC | 23 | 47 |
| 8920 | non-targ | B2032 | zeaxanthin | ARA_LEAF | p-Super | LC | 27 | 59 |
| 115595 | non-targ | B2099 | cryptoxanthin | ARA_LEAF | p-Super | LC | 32 | 53 |
| 39013 | non-targ | B2121 | zeaxanthin | ARA_LEAF | p-Super | LC | 37 | 40 |
| 40329 | non-targ | B2474 | zeaxanthin | ARA_LEAF | p-Super | LC | 22 | 42 |
| 40741 | non-targ | B2714 | zeaxanthin | ARA_LEAF | p-Super | LC | 23 | 38 |
| 115719 | non-targ | B2790 | cryptoxanthin | ARA_LEAF | p-Super | LC | 29 | 43 |
| 41073 | non-targ | B2914 | violaxanthin | ARA_SEED_2 | p-USP | LC | 50 | 220 |
| 9492 | non-targ | B3256 | violaxanthin | ARA_SEED_2 | p-USP | LC | 36 | 220 |
| 10104 | non-targ | B3346 | cryptoxanthin | ARA_LEAF | p-Super | LC | 47 | 60 |
| 94386 | non-targ | B3774 | violaxanthin | ARA_SEED_2 | p-USP | LC | 35 | 232 |
| 10708 | non-targ | B3817 | cryptoxanthin | ARA_LEAF | p-Super | LC | 34 | 66 |
| 105659 | plastidic | B3908 | violaxanthin | ARA_SEED_2 | p-USP | LC | 47 | 66 |
| 44378 | non-targ | B4012 | violaxanthin | ARA_SEED_2 | p-USP | LC | 39 | 118 |
| 130673 | non-targ | B4120 | cryptoxanthin | ARA_LEAF | p-Super | LC | 37 | 74 |
| 130673 | non-targ | B4120 | zeaxanthin | ARA_LEAF | p-Super | LC | 25 | 30 |
| 45556 | non-targ | B4384 | violaxanthin | ARA_SEED_2 | p-USP | LC | 92 | 324 |
| 46751 | non-targ | GM02LC19289 | zeaxanthin | ARA_LEAF | p-PcUBI | LC | 33 | 36 |
| 53189 | non-targ | Sll1185 | cryptoxanthin | ARA_LEAF | p-PcUBI | LC | 35 | 47 |
| 53189 | non-targ | Sll1185 | zeaxanthin | ARA_LEAF | p-PcUBI | LC | 28 | 48 |
| 58823 | plastidic | Slr1755 | zeaxanthin | ARA_LEAF | p-PcUBI | LC | 27 | 46 |
| 63167 | non-targ | Ycl026c-a | cryptoxanthin | ARA_LEAF | Big35S | LC | 32 | 79 |
| 14706 | plastidic | Ydr131c | cryptoxanthin | ARA_LEAF | p-Super | LC | 38 | 133 |
| 90278 | plastidic | Ygl096w | cryptoxanthin | ARA_LEAF | p-Super | LC | 39 | 59 |
| 130742 | plastidic | Ygl256w | cryptoxanthin | ARA_LEAF | p-Super | LC | 35 | 57 |
| 130903 | non-targ | Ykr072c | cryptoxanthin | ARA_LEAF | Big35S | LC | 50 | 76 |
| 130903 | non-targ | Ykr072c | zeaxanthin | ARA_LEAF | Big35S | LC | 25 | 52 |
| 130932 | plastidic | Ymr281w | zeaxanthin | ARA_LEAF | p-Super | LC | 28 | 81 |
| 130986 | plastidic | Ymr324c | cryptoxanthin | ARA_LEAF | p-Super | LC | 31 | 49 |
| 67646 | plastidic | Ynr019w | zeaxanthin | ARA_LEAF | p-PcUBI | LC | 33 | 49 |
| 130713 | non-targ | Yer184c | abscisic acid | ARA_LEAF | Big35S | LC | 31 | 114 |
| 130999 | non-targ | YOR044W | abscisic acid | ARA_LEAF | Big35S | LC | 3 | 113 |
| 45394 | non-targ | B4321 | abscisic acid | ARA_LEAF | p-Super | LC | 25 | 283 |
| 54337 | mitochondrial | Sll1450 | abscisic acid | ARA_LEAF | p-PcUBI | LC | 22 | 115 |
| 86447 | plastidic | Sll1848 | abscisic acid | ARA_LEAF | p-PcUBI | LC | 26 | 364 |
| 68657 | non-targ | At3g02990 | abscisic acid | ARA_LEAF | p-PcUBI | LC | 14 | 231 |
| 18235 | non-targ | At1g48260 | abscisic acid | ARA_LEAF | p-PcUBI | LC | 29 | 300 |
| 19419 | non-targ | At1g72770 | abscisic acid | ARA_LEAF | p-PcUBI | LC | 124 | 1187 |
| 70715 | non-targ | AVIN- | abscisic acid | ARA_LEAF | p-PcUBI | LC | 12 | 162 |
| | | DRAFT_0539 | | | | | | |
| 20346 | non-targ | At2g30540 | abscisic acid | ARA_LEAF | p-PcUBI | LC | 11 | 152 |

[66328] Column 1 shows the SEQ ID NO, Column 2 shows the expression type (targeted or non-targeted), Column 3 shows the “gene name” (locus), Column 4 shows the metabolite analyzed, Column 5 indicates the A. thaliana source tissue analyzed, Column 6 indicates the used promoter for expression, Column 7 indicates the analytical method. Columns 8 and 9 show the minimum and the maximum increase of the analyzed metabolite (in percent) in comparison to the wild type (ratio_by_WT, given as percent increase).

[66329] The term “non-targ” in Table d, Column 2 which shows the expression type means “non-targeted”.

[66330] When the analyses were repeated independently, all results proved to be significant.

[66331] [0505.1.7.13] to [0515.1.7.13] for the disclosure of these paragraphs see [0505.1.7.7] to [0515.1.7.7] above

[66332] In a further embodiment, the present invention relates in paragraphs [0000.1.7.14.] to [0514.1.7.14.] to a further process for the production of the fine chemical betasitosterol, campesterol and/or stigmasterol as defined below and corresponding embodiments as described herein as follows.

[66333] for the disclosure of this paragraph see [0001.1.7.7] above

[66334] Sterols are a class of essential, natural compounds required by all eukaryotes to complete their life cycle. In animals, cholesterol is typically the major sterol while in fungi it is ergosterol. Plants produce a class of sterols called phytosterols. Phytosterols are natural components of many vegetables and grains. The term “phytosterols” covers plant sterols and plant stanols. Plant sterols are naturally occurring substances present in the diet as minor components of vegetable oils. The structures of these plant sterols are similar to that of cholesterol with an extra methyl or ethyl group and a double bond in the side chain. Saturated plant sterols, referred to as stanols, have no double bond in the ring structure.

[66335] Phytosterols (including plant sterols and stanols) are natural components of plant foods, especially plant oils, seeds and nuts, cereals and legumes specially of edible vegetable oils such as sunflower seed oil and, as such are natural constituents of the human diet. The most common phytosterols are Beta-sitosterol, campesterol, and stigmasterol. Beta-sitosterol is found in high amounts in nuts.

[66336] A high concentration of cholesterol in serum, i.e., hypercholesterolemia, is a wellknown risk factor for coronary heart disease (CH D). Blood cholesterol levels can be decreased by following diets, which are low in saturated fat, high in polyunsaturated fat and low in cholesterol. Although considerable achievements have been made in terms of knowledge and education, consumers still find it difficult to follow healthy eating advice. Both plant sterols and plant stanols (e.g. phytosterols) are effective in lowering plasma total and low density lipoprotein (LDL) cholesterol and this occurs by inhibiting the absorption of cholesterol from the small intestine. The plasma cholesterol-lowering properties of plant sterols have been known since the 1950s (Pollak, Circulation, 7, 702-706.1953). They have been used as cholesterol-lowering agents, first in a free form (Pollak and Kritchevsky, Sitosterol. In: Monographs on Aherosclerosis. Clarkson T B, Kritchevsky D,Pollak O J, eds. New York, Basel, Karger 1981; 1-219) and recently mainly as esterified phytosterols (Katan et al., Mayo Clin Proc 2003; 78: 965-978).

[66337] The consumption of plant sterols and plant stanols lowers blood cholesterol levels by inhibiting the absorption of dietary and endogenously-produced cholesterol from the small intestine and the plant sterols/stanols are only very poorly absorbed themselves. This inhibition is related to the similarity in physico-chemical properties of plant sterols and stanols and cholesterol. Plant sterols and plant stanols appear to be without hazard to health, having been shown without adverse effects in a large number of human studies. They show no evidence of toxicity even at high dose levels and gastro-intestinal absorption is low.

[66338] The most abundant sterols of vascular plants are campesterol, sitosterol and stigmasterol, all of which contain a double bond between the carbon atoms at positions 5 and 6 and are classified as delta-5 sterols.

[66339] Exemplary naturally occurring delta-5 plant sterols are isofucosterol, sitosterol, stigmasterol, campesterol, cholesterol, and dihydrobrassicasterol. Exemplary naturally occurring non-delta-5 plant sterols are cycloartenol, 24-methylene cycloartenol, cycloeucalenol, and obtusifoliol.

[66340] The ratio of delta-5 to non-delta-5 sterols in plants can be an important factor relating to insect pest resistance. Insect pests are unable to synthesize de novo the steroid nucleus and depend upon external sources of sterols in their food source for production of necessary steroid compounds. In particular, insect pests require an external source of delta-5 sterols. By way of example, externally provided delta-5 sterols are necessary for the production of ecdysteroids, hormones that control reproduction and development. See, e.g., Costet et al., Proc. Natl. Acad. Sci. USA, 84:643 (1987) and Corio-Costet et al., Archives of Insect Biochem. Physiol., 11:47 (1989).

[66341] The content of phytosterols in a cell was increased by increasing or decreasing certain activities as disclosed in WO2006/069610, WO2007/087815 or WO2008/034648. A detailled description of the state of the art can be found in WO2008/034648, paragraph [0005.1.13.13] (which is incorporated by reference).

[66342] The effectiveness of phytosterols as a dietary component to lower serum cholesterol level in humans has been well documented in the past years. Therefore, consumption of phytosterol-enriched food products by the general population and particularly mildly hypercholesterolemic subjects can be recommended. The FDA has approved the following claim for phytosterols: “Foods containing at least 0.4 gram per serving of plant sterols, eaten twice a day with meals for a daily total intake of at least 0.8 gram, as part of a diet low in saturated fat and cholesterol, may reduce the risk of heart disease.”

[66343] However, limited quantities of phytosterols are currently a major barrier in satisfying the demands for such functional foods. Transgenic plants having altered sterol profiles could be instrumental in establishing a dietary approach to cholesterol management and cardiovascular disease prevention. The altered phytosterol profile further leads to pest resistance.

[66344] Although people consume plant sterols every day in their normal diet, the amount is not great enough to have a significant blood cholesterol lowering effect. The intake of phytosterols varies among different populations according to the food products being consumed, but the average daily Western diet is reported to contain 150-300 mg of these sterols (de Vries et al., J Food Comp Anal 1997; 19: 115-141; Bjorkhem et al. Inborn errors in bile acid biosynthesis and storage of sterols other than cholesterol. In: The Metabolic and Molecular Bases of Inherited Disease. Scriver C S, Beaudet A L, Sly W S, Valle D, eds. New York, McGrawHill 2001; 2961-2988). In order to achieve a cholesterol-lowering benefit, approximately 1 g/day of plant sterols need to be consumed (Hendriks et al., European Journal of Clinical Nutrition, 53, 319-327.1999).

[66345] Phytosterols are found naturally in plant foods at low levels. The enrichment of foods such as margarines with plant sterols and stanols is one of the recent developments in functional foods to enhance the cholesterol-lowering ability of traditional food products. Incorporation of additional phytosterols into the diet may be an effective way of lowering total and LDL cholesterol levels. The non-esterified phytosterols can be used as novel food ingredients in: bakery products and cereals (eg, breakfast cereals, breakfast bars); dairy products such as low and reduced fat liquid milk, low and reduced fat yoghurt and yoghurt products, and dairy based desserts; non-carbonated soft drinks like low and reduced fat soy beverages and low and reduced fat soy-based yoghurts; meat products or edible fats and oils (eg, mayonnaise, spice sauces, salad dressings); margarine; and table spreads or dietary fats. [0009.1.14.14] When edible oils undergo normal refining, plant sterols are partially extracted. It is estimated that 2500 tonnes of vegetable oil needs to be refined to produce 1 tonne of plant sterols. Plant stanols are obtained by hydrogenation of the plant sterols.

[66346] Another source of plant sterols is tall oil, derived from the process of paper production from wood and approximately 2500 tons of pine is required to produce 1 ton of plant sterols. Tall oil also contains a higher proportion of plant stanols (primarily beta-sitostanol) than do vegetable oils.

[66347] The allowance by the FDA of a health claim for phytosterols and phytostanols has created much consumer interest and demand. There is a need to find new sources of phytosterols.

[66348] An economical method for producing phytosterols or its precursor and food- and feedstuffs with increased phytosterol content is therefore very important.

[66349] Particularly economical methods are biotechnological methods utilizing phytosterol-producing organisms, which are either natural or optimized by genetic modification.

[66350] There is a constant need for providing novel enzyme activities or direct or indirect regulators and thus alternative methods with advantageous properties for producing phytosterols or its precursor in organisms, e.g. in transgenic organisms.

[66351] To ensure a high quality of foods and animal feeds, it is therefore necessary to replace cholesterin by phytosterols. Accordingly, there is still a great demand for new and more suitable genes, which encode enzymes or regulators, which participate in the biosynthesis of phytosterols and make it possible to produce certain phytosterols specifically on an industrial scale without unwanted byproducts being formed. In the selection of genes for biosynthesis or regulation two characteristics above all are particularly important. On the one hand, there is as ever a need for improved processes for obtaining the highest possible contents of phytosterols and on the other hand as less as possible byproducts should be produced in the production process.

[66352] There is a demand especially for plants producing phytosterols in much greater quantities, preferably as compared to a control or wild type plant, where the phytosterols are preferably easy accessible and recoverable on an industrial scale without unwanted byproducts forming.

[66353] It is an object of the present invention to develop an inexpensive process for the synthesis of beta-sitosterol, campesterol, and/or stigmasterol.

[66354] It is a further object of the present invention to develop an inexpensive process for the synthesis of phytosterols, preferably beta-sitosterol, campesterol, and/or stigmasterol and to assure that the phytosterols, preferably beta-sitosterol, campesterol, and/or stigmasterol are more accessible and facilely to isolate and recover in an industrial scale from the producing organism, preferably from a plant.

[66355] for the disclosure of this paragraph see [0013.1.7.7] above

[66356] Accordingly, in a first embodiment, the invention relates to a process for the production of at least one fine chemical selected from the group consisting of: beta-sitosterol, campesterol, and stigmasterol, or, in other words, of the “fine chemical” or “fine chemical of the invention”.

[66357] The terms “fine chemical of the invention”, “fine chemical” or “the fine chemical” are used herein equally and relate in context of the paragraphs or sections [0014.1.14.14] to [0514.1.7.14] essentially to the metabolite or the metabolites indicated in column 7, application no. 14 of Tables I, II and IV in the respective line.

[66358] Further, the term “in context of any of the paragraphs [0014.1.14.14] to [0514.1.7.14]” as used herein means that for any of said paragraphs [0014.1.14.14] to [0514.1.7.14] the term “the fine chemical” is understood to follow the definition of paragraphs or sections [0014.1.14.14] and [0015.1.14.14], independently whether it refers to any other paragraph or not and whether the reference recites the term “fine chemical” in an other context.

[66359] Thus, in cases where one or more paragraphs or sections are incorporated by reference into any of the present paragraphs [0014.1.14.14] to [0514.1.7.14], e.g. by usage of the term “see paragraph” or the term “for the disclosure of this paragraph see the disclosure of paragraph” or the term “incorporated by reference” or a corresponding term, the incorporated paragraph, section or term “the fine chemical” is also understood to have the meaning according to the definition of paragraph [0014.1.14.14] and [0015.1.14.14].

[66360] Accordingly, in one embodiment, the term “fine chemical of the invention”, “fine chemical” or “the fine chemical” as used herein (alone or in combination, like in FCRP) means “betasitosterol in context of the nucleic acid or polypeptide sequences listed in the respective same line of any one of Tables Ito IV of application no. 14 and indicating in column 7 the metabolite “beta-sitosterol”.

[66361] In one embodiment, the term beta-sitosterol or the term “fine chemical” mean in context of the paragraphs or sections [0014.1.14.14] to [0514.1.7.14] at least one chemical compound with an activity of the above mentioned beta-sitosterol, respectively.

[66362] Accordingly, in one embodiment, the term “fine chemical of the invention”, “fine chemical” or “the fine chemical” as used herein (alone or in combination, like in FCRP) means “campesterol in context of the nucleic acid or polypeptide sequences listed in the respective same line of any one of Tables Ito IV of application no. 14 and indicating in column 7 the metabolite “campesterol”.

[66363] In one embodiment, the term campesterol or the term “fine chemical” mean in context of the paragraphs or sections [0014.1.14.14] to [0514.1.7.14] at least one chemical compound with an activity of the above mentioned campesterol, respectively.

[66364] Accordingly, in one embodiment, the term “fine chemical of the invention”, “fine chemical” or “the fine chemical” as used herein (alone or in combination, like in FCRP) means “stigmasterol in context of the nucleic acid or polypeptide sequences listed in the respective same line of any one of Tables I to IV of application no. 14 and indicating in column 7 the metabolite “stigmasterol”.

[66365] In one embodiment, the term stigmasterol or the term “fine chemical” mean in context of the paragraphs or sections [0014.1.14.14] to [0514.1.7.14] at least one chemical compound with an activity of the above mentioned stigmasterol, respectively.

[66366] Accordingly, in one embodiment, the terms “fine chemical of the invention”, “fine chemical” or “the fine chemical” mean in context of any of the paragraphs [0014.1.14.14] to [0514.1.7.14] beta-sitosterol, its salts, ester or ether in free form or bound form, for example acylated (beta-sitosterol esters), alkylated (beta-sitosteryl alkyl ethers), sulfated (beta-sitosterol sulfate), or linked to a glycoside moiety (beta-sitosteryl glycosides) which can be itself acylated (acylated sterol glycosides).

[66367] In a preferred embodiment, the term “the fine chemical” means beta-sitosterol or its salts, ester or ether, in free form or bound form.

[66368] In a preferred embodiment “beta-sitosterol” means beta-sitosterol in free form.

[66369] Accordingly, in one embodiment, the terms “fine chemical of the invention”, “fine chemical” or “the fine chemical” mean in context of any of the paragraphs [0014.1.14.14] to [0514.1.7.14] campesterol, its salts, ester or ether in free form or bound form, for example acylated (campesterol esters), alkylated (campesteryl alkyl ethers), sulfated (campesterol sulfate), or linked to a glycoside moiety (campesteryl glycosides) which can be itself acylated (acylated sterol glycosides). In a preferred embodiment, the term “the fine chemical” means campesterol or its salts, ester or ether, in free form or bound form.

[66370] In a preferred embodiment “campesterol” means campesterol in free form.

[66371] Accordingly, in one embodiment, the terms “fine chemical of the invention”, “fine chemical” or “the fine chemical” mean in context of any of the paragraphs [0014.1.14.14] to [0514.1.7.14] stigmasterol, its salts, ester or ether in free form or bound form. In a preferred embodiment, the term “the fine chemical” means stigmasterol or its salts, ester or ether, in free form or bound form, for example acylated (stigmasterol esters), alkylated (stigmasteryl alkyl ethers), sulfated (stigmasterol sulfate), or linked to a glycoside moiety (stigmasteryl glycosides) which can be itself acylated (acylated sterol glycosides).

[66372] In a preferred embodiment “stigmasterol” means stigmasterol in free form.

[66373] Further, the term “in context of any of the paragraphs [0014.1.14.14] to [0514.1.7.14]” as used herein means that for any of said paragraphs [0014.1.14.14] to [0514.1.7.14] the term “the fine chemical” is understood to follow the definition of section [0014.1.14.14] or section [0015.1.14.14], independently whether it refers to any other paragraph or not and whether the reference recites the term “fine chemical” in an other context.

[66374] Thus, in cases where one or more paragraphs or sections are incorporated by reference into any of the present paragraphs [0014.1.14.14] to [0514.1.7.14], e.g. by usage of the term “see paragraph” or the term “for the disclosure of this paragraph see the disclosure of paragraph” or the term “incorporated by reference” or a corresponding term, the incorporated paragraph, section or term “the fine chemical” is also understood to have the meaning according to this definition of this paragraph [0015.1.14.14].

[66375] Further, the term “fine chemicals” as used herein relates to compositions comprising said fine chemical(s), i.e. comprising beta-sitosterol, campesterol, and/or stigmasterol, respectively.

[66376] Accordingly, the present invention relates to a process for the production of campesterol, which comprises
[66377] (a) increasing or generating one or more activities selected from the group consisting of C-4 sterol methyl oxidase in a non-human organism or a part thereof, preferably a microorganism, a plant cell, a plant or a part thereof, as compared to a corresponding non-transformed wild type non-human organism or a part thereof; and
[66378] (b) growing the non-human organism or a part thereof under conditions which permit the production of campesterol or a composition comprising campesterol in said non-human organism or in the culture medium surrounding said non-human organism.

[66379] Accordingly, the present invention relates to a process for the production of campesterol, which comprises
[66380] (a) increasing or generating one or more activities selected from the group consisting of protein phosphatase in a non-human organism or a part thereof, preferably a microorganism, a plant cell, a plant or a part thereof, as compared to a corresponding non-transformed wild type non-human organism or a part thereof; and
[66381] (b) growing the non-human organism or a part thereof under conditions which permit the production of campesterol or a composition comprising campesterol in said non-human organism or in the culture medium surrounding said non-human organism.

[66382] Accordingly, the present invention relates to a process for the production of campesterol, which comprises
[66383] (a) increasing or generating one or more activities selected from the group consisting of eukaryotic translation initiation factor 5 in a non-human organism or a part thereof, preferably a microorganism, a plant cell, a plant or a part thereof, as compared to a corresponding non-transformed wild type non-human organism or a part thereof; and
[66384] (b) growing the non-human organism or a part thereof under conditions which permit the production of campesterol or a composition comprising campesterol in said non-human organism or in the culture medium surrounding said non-human organism.

[66385] Accordingly, the present invention relates to a process for the production of beta-sitosterol, which comprises
[66386] (a) increasing or generating one or more activities selected from the group consisting of calcium-dependent protein kinase in a non-human organism or a part thereof, preferably a microorganism, a plant cell, a plant or a part thereof, as compared to a corresponding non-transformed wild type non-human organism or a part thereof; and
[66387] (b) growing the non-human organism or a part thereof under conditions which permit the production of beta-sitosterol or a composition comprising beta-sitosterol in said non-human organism or in the culture medium surrounding said non-human organism.

[66388] Accordingly, the present invention relates to a process for the production of campesterol, which comprises
[66389] (a) increasing or generating one or more activities selected from the group consisting of calcium-dependent protein kinase in a non-human organism or a part thereof, preferably a microorganism, a plant cell, a plant or a part thereof, as compared to a corresponding non-transformed wild type non-human organism or a part thereof; and
[66390] (b) growing the non-human organism or a part thereof under conditions which permit the production of campesterol or a composition comprising campesterol in said non-human organism or in the culture medium surrounding said non-human organism.

[66391] Accordingly, the present invention relates to a process for the production of beta-sitosterol, which comprises
[66392] (a) increasing or generating one or more activities selected from the group consisting of transcription factor in a non-human organism or a part thereof, preferably a microorganism, a plant cell, a plant or a part thereof, as compared to a corresponding non-transformed wild type non-human organism or a part thereof; and
[66393] (b) growing the non-human organism or a part thereof under conditions which permit the production of beta-sitosterol or a composition comprising beta-sitosterol in said non-human organism or in the culture medium surrounding said non-human organism.

[66394] Accordingly, the present invention relates to a process for the production of campesterol, which comprises
[66395] (a) increasing or generating one or more activities selected from the group consisting of transcription factor in a non-human organism or a part thereof, preferably a microorganism, a plant cell, a plant or a part thereof, as compared to a corresponding non-transformed wild type non-human organism or a part thereof; and
[66396] (b) growing the non-human organism or a part thereof under conditions which permit the production of campesterol or a composition comprising campesterol in said non-human organism or in the culture medium surrounding said non-human organism.

[66397] Accordingly, the present invention relates to a process for the production of campesterol, which comprises
[66398] (a) increasing or generating one or more activities selected from the group consisting of protein phosphatase in a non-human organism or a part thereof, preferably a microorganism, a plant cell, a plant or a part thereof, as compared to a corresponding non-transformed wild type non-human organism or a part thereof; and
[66399] (b) growing the non-human organism or a part thereof under conditions which permit the production of campesterol or a composition comprising campesterol in said non-human organism or in the culture medium surrounding said non-human organism.

[66400] Accordingly, the present invention relates to a process for the production of campesterol, which comprises
[66401] (a) increasing or generating one or more activities selected from the group consisting of ankyrin repeat family protein in a non-human organism or a part thereof, preferably a microorganism organism, a plant cell, a plant or a part thereof, as compared to a corresponding non-transformed wild type non-human organism or a part thereof; and
[66402] (b) growing the non-human organism or a part thereof under conditions which permit the production of campesterol or a composition comprising campesterol in said non-human organism or in the culture medium surrounding said non-human organism.

[66403] Accordingly, the present invention relates to a process for the production of beta-sitosterol, which comprises
[66404] (a) increasing or generating one or more activities selected from the group consisting of transcription factor in a non-human organism or a part thereof, preferably a microorganism, a plant cell, a plant or a part thereof, as compared to a corresponding non-transformed wild type non-human organism or a part thereof; and
[66405] (b) growing the non-human organism or a part thereof under conditions which permit the production of beta-sitosterol or a composition comprising beta-sitosterol in said non-human organism or in the culture medium surrounding said non-human organism.

[66406] Accordingly, the present invention relates to a process for the production of campesterol, which comprises
[66407] (a) increasing or generating one or more activities selected from the group consisting of transcription factor in a non-human organism or a part thereof, preferably a microorganism, a plant cell, a plant or a part thereof, as compared to a corresponding non-transformed wild type non-human organism or a part thereof; and
[66408] (b) growing the non-human organism or a part thereof under conditions which permit the production of campesterol or a composition comprising campesterol in said non-human organism or in the culture medium surrounding said non-human organism.

[66409] Accordingly, the present invention relates to a process for the production of campesterol, which comprises
[66410] (a) increasing or generating one or more activities selected from the group consisting of sterol desaturase in a non-human organism or a part thereof, preferably a microorganism, a plant cell, a plant or a part thereof, as compared to a corresponding non-transformed wild type non-human organism or a part thereof; and
[66411] (b) growing the non-human organism or a part thereof under conditions which permit the production of campesterol or a composition comprising campesterol in said non-human organism or in the culture medium surrounding said non-human organism.

[66412] Accordingly, the present invention relates to a process for the production of beta-sitosterol, which comprises
[66413] (a) increasing or generating one or more activities selected from the group consisting of monothiol glutaredoxin in a non-human organism or a part thereof, preferably a microorganism, a plant cell, a plant or a part thereof, as compared to a corresponding non-transformed wild type non-human organism or a part thereof; and
[66414] (b) growing the non-human organism or a part thereof under conditions which permit the production of beta-sitosterol or a composition comprising beta-sitosterol in said non-human organism or in the culture medium surrounding said non-human organism.

[66415] Accordingly, the present invention relates to a process for the production of campesterol, which comprises
[66416] (a) increasing or generating one or more activities selected from the group consisting of protein phosphatase in a non-human organism or a part thereof, preferably a microorganism, a plant cell, a plant or a part thereof, as compared to a corresponding non-transformed wild type non-human organism or a part thereof; and
[66417] (b) growing the non-human organism or a part thereof under conditions which permit the production of campesterol or a composition comprising campesterol in said non-human organism or in the culture medium surrounding said non-human organism.

[66418] Accordingly, the present invention relates to a process for the production of beta-sitosterol, which comprises
[66419] (a) increasing or generating one or more activities selected from the group consisting of calcium-dependent protein kinase in a non-human organism or a part thereof, preferably a microorganism, a plant cell, a plant or a part thereof, as compared to a corresponding non-transformed wild type non-human organism or a part thereof; and
[66420] (b) growing the non-human organism or a part thereof under conditions which permit the production of beta-sitosterol or a composition comprising beta-sitosterol in said non-human organism or in the culture medium surrounding said non-human organism.

[66421] Accordingly, the present invention relates to a process for the production of campesterol, which comprises
[66422] (a) increasing or generating one or more activities selected from the group consisting of calcium-dependent protein kinase in a non-human organism or a part thereof, preferably a microorganism, a plant cell, a plant or a part thereof, as compared to a corresponding non-transformed wild type non-human organism or a part thereof; and
[66423] (b) growing the non-human organism or a part thereof under conditions which permit the production of campesterol or a composition comprising campesterol in said non-human organism or in the culture medium surrounding said non-human organism.

[66424] Accordingly, the present invention relates to a process for the production of campesterol, which comprises
[66425] (a) increasing or generating one or more activities selected from the group consisting of protein phosphatase in a non-human organism or a part thereof, preferably a microorganism, a plant cell, a plant or a part thereof, as compared to a corresponding non-transformed wild type non-human organism or a part thereof; and
[66426] (b) growing the non-human organism or a part thereof under conditions which permit the production of campesterol or a composition comprising campesterol in said non-human organism or in the culture medium surrounding said non-human organism.

[66427] Accordingly, the present invention relates to a process for the production of beta-sitosterol, which comprises
[66428] (a) increasing or generating one or more activities selected from the group consisting of protein phosphatase in a non-human organism or a part thereof, preferably a microorganism, a plant cell, a plant or a part thereof, as compared to a corresponding non-transformed wild type non-human organism or a part thereof; and
[66429] (b) growing the non-human organism or a part thereof under conditions which permit the production of beta-sitosterol or a composition comprising beta-sitosterol in said non-human organism or in the culture medium surrounding said non-human organism.

[66430] Accordingly, the present invention relates to a process for the production of beta-sitosterol, which comprises
[66431] (a) increasing or generating one or more activities selected from the group consisting of protein kinase in a non-human organism or a part thereof, preferably a microorganism, a plant cell, a plant or a part thereof, as compared to a corresponding non-transformed wild type non-human organism or a part thereof; and
[66432] (b) growing the non-human organism or a part thereof under conditions which permit the production of beta-sitosterol or a composition comprising beta-sitosterol in said non-human organism or in the culture medium surrounding said non-human organism.

[66433] Accordingly, the present invention relates to a process for the production of beta-sitosterol, which comprises
[66434] (a) increasing or generating one or more activities selected from the group consisting of sec-independent protein translocase in a non-human organism or a part thereof, preferably a microorganism, a plant cell, a plant or a part thereof, as compared to a corresponding non-transformed wild type non-human organism or a part thereof; and
[66435] (b) growing the non-human organism or a part thereof under conditions which permit the production of beta-sitosterol or a composition comprising beta-sitosterol in said non-human organism or in the culture medium surrounding said non-human organism.

[66436] Accordingly, the present invention relates to a process for the production of campesterol, which comprises
[66437] (a) increasing or generating one or more activities selected from the group consisting of 2-oxoglutarate dehydrogenase E1 subunit in a non-human organism or a part thereof, preferably a microorganism, a plant cell, a plant or a part thereof, as compared to a corresponding non-transformed wild type non-human organism or a part thereof; and
[66438] (b) growing the non-human organism or a part thereof under conditions which permit the production of campesterol or a composition comprising campesterol in said non-human organism or in the culture medium surrounding said non-human organism.

[66439] Accordingly, the present invention relates to a process for the production of campesterol, which comprises
[66440] (a) increasing or generating one or more activities selected from the group consisting of oxidoreductase in a non-human organism or a part thereof, preferably a microorganism, a plant cell, a plant or a part thereof, as compared to a corresponding non-transformed wild type non-human organism or a part thereof; and
[66441] (b) growing the non-human organism or a part thereof under conditions which permit the production of campesterol or a composition comprising campesterol in said non-human organism or in the culture medium surrounding said non-human organism.

[66442] Accordingly, the present invention relates to a process for the production of beta-sitosterol, which comprises
[66443] (a) increasing or generating one or more activities selected from the group consisting of CTP synthase in a non-human organism or a part thereof, preferably a microorganism, a plant cell, a plant or a part thereof, as compared to a corresponding non-transformed wild type non-human organism or a part thereof; and
[66444] (b) growing the non-human organism or a part thereof under conditions which permit the production of beta-sitosterol or a composition comprising beta-sitosterol in said non-human organism or in the culture medium surrounding said non-human organism.

[66445] Accordingly, the present invention relates to a process for the production of campesterol, which comprises
[66446] (a) increasing or generating one or more activities selected from the group consisting of CTP synthase in a non-human organism or a part thereof, preferably a microorganism, a plant cell, a plant or a part thereof, as compared to a corresponding non-transformed wild type non-human organism or a part thereof; and
[66447] (b) growing the non-human organism or a part thereof under conditions which permit the production of campesterol or a composition comprising campesterol in said non-human organism or in the culture medium surrounding said non-human organism.

[66448] Accordingly, the present invention relates to a process for the production of campesterol, which comprises
[66449] (a) increasing or generating one or more activities selected from the group consisting of recombinase A in a non-human organism or a part thereof, preferably a microorganism, a plant cell, a plant or a part thereof, as compared to a corresponding non-transformed wild type non-human organism or a part thereof; and
[66450] (b) growing the non-human organism or a part thereof under conditions which permit the production of campesterol or a composition comprising campesterol in said non-human organism or in the culture medium surrounding said non-human organism.

[66451] Accordingly, the present invention relates to a process for the production of beta-sitosterol, which comprises
[66452] (a) increasing or generating one or more activities selected from the group consisting of hydrolase in a non-human organism or a part thereof, preferably a microorganism, a plant cell, a plant or a part thereof, as compared to a corresponding non-transformed wild type non-human organism or a part thereof; and
[66453] (b) growing the non-human organism or a part thereof under conditions which permit the production of beta-sitosterol or a composition comprising beta-sitosterol in said non-human organism or in the culture medium surrounding said non-human organism.

[66454] Accordingly, the present invention relates to a process for the production of campesterol, which comprises
[66455] (a) increasing or generating one or more activities selected from the group consisting of hydrolase in a non-human organism or a part thereof, preferably a microorganism, a plant cell, a plant or a part thereof, as compared to a corresponding non-transformed wild type non-human organism or a part thereof; and
[66456] (b) growing the non-human organism or a part thereof under conditions which permit the production of campesterol or a composition comprising campesterol in said non-human organism or in the culture medium surrounding said non-human organism.

[66457] Accordingly, the present invention relates to a process for the production of campesterol, which comprises
[66458] (a) increasing or generating one or more activities selected from the group consisting of threonine synthase in a non-human organism or a part thereof, preferably a microorganism, a plant cell, a plant or a part thereof, as compared to a corresponding non-transformed wild type non-human organism or a part thereof; and
[66459] (b) growing the non-human organism or a part thereof under conditions which permit the production of campesterol or a composition comprising campesterol in said non-human organism or in the culture medium surrounding said non-human organism.

[66460] Accordingly, the present invention relates to a process for the production of campesterol, which comprises
[66461] (a) increasing or generating one or more activities selected from the group consisting of L-ribulose-5-phosphate 4-epimerase in a non-human organism or a part thereof, preferably a microorganism, a plant cell, a plant or a part thereof, as compared to a corresponding non-transformed wild type non-human organism or a part thereof; and
[66462] (b) growing the non-human organism or a part thereof under conditions which permit the production of campesterol or a composition comprising campesterol in said non-human organism or in the culture medium surrounding said non-human organism.

[66463] Accordingly, the present invention relates to a process for the production of campesterol, which comprises
[66464] (a) increasing or generating one or more activities selected from the group consisting of glucose dehydrogenase in a non-human organism or a part thereof, preferably a microorganism, a plant cell, a plant or a part thereof, as compared to a corresponding non-transformed wild type non-human organism or a part thereof; and
[66465] (b) growing the non-human organism or a part thereof under conditions which permit the production of campesterol or a composition comprising campesterol in said non-human organism or in the culture medium surrounding said non-human organism.

[66466] Accordingly, the present invention relates to a process for the production of beta-sitosterol, which comprises
[66467] (a) increasing or generating one or more activities selected from the group consisting of ATP-binding component of a transport system in a non-human organism or a part thereof, preferably a microorganism, a plant cell, a plant or a part thereof, as compared to a corresponding non-transformed wild type non-human organism or a part thereof; and
[66468] (b) growing the non-human organism or a part thereof under conditions which permit the production of beta-sitosterol or a composition comprising beta-sitosterol in said non-human organism or in the culture medium surrounding said non-human organism.

[66469] Accordingly, the present invention relates to a process for the production of campesterol, which comprises
[66470] (a) increasing or generating one or more activities selected from the group consisting of ATP-binding component of a transport system in a non-human organism or a part thereof, preferably a microorganism, a plant cell, a plant or a part thereof, as compared to a corresponding non-transformed wild type non-human organism or a part thereof; and
[66471] (b) growing the non-human organism or a part thereof under conditions which permit the production of campesterol or a composition comprising campesterol in said non-human organism or in the culture medium surrounding said non-human organism.

[66472] Accordingly, the present invention relates to a process for the production of campesterol, which comprises
[66473] (a) increasing or generating one or more activities selected from the group consisting of membrane transport protein in a non-human organism or a part thereof, preferably a microorganism, a plant cell, a plant or a part thereof, as compared to a corresponding non-transformed wild type non-human organism or a part thereof; and
[66474] (b) growing the non-human organism or a part thereof under conditions which permit the production of campesterol or a composition comprising campesterol in said non-human organism or in the culture medium surrounding said non-human organism.

[66475] Accordingly, the present invention relates to a process for the production of campesterol, which comprises
[66476] (a) increasing or generating one or more activities selected from the group consisting of putrescine transport system permease protein in a non-human organism or a part thereof, preferably a microorganism, a plant cell, a plant or a part thereof, as compared to a corresponding non-transformed wild type non-human organism or a part thereof; and
[66477] (b) growing the non-human organism or a part thereof under conditions which permit the production of campesterol or a composition comprising campesterol in said non-human organism or in the culture medium surrounding said non-human organism.

[66478] Accordingly, the present invention relates to a process for the production of beta-sitosterol, which comprises
[66479] (a) increasing or generating one or more activities selected from the group consisting of multidrug resistance protein in a non-human organism or a part thereof, preferably a microorganism, a plant cell, a plant or a part thereof, as compared to a corresponding non-transformed wild type non-human organism or a part thereof; and
[66480] (b) growing the non-human organism or a part thereof under conditions which permit the production of beta-sitosterol or a composition comprising beta-sitosterol in said non-human organism or in the culture medium surrounding said non-human organism.

[66481] Accordingly, the present invention relates to a process for the production of beta-sitosterol, which comprises
[66482] (a) increasing or generating one or more activities selected from the group consisting of sodium/proton antiporter in a non-human organism or a part thereof, preferably a microorganism, a plant cell, a plant or a part thereof, as compared to a corresponding non-transformed wild type non-human organism or a part thereof; and
[66483] (b) growing the non-human organism or a part thereof under conditions which permit the production of beta-sitosterol or a composition comprising beta-sitosterol in said non-human organism or in the culture medium surrounding said non-human organism.

[66484] Accordingly, the present invention relates to a process for the production of campesterol, which comprises
[66485] (a) increasing or generating one or more activities selected from the group consisting of sodium/proton antiporter in a non-human organism or a part thereof, preferably a microorganism, a plant cell, a plant or a part thereof, as compared to a corresponding non-transformed wild type non-human organism or a part thereof; and
[66486] (b) growing the non-human organism or a part thereof under conditions which permit the production of campesterol or a composition comprising campesterol in said non-human organism or in the culture medium surrounding said non-human organism.

[66487] Accordingly, the present invention relates to a process for the production of beta-sitosterol, which comprises
[66488] (a) increasing or generating one or more activities selected from the group consisting of phenylacetic acid degradation protein in a non-human organism or a part thereof, preferably a microorganism, a plant cell, a plant or a part thereof, as compared to a corresponding non-transformed wild type non-human organism or a part thereof; and
[66489] (b) growing the non-human organism or a part thereof under conditions which permit the production of beta-sitosterol or a composition comprising beta-sitosterol in said non-human organism or in the culture medium surrounding said non-human organism.

[66490] Accordingly, the present invention relates to a process for the production of campesterol, which comprises
[66491] (a) increasing or generating one or more activities selected from the group consisting of phenylacetic acid degradation protein in a non-human organism or a part thereof, preferably a microorganism, a plant cell, a plant or a part thereof, as compared to a corresponding non-transformed wild type non-human organism or a part thereof; and
[66492] (b) growing the non-human organism or a part thereof under conditions which permit the production of campesterol or a composition comprising campesterol in said non-human organism or in the culture medium surrounding said non-human organism.

[66493] Accordingly, the present invention relates to a process for the production of campesterol, which comprises
[66494] (a) increasing or generating one or more activities selected from the group consisting of b1401-protein in a non-human organism or a part thereof, preferably a microorganism, a plant cell, a plant or a part thereof, as compared to a corresponding non-transformed wild type non-human organism or a part thereof; and
[66495] (b) growing the non-human organism or a part thereof under conditions which permit the production of campesterol or a composition comprising campesterol in said non-human organism or in the culture medium surrounding said non-human organism.

[66496] Accordingly, the present invention relates to a process for the production of campesterol, which comprises
[66497] (a) increasing or generating one or more activities selected from the group consisting of lipoprotein precursor in a non-human organism or a part thereof, preferably a microorganism, a plant cell, a plant or a part thereof, as compared to a corresponding non-transformed wild type non-human organism or a part thereof; and
[66498] (b) growing the non-human organism or a part thereof under conditions which permit the production of campesterol or a composition comprising campesterol in said non-human organism or in the culture medium surrounding said non-human organism.

[66499] Accordingly, the present invention relates to a process for the production of beta-sitosterol, which comprises
[66500] (a) increasing or generating one or more activities selected from the group consisting of acid shock protein in a non-human organism or a part thereof, preferably a microorganism, a plant cell, a plant or a part thereof, as compared to a corresponding non-transformed wild type non-human organism or a part thereof; and
[66501] (b) growing the non-human organism or a part thereof under conditions which permit the production of beta-sitosterol or a composition comprising beta-sitosterol in said non-human organism or in the culture medium surrounding said non-human organism.

[66502] Accordingly, the present invention relates to a process for the production of campesterol, which comprises
[66503] (a) increasing or generating one or more activities selected from the group consisting of acid shock protein in a non-human organism or a part thereof, preferably a microorganism, a plant cell, a plant or a part thereof, as compared to a corresponding non-transformed wild type non-human organism or a part thereof; and
[66504] (b) growing the non-human organism or a part thereof under conditions which permit the production of campesterol or a composition comprising campesterol in said non-human organism or in the culture medium surrounding said non-human organism.

[66505] Accordingly, the present invention relates to a process for the production of campesterol, which comprises
[66506] (a) increasing or generating one or more activities selected from the group consisting of B1795-protein in a non-human organism or a part thereof, preferably a microorganism, a plant cell, a plant or a part thereof, as compared to a corresponding non-transformed wild type non-human organism or a part thereof; and
[66507] (b) growing the non-human organism or a part thereof under conditions which permit the production of campesterol or a composition comprising campesterol in said non-human organism or in the culture medium surrounding said non-human organism.

[66508] Accordingly, the present invention relates to a process for the production of campesterol, which comprises
[66509] (a) increasing or generating one or more activities selected from the group consisting of acetyltransferase in a non-human organism or a part thereof, preferably a microorganism, a plant cell, a plant or a part thereof, as compared to a corresponding non-transformed wild type non-human organism or a part thereof; and
[66510] (b) growing the non-human organism or a part thereof under conditions which permit the production of campesterol or a composition comprising campesterol in said non-human organism or in the culture medium surrounding said non-human organism.

[66511] Accordingly, the present invention relates to a process for the production of campesterol, which comprises
[66512] (a) increasing or generating one or more activities selected from the group consisting of b2107-protein in a non-human organism or a part thereof, preferably a microorganism, a plant cell, a plant or a part thereof, as compared to a corresponding non-transformed wild type non-human organism or a part thereof; and
[66513] (b) growing the non-human organism or a part thereof under conditions which permit the production of campesterol or a composition comprising campesterol in said non-human organism or in the culture medium surrounding said non-human organism.

[66514] Accordingly, the present invention relates to a process for the production of campesterol, which comprises
[66515] (a) increasing or generating one or more activities selected from the group consisting of NADH dehydrogenase I chain N in a non-human organism or a part thereof, preferably a microorganism, a plant cell, a plant or a part thereof, as compared to a corresponding non-transformed wild type non-human organism or a part thereof; and
[66516] (b) growing the non-human organism or a part thereof under conditions which permit the production of campesterol or a composition comprising campesterol in said non-human organism or in the culture medium surrounding said non-human organism.

[66517] Accordingly, the present invention relates to a process for the production of campesterol, which comprises
[66518] (a) increasing or generating one or more activities selected from the group consisting of amidophosphoribosyltransferase in a non-human organism or a part thereof, preferably a microorganism, a plant cell, a plant or a part thereof, as compared to a corresponding non-transformed wild type non-human organism or a part thereof; and
[66519] (b) growing the non-human organism or a part thereof under conditions which permit the production of campesterol or a composition comprising campesterol in said non-human organism or in the culture medium surrounding said non-human organism.

[66520] Accordingly, the present invention relates to a process for the production of campesterol, which comprises
[66521] (a) increasing or generating one or more activities selected from the group consisting of b2376-protein in a non-human organism or a part thereof, preferably a microorganism, a plant cell, a plant or a part thereof, as compared to a corresponding non-transformed wild type non-human organism or a part thereof; and
[66522] (b) growing the non-human organism or a part thereof under conditions which permit the production of campesterol or a composition comprising campesterol in said non-human organism or in the culture medium surrounding said non-human organism.

[66523] Accordingly, the present invention relates to a process for the production of campesterol, which comprises
[66524] (a) increasing or generating one or more activities selected from the group consisting of b2399-protein in a non-human organism or a part thereof, preferably a microorganism, a plant cell, a plant or a part thereof, as compared to a corresponding non-transformed wild type non-human organism or a part thereof; and
[66525] (b) growing the non-human organism or a part thereof under conditions which permit the production of campesterol or a composition comprising campesterol in said non-human organism or in the culture medium surrounding said non-human organism.

[66526] Accordingly, the present invention relates to a process for the production of campesterol, which comprises
[66527] (a) increasing or generating one or more activities selected from the group consisting of b2474-protein in a non-human organism or a part thereof, preferably a microorganism, a plant cell, a plant or a part thereof, as compared to a corresponding non-transformed wild type non-human organism or a part thereof; and
[66528] (b) growing the non-human organism or a part thereof under conditions which permit the production of campesterol or a composition comprising campesterol in said non-human organism or in the culture medium surrounding said non-human organism.

[66529] Accordingly, the present invention relates to a process for the production of campesterol, which comprises
[66530] (a) increasing or generating one or more activities selected from the group consisting of permease protein in a non-human organism or a part thereof, preferably a microorganism, a plant cell, a plant or a part thereof, as compared to a corresponding non-transformed wild type non-human organism or a part thereof; and
[66531] (b) growing the non-human organism or a part thereof under conditions which permit the production of campesterol or a composition comprising campesterol in said non-human organism or in the culture medium surrounding said non-human organism.

[66532] Accordingly, the present invention relates to a process for the production of campesterol, which comprises
[66533] (a) increasing or generating one or more activities selected from the group consisting of b2513-protein in a non-human organism or a part thereof, preferably a microorganism, a plant cell, a plant or a part thereof, as compared to a corresponding non-transformed wild type non-human organism or a part thereof; and
[66534] (b) growing the non-human organism or a part thereof under conditions which permit the production of campesterol or a composition comprising campesterol in said non-human organism or in the culture medium surrounding said non-human organism.

[66535] Accordingly, the present invention relates to a process for the production of beta-sitosterol, which comprises
[66536] (a) increasing or generating one or more activities selected from the group consisting of putative transport system permease protein in a non-human organism or a part thereof, preferably a microorganism, a plant cell, a plant or a part thereof, as compared to a corresponding non-transformed wild type non-human organism or a part thereof; and
[66537] (b) growing the non-human organism or a part thereof under conditions which permit the production of beta-sitosterol or a composition comprising beta-sitosterol in said non-human organism or in the culture medium surrounding said non-human organism.

[66538] Accordingly, the present invention relates to a process for the production of campesterol, which comprises
[66539] (a) increasing or generating one or more activities selected from the group consisting of putative transport system permease protein in a non-human organism or a part thereof, preferably a microorganism, a plant cell, a plant or a part thereof, as compared to a corresponding non-transformed wild type non-human organism or a part thereof; and
[66540] (b) growing the non-human organism or a part thereof under conditions which permit the production of campesterol or a composition comprising campesterol in said non-human organism or in the culture medium surrounding said non-human organism.

[66541] Accordingly, the present invention relates to a process for the production of campesterol, which comprises
[66542] (a) increasing or generating one or more activities selected from the group consisting of b2654-protein in a non-human organism or a part thereof, preferably a microorganism, a plant cell, a plant or a part thereof, as compared to a corresponding non-transformed wild type non-human organism or a part thereof; and
[66543] (b) growing the non-human organism or a part thereof under conditions which permit the production of campesterol or a composition comprising campesterol in said non-human organism or in the culture medium surrounding said non-human organism.

[66544] Accordingly, the present invention relates to a process for the production of campesterol, which comprises
[66545] (a) increasing or generating one or more activities selected from the group consisting of murein transglycosylase in a non-human organism or a part thereof, preferably a microorganism, a plant cell, a plant or a part thereof, as compared to a corresponding non-transformed wild type non-human organism or a part thereof; and
[66546] (b) growing the non-human organism or a part thereof under conditions which permit the production of campesterol or a composition comprising campesterol in said non-human organism or in the culture medium surrounding said non-human organism.

[66547] Accordingly, the present invention relates to a process for the production of campesterol, which comprises
[66548] (a) increasing or generating one or more activities selected from the group consisting of oxidoreductase in a non-human organism or a part thereof, preferably a microorganism, a plant cell, a plant or a part thereof, as compared to a corresponding non-transformed wild type non-human organism or a part thereof; and
[66549] (b) growing the non-human organism or a part thereof under conditions which permit the production of campesterol or a composition comprising campesterol in said non-human organism or in the culture medium surrounding said non-human organism.

[66550] Accordingly, the present invention relates to a process for the production of campesterol, which comprises
[66551] (a) increasing or generating one or more activities selected from the group consisting of xanthine dehydrogenase in a non-human organism or a part thereof, preferably a microorganism, a plant cell, a plant or a part thereof, as compared to a corresponding non-transformed wild type non-human organism or a part thereof; and
[66552] (b) growing the non-human organism or a part thereof under conditions which permit the production of campesterol or a composition comprising campesterol in said non-human organism or in the culture medium surrounding said non-human organism.

[66553] Accordingly, the present invention relates to a process for the production of campesterol, which comprises
[66554] (a) increasing or generating one or more activities selected from the group consisting of b3151-protein in a non-human organism or a part thereof, preferably a microorganism, a plant cell, a plant or a part thereof, as compared to a corresponding non-transformed wild type non-human organism or a part thereof; and
[66555] (b) growing the non-human organism or a part thereof under conditions which permit the production of campesterol or a composition comprising campesterol in said non-human organism or in the culture medium surrounding said non-human organism.

[66556] Accordingly, the present invention relates to a process for the production of beta-sitosterol, which comprises
[66557] (a) increasing or generating one or more activities selected from the group consisting of methyltransferase in a non-human organism or a part thereof, preferably a microorganism, a plant cell, a plant or a part thereof, as compared to a corresponding non-transformed wild type non-human organism or a part thereof; and
[66558] (b) growing the non-human organism or a part thereof under conditions which permit the production of beta-sitosterol or a composition comprising beta-sitosterol in said non-human organism or in the culture medium surrounding said non-human organism.

[66559] Accordingly, the present invention relates to a process for the production of campesterol, which comprises
[66560] (a) increasing or generating one or more activities selected from the group consisting of threonine dehydrogenase in a non-human organism or a part thereof, preferably a microorganism, a plant cell, a plant or a part thereof, as compared to a corresponding non-transformed wild type non-human organism or a part thereof; and
[66561] (b) growing the non-human organism or a part thereof under conditions which permit the production of campesterol or a composition comprising campesterol in said non-human organism or in the culture medium surrounding said non-human organism.

[66562] Accordingly, the present invention relates to a process for the production of beta-sitosterol, which comprises
[66563] (a) increasing or generating one or more activities selected from the group consisting of b3989-protein in a non-human organism or a part thereof, preferably a microorganism, a plant cell, a plant or a part thereof, as compared to a corresponding non-transformed wild type non-human organism or a part thereof; and
[66564] (b) growing the non-human organism or a part thereof under conditions which permit the production of beta-sitosterol or a composition comprising beta-sitosterol in said non-human organism or in the culture medium surrounding said non-human organism.

[66565] Accordingly, the present invention relates to a process for the production of campesterol, which comprises
[66566] (a) increasing or generating one or more activities selected from the group consisting of b3989-protein in a non-human organism or a part thereof, preferably a microorganism, a plant cell, a plant or a part thereof, as compared to a corresponding non-transformed wild type non-human organism or a part thereof; and
[66567] (b) growing the non-human organism or a part thereof under conditions which permit the production of campesterol or a composition comprising campesterol in said non-human organism or in the culture medium surrounding said non-human organism.

[66568] Accordingly, the present invention relates to a process for the production of beta-sitosterol, which comprises
[66569] (a) increasing or generating one or more activities selected from the group consisting of b4029-protein in a non-human organism or a part thereof, preferably a microorganism, a plant cell, a plant or a part thereof, as compared to a corresponding non-transformed wild type non-human organism or a part thereof; and
[66570] (b) growing the non-human organism or a part thereof under conditions which permit the production of beta-sitosterol or a composition comprising beta-sitosterol in said non-human organism or in the culture medium surrounding said non-human organism.

[66571] Accordingly, the present invention relates to a process for the production of stigmasterol, which comprises
[66572] (a) increasing or generating one or more activities selected from the group consisting of b4029-protein in a non-human organism or a part thereof, preferably a microorganism, a plant cell, a plant or a part thereof, as compared to a corresponding non-transformed wild type non-human organism or a part thereof; and
[66573] (b) growing the non-human organism or a part thereof under conditions which permit the production of stigmasterol or a composition comprising stigmasterol in said non-human organism or in the culture medium surrounding said non-human organism.

[66574] Accordingly, the present invention relates to a process for the production of beta-sitosterol, which comprises
[66575] (a) increasing or generating one or more activities selected from the group consisting of b4205-protein in a non-human organism or a part thereof, preferably a microorganism, a plant cell, a plant or a part thereof, as compared to a corresponding non-transformed wild type non-human organism or a part thereof; and
[66576] (b) growing the non-human organism or a part thereof under conditions which permit the production of beta-sitosterol or a composition comprising beta-sitosterol in said non-human organism or in the culture medium surrounding said non-human organism.

[66577] Accordingly, the present invention relates to a process for the production of beta-sitosterol, which comprises
[66578] (a) increasing or generating one or more activities selected from the group consisting of glutaredoxin in a non-human organism or a part thereof, preferably a microorganism, a plant cell, a plant or a part thereof, as compared to a corresponding non-transformed wild type non-human organism or a part thereof; and
[66579] (b) growing the non-human organism or a part thereof under conditions which permit the production of beta-sitosterol or a composition comprising beta-sitosterol in said non-human organism or in the culture medium surrounding said non-human organism.

[66580] Accordingly, the present invention relates to a process for the production of campesterol, which comprises
[66581] (a) increasing or generating one or more activities selected from the group consisting of glutaredoxin in a non-human organism or a part thereof, preferably a microorganism, a plant cell, a plant or a part thereof, as compared to a corresponding non-transformed wild type non-human organism or a part thereof; and
[66582] (b) growing the non-human organism or a part thereof under conditions which permit the production of campesterol or a composition comprising campesterol in said non-human organism or in the culture medium surrounding said non-human organism.

[66583] Accordingly, the present invention relates to a process for the production of beta-sitosterol, which comprises
[66584] (a) increasing or generating one or more activities selected from the group consisting of transcription factor in a non-human organism or a part thereof, preferably a microorganism, a plant cell, a plant or a part thereof, as compared to a corresponding non-transformed wild type non-human organism or a part thereof; and
[66585] (b) growing the non-human organism or a part thereof under conditions which permit the production of beta-sitosterol or a composition comprising beta-sitosterol in said non-human organism or in the culture medium surrounding said non-human organism.

[66586] Accordingly, the present invention relates to a process for the production of campesterol, which comprises
[66587] (a) increasing or generating one or more activities selected from the group consisting of transcription factor in a non-human organism or a part thereof, preferably a microorganism, a plant cell, a plant or a part thereof, as compared to a corresponding non-transformed wild type non-human organism or a part thereof; and
[66588] (b) growing the non-human organism or a part thereof under conditions which permit the production of campesterol or a composition comprising campesterol in said non-human organism or in the culture medium surrounding said non-human organism.

[66589] Accordingly, the present invention relates to a process for the production of beta-sitosterol, which comprises
[66590] (a) increasing or generating one or more activities selected from the group consisting of cyclin D in a non-human organism or a part thereof, preferably a microorganism, a plant cell, a plant or a part thereof, as compared to a corresponding non-transformed wild type non-human organism or a part thereof; and
[66591] (b) growing the non-human organism or a part thereof under conditions which permit the production of beta-sitosterol or a composition comprising beta-sitosterol in said non-human organism or in the culture medium surrounding said non-human organism.

[66592] Accordingly, the present invention relates to a process for the production of campesterol, which comprises
[66593] (a) increasing or generating one or more activities selected from the group consisting of cyclin D in a non-human organism or a part thereof, preferably a microorganism, a plant cell, a plant or a part thereof, as compared to a corresponding non-transformed wild type non-human organism or a part thereof; and
[66594] (b) growing the non-human organism or a part thereof under conditions which permit the production of campesterol or a composition comprising campesterol in said non-human organism or in the culture medium surrounding said non-human organism.

[66595] Accordingly, the present invention relates to a process for the production of campesterol, which comprises
[66596] (a) increasing or generating one or more activities selected from the group consisting of sll0406-protein in a non-human organism or a part thereof, preferably a microorganism, a plant cell, a plant or a part thereof, as compared to a corresponding non-transformed wild type non-human organism or a part thereof; and
[66597] (b) growing the non-human organism or a part thereof under conditions which permit the production of campesterol or a composition comprising campesterol in said non-human organism or in the culture medium surrounding said non-human organism.

[66598] Accordingly, the present invention relates to a process for the production of campesterol, which comprises
[66599] (a) increasing or generating one or more activities selected from the group consisting of cation transport protein in a non-human organism or a part thereof, preferably a microorganism, a plant cell, a plant or a part thereof, as compared to a corresponding non-transformed wild type non-human organism or a part thereof; and
[66600] (b) growing the non-human organism or a part thereof under conditions which permit the production of campesterol or a composition comprising campesterol in said non-human organism or in the culture medium surrounding said non-human organism.

[66601] Accordingly, the present invention relates to a process for the production of beta-sitosterol, which comprises
[66602] (a) increasing or generating one or more activities selected from the group consisting of CTP synthetase in a non-human organism or a part thereof, preferably a microorganism, a plant cell, a plant or a part thereof, as compared to a corresponding non-transformed wild type non-human organism or a part thereof; and
[66603] (b) growing the non-human organism or a part thereof under conditions which permit the production of beta-sitosterol or a composition comprising beta-sitosterol in said non-human organism or in the culture medium surrounding said non-human organism.

[66604] Accordingly, the present invention relates to a process for the production of campesterol, which comprises
[66605] (a) increasing or generating one or more activities selected from the group consisting of CTP synthetase in a non-human organism or a part thereof, preferably a microorganism, a plant cell, a plant or a part thereof, as compared to a corresponding non-transformed wild type non-human organism or a part thereof; and
[66606] (b) growing the non-human organism or a part thereof under conditions which permit the production of campesterol or a composition comprising campesterol in said non-human organism or in the culture medium surrounding said non-human organism.

[66607] Accordingly, the present invention relates to a process for the production of beta-sitosterol, which comprises
[66608] (a) increasing or generating one or more activities selected from the group consisting of phosphoribulokinase in a non-human organism or a part thereof, preferably a microorganism, a plant cell, a plant or a part thereof, as compared to a corresponding non-transformed wild type non-human organism or a part thereof; and
[66609] (b) growing the non-human organism or a part thereof under conditions which permit the production of beta-sitosterol or a composition comprising beta-sitosterol in said non-human organism or in the culture medium surrounding said non-human organism.

[66610] Accordingly, the present invention relates to a process for the production of beta-sitosterol, which comprises
[66611] (a) increasing or generating one or more activities selected from the group consisting of ABC metal ion transporter substrate-binding protein in a non-human organism or a part thereof, preferably a microorganism, a plant cell, a plant or a part thereof, as compared to a corresponding non-transformed wild type non-human organism or a part thereof; and
[66612] (b) growing the non-human organism or a part thereof under conditions which permit the production of beta-sitosterol or a composition comprising beta-sitosterol in said non-human organism or in the culture medium surrounding said non-human organism.

[66613] Accordingly, the present invention relates to a process for the production of campesterol, which comprises
[66614] (a) increasing or generating one or more activities selected from the group consisting of sll1761-protein in a non-human organism or a part thereof, preferably a microorganism, a plant cell, a plant or a part thereof, as compared to a corresponding non-transformed wild type non-human organism or a part thereof; and
[66615] (b) growing the non-human organism or a part thereof under conditions which permit the production of campesterol or a composition comprising campesterol in said non-human organism or in the culture medium surrounding said non-human organism.

[66616] Accordingly, the present invention relates to a process for the production of beta-sitosterol, which comprises
[66617] (a) increasing or generating one or more activities selected from the group consisting of acyl transferase in a non-human organism or a part thereof, preferably a microorganism, a plant cell, a plant or a part thereof, as compared to a corresponding non-transformed wild type non-human organism or a part thereof; and
[66618] (b) growing the non-human organism or a part thereof under conditions which permit the production of beta-sitosterol or a composition comprising beta-sitosterol in said non-human organism or in the culture medium surrounding said non-human organism.

[66619] Accordingly, the present invention relates to a process for the production of campesterol, which comprises
[66620] (a) increasing or generating one or more activities selected from the group consisting of cation-transporting ATPase in a non-human organism or a part thereof, preferably a microorganism, a plant cell, a plant or a part thereof, as compared to a corresponding non-transformed wild type non-human organism or a part thereof; and
[66621] (b) growing the non-human organism or a part thereof under conditions which permit the production of campesterol or a composition comprising campesterol in said non-human organism or in the culture medium surrounding said non-human organism.

[66622] Accordingly, the present invention relates to a process for the production of beta-sitosterol, which comprises
[66623] (a) increasing or generating one or more activities selected from the group consisting of oxidoreductase in a non-human organism or a part thereof, preferably a microorganism, a plant cell, a plant or a part thereof, as compared to a corresponding non-transformed wild type non-human organism or a part thereof; and
[66624] (b) growing the non-human organism or a part thereof under conditions which permit the production of beta-sitosterol or a composition comprising beta-sitosterol in said non-human organism or in the culture medium surrounding said non-human organism.

[66625] Accordingly, the present invention relates to a process for the production of campesterol, which comprises
[66626] (a) increasing or generating one or more activities selected from the group consisting of permease protein of ABC transporter in a non-human organism or a part thereof, preferably a microorganism, a plant cell, a plant or a part thereof, as compared to a corresponding non-transformed wild type non-human organism or a part thereof; and
[66627] (b) growing the non-human organism or a part thereof under conditions which permit the production of campesterol or a composition comprising campesterol in said non-human organism or in the culture medium surrounding said non-human organism.

[66628] Accordingly, the present invention relates to a process for the production of campesterol, which comprises
[66629] (a) increasing or generating one or more activities selected from the group consisting of tryptophan synthase alpha chain in a non-human organism or a part thereof, preferably a microorganism, a plant cell, a plant or a part thereof, as compared to a corresponding non-transformed wild type non-human organism or a part thereof; and
[66630] (b) growing the non-human organism or a part thereof under conditions which permit the production of campesterol or a composition comprising campesterol in said non-human organism or in the culture medium surrounding said non-human organism.

[66631] Accordingly, the present invention relates to a process for the production of beta-sitosterol, which comprises
[66632] (a) increasing or generating one or more activities selected from the group consisting of multiple antibiotic resistance protein in a non-human organism or a part thereof, preferably a microorganism, a plant cell, a plant or a part thereof, as compared to a corresponding non-transformed wild type non-human organism or a part thereof; and
[66633] (b) growing the non-human organism or a part thereof under conditions which permit the production of beta-sitosterol or a composition comprising beta-sitosterol in said non-human organism or in the culture medium surrounding said non-human organism.

[66634] Accordingly, the present invention relates to a process for the production of campesterol, which comprises
[66635] (a) increasing or generating one or more activities selected from the group consisting of multiple antibiotic resistance protein in a non-human organism or a part thereof, preferably a microorganism, a plant cell, a plant or a part thereof, as compared to a corresponding non-transformed wild type non-human organism or a part thereof; and
[66636] (b) growing the non-human organism or a part thereof under conditions which permit the production of campesterol or a composition comprising campesterol in said non-human organism or in the culture medium surrounding said non-human organism.

[66637] Accordingly, the present invention relates to a process for the production of beta-sitosterol, which comprises
[66638] (a) increasing or generating one or more activities selected from the group consisting of TTC1386-protein in a non-human organism or a part thereof, preferably a microorganism, a plant cell, a plant or a part thereof, as compared to a corresponding non-transformed wild type non-human organism or a part thereof; and
[66639] (b) growing the non-human organism or a part thereof under conditions which permit the production of beta-sitosterol or a composition comprising beta-sitosterol in said non-human organism or in the culture medium surrounding said non-human organism.

[66640] Accordingly, the present invention relates to a process for the production of campesterol, which comprises
[66641] (a) increasing or generating one or more activities selected from the group consisting of TTC1386-protein in a non-human organism or a part thereof, preferably a microorganism, a plant cell, a plant or a part thereof, as compared to a corresponding non-transformed wild type non-human organism or a part thereof; and
[66642] (b) growing the non-human organism or a part thereof under conditions which permit the production of campesterol or a composition comprising campesterol in said non-human organism or in the culture medium surrounding said non-human organism.

[66643] Accordingly, the present invention relates to a process for the production of campesterol, which comprises
[66644] (a) increasing or generating one or more activities selected from the group consisting of homocitrate synthase in a non-human organism or a part thereof, preferably a microorganism, a plant cell, a plant or a part thereof, as compared to a corresponding non-transformed wild type non-human organism or a part thereof; and
[66645] (b) growing the non-human organism or a part thereof under conditions which permit the production of campesterol or a composition comprising campesterol in said non-human organism or in the culture medium surrounding said non-human organism.

[66646] Accordingly, the present invention relates to a process for the production of campesterol, which comprises
[66647] (a) increasing or generating one or more activities selected from the group consisting of homocitrate synthase in a non-human organism or a part thereof, preferably a microorganism, a plant cell, a plant or a part thereof, as compared to a corresponding non-transformed wild type non-human organism or a part thereof; and
[66648] (b) growing the non-human organism or a part thereof under conditions which permit the production of campesterol or a composition comprising campesterol in said non-human organism or in the culture medium surrounding said non-human organism.

[66649] Accordingly, the present invention relates to a process for the production of campesterol, which comprises
[66650] (a) increasing or generating one or more activities selected from the group consisting of cyclin in a non-human organism or a part thereof, preferably a microorganism, a plant cell, a plant or a part thereof, as compared to a corresponding non-transformed wild type non-human organism or a part thereof; and
[66651] (b) growing the non-human organism or a part thereof under conditions which permit the production of campesterol or a composition comprising campesterol in said non-human organism or in the culture medium surrounding said non-human organism.

[66652] Accordingly, the present invention relates to a process for the production of campesterol, which comprises
[66653] (a) increasing or generating one or more activities selected from the group consisting of ydl235c-protein in a non-human organism or a part thereof, preferably a microorganism, a plant cell, a plant or a part thereof, as compared to a corresponding non-transformed wild type non-human organism or a part thereof; and
[66654] (b) growing the non-human organism or a part thereof under conditions which permit the production of campesterol or a composition comprising campesterol in said non-human organism or in the culture medium surrounding said non-human organism.

[66655] Accordingly, the present invention relates to a process for the production of campesterol, which comprises
[66656] (a) increasing or generating one or more activities selected from the group consisting of oxidoreductase in a non-human organism or a part thereof, preferably a microorganism, a plant cell, a plant or a part thereof, as compared to a corresponding non-transformed wild type non-human organism or a part thereof; and
[66657] (b) growing the non-human organism or a part thereof under conditions which permit the production of campesterol or a composition comprising campesterol in said non-human organism or in the culture medium surrounding said non-human organism.

[66658] Accordingly, the present invention relates to a process for the production of campesterol, which comprises
[66659] (a) increasing or generating one or more activities selected from the group consisting of polygalacturonase in a non-human organism or a part thereof, preferably a microorganism, a plant cell, a plant or a part thereof, as compared to a corresponding non-transformed wild type non-human organism or a part thereof; and
[66660] (b) growing the non-human organism or a part thereof under conditions which permit the production of campesterol or a composition comprising campesterol in said non-human organism or in the culture medium surrounding said non-human organism.

[66661] Accordingly, the present invention relates to a process for the production of campesterol, which comprises
[66662] (a) increasing or generating one or more activities selected from the group consisting of ynl321w-protein in a non-human organism or a part thereof, preferably a microorganism, a plant cell, a plant or a part thereof, as compared to a corresponding non-transformed wild type non-human organism or a part thereof; and
[66663] (b) growing the non-human organism or a part thereof under conditions which permit the production of campesterol or a composition comprising campesterol in said non-human organism or in the culture medium surrounding said non-human organism.

[66664] Accordingly, the present invention relates to a process for the production of beta-sitosterol, which comprises
[66665] (a) increasing or generating one or more activities selected from the group consisting of acetyl-CoA acetyltransferase in a non-human organism or a part thereof, preferably a microorganism organism, a plant cell, a plant or a part thereof, as compared to a corresponding non-transformed wild type non-human organism or a part thereof; and
[66666] (b) growing the non-human organism or a part thereof under conditions which permit the production of beta-sitosterol or a composition comprising beta-sitosterol in said non-human organism or in the culture medium surrounding said non-human organism.

[66667] Accordingly, the present invention relates to a process for the production of beta-sitosterol, which comprises
[66668] (a) increasing or generating one or more activities selected from the group consisting of ypr170c-protein in a non-human organism or a part thereof, preferably a microorganism, a plant cell, a plant or a part thereof, as compared to a corresponding non-transformed wild type non-human organism or a part thereof; and
[66669] (b) growing the non-human organism or a part thereof under conditions which permit the production of beta-sitosterol or a composition comprising beta-sitosterol in said non-human organism or in the culture medium surrounding said non-human organism.

[66670] Accordingly, the present invention relates to a process for the production of campesterol, which comprises
[66671] (a) increasing or generating one or more activities selected from the group consisting of glucose-6-phosphate 1-dehydrogenase in a non-human organism or a part thereof, preferably a microorganism, a plant cell, a plant or a part thereof, as compared to a corresponding non-transformed wild type non-human organism or a part thereof; and
[66672] (b) growing the non-human organism or a part thereof under conditions which permit the production of campesterol or a composition comprising campesterol in said non-human organism or in the culture medium surrounding said non-human organism.

[66673] An embodiment of the present invention relates to a process for the production of beta-sitosterol, which comprises
[66674] (a1) increasing or generating the activity of a polypeptide comprising a polypeptide as depicted in a respective line in column 5 or 8 of Table II, application no. 14, or a homolog or a fragment thereof, a consensus sequence or at least one polypeptide motif as depicted in the respective line in column 8 of Table IV, application no. 14, whereby the respective line disclose in column 7 the fine chemical beta-sitosterol; or
[66675] (a2) increasing or generating the activity of an expression product of one or more nucleic acid molecule(s) comprising a polynucleotide as depicted in the respective line in column 5 or 8 of Table I, application no. 14, preferably the coding region thereof, or a homolog or a fragment thereof, whereby the respective line disclose in column 7 the fine chemical beta-sitosterol; or
[66676] (a3) increasing or generating the activity of a functional equivalent of (a1) or (a2); in a non-human organism or a part thereof; preferably a microorganism, a plant cell, a plant or a part thereof, as compared to a corresponding non-transformed wild type non-human organism or a part thereof; and
[66677] (b) growing the non-human organism under conditions which permit the production of beta-sitosterol or a composition comprising beta-sitosterol in said non-human organism or in the culture medium surrounding said non-human organism.

[66678] An embodiment of the present invention relates to a process for the production of campesterol, which comprises
[66679] (a1) increasing or generating the activity of a polypeptide comprising a polypeptide as depicted in a respective line in column 5 or 8 of Table II, application no. 14, or a homolog or a fragment thereof, a consensus sequence or at least one polypeptide motif as depicted in the respective line in column 8 of Table IV, application no. 14, whereby the respective line disclose in column 7 the fine chemical campesterol; or
[66680] (a2) increasing or generating the activity of an expression product of one or more nucleic acid molecule(s) comprising a polynucleotide as depicted in the respective line in column 5 or 8 of Table I, application no. 14, preferably the coding region thereof, or a homolog or a fragment thereof, whereby the respective line disclose in column 7 the fine chemical campesterol; or
[66681] (a3) increasing or generating the activity of a functional equivalent of (a1) or (a2); in a non-human organism or a part thereof; preferably a microorganism, a plant cell, a plant or a part thereof, as compared to a corresponding non-transformed wild type non-human organism or a part thereof; and
[66682] (b) growing the non-human organism under conditions which permit the production of campesterol or a composition comprising campesterol in said non-human organism or in the culture medium surrounding said non-human organism.

[66683] An embodiment of the present invention relates to a process for the production of stigmasterol, which comprises
[66684] (a1) increasing or generating the activity of a polypeptide comprising a polypeptide as depicted in a respective line in column 5 or 8 of Table II, application no. 14, or a homolog or a fragment thereof, a consensus sequence or at least one polypeptide motif as depicted in the respective line in column 8 of Table IV, application no. 14, whereby the respective line disclose in column 7 the fine chemical stigmasterol; or
[66685] (a2) increasing or generating the activity of an expression product of one or more nucleic acid molecule(s) comprising a polynucleotide as depicted in the respective line in column 5 or 8 of Table I, application no. 14, preferably the coding region thereof, or a homolog or a fragment thereof, whereby the respective line disclose in column 7 the fine chemical stigmasterol; or
[66686] (a3) increasing or generating the activity of a functional equivalent of (a1) or (a2); in a non-human organism or a part thereof; preferably a microorganism, a plant cell, a plant or a part thereof, as compared to a corresponding non-transformed wild type non-human organism or a part thereof; and
[66687] (b) growing the non-human organism under conditions which permit the production of stigmasterol or a composition comprising stigmasterol in said non-human organism or in the culture medium surrounding said non-human organism.

[66688] Accordingly, the increase or generation of one or more said activities is for example conferred by one or more expression products of said nucleic acid molecule, e.g. proteins. Accordingly, in the present invention described above, the increase or generation of one or more said activities is for example conferred by one or more protein(s) each comprising a polypeptide selected from the group as depicted in Table II, application no. 14, column 5 and 8, or a homolog or a fragment thereof.

[66689] The process of the invention comprises in one embodiment the following steps:
[66690] (i) increasing or generating of the expression of; and/or
[66691] (ii) increasing or generating the expression of an expression product of; and/or
[66692] (iii) increasing or generating one or more activities of an expression product encoded by;
   at least one nucleic acid molecule (in the following “Fine Chemical Related Protein (FCRP)”-encoding gene or “FCRP”-gene) comprising a nucleic acid molecule selected from the group consisting of:
[66693] (a) a nucleic acid molecule encoding the polypeptide shown in column 5 or 8 of Table II, preferably Table II B, application no. 14, or a homolog or a fragment thereof;
[66694] (b) a nucleic acid molecule shown in column 5 or 8 of Table I, preferably Table I B, application no. 14, or a homolog or a fragment thereof (preferably the coding region thereof);
[66695] (c) a nucleic acid molecule, which, as a result of the degeneracy of the genetic code, can be derived from a polypeptide sequence depicted in column 5 or 8 of Table II, preferably Table II B, application no. 14;
[66696] (d) a nucleic acid molecule having at least 30%, in particular at least 50%, 60%, 70%, 80%, 85%, 90%, 95%, 97%, 98%, 99% or 99.5% identity with the nucleic acid molecule sequence of a polynucleotide comprising the nucleic acid molecule shown in column 5 or 8 of Table I, preferably Table I B, application no. 14, or the coding region thereof;
[66697] (e) a nucleic acid molecule encoding a polypeptide having at least 30%, in particular 50%, 60%, 70%, 80%, 85%, 90%, 95%, 97%, 98%, 99% or 99.5% identity with the amino acid sequence of the polypeptide encoded by the nucleic acid molecule of (a), (b), (c) or (d),
[66698] (f) a nucleic acid molecule which hybridizes with a nucleic acid molecule of (a), (b), (c), (d) or (e) under stringent hybridization conditions;
[66699] (g) a nucleic acid molecule encoding a polypeptide which can be isolated with the aid of monoclonal or polyclonal antibodies made against a polypeptide encoded by one of the nucleic acid molecules of (a), (b), (c), (d), (e) or (f);
[66700] (h) a nucleic acid molecule encoding a polypeptide comprising the consensus sequence or one or more polypeptide motifs as shown in column 8 of Table IV, application no. 14;
[66701] (i) a nucleic acid molecule encoding a polypeptide having the activity represented by a respective protein as depicted in column 5 of Table II, application no. 14;
[66702] (j) a nucleic acid molecule which comprises a polynucleotide, which is obtained by amplifying a cDNA library or a genomic library using the primers as depicted in column 8 of Table III, application no. 14; and
[66703] (k) a nucleic acid molecule which is obtainable by screening a suitable nucleic acid library, especially a cDNA library and/or a genomic library, under stringent hybridization conditions with a probe comprising a complementary sequence of a nucleic acid molecule of (a), (b), (c), (d), (e), (f), (g), (h), (i) or (j) or with a fragment thereof, having at least 15 nt, preferably 20 nt, 30 nt, 50 nt, 100 nt, 200 nt, 500 nt, 1000 nt, 1500 nt, 2000 nt or 3000 nt of a nucleic acid molecule complementary to a nucleic acid molecule sequence characterized in (a), (b), (c), (d), (e), (f), (g), (h), (i) or (j);
[66704] or a nucleic acid molecule comprising a sequence which is complementary thereto.
   (All the references to Tables I to IV are references to the corresponding lines of Tables I to IV.)

[66705] In a preferred embodiment thereof said nucleic acid molecule encodes a polypeptide which has the activity of the polypeptide represented by a protein comprising a polypeptide as depicted in the corresponding hit in column 5 of Table II, application no. 14.

[66706] In another preferred embodiment thereof said nucleic acid molecule confers a generation or an increase of the respective fine chemical in a non-human organism or a part thereof as compared to a corresponding wild-type non-human organism or part thereof.

[66707] In another preferred embodiment thereof said nucleic acid molecule encodes a polypeptide which has the activity of the polypeptide represented by a protein as depicted in the corresponding hit in column 5 of Table II, application no. 14, and confers a generation or an increase of the respective fine chemical in a non-human organism or a part thereof as compared to a corresponding wild-type non-human organism or part thereof.

[66708] Accordingly, the genes of the present invention or used in accordance with the present invention, which respectively encode a protein having an activity of 2-oxoglutarate dehydrogenase E1 subunit, ABC metal ion transporter substrate-binding protein, acetyl-CoA acetyltransferase, acetyltransferase, acid shock protein, acyl transferase, amidophosphoribosyltransferase, ankyrin repeat family protein, ATP-binding component of a transport system, b1401-protein, B1795-protein, b2107-protein, b2376-protein, b2399-protein, b2474-protein, b2513-protein, b2654-protein, b3151-protein, b3989-protein, b4029-protein, b4205-protein, C-4 sterol methyl oxidase, calcium-dependent protein kinase, cation transport protein, cationtransporting ATPase, CTP synthase, CTP synthetase, cyclin, cyclin D, eukaryotic translation initiation factor 5, glucose dehydrogenase, glucose-6-phosphate 1-dehydrogenase, glutaredoxin, homocitrate synthase, hydrolase, lipoprotein precursor, L-ribulose-5-phosphate 4-epimerase, membrane transport protein, methyltransferase, monothiol glutaredoxin, multidrug resistance protein, multiple antibiotic resistance protein, murein transglycosylase, NADH dehydrogenase I chain N, oxidoreductase, permease protein, permease protein of ABC transporter, phenylacetic acid degradation protein, phosphoribulokinase, polygalacturonase, protein kinase, protein phosphatase, putative transport system permease protein, putrescine transport system permease protein, recombinase A, sec-independent protein translocase, sll0406-protein, sll1761-protein, sodium/proton antiporter, sterol desaturase, threonine dehydrogenase, threonine synthase, transcription factor, tryptophan synthase alpha chain, TTC1386-protein, xanthine dehydrogenase, ydl235c-protein, ynl321w-protein, or ypr170c-protein, which respectively encode a protein comprising a polypeptide encoded by a nucleic acid sequence as shown in Table I, application no. 14, column 5 or 8, (preferably the coding region thereof), or a homolog or a fragment thereof, which respectively encode a protein comprising a polypeptide as depicted in Table II, application no. 14, column 5 or 8, or a homolg or a fragment thereof, and/or which respectively can be amplified with the primer set shown in Table III, application no. 14, column 8, are also referred to as “FCRP genes”.

[66709] Proteins or polypeptides encoded by “FCRP-genes” are referred to as “Fine Chemical Related Proteins” or “FCRP”. For the purposes of the description of the present invention, the respective protein having an activity of 2-oxoglutarate dehydrogenase E1subunit, ABC metal ion transporter substrate-binding protein, acetyl-CoA acetyltransferase, acetyltransferase, acid shock protein, acyl transferase, amidophosphoribosyltransferase, ankyrin repeat family protein, ATP-binding component of a transport system, b1401-protein, B1795-protein, b2107-protein, b2376-protein, b2399-protein, b2474-protein, b2513-protein, b2654-protein, b3151-protein, b3989-protein, b4029-protein, b4205-protein, C-4 sterol methyl oxidase, calcium-dependent protein kinase, cation transport protein, cation-transporting ATPase, CTP synthase, CTP synthetase, cyclin, cyclin D, eukaryotic translation initiation factor 5, glucose dehydrogenase, glucose-6-phosphate 1-dehydrogenase, glutaredoxin, homocitrate synthase, hydrolase, lipoprotein precursor, L-ribulose-5-phosphate 4-epimerase, membrane transport protein, methyltransferase, monothiol glutaredoxin, multidrug resistance protein, multiple antibiotic resistance protein, murein transglycosylase, NADH dehydrogenasel chain N, oxidoreductase, permease protein, permease protein of ABC transporter, phenylacetic acid degradation protein, phosphoribulokinase, polygalacturonase, protein kinase, protein phosphatase, putative transport system permease protein, putrescine transport system permease protein, recombinase A, sec-independent protein translocase, sll0406-protein, sll1761-protein, sodium/proton antiporter, sterol desaturase, threonine dehydrogenase, threonine synthase, transcription factor, tryptophan synthase alpha chain, TTC1386-protein, xanthine dehydrogenase, ydl235c-protein, ynl321w-protein, or ypr170c-protein, the respective protein comprising a polypeptide encoded by one or more respective nucleic acid sequences as shown in Table I, application no. 14, column 5 or 8, (preferably the coding region thereof), or a homolog or fragment thereof, the respective protein comprising a respective polypeptide as depicted in Table II, application no. 14, column 5 or 8, or a homolog or fragment thereof, the respective protein comprising a sequence corresponding to the consensus sequence as shown in Table IV, application no. 14, column 8, and/or the respective protein comprising at least one polypeptide motif as shown in Table IV, application no. 14, column 8 is also referred to as Fine Chemical Related Protein” or “FCRP”.

[66710] Thus, in one embodiment, the present invention provides a process of the production of beta-sitosterol, campesterol, and/or stigmasterol, by increasing or generating one or more activities, especially selected from the group consisting of 2-oxoglutarate dehydrogenase E1subunit, ABC metal ion transporter substrate-binding protein, acetyl-CoA acetyltransferase, acetyltransferase, acid shock protein, acyl transferase, amidophosphoribosyltransferase, ankyrin repeat family protein, ATP-binding component of a transport system, b1401-protein, B1795-protein, b2107-protein, b2376-protein, b2399-protein, b2474-protein, b2513-protein, b2654-protein, b3151-protein, b3989-protein, b4029-protein, b4205-protein, C-4 sterol methyl oxidase, calcium-dependent protein kinase, cation transport protein, cation-transporting ATPase, CTP synthase, CTP synthetase, cyclin, cyclin D, eukaryotic translation initiation factor 5, glucose dehydrogenase, glucose-6-phosphate 1-dehydrogenase, glutaredoxin, homocitrate synthase, hydrolase, lipoprotein precursor, L-ribulose-5-phosphate 4-epimerase, membrane transport protein, methyltransferase, monothiol glutaredoxin, multidrug resistance protein, multiple antibiotic resistance protein, murein transglycosylase, NADH dehydrogenase I chain N, oxidoreductase, permease protein, permease protein of ABC transporter, phenylacetic acid degradation protein, phosphoribulokinase, polygalacturonase, protein kinase, protein phosphatase, putative transport system permease protein, putrescine transport system permease protein, recombinase A, sec-independent protein translocase, sll0406-protein, sll1761-protein, sodium/proton antiporter, sterol desaturase, threonine dehydrogenase, threonine synthase, transcription factor, tryptophan synthase alpha chain, TTC1386-protein, xanthine dehydrogenase, ydl235c-protein, ynl321w-protein, and ypr170c-protein, which is conferred by one or more FCRPs or the gene product of one or more FCRP-genes, for example by the gene product of a nucleic acid sequences comprising a polynucleotide selected from the group as shown in Table 1, application no. 14, column 5 or 8, (preferably by the coding region thereof), or a homolog or a fragment thereof, e.g. or by one or more proteins each comprising a polypeptide encoded by one or more nucleic acid sequences selected from the group as shown in Table I, application no. 14, column 5 or 8, (preferably by the coding region thereof), or a homolog or a fragment thereof, or by one or more protein(s) each comprising a polypeptide selected from the group as depicted in Table II, application no. 14, column 5 and 8, or a homolog thereof, or a protein comprising a sequence corresponding to the consensus sequence or comprising at least one polypeptide motif as shown in Table IV, application no. 14, column 8.

[66711] for the disclosure of this paragraph see [0025.1.7.7] above

[66712] In an embodiment, the process comprises increasing or generating the activity of one or more polypeptides having said activity, e.g. by generating or increasing the amount and/or specific activity in the cell or a compartment of a cell of one of more FCRP, especially selected from the group consisting of 2-oxoglutarate dehydrogenase E1subunit, ABC metal ion transporter substrate-binding protein, acetyl-CoA acetyltransferase, acetyltransferase, acid shock protein, acyl transferase, amidophosphoribosyltransferase, ankyrin repeat family protein, ATP-binding component of a transport system, b1401-protein, B1795-protein, b2107-protein, b2376-protein, b2399-protein, b2474-protein, b2513-protein, b2654-protein, b3151-protein, b3989-protein, b4029-protein, b4205-protein, C-4 sterol methyl oxidase, calcium-dependent protein kinase, cation transport protein, cation-transporting ATPase, CTP synthase, CTP synthetase, cyclin, cyclin D, eukaryotic translation initiation factor 5, glucose dehydrogenase, glucose-6-phosphate 1-dehydrogenase, glutaredoxin, homocitrate synthase, hydrolase, lipoprotein precursor, L-ribulose-5-phosphate 4-epimerase, membrane transport protein, methyltransferase, monothiol glutaredoxin, multidrug resistance protein, multiple antibiotic resistance protein, murein transglycosylase, NADH dehydrogenase I chain N, oxidoreductase, permease protein, permease protein of ABC transporter, phenylacetic acid degradation protein, phosphoribulokinase, polygalacturonase, protein kinase, protein phosphatase, putative transport system permease protein, putrescine transport system permease protein, recombinase A, sec-independent protein translocase, sll0406-protein, sll1761-protein, sodium/proton antiporter, sterol desaturase, threonine dehydrogenase, threonine synthase, transcription factor, tryptophan synthase alpha chain, TTC1386-protein, xanthine dehydrogenase, ydl235c-protein, ynl321w-protein, and ypr170c-protein, for example of the respective polypeptide as depicted in Table II, application no. 14, column 5 and 8, or a homolog or a fragment thereof, or the respective polypeptide comprising a sequence corresponding to the consensus sequences as shown in Table IV, application no. 14, column 8, or the respective polypeptide comprising at least one polypeptide motif as depicted in Table IV, application no. 14, column 8.

[66713] A further embodiment of the present invention relates to a process for the production of campesterol, which comprises
[66714] (a) increasing or generating the activity of a C-4 sterol methyl oxidase non-targeted in a non-human organism or a part thereof, preferably a microorganism, a plant cell, a plant or a part thereof, as compared to a corresponding non-transformed wild type non-human organism or a part thereof; and
[66715] (b) growing the non-human organism or a part thereof under conditions which permit the production of campesterol or a composition comprising campesterol in said non-human organism or in the culture medium surrounding said non-human organism.

[66716] A further embodiment of the present invention relates to a process for the production of campesterol, which comprises
[66717] (a) increasing or generating the activity of a protein phosphatase non-targeted in a non-human organism or a part thereof, preferably a microorganism, a plant cell, a plant or a part thereof, as compared to a corresponding non-transformed wild type non-human organism or a part thereof; and
[66718] (b) growing the non-human organism or a part thereof under conditions which permit the production of campesterol or a composition comprising campesterol in said non-human organism or in the culture medium surrounding said non-human organism.

[66719] A further embodiment of the present invention relates to a process for the production of campesterol, which comprises
[66720] (a) increasing or generating the activity of a eukaryotic translation initiation factor 5 non-targeted in a non-human organism or a part thereof, preferably a microorganism, a plant cell, a plant or a part thereof, as compared to a corresponding non-transformed wild type non-human organism or a part thereof; and
[66721] (b) growing the non-human organism or a part thereof under conditions which permit the production of campesterol or a composition comprising campesterol in said non-human organism or in the culture medium surrounding said non-human organism.

[66722] A further embodiment of the present invention relates to a process for the production of beta-sitosterol, which comprises
[66723] (a) increasing or generating the activity of a calcium-dependent protein kinase non-targeted in a non-human organism or a part thereof, preferably a microorganism, a plant cell, a plant or a part thereof, as compared to a corresponding non-transformed wild type non-human organism or a part thereof; and
[66724] (b) growing the non-human organism or a part thereof under conditions which permit the production of beta-sitosterol or a composition comprising beta-sitosterol in said non-human organism or in the culture medium surrounding said non-human organism.

[66725] A further embodiment of the present invention relates to a process for the production of campesterol, which comprises
[66726] (a) increasing or generating the activity of a calcium-dependent protein kinase non-targeted in a non-human organism or a part thereof, preferably a microorganism, a plant cell, a plant or a part thereof, as compared to a corresponding non-transformed wild type non-human organism or a part thereof; and
[66727] (b) growing the non-human organism or a part thereof under conditions which permit the production of campesterol or a composition comprising campesterol in said non-human organism or in the culture medium surrounding said non-human organism.

[66728] A further embodiment of the present invention relates to a process for the production of beta-sitosterol, which comprises
[66729] (a) increasing or generating the activity of a transcription factor non-targeted in a non-human organism or a part thereof, preferably a microorganism, a plant cell, a plant or a part thereof, as compared to a corresponding non-transformed wild type non-human organism or a part thereof; and
[66730] (b) growing the non-human organism or a part thereof under conditions which permit the production of beta-sitosterol or a composition comprising beta-sitosterol in said non-human organism or in the culture medium surrounding said non-human organism.

[66731] A further embodiment of the present invention relates to a process for the production of campesterol, which comprises
[66732] (a) increasing or generating the activity of a transcription factor non-targeted in a non-human organism or a part thereof, preferably a microorganism, a plant cell, a plant or a part thereof, as compared to a corresponding non-transformed wild type non-human organism or a part thereof; and
[66733] (b) growing the non-human organism or a part thereof under conditions which permit the production of campesterol or a composition comprising campesterol in said non-human organism or in the culture medium surrounding said non-human organism.

[66734] A further embodiment of the present invention relates to a process for the production of campesterol, which comprises
[66735] (a) increasing or generating the activity of a protein phosphatase non-targeted in a non-human organism or a part thereof, preferably a microorganism, a plant cell, a plant or a part thereof, as compared to a corresponding non-transformed wild type non-human organism or a part thereof; and
[66736] (b) growing the non-human organism or a part thereof under conditions which permit the production of campesterol or a composition comprising campesterol in said non-human organism or in the culture medium surrounding said non-human organism.

[66737] A further embodiment of the present invention relates to a process for the production of campesterol, which comprises
[66738] (a) increasing or generating the activity of a ankyrin repeat family protein non-targeted in a non-human organism or a part thereof, preferably a microorganism, a plant cell, a plant or a part thereof, as compared to a corresponding non-transformed wild type non-human organism or a part thereof; and
[66739] (b) growing the non-human organism or a part thereof under conditions which permit the production of campesterol or a composition comprising campesterol in said non-human organism or in the culture medium surrounding said non-human organism.

[66740] A further embodiment of the present invention relates to a process for the production of beta-sitosterol, which comprises
[66741] (a) increasing or generating the activity of a transcription factor non-targeted in a non-human organism or a part thereof, preferably a microorganism, a plant cell, a plant or a part thereof, as compared to a corresponding non-transformed wild type non-human organism or a part thereof; and
[66742] (b) growing the non-human organism or a part thereof under conditions which permit the production of beta-sitosterol or a composition comprising beta-sitosterol in said non-human organism or in the culture medium surrounding said non-human organism.

[66743] A further embodiment of the present invention relates to a process for the production of campesterol, which comprises
[66744] (a) increasing or generating the activity of a transcription factor non-targeted in a non-human organism or a part thereof, preferably a microorganism, a plant cell, a plant or a part thereof, as compared to a corresponding non-transformed wild type non-human organism or a part thereof; and
[66745] (b) growing the non-human organism or a part thereof under conditions which permit the production of campesterol or a composition comprising campesterol in said non-human organism or in the culture medium surrounding said non-human organism.

[66746] A further embodiment of the present invention relates to a process for the production of campesterol, which comprises
[66747] (a) increasing or generating the activity of a sterol desaturase non-targeted in a non-human organism or a part thereof, preferably a microorganism, a plant cell, a plant or a part thereof, as compared to a corresponding non-transformed wild type non-human organism or a part thereof; and
[66748] (b) growing the non-human organism or a part thereof under conditions which permit the production of campesterol or a composition comprising campesterol in said non-human organism or in the culture medium surrounding said non-human organism.

[66749] A further embodiment of the present invention relates to a process for the production of beta-sitosterol, which comprises
[66750] (a) increasing or generating the activity of a monothiol glutaredoxin non-targeted in a non-human organism or a part thereof, preferably a microorganism, a plant cell, a plant or a part thereof, as compared to a corresponding non-transformed wild type non-human organism or a part thereof; and
[66751] (b) growing the non-human organism or a part thereof under conditions which permit the production of beta-sitosterol or a composition comprising beta-sitosterol in said non-human organism or in the culture medium surrounding said non-human organism.

[66752] A further embodiment of the present invention relates to a process for the production of campesterol, which comprises
[66753] (a) increasing or generating the activity of a protein phosphatase non-targeted in a non-human organism or a part thereof, preferably a microorganism, a plant cell, a plant or a part thereof, as compared to a corresponding non-transformed wild type non-human organism or a part thereof; and
[66754] (b) growing the non-human organism or a part thereof under conditions which permit the production of campesterol or a composition comprising campesterol in said non-human organism or in the culture medium surrounding said non-human organism.

[66755] A further embodiment of the present invention relates to a process for the production of beta-sitosterol, which comprises
[66756] (a) increasing or generating the activity of a calcium-dependent protein kinase non-targeted in a non-human organism or a part thereof, preferably a microorganism, a plant cell, a plant or a part thereof, as compared to a corresponding non-transformed wild type non-human organism or a part thereof; and
[66757] (b) growing the non-human organism or a part thereof under conditions which permit the production of beta-sitosterol or a composition comprising beta-sitosterol in said non-human organism or in the culture medium surrounding said non-human organism.

[66758] A further embodiment of the present invention relates to a process for the production of campesterol, which comprises
[66759] (a) increasing or generating the activity of a calcium-dependent protein kinase non-targeted in a non-human organism or a part thereof, preferably a microorganism, a plant cell, a plant or a part thereof, as compared to a corresponding non-transformed wild type non-human organism or a part thereof; and
[66760] (b) growing the non-human organism or a part thereof under conditions which permit the production of campesterol or a composition comprising campesterol in said non-human organism or in the culture medium surrounding said non-human organism.

[66761] A further embodiment of the present invention relates to a process for the production of campesterol, which comprises
[66762] (a) increasing or generating the activity of a protein phosphatase non-targeted in a non-human organism or a part thereof, preferably a microorganism, a plant cell, a plant or a part thereof, as compared to a corresponding non-transformed wild type non-human organism or a part thereof; and
[66763] (b) growing the non-human organism or a part thereof under conditions which permit the production of campesterol or a composition comprising campesterol in said non-human organism or in the culture medium surrounding said non-human organism.

[66764] A further embodiment of the present invention relates to a process for the production of beta-sitosterol, which comprises
[66765] (a) increasing or generating the activity of a protein phosphatase non-targeted in a non-human organism or a part thereof, preferably a microorganism, a plant cell, a plant or a part thereof, as compared to a corresponding non-transformed wild type non-human organism or a part thereof; and
[66766] (b) growing the non-human organism or a part thereof under conditions which permit the production of beta-sitosterol or a composition comprising beta-sitosterol in said non-human organism or in the culture medium surrounding said non-human organism.

[66767] A further embodiment of the present invention relates to a process for the production of beta-sitosterol, which comprises
[66768] (a) increasing or generating the activity of a protein kinase non-targeted in a non-human organism or a part thereof, preferably a microorganism, a plant cell, a plant or a part thereof, as compared to a corresponding non-transformed wild type non-human organism or a part thereof; and
[66769] (b) growing the non-human organism or a part thereof under conditions which permit the production of beta-sitosterol or a composition comprising beta-sitosterol in said non-human organism or in the culture medium surrounding said non-human organism.

[66770] A further embodiment of the present invention relates to a process for the production of beta-sitosterol, which comprises
[66771] (a) increasing or generating the activity of a sec-independent protein translocase non-targeted in a non-human organism or a part thereof, preferably a microorganism, a plant cell, a plant or a part thereof, as compared to a corresponding non-transformed wild type non-human organism or a part thereof; and
[66772] (b) growing the non-human organism or a part thereof under conditions which permit the production of beta-sitosterol or a composition comprising beta-sitosterol in said non-human organism or in the culture medium surrounding said non-human organism.

[66773] A further embodiment of the present invention relates to a process for the production of campesterol, which comprises
[66774] (a) increasing or generating the activity of a 2-oxoglutarate dehydrogenase E1 subunit non-targeted in a non-human organism or a part thereof, preferably a microorganism, a plant cell, a plant or a part thereof, as compared to a corresponding non-transformed wild type non-human organism or a part thereof; and
[66775] (b) growing the non-human organism or a part thereof under conditions which permit the production of campesterol or a composition comprising campesterol in said non-human organism or in the culture medium surrounding said non-human organism.

[66776] A further embodiment of the present invention relates to a process for the production of campesterol, which comprises
[66777] (a) increasing or generating the activity of a oxidoreductase non-targeted in a non-human organism or a part thereof, preferably a microorganism, a plant cell, a plant or a part thereof, as compared to a corresponding non-transformed wild type non-human organism or a part thereof; and
[66778] (b) growing the non-human organism or a part thereof under conditions which permit the production of campesterol or a composition comprising campesterol in said non-human organism or in the culture medium surrounding said non-human organism.

[66779] A further embodiment of the present invention relates to a process for the production of beta-sitosterol, which comprises
[66780] (a) increasing or generating the activity of a CTP synthase non-targeted in a non-human organism or a part thereof, preferably a microorganism, a plant cell, a plant or a part thereof, as compared to a corresponding non-transformed wild type non-human organism or a part thereof; and
[66781] (b) growing the non-human organism or a part thereof under conditions which permit the production of beta-sitosterol or a composition comprising beta-sitosterol in said non-human organism or in the culture medium surrounding said non-human organism.

[66782] A further embodiment of the present invention relates to a process for the production of campesterol, which comprises
[66783] (a) increasing or generating the activity of a CTP synthase non-targeted in a non-human organism or a part thereof, preferably a microorganism, a plant cell, a plant or a part thereof, as compared to a corresponding non-transformed wild type non-human organism or a part thereof; and
[66784] (b) growing the non-human organism or a part thereof under conditions which permit the production of campesterol or a composition comprising campesterol in said non-human organism or in the culture medium surrounding said non-human organism.

[66785] A further embodiment of the present invention relates to a process for the production of campesterol, which comprises
[66786] (a) increasing or generating the activity of a recombinase A non-targeted in a non-human organism or a part thereof, preferably a microorganism, a plant cell, a plant or a part thereof, as compared to a corresponding non-transformed wild type non-human organism or a part thereof; and
[66787] (b) growing the non-human organism or a part thereof under conditions which permit the production of campesterol or a composition comprising campesterol in said non-human organism or in the culture medium surrounding said non-human organism.

[66788] A further embodiment of the present invention relates to a process for the production of beta-sitosterol, which comprises
[66789] (a) increasing or generating the activity of a hydrolase non-targeted in a non-human organism or a part thereof, preferably a microorganism, a plant cell, a plant or a part thereof, as compared to a corresponding non-transformed wild type non-human organism or a part thereof; and
[66790] (b) growing the non-human organism or a part thereof under conditions which permit the production of beta-sitosterol or a composition comprising beta-sitosterol in said non-human organism or in the culture medium surrounding said non-human organism.

[66791] A further embodiment of the present invention relates to a process for the production of campesterol, which comprises
[66792] (a) increasing or generating the activity of a hydrolase non-targeted in a non-human organism or a part thereof, preferably a microorganism, a plant cell, a plant or a part thereof, as compared to a corresponding non-transformed wild type non-human organism or a part thereof; and
[66793] (b) growing the non-human organism or a part thereof under conditions which permit the production of campesterol or a composition comprising campesterol in said non-human organism or in the culture medium surrounding said non-human organism.

[66794] A further embodiment of the present invention relates to a process for the production of campesterol, which comprises
[66795] (a) increasing or generating the activity of a threonine synthase non-targeted in a non-human organism or a part thereof, preferably a microorganism, a plant cell, a plant or a part thereof, as compared to a corresponding non-transformed wild type non-human organism or a part thereof; and
[66796] (b) growing the non-human organism or a part thereof under conditions which permit the production of campesterol or a composition comprising campesterol in said non-human organism or in the culture medium surrounding said non-human organism.

[66797] A further embodiment of the present invention relates to a process for the production of campesterol, which comprises
[66798] (a) increasing or generating the activity of a L-ribulose-5-phosphate 4-epimerase non-targeted in a non-human organism or a part thereof, preferably a microorganism, a plant cell, a plant or a part thereof, as compared to a corresponding non-transformed wild type non-human organism or a part thereof; and
[66799] (b) growing the non-human organism or a part thereof under conditions which permit the production of campesterol or a composition comprising campesterol in said non-human organism or in the culture medium surrounding said non-human organism.

[66800] A further embodiment of the present invention relates to a process for the production of campesterol, which comprises
[66801] (a) increasing or generating the activity of a glucose dehydrogenase non-targeted in a non-human organism or a part thereof, preferably a microorganism, a plant cell, a plant or a part thereof, as compared to a corresponding non-transformed wild type non-human organism or a part thereof; and
[66802] (b) growing the non-human organism or a part thereof under conditions which permit the production of campesterol or a composition comprising campesterol in said non-human organism or in the culture medium surrounding said non-human organism.

[66803] A further embodiment of the present invention relates to a process for the production of beta-sitosterol, which comprises
[66804] (a) increasing or generating the activity of a ATP-binding component of a transport system non-targeted in a non-human organism or a part thereof, preferably a microorganism, a plant cell, a plant or a part thereof, as compared to a corresponding non-transformed wild type non-human organism or a part thereof; and
[66805] (b) growing the non-human organism or a part thereof under conditions which permit the production of beta-sitosterol or a composition comprising beta-sitosterol in said non-human organism or in the culture medium surrounding said non-human organism.

[66806] A further embodiment of the present invention relates to a process for the production of campesterol, which comprises
[66807] (a) increasing or generating the activity of a ATP-binding component of a transport system non-targeted in a non-human organism or a part thereof, preferably a microorganism, a plant cell, a plant or a part thereof, as compared to a corresponding non-transformed wild type non-human organism or a part thereof; and
[66808] (b) growing the non-human organism or a part thereof under conditions which permit the production of campesterol or a composition comprising campesterol in said non-human organism or in the culture medium surrounding said non-human organism.

[66809] A further embodiment of the present invention relates to a process for the production of campesterol, which comprises
[66810] (a) increasing or generating the activity of a membrane transport protein non-targeted in a non-human organism or a part thereof, preferably a microorganism, a plant cell, a plant or a part thereof, as compared to a corresponding non-transformed wild type non-human organism or a part thereof; and
[66811] (b) growing the non-human organism or a part thereof under conditions which permit the production of campesterol or a composition comprising campesterol in said non-human organism or in the culture medium surrounding said non-human organism.

[66812] A further embodiment of the present invention relates to a process for the production of campesterol, which comprises
[66813] (a) increasing or generating the activity of a putrescine transport system permease protein non-targeted in a non-human organism or a part thereof, preferably a microorganism, a plant cell, a plant or a part thereof, as compared to a corresponding non-transformed wild type non-human organism or a part thereof; and
[66814] (b) growing the non-human organism or a part thereof under conditions which permit the production of campesterol or a composition comprising campesterol in said non-human organism or in the culture medium surrounding said non-human organism.

[66815] A further embodiment of the present invention relates to a process for the production of beta-sitosterol, which comprises
[66816] (a) increasing or generating the activity of a multidrug resistance protein non-targeted in a non-human organism or a part thereof, preferably a microorganism, a plant cell, a plant or a part thereof, as compared to a corresponding non-transformed wild type non-human organism or a part thereof; and
[66817] (b) growing the non-human organism or a part thereof under conditions which permit the production of beta-sitosterol or a composition comprising beta-sitosterol in said non-human organism or in the culture medium surrounding said non-human organism.

[66818] A further embodiment of the present invention relates to a process for the production of beta-sitosterol, which comprises
[66819] (a) increasing or generating the activity of a sodium/proton antiporter non-targeted in a non-human organism or a part thereof, preferably a microorganism, a plant cell, a plant or a part thereof, as compared to a corresponding non-transformed wild type non-human organism or a part thereof; and
[66820] (b) growing the non-human organism or a part thereof under conditions which permit the production of beta-sitosterol or a composition comprising beta-sitosterol in said non-human organism or in the culture medium surrounding said non-human organism.

[66821] A further embodiment of the present invention relates to a process for the production of campesterol, which comprises
[66822] (a) increasing or generating the activity of a sodium/proton antiporter non-targeted in a non-human organism or a part thereof, preferably a microorganism, a plant cell, a plant or a part thereof, as compared to a corresponding non-transformed wild type non-human organism or a part thereof; and
[66823] (b) growing the non-human organism or a part thereof under conditions which permit the production of campesterol or a composition comprising campesterol in said non-human organism or in the culture medium surrounding said non-human organism.

[66824] A further embodiment of the present invention relates to a process for the production of beta-sitosterol, which comprises
[66825] (a) increasing or generating the activity of a phenylacetic acid degradation protein non-targeted in a non-human organism or a part thereof, preferably a microorganism, a plant cell, a plant or a part thereof, as compared to a corresponding non-transformed wild type non-human organism or a part thereof; and
[66826] (b) growing the non-human organism or a part thereof under conditions which permit the production of beta-sitosterol or a composition comprising beta-sitosterol in said non-human organism or in the culture medium surrounding said non-human organism.

[66827] A further embodiment of the present invention relates to a process for the production of campesterol, which comprises
[66828] (a) increasing or generating the activity of a phenylacetic acid degradation protein non-targeted in a non-human organism or a part thereof, preferably a microorganism, a plant cell, a plant or a part thereof, as compared to a corresponding non-transformed wild type non-human organism or a part thereof; and
[66829] (b) growing the non-human organism or a part thereof under conditions which permit the production of campesterol or a composition comprising campesterol in said non-human organism or in the culture medium surrounding said non-human organism.

[66830] A further embodiment of the present invention relates to a process for the production of campesterol, which comprises
[66831] (a) increasing or generating the activity of a b1401-protein non-targeted in a non-human organism or a part thereof, preferably a microorganism, a plant cell, a plant or a part thereof, as compared to a corresponding non-transformed wild type non-human organism or a part thereof; and
[66832] (b) growing the non-human organism or a part thereof under conditions which permit the production of campesterol or a composition comprising campesterol in said non-human organism or in the culture medium surrounding said non-human organism.

[66833] A further embodiment of the present invention relates to a process for the production of campesterol, which comprises
[66834] (a) increasing or generating the activity of a lipoprotein precursor non-targeted in a non-human organism or a part thereof, preferably a microorganism, a plant cell, a plant or a part thereof, as compared to a corresponding non-transformed wild type non-human organism or a part thereof; and
[66835] (b) growing the non-human organism or a part thereof under conditions which permit the production of campesterol or a composition comprising campesterol in said non-human organism or in the culture medium surrounding said non-human organism.

[66836] A further embodiment of the present invention relates to a process for the production of beta-sitosterol, which comprises
[66837] (a) increasing or generating the activity of a acid shock protein non-targeted in a non-human organism or a part thereof, preferably a microorganism, a plant cell, a plant or a part thereof, as compared to a corresponding non-transformed wild type non-human organism or a part thereof; and
[66838] (b) growing the non-human organism or a part thereof under conditions which permit the production of beta-sitosterol or a composition comprising beta-sitosterol in said non-human organism or in the culture medium surrounding said non-human organism.

[66839] A further embodiment of the present invention relates to a process for the production of campesterol, which comprises
[66840] (a) increasing or generating the activity of a acid shock protein non-targeted in a non-human organism or a part thereof, preferably a microorganism, a plant cell, a plant or a part thereof, as compared to a corresponding non-transformed wild type non-human organism or a part thereof; and
[66841] (b) growing the non-human organism or a part thereof under conditions which permit the production of campesterol or a composition comprising campesterol in said non-human organism or in the culture medium surrounding said non-human organism.

[66842] A further embodiment of the present invention relates to a process for the production of campesterol, which comprises
[66843] (a) increasing or generating the activity of a B1795-protein non-targeted in a non-human organism or a part thereof, preferably a microorganism, a plant cell, a plant or a part thereof, as compared to a corresponding non-transformed wild type non-human organism or a part thereof; and
[66844] (b) growing the non-human organism or a part thereof under conditions which permit the production of campesterol or a composition comprising campesterol in said non-human organism or in the culture medium surrounding said non-human organism.

[66845] A further embodiment of the present invention relates to a process for the production of campesterol, which comprises
[66846] (a) increasing or generating the activity of a acetyltransferase non-targeted in a non-human organism or a part thereof, preferably a microorganism, a plant cell, a plant or a part thereof, as compared to a corresponding non-transformed wild type non-human organism or a part thereof; and
[66847] (b) growing the non-human organism or a part thereof under conditions which permit the production of campesterol or a composition comprising campesterol in said non-human organism or in the culture medium surrounding said non-human organism.

[66848] A further embodiment of the present invention relates to a process for the production of campesterol, which comprises
[66849] (a) increasing or generating the activity of a b2107-protein non-targeted in a non-human organism or a part thereof, preferably a microorganism, a plant cell, a plant or a part thereof, as compared to a corresponding non-transformed wild type non-human organism or a part thereof; and
[66850] (b) growing the non-human organism or a part thereof under conditions which permit the production of campesterol or a composition comprising campesterol in said non-human organism or in the culture medium surrounding said non-human organism.

[66851] A further embodiment of the present invention relates to a process for the production of campesterol, which comprises
[66852] (a) increasing or generating the activity of a NADH dehydrogenase I chain N non-targeted in a non-human organism or a part thereof, preferably a microorganism, a plant cell, a plant or a part thereof, as compared to a corresponding non-transformed wild type non-human organism or a part thereof; and
[66853] (b) growing the non-human organism or a part thereof under conditions which permit the production of campesterol or a composition comprising campesterol in said non-human organism or in the culture medium surrounding said non-human organism.

[66854] A further embodiment of the present invention relates to a process for the production of campesterol, which comprises
[66855] (a) increasing or generating the activity of a amidophosphoribosyltransferase non-targeted in a non-human organism or a part thereof, preferably a microorganism, a plant cell, a plant or a part thereof, as compared to a corresponding non-transformed wild type non-human organism or a part thereof; and
[66856] (b) growing the non-human organism or a part thereof under conditions which permit the production of campesterol or a composition comprising campesterol in said non-human organism or in the culture medium surrounding said non-human organism.

[66857] A further embodiment of the present invention relates to a process for the production of campesterol, which comprises
[66858] (a) increasing or generating the activity of a b2376-protein non-targeted in a non-human organism or a part thereof, preferably a microorganism, a plant cell, a plant or a part thereof, as compared to a corresponding non-transformed wild type non-human organism or a part thereof; and
[66859] (b) growing the non-human organism or a part thereof under conditions which permit the production of campesterol or a composition comprising campesterol in said non-human organism or in the culture medium surrounding said non-human organism.

[66860] A further embodiment of the present invention relates to a process for the production of campesterol, which comprises
[66861] (a) increasing or generating the activity of a b2399-protein non-targeted in a non-human organism or a part thereof, preferably a microorganism, a plant cell, a plant or a part thereof, as compared to a corresponding non-transformed wild type non-human organism or a part thereof; and
[66862] (b) growing the non-human organism or a part thereof under conditions which permit the production of campesterol or a composition comprising campesterol in said non-human organism or in the culture medium surrounding said non-human organism.

[66863] A further embodiment of the present invention relates to a process for the production of campesterol, which comprises
[66864] (a) increasing or generating the activity of a b2474-protein non-targeted in a non-human organism or a part thereof, preferably a microorganism, a plant cell, a plant or a part thereof, as compared to a corresponding non-transformed wild type non-human organism or a part thereof; and
[66865] (b) growing the non-human organism or a part thereof under conditions which permit the production of campesterol or a composition comprising campesterol in said non-human organism or in the culture medium surrounding said non-human organism.

[66866] A further embodiment of the present invention relates to a process for the production of campesterol, which comprises
[66867] (a) increasing or generating the activity of a permease protein non-targeted in a non-human organism or a part thereof, preferably a microorganism, a plant cell, a plant or a part thereof, as compared to a corresponding non-transformed wild type non-human organism or a part thereof; and
[66868] (b) growing the non-human organism or a part thereof under conditions which permit the production of campesterol or a composition comprising campesterol in said non-human organism or in the culture medium surrounding said non-human organism.

[66869] A further embodiment of the present invention relates to a process for the production of campesterol, which comprises
[66870] (a) increasing or generating the activity of a b2513-protein non-targeted in a non-human organism or a part thereof, preferably a microorganism, a plant cell, a plant or a part thereof, as compared to a corresponding non-transformed wild type non-human organism or a part thereof; and
[66871] (b) growing the non-human organism or a part thereof under conditions which permit the production of campesterol or a composition comprising campesterol in said non-human organism or in the culture medium surrounding said non-human organism.

[66872] A further embodiment of the present invention relates to a process for the production of beta-sitosterol, which comprises
[66873] (a) increasing or generating the activity of a putative transport system permease protein non-targeted in a non-human organism or a part thereof, preferably a microorganism, a plant cell, a plant or a part thereof, as compared to a corresponding non-transformed wild type non-human organism or a part thereof; and
[66874] (b) growing the non-human organism or a part thereof under conditions which permit the production of beta-sitosterol or a composition comprising beta-sitosterol in said non-human organism or in the culture medium surrounding said non-human organism.

[66875] A further embodiment of the present invention relates to a process for the production of campesterol, which comprises
[66876] (a) increasing or generating the activity of a putative transport system permease protein non-targeted in a non-human organism or a part thereof, preferably a microorganism, a plant cell, a plant or a part thereof, as compared to a corresponding non-transformed wild type non-human organism or a part thereof; and
[66877] (b) growing the non-human organism or a part thereof under conditions which permit the production of campesterol or a composition comprising campesterol in said non-human organism or in the culture medium surrounding said non-human organism.

[66878] A further embodiment of the present invention relates to a process for the production of campesterol, which comprises
[66879] (a) increasing or generating the activity of a b2654-protein non-targeted in a non-human organism or a part thereof, preferably a microorganism, a plant cell, a plant or a part thereof, as compared to a corresponding non-transformed wild type non-human organism or a part thereof; and
[66880] (b) growing the non-human organism or a part thereof under conditions which permit the production of campesterol or a composition comprising campesterol in said non-human organism or in the culture medium surrounding said non-human organism.

[66881] A further embodiment of the present invention relates to a process for the production of campesterol, which comprises
[66882] (a) increasing or generating the activity of a murein transglycosylase non-targeted in a non-human organism or a part thereof, preferably a microorganism, a plant cell, a plant or a part thereof, as compared to a corresponding non-transformed wild type non-human organism or a part thereof; and
[66883] (b) growing the non-human organism or a part thereof under conditions which permit the production of campesterol or a composition comprising campesterol in said non-human organism or in the culture medium surrounding said non-human organism.

[66884] A further embodiment of the present invention relates to a process for the production of campesterol, which comprises
[66885] (a) increasing or generating the activity of a oxidoreductase non-targeted in a non-human organism or a part thereof, preferably a microorganism, a plant cell, a plant or a part thereof, as compared to a corresponding non-transformed wild type non-human organism or a part thereof; and
[66886] (b) growing the non-human organism or a part thereof under conditions which permit the production of campesterol or a composition comprising campesterol in said non-human organism or in the culture medium surrounding said non-human organism.

[66887] A further embodiment of the present invention relates to a process for the production of campesterol, which comprises
[66888] (a) increasing or generating the activity of a xanthine dehydrogenase non-targeted in a non-human organism or a part thereof, preferably a microorganism, a plant cell, a plant or a part thereof, as compared to a corresponding non-transformed wild type non-human organism or a part thereof; and
[66889] (b) growing the non-human organism or a part thereof under conditions which permit the production of campesterol or a composition comprising campesterol in said non-human organism or in the culture medium surrounding said non-human organism.

[66890] A further embodiment of the present invention relates to a process for the production of campesterol, which comprises
[66891] (a) increasing or generating the activity of a b3151-protein non-targeted in a non-human organism or a part thereof, preferably a microorganism, a plant cell, a plant or a part thereof, as compared to a corresponding non-transformed wild type non-human organism or a part thereof; and
[66892] (b) growing the non-human organism or a part thereof under conditions which permit the production of campesterol or a composition comprising campesterol in said non-human organism or in the culture medium surrounding said non-human organism.

[66893] A further embodiment of the present invention relates to a process for the production of beta-sitosterol, which comprises
[66894] (a) increasing or generating the activity of a methyltransferase non-targeted in a non-human organism or a part thereof, preferably a microorganism, a plant cell, a plant or a part thereof, as compared to a corresponding non-transformed wild type non-human organism or a part thereof; and
[66895] (b) growing the non-human organism or a part thereof under conditions which permit the production of beta-sitosterol or a composition comprising beta-sitosterol in said non-human organism or in the culture medium surrounding said non-human organism.

[66896] A further embodiment of the present invention relates to a process for the production of campesterol, which comprises
[66897] (a) increasing or generating the activity of a threonine dehydrogenase non-targeted in a non-human organism or a part thereof, preferably a microorganism, a plant cell, a plant or a part thereof, as compared to a corresponding non-transformed wild type non-human organism or a part thereof; and
[66898] (b) growing the non-human organism or a part thereof under conditions which permit the production of campesterol or a composition comprising campesterol in said non-human organism or in the culture medium surrounding said non-human organism.

[66899] A further embodiment of the present invention relates to a process for the production of beta-sitosterol, which comprises
[66900] (a) increasing or generating the activity of a b3989-protein non-targeted in a non-human organism or a part thereof, preferably a microorganism, a plant cell, a plant or a part thereof, as compared to a corresponding non-transformed wild type non-human organism or a part thereof; and
[66901] (b) growing the non-human organism or a part thereof under conditions which permit the production of beta-sitosterol or a composition comprising beta-sitosterol in said non-human organism or in the culture medium surrounding said non-human organism.

[66902] A further embodiment of the present invention relates to a process for the production of campesterol, which comprises
[66903] (a) increasing or generating the activity of a b3989-protein non-targeted in a non-human organism or a part thereof, preferably a microorganism, a plant cell, a plant or a part thereof, as compared to a corresponding non-transformed wild type non-human organism or a part thereof; and
[66904] (b) growing the non-human organism or a part thereof under conditions which permit the production of campesterol or a composition comprising campesterol in said non-human organism or in the culture medium surrounding said non-human organism.

[66905] A further embodiment of the present invention relates to a process for the production of beta-sitosterol, which comprises
[66906] (a) increasing or generating the activity of a b4029-protein non-targeted in a non-human organism or a part thereof, preferably a microorganism, a plant cell, a plant or a part thereof, as compared to a corresponding non-transformed wild type non-human organism or a part thereof; and
[66907] (b) growing the non-human organism or a part thereof under conditions which permit the production of beta-sitosterol or a composition comprising beta-sitosterol in said non-human organism or in the culture medium surrounding said non-human organism.

[66908] A further embodiment of the present invention relates to a process for the production of stigmasterol, which comprises
[66909] (a) increasing or generating the activity of a b4029-protein non-targeted in a non-human organism or a part thereof, preferably a microorganism, a plant cell, a plant or a part thereof, as compared to a corresponding non-transformed wild type non-human organism or a part thereof; and
[66910] (b) growing the non-human organism or a part thereof under conditions which permit the production of stigmasterol or a composition comprising stigmasterol in said non-human organism or in the culture medium surrounding said non-human organism.

[66911] A further embodiment of the present invention relates to a process for the production of beta-sitosterol, which comprises
[66912] (a) increasing or generating the activity of a b4205-protein non-targeted in a non-human organism or a part thereof, preferably a microorganism, a plant cell, a plant or a part thereof, as compared to a corresponding non-transformed wild type non-human organism or a part thereof; and
[66913] (b) growing the non-human organism or a part thereof under conditions which permit the production of beta-sitosterol or a composition comprising beta-sitosterol in said non-human organism or in the culture medium surrounding said non-human organism.

[66914] A further embodiment of the present invention relates to a process for the production of beta-sitosterol, which comprises
[66915] (a) increasing or generating the activity of a glutaredoxin non-targeted in a non-human organism or a part thereof, preferably a microorganism, a plant cell, a plant or a part thereof, as compared to a corresponding non-transformed wild type non-human organism or a part thereof; and
[66916] (b) growing the non-human organism or a part thereof under conditions which permit the production of beta-sitosterol or a composition comprising beta-sitosterol in said non-human organism or in the culture medium surrounding said non-human organism.

[66917] A further embodiment of the present invention relates to a process for the production of campesterol, which comprises
[66918] (a) increasing or generating the activity of a glutaredoxin non-targeted in a non-human organism or a part thereof, preferably a microorganism, a plant cell, a plant or a part thereof, as compared to a corresponding non-transformed wild type non-human organism or a part thereof; and
[66919] (b) growing the non-human organism or a part thereof under conditions which permit the production of campesterol or a composition comprising campesterol in said non-human organism or in the culture medium surrounding said non-human organism.

[66920] A further embodiment of the present invention relates to a process for the production of beta-sitosterol, which comprises
[66921] (a) increasing or generating the activity of a transcription factor non-targeted in a non-human organism or a part thereof, preferably a microorganism, a plant cell, a plant or a part thereof, as compared to a corresponding non-transformed wild type non-human organism or a part thereof; and
[66922] (b) growing the non-human organism or a part thereof under conditions which permit the production of beta-sitosterol or a composition comprising beta-sitosterol in said non-human organism or in the culture medium surrounding said non-human organism.

[66923] A further embodiment of the present invention relates to a process for the production of campesterol, which comprises
[66924] (a) increasing or generating the activity of a transcription factor non-targeted in a non-human organism or a part thereof, preferably a microorganism, a plant cell, a plant or a part thereof, as compared to a corresponding non-transformed wild type non-human organism or a part thereof; and
[66925] (b) growing the non-human organism or a part thereof under conditions which permit the production of campesterol or a composition comprising campesterol in said non-human organism or in the culture medium surrounding said non-human organism.

[66926] A further embodiment of the present invention relates to a process for the production of beta-sitosterol, which comprises
[66927] (a) increasing or generating the activity of a cyclin D non-targeted in a non-human organism or a part thereof, preferably a microorganism, a plant cell, a plant or a part thereof, as compared to a corresponding non-transformed wild type non-human organism or a part thereof; and
[66928] (b) growing the non-human organism or a part thereof under conditions which permit the production of beta-sitosterol or a composition comprising beta-sitosterol in said non-human organism or in the culture medium surrounding said non-human organism.

[66929] A further embodiment of the present invention relates to a process for the production of campesterol, which comprises
[66930] (a) increasing or generating the activity of a cyclin D non-targeted in a non-human organism or a part thereof, preferably a microorganism, a plant cell, a plant or a part thereof, as compared to a corresponding non-transformed wild type non-human organism or a part thereof; and
[66931] (b) growing the non-human organism or a part thereof under conditions which permit the production of campesterol or a composition comprising campesterol in said non-human organism or in the culture medium surrounding said non-human organism.

[66932] A further embodiment of the present invention relates to a process for the production of campesterol, which comprises
[66933] (a) increasing or generating the activity of a sll0406-protein non-targeted in a non-human organism or a part thereof, preferably a microorganism, a plant cell, a plant or a part thereof, as compared to a corresponding non-transformed wild type non-human organism or a part thereof; and
[66934] (b) growing the non-human organism or a part thereof under conditions which permit the production of campesterol or a composition comprising campesterol in said non-human organism or in the culture medium surrounding said non-human organism.

[66935] A further embodiment of the present invention relates to a process for the production of campesterol, which comprises
[66936] (a) increasing or generating the activity of a cation transport protein non-targeted in a non-human organism or a part thereof, preferably a microorganism, a plant cell, a plant or a part thereof, as compared to a corresponding non-transformed wild type non-human organism or a part thereof; and
[66937] (b) growing the non-human organism or a part thereof under conditions which permit the production of campesterol or a composition comprising campesterol in said non-human organism or in the culture medium surrounding said non-human organism.

[66938] A further embodiment of the present invention relates to a process for the production of beta-sitosterol, which comprises
[66939] (a) increasing or generating the activity of a CTP synthetase non-targeted in a non-human organism or a part thereof, preferably a microorganism, a plant cell, a plant or a part thereof, as compared to a corresponding non-transformed wild type non-human organism or a part thereof; and
[66940] (b) growing the non-human organism or a part thereof under conditions which permit the production of beta-sitosterol or a composition comprising beta-sitosterol in said non-human organism or in the culture medium surrounding said non-human organism.

[66941] A further embodiment of the present invention relates to a process for the production of campesterol, which comprises
[66942] (a) increasing or generating the activity of a CTP synthetase non-targeted in a non-human organism or a part thereof, preferably a microorganism, a plant cell, a plant or a part thereof, as compared to a corresponding non-transformed wild type non-human organism or a part thereof; and
[66943] (b) growing the non-human organism or a part thereof under conditions which permit the production of campesterol or a composition comprising campesterol in said non-human organism or in the culture medium surrounding said non-human organism.

[66944] A further embodiment of the present invention relates to a process for the production of beta-sitosterol, which comprises
[66945] (a) increasing or generating the activity of a phosphoribulokinase non-targeted in a non-human organism or a part thereof, preferably a microorganism, a plant cell, a plant or a part thereof, as compared to a corresponding non-transformed wild type non-human organism or a part thereof; and
[66946] (b) growing the non-human organism or a part thereof under conditions which permit the production of beta-sitosterol or a composition comprising beta-sitosterol in said non-human organism or in the culture medium surrounding said non-human organism.

[66947] A further embodiment of the present invention relates to a process for the production of beta-sitosterol, which comprises
[66948] (a) increasing or generating the activity of a ABC metal ion transporter substrate-binding protein non-targeted in a non-human organism or a part thereof, preferably a microorganism, a plant cell, a plant or a part thereof, as compared to a corresponding non-transformed wild type non-human organism or a part thereof; and
[66949] (b) growing the non-human organism or a part thereof under conditions which permit the production of beta-sitosterol or a composition comprising beta-sitosterol in said non-human organism or in the culture medium surrounding said non-human organism.

[66950] A further embodiment of the present invention relates to a process for the production of campesterol, which comprises
[66951] (a) increasing or generating the activity of a sll1761-protein non-targeted in a non-human organism or a part thereof, preferably a microorganism, a plant cell, a plant or a part thereof, as compared to a corresponding non-transformed wild type non-human organism or a part thereof; and
[66952] (b) growing the non-human organism or a part thereof under conditions which permit the production of campesterol or a composition comprising campesterol in said non-human organism or in the culture medium surrounding said non-human organism.

[66953] A further embodiment of the present invention relates to a process for the production of beta-sitosterol, which comprises
[66954] (a) increasing or generating the activity of a acyl transferase non-targeted in a non-human organism or a part thereof, preferably a microorganism, a plant cell, a plant or a part thereof, as compared to a corresponding non-transformed wild type non-human organism or a part thereof; and
[66955] (b) growing the non-human organism or a part thereof under conditions which permit the production of beta-sitosterol or a composition comprising beta-sitosterol in said non-human organism or in the culture medium surrounding said non-human organism.

[66956] A further embodiment of the present invention relates to a process for the production of campesterol, which comprises
[66957] (a) increasing or generating the activity of a cation-transporting ATPase non-targeted in a non-human organism or a part thereof, preferably a microorganism, a plant cell, a plant or a part thereof, as compared to a corresponding non-transformed wild type non-human organism or a part thereof; and
[66958] (b) growing the non-human organism or a part thereof under conditions which permit the production of campesterol or a composition comprising campesterol in said non-human organism or in the culture medium surrounding said non-human organism.

[66959] A further embodiment of the present invention relates to a process for the production of beta-sitosterol, which comprises
[66960] (a) increasing or generating the activity of a oxidoreductase non-targeted in a non-human organism or a part thereof, preferably a microorganism, a plant cell, a plant or a part thereof, as compared to a corresponding non-transformed wild type non-human organism or a part thereof; and
[66961] (b) growing the non-human organism or a part thereof under conditions which permit the production of beta-sitosterol or a composition comprising beta-sitosterol in said non-human organism or in the culture medium surrounding said non-human organism.

[66962] A further embodiment of the present invention relates to a process for the production of campesterol, which comprises
[66963] (a) increasing or generating the activity of a permease protein of ABC transporter non-targeted in a non-human organism or a part thereof, preferably a microorganism, a plant cell, a plant or a part thereof, as compared to a corresponding non-transformed wild type non-human organism or a part thereof; and
[66964] (b) growing the non-human organism or a part thereof under conditions which permit the production of campesterol or a composition comprising campesterol in said non-human organism or in the culture medium surrounding said non-human organism.

[66965] A further embodiment of the present invention relates to a process for the production of campesterol, which comprises
[66966] (a) increasing or generating the activity of a tryptophan synthase alpha chain non-targeted in a non-human organism or a part thereof, preferably a microorganism, a plant cell, a plant or a part thereof, as compared to a corresponding non-transformed wild type non-human organism or a part thereof; and
[66967] (b) growing the non-human organism or a part thereof under conditions which permit the production of campesterol or a composition comprising campesterol in said non-human organism or in the culture medium surrounding said non-human organism.

[66968] A further embodiment of the present invention relates to a process for the production of beta-sitosterol, which comprises
[66969] (a) increasing or generating the activity of a multiple antibiotic resistance protein non-targeted in a non-human organism or a part thereof, preferably a microorganism, a plant cell, a plant or a part thereof, as compared to a corresponding non-transformed wild type non-human organism or a part thereof; and
[66970] (b) growing the non-human organism or a part thereof under conditions which permit the production of beta-sitosterol or a composition comprising beta-sitosterol in said non-human organism or in the culture medium surrounding said non-human organism.

[66971] A further embodiment of the present invention relates to a process for the production of campesterol, which comprises
[66972] (a) increasing or generating the activity of a multiple antibiotic resistance protein non-targeted in a non-human organism or a part thereof, preferably a microorganism, a plant cell, a plant or a part thereof, as compared to a corresponding non-transformed wild type non-human organism or a part thereof; and
[66973] (b) growing the non-human organism or a part thereof under conditions which permit the production of campesterol or a composition comprising campesterol in said non-human organism or in the culture medium surrounding said non-human organism.

[66974] A further embodiment of the present invention relates to a process for the production of beta-sitosterol, which comprises
[66975] (a) increasing or generating the activity of a TTC1386-protein non-targeted in a non-human organism or a part thereof, preferably a microorganism, a plant cell, a plant or a part thereof, as compared to a corresponding non-transformed wild type non-human organism or a part thereof; and
[66976] (b) growing the non-human organism or a part thereof under conditions which permit the production of beta-sitosterol or a composition comprising beta-sitosterol in said non-human organism or in the culture medium surrounding said non-human organism.

[66977] A further embodiment of the present invention relates to a process for the production of campesterol, which comprises
[66978] (a) increasing or generating the activity of a TTC1386-protein non-targeted in a non-human organism or a part thereof, preferably a microorganism, a plant cell, a plant or a part thereof, as compared to a corresponding non-transformed wild type non-human organism or a part thereof; and
[66979] (b) growing the non-human organism or a part thereof under conditions which permit the production of campesterol or a composition comprising campesterol in said non-human organism or in the culture medium surrounding said non-human organism.

[66980] A further embodiment of the present invention relates to a process for the production of campesterol, which comprises
[66981] (a) increasing or generating the activity of a homocitrate synthase non-targeted in a non-human organism or a part thereof, preferably a microorganism, a plant cell, a plant or a part thereof, as compared to a corresponding non-transformed wild type non-human organism or a part thereof; and
[66982] (b) growing the non-human organism or a part thereof under conditions which permit the production of campesterol or a composition comprising campesterol in said non-human organism or in the culture medium surrounding said non-human organism.

[66983] A further embodiment of the present invention relates to a process for the production of campesterol, which comprises
[66984] (a) increasing or generating the activity of a homocitrate synthase non-targeted in a non-human organism or a part thereof, preferably a microorganism, a plant cell, a plant or a part thereof, as compared to a corresponding non-transformed wild type non-human organism or a part thereof; and
[66985] (b) growing the non-human organism or a part thereof under conditions which permit the production of campesterol or a composition comprising campesterol in said non-human organism or in the culture medium surrounding said non-human organism.

[66986] A further embodiment of the present invention relates to a process for the production of campesterol, which comprises
[66987] (a) increasing or generating the activity of a cyclin non-targeted in a non-human organism or a part thereof, preferably a microorganism, a plant cell, a plant or a part thereof, as compared to a corresponding non-transformed wild type non-human organism or a part thereof; and
[66988] (b) growing the non-human organism or a part thereof under conditions which permit the production of campesterol or a composition comprising campesterol in said non-human organism or in the culture medium surrounding said non-human organism.

[66989] A further embodiment of the present invention relates to a process for the production of campesterol, which comprises
[66990] (a) increasing or generating the activity of a ydl235c-protein non-targeted in a non-human organism or a part thereof, preferably a microorganism, a plant cell, a plant or a part thereof, as compared to a corresponding non-transformed wild type non-human organism or a part thereof; and
[66991] (b) growing the non-human organism or a part thereof under conditions which permit the production of campesterol or a composition comprising campesterol in said non-human organism or in the culture medium surrounding said non-human organism.

[66992] A further embodiment of the present invention relates to a process for the production of campesterol, which comprises
[66993] (a) increasing or generating the activity of a oxidoreductase non-targeted in a non-human organism or a part thereof, preferably a microorganism, a plant cell, a plant or a part thereof, as compared to a corresponding non-transformed wild type non-human organism or a part thereof; and
[66994] (b) growing the non-human organism or a part thereof under conditions which permit the production of campesterol or a composition comprising campesterol in said non-human organism or in the culture medium surrounding said non-human organism.

[66995] A further embodiment of the present invention relates to a process for the production of campesterol, which comprises
[66996] (a) increasing or generating the activity of a polygalacturonase non-targeted in a non-human organism or a part thereof, preferably a microorganism, a plant cell, a plant or a part thereof, as compared to a corresponding non-transformed wild type non-human organism or a part thereof; and
[66997] (b) growing the non-human organism or a part thereof under conditions which permit the production of campesterol or a composition comprising campesterol in said non-human organism or in the culture medium surrounding said non-human organism.

[66998] A further embodiment of the present invention relates to a process for the production of campesterol, which comprises
[66999] (a) increasing or generating the activity of a ynl321w-protein non-targeted in a non-human organism or a part thereof, preferably a microorganism, a plant cell, a plant or a part thereof, as compared to a corresponding non-transformed wild type non-human organism or a part thereof; and
[67000] (b) growing the non-human organism or a part thereof under conditions which permit the production of campesterol or a composition comprising campesterol in said non-human organism or in the culture medium surrounding said non-human organism.

[67001] A further embodiment of the present invention relates to a process for the production of beta-sitosterol, which comprises
[67002] (a) increasing or generating the activity of a acetyl-CoA acetyltransferase non-targeted in a non-human organism or a part thereof, preferably a microorganism, a plant cell, a plant or a part thereof, as compared to a corresponding non-transformed wild type non-human organism or a part thereof; and
[67003] (b) growing the non-human organism or a part thereof under conditions which permit the production of beta-sitosterol or a composition comprising beta-sitosterol in said non-human organism or in the culture medium surrounding said non-human organism.

[67004] A further embodiment of the present invention relates to a process for the production of beta-sitosterol, which comprises
[67005] (a) increasing or generating the activity of a ypr170c-protein non-targeted in a non-human organism or a part thereof, preferably a microorganism, a plant cell, a plant or a part thereof, as compared to a corresponding non-transformed wild type non-human organism or a part thereof; and
[67006] (b) growing the non-human organism or a part thereof under conditions which permit the production of beta-sitosterol or a composition comprising beta-sitosterol in said non-human organism or in the culture medium surrounding said non-human organism.

[67007] A further embodiment of the present invention relates to a process for the production of campesterol, which comprises
[67008] (a) increasing or generating the activity of a glucose-6-phosphate 1-dehydrogenase non-targeted in a non-human organism or a part thereof, preferably a microorganism, a plant cell, a plant or a part thereof, as compared to a corresponding non-transformed wild type non-human organism or a part thereof; and
[67009] (b) growing the non-human organism or a part thereof under conditions which permit the production of campesterol or a composition comprising campesterol in said non-human organism or in the culture medium surrounding said non-human organism.

[67010] A further embodiment of the present invention relates to a process for the production of beta-sitosterol, which comprises
[67011] (a) increasing or generating the activity of a polypeptide comprising a polypeptide as depicted in the respective line in column 5 or 8 of Table II, application no. 14, or a homolog or a fragment thereof, a consensus sequence or at least one polypeptide motif as depicted in the respective line in column 8 of Table IV, application no. 14, whereby the respective line disclose in column 7 the fine chemical beta-sitosterol; or
[67012] increasing or generating the activity of an expression product of one or more nucleic acid molecule(s) comprising a polynucleotide as depicted in the respective line in column 5 or 8 of Table I, application no. 14, preferably the coding region thereof, or a homolog or a fragment thereof, whereby the respective line disclose in column 7 the fine chemical beta-sitosterol;
[67013] non-targeted in a non-human organism or a part thereof; preferably a microorganism, a plant cell, a plant or a part thereof, as compared to a corresponding non-transformed wild type non-human organism or a part thereof; and
[67014] (b) growing the non-human organism under conditions which permit the production of beta-sitosterol, or a composition comprising beta-sitosterol in said non-human organism or in the culture medium surrounding said non-human organism.

[67015] A further embodiment of the present invention relates to a process for the production of campesterol, which comprises
[67016] (a) increasing or generating the activity of a polypeptide comprising a polypeptide as depicted in the respective line in column 5 or 8 of Table II, application no. 14, or a homolog or a fragment thereof, a consensus sequence or at least one polypeptide motif as depicted in the respective line in column 8 of Table IV, application no. 14, whereby the respective line disclose in column 7 the fine chemical campesterol; or
[67017] increasing or generating the activity of an expression product of one or more nucleic acid molecule(s) comprising a polynucleotide as depicted in the respective line in column 5 or 8 of Table I, application no. 14, preferably the coding region thereof, or a homolog or a fragment thereof, whereby the respective line disclose in column 7 the fine chemical campesterol;
[67018] non-targeted in a non-human organism or a part thereof; preferably a microorganism, a plant cell, a plant or a part thereof, as compared to a corresponding non-transformed wild type non-human organism or a part thereof; and
[67019] (b) growing the non-human organism under conditions which permit the production of campesterol, or a composition comprising campesterol in said non-human organism or in the culture medium surrounding said non-human organism.

[67020] A further embodiment of the present invention relates to a process for the production of stigmasterol, which comprises
[67021] (a) increasing or generating the activity of a polypeptide comprising a polypeptide as depicted in the respective line in column 5 or 8 of Table II, application no. 14, or a homolog or a fragment thereof, a consensus sequence or at least one polypeptide motif as depicted in the respective line in column 8 of Table IV, application no. 14, whereby the respective line disclose in column 7 the fine chemical stigmasterol; or
[67022] increasing or generating the activity of an expression product of one or more nucleic acid molecule(s) comprising a polynucleotide as depicted in the respective line in column 5 or 8 of Table I, application no. 14, preferably the coding region thereof, or a homolog or a fragment thereof, whereby the respective line disclose in column 7 the fine chemical stigmasterol;
[67023] non-targeted in a non-human organism or a part thereof; preferably a microorganism, a plant cell, a plant or a part thereof, as compared to a corresponding non-transformed wild type non-human organism or a part thereof; and
[67024] (b) growing the non-human organism under conditions which permit the production of stigmasterol, or a composition comprising stigmasterol in said non-human organism or in the culture medium surrounding said non-human organism.

[67025] A further embodiment of the present invention relates to a process for the production of campesterol, which comprises
[67026] (a) increasing or generating one or more activities selected from the group consisting of C-4 sterol methyl oxidase in an organelle, preferably in plastids or mitochondria, especially in plastids, of a non-human organism or a part thereof, preferably a microorganism, a plant cell, a plant or a part thereof, as compared to a corresponding non-transformed wild type non-human organism or a part thereof; and
[67027] (b) growing the non-human organism or a part thereof under conditions which permit the production of campesterol or a composition comprising campesterol in said non-human organism or in the culture medium surrounding said non-human organism.

[67028] A further embodiment of the present invention relates to a process for the production of campesterol, which comprises
[67029] (a) increasing or generating one or more activities selected from the group consisting of protein phosphatase in an organelle, preferably in plastids or mitochondria, especially in plastids, of a non-human organism or a part thereof, preferably a microorganism, a plant cell, a plant or a part thereof, as compared to a corresponding non-transformed wild type non-human organism or a part thereof; and
[67030] (b) growing the non-human organism or a part thereof under conditions which permit the production of campesterol or a composition comprising campesterol in said non-human organism or in the culture medium surrounding said non-human organism.

[67031] A further embodiment of the present invention relates to a process for the production of campesterol, which comprises
[67032] (a) increasing or generating one or more activities selected from the group consisting of eukaryotic translation initiation factor 5 in an organelle, preferably in plastids or mitochondria, especially in plastids, of a non-human organism or a part thereof, preferably a microorganism organism, a plant cell, a plant or a part thereof, as compared to a corresponding non-transformed wild type non-human organism or a part thereof; and
[67033] (b) growing the non-human organism or a part thereof under conditions which permit the production of campesterol or a composition comprising campesterol in said non-human organism or in the culture medium surrounding said non-human organism.

[67034] A further embodiment of the present invention relates to a process for the production of beta-sitosterol, which comprises
[67035] (a) increasing or generating one or more activities selected from the group consisting of calcium-dependent protein kinase in an organelle, preferably in plastids or mitochondria, especially in plastids, of a non-human organism or a part thereof, preferably a microorganism, a plant cell, a plant or a part thereof, as compared to a corresponding non-transformed wild type non-human organism or a part thereof; and
[67036] (b) growing the non-human organism or a part thereof under conditions which permit the production of beta-sitosterol or a composition comprising beta-sitosterol in said non-human organism or in the culture medium surrounding said non-human organism.

[67037] A further embodiment of the present invention relates to a process for the production of campesterol, which comprises
[67038] (a) increasing or generating one or more activities selected from the group consisting of calcium-dependent protein kinase in an organelle, preferably in plastids or mitochondria, especially in plastids, of a non-human organism or a part thereof, preferably a microorganism, plant cell, a plant or a part thereof, as compared to a corresponding non-transformed wild type non-human organism or a part thereof; and
[67039] (b) growing the non-human organism or a part thereof under conditions which permit the production of campesterol or a composition comprising campesterol in said non-human organism or in the culture medium surrounding said non-human organism.

[67040] A further embodiment of the present invention relates to a process for the production of beta-sitosterol, which comprises
[67041] (a) increasing or generating one or more activities selected from the group consisting of transcription factor in an organelle, preferably in plastids or mitochondria, especially in plastids, of a non-human organism or a part thereof, preferably a microorganism, a plant cell, a plant or a part thereof, as compared to a corresponding non-transformed wild type non-human organism or a part thereof; and
[67042] (b) growing the non-human organism or a part thereof under conditions which permit the production of beta-sitosterol or a composition comprising beta-sitosterol in said non-human organism or in the culture medium surrounding said non-human organism.

[67043] A further embodiment of the present invention relates to a process for the production of campesterol, which comprises
[67044] (a) increasing or generating one or more activities selected from the group consisting of transcription factor in an organelle, preferably in plastids or mitochondria, especially in plastids, of a non-human organism or a part thereof, preferably a microorganism, a plant cell, a plant or a part thereof, as compared to a corresponding non-transformed wild type non-human organism or a part thereof; and
[67045] (b) growing the non-human organism or a part thereof under conditions which permit the production of campesterol or a composition comprising campesterol in said non-human organism or in the culture medium surrounding said non-human organism.

[67046] A further embodiment of the present invention relates to a process for the production of campesterol, which comprises
[67047] (a) increasing or generating one or more activities selected from the group consisting of protein phosphatase in an organelle, preferably in plastids or mitochondria, especially in plastids, of a non-human organism or a part thereof, preferably a microorganism, a plant cell, a plant or a part thereof, as compared to a corresponding non-transformed wild type non-human organism or a part thereof; and
[67048] (b) growing the non-human organism or a part thereof under conditions which permit the production of campesterol or a composition comprising campesterol in said non-human organism or in the culture medium surrounding said non-human organism.

[67049] A further embodiment of the present invention relates to a process for the production of campesterol, which comprises
[67050] (a) increasing or generating one or more activities selected from the group consisting of ankyrin repeat family protein in an organelle, preferably in plastids or mitochondria, especially in plastids, of a non-human organism or a part thereof, preferably a microorganism, a plant cell, a plant or a part thereof, as compared to a corresponding non-transformed wild type non-human organism or a part thereof; and
[67051] (b) growing the non-human organism or a part thereof under conditions which permit the production of campesterol or a composition comprising campesterol in said non-human organism or in the culture medium surrounding said non-human organism.

[67052] A further embodiment of the present invention relates to a process for the production of beta-sitosterol, which comprises
[67053] (a) increasing or generating one or more activities selected from the group consisting of transcription factor in an organelle, preferably in plastids or mitochondria, especially in plastids, of a non-human organism or a part thereof, preferably a microorganism, a plant cell, a plant or a part thereof, as compared to a corresponding non-transformed wild type non-human organism or a part thereof; and
[67054] (b) growing the non-human organism or a part thereof under conditions which permit the production of beta-sitosterol or a composition comprising beta-sitosterol in said non-human organism or in the culture medium surrounding said non-human organism.

[67055] A further embodiment of the present invention relates to a process for the production of campesterol, which comprises
[67056] (a) increasing or generating one or more activities selected from the group consisting of transcription factor in an organelle, preferably in plastids or mitochondria, especially in plastids, of a non-human organism or a part thereof, preferably a microorganism, a plant cell, a plant or a part thereof, as compared to a corresponding non-transformed wild type non-human organism or a part thereof; and
[67057] (b) growing the non-human organism or a part thereof under conditions which permit the production of campesterol or a composition comprising campesterol in said non-human organism or in the culture medium surrounding said non-human organism.

[67058] A further embodiment of the present invention relates to a process for the production of campesterol, which comprises
[67059] (a) increasing or generating one or more activities selected from the group consisting of sterol desaturase in an organelle, preferably in plastids or mitochondria, especially in plastids, of a non-human organism or a part thereof, preferably a microorganism, a plant cell, a plant or a part thereof, as compared to a corresponding non-transformed wild type non-human organism or a part thereof; and
[67060] (b) growing the non-human organism or a part thereof under conditions which permit the production of campesterol or a composition comprising campesterol in said non-human organism or in the culture medium surrounding said non-human organism.

[67061] A further embodiment of the present invention relates to a process for the production of beta-sitosterol, which comprises
[67062] (a) increasing or generating one or more activities selected from the group consisting of monothiol glutaredoxin in an organelle, preferably in plastids or mitochondria, especially in plastids, of a non-human organism or a part thereof, preferably a microorganism, a plant cell, a plant or a part thereof, as compared to a corresponding non-transformed wild type non-human organism or a part thereof; and
[67063] (b) growing the non-human organism or a part thereof under conditions which permit the production of beta-sitosterol or a composition comprising beta-sitosterol in said non-human organism or in the culture medium surrounding said non-human organism.

[67064] A further embodiment of the present invention relates to a process for the production of campesterol, which comprises
[67065] (a) increasing or generating one or more activities selected from the group consisting of protein phosphatase in an organelle, preferably in plastids or mitochondria, especially in plastids, of a non-human organism or a part thereof, preferably a microorganism, a plant cell, a plant or a part thereof, as compared to a corresponding non-transformed wild type non-human organism or a part thereof; and
[67066] (b) growing the non-human organism or a part thereof under conditions which permit the production of campesterol or a composition comprising campesterol in said non-human organism or in the culture medium surrounding said non-human organism.

[67067] A further embodiment of the present invention relates to a process for the production of beta-sitosterol, which comprises
[67068] (a) increasing or generating one or more activities selected from the group consisting of calcium-dependent protein kinase in an organelle, preferably in plastids or mitochondria, especially in plastids, of a non-human organism or a part thereof, preferably a microorganism, a plant cell, a plant or a part thereof, as compared to a corresponding non-transformed wild type non-human organism or a part thereof; and
[67069] (b) growing the non-human organism or a part thereof under conditions which permit the production of beta-sitosterol or a composition comprising beta-sitosterol in said non-human organism or in the culture medium surrounding said non-human organism.

[67070] A further embodiment of the present invention relates to a process for the production of campesterol, which comprises
[67071] (a) increasing or generating one or more activities selected from the group consisting of calcium-dependent protein kinase in an organelle, preferably in plastids or mitochondria, especially in plastids, of a non-human organism or a part thereof, preferably a microorganism, a plant cell, a plant or a part thereof, as compared to a corresponding non-transformed wild type non-human organism or a part thereof; and
[67072] (b) growing the non-human organism or a part thereof under conditions which permit the production of campesterol or a composition comprising campesterol in said non-human organism or in the culture medium surrounding said non-human organism.

[67073] A further embodiment of the present invention relates to a process for the production of campesterol, which comprises
[67074] (a) increasing or generating one or more activities selected from the group consisting of protein phosphatase in an organelle, preferably in plastids or mitochondria, especially in plastids, of a non-human organism or a part thereof, preferably a microorganism, a plant cell, a plant or a part thereof, as compared to a corresponding non-transformed wild type non-human organism or a part thereof; and
[67075] (b) growing the non-human organism or a part thereof under conditions which permit the production of campesterol or a composition comprising campesterol in said non-human organism or in the culture medium surrounding said non-human organism.

[67076] A further embodiment of the present invention relates to a process for the production of beta-sitosterol, which comprises
[67077] (a) increasing or generating one or more activities selected from the group consisting of protein phosphatase in an organelle, preferably in plastids or mitochondria, especially in plastids, of a non-human organism or a part thereof, preferably a microorganism, a plant cell, a plant or a part thereof, as compared to a corresponding non-transformed wild type non-human organism or a part thereof; and
[67078] (b) growing the non-human organism or a part thereof under conditions which permit the production of beta-sitosterol or a composition comprising beta-sitosterol in said non-human organism or in the culture medium surrounding said non-human organism.

[67079] A further embodiment of the present invention relates to a process for the production of beta-sitosterol, which comprises
[67080] (a) increasing or generating one or more activities selected from the group consisting of protein kinase in an organelle, preferably in plastids or mitochondria, especially in plastids, of a non-human organism or a part thereof, preferably a microorganism, a plant cell, a plant or a part thereof, as compared to a corresponding non-transformed wild type non-human organism or a part thereof; and
[67081] (b) growing the non-human organism or a part thereof under conditions which permit the production of beta-sitosterol or a composition comprising beta-sitosterol in said non-human organism or in the culture medium surrounding said non-human organism.

[67082] A further embodiment of the present invention relates to a process for the production of beta-sitosterol, which comprises
[67083] (a) increasing or generating one or more activities selected from the group consisting of sec-independent protein translocase in an organelle, preferably in plastids or mitochondria, especially in plastids, of a non-human organism or a part thereof, preferably a microorganism, a plant cell, a plant or a part thereof, as compared to a corresponding non-transformed wild type non-human organism or a part thereof; and
[67084] (b) growing the non-human organism or a part thereof under conditions which permit the production of beta-sitosterol or a composition comprising beta-sitosterol in said non-human organism or in the culture medium surrounding said non-human organism.

[67085] A further embodiment of the present invention relates to a process for the production of campesterol, which comprises
[67086] (a) increasing or generating one or more activities selected from the group consisting of 2-oxoglutarate dehydrogenase E1 subunit in an organelle, preferably in plastids or mitochondria, especially in plastids, of a non-human organism or a part thereof, preferably a microorganism, a plant cell, a plant or a part thereof, as compared to a corresponding non-transformed wild type non-human organism or a part thereof; and
[67087] (b) growing the non-human organism or a part thereof under conditions which permit the production of campesterol or a composition comprising campesterol in said non-human organism or in the culture medium surrounding said non-human organism.

[67088] A further embodiment of the present invention relates to a process for the production of campesterol, which comprises
[67089] (a) increasing or generating one or more activities selected from the group consisting of oxidoreductase in an organelle, preferably in plastids or mitochondria, especially in plastids, of a non-human organism or a part thereof, preferably a microorganism, a plant cell, a plant or a part thereof, as compared to a corresponding non-transformed wild type non-human organism or a part thereof; and
[67090] (b) growing the non-human organism or a part thereof under conditions which permit the production of campesterol or a composition comprising campesterol in said non-human organism or in the culture medium surrounding said non-human organism.

[67091] A further embodiment of the present invention relates to a process for the production of beta-sitosterol, which comprises
[67092] (a) increasing or generating one or more activities selected from the group consisting of CTP synthase in an organelle, preferably in plastids or mitochondria, especially in plastids, of a non-human organism or a part thereof, preferably a microorganism, a plant cell, a plant or a part thereof, as compared to a corresponding non-transformed wild type non-human organism or a part thereof; and
[67093] (b) growing the non-human organism or a part thereof under conditions which permit the production of beta-sitosterol or a composition comprising beta-sitosterol in said non-human organism or in the culture medium surrounding said non-human organism.

[67094] A further embodiment of the present invention relates to a process for the production of campesterol, which comprises
[67095] (a) increasing or generating one or more activities selected from the group consisting of CTP synthase in an organelle, preferably in plastids or mitochondria, especially in plastids, of a non-human organism or a part thereof, preferably a microorganism, a plant cell, a plant or a part thereof, as compared to a corresponding non-transformed wild type non-human organism or a part thereof; and
[67096] (b) growing the non-human organism or a part thereof under conditions which permit the production of campesterol or a composition comprising campesterol in said non-human organism or in the culture medium surrounding said non-human organism.

[67097] A further embodiment of the present invention relates to a process for the production of campesterol, which comprises
[67098] (a) increasing or generating one or more activities selected from the group consisting of recombinase A in an organelle, preferably in plastids or mitochondria, especially in plastids, of a non-human organism or a part thereof, preferably a microorganism, a plant cell, a plant or a part thereof, as compared to a corresponding non-transformed wild type non-human organism or a part thereof; and
[67099] (b) growing the non-human organism or a part thereof under conditions which permit the production of campesterol or a composition comprising campesterol in said non-human organism or in the culture medium surrounding said non-human organism.

[67100] A further embodiment of the present invention relates to a process for the production of beta-sitosterol, which comprises
[67101] (a) increasing or generating one or more activities selected from the group consisting of hydrolase in an organelle, preferably in plastids or mitochondria, especially in plastids, of a non-human organism or a part thereof, preferably a microorganism, a plant cell, a plant or a part thereof, as compared to a corresponding non-transformed wild type non-human organism or a part thereof; and
[67102] (b) growing the non-human organism or a part thereof under conditions which permit the production of beta-sitosterol or a composition comprising beta-sitosterol in said non-human organism or in the culture medium surrounding said non-human organism.

[67103] A further embodiment of the present invention relates to a process for the production of campesterol, which comprises
[67104] (a) increasing or generating one or more activities selected from the group consisting of hydrolase in an organelle, preferably in plastids or mitochondria, especially in plastids, of a non-human organism or a part thereof, preferably a microorganism, a plant cell, a plant or a part thereof, as compared to a corresponding non-transformed wild type non-human organism or a part thereof; and
[67105] (b) growing the non-human organism or a part thereof under conditions which permit the production of campesterol or a composition comprising campesterol in said non-human organism or in the culture medium surrounding said non-human organism.

[67106] A further embodiment of the present invention relates to a process for the production of campesterol, which comprises
[67107] (a) increasing or generating one or more activities selected from the group consisting of threonine synthase in an organelle, preferably in plastids or mitochondria, especially in plastids, of a non-human organism or a part thereof, preferably a microorganism, a plant cell, a plant or a part thereof, as compared to a corresponding non-transformed wild type non-human organism or a part thereof; and
[67108] (b) growing the non-human organism or a part thereof under conditions which permit the pro-duction of campesterol or a composition comprising campesterol in said non-human organism or in the culture medium surrounding said non-human organism.

[67109] A further embodiment of the present invention relates to a process for the production of campesterol, which comprises
[67110] (a) increasing or generating one or more activities selected from the group consisting of L-ribulose-5-phosphate 4-epimerase in an organelle, preferably in plastids or mitochondria, especially in plastids, of a non-human organism or a part thereof, preferably a microorganism, a plant cell, a plant or a part thereof, as compared to a corresponding non-transformed wild type non-human organism or a part thereof; and
[67111] (b) growing the non-human organism or a part thereof under conditions which permit the production of campesterol or a composition comprising campesterol in said non-human organism or in the culture medium surrounding said non-human organism.

[67112] A further embodiment of the present invention relates to a process for the production of campesterol, which comprises
[67113] (a) increasing or generating one or more activities selected from the group consisting of glucose dehydrogenase in an organelle, preferably in plastids or mitochondria, especially in plastids, of a non-human organism or a part thereof, preferably a microorganism, a plant cell, a plant or a part thereof, as compared to a corresponding non-transformed wild type non-human organism or a part thereof; and
[67114] (b) growing the non-human organism or a part thereof under conditions which permit the production of campesterol or a composition comprising campesterol in said non-human organism or in the culture medium surrounding said non-human organism.

[67115] A further embodiment of the present invention relates to a process for the production of beta-sitosterol, which comprises
[67116] (a) increasing or generating one or more activities selected from the group consisting of ATP-binding component of a transport system in an organelle, preferably in plastids or mitochondria, especially in plastids, of a non-human organism or a part thereof, preferably a microorganism, a plant cell, a plant or a part thereof, as compared to a corresponding non-transformed wild type non-human organism or a part thereof; and
[67117] (b) growing the non-human organism or a part thereof under conditions which permit the production of beta-sitosterol or a composition comprising beta-sitosterol in said non-human organism or in the culture medium surrounding said non-human organism.

[67118] A further embodiment of the present invention relates to a process for the production of campesterol, which comprises
[67119] (a) increasing or generating one or more activities selected from the group consisting of ATP-binding component of a transport system in an organelle, preferably in plastids or mitochondria, especially in plastids, of a non-human organism or a part thereof, preferably a microorganism, a plant cell, a plant or a part thereof, as compared to a corresponding non-transformed wild type non-human organism or a part thereof; and
[67120] (b) growing the non-human organism or a part thereof under conditions which permit the production of campesterol or a composition comprising campesterol in said non-human organism or in the culture medium surrounding said non-human organism.

[67121] A further embodiment of the present invention relates to a process for the production of campesterol, which comprises
[67122] (a) increasing or generating one or more activities selected from the group consisting of membrane transport protein in an organelle, preferably in plastids or mitochondria, especially in plastids, of a non-human organism or a part thereof, preferably a microorganism, a plant cell, a plant or a part thereof, as compared to a corresponding non-transformed wild type non-human organism or a part thereof; and
[67123] (b) growing the non-human organism or a part thereof under conditions which permit the production of campesterol or a composition comprising campesterol in said non-human organism or in the culture medium surrounding said non-human organism.

[67124] A further embodiment of the present invention relates to a process for the production of campesterol, which comprises
[67125] (a) increasing or generating one or more activities selected from the group consisting of putrescine transport system permease protein in an organelle, preferably in plastids or mitochondria, especially in plastids, of a non-human organism or a part thereof, preferably a microorganism, a plant cell, a plant or a part thereof, as compared to a corresponding non-transformed wild type non-human organism or a part thereof; and
[67126] (b) growing the non-human organism or a part thereof under conditions which permit the production of campesterol or a composition comprising campesterol in said non-human organism or in the culture medium surrounding said non-human organism.

[67127] A further embodiment of the present invention relates to a process for the production of beta-sitosterol, which comprises
[67128] (a) increasing or generating one or more activities selected from the group consisting of multidrug resistance protein in an organelle, preferably in plastids or mitochondria, especially in plastids, of a non-human organism or a part thereof, preferably a microorganism, a plant cell, a plant or a part thereof, as compared to a corresponding non-transformed wild type non-human organism or a part thereof; and
[67129] (b) growing the non-human organism or a part thereof under conditions which permit the production of beta-sitosterol or a composition comprising beta-sitosterol in said non-human organism or in the culture medium surrounding said non-human organism.

[67130] A further embodiment of the present invention relates to a process for the production of beta-sitosterol, which comprises
[67131] (a) increasing or generating one or more activities selected from the group consisting of sodium/proton antiporter in an organelle, preferably in plastids or mitochondria, especially in plastids, of a non-human organism or a part thereof, preferably a microorganism, a plant cell, a plant or a part thereof, as compared to a corresponding non-transformed wild type non-human organism or a part thereof; and
[67132] (b) growing the non-human organism or a part thereof under conditions which permit the production of beta-sitosterol or a composition comprising beta-sitosterol in said non-human organism or in the culture medium surrounding said non-human organism.

[67133] A further embodiment of the present invention relates to a process for the production of campesterol, which comprises
[67134] (a) increasing or generating one or more activities selected from the group consisting of sodium/proton antiporter in an organelle, preferably in plastids or mitochondria, especially in plastids, of a non-human organism or a part thereof, preferably a microorganism, a plant cell, a plant or a part thereof, as compared to a corresponding non-transformed wild type non-human organism or a part thereof; and
[67135] (b) growing the non-human organism or a part thereof under conditions which permit the production of campesterol or a composition comprising campesterol in said non-human organism or in the culture medium surrounding said non-human organism.

[67136] A further embodiment of the present invention relates to a process for the production of beta-sitosterol, which comprises
[67137] (a) increasing or generating one or more activities selected from the group consisting of phenylacetic acid degradation protein in an organelle, preferably in plastids or mitochondria, especially in plastids, of a non-human organism or a part thereof, preferably a microorganism, a plant cell, a plant or a part thereof, as compared to a corresponding non-transformed wild type non-human organism or a part thereof; and
[67138] (b) growing the non-human organism or a part thereof under conditions which permit the production of beta-sitosterol or a composition comprising beta-sitosterol in said non-human organism or in the culture medium surrounding said non-human organism.

[67139] A further embodiment of the present invention relates to a process for the production of campesterol, which comprises
[67140] (a) increasing or generating one or more activities selected from the group consisting of phenylacetic acid degradation protein in an organelle, preferably in plastids or mitochondria, especially in plastids, of a non-human organism or a part thereof, preferably a microorganism organism, a plant cell, a plant or a part thereof, as compared to a corresponding non-transformed wild type non-human organism or a part thereof; and
[67141] (b) growing the non-human organism or a part thereof under conditions which permit the production of campesterol or a composition comprising campesterol in said non-human organism or in the culture medium surrounding said non-human organism.

[67142] A further embodiment of the present invention relates to a process for the production of campesterol, which comprises
[67143] (a) increasing or generating one or more activities selected from the group consisting of b1401-protein in an organelle, preferably in plastids or mitochondria, especially in plastids, of a non-human organism or a part thereof, preferably a microorganism, a plant cell, a plant or a part thereof, as compared to a corresponding non-transformed wild type non-human organism or a part thereof; and
[67144] (b) growing the non-human organism or a part thereof under conditions which permit the production of campesterol or a composition comprising campesterol in said non-human organism or in the culture medium surrounding said non-human organism.

[67145] A further embodiment of the present invention relates to a process for the production of campesterol, which comprises
[67146] (a) increasing or generating one or more activities selected from the group consisting of lipoprotein precursor in an organelle, preferably in plastids or mitochondria, especially in plastids, of a non-human organism or a part thereof, preferably a microorganism, a plant cell, a plant or a part thereof, as compared to a corresponding non-transformed wild type non-human organism or a part thereof; and
[67147] (b) growing the non-human organism or a part thereof under conditions which permit the production of campesterol or a composition comprising campesterol in said non-human organism or in the culture medium surrounding said non-human organism.

[67148] A further embodiment of the present invention relates to a process for the production of beta-sitosterol, which comprises
[67149] (a) increasing or generating one or more activities selected from the group consisting of acid shock protein in an organelle, preferably in plastids or mitochondria, especially in plastids, of a non-human organism or a part thereof, preferably a microorganism, a plant cell, a plant or a part thereof, as compared to a corresponding non-transformed wild type non-human organism or a part thereof; and
[67150] (b) growing the non-human organism or a part thereof under conditions which permit the production of beta-sitosterol or a composition comprising beta-sitosterol in said non-human organism or in the culture medium surrounding said non-human organism.

[67151] A further embodiment of the present invention relates to a process for the production of campesterol, which comprises
[67152] (a) increasing or generating one or more activities selected from the group consisting of acid shock protein in an organelle, preferably in plastids or mitochondria, especially in plastids, of a non-human organism or a part thereof, preferably a microorganism, a plant cell, a plant or a part thereof, as compared to a corresponding non-transformed wild type non-human organism or a part thereof; and
[67153] (b) growing the non-human organism or a part thereof under conditions which permit the production of campesterol or a composition comprising campesterol in said non-human organism or in the culture medium surrounding said non-human organism.

[67154] A further embodiment of the present invention relates to a process for the production of campesterol, which comprises
[67155] (a) increasing or generating one or more activities selected from the group consisting of B1795-protein in an organelle, preferably in plastids or mitochondria, especially in plastids, of a non-human organism or a part thereof, preferably a microorganism, a plant cell, a plant or a part thereof, as compared to a corresponding non-transformed wild type non-human organism or a part thereof; and
[67156] (b) growing the non-human organism or a part thereof under conditions which permit the production of campesterol or a composition comprising campesterol in said non-human organism or in the culture medium surrounding said non-human organism.

[67157] A further embodiment of the present invention relates to a process for the production of campesterol, which comprises
[67158] (a) increasing or generating one or more activities selected from the group consisting of acetyltransferase in an organelle, preferably in plastids or mitochondria, especially in plastids, of a non-human organism or a part thereof, preferably a microorganism, a plant cell, a plant or a part thereof, as compared to a corresponding non-transformed wild type non-human organism or a part thereof; and
[67159] (b) growing the non-human organism or a part thereof under conditions which permit the production of campesterol or a composition comprising campesterol in said non-human organism or in the culture medium surrounding said non-human organism.

[67160] A further embodiment of the present invention relates to a process for the production of campesterol, which comprises
[67161] (a) increasing or generating one or more activities selected from the group consisting of b2107-protein in an organelle, preferably in plastids or mitochondria, especially in plastids, of a non-human organism or a part thereof, preferably a microorganism, a plant cell, a plant or a part thereof, as compared to a corresponding non-transformed wild type non-human organism or a part thereof; and
[67162] (b) growing the non-human organism or a part thereof under conditions which permit the production of campesterol or a composition comprising campesterol in said non-human organism or in the culture medium surrounding said non-human organism.

[67163] A further embodiment of the present invention relates to a process for the production of campesterol, which comprises
[67164] (a) increasing or generating one or more activities selected from the group consisting of NADH dehydrogenase I chain N in an organelle, preferably in plastids or mitochondria, especially in plastids, of a non-human organism or a part thereof, preferably a microorganism, a plant cell, a plant or a part thereof, as compared to a corresponding non-transformed wild type non-human organism or a part thereof; and
[67165] (b) growing the non-human organism or a part thereof under conditions which permit the production of campesterol or a composition comprising campesterol in said non-human organism or in the culture medium surrounding said non-human organism.

[67166] A further embodiment of the present invention relates to a process for the production of campesterol, which comprises
[67167] (a) increasing or generating one or more activities selected from the group consisting of amidophosphoribosyltransferase in an organelle, preferably in plastids or mitochondria, especially in plastids, of a non-human organism or a part thereof, preferably a microorganism, a plant cell, a plant or a part thereof, as compared to a corresponding non-transformed wild type non-human organism or a part thereof; and
[67168] (b) growing the non-human organism or a part thereof under conditions which permit the production of campesterol or a composition comprising campesterol in said non-human organism or in the culture medium surrounding said non-human organism.

[67169] A further embodiment of the present invention relates to a process for the production of campesterol, which comprises
[67170] (a) increasing or generating one or more activities selected from the group consisting of b2376-protein in an organelle, preferably in plastids or mitochondria, especially in plastids, of a non-human organism or a part thereof, preferably a microorganism, a plant cell, a plant or a part thereof, as compared to a corresponding non-transformed wild type non-human organism or a part thereof; and
[67171] (b) growing the non-human organism or a part thereof under conditions which permit the production of campesterol or a composition comprising campesterol in said non-human organism or in the culture medium surrounding said non-human organism.

[67172] A further embodiment of the present invention relates to a process for the production of campesterol, which comprises
[67173] (a) increasing or generating one or more activities selected from the group consisting of b2399-protein in an organelle, preferably in plastids or mitochondria, especially in plastids, of a non-human organism or a part thereof, preferably a microorganism, a plant cell, a plant or a part thereof, as compared to a corresponding non-transformed wild type non-human organism or a part thereof; and
[67174] (b) growing the non-human organism or a part thereof under conditions which permit the production of campesterol or a composition comprising campesterol in said non-human organism or in the culture medium surrounding said non-human organism.

[67175] A further embodiment of the present invention relates to a process for the production of campesterol, which comprises
[67176] (a) increasing or generating one or more activities selected from the group consisting of b2474-protein in an organelle, preferably in plastids or mitochondria, especially in plastids, of a non-human organism or a part thereof, preferably a microorganism, a plant cell, a plant or a part thereof, as compared to a corresponding non-transformed wild type non-human organism or a part thereof; and
[67177] (b) growing the non-human organism or a part thereof under conditions which permit the production of campesterol or a composition comprising campesterol in said non-human organism or in the culture medium surrounding said non-human organism.

[67178] A further embodiment of the present invention relates to a process for the production of campesterol, which comprises
[67179] (a) increasing or generating one or more activities selected from the group consisting of permease protein in an organelle, preferably in plastids or mitochondria, especially in plastids, of a non-human organism or a part thereof, preferably a microorganism, a plant cell, a plant or a part thereof, as compared to a corresponding non-transformed wild type non-human organism or a part thereof; and
[67180] (b) growing the non-human organism or a part thereof under conditions which permit the production of campesterol or a composition comprising campesterol in said non-human organism or in the culture medium surrounding said non-human organism.

[67181] A further embodiment of the present invention relates to a process for the production of campesterol, which comprises
[67182] (a) increasing or generating one or more activities selected from the group consisting of b2513-protein in an organelle, preferably in plastids or mitochondria, especially in plastids, of a non-human organism or a part thereof, preferably a microorganism, a plant cell, a plant or a part thereof, as compared to a corresponding non-transformed wild type non-human organism or a part thereof; and
[67183] (b) growing the non-human organism or a part thereof under conditions which permit the production of campesterol or a composition comprising campesterol in said non-human organism or in the culture medium surrounding said non-human organism.

[67184] A further embodiment of the present invention relates to a process for the production of beta-sitosterol, which comprises
[67185] (a) increasing or generating one or more activities selected from the group consisting of putative transport system permease protein in an organelle, preferably in plastids or mitochondria, especially in plastids, of a non-human organism or a part thereof, preferably a microorganism, a plant cell, a plant or a part thereof, as compared to a corresponding non-transformed wild type non-human organism or a part thereof; and
[67186] (b) growing the non-human organism or a part thereof under conditions which permit the production of beta-sitosterol or a composition comprising beta-sitosterol in said non-human organism or in the culture medium surrounding said non-human organism.

[67187] A further embodiment of the present invention relates to a process for the production of campesterol, which comprises
[67188] (a) increasing or generating one or more activities selected from the group consisting of putative transport system permease protein in an organelle, preferably in plastids or mitochondria, especially in plastids, of a non-human organism or a part thereof, preferably a microorganism, a plant cell, a plant or a part thereof, as compared to a corresponding non-transformed wild type non-human organism or a part thereof; and
[67189] (b) growing the non-human organism or a part thereof under conditions which permit the production of campesterol or a composition comprising campesterol in said non-human organism or in the culture medium surrounding said non-human organism.

[67190] A further embodiment of the present invention relates to a process for the production of campesterol, which comprises
[67191] (a) increasing or generating one or more activities selected from the group consisting of b2654-protein in an organelle, preferably in plastids or mitochondria, especially in plastids, of a non-human organism or a part thereof, preferably a microorganism, a plant cell, a plant or a part thereof, as compared to a corresponding non-transformed wild type non-human organism or a part thereof; and
[67192] (b) growing the non-human organism or a part thereof under conditions which permit the production of campesterol or a composition comprising campesterol in said non-human organism or in the culture medium surrounding said non-human organism.

[67193] A further embodiment of the present invention relates to a process for the production of campesterol, which comprises
[67194] (a) increasing or generating one or more activities selected from the group consisting of murein transglycosylase in an organelle, preferably in plastids or mitochondria, especially in plastids, of a non-human organism or a part thereof, preferably a microorganism, a plant cell, a plant or a part thereof, as compared to a corresponding non-transformed wild type non-human organism or a part thereof; and
[67195] (b) growing the non-human organism or a part thereof under conditions which permit the production of campesterol or a composition comprising campesterol in said non-human organism or in the culture medium surrounding said non-human organism.

[67196] A further embodiment of the present invention relates to a process for the production of campesterol, which comprises
[67197] (a) increasing or generating one or more activities selected from the group consisting of oxidoreductase in an organelle, preferably in plastids or mitochondria, especially in plastids, of a non-human organism or a part thereof, preferably a microorganism, a plant cell, a plant or a part thereof, as compared to a corresponding non-transformed wild type non-human organism or a part thereof; and
[67198] (b) growing the non-human organism or a part thereof under conditions which permit the production of campesterol or a composition comprising campesterol in said non-human organism or in the culture medium surrounding said non-human organism.

[67199] A further embodiment of the present invention relates to a process for the production of campesterol, which comprises
[67200] (a) increasing or generating one or more activities selected from the group consisting of xanthine dehydrogenase in an organelle, preferably in plastids or mitochondria, especially in plastids, of a non-human organism or a part thereof, preferably a microorganism, a plant cell, a plant or a part thereof, as compared to a corresponding non-transformed wild type non-human organism or a part thereof; and
[67201] (b) growing the non-human organism or a part thereof under conditions which permit the production of campesterol or a composition comprising campesterol in said non-human organism or in the culture medium surrounding said non-human organism.

[67202] A further embodiment of the present invention relates to a process for the production of campesterol, which comprises
[67203] (a) increasing or generating one or more activities selected from the group consisting of b3151-protein in an organelle, preferably in plastids or mitochondria, especially in plastids, of a non-human organism or a part thereof, preferably a microorganism, a plant cell, a plant or a part thereof, as compared to a corresponding non-transformed wild type non-human organism or a part thereof; and
[67204] (b) growing the non-human organism or a part thereof under conditions which permit the production of campesterol or a composition comprising campesterol in said non-human organism or in the culture medium surrounding said non-human organism.

[67205] A further embodiment of the present invention relates to a process for the production of beta-sitosterol, which comprises
[67206] (a) increasing or generating one or more activities selected from the group consisting of methyltransferase in an organelle, preferably in plastids or mitochondria, especially in plastids, of a non-human organism or a part thereof, preferably a microorganism, a plant cell, a plant or a part thereof, as compared to a corresponding non-transformed wild type non-human organism or a part thereof; and
[67207] (b) growing the non-human organism or a part thereof under conditions which permit the production of beta-sitosterol or a composition comprising beta-sitosterol in said non-human organism or in the culture medium surrounding said non-human organism.

[67208] A further embodiment of the present invention relates to a process for the production of campesterol, which comprises
[67209] (a) increasing or generating one or more activities selected from the group consisting of threonine dehydrogenase in an organelle, preferably in plastids or mitochondria, especially in plastids, of a non-human organism or a part thereof, preferably a microorganism, a plant cell, a plant or a part thereof, as compared to a corresponding non-transformed wild type non-human organism or a part thereof; and
[67210] (b) growing the non-human organism or a part thereof under conditions which permit the production of campesterol or a composition comprising campesterol in said non-human organism or in the culture medium surrounding said non-human organism.

[67211] A further embodiment of the present invention relates to a process for the production of beta-sitosterol, which comprises
[67212] (a) increasing or generating one or more activities selected from the group consisting of b3989-protein in an organelle, preferably in plastids or mitochondria, especially in plastids, of a non-human organism or a part thereof, preferably a microorganism, a plant cell, a plant or a part thereof, as compared to a corresponding non-transformed wild type non-human organism or a part thereof; and
[67213] (b) growing the non-human organism or a part thereof under conditions which permit the production of beta-sitosterol or a composition comprising beta-sitosterol in said non-human organism or in the culture medium surrounding said non-human organism.

[67214] A further embodiment of the present invention relates to a process for the production of campesterol, which comprises
[67215] (a) increasing or generating one or more activities selected from the group consisting of b3989-protein in an organelle, preferably in plastids or mitochondria, especially in plastids, of a non-human organism or a part thereof, preferably a microorganism, a plant cell, a plant or a part thereof, as compared to a corresponding non-transformed wild type non-human organism or a part thereof; and
[67216] (b) growing the non-human organism or a part thereof under conditions which permit the production of campesterol or a composition comprising campesterol in said non-human organism or in the culture medium surrounding said non-human organism.

[67217] A further embodiment of the present invention relates to a process for the production of beta-sitosterol, which comprises
[67218] (a) increasing or generating one or more activities selected from the group consisting of b4029-protein in an organelle, preferably in plastids or mitochondria, especially in plastids, of a non-human organism or a part thereof, preferably a microorganism, a plant cell, a plant or a part thereof, as compared to a corresponding non-transformed wild type non-human organism or a part thereof; and
[67219] (b) growing the non-human organism or a part thereof under conditions which permit the production of beta-sitosterol or a composition comprising beta-sitosterol in said non-human organism or in the culture medium surrounding said non-human organism.

[67220] A further embodiment of the present invention relates to a process for the production of stigmasterol, which comprises
[67221] (a) increasing or generating one or more activities selected from the group consisting of b4029-protein in an organelle, preferably in plastids or mitochondria, especially in plastids, of a non-human organism or a part thereof, preferably a microorganism, a plant cell, a plant or a part thereof, as compared to a corresponding non-transformed wild type non-human organism or a part thereof; and
[67222] (b) growing the non-human organism or a part thereof under conditions which permit the production of stigmasterol or a composition comprising stigmasterol in said non-human organism or in the culture medium surrounding said non-human organism.

[67223] A further embodiment of the present invention relates to a process for the production of beta-sitosterol, which comprises
[67224] (a) increasing or generating one or more activities selected from the group consisting of b4205-protein in an organelle, preferably in plastids or mitochondria, especially in plastids, of a non-human organism or a part thereof, preferably a microorganism, a plant cell, a plant or a part thereof, as compared to a corresponding non-transformed wild type non-human organism or a part thereof; and
[67225] (b) growing the non-human organism or a part thereof under conditions which permit the production of beta-sitosterol or a composition comprising beta-sitosterol in said non-human organism or in the culture medium surrounding said non-human organism.

[67226] A further embodiment of the present invention relates to a process for the production of beta-sitosterol, which comprises
[67227] (a) increasing or generating one or more activities selected from the group consisting of glutaredoxin in an organelle, preferably in plastids or mitochondria, especially in plastids, of a non-human organism or a part thereof, preferably a microorganism, a plant cell, a plant or a part thereof, as compared to a corresponding non-transformed wild type non-human organism or a part thereof; and
[67228] (b) growing the non-human organism or a part thereof under conditions which permit the production of beta-sitosterol or a composition comprising beta-sitosterol in said non-human organism or in the culture medium surrounding said non-human organism.

[67229] A further embodiment of the present invention relates to a process for the production of campesterol, which comprises
[67230] (a) increasing or generating one or more activities selected from the group consisting of glutaredoxin in an organelle, preferably in plastids or mitochondria, especially in plastids, of a non-human organism or a part thereof, preferably a microorganism, a plant cell, a plant or a part thereof, as compared to a corresponding non-transformed wild type non-human organism or a part thereof; and
[67231] (b) growing the non-human organism or a part thereof under conditions which permit the production of campesterol or a composition comprising campesterol in said non-human organism or in the culture medium surrounding said non-human organism.

[67232] A further embodiment of the present invention relates to a process for the production of beta-sitosterol, which comprises
[67233] (a) increasing or generating one or more activities selected from the group consisting of transcription factor in an organelle, preferably in plastids or mitochondria, especially in plastids, of a non-human organism or a part thereof, preferably a microorganism, a plant cell, a plant or a part thereof, as compared to a corresponding non-transformed wild type non-human organism or a part thereof; and
[67234] (b) growing the non-human organism or a part thereof under conditions which permit the pro-duction of beta-sitosterol or a composition comprising beta-sitosterol in said non-human organism or in the culture medium surrounding said non-human organism.

[67235] A further embodiment of the present invention relates to a process for the production of campesterol, which comprises
[67236] (a) increasing or generating one or more activities selected from the group consisting of transcription factor in an organelle, preferably in plastids or mitochondria, especially in plastids, of a non-human organism or a part thereof, preferably a microorganism, a plant cell, a plant or a part thereof, as compared to a corresponding non-transformed wild type non-human organism or a part thereof; and
[67237] (b) growing the non-human organism or a part thereof under conditions which permit the production of campesterol or a composition comprising campesterol in said non-human organism or in the culture medium surrounding said non-human organism.

[67238] A further embodiment of the present invention relates to a process for the production of beta-sitosterol, which comprises
[67239] (a) increasing or generating one or more activities selected from the group consisting of cyclin D in an organelle, preferably in plastids or mitochondria, especially in plastids, of a non-human organism or a part thereof, preferably a microorganism, a plant cell, a plant or a part thereof, as compared to a corresponding non-transformed wild type non-human organism or a part thereof; and
[67240] (b) growing the non-human organism or a part thereof under conditions which permit the production of beta-sitosterol or a composition comprising beta-sitosterol in said non-human organism or in the culture medium surrounding said non-human organism.

[67241] A further embodiment of the present invention relates to a process for the production of campesterol, which comprises
[67242] (a) increasing or generating one or more activities selected from the group consisting of cyclin D in an organelle, preferably in plastids or mitochondria, especially in plastids, of a non-human organism or a part thereof, preferably a microorganism, a plant cell, a plant or a part thereof, as compared to a corresponding non-transformed wild type non-human organism or a part thereof; and
[67243] (b) growing the non-human organism or a part thereof under conditions which permit the production of campesterol or a composition comprising campesterol in said non-human organism or in the culture medium surrounding said non-human organism.

[67244] A further embodiment of the present invention relates to a process for the production of campesterol, which comprises
[67245] (a) increasing or generating one or more activities selected from the group consisting of sll0406-protein in an organelle, preferably in plastids or mitochondria, especially in plastids, of a non-human organism or a part thereof, preferably a microorganism, a plant cell, a plant or a part thereof, as compared to a corresponding non-transformed wild type non-human organism or a part thereof; and
[67246] (b) growing the non-human organism or a part thereof under conditions which permit the production of campesterol or a composition comprising campesterol in said non-human organism or in the culture medium surrounding said non-human organism.

[67247] A further embodiment of the present invention relates to a process for the production of campesterol, which comprises
[67248] (a) increasing or generating one or more activities selected from the group consisting of cation transport protein in an organelle, preferably in plastids or mitochondria, especially in plastids, of a non-human organism or a part thereof, preferably a microorganism, a plant cell, a plant or a part thereof, as compared to a corresponding non-transformed wild type non-human organism or a part thereof; and
[67249] (b) growing the non-human organism or a part thereof under conditions which permit the production of campesterol or a composition comprising campesterol in said non-human organism or in the culture medium surrounding said non-human organism.

[67250] A further embodiment of the present invention relates to a process for the production of beta-sitosterol, which comprises
[67251] (a) increasing or generating one or more activities selected from the group consisting of CTP synthetase in an organelle, preferably in plastids or mitochondria, especially in plastids, of a non-human organism or a part thereof, preferably a microorganism, a plant cell, a plant or a part thereof, as compared to a corresponding non-transformed wild type non-human organism or a part thereof; and
[67252] (b) growing the non-human organism or a part thereof under conditions which permit the production of beta-sitosterol or a composition comprising beta-sitosterol in said non-human organism or in the culture medium surrounding said non-human organism.

[67253] A further embodiment of the present invention relates to a process for the production of campesterol, which comprises
[67254] (a) increasing or generating one or more activities selected from the group consisting of CTP synthetase in an organelle, preferably in plastids or mitochondria, especially in plastids, of a non-human organism or a part thereof, preferably a microorganism, a plant cell, a plant or a part thereof, as compared to a corresponding non-transformed wild type non-human organism or a part thereof; and
[67255] (b) growing the non-human organism or a part thereof under conditions which permit the production of campesterol or a composition comprising campesterol in said non-human organism or in the culture medium surrounding said non-human organism.

[67256] A further embodiment of the present invention relates to a process for the production of beta-sitosterol, which comprises
[67257] (a) increasing or generating one or more activities selected from the group consisting of phosphoribulokinase in an organelle, preferably in plastids or mitochondria, especially in plastids, of a non-human organism or a part thereof, preferably a microorganism, a plant cell, a plant or a part thereof, as compared to a corresponding non-transformed wild type non-human organism or a part thereof; and
[67258] (b) growing the non-human organism or a part thereof under conditions which permit the production of beta-sitosterol or a composition comprising beta-sitosterol in said non-human organism or in the culture medium surrounding said non-human organism.

[67259] A further embodiment of the present invention relates to a process for the production of beta-sitosterol, which comprises
[67260] (a) increasing or generating one or more activities selected from the group consisting of ABC metal ion transporter substrate-binding protein in an organelle, preferably in plastids or mitochondria, especially in plastids, of a non-human organism or a part thereof, preferably a microorganism, a plant cell, a plant or a part thereof, as compared to a corresponding non-transformed wild type non-human organism or a part thereof; and
[67261] (b) growing the non-human organism or a part thereof under conditions which permit the production of beta-sitosterol or a composition comprising beta-sitosterol in said non-human organism or in the culture medium surrounding said non-human organism.

[67262] A further embodiment of the present invention relates to a process for the production of campesterol, which comprises
[67263] (a) increasing or generating one or more activities selected from the group consisting of sll1761-protein in an organelle, preferably in plastids or mitochondria, especially in plastids, of a non-human organism or a part thereof, preferably a microorganism, a plant cell, a plant or a part thereof, as compared to a corresponding non-transformed wild type non-human organism or a part thereof; and
[67264] (b) growing the non-human organism or a part thereof under conditions which permit the production of campesterol or a composition comprising campesterol in said non-human organism or in the culture medium surrounding said non-human organism.

[67265] A further embodiment of the present invention relates to a process for the production of beta-sitosterol, which comprises
[67266] (a) increasing or generating one or more activities selected from the group consisting of acyl transferase in an organelle, preferably in plastids or mitochondria, especially in plastids, of a non-human organism or a part thereof, preferably a microorganism, a plant cell, a plant or a part thereof, as compared to a corresponding non-transformed wild type non-human organism or a part thereof; and
[67267] (b) growing the non-human organism or a part thereof under conditions which permit the production of beta-sitosterol or a composition comprising beta-sitosterol in said non-human organism or in the culture medium surrounding said non-human organism.

[67268] A further embodiment of the present invention relates to a process for the production of campesterol, which comprises
[67269] (a) increasing or generating one or more activities selected from the group consisting of cation-transporting ATPase in an organelle, preferably in plastids or mitochondria, especially in plastids, of a non-human organism or a part thereof, preferably a microorganism, a plant cell, a plant or a part thereof, as compared to a corresponding non-transformed wild type non-human organism or a part thereof; and
[67270] (b) growing the non-human organism or a part thereof under conditions which permit the production of campesterol or a composition comprising campesterol in said non-human organism or in the culture medium surrounding said non-human organism.

[67271] A further embodiment of the present invention relates to a process for the production of beta-sitosterol, which comprises
[67272] (a) increasing or generating one or more activities selected from the group consisting of oxidoreductase in an organelle, preferably in plastids or mitochondria, especially in plastids, of a non-human organism or a part thereof, preferably a microorganism, a plant cell, a plant or a part thereof, as compared to a corresponding non-transformed wild type non-human organism or a part thereof; and
[67273] (b) growing the non-human organism or a part thereof under conditions which permit the production of beta-sitosterol or a composition comprising beta-sitosterol in said non-human organism or in the culture medium surrounding said non-human organism.

[67274] A further embodiment of the present invention relates to a process for the production of campesterol, which comprises
[67275] (a) increasing or generating one or more activities selected from the group consisting of permease protein of ABC transporter in an organelle, preferably in plastids or mitochondria, especially in plastids, of a non-human organism or a part thereof, preferably a microorganism, a plant cell, a plant or a part thereof, as compared to a corresponding non-transformed wild type non-human organism or a part thereof; and
[67276] (b) growing the non-human organism or a part thereof under conditions which permit the production of campesterol or a composition comprising campesterol in said non-human organism or in the culture medium surrounding said non-human organism.

[67277] A further embodiment of the present invention relates to a process for the production of campesterol, which comprises
[67278] (a) increasing or generating one or more activities selected from the group consisting of tryptophan synthase alpha chain in an organelle, preferably in plastids or mitochondria, especially in plastids, of a non-human organism or a part thereof, preferably a microorganism, a plant cell, a plant or a part thereof, as compared to a corresponding non-transformed wild type non-human organism or a part thereof; and
[67279] (b) growing the non-human organism or a part thereof under conditions which permit the production of campesterol or a composition comprising campesterol in said non-human organism or in the culture medium surrounding said non-human organism.

[67280] A further embodiment of the present invention relates to a process for the production of beta-sitosterol, which comprises
[67281] (a) increasing or generating one or more activities selected from the group consisting of multiple antibiotic resistance protein in an organelle, preferably in plastids or mitochondria, especially in plastids, of a non-human organism or a part thereof, preferably a microorganism, a plant cell, a plant or a part thereof, as compared to a corresponding non-transformed wild type non-human organism or a part thereof; and
[67282] (b) growing the non-human organism or a part thereof under conditions which permit the production of beta-sitosterol or a composition comprising beta-sitosterol in said non-human organism or in the culture medium surrounding said non-human organism.

[67283] A further embodiment of the present invention relates to a process for the production of campesterol, which comprises
[67284] (a) increasing or generating one or more activities selected from the group consisting of multiple antibiotic resistance protein in an organelle, preferably in plastids or mitochondria, especially in plastids, of a non-human organism or a part thereof, preferably a microorganism, a plant cell, a plant or a part thereof, as compared to a corresponding non-transformed wild type non-human organism or a part thereof; and
[67285] (b) growing the non-human organism or a part thereof under conditions which permit the production of campesterol or a composition comprising campesterol in said non-human organism or in the culture medium surrounding said non-human organism.

[67286] A further embodiment of the present invention relates to a process for the production of beta-sitosterol, which comprises
[67287] (a) increasing or generating one or more activities selected from the group consisting of TTC1386-protein in an organelle, preferably in plastids or mitochondria, especially in plastids, of a non-human organism or a part thereof, preferably a microorganism, a plant cell, a plant or a part thereof, as compared to a corresponding non-transformed wild type non-human organism or a part thereof; and
[67288] (b) growing the non-human organism or a part thereof under conditions which permit the production of beta-sitosterol or a composition comprising beta-sitosterol in said non-human organism or in the culture medium surrounding said non-human organism.

[67289] A further embodiment of the present invention relates to a process for the production of campesterol, which comprises
[67290] (a) increasing or generating one or more activities selected from the group consisting of TTC1386-protein in an organelle, preferably in plastids or mitochondria, especially in plastids, of a non-human organism or a part thereof, preferably a microorganism, a plant cell, a plant or a part thereof, as compared to a corresponding non-transformed wild type non-human organism or a part thereof; and
[67291] (b) growing the non-human organism or a part thereof under conditions which permit the production of campesterol or a composition comprising campesterol in said non-human organism or in the culture medium surrounding said non-human organism.

[67292] A further embodiment of the present invention relates to a process for the production of campesterol, which comprises
[67293] (a) increasing or generating one or more activities selected from the group consisting of homocitrate synthase in an organelle, preferably in plastids or mitochondria, especially in plastids, of a non-human organism or a part thereof, preferably a microorganism, a plant cell, a plant or a part thereof, as compared to a corresponding non-transformed wild type non-human organism or a part thereof; and
[67294] (b) growing the non-human organism or a part thereof under conditions which permit the production of campesterol or a composition comprising campesterol in said non-human organism or in the culture medium surrounding said non-human organism.

[67295] A further embodiment of the present invention relates to a process for the production of campesterol, which comprises
[67296] (a) increasing or generating one or more activities selected from the group consisting of homocitrate synthase in an organelle, preferably in plastids or mitochondria, especially in plastids, of a non-human organism or a part thereof, preferably a microorganism, a plant cell, a plant or a part thereof, as compared to a corresponding non-transformed wild type non-human organism or a part thereof; and
[67297] (b) growing the non-human organism or a part thereof under conditions which permit the production of campesterol or a composition comprising campesterol in said non-human organism or in the culture medium surrounding said non-human organism.

[67298] A further embodiment of the present invention relates to a process for the production of campesterol, which comprises
[67299] (a) increasing or generating one or more activities selected from the group consisting of cyclin in an organelle, preferably in plastids or mitochondria, especially in plastids, of a non-human organism or a part thereof, preferably a microorganism, a plant cell, a plant or a part thereof, as compared to a corresponding non-transformed wild type non-human organism or a part thereof; and
[67300] (b) growing the non-human organism or a part thereof under conditions which permit the production of campesterol or a composition comprising campesterol in said non-human organism or in the culture medium surrounding said non-human organism.

[67301] A further embodiment of the present invention relates to a process for the production of campesterol, which comprises
[67302] (a) increasing or generating one or more activities selected from the group consisting of ydl235c-protein in an organelle, preferably in plastids or mitochondria, especially in plastids, of a non-human organism or a part thereof, preferably a microorganism, a plant cell, a plant or a part thereof, as compared to a corresponding non-transformed wild type non-human organism or a part thereof; and
[67303] (b) growing the non-human organism or a part thereof under conditions which permit the production of campesterol or a composition comprising campesterol in said non-human organism or in the culture medium surrounding said non-human organism.

[67304] A further embodiment of the present invention relates to a process for the production of campesterol, which comprises
[67305] (a) increasing or generating one or more activities selected from the group consisting of oxidoreductase in an organelle, preferably in plastids or mitochondria, especially in plastids, of a non-human organism or a part thereof, preferably a microorganism, a plant cell, a plant or a part thereof, as compared to a corresponding non-transformed wild type non-human organism or a part thereof; and
[67306] (b) growing the non-human organism or a part thereof under conditions which permit the production of campesterol or a composition comprising campesterol in said non-human organism or in the culture medium surrounding said non-human organism.

[67307] A further embodiment of the present invention relates to a process for the production of campesterol, which comprises
[67308] (a) increasing or generating one or more activities selected from the group consisting of polygalacturonase in an organelle, preferably in plastids or mitochondria, especially in plastids, of a non-human organism or a part thereof, preferably a microorganism, a plant cell, a plant or a part thereof, as compared to a corresponding non-transformed wild type non-human organism or a part thereof; and
[67309] (b) growing the non-human organism or a part thereof under conditions which permit the production of campesterol or a composition comprising campesterol in said non-human organism or in the culture medium surrounding said non-human organism.

[67310] A further embodiment of the present invention relates to a process for the production of campesterol, which comprises
[67311] (a) increasing or generating one or more activities selected from the group consisting of ynl321w-protein in an organelle, preferably in plastids or mitochondria, especially in plastids, of a non-human organism or a part thereof, preferably a microorganism, a plant cell, a plant or a part thereof, as compared to a corresponding non-transformed wild type non-human organism or a part thereof; and
[67312] (b) growing the non-human organism or a part thereof under conditions which permit the production of campesterol or a composition comprising campesterol in said non-human organism or in the culture medium surrounding said non-human organism.

[67313] A further embodiment of the present invention relates to a process for the production of beta-sitosterol, which comprises
[67314] (a) increasing or generating one or more activities selected from the group consisting of acetyl-CoA acetyltransferase in an organelle, preferably in plastids or mitochondria, especially in plastids, of a non-human organism or a part thereof, preferably a microorganism, a plant cell, a plant or a part thereof, as compared to a corresponding non-transformed wild type non-human organism or a part thereof; and
[67315] (b) growing the non-human organism or a part thereof under conditions which permit the production of beta-sitosterol or a composition comprising beta-sitosterol in said non-human organism or in the culture medium surrounding said non-human organism.

[67316] A further embodiment of the present invention relates to a process for the production of beta-sitosterol, which comprises
[67317] (a) increasing or generating one or more activities selected from the group consisting of ypr170c-protein in an organelle, preferably in plastids or mitochondria, especially in plastids, of a non-human organism or a part thereof, preferably a microorganism, a plant cell, a plant or a part thereof, as compared to a corresponding non-transformed wild type non-human organism or a part thereof; and
[67318] (b) growing the non-human organism or a part thereof under conditions which permit the production of beta-sitosterol or a composition comprising beta-sitosterol in said non-human organism or in the culture medium surrounding said non-human organism.

[67319] A further embodiment of the present invention relates to a process for the production of campesterol, which comprises
[67320] (a) increasing or generating one or more activities selected from the group consisting of glucose-6-phosphate 1-dehydrogenase in an organelle, preferably in plastids or mitochondria, especially in plastids, of a non-human organism or a part thereof, preferably a microorganism organism, a plant cell, a plant or a part thereof, as compared to a corresponding non-transformed wild type non-human organism or a part thereof; and
[67321] (b) growing the non-human organism or a part thereof under conditions which permit the production of campesterol or a composition comprising campesterol in said non-human organism or in the culture medium surrounding said non-human organism.

[67322] A further embodiment of the present invention relates to a process for the production of beta-sitosterol, which comprises
[67323] (a1) increasing or generating the activity of a polypeptide comprising a polypeptide as depicted in the respective line in column 5 or 8 of Table II, application no. 14, or a homolog or fragment thereof, a consensus sequence or at least one polypeptide motif as depicted in column 8 of Table IV, application no. 14, whereby the respective line disclose in column 7 the fine chemical beta-sitosterol; or
[67324] increasing or generating the activity of an expression product of one or more nucleic acid molecule(s) comprising a polynucleotide as depicted in the respective line in column 5 or 8 of Table I, application no. 14, preferably the coding region thereof, or a homolog or a fragment thereof, whereby the respective line disclose in column 7 the fine chemical beta-sitosterol;
[67325] in an organelle, preferably in plastids or mitochondria, especially in plastids, in a non-human organism or a part thereof; preferably a microorganism, a plant cell, a plant or a part thereof, as compared to a corresponding non-transformed wild type non-human organism or a part thereof; or
[67326] (a2) increasing or generating the activity of a polypeptide comprising a polypeptide as depicted in the respective line in column 5 or 8 of Table II, application no. 14, or a homolog or a fragment thereof, a consensus sequence or at least one polypeptide motif as depicted in the respective line in column 8 of Table IV, application no. 14, which is joined to a transit peptide, whereby the respective line disclose in column 7 the fine chemical beta-sitosterol; or
[67327] increasing or generating the activity of an expression product of one or more nucleic acid molecule(s) comprising a polynucleotide as depicted in the respective line in column 5 or 8 of Table I, application no. 14, preferably the coding region thereof, or a homolog or a fragment thereof, which is joined to a nucleic acid sequence encoding an organelle localization sequence, preferably a plastid or a mitochondrion localization sequence, especially a plastid localization sequence, whereby the respective line disclose in column 7 the fine chemical beta-sitosterol;
[67328] in a non-human organism or a part thereof; preferably a microorganism, a plant cell, a plant or a part thereof, as compared to a corresponding non-transformed wild type non-human organism or a part thereof; or
[67329] (a3) increasing or generating the activity of a polypeptide comprising a polypeptide as depicted in the respective line in column 5 or 8 of Table II, application no. 14, or a homolog or a fragment thereof, a consensus sequence or at least one polypeptide motif as depicted in the respective line in column 8 of Table IV, application no. 14, whereby the respective line disclose in column 7 the fine chemical beta-sitosterol; or
[67330] increasing or generating the activity of an expression product of one or more nucleic acid molecule(s) comprising a polynucleotide as depicted in the respective line in column 5 or 8 of Table I, application no. 14, preferably the coding region thereof, or a homolog or a fragment thereof, whereby the respective line disclose in column 7 the fine chemical beta-sitosterol;
[67331] in an organelle, preferably in plastids or mitochondria, especially in plastids, in a non-human organism or a part thereof; preferably a microorganism, a plant cell, a plant or a part thereof, through transformation of the organelle, as compared to a corresponding non-transformed wild type non-human organism or a part thereof;
[67332] and
[67333] (b) growing the non-human organism under conditions which permit the production of beta-sitosterol, or a composition comprising beta-sitosterol in said non-human organism or in the culture medium surrounding said non-human organism.

[67334] A further embodiment of the present invention relates to a process for the production of campesterol, which comprises
[67335] (a1) increasing or generating the activity of a polypeptide comprising a polypeptide as depicted in the respective line in column 5 or 8 of Table II, application no. 14, or a homolog or fragment thereof, a consensus sequence or at least one polypeptide motif as depicted in column 8 of Table IV, application no. 14, whereby the respective line disclose in column 7 the fine chemical campesterol; or
[67336] increasing or generating the activity of an expression product of one or more nucleic acid molecule(s) comprising a polynucleotide as depicted in the respective line in column 5 or 8 of Table I, application no. 14, preferably the coding region thereof, or a homolog or a fragment thereof, whereby the respective line disclose in column 7 the fine chemical campesterol;
[67337] in an organelle, preferably in plastids or mitochondria, especially in plastids, in a non-human organism or a part thereof; preferably a microorganism, a plant cell, a plant or a part thereof, as compared to a corresponding non-transformed wild type non-human organism or a part thereof; or
[67338] (a2) increasing or generating the activity of a polypeptide comprising a polypeptide as depicted in the respective line in column 5 or 8 of Table II, application no. 14, or a homolog or a fragment thereof, a consensus sequence or at least one polypeptide motif as depicted in the respective line in column 8 of Table IV, application no. 14, which is joined to a transit peptide, whereby the respective line disclose in column 7 the fine chemical campesterol; or
[67339] increasing or generating the activity of an expression product of one or more nucleic acid molecule(s) comprising a polynucleotide as depicted in the respective line in column 5 or 8 of Table I, application no. 14, preferably the coding region thereof, or a homolog or a fragment thereof, which is joined to a nucleic acid sequence encoding an organelle localization sequence, preferably a plastid or a mitochondrion localization sequence, especially a plastid localization sequence, whereby the respective line disclose in column 7 the fine chemical campesterol;
[67340] in a non-human organism or a part thereof; preferably a microorganism, a plant cell, a plant or a part thereof, as compared to a corresponding non-transformed wild type non-human organism or a part thereof; or
[67341] (a3) increasing or generating the activity of a polypeptide comprising a polypeptide as depicted in the respective line in column 5 or 8 of Table II, application no. 14, or a homolog or a fragment thereof, a consensus sequence or at least one polypeptide motif as depicted in the respective line in column 8 of Table IV, application no. 14, whereby the respective line disclose in column 7 the fine chemical campesterol; or
[67342] increasing or generating the activity of an expression product of one or more nucleic acid molecule(s) comprising a polynucleotide as depicted in the respective line in column 5 or 8 of Table I, application no. 14, preferably the coding region thereof, or a homolog or a fragment thereof, whereby the respective line disclose in column 7 the fine chemical campesterol;
[67343] in an organelle, preferably in plastids or mitochondria, especially in plastids, in a non-human organism or a part thereof; preferably a microorganism, a plant cell, a plant or a part thereof, through transformation of the organelle, as compared to a corresponding non-transformed wild type non-human organism or a part thereof;
[67344] and
[67345] (b) growing the non-human organism under conditions which permit the production of campesterol, or a composition comprising campesterol in said non-human organism or in the culture medium surrounding said non-human organism.

[67346] A further embodiment of the present invention relates to a process for the production of stigmasterol, which comprises
[67347] (a1) increasing or generating the activity of a polypeptide comprising a polypeptide as depicted in the respective line in column 5 or 8 of Table II, application no. 14, or a homolog or fragment thereof, a consensus sequence or at least one polypeptide motif as depicted in column 8 of Table IV, application no. 14, whereby the respective line disclose in column 7 the fine chemical stigmasterol; or
[67348] increasing or generating the activity of an expression product of one or more nucleic acid molecule(s) comprising a polynucleotide as depicted in the respective line in column 5 or 8 of Table I, application no. 14, preferably the coding region thereof, or a homolog or a fragment thereof, whereby the respective line disclose in column 7 the fine chemical stigmasterol;
[67349] in an organelle, preferably in plastids or mitochondria, especially in plastids, in a non-human organism or a part thereof; preferably a microorganism, a plant cell, a plant or a part thereof, as compared to a corresponding non-transformed wild type non-human organism or a part thereof; or
[67350] (a2) increasing or generating the activity of a polypeptide comprising a polypeptide as depicted in the respective line in column 5 or 8 of Table II, application no. 14, or a homolog or a fragment thereof, a consensus sequence or at least one polypeptide motif as depicted in the respective line in column 8 of Table IV, application no. 14, which is joined to a transit peptide, whereby the respective line disclose in column 7 the fine chemical stigmasterol; or
[67351] increasing or generating the activity of an expression product of one or more nucleic acid molecule(s) comprising a polynucleotide as depicted in the respective line in column 5 or 8 of Table I, application no. 14, preferably the coding region thereof, or a homolog or a fragment thereof, which is joined to a nucleic acid sequence encoding an organelle localization sequence, preferably a plastid or a mitochondrion localization sequence, especially a plastid localization sequence, whereby the respective line disclose in column 7 the fine chemical stigmasterol;
[67352] in a non-human organism or a part thereof; preferably a microorganism, a plant cell, a plant or a part thereof, as compared to a corresponding non-transformed wild type non-human organism or a part thereof; or
[67353] (a3) increasing or generating the activity of a polypeptide comprising a polypeptide as depicted in the respective line in column 5 or 8 of Table II, application no. 14, or a homolog or a fragment thereof, a consensus sequence or at least one polypeptide motif as depicted in the respective line in column 8 of Table IV, application no. 14, whereby the respective line disclose in column 7 the fine chemical stigmasterol; or
[67354] increasing or generating the activity of an expression product of one or more nucleic acid molecule(s) comprising a polynucleotide as depicted in the respective line in column 5 or 8 of Table I, application no. 14, preferably the coding region thereof, or a homolog or a fragment thereof, whereby the respective line disclose in column 7 the fine chemical stigmasterol;
[67355] in an organelle, preferably in plastids or mitochondria, especially in plastids, in a non-human organism or a part thereof; preferably a microorganism, a plant cell, a plant or a part thereof, through transformation of the organelle, as compared to a corresponding non-transformed wild type non-human organism or a part thereof;
[67356] and
[67357] (b) growing the non-human organism under conditions which permit the production of stigmasterol, or a composition comprising stigmasterol in said non-human organism or in the culture medium surrounding said non-human organism.

[67358] Accordingly, the present invention relates to a process for the production of campesterol, which comprises
[67359] (a) increasing or generating the activity of a C-4 sterol methyl oxidase in the cytosol of a cell of a non-human organism or a part thereof, preferably a microorganism, a plant cell, a plant or a part thereof, as compared to a corresponding non-transformed wild type non-human organism or a part thereof; and
[67360] (b) growing the non-human organism or a part thereof under conditions which permit the production of campesterol or a composition comprising campesterol in said non-human organism or in the culture medium surrounding said non-human organism.

[67361] Accordingly, the present invention relates to a process for the production of campesterol, which comprises
[67362] (a) increasing or generating the activity of a protein phosphatase in the cytosol of a cell of a non-human organism or a part thereof, preferably a microorganism, a plant cell, a plant or a part thereof, as compared to a corresponding non-transformed wild type non-human organism or a part thereof; and
[67363] (b) growing the non-human organism or a part thereof under conditions which permit the production of campesterol or a composition comprising campesterol in said non-human organism or in the culture medium surrounding said non-human organism.

[67364] Accordingly, the present invention relates to a process for the production of campesterol, which comprises
[67365] (a) increasing or generating the activity of a eukaryotic translation initiation factor 5 in the cytosol of a cell of a non-human organism or a part thereof, preferably a microorganism, a plant cell, a plant or a part thereof, as compared to a corresponding non-transformed wild type non-human organism or a part thereof; and
[67366] (b) growing the non-human organism or a part thereof under conditions which permit the production of campesterol or a composition comprising campesterol in said non-human organism or in the culture medium surrounding said non-human organism.

[67367] Accordingly, the present invention relates to a process for the production of beta-sitosterol, which comprises
[67368] (a) increasing or generating the activity of a calcium-dependent protein kinase in the cytosol of a cell of a non-human organism or a part thereof, preferably a microorganism, a plant cell, a plant or a part thereof, as compared to a corresponding non-transformed wild type non-human organism or a part thereof; and
[67369] (b) growing the non-human organism or a part thereof under conditions which permit the production of beta-sitosterol or a composition comprising beta-sitosterol in said non-human organism or in the culture medium surrounding said non-human organism.

[67370] Accordingly, the present invention relates to a process for the production of campesterol, which comprises
[67371] (a) increasing or generating the activity of a calcium-dependent protein kinase in the cytosol of a cell of a non-human organism or a part thereof, preferably a microorganism, a plant cell, a plant or a part thereof, as compared to a corresponding non-transformed wild type non-human organism or a part thereof; and
[67372] (b) growing the non-human organism or a part thereof under conditions which permit the production of campesterol or a composition comprising campesterol in said non-human organism or in the culture medium surrounding said non-human organism.

[67373] Accordingly, the present invention relates to a process for the production of beta-sitosterol, which comprises
[67374] (a) increasing or generating the activity of a transcription factor in the cytosol of a cell of a non-human organism or a part thereof, preferably a microorganism, a plant cell, a plant or a part thereof, as compared to a corresponding non-transformed wild type non-human organism or a part thereof; and
[67375] (b) growing the non-human organism or a part thereof under conditions which permit the production of beta-sitosterol or a composition comprising beta-sitosterol in said non-human organism or in the culture medium surrounding said non-human organism.

[67376] Accordingly, the present invention relates to a process for the production of campesterol, which comprises
[67377] (a) increasing or generating the activity of a transcription factor in the cytosol of a cell of a non-human organism or a part thereof, preferably a microorganism, a plant cell, a plant or a part thereof, as compared to a corresponding non-transformed wild type non-human organism or a part thereof; and
[67378] (b) growing the non-human organism or a part thereof under conditions which permit the production of campesterol or a composition comprising campesterol in said non-human organism or in the culture medium surrounding said non-human organism.

[67379] Accordingly, the present invention relates to a process for the production of campesterol, which comprises
[67380] (a) increasing or generating the activity of a protein phosphatase in the cytosol of a cell of a non-human organism or a part thereof, preferably a microorganism, a plant cell, a plant or a part thereof, as compared to a corresponding non-transformed wild type non-human organism or a part thereof; and
[67381] (b) growing the non-human organism or a part thereof under conditions which permit the production of campesterol or a composition comprising campesterol in said non-human organism or in the culture medium surrounding said non-human organism.

[67382] Accordingly, the present invention relates to a process for the production of campesterol, which comprises
[67383] (a) increasing or generating the activity of a ankyrin repeat family protein in the cytosol of a cell of a non-human organism or a part thereof, preferably a microorganism, a plant cell, a plant or a part thereof, as compared to a corresponding non-transformed wild type non-human organism or a part thereof; and
[67384] (b) growing the non-human organism or a part thereof under conditions which permit the production of campesterol or a composition comprising campesterol in said non-human organism or in the culture medium surrounding said non-human organism.

[67385] Accordingly, the present invention relates to a process for the production of beta-sitosterol, which comprises
[67386] (a) increasing or generating the activity of a transcription factor in the cytosol of a cell of a non-human organism or a part thereof, preferably a microorganism, a plant cell, a plant or a part thereof, as compared to a corresponding non-transformed wild type non-human organism or a part thereof; and
[67387] (b) growing the non-human organism or a part thereof under conditions which permit the production of beta-sitosterol or a composition comprising beta-sitosterol in said non-human organism or in the culture medium surrounding said non-human organism.

[67388] Accordingly, the present invention relates to a process for the production of campesterol, which comprises
[67389] (a) increasing or generating the activity of a transcription factor in the cytosol of a cell of a non-human organism or a part thereof, preferably a microorganism, a plant cell, a plant or a part thereof, as compared to a corresponding non-transformed wild type non-human organism or a part thereof; and
[67390] (b) growing the non-human organism or a part thereof under conditions which permit the production of campesterol or a composition comprising campesterol in said non-human organism or in the culture medium surrounding said non-human organism.

[67391] Accordingly, the present invention relates to a process for the production of campesterol, which comprises
[67392] (a) increasing or generating the activity of a sterol desaturase in the cytosol of a cell of a non-human organism or a part thereof, preferably a microorganism, a plant cell, a plant or a part thereof, as compared to a corresponding non-transformed wild type non-human organism or a part thereof; and
[67393] (b) growing the non-human organism or a part thereof under conditions which permit the production of campesterol or a composition comprising campesterol in said non-human organism or in the culture medium surrounding said non-human organism.

[67394] Accordingly, the present invention relates to a process for the production of beta-sitosterol, which comprises
[67395] (a) increasing or generating the activity of a monothiol glutaredoxin in the cytosol of a cell of a non-human organism or a part thereof, preferably a microorganism, a plant cell, a plant or a part thereof, as compared to a corresponding non-transformed wild type non-human organism or a part thereof; and
[67396] (b) growing the non-human organism or a part thereof under conditions which permit the production of beta-sitosterol or a composition comprising beta-sitosterol in said non-human organism or in the culture medium surrounding said non-human organism.

[67397] Accordingly, the present invention relates to a process for the production of campesterol, which comprises
[67398] (a) increasing or generating the activity of a protein phosphatase in the cytosol of a cell of a non-human organism or a part thereof, preferably a microorganism, a plant cell, a plant or a part thereof, as compared to a corresponding non-transformed wild type non-human organism or a part thereof; and
[67399] (b) growing the non-human organism or a part thereof under conditions which permit the production of campesterol or a composition comprising campesterol in said non-human organism or in the culture medium surrounding said non-human organism.

[67400] Accordingly, the present invention relates to a process for the production of beta-sitosterol, which comprises
[67401] (a) increasing or generating the activity of a calcium-dependent protein kinase in the cytosol of a cell of a non-human organism or a part thereof, preferably a microorganism, a plant cell, a plant or a part thereof, as compared to a corresponding non-transformed wild type non-human organism or a part thereof; and
[67402] (b) growing the non-human organism or a part thereof under conditions which permit the production of beta-sitosterol or a composition comprising beta-sitosterol in said non-human organism or in the culture medium surrounding said non-human organism.

[67403] Accordingly, the present invention relates to a process for the production of campesterol, which comprises
[67404] (a) increasing or generating the activity of a calcium-dependent protein kinase in the cytosol of a cell of a non-human organism or a part thereof, preferably a microorganism, a plant cell, a plant or a part thereof, as compared to a corresponding non-transformed wild type non-human organism or a part thereof; and
[67405] (b) growing the non-human organism or a part thereof under conditions which permit the production of campesterol or a composition comprising campesterol in said non-human organism or in the culture medium surrounding said non-human organism.

[67406] Accordingly, the present invention relates to a process for the production of campesterol, which comprises
[67407] (a) increasing or generating the activity of a protein phosphatase in the cytosol of a cell of a non-human organism or a part thereof, preferably a microorganism, a plant cell, a plant or a part thereof, as compared to a corresponding non-transformed wild type non-human organism or a part thereof; and
[67408] (b) growing the non-human organism or a part thereof under conditions which permit the production of campesterol or a composition comprising campesterol in said non-human organism or in the culture medium surrounding said non-human organism.

[67409] Accordingly, the present invention relates to a process for the production of beta-sitosterol, which comprises
[67410] (a) increasing or generating the activity of a protein phosphatase in the cytosol of a cell of a non-human organism or a part thereof, preferably a microorganism, a plant cell, a plant or a part thereof, as compared to a corresponding non-transformed wild type non-human organism or a part thereof; and
[67411] (b) growing the non-human organism or a part thereof under conditions which permit the production of beta-sitosterol or a composition comprising beta-sitosterol in said non-human organism or in the culture medium surrounding said non-human organism.

[67412] Accordingly, the present invention relates to a process for the production of beta-sitosterol, which comprises
[67413] (a) increasing or generating the activity of a protein kinase in the cytosol of a cell of a non-human organism or a part thereof, preferably a microorganism, a plant cell, a plant or a part thereof, as compared to a corresponding non-transformed wild type non-human organism or a part thereof; and
[67414] (b) growing the non-human organism or a part thereof under conditions which permit the production of beta-sitosterol or a composition comprising beta-sitosterol in said non-human organism or in the culture medium surrounding said non-human organism.

[67415] Accordingly, the present invention relates to a process for the production of beta-sitosterol, which comprises
[67416] (a) increasing or generating the activity of a sec-independent protein translocase in the cytosol of a cell of a non-human organism or a part thereof, preferably a microorganism, a plant cell, a plant or a part thereof, as compared to a corresponding non-transformed wild type non-human organism or a part thereof; and
[67417] (b) growing the non-human organism or a part thereof under conditions which permit the production of beta-sitosterol or a composition comprising beta-sitosterol in said non-human organism or in the culture medium surrounding said non-human organism.

[67418] Accordingly, the present invention relates to a process for the production of campesterol, which comprises
[67419] (a) increasing or generating the activity of a 2-oxoglutarate dehydrogenase E1 subunit in the cytosol of a cell of a non-human organism or a part thereof, preferably a microorganism, a plant cell, a plant or a part thereof, as compared to a corresponding non-transformed wild type non-human organism or a part thereof; and
[67420] (b) growing the non-human organism or a part thereof under conditions which permit the production of campesterol or a composition comprising campesterol in said non-human organism or in the culture medium surrounding said non-human organism.

[67421] Accordingly, the present invention relates to a process for the production of campesterol, which comprises
[67422] (a) increasing or generating the activity of a oxidoreductase in the cytosol of a cell of a non-human organism or a part thereof, preferably a microorganism, a plant cell, a plant or a part thereof, as compared to a corresponding non-transformed wild type non-human organism or a part thereof; and
[67423] (b) growing the non-human organism or a part thereof under conditions which permit the production of campesterol or a composition comprising campesterol in said non-human organism or in the culture medium surrounding said non-human organism.

[67424] Accordingly, the present invention relates to a process for the production of beta-sitosterol, which comprises
[67425] (a) increasing or generating the activity of a CTP synthase in the cytosol of a cell of a non-human organism or a part thereof, preferably a microorganism, a plant cell, a plant or a part thereof, as compared to a corresponding non-transformed wild type non-human organism or a part thereof; and
[67426] (b) growing the non-human organism or a part thereof under conditions which permit the production of beta-sitosterol or a composition comprising beta-sitosterol in said non-human organism or in the culture medium surrounding said non-human organism.

[67427] Accordingly, the present invention relates to a process for the production of campesterol, which comprises
[67428] (a) increasing or generating the activity of a CTP synthase in the cytosol of a cell of a non-human organism or a part thereof, preferably a microorganism, a plant cell, a plant or a part thereof, as compared to a corresponding non-transformed wild type non-human organism or a part thereof; and
[67429] (b) growing the non-human organism or a part thereof under conditions which permit the production of campesterol or a composition comprising campesterol in said non-human organism or in the culture medium surrounding said non-human organism.

[67430] Accordingly, the present invention relates to a process for the production of campesterol, which comprises
[67431] (a) increasing or generating the activity of a recombinase A in the cytosol of a cell of a non-human organism or a part thereof, preferably a microorganism, a plant cell, a plant or a part thereof, as compared to a corresponding non-transformed wild type non-human organism or a part thereof; and
[67432] (b) growing the non-human organism or a part thereof under conditions which permit the production of campesterol or a composition comprising campesterol in said non-human organism or in the culture medium surrounding said non-human organism.

[67433] Accordingly, the present invention relates to a process for the production of beta-sitosterol, which comprises
[67434] (a) increasing or generating the activity of a hydrolase in the cytosol of a cell of a non-human organism or a part thereof, preferably a microorganism, a plant cell, a plant or a part thereof, as compared to a corresponding non-transformed wild type non-human organism or a part thereof; and
[67435] (b) growing the non-human organism or a part thereof under conditions which permit the production of beta-sitosterol or a composition comprising beta-sitosterol in said non-human organism or in the culture medium surrounding said non-human organism.

[67436] Accordingly, the present invention relates to a process for the production of campesterol, which comprises
[67437] (a) increasing or generating the activity of a hydrolase in the cytosol of a cell of a non-human organism or a part thereof, preferably a microorganism, a plant cell, a plant or a part thereof, as compared to a corresponding non-transformed wild type non-human organism or a part thereof; and
[67438] (b) growing the non-human organism or a part thereof under conditions which permit the production of campesterol or a composition comprising campesterol in said non-human organism or in the culture medium surrounding said non-human organism.

[67439] Accordingly, the present invention relates to a process for the production of campesterol, which comprises
[67440] (a) increasing or generating the activity of a threonine synthase in the cytosol of a cell of a non-human organism or a part thereof, preferably a microorganism, a plant cell, a plant or a part thereof, as compared to a corresponding non-transformed wild type non-human organism or a part thereof; and
[67441] (b) growing the non-human organism or a part thereof under conditions which permit the production of campesterol or a composition comprising campesterol in said non-human organism or in the culture medium surrounding said non-human organism.

[67442] Accordingly, the present invention relates to a process for the production of campesterol, which comprises
[67443] (a) increasing or generating the activity of a L-ribulose-5-phosphate 4-epimerase in the cytosol of a cell of a non-human organism or a part thereof, preferably a microorganism, a plant cell, a plant or a part thereof, as compared to a corresponding non-transformed wild type non-human organism or a part thereof; and
[67444] (b) growing the non-human organism or a part thereof under conditions which permit the production of campesterol or a composition comprising campesterol in said non-human organism or in the culture medium surrounding said non-human organism.

[67445] Accordingly, the present invention relates to a process for the production of campesterol, which comprises
[67446] (a) increasing or generating the activity of a glucose dehydrogenase in the cytosol of a cell of a non-human organism or a part thereof, preferably a microorganism, a plant cell, a plant or a part thereof, as compared to a corresponding non-transformed wild type non-human organism or a part thereof; and
[67447] (b) growing the non-human organism or a part thereof under conditions which permit the production of campesterol or a composition comprising campesterol in said non-human organism or in the culture medium surrounding said non-human organism.

[67448] Accordingly, the present invention relates to a process for the production of beta-sitosterol, which comprises
[67449] (a) increasing or generating the activity of a ATP-binding component of a transport system in the cytosol of a cell of a non-human organism or a part thereof, preferably a microorganism, a plant cell, a plant or a part thereof, as compared to a corresponding non-transformed wild type non-human organism or a part thereof; and
[67450] (b) growing the non-human organism or a part thereof under conditions which permit the production of beta-sitosterol or a composition comprising beta-sitosterol in said non-human organism or in the culture medium surrounding said non-human organism.

[67451] Accordingly, the present invention relates to a process for the production of campesterol, which comprises
[67452] (a) increasing or generating the activity of a ATP-binding component of a transport system in the cytosol of a cell of a non-human organism or a part thereof, preferably a microorganism, a plant cell, a plant or a part thereof, as compared to a corresponding non-transformed wild type non-human organism or a part thereof; and
[67453] (b) growing the non-human organism or a part thereof under conditions which permit the production of campesterol or a composition comprising campesterol in said non-human organism or in the culture medium surrounding said non-human organism.

[67454] Accordingly, the present invention relates to a process for the production of campesterol, which comprises
[67455] (a) increasing or generating the activity of a membrane transport protein in the cytosol of a cell of a non-human organism or a part thereof, preferably a microorganism, a plant cell, a plant or a part thereof, as compared to a corresponding non-transformed wild type non-human organism or a part thereof; and
[67456] (b) growing the non-human organism or a part thereof under conditions which permit the production of campesterol or a composition comprising campesterol in said non-human organism or in the culture medium surrounding said non-human organism.

[67457] Accordingly, the present invention relates to a process for the production of campesterol, which comprises
[67458] (a) increasing or generating the activity of a putrescine transport system permease protein in the cytosol of a cell of a non-human organism or a part thereof, preferably a microorganism, a plant cell, a plant or a part thereof, as compared to a corresponding non-transformed wild type non-human organism or a part thereof; and
[67459] (b) growing the non-human organism or a part thereof under conditions which permit the production of campesterol or a composition comprising campesterol in said non-human organism or in the culture medium surrounding said non-human organism.

[67460] Accordingly, the present invention relates to a process for the production of beta-sitosterol, which comprises
[67461] (a) increasing or generating the activity of a multidrug resistance protein in the cytosol of a cell of a non-human organism or a part thereof, preferably a microorganism, a plant cell, a plant or a part thereof, as compared to a corresponding non-transformed wild type non-human organism or a part thereof; and
[67462] (b) growing the non-human organism or a part thereof under conditions which permit the production of beta-sitosterol or a composition comprising beta-sitosterol in said non-human organism or in the culture medium surrounding said non-human organism.

[67463] Accordingly, the present invention relates to a process for the production of beta-sitosterol, which comprises
[67464] (a) increasing or generating the activity of a sodium/proton antiporter in the cytosol of a cell of a non-human organism or a part thereof, preferably a microorganism, a plant cell, a plant or a part thereof, as compared to a corresponding non-transformed wild type non-human organism or a part thereof; and
[67465] (b) growing the non-human organism or a part thereof under conditions which permit the production of beta-sitosterol or a composition comprising beta-sitosterol in said non-human organism or in the culture medium surrounding said non-human organism.

[67466] Accordingly, the present invention relates to a process for the production of campesterol, which comprises
[67467] (a) increasing or generating the activity of a sodium/proton antiporter in the cytosol of a cell of a non-human organism or a part thereof, preferably a microorganism, a plant cell, a plant or a part thereof, as compared to a corresponding non-transformed wild type non-human organism or a part thereof; and
[67468] (b) growing the non-human organism or a part thereof under conditions which permit the production of campesterol or a composition comprising campesterol in said non-human organism or in the culture medium surrounding said non-human organism.

[67469] Accordingly, the present invention relates to a process for the production of beta-sitosterol, which comprises
[67470] (a) increasing or generating the activity of a phenylacetic acid degradation protein in the cytosol of a cell of a non-human organism or a part thereof, preferably a microorganism, a plant cell, a plant or a part thereof, as compared to a corresponding non-transformed wild type non-human organism or a part thereof; and
[67471] (b) growing the non-human organism or a part thereof under conditions which permit the production of beta-sitosterol or a composition comprising beta-sitosterol in said non-human organism or in the culture medium surrounding said non-human organism.

[67472] Accordingly, the present invention relates to a process for the production of campesterol, which comprises
[67473] (a) increasing or generating the activity of a phenylacetic acid degradation protein in the cytosol of a cell of a non-human organism or a part thereof, preferably a microorganism, a plant cell, a plant or a part thereof, as compared to a corresponding non-transformed wild type non-human organism or a part thereof; and
[67474] (b) growing the non-human organism or a part thereof under conditions which permit the production of campesterol or a composition comprising campesterol in said non-human organism or in the culture medium surrounding said non-human organism.

[67475] Accordingly, the present invention relates to a process for the production of campesterol, which comprises
[67476] (a) increasing or generating the activity of a b1401-protein in the cytosol of a cell of a non-human organism or a part thereof, preferably a microorganism, a plant cell, a plant or a part thereof, as compared to a corresponding non-transformed wild type non-human organism or a part thereof; and
[67477] (b) growing the non-human organism or a part thereof under conditions which permit the production of campesterol or a composition comprising campesterol in said non-human organism or in the culture medium surrounding said non-human organism.

[67478] Accordingly, the present invention relates to a process for the production of campesterol, which comprises
[67479] (a) increasing or generating the activity of a lipoprotein precursor in the cytosol of a cell of a non-human organism or a part thereof, preferably a microorganism, a plant cell, a plant or a part thereof, as compared to a corresponding non-transformed wild type non-human organism or a part thereof; and
[67480] (b) growing the non-human organism or a part thereof under conditions which permit the production of campesterol or a composition comprising campesterol in said non-human organism or in the culture medium surrounding said non-human organism.

[67481] Accordingly, the present invention relates to a process for the production of beta-sitosterol, which comprises
[67482] (a) increasing or generating the activity of a acid shock protein in the cytosol of a cell of a non-human organism or a part thereof, preferably a microorganism, a plant cell, a plant or a part thereof, as compared to a corresponding non-transformed wild type non-human organism or a part thereof; and
[67483] (b) growing the non-human organism or a part thereof under conditions which permit the production of beta-sitosterol or a composition comprising beta-sitosterol in said non-human organism or in the culture medium surrounding said non-human organism.

[67484] Accordingly, the present invention relates to a process for the production of campesterol, which comprises
[67485] (a) increasing or generating the activity of a acid shock protein in the cytosol of a cell of a non-human organism or a part thereof, preferably a microorganism, a plant cell, a plant or a part thereof, as compared to a corresponding non-transformed wild type non-human organism or a part thereof; and
[67486] (b) growing the non-human organism or a part thereof under conditions which permit the production of campesterol or a composition comprising campesterol in said non-human organism or in the culture medium surrounding said non-human organism.

[67487] Accordingly, the present invention relates to a process for the production of campesterol, which comprises
[67488] (a) increasing or generating the activity of a B1795-protein in the cytosol of a cell of a non-human organism or a part thereof, preferably a microorganism, a plant cell, a plant or a part thereof, as compared to a corresponding non-transformed wild type non-human organism or a part thereof; and
[67489] (b) growing the non-human organism or a part thereof under conditions which permit the production of campesterol or a composition comprising campesterol in said non-human organism or in the culture medium surrounding said non-human organism.

[67490] Accordingly, the present invention relates to a process for the production of campesterol, which comprises
[67491] (a) increasing or generating the activity of a acetyltransferase in the cytosol of a cell of a non-human organism or a part thereof, preferably a microorganism, a plant cell, a plant or a part thereof, as compared to a corresponding non-transformed wild type non-human organism or a part thereof; and
[67492] (b) growing the non-human organism or a part thereof under conditions which permit the production of campesterol or a composition comprising campesterol in said non-human organism or in the culture medium surrounding said non-human organism.

[67493] Accordingly, the present invention relates to a process for the production of campesterol, which comprises
[67494] (a) increasing or generating the activity of a b2107-protein in the cytosol of a cell of a non-human organism or a part thereof, preferably a microorganism, a plant cell, a plant or a part thereof, as compared to a corresponding non-transformed wild type non-human organism or a part thereof; and
[67495] (b) growing the non-human organism or a part thereof under conditions which permit the production of campesterol or a composition comprising campesterol in said non-human organism or in the culture medium surrounding said non-human organism.

[67496] Accordingly, the present invention relates to a process for the production of campesterol, which comprises
[67497] (a) increasing or generating the activity of a NADH dehydrogenase I chain N in the cytosol of a cell of a non-human organism or a part thereof, preferably a microorganism, a plant cell, a plant or a part thereof, as compared to a corresponding non-transformed wild type non-human organism or a part thereof; and
[67498] (b) growing the non-human organism or a part thereof under conditions which permit the production of campesterol or a composition comprising campesterol in said non-human organism or in the culture medium surrounding said non-human organism.

[67499] Accordingly, the present invention relates to a process for the production of campesterol, which comprises
[67500] (a) increasing or generating the activity of a amidophosphoribosyltransferase in the cytosol of a cell of a non-human organism or a part thereof, preferably a microorganism, a plant cell, a plant or a part thereof, as compared to a corresponding non-transformed wild type non-human organism or a part thereof; and
[67501] (b) growing the non-human organism or a part thereof under conditions which permit the production of campesterol or a composition comprising campesterol in said non-human organism or in the culture medium surrounding said non-human organism.

[67502] Accordingly, the present invention relates to a process for the production of campesterol, which comprises
[67503] (a) increasing or generating the activity of a b2376-protein in the cytosol of a cell of a non-human organism or a part thereof, preferably a microorganism, a plant cell, a plant or a part thereof, as compared to a corresponding non-transformed wild type non-human organism or a part thereof; and
[67504] (b) growing the non-human organism or a part thereof under conditions which permit the production of campesterol or a composition comprising campesterol in said non-human organism or in the culture medium surrounding said non-human organism.

[67505] Accordingly, the present invention relates to a process for the production of campesterol, which comprises
[67506] (a) increasing or generating the activity of a b2399-protein in the cytosol of a cell of a non-human organism or a part thereof, preferably a microorganism, a plant cell, a plant or a part thereof, as compared to a corresponding non-transformed wild type non-human organism or a part thereof; and
[67507] (b) growing the non-human organism or a part thereof under conditions which permit the production of campesterol or a composition comprising campesterol in said non-human organism or in the culture medium surrounding said non-human organism.

[67508] Accordingly, the present invention relates to a process for the production of campesterol, which comprises
[67509] (a) increasing or generating the activity of a b2474-protein in the cytosol of a cell of a non-human organism or a part thereof, preferably a microorganism, a plant cell, a plant or a part thereof, as compared to a corresponding non-transformed wild type non-human organism or a part thereof; and
[67510] (b) growing the non-human organism or a part thereof under conditions which permit the production of campesterol or a composition comprising campesterol in said non-human organism or in the culture medium surrounding said non-human organism.

[67511] Accordingly, the present invention relates to a process for the production of campesterol, which comprises
[67512] (a) increasing or generating the activity of a permease protein in the cytosol of a cell of a non-human organism or a part thereof, preferably a microorganism, a plant cell, a plant or a part thereof, as compared to a corresponding non-transformed wild type non-human organism or a part thereof; and
[67513] (b) growing the non-human organism or a part thereof under conditions which permit the production of campesterol or a composition comprising campesterol in said non-human organism or in the culture medium surrounding said non-human organism.

[67514] Accordingly, the present invention relates to a process for the production of campesterol, which comprises
[67515] (a) increasing or generating the activity of a b2513-protein in the cytosol of a cell of a non-human organism or a part thereof, preferably a microorganism, a plant cell, a plant or a part thereof, as compared to a corresponding non-transformed wild type non-human organism or a part thereof; and
[67516] (b) growing the non-human organism or a part thereof under conditions which permit the production of campesterol or a composition comprising campesterol in said non-human organism or in the culture medium surrounding said non-human organism.

[67517] Accordingly, the present invention relates to a process for the production of beta-sitosterol, which comprises
[67518] (a) increasing or generating the activity of a putative transport system permease protein in the cytosol of a cell of a non-human organism or a part thereof, preferably a microorganism, a plant cell, a plant or a part thereof, as compared to a corresponding non-transformed wild type non-human organism or a part thereof; and
[67519] (b) growing the non-human organism or a part thereof under conditions which permit the production of beta-sitosterol or a composition comprising beta-sitosterol in said non-human organism or in the culture medium surrounding said non-human organism.

[67520] Accordingly, the present invention relates to a process for the production of campesterol, which comprises
[67521] (a) increasing or generating the activity of a putative transport system permease protein in the cytosol of a cell of a non-human organism or a part thereof, preferably a microorganism, a plant cell, a plant or a part thereof, as compared to a corresponding non-transformed wild type non-human organism or a part thereof; and
[67522] (b) growing the non-human organism or a part thereof under conditions which permit the production of campesterol or a composition comprising campesterol in said non-human organism or in the culture medium surrounding said non-human organism.

[67523] Accordingly, the present invention relates to a process for the production of campesterol, which comprises
[67524] (a) increasing or generating the activity of a b2654-protein in the cytosol of a cell of a non-human organism or a part thereof, preferably a microorganism, a plant cell, a plant or a part thereof, as compared to a corresponding non-transformed wild type non-human organism or a part thereof; and
[67525] (b) growing the non-human organism or a part thereof under conditions which permit the production of campesterol or a composition comprising campesterol in said non-human organism or in the culture medium surrounding said non-human organism.

[67526] Accordingly, the present invention relates to a process for the production of campesterol, which comprises
[67527] (a) increasing or generating the activity of a murein transglycosylase in the cytosol of a cell of a non-human organism or a part thereof, preferably a microorganism, a plant cell, a plant or a part thereof, as compared to a corresponding non-transformed wild type non-human organism or a part thereof; and
[67528] (b) growing the non-human organism or a part thereof under conditions which permit the production of campesterol or a composition comprising campesterol in said non-human organism or in the culture medium surrounding said non-human organism.

[67529] Accordingly, the present invention relates to a process for the production of campesterol, which comprises
[67530] (a) increasing or generating the activity of a oxidoreductase in the cytosol of a cell of a non-human organism or a part thereof, preferably a microorganism, a plant cell, a plant or a part thereof, as compared to a corresponding non-transformed wild type non-human organism or a part thereof; and
[67531] (b) growing the non-human organism or a part thereof under conditions which permit the production of campesterol or a composition comprising campesterol in said non-human organism or in the culture medium surrounding said non-human organism.

[67532] Accordingly, the present invention relates to a process for the production of campesterol, which comprises
[67533] (a) increasing or generating the activity of a xanthine dehydrogenase in the cytosol of a cell of a non-human organism or a part thereof, preferably a microorganism, a plant cell, a plant or a part thereof, as compared to a corresponding non-transformed wild type non-human organism or a part thereof; and
[67534] (b) growing the non-human organism or a part thereof under conditions which permit the production of campesterol or a composition comprising campesterol in said non-human organism or in the culture medium surrounding said non-human organism.

[67535] Accordingly, the present invention relates to a process for the production of campesterol, which comprises
[67536] (a) increasing or generating the activity of a b3151-protein in the cytosol of a cell of a non-human organism or a part thereof, preferably a microorganism, a plant cell, a plant or a part thereof, as compared to a corresponding non-transformed wild type non-human organism or a part thereof; and
[67537] (b) growing the non-human organism or a part thereof under conditions which permit the production of campesterol or a composition comprising campesterol in said non-human organism or in the culture medium surrounding said non-human organism.

[67538] Accordingly, the present invention relates to a process for the production of beta-sitosterol, which comprises
[67539] (a) increasing or generating the activity of a methyltransferase in the cytosol of a cell of a non-human organism or a part thereof, preferably a microorganism, a plant cell, a plant or a part thereof, as compared to a corresponding non-transformed wild type non-human organism or a part thereof; and
[67540] (b) growing the non-human organism or a part thereof under conditions which permit the production of beta-sitosterol or a composition comprising beta-sitosterol in said non-human organism or in the culture medium surrounding said non-human organism.

[67541] Accordingly, the present invention relates to a process for the production of campesterol, which comprises
[67542] (a) increasing or generating the activity of a threonine dehydrogenase in the cytosol of a cell of a non-human organism or a part thereof, preferably a microorganism, a plant cell, a plant or a part thereof, as compared to a corresponding non-transformed wild type non-human organism or a part thereof; and
[67543] (b) growing the non-human organism or a part thereof under conditions which permit the production of campesterol or a composition comprising campesterol in said non-human organism or in the culture medium surrounding said non-human organism.

[67544] Accordingly, the present invention relates to a process for the production of beta-sitosterol, which comprises
[67545] (a) increasing or generating the activity of a b3989-protein in the cytosol of a cell of a non-human organism or a part thereof, preferably a microorganism, a plant cell, a plant or a part thereof, as compared to a corresponding non-transformed wild type non-human organism or a part thereof; and
[67546] (b) growing the non-human organism or a part thereof under conditions which permit the production of beta-sitosterol or a composition comprising beta-sitosterol in said non-human organism or in the culture medium surrounding said non-human organism.

[67547] Accordingly, the present invention relates to a process for the production of campesterol, which comprises
[67548] (a) increasing or generating the activity of a b3989-protein in the cytosol of a cell of a non-human organism or a part thereof, preferably a microorganism, a plant cell, a plant or a part thereof, as compared to a corresponding non-transformed wild type non-human organism or a part thereof; and
[67549] (b) growing the non-human organism or a part thereof under conditions which permit the production of campesterol or a composition comprising campesterol in said non-human organism or in the culture medium surrounding said non-human organism.

[67550] Accordingly, the present invention relates to a process for the production of beta-sitosterol, which comprises
[67551] (a) increasing or generating the activity of a b4029-protein in the cytosol of a cell of a non-human organism or a part thereof, preferably a microorganism, a plant cell, a plant or a part thereof, as compared to a corresponding non-transformed wild type non-human organism or a part thereof; and
[67552] (b) growing the non-human organism or a part thereof under conditions which permit the production of beta-sitosterol or a composition comprising beta-sitosterol in said non-human organism or in the culture medium surrounding said non-human organism.

[67553] Accordingly, the present invention relates to a process for the production of stigmasterol, which comprises
[67554] (a) increasing or generating the activity of a b4029-protein in the cytosol of a cell of a non-human organism or a part thereof, preferably a microorganism, a plant cell, a plant or a part thereof, as compared to a corresponding non-transformed wild type non-human organism or a part thereof; and
[67555] (b) growing the non-human organism or a part thereof under conditions which permit the production of stigmasterol or a composition comprising stigmasterol in said non-human organism or in the culture medium surrounding said non-human organism.

[67556] Accordingly, the present invention relates to a process for the production of beta-sitosterol, which comprises
[67557] (a) increasing or generating the activity of a b4205-protein in the cytosol of a cell of a non-human organism or a part thereof, preferably a microorganism, a plant cell, a plant or a part thereof, as compared to a corresponding non-transformed wild type non-human organism or a part thereof; and
[67558] (b) growing the non-human organism or a part thereof under conditions which permit the production of beta-sitosterol or a composition comprising beta-sitosterol in said non-human organism or in the culture medium surrounding said non-human organism.

[67559] Accordingly, the present invention relates to a process for the production of beta-sitosterol, which comprises
[67560] (a) increasing or generating the activity of a glutaredoxin in the cytosol of a cell of a non-human organism or a part thereof, preferably a microorganism, a plant cell, a plant or a part thereof, as compared to a corresponding non-transformed wild type non-human organism or a part thereof; and
[67561] (b) growing the non-human organism or a part thereof under conditions which permit the production of beta-sitosterol or a composition comprising beta-sitosterol in said non-human organism or in the culture medium surrounding said non-human organism.

[67562] Accordingly, the present invention relates to a process for the production of campesterol, which comprises
[67563] (a) increasing or generating the activity of a glutaredoxin in the cytosol of a cell of a non-human organism or a part thereof, preferably a microorganism, a plant cell, a plant or a part thereof, as compared to a corresponding non-transformed wild type non-human organism or a part thereof; and
[67564] (b) growing the non-human organism or a part thereof under conditions which permit the production of campesterol or a composition comprising campesterol in said non-human organism or in the culture medium surrounding said non-human organism.

[67565] Accordingly, the present invention relates to a process for the production of beta-sitosterol, which comprises
[67566] (a) increasing or generating the activity of a transcription factor in the cytosol of a cell of a non-human organism or a part thereof, preferably a microorganism, a plant cell, a plant or a part thereof, as compared to a corresponding non-transformed wild type non-human organism or a part thereof; and
[67567] (b) growing the non-human organism or a part thereof under conditions which permit the production of beta-sitosterol or a composition comprising beta-sitosterol in said non-human organism or in the culture medium surrounding said non-human organism.

[67568] Accordingly, the present invention relates to a process for the production of campesterol, which comprises
[67569] (a) increasing or generating the activity of a transcription factor in the cytosol of a cell of a non-human organism or a part thereof, preferably a microorganism, a plant cell, a plant or a part thereof, as compared to a corresponding non-transformed wild type non-human organism or a part thereof; and
[67570] (b) growing the non-human organism or a part thereof under conditions which permit the production of campesterol or a composition comprising campesterol in said non-human organism or in the culture medium surrounding said non-human organism.

[67571] Accordingly, the present invention relates to a process for the production of beta-sitosterol, which comprises
[67572] (a) increasing or generating the activity of a cyclin D in the cytosol of a cell of a non-human organism or a part thereof, preferably a microorganism, a plant cell, a plant or a part thereof, as compared to a corresponding non-transformed wild type non-human organism or a part thereof; and
[67573] (b) growing the non-human organism or a part thereof under conditions which permit the production of beta-sitosterol or a composition comprising beta-sitosterol in said non-human organism or in the culture medium surrounding said non-human organism.

[67574] Accordingly, the present invention relates to a process for the production of campesterol, which comprises
[67575] (a) increasing or generating the activity of a cyclin D in the cytosol of a cell of a non-human organism or a part thereof, preferably a microorganism, a plant cell, a plant or a part thereof, as compared to a corresponding non-transformed wild type non-human organism or a part thereof; and
[67576] (b) growing the non-human organism or a part thereof under conditions which permit the production of campesterol or a composition comprising campesterol in said non-human organism or in the culture medium surrounding said non-human organism.

[67577] Accordingly, the present invention relates to a process for the production of campesterol, which comprises
[67578] (a) increasing or generating the activity of a sll0406-protein in the cytosol of a cell of a non-human organism or a part thereof, preferably a microorganism, a plant cell, a plant or a part thereof, as compared to a corresponding non-transformed wild type non-human organism or a part thereof; and
[67579] (b) growing the non-human organism or a part thereof under conditions which permit the production of campesterol or a composition comprising campesterol in said non-human organism or in the culture medium surrounding said non-human organism.

[67580] Accordingly, the present invention relates to a process for the production of campesterol, which comprises
[67581] (a) increasing or generating the activity of a cation transport protein in the cytosol of a cell of a non-human organism or a part thereof, preferably a microorganism, a plant cell, a plant or a part thereof, as compared to a corresponding non-transformed wild type non-human organism or a part thereof; and
[67582] (b) growing the non-human organism or a part thereof under conditions which permit the production of campesterol or a composition comprising campesterol in said non-human organism or in the culture medium surrounding said non-human organism.

[67583] Accordingly, the present invention relates to a process for the production of beta-sitosterol, which comprises
[67584] (a) increasing or generating the activity of a CTP synthetase in the cytosol of a cell of a non-human organism or a part thereof, preferably a microorganism, a plant cell, a plant or a part thereof, as compared to a corresponding non-transformed wild type non-human organism or a part thereof; and
[67585] (b) growing the non-human organism or a part thereof under conditions which permit the production of beta-sitosterol or a composition comprising beta-sitosterol in said non-human organism or in the culture medium surrounding said non-human organism.

[67586] Accordingly, the present invention relates to a process for the production of campesterol, which comprises
[67587] (a) increasing or generating the activity of a CTP synthetase in the cytosol of a cell of a non-human organism or a part thereof, preferably a microorganism, a plant cell, a plant or a part thereof, as compared to a corresponding non-transformed wild type non-human organism or a part thereof; and
[67588] (b) growing the non-human organism or a part thereof under conditions which permit the production of campesterol or a composition comprising campesterol in said non-human organism or in the culture medium surrounding said non-human organism.

[67589] Accordingly, the present invention relates to a process for the production of beta-sitosterol, which comprises
[67590] (a) increasing or generating the activity of a phosphoribulokinase in the cytosol of a cell of a non-human organism or a part thereof, preferably a microorganism, a plant cell, a plant or a part thereof, as compared to a corresponding non-transformed wild type non-human organism or a part thereof; and
[67591] (b) growing the non-human organism or a part thereof under conditions which permit the production of beta-sitosterol or a composition comprising beta-sitosterol in said non-human organism or in the culture medium surrounding said non-human organism.

[67592] Accordingly, the present invention relates to a process for the production of beta-sitosterol, which comprises
[67593] (a) increasing or generating the activity of a ABC metal ion transporter substrate-binding protein in the cytosol of a cell of a non-human organism or a part thereof, preferably a microorganism organism, a plant cell, a plant or a part thereof, as compared to a corresponding non-transformed wild type non-human organism or a part thereof; and
[67594] (b) growing the non-human organism or a part thereof under conditions which permit the production of beta-sitosterol or a composition comprising beta-sitosterol in said non-human organism or in the culture medium surrounding said non-human organism.

[67595] Accordingly, the present invention relates to a process for the production of campesterol, which comprises
[67596] (a) increasing or generating the activity of a sll1761-protein in the cytosol of a cell of a non-human organism or a part thereof, preferably a microorganism, a plant cell, a plant or a part thereof, as compared to a corresponding non-transformed wild type non-human organism or a part thereof; and
[67597] (b) growing the non-human organism or a part thereof under conditions which permit the production of campesterol or a composition comprising campesterol in said non-human organism or in the culture medium surrounding said non-human organism.

[67598] Accordingly, the present invention relates to a process for the production of beta-sitosterol, which comprises
[67599] (a) increasing or generating the activity of a acyl transferase in the cytosol of a cell of a non-human organism or a part thereof, preferably a microorganism, a plant cell, a plant or a part thereof, as compared to a corresponding non-transformed wild type non-human organism or a part thereof; and
[67600] (b) growing the non-human organism or a part thereof under conditions which permit the production of beta-sitosterol or a composition comprising beta-sitosterol in said non-human organism or in the culture medium surrounding said non-human organism.

[67601] Accordingly, the present invention relates to a process for the production of campesterol, which comprises
[67602] (a) increasing or generating the activity of a cation-transporting ATPase in the cytosol of a cell of a non-human organism or a part thereof, preferably a microorganism, a plant cell, a plant or a part thereof, as compared to a corresponding non-transformed wild type non-human organism or a part thereof; and
[67603] (b) growing the non-human organism or a part thereof under conditions which permit the production of campesterol or a composition comprising campesterol in said non-human organism or in the culture medium surrounding said non-human organism.

[67604] Accordingly, the present invention relates to a process for the production of beta-sitosterol, which comprises
[67605] (a) increasing or generating the activity of a oxidoreductase in the cytosol of a cell of a non-human organism or a part thereof, preferably a microorganism, a plant cell, a plant or a part thereof, as compared to a corresponding non-transformed wild type non-human organism or a part thereof; and
[67606] (b) growing the non-human organism or a part thereof under conditions which permit the production of beta-sitosterol or a composition comprising beta-sitosterol in said non-human organism or in the culture medium surrounding said non-human organism.

[67607] Accordingly, the present invention relates to a process for the production of campesterol, which comprises
[67608] (a) increasing or generating the activity of a permease protein of ABC transporter in the cytosol of a cell of a non-human organism or a part thereof, preferably a microorganism, a plant cell, a plant or a part thereof, as compared to a corresponding non-transformed wild type non-human organism or a part thereof; and
[67609] (b) growing the non-human organism or a part thereof under conditions which permit the production of campesterol or a composition comprising campesterol in said non-human organism or in the culture medium surrounding said non-human organism.

[67610] Accordingly, the present invention relates to a process for the production of campesterol, which comprises
[67611] (a) increasing or generating the activity of a tryptophan synthase alpha chain in the cytosol of a cell of a non-human organism or a part thereof, preferably a microorganism, a plant cell, a plant or a part thereof, as compared to a corresponding non-transformed wild type non-human organism or a part thereof; and
[67612] (b) growing the non-human organism or a part thereof under conditions which permit the production of campesterol or a composition comprising campesterol in said non-human organism or in the culture medium surrounding said non-human organism.

[67613] Accordingly, the present invention relates to a process for the production of beta-sitosterol, which comprises
[67614] (a) increasing or generating the activity of a multiple antibiotic resistance protein in the cytosol of a cell of a non-human organism or a part thereof, preferably a microorganism, a plant cell, a plant or a part thereof, as compared to a corresponding non-transformed wild type non-human organism or a part thereof; and
[67615] (b) growing the non-human organism or a part thereof under conditions which permit the production of beta-sitosterol or a composition comprising beta-sitosterol in said non-human organism or in the culture medium surrounding said non-human organism.

[67616] Accordingly, the present invention relates to a process for the production of campesterol, which comprises
[67617] (a) increasing or generating the activity of a multiple antibiotic resistance protein in the cytosol of a cell of a non-human organism or a part thereof, preferably a microorganism, a plant cell, a plant or a part thereof, as compared to a corresponding non-transformed wild type non-human organism or a part thereof; and
[67618] (b) growing the non-human organism or a part thereof under conditions which permit the production of campesterol or a composition comprising campesterol in said non-human organism or in the culture medium surrounding said non-human organism.

[67619] Accordingly, the present invention relates to a process for the production of beta-sitosterol, which comprises
[67620] (a) increasing or generating the activity of a TTC1386-protein in the cytosol of a cell of a non-human organism or a part thereof, preferably a microorganism, a plant cell, a plant or a part thereof, as compared to a corresponding non-transformed wild type non-human organism or a part thereof; and
[67621] (b) growing the non-human organism or a part thereof under conditions which permit the production of beta-sitosterol or a composition comprising beta-sitosterol in said non-human organism or in the culture medium surrounding said non-human organism.

[67622] Accordingly, the present invention relates to a process for the production of campesterol, which comprises
[67623] (a) increasing or generating the activity of a TTC1386-protein in the cytosol of a cell of a non-human organism or a part thereof, preferably a microorganism, a plant cell, a plant or a part thereof, as compared to a corresponding non-transformed wild type non-human organism or a part thereof; and
[67624] (b) growing the non-human organism or a part thereof under conditions which permit the production of campesterol or a composition comprising campesterol in said non-human organism or in the culture medium surrounding said non-human organism.

[67625] Accordingly, the present invention relates to a process for the production of campesterol, which comprises
[67626] (a) increasing or generating the activity of a homocitrate synthase in the cytosol of a cell of a non-human organism or a part thereof, preferably a microorganism, a plant cell, a plant or a part thereof, as compared to a corresponding non-transformed wild type non-human organism or a part thereof; and
[67627] (b) growing the non-human organism or a part thereof under conditions which permit the production of campesterol or a composition comprising campesterol in said non-human organism or in the culture medium surrounding said non-human organism.

[67628] Accordingly, the present invention relates to a process for the production of campesterol, which comprises
[67629] (a) increasing or generating the activity of a homocitrate synthase in the cytosol of a cell of a non-human organism or a part thereof, preferably a microorganism, a plant cell, a plant or a part thereof, as compared to a corresponding non-transformed wild type non-human organism or a part thereof; and
[67630] (b) growing the non-human organism or a part thereof under conditions which permit the production of campesterol or a composition comprising campesterol in said non-human organism or in the culture medium surrounding said non-human organism.

[67631] Accordingly, the present invention relates to a process for the production of campesterol, which comprises
[67632] (a) increasing or generating the activity of a cyclin in the cytosol of a cell of a non-human organism or a part thereof, preferably a microorganism, a plant cell, a plant or a part thereof, as compared to a corresponding non-transformed wild type non-human organism or a part thereof; and
[67633] (b) growing the non-human organism or a part thereof under conditions which permit the production of campesterol or a composition comprising campesterol in said non-human organism or in the culture medium surrounding said non-human organism.

[67634] Accordingly, the present invention relates to a process for the production of campesterol, which comprises
[67635] (a) increasing or generating the activity of a ydl235c-protein in the cytosol of a cell of a non-human organism or a part thereof, preferably a microorganism, a plant cell, a plant or a part thereof, as compared to a corresponding non-transformed wild type non-human organism or a part thereof; and
[67636] (b) growing the non-human organism or a part thereof under conditions which permit the production of campesterol or a composition comprising campesterol in said non-human organism or in the culture medium surrounding said non-human organism.

[67637] Accordingly, the present invention relates to a process for the production of campesterol, which comprises
[67638] (a) increasing or generating the activity of a oxidoreductase in the cytosol of a cell of a non-human organism or a part thereof, preferably a microorganism, a plant cell, a plant or a part thereof, as compared to a corresponding non-transformed wild type non-human organism or a part thereof; and
[67639] (b) growing the non-human organism or a part thereof under conditions which permit the production of campesterol or a composition comprising campesterol in said non-human organism or in the culture medium surrounding said non-human organism.

[67640] Accordingly, the present invention relates to a process for the production of campesterol, which comprises
[67641] (a) increasing or generating the activity of a polygalacturonase in the cytosol of a cell of a non-human organism or a part thereof, preferably a microorganism, a plant cell, a plant or a part thereof, as compared to a corresponding non-transformed wild type non-human organism or a part thereof; and
[67642] (b) growing the non-human organism or a part thereof under conditions which permit the production of campesterol or a composition comprising campesterol in said non-human organism or in the culture medium surrounding said non-human organism.

[67643] Accordingly, the present invention relates to a process for the production of campesterol, which comprises
[67644] (a) increasing or generating the activity of a ynl321w-protein in the cytosol of a cell of a non-human organism or a part thereof, preferably a microorganism, a plant cell, a plant or a part thereof, as compared to a corresponding non-transformed wild type non-human organism or a part thereof; and
[67645] (b) growing the non-human organism or a part thereof under conditions which permit the production of campesterol or a composition comprising campesterol in said non-human organism or in the culture medium surrounding said non-human organism.

[67646] Accordingly, the present invention relates to a process for the production of beta-sitosterol, which comprises
[67647] (a) increasing or generating the activity of a acetyl-CoA acetyltransferase in the cytosol of a cell of a non-human organism or a part thereof, preferably a microorganism, a plant cell, a plant or a part thereof, as compared to a corresponding non-transformed wild type non-human organism or a part thereof; and
[67648] (b) growing the non-human organism or a part thereof under conditions which permit the production of beta-sitosterol or a composition comprising beta-sitosterol in said non-human organism or in the culture medium surrounding said non-human organism.

[67649] Accordingly, the present invention relates to a process for the production of beta-sitosterol, which comprises
[67650] (a) increasing or generating the activity of a ypr170c-protein in the cytosol of a cell of a non-human organism or a part thereof, preferably a microorganism, a plant cell, a plant or a part thereof, as compared to a corresponding non-transformed wild type non-human organism or a part thereof; and
[67651] (b) growing the non-human organism or a part thereof under conditions which permit the production of beta-sitosterol or a composition comprising beta-sitosterol in said non-human organism or in the culture medium surrounding said non-human organism.

[67652] Accordingly, the present invention relates to a process for the production of campesterol, which comprises
[67653] (a) increasing or generating the activity of a glucose-6-phosphate 1-dehydrogenase in the cytosol of a cell of a non-human organism or a part thereof, preferably a microorganism, a plant cell, a plant or a part thereof, as compared to a corresponding non-transformed wild type non-human organism or a part thereof; and
[67654] (b) growing the non-human organism or a part thereof under conditions which permit the production of campesterol or a composition comprising campesterol in said non-human organism or in the culture medium surrounding said non-human organism.

[67655] Accordingly, the present invention relates to a process for the production of beta-sitosterol, which comprises
[67656] (a) increasing or generating the activity of a polypeptide comprising a polypeptide as depicted in the respective line in column 5 or 8 of Table II, application no. 14, or a homolog or a fragment thereof, a consensus sequence or at least one polypeptide motif as depicted in the respective line in column 8 of Table IV, application no. 14, whereby the respective line disclose in column 7 the fine chemical beta-sitosterol; or
[67657] increasing or generating the activity of an expression product of one or more nucleic acid molecule(s) comprising a polynucleotide as depicted in the respective line in column 5 or 8 of Table I, application no. 14, preferably the coding region thereof, or a homolog or a fragment thereof, whereby the respective line disclose in column 7 the fine chemical beta-sitosterol;
[67658] in the cytosol of a cell of a non-human organism or a part thereof; preferably a microorganism, a plant cell, a plant or a part thereof, as compared to a corresponding non-transformed wild type non-human organism or a part thereof; and
[67659] (b) growing the non-human organism under conditions which permit the production of beta-sitosterol, or a composition comprising beta-sitosterol in said non-human organism or in the culture medium surrounding said non-human organism.

[67660] Accordingly, the present invention relates to a process for the production of campesterol, which comprises
[67661] (a) increasing or generating the activity of a polypeptide comprising a polypeptide as depicted in the respective line in column 5 or 8 of Table II, application no. 14, or a homolog or a fragment thereof, a consensus sequence or at least one polypeptide motif as depicted in the respective line in column 8 of Table IV, application no. 14, whereby the respective line disclose in column 7 the fine chemical campesterol; or
[67662] increasing or generating the activity of an expression product of one or more nucleic acid molecule(s) comprising a polynucleotide as depicted in the respective line in column 5 or 8 of Table I, application no. 14, preferably the coding region thereof, or a homolog or a fragment thereof, whereby the respective line disclose in column 7 the fine chemical campesterol;
[67663] in the cytosol of a cell of a non-human organism or a part thereof; preferably a microorganism, a plant cell, a plant or a part thereof, as compared to a corresponding non-transformed wild type non-human organism or a part thereof; and
[67664] (b) growing the non-human organism under conditions which permit the production of campesterol, or a composition comprising campesterol in said non-human organism or in the culture medium surrounding said non-human organism.

[67665] Accordingly, the present invention relates to a process for the production of stigmasterol, which comprises
[67666] (a) increasing or generating the activity of a polypeptide comprising a polypeptide as depicted in the respective line in column 5 or 8 of Table II, application no. 14, or a homolog or a fragment thereof, a consensus sequence or at least one polypeptide motif as depicted in the respective line in column 8 of Table IV, application no. 14, whereby the respective line disclose in column 7 the fine chemical stigmasterol; or
[67667] increasing or generating the activity of an expression product of one or more nucleic acid molecule(s) comprising a polynucleotide as depicted in the respective line in column 5 or 8 of Table I, application no. 14, preferably the coding region thereof, or a homolog or a fragment thereof, whereby the respective line disclose in column 7 the fine chemical stigmasterol;
[67668] in the cytosol of a cell of a non-human organism or a part thereof; preferably a microorganism, a plant cell, a plant or a part thereof, as compared to a corresponding non-transformed wild type non-human organism or a part thereof; and
[67669] (b) growing the non-human organism under conditions which permit the production of stigmasterol, or a composition comprising stigmasterol in said non-human organism or in the culture medium surrounding said non-human organism.

[67670] In a further embodiment the activity of the polypeptide comprising a polypeptide as depicted in the respective line in column 5 or 8 of Table II, application no. 14, or a homolog or a fragment thereof, a consensus sequence or at least one polypeptide motif as depicted in the respective line in column 8 of Table IV, application no. 14, is increased or generated non-targeted in the above-mentioned process in a microorganism or plant or a part thereof.

[67671] In a further embodiment said polypeptide has the activity of the respective polypeptide represented by a protein comprising a polypeptide as depicted in the respective line in column 5 of Table II, application no. 14.

[67672] In a further embodiment the activity of the expression product of one or more nucleic acid molecule(s) comprising a polynucleotide as depicted in the respective line in column 5 or 8 of Table I, application no. 14, preferably the coding region thereof, or a homolog or a fragment thereof, is increased or generated non-targeted in the above-mentioned process in a microorganism or plant or a part thereof.

[67673] In a further embodiment the activity of the polypeptide comprising a polypeptide as depicted in the respective line in column 5 or 8 of Table II, application no. 14, or a homolog or a fragment thereof, a consensus sequence or at least one polypeptide motif as depicted in the respective line in column 8 of Table IV, application no. 14, is increased or generated in the above-mentioned process in an organelle preferably in plastids or mitochondria, especially in plastids, of a microorganism or plant.

[67674] In a further embodiment said polypeptide has the activity of the respective polypeptide represented by a protein comprising a polypeptide as depicted in the respective line in column 5 of Table II, application no. 14.

[67675] In a further embodiment the activity of the expression product of one or more nucleic acid molecule(s) comprising a polynucleotide as depicted in the respective line in column 5 or 8 of Table I, application no. 14, preferably the coding region thereof, or a homolog or a fragment thereof, is increased or generated in the above-mentioned process in an organelle, preferably in plasids or mitochondria, especially in plastids, of a microorganism or plant.

[67676] In a further embodiment the activity of the polypeptide comprising a polypeptide as depicted in the respective line in column 5 or 8 of Table II, application no. 14, or a homolog or a fragment thereof, a consensus sequence or at least one polypeptide motif as depicted in the respective line in column 8 of Table IV, application no. 14, is increased or generated in the above-mentioned process in the cyctosol of a cell, of a microorganism or plant.

[67677] In a further embodiment said polypeptide has the activity of the respective polypeptide represented by a protein comprising a polypeptide as depicted in the respective line in column 5 of Table II, application no. 14.

[67678] In a further embodiment the activity of the expression product of one or more nucleic acid molecule(s) comprising a polynucleotide as depicted in the respective line in column 5 or 8 of Table I, application no. 14, preferably the coding region thereof, or a homolog or a fragment thereof, is increased or generated in the above-mentioned process in the cytosol of a cell, of a microorganism or plant.

[67679] [0039.1.7.14] to [0066.1.7.14] for the disclosure of these paragraphs see [0039.1.7.7] to [0066.1.7.7] above

[67680] As mentioned above the nucleic acid sequences coding for the proteins as shown in Table II, application no. 14, column 5 or 8, or homologs or fragments thereof, are joined to a nucleic acid sequence encoding a plastidic transit peptide, e.g, if for the nucleic acid molecule in Table I, column 6 the term “plastidic” is indicated. This nucleic acid sequence encoding a transit peptide ensures transport of the protein to the organelle. The nucleic acid sequence of the gene to be expressed and the nucleic acid sequence encoding the transit peptide are operably linked. Therefore the transit peptide coding sequence is fused in frame to the nucleic acid sequence coding for proteins as shown in Table II, application no. 14, column 5 or 8, or homologs or fragments thereof, e.g., if for the nucleic acid molecule in Table I, column 6 the term “plastidic” is indicated.

[67681] [0068.1.7.14] to [0072.1.7.14] for the disclosure of these paragraphs see [0068.1.7.7] to [0072.1.7.7] above

[67682] As mentioned above the nucleic acid sequences coding for the proteins as shown in the respective line in Table II, application no. 14, column 5 or 8, or homologs or fragments thereof, are joined to a nucleic acid sequence encoding a mitochondric transit peptide, e.g., if for the respective nucleic acid molecule in Table I, column 6 the term “mitochondric” is indicated. This nucleic acid sequence encoding a transit peptide ensures transport of the protein to the organelle. The nucleic acid sequence of the gene to be expressed and the nucleic acid sequence encoding the transit peptide are operably linked. Therefore the transit peptide encoding sequence is fused in frame to the nucleic acid sequence coding for proteins as shown in the respective line in Table II, application no. 14, column 5 or 8, or homologs or fragments thereof, e.g., if for the nucleic acid molecule in the respective line in Table I, column 6 the term “mitochondric”. is indicated.

[67683] for the disclosure of this paragraph see [0074.1.7.7] above

[67684] for the disclosure of this paragraph see [0075.1.7.7] above

[67685] Nucleic acid sequences coding for the transit peptides may be chemically synthesized either in part or wholly according to structure of transit peptide sequences disclosed in the prior art. Said natural or chemically synthesized sequences can be directly linked to the sequences encoding the mature protein or via a linker nucleic acid sequence, which may be typically less than 500 base pairs, preferably less than 450, 400, 350, 300, 250 or 200 base pairs, more preferably less than 150, 100, 90, 80, 70, 60, 50, 40 or 30 base pairs and most preferably less than 25, 20, 15, 12, 9, 6 or 3 base pairs in length and are in frame to the coding sequence. Furthermore favorable nucleic acid sequences encoding transit peptides may comprise sequences derived from more than one biological and/or chemical source and may include a nucleic acid sequence derived from the amino-terminal region of the mature protein, which in its native state is linked to the transit peptide. In a preferred embodiment of the invention said amino-terminal region of the mature protein is typically less than 150 amino acids, preferably less than 140, 130, 120, 110, 100 or 90 amino acids, more preferably less than 80, 70, 60, 50, 40, 35, 30, 25 or 20 amino acids and most preferably less than 19, 18, 17, 16, 15, 14, 13, 12, 11 or 10 amino acids in length. But even shorter or longer stretches are also possible. In addition target sequences, which facilitate the transport of proteins to other cell compartments such as the vacuole, endoplasmic reticulum, golgi complex, glyoxysomes, peroxisomes, mitochondria (in case of a plastidal transit peptide) or plastids, especially chloroplasts (in case of a mitochondric transit peptide) may be also part of the inventive nucleic acid sequence. The proteins translated from said inventive nucleic acid sequences are a kind of fusion proteins that means the nucleic acid sequences encoding the plastidal transit peptide for example the ones shown in Table a, preferably the last one of the Table a are joint to the respective nucleic acid sequences shown in Table I, application no. 14, columns 5 or 8, especially the coding region thereof, or homologs or fragments thereof, in case of nucleic acid sequences being expressed in plastids, and that means the nucleic acid sequences encoding the mitochondric transit peptide for example the ones shown in Table b, preferably the last one of the Table b are joint to the respective nucleic acid sequences shown in Table I, application no. 14, columns 5 or 8, especially the coding region thereof, or homologs or fragments thereof, in case of nucleic acid sequences being expressed in mitochondria. The person skilled in the art is able to join said sequences in a functional manner. Advantageously the transit peptide part is cleaved off from the protein part shown in Table II, application no. 14, columns 5 or 8, or a homolog or fragment thereof, during or after the transport into the organelles, preferably into the plastids or mitochondria, respectively.

[67686] All products of the cleavage of the preferred transit peptide shown in the last line of Table a have preferably the N-terminal amino acid sequences QIA CSS or QIA EFQLTT in front of the start methionine of the respective protein mentioned in Table II, application no. 14, column 5 or 8. or homologs or fragments thereof. Other short amino acid sequences of an range of 1 to 20 amino acids preferable 2 to 15 amino acids, more preferable 3 to 10 amino acids most preferably 4 to 8 amino acids are also possible in front of the start methionine of the protein mentioned in Table II, application no. 14, columns 5 or 8, or homologs or fragments thereof. In case of the amino acid sequence QIA CSS the three amino acids in front of the start methionine are stemming from the LIC (=ligatation independent cloning) cassette. Said short amino acid sequence is preferred in the case of the expression of E. coli genes. In case of the amino acid sequence QIA EFQLTT the six amino acids in front of the start methionine are stemming from the LIC cassette. Said short amino acid sequence is preferred in the case of the expression of S. cerevisiae genes. The skilled worker knowns that other short sequences are also useful in the expression of the respective nucleic acid molecule comprising a polynucleotide as depicted in Table I, application no. 14, column 5 or 8, preferably the coding region thereof, or a homolog or a fragment thereof. Furthermore the skilled worker is aware of the fact that there is not a need for such short sequences in the expression of the genes.

[67687] for the disclosure of this paragraph see [0077.1.7.7] above

[67688] for the disclosure of this paragraph see [0078.1.7.7] above

[67689] Alternatively to the targeting of the respective sequences shown in Table II, application no. 14, columns 5 or 8, or homologs or fragments thereof, preferably of sequences in general encoded in the nucleus with the aid of the targeting sequences mentioned for example in Table a alone, Table b alone, or in combination with other targeting sequences preferably into plastids or mitochondria, respectively, the nucleic acids of the invention can directly be introduced into the plastidal or mitochondrial genome. Therefore in a preferred embodiment the respective nucleic acid sequences shown in the respective line in Table I, application no. 14, columns 5 or 8, preferably the coding region thereof, or homologs or fragments thereof, are directly introduced and expressed in plastids e.g., if for the nucleic acid molecule in the respective line in Table I, column 6, the term “plastidic” is indicated, or are directly introduced and expressed in mitochondria e.g., if for the nucleic acid molecule in the respective line in Table I, column 6 the term “mitochondric” is indicated.

[67690] The term “introduced” in the context of this specification shall mean the insertion of a nucleic acid sequence into the organism by means of a “transfection”, “transduction” or preferably by “transformation”.

[67691] A plastid, such as a chloroplast, or a mitochondrion, has been “transformed” by an exogenous (preferably foreign) nucleic acid sequence if a nucleic acid sequence has been introduced into the plastid or mitochondrion that means that this sequence has crossed the membrane or the membranes of the plastid or of the mitochondrion. The exogenous, preferably foreign, DNA may be integrated (covalently linked) into plastid or mitochondrial DNA making up the genome of the plastid or mitochondrion, or it may remain unintegrated (e.g., by including a chloroplast origin of replication). “Stably” integrated DNA sequences are those, which are inherited through plastid or mitochondrion replication, thereby transferring new plastids or mitochondria, with the features of the integrated DNA sequence to the progeny.

[67692] [0080.1.7.14] to [0083.1.7.14] for the disclosure of these paragraphs see [0080.1.7.7] to [0083.1.7.7] above

[67693] For the process of the present invention it may be of great advantage that by transforming the plastids the intraspecies specific transgene flow is blocked, because a lot of species such as corn, cotton and rice have a strict maternal inheritance of plastids. By placing the respective genes specified in the respective line in Table I, application no. 14, columns 5 or 8, preferably the coding region, or homologs or fragments thereof, e.g. if for the nucleic acid molecule in the respective line in column 6 of Table I the term “plastidic” is indicated, in the plastids of plants, these genes will not be present in the pollen of said plants.

[67694] A further preferred embodiment of the invention relates to the use of so called “chloroplast localization sequences”, in which a first RNA sequence or molecule is capable of transporting or “chaperoning” a second RNA sequence, such as a RNA sequence transcribed from the sequences depicted in the respective line in Table I, application no. 14, columns 5 or 8, preferably the coding region thereof, or a homolog or a fragment thereof, or a sequence encoding a protein, as depicted in the respective line in Table II, application no. 14, columns 5 and 8, or a homolog or a fragment thereof, from an external environment inside a cell or outside a plastid into a chloroplast. In one embodiment the chloroplast localization signal is substantially similar or complementary to a complete or intact viroid sequence. The chloroplast localization signal may be encoded by a DNA sequence, which is transcribed into the chloroplast localization RNA. The term “viroid” refers to a naturally occurring single stranded RNA molecule (Flores, C. R. Acad. Sci. III. 324 (10), 943 (2001)). Viroids usually contain about 200-500 nucleotides and generally exist as circular molecules. Examples of viroids that contain chloroplast localization signals include but are not limited to ASBVd, PLMVd, CChMVd and ELVd. The viroid sequence or a functional part of it can be fused to the sequences depicted in the respective line in Table I, application no. 14, columns 5 or 8, preferably the coding region thereof, or a homolog or a fragment thereof, or a sequence encoding a protein, as depicted in the respective line in Table II, application no. 14, columns 5 or 8, or a homolog or a fragment thereof, in such a manner that the viroid sequence transports a sequence transcribed from a sequence as depicted in the respective line in Table I, application no. 14 columns 5 or 8, preferably the coding region thereof, or a homolog or a fragment thereof, or a sequence encoding a protein as depicted in the respective line in Table II, application no. 14 columns 5 or 8, or a homolog or a fragment thereof, into the chloroplasts, e.g. if for the nucleic acid molecule in column 6 of Table I the term “plastidic” is indicated. A preferred embodiment uses a modified ASBVd (Navarro et al., Virology. 268 (1), 218 (2000)).

[67695] In a further specific embodiment the protein to be expressed in the plastids such as the proteins depicted in the respective line in Table II, application no. 14, columns 5 or 8, or a homolog or a fragment thereof, e.g. if for the nucleic acid molecule in the respective line in column 6 of Table I the term “plastidic” is indicated, are encoded by different nucleic acids. Such a method is disclosed in WO 2004/040973, which shall be incorporated by reference. WO 2004/040973 teaches a method, which relates to the translocation of an RNA corresponding to a gene or gene fragment into the chloroplast by means of a chloroplast localization sequence. The genes, which should be expressed in the plant or plant cells, are split into nucleic acid fragments, which are introduced into different compartments in the plant e.g. the nucleus, the plastids and/or mitochondria. Additionally plant cells are described in which the chloroplast contains a ribozyme fused at one end to an RNA encoding a fragment of a protein used in the inventive process such that the ribozyme can trans-splice the translocated fusion RNA to the RNA encoding the gene fragment to form and as the case may be reunite the nucleic acid fragments to an intact mRNA encoding a functional protein for example as disclosed in the respective line in Table II, application no. 14, columns 5 or 8, or a homolog or a fragment thereof.

[67696] In a preferred embodiment of the invention the nucleic acid sequences as shown in the respective line in Table I, application no. 14, columns 5 or 8, preferably the coding region thereof, or homologs or fragments thereof, e.g. if for the nucleic acid molecule in the respective line in column 6 of Table I the term “plastidic” is indicated, used in the inventive process are transformed into plastids, which are metabolically active. Those plastids should preferably maintain at a high copy number in the plant or plant tissue of interest, most preferably the chloroplasts found in green plant tissues, such as leaves or cotyledons or in seeds.

[67697] For a good expression in the plastids the nucleic acid sequences as shown in the respective line in Table I, application no. 14, columns 5 or 8, preferably the coding region thereof, or homologs or fragments thereof, e.g. if for the nucleic acid molecule in the respective line in column 6 of Table I the term “plastidic” is indicated, are introduced into an expression cassette using preferably a promoter and terminater, which are active in plastids preferably a chloroplast promoter. Examples of such promoters include the psbA promoter from the gene from spinach or pea, the rbcL promoter, and the atpB promoter from corn.

[67698] [0089.1.7.14] to [0092.1.7.14] for the disclosure of these paragraphs see [0089.1.7.7] to [0092.1.7.7] above

[67699] Advantageously the process for the production of the fine chemical beta-sitosterol, campesterol, and/or stigmasterol leads to an enhanced production of the respective fine chemical. The terms “enhanced” or “increase” mean at least a 10%, 20%, 30%, 40% or 50%, preferably at least 60%, 70%, 80%, 90% or 100%, more preferably 150%, 200%, 300%, 400% or 500% higher production of the respective fine chemical beta-sitosterol, campesterol, and/or stigmasterol in comparison to the wild-type as defined above, e.g. that means in comparison to a non-human organism without the aforementioned modification of the activity of a protein as shown in the respective line in Table II, application no. 14, column 5 or 8, or a fragment or a homolog thereof. The modification of the activity of a protein as shown in the respective line in Table II, application no. 14, column 5 or 8, or a homolog or a fragment thereof, or their combination can be achieved by joining the protein to a respective transit peptide, e.g. if for the respective encoding nucleic acid molecule in column 6 of Table I the term “plastidic” or “mitochondric” is indicated.

[67700] Surprisingly it was found, that the transgenic expression of a protein as shown in the respective line in Table II, application no. 14, column 5, especially from the Saccaromyces cerevisiae, E. coli, Arabidopsis thaliana, Azotobacter vinelandii, Brassica napus, Glycine max, Oryza sativa, Physcomitrella patens, Synechocystis sp., Thermus thermophilus, Zea mays in a non-human organism, like a plant or a part thereof, such as Arabidopsis thaliana for example, or a microorganism, conferred a production of or an increase in beta-sitosterol, campesterol, and/or stigmasterol,respectively, to the transgenic non-human organism as compared to a corresponding non-transformed wild type.

[67701] In one embodiment the transgenic expression of a protein as shown in the respective line in Table II, application no. 14, column 5 or 8, or a homolog or a fragment thereof, especially from the Saccaromyces cerevisiae, E. coli, Arabidopsis thaliana, Azotobacter vinelandii, Brassica napus, Glycine max, Oryza sativa, Physcomitrella patens, Synechocystis sp., Thermus thermophilus, Zea mays in a non-human organism, like a plant or a part thereof, such as Arabidopsis thaliana for example, or a microorganism, confers a production of or an increase in beta-sitosterol, campesterol, and/or stigmasterol,respectively, to the transgenic non-human organism as compared to a corresponding non-transformed wild type.

[67702] Accordingly, in one embodiment, an increase of campesterol in a non-human organism, as compared to a corresponding non-transformed wild type non-human organism, is conferred in the process of the invention, if the activity of a polypeptide showing the activity of a C-4 sterol methyl oxidase, or if the activity of the polypeptide At1g07420, preferably represented by SEQ ID NO. 131004, or a homolog or fragment thereof, or if the activity of a polypeptide encoded by a nucleic acid molecule comprising the nucleic acid SEQ ID NO. 131003, preferably the coding region thereof, or a homolog or fragment thereof, e.g. derived from Arabidopsis thaliana, is increased or generated. For example the activity of a nucleic acid molecule or a polypeptide comprising the nucleic acid, preferably the coding region thereof, or polypeptide or the consensus sequence or the polypeptide motif, as depicted in Table I, II or IV, application No. 14, column 5 or 8 in the respective same line as the nucleic acid molecule SEQ ID NO. 131003 or polypeptide SEQ ID NO. 131004, respectively, or a homolog or a fragment thereof, is increased or generated, or if the activity C-4 sterol methyl oxidase is increased or generated in a non-human organism, like a microorganism or a plant cell, plant or part thereof, especially with non-targeted localization, whereby the respective line disclose in column 7 the fine chemical campesterol. For example, an increase of the campesterol of at least 1 percent, particularly in a range of 89 to 300-percent is conferred as compared to a corresponding non-transformed wild type non-human organism.

[67703] Accordingly, in one embodiment, an increase of campesterol in a non-human organism, as compared to a corresponding non-transformed wild type non-human organism, is conferred in the process of the invention, if the activity of a polypeptide showing the activity of a protein phosphatase, or if the activity of the polypeptide At1g07430, preferably represented by SEQ ID NO. 17452, or a homolog or fragment thereof, or if the activity of a polypeptide encoded by a nucleic acid molecule comprising the nucleic acid SEQ ID NO. 17451, preferably the coding region thereof, or a homolog or fragment thereof, e.g. derived from Arabidopsis thaliana, is increased or generated. For example the activity of a nucleic acid molecule or a polypeptide comprising the nucleic acid, preferably the coding region thereof, or polypeptide or the consensus sequence or the polypeptide motif, as depicted in Table I, II or IV, application No. 14, column 5 or 8 in the respective same line as the nucleic acid molecule SEQ ID NO. 17451 or polypeptide SEQ ID NO. 17452, respectively, or a homolog or a fragment thereof, is increased or generated, or if the activity protein phosphatase is increased or generated in a non-human organism, like a microorganism or a plant cell, plant or part thereof, especially with non-targeted localization, whereby the respective line disclose in column 7 the fine chemical campesterol. For example, an increase of the campesterol of at least 1 percent, particularly in a range of 18 to 54-percent is conferred as compared to a corresponding non-transformed wild type non-human organism.

[67704] Accordingly, in one embodiment, an increase of campesterol in a non-human organism, as compared to a corresponding non-transformed wild type non-human organism, is conferred in the process of the invention, if the activity of a polypeptide showing the activity of a eukaryotic translation initiation factor 5, or if the activity of the polypeptide At1g36730, preferably represented by SEQ ID NO. 17969, or a homolog or fragment thereof, or if the activity of a polypeptide encoded by a nucleic acid molecule comprising the nucleic acid SEQ ID NO. 17968, preferably the coding region thereof, or a homolog or fragment thereof, e.g. derived from Arabidopsis thaliana, is increased or generated. For example the activity of a nucleic acid molecule or a polypeptide comprising the nucleic acid, preferably the coding region thereof, or polypeptide or the consensus sequence or the polypeptide motif, as depicted in Table I, II or IV, application No. 14, column 5 or 8 in the respective same line as the nucleic acid molecule SEQ ID NO. 17968 or polypeptide SEQ ID NO. 17969, respectively, or a homolog or a fragment thereof, is increased or generated, or if the activity eukaryotic translation initiation factor 5 is increased or generated in a non-human organism, like a microorganism or a plant cell, plant or part thereof, especially with non-targeted localization, whereby the respective line disclose in column 7 the fine chemical campesterol. For example, an increase of the campesterol of at least 1 percent, particularly in a range of 17 to 36-percent is conferred as compared to a corresponding non-transformed wild type non-human organism.

[67705] Accordingly, in one embodiment, an increase of beta-sitosterol in a non-human organism, as compared to a corresponding non-transformed wild type non-human organism, is conferred in the process of the invention, if the activity of a polypeptide showing the activity of a calcium-dependent protein kinase, or if the activity of the polypeptide At1g61950, preferably represented by SEQ ID NO. 18870, or a homolog or fragment thereof, or if the activity of a polypeptide encoded by a nucleic acid molecule comprising the nucleic acid SEQ ID NO. 18869, preferably the coding region thereof, or a homolog or fragment thereof, e.g. derived from Arabidopsis thaliana, is increased or generated. For example the activity of a nucleic acid molecule or a polypeptide comprising the nucleic acid, preferably the coding region thereof, or polypeptide or the consensus sequence or the polypeptide motif, as depicted in Table I, II or IV, application No. 14, column 5 or 8 in the respective same line as the nucleic acid molecule SEQ ID NO. 18869 or polypeptide SEQ ID NO. 18870, respectively, or a homolog or a fragment thereof, is increased or generated, or if the activity calcium-dependent protein kinase is increased or generated in a non-human organism, like a microorganism or a plant cell, plant or part thereof, especially with non-targeted localization, whereby the respective line disclose in column 7 the fine chemical beta-sitosterol. For example, an increase of the beta-sitosterol of at least 1 percent, particularly in a range of 17 to 22-percent is conferred as compared to a corresponding non-transformed wild type non-human organism.

[67706] Accordingly, in one embodiment, an increase of campesterol in a non-human organism, as compared to a corresponding non-transformed wild type non-human organism, is conferred in the process of the invention, if the activity of a polypeptide showing the activity of a calcium-dependent protein kinase, or if the activity of the polypeptide At1g61950, preferably represented by SEQ ID NO. 18870, or a homolog or fragment thereof, or if the activity of a polypeptide encoded by a nucleic acid molecule comprising the nucleic acid SEQ ID NO. 18869, preferably the coding region thereof, or a homolog or fragment thereof, e.g. derived from Arabidopsis thaliana, is increased or generated. For example the activity of a nucleic acid molecule or a polypeptide comprising the nucleic acid, preferably the coding region thereof, or polypeptide or the consensus sequence or the polypeptide motif, as depicted in Table I, II or IV, application No. 14, column 5 or 8 in the respective same line as the nucleic acid molecule SEQ ID NO. 18869 or polypeptide SEQ ID NO. 18870, respectively, or a homolog or a fragment thereof, is increased or generated, or if the activity calcium-dependent protein kinase is increased or generated in a non-human organism, like a microorganism or a plant cell, plant or part thereof, especially with non-targeted localization, whereby the respective line disclose in column 7 the fine chemical campesterol. For example, an increase of the campesterol of at least 1 percent, particularly in a range of 17 to 37-percent is conferred as compared to a corresponding non-transformed wild type non-human organism.

[67707] Accordingly, in one embodiment, an increase of beta-sitosterol in a non-human organism, as compared to a corresponding non-transformed wild type non-human organism, is conferred in the process of the invention, if the activity of a polypeptide showing the activity of a transcription factor, or if the activity of the polypeptide At1g68320, preferably represented by SEQ ID NO. 1062, or a homolog or fragment thereof, or if the activity of a polypeptide encoded by a nucleic acid molecule comprising the nucleic acid SEQ ID NO. 1061, preferably the coding region thereof, or a homolog or fragment thereof, e.g. derived from Arabidopsis thaliana, is increased or generated. For example the activity of a nucleic acid molecule or a polypeptide comprising the nucleic acid, preferably the coding region thereof, or polypeptide or the consensus sequence or the polypeptide motif, as depicted in Table I, II or IV, application No. 14, column 5 or 8 in the respective same line as the nucleic acid molecule SEQ ID NO. 1061 or polypeptide SEQ ID NO. 1062, respectively, or a homolog or a fragment thereof, is increased or generated, or if the activity transcription factor is increased or generated in a non-human organism, like a microorganism or a plant cell, plant or part thereof, especially with non-targeted localization, whereby the respective line disclose in column 7 the fine chemical beta-sitosterol. For example, an increase of the beta-sitosterol of at least 1 percent, particularly in a range of 14 to 49-percent is conferred as compared to a corresponding non-transformed wild type non-human organism.

[67708] Accordingly, in one embodiment, an increase of campesterol in a non-human organism, as compared to a corresponding non-transformed wild type non-human organism, is conferred in the process of the invention, if the activity of a polypeptide showing the activity of a transcription factor, or if the activity of the polypeptide At1g68320, preferably represented by SEQ ID NO. 1062, or a homolog or fragment thereof, or if the activity of a polypeptide encoded by a nucleic acid molecule comprising the nucleic acid SEQ ID NO. 1061, preferably the coding region thereof, or a homolog or fragment thereof, e.g. derived from Arabidopsis thaliana, is increased or generated. For example the activity of a nucleic acid molecule or a polypeptide comprising the nucleic acid, preferably the coding region thereof, or polypeptide or the consensus sequence or the polypeptide motif, as depicted in Table I, II or IV, application No. 14, column 5 or 8 in the respective same line as the nucleic acid molecule SEQ ID NO. 1061 or polypeptide SEQ ID NO. 1062, respectively, or a homolog or a fragment thereof, is increased or generated, or if the activity transcription factor is increased or generated in a non-human organism, like a microorganism or a plant cell, plant or part thereof, especially with non-targeted localization, whereby the respective line disclose in column 7 the fine chemical campesterol. For example, an increase of the campesterol of at least 1 percent, particularly in a range of 16 to 76-percent is conferred as compared to a corresponding non-transformed wild type non-human organism.

[67709] Accordingly, in one embodiment, an increase of campesterol in a non-human organism, as compared to a corresponding non-transformed wild type non-human organism, is conferred in the process of the invention, if the activity of a polypeptide showing the activity of a protein phosphatase, or if the activity of the polypeptide At1g72770, preferably represented by SEQ ID NO. 19420, or a homolog or fragment thereof, or if the activity of a polypeptide encoded by a nucleic acid molecule comprising the nucleic acid SEQ ID NO. 19419, preferably the coding region thereof, or a homolog or fragment thereof, e.g. derived from Arabidopsis thaliana, is increased or generated. For example the activity of a nucleic acid molecule or a polypeptide comprising the nucleic acid, preferably the coding region thereof, or polypeptide or the consensus sequence or the polypeptide motif, as depicted in Table I, II or IV, application No. 14, column 5 or 8 in the respective same line as the nucleic acid molecule SEQ ID NO. 19419 or polypeptide SEQ ID NO. 19420, respectively, or a homolog or a fragment thereof, is increased or generated, or if the activity protein phosphatase is increased or generated in a non-human organism, like a microorganism or a plant cell, plant or part thereof, especially with non-targeted localization, whereby the respective line disclose in column 7 the fine chemical campesterol. For example, an increase of the campesterol of at least 1 percent, particularly in a range of 17 to 79-percent is conferred as compared to a corresponding non-transformed wild type non-human organism.

[67710] Accordingly, in one embodiment, an increase of campesterol in a non-human organism, as compared to a corresponding non-transformed wild type non-human organism, is conferred in the process of the invention, if the activity of a polypeptide showing the activity of a ankyrin repeat family protein, or if the activity of the polypeptide At3g04710, preferably represented by SEQ ID NO. 21903, or a homolog or fragment thereof, or if the activity of a polypeptide encoded by a nucleic acid molecule comprising the nucleic acid SEQ ID NO. 21902, preferably the coding region thereof, or a homolog or fragment thereof, e.g. derived from Arabidopsis thaliana, is increased or generated. For example the activity of a nucleic acid molecule or a polypeptide comprising the nucleic acid, preferably the coding region thereof, or polypeptide or the consensus sequence or the polypeptide motif, as depicted in Table I, II or IV, application No. 14, column 5 or 8 in the respective same line as the nucleic acid molecule SEQ ID NO. 21902 or polypeptide SEQ ID NO. 21903, respectively, or a homolog or a fragment thereof, is increased or generated, or if the activity ankyrin repeat family protein is increased or generated in a non-human organism, like a microorganism or a plant cell, plant or part thereof, especially with non-targeted localization, whereby the respective line disclose in column 7 the fine chemical campesterol. For example, an increase of the campesterol of at least 1 percent, particularly in a range of 16 to 31-percent is conferred as compared to a corresponding non-transformed wild type non-human organism.

[67711] Accordingly, in one embodiment, an increase of beta-sitosterol in a non-human organism, as compared to a corresponding non-transformed wild type non-human organism, is conferred in the process of the invention, if the activity of a polypeptide showing the activity of a transcription factor, or if the activity of the polypeptide At4g09960, preferably represented by SEQ ID NO. 109718, or a homolog or fragment thereof, or if the activity of a polypeptide encoded by a nucleic acid molecule comprising the nucleic acid SEQ ID NO. 109717, preferably the coding region thereof, or a homolog or fragment thereof, e.g. derived from Arabidopsis thaliana, is increased or generated. For example the activity of a nucleic acid molecule or a polypeptide comprising the nucleic acid, preferably the coding region thereof, or polypeptide or the consensus sequence or the polypeptide motif, as depicted in Table I, II or IV, application No. 14, column 5 or 8 in the respective same line as the nucleic acid molecule SEQ ID NO. 109717 or polypeptide SEQ ID NO. 109718, respectively, or a homolog or a fragment thereof, is increased or generated, or if the activity transcription factor is increased or generated in a non-human organism, like a microorganism or a plant cell, plant or part thereof, especially with non-targeted localization, whereby the respective line disclose in column 7 the fine chemical beta-sitosterol. For example, an increase of the beta-sitosterol of at least 1 percent, particularly in a range of 17 to 154-percent is conferred as compared to a corresponding non-transformed wild type non-human organism.

[67712] Accordingly, in one embodiment, an increase of campesterol in a non-human organism, as compared to a corresponding non-transformed wild type non-human organism, is conferred in the process of the invention, if the activity of a polypeptide showing the activity of a transcription factor, or if the activity of the polypeptide At4g09960, preferably represented by SEQ ID NO. 109718, or a homolog or fragment thereof, or if the activity of a polypeptide encoded by a nucleic acid molecule comprising the nucleic acid SEQ ID NO. 109717, preferably the coding region thereof, or a homolog or fragment thereof, e.g. derived from Arabidopsis thaliana, is increased or generated. For example the activity of a nucleic acid molecule or a polypeptide comprising the nucleic acid, preferably the coding region thereof, or polypeptide or the consensus sequence or the polypeptide motif, as depicted in Table I, II or IV, application No. 14, column 5 or 8 in the respective same line as the nucleic acid molecule SEQ ID NO. 109717 or polypeptide SEQ ID NO. 109718, respectively, or a homolog or a fragment thereof, is increased or generated, or if the activity transcription factor is increased or generated in a non-human organism, like a microorganism or a plant cell, plant or part thereof, especially with non-targeted localization, whereby the respective line disclose in column 7 the fine chemical campesterol. For example, an increase of the campesterol of at least 1 percent, particularly in a range of 17 to 38-percent is conferred as compared to a corresponding non-transformed wild type non-human organism.

[67713] Accordingly, in one embodiment, an increase of campesterol in a non-human organism, as compared to a corresponding non-transformed wild type non-human organism, is conferred in the process of the invention, if the activity of a polypeptide showing the activity of a sterol desaturase, or if the activity of the polypeptide At4g12110, preferably represented by SEQ ID NO. 131209, or a homolog or fragment thereof, or if the activity of a polypeptide encoded by a nucleic acid molecule comprising the nucleic acid SEQ ID NO. 131208, preferably the coding region thereof, or a homolog or fragment thereof, e.g. derived from Arabidopsis thaliana, is increased or generated. For example the activity of a nucleic acid molecule or a polypeptide comprising the nucleic acid, preferably the coding region thereof, or polypeptide or the consensus sequence or the polypeptide motif, as depicted in Table I, II or IV, application No. 14, column 5 or 8 in the respective same line as the nucleic acid molecule SEQ ID NO. 131208 or polypeptide SEQ ID NO. 131209, respectively, or a homolog or a fragment thereof, is increased or generated, or if the activity sterol desaturase is increased or generated in a non-human organism, like a microorganism or a plant cell, plant or part thereof, especially with non-targeted localization, whereby the respective line disclose in column 7 the fine chemical campesterol. For example, an increase of the campesterol of at least 1 percent, particularly in a range of 22 to 75-percent is conferred as compared to a corresponding non-transformed wild type non-human organism.

[67714] Accordingly, in one embodiment, an increase of beta-sitosterol in a non-human organism, as compared to a corresponding non-transformed wild type non-human organism, is conferred in the process of the invention, if the activity of a polypeptide showing the activity of a monothiol glutaredoxin, or if the activity of the polypeptide At4g15660, preferably represented by SEQ ID NO. 23483, or a homolog or fragment thereof, or if the activity of a polypeptide encoded by a nucleic acid molecule comprising the nucleic acid SEQ ID NO. 23482, preferably the coding region thereof, or a homolog or fragment thereof, e.g. derived from Arabidopsis thaliana, is increased or generated. For example the activity of a nucleic acid molecule or a polypeptide comprising the nucleic acid, preferably the coding region thereof, or polypeptide or the consensus sequence or the polypeptide motif, as depicted in Table I, II or IV, application No. 14, column 5 or 8 in the respective same line as the nucleic acid molecule SEQ ID NO. 23482 or polypeptide SEQ ID NO. 23483, respectively, or a homolog or a fragment thereof, is increased or generated, or if the activity monothiol glutaredoxin is increased or generated in a non-human organism, like a microorganism or a plant cell, plant or part thereof, especially with non-targeted localization, whereby the respective line disclose in column 7 the fine chemical beta-sitosterol. For example, an increase of the beta-sitosterol of at least 1 percent, particularly in a range of 15 to 44-percent is conferred as compared to a corresponding non-transformed wild type non-human organism.

[67715] Accordingly, in one embodiment, an increase of campesterol in a non-human organism, as compared to a corresponding non-transformed wild type non-human organism, is conferred in the process of the invention, if the activity of a polypeptide showing the activity of a protein phosphatase, or if the activity of the polypeptide At4g26080, preferably represented by SEQ ID NO. 68850, or a homolog or fragment thereof, or if the activity of a polypeptide encoded by a nucleic acid molecule comprising the nucleic acid SEQ ID NO. 68849, preferably the coding region thereof, or a homolog or fragment thereof, e.g. derived from Arabidopsis thaliana, is increased or generated. For example the activity of a nucleic acid molecule or a polypeptide comprising the nucleic acid, preferably the coding region thereof, or polypeptide or the consensus sequence or the polypeptide motif, as depicted in Table I, II or IV, application No. 14, column 5 or 8 in the respective same line as the nucleic acid molecule SEQ ID NO. 68849 or polypeptide SEQ ID NO. 68850, respectively, or a homolog or a fragment thereof, is increased or generated, or if the activity protein phosphatase is increased or generated in a non-human organism, like a microorganism or a plant cell, plant or part thereof, especially with non-targeted localization, whereby the respective line disclose in column 7 the fine chemical campesterol. For example, an increase of the campesterol of at least 1 percent, particularly in a range of 16 to 39-percent is conferred as compared to a corresponding non-transformed wild type non-human organism.

[67716] Accordingly, in one embodiment, an increase of beta-sitosterol in a non-human organism, as compared to a corresponding non-transformed wild type non-human organism, is conferred in the process of the invention, if the activity of a polypeptide showing the activity of a calcium-dependent protein kinase, or if the activity of the polypeptide At4g35310, preferably represented by SEQ ID NO. 4349, or a homolog or fragment thereof, or if the activity of a polypeptide encoded by a nucleic acid molecule comprising the nucleic acid SEQ ID NO. 4348, preferably the coding region thereof, or a homolog or fragment thereof, e.g. derived from Arabidopsis thaliana, is increased or generated. For example the activity of a nucleic acid molecule or a polypeptide comprising the nucleic acid, preferably the coding region thereof, or polypeptide or the consensus sequence or the polypeptide motif, as depicted in Table I, II or IV, application No. 14, column 5 or 8 in the respective same line as the nucleic acid molecule SEQ ID NO. 4348 or polypeptide SEQ ID NO. 4349, respectively, or a homolog or a fragment thereof, is increased or generated, or if the activity calcium-dependent protein kinase is increased or generated in a non-human organism, like a microorganism or a plant cell, plant or part thereof, especially with non-targeted localization, whereby the respective line disclose in column 7 the fine chemical beta-sitosterol. For example, an increase of the beta-sitosterol of at least 1 percent, particularly in a range of 18 to 34-percent is conferred as compared to a corresponding non-transformed wild type non-human organism.

[67717] Accordingly, in one embodiment, an increase of campesterol in a non-human organism, as compared to a corresponding non-transformed wild type non-human organism, is conferred in the process of the invention, if the activity of a polypeptide showing the activity of a calcium-dependent protein kinase, or if the activity of the polypeptide At4g35310, preferably represented by SEQ ID NO. 4349, or a homolog or fragment thereof, or if the activity of a polypeptide encoded by a nucleic acid molecule comprising the nucleic acid SEQ ID NO. 4348, preferably the coding region thereof, or a homolog or fragment thereof, e.g. derived from Arabidopsis thaliana, is increased or generated. For example the activity of a nucleic acid molecule or a polypeptide comprising the nucleic acid, preferably the coding region thereof, or polypeptide or the consensus sequence or the polypeptide motif, as depicted in Table I, II or IV, application No. 14, column 5 or 8 in the respective same line as the nucleic acid molecule SEQ ID NO. 4348 or polypeptide SEQ ID NO. 4349, respectively, or a homolog or a fragment thereof, is increased or generated, or if the activity calcium-dependent protein kinase is increased or generated in a non-human organism, like a microorganism or a plant cell, plant or part thereof, especially with non-targeted localization, whereby the respective line disclose in column 7 the fine chemical campesterol. For example, an increase of the campesterol of at least 1 percent, particularly in a range of 35 to 70-percent is conferred as compared to a corresponding non-transformed wild type non-human organism.

[67718] Accordingly, in one embodiment, an increase of campesterol in a non-human organism, as compared to a corresponding non-transformed wild type non-human organism, is conferred in the process of the invention, if the activity of a polypeptide showing the activity of a protein phosphatase, or if the activity of the polypeptide At5g57050, preferably represented by SEQ ID NO. 5319, or a homolog or fragment thereof, or if the activity of a polypeptide encoded by a nucleic acid molecule comprising the nucleic acid SEQ ID NO. 5318, preferably the coding region thereof, or a homolog or fragment thereof, e.g. derived from Arabidopsis thaliana, is increased or generated. For example the activity of a nucleic acid molecule or a polypeptide comprising the nucleic acid, preferably the coding region thereof, or polypeptide or the consensus sequence or the polypeptide motif, as depicted in Table I, II or IV, application No. 14, column 5 or 8 in the respective same line as the nucleic acid molecule SEQ ID NO. 5318 or polypeptide SEQ ID NO. 5319, respectively, or a homolog or a fragment thereof, is increased or generated, or if the activity protein phosphatase is increased or generated in a non-human organism, like a microorganism or a plant cell, plant or part thereof, especially with non-targeted localization, whereby the respective line disclose in column 7 the fine chemical campesterol. For example, an increase of the campesterol of at least 1 percent, particularly in a range of 30 to 45-percent is conferred as compared to a corresponding non-transformed wild type non-human organism.

[67719] Accordingly, in one embodiment, an increase of beta-sitosterol in a non-human organism, as compared to a corresponding non-transformed wild type non-human organism, is conferred in the process of the invention, if the activity of a polypeptide showing the activity of a protein phosphatase, or if the activity of the polypeptide At5g59220, preferably represented by SEQ ID NO. 25499, or a homolog or fragment thereof, or if the activity of a polypeptide encoded by a nucleic acid molecule comprising the nucleic acid SEQ ID NO. 25498, preferably the coding region thereof, or a homolog or fragment thereof, e.g. derived from Arabidopsis thaliana, is increased or generated. For example the activity of a nucleic acid molecule or a polypeptide comprising the nucleic acid, preferably the coding region thereof, or polypeptide or the consensus sequence or the polypeptide motif, as depicted in Table I, II or IV, application No. 14, column 5 or 8 in the respective same line as the nucleic acid molecule SEQ ID NO. 25498 or polypeptide SEQ ID NO. 25499, respectively, or a homolog or a fragment thereof, is increased or generated, or if the activity protein phosphatase is increased or generated in a non-human organism, like a microorganism or a plant cell, plant or part thereof, especially with non-targeted localization, whereby the respective line disclose in column 7 the fine chemical beta-sitosterol. For example, an increase of the beta-sitosterol of at least 1 percent, particularly in a range of 13 to 39-percent is conferred as compared to a corresponding non-transformed wild type non-human organism.

[67720] Accordingly, in one embodiment, an increase of beta-sitosterol in a non-human organism, as compared to a corresponding non-transformed wild type non-human organism, is conferred in the process of the invention, if the activity of a polypeptide showing the activity of a protein kinase, or if the activity of the polypeptide At5g66710, preferably represented by SEQ ID NO. 122804, or a homolog or fragment thereof, or if the activity of a polypeptide encoded by a nucleic acid molecule comprising the nucleic acid SEQ ID NO. 122803, preferably the coding region thereof, or a homolog or fragment thereof, e.g. derived from Arabidopsis thaliana, is increased or generated. For example the activity of a nucleic acid molecule or a polypeptide comprising the nucleic acid, preferably the coding region thereof, or polypeptide or the consensus sequence or the polypeptide motif, as depicted in Table I, II or IV, application No. 14, column 5 or 8 in the respective same line as the nucleic acid molecule SEQ ID NO. 122803 or polypeptide SEQ ID NO. 122804, respectively, or a homolog or a fragment thereof, is increased or generated, or if the activity protein kinase is increased or generated in a non-human organism, like a microorganism or a plant cell, plant or part thereof, especially with non-targeted localization, whereby the respective line disclose in column 7 the fine chemical beta-sitosterol. For example, an increase of the beta-sitosterol of at least 1 percent, particularly in a range of 14 to 23-percent is conferred as compared to a corresponding non-transformed wild type non-human organism.

[67721] Accordingly, in one embodiment, an increase of beta-sitosterol in a non-human organism, as compared to a corresponding non-transformed wild type non-human organism, is conferred in the process of the invention, if the activity of a polypeptide showing the activity of a sec-independent protein translocase, or if the activity of the polypeptide AvinDRAFT_{—}1624, preferably represented by SEQ ID NO. 26197, or a homolog or fragment thereof, or if the activity of a polypeptide encoded by a nucleic acid molecule comprising the nucleic acid SEQ ID NO. 26196, preferably the coding region thereof, or a homolog or fragment thereof, e.g. derived from Azotobacter vinelandii, is increased or generated. For example the activity of a nucleic acid molecule or a polypeptide comprising the nucleic acid, preferably the coding region thereof, or polypeptide or the consensus sequence or the polypeptide motif, as depicted in Table I, II or IV, application No. 14, column 5 or 8 in the respective same line as the nucleic acid molecule SEQ ID NO. 26196 or polypeptide SEQ ID NO. 26197, respectively, or a homolog or a fragment thereof, is increased or generated, or if the activity sec-independent protein translocase is increased or generated in a non-human organism, like a microorganism or a plant cell, plant or part thereof, especially with non-targeted localization, whereby the respective line disclose in column 7 the fine chemical beta-sitosterol. For example, an increase of the beta-sitosterol of at least 1 percent, particularly in a range of 13 to 18-percent is conferred as compared to a corresponding non-transformed wild type non-human organism.

[67722] Accordingly, in one embodiment, an increase of campesterol in a non-human organism, as compared to a corresponding non-transformed wild type non-human organism, is conferred in the process of the invention, if the activity of a polypeptide showing the activity of a 2-oxoglutarate dehydrogenase E1 subunit, or if the activity of the polypeptide AvinDRAFT_{—}3028, preferably represented by SEQ ID NO. 6076, or a homolog or fragment thereof, or if the activity of a polypeptide encoded by a nucleic acid molecule comprising the nucleic acid SEQ ID NO. 6075, preferably the coding region thereof, or a homolog or fragment thereof, e.g. derived from Azotobacter vinelandii, is increased or generated. For example the activity of a nucleic acid molecule or a polypeptide comprising the nucleic acid, preferably the coding region thereof, or polypeptide or the consensus sequence or the polypeptide motif, as depicted in Table I, II or IV, application No. 14, column 5 or 8 in the respective same line as the nucleic acid molecule SEQ ID NO. 6075 or polypeptide SEQ ID NO. 6076, respectively, or a homolog or a fragment thereof, is increased or generated, or if the activity 2-oxoglutarate dehydrogenase E1 subunit is increased or generated in a non-human organism, like a microorganism or a plant cell, plant or part thereof, especially with non-targeted localization, whereby the respective line disclose in column 7 the fine chemical campesterol. For example, an increase of the campesterol of at least 1 percent, particularly in a range of 18 to 43-percent is conferred as compared to a corresponding non-transformed wild type non-human organism.

[67723] Accordingly, in one embodiment, an increase of campesterol in a non-human organism, as compared to a corresponding non-transformed wild type non-human organism, is conferred in the process of the invention, if the activity of a polypeptide showing the activity of a oxidoreductase, or if the activity of the polypeptide AvinDRAFT_{—}3253, preferably represented by SEQ ID NO. 29501, or a homolog or fragment thereof, or if the activity of a polypeptide encoded by a nucleic acid molecule comprising the nucleic acid SEQ ID NO. 29500, preferably the coding region thereof, or a homolog or fragment thereof, e.g. derived from Azotobacter vinelandii, is increased or generated. For example the activity of a nucleic acid molecule or a polypeptide comprising the nucleic acid, preferably the coding region thereof, or polypeptide or the consensus sequence or the polypeptide motif, as depicted in Table I, II or IV, application No. 14, column 5 or 8 in the respective same line as the nucleic acid molecule SEQ ID NO. 29500 or polypeptide SEQ ID NO. 29501, respectively, or a homolog or a fragment thereof, is increased or generated, or if the activity oxidoreductase is increased or generated in a non-human organism, like a microorganism or a plant cell, plant or part thereof, especially with non-targeted localization, whereby the respective line disclose in column 7 the fine chemical campesterol. For example, an increase of the campesterol of at least 1 percent, particularly in a range of 16 to 35 percent is conferred as compared to a corresponding non-transformed wild type non-human organism.

[67724] Accordingly, in one embodiment, an increase of beta-sitosterol in a non-human organism, as compared to a corresponding non-transformed wild type non-human organism, is conferred in the process of the invention, if the activity of a polypeptide showing the activity of a CTP synthase, or if the activity of the polypeptide AvinDRAFT_{—}3605, preferably represented by SEQ ID NO. 31027, or a homolog or fragment thereof, or if the activity of a polypeptide encoded by a nucleic acid molecule comprising the nucleic acid SEQ ID NO. 31026, preferably the coding region thereof, or a homolog or fragment thereof, e.g. derived from Azotobacter vinelandii, is increased or generated. For example the activity of a nucleic acid molecule or a polypeptide comprising the nucleic acid, preferably the coding region thereof, or polypeptide or the consensus sequence or the polypeptide motif, as depicted in Table I, II or IV, application No. 14, column 5 or 8 in the respective same line as the nucleic acid molecule SEQ ID NO. 31026 or polypeptide SEQ ID NO. 31027, respectively, or a homolog or a fragment thereof, is increased or generated, or if the activity CTP synthase is increased or generated in a non-human organism, like a microorganism or a plant cell, plant or part thereof, especially with non-targeted localization, whereby the respective line disclose in column 7 the fine chemical beta-sitosterol. For example, an increase of the beta-sitosterol of at least 1 percent, particularly in a range of 13 to 24-percent is conferred as compared to a corresponding non-transformed wild type non-human organism.

[67725] Accordingly, in one embodiment, an increase of campesterol in a non-human organism, as compared to a corresponding non-transformed wild type non-human organism, is conferred in the process of the invention, if the activity of a polypeptide showing the activity of a CTP synthase, or if the activity of the polypeptide AvinDRAFT_{—}3605, preferably represented by SEQ ID NO. 31027, or a homolog or fragment thereof, or if the activity of a polypeptide encoded by a nucleic acid molecule comprising the nucleic acid SEQ ID NO. 31026, preferably the coding region thereof, or a homolog or fragment thereof, e.g. derived from Azotobacter vinelandii, is increased or generated. For example the activity of a nucleic acid molecule or a polypeptide comprising the nucleic acid, preferably the coding region thereof, or polypeptide or the consensus sequence or the polypeptide motif, as depicted in Table I, II or IV, application No. 14, column 5 or 8 in the respective same line as the nucleic acid molecule SEQ ID NO. 31026 or polypeptide SEQ ID NO. 31027, respectively, or a homolog or a fragment thereof, is increased or generated, or if the activity CTP synthase is increased or generated in a non-human organism, like a microorganism or a plant cell, plant or part thereof, especially with non-targeted localization, whereby the respective line disclose in column 7 the fine chemical campesterol. For example, an increase of the campesterol of at least 1 percent, particularly in a range of 17 to 44-percent is conferred as compared to a corresponding non-transformed wild type non-human organism.

[67726] Accordingly, in one embodiment, an increase of campesterol in a non-human organism, as compared to a corresponding non-transformed wild type non-human organism, is conferred in the process of the invention, if the activity of a polypeptide showing the activity of a recombinase A, or if the activity of the polypeptide AvinDRAFT_{—}3629, preferably represented by SEQ ID NO. 114232, or a homolog or fragment thereof, or if the activity of a polypeptide encoded by a nucleic acid molecule comprising the nucleic acid SEQ ID NO. 114231, preferably the coding region thereof, or a homolog or fragment thereof, e.g. derived from Azotobacter vinelandii, is increased or generated. For example the activity of a nucleic acid molecule or a polypeptide comprising the nucleic acid, preferably the coding region thereof, or polypeptide or the consensus sequence or the polypeptide motif, as depicted in Table I, II or IV, application No. 14, column 5 or 8 in the respective same line as the nucleic acid molecule SEQ ID NO. 114231 or polypeptide SEQ ID NO. 114232, respectively, or a homolog or a fragment thereof, is increased or generated, or if the activity recombinase A is increased or generated in a non-human organism, like a microorganism or a plant cell, plant or part thereof, especially with non-targeted localization, whereby the respective line disclose in column 7 the fine chemical campesterol. For example, an increase of the campesterol of at least 1 percent, particularly in a range of 16 to 72-percent is conferred as compared to a corresponding non-transformed wild type non-human organism.

[67727] Accordingly, in one embodiment, an increase of beta-sitosterol in a non-human organism, as compared to a corresponding non-transformed wild type non-human organism, is conferred in the process of the invention, if the activity of a polypeptide showing the activity of a hydrolase, or if the activity of the polypeptide AvinDRAFT_{—}5103, preferably represented by SEQ ID NO. 6511, or a homolog or fragment thereof, or if the activity of a polypeptide encoded by a nucleic acid molecule comprising the nucleic acid SEQ ID NO. 6510, preferably the coding region thereof, or a homolog or fragment thereof, e.g. derived from Azotobacter vinelandii, is increased or generated. For example the activity of a nucleic acid molecule or a polypeptide comprising the nucleic acid, preferably the coding region thereof, or polypeptide or the consensus sequence or the polypeptide motif, as depicted in Table I, II or IV, application No. 14, column 5 or 8 in the respective same line as the nucleic acid molecule SEQ ID NO. 6510 or polypeptide SEQ ID NO. 6511, respectively, or a homolog or a fragment thereof, is increased or generated, or if the activity hydrolase is increased or generated in a non-human organism, like a microorganism or a plant cell, plant or part thereof, especially with non-targeted localization, whereby the respective line disclose in column 7 the fine chemical beta-sitosterol. For example, an increase of the beta-sitosterol of at least 1 percent, particularly in a range of 16 to 32-percent is conferred as compared to a corresponding non-transformed wild type non-human organism.

[67728] Accordingly, in one embodiment, an increase of campesterol in a non-human organism, as compared to a corresponding non-transformed wild type non-human organism, is conferred in the process of the invention, if the activity of a polypeptide showing the activity of a hydrolase, or if the activity of the polypeptide AvinDRAFT_{—}5103, preferably represented by SEQ ID NO. 6511, or a homolog or fragment thereof, or if the activity of a polypeptide encoded by a nucleic acid molecule comprising the nucleic acid SEQ ID NO. 6510, preferably the coding region thereof, or a homolog or fragment thereof, e.g. derived from Azotobacter vinelandii, is increased or generated. For example the activity of a nucleic acid molecule or a polypeptide comprising the nucleic acid, preferably the coding region thereof, or polypeptide or the consensus sequence or the polypeptide motif, as depicted in Table I, II or IV, application No. 14, column 5 or 8 in the respective same line as the nucleic acid molecule SEQ ID NO. 6510 or polypeptide SEQ ID NO. 6511, respectively, or a homolog or a fragment thereof, is increased or generated, or if the activity hydrolase is increased or generated in a non-human organism, like a microorganism or a plant cell, plant or part thereof, especially with non-targeted localization, whereby the respective line disclose in column 7 the fine chemical campesterol. For example, an increase of the campesterol of at least 1 percent, particularly in a range of 19 to 45-percent is conferred as compared to a corresponding non-transformed wild type non-human organism.

[67729] Accordingly, in one embodiment, an increase of campesterol in a non-human organism, as compared to a corresponding non-transformed wild type non-human organism, is conferred in the process of the invention, if the activity of a polypeptide showing the activity of a threonine synthase, or if the activity of the polypeptide B0004, preferably represented by SEQ ID NO. 34890, or a homolog or fragment thereof, or if the activity of a polypeptide encoded by a nucleic acid molecule comprising the nucleic acid SEQ ID NO. 34889, preferably the coding region thereof, or a homolog or fragment thereof, e.g. derived from Escherichia coli, is increased or generated. For example the activity of a nucleic acid molecule or a polypeptide comprising the nucleic acid, preferably the coding region thereof, or polypeptide or the consensus sequence or the polypeptide motif, as depicted in Table I, II or IV, application No. 14, column 5 or 8 in the respective same line as the nucleic acid molecule SEQ ID NO. 34889 or polypeptide SEQ ID NO. 34890, respectively, or a homolog or a fragment thereof, is increased or generated, or if the activity threonine synthase is increased or generated in a non-human organism, like a microorganism or a plant cell, plant or part thereof, especially with plastidic localization, whereby the respective line disclose in column 7 the fine chemical campesterol. For example, an increase of the campesterol of at least 1 percent, particularly in a range of 21 to 90-percent is conferred as compared to a corresponding non-transformed wild type non-human organism.

[67730] Accordingly, in one embodiment, an increase of campesterol in a non-human organism, as compared to a corresponding non-transformed wild type non-human organism, is conferred in the process of the invention, if the activity of a polypeptide showing the activity of a L-ribulose-5-phosphate 4-epimerase, or if the activity of the polypeptide B0061, preferably represented by SEQ ID NO. 35205, or a homolog or fragment thereof, or if the activity of a polypeptide encoded by a nucleic acid molecule comprising the nucleic acid SEQ ID NO. 35204, preferably the coding region thereof, or a homolog or fragment thereof, e.g. derived from Escherichia coli, is increased or generated. For example the activity of a nucleic acid molecule or a polypeptide comprising the nucleic acid, preferably the coding region thereof, or polypeptide or the consensus sequence or the polypeptide motif, as depicted in Table I, II or IV, application No. 14, column 5 or 8 in the respective same line as the nucleic acid molecule SEQ ID NO. 35204 or polypeptide SEQ ID NO. 35205, respectively, or a homolog or a fragment thereof, is increased or generated, or if the activity L-ribulose-5-phosphate 4-epimerase is increased or generated in a non-human organism, like a microorganism or a plant cell, plant or part thereof, especially with non-targeted localization, whereby the respective line disclose in column 7 the fine chemical campesterol. For example, an increase of the campesterol of at least 1 percent, particularly in a range of 16 to 56-percent is conferred as compared to a corresponding non-transformed wild type non-human organism.

[67731] Accordingly, in one embodiment, an increase of campesterol in a non-human organism, as compared to a corresponding non-transformed wild type non-human organism, is conferred in the process of the invention, if the activity of a polypeptide showing the activity of a glucose dehydrogenase, or if the activity of the polypeptide B0124, preferably represented by SEQ ID NO. 35483, or a homolog or fragment thereof, or if the activity of a polypeptide encoded by a nucleic acid molecule comprising the nucleic acid SEQ ID NO. 35482, preferably the coding region thereof, or a homolog or fragment thereof, e.g. derived from Escherichia coli, is increased or generated. For example the activity of a nucleic acid molecule or a polypeptide comprising the nucleic acid, preferably the coding region thereof, or polypeptide or the consensus sequence or the polypeptide motif, as depicted in Table I, II or IV, application No. 14, column 5 or 8 in the respective same line as the nucleic acid molecule SEQ ID NO. 35482 or polypeptide SEQ ID NO. 35483, respectively, or a homolog or a fragment thereof, is increased or generated, or if the activity glucose dehydrogenase is increased or generated in a non-human organism, like a microorganism or a plant cell, plant or part thereof, especially with non-targeted localization, whereby the respective line disclose in column 7 the fine chemical campesterol. For example, an increase of the campesterol of at least 1 percent, particularly in a range of 26 to 55-percent is conferred as compared to a corresponding non-transformed wild type non-human organism.

[67732] Accordingly, in one embodiment, an increase of beta-sitosterol in a non-human organism, as compared to a corresponding non-transformed wild type non-human organism, is conferred in the process of the invention, if the activity of a polypeptide showing the activity of a ATP-binding component of a transport system, or if the activity of the polypeptide B0449, preferably represented by SEQ ID NO. 7334, or a homolog or fragment thereof, or if the activity of a polypeptide encoded by a nucleic acid molecule comprising the nucleic acid SEQ ID NO. 7333, preferably the coding region thereof, or a homolog or fragment thereof, e.g. derived from Escherichia coli, is increased or generated. For example the activity of a nucleic acid molecule or a polypeptide comprising the nucleic acid, preferably the coding region thereof, or polypeptide or the consensus sequence or the polypeptide motif, as depicted in Table I, II or IV, application No. 14, column 5 or 8 in the respective same line as the nucleic acid molecule SEQ ID NO. 7333 or polypeptide SEQ ID NO. 7334, respectively, or a homolog or a fragment thereof, is increased or generated, or if the activity ATP-binding component of a transport system is increased or generated in a non-human organism, like a microorganism or a plant cell, plant or part thereof, especially with non-targeted localization, whereby the respective line disclose in column 7 the fine chemical beta-sitosterol. For example, an increase of the beta-sitosterol of at least 1 percent, particularly in a range of 19 to 63-percent is conferred as compared to a corresponding non-transformed wild type non-human organism.

[67733] Accordingly, in one embodiment, an increase of campesterol in a non-human organism, as compared to a corresponding non-transformed wild type non-human organism, is conferred in the process of the invention, if the activity of a polypeptide showing the activity of a ATP-binding component of a transport system, or if the activity of the polypeptide B0449, preferably represented by SEQ ID NO. 7334, or a homolog or fragment thereof, or if the activity of a polypeptide encoded by a nucleic acid molecule comprising the nucleic acid SEQ ID NO. 7333, preferably the coding region thereof, or a homolog or fragment thereof, e.g. derived from Escherichia coli, is increased or generated. For example the activity of a nucleic acid molecule or a polypeptide comprising the nucleic acid, preferably the coding region thereof, or polypeptide or the consensus sequence or the polypeptide motif, as depicted in Table I, II or IV, application No. 14, column 5 or 8 in the respective same line as the nucleic acid molecule SEQ ID NO. 7333 or polypeptide SEQ ID NO. 7334, respectively, or a homolog or a fragment thereof, is increased or generated, or if the activity ATP-binding component of a transport system is increased or generated in a non-human organism, like a microorganism or a plant cell, plant or part thereof, especially with non-targeted localization, whereby the respective line disclose in column 7 the fine chemical campesterol. For example, an increase of the campesterol of at least 1 percent, particularly in a range of 20 to 86-percent is conferred as compared to a corresponding non-transformed wild type non-human organism.

[67734] Accordingly, in one embodiment, an increase of campesterol in a non-human organism, as compared to a corresponding non-transformed wild type non-human organism, is conferred in the process of the invention, if the activity of a polypeptide showing the activity of a membrane transport protein, or if the activity of the polypeptide B0486, preferably represented by SEQ ID NO. 7687, or a homolog or fragment thereof, or if the activity of a polypeptide encoded by a nucleic acid molecule comprising the nucleic acid SEQ ID NO. 7686, preferably the coding region thereof, or a homolog or fragment thereof, e.g. derived from Escherichia coli, is increased or generated. For example the activity of a nucleic acid molecule or a polypeptide comprising the nucleic acid, preferably the coding region thereof, or polypeptide or the consensus sequence or the polypeptide motif, as depicted in Table I, II or IV, application No. 14, column 5 or 8 in the respective same line as the nucleic acid molecule SEQ ID NO. 7686 or polypeptide SEQ ID NO. 7687, respectively, or a homolog or a fragment thereof, is increased or generated, or if the activity membrane transport protein is increased or generated in a non-human organism, like a microorganism or a plant cell, plant or part thereof, especially with non-targeted localization, whereby the respective line disclose in column 7 the fine chemical campesterol. For example, an increase of the campesterol of at least 1 percent, particularly in a range of 19 to 29-percent is conferred as compared to a corresponding non-transformed wild type non-human organism.

[67735] Accordingly, in one embodiment, an increase of campesterol in a non-human organism, as compared to a corresponding non-transformed wild type non-human organism, is conferred in the process of the invention, if the activity of a polypeptide showing the activity of a putrescine transport system permease protein, or if the activity of the polypeptide B0856, preferably represented by SEQ ID NO. 131360, or a homolog or fragment thereof, or if the activity of a polypeptide encoded by a nucleic acid molecule comprising the nucleic acid SEQ ID NO. 131359, preferably the coding region thereof, or a homolog or fragment thereof, e.g. derived from Escherichia coli, is increased or generated. For example the activity of a nucleic acid molecule or a polypeptide comprising the nucleic acid, preferably the coding region thereof, or polypeptide or the consensus sequence or the polypeptide motif, as depicted in Table I, II or IV, application No. 14, column 5 or 8 in the respective same line as the nucleic acid molecule SEQ ID NO. 131359 or polypeptide SEQ ID NO. 131360, respectively, or a homolog or a fragment thereof, is increased or generated, or if the activity putrescine transport system permease protein is increased or generated in a non-human organism, like a microorganism or a plant cell, plant or part thereof, especially with plastidic localization, whereby the respective line disclose in column 7 the fine chemical campesterol. For example, an increase of the campesterol of at least 1 percent, particularly in a range of 25 to 28-percent is conferred as compared to a corresponding non-transformed wild type non-human organism.

[67736] Accordingly, in one embodiment, an increase of beta-sitosterol in a non-human organism, as compared to a corresponding non-transformed wild type non-human organism, is conferred in the process of the invention, if the activity of a polypeptide showing the activity of a multidrug resistance protein, or if the activity of the polypeptide B1065, preferably represented by SEQ ID NO. 76033, or a homolog or fragment thereof, or if the activity of a polypeptide encoded by a nucleic acid molecule comprising the nucleic acid SEQ ID NO. 76032, preferably the coding region thereof, or a homolog or fragment thereof, e.g. derived from Escherichia coli, is increased or generated. For example the activity of a nucleic acid molecule or a polypeptide comprising the nucleic acid, preferably the coding region thereof, or polypeptide or the consensus sequence or the polypeptide motif, as depicted in Table I, II or IV, application No. 14, column 5 or 8 in the respective same line as the nucleic acid molecule SEQ ID NO. 76032 or polypeptide SEQ ID NO. 76033, respectively, or a homolog or a fragment thereof, is increased or generated, or if the activity multidrug resistance protein is increased or generated in a non-human organism, like a microorganism or a plant cell, plant or part thereof, especially with plastidic localization, whereby the respective line disclose in column 7 the fine chemical beta-sitosterol. For example, an increase of the beta-sitosterol of at least 1 percent, particularly in a range of 20 to 27-percent is conferred as compared to a corresponding non-transformed wild type non-human organism.

[67737] Accordingly, in one embodiment, an increase of beta-sitosterol in a non-human organism, as compared to a corresponding non-transformed wild type non-human organism, is conferred in the process of the invention, if the activity of a polypeptide showing the activity of a sodium/proton antiporter, or if the activity of the polypeptide B1186, preferably represented by SEQ ID NO. 37401, or a homolog or fragment thereof, or if the activity of a polypeptide encoded by a nucleic acid molecule comprising the nucleic acid SEQ ID NO. 37400, preferably the coding region thereof, or a homolog or fragment thereof, e.g. derived from Escherichia coli, is increased or generated. For example the activity of a nucleic acid molecule or a polypeptide comprising the nucleic acid, preferably the coding region thereof, or polypeptide or the consensus sequence or the polypeptide motif, as depicted in Table I, II or IV, application No. 14, column 5 or 8 in the respective same line as the nucleic acid molecule SEQ ID NO. 37400 or polypeptide SEQ ID NO. 37401, respectively, or a homolog or a fragment thereof, is increased or generated, or if the activity sodium/proton antiporter is increased or generated in a non-human organism, like a microorganism or a plant cell, plant or part thereof, especially with non-targeted localization, whereby the respective line disclose in column 7 the fine chemical beta-sitosterol. For example, an increase of the beta-sitosterol of at least 1 percent, particularly in a range of 15 to 54-percent is conferred as compared to a corresponding non-transformed wild type non-human organism.

[67738] Accordingly, in one embodiment, an increase of campesterol in a non-human organism, as compared to a corresponding non-transformed wild type non-human organism, is conferred in the process of the invention, if the activity of a polypeptide showing the activity of a sodium/proton antiporter, or if the activity of the polypeptide B1186, preferably represented by SEQ ID NO. 37401, or a homolog or fragment thereof, or if the activity of a polypeptide encoded by a nucleic acid molecule comprising the nucleic acid SEQ ID NO. 37400, preferably the coding region thereof, or a homolog or fragment thereof, e.g. derived from Escherichia coli, is increased or generated. For example the activity of a nucleic acid molecule or a polypeptide comprising the nucleic acid, preferably the coding region thereof, or polypeptide or the consensus sequence or the polypeptide motif, as depicted in Table I, II or IV, application No. 14, column 5 or 8 in the respective same line as the nucleic acid molecule SEQ ID NO. 37400 or polypeptide SEQ ID NO. 37401, respectively, or a homolog or a fragment thereof, is increased or generated, or if the activity sodium/proton antiporter is increased or generated in a non-human organism, like a microorganism or a plant cell, plant or part thereof, especially with non-targeted localization, whereby the respective line disclose in column 7 the fine chemical campesterol. For example, an increase of the campesterol of at least 1 percent, particularly in a range of 16 to 39 percent is conferred as compared to a corresponding non-transformed wild type non-human organism.

[67739] Accordingly, in one embodiment, an increase of beta-sitosterol in a non-human organism, as compared to a corresponding non-transformed wild type non-human organism, is conferred in the process of the invention, if the activity of a polypeptide showing the activity of a phenylacetic acid degradation protein, or if the activity of the polypeptide B1391, preferably represented by SEQ ID NO. 131490, or a homolog or fragment thereof, or if the activity of a polypeptide encoded by a nucleic acid molecule comprising the nucleic acid SEQ ID NO. 131489, preferably the coding region thereof, or a homolog or fragment thereof, e.g. derived from Escherichia coli, is increased or generated. For example the activity of a nucleic acid molecule or a polypeptide comprising the nucleic acid, preferably the coding region thereof, or polypeptide or the consensus sequence or the polypeptide motif, as depicted in Table I, II or IV, application No. 14, column 5 or 8 in the respective same line as the nucleic acid molecule SEQ ID NO. 131489 or polypeptide SEQ ID NO. 131490, respectively, or a homolog or a fragment thereof, is increased or generated, or if the activity phenylacetic acid degradation protein is increased or generated in a non-human organism, like a microorganism or a plant cell, plant or part thereof, especially with non-targeted localization, whereby the respective line disclose in column 7 the fine chemical beta-sitosterol. For example, an increase of the beta-sitosterol of at least 1 percent, particularly in a range of 13 to 24-percent is conferred as compared to a corresponding non-transformed wild type non-human organism.

[67740] Accordingly, in one embodiment, an increase of campesterol in a non-human organism, as compared to a corresponding non-transformed wild type non-human organism, is conferred in the process of the invention, if the activity of a polypeptide showing the activity of a phenylacetic acid degradation protein, or if the activity of the polypeptide B1391, preferably represented by SEQ ID NO. 131490, or a homolog or fragment thereof, or if the activity of a polypeptide encoded by a nucleic acid molecule comprising the nucleic acid SEQ ID NO. 131489, preferably the coding region thereof, or a homolog or fragment thereof, e.g. derived from Escherichia coli, is increased or generated. For example the activity of a nucleic acid molecule or a polypeptide comprising the nucleic acid, preferably the coding region thereof, or polypeptide or the consensus sequence or the polypeptide motif, as depicted in Table I, II or IV, application No. 14, column 5 or 8 in the respective same line as the nucleic acid molecule SEQ ID NO. 131489 or polypeptide SEQ ID NO. 131490, respectively, or a homolog or a fragment thereof, is increased or generated, or if the activity phenylacetic acid degradation protein is increased or generated in a non-human organism, like a microorganism or a plant cell, plant or part thereof, especially with non-targeted localization, whereby the respective line disclose in column 7 the fine chemical campesterol. For example, an increase of the campesterol of at least 1 percent, particularly in a range of 15 to 29-percent is conferred as compared to a corresponding non-transformed wild type non-human organism.

[67741] Accordingly, in one embodiment, an increase of campesterol in a non-human organism, as compared to a corresponding non-transformed wild type non-human organism, is conferred in the process of the invention, if the activity of a polypeptide showing the activity of a b1401-protein, or if the activity of the polypeptide B1401, preferably represented by SEQ ID NO. 131532, or a homolog or fragment thereof, or if the activity of a polypeptide encoded by a nucleic acid molecule comprising the nucleic acid SEQ ID NO. 131531, preferably the coding region thereof, or a homolog or fragment thereof, e.g. derived from Escherichia coli, is increased or generated. For example the activity of a nucleic acid molecule or a polypeptide comprising the nucleic acid, preferably the coding region thereof, or polypeptide or the consensus sequence or the polypeptide motif, as depicted in Table I, II or IV, application No. 14, column 5 or 8 in the respective same line as the nucleic acid molecule SEQ ID NO. 131531 or polypeptide SEQ ID NO. 131532, respectively, or a homolog or a fragment thereof, is increased or generated, or if the activity b1401-protein is increased or generated in a non-human organism, like a microorganism or a plant cell, plant or part thereof, especially with non-targeted localization, whereby the respective line disclose in column 7 the fine chemical campesterol. For example, an increase of the campesterol of at least 1 percent, particularly in a range of 19 to 40-percent is conferred as compared to a corresponding non-transformed wild type non-human organism.

[67742] Accordingly, in one embodiment, an increase of campesterol in a non-human organism, as compared to a corresponding non-transformed wild type non-human organism, is conferred in the process of the invention, if the activity of a polypeptide showing the activity of a lipoprotein precursor, or if the activity of the polypeptide B1431, preferably represented by SEQ ID NO. 38267, or a homolog or fragment thereof, or if the activity of a polypeptide encoded by a nucleic acid molecule comprising the nucleic acid SEQ ID NO. 38266, preferably the coding region thereof, or a homolog or fragment thereof, e.g. derived from Escherichia coli, is increased or generated. For example the activity of a nucleic acid molecule or a polypeptide comprising the nucleic acid, preferably the coding region thereof, or polypeptide or the consensus sequence or the polypeptide motif, as depicted in Table I, II or IV, application No. 14, column 5 or 8 in the respective same line as the nucleic acid molecule SEQ ID NO. 38266 or polypeptide SEQ ID NO. 38267, respectively, or a homolog or a fragment thereof, is increased or generated, or if the activity lipoprotein precursor is increased or generated in a non-human organism, like a microorganism organism or a plant cell, plant or part thereof, especially with plastidic localization, whereby the respective line disclose in column 7 the fine chemical campesterol. For example, an increase of the campesterol of at least 1 percent, particularly in a range of 27 to 440-percent is conferred as compared to a corresponding non-transformed wild type non-human organism.

[67743] Accordingly, in one embodiment, an increase of beta-sitosterol in a non-human organism, as compared to a corresponding non-transformed wild type non-human organism, is conferred in the process of the invention, if the activity of a polypeptide showing the activity of a acid shock protein, or if the activity of the polypeptide B1597, preferably represented by SEQ ID NO. 38301, or a homolog or fragment thereof, or if the activity of a polypeptide encoded by a nucleic acid molecule comprising the nucleic acid SEQ ID NO. 38300, preferably the coding region thereof, or a homolog or fragment thereof, e.g. derived from Escherichia coli, is increased or generated. For example the activity of a nucleic acid molecule or a polypeptide comprising the nucleic acid, preferably the coding region thereof, or polypeptide or the consensus sequence or the polypeptide motif, as depicted in Table I, II or IV, application No. 14, column 5 or 8 in the respective same line as the nucleic acid molecule SEQ ID NO. 38300 or polypeptide SEQ ID NO. 38301, respectively, or a homolog or a fragment thereof, is increased or generated, or if the activity acid shock protein is increased or generated in a non-human organism, like a microorganism or a plant cell, plant or part thereof, especially with non-targeted localization, whereby the respective line disclose in column 7 the fine chemical beta-sitosterol. For example, an increase of the beta-sitosterol of at least 1 percent, particularly in a range of 20 to 33-percent is conferred as compared to a corresponding non-transformed wild type non-human organism.

[67744] Accordingly, in one embodiment, an increase of campesterol in a non-human organism, as compared to a corresponding non-transformed wild type non-human organism, is conferred in the process of the invention, if the activity of a polypeptide showing the activity of a acid shock protein, or if the activity of the polypeptide B1597, preferably represented by SEQ ID NO. 38301, or a homolog or fragment thereof, or if the activity of a polypeptide encoded by a nucleic acid molecule comprising the nucleic acid SEQ ID NO. 38300, preferably the coding region thereof, or a homolog or fragment thereof, e.g. derived from Escherichia coli, is increased or generated. For example the activity of a nucleic acid molecule or a polypeptide comprising the nucleic acid, preferably the coding region thereof, or polypeptide or the consensus sequence or the polypeptide motif, as depicted in Table I, II or IV, application No. 14, column 5 or 8 in the respective same line as the nucleic acid molecule SEQ ID NO. 38300 or polypeptide SEQ ID NO. 38301, respectively, or a homolog or a fragment thereof, is increased or generated, or if the activity acid shock protein is increased or generated in a non-human organism, like a microorganism or a plant cell, plant or part thereof, especially with non-targeted localization, whereby the respective line disclose in column 7 the fine chemical campesterol. For example, an increase of the campesterol of at least 1 percent, particularly in a range of 16 to 46-percent is conferred as compared to a corresponding non-transformed wild type non-human organism.

[67745] Accordingly, in one embodiment, an increase of campesterol in a non-human organism, as compared to a corresponding non-transformed wild type non-human organism, is conferred in the process of the invention, if the activity of a polypeptide showing the activity of a B1795-protein, or if the activity of the polypeptide B1795, preferably represented by SEQ ID NO. 131540, or a homolog or fragment thereof, or if the activity of a polypeptide encoded by a nucleic acid molecule comprising the nucleic acid SEQ ID NO. 131539, preferably the coding region thereof, or a homolog or fragment thereof, e.g. derived from Escherichia coli, is increased or generated. For example the activity of a nucleic acid molecule or a polypeptide comprising the nucleic acid, preferably the coding region thereof, or polypeptide or the consensus sequence or the polypeptide motif, as depicted in Table I, II or IV, application No. 14, column 5 or 8 in the respective same line as the nucleic acid molecule SEQ ID NO. 131539 or polypeptide SEQ ID NO. 131540, respectively, or a homolog or a fragment thereof, is increased or generated, or if the activity B1795-protein is increased or generated in a non-human organism, like a microorganism or a plant cell, plant or part thereof, especially with non-targeted localization, whereby the respective line disclose in column 7 the fine chemical campesterol. For example, an increase of the campesterol of at least 1 percent, particularly in a range of 37 to 54-percent is conferred as compared to a corresponding non-transformed wild type non-human organism.

[67746] Accordingly, in one embodiment, an increase of campesterol in a non-human organism, as compared to a corresponding non-transformed wild type non-human organism, is conferred in the process of the invention, if the activity of a polypeptide showing the activity of a acetyltransferase, or if the activity of the polypeptide B1932, preferably represented by SEQ ID NO. 131800, or a homolog or fragment thereof, or if the activity of a polypeptide encoded by a nucleic acid molecule comprising the nucleic acid SEQ ID NO. 131799, preferably the coding region thereof, or a homolog or fragment thereof, e.g. derived from Escherichia coli, is increased or generated. For example the activity of a nucleic acid molecule or a polypeptide comprising the nucleic acid, preferably the coding region thereof, or polypeptide or the consensus sequence or the polypeptide motif, as depicted in Table I, II or IV, application No. 14, column 5 or 8 in the respective same line as the nucleic acid molecule SEQ ID NO. 131799 or polypeptide SEQ ID NO. 131800, respectively, or a homolog or a fragment thereof, is increased or generated, or if the activity acetyltransferase is increased or generated in a non-human organism, like a microorganism or a plant cell, plant or part thereof, especially with non-targeted localization, whereby the respective line disclose in column 7 the fine chemical campesterol. For example, an increase of the campesterol of at least 1 percent, particularly in a range of 17 to 50-percent is conferred as compared to a corresponding non-transformed wild type non-human organism.

[67747] Accordingly, in one embodiment, an increase of campesterol in a non-human organism, as compared to a corresponding non-transformed wild type non-human organism, is conferred in the process of the invention, if the activity of a polypeptide showing the activity of a b2107-protein, or if the activity of the polypeptide B2107, preferably represented by SEQ ID NO. 39003, or a homolog or fragment thereof, or if the activity of a polypeptide encoded by a nucleic acid molecule comprising the nucleic acid SEQ ID NO. 39002, preferably the coding region thereof, or a homolog or fragment thereof, e.g. derived from Escherichia coli, is increased or generated. For example the activity of a nucleic acid molecule or a polypeptide comprising the nucleic acid, preferably the coding region thereof, or polypeptide or the consensus sequence or the polypeptide motif, as depicted in Table I, II or IV, application No. 14, column 5 or 8 in the respective same line as the nucleic acid molecule SEQ ID NO. 39002 or polypeptide SEQ ID NO. 39003, respectively, or a homolog or a fragment thereof, is increased or generated, or if the activity b2107-protein is increased or generated in a non-human organism, like a microorganism or a plant cell, plant or part thereof, especially with non-targeted localization, whereby the respective line disclose in column 7 the fine chemical campesterol. For example, an increase of the campesterol of at least 1 percent, particularly in a range of 16 to 48-percent is conferred as compared to a corresponding non-transformed wild type non-human organism.

[67748] Accordingly, in one embodiment, an increase of campesterol in a non-human organism, as compared to a corresponding non-transformed wild type non-human organism, is conferred in the process of the invention, if the activity of a polypeptide showing the activity of a NADH dehydrogenase I chain N, or if the activity of the polypeptide B2276, preferably represented by SEQ ID NO. 131840, or a homolog or fragment thereof, or if the activity of a polypeptide encoded by a nucleic acid molecule comprising the nucleic acid SEQ ID NO. 131839, preferably the coding region thereof, or a homolog or fragment thereof, e.g. derived from Escherichia coli, is increased or generated. For example the activity of a nucleic acid molecule or a polypeptide comprising the nucleic acid, preferably the coding region thereof, or polypeptide or the consensus sequence or the polypeptide motif, as depicted in Table I, II or IV, application No. 14, column 5 or 8 in the respective same line as the nucleic acid molecule SEQ ID NO. 131839 or polypeptide SEQ ID NO. 131840, respectively, or a homolog or a fragment thereof, is increased or generated, or if the activity NADH dehydrogenase I chain N is increased or generated in a non-human organism, like a microorganism or a plant cell, plant or part thereof, especially with non-targeted localization, whereby the respective line disclose in column 7 the fine chemical campesterol. For example, an increase of the campesterol of at least 1 percent, particularly in a range of 13 to 20-percent is conferred as compared to a corresponding non-transformed wild type non-human organism.

[67749] Accordingly, in one embodiment, an increase of campesterol in a non-human organism, as compared to a corresponding non-transformed wild type non-human organism, is conferred in the process of the invention, if the activity of a polypeptide showing the activity of a amidophosphoribosyltransferase, or if the activity of the polypeptide B2312, preferably represented by SEQ ID NO. 132087, or a homolog or fragment thereof, or if the activity of a polypeptide encoded by a nucleic acid molecule comprising the nucleic acid SEQ ID NO. 132086, preferably the coding region thereof, or a homolog or fragment thereof, e.g. derived from Escherichia coli, is increased or generated. For example the activity of a nucleic acid molecule or a polypeptide comprising the nucleic acid, preferably the coding region thereof, or polypeptide or the consensus sequence or the polypeptide motif, as depicted in Table I, II or IV, application No. 14, column 5 or 8 in the respective same line as the nucleic acid molecule SEQ ID NO. 132086 or polypeptide SEQ ID NO. 132087, respectively, or a homolog or a fragment thereof, is increased or generated, or if the activity amidophosphoribosyltransferase is increased or generated in a non-human organism, like a microorganism or a plant cell, plant or part thereof, especially with non-targeted localization, whereby the respective line disclose in column 7 the fine chemical campesterol. For example, an increase of the campesterol of at least 1 percent, particularly in a range of 16 to 73-percent is conferred as compared to a corresponding non-transformed wild type non-human organism.

[67750] Accordingly, in one embodiment, an increase of campesterol in a non-human organism, as compared to a corresponding non-transformed wild type non-human organism, is conferred in the process of the invention, if the activity of a polypeptide showing the activity of a b2376-protein, or if the activity of the polypeptide B2376, preferably represented by SEQ ID NO. 132696, or a homolog or fragment thereof, or if the activity of a polypeptide encoded by a nucleic acid molecule comprising the nucleic acid SEQ ID NO. 132695, preferably the coding region thereof, or a homolog or fragment thereof, e.g. derived from Escherichia coli, is increased or generated. For example the activity of a nucleic acid molecule or a polypeptide comprising the nucleic acid, preferably the coding region thereof, or polypeptide or the consensus sequence or the polypeptide motif, as depicted in Table I, II or IV, application No. 14, column 5 or 8 in the respective same line as the nucleic acid molecule SEQ ID NO. 132695 or polypeptide SEQ ID NO. 132696, respectively, or a homolog or a fragment thereof, is increased or generated, or if the activity b2376-protein is increased or generated in a non-human organism, like a microorganism or a plant cell, plant or part thereof, especially with plastidic localization, whereby the respective line disclose in column 7 the fine chemical campesterol. For example, an increase of the campesterol of at least 1 percent, particularly in a range of 26 to 193-percent is conferred as compared to a corresponding non-transformed wild type non-human organism.

[67751] Accordingly, in one embodiment, an increase of campesterol in a non-human organism, as compared to a corresponding non-transformed wild type non-human organism, is conferred in the process of the invention, if the activity of a polypeptide showing the activity of a b2399-protein, or if the activity of the polypeptide B2399, preferably represented by SEQ ID NO. 39238, or a homolog or fragment thereof, or if the activity of a polypeptide encoded by a nucleic acid molecule comprising the nucleic acid SEQ ID NO. 39237, preferably the coding region thereof, or a homolog or fragment thereof, e.g. derived from Escherichia coli, is increased or generated. For example the activity of a nucleic acid molecule or a polypeptide comprising the nucleic acid, preferably the coding region thereof, or polypeptide or the consensus sequence or the polypeptide motif, as depicted in Table I, II or IV, application No. 14, column 5 or 8 in the respective same line as the nucleic acid molecule SEQ ID NO. 39237 or polypeptide SEQ ID NO. 39238, respectively, or a homolog or a fragment thereof, is increased or generated, or if the activity b2399-protein is increased or generated in a non-human organism, like a microorganism or a plant cell, plant or part thereof, especially with non-targeted localization, whereby the respective line disclose in column 7 the fine chemical campesterol. For example, an increase of the campesterol of at least 1 percent, particularly in a range of 45 to 79-percent is conferred as compared to a corresponding non-transformed wild type non-human organism.

[67752] Accordingly, in one embodiment, an increase of campesterol in a non-human organism, as compared to a corresponding non-transformed wild type non-human organism, is conferred in the process of the invention, if the activity of a polypeptide showing the activity of a b2474-protein, or if the activity of the polypeptide B2474, preferably represented by SEQ ID NO. 40330, or a homolog or fragment thereof, or if the activity of a polypeptide encoded by a nucleic acid molecule comprising the nucleic acid SEQ ID NO. 40329, preferably the coding region thereof, or a homolog or fragment thereof, e.g. derived from Escherichia coli, is increased or generated. For example the activity of a nucleic acid molecule or a polypeptide comprising the nucleic acid, preferably the coding region thereof, or polypeptide or the consensus sequence or the polypeptide motif, as depicted in Table I, II or IV, application No. 14, column 5 or 8 in the respective same line as the nucleic acid molecule SEQ ID NO. 40329 or polypeptide SEQ ID NO. 40330, respectively, or a homolog or a fragment thereof, is increased or generated, or if the activity b2474-protein is increased or generated in a non-human organism, like a microorganism or a plant cell, plant or part thereof, especially with non-targeted localization, whereby the respective line disclose in column 7 the fine chemical campesterol. For example, an increase of the campesterol of at least 1 percent, particularly in a range of 17 to 48-percent is conferred as compared to a corresponding non-transformed wild type non-human organism.

[67753] Accordingly, in one embodiment, an increase of campesterol in a non-human organism, as compared to a corresponding non-transformed wild type non-human organism, is conferred in the process of the invention, if the activity of a polypeptide showing the activity of a permease protein, or if the activity of the polypeptide B2493, preferably represented by SEQ ID NO. 132707, or a homolog or fragment thereof, or if the activity of a polypeptide encoded by a nucleic acid molecule comprising the nucleic acid SEQ ID NO. 132706, preferably the coding region thereof, or a homolog or fragment thereof, e.g. derived from Escherichia coli, is increased or generated. For example the activity of a nucleic acid molecule or a polypeptide comprising the nucleic acid, preferably the coding region thereof, or polypeptide or the consensus sequence or the polypeptide motif, as depicted in Table I, II or IV, application No. 14, column 5 or 8 in the respective same line as the nucleic acid molecule SEQ ID NO. 132706 or polypeptide SEQ ID NO. 132707, respectively, or a homolog or a fragment thereof, is increased or generated, or if the activity permease protein is increased or generated in a non-human organism, like a microorganism or a plant cell, plant or part thereof, especially with non-targeted localization, whereby the respective line disclose in column 7 the fine chemical campesterol. For example, an increase of the campesterol of at least 1 percent, particularly in a range of 16 to 29-percent is conferred as compared to a corresponding non-transformed wild type non-human organism.

[67754] Accordingly, in one embodiment, an increase of campesterol in a non-human organism, as compared to a corresponding non-transformed wild type non-human organism, is conferred in the process of the invention, if the activity of a polypeptide showing the activity of a b2513-protein, or if the activity of the polypeptide B2513, preferably represented by SEQ ID NO. 9168, or a homolog or fragment thereof, or if the activity of a polypeptide encoded by a nucleic acid molecule comprising the nucleic acid SEQ ID NO. 9167, preferably the coding region thereof, or a homolog or fragment thereof, e.g. derived from Escherichia coli, is increased or generated. For example the activity of a nucleic acid molecule or a polypeptide comprising the nucleic acid, preferably the coding region thereof, or polypeptide or the consensus sequence or the polypeptide motif, as depicted in Table I, II or IV, application No. 14, column 5 or 8 in the respective same line as the nucleic acid molecule SEQ ID NO. 9167 or polypeptide SEQ ID NO. 9168, respectively, or a homolog or a fragment thereof, is increased or generated, or if the activity b2513-protein is increased or generated in a non-human organism, like a microorganism or a plant cell, plant or part thereof, especially with non-targeted localization, whereby the respective line disclose in column 7 the fine chemical campesterol. For example, an increase of the campesterol of at least 1 percent, particularly in a range of 37 to 72-percent is conferred as compared to a corresponding non-transformed wild type non-human organism.

[67755] Accordingly, in one embodiment, an increase of beta-sitosterol in a non-human organism, as compared to a corresponding non-transformed wild type non-human organism, is conferred in the process of the invention, if the activity of a polypeptide showing the activity of a putative transport system permease protein, or if the activity of the polypeptide B2546, preferably represented by SEQ ID NO. 99899, or a homolog or fragment thereof, or if the activity of a polypeptide encoded by a nucleic acid molecule comprising the nucleic acid SEQ ID NO. 99898, preferably the coding region thereof, or a homolog or fragment thereof, e.g. derived from Escherichia coli, is increased or generated. For example the activity of a nucleic acid molecule or a polypeptide comprising the nucleic acid, preferably the coding region thereof, or polypeptide or the consensus sequence or the polypeptide motif, as depicted in Table I, II or IV, application No.

[67756] 14, column 5 or 8 in the respective same line as the nucleic acid molecule SEQ ID NO. 99898 or polypeptide SEQ ID NO. 99899, respectively, or a homolog or a fragment thereof, is increased or generated, or if the activity putative transport system permease protein is increased or generated in a non-human organism, like a microorganism or a plant cell, plant or part thereof, especially with non-targeted localization, whereby the respective line disclose in column 7 the fine chemical beta-sitosterol. For example, an increase of the beta-sitosterol of at least 1 percent, particularly in a range of 13 to 21-percent is conferred as compared to a corresponding non-transformed wild type non-human organism.

[67757] Accordingly, in one embodiment, an increase of campesterol in a non-human organism, as compared to a corresponding non-transformed wild type non-human organism, is conferred in the process of the invention, if the activity of a polypeptide showing the activity of a putative transport system permease protein, or if the activity of the polypeptide B2546, preferably represented by SEQ ID NO. 99899, or a homolog or fragment thereof, or if the activity of a polypeptide encoded by a nucleic acid molecule comprising the nucleic acid SEQ ID NO. 99898, preferably the coding region thereof, or a homolog or fragment thereof, e.g. derived from Escherichia coli, is increased or generated. For example the activity of a nucleic acid molecule or a polypeptide comprising the nucleic acid, preferably the coding region thereof, or polypeptide or the consensus sequence or the polypeptide motif, as depicted in Table I, II or IV, application No. 14, column 5 or 8 in the respective same line as the nucleic acid molecule SEQ ID NO. 99898 or polypeptide SEQ ID NO. 99899, respectively, or a homolog or a fragment thereof, is increased or generated, or if the activity putative transport system permease protein is increased or generated in a non-human organism, like a microorganism or a plant cell, plant or part thereof, especially with non-targeted localization, whereby the respective line disclose in column 7 the fine chemical campesterol. For example, an increase of the campesterol of at least 1 percent, particularly in a range of 16 to 30-percent is conferred as compared to a corresponding non-transformed wild type non-human organism.

[67758] Accordingly, in one embodiment, an increase of campesterol in a non-human organism, as compared to a corresponding non-transformed wild type non-human organism, is conferred in the process of the invention, if the activity of a polypeptide showing the activity of a b2654-protein, or if the activity of the polypeptide B2654, preferably represented by SEQ ID NO.

[67759] 125227, or a homolog or fragment thereof, or if the activity of a polypeptide encoded by a nucleic acid molecule comprising the nucleic acid SEQ ID NO. 125226, preferably the coding region thereof, or a homolog or fragment thereof, e.g. derived from Escherichia coli, is increased or generated. For example the activity of a nucleic acid molecule or a polypeptide comprising the nucleic acid, preferably the coding region thereof, or polypeptide or the consensus sequence or the polypeptide motif, as depicted in Table I, II or IV, application No. 14, column 5 or 8 in the respective same line as the nucleic acid molecule SEQ ID NO. 125226 or polypeptide SEQ ID NO. 125227, respectively, or a homolog or a fragment thereof, is increased or generated, or if the activity b2654-protein is increased or generated in a non-human organism, like a microorganism or a plant cell, plant or part thereof, especially with non-targeted localization, whereby the respective line disclose in column 7 the fine chemical campesterol. For example, an increase of the campesterol of at least 1 percent, particularly in a range of 14 to 21-percent is conferred as compared to a corresponding non-transformed wild type non-human organism.

[67760] Accordingly, in one embodiment, an increase of campesterol in a non-human organism, as compared to a corresponding non-transformed wild type non-human organism, is conferred in the process of the invention, if the activity of a polypeptide showing the activity of a murein transglycosylase, or if the activity of the polypeptide B2701, preferably represented by SEQ ID NO. 80757, or a homolog or fragment thereof, or if the activity of a polypeptide encoded by a nucleic acid molecule comprising the nucleic acid SEQ ID NO. 80756, preferably the coding region thereof, or a homolog or fragment thereof, e.g. derived from Escherichia coli, is increased or generated. For example the activity of a nucleic acid molecule or a polypeptide comprising the nucleic acid, preferably the coding region thereof, or polypeptide or the consensus sequence or the polypeptide motif, as depicted in Table I, II or IV, application No. 14, column 5 or 8 in the respective same line as the nucleic acid molecule SEQ ID NO. 80756 or polypeptide SEQ ID NO. 80757, respectively, or a homolog or a fragment thereof, is increased or generated, or if the activity murein transglycosylase is increased or generated in a non-human organism, like a microorganism or a plant cell, plant or part thereof, especially with non-targeted localization, whereby the respective line disclose in column 7 the fine chemical campesterol. For example, an increase of the campesterol of at least 1 percent, particularly in a range of 16 to 37-percent is conferred as compared to a corresponding non-transformed wild type non-human organism.

[67761] Accordingly, in one embodiment, an increase of campesterol in a non-human organism, as compared to a corresponding non-transformed wild type non-human organism, is conferred in the process of the invention, if the activity of a polypeptide showing the activity of a oxidoreductase, or if the activity of the polypeptide B2766, preferably represented by SEQ ID NO. 132822, or a homolog or fragment thereof, or if the activity of a polypeptide encoded by a nucleic acid molecule comprising the nucleic acid SEQ ID NO. 132821, preferably the coding region thereof, or a homolog or fragment thereof, e.g. derived from Escherichia coli, is increased or generated.

[67762] For example the activity of a nucleic acid molecule or a polypeptide comprising the nucleic acid, preferably the coding region thereof, or polypeptide or the consensus sequence or the polypeptide motif, as depicted in Table I, II or IV, application No. 14, column 5 or 8 in the respective same line as the nucleic acid molecule SEQ ID NO. 132821 or polypeptide SEQ ID NO. 132822, respectively, or a homolog or a fragment thereof, is increased or generated, or if the activity oxidoreductase is increased or generated in a non-human organism, like a microorganism or a plant cell, plant or part thereof, especially with plastidic localization, whereby the respective line disclose in column 7 the fine chemical campesterol. For example, an increase of the campesterol of at least 1 percent, particularly in a range of 20 to 39-percent is conferred as compared to a corresponding non-transformed wild type non-human organism.

[67763] Accordingly, in one embodiment, an increase of campesterol in a non-human organism, as compared to a corresponding non-transformed wild type non-human organism, is conferred in the process of the invention, if the activity of a polypeptide showing the activity of a xanthine dehydrogenase, or if the activity of the polypeptide B2866, preferably represented by SEQ ID NO. 115865, or a homolog or fragment thereof, or if the activity of a polypeptide encoded by a nucleic acid molecule comprising the nucleic acid SEQ ID NO. 115864, preferably the coding region thereof, or a homolog or fragment thereof, e.g. derived from Escherichia coli, is increased or generated. For example the activity of a nucleic acid molecule or a polypeptide comprising the nucleic acid, preferably the coding region thereof, or polypeptide or the consensus sequence or the polypeptide motif, as depicted in Table I, II or IV, application No. 14, column 5 or 8 in the respective same line as the nucleic acid molecule SEQ ID NO. 115864 or polypeptide SEQ ID NO. 115865, respectively, or a homolog or a fragment thereof, is increased or generated, or if the activity xanthine dehydrogenase is increased or generated in a non-human organism, like a microorganism or a plant cell, plant or part thereof, especially with non-targeted localization, whereby the respective line disclose in column 7 the fine chemical campesterol. For example, an increase of the campesterol of at least 1 percent, particularly in a range of 30 to 32-percent is conferred as compared to a corresponding non-transformed wild type non-human organism.

[67764] Accordingly, in one embodiment, an increase of campesterol in a non-human organism, as compared to a corresponding non-transformed wild type non-human organism, is conferred in the process of the invention, if the activity of a polypeptide showing the activity of a b3151-protein, or if the activity of the polypeptide B3151, preferably represented by SEQ ID NO. 42478, or a homolog or fragment thereof, or if the activity of a polypeptide encoded by a nucleic acid molecule comprising the nucleic acid SEQ ID NO. 42477, preferably the coding region thereof, or a homolog or fragment thereof, e.g. derived from Escherichia coli, is increased or generated. For example the activity of a nucleic acid molecule or a polypeptide comprising the nucleic acid, preferably the coding region thereof, or polypeptide or the consensus sequence or the polypeptide motif, as depicted in Table I, II or IV, application No. 14, column 5 or 8 in the respective same line as the nucleic acid molecule SEQ ID NO. 42477 or polypeptide SEQ ID NO. 42478, respectively, or a homolog or a fragment thereof, is increased or generated, or if the activity b3151-protein is increased or generated in a non-human organism, like a microorganism or a plant cell, plant or part thereof, especially with non-targeted localization, whereby the respective line disclose in column 7 the fine chemical campesterol. For example, an increase of the campesterol of at least 1 percent, particularly in a range of 19 to 46-percent is conferred as compared to a corresponding non-transformed wild type non-human organism.

[67765] Accordingly, in one embodiment, an increase of beta-sitosterol in a non-human organism, as compared to a corresponding non-transformed wild type non-human organism, is conferred in the process of the invention, if the activity of a polypeptide showing the activity of a methyltransferase, or if the activity of the polypeptide B3262, preferably represented by SEQ ID NO. 42503, or a homolog or fragment thereof, or if the activity of a polypeptide encoded by a nucleic acid molecule comprising the nucleic acid SEQ ID NO. 42502, preferably the coding region thereof, or a homolog or fragment thereof, e.g. derived from Escherichia coli, is increased or generated. For example the activity of a nucleic acid molecule or a polypeptide comprising the nucleic acid, preferably the coding region thereof, or polypeptide or the consensus sequence or the polypeptide motif, as depicted in Table I, II or IV, application No. 14, column 5 or 8 in the respective same line as the nucleic acid molecule SEQ ID NO. 42502 or polypeptide SEQ ID NO. 42503, respectively, or a homolog or a fragment thereof, is increased or generated, or if the activity methyltransferase is increased or generated in a non-human organism, like a microorganism or a plant cell, plant or part thereof, especially with non-targeted localization, whereby the respective line disclose in column 7 the fine chemical beta-sitosterol. For example, an increase of the beta-sitosterol of at least 1 percent, particularly in a range of 12 to 26-percent is conferred as compared to a corresponding non-transformed wild type non-human organism.

[67766] Accordingly, in one embodiment, an increase of campesterol in a non-human organism, as compared to a corresponding non-transformed wild type non-human organism, is conferred in the process of the invention, if the activity of a polypeptide showing the activity of a threonine dehydrogenase, or if the activity of the polypeptide B3616, preferably represented by SEQ ID NO. 42601, or a homolog or fragment thereof, or if the activity of a polypeptide encoded by a nucleic acid molecule comprising the nucleic acid SEQ ID NO. 42600, preferably the coding region thereof, or a homolog or fragment thereof, e.g. derived from Escherichia coli, is increased or generated. For example the activity of a nucleic acid molecule or a polypeptide comprising the nucleic acid, preferably the coding region thereof, or polypeptide or the consensus sequence or the polypeptide motif, as depicted in Table I, II or IV, application No. 14, column 5 or 8 in the respective same line as the nucleic acid molecule SEQ ID NO. 42600 or polypeptide SEQ ID NO. 42601, respectively, or a homolog or a fragment thereof, is increased or generated, or if the activity threonine dehydrogenase is increased or generated in a non-human organism, like a microorganism or a plant cell, plant or part thereof, especially with non-targeted localization, whereby the respective line disclose in column 7 the fine chemical campesterol. For example, an increase of the campesterol of at least 1 percent, particularly in a range of 19 to 24-percent is conferred as compared to a corresponding non-transformed wild type non-human organism.

[67767] Accordingly, in one embodiment, an increase of beta-sitosterol in a non-human organism, as compared to a corresponding non-transformed wild type non-human organism, is conferred in the process of the invention, if the activity of a polypeptide showing the activity of a b3989-protein, or if the activity of the polypeptide B3989, preferably represented by SEQ ID NO. 44373, or a homolog or fragment thereof, or if the activity of a polypeptide encoded by a nucleic acid molecule comprising the nucleic acid SEQ ID NO. 44372, preferably the coding region thereof, or a homolog or fragment thereof, e.g. derived from Escherichia coli, is increased or generated. For example the activity of a nucleic acid molecule or a polypeptide comprising the nucleic acid, preferably the coding region thereof, or polypeptide or the consensus sequence or the polypeptide motif, as depicted in Table I, II or IV, application No. 14, column 5 or 8 in the respective same line as the nucleic acid molecule SEQ ID NO. 44372 or polypeptide SEQ ID NO. 44373, respectively, or a homolog or a fragment thereof, is increased or generated, or if the activity b3989-protein is increased or generated in a non-human organism, like a microorganism or a plant cell, plant or part thereof, especially with non-targeted localization, whereby the respective line disclose in column 7 the fine chemical beta-sitosterol. For example, an increase of the beta-sitosterol of at least 1 percent, particularly in a range of 12 to 27-percent is conferred as compared to a corresponding non-transformed wild type non-human organism.

[67768] Accordingly, in one embodiment, an increase of campesterol in a non-human organism, as compared to a corresponding non-transformed wild type non-human organism, is conferred in the process of the invention, if the activity of a polypeptide showing the activity of a b3989-protein, or if the activity of the polypeptide B3989, preferably represented by SEQ ID NO. 44373, or a homolog or fragment thereof, or if the activity of a polypeptide encoded by a nucleic acid molecule comprising the nucleic acid SEQ ID NO. 44372, preferably the coding region thereof, or a homolog or fragment thereof, e.g. derived from Escherichia coli, is increased or generated. For example the activity of a nucleic acid molecule or a polypeptide comprising the nucleic acid, preferably the coding region thereof, or polypeptide or the consensus sequence or the polypeptide motif, as depicted in Table I, II or IV, application No. 14, column 5 or 8 in the respective same line as the nucleic acid molecule SEQ ID NO. 44372 or polypeptide SEQ ID NO. 44373, respectively, or a homolog or a fragment thereof, is increased or generated, or if the activity b3989-protein is increased or generated in a non-human organism, like a microorganism or a plant cell, plant or part thereof, especially with non-targeted localization, whereby the respective line disclose in column 7 the fine chemical campesterol. For example, an increase of the campesterol of at least 1 percent, particularly in a range of 37 to 49-percent is conferred as compared to a corresponding non-transformed wild type non-human organism.

[67769] Accordingly, in one embodiment, an increase of beta-sitosterol in a non-human organism, as compared to a corresponding non-transformed wild type non-human organism, is conferred in the process of the invention, if the activity of a polypeptide showing the activity of a b4029-protein, or if the activity of the polypeptide B4029, preferably represented by SEQ ID NO. 10741, or a homolog or fragment thereof, or if the activity of a polypeptide encoded by a nucleic acid molecule comprising the nucleic acid SEQ ID NO. 10740, preferably the coding region thereof, or a homolog or fragment thereof, e.g. derived from Escherichia coli, is increased or generated. For example the activity of a nucleic acid molecule or a polypeptide comprising the nucleic acid, preferably the coding region thereof, or polypeptide or the consensus sequence or the polypeptide motif, as depicted in Table I, II or IV, application No. 14, column 5 or 8 in the respective same line as the nucleic acid molecule SEQ ID NO. 10740 or polypeptide SEQ ID NO. 10741, respectively, or a homolog or a fragment thereof, is increased or generated, or if the activity b4029-protein is increased or generated in a non-human organism, like a microorganism or a plant cell, plant or part thereof, especially with non-targeted localization, whereby the respective line disclose in column 7 the fine chemical beta-sitosterol. For example, an increase of the beta-sitosterol of at least 1 percent, particularly in a range of 19 to 78-percent is conferred as compared to a corresponding non-transformed wild type non-human organism.

[67770] Accordingly, in one embodiment, an increase of stigmasterol in a non-human organism, as compared to a corresponding non-transformed wild type non-human organism, is conferred in the process of the invention, if the activity of a polypeptide showing the activity of a b4029-protein, or if the activity of the polypeptide B4029, preferably represented by SEQ ID NO. 10741, or a homolog or fragment thereof, or if the activity of a polypeptide encoded by a nucleic acid molecule comprising the nucleic acid SEQ ID NO. 10740, preferably the coding region thereof, or a homolog or fragment thereof, e.g. derived from Escherichia coli, is increased or generated. For example the activity of a nucleic acid molecule or a polypeptide comprising the nucleic acid, preferably the coding region thereof, or polypeptide or the consensus sequence or the polypeptide motif, as depicted in Table I, II or IV, application No. 14, column 5 or 8 in the respective same line as the nucleic acid molecule SEQ ID NO. 10740 or polypeptide SEQ ID NO. 10741, respectively, or a homolog or a fragment thereof, is increased or generated, or if the activity b4029-protein is increased or generated in a non-human organism, like a microorganism or a plant cell, plant or part thereof, especially with non-targeted localization, whereby the respective line disclose in column 7 the fine chemical stigmasterol. For example, an increase of the stigmasterol of at least 1 percent, particularly in a range of 80 to 3076-percent is conferred as compared to a corresponding non-transformed wild type non-human organism.

[67771] Accordingly, in one embodiment, an increase of beta-sitosterol in a non-human organism, as compared to a corresponding non-transformed wild type non-human organism, is conferred in the process of the invention, if the activity of a polypeptide showing the activity of a b4205-protein, or if the activity of the polypeptide B4205, preferably represented by SEQ ID NO. 126976, or a homolog or fragment thereof, or if the activity of a polypeptide encoded by a nucleic acid molecule comprising the nucleic acid SEQ ID NO. 126975, preferably the coding region thereof, or a homolog or fragment thereof, e.g. derived from Escherichia coli, is increased or generated. For example the activity of a nucleic acid molecule or a polypeptide comprising the nucleic acid, preferably the coding region thereof, or polypeptide or the consensus sequence or the polypeptide motif, as depicted in Table I, II or IV, application No. 14, column 5 or 8 in the respective same line as the nucleic acid molecule SEQ ID NO. 126975 or polypeptide SEQ ID NO. 126976, respectively, or a homolog or a fragment thereof, is increased or generated, or if the activity b4205-protein is increased or generated in a non-human organism, like a microorganism or a plant cell, plant or part thereof, especially with plastidic localization, whereby the respective line disclose in column 7 the fine chemical beta-sitosterol. For example, an increase of the beta-sitosterol of at least 1 percent, particularly in a range of 13 to 16-percent is conferred as compared to a corresponding non-transformed wild type non-human organism.

[67772] Accordingly, in one embodiment, an increase of beta-sitosterol in a non-human organism, as compared to a corresponding non-transformed wild type non-human organism, is conferred in the process of the invention, if the activity of a polypeptide showing the activity of a glutaredoxin, or if the activity of the polypeptide GM02LC12622, preferably represented by SEQ ID NO. 10812, or a homolog or fragment thereof, or if the activity of a polypeptide encoded by a nucleic acid molecule comprising the nucleic acid SEQ ID NO. 10811, preferably the coding region thereof, or a homolog or fragment thereof, e.g. derived from Glycine max, is increased or generated. For example the activity of a nucleic acid molecule or a polypeptide comprising the nucleic acid, preferably the coding region thereof, or polypeptide or the consensus sequence or the polypeptide motif, as depicted in Table I, II or IV, application No. 14, column 5 or 8 in the respective same line as the nucleic acid molecule SEQ ID NO. 10811 or polypeptide SEQ ID NO. 10812, respectively, or a homolog or a fragment thereof, is increased or generated, or if the activity glutaredoxin is increased or generated in a non-human organism, like a microorganism or a plant cell, plant or part thereof, especially with non-targeted localization, whereby the respective line disclose in column 7 the fine chemical beta-sitosterol. For example, an increase of the beta-sitosterol of at least 1 percent, particularly in a range of 12 to 37-percent is conferred as compared to a corresponding non-transformed wild type non-human organism.

[67773] Accordingly, in one embodiment, an increase of campesterol in a non-human organism, as compared to a corresponding non-transformed wild type non-human organism, is conferred in the process of the invention, if the activity of a polypeptide showing the activity of a glutaredoxin, or if the activity of the polypeptide GM02LC12622, preferably represented by SEQ ID NO. 10812, or a homolog or fragment thereof, or if the activity of a polypeptide encoded by a nucleic acid molecule comprising the nucleic acid SEQ ID NO. 10811, preferably the coding region thereof, or a homolog or fragment thereof, e.g. derived from Glycine max, is increased or generated. For example the activity of a nucleic acid molecule or a polypeptide comprising the nucleic acid, preferably the coding region thereof, or polypeptide or the consensus sequence or the polypeptide motif, as depicted in Table I, II or IV, application No. 14, column 5 or 8 in the respective same line as the nucleic acid molecule SEQ ID NO. 10811 or polypeptide SEQ ID NO. 10812, respectively, or a homolog or a fragment thereof, is increased or generated, or if the activity glutaredoxin is increased or generated in a non-human organism, like a microorganism or a plant cell, plant or part thereof, especially with non-targeted localization, whereby the respective line disclose in column 7 the fine chemical campesterol. For example, an increase of the campesterol of at least 1 percent, particularly in a range of 16 to 36-percent is conferred as compared to a corresponding non-transformed wild type non-human organism.

[67774] Accordingly, in one embodiment, an increase of beta-sitosterol in a non-human organism, as compared to a corresponding non-transformed wild type non-human organism, is conferred in the process of the invention, if the activity of a polypeptide showing the activity of a transcription factor, or if the activity of the polypeptide GM02LC19289, preferably represented by SEQ ID NO. 46752, or a homolog or fragment thereof, or if the activity of a polypeptide encoded by a nucleic acid molecule comprising the nucleic acid SEQ ID NO. 46751, preferably the coding region thereof, or a homolog or fragment thereof, e.g. derived from Glycine max, is increased or generated. For example the activity of a nucleic acid molecule or a polypeptide comprising the nucleic acid, preferably the coding region thereof, or polypeptide or the consensus sequence or the polypeptide motif, as depicted in Table I, II or IV, application No. 14, column 5 or 8 in the respective same line as the nucleic acid molecule SEQ ID NO. 46751 or polypeptide SEQ ID NO. 46752, respectively, or a homolog or a fragment thereof, is increased or generated, or if the activity transcription factor is increased or generated in a non-human organism, like a microorganism or a plant cell, plant or part thereof, especially with non-targeted localization, whereby the respective line disclose in column 7 the fine chemical beta-sitosterol. For example, an increase of the beta-sitosterol of at least 1 percent, particularly in a range of 14 to 40-percent is conferred as compared to a corresponding non-transformed wild type non-human organism.

[67775] Accordingly, in one embodiment, an increase of campesterol in a non-human organism, as compared to a corresponding non-transformed wild type non-human organism, is conferred in the process of the invention, if the activity of a polypeptide showing the activity of a transcription factor, or if the activity of the polypeptide GM02LC19289, preferably represented by SEQ ID NO. 46752, or a homolog or fragment thereof, or if the activity of a polypeptide encoded by a nucleic acid molecule comprising the nucleic acid SEQ ID NO. 46751, preferably the coding region thereof, or a homolog or fragment thereof, e.g. derived from Glycine max, is increased or generated. For example the activity of a nucleic acid molecule or a polypeptide comprising the nucleic acid, preferably the coding region thereof, or polypeptide or the consensus sequence or the polypeptide motif, as depicted in Table I, II or IV, application No. 14, column 5 or 8 in the respective same line as the nucleic acid molecule SEQ ID NO. 46751 or polypeptide SEQ ID NO. 46752, respectively, or a homolog or a fragment thereof, is increased or generated, or if the activity transcription factor is increased or generated in a non-human organism, like a microorganism or a plant cell, plant or part thereof, especially with non-targeted localization, whereby the respective line disclose in column 7 the fine chemical campesterol. For example, an increase of the campesterol of at least 1 percent, particularly in a range of 17 to 52-percent is conferred as compared to a corresponding non-transformed wild type non-human organism.

[67776] Accordingly, in one embodiment, an increase of beta-sitosterol in a non-human organism, as compared to a corresponding non-transformed wild type non-human organism, is conferred in the process of the invention, if the activity of a polypeptide showing the activity of a cyclin D, or if the activity of the polypeptide GM02LC44512, preferably represented by SEQ ID NO. 46851, or a homolog or fragment thereof, or if the activity of a polypeptide encoded by a nucleic acid molecule comprising the nucleic acid SEQ ID NO. 46850, preferably the coding region thereof, or a homolog or fragment thereof, e.g. derived from Glycine max, is increased or generated. For example the activity of a nucleic acid molecule or a polypeptide comprising the nucleic acid, preferably the coding region thereof, or polypeptide or the consensus sequence or the polypeptide motif, as depicted in Table I, II or IV, application No. 14, column 5 or 8 in the respective same line as the nucleic acid molecule SEQ ID NO. 46850 or polypeptide SEQ ID NO. 46851, respectively, or a homolog or a fragment thereof, is increased or generated, or if the activity cyclin D is increased or generated in a non-human organism, like a microorganism or a plant cell, plant or part thereof, especially with non-targeted localization, whereby the respective line disclose in column 7 the fine chemical beta-sitosterol. For example, an increase of the beta-sitosterol of at least 1 percent, particularly in a range of 13 to 30-percent is conferred as compared to a corresponding non-transformed wild type non-human organism.

[67777] Accordingly, in one embodiment, an increase of campesterol in a non-human organism, as compared to a corresponding non-transformed wild type non-human organism, is conferred in the process of the invention, if the activity of a polypeptide showing the activity of a cyclin D, or if the activity of the polypeptide GM02LC44512, preferably represented by SEQ ID NO. 46851, or a homolog or fragment thereof, or if the activity of a polypeptide encoded by a nucleic acid molecule comprising the nucleic acid SEQ ID NO. 46850, preferably the coding region thereof, or a homolog or fragment thereof, e.g. derived from Glycine max, is increased or generated. For example the activity of a nucleic acid molecule or a polypeptide comprising the nucleic acid, preferably the coding region thereof, or polypeptide or the consensus sequence or the polypeptide motif, as depicted in Table I, II or IV, application No. 14, column 5 or 8 in the respective same line as the nucleic acid molecule SEQ ID NO. 46850 or polypeptide SEQ ID NO. 46851, respectively, or a homolog or a fragment thereof, is increased or generated, or if the activity cyclin D is increased or generated in a non-human organism, like a microorganism or a plant cell, plant or part thereof, especially with non-targeted localization, whereby the respective line disclose in column 7 the fine chemical campesterol. For example, an increase of the campesterol of at least 1 percent, particularly in a range of 20 to 56-percent is conferred as compared to a corresponding non-transformed wild type non-human organism.

[67778] Accordingly, in one embodiment, an increase of campesterol in a non-human organism, as compared to a corresponding non-transformed wild type non-human organism, is conferred in the process of the invention, if the activity of a polypeptide showing the activity of a sll0406-protein, or if the activity of the polypeptide Sll0406, preferably represented by SEQ ID NO. 127104, or a homolog or fragment thereof, or if the activity of a polypeptide encoded by a nucleic acid molecule comprising the nucleic acid SEQ ID NO. 127103, preferably the coding region thereof, or a homolog or fragment thereof, e.g. derived from Synechocystis sp., is increased or generated. For example the activity of a nucleic acid molecule or a polypeptide comprising the nucleic acid, preferably the coding region thereof, or polypeptide or the consensus sequence or the polypeptide motif, as depicted in Table I, II or IV, application No. 14, column 5 or 8 in the respective same line as the nucleic acid molecule SEQ ID NO. 127103 or polypeptide SEQ ID NO. 127104, respectively, or a homolog or a fragment thereof, is increased or generated, or if the activity sll0406-protein is increased or generated in a non-human organism, like a microorganism or a plant cell, plant or part thereof, especially with non-targeted localization, whereby the respective line disclose in column 7 the fine chemical campesterol. For example, an increase of the campesterol of at least 1 percent, particularly in a range of 16 to 32-percent is conferred as compared to a corresponding non-transformed wild type non-human organism.

[67779] Accordingly, in one embodiment, an increase of campesterol in a non-human organism, as compared to a corresponding non-transformed wild type non-human organism, is conferred in the process of the invention, if the activity of a polypeptide showing the activity of a cation transport protein, or if the activity of the polypeptide Sll0671, preferably represented by SEQ ID NO. 132875, or a homolog or fragment thereof, or if the activity of a polypeptide encoded by a nucleic acid molecule comprising the nucleic acid SEQ ID NO. 132874, preferably the coding region thereof, or a homolog or fragment thereof, e.g. derived from Synechocystis sp., is increased or generated. For example the activity of a nucleic acid molecule or a polypeptide comprising the nucleic acid, preferably the coding region thereof, or polypeptide or the consensus sequence or the polypeptide motif, as depicted in Table I, II or IV, application No. 14, column 5 or 8 in the respective same line as the nucleic acid molecule SEQ ID NO. 132874 or polypeptide SEQ ID NO. 132875, respectively, or a homolog or a fragment thereof, is increased or generated, or if the activity cation transport protein is increased or generated in a non-human organism, like a microorganism or a plant cell, plant or part thereof, especially with non-targeted localization, whereby the respective line disclose in column 7 the fine chemical campesterol. For example, an increase of the campesterol of at least 1 percent, particularly in a range of 16 to 43-percent is conferred as compared to a corresponding non-transformed wild type non-human organism.

[67780] Accordingly, in one embodiment, an increase of beta-sitosterol in a non-human organism, as compared to a corresponding non-transformed wild type non-human organism, is conferred in the process of the invention, if the activity of a polypeptide showing the activity of a CTP synthetase, or if the activity of the polypeptide Sll1443, preferably represented by SEQ ID NO. 53879, or a homolog or fragment thereof, or if the activity of a polypeptide encoded by a nucleic acid molecule comprising the nucleic acid SEQ ID NO. 53878, preferably the coding region thereof, or a homolog or fragment thereof, e.g. derived from Synechocystis sp., is increased or generated. For example the activity of a nucleic acid molecule or a polypeptide comprising the nucleic acid, preferably the coding region thereof, or polypeptide or the consensus sequence or the polypeptide motif, as depicted in Table I, II or IV, application No. 14, column 5 or 8 in the respective same line as the nucleic acid molecule SEQ ID NO. 53878 or polypeptide SEQ ID NO. 53879, respectively, or a homolog or a fragment thereof, is increased or generated, or if the activity CTP synthetase is increased or generated in a non-human organism, like a microorganism or a plant cell, plant or part thereof, especially with mitochondrial localization, whereby the respective line disclose in column 7 the fine chemical beta-sitosterol. For example, an increase of the beta-sitosterol of at least 1 percent, particularly in a range of 12 to 25-percent is conferred as compared to a corresponding non-transformed wild type non-human organism.

[67781] Accordingly, in one embodiment, an increase of campesterol in a non-human organism, as compared to a corresponding non-transformed wild type non-human organism, is conferred in the process of the invention, if the activity of a polypeptide showing the activity of a CTP synthetase, or if the activity of the polypeptide Sll1443, preferably represented by SEQ ID NO. 53879, or a homolog or fragment thereof, or if the activity of a polypeptide encoded by a nucleic acid molecule comprising the nucleic acid SEQ ID NO. 53878, preferably the coding region thereof, or a homolog or fragment thereof, e.g. derived from Synechocystis sp., is increased or generated. For example the activity of a nucleic acid molecule or a polypeptide comprising the nucleic acid, preferably the coding region thereof, or polypeptide or the consensus sequence or the polypeptide motif, as depicted in Table I, II or IV, application No. 14, column 5 or 8 in the respective same line as the nucleic acid molecule SEQ ID NO. 53878 or polypeptide SEQ ID NO. 53879, respectively, or a homolog or a fragment thereof, is increased or generated, or if the activity CTP synthetase is increased or generated in a non-human organism, like a microorganism or a plant cell, plant or part thereof, especially with mitochondrial localization, whereby the respective line disclose in column 7 the fine chemical campesterol. For example, an increase of the campesterol of at least 1 percent, particularly in a range of 17 to 21-percent is conferred as compared to a corresponding non-transformed wild type non-human organism.

[67782] Accordingly, in one embodiment, an increase of beta-sitosterol in a non-human organism, as compared to a corresponding non-transformed wild type non-human organism, is conferred in the process of the invention, if the activity of a polypeptide showing the activity of a phosphoribulokinase, or if the activity of the polypeptide Sll1525, preferably represented by SEQ ID NO. 132939, or a homolog or fragment thereof, or if the activity of a polypeptide encoded by a nucleic acid molecule comprising the nucleic acid SEQ ID NO. 132938, preferably the coding region thereof, or a homolog or fragment thereof, e.g. derived from Synechocystis sp., is increased or generated. For example the activity of a nucleic acid molecule or a polypeptide comprising the nucleic acid, preferably the coding region thereof, or polypeptide or the consensus sequence or the polypeptide motif, as depicted in Table I, II or IV, application No. 14, column 5 or 8 in the respective same line as the nucleic acid molecule SEQ ID NO. 132938 or polypeptide SEQ ID NO. 132939, respectively, or a homolog or a fragment thereof, is increased or generated, or if the activity phosphoribulokinase is increased or generated in a non-human organism, like a microorganism or a plant cell, plant or part thereof, especially with mitochondrial localization, whereby the respective line disclose in column 7 the fine chemical beta-sitosterol. For example, an increase of the beta-sitosterol of at least 1 percent, particularly in a range of 17 to 24-percent is conferred as compared to a corresponding non-transformed wild type non-human organism.

[67783] Accordingly, in one embodiment, an increase of beta-sitosterol in a non-human organism, as compared to a corresponding non-transformed wild type non-human organism, is conferred in the process of the invention, if the activity of a polypeptide showing the activity of a ABC metal ion transporter substrate-binding protein, or if the activity of the polypeptide Sll1598, preferably represented by SEQ ID NO. 85744, or a homolog or fragment thereof, or if the activity of a polypeptide encoded by a nucleic acid molecule comprising the nucleic acid SEQ ID NO. 85743, preferably the coding region thereof, or a homolog or fragment thereof, e.g. derived from Synechocystis sp., is increased or generated. For example the activity of a nucleic acid molecule or a polypeptide comprising the nucleic acid, preferably the coding region thereof, or polypeptide or the consensus sequence or the polypeptide motif, as depicted in Table I, II or IV, application No. 14, column 5 or 8 in the respective same line as the nucleic acid molecule SEQ ID NO. 85743 or polypeptide SEQ ID NO. 85744, respectively, or a homolog or a fragment thereof, is increased or generated, or if the activity ABC metal ion transporter substrate-binding protein is increased or generated in a non-human organism, like a microorganism or a plant cell, plant or part thereof, especially with mitochondrial localization, whereby the respective line disclose in column 7 the fine chemical beta-sitosterol. For example, an increase of the beta-sitosterol of at least 1 percent, particularly in a range of 17 to 20-percent is conferred as compared to a corresponding non-transformed wild type non-human organism.

[67784] Accordingly, in one embodiment, an increase of campesterol in a non-human organism, as compared to a corresponding non-transformed wild type non-human organism, is conferred in the process of the invention, if the activity of a polypeptide showing the activity of a sll1761-protein, or if the activity of the polypeptide Sll1761, preferably represented by SEQ ID NO. 55380, or a homolog or fragment thereof, or if the activity of a polypeptide encoded by a nucleic acid molecule comprising the nucleic acid SEQ ID NO. 55379, preferably the coding region thereof, or a homolog or fragment thereof, e.g. derived from Synechocystis sp., is increased or generated. For example the activity of a nucleic acid molecule or a polypeptide comprising the nucleic acid, preferably the coding region thereof, or polypeptide or the consensus sequence or the polypeptide motif, as depicted in Table I, II or IV, application No. 14, column 5 or 8 in the respective same line as the nucleic acid molecule SEQ ID NO. 55379 or polypeptide SEQ ID NO. 55380, respectively, or a homolog or a fragment thereof, is increased or generated, or if the activity sll1761-protein is increased or generated in a non-human organism, like a microorganism or a plant cell, plant or part thereof, especially with non-targeted localization, whereby the respective line disclose in column 7 the fine chemical campesterol. For example, an increase of the campesterol of at least 1 percent, particularly in a range of 22 to 44-percent is conferred as compared to a corresponding non-transformed wild type non-human organism.

[67785] Accordingly, in one embodiment, an increase of beta-sitosterol in a non-human organism, as compared to a corresponding non-transformed wild type non-human organism, is conferred in the process of the invention, if the activity of a polypeptide showing the activity of a acyl transferase, or if the activity of the polypeptide Sll1848, preferably represented by SEQ ID NO. 86448, or a homolog or fragment thereof, or if the activity of a polypeptide encoded by a nucleic acid molecule comprising the nucleic acid SEQ ID NO. 86447, preferably the coding region thereof, or a homolog or fragment thereof, e.g. derived from Synechocystis sp., is increased or generated. For example the activity of a nucleic acid molecule or a polypeptide comprising the nucleic acid, preferably the coding region thereof, or polypeptide or the consensus sequence or the polypeptide motif, as depicted in Table I, II or IV, application No. 14, column 5 or 8 in the respective same line as the nucleic acid molecule SEQ ID NO. 86447 or polypeptide SEQ ID NO. 86448, respectively, or a homolog or a fragment thereof, is increased or generated, or if the activity acyl transferase is increased or generated in a non-human organism, like a microorganism or a plant cell, plant or part thereof, especially with plastidic localization, whereby the respective line disclose in column 7 the fine chemical beta-sitosterol. For example, an increase of the beta-sitosterol of at least 1 percent, particularly in a range of 16 to 26-percent is conferred as compared to a corresponding non-transformed wild type non-human organism.

[67786] Accordingly, in one embodiment, an increase of campesterol in a non-human organism, as compared to a corresponding non-transformed wild type non-human organism, is conferred in the process of the invention, if the activity of a polypeptide showing the activity of a cation-transporting ATPase, or if the activity of the polypeptide Sll1920, preferably represented by SEQ ID NO. 55386, or a homolog or fragment thereof, or if the activity of a polypeptide encoded by a nucleic acid molecule comprising the nucleic acid SEQ ID NO. 55385, preferably the coding region thereof, or a homolog or fragment thereof, e.g. derived from Synechocystis sp., is increased or generated. For example the activity of a nucleic acid molecule or a polypeptide comprising the nucleic acid, preferably the coding region thereof, or polypeptide or the consensus sequence or the polypeptide motif, as depicted in Table I, II or IV, application No. 14, column 5 or 8 in the respective same line as the nucleic acid molecule SEQ ID NO. 55385 or polypeptide SEQ ID NO. 55386, respectively, or a homolog or a fragment thereof, is increased or generated, or if the activity cation-transporting ATPase is increased or generated in a non-human organism, like a microorganism or a plant cell, plant or part thereof, especially with mitochondrial localization, whereby the respective line disclose in column 7 the fine chemical campesterol. For example, an increase of the campesterol of at least 1 percent, particularly in a range of 20 to 66-percent is conferred as compared to a corresponding non-transformed wild type non-human organism.

[67787] Accordingly, in one embodiment, an increase of beta-sitosterol in a non-human organism, as compared to a corresponding non-transformed wild type non-human organism, is conferred in the process of the invention, if the activity of a polypeptide showing the activity of a oxidoreductase, or if the activity of the polypeptide Slr0338, preferably represented by SEQ ID NO. 11991, or a homolog or fragment thereof, or if the activity of a polypeptide encoded by a nucleic acid molecule comprising the nucleic acid SEQ ID NO. 11990, preferably the coding region thereof, or a homolog or fragment thereof, e.g. derived from Synechocystis sp., is increased or generated. For example the activity of a nucleic acid molecule or a polypeptide comprising the nucleic acid, preferably the coding region thereof, or polypeptide or the consensus sequence or the polypeptide motif, as depicted in Table I, II or IV, application No. 14, column 5 or 8 in the respective same line as the nucleic acid molecule SEQ ID NO. 11990 or polypeptide SEQ ID NO. 11991, respectively, or a homolog or a fragment thereof, is increased or generated, or if the activity oxidoreductase is increased or generated in a non-human organism, like a microorganism or a plant cell, plant or part thereof, especially with non-targeted localization, whereby the respective line disclose in column 7 the fine chemical beta-sitosterol. For example, an increase of the beta-sitosterol of at least 1 percent, particularly in a range of 14 to 19-percent is conferred as compared to a corresponding non-transformed wild type non-human organism.

[67788] Accordingly, in one embodiment, an increase of campesterol in a non-human organism, as compared to a corresponding non-transformed wild type non-human organism, is conferred in the process of the invention, if the activity of a polypeptide showing the activity of a permease protein of ABC transporter, or if the activity of the polypeptide Slr0949, preferably represented by SEQ ID NO. 119223, or a homolog or fragment thereof, or if the activity of a polypeptide encoded by a nucleic acid molecule comprising the nucleic acid SEQ ID NO. 119222, preferably the coding region thereof, or a homolog or fragment thereof, e.g. derived from Synechocystis sp., is increased or generated. For example the activity of a nucleic acid molecule or a polypeptide comprising the nucleic acid, preferably the coding region thereof, or polypeptide or the consensus sequence or the polypeptide motif, as depicted in Table I, II or IV, application No. 14, column 5 or 8 in the respective same line as the nucleic acid molecule SEQ ID NO. 119222 or polypeptide SEQ ID NO. 119223, respectively, or a homolog or a fragment thereof, is increased or generated, or if the activity permease protein of ABC transporter is increased or generated in a non-human organism, like a microorganism or a plant cell, plant or part thereof, especially with mitochondrial localization, whereby the respective line disclose in column 7 the fine chemical campesterol. For example, an increase of the campesterol of at least 1 percent, particularly in a range of 16 to 28-percent is conferred as compared to a corresponding non-transformed wild type non-human organism.

[67789] Accordingly, in one embodiment, an increase of campesterol in a non-human organism, as compared to a corresponding non-transformed wild type non-human organism, is conferred in the process of the invention, if the activity of a polypeptide showing the activity of a tryptophan synthase alpha chain, or if the activity of the polypeptide Slr0966, preferably represented by SEQ ID NO. 87656, or a homolog or fragment thereof, or if the activity of a polypeptide encoded by a nucleic acid molecule comprising the nucleic acid SEQ ID NO. 87655, preferably the coding region thereof, or a homolog or fragment thereof, e.g. derived from Synechocystis sp., is increased or generated. For example the activity of a nucleic acid molecule or a polypeptide comprising the nucleic acid, preferably the coding region thereof, or polypeptide or the consensus sequence or the polypeptide motif, as depicted in Table I, II or IV, application No. 14, column 5 or 8 in the respective same line as the nucleic acid molecule SEQ ID NO. 87655 or polypeptide SEQ ID NO. 87656, respectively, or a homolog or a fragment thereof, is increased or generated, or if the activity tryptophan synthase alpha chain is increased or generated in a non-human organism, like a microorganism or a plant cell, plant or part thereof, especially with plastidic localization, whereby the respective line disclose in column 7 the fine chemical campesterol. For example, an increase of the campesterol of at least 1 percent, particularly in a range of 18 to 20-percent is conferred as compared to a corresponding non-transformed wild type non-human organism.

[67790] Accordingly, in one embodiment, an increase of beta-sitosterol in a non-human organism, as compared to a corresponding non-transformed wild type non-human organism, is conferred in the process of the invention, if the activity of a polypeptide showing the activity of a multiple antibiotic resistance protein, or if the activity of the polypeptide TTC1193, preferably represented by SEQ ID NO. 61724, or a homolog or fragment thereof, or if the activity of a polypeptide encoded by a nucleic acid molecule comprising the nucleic acid SEQ ID NO. 61723, preferably the coding region thereof, or a homolog or fragment thereof, e.g. derived from Thermus thermophilus, is increased or generated. For example the activity of a nucleic acid molecule or a polypeptide comprising the nucleic acid, preferably the coding region thereof, or polypeptide or the consensus sequence or the polypeptide motif, as depicted in Table I, II or IV, application No. 14, column 5 or 8 in the respective same line as the nucleic acid molecule SEQ ID NO. 61723 or polypeptide SEQ ID NO. 61724, respectively, or a homolog or a fragment thereof, is increased or generated, or if the activity multiple antibiotic resistance protein is increased or generated in a non-human organism, like a microorganism or a plant cell, plant or part thereof, especially with non-targeted localization, whereby the respective line disclose in column 7 the fine chemical beta-sitosterol. For example, an increase of the beta-sitosterol of at least 1 percent, particularly in a range of 15 to 17-percent is conferred as compared to a corresponding non-transformed wild type non-human organism.

[67791] Accordingly, in one embodiment, an increase of campesterol in a non-human organism, as compared to a corresponding non-transformed wild type non-human organism, is conferred in the process of the invention, if the activity of a polypeptide showing the activity of a multiple antibiotic resistance protein, or if the activity of the polypeptide TTC1193, preferably represented by SEQ ID NO. 61724, or a homolog or fragment thereof, or if the activity of a polypeptide encoded by a nucleic acid molecule comprising the nucleic acid SEQ ID NO. 61723, preferably the coding region thereof, or a homolog or fragment thereof, e.g. derived from Thermus thermophilus, is increased or generated. For example the activity of a nucleic acid molecule or a polypeptide comprising the nucleic acid, preferably the coding region thereof, or polypeptide or the consensus sequence or the polypeptide motif, as depicted in Table I, II or IV, application No. 14, column 5 or 8 in the respective same line as the nucleic acid molecule SEQ ID NO. 61723 or polypeptide SEQ ID NO. 61724, respectively, or a homolog or a fragment thereof, is increased or generated, or if the activity multiple antibiotic resistance protein is increased or generated in a non-human organism, like a microorganism or a plant cell, plant or part thereof, especially with non-targeted localization, whereby the respective line disclose in column 7 the fine chemical campesterol. For example, an increase of the campesterol of at least 1 percent, particularly in a range of 17 to 39-percent is conferred as compared to a corresponding non-transformed wild type non-human organism.

[67792] Accordingly, in one embodiment, an increase of beta-sitosterol in a non-human organism, as compared to a corresponding non-transformed wild type non-human organism, is conferred in the process of the invention, if the activity of a polypeptide showing the activity of a TTC1386-protein, or if the activity of the polypeptide TTC1386, preferably represented by SEQ ID NO. 62080, or a homolog or fragment thereof, or if the activity of a polypeptide encoded by a nucleic acid molecule comprising the nucleic acid SEQ ID NO. 62079, preferably the coding region thereof, or a homolog or fragment thereof, e.g. derived from Thermus thermophilus, is increased or generated. For example the activity of a nucleic acid molecule or a polypeptide comprising the nucleic acid, preferably the coding region thereof, or polypeptide or the consensus sequence or the polypeptide motif, as depicted in Table I, II or IV, application No. 14, column 5 or 8 in the respective same line as the nucleic acid molecule SEQ ID NO. 62079 or polypeptide SEQ ID NO. 62080, respectively, or a homolog or a fragment thereof, is increased or generated, or if the activity TTC1386-protein is increased or generated in a non-human organism, like a microorganism or a plant cell, plant or part thereof, especially with non-targeted localization, whereby the respective line disclose in column 7 the fine chemical beta-sitosterol. For example, an increase of the beta-sitosterol of at least 1 percent, particularly in a range of 24 to 31-percent is conferred as compared to a corresponding non-transformed wild type non-human organism.

[67793] Accordingly, in one embodiment, an increase of campesterol in a non-human organism, as compared to a corresponding non-transformed wild type non-human organism, is conferred in the process of the invention, if the activity of a polypeptide showing the activity of a TTC1386-protein, or if the activity of the polypeptide TTC1386, preferably represented by SEQ ID NO. 62080, or a homolog or fragment thereof, or if the activity of a polypeptide encoded by a nucleic acid molecule comprising the nucleic acid SEQ ID NO. 62079, preferably the coding region thereof, or a homolog or fragment thereof, e.g. derived from Thermus thermophilus, is increased or generated. For example the activity of a nucleic acid molecule or a polypeptide comprising the nucleic acid, preferably the coding region thereof, or polypeptide or the consensus sequence or the polypeptide motif, as depicted in Table I, II or IV, application No. 14, column 5 or 8 in the respective same line as the nucleic acid molecule SEQ ID NO. 62079 or polypeptide SEQ ID NO. 62080, respectively, or a homolog or a fragment thereof, is increased or generated, or if the activity TTC1386-protein is increased or generated in a non-human organism, like a microorganism or a plant cell, plant or part thereof, especially with non-targeted localization, whereby the respective line disclose in column 7 the fine chemical campesterol. For example, an increase of the campesterol of at least 1 percent, particularly in a range of 34 to 50-percent is conferred as compared to a corresponding non-transformed wild type non-human organism.

[67794] Accordingly, in one embodiment, an increase of campesterol in a non-human organism, as compared to a corresponding non-transformed wild type non-human organism, is conferred in the process of the invention, if the activity of a polypeptide showing the activity of a homocitrate synthase, or if the activity of the polypeptide TTC1550, preferably represented by SEQ ID NO. 12975, or a homolog or fragment thereof, or if the activity of a polypeptide encoded by a nucleic acid molecule comprising the nucleic acid SEQ ID NO. 12974, preferably the coding region thereof, or a homolog or fragment thereof, e.g. derived from Thermus thermophilus, is increased or generated. For example the activity of a nucleic acid molecule or a polypeptide comprising the nucleic acid, preferably the coding region thereof, or polypeptide or the consensus sequence or the polypeptide motif, as depicted in Table I, II or IV, application No. 14, column 5 or 8 in the respective same line as the nucleic acid molecule SEQ ID NO. 12974 or polypeptide SEQ ID NO. 12975, respectively, or a homolog or a fragment thereof, is increased or generated, or if the activity homocitrate synthase is increased or generated in a non-human organism, like a microorganism or a plant cell, plant or part thereof, especially with non-targeted localization, whereby the respective line disclose in column 7 the fine chemical campesterol. For example, an increase of the campesterol of at least 1 percent, particularly in a range of 17 to 23-percent is conferred as compared to a corresponding non-transformed wild type non-human organism.

[67795] Accordingly, in one embodiment, an increase of campesterol in a non-human organism, as compared to a corresponding non-transformed wild type non-human organism, is conferred in the process of the invention, if the activity of a polypeptide showing the activity of a homocitrate synthase, or if the activity of the polypeptide Ydl131w, preferably represented by SEQ ID NO. 113225, or a homolog or fragment thereof, or if the activity of a polypeptide encoded by a nucleic acid molecule comprising the nucleic acid SEQ ID NO. 113224, preferably the coding region thereof, or a homolog or fragment thereof, e.g. derived from Saccharomyces cerevisiae, is increased or generated. For example the activity of a nucleic acid molecule or a polypeptide comprising the nucleic acid, preferably the coding region thereof, or polypeptide or the consensus sequence or the polypeptide motif, as depicted in Table I, II or IV, application No. 14, column 5 or 8 in the respective same line as the nucleic acid molecule SEQ ID NO. 113224 or polypeptide SEQ ID NO. 113225, respectively, or a homolog or a fragment thereof, is increased or generated, or if the activity homocitrate synthase is increased or generated in a non-human organism, like a microorganism or a plant cell, plant or part thereof, especially with plastidic localization, whereby the respective line disclose in column 7 the fine chemical campesterol. For example, an increase of the campesterol of at least 1 percent, particularly in a range of 18 to 98-percent is conferred as compared to a corresponding non-transformed wild type non-human organism.

[67796] Accordingly, in one embodiment, an increase of campesterol in a non-human organism, as compared to a corresponding non-transformed wild type non-human organism, is conferred in the process of the invention, if the activity of a polypeptide showing the activity of a cyclin, or if the activity of the polypeptide Ydl155w, preferably represented by SEQ ID NO. 14172, or a homolog or fragment thereof, or if the activity of a polypeptide encoded by a nucleic acid molecule comprising the nucleic acid SEQ ID NO. 14171, preferably the coding region thereof, or a homolog or fragment thereof, e.g. derived from Saccharomyces cerevisiae, is increased or generated. For example the activity of a nucleic acid molecule or a polypeptide comprising the nucleic acid, preferably the coding region thereof, or polypeptide or the consensus sequence or the polypeptide motif, as depicted in Table I, II or IV, application No. 14, column 5 or 8 in the respective same line as the nucleic acid molecule SEQ ID NO. 14171 or polypeptide SEQ ID NO. 14172, respectively, or a homolog or a fragment thereof, is increased or generated, or if the activity cyclin is increased or generated in a non-human organism, like a microorganism or a plant cell, plant or part thereof, especially with non-targeted localization, whereby the respective line disclose in column 7 the fine chemical campesterol. For example, an increase of the campesterol of at least 1 percent, particularly in a range of 17 to 63-percent is conferred as compared to a corresponding non-transformed wild type non-human organism.

[67797] Accordingly, in one embodiment, an increase of campesterol in a non-human organism, as compared to a corresponding non-transformed wild type non-human organism, is conferred in the process of the invention, if the activity of a polypeptide showing the activity of a ydl235cprotein, or if the activity of the polypeptide Ydl235c, preferably represented by SEQ ID NO. 113314, or a homolog or fragment thereof, or if the activity of a polypeptide encoded by a nucleic acid molecule comprising the nucleic acid SEQ ID NO. 113313, preferably the coding region thereof, or a homolog or fragment thereof, e.g. derived from Saccharomyces cerevisiae, is increased or generated. For example the activity of a nucleic acid molecule or a polypeptide comprising the nucleic acid, preferably the coding region thereof, or polypeptide or the consensus sequence or the polypeptide motif, as depicted in Table I, II or IV, application No. 14, column 5 or 8 in the respective same line as the nucleic acid molecule SEQ ID NO. 113313 or polypeptide SEQ ID NO. 113314, respectively, or a homolog or a fragment thereof, is increased or generated, or if the activity ydl235c-protein is increased or generated in a non-human organism, like a microorganism or a plant cell, plant or part thereof, especially with plastidic localization, whereby the respective line disclose in column 7 the fine chemical campesterol. For example, an increase of the campesterol of at least 1 percent, particularly in a range of 21 to 37-percent is conferred as compared to a corresponding non-transformed wild type non-human organism.

[67798] Accordingly, in one embodiment, an increase of campesterol in a non-human organism, as compared to a corresponding non-transformed wild type non-human organism, is conferred in the process of the invention, if the activity of a polypeptide showing the activity of a oxidoreductase, or if the activity of the polypeptide Yg1039w, preferably represented by SEQ ID NO. 120437, or a homolog or fragment thereof, or if the activity of a polypeptide encoded by a nucleic acid molecule comprising the nucleic acid SEQ ID NO. 120436, preferably the coding region thereof, or a homolog or fragment thereof, e.g. derived from Saccharomyces cerevisiae, is increased or generated. For example the activity of a nucleic acid molecule or a polypeptide comprising the nucleic acid, preferably the coding region thereof, or polypeptide or the consensus sequence or the polypeptide motif, as depicted in Table I, II or IV, application No. 14, column 5 or 8 in the respective same line as the nucleic acid molecule SEQ ID NO. 120436 or polypeptide SEQ ID NO. 120437, respectively, or a homolog or a fragment thereof, is increased or generated, or if the activity oxidoreductase is increased or generated in a non-human organism, like a microorganism or a plant cell, plant or part thereof, especially with plastidic localization, whereby the respective line disclose in column 7 the fine chemical campesterol. For example, an increase of the campesterol of at least 1 percent, particularly in a range of 17 to 33-percent is conferred as compared to a corresponding non-transformed wild type non-human organism.

[67799] Accordingly, in one embodiment, an increase of campesterol in a non-human organism, as compared to a corresponding non-transformed wild type non-human organism, is conferred in the process of the invention, if the activity of a polypeptide showing the activity of a polygalacturonase, or if the activity of the polypeptide Yjr153w, preferably represented by SEQ ID NO. 66275, or a homolog or fragment thereof, or if the activity of a polypeptide encoded by a nucleic acid molecule comprising the nucleic acid SEQ ID NO. 66274, preferably the coding region thereof, or a homolog or fragment thereof, e.g. derived from Saccharomyces cerevisiae, is increased or generated. For example the activity of a nucleic acid molecule or a polypeptide comprising the nucleic acid, preferably the coding region thereof, or polypeptide or the consensus sequence or the polypeptide motif, as depicted in Table I, II or IV, application No. 14, column 5 or 8 in the respective same line as the nucleic acid molecule SEQ ID NO. 66274 or polypeptide SEQ ID NO. 66275, respectively, or a homolog or a fragment thereof, is increased or generated, or if the activity polygalacturonase is increased or generated in a non-human organism, like a microorganism or a plant cell, plant or part thereof, especially with non-targeted localization, whereby the respective line disclose in column 7 the fine chemical campesterol. For example, an increase of the campesterol of at least 1 percent, particularly in a range of 16 to 42-percent is conferred as compared to a corresponding non-transformed wild type non-human organism.

[67800] Accordingly, in one embodiment, an increase of campesterol in a non-human organism, as compared to a corresponding non-transformed wild type non-human organism, is conferred in the process of the invention, if the activity of a polypeptide showing the activity of a ynl321w-protein, or if the activity of the polypeptide Ynl321w, preferably represented by SEQ ID NO. 129547, or a homolog or fragment thereof, or if the activity of a polypeptide encoded by a nucleic acid molecule comprising the nucleic acid SEQ ID NO. 129546, preferably the coding region thereof, or a homolog or fragment thereof, e.g. derived from Saccharomyces cerevisiae, is increased or generated. For example the activity of a nucleic acid molecule or a polypeptide comprising the nucleic acid, preferably the coding region thereof, or polypeptide or the consensus sequence or the polypeptide motif, as depicted in Table I, II or IV, application No. 14, column 5 or 8 in the respective same line as the nucleic acid molecule SEQ ID NO. 129546 or polypeptide SEQ ID NO. 129547, respectively, or a homolog or a fragment thereof, is increased or generated, or if the activity ynl321w-protein is increased or generated in a non-human organism, like a microorganism or a plant cell, plant or part thereof, especially with plastidic localization, whereby the respective line disclose in column 7 the fine chemical campesterol. For example, an increase of the campesterol of at least 1 percent, particularly in a range of 16 to 28-percent is conferred as compared to a corresponding non-transformed wild type non-human organism.

[67801] Accordingly, in one embodiment, an increase of beta-sitosterol in a non-human organism, as compared to a corresponding non-transformed wild type non-human organism, is conferred in the process of the invention, if the activity of a polypeptide showing the activity of a acetyl-CoA acetyltransferase, or if the activity of the polypeptide Ypl028w, preferably represented by SEQ ID NO. 92669, or a homolog or fragment thereof, or if the activity of a polypeptide encoded by a nucleic acid molecule comprising the nucleic acid SEQ ID NO. 92668, preferably the coding region thereof, or a homolog or fragment thereof, e.g. derived from Saccharomyces cerevisiae, is increased or generated. For example the activity of a nucleic acid molecule or a polypeptide comprising the nucleic acid, preferably the coding region thereof, or polypeptide or the consensus sequence or the polypeptide motif, as depicted in Table I, II or IV, application No. 14, column 5 or 8 in the respective same line as the nucleic acid molecule SEQ ID NO. 92668 or polypeptide SEQ ID NO. 92669, respectively, or a homolog or a fragment thereof, is increased or generated, or if the activity acetyl-CoA acetyltransferase is increased or generated in a non-human organism, like a microorganism or a plant cell, plant or part thereof, especially with non-targeted localization, whereby the respective line disclose in column 7 the fine chemical beta-sitosterol. For example, an increase of the beta-sitosterol of at least 1 percent, particularly in a range of 12 to 23-percent is conferred as compared to a corresponding non-transformed wild type non-human organism.

[67802] Accordingly, in one embodiment, an increase of beta-sitosterol in a non-human organism, as compared to a corresponding non-transformed wild type non-human organism, is conferred in the process of the invention, if the activity of a polypeptide showing the activity of a ypr170cprotein, or if the activity of the polypeptide Ypr170c, preferably represented by SEQ ID NO. 113648, or a homolog or fragment thereof, or if the activity of a polypeptide encoded by a nucleic acid molecule comprising the nucleic acid SEQ ID NO. 113647, preferably the coding region thereof, or a homolog or fragment thereof, e.g. derived from Saccharomyces cerevisiae, is increased or generated. For example the activity of a nucleic acid molecule or a polypeptide comprising the nucleic acid, preferably the coding region thereof, or polypeptide or the consensus sequence or the polypeptide motif, as depicted in Table I, II or IV, application No. 14, column 5 or 8 in the respective same line as the nucleic acid molecule SEQ ID NO. 113647 or polypeptide SEQ ID NO. 113648, respectively, or a homolog or a fragment thereof, is increased or generated, or if the activity ypr170c-protein is increased or generated in a non-human organism, like a microorganism or a plant cell, plant or part thereof, especially with plastidic localization, whereby the respective line disclose in column 7 the fine chemical beta-sitosterol. For example, an increase of the beta-sitosterol of at least 1 percent, particularly in a range of 15 to 32-percent is conferred as compared to a corresponding non-transformed wild type non-human organism.

[67803] Accordingly, in one embodiment, an increase of campesterol in a non-human organism, as compared to a corresponding non-transformed wild type non-human organism, is conferred in the process of the invention, if the activity of a polypeptide showing the activity of a glucose-6-phosphate 1-dehydrogenase, or if the activity of the polypeptide 59582753_SOYBEAN, preferably represented by SEQ ID NO. 16884, or a homolog or fragment thereof, or if the activity of a polypeptide encoded by a nucleic acid molecule comprising the nucleic acid SEQ ID NO. 16883, preferably the coding region thereof, or a homolog or fragment thereof, e.g. derived from Glycine max, is increased or generated. For example the activity of a nucleic acid molecule or a polypeptide comprising the nucleic acid, preferably the coding region thereof, or polypeptide or the consensus sequence or the polypeptide motif, as depicted in Table I, II or IV, application No. 14, column 5 or 8 in the respective same line as the nucleic acid molecule SEQ ID NO. 16883 or polypeptide SEQ ID NO. 16884, respectively, or a homolog or a fragment thereof, is increased or generated, or if the activity glucose-6-phosphate 1-dehydrogenase is increased or generated in a non-human organism, like a microorganism or a plant cell, plant or part thereof, especially with plastidic localization, whereby the respective line disclose in column 7 the fine chemical campesterol. For example, an increase of the campesterol of at least 1 percent, partitularly in a range of 18 to 52-percent is conferred as compared to a corresponding non-transformed wild type non-human organism.

[67804] [0096.1.7.14] to [0103.1.7.14] for the disclosure of these paragraphs see [0096.1.7.7] to [0103.1.7.7] above

[67805] In this paragraph “A” means “Goffeau et al., Science 274 (5287), 546 (1996)”, “B” means “Blattner et al., Science 277 (5331), 1453 (1997)”, “C” means “Nakamura et al., Nucleic Acids Res. 28(1), 72 (2000)”, “D” means “deposition of the sequences to the EMBL/GenBank/DDBJ databases under “Sequencing of the draft genome assembly of Azotobacter vinelandii AvOP”. in June 2005 by Copeland et al.”, “E” means “Henne et al., Nat. Biotechnol. 22 (5), 547 (2004)”, “F” means “Kaul et al., Nature 408 (6814), 796 (2000)”, and “G” means “Matsumoto et al., Nature 436 (7052), 793 (2005)”.

[67806] The nucleic acid sequence of At1g07420 from Arabidopsis thaliana, e.g. as shown in the respective line in column 5 of Table I, application no. 14, has been published in F. And the activity of the gene product thereof is the activity of C-4 sterol methyl oxidase.

[67807] Accordingly, in one embodiment, the process of the present invention for producing campesterol in a non-human organism, like a microorganism or a plant or a part thereof, comprises increasing or generating the activity of a gene product with the activity of a gene product conferring the activity of “C-4 sterol methyl oxidase”, especially from Arabidopsis thaliana or its functional equivalent or its homolog, e.g. the increase of
[67808] (a) a gene product of a gene comprising the nucleic acid molecule as shown in the respective line in column 5 of Table I (whereby the respective line disclose in column 7 the fine chemical campesterol), application no. 14, preferably the coding region thereof, or a homolog or a fragment thereof, and being depicted in the same respective line as said At1g07420, or a functional equivalent or a homolog thereof as shown in column 8 of Table I, application no. 14, preferably the coding region thereof, particularly a homolog or functional equivalent as shown in column 8 of Table I B, application no. 14, and being depicted in the same respective line as said At1g07420, and preferably the activity is increased non-targeted, or
[67809] (b) a polypeptide comprising a polypeptide, a consensus sequence or at least a polypeptide motif as shown in the respective line in column 5 of Table II or in column 8 of Table IV, application no. 14, respectively, and being depicted in the same respective line as said At1g07420, or a functional equivalent or a homolog thereof as depicted in column 8 of Table II, application no. 14, preferably a homolog or functional equivalent as depicted in column 8 of Table II B, application no. 14, and being depicted in the same respective line as said At1g07420, and preferably the activity is increased non-targeted, whereby the respective line disclose in column 7 the fine chemical campesterol.

[67810] Accordingly, in one embodiment, the molecule which activity is to be increased in the process of the invention is the gene product with an activity as a “C-4 sterol methyl oxidase”, preferably it is the molecule of section (a) or (b) of this paragraph.

[67811] In particular, it was observed that in plants, especially in Arabidopsis thaliana, increasing or generating the activity of a gene product non-targeted with the activity of a “C-4 sterol methyl oxidase”, preferably being encoded by a gene comprising the nucleic acid sequence SEQ ID NO. 131003, preferably the coding region thereof, conferred the production of or the increase in campesterol compared with the wild type control.

[67812] The nucleic acid sequence of At1g07430 from Arabidopsis thaliana, e.g. as shown in the respective line in column 5 of Table I, application no. 14, has been published in F. And the activity of the gene product thereof is the activity of protein phosphatase.

[67813] Accordingly, in one embodiment, the process of the present invention for producing campesterol in a non-human organism, like a microorganism or a plant or a part thereof, comprises increasing or generating the activity of a gene product with the activity of a gene product conferring the activity of “protein phosphatase”, especially from Arabidopsis thaliana or its functional equivalent or its homolog, e.g. the increase of
[67814] (a) a gene product of a gene comprising the nucleic acid molecule as shown in the respective line in column 5 of Table I (whereby the respective line disclose in column 7 the fine chemical campesterol), application no. 14, preferably the coding region thereof, or a homolog or a fragment thereof, and being depicted in the same respective line as said At1g07430, or a functional equivalent or a homolog thereof as shown in column 8 of Table I, application no. 14, preferably the coding region thereof, particularly a homolog or functional equivalent as shown in column 8 of Table I B, application no. 14, and being depicted in the same respective line as said At1g07430, and preferably the activity is increased non-targeted, or
[67815] (b) a polypeptide comprising a polypeptide, a consensus sequence or at least a polypeptide motif as shown in the respective line in column 5 of Table II or in column 8 of Table IV, application no. 14, respectively, and being depicted in the same respective line as said At1g07430, or a functional equivalent or a homolog thereof as depicted in column 8 of Table II, application no. 14, preferably a homolog or functional equivalent as depicted in column 8 of Table II B, application no. 14, and being depicted in the same respective line as said At1g07430, and preferably the activity is increased non-targeted, whereby the respective line disclose in column 7 the fine chemical campesterol.

[67816] Accordingly, in one embodiment, the molecule which activity is to be increased in the process of the invention is the gene product with an activity as a “protein phosphatase”, preferably it is the molecule of section (a) or (b) of this paragraph.

[67817] In particular, it was observed that in plants, especially in Arabidopsis thaliana, increasing or generating the activity of a gene product non-targeted with the activity of a “protein phosphatase”, preferably being encoded by a gene comprising the nucleic acid sequence SEQ ID NO. 17451, preferably the coding region thereof, conferred the production of or the increase in campesterol compared with the wild type control.

[67818] The nucleic acid sequence of At1g36730 from Arabidopsis thaliana, e.g. as shown in the respective line in column 5 of Table I, application no. 14, has been published in F. And the activity of the gene product thereof is the activity of eukaryotic translation initiation factor 5.

[67819] Accordingly, in one embodiment, the process of the present invention for producing campesterol in a non-human organism, like a microorganism or a plant or a part thereof, comprises increasing or generating the activity of a gene product with the activity of a gene product conferring the activity of “eukaryotic translation initiation factor 5”, especially from Arabidopsis thaliana or its functional equivalent or its homolog, e.g. the increase of
[67820] (a) a gene product of a gene comprising the nucleic acid molecule as shown in the respective line in column 5 of Table I (whereby the respective line disclose in column 7 the fine chemical campesterol), application no. 14, preferably the coding region thereof, or a homolog or a fragment thereof, and being depicted in the same respective line as said At1g36730, or a functional equivalent or a homolog thereof as shown in column 8 of Table I, application no. 14, preferably the coding region thereof, particularly a homolog or functional equivalent as shown in column 8 of Table I B, application no. 14, and being depicted in the same respective line as said At1g36730, and preferably the activity is increased non-targeted, or
[67821] (b) a polypeptide comprising a polypeptide, a consensus sequence or at least a polypeptide motif as shown in the respective line in column 5 of Table II or in column 8 of Table IV, application no. 14, respectively, and being depicted in the same respective line as said At1g36730, or a functional equivalent or a homolog thereof as depicted in column 8 of Table II, application no. 14, preferably a homolog or functional equivalent as depicted in column 8 of Table II B, application no. 14, and being depicted in the same respective line as said At1g36730, and preferably the activity is increased non-targeted, whereby the respective line disclose in column 7 the fine chemical campesterol.

[67822] Accordingly, in one embodiment, the molecule which activity is to be increased in the process of the invention is the gene product with an activity as a “eukaryotic translation initiation factor 5”, preferably it is the molecule of section (a) or (b) of this paragraph.

[67823] In particular, it was observed that in plants, especially in Arabidopsis thaliana, increasing or generating the activity of a gene product non-targeted with the activity of a “eukaryotic translation initiation factor 5”, preferably being encoded by a gene comprising the nucleic acid sequence SEQ ID NO. 17968, preferably the coding region thereof, conferred the production of or the increase in campesterol compared with the wild type control.

[67824] The nucleic acid sequence of At1g61950 from Arabidopsis thaliana, e.g. as shown in the respective line in column 5 of Table I, application no. 14, has been published in F. And the activity of the gene product thereof is the activity of calcium-dependent protein kinase.

[67825] Accordingly, in one embodiment, the process of the present invention for producing beta-sitosterol in a non-human organism, like a microorganism or a plant or a part thereof, comprises increasing or generating the activity of a gene product with the activity of a gene product conferring the activity of “calcium-dependent protein kinase”, especially from Arabidopsis thaliana or its functional equivalent or its homolog, e.g. the increase of
[67826] (a) a gene product of a gene comprising the nucleic acid molecule as shown in the respective line in column 5 of Table I (whereby the respective line disclose in column 7 the fine chemical beta-sitosterol), application no. 14, preferably the coding region thereof, or a homolog or a fragment thereof, and being depicted in the same respective line as said At1g61950, or a functional equivalent or a homolog thereof as shown in column 8 of Table I, application no. 14, preferably the coding region thereof, particularly a homolog or functional equivalent as shown in column 8 of Table I B, application no. 14, and being depicted in the same respective line as said At1g61950, and preferably the activity is increased non-targeted, or
[67827] (b) a polypeptide comprising a polypeptide, a consensus sequence or at least a polypeptide motif as shown in the respective line in column 5 of Table II or in column 8 of Table IV, application no. 14, respectively, and being depicted in the same respective line as said At1g61950, or a functional equivalent or a homolog thereof as depicted in column 8 of Table II, application no. 14, preferably a homolog or functional equivalent as depicted in column 8 of Table II B, application no. 14, and being depicted in the same respective line as said At1g61950, and preferably the activity is increased non-targeted, whereby the respective line disclose in column 7 the fine chemical beta-sitosterol.

[67828] Accordingly, in one embodiment, the molecule which activity is to be increased in the process of the invention is the gene product with an activity as a “calcium-dependent protein kinase”, preferably it is the molecule of section (a) or (b) of this paragraph.

[67829] In particular, it was observed that in plants, especially in Arabidopsis thaliana, increasing or generating the activity of a gene product non-targeted with the activity of a “calcium-dependent protein kinase”, preferably being encoded by a gene comprising the nucleic acid sequence SEQ ID NO. 18869, preferably the coding region thereof, conferred the production of or the increase in beta-sitosterol compared with the wild type control.

[67830] The nucleic acid sequence of At1g61950 from Arabidopsis thaliana, e.g. as shown in the respective line in column 5 of Table I, application no. 14, has been published in F. And the activity of the gene product thereof is the activity of calcium-dependent protein kinase.

[67831] Accordingly, in one embodiment, the process of the present invention for producing campesterol in a non-human organism, like a microorganism or a plant or a part thereof, comprises increasing or generating the activity of a gene product with the activity of a gene product conferring the activity of “calcium-dependent protein kinase”, especially from Arabidopsis thaliana or its functional equivalent or its homolog, e.g. the increase of
[67832] (a) a gene product of a gene comprising the nucleic acid molecule as shown in the respective line in column 5 of Table I (whereby the respective line disclose in column 7 the fine chemical campesterol), application no. 14, preferably the coding region thereof, or a homolog or a fragment thereof, and being depicted in the same respective line as said At1g61950, or a functional equivalent or a homolog thereof as shown in column 8 of Table I, application no. 14, preferably the coding region thereof, particularly a homolog or functional equivalent as shown in column 8 of Table I B, application no. 14, and being depicted in the same respective line as said At1g61950, and preferably the activity is increased non-targeted, or
[67833] (b) a polypeptide comprising a polypeptide, a consensus sequence or at least a polypeptide motif as shown in the respective line in column 5 of Table II or in column 8 of Table IV, application no. 14, respectively, and being depicted in the same respective line as said At1g61950, or a functional equivalent or a homolog thereof as depicted in column 8 of Table II, application no. 14, preferably a homolog or functional equivalent as depicted in column 8 of Table II B, application no. 14, and being depicted in the same respective line as said At1g61950, and preferably the activity is increased non-targeted, whereby the respective line disclose in column 7 the fine chemical campesterol.

[67834] Accordingly, in one embodiment, the molecule which activity is to be increased in the process of the invention is the gene product with an activity as a “calcium-dependent protein kinase”, preferably it is the molecule of section (a) or (b) of this paragraph.

[67835] In particular, it was observed that in plants, especially in Arabidopsis thaliana, increasing or generating the activity of a gene product non-targeted with the activity of a “calcium-dependent protein kinase”, preferably being encoded by a gene comprising the nucleic acid sequence SEQ ID NO. 18869, preferably the coding region thereof, conferred the production of or the increase in campesterol compared with the wild type control.

[67836] The nucleic acid sequence of At1g68320 from Arabidopsis thaliana, e.g. as shown in the respective line in column 5 of Table I, application no. 14, has been published in F. And the activity of the gene product thereof is the activity of transcription factor.

[67837] Accordingly, in one embodiment, the process of the present invention for producing beta-sitosterol in a non-human organism, like a microorganism or a plant or a part thereof, comprises increasing or generating the activity of a gene product with the activity of a gene product conferring the activity of “transcription factor”, especially from Arabidopsis thaliana or its functional equivalent or its homolog, e.g. the increase of
[67838] (a) a gene product of a gene comprising the nucleic acid molecule as shown in the respective line in column 5 of Table I (whereby the respective line disclose in column 7 the fine chemical beta-sitosterol), application no. 14, preferably the coding region thereof, or a homolog or a fragment thereof, and being depicted in the same respective line as said At1g68320, or a functional equivalent or a homolog thereof as shown in column 8 of Table I, application no. 14, preferably the coding region thereof, particularly a homolog or functional equivalent as shown in column 8 of Table I B, application no. 14, and being depicted in the same respective line as said At1g68320, and preferably the activity is increased non-targeted, or
[67839] (b) a polypeptide comprising a polypeptide, a consensus sequence or at least a polypeptide motif as shown in the respective line in column 5 of Table II or in column 8 of Table IV, application no. 14, respectively, and being depicted in the same respective line as said At1g68320, or a functional equivalent or a homolog thereof as depicted in column 8 of Table II, application no. 14, preferably a homolog or functional equivalent as depicted in column 8 of Table II B, application no. 14, and being depicted in the same respective line as said At1g68320, and preferably the activity is increased non-targeted, whereby the respective line disclose in column 7 the fine chemical beta-sitosterol.

[67840] Accordingly, in one embodiment, the molecule which activity is to be increased in the process of the invention is the gene product with an activity as a “transcription factor”, preferably it is the molecule of section (a) or (b) of this paragraph.

[67841] In particular, it was observed that in plants, especially in Arabidopsis thaliana, increasing or generating the activity of a gene product non-targeted with the activity of a “transcription factor”, preferably being encoded by a gene comprising the nucleic acid sequence SEQ ID NO. 1061, preferably the coding region thereof, conferred the production of or the increase in beta-sitosterol compared with the wild type control.

[67842] The nucleic acid sequence of At1g68320 from Arabidopsis thaliana, e.g. as shown in the respective line in column 5 of Table I, application no. 14, has been published in F. And the activity of the gene product thereof is the activity of transcription factor.

[67843] Accordingly, in one embodiment, the process of the present invention for producing campesterol in a non-human organism, like a microorganism or a plant or a part thereof, comprises increasing or generating the activity of a gene product with the activity of a gene product conferring the activity of “transcription factor”, especially from Arabidopsis thaliana or its functional equivalent or its homolog, e.g. the increase of
[67844] (a) a gene product of a gene comprising the nucleic acid molecule as shown in the respective line in column 5 of Table I (whereby the respective line disclose in column 7 the fine chemical campesterol), application no. 14, preferably the coding region thereof, or a homolog or a fragment thereof, and being depicted in the same respective line as said At1g68320, or a functional equivalent or a homolog thereof as shown in column 8 of Table I, application no. 14, preferably the coding region thereof, particularly a homolog or functional equivalent as shown in column 8 of Table I B, application no. 14, and being depicted in the same respective line as said At1g68320, and preferably the activity is increased non-targeted, or
[67845] (b) a polypeptide comprising a polypeptide, a consensus sequence or at least a polypeptide motif as shown in the respective line in column 5 of Table II or in column 8 of Table IV, application no. 14, respectively, and being depicted in the same respective line as said At1g68320, or a functional equivalent or a homolog thereof as depicted in column 8 of Table II, application no. 14, preferably a homolog or functional equivalent as depicted in column 8 of Table II B, application no. 14, and being depicted in the same respective line as said At1g68320, and preferably the activity is increased non-targeted, whereby the respective line disclose in column 7 the fine chemical campesterol.

[67846] Accordingly, in one embodiment, the molecule which activity is to be increased in the process of the invention is the gene product with an activity as a “transcription factor”, preferably it is the molecule of section (a) or (b) of this paragraph.

[67847] In particular, it was observed that in plants, especially in Arabidopsis thaliana, increasing or generating the activity of a gene product non-targeted with the activity of a “transcription factor”, preferably being encoded by a gene comprising the nucleic acid sequence SEQ ID NO. 1061, preferably the coding region thereof, conferred the production of or the increase in campesterol compared with the wild type control.

[67848] The nucleic acid sequence of At1g72770 from Arabidopsis thaliana, e.g. as shown in the respective line in column 5 of Table I, application no. 14, has been published in F. And the activity of the gene product thereof is the activity of protein phosphatase.

[67849] Accordingly, in one embodiment, the process of the present invention for producing campesterol in a non-human organism, like a microorganism or a plant or a part thereof, comprises increasing or generating the activity of a gene product with the activity of a gene product conferring the activity of “protein phosphatase”, especially from Arabidopsis thaliana or its functional equivalent or its homolog, e.g. the increase of
[67850] (a) a gene product of a gene comprising the nucleic acid molecule as shown in the respective line in column 5 of Table I (whereby the respective line disclose in column 7 the fine chemical campesterol), application no. 14, preferably the coding region thereof, or a homolog or a fragment thereof, and being depicted in the same respective line as said At1g72770, or a functional equivalent or a homolog thereof as shown in column 8 of Table I, application no. 14, preferably the coding region thereof, particularly a homolog or functional equivalent as shown in column 8 of Table I B, application no. 14, and being depicted in the same respective line as said At1g72770, and preferably the activity is increased non-targeted, or
[67851] (b) a polypeptide comprising a polypeptide, a consensus sequence or at least a polypeptide motif as shown in the respective line in column 5 of Table II or in column 8 of Table IV, application no. 14, respectively, and being depicted in the same respective line as said At1g72770, or a functional equivalent or a homolog thereof as depicted in column 8 of Table II, application no. 14, preferably a homolog or functional equivalent as depicted in column 8 of Table II B, application no. 14, and being depicted in the same respective line as said At1g72770, and preferably the activity is increased non-targeted, whereby the respective line disclose in column 7 the fine chemical campesterol.

[67852] Accordingly, in one embodiment, the molecule which activity is to be increased in the process of the invention is the gene product with an activity as a “protein phosphatase”, preferably it is the molecule of section (a) or (b) of this paragraph.

[67853] In particular, it was observed that in plants, especially in Arabidopsis thaliana, increasing or generating the activity of a gene product non-targeted with the activity of a “protein phosphatase”, preferably being encoded by a gene comprising the nucleic acid sequence SEQ ID NO. 19419, preferably the coding region thereof, conferred the production of or the increase in campesterol compared with the wild type control.

[67854] The nucleic acid sequence of At3g04710 from Arabidopsis thaliana, e.g. as shown in the respective line in column 5 of Table I, application no. 14, has been published in F. And the activity of the gene product thereof is the activity of ankyrin repeat family protein.

[67855] Accordingly, in one embodiment, the process of the present invention for producing campesterol in a non-human organism, like a microorganism or a plant or a part thereof, comprises increasing or generating the activity of a gene product with the activity of a gene product conferring the activity of “ankyrin repeat family protein”, especially from Arabidopsis thaliana or its functional equivalent or its homolog, e.g. the increase of
[67856] (a) a gene product of a gene comprising the nucleic acid molecule as shown in the respective line in column 5 of Table I (whereby the respective line disclose in column 7 the fine chemical campesterol), application no. 14, preferably the coding region thereof, or a homolog or a fragment thereof, and being depicted in the same respective line as said At3g04710, or a functional equivalent or a homolog thereof as shown in column 8 of Table I, application no. 14, preferably the coding region thereof, particularly a homolog or functional equivalent as shown in column 8 of Table I B, application no. 14, and being depicted in the same respective line as said At3g04710, and preferably the activity is increased non-targeted, or
[67857] (b) a polypeptide comprising a polypeptide, a consensus sequence or at least a polypeptide motif as shown in the respective line in column 5 of Table II or in column 8 of Table IV, application no. 14, respectively, and being depicted in the same respective line as said At3g04710, or a functional equivalent or a homolog thereof as depicted in column 8 of Table II, application no. 14, preferably a homolog or functional equivalent as depicted in column 8 of Table II B, application no. 14, and being depicted in the same respective line as said At3g04710, and preferably the activity is increased non-targeted, whereby the respective line disclose in column 7 the fine chemical campesterol.

[67858] Accordingly, in one embodiment, the molecule which activity is to be increased in the process of the invention is the gene product with an activity as a “ankyrin repeat family protein”, preferably it is the molecule of section (a) or (b) of this paragraph.

[67859] In particular, it was observed that in plants, especially in Arabidopsis thaliana, increasing or generating the activity of a gene product non-targeted with the activity of a “ankyrin repeat family protein”, preferably being encoded by a gene comprising the nucleic acid sequence SEQ ID NO. 21902, preferably the coding region thereof, conferred the production of or the increase in campesterol compared with the wild type control.

[67860] The nucleic acid sequence of At4g09960 from Arabidopsis thaliana, e.g. as shown in the respective line in column 5 of Table I, application no. 14, has been published in F. And the activity of the gene product thereof is the activity of transcription factor.

[67861] Accordingly, in one embodiment, the process of the present invention for producing beta-sitosterol in a non-human organism, like a microorganism or a plant or a part thereof, comprises increasing or generating the activity of a gene product with the activity of a gene product conferring the activity of “transcription factor”, especially from Arabidopsis thaliana or its functional equivalent or its homolog, e.g. the increase of
[67862] (a) a gene product of a gene comprising the nucleic acid molecule as shown in the respective line in column 5 of Table I (whereby the respective line disclose in column 7 the fine chemical beta-sitosterol), application no. 14, preferably the coding region thereof, or a homolog or a fragment thereof, and being depicted in the same respective line as said At4g09960, or a functional equivalent or a homolog thereof as shown in column 8 of Table I, application no. 14, preferably the coding region thereof, particularly a homolog or functional equivalent as shown in column 8 of Table I B, application no. 14, and being depicted in the same respective line as said At4g09960, and preferably the activity is increased non-targeted, or
[67863] (b) a polypeptide comprising a polypeptide, a consensus sequence or at least a polypeptide motif as shown in the respective line in column 5 of Table II or in column 8 of Table IV, application no. 14, respectively, and being depicted in the same respective line as said At4g09960, or a functional equivalent or a homolog thereof as depicted in column 8 of Table II, application no. 14, preferably a homolog or functional equivalent as depicted in column 8 of Table II B, application no. 14, and being depicted in the same respective line as said At4g09960, and preferably the activity is increased non-targeted, whereby the respective line disclose in column 7 the fine chemical beta-sitosterol.

[67864] Accordingly, in one embodiment, the molecule which activity is to be increased in the process of the invention is the gene product with an activity as a “transcription factor”, preferably it is the molecule of section (a) or (b) of this paragraph.

[67865] In particular, it was observed that in plants, especially in Arabidopsis thaliana, increasing or generating the activity of a gene product non-targeted with the activity of a “transcription factor”, preferably being encoded by a gene comprising the nucleic acid sequence SEQ ID NO. 109717, preferably the coding region thereof, conferred the production of or the increase in beta-sitosterol compared with the wild type control.

[67866] The nucleic acid sequence of At4g09960 from Arabidopsis thaliana, e.g. as shown in the respective line in column 5 of Table I, application no. 14, has been published in F. And the activity of the gene product thereof is the activity of transcription factor.

[67867] Accordingly, in one embodiment, the process of the present invention for producing campesterol in a non-human organism, like a microorganism or a plant or a part thereof, comprises increasing or generating the activity of a gene product with the activity of a gene product conferring the activity of “transcription factor”, especially from Arabidopsis thaliana or its functional equivalent or its homolog, e.g. the increase of
[67868] (a) a gene product of a gene comprising the nucleic acid molecule as shown in the respective line in column 5 of Table I (whereby the respective line disclose in column 7 the fine chemical campesterol), application no. 14, preferably the coding region thereof, or a homolog or a fragment thereof, and being depicted in the same respective line as said At4g09960, or a functional equivalent or a homolog thereof as shown in column 8 of Table I, application no. 14, preferably the coding region thereof, particularly a homolog or functional equivalent as shown in column 8 of Table I B, application no. 14, and being depicted in the same respective line as said At4g09960, and preferably the activity is increased non-targeted, or
[67869] (b) a polypeptide comprising a polypeptide, a consensus sequence or at least a polypeptide motif as shown in the respective line in column 5 of Table II or in column 8 of Table IV, application no. 14, respectively, and being depicted in the same respective line as said At4g09960, or a functional equivalent or a homolog thereof as depicted in column 8 of Table II, application no. 14, preferably a homolog or functional equivalent as depicted in column 8 of Table II B, application no. 14, and being depicted in the same respective line as said At4g09960, and preferably the activity is increased non-targeted, whereby the respective line disclose in column 7 the fine chemical campesterol.

[67870] Accordingly, in one embodiment, the molecule which activity is to be increased in the process of the invention is the gene product with an activity as a “transcription factor”, preferably it is the molecule of section (a) or (b) of this paragraph.

[67871] In particular, it was observed that in plants, especially in Arabidopsis thaliana, increasing or generating the activity of a gene product non-targeted with the activity of a “transcription factor”, preferably being encoded by a gene comprising the nucleic acid sequence SEQ ID NO. 109717, preferably the coding region thereof, conferred the production of or the increase in campesterol compared with the wild type control.

[67872] The nucleic acid sequence of At4g12110 from Arabidopsis thaliana, e.g. as shown in the respective line in column 5 of Table I, application no. 14, has been published in F. And the activity of the gene product thereof is the activity of sterol desaturase.

[67873] Accordingly, in one embodiment, the process of the present invention for producing campesterol in a non-human organism, like a microorganism or a plant or a part thereof, comprises increasing or generating the activity of a gene product with the activity of a gene product conferring the activity of “sterol desaturase”, especially from Arabidopsis thaliana or its functional equivalent or its homolog, e.g. the increase of
[67874] (a) a gene product of a gene comprising the nucleic acid molecule as shown in the respective line in column 5 of Table I (whereby the respective line disclose in column 7 the fine chemical campesterol), application no. 14, preferably the coding region thereof, or a homolog or a fragment thereof, and being depicted in the same respective line as said At4g12110, or a functional equivalent or a homolog thereof as shown in column 8 of Table I, application no. 14, preferably the coding region thereof, particularly a homolog or functional equivalent as shown in column 8 of Table I B, application no. 14, and being depicted in the same respective line as said At4g12110, and preferably the activity is increased non-targeted, or
[67875] (b) a polypeptide comprising a polypeptide, a consensus sequence or at least a polypeptide motif as shown in the respective line in column 5 of Table II or in column 8 of Table IV, application no. 14, respectively, and being depicted in the same respective line as said At4g12110, or a functional equivalent or a homolog thereof as depicted in column 8 of Table II, application no. 14, preferably a homolog or functional equivalent as depicted in column 8 of Table II B, application no. 14, and being depicted in the same respective line as said At4g12110, and preferably the activity is increased non-targeted, whereby the respective line disclose in column 7 the fine chemical campesterol.

[67876] Accordingly, in one embodiment, the molecule which activity is to be increased in the process of the invention is the gene product with an activity as a “sterol desaturase”, preferably it is the molecule of section (a) or (b) of this paragraph.

[67877] In particular, it was observed that in plants, especially in Arabidopsis thaliana, increasing or generating the activity of a gene product non-targeted with the activity of a “sterol desaturase”, preferably being encoded by a gene comprising the nucleic acid sequence SEQ ID NO. 131208, preferably the coding region thereof, conferred the production of or the increase in campesterol compared with the wild type control.

[67878] The nucleic acid sequence of At4g15660 from Arabidopsis thaliana, e.g. as shown in the respective line in column 5 of Table I, application no. 14, has been published in F. And the activity of the gene product thereof is the activity of monothiol glutaredoxin.

[67879] Accordingly, in one embodiment, the process of the present invention for producing beta-sitosterol in a non-human organism, like a microorganism or a plant or a part thereof, comprises increasing or generating the activity of a gene product with the activity of a gene product conferring the activity of “monothiol glutaredoxin”, especially from Arabidopsis thaliana or its functional equivalent or its homolog, e.g. the increase of
[67880] (a) a gene product of a gene comprising the nucleic acid molecule as shown in the respective line in column 5 of Table I (whereby the respective line disclose in column 7 the fine chemical beta-sitosterol), application no. 14, preferably the coding region thereof, or a homolog or a fragment thereof, and being depicted in the same respective line as said At4g15660, or a functional equivalent or a homolog thereof as shown in column 8 of Table I, application no. 14, preferably the coding region thereof, particularly a homolog or functional equivalent as shown in column 8 of Table I B, application no. 14, and being depicted in the same respective line as said At4g15660, and preferably the activity is increased non-targeted, or
[67881] (b) a polypeptide comprising a polypeptide, a consensus sequence or at least a polypeptide motif as shown in the respective line in column 5 of Table II or in column 8 of Table IV, application no. 14, respectively, and being depicted in the same respective line as said At4g15660, or a functional equivalent or a homolog thereof as depicted in column 8 of Table II, application no. 14, preferably a homolog or functional equivalent as depicted in column 8 of Table II B, application no. 14, and being depicted in the same respective line as said At4g15660, and preferably the activity is increased non-targeted, whereby the respective line disclose in column 7 the fine chemical beta-sitosterol.

[67882] Accordingly, in one embodiment, the molecule which activity is to be increased in the process of the invention is the gene product with an activity as a “monothiol glutaredoxin”, preferably it is the molecule of section (a) or (b) of this paragraph.

[67883] In particular, it was observed that in plants, especially in Arabidopsis thaliana, increasing or generating the activity of a gene product non-targeted with the activity of a “monothiol glutaredoxin”, preferably being encoded by a gene comprising the nucleic acid sequence SEQ ID NO. 23482, preferably the coding region thereof, conferred the production of or the increase in beta-sitosterol compared with the wild type control.

[67884] The nucleic acid sequence of At4g26080 from Arabidopsis thaliana, e.g. as shown in the respective line in column 5 of Table I, application no. 14, has been published in F. And the activity of the gene product thereof is the activity of protein phosphatase.

[67885] Accordingly, in one embodiment, the process of the present invention for producing campesterol in a non-human organism, like a microorganism or a plant or a part thereof, comprises increasing or generating the activity of a gene product with the activity of a gene product conferring the activity of “protein phosphatase”, especially from Arabidopsis thaliana or its functional equivalent or its homolog, e.g. the increase of
[67886] (a) a gene product of a gene comprising the nucleic acid molecule as shown in the respective line in column 5 of Table I (whereby the respective line disclose in column 7 the fine chemical campesterol), application no. 14, preferably the coding region thereof, or a homolog or a fragment thereof, and being depicted in the same respective line as said At4g26080, or a functional equivalent or a homolog thereof as shown in column 8 of Table I, application no. 14, preferably the coding region thereof, particularly a homolog or functional equivalent as shown in column 8 of Table I B, application no. 14, and being depicted in the same respective line as said At4g26080, and preferably the activity is increased non-targeted, or
[67887] (b) a polypeptide comprising a polypeptide, a consensus sequence or at least a polypeptide motif as shown in the respective line in column 5 of Table II or in column 8 of Table IV, application no. 14, respectively, and being depicted in the same respective line as said At4g26080, or a functional equivalent or a homolog thereof as depicted in column 8 of Table II, application no. 14, preferably a homolog or functional equivalent as depicted in column 8 of Table II B, application no. 14, and being depicted in the same respective line as said At4g26080, and preferably the activity is increased non-targeted, whereby the respective line disclose in column 7 the fine chemical campesterol.

[67888] Accordingly, in one embodiment, the molecule which activity is to be increased in the process of the invention is the gene product with an activity as a “protein phosphatase”, preferably it is the molecule of section (a) or (b) of this paragraph.

[67889] In particular, it was observed that in plants, especially in Arabidopsis thaliana, increasing or generating the activity of a gene product non-targeted with the activity of a “protein phosphatase”, preferably being encoded by a gene comprising the nucleic acid sequence SEQ ID NO. 68849, preferably the coding region thereof, conferred the production of or the increase in campesterol compared with the wild type control.

[67890] The nucleic acid sequence of At4g35310 from Arabidopsis thaliana, e.g. as shown in the respective line in column 5 of Table I, application no. 14, has been published in F. And the activity of the gene product thereof is the activity of calcium-dependent protein kinase.

[67891] Accordingly, in one embodiment, the process of the present invention for producing beta-sitosterol in a non-human organism, like a microorganism or a plant or a part thereof, comprises increasing or generating the activity of a gene product with the activity of a gene product conferring the activity of “calcium-dependent protein kinase”, especially from Arabidopsis thaliana or its functional equivalent or its homolog, e.g. the increase of
[67892] (a) a gene product of a gene comprising the nucleic acid molecule as shown in the respective line in column 5 of Table I (whereby the respective line disclose in column 7 the fine chemical beta-sitosterol), application no. 14, preferably the coding region thereof, or a homolog or a fragment thereof, and being depicted in the same respective line as said At4g35310, or a functional equivalent or a homolog thereof as shown in column 8 of Table I, application no. 14, preferably the coding region thereof, particularly a homolog or functional equivalent as shown in column 8 of Table I B, application no. 14, and being depicted in the same respective line as said At4g35310, and preferably the activity is increased non-targeted, or
[67893] (b) a polypeptide comprising a polypeptide, a consensus sequence or at least a polypeptide motif as shown in the respective line in column 5 of Table II or in column 8 of Table IV, application no. 14, respectively, and being depicted in the same respective line as said At4g35310, or a functional equivalent or a homolog thereof as depicted in column 8 of Table II, application no. 14, preferably a homolog or functional equivalent as depicted in column 8 of Table II B, application no. 14, and being depicted in the same respective line as said At4g35310, and preferably the activity is increased non-targeted, whereby the respective line disclose in column 7 the fine chemical beta-sitosterol.

[67894] Accordingly, in one embodiment, the molecule which activity is to be increased in the process of the invention is the gene product with an activity as a “calcium-dependent protein kinase”, preferably it is the molecule of section (a) or (b) of this paragraph.

[67895] In particular, it was observed that in plants, especially in Arabidopsis thaliana, increasing or generating the activity of a gene product non-targeted with the activity of a “calcium-dependent protein kinase”, preferably being encoded by a gene comprising the nucleic acid sequence SEQ ID NO. 4348, preferably the coding region thereof, conferred the production of or the increase in beta-sitosterol compared with the wild type control.

[67896] The nucleic acid sequence of At4g35310 from Arabidopsis thaliana, e.g. as shown in the respective line in column 5 of Table I, application no. 14, has been published in F. And the activity of the gene product thereof is the activity of calcium-dependent protein kinase.

[67897] Accordingly, in one embodiment, the process of the present invention for producing campesterol in a non-human organism, like a microorganism or a plant or a part thereof, comprises increasing or generating the activity of a gene product with the activity of a gene product conferring the activity of “calcium-dependent protein kinase”, especially from Arabidopsis thaliana or its functional equivalent or its homolog, e.g. the increase of
[67898] (a) a gene product of a gene comprising the nucleic acid molecule as shown in the respective line in column 5 of Table I (whereby the respective line disclose in column 7 the fine chemical campesterol), application no. 14, preferably the coding region thereof, or a homolog or a fragment thereof, and being depicted in the same respective line as said At4g35310, or a functional equivalent or a homolog thereof as shown in column 8 of Table I, application no. 14, preferably the coding region thereof, particularly a homolog or functional equivalent as shown in column 8 of Table I B, application no. 14, and being depicted in the same respective line as said At4g35310, and preferably the activity is increased non-targeted, or
[67899] (b) a polypeptide comprising a polypeptide, a consensus sequence or at least a polypeptide motif as shown in the respective line in column 5 of Table II or in column 8 of Table IV, application no. 14, respectively, and being depicted in the same respective line as said At4g35310, or a functional equivalent or a homolog thereof as depicted in column 8 of Table II, application no. 14, preferably a homolog or functional equivalent as depicted in column 8 of Table II B, application no. 14, and being depicted in the same respective line as said At4g35310, and preferably the activity is increased non-targeted, whereby the respective line disclose in column 7 the fine chemical campesterol.

[67900] Accordingly, in one embodiment, the molecule which activity is to be increased in the process of the invention is the gene product with an activity as a “calcium-dependent protein kinase”, preferably it is the molecule of section (a) or (b) of this paragraph.

[67901] In particular, it was observed that in plants, especially in Arabidopsis thaliana, increasing or generating the activity of a gene product non-targeted with the activity of a “calcium-dependent protein kinase”, preferably being encoded by a gene comprising the nucleic acid sequence SEQ ID NO. 4348, preferably the coding region thereof, conferred the production of or the increase in campesterol compared with the wild type control.

[67902] The nucleic acid sequence of At5g57050 from Arabidopsis thaliana, e.g. as shown in the respective line in column 5 of Table I, application no. 14, has been published in F. And the activity of the gene product thereof is the activity of protein phosphatase.

[67903] Accordingly, in one embodiment, the process of the present invention for producing campesterol in a non-human organism, like a microorganism or a plant or a part thereof, comprises increasing or generating the activity of a gene product with the activity of a gene product conferring the activity of “protein phosphatase”, especially from Arabidopsis thaliana or its functional equivalent or its homolog, e.g. the increase of
[67904] (a) a gene product of a gene comprising the nucleic acid molecule as shown in the respective line in column 5 of Table I (whereby the respective line disclose in column 7 the fine chemical campesterol), application no. 14, preferably the coding region thereof, or a homolog or a fragment thereof, and being depicted in the same respective line as said At5g57050, or a functional equivalent or a homolog thereof as shown in column 8 of Table I, application no. 14, preferably the coding region thereof, particularly a homolog or functional equivalent as shown in column 8 of Table I B, application no. 14, and being depicted in the same respective line as said At5g57050, and preferably the activity is increased non-targeted, or
[67905] (b) a polypeptide comprising a polypeptide, a consensus sequence or at least a polypeptide motif as shown in the respective line in column 5 of Table II or in column 8 of Table IV, application no. 14, respectively, and being depicted in the same respective line as said At5g57050, or a functional equivalent or a homolog thereof as depicted in column 8 of Table II, application no. 14, preferably a homolog or functional equivalent as depicted in column 8 of Table II B, application no. 14, and being depicted in the same respective line as said At5g57050, and preferably the activity is increased non-targeted, whereby the respective line disclose in column 7 the fine chemical campesterol.

[67906] Accordingly, in one embodiment, the molecule which activity is to be increased in the process of the invention is the gene product with an activity as a “protein phosphatase”, preferably it is the molecule of section (a) or (b) of this paragraph.

[67907] In particular, it was observed that in plants, especially in Arabidopsis thaliana, increasing or generating the activity of a gene product non-targeted with the activity of a “protein phosphatase”, preferably being encoded by a gene comprising the nucleic acid sequence SEQ ID NO. 5318, preferably the coding region thereof, conferred the production of or the increase in campesterol compared with the wild type control.

[67908] The nucleic acid sequence of At5g59220 from Arabidopsis thaliana, e.g. as shown in the respective line in column 5 of Table I, application no. 14, has been published in F. And the activity of the gene product thereof is the activity of protein phosphatase.

[67909] Accordingly, in one embodiment, the process of the present invention for producing beta-sitosterol in a non-human organism, like a microorganism or a plant or a part thereof, comprises increasing or generating the activity of a gene product with the activity of a gene product conferring the activity of “protein phosphatase”, especially from Arabidopsis thaliana or its functional equivalent or its homolog, e.g. the increase of
[67910] (a) a gene product of a gene comprising the nucleic acid molecule as shown in the respective line in column 5 of Table I (whereby the respective line disclose in column 7 the fine chemical beta-sitosterol), application no. 14, preferably the coding region thereof, or a homolog or a fragment thereof, and being depicted in the same respective line as said At5g59220, or a functional equivalent or a homolog thereof as shown in column 8 of Table I, application no. 14, preferably the coding region thereof, particularly a homolog or functional equivalent as shown in column 8 of Table I B, application no. 14, and being depicted in the same respective line as said At5g59220, and preferably the activity is increased non-targeted, or
[67911] (b) a polypeptide comprising a polypeptide, a consensus sequence or at least a polypeptide motif as shown in the respective line in column 5 of Table II or in column 8 of Table IV, application no. 14, respectively, and being depicted in the same respective line as said At5g59220, or a functional equivalent or a homolog thereof as depicted in column 8 of Table II, application no. 14, preferably a homolog or functional equivalent as depicted in column 8 of Table II B, application no. 14, and being depicted in the same respective line as said At5g59220, and preferably the activity is increased non-targeted, whereby the respective line disclose in column 7 the fine chemical beta-sitosterol.

[67912] Accordingly, in one embodiment, the molecule which activity is to be increased in the process of the invention is the gene product with an activity as a “protein phosphatase”, preferably it is the molecule of section (a) or (b) of this paragraph.

[67913] In particular, it was observed that in plants, especially in Arabidopsis thaliana, increasing or generating the activity of a gene product non-targeted with the activity of a “protein phosphatase”, preferably being encoded by a gene comprising the nucleic acid sequence SEQ ID NO. 25498, preferably the coding region thereof, conferred the production of or the increase in beta-sitosterol compared with the wild type control.

[67914] The nucleic acid sequence of At5g66710 from Arabidopsis thaliana, e.g. as shown in the respective line in column 5 of Table I, application no. 14, has been published in F. And the activity of the gene product thereof is the activity of protein kinase.

[67915] Accordingly, in one embodiment, the process of the present invention for producing beta-sitosterol in a non-human organism, like a microorganism or a plant or a part thereof, comprises increasing or generating the activity of a gene product with the activity of a gene product conferring the activity of “protein kinase”, especially from Arabidopsis thaliana or its functional equivalent or its homolog, e.g. the increase of
[67916] (a) a gene product of a gene comprising the nucleic acid molecule as shown in the respective line in column 5 of Table I (whereby the respective line disclose in column 7 the fine chemical beta-sitosterol), application no. 14, preferably the coding region thereof, or a homolog or a fragment thereof, and being depicted in the same respective line as said At5g66710, or a functional equivalent or a homolog thereof as shown in column 8 of Table I, application no. 14, preferably the coding region thereof, particularly a homolog or functional equivalent as shown in column 8 of Table I B, application no. 14, and being depicted in the same respective line as said At5g66710, and preferably the activity is increased non-targeted, or
[67917] (b) a polypeptide comprising a polypeptide, a consensus sequence or at least a polypeptide motif as shown in the respective line in column 5 of Table II or in column 8 of Table IV, application no. 14, respectively, and being depicted in the same respective line as said At5g66710, or a functional equivalent or a homolog thereof as depicted in column 8 of Table II, application no. 14, preferably a homolog or functional equivalent as depicted in column 8 of Table II B, application no. 14, and being depicted in the same respective line as said At5g66710, and preferably the activity is increased non-targeted, whereby the respective line disclose in column 7 the fine chemical beta-sitosterol.

[67918] Accordingly, in one embodiment, the molecule which activity is to be increased in the process of the invention is the gene product with an activity as a “protein kinase”, preferably it is the molecule of section (a) or (b) of this paragraph.

[67919] In particular, it was observed that in plants, especially in Arabidopsis thaliana, increasing or generating the activity of a gene product non-targeted with the activity of a “protein kinase”, preferably being encoded by a gene comprising the nucleic acid sequence SEQ ID NO. 122803, preferably the coding region thereof, conferred the production of or the increase in beta-sitosterol compared with the wild type control.

[67920] The nucleic acid sequence of AvinDRAFT_{—}1624 from Azotobacter vinelandii, e.g. as shown in the respective line in column 5 of Table I, application no. 14, has been published in D. And the activity of the gene product thereof is the activity of sec-independent protein translocase.

[67921] Accordingly, in one embodiment, the process of the present invention for producing beta-sitosterol in a non-human organism, like a microorganism or a plant or a part thereof, comprises increasing or generating the activity of a gene product with the activity of a gene product conferring the activity of “sec-independent protein translocase”, especially from Azotobacter vinelandii or its functional equivalent or its homolog, e.g. the increase of
[67922] (a) a gene product of a gene comprising the nucleic acid molecule as shown in the respective line in column 5 of Table I (whereby the respective line disclose in column 7 the fine chemical beta-sitosterol), application no. 14, preferably the coding region thereof, or a homolog or a fragment thereof, and being depicted in the same respective line as said AvinDRAFT_{—}1624, or a functional equivalent or a homolog thereof as shown in column 8 of Table I, application no. 14, preferably the coding region thereof, particularly a homolog or functional equivalent as shown in column 8 of Table I B, application no. 14, and being depicted in the same respective line as said AvinDRAFT_{—}1624, and preferably the activity is increased non-targeted, or
[67923] (b) a polypeptide comprising a polypeptide, a consensus sequence or at least a polypeptide motif as shown in the respective line in column 5 of Table II or in column 8 of Table IV, application no. 14, respectively, and being depicted in the same respective line as said AvinDRAFT_{—}1624, or a functional equivalent or a homolog thereof as depicted in column 8 of Table II, application no. 14, preferably a homolog or functional equivalent as depicted in column 8 of Table II B, application no. 14, and being depicted in the same respective line as said AvinDRAFT_{—}1624, and preferably the activity is increased non-targeted, whereby the respective line disclose in column 7 the fine chemical beta-sitosterol.

[67924] Accordingly, in one embodiment, the molecule which activity is to be increased in the process of the invention is the gene product with an activity as a “sec-independent protein translocase”, preferably it is the molecule of section (a) or (b) of this paragraph.

[67925] In particular, it was observed that in plants, especially in Arabidopsis thaliana, increasing or generating the activity of a gene product non-targeted with the activity of a “sec-independent protein translocase”, preferably being encoded by a gene comprising the nucleic acid sequence SEQ ID NO. 26196, preferably the coding region thereof, conferred the production of or the increase in beta-sitosterol compared with the wild type control.

[67926] The nucleic acid sequence of AvinDRAFT_{—}3028 from Azotobacter vinelandii, e.g. as shown in the respective line in column 5 of Table I, application no. 14, has been published in D. And the activity of the gene product thereof is the activity of 2-oxoglutarate dehydrogenase E1 subunit.

[67927] Accordingly, in one embodiment, the process of the present invention for producing campesterol in a non-human organism, like a microorganism or a plant or a part thereof, comprises increasing or generating the activity of a gene product with the activity of a gene product conferring the activity of “2-oxoglutarate dehydrogenase E1 subunit”, especially from Azotobacter vinelandii or its functional equivalent or its homolog, e.g. the increase of
[67928] (a) a gene product of a gene comprising the nucleic acid molecule as shown in the respective line in column 5 of Table I (whereby the respective line disclose in column 7 the fine chemical campesterol), application no. 14, preferably the coding region thereof, or a homolog or a fragment thereof, and being depicted in the same respective line as said AvinDRAFT_{—}3028, or a functional equivalent or a homolog thereof as shown in column 8 of Table I, application no. 14, preferably the coding region thereof, particularly a homolog or functional equivalent as shown in column 8 of Table I B, application no. 14, and being depicted in the same respective line as said AvinDRAFT_{—}3028, and preferably the activity is increased non-targeted, or
[67929] (b) a polypeptide comprising a polypeptide, a consensus sequence or at least a polypeptide motif as shown in the respective line in column 5 of Table II or in column 8 of Table IV, application no. 14, respectively, and being depicted in the same respective line as said AvinDRAFT_{—}3028, or a functional equivalent or a homolog thereof as depicted in column 8 of Table II, application no. 14, preferably a homolog or functional equivalent as depicted in column 8 of Table II B, application no. 14, and being depicted in the same respective line as said AvinDRAFT_{—}3028, and preferably the activity is increased non-targeted, whereby the respective line disclose in column 7 the fine chemical campesterol.

[67930] Accordingly, in one embodiment, the molecule which activity is to be increased in the process of the invention is the gene product with an activity as a “2-oxoglutarate dehydrogenase E1 subunit”, preferably it is the molecule of section (a) or (b) of this paragraph.

[67931] In particular, it was observed that in plants, especially in Arabidopsis thaliana, increasing or generating the activity of a gene product non-targeted with the activity of a “2-oxoglutarate dehydrogenase E1 subunit”, preferably being encoded by a gene comprising the nucleic acid sequence SEQ ID NO. 6075, preferably the coding region thereof, conferred the production of or the increase in campesterol compared with the wild type control.

[67932] The nucleic acid sequence of AvinDRAFT_{—}3253 from Azotobacter vinelandii, e.g. as shown in the respective line in column 5 of Table I, application no. 14, has been published in D. And the activity of the gene product thereof is the activity of oxidoreductase.

[67933] Accordingly, in one embodiment, the process of the present invention for producing campesterol in a non-human organism, like a microorganism or a plant or a part thereof, comprises increasing or generating the activity of a gene product with the activity of a gene product conferring the activity of “oxidoreductase”, especially from Azotobacter vinelandii or its functional equivalent or its homolog, e.g. the increase of
[67934] (a) a gene product of a gene comprising the nucleic acid molecule as shown in the respective line in column 5 of Table I (whereby the respective line disclose in column 7 the fine chemical campesterol), application no. 14, preferably the coding region thereof, or a homolog or a fragment thereof, and being depicted in the same respective line as said AvinDRAFT_{—}3253, or a functional equivalent or a homolog thereof as shown in column 8 of Table I, application no. 14, preferably the coding region thereof, particularly a homolog or functional equivalent as shown in column 8 of Table I B, application no. 14, and being depicted in the same respective line as said AvinDRAFT_{—}3253, and preferably the activity is increased non-targeted, or
[67935] (b) a polypeptide comprising a polypeptide, a consensus sequence or at least a polypeptide motif as shown in the respective line in column 5 of Table II or in column 8 of Table IV, application no. 14, respectively, and being depicted in the same respective line as said AvinDRAFT_{—}3253, or a functional equivalent or a homolog thereof as depicted in column 8 of Table II, application no. 14, preferably a homolog or functional equivalent as depicted in column 8 of Table II B, application no. 14, and being depicted in the same respective line as said AvinDRAFT_{—}3253, and preferably the activity is increased non-targeted, whereby the respective line disclose in column 7 the fine chemical campesterol.

[67936] Accordingly, in one embodiment, the molecule which activity is to be increased in the process of the invention is the gene product with an activity as a “oxidoreductase”, preferably it is the molecule of section (a) or (b) of this paragraph.

[67937] In particular, it was observed that in plants, especially in Arabidopsis thaliana, increasing or generating the activity of a gene product non-targeted with the activity of a “oxidoreductase”, preferably being encoded by a gene comprising the nucleic acid sequence SEQ ID NO. 29500, preferably the coding region thereof, conferred the production of or the increase in campesterol compared with the wild type control.

[67938] The nucleic acid sequence of AvinDRAFT_{—}3605 from Azotobacter vinelandii, e.g. as shown in the respective line in column 5 of Table I, application no. 14, has been published in D. And the activity of the gene product thereof is the activity of CTP synthase.

[67939] Accordingly, in one embodiment, the process of the present invention for producing beta-sitosterol in a non-human organism, like a microorganism or a plant or a part thereof, comprises increasing or generating the activity of a gene product with the activity of a gene product conferring the activity of “CTP synthase”, especially from Azotobacter vinelandii or its functional equivalent or its homolog, e.g. the increase of
[67940] (a) a gene product of a gene comprising the nucleic acid molecule as shown in the respective line in column 5 of Table I (whereby the respective line disclose in column 7 the fine chemical beta-sitosterol), application no. 14, preferably the coding region thereof, or a homolog or a fragment thereof, and being depicted in the same respective line as said AvinDRAFT_{—}3605, or a functional equivalent or a homolog thereof as shown in column 8 of Table I, application no. 14, preferably the coding region thereof, particularly a homolog or functional equivalent as shown in column 8 of Table I B, application no. 14, and being depicted in the same respective line as said AvinDRAFT_{—}3605, and preferably the activity is increased non-targeted, or
[67941] (b) a polypeptide comprising a polypeptide, a consensus sequence or at least a polypeptide motif as shown in the respective line in column 5 of Table II or in column 8 of Table IV, application no. 14, respectively, and being depicted in the same respective line as said AvinDRAFT_{—}3605, or a functional equivalent or a homolog thereof as depicted in column 8 of Table II, application no. 14, preferably a homolog or functional equivalent as depicted in column 8 of Table II B, application no. 14, and being depicted in the same respective line as said AvinDRAFT_{—}3605, and preferably the activity is increased non-targeted, whereby the respective line disclose in column 7 the fine chemical beta-sitosterol.

[67942] Accordingly, in one embodiment, the molecule which activity is to be increased in the process of the invention is the gene product with an activity as a “CTP synthase”, preferably it is the molecule of section (a) or (b) of this paragraph.

[67943] In particular, it was observed that in plants, especially in Arabidopsis thaliana, increasing or generating the activity of a gene product non-targeted with the activity of a “CTP synthase”, preferably being encoded by a gene comprising the nucleic acid sequence SEQ ID NO. 31026, preferably the coding region thereof, conferred the production of or the increase in beta-sitosterol compared with the wild type control.

[67944] The nucleic acid sequence of AvinDRAFT_{—}3605 from Azotobacter vinelandii, e.g. as shown in the respective line in column 5 of Table I, application no. 14, has been published in D. And the activity of the gene product thereof is the activity of CTP synthase.

[67945] Accordingly, in one embodiment, the process of the present invention for producing campesterol in a non-human organism, like a microorganism or a plant or a part thereof, comprises increasing or generating the activity of a gene product with the activity of a gene product conferring the activity of “CTP synthase”, especially from Azotobacter vinelandii or its functional equivalent or its homolog, e.g. the increase of
[67946] (a) a gene product of a gene comprising the nucleic acid molecule as shown in the respective line in column 5 of Table I (whereby the respective line disclose in column 7 the fine chemical campesterol), application no. 14, preferably the coding region thereof, or a homolog or a fragment thereof, and being depicted in the same respective line as said AvinDRAFT_{—}3605, or a functional equivalent or a homolog thereof as shown in column 8 of Table I, application no. 14, preferably the coding region thereof, particularly a homolog or functional equivalent as shown in column 8 of Table I B, application no. 14, and being depicted in the same respective line as said AvinDRAFT_{—}3605, and preferably the activity is increased non-targeted, or
[67947] (b) a polypeptide comprising a polypeptide, a consensus sequence or at least a polypeptide motif as shown in the respective line in column 5 of Table II or in column 8 of Table IV, application no. 14, respectively, and being depicted in the same respective line as said AvinDRAFT_{—}3605, or a functional equivalent or a homolog thereof as depicted in column 8 of Table II, application no. 14, preferably a homolog or functional equivalent as depicted in column 8 of Table II B, application no. 14, and being depicted in the same respective line as said AvinDRAFT_{—}3605, and preferably the activity is increased non-targeted, whereby the respective line disclose in column 7 the fine chemical campesterol.

[67948] Accordingly, in one embodiment, the molecule which activity is to be increased in the process of the invention is the gene product with an activity as a “CTP synthase”, preferably it is the molecule of section (a) or (b) of this paragraph.

[67949] In particular, it was observed that in plants, especially in Arabidopsis thaliana, increasing or generating the activity of a gene product non-targeted with the activity of a “CTP synthase”, preferably being encoded by a gene comprising the nucleic acid sequence SEQ ID NO. 31026, preferably the coding region thereof, conferred the production of or the increase in campesterol compared with the wild type control.

[67950] The nucleic acid sequence of AvinDRAFT_{—}3629 from Azotobacter vinelandii, e.g. as shown in the respective line in column 5 of Table I, application no. 14, has been published in D. And the activity of the gene product thereof is the activity of recombinase A.

[67951] Accordingly, in one embodiment, the process of the present invention for producing campesterol in a non-human organism, like a microorganism or a plant or a part thereof, comprises increasing or generating the activity of a gene product with the activity of a gene product conferring the activity of “recombinase A”, especially from Azotobacter vinelandii or its functional equivalent or its homolog, e.g. the increase of
[67952] (a) a gene product of a gene comprising the nucleic acid molecule as shown in the respective line in column 5 of Table I (whereby the respective line disclose in column 7 the fine chemical campesterol), application no. 14, preferably the coding region thereof, or a homolog or a fragment thereof, and being depicted in the same respective line as said AvinDRAFT_{—}3629, or a functional equivalent or a homolog thereof as shown in column 8 of Table I, application no. 14, preferably the coding region thereof, particularly a homolog or functional equivalent as shown in column 8 of Table I B, application no. 14, and being depicted in the same respective line as said AvinDRAFT_{—}3629, and preferably the activity is increased non-targeted, or
[67953] (b) a polypeptide comprising a polypeptide, a consensus sequence or at least a polypeptide motif as shown in the respective line in column 5 of Table II or in column 8 of Table IV, application no. 14, respectively, and being depicted in the same respective line as said AvinDRAFT_{—}3629, or a functional equivalent or a homolog thereof as depicted in column 8 of Table II, application no. 14, preferably a homolog or functional equivalent as depicted in column 8 of Table II B, application no. 14, and being depicted in the same respective line as said AvinDRAFT_{—}3629, and preferably the activity is increased non-targeted, whereby the respective line disclose in column 7 the fine chemical campesterol.

[67954] Accordingly, in one embodiment, the molecule which activity is to be increased in the process of the invention is the gene product with an activity as a “recombinase A”, preferably it is the molecule of section (a) or (b) of this paragraph.

[67955] In particular, it was observed that in plants, especially in Arabidopsis thaliana, increasing or generating the activity of a gene product non-targeted with the activity of a “recombinase A”, preferably being encoded by a gene comprising the nucleic acid sequence SEQ ID NO. 114231, preferably the coding region thereof, conferred the production of or the increase in campesterol compared with the wild type control.

[67956] The nucleic acid sequence of AvinDRAFT_{—}5103 from Azotobacter vinelandii, e.g. as shown in the respective line in column 5 of Table I, application no. 14, has been published in D. And the activity of the gene product thereof is the activity of hydrolase.

[67957] Accordingly, in one embodiment, the process of the present invention for producing beta-sitosterol in a non-human organism, like a microorganism or a plant or a part thereof, comprises increasing or generating the activity of a gene product with the activity of a gene product conferring the activity of “hydrolase”, especially from Azotobacter vinelandii or its functional equivalent or its homolog, e.g. the increase of
[67958] (a) a gene product of a gene comprising the nucleic acid molecule as shown in the respective line in column 5 of Table I (whereby the respective line disclose in column 7 the fine chemical beta-sitosterol), application no. 14, preferably the coding region thereof, or a homolog or a fragment thereof, and being depicted in the same respective line as said AvinDRAFT_{—}5103, or a functional equivalent or a homolog thereof as shown in column 8 of Table I, application no. 14, preferably the coding region thereof, particularly a homolog or functional equivalent as shown in column 8 of Table I B, application no. 14, and being depicted in the same respective line as said AvinDRAFT_{—}5103, and preferably the activity is increased non-targeted, or
[67959] (b) a polypeptide comprising a polypeptide, a consensus sequence or at least a polypeptide motif as shown in the respective line in column 5 of Table II or in column 8 of Table IV, application no. 14, respectively, and being depicted in the same respective line as said AvinDRAFT_{—}5103, or a functional equivalent or a homolog thereof as depicted in column 8 of Table II, application no. 14, preferably a homolog or functional equivalent as depicted in column 8 of Table II B, application no. 14, and being depicted in the same respective line as said AvinDRAFT_{—}5103, and preferably the activity is increased non-targeted, whereby the respective line disclose in column 7 the fine chemical beta-sitosterol.

[67960] Accordingly, in one embodiment, the molecule which activity is to be increased in the process of the invention is the gene product with an activity as a “hydrolase”, preferably it is the molecule of section (a) or (b) of this paragraph.

[67961] In particular, it was observed that in plants, especially in Arabidopsis thaliana, increasing or generating the activity of a gene product non-targeted with the activity of a “hydrolase”, preferably being encoded by a gene comprising the nucleic acid sequence SEQ ID NO. 6510, preferably the coding region thereof, conferred the production of or the increase in beta-sitosterol compared with the wild type control.

[67962] The nucleic acid sequence of AvinDRAFT_{—}5103 from Azotobacter vinelandii, e.g. as shown in the respective line in column 5 of Table I, application no. 14, has been published in D. And the activity of the gene product thereof is the activity of hydrolase.

[67963] Accordingly, in one embodiment, the process of the present invention for producing campesterol in a non-human organism, like a microorganism or a plant or a part thereof, comprises increasing or generating the activity of a gene product with the activity of a gene product conferring the activity of “hydrolase”, especially from Azotobacter vinelandii or its functional equivalent or its homolog, e.g. the increase of
[67964] (a) a gene product of a gene comprising the nucleic acid molecule as shown in the respective line in column 5 of Table I (whereby the respective line disclose in column 7 the fine chemical campesterol), application no. 14, preferably the coding region thereof, or a homolog or a fragment thereof, and being depicted in the same respective line as said AvinDRAFT_{—}5103, or a functional equivalent or a homolog thereof as shown in column 8 of Table I, application no. 14, preferably the coding region thereof, particularly a homolog or functional equivalent as shown in column 8 of Table I B, application no. 14, and being depicted in the same respective line as said AvinDRAFT_{—}5103, and preferably the activity is increased non-targeted, or
[67965] (b) a polypeptide comprising a polypeptide, a consensus sequence or at least a polypeptide motif as shown in the respective line in column 5 of Table II or in column 8 of Table IV, application no. 14, respectively, and being depicted in the same respective line as said AvinDRAFT_{—}5103, or a functional equivalent or a homolog thereof as depicted in column 8 of Table II, application no. 14, preferably a homolog or functional equivalent as depicted in column 8 of Table II B, application no. 14, and being depicted in the same respective line as said AvinDRAFT_{—}5103, and preferably the activity is increased non-targeted, whereby the respective line disclose in column 7 the fine chemical campesterol.

[67966] Accordingly, in one embodiment, the molecule which activity is to be increased in the process of the invention is the gene product with an activity as a “hydrolase”, preferably it is the molecule of section (a) or (b) of this paragraph.

[67967] In particular, it was observed that in plants, especially in Arabidopsis thaliana, increasing or generating the activity of a gene product non-targeted with the activity of a “hydrolase”, preferably being encoded by a gene comprising the nucleic acid sequence SEQ ID NO. 6510, preferably the coding region thereof, conferred the production of or the increase in campesterol compared with the wild type control.

[67968] The nucleic acid sequence of B0004 from Escherichia coli, e.g. as shown in the respective line in column 5 of Table I, application no. 14, has been published in B. And the activity of the gene product thereof is the activity of threonine synthase.

[67969] Accordingly, in one embodiment, the process of the present invention for producing campesterol in a non-human organism, like a microorganism or a plant or a part thereof, comprises increasing or generating the activity of a gene product with the activity of a gene product conferring the activity of “threonine synthase”, especially from Escherichia coli or its functional equivalent or its homolog, e.g. the increase of
[67970] (a) a gene product of a gene comprising the nucleic acid molecule as shown in the respective line in column 5 of Table I (whereby the respective line disclose in column 7 the fine chemical campesterol), application no. 14, preferably the coding region thereof, or a homolog or a fragment thereof, and being depicted in the same respective line as said B0004, or a functional equivalent or a homolog thereof as shown in column 8 of Table I, application no. 14, preferably the coding region thereof, particularly a homolog or functional equivalent as shown in column 8 of Table I B, application no. 14, and being depicted in the same respective line as said B0004, and preferably the activity is increased plastidic, or
[67971] (b) a polypeptide comprising a polypeptide, a consensus sequence or at least a polypeptide motif as shown in the respective line in column 5 of Table II or in column 8 of Table IV, application no. 14, respectively, and being depicted in the same respective line as said B0004, or a functional equivalent or a homolog thereof as depicted in column 8 of Table II, application no. 14, preferably a homolog or functional equivalent as depicted in column 8 of Table II B, application no. 14, and being depicted in the same respective line as said B0004, and preferably the activity is increased plastidic, whereby the respective line disclose in column 7 the fine chemical campesterol.

[67972] Accordingly, in one embodiment, the molecule which activity is to be increased in the process of the invention is the gene product with an activity as a “threonine synthase”, preferably it is the molecule of section (a) or (b) of this paragraph.

[67973] In particular, it was observed that in plants, especially in Arabidopsis thaliana, increasing or generating the activity of a gene product plastidic with the activity of a “threonine synthase”, preferably being encoded by a gene comprising the nucleic acid sequence SEQ ID NO. 34889, preferably the coding region thereof, conferred the production of or the increase in campesterol compared with the wild type control.

[67974] The nucleic acid sequence of B0061 from Escherichia coli, e.g. as shown in the respective line in column 5 of Table I, application no. 14, has been published in B. And the activity of the gene product thereof is the activity of L-ribulose-5-phosphate 4-epimerase.

[67975] Accordingly, in one embodiment, the process of the present invention for producing campesterol in a non-human organism, like a microorganism or a plant or a part thereof, comprises increasing or generating the activity of a gene product with the activity of a gene product conferring the activity of “L-ribulose-5-phosphate 4-epimerase”, especially from Escherichia coli or its functional equivalent or its homolog, e.g. the increase of
[67976] (a) a gene product of a gene comprising the nucleic acid molecule as shown in the respective line in column 5 of Table I (whereby the respective line disclose in column 7 the fine chemical campesterol), application no. 14, preferably the coding region thereof, or a homolog or a fragment thereof, and being depicted in the same respective line as said B0061, or a functional equivalent or a homolog thereof as shown in column 8 of Table I, application no. 14, preferably the coding region thereof, particularly a homolog or functional equivalent as shown in column 8 of Table I B, application no. 14, and being depicted in the same respective line as said B0061, and preferably the activity is increased non-targeted, or
[67977] (b) a polypeptide comprising a polypeptide, a consensus sequence or at least a polypeptide motif as shown in the respective line in column 5 of Table II or in column 8 of Table IV, application no. 14, respectively, and being depicted in the same respective line as said B0061, or a functional equivalent or a homolog thereof as depicted in column 8 of Table II, application no. 14, preferably a homolog or functional equivalent as depicted in column 8 of Table II B, application no. 14, and being depicted in the same respective line as said B0061, and preferably the activity is increased non-targeted, whereby the respective line disclose in column 7 the fine chemical campesterol.

[67978] Accordingly, in one embodiment, the molecule which activity is to be increased in the process of the invention is the gene product with an activity as a “L-ribulose-5-phosphate 4-epimerase”, preferably it is the molecule of section (a) or (b) of this paragraph.

[67979] In particular, it was observed that in plants, especially in Arabidopsis thaliana, increasing or generating the activity of a gene product non-targeted with the activity of a “L-ribulose-5-phosphate 4-epimerase”, preferably being encoded by a gene comprising the nucleic acid sequence SEQ ID NO. 35204, preferably the coding region thereof, conferred the production of or the increase in campesterol compared with the wild type control.

[67980] The nucleic acid sequence of B0124 from Escherichia coli, e.g. as shown in the respective line in column 5 of Table I, application no. 14, has been published in B. And the activity of the gene product thereof is the activity of glucose dehydrogenase.

[67981] Accordingly, in one embodiment, the process of the present invention for producing campesterol in a non-human organism, like a microorganism or a plant or a part thereof, comprises increasing or generating the activity of a gene product with the activity of a gene product conferring the activity of “glucose dehydrogenase”, especially from Escherichia coli or its functional equivalent or its homolog, e.g. the increase of
[67982] (a) a gene product of a gene comprising the nucleic acid molecule as shown in the respective line in column 5 of Table I (whereby the respective line disclose in column 7 the fine chemical campesterol), application no. 14, preferably the coding region thereof, or a homolog or a fragment thereof, and being depicted in the same respective line as said B0124, or a functional equivalent or a homolog thereof as shown in column 8 of Table I, application no. 14, preferably the coding region thereof, particularly a homolog or functional equivalent as shown in column 8 of Table I B, application no. 14, and being depicted in the same respective line as said B0124, and preferably the activity is increased non-targeted, or
[67983] (b) a polypeptide comprising a polypeptide, a consensus sequence or at least a polypeptide motif as shown in the respective line in column 5 of Table II or in column 8 of Table IV, application no. 14, respectively, and being depicted in the same respective line as said B0124, or a functional equivalent or a homolog thereof as depicted in column 8 of Table II, application no. 14, preferably a homolog or functional equivalent as depicted in column 8 of Table II B, application no. 14, and being depicted in the same respective line as said B0124, and preferably the activity is increased non-targeted, whereby the respective line disclose in column 7 the fine chemical campesterol.

[67984] Accordingly, in one embodiment, the molecule which activity is to be increased in the process of the invention is the gene product with an activity as a “glucose dehydrogenase”, preferably it is the molecule of section (a) or (b) of this paragraph.

[67985] In particular, it was observed that in plants, especially in Arabidopsis thaliana, increasing or generating the activity of a gene product non-targeted with the activity of a “glucose dehydrogenase”, preferably being encoded by a gene comprising the nucleic acid sequence SEQ ID NO. 35482, preferably the coding region thereof, conferred the production of or the increase in campesterol compared with the wild type control.

[67986] The nucleic acid sequence of B0449 from Escherichia coli, e.g. as shown in the respective line in column 5 of Table I, application no. 14, has been published in B. And the activity of the gene product thereof is the activity of ATP-binding component of a transport system.

[67987] Accordingly, in one embodiment, the process of the present invention for producing beta-sitosterol in a non-human organism, like a microorganism or a plant or a part thereof, comprises increasing or generating the activity of a gene product with the activity of a gene product conferring the activity of “ATP-binding component of a transport system”, especially from Escherichia coli or its functional equivalent or its homolog, e.g. the increase of
[67988] (a) a gene product of a gene comprising the nucleic acid molecule as shown in the respective line in column 5 of Table I (whereby the respective line disclose in column 7 the fine chemical beta-sitosterol), application no. 14, preferably the coding region thereof, or a homolog or a fragment thereof, and being depicted in the same respective line as said B0449, or a functional equivalent or a homolog thereof as shown in column 8 of Table I, application no. 14, preferably the coding region thereof, particularly a homolog or functional equivalent as shown in column 8 of Table I B, application no. 14, and being depicted in the same respective line as said B0449, and preferably the activity is increased non-targeted, or
[67989] (b) a polypeptide comprising a polypeptide, a consensus sequence or at least a polypeptide motif as shown in the respective line in column 5 of Table II or in column 8 of Table IV, application no. 14, respectively, and being depicted in the same respective line as said B0449, or a functional equivalent or a homolog thereof as depicted in column 8 of Table II, application no. 14, preferably a homolog or functional equivalent as depicted in column 8 of Table II B, application no. 14, and being depicted in the same respective line as said B0449, and preferably the activity is increased non-targeted, whereby the respective line disclose in column 7 the fine chemical beta-sitosterol.

[67990] Accordingly, in one embodiment, the molecule which activity is to be increased in the process of the invention is the gene product with an activity as a “ATP-binding component of a transport system”, preferably it is the molecule of section (a) or (b) of this paragraph.

[67991] In particular, it was observed that in plants, especially in Arabidopsis thaliana, increasing or generating the activity of a gene product non-targeted with the activity of a “ATP-binding component of a transport system”, preferably being encoded by a gene comprising the nucleic acid sequence SEQ ID NO. 7333, preferably the coding region thereof, conferred the production of or the increase in beta-sitosterol compared with the wild type control.

[67992] The nucleic acid sequence of B0449 from Escherichia coli, e.g. as shown in the respective line in column 5 of Table I, application no. 14, has been published in B. And the activity of the gene product thereof is the activity of ATP-binding component of a transport system.

[67993] Accordingly, in one embodiment, the process of the present invention for producing campesterol in a non-human organism, like a microorganism or a plant or a part thereof, comprises increasing or generating the activity of a gene product with the activity of a gene product conferring the activity of “ATP-binding component of a transport system”, especially from Escherichia coli or its functional equivalent or its homolog, e.g. the increase of
[67994] (a) a gene product of a gene comprising the nucleic acid molecule as shown in the respective line in column 5 of Table I (whereby the respective line disclose in column 7 the fine chemical campesterol), application no. 14, preferably the coding region thereof, or a homolog or a fragment thereof, and being depicted in the same respective line as said B0449, or a functional equivalent or a homolog thereof as shown in column 8 of Table I, application no. 14, preferably the coding region thereof, particularly a homolog or functional equivalent as shown in column 8 of Table I B, application no. 14, and being depicted in the same respective line as said B0449, and preferably the activity is increased non-targeted, or
[67995] (b) a polypeptide comprising a polypeptide, a consensus sequence or at least a polypeptide motif as shown in the respective line in column 5 of Table II or in column 8 of Table IV, application no. 14, respectively, and being depicted in the same respective line as said B0449, or a functional equivalent or a homolog thereof as depicted in column 8 of Table II, application no. 14, preferably a homolog or functional equivalent as depicted in column 8 of Table II B, application no. 14, and being depicted in the same respective line as said B0449, and preferably the activity is increased non-targeted, whereby the respective line disclose in column 7 the fine chemical campesterol.

[67996] Accordingly, in one embodiment, the molecule which activity is to be increased in the process of the invention is the gene product with an activity as a “ATP-binding component of a transport system”, preferably it is the molecule of section (a) or (b) of this paragraph.

[67997] In particular, it was observed that in plants, especially in Arabidopsis thaliana, increasing or generating the activity of a gene product non-targeted with the activity of a “ATP-binding component of a transport system”, preferably being encoded by a gene comprising the nucleic acid sequence SEQ ID NO. 7333, preferably the coding region thereof, conferred the production of or the increase in campesterol compared with the wild type control.

[67998] The nucleic acid sequence of B0486 from Escherichia coli, e.g. as shown in the respective line in column 5 of Table I, application no. 14, has been published in B. And the activity of the gene product thereof is the activity of membrane transport protein.

[67999] Accordingly, in one embodiment, the process of the present invention for producing campesterol in a non-human organism, like a microorganism or a plant or a part thereof, comprises increasing or generating the activity of a gene product with the activity of a gene product conferring the activity of “membrane transport protein”, especially from Escherichia coli or its functional equivalent or its homolog, e.g. the increase of
[68000] (a) a gene product of a gene comprising the nucleic acid molecule as shown in the respective line in column 5 of Table I (whereby the respective line disclose in column 7 the fine chemical campesterol), application no. 14, preferably the coding region thereof, or a homolog or a fragment thereof, and being depicted in the same respective line as said B0486, or a functional equivalent or a homolog thereof as shown in column 8 of Table I, application no. 14, preferably the coding region thereof, particularly a homolog or functional equivalent as shown in column 8 of Table I B, application no. 14, and being depicted in the same respective line as said B0486, and preferably the activity is increased non-targeted, or
[68001] (b) a polypeptide comprising a polypeptide, a consensus sequence or at least a polypeptide motif as shown in the respective line in column 5 of Table II or in column 8 of Table IV, application no. 14, respectively, and being depicted in the same respective line as said B0486, or a functional equivalent or a homolog thereof as depicted in column 8 of Table II, application no. 14, preferably a homolog or functional equivalent as depicted in column 8 of Table II B, application no. 14, and being depicted in the same respective line as said B0486, and preferably the activity is increased non-targeted, whereby the respective line disclose in column 7 the fine chemical campesterol.

[68002] Accordingly, in one embodiment, the molecule which activity is to be increased in the process of the invention is the gene product with an activity as a “membrane transport protein”, preferably it is the molecule of section (a) or (b) of this paragraph.

[68003] In particular, it was observed that in plants, especially in Arabidopsis thaliana, increasing or generating the activity of a gene product non-targeted with the activity of a “membrane transport protein”, preferably being encoded by a gene comprising the nucleic acid sequence SEQ ID NO. 7686, preferably the coding region thereof, conferred the production of or the increase in campesterol compared with the wild type control.

[68004] The nucleic acid sequence of B0856 from Escherichia coli, e.g. as shown in the respective line in column 5 of Table I, application no. 14, has been published in B. And the activity of the gene product thereof is the activity of putrescine transport system permease protein.

[68005] Accordingly, in one embodiment, the process of the present invention for producing campesterol in a non-human organism, like a microorganism or a plant or a part thereof, comprises increasing or generating the activity of a gene product with the activity of a gene product conferring the activity of “putrescine transport system permease protein”, especially from Escherichia coli or its functional equivalent or its homolog, e.g. the increase of
[68006] (a) a gene product of a gene comprising the nucleic acid molecule as shown in the respective line in column 5 of Table I (whereby the respective line disclose in column 7 the fine chemical campesterol), application no. 14, preferably the coding region thereof, or a homolog or a fragment thereof, and being depicted in the same respective line as said B0856, or a functional equivalent or a homolog thereof as shown in column 8 of Table I, application no. 14, preferably the coding region thereof, particularly a homolog or functional equivalent as shown in column 8 of Table I B, application no. 14, and being depicted in the same respective line as said B0856, and preferably the activity is increased plastidic, or
[68007] (b) a polypeptide comprising a polypeptide, a consensus sequence or at least a polypeptide motif as shown in the respective line in column 5 of Table II or in column 8 of Table IV, application no. 14, respectively, and being depicted in the same respective line as said B0856, or a functional equivalent or a homolog thereof as depicted in column 8 of Table II, application no. 14, preferably a homolog or functional equivalent as depicted in column 8 of Table II B, application no. 14, and being depicted in the same respective line as said B0856, and preferably the activity is increased plastidic, whereby the respective line disclose in column 7 the fine chemical campesterol.

[68008] Accordingly, in one embodiment, the molecule which activity is to be increased in the process of the invention is the gene product with an activity as a “putrescine transport system permease protein”, preferably it is the molecule of section (a) or (b) of this paragraph.

[68009] In particular, it was observed that in plants, especially in Arabidopsis thaliana, increasing or generating the activity of a gene product plastidic with the activity of a “putrescine transport system permease protein”, preferably being encoded by a gene comprising the nucleic acid sequence SEQ ID NO. 131359, preferably the coding region thereof, conferred the production of or the increase in campesterol compared with the wild type control.

[68010] The nucleic acid sequence of B1065 from Escherichia coli, e.g. as shown in the respective line in column 5 of Table I, application no. 14, has been published in B. And the activity of the gene product thereof is the activity of multidrug resistance protein.

[68011] Accordingly, in one embodiment, the process of the present invention for producing beta-sitosterol in a non-human organism, like a microorganism or a plant or a part thereof, comprises increasing or generating the activity of a gene product with the activity of a gene product conferring the activity of “multidrug resistance protein”, especially from Escherichia coli or its functional equivalent or its homolog, e.g. the increase of
[68012] (a) a gene product of a gene comprising the nucleic acid molecule as shown in the respective line in column 5 of Table I (whereby the respective line disclose in column 7 the fine chemical beta-sitosterol), application no. 14, preferably the coding region thereof, or a homolog or a fragment thereof, and being depicted in the same respective line as said B1065, or a functional equivalent or a homolog thereof as shown in column 8 of Table I, application no. 14, preferably the coding region thereof, particularly a homolog or functional equivalent as shown in column 8 of Table I B, application no. 14, and being depicted in the same respective line as said B1065, and preferably the activity is increased plastidic, or
[68013] (b) a polypeptide comprising a polypeptide, a consensus sequence or at least a polypeptide motif as shown in the respective line in column 5 of Table II or in column 8 of Table IV, application no. 14, respectively, and being depicted in the same respective line as said B1065, or a functional equivalent or a homolog thereof as depicted in column 8 of Table II, application no. 14, preferably a homolog or functional equivalent as depicted in column 8 of Table II B, application no. 14, and being depicted in the same respective line as said B1065, and preferably the activity is increased plastidic, whereby the respective line disclose in column 7 the fine chemical beta-sitosterol.

[68014] Accordingly, in one embodiment, the molecule which activity is to be increased in the process of the invention is the gene product with an activity as a “multidrug resistance protein”, preferably it is the molecule of section (a) or (b) of this paragraph.

[68015] In particular, it was observed that in plants, especially in Arabidopsis thaliana, increasing or generating the activity of a gene product plastidic with the activity of a “multidrug resistance protein”, preferably being encoded by a gene comprising the nucleic acid sequence SEQ ID NO. 76032, preferably the coding region thereof, conferred the production of or the increase in beta-sitosterol compared with the wild type control.

[68016] The nucleic acid sequence of B1186 from Escherichia coli, e.g. as shown in the respective line in column 5 of Table I, application no. 14, has been published in B. And the activity of the gene product thereof is the activity of sodium/proton antiporter.

[68017] Accordingly, in one embodiment, the process of the present invention for producing beta-sitosterol in a non-human organism, like a microorganism or a plant or a part thereof, comprises increasing or generating the activity of a gene product with the activity of a gene product conferring the activity of “sodium/proton antiporter”, especially from Escherichia coli or its functional equivalent or its homolog, e.g. the increase of
[68018] (a) a gene product of a gene comprising the nucleic acid molecule as shown in the respective line in column 5 of Table I (whereby the respective line disclose in column 7 the fine chemical beta-sitosterol), application no. 14, preferably the coding region thereof, or a homolog or a fragment thereof, and being depicted in the same respective line as said B1186, or a functional equivalent or a homolog thereof as shown in column 8 of Table I, application no. 14, preferably the coding region thereof, particularly a homolog or functional equivalent as shown in column 8 of Table I B, application no. 14, and being depicted in the same respective line as said B1186, and preferably the activity is increased non-targeted, or
[68019] (b) a polypeptide comprising a polypeptide, a consensus sequence or at least a polypeptide motif as shown in the respective line in column 5 of Table II or in column 8 of Table IV, application no. 14, respectively, and being depicted in the same respective line as said B1186, or a functional equivalent or a homolog thereof as depicted in column 8 of Table II, application no. 14, preferably a homolog or functional equivalent as depicted in column 8 of Table II B, application no. 14, and being depicted in the same respective line as said B1186, and preferably the activity is increased non-targeted, whereby the respective line disclose in column 7 the fine chemical beta-sitosterol.

[68020] Accordingly, in one embodiment, the molecule which activity is to be increased in the process of the invention is the gene product with an activity as a “sodium/proton antiporter”, preferably it is the molecule of section (a) or (b) of this paragraph.

[68021] In particular, it was observed that in plants, especially in Arabidopsis thaliana, increasing or generating the activity of a gene product non-targeted with the activity of a “sodium/proton antiporter”, preferably being encoded by a gene comprising the nucleic acid sequence SEQ ID NO. 37400, preferably the coding region thereof, conferred the production of or the increase in beta-sitosterol compared with the wild type control.

[68022] The nucleic acid sequence of B1186 from Escherichia coli, e.g. as shown in the respective line in column 5 of Table I, application no. 14, has been published in B. And the activity of the gene product thereof is the activity of sodium/proton antiporter.

[68023] Accordingly, in one embodiment, the process of the present invention for producing campesterol in a non-human organism, like a microorganism or a plant or a part thereof, comprises increasing or generating the activity of a gene product with the activity of a gene product conferring the activity of “sodium/proton antiporter”, especially from Escherichia coli or its functional equivalent or its homolog, e.g. the increase of
[68024] (a) a gene product of a gene comprising the nucleic acid molecule as shown in the respective line in column 5 of Table I (whereby the respective line disclose in column 7 the fine chemical campesterol), application no. 14, preferably the coding region thereof, or a homolog or a fragment thereof, and being depicted in the same respective line as said B1186, or a functional equivalent or a homolog thereof as shown in column 8 of Table I, application no. 14, preferably the coding region thereof, particularly a homolog or functional equivalent as shown in column 8 of Table I B, application no. 14, and being depicted in the same respective line as said B1186, and preferably the activity is increased non-targeted, or
[68025] (b) a polypeptide comprising a polypeptide, a consensus sequence or at least a polypeptide motif as shown in the respective line in column 5 of Table II or in column 8 of Table IV, application no. 14, respectively, and being depicted in the same respective line as said B1186, or a functional equivalent or a homolog thereof as depicted in column 8 of Table II, application no. 14, preferably a homolog or functional equivalent as depicted in column 8 of Table II B, application no. 14, and being depicted in the same respective line as said B1186, and preferably the activity is increased non-targeted, whereby the respective line disclose in column 7 the fine chemical campesterol.

[68026] Accordingly, in one embodiment, the molecule which activity is to be increased in the process of the invention is the gene product with an activity as a “sodium/proton antiporter”, preferably it is the molecule of section (a) or (b) of this paragraph.

[68027] In particular, it was observed that in plants, especially in Arabidopsis thaliana, increasing or generating the activity of a gene product non-targeted with the activity of a “sodium/proton antiporter”, preferably being encoded by a gene comprising the nucleic acid sequence SEQ ID NO. 37400, preferably the coding region thereof, conferred the production of or the increase in campesterol compared with the wild type control.

[68028] The nucleic acid sequence of B1391 from Escherichia coli, e.g. as shown in the respective line in column 5 of Table I, application no. 14, has been published in B. And the activity of the gene product thereof is the activity of phenylacetic acid degradation protein.

[68029] Accordingly, in one embodiment, the process of the present invention for producing beta-sitosterol in a non-human organism, like a microorganism or a plant or a part thereof, comprises increasing or generating the activity of a gene product with the activity of a gene product conferring the activity of “phenylacetic acid degradation protein”, especially from Escherichia coli or its functional equivalent or its homolog, e.g. the increase of
[68030] (a) a gene product of a gene comprising the nucleic acid molecule as shown in the respective line in column 5 of Table I (whereby the respective line disclose in column 7 the fine chemical beta-sitosterol), application no. 14, preferably the coding region thereof, or a homolog or a fragment thereof, and being depicted in the same respective line as said B1391, or a functional equivalent or a homolog thereof as shown in column 8 of Table I, application no. 14, preferably the coding region thereof, particularly a homolog or functional equivalent as shown in column 8 of Table I B, application no. 14, and being depicted in the same respective line as said B1391, and preferably the activity is increased non-targeted, or
[68031] (b) a polypeptide comprising a polypeptide, a consensus sequence or at least a polypeptide motif as shown in the respective line in column 5 of Table II or in column 8 of Table IV, application no. 14, respectively, and being depicted in the same respective line as said B1391, or a functional equivalent or a homolog thereof as depicted in column 8 of Table II, application no. 14, preferably a homolog or functional equivalent as depicted in column 8 of Table II B, application no. 14, and being depicted in the same respective line as said B1391, and preferably the activity is increased non-targeted, whereby the respective line disclose in column 7 the fine chemical beta-sitosterol.

[68032] Accordingly, in one embodiment, the molecule which activity is to be increased in the process of the invention is the gene product with an activity as a “phenylacetic acid degradation protein”, preferably it is the molecule of section (a) or (b) of this paragraph.

[68033] In particular, it was observed that in plants, especially in Arabidopsis thaliana, increasing or generating the activity of a gene product non-targeted with the activity of a “phenylacetic acid degradation protein”, preferably being encoded by a gene comprising the nucleic acid sequence SEQ ID NO. 131489, preferably the coding region thereof, conferred the production of or the increase in beta-sitosterol compared with the wild type control.

[68034] The nucleic acid sequence of B1391 from Escherichia coli, e.g. as shown in the respective line in column 5 of Table I, application no. 14, has been published in B. And the activity of the gene product thereof is the activity of phenylacetic acid degradation protein.

[68035] Accordingly, in one embodiment, the process of the present invention for producing campesterol in a non-human organism, like a microorganism or a plant or a part thereof, comprises increasing or generating the activity of a gene product with the activity of a gene product conferring the activity of “phenylacetic acid degradation protein”, especially from Escherichia coli or its functional equivalent or its homolog, e.g. the increase of
[68036] (a) a gene product of a gene comprising the nucleic acid molecule as shown in the respective line in column 5 of Table I (whereby the respective line disclose in column 7 the fine chemical campesterol), application no. 14, preferably the coding region thereof, or a homolog or a fragment thereof, and being depicted in the same respective line as said B1391, or a functional equivalent or a homolog thereof as shown in column 8 of Table I, application no. 14, preferably the coding region thereof, particularly a homolog or functional equivalent as shown in column 8 of Table I B, application no. 14, and being depicted in the same respective line as said B1391, and preferably the activity is increased non-targeted, or
[68037] (b) a polypeptide comprising a polypeptide, a consensus sequence or at least a polypeptide motif as shown in the respective line in column 5 of Table II or in column 8 of Table IV, application no. 14, respectively, and being depicted in the same respective line as said B1391, or a functional equivalent or a homolog thereof as depicted in column 8 of Table II, application no. 14, preferably a homolog or functional equivalent as depicted in column 8 of Table II B, application no. 14, and being depicted in the same respective line as said B1391, and preferably the activity is increased non-targeted, whereby the respective line disclose in column 7 the fine chemical campesterol.

[68038] Accordingly, in one embodiment, the molecule which activity is to be increased in the process of the invention is the gene product with an activity as a “phenylacetic acid degradation protein”, preferably it is the molecule of section (a) or (b) of this paragraph.

[68039] In particular, it was observed that in plants, especially in Arabidopsis thaliana, increasing or generating the activity of a gene product non-targeted with the activity of a “phenylacetic acid degradation protein”, preferably being encoded by a gene comprising the nucleic acid sequence SEQ ID NO. 131489, preferably the coding region thereof, conferred the production of or the increase in campesterol compared with the wild type control.

[68040] The nucleic acid sequence of B1401 from Escherichia coli, e.g. as shown in the respective line in column 5 of Table I, application no. 14, has been published in B. And the activity of the gene product thereof is the activity of b1401-protein.

[68041] Accordingly, in one embodiment, the process of the present invention for producing campesterol in a non-human organism, like a microorganism or a plant or a part thereof, comprises increasing or generating the activity of a gene product with the activity of a gene product conferring the activity of “b1401-protein”, especially from Escherichia coli or its functional equivalent or its homolog, e.g. the increase of
[68042] (a) a gene product of a gene comprising the nucleic acid molecule as shown in the respective line in column 5 of Table I (whereby the respective line disclose in column 7 the fine chemical campesterol), application no. 14, preferably the coding region thereof, or a homolog or a fragment thereof, and being depicted in the same respective line as said B1401, or a functional equivalent or a homolog thereof as shown in column 8 of Table I, application no. 14, preferably the coding region thereof, particularly a homolog or functional equivalent as shown in column 8 of Table I B, application no. 14, and being depicted in the same respective line as said B1401, and preferably the activity is increased non-targeted, or
[68043] (b) a polypeptide comprising a polypeptide, a consensus sequence or at least a polypeptide motif as shown in the respective line in column 5 of Table II or in column 8 of Table IV, application no. 14, respectively, and being depicted in the same respective line as said B1401, or a functional equivalent or a homolog thereof as depicted in column 8 of Table II, application no. 14, preferably a homolog or functional equivalent as depicted in column 8 of Table II B, application no. 14, and being depicted in the same respective line as said B1401, and preferably the activity is increased non-targeted, whereby the respective line disclose in column 7 the fine chemical campesterol.

[68044] Accordingly, in one embodiment, the molecule which activity is to be increased in the process of the invention is the gene product with an activity as a “b1401-protein”, preferably it is the molecule of section (a) or (b) of this paragraph.

[68045] In particular, it was observed that in plants, especially in Arabidopsis thaliana, increasing or generating the activity of a gene product non-targeted with the activity of a “b1401-protein”, preferably being encoded by a gene comprising the nucleic acid sequence SEQ ID NO. 131531, preferably the coding region thereof, conferred the production of or the increase in campesterol compared with the wild type control.

[68046] The nucleic acid sequence of B1431 from Escherichia coli, e.g. as shown in the respective line in column 5 of Table I, application no. 14, has been published in B. And the activity of the gene product thereof is the activity of lipoprotein precursor.

[68047] Accordingly, in one embodiment, the process of the present invention for producing campesterol in a non-human organism, like a microorganism or a plant or a part thereof, comprises increasing or generating the activity of a gene product with the activity of a gene product conferring the activity of “lipoprotein precursor”, especially from Escherichia coli or its functional equivalent or its homolog, e.g. the increase of
[68048] (a) a gene product of a gene comprising the nucleic acid molecule as shown in the respective line in column 5 of Table I (whereby the respective line disclose in column 7 the fine chemical campesterol), application no. 14, preferably the coding region thereof, or a homolog or a fragment thereof, and being depicted in the same respective line as said B1431, or a functional equivalent or a homolog thereof as shown in column 8 of Table I, application no. 14, preferably the coding region thereof, particularly a homolog or functional equivalent as shown in column 8 of Table I B, application no. 14, and being depicted in the same respective line as said B1431, and preferably the activity is increased plastidic, or
[68049] (b) a polypeptide comprising a polypeptide, a consensus sequence or at least a polypeptide motif as shown in the respective line in column 5 of Table II or in column 8 of Table IV, application no. 14, respectively, and being depicted in the same respective line as said B1431, or a functional equivalent or a homolog thereof as depicted in column 8 of Table II, application no. 14, preferably a homolog or functional equivalent as depicted in column 8 of Table II B, application no. 14, and being depicted in the same respective line as said B1431, and preferably the activity is increased plastidic, whereby the respective line disclose in column 7 the fine chemical campesterol.

[68050] Accordingly, in one embodiment, the molecule which activity is to be increased in the process of the invention is the gene product with an activity as a “lipoprotein precursor”, preferably it is the molecule of section (a) or (b) of this paragraph.

[68051] In particular, it was observed that in plants, especially in Arabidopsis thaliana, increasing or generating the activity of a gene product plastidic with the activity of a “lipoprotein precursor”, preferably being encoded by a gene comprising the nucleic acid sequence SEQ ID NO. 38266, preferably the coding region thereof, conferred the production of or the increase in campesterol compared with the wild type control.

[68052] The nucleic acid sequence of B1597 from Escherichia coli, e.g. as shown in the respective line in column 5 of Table I, application no. 14, has been published in B. And the activity of the gene product thereof is the activity of acid shock protein.

[68053] Accordingly, in one embodiment, the process of the present invention for producing beta-sitosterol in a non-human organism, like a microorganism or a plant or a part thereof, comprises increasing or generating the activity of a gene product with the activity of a gene product conferring the activity of “acid shock protein”, especially from Escherichia coli or its functional equivalent or its homolog, e.g. the increase of
[68054] (a) a gene product of a gene comprising the nucleic acid molecule as shown in the respective line in column 5 of Table I (whereby the respective line disclose in column 7 the fine chemical beta-sitosterol), application no. 14, preferably the coding region thereof, or a homolog or a fragment thereof, and being depicted in the same respective line as said B1597, or a functional equivalent or a homolog thereof as shown in column 8 of Table I, application no. 14, preferably the coding region thereof, particularly a homolog or functional equivalent as shown in column 8 of Table I B, application no. 14, and being depicted in the same respective line as said B1597, and preferably the activity is increased non-targeted, or
[68055] (b) a polypeptide comprising a polypeptide, a consensus sequence or at least a polypeptide motif as shown in the respective line in column 5 of Table II or in column 8 of Table IV, application no. 14, respectively, and being depicted in the same respective line as said B1597, or a functional equivalent or a homolog thereof as depicted in column 8 of Table II, application no. 14, preferably a homolog or functional equivalent as depicted in column 8 of Table II B, application no. 14, and being depicted in the same respective line as said B1597, and preferably the activity is increased non-targeted, whereby the respective line disclose in column 7 the fine chemical beta-sitosterol.

[68056] Accordingly, in one embodiment, the molecule which activity is to be increased in the process of the invention is the gene product with an activity as a “acid shock protein”, preferably it is the molecule of section (a) or (b) of this paragraph.

[68057] In particular, it was observed that in plants, especially in Arabidopsis thaliana, increasing or generating the activity of a gene product non-targeted with the activity of a “acid shock protein”, preferably being encoded by a gene comprising the nucleic acid sequence SEQ ID NO. 38300, preferably the coding region thereof, conferred the production of or the increase in beta-sitosterol compared with the wild type control.

[68058] The nucleic acid sequence of B1597 from Escherichia coli, e.g. as shown in the respective line in column 5 of Table I, application no. 14, has been published in B. And the activity of the gene product thereof is the activity of acid shock protein.

[68059] Accordingly, in one embodiment, the process of the present invention for producing campesterol in a non-human organism, like a microorganism or a plant or a part thereof, comprises increasing or generating the activity of a gene product with the activity of a gene product conferring the activity of “acid shock protein”, especially from Escherichia coli or its functional equivalent or its homolog, e.g. the increase of
[68060] (a) a gene product of a gene comprising the nucleic acid molecule as shown in the respective line in column 5 of Table I (whereby the respective line disclose in column 7 the fine chemical campesterol), application no. 14, preferably the coding region thereof, or a homolog or a fragment thereof, and being depicted in the same respective line as said B1597, or a functional equivalent or a homolog thereof as shown in column 8 of Table I, application no. 14, preferably the coding region thereof, particularly a homolog or functional equivalent as shown in column 8 of Table I B, application no. 14, and being depicted in the same respective line as said B1597, and preferably the activity is increased non-targeted, or
[68061] (b) a polypeptide comprising a polypeptide, a consensus sequence or at least a polypeptide motif as shown in the respective line in column 5 of Table II or in column 8 of Table IV, application no. 14, respectively, and being depicted in the same respective line as said B1597, or a functional equivalent or a homolog thereof as depicted in column 8 of Table II, application no. 14, preferably a homolog or functional equivalent as depicted in column 8 of Table II B, application no. 14, and being depicted in the same respective line as said B1597, and preferably the activity is increased non-targeted, whereby the respective line disclose in column 7 the fine chemical campesterol.

[68062] Accordingly, in one embodiment, the molecule which activity is to be increased in the process of the invention is the gene product with an activity as a “acid shock protein”, preferably it is the molecule of section (a) or (b) of this paragraph.

[68063] In particular, it was observed that in plants, especially in Arabidopsis thaliana, increasing or generating the activity of a gene product non-targeted with the activity of a “acid shock protein”, preferably being encoded by a gene comprising the nucleic acid sequence SEQ ID NO. 38300, preferably the coding region thereof, conferred the production of or the increase in campesterol compared with the wild type control.

[68064] The nucleic acid sequence of B1795 from Escherichia coli, e.g. as shown in the respective line in column 5 of Table I, application no. 14, has been published in B. And the activity of the gene product thereof is the activity of B1795-protein.

[68065] Accordingly, in one embodiment, the process of the present invention for producing campesterol in a non-human organism, like a microorganism or a plant or a part thereof, comprises increasing or generating the activity of a gene product with the activity of a gene product conferring the activity of “B1795-protein”, especially from Escherichia coli or its functional equivalent or its homolog, e.g. the increase of
[68066] (a) a gene product of a gene comprising the nucleic acid molecule as shown in the respective line in column 5 of Table I (whereby the respective line disclose in column 7 the fine chemical campesterol), application no. 14, preferably the coding region thereof, or a homolog or a fragment thereof, and being depicted in the same respective line as said B1795, or a functional equivalent or a homolog thereof as shown in column 8 of Table I, application no. 14, preferably the coding region thereof, particularly a homolog or functional equivalent as shown in column 8 of Table I B, application no. 14, and being depicted in the same respective line as said B1795, and preferably the activity is increased non-targeted, or
[68067] (b) a polypeptide comprising a polypeptide, a consensus sequence or at least a polypeptide motif as shown in the respective line in column 5 of Table II or in column 8 of Table IV, application no. 14, respectively, and being depicted in the same respective line as said B1795, or a functional equivalent or a homolog thereof as depicted in column 8 of Table II, application no. 14, preferably a homolog or functional equivalent as depicted in column 8 of Table II B, application no. 14, and being depicted in the same respective line as said B1795, and preferably the activity is increased non-targeted, whereby the respective line disclose in column 7 the fine chemical campesterol.

[68068] Accordingly, in one embodiment, the molecule which activity is to be increased in the process of the invention is the gene product with an activity as a “B1795-protein”, preferably it is the molecule of section (a) or (b) of this paragraph.

[68069] In particular, it was observed that in plants, especially in Arabidopsis thaliana, increasing or generating the activity of a gene product non-targeted with the activity of a “B1795-protein”, preferably being encoded by a gene comprising the nucleic acid sequence SEQ ID NO. 131539, preferably the coding region thereof, conferred the production of or the increase in campesterol compared with the wild type control.

[68070] The nucleic acid sequence of B1932 from Escherichia coli, e.g. as shown in the respective line in column 5 of Table I, application no. 14, has been published in B. And the activity of the gene product thereof is the activity of acetyltransferase.

[68071] Accordingly, in one embodiment, the process of the present invention for producing campesterol in a non-human organism, like a microorganism or a plant or a part thereof, comprises increasing or generating the activity of a gene product with the activity of a gene product conferring the activity of “acetyltransferase”, especially from Escherichia coli or its functional equivalent or its homolog, e.g. the increase of
[68072] (a) a gene product of a gene comprising the nucleic acid molecule as shown in the respective line in column 5 of Table I (whereby the respective line disclose in column 7 the fine chemical campesterol), application no. 14, preferably the coding region thereof, or a homolog or a fragment thereof, and being depicted in the same respective line as said B1932, or a functional equivalent or a homolog thereof as shown in column 8 of Table I, application no. 14, preferably the coding region thereof, particularly a homolog or functional equivalent as shown in column 8 of Table I B, application no. 14, and being depicted in the same respective line as said B1932, and preferably the activity is increased non-targeted, or
[68073] (b) a polypeptide comprising a polypeptide, a consensus sequence or at least a polypeptide motif as shown in the respective line in column 5 of Table II or in column 8 of Table IV, application no. 14, respectively, and being depicted in the same respective line as said B1932, or a functional equivalent or a homolog thereof as depicted in column 8 of Table II, application no. 14, preferably a homolog or functional equivalent as depicted in column 8 of Table II B, application no. 14, and being depicted in the same respective line as said B1932, and preferably the activity is increased non-targeted, whereby the respective line disclose in column 7 the fine chemical campesterol.

[68074] Accordingly, in one embodiment, the molecule which activity is to be increased in the process of the invention is the gene product with an activity as a “acetyltransferase”, preferably it is the molecule of section (a) or (b) of this paragraph.

[68075] In particular, it was observed that in plants, especially in Arabidopsis thaliana, increasing or generating the activity of a gene product non-targeted with the activity of a “acetyltransferase”, preferably being encoded by a gene comprising the nucleic acid sequence SEQ ID NO. 131799, preferably the coding region thereof, conferred the production of or the increase in campesterol compared with the wild type control.

[68076] The nucleic acid sequence of B2107 from Escherichia coli, e.g. as shown in the respective line in column 5 of Table I, application no. 14, has been published in B. And the activity of the gene product thereof is the activity of b2107-protein.

[68077] Accordingly, in one embodiment, the process of the present invention for producing campesterol in a non-human organism, like a microorganism or a plant or a part thereof, comprises increasing or generating the activity of a gene product with the activity of a gene product conferring the activity of “b2107-protein”, especially from Escherichia coli or its functional equivalent or its homolog, e.g. the increase of
[68078] (a) a gene product of a gene comprising the nucleic acid molecule as shown in the respective line in column 5 of Table I (whereby the respective line disclose in column 7 the fine chemical campesterol), application no. 14, preferably the coding region thereof, or a homolog or a fragment thereof, and being depicted in the same respective line as said B2107, or a functional equivalent or a homolog thereof as shown in column 8 of Table I, application no. 14, preferably the coding region thereof, particularly a homolog or functional equivalent as shown in column 8 of Table I B, application no. 14, and being depicted in the same respective line as said B2107, and preferably the activity is increased non-targeted, or
[68079] (b) a polypeptide comprising a polypeptide, a consensus sequence or at least a polypeptide motif as shown in the respective line in column 5 of Table II or in column 8 of Table IV, application no. 14, respectively, and being depicted in the same respective line as said B2107, or a functional equivalent or a homolog thereof as depicted in column 8 of Table II, application no. 14, preferably a homolog or functional equivalent as depicted in column 8 of Table II B, application no. 14, and being depicted in the same respective line as said B2107, and preferably the activity is increased non-targeted, whereby the respective line disclose in column 7 the fine chemical campesterol.

[68080] Accordingly, in one embodiment, the molecule which activity is to be increased in the process of the invention is the gene product with an activity as a “b2107-protein”, preferably it is the molecule of section (a) or (b) of this paragraph.

[68081] In particular, it was observed that in plants, especially in Arabidopsis thaliana, increasing or generating the activity of a gene product non-targeted with the activity of a “b2107-protein”, preferably being encoded by a gene comprising the nucleic acid sequence SEQ ID NO. 39002, preferably the coding region thereof, conferred the production of or the increase in campesterol compared with the wild type control.

[68082] The nucleic acid sequence of B2276 from Escherichia coli, e.g. as shown in the respective line in column 5 of Table I, application no. 14, has been published in B. And the activity of the gene product thereof is the activity of NADH dehydrogenase I chain N.

[68083] Accordingly, in one embodiment, the process of the present invention for producing campesterol in a non-human organism, like a microorganism or a plant or a part thereof, comprises increasing or generating the activity of a gene product with the activity of a gene product conferring the activity of “NADH dehydrogenase I chain N”, especially from Escherichia coli or its functional equivalent or its homolog, e.g. the increase of
[68084] (a) a gene product of a gene comprising the nucleic acid molecule as shown in the respective line in column 5 of Table I (whereby the respective line disclose in column 7 the fine chemical campesterol), application no. 14, preferably the coding region thereof, or a homolog or a fragment thereof, and being depicted in the same respective line as said B2276, or a functional equivalent or a homolog thereof as shown in column 8 of Table I, application no. 14, preferably the coding region thereof, particularly a homolog or functional equivalent as shown in column 8 of Table I B, application no. 14, and being depicted in the same respective line as said B2276, and preferably the activity is increased non-targeted, or
[68085] (b) a polypeptide comprising a polypeptide, a consensus sequence or at least a polypeptide motif as shown in the respective line in column 5 of Table II or in column 8 of Table IV, application no. 14, respectively, and being depicted in the same respective line as said B2276, or a functional equivalent or a homolog thereof as depicted in column 8 of Table II, application no. 14, preferably a homolog or functional equivalent as depicted in column 8 of Table II B, application no. 14, and being depicted in the same respective line as said B2276, and preferably the activity is increased non-targeted, whereby the respective line disclose in column 7 the fine chemical campesterol.

[68086] Accordingly, in one embodiment, the molecule which activity is to be increased in the process of the invention is the gene product with an activity as a “NADH dehydrogenase I chain N”, preferably it is the molecule of section (a) or (b) of this paragraph.

[68087] In particular, it was observed that in plants, especially in Arabidopsis thaliana, increasing or generating the activity of a gene product non-targeted with the activity of a “NADH dehydrogenase I chain N”, preferably being encoded by a gene comprising the nucleic acid sequence SEQ ID NO. 131839, preferably the coding region thereof, conferred the production of or the increase in campesterol compared with the wild type control.

[68088] The nucleic acid sequence of B2312 from Escherichia coli, e.g. as shown in the respective line in column 5 of Table I, application no. 14, has been published in B. And the activity of the gene product thereof is the activity of amidophosphoribosyltransferase.

[68089] Accordingly, in one embodiment, the process of the present invention for producing campesterol in a non-human organism, like a microorganism or a plant or a part thereof, comprises increasing or generating the activity of a gene product with the activity of a gene product conferring the activity of “amidophosphoribosyltransferase”, especially from Escherichia coli or its functional equivalent or its homolog, e.g. the increase of
[68090] (a) a gene product of a gene comprising the nucleic acid molecule as shown in the respective line in column 5 of Table I (whereby the respective line disclose in column 7 the fine chemical campesterol), application no. 14, preferably the coding region thereof, or a homolog or a fragment thereof, and being depicted in the same respective line as said B2312, or a functional equivalent or a homolog thereof as shown in column 8 of Table I, application no. 14, preferably the coding region thereof, particularly a homolog or functional equivalent as shown in column 8 of Table I B, application no. 14, and being depicted in the same respective line as said B2312, and preferably the activity is increased non-targeted, or
[68091] (b) a polypeptide comprising a polypeptide, a consensus sequence or at least a polypeptide motif as shown in the respective line in column 5 of Table II or in column 8 of Table IV, application no. 14, respectively, and being depicted in the same respective line as said B2312, or a functional equivalent or a homolog thereof as depicted in column 8 of Table II, application no. 14, preferably a homolog or functional equivalent as depicted in column 8 of Table II B, application no. 14, and being depicted in the same respective line as said B2312, and preferably the activity is increased non-targeted, whereby the respective line disclose in column 7 the fine chemical campesterol.

[68092] Accordingly, in one embodiment, the molecule which activity is to be increased in the process of the invention is the gene product with an activity as a “amidophosphoribosyltransferase”, preferably it is the molecule of section (a) or (b) of this paragraph.

[68093] In particular, it was observed that in plants, especially in Arabidopsis thaliana, increasing or generating the activity of a gene product non-targeted with the activity of a “amidophosphoribosyltransferase”, preferably being encoded by a gene comprising the nucleic acid sequence SEQ ID NO. 132086, preferably the coding region thereof, conferred the production of or the increase in campesterol compared with the wild type control.

[68094] The nucleic acid sequence of B2376 from Escherichia coli, e.g. as shown in the respective line in column 5 of Table I, application no. 14, has been published in B. And the activity of the gene product thereof is the activity of b2376-protein.

[68095] Accordingly, in one embodiment, the process of the present invention for producing campesterol in a non-human organism, like a microorganism or a plant or a part thereof, comprises increasing or generating the activity of a gene product with the activity of a gene product conferring the activity of “b2376-protein”, especially from Escherichia coli or its functional equivalent or its homolog, e.g. the increase of
[68096] (a) a gene product of a gene comprising the nucleic acid molecule as shown in the respective line in column 5 of Table I (whereby the respective line disclose in column 7 the fine chemical campesterol), application no. 14, preferably the coding region thereof, or a homolog or a fragment thereof, and being depicted in the same respective line as said B2376, or a functional equivalent or a homolog thereof as shown in column 8 of Table I, application no. 14, preferably the coding region thereof, particularly a homolog or functional equivalent as shown in column 8 of Table I B, application no. 14, and being depicted in the same respective line as said B2376, and preferably the activity is increased plastidic, or
[68097] (b) a polypeptide comprising a polypeptide, a consensus sequence or at least a polypeptide motif as shown in the respective line in column 5 of Table II or in column 8 of Table IV, application no. 14, respectively, and being depicted in the same respective line as said B2376, or a functional equivalent or a homolog thereof as depicted in column 8 of Table II, application no. 14, preferably a homolog or functional equivalent as depicted in column 8 of Table II B, application no. 14, and being depicted in the same respective line as said B2376, and preferably the activity is increased plastidic, whereby the respective line disclose in column 7 the fine chemical campesterol.

[68098] Accordingly, in one embodiment, the molecule which activity is to be increased in the process of the invention is the gene product with an activity as a “b2376-protein”, preferably it is the molecule of section (a) or (b) of this paragraph.

[68099] In particular, it was observed that in plants, especially in Arabidopsis thaliana, increasing or generating the activity of a gene product plastidic with the activity of a “b2376-protein”, preferably being encoded by a gene comprising the nucleic acid sequence SEQ ID NO. 132695, preferably the coding region thereof, conferred the production of or the increase in campesterol compared with the wild type control.

[68100] The nucleic acid sequence of B2399 from Escherichia coli, e.g. as shown in the respective line in column 5 of Table I, application no. 14, has been published in B. And the activity of the gene product thereof is the activity of b2399-protein.

[68101] Accordingly, in one embodiment, the process of the present invention for producing campesterol in a non-human organism, like a microorganism or a plant or a part thereof, comprises increasing or generating the activity of a gene product with the activity of a gene product conferring the activity of “b2399-protein”, especially from Escherichia coli or its functional equivalent or its homolog, e.g. the increase of
[68102] (a) a gene product of a gene comprising the nucleic acid molecule as shown in the respective line in column 5 of Table I (whereby the respective line disclose in column 7 the fine chemical campesterol), application no. 14, preferably the coding region thereof, or a homolog or a fragment thereof, and being depicted in the same respective line as said B2399, or a functional equivalent or a homolog thereof as shown in column 8 of Table I, application no. 14, preferably the coding region thereof, particularly a homolog or functional equivalent as shown in column 8 of Table I B, application no. 14, and being depicted in the same respective line as said B2399, and preferably the activity is increased non-targeted, or
[68103] (b) a polypeptide comprising a polypeptide, a consensus sequence or at least a polypeptide motif as shown in the respective line in column 5 of Table II or in column 8 of Table IV, application no. 14, respectively, and being depicted in the same respective line as said B2399, or a functional equivalent or a homolog thereof as depicted in column 8 of Table II, application no. 14, preferably a homolog or functional equivalent as depicted in column 8 of Table II B, application no. 14, and being depicted in the same respective line as said B2399, and preferably the activity is increased non-targeted, whereby the respective line disclose in column 7 the fine chemical campesterol.

[68104] Accordingly, in one embodiment, the molecule which activity is to be increased in the process of the invention is the gene product with an activity as a “b2399-protein”, preferably it is the molecule of section (a) or (b) of this paragraph.

[68105] In particular, it was observed that in plants, especially in Arabidopsis thaliana, increasing or generating the activity of a gene product non-targeted with the activity of a “b2399-protein”, preferably being encoded by a gene comprising the nucleic acid sequence SEQ ID NO. 39237, preferably the coding region thereof, conferred the production of or the increase in campesterol compared with the wild type control.

[68106] The nucleic acid sequence of B2474 from Escherichia coli, e.g. as shown in the respective line in column 5 of Table I, application no. 14, has been published in B. And the activity of the gene product thereof is the activity of b2474-protein.

[68107] Accordingly, in one embodiment, the process of the present invention for producing campesterol in a non-human organism, like a microorganism or a plant or a part thereof, comprises increasing or generating the activity of a gene product with the activity of a gene product conferring the activity of “b2474-protein”, especially from Escherichia coli or its functional equivalent or its homolog, e.g. the increase of
[68108] (a) a gene product of a gene comprising the nucleic acid molecule as shown in the respective line in column 5 of Table I (whereby the respective line disclose in column 7 the fine chemical campesterol), application no. 14, preferably the coding region thereof, or a homolog or a fragment thereof, and being depicted in the same respective line as said B2474, or a functional equivalent or a homolog thereof as shown in column 8 of Table I, application no. 14, preferably the coding region thereof, particularly a homolog or functional equivalent as shown in column 8 of Table I B, application no. 14, and being depicted in the same respective line as said B2474, and preferably the activity is increased non-targeted, or
[68109] (b) a polypeptide comprising a polypeptide, a consensus sequence or at least a polypeptide motif as shown in the respective line in column 5 of Table II or in column 8 of Table IV, application no. 14, respectively, and being depicted in the same respective line as said B2474, or a functional equivalent or a homolog thereof as depicted in column 8 of Table II, application no. 14, preferably a homolog or functional equivalent as depicted in column 8 of Table II B, application no. 14, and being depicted in the same respective line as said B2474, and preferably the activity is increased non-targeted, whereby the respective line disclose in column 7 the fine chemical campesterol.

[68110] Accordingly, in one embodiment, the molecule which activity is to be increased in the process of the invention is the gene product with an activity as a “b2474-protein”, preferably it is the molecule of section (a) or (b) of this paragraph.

[68111] In particular, it was observed that in plants, especially in Arabidopsis thaliana, increasing or generating the activity of a gene product non-targeted with the activity of a “b2474-protein”, preferably being encoded by a gene comprising the nucleic acid sequence SEQ ID NO. 40329, preferably the coding region thereof, conferred the production of or the increase in campesterol compared with the wild type control.

[68112] The nucleic acid sequence of B2493 from Escherichia coli, e.g. as shown in the respective line in column 5 of Table I, application no. 14, has been published in B. And the activity of the gene product thereof is the activity of permease protein.

[68113] Accordingly, in one embodiment, the process of the present invention for producing campesterol in a non-human organism, like a microorganism or a plant or a part thereof, comprises increasing or generating the activity of a gene product with the activity of a gene product conferring the activity of “permease protein”, especially from Escherichia coli or its functional equivalent or its homolog, e.g. the increase of
[68114] (a) a gene product of a gene comprising the nucleic acid molecule as shown in the respective line in column 5 of Table I (whereby the respective line disclose in column 7 the fine chemical campesterol), application no. 14, preferably the coding region thereof, or a homolog or a fragment thereof, and being depicted in the same respective line as said B2493, or a functional equivalent or a homolog thereof as shown in column 8 of Table I, application no. 14, preferably the coding region thereof, particularly a homolog or functional equivalent as shown in column 8 of Table I B, application no. 14, and being depicted in the same respective line as said B2493, and preferably the activity is increased non-targeted, or
[68115] (b) a polypeptide comprising a polypeptide, a consensus sequence or at least a polypeptide motif as shown in the respective line in column 5 of Table II or in column 8 of Table IV, application no. 14, respectively, and being depicted in the same respective line as said B2493, or a functional equivalent or a homolog thereof as depicted in column 8 of Table II, application no. 14, preferably a homolog or functional equivalent as depicted in column 8 of Table II B, application no. 14, and being depicted in the same respective line as said B2493, and preferably the activity is increased non-targeted, whereby the respective line disclose in column 7 the fine chemical campesterol.

[68116] Accordingly, in one embodiment, the molecule which activity is to be increased in the process of the invention is the gene product with an activity as a “permease protein”, preferably it is the molecule of section (a) or (b) of this paragraph.

[68117] In particular, it was observed that in plants, especially in Arabidopsis thaliana, increasing or generating the activity of a gene product non-targeted with the activity of a “permease protein”, preferably being encoded by a gene comprising the nucleic acid sequence SEQ ID NO. 132706, preferably the coding region thereof, conferred the production of or the increase in campesterol compared with the wild type control.

[68118] The nucleic acid sequence of B2513 from Escherichia coli, e.g. as shown in the respective line in column 5 of Table I, application no. 14, has been published in B. And the activity of the gene product thereof is the activity of b2513-protein.

[68119] Accordingly, in one embodiment, the process of the present invention for producing campesterol in a non-human organism, like a microorganism or a plant or a part thereof, comprises increasing or generating the activity of a gene product with the activity of a gene product conferring the activity of “b2513-protein”, especially from Escherichia coli or its functional equivalent or its homolog, e.g. the increase of
[68120] (a) a gene product of a gene comprising the nucleic acid molecule as shown in the respective line in column 5 of Table I (whereby the respective line disclose in column 7 the fine chemical campesterol), application no. 14, preferably the coding region thereof, or a homolog or a fragment thereof, and being depicted in the same respective line as said B2513, or a functional equivalent or a homolog thereof as shown in column 8 of Table I, application no. 14, preferably the coding region thereof, particularly a homolog or functional equivalent as shown in column 8 of Table I B, application no. 14, and being depicted in the same respective line as said B2513, and preferably the activity is increased non-targeted, or
[68121] (b) a polypeptide comprising a polypeptide, a consensus sequence or at least a polypeptide motif as shown in the respective line in column 5 of Table II or in column 8 of Table IV, application no. 14, respectively, and being depicted in the same respective line as said B2513, or a functional equivalent or a homolog thereof as depicted in column 8 of Table II, application no. 14, preferably a homolog or functional equivalent as depicted in column 8 of Table II B, application no. 14, and being depicted in the same respective line as said B2513, and preferably the activity is increased non-targeted, whereby the respective line disclose in column 7 the fine chemical campesterol.

[68122] Accordingly, in one embodiment, the molecule which activity is to be increased in the process of the invention is the gene product with an activity as a “b2513-protein”, preferably it is the molecule of section (a) or (b) of this paragraph.

[68123] In particular, it was observed that in plants, especially in Arabidopsis thaliana, increasing or generating the activity of a gene product non-targeted with the activity of a “b2513-protein”, preferably being encoded by a gene comprising the nucleic acid sequence SEQ ID NO. 9167, preferably the coding region thereof, conferred the production of or the increase in campesterol compared with the wild type control.

[68124] The nucleic acid sequence of B2546 from Escherichia coli, e.g. as shown in the respective line in column 5 of Table I, application no. 14, has been published in B. And the activity of the gene product thereof is the activity of putative transport system permease protein.

[68125] Accordingly, in one embodiment, the process of the present invention for producing beta-sitosterol in a non-human organism, like a microorganism or a plant or a part thereof, comprises increasing or generating the activity of a gene product with the activity of a gene product conferring the activity of “putative transport system permease protein”, especially from Escherichia coli or its functional equivalent or its homolog, e.g. the increase of
[68126] (a) a gene product of a gene comprising the nucleic acid molecule as shown in the respective line in column 5 of Table I (whereby the respective line disclose in column 7 the fine chemical beta-sitosterol), application no. 14, preferably the coding region thereof, or a homolog or a fragment thereof, and being depicted in the same respective line as said B2546, or a functional equivalent or a homolog thereof as shown in column 8 of Table I, application no. 14, preferably the coding region thereof, particularly a homolog or functional equivalent as shown in column 8 of Table I B, application no. 14, and being depicted in the same respective line as said B2546, and preferably the activity is increased non-targeted, or
[68127] (b) a polypeptide comprising a polypeptide, a consensus sequence or at least a polypeptide motif as shown in the respective line in column 5 of Table II or in column 8 of Table IV, application no. 14, respectively, and being depicted in the same respective line as said B2546, or a functional equivalent or a homolog thereof as depicted in column 8 of Table II, application no. 14, preferably a homolog or functional equivalent as depicted in column 8 of Table II B, application no. 14, and being depicted in the same respective line as said B2546, and preferably the activity is increased non-targeted, whereby the respective line disclose in column 7 the fine chemical beta-sitosterol.

[68128] Accordingly, in one embodiment, the molecule which activity is to be increased in the process of the invention is the gene product with an activity as a “putative transport system permease protein”, preferably it is the molecule of section (a) or (b) of this paragraph.

[68129] In particular, it was observed that in plants, especially in Arabidopsis thaliana, increasing or generating the activity of a gene product non-targeted with the activity of a “putative transport system permease protein”, preferably being encoded by a gene comprising the nucleic acid sequence SEQ ID NO. 99898, preferably the coding region thereof, conferred the production of or the increase in beta-sitosterol compared with the wild type control.

[68130] The nucleic acid sequence of B2546 from Escherichia coli, e.g. as shown in the respective line in column 5 of Table I, application no. 14, has been published in B. And the activity of the gene product thereof is the activity of putative transport system permease protein.

[68131] Accordingly, in one embodiment, the process of the present invention for producing campesterol in a non-human organism, like a microorganism or a plant or a part thereof, comprises increasing or generating the activity of a gene product with the activity of a gene product conferring the activity of “putative transport system permease protein”, especially from Escherichia coli or its functional equivalent or its homolog, e.g. the increase of
[68132] (a) a gene product of a gene comprising the nucleic acid molecule as shown in the respective line in column 5 of Table I (whereby the respective line disclose in column 7 the fine chemical campesterol), application no. 14, preferably the coding region thereof, or a homolog or a fragment thereof, and being depicted in the same respective line as said B2546, or a functional equivalent or a homolog thereof as shown in column 8 of Table I, application no. 14, preferably the coding region thereof, particularly a homolog or functional equivalent as shown in column 8 of Table I B, application no. 14, and being depicted in the same respective line as said B2546, and preferably the activity is increased non-targeted, or
[68133] (b) a polypeptide comprising a polypeptide, a consensus sequence or at least a polypeptide motif as shown in the respective line in column 5 of Table II or in column 8 of Table IV, application no. 14, respectively, and being depicted in the same respective line as said B2546, or a functional equivalent or a homolog thereof as depicted in column 8 of Table II, application no. 14, preferably a homolog or functional equivalent as depicted in column 8 of Table II B, application no. 14, and being depicted in the same respective line as said B2546, and preferably the activity is increased non-targeted, whereby the respective line disclose in column 7 the fine chemical campesterol.

[68134] Accordingly, in one embodiment, the molecule which activity is to be increased in the process of the invention is the gene product with an activity as a “putative transport system permease protein”, preferably it is the molecule of section (a) or (b) of this paragraph.

[68135] In particular, it was observed that in plants, especially in Arabidopsis thaliana, increasing or generating the activity of a gene product non-targeted with the activity of a “putative transport system permease protein”, preferably being encoded by a gene comprising the nucleic acid sequence SEQ ID NO. 99898, preferably the coding region thereof, conferred the production of or the increase in campesterol compared with the wild type control.

[68136] The nucleic acid sequence of B2654 from Escherichia coli, e.g. as shown in the respective line in column 5 of Table I, application no. 14, has been published in B. And the activity of the gene product thereof is the activity of b2654-protein.

[68137] Accordingly, in one embodiment, the process of the present invention for producing campesterol in a non-human organism, like a microorganism or a plant or a part thereof, comprises increasing or generating the activity of a gene product with the activity of a gene product conferring the activity of “b2654-protein”, especially from Escherichia coli or its functional equivalent or its homolog, e.g. the increase of
[68138] (a) a gene product of a gene comprising the nucleic acid molecule as shown in the respective line in column 5 of Table I (whereby the respective line disclose in column 7 the fine chemical campesterol), application no. 14, preferably the coding region thereof, or a homolog or a fragment thereof, and being depicted in the same respective line as said B2654, or a functional equivalent or a homolog thereof as shown in column 8 of Table I, application no. 14, preferably the coding region thereof, particularly a homolog or functional equivalent as shown in column 8 of Table I B, application no. 14, and being depicted in the same respective line as said B2654, and preferably the activity is increased non-targeted, or
[68139] (b) a polypeptide comprising a polypeptide, a consensus sequence or at least a polypeptide motif as shown in the respective line in column 5 of Table II or in column 8 of Table IV, application no. 14, respectively, and being depicted in the same respective line as said B2654, or a functional equivalent or a homolog thereof as depicted in column 8 of Table II, application no. 14, preferably a homolog or functional equivalent as depicted in column 8 of Table II B, application no. 14, and being depicted in the same respective line as said B2654, and preferably the activity is increased non-targeted, whereby the respective line disclose in column 7 the fine chemical campesterol.

[68140] Accordingly, in one embodiment, the molecule which activity is to be increased in the process of the invention is the gene product with an activity as a “b2654-protein”, preferably it is the molecule of section (a) or (b) of this paragraph.

[68141] In particular, it was observed that in plants, especially in Arabidopsis thaliana, increasing or generating the activity of a gene product non-targeted with the activity of a “b2654-protein”, preferably being encoded by a gene comprising the nucleic acid sequence SEQ ID NO. 125226, preferably the coding region thereof, conferred the production of or the increase in campesterol compared with the wild type control.

[68142] The nucleic acid sequence of B2701 from Escherichia coli, e.g. as shown in the respective line in column 5 of Table I, application no. 14, has been published in B. And the activity of the gene product thereof is the activity of murein transglycosylase.

[68143] Accordingly, in one embodiment, the process of the present invention for producing campesterol in a non-human organism, like a microorganism or a plant or a part thereof, comprises increasing or generating the activity of a gene product with the activity of a gene product conferring the activity of “murein transglycosylase”, especially from Escherichia coli or its functional equivalent or its homolog, e.g. the increase of
[68144] (a) a gene product of a gene comprising the nucleic acid molecule as shown in the respective line in column 5 of Table I (whereby the respective line disclose in column 7 the fine chemical campesterol), application no. 14, preferably the coding region thereof, or a homolog or a fragment thereof, and being depicted in the same respective line as said B2701, or a functional equivalent or a homolog thereof as shown in column 8 of Table I, application no. 14, preferably the coding region thereof, particularly a homolog or functional equivalent as shown in column 8 of Table I B, application no. 14, and being depicted in the same respective line as said B2701, and preferably the activity is increased non-targeted, or
[68145] (b) a polypeptide comprising a polypeptide, a consensus sequence or at least a polypeptide motif as shown in the respective line in column 5 of Table II or in column 8 of Table IV, application no. 14, respectively, and being depicted in the same respective line as said B2701, or a functional equivalent or a homolog thereof as depicted in column 8 of Table II, application no. 14, preferably a homolog or functional equivalent as depicted in column 8 of Table II B, application no. 14, and being depicted in the same respective line as said B2701, and preferably the activity is increased non-targeted, whereby the respective line disclose in column 7 the fine chemical campesterol.

[68146] Accordingly, in one embodiment, the molecule which activity is to be increased in the process of the invention is the gene product with an activity as a “murein transglycosylase”, preferably it is the molecule of section (a) or (b) of this paragraph.

[68147] In particular, it was observed that in plants, especially in Arabidopsis thaliana, increasing or generating the activity of a gene product non-targeted with the activity of a “murein transglycosylase”, preferably being encoded by a gene comprising the nucleic acid sequence SEQ ID NO. 80756, preferably the coding region thereof, conferred the production of or the increase in campesterol compared with the wild type control.

[68148] The nucleic acid sequence of B2766 from Escherichia coli, e.g. as shown in the respective line in column 5 of Table I, application no. 14, has been published in B. And the activity of the gene product thereof is the activity of oxidoreductase.

[68149] Accordingly, in one embodiment, the process of the present invention for producing campesterol in a non-human organism, like a microorganism or a plant or a part thereof, comprises increasing or generating the activity of a gene product with the activity of a gene product conferring the activity of “oxidoreductase”, especially from Escherichia coli or its functional equivalent or its homolog, e.g. the increase of
[68150] (a) a gene product of a gene comprising the nucleic acid molecule as shown in the respective line in column 5 of Table I (whereby the respective line disclose in column 7 the fine chemical campesterol), application no. 14, preferably the coding region thereof, or a homolog or a fragment thereof, and being depicted in the same respective line as said B2766, or a functional equivalent or a homolog thereof as shown in column 8 of Table I, application no. 14, preferably the coding region thereof, particularly a homolog or functional equivalent as shown in column 8 of Table I B, application no. 14, and being depicted in the same respective line as said B2766, and preferably the activity is increased plastidic, or
[68151] (b) a polypeptide comprising a polypeptide, a consensus sequence or at least a polypeptide motif as shown in the respective line in column 5 of Table II or in column 8 of Table IV, application no. 14, respectively, and being depicted in the same respective line as said B2766, or a functional equivalent or a homolog thereof as depicted in column 8 of Table II, application no. 14, preferably a homolog or functional equivalent as depicted in column 8 of Table II B, application no. 14, and being depicted in the same respective line as said B2766, and preferably the activity is increased plastidic, whereby the respective line disclose in column 7 the fine chemical campesterol.

[68152] Accordingly, in one embodiment, the molecule which activity is to be increased in the process of the invention is the gene product with an activity as a “oxidoreductase”, preferably it is the molecule of section (a) or (b) of this paragraph.

[68153] In particular, it was observed that in plants, especially in Arabidopsis thaliana, increasing or generating the activity of a gene product plastidic with the activity of a “oxidoreductase”, preferably being encoded by a gene comprising the nucleic acid sequence SEQ ID NO. 132821, preferably the coding region thereof, conferred the production of or the increase in campesterol compared with the wild type control.

[68154] The nucleic acid sequence of B2866 from Escherichia coli, e.g. as shown in the respective line in column 5 of Table I, application no. 14, has been published in B. And the activity of the gene product thereof is the activity of xanthine dehydrogenase.

[68155] Accordingly, in one embodiment, the process of the present invention for producing campesterol in a non-human organism, like a microorganism or a plant or a part thereof, comprises increasing or generating the activity of a gene product with the activity of a gene product conferring the activity of “xanthine dehydrogenase”, especially from Escherichia coli or its functional equivalent or its homolog, e.g. the increase of
[68156] (a) a gene product of a gene comprising the nucleic acid molecule as shown in the respective line in column 5 of Table I (whereby the respective line disclose in column 7 the fine chemical campesterol), application no. 14, preferably the coding region thereof, or a homolog or a fragment thereof, and being depicted in the same respective line as said B2866, or a functional equivalent or a homolog thereof as shown in column 8 of Table I, application no. 14, preferably the coding region thereof, particularly a homolog or functional equivalent as shown in column 8 of Table I B, application no. 14, and being depicted in the same respective line as said B2866, and preferably the activity is increased non-targeted, or
[68157] (b) a polypeptide comprising a polypeptide, a consensus sequence or at least a polypeptide motif as shown in the respective line in column 5 of Table II or in column 8 of Table IV, application no. 14, respectively, and being depicted in the same respective line as said B2866, or a functional equivalent or a homolog thereof as depicted in column 8 of Table II, application no. 14, preferably a homolog or functional equivalent as depicted in column 8 of Table II B, application no. 14, and being depicted in the same respective line as said B2866, and preferably the activity is increased non-targeted, whereby the respective line disclose in column 7 the fine chemical campesterol.

[68158] Accordingly, in one embodiment, the molecule which activity is to be increased in the process of the invention is the gene product with an activity as a “xanthine dehydrogenase”, preferably it is the molecule of section (a) or (b) of this paragraph.

[68159] In particular, it was observed that in plants, especially in Arabidopsis thaliana, increasing or generating the activity of a gene product non-targeted with the activity of a “xanthine dehydrogenase”, preferably being encoded by a gene comprising the nucleic acid sequence SEQ ID NO. 115864, preferably the coding region thereof, conferred the production of or the increase in campesterol compared with the wild type control.

[68160] The nucleic acid sequence of B3151 from Escherichia coli, e.g. as shown in the respective line in column 5 of Table I, application no. 14, has been published in B. And the activity of the gene product thereof is the activity of b3151-protein.

[68161] Accordingly, in one embodiment, the process of the present invention for producing campesterol in a non-human organism, like a microorganism or a plant or a part thereof, comprises increasing or generating the activity of a gene product with the activity of a gene product conferring the activity of “b3151-protein”, especially from Escherichia coli or its functional equivalent or its homolog, e.g. the increase of
[68162] (a) a gene product of a gene comprising the nucleic acid molecule as shown in the respective line in column 5 of Table I (whereby the respective line disclose in column 7 the fine chemical campesterol), application no. 14, preferably the coding region thereof, or a homolog or a fragment thereof, and being depicted in the same respective line as said B3151, or a functional equivalent or a homolog thereof as shown in column 8 of Table I, application no. 14, preferably the coding region thereof, particularly a homolog or functional equivalent as shown in column 8 of Table I B, application no. 14, and being depicted in the same respective line as said B3151, and preferably the activity is increased non-targeted, or
[68163] (b) a polypeptide comprising a polypeptide, a consensus sequence or at least a polypeptide motif as shown in the respective line in column 5 of Table II or in column 8 of Table IV, application no. 14, respectively, and being depicted in the same respective line as said B3151, or a functional equivalent or a homolog thereof as depicted in column 8 of Table II, application no. 14, preferably a homolog or functional equivalent as depicted in column 8 of Table II B, application no. 14, and being depicted in the same respective line as said B3151, and preferably the activity is increased non-targeted, whereby the respective line disclose in column 7 the fine chemical campesterol.

[68164] Accordingly, in one embodiment, the molecule which activity is to be increased in the process of the invention is the gene product with an activity as a “b3151-protein”, preferably it is the molecule of section (a) or (b) of this paragraph.

[68165] In particular, it was observed that in plants, especially in Arabidopsis thaliana, increasing or generating the activity of a gene product non-targeted with the activity of a “b3151-protein”, preferably being encoded by a gene comprising the nucleic acid sequence SEQ ID NO. 42477, preferably the coding region thereof, conferred the production of or the increase in campesterol compared with the wild type control.

[68166] The nucleic acid sequence of B3262 from Escherichia coli, e.g. as shown in the respective line in column 5 of Table I, application no. 14, has been published in B. And the activity of the gene product thereof is the activity of methyltransferase.

[68167] Accordingly, in one embodiment, the process of the present invention for producing beta-sitosterol in a non-human organism, like a microorganism or a plant or a part thereof, comprises increasing or generating the activity of a gene product with the activity of a gene product conferring the activity of “methyltransferase”, especially from Escherichia coli or its functional equivalent or its homolog, e.g. the increase of
[68168] (a) a gene product of a gene comprising the nucleic acid molecule as shown in the respective line in column 5 of Table I (whereby the respective line disclose in column 7 the fine chemical beta-sitosterol), application no. 14, preferably the coding region thereof, or a homolog or a fragment thereof, and being depicted in the same respective line as said B3262, or a functional equivalent or a homolog thereof as shown in column 8 of Table I, application no. 14, preferably the coding region thereof, particularly a homolog or functional equivalent as shown in column 8 of Table I B, application no. 14, and being depicted in the same respective line as said B3262, and preferably the activity is increased non-targeted, or
[68169] (b) a polypeptide comprising a polypeptide, a consensus sequence or at least a polypeptide motif as shown in the respective line in column 5 of Table II or in column 8 of Table IV, application no. 14, respectively, and being depicted in the same respective line as said B3262, or a functional equivalent or a homolog thereof as depicted in column 8 of Table II, application no. 14, preferably a homolog or functional equivalent as depicted in column 8 of Table II B, application no. 14, and being depicted in the same respective line as said B3262, and preferably the activity is increased non-targeted, whereby the respective line disclose in column 7 the fine chemical beta-sitosterol.

[68170] Accordingly, in one embodiment, the molecule which activity is to be increased in the process of the invention is the gene product with an activity as a “methyltransferase”, preferably it is the molecule of section (a) or (b) of this paragraph.

[68171] In particular, it was observed that in plants, especially in Arabidopsis thaliana, increasing or generating the activity of a gene product non-targeted with the activity of a “methyltransferase”, preferably being encoded by a gene comprising the nucleic acid sequence SEQ ID NO. 42502, preferably the coding region thereof, conferred the production of or the increase in beta-sitosterol compared with the wild type control.

[68172] The nucleic acid sequence of B3616 from Escherichia coli, e.g. as shown in the respective line in column 5 of Table I, application no. 14, has been published in B. And the activity of the gene product thereof is the activity of threonine dehydrogenase.

[68173] Accordingly, in one embodiment, the process of the present invention for producing campesterol in a non-human organism, like a microorganism or a plant or a part thereof, comprises increasing or generating the activity of a gene product with the activity of a gene product conferring the activity of “threonine dehydrogenase”, especially from Escherichia coli or its functional equivalent or its homolog, e.g. the increase of
[68174] (a) a gene product of a gene comprising the nucleic acid molecule as shown in the respective line in column 5 of Table I (whereby the respective line disclose in column 7 the fine chemical campesterol), application no. 14, preferably the coding region thereof, or a homolog or a fragment thereof, and being depicted in the same respective line as said B3616, or a functional equivalent or a homolog thereof as shown in column 8 of Table I, application no. 14, preferably the coding region thereof, particularly a homolog or functional equivalent as shown in column 8 of Table I B, application no. 14, and being depicted in the same respective line as said B3616, and preferably the activity is increased non-targeted, or
[68175] (b) a polypeptide comprising a polypeptide, a consensus sequence or at least a polypeptide motif as shown in the respective line in column 5 of Table II or in column 8 of Table IV, application no. 14, respectively, and being depicted in the same respective line as said B3616, or a functional equivalent or a homolog thereof as depicted in column 8 of Table II, application no. 14, preferably a homolog or functional equivalent as depicted in column 8 of Table II B, application no. 14, and being depicted in the same respective line as said B3616, and preferably the activity is increased non-targeted, whereby the respective line disclose in column 7 the fine chemical campesterol.

[68176] Accordingly, in one embodiment, the molecule which activity is to be increased in the process of the invention is the gene product with an activity as a “threonine dehydrogenase”, preferably it is the molecule of section (a) or (b) of this paragraph.

[68177] In particular, it was observed that in plants, especially in Arabidopsis thaliana, increasing or generating the activity of a gene product non-targeted with the activity of a “threonine dehydrogenase”, preferably being encoded by a gene comprising the nucleic acid sequence SEQ ID NO. 42600, preferably the coding region thereof, conferred the production of or the increase in campesterol compared with the wild type control.

[68178] The nucleic acid sequence of B3989 from Escherichia coli, e.g. as shown in the respective line in column 5 of Table I, application no. 14, has been published in B. And the activity of the gene product thereof is the activity of b3989-protein.

[68179] Accordingly, in one embodiment, the process of the present invention for producing beta-sitosterol in a non-human organism, like a microorganism or a plant or a part thereof, comprises increasing or generating the activity of a gene product with the activity of a gene product conferring the activity of “b3989-protein”, especially from Escherichia coli or its functional equivalent or its homolog, e.g. the increase of
[68180] (a) a gene product of a gene comprising the nucleic acid molecule as shown in the respective line in column 5 of Table I (whereby the respective line disclose in column 7 the fine chemical beta-sitosterol), application no. 14, preferably the coding region thereof, or a homolog or a fragment thereof, and being depicted in the same respective line as said B3989, or a functional equivalent or a homolog thereof as shown in column 8 of Table I, application no. 14, preferably the coding region thereof, particularly a homolog or functional equivalent as shown in column 8 of Table I B, application no. 14, and being depicted in the same respective line as said B3989, and preferably the activity is increased non-targeted, or
[68181] (b) a polypeptide comprising a polypeptide, a consensus sequence or at least a polypeptide motif as shown in the respective line in column 5 of Table II or in column 8 of Table IV, application no. 14, respectively, and being depicted in the same respective line as said B3989, or a functional equivalent or a homolog thereof as depicted in column 8 of Table II, application no. 14, preferably a homolog or functional equivalent as depicted in column 8 of Table II B, application no. 14, and being depicted in the same respective line as said B3989, and preferably the activity is increased non-targeted, whereby the respective line disclose in column 7 the fine chemical beta-sitosterol.

[68182] Accordingly, in one embodiment, the molecule which activity is to be increased in the process of the invention is the gene product with an activity as a “b3989-protein”, preferably it is the molecule of section (a) or (b) of this paragraph.

[68183] In particular, it was observed that in plants, especially in Arabidopsis thaliana, increasing or generating the activity of a gene product non-targeted with the activity of a “b3989-protein”, preferably being encoded by a gene comprising the nucleic acid sequence SEQ ID NO. 44372, preferably the coding region thereof, conferred the production of or the increase in beta-sitosterol compared with the wild type control.

[68184] The nucleic acid sequence of B3989 from Escherichia coli, e.g. as shown in the respective line in column 5 of Table I, application no. 14, has been published in B. And the activity of the gene product thereof is the activity of b3989-protein.

[68185] Accordingly, in one embodiment, the process of the present invention for producing campesterol in a non-human organism, like a microorganism or a plant or a part thereof, comprises increasing or generating the activity of a gene product with the activity of a gene product conferring the activity of “b3989-protein”, especially from Escherichia coli or its functional equivalent or its homolog, e.g. the increase of
[68186] (a) a gene product of a gene comprising the nucleic acid molecule as shown in the respective line in column 5 of Table I (whereby the respective line disclose in column 7 the fine chemical campesterol), application no. 14, preferably the coding region thereof, or a homolog or a fragment thereof, and being depicted in the same respective line as said B3989, or a functional equivalent or a homolog thereof as shown in column 8 of Table I, application no. 14, preferably the coding region thereof, particularly a homolog or functional equivalent as shown in column 8 of Table I B, application no. 14, and being depicted in the same respective line as said B3989, and preferably the activity is increased non-targeted, or
[68187] (b) a polypeptide comprising a polypeptide, a consensus sequence or at least a polypeptide motif as shown in the respective line in column 5 of Table II or in column 8 of Table IV, application no. 14, respectively, and being depicted in the same respective line as said B3989, or a functional equivalent or a homolog thereof as depicted in column 8 of Table II, application no. 14, preferably a homolog or functional equivalent as depicted in column 8 of Table II B, application no. 14, and being depicted in the same respective line as said B3989, and preferably the activity is increased non-targeted, whereby the respective line disclose in column 7 the fine chemical campesterol.

[68188] Accordingly, in one embodiment, the molecule which activity is to be increased in the process of the invention is the gene product with an activity as a “b3989-protein”, preferably it is the molecule of section (a) or (b) of this paragraph.

[68189] In particular, it was observed that in plants, especially in Arabidopsis thaliana, increasing or generating the activity of a gene product non-targeted with the activity of a “b3989-protein”, preferably being encoded by a gene comprising the nucleic acid sequence SEQ ID NO. 44372, preferably the coding region thereof, conferred the production of or the increase in campesterol compared with the wild type control.

[68190] The nucleic acid sequence of B4029 from Escherichia coli, e.g. as shown in the respective line in column 5 of Table I, application no. 14, has been published in B. And the activity of the gene product thereof is the activity of b4029-protein.

[68191] Accordingly, in one embodiment, the process of the present invention for producing beta-sitosterol in a non-human organism, like a microorganism or a plant or a part thereof, comprises increasing or generating the activity of a gene product with the activity of a gene product conferring the activity of “b4029-protein”, especially from Escherichia coli or its functional equivalent or its homolog, e.g. the increase of
[68192] (a) a gene product of a gene comprising the nucleic acid molecule as shown in the respective line in column 5 of Table I (whereby the respective line disclose in column 7 the fine chemical beta-sitosterol), application no. 14, preferably the coding region thereof, or a homolog or a fragment thereof, and being depicted in the same respective line as said B4029, or a functional equivalent or a homolog thereof as shown in column 8 of Table I, application no. 14, preferably the coding region thereof, particularly a homolog or functional equivalent as shown in column 8 of Table I B, application no. 14, and being depicted in the same respective line as said B4029, and preferably the activity is increased non-targeted, or
[68193] (b) a polypeptide comprising a polypeptide, a consensus sequence or at least a polypeptide motif as shown in the respective line in column 5 of Table II or in column 8 of Table IV, application no. 14, respectively, and being depicted in the same respective line as said B4029, or a functional equivalent or a homolog thereof as depicted in column 8 of Table II, application no. 14, preferably a homolog or functional equivalent as depicted in column 8 of Table II B, application no. 14, and being depicted in the same respective line as said B4029, and preferably the activity is increased non-targeted, whereby the respective line disclose in column 7 the fine chemical beta-sitosterol.

[68194] Accordingly, in one embodiment, the molecule which activity is to be increased in the process of the invention is the gene product with an activity as a “b4029-protein”, preferably it is the molecule of section (a) or (b) of this paragraph.

[68195] In particular, it was observed that in plants, especially in Arabidopsis thaliana, increasing or generating the activity of a gene product non-targeted with the activity of a “b4029-protein”, preferably being encoded by a gene comprising the nucleic acid sequence SEQ ID NO. 10740, preferably the coding region thereof, conferred the production of or the increase in beta-sitosterol compared with the wild type control.

[68196] The nucleic acid sequence of B4029 from Escherichia coli, e.g. as shown in the respective line in column 5 of Table I, application no. 14, has been published in B. And the activity of the gene product thereof is the activity of b4029-protein.

[68197] Accordingly, in one embodiment, the process of the present invention for producing stigmasterol in a non-human organism, like a microorganism or a plant or a part thereof, comprises increasing or generating the activity of a gene product with the activity of a gene product conferring the activity of “b4029-protein”, especially from Escherichia coli or its functional equivalent or its homolog, e.g. the increase of
[68198] (a) a gene product of a gene comprising the nucleic acid molecule as shown in the respective line in column 5 of Table I (whereby the respective line disclose in column 7 the fine chemical stigmasterol), application no. 14, preferably the coding region thereof, or a homolog or a fragment thereof, and being depicted in the same respective line as said B4029, or a functional equivalent or a homolog thereof as shown in column 8 of Table I, application no. 14, preferably the coding region thereof, particularly a homolog or functional equivalent as shown in column 8 of Table I B, application no. 14, and being depicted in the same respective line as said B4029, and preferably the activity is increased non-targeted, or
[68199] (b) a polypeptide comprising a polypeptide, a consensus sequence or at least a polypeptide motif as shown in the respective line in column 5 of Table II or in column 8 of Table IV, application no. 14, respectively, and being depicted in the same respective line as said B4029, or a functional equivalent or a homolog thereof as depicted in column 8 of Table II, application no. 14, preferably a homolog or functional equivalent as depicted in column 8 of Table II B, application no. 14, and being depicted in the same respective line as said B4029, and preferably the activity is increased non-targeted, whereby the respective line disclose in column 7 the fine chemical stigmasterol.

[68200] Accordingly, in one embodiment, the molecule which activity is to be increased in the process of the invention is the gene product with an activity as a “b4029-protein”, preferably it is the molecule of section (a) or (b) of this paragraph.

[68201] In particular, it was observed that in plants, especially in Arabidopsis thaliana, increasing or generating the activity of a gene product non-targeted with the activity of a “b4029-protein”, preferably being encoded by a gene comprising the nucleic acid sequence SEQ ID NO. 10740, preferably the coding region thereof, conferred the production of or the increase in stigmasterol compared with the wild type control.

[68202] The nucleic acid sequence of B4205 from Escherichia coli, e.g. as shown in the respective line in column 5 of Table I, application no. 14, has been published in B. And the activity of the gene product thereof is the activity of b4205-protein.

[68203] Accordingly, in one embodiment, the process of the present invention for producing beta-sitosterol in a non-human organism, like a microorganism or a plant or a part thereof, comprises increasing or generating the activity of a gene product with the activity of a gene product conferring the activity of “b4205-protein”, especially from Escherichia coli or its functional equivalent or its homolog, e.g. the increase of
[68204] (a) a gene product of a gene comprising the nucleic acid molecule as shown in the respective line in column 5 of Table I (whereby the respective line disclose in column 7 the fine chemical beta-sitosterol), application no. 14, preferably the coding region thereof, or a homolog or a fragment thereof, and being depicted in the same respective line as said B4205, or a functional equivalent or a homolog thereof as shown in column 8 of Table I, application no. 14, preferably the coding region thereof, particularly a homolog or functional equivalent as shown in column 8 of Table I B, application no. 14, and being depicted in the same respective line as said B4205, and preferably the activity is increased plastidic, or
[68205] (b) a polypeptide comprising a polypeptide, a consensus sequence or at least a polypeptide motif as shown in the respective line in column 5 of Table II or in column 8 of Table IV, application no. 14, respectively, and being depicted in the same respective line as said B4205, or a functional equivalent or a homolog thereof as depicted in column 8 of Table II, application no. 14, preferably a homolog or functional equivalent as depicted in column 8 of Table II B, application no. 14, and being depicted in the same respective line as said B4205, and preferably the activity is increased plastidic, whereby the respective line disclose in column 7 the fine chemical beta-sitosterol.

[68206] Accordingly, in one embodiment, the molecule which activity is to be increased in the process of the invention is the gene product with an activity as a “b4205-protein”, preferably it is the molecule of section (a) or (b) of this paragraph.

[68207] In particular, it was observed that in plants, especially in Arabidopsis thaliana, increasing or generating the activity of a gene product plastidic with the activity of a “b4205-protein”, preferably being encoded by a gene comprising the nucleic acid sequence SEQ ID NO. 126975, preferably the coding region thereof, conferred the production of or the increase in beta-sitosterol compared with the wild type control.

[68208] The nucleic acid sequence of GM02LC12622 from Glycine max, e.g. as shown in the respective line in column 5 of Table I, application no. 14, is unpublished. And the activity of the gene product thereof is the activity of glutaredoxin.

[68209] Accordingly, in one embodiment, the process of the present invention for producing beta-sitosterol in a non-human organism, like a microorganism or a plant or a part thereof, comprises increasing or generating the activity of a gene product with the activity of a gene product conferring the activity of “glutaredoxin”, especially from Glycine max or its functional equivalent or its homolog, e.g. the increase of
[68210] (a) a gene product of a gene comprising the nucleic acid molecule as shown in the respective line in column 5 of Table I (whereby the respective line disclose in column 7 the fine chemical beta-sitosterol), application no. 14, preferably the coding region thereof, or a homolog or a fragment thereof, and being depicted in the same respective line as said GM02LC12622, or a functional equivalent or a homolog thereof as shown in column 8 of Table I, application no. 14, preferably the coding region thereof, particularly a homolog or functional equivalent as shown in column 8 of Table I B, application no. 14, and being depicted in the same respective line as said GM02LC12622, and preferably the activity is increased non-targeted, or
[68211] (b) a polypeptide comprising a polypeptide, a consensus sequence or at least a polypeptide motif as shown in the respective line in column 5 of Table II or in column 8 of Table IV, application no. 14, respectively, and being depicted in the same respective line as said GM02LC12622, or a functional equivalent or a homolog thereof as depicted in column 8 of Table II, application no. 14, preferably a homolog or functional equivalent as depicted in column 8 of Table II B, application no. 14, and being depicted in the same respective line as said GM02LC12622, and preferably the activity is increased non-targeted, whereby the respective line disclose in column 7 the fine chemical beta-sitosterol.

[68212] Accordingly, in one embodiment, the molecule which activity is to be increased in the process of the invention is the gene product with an activity as a “glutaredoxin”, preferably it is the molecule of section (a) or (b) of this paragraph.

[68213] In particular, it was observed that in plants, especially in Arabidopsis thaliana, increasing or generating the activity of a gene product non-targeted with the activity of a “glutaredoxin”, preferably being encoded by a gene comprising the nucleic acid sequence SEQ ID NO. 10811, preferably the coding region thereof, conferred the production of or the increase in beta-sitosterol compared with the wild type control.

[68214] The nucleic acid sequence of GM02LC12622 from Glycine max, e.g. as shown in the respective line in column 5 of Table I, application no. 14, is unpublished. And the activity of the gene product thereof is the activity of glutaredoxin.

[68215] Accordingly, in one embodiment, the process of the present invention for producing campesterol in a non-human organism, like a microorganism or a plant or a part thereof, comprises increasing or generating the activity of a gene product with the activity of a gene product conferring the activity of “glutaredoxin”, especially from Glycine max or its functional equivalent or its homolog, e.g. the increase of
[68216] (a) a gene product of a gene comprising the nucleic acid molecule as shown in the respective line in column 5 of Table I (whereby the respective line disclose in column 7 the fine chemical campesterol), application no. 14, preferably the coding region thereof, or a homolog or a fragment thereof, and being depicted in the same respective line as said GM02LC12622, or a functional equivalent or a homolog thereof as shown in column 8 of Table I, application no. 14, preferably the coding region thereof, particularly a homolog or functional equivalent as shown in column 8 of Table I B, application no. 14, and being depicted in the same respective line as said GM02LC12622, and preferably the activity is increased non-targeted, or
[68217] (b) a polypeptide comprising a polypeptide, a consensus sequence or at least a polypeptide motif as shown in the respective line in column 5 of Table II or in column 8 of Table IV, application no. 14, respectively, and being depicted in the same respective line as said GM02LC12622, or a functional equivalent or a homolog thereof as depicted in column 8 of Table II, application no. 14, preferably a homolog or functional equivalent as depicted in column 8 of Table II B, application no. 14, and being depicted in the same respective line as said GM02LC12622, and preferably the activity is increased non-targeted, whereby the respective line disclose in column 7 the fine chemical campesterol.

[68218] Accordingly, in one embodiment, the molecule which activity is to be increased in the process of the invention is the gene product with an activity as a “glutaredoxin”, preferably it is the molecule of section (a) or (b) of this paragraph.

[68219] In particular, it was observed that in plants, especially in Arabidopsis thaliana, increasing or generating the activity of a gene product non-targeted with the activity of a “glutaredoxin”, preferably being encoded by a gene comprising the nucleic acid sequence SEQ ID NO. 10811, preferably the coding region thereof, conferred the production of or the increase in campesterol compared with the wild type control.

[68220] The nucleic acid sequence of GM02LC19289 from Glycine max, e.g. as shown in the respective line in column 5 of Table I, application no. 14, is unpublished. And the activity of the gene product thereof is the activity of transcription factor.

[68221] Accordingly, in one embodiment, the process of the present invention for producing beta-sitosterol in a non-human organism, like a microorganism or a plant or a part thereof, comprises increasing or generating the activity of a gene product with the activity of a gene product conferring the activity of “transcription factor”, especially from Glycine max or its functional equivalent or its homolog, e.g. the increase of
[68222] (a) a gene product of a gene comprising the nucleic acid molecule as shown in the respective line in column 5 of Table I (whereby the respective line disclose in column 7 the fine chemical beta-sitosterol), application no. 14, preferably the coding region thereof, or a homolog or a fragment thereof, and being depicted in the same respective line as said GM02LC19289, or a functional equivalent or a homolog thereof as shown in column 8 of Table I, application no. 14, preferably the coding region thereof, particularly a homolog or functional equivalent as shown in column 8 of Table I B, application no. 14, and being depicted in the same respective line as said GM02LC19289, and preferably the activity is increased non-targeted, or
[68223] (b) a polypeptide comprising a polypeptide, a consensus sequence or at least a polypeptide motif as shown in the respective line in column 5 of Table II or in column 8 of Table IV, application no. 14, respectively, and being depicted in the same respective line as said GM02LC19289, or a functional equivalent or a homolog thereof as depicted in column 8 of Table II, application no. 14, preferably a homolog or functional equivalent as depicted in column 8 of Table II B, application no. 14, and being depicted in the same respective line as said GM02LC19289, and preferably the activity is increased non-targeted, whereby the respective line disclose in column 7 the fine chemical beta-sitosterol.

[68224] Accordingly, in one embodiment, the molecule which activity is to be increased in the process of the invention is the gene product with an activity as a “transcription factor”, preferably it is the molecule of section (a) or (b) of this paragraph.

[68225] In particular, it was observed that in plants, especially in Arabidopsis thaliana, increasing or generating the activity of a gene product non-targeted with the activity of a “transcription factor”, preferably being encoded by a gene comprising the nucleic acid sequence SEQ ID NO. 46751, preferably the coding region thereof, conferred the production of or the increase in beta-sitosterol compared with the wild type control.

[68226] The nucleic acid sequence of GM02LC19289 from Glycine max, e.g. as shown in the respective line in column 5 of Table I, application no. 14, is unpublished. And the activity of the gene product thereof is the activity of transcription factor.

[68227] Accordingly, in one embodiment, the process of the present invention for producing campesterol in a non-human organism, like a microorganism or a plant or a part thereof, comprises increasing or generating the activity of a gene product with the activity of a gene product conferring the activity of “transcription factor”, especially from Glycine max or its functional equivalent or its homolog, e.g. the increase of
[68228] (a) a gene product of a gene comprising the nucleic acid molecule as shown in the respective line in column 5 of Table I (whereby the respective line disclose in column 7 the fine chemical campesterol), application no. 14, preferably the coding region thereof, or a homolog or a fragment thereof, and being depicted in the same respective line as said GM02LC19289, or a functional equivalent or a homolog thereof as shown in column 8 of Table I, application no. 14, preferably the coding region thereof, particularly a homolog or functional equivalent as shown in column 8 of Table I B, application no. 14, and being depicted in the same respective line as said GM02LC19289, and preferably the activity is increased non-targeted, or
[68229] (b) a polypeptide comprising a polypeptide, a consensus sequence or at least a polypeptide motif as shown in the respective line in column 5 of Table II or in column 8 of Table IV, application no. 14, respectively, and being depicted in the same respective line as said GM02LC19289, or a functional equivalent or a homolog thereof as depicted in column 8 of Table II, application no. 14, preferably a homolog or functional equivalent as depicted in column 8 of Table II B, application no. 14, and being depicted in the same respective line as said GM02LC19289, and preferably the activity is increased non-targeted, whereby the respective line disclose in column 7 the fine chemical campesterol.

[68230] Accordingly, in one embodiment, the molecule which activity is to be increased in the process of the invention is the gene product with an activity as a “transcription factor”, preferably it is the molecule of section (a) or (b) of this paragraph.

[68231] In particular, it was observed that in plants, especially in Arabidopsis thaliana, increasing or generating the activity of a gene product non-targeted with the activity of a “transcription factor”, preferably being encoded by a gene comprising the nucleic acid sequence SEQ ID NO. 46751, preferably the coding region thereof, conferred the production of or the increase in campesterol compared with the wild type control.

[68232] The nucleic acid sequence of GM02LC44512 from Glycine max, e.g. as shown in the respective line in column 5 of Table I, application no. 14, is unpublished. And the activity of the gene product thereof is the activity of cyclin D.

[68233] Accordingly, in one embodiment, the process of the present invention for producing beta-sitosterol in a non-human organism, like a microorganism or a plant or a part thereof, comprises increasing or generating the activity of a gene product with the activity of a gene product conferring the activity of “cyclin D”, especially from Glycine max or its functional equivalent or its homolog, e.g. the increase of
[68234] (a) a gene product of a gene comprising the nucleic acid molecule as shown in the respective line in column 5 of Table I (whereby the respective line disclose in column 7 the fine chemical beta-sitosterol), application no. 14, preferably the coding region thereof, or a homolog or a fragment thereof, and being depicted in the same respective line as said GM02LC44512, or a functional equivalent or a homolog thereof as shown in column 8 of Table I, application no. 14, preferably the coding region thereof, particularly a homolog or functional equivalent as shown in column 8 of Table I B, application no. 14, and being depicted in the same respective line as said GM02LC44512, and preferably the activity is increased non-targeted, or
[68235] (b) a polypeptide comprising a polypeptide, a consensus sequence or at least a polypeptide motif as shown in the respective line in column 5 of Table II or in column 8 of Table IV, application no. 14, respectively, and being depicted in the same respective line as said GM02LC44512, or a functional equivalent or a homolog thereof as depicted in column 8 of Table II, application no. 14, preferably a homolog or functional equivalent as depicted in column 8 of Table II B, application no. 14, and being depicted in the same respective line as said GM02LC44512, and preferably the activity is increased non-targeted, whereby the respective line disclose in column 7 the fine chemical beta-sitosterol.

[68236] Accordingly, in one embodiment, the molecule which activity is to be increased in the process of the invention is the gene product with an activity as a “cyclin D”, preferably it is the molecule of section (a) or (b) of this paragraph.

[68237] In particular, it was observed that in plants, especially in Arabidopsis thaliana, increasing or generating the activity of a gene product non-targeted with the activity of a “cyclin D”, preferably being encoded by a gene comprising the nucleic acid sequence SEQ ID NO. 46850, preferably the coding region thereof, conferred the production of or the increase in beta-sitosterol compared with the wild type control.

[68238] The nucleic acid sequence of GM02LC44512 from Glycine max, e.g. as shown in the respective line in column 5 of Table I, application no. 14, is unpublished. And the activity of the gene product thereof is the activity of cyclin D.

[68239] Accordingly, in one embodiment, the process of the present invention for producing campesterol in a non-human organism, like a microorganism or a plant or a part thereof, comprises increasing or generating the activity of a gene product with the activity of a gene product conferring the activity of “cyclin D”, especially from Glycine max or its functional equivalent or its homolog, e.g. the increase of
[68240] (a) a gene product of a gene comprising the nucleic acid molecule as shown in the respective line in column 5 of Table I (whereby the respective line disclose in column 7 the fine chemical campesterol), application no. 14, preferably the coding region thereof, or a homolog or a fragment thereof, and being depicted in the same respective line as said GM02LC44512, or a functional equivalent or a homolog thereof as shown in column 8 of Table I, application no. 14, preferably the coding region thereof, particularly a homolog or functional equivalent as shown in column 8 of Table I B, application no. 14, and being depicted in the same respective line as said GM02LC44512, and preferably the activity is increased non-targeted, or
[68241] (b) a polypeptide comprising a polypeptide, a consensus sequence or at least a polypeptide motif as shown in the respective line in column 5 of Table II or in column 8 of Table IV, application no. 14, respectively, and being depicted in the same respective line as said GM02LC44512, or a functional equivalent or a homolog thereof as depicted in column 8 of Table II, application no. 14, preferably a homolog or functional equivalent as depicted in column 8 of Table II B, application no. 14, and being depicted in the same respective line as said GM02LC44512, and preferably the activity is increased non-targeted, whereby the respective line disclose in column 7 the fine chemical campesterol.

[68242] Accordingly, in one embodiment, the molecule which activity is to be increased in the process of the invention is the gene product with an activity as a “cyclin D”, preferably it is the molecule of section (a) or (b) of this paragraph.

[68243] In particular, it was observed that in plants, especially in Arabidopsis thaliana, increasing or generating the activity of a gene product non-targeted with the activity of a “cyclin D”, preferably being encoded by a gene comprising the nucleic acid sequence SEQ ID NO. 46850, preferably the coding region thereof, conferred the production of or the increase in campesterol compared with the wild type control.

[68244] The nucleic acid sequence of Sll0406 from Synechocystis sp., e.g. as shown in the respective line in column 5 of Table I, application no. 14, has been published in C. And the activity of the gene product thereof is the activity of sll0406-protein.

[68245] Accordingly, in one embodiment, the process of the present invention for producing campesterol in a non-human organism, like a microorganism or a plant or a part thereof, comprises increasing or generating the activity of a gene product with the activity of a gene product conferring the activity of “sll0406-protein”, especially from Synechocystis sp. or its functional equivalent or its homolog, e.g. the increase of
[68246] (a) a gene product of a gene comprising the nucleic acid molecule as shown in the respective line in column 5 of Table I (whereby the respective line disclose in column 7 the fine chemical campesterol), application no. 14, preferably the coding region thereof, or a homolog or a fragment thereof, and being depicted in the same respective line as said Sll0406, or a functional equivalent or a homolog thereof as shown in column 8 of Table I, application no. 14, preferably the coding region thereof, particularly a homolog or functional equivalent as shown in column 8 of Table I B, application no. 14, and being depicted in the same respective line as said Sll0406, and preferably the activity is increased non-targeted, or
[68247] (b) a polypeptide comprising a polypeptide, a consensus sequence or at least a polypeptide motif as shown in the respective line in column 5 of Table II or in column 8 of Table IV, application no. 14, respectively, and being depicted in the same respective line as said Sll0406, or a functional equivalent or a homolog thereof as depicted in column 8 of Table II, application no. 14, preferably a homolog or functional equivalent as depicted in column 8 of Table II B, application no. 14, and being depicted in the same respective line as said Sll0406, and preferably the activity is increased non-targeted, whereby the respective line disclose in column 7 the fine chemical campesterol.

[68248] Accordingly, in one embodiment, the molecule which activity is to be increased in the process of the invention is the gene product with an activity as a “sll0406-protein”, preferably it is the molecule of section (a) or (b) of this paragraph.

[68249] In particular, it was observed that in plants, especially in Arabidopsis thaliana, increasing or generating the activity of a gene product non-targeted with the activity of a “sll0406-protein”, preferably being encoded by a gene comprising the nucleic acid sequence SEQ ID NO. 127103, preferably the coding region thereof, conferred the production of or the increase in campesterol compared with the wild type control.

[68250] The nucleic acid sequence of Sll0671 from Synechocystis sp., e.g. as shown in the respective line in column 5 of Table I, application no. 14, has been published in C. And the activity of the gene product thereof is the activity of cation transport protein.

[68251] Accordingly, in one embodiment, the process of the present invention for producing campesterol in a non-human organism, like a microorganism or a plant or a part thereof, comprises increasing or generating the activity of a gene product with the activity of a gene product conferring the activity of “cation transport protein”, especially from Synechocystis sp. or its functional equivalent or its homolog, e.g. the increase of
[68252] (a) a gene product of a gene comprising the nucleic acid molecule as shown in the respective line in column 5 of Table I (whereby the respective line disclose in column 7 the fine chemical campesterol), application no. 14, preferably the coding region thereof, or a homolog or a fragment thereof, and being depicted in the same respective line as said Sll0671, or a functional equivalent or a homolog thereof as shown in column 8 of Table I, application no. 14, preferably the coding region thereof, particularly a homolog or functional equivalent as shown in column 8 of Table I B, application no. 14, and being depicted in the same respective line as said Sll0671, and preferably the activity is increased non-targeted, or
[68253] (b) a polypeptide comprising a polypeptide, a consensus sequence or at least a polypeptide motif as shown in the respective line in column 5 of Table II or in column 8 of Table IV, application no. 14, respectively, and being depicted in the same respective line as said Sll0671, or a functional equivalent or a homolog thereof as depicted in column 8 of Table II, application no. 14, preferably a homolog or functional equivalent as depicted in column 8 of Table II B, application no. 14, and being depicted in the same respective line as said Sll0671, and preferably the activity is increased non-targeted, whereby the respective line disclose in column 7 the fine chemical campesterol.

[68254] Accordingly, in one embodiment, the molecule which activity is to be increased in the process of the invention is the gene product with an activity as a “cation transport protein”, preferably it is the molecule of section (a) or (b) of this paragraph.

[68255] In particular, it was observed that in plants, especially in Arabidopsis thaliana, increasing or generating the activity of a gene product non-targeted with the activity of a “cation transport protein”, preferably being encoded by a gene comprising the nucleic acid sequence SEQ ID NO. 132874, preferably the coding region thereof, conferred the production of or the increase in campesterol compared with the wild type control.

[68256] The nucleic acid sequence of Sll1443 from Synechocystis sp., e.g. as shown in the respective line in column 5 of Table I, application no. 14, has been published in C. And the activity of the gene product thereof is the activity of CTP synthetase.

[68257] Accordingly, in one embodiment, the process of the present invention for producing beta-sitosterol in a non-human organism, like a microorganism or a plant or a part thereof, comprises increasing or generating the activity of a gene product with the activity of a gene product conferring the activity of “CTP synthetase”, especially from Synechocystis sp. or its functional equivalent or its homolog, e.g. the increase of
[68258] (a) a gene product of a gene comprising the nucleic acid molecule as shown in the respective line in column 5 of Table I (whereby the respective line disclose in column 7 the fine chemical beta-sitosterol), application no. 14, preferably the coding region thereof, or a homolog or a fragment thereof, and being depicted in the same respective line as said Sll1443, or a functional equivalent or a homolog thereof as shown in column 8 of Table I, application no. 14, preferably the coding region thereof, particularly a homolog or functional equivalent as shown in column 8 of Table I B, application no. 14, and being depicted in the same respective line as said Sll1443, and preferably the activity is increased mitochondrial, or
[68259] (b) a polypeptide comprising a polypeptide, a consensus sequence or at least a polypeptide motif as shown in the respective line in column 5 of Table II or in column 8 of Table IV, application no. 14, respectively, and being depicted in the same respective line as said Sll1443, or a functional equivalent or a homolog thereof as depicted in column 8 of Table II, application no. 14, preferably a homolog or functional equivalent as depicted in column 8 of Table II B, application no. 14, and being depicted in the same respective line as said Sll1443, and preferably the activity is increased mitochondrial, whereby the respective line disclose in column 7 the fine chemical beta-sitosterol.

[68260] Accordingly, in one embodiment, the molecule which activity is to be increased in the process of the invention is the gene product with an activity as a “CTP synthetase”, preferably it is the molecule of section (a) or (b) of this paragraph.

[68261] In particular, it was observed that in plants, especially in Arabidopsis thaliana, increasing or generating the activity of a gene product mitochondrial with the activity of a “CTP synthetase”, preferably being encoded by a gene comprising the nucleic acid sequence SEQ ID NO. 53878, preferably the coding region thereof, conferred the production of or the increase in beta-sitosterol compared with the wild type control.

[68262] The nucleic acid sequence of Sll1443 from Synechocystis sp., e.g. as shown in the respective line in column 5 of Table I, application no. 14, has been published in C. And the activity of the gene product thereof is the activity of CTP synthetase.

[68263] Accordingly, in one embodiment, the process of the present invention for producing campesterol in a non-human organism, like a microorganism or a plant or a part thereof, comprises increasing or generating the activity of a gene product with the activity of a gene product conferring the activity of “CTP synthetase”, especially from Synechocystis sp. or its functional equivalent or its homolog, e.g. the increase of
[68264] (a) a gene product of a gene comprising the nucleic acid molecule as shown in the respective line in column 5 of Table I (whereby the respective line disclose in column 7 the fine chemical campesterol), application no. 14, preferably the coding region thereof, or a homolog or a fragment thereof, and being depicted in the same respective line as said Sll1443, or a functional equivalent or a homolog thereof as shown in column 8 of Table I, application no. 14, preferably the coding region thereof, particularly a homolog or functional equivalent as shown in column 8 of Table I B, application no. 14, and being depicted in the same respective line as said Sll1443, and preferably the activity is increased mitochondrial, or
[68265] (b) a polypeptide comprising a polypeptide, a consensus sequence or at least a polypeptide motif as shown in the respective line in column 5 of Table II or in column 8 of Table IV, application no. 14, respectively, and being depicted in the same respective line as said Sll1443, or a functional equivalent or a homolog thereof as depicted in column 8 of Table II, application no. 14, preferably a homolog or functional equivalent as depicted in column 8 of Table II B, application no. 14, and being depicted in the same respective line as said Sll1443, and preferably the activity is increased mitochondrial, whereby the respective line disclose in column 7 the fine chemical campesterol.

[68266] Accordingly, in one embodiment, the molecule which activity is to be increased in the process of the invention is the gene product with an activity as a “CTP synthetase”, preferably it is the molecule of section (a) or (b) of this paragraph.

[68267] In particular, it was observed that in plants, especially in Arabidopsis thaliana, increasing or generating the activity of a gene product mitochondrial with the activity of a “CTP synthetase”, preferably being encoded by a gene comprising the nucleic acid sequence SEQ ID NO. 53878, preferably the coding region thereof, conferred the production of or the increase in campesterol compared with the wild type control.

[68268] The nucleic acid sequence of Sll1525 from Synechocystis sp., e.g. as shown in the respective line in column 5 of Table I, application no. 14, has been published in C. And the activity of the gene product thereof is the activity of phosphoribulokinase.

[68269] Accordingly, in one embodiment, the process of the present invention for producing beta-sitosterol in a non-human organism, like a microorganism or a plant or a part thereof, comprises increasing or generating the activity of a gene product with the activity of a gene product conferring the activity of “phosphoribulokinase”, especially from Synechocystis sp. or its functional equivalent or its homolog, e.g. the increase of
[68270] (a) a gene product of a gene comprising the nucleic acid molecule as shown in the respective line in column 5 of Table I (whereby the respective line disclose in column 7 the fine chemical beta-sitosterol), application no. 14, preferably the coding region thereof, or a homolog or a fragment thereof, and being depicted in the same respective line as said Sll1525, or a functional equivalent or a homolog thereof as shown in column 8 of Table I, application no. 14, preferably the coding region thereof, particularly a homolog or functional equivalent as shown in column 8 of Table I B, application no. 14, and being depicted in the same respective line as said Sll1525, and preferably the activity is increased mitochondrial, or
[68271] (b) a polypeptide comprising a polypeptide, a consensus sequence or at least a polypeptide motif as shown in the respective line in column 5 of Table II or in column 8 of Table IV, application no. 14, respectively, and being depicted in the same respective line as said Sll1525, or a functional equivalent or a homolog thereof as depicted in column 8 of Table II, application no. 14, preferably a homolog or functional equivalent as depicted in column 8 of Table II B, application no. 14, and being depicted in the same respective line as said Sll1525, and preferably the activity is increased mitochondrial, whereby the respective line disclose in column 7 the fine chemical beta-sitosterol.

[68272] Accordingly, in one embodiment, the molecule which activity is to be increased in the process of the invention is the gene product with an activity as a “phosphoribulokinase”, preferably it is the molecule of section (a) or (b) of this paragraph.

[68273] In particular, it was observed that in plants, especially in Arabidopsis thaliana, increasing or generating the activity of a gene product mitochondrial with the activity of a “phosphoribulokinase”, preferably being encoded by a gene comprising the nucleic acid sequence SEQ ID NO. 132938, preferably the coding region thereof, conferred the production of or the increase in beta-sitosterol compared with the wild type control.

[68274] The nucleic acid sequence of Sll1598 from Synechocystis sp., e.g. as shown in the respective line in column 5 of Table I, application no. 14, has been published in C. And the activity of the gene product thereof is the activity of ABC metal ion transporter substrate-binding protein.

[68275] Accordingly, in one embodiment, the process of the present invention for producing beta-sitosterol in a non-human organism, like a microorganism or a plant or a part thereof, comprises increasing or generating the activity of a gene product with the activity of a gene product conferring the activity of “ABC metal ion transporter substrate-binding protein”, especially from Synechocystis sp. or its functional equivalent or its homolog, e.g. the increase of
[68276] (a) a gene product of a gene comprising the nucleic acid molecule as shown in the respective line in column 5 of Table I (whereby the respective line disclose in column 7 the fine chemical beta-sitosterol), application no. 14, preferably the coding region thereof, or a homolog or a fragment thereof, and being depicted in the same respective line as said Sll1598, or a functional equivalent or a homolog thereof as shown in column 8 of Table I, application no. 14, preferably the coding region thereof, particularly a homolog or functional equivalent as shown in column 8 of Table I B, application no. 14, and being depicted in the same respective line as said Sll1598, and preferably the activity is increased mitochondrial, or
[68277] (b) a polypeptide comprising a polypeptide, a consensus sequence or at least a polypeptide motif as shown in the respective line in column 5 of Table II or in column 8 of Table IV, application no. 14, respectively, and being depicted in the same respective line as said Sll1598, or a functional equivalent or a homolog thereof as depicted in column 8 of Table II, application no. 14, preferably a homolog or functional equivalent as depicted in column 8 of Table II B, application no. 14, and being depicted in the same respective line as said Sll1598, and preferably the activity is increased mitochondrial, whereby the respective line disclose in column 7 the fine chemical beta-sitosterol.

[68278] Accordingly, in one embodiment, the molecule which activity is to be increased in the process of the invention is the gene product with an activity as a “ABC metal ion transporter substratebinding protein”, preferably it is the molecule of section (a) or (b) of this paragraph.

[68279] In particular, it was observed that in plants, especially in Arabidopsis thaliana, increasing or generating the activity of a gene product mitochondrial with the activity of a “ABC metal ion transporter substrate-binding protein”, preferably being encoded by a gene comprising the nucleic acid sequence SEQ ID NO. 85743, preferably the coding region thereof, conferred the production of or the increase in beta-sitosterol compared with the wild type control.

[68280] The nucleic acid sequence of Sll1761 from Synechocystis sp., e.g. as shown in the respective line in column 5 of Table I, application no. 14, has been published in C. And the activity of the gene product thereof is the activity of sll1761-protein.

[68281] Accordingly, in one embodiment, the process of the present invention for producing campesterol in a non-human organism, like a microorganism or a plant or a part thereof, comprises increasing or generating the activity of a gene product with the activity of a gene product conferring the activity of “sll1761-protein”, especially from Synechocystis sp. or its functional equivalent or its homolog, e.g. the increase of
[68282] (a) a gene product of a gene comprising the nucleic acid molecule as shown in the respective line in column 5 of Table I (whereby the respective line disclose in column 7 the fine chemical campesterol), application no. 14, preferably the coding region thereof, or a homolog or a fragment thereof, and being depicted in the same respective line as said Sll1761, or a functional equivalent or a homolog thereof as shown in column 8 of Table I, application no. 14, preferably the coding region thereof, particularly a homolog or functional equivalent as shown in column 8 of Table I B, application no. 14, and being depicted in the same respective line as said Sll1761, and preferably the activity is increased non-targeted, or
[68283] (b) a polypeptide comprising a polypeptide, a consensus sequence or at least a polypeptide motif as shown in the respective line in column 5 of Table II or in column 8 of Table IV, application no. 14, respectively, and being depicted in the same respective line as said Sll1761, or a functional equivalent or a homolog thereof as depicted in column 8 of Table II, application no. 14, preferably a homolog or functional equivalent as depicted in column 8 of Table II B, application no. 14, and being depicted in the same respective line as said Sll1761, and preferably the activity is increased non-targeted, whereby the respective line disclose in column 7 the fine chemical campesterol.

[68284] Accordingly, in one embodiment, the molecule which activity is to be increased in the process of the invention is the gene product with an activity as a “sll1761-protein”, preferably it is the molecule of section (a) or (b) of this paragraph.

[68285] In particular, it was observed that in plants, especially in Arabidopsis thaliana, increasing or generating the activity of a gene product non-targeted with the activity of a “sll1761-protein”, preferably being encoded by a gene comprising the nucleic acid sequence SEQ ID NO. 55379, preferably the coding region thereof, conferred the production of or the increase in campesterol compared with the wild type control.

[68286] The nucleic acid sequence of Sll1848 from Synechocystis sp., e.g. as shown in the respective line in column 5 of Table I, application no. 14, has been published in C. And the activity of the gene product thereof is the activity of acyl transferase.

[68287] Accordingly, in one embodiment, the process of the present invention for producing beta-sitosterol in a non-human organism, like a microorganism or a plant or a part thereof, comprises increasing or generating the activity of a gene product with the activity of a gene product conferring the activity of “acyl transferase”, especially from Synechocystis sp. or its functional equivalent or its homolog, e.g. the increase of
[68288] (a) a gene product of a gene comprising the nucleic acid molecule as shown in the respective line in column 5 of Table I (whereby the respective line disclose in column 7 the fine chemical beta-sitosterol), application no. 14, preferably the coding region thereof, or a homolog or a fragment thereof, and being depicted in the same respective line as said Sll1848, or a functional equivalent or a homolog thereof as shown in column 8 of Table I, application no. 14, preferably the coding region thereof, particularly a homolog or functional equivalent as shown in column 8 of Table I B, application no. 14, and being depicted in the same respective line as said Sll1848, and preferably the activity is increased plastidic, or
[68289] (b) a polypeptide comprising a polypeptide, a consensus sequence or at least a polypeptide motif as shown in the respective line in column 5 of Table II or in column 8 of Table IV, application no. 14, respectively, and being depicted in the same respective line as said Sll1848, or a functional equivalent or a homolog thereof as depicted in column 8 of Table II, application no. 14, preferably a homolog or functional equivalent as depicted in column 8 of Table II B, application no. 14, and being depicted in the same respective line as said Sll1848, and preferably the activity is increased plastidic, whereby the respective line disclose in column 7 the fine chemical beta-sitosterol.

[68290] Accordingly, in one embodiment, the molecule which activity is to be increased in the process of the invention is the gene product with an activity as a “acyl transferase”, preferably it is the molecule of section (a) or (b) of this paragraph.

[68291] In particular, it was observed that in plants, especially in Arabidopsis thaliana, increasing or generating the activity of a gene product plastidic with the activity of a “acyl transferase”, preferably being encoded by a gene comprising the nucleic acid sequence SEQ ID NO. 86447, preferably the coding region thereof, conferred the production of or the increase in beta-sitosterol compared with the wild type control.

[68292] The nucleic acid sequence of Sll1920 from Synechocystis sp., e.g. as shown in the respective line in column 5 of Table I, application no. 14, has been published in C. And the activity of the gene product thereof is the activity of cation-transporting ATPase.

[68293] Accordingly, in one embodiment, the process of the present invention for producing campesterol in a non-human organism, like a microorganism or a plant or a part thereof, comprises increasing or generating the activity of a gene product with the activity of a gene product conferring the activity of “cation-transporting ATPase”, especially from Synechocystis sp. or its functional equivalent or its homolog, e.g. the increase of
[68294] (a) a gene product of a gene comprising the nucleic acid molecule as shown in the respective line in column 5 of Table I (whereby the respective line disclose in column 7 the fine chemical campesterol), application no. 14, preferably the coding region thereof, or a homolog or a fragment thereof, and being depicted in the same respective line as said Sll1920, or a functional equivalent or a homolog thereof as shown in column 8 of Table I, application no. 14, preferably the coding region thereof, particularly a homolog or functional equivalent as shown in column 8 of Table I B, application no. 14, and being depicted in the same respective line as said Sll1920, and preferably the activity is increased mitochondrial, or
[68295] (b) a polypeptide comprising a polypeptide, a consensus sequence or at least a polypeptide motif as shown in the respective line in column 5 of Table II or in column 8 of Table IV, application no. 14, respectively, and being depicted in the same respective line as said Sll1920, or a functional equivalent or a homolog thereof as depicted in column 8 of Table II, application no. 14, preferably a homolog or functional equivalent as depicted in column 8 of Table II B, application no. 14, and being depicted in the same respective line as said Sll1920, and preferably the activity is increased mitochondrial, whereby the respective line disclose in column 7 the fine chemical campesterol.

[68296] Accordingly, in one embodiment, the molecule which activity is to be increased in the process of the invention is the gene product with an activity as a “cation-transporting ATPase”, preferably it is the molecule of section (a) or (b) of this paragraph.

[68297] In particular, it was observed that in plants, especially in Arabidopsis thaliana, increasing or generating the activity of a gene product mitochondrial with the activity of a “cation-transporting ATPase”, preferably being encoded by a gene comprising the nucleic acid sequence SEQ ID NO. 55385, preferably the coding region thereof, conferred the production of or the increase in campesterol compared with the wild type control.

[68298] The nucleic acid sequence of Slr0338 from Synechocystis sp., e.g. as shown in the respective line in column 5 of Table I, application no. 14, has been published in C. And the activity of the gene product thereof is the activity of oxidoreductase.

[68299] Accordingly, in one embodiment, the process of the present invention for producing beta-sitosterol in a non-human organism, like a microorganism or a plant or a part thereof, comprises increasing or generating the activity of a gene product with the activity of a gene product conferring the activity of “oxidoreductase”, especially from Synechocystis sp. or its functional equivalent or its homolog, e.g. the increase of
[68300] (a) a gene product of a gene comprising the nucleic acid molecule as shown in the respective line in column 5 of Table I (whereby the respective line disclose in column 7 the fine chemical beta-sitosterol), application no. 14, preferably the coding region thereof, or a homolog or a fragment thereof, and being depicted in the same respective line as said Slr0338, or a functional equivalent or a homolog thereof as shown in column 8 of Table I, application no. 14, preferably the coding region thereof, particularly a homolog or functional equivalent as shown in column 8 of Table I B, application no. 14, and being depicted in the same respective line as said Slr0338, and preferably the activity is increased non-targeted, or
[68301] (b) a polypeptide comprising a polypeptide, a consensus sequence or at least a polypeptide motif as shown in the respective line in column 5 of Table II or in column 8 of Table IV, application no. 14, respectively, and being depicted in the same respective line as said Slr0338, or a functional equivalent or a homolog thereof as depicted in column 8 of Table II, application no. 14, preferably a homolog or functional equivalent as depicted in column 8 of Table II B, application no. 14, and being depicted in the same respective line as said Slr0338, and preferably the activity is increased non-targeted, whereby the respective line disclose in column 7 the fine chemical beta-sitosterol.

[68302] Accordingly, in one embodiment, the molecule which activity is to be increased in the process of the invention is the gene product with an activity as a “oxidoreductase”, preferably it is the molecule of section (a) or (b) of this paragraph.

[68303] In particular, it was observed that in plants, especially in Arabidopsis thaliana, increasing or generating the activity of a gene product non-targeted with the activity of a “oxidoreductase”, preferably being encoded by a gene comprising the nucleic acid sequence SEQ ID NO. 11990, preferably the coding region thereof, conferred the production of or the increase in beta-sitosterol compared with the wild type control.

[68304] The nucleic acid sequence of Slr0949 from Synechocystis sp., e.g. as shown in the respective line in column 5 of Table I, application no. 14, has been published in C. And the activity of the gene product thereof is the activity of permease protein of ABC transporter.

[68305] Accordingly, in one embodiment, the process of the present invention for producing campesterol in a non-human organism, like a microorganism or a plant or a part thereof, comprises increasing or generating the activity of a gene product with the activity of a gene product conferring the activity of “permease protein of ABC transporter”, especially from Synechocystis sp. or its functional equivalent or its homolog, e.g. the increase of
[68306] (a) a gene product of a gene comprising the nucleic acid molecule as shown in the respective line in column 5 of Table I (whereby the respective line disclose in column 7 the fine chemical campesterol), application no. 14, preferably the coding region thereof, or a homolog or a fragment thereof, and being depicted in the same respective line as said Slr0949, or a functional equivalent or a homolog thereof as shown in column 8 of Table I, application no. 14, preferably the coding region thereof, particularly a homolog or functional equivalent as shown in column 8 of Table I B, application no. 14, and being depicted in the same respective line as said Slr0949, and preferably the activity is increased mitochondrial, or
[68307] (b) a polypeptide comprising a polypeptide, a consensus sequence or at least a polypeptide motif as shown in the respective line in column 5 of Table II or in column 8 of Table IV, application no. 14, respectively, and being depicted in the same respective line as said Slr0949, or a functional equivalent or a homolog thereof as depicted in column 8 of Table II, application no. 14, preferably a homolog or functional equivalent as depicted in column 8 of Table II B, application no. 14, and being depicted in the same respective line as said Slr0949, and preferably the activity is increased mitochondrial, whereby the respective line disclose in column 7 the fine chemical campesterol.

[68308] Accordingly, in one embodiment, the molecule which activity is to be increased in the process of the invention is the gene product with an activity as a “permease protein of ABC transporter”, preferably it is the molecule of section (a) or (b) of this paragraph.

[68309] In particular, it was observed that in plants, especially in Arabidopsis thaliana, increasing or generating the activity of a gene product mitochondrial with the activity of a “permease protein of ABC transporter”, preferably being encoded by a gene comprising the nucleic acid sequence SEQ ID NO. 119222, preferably the coding region thereof, conferred the production of or the increase in campesterol compared with the wild type control.

[68310] The nucleic acid sequence of Slr0966 from Synechocystis sp., e.g. as shown in the respective line in column 5 of Table I, application no. 14, has been published in C. And the activity of the gene product thereof is the activity of tryptophan synthase alpha chain.

[68311] Accordingly, in one embodiment, the process of the present invention for producing campesterol in a non-human organism, like a microorganism or a plant or a part thereof, comprises increasing or generating the activity of a gene product with the activity of a gene product conferring the activity of “tryptophan synthase alpha chain”, especially from Synechocystis sp. or its functional equivalent or its homolog, e.g. the increase of
[68312] (a) a gene product of a gene comprising the nucleic acid molecule as shown in the respective line in column 5 of Table I (whereby the respective line disclose in column 7 the fine chemical campesterol), application no. 14, preferably the coding region thereof, or a homolog or a fragment thereof, and being depicted in the same respective line as said Slr0966, or a functional equivalent or a homolog thereof as shown in column 8 of Table I, application no. 14, preferably the coding region thereof, particularly a homolog or functional equivalent as shown in column 8 of Table I B, application no. 14, and being depicted in the same respective line as said Slr0966, and preferably the activity is increased plastidic, or
[68313] (b) a polypeptide comprising a polypeptide, a consensus sequence or at least a polypeptide motif as shown in the respective line in column 5 of Table II or in column 8 of Table IV, application no. 14, respectively, and being depicted in the same respective line as said Slr0966, or a functional equivalent or a homolog thereof as depicted in column 8 of Table II, application no. 14, preferably a homolog or functional equivalent as depicted in column 8 of Table II B, application no. 14, and being depicted in the same respective line as said Slr0966, and preferably the activity is increased plastidic, whereby the respective line disclose in column 7 the fine chemical campesterol.

[68314] Accordingly, in one embodiment, the molecule which activity is to be increased in the process of the invention is the gene product with an activity as a “tryptophan synthase alpha chain”, preferably it is the molecule of section (a) or (b) of this paragraph.

[68315] In particular, it was observed that in plants, especially in Arabidopsis thaliana, increasing or generating the activity of a gene product plastidic with the activity of a “tryptophan synthase alpha chain”, preferably being encoded by a gene comprising the nucleic acid sequence SEQ ID NO. 87655, preferably the coding region thereof, conferred the production of or the increase in campesterol compared with the wild type control.

[68316] The nucleic acid sequence of TTC1193 from Thermus thermophilus, e.g. as shown in the respective line in column 5 of Table I, application no. 14, has been published in E. And the activity of the gene product thereof is the activity of multiple antibiotic resistance protein.

[68317] Accordingly, in one embodiment, the process of the present invention for producing beta-sitosterol in a non-human organism, like a microorganism or a plant or a part thereof, comprises increasing or generating the activity of a gene product with the activity of a gene product conferring the activity of “multiple antibiotic resistance protein”, especially from Thermus thermophilus or its functional equivalent or its homolog, e.g. the increase of
[68318] (a) a gene product of a gene comprising the nucleic acid molecule as shown in the respective line in column 5 of Table I (whereby the respective line disclose in column 7 the fine chemical beta-sitosterol), application no. 14, preferably the coding region thereof, or a homolog or a fragment thereof, and being depicted in the same respective line as said TTC1193, or a functional equivalent or a homolog thereof as shown in column 8 of Table I, application no. 14, preferably the coding region thereof, particularly a homolog or functional equivalent as shown in column 8 of Table I B, application no. 14, and being depicted in the same respective line as said TTC1193, and preferably the activity is increased non-targeted, or
[68319] (b) a polypeptide comprising a polypeptide, a consensus sequence or at least a polypeptide motif as shown in the respective line in column 5 of Table II or in column 8 of Table IV, application no. 14, respectively, and being depicted in the same respective line as said TTC1193, or a functional equivalent or a homolog thereof as depicted in column 8 of Table II, application no. 14, preferably a homolog or functional equivalent as depicted in column 8 of Table II B, application no. 14, and being depicted in the same respective line as said TTC1193, and preferably the activity is increased non-targeted, whereby the respective line disclose in column 7 the fine chemical beta-sitosterol.

[68320] Accordingly, in one embodiment, the molecule which activity is to be increased in the process of the invention is the gene product with an activity as a “multiple antibiotic resistance protein”, preferably it is the molecule of section (a) or (b) of this paragraph.

[68321] In particular, it was observed that in plants, especially in Arabidopsis thaliana, increasing or generating the activity of a gene product non-targeted with the activity of a “multiple antibiotic resistance protein”, preferably being encoded by a gene comprising the nucleic acid sequence SEQ ID NO. 61723, preferably the coding region thereof, conferred the production of or the increase in beta-sitosterol compared with the wild type control.

[68322] The nucleic acid sequence of TTC1193 from Thermus thermophilus, e.g. as shown in the respective line in column 5 of Table I, application no. 14, has been published in E. And the activity of the gene product thereof is the activity of multiple antibiotic resistance protein.

[68323] Accordingly, in one embodiment, the process of the present invention for producing campesterol in a non-human organism, like a microorganism or a plant or a part thereof, comprises increasing or generating the activity of a gene product with the activity of a gene product conferring the activity of “multiple antibiotic resistance protein”, especially from Thermus thermophilus or its functional equivalent or its homolog, e.g. the increase of
[68324] (a) a gene product of a gene comprising the nucleic acid molecule as shown in the respective line in column 5 of Table I (whereby the respective line disclose in column 7 the fine chemical campesterol), application no. 14, preferably the coding region thereof, or a homolog or a fragment thereof, and being depicted in the same respective line as said TTC1193, or a functional equivalent or a homolog thereof as shown in column 8 of Table I, application no. 14, preferably the coding region thereof, particularly a homolog or functional equivalent as shown in column 8 of Table I B, application no. 14, and being depicted in the same respective line as said TTC1193, and preferably the activity is increased non-targeted, or
[68325] (b) a polypeptide comprising a polypeptide, a consensus sequence or at least a polypeptide motif as shown in the respective line in column 5 of Table II or in column 8 of Table IV, application no. 14, respectively, and being depicted in the same respective line as said TTC1193, or a functional equivalent or a homolog thereof as depicted in column 8 of Table II, application no. 14, preferably a homolog or functional equivalent as depicted in column 8 of Table II B, application no. 14, and being depicted in the same respective line as said TTC1193, and preferably the activity is increased non-targeted, whereby the respective line disclose in column 7 the fine chemical campesterol.

[68326] Accordingly, in one embodiment, the molecule which activity is to be increased in the process of the invention is the gene product with an activity as a “multiple antibiotic resistance protein”, preferably it is the molecule of section (a) or (b) of this paragraph.

[68327] In particular, it was observed that in plants, especially in Arabidopsis thaliana, increasing or generating the activity of a gene product non-targeted with the activity of a “multiple antibiotic resistance protein”, preferably being encoded by a gene comprising the nucleic acid sequence SEQ ID NO. 61723, preferably the coding region thereof, conferred the production of or the increase in campesterol compared with the wild type control.

[68328] The nucleic acid sequence of TTC1386 from Thermus thermophilus, e.g. as shown in the respective line in column 5 of Table I, application no. 14, has been published in E. And the activity of the gene product thereof is the activity of TTC1386-protein.

[68329] Accordingly, in one embodiment, the process of the present invention for producing beta-sitosterol in a non-human organism, like a microorganism or a plant or a part thereof, comprises increasing or generating the activity of a gene product with the activity of a gene product conferring the activity of “TTC1386-protein”, especially from Thermus thermophilus or its functional equivalent or its homolog, e.g. the increase of
[68330] (a) a gene product of a gene comprising the nucleic acid molecule as shown in the respective line in column 5 of Table I (whereby the respective line disclose in column 7 the fine chemical beta-sitosterol), application no. 14, preferably the coding region thereof, or a homolog or a fragment thereof, and being depicted in the same respective line as said TTC1386, or a functional equivalent or a homolog thereof as shown in column 8 of Table I, application no. 14, preferably the coding region thereof, particularly a homolog or functional equivalent as shown in column 8 of Table I B, application no. 14, and being depicted in the same respective line as said TTC1386, and preferably the activity is increased non-targeted, or
[68331] (b) a polypeptide comprising a polypeptide, a consensus sequence or at least a polypeptide motif as shown in the respective line in column 5 of Table II or in column 8 of Table IV, application no. 14, respectively, and being depicted in the same respective line as said TTC1386, or a functional equivalent or a homolog thereof as depicted in column 8 of Table II, application no. 14, preferably a homolog or functional equivalent as depicted in column 8 of Table II B, application no. 14, and being depicted in the same respective line as said TTC1386, and preferably the activity is increased non-targeted, whereby the respective line disclose in column 7 the fine chemical beta-sitosterol.

[68332] Accordingly, in one embodiment, the molecule which activity is to be increased in the process of the invention is the gene product with an activity as a “TTC1386-protein”, preferably it is the molecule of section (a) or (b) of this paragraph.

[68333] In particular, it was observed that in plants, especially in Arabidopsis thaliana, increasing or generating the activity of a gene product non-targeted with the activity of a “TTC1386-protein”, preferably being encoded by a gene comprising the nucleic acid sequence SEQ ID NO. 62079, preferably the coding region thereof, conferred the production of or the increase in beta-sitosterol compared with the wild type control.

[68334] The nucleic acid sequence of TTC1386 from Thermus thermophilus, e.g. as shown in the respective line in column 5 of Table I, application no. 14, has been published in E. And the activity of the gene product thereof is the activity of TTC1386-protein.

[68335] Accordingly, in one embodiment, the process of the present invention for producing campesterol in a non-human organism, like a microorganism or a plant or a part thereof, comprises increasing or generating the activity of a gene product with the activity of a gene product conferring the activity of “TTC1386-protein”, especially from Thermus thermophilus or its functional equivalent or its homolog, e.g. the increase of
[68336] (a) a gene product of a gene comprising the nucleic acid molecule as shown in the respective line in column 5 of Table I (whereby the respective line disclose in column 7 the fine chemical campesterol), application no. 14, preferably the coding region thereof, or a homolog or a fragment thereof, and being depicted in the same respective line as said TTC1386, or a functional equivalent or a homolog thereof as shown in column 8 of Table I, application no. 14, preferably the coding region thereof, particularly a homolog or functional equivalent as shown in column 8 of Table I B, application no. 14, and being depicted in the same respective line as said TTC1386, and preferably the activity is increased non-targeted, or
[68337] (b) a polypeptide comprising a polypeptide, a consensus sequence or at least a polypeptide motif as shown in the respective line in column 5 of Table II or in column 8 of Table IV, application no. 14, respectively, and being depicted in the same respective line as said TTC1386, or a functional equivalent or a homolog thereof as depicted in column 8 of Table II, application no. 14, preferably a homolog or functional equivalent as depicted in column 8 of Table II B, application no. 14, and being depicted in the same respective line as said TTC1386, and preferably the activity is increased non-targeted, whereby the respective line disclose in column 7 the fine chemical campesterol.

[68338] Accordingly, in one embodiment, the molecule which activity is to be increased in the process of the invention is the gene product with an activity as a “TTC1386-protein”, preferably it is the molecule of section (a) or (b) of this paragraph.

[68339] In particular, it was observed that in plants, especially in Arabidopsis thaliana, increasing or generating the activity of a gene product non-targeted with the activity of a “TTC1386-protein”, preferably being encoded by a gene comprising the nucleic acid sequence SEQ ID NO. 62079, preferably the coding region thereof, conferred the production of or the increase in campesterol compared with the wild type control.

[68340] The nucleic acid sequence of TTC1550 from Thermus thermophilus, e.g. as shown in the respective line in column 5 of Table I, application no. 14, has been published in E. And the activity of the gene product thereof is the activity of homocitrate synthase.

[68341] Accordingly, in one embodiment, the process of the present invention for producing campesterol in a non-human organism, like a microorganism or a plant or a part thereof, comprises increasing or generating the activity of a gene product with the activity of a gene product conferring the activity of “homocitrate synthase”, especially from Thermus thermophilus or its functional equivalent or its homolog, e.g. the increase of
[68342] (a) a gene product of a gene comprising the nucleic acid molecule as shown in the respective line in column 5 of Table I (whereby the respective line disclose in column 7 the fine chemical campesterol), application no. 14, preferably the coding region thereof, or a homolog or a fragment thereof, and being depicted in the same respective line as said TTC1550, or a functional equivalent or a homolog thereof as shown in column 8 of Table I, application no. 14, preferably the coding region thereof, particularly a homolog or functional equivalent as shown in column 8 of Table I B, application no. 14, and being depicted in the same respective line as said TTC1550, and preferably the activity is increased non-targeted, or
[68343] (b) a polypeptide comprising a polypeptide, a consensus sequence or at least a polypeptide motif as shown in the respective line in column 5 of Table II or in column 8 of Table IV, application no. 14, respectively, and being depicted in the same respective line as said TTC1550, or a functional equivalent or a homolog thereof as depicted in column 8 of Table II, application no. 14, preferably a homolog or functional equivalent as depicted in column 8 of Table II B, application no. 14, and being depicted in the same respective line as said TTC1550, and preferably the activity is increased non-targeted, whereby the respective line disclose in column 7 the fine chemical campesterol.

[68344] Accordingly, in one embodiment, the molecule which activity is to be increased in the process of the invention is the gene product with an activity as a “homocitrate synthase”, preferably it is the molecule of section (a) or (b) of this paragraph.

[68345] In particular, it was observed that in plants, especially in Arabidopsis thaliana, increasing or generating the activity of a gene product non-targeted with the activity of a “homocitrate synthase”, preferably being encoded by a gene comprising the nucleic acid sequence SEQ ID NO. 12974, preferably the coding region thereof, conferred the production of or the increase in campesterol compared with the wild type control.

[68346] The nucleic acid sequence of Ydl131w from Saccharomyces cerevisiae, e.g. as shown in the respective line in column 5 of Table I, application no. 14, has been published in A. And the activity of the gene product thereof is the activity of homocitrate synthase.

[68347] Accordingly, in one embodiment, the process of the present invention for producing campesterol in a non-human organism, like a microorganism or a plant or a part thereof, comprises increasing or generating the activity of a gene product with the activity of a gene product conferring the activity of “homocitrate synthase”, especially from Saccharomyces cerevisiae or its functional equivalent or its homolog, e.g. the increase of
[68348] (a) a gene product of a gene comprising the nucleic acid molecule as shown in the respective line in column 5 of Table I (whereby the respective line disclose in column 7 the fine chemical campesterol), application no. 14, preferably the coding region thereof, or a homolog or a fragment thereof, and being depicted in the same respective line as said Ydl131w, or a functional equivalent or a homolog thereof as shown in column 8 of Table I, application no. 14, preferably the coding region thereof, particularly a homolog or functional equivalent as shown in column 8 of Table I B, application no. 14, and being depicted in the same respective line as said Ydl131w, and preferably the activity is increased plastidic, or
[68349] (b) a polypeptide comprising a polypeptide, a consensus sequence or at least a polypeptide motif as shown in the respective line in column 5 of Table II or in column 8 of Table IV, application no. 14, respectively, and being depicted in the same respective line as said Ydl131w, or a functional equivalent or a homolog thereof as depicted in column 8 of Table II, application no. 14, preferably a homolog or functional equivalent as depicted in column 8 of Table II B, application no. 14, and being depicted in the same respective line as said Ydl131w, and preferably the activity is increased plastidic, whereby the respective line disclose in column 7 the fine chemical campesterol.

[68350] Accordingly, in one embodiment, the molecule which activity is to be increased in the process of the invention is the gene product with an activity as a “homocitrate synthase”, preferably it is the molecule of section (a) or (b) of this paragraph.

[68351] In particular, it was observed that in plants, especially in Arabidopsis thaliana, increasing or generating the activity of a gene product plastidic with the activity of a “homocitrate synthase”, preferably being encoded by a gene comprising the nucleic acid sequence SEQ ID NO. 113224, preferably the coding region thereof, conferred the production of or the increase in campesterol compared with the wild type control.

[68352] The nucleic acid sequence of Ydl155w from Saccharomyces cerevisiae, e.g. as shown in the respective line in column 5 of Table I, application no. 14, has been published in A. And the activity of the gene product thereof is the activity of cyclin.

[68353] Accordingly, in one embodiment, the process of the present invention for producing campesterol in a non-human organism, like a microorganism or a plant or a part thereof, comprises increasing or generating the activity of a gene product with the activity of a gene product conferring the activity of “cyclin”, especially from Saccharomyces cerevisiae or its functional equivalent or its homolog, e.g. the increase of
[68354] (a) a gene product of a gene comprising the nucleic acid molecule as shown in the respective line in column 5 of Table I (whereby the respective line disclose in column 7 the fine chemical campesterol), application no. 14, preferably the coding region thereof, or a homolog or a fragment thereof, and being depicted in the same respective line as said Ydl155w, or a functional equivalent or a homolog thereof as shown in column 8 of Table I, application no. 14, preferably the coding region thereof, particularly a homolog or functional equivalent as shown in column 8 of Table I B, application no. 14, and being depicted in the same respective line as said Ydl155w, and preferably the activity is increased non-targeted, or
[68355] (b) a polypeptide comprising a polypeptide, a consensus sequence or at least a polypeptide motif as shown in the respective line in column 5 of Table II or in column 8 of Table IV, application no. 14, respectively, and being depicted in the same respective line as said Ydl155w, or a functional equivalent or a homolog thereof as depicted in column 8 of Table II, application no. 14, preferably a homolog or functional equivalent as depicted in column 8 of Table II B, application no. 14, and being depicted in the same respective line as said Ydl155w, and preferably the activity is increased non-targeted, whereby the respective line disclose in column 7 the fine chemical campesterol.

[68356] Accordingly, in one embodiment, the molecule which activity is to be increased in the process of the invention is the gene product with an activity as a “cyclin”, preferably it is the molecule of section (a) or (b) of this paragraph.

[68357] In particular, it was observed that in plants, especially in Arabidopsis thaliana, increasing or generating the activity of a gene product non-targeted with the activity of a “cyclin”, preferably being encoded by a gene comprising the nucleic acid sequence SEQ ID NO. 14171, preferably the coding region thereof, conferred the production of or the increase in campesterol compared with the wild type control.

[68358] The nucleic acid sequence of Ydl235c from Saccharomyces cerevisiae, e.g. as shown in the respective line in column 5 of Table I, application no. 14, has been published in A. And the activity of the gene product thereof is the activity of ydl235c-protein.

[68359] Accordingly, in one embodiment, the process of the present invention for producing campesterol in a non-human organism, like a microorganism or a plant or a part thereof, comprises increasing or generating the activity of a gene product with the activity of a gene product conferring the activity of “ydl235c-protein”, especially from Saccharomyces cerevisiae or its functional equivalent or its homolog, e.g. the increase of
[68360] (a) a gene product of a gene comprising the nucleic acid molecule as shown in the respective line in column 5 of Table I (whereby the respective line disclose in column 7 the fine chemical campesterol), application no. 14, preferably the coding region thereof, or a homolog or a fragment thereof, and being depicted in the same respective line as said Ydl235c, or a functional equivalent or a homolog thereof as shown in column 8 of Table I, application no. 14, preferably the coding region thereof, particularly a homolog or functional equivalent as shown in column 8 of Table I B, application no. 14, and being depicted in the same respective line as said Ydl235c, and preferably the activity is increased plastidic, or
[68361] (b) a polypeptide comprising a polypeptide, a consensus sequence or at least a polypeptide motif as shown in the respective line in column 5 of Table II or in column 8 of Table IV, application no. 14, respectively, and being depicted in the same respective line as said Ydl235c, or a functional equivalent or a homolog thereof as depicted in column 8 of Table II, application no. 14, preferably a homolog or functional equivalent as depicted in column 8 of Table II B, application no. 14, and being depicted in the same respective line as said Ydl235c, and preferably the activity is increased plastidic, whereby the respective line disclose in column 7 the fine chemical campesterol.

[68362] Accordingly, in one embodiment, the molecule which activity is to be increased in the process of the invention is the gene product with an activity as a “ydl235c-protein”, preferably it is the molecule of section (a) or (b) of this paragraph.

[68363] In particular, it was observed that in plants, especially in Arabidopsis thaliana, increasing or generating the activity of a gene product plastidic with the activity of a “ydl235c-protein”, preferably being encoded by a gene comprising the nucleic acid sequence SEQ ID NO. 113313, preferably the coding region thereof, conferred the production of or the increase in campesterol compared with the wild type control.

[68364] The nucleic acid sequence of Ygl039w from Saccharomyces cerevisiae, e.g. as shown in the respective line in column 5 of Table I, application no. 14, has been published in A. And the activity of the gene product thereof is the activity of oxidoreductase.

[68365] Accordingly, in one embodiment, the process of the present invention for producing campesterol in a non-human organism, like a microorganism or a plant or a part thereof, comprises increasing or generating the activity of a gene product with the activity of a gene product conferring the activity of “oxidoreductase”, especially from Saccharomyces cerevisiae or its functional equivalent or its homolog, e.g. the increase of
[68366] (a) a gene product of a gene comprising the nucleic acid molecule as shown in the respective line in column 5 of Table I (whereby the respective line disclose in column 7 the fine chemical campesterol), application no. 14, preferably the coding region thereof, or a homolog or a fragment thereof, and being depicted in the same respective line as said Ygl039w, or a functional equivalent or a homolog thereof as shown in column 8 of Table I, application no. 14, preferably the coding region thereof, particularly a homolog or functional equivalent as shown in column 8 of Table I B, application no. 14, and being depicted in the same respective line as said Ygl039w, and preferably the activity is increased plastidic, or
[68367] (b) a polypeptide comprising a polypeptide, a consensus sequence or at least a polypeptide motif as shown in the respective line in column 5 of Table II or in column 8 of Table IV, application no. 14, respectively, and being depicted in the same respective line as said Ygl039w, or a functional equivalent or a homolog thereof as depicted in column 8 of Table II, application no. 14, preferably a homolog or functional equivalent as depicted in column 8 of Table II B, application no. 14, and being depicted in the same respective line as said Ygl039w, and preferably the activity is increased plastidic, whereby the respective line disclose in column 7 the fine chemical campesterol.

[68368] Accordingly, in one embodiment, the molecule which activity is to be increased in the process of the invention is the gene product with an activity as a “oxidoreductase”, preferably it is the molecule of section (a) or (b) of this paragraph.

[68369] In particular, it was observed that in plants, especially in Arabidopsis thaliana, increasing or generating the activity of a gene product plastidic with the activity of a “oxidoreductase”, preferably being encoded by a gene comprising the nucleic acid sequence SEQ ID NO. 120436, preferably the coding region thereof, conferred the production of or the increase in campesterol compared with the wild type control.

[68370] The nucleic acid sequence of Yjr153w from Saccharomyces cerevisiae, e.g. as shown in the respective line in column 5 of Table I, application no. 14, has been published in A. And the activity of the gene product thereof is the activity of polygalacturonase.

[68371] Accordingly, in one embodiment, the process of the present invention for producing campesterol in a non-human organism, like a microorganism or a plant or a part thereof, comprises increasing or generating the activity of a gene product with the activity of a gene product conferring the activity of “polygalacturonase”, especially from Saccharomyces cerevisiae or its functional equivalent or its homolog, e.g. the increase of
[68372] (a) a gene product of a gene comprising the nucleic acid molecule as shown in the respective line in column 5 of Table I (whereby the respective line disclose in column 7 the fine chemical campesterol), application no. 14, preferably the coding region thereof, or a homolog or a fragment thereof, and being depicted in the same respective line as said Yjr153w, or a functional equivalent or a homolog thereof as shown in column 8 of Table I, application no. 14, preferably the coding region thereof, particularly a homolog or functional equivalent as shown in column 8 of Table I B, application no. 14, and being depicted in the same respective line as said Yjr153w, and preferably the activity is increased non-targeted, or
[68373] (b) a polypeptide comprising a polypeptide, a consensus sequence or at least a polypeptide motif as shown in the respective line in column 5 of Table II or in column 8 of Table IV, application no. 14, respectively, and being depicted in the same respective line as said Yjr153w, or a functional equivalent or a homolog thereof as depicted in column 8 of Table II, application no. 14, preferably a homolog or functional equivalent as depicted in column 8 of Table II B, application no. 14, and being depicted in the same respective line as said Yjr153w, and preferably the activity is increased non-targeted, whereby the respective line disclose in column 7 the fine chemical campesterol.

[68374] Accordingly, in one embodiment, the molecule which activity is to be increased in the process of the invention is the gene product with an activity as a “polygalacturonase”, preferably it is the molecule of section (a) or (b) of this paragraph.

[68375] In particular, it was observed that in plants, especially in Arabidopsis thaliana, increasing or generating the activity of a gene product non-targeted with the activity of a “polygalacturonase”, preferably being encoded by a gene comprising the nucleic acid sequence SEQ ID NO. 66274, preferably the coding region thereof, conferred the production of or the increase in campesterol compared with the wild type control.

[68376] The nucleic acid sequence of Ynl321w from Saccharomyces cerevisiae, e.g. as shown in the respective line in column 5 of Table I, application no. 14, has been published in A. And the activity of the gene product thereof is the activity of ynl321w-protein.

[68377] Accordingly, in one embodiment, the process of the present invention for producing campesterol in a non-human organism, like a microorganism or a plant or a part thereof, comprises increasing or generating the activity of a gene product with the activity of a gene product conferring the activity of “ynl321w-protein”, especially from Saccharomyces cerevisiae or its functional equivalent or its homolog, e.g. the increase of
[68378] (a) a gene product of a gene comprising the nucleic acid molecule as shown in the respective line in column 5 of Table I (whereby the respective line disclose in column 7 the fine chemical campesterol), application no. 14, preferably the coding region thereof, or a homolog or a fragment thereof, and being depicted in the same respective line as said Ynl321w, or a functional equivalent or a homolog thereof as shown in column 8 of Table I, application no. 14, preferably the coding region thereof, particularly a homolog or functional equivalent as shown in column 8 of Table I B, application no. 14, and being depicted in the same respective line as said Ynl321w, and preferably the activity is increased plastidic, or
[68379] (b) a polypeptide comprising a polypeptide, a consensus sequence or at least a polypeptide motif as shown in the respective line in column 5 of Table II or in column 8 of Table IV, application no. 14, respectively, and being depicted in the same respective line as said Ynl321w, or a functional equivalent or a homolog thereof as depicted in column 8 of Table II, application no. 14, preferably a homolog or functional equivalent as depicted in column 8 of Table II B, application no. 14, and being depicted in the same respective line as said Ynl321w, and preferably the activity is increased plastidic, whereby the respective line disclose in column 7 the fine chemical campesterol.

[68380] Accordingly, in one embodiment, the molecule which activity is to be increased in the process of the invention is the gene product with an activity as a “ynl321w-protein”, preferably it is the molecule of section (a) or (b) of this paragraph.

[68381] In particular, it was observed that in plants, especially in Arabidopsis thaliana, increasing or generating the activity of a gene product plastidic with the activity of a “ynl321w-protein”, preferably being encoded by a gene comprising the nucleic acid sequence SEQ ID NO. 129546, preferably the coding region thereof, conferred the production of or the increase in campesterol compared with the wild type control.

[68382] The nucleic acid sequence of Ypl028w from Saccharomyces cerevisiae, e.g. as shown in the respective line in column 5 of Table I, application no. 14, has been published in A. And the activity of the gene product thereof is the activity of acetyl-CoA acetyltransferase.

[68383] Accordingly, in one embodiment, the process of the present invention for producing beta-sitosterol in a non-human organism, like a microorganism or a plant or a part thereof, comprises increasing or generating the activity of a gene product with the activity of a gene product conferring the activity of “acetyl-CoA acetyltransferase”, especially from Saccharomyces cerevisiae or its functional equivalent or its homolog, e.g. the increase of
[68384] (a) a gene product of a gene comprising the nucleic acid molecule as shown in the respective line in column 5 of Table I (whereby the respective line disclose in column 7 the fine chemical beta-sitosterol), application no. 14, preferably the coding region thereof, or a homolog or a fragment thereof, and being depicted in the same respective line as said Ypl028w, or a functional equivalent or a homolog thereof as shown in column 8 of Table I, application no. 14, preferably the coding region thereof, particularly a homolog or functional equivalent as shown in column 8 of Table I B, application no. 14, and being depicted in the same respective line as said Ypl028w, and preferably the activity is increased non-targeted, or
[68385] (b) a polypeptide comprising a polypeptide, a consensus sequence or at least a polypeptide motif as shown in the respective line in column 5 of Table II or in column 8 of Table IV, application no. 14, respectively, and being depicted in the same respective line as said Ypl028w, or a functional equivalent or a homolog thereof as depicted in column 8 of Table II, application no. 14, preferably a homolog or functional equivalent as depicted in column 8 of Table II B, application no. 14, and being depicted in the same respective line as said Ypl028w, and preferably the activity is increased non-targeted, whereby the respective line disclose in column 7 the fine chemical beta-sitosterol.

[68386] Accordingly, in one embodiment, the molecule which activity is to be increased in the process of the invention is the gene product with an activity as a “acetyl-CoA acetyltransferase”, preferably it is the molecule of section (a) or (b) of this paragraph.

[68387] In particular, it was observed that in plants, especially in Arabidopsis thaliana, increasing or generating the activity of a gene product non-targeted with the activity of a “acetyl-CoA acetyltransferase”, preferably being encoded by a gene comprising the nucleic acid sequence SEQ ID NO. 92668, preferably the coding region thereof, conferred the production of or the increase in beta-sitosterol compared with the wild type control.

[68388] The nucleic acid sequence of Ypr170c from Saccharomyces cerevisiae, e.g. as shown in the respective line in column 5 of Table I, application no. 14, has been published in A. And the activity of the gene product thereof is the activity of ypr170c-protein.

[68389] Accordingly, in one embodiment, the process of the present invention for producing beta-sitosterol in a non-human organism, like a microorganism or a plant or a part thereof, comprises increasing or generating the activity of a gene product with the activity of a gene product conferring the activity of “ypr170c-protein”, especially from Saccharomyces cerevisiae or its functional equivalent or its homolog, e.g. the increase of
[68390] (a) a gene product of a gene comprising the nucleic acid molecule as shown in the respective line in column 5 of Table I (whereby the respective line disclose in column 7 the fine chemical beta-sitosterol), application no. 14, preferably the coding region thereof, or a homolog or a fragment thereof, and being depicted in the same respective line as said Ypr170c, or a functional equivalent or a homolog thereof as shown in column 8 of Table I, application no. 14, preferably the coding region thereof, particularly a homolog or functional equivalent as shown in column 8 of Table I B, application no. 14, and being depicted in the same respective line as said Ypr170c, and preferably the activity is increased plastidic, or
[68391] (b) a polypeptide comprising a polypeptide, a consensus sequence or at least a polypeptide motif as shown in the respective line in column 5 of Table II or in column 8 of Table IV, application no. 14, respectively, and being depicted in the same respective line as said Ypr170c, or a functional equivalent or a homolog thereof as depicted in column 8 of Table II, application no. 14, preferably a homolog or functional equivalent as depicted in column 8 of Table II B, application no. 14, and being depicted in the same respective line as said Ypr170c, and preferably the activity is increased plastidic, whereby the respective line disclose in column 7 the fine chemical beta-sitosterol.

[68392] Accordingly, in one embodiment, the molecule which activity is to be increased in the process of the invention is the gene product with an activity as a “ypr170c-protein”, preferably it is the molecule of section (a) or (b) of this paragraph.

[68393] In particular, it was observed that in plants, especially in Arabidopsis thaliana, increasing or generating the activity of a gene product plastidic with the activity of a “ypr170c-protein”, preferably being encoded by a gene comprising the nucleic acid sequence SEQ ID NO. 113647, preferably the coding region thereof, conferred the production of or the increase in beta-sitosterol compared with the wild type control.

[68394] The nucleic acid sequence of 59582753_SOYBEAN from Glycine max, e.g. as shown in the respective line in column 5 of Table I, application no. 14, is unpublished. And the activity of the gene product thereof is the activity of glucose-6-phosphate 1-dehydrogenase.

[68395] Accordingly, in one embodiment, the process of the present invention for producing campesterol in a non-human organism, like a microorganism or a plant or a part thereof, comprises increasing or generating the activity of a gene product with the activity of a gene product conferring the activity of “glucose-6-phosphate 1-dehydrogenase”, especially from Glycine max or its functional equivalent or its homolog, e.g. the increase of
[68396] (a) a gene product of a gene comprising the nucleic acid molecule as shown in the respective line in column 5 of Table I (whereby the respective line disclose in column 7 the fine chemical campesterol), application no. 14, preferably the coding region thereof, or a homolog or a fragment thereof, and being depicted in the same respective line as said 59582753_SOYBEAN, or a functional equivalent or a homolog thereof as shown in column 8 of Table I, application no. 14, preferably the coding region thereof, particularly a homolog or functional equivalent as shown in column 8 of Table I B, application no. 14, and being depicted in the same respective line as said 59582753_SOYBEAN, and preferably the activity is increased plastidic, or
[68397] (b) a polypeptide comprising a polypeptide, a consensus sequence or at least a polypeptide motif as shown in the respective line in column 5 of Table II or in column 8 of Table IV, application no. 14, respectively, and being depicted in the same respective line as said 59582753_SOYBEAN, or a functional equivalent or a homolog thereof as depicted in column 8 of Table II, application no. 14, preferably a homolog or functional equivalent as depicted in column 8 of Table II B, application no. 14, and being depicted in the same respective line as said 59582753_SOYBEAN, and preferably the activity is increased plastidic, whereby the respective line disclose in column 7 the fine chemical campesterol.

[68398] Accordingly, in one embodiment, the molecule which activity is to be increased in the process of the invention is the gene product with an activity as a “glucose-6-phosphate 1-dehydrogenase”, preferably it is the molecule of section (a) or (b) of this paragraph.

[68399] In particular, it was observed that in plants, especially in Arabidopsis thaliana, increasing or generating the activity of a gene product plastidic with the activity of a “glucose-6-phosphate 1dehydrogenase”, preferably being encoded by a gene comprising the nucleic acid sequence SEQ ID NO. 16883, preferably the coding region thereof, conferred the production of or the increase in campesterol compared with the wild type control.

[68400] [0105.1.7.14] to [0107.1.7.14] for the disclosure of these paragraphs see [0105.1.7.7] to [0107.1.7.7] above

[68401] A protein having an activity conferring an increase in the amount or level of the fine chemical beta-sitosterol, campesterol, or stigmasterol, upon targeting to the plastids or mitochondria or upon non-targeting, preferably has the structure of the respective polypeptide described herein, in particular of the polypeptides comprising the consensus sequence or at least one polypeptide motifs as shown in the respective line in Table IV, application no. 14, column 8 or of the polypeptide comprising an amino acid sequence as disclosed in the respective line in Table II, application no. 14, columns 5 or 8, or homologs or fragments thereof as described herein, or is encoded by the nucleic acid molecule characterized herein or the nucleic acid molecule according to the invention, for example by the nucleic acid molecule as shown in the respective line in Table I, application no. 14, columns 5 or 8, preferably the coding region thereof, or homologs or fragments thereof and has the herein mentioned activity.

[68402] for the disclosure of this paragraph see [0109.1.7.7] above

[68403] for the disclosure of this paragraph see [0110.1.7.7] above

[68404] In one embodiment, the process of the present invention comprises one or more of the following steps
[68405] (a) stabilizing a protein conferring the generation or increased expression of a protein encoded by the nucleic acid molecule of the invention or of the polypeptide of the invention, e.g. of a polypeptide having the activity selected from the group consisting of 2-oxoglutarate dehydrogenase E1 subunit, ABC metal ion transporter substrate-binding protein, acetyl-CoA acetyltransferase, acetyltransferase, acid shock protein, acyl transferase, amidophosphoribosyltransferase, ankyrin repeat family protein, ATP-binding component of a transport system, b1401-protein, B1795-protein, b2107-protein, b2376-protein, b2399-protein, b2474-protein, b2513-protein, b2654-protein, b3151-protein, b3989-protein, b4029-protein, b4205-protein, C-4 sterol methyl oxidase, calcium-dependent protein kinase, cation transport protein, cation-transporting ATPase, CTP synthase, CTP synthetase, cyclin, cyclin D, eukaryotic translation initiation factor 5, glucose dehydrogenase, glucose-6-phosphate 1-dehydrogenase, glutaredoxin, homocitrate synthase, hydrolase, lipoprotein precursor, L-ribulose-5-phosphate 4-epimerase, membrane transport protein, methyltransferase, monothiol glutaredoxin, multidrug resistance protein, multiple antibiotic resistance protein, murein transglycosylase, NADH dehydrogenase I chain N, oxidoreductase, permease protein, permease protein of ABC transporter, phenylacetic acid degradation protein, phosphoribulokinase, polygalacturonase, protein kinase, protein phosphatase, putative transport system permease protein, putrescine transport system permease protein, recombinase A, sec-independent protein translocase, sll0406-protein, sll1761-protein, sodium/proton antiporter, sterol desaturase, threonine dehydrogenase, threonine synthase, transcription factor, tryptophan synthase alpha chain, TTC1386-protein, xanthine dehydrogenase, ydl235c-protein, ynl321w-protein, and ypr170c-protein, or of a polypeptide as indicated in the respective line in Table II, application no. 14, columns 5 or 8, or its homologs or fragments, and conferring the production of or an increase in beta-sitosterol, campesterol, or stigmasterol, respectively; and/or
[68406] (b) stabilizing a mRNA conferring the generation or increased expression of a FCRP, e.g. protein encoded by the nucleic acid molecule of the invention or its homologs or fragments, or of a mRNA encoding the polypeptide of the present invention having the hereinmentioned activity selected from the group consisting of said activities mentioned in (a) and conferring the production of or an increase in beta-sitosterol, campesterol, or stigmasterol, respectively; and/or
[68407] (c) increasing the specific activity of a protein conferring the increased expression of a FCRP, e.g. a protein encoded by the nucleic acid molecule of the invention or of the polypeptide of the present invention having herein-mentioned beta-sitosterol, campesterol, or stigmasterol generating or increasing activity, respectively, e.g. of a polypeptide having the activity of a protein as indicated in the respective line in Table II, application no. 14, columns 5 or 8, or its homologs or fragments, or decreasing the inhibitory regulation of the polypeptide of the invention; and/or
[68408] (d) generating or increasing the expression of an endogenous or artificial transcription factor mediating the expression of a protein conferring the generation or increased expression of a FCRP, e.g. a protein encoded by the nucleic acid molecule of the invention or of the polypeptide of the invention having herein-mentioned activity selected from the group consisting of said activities mentioned in (a) and conferring a beta-sitosterol, campesterol, or stigmasterol increasing activity, respectively, e.g. of a polypeptide having the activity of a protein as indicated in the respective line in Table II, application no. 14, columns 5 or 8 or its homologs; and/or
[68409] (e) stimulating activity of a protein conferring the increased expression of a FCRP, e.g. a protein encoded by the nucleic acid molecule of the present invention or a polypeptide of the present invention having herein-mentioned activity selected from the group consisting of said activities mentioned in (a) and conferring a beta-sitosterol, campesterol, or stigmasterol increasing activity, respectively, e.g. of a polypeptide having the activity of a protein as indicated in the respective line in Table II, application no. 14, columns 5 or 8, or its homologs or fragments, by adding one or more exogenous inducing factors to the non-human organism or parts thereof; and/or
[68410] (f) expressing a transgenic gene encoding a protein conferring the increased expression of a FCRP, e.g. a polypeptide encoded by the nucleic acid molecule of the present invention or a polypeptide of the present invention, having herein-mentioned activity selected from the group consisting of said activities mentioned in (a) and conferring a beta-sitosterol, campesterol, or stigmasterol increasing activity, respectively, e.g. of a polypeptide having the activity of a protein as indicated in the respective line in Table II, application no. 14, columns 5 or 8, or its homologs or fragments, and/or
[68411] (g) increasing the copy number of a gene conferring the increased expression of a nucleic acid molecule encoding a FCRP, e.g. a polypeptide encoded by the nucleic acid molecule of the invention or the polypeptide of the invention having herein-mentioned activity selected from the group consisting of said activities mentioned in (a) and conferring a beta-sitosterol, campesterol, or stigmasterol increasing activity, respectively, e.g. of a polypeptide having the activity of a protein as indicated in the respective line in Table II, application no. 14, columns 5 or 8, or its homologs or fragments; and/or
[68412] (h) increasing the expression of the endogenous gene encoding the FCRP, polypeptide of the invention, e.g. a polypeptide encoded by the nucleic acid molecule of the invention or the polypeptide of the invention having herein-mentioned activity selected from the group consisting of said activities mentioned in (a) and conferring a beta-sitosterol, campesterol, or stigmasterol; increasing activity, respectively, e.g. of a polypeptide having the activity of a protein as indicated in the respective line in Table II, application no. 14, columns 5 or 8, or its homologs or fragments, by adding positive expression or removing negative expression elements, e.g. homologous recombination can be used to either introduce positive regulatory elements like for plants the 35S enhancer into the promoter or to remove repressor elements form regulatory regions. Further gene conversion methods can be used to disrupt repressor elements or to enhance to activity of positive elements. Positive elements can be randomly introduced in plants by T-DNA or transposon mutagenesis and lines can be identified in which the positive elements have be integrated near to a gene of the invention, the expression of which is thereby enhanced; and/or
[68413] (i) modulating growth conditions of the non-human organism in such a manner, that the expression or activity of the gene encoding the FCRP, e.g. a protein of the invention or the protein itself is enhanced, for example microorganisms or plants can be grown for example under a higher temperature regime leading to an enhanced expression of heat shock proteins, which can lead to an enhanced beta-sitosterol, campesterol, or stigmasterol production, respectively; and/or
[68414] (j) selecting of non-human organisms with especially high activity of the proteins of the invention from natural or from mutagenized resources and breeding them into the target organisms, e.g. the elite crops; and/or
[68415] (k) directing a protein encoded by the nucleic acid molecule of the invention or of the polypeptide of the present invention having herein-mentioned activity selected from the group consisting of said activities mentioned in (a) and conferring a beta-sitosterol, campesterol, or stigmasterol increasing activity, respectively, e.g. of a polypeptide having the activity of a protein as indicated in the respective line in Table II, application no. 14, columns 5 or 8, or its homologs or fragments, if for the corresponding nucleic acid molecule in the respective line in column 6 of Table I the term “plastidic” is indicated, to the plastids by the addition of a plastidial targeting sequence or if for the corresponding nucleic acid molecule in the respective line in column 6 of Table I the term “mitochondric” is indicated, to the mitochondria by the addition of a mitochondrial targeting sequence; and/or
[68416] (l) generating the expression of a protein encoded by the nucleic acid molecule of the invention or of the polypeptide of the present invention having herein-mentioned activity selected from the group consisting of said activities mentioned in (a) and conferring a beta-sitosterol, campesterol, or stigmasterol increasing activity, respectively, e.g. of a polypeptide having the activity of a protein as indicated in the respective line in Table II, application no. 14, columns 5 or 8, or its homologs or fragments, if for the corresponding nucleic acid molecule in the respective line in column 6 of Table I the term “plastidic” or “mitochondric” is indicated, in these organelles by the stable or transient transformation, advantageously stable transformation, of organelles, preferably plastids or mitochondria, with an inventive nucleic acid sequence preferably in form of an expression cassette containing said sequence leading to the expression of the nucleic acids or polypeptides of the invention in the respective organelle; and/or
[68417] (m) generating the expression of a protein encoded by the nucleic acid molecule of the invention or of the polypeptide of the present invention having herein-mentioned activity selected from the group consisting of said activities mentioned in (a) and conferring a beta-sitosterol, campesterol, and/or stigmasterol increasing activity, respectively, e.g. of a polypeptide having the activity of a protein as indicated in the respective line in Table II, application no. 14, columns 5 or 8, or its homologs or fragments, if for the corresponding nucleic acid molecule in the respective line in column 6 of Table I the term “plastidic” or “mitochondric” is indicated, in these organelles by integration of a nucleic acid of the invention into the genome of the respective organelle under control of preferable a promoter selective for the respective organelle.

[68418] Preferably, said mRNA is the coding region of the nucleic acid molecule of the present invention and/or the protein conferring the increased expression of a protein encoded by the coding region of the nucleic acid molecule of the present invention alone or linked to a transit nucleic acid sequence or transit peptide encoding nucleic acid sequence or the polypeptide having the herein mentioned activity, e.g. conferring the generation of or increase of beta-sitosterol, campesterol, or stigmasterol, respectively, after increasing the expression or activity of the encoded polypeptide, non-targeted or in organelles such as plastids and/or mitochondria, preferably plastids, or having the activity of a polypeptide having an activity as the protein as shown in the respective line in Table II, application no. 14, column 3, or its homologs. Preferably the increase of beta-sitosterol, campesterol, or stigmasterol, respectively, takes place non-targeted or in plastids and/or mitochondria, preferably non-targeted or in plastids.

[68419] [0113.1.7.14] to [0122.1.7.14] for the disclosure of these paragraphs see [0113.1.7.7] to [0122.1.7.7] above

[68420] The activation of an endogenous polypeptide having above-mentioned activity, e.g. having the activity of a protein as shown in the respective line in Table II, application no. 14, column 3 or of the polypeptide of the invention, e.g. conferring the increase of the fine chemical beta-sitosterol, campesterol, or stigmasterol, respectively, by increase of expression or activity in the cytoplasm, and/or in the cytosol, and/or in an organelle, such as plastids or mitochondria, can also be increased by introducing a synthetic transcription factor, which binds close to the coding region of the gene encoding the protein as shown in the respective line in Table II, application no. 14, column 5 or 8, or homologs or fragments thereof, and activates its transcription. A chimeric zinc finger protein can be constructed, which comprises a specific DNA-binding domain and an activation domain as e.g. the VP16 domain of Herpes Simplex virus. The specific binding domain can bind to the regulatory region of the gene encoding the protein as shown in the respective line in Table II, application no. 14, column 5 or 8, or homologs or fragments thereof. The expression of the chimeric transcription factor in a non-human organism, in particular in a plant, leads to a specific expression of the protein as shown in the respective line in Table II, application no. 14, column 5 or 8, or homologs or fragments thereof, see e.g. in WO01/52620, Oriz, Proc. Natl. Acad. Sci. USA 99, 13290 (2002), or Guan, Proc. Natl. Acad. Sci. USA 99, 13296 (2002).

[68421] [0124.1.7.14] to [0127.1.7.14] for the disclosure of these paragraphs see [0124.1.7.7] to [0127.1.7.7] above

[68422] Owing to the introduction of a gene or a plurality of genes conferring the expression of the nucleic acid molecule of the invention or the polypeptide of the invention, for example the nucleic acid construct mentioned below, or encoding the protein as shown in the respective line in Table II, application no. 14, column 5 or 8, or homologs or fragments thereof, into a non-human organism alone or in combination with other genes, it is possible not only to increase the biosynthetic flux towards the end product, but also to increase, modify or create de novo an advantageous, preferably novel metabolites composition in the non-human organism, e.g. an advantageous composition comprising a higher content of (from a viewpoint of nutritional physiology limited) beta-sitosterol, campesterol, or stigmasterol and if desired other steroids, and/or other metabolites, in free or bound form.

[68423] for the disclosure of this paragraph see [0129.1.7.7] above

[68424] Accordingly, in one embodiment, the process according to the invention relates to a process, which comprises:
[68425] (a) providing a non-human organism, preferably a microorganism, a plant cell, a plant tissue, a plant or a part thereof, more preferably a microorganism, a plant tissue, a plant or a part thereof;
[68426] (b) increasing the activity of a protein as shown in the respective line in Table II, application no. 14, column 3 or of a polypeptide being encoded by the respective nucleic acid molecule of the present invention and described below, e.g. conferring an increase of the fine chemical beta-sitosterol, campesterol, or stigmasterol, respectively, in the non-human organism, preferably in the microorganism, the plant cell, the plant tissue, the plant or a part thereof, more preferably a microorganism, a plant tissue, a plant or a part thereof, especially cytoplasmic or in an organelle, like plastids or mitochondria,
[68427] (c) growing the non-human organism, preferably the microorganism, the plant cell, the plant tissue, the plant or a part thereof, under conditions which permit the production of said chemical in the non-human organism, preferably the microorganism, the plant cell, the plant tissue, the plant or a part thereof; and
[68428] (d) if desired, recovering, optionally isolating, said fine chemical, in free and/or bound form, and, optionally further free and/or bound steroid, and/or other metabolites synthesized by the non-human organism, the microorganism, the plant cell, the plant tissue, the plant or a part thereof.

[68429] [0131.1.7.14] to [0133.1.7.14] for the disclosure of these paragraphs see [0131.1.7.7] to [0133.1.7.7] above

[68430] The non-human organism, in particular the microorganism, plant or part thereof, is advantageously grown in such a way that it is not only possible to recover, if desired to isolate the free or bound fine chemical or the free and bound fine chemical but as option it is also possible to produce, recover and, if desired to isolate, other free or/and bound vitamins and/or other metabolites.

[68431] The organisms are harvested in a manner known per se and appropriate for the particular organism. Microorganisms such as bacteria, mosses, yeasts and fungi or plant cells which are cultured in liquid media by fermentation may be removed, for example, by centrifugation, decanting or filtration. Plants are grown on solid media in a manner known per se and harvested accordingly.

[68432] Accordingly, the fine chemical, which is synthesized in the organism, in particular the microorganism, the plant or animal cell, the plant or animal tissue or the plant can be isolated if desired. Depending on the use of the fine chemical, different purities resulting from the purification may be advantageous as will be described herein below.

[68433] For example, after the growing phase, the organisms can be harvested. The organisms, its cells or a part thereof or the recovered, and if desired isolated, phytosterols, in particular beta-sitosterol, campesterol and/or stigmasterol, or esters, glycosides, triglycerides, lipids, oils and/or fats containing beta-sitosterol, campesterol and/or stigmasterol can then be processed further directly into foodstuffs or animal feeds or for other applications, for example according to the disclosures made in WO/2005/083093 or WO2005/012316, which are expressly incorporated herein by reference.

[68434] Transgenic plants which comprise the phytosterols such as beta-sitosterol, stigmasterol and/or campesterol synthesized in the process according to the invention can advantageously be marketed directly without there being any need for the phytosterols synthesized to be isolated. Plants for the process according to the invention are listed as meaning intact plants and all plant parts, plant organs or plant parts such as leaf, stem, seeds, root, tubers, progeny, anthers, fibers, root hairs, stalks, embryos, calli, cotelydons, petioles, harvested material, plant tissue, reproductive tissue and cell cultures which are derived from the actual transgenic plant and/or can be used for bringing about the transgenic plant. In this context, the seed comprises all parts of the seed such as the seed coats, epidermal cells, seed cells, endosperm or embryonic tissue. However, the fine chemical produced in the process according to the invention can also be isolated from the organisms, advantageously plants, in the form of their oils, fats, lipids containing beta-sitosterol and/or campesterol and/or in free form such as beta-sitosterol, stigmasterol and/or campestrerol. Phytosterols produced by this process can be obtained by harvesting the organisms, either from the crop in which they grow, or from the field. This can be done via pressing or extraction of the plant parts, preferably the plant seeds, as extracts, e.g. ether, alcohol, or other organic solvents or water containing extract. To increase the efficiency of extraction it is beneficial to clean, to temper and if necessary to hull and to flake the plant material expecially the progeny or the seeds. E.g the oils, fats, lipids, esters and/or free phytosterols, extracts, e.g. ether, alcohol, or other organic solvents or water containing extract which contain the phytosterols, in particular beta-sitosterol and/or campesterol produced according to the process of the invention can be obtained by what is known as cold beating or cold pressing without applying heat. To allow for greater ease of disruption of the plant parts, specifically the seeds, they are previously comminuted, steamed or roasted. The seeds, which have been pretreated in this manner can subsequently be pressed or extracted with solvents such as warm hexane. The solvent is subsequently removed. In the case of microorganisms, the latter are, after harvesting, for example extracted directly without further processing steps or else, after disruption, extracted via various methods with which the skilled worker is familiar. In this manner, more than 96% of the compounds produced in the process can be isolated. Thereafter, the resulting products are processed further, i.e. degummed and/or refined. In this process, substances such as the plant mucilages and suspended matter are first removed. What is known as desliming can be affected enzymatically or, for example, chemico-physically by addition of acid such as phosphoric acid.

[68435] Plant sterols (phytosterols) are by-products of traditional vegetable oil refining. The source may be commonly a blend of crude edible oils, consisting of soy bean oil or of other edible oils, e.g. corn, rapeseed, olive and palm oil in varying proportions. Hemp may also be a source of new oilseed, oil and food ingredients as well as Sea buckthorn (hippophae rhamnoides). The crude oil, which is obtained by pressing or solvent extraction, may undergoes a series of refining processes to remove solvents, lecithins, free fatty acids, color bodies, off-odors and off-flavors.

[68436] In one of these steps, the oil may be subjected to steam distillation at reduced pressure (deodorisation) and the resulting distillate contains the phytosterol fraction. From this fraction, fatty acids, lecithins and other compounds are removed by fractional distillation, ethanolysis/transesterification, distillation and crystallisation from a heptane solution, and the phytosterols are further purified by recrystallisation using food grade materials and good manufacturing practices. The extraction and purification steps are standard methods and similar to the procedures used traditionally by the food industry for the production of plant sterols. Phytosterol esters may be produced from the sterols using food grade vegetable oil-derived fatty acids or triglycerides and applying standard methods for esterification or transesterification commonly used in the fats and oils industry.

[68437] [0135.1.7.14] to [0139.1.7.14] for the disclosure of these paragraphs see [0135.1.7.7] to [0139.1.7.7] above

[68438] In another embodiment, the invention relates to a (isolated) nucleic acid molecule, which comprises a nucleic acid molecule selected from the group consisting of:
[68439] (a) a nucleic acid molecule encoding a polypeptide shown in Table II, application no. 14, column 5 or 8, preferably shown in Table II B, application no. 14, column 8, or a homolog or a fragment thereof;
[68440] (b) a nucleic acid molecule shown in Table I, application no. 14, column 5 or 8, preferably shown in Table I B, application no. 14, column 8, preferably the coding region thereof, or a homolog or a fragment thereof;
[68441] (c) a nucleic acid molecule, which, as a result of the degeneracy of the genetic code, can be derived from a polypeptide sequence depicted in column 5 or 8 of Table II, application no. 14, preferably in column 8 of Table II B, application no. 14;
[68442] (d) a nucleic acid molecule having at least 30% identity, preferably at least 40%, 50%, 60%, 70%, 75%, 80%, 85%, 90%, 95%, 96%, 97%, 98%, 99%, 99.5%, with the nucleic acid molecule sequence of a polynucleotide comprising the nucleic acid molecule shown in column 5 or 8 of Table I, application no. 14, preferably shown in column 8 of Table I B, application no. 14, preferably the coding region thereof;
[68443] (e) a nucleic acid molecule encoding a polypeptide having at least 30% identity, preferably at least 40%, 50% 60%, 70%, 75%, 80%, 85%, 90%, 95%, 96%, 97%, 98%, 99%, 99.5%, identity with the amino acid sequence of the polypeptide encoded by the nucleic acid molecule of (a), (b), (c) or (d);
[68444] (f) a nucleic acid molecule which hybridizes with a nucleic acid molecule of (a), (b), (c), (d) or (e) under stringent hybridization conditions;
[68445] (g) a nucleic acid molecule encoding a polypeptide which can be isolated with the aid of monoclonal or polyclonal antibodies made against a polypeptide encoded by one of the nucleic acid molecules of (a), (b), (c), (d), (e) or (f);
[68446] (h) a nucleic acid molecule encoding a polypeptide comprising the consensus sequence or one or more polypeptide motifs as shown in column 8 of Table IV, application no. 14;
[68447] (i) a nucleic acid molecule encoding a polypeptide having the activity represented by a respective protein as depicted in column 5 of Table II, application no. 14;
[68448] (j) a nucleic acid molecule comprising a polynucleotide which is obtained by amplifying a cDNA library or a genomic library using the primers in Table III, application no. 14, column 8;
[68449] and
[68450] (k) nucleic acid molecule which is obtainable by screening a suitable nucleic acid library, especially a cDNA library and/or a genomic library, under stringent hybridization conditions with a probe comprising one of the sequences of the nucleic acid molecule of (a), (b), (c), (d), (e), (f), (g), (h), (i) or (j) or with a fragment of at least 15 nt, preferably 20 nt, 30 nt, 50 nt, 100 nt, 200 nt,500 nt, 1000 nt, 1500 nt, 2000 nt or 3000 nt of the nucleic acid molecule characterized in (a), (b), (c), (d), (e), (f), (g), (h), (i) or (j) ;
[68451] or a nucleic acid molecule comprising a sequence which is complementary thereto.
   (All the references to Tables I to IV are references to the corresponding lines of Tables I to IV.)

[68452] In a preferred embodiment thereof said nucleic acid molecule according to (a), (b), (c), (d), (e), (f), (g), (h), (i), (j) or (k) encodes a polypeptide which has the activity of the respective polypeptide represented by a protein comprising a polypeptide as depicted in the respective line in column 5 of Table II, application no. 14.

[68453] In another preferred embodiment thereof said nucleic acid molecule according to (a), (b), (c), (d), (e), (f), (g), (h), (i), (j) or (k) confers a generation or an increase of the respective fine chemical in a non-human organism or a part thereof as compared to a corresponding wild-type non-human organism or part thereof.

[68454] In another preferred embodiment thereof said nucleic acid molecule according to (a), (b), (c), (d), (e), (f), (g), (h), (i), (j) or (k) encodes a polypeptide which has the activity of the respective polypeptide represented by a protein as depicted in the respective line in column 5 of Table II application no. 14 and confers a generation or an increase of the respective fine chemical in a non-human organism or a part thereof as compared to a corresponding wild-type non-human organism or part thereof.

[68455] In another embodiment, the invention relates to a (isolated) nucleic acid molecule, which comprises a nucleic acid molecule selected from the group consisting of:
[68456] (a) a nucleic acid molecule encoding a polypeptide shown in Table II, column 5 or 8, application no. 14, preferably shown in Table II A, application no. 14, in column 5 or in Table II A, application no. 14, column 8 or in Table II B, application no. 14, column 8, or a homolog or a fragment thereof;
[68457] (b) a nucleic acid molecule shown in Table I, application no. 14, column 5 or 8, preferably shown in Table I A, application no. 14, in column 5 or in Table I A, application no. 14, column 8 or in Table I B, application no. 14, column 8, preferably the coding region thereof, or a homolog or a fragment thereof;
[68458] (c) a nucleic acid molecule, which, as a result of the degeneracy of the genetic code, can be derived from a polypeptide sequence depicted in column 5 or 8 of Table II, application no. 14, preferably shown in Table II A, application no. 14, in column 5 or in Table II A, application no. 14, column 8 or in Table II B, application no. 14, column 8;
[68459] (d) a nucleic acid molecule having at least 30% identity, preferably at least 40%, 50%, 60%, 70%, 75%, 80%, 85%, 90%, 95%, 96%, 97%, 98%, 99%, 99.5%, with the nucleic acid molecule sequence of a polynucleotide comprising the nucleic acid molecule shown in column 5 or 8 of Table I, application no. 14, preferably shown in Table I A, application no. 14, in column 5 or in Table I A, application no. 14, column 8 or in Table I B column 8, preferably the coding region thereof;
[68460] (e) a nucleic acid molecule encoding a polypeptide having at least 30% identity, preferably at least 40%, 50% 60%, 70%, 75%, 80%, 85%, 90%, 95%, 96%, 97%, 98%, 99%, 99.5%, identity with the amino acid sequence of the polypeptide encoded by the nucleic acid molecule of (a), (b), (c) or (d);
[68461] (f) a nucleic acid molecule which hybridizes with a nucleic acid molecule of (a), (b), (c), (d) or (e) under stringent hybridization conditions;
[68462] (g) a nucleic acid molecule encoding a polypeptide which can be isolated with the aid of monoclonal or polyclonal antibodies made against a polypeptide encoded by one of the nucleic acid molecules of (a), (b), (c), (d), (e) or (f);
[68463] (h) a nucleic acid molecule encoding a polypeptide comprising the consensus sequence or one or more polypeptide motifs as shown in column 8 of Table IV, application no. 14;
[68464] (i) a nucleic acid molecule encoding a polypeptide having the activity represented by a respective protein as depicted in column 5 of Table II, application no. 14;
[68465] (j) a nucleic acid molecule comprising a polynucleotide which is obtained by amplifying a cDNA library or a genomic library using the primers in Table III, application no. 14, column 8;
[68466] and
[68467] (k) nucleic acid molecule which is obtainable by screening a suitable nucleic acid library, especially a cDNA library and/or a genomic library, under stringent hybridization conditions with a probe comprising one of the sequences of the nucleic acid molecule of (a), (b), (c), (d), (e), (f), (g), (h), (i) or (j) or with a fragment thereof having at least 15 nt, preferably 20 nt, 30 nt, 50 nt, 100 nt, 200 nt,500 nt, 1000 nt, 1500 nt, 2000 nt or 3000 nt of the nucleic acid molecule complementary to a nucleic acid sequence characterized in (a), (b), (c), (d), (e), (f), (g), (h), (i) or (j);
[68468] or a nucleic acid molecule comprising a sequence which is complementary thereto;
   whereby, preferably, the nucleic acid molecule according to (a), (b), (c), (d), (e), (f), (g), (h), (i), (j) or (k) distinguishes over the sequence depicted in Table I A and/or I B, application no. 14, column 5 or 8, or the coding regions thereof, by one or more nucleotides (especially but not exceeding 5%, preferably 4%, 3%, 2%, 1%, 0.5%, 0.2% or 0.1%). In an embodiment, the nucleic acid molecule of the invention does not consist of the sequence shown in Table I A and/or I B, application no. 14, column 5 or 8, or the coding region thereof. In another embodiment, the nucleic acid molecule of the present invention, preferably the coding region thereof, is at least 30%, 40%, 50%, 60%, 70%, 80%, 90%, 95% identical but less than 100%, 99.999%, 99.99%, 99.9%, 99%, 98%, 97%, 96% or 95% identical to the sequence shown in Table I A and/or I B, application no. 14, column 5 or 8, or the coding region thereof, respectively. In a further embodiment the nucleic acid molecule does not encode the polypeptide sequence shown in Table II A and/or II B, application no. 14, column 5 or 8 but homologs thereof. Accordingly, in one embodiment, the nucleic acid molecule of the present invention encodes in one embodiment a polypeptide which differs at least in one or more amino acids (especially but not exceeding 5%, preferably 4%, 3%, 2%, 1%, 0.5%, 0.2% or 0.1%) from the polypeptide shown in Table II, application no. 14, column 5 or 8 and does not encode a protein of the sequence shown in Table II A and/or II B, application no. 14, column 5 or 8. Accordingly, in one embodiment, the protein encoded by a sequence of a nucleic acid according to (a), (b), (c), (d), (e), (f), (g), (h), (i), (j) or (k) does not consist of the sequence shown in Table I A and/or I B, application no. 14, column 5 or 8, or the coding region thereof. In a further embodiment, the protein of the present invention is at least 30%, 40%, 50%, 60%, 70%, 80%, 90%, 95% identical to protein sequence depicted in Table II A and/or II B, application no. 14, column 5 or 8 but less than 100%, preferably less than 99.999%, 99.99%, 99.9%, 99%, 98%, 97%, 96% or 95% identical to the sequence shown in Table II A and/or II B, application no. 14, column 5 or 8.
   (All the references to Tables I to IV are references to the corresponding lines of Tables I to IV.)

[68469] In a preferred embodiment thereof said nucleic acid molecule according to (a), (b), (c), (d), (e), (f), (g), (h), (i), (j) or (k) encodes a polypeptide which has the activity of the respective polypeptide represented by a protein comprising a polypeptide as depicted in the respective line in column 5 of Table II, application no. 14.

[68470] In another preferred embodiment thereof said nucleic acid molecule according to (a), (b), (c), (d), (e), (f), (g), (h), (i), (j) or (k) confers a generation or an increase of the respective fine chemical in a non-human organism or a part thereof as compared to a corresponding wild-type non-human organism or part thereof.

[68471] In another preferred embodiment thereof said nucleic acid molecule according to (a), (b), (c), (d), (e), (f), (g), (h), (i), (j) or (k) encodes a polypeptide which has the activity of the respective polypeptide represented by a protein as depicted in the respective line in column 5 of Table II, application no. 14, and confers a generation or an increase of the respective fine chemical in a non-human organism or a part thereof as compared to a corresponding wild-type non-human organism or part thereof.

[68472] [0144.1.7.14] to [0155.1.7.14] for the disclosure of these paragraphs see [0144.1.7.7] to [0155.1.7.7] above

[68473] In a preferred embodiment a nucleic acid construct, for example an expression cassette, comprises upstream, i.e. at the 5′ end of the encoding sequence, a promoter and downstream, i.e. at the 3′ end, a polyadenylation signal and optionally other regulatory elements which are operably linked to the intervening encoding sequence with one of the nucleic acids as depicted in the respective line in Table I, application no. 14, column 5 or 8, preferably the coding region thereof, or a homolog or a fragment thereof. By an operable linkage is meant the sequential arrangement of promoter, encoding sequence, terminator, optionally other regulatory elements and optionally targeting sequences in such a way that each of the regulatory elements/targeting sequence can fulfill its function in the expression of the encoding sequence in due manner. In one embodiment the sequences preferred for operable linkage are targeting sequences for ensuring subcellular localization in organelles, like plastids or mitochondria. However, targeting sequences for ensuring subcellular localization in the endoplasmic reticulum (=ER), in the nucleus, in oil corpuscles or other compartments may also be employed as well as translation promoters such as the 5′ lead sequence in tobacco mosaic virus (Gallie et al., Nucl. Acids Res. 15, 8693 (1987)).

[68474] for the disclosure of this paragraph see [0157.1.7.7] above

[68475] In an embodiment, the invention relates to an expression cassette, comprising
[68476] 1) a promoter, preferably a promoter selected from the group consisting of Big35S, PCUbi, Super and USP;
[68477] 2) a nucleic acid molecule selected from the group consisting of
   [68478] (a) a nucleic acid molecule encoding a polypeptide shown in Table II, application no. 14, column 5 or 8, preferably shown in Table II A, application no. 14, column 5, or in Table II A, application no. 14, column 8, or in Table II B, application no. 14, column 8, or a homolog or a fragment thereof;
   [68479] (b) a nucleic acid molecule shown in Table I, application no. 14, column 5 or 8, preferably shown in Table I A, application no. 14, column 5, or in Table I A, application no. 14, column 8, or in Table I B, application no. 14, column 8, preferably the coding region thereof, or a homolog or a fragment thereof;
   [68480] (c) a nucleic acid molecule, which, as a result of the degeneracy of the genetic code, can be derived from a polypeptide sequence depicted in column 5 or 8 of Table II, application no. 14, preferably shown in Table II A, application no. 14, column 5, or in Table II A, application no. 14, column 8, or in Table II B, application no. 14, column 8;
   [68481] (d) a nucleic acid molecule having at least 30% identity, preferably at least 40%, 50%, 60%, 70%, 75%, 80%, 85%, 90%, 95%, 96%, 97%, 98%, 99%, 99.5%, with the nucleic acid molecule sequence of a polynucleotide comprising the nucleic acid molecule shown in column 5 or 8 of Table I, application no. 14, preferably shown in Table I A, application no. 14, column 5, or in Table I A, application no. 14, column 8, or in Table I B, application no. 14, column 8, preferably the coding region thereof;
   [68482] (e) a nucleic acid molecule encoding a polypeptide having at least 30% identity, preferably at least 40%, 50% 60%, 70%, 75%, 80%, 85%, 90%, 95%, 96%, 97%, 98%, 99%, 99.5%, identity with the amino acid sequence of the polypeptide encoded by the nucleic acid molecule of (a), (b), (c) or (d);
   [68483] (f) a nucleic acid molecule which hybridizes with a nucleic acid molecule of (a), (b), (c), (d) or (e) under stringent hybridization conditions;
   [68484] (g) a nucleic acid molecule encoding a polypeptide which can be isolated with the aid of monoclonal or polyclonal antibodies made against a polypeptide encoded by one of the nucleic acid molecules of (a), (b), (c), (d), (e) or (f);
   [68485] (h) a nucleic acid molecule encoding a polypeptide comprising the consensus sequence or one or more polypeptide motifs as shown in column 8 of Table IV, application no. 14;
   [68486] (i) a nucleic acid molecule encoding a polypeptide having the activity represented by a respective protein as depicted in column 5 of Table II, application no. 14;
   [68487] (j) a nucleic acid molecule comprising a polynucleotide which is obtained by amplifying a cDNA library or a genomic library using the primers in Table III, application no. 14, column 8;
   [68488] and
   [68489] (k) nucleic acid molecule which is obtainable by screening a suitable nucleic acid library, especially a cDNA library and/or a genomic library, under stringent hybridization conditions with a probe comprising one of the sequences of the nucleic acid molecule of (a), (b), (c), (d), (e), (f), (g), (h), (i) or (j) or with a fragment of at least 15 nt, preferably 20 nt, 30 nt, 50 nt, 100 nt, 200 nt,500 nt, 1000 nt, 1500 nt, 2000 nt or 3000 nt of the nucleic acid molecule characterized in (a), (b), (c), (d), (e), (f), (g), (h), (i) or (j);
   [68490] or a nucleic acid molecule comprising a sequence which is complementary thereto.
      and, optionally
[68491] 3) nucleic acid molecule encoding a transit peptide, preferably encoding a plastidal transit peptide or a mitochondrial transit peptide;
   which are operable linked.
   (All the references to Tables I to IV are references to the corresponding lines of Tables I to IV.)

[68492] In a preferred embodiment thereof said nucleic acid molecule according to 2 (a), (b), (c), (d), (e), (f), (g), (h), (i), (j) or (k) encodes a polypeptide which has the activity of the respective polypeptide represented by a protein comprising a polypeptide as depicted in the respective line in column 5 of Table II, application no. 14.

[68493] In another preferred embodiment thereof said nucleic acid molecule according to 2 (a), (b), (c), (d), (e), (f), (g), (h), (i), (j) or (k) confers a generation or an increase of the respective fine chemical in a non-human organism or a part thereof as compared to a corresponding wild-type non-human organism or part thereof.

[68494] In another preferred embodiment thereof said nucleic acid molecule according to 2 (a), (b), (c), (d), (e), (f), (g), (h), (i), (j) or (k) encodes a polypeptide which has the activity of the respective polypeptide represented by a protein as depicted in the respective line in column 5 of Table II application no. 14 and confers a generation or an increase of the respective fine chemical in a non-human organism or a part thereof as compared to a corresponding wild-type non-human organism or part thereof.

[68495] In another embodiment thereof the expression cassette comprises 3) a nucleic acid molecule encoding a transit peptide, preferably encoding a plastidal transit peptide, especially in case in column 6 of Table I, application no. 14, in the same line as of the respective nucleic acid molecule according to 2) “plastidic” is depicted, or encoding a mitochondrial transit peptide, especially in case in column 6 of Table I, application no. 14, in the same line as of the respective nucleic acid molecule according to 2) “mitochondric” is depicted.

[68496] In another embodiment thereof the expression cassette does not comprise 3) a nucleic acid molecule encoding a transit peptide, especially in case in column 6 of Table I, application no. 14, in the same line as of the respective nucleic acid molecule according to 2) “non-targeted” is depicted.

[68497] In a further embodiment, the invention relates to an expression cassette, comprising
[68498] 1) a promoter, preferably a promoter selected from the group consisting of Big35S, PCUbi, Super and USP;
[68499] 2) a nucleic acid molecule selected from the group consisting of
   [68500] (a) a nucleic acid molecule encoding a polypeptide shown in Table II, application no. 14, column 5 or 8, preferably shown in Table II A, application no. 14, column 5, or in Table II A, application no. 14, column 8, or in Table II B, application no. 14, column 8, or a homolog or a fragment thereof;
   [68501] (b) a nucleic acid molecule shown in Table I, application no. 14, column 5 or 8, preferably shown in Table I A, application no. 14, column 5, or in Table I A, application no. 14, column 8, or in Table I B, application no. 14, column 8, preferably the coding region thereof, or a homolog or a fragment thereof;
   [68502] (c) a nucleic acid molecule, which, as a result of the degeneracy of the genetic code, can be derived from a polypeptide sequence depicted in column 5 or 8 of Table II, application no. 14, preferably shown in Table II A, application no. 14, column 5, or in Table II A, application no. 14, column 8, or in Table II B, application no. 14, column 8;
   [68503] (d) a nucleic acid molecule having at least 30% identity, preferably at least 40%, 50%, 60%, 70%, 75%, 80%, 85%, 90%, 95%, 96%, 97%, 98%, 99%, 99.5%, with the nucleic acid molecule sequence of a polynucleotide comprising the nucleic acid molecule shown in column 5 or 8 of Table I, application no. 14, preferably shown in Table I A, application no. 14, column 5, or in Table I A, application no. 14, column 8,or in Table I B, application no. 14, column 8, preferably the coding region thereof;
   [68504] (e) a nucleic acid molecule encoding a polypeptide having at least 30% identity, preferably at least 40%, 50% 60%, 70%, 75%, 80%, 85%, 90%, 95%, 96%, 97%, 98%, 99%, 99.5%, identity with the amino acid sequence of the polypeptide encoded by the nucleic acid molecule of (a), (b), (c) or (d);
   [68505] (f) a nucleic acid molecule which hybridizes with a nucleic acid molecule of (a), (b), (c), (d) or (e) under stringent hybridization conditions;
   [68506] (g) a nucleic acid molecule encoding a polypeptide which can be isolated with the aid of monoclonal or polyclonal antibodies made against a polypeptide encoded by one of the nucleic acid molecules of (a), (b), (c), (d), (e) or (f);
   [68507] (h) a nucleic acid molecule encoding a polypeptide comprising the consensus sequence or one or more polypeptide motifs as shown in column 8 of Table IV, application no. 14;
   [68508] (i) a nucleic acid molecule encoding a polypeptide having the activity represented by a respective protein as depicted in column 5 of Table II, application no. 14;
   [68509] (j) a nucleic acid molecule comprising a polynucleotide which is obtained by amplifying a cDNA library or a genomic library using the primers in Table III, application no. 14, column 8;
   [68510] and
   [68511] (k) nucleic acid molecule which is obtainable by screening a suitable nucleic acid library, especially a cDNA library and/or a genomic library, under stringent hybridization conditions with a probe comprising one of the sequences of the nucleic acid molecule of (a), (b), (c), (d), (e), (f), (g), (h), (i) or (j) or with a fragment of at least 15 nt, preferably 20 nt, 30 nt, 50 nt, 100 nt, 200 nt,500 nt, 1000 nt, 1500 nt, 2000 nt or 3000 nt of the nucleic acid molecule characterized in (a), (b), (c), (d), (e), (f), (g), (h), (i) or (j);
   [68512] or a nucleic acid molecule comprising a sequence which is complementary thereto; and, optionally
[68513] 3) nucleic acid molecule encoding a transit peptide, preferably encoding a plastidal transit peptide or a mitochondrial transit peptide;
   which are operable linked and
   whereby, preferably, the nucleic acid molecule according to 2 (a), (b), (c), (d), (e), (f), (g), (h), (i), (j) or (k) distinguishes over the sequence depicted in Table I A and/or I B, application no. 14, column 5 or 8, or the coding region thereof, by one or more nucleotides (especially but not exceeding 5%, preferably 4%, 3%, 2%, 1%, 0.5%, 0.2% or 0.1%). In an embodiment, the nucleic acid molecule of the invention according to 2) does not consist of the sequence shown in Table I A and/or I B, application no. 14, column 5 or 8, or the coding region thereof. In another embodiment, the nucleic acid molecule of the present invention, preferably the coding region thereof, is at least 30%, 40%, 50%, 60%, 70%, 80%, 90%, 95% identical but less than 100%, 99.999%, 99.99%, 99.9%, 99%, 98%, 97%, 96% or 95% identical to the sequence shown in Table I A and/or I B, application no. 14, column 5 or 8, or the coding region thereof, respectively. In a further embodiment the nucleic acid molecule does not encode the polypeptide sequence shown in Table II A and/or II B, application no. 14, column 5 or 8 but homologs thereof.

[68514] Accordingly, in one embodiment, the nucleic acid molecule of the present invention encodes in one embodiment a polypeptide which differs at least in one or more amino acids (especially but not exceeding 5%, preferably 4%, 3%, 2%, 1%, 0.5%, 0.2% or 0.1%) from the polypeptide shown in Table II, application no. 14, column 5 or 8 and does not encode a protein of the sequence shown in Table II A and/or II B, application no. 14, column 5 or 8. Accordingly, in one embodiment, the protein encoded by a sequence of a nucleic acid according to 2(a), (b), (c), (d), (e), (f), (g), (h), (i), (j) or (k) does not consist of the sequence shown in Table I A and/or I B, application no. 14, column 5 or 8, or the coding region thereof. In a further embodiment, the protein of the present invention is at least 30%, 40%, 50%, 60%, 70%, 80%, 90%, 95% identical to protein sequence depicted in Table II A and/or II B, application no. 14, column 5 or 8 but less than 100%, 99.999%, 99.99%, 99.9%, 99%, 98%, 97%, 96% or 95% identical to the sequence shown in Table II A and/or II B, application no. 14, column 5 or 8.

(All the references to Tables I to IV are references to the corresponding lines of Tables I to IV.)

[68515] In a preferred embodiment thereof said nucleic acid molecule according to 2 (a), (b), (c), (d), (e), (f), (g), (h), (i), (j) or (k) encodes a polypeptide which has the activity of the respective polypeptide represented by a protein comprising a polypeptide as depicted in the respective line in column 5 of Table II, application no. 14.

[68516] In another preferred embodiment thereof said nucleic acid molecule according to 2 (a), (b), (c), (d), (e), (f), (g), (h), (i), (j) or (k) confers a generation or an increase of the respective fine chemical in a non-human organism or a part thereof as compared to a corresponding wild-type non-human organism or part thereof.

[68517] In another preferred embodiment thereof said nucleic acid molecule according to 2 (a), (b), (c), (d), (e), (f), (g), (h), (i), (j) or (k) encodes a polypeptide which has the activity of the respective polypeptide represented by a protein as depicted in the respective line in column 5 of Table II application no. 14 and confers a generation or an increase of the respective fine chemical in a non-human organism or a part thereof as compared to a corresponding wild-type non-human organism or part thereof.

[68518] In another embodiment thereof the expression cassette comprises 3) a nucleic acid molecule encoding a transit peptide, preferably encoding a plastidal transit peptide, especially in case in column 6 of Table I, application no. 14, in the same line as of the respective nucleic acid molecule according to 2) “plastidic” is depicted, or encoding a mitochondrial transit peptide, especially in case in column 6 of Table I, application no. 14, in the same line as of the respective nucleic acid molecule according to 2) “mitochondric” is depicted.

[68519] In another embodiment thereof the expression cassette does not comprise 3) a nucleic acid molecule encoding a transit peptide, especially in case in column 6 of Table I, application no. 14, in the same line as of the respective nucleic acid molecule according to 2) “non-targeted” is depicted.

[68520] In an embodiment the present invention relates to an expresssion cassette comprising a) a promoter, preferably a promoter selected from the group consisting of Big35S, PCUbi, Super and USP, in particular p-PcUBI; and b) the nucleic acid SEQ ID NO. 131003, or a homolog or fragment thereof, or a homolog thereof being depicted in Table I, application no. 14, column 8, in the same line as SEQ ID NO. 131003, preferably the coding region thereof, a homolog or a fragment thereof; which are operable linked.

[68521] In an embodiment thereof the expression cassette comprises in addition c) a nucleic acid molecule encoding a transit peptide, especially a plastidal transit petide in case in Table I, application no. 14, in column 6 in the same line as SEQ ID NO. 131003 is depicted, plastidic is mentioned, or a mitochondrial transit peptide in case in Table I, application no. 14, in column 6 in the same line as SEQ ID NO. 131003 is depicted, mitochondric is mentioned; which is operable linked, too.

[68522] In another embodiment thereof the expression cassette does not comprise an additional transit peptide in case in Table I, application no. 14, in column 6 in the same line as SEQ ID NO. 131003 is depicted, non-targeted is mentioned.

[68523] In an embodiment the present invention relates to an expresssion cassette comprising a) a promoter, preferably a promoter selected from the group consisting of Big35S, PCUbi, Super and USP, in particular p-PcUBI; and b) the nucleic acid SEQ ID NO. 17451, or a homolog or fragment thereof, or a homolog thereof being depicted in Table I, application no. 14, column 8, in the same line as SEQ ID NO. 17451, preferably the coding region thereof, a homolog or a fragment thereof; which are operable linked.

[68524] In an embodiment thereof the expression cassette comprises in addition c) a nucleic acid molecule encoding a transit peptide, especially a plastidal transit petide in case in Table I, application no. 14, in column 6 in the same line as SEQ ID NO. 17451 is depicted, plastidic is mentioned, or a mitochondrial transit peptide in case in Table I, application no. 14, in column 6 in the same line as SEQ ID NO. 17451 is depicted, mitochondric is mentioned; which is operable linked, too.

[68525] In another embodiment thereof the expression cassette does not comprise an additional transit peptide in case in Table I, application no. 14, in column 6 in the same line as SEQ ID NO. 17451 is depicted, non-targeted is mentioned.

[68526] In an embodiment the present invention relates to an expresssion cassette comprising a) a promoter, preferably a promoter selected from the group consisting of Big35S, PCUbi, Super and USP, in particular p-PcUBI; and b) the nucleic acid SEQ ID NO. 17968, or a homolog or fragment thereof, or a homolog thereof being depicted in Table I, application no. 14, column 8, in the same line as SEQ ID NO. 17968, preferably the coding region thereof, a homolog or a fragment thereof; which are operable linked.

[68527] In an embodiment thereof the expression cassette comprises in addition c) a nucleic acid molecule encoding a transit peptide, especially a plastidal transit petide in case in Table I, application no. 14, in column 6 in the same line as SEQ ID NO. 17968 is depicted, plastidic is mentioned, or a mitochondrial transit peptide in case in Table I, application no. 14, in column 6 in the same line as SEQ ID NO. 17968 is depicted, mitochondric is mentioned; which is operable linked, too.

[68528] In another embodiment thereof the expression cassette does not comprise an additional transit peptide in case in Table I, application no. 14, in column 6 in the same line as SEQ ID NO. 17968 is depicted, non-targeted is mentioned.

[68529] In an embodiment the present invention relates to an expresssion cassette comprising a) a promoter, preferably a promoter selected from the group consisting of Big35S, PCUbi, Super and USP, in particular p-PcUBI; and b) the nucleic acid SEQ ID NO. 18869, or a homolog or fragment thereof, or a homolog thereof being depicted in Table I, application no. 14, column 8, in the same line as SEQ ID NO. 18869, preferably the coding region thereof, a homolog or a fragment thereof; which are operable linked.

[68530] In an embodiment thereof the expression cassette comprises in addition c) a nucleic acid molecule encoding a transit peptide, especially a plastidal transit petide in case in Table I, application no. 14, in column 6 in the same line as SEQ ID NO. 18869 is depicted, plastidic is mentioned, or a mitochondrial transit peptide in case in Table I, application no. 14, in column 6 in the same line as SEQ ID NO. 18869 is depicted, mitochondric is mentioned; which is operable linked, too.

[68531] In another embodiment thereof the expression cassette does not comprise an additional transit peptide in case in Table I, application no. 14, in column 6 in the same line as SEQ ID NO. 18869 is depicted, non-targeted is mentioned.

[68532] In an embodiment the present invention relates to an expresssion cassette comprising a) a promoter, preferably a promoter selected from the group consisting of Big35S, PCUbi, Super and USP, in particular p-PcUBI; and b) the nucleic acid SEQ ID NO. 1061, or a homolog or fragment thereof, or a homolog thereof being depicted in Table I, application no. 14, column 8, in the same line as SEQ ID NO. 1061, preferably the coding region thereof, a homolog or a fragment thereof; which are operable linked.

[68533] In an embodiment thereof the expression cassette comprises in addition c) a nucleic acid molecule encoding a transit peptide, especially a plastidal transit petide in case in Table I, application no. 14, in column 6 in the same line as SEQ ID NO. 1061 is depicted, plastidic is mentioned, or a mitochondrial transit peptide in case in Table I, application no. 14, in column 6 in the same line as SEQ ID NO. 1061 is depicted, mitochondric is mentioned; which is operable linked, too.

[68534] In another embodiment thereof the expression cassette does not comprise an additional transit peptide in case in Table I, application no. 14, in column 6 in the same line as SEQ ID NO. 1061 is depicted, non-targeted is mentioned.

[68535] In an embodiment the present invention relates to an expresssion cassette comprising a) a promoter, preferably a promoter selected from the group consisting of Big35S, PCUbi, Super and USP, in particular p-PcUBI; and b) the nucleic acid SEQ ID NO. 19419, or a homolog or fragment thereof, or a homolog thereof being depicted in Table I, application no. 14, column 8, in the same line as SEQ ID NO. 19419, preferably the coding region thereof, a homolog or a fragment thereof; which are operable linked.

[68536] In an embodiment thereof the expression cassette comprises in addition c) a nucleic acid molecule encoding a transit peptide, especially a plastidal transit petide in case in Table I, application no. 14, in column 6 in the same line as SEQ ID NO. 19419 is depicted, plastidic is mentioned, or a mitochondrial transit peptide in case in Table I, application no. 14, in column 6 in the same line as SEQ ID NO. 19419 is depicted, mitochondric is mentioned; which is operable linked, too.

[68537] In another embodiment thereof the expression cassette does not comprise an additional transit peptide in case in Table I, application no. 14, in column 6 in the same line as SEQ ID NO. 19419 is depicted, non-targeted is mentioned.

[68538] In an embodiment the present invention relates to an expresssion cassette comprising a) a promoter, preferably a promoter selected from the group consisting of Big35S, PCUbi, Super and USP, in particular p-PcUBI; and b) the nucleic acid SEQ ID NO. 21902, or a homolog or fragment thereof, or a homolog thereof being depicted in Table I, application no. 14, column 8, in the same line as SEQ ID NO. 21902, preferably the coding region thereof, a homolog or a fragment thereof; which are operable linked.

[68539] In an embodiment thereof the expression cassette comprises in addition c) a nucleic acid molecule encoding a transit peptide, especially a plastidal transit petide in case in Table I, application no. 14, in column 6 in the same line as SEQ ID NO. 21902 is depicted, plastidic is mentioned, or a mitochondrial transit peptide in case in Table I, application no. 14, in column 6 in the same line as SEQ ID NO. 21902 is depicted, mitochondric is mentioned; which is operable linked, too.

[68540] In another embodiment thereof the expression cassette does not comprise an additional transit peptide in case in Table I, application no. 14, in column 6 in the same line as SEQ ID NO. 21902 is depicted, non-targeted is mentioned.

[68541] In an embodiment the present invention relates to an expresssion cassette comprising a) a promoter, preferably a promoter selected from the group consisting of Big35S, PCUbi, Super and USP, in particular p-PcUBI; and b) the nucleic acid SEQ ID NO. 109717, or a homolog or fragment thereof, or a homolog thereof being depicted in Table I, application no. 14, column 8, in the same line as SEQ ID NO. 109717, preferably the coding region thereof, a homolog or a fragment thereof; which are operable linked.

[68542] In an embodiment thereof the expression cassette comprises in addition c) a nucleic acid molecule encoding a transit peptide, especially a plastidal transit petide in case in Table I, application no. 14, in column 6 in the same line as SEQ ID NO. 109717 is depicted, plastidic is mentioned, or a mitochondrial transit peptide in case in Table I, application no. 14, in column 6 in the same line as SEQ ID NO. 109717 is depicted, mitochondric is mentioned; which is operable linked, too.

[68543] In another embodiment thereof the expression cassette does not comprise an additional transit peptide in case in Table I, application no. 14, in column 6 in the same line as SEQ ID NO. 109717 is depicted, non-targeted is mentioned.

[68544] In an embodiment the present invention relates to an expresssion cassette comprising a) a promoter, preferably a promoter selected from the group consisting of Big35S, PCUbi, Super and USP, in particular p-PcUBI; and b) the nucleic acid SEQ ID NO. 131208, or a homolog or fragment thereof, or a homolog thereof being depicted in Table I, application no. 14, column 8, in the same line as SEQ ID NO. 131208, preferably the coding region thereof, a homolog or a fragment thereof; which are operable linked.

[68545] In an embodiment thereof the expression cassette comprises in addition c) a nucleic acid molecule encoding a transit peptide, especially a plastidal transit petide in case in Table I, application no. 14, in column 6 in the same line as SEQ ID NO. 131208 is depicted, plastidic is mentioned, or a mitochondrial transit peptide in case in Table I, application no. 14, in column 6 in the same line as SEQ ID NO. 131208 is depicted, mitochondric is mentioned; which is operable linked, too.

[68546] In another embodiment thereof the expression cassette does not comprise an additional transit peptide in case in Table I, application no. 14, in column 6 in the same line as SEQ ID NO. 131208 is depicted, non-targeted is mentioned.

[68547] In an embodiment the present invention relates to an expresssion cassette comprising a) a promoter, preferably a promoter selected from the group consisting of Big35S, PCUbi, Super and USP, in particular p-PcUBI; and b) the nucleic acid SEQ ID NO. 23482, or a homolog or fragment thereof, or a homolog thereof being depicted in Table I, application no. 14, column 8, in the same line as SEQ ID NO. 23482, preferably the coding region thereof, a homolog or a fragment thereof; which are operable linked.

[68548] In an embodiment thereof the expression cassette comprises in addition c) a nucleic acid molecule encoding a transit peptide, especially a plastidal transit petide in case in Table I, application no. 14, in column 6 in the same line as SEQ ID NO. 23482 is depicted, plastidic is mentioned, or a mitochondrial transit peptide in case in Table I, application no. 14, in column 6 in the same line as SEQ ID NO. 23482 is depicted, mitochondric is mentioned; which is operable linked, too.

[68549] In another embodiment thereof the expression cassette does not comprise an additional transit peptide in case in Table I, application no. 14, in column 6 in the same line as SEQ ID NO. 23482 is depicted, non-targeted is mentioned.

[68550] In an embodiment the present invention relates to an expresssion cassette comprising a) a promoter, preferably a promoter selected from the group consisting of Big35S, PCUbi, Super and USP, in particular p-PcUBI; and b) the nucleic acid SEQ ID NO. 68849, or a homolog or fragment thereof, or a homolog thereof being depicted in Table I, application no. 14, column 8, in the same line as SEQ ID NO. 68849, preferably the coding region thereof, a homolog or a fragment thereof; which are operable linked.

[68551] In an embodiment thereof the expression cassette comprises in addition c) a nucleic acid molecule encoding a transit peptide, especially a plastidal transit petide in case in Table I, application no. 14, in column 6 in the same line as SEQ ID NO. 68849 is depicted, plastidic is mentioned, or a mitochondrial transit peptide in case in Table I, application no. 14, in column 6 in the same line as SEQ ID NO. 68849 is depicted, mitochondric is mentioned; which is operable linked, too.

[68552] In another embodiment thereof the expression cassette does not comprise an additional transit peptide in case in Table I, application no. 14, in column 6 in the same line as SEQ ID NO. 68849 is depicted, non-targeted is mentioned.

[68553] In an embodiment the present invention relates to an expresssion cassette comprising a) a promoter, preferably a promoter selected from the group consisting of Big35S, PCUbi, Super and USP, in particular p-PcUBI; and b) the nucleic acid SEQ ID NO. 4348, or a homolog or fragment thereof, or a homolog thereof being depicted in Table I, application no. 14, column 8, in the same line as SEQ ID NO. 4348, preferably the coding region thereof, a homolog or a fragment thereof; which are operable linked.

[68554] In an embodiment thereof the expression cassette comprises in addition c) a nucleic acid molecule encoding a transit peptide, especially a plastidal transit petide in case in Table I, application no. 14, in column 6 in the same line as SEQ ID NO. 4348 is depicted, plastidic is mentioned, or a mitochondrial transit peptide in case in Table I, application no. 14, in column 6 in the same line as SEQ ID NO. 4348 is depicted, mitochondric is mentioned; which is operable linked, too.

[68555] In another embodiment thereof the expression cassette does not comprise an additional transit peptide in case in Table I, application no. 14, in column 6 in the same line as SEQ ID NO. 4348 is depicted, non-targeted is mentioned.

[68556] In an embodiment the present invention relates to an expresssion cassette comprising a) a promoter, preferably a promoter selected from the group consisting of Big35S, PCUbi, Super and USP, in particular p-PcUBI; and b) the nucleic acid SEQ ID NO. 5318, or a homolog or fragment thereof, or a homolog thereof being depicted in Table I, application no. 14, column 8, in the same line as SEQ ID NO. 5318, preferably the coding region thereof, a homolog or a fragment thereof; which are operable linked.

[68557] In an embodiment thereof the expression cassette comprises in addition c) a nucleic acid molecule encoding a transit peptide, especially a plastidal transit petide in case in Table I, application no. 14, in column 6 in the same line as SEQ ID NO. 5318 is depicted, plastidic is mentioned, or a mitochondrial transit peptide in case in Table I, application no. 14, in column 6 in the same line as SEQ ID NO. 5318 is depicted, mitochondric is mentioned; which is operable linked, too.

[68558] In another embodiment thereof the expression cassette does not comprise an additional transit peptide in case in Table I, application no. 14, in column 6 in the same line as SEQ ID NO. 5318 is depicted, non-targeted is mentioned.

[68559] In an embodiment the present invention relates to an expresssion cassette comprising a) a promoter, preferably a promoter selected from the group consisting of Big35S, PCUbi, Super and USP, in particular p-PcUBI; and b) the nucleic acid SEQ ID NO. 25498, or a homolog or fragment thereof, or a homolog thereof being depicted in Table I, application no. 14, column 8, in the same line as SEQ ID NO. 25498, preferably the coding region thereof, a homolog or a fragment thereof; which are operable linked.

[68560] In an embodiment thereof the expression cassette comprises in addition c) a nucleic acid molecule encoding a transit peptide, especially a plastidal transit petide in case in Table I, application no. 14, in column 6 in the same line as SEQ ID NO. 25498 is depicted, plastidic is mentioned, or a mitochondrial transit peptide in case in Table I, application no. 14, in column 6 in the same line as SEQ ID NO. 25498 is depicted, mitochondric is mentioned; which is operable linked, too.

[68561] In another embodiment thereof the expression cassette does not comprise an additional transit peptide in case in Table I, application no. 14, in column 6 in the same line as SEQ ID NO. 25498 is depicted, non-targeted is mentioned.

[68562] In an embodiment the present invention relates to an expresssion cassette comprising a) a promoter, preferably a promoter selected from the group consisting of Big35S, PCUbi, Super and USP, in particular p-PcUBI; and b) the nucleic acid SEQ ID NO. 122803, or a homolog or fragment thereof, or a homolog thereof being depicted in Table I, application no. 14, column 8, in the same line as SEQ ID NO. 122803, preferably the coding region thereof, a homolog or a fragment thereof; which are operable linked.

[68563] In an embodiment thereof the expression cassette comprises in addition c) a nucleic acid molecule encoding a transit peptide, especially a plastidal transit petide in case in Table I, application no. 14, in column 6 in the same line as SEQ ID NO. 122803 is depicted, plastidic is mentioned, or a mitochondrial transit peptide in case in Table I, application no. 14, in column 6 in the same line as SEQ ID NO. 122803 is depicted, mitochondric is mentioned; which is operable linked, too.

[68564] In another embodiment thereof the expression cassette does not comprise an additional transit peptide in case in Table I, application no. 14, in column 6 in the same line as SEQ ID NO. 122803 is depicted, non-targeted is mentioned.

[68565] In an embodiment the present invention relates to an expresssion cassette comprising a) a promoter, preferably a promoter selected from the group consisting of Big35S, PCUbi, Super and USP, in particular p-PcUBI; and b) the nucleic acid SEQ ID NO. 26196, or a homolog or fragment thereof, or a homolog thereof being depicted in Table I, application no. 14, column 8, in the same line as SEQ ID NO. 26196, preferably the coding region thereof, a homolog or a fragment thereof; which are operable linked.

[68566] In an embodiment thereof the expression cassette comprises in addition c) a nucleic acid molecule encoding a transit peptide, especially a plastidal transit petide in case in Table I, application no. 14, in column 6 in the same line as SEQ ID NO. 26196 is depicted, plastidic is mentioned, or a mitochondrial transit peptide in case in Table I, application no. 14, in column 6 in the same line as SEQ ID NO. 26196 is depicted, mitochondric is mentioned; which is operable linked, too.

[68567] In another embodiment thereof the expression cassette does not comprise an additional transit peptide in case in Table I, application no. 14, in column 6 in the same line as SEQ ID NO. 26196 is depicted, non-targeted is mentioned.

[68568] In an embodiment the present invention relates to an expresssion cassette comprising a) a promoter, preferably a promoter selected from the group consisting of Big35S, PCUbi, Super and USP, in particular p-PcUBI; and b) the nucleic acid SEQ ID NO. 6075, or a homolog or fragment thereof, or a homolog thereof being depicted in Table I, application no. 14, column 8, in the same line as SEQ ID NO. 6075, preferably the coding region thereof, a homolog or a fragment thereof; which are operable linked.

[68569] In an embodiment thereof the expression cassette comprises in addition c) a nucleic acid molecule encoding a transit peptide, especially a plastidal transit petide in case in Table I, application no. 14, in column 6 in the same line as SEQ ID NO. 6075 is depicted, plastidic is mentioned, or a mitochondrial transit peptide in case in Table I, application no. 14, in column 6 in the same line as SEQ ID NO. 6075 is depicted, mitochondric is mentioned; which is operable linked, too.

[68570] In another embodiment thereof the expression cassette does not comprise an additional transit peptide in case in Table I, application no. 14, in column 6 in the same line as SEQ ID NO. 6075 is depicted, non-targeted is mentioned.

[68571] In an embodiment the present invention relates to an expresssion cassette comprising a) a promoter, preferably a promoter selected from the group consisting of Big35S, PCUbi, Super and USP, in particular p-PcUBI; and b) the nucleic acid SEQ ID NO. 29500, or a homolog or fragment thereof, or a homolog thereof being depicted in Table I, application no. 14, column 8, in the same line as SEQ ID NO. 29500, preferably the coding region thereof, a homolog or a fragment thereof; which are operable linked.

[68572] In an embodiment thereof the expression cassette comprises in addition c) a nucleic acid molecule encoding a transit peptide, especially a plastidal transit petide in case in Table I, application no. 14, in column 6 in the same line as SEQ ID NO. 29500 is depicted, plastidic is mentioned, or a mitochondrial transit peptide in case in Table I, application no. 14, in column 6 in the same line as SEQ ID NO. 29500 is depicted, mitochondric is mentioned; which is operable linked, too.

[68573] In another embodiment thereof the expression cassette does not comprise an additional transit peptide in case in Table I, application no. 14, in column 6 in the same line as SEQ ID NO. 29500 is depicted, non-targeted is mentioned.

[68574] In an embodiment the present invention relates to an expresssion cassette comprising a) a promoter, preferably a promoter selected from the group consisting of Big35S, PCUbi, Super and USP, in particular p-PcUBI; and b) the nucleic acid SEQ ID NO. 31026, or a homolog or fragment thereof, or a homolog thereof being depicted in Table I, application no. 14, column 8, in the same line as SEQ ID NO. 31026, preferably the coding region thereof, a homolog or a fragment thereof; which are operable linked.

[68575] In an embodiment thereof the expression cassette comprises in addition c) a nucleic acid molecule encoding a transit peptide, especially a plastidal transit petide in case in Table I, application no. 14, in column 6 in the same line as SEQ ID NO. 31026 is depicted, plastidic is mentioned, or a mitochondrial transit peptide in case in Table I, application no. 14, in column 6 in the same line as SEQ ID NO. 31026 is depicted, mitochondric is mentioned; which is operable linked, too.

[68576] In another embodiment thereof the expression cassette does not comprise an additional transit peptide in case in Table I, application no. 14, in column 6 in the same line as SEQ ID NO. 31026 is depicted, non-targeted is mentioned.

[68577] In an embodiment the present invention relates to an expresssion cassette comprising a) a promoter, preferably a promoter selected from the group consisting of Big35S, PCUbi, Super and USP, in particular p-PcUBI; and b) the nucleic acid SEQ ID NO. 114231, or a homolog or fragment thereof, or a homolog thereof being depicted in Table I, application no. 14, column 8, in the same line as SEQ ID NO. 114231, preferably the coding region thereof, a homolog or a fragment thereof; which are operable linked.

[68578] In an embodiment thereof the expression cassette comprises in addition c) a nucleic acid molecule encoding a transit peptide, especially a plastidal transit petide in case in Table I, application no. 14, in column 6 in the same line as SEQ ID NO. 114231 is depicted, plastidic is mentioned, or a mitochondrial transit peptide in case in Table I, application no. 14, in column 6 in the same line as SEQ ID NO. 114231 is depicted, mitochondric is mentioned; which is operable linked, too.

[68579] In another embodiment thereof the expression cassette does not comprise an additional transit peptide in case in Table I, application no. 14, in column 6 in the same line as SEQ ID NO. 114231 is depicted, non-targeted is mentioned.

[68580] In an embodiment the present invention relates to an expresssion cassette comprising a) a promoter, preferably a promoter selected from the group consisting of Big35S, PCUbi, Super and USP, in particular p-PcUBI; and b) the nucleic acid SEQ ID NO. 6510, or a homolog or fragment thereof, or a homolog thereof being depicted in Table I, application no. 14, column 8, in the same line as SEQ ID NO. 6510, preferably the coding region thereof, a homolog or a fragment thereof; which are operable linked.

[68581] In an embodiment thereof the expression cassette comprises in addition c) a nucleic acid molecule encoding a transit peptide, especially a plastidal transit petide in case in Table I, application no. 14, in column 6 in the same line as SEQ ID NO. 6510 is depicted, plastidic is mentioned, or a mitochondrial transit peptide in case in Table I, application no. 14, in column 6 in the same line as SEQ ID NO. 6510 is depicted, mitochondric is mentioned; which is operable linked, too.

[68582] In another embodiment thereof the expression cassette does not comprise an additional transit peptide in case in Table I, application no. 14, in column 6 in the same line as SEQ ID NO. 6510 is depicted, non-targeted is mentioned.

[68583] In an embodiment the present invention relates to an expresssion cassette comprising a) a promoter, preferably a promoter selected from the group consisting of Big35S, PCUbi, Super and USP, in particular p-Super; and b) the nucleic acid SEQ ID NO. 34889, or a homolog or fragment thereof, or a homolog thereof being depicted in Table I, application no. 14, column 8, in the same line as SEQ ID NO. 34889, preferably the coding region thereof, a homolog or a fragment thereof; which are operable linked.

[68584] In an embodiment thereof the expression cassette comprises in addition c) a nucleic acid molecule encoding a transit peptide, especially a plastidal transit petide in case in Table I, application no. 14, in column 6 in the same line as SEQ ID NO. 34889 is depicted, plastidic is mentioned, or a mitochondrial transit peptide in case in Table I, application no. 14, in column 6 in the same line as SEQ ID NO. 34889 is depicted, mitochondric is mentioned; which is operable linked, too.

[68585] In another embodiment thereof the expression cassette does not comprise an additional transit peptide in case in Table I, application no. 14, in column 6 in the same line as SEQ ID NO. 34889 is depicted, non-targeted is mentioned.

[68586] In an embodiment the present invention relates to an expresssion cassette comprising a) a promoter, preferably a promoter selected from the group consisting of Big35S, PCUbi, Super and USP, in particular p-Super; and b) the nucleic acid SEQ ID NO. 35204, or a homolog or fragment thereof, or a homolog thereof being depicted in Table I, application no. 14, column 8, in the same line as SEQ ID NO. 35204, preferably the coding region thereof, a homolog or a fragment thereof; which are operable linked.

[68587] In an embodiment thereof the expression cassette comprises in addition c) a nucleic acid molecule encoding a transit peptide, especially a plastidal transit petide in case in Table I, application no. 14, in column 6 in the same line as SEQ ID NO. 35204 is depicted, plastidic is mentioned, or a mitochondrial transit peptide in case in Table I, application no. 14, in column 6 in the same line as SEQ ID NO. 35204 is depicted, mitochondric is mentioned; which is operable linked, too.

[68588] In another embodiment thereof the expression cassette does not comprise an additional transit peptide in case in Table I, application no. 14, in column 6 in the same line as SEQ ID NO. 35204 is depicted, non-targeted is mentioned.

[68589] In an embodiment the present invention relates to an expresssion cassette comprising a) a promoter, preferably a promoter selected from the group consisting of Big35S, PCUbi, Super and USP, in particular p-USP; and b) the nucleic acid SEQ ID NO. 35482, or a homolog or fragment thereof, or a homolog thereof being depicted in Table I, application no. 14, column 8, in the same line as SEQ ID NO. 35482, preferably the coding region thereof, a homolog or a fragment thereof; which are operable linked.

[68590] In an embodiment thereof the expression cassette comprises in addition c) a nucleic acid molecule encoding a transit peptide, especially a plastidal transit petide in case in Table I, application no. 14, in column 6 in the same line as SEQ ID NO. 35482 is depicted, plastidic is mentioned, or a mitochondrial transit peptide in case in Table I, application no. 14, in column 6 in the same line as SEQ ID NO. 35482 is depicted, mitochondric is mentioned; which is operable linked, too.

[68591] In another embodiment thereof the expression cassette does not comprise an additional transit peptide in case in Table I, application no. 14, in column 6 in the same line as SEQ ID NO. 35482 is depicted, non-targeted is mentioned.

[68592] In an embodiment the present invention relates to an expresssion cassette comprising a) a promoter, preferably a promoter selected from the group consisting of Big35S, PCUbi, Super and USP, in particular p-Super; and b) the nucleic acid SEQ ID NO. 7333, or a homolog or fragment thereof, or a homolog thereof being depicted in Table I, application no. 14, column 8, in the same line as SEQ ID NO. 7333, preferably the coding region thereof, a homolog or a fragment thereof; which are operable linked.

[68593] In an embodiment thereof the expression cassette comprises in addition c) a nucleic acid molecule encoding a transit peptide, especially a plastidal transit petide in case in Table I, application no. 14, in column 6 in the same line as SEQ ID NO. 7333 is depicted, plastidic is mentioned, or a mitochondrial transit peptide in case in Table I, application no. 14, in column 6 in the same line as SEQ ID NO. 7333 is depicted, mitochondric is mentioned; which is operable linked, too.

[68594] In another embodiment thereof the expression cassette does not comprise an additional transit peptide in case in Table I, application no. 14, in column 6 in the same line as SEQ ID NO. 7333 is depicted, non-targeted is mentioned.

[68595] In an embodiment the present invention relates to an expresssion cassette comprising a) a promoter, preferably a promoter selected from the group consisting of Big35S, PCUbi, Super and USP, in particular p-Super; and b) the nucleic acid SEQ ID NO. 7686, or a homolog or fragment thereof, or a homolog thereof being depicted in Table I, application no. 14, column 8, in the same line as SEQ ID NO. 7686, preferably the coding region thereof, a homolog or a fragment thereof; which are operable linked.

[68596] In an embodiment thereof the expression cassette comprises in addition c) a nucleic acid molecule encoding a transit peptide, especially a plastidal transit petide in case in Table I, application no. 14, in column 6 in the same line as SEQ ID NO. 7686 is depicted, plastidic is mentioned, or a mitochondrial transit peptide in case in Table I, application no. 14, in column 6 in the same line as SEQ ID NO. 7686 is depicted, mitochondric is mentioned; which is operable linked, too.

[68597] In another embodiment thereof the expression cassette does not comprise an additional transit peptide in case in Table I, application no. 14, in column 6 in the same line as SEQ ID NO. 7686 is depicted, non-targeted is mentioned.

[68598] In an embodiment the present invention relates to an expresssion cassette comprising a) a promoter, preferably a promoter selected from the group consisting of Big35S, PCUbi, Super and USP, in particular p-Super; and b) the nucleic acid SEQ ID NO. 131359, or a homolog or fragment thereof, or a homolog thereof being depicted in Table I, application no. 14, column 8, in the same line as SEQ ID NO. 131359, preferably the coding region thereof, a homolog or a fragment thereof; which are operable linked.

[68599] In an embodiment thereof the expression cassette comprises in addition c) a nucleic acid molecule encoding a transit peptide, especially a plastidal transit petide in case in Table I, application no. 14, in column 6 in the same line as SEQ ID NO. 131359 is depicted, plastidic is mentioned, or a mitochondrial transit peptide in case in Table I, application no. 14, in column 6 in the same line as SEQ ID NO. 131359 is depicted, mitochondric is mentioned; which is operable linked, too.

[68600] In another embodiment thereof the expression cassette does not comprise an additional transit peptide in case in Table I, application no. 14, in column 6 in the same line as SEQ ID NO. 131359 is depicted, non-targeted is mentioned.

[68601] In an embodiment the present invention relates to an expresssion cassette comprising a) a promoter, preferably a promoter selected from the group consisting of Big35S, PCUbi, Super and USP, in particular p-Super; and b) the nucleic acid SEQ ID NO. 76032, or a homolog or fragment thereof, or a homolog thereof being depicted in Table I, application no. 14, column 8, in the same line as SEQ ID NO. 76032, preferably the coding region thereof, a homolog or a fragment thereof; which are operable linked.

[68602] In an embodiment thereof the expression cassette comprises in addition c) a nucleic acid molecule encoding a transit peptide, especially a plastidal transit petide in case in Table I, application no. 14, in column 6 in the same line as SEQ ID NO. 76032 is depicted, plastidic is mentioned, or a mitochondrial transit peptide in case in Table I, application no. 14, in column 6 in the same line as SEQ ID NO. 76032 is depicted, mitochondric is mentioned; which is operable linked, too.

[68603] In another embodiment thereof the expression cassette does not comprise an additional transit peptide in case in Table I, application no. 14, in column 6 in the same line as SEQ ID NO. 76032 is depicted, non-targeted is mentioned.

[68604] In an embodiment the present invention relates to an expresssion cassette comprising a) a promoter, preferably a promoter selected from the group consisting of Big35S, PCUbi, Super and USP, in particular p-Super; and b) the nucleic acid SEQ ID NO. 37400, or a homolog or fragment thereof, or a homolog thereof being depicted in Table I, application no. 14, column 8, in the same line as SEQ ID NO. 37400, preferably the coding region thereof, a homolog or a fragment thereof; which are operable linked.

[68605] In an embodiment thereof the expression cassette comprises in addition c) a nucleic acid molecule encoding a transit peptide, especially a plastidal transit petide in case in Table I, application no. 14, in column 6 in the same line as SEQ ID NO. 37400 is depicted, plastidic is mentioned, or a mitochondrial transit peptide in case in Table I, application no. 14, in column 6 in the same line as SEQ ID NO. 37400 is depicted, mitochondric is mentioned; which is operable linked, too.

[68606] In another embodiment thereof the expression cassette does not comprise an additional transit peptide in case in Table I, application no. 14, in column 6 in the same line as SEQ ID NO. 37400 is depicted, non-targeted is mentioned.

[68607] In an embodiment the present invention relates to an expresssion cassette comprising a) a promoter, preferably a promoter selected from the group consisting of Big35S, PCUbi, Super and USP, in particular p-Super; and b) the nucleic acid SEQ ID NO. 131489, or a homolog or fragment thereof, or a homolog thereof being depicted in Table I, application no. 14, column 8, in the same line as SEQ ID NO. 131489, preferably the coding region thereof, a homolog or a fragment thereof; which are operable linked.

[68608] In an embodiment thereof the expression cassette comprises in addition c) a nucleic acid molecule encoding a transit peptide, especially a plastidal transit petide in case in Table I, application no. 14, in column 6 in the same line as SEQ ID NO. 131489 is depicted, plastidic is mentioned, or a mitochondrial transit peptide in case in Table I, application no. 14, in column 6 in the same line as SEQ ID NO. 131489 is depicted, mitochondric is mentioned; which is operable linked, too.

[68609] In another embodiment thereof the expression cassette does not comprise an additional transit peptide in case in Table I, application no. 14, in column 6 in the same line as SEQ ID NO. 131489 is depicted, non-targeted is mentioned.

[68610] In an embodiment the present invention relates to an expresssion cassette comprising a) a promoter, preferably a promoter selected from the group consisting of Big35S, PCUbi, Super and USP, in particular p-Super; and b) the nucleic acid SEQ ID NO. 131531, or a homolog or fragment thereof, or a homolog thereof being depicted in Table I, application no. 14, column 8, in the same line as SEQ ID NO. 131531, preferably the coding region thereof, a homolog or a fragment thereof; which are operable linked.

[68611] In an embodiment thereof the expression cassette comprises in addition c) a nucleic acid molecule encoding a transit peptide, especially a plastidal transit petide in case in Table I, application no. 14, in column 6 in the same line as SEQ ID NO. 131531 is depicted, plastidic is mentioned, or a mitochondrial transit peptide in case in Table I, application no. 14, in column 6 in the same line as SEQ ID NO. 131531 is depicted, mitochondric is mentioned; which is operable linked, too.

[68612] In another embodiment thereof the expression cassette does not comprise an additional transit peptide in case in Table I, application no. 14, in column 6 in the same line as SEQ ID NO. 131531 is depicted, non-targeted is mentioned.

[68613] In an embodiment the present invention relates to an expresssion cassette comprising a) a promoter, preferably a promoter selected from the group consisting of Big35S, PCUbi, Super and USP, in particular p-Super; and b) the nucleic acid SEQ ID NO. 38266, or a homolog or fragment thereof, or a homolog thereof being depicted in Table I, application no. 14, column 8, in the same line as SEQ ID NO. 38266, preferably the coding region thereof, a homolog or a fragment thereof; which are operable linked.

[68614] In an embodiment thereof the expression cassette comprises in addition c) a nucleic acid molecule encoding a transit peptide, especially a plastidal transit petide in case in Table I, application no. 14, in column 6 in the same line as SEQ ID NO. 38266 is depicted, plastidic is mentioned, or a mitochondrial transit peptide in case in Table I, application no. 14, in column 6 in the same line as SEQ ID NO. 38266 is depicted, mitochondric is mentioned; which is operable linked, too.

[68615] In another embodiment thereof the expression cassette does not comprise an additional transit peptide in case in Table I, application no. 14, in column 6 in the same line as SEQ ID NO. 38266 is depicted, non-targeted is mentioned.

[68616] In an embodiment the present invention relates to an expresssion cassette comprising a) a promoter, preferably a promoter selected from the group consisting of Big35S, PCUbi, Super and USP, in particular p-Super; and b) the nucleic acid SEQ ID NO. 38300, or a homolog or fragment thereof, or a homolog thereof being depicted in Table I, application no. 14, column 8, in the same line as SEQ ID NO. 38300, preferably the coding region thereof, a homolog or a fragment thereof; which are operable linked.

[68617] In an embodiment thereof the expression cassette comprises in addition c) a nucleic acid molecule encoding a transit peptide, especially a plastidal transit petide in case in Table I, application no. 14, in column 6 in the same line as SEQ ID NO. 38300 is depicted, plastidic is mentioned, or a mitochondrial transit peptide in case in Table I, application no. 14, in column 6 in the same line as SEQ ID NO. 38300 is depicted, mitochondric is mentioned; which is operable linked, too.

[68618] In another embodiment thereof the expression cassette does not comprise an additional transit peptide in case in Table I, application no. 14, in column 6 in the same line as SEQ ID NO. 38300 is depicted, non-targeted is mentioned.

[68619] In an embodiment the present invention relates to an expresssion cassette comprising a) a promoter, preferably a promoter selected from the group consisting of Big35S, PCUbi, Super and USP, in particular p-Super; and b) the nucleic acid SEQ ID NO. 131539, or a homolog or fragment thereof, or a homolog thereof being depicted in Table I, application no. 14, column 8, in the same line as SEQ ID NO. 131539, preferably the coding region thereof, a homolog or a fragment thereof; which are operable linked.

[68620] In an embodiment thereof the expression cassette comprises in addition c) a nucleic acid molecule encoding a transit peptide, especially a plastidal transit petide in case in Table I, application no. 14, in column 6 in the same line as SEQ ID NO. 131539 is depicted, plastidic is mentioned, or a mitochondrial transit peptide in case in Table I, application no. 14, in column 6 in the same line as SEQ ID NO. 131539 is depicted, mitochondric is mentioned; which is operable linked, too.

[68621] In another embodiment thereof the expression cassette does not comprise an additional transit peptide in case in Table I, application no. 14, in column 6 in the same line as SEQ ID NO. 131539 is depicted, non-targeted is mentioned.

[68622] In an embodiment the present invention relates to an expresssion cassette comprising a) a promoter, preferably a promoter selected from the group consisting of Big35S, PCUbi, Super and USP, in particular p-Super; and b) the nucleic acid SEQ ID NO. 131799, or a homolog or fragment thereof, or a homolog thereof being depicted in Table I, application no. 14, column 8, in the same line as SEQ ID NO. 131799, preferably the coding region thereof, a homolog or a fragment thereof; which are operable linked.

[68623] In an embodiment thereof the expression cassette comprises in addition c) a nucleic acid molecule encoding a transit peptide, especially a plastidal transit petide in case in Table I, application no. 14, in column 6 in the same line as SEQ ID NO. 131799 is depicted, plastidic is mentioned, or a mitochondrial transit peptide in case in Table I, application no. 14, in column 6 in the same line as SEQ ID NO. 131799 is depicted, mitochondric is mentioned; which is operable linked, too.

[68624] In another embodiment thereof the expression cassette does not comprise an additional transit peptide in case in Table I, application no. 14, in column 6 in the same line as SEQ ID NO. 131799 is depicted, non-targeted is mentioned.

[68625] In an embodiment the present invention relates to an expresssion cassette comprising a) a promoter, preferably a promoter selected from the group consisting of Big35S, PCUbi, Super and USP, in particular p-Super; and b) the nucleic acid SEQ ID NO. 39002, or a homolog or fragment thereof, or a homolog thereof being depicted in Table I, application no. 14, column 8, in the same line as SEQ ID NO. 39002, preferably the coding region thereof, a homolog or a fragment thereof; which are operable linked.

[68626] In an embodiment thereof the expression cassette comprises in addition c) a nucleic acid molecule encoding a transit peptide, especially a plastidal transit petide in case in Table I, application no. 14, in column 6 in the same line as SEQ ID NO. 39002 is depicted, plastidic is mentioned, or a mitochondrial transit peptide in case in Table I, application no. 14, in column 6 in the same line as SEQ ID NO. 39002 is depicted, mitochondric is mentioned; which is operable linked, too.

[68627] In another embodiment thereof the expression cassette does not comprise an additional transit peptide in case in Table I, application no. 14, in column 6 in the same line as SEQ ID NO. 39002 is depicted, non-targeted is mentioned.

[68628] In an embodiment the present invention relates to an expresssion cassette comprising a) a promoter, preferably a promoter selected from the group consisting of Big35S, PCUbi, Super and USP, in particular p-USP; and b) the nucleic acid SEQ ID NO. 131839, or a homolog or fragment thereof, or a homolog thereof being depicted in Table I, application no. 14, column 8, in the same line as SEQ ID NO. 131839, preferably the coding region thereof, a homolog or a fragment thereof; which are operable linked.

[68629] In an embodiment thereof the expression cassette comprises in addition c) a nucleic acid molecule encoding a transit peptide, especially a plastidal transit petide in case in Table I, application no. 14, in column 6 in the same line as SEQ ID NO. 131839 is depicted, plastidic is mentioned, or a mitochondrial transit peptide in case in Table I, application no. 14, in column 6 in the same line as SEQ ID NO. 131839 is depicted, mitochondric is mentioned; which is operable linked, too.

[68630] In another embodiment thereof the expression cassette does not comprise an additional transit peptide in case in Table I, application no. 14, in column 6 in the same line as SEQ ID NO. 131839 is depicted, non-targeted is mentioned.

[68631] In an embodiment the present invention relates to an expresssion cassette comprising a) a promoter, preferably a promoter selected from the group consisting of Big35S, PCUbi, Super and USP, in particular p-Super; and b) the nucleic acid SEQ ID NO. 132086, or a homolog or fragment thereof, or a homolog thereof being depicted in Table I, application no. 14, column 8, in the same line as SEQ ID NO. 132086, preferably the coding region thereof, a homolog or a fragment thereof; which are operable linked.

[68632] In an embodiment thereof the expression cassette comprises in addition c) a nucleic acid molecule encoding a transit peptide, especially a plastidal transit petide in case in Table I, application no. 14, in column 6 in the same line as SEQ ID NO. 132086 is depicted, plastidic is mentioned, or a mitochondrial transit peptide in case in Table I, application no. 14, in column 6 in the same line as SEQ ID NO. 132086 is depicted, mitochondric is mentioned; which is operable linked, too.

[68633] In another embodiment thereof the expression cassette does not comprise an additional transit peptide in case in Table I, application no. 14, in column 6 in the same line as SEQ ID NO. 132086 is depicted, non-targeted is mentioned.

[68634] In an embodiment the present invention relates to an expresssion cassette comprising a) a promoter, preferably a promoter selected from the group consisting of Big35S, PCUbi, Super and USP, in particular p-Super; and b) the nucleic acid SEQ ID NO. 132695, or a homolog or fragment thereof, or a homolog thereof being depicted in Table I, application no. 14, column 8, in the same line as SEQ ID NO. 132695, preferably the coding region thereof, a homolog or a fragment thereof; which are operable linked.

[68635] In an embodiment thereof the expression cassette comprises in addition c) a nucleic acid molecule encoding a transit peptide, especially a plastidal transit petide in case in Table I, application no. 14, in column 6 in the same line as SEQ ID NO. 132695 is depicted, plastidic is mentioned, or a mitochondrial transit peptide in case in Table I, application no. 14, in column 6 in the same line as SEQ ID NO. 132695 is depicted, mitochondric is mentioned; which is operable linked, too.

[68636] In another embodiment thereof the expression cassette does not comprise an additional transit peptide in case in Table I, application no. 14, in column 6 in the same line as SEQ ID NO. 132695 is depicted, non-targeted is mentioned.

[68637] In an embodiment the present invention relates to an expresssion cassette comprising a) a promoter, preferably a promoter selected from the group consisting of Big35S, PCUbi, Super and USP, in particular p-Super; and b) the nucleic acid SEQ ID NO. 39237, or a homolog or fragment thereof, or a homolog thereof being depicted in Table I, application no. 14, column 8, in the same line as SEQ ID NO. 39237, preferably the coding region thereof, a homolog or a fragment thereof; which are operable linked.

[68638] In an embodiment thereof the expression cassette comprises in addition c) a nucleic acid molecule encoding a transit peptide, especially a plastidal transit petide in case in Table I, application no. 14, in column 6 in the same line as SEQ ID NO. 39237 is depicted, plastidic is mentioned, or a mitochondrial transit peptide in case in Table I, application no. 14, in column 6 in the same line as SEQ ID NO. 39237 is depicted, mitochondric is mentioned; which is operable linked, too.

[68639] In another embodiment thereof the expression cassette does not comprise an additional transit peptide in case in Table I, application no. 14, in column 6 in the same line as SEQ ID NO. 39237 is depicted, non-targeted is mentioned.

[68640] In an embodiment the present invention relates to an expresssion cassette comprising a) a promoter, preferably a promoter selected from the group consisting of Big35S, PCUbi, Super and USP, in particular p-Super; and b) the nucleic acid SEQ ID NO. 40329, or a homolog or fragment thereof, or a homolog thereof being depicted in Table I, application no. 14, column 8, in the same line as SEQ ID NO. 40329, preferably the coding region thereof, a homolog or a fragment thereof; which are operable linked.

[68641] In an embodiment thereof the expression cassette comprises in addition c) a nucleic acid molecule encoding a transit peptide, especially a plastidal transit petide in case in Table I, application no. 14, in column 6 in the same line as SEQ ID NO. 40329 is depicted, plastidic is mentioned, or a mitochondrial transit peptide in case in Table I, application no. 14, in column 6 in the same line as SEQ ID NO. 40329 is depicted, mitochondric is mentioned; which is operable linked, too.

[68642] In another embodiment thereof the expression cassette does not comprise an additional transit peptide in case in Table I, application no. 14, in column 6 in the same line as SEQ ID NO. 40329 is depicted, non-targeted is mentioned.

[68643] In an embodiment the present invention relates to an expresssion cassette comprising a) a promoter, preferably a promoter selected from the group consisting of Big35S, PCUbi, Super and USP, in particular p-Super; and b) the nucleic acid SEQ ID NO. 132706, or a homolog or fragment thereof, or a homolog thereof being depicted in Table I, application no. 14, column 8, in the same line as SEQ ID NO. 132706, preferably the coding region thereof, a homolog or a fragment thereof; which are operable linked.

[68644] In an embodiment thereof the expression cassette comprises in addition c) a nucleic acid molecule encoding a transit peptide, especially a plastidal transit petide in case in Table I, application no. 14, in column 6 in the same line as SEQ ID NO. 132706 is depicted, plastidic is mentioned, or a mitochondrial transit peptide in case in Table I, application no. 14, in column 6 in the same line as SEQ ID NO. 132706 is depicted, mitochondric is mentioned; which is operable linked, too.

[68645] In another embodiment thereof the expression cassette does not comprise an additional transit peptide in case in Table I, application no. 14, in column 6 in the same line as SEQ ID NO. 132706 is depicted, non-targeted is mentioned.

[68646] In an embodiment the present invention relates to an expresssion cassette comprising a) a promoter, preferably a promoter selected from the group consisting of Big35S, PCUbi, Super and USP, in particular p-Super; and b) the nucleic acid SEQ ID NO. 9167, or a homolog or fragment thereof, or a homolog thereof being depicted in Table I, application no. 14, column 8, in the same line as SEQ ID NO. 9167, preferably the coding region thereof, a homolog or a fragment thereof; which are operable linked.

[68647] In an embodiment thereof the expression cassette comprises in addition c) a nucleic acid molecule encoding a transit peptide, especially a plastidal transit petide in case in Table I, application no. 14, in column 6 in the same line as SEQ ID NO. 9167 is depicted, plastidic is mentioned, or a mitochondrial transit peptide in case in Table I, application no. 14, in column 6 in the same line as SEQ ID NO. 9167 is depicted, mitochondric is mentioned; which is operable linked, too.

[68648] In another embodiment thereof the expression cassette does not comprise an additional transit peptide in case in Table I, application no. 14, in column 6 in the same line as SEQ ID NO. 9167 is depicted, non-targeted is mentioned.

[68649] In an embodiment the present invention relates to an expresssion cassette comprising a) a promoter, preferably a promoter selected from the group consisting of Big35S, PCUbi, Super and USP, in particular p-Super; and b) the nucleic acid SEQ ID NO. 99898, or a homolog or fragment thereof, or a homolog thereof being depicted in Table I, application no. 14, column 8, in the same line as SEQ ID NO. 99898, preferably the coding region thereof, a homolog or a fragment thereof; which are operable linked.

[68650] In an embodiment thereof the expression cassette comprises in addition c) a nucleic acid molecule encoding a transit peptide, especially a plastidal transit petide in case in Table I, application no. 14, in column 6 in the same line as SEQ ID NO. 99898 is depicted, plastidic is mentioned, or a mitochondrial transit peptide in case in Table I, application no. 14, in column 6 in the same line as SEQ ID NO. 99898 is depicted, mitochondric is mentioned; which is operable linked, too.

[68651] In another embodiment thereof the expression cassette does not comprise an additional transit peptide in case in Table I, application no. 14, in column 6 in the same line as SEQ ID NO. 99898 is depicted, non-targeted is mentioned.

[68652] In an embodiment the present invention relates to an expresssion cassette comprising a) a promoter, preferably a promoter selected from the group consisting of Big35S, PCUbi, Super and USP, in particular p-Super; and b) the nucleic acid SEQ ID NO. 125226, or a homolog or fragment thereof, or a homolog thereof being depicted in Table I, application no. 14, column 8, in the same line as SEQ ID NO. 125226, preferably the coding region thereof, a homolog or a fragment thereof; which are operable linked.

[68653] In an embodiment thereof the expression cassette comprises in addition c) a nucleic acid molecule encoding a transit peptide, especially a plastidal transit petide in case in Table I, application no. 14, in column 6 in the same line as SEQ ID NO. 125226 is depicted, plastidic is mentioned, or a mitochondrial transit peptide in case in Table I, application no. 14, in column 6 in the same line as SEQ ID NO. 125226 is depicted, mitochondric is mentioned; which is operable linked, too.

[68654] In another embodiment thereof the expression cassette does not comprise an additional transit peptide in case in Table I, application no. 14, in column 6 in the same line as SEQ ID NO. 125226 is depicted, non-targeted is mentioned.

[68655] In an embodiment the present invention relates to an expresssion cassette comprising a) a promoter, preferably a promoter selected from the group consisting of Big35S, PCUbi, Super and USP, in particular p-Super; and b) the nucleic acid SEQ ID NO. 80756, or a homolog or fragment thereof, or a homolog thereof being depicted in Table I, application no. 14, column 8, in the same line as SEQ ID NO. 80756, preferably the coding region thereof, a homolog or a fragment thereof; which are operable linked.

[68656] In an embodiment thereof the expression cassette comprises in addition c) a nucleic acid molecule encoding a transit peptide, especially a plastidal transit petide in case in Table I, application no. 14, in column 6 in the same line as SEQ ID NO. 80756 is depicted, plastidic is mentioned, or a mitochondrial transit peptide in case in Table I, application no. 14, in column 6 in the same line as SEQ ID NO. 80756 is depicted, mitochondric is mentioned; which is operable linked, too.

[68657] In another embodiment thereof the expression cassette does not comprise an additional transit peptide in case in Table I, application no. 14, in column 6 in the same line as SEQ ID NO. 80756 is depicted, non-targeted is mentioned.

[68658] In an embodiment the present invention relates to an expresssion cassette comprising a) a promoter, preferably a promoter selected from the group consisting of Big35S, PCUbi, Super and USP, in particular p-Super; and b) the nucleic acid SEQ ID NO. 132821, or a homolog or fragment thereof, or a homolog thereof being depicted in Table I, application no. 14, column 8, in the same line as SEQ ID NO. 132821, preferably the coding region thereof, a homolog or a fragment thereof; which are operable linked.

[68659] In an embodiment thereof the expression cassette comprises in addition c) a nucleic acid molecule encoding a transit peptide, especially a plastidal transit petide in case in Table I, application no. 14, in column 6 in the same line as SEQ ID NO. 132821 is depicted, plastidic is mentioned, or a mitochondrial transit peptide in case in Table I, application no. 14, in column 6 in the same line as SEQ ID NO. 132821 is depicted, mitochondric is mentioned; which is operable linked, too.

[68660] In another embodiment thereof the expression cassette does not comprise an additional transit peptide in case in Table I, application no. 14, in column 6 in the same line as SEQ ID NO. 132821 is depicted, non-targeted is mentioned.

[68661] In an embodiment the present invention relates to an expresssion cassette comprising a) a promoter, preferably a promoter selected from the group consisting of Big35S, PCUbi, Super and USP, in particular p-Super; and b) the nucleic acid SEQ ID NO. 115864, or a homolog or fragment thereof, or a homolog thereof being depicted in Table I, application no. 14, column 8, in the same line as SEQ ID NO. 115864, preferably the coding region thereof, a homolog or a fragment thereof; which are operable linked.

[68662] In an embodiment thereof the expression cassette comprises in addition c) a nucleic acid molecule encoding a transit peptide, especially a plastidal transit petide in case in Table I, application no. 14, in column 6 in the same line as SEQ ID NO. 115864 is depicted, plastidic is mentioned, or a mitochondrial transit peptide in case in Table I, application no. 14, in column 6 in the same line as SEQ ID NO. 115864 is depicted, mitochondric is mentioned; which is operable linked, too.

[68663] In another embodiment thereof the expression cassette does not comprise an additional transit peptide in case in Table I, application no. 14, in column 6 in the same line as SEQ ID NO. 115864 is depicted, non-targeted is mentioned.

[68664] In an embodiment the present invention relates to an expresssion cassette comprising a) a promoter, preferably a promoter selected from the group consisting of Big35S, PCUbi, Super and USP, in particular p-Super; and b) the nucleic acid SEQ ID NO. 42477, or a homolog or fragment thereof, or a homolog thereof being depicted in Table I, application no. 14, column 8, in the same line as SEQ ID NO. 42477, preferably the coding region thereof, a homolog or a fragment thereof; which are operable linked.

[68665] In an embodiment thereof the expression cassette comprises in addition c) a nucleic acid molecule encoding a transit peptide, especially a plastidal transit petide in case in Table I, application no. 14, in column 6 in the same line as SEQ ID NO. 42477 is depicted, plastidic is mentioned, or a mitochondrial transit peptide in case in Table I, application no. 14, in column 6 in the same line as SEQ ID NO. 42477 is depicted, mitochondric is mentioned; which is operable linked, too.

[68666] In another embodiment thereof the expression cassette does not comprise an additional transit peptide in case in Table I, application no. 14, in column 6 in the same line as SEQ ID NO. 42477 is depicted, non-targeted is mentioned.

[68667] In an embodiment the present invention relates to an expresssion cassette comprising a) a promoter, preferably a promoter selected from the group consisting of Big35S, PCUbi, Super and USP, in particular p-Super; and b) the nucleic acid SEQ ID NO. 42502, or a homolog or fragment thereof, or a homolog thereof being depicted in Table I, application no. 14, column 8, in the same line as SEQ ID NO. 42502, preferably the coding region thereof, a homolog or a fragment thereof; which are operable linked.

[68668] In an embodiment thereof the expression cassette comprises in addition c) a nucleic acid molecule encoding a transit peptide, especially a plastidal transit petide in case in Table I, application no. 14, in column 6 in the same line as SEQ ID NO. 42502 is depicted, plastidic is mentioned, or a mitochondrial transit peptide in case in Table I, application no. 14, in column 6 in the same line as SEQ ID NO. 42502 is depicted, mitochondric is mentioned; which is operable linked, too.

[68669] In another embodiment thereof the expression cassette does not comprise an additional transit peptide in case in Table I, application no. 14, in column 6 in the same line as SEQ ID NO. 42502 is depicted, non-targeted is mentioned.

[68670] In an embodiment the present invention relates to an expresssion cassette comprising a) a promoter, preferably a promoter selected from the group consisting of Big35S, PCUbi, Super and USP, in particular p-Super; and b) the nucleic acid SEQ ID NO. 42600, or a homolog or fragment thereof, or a homolog thereof being depicted in Table I, application no. 14, column 8, in the same line as SEQ ID NO. 42600, preferably the coding region thereof, a homolog or a fragment thereof; which are operable linked.

[68671] In an embodiment thereof the expression cassette comprises in addition c) a nucleic acid molecule encoding a transit peptide, especially a plastidal transit petide in case in Table I, application no. 14, in column 6 in the same line as SEQ ID NO. 42600 is depicted, plastidic is mentioned, or a mitochondrial transit peptide in case in Table I, application no. 14, in column 6 in the same line as SEQ ID NO. 42600 is depicted, mitochondric is mentioned; which is operable linked, too.

[68672] In another embodiment thereof the expression cassette does not comprise an additional transit peptide in case in Table I, application no. 14, in column 6 in the same line as SEQ ID NO. 42600 is depicted, non-targeted is mentioned.

[68673] In an embodiment the present invention relates to an expresssion cassette comprising a) a promoter, preferably a promoter selected from the group consisting of Big35S, PCUbi, Super and USP, in particular p-Super; and b) the nucleic acid SEQ ID NO. 44372, or a homolog or fragment thereof, or a homolog thereof being depicted in Table I, application no. 14, column 8, in the same line as SEQ ID NO. 44372, preferably the coding region thereof, a homolog or a fragment thereof; which are operable linked.

[68674] In an embodiment thereof the expression cassette comprises in addition c) a nucleic acid molecule encoding a transit peptide, especially a plastidal transit petide in case in Table I, application no. 14, in column 6 in the same line as SEQ ID NO. 44372 is depicted, plastidic is mentioned, or a mitochondrial transit peptide in case in Table I, application no. 14, in column 6 in the same line as SEQ ID NO. 44372 is depicted, mitochondric is mentioned; which is operable linked, too.

[68675] In another embodiment thereof the expression cassette does not comprise an additional transit peptide in case in Table I, application no. 14, in column 6 in the same line as SEQ ID NO. 44372 is depicted, non-targeted is mentioned.

[68676] In an embodiment the present invention relates to an expresssion cassette comprising a) a promoter, preferably a promoter selected from the group consisting of Big35S, PCUbi, Super and USP, in particular p-Super; and b) the nucleic acid SEQ ID NO. 10740, or a homolog or fragment thereof, or a homolog thereof being depicted in Table I, application no. 14, column 8, in the same line as SEQ ID NO. 10740, preferably the coding region thereof, a homolog or a fragment thereof; which are operable linked.

[68677] In an embodiment thereof the expression cassette comprises in addition c) a nucleic acid molecule encoding a transit peptide, especially a plastidal transit petide in case in Table I, application no. 14, in column 6 in the same line as SEQ ID NO. 10740 is depicted, plastidic is mentioned, or a mitochondrial transit peptide in case in Table I, application no. 14, in column 6 in the same line as SEQ ID NO. 10740 is depicted, mitochondric is mentioned; which is operable linked, too.

[68678] In another embodiment thereof the expression cassette does not comprise an additional transit peptide in case in Table I, application no. 14, in column 6 in the same line as SEQ ID NO. 10740 is depicted, non-targeted is mentioned.

[68679] In an embodiment the present invention relates to an expresssion cassette comprising a) a promoter, preferably a promoter selected from the group consisting of Big35S, PCUbi, Super and USP, in particular p-Super; and b) the nucleic acid SEQ ID NO. 126975, or a homolog or fragment thereof, or a homolog thereof being depicted in Table I, application no. 14, column 8, in the same line as SEQ ID NO. 126975, preferably the coding region thereof, a homolog or a fragment thereof; which are operable linked.

[68680] In an embodiment thereof the expression cassette comprises in addition c) a nucleic acid molecule encoding a transit peptide, especially a plastidal transit petide in case in Table I, application no. 14, in column 6 in the same line as SEQ ID NO. 126975 is depicted, plastidic is mentioned, or a mitochondrial transit peptide in case in Table I, application no. 14, in column 6 in the same line as SEQ ID NO. 126975 is depicted, mitochondric is mentioned; which is operable linked, too.

[68681] In another embodiment thereof the expression cassette does not comprise an additional transit peptide in case in Table I, application no. 14, in column 6 in the same line as SEQ ID NO. 126975 is depicted, non-targeted is mentioned.

[68682] In an embodiment the present invention relates to an expresssion cassette comprising a) a promoter, preferably a promoter selected from the group consisting of Big35S, PCUbi, Super and USP, in particular p-PcUBI; and b) the nucleic acid SEQ ID NO. 10811, or a homolog or fragment thereof, or a homolog thereof being depicted in Table I, application no. 14, column 8, in the same line as SEQ ID NO. 10811, preferably the coding region thereof, a homolog or a fragment thereof; which are operable linked.

[68683] In an embodiment thereof the expression cassette comprises in addition c) a nucleic acid molecule encoding a transit peptide, especially a plastidal transit petide in case in Table I, application no. 14, in column 6 in the same line as SEQ ID NO. 10811 is depicted, plastidic is mentioned, or a mitochondrial transit peptide in case in Table I, application no. 14, in column 6 in the same line as SEQ ID NO. 10811 is depicted, mitochondric is mentioned; which is operable linked, too.

[68684] In another embodiment thereof the expression cassette does not comprise an additional transit peptide in case in Table I, application no. 14, in column 6 in the same line as SEQ ID NO. 10811 is depicted, non-targeted is mentioned.

[68685] In an embodiment the present invention relates to an expresssion cassette comprising a) a promoter, preferably a promoter selected from the group consisting of Big35S, PCUbi, Super and USP, in particular p-PcUBI; and b) the nucleic acid SEQ ID NO. 46751, or a homolog or fragment thereof, or a homolog thereof being depicted in Table I, application no. 14, column 8, in the same line as SEQ ID NO. 46751, preferably the coding region thereof, a homolog or a fragment thereof; which are operable linked.

[68686] In an embodiment thereof the expression cassette comprises in addition c) a nucleic acid molecule encoding a transit peptide, especially a plastidal transit petide in case in Table I, application no. 14, in column 6 in the same line as SEQ ID NO. 46751 is depicted, plastidic is mentioned, or a mitochondrial transit peptide in case in Table I, application no. 14, in column 6 in the same line as SEQ ID NO. 46751 is depicted, mitochondric is mentioned; which is operable linked, too.

[68687] In another embodiment thereof the expression cassette does not comprise an additional transit peptide in case in Table I, application no. 14, in column 6 in the same line as SEQ ID NO. 46751 is depicted, non-targeted is mentioned.

[68688] In an embodiment the present invention relates to an expresssion cassette comprising a) a promoter, preferably a promoter selected from the group consisting of Big35S, PCUbi, Super and USP, in particular p-PcUBI; and b) the nucleic acid SEQ ID NO. 46850, or a homolog or fragment thereof, or a homolog thereof being depicted in Table I, application no. 14, column 8, in the same line as SEQ ID NO. 46850, preferably the coding region thereof, a homolog or a fragment thereof; which are operable linked.

[68689] In an embodiment thereof the expression cassette comprises in addition c) a nucleic acid molecule encoding a transit peptide, especially a plastidal transit petide in case in Table I, application no. 14, in column 6 in the same line as SEQ ID NO. 46850 is depicted, plastidic is mentioned, or a mitochondrial transit peptide in case in Table I, application no. 14, in column 6 in the same line as SEQ ID NO. 46850 is depicted, mitochondric is mentioned; which is operable linked, too.

[68690] In another embodiment thereof the expression cassette does not comprise an additional transit peptide in case in Table I, application no. 14, in column 6 in the same line as SEQ ID NO. 46850 is depicted, non-targeted is mentioned.

[68691] In an embodiment the present invention relates to an expresssion cassette comprising a) a promoter, preferably a promoter selected from the group consisting of Big35S, PCUbi, Super and USP, in particular p-PcUBI; and b) the nucleic acid SEQ ID NO. 127103, or a homolog or fragment thereof, or a homolog thereof being depicted in Table I, application no. 14, column 8, in the same line as SEQ ID NO. 127103, preferably the coding region thereof, a homolog or a fragment thereof; which are operable linked.

[68692] In an embodiment thereof the expression cassette comprises in addition c) a nucleic acid molecule encoding a transit peptide, especially a plastidal transit petide in case in Table I, application no. 14, in column 6 in the same line as SEQ ID NO. 127103 is depicted, plastidic is mentioned, or a mitochondrial transit peptide in case in Table I, application no. 14, in column 6 in the same line as SEQ ID NO. 127103 is depicted, mitochondric is mentioned; which is operable linked, too.

[68693] In another embodiment thereof the expression cassette does not comprise an additional transit peptide in case in Table I, application no. 14, in column 6 in the same line as SEQ ID NO. 127103 is depicted, non-targeted is mentioned.

[68694] In an embodiment the present invention relates to an expresssion cassette comprising a) a promoter, preferably a promoter selected from the group consisting of Big35S, PCUbi, Super and USP, in particular p-PcUBI; and b) the nucleic acid SEQ ID NO. 132874, or a homolog or fragment thereof, or a homolog thereof being depicted in Table I, application no. 14, column 8, in the same line as SEQ ID NO. 132874, preferably the coding region thereof, a homolog or a fragment thereof; which are operable linked.

[68695] In an embodiment thereof the expression cassette comprises in addition c) a nucleic acid molecule encoding a transit peptide, especially a plastidal transit petide in case in Table I, application no. 14, in column 6 in the same line as SEQ ID NO. 132874 is depicted, plastidic is mentioned, or a mitochondrial transit peptide in case in Table I, application no. 14, in column 6 in the same line as SEQ ID NO. 132874 is depicted, mitochondric is mentioned; which is operable linked, too.

[68696] In another embodiment thereof the expression cassette does not comprise an additional transit peptide in case in Table I, application no. 14, in column 6 in the same line as SEQ ID NO. 132874 is depicted, non-targeted is mentioned.

[68697] In an embodiment the present invention relates to an expresssion cassette comprising a) a promoter, preferably a promoter selected from the group consisting of Big35S, PCUbi, Super and USP, in particular p-PcUBI; and b) the nucleic acid SEQ ID NO. 53878, or a homolog or fragment thereof, or a homolog thereof being depicted in Table I, application no. 14, column 8, in the same line as SEQ ID NO. 53878, preferably the coding region thereof, a homolog or a fragment thereof; which are operable linked.

[68698] In an embodiment thereof the expression cassette comprises in addition c) a nucleic acid molecule encoding a transit peptide, especially a plastidal transit petide in case in Table I, application no. 14, in column 6 in the same line as SEQ ID NO. 53878 is depicted, plastidic is mentioned, or a mitochondrial transit peptide in case in Table I, application no. 14, in column 6 in the same line as SEQ ID NO. 53878 is depicted, mitochondric is mentioned; which is operable linked, too.

[68699] In another embodiment thereof the expression cassette does not comprise an additional transit peptide in case in Table I, application no. 14, in column 6 in the same line as SEQ ID NO. 53878 is depicted, non-targeted is mentioned.

[68700] In an embodiment the present invention relates to an expresssion cassette comprising a) a promoter, preferably a promoter selected from the group consisting of Big35S, PCUbi, Super and USP, in particular p-PcUBI; and b) the nucleic acid SEQ ID NO. 132938, or a homolog or fragment thereof, or a homolog thereof being depicted in Table I, application no. 14, column 8, in the same line as SEQ ID NO. 132938, preferably the coding region thereof, a homolog or a fragment thereof; which are operable linked.

[68701] In an embodiment thereof the expression cassette comprises in addition c) a nucleic acid molecule encoding a transit peptide, especially a plastidal transit petide in case in Table I, application no. 14, in column 6 in the same line as SEQ ID NO. 132938 is depicted, plastidic is mentioned, or a mitochondrial transit peptide in case in Table I, application no. 14, in column 6 in the same line as SEQ ID NO. 132938 is depicted, mitochondric is mentioned; which is operable linked, too.

[68702] In another embodiment thereof the expression cassette does not comprise an additional transit peptide in case in Table I, application no. 14, in column 6 in the same line as SEQ ID NO. 132938 is depicted, non-targeted is mentioned.

[68703] In an embodiment the present invention relates to an expresssion cassette comprising a) a promoter, preferably a promoter selected from the group consisting of Big35S, PCUbi, Super and USP, in particular p-PcUBI; and b) the nucleic acid SEQ ID NO. 85743, or a homolog or fragment thereof, or a homolog thereof being depicted in Table I, application no. 14, column 8, in the same line as SEQ ID NO. 85743, preferably the coding region thereof, a homolog or a fragment thereof; which are operable linked.

[68704] In an embodiment thereof the expression cassette comprises in addition c) a nucleic acid molecule encoding a transit peptide, especially a plastidal transit petide in case in Table I, application no. 14, in column 6 in the same line as SEQ ID NO. 85743 is depicted, plastidic is mentioned, or a mitochondrial transit peptide in case in Table I, application no. 14, in column 6 in the same line as SEQ ID NO. 85743 is depicted, mitochondric is mentioned; which is operable linked, too.

[68705] In another embodiment thereof the expression cassette does not comprise an additional transit peptide in case in Table I, application no. 14, in column 6 in the same line as SEQ ID NO. 85743 is depicted, non-targeted is mentioned.

[68706] In an embodiment the present invention relates to an expresssion cassette comprising a) a promoter, preferably a promoter selected from the group consisting of Big35S, PCUbi, Super and USP, in particular p-PcUBI; and b) the nucleic acid SEQ ID NO. 55379, or a homolog or fragment thereof, or a homolog thereof being depicted in Table I, application no. 14, column 8, in the same line as SEQ ID NO. 55379, preferably the coding region thereof, a homolog or a fragment thereof; which are operable linked.

[68707] In an embodiment thereof the expression cassette comprises in addition c) a nucleic acid molecule encoding a transit peptide, especially a plastidal transit petide in case in Table I, application no. 14, in column 6 in the same line as SEQ ID NO. 55379 is depicted, plastidic is mentioned, or a mitochondrial transit peptide in case in Table I, application no. 14, in column 6 in the same line as SEQ ID NO. 55379 is depicted, mitochondric is mentioned; which is operable linked, too.

[68708] In another embodiment thereof the expression cassette does not comprise an additional transit peptide in case in Table I, application no. 14, in column 6 in the same line as SEQ ID NO. 55379 is depicted, non-targeted is mentioned.

[68709] In an embodiment the present invention relates to an expresssion cassette comprising a) a promoter, preferably a promoter selected from the group consisting of Big35S, PCUbi, Super and USP, in particular p-PcUBI; and b) the nucleic acid SEQ ID NO. 86447, or a homolog or fragment thereof, or a homolog thereof being depicted in Table I, application no. 14, column 8, in the same line as SEQ ID NO. 86447, preferably the coding region thereof, a homolog or a fragment thereof; which are operable linked.

[68710] In an embodiment thereof the expression cassette comprises in addition c) a nucleic acid molecule encoding a transit peptide, especially a plastidal transit petide in case in Table I, application no. 14, in column 6 in the same line as SEQ ID NO. 86447 is depicted, plastidic is mentioned, or a mitochondrial transit peptide in case in Table I, application no. 14, in column 6 in the same line as SEQ ID NO. 86447 is depicted, mitochondric is mentioned; which is operable linked, too.

[68711] In another embodiment thereof the expression cassette does not comprise an additional transit peptide in case in Table I, application no. 14, in column 6 in the same line as SEQ ID NO. 86447 is depicted, non-targeted is mentioned.

[68712] In an embodiment the present invention relates to an expresssion cassette comprising a) a promoter, preferably a promoter selected from the group consisting of Big35S, PCUbi, Super and USP, in particular p-PcUBI; and b) the nucleic acid SEQ ID NO. 55385, or a homolog or fragment thereof, or a homolog thereof being depicted in Table I, application no. 14, column 8, in the same line as SEQ ID NO. 55385, preferably the coding region thereof, a homolog or a fragment thereof; which are operable linked.

[68713] In an embodiment thereof the expression cassette comprises in addition c) a nucleic acid molecule encoding a transit peptide, especially a plastidal transit petide in case in Table I, application no. 14, in column 6 in the same line as SEQ ID NO. 55385 is depicted, plastidic is mentioned, or a mitochondrial transit peptide in case in Table I, application no. 14, in column 6 in the same line as SEQ ID NO. 55385 is depicted, mitochondric is mentioned; which is operable linked, too.

[68714] In another embodiment thereof the expression cassette does not comprise an additional transit peptide in case in Table I, application no. 14, in column 6 in the same line as SEQ ID NO. 55385 is depicted, non-targeted is mentioned.

[68715] In an embodiment the present invention relates to an expresssion cassette comprising a) a promoter, preferably a promoter selected from the group consisting of Big35S, PCUbi, Super and USP, in particular p-PcUBI; and b) the nucleic acid SEQ ID NO. 11990, or a homolog or fragment thereof, or a homolog thereof being depicted in Table I, application no. 14, column 8, in the same line as SEQ ID NO. 11990, preferably the coding region thereof, a homolog or a fragment thereof; which are operable linked.

[68716] In an embodiment thereof the expression cassette comprises in addition c) a nucleic acid molecule encoding a transit peptide, especially a plastidal transit petide in case in Table I, application no. 14, in column 6 in the same line as SEQ ID NO. 11990 is depicted, plastidic is mentioned, or a mitochondrial transit peptide in case in Table I, application no. 14, in column 6 in the same line as SEQ ID NO. 11990 is depicted, mitochondric is mentioned; which is operable linked, too.

[68717] In another embodiment thereof the expression cassette does not comprise an additional transit peptide in case in Table I, application no. 14, in column 6 in the same line as SEQ ID NO. 11990 is depicted, non-targeted is mentioned.

[68718] In an embodiment the present invention relates to an expresssion cassette comprising a) a promoter, preferably a promoter selected from the group consisting of Big35S, PCUbi, Super and USP, in particular p-PcUBI; and b) the nucleic acid SEQ ID NO. 119222, or a homolog or fragment thereof, or a homolog thereof being depicted in Table I, application no. 14, column 8, in the same line as SEQ ID NO. 119222, preferably the coding region thereof, a homolog or a fragment thereof; which are operable linked.

[68719] In an embodiment thereof the expression cassette comprises in addition c) a nucleic acid molecule encoding a transit peptide, especially a plastidal transit petide in case in Table I, application no. 14, in column 6 in the same line as SEQ ID NO. 119222 is depicted, plastidic is mentioned, or a mitochondrial transit peptide in case in Table I, application no. 14, in column 6 in the same line as SEQ ID NO. 119222 is depicted, mitochondric is mentioned; which is operable linked, too.

[68720] In another embodiment thereof the expression cassette does not comprise an additional transit peptide in case in Table I, application no. 14, in column 6 in the same line as SEQ ID NO. 119222 is depicted, non-targeted is mentioned.

[68721] In an embodiment the present invention relates to an expresssion cassette comprising a) a promoter, preferably a promoter selected from the group consisting of Big35S, PCUbi, Super and USP, in particular p-PcUBI; and b) the nucleic acid SEQ ID NO. 87655, or a homolog or fragment thereof, or a homolog thereof being depicted in Table I, application no. 14, column 8, in the same line as SEQ ID NO. 87655, preferably the coding region thereof, a homolog or a fragment thereof; which are operable linked.

[68722] In an embodiment thereof the expression cassette comprises in addition c) a nucleic acid molecule encoding a transit peptide, especially a plastidal transit petide in case in Table I, application no. 14, in column 6 in the same line as SEQ ID NO. 87655 is depicted, plastidic is mentioned, or a mitochondrial transit peptide in case in Table I, application no. 14, in column 6 in the same line as SEQ ID NO. 87655 is depicted, mitochondric is mentioned; which is operable linked, too.

[68723] In another embodiment thereof the expression cassette does not comprise an additional transit peptide in case in Table I, application no. 14, in column 6 in the same line as SEQ ID NO. 87655 is depicted, non-targeted is mentioned.

[68724] In an embodiment the present invention relates to an expresssion cassette comprising a) a promoter, preferably a promoter selected from the group consisting of Big35S, PCUbi, Super and USP, in particular p-PcUBI; and b) the nucleic acid SEQ ID NO. 61723, or a homolog or fragment thereof, or a homolog thereof being depicted in Table I, application no. 14, column 8, in the same line as SEQ ID NO. 61723, preferably the coding region thereof, a homolog or a fragment thereof; which are operable linked.

[68725] In an embodiment thereof the expression cassette comprises in addition c) a nucleic acid molecule encoding a transit peptide, especially a plastidal transit petide in case in Table I, application no. 14, in column 6 in the same line as SEQ ID NO. 61723 is depicted, plastidic is mentioned, or a mitochondrial transit peptide in case in Table I, application no. 14, in column 6 in the same line as SEQ ID NO. 61723 is depicted, mitochondric is mentioned; which is operable linked, too.

[68726] In another embodiment thereof the expression cassette does not comprise an additional transit peptide in case in Table I, application no. 14, in column 6 in the same line as SEQ ID NO. 61723 is depicted, non-targeted is mentioned.

[68727] In an embodiment the present invention relates to an expresssion cassette comprising a) a promoter, preferably a promoter selected from the group consisting of Big35S, PCUbi, Super and USP, in particular p-PcUBI; and b) the nucleic acid SEQ ID NO. 62079, or a homolog or fragment thereof, or a homolog thereof being depicted in Table I, application no. 14, column 8, in the same line as SEQ ID NO. 62079, preferably the coding region thereof, a homolog or a fragment thereof; which are operable linked.

[68728] In an embodiment thereof the expression cassette comprises in addition c) a nucleic acid molecule encoding a transit peptide, especially a plastidal transit petide in case in Table I, application no. 14, in column 6 in the same line as SEQ ID NO. 62079 is depicted, plastidic is mentioned, or a mitochondrial transit peptide in case in Table I, application no. 14, in column 6 in the same line as SEQ ID NO. 62079 is depicted, mitochondric is mentioned; which is operable linked, too.

[68729] In another embodiment thereof the expression cassette does not comprise an additional transit peptide in case in Table I, application no. 14, in column 6 in the same line as SEQ ID NO. 62079 is depicted, non-targeted is mentioned.

[68730] In an embodiment the present invention relates to an expresssion cassette comprising a) a promoter, preferably a promoter selected from the group consisting of Big35S, PCUbi, Super and USP, in particular p-PcUBI; and b) the nucleic acid SEQ ID NO. 12974, or a homolog or fragment thereof, or a homolog thereof being depicted in Table I, application no. 14, column 8, in the same line as SEQ ID NO. 12974, preferably the coding region thereof, a homolog or a fragment thereof; which are operable linked.

[68731] In an embodiment thereof the expression cassette comprises in addition c) a nucleic acid molecule encoding a transit peptide, especially a plastidal transit petide in case in Table I, application no. 14, in column 6 in the same line as SEQ ID NO. 12974 is depicted, plastidic is mentioned, or a mitochondrial transit peptide in case in Table I, application no. 14, in column 6 in the same line as SEQ ID NO. 12974 is depicted, mitochondric is mentioned; which is operable linked, too.

[68732] In another embodiment thereof the expression cassette does not comprise an additional transit peptide in case in Table I, application no. 14, in column 6 in the same line as SEQ ID NO. 12974 is depicted, non-targeted is mentioned.

[68733] In an embodiment the present invention relates to an expresssion cassette comprising a) a promoter, preferably a promoter selected from the group consisting of Big35S, PCUbi, Super and USP, in particular p-Super; and b) the nucleic acid SEQ ID NO. 113224, or a homolog or fragment thereof, or a homolog thereof being depicted in Table I, application no. 14, column 8, in the same line as SEQ ID NO. 113224, preferably the coding region thereof, a homolog or a fragment thereof; which are operable linked.

[68734] In an embodiment thereof the expression cassette comprises in addition c) a nucleic acid molecule encoding a transit peptide, especially a plastidal transit petide in case in Table I, application no. 14, in column 6 in the same line as SEQ ID NO. 113224 is depicted, plastidic is mentioned, or a mitochondrial transit peptide in case in Table I, application no. 14, in column 6 in the same line as SEQ ID NO. 113224 is depicted, mitochondric is mentioned; which is operable linked, too.

[68735] In another embodiment thereof the expression cassette does not comprise an additional transit peptide in case in Table I, application no. 14, in column 6 in the same line as SEQ ID NO. 113224 is depicted, non-targeted is mentioned.

[68736] In an embodiment the present invention relates to an expresssion cassette comprising a) a promoter, preferably a promoter selected from the group consisting of Big35S, PCUbi, Super and USP, in particular Big35S; and b) the nucleic acid SEQ ID NO. 14171, or a homolog or fragment thereof, or a homolog thereof being depicted in Table I, application no. 14, column 8, in the same line as SEQ ID NO. 14171, preferably the coding region thereof, a homolog or a fragment thereof; which are operable linked.

[68737] In an embodiment thereof the expression cassette comprises in addition c) a nucleic acid molecule encoding a transit peptide, especially a plastidal transit petide in case in Table I, application no. 14, in column 6 in the same line as SEQ ID NO. 14171 is depicted, plastidic is mentioned, or a mitochondrial transit peptide in case in Table I, application no. 14, in column 6 in the same line as SEQ ID NO. 14171 is depicted, mitochondric is mentioned; which is operable linked, too.

[68738] In another embodiment thereof the expression cassette does not comprise an additional transit peptide in case in Table I, application no. 14, in column 6 in the same line as SEQ ID NO. 14171 is depicted, non-targeted is mentioned.

[68739] In an embodiment the present invention relates to an expresssion cassette comprising a) a promoter, preferably a promoter selected from the group consisting of Big35S, PCUbi, Super and USP, in particular p-Super; and b) the nucleic acid SEQ ID NO. 113313, or a homolog or fragment thereof, or a homolog thereof being depicted in Table I, application no. 14, column 8, in the same line as SEQ ID NO. 113313, preferably the coding region thereof, a homolog or a fragment thereof; which are operable linked.

[68740] In an embodiment thereof the expression cassette comprises in addition c) a nucleic acid molecule encoding a transit peptide, especially a plastidal transit petide in case in Table I, application no. 14, in column 6 in the same line as SEQ ID NO. 113313 is depicted, plastidic is mentioned, or a mitochondrial transit peptide in case in Table I, application no. 14, in column 6 in the same line as SEQ ID NO. 113313 is depicted, mitochondric is mentioned; which is operable linked, too.

[68741] In another embodiment thereof the expression cassette does not comprise an additional transit peptide in case in Table I, application no. 14, in column 6 in the same line as SEQ ID NO. 113313 is depicted, non-targeted is mentioned.

[68742] In an embodiment the present invention relates to an expresssion cassette comprising a) a promoter, preferably a promoter selected from the group consisting of Big35S, PCUbi, Super and USP, in particular p-PcUBI; and b) the nucleic acid SEQ ID NO. 120436, or a homolog or fragment thereof, or a homolog thereof being depicted in Table I, application no. 14, column 8, in the same line as SEQ ID NO. 120436, preferably the coding region thereof, a homolog or a fragment thereof; which are operable linked.

[68743] In an embodiment thereof the expression cassette comprises in addition c) a nucleic acid molecule encoding a transit peptide, especially a plastidal transit petide in case in Table I, application no. 14, in column 6 in the same line as SEQ ID NO. 120436 is depicted, plastidic is mentioned, or a mitochondrial transit peptide in case in Table I, application no. 14, in column 6 in the same line as SEQ ID NO. 120436 is depicted, mitochondric is mentioned; which is operable linked, too.

[68744] In another embodiment thereof the expression cassette does not comprise an additional transit peptide in case in Table I, application no. 14, in column 6 in the same line as SEQ ID NO. 120436 is depicted, non-targeted is mentioned.

[68745] In an embodiment the present invention relates to an expresssion cassette comprising a) a promoter, preferably a promoter selected from the group consisting of Big35S, PCUbi, Super and USP, in particular p-PcUBI; and b) the nucleic acid SEQ ID NO. 66274, or a homolog or fragment thereof, or a homolog thereof being depicted in Table I, application no. 14, column 8, in the same line as SEQ ID NO. 66274, preferably the coding region thereof, a homolog or a fragment thereof; which are operable linked.

[68746] In an embodiment thereof the expression cassette comprises in addition c) a nucleic acid molecule encoding a transit peptide, especially a plastidal transit petide in case in Table I, application no. 14, in column 6 in the same line as SEQ ID NO. 66274 is depicted, plastidic is mentioned, or a mitochondrial transit peptide in case in Table I, application no. 14, in column 6 in the same line as SEQ ID NO. 66274 is depicted, mitochondric is mentioned; which is operable linked, too.

[68747] In another embodiment thereof the expression cassette does not comprise an additional transit peptide in case in Table I, application no. 14, in column 6 in the same line as SEQ ID NO. 66274 is depicted, non-targeted is mentioned.

[68748] In an embodiment the present invention relates to an expresssion cassette comprising a) a promoter, preferably a promoter selected from the group consisting of Big35S, PCUbi, Super and USP, in particular p-Super; and b) the nucleic acid SEQ ID NO. 129546, or a homolog or fragment thereof, or a homolog thereof being depicted in Table I, application no. 14, column 8, in the same line as SEQ ID NO. 129546, preferably the coding region thereof, a homolog or a fragment thereof; which are operable linked.

[68749] In an embodiment thereof the expression cassette comprises in addition c) a nucleic acid molecule encoding a transit peptide, especially a plastidal transit petide in case in Table I, application no. 14, in column 6 in the same line as SEQ ID NO. 129546 is depicted, plastidic is mentioned, or a mitochondrial transit peptide in case in Table I, application no. 14, in column 6 in the same line as SEQ ID NO. 129546 is depicted, mitochondric is mentioned; which is operable linked, too.

[68750] In another embodiment thereof the expression cassette does not comprise an additional transit peptide in case in Table I, application no. 14, in column 6 in the same line as SEQ ID NO. 129546 is depicted, non-targeted is mentioned.

[68751] In an embodiment the present invention relates to an expresssion cassette comprising a) a promoter, preferably a promoter selected from the group consisting of Big35S, PCUbi, Super and USP, in particular p-PcUBI; and b) the nucleic acid SEQ ID NO. 92668, or a homolog or fragment thereof, or a homolog thereof being depicted in Table I, application no. 14, column 8, in the same line as SEQ ID NO. 92668, preferably the coding region thereof, a homolog or a fragment thereof; which are operable linked.

[68752] In an embodiment thereof the expression cassette comprises in addition c) a nucleic acid molecule encoding a transit peptide, especially a plastidal transit petide in case in Table I, application no. 14, in column 6 in the same line as SEQ ID NO. 92668 is depicted, plastidic is mentioned, or a mitochondrial transit peptide in case in Table I, application no. 14, in column 6 in the same line as SEQ ID NO. 92668 is depicted, mitochondric is mentioned; which is operable linked, too.

[68753] In another embodiment thereof the expression cassette does not comprise an additional transit peptide in case in Table I, application no. 14, in column 6 in the same line as SEQ ID NO. 92668 is depicted, non-targeted is mentioned.

[68754] In an embodiment the present invention relates to an expresssion cassette comprising a) a promoter, preferably a promoter selected from the group consisting of Big35S, PCUbi, Super and USP, in particular p-Super; and b) the nucleic acid SEQ ID NO. 113647, or a homolog or fragment thereof, or a homolog thereof being depicted in Table I, application no. 14, column 8, in the same line as SEQ ID NO. 113647, preferably the coding region thereof, a homolog or a fragment thereof; which are operable linked.

[68755] In an embodiment thereof the expression cassette comprises in addition c) a nucleic acid molecule encoding a transit peptide, especially a plastidal transit petide in case in Table I, application no. 14, in column 6 in the same line as SEQ ID NO. 113647 is depicted, plastidic is mentioned, or a mitochondrial transit peptide in case in Table I, application no. 14, in column 6 in the same line as SEQ ID NO. 113647 is depicted, mitochondric is mentioned; which is operable linked, too.

[68756] In another embodiment thereof the expression cassette does not comprise an additional transit peptide in case in Table I, application no. 14, in column 6 in the same line as SEQ ID NO. 113647 is depicted, non-targeted is mentioned.

[68757] In an embodiment the present invention relates to an expresssion cassette comprising a) a promoter, preferably a promoter selected from the group consisting of Big35S, PCUbi, Super and USP, in particular p-PcUBI; and b) the nucleic acid SEQ ID NO. 16883, or a homolog or fragment thereof, or a homolog thereof being depicted in Table I, application no. 14, column 8, in the same line as SEQ ID NO. 16883, preferably the coding region thereof, a homolog or a fragment thereof; which are operable linked.

[68758] In an embodiment thereof the expression cassette comprises in addition c) a nucleic acid molecule encoding a transit peptide, especially a plastidal transit petide in case in Table I, application no. 14, in column 6 in the same line as SEQ ID NO. 16883 is depicted, plastidic is mentioned, or a mitochondrial transit peptide in case in Table I, application no. 14, in column 6 in the same line as SEQ ID NO. 16883 is depicted, mitochondric is mentioned; which is operable linked, too.

[68759] In another embodiment thereof the expression cassette does not comprise an additional transit peptide in case in Table I, application no. 14, in column 6 in the same line as SEQ ID NO. 16883 is depicted, non-targeted is mentioned.

[68760] [0165.1.7.14] to [0170.1.7.14] for the disclosure of these paragraphs see [0165.1.7.7] to [0170.1.7.7] above

[68761] The invention further provides a vector, comprising a nucleic acid molecule comprising 1) a nucleic acid molecule selected from the group consisting of:
[68762] (a) a nucleic acid molecule encoding a polypeptide shown in Table II, column 5 or 8, application no. 14, preferably shown in Table II A, application no. 14, in column 5, or in Table II

[68763] A, application no. 14, column 8, or in Table II B, application no. 14, column 8, or a homolog or a fragment thereof;
[68764] (b) a nucleic acid molecule shown in Table I, application no. 14, column 5 or 8, preferably shown in Table I A, application no. 14, in column 5, or in Table I A, application no. 14, column 8, or in Table I B, application no. 14, column 8, preferably the coding region thereof, or a homolog or a fragment thereof;
[68765] (c) a nucleic acid molecule, which, as a result of the degeneracy of the genetic code, can be derived from a polypeptide sequence depicted in column 5 or 8 of Table II, application no. 14, preferably shown in Table II A, application no. 14, in column 5, or in Table II A, application no. 14, column 8, or in Table II B, application no. 14, column 8;
[68766] (d) a nucleic acid molecule having at least 30% identity, preferably at least 40%, 50%, 60%, 70%, 75%, 80%, 85%, 90%, 95%, 96%, 97%, 98%, 99%, 99.5%, with the nucleic acid molecule sequence of a polynucleotide comprising the nucleic acid molecule shown in column 5 or 8 of Table I, application no. 14, preferably shown in Table I A, application no. 14, in column 5, or in Table I A, application no. 14, column 8, or in Table I B, application no. 14, column 8, preferably the coding region thereof;
[68767] (e) a nucleic acid molecule encoding a polypeptide having at least 30% identity, preferably at least 40%, 50% 60%, 70%, 75%, 80%, 85%, 90%, 95%, 96%, 97%, 98%, 99%, 99.5%, identity with the amino acid sequence of the polypeptide encoded by the nucleic acid molecule of (a), (b), (c), or (d);
[68768] (f) a nucleic acid molecule which hybridizes with a nucleic acid molecule of (a), (b), (c), (d), or (e) under stringent hybridization conditions;
[68769] (g) a nucleic acid molecule encoding a polypeptide which can be isolated with the aid of monoclonal or polyclonal antibodies made against a polypeptide encoded by one of the nucleic acid molecules of (a), (b), (c), (d), (e) or (f);
[68770] (h) a nucleic acid molecule encoding a polypeptide comprising the consensus sequence or one or more polypeptide motifs as shown in column 8 of Table IV, application no. 14;
[68771] (i) a nucleic acid molecule encoding a polypeptide having the activity represented by a protein as depicted in column 5 of Table II, application no. 14;
[68772] (j) a nucleic acid molecule comprising a polynucleotide which is obtained by amplifying a cDNA library or a genomic library using the primers in Table III, application no. 14, column 8;
[68773] and
[68774] (k) nucleic acid molecule which is obtainable by screening a suitable nucleic acid library, especially a cDNA library and/or a genomic library, under stringent hybridization conditions with a probe comprising one of the sequences of the nucleic acid molecule of (a), (b), (c), (d), (e), (f), (g), (h), (i) or (j) or with a fragment thereof having at least 15 nt, preferably 20 nt, 30 nt, 50 nt, 100 nt, 200 nt, 500 nt, 1000 nt, 1500 nt, 2000 nt or 3000 nt of the nucleic acid molecule complementary to a nucleic acid sequence characterized in (a), (b), (c), (d), (e), (f), (g), (h), (i) or (j);
[68775] or a nucleic acid molecule comprising a sequence which is complementary thereto.
   (All the references to Tables I to IV are references to the corresponding lines of Tables I to IV.)

[68776] In a preferred embodiment of said vector said nucleic acid molecule according to 1 (a), (b), (c), (d), (e), (f), (g), (h), (i), (j) or (k) encodes a polypeptide which has the activity of the respective polypeptide represented by a protein comprising a polypeptide as depicted in the respective line in column 5 of Table II, application no. 14.

[68777] In another preferred embodiment of said vector said nucleic acid molecule according to 1 (a), (b), (c), (d), (e), (f), (g), (h), (i), (j) or (k) confers a generation or an increase of the respective fine chemical in a non-human organism or a part thereof as compared to a corresponding wild-type non-human organism or part thereof.

[68778] In another preferred embodiment of said vector said nucleic acid molecule according to 1 (a), (b), (c), (d), (e), (f), (g), (h), (i), (j) or (k) encodes a polypeptide which has the activity of the respective polypeptide represented by a protein as depicted in the respective line in column 5 of Table II, application no. 14, and confers a generation or an increase of the respective fine chemical in a non-human organism or a part thereof as compared to a corresponding wild-type non-human organism or part thereof.

[68779] In another embodiment thereof said vector comprises beneath said nucleic acid molecule according to 1 (a), (b), (c), (d), (e), (f), (g), (h), (i), (j) or (k), a promoter, preferably a promoter selected from the group consisting of Big35S, PCUbi, Super and USP, which are operable linked.

[68780] In a preferred embodiment thereof said vector comprises beneath said nucleic acid molecule according to 1 (a), (b), (c), (d), (e), (f), (g), (h), (i), (j) or (k), a promoter, preferably a promoter selected from the group consisting of Big35S, PCUbi, Super and USP, which are operable linked; and said nucleic acid molecule according to 1 (a), (b), (c), (d), (e), (f), (g), (h), (i), (j) or (k) encodes a polypeptide which has the activity of the respective polypeptide represented by a protein comprising a polypeptide as depicted in the respective line in column 5 of Table II, application no. 14.

[68781] In another preferred embodiment thereof said vector comprises beneath said nucleic acid molecule according to 1 (a), (b), (c), (d), (e), (f), (g), (h), (i), (j) or (k), a promoter, preferably a promoter selected from the group consisting of Big35S, PCUbi, Super and USP, which are operable linked; and said nucleic acid molecule according to 1 (a), (b), (c), (d), (e), (f), (g), (h), (i), (j) or (k) confers a generation or an increase of the respective fine chemical in a non-human organism or a part thereof as compared to a corresponding wild-type non-human organism or part thereof.

[68782] In another preferred embodiment thereof said vector comprises beneath said nucleic acid molecule according to 1 (a), (b), (c), (d), (e), (f), (g), (h), (i), (j) or (k), a promoter, preferably a promoter selected from the group consisting of Big35S, PCUbi, Super and USP, which are operable linked; and said nucleic acid molecule according to 1 (a), (b), (c), (d), (e), (f), (g), (h), (i), (j) or (k) encodes a polypeptide which has the activity of the respective polypeptide represented by a protein as depicted in the respective line in column 5 of Table II, application no. 14, and confers a generation or an increase of the respective fine chemical in a non-human organism or a part thereof as compared to a corresponding wild-type non-human organism or part thereof.

[68783] In another embodiment thereof said vector comprises beneath said nucleic acid molecule according to 1 (a), (b), (c), (d), (e), (f), (g), (h), (i), (j) or (k), a nucleic acid molecule encoding a transit peptide, preferably encoding a plastidal transit peptide, especially in case in column 6 of Table I, application no. 14, in the same line as of the respective nucleic acid molecule according to 1) “plastidic” is depicted, or encoding a mitochondrial transit peptide, especially in case in column 6 of Table I, application no. 14, in the same line as of the respective nucleic acid molecule according to 1) “mitochondric” is depicted, which are operable linked.

[68784] In another embodiment thereof said vector does not comprise beneath said nucleic acid molecule according to 1 (a), (b), (c), (d), (e), (f), (g), (h), (i), (j) or (k), a nucleic acid molecule encoding a transit peptide in case in column 6 of Table I, application no. 14, in the same line as of the respective nucleic acid molecule according to 1) “non-targeted” is depicted.

[68785] In another embodiment thereof said vector comprises beneath said nucleic acid molecule according to 1 (a), (b), (c), (d), (e), (f), (g), (h), (i), (j) or (k), and a promoter, preferably a promoter selected from the group consisting of Big35S, PCUbi, Super and USP; a nucleic acid molecule encoding a transit peptide, preferably encoding a plastidal transit peptide, especially in case in column 6 of Table I, application no. 14, in the same line as of the respective nucleic acid molecule according to 1) “plastidic” is depicted, or encoding a mitochondrial transit peptide, especially in case in column 6 of Table I, application no. 14, in the same line as of the respective nucleic acid molecule according to 1) “mitochondric” is depicted, which are operable linked.

[68786] In another embodiment thereof said vector does not comprise beneath said nucleic acid molecule according to 1 (a), (b), (c), (d), (e), (f), (g), (h), (i), (j) or (k), and a promoter, preferably a promoter selected from the group consisting of Big35S, PCUbi, Super and USP, which are operable linked; a nucleic acid molecule encoding a transit peptide, especially in case in column 6 of Table I, application no. 14, in the same line as of the respective nucleic acid molecule according to 1) “non-targeted” is depicted.

[68787] In another embodiment thereof said vector comprises beneath said nucleic acid molecule according to 1 (a), (b), (c), (d), (e), (f), (g), (h), (i), (j) or (k), and a promoter, preferably a promoter selected from the group consisting of Big35S, PCUbi, Super and USP; a nucleic acid molecule encoding a transit peptide, preferably encoding a plastidal transit peptide, especially in case in column 6 of Table I, application no. 14, in the same line as of the respective nucleic acid molecule according to 1) “plastidic” is depicted, or encoding a mitochondrial transit peptide, especially in case in column 6 of Table I, application no. 14, in the same line as of the respective nucleic acid molecule according to 1) “mitochondric” is depicted, which are operable linked; and wherein said nucleic acid molecule according to 1 (a), (b), (c), (d), (e), (f), (g), (h), (i), (j) or (k) encodes a polypeptide which has the activity of the respective polypeptide represented by a protein comprising a polypeptide as depicted in column 5 of Table II, application no. 14 (in the same line).

[68788] In another embodiment thereof said vector does not comprise beneath said nucleic acid molecule according to 1 (a), (b), (c), (d), (e), (f), (g), (h), (i), (j) or (k), and a promoter, preferably a promoter selected from the group consisting of Big35S, PCUbi, Super and USP, which are operatively linked; a nucleic acid molecule encoding a transit peptide, especially in case in column 6 of Table I, application no. 14, in the same line as of the respective nucleic acid molecule according to 1) “non-targeted” is depicted; and wherein said nucleic acid molecule according to 1 (a), (b), (c), (d), (e), (f), (g), (h), (i), (j) or (k) encodes a polypeptide which has the activity of the respective polypeptide represented by a protein comprising a polypeptide as depicted in column 5 of Table II, application no. 14.

[68789] In another embodiment thereof said vector comprises beneath said nucleic acid molecule according to 1 (a), (b), (c), (d), (e), (f), (g), (h), (i), (j) or (k), and a promoter, preferably a promoter selected from the group consisting of Big35S, PCUbi, Super and USP; a nucleic acid molecule encoding a transit peptide, preferably encoding a plastidal transit peptide, especially in case in column 6 of Table I, application no. 14, in the same line as of the respective nucleic acid molecule according to 1) “plastidic” is depicted, or encoding a mitochondrial transit peptide, especially in case in column 6 of Table I, application no. 14, in the same line as of the respective nucleic acid molecule according to 1) “mitochondric” is depicted, which are operable linked; and wherein said nucleic acid molecule according to 1 (a), (b), (c), (d), (e), (f), (g), (h), (i), (j) or (k) confers a generation or an increase of the respective fine chemical in a non-human organism or a part thereof as compared to a corresponding wild-type non-human organism or part thereof.

[68790] In another embodiment thereof said vector does not comprise beneath said nucleic acid molecule according to 1 (a), (b), (c), (d), (e), (f), (g), (h), (i), (j) or (k), and a promoter, preferably a promoter selected from the group consisting of Big35S, PCUbi, Super and USP, which are operatively linked; a nucleic acid molecule encoding a transit peptide, especially in case in column 6 of Table I, application no. 14, in the same line as of the respective nucleic acid molecule according to 1) “non-targeted” is depicted; and wherein said nucleic acid molecule according to 1 (a), (b), (c), (d), (e), (f), (g), (h), (i), (j) or (k) confers a generation or an increase of the respective fine chemical in a non-human organism or a part thereof as compared to a corresponding wild-type non-human organism or part thereof.

[68791] In another embodiment thereof said vector comprises beneath said nucleic acid molecule according to 1 (a), (b), (c), (d), (e), (f), (g), (h), (i), (j) or (k), and a promoter, preferably a promoter selected from the group consisting of Big35S, PCUbi, Super and USP; a nucleic acid molecule encoding a transit peptide, preferably encoding a plastidal transit peptide, especially in case in column 6 of Table I, application no. 14, in the same line as of the respective nucleic acid molecule according to 1) “plastidic” is depicted, or encoding a mitochondrial transit peptide, especially in case in column 6 of Table I, application no. 14, in the same line as of the respective nucleic acid molecule according to 1) “mitochondric” is depicted, which are operable linked; and wherein said nucleic acid molecule according to 1 (a), (b), (c), (d), (e), (f), (g), (h), (i), (j) or (k) encodes a polypeptide which has the activity of the respective polypeptide represented by a protein as depicted in column 5 of Table II application no. 14 and confers a generation or an increase of the respective fine chemical in a non-human organism or a part thereof as compared to a corresponding wild-type non-human organism or part thereof.

[68792] In another embodiment thereof said vector does not comprise beneath said nucleic acid molecule according to 1 (a), (b), (c), (d), (e), (f), (g), (h), (i), (j) or (k), and a promoter, preferably a promoter selected from the group consisting of Big35S, PCUbi, Super and USP, which are operatively linked; a nucleic acid molecule encoding a transit peptide, especially in case in column 6 of Table I, application no. 14, in the same line as of the respective nucleic acid molecule according to 1) “non-targeted” is depicted; and wherein said nucleic acid molecule according to 1 (a), (b), (c), (d), (e), (f), (g), (h), (i), (j) or (k) encodes a polypeptide which has the activity of the respective polypeptide represented by a protein as depicted in column 5 of Table II application no. 14 (in the same line) and confers a generation or an increase of the respective fine chemical in a non-human organism or a part thereof as compared to a corresponding wild-type non-human organism or part thereof.

[68793] In a preferred embodiment of said vector said nucleic acid molecule according to 1 (a), (b), (c), (d), (e), (f), (g), (h), (i), (j) or (k), said promoter and optionally said nucleic acid molecule encoding a transit peptide are encompassed in an expression cassette. Accordingly in an embodiment the invention provides a vector comprising an expression cassette comprising said nucleic acid molecule according to 1 (a), (b), (c), (d), (e), (f), (g), (h), (i), (j) or (k), said promoter and optionally said a nucleic acid molecule encoding a transit peptide, operable linked. Said expression cassette may encompass a terminator, too.

[68794] The invention further provides a vector comprising a nucleic acid molecule comprising 1) a nucleic acid molecule selected from the group consisting of:
[68795] (a) a nucleic acid molecule encoding a polypeptide shown in Table II, column 5 or 8, application no. 14, preferably shown in Table II A, application no. 14, in column 5, or in Table II A, application no. 14, column 8, or in Table II B, application no. 14, column 8, or a homolog or a fragment thereof;
[68796] (b) a nucleic acid molecule shown in Table I, application no. 14, column 5 or 8, preferably shown in Table I A, application no. 14, in column 5, or in Table I A, application no. 14, column 8, or in Table I B, application no. 14, column 8, preferably the coding region thereof, or a homolog or a fragment thereof;
[68797] (c) a nucleic acid molecule, which, as a result of the degeneracy of the genetic code, can be derived from a polypeptide sequence depicted in column 5 or 8 of Table II, application no. 14, preferably shown in Table II A, application no. 14, in column 5, or in Table II A, application no. 14, column 8, or in Table II B, application no. 14, column 8;
[68798] (d) a nucleic acid molecule having at least 30% identity, preferably at least 40%, 50%, 60%, 70%, 75%, 80%, 85%, 90%, 95%, 96%, 97%, 98%, 99%, 99.5%, with the nucleic acid molecule sequence of a polynucleotide comprising the nucleic acid molecule shown in column 5 or 8 of Table I, application no. 14, preferably shown in Table I A, application no. 14, in column 5, or in Table I A, application no. 14, column 8, or in Table I B, application no. 14, column 8, preferably the coding region thereof;
[68799] (e) a nucleic acid molecule encoding a polypeptide having at least 30% identity, preferably at least 40%, 50% 60%, 70%, 75%, 80%, 85%, 90%, 95%, 96%, 97%, 98%, 99%, 99.5%, identity with the amino acid sequence of the polypeptide encoded by the nucleic acid molecule of (a), (b), (c), or (d);
[68800] (f) a nucleic acid molecule which hybridizes with a nucleic acid molecule of (a), (b), (c), (d), or (e) under stringent hybridization conditions;
[68801] (g) a nucleic acid molecule encoding a polypeptide which can be isolated with the aid of monoclonal or polyclonal antibodies made against a polypeptide encoded by one of the nucleic acid molecules of (a), (b), (c), (d), (e) or (f);
[68802] (h) a nucleic acid molecule encoding a polypeptide comprising the consensus sequence or one or more polypeptide motifs as shown in column 8 of Table IV, application no. 14;
[68803] (i) a nucleic acid molecule encoding a polypeptide having the activity represented by a protein as depicted in column 5 of Table II, application no. 14;
[68804] (j) a nucleic acid molecule comprising a polynucleotide which is obtained by amplifying a cDNA library or a genomic library using the primers in Table III, application no. 14, column 8;
[68805] and
[68806] (k) nucleic acid molecule which is obtainable by screening a suitable nucleic acid library, especially a cDNA library and/or a genomic library, under stringent hybridization conditions with a probe comprising one of the sequences of the nucleic acid molecule of (a), (b), (c), (d), (e), (f), (g), (h), (i) or (j) or with a fragment thereof having at least 15 nt, preferably 20 nt, 30 nt, 50 nt, 100 nt, 200 nt, 500 nt, 1000 nt, 1500 nt, 2000 nt or 3000 nt of the nucleic acid molecule complementary to a nucleic acid sequence characterized in (a), (b), (c), (d), (e), (f), (g), (h), (i) or (j);
[68807] or a nucleic acid molecule comprising a sequence which is complementary thereto;
   whereby, preferably, the nucleic acid molecule according to 1 (a), (b), (c), (d), (e), (f), (g), (h), (i), (j) or (k) distinguishes over the sequence depicted in Table I A and/or I B, application no. 14, column 5 or 8, or the coding region thereof, by one or more nucleotides (especially but not exceeding 5%, preferably 4%, 3%, 2%, 1%, 0.5%, 0.2% or 0.1%). In an embodiment, the nucleic acid molecule of the invention does not consist of the sequence shown in Table I A and/or I B, application no. 14, column 5 or 8, or the coding region thereof, respectively. In another embodiment, the nucleic acid molecule of the present invention, preferably the coding region thereof, is 30%, 40%, 50%, 60%, 70%, 80%, 90%, 95% identical but less than 100%, 99.999%, 99.99%, 99.9%, 99%, 98%, 97%, 96% or 95% identical to the sequence shown in Table I A and/or I B, application no. 14, column 5 or 8, or the coding region thereof, respectively. In a further embodiment the nucleic acid molecule does not encode the polypeptide sequence shown in Table II A and/or II B, application no. 14, column 5 or 8 but homologs thereof. Accordingly, in one embodiment, the nucleic acid molecule of the present invention encodes in one embodiment a polypeptide which differs at least in one or more amino acids (especially but not exceeding 5%, preferably 4%, 3%, 2%, 1%, 0.5%, 0.2% or 0.1%) from the polypeptide shown in Table II, application no. 14, column 5 or 8 and does not encode a protein of the sequence shown in Table II A and/or II B, application no. 14, column 5 or 8. Accordingly, in one embodiment, the protein encoded by a sequence of a nucleic acid according to (a), (b), (c), (d), (e), (f), (g), (h), (i), (j) or (k) does not consist of the sequence shown in Table I A and/or I B, application no. 14, column 5 and 8, or the coding region thereof. In a further embodiment, the protein of the present invention is at least 30%,40%, 50%, 60%, 70%, 80%, 90%, 95% identical to protein sequence depicted in Table II A and/or II B, application no. 14, column 5 or 8 but less than 100%, preferably less than 99.999%, 99.99% or 99.9%, more preferably less than 99%, 985, 97%, 96% or 95% identical to the sequence shown in Table II A and/or II B, application no. 14, column 5 or 8.
   (All the references to Tables I to IV are references to the corresponding lines of Tables I to IV.)

[68808] In a preferred embodiment of said vector said nucleic acid molecule according to 1 (a), (b), (c), (d), (e), (f), (g), (h), (i), (j) or (k) encodes a polypeptide which has the activity of the respective polypeptide represented by a protein comprising a polypeptide as depicted in the respective line in column 5 of Table II, application no. 14.

[68809] In another preferred embodiment of said vector said nucleic acid molecule according to 1 (a), (b), (c), (d), (e), (f), (g), (h), (i), (j) or (k) confers a generation or an increase of the respective fine chemical in a non-human organism or a part thereof as compared to a corresponding wild-type non-human organism or part thereof.

[68810] In another preferred embodiment of said vector said nucleic acid molecule according to 1 (a), (b), (c), (d), (e), (f), (g), (h), (i), (j) or (k) encodes a polypeptide which has the activity of the respective polypeptide represented by a protein as depicted in the respective line in column 5 of Table II, application no. 14, and confers a generation or an increase of the respective fine chemical in a non-human organism or a part thereof as compared to a corresponding wild-type non-human organism or part thereof.

[68811] In another embodiment thereof said vector comprises beneath said nucleic acid molecule according to 1 (a), (b), (c), (d), (e), (f), (g), (h), (i), (j) or (k), a promoter, preferably a promoter selected from the group consisting of Big35S, PCUbi, Super and USP, which are operable linked.

[68812] In a preferred embodiment thereof said vector comprises beneath said nucleic acid molecule according to 1 (a), (b), (c), (d), (e), (f), (g), (h), (i), (j) or (k), a promoter, preferably a promoter selected from the group consisting of Big35S, PCUbi, Super and USP, which are operable linked; and said nucleic acid molecule according to 1 (a), (b), (c), (d), (e), (f), (g), (h), (i), (j) or (k) encodes a polypeptide which has the activity of the respective polypeptide represented by a protein comprising a polypeptide as depicted in the respective line in column 5 of Table II, application no. 14.

[68813] In another preferred embodiment thereof said vector comprises beneath said nucleic acid molecule according to 1 (a), (b), (c), (d), (e), (f), (g), (h), (i), (j) or (k), a promoter, preferably a promoter selected from the group consisting of Big35S, PCUbi, Super and USP, which are operable linked; and said nucleic acid molecule according to 1 (a), (b), (c), (d), (e), (f), (g), (h), (i), (j) or (k) confers a generation or an increase of the respective fine chemical in a non-human organism or a part thereof as compared to a corresponding wild-type non-human organism or part thereof.

[68814] In another preferred embodiment thereof said vector comprises beneath said nucleic acid molecule according to 1 (a), (b), (c), (d), (e), (f), (g), (h), (i), (j) or (k), a promoter, preferably a promoter selected from the group consisting of Big35S, PCUbi, Super and USP, which are operable linked; and said nucleic acid molecule according to 1 (a), (b), (c), (d), (e), (f), (g), (h), (i), (j) or (k) encodes a polypeptide which has the activity of the respective polypeptide represented by a protein as depicted in the respective line in column 5 of Table II, application no. 14, and confers a generation or an increase of the respective fine chemical in a non-human organism or a part thereof as compared to a corresponding wild-type non-human organism or part thereof.

[68815] In another embodiment thereof said vector comprises beneath said nucleic acid molecule according to 1 (a), (b), (c), (d), (e), (f), (g), (h), (i), (j) or (k), a nucleic acid molecule encoding a transit peptide, preferably encoding a plastidal transit peptide, especially in case in column 6 of Table I, application no. 14, in the same line as of the respective nucleic acid molecule according to 1) “plastidic” is depicted, or encoding a mitochondrial transit peptide, especially in case in column 6 of Table I, application no. 14, in the same line as of the respective nucleic acid molecule according to 1) “mitochondric” is depicted, which are operable linked.

[68816] In another embodiment thereof said vector does not comprise beneath said nucleic acid molecule according to 1 (a), (b), (c), (d), (e), (f), (g), (h), (i), (j) or (k), a nucleic acid molecule encoding a transit peptide in case in column 6 of Table I, application no. 14, in the same line as of the respective nucleic acid molecule according to 1) “non-targeted” is depicted.

[68817] In another embodiment thereof said vector comprises beneath said nucleic acid molecule according to 1 (a), (b), (c), (d), (e), (f), (g), (h), (i), (j) or (k), and a promoter, preferably a promoter selected from the group consisting of Big35S, PCUbi, Super and USP; a nucleic acid molecule encoding a transit peptide, preferably encoding a plastidal transit peptide, especially in case in column 6 of Table I, application no. 14, in the same line as of the respective nucleic acid molecule according to 1) “plastidic” is depicted, or encoding a mitochondrial transit peptide, especially in case in column 6 of Table I, application no. 14, in the same line as of the respective nucleic acid molecule according to 1) “mitochondric” is depicted, which are operable linked.

[68818] In another embodiment thereof said vector does not comprise beneath said nucleic acid molecule according to 1 (a), (b), (c), (d), (e), (f), (g), (h), (i), (j) or (k), and a promoter, preferably a promoter selected from the group consisting of Big35S, PCUbi, Super and USP, which are operatively linked; a nucleic acid molecule encoding a transit peptide, especially in case in column 6 of Table I, application no. 14, in the same line as of the respective nucleic acid molecule according to 1) “non-targeted” is depicted.

[68819] In another embodiment thereof said vector comprises beneath said nucleic acid molecule according to 1 (a), (b), (c), (d), (e), (f), (g), (h), (i), (j) or (k), and a promoter, preferably a promoter selected from the group consisting of Big35S, PCUbi, Super and USP; a nucleic acid molecule encoding a transit peptide, preferably encoding a plastidal transit peptide, especially in case in column 6 of Table I, application no. 14, in the same line as of the respective nucleic acid molecule according to 1) “plastidic” is depicted, or encoding a mitochondrial transit peptide, especially in case in column 6 of Table I, application no. 14, in the same line as of the respective nucleic acid molecule according to 1) “mitochondric” is depicted, which are operable linked; and wherein said nucleic acid molecule according to 1 (a), (b), (c), (d), (e), (f), (g), (h), (i), (j) or (k) encodes a polypeptide which has the activity of the respective polypeptide represented by a protein comprising a polypeptide as depicted in column 5 of Table II, application no. 14.

[68820] In another embodiment thereof said vector does not comprise beneath said nucleic acid molecule according to 1 (a), (b), (c), (d), (e), (f), (g), (h), (i), (j) or (k), and a promoter, preferably a promoter selected from the group consisting of Big35S, PCUbi, Super and USP, which are operatively linked; a nucleic acid molecule encoding a transit peptide, especially in case in column 6 of Table I, application no. 14, in the same line as of the respective nucleic acid molecule according to 1) “non-targeted” is depicted; and wherein said nucleic acid molecule according to 1 (a), (b), (c), (d), (e), (f), (g), (h), (i), (j) or (k) encodes a polypeptide which has the activity of the respective polypeptide represented by a protein comprising a polypeptide as depicted in column 5 of Table II, application no. 14.

[68821] In another embodiment thereof said vector comprises beneath said nucleic acid molecule according to 1 (a), (b), (c), (d), (e), (f), (g), (h), (i), (j) or (k), and a promoter, preferably a promoter selected from the group consisting of Big35S, PCUbi, Super and USP; a nucleic acid molecule encoding a transit peptide, preferably encoding a plastidal transit peptide, especially in case in column 6 of Table I, application no. 14, in the same line as of the respective nucleic acid molecule according to 1) “plastidic” is depicted, or encoding a mitochondrial transit peptide, especially in case in column 6 of Table I, application no. 14, in the same line as of the respective nucleic acid molecule according to 1) “mitochondric” is depicted, which are operable linked; and wherein said nucleic acid molecule according to 1 (a), (b), (c), (d), (e), (f), (g), (h), (i), (j) or (k) confers a generation or an increase of the respective fine chemical in a non-human organism or a part thereof as compared to a corresponding wild-type non-human organism or part thereof.

[68822] In another embodiment thereof said vector does not comprise beneath said nucleic acid molecule according to 1 (a), (b), (c), (d), (e), (f), (g), (h), (i), (j) or (k), and a promoter, preferably a promoter selected from the group consisting of Big35S, PCUbi, Super and USP, which are operatively linked; a nucleic acid molecule encoding a transit peptide, especially in case in column 6 of Table I, application no. 14, in the same line as of the respective nucleic acid molecule according to 1) “non-targeted” is depicted; and wherein said nucleic acid molecule according to 1 (a), (b), (c), (d), (e), (f), (g), (h), (i), (j) or (k) confers a generation or an increase of the respective fine chemical in a non-human organism or a part thereof as compared to a corresponding wild-type non-human organism or part thereof.

[68823] In another embodiment thereof said vector comprises beneath said nucleic acid molecule according to 1 (a), (b), (c), (d), (e), (f), (g), (h), (i), (j) or (k), and a promoter, preferably a promoter selected from the group consisting of Big35S, PCUbi, Super and USP; a nucleic acid molecule encoding a transit peptide, preferably encoding a plastidal transit peptide, especially in case in column 6 of Table I, application no. 14, in the same line as of the respective nucleic acid molecule according to 1) “plastidic” is depicted, or encoding a mitochondrial transit peptide, especially in case in column 6 of Table I, application no. 14, in the same line as of the respective nucleic acid molecule according to 1) “mitochondric” is depicted, which are operable linked; and wherein said nucleic acid molecule according to 1 (a), (b), (c), (d), (e), (f), (g), (h), (i), (j) or (k) encodes a polypeptide which has the activity of the respective polypeptide represented by a protein as depicted in column 5 of Table II application no. 14 and confers a generation or an increase of the respective fine chemical in a non-human organism or a part thereof as compared to a corresponding wild-type non-human organism or part thereof.

[68824] In another embodiment thereof said vector does not comprise beneath said nucleic acid molecule according to 1 (a), (b), (c), (d), (e), (f), (g), (h), (i), (j) or (k), and a promoter, preferably a promoter selected from the group consisting of Big35S, PCUbi, Super and USP, which are operatively linked; a nucleic acid molecule encoding a transit peptide, especially in case in column 6 of Table I, application no. 14, in the same line as of the respective nucleic acid molecule according to 1) “non-targeted” is depicted; and wherein said nucleic acid molecule according to 1 (a), (b), (c), (d), (e), (f), (g), (h), (i), (j) or (k) encodes a polypeptide which has the activity of the respective polypeptide represented by a protein as depicted in column 5 of Table II application no. 14 and confers a generation or an increase of the respective fine chemical in a non-human organism or a part thereof as compared to a corresponding wild-type non-human organism or part thereof.

[68825] [0181.1.7.14] to [0209.1.7.14] for the disclosure of these paragraphs see [0181.1.7.7] to [0209.1.7.7] above

[68826] The genes of the invention, coding in one embodiment for an activity selected from the group consisting of 2-oxoglutarate dehydrogenase E1 subunit, ABC metal ion transporter substrate-binding protein, acetyl-CoA acetyltransferase, acetyltransferase, acid shock protein, acyl transferase, amidophosphoribosyltransferase, ankyrin repeat family protein, ATP-binding component of a transport system, b1401-protein, B1795-protein, b2107-protein, b2376-protein, b2399-protein, b2474-protein, b2513-protein, b2654-protein, b3151-protein, b3989-protein, b4029-protein, b4205-protein, C-4 sterol methyl oxidase, calcium-dependent protein kinase, cation transport protein, cation-transporting ATPase, CTP synthase, CTP synthetase, cyclin, cyclin D, eukaryotic translation initiation factor 5, glucose dehydrogenase, glucose-6-phosphate 1-dehydrogenase, glutaredoxin, homocitrate synthase, hydrolase, lipoprotein precursor, L-ribulose-5-phosphate 4-epimerase, membrane transport protein, methyltransferase, monothiol glutaredoxin, multidrug resistance protein, multiple antibiotic resistance protein, murein transglycosylase, NADH dehydrogenase I chain N, oxidoreductase, permease protein, permease protein of ABC transporter, phenylacetic acid degradation protein, phosphoribulokinase, polygalacturonase, protein kinase, protein phosphatase, putative transport system permease protein, putrescine transport system permease protein, recombinase A, sec-independent protein translocase, sll0406-protein, sll1761-protein, sodium/proton antiporter, sterol desaturase, threonine dehydrogenase, threonine synthase, transcription factor, tryptophan synthase alpha chain, TTC1386-protein, xanthine dehydrogenase, ydl235c-protein, ynl321w-protein, and ypr170c-protein are also called “FCRP genes”.

[68827] [0211.1.7.14] to [0225.1.7.14] for the disclosure of these paragraphs see [0211.1.7.7] to [0225.1.7.7] above

[68828] In addition to the sequence mentioned in Table I, application no. 14, column 5 or 8, preferably the coding region thereof, or its homologs or fragments, it may be advantageous additionally to express and/or mutate further genes in the non-human organisms. Especially advantageously, additionally at least one further gene of the biosynthetic pathway of the fine chemical is expressed in the non-human organisms such as plants or microorganisms. It is also possible that the regulation of the natural genes has been modified advantageously so that the gene and/or its gene product is no longer subject to the regulatory mechanisms which exist in the non-human organisms. This leads to an increased synthesis of the respective amino acid since, for example, feedback regulations no longer exist to the same extent or not at all. In addition it might be advantageously to combine the nucleic acids sequences of the invention containing the sequences shown in the respective line in Table I, application no. 14, column 5 or 8, preferably the coding region thereof, or homologs or fragments thereof, with genes which generally support or enhance the growth or yield of the target non-human organisms, for example genes which lead to faster growth rate of non human organism like microorganisms or plants or genes which produce stress-, pathogen-, or herbicide-resistant plants.

[68829] In a further embodiment of the process of the invention, therefore, organisms are grown, in which there is simultaneous overexpression of at least one nucleic acid or one of the genes which code for proteins involved in the sterol/phytosterol metabolism, in particular in synthesis of of beta-sitosterol, stigmasterol and/or campesterol.

[68830] Further advantageous nucleic acid sequences which can be expressed in combination with the sequences used in the process and/or the abovementioned biosynthesis genes are the sequences encoding further genes of the phytosterol biosynthetic pathway, such as the enzymes catalyzing the production of acetyl CoA_HMGCoA, mevalonate, mevalonate 5 phosphate, mevalonate 5-pyrophosphate, isopentyl diphosphate, 5-pyrophosphatemevalonate, isopentyl pyrophosphate (PIP), dimethylallyl pyrophosphate (DMAPP), PIP+DMAPP, geranyl pyrophosphate+IPP, farnesyl pyrophosphate, 2 farnesyl pyrophosphate, squalene (squalene synthase) and squalene epoxide, or cycloartenol synthase controling the cyclization of squalene epoxide, S-adenosyl-L-methionine:sterol C-24 methyl transferase (EC 2.1.1.41) (SMT1) catalyzing the transfer of a methyl group from a cofactor, SMT2 catalyzing the second methyl transfer reaction, sterol C-14 demethylase catalyzing the demethylation at C-14, removing the methyl group and creating a double bond. These genes can lead to an increased synthesis of the essential phytosterol, in particular, of beta-sitosterol, stigmasterol and/or campesterol resp.

[68831] [0228.1.7.14] to [0239.1.7.14] for the disclosure of these paragraphs see [0228.1.7.7] to [0239.1.7.7] above

[68832] In an embodiment of the present invention the nucleic acid construct of the present invention comprises a nucleic acid molecule as depicted in the respective line in Table I, application no. 14, column 5 or 8, preferably the coding region thereof, a fragment or a homolog thereof, and a plant promoter, such as the Big 35S promoter, the DC3 promoter, the PC Ubi promoter, the LegB4-promoter, the Super promoter, the USP promoter or the like. In another embodiment the nucleic acid construct of the present invention comprises a nucleic acid molecule as depicted in the respective line in Table I, application no. 14, column 5 or 8, preferably the coding region thereof, a fragment or a homolog thereof, and a plant promoter such as, for example, the USP, the LegB4-, the DC3 promoter or the ubiquitin promoter from parsley or other herein mentioned promoters. In a further embodiment the nucleic acid construct of the present invention comprises a nucleic acid molecule as depicted in the respective line in Table I, application no. 14, column 5 or 8, preferably the coding region thereof, a fragment or a homolog thereof, and a plant promoter, such as the Big 35S promoter, the PC Ubi promoter, the Super promoter, the USP promoter or the like. In addition different terminators may advantageously be used in these nucleic acid constructs; examples for transcriptional termination are polyadenylation signals.

[68833] [0241.1.7.14] to [0245.1.7.14] for the disclosure of theses paragraphs see [0241.1.7.7] to [0245.1.7.7] above

[68834] Other preferred sequences for use in operable linkage in gene expression constructs are targeting sequences, which are required for targeting the gene product into specific cell compartments (for a review, see Kermode, Crit. Rev. Plant Sci. 15 (4), 285 (1996) and references cited therein), for example into the vacuole, the nucleus, all types of plastids, such as amyloplasts, chloroplasts, chromoplasts, the extracellular space, the mitochondria, the endoplasmic reticulum, elaioplasts, peroxisomes, glycosomes, and other compartments of cells or extracellular; preferred are sequences, which are involved in targeting to plastids as mentioned above. Sequences, which must be mentioned in this context are, in particular, the signal-peptide- or transit-peptide-encoding sequences which are known per se. For example, plastidtransit-peptide-encoding sequences enable the targeting of the expression product into the plastids of a plant cell. Targeting sequences are also known for eukaryotic and to a lower extent for prokaryotic organisms and can advantageously be operable linked with the nucleic acid molecule of the present invention as shown in Table I, application no. 14, columns 5 and 8, preferably the coding region thereof, or homologs or fragments thereof, and described herein to achieve an expression in one of said compartments or extracellular.

[68835] [0247.1.7.14] to [0249.1.7.14] for the disclosure of these paragraphs see [0247.1.7.7] to [0249.1.7.7] above

[68836] Preferred promoters are in particular those which bring about gene expression in tissues and organs, such as leaves, roots, seeds, pollen or xylem. Examples of tissue preferred or organ preferred promoters include, but are not limited to fruit-preferred, ovulepreferred, male tissue-preferred, seed-preferred, pollen-preferred integument-preferred, tuber-preferred, stalk-preferred, pericarp-preferred, leaf-preferred, stigma-preferred, pollen-preferred, anther-preferred, petal-preferred, sepal-preferred, pedicel-preferred, silique-preferred, stem-preferred, root-preferred promoters, and the like. Especially those promoters are preferred which bring about gene expression in tissues and organs in which the biosynthesis of phytosterols takes place, like in seed cells, such as endosperm cells and cells of the developing embryo. Seed promoters are preferentially expressed during seed development and/or germination. For example, seed preferred promoters can be embryo-preferred, endosperm preferred and seed coat-preferred (see Thompson et al., BioEssays 10, 108 (1989)). Examples of seed preferred promoters include, but are not limited to, cellulose synthase (celA), Cim1, gammazein, globulin-1, maize 19 kD zein (cZ19B1), and the like. Other suitable promoters are the oilseed rape napin gene promoter (U.S. Pat. No. 5,608,152), the Vicia faba USP promoter (Baeumlein et al., Mol Gen Genet, 225 (3), 459 (1991)), the Arabidopsis oleosin promoter (WO 98/45461), the Phaseolus vulgaris phaseolin promoter (U.S. Pat. No. 5,504,200), the Brassica Bce4 promoter (WO 91/13980), the bean arc5 promoter, the carrot DcG3 promoter, or the Legumin B4 promoter (LeB4) (Baeumlein et al., Plant Journal, 2 (2), 233 (1992)), and promoters which bring about the seed-specific expression in monocotyledonous plants such as maize, barley, wheat, rye, rice and the like. Advantageous seed-specific promoters are the sucrose binding protein promoter (WO 00/26388), the phaseolin promoter and the napin promoter. Suitable promoters which must be considered are the barley Ipt2 or Ipt1 gene promoter (WO 95/15389 and WO 95/23230), and the promoters described in WO 99/16890 (promoters from the barley hordein gene, the rice glutelin gene, the rice oryzin gene, the rice prolamin gene, the wheat gliadin gene, the wheat glutelin gene, the maize zein gene, the oat glutelin gene, the sorghum kasirin gene and the rye secalin gene). Further suitable promoters are Amy32b, Amy 6-6 and Aleurain (U.S. Pat. No. 5,677,474), Bce4 (oilseed rape) (U.S. Pat. No. 5,530,149), glycinin (soya) (EP 571 741], phosphoenolpyruvate carboxylase (soya) (JP 06/62870), ADR12-2 (soya) (WO 98/08962), isocitrate lyase (oilseed rape) (U.S. Pat. No. 5,689,040]) or α-amylase (barley) (EP 781 8499. Other promoters which are available for the expression of genes in plants are leaf-specific promoters such as those described in DE-A 19 644 478 or light-regulated promoters such as, for example, the pea petE promoter.

[68837] [0251.1.7.14] to [0266.1.7.14] for the disclosure of these paragraphs see [0251.1.7.7] to [0266.1.7.7] above

[68838] An embodiment of the invention relates to a vector where the nucleic acid molecule according to the invention is linked operably to regulatory sequences which permit the expression in a prokaryotic or eukaryotic host. A further embodiment of the invention relates to a vector in which a nucleic acid sequence encoding one of the polypeptides shown in the respective line in Table II, application no. 14, columns 5 or 8, or homologs or fragments thereof, is functionally linked to a targeting sequence such as a plastidial or mitochondrial targeting sequence. A further embodiment of the invention relates to a vector in which a nucleic acid sequence encoding one of the polypeptides shown in the respective line in Table II, application no. 14, columns 5 or 8, or homologs or fragments thereof, is functionally linked to (a) regulatory sequence which permit the expression in an organelle, such as plastids or mitochondria, preferably plastids.

[68839] A further embodiment of the invention relates to a vector which comprises a nucleic acid sequence encoding one of the polypeptides shown in the respective line in Table II, application no. 14, columns 5 or 8, or homologs or fragments thereof, but no additional targeting sequence.

[68840] [0268.1.7.14] to [0273.1.7.14] for the disclosure of these paragraphs see [0268.1.7.7] to [0273.1.7.7] above

[68841] A further object of the invention relates to the use of a nucleic acid construct, e.g. an expression cassette, comprising one or more nucleic acid molecules encoding one or more polypeptides as depicted in the respective line(s) in Table II, application no. 14, columns 5 or 8, or homologs or fragments thereof, or comprising one or more nucleic acid molecules as depicted in the respective line(s) in Table I, application no. 14, columns 5 or 8, preferably the coding region thereof, or homologs or fragments thereof, or comprising a nucleic acid molecule hybridizing therewith for the transformation of a microorganism or a plant cell, plant tissues or a part of a plant

[68842] In doing so, depending on the choice of promoter, the nucleic acid molecules shown in the respective line in Table I, application no. 14, column 5 or 8, preferably the coding region thereof, or homologs or fragments thereof, or the nucleic acid molecules encoding a polypeptide as depicted in the respective line in Table II, application no. 14, column 5 or 8, or homologs or fragments thereof, can be expressed in the whole plant or specifically e.g. in the leaves, in the seeds, the nodules, in roots, in the stem or other parts of the plant. Those transgenic plants overproducing sequences, e.g. as depicted in the respective line in Table I, application no. 14, column 5 or 8, preferably the coding region thereof, or homologs or fragments thereof, the plant cell, plant tissues, plants, the reproductive material thereof, or parts thereof are a further object of the present invention.

[68843] Within the framework of the present invention, the production of the beta-sitosterol, campesterol, or stigmasterol is due to the generation or over-expression of one or more polypeptides as depicted in the respective line(s) in Table II, application no. 14, column 5 or 8, or homologs or fragments thereof, or encoded by the corresponding nucleic acid molecules as depicted in the respective line(s) in Table I, application no. 14, column 5 or 8, preferably the coding region thereof, or homologs or fragments thereof, in the non-human organism according to the invention, advantageously in the transgenic microorganism or plant according to the invention, at least for the duration of at least one plant generation.

[68844] A constitutive expression of the polypeptide as depicted in the respective line in Table II, application no. 14, column 5 or 8, or homologs or fragments thereof, or encoded by the respective nucleic acid molecule as depicted in the respective line in Table I, application no. 14, column 5 or 8, preferably the coding region thereof, or homologs or fragments thereof, may be advantageous. On the other hand, an inducible expression may also appear desirable. Expression of the polypeptide sequences of the invention can be either directed to the cytosol or to the organelles, such as plastids or mitochondria, preferably the plastids of the host cells, preferably the plant cells, or non-targeted.

[68845] for the disclosure of this paragraph see [0278.1.7.7] above

[68846] In a further embodiment the invention relates to a transgenic non-human organisms such as transgenic microorganism or transgenic plant comprising a nucleic acid molecule comprising
[68847] [1) a nucleic acid molecule selected from the group consisting of
   [68848] (a) a nucleic acid molecule encoding a polypeptide shown in Table II, application no. 14, column 5 or 8, preferably shown in Table II A, application no. 14, column 5, or in Table II A, application no. 14, column 8, or in Table II B, application no. 14, column 8, or a homolog or a fragment thereof;
   [68849] (b) a nucleic acid molecule shown in Table I, application no. 14, column 5 or 8, preferably shown in Table I A, application no. 14, column 5, or in Table I A, application no. 14, column 8, or in Table I B, application no. 14, column 8, preferably the coding region thereof, or a homolog or a fragment thereof;
   [68850] (c) a nucleic acid molecule, which, as a result of the degeneracy of the genetic code, can be derived from a polypeptide sequence depicted in column 5 or 8 of Table II, application no. 14, preferably shown in Table II A, application no. 14, column 5, or in Table II A, application no. 14, column 8, or in Table II B, application no. 14, column 8;
   [68851] (d) a nucleic acid molecule having at least 30% identity, preferably at least 40%, 50%, 60%, 70%, 75%, 80%, 85%, 90%, 95%, 96%, 97%, 98%, 99%, 99.5%, with the nucleic acid molecule sequence of a polynucleotide comprising the nucleic acid molecule shown in column 5 or 8 of Table I, application no. 14, preferably shown in Table I A, application no. 14, column 5, or in Table I A, application no. 14, column 8, or in Table I B, application no. 14, column 8, preferably the coding region thereof;
   [68852] (e) a nucleic acid molecule encoding a polypeptide having at least 30% identity, preferably at least 40%, 50% 60%, 70%, 75%, 80%, 85%, 90%, 95%, 96%, 97%, 98%, 99%, 99.5%, identity with the amino acid sequence of the polypeptide encoded by the nucleic acid molecule of (a), (b), (c) or (d);
   [68853] (f) a nucleic acid molecule which hybridizes with a nucleic acid molecule of (a), (b), (c), (d) or (e) under stringent hybridization conditions;
   [68854] (g) a nucleic acid molecule encoding a polypeptide which can be isolated with the aid of monoclonal or polyclonal antibodies made against a polypeptide encoded by one of the nucleic acid molecules of (a), (b), (c), (d), (e) or (f);
   [68855] (h) a nucleic acid molecule encoding a polypeptide comprising the consensus sequence or one or more polypeptide motifs as shown in column 8 of Table IV, application no. 14;
   [68856] (i) a nucleic acid molecule encoding a polypeptide having the activity represented by a respective protein as depicted in column 5 of Table II, application no. 14;
   [68857] (j) a nucleic acid molecule comprising a polynucleotide which is obtained by amplifying a cDNA library or a genomic library using the primers in Table III, application no. 14, column 8;
   [68858] and
   [68859] (k) nucleic acid molecule which is obtainable by screening a suitable nucleic acid library, especially a cDNA library and/or a genomic library, under stringent hybridization conditions with a probe comprising one of the sequences of the nucleic acid molecule of (a), (b), (c), (d), (e), (f), (g), (h), (i) or (j) or with a fragment of at least 15 nt, preferably 20 nt, 30 nt, 50 nt, 100 nt, 200 nt,500 nt, 1000 nt, 1500 nt, 2000 nt or 3000 nt of the nucleic acid molecule characterized in (a), (b), (c), (d), (e), (f), (g), (h), (i) or (j);
   [68860] or a nucleic acid molecule comprising a sequence which is complementary thereto; and, if desired
[68861] 2) nucleic acid molecule encoding a transit peptide, preferably encoding a plastidal transit peptide or a mitochondrial transit peptide; which are operable linked;]
   or comprising an expression cassette comprising
[68862] [0) a promoter, preferably a promoter selected from the group consisting of Big35S, PCUbi, Super and USP; and
[68863] 1) a nucleic acid molecule selected from the group consisting of
   [68864] (a) a nucleic acid molecule encoding a polypeptide shown in Table II, application no. 14, column 5 or 8, preferably shown in Table II A, application no. 14, column 5, or in Table II A, application no. 14, column 8, or in Table II B, application no. 14, column 8, or a homolog or a fragment thereof;
   [68865] (b) a nucleic acid molecule shown in Table I, application no. 14, column 5 or 8, preferably shown in Table I A, application no. 14, column 5, or in Table I A, application no. 14, column 8, or in Table I B, application no. 14, column 8, preferably the coding region thereof, or a homolog or a fragment thereof;
   [68866] (c) a nucleic acid molecule, which, as a result of the degeneracy of the genetic code, can be derived from a polypeptide sequence depicted in column 5 or 8 of Table II, application no. 14, preferably shown in Table II A, application no. 14, column 5, or in Table II A, application no. 14, column 8, or in Table II B, application no. 14, column 8;
   [68867] (d) a nucleic acid molecule having at least 30% identity, preferably at least 40%, 50%, 60%, 70%, 75%, 80%, 85%, 90%, 95%, 96%, 97%, 98%, 99%, 99.5%, with the nucleic acid molecule sequence of a polynucleotide comprising the nucleic acid molecule shown in column 5 or 8 of Table I, application no. 14, preferably shown in Table I A, application no. 14, column 5, or in Table I A, application no. 14, column 8, or in Table I B, application no. 14, column 8, preferably the coding region thereof;
   [68868] (e) a nucleic acid molecule encoding a polypeptide having at least 30% identity, preferably at least 40%, 50% 60%, 70%, 75%, 80%, 85%, 90%, 95%, 96%, 97%, 98%, 99%, 99.5%, identity with the amino acid sequence of the polypeptide encoded by the nucleic acid molecule of (a), (b), (c) or (d);
   [68869] (f) a nucleic acid molecule which hybridizes with a nucleic acid molecule of (a), (b), (c), (d) or (e) under stringent hybridization conditions;
   [68870] (g) a nucleic acid molecule encoding a polypeptide which can be isolated with the aid of monoclonal or polyclonal antibodies made against a polypeptide encoded by one of the nucleic acid molecules of (a), (b), (c), (d), (e) or (f);
   [68871] (h) a nucleic acid molecule encoding a polypeptide comprising the consensus sequence or one or more polypeptide motifs as shown in column 8 of Table IV, application no. 14;
   [68872] (i) a nucleic acid molecule encoding a polypeptide having the activity represented by a respective protein as depicted in column 5 of Table II, application no. 14;
   [68873] (j) a nucleic acid molecule comprising a polynucleotide which is obtained by amplifying a cDNA library or a genomic library using the primers in Table III, application no. 14, column 8;
   [68874] and
   [68875] (k) nucleic acid molecule which is obtainable by screening a suitable nucleic acid library, especially a cDNA library and/or a genomic library, under stringent hybridization conditions with a probe comprising one of the sequences of the nucleic acid molecule of (a), (b), (c), (d), (e), (f), (g), (h), (i) or (j) or with a fragment of at least 15 nt, preferably 20 nt, 30 nt, 50 nt, 100 nt, 200 nt,500 nt, 1000 nt, 1500 nt, 2000 nt or 3000 nt of the nucleic acid molecule characterized in (a), (b), (c), (d), (e), (f), (g), (h), (i) or (j);
   [68876] or a nucleic acid molecule comprising a sequence which is complementary thereto;
      and, if desired
[68877] 2) nucleic acid molecule encoding a transit peptide, preferably encoding a plastidal transit peptide or a mitochondrial transit peptide;
   which are operable linked;]
   or comprising or being transformed by a vector comprising
[68878] [1) a nucleic acid molecule selected from the group consisting of
   [68879] (a) a nucleic acid molecule encoding a polypeptide shown in Table II, application no.

[68880] 14, column 5 or 8, preferably shown in Table II A, application no. 14, column 5, or in Table II A, application no. 14, column 8, or in Table II B, application no. 14, column 8, or a homolog or a fragment thereof;
[68881] (b) a nucleic acid molecule shown in Table I, application no. 14, column 5 or 8, preferably shown in Table I A, application no. 14, column 5, or in Table I A, application no. 14, column 8, or in Table I B, application no. 14, column 8, preferably the coding region thereof, or a homolog or a fragment thereof;
[68882] (c) a nucleic acid molecule, which, as a result of the degeneracy of the genetic code, can be derived from a polypeptide sequence depicted in column 5 or 8 of Table II, application no. 14, preferably shown in Table II A, application no. 14, column 5, or in Table II A, application no. 14, column 8, or in Table II B, application no. 14, column 8;
[68883] (d) a nucleic acid molecule having at least 30% identity, preferably at least 40%, 50%, 60%, 70%, 75%, 80%, 85%, 90%, 95%, 96%, 97%, 98%, 99%, 99.5%, with the nucleic acid molecule sequence of a polynucleotide comprising the nucleic acid molecule shown in column 5 or 8 of Table I, application no. 14, preferably shown in Table I A, application no. 14, column 5, or in Table I A, application no. 14, column 8, or in Table I B, application no. 14, column 8, preferably the coding region thereof;
[68884] (e) a nucleic acid molecule encoding a polypeptide having at least 30% identity, preferably at least 40%, 50% 60%, 70%, 75%, 80%, 85%, 90%, 95%, 96%, 97%, 98%, 99%, 99.5%, identity with the amino acid sequence of the polypeptide encoded by the nucleic acid molecule of (a), (b), (c) or (d);
[68885] (f) a nucleic acid molecule which hybridizes with a nucleic acid molecule of (a), (b), (c), (d) or (e) under stringent hybridization conditions;
[68886] (g) a nucleic acid molecule encoding a polypeptide which can be isolated with the aid of monoclonal or polyclonal antibodies made against a polypeptide encoded by one of the nucleic acid molecules of (a), (b), (c), (d), (e) or (f);
[68887] (h) a nucleic acid molecule encoding a polypeptide comprising the consensus sequence or one or more polypeptide motifs as shown in column 8 of Table IV, application no. 14;
[68888] (i) a nucleic acid molecule encoding a polypeptide having the activity represented by a respective protein as depicted in column 5 of Table II, application no. 14;
[68889] (j) a nucleic acid molecule comprising a polynucleotide which is obtained by amplifying a cDNA library or a genomic library using the primers in Table III, application no. 14, column 8;
[68890] and
[68891] (k) nucleic acid molecule which is obtainable by screening a suitable nucleic acid library, especially a cDNA library and/or a genomic library, under stringent hybridization conditions with a probe comprising one of the sequences of the nucleic acid molecule of (a), (b), (c), (d), (e), (f), (g), (h), (i) or (j) or with a fragment of at least 15 nt, preferably 20 nt, 30 nt, 50 nt, 100 nt, 200 nt,500 nt, 1000 nt, 1500 nt, 2000 nt or 3000 nt of the nucleic acid molecule characterized in (a), (b), (c), (d), (e), (f), (g), (h), (i) or (j);
[68892] or a nucleic acid molecule comprising a sequence which is complementary thereto;]
   as well as respective transgenic cells, tissue, parts of such non-human organism, e.g. plant cells, plant tissue, part of plants, like leaves, roots, stems, blossoms, seeds, fruits, pollen and the like.
   (All the references to Tables I to IV are references to the corresponding lines of Tables I to IV.)

[68893] In a preferred embodiment of said transgenic non-human organism said nucleic acid molecule according to 1 (a), (b), (c), (d), (e), (f), (g), (h), (i), (j) or (k) encodes a polypeptide which has the activity of the respective polypeptide represented by a protein comprising a polypeptide as depicted in the respective line in column 5 of Table II, application no. 14.

[68894] In another preferred embodiment of said transgenic non-human organism said nucleic acid molecule according to 1 (a), (b), (c), (d), (e), (f), (g), (h), (i), (j) or (k) confers a generation or an increase of the respective fine chemical in a non-human organism or a part thereof as compared to a corresponding wild-type non-human organism or part thereof.

[68895] In another preferred embodiment of said transgenic non-human organism said nucleic acid molecule according to 1 (a), (b), (c), (d), (e), (f), (g), (h), (i), (j) or (k) encodes a polypeptide which has the activity of the respective polypeptide represented by a protein as depicted in the respective line in column 5 of Table II application no. 14 and confers a generation or an increase of the respective fine chemical in a non-human organism or a part thereof as compared to a corresponding wild-type non-human organism or part thereof.

[68896] In another embodiment of said transgenic non-human organism the expression cassette comprises 2) a nucleic acid molecule encoding a transit peptide, preferably encoding a plastidal transit peptide, especially in case in column 6 of Table I, application no. 14, in the same line as of the respective nucleic acid molecule according to 1) “plastidic” is depicted, or encoding a mitochondrial transit peptide, especially in case in column 6 of Table I, application no. 14, in the same line as of the respective nucleic acid molecule according to 1) “mitochondric” is depicted.

[68897] In another embodiment of said transgenic non-human organism the expression cassette does not comprise 2) a nucleic acid molecule encoding a transit peptide, especially in case in column 6 of Table I, application no. 14, in the same line as of the respective nucleic acid molecule according to 1) “non-targeted” is depicted.

[68898] In another embodiment of said transgenic non-human organism said vector comprises beneath said nucleic acid molecule according to 1 (a), (b), (c), (d), (e), (f), (g), (h), (i), (j) or (k), a promoter, preferably a promoter selected from the group consisting of Big35S, PCUbi, Super and USP, which are operable linked.

[68899] In a preferred embodiment of said transgenic non-human organism said vector comprises beneath said nucleic acid molecule according to 1 (a), (b), (c), (d), (e), (f), (g), (h), (i), (j) or (k), a promoter, preferably a promoter selected from the group consisting of Big35S, PCUbi, Super and USP, which are operable linked; and said nucleic acid molecule according to 1 (a), (b), (c), (d), (e), (f), (g), (h), (i), (j) or (k) encodes a polypeptide which has the activity of the respective polypeptide represented by a protein comprising a polypeptide as depicted in the respective line in column 5 of Table II, application no. 14.

[68900] In another preferred embodiment of said transgenic non-human organism said vector comprises beneath said nucleic acid molecule according to 1 (a), (b), (c), (d), (e), (f), (g), (h), (i), (j) or (k), a promoter, preferably a promoter selected from the group consisting of Big35S, PCUbi, Super and USP, which are operable linked; and said nucleic acid molecule according to 1 (a), (b), (c), (d), (e), (f), (g), (h), (i), (j) or (k) confers a generation or an increase of the respective fine chemical in a non-human organism or a part thereof as compared to a corresponding wild-type non-human organism or part thereof.

[68901] In another preferred embodiment of said transgenic non-human organism said vector comprises beneath said nucleic acid molecule according to 1 (a), (b), (c), (d), (e), (f), (g), (h), (i), (j) or (k), a promoter, preferably a promoter selected from the group consisting of Big35S, PCUbi, Super and USP, which are operable linked; and said nucleic acid molecule according to 1 (a), (b), (c), (d), (e), (f), (g), (h), (i), (j) or (k) encodes a polypeptide which has the activity of the respective polypeptide represented by a protein as depicted in the respective line in column 5 of Table II, application no. 14, and confers a generation or an increase of the respective fine chemical in a non-human organism or a part thereof as compared to a corresponding wild-type non-human organism or part thereof.

[68902] In another embodiment of said transgenic non-human organism said vector comprises beneath said nucleic acid molecule according to 1 (a), (b), (c), (d), (e), (f), (g), (h), (i), (j) or (k), a nucleic acid molecule encoding a transit peptide, preferably encoding a plastidal transit peptide, especially in case in column 6 of Table I, application no. 14, in the same line as of the respective nucleic acid molecule according to 1) “plastidic” is depicted, or encoding a mitochondrial transit peptide, especially in case in column 6 of Table I, application no. 14, in the same line as of the respective nucleic acid molecule according to 1) “mitochondric” is depicted, which are operable linked.

[68903] In another embodiment of said transgenic non-human organism said vector does not comprise beneath said nucleic acid molecule according to 1 (a), (b), (c), (d), (e), (f), (g), (h), (i), (j) or (k), a nucleic acid molecule encoding a transit peptide in case in column 6 of Table I, application no. 14, in the same line as of the respective nucleic acid molecule according to 1) “non-targeted” is depicted, which are operable linked.

[68904] In another embodiment of said transgenic non-human organism said vector comprises beneath said nucleic acid molecule according to 1 (a), (b), (c), (d), (e), (f), (g), (h), (i), (j) or (k), and a promoter, preferably a promoter selected from the group consisting of Big35S, PCUbi, Super and USP; a nucleic acid molecule encoding a transit peptide, preferably encoding a plastidal transit peptide, especially in case in column 6 of Table I, application no. 14, in the same line as of the respective nucleic acid molecule according to 1) “plastidic” is depicted, or encoding a mitochondrial transit peptide, especially in case in column 6 of Table I, application no. 14, in the same line as of the respective nucleic acid molecule according to 1) “mitochondric”. is depicted, which are operable linked.

[68905] In another embodiment of said transgenic non-human organism said vector does not comprise beneath said nucleic acid molecule according to 1 (a), (b), (c), (d), (e), (f), (g), (h), (i), (j) or (k), and a promoter, preferably a promoter selected from the group consisting of Big35S, PCUbi, Super and USP; a nucleic acid molecule encoding a transit peptide, especially in case in column 6 of Table I, application no. 14, in the same line as of the respective nucleic acid molecule according to 1) “non-targeted” is depicted, which are operable linked.

[68906] In another embodiment of said transgenic non-human organism said vector comprises beneath said nucleic acid molecule according to 1 (a), (b), (c), (d), (e), (f), (g), (h), (i), (j) or (k), and a promoter, preferably a promoter selected from the group consisting of Big35S, PCUbi, Super and USP; a nucleic acid molecule encoding a transit peptide, preferably encoding a plastidal transit peptide, especially in case in column 6 of Table I, application no. 14, in the same line as of the respective nucleic acid molecule according to 1) “plastidic” is depicted, or encoding a mitochondrial transit peptide, especially in case in column 6 of Table I, application no. 14, in the same line as of the respective nucleic acid molecule according to 1) “mitochondric” is depicted, which are operable linked; and wherein said nucleic acid molecule according to 1 (a), (b), (c), (d), (e), (f), (g), (h), (i), (j) or (k) encodes a polypeptide which has the activity of the respective polypeptide represented by a protein comprising a polypeptide as depicted in the respective line in column 5 of Table II, application no. 14.

[68907] In another embodiment of said transgenic non-human organism said vector does not comprise beneath said nucleic acid molecule according to 1 (a), (b), (c), (d), (e), (f), (g), (h), (i), (j) or (k), and a promoter, preferably a promoter selected from the group consisting of Big35S, PCUbi, Super and USP; a nucleic acid molecule encoding a transit peptide, especially in case in column 6 of Table I, application no. 14, in the same line as of the respective nucleic acid molecule according to 1) “non-targeted” is depicted, which are operable linked; and wherein said nucleic acid molecule according to 1 (a), (b), (c), (d), (e), (f), (g), (h), (i), (j) or (k) encodes a polypeptide which has the activity of the respective polypeptide represented by a protein comprising a polypeptide as depicted in the respective line in column 5 of Table II, application no. 14.

[68908] In another embodiment of said transgenic non-human organism said vector comprises beneath said nucleic acid molecule according to 1 (a), (b), (c), (d), (e), (f), (g), (h), (i), (j) or (k), and a promoter, preferably a promoter selected from the group consisting of Big35S, PCUbi, Super and USP; a nucleic acid molecule encoding a transit peptide, preferably encoding a plastidal transit peptide, especially in case in column 6 of Table I, application no. 14, in the same line as of the respective nucleic acid molecule according to 1) “plastidic” is depicted, or encoding a mitochondrial transit peptide, especially in case in column 6 of Table I, application no. 14, in the same line as of the respective nucleic acid molecule according to 1) “mitochondric” is depicted, which are operable linked; and wherein said nucleic acid molecule according to 1 (a), (b), (c), (d), (e), (f), (g), (h), (i), (j) or (k) confers a generation or an increase of the respective fine chemical in a non-human organism or a part thereof as compared to a corresponding wild-type non-human organism or part thereof.

[68909] In another embodiment of said transgenic non-human organism said vector does not comprise beneath said nucleic acid molecule according to 1 (a), (b), (c), (d), (e), (f), (g), (h), (i), (j) or (k), and a promoter, preferably a promoter selected from the group consisting of Big35S, PCUbi, Super and USP; a nucleic acid molecule encoding a transit peptide, especially in case in column 6 of Table I, application no. 14, in the same line as of the respective nucleic acid molecule according to 1) “non-targeted” is depicted, which are operable linked; and wherein said nucleic acid molecule according to 1 (a), (b), (c), (d), (e), (f), (g), (h), (i), (j) or (k) confers a generation or an increase of the respective fine chemical in a non-human organism or a part thereof as compared to a corresponding wild-type non-human organism or part thereof.

[68910] In another embodiment of said transgenic non-human organism said vector comprises beneath said nucleic acid molecule according to 1 (a), (b), (c), (d), (e), (f), (g), (h), (i), (j) or (k), and a promoter, preferably a promoter selected from the group consisting of Big35S, PCUbi, Super and USP; a nucleic acid molecule encoding a transit peptide, preferably encoding a plastidal transit peptide, especially in case in column 6 of Table I, application no. 14, in the same line as of the respective nucleic acid molecule according to 1) “plastidic” is depicted, or encoding a mitochondrial transit peptide, especially in case in column 6 of Table I, application no. 14, in the same line as of the respective nucleic acid molecule according to 1) “mitochondric” is depicted, which are operable linked; and wherein said nucleic acid molecule according to 1 (a), (b), (c), (d), (e), (f), (g), (h), (i), (j) or (k) encodes a polypeptide which has the activity of the respective polypeptide represented by a protein as depicted in the respective line in column 5 of Table II application no. 14 and confers a generation or an increase of the respective fine chemical in a non-human organism or a part thereof as compared to a corresponding wild-type non-human organism or part thereof.

[68911] In another embodiment of said transgenic non-human organism said vector does not comprise beneath said nucleic acid molecule according to 1 (a), (b), (c), (d), (e), (f), (g), (h), (i), (j) or (k), and a promoter, preferably a promoter selected from the group consisting of Big35S, PCUbi, Super and USP; a nucleic acid molecule encoding a transit peptide, especially in case in column 6 of Table I, application no. 14, in the same line as of the respective nucleic acid molecule according to 1) “non-targeted” is depicted, which are operable linked; and wherein said nucleic acid molecule according to 1 (a), (b), (c), (d), (e), (f), (g), (h), (i), (j) or (k) encodes a polypeptide which has the activity of the respective polypeptide represented by a protein as depicted in the respective line in column 5 of Table II application no. 14 (in the same line) and confers a generation or an increase of the respective fine chemical in a non-human organism or a part thereof as compared to a corresponding wild-type non-human organism or part thereof.

[68912] In a preferred embodiment of said transgenic non-human organism said nucleic acid molecule according to 1 (a), (b), (c), (d), (e), (f), (g), (h), (i), (j) or (k), said promoter and optionally said nucleic acid molecule encoding a transit peptide are encompassed in an expression cassette in said vector. Accordingly an embodiment the invention provides a non-human organism comprising or being transformed by a vector comprising an expression cassette comprising said nucleic acid molecule according to 1 (a), (b), (c), (d), (e), (f), (g), (h), (i), (j) or (k), said promoter and optionally said a nucleic acid molecule encoding a transit peptide, operable linked. Said expression cassette may encompass a terminator, too.

[68913] In a further embodiment the invention relates to a transgenic non-human organisms such as transgenic microorganism or transgenic plant comprising a nucleic acid molecule comprising
[68914] [1) a nucleic acid molecule selected from the group consisting of
   [68915] (a) a nucleic acid molecule encoding a polypeptide shown in Table II, application no. 14, column 5 or 8, preferably shown in Table II A, application no. 14, column 5, or in Table II A, application no. 14, column 8, or in Table II B, application no. 14, column 8, or a homolog or a fragment thereof;
   [68916] (b) a nucleic acid molecule shown in Table I, application no. 14, column 5 or 8, preferably shown in Table I A, application no. 14, column 5, or in Table I A, application no. 14, column 8, or in Table I B, application no. 14, column 8, preferably the coding region thereof, or a homolog or a fragment thereof;
   [68917] (c) a nucleic acid molecule, which, as a result of the degeneracy of the genetic code, can be derived from a polypeptide sequence depicted in column 5 or 8 of Table II, application no. 14, preferably shown in Table II A, application no. 14, column 5, or in Table II A, application no. 14, column 8, or in Table II B, application no. 14, column 8;
   [68918] (d) a nucleic acid molecule having at least 30% identity, preferably at least 40%, 50%, 60%, 70%, 75%, 80%, 85%, 90%, 95%, 96%, 97%, 98%, 99%, 99.5%, with the nucleic acid molecule sequence of a polynucleotide comprising the nucleic acid molecule shown in column 5 or 8 of Table I, application no. 14, preferably shown in Table I A, application no. 14, column 5, or in Table I A, application no. 14, column 8, or in Table I B, application no. 14, column 8, preferably the coding region thereof;
   [68919] (e) a nucleic acid molecule encoding a polypeptide having at least 30% identity, preferably at least 40%, 50% 60%, 70%, 75%, 80%, 85%, 90%, 95%, 96%, 97%, 98%, 99%, 99.5%, identity with the amino acid sequence of the polypeptide encoded by the nucleic acid molecule of (a), (b), (c) or (d);
   [68920] (f) a nucleic acid molecule which hybridizes with a nucleic acid molecule of (a), (b), (c), (d) or (e) under stringent hybridization conditions;
   [68921] (g) a nucleic acid molecule encoding a polypeptide which can be isolated with the aid of monoclonal or polyclonal antibodies made against a polypeptide encoded by one of the nucleic acid molecules of (a), (b), (c), (d), (e) or (f);
   [68922] (h) a nucleic acid molecule encoding a polypeptide comprising the consensus sequence or one or more polypeptide motifs as shown in column 8 of Table IV, application no. 14;
   [68923] (i) a nucleic acid molecule encoding a polypeptide having the activity represented by a respective protein as depicted in column 5 of Table II, application no. 14;
   [68924] (j) a nucleic acid molecule comprising a polynucleotide which is obtained by amplifying a cDNA library or a genomic library using the primers in Table III, application no.

[68925] 14, column 8;
[68926] and
[68927] (k) nucleic acid molecule which is obtainable by screening a suitable nucleic acid library, especially a cDNA library and/or a genomic library, under stringent hybridization conditions with a probe comprising one of the sequences of the nucleic acid molecule of (a), (b), (c), (d), (e), (f), (g), (h), (i) or (j) or with a fragment of at least 15 nt, preferably 20 nt, 30 nt, 50 nt, 100 nt, 200 nt,500 nt, 1000 nt, 1500 nt, 2000 nt or 3000 nt of the nucleic acid molecule characterized in (a), (b), (c), (d), (e), (f), (g), (h), (i) or (j);
[68928] or a nucleic acid molecule comprising a sequence which is complementary thereto;
   and, if desired
[68929] 2) nucleic acid molecule encoding a transit peptide, preferably encoding a plastidal transit peptide or a mitochondrial transit peptide;
   which are operable linked;]
   or comprising an expression cassette comprising
[68930] [0) a promoter, preferably a promoter selected from the group consisting of Big35S, PCUbi, Super and USP; and 1) a nucleic acid molecule selected from the group consisting of
   [68931] (a) a nucleic acid molecule encoding a polypeptide shown in Table II, application no. 14, column 5 or 8, preferably shown in Table II A, application no. 14, column 5, or in Table II A, application no. 14, column 8, or in Table II B, application no. 14, column 8, or a homolog or a fragment thereof;
   [68932] (b) a nucleic acid molecule shown in Table I, application no. 14, column 5 or 8, preferably shown in Table I A, application no. 14, column 5, or in Table I A, application no. 14, column 8, or in Table I B, application no. 14, column 8, preferably the coding region thereof, or a homolog or a fragment thereof;
   [68933] (c) a nucleic acid molecule, which, as a result of the degeneracy of the genetic code, can be derived from a polypeptide sequence depicted in column 5 or 8 of Table II, application no. 14, preferably shown in Table II A, application no. 14, column 5, or in Table II A, application no. 14, column 8, or in Table II B, application no. 14, column 8;
   [68934] (d) a nucleic acid molecule having at least 30% identity, preferably at least 40%, 50%, 60%, 70%, 75%, 80%, 85%, 90%, 95%, 96%, 97%, 98%, 99%, 99.5%, with the nucleic acid molecule sequence of a polynucleotide comprising the nucleic acid molecule shown in column 5 or 8 of Table I, application no. 14, preferably shown in Table I A, application no. 14, column 5, or in Table I A, application no. 14, column 8, or in Table I B, application no. 14, column 8, preferably the coding region thereof;
   [68935] (e) a nucleic acid molecule encoding a polypeptide having at least 30% identity, preferably at least 40%, 50% 60%, 70%, 75%, 80%, 85%, 90%, 95%, 96%, 97%, 98%, 99%, 99.5%, identity with the amino acid sequence of the polypeptide encoded by the nucleic acid molecule of (a), (b), (c) or (d);
   [68936] (f) a nucleic acid molecule which hybridizes with a nucleic acid molecule of (a), (b), (c), (d) or (e) under stringent hybridization conditions;
   [68937] (g) a nucleic acid molecule encoding a polypeptide which can be isolated with the aid of monoclonal or polyclonal antibodies made against a polypeptide encoded by one of the nucleic acid molecules of (a), (b), (c), (d), (e) or (f);
   [68938] (h) a nucleic acid molecule encoding a polypeptide comprising the consensus sequence or one or more polypeptide motifs as shown in column 8 of Table IV, application no. 14;
   [68939] (i) a nucleic acid molecule encoding a polypeptide having the activity represented by a respective protein as depicted in column 5 of Table II, application no. 14;
   [68940] (j) a nucleic acid molecule comprising a polynucleotide which is obtained by amplifying a cDNA library or a genomic library using the primers in Table III, application no. 14, column 8;
   [68941] and
   [68942] (k) nucleic acid molecule which is obtainable by screening a suitable nucleic acid library, especially a cDNA library and/or a genomic library, under stringent hybridization conditions with a probe comprising one of the sequences of the nucleic acid molecule of (a), (b), (c), (d), (e), (f), (g), (h), (i) or (j) or with a fragment of at least 15 nt, preferably 20 nt, 30 nt, 50 nt, 100 nt, 200 nt,500 nt, 1000 nt, 1500 nt, 2000 nt or 3000 nt of the nucleic acid molecule characterized in (a), (b), (c), (d), (e), (f), (g), (h), (i) or (j);
   [68943] or a nucleic acid molecule comprising a sequence which is complementary thereto;]
      and, if desired
[68944] 2) nucleic acid molecule encoding a transit peptide, preferably encoding a plastidal transit peptide or a mitochondrial transit peptide;
   which are operable linked;]
   or comprising or being transformed by a vector comprising
[68945] [1) a nucleic acid molecule selected from the group consisting of
   [68946] (a) a nucleic acid molecule encoding a polypeptide shown in Table II, application no. 14, column 5 or 8, preferably shown in Table II A, application no. 14, column 5, or in Table II A, application no. 14, column 8, or in Table II B, application no. 14, column 8, or a homolog or a fragment thereof;
   [68947] (b) a nucleic acid molecule shown in Table I, application no. 14, column 5 or 8, preferably shown in Table I A, application no. 14, column 5, or in Table I A, application no. 14, column 8, or in Table I B, application no. 14, column 8, preferably the coding region thereof, or a homolog or a fragment thereof;
   [68948] (c) a nucleic acid molecule, which, as a result of the degeneracy of the genetic code, can be derived from a polypeptide sequence depicted in column 5 or 8 of Table II, application no. 14, preferably shown in Table II A, application no. 14, column 5, or in Table II A, application no. 14, column 8, or in Table II B, application no. 14, column 8;
   [68949] (d) a nucleic acid molecule having at least 30% identity, preferably at least 40%, 50%, 60%, 70%, 75%, 80%, 85%, 90%, 95%, 96%, 97%, 98%, 99%, 99.5%, with the nucleic acid molecule sequence of a polynucleotide comprising the nucleic acid molecule shown in column 5 or 8 of Table I, application no. 14, preferably shown in Table I A, application no. 14, column 5, or in Table I A, application no. 14, column 8, or in Table I B, application no. 14, column 8, preferably the coding region thereof;
   [68950] (e) a nucleic acid molecule encoding a polypeptide having at least 30% identity, preferably at least 40%, 50% 60%, 70%, 75%, 80%, 85%, 90%, 95%, 96%, 97%, 98%, 99%, 99.5%, identity with the amino acid sequence of the polypeptide encoded by the nucleic acid molecule of (a), (b), (c) or (d);
   [68951] (f) a nucleic acid molecule which hybridizes with a nucleic acid molecule of (a), (b), (c), (d) or (e) under stringent hybridization conditions;
   [68952] (g) a nucleic acid molecule encoding a polypeptide which can be isolated with the aid of monoclonal or polyclonal antibodies made against a polypeptide encoded by one of the nucleic acid molecules of (a), (b), (c), (d), (e) or (f);
   [68953] (h) a nucleic acid molecule encoding a polypeptide comprising the consensus sequence or one or more polypeptide motifs as shown in column 8 of Table IV, application no. 14;
   [68954] (i) a nucleic acid molecule encoding a polypeptide having the activity represented by a respective protein as depicted in column 5 of Table II, application no. 14;
   [68955] (j) a nucleic acid molecule comprising a polynucleotide which is obtained by amplifying a cDNA library or a genomic library using the primers in Table III, application no. 14, column 8;
   [68956] and
   [68957] (k) nucleic acid molecule which is obtainable by screening a suitable nucleic acid library, especially a cDNA library and/or a genomic library, under stringent hybridization conditions with a probe comprising one of the sequences of the nucleic acid molecule of (a), (b), (c), (d), (e), (f), (g), (h), (i) or (j) or with a fragment of at least 15 nt, preferably 20 nt, 30 nt, 50 nt, 100 nt, 200 nt,500 nt, 1000 nt, 1500 nt, 2000 nt or 3000 nt of the nucleic acid molecule characterized in (a), (b), (c), (d), (e), (f), (g), (h), (i) or (j);
   [68958] or a nucleic acid molecule comprising a sequence which is complementary thereto;]
      whereby, preferably, the nucleic acid molecule according to 1 (a), (b), (c), (d), (e), (f), (g), (h), (i), (j) or (k) distinguishes over the sequence depicted in Table I A and/or I B, application no. 14, column 5 or 8, or the coding regions thereof, by one or more nucleotides (especially but not exceeding 5%, preferably 4%, 3%, 2%, 1%, 0.5%, 0.2% or 0.1%). In an embodiment, the nucleic acid molecule of the invention does not consist of the sequence shown in Table I A and/or I B, application no. 14, column 5 or 8, or the coding region thereof. In another embodiment, the nucleic acid molecule of the present invention, preferably the coding region thereof, is at least 30%, 40%, 50%, 60%, 70%, 80%, 90%, 95% identical but less than 100%, 99.999%, 99.99%, 99.9%, 99%, 98%, 97%, 96% or 95% identical to the sequence shown in Table I A and/or I B, application no. 14, column 5 or 8, or the coding region thereof, respectively. In a further embodiment the nucleic acid molecule does not encode the polypeptide sequence shown in Table II A and/or II B, application no. 14, column 5 or 8 but homologs thereof. Accordingly, in one embodiment, the nucleic acid molecule of the present invention encodes in one embodiment a polypeptide which differs at least in one or more amino acids (especially but not exceeding 5%, preferably 4%, 3%, 2%, 1%, 0.5%, 0.2% or 0.1%) from the polypeptide shown in Table II, application no. 14, column 5 or 8 and does not encode a protein of the sequence shown in Table II A and/or II B, application no. 14, column 5 or 8. Accordingly, in one embodiment, the protein encoded by a sequence of a nucleic acid according to 1 (a), (b), (c), (d), (e), (f), (g), (h), (i), (j) or (k) does not consist of the sequence shown in Table I A and/or I B, application no. 14, column 5 or 8, or the coding region thereof. In a further embodiment, the protein of the present invention is at least 30%, 40%, 50%, 60%, 70%, 80%, 90%, 95% identical to protein sequence depicted in Table II A and/or II B, application no. 14, column 5 or 8 but less than 100%, preferably less than 99.999%, 99.99%, 99.9%, 99%, 98%, 97%, 96% or 95% identical to the sequence shown in Table II A and/or II B, application no. 14, column 5 or 8; as well as respective transgenic cells, tissue, parts of such non-human organism, e.g. plant cells, plant tissue, part of plants, like leaves, roots, stems, blossoms, seeds, fruits, pollen and the like.
      (All the references to Tables I to IV are references to the corresponding lines of Tables I to IV.)

[68959] In a preferred embodiment of said transgenic non-human organism said nucleic acid molecule according to 1 (a), (b), (c), (d), (e), (f), (g), (h), (i), (j) or (k) encodes a polypeptide which has the activity of the respective polypeptide represented by a protein comprising a polypeptide as depicted in the respective line in column 5 of Table II, application no. 14.

[68960] In another preferred embodiment of said transgenic non-human organism said nucleic acid molecule according to 1 (a), (b), (c), (d), (e), (f), (g), (h), (i), (j) or (k) confers a generation or an increase of the respective fine chemical in a non-human organism or a part thereof as compared to a corresponding wild-type non-human organism or part thereof.

[68961] In another preferred embodiment of said transgenic non-human organism said nucleic acid molecule according to 1 (a), (b), (c), (d), (e), (f), (g), (h), (i), (j) or (k) encodes a polypeptide which has the activity of the respective polypeptide represented by a protein as depicted in the respective line in column 5 of Table II application no. 14 and confers a generation or an increase of the respective fine chemical in a non-human organism or a part thereof as compared to a corresponding wild-type non-human organism or part thereof.

[68962] In another embodiment of said transgenic non-human organism the expression cassette comprises 2) a nucleic acid molecule encoding a transit peptide, preferably encoding a plastidal transit peptide, especially in case in column 6 of Table I, application no. 14, in the same line as of the respective nucleic acid molecule according to 1) “plastidic” is depicted, or encoding a mitochondrial transit peptide, especially in case in column 6 of Table I, application no. 14, in the same line as of the respective nucleic acid molecule according to 1) “mitochondric” is depicted.

[68963] In another embodiment thereof the expression cassette does not comprise 2) a nucleic acid molecule encoding a transit peptide, especially in case in column 6 of Table I, application no. 14, in the same line as of the respective nucleic acid molecule according to 1) “non-targeted” is depicted.

[68964] In another embodiment of said transgenic non-human organism said vector comprises beneath said nucleic acid molecule according to 1 (a), (b), (c), (d), (e), (f), (g), (h), (i), (j) or (k), a promoter, preferably a promoter selected from the group consisting of Big35S, PCUbi, Super and USP, which are operable linked.

[68965] In a preferred embodiment of said transgenic non-human organism said vector comprises beneath said nucleic acid molecule according to 1 (a), (b), (c), (d), (e), (f), (g), (h), (i), (j) or (k), a promoter, preferably a promoter selected from the group consisting of Big35S, PCUbi, Super and USP, which are operable linked; and said nucleic acid molecule according to 1 (a), (b), (c), (d), (e), (f), (g), (h), (i), (j) or (k) encodes a polypeptide which has the activity of the respective polypeptide represented by a protein comprising a polypeptide as depicted in the respective line in column 5 of Table II, application no. 14.

[68966] In another preferred embodiment of said transgenic non-human organism said vector comprises beneath said nucleic acid molecule according to 1 (a), (b), (c), (d), (e), (f), (g), (h), (i), (j) or (k), a promoter, preferably a promoter selected from the group consisting of Big35S, PCUbi, Super and USP, which are operable linked; and said nucleic acid molecule according to 1 (a), (b), (c), (d), (e), (f), (g), (h), (i), (j) or (k) confers a generation or an increase of the respective fine chemical in a non-human organism or a part thereof as compared to a corresponding wild-type non-human organism or part thereof.

[68967] In another preferred embodiment of said transgenic non-human organism said vector comprises beneath said nucleic acid molecule according to 1 (a), (b), (c), (d), (e), (f), (g), (h), (i), (j) or (k), a promoter, preferably a promoter selected from the group consisting of Big35S, PCUbi, Super and USP, which are operable linked; and said nucleic acid molecule according to 1 (a), (b), (c), (d), (e), (f), (g), (h), (i), (j) or (k) encodes a polypeptide which has the activity of the respective polypeptide represented by a protein as depicted in the same line in column 5 of Table II, application no. 14, and confers a generation or an increase of the respective fine chemical in a non-human organism or a part thereof as compared to a corresponding wild-type non-human organism or part thereof.

[68968] In another embodiment of said transgenic non-human organism said vector comprises beneath said nucleic acid molecule according to 1 (a), (b), (c), (d), (e), (f), (g), (h), (i), (j) or (k), a nucleic acid molecule encoding a transit peptide, preferably encoding a plastidal transit peptide, especially in case in column 6 of Table I, application no. 14, in the same line as of the respective nucleic acid molecule according to 1) “plastidic” is depicted, or encoding a mitochondrial transit peptide, especially in case in column 6 of Table I, application no. 14, in the same line as of the respective nucleic acid molecule according to 1) “mitochondric” is depicted, which are operable linked.

[68969] In another embodiment of said transgenic non-human organism said vector does not comprise beneath said nucleic acid molecule according to 1 (a), (b), (c), (d), (e), (f), (g), (h), (i), (j) or (k), a nucleic acid molecule encoding a transit peptide in case in column 6 of Table I, application no. 14, in the same line as of the respective nucleic acid molecule according to 1) “non-targeted” is depicted, which are operable linked.

[68970] In another embodiment of said transgenic non-human organism said vector comprises beneath said nucleic acid molecule according to 1 (a), (b), (c), (d), (e), (f), (g), (h), (i), (j) or (k), and a promoter, preferably a promoter selected from the group consisting of Big35S, PCUbi, Super and USP; a nucleic acid molecule encoding a transit peptide, preferably encoding a plastidal transit peptide, especially in case in column 6 of Table I, application no. 14, in the same line as of the respective nucleic acid molecule according to 1) “plastidic” is depicted, or encoding a mitochondrial transit peptide, especially in case in column 6 of Table I, application no. 14, in the same line as of the respective nucleic acid molecule according to 1) “mitochondric” is depicted, which are operable linked.

[68971] In another embodiment of said transgenic non-human organism said vector does not comprise beneath said nucleic acid molecule according to 1 (a), (b), (c), (d), (e), (f), (g), (h), (i), (j) or (k), and a promoter, preferably a promoter selected from the group consisting of Big35S, PCUbi, Super and USP; a nucleic acid molecule encoding a transit peptide, especially in case in column 6 of Table I, application no. 14, in the same line as of the respective nucleic acid molecule according to 1) “non-targeted” is depicted, which are operable linked.

[68972] In another embodiment of said transgenic non-human organism said vector comprises beneath said nucleic acid molecule according to 1 (a), (b), (c), (d), (e), (f), (g), (h), (i), (j) or (k), and a promoter, preferably a promoter selected from the group consisting of Big35S, PCUbi, Super and USP; a nucleic acid molecule encoding a transit peptide, preferably encoding a plastidal transit peptide, especially in case in column 6 of Table I, application no. 14, in the same line as of the respective nucleic acid molecule according to 1) “plastidic” is depicted, or encoding a mitochondrial transit peptide, especially in case in column 6 of Table I, application no. 14, in the same line as of the respective nucleic acid molecule according to 1) “mitochondric” is depicted, which are operable linked; and wherein said nucleic acid molecule according to 1 (a), (b), (c), (d), (e), (f), (g), (h), (i), (j) or (k) encodes a polypeptide which has the activity of the respective polypeptide represented by a protein comprising a polypeptide as depicted in the respective line in column 5 of Table II, application no. 14.

[68973] In another embodiment of said transgenic non-human organism said vector does not comprise beneath said nucleic acid molecule according to 1 (a), (b), (c), (d), (e), (f), (g), (h), (i), (j) or (k), and a promoter, preferably a promoter selected from the group consisting of Big35S, PCUbi, Super and USP; a nucleic acid molecule encoding a transit peptide, especially in case in column 6 of Table I, application no. 14, in the same line as of the respective nucleic acid molecule according to 1) “non-targeted” is depicted, which are operable linked; and wherein said nucleic acid molecule according to 1 (a), (b), (c), (d), (e), (f), (g), (h), (i), (j) or (k) encodes a polypeptide which has the activity of the respective polypeptide represented by a protein comprising a polypeptide as depicted in the respective line in column 5 of Table II, application no. 14.

[68974] In another embodiment of said transgenic non-human organism said vector comprises beneath said nucleic acid molecule according to 1 (a), (b), (c), (d), (e), (f), (g), (h), (i), (j) or (k), and a promoter, preferably a promoter selected from the group consisting of Big35S, PCUbi, Super and USP; a nucleic acid molecule encoding a transit peptide, preferably encoding a plastidal transit peptide, especially in case in column 6 of Table I, application no. 14, in the same line as of the respective nucleic acid molecule according to 1) “plastidic” is depicted, or encoding a mitochondrial transit peptide, especially in case in column 6 of Table I, application no. 14, in the same line as of the respective nucleic acid molecule according to 1) “mitochondric” is depicted, which are operable linked; and wherein said nucleic acid molecule according to 1 (a), (b), (c), (d), (e), (f), (g), (h), (i), (j) or (k) confers a generation or an increase of the respective fine chemical in a non-human organism or a part thereof as compared to a corresponding wild-type non-human organism or part thereof.

[68975] In another embodiment of said transgenic non-human organism said vector does not comprise beneath said nucleic acid molecule according to 1 (a), (b), (c), (d), (e), (f), (g), (h), (i), (j) or (k), and a promoter, preferably a promoter selected from the group consisting of Big35S, PCUbi, Super and USP; a nucleic acid molecule encoding a transit peptide, especially in case in column 6 of Table I, application no. 14, in the same line as of the respective nucleic acid molecule according to 1) “non-targeted” is depicted, which are operable linked; and wherein said nucleic acid molecule according to 1 (a), (b), (c), (d), (e), (f), (g), (h), (i), (j) or (k) confers a generation or an increase of the respective fine chemical in a non-human organism or a part thereof as compared to a corresponding wild-type non-human organism or part thereof.

[68976] In another embodiment of said transgenic non-human organism said vector comprises beneath said nucleic acid molecule according to 1 (a), (b), (c), (d), (e), (f), (g), (h), (i), (j) or (k), and a promoter, preferably a promoter selected from the group consisting of Big35S, PCUbi, Super and USP; a nucleic acid molecule encoding a transit peptide, preferably encoding a plastidal transit peptide, especially in case in column 6 of Table I, application no. 14, in the same line as of the respective nucleic acid molecule according to 1) “plastidic” is depicted, or encoding a mitochondrial transit peptide, especially in case in column 6 of Table I, application no. 14, in the same line as of the respective nucleic acid molecule according to 1) “mitochondric” is depicted, which are operable linked; and wherein said nucleic acid molecule according to 1 (a), (b), (c), (d), (e), (f), (g), (h), (i), (j) or (k) encodes a polypeptide which has the activity of the respective polypeptide represented by a protein as depicted in the respective line in column 5 of Table II application no. 14 and confers a generation or an increase of the respective fine chemical in a non-human organism or a part thereof as compared to a corresponding wild-type non-human organism or part thereof.

[68977] In another embodiment of said transgenic non-human organism said vector does not comprise beneath said nucleic acid molecule according to 1 (a), (b), (c), (d), (e), (f), (g), (h), (i), (j) or (k), and a promoter, preferably a promoter selected from the group consisting of Big35S, PCUbi, Super and USP; a nucleic acid molecule encoding a transit peptide, especially in case in column 6 of Table I, application no. 14, in the same line as of the respective nucleic acid molecule according to 1) “non-targeted” is depicted, which are operable linked; and wherein said nucleic acid molecule according to 1 (a), (b), (c), (d), (e), (f), (g), (h), (i), (j) or (k) encodes a polypeptide which has the activity of the respective polypeptide represented by a protein as depicted in the respective line in column 5 of Table II application no. 14 and confers a generation or an increase of the respective fine chemical in a non-human organism or a part thereof as compared to a corresponding wild-type non-human organism or part thereof.

[68978] In a preferred embodiment of said transgenic non-human organism said nucleic acid molecule according to 1 (a), (b), (c), (d), (e), (f), (g), (h), (i), (j) or (k), said promoter and optionally said nucleic acid molecule encoding a transit peptide are encompassed in an expression cassette in said vector. Accordingly an embodiment the invention provides a non-human organism comprising or being transformed by a vector comprising an expression cassette comprising said nucleic acid molecule according to 1 (a), (b), (c), (d), (e), (f), (g), (h), (i), (j) or (k), said promoter and optionally said a nucleic acid molecule encoding a transit peptide, operable linked. Said expression cassette may encompass a terminator, too.

[68979] [0291.1.7.14] to [0299.1.7.14] for the disclosure of these paragraphs see [0291.1.7.7] to [0299.1.7.7] above

[68980] The term “biological active portion” or “biological activity” means a polypeptide as depicted in the respective line in Table II, application no. 14, column 3 or a portion of said polypeptide which still has at least 10% or 20%, preferably 30%, 40%, 50% or 60%, especially preferably 70%, 75%, 80%, 90% or 95% of the enzymatic or biological activity of the natural or starting enzyme or protein.

[68981] [0301.1.7.14] to [0304.1.7.14] for the disclosure of these paragraphs see [0301.1.7.7] to [0304.1.7.7] above

[68982] Synthetic oligonucleotide primers for the amplification, e.g. as shown in the respective line in Table III, application no. 14, column 8, by means of polymerase chain reaction can be generated on the basis of a sequence shown herein, for example the sequence shown in the respective line in Table I, application no. 14, columns 5 or 8, or the sequences derived from Table II, application no. 14, columns 5 or 8, respectively.

[68983] Moreover, it is possible to identify a conserved region of a protein from various organism by carrying out protein sequence alignments with the polypeptide encoded by the nucleic acid molecules of the present invention, in particular with the sequences encoded by the nucleic acid molecule shown in the respective line in column 5 or 8 of Table I, application no. 14, from which conserved regions, and in turn, degenerate primers can be derived. Conserved regions are those, which show a very little variation in the amino acid in one particular position of several homologs from different origin. The consensus sequence and polypeptide motifs shown in the respective line in column 8 of Table IV, application no. 14, are derived from such alignments of homologous proteins.

[68984] In an embodiment of the present invention, in the method of the present invention the activity of a polypeptide comprising or consisting of a consensus sequence or at least one polypeptide motif shown in the respective line in Table IV, application no. 14, column 8, is increased. In another embodiment thereof, the method of the present invention relates to a polypeptide comprising or consisting of a consensus sequence shown in the respective line in Table IV, application no. 14, column 8 or comprising at least one polypeptide motif shown in the respective line in Table IV, application no. 14, column 8, whereby not more than 20, 15, 10, 9, 8, 7, 6, 5 4, 3, 2 or 1, or 0 of the amino acid positions indicated can be replaced by any amino acid. In another embodiment thereof, the method of the present invention relates to a polypeptide comprising or consisting of a consensus sequence shown in the respective line in Table IV, application no. 14, column 8 or comprising at least one polypeptide motif shown in the respective line in Table IV, application no. 14, column 8, whereby not more than 15%, 10%, 5%, 4%, 3%, 2% or 1%, or 0% of the amino acid positions defined as distinct specific amino acids are/is replaced by another amino acid. In another embodiment thereof, the method of the present invention relates to a polypeptide comprising or consisting of a consensus sequence shown in the respective line in Table IV, application no. 14, column 8 or comprising at least one polypeptide motif shown in the respective line in Table IV, application no. 14, column 8, whereby not more than 20, 15, 10, 9, 8, 7, 6, 5, 4, 3, 2 or 1, or 0 amino acids are inserted into a consensus sequence or polypeptide motif.

[68985] In an embodiment of the present invention, in the method of the present invention the activity of a polypeptide comprising or consisting of a consensus sequence or at least one polypeptide motif shown in the respective line in Table IV, application no. 14, column 8, is increased, whereby said polypeptide distinguishes over the sequence depicted in Table II, application no. 14, columns 5 or 8 by one or more amino acids.

[68986] In one embodiment, said polypeptide of the invention distinguishes over the sequence shown in the respective line in Table II, application no. 14, columns 5 and 8 by more than 5, 6, 7, 8 or 9 amino acids, preferably by more than 10, 15, 20, 25 or 30 amino acids, even more preferred are more than 40, 50, or 60 amino acids and, preferably, the sequence of the polypeptide of the invention distinguishes from the sequence shown in the respective line in Table II B, application no. 14, columns 5 and 8 by not more than 80%, 70%, 60%, 50%, 40%, 30%, 20%, 10%, 5%, 4%, 3%, 2%, 1% or 0.5%. In another embodiment, said polypeptide of the invention does not consist of the sequence shown in Table II, application no. 14, columns 5 or 8.

[68987] [0309.1.7.14] to [0321.1.7.14] for the disclosure of these paragraphs see [0309.1.7.7] to [0321.1.7.7] above

[68988] Polypeptides having above-mentioned activity, i.e. conferring the production or the increased production of the fine chemical beta-sitosterol, campesterol, or stigmasterol as compared to a corresponding, e.g. non-transformed, wild type non-human organism, like a microorganism or a plant cell, plant or part thereof, can be encoded by other DNA sequences which hybridize to the sequences shown in the respective line in Table I, application no. 14, columns 5 and 8, preferably the coding region thereof, at least under relaxed hybridization conditions and which encode the expression of polypeptides conferring the production or the increased production of the respective fine chemical beta-sitosterol, campesterol, or stigmasterol as compared to a corresponding, e.g. non-transformed, wild type non-human organism, like a microorganism or a plant cell, plant or part thereof.

[68989] [0323.1.7.14] to [0329.1.7.14] for the disclosure of theses paragraphs see [0323.1.7.7] to [0329.1.7.7] above

[68990] Further, the nucleic acid molecule of the invention comprises a nucleic acid molecule, which is a complement of one of the nucleotide sequences of above-mentioned nucleic acid molecules or a portion thereof. A nucleic acid molecule or its sequence which is complementary to one of the nucleotide molecules or sequences shown in the respective line in Table I, application no. 14, columns 5 or 8, preferably the coding region thereof, homologs or fragments thereof, is one which is sufficiently complementary to one of the nucleotide molecules or sequences shown in the respective line in Table I, application no. 14, columns 5 or 8, preferably the coding region thereof, homologs or fragments thereof, such that it can hybridize to one of the nucleotide sequences shown in Table I, application no. 14, columns 5 or 8, preferably the coding region thereof, homologs or fragments thereof, thereby forming a stable duplex. Preferably, the hybridization is performed under stringent hybridization conditions. However, a complement of one of the herein disclosed sequences is preferably a sequence complement thereto according to the base pairing of nucleic acid molecules well known to the skilled person. For example, the bases A and G undergo base pairing with the bases T and U or C, resp. and visa versa. Modifications of the bases can influence the base-pairing partner.

[68991] The nucleic acid molecule of the invention comprises a nucleotide sequence which is at least about 30%, 35%, 40%, 45%, 50%, 55%, 60%, 65%, 70%, 75%, 80%, 90%, 95%, 96%, 97%, 98%, 99%, 99.5% or more homologous to a nucleotide sequence shown in Table I, application no. 14, columns 5 or 8, preferably the coding region thereof, homologs or fragments thereof, and preferably has above-mentioned activity, in particular conferring the production or the increased production of the fine chemical beta-sitosterol, campesterol, or stigmasterol, respectively, after increasing the activity or an activity of a gene as shown in the respective line in Table I or of a gene product, e.g. as shown in the respective line in Table II, application no. 14, column 5 or 8, by for example in one embodiment expression either in the cytosol or in an organelle such as a plastid or mitochondria or both, preferably in a plastid, or in another embodiment non-targeted or targeted.

[68992] The nucleic acid molecule of the invention comprises a nucleotide sequence or molecule which hybridizes, preferably hybridizes under stringent conditions as defined herein, to one of the nucleic acid molecule shown in the respective line in Table I, preferably Table IB, application no. 14, columns 5 or 8, preferably the coding region thereof, fragments or homologs thereof, and encodes a protein having above-mentioned activity, e.g. conferring the production or the increased production of the respective fine chemical beta-sitosterol, campesterol, or stigmasterol as compared to a corresponding, e.g. non-transformed, wild type non-human organism, like a microorganism or a plant cell, plant or part thereof, by for example in one embodiment expression either in the cytosol or in an organelle such as a plastid or mitochondria or both, preferably in a plastid, or in another embodiment non-targeted or targeted, and optionally, the activity thereof is selected from the group consisting of 2-oxoglutarate dehydrogenase E1 subunit, ABC metal ion transporter substrate-binding protein, acetyl-CoA acetyltransferase, acetyltransferase, acid shock protein, acyl transferase, amidophosphoribosyltransferase, ankyrin repeat family protein, ATP-binding component of a transport system, b1401-protein, B1795-protein, b2107-protein, b2376-protein, b2399-protein, b2474-protein, b2513-protein, b2654-protein, b3151-protein, b3989-protein, b4029-protein, b4205-protein, C-4 sterol methyl oxidase, calcium-dependent protein kinase, cation transport protein, cation-transporting ATPase, CTP synthase, CTP synthetase, cyclin, cyclin D, eukaryotic translation initiation factor 5, glucose dehydrogenase, glucose-6-phosphate 1-dehydrogenase, glutaredoxin, homocitrate synthase, hydrolase, lipoprotein precursor, L-ribulose-5-phosphate 4-epimerase, membrane transport protein, methyltransferase, monothiol glutaredoxin, multidrug resistance protein, multiple antibiotic resistance protein, murein transglycosylase, NADH dehydrogenase I chain N, oxidoreductase, permease protein, permease protein of ABC transporter, phenylacetic acid degradation protein, phosphoribulokinase, polygalacturonase, protein kinase, protein phosphatase, putative transport system permease protein, putrescine transport system permease protein, recombinase A, sec-independent protein translocase, sll0406-protein, sll1761-protein, sodium/proton antiporter, sterol desaturase, threonine dehydrogenase, threonine synthase, transcription factor, tryptophan synthase alpha chain, TTC1386-protein, xanthine dehydrogenase, ydl235c-protein, ynl321w-protein, and ypr170c-protein, respectively.

[68993] Moreover, the nucleic acid molecule of the invention can comprise only a porganism tion of the coding region of one of the nucleic acid molecules depicted in Table I, application no. 14, columns 5 or 8, for example a fragment which can be used as a probe or primer or a fragment encoding a biologically active portion of the polypeptide of the present invention or of a polypeptide used in the process of the present invention, i.e. having above-mentioned activity, e.g. conferring the production or the increased production of the respective fine chemical beta-sitosterol, campesterol, or stigmasterol as compared to a corresponding, e.g. non-transformed, wild type non-human organism, like a microorganism or a plant cell, plant or part thereof, by for example in one embodiment expression either in the cytosol or in an organelle such as a plastid or mitochondria or both, preferably in a plastid, or in another embodiment non-targeted or targeted. The nucleotide sequences determined from the cloning of the present protein-accordingto-the-invention-encoding gene allows for the generation of probes and primers designed for use in identifying and/or cloning its homologues from other cell types and organisms. The probe/primer typically comprises a substantially purified oligonucleotide. The oligonucleotide typically comprises a region of nucleotide sequence that hybridizes under stringent conditions to at least about 12, 15 preferably about 20 or 25, more preferably about 40, 50 or 75 consecutive nucleotides of a sense strand of one of the sequences set forth, e.g., in the respective line in Table I, application no. 14, column 5 or 8, preferably the coding region thereof, or a homolog or a fragment thereof, an anti-sense sequence of one of the sequences, e.g., set forth in the respective line in Table I, application no. 14, columns 5 or 8, preferably the coding region thereof, or a homolog or a fragment thereof or naturally occurring mutants thereof. Primers based on a nucleic acid molecule of invention can be used in PCR reactions to clone homologs of the polypeptide of the invention or of the polypeptide used in the process of the invention, e.g. as the primers described in the examples of the present invention, e.g. as shown in the examples. A PCR with the primers shown in the respective line in Table III, column 8 will result in a fragment of the gene product as shown in Table II, application no. 14, column 5.

[68994] Primer sets are interchangeable. The person skilled in the art knows how to design and combine said primers to result in the desired product, e.g. in a full length clone or a partial sequence. Probes based on the sequences of the nucleic acid molecule of the invention or used in the process of the present invention can be used to detect transcripts or genomic sequences encoding the same or homologous proteins. The probe can further comprise a label group attached thereto, e.g. the label group can be a radioisotope, a fluorescent compound, an enzyme, or an enzyme co-factor. Such probes can be used as a part of a genomic marker test kit for identifying cells which express a polypeptide of the invention or used in the process of the present invention, such as by measuring a level of an encoding nucleic acid molecule in a sample of cells, e.g. detecting mRNA levels or determining, whether a genomic gene comprising the sequence of the polynucleotide of the invention or used in the processes of the present invention has been mutated or deleted.

[68995] As the expression of a respective nucleic acids of the invention is related to the synthesis of the respective fine chemical beta-sitosterol, campesterol, or stigmasterol its function as a probe extends to the detection of microorganisms, plant tissues, plants, plant variets, plant ecotypes or plant genera with varying capability or potential for synthesis of the respective fine chemical beta-sitosterol, campesterol, or stigmasterol. Therefore in one embodiment the present invention relates to a method for analyzing the capability or potential of a plant tissue, a plant, a plant variety or plant ecotype to produce the fine chemical beta-sitosterol, campesterol, or stigmasterol by using the nucleic acid of the invention or parts thereof as a probe to detect the amount of the nucleic acid of the invention in the non-human organism or a part thereof in comparison to another non-human organism.

[68996] The nucleic acid molecule of the invention encodes a polypeptide or portion thereof which includes an amino acid sequence which is sufficiently homologous to the amino acid sequence shown in respective line in Table II, application no. 14, columns 5 or 8 such that the protein or portion thereof maintains the ability to confer the production or the increased production of the respective fine chemical beta-sitosterol, campesterol, or stigmasterol as compared to a corresponding, e.g. non-transformed, wild type non-human organism, like a microorganism or a plant cell, plant or part thereof, in particular increasing the activity as mentioned above or as described in the examples in microorganisms or plants.

[68997] As used herein, the language “sufficiently homologous” refers to proteins or portions thereof which have amino acid sequences which include a minimum number of identical or equivalent amino acids (e.g. an amino acid which has a similar side chain as an amino acid in one of the sequences of the polypeptide of the present invention) to an amino acid sequence shown in the respective line in Table II, application no. 14, columns 5 or 8 such that the protein or portion thereof is able to confer the production or the increased production of the respective fine chemical beta-sitosterol, campesterol, or stigmasterol as compared to a corresponding, e.g. non-transformed, wild type non-human organism, like a microorganism or a plant cell, plant or part thereof. For example having the activity of a protein as shown in the respective line in Table II, application no. 14, column 3 and as described herein.

[68998] In an embodiment of the present invention, the nucleic acid molecule of the present invention comprises a nucleic acid molecule that encodes a portion of the protein of the present invention. The protein is at least about 30%, 35%, 40%, 45% 50%, 55%, 60%, 65%, 70%, 75%, 80%, 85%, 90%, 91%, 92%, 93%, 94%, 95%, 96%, 97%, 98%, 99%, 99.5% or more homologous to an entire amino acid sequence shown in the respective line of Table II, application no. 14, column 5 or 8 and has the above-mentioned activity, e.g. conferring the production or the increased production of the respective fine chemical beta-sitosterol, campesterol, or stigmasterol as compared to a corresponding, e.g. non-transformed, wild type non-human organism, like a microorganism or a plant cell, plant or part thereof by, for example in a embodiment expression either in the cytosol or in an organelle such as a plastid or mitochondria or both, preferably in a plastid, or in another embodiment by targeted or non-targeted expression.

[68999] for the disclosure of this paragraph see [0338.1.7.7] above

[69000] for the disclosure of this paragraph see [0339.1.7.7] above

[69001] The invention further relates to nucleic acid molecules or methods using said nucleic acid molecules that differ from one of the nucleotide sequences shown in the respective line in Table I, application no. 14, columns 5 or 8, preferably the coding region thereof, or fragments or homologs thereof, due to degeneracy of the genetic code but encode a polypeptide of the present invention, in particular a polypeptide having the above-mentioned activity, e.g. as those polypeptides depicted in the respective line in Table II, application no. 14, columns 5 or 8, fragments or homologs thereof. Advantageously, the nucleic acid molecule of the invention comprises, or in an other embodiment has, a nucleotide sequence encoding a protein comprising, or in an other embodiment having, an amino acid sequence shown in the respective line in Table II, application no. 14, columns 5 or 8, fragments or homologs thereof. In a further embodiment, the nucleic acid molecule of the invention encodes a full length protein which is substantially homologous to an amino acid sequence shown in the respective line in Table II, application no. 14, columns 5 or 8, or homologs thereof. However, in an embodiment, the nucleic acid molecule of the present invention does not consist of the sequence shown in the respective line in Table I, preferably Table IA, application no. 14, columns 5 or 8, preferably the coding region thereof, but the functional homologs thereof.

[69002] [0341.1.7.14] to [0343.1.7.14] for the disclosure of these paragraphs see [0341.1.7.7] to [0343.1.7.7] above

[69003] Accordingly, in another embodiment, a nucleic acid molecule of the invention is at least 15, 20, 25 or 30 nucleotides in length. Preferably, it hybridizes under stringent conditions to a nucleic acid molecule comprising a nucleotide sequence of the nucleic acid molecule of the present invention or used in the process of the present invention, e.g. comprising the sequence shown in the respective line in Table I, application no. 14, columns 5 or 8, preferably the coding region thereof. In another embodiment the nucleic acid molecule is preferably at least 20, 30, 50, 100, 250 or more nucleotides in length.

[69004] for the disclosure of this paragraph see [0345.1.7.7] above

[69005] Preferably, a nucleic acid molecule of the invention that hybridizes under stringent conditions to a sequence shown in the respective line in Table I, application no. 14, columns 5 or 8, preferably the coding region thereof, corresponds to a naturally-occurring nuoleic acid molecule of the invention. As used herein, a “naturally-occurring” nucleic acid molecule refers to a RNA or DNA molecule having a nucleotide sequence that occurs in nature (e.g. encodes a natural protein). Preferably, the nucleic acid molecule encodes a natural protein having above-mentioned activity, e.g. conferring the production or the increased production of the respective fine chemical beta-sitosterol, campesterol, or stigmasterol as compared to a corresponding, e.g. non-transformed, wild type non-human organism, like a microorganism or a plant cell, plant or part thereof after increasing the expression or activity thereof or the activity of a protein of the invention or used in the process of the invention, in an embodiment for example expression either in the cytosol or in an organelle such as a plastid or mitochondria, preferably in plastids, or, in another embodiment by targeted or non-targeted expression.

[69006] for the disclosure of this paragraph see [0347.1.7.7] above

[69007] For example, nucleotide substitutions leading to amino acid substitutions at “non-essential” amino acid residues can be made in a sequence of the nucleic acid molecule of the invention or used in the process of the invention, e.g. shown in the respective line in Table I, application no. 14, columns 5 or 8, preferably the coding region thereof, or fragments or homologs thereof.

[69008] for the disclosure of this paragraph see [0349.1.7.7] above

[69009] for the disclosure of this paragraph see [0350.1.7.7] above

[69010] Accordingly, the invention relates to nucleic acid molecules encoding a polypeptide having above-mentioned activity, in a non-human organisms or parts thereof by for example expression either in the cytosol or in an organelle such as a plastid or mitochondria or both, preferably in plastids, that contain changes in amino acid residues that are not essential for said activity. Such polypeptides differ in amino acid sequence from a sequence depicted in the respective line in Table II, especially Table IIA, application no. 14, columns 5 or 8, but retain said activity described herein. The nucleic acid molecule can comprise a nucleotide sequence encoding a polypeptide, wherein the polypeptide comprises an amino acid sequence at least about 50% identical to an amino acid sequence shown in the respective line in Table II, application no. 14, columns 5 or 8, and is capable of conferring the production or the increased production of the respective fine chemical beta-sitosterol, campesterol, or stigmasterol as compared to a corresponding, e.g. non-transformed, wild type non-human organism, like a microorganism or a plant cell, plant or part thereof, after increasing its activity for example in an embodiment by expression either in the cytosol or in an organelle such as a plastid or mitochondria or both, preferably in plastids, or, in another embodiment by targeted or non-targeted expression. Preferably, the protein encoded by the nucleic acid molecule is at least about 60%, 70%, 80%, 90%, 95%, 96%, 97%, 98%, 99% or 99.5% identical to the sequence shown in the respective line in Table II, application no. 14, columns 5 or 8.

[69011] [0352.1.7.14] to [0357.1.7.14] for the disclosure of these paragraphs see [0352.1.7.7] to [0357.1.7.7] above

[69012] Functional equivalents of the nucleic acid molecules according to the present invention and/or used in the process according to the present invention represent an embodiment of homologs. Functional equivalents derived from the nucleic acid molecules as shown in the respective line in Table I, application no. 14, columns 5 or 8, preferably the coding region thereof, according to the invention by substitution, insertion or deletion have at least 30%, 35%, 40%, 45%, 50%, 55%, 60%, 65%, 70%, 75%, 80%, 85%, 90%, 91%, 92%, 93%, 94%, 95%, 96%, 97%, 98%, 99% or 99.5% homology with one of the nucleic acid molecules as shown in the respective line in Table I, application no. 14, columns 5 or 8, preferably the coding region thereof, according to the invention and encode polypeptides having essentially the same properties as the polypeptide as shown in the respective line in Table II, application no. 14, columns 5 or 8.

[69013] Functional equivalents derived from one of the polypeptides as shown in the respective line in Table II, application no. 14, columns 5 or 8 according to the invention by substitution, insertion or deletion have at least 30%, 35%, 40%, 45%, 50%, 55%, 60%, 65%, 70%, 75%, 80%, 85%, 90%, 91%, 92%, 93%, 94%, 95%, 96%, 97%, 98%, 99% or 99.5% homology with one of the polypeptides as shown in the respective line in Table II, application no. 14, columns 5 or 8 according to the invention and having essentially the same properties as the polypeptide as shown in the respective line in Table II, application no. 14, columns 5 or 8.

[69014] for the disclosure of this paragraph see [0359.1.7.7] above

[69015] A nucleic acid molecule encoding a homolog to a polypeptide depicted in the respective line in Table II, application no. 14, columns 5 or 8 can be created by introducing one or more nucleotide substitutions, additions or deletions into the nucleic acid molecule of the present invention, in particular of Table I, application no. 14, columns 5 or 8, in the respective line, such that one or more amino acid substitutions, additions or deletions are introduced into the encoded protein. Mutations can be introduced into the nucleic acid molecules as depicted in the respective line in Table I, application no. 14, columns 5 or 8, preferably the coding region thereof, by standard techniques, such as site-directed mutagenesis, PCR-mediated mutagenesis or other methods known to the person skilled in the art.

[69016] [0361.1.7.14] to [0363.1.7.14] for the disclosure of these paragraphs see [0361.1.7.7] to [0363.1.7.7] above

[69017] Homologues of the nucleic acid sequences used, with the sequences shown in the respective line in Table I, application no. 14, columns 5 or 8, preferably the coding region thereof, comprise also allelic variants with at least approximately 30%, 35%, 40%, 45%, 50%, 55%, 60%, 65%, 70%, 75%, 80%, 85%, 90%, 91%, 92%, 93%, 94% 95%. 96%, 97%, 98%, 99%, 99.5% or more % homology with one of the nucleotide sequences shown or the abovementioned derived nucleic acid sequences or their homologues or derivatives or parts of these. Allelic variants encompass in particular functional variants which can be obtained by deletion, insertion or substitution of nucleotides from the sequences shown in the respective line, preferably in Table I, columns 5 or 8, preferably the coding region thereof, or from the derived nucleic acid sequences, the intention being, however, that the enzymatic activity or the biological activity of the resulting proteins synthesized is advantageously retained or increased.

[69018] In one embodiment of the present invention, the nucleic acid molecule of the invention or used in the process of the invention comprises the sequences shown in the respective line in any of the Table I, application no. 14, columns 5 or 8, preferably the coding region thereof, fragments or homologs thereof. It is preferred that the nucleic acid molecule comprises as little as possible other nucleotides not shown in the respective line in any one of Table I, application no. 14, columns 5 or 8, preferably the coding region thereof, fragments or homologs thereof. In one embodiment, the nucleic acid molecule comprises less than 500, 400, 300, 200, 100, 90, 80, 70, 60, 50 or 40 further nucleotides. In a further embodiment, the nucleic acid molecule comprises less than 30, 20 or 10 further nucleotides. In one embodiment, the nucleic acid molecule used in the process of the invention is identical to the sequences shown in the respective line in Table I, application no. 14, columns 5 or 8, preferably the coding region thereof.

[69019] Also preferred is that the nucleic acid molecule used in the process of the invention encodes a polypeptide comprising the sequence shown in the respective line in Table II, application no. 14, columns 5 or 8, fragments or homologs thereof. In one embodiment, the nucleic acid molecule encodes less than 150, 130, 100, 80, 60, 50, 40 or 30 further amino acids. In a further embodiment, the encoded polypeptide comprises less than 20, 15, 10, 9, 8, 7, 6 or 5 further amino acids. In one embodiment used in the inventive process, the encoded polypeptide is identical to the sequences shown in the respective line in Table II, application no. 14, columns 5 or 8.

[69020] In one embodiment, the nucleic acid molecule of the invention or used in the process encodes a polypeptide comprising the sequence shown in the respective line in Table II, application no. 14, columns 5 or 8, or fragments or homologs thereof, and comprises less than 100 further nucleotides. In a further embodiment, said nucleic acid molecule comprises less than 30 further nucleotides. In one embodiment, the nucleic acid molecule used in the process is identical to a coding sequence of the sequences shown in the respective line in Table I, application no. 14, columns 5 or 8.

[69021] Polypeptides (=proteins), which still have the essential biological or enzymatic activity of the polypeptide of the present invention conferring the production or the increased production of the respective fine chemical beta-sitosterol, campesterol, or stigmasterol as compared to a corresponding, e.g. non-transformed, wild type non-human organism, like a microorganism or a plant cell, plant or part thereof, i.e. whose activity is essentially not reduced, are polypeptides with at least 10%, 20%, 30%, 40%, 50%, 60%, 70%, 80%, 90%, 95% or more of the wild type biological activity or enzymatic activity, advantageously, the activity is essentially not reduced in comparison with the activity of a polypeptide shown in the respective line in Table II, application no. 14, columns 5 or 8 expressed under identical conditions.

[69022] Homologues of nucleic acid molecules shown in the respective line in Table I, application no. 14, columns 5 or 8, preferably the coding region thereof, or fragments thereof, or of the derived sequences shown in the respective line in Table II, application no. 14, columns 5 or 8, or fragments thereof, also mean truncated sequences, cDNA, single-stranded DNA or RNA of the coding and noncoding DNA sequence. Homologues of said sequences are also understood as meaning derivatives, which comprise noncoding regions such as, for example, UTRs, introns, terminators, enhancers or promoter variants. The promoters upstream of the nucleotide sequences stated can be modified by one or more nucleotide substitution(s), insertion(s) and/or deletion(s) without, however, interfering with the functionality or activity either of the promoters, the open reading frame (=ORF) or with the 3′-regulatory region such as terminators or other 3′-regulatory regions, which are far away from the ORF. It is furthermore possible that the activity of the promoters is increased by modification of their sequence, or that they are replaced completely by more active promoters, even promoters from heterologous organisms. Appropriate promoters are known to the person skilled in the art and are mentioned herein below.

[69023] [0370.1.7.14] to [0379.1.7.14] for the disclosure of these paragraphs see [0370.1.7.7] to [0379.1.7.7] above

[69024] Moreover, a native polypeptide conferring the increase of the respective fine chemical beta-sitosterol, campesterol, or stigmasterol in a non-human organism or a part thereof can be isolated from cells (e.g., endothelial cells), for example using the antibody of the present invention as described below, in particular, an antibody against proteins having 2-oxoglutarate dehydrogenase E1 subunit, ABC metal ion transporter substrate-binding protein, acetyl-CoA acetyltransferase, acetyltransferase, acid shock protein, acyl transferase, amidophosphoribosyltransferase, ankyrin repeat family protein, ATP-binding component of a transport system, b1401-protein, B1795-protein, b2107-protein, b2376-protein, b2399-protein, b2474-protein, b2513-protein, b2654-protein, b3151-protein, b3989-protein, b4029-protein, b4205-protein, C-4 sterol methyl oxidase, calcium-dependent protein kinase, cation transport protein, cation-transporting ATPase, CTP synthase, CTP synthetase, cyclin, cyclin D, eukaryotic translation initiation factor 5, glucose dehydrogenase, glucose-6-phosphate 1-dehydrogenase, glutaredoxin, homocitrate synthase, hydrolase, lipoprotein precursor, L-ribulose-5-phosphate 4-epimerase, membrane transport protein, methyltransferase, monothiol glutaredoxin, multidrug resistance protein, multiple antibiotic resistance protein, murein transglycosylase, NADH dehydrogenase I chain N, oxidoreductase, permease protein, permease protein of ABC transporter, phenylacetic acid degradation protein, phosphoribulokinase, polygalacturonase, protein kinase, protein phosphatase, putative transport system permease protein, putrescine transport system permease protein, recombinase A, sec-independent protein translocase, sll0406-protein, sll1761-protein, sodium/proton antiporter, sterol desaturase, threonine dehydrogenase, threonine synthase, transcription factor, tryptophan synthase alpha chain, TTC1386-protein, xanthine dehydrogenase, ydl235c-protein, ynl321w-protein, or ypr170c-protein activity, respectively, or an antibody against polypeptides as shown in the respective line in Table II, application no. 14, columns 5 or 8, or fragments or homologs thereof which can be produced by standard techniques utilizing the polypeptid of the present invention or fragment thereof, i.e., the polypeptide of this invention (FCRP). Preferred are monoclonal antibodies.

[69025] for the disclosure of this paragraph see [0381.1.7.7] above

[69026] In one embodiment, the present invention relates to a polypeptide as depicted in the respective line in Table II, especially in Table IIA or especially in Table IIB, application no. 14, columns 5 or 8, or fragment or homolog thereof or as coded by the nucleic acid molecule shown in the respective line in Table I, especially Table IA or especially Table IB, application no. 14, columns 5 or 8, preferably the coding region thereof, or fragment or homolog thereof.

[69027] In an embodiment, the present invention relates to a polypeptide comprising or consisting of a consensus sequence shown in the respective line in Table IV, application no. 14, column 8 or at least one polypeptide motif shown in the respective line in Table IV, application no. 14, column 8.

[69028] In an embodiment thereof, the present invention relates to a polypeptide comprising or consisting of a consensus sequence shown in the respective line in Table IV, application no. 14, column 8 or comprising at least one polypeptide motif shown in the respective line in Table IV, application no. 14, column 8, whereby not more than 20, 15, 10, 9, 8, 7, 6, 5, 4, 3, 2, or 1, or 0 of the amino acids can be replaced by any amino acid.

[69029] In another embodiment thereof, the present invention relates to a polypeptide comprising or consisting of a consensus sequence shown in the respective line in Table IV, application no. 14, column 8 or comprising at least one polypeptide motif shown in the respective line in Table IV, application no. 14, column 8, whereby not more than 15%, 10%, 5%, 4%, 3%, 2% or1% or 0% of the amino acids defined as distinct specific amino acids are/is replaced by another amino acid.

[69030] In another embodiment thereof, the present invention relates to a polypeptide comprising or consisting of a consensus sequence shown in the respective line in Table IV, application no. 14, column 8 or comprising at least one polypeptide motif shown in the respective line in Table IV, application no. 14, column 8, whereby not more than 20, 15, 10, 9, 8, 7, 6, 5, 4, 3, 2, or 1, or 0 amino acids are inserted into the consensus sequence or polypeptide motif.

[69031] In an embodiment of the present invention, the polypeptide of the present invention comprises or consists of a consensus sequence or at least one polypeptide motif shown in the respective line in Table IV, application no. 14, column 8, whereby said polypeptide distinguishes over the sequence depicted in the respective line in Table II, application no. 14, columns 5 or 8 by one or more amino acids. In one embodiment, said polypeptide of the invention distinguishes over the sequence shown in the respective line in Table II, application no. 14, columns 5 and 8 by more than 5, 6, 7, 8 or 9 amino acids, preferably by more than 10, 15, 20, 25 or 30 amino acids, even more preferred are more than 40, 50, or 60 amino acids and, preferably, the sequence of the polypeptide of the invention distinguishes from the sequence shown in the respective line in Table II, application no. 14, columns 5 and 8 by not more than 80%, 70%, 60%, 50%, 40%, 30%, 20%, 10%, 5%, 4%, 3%, 2%, 1% or 0.5%. In another embodiment, said polypeptide of the invention does not consist of the sequence shown in the respective line in Table II, application no. 14, columns 5 and 8.

[69032] In an embodiment, the invention relates to a polypeptide conferring an increase in the respective fine chemical beta-sitosterol, campesterol, or stigmasterol in a non-human organism, especially a microorganism or a plant, or a part thereof, being encoded by the nucleic acid molecule of the invention or used in the process of the invention and having a sequence which distinguishes over the sequence as shown in the respective line in Table II, application no. 14, columns 5 or 8 by one or more amino acids (but not exceeding 5%, preferably 4%, 3%, 2%, 1%, 0.5%, 0.2% or 0.1%). In an embodiment, said polypeptide of the invention does not comprise or consist of the sequence shown in the respective line in Table II, application no. 14, columns 5 or 8. In an embodiment, said polypeptide of the present invention is less than 100%, 99.999%, 99.99%, 99.9% or 99% identical. In one embodiment, said polypeptide which differs at least in one or more amino acids (but not exceeding 5%, preferably 4%, 3%, 2%, 1%, 0.5%, 0.2% or 0.1%) from the polypeptide shown in the respective line in Table II, application no. 14, columns 5 and 8 does not comprise a protein of the sequence shown in the respective line in Table II A and/or II B, application no. 14, columns 5 or 8.

[69033] In an embodiment, the present invention relates to a polypeptide having the activity of the protein as shown in the respective line in Table II, application no. 14, column 3, which distinguishes over the sequence depicted in the respective line in Table II, application no. 14, columns 5 or 8 by one or more amino acids, preferably by more than 5, 6, 7, 8 or 9 amino acids, preferably by more than 10, 15, 20, 25 or 30 amino acids, even more preferred are more than 40, 50, or 60 amino acids and, preferably, the sequence of the polypeptide of the invention distinguishes from the sequence shown in the respective line in Table II, application no. 14, columns 5 and 8 by not more than 80%, 70%, 60%, 50%, 40%, 30%, 20%, 10%, 5%, 4%, 3%, 2%, 1% or 0.5%.

[69034] In another embodiment the polypeptide of the invention takes the form of a preprotein consisting of a plastidial or mitochondrial transit peptide joint to a polypeptide having the activity of the protein as shown in Table II, column 3, from which the transit peptide is preferably cleaved off upon transport of the preprotein into the organelle for example into the plastid or mitochondrion.

[69035] In another embodiment the polypeptide of the invention takes not the form of a preprotein.

[69036] for the disclosure of this paragraph see [0390.1.7.7] above

[69037] for the disclosure of this paragraph see [0391.1.7.7] above

[69038] A polypeptide of the invention can participate in the process of the present invention. The polypeptide or a portion thereof comprises preferably an amino acid sequence, which is sufficiently homologous to an amino acid sequence shown in the respective line in Table II A and/or II B, application no. 14, columns 5 or 8.

[69039] Further, the polypeptide can have an amino acid sequence which is encoded by a nucleotide sequence which hybridizes, preferably hybridizes under stringent conditions as described above, to a nucleotide sequence of the nucleic acid molecule of the present invention. Accordingly, the polypeptide has an amino acid sequence which is encoded by a nucleotide sequence that is at least about 35%, 40%, 45%, 50%, 55%, 60%, 65%, 70%, 75%, 80%, 85%, 90%, 91%, 92%, 93%, 94%, 95%, 96%, 97%, 98%, 99%, 99.5% or more homologous to one of the amino acid sequences as shown in the respective line in Table II A and/or II B, application no. 14, columns 5 or 8, or fragments thereof. The preferred polypeptide of the present invention preferably possesses at least one of the activities according to the invention and described herein. A preferred polypeptide of the present invention includes an amino acid sequence encoded by a nucleotide sequence which hybridizes, preferably hybridizes under stringent conditions, to a nucleotide sequence shown in the respective line in Table I A and/or I B, application no. 14, columns 5 or 8, preferably the coding region thereof, or fragments thereto or which is homologous thereto, as defined above

[69040] The polypeptide of the present invention can vary from the sequences shown in the respective line in Table II A and/or II B, application no. 14, columns 5 or 8 in amino acid sequence due to natural variation or mutagenesis, as described in detail herein. Accordingly, the polypeptide comprise an amino acid sequence which is at least about 35%, 40%, 45%, 50%, 55%, 60%, 65%, 70%, 75%, 80%, 85% or 90, 91%, 92%, 93%, 94%, 95%, 96%, 97%, 98%, 99%, 99.5% or more homologous to an entire amino acid sequence shown in the respective line in Table II A and/or II B, application no. 14, columns 5 or 8.

[69041] Biologically active portions of a polypeptide of the present invention include peptides comprising amino acid sequences derived from the amino acid sequence of the polypeptide of the present invention or used in the process of the present invention, e.g., the amino acid sequence shown in the respective line in Table II, application no. 14, columns 5 or 8 or the amino acid sequence of a protein homologous thereto, which include fewer amino acids than a full length polypeptide of the present invention or used in the process of the present invention or the full length protein which is homologous to a polypeptide of the present invention or used in the process of the present invention depicted herein, and exhibit at least one activity of a polypeptide of the present invention or used in the process of the present invention.

[69042] for the disclosure of this paragraph see [0396.1.7.7] above

[69043] Manipulation of the nucleic acid molecule of the invention may result in the production of a protein having differences from the protein as shown in the respective line in Table II, application no. 14, column 5 or 8. Differences shall mean at least one amino acid different from the sequences as shown in the respective line in Table II, application no. 14, column 5 or 8, preferably at least 2, 3, 4, 5, 6, 7, 8, 9 or 10 amino acids (especially but not exceeding 0.1%, preferably 0.2%, 0.5%, 1%, 2%, 3% 4% or 5%), more preferably at least 15, 20, 25, 30, 35, 40, 45 or 50 amino acids (especially but not exceeding 0.5%, preferably 1%, 2%, 3% 4%, 5%, 10% or 25%) different from the sequences as shown in the respective line in Table II, application no. 14, column 5 or 8. These proteins may be improved in efficiency or activity, or may be more stable and therefore present in greater numbers in the cell as compared to the wild-type cell.

[69044] Any mutagenesis strategies for the polypeptide of the present invention or the polypeptide used in the process of the present invention to result in increasing said activity are not meant to be limiting; variations on these strategies will be readily apparent to one skilled in the art. Using such strategies, and incorporating the mechanisms disclosed herein, the nucleic acid molecule and polypeptide of the invention may be utilized to generate algae, ciliates, fungi, other microorganisms like C. glutamicum or plants or parts thereof, expressing proteins as shown in the respective line in Table II, application no. 14, column 5 or 8, or mutated proteins thereof. The nucleic acid molecules and polypeptide molecules of the invention are expressed such that the yield, production, and/or efficiency of production of a desired compound is improved.

[69045] [0399.1.7.14] to [0401.1.7.14] for the disclosure of these paragraphs see [0399.1.7.7] to [0401.1.7.7] above

[69046] In one embodiment, a protein (=polypeptide) as shown in the respective line in Table II, application no. 14, column 5 or 8 refers to a polypeptide having an amino acid sequence corresponding to the polypeptide of the invention, especially to a polypeptide as shown in Table II, application no. 14, columns 5 or 8 or homologs thereof, or used in the process of the invention, whereas a “non- inventive protein or polypeptide” or “other polypeptide” refers to a polypeptide having an amino acid sequence corresponding to a protein which is not substantially homologous to a polypeptide of the invention, preferably which is not substantially homologous to a polypeptide or protein as shown in the respective line in Table II, application no. 14, column 5 or 8 or homologs thereof, e.g., a protein which does not confer the activity described herein and which is derived from the same or a different organism.

[69047] [0403.1.7.14] to [0409.1.7.14] for the disclosure of these paragraphs see [0403.1.7.7] to [0409.1.7.7] above

[69048] As the nucleic acid molecules of the invention and/or the expression thereof is related to the synthesis of the respective fine chemical beta-sitosterol, campesterol, or stigmasterol its function as a probe extends to the detection of microorganisms, plant tissues, plants, plant variets, plant ecotypes or plant genera with varying, advantageously increased, capability or potential for synthesis of the respective fine chemical beta-sitosterol, campesterol, or stigmasterol. Therefore in one embodiment the present invention relates to a method for analyzing the capability or potential of a plant tissue, a plant, a plant variety or ecotype to produce the respective fine chemical beta-sitosterol, campesterol, or stigmasterol by using the respective antibody of the invention as a probe to detect the amount of the polypeptide encoded by said nucleic acid molecule of the invention in a non-human organism in comparison to another organism.

[69049] Therefore in one embodiment the invention relates to a method to probe a non-human organism for its capability for the production of the respective fine chemical comprising the steps of
[69050] a) analyzing the sequence and/or the expression of the respective nucleic acid molecule of the invention in least two non-human organisms which differ in the capability to produce the respective fine chemical;
[69051] b) associate the different sequence and/or expression level of the nucleic acid molecules of the invention with their different capability to produce the respective fine chemical;
[69052] c) analyze the sequence and/or the expression of the nucleic acid molecule of the invention in at least a third non-human organism;
[69053] d) predict the capability of the at least third organism to produce the respective fine chemical based by comparing the sequence and/or expression of the nucleic acid of the invention to the sequences and/or expression levels of the nucleic acid molecule of the invention of the at least two organisms analyzed in step a.

[69054] [0411.1.7.14] to [0430.1.7.14] for the disclosure of these paragraphs see [0411.1.7.7] t [0430.1.7.7] above

[69055] Accordingly the present invention relates to any cell transgenic for any nucleic acid characterized as part of the invention, e.g. conferring the increase of the respective fine chemical beta-sitosterol, campesterol, or stigmasterol in a cell or a non-human organism or a part thereof, e.g. the nucleic acid molecule of the invention, the nucleic acid construct of the invention, the vector of the invention, the expression cassette according to the invention, or a nucleic acid molecule encoding the polypeptide of the invention, e.g. encoding a polypeptide having an activity as the protein as shown in the respective line in Table II, application no. 14, column 3. Due to the above-mentioned activity the respective fine chemical beta-sitosterol, campesterol, or stigmasterol content in a cell or a non-human organism is increased. For example, due to modulation or manipulation, the cellular activity is increased, in a preferred embodiment in organelles such as plastids or mitochondria, e.g. due to an increased expression or specific activity or specific targeting of the subject matters of the invention in a cell or a non-human organism or a part thereof especially in organelles such as plastids or mitochondria, or in another embodiment in the cytosol. Transgenic for a polypeptide having a protein or a protein activity means herein that due to modulation or manipulation of the genome, the activity of protein as shown in the respective line in Table II, application no. 14, column 3 or a protein as shown in the respective line in Table II, application no. 14, column 3-like activity is increased in the cell or non-human organism or part thereof, especially in organelles such as plastids or mitochondria, or especially in the cytosol. Examples are described above in context with the process of the invention.

[69056] for the disclosure of this paragraph see [0432.1.7.7] above

[69057] A naturally occurring expression cassette—for example the naturally occurring combination of the promoter of the gene encoding a protein as shown in the respective line in Table II, application no. 14, column 5 or 8, preferably the coding region thereof, or fragments or homologs thereof with the corresponding encoding gene—becomes a transgenic expression cassette when it is modified by non-natural, synthetic “artificial” methods such as, for example, mutagenesis. Such methods have been described (U.S. Pat. No. 5,565,350; WO 00/15815; also see above).

[69058] for the disclosure of this paragraph see [0434.1.7.7] above

[69059] for the disclosure of this paragraph see [0435.1.7.7] above

[69060] Transgenic plants comprising the respective fine chemical(s) synthesized in the process according to the invention can be marketed directly without isolation of the fine chemical synthesized. In the process according to the invention, plants are understood as meaning all plant parts, plant organs such as leaf, stalk, root, tubers or seeds or propagation material or harvested material or the intact plant. In this context, the seed encompasses all parts of the seed such as the seed coats, epidermal cells, seed cells, endosperm or embryonic tissue. The fine chemical produced in the process according to the invention may, however, also be isolated from the plant. In case of beta-sitosterol, campesterol, or stigmasterol this can be in free form or bound to proteins. Fine chemical(s) produced by this process can be harvested by harvesting the non-human organisms either from the culture in which they grow or from the field. For example, this can be done via squeezing, grinding and/or extraction, salt precipitation and/or ion-exchange chromatography of the plant parts, preferably the plant seeds, plant fruits, plant tubers and the like.

[69061] [0437.1.7.14] to [0447.1.7.14] for the disclosure of these paragraphs see [0437.1.7.7] to [0447.1.7.7] above

[69062] Identity and purity of the phytosterols such as beta-sitosterol, stigmasterol and/or campesterol isolated can be determined by standard techniques of the art. They encompass old techniques such as photometric methods and new techniques such as high-performance liquid chromatography (HPLC), gas chromatography (GC), spectroscopic methods, mass spectrometry (MS), staining methods, thin-layer chromatography, NIRS, enzyme assay or microbiological assays.

[69063] Phytosterols can be detected via HPLC, e.g. reversed-phase HPLC, as described by Heftmann, E. and Hunter, I.R. (J Chromatogr 1979; 165: 283-299. Furthermore the analysis of phytosterols can be performed as described in S. L. Abidi, “Chromatographic analysis of plant sterols in foods and vegetable oils [Review]”, Journal of Chromatography 2001, A.. 935, 173-20 or P. Appelblad, K. Irgum, “Separation and detection of neuroactive steroids from biological matrices [Review]”, Journal of Chromatography A 2002, 955, 151-182. or K. Shimada, K. Mitamura, T. Higashi, “Gas chromatography and high-performance liquid chromatography of natural steroids [Review]”, Journal of Chromatography 2001, A.. 935, 141-172.

[69064] For the sterol isolation and analysis the German standard method F III may be used. The method comprises: saponification of fat, isolation of unsaponifiable matter using an aliminium oxide column, separation of sterol fraction by preparative TLC and determination of the composition of sterols as trimetysilyl ethers by GC.

[69065] The phytosterols obtained in the process are suitable as starting material for the synthesis of further products of value. For example, phytosterols are efficient cholesterol-lowering agents leading to the prevention of cardiovascular disease. In addition, they produce a wide spectrum of therapeutic effects including anti-tumor properties. Epidemiologic and experimental studies suggest that dietary phytosterols, preferably beta-sitosterol, stigmasterol and/or campesterol may offer protection from the most common cancers in Western societies, such as colon, breast and prostate cancer.

[69066] Accordingly, the present invention relates a method for the production of a pharmaceuticals, food stuff, animal feeds, nutrients or cosmetics comprising the steps of the process according to the invention, including the isolation of the fine chemical produced or a composition produced comprising the fine chemical, and, if desired, formulating the product with a pharmaceutical acceptable carrier or formulating the product in a form acceptable for an application in agriculture or formulating the product in a form acceptable for an application as food stuff, animal feed, nutrient or cosmetic. A further embodiment according to the invention is the use of the fine chemical produced in the process or of the transgenic non-human organisms in animal feeds, foodstuffs, medicines, food supplements, cosmetics or pharmaceuticals. %% ERROR %%.

[69067] for the disclosure of this paragraph see [0450.1.7.7] above

[69068] for the disclosure of this paragraph see [0451.1.7.7] above

[69069] Further in another embodiment, the present invention relates to the use of the nucleic acid molecule of the invention or used in the method of the invention alone or in combination with other genes of the respective fine chemical synthesis for example of the phytosterol biosynthesis, the polypeptide of the invention or used in the method of the invention, the nucleic acid construct of the invention, the expression cassette of the invention, the vector of the invention, the plant or plant tissue or the host cell of the invention, for the production of plant resistant to a herbicide inhibiting eventually the production of the fine chemical.

[69070] for the disclosure of this paragraph see [0453.1.7.7] above

[69071] for the disclosure of this paragraph see [0454.1.7.7] above

[69072] In one embodiment, the present invention relates to a method for the identification of a gene product conferring the production of or an increase in the fine chemical production in a non-human cell, comprising the following steps:
[69073] (a) contacting, e.g. hybridizing, a, some or all nucleic acid molecules of a sample, e.g. cells, tissues, plants or microorganisms or a nucleic acid library, which can contain a candidate gene encoding a gene product conferring the production of or an increase in the fine chemical after expression, with the nucleic acid molecule of the present invention as shown in the respective line in column 5 or 8 of Table I A or B of application no. 14, preferably the coding region thereof, or a fragment or homolog thereof;
[69074] (b) identifying the nucleic acid molecules, which hybridize under relaxed stringent conditions with the nucleic acid molecule of the present invention in particular to the nucleic acid molecule sequence shown in the respective line in Table I, application no. 14, columns 5 or 8, preferably the coding region thereof, of a fragment or a homolog thereof, preferably in Table I B, application no. 14, columns 5 or 8, preferably the coding region thereof, of a fragment or a homolog thereof, and, optionally, isolating the full length cDNA clone or complete genomic clone;
[69075] (c) introducing the candidate nucleic acid molecules or a fragment thereof in host cells, preferably in a plant cell or a microorganism, appropriate for producing the fine chemical;
[69076] (d) expressing the identified nucleic acid molecules in the host cells for which the production of or the increased production of the fine chemical is desired;
[69077] (e) assaying the fine chemical level in the non-human host cells; and
[69078] (f) identifying the nucleic acid molecule and/or its gene product which expression confers the production of or an increase in the fine chemical level in the non-human host cell after expression compared to the wild type.

[69079] for the disclosure of this paragraph see [0456.1.7.7] above

[69080] In another embodiment, the present invention relates to a method for the identification of a gene product conferring the production of or an increase in the fine chemical production in a cell, comprising the following steps:
[69081] (a) identifying a nucleic acid molecule of a non-human organism, which is at least 20%, 25%, 30%, 35%, 40%, 50%, 60%, 70%, 80%, 90%, 95%, 96%, 97%, 98%, 99%, 99.5% or more homolog to the nucleic acid molecule encoding a polypeptide comprising the polypeptide molecule as shown in the respective line in column 5 or 8 of Table II, application no. 14, or comprising a consensus sequence or a polypeptide motif as shown in the respective line in column 8 of Table IV, application no. 14, or being encoded by a nucleic acid molecule comprising a polynucleotide as shown in the respective line in column 5 or 8 of Table I, application no. 14, preferably the coding region thereof, or a homologue thereof as described herein, for example via homology search in a data bank;
[69082] (b) introducing the candidate nucleic acid molecule in non-human host cells, preferably in a plant cell or a microorganism, appropriate for producing the fine chemical;
[69083] (c) expressing the identified nucleic acid molecule in the non-human host cells;
[69084] (d) assaying the fine chemical level in the non-human host cells; and
[69085] (e) identifying the nucleic acid molecule and its gene product which expression confers the production of or an increase in the fine chemical level in the non-human host cell after expression compared to the wild type.

[69086] for the disclosure of this paragraph see [0458.1.7.7] above

[69087] Further, the nucleic acid molecules disclosed herein, in particular the nucleic acid molecules shown in the respective line in column 5 or 8 of Table I A or B of application no. 14, may be sufficiently homologous to the sequences of related species such that these nucleic acid molecules may serve as markers for the construction of a genomic map in related organism or for association mapping. Furthermore natural variation in the genomic regions corresponding to nucleic acids disclosed herein, in particular the nucleic acid molecule shown in the respective line in column 5 or 8 of Table I A or B, of application no. 14 or homologous thereof, may lead to variation in the activity of the proteins disclosed herein, in particular the proteins comprising polypeptides as shown in the respective lines in column 5 or 8 of Table II A or B, of application no. 14 or their homologous, or comprising the consensus sequence or the polypeptide motif as shown in the respective line in column 8 of Table IV, and in consequence in a natural variation of an increased fine chemical production.

[69088] In consequence natural variation eventually also exists in form of more active allelic variants leading already to a relative increase in the fine chemical. Different variants of the nucleic acid molecules disclosed herein, in particular the nucleic acid molecules comprising the nucleic acid molecules as shown in the respective line in column 5 or 8 of Table I A or B of application no. 14, preferably the coding region thereof, which corresponds to different levels of increase in fine chemical, e.g. different levels of increase in fine chemical, can be indentified and used for marker assisted breeding for an enhanced production of the fine chemical.

[69089] Natural variation may also exist in the regulatory regions, e.g. the promoters of the natural genes comprising the nucleic acid molecules as shown in the respective line column 5 or 8 of Table I A or B of application no. 14, preferably the coding region thereof, which can similarly correspond to different levels of increase in the fine chemical, e.g. different levels of increase in the fine chemical can be identified and used for marker assisted breeding for an enhanced production of the fine chemical.

[69090] Accordingly, the present invention relates to a method for breeding plants for the production of the fine chemical, comprising
[69091] (a) selecting a first plant variety with an increased production of the fine chemical, e.g. based on an increased expression of a nucleic acid molecule of the invention as disclosed herein, in particular of a nucleic acid molecule comprising a nucleic acid molecule as shown in the respective line in column 5 or 8 of Table I A or B of application no. 14, preferably the coding region thereof, or fragments or homologs thereof, or a polypeptide comprising a polypeptide as shown in the respective line in column 5 or 8 of Table II A or B of application no. 14, or fragments or homologs thereof, or comprising a consensus sequence or a polypeptide motif as shown in the respective line in column 8 of Table IV, or a homolog thereof, as described herein;
[69092] (b) associating the level of increased production of the fine chemical, with the expression level or the genomic structure of a gene encoding said polypeptide or said nucleic acid molecule;
[69093] (c) crossing the first plant variety with a second plant variety, which significantly differs in its level of fine chemical; and
[69094] (d) identifying, which of the offspring varieties has got increased production of the fine chemical by the expression level of said polypeptide or nucleic acid molecule or the genomic structure of the gene(s) encoding said polypeptide or nucleic acid molecule of the invention.

[69095] [0462.1.7.14] to [0479.1.7.14] for the disclosure of these paragraphs see [0462.1.7.7] to [0479.1.7.7] above

[69096] In a further embodiment the nucleic acid molecule of the invention, the polypeptide of the invention, the nucleic acid construct of the invention, the expression cassette of the invention, the non-human organisms, the non-human host cell, the microorganisms, the plant, plant cell, or the part thereof, of the invention, the vector of the invention, the agonist identified with the method of the invention, the nucleic acid molecule identified with the method of the present invention, can be used for the production of the fine chemical or of the fine chemical and one or more other phytosterols.

[69097] Accordingly, the nucleic acid molecule of the invention, or the nucleic acid molecule identified with the method of the present invention or the complement sequences thereof, the polypeptide of the invention, the nucleic acid construct of the invention, the expression cassette of the invention, the non-human organism, the non-human host cell, the microorganism, the plant, plant cell, or the part thereof of the invention, the vector of the invention, the agonist identified with the method of the invention, the antibody of the present invention, can be used for the production of or the increase in the fine chemical in a non-human organism or part thereof, e.g. in a cell.

[69098] for the disclosure of this paragraph see [0481.1.7.7] above

[69099] for the disclosure of this paragraph see [0482.1.7.7] above

[69100] A special embodiment of this invention is related to genes which increase or generate the production of the fine chemical beta-sitosterol, campesterol, and/or stigmasterol in plant cells, plants or part thereof. Phenotypes thereto are associated with yield of plants (=yield related phenotypes). In accordance with the invention, therefore, the respective genes identified in Table I, wherein in column 7 beta-sitosterol, campesterol, and/or stigmasterol are mentioned, especially the coding region thereof, or homologs or fragments thereof,may be employed to enhance any yield-related phenotype. Increased yield may be determined in field trials of transgenic plants and suitable control plants. Alternatively, a transgene's ability to increase yield may be determined in a model plant. An increased yield phenotype may be determined in the field test or in a model plant by measuring any one or any combination of the following phenotypes, in comparison to a control plant: yield of dry harvestable parts of the plant, yield of dry aerial harvestable parts of the plant, yield of underground dry harvestable parts of the plant, yield of fresh weight harvestable parts of the plant, yield of aerial fresh weight harvestable parts of the plant yield of underground fresh weight harvestable parts of the plant, yield of the plant's fruit (both fresh and dried), grain dry weight, yield of seeds (both fresh and dry), and the like.

[69101] The most basic yield-related phenotype is increased yield associated with the presence of the gene or a homolog or a fragment thereof as a transgene in the plant, i.e., the intrinsic yield of the plant. Intrinsic yield capacity of a plant can be, for example, manifested in a field test or in a model system by demonstrating an improvement of seed yield (e.g. in terms of increased seed/grain size, increased ear number, increased seed number per ear, improvement of seed filling, improvement of seed composition, embryo and/or endosperm improvements, and the like); modification and improvement of inherent growth and development mechanisms of a plant (such as plant height, plant growth rate, pod number, pod position on the plant, number of internodes, incidence of pod shatter, efficiency of nodulation and nitrogen fixation, efficiency of carbon assimilation, improvement of seedling vigour/early vigour, enhanced efficiency of germination (under non-stressed conditions), improvement in plant architecture.

[69102] Increased yield-related phenotypes may also be measured to determine tolerance to abiotic environmental stress. Abiotic stresses include drought, low temperature, salinity, osmotic stress, shade, high plant density, mechanical stresses, and oxidative stress, and yield-related phenotypes are encompassed by tolerance to such abiotic stresses. Additional phenotypes that can be monitored to determine enhanced tolerance to abiotic environmental stress include, without limitation, wilting; leaf browning; loss of turgor, which results in drooping of leaves or needles stems, and flowers; drooping and/or shedding of leaves or needles; the leaves are green but leaf angled slightly toward the ground compared with controls; leaf blades begun to fold (curl) inward; premature senescence of leaves or needles; loss of chlorophyll in leaves or needles and/or yellowing. Any of the yield-related phenotypes described above may be monitored in field tests or in model plants to demonstrate that a transgenic plant has increased tolerance to abiotic environmental stress. In accordance with the invention, the respective genes identified in Table 1, in case in column 7 beta-sitosterol, campesterol, and/or stigmasterol is indicated, especially the coding region thereof, or homologs or fragments thereof, may be employed to enhance tolerance to abiotic environmental stress in a plant means that the plant, when confronted with abiotic environmental stress.

[69103] A polypeptide conferring an yield-increasing activity can be encoded by a respective nucleic acid sequence as shown in Table I, column 5 or 8, and/or comprises or consists of a respective polypeptide as depicted in Table II, column 5 and 8, and/or can be amplified with the respective primer set shown in Table III, column 8, in case in column 7 beta-sitosterol, campesterol, and/or stigmasterol is indicated.

[69104] “Improved adaptation” to environmental stress like e.g. freezing and/or chilling temperatures refers to an improved plant performance under environmental stress conditions.

[69105] A modification, i.e. an increase, can be caused by endogenous or exogenous factors. For example, an increase in activity in an organism or a part thereof can be caused by adding a gene product or a precursor or an activator or an agonist to the media or nutrition or can be caused by introducing said subjects into an organism, transient or stable. Furthermore such an increase can be reached by the introduction of the respective inventive nucleic acid sequence or the encoded protein in the correct cell compartment for example into the nucleus or cytoplasmic respectively or into plastids either by transformation and/or targeting.

[69106] The term “yield” as used herein generally refers to a measurable produce from a plant, particularly a crop. Yield and yield increase (in comparison to a non-transformed starting or wild-type plant) can be measured in a number of ways, and it is understood that a skilled person will be able to apply the correct meaning in view of the particular embodiments, the particular crop concerned and the specific purpose or application concerned. The terms “improved yield” or “increased yield” can be used interchangeable.

[69107] As used herein, the term “improved yield” or the term “increased yield” means any improvement in the yield of any measured plant product, such as grain, fruit or fiber. In accordance with the invention, changes in different phenotypic traits may improve yield. For example, and without limitation, parameters such as floral organ development, root initiation, root biomass, seed number, seed weight, harvest index, tolerance to abiotic environmental stress, leaf formation, phototropism, apical dominance, and fruit development, are suitable measurements of improved yield. Any increase in yield is an improved yield in accordance with the invention. For example, the improvement in yield can comprise a 0.1%, 0.5%, 1%, 3%, 5%, 10%, 15%, 20%, 30%, 40%, 50%, 60%, 70%, 80%, 90% or greater increase in any measured parameter. For example, an increase in the bushel/acre yield of soybeans or corn derived from a crop comprising plants which are transgenic for the nucleotides and polypeptides of Table I, in case in column 7 beta-sitosterol, campesterol, and/or stigmasterol is mentioned, as compared with the bushel/acre yield from untreated soybeans or corn cultivated under the same conditions, is an improved yield in accordance with the invention. The increased or improved yield can be achieved in the absence or presence of stress conditions.

[69108] For example, enhanced or increased “yield” refers to one or more yield parameters selected from the group consisting of biomass yield, dry biomass yield, aerial dry biomass yield, underground dry biomass yield, fresh-weight biomass yield, aerial fresh-weight biomass yield, underground fresh-weight biomass yield; enhanced yield of harvestable parts, either dry or freshweight or both, either aerial or underground or both; enhanced yield of crop fruit, either dry or fresh-weight or both, either aerial or underground or both; and preferably enhanced yield of seeds, either dry or fresh-weight or both, either aerial or underground or both. Crop yield is defined herein as the number of bushels of relevant agricultural product (such as grain, forage, or seed) harvested per acre. Crop yield is impacted by abiotic stresses, such as drought, heat, salinity, and cold stress, and by the size (biomass) of the plant. Traditional plant breeding strategies are relatively slow and have in general not been successful in conferring increased tolerance to abiotic stresses. Grain yield improvements by conventional breeding have nearly reached a plateau in maize.

[69109] Accordingly, the yield of a plant can depend on the specific plant/crop of interest as well as its intended application (such as food production, feed production, processed food production, biofuel, biogas or alcohol production, or the like) of interest in each particular case. Thus, in one embodiment, yield is calculated as harvest index (expressed as a ratio of the weight of the respective harvestable parts divided by the total biomass), harvestable parts weight per area (acre, square meter, or the like); and the like. The harvest index, i.e., the ratio of yield biomass to the total cumulative biomass at harvest, in maize has remained essentially unchanged during selective breeding for grain yield over the last hundred years. Accordingly, recent yield improvements that have occurred in maize are the result of the increased total biomass production per unit land area. This increased total biomass has been achieved by increasing planting density, which has led to adaptive phenotypic alterations, such as a reduction in leaf angle, which may reduce shading of lower leaves, and tassel size, which may increase harvest index. Harvest index is relatively stable under many environmental conditions, and so a robust correlation between plant size and grain yield is possible. Plant size and grain yield are intrinsically linked, because the majority of grain biomass is dependent on current or stored photosynthetic productivity by the leaves and stem of the plant. As with abiotic stress tolerance, measurements of plant size in early development, under standardized conditions in a growth chamber or greenhouse, are standard practices to measure potential yield advantages conferred by the presence of a transgene.

[69110] Acccordingly, the yield of a plant can be increased by improving one or more of the yield-related phenotypes.

[69111] Such yield-related phenotypes or traits of a plant the improvement of which results in increased yield comprise, without limitation, the increase of the intrinsic yield capacity of a plant, improved nutrient use efficiency, and/or increased stress tolerance.

[69112] For example, yield refers to biomass yield, e.g. to dry weight biomass yield and/or fresh-weight biomass yield. Biomass yield refers to the aerial or underground parts of a plant, depending on the specific circumstances (test conditions, specific crop of interest, application of interest, and the like). In one embodiment, biomass yield refers to the aerial and underground parts. Biomass yield may be calculated as fresh-weight, dry weight or a moisture adjusted basis. Biomass yield may be calculated on a per plant basis or in relation to a specific area (e.g. biomass yield per acre/ square meter/ or the like).

[69113] In other embodiment, “yield” refers to seed yield which can be measured by one or more of the following parameters: number of seeds or number of filled seeds (per plant or per area (acre/square meter/ or the like)); seed filling rate (ratio between number of filled seeds and total number of seeds); number of flowers per plant; seed biomass or total seeds weight (per plant or per area (acre/square meter/ or the like); thousand kernel weight (TKW; extrapolated from the number of filled seeds counted and their total weight; an increase in TKW may be caused by an increased seed size, an increased seed weight, an increased embryo size, and/or an increased endosperm). Other parameters allowing to measure seed yield are also known in the art. Seed yield may be determined on a dry weight or on a fresh weight basis, or typically on a moisture adjusted basis, e.g. at 15.5 percent moisture.

[69114] For example, the term “increased yield” means that the plant, exhibits an increased growth rate, under conditions of abiotic environmental stress, compared to the corresponding wild-type plant.

[69115] An increased growth rate may be reflected inter alia by or confers an increased biomass production of the whole plant, or an increased biomass production of the aerial parts of a plant, or by an increased biomass production of the underground parts of a plant, or by an increased biomass production of parts of a plant, like stems, leaves, blossoms, fruits, and/or seeds.

[69116] Increased yield includes higher fruit yields, higher seed yields, higher fresh matter production, and/or higher dry matter production.

[69117] The term “increased yield” means that the plant, exhibits a prolonged growth under conditions of abiotic environmental stress, as compared to the corresponding, e.g. non-transformed, wild type organism. A prolonged growth comprises survival and/or continued growth of the plant, at the moment when the non-transformed wild type organism shows visual symptoms of deficiency and/or death.

[69118] When the plant of the invention is a corn plant increased yield for corn plants means, for example, increased seed yield, in particular for corn varieties used for feed or food. Increased seed yield of corn refers to an increased kernel size or weight, an increased kernel per ear, or increased ears per plant. Alternatively or in addition the cob yield may be increased, or the length or size of the cob is increased, or the kernel per cob ratio is improved.

[69119] When the plant of the invention is a soy plant, increased yield for soy plants means increased seed yield, in particular for soy varieties used for feed or food. Increased seed yield of soy refers for example to an increased kernel size or weight, an increased kernel per pod, or increased pods per plant.

[69120] When the plant of the invention is an oil seed rape (OSR) plant, increased yield for OSR plants means increased seed yield, in particular for OSR varieties used for feed or food. Increased seed yield of OSR refers to an increased seed size or weight, an increased seed number per silique, or increased siliques per plant.

[69121] When the plant of the invention is a cotton plant,increased yield for cotton plants means increased lint yield. Increased lint yield of cotton refers in one embodiment to an increased length of lint.

[69122] When the plant of the invention is a wheat plant increased yield for wheat plants means, for example, increased seed yield, in particular for wheat varieties used for feed or food. Increased seed yield of wheat refers to an increased kernel size or weight, an increased kernel per ear, or increased ears per plant. Increased seed yield of wheat refers also to an increased grain size or weight, an increased number of grains per spike, or increased number of spikes per plant. Alternatively or in addition increased seed yield of wheat refers also to an increased grain yield, increased length of spikes, increased number of spikelets per spike , increased 1000 grain weight or increased flag leaf area (flag leaf is the leaf directely below the spike).

[69123] Said increased yield can typically be achieved by enhancing or improving, one or more yieldrelated traits of the plant. Such yield-related traits of a plant comprise, without limitation, the increase of the intrinsic yield capacity of a plant, improved nutrient use efficiency, and/or increased stress tolerance, in particular increased abiotic stress tolerance.

[69124] Intrinsic yield capacity of a plant can be, for example, manifested by improving the specific (intrinsic) seed yield (e.g. in terms of increased seed/grain size, increased ear number, increased seed number per ear, improvement of seed filling, improvement of seed composition, embryo and/or endosperm improvements, or the like); modification and improvement of inherent growth and development mechanisms of a plant (such as plant height, plant growth rate, pod number, pod position on the plant, number of internodes, incidence of pod shatter, efficiency of nodulation and nitrogen fixation, efficiency of carbon assimilation, improvement of seedling vigour/early vigour, enhanced efficiency of germination (under stressed or non-stressed conditions), improvement in plant architecture, cell cycle modifications, photosynthesis modifications, various signaling pathway modifications, modification of transcriptional regulation, modification of translational regulation, modification of enzyme activities, and the like); and/or the like.

[69125] The improvement or increase of stress tolerance of a plant can for example be manifested by improving or increasing a plant's tolerance against stress, particularly abiotic stress. In the present application, abiotic stress refers generally to abiotic environmental conditions a plant is typically confronted with, including, but not limited to, drought (tolerance to drought may be achieved as a result of improved water use efficiency), heat, low temperatures and cold conditions (such as freezing and chilling conditions), salinity, osmotic stress , shade, high plant density, mechanical stress, oxidative stress, and the like.

[69126] The increased plant yield can also be mediated by increasing the “nutrient use efficiency of a plant”, e.g. by improving the use efficiency of nutrients including, but not limited to, phosphorus, potassium, and nitrogen. Further, higher yields may be obtained with current or standard levels of nitrogen use.

[69127] Generally, the term “increased tolerance to stress” can be defined as survival of plants, and/or higher yield production, under stress conditions as compared to a non-transformed wild type or starting plant: For example, the plant of the invention or produced according to the method of the invention is better adapted to the stress conditions. “Improved adaptation” to environmental stress like e.g. drought, heat, nutrient depletion, freezing and/or chilling temperatures refers herein to an improved plant performance resulting in an increased yield, particularly with regard to one or more of the yield related traits as defined in more detail above.

[69128] During its life-cycle, a plant is generally confronted with a diversity of environmental conditions. Any such conditions, which may, under certain circumstances, have an impact on plant yield, are herein referred to as “stress” condition. Environmental stresses may generally be divided into biotic and abiotic (environmental) stresses. Unfavorable nutrient conditions are sometimes also referred to as “environmental stress”. The present invention does also contemplate solutions for this kind of environmental stress, e.g. referring to increased nutrient use efficiency.

[69129] For the purposes of the description of the present invention, the terms “enhanced tolerance to abiotic stress”, “enhanced resistance to abiotic environmental stress”, “enhanced tolerance to environmental stress”, “improved adaptation to environmental stress” and other variations and expressions similar in its meaning are used interchangeably and refer, without limitation, to an improvement in tolerance to one or more abiotic environmental stress(es) as described herein and as compared to a corresponding origin or wild type plant or a part thereof.

[69130] The term abiotic stress tolerance(s) refers for example low temperature tolerance, drought tolerance or improved water use efficiency (WUE), heat tolerance, salt stress tolerance and others. Studies of a plant's response to desiccation, osmotic shock, and temperature extremes are also employed to determine the plant's tolerance or resistance to abiotic stresses. Water use efficiency (WUE) is a parameter often correlated with drought tolerance. In selecting traits for improving crops, a decrease in water use, without a change in growth would have particular merit in an irrigated agricultural system where the water input costs were high. An increase in growth without a corresponding jump in water use would have applicability to all agricultural systems. In many agricultural systems where water supply is not limiting, an increase in growth, even if it came at the expense of an increase in water use also increases yield.

[69131] Drought stress means any environmental stress which leads to a lack of water in plants or reduction of water supply to plants, including a secondary stress by low temperature and/or salt, and/or a primary stress during drought or heat, e.g. desiccation etc.

### Specific Embodiments

[69132] Accordingly, this invention provides respective measures and methods to produce plants with increased yield, e.g. genes conferring an increased yield-related trait, for example enhanced tolerance to abiotic environmental stress, for example an increased drought tolerance and/or low temperature tolerance and/or an increased nutrient use efficiency, intrinsic yield and/or another increased yield-related trait, upon expression or over-expression. Accordingly, the present invention provides such genes in case in column 7 of the respective Table or beta-sitosterol, campesterol, and/or stigmasterol is indicated. In particular, such genes are described in column 5 as well as in column 8 of Tables I, especially the coding region thereof, or homologs or fragments thereof, in case beta-sitosterol, campesterol, and/or stigmasterol are indicated in column 7 or the respective polypeptides are described in column 5 as well as in column 8 of Table II, or homologs or fragments thereof, in case beta-sitosterol, campesterol, and/or stigmasterol are indicated in column 7.

[69133] Accordingly, the present invention provides respective transgenic plants showing one or more improved yield-related traits as compared to the corresponding origin or the wild type plant and methods for producing such transgenic plants with increased yield in case in column 7 of the respective Table “beta-sitosterol” or “campesterol” or “stigmasterol”is indicated. In one embodiment, one or more of said yield-increasing activities are increased by increasing the amount and/or the specific activity of one or more proteins listed in Table II, column 5 or 8 in a compartment of a cell indicated in Table II, column 6, in case in column 7 of the respective Table “beta-sitosterol” or “campesterol” or “stigmasterol” is indicated.

[69134] Accordingly to present invention, the yield of the plant of the invention is increased by improving one or more of the yield-related traits as defined herein. Said increased yield in accordance with the present invention can typically be achieved by enhancing or improving, in comparison to an origin or wild-type plant, one or more yield-related traits of said plant. Such yield-related traits of a plant the improvement of which results in increased yield comprise, without limitation, the increase of the intrinsic yield capacity of a plant, improved nutrient use efficiency, like nitrogen use efficiency, and/or increased stress tolerance.

[69135] In one embodiment, the present invention provides respective transgenic plants showing one or more improved yield-related traits, preferably increased drought tolerance as compared to the corresponding origin or the wild type plant and methods for producing such transgenic plants with increased yield in case in column 7 of the respective Table “beta-sitosterol” or “campesterol” or “stigmasterol”is indicated.

[69136] In one embodiment, the present invention provides respective transgenic plants showing one or more improved yield-related traits, preferably increased stress tolerance against low temperatures and cold conditions (such as freezing and chilling conditions) as compared to the corresponding origin or the wild type plant and methods for producing such transgenic plants with increased yield in case in column 7 of the respective Table “beta-sitosterol” or “campesterol” is indicated.

[69137] In a further embodiment the present invention is characterized by the features as disclosed in the following items:

[69138] Item 1. A process for the production of a fine chemical selected from the group consisting of: beta-sitosterol, campesterol and/or stigmasterol
[69139] (a) increasing or generating one or more activities selected from the group consisting of 2-oxoglutarate dehydrogenase E1 subunit, ABC metal ion transporter substratebinding protein, acetyl-CoA acetyltransferase, acetyltransferase, acid shock protein, acyl transferase, amidophosphoribosyltransferase, ankyrin repeat family protein, ATP-binding component of a transport system, b1401-protein, B1795-protein, b2107-protein, b2376-protein, b2399-protein, b2474-protein, b2513-protein, b2654-protein, b3151-protein, b3989-protein, b4029-protein, b4205-protein, C-4 sterol methyl oxidase, calcium-dependent protein kinase, cation transport protein, cation-transporting ATPase, CTP synthase, CTP synthetase, cyclin, cyclin D, eukaryotic translation initiation factor 5, glucose dehydrogenase, glucose-6-phosphate 1-dehydrogenase, glutaredoxin, homocitrate synthase, hydrolase, lipoprotein precursor, L-ribulose-5-phosphate 4-epimerase, membrane transport protein, methyltransferase, monothiol glutaredoxin, multidrug resistance protein, multiple antibiotic resistance protein, murein transglycosylase, NADH dehydrogenase I chain N, oxidoreductase, permease protein, permease protein of ABC transporter, phenylacetic acid degradation protein, phosphoribulokinase, polygalacturonase, protein kinase, protein phosphatase, putative transport system permease protein, putrescine transport system permease protein, recombinase A, sec-independent protein translocase, sll0406-protein, sll1761-protein, sodium/proton antiporter, sterol desaturase, threonine dehydrogenase, threonine synthase, transcription factor, tryptophan synthase alpha chain, TTC1386-protein, xanthine dehydrogenase, ydl235c-protein, ynl321w-protein, and ypr170c-protein, in a non-human organism or a part thereof, preferably a microorganism, a plant cell, a plant or a part thereof, as compared to a corresponding non-transformed wild type non-human organism or a part thereof; and
[69140] (b) growing the non-human organism or a part thereof under conditions which permit the production of beta-sitosterol, campesterol and/or stigmasterol or a composition comprising beta-sitosterol, campesterol and/or stigmasterol in said non-human organism or in the culture medium surrounding said non-human organism.

[69141] Item 2. A process for the production of a fine chemical selected from the group consisting of: beta-sitosterol, campesterol and/or stigmasterol, which comprises
[69142] (A)
   [69143] (i) increasing or generating of the expression of; and/or
   [69144] (ii) increasing or generating the expression of an expression product of; and/or
   [69145] (iii) increasing or generating one or more activities of an expression product encoded by;
      at least one respective nucleic acid molecule comprising a nucleic acid molecule selected from the group consisting of:
   [69146] (a) a nucleic acid molecule encoding the polypeptide shown in column 5 or 8 of Table II, preferably Table II B, application no.14, or a homolog or a fragment thereof;
   [69147] (b) a nucleic acid molecule shown in column 5 or 8 of Table I, preferably Table I B, application no.14, or a homolog or a fragment thereof (preferably the coding region thereof);
   [69148] (c) a nucleic acid molecule, which, as a result of the degeneracy of the genetic code, can be derived from a polypeptide sequence depicted in column 5 or 8 of Table II, preferably Table II B, application no.14;
   [69149] (d) a nucleic acid molecule having at least 30%, in particular at least 50%, 60%, 70%, 80%, 85%, 90%, 95%, 97%, 98%, 99% or 99.5% identity with the nucleic acid molecule sequence of a polynucleotide comprising the nucleic acid molecule shown in column 5 or 8 of Table I, preferably Table I B, application no. 14, or the coding region thereof;
   [69150] (e) a nucleic acid molecule encoding a polypeptide having at least 30%, in particular 50%, 60%, 70%, 80%, 85%, 90%, 95%, 97%, 98%, 99% or 99.5% identity with the amino acid sequence of the polypeptide encoded by the nucleic acid molecule of (a), (b), (c) or (d);
   [69151] (f) a nucleic acid molecule which hybridizes with a nucleic acid molecule of (a), (b), (c), (d) or (e) under stringent hybridization conditions;
   [69152] (g) a nucleic acid molecule encoding a polypeptide which can be isolated with the aid of monoclonal or polyclonal antibodies made against a polypeptide encoded by one of the nucleic acid molecules of (a), (b), (c), (d), (e) or (f);
   [69153] (h) a nucleic acid molecule encoding a polypeptide comprising the consensus sequence or one or more polypeptide motifs as shown in column 8 of Table IV, application no.14;
   [69154] (i) a nucleic acid molecule encoding a polypeptide having the activity represented by a respective protein as depicted in column 5 of Table II, application no. 14;
   [69155] (j) a nucleic acid molecule which comprises a polynucleotide, which is obtained by amplifying a cDNA library or a genomic library using the primers as depicted in column 8 of Table III, application no. 14; and
   [69156] (k) a nucleic acid molecule which is obtainable by screening a suitable nucleic acid library, especially a cDNA library and/or a genomic library, under stringent hybridization conditions with a probe comprising a complementary sequence of a nucleic acid molecule of (a), (b), (c), (d), (e), (f), (g), (h), (i) or (j) or with a fragment thereof, having at least 15 nt, preferably 20 nt, 30 nt, 50 nt, 100 nt, 200 nt, 500 nt, 1000 nt, 1500 nt, 2000 nt or 3000 nt of a nucleic acid molecule complementary to a nucleic acid molecule sequence characterized in (a), (b), (c), (d), (e), (f), (g), (h), (i) or (j);
   [69157] or a nucleic acid molecule comprising a sequence which is complementary thereto; in a non-human organism or a part thereof, preferably a microorganism, a plant cell, a plant or a part thereof, as compared to a corresponding non-transformed wild type non-human organism or a part thereof; and
[69158] (B) growing the non-human organism or a part thereof under conditions which permit the production of beta-sitosterol, campesterol and/or stigmasterol or a composition comprising beta-sitosterol, campesterol and/or stigmasterol in said non-human organism or in the culture medium surrounding said non-human organism.

[69159] Item 3. A process of items 1 or 2, comprising of recovering beta-sitosterol, campesterol and/or stigmasterol in its free or bound form.

[69160] Item 4. The process of any one of items 1 to 3, comprising the folowing steps:
[69161] (a) selecting a non-human organism or a part thereof expressing a polypeptide encoded by the nucleic acid molecule characterized in item 2;
[69162] (b) mutagenizing the selected non-human organism or the part thereof;
[69163] (c) comparing the activity or the expression level of said polypeptide in the mutagenized non-human organism or the part thereof with the activity or the expression of said polypeptide of the selected non-human organisms or the part thereof;
[69164] (d) selecting the mutated non-human organisms or parts thereof, which comprise an increased activity or expression level of said polypeptide compared to the selected non-human organism or the part thereof;
[69165] (e) optionally, growing and cultivating the non-human organisms or the parts thereof; and
[69166] (f) recovering, and optionally isolating, the free or bound beta-sitosterol, campesterol and/or stigmasterol produced by the selected mutated non-human organisms or parts thereof.

[69167] Item 5. The process of any one of items 1 to 4 wherein the activity of said protein or the expression of said nucleic acid molecule is increased or generated transiently or stably.

[69168] Item 6. An isolated nucleic acid molecule comprising a nucleic acid molecule selected from the group consisting of:
[69169] (a) a nucleic acid molecule encoding a polypeptide shown in Table II, application no. 14, column 5 or 8, preferably shown in Table II B, application no. 14, column 8, or a homolog or a fragment thereof;
[69170] (b) a nucleic acid molecule shown in Table I, application no. 14, column 5 or 8, preferably shown in Table I B, application no. 14, column 8, preferably the coding region thereof, or a homolog or a fragment thereof;
[69171] (c) a nucleic acid molecule, which, as a result of the degeneracy of the genetic code, can be derived from a polypeptide sequence depicted in column 5 or 8 of Table II, application no. 14, preferably in column 8 of Table II B, application no. application no.;
[69172] (d) a nucleic acid molecule having at least 30% identity, preferably at least 40%, 50%, 60%, 70%, 75%, 80%, 85%, 90%, 95%, 96%, 97%, 98%, 99%, 99.5%, with the nucleic acid molecule sequence of a polynucleotide comprising the nucleic acid molecule shown in column 5 or 8 of Table I, application no. 3, preferably shown in column 8 of Table I B, application no. 14, preferably the coding region thereof;
[69173] (e) a nucleic acid molecule encoding a polypeptide having at least 30% identity, preferably at least 40%, 50% 60%, 70%, 75%, 80%, 85%, 90%, 95%, 96%, 97%, 98%, 99%, 99.5%, identity with the amino acid sequence of the polypeptide encoded by the nucleic acid molecule of (a), (b), (c) or (d);
[69174] (f) a nucleic acid molecule which hybridizes with a nucleic acid molecule of (a), (b), (c), (d) or (e) under stringent hybridisation conditions;
[69175] (g) a nucleic acid molecule encoding a polypeptide which can be isolated with the aid of monoclonal or polyclonal antibodies made against a polypeptide encoded by one of the nucleic acid molecules of (a), (b), (c), (d), (e) or (f);
[69176] (h) a nucleic acid molecule encoding a polypeptide comprising the consensus sequence or one or more polypeptide motifs as shown in column 8 of Table IV, application no. 14;
[69177] (i) a nucleic acid molecule encoding a polypeptide having the activity represented by a respective protein as depicted in column 5 of Table II, application no. 14;
[69178] (j) a nucleic acid molecule comprising a polynucleotide which is obtained by amplifying a cDNA library or a genomic library using the primers in Table III, application no. 14, column 8;
[69179] and
[69180] (k) nucleic acid molecule which is obtainable by screening a suitable nucleic acid library, especially a cDNA library and/or a genomic library, under stringent hybridization conditions with a probe comprising one of the sequences of the nucleic acid molecule of (a), (b), (c), (d), (e), (f), (g), (h), (i) or (j) or with a fragment of at least 15 nt, preferably 20 nt, 30 nt, 50 nt, 100 nt, 200 nt,500 nt, 1000 nt, 1500 nt, 2000 nt or 3000 nt of the nucleic acid molecule characterized in (a), (b), (c), (d), (e), (f), (g), (h), (i) or (j);
[69181] or a nucleic acid molecule comprising a sequence which is complementary thereto.

[69182] Item 7. A nucleic acid construct which confers the expression of the nucleic acid molecule as defined in item 6, comprising one or more regulatory elements.

[69183] Item 8. An expression cassette comprising
[69184] (a) a promoter, preferably selected from the group consisting of Big35S, PCUbi, Super and USP;
[69185] (b) a nucleic acid molecule as defined in item 6.

[69186] Item 9. A vector comprising the nucleic acid molecule as defined in item 6 or the nucleic acid construct as claimed in item 7 or the expression cassette as claimed in item 8.

[69187] Item 10. A host cell or a plant organelle, which has been transformed with the vector as claimed in item 9 or the nucleic acid molecule as defined in item 6 or the nucleic acid construct as claimed in item 7 or the expression cassette as claimed in item 8.

[69188] Item 11. The host cell of item 10, which is a plant cell or a microorganism.

[69189] Item 12. A process for producing a polypeptide, wherein the polypeptide is expressed in a host cell as claimed in item 10 or 11.

[69190] Item 13. A polypeptide produced by the process as claimed in item 12 or encoded by the nucleic acid molecule as defined in item 6.

[69191] Item 14. An antibody, which binds specifically to the polypeptide as claimed in item 13.

[69192] Item 15. A plant tissue, propagation material, harvested material or a plant comprising the host cell as claimed in item 10 or 11.

[69193] Item 16. A process for the identification of a compound conferring an increase in beta-sitosterol, campesterol and/or stigmasterol production in a non-human organism, comprising the steps:
[69194] (a) culturing a plant cell or tissue or microorganism or maintaining a plant expressing the polypeptide encoded by the nucleic acid molecule as defined in item 6 conferring an increase in the amount of beta-sitosterol, campesterol and/or stigmasterol in a non-human organism or a part thereof and a readout system capable of interacting with the polypeptide under suitable conditions which permit the interaction of the polypeptide with said readout system in the presence of a compound or a sample comprising a plurality of compounds and capable of providing a detectable signal in response to the binding of a compound to said polypeptide under conditions which permit the expression of said readout system and of the polypeptide encoded by the nucleic acid molecule of item 6 conferring an increase in the amount of beta-sitosterol, campesterol and/or stigmasterolin a non-human organism or a part thereof;
[69195] (b) identifying if the compound is an effective agonist by detecting the presence or absence or increase of a signal produced by said readout system.

[69196] Item 17. A method for the production of an agricultural composition comprising the steps of the method of item 16 and formulating the compound identified in item 16 in a form acceptable for an application in agriculture.

[69197] Item 18. A composition comprising the nucleic acid molecule as defined in item 6, the polypeptide as claimed in item 13, the nucleic acid construct as claimed in item 7, the expression cassette as claimed in item 8, the vector as claimed in item 9, the compound as claimed in item 16, the antibody as claimed in item 14, and optionally an agricultural acceptable carrier.

[69198] Item 19. Use of the nucleic acid molecule as defined in item 6 for the identification of a nucleic acid molecule conferring an increase in beta-sitosterol, campesterol and/or stigmasterol after expression.

[69199] Item 20. Cosmetic, pharmaceutical, food or feed composition comprising the nucleic acid moleculeas defined in item 6, the polypeptide as claimed in item 13, the nucleic acid construct as claimed in item 7, the expression cassette as claimed in item 8, the vector as claimed in item 9, the antibody as claimed in item 14 , the plant or plant tissue as claimed in item 15, the harvested material as claimed in item 15 or the host cell of item as claimed in items 10 or 11.

[69200] Item 21. Use of the nuclei acid molecule as defined in item 6, the polypeptide as claimed in item 13, the nucleic acid construct as claimed in item 7, the expression cassette as claimed in item 8, the vector as claimed in claim9, the plant or plant tissue as claimed in item 15, or the host cell of item 10 to 11 for the production of plant resistant to a herbicide inhibiting the production of beta-sitosterol, campesterol and/or stigmasterol.

[69201] Item 22. A method for producing a plant with increased yield as compared to a corresponding non-transformed wild type plant, whereby the method comprises
[69202] (i) increasing or generating of the expression of; and/or
[69203] (ii) increasing or generating the expression of an expression product of; and/or
[69204] (iii) increasing or generating one or more activities of an expression product encoded by;
   at least one respective nucleic acid molecule comprising a nucleic acid molecule selected from the group consisting of:
[69205] (a) a nucleic acid molecule encoding the polypeptide shown in column 5 or 8 of Table II, preferably Table II B, application no. 14, or a homolog or a fragment thereof, in case in column 7 beta-sitosterol, campesterol and/or stigmasterol is indicated;
[69206] (b) a nucleic acid molecule shown in column 5 or 8 of Table I, preferably Table I B, application no. 14, or a homolog or a fragment thereof (preferably the coding region thereof) , in case in column 7 beta-sitosterol, campesterol and/or stigmasterol is indicated,
[69207] (c) a nucleic acid molecule, which, as a result of the degeneracy of the genetic code, can be derived from a polypeptide sequence depicted in column 5 or 8 of Table II, preferably Table II B, application no. 14, in case in column 7 beta-sitosterol, campesterol and/or stigmasterol is indicated;
[69208] (d) a nucleic acid molecule having at least 30%, in particular at least 50%, 60%, 70%, 80%, 85%, 90%, 95%, 97%, 98%, 99% or 99.5% identity with the nucleic acid molecule sequence of a polynucleotide comprising the nucleic acid molecule shown in column 5 or 8 of Table I, preferably Table I B, application no. 14, or the coding region thereof, in case in column 7 beta-sitosterol, campesterol and/or stigmasterol is indicated;
[69209] (e) a nucleic acid molecule encoding a polypeptide having at least 30%, in particular 50%, 60%, 70%, 80%, 85%, 90%, 95%, 97%, 98%, 99% or 99.5% identity with the amino acid sequence of the polypeptide encoded by the nucleic acid molecule of (a), (b), (c) or (d);
[69210] (f) a nucleic acid molecule which hybridizes with a nucleic acid molecule of (a), (b), (c), (d) or (e) under stringent hybridization conditions;
[69211] (g) a nucleic acid molecule encoding a polypeptide which can be isolated with the aid of monoclonal or polyclonal antibodies made against a polypeptide encoded by one of the nucleic acid molecules of (a), (b), (c), (d), (e) or (f);
[69212] (h) a nucleic acid molecule encoding a polypeptide comprising the consensus sequence or one or more polypeptide motifs as shown in column 8 of Table IV, application no. 14, in case in column 7 beta-sitosterol, campesterol and/or stigmasterol is indicated;
[69213] (i) a nucleic acid molecule encoding a polypeptide having the activity represented by a respective protein as depicted in column 5 of Table II, application no. 14, in case in column 7 beta-sitosterol, campesterol and/or stigmasterol is indicated;
[69214] (j) a nucleic acid molecule which comprises a polynucleotide, which is obtained by amplifying a cDNA library or a genomic library using the primers as depicted in column 8 of Table III, application no. 14, in case in column 7 beta-sitosterol, campesterol and/or stigmasterol is indicated; and
[69215] (k) a nucleic acid molecule which is obtainable by screening a suitable nucleic acid library, especially a cDNA library and/or a genomic library, under stringent hybridization conditions with a probe comprising a complementary sequence of a nucleic acid molecule of (a), (b), (c), (d), (e), (f), (g), (h), (i) or (j) or with a fragment thereof, having at least 15 nt, preferably 20 nt, 30 nt, 50 nt, 100 nt, 200 nt, 500 nt, 1000 nt, 1500 nt, 2000 nt or 3000 nt of a nucleic acid molecule complementary to a nucleic acid molecule sequence characterized in (a), (b), (c), (d), (e), (f), (g), (h), (i) or (j);
[69216] or a nucleic acid molecule comprising a sequence which is complementary thereto; in a plant cell, plant or a part thereof.

[69217] 23. A method for producing a plant with increased yield according to item 22, which comprises in addition the regeneration of a plant from such transformed plant cell, plant cell compartment, plant cell nucleus, plant cell or plant tissue with increased yield.

[69218] [0483.1.7.14] to [0492.1.7.14] for the disclosure of theses paragraphs see [0483.1.7.7] to [0492.1.7.7] above

### Example 10

### Purification of a Fine Chemical e.g. of Phytosterols in Particular Beta-Sitosterol, Campesterol, and/or Stigmasterol

[69219] Identity and purity of the phytosterols such as beta-sitosterol, campesterol, and/or stigmasterol isolated can be determined by standard techniques of the art. They encompass old techniques such as photometric methods and new techniques such as high-performance liquid chromatography (HPLC), gas chromatography (GC), spectroscopic methods, mass spectrometry (MS), staining methods, thin-layer chromatography, NIRS, enzyme assay or microbiological assays. Phytosterols can be detected via HPLC, e.g. reversed-phase HPLC, as described by Heftmann, E. and Hunter, I.R. (J Chromatogr 1979; 165: 283-299. Furthermore the analysis of phytosterols can be performed as described in S. L. Abidi, “Chromatographic analysis of plant sterols in foods and vegetable oils [Review]”, Journal of Chromatography 2001, A.. 935, 173-20 or P. Appelblad, K. Irgum, “Separation and detection of neuroactive steroids from biological matrices [Review]”, Journal of Chromatography A 2002, 955, 151-182. or K. Shimada, K. Mitamura, T. Higashi, “Gas chromatography and high-performance liquid chromatography of natural steroids [Review]”, Journal of Chromatography 2001, A.. 935, 141-172. For the sterol isolation and analysis the German standard method F III may be used. The method comprises: saponification of fat, isolation of unsaponifiable matter using an aluminium oxide column, separation of sterol fraction by preparative TLC and determination of the composition of sterols as trimetysilyl ethers by GC.

[69220] for the disclosure of this paragraph see [0494.1.7.7] above

### Example 11a

### PCR Amplification of the Sequences

[69221] Unless otherwise specified, standard methods as described in Sambrook et al., Molecular Cloning: A laboratory manual, Cold Spring Harbor 1989, Cold Spring Harbor Laboratory Press are used.

[69222] The inventive sequences as shown in the respective line in Table I, column 5, preferably the coding region thereof, were amplified by PCR as described in the protocol of the Pfu Ultra, Pfu Turbo or Herculase DNA polymerase (Stratagene). The composition for the protocol of the Pfu Ultra, Pfu Turbo or Herculase DNA polymerase was as follows: 1×PCR buffer (Stratagene), 0.2 mM of each dNTP, 100 ng genomic DNA of Saccharomyces cerevisiae (strain S288C; Research Genetics, Inc., now Invitrogen), Escherichia coli (strain MG1655; E. coli Genetic Stock Center), Synechocystis sp. (strain PCC6803), Azotobacter vinelandii (strain N.R. Smith, 16), Thermus thermophilus (HB8) or 50 ng cDNA from various tissues and development stages of Arabidopsis thaliana (ecotype Columbia), Physcomitrella patens, Glycine max (variety Resnick), Brassica napus, Oryza sativa or Zea mays (variety B73, Mo17, A188), 50 pmol forward primer, 50 pmol reverse primer, with or without 1 M Betaine, 2.5 u Pfu Ultra, Pfu Turbo or Herculase DNA polymerase.

[69223] The amplification cycles were as follows:

[69224] 1 cycle of 2-3 minutes at 94-95° C., then 25-36 cycles with 30-60 seconds at 94-95° C., 30-45 seconds at 50-60° C. and 210-480 seconds at 72° C., followed by 1 cycle of 5-10 minutes at 72° C., then 4-16° C.—preferably for Saccharomyces cerevisiae, Escherichia coli, Synechocystis sp., Azotobacter vinelandii, Thermus thermophilus.

[69225] In case of Arabidopsis thaliana, Brassica napus, Glycine max, Oryza sativa, Physcomitrella patens, Zea mays the amplification cycles were as follows: 1 cycle with 30 seconds at 94° C., 30 seconds at 61° C., 15 minutes at 72° C., then 2 cycles with 30 seconds at 94° C., 30 seconds at 60° C., 15 minutes at 72° C., then 3 cycles with 30 seconds at 94° C., 30 seconds at 59° C., 15 minutes at 72° C., then 4 cycles with 30 seconds at 94° C., 30 seconds at 58° C., 15 minutes at 72° C., then 25 cycles with 30 seconds at 94° C., 30 seconds at 57° C., 15 minutes at 72° C., then 1 cycle with 10 minutes at 72° C., then finally 4-16° C. RNAs were generated with the RNeasy Plant Kit according to the standard protocol (Qiagen) and Superscript II Reverse Transkriptase was used to produce double stranded cDNA according to the standard protocol (Invitrogen).

[69226] ORF specific primer pairs for the genes to be expressed are shown in the respective line in Table III, column 8. The following adapter sequences were added to Saccharomyces cerevisiae ORF specific primers (see Table III) for cloning purposes:

SEQ ID NO: 20

| | | |
|---|---|---|
| i) | foward primer: | 5′-GGAATTCCAGCTGACCACC-3′ |

SEQ ID NO: 21

| | | |
|---|---|---|
| ii) | reverse primer: | 5′-GATCCCCGGGAATTGCCATG-3′ |

[69227] These adaptor sequences allow cloning of the ORF into the various vectors containing the Resgen adaptors, see table column E of Table c.

[69228] The following adapter sequences were added to Saccharomyces cerevisiae, Escherichia coli, Synechocystis sp., Azotobacter vinelandii, Thermus thermophilus, Arabidopsis thaliana, Brassica napus, Glycine max, Oryza sativa , Physcomitrella patens, or Zea mays ORF specific primers for cloning purposes:

| SEQ ID NO: 22 | | |
|---|---|---|
| iii) | forward primer: | 5′-TTGCTCTTCC-3′ |
| SEQ ID NO: 23 | | |
| iiii) | reverse primer: | 5′-TTGCTCTTCG-3′ |

[69229] The adaptor sequences allow cloning of the ORF into the various vectors containing the Colic adaptors, see table column E of Table c.

[69230] Therefore for amplification and cloning of Saccharomyces cerevisiae SEQ ID NO: 14171, a primer consisting of the adaptor sequence i) and the ORF specific sequence SEQ ID NO: 14271 and a second primer consisting of the adaptor sequence ii) and the ORF specific sequence SEQ ID NO: 14272 were used.

[69231] For amplification and cloning of Escherichia coli SEQ ID NO: 7333, a primer consisting of the adaptor sequence iii) and the ORF specific sequence SEQ ID NO: 7679 and a second primer consisting of the adaptor sequence iiii) and the ORF specific sequence SEQ ID NO: 7680 were used.

[69232] For amplification and cloning of Synechocystis sp. SEQ ID NO: 11990, a primer consisting of the adaptor sequence iii) and the ORF specific sequence SEQ ID NO: 12064 and a second primer consisting of the adaptor sequence iiii) and the ORF specific sequence SEQ ID NO: 12065 were used.

[69233] For amplification and cloning of Arabidopsis thaliana SEQ ID NO: 1061, a primer consisting of the adaptor sequence iii) and the ORF specific sequence SEQ ID NO: 1293 and a second primer consisting of the adaptor sequence iiii) and the ORF specific sequence SEQ ID NO: 1294 were used.

[69234] For amplification and cloning of Azotobacter vinelandii SEQ ID NO: 6075, a primer consisting of the adaptor sequence iii) and the ORF specific sequence SEQ ID NO: 6255 and a second primer consisting of the adaptor sequence iiii) and the ORF specific sequence SEQ ID NO: 6256 were used.

[69235] For amplification and cloning of Glycine max SEQ ID NO: 10811, a primer consisting of the adaptor sequence iii) and the ORF specific sequence SEQ ID NO: 11207 and a second primer consisting of the adaptor sequence iiii) and the ORF specific sequence SEQ ID NO: 11208 were used.

[69236] For amplification and cloning of Thermus thermophilus SEQ ID NO: 12974, a primer consisting of the adaptor sequence iii) and the ORF specific sequence SEQ ID NO: 13372 and a second primer consisting of the adaptor sequence iiii) and the ORF specific sequence SEQ ID NO: 13373 were used.

[69237] Following these examples every sequence disclosed in Table I, preferably column 5, especially the coding region thereof can be cloned by fusing the adaptor sequences to the respective specific primers sequences as disclosed in Table III, column 8 using the respective vectors shown in Table c.

[69238] [0496.1.7.14] to [0499.1.7.14] for the disclosure of these paragraphs see [0496.1.7.7] to [0499.1.7.7] above

### Example 11e

### Cloning of Inventive Sequences as Shown in Table I, Column 5 in the Different Expression Vectors

[69239] For cloning of for example SEQ ID NO: 7333 from Escherichia coli or any other ORF from Escherichia coli, Synechocystis sp., Azotobacter vinelandii, Thermus thermophilus, Arabidopsis thaliana or Glycine max, the vector DNA was treated with the restriction enzymes Pacl and Ncol following the standard protocol (MBI Fermentas).

[69240] For cloning for example the ORFs of SEQ ID NO: 14171 from Saccharomyces cerevisiae or any other ORF from Saccharomyces cerevisiae into vectors containing the Resgen adaptor sequence the respective vector DNA was treated with the restriction enzyme Ncol.

[69241] For cloning of for example ORFs SEQ ID NO: 66274 from Saccharomyces cerevisiae or any other ORF from Saccharomyces cerevisiae into vectors containing the Colic adaptor sequence, the respective vector DNA was treated with the restriction enzymes Pacl and Ncol following the standard protocol (MBI Fermentas).

[69242] In all cases the reaction was stopped by inactivation at 70° C. for 20 minutes and purified over QlAquick or NucleoSpin Extract II columns following the standard protocol (Qiagen or Macherey-Nagel).

[69243] Then the PCR-product representing the amplified ORF with the respective adapter sequences and the vector DNA were treated with T4 DNA polymerase according to the standard protocol (MBI Fermentas) to produce single stranded overhangs with the parameters 1 unit T4 DNA polymerase at 37° C. for 2-10 minutes for the vector and 1-2 u T4 DNA polymerase at 15-17° C. for 10-60 minutes for the PCR product representing SEQ ID NO: 7333.

[69244] The reaction was stopped by addition of high-salt buffer and purified over QlAquick or NucleoSpin Extract II columns following the standard protocol (Qiagen or Macherey-Nagel).

[69245] According to this example the skilled person is able to clone all sequences disclosed in Table I, preferably column 5 or column 8, especially the coding region thereof.

[69246] Approximately 30-60 ng of prepared vector and a defined amount of prepared amplificate were mixed and hybridized at 65° C. for 15 minutes followed by 37° C. 0.1° C/1 seconds, followed by 37° C. 10 minutes, followed by 0.1° C/1 seconds, then 4-10° C. The ligated constructs were transformed in the same reaction vessel by addition of competent E. coli cells (strain DHSalpha) and incubation for 20 minutes at 1° C. followed by a heat shock for 90 seconds at 42° C. and cooling to 1-4° C. Then, complete medium (SOC) was added and the mixture was incubated for 45 minutes at 37° C. The entire mixture was subsequently plated onto an agar plate with 0.05 mg/ml kanamycin and incubated overnight at 37° C.

[69247] The outcome of the cloning step was verified by amplification with the aid of primers which bind upstream and downstream of the integration site, thus allowing the amplification of the insertion. The amplifications were carried out as described in the protocol of Taq DNA polymerase (Gibco-BRL).

[69248] The amplification cycles were as follows:

[69249] 1 cycle of 1-5 minutes at 94° C., followed by 35 cycles of in each case 15-60 seconds at 94° C., 15-60 seconds at 50-66° C. and 5-15 minutes at 72° C., followed by 1 cycle of 10 minutes at 72° C., then 4-16° C.

[69250] Several colonies were checked, but only one colony for which a PCR product of the expected size was detected was used in the following steps.

[69251] A portion of this positive colony was transferred into a reaction vessel filled with complete medium (LB) supplemented with kanamycin and incubated overnight at 37° C.

[69252] The plasmid preparation was carried out as specified in the Qiaprep or NucleoSpin Multi-96 Plus standard protocol (Qiagen or Macherey-Nagel).

[69253] [0501.1.7.14] to [0503.1.7.14] for the disclosure of these paragraphs see [0501.1.7.7] to [0503.1.7.7] above

[69254] Table d showing results of plant analyses

TABLE d

| SeqID | Target | Locus | Metabolite | Source | Promotor | Method | Min | Max |
|---|---|---|---|---|---|---|---|---|
| 131003 | non-targ | At1g07420 | campesterol | ARA_LEAF | p-PcUBI | GC | 89 | 300 |
| 17451 | non-targ | At1g07430 | campesterol | ARA_LEAF | p-PcUBI | GC | 18 | 54 |
| 17968 | non-targ | At1g36730 | campesterol | ARA_LEAF | p-PcUBI | GC | 17 | 36 |
| 18869 | non-targ | At1g61950 | b-sitosterol | ARA_LEAF | p-PcUBI | GC | 17 | 22 |
| 18869 | non-targ | At1g61950 | campesterol | ARA_LEAF | p-PcUBI | GC | 17 | 37 |
| 1061 | non-targ | At1g68320 | b-sitosterol | ARA_LEAF | p-PcUBI | GC | 14 | 49 |
| 1061 | non-targ | At1g68320 | campesterol | ARA_LEAF | p-PcUBI | GC | 16 | 76 |
| 19419 | non-targ | At1g72770 | campesterol | ARA_LEAF | p-PcUBI | GC | 17 | 79 |
| 21902 | non-targ | At3g04710 | campesterol | ARA_LEAF | p-PcUBI | GC | 16 | 31 |
| 109717 | non-targ | At4g09960 | b-sitosterol | ARA_LEAF | p-PcUBI | GC | 17 | 154 |
| 109717 | non-targ | At4g09960 | campesterol | ARA_LEAF | p-PcUBI | GC | 17 | 38 |
| 131208 | non-targ | At4g12110 | campesterol | ARA_LEAF | p-PcUBI | GC | 22 | 75 |
| 23482 | non-targ | At4g15660 | b-sitosterol | ARA_LEAF | p-PcUBI | GC | 15 | 44 |
| 68849 | non-targ | At4g26080 | campesterol | ARA_LEAF | p-PcUBI | GC | 16 | 39 |
| 4348 | non-targ | At4g35310 | b-sitosterol | ARA_LEAF | p-PcUBI | GC | 18 | 34 |
| 4348 | non-targ | At4g35310 | campesterol | ARA_LEAF | p-PcUBI | GC | 35 | 70 |
| 5318 | non-targ | At5g57050 | campesterol | ARA_LEAF | p-PcUBI | GC | 30 | 45 |
| 25498 | non-targ | At5g59220 | b-sitosterol | ARA_LEAF | p-PcUBI | GC | 13 | 39 |
| 122803 | non-targ | At5g66710 | b-sitosterol | ARA_LEAF | p-PcUBI | GC | 14 | 23 |
| 26196 | non-targ | Avin- | b-sitosterol | ARA_LEAF | p-PcUBI | GC | 13 | 18 |
| | | DRAFT_1624 | | | | | | |
| 6075 | non-targ | Avin- | campesterol | ARA_LEAF | p-PcUBI | GC | 18 | 43 |
| | | DRAFT_3028 | | | | | | |
| 29500 | non-targ | Avin- | campesterol | ARA_LEAF | p-PcUBI | GC | 16 | 35 |
| | | DRAFT_3253 | | | | | | |
| 31026 | non-targ | Avin- | b-sitosterol | ARA_LEAF | p-PcUBI | GC | 13 | 24 |
| | | DRAFT_3605 | | | | | | |
| 31026 | non-targ | Avin- | campesterol | ARA_LEAF | p-PcUBI | GC | 17 | 44 |
| | | DRAFT_3605 | | | | | | |
| 114231 | non-targ | Avin- | campesterol | ARA_LEAF | p-PcUBI | GC | 16 | 72 |
| | | DRAFT_3629 | | | | | | |
| 6510 | non-targ | Avin- | b-sitosterol | ARA_LEAF | p-PcUBI | GC | 16 | 32 |
| | | DRAFT_5103 | | | | | | |
| 6510 | non-targ | Avin- | campesterol | ARA_LEAF | p-PcUBI | GC | 19 | 45 |
| | | DRAFT_5103 | | | | | | |
| 34889 | plastidic | B0004 | campesterol | ARA_LEAF | p-Super | GC | 21 | 90 |
| 35204 | non-targ | B0061 | campesterol | ARA_LEAF | p-Super | GC | 16 | 56 |
| 35482 | non-targ | B0124 | campesterol | ARA_SEED_2 | p-USP | GC | 26 | 55 |
| 7333 | non-targ | B0449 | b-sitosterol | ARA_LEAF | p-Super | GC | 19 | 63 |
| 7333 | non-targ | B0449 | campesterol | ARA_LEAF | p-Super | GC | 20 | 86 |
| 7686 | non-targ | B0486 | campesterol | ARA_LEAF | p-Super | GC | 19 | 29 |
| 131359 | plastidic | B0856 | campesterol | ARA_LEAF | p-Super | GC | 25 | 28 |
| 76032 | plastidic | B1065 | b-sitosterol | ARA_LEAF | p-Super | GC | 20 | 27 |
| 37400 | non-targ | B1186 | b-sitosterol | ARA_LEAF | p-Super | GC | 15 | 54 |
| 37400 | non-targ | B1186 | campesterol | ARA_LEAF | p-Super | GC | 16 | 39 |
| 131489 | non-targ | B1391 | b-sitosterol | ARA_LEAF | p-Super | GC | 13 | 24 |
| 131489 | non-targ | B1391 | campesterol | ARA_LEAF | p-Super | GC | 15 | 29 |
| 131531 | non-targ | B1401 | campesterol | ARA_LEAF | p-Super | GC | 19 | 40 |
| 38266 | plastidic | B1431 | campesterol | ARA_LEAF | p-Super | GC | 27 | 440 |
| 38300 | non-targ | B1597 | b-sitosterol | ARA_LEAF | p-Super | GC | 20 | 33 |
| 38300 | non-targ | B1597 | campesterol | ARA_LEAF | p-Super | GC | 16 | 46 |
| 131539 | non-targ | B1795 | campesterol | ARA_LEAF | p-Super | GC | 37 | 54 |
| 131799 | non-targ | B1932 | campesterol | ARA_LEAF | p-Super | GC | 17 | 50 |
| 39002 | non-targ | B2107 | campesterol | ARA_LEAF | p-Super | GC | 16 | 48 |
| 131839 | non-targ | B2276 | campesterol | ARA_SEED_2 | p-USP | GC | 13 | 20 |
| 132086 | non-targ | B2312 | campesterol | ARA_LEAF | p-Super | GC | 16 | 73 |
| 132695 | plastidic | B2376 | campesterol | ARA_LEAF | p-Super | GC | 26 | 193 |
| 39237 | non-targ | B2399 | campesterol | ARA_LEAF | p-Super | GC | 45 | 79 |
| 40329 | non-targ | B2474 | campesterol | ARA_LEAF | p-Super | GC | 17 | 48 |
| 132706 | non-targ | B2493 | campesterol | ARA_LEAF | p-Super | GC | 16 | 29 |
| 9167 | non-targ | B2513 | campesterol | ARA_LEAF | p-Super | GC | 37 | 72 |
| 99898 | non-targ | B2546 | b-sitosterol | ARA_LEAF | p-Super | GC | 13 | 21 |
| 99898 | non-targ | B2546 | campesterol | ARA_LEAF | p-Super | GC | 16 | 30 |
| 125226 | non-targ | B2654 | campesterol | ARA_LEAF | p-Super | GC | 14 | 21 |
| 80756 | non-targ | B2701 | campesterol | ARA_LEAF | p-Super | GC | 16 | 37 |
| 132821 | plastidic | B2766 | campesterol | ARA_LEAF | p-Super | GC | 20 | 39 |
| 115864 | non-targ | B2866 | campesterol | ARA_LEAF | p-Super | GC | 30 | 32 |
| 42477 | non-targ | B3151 | campesterol | ARA_LEAF | p-Super | GC | 19 | 46 |
| 42502 | non-targ | B3262 | b-sitosterol | ARA_LEAF | p-Super | GC | 12 | 26 |
| 42600 | non-targ | B3616 | campesterol | ARA_LEAF | p-Super | GC | 19 | 24 |
| 44372 | non-targ | B3989 | b-sitosterol | ARA_LEAF | p-Super | GC | 12 | 27 |
| 44372 | non-targ | B3989 | campesterol | ARA_LEAF | p-Super | GC | 37 | 49 |
| 10740 | non-targ | B4029 | b-sitosterol | ARA_LEAF | p-Super | GC | 19 | 78 |
| 10740 | non-targ | B4029 | stigmasterol | ARA_LEAF | p-Super | GC | 80 | 3076 |
| 126975 | plastidic | B4205 | b-sitosterol | ARA_LEAF | p-Super | GC | 13 | 16 |
| 10811 | non-targ | GM02LC12622 | b-sitosterol | ARA_LEAF | p-PcUBI | GC | 12 | 37 |
| 10811 | non-targ | GM02LC12622 | campesterol | ARA_LEAF | p-PcUBI | GC | 16 | 36 |
| 46751 | non-targ | GM02LC19289 | b-sitosterol | ARA_LEAF | p-PcUBI | GC | 14 | 40 |
| 46751 | non-targ | GM02LC19289 | campesterol | ARA_LEAF | p-PcUBI | GC | 17 | 52 |
| 46850 | non-targ | GM02LC44512 | b-sitosterol | ARA_LEAF | p-PcUBI | GC | 13 | 30 |
| 46850 | non-targ | GM02LC44512 | campesterol | ARA_LEAF | p-PcUBI | GC | 20 | 56 |
| 127103 | non-targ | Sll0406 | campesterol | ARA_LEAF | p-PcUBI | GC | 16 | 32 |
| 132874 | non-targ | Sll0671 | campesterol | ARA_LEAF | p-PcUBI | GC | 16 | 43 |
| 53878 | mitochondrial | Sll1443 | b-sitosterol | ARA_LEAF | p-PcUBI | GC | 12 | 25 |
| 53878 | mitochondrial | Sll1443 | campesterol | ARA_LEAF | p-PcUBI | GC | 17 | 21 |
| 132938 | mitochondrial | Sll1525 | b-sitosterol | ARA_LEAF | p-PcUBI | GC | 17 | 24 |
| 85743 | mitochondrial | Sll1598 | b-sitosterol | ARA_LEAF | p-PcUBI | GC | 17 | 20 |
| 55379 | non-targ | Sll1761 | campesterol | ARA_LEAF | p-PcUBI | GC | 22 | 44 |
| 86447 | plastidic | Sll1848 | b-sitosterol | ARA_LEAF | p-PcUBI | GC | 16 | 26 |
| 55385 | mitochondrial | Sll1920 | campesterol | ARA_LEAF | p-PcUBI | GC | 20 | 66 |
| 11990 | non-targ | Slr0338 | b-sitosterol | ARA_LEAF | p-PcUBI | GC | 14 | 19 |
| 119222 | mitochondrial | Slr0949 | campesterol | ARA_LEAF | p-PcUBI | GC | 16 | 28 |
| 87655 | plastidic | Slr0966 | campesterol | ARA_LEAF | p-PcUBI | GC | 18 | 20 |
| 61723 | non-targ | TTC1193 | b-sitosterol | ARA_LEAF | p-PcUBI | GC | 15 | 17 |
| 61723 | non-targ | TTC1193 | campesterol | ARA_LEAF | p-PcUBI | GC | 17 | 39 |
| 62079 | non-targ | TTC1386 | b-sitosterol | ARA_LEAF | p-PcUBI | GC | 24 | 31 |
| 62079 | non-targ | TTC1386 | campesterol | ARA_LEAF | p-PcUBI | GC | 34 | 50 |
| 12974 | non-targ | TTC1550 | campesterol | ARA_LEAF | p-PcUBI | GC | 17 | 23 |
| 113224 | plastidic | Ydl131w | campesterol | ARA_LEAF | p-Super | GC | 18 | 98 |
| 14171 | non-targ | Ydl155w | campesterol | ARA_LEAF | Big35S | GC | 17 | 63 |
| 113313 | plastidic | Ydl235c | campesterol | ARA_LEAF | p-Super | GC | 21 | 37 |
| 120436 | plastidic | Ygl039w | campesterol | ARA_LEAF | p-PcUBI | GC | 17 | 33 |
| 66274 | non-targ | Yjr153w | campesterol | ARA_LEAF | p-PcUBI | GC | 16 | 42 |
| 129546 | plastidic | Ynl321w | campesterol | ARA_LEAF | p-Super | GC | 16 | 28 |
| 92668 | non-targ | Ypl028w | b-sitosterol | ARA_SEED_2 | p-PcUBI | GC | 12 | 23 |
| 113647 | plastidic | Ypr170c | b-sitosterol | ARA_LEAF | p-Super | GC | 15 | 32 |
| 16883 | plastidic | 59582753_SOYBEAN | campesterol | ARA_LEAF | p-PcUBI | GC | 18 | 52 |

[69255] Column 1 shows the SEQ ID NO, Column 2 shows the expression type (targeted or non-targeted), Column 3 shows the “gene name” (locus), Column 4 shows the metabolite analyzed, Column 5 indicates the A. thaliana source tissue analyzed, Column 6 indicates the used promoter for expression, Column 7 indicates the analytical method. Columns 8 and 9 show the minimum and the maximum increase of the analyzed metabolite (in percent) in comparison to the wild type (ratio_by_WT, given as percent increase).

[69256] The term “non-targ” in Table d, Column 2 which shows the expression type means “non-targeted”.

[69257] The term “b-sitosterol” in Table d, Column 4 which shows the metabolite means “beta-sitosterol”. When the analyses were repeated independently, all results proved to be significant.

[69258] [0505.1.7.14] to [0515.1.7.14] for the disclosure of these paragraphs see [0505.1.7.7] to [0515.1.7.7] above

[69259] In a further embodiment, the present invention relates in paragraphs [0000.1.7.15.] to [0514.1.7.15.] to a further process for the production of the fine chemical citramalate, citrate, fumarate, glycerate, malate, oxalate, pyruvate, succinate, and/or vitamin c and/or threonic acid as defined below and corresponding embodiments as described herein as follows.

[69260] for the disclosure of this paragraph see [0001.1.7.7] above

[69261] Succinic acid (succinate) is a dicarboxylic acid, a water-soluble, colorless crystal with an acid taste. It is an intermediate of the citric acid cycle (known also as the tricarboxylic acid cycle (TCA cycle) or the Krebs cycle) and the glyoxylate cycle, produced by action of the enzyme succinyl-CoA synthetase on succinyl-CoA. Succinic acid is converted to fumaric acid by action of the enzyme succinic acid dehydrogenase (with formation of FADH2).

[69262] It is used as flavoring agent for food and beverages. Succinic acid is an intermediate for a lot of chemical compounds such as dyes, perfumes, lacquers, photographic chemicals, alkyd resins or plasticizer. Furthermore it is also an intermediate used for the production of medicines used as sedatives, contraceptives or anticancer drugs.

[69263] Malic acid (malate) is an alpha-hydroxy organic acid. Its salt is named as malate. It is found in apples and other fruits and therefore named as fruit acid. Malic acid especially in the form of its anion malate, is a key intermediate in the major biochemical energyproducing cycle in cells known as the citric acid or Krebs cycle located in the cells' mitochondria and in the glyoxylate cycle.

[69264] It is an important compound together with magnesium for the treatment of fibromyalgia, a rheumatic illness which affects often middle-aged women. D-Malate is an optically active compound which can be used as a synthon in organic synthesis, as a resolving agent and as a ligand in asymmetric catalysis.

[69265] Malic acid is not only a central metabolite in intermediary flow of carbon in organisms. Malic acid is a common constituent of all plants, and its formation is controlled by an enzyme (protein catalyst) called malic acid dehydrogenase (MDH).

[69266] In higher plants, vacuolar malic acid accumulation, and hence, transtonoplast malic acid transport, also plays a paramount role in many physiological functions. These include adjustment of osmotic and turgor potentials in extension growth and movements of stomata and pulvini, pHregulation, e.g. during nitrate reduction, and others (for review, see Lunge et al, Plant Physiol, 124(2000),1335-1348).

[69267] Malic acid occupies a central role in plant metabolism. Its importance in plant mineral nutrition is reflected by the role it plays in symbiotic nitrogen fixation, phosphorus acquisition, and aluminum tolerance (Osawa and Matsumoto, Plant Physiol, 126(2001), 411-420). During phosphorus deficiency, malic acid is frequently secreted from roots to release unavailable forms of phosphorus. In nitrogen-fixing root nodules, malic acid is the primary substrate for bacteroid respiration, thus fueling nitrogenase. The malic acid oxaloacetate shuttle is characteristic for plant cells. It transports redox equivalents intracellularly.

[69268] It should be noted that malate (and pyruvate as phosphoenolpyruvate) have a special function as intermediate storage form for carbon dioxide in the C4 and CAM metabolism.

[69269] Ascorbic acid (Vitamin C, ascorbate) is a six carbon compound related to glucose, is a water-soluble vitamin that is naturally present in some foods, added to others, and available as a dietary supplement. It is found naturally in citrus fruits and many vegetables. Ascorbic acid is an essential nutrient in human diets, and necessary to maintain connective tissue and bone. Its biologically active form, vitamin C, functions as a reducing agent and coenzyme in several metabolic pathways. Vitamin C is considered an antioxidant. Its appearance is white to light yellow crystals or powder. It is water soluble. The L-enantiomer of ascorbic acid is commonly known as vitamin C. Ascorbic acid also rapidly interconverts into two unstable diketone tautomers by proton transfer, although it is the most stable in the enol form. Primates (including humans) and a few other species in all divisions of the animal kingdom, notably the guinea pig, are unable to synthesize vitamin C endogenously, so it is an essential dietary component.

[69270] The metabolism of ascorbic acid involves its oxidation to dehydroascorbic acid, followed by the formation of the aldonic acids L-lyxonic acid, L-xylonic acid, and L-threonic acid.

[69271] Threonic acid is a sugar acid derived from threose. The L-isomer is a metabolite of ascorbic acid (vitamin C).Threonic acid is a natural constituent in leaves of certain plants. It is derived from ascorbate either by enzymatic or natural oxidation.

[69272] Fumaric acid (fumarate) is also an intermediate of the citric acid cycle (Krebs cycle). It is synthesized from succinic acid. Fumarate, also called fumaric acid, is a useful compound in treatment of psoriasis, which is a chronic, incurable, disabling skin disease characterised by red, scaly plaques. Approximately 23% of psoriasis patients also have an accompanying arthritis that can become debilitating.

[69273] The discovery in Arabidopsis of citramalic acid (citramalate) (Fiehn et al. 2000 Nature Biotechnology 18, 1157-1161) a potential precursor of pyruvic acid and acetate suggests a novel aspect of carbon metabolism and furthermore suggests the existence of a tricarboxylic acid cycle bypass previously found only in bacteria. Citramalate is an derivative of malic acid and produced from itaconic acid.

[69274] Glyceric acid (glycerate) is an important precursor in the anabolism of amino acids, in particular for serine and glycine. Following the glucollate pathway glyceric acid can be converted into pyruvate. Further, the energy level of a cell may be depend on the level of glyceric acid found. Glycerate and glycerate-3-phophate form a shuttle for the transportation of energy equivalents, e.g. during photorespiration between glycosomes and peroxisomes. Glyceric acid is colorless syrupy acid, obtained from oxidation of glycerol and has an diuretic effect. Glyceric acid has an diuretic effect.

[69275] Citrate is the conjugated base of citric acid. Since citric acid is a multifunctional acid, intermediate ions exist (hydrogen citrate ion and dihydrogen citrate ion). The exact state of protonation/deprotonation of the citrate anion/citric acid is not discriminated here. Citrate is a key intermediate in the tricarboxylic acid cycle (TCA cycle) , which is of central importance for aerobic organisms and is a key intermediate in the glyoxylate cycle. Citrate as a metabolite has been observed in all kown living organisms .

[69276] Citrate from the TCA cylce can be branched of into fatty acid biosynthesis (via conversion to acetyl CoA). Citrate is a positive modulator of this conversion and allosterically regulates the enzyme acetyl-CoA carboxylase, which is the regulating enzyme in the conversion of acetyl CoA into malonyl CoA (the commitment step in fatty acid synthesis).

[69277] Pyruvic acid (pyruvates) is a naturally occurring component in plants and vegetables and in the body, where it is inherently involved in metabolism, the process whereby energy is produced. Pyruvate supplies energy to living cells in the citric acid cycle and can also be converted to carbohydrates via gluconeogenesis, to fatty acids or energy through acetylCoA, to the amino acid alanine and to ethanol. Pyruvic acid represents the final step in the metabolism of glucose or starch. Pyruvate can be derived from glyceric acid. Increased pyruvic acid production in yeast strains is known (WO 04/099425).

[69278] Pyruvic acid is used commercially to produce its salts and esters (pyruvates) used as dietary supplements for the effect of enhancing weight loss. Pyruvic acid is used for the synthesis of amino acids (alanine, tyrosine, phenylalanine, and tryptophan) and used in biochemical research. Its derivatives are used in making food additives and flavoring agents.

[69279] Oxalic acid is the simplest dicarboxylic acid. Reactions of protonisation/deprotonisation belong to the fastest chemical reactions known and it usually makes little sense to distinguish between the acid and it's conjugated base in the complex biological enviroments. Therefore, e.g. oxalic acid and oxalate are not commonly distinguished in this document—with the noteable exception of insoluble salts (e.g. calcium oxalate). Oxalic acid is formed via several major pathways. In plants, glycolate can be converted to oxalic acid. Oxaloacetate also can be split to form oxalate and acetate. Another significant precursor of oxalate in plants is L-ascorbic acid. The cleavage of ascorbic acid between C2 and C3 leads to oxalate biosynthesis.

[69280] Oxalic acid is heavily used in electrochemistry .Oxalic acid for technical applications is produced from natrium formiate or by fermentation of Aspergillus strains. Oxalic acid is considered to be relevant for plant health; nevertheless, the (minor) toxicity of solutable oxalates should be kept in mind when an increased oxalic acid content is desired for improved plant health.

[69281] Due to these important physiological roles and agrobiotechnological potential of citramalate, citrate, fumarate, glycerate, malate, oxalate, pyruvate, succinate, and/or vitamin c and/or threonic acid there is a need to identify the genes of enzymes and other proteins involved in citramalate, citrate, fumarate, glycerate, malate, oxalate, pyruvate, succinate, and/or vitamin c and/or threonic acid metabolism, and to generate mutants or transgenic non-human organism or a part thereof, preferably a microorganism, a plant cell, a plant or a part thereof, which are able to modify the content in said organism.

[69282] Improving the quality of foodstuffs and animal feeds is an important task of the food-and-feed industry. It is therefore a task to increase the productivity of plants so that the content of citramalate, citrate, fumarate, glycerate, malate, oxalate, pyruvate, succinate, and/or vitamin c and/or threonic acid in the plants are increased. Said products can be isolated from the plants and used for the production of cosmetics and pharmaceuticals.

[69283] On the other hand said fine chemicals citramalate, citrate, fumarate, glycerate, malate, oxalate, pyruvate, succinate, and/or vitamin c and/or threonic acid, are used also in industrial production and processes which go beyond production of food, feed, cosmetics and pharmaceuticals.

[69284] It is an object of the present invention to develop an inexpensive process for the synthesis of citramalate, citrate, fumarate, glycerate, malate, oxalate, pyruvate, succinate, and/or vitamin c and/or threonic acid.

[69285] It is a further object of the present invention to develop an inexpensive process for the synthesis of citramalate, citrate, fumarate, glycerate, malate, oxalate, pyruvate, succinate, and/or vitamin c and/or threonic acid and to assure that the citramalate, citrate, fumarate, glycerate, malate, oxalate, pyruvate, succinate, and/or vitamin c and/or threonic acid are more accessible and facilely to isolate and recover in an industrial scale from the producing organism, preferably from a plant.

[69286] for the disclosure of this paragraph see [0013.1.7.7] above

[69287] Accordingly, in a first embodiment, the invention relates to a process for the production of at least one fine chemical selected from the group consisting of: citramalate, citrate, fumarate, glycerate, malate, oxalate, pyruvate, succinate, and vitamin c and/or threonic acid, or, in other words, of the “fine chemical” or “fine chemical of the invention”.

[69288] The terms “fine chemical of the invention”, “fine chemical” or “the fine chemical” are used herein equally and relate in context of the paragraphs or sections [0014.1.15.15] to [0514.1.7.15] essentially to the metabolite or the metabolites indicated in column 7, application no. 15 of Tables I, II and IV in the respective line.

[69289] Further, the term “in context of any of the paragraphs [0014.1.15.15] to [0514.1.7.15]” as used herein means that for any of said paragraphs [0014.1.15.15] to [0514.1.7.15] the term “the fine chemical” is understood to follow the definition of paragraphs or sections [0014.1.15.15] and [0015.1.15.15], independently whether it refers to any other paragraph or not and whether the reference recites the term “fine chemical” in an other context.

[69290] Thus, in cases where one or more paragraphs or sections are incorporated by reference into any of the present paragraphs [0014.1.15.15] to [0514.1.7.15], e.g. by usage of the term “see paragraph” or the term “for the disclosure of this paragraph see the disclosure of paragraph” or the term “incorporated by reference” or a corresponding term, the incorporated paragraph, section or term “the fine chemical” is also understood to have the meaning according to the definition of paragraph [0014.1.15.15] and [0015.1.15.15].

[69291] Accordingly, in one embodiment, the term “fine chemical of the invention”, “fine chemical” or “the fine chemical” as used herein (alone or in combination, like in FCRP) means “citramalate in context of the nucleic acid or polypeptide sequences listed in the respective same line of any one of Tables I to IV of application no. 15 and indicating in column 7 the metabolite “citramalate”.

[69292] In one embodiment, the term citramalate or the term “fine chemical” mean in context of the paragraphs or sections [0014.1.15.15] to [0514.1.7.15] at least one chemical compound with an activity of the above mentioned citramalate, respectively.

[69293] Accordingly, in one embodiment, the term “fine chemical of the invention”, “fine chemical” or “the fine chemical” as used herein (alone or in combination, like in FCRP) means “citrate in context of the nucleic acid or polypeptide sequences listed in the respective same line of any one of Tables I to IV of application no. 15 and indicating in column 7 the metabolite “citrate”.

[69294] In one embodiment, the term citrate or the term “fine chemical” mean in context of the paragraphs or sections [0014.1.15.15] to [0514.1.7.15] at least one chemical compound with an activity of the above mentioned citrate, respectively.

[69295] Accordingly, in one embodiment, the term “fine chemical of the invention”, “fine chemical” or “the fine chemical” as used herein (alone or in combination, like in FCRP) means “fumarate in context of the nucleic acid or polypeptide sequences listed in the respective same line of any one of Tables I to IV of application no. 15 and indicating in column 7 the metabolite “fumarate”.

[69296] In one embodiment, the term fumarate or the term “fine chemical” mean in context of the paragraphs or sections [0014.1.15.15] to [0514.1.7.15] at least one chemical compound with an activity of the above mentioned fumarate, respectively.

[69297] Accordingly, in one embodiment, the term “fine chemical of the invention”, “fine chemical” or “the fine chemical” as used herein (alone or in combination, like in FCRP) means “glycerate in context of the nucleic acid or polypeptide sequences listed in the respective same line of any one of Tables I to IV of application no. 15 and indicating in column 7 the metabolite “glycerate”.

[69298] In one embodiment, the term glycerate or the term “fine chemical” mean in context of the paragraphs or sections [0014.1.15.15] to [0514.1.7.15] at least one chemical compound with an activity of the above mentioned glycerate, respectively.

[69299] Accordingly, in one embodiment, the term “fine chemical of the invention”, “fine chemical” or “the fine chemical” as used herein (alone or in combination, like in FCRP) means “malate in context of the nucleic acid or polypeptide sequences listed in the respective same line of any one of Tables I to IV of application no. 15 and indicating in column 7 the metabolite “malate”.

[69300] In one embodiment, the term malate or the term “fine chemical” mean in context of the paragraphs or sections [0014.1.15.15] to [0514.1.7.15] at least one chemical compound with an activity of the above mentioned malate, respectively.

[69301] Accordingly, in one embodiment, the term “fine chemical of the invention”, “fine chemical” or “the fine chemical” as used herein (alone or in combination, like in FCRP) means “oxalate in context of the nucleic acid or polypeptide sequences listed in the respective same line of any one of Tables I to IV of application no. 15 and indicating in column 7 the metabolite “oxalate”.

[69302] In one embodiment, the term oxalate or the term “fine chemical” mean in context of the paragraphs or sections [0014.1.15.15] to [0514.1.7.15] at least one chemical compound with an activity of the above mentioned oxalate, respectively.

[69303] Accordingly, in one embodiment, the term “fine chemical of the invention”, “fine chemical” or “the fine chemical” as used herein (alone or in combination, like in FCRP) means “pyruvate in context of the nucleic acid or polypeptide sequences listed in the respective same line of any one of Tables I to IV of application no. 15 and indicating in column 7 the metabolite “pyruvate”.

[69304] In one embodiment, the term pyruvate or the term “fine chemical” mean in context of the paragraphs or sections [0014.1.15.15] to [0514.1.7.15] at least one chemical compound with an activity of the above mentioned pyruvate, respectively.

[69305] Accordingly, in one embodiment, the term “fine chemical of the invention”, “fine chemical” or “the fine chemical” as used herein (alone or in combination, like in FCRP) means “succinate in context of the nucleic acid or polypeptide sequences listed in the respective same line of any one of Tables I to IV of application no. 15 and indicating in column 7 the metabolite “succinate”.

[69306] In one embodiment, the term succinate or the term “fine chemical” mean in context of the paragraphs or sections [0014.1.15.15] to [0514.1.7.15] at least one chemical compound with an activity of the above mentioned succinate, respectively.

[69307] Accordingly, in one embodiment, the term “fine chemical of the invention”, “fine chemical” or “the fine chemical” as used herein (alone or in combination, like in FCRP) means “vitamin c and/or threonic acid” in context of the nucleic acid or polypeptide sequences listed in the respective same line of any one of Tables I to IV of application no. 15 and indicating in column 7 the metabolite “vitamin c and/or threonic acid”.

[69308] In one embodiment, the term vitamin c and/or threonic acid or the term “fine chemical” mean in context of the paragraphs or sections [0014.1.15.15] to [0514.1.7.15] at least one chemical compound with an activity of the above mentioned vitamin c and/or threonic acid, respectively. [0015.1.15.15] Accordingly, in one embodiment, the terms “fine chemical of the invention”, “fine chemical” or “the fine chemical” mean in context of any of the paragraphs [0014.1.15.15] to [0514.1.7.15] citramalate, its salts, ester or ether in free form or bound form. In a preferred embodiment, the term “the fine chemical” means citramalate or its salts, ester or ether, in free form or bound form.

[69309] In a preferred embodiment “citramalate” means citramalate in free form.

[69310] Accordingly, in one embodiment, the terms “fine chemical of the invention”, “fine chemical” or “the fine chemical” mean in context of any of the paragraphs [0014.1.15.15] to [0514.1.7.15] citrate, its salts, ester or ether in free form or bound form. In a preferred embodiment, the term “the fine chemical” means citrate or its salts, ester or ether, in free form or bound form.

[69311] In a preferred embodiment “citrate” means citrate in free form.

[69312] Accordingly, in one embodiment, the terms “fine chemical of the invention”, “fine chemical” or “the fine chemical” mean in context of any of the paragraphs [0014.1.15.15] to [0514.1.7.15] fumarate, its salts, ester or ether in free form or bound form. In a preferred embodiment, the term “the fine chemical” means fumarate or its salts, ester or ether, in free form or bound form.

[69313] In a preferred embodiment “fumarate” means fumarate in free form.

[69314] Accordingly, in one embodiment, the terms “fine chemical of the invention”, “fine chemical” or “the fine chemical” mean in context of any of the paragraphs [0014.1.15.15] to [0514.1.7.15] glycerate, its salts, ester or ether in free form or bound form. In a preferred embodiment, the term “the fine chemical” means glycerate or its salts, ester or ether, in free form or bound form, preferably as phosphate derivatives of glyceric acid, including 2-phosphoglyceric acid, 3-phosphoglyceric acid, 2,3-bisphosphoglyceric acid, and 1,3-bisphosphoglyceric acid.

[69315] In a preferred embodiment “glycerate” means glycerate in free form.

[69316] Accordingly, in one embodiment, the terms “fine chemical of the invention”, “fine chemical” or “the fine chemical” mean in context of any of the paragraphs [0014.1.15.15] to [0514.1.7.15] malate, its salts, ester or ether in free form or bound form. In a preferred embodiment, the term “the fine chemical” means malate or its salts, ester or ether, in free form or bound form.

[69317] In a preferred embodiment “malate” means malate in free form.

[69318] Accordingly, in one embodiment, the terms “fine chemical of the invention”, “fine chemical” or “the fine chemical” mean in context of any of the paragraphs [0014.1.15.15] to [0514.1.7.15] oxalate, its salts, ester or ether in free form or bound form. In a preferred embodiment, the term “the fine chemical” means oxalate or its salts, ester or ether, in free form or bound form.

[69319] In a preferred embodiment “oxalate” means oxalate in free form.

[69320] Accordingly, in one embodiment, the terms “fine chemical of the invention”, “fine chemical” or “the fine chemical” mean in context of any of the paragraphs [0014.1.15.15] to [0514.1.7.15] pyruvate, its salts, ester or ether in free form or bound form. In a preferred embodiment, the term “the fine chemical” means pyruvate or its salts, ester or ether, in free form or bound form.

[69321] In a preferred embodiment “pyruvate” means pyruvate in free form.

[69322] Accordingly, in one embodiment, the terms “fine chemical of the invention”, “fine chemical” or “the fine chemical” mean in context of any of the paragraphs [0014.1.15.15] to [0514.1.7.15] succinate, its salts, ester or ether in free form or bound form. In a preferred embodiment, the term “the fine chemical” means succinate or its salts, ester or ether, in free form or bound form.

[69323] In a preferred embodiment “succinate” means succinate in free form.

[69324] Accordingly, in one embodiment, the terms “fine chemical of the invention”, “fine chemical” or “the fine chemical” mean in context of any of the paragraphs [0014.1.15.15] to [0514.1.7.15] vitamin c and/or threonic acid, its salts, ester or ether in free form or bound form. In a preferred embodiment, the term “the fine chemical” means vitamin c and/or threonic acid or its salts, ester or ether, in free form or bound form.

[69325] In a preferred embodiment “vitamin c and/or threonic acid ” means vitamin c and/or threonic acid in free form.

[69326] In one embodiment, the term “the fine chemical” or “the respective fine chemical” mean in context of any of the paragraphs [0014.1.15.15] to [0514.1.7.15] at least one substrate or product of the citric acid cycle, a derivate of one of the substrates or products (for example pyruvate and malate as derivates of citramalate, acetyl-CoA as derivate of pyruvate or citrate, pyruvate as derivate of glycerate) or vitamin c, ascorbic acid or ascorbate and derivates like oxalate and/or threonic acid Further, the term “in context of any of the paragraphs [0014.1.15.15] to [0514.1.7.15]” as used herein means that for any of said paragraphs [0014.1.15.15] to [0514.1.7.15] the term “the fine chemical” is understood to follow the definition of section [0014.1.15.15] or section [0015.1.15.15], independently whether it refers to any other paragraph or not and whether the reference recites the term “fine chemical” in an other context.

[69327] Thus, in cases where one or more paragraphs or sections are incorporated by reference into any of the present paragraphs [0014.1.15.15] to [0514.1.7.15], e.g. by usage of the term “see paragraph” or the term “for the disclosure of this paragraph see the disclosure of paragraph” or the term “incorporated by reference” or a corresponding term, the incorporated paragraph, section or term “the fine chemical” is also understood to have the meaning according to this definition of this paragraph [0015.1.15.15].

[69328] Further, the term “fine chemicals” as used herein relates to compositions comprising said fine chemical(s), i.e. comprising citramalate, citrate, fumarate, glycerate, malate, oxalate, pyruvate, succinate, and/or vitamin c and/or threonic acid, respectively.

[69329] Accordingly, the present invention relates to a process for the production of succinate, which comprises
[69330] (a) increasing or generating one or more activities selected from the group consisting of protein phosphatase in a non-human organism or a part thereof, preferably a microorganism, a plant cell, a plant or a part thereof, as compared to a corresponding non-transformed wild type non-human organism or a part thereof; and
[69331] (b) growing the non-human organism or a part thereof under conditions which permit the production of succinate or a composition comprising succinate in said non-human organism or in the culture medium surrounding said non-human organism.

[69332] Accordingly, the present invention relates to a process for the production of malate, which comprises
[69333] (a) increasing or generating one or more activities selected from the group consisting of At1g13930-protein in a non-human organism or a part thereof, preferably a microorganism, a plant cell, a plant or a part thereof, as compared to a corresponding non-transformed wild type non-human organism or a part thereof; and
[69334] (b) growing the non-human organism or a part thereof under conditions which permit the production of malate or a composition comprising malate in said non-human organism or in the culture medium surrounding said non-human organism.

[69335] Accordingly, the present invention relates to a process for the production of succinate, which comprises
[69336] (a) increasing or generating one or more activities selected from the group consisting of At1g13930-protein in a non-human organism or a part thereof, preferably a microorganism, a plant cell, a plant or a part thereof, as compared to a corresponding non-transformed wild type non-human organism or a part thereof; and
[69337] (b) growing the non-human organism or a part thereof under conditions which permit the production of succinate or a composition comprising succinate in said non-human organism or in the culture medium surrounding said non-human organism.

[69338] Accordingly, the present invention relates to a process for the production of malate, which comprises
[69339] (a) increasing or generating one or more activities selected from the group consisting of eukaryotic translation initiation factor 5 in a non-human organism or a part thereof, preferably a microorganism, a plant cell, a plant or a part thereof, as compared to a corresponding non-transformed wild type non-human organism or a part thereof; and
[69340] (b) growing the non-human organism or a part thereof under conditions which permit the production of malate or a composition comprising malate in said non-human organism or in the culture medium surrounding said non-human organism.

[69341] Accordingly, the present invention relates to a process for the production of vitamin c and/or threonic acid, which comprises
[69342] (a) increasing or generating one or more activities selected from the group consisting of eukaryotic translation initiation factor 5 in a non-human organism or a part thereof, preferably a microorganism, a plant cell, a plant or a part thereof, as compared to a corresponding non-transformed wild type non-human organism or a part thereof; and
[69343] (b) growing the non-human organism or a part thereof under conditions which permit the production of vitamin c and/or threonic acid or a composition comprising vitamin c and/or threonic acid in said non-human organism or in the culture medium surrounding said non-human organism.

[69344] Accordingly, the present invention relates to a process for the production of fumarate, which comprises
[69345] (a) increasing or generating one or more activities selected from the group consisting of transcriptional regulator in a non-human organism or a part thereof, preferably a microorganism, a plant cell, a plant or a part thereof, as compared to a corresponding non-transformed wild type non-human organism or a part thereof; and
[69346] (b) growing the non-human organism or a part thereof under conditions which permit the production of fumarate or a composition comprising fumarate in said non-human organism or in the culture medium surrounding said non-human organism.

[69347] Accordingly, the present invention relates to a process for the production of fumarate, which comprises
[69348] (a) increasing or generating one or more activities selected from the group consisting of protein phosphatase in a non-human organism or a part thereof, preferably a microorganism, a plant cell, a plant or a part thereof, as compared to a corresponding non-transformed wild type non-human organism or a part thereof; and
[69349] (b) growing the non-human organism or a part thereof under conditions which permit the production of fumarate or a composition comprising fumarate in said non-human organism or in the culture medium surrounding said non-human organism.

[69350] Accordingly, the present invention relates to a process for the production of vitamin c and/or threonic acid, which comprises
[69351] (a) increasing or generating one or more activities selected from the group consisting of protein phosphatase in a non-human organism or a part thereof, preferably a microorganism, a plant cell, a plant or a part thereof, as compared to a corresponding non-transformed wild type non-human organism or a part thereof; and
[69352] (b) growing the non-human organism or a part thereof under conditions which permit the production of vitamin c and/or threonic acid or a composition comprising vitamin c and/or threonic acid in said non-human organism or in the culture medium surrounding said non-human organism.

[69353] Accordingly, the present invention relates to a process for the production of fumarate, which comprises
[69354] (a) increasing or generating one or more activities selected from the group consisting of CBL-interacting protein kinase in a non-human organism or a part thereof, preferably a microorganism organism, a plant cell, a plant or a part thereof, as compared to a corresponding non-transformed wild type non-human organism or a part thereof; and
[69355] (b) growing the non-human organism or a part thereof under conditions which permit the production of fumarate or a composition comprising fumarate in said non-human organism or in the culture medium surrounding said non-human organism.

[69356] Accordingly, the present invention relates to a process for the production of malate, which comprises
[69357] (a) increasing or generating one or more activities selected from the group consisting of CBL-interacting protein kinase in a non-human organism or a part thereof, preferably a microorganism organism, a plant cell, a plant or a part thereof, as compared to a corresponding non-transformed wild type non-human organism or a part thereof; and
[69358] (b) growing the non-human organism or a part thereof under conditions which permit the production of malate or a composition comprising malate in said non-human organism or in the culture medium surrounding said non-human organism.

[69359] Accordingly, the present invention relates to a process for the production of succinate, which comprises
[69360] (a) increasing or generating one or more activities selected from the group consisting of CBL-interacting protein kinase in a non-human organism or a part thereof, preferably a microorganism organism, a plant cell, a plant or a part thereof, as compared to a corresponding non-transformed wild type non-human organism or a part thereof; and
[69361] (b) growing the non-human organism or a part thereof under conditions which permit the production of succinate or a composition comprising succinate in said non-human organism or in the culture medium surrounding said non-human organism.

[69362] Accordingly, the present invention relates to a process for the production of fumarate, which comprises
[69363] (a) increasing or generating one or more activities selected from the group consisting of phenylalanine ammonia-lyase in a non-human organism or a part thereof, preferably a microorganism, a plant cell, a plant or a part thereof, as compared to a corresponding non-transformed wild type non-human organism or a part thereof; and
[69364] (b) growing the non-human organism or a part thereof under conditions which permit the production of fumarate or a composition comprising fumarate in said non-human organism or in the culture medium surrounding said non-human organism.

[69365] Accordingly, the present invention relates to a process for the production of succinate, which comprises
[69366] (a) increasing or generating one or more activities selected from the group consisting of thioredoxin reductase in a non-human organism or a part thereof, preferably a microorganism, a plant cell, a plant or a part thereof, as compared to a corresponding non-transformed wild type non-human organism or a part thereof; and
[69367] (b) growing the non-human organism or a part thereof under conditions which permit the production of succinate or a composition comprising succinate in said non-human organism or in the culture medium surrounding said non-human organism.

[69368] Accordingly, the present invention relates to a process for the production of succinate, which comprises
[69369] (a) increasing or generating one or more activities selected from the group consisting of citrate synthase in a non-human organism or a part thereof, preferably a microorganism, a plant cell, a plant or a part thereof, as compared to a corresponding non-transformed wild type non-human organism or a part thereof; and
[69370] (b) growing the non-human organism or a part thereof under conditions which permit the production of succinate or a composition comprising succinate in said non-human organism or in the culture medium surrounding said non-human organism.

[69371] Accordingly, the present invention relates to a process for the production of citramalate, which comprises
[69372] (a) increasing or generating one or more activities selected from the group consisting of pyruvate kinase in a non-human organism or a part thereof, preferably a microorganism, a plant cell, a plant or a part thereof, as compared to a corresponding non-transformed wild type non-human organism or a part thereof; and
[69373] (b) growing the non-human organism or a part thereof under conditions which permit the production of citramalate or a composition comprising citramalate in said non-human organism or in the culture medium surrounding said non-human organism.

[69374] Accordingly, the present invention relates to a process for the production of succinate, which comprises
[69375] (a) increasing or generating one or more activities selected from the group consisting of pyruvate kinase in a non-human organism or a part thereof, preferably a microorganism, a plant cell, a plant or a part thereof, as compared to a corresponding non-transformed wild type non-human organism or a part thereof; and
[69376] (b) growing the non-human organism or a part thereof under conditions which permit the production of succinate or a composition comprising succinate in said non-human organism or in the culture medium surrounding said non-human organism.

[69377] Accordingly, the present invention relates to a process for the production of malate, which comprises
[69378] (a) increasing or generating one or more activities selected from the group consisting of protein phosphatase in a non-human organism or a part thereof, preferably a microorganism, a plant cell, a plant or a part thereof, as compared to a corresponding non-transformed wild type non-human organism or a part thereof; and
[69379] (b) growing the non-human organism or a part thereof under conditions which permit the production of malate or a composition comprising malate in said non-human organism or in the culture medium surrounding said non-human organism.

[69380] Accordingly, the present invention relates to a process for the production of succinate, which comprises
[69381] (a) increasing or generating one or more activities selected from the group consisting of protein phosphatase in a non-human organism or a part thereof, preferably a microorganism, a plant cell, a plant or a part thereof, as compared to a corresponding non-transformed wild type non-human organism or a part thereof; and
[69382] (b) growing the non-human organism or a part thereof under conditions which permit the production of succinate or a composition comprising succinate in said non-human organism or in the culture medium surrounding said non-human organism.

[69383] Accordingly, the present invention relates to a process for the production of fumarate, which comprises
[69384] (a) increasing or generating one or more activities selected from the group consisting of thioredoxin family protein in a non-human organism or a part thereof, preferably a microorganism, a plant cell, a plant or a part thereof, as compared to a corresponding non-transformed wild type non-human organism or a part thereof; and
[69385] (b) growing the non-human organism or a part thereof under conditions which permit the production of fumarate or a composition comprising fumarate in said non-human organism or in the culture medium surrounding said non-human organism.

[69386] Accordingly, the present invention relates to a process for the production of malate, which comprises
[69387] (a) increasing or generating one or more activities selected from the group consisting of thioredoxin family protein in a non-human organism or a part thereof, preferably a microorganism, a plant cell, a plant or a part thereof, as compared to a corresponding non-transformed wild type non-human organism or a part thereof; and
[69388] (b) growing the non-human organism or a part thereof under conditions which permit the production of malate or a composition comprising malate in said non-human organism or in the culture medium surrounding said non-human organism.

[69389] Accordingly, the present invention relates to a process for the production of glycerate, which comprises
[69390] (a) increasing or generating one or more activities selected from the group consisting of thioredoxin in a non-human organism or a part thereof, preferably a microorganism, a plant cell, a plant or a part thereof, as compared to a corresponding non-transformed wild type non-human organism or a part thereof; and
[69391] (b) growing the non-human organism or a part thereof under conditions which permit the production of glycerate or a composition comprising glycerate in said non-human organism or in the culture medium surrounding said non-human organism.

[69392] Accordingly, the present invention relates to a process for the production of fumarate, which comprises
[69393] (a) increasing or generating one or more activities selected from the group consisting of auxin response factor in a non-human organism or a part thereof, preferably a microorganism, a plant cell, a plant or a part thereof, as compared to a corresponding non-transformed wild type non-human organism or a part thereof; and
[69394] (b) growing the non-human organism or a part thereof under conditions which permit the production of fumarate or a composition comprising fumarate in said non-human organism or in the culture medium surrounding said non-human organism.

[69395] Accordingly, the present invention relates to a process for the production of malate, which comprises
[69396] (a) increasing or generating one or more activities selected from the group consisting of auxin response factor in a non-human organism or a part thereof, preferably a microorganism, a plant cell, a plant or a part thereof, as compared to a corresponding non-transformed wild type non-human organism or a part thereof; and
[69397] (b) growing the non-human organism or a part thereof under conditions which permit the production of malate or a composition comprising malate in said non-human organism or in the culture medium surrounding said non-human organism.

[69398] Accordingly, the present invention relates to a process for the production of citramalate, which comprises
[69399] (a) increasing or generating one or more activities selected from the group consisting of monthiol glutaredoxin in a non-human organism or a part thereof, preferably a microorganism, a plant cell, a plant or a part thereof, as compared to a corresponding non-transformed wild type non-human organism or a part thereof; and
[69400] (b) growing the non-human organism or a part thereof under conditions which permit the production of citramalate or a composition comprising citramalate in said non-human organism or in the culture medium surrounding said non-human organism.

[69401] Accordingly, the present invention relates to a process for the production of fumarate, which comprises
[69402] (a) increasing or generating one or more activities selected from the group consisting of monthiol glutaredoxin in a non-human organism or a part thereof, preferably a microorganism, a plant cell, a plant or a part thereof, as compared to a corresponding non-transformed wild type non-human organism or a part thereof; and
[69403] (b) growing the non-human organism or a part thereof under conditions which permit the production of fumarate or a composition comprising fumarate in said non-human organism or in the culture medium surrounding said non-human organism.

[69404] Accordingly, the present invention relates to a process for the production of glycerate, which comprises
[69405] (a) increasing or generating one or more activities selected from the group consisting of monthiol glutaredoxin in a non-human organism or a part thereof, preferably a microorganism, a plant cell, a plant or a part thereof, as compared to a corresponding non-transformed wild type non-human organism or a part thereof; and
[69406] (b) growing the non-human organism or a part thereof under conditions which permit the production of glycerate or a composition comprising glycerate in said non-human organism or in the culture medium surrounding said non-human organism.

[69407] Accordingly, the present invention relates to a process for the production of malate, which comprises
[69408] (a) increasing or generating one or more activities selected from the group consisting of monthiol glutaredoxin in a non-human organism or a part thereof, preferably a microorganism, a plant cell, a plant or a part thereof, as compared to a corresponding non-transformed wild type non-human organism or a part thereof; and
[69409] (b) growing the non-human organism or a part thereof under conditions which permit the production of malate or a composition comprising malate in said non-human organism or in the culture medium surrounding said non-human organism.

[69410] Accordingly, the present invention relates to a process for the production of succinate, which comprises
[69411] (a) increasing or generating one or more activities selected from the group consisting of monthiol glutaredoxin in a non-human organism or a part thereof, preferably a microorganism, a plant cell, a plant or a part thereof, as compared to a corresponding non-transformed wild type non-human organism or a part thereof; and
[69412] (b) growing the non-human organism or a part thereof under conditions which permit the production of succinate or a composition comprising succinate in said non-human organism or in the culture medium surrounding said non-human organism.

[69413] Accordingly, the present invention relates to a process for the production of vitamin c and/or threonic acid, which comprises
[69414] (a) increasing or generating one or more activities selected from the group consisting of monthiol glutaredoxin in a non-human organism or a part thereof, preferably a microorganism, a plant cell, a plant or a part thereof, as compared to a corresponding non-transformed wild type non-human organism or a part thereof; and
[69415] (b) growing the non-human organism or a part thereof under conditions which permit the production of vitamin c and/or threonic acid or a composition comprising vitamin c and/or threonic acid in said non-human organism or in the culture medium surrounding said non-human organism.

[69416] Accordingly, the present invention relates to a process for the production of citramalate, which comprises
[69417] (a) increasing or generating one or more activities selected from the group consisting of glutaredoxin in a non-human organism or a part thereof, preferably a microorganism, a plant cell, a plant or a part thereof, as compared to a corresponding non-transformed wild type non-human organism or a part thereof; and
[69418] (b) growing the non-human organism or a part thereof under conditions which permit the production of citramalate or a composition comprising citramalate in said non-human organism or in the culture medium surrounding said non-human organism.

[69419] Accordingly, the present invention relates to a process for the production of fumarate, which comprises
[69420] (a) increasing or generating one or more activities selected from the group consisting of glutaredoxin in a non-human organism or a part thereof, preferably a microorganism, a plant cell, a plant or a part thereof, as compared to a corresponding non-transformed wild type non-human organism or a part thereof; and
[69421] (b) growing the non-human organism or a part thereof under conditions which permit the production of fumarate or a composition comprising fumarate in said non-human organism or in the culture medium surrounding said non-human organism.

[69422] Accordingly, the present invention relates to a process for the production of glycerate, which comprises
[69423] (a) increasing or generating one or more activities selected from the group consisting of glutaredoxin in a non-human organism or a part thereof, preferably a microorganism, a plant cell, a plant or a part thereof, as compared to a corresponding non-transformed wild type non-human organism or a part thereof; and
[69424] (b) growing the non-human organism or a part thereof under conditions which permit the production of glycerate or a composition comprising glycerate in said non-human organism or in the culture medium surrounding said non-human organism.

[69425] Accordingly, the present invention relates to a process for the production of malate, which comprises
[69426] (a) increasing or generating one or more activities selected from the group consisting of glutaredoxin in a non-human organism or a part thereof, preferably a microorganism, a plant cell, a plant or a part thereof, as compared to a corresponding non-transformed wild type non-human organism or a part thereof; and
[69427] (b) growing the non-human organism or a part thereof under conditions which permit the production of malate or a composition comprising malate in said non-human organism or in the culture medium surrounding said non-human organism.

[69428] Accordingly, the present invention relates to a process for the production of succinate, which comprises
[69429] (a) increasing or generating one or more activities selected from the group consisting of glutaredoxin in a non-human organism or a part thereof, preferably a microorganism, a plant cell, a plant or a part thereof, as compared to a corresponding non-transformed wild type non-human organism or a part thereof; and
[69430] (b) growing the non-human organism or a part thereof under conditions which permit the production of succinate or a composition comprising succinate in said non-human organism or in the culture medium surrounding said non-human organism.

[69431] Accordingly, the present invention relates to a process for the production of glycerate, which comprises
[69432] (a) increasing or generating one or more activities selected from the group consisting of thioredoxin in a non-human organism or a part thereof, preferably a microorganism, a plant cell, a plant or a part thereof, as compared to a corresponding non-transformed wild type non-human organism or a part thereof; and
[69433] (b) growing the non-human organism or a part thereof under conditions which permit the production of glycerate or a composition comprising glycerate in said non-human organism or in the culture medium surrounding said non-human organism.

[69434] Accordingly, the present invention relates to a process for the production of citramalate, which comprises
[69435] (a) increasing or generating one or more activities selected from the group consisting of monothiol glutaredoxin in a non-human organism or a part thereof, preferably a microorganism, a plant cell, a plant or a part thereof, as compared to a corresponding non-transformed wild type non-human organism or a part thereof; and
[69436] (b) growing the non-human organism or a part thereof under conditions which permit the production of citramalate or a composition comprising citramalate in said non-human organism or in the culture medium surrounding said non-human organism.

[69437] Accordingly, the present invention relates to a process for the production of fumarate, which comprises
[69438] (a) increasing or generating one or more activities selected from the group consisting of monothiol glutaredoxin in a non-human organism or a part thereof, preferably a microorganism, a plant cell, a plant or a part thereof, as compared to a corresponding non-transformed wild type non-human organism or a part thereof; and
[69439] (b) growing the non-human organism or a part thereof under conditions which permit the production of fumarate or a composition comprising fumarate in said non-human organism or in the culture medium surrounding said non-human organism.

[69440] Accordingly, the present invention relates to a process for the production of glycerate, which comprises
[69441] (a) increasing or generating one or more activities selected from the group consisting of monothiol glutaredoxin in a non-human organism or a part thereof, preferably a microorganism, a plant cell, a plant or a part thereof, as compared to a corresponding non-transformed wild type non-human organism or a part thereof; and
[69442] (b) growing the non-human organism or a part thereof under conditions which permit the production of glycerate or a composition comprising glycerate in said non-human organism or in the culture medium surrounding said non-human organism.

[69443] Accordingly, the present invention relates to a process for the production of malate, which comprises
[69444] (a) increasing or generating one or more activities selected from the group consisting of monothiol glutaredoxin in a non-human organism or a part thereof, preferably a microorganism, a plant cell, a plant or a part thereof, as compared to a corresponding non-transformed wild type non-human organism or a part thereof; and
[69445] (b) growing the non-human organism or a part thereof under conditions which permit the production of malate or a composition comprising malate in said non-human organism or in the culture medium surrounding said non-human organism.

[69446] Accordingly, the present invention relates to a process for the production of succinate, which comprises
[69447] (a) increasing or generating one or more activities selected from the group consisting of monothiol glutaredoxin in a non-human organism or a part thereof, preferably a microorganism, a plant cell, a plant or a part thereof, as compared to a corresponding non-transformed wild type non-human organism or a part thereof; and
[69448] (b) growing the non-human organism or a part thereof under conditions which permit the production of succinate or a composition comprising succinate in said non-human organism or in the culture medium surrounding said non-human organism.

[69449] Accordingly, the present invention relates to a process for the production of vitamin c and/or threonic acid, which comprises
[69450] (a) increasing or generating one or more activities selected from the group consisting of monothiol glutaredoxin in a non-human organism or a part thereof, preferably a microorganism, a plant cell, a plant or a part thereof, as compared to a corresponding non-transformed wild type non-human organism or a part thereof; and
[69451] (b) growing the non-human organism or a part thereof under conditions which permit the production of vitamin c and/or threonic acid or a composition comprising vitamin c and/or threonic acid in said non-human organism or in the culture medium surrounding said non-human organism.

[69452] Accordingly, the present invention relates to a process for the production of fumarate, which comprises
[69453] (a) increasing or generating one or more activities selected from the group consisting of monothiol glutaredoxin in a non-human organism or a part thereof, preferably a microorganism, a plant cell, a plant or a part thereof, as compared to a corresponding non-transformed wild type non-human organism or a part thereof; and
[69454] (b) growing the non-human organism or a part thereof under conditions which permit the production of fumarate or a composition comprising fumarate in said non-human organism or in the culture medium surrounding said non-human organism.

[69455] Accordingly, the present invention relates to a process for the production of glycerate, which comprises
[69456] (a) increasing or generating one or more activities selected from the group consisting of monothiol glutaredoxin in a non-human organism or a part thereof, preferably a microorganism, a plant cell, a plant or a part thereof, as compared to a corresponding non-transformed wild type non-human organism or a part thereof; and
[69457] (b) growing the non-human organism or a part thereof under conditions which permit the production of glycerate or a composition comprising glycerate in said non-human organism or in the culture medium surrounding said non-human organism.

[69458] Accordingly, the present invention relates to a process for the production of malate, which comprises
[69459] (a) increasing or generating one or more activities selected from the group consisting of monothiol glutaredoxin in a non-human organism or a part thereof, preferably a microorganism, a plant cell, a plant or a part thereof, as compared to a corresponding non-transformed wild type non-human organism or a part thereof; and
[69460] (b) growing the non-human organism or a part thereof under conditions which permit the production of malate or a composition comprising malate in said non-human organism or in the culture medium surrounding said non-human organism.

[69461] Accordingly, the present invention relates to a process for the production of succinate, which comprises
[69462] (a) increasing or generating one or more activities selected from the group consisting of monothiol glutaredoxin in a non-human organism or a part thereof, preferably a microorganism, a plant cell, a plant or a part thereof, as compared to a corresponding non-transformed wild type non-human organism or a part thereof; and
[69463] (b) growing the non-human organism or a part thereof under conditions which permit the production of succinate or a composition comprising succinate in said non-human organism or in the culture medium surrounding said non-human organism.

[69464] Accordingly, the present invention relates to a process for the production of citramalate, which comprises
[69465] (a) increasing or generating one or more activities selected from the group consisting of monothiol glutaredoxin in a non-human organism or a part thereof, preferably a microorganism, a plant cell, a plant or a part thereof, as compared to a corresponding non-transformed wild type non-human organism or a part thereof; and
[69466] (b) growing the non-human organism or a part thereof under conditions which permit the production of citramalate or a composition comprising citramalate in said non-human organism or in the culture medium surrounding said non-human organism.

[69467] Accordingly, the present invention relates to a process for the production of fumarate, which comprises
[69468] (a) increasing or generating one or more activities selected from the group consisting of monothiol glutaredoxin in a non-human organism or a part thereof, preferably a microorganism, a plant cell, a plant or a part thereof, as compared to a corresponding non-transformed wild type non-human organism or a part thereof; and
[69469] (b) growing the non-human organism or a part thereof under conditions which permit the production of fumarate or a composition comprising fumarate in said non-human organism or in the culture medium surrounding said non-human organism.

[69470] Accordingly, the present invention relates to a process for the production of malate, which comprises
[69471] (a) increasing or generating one or more activities selected from the group consisting of monothiol glutaredoxin in a non-human organism or a part thereof, preferably a microorganism, a plant cell, a plant or a part thereof, as compared to a corresponding non-transformed wild type non-human organism or a part thereof; and
[69472] (b) growing the non-human organism or a part thereof under conditions which permit the production of malate or a composition comprising malate in said non-human organism or in the culture medium surrounding said non-human organism.

[69473] Accordingly, the present invention relates to a process for the production of succinate, which comprises
[69474] (a) increasing or generating one or more activities selected from the group consisting of monothiol glutaredoxin in a non-human organism or a part thereof, preferably a microorganism, a plant cell, a plant or a part thereof, as compared to a corresponding non-transformed wild type non-human organism or a part thereof; and
[69475] (b) growing the non-human organism or a part thereof under conditions which permit the production of succinate or a composition comprising succinate in said non-human organism or in the culture medium surrounding said non-human organism.

[69476] Accordingly, the present invention relates to a process for the production of vitamin c and/or threonic acid, which comprises
[69477] (a) increasing or generating one or more activities selected from the group consisting of monothiol glutaredoxin in a non-human organism or a part thereof, preferably a microorganism, a plant cell, a plant or a part thereof, as compared to a corresponding non-transformed wild type non-human organism or a part thereof; and
[69478] (b) growing the non-human organism or a part thereof under conditions which permit the production of vitamin c and/or threonic acid or a composition comprising vitamin c and/or threonic acid in said non-human organism or in the culture medium surrounding said non-human organism.

[69479] Accordingly, the present invention relates to a process for the production of glycerate, which comprises
[69480] (a) increasing or generating one or more activities selected from the group consisting of monothiol glutaredoxin in a non-human organism or a part thereof, preferably a microorganism, a plant cell, a plant or a part thereof, as compared to a corresponding non-transformed wild type non-human organism or a part thereof; and
[69481] (b) growing the non-human organism or a part thereof under conditions which permit the production of glycerate or a composition comprising glycerate in said non-human organism or in the culture medium surrounding said non-human organism.

[69482] Accordingly, the present invention relates to a process for the production of citramalate, which comprises
[69483] (a) increasing or generating one or more activities selected from the group consisting of protein phosphatase in a non-human organism or a part thereof, preferably a microorganism, a plant cell, a plant or a part thereof, as compared to a corresponding non-transformed wild type non-human organism or a part thereof; and
[69484] (b) growing the non-human organism or a part thereof under conditions which permit the production of citramalate or a composition comprising citramalate in said non-human organism or in the culture medium surrounding said non-human organism.

[69485] Accordingly, the present invention relates to a process for the production of succinate, which comprises
[69486] (a) increasing or generating one or more activities selected from the group consisting of protein phosphatase in a non-human organism or a part thereof, preferably a microorganism, a plant cell, a plant or a part thereof, as compared to a corresponding non-transformed wild type non-human organism or a part thereof; and
[69487] (b) growing the non-human organism or a part thereof under conditions which permit the production of succinate or a composition comprising succinate in said non-human organism or in the culture medium surrounding said non-human organism.

[69488] Accordingly, the present invention relates to a process for the production of citramalate, which comprises
[69489] (a) increasing or generating one or more activities selected from the group consisting of glutaredoxin in a non-human organism or a part thereof, preferably a microorganism, a plant cell, a plant or a part thereof, as compared to a corresponding non-transformed wild type non-human organism or a part thereof; and
[69490] (b) growing the non-human organism or a part thereof under conditions which permit the production of citramalate or a composition comprising citramalate in said non-human organism or in the culture medium surrounding said non-human organism.

[69491] Accordingly, the present invention relates to a process for the production of fumarate, which comprises
[69492] (a) increasing or generating one or more activities selected from the group consisting of glutaredoxin in a non-human organism or a part thereof, preferably a microorganism, a plant cell, a plant or a part thereof, as compared to a corresponding non-transformed wild type non-human organism or a part thereof; and
[69493] (b) growing the non-human organism or a part thereof under conditions which permit the production of fumarate or a composition comprising fumarate in said non-human organism or in the culture medium surrounding said non-human organism.

[69494] Accordingly, the present invention relates to a process for the production of malate, which comprises
[69495] (a) increasing or generating one or more activities selected from the group consisting of glutaredoxin in a non-human organism or a part thereof, preferably a microorganism, a plant cell, a plant or a part thereof, as compared to a corresponding non-transformed wild type non-human organism or a part thereof; and
[69496] (b) growing the non-human organism or a part thereof under conditions which permit the production of malate or a composition comprising malate in said non-human organism or in the culture medium surrounding said non-human organism.

[69497] Accordingly, the present invention relates to a process for the production of succinate, which comprises
[69498] (a) increasing or generating one or more activities selected from the group consisting of glutaredoxin in a non-human organism or a part thereof, preferably a microorganism, a plant cell, a plant or a part thereof, as compared to a corresponding non-transformed wild type non-human organism or a part thereof; and
[69499] (b) growing the non-human organism or a part thereof under conditions which permit the production of succinate or a composition comprising succinate in said non-human organism or in the culture medium surrounding said non-human organism.

[69500] Accordingly, the present invention relates to a process for the production of vitamin c and/or threonic acid, which comprises
[69501] (a) increasing or generating one or more activities selected from the group consisting of glutaredoxin in a non-human organism or a part thereof, preferably a microorganism, a plant cell, a plant or a part thereof, as compared to a corresponding non-transformed wild type non-human organism or a part thereof; and
[69502] (b) growing the non-human organism or a part thereof under conditions which permit the production of vitamin c and/or threonic acid or a composition comprising vitamin c and/or threonic acid in said non-human organism or in the culture medium surrounding said non-human organism.

[69503] Accordingly, the present invention relates to a process for the production of malate, which comprises
[69504] (a) increasing or generating one or more activities selected from the group consisting of calcium-dependent protein kinase in a non-human organism or a part thereof, preferably a microorganism, a plant cell, a plant or a part thereof, as compared to a corresponding non-transformed wild type non-human organism or a part thereof; and
[69505] (b) growing the non-human organism or a part thereof under conditions which permit the production of malate or a composition comprising malate in said non-human organism or in the culture medium surrounding said non-human organism.

[69506] Accordingly, the present invention relates to a process for the production of fumarate, which comprises
[69507] (a) increasing or generating one or more activities selected from the group consisting of heat shock transcription factor in a non-human organism or a part thereof, preferably a microorganism organism, a plant cell, a plant or a part thereof, as compared to a corresponding non-transformed wild type non-human organism or a part thereof; and
[69508] (b) growing the non-human organism or a part thereof under conditions which permit the production of fumarate or a composition comprising fumarate in said non-human organism or in the culture medium surrounding said non-human organism.

[69509] Accordingly, the present invention relates to a process for the production of malate, which comprises
[69510] (a) increasing or generating one or more activities selected from the group consisting of heat shock transcription factor in a non-human organism or a part thereof, preferably a microorganism organism, a plant cell, a plant or a part thereof, as compared to a corresponding non-transformed wild type non-human organism or a part thereof; and
[69511] (b) growing the non-human organism or a part thereof under conditions which permit the production of malate or a composition comprising malate in said non-human organism or in the culture medium surrounding said non-human organism.

[69512] Accordingly, the present invention relates to a process for the production of succinate, which comprises
[69513] (a) increasing or generating one or more activities selected from the group consisting of heat shock transcription factor in a non-human organism or a part thereof, preferably a microorganism organism, a plant cell, a plant or a part thereof, as compared to a corresponding non-transformed wild type non-human organism or a part thereof; and
[69514] (b) growing the non-human organism or a part thereof under conditions which permit the production of succinate or a composition comprising succinate in said non-human organism or in the culture medium surrounding said non-human organism.

[69515] Accordingly, the present invention relates to a process for the production of glycerate, which comprises
[69516] (a) increasing or generating one or more activities selected from the group consisting of gibberellin 20-oxidase in a non-human organism or a part thereof, preferably a microorganism, a plant cell, a plant or a part thereof, as compared to a corresponding non-transformed wild type non-human organism or a part thereof; and
[69517] (b) growing the non-human organism or a part thereof under conditions which permit the production of glycerate or a composition comprising glycerate in said non-human organism or in the culture medium surrounding said non-human organism.

[69518] Accordingly, the present invention relates to a process for the production of malate, which comprises
[69519] (a) increasing or generating one or more activities selected from the group consisting of gibberellin 20-oxidase in a non-human organism or a part thereof, preferably a microorganism, a plant cell, a plant or a part thereof, as compared to a corresponding non-transformed wild type non-human organism or a part thereof; and
[69520] (b) growing the non-human organism or a part thereof under conditions which permit the production of malate or a composition comprising malate in said non-human organism or in the culture medium surrounding said non-human organism.

[69521] Accordingly, the present invention relates to a process for the production of succinate, which comprises
[69522] (a) increasing or generating one or more activities selected from the group consisting of monothiol glutaredoxin in a non-human organism or a part thereof, preferably a microorganism, a plant cell, a plant or a part thereof, as compared to a corresponding non-transformed wild type non-human organism or a part thereof; and
[69523] (b) growing the non-human organism or a part thereof under conditions which permit the production of succinate or a composition comprising succinate in said non-human organism or in the culture medium surrounding said non-human organism.

[69524] Accordingly, the present invention relates to a process for the production of malate, which comprises
[69525] (a) increasing or generating one or more activities selected from the group consisting of translation initiation factor subunit in a non-human organism or a part thereof, preferably a microorganism, a plant cell, a plant or a part thereof, as compared to a corresponding non-transformed wild type non-human organism or a part thereof; and
[69526] (b) growing the non-human organism or a part thereof under conditions which permit the production of malate or a composition comprising malate in said non-human organism or in the culture medium surrounding said non-human organism.

[69527] Accordingly, the present invention relates to a process for the production of fumarate, which comprises
[69528] (a) increasing or generating one or more activities selected from the group consisting of transcription factor in a non-human organism or a part thereof, preferably a microorganism, a plant cell, a plant or a part thereof, as compared to a corresponding non-transformed wild type non-human organism or a part thereof; and
[69529] (b) growing the non-human organism or a part thereof under conditions which permit the production of fumarate or a composition comprising fumarate in said non-human organism or in the culture medium surrounding said non-human organism.

[69530] Accordingly, the present invention relates to a process for the production of malate, which comprises
[69531] (a) increasing or generating one or more activities selected from the group consisting of transcription factor in a non-human organism or a part thereof, preferably a microorganism, a plant cell, a plant or a part thereof, as compared to a corresponding non-transformed wild type non-human organism or a part thereof; and
[69532] (b) growing the non-human organism or a part thereof under conditions which permit the production of malate or a composition comprising malate in said non-human organism or in the culture medium surrounding said non-human organism.

[69533] Accordingly, the present invention relates to a process for the production of succinate, which comprises
[69534] (a) increasing or generating one or more activities selected from the group consisting of protein phosphatase in a non-human organism or a part thereof, preferably a microorganism, a plant cell, a plant or a part thereof, as compared to a corresponding non-transformed wild type non-human organism or a part thereof; and
[69535] (b) growing the non-human organism or a part thereof under conditions which permit the production of succinate or a composition comprising succinate in said non-human organism or in the culture medium surrounding said non-human organism.

[69536] Accordingly, the present invention relates to a process for the production of succinate, which comprises
[69537] (a) increasing or generating one or more activities selected from the group consisting of pyruvate kinase in a non-human organism or a part thereof, preferably a microorganism, a plant cell, a plant or a part thereof, as compared to a corresponding non-transformed wild type non-human organism or a part thereof; and
[69538] (b) growing the non-human organism or a part thereof under conditions which permit the production of succinate or a composition comprising succinate in said non-human organism or in the culture medium surrounding said non-human organism.

[69539] Accordingly, the present invention relates to a process for the production of fumarate, which comprises
[69540] (a) increasing or generating one or more activities selected from the group consisting of zinc finger protein in a non-human organism or a part thereof, preferably a microorganism, a plant cell, a plant or a part thereof, as compared to a corresponding non-transformed wild type non-human organism or a part thereof; and
[69541] (b) growing the non-human organism or a part thereof under conditions which permit the production of fumarate or a composition comprising fumarate in said non-human organism or in the culture medium surrounding said non-human organism.

[69542] Accordingly, the present invention relates to a process for the production of citramalate, which comprises
[69543] (a) increasing or generating one or more activities selected from the group consisting of CDP-diacylglycerol-serine O-phosphatidyltransferase in a non-human organism or a part thereof, preferably a microorganism, a plant cell, a plant or a part thereof, as compared to a corresponding non-transformed wild type non-human organism or a part thereof; and
[69544] (b) growing the non-human organism or a part thereof under conditions which permit the production of citramalate or a composition comprising citramalate in said non-human organism or in the culture medium surrounding said non-human organism.

[69545] Accordingly, the present invention relates to a process for the production of fumarate, which comprises
[69546] (a) increasing or generating one or more activities selected from the group consisting of CDP-diacylglycerol-serine O-phosphatidyltransferase in a non-human organism or a part thereof, preferably a microorganism, a plant cell, a plant or a part thereof, as compared to a corresponding non-transformed wild type non-human organism or a part thereof; and
[69547] (b) growing the non-human organism or a part thereof under conditions which permit the production of fumarate or a composition comprising fumarate in said non-human organism or in the culture medium surrounding said non-human organism.

[69548] Accordingly, the present invention relates to a process for the production of malate, which comprises
[69549] (a) increasing or generating one or more activities selected from the group consisting of CDP-diacylglycerol-serine O-phosphatidyltransferase in a non-human organism or a part thereof, preferably a microorganism, a plant cell, a plant or a part thereof, as compared to a corresponding non-transformed wild type non-human organism or a part thereof; and
[69550] (b) growing the non-human organism or a part thereof under conditions which permit the production of malate or a composition comprising malate in said non-human organism or in the culture medium surrounding said non-human organism.

[69551] Accordingly, the present invention relates to a process for the production of malate, which comprises
[69552] (a) increasing or generating one or more activities selected from the group consisting of Glycine cleavage system T aminomethyltransferase in a non-human organism or a part thereof, preferably a microorganism, a plant cell, a plant or a part thereof, as compared to a corresponding non-transformed wild type non-human organism or a part thereof; and
[69553] (b) growing the non-human organism or a part thereof under conditions which permit the production of malate or a composition comprising malate in said non-human organism or in the culture medium surrounding said non-human organism.

[69554] Accordingly, the present invention relates to a process for the production of malate, which comprises
[69555] (a) increasing or generating one or more activities selected from the group consisting of transcriptional regulator in a non-human organism or a part thereof, preferably a microorganism, a plant cell, a plant or a part thereof, as compared to a corresponding non-transformed wild type non-human organism or a part thereof; and
[69556] (b) growing the non-human organism or a part thereof under conditions which permit the production of malate or a composition comprising malate in said non-human organism or in the culture medium surrounding said non-human organism.

[69557] Accordingly, the present invention relates to a process for the production of malate, which comprises
[69558] (a) increasing or generating one or more activities selected from the group consisting of adenylylsulfate kinase in a non-human organism or a part thereof, preferably a microorganism, a plant cell, a plant or a part thereof, as compared to a corresponding non-transformed wild type non-human organism or a part thereof; and
[69559] (b) growing the non-human organism or a part thereof under conditions which permit the production of malate or a composition comprising malate in said non-human organism or in the culture medium surrounding said non-human organism.

[69560] Accordingly, the present invention relates to a process for the production of succinate, which comprises
[69561] (a) increasing or generating one or more activities selected from the group consisting of adenylylsulfate kinase in a non-human organism or a part thereof, preferably a microorganism, a plant cell, a plant or a part thereof, as compared to a corresponding non-transformed wild type non-human organism or a part thereof; and
[69562] (b) growing the non-human organism or a part thereof under conditions which permit the production of succinate or a composition comprising succinate in said non-human organism or in the culture medium surrounding said non-human organism.

[69563] Accordingly, the present invention relates to a process for the production of fumarate, which comprises
[69564] (a) increasing or generating one or more activities selected from the group consisting of sec-independent protein translocase in a non-human organism or a part thereof, preferably a microorganism, a plant cell, a plant or a part thereof, as compared to a corresponding non-transformed wild type non-human organism or a part thereof; and
[69565] (b) growing the non-human organism or a part thereof under conditions which permit the production of fumarate or a composition comprising fumarate in said non-human organism or in the culture medium surrounding said non-human organism.

[69566] Accordingly, the present invention relates to a process for the production of malate, which comprises
[69567] (a) increasing or generating one or more activities selected from the group consisting of sec-independent protein translocase in a non-human organism or a part thereof, preferably a microorganism, a plant cell, a plant or a part thereof, as compared to a corresponding non-transformed wild type non-human organism or a part thereof; and
[69568] (b) growing the non-human organism or a part thereof under conditions which permit the production of malate or a composition comprising malate in said non-human organism or in the culture medium surrounding said non-human organism.

[69569] Accordingly, the present invention relates to a process for the production of fumarate, which comprises
[69570] (a) increasing or generating one or more activities selected from the group consisting of fumarate hydratase in a non-human organism or a part thereof, preferably a microorganism, a plant cell, a plant or a part thereof, as compared to a corresponding non-transformed wild type non-human organism or a part thereof; and
[69571] (b) growing the non-human organism or a part thereof under conditions which permit the production of fumarate or a composition comprising fumarate in said non-human organism or in the culture medium surrounding said non-human organism.

[69572] Accordingly, the present invention relates to a process for the production of succinate, which comprises
[69573] (a) increasing or generating one or more activities selected from the group consisting of pyruvate kinase in a non-human organism or a part thereof, preferably a microorganism, a plant cell, a plant or a part thereof, as compared to a corresponding non-transformed wild type non-human organism or a part thereof; and
[69574] (b) growing the non-human organism or a part thereof under conditions which permit the production of succinate or a composition comprising succinate in said non-human organism or in the culture medium surrounding said non-human organism.

[69575] Accordingly, the present invention relates to a process for the production of succinate, which comprises
[69576] (a) increasing or generating one or more activities selected from the group consisting of transcriptional regulator protein in a non-human organism or a part thereof, preferably a microorganism, a plant cell, a plant or a part thereof, as compared to a corresponding non-transformed wild type non-human organism or a part thereof; and
[69577] (b) growing the non-human organism or a part thereof under conditions which permit the production of succinate or a composition comprising succinate in said non-human organism or in the culture medium surrounding said non-human organism.

[69578] Accordingly, the present invention relates to a process for the production of glycerate, which comprises
[69579] (a) increasing or generating one or more activities selected from the group consisting of beta-hydroxylase in a non-human organism or a part thereof, preferably a microorganism, a plant cell, a plant or a part thereof, as compared to a corresponding non-transformed wild type non-human organism or a part thereof; and
[69580] (b) growing the non-human organism or a part thereof under conditions which permit the production of glycerate or a composition comprising glycerate in said non-human organism or in the culture medium surrounding said non-human organism.

[69581] Accordingly, the present invention relates to a process for the production of succinate, which comprises
[69582] (a) increasing or generating one or more activities selected from the group consisting of 30S ribosomal protein S3 in a non-human organism or a part thereof, preferably a microorganism, a plant cell, a plant or a part thereof, as compared to a corresponding non-transformed wild type non-human organism or a part thereof; and
[69583] (b) growing the non-human organism or a part thereof under conditions which permit the production of succinate or a composition comprising succinate in said non-human organism or in the culture medium surrounding said non-human organism.

[69584] Accordingly, the present invention relates to a process for the production of citramalate, which comprises
[69585] (a) increasing or generating one or more activities selected from the group consisting of 50S ribosomal protein L14 in a non-human organism or a part thereof, preferably a microorganism, a plant cell, a plant or a part thereof, as compared to a corresponding non-transformed wild type non-human organism or a part thereof; and
[69586] (b) growing the non-human organism or a part thereof under conditions which permit the production of citramalate or a composition comprising citramalate in said non-human organism or in the culture medium surrounding said non-human organism.

[69587] Accordingly, the present invention relates to a process for the production of malate, which comprises
[69588] (a) increasing or generating one or more activities selected from the group consisting of acyl-CoA synthase in a non-human organism or a part thereof, preferably a microorganism, a plant cell, a plant or a part thereof, as compared to a corresponding non-transformed wild type non-human organism or a part thereof; and
[69589] (b) growing the non-human organism or a part thereof under conditions which permit the production of malate or a composition comprising malate in said non-human organism or in the culture medium surrounding said non-human organism.

[69590] Accordingly, the present invention relates to a process for the production of citramalate, which comprises
[69591] (a) increasing or generating one or more activities selected from the group consisting of 2-oxoglutarate dehydrogenase E1 subunit in a non-human organism or a part thereof, preferably a microorganism, a plant cell, a plant or a part thereof, as compared to a corresponding non-transformed wild type non-human organism or a part thereof; and
[69592] (b) growing the non-human organism or a part thereof under conditions which permit the production of citramalate or a composition comprising citramalate in said non-human organism or in the culture medium surrounding said non-human organism.

[69593] Accordingly, the present invention relates to a process for the production of fumarate, which comprises
[69594] (a) increasing or generating one or more activities selected from the group consisting of 2-oxoglutarate dehydrogenase E1 subunit in a non-human organism or a part thereof, preferably a microorganism, a plant cell, a plant or a part thereof, as compared to a corresponding non-transformed wild type non-human organism or a part thereof; and
[69595] (b) growing the non-human organism or a part thereof under conditions which permit the production of fumarate or a composition comprising fumarate in said non-human organism or in the culture medium surrounding said non-human organism.

[69596] Accordingly, the present invention relates to a process for the production of malate, which comprises
[69597] (a) increasing or generating one or more activities selected from the group consisting of 2-oxoglutarate dehydrogenase E1 subunit in a non-human organism or a part thereof, preferably a microorganism, a plant cell, a plant or a part thereof, as compared to a corresponding non-transformed wild type non-human organism or a part thereof; and
[69598] (b) growing the non-human organism or a part thereof under conditions which permit the production of malate or a composition comprising malate in said non-human organism or in the culture medium surrounding said non-human organism.

[69599] Accordingly, the present invention relates to a process for the production of succinate, which comprises
[69600] (a) increasing or generating one or more activities selected from the group consisting of 2-oxoglutarate dehydrogenase E1 subunit in a non-human organism or a part thereof, preferably a microorganism, a plant cell, a plant or a part thereof, as compared to a corresponding non-transformed wild type non-human organism or a part thereof; and
[69601] (b) growing the non-human organism or a part thereof under conditions which permit the production of succinate or a composition comprising succinate in said non-human organism or in the culture medium surrounding said non-human organism.

[69602] Accordingly, the present invention relates to a process for the production of vitamin c and/or threonic acid, which comprises
[69603] (a) increasing or generating one or more activities selected from the group consisting of 2-oxoglutarate dehydrogenase E1 subunit in a non-human organism or a part thereof, preferably a microorganism, a plant cell, a plant or a part thereof, as compared to a corresponding non-transformed wild type non-human organism or a part thereof; and
[69604] (b) growing the non-human organism or a part thereof under conditions which permit the production of vitamin c and/or threonic acid or a composition comprising vitamin c and/or threonic acid in said non-human organism or in the culture medium surrounding said non-human organism.

[69605] Accordingly, the present invention relates to a process for the production of citramalate, which comprises
[69606] (a) increasing or generating one or more activities selected from the group consisting of transcriptional regulator in a non-human organism or a part thereof, preferably a microorganism, a plant cell, a plant or a part thereof, as compared to a corresponding non-transformed wild type non-human organism or a part thereof; and
[69607] (b) growing the non-human organism or a part thereof under conditions which permit the production of citramalate or a composition comprising citramalate in said non-human organism or in the culture medium surrounding said non-human organism.

[69608] Accordingly, the present invention relates to a process for the production of fumarate, which comprises
[69609] (a) increasing or generating one or more activities selected from the group consisting of transcriptional regulator in a non-human organism or a part thereof, preferably a microorganism, a plant cell, a plant or a part thereof, as compared to a corresponding non-transformed wild type non-human organism or a part thereof; and
[69610] (b) growing the non-human organism or a part thereof under conditions which permit the production of fumarate or a composition comprising fumarate in said non-human organism or in the culture medium surrounding said non-human organism.

[69611] Accordingly, the present invention relates to a process for the production of succinate, which comprises
[69612] (a) increasing or generating one or more activities selected from the group consisting of oxidoreductase in a non-human organism or a part thereof, preferably a microorganism, a plant cell, a plant or a part thereof, as compared to a corresponding non-transformed wild type non-human organism or a part thereof; and
[69613] (b) growing the non-human organism or a part thereof under conditions which permit the production of succinate or a composition comprising succinate in said non-human organism or in the culture medium surrounding said non-human organism.

[69614] Accordingly, the present invention relates to a process for the production of fumarate, which comprises
[69615] (a) increasing or generating one or more activities selected from the group consisting of CTP synthase in a non-human organism or a part thereof, preferably a microorganism, a plant cell, a plant or a part thereof, as compared to a corresponding non-transformed wild type non-human organism or a part thereof; and
[69616] (b) growing the non-human organism or a part thereof under conditions which permit the production of fumarate or a composition comprising fumarate in said non-human organism or in the culture medium surrounding said non-human organism.

[69617] Accordingly, the present invention relates to a process for the production of malate, which comprises
[69618] (a) increasing or generating one or more activities selected from the group consisting of CTP synthase in a non-human organism or a part thereof, preferably a microorganism, a plant cell, a plant or a part thereof, as compared to a corresponding non-transformed wild type non-human organism or a part thereof; and
[69619] (b) growing the non-human organism or a part thereof under conditions which permit the production of malate or a composition comprising malate in said non-human organism or in the culture medium surrounding said non-human organism.

[69620] Accordingly, the present invention relates to a process for the production of succinate, which comprises
[69621] (a) increasing or generating one or more activities selected from the group consisting of CTP synthase in a non-human organism or a part thereof, preferably a microorganism, a plant cell, a plant or a part thereof, as compared to a corresponding non-transformed wild type non-human organism or a part thereof; and
[69622] (b) growing the non-human organism or a part thereof under conditions which permit the production of succinate or a composition comprising succinate in said non-human organism or in the culture medium surrounding said non-human organism.

[69623] Accordingly, the present invention relates to a process for the production of succinate, which comprises
[69624] (a) increasing or generating one or more activities selected from the group consisting of recombinase A in a non-human organism or a part thereof, preferably a microorganism, a plant cell, a plant or a part thereof, as compared to a corresponding non-transformed wild type non-human organism or a part thereof; and
[69625] (b) growing the non-human organism or a part thereof under conditions which permit the production of succinate or a composition comprising succinate in said non-human organism or in the culture medium surrounding said non-human organism.

[69626] Accordingly, the present invention relates to a process for the production of malate, which comprises
[69627] (a) increasing or generating one or more activities selected from the group consisting of glucose-1-phosphate cytidylyltransferase in a non-human organism or a part thereof, preferably a microorganism, a plant cell, a plant or a part thereof, as compared to a corresponding non-transformed wild type non-human organism or a part thereof; and
[69628] (b) growing the non-human organism or a part thereof under conditions which permit the production of malate or a composition comprising malate in said non-human organism or in the culture medium surrounding said non-human organism.

[69629] Accordingly, the present invention relates to a process for the production of fumarate, which comprises
[69630] (a) increasing or generating one or more activities selected from the group consisting of CDP-glucose-4,6-dehydratase in a non-human organism or a part thereof, preferably a microorganism, a plant cell, a plant or a part thereof, as compared to a corresponding non-transformed wild type non-human organism or a part thereof; and
[69631] (b) growing the non-human organism or a part thereof under conditions which permit the production of fumarate or a composition comprising fumarate in said non-human organism or in the culture medium surrounding said non-human organism.

[69632] Accordingly, the present invention relates to a process for the production of malate, which comprises
[69633] (a) increasing or generating one or more activities selected from the group consisting of CDP-glucose-4,6-dehydratase in a non-human organism or a part thereof, preferably a microorganism, a plant cell, a plant or a part thereof, as compared to a corresponding non-transformed wild type non-human organism or a part thereof; and
[69634] (b) growing the non-human organism or a part thereof under conditions which permit the production of malate or a composition comprising malate in said non-human organism or in the culture medium surrounding said non-human organism.

[69635] Accordingly, the present invention relates to a process for the production of malate, which comprises
[69636] (a) increasing or generating one or more activities selected from the group consisting of aminotransferase in a non-human organism or a part thereof, preferably a microorganism, a plant cell, a plant or a part thereof, as compared to a corresponding non-transformed wild type non-human organism or a part thereof; and
[69637] (b) growing the non-human organism or a part thereof under conditions which permit the production of malate or a composition comprising malate in said non-human organism or in the culture medium surrounding said non-human organism.

[69638] Accordingly, the present invention relates to a process for the production of succinate, which comprises
[69639] (a) increasing or generating one or more activities selected from the group consisting of isocitrate lyase in a non-human organism or a part thereof, preferably a microorganism, a plant cell, a plant or a part thereof, as compared to a corresponding non-transformed wild type non-human organism or a part thereof; and
[69640] (b) growing the non-human organism or a part thereof under conditions which permit the production of succinate or a composition comprising succinate in said non-human organism or in the culture medium surrounding said non-human organism.

[69641] Accordingly, the present invention relates to a process for the production of fumarate, which comprises
[69642] (a) increasing or generating one or more activities selected from the group consisting of NADH-quinone oxidoreductase subunit in a non-human organism or a part thereof, preferably a microorganism, a plant cell, a plant or a part thereof, as compared to a corresponding non-transformed wild type non-human organism or a part thereof; and
[69643] (b) growing the non-human organism or a part thereof under conditions which permit the production of fumarate or a composition comprising fumarate in said non-human organism or in the culture medium surrounding said non-human organism.

[69644] Accordingly, the present invention relates to a process for the production of malate, which comprises
[69645] (a) increasing or generating one or more activities selected from the group consisting of NADH-quinone oxidoreductase subunit in a non-human organism or a part thereof, preferably a microorganism, a plant cell, a plant or a part thereof, as compared to a corresponding non-transformed wild type non-human organism or a part thereof; and
[69646] (b) growing the non-human organism or a part thereof under conditions which permit the production of malate or a composition comprising malate in said non-human organism or in the culture medium surrounding said non-human organism.

[69647] Accordingly, the present invention relates to a process for the production of malate, which comprises
[69648] (a) increasing or generating one or more activities selected from the group consisting of RNA polymerase sigma factor in a non-human organism or a part thereof, preferably a microorganism organism, a plant cell, a plant or a part thereof, as compared to a corresponding non-transformed wild type non-human organism or a part thereof; and
[69649] (b) growing the non-human organism or a part thereof under conditions which permit the production of malate or a composition comprising malate in said non-human organism or in the culture medium surrounding said non-human organism.

[69650] Accordingly, the present invention relates to a process for the production of malate, which comprises
[69651] (a) increasing or generating one or more activities selected from the group consisting of hydrolase in a non-human organism or a part thereof, preferably a microorganism, a plant cell, a plant or a part thereof, as compared to a corresponding non-transformed wild type non-human organism or a part thereof; and
[69652] (b) growing the non-human organism or a part thereof under conditions which permit the production of malate or a composition comprising malate in said non-human organism or in the culture medium surrounding said non-human organism.

[69653] Accordingly, the present invention relates to a process for the production of malate, which comprises
[69654] (a) increasing or generating one or more activities selected from the group consisting of glutamate-ammonia-ligase in a non-human organism or a part thereof, preferably a microorganism, a plant cell, a plant or a part thereof, as compared to a corresponding non-transformed wild type non-human organism or a part thereof; and
[69655] (b) growing the non-human organism or a part thereof under conditions which permit the production of malate or a composition comprising malate in said non-human organism or in the culture medium surrounding said non-human organism.

[69656] Accordingly, the present invention relates to a process for the production of succinate, which comprises
[69657] (a) increasing or generating one or more activities selected from the group consisting of electron transfer flavoprotein subunit beta in a non-human organism or a part thereof, preferably a microorganism, a plant cell, a plant or a part thereof, as compared to a corresponding non-transformed wild type non-human organism or a part thereof; and
[69658] (b) growing the non-human organism or a part thereof under conditions which permit the production of succinate or a composition comprising succinate in said non-human organism or in the culture medium surrounding said non-human organism.

[69659] Accordingly, the present invention relates to a process for the production of fumarate, which comprises
[69660] (a) increasing or generating one or more activities selected from the group consisting of AX653549-protein in a non-human organism or a part thereof, preferably a microorganism, a plant cell, a plant or a part thereof, as compared to a corresponding non-transformed wild type non-human organism or a part thereof; and
[69661] (b) growing the non-human organism or a part thereof under conditions which permit the production of fumarate or a composition comprising fumarate in said non-human organism or in the culture medium surrounding said non-human organism.

[69662] Accordingly, the present invention relates to a process for the production of malate, which comprises
[69663] (a) increasing or generating one or more activities selected from the group consisting of AX653549-protein in a non-human organism or a part thereof, preferably a microorganism, a plant cell, a plant or a part thereof, as compared to a corresponding non-transformed wild type non-human organism or a part thereof; and
[69664] (b) growing the non-human organism or a part thereof under conditions which permit the production of malate or a composition comprising malate in said non-human organism or in the culture medium surrounding said non-human organism.

[69665] Accordingly, the present invention relates to a process for the production of fumarate, which comprises
[69666] (a) increasing or generating one or more activities selected from the group consisting of AY087308-protein in a non-human organism or a part thereof, preferably a microorganism, a plant cell, a plant or a part thereof, as compared to a corresponding non-transformed wild type non-human organism or a part thereof; and
[69667] (b) growing the non-human organism or a part thereof under conditions which permit the production of fumarate or a composition comprising fumarate in said non-human organism or in the culture medium surrounding said non-human organism.

[69668] Accordingly, the present invention relates to a process for the production of malate, which comprises
[69669] (a) increasing or generating one or more activities selected from the group consisting of AY087308-protein in a non-human organism or a part thereof, preferably a microorganism, a plant cell, a plant or a part thereof, as compared to a corresponding non-transformed wild type non-human organism or a part thereof; and
[69670] (b) growing the non-human organism or a part thereof under conditions which permit the production of malate or a composition comprising malate in said non-human organism or in the culture medium surrounding said non-human organism.

[69671] Accordingly, the present invention relates to a process for the production of succinate, which comprises
[69672] (a) increasing or generating one or more activities selected from the group consisting of AY087308-protein in a non-human organism or a part thereof, preferably a microorganism, a plant cell, a plant or a part thereof, as compared to a corresponding non-transformed wild type non-human organism or a part thereof; and
[69673] (b) growing the non-human organism or a part thereof under conditions which permit the production of succinate or a composition comprising succinate in said non-human organism or in the culture medium surrounding said non-human organism.

[69674] Accordingly, the present invention relates to a process for the production of fumarate, which comprises
[69675] (a) increasing or generating one or more activities selected from the group consisting of fumarate hydratase in a non-human organism or a part thereof, preferably a microorganism, a plant cell, a plant or a part thereof, as compared to a corresponding non-transformed wild type non-human organism or a part thereof; and
[69676] (b) growing the non-human organism or a part thereof under conditions which permit the production of fumarate or a composition comprising fumarate in said non-human organism or in the culture medium surrounding said non-human organism.

[69677] Accordingly, the present invention relates to a process for the production of malate, which comprises
[69678] (a) increasing or generating one or more activities selected from the group consisting of threonine synthase in a non-human organism or a part thereof, preferably a microorganism, a plant cell, a plant or a part thereof, as compared to a corresponding non-transformed wild type non-human organism or a part thereof; and
[69679] (b) growing the non-human organism or a part thereof under conditions which permit the production of malate or a composition comprising malate in said non-human organism or in the culture medium surrounding said non-human organism.

[69680] Accordingly, the present invention relates to a process for the production of fumarate, which comprises
[69681] (a) increasing or generating one or more activities selected from the group consisting of ribulokinase in a non-human organism or a part thereof, preferably a microorganism, a plant cell, a plant or a part thereof, as compared to a corresponding non-transformed wild type non-human organism or a part thereof; and
[69682] (b) growing the non-human organism or a part thereof under conditions which permit the production of fumarate or a composition comprising fumarate in said non-human organism or in the culture medium surrounding said non-human organism.

[69683] Accordingly, the present invention relates to a process for the production of succinate, which comprises
[69684] (a) increasing or generating one or more activities selected from the group consisting of ribulokinase in a non-human organism or a part thereof, preferably a microorganism, a plant cell, a plant or a part thereof, as compared to a corresponding non-transformed wild type non-human organism or a part thereof; and
[69685] (b) growing the non-human organism or a part thereof under conditions which permit the production of succinate or a composition comprising succinate in said non-human organism or in the culture medium surrounding said non-human organism.

[69686] Accordingly, the present invention relates to a process for the production of citrate, which comprises
[69687] (a) increasing or generating one or more activities selected from the group consisting of glucose dehydrogenase in a non-human organism or a part thereof, preferably a microorganism, a plant cell, a plant or a part thereof, as compared to a corresponding non-transformed wild type non-human organism or a part thereof; and
[69688] (b) growing the non-human organism or a part thereof under conditions which permit the production of citrate or a composition comprising citrate in said non-human organism or in the culture medium surrounding said non-human organism.

[69689] Accordingly, the present invention relates to a process for the production of fumarate, which comprises
[69690] (a) increasing or generating one or more activities selected from the group consisting of acyl-CoA dehydrogenase in a non-human organism or a part thereof, preferably a microorganism, a plant cell, a plant or a part thereof, as compared to a corresponding non-transformed wild type non-human organism or a part thereof; and
[69691] (b) growing the non-human organism or a part thereof under conditions which permit the production of fumarate or a composition comprising fumarate in said non-human organism or in the culture medium surrounding said non-human organism.

[69692] Accordingly, the present invention relates to a process for the production of citrate, which comprises
[69693] (a) increasing or generating one or more activities selected from the group consisting of betaine aldehyde dehydrogenase in a non-human organism or a part thereof, preferably a microorganism, a plant cell, a plant or a part thereof, as compared to a corresponding non-transformed wild type non-human organism or a part thereof; and
[69694] (b) growing the non-human organism or a part thereof under conditions which permit the production of citrate or a composition comprising citrate in said non-human organism or in the culture medium surrounding said non-human organism.

[69695] Accordingly, the present invention relates to a process for the production of malate, which comprises
[69696] (a) increasing or generating one or more activities selected from the group consisting of ATP-binding component of a transport system in a non-human organism or a part thereof, preferably a microorganism, a plant cell, a plant or a part thereof, as compared to a corresponding non-transformed wild type non-human organism or a part thereof; and
[69697] (b) growing the non-human organism or a part thereof under conditions which permit the production of malate or a composition comprising malate in said non-human organism or in the culture medium surrounding said non-human organism.

[69698] Accordingly, the present invention relates to a process for the production of malate, which comprises
[69699] (a) increasing or generating one or more activities selected from the group consisting of membrane transport protein in a non-human organism or a part thereof, preferably a microorganism, a plant cell, a plant or a part thereof, as compared to a corresponding non-transformed wild type non-human organism or a part thereof; and
[69700] (b) growing the non-human organism or a part thereof under conditions which permit the production of malate or a composition comprising malate in said non-human organism or in the culture medium surrounding said non-human organism.

[69701] Accordingly, the present invention relates to a process for the production of succinate, which comprises
[69702] (a) increasing or generating one or more activities selected from the group consisting of membrane transport protein in a non-human organism or a part thereof, preferably a microorganism, a plant cell, a plant or a part thereof, as compared to a corresponding non-transformed wild type non-human organism or a part thereof; and
[69703] (b) growing the non-human organism or a part thereof under conditions which permit the production of succinate or a composition comprising succinate in said non-human organism or in the culture medium surrounding said non-human organism.

[69704] Accordingly, the present invention relates to a process for the production of citrate, which comprises
[69705] (a) increasing or generating one or more activities selected from the group consisting of glycerate kinase in a non-human organism or a part thereof, preferably a microorganism, a plant cell, a plant or a part thereof, as compared to a corresponding non-transformed wild type non-human organism or a part thereof; and
[69706] (b) growing the non-human organism or a part thereof under conditions which permit the production of citrate or a composition comprising citrate in said non-human organism or in the culture medium surrounding said non-human organism.

[69707] Accordingly, the present invention relates to a process for the production of fumarate, which comprises
[69708] (a) increasing or generating one or more activities selected from the group consisting of isochorismate synthase in a non-human organism or a part thereof, preferably a microorganism, a plant cell, a plant or a part thereof, as compared to a corresponding non-transformed wild type non-human organism or a part thereof; and
[69709] (b) growing the non-human organism or a part thereof under conditions which permit the production of fumarate or a composition comprising fumarate in said non-human organism or in the culture medium surrounding said non-human organism.

[69710] Accordingly, the present invention relates to a process for the production of malate, which comprises
[69711] (a) increasing or generating one or more activities selected from the group consisting of isochorismate synthase in a non-human organism or a part thereof, preferably a microorganism, a plant cell, a plant or a part thereof, as compared to a corresponding non-transformed wild type non-human organism or a part thereof; and
[69712] (b) growing the non-human organism or a part thereof under conditions which permit the production of malate or a composition comprising malate in said non-human organism or in the culture medium surrounding said non-human organism.

[69713] Accordingly, the present invention relates to a process for the production of fumarate, which comprises
[69714] (a) increasing or generating one or more activities selected from the group consisting of zinc transporter in a non-human organism or a part thereof, preferably a microorganism, a plant cell, a plant or a part thereof, as compared to a corresponding non-transformed wild type non-human organism or a part thereof; and
[69715] (b) growing the non-human organism or a part thereof under conditions which permit the production of fumarate or a composition comprising fumarate in said non-human organism or in the culture medium surrounding said non-human organism.

[69716] Accordingly, the present invention relates to a process for the production of succinate, which comprises
[69717] (a) increasing or generating one or more activities selected from the group consisting of b0801-protein in a non-human organism or a part thereof, preferably a microorganism, a plant cell, a plant or a part thereof, as compared to a corresponding non-transformed wild type non-human organism or a part thereof; and
[69718] (b) growing the non-human organism or a part thereof under conditions which permit the production of succinate or a composition comprising succinate in said non-human organism or in the culture medium surrounding said non-human organism.

[69719] Accordingly, the present invention relates to a process for the production of malate, which comprises
[69720] (a) increasing or generating one or more activities selected from the group consisting of leucyl/phenylalanyl-tRNA-protein transferase in a non-human organism or a part thereof, preferably a microorganism, a plant cell, a plant or a part thereof, as compared to a corresponding non-transformed wild type non-human organism or a part thereof; and
[69721] (b) growing the non-human organism or a part thereof under conditions which permit the production of malate or a composition comprising malate in said non-human organism or in the culture medium surrounding said non-human organism.

[69722] Accordingly, the present invention relates to a process for the production of vitamin c and/or threonic acid, which comprises
[69723] (a) increasing or generating one or more activities selected from the group consisting of methylglyoxal synthase in a non-human organism or a part thereof, preferably a microorganism, a plant cell, a plant or a part thereof, as compared to a corresponding non-transformed wild type non-human organism or a part thereof; and
[69724] (b) growing the non-human organism or a part thereof under conditions which permit the production of vitamin c and/or threonic acid or a composition comprising vitamin c and/or threonic acid in said non-human organism or in the culture medium surrounding said non-human organism.

[69725] Accordingly, the present invention relates to a process for the production of malate, which comprises
[69726] (a) increasing or generating one or more activities selected from the group consisting of b1003-protein in a non-human organism or a part thereof, preferably a microorganism, a plant cell, a plant or a part thereof, as compared to a corresponding non-transformed wild type non-human organism or a part thereof; and
[69727] (b) growing the non-human organism or a part thereof under conditions which permit the production of malate or a composition comprising malate in said non-human organism or in the culture medium surrounding said non-human organism.

[69728] Accordingly, the present invention relates to a process for the production of malate, which comprises
[69729] (a) increasing or generating one or more activities selected from the group consisting of membrane protein in a non-human organism or a part thereof, preferably a microorganism, a plant cell, a plant or a part thereof, as compared to a corresponding non-transformed wild type non-human organism or a part thereof; and
[69730] (b) growing the non-human organism or a part thereof under conditions which permit the production of malate or a composition comprising malate in said non-human organism or in the culture medium surrounding said non-human organism.

[69731] Accordingly, the present invention relates to a process for the production of succinate, which comprises
[69732] (a) increasing or generating one or more activities selected from the group consisting of b1285-protein in a non-human organism or a part thereof, preferably a microorganism, a plant cell, a plant or a part thereof, as compared to a corresponding non-transformed wild type non-human organism or a part thereof; and
[69733] (b) growing the non-human organism or a part thereof under conditions which permit the production of succinate or a composition comprising succinate in said non-human organism or in the culture medium surrounding said non-human organism.

[69734] Accordingly, the present invention relates to a process for the production of malate, which comprises
[69735] (a) increasing or generating one or more activities selected from the group consisting of phenylacetic acid degradation protein in a non-human organism or a part thereof, preferably a microorganism, a plant cell, a plant or a part thereof, as compared to a corresponding non-transformed wild type non-human organism or a part thereof; and
[69736] (b) growing the non-human organism or a part thereof under conditions which permit the production of malate or a composition comprising malate in said non-human organism or in the culture medium surrounding said non-human organism.

[69737] Accordingly, the present invention relates to a process for the production of malate, which comprises
[69738] (a) increasing or generating one or more activities selected from the group consisting of b1425-protein in a non-human organism or a part thereof, preferably a microorganism, a plant cell, a plant or a part thereof, as compared to a corresponding non-transformed wild type non-human organism or a part thereof; and
[69739] (b) growing the non-human organism or a part thereof under conditions which permit the production of malate or a composition comprising malate in said non-human organism or in the culture medium surrounding said non-human organism.

[69740] Accordingly, the present invention relates to a process for the production of succinate, which comprises
[69741] (a) increasing or generating one or more activities selected from the group consisting of lipoprotein precursor in a non-human organism or a part thereof, preferably a microorganism, a plant cell, a plant or a part thereof, as compared to a corresponding non-transformed wild type non-human organism or a part thereof; and
[69742] (b) growing the non-human organism or a part thereof under conditions which permit the production of succinate or a composition comprising succinate in said non-human organism or in the culture medium surrounding said non-human organism.

[69743] Accordingly, the present invention relates to a process for the production of citramalate, which comprises
[69744] (a) increasing or generating one or more activities selected from the group consisting of b1445-protein in a non-human organism or a part thereof, preferably a microorganism, a plant cell, a plant or a part thereof, as compared to a corresponding non-transformed wild type non-human organism or a part thereof; and
[69745] (b) growing the non-human organism or a part thereof under conditions which permit the production of citramalate or a composition comprising citramalate in said non-human organism or in the culture medium surrounding said non-human organism.

[69746] Accordingly, the present invention relates to a process for the production of citramalate, which comprises
[69747] (a) increasing or generating one or more activities selected from the group consisting of b1522-protein in a non-human organism or a part thereof, preferably a microorganism, a plant cell, a plant or a part thereof, as compared to a corresponding non-transformed wild type non-human organism or a part thereof; and
[69748] (b) growing the non-human organism or a part thereof under conditions which permit the production of citramalate or a composition comprising citramalate in said non-human organism or in the culture medium surrounding said non-human organism.

[69749] Accordingly, the present invention relates to a process for the production of malate, which comprises
[69750] (a) increasing or generating one or more activities selected from the group consisting of b1522-protein in a non-human organism or a part thereof, preferably a microorganism, a plant cell, a plant or a part thereof, as compared to a corresponding non-transformed wild type non-human organism or a part thereof; and
[69751] (b) growing the non-human organism or a part thereof under conditions which permit the production of malate or a composition comprising malate in said non-human organism or in the culture medium surrounding said non-human organism.

[69752] Accordingly, the present invention relates to a process for the production of fumarate, which comprises
[69753] (a) increasing or generating one or more activities selected from the group consisting of Fe—S subunit of oxidoreductase in a non-human organism or a part thereof, preferably a microorganism organism, a plant cell, a plant or a part thereof, as compared to a corresponding non-transformed wild type non-human organism or a part thereof; and
[69754] (b) growing the non-human organism or a part thereof under conditions which permit the production of fumarate or a composition comprising fumarate in said non-human organism or in the culture medium surrounding said non-human organism.

[69755] Accordingly, the present invention relates to a process for the production of fumarate, which comprises
[69756] (a) increasing or generating one or more activities selected from the group consisting of fumarate hydratase in a non-human organism or a part thereof, preferably a microorganism, a plant cell, a plant or a part thereof, as compared to a corresponding non-transformed wild type non-human organism or a part thereof; and
[69757] (b) growing the non-human organism or a part thereof under conditions which permit the production of fumarate or a composition comprising fumarate in said non-human organism or in the culture medium surrounding said non-human organism.

[69758] Accordingly, the present invention relates to a process for the production of succinate, which comprises
[69759] (a) increasing or generating one or more activities selected from the group consisting of electron transport complex protein in a non-human organism or a part thereof, preferably a microorganism, a plant cell, a plant or a part thereof, as compared to a corresponding non-transformed wild type non-human organism or a part thereof; and
[69760] (b) growing the non-human organism or a part thereof under conditions which permit the production of succinate or a composition comprising succinate in said non-human organism or in the culture medium surrounding said non-human organism.

[69761] Accordingly, the present invention relates to a process for the production of succinate, which comprises
[69762] (a) increasing or generating one or more activities selected from the group consisting of methylglyoxalase in a non-human organism or a part thereof, preferably a microorganism, a plant cell, a plant or a part thereof, as compared to a corresponding non-transformed wild type non-human organism or a part thereof; and
[69763] (b) growing the non-human organism or a part thereof under conditions which permit the production of succinate or a composition comprising succinate in said non-human organism or in the culture medium surrounding said non-human organism.

[69764] Accordingly, the present invention relates to a process for the production of citramalate, which comprises
[69765] (a) increasing or generating one or more activities selected from the group consisting of b1670-protein in a non-human organism or a part thereof, preferably a microorganism, a plant cell, a plant or a part thereof, as compared to a corresponding non-transformed wild type non-human organism or a part thereof; and
[69766] (b) growing the non-human organism or a part thereof under conditions which permit the production of citramalate or a composition comprising citramalate in said non-human organism or in the culture medium surrounding said non-human organism.

[69767] Accordingly, the present invention relates to a process for the production of malate, which comprises
[69768] (a) increasing or generating one or more activities selected from the group consisting of b1670-protein in a non-human organism or a part thereof, preferably a microorganism, a plant cell, a plant or a part thereof, as compared to a corresponding non-transformed wild type non-human organism or a part thereof; and
[69769] (b) growing the non-human organism or a part thereof under conditions which permit the production of malate or a composition comprising malate in said non-human organism or in the culture medium surrounding said non-human organism.

[69770] Accordingly, the present invention relates to a process for the production of citramalate, which comprises
[69771] (a) increasing or generating one or more activities selected from the group consisting of b1672-protein in a non-human organism or a part thereof, preferably a microorganism, a plant cell, a plant or a part thereof, as compared to a corresponding non-transformed wild type non-human organism or a part thereof; and
[69772] (b) growing the non-human organism or a part thereof under conditions which permit the production of citramalate or a composition comprising citramalate in said non-human organism or in the culture medium surrounding said non-human organism.

[69773] Accordingly, the present invention relates to a process for the production of malate, which comprises
[69774] (a) increasing or generating one or more activities selected from the group consisting of b1672-protein in a non-human organism or a part thereof, preferably a microorganism, a plant cell, a plant or a part thereof, as compared to a corresponding non-transformed wild type non-human organism or a part thereof; and
[69775] (b) growing the non-human organism or a part thereof under conditions which permit the production of malate or a composition comprising malate in said non-human organism or in the culture medium surrounding said non-human organism.

[69776] Accordingly, the present invention relates to a process for the production of vitamin c and/or threonic acid, which comprises
[69777] (a) increasing or generating one or more activities selected from the group consisting of b1672-protein in a non-human organism or a part thereof, preferably a microorganism, a plant cell, a plant or a part thereof, as compared to a corresponding non-transformed wild type non-human organism or a part thereof; and
[69778] (b) growing the non-human organism or a part thereof under conditions which permit the production of vitamin c and/or threonic acid or a composition comprising vitamin c and/or threonic acid in said non-human organism or in the culture medium surrounding said non-human organism.

[69779] Accordingly, the present invention relates to a process for the production of malate, which comprises
[69780] (a) increasing or generating one or more activities selected from the group consisting of b1742-protein in a non-human organism or a part thereof, preferably a microorganism, a plant cell, a plant or a part thereof, as compared to a corresponding non-transformed wild type non-human organism or a part thereof; and
[69781] (b) growing the non-human organism or a part thereof under conditions which permit the production of malate or a composition comprising malate in said non-human organism or in the culture medium surrounding said non-human organism.

[69782] Accordingly, the present invention relates to a process for the production of succinate, which comprises
[69783] (a) increasing or generating one or more activities selected from the group consisting of b1742-protein in a non-human organism or a part thereof, preferably a microorganism, a plant cell, a plant or a part thereof, as compared to a corresponding non-transformed wild type non-human organism or a part thereof; and
[69784] (b) growing the non-human organism or a part thereof under conditions which permit the production of succinate or a composition comprising succinate in said non-human organism or in the culture medium surrounding said non-human organism.

[69785] Accordingly, the present invention relates to a process for the production of succinate, which comprises
[69786] (a) increasing or generating one or more activities selected from the group consisting of arginine N-succinyltransferase in a non-human organism or a part thereof, preferably a microorganism, a plant cell, a plant or a part thereof, as compared to a corresponding non-transformed wild type non-human organism or a part thereof; and
[69787] (b) growing the non-human organism or a part thereof under conditions which permit the production of succinate or a composition comprising succinate in said non-human organism or in the culture medium surrounding said non-human organism.

[69788] Accordingly, the present invention relates to a process for the production of vitamin c and/or threonic acid, which comprises
[69789] (a) increasing or generating one or more activities selected from the group consisting of ABC transporter permease protein in a non-human organism or a part thereof, preferably a microorganism, a plant cell, a plant or a part thereof, as compared to a corresponding non-transformed wild type non-human organism or a part thereof; and
[69790] (b) growing the non-human organism or a part thereof under conditions which permit the production of vitamin c and/or threonic acid or a composition comprising vitamin c and/or threonic acid in said non-human organism or in the culture medium surrounding said non-human organism.

[69791] Accordingly, the present invention relates to a process for the production of malate, which comprises
[69792] (a) increasing or generating one or more activities selected from the group consisting of protease in a non-human organism or a part thereof, preferably a microorganism, a plant cell, a plant or a part thereof, as compared to a corresponding non-transformed wild type non-human organism or a part thereof; and
[69793] (b) growing the non-human organism or a part thereof under conditions which permit the production of malate or a composition comprising malate in said non-human organism or in the culture medium surrounding said non-human organism.

[69794] Accordingly, the present invention relates to a process for the production of vitamin c and/or threonic acid, which comprises
[69795] (a) increasing or generating one or more activities selected from the group consisting of dATP pyrophosphohydrolase in a non-human organism or a part thereof, preferably a microorganism, a plant cell, a plant or a part thereof, as compared to a corresponding non-transformed wild type non-human organism or a part thereof; and
[69796] (b) growing the non-human organism or a part thereof under conditions which permit the production of vitamin c and/or threonic acid or a composition comprising vitamin c and/or threonic acid in said non-human organism or in the culture medium surrounding said non-human organism.

[69797] Accordingly, the present invention relates to a process for the production of succinate, which comprises
[69798] (a) increasing or generating one or more activities selected from the group consisting of b1898-protein in a non-human organism or a part thereof, preferably a microorganism, a plant cell, a plant or a part thereof, as compared to a corresponding non-transformed wild type non-human organism or a part thereof; and
[69799] (b) growing the non-human organism or a part thereof under conditions which permit the production of succinate or a composition comprising succinate in said non-human organism or in the culture medium surrounding said non-human organism.

[69800] Accordingly, the present invention relates to a process for the production of fumarate, which comprises
[69801] (a) increasing or generating one or more activities selected from the group consisting of flagellar M-ring protein in a non-human organism or a part thereof, preferably a microorganism, a plant cell, a plant or a part thereof, as compared to a corresponding non-transformed wild type non-human organism or a part thereof; and
[69802] (b) growing the non-human organism or a part thereof under conditions which permit the production of fumarate or a composition comprising fumarate in said non-human organism or in the culture medium surrounding said non-human organism.

[69803] Accordingly, the present invention relates to a process for the production of malate, which comprises
[69804] (a) increasing or generating one or more activities selected from the group consisting of flagellar M-ring protein in a non-human organism or a part thereof, preferably a microorganism, a plant cell, a plant or a part thereof, as compared to a corresponding non-transformed wild type non-human organism or a part thereof; and
[69805] (b) growing the non-human organism or a part thereof under conditions which permit the production of malate or a composition comprising malate in said non-human organism or in the culture medium surrounding said non-human organism.

[69806] Accordingly, the present invention relates to a process for the production of succinate, which comprises
[69807] (a) increasing or generating one or more activities selected from the group consisting of flagellar M-ring protein in a non-human organism or a part thereof, preferably a microorganism, a plant cell, a plant or a part thereof, as compared to a corresponding non-transformed wild type non-human organism or a part thereof; and
[69808] (b) growing the non-human organism or a part thereof under conditions which permit the production of succinate or a composition comprising succinate in said non-human organism or in the culture medium surrounding said non-human organism.

[69809] Accordingly, the present invention relates to a process for the production of malate, which comprises
[69810] (a) increasing or generating one or more activities selected from the group consisting of O-antigen chain length determinant in a non-human organism or a part thereof, preferably a microorganism, a plant cell, a plant or a part thereof, as compared to a corresponding non-transformed wild type non-human organism or a part thereof; and
[69811] (b) growing the non-human organism or a part thereof under conditions which permit the production of malate or a composition comprising malate in said non-human organism or in the culture medium surrounding said non-human organism.

[69812] Accordingly, the present invention relates to a process for the production of fumarate, which comprises
[69813] (a) increasing or generating one or more activities selected from the group consisting of b2399-protein in a non-human organism or a part thereof, preferably a microorganism, a plant cell, a plant or a part thereof, as compared to a corresponding non-transformed wild type non-human organism or a part thereof; and
[69814] (b) growing the non-human organism or a part thereof under conditions which permit the production of fumarate or a composition comprising fumarate in said non-human organism or in the culture medium surrounding said non-human organism.

[69815] Accordingly, the present invention relates to a process for the production of succinate, which comprises
[69816] (a) increasing or generating one or more activities selected from the group consisting of b2399-protein in a non-human organism or a part thereof, preferably a microorganism, a plant cell, a plant or a part thereof, as compared to a corresponding non-transformed wild type non-human organism or a part thereof; and
[69817] (b) growing the non-human organism or a part thereof under conditions which permit the production of succinate or a composition comprising succinate in said non-human organism or in the culture medium surrounding said non-human organism.

[69818] Accordingly, the present invention relates to a process for the production of vitamin c and/or threonic acid, which comprises
[69819] (a) increasing or generating one or more activities selected from the group consisting of b2399-protein in a non-human organism or a part thereof, preferably a microorganism, a plant cell, a plant or a part thereof, as compared to a corresponding non-transformed wild type non-human organism or a part thereof; and
[69820] (b) growing the non-human organism or a part thereof under conditions which permit the production of vitamin c and/or threonic acid or a composition comprising vitamin c and/or threonic acid in said non-human organism or in the culture medium surrounding said non-human organism.

[69821] Accordingly, the present invention relates to a process for the production of vitamin c and/or threonic acid, which comprises
[69822] (a) increasing or generating one or more activities selected from the group consisting of cysteine synthase A in a non-human organism or a part thereof, preferably a microorganism, a plant cell, a plant or a part thereof, as compared to a corresponding non-transformed wild type non-human organism or a part thereof; and
[69823] (b) growing the non-human organism or a part thereof under conditions which permit the production of vitamin c and/or threonic acid or a composition comprising vitamin c and/or threonic acid in said non-human organism or in the culture medium surrounding said non-human organism.

[69824] Accordingly, the present invention relates to a process for the production of vitamin c and/or threonic acid, which comprises
[69825] (a) increasing or generating one or more activities selected from the group consisting of cysteine synthase B in a non-human organism or a part thereof, preferably a microorganism, a plant cell, a plant or a part thereof, as compared to a corresponding non-transformed wild type non-human organism or a part thereof; and
[69826] (b) growing the non-human organism or a part thereof under conditions which permit the production of vitamin c and/or threonic acid or a composition comprising vitamin c and/or threonic acid in said non-human organism or in the culture medium surrounding said non-human organism.

[69827] Accordingly, the present invention relates to a process for the production of fumarate, which comprises
[69828] (a) increasing or generating one or more activities selected from the group consisting of transcriptional regulator in a non-human organism or a part thereof, preferably a microorganism, a plant cell, a plant or a part thereof, as compared to a corresponding non-transformed wild type non-human organism or a part thereof; and
[69829] (b) growing the non-human organism or a part thereof under conditions which permit the production of fumarate or a composition comprising fumarate in said non-human organism or in the culture medium surrounding said non-human organism.

[69830] Accordingly, the present invention relates to a process for the production of malate, which comprises
[69831] (a) increasing or generating one or more activities selected from the group consisting of transcriptional regulator in a non-human organism or a part thereof, preferably a microorganism, a plant cell, a plant or a part thereof, as compared to a corresponding non-transformed wild type non-human organism or a part thereof; and
[69832] (b) growing the non-human organism or a part thereof under conditions which permit the production of malate or a composition comprising malate in said non-human organism or in the culture medium surrounding said non-human organism.

[69833] Accordingly, the present invention relates to a process for the production of succinate, which comprises
[69834] (a) increasing or generating one or more activities selected from the group consisting of murein transglycosylase in a non-human organism or a part thereof, preferably a microorganism, a plant cell, a plant or a part thereof, as compared to a corresponding non-transformed wild type non-human organism or a part thereof; and
[69835] (b) growing the non-human organism or a part thereof under conditions which permit the production of succinate or a composition comprising succinate in said non-human organism or in the culture medium surrounding said non-human organism.

[69836] Accordingly, the present invention relates to a process for the production of succinate, which comprises
[69837] (a) increasing or generating one or more activities selected from the group consisting of 2-C-methyl-D-erythritol 4-phosphate cytidylyltransferase in a non-human organism or a part thereof, preferably a microorganism, a plant cell, a plant or a part thereof, as compared to a corresponding non-transformed wild type non-human organism or a part thereof; and
[69838] (b) growing the non-human organism or a part thereof under conditions which permit the production of succinate or a composition comprising succinate in said non-human organism or in the culture medium surrounding said non-human organism.

[69839] Accordingly, the present invention relates to a process for the production of succinate, which comprises
[69840] (a) increasing or generating one or more activities selected from the group consisting of amino-acid acetyltransferase in a non-human organism or a part thereof, preferably a microorganism, a plant cell, a plant or a part thereof, as compared to a corresponding non-transformed wild type non-human organism or a part thereof; and
[69841] (b) growing the non-human organism or a part thereof under conditions which permit the production of succinate or a composition comprising succinate in said non-human organism or in the culture medium surrounding said non-human organism.

[69842] Accordingly, the present invention relates to a process for the production of succinate, which comprises
[69843] (a) increasing or generating one or more activities selected from the group consisting of xanthine dehydrogenase in a non-human organism or a part thereof, preferably a microorganism, a plant cell, a plant or a part thereof, as compared to a corresponding non-transformed wild type non-human organism or a part thereof; and
[69844] (b) growing the non-human organism or a part thereof under conditions which permit the production of succinate or a composition comprising succinate in said non-human organism or in the culture medium surrounding said non-human organism.

[69845] Accordingly, the present invention relates to a process for the production of succinate, which comprises
[69846] (a) increasing or generating one or more activities selected from the group consisting of cystathionine beta-lyase in a non-human organism or a part thereof, preferably a microorganism, a plant cell, a plant or a part thereof, as compared to a corresponding non-transformed wild type non-human organism or a part thereof; and
[69847] (b) growing the non-human organism or a part thereof under conditions which permit the production of succinate or a composition comprising succinate in said non-human organism or in the culture medium surrounding said non-human organism.

[69848] Accordingly, the present invention relates to a process for the production of fumarate, which comprises
[69849] (a) increasing or generating one or more activities selected from the group consisting of methyltransferase in a non-human organism or a part thereof, preferably a microorganism, a plant cell, a plant or a part thereof, as compared to a corresponding non-transformed wild type non-human organism or a part thereof; and
[69850] (b) growing the non-human organism or a part thereof under conditions which permit the production of fumarate or a composition comprising fumarate in said non-human organism or in the culture medium surrounding said non-human organism.

[69851] Accordingly, the present invention relates to a process for the production of malate, which comprises
[69852] (a) increasing or generating one or more activities selected from the group consisting of methyltransferase in a non-human organism or a part thereof, preferably a microorganism, a plant cell, a plant or a part thereof, as compared to a corresponding non-transformed wild type non-human organism or a part thereof; and
[69853] (b) growing the non-human organism or a part thereof under conditions which permit the production of malate or a composition comprising malate in said non-human organism or in the culture medium surrounding said non-human organism.

[69854] Accordingly, the present invention relates to a process for the production of fumarate, which comprises
[69855] (a) increasing or generating one or more activities selected from the group consisting of lipopolysaccharide core biosynthesis protein in a non-human organism or a part thereof, preferably a microorganism, a plant cell, a plant or a part thereof, as compared to a corresponding non-transformed wild type non-human organism or a part thereof; and
[69856] (b) growing the non-human organism or a part thereof under conditions which permit the production of fumarate or a composition comprising fumarate in said non-human organism or in the culture medium surrounding said non-human organism.

[69857] Accordingly, the present invention relates to a process for the production of succinate, which comprises
[69858] (a) increasing or generating one or more activities selected from the group consisting of b3777-protein in a non-human organism or a part thereof, preferably a microorganism, a plant cell, a plant or a part thereof, as compared to a corresponding non-transformed wild type non-human organism or a part thereof; and
[69859] (b) growing the non-human organism or a part thereof under conditions which permit the production of succinate or a composition comprising succinate in said non-human organism or in the culture medium surrounding said non-human organism.

[69860] Accordingly, the present invention relates to a process for the production of malate, which comprises
[69861] (a) increasing or generating one or more activities selected from the group consisting of b3791-protein in a non-human organism or a part thereof, preferably a microorganism, a plant cell, a plant or a part thereof, as compared to a corresponding non-transformed wild type non-human organism or a part thereof; and
[69862] (b) growing the non-human organism or a part thereof under conditions which permit the production of malate or a composition comprising malate in said non-human organism or in the culture medium surrounding said non-human organism.

[69863] Accordingly, the present invention relates to a process for the production of succinate, which comprises
[69864] (a) increasing or generating one or more activities selected from the group consisting of b3791-protein in a non-human organism or a part thereof, preferably a microorganism, a plant cell, a plant or a part thereof, as compared to a corresponding non-transformed wild type non-human organism or a part thereof; and
[69865] (b) growing the non-human organism or a part thereof under conditions which permit the production of succinate or a composition comprising succinate in said non-human organism or in the culture medium surrounding said non-human organism.

[69866] Accordingly, the present invention relates to a process for the production of citramalate, which comprises
[69867] (a) increasing or generating one or more activities selected from the group consisting of b3814-protein in a non-human organism or a part thereof, preferably a microorganism, a plant cell, a plant or a part thereof, as compared to a corresponding non-transformed wild type non-human organism or a part thereof; and
[69868] (b) growing the non-human organism or a part thereof under conditions which permit the production of citramalate or a composition comprising citramalate in said non-human organism or in the culture medium surrounding said non-human organism.

[69869] Accordingly, the present invention relates to a process for the production of fumarate, which comprises
[69870] (a) increasing or generating one or more activities selected from the group consisting of b3817-protein in a non-human organism or a part thereof, preferably a microorganism, a plant cell, a plant or a part thereof, as compared to a corresponding non-transformed wild type non-human organism or a part thereof; and
[69871] (b) growing the non-human organism or a part thereof under conditions which permit the production of fumarate or a composition comprising fumarate in said non-human organism or in the culture medium surrounding said non-human organism.

[69872] Accordingly, the present invention relates to a process for the production of citramalate, which comprises
[69873] (a) increasing or generating one or more activities selected from the group consisting of threonine efflux protein in a non-human organism or a part thereof, preferably a microorganism, a plant cell, a plant or a part thereof, as compared to a corresponding non-transformed wild type non-human organism or a part thereof; and
[69874] (b) growing the non-human organism or a part thereof under conditions which permit the production of citramalate or a composition comprising citramalate in said non-human organism or in the culture medium surrounding said non-human organism.

[69875] Accordingly, the present invention relates to a process for the production of malate, which comprises
[69876] (a) increasing or generating one or more activities selected from the group consisting of threonine efflux protein in a non-human organism or a part thereof, preferably a microorganism, a plant cell, a plant or a part thereof, as compared to a corresponding non-transformed wild type non-human organism or a part thereof; and
[69877] (b) growing the non-human organism or a part thereof under conditions which permit the production of malate or a composition comprising malate in said non-human organism or in the culture medium surrounding said non-human organism.

[69878] Accordingly, the present invention relates to a process for the production of succinate, which comprises
[69879] (a) increasing or generating one or more activities selected from the group consisting of b3989-protein in a non-human organism or a part thereof, preferably a microorganism, a plant cell, a plant or a part thereof, as compared to a corresponding non-transformed wild type non-human organism or a part thereof; and
[69880] (b) growing the non-human organism or a part thereof under conditions which permit the production of succinate or a composition comprising succinate in said non-human organism or in the culture medium surrounding said non-human organism.

[69881] Accordingly, the present invention relates to a process for the production of fumarate, which comprises
[69882] (a) increasing or generating one or more activities selected from the group consisting of acetyltransferase in a non-human organism or a part thereof, preferably a microorganism, a plant cell, a plant or a part thereof, as compared to a corresponding non-transformed wild type non-human organism or a part thereof; and
[69883] (b) growing the non-human organism or a part thereof under conditions which permit the production of fumarate or a composition comprising fumarate in said non-human organism or in the culture medium surrounding said non-human organism.

[69884] Accordingly, the present invention relates to a process for the production of fumarate, which comprises
[69885] (a) increasing or generating one or more activities selected from the group consisting of b4029-protein in a non-human organism or a part thereof, preferably a microorganism, a plant cell, a plant or a part thereof, as compared to a corresponding non-transformed wild type non-human organism or a part thereof; and
[69886] (b) growing the non-human organism or a part thereof under conditions which permit the production of fumarate or a composition comprising fumarate in said non-human organism or in the culture medium surrounding said non-human organism.

[69887] Accordingly, the present invention relates to a process for the production of malate, which comprises
[69888] (a) increasing or generating one or more activities selected from the group consisting of b4029-protein in a non-human organism or a part thereof, preferably a microorganism, a plant cell, a plant or a part thereof, as compared to a corresponding non-transformed wild type non-human organism or a part thereof; and
[69889] (b) growing the non-human organism or a part thereof under conditions which permit the production of malate or a composition comprising malate in said non-human organism or in the culture medium surrounding said non-human organism.

[69890] Accordingly, the present invention relates to a process for the production of succinate, which comprises
[69891] (a) increasing or generating one or more activities selected from the group consisting of b4029-protein in a non-human organism or a part thereof, preferably a microorganism, a plant cell, a plant or a part thereof, as compared to a corresponding non-transformed wild type non-human organism or a part thereof; and
[69892] (b) growing the non-human organism or a part thereof under conditions which permit the production of succinate or a composition comprising succinate in said non-human organism or in the culture medium surrounding said non-human organism.

[69893] Accordingly, the present invention relates to a process for the production of fumarate, which comprises
[69894] (a) increasing or generating one or more activities selected from the group consisting of b4050-protein in a non-human organism or a part thereof, preferably a microorganism, a plant cell, a plant or a part thereof, as compared to a corresponding non-transformed wild type non-human organism or a part thereof; and
[69895] (b) growing the non-human organism or a part thereof under conditions which permit the production of fumarate or a composition comprising fumarate in said non-human organism or in the culture medium surrounding said non-human organism.

[69896] Accordingly, the present invention relates to a process for the production of malate, which comprises
[69897] (a) increasing or generating one or more activities selected from the group consisting of b4050-protein in a non-human organism or a part thereof, preferably a microorganism, a plant cell, a plant or a part thereof, as compared to a corresponding non-transformed wild type non-human organism or a part thereof; and
[69898] (b) growing the non-human organism or a part thereof under conditions which permit the production of malate or a composition comprising malate in said non-human organism or in the culture medium surrounding said non-human organism.

[69899] Accordingly, the present invention relates to a process for the production of citramalate, which comprises
[69900] (a) increasing or generating one or more activities selected from the group consisting of b4056-protein in a non-human organism or a part thereof, preferably a microorganism, a plant cell, a plant or a part thereof, as compared to a corresponding non-transformed wild type non-human organism or a part thereof; and
[69901] (b) growing the non-human organism or a part thereof under conditions which permit the production of citramalate or a composition comprising citramalate in said non-human organism or in the culture medium surrounding said non-human organism.

[69902] Accordingly, the present invention relates to a process for the production of citrate, which comprises
[69903] (a) increasing or generating one or more activities selected from the group consisting of aspartase in a non-human organism or a part thereof, preferably a microorganism, a plant cell, a plant or a part thereof, as compared to a corresponding non-transformed wild type non-human organism or a part thereof; and
[69904] (b) growing the non-human organism or a part thereof under conditions which permit the production of citrate or a composition comprising citrate in said non-human organism or in the culture medium surrounding said non-human organism.

[69905] Accordingly, the present invention relates to a process for the production of fumarate, which comprises
[69906] (a) increasing or generating one or more activities selected from the group consisting of acetyltransferase in a non-human organism or a part thereof, preferably a microorganism, a plant cell, a plant or a part thereof, as compared to a corresponding non-transformed wild type non-human organism or a part thereof; and
[69907] (b) growing the non-human organism or a part thereof under conditions which permit the production of fumarate or a composition comprising fumarate in said non-human organism or in the culture medium surrounding said non-human organism.

[69908] Accordingly, the present invention relates to a process for the production of malate, which comprises
[69909] (a) increasing or generating one or more activities selected from the group consisting of acetyltransferase in a non-human organism or a part thereof, preferably a microorganism, a plant cell, a plant or a part thereof, as compared to a corresponding non-transformed wild type non-human organism or a part thereof; and
[69910] (b) growing the non-human organism or a part thereof under conditions which permit the production of malate or a composition comprising malate in said non-human organism or in the culture medium surrounding said non-human organism.

[69911] Accordingly, the present invention relates to a process for the production of vitamin c and/or threonic acid, which comprises
[69912] (a) increasing or generating one or more activities selected from the group consisting of purine-nucleoside phosphorylase in a non-human organism or a part thereof, preferably a microorganism, a plant cell, a plant or a part thereof, as compared to a corresponding non-transformed wild type non-human organism or a part thereof; and
[69913] (b) growing the non-human organism or a part thereof under conditions which permit the production of vitamin c and/or threonic acid or a composition comprising vitamin c and/or threonic acid in said non-human organism or in the culture medium surrounding said non-human organism.

[69914] Accordingly, the present invention relates to a process for the production of succinate, which comprises
[69915] (a) increasing or generating one or more activities selected from the group consisting of lysine decarboxylase in a non-human organism or a part thereof, preferably a microorganism, a plant cell, a plant or a part thereof, as compared to a corresponding non-transformed wild type non-human organism or a part thereof; and
[69916] (b) growing the non-human organism or a part thereof under conditions which permit the production of succinate or a composition comprising succinate in said non-human organism or in the culture medium surrounding said non-human organism.

[69917] Accordingly, the present invention relates to a process for the production of succinate, which comprises
[69918] (a) increasing or generating one or more activities selected from the group consisting of glutaredoxin in a non-human organism or a part thereof, preferably a microorganism, a plant cell, a plant or a part thereof, as compared to a corresponding non-transformed wild type non-human organism or a part thereof; and
[69919] (b) growing the non-human organism or a part thereof under conditions which permit the production of succinate or a composition comprising succinate in said non-human organism or in the culture medium surrounding said non-human organism.

[69920] Accordingly, the present invention relates to a process for the production of fumarate, which comprises
[69921] (a) increasing or generating one or more activities selected from the group consisting of GM02LC17485-protein in a non-human organism or a part thereof, preferably a microorganism, a plant cell, a plant or a part thereof, as compared to a corresponding non-transformed wild type non-human organism or a part thereof; and
[69922] (b) growing the non-human organism or a part thereof under conditions which permit the production of fumarate or a composition comprising fumarate in said non-human organism or in the culture medium surrounding said non-human organism.

[69923] Accordingly, the present invention relates to a process for the production of citramalate, which comprises
[69924] (a) increasing or generating one or more activities selected from the group consisting of transcription factor in a non-human organism or a part thereof, preferably a microorganism, a plant cell, a plant or a part thereof, as compared to a corresponding non-transformed wild type non-human organism or a part thereof; and
[69925] (b) growing the non-human organism or a part thereof under conditions which permit the production of citramalate or a composition comprising citramalate in said non-human organism or in the culture medium surrounding said non-human organism.

[69926] Accordingly, the present invention relates to a process for the production of fumarate, which comprises
[69927] (a) increasing or generating one or more activities selected from the group consisting of transcription factor in a non-human organism or a part thereof, preferably a microorganism, a plant cell, a plant or a part thereof, as compared to a corresponding non-transformed wild type non-human organism or a part thereof; and
[69928] (b) growing the non-human organism or a part thereof under conditions which permit the production of fumarate or a composition comprising fumarate in said non-human organism or in the culture medium surrounding said non-human organism.

[69929] Accordingly, the present invention relates to a process for the production of malate, which comprises
[69930] (a) increasing or generating one or more activities selected from the group consisting of transcription factor in a non-human organism or a part thereof, preferably a microorganism, a plant cell, a plant or a part thereof, as compared to a corresponding non-transformed wild type non-human organism or a part thereof; and
[69931] (b) growing the non-human organism or a part thereof under conditions which permit the production of malate or a composition comprising malate in said non-human organism or in the culture medium surrounding said non-human organism.

[69932] Accordingly, the present invention relates to a process for the production of citramalate, which comprises
[69933] (a) increasing or generating one or more activities selected from the group consisting of GM02LC5744-protein in a non-human organism or a part thereof, preferably a microorganism, a plant cell, a plant or a part thereof, as compared to a corresponding non-transformed wild type non-human organism or a part thereof; and
[69934] (b) growing the non-human organism or a part thereof under conditions which permit the production of citramalate or a composition comprising citramalate in said non-human organism or in the culture medium surrounding said non-human organism.

[69935] Accordingly, the present invention relates to a process for the production of fumarate, which comprises
[69936] (a) increasing or generating one or more activities selected from the group consisting of GM02LC5744-protein in a non-human organism or a part thereof, preferably a microorganism, a plant cell, a plant or a part thereof, as compared to a corresponding non-transformed wild type non-human organism or a part thereof; and
[69937] (b) growing the non-human organism or a part thereof under conditions which permit the production of fumarate or a composition comprising fumarate in said non-human organism or in the culture medium surrounding said non-human organism.

[69938] Accordingly, the present invention relates to a process for the production of citramalate, which comprises
[69939] (a) increasing or generating one or more activities selected from the group consisting of heat shock protein in a non-human organism or a part thereof, preferably a microorganism, a plant cell, a plant or a part thereof, as compared to a corresponding non-transformed wild type non-human organism or a part thereof; and
[69940] (b) growing the non-human organism or a part thereof under conditions which permit the production of citramalate or a composition comprising citramalate in said non-human organism or in the culture medium surrounding said non-human organism.

[69941] Accordingly, the present invention relates to a process for the production of fumarate, which comprises
[69942] (a) increasing or generating one or more activities selected from the group consisting of agmatinase in a non-human organism or a part thereof, preferably a microorganism, a plant cell, a plant or a part thereof, as compared to a corresponding non-transformed wild type non-human organism or a part thereof; and
[69943] (b) growing the non-human organism or a part thereof under conditions which permit the production of fumarate or a composition comprising fumarate in said non-human organism or in the culture medium surrounding said non-human organism.

[69944] Accordingly, the present invention relates to a process for the production of malate, which comprises
[69945] (a) increasing or generating one or more activities selected from the group consisting of ABC transporter ATP binding component in a non-human organism or a part thereof, preferably a microorganism, a plant cell, a plant or a part thereof, as compared to a corresponding non-transformed wild type non-human organism or a part thereof; and
[69946] (b) growing the non-human organism or a part thereof under conditions which permit the production of malate or a composition comprising malate in said non-human organism or in the culture medium surrounding said non-human organism.

[69947] Accordingly, the present invention relates to a process for the production of succinate, which comprises
[69948] (a) increasing or generating one or more activities selected from the group consisting of ABC transporter ATP binding component in a non-human organism or a part thereof, preferably a microorganism, a plant cell, a plant or a part thereof, as compared to a corresponding non-transformed wild type non-human organism or a part thereof; and
[69949] (b) growing the non-human organism or a part thereof under conditions which permit the production of succinate or a composition comprising succinate in said non-human organism or in the culture medium surrounding said non-human organism.

[69950] Accordingly, the present invention relates to a process for the production of fumarate, which comprises
[69951] (a) increasing or generating one or more activities selected from the group consisting of oxireductase in a non-human organism or a part thereof, preferably a microorganism, a plant cell, a plant or a part thereof, as compared to a corresponding non-transformed wild type non-human organism or a part thereof; and
[69952] (b) growing the non-human organism or a part thereof under conditions which permit the production of fumarate or a composition comprising fumarate in said non-human organism or in the culture medium surrounding said non-human organism.

[69953] Accordingly, the present invention relates to a process for the production of succinate, which comprises
[69954] (a) increasing or generating one or more activities selected from the group consisting of phosphatase in a non-human organism or a part thereof, preferably a microorganism, a plant cell, a plant or a part thereof, as compared to a corresponding non-transformed wild type non-human organism or a part thereof; and
[69955] (b) growing the non-human organism or a part thereof under conditions which permit the production of succinate or a composition comprising succinate in said non-human organism or in the culture medium surrounding said non-human organism.

[69956] Accordingly, the present invention relates to a process for the production of citramalate, which comprises
[69957] (a) increasing or generating one or more activities selected from the group consisting of CDP-diacylglycerol-glycerol-3-phosphate 3- phosphatidyltransferase in a non-human organism or a part thereof, preferably a microorganism, a plant cell, a plant or a part thereof, as compared to a corresponding non-transformed wild type non-human organism or a part thereof; and
[69958] (b) growing the non-human organism or a part thereof under conditions which permit the production of citramalate or a composition comprising citramalate in said non-human organism or in the culture medium surrounding said non-human organism.

[69959] Accordingly, the present invention relates to a process for the production of malate, which comprises
[69960] (a) increasing or generating one or more activities selected from the group consisting of CDP-diacylglycerol-glycerol-3-phosphate 3- phosphatidyltransferase in a non-human organism or a part thereof, preferably a microorganism, a plant cell, a plant or a part thereof, as compared to a corresponding non-transformed wild type non-human organism or a part thereof; and
[69961] (b) growing the non-human organism or a part thereof under conditions which permit the production of malate or a composition comprising malate in said non-human organism or in the culture medium surrounding said non-human organism.

[69962] Accordingly, the present invention relates to a process for the production of succinate, which comprises
[69963] (a) increasing or generating one or more activities selected from the group consisting of adenylate kinase in a non-human organism or a part thereof, preferably a microorganism, a plant cell, a plant or a part thereof, as compared to a corresponding non-transformed wild type non-human organism or a part thereof; and
[69964] (b) growing the non-human organism or a part thereof under conditions which permit the production of succinate or a composition comprising succinate in said non-human organism or in the culture medium surrounding said non-human organism.

[69965] Accordingly, the present invention relates to a process for the production of citramalate, which comprises
[69966] (a) increasing or generating one or more activities selected from the group consisting of cation-transporting ATPase in a non-human organism or a part thereof, preferably a microorganism, a plant cell, a plant or a part thereof, as compared to a corresponding non-transformed wild type non-human organism or a part thereof; and
[69967] (b) growing the non-human organism or a part thereof under conditions which permit the production of citramalate or a composition comprising citramalate in said non-human organism or in the culture medium surrounding said non-human organism.

[69968] Accordingly, the present invention relates to a process for the production of malate, which comprises
[69969] (a) increasing or generating one or more activities selected from the group consisting of cation-transporting ATPase in a non-human organism or a part thereof, preferably a microorganism, a plant cell, a plant or a part thereof, as compared to a corresponding non-transformed wild type non-human organism or a part thereof; and
[69970] (b) growing the non-human organism or a part thereof under conditions which permit the production of malate or a composition comprising malate in said non-human organism or in the culture medium surrounding said non-human organism.

[69971] Accordingly, the present invention relates to a process for the production of fumarate, which comprises
[69972] (a) increasing or generating one or more activities selected from the group consisting of fumarate hydratase in a non-human organism or a part thereof, preferably a microorganism, a plant cell, a plant or a part thereof, as compared to a corresponding non-transformed wild type non-human organism or a part thereof; and
[69973] (b) growing the non-human organism or a part thereof under conditions which permit the production of fumarate or a composition comprising fumarate in said non-human organism or in the culture medium surrounding said non-human organism.

[69974] Accordingly, the present invention relates to a process for the production of citramalate, which comprises
[69975] (a) increasing or generating one or more activities selected from the group consisting of oxidoreductase in a non-human organism or a part thereof, preferably a microorganism, a plant cell, a plant or a part thereof, as compared to a corresponding non-transformed wild type non-human organism or a part thereof; and
[69976] (b) growing the non-human organism or a part thereof under conditions which permit the production of citramalate or a composition comprising citramalate in said non-human organism or in the culture medium surrounding said non-human organism.

[69977] Accordingly, the present invention relates to a process for the production of fumarate, which comprises
[69978] (a) increasing or generating one or more activities selected from the group consisting of bifunctional purine biosynthesis protein in a non-human organism or a part thereof, preferably a microorganism, a plant cell, a plant or a part thereof, as compared to a corresponding non-transformed wild type non-human organism or a part thereof; and
[69979] (b) growing the non-human organism or a part thereof under conditions which permit the production of fumarate or a composition comprising fumarate in said non-human organism or in the culture medium surrounding said non-human organism.

[69980] Accordingly, the present invention relates to a process for the production of citramalate, which comprises
[69981] (a) increasing or generating one or more activities selected from the group consisting of malate dehydrogenase in a non-human organism or a part thereof, preferably a microorganism, a plant cell, a plant or a part thereof, as compared to a corresponding non-transformed wild type non-human organism or a part thereof; and
[69982] (b) growing the non-human organism or a part thereof under conditions which permit the production of citramalate or a composition comprising citramalate in said non-human organism or in the culture medium surrounding said non-human organism.

[69983] Accordingly, the present invention relates to a process for the production of succinate, which comprises
[69984] (a) increasing or generating one or more activities selected from the group consisting of malate dehydrogenase in a non-human organism or a part thereof, preferably a microorganism, a plant cell, a plant or a part thereof, as compared to a corresponding non-transformed wild type non-human organism or a part thereof; and
[69985] (b) growing the non-human organism or a part thereof under conditions which permit the production of succinate or a composition comprising succinate in said non-human organism or in the culture medium surrounding said non-human organism.

[69986] Accordingly, the present invention relates to a process for the production of glycerate, which comprises
[69987] (a) increasing or generating one or more activities selected from the group consisting of dihydrolipoamide dehydrogenase in a non-human organism or a part thereof, preferably a microorganism, a plant cell, a plant or a part thereof, as compared to a corresponding non-transformed wild type non-human organism or a part thereof; and
[69988] (b) growing the non-human organism or a part thereof under conditions which permit the production of glycerate or a composition comprising glycerate in said non-human organism or in the culture medium surrounding said non-human organism.

[69989] Accordingly, the present invention relates to a process for the production of succinate, which comprises
[69990] (a) increasing or generating one or more activities selected from the group consisting of dihydrolipoamide dehydrogenase in a non-human organism or a part thereof, preferably a microorganism, a plant cell, a plant or a part thereof, as compared to a corresponding non-transformed wild type non-human organism or a part thereof; and
[69991] (b) growing the non-human organism or a part thereof under conditions which permit the production of succinate or a composition comprising succinate in said non-human organism or in the culture medium surrounding said non-human organism.

[69992] Accordingly, the present invention relates to a process for the production of succinate, which comprises
[69993] (a) increasing or generating one or more activities selected from the group consisting of slr1170-protein in a non-human organism or a part thereof, preferably a microorganism, a plant cell, a plant or a part thereof, as compared to a corresponding non-transformed wild type non-human organism or a part thereof; and
[69994] (b) growing the non-human organism or a part thereof under conditions which permit the production of succinate or a composition comprising succinate in said non-human organism or in the culture medium surrounding said non-human organism.

[69995] Accordingly, the present invention relates to a process for the production of fumarate, which comprises
[69996] (a) increasing or generating one or more activities selected from the group consisting of phosphate import ATP-binding protein in a non-human organism or a part thereof, preferably a microorganism, a plant cell, a plant or a part thereof, as compared to a corresponding non-transformed wild type non-human organism or a part thereof; and
[69997] (b) growing the non-human organism or a part thereof under conditions which permit the production of fumarate or a composition comprising fumarate in said non-human organism or in the culture medium surrounding said non-human organism.

[69998] Accordingly, the present invention relates to a process for the production of succinate, which comprises
[69999] (a) increasing or generating one or more activities selected from the group consisting of gamma-glutamyltranspeptidase in a non-human organism or a part thereof, preferably a microorganism, a plant cell, a plant or a part thereof, as compared to a corresponding non-transformed wild type non-human organism or a part thereof; and
[70000] (b) growing the non-human organism or a part thereof under conditions which permit the production of succinate or a composition comprising succinate in said non-human organism or in the culture medium surrounding said non-human organism.

[70001] Accordingly, the present invention relates to a process for the production of malate, which comprises
[70002] (a) increasing or generating one or more activities selected from the group consisting of photosystem II protein in a non-human organism or a part thereof, preferably a microorganism, a plant cell, a plant or a part thereof, as compared to a corresponding non-transformed wild type non-human organism or a part thereof; and
[70003] (b) growing the non-human organism or a part thereof under conditions which permit the production of malate or a composition comprising malate in said non-human organism or in the culture medium surrounding said non-human organism.

[70004] Accordingly, the present invention relates to a process for the production of fumarate, which comprises
[70005] (a) increasing or generating one or more activities selected from the group consisting of malonyl CoA-acyl carrier protein transacylase in a non-human organism or a part thereof, preferably a microorganism, a plant cell, a plant or a part thereof, as compared to a corresponding non-transformed wild type non-human organism or a part thereof; and
[70006] (b) growing the non-human organism or a part thereof under conditions which permit the production of fumarate or a composition comprising fumarate in said non-human organism or in the culture medium surrounding said non-human organism.

[70007] Accordingly, the present invention relates to a process for the production of succinate, which comprises
[70008] (a) increasing or generating one or more activities selected from the group consisting of malonyl CoA-acyl carrier protein transacylase in a non-human organism or a part thereof, preferably a microorganism, a plant cell, a plant or a part thereof, as compared to a corresponding non-transformed wild type non-human organism or a part thereof; and
[70009] (b) growing the non-human organism or a part thereof under conditions which permit the production of succinate or a composition comprising succinate in said non-human organism or in the culture medium surrounding said non-human organism.

[70010] Accordingly, the present invention relates to a process for the production of glycerate, which comprises
[70011] (a) increasing or generating one or more activities selected from the group consisting of photosystem I reaction centre subunit in a non-human organism or a part thereof, preferably a microorganism, a plant cell, a plant or a part thereof, as compared to a corresponding non-transformed wild type non-human organism or a part thereof; and
[70012] (b) growing the non-human organism or a part thereof under conditions which permit the production of glycerate or a composition comprising glycerate in said non-human organism or in the culture medium surrounding said non-human organism.

[70013] Accordingly, the present invention relates to a process for the production of fumarate, which comprises
[70014] (a) increasing or generating one or more activities selected from the group consisting of Sec-independent protein translocase subunit in a non-human organism or a part thereof, preferably a microorganism, a plant cell, a plant or a part thereof, as compared to a corresponding non-transformed wild type non-human organism or a part thereof; and
[70015] (b) growing the non-human organism or a part thereof under conditions which permit the production of fumarate or a composition comprising fumarate in said non-human organism or in the culture medium surrounding said non-human organism.

[70016] Accordingly, the present invention relates to a process for the production of succinate, which comprises
[70017] (a) increasing or generating one or more activities selected from the group consisting of Sec-independent protein translocase subunit in a non-human organism or a part thereof, preferably a microorganism, a plant cell, a plant or a part thereof, as compared to a corresponding non-transformed wild type non-human organism or a part thereof; and
[70018] (b) growing the non-human organism or a part thereof under conditions which permit the production of succinate or a composition comprising succinate in said non-human organism or in the culture medium surrounding said non-human organism.

[70019] Accordingly, the present invention relates to a process for the production of citramalate, which comprises
[70020] (a) increasing or generating one or more activities selected from the group consisting of 2-isopropylmalate synthase in a non-human organism or a part thereof, preferably a microorganism organism, a plant cell, a plant or a part thereof, as compared to a corresponding non-transformed wild type non-human organism or a part thereof; and
[70021] (b) growing the non-human organism or a part thereof under conditions which permit the production of citramalate or a composition comprising citramalate in said non-human organism or in the culture medium surrounding said non-human organism.

[70022] Accordingly, the present invention relates to a process for the production of fumarate, which comprises
[70023] (a) increasing or generating one or more activities selected from the group consisting of multiple antibiotic resistance protein in a non-human organism or a part thereof, preferably a microorganism, a plant cell, a plant or a part thereof, as compared to a corresponding non-transformed wild type non-human organism or a part thereof; and
[70024] (b) growing the non-human organism or a part thereof under conditions which permit the production of fumarate or a composition comprising fumarate in said non-human organism or in the culture medium surrounding said non-human organism.

[70025] Accordingly, the present invention relates to a process for the production of succinate, which comprises
[70026] (a) increasing or generating one or more activities selected from the group consisting of multiple antibiotic resistance protein in a non-human organism or a part thereof, preferably a microorganism, a plant cell, a plant or a part thereof, as compared to a corresponding non-transformed wild type non-human organism or a part thereof; and
[70027] (b) growing the non-human organism or a part thereof under conditions which permit the production of succinate or a composition comprising succinate in said non-human organism or in the culture medium surrounding said non-human organism.

[70028] Accordingly, the present invention relates to a process for the production of fumarate, which comprises
[70029] (a) increasing or generating one or more activities selected from the group consisting of TTC1386-protein in a non-human organism or a part thereof, preferably a microorganism, a plant cell, a plant or a part thereof, as compared to a corresponding non-transformed wild type non-human organism or a part thereof; and
[70030] (b) growing the non-human organism or a part thereof under conditions which permit the production of fumarate or a composition comprising fumarate in said non-human organism or in the culture medium surrounding said non-human organism.

[70031] Accordingly, the present invention relates to a process for the production of malate, which comprises
[70032] (a) increasing or generating one or more activities selected from the group consisting of TTC1386-protein in a non-human organism or a part thereof, preferably a microorganism, a plant cell, a plant or a part thereof, as compared to a corresponding non-transformed wild type non-human organism or a part thereof; and
[70033] (b) growing the non-human organism or a part thereof under conditions which permit the production of malate or a composition comprising malate in said non-human organism or in the culture medium surrounding said non-human organism.

[70034] Accordingly, the present invention relates to a process for the production of succinate, which comprises
[70035] (a) increasing or generating one or more activities selected from the group consisting of TTC1386-protein in a non-human organism or a part thereof, preferably a microorganism, a plant cell, a plant or a part thereof, as compared to a corresponding non-transformed wild type non-human organism or a part thereof; and
[70036] (b) growing the non-human organism or a part thereof under conditions which permit the production of succinate or a composition comprising succinate in said non-human organism or in the culture medium surrounding said non-human organism.

[70037] Accordingly, the present invention relates to a process for the production of citramalate, which comprises
[70038] (a) increasing or generating one or more activities selected from the group consisting of oxidoreductase subunit in a non-human organism or a part thereof, preferably a microorganism, a plant cell, a plant or a part thereof, as compared to a corresponding non-transformed wild type non-human organism or a part thereof; and
[70039] (b) growing the non-human organism or a part thereof under conditions which permit the production of citramalate or a composition comprising citramalate in said non-human organism or in the culture medium surrounding said non-human organism.

[70040] Accordingly, the present invention relates to a process for the production of glycerate, which comprises
[70041] (a) increasing or generating one or more activities selected from the group consisting of oxidoreductase subunit in a non-human organism or a part thereof, preferably a microorganism, a plant cell, a plant or a part thereof, as compared to a corresponding non-transformed wild type non-human organism or a part thereof; and
[70042] (b) growing the non-human organism or a part thereof under conditions which permit the production of glycerate or a composition comprising glycerate in said non-human organism or in the culture medium surrounding said non-human organism.

[70043] Accordingly, the present invention relates to a process for the production of malate, which comprises
[70044] (a) increasing or generating one or more activities selected from the group consisting of oxidoreductase subunit in a non-human organism or a part thereof, preferably a microorganism, a plant cell, a plant or a part thereof, as compared to a corresponding non-transformed wild type non-human organism or a part thereof; and
[70045] (b) growing the non-human organism or a part thereof under conditions which permit the production of malate or a composition comprising malate in said non-human organism or in the culture medium surrounding said non-human organism.

[70046] Accordingly, the present invention relates to a process for the production of fumarate, which comprises
[70047] (a) increasing or generating one or more activities selected from the group consisting of XM_{—}473199-protein in a non-human organism or a part thereof, preferably a microorganism, a plant cell, a plant or a part thereof, as compared to a corresponding non-transformed wild type non-human organism or a part thereof; and
[70048] (b) growing the non-human organism or a part thereof under conditions which permit the production of fumarate or a composition comprising fumarate in said non-human organism or in the culture medium surrounding said non-human organism.

[70049] Accordingly, the present invention relates to a process for the production of malate, which comprises
[70050] (a) increasing or generating one or more activities selected from the group consisting of XM_{—}473199-protein in a non-human organism or a part thereof, preferably a microorganism, a plant cell, a plant or a part thereof, as compared to a corresponding non-transformed wild type non-human organism or a part thereof; and
[70051] (b) growing the non-human organism or a part thereof under conditions which permit the production of malate or a composition comprising malate in said non-human organism or in the culture medium surrounding said non-human organism.

[70052] Accordingly, the present invention relates to a process for the production of succinate, which comprises
[70053] (a) increasing or generating one or more activities selected from the group consisting of XM_{—}473199-protein in a non-human organism or a part thereof, preferably a microorganism, a plant cell, a plant or a part thereof, as compared to a corresponding non-transformed wild type non-human organism or a part thereof; and
[70054] (b) growing the non-human organism or a part thereof under conditions which permit the production of succinate or a composition comprising succinate in said non-human organism or in the culture medium surrounding said non-human organism.

[70055] Accordingly, the present invention relates to a process for the production of succinate, which comprises
[70056] (a) increasing or generating one or more activities selected from the group consisting of glutamate dehydrogenase in a non-human organism or a part thereof, preferably a microorganism, a plant cell, a plant or a part thereof, as compared to a corresponding non-transformed wild type non-human organism or a part thereof; and
[70057] (b) growing the non-human organism or a part thereof under conditions which permit the production of succinate or a composition comprising succinate in said non-human organism or in the culture medium surrounding said non-human organism.

[70058] Accordingly, the present invention relates to a process for the production of citramalate, which comprises
[70059] (a) increasing or generating one or more activities selected from the group consisting of acetyl-CoA hydrolase in a non-human organism or a part thereof, preferably a microorganism, a plant cell, a plant or a part thereof, as compared to a corresponding non-transformed wild type non-human organism or a part thereof; and
[70060] (b) growing the non-human organism or a part thereof under conditions which permit the production of citramalate or a composition comprising citramalate in said non-human organism or in the culture medium surrounding said non-human organism.

[70061] Accordingly, the present invention relates to a process for the production of pyruvate, which comprises
[70062] (a) increasing or generating one or more activities selected from the group consisting of acetyl-CoA hydrolase in a non-human organism or a part thereof, preferably a microorganism, a plant cell, a plant or a part thereof, as compared to a corresponding non-transformed wild type non-human organism or a part thereof; and
[70063] (b) growing the non-human organism or a part thereof under conditions which permit the production of pyruvate or a composition comprising pyruvate in said non-human organism or in the culture medium surrounding said non-human organism.

[70064] Accordingly, the present invention relates to a process for the production of malate, which comprises
[70065] (a) increasing or generating one or more activities selected from the group consisting of pyruvate carboxylase in a non-human organism or a part thereof, preferably a microorganism, a plant cell, a plant or a part thereof, as compared to a corresponding non-transformed wild type non-human organism or a part thereof; and
[70066] (b) growing the non-human organism or a part thereof under conditions which permit the production of malate or a composition comprising malate in said non-human organism or in the culture medium surrounding said non-human organism.

[70067] Accordingly, the present invention relates to a process for the production of fumarate, which comprises
[70068] (a) increasing or generating one or more activities selected from the group consisting of ycr102c-protein in a non-human organism or a part thereof, preferably a microorganism, a plant cell, a plant or a part thereof, as compared to a corresponding non-transformed wild type non-human organism or a part thereof; and
[70069] (b) growing the non-human organism or a part thereof under conditions which permit the production of fumarate or a composition comprising fumarate in said non-human organism or in the culture medium surrounding said non-human organism.

[70070] Accordingly, the present invention relates to a process for the production of fumarate, which comprises
[70071] (a) increasing or generating one or more activities selected from the group consisting of YDL159W-A-protein in a non-human organism or a part thereof, preferably a microorganism, a plant cell, a plant or a part thereof, as compared to a corresponding non-transformed wild type non-human organism or a part thereof; and
[70072] (b) growing the non-human organism or a part thereof under conditions which permit the production of fumarate or a composition comprising fumarate in said non-human organism or in the culture medium surrounding said non-human organism.

[70073] Accordingly, the present invention relates to a process for the production of fumarate, which comprises
[70074] (a) increasing or generating one or more activities selected from the group consisting of coproporphyrinogen III oxidase in a non-human organism or a part thereof, preferably a microorganism, a plant cell, a plant or a part thereof, as compared to a corresponding non-transformed wild type non-human organism or a part thereof; and
[70075] (b) growing the non-human organism or a part thereof under conditions which permit the production of fumarate or a composition comprising fumarate in said non-human organism or in the culture medium surrounding said non-human organism.

[70076] Accordingly, the present invention relates to a process for the production of succinate, which comprises
[70077] (a) increasing or generating one or more activities selected from the group consisting of coproporphyrinogen III oxidase in a non-human organism or a part thereof, preferably a microorganism, a plant cell, a plant or a part thereof, as compared to a corresponding non-transformed wild type non-human organism or a part thereof; and
[70078] (b) growing the non-human organism or a part thereof under conditions which permit the production of succinate or a composition comprising succinate in said non-human organism or in the culture medium surrounding said non-human organism.

[70079] Accordingly, the present invention relates to a process for the production of malate, which comprises
[70080] (a) increasing or generating one or more activities selected from the group consisting of ygl237c-protein in a non-human organism or a part thereof, preferably a microorganism, a plant cell, a plant or a part thereof, as compared to a corresponding non-transformed wild type non-human organism or a part thereof; and
[70081] (b) growing the non-human organism or a part thereof under conditions which permit the production of malate or a composition comprising malate in said non-human organism or in the culture medium surrounding said non-human organism.

[70082] Accordingly, the present invention relates to a process for the production of succinate, which comprises
[70083] (a) increasing or generating one or more activities selected from the group consisting of ygl237c-protein in a non-human organism or a part thereof, preferably a microorganism, a plant cell, a plant or a part thereof, as compared to a corresponding non-transformed wild type non-human organism or a part thereof; and
[70084] (b) growing the non-human organism or a part thereof under conditions which permit the production of succinate or a composition comprising succinate in said non-human organism or in the culture medium surrounding said non-human organism.

[70085] Accordingly, the present invention relates to a process for the production of fumarate, which comprises
[70086] (a) increasing or generating one or more activities selected from the group consisting of YGR193C-protein in a non-human organism or a part thereof, preferably a microorganism, a plant cell, a plant or a part thereof, as compared to a corresponding non-transformed wild type non-human organism or a part thereof; and
[70087] (b) growing the non-human organism or a part thereof under conditions which permit the production of fumarate or a composition comprising fumarate in said non-human organism or in the culture medium surrounding said non-human organism.

[70088] Accordingly, the present invention relates to a process for the production of malate, which comprises
[70089] (a) increasing or generating one or more activities selected from the group consisting of YGR193C-protein in a non-human organism or a part thereof, preferably a microorganism, a plant cell, a plant or a part thereof, as compared to a corresponding non-transformed wild type non-human organism or a part thereof; and
[70090] (b) growing the non-human organism or a part thereof under conditions which permit the production of malate or a composition comprising malate in said non-human organism or in the culture medium surrounding said non-human organism.

[70091] Accordingly, the present invention relates to a process for the production of succinate, which comprises
[70092] (a) increasing or generating one or more activities selected from the group consisting of YGR193C-protein in a non-human organism or a part thereof, preferably a microorganism, a plant cell, a plant or a part thereof, as compared to a corresponding non-transformed wild type non-human organism or a part thereof; and
[70093] (b) growing the non-human organism or a part thereof under conditions which permit the production of succinate or a composition comprising succinate in said non-human organism or in the culture medium surrounding said non-human organism.

[70094] Accordingly, the present invention relates to a process for the production of malate, which comprises
[70095] (a) increasing or generating one or more activities selected from the group consisting of ygr221 c-protein in a non-human organism or a part thereof, preferably a microorganism, a plant cell, a plant or a part thereof, as compared to a corresponding non-transformed wild type non-human organism or a part thereof; and
[70096] (b) growing the non-human organism or a part thereof under conditions which permit the production of malate or a composition comprising malate in said non-human organism or in the culture medium surrounding said non-human organism.

[70097] Accordingly, the present invention relates to a process for the production of citrate, which comprises
[70098] (a) increasing or generating one or more activities selected from the group consisting of glycerol kinase in a non-human organism or a part thereof, preferably a microorganism, a plant cell, a plant or a part thereof, as compared to a corresponding non-transformed wild type non-human organism or a part thereof; and
[70099] (b) growing the non-human organism or a part thereof under conditions which permit the production of citrate or a composition comprising citrate in said non-human organism or in the culture medium surrounding said non-human organism.

[70100] Accordingly, the present invention relates to a process for the production of malate, which comprises
[70101] (a) increasing or generating one or more activities selected from the group consisting of yhr131c-protein in a non-human organism or a part thereof, preferably a microorganism, a plant cell, a plant or a part thereof, as compared to a corresponding non-transformed wild type non-human organism or a part thereof; and
[70102] (b) growing the non-human organism or a part thereof under conditions which permit the production of malate or a composition comprising malate in said non-human organism or in the culture medium surrounding said non-human organism.

[70103] Accordingly, the present invention relates to a process for the production of succinate, which comprises
[70104] (a) increasing or generating one or more activities selected from the group consisting of yhr207c-protein in a non-human organism or a part thereof, preferably a microorganism, a plant cell, a plant or a part thereof, as compared to a corresponding non-transformed wild type non-human organism or a part thereof; and
[70105] (b) growing the non-human organism or a part thereof under conditions which permit the production of succinate or a composition comprising succinate in said non-human organism or in the culture medium surrounding said non-human organism.

[70106] Accordingly, the present invention relates to a process for the production of glycerate, which comprises
[70107] (a) increasing or generating one or more activities selected from the group consisting of DnaJ-like chaperone in a non-human organism or a part thereof, preferably a microorganism, a plant cell, a plant or a part thereof, as compared to a corresponding non-transformed wild type non-human organism or a part thereof; and
[70108] (b) growing the non-human organism or a part thereof under conditions which permit the production of glycerate or a composition comprising glycerate in said non-human organism or in the culture medium surrounding said non-human organism.

[70109] Accordingly, the present invention relates to a process for the production of oxalate, which comprises
[70110] (a) increasing or generating one or more activities selected from the group consisting of hexose transporter in a non-human organism or a part thereof, preferably a microorganism, a plant cell, a plant or a part thereof, as compared to a corresponding non-transformed wild type non-human organism or a part thereof; and
[70111] (b) growing the non-human organism or a part thereof under conditions which permit the production of oxalate or a composition comprising oxalate in said non-human organism or in the culture medium surrounding said non-human organism.

[70112] Accordingly, the present invention relates to a process for the production of citramalate, which comprises
[70113] (a) increasing or generating one or more activities selected from the group consisting of branched chain aminotransferase in a non-human organism or a part thereof, preferably a microorganism, a plant cell, a plant or a part thereof, as compared to a corresponding non-transformed wild type non-human organism or a part thereof; and
[70114] (b) growing the non-human organism or a part thereof under conditions which permit the production of citramalate or a composition comprising citramalate in said non-human organism or in the culture medium surrounding said non-human organism.

[70115] Accordingly, the present invention relates to a process for the production of fumarate, which comprises
[70116] (a) increasing or generating one or more activities selected from the group consisting of polygalacturonase in a non-human organism or a part thereof, preferably a microorganism, a plant cell, a plant or a part thereof, as compared to a corresponding non-transformed wild type non-human organism or a part thereof; and
[70117] (b) growing the non-human organism or a part thereof under conditions which permit the production of fumarate or a composition comprising fumarate in said non-human organism or in the culture medium surrounding said non-human organism.

[70118] Accordingly, the present invention relates to a process for the production of malate, which comprises
[70119] (a) increasing or generating one or more activities selected from the group consisting of polygalacturonase in a non-human organism or a part thereof, preferably a microorganism, a plant cell, a plant or a part thereof, as compared to a corresponding non-transformed wild type non-human organism or a part thereof; and
[70120] (b) growing the non-human organism or a part thereof under conditions which permit the production of malate or a composition comprising malate in said non-human organism or in the culture medium surrounding said non-human organism.

[70121] Accordingly, the present invention relates to a process for the production of malate, which comprises
[70122] (a) increasing or generating one or more activities selected from the group consisting of YKL038W-protein in a non-human organism or a part thereof, preferably a microorganism, a plant cell, a plant or a part thereof, as compared to a corresponding non-transformed wild type non-human organism or a part thereof; and
[70123] (b) growing the non-human organism or a part thereof under conditions which permit the production of malate or a composition comprising malate in said non-human organism or in the culture medium surrounding said non-human organism.

[70124] Accordingly, the present invention relates to a process for the production of vitamin c and/or threonic acid, which comprises
[70125] (a) increasing or generating one or more activities selected from the group consisting of YKL140W-protein in a non-human organism or a part thereof, preferably a microorganism, a plant cell, a plant or a part thereof, as compared to a corresponding non-transformed wild type non-human organism or a part thereof; and
[70126] (b) growing the non-human organism or a part thereof under conditions which permit the production of vitamin c and/or threonic acid or a composition comprising vitamin c and/or threonic acid in said non-human organism or in the culture medium surrounding said non-human organism.

[70127] Accordingly, the present invention relates to a process for the production of fumarate, which comprises
[70128] (a) increasing or generating one or more activities selected from the group consisting of ylr065c-protein in a non-human organism or a part thereof, preferably a microorganism, a plant cell, a plant or a part thereof, as compared to a corresponding non-transformed wild type non-human organism or a part thereof; and
[70129] (b) growing the non-human organism or a part thereof under conditions which permit the production of fumarate or a composition comprising fumarate in said non-human organism or in the culture medium surrounding said non-human organism.

[70130] Accordingly, the present invention relates to a process for the production of succinate, which comprises
[70131] (a) increasing or generating one or more activities selected from the group consisting of isocitrate dehydrogenase in a non-human organism or a part thereof, preferably a microorganism, a plant cell, a plant or a part thereof, as compared to a corresponding non-transformed wild type non-human organism or a part thereof; and
[70132] (b) growing the non-human organism or a part thereof under conditions which permit the production of succinate or a composition comprising succinate in said non-human organism or in the culture medium surrounding said non-human organism.

[70133] Accordingly, the present invention relates to a process for the production of fumarate, which comprises
[70134] (a) increasing or generating one or more activities selected from the group consisting of ylr326w-protein in a non-human organism or a part thereof, preferably a microorganism, a plant cell, a plant or a part thereof, as compared to a corresponding non-transformed wild type non-human organism or a part thereof; and
[70135] (b) growing the non-human organism or a part thereof under conditions which permit the production of fumarate or a composition comprising fumarate in said non-human organism or in the culture medium surrounding said non-human organism.

[70136] Accordingly, the present invention relates to a process for the production of glycerate, which comprises
[70137] (a) increasing or generating one or more activities selected from the group consisting of ylr326w-protein in a non-human organism or a part thereof, preferably a microorganism, a plant cell, a plant or a part thereof, as compared to a corresponding non-transformed wild type non-human organism or a part thereof; and
[70138] (b) growing the non-human organism or a part thereof under conditions which permit the production of glycerate or a composition comprising glycerate in said non-human organism or in the culture medium surrounding said non-human organism.

[70139] Accordingly, the present invention relates to a process for the production of vitamin c and/or threonic acid, which comprises
[70140] (a) increasing or generating one or more activities selected from the group consisting of ylr326w-protein in a non-human organism or a part thereof, preferably a microorganism, a plant cell, a plant or a part thereof, as compared to a corresponding non-transformed wild type non-human organism or a part thereof; and
[70141] (b) growing the non-human organism or a part thereof under conditions which permit the production of vitamin c and/or threonic acid or a composition comprising vitamin c and/or threonic acid in said non-human organism or in the culture medium surrounding said non-human organism.

[70142] Accordingly, the present invention relates to a process for the production of fumarate, which comprises
[70143] (a) increasing or generating one or more activities selected from the group consisting of yml084w-protein in a non-human organism or a part thereof, preferably a microorganism, a plant cell, a plant or a part thereof, as compared to a corresponding non-transformed wild type non-human organism or a part thereof; and
[70144] (b) growing the non-human organism or a part thereof under conditions which permit the production of fumarate or a composition comprising fumarate in said non-human organism or in the culture medium surrounding said non-human organism.

[70145] Accordingly, the present invention relates to a process for the production of succinate, which comprises
[70146] (a) increasing or generating one or more activities selected from the group consisting of yml084w-protein in a non-human organism or a part thereof, preferably a microorganism, a plant cell, a plant or a part thereof, as compared to a corresponding non-transformed wild type non-human organism or a part thereof; and
[70147] (b) growing the non-human organism or a part thereof under conditions which permit the production of succinate or a composition comprising succinate in said non-human organism or in the culture medium surrounding said non-human organism.

[70148] Accordingly, the present invention relates to a process for the production of citramalate, which comprises
[70149] (a) increasing or generating one or more activities selected from the group consisting of yol073c-protein in a non-human organism or a part thereof, preferably a microorganism, a plant cell, a plant or a part thereof, as compared to a corresponding non-transformed wild type non-human organism or a part thereof; and
[70150] (b) growing the non-human organism or a part thereof under conditions which permit the production of citramalate or a composition comprising citramalate in said non-human organism or in the culture medium surrounding said non-human organism.

[70151] Accordingly, the present invention relates to a process for the production of malate, which comprises
[70152] (a) increasing or generating one or more activities selected from the group consisting of yol073c-protein in a non-human organism or a part thereof, preferably a microorganism, a plant cell, a plant or a part thereof, as compared to a corresponding non-transformed wild type non-human organism or a part thereof; and
[70153] (b) growing the non-human organism or a part thereof under conditions which permit the production of malate or a composition comprising malate in said non-human organism or in the culture medium surrounding said non-human organism.

[70154] Accordingly, the present invention relates to a process for the production of vitamin c and/or threonic acid, which comprises
[70155] (a) increasing or generating one or more activities selected from the group consisting of yol160w-protein in a non-human organism or a part thereof, preferably a microorganism, a plant cell, a plant or a part thereof, as compared to a corresponding non-transformed wild type non-human organism or a part thereof; and
[70156] (b) growing the non-human organism or a part thereof under conditions which permit the production of vitamin c and/or threonic acid or a composition comprising vitamin c and/or threonic acid in said non-human organism or in the culture medium surrounding said non-human organism.

[70157] Accordingly, the present invention relates to a process for the production of malate, which comprises
[70158] (a) increasing or generating one or more activities selected from the group consisting of acetyl-CoA acetyltransferase in a non-human organism or a part thereof, preferably a microorganism organism, a plant cell, a plant or a part thereof, as compared to a corresponding non-transformed wild type non-human organism or a part thereof; and
[70159] (b) growing the non-human organism or a part thereof under conditions which permit the production of malate or a composition comprising malate in said non-human organism or in the culture medium surrounding said non-human organism.

[70160] Accordingly, the present invention relates to a process for the production of vitamin c and/or threonic acid, which comprises
[70161] (a) increasing or generating one or more activities selected from the group consisting of ammonium transporter in a non-human organism or a part thereof, preferably a microorganism, a plant cell, a plant or a part thereof, as compared to a corresponding non-transformed wild type non-human organism or a part thereof; and
[70162] (b) growing the non-human organism or a part thereof under conditions which permit the production of vitamin c and/or threonic acid or a composition comprising vitamin c and/or threonic acid in said non-human organism or in the culture medium surrounding said non-human organism.

[70163] Accordingly, the present invention relates to a process for the production of fumarate, which comprises
[70164] (a) increasing or generating one or more activities selected from the group consisting of 47266012-protein in a non-human organism or a part thereof, preferably a microorganism, a plant cell, a plant or a part thereof, as compared to a corresponding non-transformed wild type non-human organism or a part thereof; and
[70165] (b) growing the non-human organism or a part thereof under conditions which permit the production of fumarate or a composition comprising fumarate in said non-human organism or in the culture medium surrounding said non-human organism.

[70166] Accordingly, the present invention relates to a process for the production of malate, which comprises
[70167] (a) increasing or generating one or more activities selected from the group consisting of 47266012-protein in a non-human organism or a part thereof, preferably a microorganism, a plant cell, a plant or a part thereof, as compared to a corresponding non-transformed wild type non-human organism or a part thereof; and
[70168] (b) growing the non-human organism or a part thereof under conditions which permit the production of malate or a composition comprising malate in said non-human organism or in the culture medium surrounding said non-human organism.

[70169] Accordingly, the present invention relates to a process for the production of succinate, which comprises
[70170] (a) increasing or generating one or more activities selected from the group consisting of 47266012-protein in a non-human organism or a part thereof, preferably a microorganism, a plant cell, a plant or a part thereof, as compared to a corresponding non-transformed wild type non-human organism or a part thereof; and
[70171] (b) growing the non-human organism or a part thereof under conditions which permit the production of succinate or a composition comprising succinate in said non-human organism or in the culture medium surrounding said non-human organism.

[70172] Accordingly, the present invention relates to a process for the production of fumarate, which comprises
[70173] (a) increasing or generating one or more activities selected from the group consisting of 49747384_SOYBEAN-protein in a non-human organism or a part thereof, preferably a microorganism, a plant cell, a plant or a part thereof, as compared to a corresponding non-transformed wild type non-human organism or a part thereof; and
[70174] (b) growing the non-human organism or a part thereof under conditions which permit the production of fumarate or a composition comprising fumarate in said non-human organism or in the culture medium surrounding said non-human organism.

[70175] Accordingly, the present invention relates to a process for the production of malate, which comprises
[70176] (a) increasing or generating one or more activities selected from the group consisting of 49747384_SOYBEAN-protein in a non-human organism or a part thereof, preferably a microorganism, a plant cell, a plant or a part thereof, as compared to a corresponding non-transformed wild type non-human organism or a part thereof; and
[70177] (b) growing the non-human organism or a part thereof under conditions which permit the production of malate or a composition comprising malate in said non-human organism or in the culture medium surrounding said non-human organism.

[70178] Accordingly, the present invention relates to a process for the production of succinate, which comprises
[70179] (a) increasing or generating one or more activities selected from the group consisting of 49747384_SOYBEAN-protein in a non-human organism or a part thereof, preferably a microorganism, a plant cell, a plant or a part thereof, as compared to a corresponding non-transformed wild type non-human organism or a part thereof; and
[70180] (b) growing the non-human organism or a part thereof under conditions which permit the production of succinate or a composition comprising succinate in said non-human organism or in the culture medium surrounding said non-human organism.

[70181] Accordingly, the present invention relates to a process for the production of vitamin c and/or threonic acid, which comprises
[70182] (a) increasing or generating one or more activities selected from the group consisting of 49747384_SOYBEAN-protein in a non-human organism or a part thereof, preferably a microorganism, a plant cell, a plant or a part thereof, as compared to a corresponding non-transformed wild type non-human organism or a part thereof; and
[70183] (b) growing the non-human organism or a part thereof under conditions which permit the production of vitamin c and/or threonic acid or a composition comprising vitamin c and/or threonic acid in said non-human organism or in the culture medium surrounding said non-human organism.

[70184] Accordingly, the present invention relates to a process for the production of citramalate, which comprises
[70185] (a) increasing or generating one or more activities selected from the group consisting of pyruvate kinase in a non-human organism or a part thereof, preferably a microorganism, a plant cell, a plant or a part thereof, as compared to a corresponding non-transformed wild type non-human organism or a part thereof; and
[70186] (b) growing the non-human organism or a part thereof under conditions which permit the production of citramalate or a composition comprising citramalate in said non-human organism or in the culture medium surrounding said non-human organism.

[70187] Accordingly, the present invention relates to a process for the production of succinate, which comprises
[70188] (a) increasing or generating one or more activities selected from the group consisting of pyruvate kinase in a non-human organism or a part thereof, preferably a microorganism, a plant cell, a plant or a part thereof, as compared to a corresponding non-transformed wild type non-human organism or a part thereof; and
[70189] (b) growing the non-human organism or a part thereof under conditions which permit the production of succinate or a composition comprising succinate in said non-human organism or in the culture medium surrounding said non-human organism.

[70190] Accordingly, the present invention relates to a process for the production of citramalate, which comprises
[70191] (a) increasing or generating one or more activities selected from the group consisting of glucose-6-phosphate 1-dehydrogenase in a non-human organism or a part thereof, preferably a microorganism, a plant cell, a plant or a part thereof, as compared to a corresponding non-transformed wild type non-human organism or a part thereof; and
[70192] (b) growing the non-human organism or a part thereof under conditions which permit the production of citramalate or a composition comprising citramalate in said non-human organism or in the culture medium surrounding said non-human organism.

[70193] An embodiment of the present invention relates to a process for the production of citramalate, which comprises
[70194] (a1) increasing or generating the activity of a polypeptide comprising a polypeptide as depicted in a respective line in column 5 or 8 of Table II, application no. 15, or a homolog or a fragment thereof, a consensus sequence or at least one polypeptide motif as depicted in the respective line in column 8 of Table IV, application no. 15, whereby the respective line disclose in column 7 the fine chemical citramalate; or
[70195] (a2) increasing or generating the activity of an expression product of one or more nucleic acid molecule(s) comprising a polynucleotide as depicted in the respective line in column 5 or 8 of Table I, application no. 15, preferably the coding region thereof, or a homolog or a fragment thereof, whereby the respective line disclose in column 7 the fine chemical citramalate; or
[70196] (a3) increasing or generating the activity of a functional equivalent of (a1) or (a2);
[70197] in a non-human organism or a part thereof; preferably a microorganism, a plant cell, a plant or a part thereof, as compared to a corresponding non-transformed wild type non-human organism or a part thereof; and
[70198] (b) growing the non-human organism under conditions which permit the production of citramalate or a composition comprising citramalate in said non-human organism or in the culture medium surrounding said non-human organism.

[70199] An embodiment of the present invention relates to a process for the production of citrate, which comprises
[70200] (a1) increasing or generating the activity of a polypeptide comprising a polypeptide as depicted in a respective line in column 5 or 8 of Table II, application no. 15, or a homolog or a fragment thereof, a consensus sequence or at least one polypeptide motif as depicted in the respective line in column 8 of Table IV, application no. 15, whereby the respective line disclose in column 7 the fine chemical citrate; or
[70201] (a2) increasing or generating the activity of an expression product of one or more nucleic acid molecule(s) comprising a polynucleotide as depicted in the respective line in column 5 or 8 of Table I, application no. 15, preferably the coding region thereof, or a homolog or a fragment thereof, whereby the respective line disclose in column 7 the fine chemical citrate; or
[70202] (a3) increasing or generating the activity of a functional equivalent of (a1) or (a2);
[70203] in a non-human organism or a part thereof; preferably a microorganism, a plant cell, a plant or a part thereof, as compared to a corresponding non-transformed wild type non-human organism or a part thereof; and
[70204] (b) growing the non-human organism under conditions which permit the production of citrate or a composition comprising citrate in said non-human organism or in the culture medium surrounding said non-human organism.

[70205] An embodiment of the present invention relates to a process for the production of fumarate, which comprises
[70206] (a1) increasing or generating the activity of a polypeptide comprising a polypeptide as depicted in a respective line in column 5 or 8 of Table II, application no. 15, or a homolog or a fragment thereof, a consensus sequence or at least one polypeptide motif as depicted in the respective line in column 8 of Table IV, application no. 15, whereby the respective line disclose in column 7 the fine chemical fumarate; or
[70207] (a2) increasing or generating the activity of an expression product of one or more nucleic acid molecule(s) comprising a polynucleotide as depicted in the respective line in column 5 or 8 of Table I, application no. 15, preferably the coding region thereof, or a homolog or a fragment thereof, whereby the respective line disclose in column 7 the fine chemical fumarate; or
[70208] (a3) increasing or generating the activity of a functional equivalent of (a1) or (a2);
[70209] in a non-human organism or a part thereof; preferably a microorganism, a plant cell, a plant or a part thereof, as compared to a corresponding non-transformed wild type non-human organism or a part thereof; and
[70210] (b) growing the non-human organism under conditions which permit the production of fumarate or a composition comprising fumarate in said non-human organism or in the culture medium surrounding said non-human organism.

[70211] An embodiment of the present invention relates to a process for the production of glycerate, which comprises
[70212] (a1) increasing or generating the activity of a polypeptide comprising a polypeptide as depicted in a respective line in column 5 or 8 of Table II, application no. 15, or a homolog or a fragment thereof, a consensus sequence or at least one polypeptide motif as depicted in the respective line in column 8 of Table IV, application no. 15, whereby the respective line disclose in column 7 the fine chemical glycerate; or
[70213] (a2) increasing or generating the activity of an expression product of one or more nucleic acid molecule(s) comprising a polynucleotide as depicted in the respective line in column 5 or 8 of Table I, application no. 15, preferably the coding region thereof, or a homolog or a fragment thereof, whereby the respective line disclose in column 7 the fine chemical glycerate; or
[70214] (a3) increasing or generating the activity of a functional equivalent of (a1) or (a2);
[70215] in a non-human organism or a part thereof; preferably a microorganism, a plant cell, a plant or a part thereof, as compared to a corresponding non-transformed wild type non-human organism or a part thereof; and
[70216] (b) growing the non-human organism under conditions which permit the production of glycerate or a composition comprising glycerate in said non-human organism or in the culture medium surrounding said non-human organism.

[70217] An embodiment of the present invention relates to a process for the production of malate, which comprises
[70218] (a1) increasing or generating the activity of a polypeptide comprising a polypeptide as depicted in a respective line in column 5 or 8 of Table II, application no. 15, or a homolog or a fragment thereof, a consensus sequence or at least one polypeptide motif as depicted in the respective line in column 8 of Table IV, application no. 15, whereby the respective line disclose in column 7 the fine chemical malate; or
[70219] (a2) increasing or generating the activity of an expression product of one or more nucleic acid molecule(s) comprising a polynucleotide as depicted in the respective line in column 5 or 8 of Table I, application no. 15, preferably the coding region thereof, or a homolog or a fragment thereof, whereby the respective line disclose in column 7 the fine chemical malate; or
[70220] (a3) increasing or generating the activity of a functional equivalent of (a1) or (a2);

[70221] in a non-human organism or a part thereof; preferably a microorganism, a plant cell, a plant or a part thereof, as compared to a corresponding non-transformed wild type non-human organism or a part thereof; and
[70222] (b) growing the non-human organism under conditions which permit the production of malate or a composition comprising malate in said non-human organism or in the culture medium surrounding said non-human organism.

[70223] An embodiment of the present invention relates to a process for the production of oxalate, which comprises
[70224] (a1) increasing or generating the activity of a polypeptide comprising a polypeptide as depicted in a respective line in column 5 or 8 of Table II, application no. 15, or a homolog or a fragment thereof, a consensus sequence or at least one polypeptide motif as depicted in the respective line in column 8 of Table IV, application no. 15, whereby the respective line disclose in column 7 the fine chemical oxalate; or
[70225] (a2) increasing or generating the activity of an expression product of one or more nucleic acid molecule(s) comprising a polynucleotide as depicted in the respective line in column 5 or 8 of Table I, application no. 15, preferably the coding region thereof, or a homolog or a fragment thereof, whereby the respective line disclose in column 7 the fine chemical oxalate; or
[70226] (a3) increasing or generating the activity of a functional equivalent of (a1) or (a2);
[70227] in a non-human organism or a part thereof; preferably a microorganism, a plant cell, a plant or a part thereof, as compared to a corresponding non-transformed wild type non-human organism or a part thereof; and
[70228] (b) growing the non-human organism under conditions which permit the production of oxalate or a composition comprising oxalate in said non-human organism or in the culture medium surrounding said non-human organism.

[70229] An embodiment of the present invention relates to a process for the production of pyruvate, which comprises
[70230] (a1) increasing or generating the activity of a polypeptide comprising a polypeptide as depicted in a respective line in column 5 or 8 of Table II, application no. 15, or a homolog or a fragment thereof, a consensus sequence or at least one polypeptide motif as depicted in the respective line in column 8 of Table IV, application no. 15, whereby the respective line disclose in column 7 the fine chemical pyruvate; or
[70231] (a2) increasing or generating the activity of an expression product of one or more nucleic acid molecule(s) comprising a polynucleotide as depicted in the respective line in column 5 or 8 of Table I, application no. 15, preferably the coding region thereof, or a homolog or a fragment thereof, whereby the respective line disclose in column 7 the fine chemical pyruvate; or
[70232] (a3) increasing or generating the activity of a functional equivalent of (a1) or (a2);
[70233] in a non-human organism or a part thereof; preferably a microorganism, a plant cell, a plant or a part thereof, as compared to a corresponding non-transformed wild type non-human organism or a part thereof; and
[70234] (b) growing the non-human organism under conditions which permit the production of pyruvate or a composition comprising pyruvate in said non-human organism or in the culture medium surrounding said non-human organism.

[70235] An embodiment of the present invention relates to a process for the production of succinate, which comprises
[70236] (a1) increasing or generating the activity of a polypeptide comprising a polypeptide as depicted in a respective line in column 5 or 8 of Table II, application no. 15, or a homolog or a fragment thereof, a consensus sequence or at least one polypeptide motif as depicted in the respective line in column 8 of Table IV, application no. 15, whereby the respective line disclose in column 7 the fine chemical succinate; or
[70237] (a2) increasing or generating the activity of an expression product of one or more nucleic acid molecule(s) comprising a polynucleotide as depicted in the respective line in column 5 or 8 of Table I, application no. 15, preferably the coding region thereof, or a homolog or a fragment thereof, whereby the respective line disclose in column 7 the fine chemical succinate; or
[70238] (a3) increasing or generating the activity of a functional equivalent of (a1) or (a2);
[70239] in a non-human organism or a part thereof; preferably a microorganism, a plant cell, a plant or a part thereof, as compared to a corresponding non-transformed wild type non-human organism or a part thereof; and
[70240] (b) growing the non-human organism under conditions which permit the production of succinate or a composition comprising succinate in said non-human organism or in the culture medium surrounding said non-human organism.

[70241] An embodiment of the present invention relates to a process for the production of vitamin c and/or threonic acid, which comprises
[70242] (a1) increasing or generating the activity of a polypeptide comprising a polypeptide as depicted in a respective line in column 5 or 8 of Table II, application no. 15, or a homolog or a fragment thereof, a consensus sequence or at least one polypeptide motif as depicted in the respective line in column 8 of Table IV, application no. 15, whereby the respective line disclose in column 7 the fine chemical vitamin c and/or threonic acid; or
[70243] (a2) increasing or generating the activity of an expression product of one or more nucleic acid molecule(s) comprising a polynucleotide as depicted in the respective line in column 5 or 8 of Table I, application no. 15, preferably the coding region thereof, or a homolog or a fragment thereof, whereby the respective line disclose in column 7 the fine chemical vitamin c and/or threonic acid; or
[70244] (a3) increasing or generating the activity of a functional equivalent of (a1) or (a2);
[70245] in a non-human organism or a part thereof; preferably a microorganism, a plant cell, a plant or a part thereof, as compared to a corresponding non-transformed wild type non-human organism or a part thereof; and
[70246] (b) growing the non-human organism under conditions which permit the production of vitamin c and/or threonic acid or a composition comprising vitamin c and/or threonic acid in said non-human organism or in the culture medium surrounding said non-human organism.

[70247] Accordingly, the increase or generation of one or more said activities is for example conferred by one or more expression products of said nucleic acid molecule, e.g. proteins. Accordingly, in the present invention described above, the increase or generation of one or more said activities is for example conferred by one or more protein(s) each comprising a polypeptide selected from the group as depicted in Table II, application no. 15, column 5 and 8, or a homolog or a fragment thereof.

[70248] The process of the invention comprises in one embodiment the following steps:
[70249] (i) increasing or generating of the expression of; and/or
[70250] (ii) increasing or generating the expression of an expression product of; and/or
[70251] (iii) increasing or generating one or more activities of an expression product encoded by;
   at least one nucleic acid molecule (in the following “Fine Chemical Related Protein (FCRP)”-encoding gene or “FCRP”-gene) comprising a nucleic acid molecule selected from the group consisting of:
[70252] (a) a nucleic acid molecule encoding the polypeptide shown in column 5 or 8 of Table II, preferably Table II B, application no. 15, or a homolog or a fragment thereof;
[70253] (b) a nucleic acid molecule shown in column 5 or 8 of Table I, preferably Table I B, application no. 15, or a homolog or a fragment thereof (preferably the coding region thereof);
[70254] (c) a nucleic acid molecule, which, as a result of the degeneracy of the genetic code, can be derived from a polypeptide sequence depicted in column 5 or 8 of Table II, preferably Table II B, application no. 15;
[70255] (d) a nucleic acid molecule having at least 30%, in particular at least 50%, 60%, 70%, 80%, 85%, 90%, 95%, 97%, 98%, 99% or 99.5% identity with the nucleic acid molecule sequence of a polynucleotide comprising the nucleic acid molecule shown in column 5 or 8 of Table I, preferably Table I B, application no. 15, or the coding region thereof;
[70256] (e) a nucleic acid molecule encoding a polypeptide having at least 30%, in particular 50%, 60%, 70%, 80%, 85%, 90%, 95%, 97%, 98%, 99% or 99.5% identity with the amino acid sequence of the polypeptide encoded by the nucleic acid molecule of (a), (b), (c) or (d),
[70257] (f) a nucleic acid molecule which hybridizes with a nucleic acid molecule of (a), (b), (c), (d) or (e) under stringent hybridization conditions;
[70258] (g) a nucleic acid molecule encoding a polypeptide which can be isolated with the aid of monoclonal or polyclonal antibodies made against a polypeptide encoded by one of the nucleic acid molecules of (a), (b), (c), (d), (e) or (f);
[70259] (h) a nucleic acid molecule encoding a polypeptide comprising the consensus sequence or one or more polypeptide motifs as shown in column 8 of Table IV, application no. 15;
[70260] (i) a nucleic acid molecule encoding a polypeptide having the activity represented by a respective protein as depicted in column 5 of Table II, application no. 15;
[70261] (j) a nucleic acid molecule which comprises a polynucleotide, which is obtained by amplifying a cDNA library or a genomic library using the primers as depicted in column 8 of Table III, application no. 15; and
[70262] (k) a nucleic acid molecule which is obtainable by screening a suitable nucleic acid library, especially a cDNA library and/or a genomic library, under stringent hybridization conditions with a probe comprising a complementary sequence of a nucleic acid molecule of (a), (b), (c), (d), (e), (f), (g), (h), (i) or (j) or with a fragment thereof, having at least 15 nt, preferably 20 nt, 30 nt, 50 nt, 100 nt, 200 nt, 500 nt, 1000 nt, 1500 nt, 2000 nt or 3000 nt of a nucleic acid molecule complementary to a nucleic acid molecule sequence characterized in (a), (b), (c), (d), (e), (f), (g), (h), (i) or (j);
[70263] or a nucleic acid molecule comprising a sequence which is complementary thereto.
   (All the references to Tables I to IV are references to the corresponding lines of Tables I to IV.)

[70264] In a preferred embodiment thereof said nucleic acid molecule encodes a polypeptide which has the activity of the polypeptide represented by a protein comprising a polypeptide as depicted in the corresponding hit in column 5 of Table II, application no. 15.

[70265] In another preferred embodiment thereof said nucleic acid molecule confers a generation or an increase of the respective fine chemical in a non-human organism or a part thereof as compared to a corresponding wild-type non-human organism or part thereof.

[70266] In another preferred embodiment thereof said nucleic acid molecule encodes a polypeptide which has the activity of the polypeptide represented by a protein as depicted in the corresponding hit in column 5 of Table II, application no. 15, and confers a generation or an increase of the respective fine chemical in a non-human organism or a part thereof as compared to a corresponding wild-type non-human organism or part thereof.

[70267] Accordingly, the genes of the present invention or used in accordance with the present invention, which respectively encode a protein having an activity of 2-C-methyl-D-erythritol 4-phosphate cytidylyltransferase, 2-isopropylmalate synthase, 2-oxoglutarate dehydrogenase E1 subunit, 30S ribosomal protein S3, 47266012-protein, 49747384_SOYBEAN-protein, 50S ribosomal protein L14, ABC transporter ATP binding component, ABC transporter permease protein, acetyl-CoA acetyltransferase, acetyl-CoA hydrolase, acetyltransferase, acyl-CoA dehydrogenase, acyl-CoA synthase, adenylate kinase, adenylylsulfate kinase, agmatinase, amino-acid acetyltransferase, aminotransferase, ammonium transporter, arginine N-succinyltransferase, aspartase, At1g13930-protein, ATP-binding component of a transport system, auxin response factor, AX653549-protein, AY087308-protein, b0801-protein, b1003-protein, b1285-protein, b1425-protein, b1445-protein, b1522-protein, b1670-protein, b1672-protein, b1742-protein, b1898-protein, b2399-protein, b3777-protein, b3791-protein, b3814-protein, b3817-protein, b3989-protein, b4029-protein, b4050-protein, b4056-protein, beta-hydroxylase, betaine aldehyde dehydrogenase, bifunctional purine biosynthesis protein, branched chain aminotransferase, calcium-dependent protein kinase, cation-transporting ATPase, CBL-interacting protein kinase, CDP-diacylglycerol-glycerol-3-phosphate 3-phosphatidyltransferase, CDP-diacylglycerol-serine O-phosphatidyltransferase, CDP-glucose-4,6-dehydratase, citrate synthase, coproporphyrinogen III oxidase, CTP synthase, cystathionine beta-lyase, cysteine synthase A, cysteine synthase B, dATP pyrophosphohydrolase, dihydrolipoamide dehydrogenase, DnaJ-like chaperone, electron transfer flavoprotein subunit beta, electron transport complex protein, eukaryotic translation initiation factor 5, Fe—S subunit of oxidoreductase, flagellar M-ring protein, fumarate hydratase, gamma-glutamyltranspeptidase, gibberellin 20-oxidase, glucose dehydrogenase, glucose-1-phosphate cytidylyltransferase, glucose-6-phosphate 1-dehydrogenase, glutamate dehydrogenase, glutamate-ammonia-ligase, glutaredoxin, glycerate kinase, glycerol kinase, Glycine cleavage system T aminomethyltransferase, GM02LC17485-protein, GM02LC5744-protein, heat shock protein, heat shock transcription factor, hexose transporter, hydrolase, isochorismate synthase, isocitrate dehydrogenase, isocitrate lyase, leucyl/phenylalanyl-tRNA-protein transferase, lipopolysaccharide core biosynthesis protein, lipoprotein precursor, lysine decarboxylase, malate dehydrogenase, malonyl CoA-acyl carrier protein transacylase, membrane protein, membrane transport protein, methylglyoxal synthase, methylglyoxalase, methyltransferase, monothiol glutaredoxin, monthiol glutaredoxin, multiple antibiotic resistance protein, murein transglycosylase, NADH-quinone oxidoreductase subunit, O-antigen chain length determinant, oxidoreductase, oxidoreductase subunit, oxireductase, phenylacetic acid degradation protein, phenylalanine ammonia-lyase, phosphatase, phosphate import ATP-binding protein, photosystem I reaction centre subunit, photosystem II protein, polygalacturonase, protease, protein phosphatase, purine-nucleoside phosphorylase, pyruvate carboxylase, pyruvate kinase, recombinase A, ribulokinase, RNA polymerase sigma factor, sec-independent protein translocase, Sec-independent protein translocase subunit, slr1170-protein, thioredoxin, thioredoxin family protein, thioredoxin reductase, threonine efflux protein, threonine synthase, transcription factor, transcriptional regulator, transcriptional regulator protein, translation initiation factor subunit, TTC1386-protein, xanthine dehydrogenase, XM_{—}473199-protein, ycr102c-protein, YDL159W-A-protein, ygl237c-protein, YGR193C-protein, ygr221 c-protein, yhr131c-protein, yhr207c-protein, YKL038W-protein, YKL140W-protein, ylr065c-protein, ylr326w-protein, yml084w-protein, yol073c-protein, yol160w-protein, zinc finger protein, or zinc transporter, which respectively encode a protein comprising a polypeptide encoded by a nucleic acid sequence as shown in Table I, application no. 15, column 5 or 8, (preferably the coding region thereof), or a homolog or a fragment thereof, which respectively encode a protein comprising a polypeptide as depicted in Table II, application no. 15, column 5 or 8, or a homolg or a fragment thereof, and/or which respectively can be amplified with the primer set shown in Table III, application no. 15, column 8, are also referred to as “FCRP genes”.

[70268] Proteins or polypeptides encoded by “FCRP-genes” are referred to as “Fine Chemical Related Proteins” or “FCRP”. For the purposes of the description of the present invention, the respective protein having an activity of 2-C-methyl-D-erythritol 4-phosphate cytidylyltransferase, 2-isopropylmalate synthase, 2-oxoglutarate dehydrogenase E1 subunit, 30S ribosomal protein S3, 47266012-protein, 49747384_SOYBEAN-protein, 50S ribosomal protein L14, ABC transporter ATP binding component, ABC transporter permease protein, acetyl-CoA acetyltransferase, acetyl-CoA hydrolase, acetyltransferase, acyl-CoA dehydrogenase, acyl-CoA synthase, adenylate kinase, adenylylsulfate kinase, agmatinase, amino-acid acetyltransferase, aminotransferase, ammonium transporter, arginine N-succinyltransferase, aspartase, Atl g13930-protein, ATP-binding component of a transport system, auxin response factor, AX653549-protein, AY087308-protein, b0801-protein, b1003-protein, b1285-protein, b1425-protein, b1445-protein, b1522-protein, b1670-protein, b1672-protein, b1742-protein, b1898-protein, b2399-protein, b3777-protein, b3791-protein, b3814-protein, b3817-protein, b3989-protein, b4029-protein, b4050-protein, b4056-protein, beta-hydroxylase, betaine aldehyde dehydrogenase, bifunctional purine biosynthesis protein, branched chain aminotransferase, calcium-dependent protein kinase, cation-transporting ATPase, CBL-interacting protein kinase, CDP-diacylglycerol-glycerol-3-phosphate 3- phosphatidyltransferase, CDP-diacylglycerolserine O-phosphatidyltransferase, CDP-glucose-4,6-dehydratase, citrate synthase, coproporganism phyrinogen III oxidase, CTP synthase, cystathionine beta-lyase, cysteine synthase A, cysteine synthase B, dATP pyrophosphohydrolase, dihydrolipoamide dehydrogenase, DnaJ-like chaperone, electron transfer flavoprotein subunit beta, electron transport complex protein, eukaryotic translation initiation factor 5, Fe—S subunit of oxidoreductase, flagellar M-ring protein, fumarate hydratase, gamma-glutamyltranspeptidase, gibberellin 20-oxidase, glucose dehydrogenase, glucose-1-phosphate cytidylyltransferase, glucose-6-phosphate 1-dehydrogenase, glutamate dehydrogenase, glutamate-ammonia-ligase, glutaredoxin, glycerate kinase, glycerol kinase, Glycine cleavage system T aminomethyltransferase, GM02LC17485-protein, GM02LC5744-protein, heat shock protein, heat shock transcription factor, hexose transporter, hydrolase, isochorismate synthase, isocitrate dehydrogenase, isocitrate lyase, leucyl/phenylalanyl-tRNA-protein transferase, lipopolysaccharide core biosynthesis protein, lipoprotein precursor, lysine decarboxylase, malate dehydrogenase, malonyl CoA-acyl carrier protein transacylase, membrane protein, membrane transport protein, methylglyoxal synthase, methylglyoxalase, methyl-transferase, monothiol glutaredoxin, monthiol glutaredoxin, multiple antibiotic resistance protein, murein transglycosylase, NADH-quinone oxidoreductase subunit, O-antigen chain length determinant, oxidoreductase, oxidoreductase subunit, oxireductase, phenylacetic acid degradation protein, phenylalanine ammonia-lyase, phosphatase, phosphate import ATP-binding protein, photosystem I reaction centre subunit, photosystem II protein, polygalacturonase, protease, protein phosphatase, purine-nucleoside phosphorylase, pyruvate carboxylase, pyruvate kinase, recombinase A, ribulokinase, RNA polymerase sigma factor, sec-independent protein translocase, Sec-independent protein translocase subunit, slr1170-protein, thioredoxin, thioredoxin family protein, thioredoxin reductase, threonine efflux protein, threonine synthase, transcription factor, transcriptional regulator, transcriptional regulator protein, translation initiation factor subunit, TTC1386-protein, xanthine dehydrogenase, XM_{—}473199-protein, ycr102c-protein, YDL159W-A-protein, ygl237c-protein, YGR193C-protein, ygr221 c-protein, yhrl 31 c-protein, yhr207c-protein, YKL038W-protein, YKL140W-protein, ylr065c-protein, ylr326w-protein, yml084w-protein, yol073c-protein, yol160w-protein, zinc finger protein, or zinc transporter, the respective protein comprising a polypeptide encoded by one or more respective nucleic acid sequences as shown in Table I, application no. 15, column 5 or 8, (preferably the coding region thereof), or a homolog or fragment thereof, the respective protein comprising a respective polypeptide as depicted in Table II, application no. 15, column 5 or 8, or a homolog or fragment thereof, the respective protein comprising a sequence corresponding to the consensus sequence as shown in Table IV, application no. 15, column 8, and/or the respective protein comprising at least one polypeptide motif as shown in Table IV, application no. 15, column 8 is also referred to as Fine Chemical Related Protein” or “FCRP”.

[70269] Thus, in one embodiment, the present invention provides a process of the production of citramalate, citrate, fumarate, glycerate, malate, oxalate, pyruvate, succinate, and/or vitamin c and/or threonic acid, by increasing or generating one or more activities, especially selected from the group consisting of 2-C-methyl-D-erythritol 4-phosphate cytidylyltransferase, 2-isopropylmalate synthase, 2-oxoglutarate dehydrogenase E1 subunit, 30S ribosomal protein S3, 47266012-protein, 49747384_SOYBEAN-protein, 50S ribosomal protein L14, ABC transporter ATP binding component, ABC transporter permease protein, acetyl-CoA acetyltransferase, acetyl-CoA hydrolase, acetyltransferase, acyl-CoA dehydrogenase, acyl-CoA synthase, adenylate kinase, adenylylsulfate kinase, agmatinase, amino-acid acetyltransferase, aminotransferase, ammonium transporter, arginine N-succinyltransferase, aspartase, At1g13930-protein, ATP-binding component of a transport system, auxin response factor, AX653549-protein, AY087308-protein, b0801-protein, b1003-protein, b1285-protein, b1425-protein, b1445-protein, b1522-protein, b1670-protein, b1672-protein, b1742-protein, b1898-protein, b2399-protein, b3777-protein, b3791-protein, b3814-protein, b3817-protein, b3989-protein, b4029-protein, b4050-protein, b4056-protein, beta-hydroxylase, betaine aldehyde dehydrogenase, bifunctional purine biosynthesis protein, branched chain aminotransferase, calcium-dependent protein kinase, cation-transporting ATPase, CBL-interacting protein kinase, CDP-diacylglycerol-glycerol-3-phosphate 3-phosphatidyltransferase, CDP-diacylglycerol-serine O-phosphatidyltransferase, CDP-glucose-4,6-dehydratase, citrate synthase, coproporphyrinogen III oxidase, CTP synthase, cystathionine beta-lyase, cysteine synthase A, cysteine synthase B, dATP pyrophosphohydrolase, dihydrolipoamide dehydrogenase, DnaJ-like chaperone, electron transfer flavoprotein subunit beta, electron transport complex protein, eukaryotic translation initiation factor 5, Fe—S subunit of oxidoreductase, flagellar M-ring protein, fumarate hydratase, gamma-glutamyltranspeptidase, gibberellin 20-oxidase, glucose dehydrogenase, glucose-1-phosphate cytidylyltransferase, glucose-6-phosphate 1-dehydrogenase, glutamate dehydrogenase, glutamate-ammonia-ligase, glutaredoxin, glycerate kinase, glycerol kinase, Glycine cleavage system T aminomethyltransferase, GM02LC17485-protein, GM02LC5744-protein, heat shock protein, heat shock transcription factor, hexose transporter, hydrolase, isochorismate synthase, isocitrate dehydrogenase, isocitrate lyase, leucyl/phenylalanyl-tRNA-protein transferase, lipopolysaccharide core biosynthesis protein, lipoprotein precursor, lysine decarboxylase, malate dehydrogenase, malonyl CoA-acyl carrier protein transacylase, membrane protein, membrane transport protein, methylglyoxal synthase, methylglyoxalase, methyltransferase, monothiol glutaredoxin, monthiol glutaredoxin, multiple antibiotic resistance protein, murein transglycosylase, NADH-quinone oxidoreductase subunit, O-antigen chain length determinant, oxidoreductase, oxidoreductase subunit, oxireductase, phenylacetic acid degradation protein, phenylalanine ammonialyase, phosphatase, phosphate import ATP-binding protein, photosystem I reaction centre subunit, photosystem 11-protein, polygalacturonase, protease, protein phosphatase, purinenucleoside phosphorylase, pyruvate carboxylase, pyruvate kinase, recombinase A, ribulokinase, RNA polymerase sigma factor, sec-independent protein translocase, Sec-independent protein translocase subunit, slr1170-protein, thioredoxin, thioredoxin family protein, thioredoxin reductase, threonine efflux protein, threonine synthase, transcription factor, transcriptional regulator, transcriptional regulator protein, translation initiation factor subunit, TTC1386-protein, xanthine dehydrogenase, XM_{—}473199-protein, ycr102c-protein, YDL159W-A-protein, ygl237c-protein, YGR193C-protein, ygr221c-protein, yhr131c-protein, yhr207c-protein, YKL038W-protein, YKL140W-protein, ylr065c-protein, ylr326w-protein, yml084w-protein, yol073c-protein, yol160w-protein, zinc finger protein, and zinc transporter, which is conferred by one or more FCRPs or the gene product of one or more FCRP-genes, for example by the gene product of a nucleic acid sequences comprising a polynucleotide selected from the group as shown in Table I, application no. 15, column 5 or 8, (preferably by the coding region thereof), or a homolog or a fragment thereof, e.g. or by one or more proteins each comprising a polypeptide encoded by one or more nucleic acid sequences selected from the group as shown in Table I, application no. 15, column 5 or 8, (preferably by the coding region thereof), or a homolog or a fragment thereof, or by one or more protein(s) each comprising a polypeptide selected from the group as depicted in Table II, application no. 15, column 5 and 8, or a homolog thereof, or a protein comprising a sequence corresponding to the consensus sequence or comprising at least one polypeptide motif as shown in Table IV, application no. 15, column 8.

[70270] for the disclosure of this paragraph see [0025.1.7.7] above

[70271] In an embodiment, the process comprises increasing or generating the activity of one or more polypeptides having said activity, e.g. by generating or increasing the amount and/or specific activity in the cell or a compartment of a cell of one of more FCRP, especially selected from the group consisting of 2-C-methyl-D-erythritol 4-phosphate cytidylyltransferase, 2-isopropylmalate synthase, 2-oxoglutarate dehydrogenase E1 subunit, 30S ribosomal protein S3, 47266012-protein, 49747384_SOYBEAN-protein, 50S ribosomal protein L14, ABC transporter ATP binding component, ABC transporter permease protein, acetyl-CoA acetyltransferase, acetyl-CoA hydrolase, acetyltransferase, acyl-CoA dehydrogenase, acyl-CoA synthase, adenylate kinase, adenylylsulfate kinase, agmatinase, amino-acid acetyltransferase, aminotransferase, ammonium transporter, arginine N-succinyltransferase, aspartase, At1g13930-protein, ATP-binding component of a transport system, auxin response factor, AX653549-protein, AY087308-protein, b0801-protein, b1003-protein, b1285-protein, b1425-protein, b1445-protein, b1522-protein, b1670-protein, b1672-protein, b1742-protein, b1898-protein, b2399-protein, b3777-protein, b3791-protein, b3814-protein, b3817-protein, b3989-protein, b4029-protein, b4050-protein, b4056-protein, beta-hydroxylase, betaine aldehyde dehydrogenase, bifunctional purine biosynthesis protein, branched chain aminotransferase, calcium-dependent protein kinase, cation-transporting ATPase, CBL-interacting protein kinase, CDP-diacylglycerol-glycerol-3-phosphate 3- phosphatidyltransferase, CDP-diacylglycerol-serine O-phosphatidyltransferase, CDP-glucose-4,6-dehydratase, citrate synthase, coproporphyrinogen III oxidase, CTP synthase, cystathionine beta-lyase, cysteine synthase A, cysteine synthase B, dATP pyrophosphohydrolase, dihydrolipoamide dehydrogenase, DnaJ-like chaperone, electron transfer flavoprotein subunit beta, electron transport complex protein, eukaryotic translation initiation factor 5, Fe—S subunit of oxidoreductase, flagellar M-ring protein, fumarate hydratase, gamma-glutamyltranspeptidase, gibberellin 20-oxidase, glucose dehydrogenase, glucose-1-phosphate cytidylyltransferase, glucose-6-phosphate 1-dehydrogenase, glutamate dehydrogenase, glutamate-ammonia-ligase, glutaredoxin, glycerate kinase, glycerol kinase, Glycine cleavage system T aminomethyltransferase, GM02LC17485-protein, GM02LC5744-protein, heat shock protein, heat shock transcription factor, hexose transporter, hydrolase, isochorismate synthase, isocitrate dehydrogenase, isocitrate lyase, leucyl/phenylalanyl-tRNA-protein transferase, lipopolysaccharide core biosynthesis protein, lipoprotein precursor, lysine decarboxylase, malate dehydrogenase, malonyl CoA-acyl carrier protein transacylase, membrane protein, membrane transport protein, methylglyoxal synthase, methylglyoxalase, methyltransferase, monothiol glutaredoxin, monthiol glutaredoxin, multiple antibiotic resistance protein, murein transglycosylase, NADH-quinone oxidoreductase subunit, O-antigen chain length determinant, oxidoreductase, oxidoreductase subunit, oxireductase, phenylacetic acid degradation protein, phenylalanine ammonia-lyase, phosphatase, phosphate import ATP-binding protein, photosystem I reaction centre subunit, photosystem II protein, polygalacturonase, protease, protein phosphatase, purine-nucleoside phosphorylase, pyruvate carboxylase, pyruvate kinase, recombinase A, ribulokinase, RNA polymerase sigma factor, sec-independent protein translocase, Sec-independent protein translocase subunit, slr1170-protein, thioredoxin, thioredoxin family protein, thioredoxin reductase, threonine efflux protein, threonine synthase, transcription factor, transcriptional regulator, transcriptional regulator protein, translation initiation factor subunit, TTC1386-protein, xanthine dehydrogenase, XM_{—}473199-protein, ycr102c-protein, YDL159W-A-protein, ygl237c-protein, YGR193C-protein, ygr221 c-protein, yhr131c-protein, yhr207c-protein, YKL038W-protein, YKL140W-protein, ylr065c-protein, ylr326w-protein, yml084w-protein, yol073c-protein, yol160w-protein, zinc finger protein, and zinc transporter, for example of the respective polypeptide as depicted in Table II, application no. 15, column 5 and 8, or a homolog or a fragment thereof, or the respective polypeptide comprising a sequence corresponding to the consensus sequences as shown in Table IV, application no. 15, column 8, or the respective polypeptide comprising at least one polypeptide motif as depicted in Table IV, application no. 15, column 8.

[70272] A further embodiment of the present invention relates to a process for the production of succinate, which comprises
[70273] (a) increasing or generating the activity of a protein phosphatase non-targeted in a non-human organism or a part thereof, preferably a microorganism, a plant cell, a plant or a part thereof, as compared to a corresponding non-transformed wild type non-human organism or a part thereof; and
[70274] (b) growing the non-human organism or a part thereof under conditions which permit the production of succinate or a composition comprising succinate in said non-human organism or in the culture medium surrounding said non-human organism.

[70275] A further embodiment of the present invention relates to a process for the production of malate, which comprises
[70276] (a) increasing or generating the activity of a At1g13930-protein non-targeted in a non-human organism or a part thereof, preferably a microorganism, a plant cell, a plant or a part thereof, as compared to a corresponding non-transformed wild type non-human organism or a part thereof; and
[70277] (b) growing the non-human organism or a part thereof under conditions which permit the production of malate or a composition comprising malate in said non-human organism or in the culture medium surrounding said non-human organism.

[70278] A further embodiment of the present invention relates to a process for the production of succinate, which comprises
[70279] (a) increasing or generating the activity of a At1g13930-protein non-targeted in a non-human organism or a part thereof, preferably a microorganism, a plant cell, a plant or a part thereof, as compared to a corresponding non-transformed wild type non-human organism or a part thereof; and
[70280] (b) growing the non-human organism or a part thereof under conditions which permit the production of succinate or a composition comprising succinate in said non-human organism or in the culture medium surrounding said non-human organism.

[70281] A further embodiment of the present invention relates to a process for the production of malate, which comprises
[70282] (a) increasing or generating the activity of a eukaryotic translation initiation factor 5 non-targeted in a non-human organism or a part thereof, preferably a microorganism, a plant cell, a plant or a part thereof, as compared to a corresponding non-transformed wild type non-human organism or a part thereof; and
[70283] (b) growing the non-human organism or a part thereof under conditions which permit the production of malate or a composition comprising malate in said non-human organism or in the culture medium surrounding said non-human organism.

[70284] A further embodiment of the present invention relates to a process for the production of vitamin c and/or threonic acid, which comprises
[70285] (a) increasing or generating the activity of a eukaryotic translation initiation factor 5 non-targeted in a non-human organism or a part thereof, preferably a microorganism, a plant cell, a plant or a part thereof, as compared to a corresponding non-transformed wild type non-human organism or a part thereof; and
[70286] (b) growing the non-human organism or a part thereof under conditions which permit the production of vitamin c and/or threonic acid or a composition comprising vitamin c and/or threonic acid in said non-human organism or in the culture medium surrounding said non-human organism.

[70287] A further embodiment of the present invention relates to a process for the production of fumarate, which comprises
[70288] (a) increasing or generating the activity of a transcriptional regulator non-targeted in a non-human organism or a part thereof, preferably a microorganism, a plant cell, a plant or a part thereof, as compared to a corresponding non-transformed wild type non-human organism or a part thereof; and
[70289] (b) growing the non-human organism or a part thereof under conditions which permit the production of fumarate or a composition comprising fumarate in said non-human organism or in the culture medium surrounding said non-human organism.

[70290] A further embodiment of the present invention relates to a process for the production of fumarate, which comprises
[70291] (a) increasing or generating the activity of a protein phosphatase non-targeted in a non-human organism or a part thereof, preferably a microorganism, a plant cell, a plant or a part thereof, as compared to a corresponding non-transformed wild type non-human organism or a part thereof; and
[70292] (b) growing the non-human organism or a part thereof under conditions which permit the production of fumarate or a composition comprising fumarate in said non-human organism or in the culture medium surrounding said non-human organism.

[70293] A further embodiment of the present invention relates to a process for the production of vitamin c and/or threonic acid, which comprises
[70294] (a) increasing or generating the activity of a protein phosphatase non-targeted in a non-human organism or a part thereof, preferably a microorganism, a plant cell, a plant or a part thereof, as compared to a corresponding non-transformed wild type non-human organism or a part thereof; and
[70295] (b) growing the non-human organism or a part thereof under conditions which permit the production of vitamin c and/or threonic acid or a composition comprising vitamin c and/or threonic acid in said non-human organism or in the culture medium surrounding said non-human organism.

[70296] A further embodiment of the present invention relates to a process for the production of fumarate, which comprises
[70297] (a) increasing or generating the activity of a CBL-interacting protein kinase non-targeted in a non-human organism or a part thereof, preferably a microorganism, a plant cell, a plant or a part thereof, as compared to a corresponding non-transformed wild type non-human organism or a part thereof; and
[70298] (b) growing the non-human organism or a part thereof under conditions which permit the production of fumarate or a composition comprising fumarate in said non-human organism or in the culture medium surrounding said non-human organism.

[70299] A further embodiment of the present invention relates to a process for the production of malate, which comprises
[70300] (a) increasing or generating the activity of a CBL-interacting protein kinase non-targeted in a non-human organism or a part thereof, preferably a microorganism, a plant cell, a plant or a part thereof, as compared to a corresponding non-transformed wild type non-human organism or a part thereof; and
[70301] (b) growing the non-human organism or a part thereof under conditions which permit the production of malate or a composition comprising malate in said non-human organism or in the culture medium surrounding said non-human organism.

[70302] A further embodiment of the present invention relates to a process for the production of succinate, which comprises
[70303] (a) increasing or generating the activity of a CBL-interacting protein kinase non-targeted in a non-human organism or a part thereof, preferably a microorganism, a plant cell, a plant or a part thereof, as compared to a corresponding non-transformed wild type non-human organism or a part thereof; and
[70304] (b) growing the non-human organism or a part thereof under conditions which permit the production of succinate or a composition comprising succinate in said non-human organism or in the culture medium surrounding said non-human organism.

[70305] A further embodiment of the present invention relates to a process for the production of fumarate, which comprises
[70306] (a) increasing or generating the activity of a phenylalanine ammonia-lyase non-targeted in a non-human organism or a part thereof, preferably a microorganism, a plant cell, a plant or a part thereof, as compared to a corresponding non-transformed wild type non-human organism or a part thereof; and
[70307] (b) growing the non-human organism or a part thereof under conditions which permit the production of fumarate or a composition comprising fumarate in said non-human organism or in the culture medium surrounding said non-human organism.

[70308] A further embodiment of the present invention relates to a process for the production of succinate, which comprises
[70309] (a) increasing or generating the activity of a thioredoxin reductase non-targeted in a non-human organism or a part thereof, preferably a microorganism, a plant cell, a plant or a part thereof, as compared to a corresponding non-transformed wild type non-human organism or a part thereof; and
[70310] (b) growing the non-human organism or a part thereof under conditions which permit the production of succinate or a composition comprising succinate in said non-human organism or in the culture medium surrounding said non-human organism.

[70311] A further embodiment of the present invention relates to a process for the production of succinate, which comprises
[70312] (a) increasing or generating the activity of a citrate synthase non-targeted in a non-human organism or a part thereof, preferably a microorganism, a plant cell, a plant or a part thereof, as compared to a corresponding non-transformed wild type non-human organism or a part thereof; and
[70313] (b) growing the non-human organism or a part thereof under conditions which permit the production of succinate or a composition comprising succinate in said non-human organism or in the culture medium surrounding said non-human organism.

[70314] A further embodiment of the present invention relates to a process for the production of citramalate, which comprises
[70315] (a) increasing or generating the activity of a pyruvate kinase non-targeted in a non-human organism or a part thereof, preferably a microorganism, a plant cell, a plant or a part thereof, as compared to a corresponding non-transformed wild type non-human organism or a part thereof; and
[70316] (b) growing the non-human organism or a part thereof under conditions which permit the production of citramalate or a composition comprising citramalate in said non-human organism or in the culture medium surrounding said non-human organism.

[70317] A further embodiment of the present invention relates to a process for the production of succinate, which comprises
[70318] (a) increasing or generating the activity of a pyruvate kinase non-targeted in a non-human organism or a part thereof, preferably a microorganism, a plant cell, a plant or a part thereof, as compared to a corresponding non-transformed wild type non-human organism or a part thereof; and
[70319] (b) growing the non-human organism or a part thereof under conditions which permit the production of succinate or a composition comprising succinate in said non-human organism or in the culture medium surrounding said non-human organism.

[70320] A further embodiment of the present invention relates to a process for the production of malate, which comprises
[70321] (a) increasing or generating the activity of a protein phosphatase non-targeted in a non-human organism or a part thereof, preferably a microorganism, a plant cell, a plant or a part thereof, as compared to a corresponding non-transformed wild type non-human organism or a part thereof; and
[70322] (b) growing the non-human organism or a part thereof under conditions which permit the production of malate or a composition comprising malate in said non-human organism or in the culture medium surrounding said non-human organism.

[70323] A further embodiment of the present invention relates to a process for the production of succinate, which comprises
[70324] (a) increasing or generating the activity of a protein phosphatase non-targeted in a non-human organism or a part thereof, preferably a microorganism, a plant cell, a plant or a part thereof, as compared to a corresponding non-transformed wild type non-human organism or a part thereof; and
[70325] (b) growing the non-human organism or a part thereof under conditions which permit the production of succinate or a composition comprising succinate in said non-human organism or in the culture medium surrounding said non-human organism.

[70326] A further embodiment of the present invention relates to a process for the production of fumarate, which comprises
[70327] (a) increasing or generating the activity of a thioredoxin family protein non-targeted in a non-human organism or a part thereof, preferably a microorganism, a plant cell, a plant or a part thereof, as compared to a corresponding non-transformed wild type non-human organism or a part thereof; and
[70328] (b) growing the non-human organism or a part thereof under conditions which permit the production of fumarate or a composition comprising fumarate in said non-human organism or in the culture medium surrounding said non-human organism.

[70329] A further embodiment of the present invention relates to a process for the production of malate, which comprises
[70330] (a) increasing or generating the activity of a thioredoxin family protein non-targeted in a non-human organism or a part thereof, preferably a microorganism, a plant cell, a plant or a part thereof, as compared to a corresponding non-transformed wild type non-human organism or a part thereof; and
[70331] (b) growing the non-human organism or a part thereof under conditions which permit the production of malate or a composition comprising malate in said non-human organism or in the culture medium surrounding said non-human organism.

[70332] A further embodiment of the present invention relates to a process for the production of glycerate, which comprises
[70333] (a) increasing or generating the activity of a thioredoxin non-targeted in a non-human organism or a part thereof, preferably a microorganism, a plant cell, a plant or a part thereof, as compared to a corresponding non-transformed wild type non-human organism or a part thereof; and
[70334] (b) growing the non-human organism or a part thereof under conditions which permit the production of glycerate or a composition comprising glycerate in said non-human organism or in the culture medium surrounding said non-human organism.

[70335] A further embodiment of the present invention relates to a process for the production of fumarate, which comprises
[70336] (a) increasing or generating the activity of a auxin response factor non-targeted in a non-human organism or a part thereof, preferably a microorganism, a plant cell, a plant or a part thereof, as compared to a corresponding non-transformed wild type non-human organism or a part thereof; and
[70337] (b) growing the non-human organism or a part thereof under conditions which permit the production of fumarate or a composition comprising fumarate in said non-human organism or in the culture medium surrounding said non-human organism.

[70338] A further embodiment of the present invention relates to a process for the production of malate, which comprises
[70339] (a) increasing or generating the activity of a auxin response factor non-targeted in a non-human organism or a part thereof, preferably a microorganism, a plant cell, a plant or a part thereof, as compared to a corresponding non-transformed wild type non-human organism or a part thereof; and
[70340] (b) growing the non-human organism or a part thereof under conditions which permit the production of malate or a composition comprising malate in said non-human organism or in the culture medium surrounding said non-human organism.

[70341] A further embodiment of the present invention relates to a process for the production of citramalate, which comprises
[70342] (a) increasing or generating the activity of a monthiol glutaredoxin non-targeted in a non-human organism or a part thereof, preferably a microorganism, a plant cell, a plant or a part thereof, as compared to a corresponding non-transformed wild type non-human organism or a part thereof; and
[70343] (b) growing the non-human organism or a part thereof under conditions which permit the production of citramalate or a composition comprising citramalate in said non-human organism or in the culture medium surrounding said non-human organism.

[70344] A further embodiment of the present invention relates to a process for the production of fumarate, which comprises
[70345] (a) increasing or generating the activity of a monthiol glutaredoxin non-targeted in a non-human organism or a part thereof, preferably a microorganism, a plant cell, a plant or a part thereof, as compared to a corresponding non-transformed wild type non-human organism or a part thereof; and
[70346] (b) growing the non-human organism or a part thereof under conditions which permit the production of fumarate or a composition comprising fumarate in said non-human organism or in the culture medium surrounding said non-human organism.

[70347] A further embodiment of the present invention relates to a process for the production of glycerate, which comprises
[70348] (a) increasing or generating the activity of a monthiol glutaredoxin non-targeted in a non-human organism or a part thereof, preferably a microorganism, a plant cell, a plant or a part thereof, as compared to a corresponding non-transformed wild type non-human organism or a part thereof; and
[70349] (b) growing the non-human organism or a part thereof under conditions which permit the production of glycerate or a composition comprising glycerate in said non-human organism or in the culture medium surrounding said non-human organism.

[70350] A further embodiment of the present invention relates to a process for the production of malate, which comprises
[70351] (a) increasing or generating the activity of a monthiol glutaredoxin non-targeted in a non-human organism or a part thereof, preferably a microorganism, a plant cell, a plant or a part thereof, as compared to a corresponding non-transformed wild type non-human organism or a part thereof; and
[70352] (b) growing the non-human organism or a part thereof under conditions which permit the production of malate or a composition comprising malate in said non-human organism or in the culture medium surrounding said non-human organism.

[70353] A further embodiment of the present invention relates to a process for the production of succinate, which comprises
[70354] (a) increasing or generating the activity of a monthiol glutaredoxin non-targeted in a non-human organism or a part thereof, preferably a microorganism, a plant cell, a plant or a part thereof, as compared to a corresponding non-transformed wild type non-human organism or a part thereof; and
[70355] (b) growing the non-human organism or a part thereof under conditions which permit the production of succinate or a composition comprising succinate in said non-human organism or in the culture medium surrounding said non-human organism.

[70356] A further embodiment of the present invention relates to a process for the production of vitamin c and/or threonic acid, which comprises
[70357] (a) increasing or generating the activity of a monthiol glutaredoxin non-targeted in a non-human organism or a part thereof, preferably a microorganism, a plant cell, a plant or a part thereof, as compared to a corresponding non-transformed wild type non-human organism or a part thereof; and
[70358] (b) growing the non-human organism or a part thereof under conditions which permit the production of vitamin c and/or threonic acid or a composition comprising vitamin c and/or threonic acid in said non-human organism or in the culture medium surrounding said non-human organism.

[70359] A further embodiment of the present invention relates to a process for the production of citramalate, which comprises
[70360] (a) increasing or generating the activity of a glutaredoxin non-targeted in a non-human organism or a part thereof, preferably a microorganism, a plant cell, a plant or a part thereof, as compared to a corresponding non-transformed wild type non-human organism or a part thereof; and
[70361] (b) growing the non-human organism or a part thereof under conditions which permit the production of citramalate or a composition comprising citramalate in said non-human organism or in the culture medium surrounding said non-human organism.

[70362] A further embodiment of the present invention relates to a process for the production of fumarate, which comprises
[70363] (a) increasing or generating the activity of a glutaredoxin non-targeted in a non-human organism or a part thereof, preferably a microorganism, a plant cell, a plant or a part thereof, as compared to a corresponding non-transformed wild type non-human organism or a part thereof; and
[70364] (b) growing the non-human organism or a part thereof under conditions which permit the production of fumarate or a composition comprising fumarate in said non-human organism or in the culture medium surrounding said non-human organism.

[70365] A further embodiment of the present invention relates to a process for the production of glycerate, which comprises
[70366] (a) increasing or generating the activity of a glutaredoxin non-targeted in a non-human organism or a part thereof, preferably a microorganism, a plant cell, a plant or a part thereof, as compared to a corresponding non-transformed wild type non-human organism or a part thereof; and
[70367] (b) growing the non-human organism or a part thereof under conditions which permit the production of glycerate or a composition comprising glycerate in said non-human organism or in the culture medium surrounding said non-human organism.

[70368] A further embodiment of the present invention relates to a process for the production of malate, which comprises
[70369] (a) increasing or generating the activity of a glutaredoxin non-targeted in a non-human organism or a part thereof, preferably a microorganism, a plant cell, a plant or a part thereof, as compared to a corresponding non-transformed wild type non-human organism or a part thereof; and
[70370] (b) growing the non-human organism or a part thereof under conditions which permit the production of malate or a composition comprising malate in said non-human organism or in the culture medium surrounding said non-human organism.

[70371] A further embodiment of the present invention relates to a process for the production of succinate, which comprises
[70372] (a) increasing or generating the activity of a glutaredoxin non-targeted in a non-human organism or a part thereof, preferably a microorganism, a plant cell, a plant or a part thereof, as compared to a corresponding non-transformed wild type non-human organism or a part thereof; and
[70373] (b) growing the non-human organism or a part thereof under conditions which permit the production of succinate or a composition comprising succinate in said non-human organism or in the culture medium surrounding said non-human organism.

[70374] A further embodiment of the present invention relates to a process for the production of glycerate, which comprises
[70375] (a) increasing or generating the activity of a thioredoxin non-targeted in a non-human organism or a part thereof, preferably a microorganism, a plant cell, a plant or a part thereof, as compared to a corresponding non-transformed wild type non-human organism or a part thereof; and
[70376] (b) growing the non-human organism or a part thereof under conditions which permit the production of glycerate or a composition comprising glycerate in said non-human organism or in the culture medium surrounding said non-human organism.

[70377] A further embodiment of the present invention relates to a process for the production of citramalate, which comprises
[70378] (a) increasing or generating the activity of a monothiol glutaredoxin non-targeted in a non-human organism or a part thereof, preferably a microorganism, a plant cell, a plant or a part thereof, as compared to a corresponding non-transformed wild type non-human organism or a part thereof; and
[70379] (b) growing the non-human organism or a part thereof under conditions which permit the production of citramalate or a composition comprising citramalate in said non-human organism or in the culture medium surrounding said non-human organism.

[70380] A further embodiment of the present invention relates to a process for the production of fumarate, which comprises
[70381] (a) increasing or generating the activity of a monothiol glutaredoxin non-targeted in a non-human organism or a part thereof, preferably a microorganism, a plant cell, a plant or a part thereof, as compared to a corresponding non-transformed wild type non-human organism or a part thereof; and
[70382] (b) growing the non-human organism or a part thereof under conditions which permit the production of fumarate or a composition comprising fumarate in said non-human organism or in the culture medium surrounding said non-human organism.

[70383] A further embodiment of the present invention relates to a process for the production of glycerate, which comprises
[70384] (a) increasing or generating the activity of a monothiol glutaredoxin non-targeted in a non-human organism or a part thereof, preferably a microorganism, a plant cell, a plant or a part thereof, as compared to a corresponding non-transformed wild type non-human organism or a part thereof; and
[70385] (b) growing the non-human organism or a part thereof under conditions which permit the production of glycerate or a composition comprising glycerate in said non-human organism or in the culture medium surrounding said non-human organism.

[70386] A further embodiment of the present invention relates to a process for the production of malate, which comprises
[70387] (a) increasing or generating the activity of a monothiol glutaredoxin non-targeted in a non-human organism or a part thereof, preferably a microorganism, a plant cell, a plant or a part thereof, as compared to a corresponding non-transformed wild type non-human organism or a part thereof; and
[70388] (b) growing the non-human organism or a part thereof under conditions which permit the production of malate or a composition comprising malate in said non-human organism or in the culture medium surrounding said non-human organism.

[70389] A further embodiment of the present invention relates to a process for the production of succinate, which comprises
[70390] (a) increasing or generating the activity of a monothiol glutaredoxin non-targeted in a non-human organism or a part thereof, preferably a microorganism, a plant cell, a plant or a part thereof, as compared to a corresponding non-transformed wild type non-human organism or a part thereof; and
[70391] (b) growing the non-human organism or a part thereof under conditions which permit the production of succinate or a composition comprising succinate in said non-human organism or in the culture medium surrounding said non-human organism.

[70392] A further embodiment of the present invention relates to a process for the production of vitamin c and/or threonic acid, which comprises
[70393] (a) increasing or generating the activity of a monothiol glutaredoxin non-targeted in a non-human organism or a part thereof, preferably a microorganism, a plant cell, a plant or a part thereof, as compared to a corresponding non-transformed wild type non-human organism or a part thereof; and
[70394] (b) growing the non-human organism or a part thereof under conditions which permit the production of vitamin c and/or threonic acid or a composition comprising vitamin c and/or threonic acid in said non-human organism or in the culture medium surrounding said non-human organism.

[70395] A further embodiment of the present invention relates to a process for the production of fumarate, which comprises
[70396] (a) increasing or generating the activity of a monothiol glutaredoxin non-targeted in a non-human organism or a part thereof, preferably a microorganism, a plant cell, a plant or a part thereof, as compared to a corresponding non-transformed wild type non-human organism or a part thereof; and
[70397] (b) growing the non-human organism or a part thereof under conditions which permit the production of fumarate or a composition comprising fumarate in said non-human organism or in the culture medium surrounding said non-human organism.

[70398] A further embodiment of the present invention relates to a process for the production of glycerate, which comprises
[70399] (a) increasing or generating the activity of a monothiol glutaredoxin non-targeted in a non-human organism or a part thereof, preferably a microorganism, a plant cell, a plant or a part thereof, as compared to a corresponding non-transformed wild type non-human organism or a part thereof; and
[70400] (b) growing the non-human organism or a part thereof under conditions which permit the production of glycerate or a composition comprising glycerate in said non-human organism or in the culture medium surrounding said non-human organism.

[70401] A further embodiment of the present invention relates to a process for the production of malate, which comprises
[70402] (a) increasing or generating the activity of a monothiol glutaredoxin non-targeted in a non-human organism or a part thereof, preferably a microorganism, a plant cell, a plant or a part thereof, as compared to a corresponding non-transformed wild type non-human organism or a part thereof; and
[70403] (b) growing the non-human organism or a part thereof under conditions which permit the production of malate or a composition comprising malate in said non-human organism or in the culture medium surrounding said non-human organism.

[70404] A further embodiment of the present invention relates to a process for the production of succinate, which comprises
[70405] (a) increasing or generating the activity of a monothiol glutaredoxin non-targeted in a non-human organism or a part thereof, preferably a microorganism, a plant cell, a plant or a part thereof, as compared to a corresponding non-transformed wild type non-human organism or a part thereof; and
[70406] (b) growing the non-human organism or a part thereof under conditions which permit the production of succinate or a composition comprising succinate in said non-human organism or in the culture medium surrounding said non-human organism.

[70407] A further embodiment of the present invention relates to a process for the production of citramalate, which comprises
[70408] (a) increasing or generating the activity of a monothiol glutaredoxin non-targeted in a non-human organism or a part thereof, preferably a microorganism, a plant cell, a plant or a part thereof, as compared to a corresponding non-transformed wild type non-human organism or a part thereof; and
[70409] (b) growing the non-human organism or a part thereof under conditions which permit the production of citramalate or a composition comprising citramalate in said non-human organism or in the culture medium surrounding said non-human organism.

[70410] A further embodiment of the present invention relates to a process for the production of fumarate, which comprises
[70411] (a) increasing or generating the activity of a monothiol glutaredoxin non-targeted in a non-human organism or a part thereof, preferably a microorganism, a plant cell, a plant or a part thereof, as compared to a corresponding non-transformed wild type non-human organism or a part thereof; and
[70412] (b) growing the non-human organism or a part thereof under conditions which permit the production of fumarate or a composition comprising fumarate in said non-human organism or in the culture medium surrounding said non-human organism.

[70413] A further embodiment of the present invention relates to a process for the production of malate, which comprises
[70414] (a) increasing or generating the activity of a monothiol glutaredoxin non-targeted in a non-human organism or a part thereof, preferably a microorganism, a plant cell, a plant or a part thereof, as compared to a corresponding non-transformed wild type non-human organism or a part thereof; and
[70415] (b) growing the non-human organism or a part thereof under conditions which permit the production of malate or a composition comprising malate in said non-human organism or in the culture medium surrounding said non-human organism.

[70416] A further embodiment of the present invention relates to a process for the production of succinate, which comprises
[70417] (a) increasing or generating the activity of a monothiol glutaredoxin non-targeted in a non-human organism or a part thereof, preferably a microorganism, a plant cell, a plant or a part thereof, as compared to a corresponding non-transformed wild type non-human organism or a part thereof; and
[70418] (b) growing the non-human organism or a part thereof under conditions which permit the production of succinate or a composition comprising succinate in said non-human organism or in the culture medium surrounding said non-human organism.

[70419] A further embodiment of the present invention relates to a process for the production of vitamin c and/or threonic acid, which comprises
[70420] (a) increasing or generating the activity of a monothiol glutaredoxin non-targeted in a non-human organism or a part thereof, preferably a microorganism, a plant cell, a plant or a part thereof, as compared to a corresponding non-transformed wild type non-human organism or a part thereof; and
[70421] (b) growing the non-human organism or a part thereof under conditions which permit the production of vitamin c and/or threonic acid or a composition comprising vitamin c and/or threonic acid in said non-human organism or in the culture medium surrounding said non-human organism.

[70422] A further embodiment of the present invention relates to a process for the production of glycerate, which comprises
[70423] (a) increasing or generating the activity of a monothiol glutaredoxin non-targeted in a non-human organism or a part thereof, preferably a microorganism, a plant cell, a plant or a part thereof, as compared to a corresponding non-transformed wild type non-human organism or a part thereof; and
[70424] (b) growing the non-human organism or a part thereof under conditions which permit the production of glycerate or a composition comprising glycerate in said non-human organism or in the culture medium surrounding said non-human organism.

[70425] A further embodiment of the present invention relates to a process for the production of citramalate, which comprises
[70426] (a) increasing or generating the activity of a protein phosphatase non-targeted in a non-human organism or a part thereof, preferably a microorganism, a plant cell, a plant or a part thereof, as compared to a corresponding non-transformed wild type non-human organism or a part thereof; and
[70427] (b) growing the non-human organism or a part thereof under conditions which permit the production of citramalate or a composition comprising citramalate in said non-human organism or in the culture medium surrounding said non-human organism.

[70428] A further embodiment of the present invention relates to a process for the production of succinate, which comprises
[70429] (a) increasing or generating the activity of a protein phosphatase non-targeted in a non-human organism or a part thereof, preferably a microorganism, a plant cell, a plant or a part thereof, as compared to a corresponding non-transformed wild type non-human organism or a part thereof; and
[70430] (b) growing the non-human organism or a part thereof under conditions which permit the production of succinate or a composition comprising succinate in said non-human organism or in the culture medium surrounding said non-human organism.

[70431] A further embodiment of the present invention relates to a process for the production of citramalate, which comprises
[70432] (a) increasing or generating the activity of a glutaredoxin non-targeted in a non-human organism or a part thereof, preferably a microorganism, a plant cell, a plant or a part thereof, as compared to a corresponding non-transformed wild type non-human organism or a part thereof; and
[70433] (b) growing the non-human organism or a part thereof under conditions which permit the production of citramalate or a composition comprising citramalate in said non-human organism or in the culture medium surrounding said non-human organism.

[70434] A further embodiment of the present invention relates to a process for the production of fumarate, which comprises
[70435] (a) increasing or generating the activity of a glutaredoxin non-targeted in a non-human organism or a part thereof, preferably a microorganism, a plant cell, a plant or a part thereof, as compared to a corresponding non-transformed wild type non-human organism or a part thereof; and
[70436] (b) growing the non-human organism or a part thereof under conditions which permit the production of fumarate or a composition comprising fumarate in said non-human organism or in the culture medium surrounding said non-human organism.

[70437] A further embodiment of the present invention relates to a process for the production of malate, which comprises
[70438] (a) increasing or generating the activity of a glutaredoxin non-targeted in a non-human organism or a part thereof, preferably a microorganism, a plant cell, a plant or a part thereof, as compared to a corresponding non-transformed wild type non-human organism or a part thereof; and
[70439] (b) growing the non-human organism or a part thereof under conditions which permit the production of malate or a composition comprising malate in said non-human organism or in the culture medium surrounding said non-human organism.

[70440] A further embodiment of the present invention relates to a process for the production of succinate, which comprises
[70441] (a) increasing or generating the activity of a glutaredoxin non-targeted in a non-human organism or a part thereof, preferably a microorganism, a plant cell, a plant or a part thereof, as compared to a corresponding non-transformed wild type non-human organism or a part thereof; and
[70442] (b) growing the non-human organism or a part thereof under conditions which permit the production of succinate or a composition comprising succinate in said non-human organism or in the culture medium surrounding said non-human organism.

[70443] A further embodiment of the present invention relates to a process for the production of vitamin c and/or threonic acid, which comprises
[70444] (a) increasing or generating the activity of a glutaredoxin non-targeted in a non-human organism or a part thereof, preferably a microorganism, a plant cell, a plant or a part thereof, as compared to a corresponding non-transformed wild type non-human organism or a part thereof; and
[70445] (b) growing the non-human organism or a part thereof under conditions which permit the production of vitamin c and/or threonic acid or a composition comprising vitamin c and/or threonic acid in said non-human organism or in the culture medium surrounding said non-human organism.

[70446] A further embodiment of the present invention relates to a process for the production of malate, which comprises
[70447] (a) increasing or generating the activity of a calcium-dependent protein kinase non-targeted in a non-human organism or a part thereof, preferably a microorganism, a plant cell, a plant or a part thereof, as compared to a corresponding non-transformed wild type non-human organism or a part thereof; and
[70448] (b) growing the non-human organism or a part thereof under conditions which permit the production of malate or a composition comprising malate in said non-human organism or in the culture medium surrounding said non-human organism.

[70449] A further embodiment of the present invention relates to a process for the production of fumarate, which comprises
[70450] (a) increasing or generating the activity of a heat shock transcription factor non-targeted in a non-human organism or a part thereof, preferably a microorganism, a plant cell, a plant or a part thereof, as compared to a corresponding non-transformed wild type non-human organism or a part thereof; and
[70451] (b) growing the non-human organism or a part thereof under conditions which permit the production of fumarate or a composition comprising fumarate in said non-human organism or in the culture medium surrounding said non-human organism.

[70452] A further embodiment of the present invention relates to a process for the production of malate, which comprises
[70453] (a) increasing or generating the activity of a heat shock transcription factor non-targeted in a non-human organism or a part thereof, preferably a microorganism, a plant cell, a plant or a part thereof, as compared to a corresponding non-transformed wild type non-human organism or a part thereof; and
[70454] (b) growing the non-human organism or a part thereof under conditions which permit the production of malate or a composition comprising malate in said non-human organism or in the culture medium surrounding said non-human organism.

[70455] A further embodiment of the present invention relates to a process for the production of succinate, which comprises
[70456] (a) increasing or generating the activity of a heat shock transcription factor non-targeted in a non-human organism or a part thereof, preferably a microorganism, a plant cell, a plant or a part thereof, as compared to a corresponding non-transformed wild type non-human organism or a part thereof; and
[70457] (b) growing the non-human organism or a part thereof under conditions which permit the production of succinate or a composition comprising succinate in said non-human organism or in the culture medium surrounding said non-human organism.

[70458] A further embodiment of the present invention relates to a process for the production of glycerate, which comprises
[70459] (a) increasing or generating the activity of a gibberellin 20-oxidase non-targeted in a non-human organism or a part thereof, preferably a microorganism, a plant cell, a plant or a part thereof, as compared to a corresponding non-transformed wild type non-human organism or a part thereof; and
[70460] (b) growing the non-human organism or a part thereof under conditions which permit the production of glycerate or a composition comprising glycerate in said non-human organism or in the culture medium surrounding said non-human organism.

[70461] A further embodiment of the present invention relates to a process for the production of malate, which comprises
[70462] (a) increasing or generating the activity of a gibberellin 20-oxidase non-targeted in a non-human organism or a part thereof, preferably a microorganism, a plant cell, a plant or a part thereof, as compared to a corresponding non-transformed wild type non-human organism or a part thereof; and
[70463] (b) growing the non-human organism or a part thereof under conditions which permit the production of malate or a composition comprising malate in said non-human organism or in the culture medium surrounding said non-human organism.

[70464] A further embodiment of the present invention relates to a process for the production of succinate, which comprises
[70465] (a) increasing or generating the activity of a monothiol glutaredoxin non-targeted in a non-human organism or a part thereof, preferably a microorganism, a plant cell, a plant or a part thereof, as compared to a corresponding non-transformed wild type non-human organism or a part thereof; and
[70466] (b) growing the non-human organism or a part thereof under conditions which permit the production of succinate or a composition comprising succinate in said non-human organism or in the culture medium surrounding said non-human organism.

[70467] A further embodiment of the present invention relates to a process for the production of malate, which comprises
[70468] (a) increasing or generating the activity of a translation initiation factor subunit non-targeted in a non-human organism or a part thereof, preferably a microorganism, a plant cell, a plant or a part thereof, as compared to a corresponding non-transformed wild type non-human organism or a part thereof; and
[70469] (b) growing the non-human organism or a part thereof under conditions which permit the production of malate or a composition comprising malate in said non-human organism or in the culture medium surrounding said non-human organism.

[70470] A further embodiment of the present invention relates to a process for the production of fumarate, which comprises
[70471] (a) increasing or generating the activity of a transcription factor non-targeted in a non-human organism or a part thereof, preferably a microorganism, a plant cell, a plant or a part thereof, as compared to a corresponding non-transformed wild type non-human organism or a part thereof; and
[70472] (b) growing the non-human organism or a part thereof under conditions which permit the production of fumarate or a composition comprising fumarate in said non-human organism or in the culture medium surrounding said non-human organism.

[70473] A further embodiment of the present invention relates to a process for the production of malate, which comprises
[70474] (a) increasing or generating the activity of a transcription factor non-targeted in a non-human organism or a part thereof, preferably a microorganism, a plant cell, a plant or a part thereof, as compared to a corresponding non-transformed wild type non-human organism or a part thereof; and
[70475] (b) growing the non-human organism or a part thereof under conditions which permit the production of malate or a composition comprising malate in said non-human organism or in the culture medium surrounding said non-human organism.

[70476] A further embodiment of the present invention relates to a process for the production of succinate, which comprises
[70477] (a) increasing or generating the activity of a protein phosphatase non-targeted in a non-human organism or a part thereof, preferably a microorganism, a plant cell, a plant or a part thereof, as compared to a corresponding non-transformed wild type non-human organism or a part thereof; and
[70478] (b) growing the non-human organism or a part thereof under conditions which permit the production of succinate or a composition comprising succinate in said non-human organism or in the culture medium surrounding said non-human organism.

[70479] A further embodiment of the present invention relates to a process for the production of succinate, which comprises
[70480] (a) increasing or generating the activity of a pyruvate kinase non-targeted in a non-human organism or a part thereof, preferably a microorganism, a plant cell, a plant or a part thereof, as compared to a corresponding non-transformed wild type non-human organism or a part thereof; and
[70481] (b) growing the non-human organism or a part thereof under conditions which permit the production of succinate or a composition comprising succinate in said non-human organism or in the culture medium surrounding said non-human organism.

[70482] A further embodiment of the present invention relates to a process for the production of fumarate, which comprises
[70483] (a) increasing or generating the activity of a zinc finger protein non-targeted in a non-human organism or a part thereof, preferably a microorganism, a plant cell, a plant or a part thereof, as compared to a corresponding non-transformed wild type non-human organism or a part thereof; and
[70484] (b) growing the non-human organism or a part thereof under conditions which permit the production of fumarate or a composition comprising fumarate in said non-human organism or in the culture medium surrounding said non-human organism.

[70485] A further embodiment of the present invention relates to a process for the production of citramalate, which comprises
[70486] (a) increasing or generating the activity of a CDP-diacylglycerol-serine O-phosphatidyltransferase non-targeted in a non-human organism or a part thereof, preferably a microorganism, a plant cell, a plant or a part thereof, as compared to a corresponding non-transformed wild type non-human organism or a part thereof; and
[70487] (b) growing the non-human organism or a part thereof under conditions which permit the production of citramalate or a composition comprising citramalate in said non-human organism or in the culture medium surrounding said non-human organism.

[70488] A further embodiment of the present invention relates to a process for the production of fumarate, which comprises
[70489] (a) increasing or generating the activity of a CDP-diacylglycerol-serine O-phosphatidyltransferase non-targeted in a non-human organism or a part thereof, preferably a microorganism, a plant cell, a plant or a part thereof, as compared to a corresponding non-transformed wild type non-human organism or a part thereof; and
[70490] (b) growing the non-human organism or a part thereof under conditions which permit the production of fumarate or a composition comprising fumarate in said non-human organism or in the culture medium surrounding said non-human organism.

[70491] A further embodiment of the present invention relates to a process for the production of malate, which comprises
[70492] (a) increasing or generating the activity of a CDP-diacylglycerol-serine O-phosphatidyltransferase non-targeted in a non-human organism or a part thereof, preferably a microorganism, a plant cell, a plant or a part thereof, as compared to a corresponding non-transformed wild type non-human organism or a part thereof; and
[70493] (b) growing the non-human organism or a part thereof under conditions which permit the production of malate or a composition comprising malate in said non-human organism or in the culture medium surrounding said non-human organism.

[70494] A further embodiment of the present invention relates to a process for the production of malate, which comprises
[70495] (a) increasing or generating the activity of a Glycine cleavage system T aminomethyltransferase non-targeted in a non-human organism or a part thereof, preferably a microorganism, a plant cell, a plant or a part thereof, as compared to a corresponding non-transformed wild type non-human organism or a part thereof; and
[70496] (b) growing the non-human organism or a part thereof under conditions which permit the production of malate or a composition comprising malate in said non-human organism or in the culture medium surrounding said non-human organism.

[70497] A further embodiment of the present invention relates to a process for the production of malate, which comprises
[70498] (a) increasing or generating the activity of a transcriptional regulator non-targeted in a non-human organism or a part thereof, preferably a microorganism, a plant cell, a plant or a part thereof, as compared to a corresponding non-transformed wild type non-human organism or a part thereof; and
[70499] (b) growing the non-human organism or a part thereof under conditions which permit the production of malate or a composition comprising malate in said non-human organism or in the culture medium surrounding said non-human organism.

[70500] A further embodiment of the present invention relates to a process for the production of malate, which comprises
[70501] (a) increasing or generating the activity of a adenylylsulfate kinase non-targeted in a non-human organism or a part thereof, preferably a microorganism, a plant cell, a plant or a part thereof, as compared to a corresponding non-transformed wild type non-human organism or a part thereof; and
[70502] (b) growing the non-human organism or a part thereof under conditions which permit the production of malate or a composition comprising malate in said non-human organism or in the culture medium surrounding said non-human organism.

[70503] A further embodiment of the present invention relates to a process for the production of succinate, which comprises
[70504] (a) increasing or generating the activity of a adenylylsulfate kinase non-targeted in a non-human organism or a part thereof, preferably a microorganism, a plant cell, a plant or a part thereof, as compared to a corresponding non-transformed wild type non-human organism or a part thereof; and
[70505] (b) growing the non-human organism or a part thereof under conditions which permit the production of succinate or a composition comprising succinate in said non-human organism or in the culture medium surrounding said non-human organism.

[70506] A further embodiment of the present invention relates to a process for the production of fumarate, which comprises
[70507] (a) increasing or generating the activity of a sec-independent protein translocase non-targeted in a non-human organism or a part thereof, preferably a microorganism, a plant cell, a plant or a part thereof, as compared to a corresponding non-transformed wild type non-human organism or a part thereof; and
[70508] (b) growing the non-human organism or a part thereof under conditions which permit the production of fumarate or a composition comprising fumarate in said non-human organism or in the culture medium surrounding said non-human organism.

[70509] A further embodiment of the present invention relates to a process for the production of malate, which comprises
[70510] (a) increasing or generating the activity of a sec-independent protein translocase non-targeted in a non-human organism or a part thereof, preferably a microorganism, a plant cell, a plant or a part thereof, as compared to a corresponding non-transformed wild type non-human organism or a part thereof; and
[70511] (b) growing the non-human organism or a part thereof under conditions which permit the production of malate or a composition comprising malate in said non-human organism or in the culture medium surrounding said non-human organism.

[70512] A further embodiment of the present invention relates to a process for the production of fumarate, which comprises
[70513] (a) increasing or generating the activity of a fumarate hydratase non-targeted in a non-human organism or a part thereof, preferably a microorganism, a plant cell, a plant or a part thereof, as compared to a corresponding non-transformed wild type non-human organism or a part thereof; and
[70514] (b) growing the non-human organism or a part thereof under conditions which permit the production of fumarate or a composition comprising fumarate in said non-human organism or in the culture medium surrounding said non-human organism.

[70515] A further embodiment of the present invention relates to a process for the production of succinate, which comprises
[70516] (a) increasing or generating the activity of a pyruvate kinase non-targeted in a non-human organism or a part thereof, preferably a microorganism, a plant cell, a plant or a part thereof, as compared to a corresponding non-transformed wild type non-human organism or a part thereof; and
[70517] (b) growing the non-human organism or a part thereof under conditions which permit the production of succinate or a composition comprising succinate in said non-human organism or in the culture medium surrounding said non-human organism.

[70518] A further embodiment of the present invention relates to a process for the production of succinate, which comprises
[70519] (a) increasing or generating the activity of a transcriptional regulator protein non-targeted in a non-human organism or a part thereof, preferably a microorganism, a plant cell, a plant or a part thereof, as compared to a corresponding non-transformed wild type non-human organism or a part thereof; and
[70520] (b) growing the non-human organism or a part thereof under conditions which permit the production of succinate or a composition comprising succinate in said non-human organism or in the culture medium surrounding said non-human organism.

[70521] A further embodiment of the present invention relates to a process for the production of glycerate, which comprises
[70522] (a) increasing or generating the activity of a beta-hydroxylase non-targeted in a non-human organism or a part thereof, preferably a microorganism, a plant cell, a plant or a part thereof, as compared to a corresponding non-transformed wild type non-human organism or a part thereof; and
[70523] (b) growing the non-human organism or a part thereof under conditions which permit the production of glycerate or a composition comprising glycerate in said non-human organism or in the culture medium surrounding said non-human organism.

[70524] A further embodiment of the present invention relates to a process for the production of succinate, which comprises
[70525] (a) increasing or generating the activity of a 30S ribosomal protein S3 non-targeted in a non-human organism or a part thereof, preferably a microorganism, a plant cell, a plant or a part thereof, as compared to a corresponding non-transformed wild type non-human organism or a part thereof; and
[70526] (b) growing the non-human organism or a part thereof under conditions which permit the production of succinate or a composition comprising succinate in said non-human organism or in the culture medium surrounding said non-human organism.

[70527] A further embodiment of the present invention relates to a process for the production of citramalate, which comprises
[70528] (a) increasing or generating the activity of a 50S ribosomal protein L14 non-targeted in a non-human organism or a part thereof, preferably a microorganism, a plant cell, a plant or a part thereof, as compared to a corresponding non-transformed wild type non-human organism or a part thereof; and
[70529] (b) growing the non-human organism or a part thereof under conditions which permit the production of citramalate or a composition comprising citramalate in said non-human organism or in the culture medium surrounding said non-human organism.

[70530] A further embodiment of the present invention relates to a process for the production of malate, which comprises
[70531] (a) increasing or generating the activity of a acyl-CoA synthase non-targeted in a non-human organism or a part thereof, preferably a microorganism, a plant cell, a plant or a part thereof, as compared to a corresponding non-transformed wild type non-human organism or a part thereof; and
[70532] (b) growing the non-human organism or a part thereof under conditions which permit the production of malate or a composition comprising malate in said non-human organism or in the culture medium surrounding said non-human organism.

[70533] A further embodiment of the present invention relates to a process for the production of citramalate, which comprises
[70534] (a) increasing or generating the activity of a 2-oxoglutarate dehydrogenase E1 subunit non-targeted in a non-human organism or a part thereof, preferably a microorganism, a plant cell, a plant or a part thereof, as compared to a corresponding non-transformed wild type non-human organism or a part thereof; and
[70535] (b) growing the non-human organism or a part thereof under conditions which permit the production of citramalate or a composition comprising citramalate in said non-human organism or in the culture medium surrounding said non-human organism.

[70536] A further embodiment of the present invention relates to a process for the production of fumarate, which comprises
[70537] (a) increasing or generating the activity of a 2-oxoglutarate dehydrogenase E1 subunit non-targeted in a non-human organism or a part thereof, preferably a microorganism, a plant cell, a plant or a part thereof, as compared to a corresponding non-transformed wild type non-human organism or a part thereof; and
[70538] (b) growing the non-human organism or a part thereof under conditions which permit the production of fumarate or a composition comprising fumarate in said non-human organism or in the culture medium surrounding said non-human organism.

[70539] A further embodiment of the present invention relates to a process for the production of malate, which comprises
[70540] (a) increasing or generating the activity of a 2-oxoglutarate dehydrogenase E1 subunit non-targeted in a non-human organism or a part thereof, preferably a microorganism, a plant cell, a plant or a part thereof, as compared to a corresponding non-transformed wild type non-human organism or a part thereof; and
[70541] (b) growing the non-human organism or a part thereof under conditions which permit the production of malate or a composition comprising malate in said non-human organism or in the culture medium surrounding said non-human organism.

[70542] A further embodiment of the present invention relates to a process for the production of succinate, which comprises
[70543] (a) increasing or generating the activity of a 2-oxoglutarate dehydrogenase E1 subunit non-targeted in a non-human organism or a part thereof, preferably a microorganism, a plant cell, a plant or a part thereof, as compared to a corresponding non-transformed wild type non-human organism or a part thereof; and
[70544] (b) growing the non-human organism or a part thereof under conditions which permit the production of succinate or a composition comprising succinate in said non-human organism or in the culture medium surrounding said non-human organism.

[70545] A further embodiment of the present invention relates to a process for the production of vitamin c and/or threonic acid, which comprises
[70546] (a) increasing or generating the activity of a 2-oxoglutarate dehydrogenase E1 subunit non-targeted in a non-human organism or a part thereof, preferably a microorganism, a plant cell, a plant or a part thereof, as compared to a corresponding non-transformed wild type non-human organism or a part thereof; and
[70547] (b) growing the non-human organism or a part thereof under conditions which permit the production of vitamin c and/or threonic acid or a composition comprising vitamin c and/or threonic acid in said non-human organism or in the culture medium surrounding said non-human organism.

[70548] A further embodiment of the present invention relates to a process for the production of citramalate, which comprises
[70549] (a) increasing or generating the activity of a transcriptional regulator non-targeted in a non-human organism or a part thereof, preferably a microorganism, a plant cell, a plant or a part thereof, as compared to a corresponding non-transformed wild type non-human organism or a part thereof; and
[70550] (b) growing the non-human organism or a part thereof under conditions which permit the production of citramalate or a composition comprising citramalate in said non-human organism or in the culture medium surrounding said non-human organism.

[70551] A further embodiment of the present invention relates to a process for the production of fumarate, which comprises
[70552] (a) increasing or generating the activity of a transcriptional regulator non-targeted in a non-human organism or a part thereof, preferably a microorganism, a plant cell, a plant or a part thereof, as compared to a corresponding non-transformed wild type non-human organism or a part thereof; and
[70553] (b) growing the non-human organism or a part thereof under conditions which permit the production of fumarate or a composition comprising fumarate in said non-human organism or in the culture medium surrounding said non-human organism.

[70554] A further embodiment of the present invention relates to a process for the production of succinate, which comprises
[70555] (a) increasing or generating the activity of a oxidoreductase non-targeted in a non-human organism or a part thereof, preferably a microorganism, a plant cell, a plant or a part thereof, as compared to a corresponding non-transformed wild type non-human organism or a part thereof; and
[70556] (b) growing the non-human organism or a part thereof under conditions which permit the production of succinate or a composition comprising succinate in said non-human organism or in the culture medium surrounding said non-human organism.

[70557] A further embodiment of the present invention relates to a process for the production of fumarate, which comprises
[70558] (a) increasing or generating the activity of a CTP synthase non-targeted in a non-human organism or a part thereof, preferably a microorganism, a plant cell, a plant or a part thereof, as compared to a corresponding non-transformed wild type non-human organism or a part thereof; and
[70559] (b) growing the non-human organism or a part thereof under conditions which permit the production of fumarate or a composition comprising fumarate in said non-human organism or in the culture medium surrounding said non-human organism.

[70560] A further embodiment of the present invention relates to a process for the production of malate, which comprises
[70561] (a) increasing or generating the activity of a CTP synthase non-targeted in a non-human organism or a part thereof, preferably a microorganism, a plant cell, a plant or a part thereof, as compared to a corresponding non-transformed wild type non-human organism or a part thereof; and
[70562] (b) growing the non-human organism or a part thereof under conditions which permit the production of malate or a composition comprising malate in said non-human organism or in the culture medium surrounding said non-human organism.

[70563] A further embodiment of the present invention relates to a process for the production of succinate, which comprises
[70564] (a) increasing or generating the activity of a CTP synthase non-targeted in a non-human organism or a part thereof, preferably a microorganism, a plant cell, a plant or a part thereof, as compared to a corresponding non-transformed wild type non-human organism or a part thereof; and
[70565] (b) growing the non-human organism or a part thereof under conditions which permit the production of succinate or a composition comprising succinate in said non-human organism or in the culture medium surrounding said non-human organism.

[70566] A further embodiment of the present invention relates to a process for the production of succinate, which comprises
[70567] (a) increasing or generating the activity of a recombinase A non-targeted in a non-human organism or a part thereof, preferably a microorganism, a plant cell, a plant or a part thereof, as compared to a corresponding non-transformed wild type non-human organism or a part thereof; and
[70568] (b) growing the non-human organism or a part thereof under conditions which permit the production of succinate or a composition comprising succinate in said non-human organism or in the culture medium surrounding said non-human organism.

[70569] A further embodiment of the present invention relates to a process for the production of malate, which comprises
[70570] (a) increasing or generating the activity of a glucose-1-phosphate cytidylyltransferase non-targeted in a non-human organism or a part thereof, preferably a microorganism, a plant cell, a plant or a part thereof, as compared to a corresponding non-transformed wild type non-human organism or a part thereof; and
[70571] (b) growing the non-human organism or a part thereof under conditions which permit the production of malate or a composition comprising malate in said non-human organism or in the culture medium surrounding said non-human organism.

[70572] A further embodiment of the present invention relates to a process for the production of fumarate, which comprises
[70573] (a) increasing or generating the activity of a CDP-glucose-4,6-dehydratase non-targeted in a non-human organism or a part thereof, preferably a microorganism, a plant cell, a plant or a part thereof, as compared to a corresponding non-transformed wild type non-human organism or a part thereof; and
[70574] (b) growing the non-human organism or a part thereof under conditions which permit the production of fumarate or a composition comprising fumarate in said non-human organism or in the culture medium surrounding said non-human organism.

[70575] A further embodiment of the present invention relates to a process for the production of malate, which comprises
[70576] (a) increasing or generating the activity of a CDP-glucose-4,6-dehydratase non-targeted in a non-human organism or a part thereof, preferably a microorganism, a plant cell, a plant or a part thereof, as compared to a corresponding non-transformed wild type non-human organism or a part thereof; and
[70577] (b) growing the non-human organism or a part thereof under conditions which permit the production of malate or a composition comprising malate in said non-human organism or in the culture medium surrounding said non-human organism.

[70578] A further embodiment of the present invention relates to a process for the production of malate, which comprises
[70579] (a) increasing or generating the activity of a aminotransferase non-targeted in a non-human organism or a part thereof, preferably a microorganism, a plant cell, a plant or a part thereof, as compared to a corresponding non-transformed wild type non-human organism or a part thereof; and
[70580] (b) growing the non-human organism or a part thereof under conditions which permit the production of malate or a composition comprising malate in said non-human organism or in the culture medium surrounding said non-human organism.

[70581] A further embodiment of the present invention relates to a process for the production of succinate, which comprises
[70582] (a) increasing or generating the activity of a isocitrate lyase non-targeted in a non-human organism or a part thereof, preferably a microorganism, a plant cell, a plant or a part thereof, as compared to a corresponding non-transformed wild type non-human organism or a part thereof; and
[70583] (b) growing the non-human organism or a part thereof under conditions which permit the production of succinate or a composition comprising succinate in said non-human organism or in the culture medium surrounding said non-human organism.

[70584] A further embodiment of the present invention relates to a process for the production of fumarate, which comprises
[70585] (a) increasing or generating the activity of a NADH-quinone oxidoreductase subunit non-targeted in a non-human organism or a part thereof, preferably a microorganism, a plant cell, a plant or a part thereof, as compared to a corresponding non-transformed wild type non-human organism or a part thereof; and
[70586] (b) growing the non-human organism or a part thereof under conditions which permit the production of fumarate or a composition comprising fumarate in said non-human organism or in the culture medium surrounding said non-human organism.

[70587] A further embodiment of the present invention relates to a process for the production of malate, which comprises
[70588] (a) increasing or generating the activity of a NADH-quinone oxidoreductase subunit non-targeted in a non-human organism or a part thereof, preferably a microorganism, a plant cell, a plant or a part thereof, as compared to a corresponding non-transformed wild type non-human organism or a part thereof; and
[70589] (b) growing the non-human organism or a part thereof under conditions which permit the production of malate or a composition comprising malate in said non-human organism or in the culture medium surrounding said non-human organism.

[70590] A further embodiment of the present invention relates to a process for the production of malate, which comprises
[70591] (a) increasing or generating the activity of a RNA polymerase sigma factor non-targeted in a non-human organism or a part thereof, preferably a microorganism, a plant cell, a plant or a part thereof, as compared to a corresponding non-transformed wild type non-human organism or a part thereof; and
[70592] (b) growing the non-human organism or a part thereof under conditions which permit the production of malate or a composition comprising malate in said non-human organism or in the culture medium surrounding said non-human organism.

[70593] A further embodiment of the present invention relates to a process for the production of malate, which comprises
[70594] (a) increasing or generating the activity of a hydrolase non-targeted in a non-human organism or a part thereof, preferably a microorganism, a plant cell, a plant or a part thereof, as compared to a corresponding non-transformed wild type non-human organism or a part thereof; and
[70595] (b) growing the non-human organism or a part thereof under conditions which permit the production of malate or a composition comprising malate in said non-human organism or in the culture medium surrounding said non-human organism.

[70596] A further embodiment of the present invention relates to a process for the production of malate, which comprises
[70597] (a) increasing or generating the activity of a glutamate-ammonia-ligase non-targeted in a non-human organism or a part thereof, preferably a microorganism, a plant cell, a plant or a part thereof, as compared to a corresponding non-transformed wild type non-human organism or a part thereof; and
[70598] (b) growing the non-human organism or a part thereof under conditions which permit the production of malate or a composition comprising malate in said non-human organism or in the culture medium surrounding said non-human organism.

[70599] A further embodiment of the present invention relates to a process for the production of succinate, which comprises
[70600] (a) increasing or generating the activity of a electron transfer flavoprotein subunit beta non-targeted in a non-human organism or a part thereof, preferably a microorganism, a plant cell, a plant or a part thereof, as compared to a corresponding non-transformed wild type non-human organism or a part thereof; and
[70601] (b) growing the non-human organism or a part thereof under conditions which permit the production of succinate or a composition comprising succinate in said non-human organism or in the culture medium surrounding said non-human organism.

[70602] A further embodiment of the present invention relates to a process for the production of fumarate, which comprises
[70603] (a) increasing or generating the activity of a AX653549-protein non-targeted in a non-human organism or a part thereof, preferably a microorganism, a plant cell, a plant or a part thereof, as compared to a corresponding non-transformed wild type non-human organism or a part thereof; and
[70604] (b) growing the non-human organism or a part thereof under conditions which permit the production of fumarate or a composition comprising fumarate in said non-human organism or in the culture medium surrounding said non-human organism.

[70605] A further embodiment of the present invention relates to a process for the production of malate, which comprises
[70606] (a) increasing or generating the activity of a AX653549-protein non-targeted in a non-human organism or a part thereof, preferably a microorganism, a plant cell, a plant or a part thereof, as compared to a corresponding non-transformed wild type non-human organism or a part thereof; and
[70607] (b) growing the non-human organism or a part thereof under conditions which permit the production of malate or a composition comprising malate in said non-human organism or in the culture medium surrounding said non-human organism.

[70608] A further embodiment of the present invention relates to a process for the production of fumarate, which comprises
[70609] (a) increasing or generating the activity of a AY087308-protein non-targeted in a non-human organism or a part thereof, preferably a microorganism, a plant cell, a plant or a part thereof, as compared to a corresponding non-transformed wild type non-human organism or a part thereof; and
[70610] (b) growing the non-human organism or a part thereof under conditions which permit the production of fumarate or a composition comprising fumarate in said non-human organism or in the culture medium surrounding said non-human organism.

[70611] A further embodiment of the present invention relates to a process for the production of malate, which comprises
[70612] (a) increasing or generating the activity of a AY087308-protein non-targeted in a non-human organism or a part thereof, preferably a microorganism, a plant cell, a plant or a part thereof, as compared to a corresponding non-transformed wild type non-human organism or a part thereof; and
[70613] (b) growing the non-human organism or a part thereof under conditions which permit the production of malate or a composition comprising malate in said non-human organism or in the culture medium surrounding said non-human organism.

[70614] A further embodiment of the present invention relates to a process for the production of succinate, which comprises
[70615] (a) increasing or generating the activity of a AY087308-protein non-targeted in a non-human organism or a part thereof, preferably a microorganism, a plant cell, a plant or a part thereof, as compared to a corresponding non-transformed wild type non-human organism or a part thereof; and
[70616] (b) growing the non-human organism or a part thereof under conditions which permit the production of succinate or a composition comprising succinate in said non-human organism or in the culture medium surrounding said non-human organism.

[70617] A further embodiment of the present invention relates to a process for the production of fumarate, which comprises
[70618] (a) increasing or generating the activity of a fumarate hydratase non-targeted in a non-human organism or a part thereof, preferably a microorganism, a plant cell, a plant or a part thereof, as compared to a corresponding non-transformed wild type non-human organism or a part thereof; and
[70619] (b) growing the non-human organism or a part thereof under conditions which permit the production of fumarate or a composition comprising fumarate in said non-human organism or in the culture medium surrounding said non-human organism.

[70620] A further embodiment of the present invention relates to a process for the production of malate, which comprises
[70621] (a) increasing or generating the activity of a threonine synthase non-targeted in a non-human organism or a part thereof, preferably a microorganism, a plant cell, a plant or a part thereof, as compared to a corresponding non-transformed wild type non-human organism or a part thereof; and
[70622] (b) growing the non-human organism or a part thereof under conditions which permit the production of malate or a composition comprising malate in said non-human organism or in the culture medium surrounding said non-human organism.

[70623] A further embodiment of the present invention relates to a process for the production of fumarate, which comprises
[70624] (a) increasing or generating the activity of a ribulokinase non-targeted in a non-human organism or a part thereof, preferably a microorganism, a plant cell, a plant or a part thereof, as compared to a corresponding non-transformed wild type non-human organism or a part thereof; and
[70625] (b) growing the non-human organism or a part thereof under conditions which permit the production of fumarate or a composition comprising fumarate in said non-human organism or in the culture medium surrounding said non-human organism.

[70626] A further embodiment of the present invention relates to a process for the production of succinate, which comprises
[70627] (a) increasing or generating the activity of a ribulokinase non-targeted in a non-human organism or a part thereof, preferably a microorganism, a plant cell, a plant or a part thereof, as compared to a corresponding non-transformed wild type non-human organism or a part thereof; and
[70628] (b) growing the non-human organism or a part thereof under conditions which permit the production of succinate or a composition comprising succinate in said non-human organism or in the culture medium surrounding said non-human organism.

[70629] A further embodiment of the present invention relates to a process for the production of citrate, which comprises
[70630] (a) increasing or generating the activity of a glucose dehydrogenase non-targeted in a non-human organism or a part thereof, preferably a microorganism, a plant cell, a plant or a part thereof, as compared to a corresponding non-transformed wild type non-human organism or a part thereof; and
[70631] (b) growing the non-human organism or a part thereof under conditions which permit the production of citrate or a composition comprising citrate in said non-human organism or in the culture medium surrounding said non-human organism.

[70632] A further embodiment of the present invention relates to a process for the production of fumarate, which comprises
[70633] (a) increasing or generating the activity of a acyl-CoA dehydrogenase non-targeted in a non-human organism or a part thereof, preferably a microorganism, a plant cell, a plant or a part thereof, as compared to a corresponding non-transformed wild type non-human organism or a part thereof; and
[70634] (b) growing the non-human organism or a part thereof under conditions which permit the production of fumarate or a composition comprising fumarate in said non-human organism or in the culture medium surrounding said non-human organism.

[70635] A further embodiment of the present invention relates to a process for the production of citrate, which comprises
[70636] (a) increasing or generating the activity of a betaine aldehyde dehydrogenase non-targeted in a non-human organism or a part thereof, preferably a microorganism, a plant cell, a plant or a part thereof, as compared to a corresponding non-transformed wild type non-human organism or a part thereof; and
[70637] (b) growing the non-human organism or a part thereof under conditions which permit the production of citrate or a composition comprising citrate in said non-human organism or in the culture medium surrounding said non-human organism.

[70638] A further embodiment of the present invention relates to a process for the production of malate, which comprises
[70639] (a) increasing or generating the activity of a ATP-binding component of a transport system non-targeted in a non-human organism or a part thereof, preferably a microorganism, a plant cell, a plant or a part thereof, as compared to a corresponding non-transformed wild type non-human organism or a part thereof; and
[70640] (b) growing the non-human organism or a part thereof under conditions which permit the production of malate or a composition comprising malate in said non-human organism or in the culture medium surrounding said non-human organism.

[70641] A further embodiment of the present invention relates to a process for the production of malate, which comprises
[70642] (a) increasing or generating the activity of a membrane transport protein non-targeted in a non-human organism or a part thereof, preferably a microorganism, a plant cell, a plant or a part thereof, as compared to a corresponding non-transformed wild type non-human organism or a part thereof; and
[70643] (b) growing the non-human organism or a part thereof under conditions which permit the production of malate or a composition comprising malate in said non-human organism or in the culture medium surrounding said non-human organism.

[70644] A further embodiment of the present invention relates to a process for the production of succinate, which comprises
[70645] (a) increasing or generating the activity of a membrane transport protein non-targeted in a non-human organism or a part thereof, preferably a microorganism, a plant cell, a plant or a part thereof, as compared to a corresponding non-transformed wild type non-human organism or a part thereof; and
[70646] (b) growing the non-human organism or a part thereof under conditions which permit the production of succinate or a composition comprising succinate in said non-human organism or in the culture medium surrounding said non-human organism.

[70647] A further embodiment of the present invention relates to a process for the production of citrate, which comprises
[70648] (a) increasing or generating the activity of a glycerate kinase non-targeted in a non-human organism or a part thereof, preferably a microorganism, a plant cell, a plant or a part thereof, as compared to a corresponding non-transformed wild type non-human organism or a part thereof; and
[70649] (b) growing the non-human organism or a part thereof under conditions which permit the production of citrate or a composition comprising citrate in said non-human organism or in the culture medium surrounding said non-human organism.

[70650] A further embodiment of the present invention relates to a process for the production of fumarate, which comprises
[70651] (a) increasing or generating the activity of a isochorismate synthase non-targeted in a non-human organism or a part thereof, preferably a microorganism, a plant cell, a plant or a part thereof, as compared to a corresponding non-transformed wild type non-human organism or a part thereof; and
[70652] (b) growing the non-human organism or a part thereof under conditions which permit the production of fumarate or a composition comprising fumarate in said non-human organism or in the culture medium surrounding said non-human organism.

[70653] A further embodiment of the present invention relates to a process for the production of malate, which comprises
[70654] (a) increasing or generating the activity of a isochorismate synthase non-targeted in a non-human organism or a part thereof, preferably a microorganism, a plant cell, a plant or a part thereof, as compared to a corresponding non-transformed wild type non-human organism or a part thereof; and
[70655] (b) growing the non-human organism or a part thereof under conditions which permit the production of malate or a composition comprising malate in said non-human organism or in the culture medium surrounding said non-human organism.

[70656] A further embodiment of the present invention relates to a process for the production of fumarate, which comprises
[70657] (a) increasing or generating the activity of a zinc transporter non-targeted in a non-human organism or a part thereof, preferably a microorganism, a plant cell, a plant or a part thereof, as compared to a corresponding non-transformed wild type non-human organism or a part thereof; and
[70658] (b) growing the non-human organism or a part thereof under conditions which permit the production of fumarate or a composition comprising fumarate in said non-human organism or in the culture medium surrounding said non-human organism.

[70659] A further embodiment of the present invention relates to a process for the production of succinate, which comprises
[70660] (a) increasing or generating the activity of a b0801-protein non-targeted in a non-human organism or a part thereof, preferably a microorganism, a plant cell, a plant or a part thereof, as compared to a corresponding non-transformed wild type non-human organism or a part thereof; and
[70661] (b) growing the non-human organism or a part thereof under conditions which permit the production of succinate or a composition comprising succinate in said non-human organism or in the culture medium surrounding said non-human organism.

[70662] A further embodiment of the present invention relates to a process for the production of malate, which comprises
[70663] (a) increasing or generating the activity of a leucyl/phenylalanyl-tRNA-protein transferase non-targeted in a non-human organism or a part thereof, preferably a microorganism, a plant cell, a plant or a part thereof, as compared to a corresponding non-transformed wild type non-human organism or a part thereof; and
[70664] (b) growing the non-human organism or a part thereof under conditions which permit the production of malate or a composition comprising malate in said non-human organism or in the culture medium surrounding said non-human organism.

[70665] A further embodiment of the present invention relates to a process for the production of vitamin c and/or threonic acid, which comprises
[70666] (a) increasing or generating the activity of a methylglyoxal synthase non-targeted in a non-human organism or a part thereof, preferably a microorganism, a plant cell, a plant or a part thereof, as compared to a corresponding non-transformed wild type non-human organism or a part thereof; and
[70667] (b) growing the non-human organism or a part thereof under conditions which permit the production of vitamin c and/or threonic acid or a composition comprising vitamin c and/or threonic acid in said non-human organism or in the culture medium surrounding said non-human organism.

[70668] A further embodiment of the present invention relates to a process for the production of malate, which comprises
[70669] (a) increasing or generating the activity of a b1003-protein non-targeted in a non-human organism or a part thereof, preferably a microorganism, a plant cell, a plant or a part thereof, as compared to a corresponding non-transformed wild type non-human organism or a part thereof; and
[70670] (b) growing the non-human organism or a part thereof under conditions which permit the production of malate or a composition comprising malate in said non-human organism or in the culture medium surrounding said non-human organism.

[70671] A further embodiment of the present invention relates to a process for the production of malate, which comprises
[70672] (a) increasing or generating the activity of a membrane protein non-targeted in a non-human organism or a part thereof, preferably a microorganism, a plant cell, a plant or a part thereof, as compared to a corresponding non-transformed wild type non-human organism or a part thereof; and
[70673] (b) growing the non-human organism or a part thereof under conditions which permit the production of malate or a composition comprising malate in said non-human organism or in the culture medium surrounding said non-human organism.

[70674] A further embodiment of the present invention relates to a process for the production of succinate, which comprises
[70675] (a) increasing or generating the activity of a b1285-protein non-targeted in a non-human organism or a part thereof, preferably a microorganism, a plant cell, a plant or a part thereof, as compared to a corresponding non-transformed wild type non-human organism or a part thereof; and
[70676] (b) growing the non-human organism or a part thereof under conditions which permit the production of succinate or a composition comprising succinate in said non-human organism or in the culture medium surrounding said non-human organism.

[70677] A further embodiment of the present invention relates to a process for the production of malate, which comprises
[70678] (a) increasing or generating the activity of a phenylacetic acid degradation protein non-targeted in a non-human organism or a part thereof, preferably a microorganism, a plant cell, a plant or a part thereof, as compared to a corresponding non-transformed wild type non-human organism or a part thereof; and
[70679] (b) growing the non-human organism or a part thereof under conditions which permit the production of malate or a composition comprising malate in said non-human organism or in the culture medium surrounding said non-human organism.

[70680] A further embodiment of the present invention relates to a process for the production of malate, which comprises
[70681] (a) increasing or generating the activity of a b1425-protein non-targeted in a non-human organism or a part thereof, preferably a microorganism, a plant cell, a plant or a part thereof, as compared to a corresponding non-transformed wild type non-human organism or a part thereof; and
[70682] (b) growing the non-human organism or a part thereof under conditions which permit the production of malate or a composition comprising malate in said non-human organism or in the culture medium surrounding said non-human organism.

[70683] A further embodiment of the present invention relates to a process for the production of succinate, which comprises
[70684] (a) increasing or generating the activity of a lipoprotein precursor non-targeted in a non-human organism or a part thereof, preferably a microorganism, a plant cell, a plant or a part thereof, as compared to a corresponding non-transformed wild type non-human organism or a part thereof; and
[70685] (b) growing the non-human organism or a part thereof under conditions which permit the production of succinate or a composition comprising succinate in said non-human organism or in the culture medium surrounding said non-human organism.

[70686] A further embodiment of the present invention relates to a process for the production of citramalate, which comprises
[70687] (a) increasing or generating the activity of a b1445-protein non-targeted in a non-human organism or a part thereof, preferably a microorganism, a plant cell, a plant or a part thereof, as compared to a corresponding non-transformed wild type non-human organism or a part thereof; and
[70688] (b) growing the non-human organism or a part thereof under conditions which permit the production of citramalate or a composition comprising citramalate in said non-human organism or in the culture medium surrounding said non-human organism.

[70689] A further embodiment of the present invention relates to a process for the production of citramalate, which comprises
[70690] (a) increasing or generating the activity of a b1522-protein non-targeted in a non-human organism or a part thereof, preferably a microorganism, a plant cell, a plant or a part thereof, as compared to a corresponding non-transformed wild type non-human organism or a part thereof; and
[70691] (b) growing the non-human organism or a part thereof under conditions which permit the production of citramalate or a composition comprising citramalate in said non-human organism or in the culture medium surrounding said non-human organism.

[70692] A further embodiment of the present invention relates to a process for the production of malate, which comprises
[70693] (a) increasing or generating the activity of a b1522-protein non-targeted in a non-human organism or a part thereof, preferably a microorganism, a plant cell, a plant or a part thereof, as compared to a corresponding non-transformed wild type non-human organism or a part thereof; and
[70694] (b) growing the non-human organism or a part thereof under conditions which permit the production of malate or a composition comprising malate in said non-human organism or in the culture medium surrounding said non-human organism.

[70695] A further embodiment of the present invention relates to a process for the production of fumarate, which comprises
[70696] (a) increasing or generating the activity of a Fe—S subunit of oxidoreductase non-targeted in a non-human organism or a part thereof, preferably a microorganism, a plant cell, a plant or a part thereof, as compared to a corresponding non-transformed wild type non-human organism or a part thereof; and
[70697] (b) growing the non-human organism or a part thereof under conditions which permit the production of fumarate or a composition comprising fumarate in said non-human organism or in the culture medium surrounding said non-human organism.

[70698] A further embodiment of the present invention relates to a process for the production of fumarate, which comprises
[70699] (a) increasing or generating the activity of a fumarate hydratase non-targeted in a non-human organism or a part thereof, preferably a microorganism, a plant cell, a plant or a part thereof, as compared to a corresponding non-transformed wild type non-human organism or a part thereof; and
[70700] (b) growing the non-human organism or a part thereof under conditions which permit the production of fumarate or a composition comprising fumarate in said non-human organism or in the culture medium surrounding said non-human organism.

[70701] A further embodiment of the present invention relates to a process for the production of succinate, which comprises
[70702] (a) increasing or generating the activity of a electron transport complex protein non-targeted in a non-human organism or a part thereof, preferably a microorganism, a plant cell, a plant or a part thereof, as compared to a corresponding non-transformed wild type non-human organism or a part thereof; and
[70703] (b) growing the non-human organism or a part thereof under conditions which permit the production of succinate or a composition comprising succinate in said non-human organism or in the culture medium surrounding said non-human organism.

[70704] A further embodiment of the present invention relates to a process for the production of succinate, which comprises
[70705] (a) increasing or generating the activity of a methylglyoxalase non-targeted in a non-human organism or a part thereof, preferably a microorganism, a plant cell, a plant or a part thereof, as compared to a corresponding non-transformed wild type non-human organism or a part thereof; and
[70706] (b) growing the non-human organism or a part thereof under conditions which permit the production of succinate or a composition comprising succinate in said non-human organism or in the culture medium surrounding said non-human organism.

[70707] A further embodiment of the present invention relates to a process for the production of citramalate, which comprises
[70708] (a) increasing or generating the activity of a b1670-protein non-targeted in a non-human organism or a part thereof, preferably a microorganism, a plant cell, a plant or a part thereof, as compared to a corresponding non-transformed wild type non-human organism or a part thereof; and
[70709] (b) growing the non-human organism or a part thereof under conditions which permit the production of citramalate or a composition comprising citramalate in said non-human organism or in the culture medium surrounding said non-human organism.

[70710] A further embodiment of the present invention relates to a process for the production of malate, which comprises
[70711] (a) increasing or generating the activity of a b1670-protein non-targeted in a non-human organism or a part thereof, preferably a microorganism, a plant cell, a plant or a part thereof, as compared to a corresponding non-transformed wild type non-human organism or a part thereof; and
[70712] (b) growing the non-human organism or a part thereof under conditions which permit the production of malate or a composition comprising malate in said non-human organism or in the culture medium surrounding said non-human organism.

[70713] A further embodiment of the present invention relates to a process for the production of citramalate, which comprises
[70714] (a) increasing or generating the activity of a b1672-protein non-targeted in a non-human organism or a part thereof, preferably a microorganism, a plant cell, a plant or a part thereof, as compared to a corresponding non-transformed wild type non-human organism or a part thereof; and
[70715] (b) growing the non-human organism or a part thereof under conditions which permit the production of citramalate or a composition comprising citramalate in said non-human organism or in the culture medium surrounding said non-human organism.

[70716] A further embodiment of the present invention relates to a process for the production of malate, which comprises
[70717] (a) increasing or generating the activity of a b1672-protein non-targeted in a non-human organism or a part thereof, preferably a microorganism, a plant cell, a plant or a part thereof, as compared to a corresponding non-transformed wild type non-human organism or a part thereof; and
[70718] (b) growing the non-human organism or a part thereof under conditions which permit the production of malate or a composition comprising malate in said non-human organism or in the culture medium surrounding said non-human organism.

[70719] A further embodiment of the present invention relates to a process for the production of vitamin c and/or threonic acid, which comprises
[70720] (a) increasing or generating the activity of a b1672-protein non-targeted in a non-human organism or a part thereof, preferably a microorganism, a plant cell, a plant or a part thereof, as compared to a corresponding non-transformed wild type non-human organism or a part thereof; and
[70721] (b) growing the non-human organism or a part thereof under conditions which permit the production of vitamin c and/or threonic acid or a composition comprising vitamin c and/or threonic acid in said non-human organism or in the culture medium surrounding said non-human organism.

[70722] A further embodiment of the present invention relates to a process for the production of malate, which comprises
[70723] (a) increasing or generating the activity of a b1742-protein non-targeted in a non-human organism or a part thereof, preferably a microorganism, a plant cell, a plant or a part thereof, as compared to a corresponding non-transformed wild type non-human organism or a part thereof; and
[70724] (b) growing the non-human organism or a part thereof under conditions which permit the production of malate or a composition comprising malate in said non-human organism or in the culture medium surrounding said non-human organism.

[70725] A further embodiment of the present invention relates to a process for the production of succinate, which comprises
[70726] (a) increasing or generating the activity of a b1742-protein non-targeted in a non-human organism or a part thereof, preferably a microorganism, a plant cell, a plant or a part thereof, as compared to a corresponding non-transformed wild type non-human organism or a part thereof; and
[70727] (b) growing the non-human organism or a part thereof under conditions which permit the production of succinate or a composition comprising succinate in said non-human organism or in the culture medium surrounding said non-human organism.

[70728] A further embodiment of the present invention relates to a process for the production of succinate, which comprises
[70729] (a) increasing or generating the activity of a arginine N-succinyltransferase non-targeted in a non-human organism or a part thereof, preferably a microorganism, a plant cell, a plant or a part thereof, as compared to a corresponding non-transformed wild type non-human organism or a part thereof; and
[70730] (b) growing the non-human organism or a part thereof under conditions which permit the production of succinate or a composition comprising succinate in said non-human organism or in the culture medium surrounding said non-human organism.

[70731] A further embodiment of the present invention relates to a process for the production of vitamin c and/or threonic acid, which comprises
[70732] (a) increasing or generating the activity of a ABC transporter permease protein non-targeted in a non-human organism or a part thereof, preferably a microorganism, a plant cell, a plant or a part thereof, as compared to a corresponding non-transformed wild type non-human organism or a part thereof; and
[70733] (b) growing the non-human organism or a part thereof under conditions which permit the production of vitamin c and/or threonic acid or a composition comprising vitamin c and/or threonic acid in said non-human organism or in the culture medium surrounding said non-human organism.

[70734] A further embodiment of the present invention relates to a process for the production of malate, which comprises
[70735] (a) increasing or generating the activity of a protease non-targeted in a non-human organism or a part thereof, preferably a microorganism, a plant cell, a plant or a part thereof, as compared to a corresponding non-transformed wild type non-human organism or a part thereof; and
[70736] (b) growing the non-human organism or a part thereof under conditions which permit the production of malate or a composition comprising malate in said non-human organism or in the culture medium surrounding said non-human organism.

[70737] A further embodiment of the present invention relates to a process for the production of vitamin c and/or threonic acid, which comprises
[70738] (a) increasing or generating the activity of a dATP pyrophosphohydrolase non-targeted in a non-human organism or a part thereof, preferably a microorganism, a plant cell, a plant or a part thereof, as compared to a corresponding non-transformed wild type non-human organism or a part thereof; and
[70739] (b) growing the non-human organism or a part thereof under conditions which permit the production of vitamin c and/or threonic acid or a composition comprising vitamin c and/or threonic acid in said non-human organism or in the culture medium surrounding said non-human organism.

[70740] A further embodiment of the present invention relates to a process for the production of succinate, which comprises
[70741] (a) increasing or generating the activity of a b1898-protein non-targeted in a non-human organism or a part thereof, preferably a microorganism, a plant cell, a plant or a part thereof, as compared to a corresponding non-transformed wild type non-human organism or a part thereof; and
[70742] (b) growing the non-human organism or a part thereof under conditions which permit the production of succinate or a composition comprising succinate in said non-human organism or in the culture medium surrounding said non-human organism.

[70743] A further embodiment of the present invention relates to a process for the production of fumarate, which comprises
[70744] (a) increasing or generating the activity of a flagellar M-ring protein non-targeted in a non-human organism or a part thereof, preferably a microorganism, a plant cell, a plant or a part thereof, as compared to a corresponding non-transformed wild type non-human organism or a part thereof; and
[70745] (b) growing the non-human organism or a part thereof under conditions which permit the production of fumarate or a composition comprising fumarate in said non-human organism or in the culture medium surrounding said non-human organism.

[70746] A further embodiment of the present invention relates to a process for the production of malate, which comprises
[70747] (a) increasing or generating the activity of a flagellar M-ring protein non-targeted in a non-human organism or a part thereof, preferably a microorganism, a plant cell, a plant or a part thereof, as compared to a corresponding non-transformed wild type non-human organism or a part thereof; and
[70748] (b) growing the non-human organism or a part thereof under conditions which permit the production of malate or a composition comprising malate in said non-human organism or in the culture medium surrounding said non-human organism.

[70749] A further embodiment of the present invention relates to a process for the production of succinate, which comprises
[70750] (a) increasing or generating the activity of a flagellar M-ring protein non-targeted in a non-human organism or a part thereof, preferably a microorganism, a plant cell, a plant or a part thereof, as compared to a corresponding non-transformed wild type non-human organism or a part thereof; and
[70751] (b) growing the non-human organism or a part thereof under conditions which permit the production of succinate or a composition comprising succinate in said non-human organism or in the culture medium surrounding said non-human organism.

[70752] A further embodiment of the present invention relates to a process for the production of malate, which comprises
[70753] (a) increasing or generating the activity of a O-antigen chain length determinant non-targeted in a non-human organism or a part thereof, preferably a microorganism, a plant cell, a plant or a part thereof, as compared to a corresponding non-transformed wild type non-human organism or a part thereof; and
[70754] (b) growing the non-human organism or a part thereof under conditions which permit the production of malate or a composition comprising malate in said non-human organism or in the culture medium surrounding said non-human organism.

[70755] A further embodiment of the present invention relates to a process for the production of fumarate, which comprises
[70756] (a) increasing or generating the activity of a b2399-protein non-targeted in a non-human organism or a part thereof, preferably a microorganism, a plant cell, a plant or a part thereof, as compared to a corresponding non-transformed wild type non-human organism or a part thereof; and
[70757] (b) growing the non-human organism or a part thereof under conditions which permit the production of fumarate or a composition comprising fumarate in said non-human organism or in the culture medium surrounding said non-human organism.

[70758] A further embodiment of the present invention relates to a process for the production of succinate, which comprises
[70759] (a) increasing or generating the activity of a b2399-protein non-targeted in a non-human organism or a part thereof, preferably a microorganism, a plant cell, a plant or a part thereof, as compared to a corresponding non-transformed wild type non-human organism or a part thereof; and
[70760] (b) growing the non-human organism or a part thereof under conditions which permit the production of succinate or a composition comprising succinate in said non-human organism or in the culture medium surrounding said non-human organism.

[70761] A further embodiment of the present invention relates to a process for the production of vitamin c and/or threonic acid, which comprises
[70762] (a) increasing or generating the activity of a b2399-protein non-targeted in a non-human organism or a part thereof, preferably a microorganism, a plant cell, a plant or a part thereof, as compared to a corresponding non-transformed wild type non-human organism or a part thereof; and
[70763] (b) growing the non-human organism or a part thereof under conditions which permit the production of vitamin c and/or threonic acid or a composition comprising vitamin c and/or threonic acid in said non-human organism or in the culture medium surrounding said non-human organism.

[70764] A further embodiment of the present invention relates to a process for the production of vitamin c and/or threonic acid, which comprises
[70765] (a) increasing or generating the activity of a cysteine synthase A non-targeted in a non-human organism or a part thereof, preferably a microorganism, a plant cell, a plant or a part thereof, as compared to a corresponding non-transformed wild type non-human organism or a part thereof; and
[70766] (b) growing the non-human organism or a part thereof under conditions which permit the production of vitamin c and/or threonic acid or a composition comprising vitamin c and/or threonic acid in said non-human organism or in the culture medium surrounding said non-human organism.

[70767] A further embodiment of the present invention relates to a process for the production of vitamin c and/or threonic acid, which comprises
[70768] (a) increasing or generating the activity of a cysteine synthase B non-targeted in a non-human organism or a part thereof, preferably a microorganism, a plant cell, a plant or a part thereof, as compared to a corresponding non-transformed wild type non-human organism or a part thereof; and
[70769] (b) growing the non-human organism or a part thereof under conditions which permit the production of vitamin c and/or threonic acid or a composition comprising vitamin c and/or threonic acid in said non-human organism or in the culture medium surrounding said non-human organism.

[70770] A further embodiment of the present invention relates to a process for the production of fumarate, which comprises
[70771] (a) increasing or generating the activity of a transcriptional regulator non-targeted in a non-human organism or a part thereof, preferably a microorganism, a plant cell, a plant or a part thereof, as compared to a corresponding non-transformed wild type non-human organism or a part thereof; and
[70772] (b) growing the non-human organism or a part thereof under conditions which permit the production of fumarate or a composition comprising fumarate in said non-human organism or in the culture medium surrounding said non-human organism.

[70773] A further embodiment of the present invention relates to a process for the production of malate, which comprises
[70774] (a) increasing or generating the activity of a transcriptional regulator non-targeted in a non-human organism or a part thereof, preferably a microorganism, a plant cell, a plant or a part thereof, as compared to a corresponding non-transformed wild type non-human organism or a part thereof; and
[70775] (b) growing the non-human organism or a part thereof under conditions which permit the production of malate or a composition comprising malate in said non-human organism or in the culture medium surrounding said non-human organism.

[70776] A further embodiment of the present invention relates to a process for the production of succinate, which comprises
[70777] (a) increasing or generating the activity of a murein transglycosylase non-targeted in a non-human organism or a part thereof, preferably a microorganism, a plant cell, a plant or a part thereof, as compared to a corresponding non-transformed wild type non-human organism or a part thereof; and
[70778] (b) growing the non-human organism or a part thereof under conditions which permit the production of succinate or a composition comprising succinate in said non-human organism or in the culture medium surrounding said non-human organism.

[70779] A further embodiment of the present invention relates to a process for the production of succinate, which comprises
[70780] (a) increasing or generating the activity of a 2-C-methyl-D-erythritol 4-phosphate cytidylyltransferase non-targeted in a non-human organism or a part thereof, preferably a microorganism organism, a plant cell, a plant or a part thereof, as compared to a corresponding non-transformed wild type non-human organism or a part thereof; and
[70781] (b) growing the non-human organism or a part thereof under conditions which permit the production of succinate or a composition comprising succinate in said non-human organism or in the culture medium surrounding said non-human organism.

[70782] A further embodiment of the present invention relates to a process for the production of succinate, which comprises
[70783] (a) increasing or generating the activity of a amino-acid acetyltransferase non-targeted in a non-human organism or a part thereof, preferably a microorganism, a plant cell, a plant or a part thereof, as compared to a corresponding non-transformed wild type non-human organism or a part thereof; and
[70784] (b) growing the non-human organism or a part thereof under conditions which permit the production of succinate or a composition comprising succinate in said non-human organism or in the culture medium surrounding said non-human organism.

[70785] A further embodiment of the present invention relates to a process for the production of succinate, which comprises
[70786] (a) increasing or generating the activity of a xanthine dehydrogenase non-targeted in a non-human organism or a part thereof, preferably a microorganism, a plant cell, a plant or a part thereof, as compared to a corresponding non-transformed wild type non-human organism or a part thereof; and
[70787] (b) growing the non-human organism or a part thereof under conditions which permit the production of succinate or a composition comprising succinate in said non-human organism or in the culture medium surrounding said non-human organism.

[70788] A further embodiment of the present invention relates to a process for the production of succinate, which comprises
[70789] (a) increasing or generating the activity of a cystathionine beta-lyase non-targeted in a non-human organism or a part thereof, preferably a microorganism, a plant cell, a plant or a part thereof, as compared to a corresponding non-transformed wild type non-human organism or a part thereof; and
[70790] (b) growing the non-human organism or a part thereof under conditions which permit the production of succinate or a composition comprising succinate in said non-human organism or in the culture medium surrounding said non-human organism.

[70791] A further embodiment of the present invention relates to a process for the production of fumarate, which comprises
[70792] (a) increasing or generating the activity of a methyltransferase non-targeted in a non-human organism or a part thereof, preferably a microorganism, a plant cell, a plant or a part thereof, as compared to a corresponding non-transformed wild type non-human organism or a part thereof; and
[70793] (b) growing the non-human organism or a part thereof under conditions which permit the production of fumarate or a composition comprising fumarate in said non-human organism or in the culture medium surrounding said non-human organism.

[70794] A further embodiment of the present invention relates to a process for the production of malate, which comprises
[70795] (a) increasing or generating the activity of a methyltransferase non-targeted in a non-human organism or a part thereof, preferably a microorganism, a plant cell, a plant or a part thereof, as compared to a corresponding non-transformed wild type non-human organism or a part thereof; and
[70796] (b) growing the non-human organism or a part thereof under conditions which permit the production of malate or a composition comprising malate in said non-human organism or in the culture medium surrounding said non-human organism.

[70797] A further embodiment of the present invention relates to a process for the production of fumarate, which comprises
[70798] (a) increasing or generating the activity of a lipopolysaccharide core biosynthesis protein non-targeted in a non-human organism or a part thereof, preferably a microorganism, a plant cell, a plant or a part thereof, as compared to a corresponding non-transformed wild type non-human organism or a part thereof; and
[70799] (b) growing the non-human organism or a part thereof under conditions which permit the production of fumarate or a composition comprising fumarate in said non-human organism or in the culture medium surrounding said non-human organism.

[70800] A further embodiment of the present invention relates to a process for the production of succinate, which comprises
[70801] (a) increasing or generating the activity of a b3777-protein non-targeted in a non-human organism or a part thereof, preferably a microorganism, a plant cell, a plant or a part thereof, as compared to a corresponding non-transformed wild type non-human organism or a part thereof; and
[70802] (b) growing the non-human organism or a part thereof under conditions which permit the production of succinate or a composition comprising succinate in said non-human organism or in the culture medium surrounding said non-human organism.

[70803] A further embodiment of the present invention relates to a process for the production of malate, which comprises
[70804] (a) increasing or generating the activity of a b3791-protein non-targeted in a non-human organism or a part thereof, preferably a microorganism, a plant cell, a plant or a part thereof, as compared to a corresponding non-transformed wild type non-human organism or a part thereof; and
[70805] (b) growing the non-human organism or a part thereof under conditions which permit the production of malate or a composition comprising malate in said non-human organism or in the culture medium surrounding said non-human organism.

[70806] A further embodiment of the present invention relates to a process for the production of succinate, which comprises
[70807] (a) increasing or generating the activity of a b3791-protein non-targeted in a non-human organism or a part thereof, preferably a microorganism, a plant cell, a plant or a part thereof, as compared to a corresponding non-transformed wild type non-human organism or a part thereof; and
[70808] (b) growing the non-human organism or a part thereof under conditions which permit the production of succinate or a composition comprising succinate in said non-human organism or in the culture medium surrounding said non-human organism.

[70809] A further embodiment of the present invention relates to a process for the production of citramalate, which comprises
[70810] (a) increasing or generating the activity of a b3814-protein non-targeted in a non-human organism or a part thereof, preferably a microorganism, a plant cell, a plant or a part thereof, as compared to a corresponding non-transformed wild type non-human organism or a part thereof; and
[70811] (b) growing the non-human organism or a part thereof under conditions which permit the production of citramalate or a composition comprising citramalate in said non-human organism or in the culture medium surrounding said non-human organism.

[70812] A further embodiment of the present invention relates to a process for the production of fumarate, which comprises
[70813] (a) increasing or generating the activity of a b3817-protein non-targeted in a non-human organism or a part thereof, preferably a microorganism, a plant cell, a plant or a part thereof, as compared to a corresponding non-transformed wild type non-human organism or a part thereof; and
[70814] (b) growing the non-human organism or a part thereof under conditions which permit the production of fumarate or a composition comprising fumarate in said non-human organism or in the culture medium surrounding said non-human organism.

[70815] A further embodiment of the present invention relates to a process for the production of citramalate, which comprises
[70816] (a) increasing or generating the activity of a threonine efflux protein non-targeted in a non-human organism or a part thereof, preferably a microorganism, a plant cell, a plant or a part thereof, as compared to a corresponding non-transformed wild type non-human organism or a part thereof; and
[70817] (b) growing the non-human organism or a part thereof under conditions which permit the production of citramalate or a composition comprising citramalate in said non-human organism or in the culture medium surrounding said non-human organism.

[70818] A further embodiment of the present invention relates to a process for the production of malate, which comprises
[70819] (a) increasing or generating the activity of a threonine efflux protein non-targeted in a non-human organism or a part thereof, preferably a microorganism, a plant cell, a plant or a part thereof, as compared to a corresponding non-transformed wild type non-human organism or a part thereof; and
[70820] (b) growing the non-human organism or a part thereof under conditions which permit the production of malate or a composition comprising malate in said non-human organism or in the culture medium surrounding said non-human organism.

[70821] A further embodiment of the present invention relates to a process for the production of succinate, which comprises
[70822] (a) increasing or generating the activity of a b3989-protein non-targeted in a non-human organism or a part thereof, preferably a microorganism, a plant cell, a plant or a part thereof, as compared to a corresponding non-transformed wild type non-human organism or a part thereof; and
[70823] (b) growing the non-human organism or a part thereof under conditions which permit the production of succinate or a composition comprising succinate in said non-human organism or in the culture medium surrounding said non-human organism.

[70824] A further embodiment of the present invention relates to a process for the production of fumarate, which comprises
[70825] (a) increasing or generating the activity of a acetyltransferase non-targeted in a non-human organism or a part thereof, preferably a microorganism, a plant cell, a plant or a part thereof, as compared to a corresponding non-transformed wild type non-human organism or a part thereof; and
[70826] (b) growing the non-human organism or a part thereof under conditions which permit the production of fumarate or a composition comprising fumarate in said non-human organism or in the culture medium surrounding said non-human organism.

[70827] A further embodiment of the present invention relates to a process for the production of fumarate, which comprises
[70828] (a) increasing or generating the activity of a b4029-protein non-targeted in a non-human organism or a part thereof, preferably a microorganism, a plant cell, a plant or a part thereof, as compared to a corresponding non-transformed wild type non-human organism or a part thereof; and
[70829] (b) growing the non-human organism or a part thereof under conditions which permit the production of fumarate or a composition comprising fumarate in said non-human organism or in the culture medium surrounding said non-human organism.

[70830] A further embodiment of the present invention relates to a process for the production of malate, which comprises
[70831] (a) increasing or generating the activity of a b4029-protein non-targeted in a non-human organism or a part thereof, preferably a microorganism, a plant cell, a plant or a part thereof, as compared to a corresponding non-transformed wild type non-human organism or a part thereof; and
[70832] (b) growing the non-human organism or a part thereof under conditions which permit the production of malate or a composition comprising malate in said non-human organism or in the culture medium surrounding said non-human organism.

[70833] A further embodiment of the present invention relates to a process for the production of succinate, which comprises
[70834] (a) increasing or generating the activity of a b4029-protein non-targeted in a non-human organism or a part thereof, preferably a microorganism, a plant cell, a plant or a part thereof, as compared to a corresponding non-transformed wild type non-human organism or a part thereof; and
[70835] (b) growing the non-human organism or a part thereof under conditions which permit the production of succinate or a composition comprising succinate in said non-human organism or in the culture medium surrounding said non-human organism.

[70836] A further embodiment of the present invention relates to a process for the production of fumarate, which comprises
[70837] (a) increasing or generating the activity of a b4050-protein non-targeted in a non-human organism or a part thereof, preferably a microorganism, a plant cell, a plant or a part thereof, as compared to a corresponding non-transformed wild type non-human organism or a part thereof; and
[70838] (b) growing the non-human organism or a part thereof under conditions which permit the production of fumarate or a composition comprising fumarate in said non-human organism or in the culture medium surrounding said non-human organism.

[70839] A further embodiment of the present invention relates to a process for the production of malate, which comprises
[70840] (a) increasing or generating the activity of a b4050-protein non-targeted in a non-human organism or a part thereof, preferably a microorganism, a plant cell, a plant or a part thereof, as compared to a corresponding non-transformed wild type non-human organism or a part thereof; and
[70841] (b) growing the non-human organism or a part thereof under conditions which permit the production of malate or a composition comprising malate in said non-human organism or in the culture medium surrounding said non-human organism.

[70842] A further embodiment of the present invention relates to a process for the production of citramalate, which comprises
[70843] (a) increasing or generating the activity of a b4056-protein non-targeted in a non-human organism or a part thereof, preferably a microorganism, a plant cell, a plant or a part thereof, as compared to a corresponding non-transformed wild type non-human organism or a part thereof; and
[70844] (b) growing the non-human organism or a part thereof under conditions which permit the production of citramalate or a composition comprising citramalate in said non-human organism or in the culture medium surrounding said non-human organism.

[70845] A further embodiment of the present invention relates to a process for the production of citrate, which comprises
[70846] (a) increasing or generating the activity of a aspartase non-targeted in a non-human organism or a part thereof, preferably a microorganism, a plant cell, a plant or a part thereof, as compared to a corresponding non-transformed wild type non-human organism or a part thereof; and
[70847] (b) growing the non-human organism or a part thereof under conditions which permit the production of citrate or a composition comprising citrate in said non-human organism or in the culture medium surrounding said non-human organism.

[70848] A further embodiment of the present invention relates to a process for the production of fumarate, which comprises
[70849] (a) increasing or generating the activity of a acetyltransferase non-targeted in a non-human organism or a part thereof, preferably a microorganism, a plant cell, a plant or a part thereof, as compared to a corresponding non-transformed wild type non-human organism or a part thereof; and
[70850] (b) growing the non-human organism or a part thereof under conditions which permit the production of fumarate or a composition comprising fumarate in said non-human organism or in the culture medium surrounding said non-human organism.

[70851] A further embodiment of the present invention relates to a process for the production of malate, which comprises
[70852] (a) increasing or generating the activity of a acetyltransferase non-targeted in a non-human organism or a part thereof, preferably a microorganism, a plant cell, a plant or a part thereof, as compared to a corresponding non-transformed wild type non-human organism or a part thereof; and
[70853] (b) growing the non-human organism or a part thereof under conditions which permit the production of malate or a composition comprising malate in said non-human organism or in the culture medium surrounding said non-human organism.

[70854] A further embodiment of the present invention relates to a process for the production of vitamin c and/or threonic acid, which comprises
[70855] (a) increasing or generating the activity of a purine-nucleoside phosphorylase non-targeted in a non-human organism or a part thereof, preferably a microorganism, a plant cell, a plant or a part thereof, as compared to a corresponding non-transformed wild type non-human organism or a part thereof; and
[70856] (b) growing the non-human organism or a part thereof under conditions which permit the production of vitamin c and/or threonic acid or a composition comprising vitamin c and/or threonic acid in said non-human organism or in the culture medium surrounding said non-human organism.

[70857] A further embodiment of the present invention relates to a process for the production of succinate, which comprises
[70858] (a) increasing or generating the activity of a lysine decarboxylase non-targeted in a non-human organism or a part thereof, preferably a microorganism, a plant cell, a plant or a part thereof, as compared to a corresponding non-transformed wild type non-human organism or a part thereof; and
[70859] (b) growing the non-human organism or a part thereof under conditions which permit the production of succinate or a composition comprising succinate in said non-human organism or in the culture medium surrounding said non-human organism.

[70860] A further embodiment of the present invention relates to a process for the production of succinate, which comprises
[70861] (a) increasing or generating the activity of a glutaredoxin non-targeted in a non-human organism or a part thereof, preferably a microorganism, a plant cell, a plant or a part thereof, as compared to a corresponding non-transformed wild type non-human organism or a part thereof; and
[70862] (b) growing the non-human organism or a part thereof under conditions which permit the production of succinate or a composition comprising succinate in said non-human organism or in the culture medium surrounding said non-human organism.

[70863] A further embodiment of the present invention relates to a process for the production of fumarate, which comprises
[70864] (a) increasing or generating the activity of a GM02LC17485-protein non-targeted in a non-human organism or a part thereof, preferably a microorganism, a plant cell, a plant or a part thereof, as compared to a corresponding non-transformed wild type non-human organism or a part thereof; and
[70865] (b) growing the non-human organism or a part thereof under conditions which permit the production of fumarate or a composition comprising fumarate in said non-human organism or in the culture medium surrounding said non-human organism.

[70866] A further embodiment of the present invention relates to a process for the production of citramalate, which comprises
[70867] (a) increasing or generating the activity of a transcription factor non-targeted in a non-human organism or a part thereof, preferably a microorganism, a plant cell, a plant or a part thereof, as compared to a corresponding non-transformed wild type non-human organism or a part thereof; and
[70868] (b) growing the non-human organism or a part thereof under conditions which permit the production of citramalate or a composition comprising citramalate in said non-human organism or in the culture medium surrounding said non-human organism.

[70869] A further embodiment of the present invention relates to a process for the production of fumarate, which comprises
[70870] (a) increasing or generating the activity of a transcription factor non-targeted in a non-human organism or a part thereof, preferably a microorganism, a plant cell, a plant or a part thereof, as compared to a corresponding non-transformed wild type non-human organism or a part thereof; and
[70871] (b) growing the non-human organism or a part thereof under conditions which permit the production of fumarate or a composition comprising fumarate in said non-human organism or in the culture medium surrounding said non-human organism.

[70872] A further embodiment of the present invention relates to a process for the production of malate, which comprises
[70873] (a) increasing or generating the activity of a transcription factor non-targeted in a non-human organism or a part thereof, preferably a microorganism, a plant cell, a plant or a part thereof, as compared to a corresponding non-transformed wild type non-human organism or a part thereof; and
[70874] (b) growing the non-human organism or a part thereof under conditions which permit the production of malate or a composition comprising malate in said non-human organism or in the culture medium surrounding said non-human organism.

[70875] A further embodiment of the present invention relates to a process for the production of citramalate, which comprises
[70876] (a) increasing or generating the activity of a GM02LC5744-protein non-targeted in a non-human organism or a part thereof, preferably a microorganism, a plant cell, a plant or a part thereof, as compared to a corresponding non-transformed wild type non-human organism or a part thereof; and
[70877] (b) growing the non-human organism or a part thereof under conditions which permit the production of citramalate or a composition comprising citramalate in said non-human organism or in the culture medium surrounding said non-human organism.

[70878] A further embodiment of the present invention relates to a process for the production of fumarate, which comprises
[70879] (a) increasing or generating the activity of a GM02LC5744-protein non-targeted in a non-human organism or a part thereof, preferably a microorganism, a plant cell, a plant or a part thereof, as compared to a corresponding non-transformed wild type non-human organism or a part thereof; and
[70880] (b) growing the non-human organism or a part thereof under conditions which permit the production of fumarate or a composition comprising fumarate in said non-human organism or in the culture medium surrounding said non-human organism.

[70881] A further embodiment of the present invention relates to a process for the production of citramalate, which comprises
[70882] (a) increasing or generating the activity of a heat shock protein non-targeted in a non-human organism or a part thereof, preferably a microorganism, a plant cell, a plant or a part thereof, as compared to a corresponding non-transformed wild type non-human organism or a part thereof; and
[70883] (b) growing the non-human organism or a part thereof under conditions which permit the production of citramalate or a composition comprising citramalate in said non-human organism or in the culture medium surrounding said non-human organism.

[70884] A further embodiment of the present invention relates to a process for the production of fumarate, which comprises
[70885] (a) increasing or generating the activity of a agmatinase non-targeted in a non-human organism or a part thereof, preferably a microorganism, a plant cell, a plant or a part thereof, as compared to a corresponding non-transformed wild type non-human organism or a part thereof; and
[70886] (b) growing the non-human organism or a part thereof under conditions which permit the production of fumarate or a composition comprising fumarate in said non-human organism or in the culture medium surrounding said non-human organism.

[70887] A further embodiment of the present invention relates to a process for the production of malate, which comprises
[70888] (a) increasing or generating the activity of a ABC transporter ATP binding component non-targeted in a non-human organism or a part thereof, preferably a microorganism, a plant cell, a plant or a part thereof, as compared to a corresponding non-transformed wild type non-human organism or a part thereof; and
[70889] (b) growing the non-human organism or a part thereof under conditions which permit the production of malate or a composition comprising malate in said non-human organism or in the culture medium surrounding said non-human organism.

[70890] A further embodiment of the present invention relates to a process for the production of succinate, which comprises
[70891] (a) increasing or generating the activity of a ABC transporter ATP binding component non-targeted in a non-human organism or a part thereof, preferably a microorganism, a plant cell, a plant or a part thereof, as compared to a corresponding non-transformed wild type non-human organism or a part thereof; and
[70892] (b) growing the non-human organism or a part thereof under conditions which permit the production of succinate or a composition comprising succinate in said non-human organism or in the culture medium surrounding said non-human organism.

[70893] A further embodiment of the present invention relates to a process for the production of fumarate, which comprises
[70894] (a) increasing or generating the activity of a oxireductase non-targeted in a non-human organism or a part thereof, preferably a microorganism, a plant cell, a plant or a part thereof, as compared to a corresponding non-transformed wild type non-human organism or a part thereof; and
[70895] (b) growing the non-human organism or a part thereof under conditions which permit the production of fumarate or a composition comprising fumarate in said non-human organism or in the culture medium surrounding said non-human organism.

[70896] A further embodiment of the present invention relates to a process for the production of succinate, which comprises
[70897] (a) increasing or generating the activity of a phosphatase non-targeted in a non-human organism or a part thereof, preferably a microorganism, a plant cell, a plant or a part thereof, as compared to a corresponding non-transformed wild type non-human organism or a part thereof; and
[70898] (b) growing the non-human organism or a part thereof under conditions which permit the production of succinate or a composition comprising succinate in said non-human organism or in the culture medium surrounding said non-human organism.

[70899] A further embodiment of the present invention relates to a process for the production of citramalate, which comprises
[70900] (a) increasing or generating the activity of a CDP-diacylglycerol-glycerol-3-phosphate 3-phosphatidyltransferase non-targeted in a non-human organism or a part thereof, preferably a microorganism, a plant cell, a plant or a part thereof, as compared to a corresponding non-transformed wild type non-human organism or a part thereof; and
[70901] (b) growing the non-human organism or a part thereof under conditions which permit the production of citramalate or a composition comprising citramalate in said non-human organism or in the culture medium surrounding said non-human organism.

[70902] A further embodiment of the present invention relates to a process for the production of malate, which comprises
[70903] (a) increasing or generating the activity of a CDP-diacylglycerol-glycerol-3-phosphate 3-phosphatidyltransferase non-targeted in a non-human organism or a part thereof, preferably a microorganism, a plant cell, a plant or a part thereof, as compared to a corresponding non-transformed wild type non-human organism or a part thereof; and
[70904] (b) growing the non-human organism or a part thereof under conditions which permit the production of malate or a composition comprising malate in said non-human organism or in the culture medium surrounding said non-human organism.

[70905] A further embodiment of the present invention relates to a process for the production of succinate, which comprises
[70906] (a) increasing or generating the activity of a adenylate kinase non-targeted in a non-human organism or a part thereof, preferably a microorganism, a plant cell, a plant or a part thereof, as compared to a corresponding non-transformed wild type non-human organism or a part thereof; and
[70907] (b) growing the non-human organism or a part thereof under conditions which permit the production of succinate or a composition comprising succinate in said non-human organism or in the culture medium surrounding said non-human organism.

[70908] A further embodiment of the present invention relates to a process for the production of citramalate, which comprises
[70909] (a) increasing or generating the activity of a cation-transporting ATPase non-targeted in a non-human organism or a part thereof, preferably a microorganism, a plant cell, a plant or a part thereof, as compared to a corresponding non-transformed wild type non-human organism or a part thereof; and
[70910] (b) growing the non-human organism or a part thereof under conditions which permit the production of citramalate or a composition comprising citramalate in said non-human organism or in the culture medium surrounding said non-human organism.

[70911] A further embodiment of the present invention relates to a process for the production of malate, which comprises
[70912] (a) increasing or generating the activity of a cation-transporting ATPase non-targeted in a non-human organism or a part thereof, preferably a microorganism, a plant cell, a plant or a part thereof, as compared to a corresponding non-transformed wild type non-human organism or a part thereof; and
[70913] (b) growing the non-human organism or a part thereof under conditions which permit the production of malate or a composition comprising malate in said non-human organism or in the culture medium surrounding said non-human organism.

[70914] A further embodiment of the present invention relates to a process for the production of fumarate, which comprises
[70915] (a) increasing or generating the activity of a fumarate hydratase non-targeted in a non-human organism or a part thereof, preferably a microorganism, a plant cell, a plant or a part thereof, as compared to a corresponding non-transformed wild type non-human organism or a part thereof; and
[70916] (b) growing the non-human organism or a part thereof under conditions which permit the production of fumarate or a composition comprising fumarate in said non-human organism or in the culture medium surrounding said non-human organism.

[70917] A further embodiment of the present invention relates to a process for the production of citramalate, which comprises
[70918] (a) increasing or generating the activity of a oxidoreductase non-targeted in a non-human organism or a part thereof, preferably a microorganism, a plant cell, a plant or a part thereof, as compared to a corresponding non-transformed wild type non-human organism or a part thereof; and
[70919] (b) growing the non-human organism or a part thereof under conditions which permit the production of citramalate or a composition comprising citramalate in said non-human organism or in the culture medium surrounding said non-human organism.

[70920] A further embodiment of the present invention relates to a process for the production of fumarate, which comprises
[70921] (a) increasing or generating the activity of a bifunctional purine biosynthesis protein non-targeted in a non-human organism or a part thereof, preferably a microorganism, a plant cell, a plant or a part thereof, as compared to a corresponding non-transformed wild type non-human organism or a part thereof; and
[70922] (b) growing the non-human organism or a part thereof under conditions which permit the production of fumarate or a composition comprising fumarate in said non-human organism or in the culture medium surrounding said non-human organism.

[70923] A further embodiment of the present invention relates to a process for the production of citramalate, which comprises
[70924] (a) increasing or generating the activity of a malate dehydrogenase non-targeted in a non-human organism or a part thereof, preferably a microorganism, a plant cell, a plant or a part thereof, as compared to a corresponding non-transformed wild type non-human organism or a part thereof; and
[70925] (b) growing the non-human organism or a part thereof under conditions which permit the production of citramalate or a composition comprising citramalate in said non-human organism or in the culture medium surrounding said non-human organism.

[70926] A further embodiment of the present invention relates to a process for the production of succinate, which comprises
[70927] (a) increasing or generating the activity of a malate dehydrogenase non-targeted in a non-human organism or a part thereof, preferably a microorganism, a plant cell, a plant or a part thereof, as compared to a corresponding non-transformed wild type non-human organism or a part thereof; and
[70928] (b) growing the non-human organism or a part thereof under conditions which permit the production of succinate or a composition comprising succinate in said non-human organism or in the culture medium surrounding said non-human organism.

[70929] A further embodiment of the present invention relates to a process for the production of glycerate, which comprises
[70930] (a) increasing or generating the activity of a dihydrolipoamide dehydrogenase non-targeted in a non-human organism or a part thereof, preferably a microorganism, a plant cell, a plant or a part thereof, as compared to a corresponding non-transformed wild type non-human organism or a part thereof; and
[70931] (b) growing the non-human organism or a part thereof under conditions which permit the production of glycerate or a composition comprising glycerate in said non-human organism or in the culture medium surrounding said non-human organism.

[70932] A further embodiment of the present invention relates to a process for the production of succinate, which comprises
[70933] (a) increasing or generating the activity of a dihydrolipoamide dehydrogenase non-targeted in a non-human organism or a part thereof, preferably a microorganism, a plant cell, a plant or a part thereof, as compared to a corresponding non-transformed wild type non-human organism or a part thereof; and
[70934] (b) growing the non-human organism or a part thereof under conditions which permit the production of succinate or a composition comprising succinate in said non-human organism or in the culture medium surrounding said non-human organism.

[70935] A further embodiment of the present invention relates to a process for the production of succinate, which comprises
[70936] (a) increasing or generating the activity of a slr1170-protein non-targeted in a non-human organism or a part thereof, preferably a microorganism, a plant cell, a plant or a part thereof, as compared to a corresponding non-transformed wild type non-human organism or a part thereof; and
[70937] (b) growing the non-human organism or a part thereof under conditions which permit the production of succinate or a composition comprising succinate in said non-human organism or in the culture medium surrounding said non-human organism.

[70938] A further embodiment of the present invention relates to a process for the production of fumarate, which comprises
[70939] (a) increasing or generating the activity of a phosphate import ATP-binding protein non-targeted in a non-human organism or a part thereof, preferably a microorganism, a plant cell, a plant or a part thereof, as compared to a corresponding non-transformed wild type non-human organism or a part thereof; and
[70940] (b) growing the non-human organism or a part thereof under conditions which permit the production of fumarate or a composition comprising fumarate in said non-human organism or in the culture medium surrounding said non-human organism.

[70941] A further embodiment of the present invention relates to a process for the production of succinate, which comprises
[70942] (a) increasing or generating the activity of a gamma-glutamyltranspeptidase non-targeted in a non-human organism or a part thereof, preferably a microorganism, a plant cell, a plant or a part thereof, as compared to a corresponding non-transformed wild type non-human organism or a part thereof; and
[70943] (b) growing the non-human organism or a part thereof under conditions which permit the production of succinate or a composition comprising succinate in said non-human organism or in the culture medium surrounding said non-human organism.

[70944] A further embodiment of the present invention relates to a process for the production of malate, which comprises
[70945] (a) increasing or generating the activity of a photosystem II protein non-targeted in a non-human organism or a part thereof, preferably a microorganism, a plant cell, a plant or a part thereof, as compared to a corresponding non-transformed wild type non-human organism or a part thereof; and
[70946] (b) growing the non-human organism or a part thereof under conditions which permit the production of malate or a composition comprising malate in said non-human organism or in the culture medium surrounding said non-human organism.

[70947] A further embodiment of the present invention relates to a process for the production of fumarate, which comprises
[70948] (a) increasing or generating the activity of a malonyl CoA-acyl carrier protein transacylase non-targeted in a non-human organism or a part thereof, preferably a microorganism, a plant cell, a plant or a part thereof, as compared to a corresponding non-transformed wild type non-human organism or a part thereof; and
[70949] (b) growing the non-human organism or a part thereof under conditions which permit the production of fumarate or a composition comprising fumarate in said non-human organism or in the culture medium surrounding said non-human organism.

[70950] A further embodiment of the present invention relates to a process for the production of succinate, which comprises
[70951] (a) increasing or generating the activity of a malonyl CoA-acyl carrier protein transacylase non-targeted in a non-human organism or a part thereof, preferably a microorganism, a plant cell, a plant or a part thereof, as compared to a corresponding non-transformed wild type non-human organism or a part thereof; and
[70952] (b) growing the non-human organism or a part thereof under conditions which permit the production of succinate or a composition comprising succinate in said non-human organism or in the culture medium surrounding said non-human organism.

[70953] A further embodiment of the present invention relates to a process for the production of glycerate, which comprises
[70954] (a) increasing or generating the activity of a photosystem I reaction centre subunit non-targeted in a non-human organism or a part thereof, preferably a microorganism, a plant cell, a plant or a part thereof, as compared to a corresponding non-transformed wild type non-human organism or a part thereof; and
[70955] (b) growing the non-human organism or a part thereof under conditions which permit the production of glycerate or a composition comprising glycerate in said non-human organism or in the culture medium surrounding said non-human organism.

[70956] A further embodiment of the present invention relates to a process for the production of fumarate, which comprises
[70957] (a) increasing or generating the activity of a Sec-independent protein translocase subunit non-targeted in a non-human organism or a part thereof, preferably a microorganism, a plant cell, a plant or a part thereof, as compared to a corresponding non-transformed wild type non-human organism or a part thereof; and
[70958] (b) growing the non-human organism or a part thereof under conditions which permit the production of fumarate or a composition comprising fumarate in said non-human organism or in the culture medium surrounding said non-human organism.

[70959] A further embodiment of the present invention relates to a process for the production of succinate, which comprises
[70960] (a) increasing or generating the activity of a Sec-independent protein translocase subunit non-targeted in a non-human organism or a part thereof, preferably a microorganism, a plant cell, a plant or a part thereof, as compared to a corresponding non-transformed wild type non-human organism or a part thereof; and
[70961] (b) growing the non-human organism or a part thereof under conditions which permit the production of succinate or a composition comprising succinate in said non-human organism or in the culture medium surrounding said non-human organism.

[70962] A further embodiment of the present invention relates to a process for the production of citramalate, which comprises
[70963] (a) increasing or generating the activity of a 2-isopropylmalate synthase non-targeted in a non-human organism or a part thereof, preferably a microorganism, a plant cell, a plant or a part thereof, as compared to a corresponding non-transformed wild type non-human organism or a part thereof; and
[70964] (b) growing the non-human organism or a part thereof under conditions which permit the production of citramalate or a composition comprising citramalate in said non-human organism or in the culture medium surrounding said non-human organism.

[70965] A further embodiment of the present invention relates to a process for the production of fumarate, which comprises
[70966] (a) increasing or generating the activity of a multiple antibiotic resistance protein non-targeted in a non-human organism or a part thereof, preferably a microorganism, a plant cell, a plant or a part thereof, as compared to a corresponding non-transformed wild type non-human organism or a part thereof; and
[70967] (b) growing the non-human organism or a part thereof under conditions which permit the production of fumarate or a composition comprising fumarate in said non-human organism or in the culture medium surrounding said non-human organism.

[70968] A further embodiment of the present invention relates to a process for the production of succinate, which comprises
[70969] (a) increasing or generating the activity of a multiple antibiotic resistance protein non-targeted in a non-human organism or a part thereof, preferably a microorganism, a plant cell, a plant or a part thereof, as compared to a corresponding non-transformed wild type non-human organism or a part thereof; and
[70970] (b) growing the non-human organism or a part thereof under conditions which permit the production of succinate or a composition comprising succinate in said non-human organism or in the culture medium surrounding said non-human organism.

[70971] A further embodiment of the present invention relates to a process for the production of fumarate, which comprises
[70972] (a) increasing or generating the activity of a TTC1386-protein non-targeted in a non-human organism or a part thereof, preferably a microorganism, a plant cell, a plant or a part thereof, as compared to a corresponding non-transformed wild type non-human organism or a part thereof; and
[70973] (b) growing the non-human organism or a part thereof under conditions which permit the production of fumarate or a composition comprising fumarate in said non-human organism or in the culture medium surrounding said non-human organism.

[70974] A further embodiment of the present invention relates to a process for the production of malate, which comprises
[70975] (a) increasing or generating the activity of a TTC1386-protein non-targeted in a non-human organism or a part thereof, preferably a microorganism, a plant cell, a plant or a part thereof, as compared to a corresponding non-transformed wild type non-human organism or a part thereof; and
[70976] (b) growing the non-human organism or a part thereof under conditions which permit the production of malate or a composition comprising malate in said non-human organism or in the culture medium surrounding said non-human organism.

[70977] A further embodiment of the present invention relates to a process for the production of succinate, which comprises
[70978] (a) increasing or generating the activity of a TTC1386-protein non-targeted in a non-human organism or a part thereof, preferably a microorganism, a plant cell, a plant or a part thereof, as compared to a corresponding non-transformed wild type non-human organism or a part thereof; and
[70979] (b) growing the non-human organism or a part thereof under conditions which permit the production of succinate or a composition comprising succinate in said non-human organism or in the culture medium surrounding said non-human organism.

[70980] A further embodiment of the present invention relates to a process for the production of citramalate, which comprises
[70981] (a) increasing or generating the activity of a oxidoreductase subunit non-targeted in a non-human organism or a part thereof, preferably a microorganism, a plant cell, a plant or a part thereof, as compared to a corresponding non-transformed wild type non-human organism or a part thereof; and
[70982] (b) growing the non-human organism or a part thereof under conditions which permit the production of citramalate or a composition comprising citramalate in said non-human organism or in the culture medium surrounding said non-human organism.

[70983] A further embodiment of the present invention relates to a process for the production of glycerate, which comprises
[70984] (a) increasing or generating the activity of a oxidoreductase subunit non-targeted in a non-human organism or a part thereof, preferably a microorganism, a plant cell, a plant or a part thereof, as compared to a corresponding non-transformed wild type non-human organism or a part thereof; and
[70985] (b) growing the non-human organism or a part thereof under conditions which permit the production of glycerate or a composition comprising glycerate in said non-human organism or in the culture medium surrounding said non-human organism.

[70986] A further embodiment of the present invention relates to a process for the production of malate, which comprises
[70987] (a) increasing or generating the activity of a oxidoreductase subunit non-targeted in a non-human organism or a part thereof, preferably a microorganism, a plant cell, a plant or a part thereof, as compared to a corresponding non-transformed wild type non-human organism or a part thereof; and
[70988] (b) growing the non-human organism or a part thereof under conditions which permit the production of malate or a composition comprising malate in said non-human organism or in the culture medium surrounding said non-human organism.

[70989] A further embodiment of the present invention relates to a process for the production of fumarate, which comprises
[70990] (a) increasing or generating the activity of a XM_{—}473199-protein non-targeted in a non-human organism or a part thereof, preferably a microorganism, a plant cell, a plant or a part thereof, as compared to a corresponding non-transformed wild type non-human organism or a part thereof; and
[70991] (b) growing the non-human organism or a part thereof under conditions which permit the production of fumarate or a composition comprising fumarate in said non-human organism or in the culture medium surrounding said non-human organism.

[70992] A further embodiment of the present invention relates to a process for the production of malate, which comprises
[70993] (a) increasing or generating the activity of a XM_{—}473199-protein non-targeted in a non-human organism or a part thereof, preferably a microorganism, a plant cell, a plant or a part thereof, as compared to a corresponding non-transformed wild type non-human organism or a part thereof; and
[70994] (b) growing the non-human organism or a part thereof under conditions which permit the production of malate or a composition comprising malate in said non-human organism or in the culture medium surrounding said non-human organism.

[70995] A further embodiment of the present invention relates to a process for the production of succinate, which comprises
[70996] (a) increasing or generating the activity of a XM_{—}473199-protein non-targeted in a non-human organism or a part thereof, preferably a microorganism, a plant cell, a plant or a part thereof, as compared to a corresponding non-transformed wild type non-human organism or a part thereof; and
[70997] (b) growing the non-human organism or a part thereof under conditions which permit the production of succinate or a composition comprising succinate in said non-human organism or in the culture medium surrounding said non-human organism.

[70998] A further embodiment of the present invention relates to a process for the production of succinate, which comprises
[70999] (a) increasing or generating the activity of a glutamate dehydrogenase non-targeted in a non-human organism or a part thereof, preferably a microorganism, a plant cell, a plant or a part thereof, as compared to a corresponding non-transformed wild type non-human organism or a part thereof; and
[71000] (b) growing the non-human organism or a part thereof under conditions which permit the production of succinate or a composition comprising succinate in said non-human organism or in the culture medium surrounding said non-human organism.

[71001] A further embodiment of the present invention relates to a process for the production of citramalate, which comprises
[71002] (a) increasing or generating the activity of a acetyl-CoA hydrolase non-targeted in a non-human organism or a part thereof, preferably a microorganism, a plant cell, a plant or a part thereof, as compared to a corresponding non-transformed wild type non-human organism or a part thereof; and
[71003] (b) growing the non-human organism or a part thereof under conditions which permit the production of citramalate or a composition comprising citramalate in said non-human organism or in the culture medium surrounding said non-human organism.

[71004] A further embodiment of the present invention relates to a process for the production of pyruvate, which comprises
[71005] (a) increasing or generating the activity of a acetyl-CoA hydrolase non-targeted in a non-human organism or a part thereof, preferably a microorganism, a plant cell, a plant or a part thereof, as compared to a corresponding non-transformed wild type non-human organism or a part thereof; and
[71006] (b) growing the non-human organism or a part thereof under conditions which permit the production of pyruvate or a composition comprising pyruvate in said non-human organism or in the culture medium surrounding said non-human organism.

[71007] A further embodiment of the present invention relates to a process for the production of malate, which comprises
[71008] (a) increasing or generating the activity of a pyruvate carboxylase non-targeted in a non-human organism or a part thereof, preferably a microorganism, a plant cell, a plant or a part thereof, as compared to a corresponding non-transformed wild type non-human organism or a part thereof; and
[71009] (b) growing the non-human organism or a part thereof under conditions which permit the production of malate or a composition comprising malate in said non-human organism or in the culture medium surrounding said non-human organism.

[71010] A further embodiment of the present invention relates to a process for the production of fumarate, which comprises
[71011] (a) increasing or generating the activity of a ycr102c-protein non-targeted in a non-human organism or a part thereof, preferably a microorganism, a plant cell, a plant or a part thereof, as compared to a corresponding non-transformed wild type non-human organism or a part thereof; and
[71012] (b) growing the non-human organism or a part thereof under conditions which permit the production of fumarate or a composition comprising fumarate in said non-human organism or in the culture medium surrounding said non-human organism.

[71013] A further embodiment of the present invention relates to a process for the production of fumarate, which comprises
[71014] (a) increasing or generating the activity of a YDL159W-A-protein non-targeted in a non-human organism or a part thereof, preferably a microorganism, a plant cell, a plant or a part thereof, as compared to a corresponding non-transformed wild type non-human organism or a part thereof; and
[71015] (b) growing the non-human organism or a part thereof under conditions which permit the production of fumarate or a composition comprising fumarate in said non-human organism or in the culture medium surrounding said non-human organism.

[71016] A further embodiment of the present invention relates to a process for the production of fumarate, which comprises
[71017] (a) increasing or generating the activity of a coproporphyrinogen III oxidase non-targeted in a non-human organism or a part thereof, preferably a microorganism, a plant cell, a plant or a part thereof, as compared to a corresponding non-transformed wild type non-human organism or a part thereof; and
[71018] (b) growing the non-human organism or a part thereof under conditions which permit the production of fumarate or a composition comprising fumarate in said non-human organism or in the culture medium surrounding said non-human organism.

[71019] A further embodiment of the present invention relates to a process for the production of succinate, which comprises
[71020] (a) increasing or generating the activity of a coproporphyrinogen III oxidase non-targeted in a non-human organism or a part thereof, preferably a microorganism, a plant cell, a plant or a part thereof, as compared to a corresponding non-transformed wild type non-human organism or a part thereof; and
[71021] (b) growing the non-human organism or a part thereof under conditions which permit the production of succinate or a composition comprising succinate in said non-human organism or in the culture medium surrounding said non-human organism.

[71022] A further embodiment of the present invention relates to a process for the production of malate, which comprises
[71023] (a) increasing or generating the activity of a ygl237c-protein non-targeted in a non-human organism or a part thereof, preferably a microorganism, a plant cell, a plant or a part thereof, as compared to a corresponding non-transformed wild type non-human organism or a part thereof; and
[71024] (b) growing the non-human organism or a part thereof under conditions which permit the production of malate or a composition comprising malate in said non-human organism or in the culture medium surrounding said non-human organism.

[71025] A further embodiment of the present invention relates to a process for the production of succinate, which comprises
[71026] (a) increasing or generating the activity of a ygl237c-protein non-targeted in a non-human organism or a part thereof, preferably a microorganism, a plant cell, a plant or a part thereof, as compared to a corresponding non-transformed wild type non-human organism or a part thereof; and
[71027] (b) growing the non-human organism or a part thereof under conditions which permit the production of succinate or a composition comprising succinate in said non-human organism or in the culture medium surrounding said non-human organism.

[71028] A further embodiment of the present invention relates to a process for the production of fumarate, which comprises
[71029] (a) increasing or generating the activity of a YGR193C-protein non-targeted in a non-human organism or a part thereof, preferably a microorganism, a plant cell, a plant or a part thereof, as compared to a corresponding non-transformed wild type non-human organism or a part thereof; and
[71030] (b) growing the non-human organism or a part thereof under conditions which permit the production of fumarate or a composition comprising fumarate in said non-human organism or in the culture medium surrounding said non-human organism.

[71031] A further embodiment of the present invention relates to a process for the production of malate, which comprises
[71032] (a) increasing or generating the activity of a YGR193C-protein non-targeted in a non-human organism or a part thereof, preferably a microorganism, a plant cell, a plant or a part thereof, as compared to a corresponding non-transformed wild type non-human organism or a part thereof; and
[71033] (b) growing the non-human organism or a part thereof under conditions which permit the production of malate or a composition comprising malate in said non-human organism or in the culture medium surrounding said non-human organism.

[71034] A further embodiment of the present invention relates to a process for the production of succinate, which comprises
[71035] (a) increasing or generating the activity of a YGR193C-protein non-targeted in a non-human organism or a part thereof, preferably a microorganism, a plant cell, a plant or a part thereof, as compared to a corresponding non-transformed wild type non-human organism or a part thereof; and
[71036] (b) growing the non-human organism or a part thereof under conditions which permit the production of succinate or a composition comprising succinate in said non-human organism or in the culture medium surrounding said non-human organism.

[71037] A further embodiment of the present invention relates to a process for the production of malate, which comprises
[71038] (a) increasing or generating the activity of a ygr221c-protein non-targeted in a non-human organism or a part thereof, preferably a microorganism, a plant cell, a plant or a part thereof, as compared to a corresponding non-transformed wild type non-human organism or a part thereof; and
[71039] (b) growing the non-human organism or a part thereof under conditions which permit the production of malate or a composition comprising malate in said non-human organism or in the culture medium surrounding said non-human organism.

[71040] A further embodiment of the present invention relates to a process for the production of citrate, which comprises
[71041] (a) increasing or generating the activity of a glycerol kinase non-targeted in a non-human organism or a part thereof, preferably a microorganism, a plant cell, a plant or a part thereof, as compared to a corresponding non-transformed wild type non-human organism or a part thereof; and
[71042] (b) growing the non-human organism or a part thereof under conditions which permit the production of citrate or a composition comprising citrate in said non-human organism or in the culture medium surrounding said non-human organism.

[71043] A further embodiment of the present invention relates to a process for the production of malate, which comprises
[71044] (a) increasing or generating the activity of a yhr131c-protein non-targeted in a non-human organism or a part thereof, preferably a microorganism, a plant cell, a plant or a part thereof, as compared to a corresponding non-transformed wild type non-human organism or a part thereof; and
[71045] (b) growing the non-human organism or a part thereof under conditions which permit the production of malate or a composition comprising malate in said non-human organism or in the culture medium surrounding said non-human organism.

[71046] A further embodiment of the present invention relates to a process for the production of succinate, which comprises
[71047] (a) increasing or generating the activity of a yhr207c-protein non-targeted in a non-human organism or a part thereof, preferably a microorganism, a plant cell, a plant or a part thereof, as compared to a corresponding non-transformed wild type non-human organism or a part thereof; and
[71048] (b) growing the non-human organism or a part thereof under conditions which permit the production of succinate or a composition comprising succinate in said non-human organism or in the culture medium surrounding said non-human organism.

[71049] A further embodiment of the present invention relates to a process for the production of glycerate, which comprises
[71050] (a) increasing or generating the activity of a DnaJ-like chaperone non-targeted in a non-human organism or a part thereof, preferably a microorganism, a plant cell, a plant or a part thereof, as compared to a corresponding non-transformed wild type non-human organism or a part thereof; and
[71051] (b) growing the non-human organism or a part thereof under conditions which permit the production of glycerate or a composition comprising glycerate in said non-human organism or in the culture medium surrounding said non-human organism.

[71052] A further embodiment of the present invention relates to a process for the production of oxalate, which comprises
[71053] (a) increasing or generating the activity of a hexose transporter non-targeted in a non-human organism or a part thereof, preferably a microorganism, a plant cell, a plant or a part thereof, as compared to a corresponding non-transformed wild type non-human organism or a part thereof; and
[71054] (b) growing the non-human organism or a part thereof under conditions which permit the production of oxalate or a composition comprising oxalate in said non-human organism or in the culture medium surrounding said non-human organism.

[71055] A further embodiment of the present invention relates to a process for the production of citramalate, which comprises
[71056] (a) increasing or generating the activity of a branched chain aminotransferase non-targeted in a non-human organism or a part thereof, preferably a microorganism, a plant cell, a plant or a part thereof, as compared to a corresponding non-transformed wild type non-human organism or a part thereof; and
[71057] (b) growing the non-human organism or a part thereof under conditions which permit the production of citramalate or a composition comprising citramalate in said non-human organism or in the culture medium surrounding said non-human organism.

[71058] A further embodiment of the present invention relates to a process for the production of fumarate, which comprises
[71059] (a) increasing or generating the activity of a polygalacturonase non-targeted in a non-human organism or a part thereof, preferably a microorganism, a plant cell, a plant or a part thereof, as compared to a corresponding non-transformed wild type non-human organism or a part thereof; and
[71060] (b) growing the non-human organism or a part thereof under conditions which permit the production of fumarate or a composition comprising fumarate in said non-human organism or in the culture medium surrounding said non-human organism.

[71061] A further embodiment of the present invention relates to a process for the production of malate, which comprises
[71062] (a) increasing or generating the activity of a polygalacturonase non-targeted in a non-human organism or a part thereof, preferably a microorganism, a plant cell, a plant or a part thereof, as compared to a corresponding non-transformed wild type non-human organism or a part thereof; and
[71063] (b) growing the non-human organism or a part thereof under conditions which permit the production of malate or a composition comprising malate in said non-human organism or in the culture medium surrounding said non-human organism.

[71064] A further embodiment of the present invention relates to a process for the production of malate, which comprises
[71065] (a) increasing or generating the activity of a YKL038W-protein non-targeted in a non-human organism or a part thereof, preferably a microorganism, a plant cell, a plant or a part thereof, as compared to a corresponding non-transformed wild type non-human organism or a part thereof; and
[71066] (b) growing the non-human organism or a part thereof under conditions which permit the production of malate or a composition comprising malate in said non-human organism or in the culture medium surrounding said non-human organism.

[71067] A further embodiment of the present invention relates to a process for the production of vitamin c and/or threonic acid, which comprises
[71068] (a) increasing or generating the activity of a YKL140W-protein non-targeted in a non-human organism or a part thereof, preferably a microorganism, a plant cell, a plant or a part thereof, as compared to a corresponding non-transformed wild type non-human organism or a part thereof; and
[71069] (b) growing the non-human organism or a part thereof under conditions which permit the production of vitamin c and/or threonic acid or a composition comprising vitamin c and/or threonic acid in said non-human organism or in the culture medium surrounding said non-human organism.

[71070] A further embodiment of the present invention relates to a process for the production of fumarate, which comprises
[71071] (a) increasing or generating the activity of a ylr065c-protein non-targeted in a non-human organism or a part thereof, preferably a microorganism, a plant cell, a plant or a part thereof, as compared to a corresponding non-transformed wild type non-human organism or a part thereof; and
[71072] (b) growing the non-human organism or a part thereof under conditions which permit the production of fumarate or a composition comprising fumarate in said non-human organism or in the culture medium surrounding said non-human organism.

[71073] A further embodiment of the present invention relates to a process for the production of succinate, which comprises
[71074] (a) increasing or generating the activity of a isocitrate dehydrogenase non-targeted in a non-human organism or a part thereof, preferably a microorganism, a plant cell, a plant or a part thereof, as compared to a corresponding non-transformed wild type non-human organism or a part thereof; and
[71075] (b) growing the non-human organism or a part thereof under conditions which permit the production of succinate or a composition comprising succinate in said non-human organism or in the culture medium surrounding said non-human organism.

[71076] A further embodiment of the present invention relates to a process for the production of fumarate, which comprises
[71077] (a) increasing or generating the activity of a ylr326w-protein non-targeted in a non-human organism or a part thereof, preferably a microorganism, a plant cell, a plant or a part thereof, as compared to a corresponding non-transformed wild type non-human organism or a part thereof; and
[71078] (b) growing the non-human organism or a part thereof under conditions which permit the production of fumarate or a composition comprising fumarate in said non-human organism or in the culture medium surrounding said non-human organism.

[71079] A further embodiment of the present invention relates to a process for the production of glycerate, which comprises
[71080] (a) increasing or generating the activity of a ylr326w-protein non-targeted in a non-human organism or a part thereof, preferably a microorganism, a plant cell, a plant or a part thereof, as compared to a corresponding non-transformed wild type non-human organism or a part thereof; and
[71081] (b) growing the non-human organism or a part thereof under conditions which permit the production of glycerate or a composition comprising glycerate in said non-human organism or in the culture medium surrounding said non-human organism.

[71082] A further embodiment of the present invention relates to a process for the production of vitamin c and/or threonic acid, which comprises
[71083] (a) increasing or generating the activity of a ylr326w-protein non-targeted in a non-human organism or a part thereof, preferably a microorganism, a plant cell, a plant or a part thereof, as compared to a corresponding non-transformed wild type non-human organism or a part thereof; and
[71084] (b) growing the non-human organism or a part thereof under conditions which permit the production of vitamin c and/or threonic acid or a composition comprising vitamin c and/or threonic acid in said non-human organism or in the culture medium surrounding said non-human organism.

[71085] A further embodiment of the present invention relates to a process for the production of fumarate, which comprises
[71086] (a) increasing or generating the activity of a yml084w-protein non-targeted in a non-human organism or a part thereof, preferably a microorganism, a plant cell, a plant or a part thereof, as compared to a corresponding non-transformed wild type non-human organism or a part thereof; and
[71087] (b) growing the non-human organism or a part thereof under conditions which permit the production of fumarate or a composition comprising fumarate in said non-human organism or in the culture medium surrounding said non-human organism.

[71088] A further embodiment of the present invention relates to a process for the production of succinate, which comprises
[71089] (a) increasing or generating the activity of a yml084w-protein non-targeted in a non-human organism or a part thereof, preferably a microorganism, a plant cell, a plant or a part thereof, as compared to a corresponding non-transformed wild type non-human organism or a part thereof; and
[71090] (b) growing the non-human organism or a part thereof under conditions which permit the production of succinate or a composition comprising succinate in said non-human organism or in the culture medium surrounding said non-human organism.

[71091] A further embodiment of the present invention relates to a process for the production of citramalate, which comprises
[71092] (a) increasing or generating the activity of a yol073c-protein non-targeted in a non-human organism or a part thereof, preferably a microorganism, a plant cell, a plant or a part thereof, as compared to a corresponding non-transformed wild type non-human organism or a part thereof; and
[71093] (b) growing the non-human organism or a part thereof under conditions which permit the production of citramalate or a composition comprising citramalate in said non-human organism or in the culture medium surrounding said non-human organism.

[71094] A further embodiment of the present invention relates to a process for the production of malate, which comprises
[71095] (a) increasing or generating the activity of a yol073c-protein non-targeted in a non-human organism or a part thereof, preferably a microorganism, a plant cell, a plant or a part thereof, as compared to a corresponding non-transformed wild type non-human organism or a part thereof; and
[71096] (b) growing the non-human organism or a part thereof under conditions which permit the production of malate or a composition comprising malate in said non-human organism or in the culture medium surrounding said non-human organism.

[71097] A further embodiment of the present invention relates to a process for the production of vitamin c and/or threonic acid, which comprises
[71098] (a) increasing or generating the activity of a yol160w-protein non-targeted in a non-human organism or a part thereof, preferably a microorganism, a plant cell, a plant or a part thereof, as compared to a corresponding non-transformed wild type non-human organism or a part thereof; and
[71099] (b) growing the non-human organism or a part thereof under conditions which permit the production of vitamin c and/or threonic acid or a composition comprising vitamin c and/or threonic acid in said non-human organism or in the culture medium surrounding said non-human organism.

[71100] A further embodiment of the present invention relates to a process for the production of malate, which comprises
[71101] (a) increasing or generating the activity of a acetyl-CoA acetyltransferase non-targeted in a non-human organism or a part thereof, preferably a microorganism, a plant cell, a plant or a part thereof, as compared to a corresponding non-transformed wild type non-human organism or a part thereof; and
[71102] (b) growing the non-human organism or a part thereof under conditions which permit the production of malate or a composition comprising malate in said non-human organism or in the culture medium surrounding said non-human organism.

[71103] A further embodiment of the present invention relates to a process for the production of vitamin c and/or threonic acid, which comprises
[71104] (a) increasing or generating the activity of a ammonium transporter non-targeted in a non-human organism or a part thereof, preferably a microorganism, a plant cell, a plant or a part thereof, as compared to a corresponding non-transformed wild type non-human organism or a part thereof; and
[71105] (b) growing the non-human organism or a part thereof under conditions which permit the production of vitamin c and/or threonic acid or a composition comprising vitamin c and/or threonic acid in said non-human organism or in the culture medium surrounding said non-human organism.

[71106] A further embodiment of the present invention relates to a process for the production of fumarate, which comprises
[71107] (a) increasing or generating the activity of a 47266012-protein non-targeted in a non-human organism or a part thereof, preferably a microorganism, a plant cell, a plant or a part thereof, as compared to a corresponding non-transformed wild type non-human organism or a part thereof; and
[71108] (b) growing the non-human organism or a part thereof under conditions which permit the production of fumarate or a composition comprising fumarate in said non-human organism or in the culture medium surrounding said non-human organism.

[71109] A further embodiment of the present invention relates to a process for the production of malate, which comprises
[71110] (a) increasing or generating the activity of a 47266012-protein non-targeted in a non-human organism or a part thereof, preferably a microorganism, a plant cell, a plant or a part thereof, as compared to a corresponding non-transformed wild type non-human organism or a part thereof; and
[71111] (b) growing the non-human organism or a part thereof under conditions which permit the production of malate or a composition comprising malate in said non-human organism or in the culture medium surrounding said non-human organism.

[71112] A further embodiment of the present invention relates to a process for the production of succinate, which comprises
[71113] (a) increasing or generating the activity of a 47266012-protein non-targeted in a non-human organism or a part thereof, preferably a microorganism, a plant cell, a plant or a part thereof, as compared to a corresponding non-transformed wild type non-human organism or a part thereof; and
[71114] (b) growing the non-human organism or a part thereof under conditions which permit the production of succinate or a composition comprising succinate in said non-human organism or in the culture medium surrounding said non-human organism.

[71115] A further embodiment of the present invention relates to a process for the production of fumarate, which comprises
[71116] (a) increasing or generating the activity of a 49747384_SOYBEAN-protein non-targeted in a non-human organism or a part thereof, preferably a microorganism, a plant cell, a plant or a part thereof, as compared to a corresponding non-transformed wild type non-human organism or a part thereof; and
[71117] (b) growing the non-human organism or a part thereof under conditions which permit the production of fumarate or a composition comprising fumarate in said non-human organism or in the culture medium surrounding said non-human organism.

[71118] A further embodiment of the present invention relates to a process for the production of malate, which comprises
[71119] (a) increasing or generating the activity of a 49747384_SOYBEAN-protein non-targeted in a non-human organism or a part thereof, preferably a microorganism, a plant cell, a plant or a part thereof, as compared to a corresponding non-transformed wild type non-human organism or a part thereof; and
[71120] (b) growing the non-human organism or a part thereof under conditions which permit the production of malate or a composition comprising malate in said non-human organism or in the culture medium surrounding said non-human organism.

[71121] A further embodiment of the present invention relates to a process for the production of succinate, which comprises
[71122] (a) increasing or generating the activity of a 49747384_SOYBEAN-protein non-targeted in a non-human organism or a part thereof, preferably a microorganism, a plant cell, a plant or a part thereof, as compared to a corresponding non-transformed wild type non-human organism or a part thereof; and
[71123] (b) growing the non-human organism or a part thereof under conditions which permit the production of succinate or a composition comprising succinate in said non-human organism or in the culture medium surrounding said non-human organism.

[71124] A further embodiment of the present invention relates to a process for the production of vitamin c and/or threonic acid, which comprises
[71125] (a) increasing or generating the activity of a 49747384_SOYBEAN-protein non-targeted in a non-human organism or a part thereof, preferably a microorganism, a plant cell, a plant or a part thereof, as compared to a corresponding non-transformed wild type non-human organism or a part thereof; and
[71126] (b) growing the non-human organism or a part thereof under conditions which permit the production of vitamin c and/or threonic acid or a composition comprising vitamin c and/or threonic acid in said non-human organism or in the culture medium surrounding said non-human organism.

[71127] A further embodiment of the present invention relates to a process for the production of citramalate, which comprises
[71128] (a) increasing or generating the activity of a pyruvate kinase non-targeted in a non-human organism or a part thereof, preferably a microorganism, a plant cell, a plant or a part thereof, as compared to a corresponding non-transformed wild type non-human organism or a part thereof; and
[71129] (b) growing the non-human organism or a part thereof under conditions which permit the production of citramalate or a composition comprising citramalate in said non-human organism or in the culture medium surrounding said non-human organism.

[71130] A further embodiment of the present invention relates to a process for the production of succinate, which comprises
[71131] (a) increasing or generating the activity of a pyruvate kinase non-targeted in a non-human organism or a part thereof, preferably a microorganism, a plant cell, a plant or a part thereof, as compared to a corresponding non-transformed wild type non-human organism or a part thereof; and
[71132] (b) growing the non-human organism or a part thereof under conditions which permit the production of succinate or a composition comprising succinate in said non-human organism or in the culture medium surrounding said non-human organism.

[71133] A further embodiment of the present invention relates to a process for the production of citramalate, which comprises
[71134] (a) increasing or generating the activity of a glucose-6-phosphate 1-dehydrogenase non-targeted in a non-human organism or a part thereof, preferably a microorganism, a plant cell, a plant or a part thereof, as compared to a corresponding non-transformed wild type non-human organism or a part thereof; and
[71135] (b) growing the non-human organism or a part thereof under conditions which permit the production of citramalate or a composition comprising citramalate in said non-human organism or in the culture medium surrounding said non-human organism.

[71136] A further embodiment of the present invention relates to a process for the production of citramalate, which comprises
[71137] (a) increasing or generating the activity of a polypeptide comprising a polypeptide as depicted in the respective line in column 5 or 8 of Table II, application no. 15, or a homolog or a fragment thereof, a consensus sequence or at least one polypeptide motif as depicted in the respective line in column 8 of Table IV, application no. 15, whereby the respective line disclose in column 7 the fine chemical citramalate; or
[71138] increasing or generating the activity of an expression product of one or more nucleic acid molecule(s) comprising a polynucleotide as depicted in the respective line in column 5 or 8 of Table I, application no. 15, preferably the coding region thereof, or a homolog or a fragment thereof, whereby the respective line disclose in column 7 the fine chemical citramalate;
[71139] non-targeted in a non-human organism or a part thereof; preferably a microorganism, a plant cell, a plant or a part thereof, as compared to a corresponding non-transformed wild type non-human organism or a part thereof; and
[71140] (b) growing the non-human organism under conditions which permit the production of citramalate, or a composition comprising citramalate in said non-human organism or in the culture medium surrounding said non-human organism.

[71141] A further embodiment of the present invention relates to a process for the production of citrate, which comprises
[71142] (a) increasing or generating the activity of a polypeptide comprising a polypeptide as depicted in the respective line in column 5 or 8 of Table II, application no. 15, or a homolog or a fragment thereof, a consensus sequence or at least one polypeptide motif as depicted in the respective line in column 8 of Table IV, application no. 15, whereby the respective line disclose in column 7 the fine chemical citrate; or
[71143] increasing or generating the activity of an expression product of one or more nucleic acid molecule(s) comprising a polynucleotide as depicted in the respective line in column 5 or 8 of Table I, application no. 15, preferably the coding region thereof, or a homolog or a fragment thereof, whereby the respective line disclose in column 7 the fine chemical citrate;
[71144] non-targeted in a non-human organism or a part thereof; preferably a microorganism, a plant cell, a plant or a part thereof, as compared to a corresponding non-transformed wild type non-human organism or a part thereof; and
[71145] (b) growing the non-human organism under conditions which permit the production of citrate, or a composition comprising citrate in said non-human organism or in the culture medium surrounding said non-human organism.

[71146] A further embodiment of the present invention relates to a process for the production of fumarate, which comprises
[71147] (a) increasing or generating the activity of a polypeptide comprising a polypeptide as depicted in the respective line in column 5 or 8 of Table II, application no. 15, or a homolog or a fragment thereof, a consensus sequence or at least one polypeptide motif as depicted in the respective line in column 8 of Table IV, application no. 15, whereby the respective line disclose in column 7 the fine chemical fumarate; or
[71148] increasing or generating the activity of an expression product of one or more nucleic acid molecule(s) comprising a polynucleotide as depicted in the respective line in column 5 or 8 of Table I, application no. 15, preferably the coding region thereof, or a homolog or a fragment thereof, whereby the respective line disclose in column 7 the fine chemical fumarate;
[71149] non-targeted in a non-human organism or a part thereof; preferably a microorganism, a plant cell, a plant or a part thereof, as compared to a corresponding non-transformed wild type non-human organism or a part thereof; and
[71150] (b) growing the non-human organism under conditions which permit the production of fumarate, or a composition comprising fumarate in said non-human organism or in the culture medium surrounding said non-human organism.

[71151] A further embodiment of the present invention relates to a process for the production of glycerate, which comprises
[71152] (a) increasing or generating the activity of a polypeptide comprising a polypeptide as depicted in the respective line in column 5 or 8 of Table II, application no. 15, or a homolog or a fragment thereof, a consensus sequence or at least one polypeptide motif as depicted in the respective line in column 8 of Table IV, application no. 15, whereby the respective line disclose in column 7 the fine chemical glycerate; or
[71153] increasing or generating the activity of an expression product of one or more nucleic acid molecule(s) comprising a polynucleotide as depicted in the respective line in column 5 or 8 of Table I, application no. 15, preferably the coding region thereof, or a homolog or a fragment thereof, whereby the respective line disclose in column 7 the fine chemical glycerate;
[71154] non-targeted in a non-human organism or a part thereof; preferably a microorganism, a plant cell, a plant or a part thereof, as compared to a corresponding non-transformed wild type non-human organism or a part thereof; and
[71155] (b) growing the non-human organism under conditions which permit the production of glycerate, or a composition comprising glycerate in said non-human organism or in the culture medium surrounding said non-human organism.

[71156] A further embodiment of the present invention relates to a process for the production of malate, which comprises
[71157] (a) increasing or generating the activity of a polypeptide comprising a polypeptide as depicted in the respective line in column 5 or 8 of Table II, application no. 15, or a homolog or a fragment thereof, a consensus sequence or at least one polypeptide motif as depicted in the respective line in column 8 of Table IV, application no. 15, whereby the respective line disclose in column 7 the fine chemical malate; or
[71158] increasing or generating the activity of an expression product of one or more nucleic acid molecule(s) comprising a polynucleotide as depicted in the respective line in column 5 or 8 of Table I, application no. 15, preferably the coding region thereof, or a homolog or a fragment thereof, whereby the respective line disclose in column 7 the fine chemical malate;
[71159] non-targeted in a non-human organism or a part thereof; preferably a microorganism, a plant cell, a plant or a part thereof, as compared to a corresponding non-transformed wild type non-human organism or a part thereof; and
[71160] (b) growing the non-human organism under conditions which permit the production of malate, or a composition comprising malate in said non-human organism or in the culture medium surrounding said non-human organism.

[71161] A further embodiment of the present invention relates to a process for the production of oxalate, which comprises
[71162] (a) increasing or generating the activity of a polypeptide comprising a polypeptide as depicted in the respective line in column 5 or 8 of Table II, application no. 15, or a homolog or a fragment thereof, a consensus sequence or at least one polypeptide motif as depicted in the respective line in column 8 of Table IV, application no. 15, whereby the respective line disclose in column 7 the fine chemical oxalate; or
[71163] increasing or generating the activity of an expression product of one or more nucleic acid molecule(s) comprising a polynucleotide as depicted in the respective line in column 5 or 8 of Table I, application no. 15, preferably the coding region thereof, or a homolog or a fragment thereof, whereby the respective line disclose in column 7 the fine chemical oxalate;
[71164] non-targeted in a non-human organism or a part thereof; preferably a microorganism, a plant cell, a plant or a part thereof, as compared to a corresponding non-transformed wild type non-human organism or a part thereof; and
[71165] (b) growing the non-human organism under conditions which permit the production of oxalate, or a composition comprising oxalate in said non-human organism or in the culture medium surrounding said non-human organism.

[71166] A further embodiment of the present invention relates to a process for the production of pyruvate, which comprises
[71167] (a) increasing or generating the activity of a polypeptide comprising a polypeptide as depicted in the respective line in column 5 or 8 of Table II, application no. 15, or a homolog or a fragment thereof, a consensus sequence or at least one polypeptide motif as depicted in the respective line in column 8 of Table IV, application no. 15, whereby the respective line disclose in column 7 the fine chemical pyruvate; or
[71168] increasing or generating the activity of an expression product of one or more nucleic acid molecule(s) comprising a polynucleotide as depicted in the respective line in column 5 or 8 of Table I, application no. 15, preferably the coding region thereof, or a homolog or a fragment thereof, whereby the respective line disclose in column 7 the fine chemical pyruvate;
[71169] non-targeted in a non-human organism or a part thereof; preferably a microorganism, a plant cell, a plant or a part thereof, as compared to a corresponding non-transformed wild type non-human organism or a part thereof; and
[71170] (b) growing the non-human organism under conditions which permit the production of pyruvate, or a composition comprising pyruvate in said non-human organism or in the culture medium surrounding said non-human organism.

[71171] A further embodiment of the present invention relates to a process for the production of succinate, which comprises
[71172] (a) increasing or generating the activity of a polypeptide comprising a polypeptide as depicted in the respective line in column 5 or 8 of Table II, application no. 15, or a homolog or a fragment thereof, a consensus sequence or at least one polypeptide motif as depicted in the respective line in column 8 of Table IV, application no. 15, whereby the respective line disclose in column 7 the fine chemical succinate; or
[71173] increasing or generating the activity of an expression product of one or more nucleic acid molecule(s) comprising a polynucleotide as depicted in the respective line in column 5 or 8 of Table I, application no. 15, preferably the coding region thereof, or a homolog or a fragment thereof, whereby the respective line disclose in column 7 the fine chemical succinate;
[71174] non-targeted in a non-human organism or a part thereof; preferably a microorganism, a plant cell, a plant or a part thereof, as compared to a corresponding non-transformed wild type non-human organism or a part thereof; and
[71175] (b) growing the non-human organism under conditions which permit the production of succinate, or a composition comprising succinate in said non-human organism or in the culture medium surrounding said non-human organism.

[71176] A further embodiment of the present invention relates to a process for the production of vitamin c and/or threonic acid, which comprises
[71177] (a) increasing or generating the activity of a polypeptide comprising a polypeptide as depicted in the respective line in column 5 or 8 of Table II, application no. 15, or a homolog or a fragment thereof, a consensus sequence or at least one polypeptide motif as depicted in the respective line in column 8 of Table IV, application no. 15, whereby the respective line disclose in column 7 the fine chemical vitamin c and/or threonic acid; or
[71178] increasing or generating the activity of an expression product of one or more nucleic acid molecule(s) comprising a polynucleotide as depicted in the respective line in column 5 or 8 of Table I, application no. 15, preferably the coding region thereof, or a homolog or a fragment thereof, whereby the respective line disclose in column 7 the fine chemical vitamin c and/or threonic acid;
[71179] non-targeted in a non-human organism or a part thereof; preferably a microorganism, a plant cell, a plant or a part thereof, as compared to a corresponding non-transformed wild type non-human organism or a part thereof; and
[71180] (b) growing the non-human organism under conditions which permit the production of vitamin c and/or threonic acid, or a composition comprising vitamin c and/or threonic acid in said non-human organism or in the culture medium surrounding said non-human organism.

[71181] A further embodiment of the present invention relates to a process for the production of succinate, which comprises
[71182] (a) increasing or generating one or more activities selected from the group consisting of protein phosphatase in an organelle, preferably in plastids or mitochondria, especially in plastids, of a non-human organism or a part thereof, preferably a microorganism, a plant cell, a plant or a part thereof, as compared to a corresponding non-transformed wild type non-human organism or a part thereof; and
[71183] (b) growing the non-human organism or a part thereof under conditions which permit the production of succinate or a composition comprising succinate in said non-human organism or in the culture medium surrounding said non-human organism.

[71184] A further embodiment of the present invention relates to a process for the production of malate, which comprises
[71185] (a) increasing or generating one or more activities selected from the group consisting of At1g13930-protein in an organelle, preferably in plastids or mitochondria, especially in plastids, of a non-human organism or a part thereof, preferably a microorganism, a plant cell, a plant or a part thereof, as compared to a corresponding non-transformed wild type non-human organism or a part thereof; and
[71186] (b) growing the non-human organism or a part thereof under conditions which permit the production of malate or a composition comprising malate in said non-human organism or in the culture medium surrounding said non-human organism.

[71187] A further embodiment of the present invention relates to a process for the production of succinate, which comprises
[71188] (a) increasing or generating one or more activities selected from the group consisting of At1g13930-protein in an organelle, preferably in plastids or mitochondria, especially in plastids, of a non-human organism or a part thereof, preferably a microorganism, a plant cell, a plant or a part thereof, as compared to a corresponding non-transformed wild type non-human organism or a part thereof; and
[71189] (b) growing the non-human organism or a part thereof under conditions which permit the production of succinate or a composition comprising succinate in said non-human organism or in the culture medium surrounding said non-human organism.

[71190] A further embodiment of the present invention relates to a process for the production of malate, which comprises
[71191] (a) increasing or generating one or more activities selected from the group consisting of eukaryotic translation initiation factor 5 in an organelle, preferably in plastids or mitochondria, especially in plastids, of a non-human organism or a part thereof, preferably a microorganism organism, a plant cell, a plant or a part thereof, as compared to a corresponding non-transformed wild type non-human organism or a part thereof; and
[71192] (b) growing the non-human organism or a part thereof under conditions which permit the production of malate or a composition comprising malate in said non-human organism or in the culture medium surrounding said non-human organism.

[71193] A further embodiment of the present invention relates to a process for the production of vitamin c and/or threonic acid, which comprises
[71194] (a) increasing or generating one or more activities selected from the group consisting of eukaryotic translation initiation factor 5 in an organelle, preferably in plastids or mitochondria, especially in plastids, of a non-human organism or a part thereof, preferably a microorganism organism, a plant cell, a plant or a part thereof, as compared to a corresponding non-transformed wild type non-human organism or a part thereof; and
[71195] (b) growing the non-human organism or a part thereof under conditions which permit the production of vitamin c and/or threonic acid or a composition comprising vitamin c and/or threonic acid in said non-human organism or in the culture medium surrounding said non-human organism.

[71196] A further embodiment of the present invention relates to a process for the production of fumarate, which comprises
[71197] (a) increasing or generating one or more activities selected from the group consisting of transcriptional regulator in an organelle, preferably in plastids or mitochondria, especially in plastids, of a non-human organism or a part thereof, preferably a microorganism, a plant cell, a plant or a part thereof, as compared to a corresponding non-transformed wild type non-human organism or a part thereof; and
[71198] (b) growing the non-human organism or a part thereof under conditions which permit the production of fumarate or a composition comprising fumarate in said non-human organism or in the culture medium surrounding said non-human organism.

[71199] A further embodiment of the present invention relates to a process for the production of fumarate, which comprises
[71200] (a) increasing or generating one or more activities selected from the group consisting of protein phosphatase in an organelle, preferably in plastids or mitochondria, especially in plastids, of a non-human organism or a part thereof, preferably a microorganism, a plant cell, a plant or a part thereof, as compared to a corresponding non-transformed wild type non-human organism or a part thereof; and
[71201] (b) growing the non-human organism or a part thereof under conditions which permit the production of fumarate or a composition comprising fumarate in said non-human organism or in the culture medium surrounding said non-human organism.

[71202] A further embodiment of the present invention relates to a process for the production of vitamin c and/or threonic acid, which comprises
[71203] (a) increasing or generating one or more activities selected from the group consisting of protein phosphatase in an organelle, preferably in plastids or mitochondria, especially in plastids, of a non-human organism or a part thereof, preferably a microorganism, a plant cell, a plant or a part thereof, as compared to a corresponding non-transformed wild type non-human organism or a part thereof; and
[71204] (b) growing the non-human organism or a part thereof under conditions which permit the production of vitamin c and/or threonic acid or a composition comprising vitamin c and/or threonic acid in said non-human organism or in the culture medium surrounding said non-human organism.

[71205] A further embodiment of the present invention relates to a process for the production of fumarate, which comprises
[71206] (a) increasing or generating one or more activities selected from the group consisting of CBL-interacting protein kinase in an organelle, preferably in plastids or mitochondria, especially in plastids, of a non-human organism or a part thereof, preferably a microorganism, a plant cell, a plant or a part thereof, as compared to a corresponding non-transformed wild type non-human organism or a part thereof; and
[71207] (b) growing the non-human organism or a part thereof under conditions which permit the production of fumarate or a composition comprising fumarate in said non-human organism or in the culture medium surrounding said non-human organism.

[71208] A further embodiment of the present invention relates to a process for the production of malate, which comprises
[71209] (a) increasing or generating one or more activities selected from the group consisting of CBL-interacting protein kinase in an organelle, preferably in plastids or mitochondria, especially in plastids, of a non-human organism or a part thereof, preferably a microorganism, a plant cell, a plant or a part thereof, as compared to a corresponding non-transformed wild type non-human organism or a part thereof; and
[71210] (b) growing the non-human organism or a part thereof under conditions which permit the production of malate or a composition comprising malate in said non-human organism or in the culture medium surrounding said non-human organism.

[71211] A further embodiment of the present invention relates to a process for the production of succinate, which comprises
[71212] (a) increasing or generating one or more activities selected from the group consisting of CBL-interacting protein kinase in an organelle, preferably in plastids or mitochondria, especially in plastids, of a non-human organism or a part thereof, preferably a microorganism, a plant cell, a plant or a part thereof, as compared to a corresponding non-transformed wild type non-human organism or a part thereof; and
[71213] (b) growing the non-human organism or a part thereof under conditions which permit the production of succinate or a composition comprising succinate in said non-human organism or in the culture medium surrounding said non-human organism.

[71214] A further embodiment of the present invention relates to a process for the production of fumarate, which comprises
[71215] (a) increasing or generating one or more activities selected from the group consisting of phenylalanine ammonia-lyase in an organelle, preferably in plastids or mitochondria, especially in plastids, of a non-human organism or a part thereof, preferably a microorganism, a plant cell, a plant or a part thereof, as compared to a corresponding non-transformed wild type non-human organism or a part thereof; and
[71216] (b) growing the non-human organism or a part thereof under conditions which permit the production of fumarate or a composition comprising fumarate in said non-human organism or in the culture medium surrounding said non-human organism.

[71217] A further embodiment of the present invention relates to a process for the production of succinate, which comprises
[71218] (a) increasing or generating one or more activities selected from the group consisting of thioredoxin reductase in an organelle, preferably in plastids or mitochondria, especially in plastids, of a non-human organism or a part thereof, preferably a microorganism, a plant cell, a plant or a part thereof, as compared to a corresponding non-transformed wild type non-human organism or a part thereof; and
[71219] (b) growing the non-human organism or a part thereof under conditions which permit the production of succinate or a composition comprising succinate in said non-human organism or in the culture medium surrounding said non-human organism.

[71220] A further embodiment of the present invention relates to a process for the production of succinate, which comprises
[71221] (a) increasing or generating one or more activities selected from the group consisting of citrate synthase in an organelle, preferably in plastids or mitochondria, especially in plastids, of a non-human organism or a part thereof, preferably a microorganism, a plant cell, a plant or a part thereof, as compared to a corresponding non-transformed wild type non-human organism or a part thereof; and
[71222] (b) growing the non-human organism or a part thereof under conditions which permit the production of succinate or a composition comprising succinate in said non-human organism or in the culture medium surrounding said non-human organism.

[71223] A further embodiment of the present invention relates to a process for the production of citramalate, which comprises
[71224] (a) increasing or generating one or more activities selected from the group consisting of pyruvate kinase in an organelle, preferably in plastids or mitochondria, especially in plastids, of a non-human organism or a part thereof, preferably a microorganism, a plant cell, a plant or a part thereof, as compared to a corresponding non-transformed wild type non-human organism or a part thereof; and
[71225] (b) growing the non-human organism or a part thereof under conditions which permit the production of citramalate or a composition comprising citramalate in said non-human organism or in the culture medium surrounding said non-human organism.

[71226] A further embodiment of the present invention relates to a process for the production of succinate, which comprises
[71227] (a) increasing or generating one or more activities selected from the group consisting of pyruvate kinase in an organelle, preferably in plastids or mitochondria, especially in plastids, of a non-human organism or a part thereof, preferably a microorganism, a plant cell, a plant or a part thereof, as compared to a corresponding non-transformed wild type non-human organism or a part thereof; and
[71228] (b) growing the non-human organism or a part thereof under conditions which permit the production of succinate or a composition comprising succinate in said non-human organism or in the culture medium surrounding said non-human organism.

[71229] A further embodiment of the present invention relates to a process for the production of malate, which comprises
[71230] (a) increasing or generating one or more activities selected from the group consisting of protein phosphatase in an organelle, preferably in plastids or mitochondria, especially in plastids, of a non-human organism or a part thereof, preferably a microorganism, a plant cell, a plant or a part thereof, as compared to a corresponding non-transformed wild type non-human organism or a part thereof; and
[71231] (b) growing the non-human organism or a part thereof under conditions which permit the production of malate or a composition comprising malate in said non-human organism or in the culture medium surrounding said non-human organism.

[71232] A further embodiment of the present invention relates to a process for the production of succinate, which comprises
[71233] (a) increasing or generating one or more activities selected from the group consisting of protein phosphatase in an organelle, preferably in plastids or mitochondria, especially in plastids, of a non-human organism or a part thereof, preferably a microorganism, a plant cell, a plant or a part thereof, as compared to a corresponding non-transformed wild type non-human organism or a part thereof; and
[71234] (b) growing the non-human organism or a part thereof under conditions which permit the production of succinate or a composition comprising succinate in said non-human organism or in the culture medium surrounding said non-human organism.

[71235] A further embodiment of the present invention relates to a process for the production of fumarate, which comprises
[71236] (a) increasing or generating one or more activities selected from the group consisting of thioredoxin family protein in an organelle, preferably in plastids or mitochondria, especially in plastids, of a non-human organism or a part thereof, preferably a microorganism, a plant cell, a plant or a part thereof, as compared to a corresponding non-transformed wild type non-human organism or a part thereof; and
[71237] (b) growing the non-human organism or a part thereof under conditions which permit the production of fumarate or a composition comprising fumarate in said non-human organism or in the culture medium surrounding said non-human organism.

[71238] A further embodiment of the present invention relates to a process for the production of malate, which comprises
[71239] (a) increasing or generating one or more activities selected from the group consisting of thioredoxin family protein in an organelle, preferably in plastids or mitochondria, especially in plastids, of a non-human organism or a part thereof, preferably a microorganism, a plant cell, a plant or a part thereof, as compared to a corresponding non-transformed wild type non-human organism or a part thereof; and
[71240] (b) growing the non-human organism or a part thereof under conditions which permit the production of malate or a composition comprising malate in said non-human organism or in the culture medium surrounding said non-human organism.

[71241] A further embodiment of the present invention relates to a process for the production of glycerate, which comprises
[71242] (a) increasing or generating one or more activities selected from the group consisting of thioredoxin in an organelle, preferably in plastids or mitochondria, especially in plastids, of a non-human organism or a part thereof, preferably a microorganism, a plant cell, a plant or a part thereof, as compared to a corresponding non-transformed wild type non-human organism or a part thereof; and
[71243] (b) growing the non-human organism or a part thereof under conditions which permit the production of glycerate or a composition comprising glycerate in said non-human organism or in the culture medium surrounding said non-human organism.

[71244] A further embodiment of the present invention relates to a process for the production of fumarate, which comprises
[71245] (a) increasing or generating one or more activities selected from the group consisting of auxin response factor in an organelle, preferably in plastids or mitochondria, especially in plastids, of a non-human organism or a part thereof, preferably a microorganism, a plant cell, a plant or a part thereof, as compared to a corresponding non-transformed wild type non-human organism or a part thereof; and
[71246] (b) growing the non-human organism or a part thereof under conditions which permit the production of fumarate or a composition comprising fumarate in said non-human organism or in the culture medium surrounding said non-human organism.

[71247] A further embodiment of the present invention relates to a process for the production of malate, which comprises
[71248] (a) increasing or generating one or more activities selected from the group consisting of auxin response factor in an organelle, preferably in plastids or mitochondria, especially in plastids, of a non-human organism or a part thereof, preferably a microorganism, a plant cell, a plant or a part thereof, as compared to a corresponding non-transformed wild type non-human organism or a part thereof; and
[71249] (b) growing the non-human organism or a part thereof under conditions which permit the production of malate or a composition comprising malate in said non-human organism or in the culture medium surrounding said non-human organism.

[71250] A further embodiment of the present invention relates to a process for the production of citramalate, which comprises
[71251] (a) increasing or generating one or more activities selected from the group consisting of monthiol glutaredoxin in an organelle, preferably in plastids or mitochondria, especially in plastids, of a non-human organism or a part thereof, preferably a microorganism, a plant cell, a plant or a part thereof, as compared to a corresponding non-transformed wild type non-human organism or a part thereof; and
[71252] (b) growing the non-human organism or a part thereof under conditions which permit the production of citramalate or a composition comprising citramalate in said non-human organism or in the culture medium surrounding said non-human organism.

[71253] A further embodiment of the present invention relates to a process for the production of fumarate, which comprises
[71254] (a) increasing or generating one or more activities selected from the group consisting of monthiol glutaredoxin in an organelle, preferably in plastids or mitochondria, especially in plastids, of a non-human organism or a part thereof, preferably a microorganism, a plant cell, a plant or a part thereof, as compared to a corresponding non-transformed wild type non-human organism or a part thereof; and
[71255] (b) growing the non-human organism or a part thereof under conditions which permit the production of fumarate or a composition comprising fumarate in said non-human organism or in the culture medium surrounding said non-human organism.

[71256] A further embodiment of the present invention relates to a process for the production of glycerate, which comprises
[71257] (a) increasing or generating one or more activities selected from the group consisting of monthiol glutaredoxin in an organelle, preferably in plastids or mitochondria, especially in plastids, of a non-human organism or a part thereof, preferably a microorganism, a plant cell, a plant or a part thereof, as compared to a corresponding non-transformed wild type non-human organism or a part thereof; and
[71258] (b) growing the non-human organism or a part thereof under conditions which permit the production of glycerate or a composition comprising glycerate in said non-human organism or in the culture medium surrounding said non-human organism.

[71259] A further embodiment of the present invention relates to a process for the production of malate, which comprises
[71260] (a) increasing or generating one or more activities selected from the group consisting of monthiol glutaredoxin in an organelle, preferably in plastids or mitochondria, especially in plastids, of a non-human organism or a part thereof, preferably a microorganism, a plant cell, a plant or a part thereof, as compared to a corresponding non-transformed wild type non-human organism or a part thereof; and
[71261] (b) growing the non-human organism or a part thereof under conditions which permit the production of malate or a composition comprising malate in said non-human organism or in the culture medium surrounding said non-human organism.

[71262] A further embodiment of the present invention relates to a process for the production of succinate, which comprises
[71263] (a) increasing or generating one or more activities selected from the group consisting of monthiol glutaredoxin in an organelle, preferably in plastids or mitochondria, especially in plastids, of a non-human organism or a part thereof, preferably a microorganism, a plant cell, a plant or a part thereof, as compared to a corresponding non-transformed wild type non-human organism or a part thereof; and
[71264] (b) growing the non-human organism or a part thereof under conditions which permit the production of succinate or a composition comprising succinate in said non-human organism or in the culture medium surrounding said non-human organism.

[71265] A further embodiment of the present invention relates to a process for the production of vitamin c and/or threonic acid, which comprises
[71266] (a) increasing or generating one or more activities selected from the group consisting of monthiol glutaredoxin in an organelle, preferably in plastids or mitochondria, especially in plastids, of a non-human organism or a part thereof, preferably a microorganism, a plant cell, a plant or a part thereof, as compared to a corresponding non-transformed wild type non-human organism or a part thereof; and
[71267] (b) growing the non-human organism or a part thereof under conditions which permit the production of vitamin c and/or threonic acid or a composition comprising vitamin c and/or threonic acid in said non-human organism or in the culture medium surrounding said non-human organism.

[71268] A further embodiment of the present invention relates to a process for the production of citramalate, which comprises
[71269] (a) increasing or generating one or more activities selected from the group consisting of glutaredoxin in an organelle, preferably in plastids or mitochondria, especially in plastids, of a non-human organism or a part thereof, preferably a microorganism, a plant cell, a plant or a part thereof, as compared to a corresponding non-transformed wild type non-human organism or a part thereof; and
[71270] (b) growing the non-human organism or a part thereof under conditions which permit the production of citramalate or a composition comprising citramalate in said non-human organism or in the culture medium surrounding said non-human organism.

[71271] A further embodiment of the present invention relates to a process for the production of fumarate, which comprises
[71272] (a) increasing or generating one or more activities selected from the group consisting of glutaredoxin in an organelle, preferably in plastids or mitochondria, especially in plastids, of a non-human organism or a part thereof, preferably a microorganism, a plant cell, a plant or a part thereof, as compared to a corresponding non-transformed wild type non-human organism or a part thereof; and
[71273] (b) growing the non-human organism or a part thereof under conditions which permit the production of fumarate or a composition comprising fumarate in said non-human organism or in the culture medium surrounding said non-human organism.

[71274] A further embodiment of the present invention relates to a process for the production of glycerate, which comprises
[71275] (a) increasing or generating one or more activities selected from the group consisting of glutaredoxin in an organelle, preferably in plastids or mitochondria, especially in plastids, of a non-human organism or a part thereof, preferably a microorganism, a plant cell, a plant or a part thereof, as compared to a corresponding non-transformed wild type non-human organism or a part thereof; and
[71276] (b) growing the non-human organism or a part thereof under conditions which permit the production of glycerate or a composition comprising glycerate in said non-human organism or in the culture medium surrounding said non-human organism.

[71277] A further embodiment of the present invention relates to a process for the production of malate, which comprises
[71278] (a) increasing or generating one or more activities selected from the group consisting of glutaredoxin in an organelle, preferably in plastids or mitochondria, especially in plastids, of a non-human organism or a part thereof, preferably a microorganism, a plant cell, a plant or a part thereof, as compared to a corresponding non-transformed wild type non-human organism or a part thereof; and
[71279] (b) growing the non-human organism or a part thereof under conditions which permit the production of malate or a composition comprising malate in said non-human organism or in the culture medium surrounding said non-human organism.

[71280] A further embodiment of the present invention relates to a process for the production of succinate, which comprises
[71281] (a) increasing or generating one or more activities selected from the group consisting of glutaredoxin in an organelle, preferably in plastids or mitochondria, especially in plastids, of a non-human organism or a part thereof, preferably a microorganism, a plant cell, a plant or a part thereof, as compared to a corresponding non-transformed wild type non-human organism or a part thereof; and
[71282] (b) growing the non-human organism or a part thereof under conditions which permit the production of succinate or a composition comprising succinate in said non-human organism or in the culture medium surrounding said non-human organism.

[71283] A further embodiment of the present invention relates to a process for the production of glycerate, which comprises
[71284] (a) increasing or generating one or more activities selected from the group consisting of thioredoxin in an organelle, preferably in plastids or mitochondria, especially in plastids, of a non-human organism or a part thereof, preferably a microorganism, a plant cell, a plant or a part thereof, as compared to a corresponding non-transformed wild type non-human organism or a part thereof; and
[71285] (b) growing the non-human organism or a part thereof under conditions which permit the production of glycerate or a composition comprising glycerate in said non-human organism or in the culture medium surrounding said non-human organism.

[71286] A further embodiment of the present invention relates to a process for the production of citramalate, which comprises
[71287] (a) increasing or generating one or more activities selected from the group consisting of monothiol glutaredoxin in an organelle, preferably in plastids or mitochondria, especially in plastids, of a non-human organism or a part thereof, preferably a microorganism, a plant cell, a plant or a part thereof, as compared to a corresponding non-transformed wild type non-human organism or a part thereof; and
[71288] (b) growing the non-human organism or a part thereof under conditions which permit the production of citramalate or a composition comprising citramalate in said non-human organism or in the culture medium surrounding said non-human organism.

[71289] A further embodiment of the present invention relates to a process for the production of fumarate, which comprises
[71290] (a) increasing or generating one or more activities selected from the group consisting of monothiol glutaredoxin in an organelle, preferably in plastids or mitochondria, especially in plastids, of a non-human organism or a part thereof, preferably a microorganism, a plant cell, a plant or a part thereof, as compared to a corresponding non-transformed wild type non-human organism or a part thereof; and
[71291] (b) growing the non-human organism or a part thereof under conditions which permit the production of fumarate or a composition comprising fumarate in said non-human organism or in the culture medium surrounding said non-human organism.

[71292] A further embodiment of the present invention relates to a process for the production of glycerate, which comprises
[71293] (a) increasing or generating one or more activities selected from the group consisting of monothiol glutaredoxin in an organelle, preferably in plastids or mitochondria, especially in plastids, of a non-human organism or a part thereof, preferably a microorganism, a plant cell, a plant or a part thereof, as compared to a corresponding non-transformed wild type non-human organism or a part thereof; and
[71294] (b) growing the non-human organism or a part thereof under conditions which permit the production of glycerate or a composition comprising glycerate in said non-human organism or in the culture medium surrounding said non-human organism.

[71295] A further embodiment of the present invention relates to a process for the production of malate, which comprises
[71296] (a) increasing or generating one or more activities selected from the group consisting of monothiol glutaredoxin in an organelle, preferably in plastids or mitochondria, especially in plastids, of a non-human organism or a part thereof, preferably a microorganism, a plant cell, a plant or a part thereof, as compared to a corresponding non-transformed wild type non-human organism or a part thereof; and
[71297] (b) growing the non-human organism or a part thereof under conditions which permit the production of malate or a composition comprising malate in said non-human organism or in the culture medium surrounding said non-human organism.

[71298] A further embodiment of the present invention relates to a process for the production of succinate, which comprises
[71299] (a) increasing or generating one or more activities selected from the group consisting of monothiol glutaredoxin in an organelle, preferably in plastids or mitochondria, especially in plastids, of a non-human organism or a part thereof, preferably a microorganism, a plant cell, a plant or a part thereof, as compared to a corresponding non-transformed wild type non-human organism or a part thereof; and
[71300] (b) growing the non-human organism or a part thereof under conditions which permit the production of succinate or a composition comprising succinate in said non-human organism or in the culture medium surrounding said non-human organism.

[71301] A further embodiment of the present invention relates to a process for the production of vitamin c and/or threonic acid, which comprises
[71302] (a) increasing or generating one or more activities selected from the group consisting of monothiol glutaredoxin in an organelle, preferably in plastids or mitochondria, especially in plastids, of a non-human organism or a part thereof, preferably a microorganism, a plant cell, a plant or a part thereof, as compared to a corresponding non-transformed wild type non-human organism or a part thereof; and
[71303] (b) growing the non-human organism or a part thereof under conditions which permit the production of vitamin c and/or threonic acid or a composition comprising vitamin c and/or threonic acid in said non-human organism or in the culture medium surrounding said non-human organism.

[71304] A further embodiment of the present invention relates to a process for the production of fumarate, which comprises
[71305] (a) increasing or generating one or more activities selected from the group consisting of monothiol glutaredoxin in an organelle, preferably in plastids or mitochondria, especially in plastids, of a non-human organism or a part thereof, preferably a microorganism, a plant cell, a plant or a part thereof, as compared to a corresponding non-transformed wild type non-human organism or a part thereof; and
[71306] (b) growing the non-human organism or a part thereof under conditions which permit the production of fumarate or a composition comprising fumarate in said non-human organism or in the culture medium surrounding said non-human organism.

[71307] A further embodiment of the present invention relates to a process for the production of glycerate, which comprises
[71308] (a) increasing or generating one or more activities selected from the group consisting of monothiol glutaredoxin in an organelle, preferably in plastids or mitochondria, especially in plastids, of a non-human organism or a part thereof, preferably a microorganism, a plant cell, a plant or a part thereof, as compared to a corresponding non-transformed wild type non-human organism or a part thereof; and
[71309] (b) growing the non-human organism or a part thereof under conditions which permit the production of glycerate or a composition comprising glycerate in said non-human organism or in the culture medium surrounding said non-human organism.

[71310] A further embodiment of the present invention relates to a process for the production of malate, which comprises
[71311] (a) increasing or generating one or more activities selected from the group consisting of monothiol glutaredoxin in an organelle, preferably in plastids or mitochondria, especially in plastids, of a non-human organism or a part thereof, preferably a microorganism, a plant cell, a plant or a part thereof, as compared to a corresponding non-transformed wild type non-human organism or a part thereof; and
[71312] (b) growing the non-human organism or a part thereof under conditions which permit the production of malate or a composition comprising malate in said non-human organism or in the culture medium surrounding said non-human organism.

[71313] A further embodiment of the present invention relates to a process for the production of succinate, which comprises
[71314] (a) increasing or generating one or more activities selected from the group consisting of monothiol glutaredoxin in an organelle, preferably in plastids or mitochondria, especially in plastids, of a non-human organism or a part thereof, preferably a microorganism, a plant cell, a plant or a part thereof, as compared to a corresponding non-transformed wild type non-human organism or a part thereof; and
[71315] (b) growing the non-human organism or a part thereof under conditions which permit the production of succinate or a composition comprising succinate in said non-human organism or in the culture medium surrounding said non-human organism.

[71316] A further embodiment of the present invention relates to a process for the production of citramalate, which comprises
[71317] (a) increasing or generating one or more activities selected from the group consisting of monothiol glutaredoxin in an organelle, preferably in plastids or mitochondria, especially in plastids, of a non-human organism or a part thereof, preferably a microorganism, a plant cell, a plant or a part thereof, as compared to a corresponding non-transformed wild type non-human organism or a part thereof; and
[71318] (b) growing the non-human organism or a part thereof under conditions which permit the production of citramalate or a composition comprising citramalate in said non-human organism or in the culture medium surrounding said non-human organism.

[71319] A further embodiment of the present invention relates to a process for the production of fumarate, which comprises
[71320] (a) increasing or generating one or more activities selected from the group consisting of monothiol glutaredoxin in an organelle, preferably in plastids or mitochondria, especially in plastids, of a non-human organism or a part thereof, preferably a microorganism, a plant cell, a plant or a part thereof, as compared to a corresponding non-transformed wild type non-human organism or a part thereof; and
[71321] (b) growing the non-human organism or a part thereof under conditions which permit the production of fumarate or a composition comprising fumarate in said non-human organism or in the culture medium surrounding said non-human organism.

[71322] A further embodiment of the present invention relates to a process for the production of malate, which comprises
[71323] (a) increasing or generating one or more activities selected from the group consisting of monothiol glutaredoxin in an organelle, preferably in plastids or mitochondria, especially in plastids, of a non-human organism or a part thereof, preferably a microorganism, a plant cell, a plant or a part thereof, as compared to a corresponding non-transformed wild type non-human organism or a part thereof; and
[71324] (b) growing the non-human organism or a part thereof under conditions which permit the production of malate or a composition comprising malate in said non-human organism or in the culture medium surrounding said non-human organism.

[71325] A further embodiment of the present invention relates to a process for the production of succinate, which comprises
[71326] (a) increasing or generating one or more activities selected from the group consisting of monothiol glutaredoxin in an organelle, preferably in plastids or mitochondria, especially in plastids, of a non-human organism or a part thereof, preferably a microorganism, a plant cell, a plant or a part thereof, as compared to a corresponding non-transformed wild type non-human organism or a part thereof; and
[71327] (b) growing the non-human organism or a part thereof under conditions which permit the production of succinate or a composition comprising succinate in said non-human organism or in the culture medium surrounding said non-human organism.

[71328] A further embodiment of the present invention relates to a process for the production of vitamin c and/or threonic acid, which comprises
[71329] (a) increasing or generating one or more activities selected from the group consisting of monothiol glutaredoxin in an organelle, preferably in plastids or mitochondria, especially in plastids, of a non-human organism or a part thereof, preferably a microorganism, a plant cell, a plant or a part thereof, as compared to a corresponding non-transformed wild type non-human organism or a part thereof; and
[71330] (b) growing the non-human organism or a part thereof under conditions which permit the production of vitamin c and/or threonic acid or a composition comprising vitamin c and/or threonic acid in said non-human organism or in the culture medium surrounding said non-human organism.

[71331] A further embodiment of the present invention relates to a process for the production of glycerate, which comprises
[71332] (a) increasing or generating one or more activities selected from the group consisting of monothiol glutaredoxin in an organelle, preferably in plastids or mitochondria, especially in plastids, of a non-human organism or a part thereof, preferably a microorganism, a plant cell, a plant or a part thereof, as compared to a corresponding non-transformed wild type non-human organism or a part thereof; and
[71333] (b) growing the non-human organism or a part thereof under conditions which permit the production of glycerate or a composition comprising glycerate in said non-human organism or in the culture medium surrounding said non-human organism.

[71334] A further embodiment of the present invention relates to a process for the production of citramalate, which comprises
[71335] (a) increasing or generating one or more activities selected from the group consisting of protein phosphatase in an organelle, preferably in plastids or mitochondria, especially in plastids, of a non-human organism or a part thereof, preferably a microorganism, a plant cell, a plant or a part thereof, as compared to a corresponding non-transformed wild type non-human organism or a part thereof; and
[71336] (b) growing the non-human organism or a part thereof under conditions which permit the production of citramalate or a composition comprising citramalate in said non-human organism or in the culture medium surrounding said non-human organism.

[71337] A further embodiment of the present invention relates to a process for the production of succinate, which comprises
[71338] (a) increasing or generating one or more activities selected from the group consisting of protein phosphatase in an organelle, preferably in plastids or mitochondria, especially in plastids, of a non-human organism or a part thereof, preferably a microorganism, a plant cell, a plant or a part thereof, as compared to a corresponding non-transformed wild type non-human organism or a part thereof; and
[71339] (b) growing the non-human organism or a part thereof under conditions which permit the production of succinate or a composition comprising succinate in said non-human organism or in the culture medium surrounding said non-human organism.

[71340] A further embodiment of the present invention relates to a process for the production of citramalate, which comprises
[71341] (a) increasing or generating one or more activities selected from the group consisting of glutaredoxin in an organelle, preferably in plastids or mitochondria, especially in plastids, of a non-human organism or a part thereof, preferably a microorganism, a plant cell, a plant or a part thereof, as compared to a corresponding non-transformed wild type non-human organism or a part thereof; and
[71342] (b) growing the non-human organism or a part thereof under conditions which permit the production of citramalate or a composition comprising citramalate in said non-human organism or in the culture medium surrounding said non-human organism.

[71343] A further embodiment of the present invention relates to a process for the production of fumarate, which comprises
[71344] (a) increasing or generating one or more activities selected from the group consisting of glutaredoxin in an organelle, preferably in plastids or mitochondria, especially in plastids, of a non-human organism or a part thereof, preferably a microorganism, a plant cell, a plant or a part thereof, as compared to a corresponding non-transformed wild type non-human organism or a part thereof; and
[71345] (b) growing the non-human organism or a part thereof under conditions which permit the production of fumarate or a composition comprising fumarate in said non-human organism or in the culture medium surrounding said non-human organism.

[71346] A further embodiment of the present invention relates to a process for the production of malate, which comprises
[71347] (a) increasing or generating one or more activities selected from the group consisting of glutaredoxin in an organelle, preferably in plastids or mitochondria, especially in plastids, of a non-human organism or a part thereof, preferably a microorganism, a plant cell, a plant or a part thereof, as compared to a corresponding non-transformed wild type non-human organism or a part thereof; and
[71348] (b) growing the non-human organism or a part thereof under conditions which permit the production of malate or a composition comprising malate in said non-human organism or in the culture medium surrounding said non-human organism.

[71349] A further embodiment of the present invention relates to a process for the production of succinate, which comprises
[71350] (a) increasing or generating one or more activities selected from the group consisting of glutaredoxin in an organelle, preferably in plastids or mitochondria, especially in plastids, of a non-human organism or a part thereof, preferably a microorganism, a plant cell, a plant or a part thereof, as compared to a corresponding non-transformed wild type non-human organism or a part thereof; and
[71351] (b) growing the non-human organism or a part thereof under conditions which permit the production of succinate or a composition comprising succinate in said non-human organism or in the culture medium surrounding said non-human organism.

[71352] A further embodiment of the present invention relates to a process for the production of vitamin c and/or threonic acid, which comprises
[71353] (a) increasing or generating one or more activities selected from the group consisting of glutaredoxin in an organelle, preferably in plastids or mitochondria, especially in plastids, of a non-human organism or a part thereof, preferably a microorganism, a plant cell, a plant or a part thereof, as compared to a corresponding non-transformed wild type non-human organism or a part thereof; and
[71354] (b) growing the non-human organism or a part thereof under conditions which permit the production of vitamin c and/or threonic acid or a composition comprising vitamin c and/or threonic acid in said non-human organism or in the culture medium surrounding said non-human organism.

[71355] A further embodiment of the present invention relates to a process for the production of malate, which comprises
[71356] (a) increasing or generating one or more activities selected from the group consisting of calcium-dependent protein kinase in an organelle, preferably in plastids or mitochondria, especially in plastids, of a non-human organism or a part thereof, preferably a microorganism, a plant cell, a plant or a part thereof, as compared to a corresponding non-transformed wild type non-human organism or a part thereof; and
[71357] (b) growing the non-human organism or a part thereof under conditions which permit the production of malate or a composition comprising malate in said non-human organism or in the culture medium surrounding said non-human organism.

[71358] A further embodiment of the present invention relates to a process for the production of fumarate, which comprises
[71359] (a) increasing or generating one or more activities selected from the group consisting of heat shock transcription factor in an organelle, preferably in plastids or mitochondria, especially in plastids, of a non-human organism or a part thereof, preferably a microorganism, a plant cell, a plant or a part thereof, as compared to a corresponding non-transformed wild type non-human organism or a part thereof; and
[71360] (b) growing the non-human organism or a part thereof under conditions which permit the production of fumarate or a composition comprising fumarate in said non-human organism or in the culture medium surrounding said non-human organism.

[71361] A further embodiment of the present invention relates to a process for the production of malate, which comprises
[71362] (a) increasing or generating one or more activities selected from the group consisting of heat shock transcription factor in an organelle, preferably in plastids or mitochondria, especially in plastids, of a non-human organism or a part thereof, preferably a microorganism, a plant cell, a plant or a part thereof, as compared to a corresponding non-transformed wild type non-human organism or a part thereof; and
[71363] (b) growing the non-human organism or a part thereof under conditions which permit the production of malate or a composition comprising malate in said non-human organism or in the culture medium surrounding said non-human organism.

[71364] A further embodiment of the present invention relates to a process for the production of succinate, which comprises
[71365] (a) increasing or generating one or more activities selected from the group consisting of heat shock transcription factor in an organelle, preferably in plastids or mitochondria, especially in plastids, of a non-human organism or a part thereof, preferably a microorganism, a plant cell, a plant or a part thereof, as compared to a corresponding non-transformed wild type non-human organism or a part thereof; and
[71366] (b) growing the non-human organism or a part thereof under conditions which permit the production of succinate or a composition comprising succinate in said non-human organism or in the culture medium surrounding said non-human organism.

[71367] A further embodiment of the present invention relates to a process for the production of glycerate, which comprises
[71368] (a) increasing or generating one or more activities selected from the group consisting of gibberellin 20-oxidase in an organelle, preferably in plastids or mitochondria, especially in plastids, of a non-human organism or a part thereof, preferably a microorganism, a plant cell, a plant or a part thereof, as compared to a corresponding non-transformed wild type non-human organism or a part thereof; and
[71369] (b) growing the non-human organism or a part thereof under conditions which permit the production of glycerate or a composition comprising glycerate in said non-human organism or in the culture medium surrounding said non-human organism.

[71370] A further embodiment of the present invention relates to a process for the production of malate, which comprises
[71371] (a) increasing or generating one or more activities selected from the group consisting of gibberellin 20-oxidase in an organelle, preferably in plastids or mitochondria, especially in plastids, of a non-human organism or a part thereof, preferably a microorganism, a plant cell, a plant or a part thereof, as compared to a corresponding non-transformed wild type non-human organism or a part thereof; and
[71372] (b) growing the non-human organism or a part thereof under conditions which permit the production of malate or a composition comprising malate in said non-human organism or in the culture medium surrounding said non-human organism.

[71373] A further embodiment of the present invention relates to a process for the production of succinate, which comprises
[71374] (a) increasing or generating one or more activities selected from the group consisting of monothiol glutaredoxin in an organelle, preferably in plastids or mitochondria, especially in plastids, of a non-human organism or a part thereof, preferably a microorganism, a plant cell, a plant or a part thereof, as compared to a corresponding non-transformed wild type non-human organism or a part thereof; and
[71375] (b) growing the non-human organism or a part thereof under conditions which permit the production of succinate or a composition comprising succinate in said non-human organism or in the culture medium surrounding said non-human organism.

[71376] A further embodiment of the present invention relates to a process for the production of malate, which comprises
[71377] (a) increasing or generating one or more activities selected from the group consisting of translation initiation factor subunit in an organelle, preferably in plastids or mitochondria, especially in plastids, of a non-human organism or a part thereof, preferably a microorganism, a plant cell, a plant or a part thereof, as compared to a corresponding non-transformed wild type non-human organism or a part thereof; and
[71378] (b) growing the non-human organism or a part thereof under conditions which permit the production of malate or a composition comprising malate in said non-human organism or in the culture medium surrounding said non-human organism.

[71379] A further embodiment of the present invention relates to a process for the production of fumarate, which comprises
[71380] (a) increasing or generating one or more activities selected from the group consisting of transcription factor in an organelle, preferably in plastids or mitochondria, especially in plastids, of a non-human organism or a part thereof, preferably a microorganism, a plant cell, a plant or a part thereof, as compared to a corresponding non-transformed wild type non-human organism or a part thereof; and
[71381] (b) growing the non-human organism or a part thereof under conditions which permit the production of fumarate or a composition comprising fumarate in said non-human organism or in the culture medium surrounding said non-human organism.

[71382] A further embodiment of the present invention relates to a process for the production of malate, which comprises
[71383] (a) increasing or generating one or more activities selected from the group consisting of transcription factor in an organelle, preferably in plastids or mitochondria, especially in plastids, of a non-human organism or a part thereof, preferably a microorganism, a plant cell, a plant or a part thereof, as compared to a corresponding non-transformed wild type non-human organism or a part thereof; and
[71384] (b) growing the non-human organism or a part thereof under conditions which permit the production of malate or a composition comprising malate in said non-human organism or in the culture medium surrounding said non-human organism.

[71385] A further embodiment of the present invention relates to a process for the production of succinate, which comprises
[71386] (a) increasing or generating one or more activities selected from the group consisting of protein phosphatase in an organelle, preferably in plastids or mitochondria, especially in plastids, of a non-human organism or a part thereof, preferably a microorganism, a plant cell, a plant or a part thereof, as compared to a corresponding non-transformed wild type non-human organism or a part thereof; and
[71387] (b) growing the non-human organism or a part thereof under conditions which permit the production of succinate or a composition comprising succinate in said non-human organism or in the culture medium surrounding said non-human organism.

[71388] A further embodiment of the present invention relates to a process for the production of succinate, which comprises
[71389] (a) increasing or generating one or more activities selected from the group consisting of pyruvate kinase in an organelle, preferably in plastids or mitochondria, especially in plastids, of a non-human organism or a part thereof, preferably a microorganism, a plant cell, a plant or a part thereof, as compared to a corresponding non-transformed wild type non-human organism or a part thereof; and
[71390] (b) growing the non-human organism or a part thereof under conditions which permit the production of succinate or a composition comprising succinate in said non-human organism or in the culture medium surrounding said non-human organism.

[71391] A further embodiment of the present invention relates to a process for the production of fumarate, which comprises
[71392] (a) increasing or generating one or more activities selected from the group consisting of zinc finger protein in an organelle, preferably in plastids or mitochondria, especially in plastids, of a non-human organism or a part thereof, preferably a microorganism, a plant cell, a plant or a part thereof, as compared to a corresponding non-transformed wild type non-human organism or a part thereof; and
[71393] (b) growing the non-human organism or a part thereof under conditions which permit the production of fumarate or a composition comprising fumarate in said non-human organism or in the culture medium surrounding said non-human organism.

[71394] A further embodiment of the present invention relates to a process for the production of citramalate, which comprises
[71395] (a) increasing or generating one or more activities selected from the group consisting of CDP-diacylglycerol-serine O-phosphatidyltransferase in an organelle, preferably in plastids or mitochondria, especially in plastids, of a non-human organism or a part thereof, preferably a microorganism, a plant cell, a plant or a part thereof, as compared to a corresponding non-transformed wild type non-human organism or a part thereof; and
[71396] (b) growing the non-human organism or a part thereof under conditions which permit the production of citramalate or a composition comprising citramalate in said non-human organism or in the culture medium surrounding said non-human organism.

[71397] A further embodiment of the present invention relates to a process for the production of fumarate, which comprises
[71398] (a) increasing or generating one or more activities selected from the group consisting of CDP-diacylglycerol-serine O-phosphatidyltransferase in an organelle, preferably in plastids or mitochondria, especially in plastids, of a non-human organism or a part thereof, preferably a microorganism, a plant cell, a plant or a part thereof, as compared to a corresponding non-transformed wild type non-human organism or a part thereof; and
[71399] (b) growing the non-human organism or a part thereof under conditions which permit the production of fumarate or a composition comprising fumarate in said non-human organism or in the culture medium surrounding said non-human organism.

[71400] A further embodiment of the present invention relates to a process for the production of malate, which comprises
[71401] (a) increasing or generating one or more activities selected from the group consisting of CDP-diacylglycerol-serine O-phosphatidyltransferase in an organelle, preferably in plastids or mitochondria, especially in plastids, of a non-human organism or a part thereof, preferably a microorganism, a plant cell, a plant or a part thereof, as compared to a corresponding non-transformed wild type non-human organism or a part thereof; and
[71402] (b) growing the non-human organism or a part thereof under conditions which permit the production of malate or a composition comprising malate in said non-human organism or in the culture medium surrounding said non-human organism.

[71403] A further embodiment of the present invention relates to a process for the production of malate, which comprises
[71404] (a) increasing or generating one or more activities selected from the group consisting of Glycine cleavage system T aminomethyltransferase in an organelle, preferably in plastids or mitochondria, especially in plastids, of a non-human organism or a part thereof, preferably a microorganism, a plant cell, a plant or a part thereof, as compared to a corresponding non-transformed wild type non-human organism or a part thereof; and
[71405] (b) growing the non-human organism or a part thereof under conditions which permit the production of malate or a composition comprising malate in said non-human organism or in the culture medium surrounding said non-human organism.

[71406] A further embodiment of the present invention relates to a process for the production of malate, which comprises
[71407] (a) increasing or generating one or more activities selected from the group consisting of transcriptional regulator in an organelle, preferably in plastids or mitochondria, especially in plastids, of a non-human organism or a part thereof, preferably a microorganism, a plant cell, a plant or a part thereof, as compared to a corresponding non-transformed wild type non-human organism or a part thereof; and
[71408] (b) growing the non-human organism or a part thereof under conditions which permit the production of malate or a composition comprising malate in said non-human organism or in the culture medium surrounding said non-human organism.

[71409] A further embodiment of the present invention relates to a process for the production of malate, which comprises
[71410] (a) increasing or generating one or more activities selected from the group consisting of adenylylsulfate kinase in an organelle, preferably in plastids or mitochondria, especially in plastids, of a non-human organism or a part thereof, preferably a microorganism, a plant cell, a plant or a part thereof, as compared to a corresponding non-transformed wild type non-human organism or a part thereof; and
[71411] (b) growing the non-human organism or a part thereof under conditions which permit the production of malate or a composition comprising malate in said non-human organism or in the culture medium surrounding said non-human organism.

[71412] A further embodiment of the present invention relates to a process for the production of succinate, which comprises
[71413] (a) increasing or generating one or more activities selected from the group consisting of adenylylsulfate kinase in an organelle, preferably in plastids or mitochondria, especially in plastids, of a non-human organism or a part thereof, preferably a microorganism, a plant cell, a plant or a part thereof, as compared to a corresponding non-transformed wild type non-human organism or a part thereof; and
[71414] (b) growing the non-human organism or a part thereof under conditions which permit the production of succinate or a composition comprising succinate in said non-human organism or in the culture medium surrounding said non-human organism.

[71415] A further embodiment of the present invention relates to a process for the production of fumarate, which comprises
[71416] (a) increasing or generating one or more activities selected from the group consisting of sec-independent protein translocase in an organelle, preferably in plastids or mitochondria, especially in plastids, of a non-human organism or a part thereof, preferably a microorganism, a plant cell, a plant or a part thereof, as compared to a corresponding non-transformed wild type non-human organism or a part thereof; and
[71417] (b) growing the non-human organism or a part thereof under conditions which permit the production of fumarate or a composition comprising fumarate in said non-human organism or in the culture medium surrounding said non-human organism.

[71418] A further embodiment of the present invention relates to a process for the production of malate, which comprises
[71419] (a) increasing or generating one or more activities selected from the group consisting of sec-independent protein translocase in an organelle, preferably in plastids or mitochondria, especially in plastids, of a non-human organism or a part thereof, preferably a microorganism a plant cell, a plant or a part thereof, as compared to a corresponding non-transformed, wild type non-human organism or a part thereof; and
[71420] (b) growing the non-human organism or a part thereof under conditions which permit the production of malate or a composition comprising malate in said non-human organism or in the culture medium surrounding said non-human organism.

[71421] A further embodiment of the present invention relates to a process for the production of fumarate, which comprises
[71422] (a) increasing or generating one or more activities selected from the group consisting of fumarate hydratase in an organelle, preferably in plastids or mitochondria, especially in plastids, of a non-human organism or a part thereof, preferably a microorganism, a plant cell, a plant or a part thereof, as compared to a corresponding non-transformed wild type non-human organism or a part thereof; and
[71423] (b) growing the non-human organism or a part thereof under conditions which permit the production of fumarate or a composition comprising fumarate in said non-human organism or in the culture medium surrounding said non-human organism.

[71424] A further embodiment of the present invention relates to a process for the production of succinate, which comprises
[71425] (a) increasing or generating one or more activities selected from the group consisting of pyruvate kinase in an organelle, preferably in plastids or mitochondria, especially in plastids, of a non-human organism or a part thereof, preferably a microorganism, a plant cell, a plant or a part thereof, as compared to a corresponding non-transformed wild type non-human organism or a part thereof; and
[71426] (b) growing the non-human organism or a part thereof under conditions which permit the production of succinate or a composition comprising succinate in said non-human organism or in the culture medium surrounding said non-human organism.

[71427] A further embodiment of the present invention relates to a process for the production of succinate, which comprises
[71428] (a) increasing or generating one or more activities selected from the group consisting of transcriptional regulator protein in an organelle, preferably in plastids or mitochondria, especially in plastids, of a non-human organism or a part thereof, preferably a microorganism, a plant cell, a plant or a part thereof, as compared to a corresponding non-transformed wild type non-human organism or a part thereof; and
[71429] (b) growing the non-human organism or a part thereof under conditions which permit the production of succinate or a composition comprising succinate in said non-human organism or in the culture medium surrounding said non-human organism.

[71430] A further embodiment of the present invention relates to a process for the production of glycerate, which comprises
[71431] (a) increasing or generating one or more activities selected from the group consisting of beta-hydroxylase in an organelle, preferably in plastids or mitochondria, especially in plastids, of a non-human organism or a part thereof, preferably a microorganism, a plant cell, a plant or a part thereof, as compared to a corresponding non-transformed wild type non-human organism or a part thereof; and
[71432] (b) growing the non-human organism or a part thereof under conditions which permit the production of glycerate or a composition comprising glycerate in said non-human organism or in the culture medium surrounding said non-human organism.

[71433] A further embodiment of the present invention relates to a process for the production of succinate, which comprises
[71434] (a) increasing or generating one or more activities selected from the group consisting of 30S ribosomal protein S3 in an organelle, preferably in plastids or mitochondria, especially in plastids, of a non-human organism or a part thereof, preferably a microorganism, a plant cell, a plant or a part thereof, as compared to a corresponding non-transformed wild type non-human organism or a part thereof; and
[71435] (b) growing the non-human organism or a part thereof under conditions which permit the production of succinate or a composition comprising succinate in said non-human organism or in the culture medium surrounding said non-human organism.

[71436] A further embodiment of the present invention relates to a process for the production of citramalate, which comprises
[71437] (a) increasing or generating one or more activities selected from the group consisting of 50S ribosomal protein L14 in an organelle, preferably in plastids or mitochondria, especially in plastids, of a non-human organism or a part thereof, preferably a microorganism, a plant cell, a plant or a part thereof, as compared to a corresponding non-transformed wild type non-human organism or a part thereof; and
[71438] (b) growing the non-human organism or a part thereof under conditions which permit the production of citramalate or a composition comprising citramalate in said non-human organism or in the culture medium surrounding said non-human organism.

[71439] A further embodiment of the present invention relates to a process for the production of malate, which comprises
[71440] (a) increasing or generating one or more activities selected from the group consisting of acyl-CoA synthase in an organelle, preferably in plastids or mitochondria, especially in plastids, of a non-human organism or a part thereof, preferably a microorganism, a plant cell, a plant or a part thereof, as compared to a corresponding non-transformed wild type non-human organism or a part thereof; and
[71441] (b) growing the non-human organism or a part thereof under conditions which permit the production of malate or a composition comprising malate in said non-human organism or in the culture medium surrounding said non-human organism.

[71442] A further embodiment of the present invention relates to a process for the production of citramalate, which comprises
[71443] (a) increasing or generating one or more activities selected from the group consisting of 2-oxoglutarate dehydrogenase E1 subunit in an organelle, preferably in plastids or mitochondria, especially in plastids, of a non-human organism or a part thereof, preferably a microorganism, a plant cell, a plant or a part thereof, as compared to a corresponding non-transformed wild type non-human organism or a part thereof; and
[71444] (b) growing the non-human organism or a part thereof under conditions which permit the production of citramalate or a composition comprising citramalate in said non-human organism or in the culture medium surrounding said non-human organism.

[71445] A further embodiment of the present invention relates to a process for the production of fumarate, which comprises
[71446] (a) increasing or generating one or more activities selected from the group consisting of 2-oxoglutarate dehydrogenase E1 subunit in an organelle, preferably in plastids or mitochondria, especially in plastids, of a non-human organism or a part thereof, preferably a microorganism, a plant cell, a plant or a part thereof, as compared to a corresponding non-transformed wild type non-human organism or a part thereof; and
[71447] (b) growing the non-human organism or a part thereof under conditions which permit the production of fumarate or a composition comprising fumarate in said non-human organism or in the culture medium surrounding said non-human organism.

[71448] A further embodiment of the present invention relates to a process for the production of malate, which comprises
[71449] (a) increasing or generating one or more activities selected from the group consisting of 2-oxoglutarate dehydrogenase E1 subunit in an organelle, preferably in plastids or mitochondria, especially in plastids, of a non-human organism or a part thereof, preferably a microorganism, a plant cell, a plant or a part thereof, as compared to a corresponding non-transformed wild type non-human organism or a part thereof; and
[71450] (b) growing the non-human organism or a part thereof under conditions which permit the production of malate or a composition comprising malate in said non-human organism or in the culture medium surrounding said non-human organism.

[71451] A further embodiment of the present invention relates to a process for the production of succinate, which comprises
[71452] (a) increasing or generating one or more activities selected from the group consisting of 2-oxoglutarate dehydrogenase E1 subunit in an organelle, preferably in plastids or mitochondria, especially in plastids, of a non-human organism or a part thereof, preferably a microorganism, a plant cell, a plant or a part thereof, as compared to a corresponding non-transformed wild type non-human organism or a part thereof; and
[71453] (b) growing the non-human organism or a part thereof under conditions which permit the production of succinate or a composition comprising succinate in said non-human organism or in the culture medium surrounding said non-human organism.

[71454] A further embodiment of the present invention relates to a process for the production of vitamin c and/or threonic acid, which comprises
[71455] (a) increasing or generating one or more activities selected from the group consisting of 2-oxoglutarate dehydrogenase E1 subunit in an organelle, preferably in plastids or mitochondria, especially in plastids, of a non-human organism or a part thereof, preferably a microorganism, a plant cell, a plant or a part thereof, as compared to a corresponding non-transformed wild type non-human organism or a part thereof; and
[71456] (b) growing the non-human organism or a part thereof under conditions which permit the production of vitamin c and/or threonic acid or a composition comprising vitamin c and/or threonic acid in said non-human organism or in the culture medium surrounding said non-human organism.

[71457] A further embodiment of the present invention relates to a process for the production of citramalate, which comprises
[71458] (a) increasing or generating one or more activities selected from the group consisting of transcriptional regulator in an organelle, preferably in plastids or mitochondria, especially in plastids, of a non-human organism or a part thereof, preferably a microorganism, a plant cell, a plant or a part thereof, as compared to a corresponding non-transformed wild type non-human organism or a part thereof; and
[71459] (b) growing the non-human organism or a part thereof under conditions which permit the production of citramalate or a composition comprising citramalate in said non-human organism or in the culture medium surrounding said non-human organism.

[71460] A further embodiment of the present invention relates to a process for the production of fumarate, which comprises
[71461] (a) increasing or generating one or more activities selected from the group consisting of transcriptional regulator in an organelle, preferably in plastids or mitochondria, especially in plastids, of a non-human organism or a part thereof, preferably a microorganism, a plant cell, a plant or a part thereof, as compared to a corresponding non-transformed wild type non-human organism or a part thereof; and
[71462] (b) growing the non-human organism or a part thereof under conditions which permit the production of fumarate or a composition comprising fumarate in said non-human organism or in the culture medium surrounding said non-human organism.

[71463] A further embodiment of the present invention relates to a process for the production of succinate, which comprises
[71464] (a) increasing or generating one or more activities selected from the group consisting of oxidoreductase in an organelle, preferably in plastids or mitochondria, especially in plastids, of a non-human organism or a part thereof, preferably a microorganism, a plant cell, a plant or a part thereof, as compared to a corresponding non-transformed wild type non-human organism or a part thereof; and
[71465] (b) growing the non-human organism or a part thereof under conditions which permit the production of succinate or a composition comprising succinate in said non-human organism or in the culture medium surrounding said non-human organism.

[71466] A further embodiment of the present invention relates to a process for the production of fumarate, which comprises
[71467] (a) increasing or generating one or more activities selected from the group consisting of CTP synthase in an organelle, preferably in plastids or mitochondria, especially in plastids, of a non-human organism or a part thereof, preferably a microorganism, a plant cell, a plant or a part thereof, as compared to a corresponding non-transformed wild type non-human organism or a part thereof; and
[71468] (b) growing the non-human organism or a part thereof under conditions which permit the production of fumarate or a composition comprising fumarate in said non-human organism or in the culture medium surrounding said non-human organism.

[71469] A further embodiment of the present invention relates to a process for the production of malate, which comprises
[71470] (a) increasing or generating one or more activities selected from the group consisting of CTP synthase in an organelle, preferably in plastids or mitochondria, especially in plastids, of a non-human organism or a part thereof, preferably a microorganism, a plant cell, a plant or a part thereof, as compared to a corresponding non-transformed wild type non-human organism or a part thereof; and
[71471] (b) growing the non-human organism or a part thereof under conditions which permit the production of malate or a composition comprising malate in said non-human organism or in the culture medium surrounding said non-human organism.

[71472] A further embodiment of the present invention relates to a process for the production of succinate, which comprises
[71473] (a) increasing or generating one or more activities selected from the group consisting of CTP synthase in an organelle, preferably in plastids or mitochondria, especially in plastids, of a non-human organism or a part thereof, preferably a microorganism, a plant cell, a plant or a part thereof, as compared to a corresponding non-transformed wild type non-human organism or a part thereof; and
[71474] (b) growing the non-human organism or a part thereof under conditions which permit the production of succinate or a composition comprising succinate in said non-human organism or in the culture medium surrounding said non-human organism.

[71475] A further embodiment of the present invention relates to a process for the production of succinate, which comprises
[71476] (a) increasing or generating one or more activities selected from the group consisting of recombinase A in an organelle, preferably in plastids or mitochondria, especially in plastids, of a non-human organism or a part thereof, preferably a microorganism, a plant cell, a plant or a part thereof, as compared to a corresponding non-transformed wild type non-human organism or a part thereof; and
[71477] (b) growing the non-human organism or a part thereof under conditions which permit the production of succinate or a composition comprising succinate in said non-human organism or in the culture medium surrounding said non-human organism.

[71478] A further embodiment of the present invention relates to a process for the production of malate, which comprises
[71479] (a) increasing or generating one or more activities selected from the group consisting of glucose-1-phosphate cytidylyltransferase in an organelle, preferably in plastids or mitochondria, especially in plastids, of a non-human organism or a part thereof, preferably a microorganism, a plant cell, a plant or a part thereof, as compared to a corresponding non-transformed wild type non-human organism or a part thereof; and
[71480] (b) growing the non-human organism or a part thereof under conditions which permit the production of malate or a composition comprising malate in said non-human organism or in the culture medium surrounding said non-human organism.

[71481] A further embodiment of the present invention relates to a process for the production of fumarate, which comprises
[71482] (a) increasing or generating one or more activities selected from the group consisting of CDP-glucose-4,6-dehydratase in an organelle, preferably in plastids or mitochondria, especially in plastids, of a non-human organism or a part thereof, preferably a microorganism, a plant cell, a plant or a part thereof, as compared to a corresponding non-transformed wild type non-human organism or a part thereof; and
[71483] (b) growing the non-human organism or a part thereof under conditions which permit the production of fumarate or a composition comprising fumarate in said non-human organism or in the culture medium surrounding said non-human organism.

[71484] A further embodiment of the present invention relates to a process for the production of malate, which comprises
[71485] (a) increasing or generating one or more activities selected from the group consisting of CDP-glucose-4,6-dehydratase in an organelle, preferably in plastids or mitochondria, especially in plastids, of a non-human organism or a part thereof, preferably a microorganism, a plant cell, a plant or a part thereof, as compared to a corresponding non-transformed wild type non-human organism or a part thereof; and
[71486] (b) growing the non-human organism or a part thereof under conditions which permit the production of malate or a composition comprising malate in said non-human organism or in the culture medium surrounding said non-human organism.

[71487] A further embodiment of the present invention relates to a process for the production of malate, which comprises
[71488] (a) increasing or generating one or more activities selected from the group consisting of aminotransferase in an organelle, preferably in plastids or mitochondria, especially in plastids, of a non-human organism or a part thereof, preferably a microorganism, a plant cell, a plant or a part thereof, as compared to a corresponding non-transformed wild type non-human organism or a part thereof; and
[71489] (b) growing the non-human organism or a part thereof under conditions which permit the production of malate or a composition comprising malate in said non-human organism or in the culture medium surrounding said non-human organism.

[71490] A further embodiment of the present invention relates to a process for the production of succinate, which comprises
[71491] (a) increasing or generating one or more activities selected from the group consisting of isocitrate lyase in an organelle, preferably in plastids or mitochondria, especially in plastids, of a non-human organism or a part thereof, preferably a microorganism, a plant cell, a plant or a part thereof, as compared to a corresponding non-transformed wild type non-human organism or a part thereof; and
[71492] (b) growing the non-human organism or a part thereof under conditions which permit the production of succinate or a composition comprising succinate in said non-human organism or in the culture medium surrounding said non-human organism.

[71493] A further embodiment of the present invention relates to a process for the production of fumarate, which comprises
[71494] (a) increasing or generating one or more activities selected from the group consisting of NADH-quinone oxidoreductase subunit in an organelle, preferably in plastids or mitochondria, especially in plastids, of a non-human organism or a part thereof, preferably a microorganism, a plant cell, a plant or a part thereof, as compared to a corresponding non-transformed wild type non-human organism or a part thereof; and
[71495] (b) growing the non-human organism or a part thereof under conditions which permit the production of fumarate or a composition comprising fumarate in said non-human organism or in the culture medium surrounding said non-human organism.

[71496] A further embodiment of the present invention relates to a process for the production of malate, which comprises
[71497] (a) increasing or generating one or more activities selected from the group consisting of NADH-quinone oxidoreductase subunit in an organelle, preferably in plastids or mitochondria, especially in plastids, of a non-human organism or a part thereof, preferably a microorganism, a plant cell, a plant or a part thereof, as compared to a corresponding non-transformed wild type non-human organism or a part thereof; and
[71498] (b) growing the non-human organism or a part thereof under conditions which permit the production of malate or a composition comprising malate in said non-human organism or in the culture medium surrounding said non-human organism.

[71499] A further embodiment of the present invention relates to a process for the production of malate, which comprises
[71500] (a) increasing or generating one or more activities selected from the group consisting of RNA polymerase sigma factor in an organelle, preferably in plastids or mitochondria, especially in plastids, of a non-human organism or a part thereof, preferably a microorganism, a plant cell, a plant or a part thereof, as compared to a corresponding non-transformed wild type non-human organism or a part thereof; and
[71501] (b) growing the non-human organism or a part thereof under conditions which permit the production of malate or a composition comprising malate in said non-human organism or in the culture medium surrounding said non-human organism.

[71502] A further embodiment of the present invention relates to a process for the production of malate, which comprises
[71503] (a) increasing or generating one or more activities selected from the group consisting of hydrolase in an organelle, preferably in plastids or mitochondria, especially in plastids, of a non-human organism or a part thereof, preferably a microorganism, a plant cell, a plant or a part thereof, as compared to a corresponding non-transformed wild type non-human organism or a part thereof; and
[71504] (b) growing the non-human organism or a part thereof under conditions which permit the production of malate or a composition comprising malate in said non-human organism or in the culture medium surrounding said non-human organism.

[71505] A further embodiment of the present invention relates to a process for the production of malate, which comprises
[71506] (a) increasing or generating one or more activities selected from the group consisting of glutamate-ammonia-ligase in an organelle, preferably in plastids or mitochondria, especially in plastids, of a non-human organism or a part thereof, preferably a microorganism, a plant cell, a plant or a part thereof, as compared to a corresponding non-transformed wild type non-human organism or a part thereof; and
[71507] (b) growing the non-human organism or a part thereof under conditions which permit the production of malate or a composition comprising malate in said non-human organism or in the culture medium surrounding said non-human organism.

[71508] A further embodiment of the present invention relates to a process for the production of succinate, which comprises
[71509] (a) increasing or generating one or more activities selected from the group consisting of electron transfer flavoprotein subunit beta in an organelle, preferably in plastids or mitochondria, especially in plastids, of a non-human organism or a part thereof, preferably a microorganism organism, a plant cell, a plant or a part thereof, as compared to a corresponding non-transformed wild type non-human organism or a part thereof; and
[71510] (b) growing the non-human organism or a part thereof under conditions which permit the production of succinate or a composition comprising succinate in said non-human organism or in the culture medium surrounding said non-human organism.

[71511] A further embodiment of the present invention relates to a process for the production of fumarate, which comprises
[71512] (a) increasing or generating one or more activities selected from the group consisting of AX653549-protein in an organelle, preferably in plastids or mitochondria, especially in plastids, of a non-human organism or a part thereof, preferably a microorganism, a plant cell, a plant or a part thereof, as compared to a corresponding non-transformed wild type non-human organism or a part thereof; and
[71513] (b) growing the non-human organism or a part thereof under conditions which permit the production of fumarate or a composition comprising fumarate in said non-human organism or in the culture medium surrounding said non-human organism.

[71514] A further embodiment of the present invention relates to a process for the production of malate, which comprises
[71515] (a) increasing or generating one or more activities selected from the group consisting of AX653549-protein in an organelle, preferably in plastids or mitochondria, especially in plastids, of a non-human organism or a part thereof, preferably a microorganism, a plant cell, a plant or a part thereof, as compared to a corresponding non-transformed wild type non-human organism or a part thereof; and
[71516] (b) growing the non-human organism or a part thereof under conditions which permit the production of malate or a composition comprising malate in said non-human organism or in the culture medium surrounding said non-human organism.

[71517] A further embodiment of the present invention relates to a process for the production of fumarate, which comprises
[71518] (a) increasing or generating one or more activities selected from the group consisting of AY087308-protein in an organelle, preferably in plastids or mitochondria, especially in plastids, of a non-human organism or a part thereof, preferably a microorganism, a plant cell, a plant or a part thereof, as compared to a corresponding non-transformed wild type non-human organism or a part thereof; and
[71519] (b) growing the non-human organism or a part thereof under conditions which permit the production of fumarate or a composition comprising fumarate in said non-human organism or in the culture medium surrounding said non-human organism.

[71520] A further embodiment of the present invention relates to a process for the production of malate, which comprises
[71521] (a) increasing or generating one or more activities selected from the group consisting of AY087308-protein in an organelle, preferably in plastids or mitochondria, especially in plastids, of a non-human organism or a part thereof, preferably a microorganism, a plant cell, a plant or a part thereof, as compared to a corresponding non-transformed wild type non-human organism or a part thereof; and
[71522] (b) growing the non-human organism or a part thereof under conditions which permit the production of malate or a composition comprising malate in said non-human organism or in the culture medium surrounding said non-human organism.

[71523] A further embodiment of the present invention relates to a process for the production of succinate, which comprises
[71524] (a) increasing or generating one or more activities selected from the group consisting of AY087308-protein in an organelle, preferably in plastids or mitochondria, especially in plastids, of a non-human organism or a part thereof, preferably a microorganism, a plant cell, a plant or a part thereof, as compared to a corresponding non-transformed wild type non-human organism or a part thereof; and
[71525] (b) growing the non-human organism or a part thereof under conditions which permit the production of succinate or a composition comprising succinate in said non-human organism or in the culture medium surrounding said non-human organism.

[71526] A further embodiment of the present invention relates to a process for the production of fumarate, which comprises
[71527] (a) increasing or generating one or more activities selected from the group consisting of fumarate hydratase in an organelle, preferably in plastids or mitochondria, especially in plastids, of a non-human organism or a part thereof, preferably a microorganism, a plant cell, a plant or a part thereof, as compared to a corresponding non-transformed wild type non-human organism or a part thereof; and
[71528] (b) growing the non-human organism or a part thereof under conditions which permit the production of fumarate or a composition comprising fumarate in said non-human organism or in the culture medium surrounding said non-human organism.

[71529] A further embodiment of the present invention relates to a process for the production of malate, which comprises
[71530] (a) increasing or generating one or more activities selected from the group consisting of threonine synthase in an organelle, preferably in plastids or mitochondria, especially in plastids, of a non-human organism or a part thereof, preferably a microorganism, a plant cell, a plant or a part thereof, as compared to a corresponding non-transformed wild type non-human organism or a part thereof; and
[71531] (b) growing the non-human organism or a part thereof under conditions which permit the production of malate or a composition comprising malate in said non-human organism or in the culture medium surrounding said non-human organism.

[71532] A further embodiment of the present invention relates to a process for the production of fumarate, which comprises
[71533] (a) increasing or generating one or more activities selected from the group consisting of ribulokinase in an organelle, preferably in plastids or mitochondria, especially in plastids, of a non-human organism or a part thereof, preferably a microorganism, a plant cell, a plant or a part thereof, as compared to a corresponding non-transformed wild type non-human organism or a part thereof; and
[71534] (b) growing the non-human organism or a part thereof under conditions which permit the production of fumarate or a composition comprising fumarate in said non-human organism or in the culture medium surrounding said non-human organism.

[71535] A further embodiment of the present invention relates to a process for the production of succinate, which comprises
[71536] (a) increasing or generating one or more activities selected from the group consisting of ribulokinase in an organelle, preferably in plastids or mitochondria, especially in plastids, of a non-human organism or a part thereof, preferably a microorganism, a plant cell, a plant or a part thereof, as compared to a corresponding non-transformed wild type non-human organism or a part thereof; and
[71537] (b) growing the non-human organism or a part thereof under conditions which permit the production of succinate or a composition comprising succinate in said non-human organism or in the culture medium surrounding said non-human organism.

[71538] A further embodiment of the present invention relates to a process for the production of citrate, which comprises
[71539] (a) increasing or generating one or more activities selected from the group consisting of glucose dehydrogenase in an organelle, preferably in plastids or mitochondria, especially in plastids, of a non-human organism or a part thereof, preferably a microorganism, a plant cell, a plant or a part thereof, as compared to a corresponding non-transformed wild type non-human organism or a part thereof; and
[71540] (b) growing the non-human organism or a part thereof under conditions which permit the production of citrate or a composition comprising citrate in said non-human organism or in the culture medium surrounding said non-human organism.

[71541] A further embodiment of the present invention relates to a process for the production of fumarate, which comprises
[71542] (a) increasing or generating one or more activities selected from the group consisting of acyl-CoA dehydrogenase in an organelle, preferably in plastids or mitochondria, especially in plastids, of a non-human organism or a part thereof, preferably a microorganism, a plant cell, a plant or a part thereof, as compared to a corresponding non-transformed wild type non-human organism or a part thereof; and
[71543] (b) growing the non-human organism or a part thereof under conditions which permit the production of fumarate or a composition comprising fumarate in said non-human organism or in the culture medium surrounding said non-human organism.

[71544] A further embodiment of the present invention relates to a process for the production of citrate, which comprises
[71545] (a) increasing or generating one or more activities selected from the group consisting of betaine aldehyde dehydrogenase in an organelle, preferably in plastids or mitochondria, especially in plastids, of a non-human organism or a part thereof, preferably a microorganism, a plant cell, a plant or a part thereof, as compared to a corresponding non-transformed wild type non-human organism or a part thereof; and
[71546] (b) growing the non-human organism or a part thereof under conditions which permit the production of citrate or a composition comprising citrate in said non-human organism or in the culture medium surrounding said non-human organism.

[71547] A further embodiment of the present invention relates to a process for the production of malate, which comprises
[71548] (a) increasing or generating one or more activities selected from the group consisting of ATP-binding component of a transport system in an organelle, preferably in plastids or mitochondria, especially in plastids, of a non-human organism or a part thereof, preferably a microorganism, a plant cell, a plant or a part thereof, as compared to a corresponding non-transformed wild type non-human organism or a part thereof; and
[71549] (b) growing the non-human organism or a part thereof under conditions which permit the production of malate or a composition comprising malate in said non-human organism or in the culture medium surrounding said non-human organism.

[71550] A further embodiment of the present invention relates to a process for the production of malate, which comprises
[71551] (a) increasing or generating one or more activities selected from the group consisting of membrane transport protein in an organelle, preferably in plastids or mitochondria, especially in plastids, of a non-human organism or a part thereof, preferably a microorganism, a plant cell, a plant or a part thereof, as compared to a corresponding non-transformed wild type non-human organism or a part thereof; and
[71552] (b) growing the non-human organism or a part thereof under conditions which permit the production of malate or a composition comprising malate in said non-human organism or in the culture medium surrounding said non-human organism.

[71553] A further embodiment of the present invention relates to a process for the production of succinate, which comprises
[71554] (a) increasing or generating one or more activities selected from the group consisting of membrane transport protein in an organelle, preferably in plastids or mitochondria, especially in plastids, of a non-human organism or a part thereof, preferably a microorganism, a plant cell, a plant or a part thereof, as compared to a corresponding non-transformed wild type non-human organism or a part thereof; and
[71555] (b) growing the non-human organism or a part thereof under conditions which permit the production of succinate or a composition comprising succinate in said non-human organism or in the culture medium surrounding said non-human organism.

[71556] A further embodiment of the present invention relates to a process for the production of citrate, which comprises
[71557] (a) increasing or generating one or more activities selected from the group consisting of glycerate kinase in an organelle, preferably in plastids or mitochondria, especially in plastids, of a non-human organism or a part thereof, preferably a microorganism, a plant cell, a plant or a part thereof, as compared to a corresponding non-transformed wild type non-human organism or a part thereof; and
[71558] (b) growing the non-human organism or a part thereof under conditions which permit the production of citrate or a composition comprising citrate in said non-human organism or in the culture medium surrounding said non-human organism.

[71559] A further embodiment of the present invention relates to a process for the production of fumarate, which comprises
[71560] (a) increasing or generating one or more activities selected from the group consisting of isochorismate synthase in an organelle, preferably in plastids or mitochondria, especially in plastids, of a non-human organism or a part thereof, preferably a microorganism, a plant cell, a plant or a part thereof, as compared to a corresponding non-transformed wild type non-human organism or a part thereof; and
[71561] (b) growing the non-human organism or a part thereof under conditions which permit the production of fumarate or a composition comprising fumarate in said non-human organism or in the culture medium surrounding said non-human organism.

[71562] A further embodiment of the present invention relates to a process for the production of malate, which comprises
[71563] (a) increasing or generating one or more activities selected from the group consisting of isochorismate synthase in an organelle, preferably in plastids or mitochondria, especially in plastids, of a non-human organism or a part thereof, preferably a microorganism, a plant cell, a plant or a part thereof, as compared to a corresponding non-transformed wild type non-human organism or a part thereof; and
[71564] (b) growing the non-human organism or a part thereof under conditions which permit the production of malate or a composition comprising malate in said non-human organism or in the culture medium surrounding said non-human organism.

[71565] A further embodiment of the present invention relates to a process for the production of fumarate, which comprises
[71566] (a) increasing or generating one or more activities selected from the group consisting of zinc transporter in an organelle, preferably in plastids or mitochondria, especially in plastids, of a non-human organism or a part thereof, preferably a microorganism, a plant cell, a plant or a part thereof, as compared to a corresponding non-transformed wild type non-human organism or a part thereof; and
[71567] (b) growing the non-human organism or a part thereof under conditions which permit the production of fumarate or a composition comprising fumarate in said non-human organism or in the culture medium surrounding said non-human organism.

[71568] A further embodiment of the present invention relates to a process for the production of succinate, which comprises
[71569] (a) increasing or generating one or more activities selected from the group consisting of b0801-protein in an organelle, preferably in plastids or mitochondria, especially in plastids, of a non-human organism or a part thereof, preferably a microorganism, a plant cell, a plant or a part thereof, as compared to a corresponding non-transformed wild type non-human organism or a part thereof; and
[71570] (b) growing the non-human organism or a part thereof under conditions which permit the production of succinate or a composition comprising succinate in said non-human organism or in the culture medium surrounding said non-human organism.

[71571] A further embodiment of the present invention relates to a process for the production of malate, which comprises
[71572] (a) increasing or generating one or more activities selected from the group consisting of leucyl/phenylalanyl-tRNA-protein transferase in an organelle, preferably in plastids or mitochondria, especially in plastids, of a non-human organism or a part thereof, preferably a microorganism, a plant cell, a plant or a part thereof, as compared to a corresponding non-transformed wild type non-human organism or a part thereof; and
[71573] (b) growing the non-human organism or a part thereof under conditions which permit the production of malate or a composition comprising malate in said non-human organism or in the culture medium surrounding said non-human organism.

[71574] A further embodiment of the present invention relates to a process for the production of vitamin c and/or threonic acid, which comprises
[71575] (a) increasing or generating one or more activities selected from the group consisting of methylglyoxal synthase in an organelle, preferably in plastids or mitochondria, especially in plastids, of a non-human organism or a part thereof, preferably a microorganism, a plant cell, a plant or a part thereof, as compared to a corresponding non-transformed wild type non-human organism or a part thereof; and
[71576] (b) growing the non-human organism or a part thereof under conditions which permit the production of vitamin c and/or threonic acid or a composition comprising vitamin c and/or threonic acid in said non-human organism or in the culture medium surrounding said non-human organism.

[71577] A further embodiment of the present invention relates to a process for the production of malate, which comprises
[71578] (a) increasing or generating one or more activities selected from the group consisting of b1003-protein in an organelle, preferably in plastids or mitochondria, especially in plastids, of a non-human organism or a part thereof, preferably a microorganism, a plant cell, a plant or a part thereof, as compared to a corresponding non-transformed wild type non-human organism or a part thereof; and
[71579] (b) growing the non-human organism or a part thereof under conditions which permit the production of malate or a composition comprising malate in said non-human organism or in the culture medium surrounding said non-human organism.

[71580] A further embodiment of the present invention relates to a process for the production of malate, which comprises
[71581] (a) increasing or generating one or more activities selected from the group consisting of membrane protein in an organelle, preferably in plastids or mitochondria, especially in plastids, of a non-human organism or a part thereof, preferably a microorganism, a plant cell, a plant or a part thereof, as compared to a corresponding non-transformed wild type non-human organism or a part thereof; and
[71582] (b) growing the non-human organism or a part thereof under conditions which permit the production of malate or a composition comprising malate in said non-human organism or in the culture medium surrounding said non-human organism.

[71583] A further embodiment of the present invention relates to a process for the production of succinate, which comprises
[71584] (a) increasing or generating one or more activities selected from the group consisting of b1285-protein in an organelle, preferably in plastids or mitochondria, especially in plastids, of a non-human organism or a part thereof, preferably a microorganism, a plant cell, a plant or a part thereof, as compared to a corresponding non-transformed wild type non-human organism or a part thereof; and
[71585] (b) growing the non-human organism or a part thereof under conditions which permit the production of succinate or a composition comprising succinate in said non-human organism or in the culture medium surrounding said non-human organism.

[71586] A further embodiment of the present invention relates to a process for the production of malate, which comprises
[71587] (a) increasing or generating one or more activities selected from the group consisting of phenylacetic acid degradation protein in an organelle, preferably in plastids or mitochondria, especially in plastids, of a non-human organism or a part thereof, preferably a microorganism organism, a plant cell, a plant or a part thereof, as compared to a corresponding non-transformed wild type non-human organism or a part thereof; and
[71588] (b) growing the non-human organism or a part thereof under conditions which permit the production of malate or a composition comprising malate in said non-human organism or in the culture medium surrounding said non-human organism.

[71589] A further embodiment of the present invention relates to a process for the production of malate, which comprises
[71590] (a) increasing or generating one or more activities selected from the group consisting of b1425-protein in an organelle, preferably in plastids or mitochondria, especially in plastids, of a non-human organism or a part thereof, preferably a microorganism, a plant cell, a plant or a part thereof, as compared to a corresponding non-transformed wild type non-human organism or a part thereof; and
[71591] (b) growing the non-human organism or a part thereof under conditions which permit the production of malate or a composition comprising malate in said non-human organism or in the culture medium surrounding said non-human organism.

[71592] A further embodiment of the present invention relates to a process for the production of succinate, which comprises
[71593] (a) increasing or generating one or more activities selected from the group consisting of lipoprotein precursor in an organelle, preferably in plastids or mitochondria, especially in plastids, of a non-human organism or a part thereof, preferably a microorganism, a plant cell, a plant or a part thereof, as compared to a corresponding non-transformed wild type non-human organism or a part thereof; and
[71594] (b) growing the non-human organism or a part thereof under conditions which permit the production of succinate or a composition comprising succinate in said non-human organism or in the culture medium surrounding said non-human organism.

[71595] A further embodiment of the present invention relates to a process for the production of citramalate, which comprises
[71596] (a) increasing or generating one or more activities selected from the group consisting of b1445-protein in an organelle, preferably in plastids or mitochondria, especially in plastids, of a non-human organism or a part thereof, preferably a microorganism, a plant cell, a plant or a part thereof, as compared to a corresponding non-transformed wild type non-human organism or a part thereof; and
[71597] (b) growing the non-human organism or a part thereof under conditions which permit the production of citramalate or a composition comprising citramalate in said non-human organism or in the culture medium surrounding said non-human organism.

[71598] A further embodiment of the present invention relates to a process for the production of citramalate, which comprises
[71599] (a) increasing or generating one or more activities selected from the group consisting of b1522-protein in an organelle, preferably in plastids or mitochondria, especially in plastids, of a non-human organism or a part thereof, preferably a microorganism, a plant cell, a plant or a part thereof, as compared to a corresponding non-transformed wild type non-human organism or a part thereof; and
[71600] (b) growing the non-human organism or a part thereof under conditions which permit the production of citramalate or a composition comprising citramalate in said non-human organism or in the culture medium surrounding said non-human organism.

[71601] A further embodiment of the present invention relates to a process for the production of malate, which comprises
[71602] (a) increasing or generating one or more activities selected from the group consisting of b1522-protein in an organelle, preferably in plastids or mitochondria, especially in plastids, of a non-human organism or a part thereof, preferably a microorganism, a plant cell, a plant or a part thereof, as compared to a corresponding non-transformed wild type non-human organism or a part thereof; and
[71603] (b) growing the non-human organism or a part thereof under conditions which permit the production of malate or a composition comprising malate in said non-human organism or in the culture medium surrounding said non-human organism.

[71604] A further embodiment of the present invention relates to a process for the production of fumarate, which comprises
[71605] (a) increasing or generating one or more activities selected from the group consisting of Fe—S subunit of oxidoreductase in an organelle, preferably in plastids or mitochondria, especially in plastids, of a non-human organism or a part thereof, preferably a microorganism, a plant cell, a plant or a part thereof, as compared to a corresponding non-transformed wild type non-human organism or a part thereof; and
[71606] (b) growing the non-human organism or a part thereof under conditions which permit the production of fumarate or a composition comprising fumarate in said non-human organism or in the culture medium surrounding said non-human organism.

[71607] A further embodiment of the present invention relates to a process for the production of fumarate, which comprises
[71608] (a) increasing or generating one or more activities selected from the group consisting of fumarate hydratase in an organelle, preferably in plastids or mitochondria, especially in plastids, of a non-human organism or a part thereof, preferably a microorganism, a plant cell, a plant or a part thereof, as compared to a corresponding non-transformed wild type non-human organism or a part thereof; and
[71609] (b) growing the non-human organism or a part thereof under conditions which permit the production of fumarate or a composition comprising fumarate in said non-human organism or in the culture medium surrounding said non-human organism.

[71610] A further embodiment of the present invention relates to a process for the production of succinate, which comprises
[71611] (a) increasing or generating one or more activities selected from the group consisting of electron transport complex protein in an organelle, preferably in plastids or mitochondria, especially in plastids, of a non-human organism or a part thereof, preferably a microorganism, a plant cell, a plant or a part thereof, as compared to a corresponding non-transformed wild type non-human organism or a part thereof; and
[71612] (b) growing the non-human organism or a part thereof under conditions which permit the production of succinate or a composition comprising succinate in said non-human organism or in the culture medium surrounding said non-human organism.

[71613] A further embodiment of the present invention relates to a process for the production of succinate, which comprises
[71614] (a) increasing or generating one or more activities selected from the group consisting of methylglyoxalase in an organelle, preferably in plastids or mitochondria, especially in plastids, of a non-human organism or a part thereof, preferably a microorganism, a plant cell, a plant or a part thereof, as compared to a corresponding non-transformed wild type non-human organism or a part thereof; and
[71615] (b) growing the non-human organism or a part thereof under conditions which permit the production of succinate or a composition comprising succinate in said non-human organism or in the culture medium surrounding said non-human organism.

[71616] A further embodiment of the present invention relates to a process for the production of citramalate, which comprises
[71617] (a) increasing or generating one or more activities selected from the group consisting of b1670-protein in an organelle, preferably in plastids or mitochondria, especially in plastids, of a non-human organism or a part thereof, preferably a microorganism, a plant cell, a plant or a part thereof, as compared to a corresponding non-transformed wild type non-human organism or a part thereof; and
[71618] (b) growing the non-human organism or a part thereof under conditions which permit the production of citramalate or a composition comprising citramalate in said non-human organism or in the culture medium surrounding said non-human organism.

[71619] A further embodiment of the present invention relates to a process for the production of malate, which comprises
[71620] (a) increasing or generating one or more activities selected from the group consisting of b1670-protein in an organelle, preferably in plastids or mitochondria, especially in plastids, of a non-human organism or a part thereof, preferably a microorganism, a plant cell, a plant or a part thereof, as compared to a corresponding non-transformed wild type non-human organism or a part thereof; and
[71621] (b) growing the non-human organism or a part thereof under conditions which permit the production of malate or a composition comprising malate in said non-human organism or in the culture medium surrounding said non-human organism.

[71622] A further embodiment of the present invention relates to a process for the production of citramalate, which comprises
[71623] (a) increasing or generating one or more activities selected from the group consisting of b1672-protein in an organelle, preferably in plastids or mitochondria, especially in plastids, of a non-human organism or a part thereof, preferably a microorganism, a plant cell, a plant or a part thereof, as compared to a corresponding non-transformed wild type non-human organism or a part thereof; and
[71624] (b) growing the non-human organism or a part thereof under conditions which permit the production of citramalate or a composition comprising citramalate in said non-human organism or in the culture medium surrounding said non-human organism.

[71625] A further embodiment of the present invention relates to a process for the production of malate, which comprises
[71626] (a) increasing or generating one or more activities selected from the group consisting of b1672-protein in an organelle, preferably in plastids or mitochondria, especially in plastids, of a non-human organism or a part thereof, preferably a microorganism, a plant cell, a plant or a part thereof, as compared to a corresponding non-transformed wild type non-human organism or a part thereof; and
[71627] (b) growing the non-human organism or a part thereof under conditions which permit the production of malate or a composition comprising malate in said non-human organism or in the culture medium surrounding said non-human organism.

[71628] A further embodiment of the present invention relates to a process for the production of vitamin c and/or threonic acid, which comprises
[71629] (a) increasing or generating one or more activities selected from the group consisting of b1672-protein in an organelle, preferably in plastids or mitochondria, especially in plastids, of a non-human organism or a part thereof, preferably a microorganism, a plant cell, a plant or a part thereof, as compared to a corresponding non-transformed wild type non-human organism or a part thereof; and
[71630] (b) growing the non-human organism or a part thereof under conditions which permit the production of vitamin c and/or threonic acid or a composition comprising vitamin c and/or threonic acid in said non-human organism or in the culture medium surrounding said non-human organism.

[71631] A further embodiment of the present invention relates to a process for the production of malate, which comprises
[71632] (a) increasing or generating one or more activities selected from the group consisting of b1742-protein in an organelle, preferably in plastids or mitochondria, especially in plastids, of a non-human organism or a part thereof, preferably a microorganism, a plant cell, a plant or a part thereof, as compared to a corresponding non-transformed wild type non-human organism or a part thereof; and
[71633] (b) growing the non-human organism or a part thereof under conditions which permit the production of malate or a composition comprising malate in said non-human organism or in the culture medium surrounding said non-human organism.

[71634] A further embodiment of the present invention relates to a process for the production of succinate, which comprises
[71635] (a) increasing or generating one or more activities selected from the group consisting of b1742-protein in an organelle, preferably in plastids or mitochondria, especially in plastids, of a non-human organism or a part thereof, preferably a microorganism, a plant cell, a plant or a part thereof, as compared to a corresponding non-transformed wild type non-human organism or a part thereof; and
[71636] (b) growing the non-human organism or a part thereof under conditions which permit the production of succinate or a composition comprising succinate in said non-human organism or in the culture medium surrounding said non-human organism.

[71637] A further embodiment of the present invention relates to a process for the production of succinate, which comprises
[71638] (a) increasing or generating one or more activities selected from the group consisting of arginine N-succinyltransferase in an organelle, preferably in plastids or mitochondria, especially in plastids, of a non-human organism or a part thereof, preferably a microorganism, a plant cell, a plant or a part thereof, as compared to a corresponding non-transformed wild type non-human organism or a part thereof; and
[71639] (b) growing the non-human organism or a part thereof under conditions which permit the production of succinate or a composition comprising succinate in said non-human organism or in the culture medium surrounding said non-human organism.

[71640] A further embodiment of the present invention relates to a process for the production of vitamin c and/or threonic acid, which comprises
[71641] (a) increasing or generating one or more activities selected from the group consisting of ABC transporter permease protein in an organelle, preferably in plastids or mitochondria, especially in plastids, of a non-human organism or a part thereof, preferably a microorganism, a plant cell, a plant or a part thereof, as compared to a corresponding non-transformed wild type non-human organism or a part thereof; and
[71642] (b) growing the non-human organism or a part thereof under conditions which permit the production of vitamin c and/or threonic acid or a composition comprising vitamin c and/or threonic acid in said non-human organism or in the culture medium surrounding said non-human organism.

[71643] A further embodiment of the present invention relates to a process for the production of malate, which comprises
[71644] (a) increasing or generating one or more activities selected from the group consisting of protease in an organelle, preferably in plastids or mitochondria, especially in plastids, of a non-human organism or a part thereof, preferably a microorganism, a plant cell, a plant or a part thereof, as compared to a corresponding non-transformed wild type non-human organism or a part thereof; and
[71645] (b) growing the non-human organism or a part thereof under conditions which permit the production of malate or a composition comprising malate in said non-human organism or in the culture medium surrounding said non-human organism.

[71646] A further embodiment of the present invention relates to a process for the production of vitamin c and/or threonic acid, which comprises
[71647] (a) increasing or generating one or more activities selected from the group consisting of dATP pyrophosphohydrolase in an organelle, preferably in plastids or mitochondria, especially in plastids, of a non-human organism or a part thereof, preferably a microorganism, a plant cell, a plant or a part thereof, as compared to a corresponding non-transformed wild type non-human organism or a part thereof; and
[71648] (b) growing the non-human organism or a part thereof under conditions which permit the production of vitamin c and/or threonic acid or a composition comprising vitamin c and/or threonic acid in said non-human organism or in the culture medium surrounding said non-human organism.

[71649] A further embodiment of the present invention relates to a process for the production of succinate, which comprises
[71650] (a) increasing or generating one or more activities selected from the group consisting of b1898-protein in an organelle, preferably in plastids or mitochondria, especially in plastids, of a non-human organism or a part thereof, preferably a microorganism, a plant cell, a plant or a part thereof, as compared to a corresponding non-transformed wild type non-human organism or a part thereof; and
[71651] (b) growing the non-human organism or a part thereof under conditions which permit the production of succinate or a composition comprising succinate in said non-human organism or in the culture medium surrounding said non-human organism.

[71652] A further embodiment of the present invention relates to a process for the production of fumarate, which comprises
[71653] (a) increasing or generating one or more activities selected from the group consisting of flagellar M-ring protein in an organelle, preferably in plastids or mitochondria, especially in plastids, of a non-human organism or a part thereof, preferably a microorganism, a plant cell, a plant or a part thereof, as compared to a corresponding non-transformed wild type non-human organism or a part thereof; and
[71654] (b) growing the non-human organism or a part thereof under conditions which permit the production of fumarate or a composition comprising fumarate in said non-human organism or in the culture medium surrounding said non-human organism.

[71655] A further embodiment of the present invention relates to a process for the production of malate, which comprises
[71656] (a) increasing or generating one or more activities selected from the group consisting of flagellar M-ring protein in an organelle, preferably in plastids or mitochondria, especially in plastids, of a non-human organism or a part thereof, preferably a microorganism, a plant cell, a plant or a part thereof, as compared to a corresponding non-transformed wild type non-human organism or a part thereof; and
[71657] (b) growing the non-human organism or a part thereof under conditions which permit the production of malate or a composition comprising malate in said non-human organism or in the culture medium surrounding said non-human organism.

[71658] A further embodiment of the present invention relates to a process for the production of succinate, which comprises
[71659] (a) increasing or generating one or more activities selected from the group consisting of flagellar M-ring protein in an organelle, preferably in plastids or mitochondria, especially in plastids, of a non-human organism or a part thereof, preferably a microorganism, a plant cell, a plant or a part thereof, as compared to a corresponding non-transformed wild type non-human organism or a part thereof; and
[71660] (b) growing the non-human organism or a part thereof under conditions which permit the production of succinate or a composition comprising succinate in said non-human organism or in the culture medium surrounding said non-human organism.

[71661] A further embodiment of the present invention relates to a process for the production of malate, which comprises
[71662] (a) increasing or generating one or more activities selected from the group consisting of O-antigen chain length determinant in an organelle, preferably in plastids or mitochondria, especially in plastids, of a non-human organism or a part thereof, preferably a microorganism, a plant cell, a plant or a part thereof, as compared to a corresponding non-transformed wild type non-human organism or a part thereof; and
[71663] (b) growing the non-human organism or a part thereof under conditions which permit the production of malate or a composition comprising malate in said non-human organism or in the culture medium surrounding said non-human organism.

[71664] A further embodiment of the present invention relates to a process for the production of fumarate, which comprises
[71665] (a) increasing or generating one or more activities selected from the group consisting of b2399-protein in an organelle, preferably in plastids or mitochondria, especially in plastids, of a non-human organism or a part thereof, preferably a microorganism, a plant cell, a plant or a part thereof, as compared to a corresponding non-transformed wild type non-human organism or a part thereof; and
[71666] (b) growing the non-human organism or a part thereof under conditions which permit the production of fumarate or a composition comprising fumarate in said non-human organism or in the culture medium surrounding said non-human organism.

[71667] A further embodiment of the present invention relates to a process for the production of succinate, which comprises
[71668] (a) increasing or generating one or more activities selected from the group consisting of b2399-protein in an organelle, preferably in plastids or mitochondria, especially in plastids, of a non-human organism or a part thereof, preferably a microorganism, a plant cell, a plant or a part thereof, as compared to a corresponding non-transformed wild type non-human organism or a part thereof; and
[71669] (b) growing the non-human organism or a part thereof under conditions which permit the production of succinate or a composition comprising succinate in said non-human organism or in the culture medium surrounding said non-human organism.

[71670] A further embodiment of the present invention relates to a process for the production of vitamin c and/or threonic acid, which comprises
[71671] (a) increasing or generating one or more activities selected from the group consisting of b2399-protein in an organelle, preferably in plastids or mitochondria, especially in plastids, of a non-human organism or a part thereof, preferably a microorganism, a plant cell, a plant or a part thereof, as compared to a corresponding non-transformed wild type non-human organism or a part thereof; and
[71672] (b) growing the non-human organism or a part thereof under conditions which permit the production of vitamin c and/or threonic acid or a composition comprising vitamin c and/or threonic acid in said non-human organism or in the culture medium surrounding said non-human organism.

[71673] A further embodiment of the present invention relates to a process for the production of vitamin c and/or threonic acid, which comprises
[71674] (a) increasing or generating one or more activities selected from the group consisting of cysteine synthase A in an organelle, preferably in plastids or mitochondria, especially in plastids, of a non-human organism or a part thereof, preferably a microorganism, a plant cell, a plant or a part thereof, as compared to a corresponding non-transformed wild type non-human organism or a part thereof; and
[71675] (b) growing the non-human organism or a part thereof under conditions which permit the production of vitamin c and/or threonic acid or a composition comprising vitamin c and/or threonic acid in said non-human organism or in the culture medium surrounding said non-human organism.

[71676] A further embodiment of the present invention relates to a process for the production of vitamin c and/or threonic acid, which comprises
[71677] (a) increasing or generating one or more activities selected from the group consisting of cysteine synthase B in an organelle, preferably in plastids or mitochondria, especially in plastids, of a non-human organism or a part thereof, preferably a microorganism, a plant cell, a plant or a part thereof, as compared to a corresponding non-transformed wild type non-human organism or a part thereof; and
[71678] (b) growing the non-human organism or a part thereof under conditions which permit the production of vitamin c and/or threonic acid or a composition comprising vitamin c and/or threonic acid in said non-human organism or in the culture medium surrounding said non-human organism.

[71679] A further embodiment of the present invention relates to a process for the production of fumarate, which comprises
[71680] (a) increasing or generating one or more activities selected from the group consisting of transcriptional regulator in an organelle, preferably in plastids or mitochondria, especially in plastids, of a non-human organism or a part thereof, preferably a microorganism, a plant cell, a plant or a part thereof, as compared to a corresponding non-transformed wild type non-human organism or a part thereof; and
[71681] (b) growing the non-human organism or a part thereof under conditions which permit the production of fumarate or a composition comprising fumarate in said non-human organism or in the culture medium surrounding said non-human organism.

[71682] A further embodiment of the present invention relates to a process for the production of malate, which comprises
[71683] (a) increasing or generating one or more activities selected from the group consisting of transcriptional regulator in an organelle, preferably in plastids or mitochondria, especially in plastids, of a non-human organism or a part thereof, preferably a microorganism, a plant cell, a plant or a part thereof, as compared to a corresponding non-transformed wild type non-human organism or a part thereof; and
[71684] (b) growing the non-human organism or a part thereof under conditions which permit the production of malate or a composition comprising malate in said non-human organism or in the culture medium surrounding said non-human organism.

[71685] A further embodiment of the present invention relates to a process for the production of succinate, which comprises
[71686] (a) increasing or generating one or more activities selected from the group consisting of murein transglycosylase in an organelle, preferably in plastids or mitochondria, especially in plastids, of a non-human organism or a part thereof, preferably a microorganism, a plant cell, a plant or a part thereof, as compared to a corresponding non-transformed wild type non-human organism or a part thereof; and
[71687] (b) growing the non-human organism or a part thereof under conditions which permit the production of succinate or a composition comprising succinate in said non-human organism or in the culture medium surrounding said non-human organism.

[71688] A further embodiment of the present invention relates to a process for the production of succinate, which comprises
[71689] (a) increasing or generating one or more activities selected from the group consisting of 2-C-methyl-D-erythritol 4-phosphate cytidylyltransferase in an organelle, preferably in plastids or mitochondria, especially in plastids, of a non-human organism or a part thereof, preferably a microorganism, a plant cell, a plant or a part thereof, as compared to a corresponding non-transformed wild type non-human organism or a part thereof; and
[71690] (b) growing the non-human organism or a part thereof under conditions which permit the production of succinate or a composition comprising succinate in said non-human organism or in the culture medium surrounding said non-human organism.

[71691] A further embodiment of the present invention relates to a process for the production of succinate, which comprises
[71692] (a) increasing or generating one or more activities selected from the group consisting of amino-acid acetyltransferase in an organelle, preferably in plastids or mitochondria, especially in plastids, of a non-human organism or a part thereof, preferably a microorganism, a plant cell, a plant or a part thereof, as compared to a corresponding non-transformed wild type non-human organism or a part thereof; and
[71693] (b) growing the non-human organism or a part thereof under conditions which permit the production of succinate or a composition comprising succinate in said non-human organism or in the culture medium surrounding said non-human organism.

[71694] A further embodiment of the present invention relates to a process for the production of succinate, which comprises
[71695] (a) increasing or generating one or more activities selected from the group consisting of xanthine dehydrogenase in an organelle, preferably in plastids or mitochondria, especially in plastids, of a non-human organism or a part thereof, preferably a microorganism, a plant cell, a plant or a part thereof, as compared to a corresponding non-transformed wild type non-human organism or a part thereof; and
[71696] (b) growing the non-human organism or a part thereof under conditions which permit the production of succinate or a composition comprising succinate in said non-human organism or in the culture medium surrounding said non-human organism.

[71697] A further embodiment of the present invention relates to a process for the production of succinate, which comprises
[71698] (a) increasing or generating one or more activities selected from the group consisting of cystathionine beta-lyase in an organelle, preferably in plastids or mitochondria, especially in plastids, of a non-human organism or a part thereof, preferably a microorganism, a plant cell, a plant or a part thereof, as compared to a corresponding non-transformed wild type non-human organism or a part thereof; and
[71699] (b) growing the non-human organism or a part thereof under conditions which permit the production of succinate or a composition comprising succinate in said non-human organism or in the culture medium surrounding said non-human organism.

[71700] A further embodiment of the present invention relates to a process for the production of fumarate, which comprises
[71701] (a) increasing or generating one or more activities selected from the group consisting of methyltransferase in an organelle, preferably in plastids or mitochondria, especially in plastids, of a non-human organism or a part thereof, preferably a microorganism, a plant cell, a plant or a part thereof, as compared to a corresponding non-transformed wild type non-human organism or a part thereof; and
[71702] (b) growing the non-human organism or a part thereof under conditions which permit the production of fumarate or a composition comprising fumarate in said non-human organism or in the culture medium surrounding said non-human organism.

[71703] A further embodiment of the present invention relates to a process for the production of malate, which comprises
[71704] (a) increasing or generating one or more activities selected from the group consisting of methyltransferase in an organelle, preferably in plastids or mitochondria, especially in plastids, of a non-human organism or a part thereof, preferably a microorganism, a plant cell, a plant or a part thereof, as compared to a corresponding non-transformed wild type non-human organism or a part thereof; and
[71705] (b) growing the non-human organism or a part thereof under conditions which permit the production of malate or a composition comprising malate in said non-human organism or in the culture medium surrounding said non-human organism.

[71706] A further embodiment of the present invention relates to a process for the production of fumarate, which comprises
[71707] (a) increasing or generating one or more activities selected from the group consisting of lipopolysaccharide core biosynthesis protein in an organelle, preferably in plastids or mitochondria, especially in plastids, of a non-human organism or a part thereof, preferably a microorganism, a plant cell, a plant or a part thereof, as compared to a corresponding non-transformed wild type non-human organism or a part thereof; and
[71708] (b) growing the non-human organism or a part thereof under conditions which permit the production of fumarate or a composition comprising fumarate in said non-human organism or in the culture medium surrounding said non-human organism.

[71709] A further embodiment of the present invention relates to a process for the production of succinate, which comprises
[71710] (a) increasing or generating one or more activities selected from the group consisting of b3777-protein in an organelle, preferably in plastids or mitochondria, especially in plastids, of a non-human organism or a part thereof, preferably a microorganism, a plant cell, a plant or a part thereof, as compared to a corresponding non-transformed wild type non-human organism or a part thereof; and
[71711] (b) growing the non-human organism or a part thereof under conditions which permit the production of succinate or a composition comprising succinate in said non-human organism or in the culture medium surrounding said non-human organism.

[71712] A further embodiment of the present invention relates to a process for the production of malate, which comprises
[71713] (a) increasing or generating one or more activities selected from the group consisting of b3791-protein in an organelle, preferably in plastids or mitochondria, especially in plastids, of a non-human organism or a part thereof, preferably a microorganism, a plant cell, a plant or a part thereof, as compared to a corresponding non-transformed wild type non-human organism or a part thereof; and
[71714] (b) growing the non-human organism or a part thereof under conditions which permit the production of malate or a composition comprising malate in said non-human organism or in the culture medium surrounding said non-human organism.

[71715] A further embodiment of the present invention relates to a process for the production of succinate, which comprises
[71716] (a) increasing or generating one or more activities selected from the group consisting of b3791-protein in an organelle, preferably in plastids or mitochondria, especially in plastids, of a non-human organism or a part thereof, preferably a microorganism, a plant cell, a plant or a part thereof, as compared to a corresponding non-transformed wild type non-human organism or a part thereof; and
[71717] (b) growing the non-human organism or a part thereof under conditions which permit the production of succinate or a composition comprising succinate in said non-human organism or in the culture medium surrounding said non-human organism.

[71718] A further embodiment of the present invention relates to a process for the production of citramalate, which comprises
[71719] (a) increasing or generating one or more activities selected from the group consisting of b3814-protein in an organelle, preferably in plastids or mitochondria, especially in plastids, of a non-human organism or a part thereof, preferably a microorganism, a plant cell, a plant or a part thereof, as compared to a corresponding non-transformed wild type non-human organism or a part thereof; and
[71720] (b) growing the non-human organism or a part thereof under conditions which permit the production of citramalate or a composition comprising citramalate in said non-human organism or in the culture medium surrounding said non-human organism.

[71721] A further embodiment of the present invention relates to a process for the production of fumarate, which comprises
[71722] (a) increasing or generating one or more activities selected from the group consisting of b3817-protein in an organelle, preferably in plastids or mitochondria, especially in plastids, of a non-human organism or a part thereof, preferably a microorganism, a plant cell, a plant or a part thereof, as compared to a corresponding non-transformed wild type non-human organism or a part thereof; and
[71723] (b) growing the non-human organism or a part thereof under conditions which permit the production of fumarate or a composition comprising fumarate in said non-human organism or in the culture medium surrounding said non-human organism.

[71724] A further embodiment of the present invention relates to a process for the production of citramalate, which comprises
[71725] (a) increasing or generating one or more activities selected from the group consisting of threonine efflux protein in an organelle, preferably in plastids or mitochondria, especially in plastids, of a non-human organism or a part thereof, preferably a microorganism, a plant cell, a plant or a part thereof, as compared to a corresponding non-transformed wild type non-human organism or a part thereof; and
[71726] (b) growing the non-human organism or a part thereof under conditions which permit the production of citramalate or a composition comprising citramalate in said non-human organism or in the culture medium surrounding said non-human organism.

[71727] A further embodiment of the present invention relates to a process for the production of malate, which comprises
[71728] (a) increasing or generating one or more activities selected from the group consisting of threonine efflux protein in an organelle, preferably in plastids or mitochondria, especially in plastids, of a non-human organism or a part thereof, preferably a microorganism, a plant cell, a plant or a part thereof, as compared to a corresponding non-transformed wild type non-human organism or a part thereof; and
[71729] (b) growing the non-human organism or a part thereof under conditions which permit the production of malate or a composition comprising malate in said non-human organism or in the culture medium surrounding said non-human organism.

[71730] A further embodiment of the present invention relates to a process for the production of succinate, which comprises
[71731] (a) increasing or generating one or more activities selected from the group consisting of b3989-protein in an organelle, preferably in plastids or mitochondria, especially in plastids, of a non-human organism or a part thereof, preferably a microorganism, a plant cell, a plant or a part thereof, as compared to a corresponding non-transformed wild type non-human organism or a part thereof; and
[71732] (b) growing the non-human organism or a part thereof under conditions which permit the production of succinate or a composition comprising succinate in said non-human organism or in the culture medium surrounding said non-human organism.

[71733] A further embodiment of the present invention relates to a process for the production of fumarate, which comprises
[71734] (a) increasing or generating one or more activities selected from the group consisting of acetyltransferase in an organelle, preferably in plastids or mitochondria, especially in plastids, of a non-human organism or a part thereof, preferably a microorganism, a plant cell, a plant or a part thereof, as compared to a corresponding non-transformed wild type non-human organism or a part thereof; and
[71735] (b) growing the non-human organism or a part thereof under conditions which permit the production of fumarate or a composition comprising fumarate in said non-human organism or in the culture medium surrounding said non-human organism.

[71736] A further embodiment of the present invention relates to a process for the production of fumarate, which comprises
[71737] (a) increasing or generating one or more activities selected from the group consisting of b4029-protein in an organelle, preferably in plastids or mitochondria, especially in plastids, of a non-human organism or a part thereof, preferably a microorganism, a plant cell, a plant or a part thereof, as compared to a corresponding non-transformed wild type non-human organism or a part thereof; and
[71738] (b) growing the non-human organism or a part thereof under conditions which permit the production of fumarate or a composition comprising fumarate in said non-human organism or in the culture medium surrounding said non-human organism.

[71739] A further embodiment of the present invention relates to a process for the production of malate, which comprises
[71740] (a) increasing or generating one or more activities selected from the group consisting of b4029-protein in an organelle, preferably in plastids or mitochondria, especially in plastids, of a non-human organism or a part thereof, preferably a microorganism, a plant cell, a plant or a part thereof, as compared to a corresponding non-transformed wild type non-human organism or a part thereof; and
[71741] (b) growing the non-human organism or a part thereof under conditions which permit the production of malate or a composition comprising malate in said non-human organism or in the culture medium surrounding said non-human organism.

[71742] A further embodiment of the present invention relates to a process for the production of succinate, which comprises
[71743] (a) increasing or generating one or more activities selected from the group consisting of b4029-protein in an organelle, preferably in plastids or mitochondria, especially in plastids, of a non-human organism or a part thereof, preferably a microorganism, a plant cell, a plant or a part thereof, as compared to a corresponding non-transformed wild type non-human organism or a part thereof; and
[71744] (b) growing the non-human organism or a part thereof under conditions which permit the production of succinate or a composition comprising succinate in said non-human organism or in the culture medium surrounding said non-human organism.

[71745] A further embodiment of the present invention relates to a process for the production of fumarate, which comprises
[71746] (a) increasing or generating one or more activities selected from the group consisting of b4050-protein in an organelle, preferably in plastids or mitochondria, especially in plastids, of a non-human organism or a part thereof, preferably a microorganism, a plant cell, a plant or a part thereof, as compared to a corresponding non-transformed wild type non-human organism or a part thereof; and
[71747] (b) growing the non-human organism or a part thereof under conditions which permit the production of fumarate or a composition comprising fumarate in said non-human organism or in the culture medium surrounding said non-human organism.

[71748] A further embodiment of the present invention relates to a process for the production of malate, which comprises
[71749] (a) increasing or generating one or more activities selected from the group consisting of b4050-protein in an organelle, preferably in plastids or mitochondria, especially in plastids, of a non-human organism or a part thereof, preferably a microorganism, a plant cell, a plant or a part thereof, as compared to a corresponding non-transformed wild type non-human organism or a part thereof; and
[71750] (b) growing the non-human organism or a part thereof under conditions which permit the production of malate or a composition comprising malate in said non-human organism or in the culture medium surrounding said non-human organism.

[71751] A further embodiment of the present invention relates to a process for the production of citramalate, which comprises
[71752] (a) increasing or generating one or more activities selected from the group consisting of b4056-protein in an organelle, preferably in plastids or mitochondria, especially in plastids, of a non-human organism or a part thereof, preferably a microorganism, a plant cell, a plant or a part thereof, as compared to a corresponding non-transformed wild type non-human organism or a part thereof; and
[71753] (b) growing the non-human organism or a part thereof under conditions which permit the production of citramalate or a composition comprising citramalate in said non-human organism or in the culture medium surrounding said non-human organism.

[71754] A further embodiment of the present invention relates to a process for the production of citrate, which comprises
[71755] (a) increasing or generating one or more activities selected from the group consisting of aspartase in an organelle, preferably in plastids or mitochondria, especially in plastids, of a non-human organism or a part thereof, preferably a microorganism, a plant cell, a plant or a part thereof, as compared to a corresponding non-transformed wild type non-human organism or a part thereof; and
[71756] (b) growing the non-human organism or a part thereof under conditions which permit the production of citrate or a composition comprising citrate in said non-human organism or in the culture medium surrounding said non-human organism.

[71757] A further embodiment of the present invention relates to a process for the production of fumarate, which comprises
[71758] (a) increasing or generating one or more activities selected from the group consisting of acetyltransferase in an organelle, preferably in plastids or mitochondria, especially in plastids, of a non-human organism or a part thereof, preferably a microorganism, a plant cell, a plant or a part thereof, as compared to a corresponding non-transformed wild type non-human organism or a part thereof; and
[71759] (b) growing the non-human organism or a part thereof under conditions which permit the production of fumarate or a composition comprising fumarate in said non-human organism or in the culture medium surrounding said non-human organism.

[71760] A further embodiment of the present invention relates to a process for the production of malate, which comprises
[71761] (a) increasing or generating one or more activities selected from the group consisting of acetyltransferase in an organelle, preferably in plastids or mitochondria, especially in plastids, of a non-human organism or a part thereof, preferably a microorganism, a plant cell, a plant or a part thereof, as compared to a corresponding non-transformed wild type non-human organism or a part thereof; and
[71762] (b) growing the non-human organism or a part thereof under conditions which permit the production of malate or a composition comprising malate in said non-human organism or in the culture medium surrounding said non-human organism.

[71763] A further embodiment of the present invention relates to a process for the production of vitamin c and/or threonic acid, which comprises
[71764] (a) increasing or generating one or more activities selected from the group consisting of purine-nucleoside phosphorylase in an organelle, preferably in plastids or mitochondria, especially in plastids, of a non-human organism or a part thereof, preferably a microorganism, a plant cell, a plant or a part thereof, as compared to a corresponding non-transformed wild type non-human organism or a part thereof; and
[71765] (b) growing the non-human organism or a part thereof under conditions which permit the production of vitamin c and/or threonic acid or a composition comprising vitamin c and/or threonic acid in said non-human organism or in the culture medium surrounding said non-human organism.

[71766] A further embodiment of the present invention relates to a process for the production of succinate, which comprises
[71767] (a) increasing or generating one or more activities selected from the group consisting of lysine decarboxylase in an organelle, preferably in plastids or mitochondria, especially in plastids, of a non-human organism or a part thereof, preferably a microorganism, a plant cell, a plant or a part thereof, as compared to a corresponding non-transformed wild type non-human organism or a part thereof; and
[71768] (b) growing the non-human organism or a part thereof under conditions which permit the production of succinate or a composition comprising succinate in said non-human organism or in the culture medium surrounding said non-human organism.

[71769] A further embodiment of the present invention relates to a process for the production of succinate, which comprises
[71770] (a) increasing or generating one or more activities selected from the group consisting of glutaredoxin in an organelle, preferably in plastids or mitochondria, especially in plastids, of a non-human organism or a part thereof, preferably a microorganism, a plant cell, a plant or a part thereof, as compared to a corresponding non-transformed wild type non-human organism or a part thereof; and
[71771] (b) growing the non-human organism or a part thereof under conditions which permit the production of succinate or a composition comprising succinate in said non-human organism or in the culture medium surrounding said non-human organism.

[71772] A further embodiment of the present invention relates to a process for the production of fumarate, which comprises
[71773] (a) increasing or generating one or more activities selected from the group consisting of GM02LC17485-protein in an organelle, preferably in plastids or mitochondria, especially in plastids, of a non-human organism or a part thereof, preferably a microorganism, a plant cell, a plant or a part thereof, as compared to a corresponding non-transformed wild type non-human organism or a part thereof; and
[71774] (b) growing the non-human organism or a part thereof under conditions which permit the production of fumarate or a composition comprising fumarate in said non-human organism or in the culture medium surrounding said non-human organism.

[71775] A further embodiment of the present invention relates to a process for the production of citramalate, which comprises
[71776] (a) increasing or generating one or more activities selected from the group consisting of transcription factor in an organelle, preferably in plastids or mitochondria, especially in plastids, of a non-human organism or a part thereof, preferably a microorganism, a plant cell, a plant or a part thereof, as compared to a corresponding non-transformed wild type non-human organism or a part thereof; and
[71777] (b) growing the non-human organism or a part thereof under conditions which permit the production of citramalate or a composition comprising citramalate in said non-human organism or in the culture medium surrounding said non-human organism.

[71778] A further embodiment of the present invention relates to a process for the production of fumarate, which comprises
[71779] (a) increasing or generating one or more activities selected from the group consisting of transcription factor in an organelle, preferably in plastids or mitochondria, especially in plastids, of a non-human organism or a part thereof, preferably a microorganism, a plant cell, a plant or a part thereof, as compared to a corresponding non-transformed wild type non-human organism or a part thereof; and
[71780] (b) growing the non-human organism or a part thereof under conditions which permit the production of fumarate or a composition comprising fumarate in said non-human organism or in the culture medium surrounding said non-human organism.

[71781] A further embodiment of the present invention relates to a process for the production of malate, which comprises
[71782] (a) increasing or generating one or more activities selected from the group consisting of transcription factor in an organelle, preferably in plastids or mitochondria, especially in plastids, of a non-human organism or a part thereof, preferably a microorganism, a plant cell, a plant or a part thereof, as compared to a corresponding non-transformed wild type non-human organism or a part thereof; and
[71783] (b) growing the non-human organism or a part thereof under conditions which permit the production of malate or a composition comprising malate in said non-human organism or in the culture medium surrounding said non-human organism.

[71784] A further embodiment of the present invention relates to a process for the production of citramalate, which comprises
[71785] (a) increasing or generating one or more activities selected from the group consisting of GM02LC5744-protein in an organelle, preferably in plastids or mitochondria, especially in plastids, of a non-human organism or a part thereof, preferably a microorganism, a plant cell, a plant or a part thereof, as compared to a corresponding non-transformed wild type non-human organism or a part thereof; and
[71786] (b) growing the non-human organism or a part thereof under conditions which permit the production of citramalate or a composition comprising citramalate in said non-human organism or in the culture medium surrounding said non-human organism.

[71787] A further embodiment of the present invention relates to a process for the production of fumarate, which comprises
[71788] (a) increasing or generating one or more activities selected from the group consisting of GM02LC5744-protein in an organelle, preferably in plastids or mitochondria, especially in plastids, of a non-human organism or a part thereof, preferably a microorganism, a plant cell, a plant or a part thereof, as compared to a corresponding non-transformed wild type non-human organism or a part thereof; and
[71789] (b) growing the non-human organism or a part thereof under conditions which permit the production of fumarate or a composition comprising fumarate in said non-human organism or in the culture medium surrounding said non-human organism.

[71790] A further embodiment of the present invention relates to a process for the production of citramalate, which comprises
[71791] (a) increasing or generating one or more activities selected from the group consisting of heat shock protein in an organelle, preferably in plastids or mitochondria, especially in plastids, of a non-human organism or a part thereof, preferably a microorganism, a plant cell, a plant or a part thereof, as compared to a corresponding non-transformed wild type non-human organism or a part thereof; and
[71792] (b) growing the non-human organism or a part thereof under conditions which permit the production of citramalate or a composition comprising citramalate in said non-human organism or in the culture medium surrounding said non-human organism.

[71793] A further embodiment of the present invention relates to a process for the production of fumarate, which comprises
[71794] (a) increasing or generating one or more activities selected from the group consisting of agmatinase in an organelle, preferably in plastids or mitochondria, especially in plastids, of a non-human organism or a part thereof, preferably a microorganism, a plant cell, a plant or a part thereof, as compared to a corresponding non-transformed wild type non-human organism or a part thereof; and
[71795] (b) growing the non-human organism or a part thereof under conditions which permit the production of fumarate or a composition comprising fumarate in said non-human organism or in the culture medium surrounding said non-human organism.

[71796] A further embodiment of the present invention relates to a process for the production of malate, which comprises
[71797] (a) increasing or generating one or more activities selected from the group consisting of ABC transporter ATP binding component in an organelle, preferably in plastids or mitochondria, especially in plastids, of a non-human organism or a part thereof, preferably a microorganism, a plant cell, a plant or a part thereof, as compared to a corresponding non-transformed wild type non-human organism or a part thereof; and
[71798] (b) growing the non-human organism or a part thereof under conditions which permit the production of malate or a composition comprising malate in said non-human organism or in the culture medium surrounding said non-human organism.

[71799] A further embodiment of the present invention relates to a process for the production of succinate, which comprises
[71800] (a) increasing or generating one or more activities selected from the group consisting of ABC transporter ATP binding component in an organelle, preferably in plastids or mitochondria, especially in plastids, of a non-human organism or a part thereof, preferably a microorganism, a plant cell, a plant or a part thereof, as compared to a corresponding non-transformed wild type non-human organism or a part thereof; and
[71801] (b) growing the non-human organism or a part thereof under conditions which permit the production of succinate or a composition comprising succinate in said non-human organism or in the culture medium surrounding said non-human organism.

[71802] A further embodiment of the present invention relates to a process for the production of fumarate, which comprises
[71803] (a) increasing or generating one or more activities selected from the group consisting of oxireductase in an organelle, preferably in plastids or mitochondria, especially in plastids, of a non-human organism or a part thereof, preferably a microorganism, a plant cell, a plant or a part thereof, as compared to a corresponding non-transformed wild type non-human organism or a part thereof; and
[71804] (b) growing the non-human organism or a part thereof under conditions which permit the production of fumarate or a composition comprising fumarate in said non-human organism or in the culture medium surrounding said non-human organism.

[71805] A further embodiment of the present invention relates to a process for the production of succinate, which comprises
[71806] (a) increasing or generating one or more activities selected from the group consisting of phosphatase in an organelle, preferably in plastids or mitochondria, especially in plastids, of a non-human organism or a part thereof, preferably a microorganism, a plant cell, a plant or a part thereof, as compared to a corresponding non-transformed wild type non-human organism or a part thereof; and
[71807] (b) growing the non-human organism or a part thereof under conditions which permit the production of succinate or a composition comprising succinate in said non-human organism or in the culture medium surrounding said non-human organism.

[71808] A further embodiment of the present invention relates to a process for the production of citramalate, which comprises
[71809] (a) increasing or generating one or more activities selected from the group consisting of CDP-diacylglycerol-glycerol-3-phosphate 3-phosphatidyltransferase in an organelle, preferably in plastids or mitochondria, especially in plastids, of a non-human organism or a part thereof, preferably a microorganism, a plant cell, a plant or a part thereof, as compared to a corresponding non-transformed wild type non-human organism or a part thereof; and
[71810] (b) growing the non-human organism or a part thereof under conditions which permit the production of citramalate or a composition comprising citramalate in said non-human organism or in the culture medium surrounding said non-human organism.

[71811] A further embodiment of the present invention relates to a process for the production of malate, which comprises
[71812] (a) increasing or generating one or more activities selected from the group consisting of CDP-diacylglycerol-glycerol-3-phosphate 3-phosphatidyltransferase in an organelle, preferably in plastids or mitochondria, especially in plastids, of a non-human organism or a part thereof, preferably a microorganism, a plant cell, a plant or a part thereof, as compared to a corresponding non-transformed wild type non-human organism or a part thereof; and
[71813] (b) growing the non-human organism or a part thereof under conditions which permit the production of malate or a composition comprising malate in said non-human organism or in the culture medium surrounding said non-human organism.

[71814] A further embodiment of the present invention relates to a process for the production of succinate, which comprises
[71815] (a) increasing or generating one or more activities selected from the group consisting of adenylate kinase in an organelle, preferably in plastids or mitochondria, especially in plastids, of a non-human organism or a part thereof, preferably a microorganism, a plant cell, a plant or a part thereof, as compared to a corresponding non-transformed wild type non-human organism or a part thereof; and
[71816] (b) growing the non-human organism or a part thereof under conditions which permit the production of succinate or a composition comprising succinate in said non-human organism or in the culture medium surrounding said non-human organism.

[71817] A further embodiment of the present invention relates to a process for the production of citramalate, which comprises
[71818] (a) increasing or generating one or more activities selected from the group consisting of cation-transporting ATPase in an organelle, preferably in plastids or mitochondria, especially in plastids, of a non-human organism or a part thereof, preferably a microorganism, a plant cell, a plant or a part thereof, as compared to a corresponding non-transformed wild type non-human organism or a part thereof; and
[71819] (b) growing the non-human organism or a part thereof under conditions which permit the production of citramalate or a composition comprising citramalate in said non-human organism or in the culture medium surrounding said non-human organism.

[71820] A further embodiment of the present invention relates to a process for the production of malate, which comprises
[71821] (a) increasing or generating one or more activities selected from the group consisting of cation-transporting ATPase in an organelle, preferably in plastids or mitochondria, especially in plastids, of a non-human organism or a part thereof, preferably a microorganism, a plant cell, a plant or a part thereof, as compared to a corresponding non-transformed wild type non-human organism or a part thereof; and
[71822] (b) growing the non-human organism or a part thereof under conditions which permit the production of malate or a composition comprising malate in said non-human organism or in the culture medium surrounding said non-human organism.

[71823] A further embodiment of the present invention relates to a process for the production of fumarate, which comprises
[71824] (a) increasing or generating one or more activities selected from the group consisting of fumarate hydratase in an organelle, preferably in plastids or mitochondria, especially in plastids, of a non-human organism or a part thereof, preferably a microorganism, a plant cell, a plant or a part thereof, as compared to a corresponding non-transformed wild type non-human organism or a part thereof; and
[71825] (b) growing the non-human organism or a part thereof under conditions which permit the production of fumarate or a composition comprising fumarate in said non-human organism or in the culture medium surrounding said non-human organism.

[71826] A further embodiment of the present invention relates to a process for the production of citramalate, which comprises
[71827] (a) increasing or generating one or more activities selected from the group consisting of oxidoreductase in an organelle, preferably in plastids or mitochondria, especially in plastids, of a non-human organism or a part thereof, preferably a microorganism, a plant cell, a plant or a part thereof, as compared to a corresponding non-transformed wild type non-human organism or a part thereof; and
[71828] (b) growing the non-human organism or a part thereof under conditions which permit the production of citramalate or a composition comprising citramalate in said non-human organism or in the culture medium surrounding said non-human organism.

[71829] A further embodiment of the present invention relates to a process for the production of fumarate, which comprises
[71830] (a) increasing or generating one or more activities selected from the group consisting of bifunctional purine biosynthesis protein in an organelle, preferably in plastids or mitochondria, especially in plastids, of a non-human organism or a part thereof, preferably a microorganism organism, a plant cell, a plant or a part thereof, as compared to a corresponding non-transformed wild type non-human organism or a part thereof; and
[71831] (b) growing the non-human organism or a part thereof under conditions which permit the production of fumarate or a composition comprising fumarate in said non-human organism or in the culture medium surrounding said non-human organism.

[71832] A further embodiment of the present invention relates to a process for the production of citramalate, which comprises
[71833] (a) increasing or generating one or more activities selected from the group consisting of malate dehydrogenase in an organelle, preferably in plastids or mitochondria, especially in plastids, of a non-human organism or a part thereof, preferably a microorganism, a plant cell, a plant or a part thereof, as compared to a corresponding non-transformed wild type non-human organism or a part thereof; and
[71834] (b) growing the non-human organism or a part thereof under conditions which permit the production of citramalate or a composition comprising citramalate in said non-human organism or in the culture medium surrounding said non-human organism.

[71835] A further embodiment of the present invention relates to a process for the production of succinate, which comprises
[71836] (a) increasing or generating one or more activities selected from the group consisting of malate dehydrogenase in an organelle, preferably in plastids or mitochondria, especially in plastids, of a non-human organism or a part thereof, preferably a microorganism, a plant cell, a plant or a part thereof, as compared to a corresponding non-transformed wild type non-human organism or a part thereof; and
[71837] (b) growing the non-human organism or a part thereof under conditions which permit the production of succinate or a composition comprising succinate in said non-human organism or in the culture medium surrounding said non-human organism.

[71838] A further embodiment of the present invention relates to a process for the production of glycerate, which comprises
[71839] (a) increasing or generating one or more activities selected from the group consisting of dihydrolipoamide dehydrogenase in an organelle, preferably in plastids or mitochondria, especially in plastids, of a non-human organism or a part thereof, preferably a microorganism, a plant cell, a plant or a part thereof, as compared to a corresponding non-transformed wild type non-human organism or a part thereof; and
[71840] (b) growing the non-human organism or a part thereof under conditions which permit the production of glycerate or a composition comprising glycerate in said non-human organism or in the culture medium surrounding said non-human organism.

[71841] A further embodiment of the present invention relates to a process for the production of succinate, which comprises
[71842] (a) increasing or generating one or more activities selected from the group consisting of dihydrolipoamide dehydrogenase in an organelle, preferably in plastids or mitochondria, especially in plastids, of a non-human organism or a part thereof, preferably a microorganism, a plant cell, a plant or a part thereof, as compared to a corresponding non-transformed wild type non-human organism or a part thereof; and
[71843] (b) growing the non-human organism or a part thereof under conditions which permit the production of succinate or a composition comprising succinate in said non-human organism or in the culture medium surrounding said non-human organism.

[71844] A further embodiment of the present invention relates to a process for the production of succinate, which comprises
[71845] (a) increasing or generating one or more activities selected from the group consisting of slr1170-protein in an organelle, preferably in plastids or mitochondria, especially in plastids, of a non-human organism or a part thereof, preferably a microorganism, a plant cell, a plant or a part thereof, as compared to a corresponding non-transformed wild type non-human organism or a part thereof; and
[71846] (b) growing the non-human organism or a part thereof under conditions which permit the production of succinate or a composition comprising succinate in said non-human organism or in the culture medium surrounding said non-human organism.

[71847] A further embodiment of the present invention relates to a process for the production of fumarate, which comprises
[71848] (a) increasing or generating one or more activities selected from the group consisting of phosphate import ATP-binding protein in an organelle, preferably in plastids or mitochondria, especially in plastids, of a non-human organism or a part thereof, preferably a microorganism organism, a plant cell, a plant or a part thereof, as compared to a corresponding non-transformed wild type non-human organism or a part thereof; and
[71849] (b) growing the non-human organism or a part thereof under conditions which permit the production of fumarate or a composition comprising fumarate in said non-human organism or in the culture medium surrounding said non-human organism.

[71850] A further embodiment of the present invention relates to a process for the production of succinate, which comprises
[71851] (a) increasing or generating one or more activities selected from the group consisting of gamma-glutamyltranspeptidase in an organelle, preferably in plastids or mitochondria, especially in plastids, of a non-human organism or a part thereof, preferably a microorganism, a plant cell, a plant or a part thereof, as compared to a corresponding non-transformed wild type non-human organism or a part thereof; and
[71852] (b) growing the non-human organism or a part thereof under conditions which permit the production of succinate or a composition comprising succinate in said non-human organism or in the culture medium surrounding said non-human organism.

[71853] A further embodiment of the present invention relates to a process for the production of malate, which comprises
[71854] (a) increasing or generating one or more activities selected from the group consisting of photosystem II protein in an organelle, preferably in plastids or mitochondria, especially in plastids, of a non-human organism or a part thereof, preferably a microorganism, a plant cell, a plant or a part thereof, as compared to a corresponding non-transformed wild type non-human organism or a part thereof; and
[71855] (b) growing the non-human organism or a part thereof under conditions which permit the production of malate or a composition comprising malate in said non-human organism or in the culture medium surrounding said non-human organism.

[71856] A further embodiment of the present invention relates to a process for the production of fumarate, which comprises
[71857] (a) increasing or generating one or more activities selected from the group consisting of malonyl CoA-acyl carrier protein transacylase in an organelle, preferably in plastids or mitochondria, especially in plastids, of a non-human organism or a part thereof, preferably a microorganism, a plant cell, a plant or a part thereof, as compared to a corresponding non-transformed wild type non-human organism or a part thereof; and
[71858] (b) growing the non-human organism or a part thereof under conditions which permit the production of fumarate or a composition comprising fumarate in said non-human organism or in the culture medium surrounding said non-human organism.

[71859] A further embodiment of the present invention relates to a process for the production of succinate, which comprises
[71860] (a) increasing or generating one or more activities selected from the group consisting of malonyl CoA-acyl carrier protein transacylase in an organelle, preferably in plastids or mitochondria, especially in plastids, of a non-human organism or a part thereof, preferably a microorganism, a plant cell, a plant or a part thereof, as compared to a corresponding non-transformed wild type non-human organism or a part thereof; and
[71861] (b) growing the non-human organism or a part thereof under conditions which permit the production of succinate or a composition comprising succinate in said non-human organism or in the culture medium surrounding said non-human organism.

[71862] A further embodiment of the present invention relates to a process for the production of glycerate, which comprises
[71863] (a) increasing or generating one or more activities selected from the group consisting of photosystem I reaction centre subunit in an organelle, preferably in plastids or mitochondria, especially in plastids, of a non-human organism or a part thereof, preferably a microorganism, a plant cell, a plant or a part thereof, as compared to a corresponding non-transformed wild type non-human organism or a part thereof; and
[71864] (b) growing the non-human organism or a part thereof under conditions which permit the production of glycerate or a composition comprising glycerate in said non-human organism or in the culture medium surrounding said non-human organism.

[71865] A further embodiment of the present invention relates to a process for the production of fumarate, which comprises
[71866] (a) increasing or generating one or more activities selected from the group consisting of Secindependent protein translocase subunit in an organelle, preferably in plastids or mitochondria, especially in plastids, of a non-human organism or a part thereof, preferably a microorganism, a plant cell, a plant or a part thereof, as compared to a corresponding non-transformed wild type non-human organism or a part thereof; and
[71867] (b) growing the non-human organism or a part thereof under conditions which permit the production of fumarate or a composition comprising fumarate in said non-human organism or in the culture medium surrounding said non-human organism.

[71868] A further embodiment of the present invention relates to a process for the production of succinate, which comprises
[71869] (a) increasing or generating one or more activities selected from the group consisting of Sec-independent protein translocase subunit in an organelle, preferably in plastids or mitochondria, especially in plastids, of a non-human organism or a part thereof, preferably a microorganism, a plant cell, a plant or a part thereof, as compared to a corresponding non-transformed wild type non-human organism or a part thereof; and
[71870] (b) growing the non-human organism or a part thereof under conditions which permit the production of succinate or a composition comprising succinate in said non-human organism or in the culture medium surrounding said non-human organism.

[71871] A further embodiment of the present invention relates to a process for the production of citramalate, which comprises
[71872] (a) increasing or generating one or more activities selected from the group consisting of 2-isopropylmalate synthase in an organelle, preferably in plastids or mitochondria, especially in plastids, of a non-human organism or a part thereof, preferably a microorganism, a plant cell, a plant or a part thereof, as compared to a corresponding non-transformed wild type non-human organism or a part thereof; and
[71873] (b) growing the non-human organism or a part thereof under conditions which permit the production of citramalate or a composition comprising citramalate in said non-human organism or in the culture medium surrounding said non-human organism.

[71874] A further embodiment of the present invention relates to a process for the production of fumarate, which comprises
[71875] (a) increasing or generating one or more activities selected from the group consisting of multiple antibiotic resistance protein in an organelle, preferably in plastids or mitochondria, especially in plastids, of a non-human organism or a part thereof, preferably a microorganism, a plant cell, a plant or a part thereof, as compared to a corresponding non-transformed wild type non-human organism or a part thereof; and
[71876] (b) growing the non-human organism or a part thereof under conditions which permit the production of fumarate or a composition comprising fumarate in said non-human organism or in the culture medium surrounding said non-human organism.

[71877] A further embodiment of the present invention relates to a process for the production of succinate, which comprises
[71878] (a) increasing or generating one or more activities selected from the group consisting of multiple antibiotic resistance protein in an organelle, preferably in plastids or mitochondria, especially in plastids, of a non-human organism or a part thereof, preferably a microorganism, a plant cell, a plant or a part thereof, as compared to a corresponding non-transformed wild type non-human organism or a part thereof; and
[71879] (b) growing the non-human organism or a part thereof under conditions which permit the production of succinate or a composition comprising succinate in said non-human organism or in the culture medium surrounding said non-human organism.

[71880] A further embodiment of the present invention relates to a process for the production of fumarate, which comprises
[71881] (a) increasing or generating one or more activities selected from the group consisting of TTC1386-protein in an organelle, preferably in plastids or mitochondria, especially in plastids, of a non-human organism or a part thereof, preferably a microorganism, a plant cell, a plant or a part thereof, as compared to a corresponding non-transformed wild type non-human organism or a part thereof; and
[71882] (b) growing the non-human organism or a part thereof under conditions which permit the production of fumarate or a composition comprising fumarate in said non-human organism or in the culture medium surrounding said non-human organism.

[71883] A further embodiment of the present invention relates to a process for the production of malate, which comprises
[71884] (a) increasing or generating one or more activities selected from the group consisting of TTC1386-protein in an organelle, preferably in plastids or mitochondria, especially in plastids, of a non-human organism or a part thereof, preferably a microorganism, a plant cell, a plant or a part thereof, as compared to a corresponding non-transformed wild type non-human organism or a part thereof; and
[71885] (b) growing the non-human organism or a part thereof under conditions which permit the production of malate or a composition comprising malate in said non-human organism or in the culture medium surrounding said non-human organism.

[71886] A further embodiment of the present invention relates to a process for the production of succinate, which comprises
[71887] (a) increasing or generating one or more activities selected from the group consisting of TTC1386-protein in an organelle, preferably in plastids or mitochondria, especially in plastids, of a non-human organism or a part thereof, preferably a microorganism, a plant cell, a plant or a part thereof, as compared to a corresponding non-transformed wild type non-human organism or a part thereof; and
[71888] (b) growing the non-human organism or a part thereof under conditions which permit the production of succinate or a composition comprising succinate in said non-human organism or in the culture medium surrounding said non-human organism.

[71889] A further embodiment of the present invention relates to a process for the production of citramalate, which comprises
[71890] (a) increasing or generating one or more activities selected from the group consisting of oxidoreductase subunit in an organelle, preferably in plastids or mitochondria, especially in plastids, of a non-human organism or a part thereof, preferably a microorganism, a plant cell, a plant or a part thereof, as compared to a corresponding non-transformed wild type non-human organism or a part thereof; and
[71891] (b) growing the non-human organism or a part thereof under conditions which permit the production of citramalate or a composition comprising citramalate in said non-human organism or in the culture medium surrounding said non-human organism.

[71892] A further embodiment of the present invention relates to a process for the production of glycerate, which comprises
[71893] (a) increasing or generating one or more activities selected from the group consisting of oxidoreductase subunit in an organelle, preferably in plastids or mitochondria, especially in plastids, of a non-human organism or a part thereof, preferably a microorganism, a plant cell, a plant or a part thereof, as compared to a corresponding non-transformed wild type non-human organism or a part thereof; and
[71894] (b) growing the non-human organism or a part thereof under conditions which permit the production of glycerate or a composition comprising glycerate in said non-human organism or in the culture medium surrounding said non-human organism.

[71895] A further embodiment of the present invention relates to a process for the production of malate, which comprises
[71896] (a) increasing or generating one or more activities selected from the group consisting of oxidoreductase subunit in an organelle, preferably in plastids or mitochondria, especially in plastids, of a non-human organism or a part thereof, preferably a microorganism, a plant cell, a plant or a part thereof, as compared to a corresponding non-transformed wild type non-human organism or a part thereof; and
[71897] (b) growing the non-human organism or a part thereof under conditions which permit the production of malate or a composition comprising malate in said non-human organism or in the culture medium surrounding said non-human organism.

[71898] A further embodiment of the present invention relates to a process for the production of fumarate, which comprises
[71899] (a) increasing or generating one or more activities selected from the group consisting of XM_{—}473199-protein in an organelle, preferably in plastids or mitochondria, especially in plastids, of a non-human organism or a part thereof, preferably a microorganism, a plant cell, a plant or a part thereof, as compared to a corresponding non-transformed wild type non-human organism or a part thereof; and
[71900] (b) growing the non-human organism or a part thereof under conditions which permit the production of fumarate or a composition comprising fumarate in said non-human organism or in the culture medium surrounding said non-human organism.

[71901] A further embodiment of the present invention relates to a process for the production of malate, which comprises
[71902] (a) increasing or generating one or more activities selected from the group consisting of XM_{—}473199-protein in an organelle, preferably in plastids or mitochondria, especially in plastids, of a non-human organism or a part thereof, preferably a microorganism, a plant cell, a plant or a part thereof, as compared to a corresponding non-transformed wild type non-human organism or a part thereof; and
[71903] (b) growing the non-human organism or a part thereof under conditions which permit the production of malate or a composition comprising malate in said non-human organism or in the culture medium surrounding said non-human organism.

[71904] A further embodiment of the present invention relates to a process for the production of succinate, which comprises
[71905] (a) increasing or generating one or more activities selected from the group consisting of XM_{—}473199-protein in an organelle, preferably in plastids or mitochondria, especially in plastids, of a non-human organism or a part thereof, preferably a microorganism, a plant cell, a plant or a part thereof, as compared to a corresponding non-transformed wild type non-human organism or a part thereof; and
[71906] (b) growing the non-human organism or a part thereof under conditions which permit the production of succinate or a composition comprising succinate in said non-human organism or in the culture medium surrounding said non-human organism.

[71907] A further embodiment of the present invention relates to a process for the production of succinate, which comprises
[71908] (a) increasing or generating one or more activities selected from the group consisting of glutamate dehydrogenase in an organelle, preferably in plastids or mitochondria, especially in plastids, of a non-human organism or a part thereof, preferably a microorganism, a plant cell, a plant or a part thereof, as compared to a corresponding non-transformed wild type non-human organism or a part thereof; and
[71909] (b) growing the non-human organism or a part thereof under conditions which permit the production of succinate or a composition comprising succinate in said non-human organism or in the culture medium surrounding said non-human organism.

[71910] A further embodiment of the present invention relates to a process for the production of citramalate, which comprises
[71911] (a) increasing or generating one or more activities selected from the group consisting of acetyl-CoA hydrolase in an organelle, preferably in plastids or mitochondria, especially in plastids, of a non-human organism or a part thereof, preferably a microorganism, a plant cell, a plant or a part thereof, as compared to a corresponding non-transformed wild type non-human organism or a part thereof; and
[71912] (b) growing the non-human organism or a part thereof under conditions which permit the production of citramalate or a composition comprising citramalate in said non-human organism or in the culture medium surrounding said non-human organism.

[71913] A further embodiment of the present invention relates to a process for the production of pyruvate, which comprises
[71914] (a) increasing or generating one or more activities selected from the group consisting of acetyl-CoA hydrolase in an organelle, preferably in plastids or mitochondria, especially in plastids, of a non-human organism or a part thereof, preferably a microorganism, a plant cell, a plant or a part thereof, as compared to a corresponding non-transformed wild type non-human organism or a part thereof; and
[71915] (b) growing the non-human organism or a part thereof under conditions which permit the production of pyruvate or a composition comprising pyruvate in said non-human organism or in the culture medium surrounding said non-human organism.

[71916] A further embodiment of the present invention relates to a process for the production of malate, which comprises
[71917] (a) increasing or generating one or more activities selected from the group consisting of pyruvate carboxylase in an organelle, preferably in plastids or mitochondria, especially in plastids, of a non-human organism or a part thereof, preferably a microorganism, a plant cell, a plant or a part thereof, as compared to a corresponding non-transformed wild type non-human organism or a part thereof; and
[71918] (b) growing the non-human organism or a part thereof under conditions which permit the production of malate or a composition comprising malate in said non-human organism or in the culture medium surrounding said non-human organism.

[71919] A further embodiment of the present invention relates to a process for the production of fumarate, which comprises
[71920] (a) increasing or generating one or more activities selected from the group consisting of ycr102c-protein in an organelle, preferably in plastids or mitochondria, especially in plastids, of a non-human organism or a part thereof, preferably a microorganism, a plant cell, a plant or a part thereof, as compared to a corresponding non-transformed wild type non-human organism or a part thereof; and
[71921] (b) growing the non-human organism or a part thereof under conditions which permit the production of fumarate or a composition comprising fumarate in said non-human organism or in the culture medium surrounding said non-human organism.

[71922] A further embodiment of the present invention relates to a process for the production of fumarate, which comprises
[71923] (a) increasing or generating one or more activities selected from the group consisting of YDL159W-A-protein in an organelle, preferably in plastids or mitochondria, especially in plastids, of a non-human organism or a part thereof, preferably a microorganism, a plant cell, a plant or a part thereof, as compared to a corresponding non-transformed wild type non-human organism or a part thereof; and
[71924] (b) growing the non-human organism or a part thereof under conditions which permit the production of fumarate or a composition comprising fumarate in said non-human organism or in the culture medium surrounding said non-human organism.

[71925] A further embodiment of the present invention relates to a process for the production of fumarate, which comprises
[71926] (a) increasing or generating one or more activities selected from the group consisting of coproporphyrinogen III oxidase in an organelle, preferably in plastids or mitochondria, especially in plastids, of a non-human organism or a part thereof, preferably a microorganism, a plant cell, a plant or a part thereof, as compared to a corresponding non-transformed wild type non-human organism or a part thereof; and
[71927] (b) growing the non-human organism or a part thereof under conditions which permit the production of fumarate or a composition comprising fumarate in said non-human organism or in the culture medium surrounding said non-human organism.

[71928] A further embodiment of the present invention relates to a process for the production of succinate, which comprises
[71929] (a) increasing or generating one or more activities selected from the group consisting of coproporphyrinogen III oxidase in an organelle, preferably in plastids or mitochondria, especially in plastids, of a non-human organism or a part thereof, preferably a microorganism, a plant cell, a plant or a part thereof, as compared to a corresponding non-transformed wild type non-human organism or a part thereof; and
[71930] (b) growing the non-human organism or a part thereof under conditions which permit the production of succinate or a composition comprising succinate in said non-human organism or in the culture medium surrounding said non-human organism.

[71931] A further embodiment of the present invention relates to a process for the production of malate, which comprises
[71932] (a) increasing or generating one or more activities selected from the group consisting of ygl237c-protein in an organelle, preferably in plastids or mitochondria, especially in plastids, of a non-human organism or a part thereof, preferably a microorganism, a plant cell, a plant or a part thereof, as compared to a corresponding non-transformed wild type non-human organism or a part thereof; and
[71933] (b) growing the non-human organism or a part thereof under conditions which permit the production of malate or a composition comprising malate in said non-human organism or in the culture medium surrounding said non-human organism.

[71934] A further embodiment of the present invention relates to a process for the production of succinate, which comprises
[71935] (a) increasing or generating one or more activities selected from the group consisting of ygl237c-protein in an organelle, preferably in plastids or mitochondria, especially in plastids, of a non-human organism or a part thereof, preferably a microorganism, a plant cell, a plant or a part thereof, as compared to a corresponding non-transformed wild type non-human organism or a part thereof; and
[71936] (b) growing the non-human organism or a part thereof under conditions which permit the production of succinate or a composition comprising succinate in said non-human organism or in the culture medium surrounding said non-human organism.

[71937] A further embodiment of the present invention relates to a process for the production of fumarate, which comprises
[71938] (a) increasing or generating one or more activities selected from the group consisting of YGR193C-protein in an organelle, preferably in plastids or mitochondria, especially in plastids, of a non-human organism or a part thereof, preferably a microorganism, a plant cell, a plant or a part thereof, as compared to a corresponding non-transformed wild type non-human organism or a part thereof; and
[71939] (b) growing the non-human organism or a part thereof under conditions which permit the production of fumarate or a composition comprising fumarate in said non-human organism or in the culture medium surrounding said non-human organism.

[71940] A further embodiment of the present invention relates to a process for the production of malate, which comprises
[71941] (a) increasing or generating one or more activities selected from the group consisting of YGR193C-protein in an organelle, preferably in plastids or mitochondria, especially in plastids, of a non-human organism or a part thereof, preferably a microorganism, a plant cell, a plant or a part thereof, as compared to a corresponding non-transformed wild type non-human organism or a part thereof; and
[71942] (b) growing the non-human organism or a part thereof under conditions which permit the production of malate or a composition comprising malate in said non-human organism or in the culture medium surrounding said non-human organism.

[71943] A further embodiment of the present invention relates to a process for the production of succinate, which comprises
[71944] (a) increasing or generating one or more activities selected from the group consisting of YGR193C-protein in an organelle, preferably in plastids or mitochondria, especially in plastids, of a non-human organism or a part thereof, preferably a microorganism, a plant cell, a plant or a part thereof, as compared to a corresponding non-transformed wild type non-human organism or a part thereof; and
[71945] (b) growing the non-human organism or a part thereof under conditions which permit the production of succinate or a composition comprising succinate in said non-human organism or in the culture medium surrounding said non-human organism.

[71946] A further embodiment of the present invention relates to a process for the production of malate, which comprises
[71947] (a) increasing or generating one or more activities selected from the group consisting of ygr221c-protein in an organelle, preferably in plastids or mitochondria, especially in plastids, of a non-human organism or a part thereof, preferably a microorganism, a plant cell, a plant or a part thereof, as compared to a corresponding non-transformed wild type non-human organism or a part thereof; and
[71948] (b) growing the non-human organism or a part thereof under conditions which permit the production of malate or a composition comprising malate in said non-human organism or in the culture medium surrounding said non-human organism.

[71949] A further embodiment of the present invention relates to a process for the production of citrate, which comprises
[71950] (a) increasing or generating one or more activities selected from the group consisting of glycerol kinase in an organelle, preferably in plastids or mitochondria, especially in plastids, of a non-human organism or a part thereof, preferably a microorganism, a plant cell, a plant or a part thereof, as compared to a corresponding non-transformed wild type non-human organism or a part thereof; and
[71951] (b) growing the non-human organism or a part thereof under conditions which permit the production of citrate or a composition comprising citrate in said non-human organism or in the culture medium surrounding said non-human organism.

[71952] A further embodiment of the present invention relates to a process for the production of malate, which comprises
[71953] (a) increasing or generating one or more activities selected from the group consisting of yhr131c-protein in an organelle, preferably in plastids or mitochondria, especially in plastids, of a non-human organism or a part thereof, preferably a microorganism, a plant cell, a plant or a part thereof, as compared to a corresponding non-transformed wild type non-human organism or a part thereof; and
[71954] (b) growing the non-human organism or a part thereof under conditions which permit the production of malate or a composition comprising malate in said non-human organism or in the culture medium surrounding said non-human organism.

[71955] A further embodiment of the present invention relates to a process for the production of succinate, which comprises
[71956] (a) increasing or generating one or more activities selected from the group consisting of yhr207c-protein in an organelle, preferably in plastids or mitochondria, especially in plastids, of a non-human organism or a part thereof, preferably a microorganism, a plant cell, a plant or a part thereof, as compared to a corresponding non-transformed wild type non-human organism or a part thereof; and
[71957] (b) growing the non-human organism or a part thereof under conditions which permit the production of succinate or a composition comprising succinate in said non-human organism or in the culture medium surrounding said non-human organism.

[71958] A further embodiment of the present invention relates to a process for the production of glycerate, which comprises
[71959] (a) increasing or generating one or more activities selected from the group consisting of DnaJ-like chaperone in an organelle, preferably in plastids or mitochondria, especially in plastids, of a non-human organism or a part thereof, preferably a microorganism, a plant cell, a plant or a part thereof, as compared to a corresponding non-transformed wild type non-human organism or a part thereof; and
[71960] (b) growing the non-human organism or a part thereof under conditions which permit the production of glycerate or a composition comprising glycerate in said non-human organism or in the culture medium surrounding said non-human organism.

[71961] A further embodiment of the present invention relates to a process for the production of oxalate, which comprises
[71962] (a) increasing or generating one or more activities selected from the group consisting of hexose transporter in an organelle, preferably in plastids or mitochondria, especially in plastids, of a non-human organism or a part thereof, preferably a microorganism, a plant cell, a plant or a part thereof, as compared to a corresponding non-transformed wild type non-human organism or a part thereof; and
[71963] (b) growing the non-human organism or a part thereof under conditions which permit the production of oxalate or a composition comprising oxalate in said non-human organism or in the culture medium surrounding said non-human organism.

[71964] A further embodiment of the present invention relates to a process for the production of citramalate, which comprises
[71965] (a) increasing or generating one or more activities selected from the group consisting of branched chain aminotransferase in an organelle, preferably in plastids or mitochondria, especially in plastids, of a non-human organism or a part thereof, preferably a microorganism, a plant cell, a plant or a part thereof, as compared to a corresponding non-transformed wild type non-human organism or a part thereof; and
[71966] (b) growing the non-human organism or a part thereof under conditions which permit the production of citramalate or a composition comprising citramalate in said non-human organism or in the culture medium surrounding said non-human organism.

[71967] A further embodiment of the present invention relates to a process for the production of fumarate, which comprises
[71968] (a) increasing or generating one or more activities selected from the group consisting of polygalacturonase in an organelle, preferably in plastids or mitochondria, especially in plastids, of a non-human organism or a part thereof, preferably a microorganism, a plant cell, a plant or a part thereof, as compared to a corresponding non-transformed wild type non-human organism or a part thereof; and
[71969] (b) growing the non-human organism or a part thereof under conditions which permit the production of fumarate or a composition comprising fumarate in said non-human organism or in the culture medium surrounding said non-human organism.

[71970] A further embodiment of the present invention relates to a process for the production of malate, which comprises
[71971] (a) increasing or generating one or more activities selected from the group consisting of polygalacturonase in an organelle, preferably in plastids or mitochondria, especially in plastids, of a non-human organism or a part thereof, preferably a microorganism, a plant cell, a plant or a part thereof, as compared to a corresponding non-transformed wild type non-human organism or a part thereof; and
[71972] (b) growing the non-human organism or a part thereof under conditions which permit the production of malate or a composition comprising malate in said non-human organism or in the culture medium surrounding said non-human organism.

[71973] A further embodiment of the present invention relates to a process for the production of malate, which comprises
[71974] (a) increasing or generating one or more activities selected from the group consisting of YKL038W-protein in an organelle, preferably in plastids or mitochondria, especially in plastids, of a non-human organism or a part thereof, preferably a microorganism, a plant cell, a plant or a part thereof, as compared to a corresponding non-transformed wild type non-human organism or a part thereof; and
[71975] (b) growing the non-human organism or a part thereof under conditions which permit the production of malate or a composition comprising malate in said non-human organism or in the culture medium surrounding said non-human organism.

[71976] A further embodiment of the present invention relates to a process for the production of vitamin c and/or threonic acid, which comprises
[71977] (a) increasing or generating one or more activities selected from the group consisting of YKL140W-protein in an organelle, preferably in plastids or mitochondria, especially in plastids, of a non-human organism or a part thereof, preferably a microorganism, a plant cell, a plant or a part thereof, as compared to a corresponding non-transformed wild type non-human organism or a part thereof; and
[71978] (b) growing the non-human organism or a part thereof under conditions which permit the production of vitamin c and/or threonic acid or a composition comprising vitamin c and/or threonic acid in said non-human organism or in the culture medium surrounding said non-human organism.

[71979] A further embodiment of the present invention relates to a process for the production of fumarate, which comprises
[71980] (a) increasing or generating one or more activities selected from the group consisting of ylr065c-protein in an organelle, preferably in plastids or mitochondria, especially in plastids, of a non-human organism or a part thereof, preferably a microorganism, a plant cell, a plant or a part thereof, as compared to a corresponding non-transformed wild type non-human organism or a part thereof; and
[71981] (b) growing the non-human organism or a part thereof under conditions which permit the production of fumarate or a composition comprising fumarate in said non-human organism or in the culture medium surrounding said non-human organism.

[71982] A further embodiment of the present invention relates to a process for the production of succinate, which comprises
[71983] (a) increasing or generating one or more activities selected from the group consisting of isocitrate dehydrogenase in an organelle, preferably in plastids or mitochondria, especially in plastids, of a non-human organism or a part thereof, preferably a microorganism, a plant cell, a plant or a part thereof, as compared to a corresponding non-transformed wild type non-human organism or a part thereof; and
[71984] (b) growing the non-human organism or a part thereof under conditions which permit the production of succinate or a composition comprising succinate in said non-human organism or in the culture medium surrounding said non-human organism.

[71985] A further embodiment of the present invention relates to a process for the production of fumarate, which comprises
[71986] (a) increasing or generating one or more activities selected from the group consisting of ylr326w-protein in an organelle, preferably in plastids or mitochondria, especially in plastids, of a non-human organism or a part thereof, preferably a microorganism, a plant cell, a plant or a part thereof, as compared to a corresponding non-transformed wild type non-human organism or a part thereof; and
[71987] (b) growing the non-human organism or a part thereof under conditions which permit the production of fumarate or a composition comprising fumarate in said non-human organism or in the culture medium surrounding said non-human organism.

[71988] A further embodiment of the present invention relates to a process for the production of glycerate, which comprises
[71989] (a) increasing or generating one or more activities selected from the group consisting of ylr326w-protein in an organelle, preferably in plastids or mitochondria, especially in plastids, of a non-human organism or a part thereof, preferably a microorganism, a plant cell, a plant or a part thereof, as compared to a corresponding non-transformed wild type non-human organism or a part thereof; and
[71990] (b) growing the non-human organism or a part thereof under conditions which permit the production of glycerate or a composition comprising glycerate in said non-human organism or in the culture medium surrounding said non-human organism.

[71991] A further embodiment of the present invention relates to a process for the production of vitamin c and/or threonic acid, which comprises
[71992] (a) increasing or generating one or more activities selected from the group consisting of ylr326w-protein in an organelle, preferably in plastids or mitochondria, especially in plastids, of a non-human organism or a part thereof, preferably a microorganism, a plant cell, a plant or a part thereof, as compared to a corresponding non-transformed wild type non-human organism or a part thereof; and
[71993] (b) growing the non-human organism or a part thereof under conditions which permit the production of vitamin c and/or threonic acid or a composition comprising vitamin c and/or threonic acid in said non-human organism or in the culture medium surrounding said non-human organism.

[71994] A further embodiment of the present invention relates to a process for the production of fumarate, which comprises
[71995] (a) increasing or generating one or more activities selected from the group consisting of yml084w-protein in an organelle, preferably in plastids or mitochondria, especially in plastids, of a non-human organism or a part thereof, preferably a microorganism, a plant cell, a plant or a part thereof, as compared to a corresponding non-transformed wild type non-human organism or a part thereof; and
[71996] (b) growing the non-human organism or a part thereof under conditions which permit the production of fumarate or a composition comprising fumarate in said non-human organism or in the culture medium surrounding said non-human organism.

[71997] A further embodiment of the present invention relates to a process for the production of succinate, which comprises
[71998] (a) increasing or generating one or more activities selected from the group consisting of yml084w-protein in an organelle, preferably in plastids or mitochondria, especially in plastids, of a non-human organism or a part thereof, preferably a microorganism, a plant cell, a plant or a part thereof, as compared to a corresponding non-transformed wild type non-human organism or a part thereof; and
[71999] (b) growing the non-human organism or a part thereof under conditions which permit the production of succinate or a composition comprising succinate in said non-human organism or in the culture medium surrounding said non-human organism.

[72000] A further embodiment of the present invention relates to a process for the production of citramalate, which comprises
[72001] (a) increasing or generating one or more activities selected from the group consisting of yol073c-protein in an organelle, preferably in plastids or mitochondria, especially in plastids, of a non-human organism or a part thereof, preferably a microorganism, a plant cell, a plant or a part thereof, as compared to a corresponding non-transformed wild type non-human organism or a part thereof; and
[72002] (b) growing the non-human organism or a part thereof under conditions which permit the production of citramalate or a composition comprising citramalate in said non-human organism or in the culture medium surrounding said non-human organism.

[72003] A further embodiment of the present invention relates to a process for the production of malate, which comprises
[72004] (a) increasing or generating one or more activities selected from the group consisting of yol073c-protein in an organelle, preferably in plastids or mitochondria, especially in plastids, of a non-human organism or a part thereof, preferably a microorganism, a plant cell, a plant or a part thereof, as compared to a corresponding non-transformed wild type non-human organism or a part thereof; and
[72005] (b) growing the non-human organism or a part thereof under conditions which permit the production of malate or a composition comprising malate in said non-human organism or in the culture medium surrounding said non-human organism.

[72006] A further embodiment of the present invention relates to a process for the production of vitamin c and/or threonic acid, which comprises
[72007] (a) increasing or generating one or more activities selected from the group consisting of yol160w-protein in an organelle, preferably in plastids or mitochondria, especially in plastids, of a non-human organism or a part thereof, preferably a microorganism, a plant cell, a plant or a part thereof, as compared to a corresponding non-transformed wild type non-human organism or a part thereof; and
[72008] (b) growing the non-human organism or a part thereof under conditions which permit the production of vitamin c and/or threonic acid or a composition comprising vitamin c and/or threonic acid in said non-human organism or in the culture medium surrounding said non-human organism.

[72009] A further embodiment of the present invention relates to a process for the production of malate, which comprises
[72010] (a) increasing or generating one or more activities selected from the group consisting of acetyl-CoA acetyltransferase in an organelle, preferably in plastids or mitochondria, especially in plastids, of a non-human organism or a part thereof, preferably a microorganism, a plant cell, a plant or a part thereof, as compared to a corresponding non-transformed wild type non-human organism or a part thereof; and
[72011] (b) growing the non-human organism or a part thereof under conditions which permit the production of malate or a composition comprising malate in said non-human organism or in the culture medium surrounding said non-human organism.

[72012] A further embodiment of the present invention relates to a process for the production of vitamin c and/or threonic acid, which comprises
[72013] (a) increasing or generating one or more activities selected from the group consisting of ammonium transporter in an organelle, preferably in plastids or mitochondria, especially in plastids, of a non-human organism or a part thereof, preferably a microorganism, a plant cell, a plant or a part thereof, as compared to a corresponding non-transformed wild type non-human organism or a part thereof; and
[72014] (b) growing the non-human organism or a part thereof under conditions which permit the production of vitamin c and/or threonic acid or a composition comprising vitamin c and/or threonic acid in said non-human organism or in the culture medium surrounding said non-human organism.

[72015] A further embodiment of the present invention relates to a process for the production of fumarate, which comprises
[72016] (a) increasing or generating one or more activities selected from the group consisting of 47266012-protein in an organelle, preferably in plastids or mitochondria, especially in plastids, of a non-human organism or a part thereof, preferably a microorganism, a plant cell, a plant or a part thereof, as compared to a corresponding non-transformed wild type non-human organism or a part thereof; and
[72017] (b) growing the non-human organism or a part thereof under conditions which permit the production of fumarate or a composition comprising fumarate in said non-human organism or in the culture medium surrounding said non-human organism.

[72018] A further embodiment of the present invention relates to a process for the production of malate, which comprises
[72019] (a) increasing or generating one or more activities selected from the group consisting of 47266012-protein in an organelle, preferably in plastids or mitochondria, especially in plastids, of a non-human organism or a part thereof, preferably a microorganism, a plant cell, a plant or a part thereof, as compared to a corresponding non-transformed wild type non-human organism or a part thereof; and
[72020] (b) growing the non-human organism or a part thereof under conditions which permit the production of malate or a composition comprising malate in said non-human organism or in the culture medium surrounding said non-human organism.

[72021] A further embodiment of the present invention relates to a process for the production of succinate, which comprises
[72022] (a) increasing or generating one or more activities selected from the group consisting of 47266012-protein in an organelle, preferably in plastids or mitochondria, especially in plastids, of a non-human organism or a part thereof, preferably a microorganism, a plant cell, a plant or a part thereof, as compared to a corresponding non-transformed wild type non-human organism or a part thereof; and
[72023] (b) growing the non-human organism or a part thereof under conditions which permit the production of succinate or a composition comprising succinate in said non-human organism or in the culture medium surrounding said non-human organism.

[72024] A further embodiment of the present invention relates to a process for the production of fumarate, which comprises
[72025] (a) increasing or generating one or more activities selected from the group consisting of 49747384_SOYBEAN-protein in an organelle, preferably in plastids or mitochondria, especially in plastids, of a non-human organism or a part thereof, preferably a microorganism, a plant cell, a plant or a part thereof, as compared to a corresponding non-transformed wild type non-human organism or a part thereof; and
[72026] (b) growing the non-human organism or a part thereof under conditions which permit the production of fumarate or a composition comprising fumarate in said non-human organism or in the culture medium surrounding said non-human organism.

[72027] A further embodiment of the present invention relates to a process for the production of malate, which comprises
[72028] (a) increasing or generating one or more activities selected from the group consisting of 49747384_SOYBEAN-protein in an organelle, preferably in plastids or mitochondria, especially in plastids, of a non-human organism or a part thereof, preferably a microorganism, a plant cell, a plant or a part thereof, as compared to a corresponding non-transformed wild type non-human organism or a part thereof; and
[72029] (b) growing the non-human organism or a part thereof under conditions which permit the production of malate or a composition comprising malate in said non-human organism or in the culture medium surrounding said non-human organism.

[72030] A further embodiment of the present invention relates to a process for the production of succinate, which comprises
[72031] (a) increasing or generating one or more activities selected from the group consisting of 49747384_SOYBEAN-protein in an organelle, preferably in plastids or mitochondria, especially in plastids, of a non-human organism or a part thereof, preferably a microorganism, a plant cell, a plant or a part thereof, as compared to a corresponding non-transformed wild type non-human organism or a part thereof; and
[72032] (b) growing the non-human organism or a part thereof under conditions which permit the production of succinate or a composition comprising succinate in said non-human organism or in the culture medium surrounding said non-human organism.

[72033] A further embodiment of the present invention relates to a process for the production of vitamin c and/or threonic acid, which comprises
[72034] (a) increasing or generating one or more activities selected from the group consisting of 49747384_SOYBEAN-protein in an organelle, preferably in plastids or mitochondria, especially in plastids, of a non-human organism or a part thereof, preferably a microorganism, a plant cell, a plant or a part thereof, as compared to a corresponding non-transformed wild type non-human organism or a part thereof; and
[72035] (b) growing the non-human organism or a part thereof under conditions which permit the production of vitamin c and/or threonic acid or a composition comprising vitamin c and/or threonic acid in said non-human organism or in the culture medium surrounding said non-human organism.

[72036] A further embodiment of the present invention relates to a process for the production of citramalate, which comprises
[72037] (a) increasing or generating one or more activities selected from the group consisting of pyruvate kinase in an organelle, preferably in plastids or mitochondria, especially in plastids, of a non-human organism or a part thereof, preferably a microorganism, a plant cell, a plant or a part thereof, as compared to a corresponding non-transformed wild type non-human organism or a part thereof; and
[72038] (b) growing the non-human organism or a part thereof under conditions which permit the production of citramalate or a composition comprising citramalate in said non-human organism or in the culture medium surrounding said non-human organism.

[72039] A further embodiment of the present invention relates to a process for the production of succinate, which comprises
[72040] (a) increasing or generating one or more activities selected from the group consisting of pyruvate kinase in an organelle, preferably in plastids or mitochondria, especially in plastids, of a non-human organism or a part thereof, preferably a microorganism, a plant cell, a plant or a part thereof, as compared to a corresponding non-transformed wild type non-human organism or a part thereof; and
[72041] (b) growing the non-human organism or a part thereof under conditions which permit the production of succinate or a composition comprising succinate in said non-human organism or in the culture medium surrounding said non-human organism.

[72042] A further embodiment of the present invention relates to a process for the production of citramalate, which comprises
[72043] (a) increasing or generating one or more activities selected from the group consisting of glucose-6-phosphate 1-dehydrogenase in an organelle, preferably in plastids or mitochondria, especially in plastids, of a non-human organism or a part thereof, preferably a microorganism organism, a plant cell, a plant or a part thereof, as compared to a corresponding non-transformed wild type non-human organism or a part thereof; and
[72044] (b) growing the non-human organism or a part thereof under conditions which permit the production of citramalate or a composition comprising citramalate in said non-human organism or in the culture medium surrounding said non-human organism.

[72045] A further embodiment of the present invention relates to a process for the production of citramalate, which comprises
[72046] (a1) increasing or generating the activity of a polypeptide comprising a polypeptide as depicted in the respective line in column 5 or 8 of Table II, application no. 15, or a homolog or fragment thereof, a consensus sequence or at least one polypeptide motif as depicted in column 8 of Table IV, application no. 15, whereby the respective line disclose in column 7 the fine chemical citramalate; or
[72047] increasing or generating the activity of an expression product of one or more nucleic acid molecule(s) comprising a polynucleotide as depicted in the respective line in column 5 or 8 of Table I, application no. 15, preferably the coding region thereof, or a homolog or a fragment thereof, whereby the respective line disclose in column 7 the fine chemical citramalate;
[72048] in an organelle, preferably in plastids or mitochondria, especially in plastids, in a non-human organism or a part thereof; preferably a microorganism, a plant cell, a plant or a part thereof, as compared to a corresponding non-transformed wild type non-human organism or a part thereof; or
[72049] (a2) increasing or generating the activity of a polypeptide comprising a polypeptide as depicted in the respective line in column 5 or 8 of Table II, application no. 15, or a homolog or a fragment thereof, a consensus sequence or at least one polypeptide motif as depicted in the respective line in column 8 of Table IV, application no. 15, which is joined to a transit peptide, whereby the respective line disclose in column 7 the fine chemical citramalate; or
[72050] increasing or generating the activity of an expression product of one or more nucleic acid molecule(s) comprising a polynucleotide as depicted in the respective line in column 5 or 8 of Table I, application no. 15, preferably the coding region thereof, or a homolog or a fragment thereof, which is joined to a nucleic acid sequence encoding an organelle localization sequence, preferably a plastid or a mitochondrion localization sequence, especially a plastid localization sequence, whereby the respective line disclose in column 7 the fine chemical citramalate;
[72051] in a non-human organism or a part thereof; preferably a microorganism, a plant cell, a plant or a part thereof, as compared to a corresponding non-transformed wild type non-human organism or a part thereof; or
[72052] (a3) increasing or generating the activity of a polypeptide comprising a polypeptide as depicted in the respective line in column 5 or 8 of Table II, application no. 15, or a homolog or a fragment thereof, a consensus sequence or at least one polypeptide motif as depicted in the respective line in column 8 of Table IV, application no. 15, whereby the respective line disclose in column 7 the fine chemical citramalate; or
[72053] increasing or generating the activity of an expression product of one or more nucleic acid molecule(s) comprising a polynucleotide as depicted in the respective line in column 5 or 8 of Table I, application no. 15, preferably the coding region thereof, or a homolog or a fragment thereof, whereby the respective line disclose in column 7 the fine chemical citramalate;
[72054] in an organelle, preferably in plastids or mitochondria, especially in plastids, in a non-human organism or a part thereof; preferably a microorganism, a plant cell, a plant or a part thereof, through transformation of the organelle, as compared to a corresponding non-transformed wild type non-human organism or a part thereof;
[72055] and
[72056] (b) growing the non-human organism under conditions which permit the production of citramalate, or a composition comprising citramalate in said non-human organism or in the culture medium surrounding said non-human organism.

[72057] A further embodiment of the present invention relates to a process for the production of citrate, which comprises
[72058] (a1) increasing or generating the activity of a polypeptide comprising a polypeptide as depicted in the respective line in column 5 or 8 of Table II, application no. 15, or a homolog or fragment thereof, a consensus sequence or at least one polypeptide motif as depicted in column 8 of Table IV, application no. 15, whereby the respective line disclose in column 7 the fine chemical citrate; or
[72059] increasing or generating the activity of an expression product of one or more nucleic acid molecule(s) comprising a polynucleotide as depicted in the respective line in column 5 or 8 of Table I, application no. 15, preferably the coding region thereof, or a homolog or a fragment thereof, whereby the respective line disclose in column 7 the fine chemical citrate;
[72060] in an organelle, preferably in plastids or mitochondria, especially in plastids, in a non-human organism or a part thereof; preferably a microorganism, a plant cell, a plant or a part thereof, as compared to a corresponding non-transformed wild type non-human organism or a part thereof; or
[72061] (a2) increasing or generating the activity of a polypeptide comprising a polypeptide as depicted in the respective line in column 5 or 8 of Table II, application no. 15, or a homolog or a fragment thereof, a consensus sequence or at least one polypeptide motif as depicted in the respective line in column 8 of Table IV, application no. 15, which is joined to a transit peptide, whereby the respective line disclose in column 7 the fine chemical citrate; or
[72062] increasing or generating the activity of an expression product of one or more nucleic acid molecule(s) comprising a polynucleotide as depicted in the respective line in column 5 or 8 of Table I, application no. 15, preferably the coding region thereof, or a homolog or a fragment thereof, which is joined to a nucleic acid sequence encoding an organelle localization sequence, preferably a plastid or a mitochondrion localization sequence, especially a plastid localization sequence, whereby the respective line disclose in column 7 the fine chemical citrate;
[72063] in a non-human organism or a part thereof; preferably a microorganism, a plant cell, a plant or a part thereof, as compared to a corresponding non-transformed wild type non-human organism or a part thereof; or
[72064] (a3) increasing or generating the activity of a polypeptide comprising a polypeptide as depicted in the respective line in column 5 or 8 of Table II, application no. 15, or a homolog or a fragment thereof, a consensus sequence or at least one polypeptide motif as depicted in the respective line in column 8 of Table IV, application no. 15, whereby the respective line disclose in column 7 the fine chemical citrate; or
[72065] increasing or generating the activity of an expression product of one or more nucleic acid molecule(s) comprising a polynucleotide as depicted in the respective line in column 5 or 8 of Table I, application no. 15, preferably the coding region thereof, or a homolog or a fragment thereof, whereby the respective line disclose in column 7 the fine chemical citrate;
[72066] in an organelle, preferably in plastids or mitochondria, especially in plastids, in a non-human organism or a part thereof; preferably a microorganism, a plant cell, a plant or a part thereof, through transformation of the organelle, as compared to a corresponding non-transformed wild type non-human organism or a part thereof;
[72067] and
[72068] (b) growing the non-human organism under conditions which permit the production of citrate, or a composition comprising citrate in said non-human organism or in the culture medium surrounding said non-human organism.

[72069] A further embodiment of the present invention relates to a process for the production of fumarate, which comprises
[72070] (a1) increasing or generating the activity of a polypeptide comprising a polypeptide as depicted in the respective line in column 5 or 8 of Table II, application no. 15, or a homolog or fragment thereof, a consensus sequence or at least one polypeptide motif as depicted in column 8 of Table IV, application no. 15, whereby the respective line disclose in column 7 the fine chemical fumarate; or
[72071] increasing or generating the activity of an expression product of one or more nucleic acid molecule(s) comprising a polynucleotide as depicted in the respective line in column 5 or 8 of Table I, application no. 15, preferably the coding region thereof, or a homolog or a fragment thereof, whereby the respective line disclose in column 7 the fine chemical fumarate;
[72072] in an organelle, preferably in plastids or mitochondria, especially in plastids, in a non-human organism or a part thereof; preferably a microorganism, a plant cell, a plant or a part thereof, as compared to a corresponding non-transformed wild type non-human organism or a part thereof; or
[72073] (a2) increasing or generating the activity of a polypeptide comprising a polypeptide as depicted in the respective line in column 5 or 8 of Table II, application no. 15, or a homolog or a fragment thereof, a consensus sequence or at least one polypeptide motif as depicted in the respective line in column 8 of Table IV, application no. 15, which is joined to a transit peptide, whereby the respective line disclose in column 7 the fine chemical fumarate; or
[72074] increasing or generating the activity of an expression product of one or more nucleic acid molecule(s) comprising a polynucleotide as depicted in the respective line in column 5 or 8 of Table I, application no. 15, preferably the coding region thereof, or a homolog or a fragment thereof, which is joined to a nucleic acid sequence encoding an organelle localization sequence, preferably a plastid or a mitochondrion localization sequence, especially a plastid localization sequence, whereby the respective line disclose in column 7 the fine chemical fumarate;
[72075] in a non-human organism or a part thereof; preferably a microorganism, a plant cell, a plant or a part thereof, as compared to a corresponding non-transformed wild type non-human organism or a part thereof; or
[72076] (a3) increasing or generating the activity of a polypeptide comprising a polypeptide as depicted in the respective line in column 5 or 8 of Table II, application no. 15, or a homolog or a fragment thereof, a consensus sequence or at least one polypeptide motif as depicted in the respective line in column 8 of Table IV, application no. 15, whereby the respective line disclose in column 7 the fine chemical fumarate; or
[72077] increasing or generating the activity of an expression product of one or more nucleic acid molecule(s) comprising a polynucleotide as depicted in the respective line in column 5 or 8 of Table I, application no. 15, preferably the coding region thereof, or a homolog or a fragment thereof, whereby the respective line disclose in column 7 the fine chemical fumarate;
[72078] in an organelle, preferably in plastids or mitochondria, especially in plastids, in a non-human organism or a part thereof; preferably a microorganism, a plant cell, a plant or a part thereof, through transformation of the organelle, as compared to a corresponding non-transformed wild type non-human organism or a part thereof;
[72079] and
[72080] (b) growing the non-human organism under conditions which permit the production of fumarate, or a composition comprising fumarate in said non-human organism or in the culture medium surrounding said non-human organism.

[72081] A further embodiment of the present invention relates to a process for the production of glycerate, which comprises
[72082] (a1) increasing or generating the activity of a polypeptide comprising a polypeptide as depicted in the respective line in column 5 or 8 of Table II, application no. 15, or a homolog or fragment thereof, a consensus sequence or at least one polypeptide motif as depicted in column 8 of Table IV, application no. 15, whereby the respective line disclose in column 7 the fine chemical glycerate; or
[72083] increasing or generating the activity of an expression product of one or more nucleic acid molecule(s) comprising a polynucleotide as depicted in the respective line in column 5 or 8 of Table I, application no. 15, preferably the coding region thereof, or a homolog or a fragment thereof, whereby the respective line disclose in column 7 the fine chemical glycerate;
[72084] in an organelle, preferably in plastids or mitochondria, especially in plastids, in a non-human organism or a part thereof; preferably a microorganism, a plant cell, a plant or a part thereof, as compared to a corresponding non-transformed wild type non-human organism or a part thereof; or
[72085] (a2) increasing or generating the activity of a polypeptide comprising a polypeptide as depicted in the respective line in column 5 or 8 of Table II, application no. 15, or a homolog or a fragment thereof, a consensus sequence or at least one polypeptide motif as depicted in the respective line in column 8 of Table IV, application no. 15, which is joined to a transit peptide, whereby the respective line disclose in column 7 the fine chemical glycerate; or
[72086] increasing or generating the activity of an expression product of one or more nucleic acid molecule(s) comprising a polynucleotide as depicted in the respective line in column 5 or 8 of Table I, application no. 15, preferably the coding region thereof, or a homolog or a fragment thereof, which is joined to a nucleic acid sequence encoding an organelle localization sequence, preferably a plastid or a mitochondrion localization sequence, especially a plastid localization sequence, whereby the respective line disclose in column 7 the fine chemical glycerate;
[72087] in a non-human organism or a part thereof; preferably a microorganism, a plant cell, a plant or a part thereof, as compared to a corresponding non-transformed wild type non-human organism or a part thereof; or
[72088] (a3) increasing or generating the activity of a polypeptide comprising a polypeptide as depicted in the respective line in column 5 or 8 of Table II, application no. 15, or a homolog or a fragment thereof, a consensus sequence or at least one polypeptide motif as depicted in the respective line in column 8 of Table IV, application no. 15, whereby the respective line disclose in column 7 the fine chemical glycerate; or
[72089] increasing or generating the activity of an expression product of one or more nucleic acid molecule(s) comprising a polynucleotide as depicted in the respective line in column 5 or 8 of Table I, application no. 15, preferably the coding region thereof, or a homolog or a fragment thereof, whereby the respective line disclose in column 7 the fine chemical glycerate;
[72090] in an organelle, preferably in plastids or mitochondria, especially in plastids, in a non-human organism or a part thereof; preferably a microorganism, a plant cell, a plant or a part thereof, through transformation of the organelle, as compared to a corresponding non-transformed wild type non-human organism or a part thereof;
[72091] and
[72092] (b) growing the non-human organism under conditions which permit the production of glycerate, or a composition comprising glycerate in said non-human organism or in the culture medium surrounding said non-human organism.

[72093] A further embodiment of the present invention relates to a process for the production of malate, which comprises
[72094] (a1) increasing or generating the activity of a polypeptide comprising a polypeptide as depicted in the respective line in column 5 or 8 of Table II, application no. 15, or a homolog or fragment thereof, a consensus sequence or at least one polypeptide motif as depicted in column 8 of Table IV, application no. 15, whereby the respective line disclose in column 7 the fine chemical malate; or
[72095] increasing or generating the activity of an expression product of one or more nucleic acid molecule(s) comprising a polynucleotide as depicted in the respective line in column 5 or 8 of Table I, application no. 15, preferably the coding region thereof, or a homolog or a fragment thereof, whereby the respective line disclose in column 7 the fine chemical malate;
[72096] in an organelle, preferably in plastids or mitochondria, especially in plastids, in a non-human organism or a part thereof; preferably a microorganism, a plant cell, a plant or a part thereof, as compared to a corresponding non-transformed wild type non-human organism or a part thereof; or
[72097] (a2) increasing or generating the activity of a polypeptide comprising a polypeptide as depicted in the respective line in column 5 or 8 of Table II, application no. 15, or a homolog or a fragment thereof, a consensus sequence or at least one polypeptide motif as depicted in the respective line in column 8 of Table IV, application no. 15, which is joined to a transit peptide, whereby the respective line disclose in column 7 the fine chemical malate; or
[72098] increasing or generating the activity of an expression product of one or more nucleic acid molecule(s) comprising a polynucleotide as depicted in the respective line in column 5 or 8 of Table I, application no. 15, preferably the coding region thereof, or a homolog or a fragment thereof, which is joined to a nucleic acid sequence encoding an organelle localization sequence, preferably a plastid or a mitochondrion localization sequence, especially a plastid localization sequence, whereby the respective line disclose in column 7 the fine chemical malate;
[72099] in a non-human organism or a part thereof; preferably a microorganism, a plant cell, a plant or a part thereof, as compared to a corresponding non-transformed wild type non-human organism or a part thereof; or
[72100] (a3) increasing or generating the activity of a polypeptide comprising a polypeptide as depicted in the respective line in column 5 or 8 of Table II, application no. 15, or a homolog or a fragment thereof, a consensus sequence or at least one polypeptide motif as depicted in the respective line in column 8 of Table IV, application no. 15, whereby the respective line disclose in column 7 the fine chemical malate; or
[72101] increasing or generating the activity of an expression product of one or more nucleic acid molecule(s) comprising a polynucleotide as depicted in the respective line in column 5 or 8 of Table I, application no. 15, preferably the coding region thereof, or a homolog or a fragment thereof, whereby the respective line disclose in column 7 the fine chemical malate;
[72102] in an organelle, preferably in plastids or mitochondria, especially in plastids, in a non-human organism or a part thereof; preferably a microorganism, a plant cell, a plant or a part thereof, through transformation of the organelle, as compared to a corresponding non-transformed wild type non-human organism or a part thereof;
[72103] and
[72104] (b) growing the non-human organism under conditions which permit the production of malate, or a composition comprising malate in said non-human organism or in the culture medium surrounding said non-human organism.

[72105] A further embodiment of the present invention relates to a process for the production of oxalate, which comprises
[72106] (a1) increasing or generating the activity of a polypeptide comprising a polypeptide as depicted in the respective line in column 5 or 8 of Table II, application no. 15, or a homolog or fragment thereof, a consensus sequence or at least one polypeptide motif as depicted in column 8 of Table IV, application no. 15, whereby the respective line disclose in column 7 the fine chemical oxalate; or
[72107] increasing or generating the activity of an expression product of one or more nucleic acid molecule(s) comprising a polynucleotide as depicted in the respective line in column 5 or 8 of Table I, application no. 15, preferably the coding region thereof, or a homolog or a fragment thereof, whereby the respective line disclose in column 7 the fine chemical oxalate;
[72108] in an organelle, preferably in plastids or mitochondria, especially in plastids, in a non-human organism or a part thereof; preferably a microorganism, a plant cell, a plant or a part thereof, as compared to a corresponding non-transformed wild type non-human organism or a part thereof; or
[72109] (a2) increasing or generating the activity of a polypeptide comprising a polypeptide as depicted in the respective line in column 5 or 8 of Table II, application no. 15, or a homolog or a fragment thereof, a consensus sequence or at least one polypeptide motif as depicted in the respective line in column 8 of Table IV, application no. 15, which is joined to a transit peptide, whereby the respective line disclose in column 7 the fine chemical oxalate; or
[72110] increasing or generating the activity of an expression product of one or more nucleic acid molecule(s) comprising a polynucleotide as depicted in the respective line in column 5 or 8 of Table I, application no. 15, preferably the coding region thereof, or a homolog or a fragment thereof, which is joined to a nucleic acid sequence encoding an organelle localization sequence, preferably a plastid or a mitochondrion localization sequence, especially a plastid localization sequence, whereby the respective line disclose in column 7 the fine chemical oxalate;
[72111] in a non-human organism or a part thereof; preferably a microorganism, a plant cell, a plant or a part thereof, as compared to a corresponding non-transformed wild type non-human organism or a part thereof; or
[72112] (a3) increasing or generating the activity of a polypeptide comprising a polypeptide as depicted in the respective line in column 5 or 8 of Table II, application no. 15, or a homolog or a fragment thereof, a consensus sequence or at least one polypeptide motif as depicted in the respective line in column 8 of Table IV, application no. 15, whereby the respective line disclose in column 7 the fine chemical oxalate; or increasing or generating the activity of an expression product of one or more nucleic acid molecule(s) comprising a polynucleotide as depicted in the respective line in column 5 or 8 of Table I, application no. 15, preferably the coding region thereof, or a homolog or a fragment thereof, whereby the respective line disclose in column 7 the fine chemical oxalate;
[72113] in an organelle, preferably in plastids or mitochondria, especially in plastids, in a non-human organism or a part thereof; preferably a microorganism, a plant cell, a plant or a part thereof, through transformation of the organelle, as compared to a corresponding non-transformed wild type non-human organism or a part thereof;
[72114] and
[72115] (b) growing the non-human organism under conditions which permit the production of oxalate, or a composition comprising oxalate in said non-human organism or in the culture medium surrounding said non-human organism.

[72116] A further embodiment of the present invention relates to a process for the production of pyruvate, which comprises
[72117] (a1) increasing or generating the activity of a polypeptide comprising a polypeptide as depicted in the respective line in column 5 or 8 of Table II, application no. 15, or a homolog or fragment thereof, a consensus sequence or at least one polypeptide motif as depicted in column 8 of Table IV, application no. 15, whereby the respective line disclose in column 7 the fine chemical pyruvate; or
[72118] increasing or generating the activity of an expression product of one or more nucleic acid molecule(s) comprising a polynucleotide as depicted in the respective line in column 5 or 8 of Table I, application no. 15, preferably the coding region thereof, or a homolog or a fragment thereof, whereby the respective line disclose in column 7 the fine chemical pyruvate;
[72119] in an organelle, preferably in plastids or mitochondria, especially in plastids, in a non-human organism or a part thereof; preferably a microorganism, a plant cell, a plant or a part thereof, as compared to a corresponding non-transformed wild type non-human organism or a part thereof; or
[72120] (a2) increasing or generating the activity of a polypeptide comprising a polypeptide as depicted in the respective line in column 5 or 8 of Table II, application no. 15, or a homolog or a fragment thereof, a consensus sequence or at least one polypeptide motif as depicted in the respective line in column 8 of Table IV, application no. 15, which is joined to a transit peptide, whereby the respective line disclose in column 7 the fine chemical pyruvate; or
[72121] increasing or generating the activity of an expression product of one or more nucleic acid molecule(s) comprising a polynucleotide as depicted in the respective line in column 5 or 8 of Table I, application no. 15, preferably the coding region thereof, or a homolog or a fragment thereof, which is joined to a nucleic acid sequence encoding an organelle localization sequence, preferably a plastid or a mitochondrion localization sequence, especially a plastid localization sequence, whereby the respective line disclose in column 7 the fine chemical pyruvate;
[72122] in a non-human organism or a part thereof; preferably a microorganism, a plant cell, a plant or a part thereof, as compared to a corresponding non-transformed wild type non-human organism or a part thereof; or
[72123] (a3) increasing or generating the activity of a polypeptide comprising a polypeptide as depicted in the respective line in column 5 or 8 of Table II, application no. 15, or a homolog or a fragment thereof, a consensus sequence or at least one polypeptide motif as depicted in the respective line in column 8 of Table IV, application no. 15, whereby the respective line disclose in column 7 the fine chemical pyruvate; or
[72124] increasing or generating the activity of an expression product of one or more nucleic acid molecule(s) comprising a polynucleotide as depicted in the respective line in column 5 or 8 of Table I, application no. 15, preferably the coding region thereof, or a homolog or a fragment thereof, whereby the respective line disclose in column 7 the fine chemical pyruvate;
[72125] in an organelle, preferably in plastids or mitochondria, especially in plastids, in a non-human organism or a part thereof; preferably a microorganism, a plant cell, a plant or a part thereof, through transformation of the organelle, as compared to a corresponding non-transformed wild type non-human organism or a part thereof;
[72126] and
[72127] (b) growing the non-human organism under conditions which permit the production of pyruvate, or a composition comprising pyruvate in said non-human organism or in the culture medium surrounding said non-human organism.

[72128] A further embodiment of the present invention relates to a process for the production of succinate, which comprises
[72129] (a1) increasing or generating the activity of a polypeptide comprising a polypeptide as depicted in the respective line in column 5 or 8 of Table II, application no. 15, or a homolog or fragment thereof, a consensus sequence or at least one polypeptide motif as depicted in column 8 of Table IV, application no. 15, whereby the respective line disclose in column 7 the fine chemical succinate; or
[72130] increasing or generating the activity of an expression product of one or more nucleic acid molecule(s) comprising a polynucleotide as depicted in the respective line in column 5 or 8 of Table I, application no. 15, preferably the coding region thereof, or a homolog or a fragment thereof, whereby the respective line disclose in column 7 the fine chemical succinate;
[72131] in an organelle, preferably in plastids or mitochondria, especially in plastids, in a non-human organism or a part thereof; preferably a microorganism, a plant cell, a plant or a part thereof, as compared to a corresponding non-transformed wild type non-human organism or a part thereof; or
[72132] (a2) increasing or generating the activity of a polypeptide comprising a polypeptide as depicted in the respective line in column 5 or 8 of Table II, application no. 15, or a homolog or a fragment thereof, a consensus sequence or at least one polypeptide motif as depicted in the respective line in column 8 of Table IV, application no. 15, which is joined to a transit peptide, whereby the respective line disclose in column 7 the fine chemical succinate; or
[72133] increasing or generating the activity of an expression product of one or more nucleic acid molecule(s) comprising a polynucleotide as depicted in the respective line in column 5 or 8 of Table I, application no. 15, preferably the coding region thereof, or a homolog or a fragment thereof, which is joined to a nucleic acid sequence encoding an organelle localization sequence, preferably a plastid or a mitochondrion localization sequence, especially a plastid localization sequence, whereby the respective line disclose in column 7 the fine chemical succinate;
[72134] in a non-human organism or a part thereof; preferably a microorganism, a plant cell, a plant or a part thereof, as compared to a corresponding non-transformed wild type non-human organism or a part thereof; or
[72135] (a3) increasing or generating the activity of a polypeptide comprising a polypeptide as depicted in the respective line in column 5 or 8 of Table II, application no. 15, or a homolog or a fragment thereof, a consensus sequence or at least one polypeptide motif as depicted in the respective line in column 8 of Table IV, application no. 15, whereby the respective line disclose in column 7 the fine chemical succinate; or
[72136] increasing or generating the activity of an expression product of one or more nucleic acid molecule(s) comprising a polynucleotide as depicted in the respective line in column 5 or 8 of Table I, application no. 15, preferably the coding region thereof, or a homolog or a fragment thereof, whereby the respective line disclose in column 7 the fine chemical succinate;
[72137] in an organelle, preferably in plastids or mitochondria, especially in plastids, in a non-human organism or a part thereof; preferably a microorganism, a plant cell, a plant or a part thereof, through transformation of the organelle, as compared to a corresponding non-transformed wild type non-human organism or a part thereof;
[72138] and
[72139] (b) growing the non-human organism under conditions which permit the production of succinate, or a composition comprising succinate in said non-human organism or in the culture medium surrounding said non-human organism.

[72140] A further embodiment of the present invention relates to a process for the production of vitamin c and/or threonic acid, which comprises
[72141] (a1) increasing or generating the activity of a polypeptide comprising a polypeptide as depicted in the respective line in column 5 or 8 of Table II, application no. 15, or a homolog or fragment thereof, a consensus sequence or at least one polypeptide motif as depicted in column 8 of Table IV, application no. 15, whereby the respective line disclose in column 7 the fine chemical vitamin c and/or threonic acid; or
[72142] increasing or generating the activity of an expression product of one or more nucleic acid molecule(s) comprising a polynucleotide as depicted in the respective line in column 5 or 8 of Table I, application no. 15, preferably the coding region thereof, or a homolog or a fragment thereof, whereby the respective line disclose in column 7 the fine chemical vitamin c and/or threonic acid;
[72143] in an organelle, preferably in plastids or mitochondria, especially in plastids, in a non-human organism or a part thereof; preferably a microorganism, a plant cell, a plant or a part thereof, as compared to a corresponding non-transformed wild type non-human organism or a part thereof; or
[72144] (a2) increasing or generating the activity of a polypeptide comprising a polypeptide as depicted in the respective line in column 5 or 8 of Table II, application no. 15, or a homolog or a fragment thereof, a consensus sequence or at least one polypeptide motif as depicted in the respective line in column 8 of Table IV, application no. 15, which is joined to a transit peptide, whereby the respective line disclose in column 7 the fine chemical vitamin c and/or threonic acid; or
[72145] increasing or generating the activity of an expression product of one or more nucleic acid molecule(s) comprising a polynucleotide as depicted in the respective line in column 5 or 8 of Table I, application no. 15, preferably the coding region thereof, or a homolog or a fragment thereof, which is joined to a nucleic acid sequence encoding an organelle localization sequence, preferably a plastid or a mitochondrion localization sequence, especially a plastid localization sequence, whereby the respective line disclose in column 7 the fine chemical vitamin c and/or threonic acid;
[72146] in a non-human organism or a part thereof; preferably a microorganism, a plant cell, a plant or a part thereof, as compared to a corresponding non-transformed wild type non-human organism or a part thereof; or
[72147] (a3) increasing or generating the activity of a polypeptide comprising a polypeptide as depicted in the respective line in column 5 or 8 of Table II, application no. 15, or a homolog or a fragment thereof, a consensus sequence or at least one polypeptide motif as depicted in the respective line in column 8 of Table IV, application no. 15, whereby the respective line disclose in column 7 the fine chemical vitamin c and/or threonic acid; or
[72148] increasing or generating the activity of an expression product of one or more nucleic acid molecule(s) comprising a polynucleotide as depicted in the respective line in column 5 or 8 of Table I, application no. 15, preferably the coding region thereof, or a homolog or a fragment thereof, whereby the respective line disclose in column 7 the fine chemical vitamin c and/or threonic acid;
[72149] in an organelle, preferably in plastids or mitochondria, especially in plastids, in a non-human organism or a part thereof; preferably a microorganism, a plant cell, a plant or a part thereof, through transformation of the organelle, as compared to a corresponding non-transformed wild type non-human organism or a part thereof;
[72150] and
[72151] (b) growing the non-human organism under conditions which permit the production of vitamin c and/or threonic acid, or a composition comprising vitamin c and/or threonic acid in said non-human organism or in the culture medium surrounding said non-human organism.

[72152] Accordingly, the present invention relates to a process for the production of succinate, which comprises
[72153] (a) increasing or generating the activity of a protein phosphatase in the cytosol of a cell of a non-human organism or a part thereof, preferably a microorganism, a plant cell, a plant or a part thereof, as compared to a corresponding non-transformed wild type non-human organism or a part thereof; and
[72154] (b) growing the non-human organism or a part thereof under conditions which permit the production of succinate or a composition comprising succinate in said non-human organism or in the culture medium surrounding said non-human organism.

[72155] Accordingly, the present invention relates to a process for the production of malate, which comprises
[72156] (a) increasing or generating the activity of a At1g13930-protein in the cytosol of a cell of a non-human organism or a part thereof, preferably a microorganism, a plant cell, a plant or a part thereof, as compared to a corresponding non-transformed wild type non-human organism or a part thereof; and
[72157] (b) growing the non-human organism or a part thereof under conditions which permit the production of malate or a composition comprising malate in said non-human organism or in the culture medium surrounding said non-human organism.

[72158] Accordingly, the present invention relates to a process for the production of succinate, which comprises
[72159] (a) increasing or generating the activity of a At1g13930-protein in the cytosol of a cell of a non-human organism or a part thereof, preferably a microorganism, a plant cell, a plant or a part thereof, as compared to a corresponding non-transformed wild type non-human organism or a part thereof; and
[72160] (b) growing the non-human organism or a part thereof under conditions which permit the production of succinate or a composition comprising succinate in said non-human organism or in the culture medium surrounding said non-human organism.

[72161] Accordingly, the present invention relates to a process for the production of malate, which comprises
[72162] (a) increasing or generating the activity of a eukaryotic translation initiation factor 5 in the cytosol of a cell of a non-human organism or a part thereof, preferably a microorganism, a plant cell, a plant or a part thereof, as compared to a corresponding non-transformed wild type non-human organism or a part thereof; and
[72163] (b) growing the non-human organism or a part thereof under conditions which permit the production of malate or a composition comprising malate in said non-human organism or in the culture medium surrounding said non-human organism.

[72164] Accordingly, the present invention relates to a process for the production of vitamin c and/or threonic acid, which comprises
[72165] (a) increasing or generating the activity of a eukaryotic translation initiation factor 5 in the cytosol of a cell of a non-human organism or a part thereof, preferably a microorganism, a plant cell, a plant or a part thereof, as compared to a corresponding non-transformed wild type non-human organism or a part thereof; and
[72166] (b) growing the non-human organism or a part thereof under conditions which permit the production of vitamin c and/or threonic acid or a composition comprising vitamin c and/or threonic acid in said non-human organism or in the culture medium surrounding said non-human organism.

[72167] Accordingly, the present invention relates to a process for the production of fumarate, which comprises
[72168] (a) increasing or generating the activity of a transcriptional regulator in the cytosol of a cell of a non-human organism or a part thereof, preferably a microorganism, a plant cell, a plant or a part thereof, as compared to a corresponding non-transformed wild type non-human organism or a part thereof; and
[72169] (b) growing the non-human organism or a part thereof under conditions which permit the production of fumarate or a composition comprising fumarate in said non-human organism or in the culture medium surrounding said non-human organism.

[72170] Accordingly, the present invention relates to a process for the production of fumarate, which comprises
[72171] (a) increasing or generating the activity of a protein phosphatase in the cytosol of a cell of a non-human organism or a part thereof, preferably a microorganism, a plant cell, a plant or a part thereof, as compared to a corresponding non-transformed wild type non-human organism or a part thereof; and
[72172] (b) growing the non-human organism or a part thereof under conditions which permit the production of fumarate or a composition comprising fumarate in said non-human organism or in the culture medium surrounding said non-human organism.

[72173] Accordingly, the present invention relates to a process for the production of vitamin c and/or threonic acid, which comprises
[72174] (a) increasing or generating the activity of a protein phosphatase in the cytosol of a cell of a non-human organism or a part thereof, preferably a microorganism, a plant cell, a plant or a part thereof, as compared to a corresponding non-transformed wild type non-human organism or a part thereof; and
[72175] (b) growing the non-human organism or a part thereof under conditions which permit the production of vitamin c and/or threonic acid or a composition comprising vitamin c and/or threonic acid in said non-human organism or in the culture medium surrounding said non-human organism.

[72176] Accordingly, the present invention relates to a process for the production of fumarate, which comprises
[72177] (a) increasing or generating the activity of a CBL-interacting protein kinase in the cytosol of a cell of a non-human organism or a part thereof, preferably a microorganism, a plant cell, a plant or a part thereof, as compared to a corresponding non-transformed wild type non-human organism or a part thereof; and
[72178] (b) growing the non-human organism or a part thereof under conditions which permit the production of fumarate or a composition comprising fumarate in said non-human organism or in the culture medium surrounding said non-human organism.

[72179] Accordingly, the present invention relates to a process for the production of malate, which comprises
[72180] (a) increasing or generating the activity of a CBL-interacting protein kinase in the cytosol of a cell of a non-human organism or a part thereof, preferably a microorganism, a plant cell, a plant or a part thereof, as compared to a corresponding non-transformed wild type non-human organism or a part thereof; and
[72181] (b) growing the non-human organism or a part thereof under conditions which permit the production of malate or a composition comprising malate in said non-human organism or in the culture medium surrounding said non-human organism.

[72182] Accordingly, the present invention relates to a process for the production of succinate, which comprises
[72183] (a) increasing or generating the activity of a CBL-interacting protein kinase in the cytosol of a cell of a non-human organism or a part thereof, preferably a microorganism, a plant cell, a plant or a part thereof, as compared to a corresponding non-transformed wild type non-human organism or a part thereof; and
[72184] (b) growing the non-human organism or a part thereof under conditions which permit the production of succinate or a composition comprising succinate in said non-human organism or in the culture medium surrounding said non-human organism.

[72185] Accordingly, the present invention relates to a process for the production of fumarate, which comprises
[72186] (a) increasing or generating the activity of a phenylalanine ammonia-lyase in the cytosol of a cell of a non-human organism or a part thereof, preferably a microorganism, a plant cell, a plant or a part thereof, as compared to a corresponding non-transformed wild type non-human organism or a part thereof; and
[72187] (b) growing the non-human organism or a part thereof under conditions which permit the production of fumarate or a composition comprising fumarate in said non-human organism or in the culture medium surrounding said non-human organism.

[72188] Accordingly, the present invention relates to a process for the production of succinate, which comprises
[72189] (a) increasing or generating the activity of a thioredoxin reductase in the cytosol of a cell of a non-human organism or a part thereof, preferably a microorganism, a plant cell, a plant or a part thereof, as compared to a corresponding non-transformed wild type non-human organism or a part thereof; and
[72190] (b) growing the non-human organism or a part thereof under conditions which permit the production of succinate or a composition comprising succinate in said non-human organism or in the culture medium surrounding said non-human organism.

[72191] Accordingly, the present invention relates to a process for the production of succinate, which comprises
[72192] (a) increasing or generating the activity of a citrate synthase in the cytosol of a cell of a non-human organism or a part thereof, preferably a microorganism, a plant cell, a plant or a part thereof, as compared to a corresponding non-transformed wild type non-human organism or a part thereof; and
[72193] (b) growing the non-human organism or a part thereof under conditions which permit the production of succinate or a composition comprising succinate in said non-human organism or in the culture medium surrounding said non-human organism.

[72194] Accordingly, the present invention relates to a process for the production of citramalate, which comprises
[72195] (a) increasing or generating the activity of a pyruvate kinase in the cytosol of a cell of a non-human organism or a part thereof, preferably a microorganism, a plant cell, a plant or a part thereof, as compared to a corresponding non-transformed wild type non-human organism or a part thereof; and
[72196] (b) growing the non-human organism or a part thereof under conditions which permit the production of citramalate or a composition comprising citramalate in said non-human organism or in the culture medium surrounding said non-human organism.

[72197] Accordingly, the present invention relates to a process for the production of succinate, which comprises
[72198] (a) increasing or generating the activity of a pyruvate kinase in the cytosol of a cell of a non-human organism or a part thereof, preferably a microorganism, a plant cell, a plant or a part thereof, as compared to a corresponding non-transformed wild type non-human organism or a part thereof; and
[72199] (b) growing the non-human organism or a part thereof under conditions which permit the production of succinate or a composition comprising succinate in said non-human organism or in the culture medium surrounding said non-human organism.

[72200] Accordingly, the present invention relates to a process for the production of malate, which comprises
[72201] (a) increasing or generating the activity of a protein phosphatase in the cytosol of a cell of a non-human organism or a part thereof, preferably a microorganism, a plant cell, a plant or a part thereof, as compared to a corresponding non-transformed wild type non-human organism or a part thereof; and
[72202] (b) growing the non-human organism or a part thereof under conditions which permit the production of malate or a composition comprising malate in said non-human organism or in the culture medium surrounding said non-human organism.

[72203] Accordingly, the present invention relates to a process for the production of succinate, which comprises
[72204] (a) increasing or generating the activity of a protein phosphatase in the cytosol of a cell of a non-human organism or a part thereof, preferably a microorganism, a plant cell, a plant or a part thereof, as compared to a corresponding non-transformed wild type non-human organism or a part thereof; and
[72205] (b) growing the non-human organism or a part thereof under conditions which permit the production of succinate or a composition comprising succinate in said non-human organism or in the culture medium surrounding said non-human organism.

[72206] Accordingly, the present invention relates to a process for the production of fumarate, which comprises
[72207] (a) increasing or generating the activity of a thioredoxin family protein in the cytosol of a cell of a non-human organism or a part thereof, preferably a microorganism, a plant cell, a plant or a part thereof, as compared to a corresponding non-transformed wild type non-human organism or a part thereof; and
[72208] (b) growing the non-human organism or a part thereof under conditions which permit the production of fumarate or a composition comprising fumarate in said non-human organism or in the culture medium surrounding said non-human organism.

[72209] Accordingly, the present invention relates to a process for the production of malate, which comprises
[72210] (a) increasing or generating the activity of a thioredoxin family protein in the cytosol of a cell of a non-human organism or a part thereof, preferably a microorganism, a plant cell, a plant or a part thereof, as compared to a corresponding non-transformed wild type non-human organism or a part thereof; and
[72211] (b) growing the non-human organism or a part thereof under conditions which permit the production of malate or a composition comprising malate in said non-human organism or in the culture medium surrounding said non-human organism.

[72212] Accordingly, the present invention relates to a process for the production of glycerate, which comprises
[72213] (a) increasing or generating the activity of a thioredoxin in the cytosol of a cell of a non-human organism or a part thereof, preferably a microorganism, a plant cell, a plant or a part thereof, as compared to a corresponding non-transformed wild type non-human organism or a part thereof; and
[72214] (b) growing the non-human organism or a part thereof under conditions which permit the production of glycerate or a composition comprising glycerate in said non-human organism or in the culture medium surrounding said non-human organism.

[72215] Accordingly, the present invention relates to a process for the production of fumarate, which comprises
[72216] (a) increasing or generating the activity of a auxin response factor in the cytosol of a cell of a non-human organism or a part thereof, preferably a microorganism, a plant cell, a plant or a part thereof, as compared to a corresponding non-transformed wild type non-human organism or a part thereof; and
[72217] (b) growing the non-human organism or a part thereof under conditions which permit the production of fumarate or a composition comprising fumarate in said non-human organism or in the culture medium surrounding said non-human organism.

[72218] Accordingly, the present invention relates to a process for the production of malate, which comprises
[72219] (a) increasing or generating the activity of a auxin response factor in the cytosol of a cell of a non-human organism or a part thereof, preferably a microorganism, a plant cell, a plant or a part thereof, as compared to a corresponding non-transformed wild type non-human organism or a part thereof; and
[72220] (b) growing the non-human organism or a part thereof under conditions which permit the production of malate or a composition comprising malate in said non-human organism or in the culture medium surrounding said non-human organism.

[72221] Accordingly, the present invention relates to a process for the production of citramalate, which comprises
[72222] (a) increasing or generating the activity of a monthiol glutaredoxin in the cytosol of a cell of a non-human organism or a part thereof, preferably a microorganism, a plant cell, a plant or a part thereof, as compared to a corresponding non-transformed wild type non-human organism or a part thereof; and
[72223] (b) growing the non-human organism or a part thereof under conditions which permit the production of citramalate or a composition comprising citramalate in said non-human organism or in the culture medium surrounding said non-human organism.

[72224] Accordingly, the present invention relates to a process for the production of fumarate, which comprises
[72225] (a) increasing or generating the activity of a monthiol glutaredoxin in the cytosol of a cell of a non-human organism or a part thereof, preferably a microorganism, a plant cell, a plant or a part thereof, as compared to a corresponding non-transformed wild type non-human organism or a part thereof; and
[72226] (b) growing the non-human organism or a part thereof under conditions which permit the production of fumarate or a composition comprising fumarate in said non-human organism or in the culture medium surrounding said non-human organism.

[72227] Accordingly, the present invention relates to a process for the production of glycerate, which comprises
[72228] (a) increasing or generating the activity of a monthiol glutaredoxin in the cytosol of a cell of a non-human organism or a part thereof, preferably a microorganism, a plant cell, a plant or a part thereof, as compared to a corresponding non-transformed wild type non-human organism or a part thereof; and
[72229] (b) growing the non-human organism or a part thereof under conditions which permit the production of glycerate or a composition comprising glycerate in said non-human organism or in the culture medium surrounding said non-human organism.

[72230] Accordingly, the present invention relates to a process for the production of malate, which comprises
[72231] (a) increasing or generating the activity of a monthiol glutaredoxin in the cytosol of a cell of a non-human organism or a part thereof, preferably a microorganism, a plant cell, a plant or a part thereof, as compared to a corresponding non-transformed wild type non-human organism or a part thereof; and
[72232] (b) growing the non-human organism or a part thereof under conditions which permit the production of malate or a composition comprising malate in said non-human organism or in the culture medium surrounding said non-human organism.

[72233] Accordingly, the present invention relates to a process for the production of succinate, which comprises
[72234] (a) increasing or generating the activity of a monthiol glutaredoxin in the cytosol of a cell of a non-human organism or a part thereof, preferably a microorganism, a plant cell, a plant or a part thereof, as compared to a corresponding non-transformed wild type non-human organism or a part thereof; and
[72235] (b) growing the non-human organism or a part thereof under conditions which permit the production of succinate or a composition comprising succinate in said non-human organism or in the culture medium surrounding said non-human organism.

[72236] Accordingly, the present invention relates to a process for the production of vitamin c and/or threonic acid, which comprises
[72237] (a) increasing or generating the activity of a monthiol glutaredoxin in the cytosol of a cell of a non-human organism or a part thereof, preferably a microorganism, a plant cell, a plant or a part thereof, as compared to a corresponding non-transformed wild type non-human organism or a part thereof; and
[72238] (b) growing the non-human organism or a part thereof under conditions which permit the production of vitamin c and/or threonic acid or a composition comprising vitamin c and/or threonic acid in said non-human organism or in the culture medium surrounding said non-human organism.

[72239] Accordingly, the present invention relates to a process for the production of citramalate, which comprises
[72240] (a) increasing or generating the activity of a glutaredoxin in the cytosol of a cell of a non-human organism or a part thereof, preferably a microorganism, a plant cell, a plant or a part thereof, as compared to a corresponding non-transformed wild type non-human organism or a part thereof; and
[72241] (b) growing the non-human organism or a part thereof under conditions which permit the production of citramalate or a composition comprising citramalate in said non-human organism or in the culture medium surrounding said non-human organism.

[72242] Accordingly, the present invention relates to a process for the production of fumarate, which comprises
[72243] (a) increasing or generating the activity of a glutaredoxin in the cytosol of a cell of a non-human organism or a part thereof, preferably a microorganism, a plant cell, a plant or a part thereof, as compared to a corresponding non-transformed wild type non-human organism or a part thereof; and
[72244] (b) growing the non-human organism or a part thereof under conditions which permit the production of fumarate or a composition comprising fumarate in said non-human organism or in the culture medium surrounding said non-human organism.

[72245] Accordingly, the present invention relates to a process for the production of glycerate, which comprises
[72246] (a) increasing or generating the activity of a glutaredoxin in the cytosol of a cell of a non-human organism or a part thereof, preferably a microorganism, a plant cell, a plant or a part thereof, as compared to a corresponding non-transformed wild type non-human organism or a part thereof; and
[72247] (b) growing the non-human organism or a part thereof under conditions which permit the production of glycerate or a composition comprising glycerate in said non-human organism or in the culture medium surrounding said non-human organism.

[72248] Accordingly, the present invention relates to a process for the production of malate, which comprises
[72249] (a) increasing or generating the activity of a glutaredoxin in the cytosol of a cell of a non-human organism or a part thereof, preferably a microorganism, a plant cell, a plant or a part thereof, as compared to a corresponding non-transformed wild type non-human organism or a part thereof; and
[72250] (b) growing the non-human organism or a part thereof under conditions which permit the production of malate or a composition comprising malate in said non-human organism or in the culture medium surrounding said non-human organism.

[72251] Accordingly, the present invention relates to a process for the production of succinate, which comprises
[72252] (a) increasing or generating the activity of a glutaredoxin in the cytosol of a cell of a non-human organism or a part thereof, preferably a microorganism, a plant cell, a plant or a part thereof, as compared to a corresponding non-transformed wild type non-human organism or a part thereof; and
[72253] (b) growing the non-human organism or a part thereof under conditions which permit the production of succinate or a composition comprising succinate in said non-human organism or in the culture medium surrounding said non-human organism.

[72254] Accordingly, the present invention relates to a process for the production of glycerate, which comprises
[72255] (a) increasing or generating the activity of a thioredoxin in the cytosol of a cell of a non-human organism or a part thereof, preferably a microorganism, a plant cell, a plant or a part thereof, as compared to a corresponding non-transformed wild type non-human organism or a part thereof; and
[72256] (b) growing the non-human organism or a part thereof under conditions which permit the production of glycerate or a composition comprising glycerate in said non-human organism or in the culture medium surrounding said non-human organism.

[72257] Accordingly, the present invention relates to a process for the production of citramalate, which comprises
[72258] (a) increasing or generating the activity of a monothiol glutaredoxin in the cytosol of a cell of a non-human organism or a part thereof, preferably a microorganism, a plant cell, a plant or a part thereof, as compared to a corresponding non-transformed wild type non-human organism or a part thereof; and
[72259] (b) growing the non-human organism or a part thereof under conditions which permit the production of citramalate or a composition comprising citramalate in said non-human organism or in the culture medium surrounding said non-human organism.

[72260] Accordingly, the present invention relates to a process for the production of fumarate, which comprises
[72261] (a) increasing or generating the activity of a monothiol glutaredoxin in the cytosol of a cell of a non-human organism or a part thereof, preferably a microorganism, a plant cell, a plant or a part thereof, as compared to a corresponding non-transformed wild type non-human organism or a part thereof; and
[72262] (b) growing the non-human organism or a part thereof under conditions which permit the production of fumarate or a composition comprising fumarate in said non-human organism or in the culture medium surrounding said non-human organism.

[72263] Accordingly, the present invention relates to a process for the production of glycerate, which comprises
[72264] (a) increasing or generating the activity of a monothiol glutaredoxin in the cytosol of a cell of a non-human organism or a part thereof, preferably a microorganism, a plant cell, a plant or a part thereof, as compared to a corresponding non-transformed wild type non-human organism or a part thereof; and
[72265] (b) growing the non-human organism or a part thereof under conditions which permit the production of glycerate or a composition comprising glycerate in said non-human organism or in the culture medium surrounding said non-human organism.

[72266] Accordingly, the present invention relates to a process for the production of malate, which comprises
[72267] (a) increasing or generating the activity of a monothiol glutaredoxin in the cytosol of a cell of a non-human organism or a part thereof, preferably a microorganism, a plant cell, a plant or a part thereof, as compared to a corresponding non-transformed wild type non-human organism or a part thereof; and
[72268] (b) growing the non-human organism or a part thereof under conditions which permit the production of malate or a composition comprising malate in said non-human organism or in the culture medium surrounding said non-human organism.

[72269] Accordingly, the present invention relates to a process for the production of succinate, which comprises
[72270] (a) increasing or generating the activity of a monothiol glutaredoxin in the cytosol of a cell of a non-human organism or a part thereof, preferably a microorganism, a plant cell, a plant or a part thereof, as compared to a corresponding non-transformed wild type non-human organism or a part thereof; and
[72271] (b) growing the non-human organism or a part thereof under conditions which permit the production of succinate or a composition comprising succinate in said non-human organism or in the culture medium surrounding said non-human organism.

[72272] Accordingly, the present invention relates to a process for the production of vitamin c and/or threonic acid, which comprises
[72273] (a) increasing or generating the activity of a monothiol glutaredoxin in the cytosol of a cell of a non-human organism or a part thereof, preferably a microorganism, a plant cell, a plant or a part thereof, as compared to a corresponding non-transformed wild type non-human organism or a part thereof; and
[72274] (b) growing the non-human organism or a part thereof under conditions which permit the production of vitamin c and/or threonic acid or a composition comprising vitamin c and/or threonic acid in said non-human organism or in the culture medium surrounding said non-human organism.

[72275] Accordingly, the present invention relates to a process for the production of fumarate, which comprises
[72276] (a) increasing or generating the activity of a monothiol glutaredoxin in the cytosol of a cell of a non-human organism or a part thereof, preferably a microorganism, a plant cell, a plant or a part thereof, as compared to a corresponding non-transformed wild type non-human organism or a part thereof; and
[72277] (b) growing the non-human organism or a part thereof under conditions which permit the production of fumarate or a composition comprising fumarate in said non-human organism or in the culture medium surrounding said non-human organism.

[72278] Accordingly, the present invention relates to a process for the production of glycerate, which comprises
[72279] (a) increasing or generating the activity of a monothiol glutaredoxin in the cytosol of a cell of a non-human organism or a part thereof, preferably a microorganism, a plant cell, a plant or a part thereof, as compared to a corresponding non-transformed wild type non-human organism or a part thereof; and
[72280] (b) growing the non-human organism or a part thereof under conditions which permit the production of glycerate or a composition comprising glycerate in said non-human organism or in the culture medium surrounding said non-human organism.

[72281] Accordingly, the present invention relates to a process for the production of malate, which comprises
[72282] (a) increasing or generating the activity of a monothiol glutaredoxin in the cytosol of a cell of a non-human organism or a part thereof, preferably a microorganism, a plant cell, a plant or a part thereof, as compared to a corresponding non-transformed wild type non-human organism or a part thereof; and
[72283] (b) growing the non-human organism or a part thereof under conditions which permit the production of malate or a composition comprising malate in said non-human organism or in the culture medium surrounding said non-human organism.

[72284] Accordingly, the present invention relates to a process for the production of succinate, which comprises
[72285] (a) increasing or generating the activity of a monothiol glutaredoxin in the cytosol of a cell of a non-human organism or a part thereof, preferably a microorganism, a plant cell, a plant or a part thereof, as compared to a corresponding non-transformed wild type non-human organism or a part thereof; and
[72286] (b) growing the non-human organism or a part thereof under conditions which permit the production of succinate or a composition comprising succinate in said non-human organism or in the culture medium surrounding said non-human organism.

[72287] Accordingly, the present invention relates to a process for the production of citramalate, which comprises
[72288] (a) increasing or generating the activity of a monothiol glutaredoxin in the cytosol of a cell of a non-human organism or a part thereof, preferably a microorganism, a plant cell, a plant or a part thereof, as compared to a corresponding non-transformed wild type non-human organism or a part thereof; and
[72289] (b) growing the non-human organism or a part thereof under conditions which permit the production of citramalate or a composition comprising citramalate in said non-human organism or in the culture medium surrounding said non-human organism.

[72290] Accordingly, the present invention relates to a process for the production of fumarate, which comprises
[72291] (a) increasing or generating the activity of a monothiol glutaredoxin in the cytosol of a cell of a non-human organism or a part thereof, preferably a microorganism, a plant cell, a plant or a part thereof, as compared to a corresponding non-transformed wild type non-human organism or a part thereof; and
[72292] (b) growing the non-human organism or a part thereof under conditions which permit the production of fumarate or a composition comprising fumarate in said non-human organism or in the culture medium surrounding said non-human organism.

[72293] Accordingly, the present invention relates to a process for the production of malate, which comprises
[72294] (a) increasing or generating the activity of a monothiol glutaredoxin in the cytosol of a cell of a non-human organism or a part thereof, preferably a microorganism, a plant cell, a plant or a part thereof, as compared to a corresponding non-transformed wild type non-human organism or a part thereof; and
[72295] (b) growing the non-human organism or a part thereof under conditions which permit the production of malate or a composition comprising malate in said non-human organism or in the culture medium surrounding said non-human organism.

[72296] Accordingly, the present invention relates to a process for the production of succinate, which comprises
[72297] (a) increasing or generating the activity of a monothiol glutaredoxin in the cytosol of a cell of a non-human organism or a part thereof, preferably a microorganism, a plant cell, a plant or a part thereof, as compared to a corresponding non-transformed wild type non-human organism or a part thereof; and
[72298] (b) growing the non-human organism or a part thereof under conditions which permit the production of succinate or a composition comprising succinate in said non-human organism or in the culture medium surrounding said non-human organism.

[72299] Accordingly, the present invention relates to a process for the production of vitamin c and/or threonic acid, which comprises
[72300] (a) increasing or generating the activity of a monothiol glutaredoxin in the cytosol of a cell of a non-human organism or a part thereof, preferably a microorganism, a plant cell, a plant or a part thereof, as compared to a corresponding non-transformed wild type non-human organism or a part thereof; and
[72301] (b) growing the non-human organism or a part thereof under conditions which permit the production of vitamin c and/or threonic acid or a composition comprising vitamin c and/or threonic acid in said non-human organism or in the culture medium surrounding said non-human organism.

[72302] Accordingly, the present invention relates to a process for the production of glycerate, which comprises
[72303] (a) increasing or generating the activity of a monothiol glutaredoxin in the cytosol of a cell of a non-human organism or a part thereof, preferably a microorganism, a plant cell, a plant or a part thereof, as compared to a corresponding non-transformed wild type non-human organism or a part thereof; and
[72304] (b) growing the non-human organism or a part thereof under conditions which permit the production of glycerate or a composition comprising glycerate in said non-human organism or in the culture medium surrounding said non-human organism.

[72305] Accordingly, the present invention relates to a process for the production of citramalate, which comprises
[72306] (a) increasing or generating the activity of a protein phosphatase in the cytosol of a cell of a non-human organism or a part thereof, preferably a microorganism, a plant cell, a plant or a part thereof, as compared to a corresponding non-transformed wild type non-human organism or a part thereof; and
[72307] (b) growing the non-human organism or a part thereof under conditions which permit the production of citramalate or a composition comprising citramalate in said non-human organism or in the culture medium surrounding said non-human organism.

[72308] Accordingly, the present invention relates to a process for the production of succinate, which comprises
[72309] (a) increasing or generating the activity of a protein phosphatase in the cytosol of a cell of a non-human organism or a part thereof, preferably a microorganism, a plant cell, a plant or a part thereof, as compared to a corresponding non-transformed wild type non-human organism or a part thereof; and
[72310] (b) growing the non-human organism or a part thereof under conditions which permit the production of succinate or a composition comprising succinate in said non-human organism or in the culture medium surrounding said non-human organism.

[72311] Accordingly, the present invention relates to a process for the production of citramalate, which comprises
[72312] (a) increasing or generating the activity of a glutaredoxin in the cytosol of a cell of a non-human organism or a part thereof, preferably a microorganism, a plant cell, a plant or a part thereof, as compared to a corresponding non-transformed wild type non-human organism or a part thereof; and
[72313] (b) growing the non-human organism or a part thereof under conditions which permit the production of citramalate or a composition comprising citramalate in said non-human organism or in the culture medium surrounding said non-human organism.

[72314] Accordingly, the present invention relates to a process for the production of fumarate, which comprises
[72315] (a) increasing or generating the activity of a glutaredoxin in the cytosol of a cell of a non-human organism or a part thereof, preferably a microorganism, a plant cell, a plant or a part thereof, as compared to a corresponding non-transformed wild type non-human organism or a part thereof; and
[72316] (b) growing the non-human organism or a part thereof under conditions which permit the production of fumarate or a composition comprising fumarate in said non-human organism or in the culture medium surrounding said non-human organism.

[72317] Accordingly, the present invention relates to a process for the production of malate, which comprises
[72318] (a) increasing or generating the activity of a glutaredoxin in the cytosol of a cell of a non-human organism or a part thereof, preferably a microorganism, a plant cell, a plant or a part thereof, as compared to a corresponding non-transformed wild type non-human organism or a part thereof; and
[72319] (b) growing the non-human organism or a part thereof under conditions which permit the production of malate or a composition comprising malate in said non-human organism or in the culture medium surrounding said non-human organism.

[72320] Accordingly, the present invention relates to a process for the production of succinate, which comprises
[72321] (a) increasing or generating the activity of a glutaredoxin in the cytosol of a cell of a non-human organism or a part thereof, preferably a microorganism, a plant cell, a plant or a part thereof, as compared to a corresponding non-transformed wild type non-human organism or a part thereof; and
[72322] (b) growing the non-human organism or a part thereof under conditions which permit the production of succinate or a composition comprising succinate in said non-human organism or in the culture medium surrounding said non-human organism.

[72323] Accordingly, the present invention relates to a process for the production of vitamin c and/or threonic acid, which comprises
[72324] (a) increasing or generating the activity of a glutaredoxin in the cytosol of a cell of a non-human organism or a part thereof, preferably a microorganism, a plant cell, a plant or a part thereof, as compared to a corresponding non-transformed wild type non-human organism or a part thereof; and
[72325] (b) growing the non-human organism or a part thereof under conditions which permit the production of vitamin c and/or threonic acid or a composition comprising vitamin c and/or threonic acid in said non-human organism or in the culture medium surrounding said non-human organism.

[72326] Accordingly, the present invention relates to a process for the production of malate, which comprises
[72327] (a) increasing or generating the activity of a calcium-dependent protein kinase in the cytosol of a cell of a non-human organism or a part thereof, preferably a microorganism, a plant cell, a plant or a part thereof, as compared to a corresponding non-transformed wild type non-human organism or a part thereof; and
[72328] (b) growing the non-human organism or a part thereof under conditions which permit the production of malate or a composition comprising malate in said non-human organism or in the culture medium surrounding said non-human organism.

[72329] Accordingly, the present invention relates to a process for the production of fumarate, which comprises
[72330] (a) increasing or generating the activity of a heat shock transcription factor in the cytosol of a cell of a non-human organism or a part thereof, preferably a microorganism, a plant cell, a plant or a part thereof, as compared to a corresponding non-transformed wild type non-human organism or a part thereof; and
[72331] (b) growing the non-human organism or a part thereof under conditions which permit the production of fumarate or a composition comprising fumarate in said non-human organism or in the culture medium surrounding said non-human organism.

[72332] Accordingly, the present invention relates to a process for the production of malate, which comprises
[72333] (a) increasing or generating the activity of a heat shock transcription factor in the cytosol of a cell of a non-human organism or a part thereof, preferably a microorganism, a plant cell, a plant or a part thereof, as compared to a corresponding non-transformed wild type non-human organism or a part thereof; and
[72334] (b) growing the non-human organism or a part thereof under conditions which permit the production of malate or a composition comprising malate in said non-human organism or in the culture medium surrounding said non-human organism.

[72335] Accordingly, the present invention relates to a process for the production of succinate, which comprises
[72336] (a) increasing or generating the activity of a heat shock transcription factor in the cytosol of a cell of a non-human organism or a part thereof, preferably a microorganism, a plant cell, a plant or a part thereof, as compared to a corresponding non-transformed wild type non-human organism or a part thereof; and
[72337] (b) growing the non-human organism or a part thereof under conditions which permit the production of succinate or a composition comprising succinate in said non-human organism or in the culture medium surrounding said non-human organism.

[72338] Accordingly, the present invention relates to a process for the production of glycerate, which comprises
[72339] (a) increasing or generating the activity of a gibberellin 20-oxidase in the cytosol of a cell of a non-human organism or a part thereof, preferably a microorganism, a plant cell, a plant or a part thereof, as compared to a corresponding non-transformed wild type non-human organism or a part thereof; and
[72340] (b) growing the non-human organism or a part thereof under conditions which permit the production of glycerate or a composition comprising glycerate in said non-human organism or in the culture medium surrounding said non-human organism.

[72341] Accordingly, the present invention relates to a process for the production of malate, which comprises
[72342] (a) increasing or generating the activity of a gibberellin 20-oxidase in the cytosol of a cell of a non-human organism or a part thereof, preferably a microorganism, a plant cell, a plant or a part thereof, as compared to a corresponding non-transformed wild type non-human organism or a part thereof; and
[72343] (b) growing the non-human organism or a part thereof under conditions which permit the production of malate or a composition comprising malate in said non-human organism or in the culture medium surrounding said non-human organism.

[72344] Accordingly, the present invention relates to a process for the production of succinate, which comprises
[72345] (a) increasing or generating the activity of a monothiol glutaredoxin in the cytosol of a cell of a non-human organism or a part thereof, preferably a microorganism, a plant cell, a plant or a part thereof, as compared to a corresponding non-transformed wild type non-human organism or a part thereof; and
[72346] (b) growing the non-human organism or a part thereof under conditions which permit the production of succinate or a composition comprising succinate in said non-human organism or in the culture medium surrounding said non-human organism.

[72347] Accordingly, the present invention relates to a process for the production of malate, which comprises
[72348] (a) increasing or generating the activity of a translation initiation factor subunit in the cytosol of a cell of a non-human organism or a part thereof, preferably a microorganism, a plant cell, a plant or a part thereof, as compared to a corresponding non-transformed wild type non-human organism or a part thereof; and
[72349] (b) growing the non-human organism or a part thereof under conditions which permit the production of malate or a composition comprising malate in said non-human organism or in the culture medium surrounding said non-human organism.

[72350] Accordingly, the present invention relates to a process for the production of fumarate, which comprises
[72351] (a) increasing or generating the activity of a transcription factor in the cytosol of a cell of a non-human organism or a part thereof, preferably a microorganism, a plant cell, a plant or a part thereof, as compared to a corresponding non-transformed wild type non-human organism or a part thereof; and
[72352] (b) growing the non-human organism or a part thereof under conditions which permit the production of fumarate or a composition comprising fumarate in said non-human organism or in the culture medium surrounding said non-human organism.

[72353] Accordingly, the present invention relates to a process for the production of malate, which comprises
[72354] (a) increasing or generating the activity of a transcription factor in the cytosol of a cell of a non-human organism or a part thereof, preferably a microorganism, a plant cell, a plant or a part thereof, as compared to a corresponding non-transformed wild type non-human organism or a part thereof; and
[72355] (b) growing the non-human organism or a part thereof under conditions which permit the production of malate or a composition comprising malate in said non-human organism or in the culture medium surrounding said non-human organism.

[72356] Accordingly, the present invention relates to a process for the production of succinate, which comprises
[72357] (a) increasing or generating the activity of a protein phosphatase in the cytosol of a cell of a non-human organism or a part thereof, preferably a microorganism, a plant cell, a plant or a part thereof, as compared to a corresponding non-transformed wild type non-human organism or a part thereof; and
[72358] (b) growing the non-human organism or a part thereof under conditions which permit the production of succinate or a composition comprising succinate in said non-human organism or in the culture medium surrounding said non-human organism.

[72359] Accordingly, the present invention relates to a process for the production of succinate, which comprises
[72360] (a) increasing or generating the activity of a pyruvate kinase in the cytosol of a cell of a non-human organism or a part thereof, preferably a microorganism, a plant cell, a plant or a part thereof, as compared to a corresponding non-transformed wild type non-human organism or a part thereof; and
[72361] (b) growing the non-human organism or a part thereof under conditions which permit the production of succinate or a composition comprising succinate in said non-human organism or in the culture medium surrounding said non-human organism.

[72362] Accordingly, the present invention relates to a process for the production of fumarate, which comprises
[72363] (a) increasing or generating the activity of a zinc finger protein in the cytosol of a cell of a non-human organism or a part thereof, preferably a microorganism, a plant cell, a plant or a part thereof, as compared to a corresponding non-transformed wild type non-human organism or a part thereof; and
[72364] (b) growing the non-human organism or a part thereof under conditions which permit the production of fumarate or a composition comprising fumarate in said non-human organism or in the culture medium surrounding said non-human organism.

[72365] Accordingly, the present invention relates to a process for the production of citramalate, which comprises
[72366] (a) increasing or generating the activity of a CDP-diacylglycerol-serine O-phosphatidyltransferase in the cytosol of a cell of a non-human organism or a part thereof, preferably a microorganism, a plant cell, a plant or a part thereof, as compared to a corresponding non-transformed wild type non-human organism or a part thereof; and
[72367] (b) growing the non-human organism or a part thereof under conditions which permit the production of citramalate or a composition comprising citramalate in said non-human organism or in the culture medium surrounding said non-human organism.

[72368] Accordingly, the present invention relates to a process for the production of fumarate, which comprises
[72369] (a) increasing or generating the activity of a CDP-diacylglycerol-serine O-phosphatidyltransferase in the cytosol of a cell of a non-human organism or a part thereof, preferably a microorganism, a plant cell, a plant or a part thereof, as compared to a corresponding non-transformed wild type non-human organism or a part thereof; and
[72370] (b) growing the non-human organism or a part thereof under conditions which permit the production of fumarate or a composition comprising fumarate in said non-human organism or in the culture medium surrounding said non-human organism.

[72371] Accordingly, the present invention relates to a process for the production of malate, which comprises
[72372] (a) increasing or generating the activity of a CDP-diacylglycerol-serine O-phosphatidyltransferase in the cytosol of a cell of a non-human organism or a part thereof, preferably a microorganism, a plant cell, a plant or a part thereof, as compared to a corresponding non-transformed wild type non-human organism or a part thereof; and
[72373] (b) growing the non-human organism or a part thereof under conditions which permit the production of malate or a composition comprising malate in said non-human organism or in the culture medium surrounding said non-human organism.

[72374] Accordingly, the present invention relates to a process for the production of malate, which comprises
[72375] (a) increasing or generating the activity of a Glycine cleavage system T aminomethyltransferase in the cytosol of a cell of a non-human organism or a part thereof, preferably a microorganism, a plant cell, a plant or a part thereof, as compared to a corresponding non-transformed wild type non-human organism or a part thereof; and
[72376] (b) growing the non-human organism or a part thereof under conditions which permit the production of malate or a composition comprising malate in said non-human organism or in the culture medium surrounding said non-human organism.

[72377] Accordingly, the present invention relates to a process for the production of malate, which comprises
[72378] (a) increasing or generating the activity of a transcriptional regulator in the cytosol of a cell of a non-human organism or a part thereof, preferably a microorganism, a plant cell, a plant or a part thereof, as compared to a corresponding non-transformed wild type non-human organism or a part thereof; and
[72379] (b) growing the non-human organism or a part thereof under conditions which permit the production of malate or a composition comprising malate in said non-human organism or in the culture medium surrounding said non-human organism.

[72380] Accordingly, the present invention relates to a process for the production of malate, which comprises
[72381] (a) increasing or generating the activity of a adenylylsulfate kinase in the cytosol of a cell of a non-human organism or a part thereof, preferably a microorganism, a plant cell, a plant or a part thereof, as compared to a corresponding non-transformed wild type non-human organism or a part thereof; and
[72382] (b) growing the non-human organism or a part thereof under conditions which permit the production of malate or a composition comprising malate in said non-human organism or in the culture medium surrounding said non-human organism.

[72383] Accordingly, the present invention relates to a process for the production of succinate, which comprises
[72384] (a) increasing or generating the activity of a adenylylsulfate kinase in the cytosol of a cell of a non-human organism or a part thereof, preferably a microorganism, a plant cell, a plant or a part thereof, as compared to a corresponding non-transformed wild type non-human organism or a part thereof; and
[72385] (b) growing the non-human organism or a part thereof under conditions which permit the production of succinate or a composition comprising succinate in said non-human organism or in the culture medium surrounding said non-human organism.

[72386] Accordingly, the present invention relates to a process for the production of fumarate, which comprises
[72387] (a) increasing or generating the activity of a sec-independent protein translocase in the cytosol of a cell of a non-human organism or a part thereof, preferably a microorganism, a plant cell, a plant or a part thereof, as compared to a corresponding non-transformed wild type non-human organism or a part thereof; and
[72388] (b) growing the non-human organism or a part thereof under conditions which permit the production of fumarate or a composition comprising fumarate in said non-human organism or in the culture medium surrounding said non-human organism.

[72389] Accordingly, the present invention relates to a process for the production of malate, which comprises
[72390] (a) increasing or generating the activity of a sec-independent protein translocase in the cytosol of a cell of a non-human organism or a part thereof, preferably a microorganism, a plant cell, a plant or a part thereof, as compared to a corresponding non-transformed wild type non-human organism or a part thereof; and
[72391] (b) growing the non-human organism or a part thereof under conditions which permit the production of malate or a composition comprising malate in said non-human organism or in the culture medium surrounding said non-human organism.

[72392] Accordingly, the present invention relates to a process for the production of fumarate, which comprises
[72393] (a) increasing or generating the activity of a fumarate hydratase in the cytosol of a cell of a non-human organism or a part thereof, preferably a microorganism, a plant cell, a plant or a part thereof, as compared to a corresponding non-transformed wild type non-human organism or a part thereof; and
[72394] (b) growing the non-human organism or a part thereof under conditions which permit the production of fumarate or a composition comprising fumarate in said non-human organism or in the culture medium surrounding said non-human organism.

[72395] Accordingly, the present invention relates to a process for the production of succinate, which comprises
[72396] (a) increasing or generating the activity of a pyruvate kinase in the cytosol of a cell of a non-human organism or a part thereof, preferably a microorganism, a plant cell, a plant or a part thereof, as compared to a corresponding non-transformed wild type non-human organism or a part thereof; and
[72397] (b) growing the non-human organism or a part thereof under conditions which permit the production of succinate or a composition comprising succinate in said non-human organism or in the culture medium surrounding said non-human organism.

[72398] Accordingly, the present invention relates to a process for the production of succinate, which comprises
[72399] (a) increasing or generating the activity of a transcriptional regulator protein in the cytosol of a cell of a non-human organism or a part thereof, preferably a microorganism, a plant cell, a plant or a part thereof, as compared to a corresponding non-transformed wild type non-human organism or a part thereof; and
[72400] (b) growing the non-human organism or a part thereof under conditions which permit the production of succinate or a composition comprising succinate in said non-human organism or in the culture medium surrounding said non-human organism.

[72401] Accordingly, the present invention relates to a process for the production of glycerate, which comprises
[72402] (a) increasing or generating the activity of a beta-hydroxylase in the cytosol of a cell of a non-human organism or a part thereof, preferably a microorganism, a plant cell, a plant or a part thereof, as compared to a corresponding non-transformed wild type non-human organism or a part thereof; and
[72403] (b) growing the non-human organism or a part thereof under conditions which permit the production of glycerate or a composition comprising glycerate in said non-human organism or in the culture medium surrounding said non-human organism.

[72404] Accordingly, the present invention relates to a process for the production of succinate, which comprises
[72405] (a) increasing or generating the activity of a 30S ribosomal protein S3 in the cytosol of a cell of a non-human organism or a part thereof, preferably a microorganism, a plant cell, a plant or a part thereof, as compared to a corresponding non-transformed wild type non-human organism or a part thereof; and
[72406] (b) growing the non-human organism or a part thereof under conditions which permit the production of succinate or a composition comprising succinate in said non-human organism or in the culture medium surrounding said non-human organism.

[72407] Accordingly, the present invention relates to a process for the production of citramalate, which comprises
[72408] (a) increasing or generating the activity of a 50S ribosomal protein L14 in the cytosol of a cell of a non-human organism or a part thereof, preferably a microorganism, a plant cell, a plant or a part thereof, as compared to a corresponding non-transformed wild type non-human organism or a part thereof; and
[72409] (b) growing the non-human organism or a part thereof under conditions which permit the production of citramalate or a composition comprising citramalate in said non-human organism or in the culture medium surrounding said non-human organism.

[72410] Accordingly, the present invention relates to a process for the production of malate, which comprises
[72411] (a) increasing or generating the activity of a acyl-CoA synthase in the cytosol of a cell of a non-human organism or a part thereof, preferably a microorganism, a plant cell, a plant or a part thereof, as compared to a corresponding non-transformed wild type non-human organism or a part thereof; and
[72412] (b) growing the non-human organism or a part thereof under conditions which permit the production of malate or a composition comprising malate in said non-human organism or in the culture medium surrounding said non-human organism.

[72413] Accordingly, the present invention relates to a process for the production of citramalate, which comprises
[72414] (a) increasing or generating the activity of a 2-oxoglutarate dehydrogenase E1 subunit in the cytosol of a cell of a non-human organism or a part thereof, preferably a microorganism, a plant cell, a plant or a part thereof, as compared to a corresponding non-transformed wild type non-human organism or a part thereof; and
[72415] (b) growing the non-human organism or a part thereof under conditions which permit the production of citramalate or a composition comprising citramalate in said non-human organism or in the culture medium surrounding said non-human organism.

[72416] Accordingly, the present invention relates to a process for the production of fumarate, which comprises
[72417] (a) increasing or generating the activity of a 2-oxoglutarate dehydrogenase E1 subunit in the cytosol of a cell of a non-human organism or a part thereof, preferably a microorganism, a plant cell, a plant or a part thereof, as compared to a corresponding non-transformed wild type non-human organism or a part thereof; and
[72418] (b) growing the non-human organism or a part thereof under conditions which permit the production of fumarate or a composition comprising fumarate in said non-human organism or in the culture medium surrounding said non-human organism.

[72419] Accordingly, the present invention relates to a process for the production of malate, which comprises
[72420] (a) increasing or generating the activity of a 2-oxoglutarate dehydrogenase E1 subunit in the cytosol of a cell of a non-human organism or a part thereof, preferably a microorganism, a plant cell, a plant or a part thereof, as compared to a corresponding non-transformed wild type non-human organism or a part thereof; and
[72421] (b) growing the non-human organism or a part thereof under conditions which permit the production of malate or a composition comprising malate in said non-human organism or in the culture medium surrounding said non-human organism.

[72422] Accordingly, the present invention relates to a process for the production of succinate, which comprises
[72423] (a) increasing or generating the activity of a 2-oxoglutarate dehydrogenase E1 subunit in the cytosol of a cell of a non-human organism or a part thereof, preferably a microorganism, a plant cell, a plant or a part thereof, as compared to a corresponding non-transformed wild type non-human organism or a part thereof; and
[72424] (b) growing the non-human organism or a part thereof under conditions which permit the production of succinate or a composition comprising succinate in said non-human organism or in the culture medium surrounding said non-human organism.

[72425] Accordingly, the present invention relates to a process for the production of vitamin c and/or threonic acid, which comprises
[72426] (a) increasing or generating the activity of a 2-oxoglutarate dehydrogenase E1 subunit in the cytosol of a cell of a non-human organism or a part thereof, preferably a microorganism, a plant cell, a plant or a part thereof, as compared to a corresponding non-transformed wild type non-human organism or a part thereof; and
[72427] (b) growing the non-human organism or a part thereof under conditions which permit the production of vitamin c and/or threonic acid or a composition comprising vitamin c and/or threonic acid in said non-human organism or in the culture medium surrounding said non-human organism.

[72428] Accordingly, the present invention relates to a process for the production of citramalate, which comprises
[72429] (a) increasing or generating the activity of a transcriptional regulator in the cytosol of a cell of a non-human organism or a part thereof, preferably a microorganism, a plant cell, a plant or a part thereof, as compared to a corresponding non-transformed wild type non-human organism or a part thereof; and
[72430] (b) growing the non-human organism or a part thereof under conditions which permit the production of citramalate or a composition comprising citramalate in said non-human organism or in the culture medium surrounding said non-human organism.

[72431] Accordingly, the present invention relates to a process for the production of fumarate, which comprises
[72432] (a) increasing or generating the activity of a transcriptional regulator in the cytosol of a cell of a non-human organism or a part thereof, preferably a microorganism, a plant cell, a plant or a part thereof, as compared to a corresponding non-transformed wild type non-human organism or a part thereof; and
[72433] (b) growing the non-human organism or a part thereof under conditions which permit the production of fumarate or a composition comprising fumarate in said non-human organism or in the culture medium surrounding said non-human organism.

[72434] Accordingly, the present invention relates to a process for the production of succinate, which comprises
[72435] (a) increasing or generating the activity of a oxidoreductase in the cytosol of a cell of a non-human organism or a part thereof, preferably a microorganism, a plant cell, a plant or a part thereof, as compared to a corresponding non-transformed wild type non-human organism or a part thereof; and
[72436] (b) growing the non-human organism or a part thereof under conditions which permit the production of succinate or a composition comprising succinate in said non-human organism or in the culture medium surrounding said non-human organism.

[72437] Accordingly, the present invention relates to a process for the production of fumarate, which comprises
[72438] (a) increasing or generating the activity of a CTP synthase in the cytosol of a cell of a non-human organism or a part thereof, preferably a microorganism, a plant cell, a plant or a part thereof, as compared to a corresponding non-transformed wild type non-human organism or a part thereof; and
[72439] (b) growing the non-human organism or a part thereof under conditions which permit the production of fumarate or a composition comprising fumarate in said non-human organism or in the culture medium surrounding said non-human organism.

[72440] Accordingly, the present invention relates to a process for the production of malate, which comprises
[72441] (a) increasing or generating the activity of a CTP synthase in the cytosol of a cell of a non-human organism or a part thereof, preferably a microorganism, a plant cell, a plant or a part thereof, as compared to a corresponding non-transformed wild type non-human organism or a part thereof; and
[72442] (b) growing the non-human organism or a part thereof under conditions which permit the production of malate or a composition comprising malate in said non-human organism or in the culture medium surrounding said non-human organism.

[72443] Accordingly, the present invention relates to a process for the production of succinate, which comprises
[72444] (a) increasing or generating the activity of a CTP synthase in the cytosol of a cell of a non-human organism or a part thereof, preferably a microorganism, a plant cell, a plant or a part thereof, as compared to a corresponding non-transformed wild type non-human organism or a part thereof; and
[72445] (b) growing the non-human organism or a part thereof under conditions which permit the production of succinate or a composition comprising succinate in said non-human organism or in the culture medium surrounding said non-human organism.

[72446] Accordingly, the present invention relates to a process for the production of succinate, which comprises
[72447] (a) increasing or generating the activity of a recombinase A in the cytosol of a cell of a non-human organism or a part thereof, preferably a microorganism, a plant cell, a plant or a part thereof, as compared to a corresponding non-transformed wild type non-human organism or a part thereof; and
[72448] (b) growing the non-human organism or a part thereof under conditions which permit the production of succinate or a composition comprising succinate in said non-human organism or in the culture medium surrounding said non-human organism.

[72449] Accordingly, the present invention relates to a process for the production of malate, which comprises
[72450] (a) increasing or generating the activity of a glucose-1-phosphate cytidylyltransferase in the cytosol of a cell of a non-human organism or a part thereof, preferably a microorganism, a plant cell, a plant or a part thereof, as compared to a corresponding non-transformed wild type non-human organism or a part thereof; and
[72451] (b) growing the non-human organism or a part thereof under conditions which permit the production of malate or a composition comprising malate in said non-human organism or in the culture medium surrounding said non-human organism.

[72452] Accordingly, the present invention relates to a process for the production of fumarate, which comprises
[72453] (a) increasing or generating the activity of a CDP-glucose-4,6-dehydratase in the cytosol of a cell of a non-human organism or a part thereof, preferably a microorganism, a plant cell, a plant or a part thereof, as compared to a corresponding non-transformed wild type non-human organism or a part thereof; and
[72454] (b) growing the non-human organism or a part thereof under conditions which permit the production of fumarate or a composition comprising fumarate in said non-human organism or in the culture medium surrounding said non-human organism.

[72455] Accordingly, the present invention relates to a process for the production of malate, which comprises
[72456] (a) increasing or generating the activity of a CDP-glucose-4,6-dehydratase in the cytosol of a cell of a non-human organism or a part thereof, preferably a microorganism, a plant cell, a plant or a part thereof, as compared to a corresponding non-transformed wild type non-human organism or a part thereof; and
[72457] (b) growing the non-human organism or a part thereof under conditions which permit the production of malate or a composition comprising malate in said non-human organism or in the culture medium surrounding said non-human organism.

[72458] Accordingly, the present invention relates to a process for the production of malate, which comprises
[72459] (a) increasing or generating the activity of a aminotransferase in the cytosol of a cell of a non-human organism or a part thereof, preferably a microorganism, a plant cell, a plant or a part thereof, as compared to a corresponding non-transformed wild type non-human organism or a part thereof; and
[72460] (b) growing the non-human organism or a part thereof under conditions which permit the production of malate or a composition comprising malate in said non-human organism or in the culture medium surrounding said non-human organism.

[72461] Accordingly, the present invention relates to a process for the production of succinate, which comprises
[72462] (a) increasing or generating the activity of a isocitrate lyase in the cytosol of a cell of a non-human organism or a part thereof, preferably a microorganism, a plant cell, a plant or a part thereof, as compared to a corresponding non-transformed wild type non-human organism or a part thereof; and
[72463] (b) growing the non-human organism or a part thereof under conditions which permit the production of succinate or a composition comprising succinate in said non-human organism or in the culture medium surrounding said non-human organism.

[72464] Accordingly, the present invention relates to a process for the production of fumarate, which comprises
[72465] (a) increasing or generating the activity of a NADH-quinone oxidoreductase subunit in the cytosol of a cell of a non-human organism or a part thereof, preferably a microorganism, a plant cell, a plant or a part thereof, as compared to a corresponding non-transformed wild type non-human organism or a part thereof; and
[72466] (b) growing the non-human organism or a part thereof under conditions which permit the production of fumarate or a composition comprising fumarate in said non-human organism or in the culture medium surrounding said non-human organism.

[72467] Accordingly, the present invention relates to a process for the production of malate, which comprises
[72468] (a) increasing or generating the activity of a NADH-quinone oxidoreductase subunit in the cytosol of a cell of a non-human organism or a part thereof, preferably a microorganism, a plant cell, a plant or a part thereof, as compared to a corresponding non-transformed wild type non-human organism or a part thereof; and
[72469] (b) growing the non-human organism or a part thereof under conditions which permit the production of malate or a composition comprising malate in said non-human organism or in the culture medium surrounding said non-human organism.

[72470] Accordingly, the present invention relates to a process for the production of malate, which comprises
[72471] (a) increasing or generating the activity of a RNA polymerase sigma factor in the cytosol of a cell of a non-human organism or a part thereof, preferably a microorganism, a plant cell, a plant or a part thereof, as compared to a corresponding non-transformed wild type non-human organism or a part thereof; and
[72472] (b) growing the non-human organism or a part thereof under conditions which permit the production of malate or a composition comprising malate in said non-human organism or in the culture medium surrounding said non-human organism.

[72473] Accordingly, the present invention relates to a process for the production of malate, which comprises
[72474] (a) increasing or generating the activity of a hydrolase in the cytosol of a cell of a non-human organism or a part thereof, preferably a microorganism, a plant cell, a plant or a part thereof, as compared to a corresponding non-transformed wild type non-human organism or a part thereof; and
[72475] (b) growing the non-human organism or a part thereof under conditions which permit the production of malate or a composition comprising malate in said non-human organism or in the culture medium surrounding said non-human organism.

[72476] Accordingly, the present invention relates to a process for the production of malate, which comprises
[72477] (a) increasing or generating the activity of a glutamate-ammonia-ligase in the cytosol of a cell of a non-human organism or a part thereof, preferably a microorganism, a plant cell, a plant or a part thereof, as compared to a corresponding non-transformed wild type non-human organism or a part thereof; and
[72478] (b) growing the non-human organism or a part thereof under conditions which permit the production of malate or a composition comprising malate in said non-human organism or in the culture medium surrounding said non-human organism.

[72479] Accordingly, the present invention relates to a process for the production of succinate, which comprises
[72480] (a) increasing or generating the activity of a electron transfer flavoprotein subunit beta in the cytosol of a cell of a non-human organism or a part thereof, preferably a microorganism, a plant cell, a plant or a part thereof, as compared to a corresponding non-transformed wild type non-human organism or a part thereof; and
[72481] (b) growing the non-human organism or a part thereof under conditions which permit the production of succinate or a composition comprising succinate in said non-human organism or in the culture medium surrounding said non-human organism.

[72482] Accordingly, the present invention relates to a process for the production of fumarate, which comprises
[72483] (a) increasing or generating the activity of a AX653549-protein in the cytosol of a cell of a non-human organism or a part thereof, preferably a microorganism, a plant cell, a plant or a part thereof, as compared to a corresponding non-transformed wild type non-human organism or a part thereof; and
[72484] (b) growing the non-human organism or a part thereof under conditions which permit the production of fumarate or a composition comprising fumarate in said non-human organism or in the culture medium surrounding said non-human organism.

[72485] Accordingly, the present invention relates to a process for the production of malate, which comprises
[72486] (a) increasing or generating the activity of a AX653549-protein in the cytosol of a cell of a non-human organism or a part thereof, preferably a microorganism, a plant cell, a plant or a part thereof, as compared to a corresponding non-transformed wild type non-human organism or a part thereof; and
[72487] (b) growing the non-human organism or a part thereof under conditions which permit the production of malate or a composition comprising malate in said non-human organism or in the culture medium surrounding said non-human organism.

[72488] Accordingly, the present invention relates to a process for the production of fumarate, which comprises
[72489] (a) increasing or generating the activity of a AY087308-protein in the cytosol of a cell of a non-human organism or a part thereof, preferably a microorganism, a plant cell, a plant or a part thereof, as compared to a corresponding non-transformed wild type non-human organism or a part thereof; and
[72490] (b) growing the non-human organism or a part thereof under conditions which permit the production of fumarate or a composition comprising fumarate in said non-human organism or in the culture medium surrounding said non-human organism.

[72491] Accordingly, the present invention relates to a process for the production of malate, which comprises
[72492] (a) increasing or generating the activity of a AY087308-protein in the cytosol of a cell of a non-human organism or a part thereof, preferably a microorganism, a plant cell, a plant or a part thereof, as compared to a corresponding non-transformed wild type non-human organism or a part thereof; and
[72493] (b) growing the non-human organism or a part thereof under conditions which permit the production of malate or a composition comprising malate in said non-human organism or in the culture medium surrounding said non-human organism.

[72494] Accordingly, the present invention relates to a process for the production of succinate, which comprises
[72495] (a) increasing or generating the activity of a AY087308-protein in the cytosol of a cell of a non-human organism or a part thereof, preferably a microorganism, a plant cell, a plant or a part thereof, as compared to a corresponding non-transformed wild type non-human organism or a part thereof; and
[72496] (b) growing the non-human organism or a part thereof under conditions which permit the production of succinate or a composition comprising succinate in said non-human organism or in the culture medium surrounding said non-human organism.

[72497] Accordingly, the present invention relates to a process for the production of fumarate, which comprises
[72498] (a) increasing or generating the activity of a fumarate hydratase in the cytosol of a cell of a non-human organism or a part thereof, preferably a microorganism, a plant cell, a plant or a part thereof, as compared to a corresponding non-transformed wild type non-human organism or a part thereof; and
[72499] (b) growing the non-human organism or a part thereof under conditions which permit the production of fumarate or a composition comprising fumarate in said non-human organism or in the culture medium surrounding said non-human organism.

[72500] Accordingly, the present invention relates to a process for the production of malate, which comprises
[72501] (a) increasing or generating the activity of a threonine synthase in the cytosol of a cell of a non-human organism or a part thereof, preferably a microorganism, a plant cell, a plant or a part thereof, as compared to a corresponding non-transformed wild type non-human organism or a part thereof; and
[72502] (b) growing the non-human organism or a part thereof under conditions which permit the production of malate or a composition comprising malate in said non-human organism or in the culture medium surrounding said non-human organism.

[72503] Accordingly, the present invention relates to a process for the production of fumarate, which comprises
[72504] (a) increasing or generating the activity of a ribulokinase in the cytosol of a cell of a non-human organism or a part thereof, preferably a microorganism, a plant cell, a plant or a part thereof, as compared to a corresponding non-transformed wild type non-human organism or a part thereof; and
[72505] (b) growing the non-human organism or a part thereof under conditions which permit the production of fumarate or a composition comprising fumarate in said non-human organism or in the culture medium surrounding said non-human organism.

[72506] Accordingly, the present invention relates to a process for the production of succinate, which comprises
[72507] (a) increasing or generating the activity of a ribulokinase in the cytosol of a cell of a non-human organism or a part thereof, preferably a microorganism, a plant cell, a plant or a part thereof, as compared to a corresponding non-transformed wild type non-human organism or a part thereof; and
[72508] (b) growing the non-human organism or a part thereof under conditions which permit the production of succinate or a composition comprising succinate in said non-human organism or in the culture medium surrounding said non-human organism.

[72509] Accordingly, the present invention relates to a process for the production of citrate, which comprises
[72510] (a) increasing or generating the activity of a glucose dehydrogenase in the cytosol of a cell of a non-human organism or a part thereof, preferably a microorganism, a plant cell, a plant or a part thereof, as compared to a corresponding non-transformed wild type non-human organism or a part thereof; and
[72511] (b) growing the non-human organism or a part thereof under conditions which permit the production of citrate or a composition comprising citrate in said non-human organism or in the culture medium surrounding said non-human organism.

[72512] Accordingly, the present invention relates to a process for the production of fumarate, which comprises
[72513] (a) increasing or generating the activity of a acyl-CoA dehydrogenase in the cytosol of a cell of a non-human organism or a part thereof, preferably a microorganism, a plant cell, a plant or a part thereof, as compared to a corresponding non-transformed wild type non-human organism or a part thereof; and
[72514] (b) growing the non-human organism or a part thereof under conditions which permit the production of fumarate or a composition comprising fumarate in said non-human organism or in the culture medium surrounding said non-human organism.

[72515] Accordingly, the present invention relates to a process for the production of citrate, which comprises
[72516] (a) increasing or generating the activity of a betaine aldehyde dehydrogenase in the cytosol of a cell of a non-human organism or a part thereof, preferably a microorganism, a plant cell, a plant or a part thereof, as compared to a corresponding non-transformed wild type non-human organism or a part thereof; and
[72517] (b) growing the non-human organism or a part thereof under conditions which permit the production of citrate or a composition comprising citrate in said non-human organism or in the culture medium surrounding said non-human organism.

[72518] Accordingly, the present invention relates to a process for the production of malate, which comprises
[72519] (a) increasing or generating the activity of a ATP-binding component of a transport system in the cytosol of a cell of a non-human organism or a part thereof, preferably a microorganism, a plant cell, a plant or a part thereof, as compared to a corresponding non-transformed wild type non-human organism or a part thereof; and
[72520] (b) growing the non-human organism or a part thereof under conditions which permit the production of malate or a composition comprising malate in said non-human organism or in the culture medium surrounding said non-human organism.

[72521] Accordingly, the present invention relates to a process for the production of malate, which comprises
[72522] (a) increasing or generating the activity of a membrane transport protein in the cytosol of a cell of a non-human organism or a part thereof, preferably a microorganism, a plant cell, a plant or a part thereof, as compared to a corresponding non-transformed wild type non-human organism or a part thereof; and
[72523] (b) growing the non-human organism or a part thereof under conditions which permit the production of malate or a composition comprising malate in said non-human organism or in the culture medium surrounding said non-human organism.

[72524] Accordingly, the present invention relates to a process for the production of succinate, which comprises
[72525] (a) increasing or generating the activity of a membrane transport protein in the cytosol of a cell of a non-human organism or a part thereof, preferably a microorganism, a plant cell, a plant or a part thereof, as compared to a corresponding non-transformed wild type non-human organism or a part thereof; and
[72526] (b) growing the non-human organism or a part thereof under conditions which permit the production of succinate or a composition comprising succinate in said non-human organism or in the culture medium surrounding said non-human organism.

[72527] Accordingly, the present invention relates to a process for the production of citrate, which comprises
[72528] (a) increasing or generating the activity of a glycerate kinase in the cytosol of a cell of a non-human organism or a part thereof, preferably a microorganism, a plant cell, a plant or a part thereof, as compared to a corresponding non-transformed wild type non-human organism or a part thereof; and
[72529] (b) growing the non-human organism or a part thereof under conditions which permit the production of citrate or a composition comprising citrate in said non-human organism or in the culture medium surrounding said non-human organism.

[72530] Accordingly, the present invention relates to a process for the production of fumarate, which comprises
[72531] (a) increasing or generating the activity of a isochorismate synthase in the cytosol of a cell of a non-human organism or a part thereof, preferably a microorganism, a plant cell, a plant or a part thereof, as compared to a corresponding non-transformed wild type non-human organism or a part thereof; and
[72532] (b) growing the non-human organism or a part thereof under conditions which permit the production of fumarate or a composition comprising fumarate in said non-human organism or in the culture medium surrounding said non-human organism.

[72533] Accordingly, the present invention relates to a process for the production of malate, which comprises
[72534] (a) increasing or generating the activity of a isochorismate synthase in the cytosol of a cell of a non-human organism or a part thereof, preferably a microorganism, a plant cell, a plant or a part thereof, as compared to a corresponding non-transformed wild type non-human organism or a part thereof; and
[72535] (b) growing the non-human organism or a part thereof under conditions which permit the production of malate or a composition comprising malate in said non-human organism or in the culture medium surrounding said non-human organism.

[72536] Accordingly, the present invention relates to a process for the production of fumarate, which comprises
[72537] (a) increasing or generating the activity of a zinc transporter in the cytosol of a cell of a non-human organism or a part thereof, preferably a microorganism, a plant cell, a plant or a part thereof, as compared to a corresponding non-transformed wild type non-human organism or a part thereof; and
[72538] (b) growing the non-human organism or a part thereof under conditions which permit the production of fumarate or a composition comprising fumarate in said non-human organism or in the culture medium surrounding said non-human organism.

[72539] Accordingly, the present invention relates to a process for the production of succinate, which comprises
[72540] (a) increasing or generating the activity of a b0801-protein in the cytosol of a cell of a non-human organism or a part thereof, preferably a microorganism, a plant cell, a plant or a part thereof, as compared to a corresponding non-transformed wild type non-human organism or a part thereof; and
[72541] (b) growing the non-human organism or a part thereof under conditions which permit the production of succinate or a composition comprising succinate in said non-human organism or in the culture medium surrounding said non-human organism.

[72542] Accordingly, the present invention relates to a process for the production of malate, which comprises
[72543] (a) increasing or generating the activity of a leucyl/phenylalanyl-tRNA-protein transferase in the cytosol of a cell of a non-human organism or a part thereof, preferably a microorganism, a plant cell, a plant or a part thereof, as compared to a corresponding non-transformed wild type non-human organism or a part thereof; and
[72544] (b) growing the non-human organism or a part thereof under conditions which permit the production of malate or a composition comprising malate in said non-human organism or in the culture medium surrounding said non-human organism.

[72545] Accordingly, the present invention relates to a process for the production of vitamin c and/or threonic acid, which comprises
[72546] (a) increasing or generating the activity of a methylglyoxal synthase in the cytosol of a cell of a non-human organism or a part thereof, preferably a microorganism, a plant cell, a plant or a part thereof, as compared to a corresponding non-transformed wild type non-human organism or a part thereof; and
[72547] (b) growing the non-human organism or a part thereof under conditions which permit the production of vitamin c and/or threonic acid or a composition comprising vitamin c and/or threonic acid in said non-human organism or in the culture medium surrounding said non-human organism.

[72548] Accordingly, the present invention relates to a process for the production of malate, which comprises
[72549] (a) increasing or generating the activity of a b1003-protein in the cytosol of a cell of a non-human organism or a part thereof, preferably a microorganism, a plant cell, a plant or a part thereof, as compared to a corresponding non-transformed wild type non-human organism or a part thereof; and
[72550] (b) growing the non-human organism or a part thereof under conditions which permit the production of malate or a composition comprising malate in said non-human organism or in the culture medium surrounding said non-human organism.

[72551] Accordingly, the present invention relates to a process for the production of malate, which comprises
[72552] (a) increasing or generating the activity of a membrane protein in the cytosol of a cell of a non-human organism or a part thereof, preferably a microorganism, a plant cell, a plant or a part thereof, as compared to a corresponding non-transformed wild type non-human organism or a part thereof; and
[72553] (b) growing the non-human organism or a part thereof under conditions which permit the production of malate or a composition comprising malate in said non-human organism or in the culture medium surrounding said non-human organism.

[72554] Accordingly, the present invention relates to a process for the production of succinate, which comprises
[72555] (a) increasing or generating the activity of a b1285-protein in the cytosol of a cell of a non-human organism or a part thereof, preferably a microorganism, a plant cell, a plant or a part thereof, as compared to a corresponding non-transformed wild type non-human organism or a part thereof; and
[72556] (b) growing the non-human organism or a part thereof under conditions which permit the production of succinate or a composition comprising succinate in said non-human organism or in the culture medium surrounding said non-human organism.

[72557] Accordingly, the present invention relates to a process for the production of malate, which comprises
[72558] (a) increasing or generating the activity of a phenylacetic acid degradation protein in the cytosol of a cell of a non-human organism or a part thereof, preferably a microorganism, a plant cell, a plant or a part thereof, as compared to a corresponding non-transformed wild type non-human organism or a part thereof; and
[72559] (b) growing the non-human organism or a part thereof under conditions which permit the production of malate or a composition comprising malate in said non-human organism or in the culture medium surrounding said non-human organism.

[72560] Accordingly, the present invention relates to a process for the production of malate, which comprises
[72561] (a) increasing or generating the activity of a b1425-protein in the cytosol of a cell of a non-human organism or a part thereof, preferably a microorganism, a plant cell, a plant or a part thereof, as compared to a corresponding non-transformed wild type non-human organism or a part thereof; and
[72562] (b) growing the non-human organism or a part thereof under conditions which permit the production of malate or a composition comprising malate in said non-human organism or in the culture medium surrounding said non-human organism.

[72563] Accordingly, the present invention relates to a process for the production of succinate, which comprises
[72564] (a) increasing or generating the activity of a lipoprotein precursor in the cytosol of a cell of a non-human organism or a part thereof, preferably a microorganism, a plant cell, a plant or a part thereof, as compared to a corresponding non-transformed wild type non-human organism or a part thereof; and
[72565] (b) growing the non-human organism or a part thereof under conditions which permit the production of succinate or a composition comprising succinate in said non-human organism or in the culture medium surrounding said non-human organism.

[72566] Accordingly, the present invention relates to a process for the production of citramalate, which comprises
[72567] (a) increasing or generating the activity of a b1445-protein in the cytosol of a cell of a non-human organism or a part thereof, preferably a microorganism, a plant cell, a plant or a part thereof, as compared to a corresponding non-transformed wild type non-human organism or a part thereof; and
[72568] (b) growing the non-human organism or a part thereof under conditions which permit the production of citramalate or a composition comprising citramalate in said non-human organism or in the culture medium surrounding said non-human organism.

[72569] Accordingly, the present invention relates to a process for the production of citramalate, which comprises
[72570] (a) increasing or generating the activity of a b1522-protein in the cytosol of a cell of a non-human organism or a part thereof, preferably a microorganism, a plant cell, a plant or a part thereof, as compared to a corresponding non-transformed wild type non-human organism or a part thereof; and
[72571] (b) growing the non-human organism or a part thereof under conditions which permit the production of citramalate or a composition comprising citramalate in said non-human organism or in the culture medium surrounding said non-human organism.

[72572] Accordingly, the present invention relates to a process for the production of malate, which comprises
[72573] (a) increasing or generating the activity of a b1522-protein in the cytosol of a cell of a non-human organism or a part thereof, preferably a microorganism, a plant cell, a plant or a part thereof, as compared to a corresponding non-transformed wild type non-human organism or a part thereof; and
[72574] (b) growing the non-human organism or a part thereof under conditions which permit the production of malate or a composition comprising malate in said non-human organism or in the culture medium surrounding said non-human organism.

[72575] Accordingly, the present invention relates to a process for the production of fumarate, which comprises
[72576] (a) increasing or generating the activity of a Fe—S subunit of oxidoreductase in the cytosol of a cell of a non-human organism or a part thereof, preferably a microorganism, a plant cell, a plant or a part thereof, as compared to a corresponding non-transformed wild type non-human organism or a part thereof; and
[72577] (b) growing the non-human organism or a part thereof under conditions which permit the production of fumarate or a composition comprising fumarate in said non-human organism or in the culture medium surrounding said non-human organism.

[72578] Accordingly, the present invention relates to a process for the production of fumarate, which comprises
[72579] (a) increasing or generating the activity of a fumarate hydratase in the cytosol of a cell of a non-human organism or a part thereof, preferably a microorganism, a plant cell, a plant or a part thereof, as compared to a corresponding non-transformed wild type non-human organism or a part thereof; and
[72580] (b) growing the non-human organism or a part thereof under conditions which permit the production of fumarate or a composition comprising fumarate in said non-human organism or in the culture medium surrounding said non-human organism.

[72581] Accordingly, the present invention relates to a process for the production of succinate, which comprises
[72582] (a) increasing or generating the activity of a electron transport complex protein in the cytosol of a cell of a non-human organism or a part thereof, preferably a microorganism, a plant cell, a plant or a part thereof, as compared to a corresponding non-transformed wild type non-human organism or a part thereof; and
[72583] (b) growing the non-human organism or a part thereof under conditions which permit the production of succinate or a composition comprising succinate in said non-human organism or in the culture medium surrounding said non-human organism.

[72584] Accordingly, the present invention relates to a process for the production of succinate, which comprises
[72585] (a) increasing or generating the activity of a methylglyoxalase in the cytosol of a cell of a non-human organism or a part thereof, preferably a microorganism, a plant cell, a plant or a part thereof, as compared to a corresponding non-transformed wild type non-human organism or a part thereof; and
[72586] (b) growing the non-human organism or a part thereof under conditions which permit the production of succinate or a composition comprising succinate in said non-human organism or in the culture medium surrounding said non-human organism.

[72587] Accordingly, the present invention relates to a process for the production of citramalate, which comprises
[72588] (a) increasing or generating the activity of a b1670-protein in the cytosol of a cell of a non-human organism or a part thereof, preferably a microorganism, a plant cell, a plant or a part thereof, as compared to a corresponding non-transformed wild type non-human organism or a part thereof; and
[72589] (b) growing the non-human organism or a part thereof under conditions which permit the production of citramalate or a composition comprising citramalate in said non-human organism or in the culture medium surrounding said non-human organism.

[72590] Accordingly, the present invention relates to a process for the production of malate, which comprises
[72591] (a) increasing or generating the activity of a b1670-protein in the cytosol of a cell of a non-human organism or a part thereof, preferably a microorganism, a plant cell, a plant or a part thereof, as compared to a corresponding non-transformed wild type non-human organism or a part thereof; and
[72592] (b) growing the non-human organism or a part thereof under conditions which permit the production of malate or a composition comprising malate in said non-human organism or in the culture medium surrounding said non-human organism.

[72593] Accordingly, the present invention relates to a process for the production of citramalate, which comprises
[72594] (a) increasing or generating the activity of a b1672-protein in the cytosol of a cell of a non-human organism or a part thereof, preferably a microorganism, a plant cell, a plant or a part thereof, as compared to a corresponding non-transformed wild type non-human organism or a part thereof; and
[72595] (b) growing the non-human organism or a part thereof under conditions which permit the production of citramalate or a composition comprising citramalate in said non-human organism or in the culture medium surrounding said non-human organism.

[72596] Accordingly, the present invention relates to a process for the production of malate, which comprises
[72597] (a) increasing or generating the activity of a b1672-protein in the cytosol of a cell of a non-human organism or a part thereof, preferably a microorganism, a plant cell, a plant or a part thereof, as compared to a corresponding non-transformed wild type non-human organism or a part thereof; and
[72598] (b) growing the non-human organism or a part thereof under conditions which permit the production of malate or a composition comprising malate in said non-human organism or in the culture medium surrounding said non-human organism.

[72599] Accordingly, the present invention relates to a process for the production of vitamin c and/or threonic acid, which comprises
[72600] (a) increasing or generating the activity of a b1672-protein in the cytosol of a cell of a non-human organism or a part thereof, preferably a microorganism, a plant cell, a plant or a part thereof, as compared to a corresponding non-transformed wild type non-human organism or a part thereof; and
[72601] (b) growing the non-human organism or a part thereof under conditions which permit the production of vitamin c and/or threonic acid or a composition comprising vitamin c and/or threonic acid in said non-human organism or in the culture medium surrounding said non-human organism.

[72602] Accordingly, the present invention relates to a process for the production of malate, which comprises
[72603] (a) increasing or generating the activity of a b1742-protein in the cytosol of a cell of a non-human organism or a part thereof, preferably a microorganism, a plant cell, a plant or a part thereof, as compared to a corresponding non-transformed wild type non-human organism or a part thereof; and
[72604] (b) growing the non-human organism or a part thereof under conditions which permit the production of malate or a composition comprising malate in said non-human organism or in the culture medium surrounding said non-human organism.

[72605] Accordingly, the present invention relates to a process for the production of succinate, which comprises
[72606] (a) increasing or generating the activity of a b1742-protein in the cytosol of a cell of a non-human organism or a part thereof, preferably a microorganism, a plant cell, a plant or a part thereof, as compared to a corresponding non-transformed wild type non-human organism or a part thereof; and
[72607] (b) growing the non-human organism or a part thereof under conditions which permit the production of succinate or a composition comprising succinate in said non-human organism or in the culture medium surrounding said non-human organism.

[72608] Accordingly, the present invention relates to a process for the production of succinate, which comprises
[72609] (a) increasing or generating the activity of a arginine N-succinyltransferase in the cytosol of a cell of a non-human organism or a part thereof, preferably a microorganism, a plant cell, a plant or a part thereof, as compared to a corresponding non-transformed wild type non-human organism or a part thereof; and
[72610] (b) growing the non-human organism or a part thereof under conditions which permit the production of succinate or a composition comprising succinate in said non-human organism or in the culture medium surrounding said non-human organism.

[72611] Accordingly, the present invention relates to a process for the production of vitamin c and/or threonic acid, which comprises
[72612] (a) increasing or generating the activity of a ABC transporter permease protein in the cytosol of a cell of a non-human organism or a part thereof, preferably a microorganism, a plant cell, a plant or a part thereof, as compared to a corresponding non-transformed wild type non-human organism or a part thereof; and
[72613] (b) growing the non-human organism or a part thereof under conditions which permit the production of vitamin c and/or threonic acid or a composition comprising vitamin c and/or threonic acid in said non-human organism or in the culture medium surrounding said non-human organism.

[72614] Accordingly, the present invention relates to a process for the production of malate, which comprises
[72615] (a) increasing or generating the activity of a protease in the cytosol of a cell of a non-human organism or a part thereof, preferably a microorganism, a plant cell, a plant or a part thereof, as compared to a corresponding non-transformed wild type non-human organism or a part thereof; and
[72616] (b) growing the non-human organism or a part thereof under conditions which permit the production of malate or a composition comprising malate in said non-human organism or in the culture medium surrounding said non-human organism.

[72617] Accordingly, the present invention relates to a process for the production of vitamin c and/or threonic acid, which comprises
[72618] (a) increasing or generating the activity of a dATP pyrophosphohydrolase in the cytosol of a cell of a non-human organism or a part thereof, preferably a microorganism, a plant cell, a plant or a part thereof, as compared to a corresponding non-transformed wild type non-human organism or a part thereof; and
[72619] (b) growing the non-human organism or a part thereof under conditions which permit the production of vitamin c and/or threonic acid or a composition comprising vitamin c and/or threonic acid in said non-human organism or in the culture medium surrounding said non-human organism.

[72620] Accordingly, the present invention relates to a process for the production of succinate, which comprises
[72621] (a) increasing or generating the activity of a b1898-protein in the cytosol of a cell of a non-human organism or a part thereof, preferably a microorganism, a plant cell, a plant or a part thereof, as compared to a corresponding non-transformed wild type non-human organism or a part thereof; and
[72622] (b) growing the non-human organism or a part thereof under conditions which permit the production of succinate or a composition comprising succinate in said non-human organism or in the culture medium surrounding said non-human organism.

[72623] Accordingly, the present invention relates to a process for the production of fumarate, which comprises
[72624] (a) increasing or generating the activity of a flagellar M-ring protein in the cytosol of a cell of a non-human organism or a part thereof, preferably a microorganism, a plant cell, a plant or a part thereof, as compared to a corresponding non-transformed wild type non-human organism or a part thereof; and
[72625] (b) growing the non-human organism or a part thereof under conditions which permit the production of fumarate or a composition comprising fumarate in said non-human organism or in the culture medium surrounding said non-human organism.

[72626] Accordingly, the present invention relates to a process for the production of malate, which comprises
[72627] (a) increasing or generating the activity of a flagellar M-ring protein in the cytosol of a cell of a non-human organism or a part thereof, preferably a microorganism, a plant cell, a plant or a part thereof, as compared to a corresponding non-transformed wild type non-human organism or a part thereof; and
[72628] (b) growing the non-human organism or a part thereof under conditions which permit the production of malate or a composition comprising malate in said non-human organism or in the culture medium surrounding said non-human organism.

[72629] Accordingly, the present invention relates to a process for the production of succinate, which comprises
[72630] (a) increasing or generating the activity of a flagellar M-ring protein in the cytosol of a cell of a non-human organism or a part thereof, preferably a microorganism, a plant cell, a plant or a part thereof, as compared to a corresponding non-transformed wild type non-human organism or a part thereof; and
[72631] (b) growing the non-human organism or a part thereof under conditions which permit the production of succinate or a composition comprising succinate in said non-human organism or in the culture medium surrounding said non-human organism.

[72632] Accordingly, the present invention relates to a process for the production of malate, which comprises
[72633] (a) increasing or generating the activity of a O-antigen chain length determinant in the cytosol of a cell of a non-human organism or a part thereof, preferably a microorganism, a plant cell, a plant or a part thereof, as compared to a corresponding non-transformed wild type non-human organism or a part thereof; and
[72634] (b) growing the non-human organism or a part thereof under conditions which permit the production of malate or a composition comprising malate in said non-human organism or in the culture medium surrounding said non-human organism.

[72635] Accordingly, the present invention relates to a process for the production of fumarate, which comprises
[72636] (a) increasing or generating the activity of a b2399-protein in the cytosol of a cell of a non-human organism or a part thereof, preferably a microorganism, a plant cell, a plant or a part thereof, as compared to a corresponding non-transformed wild type non-human organism or a part thereof; and
[72637] (b) growing the non-human organism or a part thereof under conditions which permit the production of fumarate or a composition comprising fumarate in said non-human organism or in the culture medium surrounding said non-human organism.

[72638] Accordingly, the present invention relates to a process for the production of succinate, which comprises
[72639] (a) increasing or generating the activity of a b2399-protein in the cytosol of a cell of a non-human organism or a part thereof, preferably a microorganism, a plant cell, a plant or a part thereof, as compared to a corresponding non-transformed wild type non-human organism or a part thereof; and
[72640] (b) growing the non-human organism or a part thereof under conditions which permit the production of succinate or a composition comprising succinate in said non-human organism or in the culture medium surrounding said non-human organism.

[72641] Accordingly, the present invention relates to a process for the production of vitamin c and/or threonic acid, which comprises
[72642] (a) increasing or generating the activity of a b2399-protein in the cytosol of a cell of a non-human organism or a part thereof, preferably a microorganism, a plant cell, a plant or a part thereof, as compared to a corresponding non-transformed wild type non-human organism or a part thereof; and
[72643] (b) growing the non-human organism or a part thereof under conditions which permit the production of vitamin c and/or threonic acid or a composition comprising vitamin c and/or threonic acid in said non-human organism or in the culture medium surrounding said non-human organism.

[72644] Accordingly, the present invention relates to a process for the production of vitamin c and/or threonic acid, which comprises
[72645] (a) increasing or generating the activity of a cysteine synthase A in the cytosol of a cell of a non-human organism or a part thereof, preferably a microorganism, a plant cell, a plant or a part thereof, as compared to a corresponding non-transformed wild type non-human organism or a part thereof; and
[72646] (b) growing the non-human organism or a part thereof under conditions which permit the production of vitamin c and/or threonic acid or a composition comprising vitamin c and/or threonic acid in said non-human organism or in the culture medium surrounding said non-human organism.

[72647] Accordingly, the present invention relates to a process for the production of vitamin c and/or threonic acid, which comprises
[72648] (a) increasing or generating the activity of a cysteine synthase B in the cytosol of a cell of a non-human organism or a part thereof, preferably a microorganism, a plant cell, a plant or a part thereof, as compared to a corresponding non-transformed wild type non-human organism or a part thereof; and
[72649] (b) growing the non-human organism or a part thereof under conditions which permit the production of vitamin c and/or threonic acid or a composition comprising vitamin c and/or threonic acid in said non-human organism or in the culture medium surrounding said non-human organism.

[72650] Accordingly, the present invention relates to a process for the production of fumarate, which comprises
[72651] (a) increasing or generating the activity of a transcriptional regulator in the cytosol of a cell of a non-human organism or a part thereof, preferably a microorganism, a plant cell, a plant or a part thereof, as compared to a corresponding non-transformed wild type non-human organism or a part thereof; and
[72652] (b) growing the non-human organism or a part thereof under conditions which permit the production of fumarate or a composition comprising fumarate in said non-human organism or in the culture medium surrounding said non-human organism.

[72653] Accordingly, the present invention relates to a process for the production of malate, which comprises
[72654] (a) increasing or generating the activity of a transcriptional regulator in the cytosol of a cell of a non-human organism or a part thereof, preferably a microorganism, a plant cell, a plant or a part thereof, as compared to a corresponding non-transformed wild type non-human organism or a part thereof; and
[72655] (b) growing the non-human organism or a part thereof under conditions which permit the production of malate or a composition comprising malate in said non-human organism or in the culture medium surrounding said non-human organism.

[72656] Accordingly, the present invention relates to a process for the production of succinate, which comprises
[72657] (a) increasing or generating the activity of a murein transglycosylase in the cytosol of a cell of a non-human organism or a part thereof, preferably a microorganism, a plant cell, a plant or a part thereof, as compared to a corresponding non-transformed wild type non-human organism or a part thereof; and
[72658] (b) growing the non-human organism or a part thereof under conditions which permit the production of succinate or a composition comprising succinate in said non-human organism or in the culture medium surrounding said non-human organism.

[72659] Accordingly, the present invention relates to a process for the production of succinate, which comprises
[72660] (a) increasing or generating the activity of a 2-C-methyl-D-erythritol 4-phosphate cytidylyltransferase in the cytosol of a cell of a non-human organism or a part thereof, preferably a microorganism, a plant cell, a plant or a part thereof, as compared to a corresponding non-transformed wild type non-human organism or a part thereof; and
[72661] (b) growing the non-human organism or a part thereof under conditions which permit the production of succinate or a composition comprising succinate in said non-human organism or in the culture medium surrounding said non-human organism.

[72662] Accordingly, the present invention relates to a process for the production of succinate, which comprises
[72663] (a) increasing or generating the activity of a amino-acid acetyltransferase in the cytosol of a cell of a non-human organism or a part thereof, preferably a microorganism, a plant cell, a plant or a part thereof, as compared to a corresponding non-transformed wild type non-human organism or a part thereof; and
[72664] (b) growing the non-human organism or a part thereof under conditions which permit the production of succinate or a composition comprising succinate in said non-human organism or in the culture medium surrounding said non-human organism.

[72665] Accordingly, the present invention relates to a process for the production of succinate, which comprises
[72666] (a) increasing or generating the activity of a xanthine dehydrogenase in the cytosol of a cell of a non-human organism or a part thereof, preferably a microorganism, a plant cell, a plant or a part thereof, as compared to a corresponding non-transformed wild type non-human organism or a part thereof; and
[72667] (b) growing the non-human organism or a part thereof under conditions which permit the production of succinate or a composition comprising succinate in said non-human organism or in the culture medium surrounding said non-human organism.

[72668] Accordingly, the present invention relates to a process for the production of succinate, which comprises
[72669] (a) increasing or generating the activity of a cystathionine beta-lyase in the cytosol of a cell of a non-human organism or a part thereof, preferably a microorganism, a plant cell, a plant or a part thereof, as compared to a corresponding non-transformed wild type non-human organism or a part thereof; and
[72670] (b) growing the non-human organism or a part thereof under conditions which permit the production of succinate or a composition comprising succinate in said non-human organism or in the culture medium surrounding said non-human organism.

[72671] Accordingly, the present invention relates to a process for the production of fumarate, which comprises
[72672] (a) increasing or generating the activity of a methyltransferase in the cytosol of a cell of a non-human organism or a part thereof, preferably a microorganism, a plant cell, a plant or a part thereof, as compared to a corresponding non-transformed wild type non-human organism or a part thereof; and
[72673] (b) growing the non-human organism or a part thereof under conditions which permit the production of fumarate or a composition comprising fumarate in said non-human organism or in the culture medium surrounding said non-human organism.

[72674] Accordingly, the present invention relates to a process for the production of malate, which comprises
[72675] (a) increasing or generating the activity of a methyltransferase in the cytosol of a cell of a non-human organism or a part thereof, preferably a microorganism, a plant cell, a plant or a part thereof, as compared to a corresponding non-transformed wild type non-human organism or a part thereof; and
[72676] (b) growing the non-human organism or a part thereof under conditions which permit the production of malate or a composition comprising malate in said non-human organism or in the culture medium surrounding said non-human organism.

[72677] Accordingly, the present invention relates to a process for the production of fumarate, which comprises
[72678] (a) increasing or generating the activity of a lipopolysaccharide core biosynthesis protein in the cytosol of a cell of a non-human organism or a part thereof, preferably a microorganism, a plant cell, a plant or a part thereof, as compared to a corresponding non-transformed wild type non-human organism or a part thereof; and
[72679] (b) growing the non-human organism or a part thereof under conditions which permit the production of fumarate or a composition comprising fumarate in said non-human organism or in the culture medium surrounding said non-human organism.

[72680] Accordingly, the present invention relates to a process for the production of succinate, which comprises
[72681] (a) increasing or generating the activity of a b3777-protein in the cytosol of a cell of a non-human organism or a part thereof, preferably a microorganism, a plant cell, a plant or a part thereof, as compared to a corresponding non-transformed wild type non-human organism or a part thereof; and
[72682] (b) growing the non-human organism or a part thereof under conditions which permit the production of succinate or a composition comprising succinate in said non-human organism or in the culture medium surrounding said non-human organism.

[72683] Accordingly, the present invention relates to a process for the production of malate, which comprises
[72684] (a) increasing or generating the activity of a b3791-protein in the cytosol of a cell of a non-human organism or a part thereof, preferably a microorganism, a plant cell, a plant or a part thereof, as compared to a corresponding non-transformed wild type non-human organism or a part thereof; and
[72685] (b) growing the non-human organism or a part thereof under conditions which permit the production of malate or a composition comprising malate in said non-human organism or in the culture medium surrounding said non-human organism.

[72686] Accordingly, the present invention relates to a process for the production of succinate, which comprises
[72687] (a) increasing or generating the activity of a b3791-protein in the cytosol of a cell of a non-human organism or a part thereof, preferably a microorganism, a plant cell, a plant or a part thereof, as compared to a corresponding non-transformed wild type non-human organism or a part thereof; and
[72688] (b) growing the non-human organism or a part thereof under conditions which permit the production of succinate or a composition comprising succinate in said non-human organism or in the culture medium surrounding said non-human organism.

[72689] Accordingly, the present invention relates to a process for the production of citramalate, which comprises
[72690] (a) increasing or generating the activity of a b3814-protein in the cytosol of a cell of a non-human organism or a part thereof, preferably a microorganism, a plant cell, a plant or a part thereof, as compared to a corresponding non-transformed wild type non-human organism or a part thereof; and
[72691] (b) growing the non-human organism or a part thereof under conditions which permit the production of citramalate or a composition comprising citramalate in said non-human organism or in the culture medium surrounding said non-human organism.

[72692] Accordingly, the present invention relates to a process for the production of fumarate, which comprises
[72693] (a) increasing or generating the activity of a b3817-protein in the cytosol of a cell of a non-human organism or a part thereof, preferably a microorganism, a plant cell, a plant or a part thereof, as compared to a corresponding non-transformed wild type non-human organism or a part thereof; and
[72694] (b) growing the non-human organism or a part thereof under conditions which permit the production of fumarate or a composition comprising fumarate in said non-human organism or in the culture medium surrounding said non-human organism.

[72695] Accordingly, the present invention relates to a process for the production of citramalate, which comprises
[72696] (a) increasing or generating the activity of a threonine efflux protein in the cytosol of a cell of a non-human organism or a part thereof, preferably a microorganism, a plant cell, a plant or a part thereof, as compared to a corresponding non-transformed wild type non-human organism or a part thereof; and
[72697] (b) growing the non-human organism or a part thereof under conditions which permit the production of citramalate or a composition comprising citramalate in said non-human organism or in the culture medium surrounding said non-human organism.

[72698] Accordingly, the present invention relates to a process for the production of malate, which comprises
[72699] (a) increasing or generating the activity of a threonine efflux protein in the cytosol of a cell of a non-human organism or a part thereof, preferably a microorganism, a plant cell, a plant or a part thereof, as compared to a corresponding non-transformed wild type non-human organism or a part thereof; and
[72700] (b) growing the non-human organism or a part thereof under conditions which permit the production of malate or a composition comprising malate in said non-human organism or in the culture medium surrounding said non-human organism.

[72701] Accordingly, the present invention relates to a process for the production of succinate, which comprises
[72702] (a) increasing or generating the activity of a b3989-protein in the cytosol of a cell of a non-human organism or a part thereof, preferably a microorganism, a plant cell, a plant or a part thereof, as compared to a corresponding non-transformed wild type non-human organism or a part thereof; and
[72703] (b) growing the non-human organism or a part thereof under conditions which permit the production of succinate or a composition comprising succinate in said non-human organism or in the culture medium surrounding said non-human organism.

[72704] Accordingly, the present invention relates to a process for the production of fumarate, which comprises
[72705] (a) increasing or generating the activity of a acetyltransferase in the cytosol of a cell of a non-human organism or a part thereof, preferably a microorganism, a plant cell, a plant or a part thereof, as compared to a corresponding non-transformed wild type non-human organism or a part thereof; and
[72706] (b) growing the non-human organism or a part thereof under conditions which permit the production of fumarate or a composition comprising fumarate in said non-human organism or in the culture medium surrounding said non-human organism.

[72707] Accordingly, the present invention relates to a process for the production of fumarate, which comprises
[72708] (a) increasing or generating the activity of a b4029-protein in the cytosol of a cell of a non-human organism or a part thereof, preferably a microorganism, a plant cell, a plant or a part thereof, as compared to a corresponding non-transformed wild type non-human organism or a part thereof; and
[72709] (b) growing the non-human organism or a part thereof under conditions which permit the production of fumarate or a composition comprising fumarate in said non-human organism or in the culture medium surrounding said non-human organism.

[72710] Accordingly, the present invention relates to a process for the production of malate, which comprises
[72711] (a) increasing or generating the activity of a b4029-protein in the cytosol of a cell of a non-human organism or a part thereof, preferably a microorganism, a plant cell, a plant or a part thereof, as compared to a corresponding non-transformed wild type non-human organism or a part thereof; and
[72712] (b) growing the non-human organism or a part thereof under conditions which permit the production of malate or a composition comprising malate in said non-human organism or in the culture medium surrounding said non-human organism.

[72713] Accordingly, the present invention relates to a process for the production of succinate, which comprises
[72714] (a) increasing or generating the activity of a b4029-protein in the cytosol of a cell of a non-human organism or a part thereof, preferably a microorganism, a plant cell, a plant or a part thereof, as compared to a corresponding non-transformed wild type non-human organism or a part thereof; and
[72715] (b) growing the non-human organism or a part thereof under conditions which permit the production of succinate or a composition comprising succinate in said non-human organism or in the culture medium surrounding said non-human organism.

[72716] Accordingly, the present invention relates to a process for the production of fumarate, which comprises
[72717] (a) increasing or generating the activity of a b4050-protein in the cytosol of a cell of a non-human organism or a part thereof, preferably a microorganism, a plant cell, a plant or a part thereof, as compared to a corresponding non-transformed wild type non-human organism or a part thereof; and
[72718] (b) growing the non-human organism or a part thereof under conditions which permit the production of fumarate or a composition comprising fumarate in said non-human organism or in the culture medium surrounding said non-human organism.

[72719] Accordingly, the present invention relates to a process for the production of malate, which comprises
[72720] (a) increasing or generating the activity of a b4050-protein in the cytosol of a cell of a non-human organism or a part thereof, preferably a microorganism, a plant cell, a plant or a part thereof, as compared to a corresponding non-transformed wild type non-human organism or a part thereof; and
[72721] (b) growing the non-human organism or a part thereof under conditions which permit the production of malate or a composition comprising malate in said non-human organism or in the culture medium surrounding said non-human organism.

[72722] Accordingly, the present invention relates to a process for the production of citramalate, which comprises
[72723] (a) increasing or generating the activity of a b4056-protein in the cytosol of a cell of a non-human organism or a part thereof, preferably a microorganism, a plant cell, a plant or a part thereof, as compared to a corresponding non-transformed wild type non-human organism or a part thereof; and
[72724] (b) growing the non-human organism or a part thereof under conditions which permit the production of citramalate or a composition comprising citramalate in said non-human organism or in the culture medium surrounding said non-human organism.

[72725] Accordingly, the present invention relates to a process for the production of citrate, which comprises
[72726] (a) increasing or generating the activity of a aspartase in the cytosol of a cell of a non-human organism or a part thereof, preferably a microorganism, a plant cell, a plant or a part thereof, as compared to a corresponding non-transformed wild type non-human organism or a part thereof; and
[72727] (b) growing the non-human organism or a part thereof under conditions which permit the production of citrate or a composition comprising citrate in said non-human organism or in the culture medium surrounding said non-human organism.

[72728] Accordingly, the present invention relates to a process for the production of fumarate, which comprises
[72729] (a) increasing or generating the activity of a acetyltransferase in the cytosol of a cell of a non-human organism or a part thereof, preferably a microorganism, a plant cell, a plant or a part thereof, as compared to a corresponding non-transformed wild type non-human organism or a part thereof; and
[72730] (b) growing the non-human organism or a part thereof under conditions which permit the production of fumarate or a composition comprising fumarate in said non-human organism or in the culture medium surrounding said non-human organism.

[72731] Accordingly, the present invention relates to a process for the production of malate, which comprises
[72732] (a) increasing or generating the activity of a acetyltransferase in the cytosol of a cell of a non-human organism or a part thereof, preferably a microorganism, a plant cell, a plant or a part thereof, as compared to a corresponding non-transformed wild type non-human organism or a part thereof; and
[72733] (b) growing the non-human organism or a part thereof under conditions which permit the production of malate or a composition comprising malate in said non-human organism or in the culture medium surrounding said non-human organism.

[72734] Accordingly, the present invention relates to a process for the production of vitamin c and/or threonic acid, which comprises
[72735] (a) increasing or generating the activity of a purine-nucleoside phosphorylase in the cytosol of a cell of a non-human organism or a part thereof, preferably a microorganism, a plant cell, a plant or a part thereof, as compared to a corresponding non-transformed wild type non-human organism or a part thereof; and
[72736] (b) growing the non-human organism or a part thereof under conditions which permit the production of vitamin c and/or threonic acid or a composition comprising vitamin c and/or threonic acid in said non-human organism or in the culture medium surrounding said non-human organism.

[72737] Accordingly, the present invention relates to a process for the production of succinate, which comprises
[72738] (a) increasing or generating the activity of a lysine decarboxylase in the cytosol of a cell of a non-human organism or a part thereof, preferably a microorganism, a plant cell, a plant or a part thereof, as compared to a corresponding non-transformed wild type non-human organism or a part thereof; and
[72739] (b) growing the non-human organism or a part thereof under conditions which permit the production of succinate or a composition comprising succinate in said non-human organism or in the culture medium surrounding said non-human organism.

[72740] Accordingly, the present invention relates to a process for the production of succinate, which comprises
[72741] (a) increasing or generating the activity of a glutaredoxin in the cytosol of a cell of a non-human organism or a part thereof, preferably a microorganism, a plant cell, a plant or a part thereof, as compared to a corresponding non-transformed wild type non-human organism or a part thereof; and
[72742] (b) growing the non-human organism or a part thereof under conditions which permit the production of succinate or a composition comprising succinate in said non-human organism or in the culture medium surrounding said non-human organism.

[72743] Accordingly, the present invention relates to a process for the production of fumarate, which comprises
[72744] (a) increasing or generating the activity of a GM02LC17485-protein in the cytosol of a cell of a non-human organism or a part thereof, preferably a microorganism, a plant cell, a plant or a part thereof, as compared to a corresponding non-transformed wild type non-human organism or a part thereof; and
[72745] (b) growing the non-human organism or a part thereof under conditions which permit the production of fumarate or a composition comprising fumarate in said non-human organism or in the culture medium surrounding said non-human organism.

[72746] Accordingly, the present invention relates to a process for the production of citramalate, which comprises
[72747] (a) increasing or generating the activity of a transcription factor in the cytosol of a cell of a non-human organism or a part thereof, preferably a microorganism, a plant cell, a plant or a part thereof, as compared to a corresponding non-transformed wild type non-human organism or a part thereof; and
[72748] (b) growing the non-human organism or a part thereof under conditions which permit the production of citramalate or a composition comprising citramalate in said non-human organism or in the culture medium surrounding said non-human organism.

[72749] Accordingly, the present invention relates to a process for the production of fumarate, which comprises
[72750] (a) increasing or generating the activity of a transcription factor in the cytosol of a cell of a non-human organism or a part thereof, preferably a microorganism, a plant cell, a plant or a part thereof, as compared to a corresponding non-transformed wild type non-human organism or a part thereof; and
[72751] (b) growing the non-human organism or a part thereof under conditions which permit the production of fumarate or a composition comprising fumarate in said non-human organism or in the culture medium surrounding said non-human organism.

[72752] Accordingly, the present invention relates to a process for the production of malate, which comprises
[72753] (a) increasing or generating the activity of a transcription factor in the cytosol of a cell of a non-human organism or a part thereof, preferably a microorganism, a plant cell, a plant or a part thereof, as compared to a corresponding non-transformed wild type non-human organism or a part thereof; and
[72754] (b) growing the non-human organism or a part thereof under conditions which permit the production of malate or a composition comprising malate in said non-human organism or in the culture medium surrounding said non-human organism.

[72755] Accordingly, the present invention relates to a process for the production of citramalate, which comprises
[72756] (a) increasing or generating the activity of a GM02LC5744-protein in the cytosol of a cell of a non-human organism or a part thereof, preferably a microorganism, a plant cell, a plant or a part thereof, as compared to a corresponding non-transformed wild type non-human organism or a part thereof; and
[72757] (b) growing the non-human organism or a part thereof under conditions which permit the production of citramalate or a composition comprising citramalate in said non-human organism or in the culture medium surrounding said non-human organism.

[72758] Accordingly, the present invention relates to a process for the production of fumarate, which comprises
[72759] (a) increasing or generating the activity of a GM02LC5744-protein in the cytosol of a cell of a non-human organism or a part thereof, preferably a microorganism, a plant cell, a plant or a part thereof, as compared to a corresponding non-transformed wild type non-human organism or a part thereof; and
[72760] (b) growing the non-human organism or a part thereof under conditions which permit the production of fumarate or a composition comprising fumarate in said non-human organism or in the culture medium surrounding said non-human organism.

[72761] Accordingly, the present invention relates to a process for the production of citramalate, which comprises
[72762] (a) increasing or generating the activity of a heat shock protein in the cytosol of a cell of a non-human organism or a part thereof, preferably a microorganism, a plant cell, a plant or a part thereof, as compared to a corresponding non-transformed wild type non-human organism or a part thereof; and
[72763] (b) growing the non-human organism or a part thereof under conditions which permit the production of citramalate or a composition comprising citramalate in said non-human organism or in the culture medium surrounding said non-human organism.

[72764] Accordingly, the present invention relates to a process for the production of fumarate, which comprises
[72765] (a) increasing or generating the activity of a agmatinase in the cytosol of a cell of a non-human organism or a part thereof, preferably a microorganism, a plant cell, a plant or a part thereof, as compared to a corresponding non-transformed wild type non-human organism or a part thereof; and
[72766] (b) growing the non-human organism or a part thereof under conditions which permit the production of fumarate or a composition comprising fumarate in said non-human organism or in the culture medium surrounding said non-human organism.

[72767] Accordingly, the present invention relates to a process for the production of malate, which comprises
[72768] (a) increasing or generating the activity of a ABC transporter ATP binding component in the cytosol of a cell of a non-human organism or a part thereof, preferably a microorganism, a plant cell, a plant or a part thereof, as compared to a corresponding non-transformed wild type non-human organism or a part thereof; and
[72769] (b) growing the non-human organism or a part thereof under conditions which permit the production of malate or a composition comprising malate in said non-human organism or in the culture medium surrounding said non-human organism.

[72770] Accordingly, the present invention relates to a process for the production of succinate, which comprises
[72771] (a) increasing or generating the activity of a ABC transporter ATP binding component in the cytosol of a cell of a non-human organism or a part thereof, preferably a microorganism, a plant cell, a plant or a part thereof, as compared to a corresponding non-transformed wild type non-human organism or a part thereof; and
[72772] (b) growing the non-human organism or a part thereof under conditions which permit the production of succinate or a composition comprising succinate in said non-human organism or in the culture medium surrounding said non-human organism.

[72773] Accordingly, the present invention relates to a process for the production of fumarate, which comprises
[72774] (a) increasing or generating the activity of a oxireductase in the cytosol of a cell of a non-human organism or a part thereof, preferably a microorganism, a plant cell, a plant or a part thereof, as compared to a corresponding non-transformed wild type non-human organism or a part thereof; and
[72775] (b) growing the non-human organism or a part thereof under conditions which permit the production of fumarate or a composition comprising fumarate in said non-human organism or in the culture medium surrounding said non-human organism.

[72776] Accordingly, the present invention relates to a process for the production of succinate, which comprises
[72777] (a) increasing or generating the activity of a phosphatase in the cytosol of a cell of a non-human organism or a part thereof, preferably a microorganism, a plant cell, a plant or a part thereof, as compared to a corresponding non-transformed wild type non-human organism or a part thereof; and
[72778] (b) growing the non-human organism or a part thereof under conditions which permit the production of succinate or a composition comprising succinate in said non-human organism or in the culture medium surrounding said non-human organism.

[72779] Accordingly, the present invention relates to a process for the production of citramalate, which comprises
[72780] (a) increasing or generating the activity of a CDP-diacylglycerol-glycerol-3-phosphate 3-phosphatidyltransferase in the cytosol of a cell of a non-human organism or a part thereof, preferably a microorganism, a plant cell, a plant or a part thereof, as compared to a corresponding non-transformed wild type non-human organism or a part thereof; and
[72781] (b) growing the non-human organism or a part thereof under conditions which permit the production of citramalate or a composition comprising citramalate in said non-human organism or in the culture medium surrounding said non-human organism.

[72782] Accordingly, the present invention relates to a process for the production of malate, which comprises
[72783] (a) increasing or generating the activity of a CDP-diacylglycerol-glycerol-3-phosphate 3-phosphatidyltransferase in the cytosol of a cell of a non-human organism or a part thereof, preferably a microorganism, a plant cell, a plant or a part thereof, as compared to a corresponding non-transformed wild type non-human organism or a part thereof; and
[72784] (b) growing the non-human organism or a part thereof under conditions which permit the production of malate or a composition comprising malate in said non-human organism or in the culture medium surrounding said non-human organism.

[72785] Accordingly, the present invention relates to a process for the production of succinate, which comprises
[72786] (a) increasing or generating the activity of a adenylate kinase in the cytosol of a cell of a non-human organism or a part thereof, preferably a microorganism, a plant cell, a plant or a part thereof, as compared to a corresponding non-transformed wild type non-human organism or a part thereof; and
[72787] (b) growing the non-human organism or a part thereof under conditions which permit the production of succinate or a composition comprising succinate in said non-human organism or in the culture medium surrounding said non-human organism.

[72788] Accordingly, the present invention relates to a process for the production of citramalate, which comprises
[72789] (a) increasing or generating the activity of a cation-transporting ATPase in the cytosol of a cell of a non-human organism or a part thereof, preferably a microorganism, a plant cell, a plant or a part thereof, as compared to a corresponding non-transformed wild type non-human organism or a part thereof; and
[72790] (b) growing the non-human organism or a part thereof under conditions which permit the production of citramalate or a composition comprising citramalate in said non-human organism or in the culture medium surrounding said non-human organism.

[72791] Accordingly, the present invention relates to a process for the production of malate, which comprises
[72792] (a) increasing or generating the activity of a cation-transporting ATPase in the cytosol of a cell of a non-human organism or a part thereof, preferably a microorganism, a plant cell, a plant or a part thereof, as compared to a corresponding non-transformed wild type non-human organism or a part thereof; and
[72793] (b) growing the non-human organism or a part thereof under conditions which permit the production of malate or a composition comprising malate in said non-human organism or in the culture medium surrounding said non-human organism.

[72794] Accordingly, the present invention relates to a process for the production of fumarate, which comprises
[72795] (a) increasing or generating the activity of a fumarate hydratase in the cytosol of a cell of a non-human organism or a part thereof, preferably a microorganism, a plant cell, a plant or a part thereof, as compared to a corresponding non-transformed wild type non-human organism or a part thereof; and
[72796] (b) growing the non-human organism or a part thereof under conditions which permit the production of fumarate or a composition comprising fumarate in said non-human organism or in the culture medium surrounding said non-human organism.

[72797] Accordingly, the present invention relates to a process for the production of citramalate, which comprises
[72798] (a) increasing or generating the activity of a oxidoreductase in the cytosol of a cell of a non-human organism or a part thereof, preferably a microorganism, a plant cell, a plant or a part thereof, as compared to a corresponding non-transformed wild type non-human organism or a part thereof; and
[72799] (b) growing the non-human organism or a part thereof under conditions which permit the production of citramalate or a composition comprising citramalate in said non-human organism or in the culture medium surrounding said non-human organism.

[72800] Accordingly, the present invention relates to a process for the production of fumarate, which comprises
[72801] (a) increasing or generating the activity of a bifunctional purine biosynthesis protein in the cytosol of a cell of a non-human organism or a part thereof, preferably a microorganism, a plant cell, a plant or a part thereof, as compared to a corresponding non-transformed wild type non-human organism or a part thereof; and
[72802] (b) growing the non-human organism or a part thereof under conditions which permit the production of fumarate or a composition comprising fumarate in said non-human organism or in the culture medium surrounding said non-human organism.

[72803] Accordingly, the present invention relates to a process for the production of citramalate, which comprises
[72804] (a) increasing or generating the activity of a malate dehydrogenase in the cytosol of a cell of a non-human organism or a part thereof, preferably a microorganism, a plant cell, a plant or a part thereof, as compared to a corresponding non-transformed wild type non-human organism or a part thereof; and
[72805] (b) growing the non-human organism or a part thereof under conditions which permit the production of citramalate or a composition comprising citramalate in said non-human organism or in the culture medium surrounding said non-human organism.

[72806] Accordingly, the present invention relates to a process for the production of succinate, which comprises
[72807] (a) increasing or generating the activity of a malate dehydrogenase in the cytosol of a cell of a non-human organism or a part thereof, preferably a microorganism, a plant cell, a plant or a part thereof, as compared to a corresponding non-transformed wild type non-human organism or a part thereof; and
[72808] (b) growing the non-human organism or a part thereof under conditions which permit the production of succinate or a composition comprising succinate in said non-human organism or in the culture medium surrounding said non-human organism.

[72809] Accordingly, the present invention relates to a process for the production of glycerate, which comprises
[72810] (a) increasing or generating the activity of a dihydrolipoamide dehydrogenase in the cytosol of a cell of a non-human organism or a part thereof, preferably a microorganism, a plant cell, a plant or a part thereof, as compared to a corresponding non-transformed wild type non-human organism or a part thereof; and
[72811] (b) growing the non-human organism or a part thereof under conditions which permit the production of glycerate or a composition comprising glycerate in said non-human organism or in the culture medium surrounding said non-human organism.

[72812] Accordingly, the present invention relates to a process for the production of succinate, which comprises
[72813] (a) increasing or generating the activity of a dihydrolipoamide dehydrogenase in the cytosol of a cell of a non-human organism or a part thereof, preferably a microorganism, a plant cell, a plant or a part thereof, as compared to a corresponding non-transformed wild type non-human organism or a part thereof; and
[72814] (b) growing the non-human organism or a part thereof under conditions which permit the production of succinate or a composition comprising succinate in said non-human organism or in the culture medium surrounding said non-human organism.

[72815] Accordingly, the present invention relates to a process for the production of succinate, which comprises
[72816] (a) increasing or generating the activity of a slr1170-protein in the cytosol of a cell of a non-human organism or a part thereof, preferably a microorganism, a plant cell, a plant or a part thereof, as compared to a corresponding non-transformed wild type non-human organism or a part thereof; and
[72817] (b) growing the non-human organism or a part thereof under conditions which permit the production of succinate or a composition comprising succinate in said non-human organism or in the culture medium surrounding said non-human organism.

[72818] Accordingly, the present invention relates to a process for the production of fumarate, which comprises
[72819] (a) increasing or generating the activity of a phosphate import ATP-binding protein in the cytosol of a cell of a non-human organism or a part thereof, preferably a microorganism, a plant cell, a plant or a part thereof, as compared to a corresponding non-transformed wild type non-human organism or a part thereof; and
[72820] (b) growing the non-human organism or a part thereof under conditions which permit the production of fumarate or a composition comprising fumarate in said non-human organism or in the culture medium surrounding said non-human organism.

[72821] Accordingly, the present invention relates to a process for the production of succinate, which comprises
[72822] (a) increasing or generating the activity of a gamma-glutamyltranspeptidase in the cytosol of a cell of a non-human organism or a part thereof, preferably a microorganism, a plant cell, a plant or a part thereof, as compared to a corresponding non-transformed wild type non-human organism or a part thereof; and
[72823] (b) growing the non-human organism or a part thereof under conditions which permit the production of succinate or a composition comprising succinate in said non-human organism or in the culture medium surrounding said non-human organism.

[72824] Accordingly, the present invention relates to a process for the production of malate, which comprises
[72825] (a) increasing or generating the activity of a photosystem II protein in the cytosol of a cell of a non-human organism or a part thereof, preferably a microorganism, a plant cell, a plant or a part thereof, as compared to a corresponding non-transformed wild type non-human organism or a part thereof; and
[72826] (b) growing the non-human organism or a part thereof under conditions which permit the production of malate or a composition comprising malate in said non-human organism or in the culture medium surrounding said non-human organism.

[72827] Accordingly, the present invention relates to a process for the production of fumarate, which comprises
[72828] (a) increasing or generating the activity of a malonyl CoA-acyl carrier protein transacylase in the cytosol of a cell of a non-human organism or a part thereof, preferably a microorganism, a plant cell, a plant or a part thereof, as compared to a corresponding non-transformed wild type non-human organism or a part thereof; and
[72829] (b) growing the non-human organism or a part thereof under conditions which permit the production of fumarate or a composition comprising fumarate in said non-human organism or in the culture medium surrounding said non-human organism.

[72830] Accordingly, the present invention relates to a process for the production of succinate, which comprises
[72831] (a) increasing or generating the activity of a malonyl CoA-acyl carrier protein transacylase in the cytosol of a cell of a non-human organism or a part thereof, preferably a microorganism, a plant cell, a plant or a part thereof, as compared to a corresponding non-transformed wild type non-human organism or a part thereof; and
[72832] (b) growing the non-human organism or a part thereof under conditions which permit the production of succinate or a composition comprising succinate in said non-human organism or in the culture medium surrounding said non-human organism.

[72833] Accordingly, the present invention relates to a process for the production of glycerate, which comprises
[72834] (a) increasing or generating the activity of a photosystem I reaction centre subunit in the cytosol of a cell of a non-human organism or a part thereof, preferably a microorganism, a plant cell, a plant or a part thereof, as compared to a corresponding non-transformed wild type non-human organism or a part thereof; and
[72835] (b) growing the non-human organism or a part thereof under conditions which permit the production of glycerate or a composition comprising glycerate in said non-human organism or in the culture medium surrounding said non-human organism.

[72836] Accordingly, the present invention relates to a process for the production of fumarate, which comprises
[72837] (a) increasing or generating the activity of a Sec-independent protein translocase subunit in the cytosol of a cell of a non-human organism or a part thereof, preferably a microorganism, a plant cell, a plant or a part thereof, as compared to a corresponding non-transformed wild type non-human organism or a part thereof; and
[72838] (b) growing the non-human organism or a part thereof under conditions which permit the production of fumarate or a composition comprising fumarate in said non-human organism or in the culture medium surrounding said non-human organism.

[72839] Accordingly, the present invention relates to a process for the production of succinate, which comprises
[72840] (a) increasing or generating the activity of a Sec-independent protein translocase subunit in the cytosol of a cell of a non-human organism or a part thereof, preferably a microorganism, a plant cell, a plant or a part thereof, as compared to a corresponding non-transformed wild type non-human organism or a part thereof; and
[72841] (b) growing the non-human organism or a part thereof under conditions which permit the production of succinate or a composition comprising succinate in said non-human organism or in the culture medium surrounding said non-human organism.

[72842] Accordingly, the present invention relates to a process for the production of citramalate, which comprises
[72843] (a) increasing or generating the activity of a 2-isopropylmalate synthase in the cytosol of a cell of a non-human organism or a part thereof, preferably a microorganism, a plant cell, a plant or a part thereof, as compared to a corresponding non-transformed wild type non-human organism or a part thereof; and
[72844] (b) growing the non-human organism or a part thereof under conditions which permit the production of citramalate or a composition comprising citramalate in said non-human organism or in the culture medium surrounding said non-human organism.

[72845] Accordingly, the present invention relates to a process for the production of fumarate, which comprises
[72846] (a) increasing or generating the activity of a multiple antibiotic resistance protein in the cytosol of a cell of a non-human organism or a part thereof, preferably a microorganism, a plant cell, a plant or a part thereof, as compared to a corresponding non-transformed wild type non-human organism or a part thereof; and
[72847] (b) growing the non-human organism or a part thereof under conditions which permit the production of fumarate or a composition comprising fumarate in said non-human organism or in the culture medium surrounding said non-human organism.

[72848] Accordingly, the present invention relates to a process for the production of succinate, which comprises
[72849] (a) increasing or generating the activity of a multiple antibiotic resistance protein in the cytosol of a cell of a non-human organism or a part thereof, preferably a microorganism, a plant cell, a plant or a part thereof, as compared to a corresponding non-transformed wild type non-human organism or a part thereof; and
[72850] (b) growing the non-human organism or a part thereof under conditions which permit the production of succinate or a composition comprising succinate in said non-human organism or in the culture medium surrounding said non-human organism.

[72851] Accordingly, the present invention relates to a process for the production of fumarate, which comprises
[72852] (a) increasing or generating the activity of a TTC1386-protein in the cytosol of a cell of a non-human organism or a part thereof, preferably a microorganism, a plant cell, a plant or a part thereof, as compared to a corresponding non-transformed wild type non-human organism or a part thereof; and
[72853] (b) growing the non-human organism or a part thereof under conditions which permit the production of fumarate or a composition comprising fumarate in said non-human organism or in the culture medium surrounding said non-human organism.

[72854] Accordingly, the present invention relates to a process for the production of malate, which comprises
[72855] (a) increasing or generating the activity of a TTC1386-protein in the cytosol of a cell of a non-human organism or a part thereof, preferably a microorganism, a plant cell, a plant or a part thereof, as compared to a corresponding non-transformed wild type non-human organism or a part thereof; and
[72856] (b) growing the non-human organism or a part thereof under conditions which permit the production of malate or a composition comprising malate in said non-human organism or in the culture medium surrounding said non-human organism.

[72857] Accordingly, the present invention relates to a process for the production of succinate, which comprises
[72858] (a) increasing or generating the activity of a TTC1386-protein in the cytosol of a cell of a non-human organism or a part thereof, preferably a microorganism, a plant cell, a plant or a part thereof, as compared to a corresponding non-transformed wild type non-human organism or a part thereof; and
[72859] (b) growing the non-human organism or a part thereof under conditions which permit the production of succinate or a composition comprising succinate in said non-human organism or in the culture medium surrounding said non-human organism.

[72860] Accordingly, the present invention relates to a process for the production of citramalate, which comprises
[72861] (a) increasing or generating the activity of a oxidoreductase subunit in the cytosol of a cell of a non-human organism or a part thereof, preferably a microorganism, a plant cell, a plant or a part thereof, as compared to a corresponding non-transformed wild type non-human organism or a part thereof; and
[72862] (b) growing the non-human organism or a part thereof under conditions which permit the production of citramalate or a composition comprising citramalate in said non-human organism or in the culture medium surrounding said non-human organism.

[72863] Accordingly, the present invention relates to a process for the production of glycerate, which comprises
[72864] (a) increasing or generating the activity of a oxidoreductase subunit in the cytosol of a cell of a non-human organism or a part thereof, preferably a microorganism, a plant cell, a plant or a part thereof, as compared to a corresponding non-transformed wild type non-human organism or a part thereof; and
[72865] (b) growing the non-human organism or a part thereof under conditions which permit the production of glycerate or a composition comprising glycerate in said non-human organism or in the culture medium surrounding said non-human organism.

[72866] Accordingly, the present invention relates to a process for the production of malate, which comprises
[72867] (a) increasing or generating the activity of a oxidoreductase subunit in the cytosol of a cell of a non-human organism or a part thereof, preferably a microorganism, a plant cell, a plant or a part thereof, as compared to a corresponding non-transformed wild type non-human organism or a part thereof; and
[72868] (b) growing the non-human organism or a part thereof under conditions which permit the production of malate or a composition comprising malate in said non-human organism or in the culture medium surrounding said non-human organism.

[72869] Accordingly, the present invention relates to a process for the production of fumarate, which comprises
[72870] (a) increasing or generating the activity of a XM_{—}473199-protein in the cytosol of a cell of a non-human organism or a part thereof, preferably a microorganism, a plant cell, a plant or a part thereof, as compared to a corresponding non-transformed wild type non-human organism or a part thereof; and
[72871] (b) growing the non-human organism or a part thereof under conditions which permit the production of fumarate or a composition comprising fumarate in said non-human organism or in the culture medium surrounding said non-human organism.

[72872] Accordingly, the present invention relates to a process for the production of malate, which comprises
[72873] (a) increasing or generating the activity of a XM_{—}473199-protein in the cytosol of a cell of a non-human organism or a part thereof, preferably a microorganism, a plant cell, a plant or a part thereof, as compared to a corresponding non-transformed wild type non-human organism or a part thereof; and
[72874] (b) growing the non-human organism or a part thereof under conditions which permit the production of malate or a composition comprising malate in said non-human organism or in the culture medium surrounding said non-human organism.

[72875] Accordingly, the present invention relates to a process for the production of succinate, which comprises
[72876] (a) increasing or generating the activity of a XM_{—}473199-protein in the cytosol of a cell of a non-human organism or a part thereof, preferably a microorganism, a plant cell, a plant or a part thereof, as compared to a corresponding non-transformed wild type non-human organism or a part thereof; and
[72877] (b) growing the non-human organism or a part thereof under conditions which permit the production of succinate or a composition comprising succinate in said non-human organism or in the culture medium surrounding said non-human organism.

[72878] Accordingly, the present invention relates to a process for the production of succinate, which comprises
[72879] (a) increasing or generating the activity of a glutamate dehydrogenase in the cytosol of a cell of a non-human organism or a part thereof, preferably a microorganism, a plant cell, a plant or a part thereof, as compared to a corresponding non-transformed wild type non-human organism or a part thereof; and
[72880] (b) growing the non-human organism or a part thereof under conditions which permit the production of succinate or a composition comprising succinate in said non-human organism or in the culture medium surrounding said non-human organism.

[72881] Accordingly, the present invention relates to a process for the production of citramalate, which comprises
[72882] (a) increasing or generating the activity of a acetyl-CoA hydrolase in the cytosol of a cell of a non-human organism or a part thereof, preferably a microorganism, a plant cell, a plant or a part thereof, as compared to a corresponding non-transformed wild type non-human organism or a part thereof; and
[72883] (b) growing the non-human organism or a part thereof under conditions which permit the production of citramalate or a composition comprising citramalate in said non-human organism or in the culture medium surrounding said non-human organism.

[72884] Accordingly, the present invention relates to a process for the production of pyruvate, which comprises
[72885] (a) increasing or generating the activity of a acetyl-CoA hydrolase in the cytosol of a cell of a non-human organism or a part thereof, preferably a microorganism, a plant cell, a plant or a part thereof, as compared to a corresponding non-transformed wild type non-human organism or a part thereof; and
[72886] (b) growing the non-human organism or a part thereof under conditions which permit the production of pyruvate or a composition comprising pyruvate in said non-human organism or in the culture medium surrounding said non-human organism.

[72887] Accordingly, the present invention relates to a process for the production of malate, which comprises
[72888] (a) increasing or generating the activity of a pyruvate carboxylase in the cytosol of a cell of a non-human organism or a part thereof, preferably a microorganism, a plant cell, a plant or a part thereof, as compared to a corresponding non-transformed wild type non-human organism or a part thereof; and
[72889] (b) growing the non-human organism or a part thereof under conditions which permit the production of malate or a composition comprising malate in said non-human organism or in the culture medium surrounding said non-human organism.

[72890] Accordingly, the present invention relates to a process for the production of fumarate, which comprises
[72891] (a) increasing or generating the activity of a ycr102c-protein in the cytosol of a cell of a non-human organism or a part thereof, preferably a microorganism, a plant cell, a plant or a part thereof, as compared to a corresponding non-transformed wild type non-human organism or a part thereof; and
[72892] (b) growing the non-human organism or a part thereof under conditions which permit the production of fumarate or a composition comprising fumarate in said non-human organism or in the culture medium surrounding said non-human organism.

[72893] Accordingly, the present invention relates to a process for the production of fumarate, which comprises
[72894] (a) increasing or generating the activity of a YDL159W-A-protein in the cytosol of a cell of a non-human organism or a part thereof, preferably a microorganism, a plant cell, a plant or a part thereof, as compared to a corresponding non-transformed wild type non-human organism or a part thereof; and
[72895] (b) growing the non-human organism or a part thereof under conditions which permit the production of fumarate or a composition comprising fumarate in said non-human organism or in the culture medium surrounding said non-human organism.

[72896] Accordingly, the present invention relates to a process for the production of fumarate, which comprises
[72897] (a) increasing or generating the activity of a coproporphyrinogen III oxidase in the cytosol of a cell of a non-human organism or a part thereof, preferably a microorganism, a plant cell, a plant or a part thereof, as compared to a corresponding non-transformed wild type non-human organism or a part thereof; and
[72898] (b) growing the non-human organism or a part thereof under conditions which permit the production of fumarate or a composition comprising fumarate in said non-human organism or in the culture medium surrounding said non-human organism.

[72899] Accordingly, the present invention relates to a process for the production of succinate, which comprises
[72900] (a) increasing or generating the activity of a coproporphyrinogen III oxidase in the cytosol of a cell of a non-human organism or a part thereof, preferably a microorganism, a plant cell, a plant or a part thereof, as compared to a corresponding non-transformed wild type non-human organism or a part thereof; and
[72901] (b) growing the non-human organism or a part thereof under conditions which permit the production of succinate or a composition comprising succinate in said non-human organism or in the culture medium surrounding said non-human organism.

[72902] Accordingly, the present invention relates to a process for the production of malate, which comprises
[72903] (a) increasing or generating the activity of a ygl237c-protein in the cytosol of a cell of a non-human organism or a part thereof, preferably a microorganism, a plant cell, a plant or a part thereof, as compared to a corresponding non-transformed wild type non-human organism or a part thereof; and
[72904] (b) growing the non-human organism or a part thereof under conditions which permit the production of malate or a composition comprising malate in said non-human organism or in the culture medium surrounding said non-human organism.

[72905] Accordingly, the present invention relates to a process for the production of succinate, which comprises
[72906] (a) increasing or generating the activity of a ygl237c-protein in the cytosol of a cell of a non-human organism or a part thereof, preferably a microorganism, a plant cell, a plant or a part thereof, as compared to a corresponding non-transformed wild type non-human organism or a part thereof; and
[72907] (b) growing the non-human organism or a part thereof under conditions which permit the production of succinate or a composition comprising succinate in said non-human organism or in the culture medium surrounding said non-human organism.

[72908] Accordingly, the present invention relates to a process for the production of fumarate, which comprises
[72909] (a) increasing or generating the activity of a YGR193C-protein in the cytosol of a cell of a non-human organism or a part thereof, preferably a microorganism, a plant cell, a plant or a part thereof, as compared to a corresponding non-transformed wild type non-human organism or a part thereof; and
[72910] (b) growing the non-human organism or a part thereof under conditions which permit the production of fumarate or a composition comprising fumarate in said non-human organism or in the culture medium surrounding said non-human organism.

[72911] Accordingly, the present invention relates to a process for the production of malate, which comprises
[72912] (a) increasing or generating the activity of a YGR193C-protein in the cytosol of a cell of a non-human organism or a part thereof, preferably a microorganism, a plant cell, a plant or a part thereof, as compared to a corresponding non-transformed wild type non-human organism or a part thereof; and
[72913] (b) growing the non-human organism or a part thereof under conditions which permit the production of malate or a composition comprising malate in said non-human organism or in the culture medium surrounding said non-human organism.

[72914] Accordingly, the present invention relates to a process for the production of succinate, which comprises
[72915] (a) increasing or generating the activity of a YGR193C-protein in the cytosol of a cell of a non-human organism or a part thereof, preferably a microorganism, a plant cell, a plant or a part thereof, as compared to a corresponding non-transformed wild type non-human organism or a part thereof; and
[72916] (b) growing the non-human organism or a part thereof under conditions which permit the production of succinate or a composition comprising succinate in said non-human organism or in the culture medium surrounding said non-human organism.

[72917] Accordingly, the present invention relates to a process for the production of malate, which comprises
[72918] (a) increasing or generating the activity of a ygr221 c-protein in the cytosol of a cell of a non-human organism or a part thereof, preferably a microorganism, a plant cell, a plant or a part thereof, as compared to a corresponding non-transformed wild type non-human organism or a part thereof; and
[72919] (b) growing the non-human organism or a part thereof under conditions which permit the production of malate or a composition comprising malate in said non-human organism or in the culture medium surrounding said non-human organism.

[72920] Accordingly, the present invention relates to a process for the production of citrate, which comprises
[72921] (a) increasing or generating the activity of a glycerol kinase in the cytosol of a cell of a non-human organism or a part thereof, preferably a microorganism, a plant cell, a plant or a part thereof, as compared to a corresponding non-transformed wild type non-human organism or a part thereof; and
[72922] (b) growing the non-human organism or a part thereof under conditions which permit the production of citrate or a composition comprising citrate in said non-human organism or in the culture medium surrounding said non-human organism.

[72923] Accordingly, the present invention relates to a process for the production of malate, which comprises
[72924] (a) increasing or generating the activity of a yhr131c-protein in the cytosol of a cell of a non-human organism or a part thereof, preferably a microorganism, a plant cell, a plant or a part thereof, as compared to a corresponding non-transformed wild type non-human organism or a part thereof; and
[72925] (b) growing the non-human organism or a part thereof under conditions which permit the pro-duction of malate or a composition comprising malate in said non-human organism or in the culture medium surrounding said non-human organism.

[72926] Accordingly, the present invention relates to a process for the production of succinate, which comprises
[72927] (a) increasing or generating the activity of a yhr207c-protein in the cytosol of a cell of a non-human organism or a part thereof, preferably a microorganism, a plant cell, a plant or a part thereof, as compared to a corresponding non-transformed wild type non-human organism or a part thereof; and
[72928] (b) growing the non-human organism or a part thereof under conditions which permit the production of succinate or a composition comprising succinate in said non-human organism or in the culture medium surrounding said non-human organism.

[72929] Accordingly, the present invention relates to a process for the production of glycerate, which comprises
[72930] (a) increasing or generating the activity of a DnaJ-like chaperone in the cytosol of a cell of a non-human organism or a part thereof, preferably a microorganism, a plant cell, a plant or a part thereof, as compared to a corresponding non-transformed wild type non-human organism or a part thereof; and
[72931] (b) growing the non-human organism or a part thereof under conditions which permit the production of glycerate or a composition comprising glycerate in said non-human organism or in the culture medium surrounding said non-human organism.

[72932] Accordingly, the present invention relates to a process for the production of oxalate, which comprises
[72933] (a) increasing or generating the activity of a hexose transporter in the cytosol of a cell of a non-human organism or a part thereof, preferably a microorganism, a plant cell, a plant or a part thereof, as compared to a corresponding non-transformed wild type non-human organism or a part thereof; and
[72934] (b) growing the non-human organism or a part thereof under conditions which permit the production of oxalate or a composition comprising oxalate in said non-human organism or in the culture medium surrounding said non-human organism.

[72935] Accordingly, the present invention relates to a process for the production of citramalate, which comprises
[72936] (a) increasing or generating the activity of a branched chain aminotransferase in the cytosol of a cell of a non-human organism or a part thereof, preferably a microorganism, a plant cell, a plant or a part thereof, as compared to a corresponding non-transformed wild type non-human organism or a part thereof; and
[72937] (b) growing the non-human organism or a part thereof under conditions which permit the production of citramalate or a composition comprising citramalate in said non-human organism or in the culture medium surrounding said non-human organism.

[72938] Accordingly, the present invention relates to a process for the production of fumarate, which comprises
[72939] (a) increasing or generating the activity of a polygalacturonase in the cytosol of a cell of a non-human organism or a part thereof, preferably a microorganism, a plant cell, a plant or a part thereof, as compared to a corresponding non-transformed wild type non-human organism or a part thereof; and
[72940] (b) growing the non-human organism or a part thereof under conditions which permit the production of fumarate or a composition comprising fumarate in said non-human organism or in the culture medium surrounding said non-human organism.

[72941] Accordingly, the present invention relates to a process for the production of malate, which comprises
[72942] (a) increasing or generating the activity of a polygalacturonase in the cytosol of a cell of a non-human organism or a part thereof, preferably a microorganism, a plant cell, a plant or a part thereof, as compared to a corresponding non-transformed wild type non-human organism or a part thereof; and
[72943] (b) growing the non-human organism or a part thereof under conditions which permit the production of malate or a composition comprising malate in said non-human organism or in the culture medium surrounding said non-human organism.

[72944] Accordingly, the present invention relates to a process for the production of malate, which comprises
[72945] (a) increasing or generating the activity of a YKL038W-protein in the cytosol of a cell of a non-human organism or a part thereof, preferably a microorganism, a plant cell, a plant or a part thereof, as compared to a corresponding non-transformed wild type non-human organism or a part thereof; and
[72946] (b) growing the non-human organism or a part thereof under conditions which permit the production of malate or a composition comprising malate in said non-human organism or in the culture medium surrounding said non-human organism.

[72947] Accordingly, the present invention relates to a process for the production of vitamin c and/or threonic acid, which comprises
[72948] (a) increasing or generating the activity of a YKL140W-protein in the cytosol of a cell of a non-human organism or a part thereof, preferably a microorganism, a plant cell, a plant or a part thereof, as compared to a corresponding non-transformed wild type non-human organism or a part thereof; and
[72949] (b) growing the non-human organism or a part thereof under conditions which permit the production of vitamin c and/or threonic acid or a composition comprising vitamin c and/or threonic acid in said non-human organism or in the culture medium surrounding said non-human organism.

[72950] Accordingly, the present invention relates to a process for the production of fumarate, which comprises
[72951] (a) increasing or generating the activity of a ylr065c-protein in the cytosol of a cell of a non-human organism or a part thereof, preferably a microorganism, a plant cell, a plant or a part thereof, as compared to a corresponding non-transformed wild type non-human organism or a part thereof; and
[72952] (b) growing the non-human organism or a part thereof under conditions which permit the production of fumarate or a composition comprising fumarate in said non-human organism or in the culture medium surrounding said non-human organism.

[72953] Accordingly, the present invention relates to a process for the production of succinate, which comprises
[72954] (a) increasing or generating the activity of a isocitrate dehydrogenase in the cytosol of a cell of a non-human organism or a part thereof, preferably a microorganism, a plant cell, a plant or a part thereof, as compared to a corresponding non-transformed wild type non-human organism or a part thereof; and
[72955] (b) growing the non-human organism or a part thereof under conditions which permit the production of succinate or a composition comprising succinate in said non-human organism or in the culture medium surrounding said non-human organism.

[72956] Accordingly, the present invention relates to a process for the production of fumarate, which comprises
[72957] (a) increasing or generating the activity of a ylr326w-protein in the cytosol of a cell of a non-human organism or a part thereof, preferably a microorganism, a plant cell, a plant or a part thereof, as compared to a corresponding non-transformed wild type non-human organism or a part thereof; and
[72958] (b) growing the non-human organism or a part thereof under conditions which permit the production of fumarate or a composition comprising fumarate in said non-human organism or in the culture medium surrounding said non-human organism.

[72959] Accordingly, the present invention relates to a process for the production of glycerate, which comprises
[72960] (a) increasing or generating the activity of a ylr326w-protein in the cytosol of a cell of a non-human organism or a part thereof, preferably a microorganism, a plant cell, a plant or a part thereof, as compared to a corresponding non-transformed wild type non-human organism or a part thereof; and
[72961] (b) growing the non-human organism or a part thereof under conditions which permit the production of glycerate or a composition comprising glycerate in said non-human organism or in the culture medium surrounding said non-human organism.

[72962] Accordingly, the present invention relates to a process for the production of vitamin c and/or threonic acid, which comprises
[72963] (a) increasing or generating the activity of a ylr326w-protein in the cytosol of a cell of a non-human organism or a part thereof, preferably a microorganism, a plant cell, a plant or a part thereof, as compared to a corresponding non-transformed wild type non-human organism or a part thereof; and
[72964] (b) growing the non-human organism or a part thereof under conditions which permit the production of vitamin c and/or threonic acid or a composition comprising vitamin c and/or threonic acid in said non-human organism or in the culture medium surrounding said non-human organism.

[72965] Accordingly, the present invention relates to a process for the production of fumarate, which comprises
[72966] (a) increasing or generating the activity of a yml084w-protein in the cytosol of a cell of a non-human organism or a part thereof, preferably a microorganism, a plant cell, a plant or a part thereof, as compared to a corresponding non-transformed wild type non-human organism or a part thereof; and
[72967] (b) growing the non-human organism or a part thereof under conditions which permit the production of fumarate or a composition comprising fumarate in said non-human organism or in the culture medium surrounding said non-human organism.

[72968] Accordingly, the present invention relates to a process for the production of succinate, which comprises
[72969] (a) increasing or generating the activity of a yml084w-protein in the cytosol of a cell of a non-human organism or a part thereof, preferably a microorganism, a plant cell, a plant or a part thereof, as compared to a corresponding non-transformed wild type non-human organism or a part thereof; and
[72970] (b) growing the non-human organism or a part thereof under conditions which permit the production of succinate or a composition comprising succinate in said non-human organism or in the culture medium surrounding said non-human organism.

[72971] Accordingly, the present invention relates to a process for the production of citramalate, which comprises
[72972] (a) increasing or generating the activity of a yol073c-protein in the cytosol of a cell of a non-human organism or a part thereof, preferably a microorganism, a plant cell, a plant or a part thereof, as compared to a corresponding non-transformed wild type non-human organism or a part thereof; and
[72973] (b) growing the non-human organism or a part thereof under conditions which permit the production of citramalate or a composition comprising citramalate in said non-human organism or in the culture medium surrounding said non-human organism.

[72974] Accordingly, the present invention relates to a process for the production of malate, which comprises
[72975] (a) increasing or generating the activity of a yol073c-protein in the cytosol of a cell of a non-human organism or a part thereof, preferably a microorganism, a plant cell, a plant or a part thereof, as compared to a corresponding non-transformed wild type non-human organism or a part thereof; and
[72976] (b) growing the non-human organism or a part thereof under conditions which permit the production of malate or a composition comprising malate in said non-human organism or in the culture medium surrounding said non-human organism.

[72977] Accordingly, the present invention relates to a process for the production of vitamin c and/or threonic acid, which comprises
[72978] (a) increasing or generating the activity of a yol160w-protein in the cytosol of a cell of a non-human organism or a part thereof, preferably a microorganism, a plant cell, a plant or a part thereof, as compared to a corresponding non-transformed wild type non-human organism or a part thereof; and
[72979] (b) growing the non-human organism or a part thereof under conditions which permit the production of vitamin c and/or threonic acid or a composition comprising vitamin c and/or threonic acid in said non-human organism or in the culture medium surrounding said non-human organism.

[72980] Accordingly, the present invention relates to a process for the production of malate, which comprises
[72981] (a) increasing or generating the activity of a acetyl-CoA acetyltransferase in the cytosol of a cell of a non-human organism or a part thereof, preferably a microorganism, a plant cell, a plant or a part thereof, as compared to a corresponding non-transformed wild type non-human organism or a part thereof; and
[72982] (b) growing the non-human organism or a part thereof under conditions which permit the production of malate or a composition comprising malate in said non-human organism or in the culture medium surrounding said non-human organism.

[72983] Accordingly, the present invention relates to a process for the production of vitamin c and/or threonic acid, which comprises
[72984] (a) increasing or generating the activity of a ammonium transporter in the cytosol of a cell of a non-human organism or a part thereof, preferably a microorganism, a plant cell, a plant or a part thereof, as compared to a corresponding non-transformed wild type non-human organism or a part thereof; and
[72985] (b) growing the non-human organism or a part thereof under conditions which permit the production of vitamin c and/or threonic acid or a composition comprising vitamin c and/or threonic acid in said non-human organism or in the culture medium surrounding said non-human organism.

[72986] Accordingly, the present invention relates to a process for the production of fumarate, which comprises
[72987] (a) increasing or generating the activity of a 47266012-protein in the cytosol of a cell of a non-human organism or a part thereof, preferably a microorganism, a plant cell, a plant or a part thereof, as compared to a corresponding non-transformed wild type non-human organism or a part thereof; and
[72988] (b) growing the non-human organism or a part thereof under conditions which permit the production of fumarate or a composition comprising fumarate in said non-human organism or in the culture medium surrounding said non-human organism.

[72989] Accordingly, the present invention relates to a process for the production of malate, which comprises
[72990] (a) increasing or generating the activity of a 47266012-protein in the cytosol of a cell of a non-human organism or a part thereof, preferably a microorganism, a plant cell, a plant or a part thereof, as compared to a corresponding non-transformed wild type non-human organism or a part thereof; and
[72991] (b) growing the non-human organism or a part thereof under conditions which permit the production of malate or a composition comprising malate in said non-human organism or in the culture medium surrounding said non-human organism.

[72992] Accordingly, the present invention relates to a process for the production of succinate, which comprises
[72993] (a) increasing or generating the activity of a 47266012-protein in the cytosol of a cell of a non-human organism or a part thereof, preferably a microorganism, a plant cell, a plant or a part thereof, as compared to a corresponding non-transformed wild type non-human organism or a part thereof; and
[72994] (b) growing the non-human organism or a part thereof under conditions which permit the production of succinate or a composition comprising succinate in said non-human organism or in the culture medium surrounding said non-human organism.

[72995] Accordingly, the present invention relates to a process for the production of fumarate, which comprises
[72996] (a) increasing or generating the activity of a 49747384_SOYBEAN-protein in the cytosol of a cell of a non-human organism or a part thereof, preferably a microorganism, a plant cell, a plant or a part thereof, as compared to a corresponding non-transformed wild type non-human organism or a part thereof; and
[72997] (b) growing the non-human organism or a part thereof under conditions which permit the production of fumarate or a composition comprising fumarate in said non-human organism or in the culture medium surrounding said non-human organism.

[72998] Accordingly, the present invention relates to a process for the production of malate, which comprises
[72999] (a) increasing or generating the activity of a 49747384_SOYBEAN-protein in the cytosol of a cell of a non-human organism or a part thereof, preferably a microorganism, a plant cell, a plant or a part thereof, as compared to a corresponding non-transformed wild type non-human organism or a part thereof; and
[73000] (b) growing the non-human organism or a part thereof under conditions which permit the production of malate or a composition comprising malate in said non-human organism or in the culture medium surrounding said non-human organism.

[73001] Accordingly, the present invention relates to a process for the production of succinate, which comprises
[73002] (a) increasing or generating the activity of a 49747384_SOYBEAN-protein in the cytosol of a cell of a non-human organism or a part thereof, preferably a microorganism, a plant cell, a plant or a part thereof, as compared to a corresponding non-transformed wild type non-human organism or a part thereof; and
[73003] (b) growing the non-human organism or a part thereof under conditions which permit the production of succinate or a composition comprising succinate in said non-human organism or in the culture medium surrounding said non-human organism.

[73004] Accordingly, the present invention relates to a process for the production of vitamin c and/or threonic acid, which comprises
[73005] (a) increasing or generating the activity of a 49747384_SOYBEAN-protein in the cytosol of a cell of a non-human organism or a part thereof, preferably a microorganism, a plant cell, a plant or a part thereof, as compared to a corresponding non-transformed wild type non-human organism or a part thereof; and
[73006] (b) growing the non-human organism or a part thereof under conditions which permit the production of vitamin c and/or threonic acid or a composition comprising vitamin c and/or threonic acid in said non-human organism or in the culture medium surrounding said non-human organism.

[73007] Accordingly, the present invention relates to a process for the production of citramalate, which comprises
[73008] (a) increasing or generating the activity of a pyruvate kinase in the cytosol of a cell of a non-human organism or a part thereof, preferably a microorganism, a plant cell, a plant or a part thereof, as compared to a corresponding non-transformed wild type non-human organism or a part thereof; and
[73009] (b) growing the non-human organism or a part thereof under conditions which permit the production of citramalate or a composition comprising citramalate in said non-human organism or in the culture medium surrounding said non-human organism.

[73010] Accordingly, the present invention relates to a process for the production of succinate, which comprises
[73011] (a) increasing or generating the activity of a pyruvate kinase in the cytosol of a cell of a non-human organism or a part thereof, preferably a microorganism, a plant cell, a plant or a part thereof, as compared to a corresponding non-transformed wild type non-human organism or a part thereof; and
[73012] (b) growing the non-human organism or a part thereof under conditions which permit the production of succinate or a composition comprising succinate in said non-human organism or in the culture medium surrounding said non-human organism.

[73013] Accordingly, the present invention relates to a process for the production of citramalate, which comprises
[73014] (a) increasing or generating the activity of a glucose-6-phosphate 1-dehydrogenase in the cytosol of a cell of a non-human organism or a part thereof, preferably a microorganism, a plant cell, a plant or a part thereof, as compared to a corresponding non-transformed wild type non-human organism or a part thereof; and
[73015] (b) growing the non-human organism or a part thereof under conditions which permit the production of citramalate or a composition comprising citramalate in said non-human organism or in the culture medium surrounding said non-human organism.

[73016] Accordingly, the present invention relates to a process for the production of citramalate, which comprises
[73017] (a) increasing or generating the activity of a polypeptide comprising a polypeptide as depicted in the respective line in column 5 or 8 of Table II, application no. 15, or a homolog or a fragment thereof, a consensus sequence or at least one polypeptide motif as depicted in the respective line in column 8 of Table IV, application no. 15, whereby the respective line disclose in column 7 the fine chemical citramalate; or
[73018] increasing or generating the activity of an expression product of one or more nucleic acid molecule(s) comprising a polynucleotide as depicted in the respective line in column 5 or 8 of Table I, application no. 15, preferably the coding region thereof, or a homolog or a fragment thereof, whereby the respective line disclose in column 7 the fine chemical citramalate;
[73019] in the cytosol of a cell of a non-human organism or a part thereof; preferably a microorganism, a plant cell, a plant or a part thereof, as compared to a corresponding non-transformed wild type non-human organism or a part thereof; and
[73020] (b) growing the non-human organism under conditions which permit the production of citramalate, or a composition comprising citramalate in said non-human organism or in the culture medium surrounding said non-human organism.

[73021] Accordingly, the present invention relates to a process for the production of citrate, which comprises
[73022] (a) increasing or generating the activity of a polypeptide comprising a polypeptide as depicted in the respective line in column 5 or 8 of Table II, application no. 15, or a homolog or a fragment thereof, a consensus sequence or at least one polypeptide motif as depicted in the respective line in column 8 of Table IV, application no. 15, whereby the respective line disclose in column 7 the fine chemical citrate; or
[73023] increasing or generating the activity of an expression product of one or more nucleic acid molecule(s) comprising a polynucleotide as depicted in the respective line in column 5 or 8 of Table I, application no. 15, preferably the coding region thereof, or a homolog or a fragment thereof, whereby the respective line disclose in column 7 the fine chemical citrate;
[73024] in the cytosol of a cell of a non-human organism or a part thereof; preferably a microorganism, a plant cell, a plant or a part thereof, as compared to a corresponding non-transformed wild type non-human organism or a part thereof; and
[73025] (b) growing the non-human organism under conditions which permit the production of citrate, or a composition comprising citrate in said non-human organism or in the culture medium surrounding said non-human organism.

[73026] Accordingly, the present invention relates to a process for the production of fumarate, which comprises
[73027] (a) increasing or generating the activity of a polypeptide comprising a polypeptide as depicted in the respective line in column 5 or 8 of Table II, application no. 15, or a homolog or a fragment thereof, a consensus sequence or at least one polypeptide motif as depicted in the respective line in column 8 of Table IV, application no. 15, whereby the respective line disclose in column 7 the fine chemical fumarate; or
[73028] increasing or generating the activity of an expression product of one or more nucleic acid molecule(s) comprising a polynucleotide as depicted in the respective line in column 5 or 8 of Table I, application no. 15, preferably the coding region thereof, or a homolog or a fragment thereof, whereby the respective line disclose in column 7 the fine chemical fumarate;
[73029] in the cytosol of a cell of a non-human organism or a part thereof; preferably a microorganism, a plant cell, a plant or a part thereof, as compared to a corresponding non-transformed wild type non-human organism or a part thereof; and
[73030] (b) growing the non-human organism under conditions which permit the production of fumarate, or a composition comprising fumarate in said non-human organism or in the culture medium surrounding said non-human organism.

[73031] Accordingly, the present invention relates to a process for the production of glycerate, which comprises
[73032] (a) increasing or generating the activity of a polypeptide comprising a polypeptide as depicted in the respective line in column 5 or 8 of Table II, application no. 15, or a homolog or a fragment thereof, a consensus sequence or at least one polypeptide motif as depicted in the respective line in column 8 of Table IV, application no. 15, whereby the respective line disclose in column 7 the fine chemical glycerate; or
[73033] increasing or generating the activity of an expression product of one or more nucleic acid molecule(s) comprising a polynucleotide as depicted in the respective line in column 5 or 8 of Table I, application no. 15, preferably the coding region thereof, or a homolog or a fragment thereof, whereby the respective line disclose in column 7 the fine chemical glycerate;
[73034] in the cytosol of a cell of a non-human organism or a part thereof; preferably a microorganism, a plant cell, a plant or a part thereof, as compared to a corresponding non-transformed wild type non-human organism or a part thereof; and
[73035] (b) growing the non-human organism under conditions which permit the production of glycerate, or a composition comprising glycerate in said non-human organism or in the culture medium surrounding said non-human organism.

[73036] Accordingly, the present invention relates to a process for the production of malate, which comprises
[73037] (a) increasing or generating the activity of a polypeptide comprising a polypeptide as depicted in the respective line in column 5 or 8 of Table II, application no. 15, or a homolog or a fragment thereof, a consensus sequence or at least one polypeptide motif as depicted in the respective line in column 8 of Table IV, application no. 15, whereby the respective line disclose in column 7 the fine chemical malate; or
[73038] increasing or generating the activity of an expression product of one or more nucleic acid molecule(s) comprising a polynucleotide as depicted in the respective line in column 5 or 8 of Table I, application no. 15, preferably the coding region thereof, or a homolog or a fragment thereof, whereby the respective line disclose in column 7 the fine chemical malate;
[73039] in the cytosol of a cell of a non-human organism or a part thereof; preferably a microorganism, a plant cell, a plant or a part thereof, as compared to a corresponding non-transformed wild type non-human organism or a part thereof; and
[73040] (b) growing the non-human organism under conditions which permit the production of malate, or a composition comprising malate in said non-human organism or in the culture medium surrounding said non-human organism.

[73041] Accordingly, the present invention relates to a process for the production of oxalate, which comprises
[73042] (a) increasing or generating the activity of a polypeptide comprising a polypeptide as depicted in the respective line in column 5 or 8 of Table II, application no. 15, or a homolog or a fragment thereof, a consensus sequence or at least one polypeptide motif as depicted in the respective line in column 8 of Table IV, application no. 15, whereby the respective line disclose in column 7 the fine chemical oxalate; or
[73043] increasing or generating the activity of an expression product of one or more nucleic acid molecule(s) comprising a polynucleotide as depicted in the respective line in column 5 or 8 of Table I, application no. 15, preferably the coding region thereof, or a homolog or a fragment thereof, whereby the respective line disclose in column 7 the fine chemical oxalate;
[73044] in the cytosol of a cell of a non-human organism or a part thereof; preferably a microorganism, a plant cell, a plant or a part thereof, as compared to a corresponding non-transformed wild type non-human organism or a part thereof; and
[73045] (b) growing the non-human organism under conditions which permit the production of oxalate, or a composition comprising oxalate in said non-human organism or in the culture medium surrounding said non-human organism.

[73046] Accordingly, the present invention relates to a process for the production of pyruvate, which comprises
[73047] (a) increasing or generating the activity of a polypeptide comprising a polypeptide as depicted in the respective line in column 5 or 8 of Table II, application no. 15, or a homolog or a fragment thereof, a consensus sequence or at least one polypeptide motif as depicted in the respective line in column 8 of Table IV, application no. 15, whereby the respective line disclose in column 7 the fine chemical pyruvate; or
[73048] increasing or generating the activity of an expression product of one or more nucleic acid molecule(s) comprising a polynucleotide as depicted in the respective line in column 5 or 8 of Table I, application no. 15, preferably the coding region thereof, or a homolog or a fragment thereof, whereby the respective line disclose in column 7 the fine chemical pyruvate;
[73049] in the cytosol of a cell of a non-human organism or a part thereof; preferably a microorganism, a plant cell, a plant or a part thereof, as compared to a corresponding non-transformed wild type non-human organism or a part thereof; and
[73050] (b) growing the non-human organism under conditions which permit the production of pyruvate, or a composition comprising pyruvate in said non-human organism or in the culture medium surrounding said non-human organism.

[73051] Accordingly, the present invention relates to a process for the production of succinate, which comprises
[73052] (a) increasing or generating the activity of a polypeptide comprising a polypeptide as depicted in the respective line in column 5 or 8 of Table II, application no. 15, or a homolog or a fragment thereof, a consensus sequence or at least one polypeptide motif as depicted in the respective line in column 8 of Table IV, application no. 15, whereby the respective line disclose in column 7 the fine chemical succinate; or
[73053] increasing or generating the activity of an expression product of one or more nucleic acid molecule(s) comprising a polynucleotide as depicted in the respective line in column 5 or 8 of Table I, application no. 15, preferably the coding region thereof, or a homolog or a fragment thereof, whereby the respective line disclose in column 7 the fine chemical succinate;
[73054] in the cytosol of a cell of a non-human organism or a part thereof; preferably a microorganism, a plant cell, a plant or a part thereof, as compared to a corresponding non-transformed wild type non-human organism or a part thereof; and
[73055] (b) growing the non-human organism under conditions which permit the production of succinate, or a composition comprising succinate in said non-human organism or in the culture medium surrounding said non-human organism.

[73056] Accordingly, the present invention relates to a process for the production of vitamin c and/or threonic acid, which comprises
[73057] (a) increasing or generating the activity of a polypeptide comprising a polypeptide as depicted in the respective line in column 5 or 8 of Table II, application no. 15, or a homolog or a fragment thereof, a consensus sequence or at least one polypeptide motif as depicted in the respective line in column 8 of Table IV, application no. 15, whereby the respective line disclose in column 7 the fine chemical vitamin c and/or threonic acid; or
[73058] increasing or generating the activity of an expression product of one or more nucleic acid molecule(s) comprising a polynucleotide as depicted in the respective line in column 5 or 8 of Table I, application no. 15, preferably the coding region thereof, or a homolog or a fragment thereof, whereby the respective line disclose in column 7 the fine chemical vitamin c and/or threonic acid;
[73059] in the cytosol of a cell of a non-human organism or a part thereof; preferably a microorganism, a plant cell, a plant or a part thereof, as compared to a corresponding non-transformed wild type non-human organism or a part thereof; and
[73060] (b) growing the non-human organism under conditions which permit the production of vitamin c and/or threonic acid, or a composition comprising vitamin c and/or threonic acid in said non-human organism or in the culture medium surrounding said non-human organism.

[73061] In a further embodiment the activity of the polypeptide comprising a polypeptide as depicted in the respective line in column 5 or 8 of Table II, application no. 15, or a homolog or a fragment thereof, a consensus sequence or at least one polypeptide motif as depicted in the respective line in column 8 of Table IV, application no. 15, is increased or generated non-targeted in the above-mentioned process in a microorganism or plant or a part thereof.

[73062] In a further embodiment said polypeptide has the activity of the respective polypeptide represented by a protein comprising a polypeptide as depicted in the respective line in column 5 of Table II, application no. 15.

[73063] In a further embodiment the activity of the expression product of one or more nucleic acid molecule(s) comprising a polynucleotide as depicted in the respective line in column 5 or 8 of Table I, application no. 15, preferably the coding region thereof, or a homolog or a fragment thereof, is increased or generated non-targeted in the above-mentioned process in a microorganism or plant or a part thereof.

[73064] In a further embodiment the activity of the polypeptide comprising a polypeptide as depicted in the respective line in column 5 or 8 of Table II, application no. 15, or a homolog or a fragment thereof, a consensus sequence or at least one polypeptide motif as depicted in the respective line in column 8 of Table IV, application no. 15, is increased or generated in the above-mentioned process in an organelle preferably in plastids or mitochondria, especially in plastids, of a microorganism or plant.

[73065] In a further embodiment said polypeptide has the activity of the respective polypeptide represented by a protein comprising a polypeptide as depicted in the respective line in column 5 of Table II, application no. 15.

[73066] In a further embodiment the activity of the expression product of one or more nucleic acid molecule(s) comprising a polynucleotide as depicted in the respective line in column 5 or 8 of Table I, application no. 15, preferably the coding region thereof, or a homolog or a fragment thereof, is increased or generated in the above-mentioned process in an organelle, preferably in plasids or mitochondria, especially in plastids, of a microorganism or plant.

[73067] In a further embodiment the activity of the polypeptide comprising a polypeptide as depicted in the respective line in column 5 or 8 of Table II, application no. 15, or a homolog or a fragment thereof, a consensus sequence or at least one polypeptide motif as depicted in the respective line in column 8 of Table IV, application no. 15, is increased or generated in the above-mentioned process in the cyctosol of a cell, of a microorganism or plant.

[73068] In a further embodiment said polypeptide has the activity of the respective polypeptide represented by a protein comprising a polypeptide as depicted in the respective line in column 5 of Table II, application no. 15.

[73069] In a further embodiment the activity of the expression product of one or more nucleic acid molecule(s) comprising a polynucleotide as depicted in the respective line in column 5 or 8 of Table I, application no. 15, preferably the coding region thereof, or a homolog or a fragment thereof, is increased or generated in the above-mentioned process in the cytosol of a cell, of a microorganism or plant.

[73070] for the disclosure of this paragraph see [0039.1.7.7] above

[73071] for the disclosure of this paragraph see [0040.1.7.7] above

[73072] for the disclosure of this paragraph see [0041.1.7.7] above

[73073] for the disclosure of this paragraph see [0042.1.7.7] above

[73074] for the disclosure of this paragraph see [0043.1.7.7] above

[73075] for the disclosure of this paragraph see [0044.1.7.7] above

[73076] for the disclosure of this paragraph see [0045.1.7.7] above

[73077] for the disclosure of this paragraph see [0046.1.7.7] above

[73078] for the disclosure of this paragraph see [0047.1.7.7] above

[73079] for the disclosure of this paragraph see [0048.1.7.7] above

[73080] for the disclosure of this paragraph see [0049.1.7.7] above

[73081] for the disclosure of this paragraph see [0050.1.7.7] above

[73082] for the disclosure of this paragraph see [0051.1.7.7] above

[73083] for the disclosure of this paragraph see [0052.1.7.7] above

[73084] for the disclosure of this paragraph see [0053.1.7.7] above

[73085] for the disclosure of this paragraph see [0054.1.7.7] above

[73086] for the disclosure of this paragraph see [0055.1.7.7] above

[73087] for the disclosure of this paragraph see [0056.1.7.7] above

[73088] for the disclosure of this paragraph see [0057.1.7.7] above

[73089] for the disclosure of this paragraph see [0058.1.7.7] above

[73090] for the disclosure of this paragraph see [0059.1.7.7] above

[73091] for the disclosure of this paragraph see [0060.1.7.7] above

[73092] for the disclosure of this paragraph see [0061.1.7.7] above

[73093] for the disclosure of this paragraph see [0062.1.7.7] above

[73094] for the disclosure of this paragraph see [0063.1.7.7] above

[73095] for the disclosure of this paragraph see [0064.1.7.7] above

[73096] for the disclosure of this paragraph see [0065.1.7.7] above

[73097] for the disclosure of this paragraph see [0066.1.7.7] above

[73098] As mentioned above the nucleic acid sequences coding for the proteins as shown in Table II, application no. 15, column 5 or 8, or homologs or fragments thereof, are joined to a nucleic acid sequence encoding a plastidic transit peptide, e.g, if for the nucleic acid molecule in Table I, column 6 the term “plastidic” is indicated. This nucleic acid sequence encoding a transit peptide ensures transport of the protein to the organelle. The nucleic acid sequence of the gene to be expressed and the nucleic acid sequence encoding the transit peptide are operably linked. Therefore the transit peptide coding sequence is fused in frame to the nucleic acid sequence coding for proteins as shown in Table II, application no. 15, column 5 or 8, or homologs or fragments thereof, e.g., if for the nucleic acid molecule in Table I, column 6 the term “plastidic” is indicated.

[73099] for the disclosure of this paragraph see [0068.1.7.7] above

[73100] for the disclosure of this paragraph see [0069.1.7.7] above

[73101] for the disclosure of this paragraph see [0070.1.7.7] above

[73102] for the disclosure of this paragraph see [0071.1.7.7] above

[73103] for the disclosure of this paragraph see [0072.1.7.7] above

[73104] As mentioned above the nucleic acid sequences coding for the proteins as shown in the respective line in Table II, application no. 15, column 5 or 8, or homologs or fragments thereof, are joined to a nucleic acid sequence encoding a mitochondric transit peptide, e.g., if for the respective nucleic acid molecule in Table I, column 6 the term “mitochondric” is indicated. This nucleic acid sequence encoding a transit peptide ensures transport of the protein to the organelle. The nucleic acid sequence of the gene to be expressed and the nucleic acid sequence encoding the transit peptide are operably linked. Therefore the transit peptide encoding sequence is fused in frame to the nucleic acid sequence coding for proteins as shown in the respective line in Table II, application no. 15, column 5 or 8, or homologs or fragments thereof, e.g., if for the nucleic acid molecule in the respective line in Table I, column 6 the term “mitochondric” is indicated.

[73105] for the disclosure of this paragraph see [0074.1.7.7] above

[73106] for the disclosure of this paragraph see [0075.1.7.7] above

[73107] Nucleic acid sequences coding for the transit peptides may be chemically synthesized either in part or wholly according to structure of transit peptide sequences disclosed in the prior art. Said natural or chemically synthesized sequences can be directly linked to the sequences encoding the mature protein or via a linker nucleic acid sequence, which may be typically less than 500 base pairs, preferably less than 450, 400, 350, 300, 250 or 200 base pairs, more preferably less than 150, 100, 90, 80, 70, 60, 50, 40 or 30 base pairs and most preferably less than 25, 20, 15, 12, 9, 6 or 3 base pairs in length and are in frame to the coding sequence. Furthermore favorable nucleic acid sequences encoding transit peptides may comprise sequences derived from more than one biological and/or chemical source and may include a nucleic acid sequence derived from the amino-terminal region of the mature protein, which in its native state is linked to the transit peptide. In a preferred embodiment of the invention said amino-terminal region of the mature protein is typically less than 150 amino acids, preferably less than 140, 130, 120, 110, 100 or 90 amino acids, more preferably less than 80, 70, 60, 50, 40, 35, 30, 25 or 20 amino acids and most preferably less than 19, 18, 17, 16, 15, 14, 13, 12, 11 or 10 amino acids in length. But even shorter or longer stretches are also possible. In addition target sequences, which facilitate the transport of proteins to other cell compartments such as the vacuole, endoplasmic reticulum, golgi complex, glyoxysomes, peroxisomes, mitochondria (in case of a plastidal transit peptide) or plastids, especially chloroplasts (in case of a mitochondric transit peptide) may be also part of the inventive nucleic acid sequence. The proteins translated from said inventive nucleic acid sequences are a kind of fusion proteins that means the nucleic acid sequences encoding the plastidal transit peptide for example the ones shown in Table a, preferably the last one of the Table a are joint to the respective nucleic acid sequences shown in Table I, application no. 15, columns 5 or 8, especially the coding region thereof, or homologs or fragments thereof, in case of nucleic acid sequences being expressed in plastids, and that means the nucleic acid sequences encoding the mitochondric transit peptide for example the ones shown in Table b, preferably the last one of the Table b are joint to the respective nucleic acid sequences shown in Table I, application no. 15, columns 5 or 8, especially the coding region thereof, or homologs or fragments thereof, in case of nucleic acid sequences being expressed in mitochondria. The person skilled in the art is able to join said sequences in a functional manner. Advantageously the transit peptide part is cleaved off from the protein part shown in Table II, application no. 15, columns 5 or 8, or a homolog or fragment thereof, during or after the transport into the organelles, preferably into the plastids or mitochondria, respectively.

[73108] All products of the cleavage of the preferred transit peptide shown in the last line of Table a have preferably the N-terminal amino acid sequences QIA CSS or QIA EFQLTT in front of the start methionine of the respective protein mentioned in Table II, application no. 15, column 5 or 8. or homologs or fragments thereof. Other short amino acid sequences of an range of 1 to 20 amino acids preferable 2 to 15 amino acids, more preferable 3 to 10 amino acids most preferably 4 to 8 amino acids are also possible in front of the start methionine of the protein mentioned in Table II, application no. 15, columns 5 or 8, or homologs or fragments thereof. In case of the amino acid sequence QIA CSS the three amino acids in front of the start methionine are stemming from the LIC (=ligatation independent cloning) cassette. Said short amino acid sequence is preferred in the case of the expression of E. coli genes. In case of the amino acid sequence QIA EFQLTT the six amino acids in front of the start methionine are stemming from the LIC cassette. Said short amino acid sequence is preferred in the case of the expression of S. cerevisiae genes. The skilled worker knowns that other short sequences are also useful in the expression of the respective nucleic acid molecule comprising a polynucleotide as depicted in Table I, application no. 15, column 5 or 8, preferably the coding region thereof, or a homolog or a fragment thereof. Furthermore the skilled worker is aware of the fact that there is not a need for such short sequences in the expression of the genes.

[73109] for the disclosure of this paragraph see [0077.1.7.7] above

[73110] for the disclosure of this paragraph see [0078.1.7.7] above

[73111] Alternatively to the targeting of the respective sequences shown in Table II, application no. 15, columns 5 or 8, or homologs or fragments thereof, preferably of sequences in general encoded in the nucleus with the aid of the targeting sequences mentioned for example in Table a alone, Table b alone, or in combination with other targeting sequences preferably into plastids or mitochondria, respectively, the nucleic acids of the invention can directly be introduced into the plastidal or mitochondrial genome. Therefore in a preferred embodiment the respective nucleic acid sequences shown in the respective line in Table I, application no. 15, columns 5 or 8, preferably the coding region thereof, or homologs or fragments thereof, are directly introduced and expressed in plastids e.g., if for the nucleic acid molecule in the respective line in Table I, column 6, the term “plastidic” is indicated, or are directly introduced and expressed in mitochondria e.g., if for the nucleic acid molecule in the respective line in Table I, column 6 the term “mitochondric” is indicated.

[73112] The term “introduced” in the context of this specification shall mean the insertion of a nucleic acid sequence into the organism by means of a “transfection”, “transduction” or preferably by “transformation”.

[73113] A plastid, such as a chloroplast, or a mitochondrion, has been “transformed” by an exogenous (preferably foreign) nucleic acid sequence if a nucleic acid sequence has been introduced into the plastid or mitochondrion that means that this sequence has crossed the membrane or the membranes of the plastid or of the mitochondrion. The exogenous, preferably foreign, DNA may be integrated (covalently linked) into plastid or mitochondrial DNA making up the genome of the plastid or mitochondrion, or it may remain unintegrated (e.g., by including a chloroplast origin of replication). “Stably” integrated DNA sequences are those, which are inherited through plastid or mitochondrion replication, thereby transferring new plastids or mitochondria, with the features of the integrated DNA sequence to the progeny.

[73114] [0080.1.7.15] to [0083.1.7.15] for the disclosure of these paragrapsh see [0080.1.7.7] to [0083.1.7.7] above

[73115] For the process of the present invention it may be of great advantage that by transforming the plastids the intraspecies specific transgene flow is blocked, because a lot of species such as corn, cotton and rice have a strict maternal inheritance of plastids. By placing the respective genes specified in the respective line in Table I, application no. 15, columns 5 or 8, preferably the coding region, or homologs or fragments thereof, e.g. if for the nucleic acid molecule in the respective line in column 6 of Table I the term “plastidic” is indicated, in the plastids of plants, these genes will not be present in the pollen of said plants.

[73116] A further preferred embodiment of the invention relates to the use of so called “chloroplast localization sequences”, in which a first RNA sequence or molecule is capable of transporting or “chaperoning” a second RNA sequence, such as a RNA sequence transcribed from the sequences depicted in the respective line in Table I, application no. 15, columns 5 or 8, preferably the coding region thereof, or a homolog or a fragment thereof, or a sequence encoding a protein, as depicted in the respective line in Table II, application no. 15, columns 5 and 8, or a homolog or a fragment thereof, from an external environment inside a cell or outside a plastid into a chloroplast. In one embodiment the chloroplast localization signal is substantially similar or complementary to a complete or intact viroid sequence. The chloroplast localization signal may be encoded by a DNA sequence, which is transcribed into the chloroplast localization RNA. The term “viroid” refers to a naturally occurring single stranded RNA molecule (Flores, C. R. Acad. Sci. III. 324 (10), 943 (2001)). Viroids usually contain about 200-500 nucleotides and generally exist as circular molecules. Examples of viroids that contain chloroplast localization signals include but are not limited to ASBVd, PLMVd, CChMVd and ELVd. The viroid sequence or a functional part of it can be fused to the sequences depicted in the respective line in Table I, application no. 15, columns 5 or 8, preferably the coding region thereof, or a homolog or a fragment thereof, or a sequence encoding a protein, as depicted in the respective line in Table II, application no. 15, columns 5 or 8, or a homolog or a fragment thereof, in such a manner that the viroid sequence transports a sequence transcribed from a sequence as depicted in the respective line in Table I, application no. 15 columns 5 or 8, preferably the coding region thereof, or a homolog or a fragment thereof, or a sequence encoding a protein as depicted in the respective line in Table II, application no. 15 columns 5 or 8, or a homolog or a fragment thereof, into the chloroplasts, e.g. if for the nucleic acid molecule in column 6 of Table I the term “plastidic” is indicated. A preferred embodiment uses a modified ASBVd (Navarro et al., Virology. 268 (1), 218 (2000)).

[73117] In a further specific embodiment the protein to be expressed in the plastids such as the proteins depicted in the respective line in Table II, application no. 15, columns 5 or 8, or a homolog or a fragment thereof, e.g. if for the nucleic acid molecule in the respective line in column 6 of Table I the term “plastidic” is indicated, are encoded by different nucleic acids. Such a method is disclosed in WO 2004/040973, which shall be incorporated by reference. WO 2004/040973 teaches a method, which relates to the translocation of an RNA corresponding to a gene or gene fragment into the chloroplast by means of a chloroplast localization sequence. The genes, which should be expressed in the plant or plant cells, are split into nucleic acid fragments, which are introduced into different compartments in the plant e.g. the nucleus, the plastids and/or mitochondria. Additionally plant cells are described in which the chloroplast contains a ribozyme fused at one end to an RNA encoding a fragment of a protein used in the inventive process such that the ribozyme can trans-splice the translocated fusion RNA to the RNA encoding the gene fragment to form and as the case may be reunite the nucleic acid fragments to an intact mRNA encoding a functional protein for example as disclosed in the respective line in Table II, application no. 15, columns 5 or 8, or a homolog or a fragment thereof.

[73118] In a preferred embodiment of the invention the nucleic acid sequences as shown in the respective line in Table I, application no. 15, columns 5 or 8, preferably the coding region thereof, or homologs or fragments thereof, e.g. if for the nucleic acid molecule in the respective line in column 6 of Table I the term “plastidic” is indicated, used in the inventive process are transformed into plastids, which are metabolically active. Those plastids should preferably maintain at a high copy number in the plant or plant tissue of interest, most preferably the chloroplasts found in green plant tissues, such as leaves or cotyledons or in seeds.

[73119] For a good expression in the plastids the nucleic acid sequences as shown in the respective line in Table I, application no. 15, columns 5 or 8, preferably the coding region thereof, or homologs or fragments thereof, e.g. if for the nucleic acid molecule in the respective line in column 6 of Table I the term “plastidic” is indicated, are introduced into an expression cassette using preferably a promoter and terminater, which are active in plastids preferably a chloroplast promoter. Examples of such promoters include the psbA promoter from the gene from spinach or pea, the rbcL promoter, and the atpB promoter from corn.

[73120] [0089.1.7.15] to [0092.1.7.15] for the disclosure of these paragraphs see [0089.1.7.7] to [0092.1.7.7] above

[73121] Advantageously the process for the production of the fine chemical citramalate, citrate, fumarate, glycerate, malate, oxalate, pyruvate, succinate, and/or vitamin c and/or threonic acid leads to an enhanced production of the respective fine chemical. The terms “enhanced” or “increase” mean at least a 10%, 20%, 30%, 40% or 50%, preferably at least 60%, 70%, 80%, 90% or 100%, more preferably 150%, 200%, 300%, 400% or 500% higher production of the respective fine chemical citramalate, citrate, fumarate, glycerate, malate, oxalate, pyruvate, succinate, and/or vitamin c and/or threonic acid in comparison to the wild-type as defined above, e.g. that means in comparison to a non-human organism without the aforementioned modification of the activity of a protein as shown in the respective line in Table II, application no. 15, column 5 or 8, or a fragment or a homolog thereof. The modification of the activity of a protein as shown in the respective line in Table II, application no. 15, column 5 or 8, or a homolog or a fragment thereof, or their combination can be achieved by joining the protein to a respective transit peptide, e.g. if for the respective encoding nucleic acid molecule in column 6 of Table I the term “plastidic” or “mitochondric” is indicated.

[73122] Surprisingly it was found, that the transgenic expression of a protein as shown in the respective line in Table II, application no. 15, column 5, especially from the Saccaromyces cerevisiae, E. coli, Arabidopsis thaliana, Azotobacter vinelandii, Brassica napus, Glycine max, Oryza sativa, Physcomitrella patens, Synechocystis sp., Thermus thermophilus, Zea mays in a non-human organism, like a plant or a part thereof, such as Arabidopsis thaliana for example, or a microorganism, conferred a production of or an increase in citramalate, citrate, fumarate, glycerate, malate, oxalate, pyruvate, succinate, and/or vitamin c and/or threonic acid, respectively, to the transgenic non-human organism as compared to a corresponding non-transformed wild type.

[73123] In one embodiment the transgenic expression of a protein as shown in the respective line in Table II, application no. 15, column 5 or 8, or a homolog or a fragment thereof, especially from the Saccaromyces cerevisiae, E. coli, Arabidopsis thaliana, Azotobacter vinelandii, Brassica napus, Glycine max, Oryza sativa, Physcomitrella patens, Synechocystis sp., Thermus thermophilus, Zea mays in a non-human organism, like a plant or a part thereof, such as Arabidopsis thaliana for example, or a microorganism, confers a production of or an increase in citramalate, citrate, fumarate, glycerate, malate, oxalate, pyruvate, succinate, and/or vitamin c and/or threonic acid, respectively, to the transgenic non-human organism as compared to a corganism responding non-transformed wild type.

[73124] Accordingly, in one embodiment, an increase of succinate in a non-human organism, as compared to a corresponding non-transformed wild type non-human organism, is conferred in the process of the invention, if the activity of a polypeptide showing the activity of a protein phosphatase, or if the activity of the polypeptide At1g07430, preferably represented by SEQ ID NO. 17452, or a homolog or fragment thereof, or if the activity of a polypeptide encoded by a nucleic acid molecule comprising the nucleic acid SEQ ID NO. 17451, preferably the coding region thereof, or a homolog or fragment thereof, e.g. derived from Arabidopsis thaliana, is increased or generated. For example the activity of a nucleic acid molecule or a polypeptide comprising the nucleic acid, preferably the coding region thereof, or polypeptide or the consensus sequence or the polypeptide motif, as depicted in Table I, II or IV, application No. 15, column 5 or 8 in the respective same line as the nucleic acid molecule SEQ ID NO. 17451 or polypeptide SEQ ID NO. 17452, respectively, or a homolog or a fragment thereof, is increased or generated, or if the activity protein phosphatase is increased or generated in a non-human organism, like a microorganism or a plant cell, plant or part thereof, especially with non-targeted localization, whereby the respective line disclose in column 7 the fine chemical succinate. For example, an increase of the succinate of at least 1 percent, particularly in a range of 47 to 67-percent is conferred as compared to a corresponding non-transformed wild type non-human organism.

[73125] Accordingly, in one embodiment, an increase of malate in a non-human organism, as compared to a corresponding non-transformed wild type non-human organism, is conferred in the process of the invention, if the activity of a polypeptide showing the activity of a At1g13930-protein, or if the activity of the polypeptide At1g13930, preferably represented by SEQ ID NO. 133002, or a homolog or fragment thereof, or if the activity of a polypeptide encoded by a nucleic acid molecule comprising the nucleic acid SEQ ID NO. 133001, preferably the coding region thereof, or a homolog or fragment thereof, e.g. derived from Arabidopsis thaliana, is increased or generated. For example the activity of a nucleic acid molecule or a polypeptide comprising the nucleic acid, preferably the coding region thereof, or polypeptide or the consensus sequence or the polypeptide motif, as depicted in Table I, II or IV, application No. 15, column 5 or 8 in the respective same line as the nucleic acid molecule SEQ ID NO. 133001 or polypeptide SEQ ID NO. 133002, respectively, or a homolog or a fragment thereof, is increased or generated, or if the activity At1g13930-protein is increased or generated in a non-human organism, like a microorganism or a plant cell, plant or part thereof, especially with non-targeted localization, whereby the respective line disclose in column 7 the fine chemical malate. For example, an increase of the malate of at least 1 percent, particularly in a range of 82 to 90-percent is conferred as compared to a corresponding non-transformed wild type non-human organism.

[73126] Accordingly, in one embodiment, an increase of succinate in a non-human organism, as compared to a corresponding non-transformed wild type non-human organism, is conferred in the process of the invention, if the activity of a polypeptide showing the activity of a At1g13930-protein, or if the activity of the polypeptide At1g13930, preferably represented by SEQ ID NO. 133002, or a homolog or fragment thereof, or if the activity of a polypeptide encoded by a nucleic acid molecule comprising the nucleic acid SEQ ID NO. 133001, preferably the coding region thereof, or a homolog or fragment thereof, e.g. derived from Arabidopsis thaliana, is increased or generated. For example the activity of a nucleic acid molecule or a polypeptide comprising the nucleic acid, preferably the coding region thereof, or polypeptide or the consensus sequence or the polypeptide motif, as depicted in Table I, II or IV, application No. 15, column 5 or 8 in the respective same line as the nucleic acid molecule SEQ ID NO. 133001 or polypeptide SEQ ID NO. 133002, respectively, or a homolog or a fragment thereof, is increased or generated, or if the activity At1g13930-protein is increased or generated in a non-human organism, like a microorganism or a plant cell, plant or part thereof, especially with non-targeted localization, whereby the respective line disclose in column 7 the fine chemical succinate. For example, an increase of the succinate of at least 1 percent, particularly in a range of 33 to 79-percent is conferred as compared to a corresponding non-transformed wild type non-human organism.

[73127] Accordingly, in one embodiment, an increase of malate in a non-human organism, as compared to a corresponding non-transformed wild type non-human organism, is conferred in the process of the invention, if the activity of a polypeptide showing the activity of a eukaryotic translation initiation factor 5, or if the activity of the polypeptide At1g36730, preferably represented by SEQ ID NO. 17969, or a homolog or fragment thereof, or if the activity of a polypeptide encoded by a nucleic acid molecule comprising the nucleic acid SEQ ID NO. 17968, preferably the coding region thereof, or a homolog or fragment thereof, e.g. derived from Arabidopsis thaliana, is increased or generated. For example the activity of a nucleic acid molecule or a polypeptide comprising the nucleic acid, preferably the coding region thereof, or polypeptide or the consensus sequence or the polypeptide motif, as depicted in Table I, II or IV, application No. 15, column 5 or 8 in the respective same line as the nucleic acid molecule SEQ ID NO. 17968 or polypeptide SEQ ID NO. 17969, respectively, or a homolog or a fragment thereof, is increased or generated, or if the activity eukaryotic translation initiation factor 5 is increased or generated in a non-human organism, like a microorganism or a plant cell, plant or part thereof, especially with non-targeted localization, whereby the respective line disclose in column 7 the fine chemical malate. For example, an increase of the malate of at least 1 percent, particularly in a range of 65 to 137-percent is conferred as compared to a corresponding non-transformed wild type non-human organism.

[73128] Accordingly, in one embodiment, an increase of vitamin c and/or threonic acid in a non-human organism, as compared to a corresponding non-transformed wild type non-human organism, is conferred in the process of the invention, if the activity of a polypeptide showing the activity of a eukaryotic translation initiation factor 5, or if the activity of the polypeptide At1g36730, preferably represented by SEQ ID NO. 17969, or a homolog or fragment thereof, or if the activity of a polypeptide encoded by a nucleic acid molecule comprising the nucleic acid SEQ ID NO. 17968, preferably the coding region thereof, or a homolog or fragment thereof, e.g. derived from Arabidopsis thaliana, is increased or generated. For example the activity of a nucleic acid molecule or a polypeptide comprising the nucleic acid, preferably the coding region thereof, or polypeptide or the consensus sequence or the polypeptide motif, as depicted in Table I, II or IV, application No. 15, column 5 or 8 in the respective same line as the nucleic acid molecule SEQ ID NO. 17968 or polypeptide SEQ ID NO. 17969, respectively, or a homolog or a fragment thereof, is increased or generated, or if the activity eukaryotic translation initiation factor 5 is increased or generated in a non-human organism, like a microorganism or a plant cell, plant or part thereof, especially with non-targeted localization, whereby the respective line disclose in column 7 the fine chemical vitamin c and/or threonic acid. For example, an increase of the vitamin c and/or threonic acid of at least 1 percent, particularly in a range of 31 to 56-percent is conferred as compared to a corresponding non-transformed wild type non-human organism.

[73129] Accordingly, in one embodiment, an increase of fumarate in a non-human organism, as compared to a corresponding non-transformed wild type non-human organism, is conferred in the process of the invention, if the activity of a polypeptide showing the activity of a transcriptional regulator, or if the activity of the polypeptide At1g43850, preferably represented by SEQ ID NO. 18071, or a homolog or fragment thereof, or if the activity of a polypeptide encoded by a nucleic acid molecule comprising the nucleic acid SEQ ID NO. 18070, preferably the coding region thereof, or a homolog or fragment thereof, e.g. derived from Arabidopsis thaliana, is increased or generated. For example the activity of a nucleic acid molecule or a polypeptide comprising the nucleic acid, preferably the coding region thereof, or polypeptide or the consensus sequence or the polypeptide motif, as depicted in Table I, II or IV, application No. 15, column 5 or 8 in the respective same line as the nucleic acid molecule SEQ ID NO. 18070 or polypeptide SEQ ID NO. 18071, respectively, or a homolog or a fragment thereof, is increased or generated, or if the activity transcriptional regulator is increased or generated in a non-human organism, like a microorganism or a plant cell, plant or part thereof, especially with non-targeted localization, whereby the respective line disclose in column 7 the fine chemical fumarate. For example, an increase of the fumarate of at least 1 percent, particularly in a range of 63 to 108-percent is conferred as compared to a corresponding non-transformed wild type non-human organism.

[73130] Accordingly, in one embodiment, an increase of fumarate in a non-human organism, as compared to a corresponding non-transformed wild type non-human organism, is conferred in the process of the invention, if the activity of a polypeptide showing the activity of a protein phosphatase, or if the activity of the polypeptide At1g48040, preferably represented by SEQ ID NO. 813, or a homolog or fragment thereof, or if the activity of a polypeptide encoded by a nucleic acid molecule comprising the nucleic acid SEQ ID NO. 812, preferably the coding region thereof, or a homolog or fragment thereof, e.g. derived from Arabidopsis thaliana, is increased or generated. For example the activity of a nucleic acid molecule or a polypeptide comprising the nucleic acid, preferably the coding region thereof, or polypeptide or the consensus sequence or the polypeptide motif, as depicted in Table I, II or IV, application No. 15, column 5 or 8 in the respective same line as the nucleic acid molecule SEQ ID NO. 812 or polypeptide SEQ ID NO. 813, respectively, or a homolog or a fragment thereof, is increased or generated, or if the activity protein phosphatase is increased or generated in a non-human organism, like a microorganism or a plant cell, plant or part thereof, especially with non-targeted localization, whereby the respective line disclose in column 7 the fine chemical fumarate. For example, an increase of the fumarate of at least 1 percent, particularly in a range of 49 to 81-percent is conferred as compared to a corresponding non-transformed wild type non-human organism.

[73131] Accordingly, in one embodiment, an increase of vitamin c and/or threonic acid in a non-human organism, as compared to a corresponding non-transformed wild type non-human organism, is conferred in the process of the invention, if the activity of a polypeptide showing the activity of a protein phosphatase, or if the activity of the polypeptide At1g72770, preferably represented by SEQ ID NO. 19420, or a homolog or fragment thereof, or if the activity of a polypeptide encoded by a nucleic acid molecule comprising the nucleic acid SEQ ID NO. 19419, preferably the coding region thereof, or a homolog or fragment thereof, e.g. derived from Arabidopsis thaliana, is increased or generated. For example the activity of a nucleic acid molecule or a polypeptide comprising the nucleic acid, preferably the coding region thereof, or polypeptide or the consensus sequence or the polypeptide motif, as depicted in Table I, II or IV, application No. 15, column 5 or 8 in the respective same line as the nucleic acid molecule SEQ ID NO. 19419 or polypeptide SEQ ID NO. 19420, respectively, or a homolog or a fragment thereof, is increased or generated, or if the activity protein phosphatase is increased or generated in a non-human organism, like a microorganism or a plant cell, plant or part thereof, especially with non-targeted localization, whereby the respective line disclose in column 7 the fine chemical vitamin c and/or threonic acid. For example, an increase of the vitamin c and/or threonic acid of at least 1 percent, particularly in a range of 31 to 109-percent is conferred as compared to a corresponding non-transformed wild type non-human organism.

[73132] Accordingly, in one embodiment, an increase of fumarate in a non-human organism, as compared to a corresponding non-transformed wild type non-human organism, is conferred in the process of the invention, if the activity of a polypeptide showing the activity of a CBL-interacting protein kinase, or if the activity of the polypeptide At2g30360, preferably represented by SEQ ID NO. 19920, or a homolog or fragment thereof, or if the activity of a polypeptide encoded by a nucleic acid molecule comprising the nucleic acid SEQ ID NO. 19919, preferably the coding region thereof, or a homolog or fragment thereof, e.g. derived from Arabidopsis thaliana, is increased or generated. For example the activity of a nucleic acid molecule or a polypeptide comprising the nucleic acid, preferably the coding region thereof, or polypeptide or the consensus sequence or the polypeptide motif, as depicted in Table I, II or IV, application No. 15, column 5 or 8 in the respective same line as the nucleic acid molecule SEQ ID NO. 19919 or polypeptide SEQ ID NO. 19920, respectively, or a homolog or a fragment thereof, is increased or generated, or if the activity CBL-interacting protein kinase is increased or generated in a non-human organism, like a microorganism or a plant cell, plant or part thereof, especially with non-targeted localization, whereby the respective line disclose in column 7 the fine chemical fumarate. For example, an increase of the fumarate of at least 1 percent, particularly in a range of 75 to 420-percent is conferred as compared to a corresponding non-transformed wild type non-human organism.

[73133] Accordingly, in one embodiment, an increase of malate in a non-human organism, as compared to a corresponding non-transformed wild type non-human organism, is conferred in the process of the invention, if the activity of a polypeptide showing the activity of a CBL-interacting protein kinase, or if the activity of the polypeptide At2g30360, preferably represented by SEQ ID NO. 19920, or a homolog or fragment thereof, or if the activity of a polypeptide encoded by a nucleic acid molecule comprising the nucleic acid SEQ ID NO. 19919, preferably the coding region thereof, or a homolog or fragment thereof, e.g. derived from Arabidopsis thaliana, is increased or generated. For example the activity of a nucleic acid molecule or a polypeptide comprising the nucleic acid, preferably the coding region thereof, or polypeptide or the consensus sequence or the polypeptide motif, as depicted in Table I, II or IV, application No. 15, column 5 or 8 in the respective same line as the nucleic acid molecule SEQ ID NO. 19919 or polypeptide SEQ ID NO. 19920, respectively, or a homolog or a fragment thereof, is increased or generated, or if the activity CBL-interacting protein kinase is increased or generated in a non-human organism, like a microorganism or a plant cell, plant or part thereof, especially with non-targeted localization, whereby the respective line disclose in column 7 the fine chemical malate. For example, an increase of the malate of at least 1 percent, particularly in a range of 52 to 364-percent is conferred as compared to a corresponding non-transformed wild type non-human organism.

[73134] Accordingly, in one embodiment, an increase of succinate in a non-human organism, as compared to a corresponding non-transformed wild type non-human organism, is conferred in the process of the invention, if the activity of a polypeptide showing the activity of a CBL-interacting protein kinase, or if the activity of the polypeptide At2g30360, preferably represented by SEQ ID NO. 19920, or a homolog or fragment thereof, or if the activity of a polypeptide encoded by a nucleic acid molecule comprising the nucleic acid SEQ ID NO. 19919, preferably the coding region thereof, or a homolog or fragment thereof, e.g. derived from Arabidopsis thaliana, is increased or generated. For example the activity of a nucleic acid molecule or a polypeptide comprising the nucleic acid, preferably the coding region thereof, or polypeptide or the consensus sequence or the polypeptide motif, as depicted in Table I, II or IV, application No. 15, column 5 or 8 in the respective same line as the nucleic acid molecule SEQ ID NO. 19919 or polypeptide SEQ ID NO. 19920, respectively, or a homolog or a fragment thereof, is increased or generated, or if the activity CBL-interacting protein kinase is increased or generated in a non-human organism, like a microorganism or a plant cell, plant or part thereof, especially with non-targeted localization, whereby the respective line disclose in column 7 the fine chemical succinate. For example, an increase of the succinate of at least 1 percent, particularly in a range of 24 to 75-percent is conferred as compared to a corresponding non-transformed wild type non-human organism.

[73135] Accordingly, in one embodiment, an increase of fumarate in a non-human organism, as compared to a corresponding non-transformed wild type non-human organism, is conferred in the process of the invention, if the activity of a polypeptide showing the activity of a phenylalanine ammonia-lyase, or if the activity of the polypeptide At2g37040, preferably represented by SEQ ID NO. 133043, or a homolog or fragment thereof, or if the activity of a polypeptide encoded by a nucleic acid molecule comprising the nucleic acid SEQ ID NO. 133042, preferably the coding region thereof, or a homolog or fragment thereof, e.g. derived from Arabidopsis thaliana, is increased or generated. For example the activity of a nucleic acid molecule or a polypeptide comprising the nucleic acid, preferably the coding region thereof, or polypeptide or the consensus sequence or the polypeptide motif, as depicted in Table I, II or IV, application No. 15, column 5 or 8 in the respective same line as the nucleic acid molecule SEQ ID NO. 133042 or polypeptide SEQ ID NO. 133043, respectively, or a homolog or a fragment thereof, is increased or generated, or if the activity phenylalanine ammonia-lyase is increased or generated in a non-human organism, like a microorganism or a plant cell, plant or part thereof, especially with non-targeted localization, whereby the respective line disclose in column 7 the fine chemical fumarate. For example, an increase of the fumarate of at least 1 percent, particularly in a range of 70 to 89-percent is conferred as compared to a corresponding non-transformed wild type non-human organism.

[73136] Accordingly, in one embodiment, an increase of succinate in a non-human organism, as compared to a corresponding non-transformed wild type non-human organism, is conferred in the process of the invention, if the activity of a polypeptide showing the activity of a thioredoxin reductase, or if the activity of the polypeptide At2g41680, preferably represented by SEQ ID NO. 133350, or a homolog or fragment thereof, or if the activity of a polypeptide encoded by a nucleic acid molecule comprising the nucleic acid SEQ ID NO. 133349, preferably the coding region thereof, or a homolog or fragment thereof, e.g. derived from Arabidopsis thaliana, is increased or generated. For example the activity of a nucleic acid molecule or a polypeptide comprising the nucleic acid, preferably the coding region thereof, or polypeptide or the consensus sequence or the polypeptide motif, as depicted in Table I, II or IV, application No. 15, column 5 or 8 in the respective same line as the nucleic acid molecule SEQ ID NO. 133349 or polypeptide SEQ ID NO. 133350, respectively, or a homolog or a fragment thereof, is increased or generated, or if the activity thioredoxin red uctase is increased or generated in a non-human organism, like a microorganism or a plant cell, plant or part thereof, especially with non-targeted localization, whereby the respective line disclose in column 7 the fine chemical succinate. For example, an increase of the succinate of at least 1 percent, particularly in a range of 34 to 91-percent is conferred as compared to a corresponding non-transformed wild type non-human organism.

[73137] Accordingly, in one embodiment, an increase of succinate in a non-human organism, as compared to a corresponding non-transformed wild type non-human organism, is conferred in the process of the invention, if the activity of a polypeptide showing the activity of a citrate synthase, or if the activity of the polypeptide At2g44350, preferably represented by SEQ ID NO. 120811, or a homolog or fragment thereof, or if the activity of a polypeptide encoded by a nucleic acid molecule comprising the nucleic acid SEQ ID NO. 120810, preferably the coding region thereof, or a homolog or fragment thereof, e.g. derived from Arabidopsis thaliana, is increased or generated. For example the activity of a nucleic acid molecule or a polypeptide comprising the nucleic acid, preferably the coding region thereof, or polypeptide or the consensus sequence or the polypeptide motif, as depicted in Table I, II or IV, application No. 15, column 5 or 8 in the respective same line as the nucleic acid molecule SEQ ID NO. 120810 or polypeptide SEQ ID NO. 120811, respectively, or a homolog or a fragment thereof, is increased or generated, or if the activity citrate synthase is increased or generated in a non-human organism, like a microorganism or a plant cell, plant or part thereof, especially with plastidic localization, whereby the respective line disclose in column 7 the fine chemical succinate. For example, an increase of the succinate of at least 1 percent, particularly in a range of 46 to 132-percent is conferred as compared to a corresponding non-transformed wild type non-human organism.

[73138] Accordingly, in one embodiment, an increase of citramalate in a non-human organism, as compared to a corresponding non-transformed wild type non-human organism, is conferred in the process of the invention, if the activity of a polypeptide showing the activity of a pyruvate kinase, or if the activity of the polypeptide At3g04050, preferably represented by SEQ ID NO. 21498, or a homolog or fragment thereof, or if the activity of a polypeptide encoded by a nucleic acid molecule comprising the nucleic acid SEQ ID NO. 21497, preferably the coding region thereof, or a homolog or fragment thereof, e.g. derived from Arabidopsis thaliana, is increased or generated. For example the activity of a nucleic acid molecule or a polypeptide comprising the nucleic acid, preferably the coding region thereof, or polypeptide or the consensus sequence or the polypeptide motif, as depicted in Table I, II or IV, application No. 15, column 5 or 8 in the respective same line as the nucleic acid molecule SEQ ID NO. 21497 or polypeptide SEQ ID NO. 21498, respectively, or a homolog or a fragment thereof, is increased or generated, or if the activity pyruvate kinase is increased or generated in a non-human organism, like a microorganism or a plant cell, plant or part thereof, especially with plastidic localization, whereby the respective line disclose in column 7 the fine chemical citramalate. For example, an increase of the citramalate of at least 1 percent, particularly in a range of 49 to 721-percent is conferred as compared to a corresponding non-transformed wild type non-human organism.

[73139] Accordingly, in one embodiment, an increase of succinate in a non-human organism, as compared to a corresponding non-transformed wild type non-human organism, is conferred in the process of the invention, if the activity of a polypeptide showing the activity of a pyruvate kinase, or if the activity of the polypeptide At3g04050, preferably represented by SEQ ID NO. 21498, or a homolog or fragment thereof, or if the activity of a polypeptide encoded by a nucleic acid molecule comprising the nucleic acid SEQ ID NO. 21497, preferably the coding region thereof, or a homolog or fragment thereof, e.g. derived from Arabidopsis thaliana, is increased or generated. For example the activity of a nucleic acid molecule or a polypeptide comprising the nucleic acid, preferably the coding region thereof, or polypeptide or the consensus sequence or the polypeptide motif, as depicted in Table I, II or IV, application No. 15, column 5 or 8 in the respective same line as the nucleic acid molecule SEQ ID NO. 21497 or polypeptide SEQ ID NO. 21498, respectively, or a homolog or a fragment thereof, is increased or generated, or if the activity pyruvate kinase is increased or generated in a non-human organism, like a microorganism or a plant cell, plant or part thereof, especially with plastidic localization, whereby the respective line disclose in column 7 the fine chemical succinate. For example, an increase of the succinate of at least 1 percent, particularly in a range of 25 to 537-percent is conferred as compared to a corresponding non-transformed wild type non-human organism.

[73140] Accordingly, in one embodiment, an increase of malate in a non-human organism, as compared to a corresponding non-transformed wild type non-human organism, is conferred in the process of the invention, if the activity of a polypeptide showing the activity of a protein phosphatase, or if the activity of the polypeptide At3g06270, preferably represented by SEQ ID NO. 22016, or a homolog or fragment thereof, or if the activity of a polypeptide encoded by a nucleic acid molecule comprising the nucleic acid SEQ ID NO. 22015, preferably the coding region thereof, or a homolog or fragment thereof, e.g. derived from Arabidopsis thaliana, is increased or generated. For example the activity of a nucleic acid molecule or a polypeptide comprising the nucleic acid, preferably the coding region thereof, or polypeptide or the consensus sequence or the polypeptide motif, as depicted in Table I, II or IV, application No. 15, column 5 or 8 in the respective same line as the nucleic acid molecule SEQ ID NO. 22015 or polypeptide SEQ ID NO. 22016, respectively, or a homolog or a fragment thereof, is increased or generated, or if the activity protein phosphatase is increased or generated in a non-human organism, like a microorganism or a plant cell, plant or part thereof, especially with non-targeted localization, whereby the respective line disclose in column 7 the fine chemical malate. For example, an increase of the malate of at least 1 percent, particularly in a range of 63 to 203-percent is conferred as compared to a corresponding non-transformed wild type non-human organism.

[73141] Accordingly, in one embodiment, an increase of succinate in a non-human organism, as compared to a corresponding non-transformed wild type non-human organism, is conferred in the process of the invention, if the activity of a polypeptide showing the activity of a protein phosphatase, or if the activity of the polypeptide At3g06270, preferably represented by SEQ ID NO. 22016, or a homolog or fragment thereof, or if the activity of a polypeptide encoded by a nucleic acid molecule comprising the nucleic acid SEQ ID NO. 22015, preferably the coding region thereof, or a homolog or fragment thereof, e.g. derived from Arabidopsis thaliana, is increased or generated. For example the activity of a nucleic acid molecule or a polypeptide comprising the nucleic acid, preferably the coding region thereof, or polypeptide or the consensus sequence or the polypeptide motif, as depicted in Table I, II or IV, application No. 15, column 5 or 8 in the respective same line as the nucleic acid molecule SEQ ID NO. 22015 or polypeptide SEQ ID NO. 22016, respectively, or a homolog or a fragment thereof, is increased or generated, or if the activity protein phosphatase is increased or generated in a non-human organism, like a microorganism or a plant cell, plant or part thereof, especially with non-targeted localization, whereby the respective line disclose in column 7 the fine chemical succinate. For example, an increase of the succinate of at least 1 percent, particularly in a range of 24 to 55-percent is conferred as compared to a corresponding non-transformed wild type non-human organism.

[73142] Accordingly, in one embodiment, an increase of fumarate in a non-human organism, as compared to a corresponding non-transformed wild type non-human organism, is conferred in the process of the invention, if the activity of a polypeptide showing the activity of a thioredoxin family protein, or if the activity of the polypeptide At3g08710, preferably represented by SEQ ID NO. 22250, or a homolog or fragment thereof, or if the activity of a polypeptide encoded by a nucleic acid molecule comprising the nucleic acid SEQ ID NO. 22249, preferably the coding region thereof, or a homolog or fragment thereof, e.g. derived from Arabidopsis thaliana, is increased or generated. For example the activity of a nucleic acid molecule or a polypeptide comprising the nucleic acid, preferably the coding region thereof, or polypeptide or the consensus sequence or the polypeptide motif, as depicted in Table I, II or IV, application No. 15, column 5 or 8 in the respective same line as the nucleic acid molecule SEQ ID NO. 22249 or polypeptide SEQ ID NO. 22250, respectively, or a homolog or a fragment thereof, is increased or generated, or if the activity thioredoxin family protein is increased or generated in a non-human organism, like a microorganism or a plant cell, plant or part thereof, especially with non-targeted localization, whereby the respective line disclose in column 7 the fine chemical fumarate. For example, an increase of the fumarate of at least 1 percent, particularly in a range of 72 to 165-percent is conferred as compared to a corresponding non-transformed wild type non-human organism.

[73143] Accordingly, in one embodiment, an increase of malate in a non-human organism, as compared to a corresponding non-transformed wild type non-human organism, is conferred in the process of the invention, if the activity of a polypeptide showing the activity of a thioredoxin family protein, or if the activity of the polypeptide At3g08710, preferably represented by SEQ ID NO. 22250, or a homolog or fragment thereof, or if the activity of a polypeptide encoded by a nucleic acid molecule comprising the nucleic acid SEQ ID NO. 22249, preferably the coding region thereof, or a homolog or fragment thereof, e.g. derived from Arabidopsis thaliana, is increased or generated. For example the activity of a nucleic acid molecule or a polypeptide comprising the nucleic acid, preferably the coding region thereof, or polypeptide or the consensus sequence or the polypeptide motif, as depicted in Table I, II or IV, application No. 15, column 5 or 8 in the respective same line as the nucleic acid molecule SEQ ID NO. 22249 or polypeptide SEQ ID NO. 22250, respectively, or a homolog or a fragment thereof, is increased or generated, or if the activity thioredoxin family protein is increased or generated in a non-human organism, like a microorganism or a plant cell, plant or part thereof, especially with non-targeted localization, whereby the respective line disclose in column 7 the fine chemical malate. For example, an increase of the malate of at least 1 percent, particularly in a range of 62 to 162-percent is conferred as compared to a corresponding non-transformed wild type non-human organism.

[73144] Accordingly, in one embodiment, an increase of glycerate in a non-human organism, as compared to a corresponding non-transformed wild type non-human organism, is conferred in the process of the invention, if the activity of a polypeptide showing the activity of a thioredoxin, or if the activity of the polypeptide At3g15360, preferably represented by SEQ ID NO. 130492, or a homolog or fragment thereof, or if the activity of a polypeptide encoded by a nucleic acid molecule comprising the nucleic acid SEQ ID NO. 130491, preferably the coding region thereof, or a homolog or fragment thereof, e.g. derived from Arabidopsis thaliana, is increased or generated. For example the activity of a nucleic acid molecule or a polypeptide comprising the nucleic acid, preferably the coding region thereof, or polypeptide or the consensus sequence or the polypeptide motif, as depicted in Table I, II or IV, application No. 15, column 5 or 8 in the respective same line as the nucleic acid molecule SEQ ID NO. 130491 or polypeptide SEQ ID NO. 130492, respectively, or a homolog or a fragment thereof, is increased or generated, or if the activity thioredoxin is increased or generated in a non-human organism, like a microorganism or a plant cell, plant or part thereof, especially with non-targeted localization, whereby the respective line disclose in column 7 the fine chemical glycerate. For example, an increase of the glycerate of at least 1 percent, particularly in a range of 31 to 129-percent is conferred as compared to a corresponding non-transformed wild type non-human organism.

[73145] Accordingly, in one embodiment, an increase of fumarate in a non-human organism, as compared to a corresponding non-transformed wild type non-human organism, is conferred in the process of the invention, if the activity of a polypeptide showing the activity of a auxin response factor, or if the activity of the polypeptide At3g61830, preferably represented by SEQ ID NO. 2368, or a homolog or fragment thereof, or if the activity of a polypeptide encoded by a nucleic acid molecule comprising the nucleic acid SEQ ID NO. 2367, preferably the coding region thereof, or a homolog or fragment thereof, e.g. derived from Arabidopsis thaliana, is increased or generated. For example the activity of a nucleic acid molecule or a polypeptide comprising the nucleic acid, preferably the coding region thereof, or polypeptide or the consensus sequence or the polypeptide motif, as depicted in Table I, II or IV, application No. 15, column 5 or 8 in the respective same line as the nucleic acid molecule SEQ ID NO. 2367 or polypeptide SEQ ID NO. 2368, respectively, or a homolog or a fragment thereof, is increased or generated, or if the activity auxin response factor is increased or generated in a non-human organism, like a microorganism or a plant cell, plant or part thereof, especially with non-targeted localization, whereby the respective line disclose in column 7 the fine chemical fumarate. For example, an increase of the fumarate of at least 1 percent, particularly in a range of 78 to 248-percent is conferred as compared to a corresponding non-transformed wild type non-human organism.

[73146] Accordingly, in one embodiment, an increase of malate in a non-human organism, as compared to a corresponding non-transformed wild type non-human organism, is conferred in the process of the invention, if the activity of a polypeptide showing the activity of a auxin response factor, or if the activity of the polypeptide At3g61830, preferably represented by SEQ ID NO. 2368, or a homolog or fragment thereof, or if the activity of a polypeptide encoded by a nucleic acid molecule comprising the nucleic acid SEQ ID NO. 2367, preferably the coding region thereof, or a homolog or fragment thereof, e.g. derived from Arabidopsis thaliana, is increased or generated.

[73147] For example the activity of a nucleic acid molecule or a polypeptide comprising the nucleic acid, preferably the coding region thereof, or polypeptide or the consensus sequence or the polypeptide motif, as depicted in Table I, II or IV, application No. 15, column 5 or 8 in the respective same line as the nucleic acid molecule SEQ ID NO. 2367 or polypeptide SEQ ID NO. 2368, respectively, or a homolog or a fragment thereof, is increased or generated, or if the activity auxin response factor is increased or generated in a non-human organism, like a microorganism or a plant cell, plant or part thereof, especially with non-targeted localization, whereby the respective line disclose in column 7 the fine chemical malate. For example, an increase of the malate of at least 1 percent, particularly in a range of 93 to 115-percent is conferred as compared to a corresponding non-transformed wild type non-human organism.

[73148] Accordingly, in one embodiment, an increase of citramalate in a non-human organism, as compared to a corresponding non-transformed wild type non-human organism, is conferred in the process of the invention, if the activity of a polypeptide showing the activity of a monthiol glutaredoxin, or if the activity of the polypeptide At3g62930, preferably represented by SEQ ID NO. 2574, or a homolog or fragment thereof, or if the activity of a polypeptide encoded by a nucleic acid molecule comprising the nucleic acid SEQ ID NO. 2573, preferably the coding region thereof, or a homolog or fragment thereof, e.g. derived from Arabidopsis thaliana, is increased or generated. For example the activity of a nucleic acid molecule or a polypeptide comprising the nucleic acid, preferably the coding region thereof, or polypeptide or the consensus sequence or the polypeptide motif, as depicted in Table I, II or IV, application No. 15, column 5 or 8 in the respective same line as the nucleic acid molecule SEQ ID NO. 2573 or polypeptide SEQ ID NO. 2574, respectively, or a homolog or a fragment thereof, is increased or generated, or if the activity monthiol glutaredoxin is increased or generated in a non-human organism, like a microorganism or a plant cell, plant or part thereof, especially with non-targeted localization, whereby the respective line disclose in column 7 the fine chemical citramalate. For example, an increase of the citramalate of at least 1 percent, particularly in a range of 70 to 163-percent is conferred as compared to a corresponding non-transformed wild type non-human organism.

[73149] Accordingly, in one embodiment, an increase of fumarate in a non-human organism, as compared to a corresponding non-transformed wild type non-human organism, is conferred in the process of the invention, if the activity of a polypeptide showing the activity of a monthiol glutaredoxin, or if the activity of the polypeptide At3g62930, preferably represented by SEQ ID NO. 2574, or a homolog or fragment thereof, or if the activity of a polypeptide encoded by a nucleic acid molecule comprising the nucleic acid SEQ ID NO. 2573, preferably the coding region thereof, or a homolog or fragment thereof, e.g. derived from Arabidopsis thaliana, is increased or generated. For example the activity of a nucleic acid molecule or a polypeptide comprising the nucleic acid, preferably the coding region thereof, or polypeptide or the consensus sequence or the polypeptide motif, as depicted in Table I, II or IV, application No. 15, column 5 or 8 in the respective same line as the nucleic acid molecule SEQ ID NO. 2573 or polypeptide SEQ ID NO. 2574, respectively, or a homolog or a fragment thereof, is increased or generated, or if the activity monthiol glutaredoxin is increased or generated in a non-human organism, like a microorganism or a plant cell, plant or part thereof, especially with non-targeted localization, whereby the respective line disclose in column 7 the fine chemical fumarate. For example, an increase of the fumarate of at least 1 percent, particularly in a range of 62 to 222-percent is conferred as compared to a corresponding non-transformed wild type non-human organism.

[73150] Accordingly, in one embodiment, an increase of glycerate in a non-human organism, as compared to a corresponding non-transformed wild type non-human organism, is conferred in the process of the invention, if the activity of a polypeptide showing the activity of a monthiol glutaredoxin, or if the activity of the polypeptide At3g62930, preferably represented by SEQ ID NO. 2574, or a homolog or fragment thereof, or if the activity of a polypeptide encoded by a nucleic acid molecule comprising the nucleic acid SEQ ID NO. 2573, preferably the coding region thereof, or a homolog or fragment thereof, e.g. derived from Arabidopsis thaliana, is increased or generated. For example the activity of a nucleic acid molecule or a polypeptide comprising the nucleic acid, preferably the coding region thereof, or polypeptide or the consensus sequence or the polypeptide motif, as depicted in Table I, II or IV, application No. 15, column 5 or 8 in the respective same line as the nucleic acid molecule SEQ ID NO. 2573 or polypeptide SEQ ID NO. 2574, respectively, or a homolog or a fragment thereof, is increased or generated, or if the activity monthiol glutaredoxin is increased or generated in a non-human organism, like a microorganism or a plant cell, plant or part thereof, especially with non-targeted localization, whereby the respective line disclose in column 7 the fine chemical glycerate. For example, an increase of the glycerate of at least 1 percent, particularly in a range of 35 to 101-percent is conferred as compared to a corresponding non-transformed wild type non-human organism.

[73151] Accordingly, in one embodiment, an increase of malate in a non-human organism, as compared to a corresponding non-transformed wild type non-human organism, is conferred in the process of the invention, if the activity of a polypeptide showing the activity of a monthiol glutaredoxin, or if the activity of the polypeptide At3g62930, preferably represented by SEQ ID NO. 2574, or a homolog or fragment thereof, or if the activity of a polypeptide encoded by a nucleic acid molecule comprising the nucleic acid SEQ ID NO. 2573, preferably the coding region thereof, or a homolog or fragment thereof, e.g. derived from Arabidopsis thaliana, is increased or generated. For example the activity of a nucleic acid molecule or a polypeptide comprising the nucleic acid, preferably the coding region thereof, or polypeptide or the consensus sequence or the polypeptide motif, as depicted in Table I, II or IV, application No. 15, column 5 or 8 in the respective same line as the nucleic acid molecule SEQ ID NO. 2573 or polypeptide SEQ ID NO. 2574, respectively, or a homolog or a fragment thereof, is increased or generated, or if the activity monthiol glutaredoxin is increased or generated in a non-human organism, like a microorganism or a plant cell, plant or part thereof, especially with non-targeted localization, whereby the respective line disclose in column 7 the fine chemical malate. For example, an increase of the malate of at least 1 percent, particularly in a range of 57 to 206-percent is conferred as compared to a corresponding non-transformed wild type non-human organism.

[73152] Accordingly, in one embodiment, an increase of succinate in a non-human organism, as compared to a corresponding non-transformed wild type non-human organism, is conferred in the process of the invention, if the activity of a polypeptide showing the activity of a monthiol glutaredoxin, or if the activity of the polypeptide At3g62930, preferably represented by SEQ ID NO. 2574, or a homolog or fragment thereof, or if the activity of a polypeptide encoded by a nucleic acid molecule comprising the nucleic acid SEQ ID NO. 2573, preferably the coding region thereof, or a homolog or fragment thereof, e.g. derived from Arabidopsis thaliana, is increased or generated. For example the activity of a nucleic acid molecule or a polypeptide comprising the nucleic acid, preferably the coding region thereof, or polypeptide or the consensus sequence or the polypeptide motif, as depicted in Table I, II or IV, application No. 15, column 5 or 8 in the respective same line as the nucleic acid molecule SEQ ID NO. 2573 or polypeptide SEQ ID NO. 2574, respectively, or a homolog or a fragment thereof, is increased or generated, or if the activity monthiol glutaredoxin is increased or generated in a non-human organism, like a microorganism or a plant cell, plant or part thereof, especially with non-targeted localization, whereby the respective line disclose in column 7 the fine chemical succinate. For example, an increase of the succinate of at least 1 percent, particularly in a range of 30 to 137-percent is conferred as compared to a corresponding non-transformed wild type non-human organism.

[73153] Accordingly, in one embodiment, an increase of vitamin c and/or threonic acid in a non-human organism, as compared to a corresponding non-transformed wild type non-human organism, is conferred in the process of the invention, if the activity of a polypeptide showing the activity of a monthiol glutaredoxin, or if the activity of the polypeptide At3g62930, preferably represented by SEQ ID NO. 2574, or a homolog or fragment thereof, or if the activity of a polypeptide encoded by a nucleic acid molecule comprising the nucleic acid SEQ ID NO. 2573, preferably the coding region thereof, or a homolog or fragment thereof, e.g. derived from Arabidopsis thaliana, is increased or generated. For example the activity of a nucleic acid molecule or a polypeptide comprising the nucleic acid, preferably the coding region thereof, or polypeptide or the consensus sequence or the polypeptide motif, as depicted in Table I, II or IV, application No. 15, column 5 or 8 in the respective same line as the nucleic acid molecule SEQ ID NO. 2573 or polypeptide SEQ ID NO. 2574, respectively, or a homolog or a fragment thereof, is increased or generated, or if the activity monthiol glutaredoxin is increased or generated in a non-human organism, like a microorganism or a plant cell, plant or part thereof, especially with non-targeted localization, whereby the respective line disclose in column 7 the fine chemical vitamin c and/or threonic acid. For example, an increase of the vitamin c and/or threonic acid of at least 1 percent, particularly in a range of 51 to 96-percent is conferred as compared to a corresponding non-transformed wild type non-human organism.

[73154] Accordingly, in one embodiment, an increase of citramalate in a non-human organism, as compared to a corresponding non-transformed wild type non-human organism, is conferred in the process of the invention, if the activity of a polypeptide showing the activity of a glutaredoxin, or if the activity of the polypeptide At3g62950, preferably represented by SEQ ID NO. 2936, or a homolog or fragment thereof, or if the activity of a polypeptide encoded by a nucleic acid molecule comprising the nucleic acid SEQ ID NO. 2935, preferably the coding region thereof, or a homolog or fragment thereof, e.g. derived from Arabidopsis thaliana, is increased or generated. For example the activity of a nucleic acid molecule or a polypeptide comprising the nucleic acid, preferably the coding region thereof, or polypeptide or the consensus sequence or the polypeptide motif, as depicted in Table I, II or IV, application No. 15, column 5 or 8 in the respective same line as the nucleic acid molecule SEQ ID NO. 2935 or polypeptide SEQ ID NO. 2936, respectively, or a homolog or a fragment thereof, is increased or generated, or if the activity glutaredoxin is increased or generated in a non-human organism, like a microorganism or a plant cell, plant or part thereof, especially with non-targeted localization, whereby the respective line disclose in column 7 the fine chemical citramalate. For example, an increase of the citramalate of at least 1 percent, particularly in a range of 65 to 235-percent is conferred as compared to a corresponding non-transformed wild type non-human organism.

[73155] Accordingly, in one embodiment, an increase of fumarate in a non-human organism, as compared to a corresponding non-transformed wild type non-human organism, is conferred in the process of the invention, if the activity of a polypeptide showing the activity of a glutaredoxin, or if the activity of the polypeptide At3g62950, preferably represented by SEQ ID NO. 2936, or a homolog or fragment thereof, or if the activity of a polypeptide encoded by a nucleic acid molecule comprising the nucleic acid SEQ ID NO. 2935, preferably the coding region thereof, or a homolog or fragment thereof, e.g. derived from Arabidopsis thaliana, is increased or generated. For example the activity of a nucleic acid molecule or a polypeptide comprising the nucleic acid, preferably the coding region thereof, or polypeptide or the consensus sequence or the polypeptide motif, as depicted in Table I, II or IV, application No. 15, column 5 or 8 in the respective same line as the nucleic acid molecule SEQ ID NO. 2935 or polypeptide SEQ ID NO. 2936, respectively, or a homolog or a fragment thereof, is increased or generated, or if the activity glutaredoxin is increased or generated in a non-human organism, like a microorganism or a plant cell, plant or part thereof, especially with non-targeted localization, whereby the respective line disclose in column 7 the fine chemical fumarate. For example, an increase of the fumarate of at least 1 percent, particularly in a range of 64 to 136-percent is conferred as compared to a corresponding non-transformed wild type non-human organism.

[73156] Accordingly, in one embodiment, an increase of glycerate in a non-human organism, as compared to a corresponding non-transformed wild type non-human organism, is conferred in the process of the invention, if the activity of a polypeptide showing the activity of a glutaredoxin, or if the activity of the polypeptide At3g62950, preferably represented by SEQ ID NO. 2936, or a homolog or fragment thereof, or if the activity of a polypeptide encoded by a nucleic acid molecule comprising the nucleic acid SEQ ID NO. 2935, preferably the coding region thereof, or a homolog or fragment thereof, e.g. derived from Arabidopsis thaliana, is increased or generated. For example the activity of a nucleic acid molecule or a polypeptide comprising the nucleic acid, preferably the coding region thereof, or polypeptide or the consensus sequence or the polypeptide motif, as depicted in Table I, II or IV, application No. 15, column 5 or 8 in the respective same line as the nucleic acid molecule SEQ ID NO. 2935 or polypeptide SEQ ID NO. 2936, respectively, or a homolog or a fragment thereof, is increased or generated, or if the activity glutaredoxin is increased or generated in a non-human organism, like a microorganism or a plant cell, plant or part thereof, especially with non-targeted localization, whereby the respective line disclose in column 7 the fine chemical glycerate. For example, an increase of the glycerate of at least 1 percent, particularly in a range of 31 to 113-percent is conferred as compared to a corresponding non-transformed wild type non-human organism.

[73157] Accordingly, in one embodiment, an increase of malate in a non-human organism, as compared to a corresponding non-transformed wild type non-human organism, is conferred in the process of the invention, if the activity of a polypeptide showing the activity of a glutaredoxin, or if the activity of the polypeptide At3g62950, preferably represented by SEQ ID NO. 2936, or a homolog or fragment thereof, or if the activity of a polypeptide encoded by a nucleic acid molecule comprising the nucleic acid SEQ ID NO. 2935, preferably the coding region thereof, or a homolog or fragment thereof, e.g. derived from Arabidopsis thaliana, is increased or generated.

[73158] For example the activity of a nucleic acid molecule or a polypeptide comprising the nucleic acid, preferably the coding region thereof, or polypeptide or the consensus sequence or the polypeptide motif, as depicted in Table I, II or IV, application No. 15, column 5 or 8 in the respective same line as the nucleic acid molecule SEQ ID NO. 2935 or polypeptide SEQ ID NO. 2936, respectively, or a homolog or a fragment thereof, is increased or generated, or if the activity glutaredoxin is increased or generated in a non-human organism, like a microorganism or a plant cell, plant or part thereof, especially with non-targeted localization, whereby the respective line disclose in column 7 the fine chemical malate. For example, an increase of the malate of at least 1 percent, particularly in a range of 100 to 274-percent is conferred as compared to a corganism responding non-transformed wild type non-human organism.

[73159] Accordingly, in one embodiment, an increase of succinate in a non-human organism, as compared to a corresponding non-transformed wild type non-human organism, is conferred in the process of the invention, if the activity of a polypeptide showing the activity of a glutaredoxin, or if the activity of the polypeptide At3g62950, preferably represented by SEQ ID NO. 2936, or a homolog or fragment thereof, or if the activity of a polypeptide encoded by a nucleic acid molecule comprising the nucleic acid SEQ ID NO. 2935, preferably the coding region thereof, or a homolog or fragment thereof, e.g. derived from Arabidopsis thaliana, is increased or generated. For example the activity of a nucleic acid molecule or a polypeptide comprising the nucleic acid, preferably the coding region thereof, or polypeptide or the consensus sequence or the polypeptide motif, as depicted in Table I, II or IV, application No. 15, column 5 or 8 in the respective same line as the nucleic acid molecule SEQ ID NO. 2935 or polypeptide SEQ ID NO. 2936, respectively, or a homolog or a fragment thereof, is increased or generated, or if the activity glutaredoxin is increased or generated in a non-human organism, like a microorganism or a plant cell, plant or part thereof, especially with non-targeted localization, whereby the respective line disclose in column 7 the fine chemical succinate. For example, an increase of the succinate of at least 1 percent, particularly in a range of 30 to 257-percent is conferred as compared to a corresponding non-transformed wild type non-human organism.

[73160] Accordingly, in one embodiment, an increase of glycerate in a non-human organism, as compared to a corresponding non-transformed wild type non-human organism, is conferred in the process of the invention, if the activity of a polypeptide showing the activity of a thioredoxin, or if the activity of the polypeptide At4g03520, preferably represented by SEQ ID NO. 133542, or a homolog or fragment thereof, or if the activity of a polypeptide encoded by a nucleic acid molecule comprising the nucleic acid SEQ ID NO. 133541, preferably the coding region thereof, or a homolog or fragment thereof, e.g. derived from Arabidopsis thaliana, is increased or generated. For example the activity of a nucleic acid molecule or a polypeptide comprising the nucleic acid, preferably the coding region thereof, or polypeptide or the consensus sequence or the polypeptide motif, as depicted in Table I, II or IV, application No. 15, column 5 or 8 in the respective same line as the nucleic acid molecule SEQ ID NO. 133541 or polypeptide SEQ ID NO. 133542, respectively, or a homolog or a fragment thereof, is increased or generated, or if the activity thioredoxin is increased or generated in a non-human organism, like a microorganism or a plant cell, plant or part thereof, especially with non-targeted localization, whereby the respective line disclose in column 7 the fine chemical glycerate. For example, an increase of the glycerate of at least 1 percent, particularly in a range of 35 to 112-percent is conferred as compared to a corresponding non-transformed wild type non-human organism.

[73161] Accordingly, in one embodiment, an increase of citramalate in a non-human organism, as compared to a corresponding non-transformed wild type non-human organism, is conferred in the process of the invention, if the activity of a polypeptide showing the activity of a monothiol glutaredoxin, or if the activity of the polypeptide At4g15660, preferably represented by SEQ ID NO. 23483, or a homolog or fragment thereof, or if the activity of a polypeptide encoded by a nucleic acid molecule comprising the nucleic acid SEQ ID NO. 23482, preferably the coding region thereof, or a homolog or fragment thereof, e.g. derived from Arabidopsis thaliana, is increased or generated. For example the activity of a nucleic acid molecule or a polypeptide comprising the nucleic acid, preferably the coding region thereof, or polypeptide or the consensus sequence or the polypeptide motif, as depicted in Table I, II or IV, application No. 15, column 5 or 8 in the respective same line as the nucleic acid molecule SEQ ID NO. 23482 or polypeptide SEQ ID NO. 23483, respectively, or a homolog or a fragment thereof, is increased or generated, or if the activity monothiol glutaredoxin is increased or generated in a non-human organism, like a microorganism or a plant cell, plant or part thereof, especially with non-targeted localization, whereby the respective line disclose in column 7 the fine chemical citramalate. For example, an increase of the citramalate of at least 1 percent, particularly in a range of 71 to 156-percent is conferred as compared to a corresponding non-transformed wild type non-human organism.

[73162] Accordingly, in one embodiment, an increase of fumarate in a non-human organism, as compared to a corresponding non-transformed wild type non-human organism, is conferred in the process of the invention, if the activity of a polypeptide showing the activity of a monothiol glutaredoxin, or if the activity of the polypeptide At4g15660, preferably represented by SEQ ID NO. 23483, or a homolog or fragment thereof, or if the activity of a polypeptide encoded by a nucleic acid molecule comprising the nucleic acid SEQ ID NO. 23482, preferably the coding region thereof, or a homolog or fragment thereof, e.g. derived from Arabidopsis thaliana, is increased or generated. For example the activity of a nucleic acid molecule or a polypeptide comprising the nucleic acid, preferably the coding region thereof, or polypeptide or the consensus sequence or the polypeptide motif, as depicted in Table I, II or IV, application No. 15, column 5 or 8 in the respective same line as the nucleic acid molecule SEQ ID NO. 23482 or polypeptide SEQ ID NO. 23483, respectively, or a homolog or a fragment thereof, is increased or generated, or if the activity monothiol glutaredoxin is increased or generated in a non-human organism, like a microorganism or a plant cell, plant or part thereof, especially with non-targeted localization, whereby the respective line disclose in column 7 the fine chemical fumarate. For example, an increase of the fumarate of at least 1 percent, particularly in a range of 195 to 463-percent is conferred as compared to a corresponding non-transformed wild type non-human organism.

[73163] Accordingly, in one embodiment, an increase of glycerate in a non-human organism, as compared to a corresponding non-transformed wild type non-human organism, is conferred in the process of the invention, if the activity of a polypeptide showing the activity of a monothiol glutaredoxin, or if the activity of the polypeptide At4g15660, preferably represented by SEQ ID NO. 23483, or a homolog or fragment thereof, or if the activity of a polypeptide encoded by a nucleic acid molecule comprising the nucleic acid SEQ ID NO. 23482, preferably the coding region thereof, or a homolog or fragment thereof, e.g. derived from Arabidopsis thaliana, is increased or generated. For example the activity of a nucleic acid molecule or a polypeptide comprising the nucleic acid, preferably the coding region thereof, or polypeptide or the consensus sequence or the polypeptide motif, as depicted in Table I, II or IV, application No. 15, column 5 or 8 in the respective same line as the nucleic acid molecule SEQ ID NO. 23482 or polypeptide SEQ ID NO. 23483, respectively, or a homolog or a fragment thereof, is increased or generated, or if the activity monothiol glutaredoxin is increased or generated in a non-human organism, like a microorganism or a plant cell, plant or part thereof, especially with non-targeted localization, whereby the respective line disclose in column 7 the fine chemical glycerate. For example, an increase of the glycerate of at least 1 percent, particularly in a range of 41 to 158-percent is conferred as compared to a corresponding non-transformed wild type non-human organism.

[73164] Accordingly, in one embodiment, an increase of malate in a non-human organism, as compared to a corresponding non-transformed wild type non-human organism, is conferred in the process of the invention, if the activity of a polypeptide showing the activity of a monothiol glutaredoxin, or if the activity of the polypeptide At4g15660, preferably represented by SEQ ID NO. 23483, or a homolog or fragment thereof, or if the activity of a polypeptide encoded by a nucleic acid molecule comprising the nucleic acid SEQ ID NO. 23482, preferably the coding region thereof, or a homolog or fragment thereof, e.g. derived from Arabidopsis thaliana, is increased or generated. For example the activity of a nucleic acid molecule or a polypeptide comprising the nucleic acid, preferably the coding region thereof, or polypeptide or the consensus sequence or the polypeptide motif, as depicted in Table I, II or IV, application No. 15, column 5 or 8 in the respective same line as the nucleic acid molecule SEQ ID NO. 23482 or polypeptide SEQ ID NO. 23483, respectively, or a homolog or a fragment thereof, is increased or generated, or if the activity monothiol glutaredoxin is increased or generated in a non-human organism, like a microorganism or a plant cell, plant or part thereof, especially with non-targeted localization, whereby the respective line disclose in column 7 the fine chemical malate. For example, an increase of the malate of at least 1 percent, particularly in a range of 123 to 321-percent is conferred as compared to a corresponding non-transformed wild type non-human organism.

[73165] Accordingly, in one embodiment, an increase of succinate in a non-human organism, as compared to a corresponding non-transformed wild type non-human organism, is conferred in the process of the invention, if the activity of a polypeptide showing the activity of a monothiol glutaredoxin, or if the activity of the polypeptide At4g15660, preferably represented by SEQ ID NO. 23483, or a homolog or fragment thereof, or if the activity of a polypeptide encoded by a nucleic acid molecule comprising the nucleic acid SEQ ID NO. 23482, preferably the coding region thereof, or a homolog or fragment thereof, e.g. derived from Arabidopsis thaliana, is increased or generated. For example the activity of a nucleic acid molecule or a polypeptide comprising the nucleic acid, preferably the coding region thereof, or polypeptide or the consensus sequence or the polypeptide motif, as depicted in Table I, II or IV, application No. 15, column 5 or 8 in the respective same line as the nucleic acid molecule SEQ ID NO. 23482 or polypeptide SEQ ID NO. 23483, respectively, or a homolog or a fragment thereof, is increased or generated, or if the activity monothiol glutaredoxin is increased or generated in a non-human organism, like a microorganism or a plant cell, plant or part thereof, especially with non-targeted localization, whereby the respective line disclose in column 7 the fine chemical succinate. For example, an increase of the succinate of at least 1 percent, particularly in a range of 133 to 346-percent is conferred as compared to a corresponding non-transformed wild type non-human organism.

[73166] Accordingly, in one embodiment, an increase of vitamin c and/or threonic acid in a non-human organism, as compared to a corresponding non-transformed wild type non-human organism, is conferred in the process of the invention, if the activity of a polypeptide showing the activity of a monothiol glutaredoxin, or if the activity of the polypeptide At4g15660, preferably represented by SEQ ID NO. 23483, or a homolog or fragment thereof, or if the activity of a polypeptide encoded by a nucleic acid molecule comprising the nucleic acid SEQ ID NO. 23482, preferably the coding region thereof, or a homolog or fragment thereof, e.g. derived from Arabidopsis thaliana, is increased or generated. For example the activity of a nucleic acid molecule or a polypeptide comprising the nucleic acid, preferably the coding region thereof, or polypeptide or the consensus sequence or the polypeptide motif, as depicted in Table I, II or IV, application No. 15, column 5 or 8 in the respective same line as the nucleic acid molecule SEQ ID NO. 23482 or polypeptide SEQ ID NO. 23483, respectively, or a homolog or a fragment thereof, is increased or generated, or if the activity monothiol glutaredoxin is increased or generated in a non-human organism, like a microorganism or a plant cell, plant or part thereof, especially with non-targeted localization, whereby the respective line disclose in column 7 the fine chemical vitamin c and/or threonic acid. For example, an increase of the vitamin c and/or threonic acid of at least 1 percent, particularly in a range of 29 to 89-percent is conferred as compared to a corresponding non-transformed wild type non-human organism.

[73167] Accordingly, in one embodiment, an increase of fumarate in a non-human organism, as compared to a corresponding non-transformed wild type non-human organism, is conferred in the process of the invention, if the activity of a polypeptide showing the activity of a monothiol glutaredoxin, or if the activity of the polypeptide At4g15670, preferably represented by SEQ ID NO. 3280, or a homolog or fragment thereof, or if the activity of a polypeptide encoded by a nucleic acid molecule comprising the nucleic acid SEQ ID NO. 3279, preferably the coding region thereof, or a homolog or fragment thereof, e.g. derived from Arabidopsis thaliana, is increased or generated. For example the activity of a nucleic acid molecule or a polypeptide comprising the nucleic acid, preferably the coding region thereof, or polypeptide or the consensus sequence or the polypeptide motif, as depicted in Table I, II or IV, application No. 15, column 5 or 8 in the respective same line as the nucleic acid molecule SEQ ID NO. 3279 or polypeptide SEQ ID NO. 3280, respectively, or a homolog or a fragment thereof, is increased or generated, or if the activity monothiol glutaredoxin is increased or generated in a non-human organism, like a microorganism or a plant cell, plant or part thereof, especially with non-targeted localization, whereby the respective line disclose in column 7 the fine chemical fumarate. For example, an increase of the fumarate of at least 1 percent, particularly in a range of 196 to 830-percent is conferred as compared to a corresponding non-transformed wild type non-human organism.

[73168] Accordingly, in one embodiment, an increase of glycerate in a non-human organism, as compared to a corresponding non-transformed wild type non-human organism, is conferred in the process of the invention, if the activity of a polypeptide showing the activity of a monothiol glutaredoxin, or if the activity of the polypeptide At4g15670, preferably represented by SEQ ID NO. 3280, or a homolog or fragment thereof, or if the activity of a polypeptide encoded by a nucleic acid molecule comprising the nucleic acid SEQ ID NO. 3279, preferably the coding region thereof, or a homolog or fragment thereof, e.g. derived from Arabidopsis thaliana, is increased or generated. For example the activity of a nucleic acid molecule or a polypeptide comprising the nucleic acid, preferably the coding region thereof, or polypeptide or the consensus sequence or the polypeptide motif, as depicted in Table I, II or IV, application No. 15, column 5 or 8 in the respective same line as the nucleic acid molecule SEQ ID NO. 3279 or polypeptide SEQ ID NO. 3280, respectively, or a homolog or a fragment thereof, is increased or generated, or if the activity monothiol glutaredoxin is increased or generated in a non-human organism, like a microorganism or a plant cell, plant or part thereof, especially with non-targeted localization, whereby the respective line disclose in column 7 the fine chemical glycerate. For example, an increase of the glycerate of at least 1 percent, particularly in a range of 49 to 224-percent is conferred as compared to a corresponding non-transformed wild type non-human organism.

[73169] Accordingly, in one embodiment, an increase of malate in a non-human organism, as compared to a corresponding non-transformed wild type non-human organism, is conferred in the process of the invention, if the activity of a polypeptide showing the activity of a monothiol glutaredoxin, or if the activity of the polypeptide At4g15670, preferably represented by SEQ ID NO. 3280, or a homolog or fragment thereof, or if the activity of a polypeptide encoded by a nucleic acid molecule comprising the nucleic acid SEQ ID NO. 3279, preferably the coding region thereof, or a homolog or fragment thereof, e.g. derived from Arabidopsis thaliana, is increased or generated. For example the activity of a nucleic acid molecule or a polypeptide comprising the nucleic acid, preferably the coding region thereof, or polypeptide or the consensus sequence or the polypeptide motif, as depicted in Table I, II or IV, application No. 15, column 5 or 8 in the respective same line as the nucleic acid molecule SEQ ID NO. 3279 or polypeptide SEQ ID NO. 3280, respectively, or a homolog or a fragment thereof, is increased or generated, or if the activity monothiol glutaredoxin is increased or generated in a non-human organism, like a microorganism or a plant cell, plant or part thereof, especially with non-targeted localization, whereby the respective line disclose in column 7 the fine chemical malate. For example, an increase of the malate of at least 1 percent, particularly in a range of 117 to 935-percent is conferred as compared to a corresponding non-transformed wild type non-human organism.

[73170] Accordingly, in one embodiment, an increase of succinate in a non-human organism, as compared to a corresponding non-transformed wild type non-human organism, is conferred in the process of the invention, if the activity of a polypeptide showing the activity of a monothiol glutaredoxin, or if the activity of the polypeptide At4g15670, preferably represented by SEQ ID NO. 3280, or a homolog or fragment thereof, or if the activity of a polypeptide encoded by a nucleic acid molecule comprising the nucleic acid SEQ ID NO. 3279, preferably the coding region thereof, or a homolog or fragment thereof, e.g. derived from Arabidopsis thaliana, is increased or generated. For example the activity of a nucleic acid molecule or a polypeptide comprising the nucleic acid, preferably the coding region thereof, or polypeptide or the consensus sequence or the polypeptide motif, as depicted in Table I, II or IV, application No. 15, column 5 or 8 in the respective same line as the nucleic acid molecule SEQ ID NO. 3279 or polypeptide SEQ ID NO. 3280, respectively, or a homolog or a fragment thereof, is increased or generated, or if the activity monothiol glutaredoxin is increased or generated in a non-human organism, like a microorganism or a plant cell, plant or part thereof, especially with non-targeted localization, whereby the respective line disclose in column 7 the fine chemical succinate. For example, an increase of the succinate of at least 1 percent, particularly in a range of 77 to 314-percent is conferred as compared to a corresponding non-transformed wild type non-human organism.

[73171] Accordingly, in one embodiment, an increase of citramalate in a non-human organism, as compared to a corresponding non-transformed wild type non-human organism, is conferred in the process of the invention, if the activity of a polypeptide showing the activity of a monothiol glutaredoxin, or if the activity of the polypeptide At4g15690, preferably represented by SEQ ID NO. 23845, or a homolog or fragment thereof, or if the activity of a polypeptide encoded by a nucleic acid molecule comprising the nucleic acid SEQ ID NO. 23844, preferably the coding region thereof, or a homolog or fragment thereof, e.g. derived from Arabidopsis thaliana, is increased or generated. For example the activity of a nucleic acid molecule or a polypeptide comprising the nucleic acid, preferably the coding region thereof, or polypeptide or the consensus sequence or the polypeptide motif, as depicted in Table I, II or IV, application No. 15, column 5 or 8 in the respective same line as the nucleic acid molecule SEQ ID NO. 23844 or polypeptide SEQ ID NO. 23845, respectively, or a homolog or a fragment thereof, is increased or generated, or if the activity monothiol glutaredoxin is increased or generated in a non-human organism, like a microorganism or a plant cell, plant or part thereof, especially with non-targeted localization, whereby the respective line disclose in column 7 the fine chemical citramalate. For example, an increase of the citramalate of at least 1 percent, particularly in a range of 47 to 204-percent is conferred as compared to a corresponding non-transformed wild type non-human organism.

[73172] Accordingly, in one embodiment, an increase of fumarate in a non-human organism, as compared to a corresponding non-transformed wild type non-human organism, is conferred in the process of the invention, if the activity of a polypeptide showing the activity of a monothiol glutaredoxin, or if the activity of the polypeptide At4g15690, preferably represented by SEQ ID NO. 23845, or a homolog or fragment thereof, or if the activity of a polypeptide encoded by a nucleic acid molecule comprising the nucleic acid SEQ ID NO. 23844, preferably the coding region thereof, or a homolog or fragment thereof, e.g. derived from Arabidopsis thaliana, is increased or generated. For example the activity of a nucleic acid molecule or a polypeptide comprising the nucleic acid, preferably the coding region thereof, or polypeptide or the consensus sequence or the polypeptide motif, as depicted in Table I, II or IV, application No. 15, column 5 or 8 in the respective same line as the nucleic acid molecule SEQ ID NO. 23844 or polypeptide SEQ ID NO. 23845, respectively, or a homolog or a fragment thereof, is increased or generated, or if the activity monothiol glutaredoxin is increased or generated in a non-human organism, like a microorganism or a plant cell, plant or part thereof, especially with non-targeted localization, whereby the respective line disclose in column 7 the fine chemical fumarate. For example, an increase of the fumarate of at least 1 percent, particularly in a range of 66 to 427-percent is conferred as compared to a corresponding non-transformed wild type non-human organism.

[73173] Accordingly, in one embodiment, an increase of malate in a non-human organism, as compared to a corresponding non-transformed wild type non-human organism, is conferred in the process of the invention, if the activity of a polypeptide showing the activity of a monothiol glutaredoxin, or if the activity of the polypeptide At4g15690, preferably represented by SEQ ID NO. 23845, or a homolog or fragment thereof, or if the activity of a polypeptide encoded by a nucleic acid molecule comprising the nucleic acid SEQ ID NO. 23844, preferably the coding region thereof, or a homolog or fragment thereof, e.g. derived from Arabidopsis thaliana, is increased or generated. For example the activity of a nucleic acid molecule or a polypeptide comprising the nucleic acid, preferably the coding region thereof, or polypeptide or the consensus sequence or the polypeptide motif, as depicted in Table I, II or IV, application No. 15, column 5 or 8 in the respective same line as the nucleic acid molecule SEQ ID NO. 23844 or polypeptide SEQ ID NO. 23845, respectively, or a homolog or a fragment thereof, is increased or generated, or if the activity monothiol glutaredoxin is increased or generated in a non-human organism, like a microorganism or a plant cell, plant or part thereof, especially with non-targeted localization, whereby the respective line disclose in column 7 the fine chemical malate. For example, an increase of the malate of at least 1 percent, particularly in a range of 76 to 386-percent is conferred as compared to a corresponding non-transformed wild type non-human organism.

[73174] Accordingly, in one embodiment, an increase of succinate in a non-human organism, as compared to a corresponding non-transformed wild type non-human organism, is conferred in the process of the invention, if the activity of a polypeptide showing the activity of a monothiol glutaredoxin, or if the activity of the polypeptide At4g15690, preferably represented by SEQ ID NO. 23845, or a homolog or fragment thereof, or if the activity of a polypeptide encoded by a nucleic acid molecule comprising the nucleic acid SEQ ID NO. 23844, preferably the coding region thereof, or a homolog or fragment thereof, e.g. derived from Arabidopsis thaliana, is increased or generated. For example the activity of a nucleic acid molecule or a polypeptide comprising the nucleic acid, preferably the coding region thereof, or polypeptide or the consensus sequence or the polypeptide motif, as depicted in Table I, II or IV, application No. 15, column 5 or 8 in the respective same line as the nucleic acid molecule SEQ ID NO. 23844 or polypeptide SEQ ID NO. 23845, respectively, or a homolog or a fragment thereof, is increased or generated, or if the activity monothiol glutaredoxin is increased or generated in a non-human organism, like a microorganism or a plant cell, plant or part thereof, especially with non-targeted localization, whereby the respective line disclose in column 7 the fine chemical succinate. For example, an increase of the succinate of at least 1 percent, particularly in a range of 32 to 158-percent is conferred as compared to a corresponding non-transformed wild type non-human organism.

[73175] Accordingly, in one embodiment, an increase of vitamin c and/or threonic acid in a non-human organism, as compared to a corresponding non-transformed wild type non-human organism, is conferred in the process of the invention, if the activity of a polypeptide showing the activity of a monothiol glutaredoxin, or if the activity of the polypeptide At4g15690, preferably represented by SEQ ID NO. 23845, or a homolog or fragment thereof, or if the activity of a polypeptide encoded by a nucleic acid molecule comprising the nucleic acid SEQ ID NO. 23844, preferably the coding region thereof, or a homolog or fragment thereof, e.g. derived from Arabidopsis thaliana, is increased or generated. For example the activity of a nucleic acid molecule or a polypeptide comprising the nucleic acid, preferably the coding region thereof, or polypeptide or the consensus sequence or the polypeptide motif, as depicted in Table I, II or IV, application No. 15, column 5 or 8 in the respective same line as the nucleic acid molecule SEQ ID NO. 23844 or polypeptide SEQ ID NO. 23845, respectively, or a homolog or a fragment thereof, is increased or generated, or if the activity monothiol glutaredoxin is increased or generated in a non-human organism, like a microorganism or a plant cell, plant or part thereof, especially with non-targeted localization, whereby the respective line disclose in column 7 the fine chemical vitamin c and/or threonic acid. For example, an increase of the vitamin c and/or threonic acid of at least 1 percent, particularly in a range of 30 to 86-percent is conferred as compared to a corresponding non-transformed wild type non-human organism.

[73176] Accordingly, in one embodiment, an increase of glycerate in a non-human organism, as compared to a corresponding non-transformed wild type non-human organism, is conferred in the process of the invention, if the activity of a polypeptide showing the activity of a monothiol glutaredoxin, or if the activity of the polypeptide At4g15700, preferably represented by SEQ ID NO. 3655, or a homolog or fragment thereof, or if the activity of a polypeptide encoded by a nucleic acid molecule comprising the nucleic acid SEQ ID NO. 3654, preferably the coding region thereof, or a homolog or fragment thereof, e.g. derived from Arabidopsis thaliana, is increased or generated. For example the activity of a nucleic acid molecule or a polypeptide comprising the nucleic acid, preferably the coding region thereof, or polypeptide or the consensus sequence or the polypeptide motif, as depicted in Table I, II or IV, application No. 15, column 5 or 8 in the respective same line as the nucleic acid molecule SEQ ID NO. 3654 or polypeptide SEQ ID NO. 3655, respectively, or a homolog or a fragment thereof, is increased or generated, or if the activity monothiol glutaredoxin is increased or generated in a non-human organism, like a microorganism or a plant cell, plant or part thereof, especially with non-targeted localization, whereby the respective line disclose in column 7 the fine chemical glycerate. For example, an increase of the glycerate of at least 1 percent, particularly in a range of 48 to 198-percent is conferred as compared to a corresponding non-transformed wild type non-human organism.

[73177] Accordingly, in one embodiment, an increase of citramalate in a non-human organism, as compared to a corresponding non-transformed wild type non-human organism, is conferred in the process of the invention, if the activity of a polypeptide showing the activity of a protein phosphatase, or if the activity of the polypeptide At4g26080, preferably represented by SEQ ID NO. 68850, or a homolog or fragment thereof, or if the activity of a polypeptide encoded by a nucleic acid molecule comprising the nucleic acid SEQ ID NO. 68849, preferably the coding region thereof, or a homolog or fragment thereof, e.g. derived from Arabidopsis thaliana, is increased or generated. For example the activity of a nucleic acid molecule or a polypeptide comprising the nucleic acid, preferably the coding region thereof, or polypeptide or the consensus sequence or the polypeptide motif, as depicted in Table I, II or IV, application No. 15, column 5 or 8 in the respective same line as the nucleic acid molecule SEQ ID NO. 68849 or polypeptide SEQ ID NO. 68850, respectively, or a homolog or a fragment thereof, is increased or generated, or if the activity protein phosphatase is increased or generated in a non-human organism, like a microorganism or a plant cell, plant or part thereof, especially with non-targeted localization, whereby the respective line disclose in column 7 the fine chemical citramalate. For example, an increase of the citramalate of at least 1 percent, particularly in a range of 47 to 70-percent is conferred as compared to a corresponding non-transformed wild type non-human organism.

[73178] Accordingly, in one embodiment, an increase of succinate in a non-human organism, as compared to a corresponding non-transformed wild type non-human organism, is conferred in the process of the invention, if the activity of a polypeptide showing the activity of a protein phosphatase, or if the activity of the polypeptide At4g26080, preferably represented by SEQ ID NO. 68850, or a homolog or fragment thereof, or if the activity of a polypeptide encoded by a nucleic acid molecule comprising the nucleic acid SEQ ID NO. 68849, preferably the coding region thereof, or a homolog or fragment thereof, e.g. derived from Arabidopsis thaliana, is increased or generated. For example the activity of a nucleic acid molecule or a polypeptide comprising the nucleic acid, preferably the coding region thereof, or polypeptide or the consensus sequence or the polypeptide motif, as depicted in Table I, II or IV, application No. 15, column 5 or 8 in the respective same line as the nucleic acid molecule SEQ ID NO. 68849 or polypeptide SEQ ID NO. 68850, respectively, or a homolog or a fragment thereof, is increased or generated, or if the activity protein phosphatase is increased or generated in a non-human organism, like a microorganism or a plant cell, plant or part thereof, especially with non-targeted localization, whereby the respective line disclose in column 7 the fine chemical succinate. For example, an increase of the succinate of at least 1 percent, particularly in a range of 30 to 52-percent is conferred as compared to a corresponding non-transformed wild type non-human organism.

[73179] Accordingly, in one embodiment, an increase of citramalate in a non-human organism, as compared to a corresponding non-transformed wild type non-human organism, is conferred in the process of the invention, if the activity of a polypeptide showing the activity of a glutaredoxin, or if the activity of the polypeptide At4g33040, preferably represented by SEQ ID NO. 4103, or a homolog or fragment thereof, or if the activity of a polypeptide encoded by a nucleic acid molecule comprising the nucleic acid SEQ ID NO. 4102, preferably the coding region thereof, or a homolog or fragment thereof, e.g. derived from Arabidopsis thaliana, is increased or generated. For example the activity of a nucleic acid molecule or a polypeptide comprising the nucleic acid, preferably the coding region thereof, or polypeptide or the consensus sequence or the polypeptide motif, as depicted in Table I, II or IV, application No. 15, column 5 or 8 in the respective same line as the nucleic acid molecule SEQ ID NO. 4102 or polypeptide SEQ ID NO. 4103, respectively, or a homolog or a fragment thereof, is increased or generated, or if the activity glutaredoxin is increased or generated in a non-human organism, like a microorganism or a plant cell, plant or part thereof, especially with non-targeted localization, whereby the respective line disclose in column 7 the fine chemical citramalate. For example, an increase of the citramalate of at least 1 percent, particularly in a range of 43 to 136-percent is conferred as compared to a corresponding non-transformed wild type non-human organism.

[73180] Accordingly, in one embodiment, an increase of fumarate in a non-human organism, as compared to a corresponding non-transformed wild type non-human organism, is conferred in the process of the invention, if the activity of a polypeptide showing the activity of a glutaredoxin, or if the activity of the polypeptide At4g33040, preferably represented by SEQ ID NO. 4103, or a homolog or fragment thereof, or if the activity of a polypeptide encoded by a nucleic acid molecule comprising the nucleic acid SEQ ID NO. 4102, preferably the coding region thereof, or a homolog or fragment thereof, e.g. derived from Arabidopsis thaliana, is increased or generated. For example the activity of a nucleic acid molecule or a polypeptide comprising the nucleic acid, preferably the coding region thereof, or polypeptide or the consensus sequence or the polypeptide motif, as depicted in Table I, II or IV, application No. 15, column 5 or 8 in the respective same line as the nucleic acid molecule SEQ ID NO. 4102 or polypeptide SEQ ID NO. 4103, respectively, or a homolog or a fragment thereof, is increased or generated, or if the activity glutaredoxin is increased or generated in a non-human organism, like a microorganism or a plant cell, plant or part thereof, especially with non-targeted localization, whereby the respective line disclose in column 7 the fine chemical fumarate. For example, an increase of the fumarate of at least 1 percent, particularly in a range of 72 to 537-percent is conferred as compared to a corresponding non-transformed wild type non-human organism.

[73181] Accordingly, in one embodiment, an increase of malate in a non-human organism, as compared to a corresponding non-transformed wild type non-human organism, is conferred in the process of the invention, if the activity of a polypeptide showing the activity of a glutaredoxin, or if the activity of the polypeptide At4g33040, preferably represented by SEQ ID NO. 4103, or a homolog or fragment thereof, or if the activity of a polypeptide encoded by a nucleic acid molecule comprising the nucleic acid SEQ ID NO. 4102, preferably the coding region thereof, or a homolog or fragment thereof, e.g. derived from Arabidopsis thaliana, is increased or generated. For example the activity of a nucleic acid molecule or a polypeptide comprising the nucleic acid, preferably the coding region thereof, or polypeptide or the consensus sequence or the polypeptide motif, as depicted in Table I, II or IV, application No. 15, column 5 or 8 in the respective same line as the nucleic acid molecule SEQ ID NO. 4102 or polypeptide SEQ ID NO. 4103, respectively, or a homolog or a fragment thereof, is increased or generated, or if the activity glutaredoxin is increased or generated in a non-human organism, like a microorganism or a plant cell, plant or part thereof, especially with non-targeted localization, whereby the respective line disclose in column 7 the fine chemical malate. For example, an increase of the malate of at least 1 percent, particularly in a range of 65 to 296-percent is conferred as compared to a corganism responding non-transformed wild type non-human organism.

[73182] Accordingly, in one embodiment, an increase of succinate in a non-human organism, as compared to a corresponding non-transformed wild type non-human organism, is conferred in the process of the invention, if the activity of a polypeptide showing the activity of a glutaredoxin, or if the activity of the polypeptide At4g33040, preferably represented by SEQ ID NO. 4103, or a homolog or fragment thereof, or if the activity of a polypeptide encoded by a nucleic acid molecule comprising the nucleic acid SEQ ID NO. 4102, preferably the coding region thereof, or a homolog or fragment thereof, e.g. derived from Arabidopsis thaliana, is increased or generated. For example the activity of a nucleic acid molecule or a polypeptide comprising the nucleic acid, preferably the coding region thereof, or polypeptide or the consensus sequence or the polypeptide motif, as depicted in Table I, II or IV, application No. 15, column 5 or 8 in the respective same line as the nucleic acid molecule SEQ ID NO. 4102 or polypeptide SEQ ID NO. 4103, respectively, or a homolog or a fragment thereof, is increased or generated, or if the activity glutaredoxin is increased or generated in a non-human organism, like a microorganism or a plant cell, plant or part thereof, especially with non-targeted localization, whereby the respective line disclose in column 7 the fine chemical succinate. For example, an increase of the succinate of at least 1 percent, particularly in a range of 42 to 149-percent is conferred as compared to a corresponding non-transformed wild type non-human organism.

[73183] Accordingly, in one embodiment, an increase of vitamin c and/or threonic acid in a non-human organism, as compared to a corresponding non-transformed wild type non-human organism, is conferred in the process of the invention, if the activity of a polypeptide showing the activity of a glutaredoxin, or if the activity of the polypeptide At4g33040, preferably represented by SEQ ID NO. 4103, or a homolog or fragment thereof, or if the activity of a polypeptide encoded by a nucleic acid molecule comprising the nucleic acid SEQ ID NO. 4102, preferably the coding region thereof, or a homolog or fragment thereof, e.g. derived from Arabidopsis thaliana, is increased or generated. For example the activity of a nucleic acid molecule or a polypeptide comprising the nucleic acid, preferably the coding region thereof, or polypeptide or the consensus sequence or the polypeptide motif, as depicted in Table I, II or IV, application No. 15, column 5 or 8 in the respective same line as the nucleic acid molecule SEQ ID NO. 4102 or polypeptide SEQ ID NO. 4103, respectively, or a homolog or a fragment thereof, is increased or generated, or if the activity glutaredoxin is increased or generated in a non-human organism, like a microorganism organism or a plant cell, plant or part thereof, especially with non-targeted localization, whereby the respective line disclose in column 7 the fine chemical vitamin c and/or threonic acid. For example, an increase of the vitamin c and/or threonic acid of at least 1 percent, particularly in a range of 32 to 102-percent is conferred as compared to a corresponding non-transformed wild type non-human organism.

[73184] Accordingly, in one embodiment, an increase of malate in a non-human organism, as compared to a corresponding non-transformed wild type non-human organism, is conferred in the process of the invention, if the activity of a polypeptide showing the activity of a calcium-dependent protein kinase, or if the activity of the polypeptide At4g35310, preferably represented by SEQ ID NO. 4349, or a homolog or fragment thereof, or if the activity of a polypeptide encoded by a nucleic acid molecule comprising the nucleic acid SEQ ID NO. 4348, preferably the coding region thereof, or a homolog or fragment thereof, e.g. derived from Arabidopsis thaliana, is increased or generated. For example the activity of a nucleic acid molecule or a polypeptide comprising the nucleic acid, preferably the coding region thereof, or polypeptide or the consensus sequence or the polypeptide motif, as depicted in Table I, II or IV, application No. 15, column 5 or 8 in the respective same line as the nucleic acid molecule SEQ ID NO. 4348 or polypeptide SEQ ID NO. 4349, respectively, or a homolog or a fragment thereof, is increased or generated, or if the activity calcium-dependent protein kinase is increased or generated in a non-human organism, like a microorganism or a plant cell, plant or part thereof, especially with non-targeted localization, whereby the respective line disclose in column 7 the fine chemical malate. For example, an increase of the malate of at least 1 percent, particularly in a range of 70 to 296-percent is conferred as compared to a corresponding non-transformed wild type non-human organism.

[73185] Accordingly, in one embodiment, an increase of fumarate in a non-human organism, as compared to a corresponding non-transformed wild type non-human organism, is conferred in the process of the invention, if the activity of a polypeptide showing the activity of a heat shock transcription factor, or if the activity of the polypeptide At5g03720, preferably represented by SEQ ID NO. 24439, or a homolog or fragment thereof, or if the activity of a polypeptide encoded by a nucleic acid molecule comprising the nucleic acid SEQ ID NO. 24438, preferably the coding region thereof, or a homolog or fragment thereof, e.g. derived from Arabidopsis thaliana, is increased or generated. For example the activity of a nucleic acid molecule or a polypeptide comprising the nucleic acid, preferably the coding region thereof, or polypeptide or the consensus sequence or the polypeptide motif, as depicted in Table I, II or IV, application No. 15, column 5 or 8 in the respective same line as the nucleic acid molecule SEQ ID NO. 24438 or polypeptide SEQ ID NO. 24439, respectively, or a homolog or a fragment thereof, is increased or generated, or if the activity heat shock transcription factor is increased or generated in a non-human organism, like a microorganism or a plant cell, plant or part thereof, especially with non-targeted localization, whereby the respective line disclose in column 7 the fine chemical fumarate. For example, an increase of the fumarate of at least 1 percent, particularly in a range of 66 to 1135-percent is conferred as compared to a corresponding non-transformed wild type non-human organism.

[73186] Accordingly, in one embodiment, an increase of malate in a non-human organism, as compared to a corresponding non-transformed wild type non-human organism, is conferred in the process of the invention, if the activity of a polypeptide showing the activity of a heat shock transcription factor, or if the activity of the polypeptide At5g03720, preferably represented by SEQ ID NO. 24439, or a homolog or fragment thereof, or if the activity of a polypeptide encoded by a nucleic acid molecule comprising the nucleic acid SEQ ID NO. 24438, preferably the coding region thereof, or a homolog or fragment thereof, e.g. derived from Arabidopsis thaliana, is increased or generated. For example the activity of a nucleic acid molecule or a polypeptide comprising the nucleic acid, preferably the coding region thereof, or polypeptide or the consensus sequence or the polypeptide motif, as depicted in Table I, II or IV, application No. 15, column 5 or 8 in the respective same line as the nucleic acid molecule SEQ ID NO. 24438 or polypeptide SEQ ID NO. 24439, respectively, or a homolog or a fragment thereof, is increased or generated, or if the activity heat shock transcription factor is increased or generated in a non-human organism, like a microorganism or a plant cell, plant or part thereof, especially with non-targeted localization, whereby the respective line disclose in column 7 the fine chemical malate. For example, an increase of the malate of at least 1 percent, particularly in a range of 133 to 687-percent is conferred as compared to a corresponding non-transformed wild type non-human organism.

[73187] Accordingly, in one embodiment, an increase of succinate in a non-human organism, as compared to a corresponding non-transformed wild type non-human organism, is conferred in the process of the invention, if the activity of a polypeptide showing the activity of a heat shock transcription factor, or if the activity of the polypeptide At5g03720, preferably represented by SEQ ID NO. 24439, or a homolog or fragment thereof, or if the activity of a polypeptide encoded by a nucleic acid molecule comprising the nucleic acid SEQ ID NO. 24438, preferably the coding region thereof, or a homolog or fragment thereof, e.g. derived from Arabidopsis thaliana, is increased or generated. For example the activity of a nucleic acid molecule or a polypeptide comprising the nucleic acid, preferably the coding region thereof, or polypeptide or the consensus sequence or the polypeptide motif, as depicted in Table I, II or IV, application No. 15, column 5 or 8 in the respective same line as the nucleic acid molecule SEQ ID NO. 24438 or polypeptide SEQ ID NO. 24439, respectively, or a homolog or a fragment thereof, is increased or generated, or if the activity heat shock transcription factor is increased or generated in a non-human organism, like a microorganism or a plant cell, plant or part thereof, especially with non-targeted localization, whereby the respective line disclose in column 7 the fine chemical succinate. For example, an increase of the succinate of at least 1 percent, particularly in a range of 30 to 376-percent is conferred as compared to a corresponding non-transformed wild type non-human organism.

[73188] Accordingly, in one embodiment, an increase of glycerate in a non-human organism, as compared to a corresponding non-transformed wild type non-human organism, is conferred in the process of the invention, if the activity of a polypeptide showing the activity of a gibberellin 20-oxidase, or if the activity of the polypeptide At5g07200, preferably represented by SEQ ID NO. 24493, or a homolog or fragment thereof, or if the activity of a polypeptide encoded by a nucleic acid molecule comprising the nucleic acid SEQ ID NO. 24492, preferably the coding region thereof, or a homolog or fragment thereof, e.g. derived from Arabidopsis thaliana, is increased or generated. For example the activity of a nucleic acid molecule or a polypeptide comprising the nucleic acid, preferably the coding region thereof, or polypeptide or the consensus sequence or the polypeptide motif, as depicted in Table I, II or IV, application No. 15, column 5 or 8 in the respective same line as the nucleic acid molecule SEQ ID NO. 24492 or polypeptide SEQ ID NO. 24493, respectively, or a homolog or a fragment thereof, is increased or generated, or if the activity gibberellin 20-oxidase is increased or generated in a non-human organism, like a microorganism or a plant cell, plant or part thereof, especially with non-targeted localization, whereby the respective line disclose in column 7 the fine chemical glycerate. For example, an increase of the glycerate of at least 1 percent, particularly in a range of 33 to 74-percent is conferred as compared to a corresponding non-transformed wild type non-human organism.

[73189] Accordingly, in one embodiment, an increase of malate in a non-human organism, as compared to a corresponding non-transformed wild type non-human organism, is conferred in the process of the invention, if the activity of a polypeptide showing the activity of a gibberellin 20-oxidase, or if the activity of the polypeptide At5g07200, preferably represented by SEQ ID NO. 24493, or a homolog or fragment thereof, or if the activity of a polypeptide encoded by a nucleic acid molecule comprising the nucleic acid SEQ ID NO. 24492, preferably the coding region thereof, or a homolog or fragment thereof, e.g. derived from Arabidopsis thaliana, is increased or generated. For example the activity of a nucleic acid molecule or a polypeptide comprising the nucleic acid, preferably the coding region thereof, or polypeptide or the consensus sequence or the polypeptide motif, as depicted in Table I, II or IV, application No. 15, column 5 or 8 in the respective same line as the nucleic acid molecule SEQ ID NO. 24492 or polypeptide SEQ ID NO. 24493, respectively, or a homolog or a fragment thereof, is increased or generated, or if the activity gibberellin 20-oxidase is increased or generated in a non-human organism, like a microorganism organism or a plant cell, plant or part thereof, especially with non-targeted localization, whereby the respective line disclose in column 7 the fine chemical malate. For example, an increase of the malate of at least 1 percent, particularly in a range of 52 to 329-percent is conferred as compared to a corresponding non-transformed wild type non-human organism.

[73190] Accordingly, in one embodiment, an increase of succinate in a non-human organism, as compared to a corresponding non-transformed wild type non-human organism, is conferred in the process of the invention, if the activity of a polypeptide showing the activity of a monothiol glutaredoxin, or if the activity of the polypeptide At5g18600, preferably represented by SEQ ID NO. 4905, or a homolog or fragment thereof, or if the activity of a polypeptide encoded by a nucleic acid molecule comprising the nucleic acid SEQ ID NO. 4904, preferably the coding region thereof, or a homolog or fragment thereof, e.g. derived from Arabidopsis thaliana, is increased or generated. For example the activity of a nucleic acid molecule or a polypeptide comprising the nucleic acid, preferably the coding region thereof, or polypeptide or the consensus sequence or the polypeptide motif, as depicted in Table I, II or IV, application No. 15, column 5 or 8 in the respective same line as the nucleic acid molecule SEQ ID NO. 4904 or polypeptide SEQ ID NO. 4905, respectively, or a homolog or a fragment thereof, is increased or generated, or if the activity monothiol glutaredoxin is increased or generated in a non-human organism, like a microorganism or a plant cell, plant or part thereof, especially with non-targeted localization, whereby the respective line disclose in column 7 the fine chemical succinate. For example, an increase of the succinate of at least 1 percent, particularly in a range of 39 to 132-percent is conferred as compared to a corresponding non-transformed wild type non-human organism.

[73191] Accordingly, in one embodiment, an increase of malate in a non-human organism, as compared to a corresponding non-transformed wild type non-human organism, is conferred in the process of the invention, if the activity of a polypeptide showing the activity of a translation initiation factor subunit, or if the activity of the polypeptide At5g27640, preferably represented by SEQ ID NO. 25345, or a homolog or fragment thereof, or if the activity of a polypeptide encoded by a nucleic acid molecule comprising the nucleic acid SEQ ID NO. 25344, preferably the coding region thereof, or a homolog or fragment thereof, e.g. derived from Arabidopsis thaliana, is increased or generated. For example the activity of a nucleic acid molecule or a polypeptide comprising the nucleic acid, preferably the coding region thereof, or polypeptide or the consensus sequence or the polypeptide motif, as depicted in Table I, II or IV, application No. 15, column 5 or 8 in the respective same line as the nucleic acid molecule SEQ ID NO. 25344 or polypeptide SEQ ID NO. 25345, respectively, or a homolog or a fragment thereof, is increased or generated, or if the activity translation initiation factor subunit is increased or generated in a non-human organism, like a microorganism or a plant cell, plant or part thereof, especially with non-targeted localization, whereby the respective line disclose in column 7 the fine chemical malate. For example, an increase of the malate of at least 1 percent, particularly in a range of 52 to 173-percent is conferred as compared to a corresponding non-transformed wild type non-human organism.

[73192] Accordingly, in one embodiment, an increase of fumarate in a non-human organism, as compared to a corresponding non-transformed wild type non-human organism, is conferred in the process of the invention, if the activity of a polypeptide showing the activity of a transcription factor, or if the activity of the polypeptide At5g39760, preferably represented by SEQ ID NO. 25429, or a homolog or fragment thereof, or if the activity of a polypeptide encoded by a nucleic acid molecule comprising the nucleic acid SEQ ID NO. 25428, preferably the coding region thereof, or a homolog or fragment thereof, e.g. derived from Arabidopsis thaliana, is increased or generated. For example the activity of a nucleic acid molecule or a polypeptide comprising the nucleic acid, preferably the coding region thereof, or polypeptide or the consensus sequence or the polypeptide motif, as depicted in Table I, II or IV, application No. 15, column 5 or 8 in the respective same line as the nucleic acid molecule SEQ ID NO. 25428 or polypeptide SEQ ID NO. 25429, respectively, or a homolog or a fragment thereof, is increased or generated, or if the activity transcription factor is increased or generated in a non-human organism, like a microorganism or a plant cell, plant or part thereof, especially with non-targeted localization, whereby the respective line disclose in column 7 the fine chemical fumarate. For example, an increase of the fumarate of at least 1 percent, particularly in a range of 54 to 110-percent is conferred as compared to a corresponding non-transformed wild type non-human organism.

[73193] Accordingly, in one embodiment, an increase of malate in a non-human organism, as compared to a corresponding non-transformed wild type non-human organism, is conferred in the process of the invention, if the activity of a polypeptide showing the activity of a transcription factor, or if the activity of the polypeptide At5g39760, preferably represented by SEQ ID NO. 25429, or a homolog or fragment thereof, or if the activity of a polypeptide encoded by a nucleic acid molecule comprising the nucleic acid SEQ ID NO. 25428, preferably the coding region thereof, or a homolog or fragment thereof, e.g. derived from Arabidopsis thaliana, is increased or generated. For example the activity of a nucleic acid molecule or a polypeptide comprising the nucleic acid, preferably the coding region thereof, or polypeptide or the consensus sequence or the polypeptide motif, as depicted in Table I, II or IV, application No. 15, column 5 or 8 in the respective same line as the nucleic acid molecule SEQ ID NO. 25428 or polypeptide SEQ ID NO. 25429, respectively, or a homolog or a fragment thereof, is increased or generated, or if the activity transcription factor is increased or generated in a non-human organism, like a microorganism or a plant cell, plant or part thereof, especially with non-targeted localization, whereby the respective line disclose in column 7 the fine chemical malate. For example, an increase of the malate of at least 1 percent, particularly in a range of 52 to 175-percent is conferred as compared to a corresponding non-transformed wild type non-human organism.

[73194] Accordingly, in one embodiment, an increase of succinate in a non-human organism, as compared to a corresponding non-transformed wild type non-human organism, is conferred in the process of the invention, if the activity of a polypeptide showing the activity of a protein phosphatase, or if the activity of the polypeptide At5g59220, preferably represented by SEQ ID NO. 25499, or a homolog or fragment thereof, or if the activity of a polypeptide encoded by a nucleic acid molecule comprising the nucleic acid SEQ ID NO. 25498, preferably the coding region thereof, or a homolog or fragment thereof, e.g. derived from Arabidopsis thaliana, is increased or generated. For example the activity of a nucleic acid molecule or a polypeptide comprising the nucleic acid, preferably the coding region thereof, or polypeptide or the consensus sequence or the polypeptide motif, as depicted in Table I, II or IV, application No. 15, column 5 or 8 in the respective same line as the nucleic acid molecule SEQ ID NO. 25498 or polypeptide SEQ ID NO. 25499, respectively, or a homolog or a fragment thereof, is increased or generated, or if the activity protein phosphatase is increased or generated in a non-human organism, like a microorganism or a plant cell, plant or part thereof, especially with non-targeted localization, whereby the respective line disclose in column 7 the fine chemical succinate. For example, an increase of the succinate of at least 1 percent, particularly in a range of 30 to 67-percent is conferred as compared to a corresponding non-transformed wild type non-human organism.

[73195] Accordingly, in one embodiment, an increase of succinate in a non-human organism, as compared to a corresponding non-transformed wild type non-human organism, is conferred in the process of the invention, if the activity of a polypeptide showing the activity of a pyruvate kinase, or if the activity of the polypeptide At5g63680, preferably represented by SEQ ID NO. 70039, or a homolog or fragment thereof, or if the activity of a polypeptide encoded by a nucleic acid molecule comprising the nucleic acid SEQ ID NO. 70038, preferably the coding region thereof, or a homolog or fragment thereof, e.g. derived from Arabidopsis thaliana, is increased or generated. For example the activity of a nucleic acid molecule or a polypeptide comprising the nucleic acid, preferably the coding region thereof, or polypeptide or the consensus sequence or the polypeptide motif, as depicted in Table I, II or IV, application No. 15, column 5 or 8 in the respective same line as the nucleic acid molecule SEQ ID NO. 70038 or polypeptide SEQ ID NO. 70039, respectively, or a homolog or a fragment thereof, is increased or generated, or if the activity pyruvate kinase is increased or generated in a non-human organism, like a microorganism or a plant cell, plant or part thereof, especially with plastidic localization, whereby the respective line disclose in column 7 the fine chemical succinate. For example, an increase of the succinate of at least 1 percent, particularly in a range of 31 to 226-percent is conferred as compared to a corresponding non-transformed wild type non-human organism.

[73196] Accordingly, in one embodiment, an increase of fumarate in a non-human organism, as compared to a corresponding non-transformed wild type non-human organism, is conferred in the process of the invention, if the activity of a polypeptide showing the activity of a zinc finger protein, or if the activity of the polypeptide At5g64920, preferably represented by SEQ ID NO. 5494, or a homolog or fragment thereof, or if the activity of a polypeptide encoded by a nucleic acid molecule comprising the nucleic acid SEQ ID NO. 5493, preferably the coding region thereof, or a homolog or fragment thereof, e.g. derived from Arabidopsis thaliana, is increased or generated. For example the activity of a nucleic acid molecule or a polypeptide comprising the nucleic acid, preferably the coding region thereof, or polypeptide or the consensus sequence or the polypeptide motif, as depicted in Table I, II or IV, application No. 15, column 5 or 8 in the respective same line as the nucleic acid molecule SEQ ID NO. 5493 or polypeptide SEQ ID NO. 5494, respectively, or a homolog or a fragment thereof, is increased or generated, or if the activity zinc finger protein is increased or generated in a non-human organism, like a microorganism or a plant cell, plant or part thereof, especially with non-targeted localization, whereby the respective line disclose in column 7 the fine chemical fumarate. For example, an increase of the fumarate of at least 1 percent, particularly in a range of 81 to 158-percent is conferred as compared to a corresponding non-transformed wild type non-human organism.

[73197] Accordingly, in one embodiment, an increase of citramalate in a non-human organism, as compared to a corresponding non-transformed wild type non-human organism, is conferred in the process of the invention, if the activity of a polypeptide showing the activity of a CDP-diacylglycerol-serine O-phosphatidyltransferase, or if the activity of the polypeptide AvinDRAFT_{—}0035, preferably represented by SEQ ID NO. 70584, or a homolog or fragment thereof, or if the activity of a polypeptide encoded by a nucleic acid molecule comprising the nucleic acid SEQ ID NO. 70583, preferably the coding region thereof, or a homolog or fragment thereof, e.g. derived from Azotobacter vinelandii, is increased or generated. For example the activity of a nucleic acid molecule or a polypeptide comprising the nucleic acid, preferably the coding region thereof, or polypeptide or the consensus sequence or the polypeptide motif, as depicted in Table I, II or IV, application No. 15, column 5 or 8 in the respective same line as the nucleic acid molecule SEQ ID NO. 70583 or polypeptide SEQ ID NO. 70584, respectively, or a homolog or a fragment thereof, is increased or generated, or if the activity CDP-diacylglycerol-serine O-phosphatidyltransferase is increased or generated in a non-human organism, like a microorganism or a plant cell, plant or part thereof, especially with non-targeted localization, whereby the respective line disclose in column 7 the fine chemical citramalate. For example, an increase of the citramalate of at least 1 percent, particularly in a range of 41 to 106-percent is conferred as compared to a corresponding non-transformed wild type non-human organism.

[73198] Accordingly, in one embodiment, an increase of fumarate in a non-human organism, as compared to a corresponding non-transformed wild type non-human organism, is conferred in the process of the invention, if the activity of a polypeptide showing the activity of a CDP-diacylglycerol-serine O-phosphatidyltransferase, or if the activity of the polypeptide AvinDRAFT_{—}0035, preferably represented by SEQ ID NO. 70584, or a homolog or fragment thereof, or if the activity of a polypeptide encoded by a nucleic acid molecule comprising the nucleic acid SEQ ID NO. 70583, preferably the coding region thereof, or a homolog or fragment thereof, e.g. derived from Azotobacter vinelandii, is increased or generated. For example the activity of a nucleic acid molecule or a polypeptide comprising the nucleic acid, preferably the coding region thereof, or polypeptide or the consensus sequence or the polypeptide motif, as depicted in Table I, II or IV, application No. 15, column 5 or 8 in the respective same line as the nucleic acid molecule SEQ ID NO. 70583 or polypeptide SEQ ID NO. 70584, respectively, or a homolog or a fragment thereof, is increased or generated, or if the activity CDP-diacylglycerol-serine O-phosphatidyltransferase is increased or generated in a non-human organism, like a microorganism or a plant cell, plant or part thereof, especially with non-targeted localization, whereby the respective line disclose in column 7 the fine chemical fumarate. For example, an increase of the fumarate of at least 1 percent, particularly in a range of 63 to 130-percent is conferred as compared to a corresponding non-transformed wild type non-human organism.

[73199] Accordingly, in one embodiment, an increase of malate in a non-human organism, as compared to a corresponding non-transformed wild type non-human organism, is conferred in the process of the invention, if the activity of a polypeptide showing the activity of a CDP-diacylglycerolserine O-phosphatidyltransferase, or if the activity of the polypeptide AvinDRAFT_{—}0035, preferably represented by SEQ ID NO. 70584, or a homolog or fragment thereof, or if the activity of a polypeptide encoded by a nucleic acid molecule comprising the nucleic acid SEQ ID NO. 70583, preferably the coding region thereof, or a homolog or fragment thereof, e.g. derived from Azotobacter vinelandii, is increased or generated. For example the activity of a nucleic acid molecule or a polypeptide comprising the nucleic acid, preferably the coding region thereof, or polypeptide or the consensus sequence or the polypeptide motif, as depicted in Table I, II or IV, application No. 15, column 5 or 8 in the respective same line as the nucleic acid molecule SEQ ID NO. 70583 or polypeptide SEQ ID NO. 70584, respectively, or a homolog or a fragment thereof, is increased or generated, or if the activity CDP-diacylglycerol-serine O-phosphatidyltransferase is increased or generated in a non-human organism, like a microorganism or a plant cell, plant or part thereof, especially with non-targeted localization, whereby the respective line disclose in column 7 the fine chemical malate. For example, an increase of the malate of at least 1 percent, particularly in a range of 55 to 281-percent is conferred as compared to a corganism responding non-transformed wild type non-human organism.

[73200] Accordingly, in one embodiment, an increase of malate in a non-human organism, as compared to a corresponding non-transformed wild type non-human organism, is conferred in the process of the invention, if the activity of a polypeptide showing the activity of a Glycine cleavage system T aminomethyltransferase, or if the activity of the polypeptide AVINDRAFT_{—}0539, preferably represented by SEQ ID NO. 70716, or a homolog or fragment thereof, or if the activity of a polypeptide encoded by a nucleic acid molecule comprising the nucleic acid SEQ ID NO. 70715, preferably the coding region thereof, or a homolog or fragment thereof, e.g. derived from Azotobacter vinelandii, is increased or generated. For example the activity of a nucleic acid molecule or a polypeptide comprising the nucleic acid, preferably the coding region thereof, or polypeptide or the consensus sequence or the polypeptide motif, as depicted in Table I, II or IV, application No. 15, column 5 or 8 in the respective same line as the nucleic acid molecule SEQ ID NO. 70715 or polypeptide SEQ ID NO. 70716, respectively, or a homolog or a fragment thereof, is increased or generated, or if the activity Glycine cleavage system T aminomethyltransferase is increased or generated in a non-human organism, like a microorganism or a plant cell, plant or part thereof, especially with non-targeted localization, whereby the respective line disclose in column 7 the fine chemical malate. For example, an increase of the malate of at least 1 percent, particularly in a range of 52 to 146-percent is conferred as compared to a corresponding non-transformed wild type non-human organism.

[73201] Accordingly, in one embodiment, an increase of malate in a non-human organism, as compared to a corresponding non-transformed wild type non-human organism, is conferred in the process of the invention, if the activity of a polypeptide showing the activity of a transcriptional regulator, or if the activity of the polypeptide AvinDRAFT_{—}1045, preferably represented by SEQ ID NO. 25677, or a homolog or fragment thereof, or if the activity of a polypeptide encoded by a nucleic acid molecule comprising the nucleic acid SEQ ID NO. 25676, preferably the coding region thereof, or a homolog or fragment thereof, e.g. derived from Azotobacter vinelandii, is increased or generated. For example the activity of a nucleic acid molecule or a polypeptide comprising the nucleic acid, preferably the coding region thereof, or polypeptide or the consensus sequence or the polypeptide motif, as depicted in Table I, II or IV, application No. 15, column 5 or 8 in the respective same line as the nucleic acid molecule SEQ ID NO. 25676 or polypeptide SEQ ID NO. 25677, respectively, or a homolog or a fragment thereof, is increased or generated, or if the activity transcriptional regulator is increased or generated in a non-human organism, like a microorganism or a plant cell, plant or part thereof, especially with non-targeted localization, whereby the respective line disclose in column 7 the fine chemical malate. For example, an increase of the malate of at least 1 percent, particularly in a range of 64 to 122-percent is conferred as compared to a corresponding non-transformed wild type non-human organism.

[73202] Accordingly, in one embodiment, an increase of malate in a non-human organism, as compared to a corresponding non-transformed wild type non-human organism, is conferred in the process of the invention, if the activity of a polypeptide showing the activity of a adenylylsulfate kinase, or if the activity of the polypeptide AvinDRAFT_{—}1398, preferably represented by SEQ ID NO. 25781, or a homolog or fragment thereof, or if the activity of a polypeptide encoded by a nucleic acid molecule comprising the nucleic acid SEQ ID NO. 25780, preferably the coding region thereof, or a homolog or fragment thereof, e.g. derived from Azotobacter vinelandii, is increased or generated. For example the activity of a nucleic acid molecule or a polypeptide comprising the nucleic acid, preferably the coding region thereof, or polypeptide or the consensus sequence or the polypeptide motif, as depicted in Table I, II or IV, application No. 15, column 5 or 8 in the respective same line as the nucleic acid molecule SEQ ID NO. 25780 or polypeptide SEQ ID NO. 25781, respectively, or a homolog or a fragment thereof, is increased or generated, or if the activity adenylylsulfate kinase is increased or generated in a non-human organism, like a microorganism or a plant cell, plant or part thereof, especially with non-targeted localization, whereby the respective line disclose in column 7 the fine chemical malate. For example, an increase of the malate of at least 1 percent, particularly in a range of 54 to 91-percent is conferred as compared to a corresponding non-transformed wild type non-human organism.

[73203] Accordingly, in one embodiment, an increase of succinate in a non-human organism, as compared to a corresponding non-transformed wild type non-human organism, is conferred in the process of the invention, if the activity of a polypeptide showing the activity of a adenylylsulfate kinase, or if the activity of the polypeptide AvinDRAFT_{—}1398, preferably represented by SEQ ID NO. 25781, or a homolog or fragment thereof, or if the activity of a polypeptide encoded by a nucleic acid molecule comprising the nucleic acid SEQ ID NO. 25780, preferably the coding region thereof, or a homolog or fragment thereof, e.g. derived from Azotobacter vinelandii, is increased or generated. For example the activity of a nucleic acid molecule or a polypeptide comprising the nucleic acid, preferably the coding region thereof, or polypeptide or the consensus sequence or the polypeptide motif, as depicted in Table I, II or IV, application No. 15, column 5 or 8 in the respective same line as the nucleic acid molecule SEQ ID NO. 25780 or polypeptide SEQ ID NO. 25781, respectively, or a homolog or a fragment thereof, is increased or generated, or if the activity adenylylsulfate kinase is increased or generated in a non-human organism, like a microorganism or a plant cell, plant or part thereof, especially with non-targeted localization, whereby the respective line disclose in column 7 the fine chemical succinate. For example, an increase of the succinate of at least 1 percent, particularly in a range of 32 to 90-percent is conferred as compared to a corresponding non-transformed wild type non-human organism.

[73204] Accordingly, in one embodiment, an increase of fumarate in a non-human organism, as compared to a corresponding non-transformed wild type non-human organism, is conferred in the process of the invention, if the activity of a polypeptide showing the activity of a sec-independent protein translocase, or if the activity of the polypeptide AvinDRAFT_{—}1624, preferably represented by SEQ ID NO. 26197, or a homolog or fragment thereof, or if the activity of a polypeptide encoded by a nucleic acid molecule comprising the nucleic acid SEQ ID NO. 26196, preferably the coding region thereof, or a homolog or fragment thereof, e.g. derived from Azotobacter vinelandii, is increased or generated. For example the activity of a nucleic acid molecule or a polypeptide comprising the nucleic acid, preferably the coding region thereof, or polypeptide or the consensus sequence or the polypeptide motif, as depicted in Table I, II or IV, application No. 15, column 5 or 8 in the respective same line as the nucleic acid molecule SEQ ID NO. 26196 or polypeptide SEQ ID NO. 26197, respectively, or a homolog or a fragment thereof, is increased or generated, or if the activity sec-independent protein translocase is increased or generated in a non-human organism, like a microorganism or a plant cell, plant or part thereof, especially with non-targeted localization, whereby the respective line disclose in column 7 the fine chemical fumarate. For example, an increase of the fumarate of at least 1 percent, particularly in a range of 66 to 110-percent is conferred as compared to a corresponding non-transformed wild type non-human organism.

[73205] Accordingly, in one embodiment, an increase of malate in a non-human organism, as compared to a corresponding non-transformed wild type non-human organism, is conferred in the process of the invention, if the activity of a polypeptide showing the activity of a sec-independent protein translocase, or if the activity of the polypeptide AvinDRAFT_{—}1624, preferably represented by SEQ ID NO. 26197, or a homolog or fragment thereof, or if the activity of a polypeptide encoded by a nucleic acid molecule comprising the nucleic acid SEQ ID NO. 26196, preferably the coding region thereof, or a homolog or fragment thereof, e.g. derived from Azotobacter vinelandii, is increased or generated. For example the activity of a nucleic acid molecule or a polypeptide comprising the nucleic acid, preferably the coding region thereof, or polypeptide or the consensus sequence or the polypeptide motif, as depicted in Table I, II or IV, application No. 15, column 5 or 8 in the respective same line as the nucleic acid molecule SEQ ID NO. 26196 or polypeptide SEQ ID NO. 26197, respectively, or a homolog or a fragment thereof, is increased or generated, or if the activity sec-independent protein translocase is increased or generated in a non-human organism, like a microorganism or a plant cell, plant or part thereof, especially with non-targeted localization, whereby the respective line disclose in column 7 the fine chemical malate. For example, an increase of the malate of at least 1 percent, particularly in a range of 67 to 120-percent is conferred as compared to a corresponding non-transformed wild type non-human organism.

[73206] Accordingly, in one embodiment, an increase of fumarate in a non-human organism, as compared to a corresponding non-transformed wild type non-human organism, is conferred in the process of the invention, if the activity of a polypeptide showing the activity of a fumarate hydratase, or if the activity of the polypeptide AvinDRAFT_{—}1699, preferably represented by SEQ ID NO. 133720, or a homolog or fragment thereof, or if the activity of a polypeptide encoded by a nucleic acid molecule comprising the nucleic acid SEQ ID NO. 133719, preferably the coding region thereof, or a homolog or fragment thereof, e.g. derived from Azotobacter vinelandii, is increased or generated. For example the activity of a nucleic acid molecule or a polypeptide comprising the nucleic acid, preferably the coding region thereof, or polypeptide or the consensus sequence or the polypeptide motif, as depicted in Table I, II or IV, application No. 15, column 5 or 8 in the respective same line as the nucleic acid molecule SEQ ID NO. 133719 or polypeptide SEQ ID NO. 133720, respectively, or a homolog or a fragment thereof, is increased or generated, or if the activity fumarate hydratase is increased or generated in a non-human organism, like a microorganism or a plant cell, plant or part thereof, especially with non-targeted localization, whereby the respective line disclose in column 7 the fine chemical fumarate. For example, an increase of the fumarate of at least 1 percent, particularly in a range of 148 to 507-percent is conferred as compared to a corresponding non-transformed wild type non-human organism.

[73207] Accordingly, in one embodiment, an increase of succinate in a non-human organism, as compared to a corresponding non-transformed wild type non-human organism, is conferred in the process of the invention, if the activity of a polypeptide showing the activity of a pyruvate kinase, or if the activity of the polypeptide AvinDRAFT_{—}1806, preferably represented by SEQ ID NO. 26435, or a homolog or fragment thereof, or if the activity of a polypeptide encoded by a nucleic acid molecule comprising the nucleic acid SEQ ID NO. 26434, preferably the coding region thereof, or a homolog or fragment thereof, e.g. derived from Azotobacter vinelandii, is increased or generated. For example the activity of a nucleic acid molecule or a polypeptide comprising the nucleic acid, preferably the coding region thereof, or polypeptide or the consensus sequence or the polypeptide motif, as depicted in Table I, II or IV, application No. 15, column 5 or 8 in the respective same line as the nucleic acid molecule SEQ ID NO. 26434 or polypeptide SEQ ID NO. 26435, respectively, or a homolog or a fragment thereof, is increased or generated, or if the activity pyruvate kinase is increased or generated in a non-human organism, like a microorganism or a plant cell, plant or part thereof, especially with non-targeted localization, whereby the respective line disclose in column 7 the fine chemical succinate. For example, an increase of the succinate of at least 1 percent, particularly in a range of 51 to 154-percent is conferred as compared to a corresponding non-transformed wild type non-human organism.

[73208] Accordingly, in one embodiment, an increase of succinate in a non-human organism, as compared to a corresponding non-transformed wild type non-human organism, is conferred in the process of the invention, if the activity of a polypeptide showing the activity of a transcriptional regulator protein, or if the activity of the polypeptide AvinDRAFT_{—}2010, preferably represented by SEQ ID NO. 114199, or a homolog or fragment thereof, or if the activity of a polypeptide encoded by a nucleic acid molecule comprising the nucleic acid SEQ ID NO. 114198, preferably the coding region thereof, or a homolog or fragment thereof, e.g. derived from Azotobacter vinelandii, is increased or generated. For example the activity of a nucleic acid molecule or a polypeptide comprising the nucleic acid, preferably the coding region thereof, or polypeptide or the consensus sequence or the polypeptide motif, as depicted in Table I, II or IV, application No. 15, column 5 or 8 in the respective same line as the nucleic acid molecule SEQ ID NO. 114198 or polypeptide SEQ ID NO. 114199, respectively, or a homolog or a fragment thereof, is increased or generated, or if the activity transcriptional regulator protein is increased or generated in a non-human organism, like a microorganism or a plant cell, plant or part thereof, especially with non-targeted localization, whereby the respective line disclose in column 7 the fine chemical succinate. For example, an increase of the succinate of at least 1 percent, particularly in a range of 30 to 43-percent is conferred as compared to a corresponding non-transformed wild type non-human organism.

[73209] Accordingly, in one embodiment, an increase of glycerate in a non-human organism, as compared to a corresponding non-transformed wild type non-human organism, is conferred in the process of the invention, if the activity of a polypeptide showing the activity of a beta-hydroxylase, or if the activity of the polypeptide AvinDRAFT_{—}2091, preferably represented by SEQ ID NO. 6041, or a homolog or fragment thereof, or if the activity of a polypeptide encoded by a nucleic acid molecule comprising the nucleic acid SEQ ID NO. 6040, preferably the coding region thereof, or a homolog or fragment thereof, e.g. derived from Azotobacter vinelandii, is increased or generated. For example the activity of a nucleic acid molecule or a polypeptide comprising the nucleic acid, preferably the coding region thereof, or polypeptide or the consensus sequence or the polypeptide motif, as depicted in Table I, II or IV, application No. 15, column 5 or 8 in the respective same line as the nucleic acid molecule SEQ ID NO. 6040 or polypeptide SEQ ID NO. 6041, respectively, or a homolog or a fragment thereof, is increased or generated, or if the activity beta-hydroxylase is increased or generated in a non-human organism, like a microorganism or a plant cell, plant or part thereof, especially with non-targeted localization, whereby the respective line disclose in column 7 the fine chemical glycerate. For example, an increase of the glycerate of at least 1 percent, particularly in a range of 31 to 81-percent is conferred as compared to a corresponding non-transformed wild type non-human organism.

[73210] Accordingly, in one embodiment, an increase of succinate in a non-human organism, as compared to a corresponding non-transformed wild type non-human organism, is conferred in the process of the invention, if the activity of a polypeptide showing the activity of a 30S ribosomal protein S3, or if the activity of the polypeptide AvinDRAFT_{—}2365, preferably represented by SEQ ID NO. 71326, or a homolog or fragment thereof, or if the activity of a polypeptide encoded by a nucleic acid molecule comprising the nucleic acid SEQ ID NO. 71325, preferably the coding region thereof, or a homolog or fragment thereof, e.g. derived from Azotobacter vinelandii, is increased or generated. For example the activity of a nucleic acid molecule or a polypeptide comprising the nucleic acid, preferably the coding region thereof, or polypeptide or the consensus sequence or the polypeptide motif, as depicted in Table I, II or IV, application No. 15, column 5 or 8 in the respective same line as the nucleic acid molecule SEQ ID NO. 71325 or polypeptide SEQ ID NO. 71326, respectively, or a homolog or a fragment thereof, is increased or generated, or if the activity 30S ribosomal protein S3 is increased or generated in a non-human organism, like a microorganism or a plant cell, plant or part thereof, especially with non-targeted localization, whereby the respective line disclose in column 7 the fine chemical succinate. For example, an increase of the succinate of at least 1 percent, particularly in a range of 45 to 203-percent is conferred as compared to a corresponding non-transformed wild type non-human organism.

[73211] Accordingly, in one embodiment, an increase of citramalate in a non-human organism, as compared to a corresponding non-transformed wild type non-human organism, is conferred in the process of the invention, if the activity of a polypeptide showing the activity of a 50S ribosomal protein L14, or if the activity of the polypeptide AvinDRAFT_{—}2369, preferably represented by SEQ ID NO. 71764, or a homolog or fragment thereof, or if the activity of a polypeptide encoded by a nucleic acid molecule comprising the nucleic acid SEQ ID NO. 71763, preferably the coding region thereof, or a homolog or fragment thereof, e.g. derived from Azotobacter vinelandii, is increased or generated. For example the activity of a nucleic acid molecule or a polypeptide comprising the nucleic acid, preferably the coding region thereof, or polypeptide or the consensus sequence or the polypeptide motif, as depicted in Table I, II or IV, application No. 15, column 5 or 8 in the respective same line as the nucleic acid molecule SEQ ID NO. 71763 or polypeptide SEQ ID NO. 71764, respectively, or a homolog or a fragment thereof, is increased or generated, or if the activity 50S ribosomal protein L14 is increased or generated in a non-human organism, like a microorganism or a plant cell, plant or part thereof, especially with non-targeted localization, whereby the respective line disclose in column 7 the fine chemical citramalate. For example, an increase of the citramalate of at least 1 percent, particularly in a range of 41 to 49-percent is conferred as compared to a corresponding non-transformed wild type non-human organism.

[73212] Accordingly, in one embodiment, an increase of malate in a non-human organism, as compared to a corresponding non-transformed wild type non-human organism, is conferred in the process of the invention, if the activity of a polypeptide showing the activity of a acyl-CoA synthase, or if the activity of the polypeptide AvinDRAFT_{—}2754, preferably represented by SEQ ID NO. 28041, or a homolog or fragment thereof, or if the activity of a polypeptide encoded by a nucleic acid molecule comprising the nucleic acid SEQ ID NO. 28040, preferably the coding region thereof, or a homolog or fragment thereof, e.g. derived from Azotobacter vinelandii, is increased or generated. For example the activity of a nucleic acid molecule or a polypeptide comprising the nucleic acid, preferably the coding region thereof, or polypeptide or the consensus sequence or the polypeptide motif, as depicted in Table I, II or IV, application No. 15, column 5 or 8 in the respective same line as the nucleic acid molecule SEQ ID NO. 28040 or polypeptide SEQ ID NO. 28041, respectively, or a homolog or a fragment thereof, is increased or generated, or if the activity acyl-CoA synthase is increased or generated in a non-human organism, like a microorganism or a plant cell, plant or part thereof, especially with non-targeted localization, whereby the respective line disclose in column 7 the fine chemical malate. For example, an increase of the malate of at least 1 percent, particularly in a range of 121 to 517-percent is conferred as compared to a corresponding non-transformed wild type non-human organism.

[73213] Accordingly, in one embodiment, an increase of citramalate in a non-human organism, as compared to a corresponding non-transformed wild type non-human organism, is conferred in the process of the invention, if the activity of a polypeptide showing the activity of a 2-oxoglutarate dehydrogenase E1 subunit, or if the activity of the polypeptide AvinDRAFT_{—}3028, preferably represented by SEQ ID NO. 6076, or a homolog or fragment thereof, or if the activity of a polypeptide encoded by a nucleic acid molecule comprising the nucleic acid SEQ ID NO. 6075, preferably the coding region thereof, or a homolog or fragment thereof, e.g. derived from Azotobacter vinelandii, is increased or generated. For example the activity of a nucleic acid molecule or a polypeptide comprising the nucleic acid, preferably the coding region thereof, or polypeptide or the consensus sequence or the polypeptide motif, as depicted in Table I, II or IV, application No. 15, column 5 or 8 in the respective same line as the nucleic acid molecule SEQ ID NO. 6075 or polypeptide SEQ ID NO. 6076, respectively, or a homolog or a fragment thereof, is increased or generated, or if the activity 2-oxoglutarate dehydrogenase E1 subunit is increased or generated in a non-human organism, like a microorganism or a plant cell, plant or part thereof, especially with non-targeted localization, whereby the respective line disclose in column 7 the fine chemical citramalate. For example, an increase of the citramalate of at least 1 percent, particularly in a range of 47 to 117-percent is conferred as compared to a corresponding non-transformed wild type non-human organism.

[73214] Accordingly, in one embodiment, an increase of fumarate in a non-human organism, as compared to a corresponding non-transformed wild type non-human organism, is conferred in the process of the invention, if the activity of a polypeptide showing the activity of a 2-oxoglutarate dehydrogenase E1 subunit, or if the activity of the polypeptide AvinDRAFT_{—}3028, preferably represented by SEQ ID NO. 6076, or a homolog or fragment thereof, or if the activity of a polypeptide encoded by a nucleic acid molecule comprising the nucleic acid SEQ ID NO. 6075, preferably the coding region thereof, or a homolog or fragment thereof, e.g. derived from Azotobacter vinelandii, is increased or generated. For example the activity of a nucleic acid molecule or a polypeptide comprising the nucleic acid, preferably the coding region thereof, or polypeptide or the consensus sequence or the polypeptide motif, as depicted in Table I, II or IV, application No. 15, column 5 or 8 in the respective same line as the nucleic acid molecule SEQ ID NO. 6075 or polypeptide SEQ ID NO. 6076, respectively, or a homolog or a fragment thereof, is increased or generated, or if the activity 2-oxoglutarate dehydrogenase E1 subunit is increased or generated in a non-human organism, like a microorganism or a plant cell, plant or part thereof, especially with non-targeted localization, whereby the respective line disclose in column 7 the fine chemical fumarate. For example, an increase of the fumarate of at least 1 percent, particularly in a range of 98 to 406-percent is conferred as compared to a corresponding non-transformed wild type non-human organism.

[73215] Accordingly, in one embodiment, an increase of malate in a non-human organism, as compared to a corresponding non-transformed wild type non-human organism, is conferred in the process of the invention, if the activity of a polypeptide showing the activity of a 2-oxoglutarate dehydrogenase E1 subunit, or if the activity of the polypeptide AvinDRAFT_{—}3028, preferably represented by SEQ ID NO. 6076, or a homolog or fragment thereof, or if the activity of a polypeptide encoded by a nucleic acid molecule comprising the nucleic acid SEQ ID NO. 6075, preferably the coding region thereof, or a homolog or fragment thereof, e.g. derived from Azotobacter vinelandii, is increased or generated. For example the activity of a nucleic acid molecule or a polypeptide comprising the nucleic acid, preferably the coding region thereof, or polypeptide or the consensus sequence or the polypeptide motif, as depicted in Table I, II or IV, application No. 15, column 5 or 8 in the respective same line as the nucleic acid molecule SEQ ID NO. 6075 or polypeptide SEQ ID NO. 6076, respectively, or a homolog or a fragment thereof, is increased or generated, or if the activity 2-oxoglutarate dehydrogenase E1 subunit is increased or generated in a non-human organism, like a microorganism or a plant cell, plant or part thereof, especially with non-targeted localization, whereby the respective line disclose in column 7 the fine chemical malate. For example, an increase of the malate of at least 1 percent, particularly in a range of 57 to 323-percent is conferred as compared to a corresponding non-transformed wild type non-human organism.

[73216] Accordingly, in one embodiment, an increase of succinate in a non-human organism, as compared to a corresponding non-transformed wild type non-human organism, is conferred in the process of the invention, if the activity of a polypeptide showing the activity of a 2-oxoglutarate dehydrogenase E1 subunit, or if the activity of the polypeptide AvinDRAFT_{—}3028, preferably represented by SEQ ID NO. 6076, or a homolog or fragment thereof, or if the activity of a polypeptide encoded by a nucleic acid molecule comprising the nucleic acid SEQ ID NO. 6075, preferably the coding region thereof, or a homolog or fragment thereof, e.g. derived from Azotobacter vinelandii, is increased or generated. For example the activity of a nucleic acid molecule or a polypeptide comprising the nucleic acid, preferably the coding region thereof, or polypeptide or the consensus sequence or the polypeptide motif, as depicted in Table I, II or IV, application No. 15, column 5 or 8 in the respective same line as the nucleic acid molecule SEQ ID NO. 6075 or polypeptide SEQ ID NO. 6076, respectively, or a homolog or a fragment thereof, is increased or generated, or if the activity 2-oxoglutarate dehydrogenase E1 subunit is increased or generated in a non-human organism, like a microorganism or a plant cell, plant or part thereof, especially with non-targeted localization, whereby the respective line disclose in column 7 the fine chemical succinate. For example, an increase of the succinate of at least 1 percent, particularly in a range of 97 to 190-percent is conferred as compared to a corresponding non-transformed wild type non-human organism.

[73217] Accordingly, in one embodiment, an increase of vitamin c and/or threonic acid in a non-human organism, as compared to a corresponding non-transformed wild type non-human organism, is conferred in the process of the invention, if the activity of a polypeptide showing the activity of a 2-oxoglutarate dehydrogenase E1 subunit, or if the activity of the polypeptide AvinDRAFT_{—}3028, preferably represented by SEQ ID NO. 6076, or a homolog or fragment thereof, or if the activity of a polypeptide encoded by a nucleic acid molecule comprising the nucleic acid SEQ ID NO. 6075, preferably the coding region thereof, or a homolog or fragment thereof, e.g. derived from Azotobacter vinelandii, is increased or generated. For example the activity of a nucleic acid molecule or a polypeptide comprising the nucleic acid, preferably the coding region thereof, or polypeptide or the consensus sequence or the polypeptide motif, as depicted in Table I, II or IV, application No. 15, column 5 or 8 in the respective same line as the nucleic acid molecule SEQ ID NO. 6075 or polypeptide SEQ ID NO. 6076, respectively, or a homolog or a fragment thereof, is increased or generated, or if the activity 2-oxoglutarate dehydrogenase E1 subunit is increased or generated in a non-human organism, like a microorganism or a plant cell, plant or part thereof, especially with non-targeted localization, whereby the respective line disclose in column 7 the fine chemical vitamin c and/or threonic acid. For example, an increase of the vitamin c and/or threonic acid of at least 1 percent, particularly in a range of 31 to 137-percent is conferred as compared to a corresponding non-transformed wild type non-human organism.

[73218] Accordingly, in one embodiment, an increase of citramalate in a non-human organism, as compared to a corresponding non-transformed wild type non-human organism, is conferred in the process of the invention, if the activity of a polypeptide showing the activity of a transcriptional regulator, or if the activity of the polypeptide AvinDRAFT_{—}3186, preferably represented by SEQ ID NO. 29247, or a homolog or fragment thereof, or if the activity of a polypeptide encoded by a nucleic acid molecule comprising the nucleic acid SEQ ID NO. 29246, preferably the coding region thereof, or a homolog or fragment thereof, e.g. derived from Azotobacter vinelandii, is increased or generated. For example the activity of a nucleic acid molecule or a polypeptide comprising the nucleic acid, preferably the coding region thereof, or polypeptide or the consensus sequence or the polypeptide motif, as depicted in Table I, II or IV, application No. 15, column 5 or 8 in the respective same line as the nucleic acid molecule SEQ ID NO. 29246 or polypeptide SEQ ID NO. 29247, respectively, or a homolog or a fragment thereof, is increased or generated, or if the activity transcriptional regulator is increased or generated in a non-human organism, like a microorganism or a plant cell, plant or part thereof, especially with non-targeted localization, whereby the respective line disclose in column 7 the fine chemical citramalate. For example, an increase of the citramalate of at least 1 percent, particularly in a range of 41 to 84-percent is conferred as compared to a corresponding non-transformed wild type non-human organism.

[73219] Accordingly, in one embodiment, an increase of fumarate in a non-human organism, as compared to a corresponding non-transformed wild type non-human organism, is conferred in the process of the invention, if the activity of a polypeptide showing the activity of a transcriptional regulator, or if the activity of the polypeptide AvinDRAFT_{—}3186, preferably represented by SEQ ID NO. 29247, or a homolog or fragment thereof, or if the activity of a polypeptide encoded by a nucleic acid molecule comprising the nucleic acid SEQ ID NO. 29246, preferably the coding region thereof, or a homolog or fragment thereof, e.g. derived from Azotobacter vinelandii, is increased or generated. For example the activity of a nucleic acid molecule or a polypeptide comprising the nucleic acid, preferably the coding region thereof, or polypeptide or the consensus sequence or the polypeptide motif, as depicted in Table I, II or IV, application No. 15, column 5 or 8 in the respective same line as the nucleic acid molecule SEQ ID NO. 29246 or polypeptide SEQ ID NO. 29247, respectively, or a homolog or a fragment thereof, is increased or generated, or if the activity transcriptional regulator is increased or generated in a non-human organism, like a microorganism or a plant cell, plant or part thereof, especially with non-targeted localization, whereby the respective line disclose in column 7 the fine chemical fumarate. For example, an increase of the fumarate of at least 1 percent, particularly in a range of 100 to 236-percent is conferred as compared to a corresponding non-transformed wild type non-human organism.

[73220] Accordingly, in one embodiment, an increase of succinate in a non-human organism, as compared to a corresponding non-transformed wild type non-human organism, is conferred in the process of the invention, if the activity of a polypeptide showing the activity of a oxidoreductase, or if the activity of the polypeptide AvinDRAFT_{—}3253, preferably represented by SEQ ID NO. 29501, or a homolog or fragment thereof, or if the activity of a polypeptide encoded by a nucleic acid molecule comprising the nucleic acid SEQ ID NO. 29500, preferably the coding region thereof, or a homolog or fragment thereof, e.g. derived from Azotobacter vinelandii, is increased or generated. For example the activity of a nucleic acid molecule or a polypeptide comprising the nucleic acid, preferably the coding region thereof, or polypeptide or the consensus sequence or the polypeptide motif, as depicted in Table I, II or IV, application No. 15, column 5 or 8 in the respective same line as the nucleic acid molecule SEQ ID NO. 29500 or polypeptide SEQ ID NO. 29501, respectively, or a homolog or a fragment thereof, is increased or generated, or if the activity oxidoreductase is increased or generated in a non-human organism, like a microorganism or a plant cell, plant or part thereof, especially with non-targeted localization, whereby the respective line disclose in column 7 the fine chemical succinate. For example, an increase of the succinate of at least 1 percent, particularly in a range of 29 to 139-percent is conferred as compared to a corresponding non-transformed wild type non-human organism.

[73221] Accordingly, in one embodiment, an increase of fumarate in a non-human organism, as compared to a corresponding non-transformed wild type non-human organism, is conferred in the process of the invention, if the activity of a polypeptide showing the activity of a CTP synthase, or if the activity of the polypeptide AvinDRAFT_{—}3605, preferably represented by SEQ ID NO. 31027, or a homolog or fragment thereof, or if the activity of a polypeptide encoded by a nucleic acid molecule comprising the nucleic acid SEQ ID NO. 31026, preferably the coding region thereof, or a homolog or fragment thereof, e.g. derived from Azotobacter vinelandii, is increased or generated. For example the activity of a nucleic acid molecule or a polypeptide comprising the nucleic acid, preferably the coding region thereof, or polypeptide or the consensus sequence or the polypeptide motif, as depicted in Table I, II or IV, application No. 15, column 5 or 8 in the respective same line as the nucleic acid molecule SEQ ID NO. 31026 or polypeptide SEQ ID NO. 31027, respectively, or a homolog or a fragment thereof, is increased or generated, or if the activity CTP synthase is increased or generated in a non-human organism, like a microorganism or a plant cell, plant or part thereof, especially with non-targeted localization, whereby the respective line disclose in column 7 the fine chemical fumarate. For example, an increase of the fumarate of at least 1 percent, particularly in a range of 61 to 240-percent is conferred as compared to a corresponding non-transformed wild type non-human organism.

[73222] Accordingly, in one embodiment, an increase of malate in a non-human organism, as compared to a corresponding non-transformed wild type non-human organism, is conferred in the process of the invention, if the activity of a polypeptide showing the activity of a CTP synthase, or if the activity of the polypeptide AvinDRAFT_{—}3605, preferably represented by SEQ ID NO. 31027, or a homolog or fragment thereof, or if the activity of a polypeptide encoded by a nucleic acid molecule comprising the nucleic acid SEQ ID NO. 31026, preferably the coding region thereof, or a homolog or fragment thereof, e.g. derived from Azotobacter vinelandii, is increased or generated. For example the activity of a nucleic acid molecule or a polypeptide comprising the nucleic acid, preferably the coding region thereof, or polypeptide or the consensus sequence or the polypeptide motif, as depicted in Table I, II or IV, application No. 15, column 5 or 8 in the respective same line as the nucleic acid molecule SEQ ID NO. 31026 or polypeptide SEQ ID NO. 31027, respectively, or a homolog or a fragment thereof, is increased or generated, or if the activity CTP synthase is increased or generated in a non-human organism, like a microorganism or a plant cell, plant or part thereof, especially with non-targeted localization, whereby the respective line disclose in column 7 the fine chemical malate. For example, an increase of the malate of at least 1 percent, particularly in a range of 53 to 314-percent is conferred as compared to a corresponding non-transformed wild type non-human organism.

[73223] Accordingly, in one embodiment, an increase of succinate in a non-human organism, as compared to a corresponding non-transformed wild type non-human organism, is conferred in the process of the invention, if the activity of a polypeptide showing the activity of a CTP synthase, or if the activity of the polypeptide AvinDRAFT_{—}3605, preferably represented by SEQ ID NO.

[73224] 31027, or a homolog or fragment thereof, or if the activity of a polypeptide encoded by a nucleic acid molecule comprising the nucleic acid SEQ ID NO. 31026, preferably the coding region thereof, or a homolog or fragment thereof, e.g. derived from Azotobacter vinelandii, is increased or generated. For example the activity of a nucleic acid molecule or a polypeptide comprising the nucleic acid, preferably the coding region thereof, or polypeptide or the consensus sequence or the polypeptide motif, as depicted in Table I, II or IV, application No. 15, column 5 or 8 in the respective same line as the nucleic acid molecule SEQ ID NO. 31026 or polypeptide SEQ ID NO. 31027, respectively, or a homolog or a fragment thereof, is increased or generated, or if the activity CTP synthase is increased or generated in a non-human organism, like a microorganism or a plant cell, plant or part thereof, especially with non-targeted localization, whereby the respective line disclose in column 7 the fine chemical succinate. For example, an increase of the succinate of at least 1 percent, particularly in a range of 66 to 203-percent is conferred as compared to a corresponding non-transformed wild type non-human organism.

[73225] Accordingly, in one embodiment, an increase of succinate in a non-human organism, as compared to a corresponding non-transformed wild type non-human organism, is conferred in the process of the invention, if the activity of a polypeptide showing the activity of a recombinase A, or if the activity of the polypeptide AvinDRAFT_{—}3629, preferably represented by SEQ ID NO. 114232, or a homolog or fragment thereof, or if the activity of a polypeptide encoded by a nucleic acid molecule comprising the nucleic acid SEQ ID NO. 114231, preferably the coding region thereof, or a homolog or fragment thereof, e.g. derived from Azotobacter vinelandii, is increased or generated. For example the activity of a nucleic acid molecule or a polypeptide comprising the nucleic acid, preferably the coding region thereof, or polypeptide or the consensus sequence or the polypeptide motif, as depicted in Table I, II or IV, application No. 15, column 5 or 8 in the respective same line as the nucleic acid molecule SEQ ID NO. 114231 or polypeptide SEQ ID NO. 114232, respectively, or a homolog or a fragment thereof, is increased or generated, or if the activity recombinase A is increased or generated in a non-human organism, like a microorganism or a plant cell, plant or part thereof, especially with non-targeted localization, whereby the respective line disclose in column 7 the fine chemical succinate. For example, an increase of the succinate of at least 1 percent, particularly in a range of 33 to 291-percent is conferred as compared to a corresponding non-transformed wild type non-human organism.

[73226] Accordingly, in one embodiment, an increase of malate in a non-human organism, as compared to a corresponding non-transformed wild type non-human organism, is conferred in the process of the invention, if the activity of a polypeptide showing the activity of a glucose-1-phosphate cytidylyltransferase, or if the activity of the polypeptide AvinDRAFT_{—}4384, preferably represented by SEQ ID NO. 31718, or a homolog or fragment thereof, or if the activity of a polypeptide encoded by a nucleic acid molecule comprising the nucleic acid SEQ ID NO. 31717, preferably the coding region thereof, or a homolog or fragment thereof, e.g. derived from Azotobacter vinelandii, is increased or generated. For example the activity of a nucleic acid molecule or a polypeptide comprising the nucleic acid, preferably the coding region thereof, or polypeptide or the consensus sequence or the polypeptide motif, as depicted in Table I, II or IV, application No. 15, column 5 or 8 in the respective same line as the nucleic acid molecule SEQ ID NO. 31717 or polypeptide SEQ ID NO. 31718, respectively, or a homolog or a fragment thereof, is increased or generated, or if the activity glucose-1-phosphate cytidylyltransferase is increased or generated in a non-human organism, like a microorganism or a plant cell, plant or part thereof, especially with non-targeted localization, whereby the respective line disclose in column 7 the fine chemical malate. For example, an increase of the malate of at least 1 percent, particularly in a range of 73 to 137-percent is conferred as compared to a corresponding non-transformed wild type non-human organism.

[73227] Accordingly, in one embodiment, an increase of fumarate in a non-human organism, as compared to a corresponding non-transformed wild type non-human organism, is conferred in the process of the invention, if the activity of a polypeptide showing the activity of a CDP-glucose-4,6-dehydratase, or if the activity of the polypeptide AvinDRAFT_{—}4385, preferably represented by SEQ ID NO. 72936, or a homolog or fragment thereof, or if the activity of a polypeptide encoded by a nucleic acid molecule comprising the nucleic acid SEQ ID NO. 72935, preferably the coding region thereof, or a homolog or fragment thereof, e.g. derived from Azotobacter vinelandii, is increased or generated. For example the activity of a nucleic acid molecule or a polypeptide comprising the nucleic acid, preferably the coding region thereof, or polypeptide or the consensus sequence or the polypeptide motif, as depicted in Table I, II or IV, application No. 15, column 5 or 8 in the respective same line as the nucleic acid molecule SEQ ID NO. 72935 or polypeptide SEQ ID NO. 72936, respectively, or a homolog or a fragment thereof, is increased or generated, or if the activity CDP-glucose-4,6-dehydratase is increased or generated in a non-human organism, like a microorganism or a plant cell, plant or part thereof, especially with non-targeted localization, whereby the respective line disclose in column 7 the fine chemical fumarate. For example, an increase of the fumarate of at least 1 percent, particularly in a range of 57 to 91-percent is conferred as compared to a corresponding non-transformed wild type non-human organism.

[73228] Accordingly, in one embodiment, an increase of malate in a non-human organism, as compared to a corresponding non-transformed wild type non-human organism, is conferred in the process of the invention, if the activity of a polypeptide showing the activity of a CDP-glucose-4,6-dehydratase, or if the activity of the polypeptide AvinDRAFT_{—}4385, preferably represented by SEQ ID NO. 72936, or a homolog or fragment thereof, or if the activity of a polypeptide encoded by a nucleic acid molecule comprising the nucleic acid SEQ ID NO. 72935, preferably the coding region thereof, or a homolog or fragment thereof, e.g. derived from Azotobacter vinelandii, is increased or generated. For example the activity of a nucleic acid molecule or a polypeptide comprising the nucleic acid, preferably the coding region thereof, or polypeptide or the consensus sequence or the polypeptide motif, as depicted in Table I, II or IV, application No. 15, column 5 or 8 in the respective same line as the nucleic acid molecule SEQ ID NO. 72935 or polypeptide SEQ ID NO. 72936, respectively, or a homolog or a fragment thereof, is increased or generated, or if the activity CDP-glucose-4,6-dehydratase is increased or generated in a non-human organism, like a microorganism or a plant cell, plant or part thereof, especially with non-targeted localization, whereby the respective line disclose in column 7 the fine chemical malate.

[73229] For example, an increase of the malate of at least 1 percent, particularly in a range of 82 to 144-percent is conferred as compared to a corresponding non-transformed wild type non-human organism.

[73230] Accordingly, in one embodiment, an increase of malate in a non-human organism, as compared to a corresponding non-transformed wild type non-human organism, is conferred in the process of the invention, if the activity of a polypeptide showing the activity of a aminotransferase, or if the activity of the polypeptide AvinDRAFT_{—}4562, preferably represented by SEQ ID NO. 31927, or a homolog or fragment thereof, or if the activity of a polypeptide encoded by a nucleic acid molecule comprising the nucleic acid SEQ ID NO. 31926, preferably the coding region thereof, or a homolog or fragment thereof, e.g. derived from Azotobacter vinelandii, is increased or generated. For example the activity of a nucleic acid molecule or a polypeptide comprising the nucleic acid, preferably the coding region thereof, or polypeptide or the consensus sequence or the polypeptide motif, as depicted in Table I, II or IV, application No. 15, column 5 or 8 in the respective same line as the nucleic acid molecule SEQ ID NO. 31926 or polypeptide SEQ ID NO. 31927, respectively, or a homolog or a fragment thereof, is increased or generated, or if the activity aminotransferase is increased or generated in a non-human organism, like a microorganism or a plant cell, plant or part thereof, especially with non-targeted localization, whereby the respective line disclose in column 7 the fine chemical malate. For example, an increase of the malate of at least 1 percent, particularly in a range of 59 to 109-percent is conferred as compared to a corresponding non-transformed wild type non-human organism.

[73231] Accordingly, in one embodiment, an increase of succinate in a non-human organism, as compared to a corresponding non-transformed wild type non-human organism, is conferred in the process of the invention, if the activity of a polypeptide showing the activity of a isocitrate lyase, or if the activity of the polypeptide AvinDRAFT_{—}4594, preferably represented by SEQ ID NO. 134172, or a homolog or fragment thereof, or if the activity of a polypeptide encoded by a nucleic acid molecule comprising the nucleic acid SEQ ID NO. 134171, preferably the coding region thereof, or a homolog or fragment thereof, e.g. derived from Azotobacter vinelandii, is increased or generated. For example the activity of a nucleic acid molecule or a polypeptide comprising the nucleic acid, preferably the coding region thereof, or polypeptide or the consensus sequence or the polypeptide motif, as depicted in Table I, II or IV, application No. 15, column 5 or 8 in the respective same line as the nucleic acid molecule SEQ ID NO. 134171 or polypeptide SEQ ID NO. 134172, respectively, or a homolog or a fragment thereof, is increased or generated, or if the activity isocitrate lyase is increased or generated in a non-human organism, like a microorganism or a plant cell, plant or part thereof, especially with non-targeted localization, whereby the respective line disclose in column 7 the fine chemical succinate. For example, an increase of the succinate of at least 1 percent, particularly in a range of 33 to 110-percent is conferred as compared to a corresponding non-transformed wild type non-human organism.

[73232] Accordingly, in one embodiment, an increase of fumarate in a non-human organism, as compared to a corresponding non-transformed wild type non-human organism, is conferred in the process of the invention, if the activity of a polypeptide showing the activity of a NADH-quinone oxidoreductase subunit, or if the activity of the polypeptide AvinDRAFT_{—}4606, preferably represented by SEQ ID NO. 73720, or a homolog or fragment thereof, or if the activity of a polypeptide encoded by a nucleic acid molecule comprising the nucleic acid SEQ ID NO. 73719, preferably the coding region thereof, or a homolog or fragment thereof, e.g. derived from Azotobacter vinelandii, is increased or generated. For example the activity of a nucleic acid molecule or a polypeptide comprising the nucleic acid, preferably the coding region thereof, or polypeptide or the consensus sequence or the polypeptide motif, as depicted in Table I, II or IV, application No. 15, column 5 or 8 in the respective same line as the nucleic acid molecule SEQ ID NO. 73719 or polypeptide SEQ ID NO. 73720, respectively, or a homolog or a fragment thereof, is increased or generated, or if the activity NADH-quinone oxidoreductase subunit is increased or generated in a non-human organism, like a microorganism or a plant cell, plant or part thereof, especially with non-targeted localization, whereby the respective line disclose in column 7 the fine chemical fumarate. For example, an increase of the fumarate of at least 1 percent, particularly in a range of 52 to 113-percent is conferred as compared to a corresponding non-transformed wild type non-human organism.

[73233] Accordingly, in one embodiment, an increase of malate in a non-human organism, as compared to a corresponding non-transformed wild type non-human organism, is conferred in the process of the invention, if the activity of a polypeptide showing the activity of a NADH-quinone oxidoreductase subunit, or if the activity of the polypeptide AvinDRAFT_{—}4606, preferably represented by SEQ ID NO. 73720, or a homolog or fragment thereof, or if the activity of a polypeptide encoded by a nucleic acid molecule comprising the nucleic acid SEQ ID NO. 73719, preferably the coding region thereof, or a homolog or fragment thereof, e.g. derived from Azotobacter vinelandii, is increased or generated. For example the activity of a nucleic acid molecule or a polypeptide comprising the nucleic acid, preferably the coding region thereof, or polypeptide or the consensus sequence or the polypeptide motif, as depicted in Table I, II or IV, application No. 15, column 5 or 8 in the respective same line as the nucleic acid molecule SEQ ID NO. 73719 or polypeptide SEQ ID NO. 73720, respectively, or a homolog or a fragment thereof, is increased or generated, or if the activity NADH-quinone oxidoreductase subunit is increased or generated in a non-human organism, like a microorganism or a plant cell, plant or part thereof, especially with non-targeted localization, whereby the respective line disclose in column 7 the fine chemical malate. For example, an increase of the malate of at least 1 percent, particularly in a range of 70 to 81-percent is conferred as compared to a corresponding non-transformed wild type non-human organism.

[73234] Accordingly, in one embodiment, an increase of malate in a non-human organism, as compared to a corresponding non-transformed wild type non-human organism, is conferred in the process of the invention, if the activity of a polypeptide showing the activity of a RNA polymerase sigma factor, or if the activity of the polypeptide AvinDRAFT_{—}4989, preferably represented by SEQ ID NO. 74453, or a homolog or fragment thereof, or if the activity of a polypeptide encoded by a nucleic acid molecule comprising the nucleic acid SEQ ID NO. 74452, preferably the coding region thereof, or a homolog or fragment thereof, e.g. derived from Azotobacter vinelandii, is increased or generated. For example the activity of a nucleic acid molecule or a polypeptide comprising the nucleic acid, preferably the coding region thereof, or polypeptide or the consensus sequence or the polypeptide motif, as depicted in Table I, II or IV, application No. 15, column 5 or 8 in the respective same line as the nucleic acid molecule SEQ ID NO. 74452 or polypeptide SEQ ID NO. 74453, respectively, or a homolog or a fragment thereof, is increased or generated, or if the activity RNA polymerase sigma factor is increased or generated in a non-human organism, like a microorganism or a plant cell, plant or part thereof, especially with non-targeted localization, whereby the respective line disclose in column 7 the fine chemical malate. For example, an increase of the malate of at least 1 percent, particularly in a range of 59 to 107-percent is conferred as compared to a corresponding non-transformed wild type non-human organism.

[73235] Accordingly, in one embodiment, an increase of malate in a non-human organism, as compared to a corresponding non-transformed wild type non-human organism, is conferred in the process of the invention, if the activity of a polypeptide showing the activity of a hydrolase, or if the activity of the polypeptide AvinDRAFT_{—}5103, preferably represented by SEQ ID NO. 6511, or a homolog or fragment thereof, or if the activity of a polypeptide encoded by a nucleic acid molecule comprising the nucleic acid SEQ ID NO. 6510, preferably the coding region thereof, or a homolog or fragment thereof, e.g. derived from Azotobacter vinelandii, is increased or generated. For example the activity of a nucleic acid molecule or a polypeptide comprising the nucleic acid, preferably the coding region thereof, or polypeptide or the consensus sequence or the polypeptide motif, as depicted in Table I, II or IV, application No. 15, column 5 or 8 in the respective same line as the nucleic acid molecule SEQ ID NO. 6510 or polypeptide SEQ ID NO. 6511, respectively, or a homolog or a fragment thereof, is increased or generated, or if the activity hydrolase is increased or generated in a non-human organism, like a microorganism or a plant cell, plant or part thereof, especially with non-targeted localization, whereby the respective line disclose in column 7 the fine chemical malate. For example, an increase of the malate of at least 1 percent, particularly in a range of 74 to 412-percent is conferred as compared to a corganism responding non-transformed wild type non-human organism.

[73236] Accordingly, in one embodiment, an increase of malate in a non-human organism, as compared to a corresponding non-transformed wild type non-human organism, is conferred in the process of the invention, if the activity of a polypeptide showing the activity of a glutamate-ammonia-ligase, or if the activity of the polypeptide AvinDRAFT_{—}5246, preferably represented by SEQ ID NO. 32038, or a homolog or fragment thereof, or if the activity of a polypeptide encoded by a nucleic acid molecule comprising the nucleic acid SEQ ID NO. 32037, preferably the coding region thereof, or a homolog or fragment thereof, e.g. derived from Azotobacter vinelandii, is increased or generated. For example the activity of a nucleic acid molecule or a polypeptide comprising the nucleic acid, preferably the coding region thereof, or polypeptide or the consensus sequence or the polypeptide motif, as depicted in Table I, II or IV, application No. 15, column 5 or 8 in the respective same line as the nucleic acid molecule SEQ ID NO. 32037 or polypeptide SEQ ID NO. 32038, respectively, or a homolog or a fragment thereof, is increased or generated, or if the activity glutamate-ammonia-ligase is increased or generated in a non-human organism, like a microorganism or a plant cell, plant or part thereof, especially with non-targeted localization, whereby the respective line disclose in column 7 the fine chemical malate. For example, an increase of the malate of at least 1 percent, particularly in a range of 181 to 293-percent is conferred as compared to a corresponding non-transformed wild type non-human organism.

[73237] Accordingly, in one embodiment, an increase of succinate in a non-human organism, as compared to a corresponding non-transformed wild type non-human organism, is conferred in the process of the invention, if the activity of a polypeptide showing the activity of a electron transfer flavoprotein subunit beta, or if the activity of the polypeptide AvinDRAFT_{—}6679, preferably represented by SEQ ID NO. 74730, or a homolog or fragment thereof, or if the activity of a polypeptide encoded by a nucleic acid molecule comprising the nucleic acid SEQ ID NO. 74729, preferably the coding region thereof, or a homolog or fragment thereof, e.g. derived from Azotobacter vinelandii, is increased or generated. For example the activity of a nucleic acid molecule or a polypeptide comprising the nucleic acid, preferably the coding region thereof, or polypeptide or the consensus sequence or the polypeptide motif, as depicted in Table I, II or IV, application No. 15, column 5 or 8 in the respective same line as the nucleic acid molecule SEQ ID NO. 74729 or polypeptide SEQ ID NO. 74730, respectively, or a homolog or a fragment thereof, is increased or generated, or if the activity electron transfer flavoprotein subunit beta is increased or generated in a non-human organism, like a microorganism or a plant cell, plant or part thereof, especially with non-targeted localization, whereby the respective line disclose in column 7 the fine chemical succinate. For example, an increase of the succinate of at least 1 percent, particularly in a range of 26 to 107-percent is conferred as compared to a corresponding non-transformed wild type non-human organism.

[73238] Accordingly, in one embodiment, an increase of fumarate in a non-human organism, as compared to a corresponding non-transformed wild type non-human organism, is conferred in the process of the invention, if the activity of a polypeptide showing the activity of a AX653549-protein, or if the activity of the polypeptide AX653549, preferably represented by SEQ ID NO. 34302, or a homolog or fragment thereof, or if the activity of a polypeptide encoded by a nucleic acid molecule comprising the nucleic acid SEQ ID NO. 34301, preferably the coding region thereof, or a homolog or fragment thereof, e.g. derived from Oryza sativa, is increased or generated. For example the activity of a nucleic acid molecule or a polypeptide comprising the nucleic acid, preferably the coding region thereof, or polypeptide or the consensus sequence or the polypeptide motif, as depicted in Table I, II or IV, application No. 15, column 5 or 8 in the respective same line as the nucleic acid molecule SEQ ID NO. 34301 or polypeptide SEQ ID NO. 34302, respectively, or a homolog or a fragment thereof, is increased or generated, or if the activity AX653549-protein is increased or generated in a non-human organism, like a microorganism or a plant cell, plant or part thereof, especially with non-targeted localization, whereby the respective line disclose in column 7 the fine chemical fumarate. For example, an increase of the fumarate of at least 1 percent, particularly in a range of 92 to 266-percent is conferred as compared to a corresponding non-transformed wild type non-human organism.

[73239] Accordingly, in one embodiment, an increase of malate in a non-human organism, as compared to a corresponding non-transformed wild type non-human organism, is conferred in the process of the invention, if the activity of a polypeptide showing the activity of a AX653549-protein, or if the activity of the polypeptide AX653549, preferably represented by SEQ ID NO. 34302, or a homolog or fragment thereof, or if the activity of a polypeptide encoded by a nucleic acid molecule comprising the nucleic acid SEQ ID NO. 34301, preferably the coding region thereof, or a homolog or fragment thereof, e.g. derived from Oryza sativa, is increased or generated. For example the activity of a nucleic acid molecule or a polypeptide comprising the nucleic acid, preferably the coding region thereof, or polypeptide or the consensus sequence or the polypeptide motif, as depicted in Table I, II or IV, application No. 15, column 5 or 8 in the respective same line as the nucleic acid molecule SEQ ID NO. 34301 or polypeptide SEQ ID NO. 34302, respectively, or a homolog or a fragment thereof, is increased or generated, or if the activity AX653549-protein is increased or generated in a non-human organism, like a microorganism or a plant cell, plant or part thereof, especially with non-targeted localization, whereby the respective line disclose in column 7 the fine chemical malate. For example, an increase of the malate of at least 1 percent, particularly in a range of 62 to 106-percent is conferred as compared to a corresponding non-transformed wild type non-human organism.

[73240] Accordingly, in one embodiment, an increase of fumarate in a non-human organism, as compared to a corresponding non-transformed wild type non-human organism, is conferred in the process of the invention, if the activity of a polypeptide showing the activity of a AY087308-protein, or if the activity of the polypeptide AY087308, preferably represented by SEQ ID NO.

[73241] 34603, or a homolog or fragment thereof, or if the activity of a polypeptide encoded by a nucleic acid molecule comprising the nucleic acid SEQ ID NO. 34602, preferably the coding region thereof, or a homolog or fragment thereof, e.g. derived from Arabidopsis thaliana, is increased or generated. For example the activity of a nucleic acid molecule or a polypeptide comprising the nucleic acid, preferably the coding region thereof, or polypeptide or the consensus sequence or the polypeptide motif, as depicted in Table I, II or IV, application No. 15, column 5 or 8 in the respective same line as the nucleic acid molecule SEQ ID NO. 34602 or polypeptide SEQ ID NO. 34603, respectively, or a homolog or a fragment thereof, is increased or generated, or if the activity AY087308-protein is increased or generated in a non-human organism, like a microorganism or a plant cell, plant or part thereof, especially with non-targeted localization, whereby the respective line disclose in column 7 the fine chemical fumarate. For example, an increase of the fumarate of at least 1 percent, particularly in a range of 84 to 224-percent is conferred as compared to a corresponding non-transformed wild type non-human organism.

[73242] Accordingly, in one embodiment, an increase of malate in a non-human organism, as compared to a corresponding non-transformed wild type non-human organism, is conferred in the process of the invention, if the activity of a polypeptide showing the activity of a AY087308-protein, or if the activity of the polypeptide AY087308, preferably represented by SEQ ID NO. 34603, or a homolog or fragment thereof, or if the activity of a polypeptide encoded by a nucleic acid molecule comprising the nucleic acid SEQ ID NO. 34602, preferably the coding region thereof, or a homolog or fragment thereof, e.g. derived from Arabidopsis thaliana, is increased or generated. For example the activity of a nucleic acid molecule or a polypeptide comprising the nucleic acid, preferably the coding region thereof, or polypeptide or the consensus sequence or the polypeptide motif, as depicted in Table I, II or IV, application No. 15, column 5 or 8 in the respective same line as the nucleic acid molecule SEQ ID NO. 34602 or polypeptide SEQ ID NO. 34603, respectively, or a homolog or a fragment thereof, is increased or generated, or if the activity AY087308-protein is increased or generated in a non-human organism, like a microorganism or a plant cell, plant or part thereof, especially with non-targeted localization, whereby the respective line disclose in column 7 the fine chemical malate. For example, an increase of the malate of at least 1 percent, particularly in a range of 51 to 252-percent is conferred as compared to a corresponding non-transformed wild type non-human organism.

[73243] Accordingly, in one embodiment, an increase of succinate in a non-human organism, as compared to a corresponding non-transformed wild type non-human organism, is conferred in the process of the invention, if the activity of a polypeptide showing the activity of a AY087308-protein, or if the activity of the polypeptide AY087308, preferably represented by SEQ ID NO. 34603, or a homolog or fragment thereof, or if the activity of a polypeptide encoded by a nucleic acid molecule comprising the nucleic acid SEQ ID NO. 34602, preferably the coding region thereof, or a homolog or fragment thereof, e.g. derived from Arabidopsis thaliana, is increased or generated. For example the activity of a nucleic acid molecule or a polypeptide comprising the nucleic acid, preferably the coding region thereof, or polypeptide or the consensus sequence or the polypeptide motif, as depicted in Table I, II or IV, application No. 15, column 5 or 8 in the respective same line as the nucleic acid molecule SEQ ID NO. 34602 or polypeptide SEQ ID NO. 34603, respectively, or a homolog or a fragment thereof, is increased or generated, or if the activity AY087308-protein is increased or generated in a non-human organism, like a microorganism or a plant cell, plant or part thereof, especially with non-targeted localization, whereby the respective line disclose in column 7 the fine chemical succinate. For example, an increase of the succinate of at least 1 percent, particularly in a range of 33 to 109-percent is conferred as compared to a corresponding non-transformed wild type non-human organism.

[73244] Accordingly, in one embodiment, an increase of fumarate in a non-human organism, as compared to a corresponding non-transformed wild type non-human organism, is conferred in the process of the invention, if the activity of a polypeptide showing the activity of a fumarate hydratase, or if the activity of the polypeptide Bab08741, preferably represented by SEQ ID NO. 136121, or a homolog or fragment thereof, or if the activity of a polypeptide encoded by a nucleic acid molecule comprising the nucleic acid SEQ ID NO. 136120, preferably the coding region thereof, or a homolog or fragment thereof, e.g. derived from Arabidopsis thaliana, is increased or generated. For example the activity of a nucleic acid molecule or a polypeptide comprising the nucleic acid, preferably the coding region thereof, or polypeptide or the consensus sequence or the polypeptide motif, as depicted in Table I, II or IV, application No. 15, column 5 or 8 in the respective same line as the nucleic acid molecule SEQ ID NO. 136120 or polypeptide SEQ ID NO. 136121, respectively, or a homolog or a fragment thereof, is increased or generated, or if the activity fumarate hydratase is increased or generated in a non-human organism, like a microorganism or a plant cell, plant or part thereof, especially with non-targeted localization, whereby the respective line disclose in column 7 the fine chemical fumarate. For example, an increase of the fumarate of at least 1 percent, particularly in a range of 165 to 582-percent is conferred as compared to a corresponding non-transformed wild type non-human organism.

[73245] Accordingly, in one embodiment, an increase of malate in a non-human organism, as compared to a corresponding non-transformed wild type non-human organism, is conferred in the process of the invention, if the activity of a polypeptide showing the activity of a threonine synthase, or if the activity of the polypeptide B0004, preferably represented by SEQ ID NO. 34890, or a homolog or fragment thereof, or if the activity of a polypeptide encoded by a nucleic acid molecule comprising the nucleic acid SEQ ID NO. 34889, preferably the coding region thereof, or a homolog or fragment thereof, e.g. derived from Escherichia coli, is increased or generated. For example the activity of a nucleic acid molecule or a polypeptide comprising the nucleic acid, preferably the coding region thereof, or polypeptide or the consensus sequence or the polypeptide motif, as depicted in Table I, II or IV, application No. 15, column 5 or 8 in the respective same line as the nucleic acid molecule SEQ ID NO. 34889 or polypeptide SEQ ID NO. 34890, respectively, or a homolog or a fragment thereof, is increased or generated, or if the activity threonine synthase is increased or generated in a non-human organism, like a microorganism or a plant cell, plant or part thereof, especially with plastidic localization, whereby the respective line disclose in column 7 the fine chemical malate. For example, an increase of the malate of at least 1 percent, particularly in a range of 61 to 169-percent is conferred as compared to a corganism responding non-transformed wild type non-human organism.

[73246] Accordingly, in one embodiment, an increase of fumarate in a non-human organism, as compared to a corresponding non-transformed wild type non-human organism, is conferred in the process of the invention, if the activity of a polypeptide showing the activity of a ribulokinase, or if the activity of the polypeptide B0063, preferably represented by SEQ ID NO. 134300, or a homolog or fragment thereof, or if the activity of a polypeptide encoded by a nucleic acid molecule comprising the nucleic acid SEQ ID NO. 134299, preferably the coding region thereof, or a homolog or fragment thereof, e.g. derived from Escherichia coli, is increased or generated. For example the activity of a nucleic acid molecule or a polypeptide comprising the nucleic acid, preferably the coding region thereof, or polypeptide or the consensus sequence or the polypeptide motif, as depicted in Table I, II or IV, application No. 15, column 5 or 8 in the respective same line as the nucleic acid molecule SEQ ID NO. 134299 or polypeptide SEQ ID NO. 134300, respectively, or a homolog or a fragment thereof, is increased or generated, or if the activity ribulokinase is increased or generated in a non-human organism, like a microorganism or a plant cell, plant or part thereof, especially with non-targeted localization, whereby the respective line disclose in column 7 the fine chemical fumarate. For example, an increase of the fumarate of at least 1 percent, particularly in a range of 63 to 529-percent is conferred as compared to a corresponding non-transformed wild type non-human organism.

[73247] Accordingly, in one embodiment, an increase of succinate in a non-human organism, as compared to a corresponding non-transformed wild type non-human organism, is conferred in the process of the invention, if the activity of a polypeptide showing the activity of a ribulokinase, or if the activity of the polypeptide B0063, preferably represented by SEQ ID NO. 134300, or a homolog or fragment thereof, or if the activity of a polypeptide encoded by a nucleic acid molecule comprising the nucleic acid SEQ ID NO. 134299, preferably the coding region thereof, or a homolog or fragment thereof, e.g. derived from Escherichia coli, is increased or generated. For example the activity of a nucleic acid molecule or a polypeptide comprising the nucleic acid, preferably the coding region thereof, or polypeptide or the consensus sequence or the polypeptide motif, as depicted in Table I, II or IV, application No. 15, column 5 or 8 in the respective same line as the nucleic acid molecule SEQ ID NO. 134299 or polypeptide SEQ ID NO. 134300, respectively, or a homolog or a fragment thereof, is increased or generated, or if the activity ribulokinase is increased or generated in a non-human organism, like a microorganism or a plant cell, plant or part thereof, especially with non-targeted localization, whereby the respective line disclose in column 7 the fine chemical succinate. For example, an increase of the succinate of at least 1 percent, particularly in a range of 39 to 119-percent is conferred as compared to a corresponding non-transformed wild type non-human organism.

[73248] Accordingly, in one embodiment, an increase of citrate in a non-human organism, as compared to a corresponding non-transformed wild type non-human organism, is conferred in the process of the invention, if the activity of a polypeptide showing the activity of a glucose dehydrogenase, or if the activity of the polypeptide B0124, preferably represented by SEQ ID NO. 35483, or a homolog or fragment thereof, or if the activity of a polypeptide encoded by a nucleic acid molecule comprising the nucleic acid SEQ ID NO. 35482, preferably the coding region thereof, or a homolog or fragment thereof, e.g. derived from Escherichia coli, is increased or generated. For example the activity of a nucleic acid molecule or a polypeptide comprising the nucleic acid, preferably the coding region thereof, or polypeptide or the consensus sequence or the polypeptide motif, as depicted in Table I, II or IV, application No. 15, column 5 or 8 in the respective same line as the nucleic acid molecule SEQ ID NO. 35482 or polypeptide SEQ ID NO. 35483, respectively, or a homolog or a fragment thereof, is increased or generated, or if the activity glucose dehydrogenase is increased or generated in a non-human organism, like a microorganism or a plant cell, plant or part thereof, especially with non-targeted localization, whereby the respective line disclose in column 7 the fine chemical citrate. For example, an increase of the citrate of at least 1 percent, particularly in a range of 91 to 837-percent is conferred as compared to a corresponding non-transformed wild type non-human organism.

[73249] Accordingly, in one embodiment, an increase of fumarate in a non-human organism, as compared to a corresponding non-transformed wild type non-human organism, is conferred in the process of the invention, if the activity of a polypeptide showing the activity of a acyl-CoA dehydrogenase, or if the activity of the polypeptide B0221, preferably represented by SEQ ID NO. 35591, or a homolog or fragment thereof, or if the activity of a polypeptide encoded by a nucleic acid molecule comprising the nucleic acid SEQ ID NO. 35590, preferably the coding region thereof, or a homolog or fragment thereof, e.g. derived from Escherichia coli, is increased or generated. For example the activity of a nucleic acid molecule or a polypeptide comprising the nucleic acid, preferably the coding region thereof, or polypeptide or the consensus sequence or the polypeptide motif, as depicted in Table I, II or IV, application No. 15, column 5 or 8 in the respective same line as the nucleic acid molecule SEQ ID NO. 35590 or polypeptide SEQ ID NO. 35591, respectively, or a homolog or a fragment thereof, is increased or generated, or if the activity acyl-CoA dehydrogenase is increased or generated in a non-human organism, like a microorganism or a plant cell, plant or part thereof, especially with non-targeted localization, whereby the respective line disclose in column 7 the fine chemical fumarate. For example, an increase of the fumarate of at least 1 percent, particularly in a range of 49 to 70-percent is conferred as compared to a corresponding non-transformed wild type non-human organism.

[73250] Accordingly, in one embodiment, an increase of citrate in a non-human organism, as compared to a corresponding non-transformed wild type non-human organism, is conferred in the process of the invention, if the activity of a polypeptide showing the activity of a betaine aldehyde dehydrogenase, or if the activity of the polypeptide B0312, preferably represented by SEQ ID NO. 121112, or a homolog or fragment thereof, or if the activity of a polypeptide encoded by a nucleic acid molecule comprising the nucleic acid SEQ ID NO. 121111, preferably the coding region thereof, or a homolog or fragment thereof, e.g. derived from Escherichia coli, is increased or generated. For example the activity of a nucleic acid molecule or a polypeptide comprising the nucleic acid, preferably the coding region thereof, or polypeptide or the consensus sequence or the polypeptide motif, as depicted in Table I, II or IV, application No. 15, column 5 or 8 in the respective same line as the nucleic acid molecule SEQ ID NO. 121111 or polypeptide SEQ ID NO. 121112, respectively, or a homolog or a fragment thereof, is increased or generated, or if the activity betaine aldehyde dehydrogenase is increased or generated in a non-human organism, like a microorganism or a plant cell, plant or part thereof, especially with non-targeted localization, whereby the respective line disclose in column 7 the fine chemical citrate. For example, an increase of the citrate of at least 1 percent, particularly in a range of 126 to 165-percent is conferred as compared to a corresponding non-transformed wild type non-human organism.

[73251] Accordingly, in one embodiment, an increase of malate in a non-human organism, as compared to a corresponding non-transformed wild type non-human organism, is conferred in the process of the invention, if the activity of a polypeptide showing the activity of a ATP-binding component of a transport system, or if the activity of the polypeptide B0449, preferably represented by SEQ ID NO. 7334, or a homolog or fragment thereof, or if the activity of a polypeptide encoded by a nucleic acid molecule comprising the nucleic acid SEQ ID NO. 7333, preferably the coding region thereof, or a homolog or fragment thereof, e.g. derived from Escherichia coli, is increased or generated. For example the activity of a nucleic acid molecule or a polypeptide comprising the nucleic acid, preferably the coding region thereof, or polypeptide or the consensus sequence or the polypeptide motif, as depicted in Table I, II or IV, application No. 15, column 5 or 8 in the respective same line as the nucleic acid molecule SEQ ID NO. 7333 or polypeptide SEQ ID NO. 7334, respectively, or a homolog or a fragment thereof, is increased or generated, or if the activity ATP-binding component of a transport system is increased or generated in a non-human organism, like a microorganism or a plant cell, plant or part thereof, especially with non-targeted localization, whereby the respective line disclose in column 7 the fine chemical malate. For example, an increase of the malate of at least 1 percent, particularly in a range of 94 to 471-percent is conferred as compared to a corresponding non-transformed wild type non-human organism.

[73252] Accordingly, in one embodiment, an increase of malate in a non-human organism, as compared to a corresponding non-transformed wild type non-human organism, is conferred in the process of the invention, if the activity of a polypeptide showing the activity of a membrane transport protein, or if the activity of the polypeptide B0486, preferably represented by SEQ ID NO. 7687, or a homolog or fragment thereof, or if the activity of a polypeptide encoded by a nucleic acid molecule comprising the nucleic acid SEQ ID NO. 7686, preferably the coding region thereof, or a homolog or fragment thereof, e.g. derived from Escherichia coli, is increased or generated. For example the activity of a nucleic acid molecule or a polypeptide comprising the nucleic acid, preferably the coding region thereof, or polypeptide or the consensus sequence or the polypeptide motif, as depicted in Table I, II or IV, application No. 15, column 5 or 8 in the respective same line as the nucleic acid molecule SEQ ID NO. 7686 or polypeptide SEQ ID NO. 7687, respectively, or a homolog or a fragment thereof, is increased or generated, or if the activity membrane transport protein is increased or generated in a non-human organism, like a microorganism organism or a plant cell, plant or part thereof, especially with non-targeted localization, whereby the respective line disclose in column 7 the fine chemical malate. For example, an increase of the malate of at least 1 percent, particularly in a range of 61 to 99-percent is conferred as compared to a corresponding non-transformed wild type non-human organism.

[73253] Accordingly, in one embodiment, an increase of succinate in a non-human organism, as compared to a corresponding non-transformed wild type non-human organism, is conferred in the process of the invention, if the activity of a polypeptide showing the activity of a membrane transport protein, or if the activity of the polypeptide B0486, preferably represented by SEQ ID NO. 7687, or a homolog or fragment thereof, or if the activity of a polypeptide encoded by a nucleic acid molecule comprising the nucleic acid SEQ ID NO. 7686, preferably the coding region thereof, or a homolog or fragment thereof, e.g. derived from Escherichia coli, is increased or generated. For example the activity of a nucleic acid molecule or a polypeptide comprising the nucleic acid, preferably the coding region thereof, or polypeptide or the consensus sequence or the polypeptide motif, as depicted in Table I, II or IV, application No. 15, column 5 or 8 in the respective same line as the nucleic acid molecule SEQ ID NO. 7686 or polypeptide SEQ ID NO. 7687, respectively, or a homolog or a fragment thereof, is increased or generated, or if the activity membrane transport protein is increased or generated in a non-human organism, like a microorganism or a plant cell, plant or part thereof, especially with non-targeted localization, whereby the respective line disclose in column 7 the fine chemical succinate. For example, an increase of the succinate of at least 1 percent, particularly in a range of 31 to 56-percent is conferred as compared to a corresponding non-transformed wild type non-human organism.

[73254] Accordingly, in one embodiment, an increase of citrate in a non-human organism, as compared to a corresponding non-transformed wild type non-human organism, is conferred in the process of the invention, if the activity of a polypeptide showing the activity of a glycerate kinase, or if the activity of the polypeptide B0514, preferably represented by SEQ ID NO. 134403, or a homolog or fragment thereof, or if the activity of a polypeptide encoded by a nucleic acid molecule comprising the nucleic acid SEQ ID NO. 134402, preferably the coding region thereof, or a homolog or fragment thereof, e.g. derived from Escherichia coli, is increased or generated. For example the activity of a nucleic acid molecule or a polypeptide comprising the nucleic acid, preferably the coding region thereof, or polypeptide or the consensus sequence or the polypeptide motif, as depicted in Table I, II or IV, application No. 15, column 5 or 8 in the respective same line as the nucleic acid molecule SEQ ID NO. 134402 or polypeptide SEQ ID NO. 134403, respectively, or a homolog or a fragment thereof, is increased or generated, or if the activity glycerate kinase is increased or generated in a non-human organism, like a microorganism or a plant cell, plant or part thereof, especially with non-targeted localization, whereby the respective line disclose in column 7 the fine chemical citrate. For example, an increase of the citrate of at least 1 percent, particularly in a range of 88 to 115-percent is conferred as compared to a corresponding non-transformed wild type non-human organism.

[73255] Accordingly, in one embodiment, an increase of fumarate in a non-human organism, as compared to a corresponding non-transformed wild type non-human organism, is conferred in the process of the invention, if the activity of a polypeptide showing the activity of a isochorismate synthase, or if the activity of the polypeptide B0593, preferably represented by SEQ ID NO. 35968, or a homolog or fragment thereof, or if the activity of a polypeptide encoded by a nucleic acid molecule comprising the nucleic acid SEQ ID NO. 35967, preferably the coding region thereof, or a homolog or fragment thereof, e.g. derived from Escherichia coli, is increased or generated. For example the activity of a nucleic acid molecule or a polypeptide comprising the nucleic acid, preferably the coding region thereof, or polypeptide or the consensus sequence or the polypeptide motif, as depicted in Table I, II or IV, application No. 15, column 5 or 8 in the respective same line as the nucleic acid molecule SEQ ID NO. 35967 or polypeptide SEQ ID NO. 35968, respectively, or a homolog or a fragment thereof, is increased or generated, or if the activity isochorismate synthase is increased or generated in a non-human organism, like a microorganism or a plant cell, plant or part thereof, especially with plastidic localization, whereby the respective line disclose in column 7 the fine chemical fumarate. For example, an increase of the fumarate of at least 1 percent, particularly in a range of 130 to 365-percent is conferred as compared to a corresponding non-transformed wild type non-human organism.

[73256] Accordingly, in one embodiment, an increase of malate in a non-human organism, as compared to a corresponding non-transformed wild type non-human organism, is conferred in the process of the invention, if the activity of a polypeptide showing the activity of a isochorismate synthase, or if the activity of the polypeptide B0593, preferably represented by SEQ ID NO. 35968, or a homolog or fragment thereof, or if the activity of a polypeptide encoded by a nucleic acid molecule comprising the nucleic acid SEQ ID NO. 35967, preferably the coding region thereof, or a homolog or fragment thereof, e.g. derived from Escherichia coli, is increased or generated. For example the activity of a nucleic acid molecule or a polypeptide comprising the nucleic acid, preferably the coding region thereof, or polypeptide or the consensus sequence or the polypeptide motif, as depicted in Table I, II or IV, application No. 15, column 5 or 8 in the respective same line as the nucleic acid molecule SEQ ID NO. 35967 or polypeptide SEQ ID NO. 35968, respectively, or a homolog or a fragment thereof, is increased or generated, or if the activity isochorismate synthase is increased or generated in a non-human organism, like a microorganism or a plant cell, plant or part thereof, especially with plastidic localization, whereby the respective line disclose in column 7 the fine chemical malate. For example, an increase of the malate of at least 1 percent, particularly in a range of 168 to 536-percent is conferred as compared to a corresponding non-transformed wild type non-human organism.

[73257] Accordingly, in one embodiment, an increase of fumarate in a non-human organism, as compared to a corresponding non-transformed wild type non-human organism, is conferred in the process of the invention, if the activity of a polypeptide showing the activity of a zinc transporter, or if the activity of the polypeptide B0752, preferably represented by SEQ ID NO. 36115, or a homolog or fragment thereof, or if the activity of a polypeptide encoded by a nucleic acid molecule comprising the nucleic acid SEQ ID NO. 36114, preferably the coding region thereof, or a homolog or fragment thereof, e.g. derived from Escherichia coli, is increased or generated. For example the activity of a nucleic acid molecule or a polypeptide comprising the nucleic acid, preferably the coding region thereof, or polypeptide or the consensus sequence or the polypeptide motif, as depicted in Table I, II or IV, application No. 15, column 5 or 8 in the respective same line as the nucleic acid molecule SEQ ID NO. 36114 or polypeptide SEQ ID NO. 36115, respectively, or a homolog or a fragment thereof, is increased or generated, or if the activity zinc transporter is increased or generated in a non-human organism, like a microorganism or a plant cell, plant or part thereof, especially with non-targeted localization, whereby the respective line disclose in column 7 the fine chemical fumarate. For example, an increase of the fumarate of at least 1 percent, particularly in a range of 158 to 628-percent is conferred as compared to a corganism responding non-transformed wild type non-human organism.

[73258] Accordingly, in one embodiment, an increase of succinate in a non-human organism, as compared to a corresponding non-transformed wild type non-human organism, is conferred in the process of the invention, if the activity of a polypeptide showing the activity of a b0801-protein, or if the activity of the polypeptide B0801, preferably represented by SEQ ID NO. 75808, or a homolog or fragment thereof, or if the activity of a polypeptide encoded by a nucleic acid molecule comprising the nucleic acid SEQ ID NO. 75807, preferably the coding region thereof, or a homolog or fragment thereof, e.g. derived from Escherichia coli, is increased or generated. For example the activity of a nucleic acid molecule or a polypeptide comprising the nucleic acid, preferably the coding region thereof, or polypeptide or the consensus sequence or the polypeptide motif, as depicted in Table I, II or IV, application No. 15, column 5 or 8 in the respective same line as the nucleic acid molecule SEQ ID NO. 75807 or polypeptide SEQ ID NO. 75808, respectively, or a homolog or a fragment thereof, is increased or generated, or if the activity b0801-protein is increased or generated in a non-human organism, like a microorganism or a plant cell, plant or part thereof, especially with non-targeted localization, whereby the respective line disclose in column 7 the fine chemical succinate. For example, an increase of the succinate of at least 1 percent, particularly in a range of 67 to 135-percent is conferred as compared to a corresponding non-transformed wild type non-human organism.

[73259] Accordingly, in one embodiment, an increase of malate in a non-human organism, as compared to a corresponding non-transformed wild type non-human organism, is conferred in the process of the invention, if the activity of a polypeptide showing the activity of a leucyl/phenylalanyl-tRNA-protein transferase, or if the activity of the polypeptide B0885, preferably represented by SEQ ID NO. 36490, or a homolog or fragment thereof, or if the activity of a polypeptide encoded by a nucleic acid molecule comprising the nucleic acid SEQ ID NO. 36489, preferably the coding region thereof, or a homolog or fragment thereof, e.g. derived from Escherichia coli, is increased or generated. For example the activity of a nucleic acid molecule or a polypeptide comprising the nucleic acid, preferably the coding region thereof, or polypeptide or the consensus sequence or the polypeptide motif, as depicted in Table I, II or IV, application No. 15, column 5 or 8 in the respective same line as the nucleic acid molecule SEQ ID NO. 36489 or polypeptide SEQ ID NO. 36490, respectively, or a homolog or a fragment thereof, is increased or generated, or if the activity leucyl/phenylalanyl-tRNA-protein transferase is increased or generated in a non-human organism, like a microorganism or a plant cell, plant or part thereof, especially with non-targeted localization, whereby the respective line disclose in column 7 the fine chemical malate.

[73260] For example, an increase of the malate of at least 1 percent, particularly in a range of 134 to 141-percent is conferred as compared to a corresponding non-transformed wild type non-human organism.

[73261] Accordingly, in one embodiment, an increase of vitamin c and/or threonic acid in a non-human organism, as compared to a corresponding non-transformed wild type non-human organism, is conferred in the process of the invention, if the activity of a polypeptide showing the activity of a methylglyoxal synthase, or if the activity of the polypeptide B0963, preferably represented by SEQ ID NO. 36671, or a homolog or fragment thereof, or if the activity of a polypeptide encoded by a nucleic acid molecule comprising the nucleic acid SEQ ID NO. 36670, preferably the coding region thereof, or a homolog or fragment thereof, e.g. derived from Escherichia coli, is increased or generated. For example the activity of a nucleic acid molecule or a polypeptide comprising the nucleic acid, preferably the coding region thereof, or polypeptide or the consensus sequence or the polypeptide motif, as depicted in Table I, II or IV, application No. 15, column 5 or 8 in the respective same line as the nucleic acid molecule SEQ ID NO. 36670 or polypeptide SEQ ID NO. 36671, respectively, or a homolog or a fragment thereof, is increased or generated, or if the activity methylglyoxal synthase is increased or generated in a non-human organism, like a microorganism or a plant cell, plant or part thereof, especially with non-targeted localization, whereby the respective line disclose in column 7 the fine chemical vitamin c and/or threonic acid. For example, an increase of the vitamin c and/or threonic acid of at least 1 percent, particularly in a range of 43 to 81-percent is conferred as compared to a corresponding non-transformed wild type non-human organism.

[73262] Accordingly, in one embodiment, an increase of malate in a non-human organism, as compared to a corresponding non-transformed wild type non-human organism, is conferred in the process of the invention, if the activity of a polypeptide showing the activity of a b1003-protein, or if the activity of the polypeptide B1003, preferably represented by SEQ ID NO. 7942, or a homolog or fragment thereof, or if the activity of a polypeptide encoded by a nucleic acid molecule comprising the nucleic acid SEQ ID NO. 7941, preferably the coding region thereof, or a homolog or fragment thereof, e.g. derived from Escherichia coli, is increased or generated. For example the activity of a nucleic acid molecule or a polypeptide comprising the nucleic acid, preferably the coding region thereof, or polypeptide or the consensus sequence or the polypeptide motif, as depicted in Table I, II or IV, application No. 15, column 5 or 8 in the respective same line as the nucleic acid molecule SEQ ID NO. 7941 or polypeptide SEQ ID NO. 7942, respectively, or a homolog or a fragment thereof, is increased or generated, or if the activity b1003-protein is increased or generated in a non-human organism, like a microorganism or a plant cell, plant or part thereof, especially with non-targeted localization, whereby the respective line disclose in column 7 the fine chemical malate. For example, an increase of the malate of at least 1 percent, particularly in a range of 107 to 1076-percent is conferred as compared to a corresponding non-transformed wild type non-human organism.

[73263] Accordingly, in one embodiment, an increase of malate in a non-human organism, as compared to a corresponding non-transformed wild type non-human organism, is conferred in the process of the invention, if the activity of a polypeptide showing the activity of a membrane protein, or if the activity of the polypeptide B1255, preferably represented by SEQ ID NO. 37484, or a homolog or fragment thereof, or if the activity of a polypeptide encoded by a nucleic acid molecule comprising the nucleic acid SEQ ID NO. 37483, preferably the coding region thereof, or a homolog or fragment thereof, e.g. derived from Escherichia coli, is increased or generated. For example the activity of a nucleic acid molecule or a polypeptide comprising the nucleic acid, preferably the coding region thereof, or polypeptide or the consensus sequence or the polypeptide motif, as depicted in Table I, II or IV, application No. 15, column 5 or 8 in the respective same line as the nucleic acid molecule SEQ ID NO. 37483 or polypeptide SEQ ID NO. 37484, respectively, or a homolog or a fragment thereof, is increased or generated, or if the activity membrane protein is increased or generated in a non-human organism, like a microorganism or a plant cell, plant or part thereof, especially with non-targeted localization, whereby the respective line disclose in column 7 the fine chemical malate. For example, an increase of the malate of at least 1 percent, particularly in a range of 50 to 119-percent is conferred as compared to a corresponding non-transformed wild type non-human organism.

[73264] Accordingly, in one embodiment, an increase of succinate in a non-human organism, as compared to a corresponding non-transformed wild type non-human organism, is conferred in the process of the invention, if the activity of a polypeptide showing the activity of a b1285-protein, or if the activity of the polypeptide B1285, preferably represented by SEQ ID NO. 134656, or a homolog or fragment thereof, or if the activity of a polypeptide encoded by a nucleic acid molecule comprising the nucleic acid SEQ ID NO. 134655, preferably the coding region thereof, or a homolog or fragment thereof, e.g. derived from Escherichia coli, is increased or generated. For example the activity of a nucleic acid molecule or a polypeptide comprising the nucleic acid, preferably the coding region thereof, or polypeptide or the consensus sequence or the polypeptide motif, as depicted in Table I, II or IV, application No. 15, column 5 or 8 in the respective same line as the nucleic acid molecule SEQ ID NO. 134655 or polypeptide SEQ ID NO. 134656, respectively, or a homolog or a fragment thereof, is increased or generated, or if the activity b1285-protein is increased or generated in a non-human organism, like a microorganism or a plant cell, plant or part thereof, especially with non-targeted localization, whereby the respective line disclose in column 7 the fine chemical succinate. For example, an increase of the succinate of at least 1 percent, particularly in a range of 31 to 37-percent is conferred as compared to a corresponding non-transformed wild type non-human organism.

[73265] Accordingly, in one embodiment, an increase of malate in a non-human organism, as compared to a corresponding non-transformed wild type non-human organism, is conferred in the process of the invention, if the activity of a polypeptide showing the activity of a phenylacetic acid degradation protein, or if the activity of the polypeptide B1390, preferably represented by SEQ ID NO. 134698, or a hornolog or fragment thereof, or if the activity of a polypeptide encoded by a nucleic acid molecule comprising the nucleic acid SEQ ID NO. 134697, preferably the coding region thereof, or a homolog or fragment thereof, e.g. derived from Escherichia coli, is increased or generated. For example the activity of a nucleic acid molecule or a polypeptide comprising the nucleic acid, preferably the coding region thereof, or polypeptide or the consensus sequence or the polypeptide motif, as depicted in Table I, II or IV, application No. 15, column 5 or 8 in the respective same line as the nucleic acid molecule SEQ ID NO. 134697 or polypeptide SEQ ID NO. 134698, respectively, or a homolog or a fragment thereof, is increased or generated, or if the activity phenylacetic acid degradation protein is increased or generated in a non-human organism, like a microorganism or a plant cell, plant or part thereof, especially with non-targeted localization, whereby the respective line disclose in column 7 the fine chemical malate. For example, an increase of the malate of at least 1 percent, particularly in a range of 60 to 182-percent is conferred as compared to a corresponding non-transformed wild type non-human organism.

[73266] Accordingly, in one embodiment, an increase of malate in a non-human organism, as compared to a corresponding non-transformed wild type non-human organism, is conferred in the process of the invention, if the activity of a polypeptide showing the activity of a b1425-protein, or if the activity of the polypeptide B1425, preferably represented by SEQ ID NO. 134757, or a homolog or fragment thereof, or if the activity of a polypeptide encoded by a nucleic acid molecule comprising the nucleic acid SEQ ID NO. 134756, preferably the coding region thereof, or a homolog or fragment thereof, e.g. derived from Escherichia coli, is increased or generated. For example the activity of a nucleic acid molecule or a polypeptide comprising the nucleic acid, preferably the coding region thereof, or polypeptide or the consensus sequence or the polypeptide motif, as depicted in Table I, II or IV, application No. 15, column 5 or 8 in the respective same line as the nucleic acid molecule SEQ ID NO. 134756 or polypeptide SEQ ID NO. 134757, respectively, or a homolog or a fragment thereof, is increased or generated, or if the activity b1425-protein is increased or generated in a non-human organism, like a microorganism or a plant cell, plant or part thereof, especially with non-targeted localization, whereby the respective line disclose in column 7 the fine chemical malate. For example, an increase of the malate of at least 1 percent, particularly in a range of 61 to 256-percent is conferred as compared to a corresponding non-transformed wild type non-human organism.

[73267] Accordingly, in one embodiment, an increase of succinate in a non-human organism, as compared to a corresponding non-transformed wild type non-human organism, is conferred in the process of the invention, if the activity of a polypeptide showing the activity of a lipoprotein precursor, or if the activity of the polypeptide B1431, preferably represented by SEQ ID NO. 38267, or a homolog or fragment thereof, or if the activity of a polypeptide encoded by a nucleic acid molecule comprising the nucleic acid SEQ ID NO. 38266, preferably the coding region thereof, or a homolog or fragment thereof, e.g. derived from Escherichia coli, is increased or generated. For example the activity of a nucleic acid molecule or a polypeptide comprising the nucleic acid, preferably the coding region thereof, or polypeptide or the consensus sequence or the polypeptide motif, as depicted in Table I, II or IV, application No. 15, column 5 or 8 in the respective same line as the nucleic acid molecule SEQ ID NO. 38266 or polypeptide SEQ ID NO. 38267, respectively, or a homolog or a fragment thereof, is increased or generated, or if the activity lipoprotein precursor is increased or generated in a non-human organism, like a microorganism or a plant cell, plant or part thereof, especially with plastidic localization, whereby the respective line disclose in column 7 the fine chemical succinate. For example, an increase of the succinate of at least 1 percent, particularly in a range of 29 to 44-percent is conferred as compared to a corresponding non-transformed wild type non-human organism.

[73268] Accordingly, in one embodiment, an increase of citramalate in a non-human organism, as compared to a corresponding non-transformed wild type non-human organism, is conferred in the process of the invention, if the activity of a polypeptide showing the activity of a b1445-protein, or if the activity of the polypeptide B1445, preferably represented by SEQ ID NO. 38290, or a homolog or fragment thereof, or if the activity of a polypeptide encoded by a nucleic acid molecule comprising the nucleic acid SEQ ID NO. 38289, preferably the coding region thereof, or a homolog or fragment thereof, e.g. derived from Escherichia coli, is increased or generated. For example the activity of a nucleic acid molecule or a polypeptide comprising the nucleic acid, preferably the coding region thereof, or polypeptide or the consensus sequence or the polypeptide motif, as depicted in Table I, II or IV, application No. 15, column 5 or 8 in the respective same line as the nucleic acid molecule SEQ ID NO. 38289 or polypeptide SEQ ID NO. 38290, respectively, or a homolog or a fragment thereof, is increased or generated, or if the activity b1445-protein is increased or generated in a non-human organism, like a microorganism or a plant cell, plant or part thereof, especially with non-targeted localization, whereby the respective line disclose in column 7 the fine chemical citramalate. For example, an increase of the citramalate of at least 1 percent, particularly in a range of 67 to 102-percent is conferred as compared to a corresponding non-transformed wild type non-human organism.

[73269] Accordingly, in one embodiment, an increase of citramalate in a non-human organism, as compared to a corresponding non-transformed wild type non-human organism, is conferred in the process of the invention, if the activity of a polypeptide showing the activity of a b1522-protein, or if the activity of the polypeptide B1522, preferably represented by SEQ ID NO. 7948, or a homolog or fragment thereof, or if the activity of a polypeptide encoded by a nucleic acid molecule comprising the nucleic acid SEQ ID NO. 7947, preferably the coding region thereof, or a homolog or fragment thereof, e.g. derived from Escherichia coli, is increased or generated. For example the activity of a nucleic acid molecule or a polypeptide comprising the nucleic acid, preferably the coding region thereof, or polypeptide or the consensus sequence or the polypeptide motif, as depicted in Table I, II or IV, application No. 15, column 5 or 8 in the respective same line as the nucleic acid molecule SEQ ID NO. 7947 or polypeptide SEQ ID NO. 7948, respectively, or a homolog or a fragment thereof, is increased or generated, or if the activity b1522-protein is increased or generated in a non-human organism, like a microorganism or a plant cell, plant or part thereof, especially with non-targeted localization, whereby the respective line disclose in column 7 the fine chemical citramalate. For example, an increase of the citramalate of at least 1 percent, particularly in a range of 41 to 92-percent is conferred as compared to a corresponding non-transformed wild type non-human organism.

[73270] Accordingly, in one embodiment, an increase of malate in a non-human organism, as compared to a corresponding non-transformed wild type non-human organism, is conferred in the process of the invention, if the activity of a polypeptide showing the activity of a b1522-protein, or if the activity of the polypeptide B1522, preferably represented by SEQ ID NO. 7948, or a homolog or fragment thereof, or if the activity of a polypeptide encoded by a nucleic acid molecule comprising the nucleic acid SEQ ID NO. 7947, preferably the coding region thereof, or a homolog or fragment thereof, e.g. derived from Escherichia coli, is increased or generated. For example the activity of a nucleic acid molecule or a polypeptide comprising the nucleic acid, preferably the coding region thereof, or polypeptide or the consensus sequence or the polypeptide motif, as depicted in Table I, II or IV, application No. 15, column 5 or 8 in the respective same line as the nucleic acid molecule SEQ ID NO. 7947 or polypeptide SEQ ID NO. 7948, respectively, or a homolog or a fragment thereof, is increased or generated, or if the activity b1522-protein is increased or generated in a non-human organism, like a microorganism or a plant cell, plant or part thereof, especially with non-targeted localization, whereby the respective line disclose in column 7 the fine chemical malate. For example, an increase of the malate of at least 1 percent, particularly in a range of 52 to 311-percent is conferred as compared to a corresponding non-transformed wild type non-human organism.

[73271] Accordingly, in one embodiment, an increase of fumarate in a non-human organism, as compared to a corresponding non-transformed wild type non-human organism, is conferred in the process of the invention, if the activity of a polypeptide showing the activity of a Fe—S subunit of oxidoreductase, or if the activity of the polypeptide B1589, preferably represented by SEQ ID NO. 78155, or a homolog or fragment thereof, or if the activity of a polypeptide encoded by a nucleic acid molecule comprising the nucleic acid SEQ ID NO. 78154, preferably the coding region thereof, or a homolog or fragment thereof, e.g. derived from Escherichia coli, is increased or generated. For example the activity of a nucleic acid molecule or a polypeptide comprising the nucleic acid, preferably the coding region thereof, or polypeptide or the consensus sequence or the polypeptide motif, as depicted in Table I, II or IV, application No. 15, column 5 or 8 in the respective same line as the nucleic acid molecule SEQ ID NO. 78154 or polypeptide SEQ ID NO. 78155, respectively, or a homolog or a fragment thereof, is increased or generated, or if the activity Fe—S subunit of oxidoreductase is increased or generated in a non-human organism, like a microorganism or a plant cell, plant or part thereof, especially with non-targeted localization, whereby the respective line disclose in column 7 the fine chemical fumarate. For example, an increase of the fumarate of at least 1 percent, particularly in a range of 117 to 167-percent is conferred as compared to a corresponding non-transformed wild type non-human organism.

[73272] Accordingly, in one embodiment, an increase of fumarate in a non-human organism, as compared to a corresponding non-transformed wild type non-human organism, is conferred in the process of the invention, if the activity of a polypeptide showing the activity of a fumarate hydratase, or if the activity of the polypeptide B1611, preferably represented by SEQ ID NO. 115065, or a homolog or fragment thereof, or if the activity of a polypeptide encoded by a nucleic acid molecule comprising the nucleic acid SEQ ID NO. 115064, preferably the coding region thereof, or a homolog or fragment thereof, e.g. derived from Escherichia coli, is increased or generated. For example the activity of a nucleic acid molecule or a polypeptide comprising the nucleic acid, preferably the coding region thereof, or polypeptide or the consensus sequence or the polypeptide motif, as depicted in Table I, II or IV, application No. 15, column 5 or 8 in the respective same line as the nucleic acid molecule SEQ ID NO. 115064 or polypeptide SEQ ID NO. 115065, respectively, or a homolog or a fragment thereof, is increased or generated, or if the activity fumarate hydratase is increased or generated in a non-human organism, like a microorganism or a plant cell, plant or part thereof, especially with plastidic localization, whereby the respective line disclose in column 7 the fine chemical fumarate. For example, an increase of the fumarate of at least 1 percent, particularly in a range of 187 to 514-percent is conferred as compared to a corresponding non-transformed wild type non-human organism.

[73273] Accordingly, in one embodiment, an increase of succinate in a non-human organism, as compared to a corresponding non-transformed wild type non-human organism, is conferred in the process of the invention, if the activity of a polypeptide showing the activity of a electron transport complex protein, or if the activity of the polypeptide B1627, preferably represented by SEQ ID NO. 38346, or a homolog or fragment thereof, or if the activity of a polypeptide encoded by a nucleic acid molecule comprising the nucleic acid SEQ ID NO. 38345, preferably the coding region thereof, or a homolog or fragment thereof, e.g. derived from Escherichia coli, is increased or generated. For example the activity of a nucleic acid molecule or a polypeptide comprising the nucleic acid, preferably the coding region thereof, or polypeptide or the consensus sequence or the polypeptide motif, as depicted in Table I, II or IV, application No. 15, column 5 or 8 in the respective same line as the nucleic acid molecule SEQ ID NO. 38345 or polypeptide SEQ ID NO. 38346, respectively, or a homolog or a fragment thereof, is increased or generated, or if the activity electron transport complex protein is increased or generated in a non-human organism, like a microorganism or a plant cell, plant or part thereof, especially with non-targeted localization, whereby the respective line disclose in column 7 the fine chemical succinate. For example, an increase of the succinate of at least 1 percent, particularly in a range of 35 to 56-percent is conferred as compared to a corresponding non-transformed wild type non-human organism.

[73274] Accordingly, in one embodiment, an increase of succinate in a non-human organism, as compared to a corresponding non-transformed wild type non-human organism, is conferred in the process of the invention, if the activity of a polypeptide showing the activity of a methylglyoxalase, or if the activity of the polypeptide B1651, preferably represented by SEQ ID NO. 78266, or a homolog or fragment thereof, or if the activity of a polypeptide encoded by a nucleic acid molecule comprising the nucleic acid SEQ ID NO. 78265, preferably the coding region thereof, or a homolog or fragment thereof, e.g. derived from Escherichia coli, is increased or generated. For example the activity of a nucleic acid molecule or a polypeptide comprising the nucleic acid, preferably the coding region thereof, or polypeptide or the consensus sequence or the polypeptide motif, as depicted in Table I, II or IV, application No. 15, column 5 or 8 in the respective same line as the nucleic acid molecule SEQ ID NO. 78265 or polypeptide SEQ ID NO. 78266, respectively, or a homolog or a fragment thereof, is increased or generated, or if the activity methylglyoxalase is increased or generated in a non-human organism, like a microorganism or a plant cell, plant or part thereof, especially with non-targeted localization, whereby the respective line disclose in column 7 the fine chemical succinate. For example, an increase of the succinate of at least 1 percent, particularly in a range of 27 to 37-percent is conferred as compared to a corresponding non-transformed wild type non-human organism.

[73275] Accordingly, in one embodiment, an increase of citramalate in a non-human organism, as compared to a corresponding non-transformed wild type non-human organism, is conferred in the process of the invention, if the activity of a polypeptide showing the activity of a b1670-protein, or if the activity of the polypeptide B1670, preferably represented by SEQ ID NO. 78754, or a homolog or fragment thereof, or if the activity of a polypeptide encoded by a nucleic acid molecule comprising the nucleic acid SEQ ID NO. 78753, preferably the coding region thereof, or a homolog or fragment thereof, e.g. derived from Escherichia coli, is increased or generated. For example the activity of a nucleic acid molecule or a polypeptide comprising the nucleic acid, preferably the coding region thereof, or polypeptide or the consensus sequence or the polypeptide motif, as depicted in Table I, II or IV, application No. 15, column 5 or 8 in the respective same line as the nucleic acid molecule SEQ ID NO. 78753 or polypeptide SEQ ID NO. 78754, respectively, or a homolog or a fragment thereof, is increased or generated, or if the activity b1670-protein is increased or generated in a non-human organism, like a microorganism or a plant cell, plant or part thereof, especially with non-targeted localization, whereby the respective line disclose in column 7 the fine chemical citramalate. For example, an increase of the citramalate of at least 1 percent, particularly in a range of 49 to 89-percent is conferred as compared to a corresponding non-transformed wild type non-human organism.

[73276] Accordingly, in one embodiment, an increase of malate in a non-human organism, as compared to a corresponding non-transformed wild type non-human organism, is conferred in the process of the invention, if the activity of a polypeptide showing the activity of a b1670-protein, or if the activity of the polypeptide B1670, preferably represented by SEQ ID NO. 78754, or a homolog or fragment thereof, or if the activity of a polypeptide encoded by a nucleic acid molecule comprising the nucleic acid SEQ ID NO. 78753, preferably the coding region thereof, or a homolog or fragment thereof, e.g. derived from Escherichia coli, is increased or generated. For example the activity of a nucleic acid molecule or a polypeptide comprising the nucleic acid, preferably the coding region thereof, or polypeptide or the consensus sequence or the polypeptide motif, as depicted in Table I, II or IV, application No. 15, column 5 or 8 in the respective same line as the nucleic acid molecule SEQ ID NO. 78753 or polypeptide SEQ ID NO. 78754, respectively, or a homolog or a fragment thereof, is increased or generated, or if the activity b1670-protein is increased or generated in a non-human organism, like a microorganism or a plant cell, plant or part thereof, especially with non-targeted localization, whereby the respective line disclose in column 7 the fine chemical malate. For example, an increase of the malate of at least 1 percent, particularly in a range of 60 to 138-percent is conferred as compared to a corresponding non-transformed wild type non-human organism.

[73277] Accordingly, in one embodiment, an increase of citramalate in a non-human organism, as compared to a corresponding non-transformed wild type non-human organism, is conferred in the process of the invention, if the activity of a polypeptide showing the activity of a b1672-protein, or if the activity of the polypeptide B1672, preferably represented by SEQ ID NO. 78772, or a homolog or fragment thereof, or if the activity of a polypeptide encoded by a nucleic acid molecule comprising the nucleic acid SEQ ID NO. 78771, preferably the coding region thereof, or a homolog or fragment thereof, e.g. derived from Escherichia coli, is increased or generated. For example the activity of a nucleic acid molecule or a polypeptide comprising the nucleic acid, preferably the coding region thereof, or polypeptide or the consensus sequence or the polypeptide motif, as depicted in Table I, II or IV, application No. 15, column 5 or 8 in the respective same line as the nucleic acid molecule SEQ ID NO. 78771 or polypeptide SEQ ID NO. 78772, respectively, or a homolog or a fragment thereof, is increased or generated, or if the activity b1672-protein is increased or generated in a non-human organism, like a microorganism or a plant cell, plant or part thereof, especially with non-targeted localization, whereby the respective line disclose in column 7 the fine chemical citramalate. For example, an increase of the citramalate of at least 1 percent, particularly in a range of 43 to 84-percent is conferred as compared to a corresponding non-transformed wild type non-human organism.

[73278] Accordingly, in one embodiment, an increase of malate in a non-human organism, as compared to a corresponding non-transformed wild type non-human organism, is conferred in the process of the invention, if the activity of a polypeptide showing the activity of a b1672-protein, or if the activity of the polypeptide B1672, preferably represented by SEQ ID NO. 78772, or a homolog or fragment thereof, or if the activity of a polypeptide encoded by a nucleic acid molecule comprising the nucleic acid SEQ ID NO. 78771, preferably the coding region thereof, or a homolog or fragment thereof, e.g. derived from Escherichia coli, is increased or generated. For example the activity of a nucleic acid molecule or a polypeptide comprising the nucleic acid, preferably the coding region thereof, or polypeptide or the consensus sequence or the polypeptide motif, as depicted in Table I, II or IV, application No. 15, column 5 or 8 in the respective same line as the nucleic acid molecule SEQ ID NO. 78771 or polypeptide SEQ ID NO. 78772, respectively, or a homolog or a fragment thereof, is increased or generated, or if the activity b1672-protein is increased or generated in a non-human organism, like a microorganism or a plant cell, plant or part thereof, especially with non-targeted localization, whereby the respective line disclose in column 7 the fine chemical malate. For example, an increase of the malate of at least 1 percent, particularly in a range of 79 to 152-percent is conferred as compared to a corresponding non-transformed wild type non-human organism.

[73279] Accordingly, in one embodiment, an increase of vitamin c and/or threonic acid in a non-human organism, as compared to a corresponding non-transformed wild type non-human organism, is conferred in the process of the invention, if the activity of a polypeptide showing the activity of a b1672-protein, or if the activity of the polypeptide B1672, preferably represented by SEQ ID NO. 78772, or a homolog or fragment thereof, or if the activity of a polypeptide encoded by a nucleic acid molecule comprising the nucleic acid SEQ ID NO. 78771, preferably the coding region thereof, or a homolog or fragment thereof, e.g. derived from Escherichia coli, is increased or generated. For example the activity of a nucleic acid molecule or a polypeptide comprising the nucleic acid, preferably the coding region thereof, or polypeptide or the consensus sequence or the polypeptide motif, as depicted in Table I, II or IV, application No. 15, column 5 or 8 in the respective same line as the nucleic acid molecule SEQ ID NO. 78771 or polypeptide SEQ ID NO. 78772, respectively, or a homolog or a fragment thereof, is increased or generated, or if the activity b1672-protein is increased or generated in a non-human organism, like a microorganism or a plant cell, plant or part thereof, especially with non-targeted localization, whereby the respective line disclose in column 7 the fine chemical vitamin c and/or threonic acid. For example, an increase of the vitamin c and/or threonic acid of at least 1 percent, particularly in a range of 30 to 48-percent is conferred as compared to a corresponding non-transformed wild type non-human organism.

[73280] Accordingly, in one embodiment, an increase of malate in a non-human organism, as compared to a corresponding non-transformed wild type non-human organism, is conferred in the process of the invention, if the activity of a polypeptide showing the activity of a b1742-protein, or if the activity of the polypeptide B1742, preferably represented by SEQ ID NO. 134763, or a homolog or fragment thereof, or if the activity of a polypeptide encoded by a nucleic acid molecule comprising the nucleic acid SEQ ID NO. 134762, preferably the coding region thereof, or a homolog or fragment thereof, e.g. derived from Escherichia coli, is increased or generated. For example the activity of a nucleic acid molecule or a polypeptide comprising the nucleic acid, preferably the coding region thereof, or polypeptide or the consensus sequence or the polypeptide motif, as depicted in Table I, II or IV, application No. 15, column 5 or 8 in the respective same line as the nucleic acid molecule SEQ ID NO. 134762 or polypeptide SEQ ID NO. 134763, respectively, or a homolog or a fragment thereof, is increased or generated, or if the activity b1742-protein is increased or generated in a non-human organism, like a microorganism or a plant cell, plant or part thereof, especially with non-targeted localization, whereby the respective line disclose in column 7 the fine chemical malate. For example, an increase of the malate of at least 1 percent, particularly in a range of 48 to 86-percent is conferred as compared to a corresponding non-transformed wild type non-human organism.

[73281] Accordingly, in one embodiment, an increase of succinate in a non-human organism, as compared to a corresponding non-transformed wild type non-human organism, is conferred in the process of the invention, if the activity of a polypeptide showing the activity of a b1742-protein, or if the activity of the polypeptide B1742, preferably represented by SEQ ID NO. 134763, or a homolog or fragment thereof, or if the activity of a polypeptide encoded by a nucleic acid molecule comprising the nucleic acid SEQ ID NO. 134762, preferably the coding region thereof, or a homolog or fragment thereof, e.g. derived from Escherichia coli, is increased or generated. For example the activity of a nucleic acid molecule or a polypeptide comprising the nucleic acid, preferably the coding region thereof, or polypeptide or the consensus sequence or the polypeptide motif, as depicted in Table I, II or IV, application No. 15, column 5 or 8 in the respective same line as the nucleic acid molecule SEQ ID NO. 134762 or polypeptide SEQ ID NO. 134763, respectively, or a homolog or a fragment thereof, is increased or generated, or if the activity b1742-protein is increased or generated in a non-human organism, like a microorganism or a plant cell, plant or part thereof, especially with non-targeted localization, whereby the respective line disclose in column 7 the fine chemical succinate. For example, an increase of the succinate of at least 1 percent, particularly in a range of 33 to 52-percent is conferred as compared to a corresponding non-transformed wild type non-human organism.

[73282] Accordingly, in one embodiment, an increase of succinate in a non-human organism, as compared to a corresponding non-transformed wild type non-human organism, is conferred in the process of the invention, if the activity of a polypeptide showing the activity of a arginine N-succinyltransferase, or if the activity of the polypeptide B1747, preferably represented by SEQ ID NO. 78780, or a homolog or fragment thereof, or if the activity of a polypeptide encoded by a nucleic acid molecule comprising the nucleic acid SEQ ID NO. 78779, preferably the coding region thereof, or a homolog or fragment thereof, e.g. derived from Escherichia coli, is increased or generated. For example the activity of a nucleic acid molecule or a polypeptide comprising the nucleic acid, preferably the coding region thereof, or polypeptide or the consensus sequence or the polypeptide motif, as depicted in Table I, II or IV, application No. 15, column 5 or 8 in the respective same line as the nucleic acid molecule SEQ ID NO. 78779 or polypeptide SEQ ID NO. 78780, respectively, or a homolog or a fragment thereof, is increased or generated, or if the activity arginine N-succinyltransferase is increased or generated in a non-human organism, like a microorganism or a plant cell, plant or part thereof, especially with plastidic localization, whereby the respective line disclose in column 7 the fine chemical succinate. For example, an increase of the succinate of at least 1 percent, particularly in a range of 51 to 158-percent is conferred as compared to a corresponding non-transformed wild type non-human organism.

[73283] Accordingly, in one embodiment, an increase of vitamin c and/or threonic acid in a non-human organism, as compared to a corresponding non-transformed wild type non-human organism, is conferred in the process of the invention, if the activity of a polypeptide showing the activity of a ABC transporter permease protein, or if the activity of the polypeptide B1755, preferably represented by SEQ ID NO. 78853, or a homolog or fragment thereof, or if the activity of a polypeptide encoded by a nucleic acid molecule comprising the nucleic acid SEQ ID NO. 78852, preferably the coding region thereof, or a homolog or fragment thereof, e.g. derived from Escherichia coli, is increased or generated. For example the activity of a nucleic acid molecule or a polypeptide comprising the nucleic acid, preferably the coding region thereof, or polypeptide or the consensus sequence or the polypeptide motif, as depicted in Table I, II or IV, application No. 15, column 5 or 8 in the respective same line as the nucleic acid molecule SEQ ID NO. 78852 or polypeptide SEQ ID NO. 78853, respectively, or a homolog or a fragment thereof, is increased or generated, or if the activity ABC transporter permease protein is increased or generated in a non-human organism, like a microorganism or a plant cell, plant or part thereof, especially with non-targeted localization, whereby the respective line disclose in column 7 the fine chemical vitamin c and/or threonic acid. For example, an increase of the vitamin c and/or threonic acid of at least 1 percent, particularly in a range of 30 to 46-percent is conferred as compared to a corresponding non-transformed wild type non-human organism.

[73284] Accordingly, in one embodiment, an increase of malate in a non-human organism, as compared to a corresponding non-transformed wild type non-human organism, is conferred in the process of the invention, if the activity of a polypeptide showing the activity of a protease, or if the activity of the polypeptide B1845, preferably represented by SEQ ID NO. 38574, or a homolog or fragment thereof, or if the activity of a polypeptide encoded by a nucleic acid molecule comprising the nucleic acid SEQ ID NO. 38573, preferably the coding region thereof, or a homolog or fragment thereof, e.g. derived from Escherichia coli, is increased or generated. For example the activity of a nucleic acid molecule or a polypeptide comprising the nucleic acid, preferably the coding region thereof, or polypeptide or the consensus sequence or the polypeptide motif, as depicted in Table I, II or IV, application No. 15, column 5 or 8 in the respective same line as the nucleic acid molecule SEQ ID NO. 38573 or polypeptide SEQ ID NO. 38574, respectively, or a homolog or a fragment thereof, is increased or generated, or if the activity protease is increased or generated in a non-human organism, like a microorganism or a plant cell, plant or part thereof, especially with non-targeted localization, whereby the respective line disclose in column 7 the fine chemical malate. For example, an increase of the malate of at least 1 percent, particularly in a range of 92 to 424-percent is conferred as compared to a corresponding non-transformed wild type non-human organism.

[73285] Accordingly, in one embodiment, an increase of vitamin c and/or threonic acid in a non-human organism, as compared to a corresponding non-transformed wild type non-human organism, is conferred in the process of the invention, if the activity of a polypeptide showing the activity of a dATP pyrophosphohydrolase, or if the activity of the polypeptide B1865, preferably represented by SEQ ID NO. 134784, or a homolog or fragment thereof, or if the activity of a polypeptide encoded by a nucleic acid molecule comprising the nucleic acid SEQ ID NO. 134783, preferably the coding region thereof, or a homolog or fragment thereof, e.g. derived from Escherichia coli, is increased or generated. For example the activity of a nucleic acid molecule or a polypeptide comprising the nucleic acid, preferably the coding region thereof, or polypeptide or the consensus sequence or the polypeptide motif, as depicted in Table I, II or IV, application No. 15, column 5 or 8 in the respective same line as the nucleic acid molecule SEQ ID NO. 134783 or polypeptide SEQ ID NO. 134784, respectively, or a homolog or a fragment thereof, is increased or generated, or if the activity dATP pyrophosphohydrolase is increased or generated in a non-human organism, like a microorganism or a plant cell, plant or part thereof, especially with non-targeted localization, whereby the respective line disclose in column 7 the fine chemical vitamin c and/or threonic acid. For example, an increase of the vitamin c and/or threonic acid of at least 1 percent, particularly in a range of 38 to 301-percent is conferred as compared to a corganism responding non-transformed wild type non-human organism.

[73286] Accordingly, in one embodiment, an increase of succinate in a non-human organism, as compared to a corresponding non-transformed wild type non-human organism, is conferred in the process of the invention, if the activity of a polypeptide showing the activity of a b1898-protein, or if the activity of the polypeptide B1898, preferably represented by SEQ ID NO. 38768, or a homolog or fragment thereof, or if the activity of a polypeptide encoded by a nucleic acid molecule comprising the nucleic acid SEQ ID NO. 38767, preferably the coding region thereof, or a homolog or fragment thereof, e.g. derived from Escherichia coli, is increased or generated. For example the activity of a nucleic acid molecule or a polypeptide comprising the nucleic acid, preferably the coding region thereof, or polypeptide or the consensus sequence or the polypeptide motif, as depicted in Table I, II or IV, application No. 15, column 5 or 8 in the respective same line as the nucleic acid molecule SEQ ID NO. 38767 or polypeptide SEQ ID NO. 38768, respectively, or a homolog or a fragment thereof, is increased or generated, or if the activity b1898-protein is increased or generated in a non-human organism, like a microorganism or a plant cell, plant or part thereof, especially with non-targeted localization, whereby the respective line disclose in column 7 the fine chemical succinate. For example, an increase of the succinate of at least 1 percent, particularly in a range of 35 to 94-percent is conferred as compared to a corresponding non-transformed wild type non-human organism.

[73287] Accordingly, in one embodiment, an increase of fumarate in a non-human organism, as compared to a corresponding non-transformed wild type non-human organism, is conferred in the process of the invention, if the activity of a polypeptide showing the activity of a flagellar M-ring protein, or if the activity of the polypeptide B1938, preferably represented by SEQ ID NO. 134865, or a homolog or fragment thereof, or if the activity of a polypeptide encoded by a nucleic acid molecule comprising the nucleic acid SEQ ID NO. 134864, preferably the coding region thereof, or a homolog or fragment thereof, e.g. derived from Escherichia coli, is increased or generated. For example the activity of a nucleic acid molecule or a polypeptide comprising the nucleic acid, preferably the coding region thereof, or polypeptide or the consensus sequence or the polypeptide motif, as depicted in Table I, II or IV, application No. 15, column 5 or 8 in the respective same line as the nucleic acid molecule SEQ ID NO. 134864 or polypeptide SEQ ID NO. 134865, respectively, or a homolog or a fragment thereof, is increased or generated, or if the activity flagellar M-ring protein is increased or generated in a non-human organism, like a microorganism or a plant cell, plant or part thereof, especially with non-targeted localization, whereby the respective line disclose in column 7 the fine chemical fumarate. For example, an increase of the fumarate of at least 1 percent, particularly in a range of 71 to 324-percent is conferred as compared to a corresponding non-transformed wild type non-human organism.

[73288] Accordingly, in one embodiment, an increase of malate in a non-human organism, as compared to a corresponding non-transformed wild type non-human organism, is conferred in the process of the invention, if the activity of a polypeptide showing the activity of a flagellar M-ring protein, or if the activity of the polypeptide B1938, preferably represented by SEQ ID NO. 134865, or a homolog or fragment thereof, or if the activity of a polypeptide encoded by a nucleic acid molecule comprising the nucleic acid SEQ ID NO. 134864, preferably the coding region thereof, or a homolog or fragment thereof, e.g. derived from Escherichia coli, is increased or generated. For example the activity of a nucleic acid molecule or a polypeptide comprising the nucleic acid, preferably the coding region thereof, or polypeptide or the consensus sequence or the polypeptide motif, as depicted in Table I, II or IV, application No. 15, column 5 or 8 in the respective same line as the nucleic acid molecule SEQ ID NO. 134864 or polypeptide SEQ ID NO. 134865, respectively, or a homolog or a fragment thereof, is increased or generated, or if the activity flagellar M-ring protein is increased or generated in a non-human organism, like a microorganism or a plant cell, plant or part thereof, especially with non-targeted localization, whereby the respective line disclose in column 7 the fine chemical malate. For example, an increase of the malate of at least 1 percent, particularly in a range of 62 to 332-percent is conferred as compared to a corresponding non-transformed wild type non-human organism.

[73289] Accordingly, in one embodiment, an increase of succinate in a non-human organism, as compared to a corresponding non-transformed wild type non-human organism, is conferred in the process of the invention, if the activity of a polypeptide showing the activity of a flagellar M-ring protein, or if the activity of the polypeptide B1938, preferably represented by SEQ ID NO. 134865, or a homolog or fragment thereof, or if the activity of a polypeptide encoded by a nucleic acid molecule comprising the nucleic acid SEQ ID NO. 134864, preferably the coding region thereof, or a homolog or fragment thereof, e.g. derived from Escherichia coli, is increased or generated. For example the activity of a nucleic acid molecule or a polypeptide comprising the nucleic acid, preferably the coding region thereof, or polypeptide or the consensus sequence or the polypeptide motif, as depicted in Table I, II or IV, application No. 15, column 5 or 8 in the respective same line as the nucleic acid molecule SEQ ID NO. 134864 or polypeptide SEQ ID NO. 134865, respectively, or a homolog or a fragment thereof, is increased or generated, or if the activity flagellar M-ring protein is increased or generated in a non-human organism, like a microorganism or a plant cell, plant or part thereof, especially with non-targeted localization, whereby the respective line disclose in column 7 the fine chemical succinate. For example, an increase of the succinate of at least 1 percent, particularly in a range of 41 to 171-percent is conferred as compared to a corresponding non-transformed wild type non-human organism.

[73290] Accordingly, in one embodiment, an increase of malate in a non-human organism, as compared to a corresponding non-transformed wild type non-human organism, is conferred in the process of the invention, if the activity of a polypeptide showing the activity of a O-antigen chain length determinant, or if the activity of the polypeptide B2027, preferably represented by SEQ ID NO. 79218, or a homolog or fragment thereof, or if the activity of a polypeptide encoded by a nucleic acid molecule comprising the nucleic acid SEQ ID NO. 79217, preferably the coding region thereof, or a homolog or fragment thereof, e.g. derived from Escherichia coli, is increased or generated. For example the activity of a nucleic acid molecule or a polypeptide comprising the nucleic acid, preferably the coding region thereof, or polypeptide or the consensus sequence or the polypeptide motif, as depicted in Table I, II or IV, application No. 15, column 5 or 8 in the respective same line as the nucleic acid molecule SEQ ID NO. 79217 or polypeptide SEQ ID NO. 79218, respectively, or a homolog or a fragment thereof, is increased or generated, or if the activity O-antigen chain length determinant is increased or generated in a non-human organism, like a microorganism or a plant cell, plant or part thereof, especially with non-targeted localization, whereby the respective line disclose in column 7 the fine chemical malate. For example, an increase of the malate of at least 1 percent, particularly in a range of 77 to 186 percent is conferred as compared to a corresponding non-transformed wild type non-human organism.

[73291] Accordingly, in one embodiment, an increase of fumarate in a non-human organism, as compared to a corresponding non-transformed wild type non-human organism, is conferred in the process of the invention, if the activity of a polypeptide showing the activity of a b2399-protein, or if the activity of the polypeptide B2399, preferably represented by SEQ ID NO. 39238, or a homolog or fragment thereof, or if the activity of a polypeptide encoded by a nucleic acid molecule comprising the nucleic acid SEQ ID NO. 39237, preferably the coding region thereof, or a homolog or fragment thereof, e.g. derived from Escherichia coli, is increased or generated. For example the activity of a nucleic acid molecule or a polypeptide comprising the nucleic acid, preferably the coding region thereof, or polypeptide or the consensus sequence or the polypeptide motif, as depicted in Table I, II or IV, application No. 15, column 5 or 8 in the respective same line as the nucleic acid molecule SEQ ID NO. 39237 or polypeptide SEQ ID NO. 39238, respectively, or a homolog or a fragment thereof, is increased or generated, or if the activity b2399-protein is increased or generated in a non-human organism, like a microorganism or a plant cell, plant or part thereof, especially with non-targeted localization, whereby the respective line disclose in column 7 the fine chemical fumarate. For example, an increase of the fumarate of at least 1 percent, particularly in a range of 190 to 3230-percent is conferred as compared to a corresponding non-transformed wild type non-human organism.

[73292] Accordingly, in one embodiment, an increase of succinate in a non-human organism, as compared to a corresponding non-transformed wild type non-human organism, is conferred in the process of the invention, if the activity of a polypeptide showing the activity of a b2399-protein, or if the activity of the polypeptide B2399, preferably represented by SEQ ID NO. 39238, or a homolog or fragment thereof, or if the activity of a polypeptide encoded by a nucleic acid molecule comprising the nucleic acid SEQ ID NO. 39237, preferably the coding region thereof, or a homolog or fragment thereof, e.g. derived from Escherichia coli, is increased or generated. For example the activity of a nucleic acid molecule or a polypeptide comprising the nucleic acid, preferably the coding region thereof, or polypeptide or the consensus sequence or the polypeptide motif, as depicted in Table I, II or IV, application No. 15, column 5 or 8 in the respective same line as the nucleic acid molecule SEQ ID NO. 39237 or polypeptide SEQ ID NO. 39238, respectively, or a homolog or a fragment thereof, is increased or generated, or if the activity b2399-protein is increased or generated in a non-human organism, like a microorganism or a plant cell, plant or part thereof, especially with non-targeted localization, whereby the respective line disclose in column 7 the fine chemical succinate. For example, an increase of the succinate of at least 1 percent, particularly in a range of 86 to 421-percent is conferred as compared to a corresponding non-transformed wild type non-human organism.

[73293] Accordingly, in one embodiment, an increase of vitamin c and/or threonic acid in a non-human organism, as compared to a corresponding non-transformed wild type non-human organism, is conferred in the process of the invention, if the activity of a polypeptide showing the activity of a b2399-protein, or if the activity of the polypeptide B2399, preferably represented by SEQ ID NO. 39238, or a homolog or fragment thereof, or if the activity of a polypeptide encoded by a nucleic acid molecule comprising the nucleic acid SEQ ID NO. 39237, preferably the coding region thereof, or a homolog or fragment thereof, e.g. derived from Escherichia coli, is increased or generated. For example the activity of a nucleic acid molecule or a polypeptide comprising the nucleic acid, preferably the coding region thereof, or polypeptide or the consensus sequence or the polypeptide motif, as depicted in Table I, II or IV, application No. 15, column 5 or 8 in the respective same line as the nucleic acid molecule SEQ ID NO. 39237 or polypeptide SEQ ID NO. 39238, respectively, or a homolog or a fragment thereof, is increased or generated, or if the activity b2399-protein is increased or generated in a non-human organism, like a microorganism or a plant cell, plant or part thereof, especially with non-targeted localization, whereby the respective line disclose in column 7 the fine chemical vitamin c and/or threonic acid. For example, an increase of the vitamin c and/or threonic acid of at least 1 percent, particularly in a range of 45 to 235-percent is conferred as compared to a corresponding non-transformed wild type non-human organism.

[73294] Accordingly, in one embodiment, an increase of vitamin c and/or threonic acid in a non-human organism, as compared to a corresponding non-transformed wild type non-human organism, is conferred in the process of the invention, if the activity of a polypeptide showing the activity of a cysteine synthase A, or if the activity of the polypeptide B2414, preferably represented by SEQ ID NO. 39301, or a homolog or fragment thereof, or if the activity of a polypeptide encoded by a nucleic acid molecule comprising the nucleic acid SEQ ID NO. 39300, preferably the coding region thereof, or a homolog or fragment thereof, e.g. derived from Escherichia coli, is increased or generated. For example the activity of a nucleic acid molecule or a polypeptide comprising the nucleic acid, preferably the coding region thereof, or polypeptide or the consensus sequence or the polypeptide motif, as depicted in Table I, II or IV, application No. 15, column 5 or 8 in the respective same line as the nucleic acid molecule SEQ ID NO. 39300 or polypeptide SEQ ID NO. 39301, respectively, or a homolog or a fragment thereof, is increased or generated, or if the activity cysteine synthase A is increased or generated in a non-human organism, like a microorganism or a plant cell, plant or part thereof, especially with non-targeted localization, whereby the respective line disclose in column 7 the fine chemical vitamin c and/or threonic acid. For example, an increase of the vitamin c and/or threonic acid of at least 1 percent, particularly in a range of 30 to 46-percent is conferred as compared to a corresponding non-transformed wild type non-human organism.

[73295] Accordingly, in one embodiment, an increase of vitamin c and/or threonic acid in a non-human organism, as compared to a corresponding non-transformed wild type non-human organism, is conferred in the process of the invention, if the activity of a polypeptide showing the activity of a cysteine synthase B, or if the activity of the polypeptide B2421, preferably represented by SEQ ID NO. 134925, or a homolog or fragment thereof, or if the activity of a polypeptide encoded by a nucleic acid molecule comprising the nucleic acid SEQ ID NO. 134924, preferably the coding region thereof, or a homolog or fragment thereof, e.g. derived from Escherichia coli, is increased or generated. For example the activity of a nucleic acid molecule or a polypeptide comprising the nucleic acid, preferably the coding region thereof, or polypeptide or the consensus sequence or the polypeptide motif, as depicted in Table I, II or IV, application No. 15, column 5 or 8 in the respective same line as the nucleic acid molecule SEQ ID NO. 134924 or polypeptide SEQ ID NO. 134925, respectively, or a homolog or a fragment thereof, is increased or generated, or if the activity cysteine synthase B is increased or generated in a non-human organism, like a microorganism or a plant cell, plant or part thereof, especially with plastidic localization, whereby the respective line disclose in column 7 the fine chemical vitamin c and/or threonic acid. For example, an increase of the vitamin c and/or threonic acid of at least 1 percent, particularly in a range of 38 to 197-percent is conferred as compared to a corresponding non-transformed wild type non-human organism.

[73296] Accordingly, in one embodiment, an increase of fumarate in a non-human organism, as compared to a corresponding non-transformed wild type non-human organism, is conferred in the process of the invention, if the activity of a polypeptide showing the activity of a transcriptional regulator, or if the activity of the polypeptide B2634, preferably represented by SEQ ID NO. 40727, or a homolog or fragment thereof, or if the activity of a polypeptide encoded by a nucleic acid molecule comprising the nucleic acid SEQ ID NO. 40726, preferably the coding region thereof, or a homolog or fragment thereof, e.g. derived from Escherichia coli, is increased or generated. For example the activity of a nucleic acid molecule or a polypeptide comprising the nucleic acid, preferably the coding region thereof, or polypeptide or the consensus sequence or the polypeptide motif, as depicted in Table I, II or IV, application No. 15, column 5 or 8 in the respective same line as the nucleic acid molecule SEQ ID NO. 40726 or polypeptide SEQ ID NO. 40727, respectively, or a homolog or a fragment thereof, is increased or generated, or if the activity transcriptional regulator is increased or generated in a non-human organism, like a microorganism or a plant cell, plant or part thereof, especially with non-targeted localization, whereby the respective line disclose in column 7 the fine chemical fumarate. For example, an increase of the fumarate of at least 1 percent, particularly in a range of 134 to 861-percent is conferred as compared to a corresponding non-transformed wild type non-human organism.

[73297] Accordingly, in one embodiment, an increase of malate in a non-human organism, as compared to a corresponding non-transformed wild type non-human organism, is conferred in the process of the invention, if the activity of a polypeptide showing the activity of a transcriptional regulator, or if the activity of the polypeptide B2634, preferably represented by SEQ ID NO. 40727, or a homolog or fragment thereof, or if the activity of a polypeptide encoded by a nucleic acid molecule comprising the nucleic acid SEQ ID NO. 40726, preferably the coding region thereof, or a homolog or fragment thereof, e.g. derived from Escherichia coli, is increased or generated. For example the activity of a nucleic acid molecule or a polypeptide comprising the nucleic acid, preferably the coding region thereof, or polypeptide or the consensus sequence or the polypeptide motif, as depicted in Table I, II or IV, application No. 15, column 5 or 8 in the respective same line as the nucleic acid molecule SEQ ID NO. 40726 or polypeptide SEQ ID NO. 40727, respectively, or a homolog or a fragment thereof, is increased or generated, or if the activity transcriptional regulator is increased or generated in a non-human organism, like a microorganism or a plant cell, plant or part thereof, especially with non-targeted localization, whereby the respective line disclose in column 7 the fine chemical malate. For example, an increase of the malate of at least 1 percent, particularly in a range of 139 to 511-percent is conferred as compared to a corresponding non-transformed wild type non-human organism.

[73298] Accordingly, in one embodiment, an increase of succinate in a non-human organism, as compared to a corresponding non-transformed wild type non-human organism, is conferred in the process of the invention, if the activity of a polypeptide showing the activity of a murein transglycosylase, or if the activity of the polypeptide B2701, preferably represented by SEQ ID NO. 80757, or a homolog or fragment thereof, or if the activity of a polypeptide encoded by a nucleic acid molecule comprising the nucleic acid SEQ ID NO. 80756, preferably the coding region thereof, or a homolog or fragment thereof, e.g. derived from Escherichia coli, is increased or generated. For example the activity of a nucleic acid molecule or a polypeptide comprising the nucleic acid, preferably the coding region thereof, or polypeptide or the consensus sequence or the polypeptide motif, as depicted in Table I, II or IV, application No. 15, column 5 or 8 in the respective same line as the nucleic acid molecule SEQ ID NO. 80756 or polypeptide SEQ ID NO. 80757, respectively, or a homolog or a fragment thereof, is increased or generated, or if the activity murein transglycosylase is increased or generated in a non-human organism, like a microorganism or a plant cell, plant or part thereof, especially with non-targeted localization, whereby the respective line disclose in column 7 the fine chemical succinate. For example, an increase of the succinate of at least 1 percent, particularly in a range of 33 to 60-percent is conferred as compared to a corresponding non-transformed wild type non-human organism.

[73299] Accordingly, in one embodiment, an increase of succinate in a non-human organism, as compared to a corresponding non-transformed wild type non-human organism, is conferred in the process of the invention, if the activity of a polypeptide showing the activity of a 2-C-methyl-D-erythritol 4-phosphate cytidylyltransferase, or if the activity of the polypeptide B2747, preferably represented by SEQ ID NO. 81076, or a homolog or fragment thereof, or if the activity of a polypeptide encoded by a nucleic acid molecule comprising the nucleic acid SEQ ID NO. 81075, preferably the coding region thereof, or a homolog or fragment thereof, e.g. derived from Escherichia coli, is increased or generated. For example the activity of a nucleic acid molecule or a polypeptide comprising the nucleic acid, preferably the coding region thereof, or polypeptide or the consensus sequence or the polypeptide motif, as depicted in Table I, II or IV, application No. 15, column 5 or 8 in the respective same line as the nucleic acid molecule SEQ ID NO. 81075 or polypeptide SEQ ID NO. 81076, respectively, or a homolog or a fragment thereof, is increased or generated, or if the activity 2-C-methyl-D-erythritol 4-phosphate cytidylyltransferase is increased or generated in a non-human organism, like a microorganism or a plant cell, plant or part thereof, especially with non-targeted localization, whereby the respective line disclose in column 7 the fine chemical succinate. For example, an increase of the succinate of at least 1 percent, particularly in a range of 33 to 53-percent is conferred as compared to a corresponding non-transformed wild type non-human organism.

[73300] Accordingly, in one embodiment, an increase of succinate in a non-human organism, as compared to a corresponding non-transformed wild type non-human organism, is conferred in the process of the invention, if the activity of a polypeptide showing the activity of a amino-acid acetyltransferase, or if the activity of the polypeptide B2818, preferably represented by SEQ ID NO. 81577, or a homolog or fragment thereof, or if the activity of a polypeptide encoded by a nucleic acid molecule comprising the nucleic acid SEQ ID NO. 81576, preferably the coding region thereof, or a homolog or fragment thereof, e.g. derived from Escherichia coli, is increased or generated. For example the activity of a nucleic acid molecule or a polypeptide comprising the nucleic acid, preferably the coding region thereof, or polypeptide or the consensus sequence or the polypeptide motif, as depicted in Table I, II or IV, application No. 15, column 5 or 8 in the respective same line as the nucleic acid molecule SEQ ID NO. 81576 or polypeptide SEQ ID NO. 81577, respectively, or a homolog or a fragment thereof, is increased or generated, or if the activity amino-acid acetyltransferase is increased or generated in a non-human organism, like a microorganism or a plant cell, plant or part thereof, especially with non-targeted localization, whereby the respective line disclose in column 7 the fine chemical succinate. For example, an increase of the succinate of at least 1 percent, particularly in a range of 30 to 59-percent is conferred as compared to a corresponding non-transformed wild type non-human organism.

[73301] Accordingly, in one embodiment, an increase of succinate in a non-human organism, as compared to a corresponding non-transformed wild type non-human organism, is conferred in the process of the invention, if the activity of a polypeptide showing the activity of a xanthine dehydrogenase, or if the activity of the polypeptide B2866, preferably represented by SEQ ID NO. 115865, or a homolog or fragment thereof, or if the activity of a polypeptide encoded by a nucleic acid molecule comprising the nucleic acid SEQ ID NO. 115864, preferably the coding region thereof, or a homolog or fragment thereof, e.g. derived from Escherichia coli, is increased or generated. For example the activity of a nucleic acid molecule or a polypeptide comprising the nucleic acid, preferably the coding region thereof, or polypeptide or the consensus sequence or the polypeptide motif, as depicted in Table I, II or IV, application No. 15, column 5 or 8 in the respective same line as the nucleic acid molecule SEQ ID NO. 115864 or polypeptide SEQ ID NO. 115865, respectively, or a homolog or a fragment thereof, is increased or generated, or if the activity xanthine dehydrogenase is increased or generated in a non-human organism, like a microorganism or a plant cell, plant or part thereof, especially with non-targeted localization, whereby the respective line disclose in column 7 the fine chemical succinate. For example, an increase of the succinate of at least 1 percent, particularly in a range of 26 to 34-percent is conferred as compared to a corresponding non-transformed wild type non-human organism.

[73302] Accordingly, in one embodiment, an increase of succinate in a non-human organism, as compared to a corresponding non-transformed wild type non-human organism, is conferred in the process of the invention, if the activity of a polypeptide showing the activity of a cystathionine beta-lyase, or if the activity of the polypeptide B3008, preferably represented by SEQ ID NO. 135894, or a homolog or fragment thereof, or if the activity of a polypeptide encoded by a nucleic acid molecule comprising the nucleic acid SEQ ID NO. 135893, preferably the coding region thereof, or a homolog or fragment thereof, e.g. derived from Escherichia coli, is increased or generated. For example the activity of a nucleic acid molecule or a polypeptide comprising the nucleic acid, preferably the coding region thereof, or polypeptide or the consensus sequence or the polypeptide motif, as depicted in Table I, II or IV, application No. 15, column 5 or 8 in the respective same line as the nucleic acid molecule SEQ ID NO. 135893 or polypeptide SEQ ID NO. 135894, respectively, or a homolog or a fragment thereof, is increased or generated, or if the activity cystathionine beta-lyase is increased or generated in a non-human organism, like a microorganism or a plant cell, plant or part thereof, especially with non-targeted localization, whereby the respective line disclose in column 7 the fine chemical succinate. For example, an increase of the succinate of at least 1 percent, particularly in a range of 26 to 63-percent is conferred as compared to a corresponding non-transformed wild type non-human organism.

[73303] Accordingly, in one embodiment, an increase of fumarate in a non-human organism, as compared to a corresponding non-transformed wild type non-human organism, is conferred in the process of the invention, if the activity of a polypeptide showing the activity of a methyltransferase, or if the activity of the polypeptide B3262, preferably represented by SEQ ID NO. 42503, or a homolog or fragment thereof, or if the activity of a polypeptide encoded by a nucleic acid molecule comprising the nucleic acid SEQ ID NO. 42502, preferably the coding region thereof, or a homolog or fragment thereof, e.g. derived from Escherichia coli, is increased or generated. For example the activity of a nucleic acid molecule or a polypeptide comprising the nucleic acid, preferably the coding region thereof, or polypeptide or the consensus sequence or the polypeptide motif, as depicted in Table I, II or IV, application No. 15, column 5 or 8 in the respective same line as the nucleic acid molecule SEQ ID NO. 42502 or polypeptide SEQ ID NO. 42503, respectively, or a homolog or a fragment thereof, is increased or generated, or if the activity methyltransferase is increased or generated in a non-human organism, like a microorganism or a plant cell, plant or part thereof, especially with non-targeted localization, whereby the respective line disclose in column 7 the fine chemical fumarate. For example, an increase of the fumarate of at least 1 percent, particularly in a range of 69 to 208-percent is conferred as compared to a corresponding non-transformed wild type non-human organism.

[73304] Accordingly, in one embodiment, an increase of malate in a non-human organism, as compared to a corresponding non-transformed wild type non-human organism, is conferred in the process of the invention, if the activity of a polypeptide showing the activity of a methyltransferase, or if the activity of the polypeptide B3262, preferably represented by SEQ ID NO. 42503, or a homolog or fragment thereof, or if the activity of a polypeptide encoded by a nucleic acid molecule comprising the nucleic acid SEQ ID NO. 42502, preferably the coding region thereof, or a homolog or fragment thereof, e.g. derived from Escherichia coli, is increased or generated. For example the activity of a nucleic acid molecule or a polypeptide comprising the nucleic acid, preferably the coding region thereof, or polypeptide or the consensus sequence or the polypeptide motif, as depicted in Table I, II or IV, application No. 15, column 5 or 8 in the respective same line as the nucleic acid molecule SEQ ID NO. 42502 or polypeptide SEQ ID NO. 42503, respectively, or a homolog or a fragment thereof, is increased or generated, or if the activity methyltransferase is increased or generated in a non-human organism, like a microorganism or a plant cell, plant or part thereof, especially with non-targeted localization, whereby the respective line disclose in column 7 the fine chemical malate. For example, an increase of the malate of at least 1 percent, particularly in a range of 76 to 135-percent is conferred as compared to a corresponding non-transformed wild type non-human organism.

[73305] Accordingly, in one embodiment, an increase of fumarate in a non-human organism, as compared to a corresponding non-transformed wild type non-human organism, is conferred in the process of the invention, if the activity of a polypeptide showing the activity of a lipopolysaccharide core biosynthesis protein, or if the activity of the polypeptide B3624, preferably represented by SEQ ID NO. 136078, or a homolog or fragment thereof, or if the activity of a polypeptide encoded by a nucleic acid molecule comprising the nucleic acid SEQ ID NO. 136077, preferably the coding region thereof, or a homolog or fragment thereof, e.g. derived from Escherichia coli, is increased or generated. For example the activity of a nucleic acid molecule or a polypeptide comprising the nucleic acid, preferably the coding region thereof, or polypeptide or the consensus sequence or the polypeptide motif, as depicted in Table I, II or IV, application No. 15, column 5 or 8 in the respective same line as the nucleic acid molecule SEQ ID NO. 136077 or polypeptide SEQ ID NO. 136078, respectively, or a homolog or a fragment thereof, is increased or generated, or if the activity lipopolysaccharide core biosynthesis protein is increased or generated in a non-human organism, like a microorganism or a plant cell, plant or part thereof, especially with non-targeted localization, whereby the respective line disclose in column 7 the fine chemical fumarate. For example, an increase of the fumarate of at least 1 percent, particularly in a range of 69 to 1749-percent is conferred as compared to a corresponding non-transformed wild type non-human organism.

[73306] Accordingly, in one embodiment, an increase of succinate in a non-human organism, as compared to a corresponding non-transformed wild type non-human organism, is conferred in the process of the invention, if the activity of a polypeptide showing the activity of a b3777-protein, or if the activity of the polypeptide B3777, preferably represented by SEQ ID NO. 136099, or a homolog or fragment thereof, or if the activity of a polypeptide encoded by a nucleic acid molecule comprising the nucleic acid SEQ ID NO. 136098, preferably the coding region thereof, or a homolog or fragment thereof, e.g. derived from Escherichia coli, is increased or generated. For example the activity of a nucleic acid molecule or a polypeptide comprising the nucleic acid, preferably the coding region thereof, or polypeptide or the consensus sequence or the polypeptide motif, as depicted in Table I, II or IV, application No. 15, column 5 or 8 in the respective same line as the nucleic acid molecule SEQ ID NO. 136098 or polypeptide SEQ ID NO. 136099, respectively, or a homolog or a fragment thereof, is increased or generated, or if the activity b3777-protein is increased or generated in a non-human organism, like a microorganism or a plant cell, plant or part thereof, especially with non-targeted localization, whereby the respective line disclose in column 7 the fine chemical succinate. For example, an increase of the succinate of at least 1 percent, particularly in a range of 29 to 54-percent is conferred as compared to a corresponding non-transformed wild type non-human organism.

[73307] Accordingly, in one embodiment, an increase of malate in a non-human organism, as compared to a corresponding non-transformed wild type non-human organism, is conferred in the process of the invention, if the activity of a polypeptide showing the activity of a b3791-protein, or if the activity of the polypeptide B3791, preferably represented by SEQ ID NO. 83727, or a homolog or fragment thereof, or if the activity of a polypeptide encoded by a nucleic acid molecule comprising the nucleic acid SEQ ID NO. 83726, preferably the coding region thereof, or a homolog or fragment thereof, e.g. derived from Escherichia coli, is increased or generated. For example the activity of a nucleic acid molecule or a polypeptide comprising the nucleic acid, preferably the coding region thereof, or polypeptide or the consensus sequence or the polypeptide motif, as depicted in Table I, II or IV, application No. 15, column 5 or 8 in the respective same line as the nucleic acid molecule SEQ ID NO. 83726 or polypeptide SEQ ID NO. 83727, respectively, or a homolog or a fragment thereof, is increased or generated, or if the activity b3791-protein is increased or generated in a non-human organism, like a microorganism or a plant cell, plant or part thereof, especially with non-targeted localization, whereby the respective line disclose in column 7 the fine chemical malate. For example, an increase of the malate of at least 1 percent, particularly in a range of 52 to 264-percent is conferred as compared to a corresponding non-transformed wild type non-human organism.

[73308] Accordingly, in one embodiment, an increase of succinate in a non-human organism, as compared to a corresponding non-transformed wild type non-human organism, is conferred in the process of the invention, if the activity of a polypeptide showing the activity of a b3791-protein, or if the activity of the polypeptide B3791, preferably represented by SEQ ID NO. 83727, or a homolog or fragment thereof, or if the activity of a polypeptide encoded by a nucleic acid molecule comprising the nucleic acid SEQ ID NO. 83726, preferably the coding region thereof, or a homolog or fragment thereof, e.g. derived from Escherichia coli, is increased or generated. For example the activity of a nucleic acid molecule or a polypeptide comprising the nucleic acid, preferably the coding region thereof, or polypeptide or the consensus sequence or the polypeptide motif, as depicted in Table I, II or IV, application No. 15, column 5 or 8 in the respective same line as the nucleic acid molecule SEQ ID NO. 83726 or polypeptide SEQ ID NO. 83727, respectively, or a homolog or a fragment thereof, is increased or generated, or if the activity b3791-protein is increased or generated in a non-human organism, like a microorganism or a plant cell, plant or part thereof, especially with non-targeted localization, whereby the respective line disclose in column 7 the fine chemical succinate. For example, an increase of the succinate of at least 1 percent, particularly in a range of 29 to 160-percent is conferred as compared to a corresponding non-transformed wild type non-human organism.

[73309] Accordingly, in one embodiment, an increase of citramalate in a non-human organism, as compared to a corresponding non-transformed wild type non-human organism, is conferred in the process of the invention, if the activity of a polypeptide showing the activity of a b3814-protein, or if the activity of the polypeptide B3814, preferably represented by SEQ ID NO. 44197, or a homolog or fragment thereof, or if the activity of a polypeptide encoded by a nucleic acid molecule comprising the nucleic acid SEQ ID NO. 44196, preferably the coding region thereof, or a homolog or fragment thereof, e.g. derived from Escherichia coli, is increased or generated. For example the activity of a nucleic acid molecule or a polypeptide comprising the nucleic acid, preferably the coding region thereof, or polypeptide or the consensus sequence or the polypeptide motif, as depicted in Table I, II or IV, application No. 15, column 5 or 8 in the respective same line as the nucleic acid molecule SEQ ID NO. 44196 or polypeptide SEQ ID NO. 44197, respectively, or a homolog or a fragment thereof, is increased or generated, or if the activity b3814-protein is increased or generated in a non-human organism, like a microorganism or a plant cell, plant or part thereof, especially with non-targeted localization, whereby the respective line disclose in column 7 the fine chemical citramalate. For example, an increase of the citramalate of at least 1 percent, particularly in a range of 41 to 45-percent is conferred as compared to a corresponding non-transformed wild type non-human organism.

[73310] Accordingly, in one embodiment, an increase of fumarate in a non-human organism, as compared to a corresponding non-transformed wild type non-human organism, is conferred in the process of the invention, if the activity of a polypeptide showing the activity of a b3817-protein, or if the activity of the polypeptide B3817, preferably represented by SEQ ID NO. 10709, or a homolog or fragment thereof, or if the activity of a polypeptide encoded by a nucleic acid molecule comprising the nucleic acid SEQ ID NO. 10708, preferably the coding region thereof, or a homolog or fragment thereof, e.g. derived from Escherichia coli, is increased or generated. For example the activity of a nucleic acid molecule or a polypeptide comprising the nucleic acid, preferably the coding region thereof, or polypeptide or the consensus sequence or the polypeptide motif, as depicted in Table I, II or IV, application No. 15, column 5 or 8 in the respective same line as the nucleic acid molecule SEQ ID NO. 10708 or polypeptide SEQ ID NO. 10709, respectively, or a homolog or a fragment thereof, is increased or generated, or if the activity b3817-protein is increased or generated in a non-human organism, like a microorganism or a plant cell, plant or part thereof, especially with non-targeted localization, whereby the respective line disclose in column 7 the fine chemical fumarate. For example, an increase of the fumarate of at least 1 percent, particularly in a range of 122 to 198-percent is conferred as compared to a corresponding non-transformed wild type non-human organism.

[73311] Accordingly, in one embodiment, an increase of citramalate in a non-human organism, as compared to a corresponding non-transformed wild type non-human organism, is conferred in the process of the invention, if the activity of a polypeptide showing the activity of a threonine efflux protein, or if the activity of the polypeptide B3823, preferably represented by SEQ ID NO. 10727, or a homolog or fragment thereof, or if the activity of a polypeptide encoded by a nucleic acid molecule comprising the nucleic acid SEQ ID NO. 10726, preferably the coding region thereof, or a homolog or fragment thereof, e.g. derived from Escherichia coli, is increased or generated. For example the activity of a nucleic acid molecule or a polypeptide comprising the nucleic acid, preferably the coding region thereof, or polypeptide or the consensus sequence or the polypeptide motif, as depicted in Table I, II or IV, application No. 15, column 5 or 8 in the respective same line as the nucleic acid molecule SEQ ID NO. 10726 or polypeptide SEQ ID NO. 10727, respectively, or a homolog or a fragment thereof, is increased or generated, or if the activity threonine efflux protein is increased or generated in a non-human organism, like a microorganism or a plant cell, plant or part thereof, especially with non-targeted localization, whereby the respective line disclose in column 7 the fine chemical citramalate. For example, an increase of the citramalate of at least 1 percent, particularly in a range of 44 to 151-percent is conferred as compared to a corresponding non-transformed wild type non-human organism.

[73312] Accordingly, in one embodiment, an increase of malate in a non-human organism, as compared to a corresponding non-transformed wild type non-human organism, is conferred in the process of the invention, if the activity of a polypeptide showing the activity of a threonine efflux protein, or if the activity of the polypeptide B3823, preferably represented by SEQ ID NO. 10727, or a homolog or fragment thereof, or if the activity of a polypeptide encoded by a nucleic acid molecule comprising the nucleic acid SEQ ID NO. 10726, preferably the coding region thereof, or a homolog or fragment thereof, e.g. derived from Escherichia coli, is increased or generated. For example the activity of a nucleic acid molecule or a polypeptide comprising the nucleic acid, preferably the coding region thereof, or polypeptide or the consensus sequence or the polypeptide motif, as depicted in Table I, II or IV, application No. 15, column 5 or 8 in the respective same line as the nucleic acid molecule SEQ ID NO. 10726 or polypeptide SEQ ID NO. 10727, respectively, or a homolog or a fragment thereof, is increased or generated, or if the activity threonine efflux protein is increased or generated in a non-human organism, like a microorganism or a plant cell, plant or part thereof, especially with non-targeted localization, whereby the respective line disclose in column 7 the fine chemical malate. For example, an increase of the malate of at least 1 percent, particularly in a range of 56 to 84-percent is conferred as compared to a corresponding non-transformed wild type non-human organism.

[73313] Accordingly, in one embodiment, an increase of succinate in a non-human organism, as compared to a corresponding non-transformed wild type non-human organism, is conferred in the process of the invention, if the activity of a polypeptide showing the activity of a b3989-protein, or if the activity of the polypeptide B3989, preferably represented by SEQ ID NO. 44373, or a homolog or fragment thereof, or if the activity of a polypeptide encoded by a nucleic acid molecule comprising the nucleic acid SEQ ID NO. 44372, preferably the coding region thereof, or a homolog or fragment thereof, e.g. derived from Escherichia coli, is increased or generated. For example the activity of a nucleic acid molecule or a polypeptide comprising the nucleic acid, preferably the coding region thereof, or polypeptide or the consensus sequence or the polypeptide motif, as depicted in Table I, II or IV, application No. 15, column 5 or 8 in the respective same line as the nucleic acid molecule SEQ ID NO. 44372 or polypeptide SEQ ID NO. 44373, respectively, or a homolog or a fragment thereof, is increased or generated, or if the activity b3989-protein is increased or generated in a non-human organism, like a microorganism or a plant cell, plant or part thereof, especially with non-targeted localization, whereby the respective line disclose in column 7 the fine chemical succinate. For example, an increase of the succinate of at least 1 percent, particularly in a range of 53 to 90-percent is conferred as compared to a corresponding non-transformed wild type non-human organism.

[73314] Accordingly, in one embodiment, an increase of fumarate in a non-human organism, as compared to a corresponding non-transformed wild type non-human organism, is conferred in the process of the invention, if the activity of a polypeptide showing the activity of a acetyltransferase, or if the activity of the polypeptide B4012, preferably represented by SEQ ID NO. 44379, or a homolog or fragment thereof, or if the activity of a polypeptide encoded by a nucleic acid molecule comprising the nucleic acid SEQ ID NO. 44378, preferably the coding region thereof, or a homolog or fragment thereof, e.g. derived from Escherichia coli, is increased or generated. For example the activity of a nucleic acid molecule or a polypeptide comprising the nucleic acid, preferably the coding region thereof, or polypeptide or the consensus sequence or the polypeptide motif, as depicted in Table I, II or IV, application No. 15, column 5 or 8 in the respective same line as the nucleic acid molecule SEQ ID NO. 44378 or polypeptide SEQ ID NO. 44379, respectively, or a homolog or a fragment thereof, is increased or generated, or if the activity acetyltransferase is increased or generated in a non-human organism, like a microorganism or a plant cell, plant or part thereof, especially with non-targeted localization, whereby the respective line disclose in column 7 the fine chemical fumarate. For example, an increase of the fumarate of at least 1 percent, particularly in a range of 58 to 204-percent is conferred as compared to a corresponding non-transformed wild type non-human organism.

[73315] Accordingly, in one embodiment, an increase of fumarate in a non-human organism, as compared to a corresponding non-transformed wild type non-human organism, is conferred in the process of the invention, if the activity of a polypeptide showing the activity of a b4029-protein, or if the activity of the polypeptide B4029, preferably represented by SEQ ID NO. 10741, or a homolog or fragment thereof, or if the activity of a polypeptide encoded by a nucleic acid molecule comprising the nucleic acid SEQ ID NO. 10740, preferably the coding region thereof, or a homolog or fragment thereof, e.g. derived from Escherichia coli, is increased or generated. For example the activity of a nucleic acid molecule or a polypeptide comprising the nucleic acid, preferably the coding region thereof, or polypeptide or the consensus sequence or the polypeptide motif, as depicted in Table I, II or IV, application No. 15, column 5 or 8 in the respective same line as the nucleic acid molecule SEQ ID NO. 10740 or polypeptide SEQ ID NO. 10741, respectively, or a homolog or a fragment thereof, is increased or generated, or if the activity b4029-protein is increased or generated in a non-human organism, like a microorganism or a plant cell, plant or part thereof, especially with non-targeted localization, whereby the respective line disclose in column 7 the fine chemical fumarate. For example, an increase of the fumarate of at least 1 percent, particularly in a range of 76 to 467-percent is conferred as compared to a corresponding non-transformed wild type non-human organism.

[73316] Accordingly, in one embodiment, an increase of malate in a non-human organism, as compared to a corresponding non-transformed wild type non-human organism, is conferred in the process of the invention, if the activity of a polypeptide showing the activity of a b4029-protein, or if the activity of the polypeptide B4029, preferably represented by SEQ ID NO. 10741, or a homolog or fragment thereof, or if the activity of a polypeptide encoded by a nucleic acid molecule comprising the nucleic acid SEQ ID NO. 10740, preferably the coding region thereof, or a homolog or fragment thereof, e.g. derived from Escherichia coli, is increased or generated. For example the activity of a nucleic acid molecule or a polypeptide comprising the nucleic acid, preferably the coding region thereof, or polypeptide or the consensus sequence or the polypeptide motif, as depicted in Table I, II or IV, application No. 15, column 5 or 8 in the respective same line as the nucleic acid molecule SEQ ID NO. 10740 or polypeptide SEQ ID NO. 10741, respectively, or a homolog or a fragment thereof, is increased or generated, or if the activity b4029-protein is increased or generated in a non-human organism, like a microorganism or a plant cell, plant or part thereof, especially with non-targeted localization, whereby the respective line disclose in column 7 the fine chemical malate. For example, an increase of the malate of at least 1 percent, particularly in a range of 81 to 511-percent is conferred as compared to a corresponding non-transformed wild type non-human organism.

[73317] Accordingly, in one embodiment, an increase of succinate in a non-human organism, as compared to a corresponding non-transformed wild type non-human organism, is conferred in the process of the invention, if the activity of a polypeptide showing the activity of a b4029-protein, or if the activity of the polypeptide B4029, preferably represented by SEQ ID NO. 10741, or a homolog or fragment thereof, or if the activity of a polypeptide encoded by a nucleic acid molecule comprising the nucleic acid SEQ ID NO. 10740, preferably the coding region thereof, or a homolog or fragment thereof, e.g. derived from Escherichia coli, is increased or generated. For example the activity of a nucleic acid molecule or a polypeptide comprising the nucleic acid, preferably the coding region thereof, or polypeptide or the consensus sequence or the polypeptide motif, as depicted in Table I, II or IV, application No. 15, column 5 or 8 in the respective same line as the nucleic acid molecule SEQ ID NO. 10740 or polypeptide SEQ ID NO. 10741, respectively, or a homolog or a fragment thereof, is increased or generated, or if the activity b4029-protein is increased or generated in a non-human organism, like a microorganism or a plant cell, plant or part thereof, especially with non-targeted localization, whereby the respective line disclose in column 7 the fine chemical succinate. For example, an increase of the succinate of at least 1 percent, particularly in a range of 29 to 444-percent is conferred as compared to a corresponding non-transformed wild type non-human organism.

[73318] Accordingly, in one embodiment, an increase of fumarate in a non-human organism, as compared to a corresponding non-transformed wild type non-human organism, is conferred in the process of the invention, if the activity of a polypeptide showing the activity of a b4050-protein, or if the activity of the polypeptide B4050, preferably represented by SEQ ID NO. 106533, or a homolog or fragment thereof, or if the activity of a polypeptide encoded by a nucleic acid molecule comprising the nucleic acid SEQ ID NO. 106532, preferably the coding region thereof, or a homolog or fragment thereof, e.g. derived from Escherichia coli, is increased or generated. For example the activity of a nucleic acid molecule or a polypeptide comprising the nucleic acid, preferably the coding region thereof, or polypeptide or the consensus sequence or the polypeptide motif, as depicted in Table I, II or IV, application No. 15, column 5 or 8 in the respective same line as the nucleic acid molecule SEQ ID NO. 106532 or polypeptide SEQ ID NO. 106533, respectively, or a homolog or a fragment thereof, is increased or generated, or if the activity b4050-protein is increased or generated in a non-human organism, like a microorganism or a plant cell, plant or part thereof, especially with non-targeted localization, whereby the respective line disclose in column 7 the fine chemical fumarate. For example, an increase of the fumarate of at least 1 percent, particularly in a range of 127 to 1497-percent is conferred as compared to a corresponding non-transformed wild type non-human organism.

[73319] Accordingly, in one embodiment, an increase of malate in a non-human organism, as compared to a corresponding non-transformed wild type non-human organism, is conferred in the process of the invention, if the activity of a polypeptide showing the activity of a b4050-protein, or if the activity of the polypeptide B4050, preferably represented by SEQ ID NO. 106533, or a homolog or fragment thereof, or if the activity of a polypeptide encoded by a nucleic acid molecule comprising the nucleic acid SEQ ID NO. 106532, preferably the coding region thereof, or a homolog or fragment thereof, e.g. derived from Escherichia coli, is increased or generated. For example the activity of a nucleic acid molecule or a polypeptide comprising the nucleic acid, preferably the coding region thereof, or polypeptide or the consensus sequence or the polypeptide motif, as depicted in Table I, II or IV, application No. 15, column 5 or 8 in the respective same line as the nucleic acid molecule SEQ ID NO. 106532 or polypeptide SEQ ID NO. 106533, respectively, or a homolog or a fragment thereof, is increased or generated, or if the activity b4050-protein is increased or generated in a non-human organism, like a microorganism or a plant cell, plant or part thereof, especially with non-targeted localization, whereby the respective line disclose in column 7 the fine chemical malate. For example, an increase of the malate of at least 1 percent, particularly in a range of 52 to 553-percent is conferred as compared to a corresponding non-transformed wild type non-human organism.

[73320] Accordingly, in one embodiment, an increase of citramalate in a non-human organism, as compared to a corresponding non-transformed wild type non-human organism, is conferred in the process of the invention, if the activity of a polypeptide showing the activity of a b4056-protein, or if the activity of the polypeptide B4056, preferably represented by SEQ ID NO. 94543, or a homolog or fragment thereof, or if the activity of a polypeptide encoded by a nucleic acid molecule comprising the nucleic acid SEQ ID NO. 94542, preferably the coding region thereof, or a homolog or fragment thereof, e.g. derived from Escherichia coli, is increased or generated. For example the activity of a nucleic acid molecule or a polypeptide comprising the nucleic acid, preferably the coding region thereof, or polypeptide or the consensus sequence or the polypeptide motif, as depicted in Table I, II or IV, application No. 15, column 5 or 8 in the respective same line as the nucleic acid molecule SEQ ID NO. 94542 or polypeptide SEQ ID NO. 94543, respectively, or a homolog or a fragment thereof, is increased or generated, or if the activity b4056-protein is increased or generated in a non-human organism, like a microorganism or a plant cell, plant or part thereof, especially with non-targeted localization, whereby the respective line disclose in column 7 the fine chemical citramalate. For example, an increase of the citramalate of at least 1 percent, particularly in a range of 41 to 94-percent is conferred as compared to a corresponding non-transformed wild type non-human organism.

[73321] Accordingly, in one embodiment, an increase of citrate in a non-human organism, as compared to a corresponding non-transformed wild type non-human organism, is conferred in the process of the invention, if the activity of a polypeptide showing the activity of a aspartase, or if the activity of the polypeptide B4139, preferably represented by SEQ ID NO. 45023, or a homolog or fragment thereof, or if the activity of a polypeptide encoded by a nucleic acid molecule comprising the nucleic acid SEQ ID NO. 45022, preferably the coding region thereof, or a homolog or fragment thereof, e.g. derived from Escherichia coli, is increased or generated. For example the activity of a nucleic acid molecule or a polypeptide comprising the nucleic acid, preferably the coding region thereof, or polypeptide or the consensus sequence or the polypeptide motif, as depicted in Table I, II or IV, application No. 15, column 5 or 8 in the respective same line as the nucleic acid molecule SEQ ID NO. 45022 or polypeptide SEQ ID NO. 45023, respectively, or a homolog or a fragment thereof, is increased or generated, or if the activity aspartase is increased or generated in a non-human organism, like a microorganism or a plant cell, plant or part thereof, especially with non-targeted localization, whereby the respective line disclose in column 7 the fine chemical citrate. For example, an increase of the citrate of at least 1 percent, particularly in a range of 119 to 342-percent is conferred as compared to a corresponding non-transformed wild type non-human organism.

[73322] Accordingly, in one embodiment, an increase of fumarate in a non-human organism, as compared to a corresponding non-transformed wild type non-human organism, is conferred in the process of the invention, if the activity of a polypeptide showing the activity of a acetyltransferase, or if the activity of the polypeptide B4256, preferably represented by SEQ ID NO. 45322, or a homolog or fragment thereof, or if the activity of a polypeptide encoded by a nucleic acid molecule comprising the nucleic acid SEQ ID NO. 45321, preferably the coding region thereof, or a homolog or fragment thereof, e.g. derived from Escherichia coli, is increased or generated. For example the activity of a nucleic acid molecule or a polypeptide comprising the nucleic acid, preferably the coding region thereof, or polypeptide or the consensus sequence or the polypeptide motif, as depicted in Table I, II or IV, application No. 15, column 5 or 8 in the respective same line as the nucleic acid molecule SEQ ID NO. 45321 or polypeptide SEQ ID NO. 45322, respectively, or a homolog or a fragment thereof, is increased or generated, or if the activity acetyltransferase is increased or generated in a non-human organism, like a microorganism or a plant cell, plant or part thereof, especially with non-targeted localization, whereby the respective line disclose in column 7 the fine chemical fumarate. For example, an increase of the fumarate of at least 1 percent, particularly in a range of 40 to 45-percent is conferred as compared to a corresponding non-transformed wild type non-human organism.

[73323] Accordingly, in one embodiment, an increase of malate in a non-human organism, as compared to a corresponding non-transformed wild type non-human organism, is conferred in the process of the invention, if the activity of a polypeptide showing the activity of a acetyltransferase, or if the activity of the polypeptide B4256, preferably represented by SEQ ID NO. 45322, or a homolog or fragment thereof, or if the activity of a polypeptide encoded by a nucleic acid molecule comprising the nucleic acid SEQ ID NO. 45321, preferably the coding region thereof, or a homolog or fragment thereof, e.g. derived from Escherichia coli, is increased or generated. For example the activity of a nucleic acid molecule or a polypeptide comprising the nucleic acid, preferably the coding region thereof, or polypeptide or the consensus sequence or the polypeptide motif, as depicted in Table I, II or IV, application No. 15, column 5 or 8 in the respective same line as the nucleic acid molecule SEQ ID NO. 45321 or polypeptide SEQ ID NO. 45322, respectively, or a homolog or a fragment thereof, is increased or generated, or if the activity acetyltransferase is increased or generated in a non-human organism, like a microorganism or a plant cell, plant or part thereof, especially with non-targeted localization, whereby the respective line disclose in column 7 the fine chemical malate. For example, an increase of the malate of at least 1 percent, particularly in a range of 201 to 278-percent is conferred as compared to a corresponding non-transformed wild type non-human organism.

[73324] Accordingly, in one embodiment, an increase of vitamin c and/or threonic acid in a non-human organism, as compared to a corresponding non-transformed wild type non-human organism, is conferred in the process of the invention, if the activity of a polypeptide showing the activity of a purine-nucleoside phosphorylase, or if the activity of the polypeptide B4384, preferably represented by SEQ ID NO. 45557, or a homolog or fragment thereof, or if the activity of a polypeptide encoded by a nucleic acid molecule comprising the nucleic acid SEQ ID NO. 45556, preferably the coding region thereof, or a homolog or fragment thereof, e.g. derived from Escherichia coli, is increased or generated. For example the activity of a nucleic acid molecule or a polypeptide comprising the nucleic acid, preferably the coding region thereof, or polypeptide or the consensus sequence or the polypeptide motif, as depicted in Table I, II or IV, application No. 15, column 5 or 8 in the respective same line as the nucleic acid molecule SEQ ID NO. 45556 or polypeptide SEQ ID NO. 45557, respectively, or a homolog or a fragment thereof, is increased or generated, or if the activity purine-nucleoside phosphorylase is increased or generated in a non-human organism, like a microorganism or a plant cell, plant or part thereof, especially with non-targeted localization, whereby the respective line disclose in column 7 the fine chemical vitamin c and/or threonic acid. For example, an increase of the vitamin c and/or threonic acid of at least 1 percent, particularly in a range of 36 to 222-percent is conferred as compared to a corresponding non-transformed wild type non-human organism.

[73325] Accordingly, in one embodiment, an increase of succinate in a non-human organism, as compared to a corresponding non-transformed wild type non-human organism, is conferred in the process of the invention, if the activity of a polypeptide showing the activity of a lysine decarboxylase, or if the activity of the polypeptide D90900, preferably represented by SEQ ID NO. 84080, or a homolog or fragment thereof, or if the activity of a polypeptide encoded by a nucleic acid molecule comprising the nucleic acid SEQ ID NO. 84079, preferably the coding region thereof, or a homolog or fragment thereof, e.g. derived from Synechocystis sp., is increased or generated. For example the activity of a nucleic acid molecule or a polypeptide comprising the nucleic acid, preferably the coding region thereof, or polypeptide or the consensus sequence or the polypeptide motif, as depicted in Table I, II or IV, application No. 15, column 5 or 8 in the respective same line as the nucleic acid molecule SEQ ID NO. 84079 or polypeptide SEQ ID NO. 84080, respectively, or a homolog or a fragment thereof, is increased or generated, or if the activity lysine decarboxylase is increased or generated in a non-human organism, like a microorganism organism or a plant cell, plant or part thereof, especially with plastidic localization, whereby the respective line disclose in column 7 the fine chemical succinate. For example, an increase of the succinate of at least 1 percent, particularly in a range of 33 to 49-percent is conferred as compared to a corresponding non-transformed wild type non-human organism.

[73326] Accordingly, in one embodiment, an increase of succinate in a non-human organism, as compared to a corresponding non-transformed wild type non-human organism, is conferred in the process of the invention, if the activity of a polypeptide showing the activity of a glutaredoxin, or if the activity of the polypeptide GM02LC12622, preferably represented by SEQ ID NO. 10812, or a homolog or fragment thereof, or if the activity of a polypeptide encoded by a nucleic acid molecule comprising the nucleic acid SEQ ID NO. 10811, preferably the coding region thereof, or a homolog or fragment thereof, e.g. derived from Glycine max, is increased or generated. For example the activity of a nucleic acid molecule or a polypeptide comprising the nucleic acid, preferably the coding region thereof, or polypeptide or the consensus sequence or the polypeptide motif, as depicted in Table I, II or IV, application No. 15, column 5 or 8 in the respective same line as the nucleic acid molecule SEQ ID NO. 10811 or polypeptide SEQ ID NO. 10812, respectively, or a homolog or a fragment thereof, is increased or generated, or if the activity glutaredoxin is increased or generated in a non-human organism, like a microorganism or a plant cell, plant or part thereof, especially with non-targeted localization, whereby the respective line disclose in column 7 the fine chemical succinate. For example, an increase of the succinate of at least 1 percent, particularly in a range of 32 to 137-percent is conferred as compared to a corresponding non-transformed wild type non-human organism.

[73327] Accordingly, in one embodiment, an increase of fumarate in a non-human organism, as compared to a corresponding non-transformed wild type non-human organism, is conferred in the process of the invention, if the activity of a polypeptide showing the activity of a GM02LC17485-protein, or if the activity of the polypeptide GM02LC17485, preferably represented by SEQ ID NO. 46406, or a homolog or fragment thereof, or if the activity of a polypeptide encoded by a nucleic acid molecule comprising the nucleic acid SEQ ID NO. 46405, preferably the coding region thereof, or a homolog or fragment thereof, e.g. derived from Glycine max, is increased or generated. For example the activity of a nucleic acid molecule or a polypeptide comprising the nucleic acid, preferably the coding region thereof, or polypeptide or the consensus sequence or the polypeptide motif, as depicted in Table I, II or IV, application No. 15, column 5 or 8 in the respective same line as the nucleic acid molecule SEQ ID NO. 46405 or polypeptide SEQ ID NO. 46406, respectively, or a homolog or a fragment thereof, is increased or generated, or if the activity GM02LC17485-protein is increased or generated in a non-human organism, like a microorganism or a plant cell, plant or part thereof, especially with non-targeted localization, whereby the respective line disclose in column 7 the fine chemical fumarate. For example, an increase of the fumarate of at least 1 percent, particularly in a range of 67 to 224-percent is conferred as compared to a corresponding non-transformed wild type non-human organism.

[73328] Accordingly, in one embodiment, an increase of citramalate in a non-human organism, as compared to a corresponding non-transformed wild type non-human organism, is conferred in the process of the invention, if the activity of a polypeptide showing the activity of a transcription factor, or if the activity of the polypeptide GM02LC21368, preferably represented by SEQ ID NO. 84199, or a homolog or fragment thereof, or if the activity of a polypeptide encoded by a nucleic acid molecule comprising the nucleic acid SEQ ID NO. 84198, preferably the coding region thereof, or a homolog or fragment thereof, e.g. derived from Glycine max, is increased or generated. For example the activity of a nucleic acid molecule or a polypeptide comprising the nucleic acid, preferably the coding region thereof, or polypeptide or the consensus sequence or the polypeptide motif, as depicted in Table I, II or IV, application No. 15, column 5 or 8 in the respective same line as the nucleic acid molecule SEQ ID NO. 84198 or polypeptide SEQ ID NO. 84199, respectively, or a homolog or a fragment thereof, is increased or generated, or if the activity transcription factor is increased or generated in a non-human organism, like a microorganism or a plant cell, plant or part thereof, especially with non-targeted localization, whereby the respective line disclose in column 7 the fine chemical citramalate. For example, an increase of the citramalate of at least 1 percent, particularly in a range of 42 to 177-percent is conferred as compared to a corresponding non-transformed wild type non-human organism.

[73329] Accordingly, in one embodiment, an increase of fumarate in a non-human organism, as compared to a corresponding non-transformed wild type non-human organism, is conferred in the process of the invention, if the activity of a polypeptide showing the activity of a transcription factor, or if the activity of the polypeptide GM02LC21368, preferably represented by SEQ ID NO. 84199, or a homolog or fragment thereof, or if the activity of a polypeptide encoded by a nucleic acid molecule comprising the nucleic acid SEQ ID NO. 84198, preferably the coding region thereof, or a homolog or fragment thereof, e.g. derived from Glycine max, is increased or generated. For example the activity of a nucleic acid molecule or a polypeptide comprising the nucleic acid, preferably the coding region thereof, or polypeptide or the consensus sequence or the polypeptide motif, as depicted in Table I, II or IV, application No. 15, column 5 or 8 in the respective same line as the nucleic acid molecule SEQ ID NO. 84198 or polypeptide SEQ ID NO. 84199, respectively, or a homolog or a fragment thereof, is increased or generated, or if the activity transcription factor is increased or generated in a non-human organism, like a microorganism or a plant cell, plant or part thereof, especially with non-targeted localization, whereby the respective line disclose in column 7 the fine chemical fumarate. For example, an increase of the fumarate of at least 1 percent, particularly in a range of 71 to 316-percent is conferred as compared to a corresponding non-transformed wild type non-human organism.

[73330] Accordingly, in one embodiment, an increase of malate in a non-human organism, as compared to a corresponding non-transformed wild type non-human organism, is conferred in the process of the invention, if the activity of a polypeptide showing the activity of a transcription factor, or if the activity of the polypeptide GM02LC21368, preferably represented by SEQ ID NO. 84199, or a homolog or fragment thereof, or if the activity of a polypeptide encoded by a nucleic acid molecule comprising the nucleic acid SEQ ID NO. 84198, preferably the coding region thereof, or a homolog or fragment thereof, e.g. derived from Glycine max, is increased or generated. For example the activity of a nucleic acid molecule or a polypeptide comprising the nucleic acid, preferably the coding region thereof, or polypeptide or the consensus sequence or the polypeptide motif, as depicted in Table I, II or IV, application No. 15, column 5 or 8 in the respective same line as the nucleic acid molecule SEQ ID NO. 84198 or polypeptide SEQ ID NO. 84199, respectively, or a homolog or a fragment thereof, is increased or generated, or if the activity transcription factor is increased or generated in a non-human organism, like a microorganism or a plant cell, plant or part thereof, especially with non-targeted localization, whereby the respective line disclose in column 7 the fine chemical malate. For example, an increase of the malate of at least 1 percent, particularly in a range of 102 to 632-percent is conferred as compared to a corresponding non-transformed wild type non-human organism.

[73331] Accordingly, in one embodiment, an increase of citramalate in a non-human organism, as compared to a corresponding non-transformed wild type non-human organism, is conferred in the process of the invention, if the activity of a polypeptide showing the activity of a GM02LC5744-protein, or if the activity of the polypeptide GM02LC5744, preferably represented by SEQ ID NO. 47077, or a homolog or fragment thereof, or if the activity of a polypeptide encoded by a nucleic acid molecule comprising the nucleic acid SEQ ID NO. 47076, preferably the coding region thereof, or a homolog or fragment thereof, e.g. derived from Glycine max, is increased or generated. For example the activity of a nucleic acid molecule or a polypeptide comprising the nucleic acid, preferably the coding region thereof, or polypeptide or the consensus sequence or the polypeptide motif, as depicted in Table I, II or IV, application No. 15, column 5 or 8 in the respective same line as the nucleic acid molecule SEQ ID NO. 47076 or polypeptide SEQ ID NO. 47077, respectively, or a homolog or a fragment thereof, is increased or generated, or if the activity GM02LC5744-protein is increased or generated in a non-human organism, like a microorganism or a plant cell, plant or part thereof, especially with non-targeted localization, whereby the respective line disclose in column 7 the fine chemical citramalate. For example, an increase of the citramalate of at least 1 percent, particularly in a range of 47 to 69-percent is conferred as compared to a corresponding non-transformed wild type non-human organism.

[73332] Accordingly, in one embodiment, an increase of fumarate in a non-human organism, as compared to a corresponding non-transformed wild type non-human organism, is conferred in the process of the invention, if the activity of a polypeptide showing the activity of a GM02LC5744-protein, or if the activity of the polypeptide GM02LC5744, preferably represented by SEQ ID NO. 47077, or a homolog or fragment thereof, or if the activity of a polypeptide encoded by a nucleic acid molecule comprising the nucleic acid SEQ ID NO. 47076, preferably the coding region thereof, or a homolog or fragment thereof, e.g. derived from Glycine max, is increased or generated. For example the activity of a nucleic acid molecule or a polypeptide comprising the nucleic acid, preferably the coding region thereof, or polypeptide or the consensus sequence or the polypeptide motif, as depicted in Table I, II or IV, application No. 15, column 5 or 8 in the respective same line as the nucleic acid molecule SEQ ID NO. 47076 or polypeptide SEQ ID NO. 47077, respectively, or a homolog or a fragment thereof, is increased or generated, or if the activity GM02LC5744-protein is increased or generated in a non-human organism, like a microorganism organism or a plant cell, plant or part thereof, especially with non-targeted localization, whereby the respective line disclose in column 7 the fine chemical fumarate. For example, an increase of the fumarate of at least 1 percent, particularly in a range of 49 to 104-percent is conferred as compared to a corresponding non-transformed wild type non-human organism.

[73333] Accordingly, in one embodiment, an increase of citramalate in a non-human organism, as compared to a corresponding non-transformed wild type non-human organism, is conferred in the process of the invention, if the activity of a polypeptide showing the activity of a heat shock protein, or if the activity of the polypeptide Sll0170, preferably represented by SEQ ID NO. 48139, or a homolog or fragment thereof, or if the activity of a polypeptide encoded by a nucleic acid molecule comprising the nucleic acid SEQ ID NO. 48138, preferably the coding region thereof, or a homolog or fragment thereof, e.g. derived from Synechocystis sp., is increased or generated. For example the activity of a nucleic acid molecule or a polypeptide comprising the nucleic acid, preferably the coding region thereof, or polypeptide or the consensus sequence or the polypeptide motif, as depicted in Table I, II or IV, application No. 15, column 5 or 8 in the respective same line as the nucleic acid molecule SEQ ID NO. 48138 or polypeptide SEQ ID NO. 48139, respectively, or a homolog or a fragment thereof, is increased or generated, or if the activity heat shock protein is increased or generated in a non-human organism, like a microorganism or a plant cell, plant or part thereof, especially with non-targeted localization, whereby the respective line disclose in column 7 the fine chemical citramalate. For example, an increase of the citramalate of at least 1 percent, particularly in a range of 49 to 116-percent is conferred as compared to a corresponding non-transformed wild type non-human organism.

[73334] Accordingly, in one embodiment, an increase of fumarate in a non-human organism, as compared to a corresponding non-transformed wild type non-human organism, is conferred in the process of the invention, if the activity of a polypeptide showing the activity of a agmatinase, or if the activity of the polypeptide Sll0228, preferably represented by SEQ ID NO. 84266, or a homolog or fragment thereof, or if the activity of a polypeptide encoded by a nucleic acid molecule comprising the nucleic acid SEQ ID NO. 84265, preferably the coding region thereof, or a homolog or fragment thereof, e.g. derived from Synechocystis sp., is increased or generated.

[73335] For example the activity of a nucleic acid molecule or a polypeptide comprising the nucleic acid, preferably the coding region thereof, or polypeptide or the consensus sequence or the polypeptide motif, as depicted in Table I, II or IV, application No. 15, column 5 or 8 in the respective same line as the nucleic acid molecule SEQ ID NO. 84265 or polypeptide SEQ ID NO. 84266, respectively, or a homolog or a fragment thereof, is increased or generated, or if the activity agmatinase is increased or generated in a non-human organism, like a microorganism or a plant cell, plant or part thereof, especially with plastidic localization, whereby the respective line disclose in column 7 the fine chemical fumarate. For example, an increase of the fumarate of at least 1 percent, particularly in a range of 67 to 78-percent is conferred as compared to a corresponding non-transformed wild type non-human organism.

[73336] Accordingly, in one embodiment, an increase of malate in a non-human organism, as compared to a corresponding non-transformed wild type non-human organism, is conferred in the process of the invention, if the activity of a polypeptide showing the activity of a ABC transporter ATP binding component, or if the activity of the polypeptide Sll0240, preferably represented by SEQ ID NO. 84442, or a homolog or fragment thereof, or if the activity of a polypeptide encoded by a nucleic acid molecule comprising the nucleic acid SEQ ID NO. 84441, preferably the coding region thereof, or a homolog or fragment thereof, e.g. derived from Synechocystis sp., is increased or generated. For example the activity of a nucleic acid molecule or a polypeptide comprising the nucleic acid, preferably the coding region thereof, or polypeptide or the consensus sequence or the polypeptide motif, as depicted in Table I, II or IV, application No. 15, column 5 or 8 in the respective same line as the nucleic acid molecule SEQ ID NO. 84441 or polypeptide SEQ ID NO. 84442, respectively, or a homolog or a fragment thereof, is increased or generated, or if the activity ABC transporter ATP binding component is increased or generated in a non-human organism, like a microorganism or a plant cell, plant or part thereof, especially with plastidic localization, whereby the respective line disclose in column 7 the fine chemical malate. For example, an increase of the malate of at least 1 percent, particularly in a range of 73 to 176-percent is conferred as compared to a corresponding non-transformed wild type non-human organism.

[73337] Accordingly, in one embodiment, an increase of succinate in a non-human organism, as compared to a corresponding non-transformed wild type non-human organism, is conferred in the process of the invention, if the activity of a polypeptide showing the activity of a ABC transporter ATP binding component, or if the activity of the polypeptide Sll0240, preferably represented by SEQ ID NO. 84442, or a homolog or fragment thereof, or if the activity of a polypeptide encoded by a nucleic acid molecule comprising the nucleic acid SEQ ID NO. 84441, preferably the coding region thereof, or a homolog or fragment thereof, e.g. derived from Synechocystis sp., is increased or generated. For example the activity of a nucleic acid molecule or a polypeptide comprising the nucleic acid, preferably the coding region thereof, or polypeptide or the consensus sequence or the polypeptide motif, as depicted in Table I, II or IV, application No. 15, column 5 or 8 in the respective same line as the nucleic acid molecule SEQ ID NO. 84441 or polypeptide SEQ ID NO. 84442, respectively, or a homolog or a fragment thereof, is increased or generated, or if the activity ABC transporter ATP binding component is increased or generated in a non-human organism, like a microorganism or a plant cell, plant or part thereof, especially with plastidic localization, whereby the respective line disclose in column 7 the fine chemical succinate. For example, an increase of the succinate of at least 1 percent, particularly in a range of 26 to 91-percent is conferred as compared to a corresponding non-transformed wild type non-human organism.

[73338] Accordingly, in one embodiment, an increase of fumarate in a non-human organism, as compared to a corresponding non-transformed wild type non-human organism, is conferred in the process of the invention, if the activity of a polypeptide showing the activity of a oxireductase, or if the activity of the polypeptide Sll0816, preferably represented by SEQ ID NO. 51199, or a homolog or fragment thereof, or if the activity of a polypeptide encoded by a nucleic acid molecule comprising the nucleic acid SEQ ID NO. 51198, preferably the coding region thereof, or a homolog or fragment thereof, e.g. derived from Synechocystis sp., is increased or generated. For example the activity of a nucleic acid molecule or a polypeptide comprising the nucleic acid, preferably the coding region thereof, or polypeptide or the consensus sequence or the polypeptide motif, as depicted in Table I, II or IV, application No. 15, column 5 or 8 in the respective same line as the nucleic acid molecule SEQ ID NO. 51198 or polypeptide SEQ ID NO. 51199, respectively, or a homolog or a fragment thereof, is increased or generated, or if the activity oxireductase is increased or generated in a non-human organism, like a microorganism or a plant cell, plant or part thereof, especially with non-targeted localization, whereby the respective line disclose in column 7 the fine chemical fumarate. For example, an increase of the fumarate of at least 1 percent, particularly in a range of 64 to 228-percent is conferred as compared to a corresponding non-transformed wild type non-human organism.

[73339] Accordingly, in one embodiment, an increase of succinate in a non-human organism, as compared to a corresponding non-transformed wild type non-human organism, is conferred in the process of the invention, if the activity of a polypeptide showing the activity of a phosphatase, or if the activity of the polypeptide Sll0895, preferably represented by SEQ ID NO. 127110, or a homolog or fragment thereof, or if the activity of a polypeptide encoded by a nucleic acid molecule comprising the nucleic acid SEQ ID NO. 127109, preferably the coding region thereof, or a homolog or fragment thereof, e.g. derived from Synechocystis sp., is increased or generated. For example the activity of a nucleic acid molecule or a polypeptide comprising the nucleic acid, preferably the coding region thereof, or polypeptide or the consensus sequence or the polypeptide motif, as depicted in Table I, II or IV, application No. 15, column 5 or 8 in the respective same line as the nucleic acid molecule SEQ ID NO. 127109 or polypeptide SEQ ID NO. 127110, respectively, or a homolog or a fragment thereof, is increased or generated, or if the activity phosphatase is increased or generated in a non-human organism, like a microorganism or a plant cell, plant or part thereof, especially with non-targeted localization, whereby the respective line disclose in column 7 the fine chemical succinate. For example, an increase of the succinate of at least 1 percent, particularly in a range of 34 to 83-percent is conferred as compared to a corresponding non-transformed wild type non-human organism.

[73340] Accordingly, in one embodiment, an increase of citramalate in a non-human organism, as compared to a corresponding non-transformed wild type non-human organism, is conferred in the process of the invention, if the activity of a polypeptide showing the activity of a CDP-diacylglycerol-glycerol-3-phosphate 3-phosphatidyltransferase, or if the activity of the polypeptide Sll1522, preferably represented by SEQ ID NO. 54453, or a homolog or fragment thereof, or if the activity of a polypeptide encoded by a nucleic acid molecule comprising the nucleic acid SEQ ID NO. 54452, preferably the coding region thereof, or a homolog or fragment thereof, e.g. derived from Synechocystis sp., is increased or generated. For example the activity of a nucleic acid molecule or a polypeptide comprising the nucleic acid, preferably the coding region thereof, or polypeptide or the consensus sequence or the polypeptide motif, as depicted in Table I, II or IV, application No. 15, column 5 or 8 in the respective same line as the nucleic acid molecule SEQ ID NO. 54452 or polypeptide SEQ ID NO. 54453, respectively, or a homolog or a fragment thereof, is increased or generated, or if the activity CDP-diacylglycerol-glycerol-3-phosphate 3-phosphatidyltransferase is increased or generated in a non-human organism, like a microorganism or a plant cell, plant or part thereof, especially with plastidic localization, whereby the respective line disclose in column 7 the fine chemical citramalate. For example, an increase of the citramalate of at least 1 percent, particularly in a range of 43 to 57-percent is conferred as compared to a corresponding non-transformed wild type non-human organism.

[73341] Accordingly, in one embodiment, an increase of malate in a non-human organism, as compared to a corresponding non-transformed wild type non-human organism, is conferred in the process of the invention, if the activity of a polypeptide showing the activity of a CDP-diacylglycerol-glycerol-3-phosphate 3-phosphatidyltransferase, or if the activity of the polypeptide Sll1522, preferably represented by SEQ ID NO. 54453, or a homolog or fragment thereof, or if the activity of a polypeptide encoded by a nucleic acid molecule comprising the nucleic acid SEQ ID NO. 54452, preferably the coding region thereof, or a homolog or fragment thereof, e.g. derived from Synechocystis sp., is increased or generated. For example the activity of a nucleic acid molecule or a polypeptide comprising the nucleic acid, preferably the coding region thereof, or polypeptide or the consensus sequence or the polypeptide motif, as depicted in Table I, II or IV, application No. 15, column 5 or 8 in the respective same line as the nucleic acid molecule SEQ ID NO. 54452 or polypeptide SEQ ID NO. 54453, respectively, or a homolog or a fragment thereof, is increased or generated, or if the activity CDP-diacylglycerol-glycerol-3-phosphate 3-phosphatidyltransferase is increased or generated in a non-human organism, like a microorganism or a plant cell, plant or part thereof, especially with plastidic localization, whereby the respective line disclose in column 7 the fine chemical malate. For example, an increase of the malate of at least 1 percent, particularly in a range of 55 to 206-percent is conferred as compared to a corganism responding non-transformed wild type non-human organism.

[73342] Accordingly, in one embodiment, an increase of succinate in a non-human organism, as compared to a corresponding non-transformed wild type non-human organism, is conferred in the process of the invention, if the activity of a polypeptide showing the activity of a adenylate kinase, or if the activity of the polypeptide Sll1815, preferably represented by SEQ ID NO. 85809, or a homolog or fragment thereof, or if the activity of a polypeptide encoded by a nucleic acid molecule comprising the nucleic acid SEQ ID NO. 85808, preferably the coding region thereof, or a homolog or fragment thereof, e.g. derived from Synechocystis sp., is increased or generated. For example the activity of a nucleic acid molecule or a polypeptide comprising the nucleic acid, preferably the coding region thereof, or polypeptide or the consensus sequence or the polypeptide motif, as depicted in Table I, II or IV, application No. 15, column 5 or 8 in the respective same line as the nucleic acid molecule SEQ ID NO. 85808 or polypeptide SEQ ID NO. 85809, respectively, or a homolog or a fragment thereof, is increased or generated, or if the activity adenylate kinase is increased or generated in a non-human organism, like a microorganism or a plant cell, plant or part thereof, especially with mitochondrial localization, whereby the respective line disclose in column 7 the fine chemical succinate. For example, an increase of the succinate of at least 1 percent, particularly in a range of 35 to 414-percent is conferred as compared to a corresponding non-transformed wild type non-human organism.

[73343] Accordingly, in one embodiment, an increase of citramalate in a non-human organism, as compared to a corresponding non-transformed wild type non-human organism, is conferred in the process of the invention, if the activity of a polypeptide showing the activity of a cation-transporting ATPase, or if the activity of the polypeptide Sll1920, preferably represented by SEQ ID NO. 55386, or a homolog or fragment thereof, or if the activity of a polypeptide encoded by a nucleic acid molecule comprising the nucleic acid SEQ ID NO. 55385, preferably the coding region thereof, or a homolog or fragment thereof, e.g. derived from Synechocystis sp., is increased or generated. For example the activity of a nucleic acid molecule or a polypeptide comprising the nucleic acid, preferably the coding region thereof, or polypeptide or the consensus sequence or the polypeptide motif, as depicted in Table I, II or IV, application No. 15, column 5 or 8 in the respective same line as the nucleic acid molecule SEQ ID NO. 55385 or polypeptide SEQ ID NO. 55386, respectively, or a homolog or a fragment thereof, is increased or generated, or if the activity cation-transporting ATPase is increased or generated in a non-human organism, like a microorganism or a plant cell, plant or part thereof, especially with non-targeted localization, whereby the respective line disclose in column 7 the fine chemical citramalate. For example, an increase of the citramalate of at least 1 percent, particularly in a range of 42 to 70-percent is conferred as compared to a corresponding non-transformed wild type non-human organism.

[73344] Accordingly, in one embodiment, an increase of malate in a non-human organism, as compared to a corresponding non-transformed wild type non-human organism, is conferred in the process of the invention, if the activity of a polypeptide showing the activity of a cation-transporting ATPase, or if the activity of the polypeptide Sll1920, preferably represented by SEQ ID NO. 55386, or a homolog or fragment thereof, or if the activity of a polypeptide encoded by a nucleic acid molecule comprising the nucleic acid SEQ ID NO. 55385, preferably the coding region thereof, or a homolog or fragment thereof, e.g. derived from Synechocystis sp., is increased or generated. For example the activity of a nucleic acid molecule or a polypeptide comprising the nucleic acid, preferably the coding region thereof, or polypeptide or the consensus sequence or the polypeptide motif, as depicted in Table I, II or IV, application No. 15, column 5 or 8 in the respective same line as the nucleic acid molecule SEQ ID NO. 55385 or polypeptide SEQ ID NO. 55386, respectively, or a homolog or a fragment thereof, is increased or generated, or if the activity cation-transporting ATPase is increased or generated in a non-human organism, like a microorganism or a plant cell, plant or part thereof, especially with mitochondrial localization, whereby the respective line disclose in column 7 the fine chemical malate. For example, an increase of the malate of at least 1 percent, particularly in a range of 63 to 120-percent is conferred as compared to a corresponding non-transformed wild type non-human organism.

[73345] Accordingly, in one embodiment, an increase of fumarate in a non-human organism, as compared to a corresponding non-transformed wild type non-human organism, is conferred in the process of the invention, if the activity of a polypeptide showing the activity of a fumarate hydratase, or if the activity of the polypeptide Slr0018, preferably represented by SEQ ID NO. 136534, or a homolog or fragment thereof, or if the activity of a polypeptide encoded by a nucleic acid molecule comprising the nucleic acid SEQ ID NO. 136533, preferably the coding region thereof, or a homolog or fragment thereof, e.g. derived from Synechocystis sp., is increased or generated. For example the activity of a nucleic acid molecule or a polypeptide comprising the nucleic acid, preferably the coding region thereof, or polypeptide or the consensus sequence or the polypeptide motif, as depicted in Table I, II or IV, application No. 15, column 5 or 8 in the respective same line as the nucleic acid molecule SEQ ID NO. 136533 or polypeptide SEQ ID NO. 136534, respectively, or a homolog or a fragment thereof, is increased or generated, or if the activity fumarate hydratase is increased or generated in a non-human organism, like a microorganism or a plant cell, plant or part thereof, especially with plastidic localization, whereby the respective line disclose in column 7 the fine chemical fumarate. For example, an increase of the fumarate of at least 1 percent, particularly in a range of 167 to 367-percent is conferred as compared to a corresponding non-transformed wild type non-human organism.

[73346] Accordingly, in one embodiment, an increase of citramalate in a non-human organism, as compared to a corresponding non-transformed wild type non-human organism, is conferred in the process of the invention, if the activity of a polypeptide showing the activity of a oxidoreductase, or if the activity of the polypeptide Slr0338, preferably represented by SEQ ID NO. 11991, or a homolog or fragment thereof, or if the activity of a polypeptide encoded by a nucleic acid molecule comprising the nucleic acid SEQ ID NO. 11990, preferably the coding region thereof, or a homolog or fragment thereof, e.g. derived from Synechocystis sp., is increased or generated. For example the activity of a nucleic acid molecule or a polypeptide comprising the nucleic acid, preferably the coding region thereof, or polypeptide or the consensus sequence or the polypeptide motif, as depicted in Table I, II or IV, application No. 15, column 5 or 8 in the respective same line as the nucleic acid molecule SEQ ID NO. 11990 or polypeptide SEQ ID NO. 11991, respectively, or a homolog or a fragment thereof, is increased or generated, or if the activity oxidoreductase is increased or generated in a non-human organism, like a microorganism or a plant cell, plant or part thereof, especially with plastidic localization, whereby the respective line disclose in column 7 the fine chemical citramalate. For example, an increase of the citramalate of at least 1 percent, particularly in a range of 58 to 138-percent is conferred as compared to a corresponding non-transformed wild type non-human organism.

[73347] Accordingly, in one embodiment, an increase of fumarate in a non-human organism, as compared to a corresponding non-transformed wild type non-human organism, is conferred in the process of the invention, if the activity of a polypeptide showing the activity of a bifunctional purine biosynthesis protein, or if the activity of the polypeptide Slr0597, preferably represented by SEQ ID NO. 56154, or a homolog or fragment thereof, or if the activity of a polypeptide encoded by a nucleic acid molecule comprising the nucleic acid SEQ ID NO. 56153, preferably the coding region thereof, or a homolog or fragment thereof, e.g. derived from Synechocystis sp., is increased or generated. For example the activity of a nucleic acid molecule or a polypeptide comprising the nucleic acid, preferably the coding region thereof, or polypeptide or the consensus sequence or the polypeptide motif, as depicted in Table I, II or IV, application No. 15, column 5 or 8 in the respective same line as the nucleic acid molecule SEQ ID NO. 56153 or polypeptide SEQ ID NO. 56154, respectively, or a homolog or a fragment thereof, is increased or generated, or if the activity bifunctional purine biosynthesis protein is increased or generated in a non-human organism, like a microorganism or a plant cell, plant or part thereof, especially with plastidic localization, whereby the respective line disclose in column 7 the fine chemical fumarate. For example, an increase of the fumarate of at least 1 percent, particularly in a range of 65 to 115-percent is conferred as compared to a corresponding non-transformed wild type non-human organism.

[73348] Accordingly, in one embodiment, an increase of citramalate in a non-human organism, as compared to a corresponding non-transformed wild type non-human organism, is conferred in the process of the invention, if the activity of a polypeptide showing the activity of a malate dehydrogenase, or if the activity of the polypeptide Slr0721, preferably represented by SEQ ID NO. 87398, or a homolog or fragment thereof, or if the activity of a polypeptide encoded by a nucleic acid molecule comprising the nucleic acid SEQ ID NO. 87397, preferably the coding region thereof, or a homolog or fragment thereof, e.g. derived from Synechocystis sp., is increased or generated. For example the activity of a nucleic acid molecule or a polypeptide comprising the nucleic acid, preferably the coding region thereof, or polypeptide or the consensus sequence or the polypeptide motif, as depicted in Table I, II or IV, application No. 15, column 5 or 8 in the respective same line as the nucleic acid molecule SEQ ID NO. 87397 or polypeptide SEQ ID NO. 87398, respectively, or a homolog or a fragment thereof, is increased or generated, or if the activity malate dehydrogenase is increased or generated in a non-human organism, like a microorganism or a plant cell, plant or part thereof, especially with plastidic localization, whereby the respective line disclose in column 7 the fine chemical citramalate. For example, an increase of the citramalate of at least 1 percent, particularly in a range of 55 to 692-percent is conferred as compared to a corresponding non-transformed wild type non-human organism.

[73349] Accordingly, in one embodiment, an increase of succinate in a non-human organism, as compared to a corresponding non-transformed wild type non-human organism, is conferred in the process of the invention, if the activity of a polypeptide showing the activity of a malate dehydrogenase, or if the activity of the polypeptide Slr0721, preferably represented by SEQ ID NO. 87398, or a homolog or fragment thereof, or if the activity of a polypeptide encoded by a nucleic acid molecule comprising the nucleic acid SEQ ID NO. 87397, preferably the coding region thereof, or a homolog or fragment thereof, e.g. derived from Synechocystis sp., is increased or generated. For example the activity of a nucleic acid molecule or a polypeptide comprising the nucleic acid, preferably the coding region thereof, or polypeptide or the consensus sequence or the polypeptide motif, as depicted in Table I, II or IV, application No. 15, column 5 or 8 in the respective same line as the nucleic acid molecule SEQ ID NO. 87397 or polypeptide SEQ ID NO. 87398, respectively, or a homolog or a fragment thereof, is increased or generated, or if the activity malate dehydrogenase is increased or generated in a non-human organism, like a microorganism or a plant cell, plant or part thereof, especially with plastidic localization, whereby the respective line disclose in column 7 the fine chemical succinate. For example, an increase of the succinate of at least 1 percent, particularly in a range of 63 to 291-percent is conferred as compared to a corresponding non-transformed wild type non-human organism.

[73350] Accordingly, in one embodiment, an increase of glycerate in a non-human organism, as compared to a corresponding non-transformed wild type non-human organism, is conferred in the process of the invention, if the activity of a polypeptide showing the activity of a dihydrolipoamide dehydrogenase, or if the activity of the polypeptide Slr1096, preferably represented by SEQ ID NO. 57735, or a homolog or fragment thereof, or if the activity of a polypeptide encoded by a nucleic acid molecule comprising the nucleic acid SEQ ID NO. 57734, preferably the coding region thereof, or a homolog or fragment thereof, e.g. derived from Synechocystis sp., is increased or generated. For example the activity of a nucleic acid molecule or a polypeptide comprising the nucleic acid, preferably the coding region thereof, or polypeptide or the consensus sequence or the polypeptide motif, as depicted in Table I, II or IV, application No. 15, column 5 or 8 in the respective same line as the nucleic acid molecule SEQ ID NO. 57734 or polypeptide SEQ ID NO. 57735, respectively, or a homolog or a fragment thereof, is increased or generated, or if the activity dihydrolipoamide dehydrogenase is increased or generated in a non-human organism, like a microorganism or a plant cell, plant or part thereof, especially with non-targeted localization, whereby the respective line disclose in column 7 the fine chemical glycerate. For example, an increase of the glycerate of at least 1 percent, particularly in a range of 31 to 42-percent is conferred as compared to a corresponding non-transformed wild type non-human organism.

[73351] Accordingly, in one embodiment, an increase of succinate in a non-human organism, as compared to a corresponding non-transformed wild type non-human organism, is conferred in the process of the invention, if the activity of a polypeptide showing the activity of a dihydrolipoamide dehydrogenase, or if the activity of the polypeptide Slr1096, preferably represented by SEQ ID NO. 57735, or a homolog or fragment thereof, or if the activity of a polypeptide encoded by a nucleic acid molecule comprising the nucleic acid SEQ ID NO. 57734, preferably the coding region thereof, or a homolog or fragment thereof, e.g. derived from Synechocystis sp., is increased or generated. For example the activity of a nucleic acid molecule or a polypeptide comprising the nucleic acid, preferably the coding region thereof, or polypeptide or the consensus sequence or the polypeptide motif, as depicted in Table I, II or IV, application No. 15, column 5 or 8 in the respective same line as the nucleic acid molecule SEQ ID NO. 57734 or polypeptide SEQ ID NO. 57735, respectively, or a homolog or a fragment thereof, is increased or generated, or if the activity dihydrolipoamide dehydrogenase is increased or generated in a non-human organism, like a microorganism or a plant cell, plant or part thereof, especially with non-targeted localization, whereby the respective line disclose in column 7 the fine chemical succinate. For example, an increase of the succinate of at least 1 percent, particularly in a range of 24 to 59-percent is conferred as compared to a corresponding non-transformed wild type non-human organism.

[73352] Accordingly, in one embodiment, an increase of succinate in a non-human organism, as compared to a corresponding non-transformed wild type non-human organism, is conferred in the process of the invention, if the activity of a polypeptide showing the activity of a slr1170-protein, or if the activity of the polypeptide Slr1170, preferably represented by SEQ ID NO. 136870, or a homolog or fragment thereof, or if the activity of a polypeptide encoded by a nucleic acid molecule comprising the nucleic acid SEQ ID NO. 136869, preferably the coding region thereof, or a homolog or fragment thereof, e.g. derived from Synechocystis sp., is increased or generated. For example the activity of a nucleic acid molecule or a polypeptide comprising the nucleic acid, preferably the coding region thereof, or polypeptide or the consensus sequence or the polypeptide motif, as depicted in Table I, II or IV, application No. 15, column 5 or 8 in the respective same line as the nucleic acid molecule SEQ ID NO. 136869 or polypeptide SEQ ID NO. 136870, respectively, or a homolog or a fragment thereof, is increased or generated, or if the activity slr1170-protein is increased or generated in a non-human organism, like a microorganism or a plant cell, plant or part thereof, especially with non-targeted localization, whereby the respective line disclose in column 7 the fine chemical succinate. For example, an increase of the succinate of at least 1 percent, particularly in a range of 39 to 81-percent is conferred as compared to a corresponding non-transformed wild type non-human organism.

[73353] Accordingly, in one embodiment, an increase of fumarate in a non-human organism, as compared to a corresponding non-transformed wild type non-human organism, is conferred in the process of the invention, if the activity of a polypeptide showing the activity of a phosphate import ATP-binding protein, or if the activity of the polypeptide Slr1250, preferably represented by SEQ ID NO. 116461, or a homolog or fragment thereof, or if the activity of a polypeptide encoded by a nucleic acid molecule comprising the nucleic acid SEQ ID NO. 116460, preferably the coding region thereof, or a homolog or fragment thereof, e.g. derived from Synechocystis sp., is increased or generated. For example the activity of a nucleic acid molecule or a polypeptide comprising the nucleic acid, preferably the coding region thereof, or polypeptide or the consensus sequence or the polypeptide motif, as depicted in Table I, II or IV, application No. 15, column 5 or 8 in the respective same line as the nucleic acid molecule SEQ ID NO. 116460 or polypeptide SEQ ID NO. 116461, respectively, or a homolog or a fragment thereof, is increased or generated, or if the activity phosphate import ATP-binding protein is increased or generated in a non-human organism, like a microorganism or a plant cell, plant or part thereof, especially with mitochondrial localization, whereby the respective line disclose in column 7 the fine chemical fumarate. For example, an increase of the fumarate of at least 1 percent, particularly in a range of 53 to 59-percent is conferred as compared to a corresponding non-transformed wild type non-human organism.

[73354] Accordingly, in one embodiment, an increase of succinate in a non-human organism, as compared to a corresponding non-transformed wild type non-human organism, is conferred in the process of the invention, if the activity of a polypeptide showing the activity of a gamma-glutamyltranspeptidase, or if the activity of the polypeptide Slr1269, preferably represented by SEQ ID NO. 58059, or a homolog or fragment thereof, or if the activity of a polypeptide encoded by a nucleic acid molecule comprising the nucleic acid SEQ ID NO. 58058, preferably the coding region thereof, or a homolog or fragment thereof, e.g. derived from Synechocystis sp., is increased or generated. For example the activity of a nucleic acid molecule or a polypeptide comprising the nucleic acid, preferably the coding region thereof, or polypeptide or the consensus sequence or the polypeptide motif, as depicted in Table I, II or IV, application No. 15, column 5 or 8 in the respective same line as the nucleic acid molecule SEQ ID NO. 58058 or polypeptide SEQ ID NO. 58059, respectively, or a homolog or a fragment thereof, is increased or generated, or if the activity gamma-glutamyltranspeptidase is increased or generated in a non-human organism, like a microorganism or a plant cell, plant or part thereof, especially with non-targeted localization, whereby the respective line disclose in column 7 the fine chemical succinate. For example, an increase of the succinate of at least 1 percent, particularly in a range of 32 to 75-percent is conferred as compared to a corresponding non-transformed wild type non-human organism.

[73355] Accordingly, in one embodiment, an increase of malate in a non-human organism, as compared to a corresponding non-transformed wild type non-human organism, is conferred in the process of the invention, if the activity of a polypeptide showing the activity of a photosystem II protein, or if the activity of the polypeptide Slr1739, preferably represented by SEQ ID NO. 58732, or a homolog or fragment thereof, or if the activity of a polypeptide encoded by a nucleic acid molecule comprising the nucleic acid SEQ ID NO. 58731, preferably the coding region thereof, or a homolog or fragment thereof, e.g. derived from Synechocystis sp., is increased or generated. For example the activity of a nucleic acid molecule or a polypeptide comprising the nucleic acid, preferably the coding region thereof, or polypeptide or the consensus sequence or the polypeptide motif, as depicted in Table I, II or IV, application No. 15, column 5 or 8 in the respective same line as the nucleic acid molecule SEQ ID NO. 58731 or polypeptide SEQ ID NO. 58732, respectively, or a homolog or a fragment thereof, is increased or generated, or if the activity photosystem II protein is increased or generated in a non-human organism, like a microorganism or a plant cell, plant or part thereof, especially with plastidic localization, whereby the respective line disclose in column 7 the fine chemical malate. For example, an increase of the malate of at least 1 percent, particularly in a range of 73 to 318-percent is conferred as compared to a corresponding non-transformed wild type non-human organism.

[73356] Accordingly, in one embodiment, an increase of fumarate in a non-human organism, as compared to a corresponding non-transformed wild type non-human organism, is conferred in the process of the invention, if the activity of a polypeptide showing the activity of a malonyl CoA-acyl carrier protein transacylase, or if the activity of the polypeptide Slr2023, preferably represented by SEQ ID NO. 59166, or a homolog or fragment thereof, or if the activity of a polypeptide encoded by a nucleic acid molecule comprising the nucleic acid SEQ ID NO. 59165, preferably the coding region thereof, or a homolog or fragment thereof, e.g. derived from Synechocystis sp., is increased or generated. For example the activity of a nucleic acid molecule or a polypeptide comprising the nucleic acid, preferably the coding region thereof, or polypeptide or the consensus sequence or the polypeptide motif, as depicted in Table I, II or IV, application No. 15, column 5 or 8 in the respective same line as the nucleic acid molecule SEQ ID NO. 59165 or polypeptide SEQ ID NO. 59166, respectively, or a homolog or a fragment thereof, is increased or generated, or if the activity malonyl CoA-acyl carrier protein transacylase is increased or generated in a non-human organism, like a microorganism or a plant cell, plant or part thereof, especially with plastidic localization, whereby the respective line disclose in column 7 the fine chemical fumarate. For example, an increase of the fumarate of at least 1 percent, particularly in a range of 108 to 384-percent is conferred as compared to a corresponding non-transformed wild type non-human organism.

[73357] Accordingly, in one embodiment, an increase of succinate in a non-human organism, as compared to a corresponding non-transformed wild type non-human organism, is conferred in the process of the invention, if the activity of a polypeptide showing the activity of a malonyl CoA-acyl carrier protein transacylase, or if the activity of the polypeptide Slr2023, preferably represented by SEQ ID NO. 59166, or a homolog or fragment thereof, or if the activity of a polypeptide encoded by a nucleic acid molecule comprising the nucleic acid SEQ ID NO. 59165, preferably the coding region thereof, or a homolog or fragment thereof, e.g. derived from Synechocystis sp., is increased or generated. For example the activity of a nucleic acid molecule or a polypeptide comprising the nucleic acid, preferably the coding region thereof, or polypeptide or the consensus sequence or the polypeptide motif, as depicted in Table I, II or IV, application No. 15, column 5 or 8 in the respective same line as the nucleic acid molecule SEQ ID NO. 59165 or polypeptide SEQ ID NO. 59166, respectively, or a homolog or a fragment thereof, is increased or generated, or if the activity malonyl CoA-acyl carrier protein transacylase is increased or generated in a non-human organism, like a microorganism or a plant cell, plant or part thereof, especially with plastidic localization, whereby the respective line disclose in column 7 the fine chemical succinate. For example, an increase of the succinate of at least 1 percent, particularly in a range of 38 to 152-percent is conferred as compared to a corresponding non-transformed wild type non-human organism.

[73358] Accordingly, in one embodiment, an increase of glycerate in a non-human organism, as compared to a corresponding non-transformed wild type non-human organism, is conferred in the process of the invention, if the activity of a polypeptide showing the activity of a photosystem I reaction centre subunit, or if the activity of the polypeptide Smr0004, preferably represented by SEQ ID NO. 136908, or a homolog or fragment thereof, or if the activity of a polypeptide encoded by a nucleic acid molecule comprising the nucleic acid SEQ ID NO. 136907, preferably the coding region thereof, or a homolog or fragment thereof, e.g. derived from Synechocystis sp., is increased or generated. For example the activity of a nucleic acid molecule or a polypeptide comprising the nucleic acid, preferably the coding region thereof, or polypeptide or the consensus sequence or the polypeptide motif, as depicted in Table I, II or IV, application No. 15, column 5 or 8 in the respective same line as the nucleic acid molecule SEQ ID NO. 136907 or polypeptide SEQ ID NO. 136908, respectively, or a homolog or a fragment thereof, is increased or generated, or if the activity photosystem I reaction centre subunit is increased or generated in a non-human organism, like a microorganism or a plant cell, plant or part thereof, especially with plastidic localization, whereby the respective line disclose in column 7 the fine chemical glycerate. For example, an increase of the glycerate of at least 1 percent, particularly in a range of 29 to 32-percent is conferred as compared to a corresponding non-transformed wild type non-human organism.

[73359] Accordingly, in one embodiment, an increase of fumarate in a non-human organism, as compared to a corresponding non-transformed wild type non-human organism, is conferred in the process of the invention, if the activity of a polypeptide showing the activity of a Sec-independent protein translocase subunit, or if the activity of the polypeptide TTC0019, preferably represented by SEQ ID NO. 12699, or a homolog or fragment thereof, or if the activity of a polypeptide encoded by a nucleic acid molecule comprising the nucleic acid SEQ ID NO. 12698, preferably the coding region thereof, or a homolog or fragment thereof, e.g. derived from Thermus thermophilus, is increased or generated. For example the activity of a nucleic acid molecule or a polypeptide comprising the nucleic acid, preferably the coding region thereof, or polypeptide or the consensus sequence or the polypeptide motif, as depicted in Table I, II or IV, application No. 15, column 5 or 8 in the respective same line as the nucleic acid molecule SEQ ID NO. 12698 or polypeptide SEQ ID NO. 12699, respectively, or a homolog or a fragment thereof, is increased or generated, or if the activity Sec-independent protein translocase subunit is increased or generated in a non-human organism, like a microorganism or a plant cell, plant or part thereof, especially with non-targeted localization, whereby the respective line disclose in column 7 the fine chemical fumarate. For example, an increase of the fumarate of at least 1 percent, particularly in a range of 181 to 395-percent is conferred as compared to a corresponding non-transformed wild type non-human organism.

[73360] Accordingly, in one embodiment, an increase of succinate in a non-human organism, as compared to a corresponding non-transformed wild type non-human organism, is conferred in the process of the invention, if the activity of a polypeptide showing the activity of a Sec-independent protein translocase subunit, or if the activity of the polypeptide TTC0019, preferably represented by SEQ ID NO. 12699, or a homolog or fragment thereof, or if the activity of a polypeptide encoded by a nucleic acid molecule comprising the nucleic acid SEQ ID NO. 12698, preferably the coding region thereof, or a homolog or fragment thereof, e.g. derived from Thermus thermophilus, is increased or generated. For example the activity of a nucleic acid molecule or a polypeptide comprising the nucleic acid, preferably the coding region thereof, or polypeptide or the consensus sequence or the polypeptide motif, as depicted in Table I, II or IV, application No. 15, column 5 or 8 in the respective same line as the nucleic acid molecule SEQ ID NO. 12698 or polypeptide SEQ ID NO. 12699, respectively, or a homolog or a fragment thereof, is increased or generated, or if the activity Sec-independent protein translocase subunit is increased or generated in a non-human organism, like a microorganism or a plant cell, plant or part thereof, especially with non-targeted localization, whereby the respective line disclose in column 7 the fine chemical succinate. For example, an increase of the succinate of at least 1 percent, particularly in a range of 31 to 106-percent is conferred as compared to a corresponding non-transformed wild type non-human organism.

[73361] Accordingly, in one embodiment, an increase of citramalate in a non-human organism, as compared to a corresponding non-transformed wild type non-human organism, is conferred in the process of the invention, if the activity of a polypeptide showing the activity of a 2-isopropylmalate synthase, or if the activity of the polypeptide TTC0849, preferably represented by SEQ ID NO. 107557, or a homolog or fragment thereof, or if the activity of a polypeptide encoded by a nucleic acid molecule comprising the nucleic acid SEQ ID NO. 107556, preferably the coding region thereof, or a homolog or fragment thereof, e.g. derived from Thermus thermophilus, is increased or generated. For example the activity of a nucleic acid molecule or a polypeptide comprising the nucleic acid, preferably the coding region thereof, or polypeptide or the consensus sequence or the polypeptide motif, as depicted in Table I, II or IV, application No. 15, column 5 or 8 in the respective same line as the nucleic acid molecule SEQ ID NO. 107556 or polypeptide SEQ ID NO. 107557, respectively, or a homolog or a fragment thereof, is increased or generated, or if the activity 2-isopropylmalate synthase is increased or generated in a non-human organism, like a microorganism or a plant cell, plant or part thereof, especially with non-targeted localization, whereby the respective line disclose in column 7 the fine chemical citramalate. For example, an increase of the citramalate of at least 1 percent, particularly in a range of 40 to 352-percent is conferred as compared to a corresponding non-transformed wild type non-human organism.

[73362] Accordingly, in one embodiment, an increase of fumarate in a non-human organism, as compared to a corresponding non-transformed wild type non-human organism, is conferred in the process of the invention, if the activity of a polypeptide showing the activity of a multiple antibiotic resistance protein, or if the activity of the polypeptide TTC1193, preferably represented by SEQ ID NO. 61724, or a homolog or fragment thereof, or if the activity of a polypeptide encoded by a nucleic acid molecule comprising the nucleic acid SEQ ID NO. 61723, preferably the coding region thereof, or a homolog or fragment thereof, e.g. derived from Thermus thermophilus, is increased or generated. For example the activity of a nucleic acid molecule or a polypeptide comprising the nucleic acid, preferably the coding region thereof, or polypeptide or the consensus sequence or the polypeptide motif, as depicted in Table I, II or IV, application No. 15, column 5 or 8 in the respective same line as the nucleic acid molecule SEQ ID NO. 61723 or polypeptide SEQ ID NO. 61724, respectively, or a homolog or a fragment thereof, is increased or generated, or if the activity multiple antibiotic resistance protein is increased or generated in a non-human organism, like a microorganism or a plant cell, plant or part thereof, especially with non-targeted localization, whereby the respective line disclose in column 7 the fine chemical fumarate. For example, an increase of the fumarate of at least 1 percent, particularly in a range of 72 to 132-percent is conferred as compared to a corresponding non-transformed wild type non-human organism.

[73363] Accordingly, in one embodiment, an increase of succinate in a non-human organism, as compared to a corresponding non-transformed wild type non-human organism, is conferred in the process of the invention, if the activity of a polypeptide showing the activity of a multiple antibiotic resistance protein, or if the activity of the polypeptide TTC1193, preferably represented by SEQ ID NO. 61724, or a homolog or fragment thereof, or if the activity of a polypeptide encoded by a nucleic acid molecule comprising the nucleic acid SEQ ID NO. 61723, preferably the coding region thereof, or a homolog or fragment thereof, e.g. derived from Thermus thermophilus, is increased or generated. For example the activity of a nucleic acid molecule or a polypeptide comprising the nucleic acid, preferably the coding region thereof, or polypeptide or the consensus sequence or the polypeptide motif, as depicted in Table I, II or IV, application No. 15, column 5 or 8 in the respective same line as the nucleic acid molecule SEQ ID NO. 61723 or polypeptide SEQ ID NO. 61724, respectively, or a homolog or a fragment thereof, is increased or generated, or if the activity multiple antibiotic resistance protein is increased or generated in a non-human organism, like a microorganism or a plant cell, plant or part thereof, especially with non-targeted localization, whereby the respective line disclose in column 7 the fine chemical succinate. For example, an increase of the succinate of at least 1 percent, particularly in a range of 36 to 110-percent is conferred as compared to a corresponding non-transformed wild type non-human organism.

[73364] Accordingly, in one embodiment, an increase of fumarate in a non-human organism, as compared to a corresponding non-transformed wild type non-human organism, is conferred in the process of the invention, if the activity of a polypeptide showing the activity of a TTC1386-protein, or if the activity of the polypeptide TTC1386, preferably represented by SEQ ID NO. 62080, or a homolog or fragment thereof, or if the activity of a polypeptide encoded by a nucleic acid molecule comprising the nucleic acid SEQ ID NO. 62079, preferably the coding region thereof, or a homolog or fragment thereof, e.g. derived from Thermus thermophilus, is increased or generated. For example the activity of a nucleic acid molecule or a polypeptide comprising the nucleic acid, preferably the coding region thereof, or polypeptide or the consensus sequence or the polypeptide motif, as depicted in Table I, II or IV, application No. 15, column 5 or 8 in the respective same line as the nucleic acid molecule SEQ ID NO. 62079 or polypeptide SEQ ID NO. 62080, respectively, or a homolog or a fragment thereof, is increased or generated, or if the activity TTC1386-protein is increased or generated in a non-human organism, like a microorganism or a plant cell, plant or part thereof, especially with non-targeted localization, whereby the respective line disclose in column 7 the fine chemical fumarate. For example, an increase of the fumarate of at least 1 percent, particularly in a range of 64 to 848-percent is conferred as compared to a corresponding non-transformed wild type non-human organism.

[73365] Accordingly, in one embodiment, an increase of malate in a non-human organism, as compared to a corresponding non-transformed wild type non-human organism, is conferred in the process of the invention, if the activity of a polypeptide showing the activity of a TTC1386-protein, or if the activity of the polypeptide TTC1386, preferably represented by SEQ ID NO. 62080, or a homolog or fragment thereof, or if the activity of a polypeptide encoded by a nucleic acid molecule comprising the nucleic acid SEQ ID NO. 62079, preferably the coding region thereof, or a homolog or fragment thereof, e.g. derived from Thermus thermophilus, is increased or generated. For example the activity of a nucleic acid molecule or a polypeptide comprising the nucleic acid, preferably the coding region thereof, or polypeptide or the consensus sequence or the polypeptide motif, as depicted in Table I, II or IV, application No. 15, column 5 or 8 in the respective same line as the nucleic acid molecule SEQ ID NO. 62079 or polypeptide SEQ ID NO. 62080, respectively, or a homolog or a fragment thereof, is increased or generated, or if the activity TTC1386-protein is increased or generated in a non-human organism, like a microorganism or a plant cell, plant or part thereof, especially with non-targeted localization, whereby the respective line disclose in column 7 the fine chemical malate. For example, an increase of the malate of at least 1 percent, particularly in a range of 241 to 353-percent is conferred as compared to a corresponding non-transformed wild type non-human organism.

[73366] Accordingly, in one embodiment, an increase of succinate in a non-human organism, as compared to a corresponding non-transformed wild type non-human organism, is conferred in the process of the invention, if the activity of a polypeptide showing the activity of a TTC1386-protein, or if the activity of the polypeptide TTC1386, preferably represented by SEQ ID NO. 62080, or a homolog or fragment thereof, or if the activity of a polypeptide encoded by a nucleic acid molecule comprising the nucleic acid SEQ ID NO. 62079, preferably the coding region thereof, or a homolog or fragment thereof, e.g. derived from Thermus thermophilus, is increased or generated. For example the activity of a nucleic acid molecule or a polypeptide comprising the nucleic acid, preferably the coding region thereof, or polypeptide or the consensus sequence or the polypeptide motif, as depicted in Table I, II or IV, application No. 15, column 5 or 8 in the respective same line as the nucleic acid molecule SEQ ID NO. 62079 or polypeptide SEQ ID NO. 62080, respectively, or a homolog or a fragment thereof, is increased or generated, or if the activity TTC1386-protein is increased or generated in a non-human organism, like a microorganism or a plant cell, plant or part thereof, especially with non-targeted localization, whereby the respective line disclose in column 7 the fine chemical succinate. For example, an increase of the succinate of at least 1 percent, particularly in a range of 31 to 161-percent is conferred as compared to a corresponding non-transformed wild type non-human organism.

[73367] Accordingly, in one embodiment, an increase of citramalate in a non-human organism, as compared to a corresponding non-transformed wild type non-human organism, is conferred in the process of the invention, if the activity of a polypeptide showing the activity of a oxidoreductase subunit, or if the activity of the polypeptide TTC1918, preferably represented by SEQ ID NO. 62161, or a homolog or fragment thereof, or if the activity of a polypeptide encoded by a nucleic acid molecule comprising the nucleic acid SEQ ID NO. 62160, preferably the coding region thereof, or a homolog or fragment thereof, e.g. derived from Thermus thermophilus, is increased or generated. For example the activity of a nucleic acid molecule or a polypeptide comprising the nucleic acid, preferably the coding region thereof, or polypeptide or the consensus sequence or the polypeptide motif, as depicted in Table I, II or IV, application No. 15, column 5 or 8 in the respective same line as the nucleic acid molecule SEQ ID NO. 62160 or polypeptide SEQ ID NO. 62161, respectively, or a homolog or a fragment thereof, is increased or generated, or if the activity oxidoreductase subunit is increased or generated in a non-human organism, like a microorganism or a plant cell, plant or part thereof, especially with non-targeted localization, whereby the respective line disclose in column 7 the fine chemical citramalate. For example, an increase of the citramalate of at least 1 percent, particularly in a range of 43 to 80-percent is conferred as compared to a corresponding non-transformed wild type non-human organism.

[73368] Accordingly, in one embodiment, an increase of glycerate in a non-human organism, as compared to a corresponding non-transformed wild type non-human organism, is conferred in the process of the invention, if the activity of a polypeptide showing the activity of a oxidoreductase subunit, or if the activity of the polypeptide TTC1918, preferably represented by SEQ ID NO. 62161, or a homolog or fragment thereof, or if the activity of a polypeptide encoded by a nucleic acid molecule comprising the nucleic acid SEQ ID NO. 62160, preferably the coding region thereof, or a homolog or fragment thereof, e.g. derived from Thermus thermophilus, is increased or generated. For example the activity of a nucleic acid molecule or a polypeptide comprising the nucleic acid, preferably the coding region thereof, or polypeptide or the consensus sequence or the polypeptide motif, as depicted in Table I, II or IV, application No. 15, column 5 or 8 in the respective same line as the nucleic acid molecule SEQ ID NO. 62160 or polypeptide SEQ ID NO. 62161, respectively, or a homolog or a fragment thereof, is increased or generated, or if the activity oxidoreductase subunit is increased or generated in a non-human organism, like a microorganism or a plant cell, plant or part thereof, especially with non-targeted localization, whereby the respective line disclose in column 7 the fine chemical glycerate. For example, an increase of the glycerate of at least 1 percent, particularly in a range of 32 to 61-percent is conferred as compared to a corresponding non-transformed wild type non-human organism.

[73369] Accordingly, in one embodiment, an increase of malate in a non-human organism, as compared to a corresponding non-transformed wild type non-human organism, is conferred in the process of the invention, if the activity of a polypeptide showing the activity of a oxidoreductase subunit, or if the activity of the polypeptide TTC1918, preferably represented by SEQ ID NO. 62161, or a homolog or fragment thereof, or if the activity of a polypeptide encoded by a nucleic acid molecule comprising the nucleic acid SEQ ID NO. 62160, preferably the coding region thereof, or a homolog or fragment thereof, e.g. derived from Thermus thermophilus, is increased or generated. For example the activity of a nucleic acid molecule or a polypeptide comprising the nucleic acid, preferably the coding region thereof, or polypeptide or the consensus sequence or the polypeptide motif, as depicted in Table I, II or IV, application No. 15, column 5 or 8 in the respective same line as the nucleic acid molecule SEQ ID NO. 62160 or polypeptide SEQ ID NO. 62161, respectively, or a homolog or a fragment thereof, is increased or generated, or if the activity oxidoreductase subunit is increased or generated in a non-human organism, like a microorganism or a plant cell, plant or part thereof, especially with non-targeted localization, whereby the respective line disclose in column 7 the fine chemical malate. For example, an increase of the malate of at least 1 percent, particularly in a range of 58 to 241-percent is conferred as compared to a corresponding non-transformed wild type non-human organism.

[73370] Accordingly, in one embodiment, an increase of fumarate in a non-human organism, as compared to a corresponding non-transformed wild type non-human organism, is conferred in the process of the invention, if the activity of a polypeptide showing the activity of a XM_{—}473199-protein, or if the activity of the polypeptide XM_{—}473199, preferably represented by SEQ ID NO. 62245, or a homolog or fragment thereof, or if the activity of a polypeptide encoded by a nucleic acid molecule comprising the nucleic acid SEQ ID NO. 62244, preferably the coding region thereof, or a homolog or fragment thereof, e.g. derived from Oryza sativa, is increased or generated. For example the activity of a nucleic acid molecule or a polypeptide comprising the nucleic acid, preferably the coding region thereof, or polypeptide or the consensus sequence or the polypeptide motif, as depicted in Table I, II or IV, application No. 15, column 5 or 8 in the respective same line as the nucleic acid molecule SEQ ID NO. 62244 or polypeptide SEQ ID NO. 62245, respectively, or a homolog or a fragment thereof, is increased or generated, or if the activity XM_{—}473199-protein is increased or generated in a non-human organism, like a microorganism or a plant cell, plant or part thereof, especially with non-targeted localization, whereby the respective line disclose in column 7 the fine chemical fumarate. For example, an increase of the fumarate of at least 1 percent, particularly in a range of 76 to 257-percent is conferred as compared to a corresponding non-transformed wild type non-human organism.

[73371] Accordingly, in one embodiment, an increase of malate in a non-human organism, as compared to a corresponding non-transformed wild type non-human organism, is conferred in the process of the invention, if the activity of a polypeptide showing the activity of a XM_{—}473199-protein, or if the activity of the polypeptide XM_{—}473199, preferably represented by SEQ ID NO. 62245, or a homolog or fragment thereof, or if the activity of a polypeptide encoded by a nucleic acid molecule comprising the nucleic acid SEQ ID NO. 62244, preferably the coding region thereof, or a homolog or fragment thereof, e.g. derived from Oryza sativa, is increased or generated. For example the activity of a nucleic acid molecule or a polypeptide comprising the nucleic acid, preferably the coding region thereof, or polypeptide or the consensus sequence or the polypeptide motif, as depicted in Table I, II or IV, application No. 15, column 5 or 8 in the respective same line as the nucleic acid molecule SEQ ID NO. 62244 or polypeptide SEQ ID NO. 62245, respectively, or a homolog or a fragment thereof, is increased or generated, or if the activity XM_{—}473199-protein is increased or generated in a non-human organism, like a microorganism or a plant cell, plant or part thereof, especially with non-targeted localization, whereby the respective line disclose in column 7 the fine chemical malate. For example, an increase of the malate of at least 1 percent, particularly in a range of 54 to 129-percent is conferred as compared to a corresponding non-transformed wild type non-human organism.

[73372] Accordingly, in one embodiment, an increase of succinate in a non-human organism, as compared to a corresponding non-transformed wild type non-human organism, is conferred in the process of the invention, if the activity of a polypeptide showing the activity of a XM_{—}473199protein, or if the activity of the polypeptide XM_{—}473199, preferably represented by SEQ ID NO. 62245, or a homolog or fragment thereof, or if the activity of a polypeptide encoded by a nucleic acid molecule comprising the nucleic acid SEQ ID NO. 62244, preferably the coding region thereof, or a homolog or fragment thereof, e.g. derived from Oryza sativa, is increased or generated. For example the activity of a nucleic acid molecule or a polypeptide comprising the nucleic acid, preferably the coding region thereof, or polypeptide or the consensus sequence or the polypeptide motif, as depicted in Table I, II or IV, application No. 15, column 5 or 8 in the respective same line as the nucleic acid molecule SEQ ID NO. 62244 or polypeptide SEQ ID NO. 62245, respectively, or a homolog or a fragment thereof, is increased or generated, or if the activity XM_{—}473199-protein is increased or generated in a non-human organism, like a microorganism or a plant cell, plant or part thereof, especially with non-targeted localization, whereby the respective line disclose in column 7 the fine chemical succinate. For example, an increase of the succinate of at least 1 percent, particularly in a range of 31 to 75-percent is conferred as compared to a corresponding non-transformed wild type non-human organism.

[73373] Accordingly, in one embodiment, an increase of succinate in a non-human organism, as compared to a corresponding non-transformed wild type non-human organism, is conferred in the process of the invention, if the activity of a polypeptide showing the activity of a glutamate dehydrogenase, or if the activity of the polypeptide Yal062w, preferably represented by SEQ ID NO. 136944, or a homolog or fragment thereof, or if the activity of a polypeptide encoded by a nucleic acid molecule comprising the nucleic acid SEQ ID NO. 136943, preferably the coding region thereof, or a homolog or fragment thereof, e.g. derived from Saccharomyces cerevisiae, is increased or generated. For example the activity of a nucleic acid molecule or a polypeptide comprising the nucleic acid, preferably the coding region thereof, or polypeptide or the consensus sequence or the polypeptide motif, as depicted in Table I, II or IV, application No. 15, column 5 or 8 in the respective same line as the nucleic acid molecule SEQ ID NO. 136943 or polypeptide SEQ ID NO. 136944, respectively, or a homolog or a fragment thereof, is increased or generated, or if the activity glutamate dehydrogenase is increased or generated in a non-human organism, like a microorganism or a plant cell, plant or part thereof, especially with plastidic localization, whereby the respective line disclose in column 7 the fine chemical succinate. For example, an increase of the succinate of at least 1 percent, particularly in a range of 35 to 75-percent is conferred as compared to a corresponding non-transformed wild type non-human organism.

[73374] Accordingly, in one embodiment, an increase of citramalate in a non-human organism, as compared to a corresponding non-transformed wild type non-human organism, is conferred in the process of the invention, if the activity of a polypeptide showing the activity of a acetyl-CoA hydrolase, or if the activity of the polypeptide Ybl015w, preferably represented by SEQ ID NO. 137388, or a homolog or fragment thereof, or if the activity of a polypeptide encoded by a nucleic acid molecule comprising the nucleic acid SEQ ID NO. 137387, preferably the coding region thereof, or a homolog or fragment thereof, e.g. derived from Saccharomyces cerevisiae, is increased or generated. For example the activity of a nucleic acid molecule or a polypeptide comprising the nucleic acid, preferably the coding region thereof, or polypeptide or the consensus sequence or the polypeptide motif, as depicted in Table I, II or IV, application No. 15, column 5 or 8 in the respective same line as the nucleic acid molecule SEQ ID NO. 137387 or polypeptide SEQ ID NO. 137388, respectively, or a homolog or a fragment thereof, is increased or generated, or if the activity acetyl-CoA hydrolase is increased or generated in a non-human organism, like a microorganism or a plant cell, plant or part thereof, especially with non-targeted localization, whereby the respective line disclose in column 7 the fine chemical citramalate. For example, an increase of the citramalate of at least 1 percent, particularly in a range of 39 to 127-percent is conferred as compared to a corresponding non-transformed wild type non-human organism.

[73375] Accordingly, in one embodiment, an increase of pyruvate in a non-human organism, as compared to a corresponding non-transformed wild type non-human organism, is conferred in the process of the invention, if the activity of a polypeptide showing the activity of a acetyl-CoA hydrolase, or if the activity of the polypeptide Ybl015w, preferably represented by SEQ ID NO. 137388, or a homolog or fragment thereof, or if the activity of a polypeptide encoded by a nucleic acid molecule comprising the nucleic acid SEQ ID NO. 137387, preferably the coding region thereof, or a homolog or fragment thereof, e.g. derived from Saccharomyces cerevisiae, is increased or generated. For example the activity of a nucleic acid molecule or a polypeptide comprising the nucleic acid, preferably the coding region thereof, or polypeptide or the consensus sequence or the polypeptide motif, as depicted in Table I, II or IV, application No. 15, column 5 or 8 in the respective same line as the nucleic acid molecule SEQ ID NO. 137387 or polypeptide SEQ ID NO. 137388, respectively, or a homolog or a fragment thereof, is increased or generated, or if the activity acetyl-CoA hydrolase is increased or generated in a non-human organism, like a microorganism or a plant cell, plant or part thereof, especially with non-targeted localization, whereby the respective line disclose in column 7 the fine chemical pyruvate. For example, an increase of the pyruvate of at least 1 percent, particularly in a range of 44 to 74-percent is conferred as compared to a corresponding non-transformed wild type non-human organism.

[73376] Accordingly, in one embodiment, an increase of malate in a non-human organism, as compared to a corresponding non-transformed wild type non-human organism, is conferred in the process of the invention, if the activity of a polypeptide showing the activity of a pyruvate carboxylase, or if the activity of the polypeptide Ybr218c, preferably represented by SEQ ID NO. 96780, or a homolog or fragment thereof, or if the activity of a polypeptide encoded by a nucleic acid molecule comprising the nucleic acid SEQ ID NO. 96779, preferably the coding region thereof, or a homolog or fragment thereof, e.g. derived from Saccharomyces cerevisiae, is increased or generated. For example the activity of a nucleic acid molecule or a polypeptide comprising the nucleic acid, preferably the coding region thereof, or polypeptide or the consensus sequence or the polypeptide motif, as depicted in Table I, II or IV, application No. 15, column 5 or 8 in the respective same line as the nucleic acid molecule SEQ ID NO. 96779 or polypeptide SEQ ID NO. 96780, respectively, or a homolog or a fragment thereof, is increased or generated, or if the activity pyruvate carboxylase is increased or generated in a non-human organism, like a microorganism organism or a plant cell, plant or part thereof, especially with plastidic localization, whereby the respective line disclose in column 7 the fine chemical malate. For example, an increase of the malate of at least 1 percent, particularly in a range of 49 to 99-percent is conferred as compared to a corresponding non-transformed wild type non-human organism.

[73377] Accordingly, in one embodiment, an increase of fumarate in a non-human organism, as compared to a corresponding non-transformed wild type non-human organism, is conferred in the process of the invention, if the activity of a polypeptide showing the activity of a ycr102c-protein, or if the activity of the polypeptide Ycr102c, preferably represented by SEQ ID NO. 63265, or a homolog or fragment thereof, or if the activity of a polypeptide encoded by a nucleic acid molecule comprising the nucleic acid SEQ ID NO. 63264, preferably the coding region thereof, or a homolog or fragment thereof, e.g. derived from Saccharomyces cerevisiae, is increased or generated. For example the activity of a nucleic acid molecule or a polypeptide comprising the nucleic acid, preferably the coding region thereof, or polypeptide or the consensus sequence or the polypeptide motif, as depicted in Table I, II or IV, application No. 15, column 5 or 8 in the respective same line as the nucleic acid molecule SEQ ID NO. 63264 or polypeptide SEQ ID NO. 63265, respectively, or a homolog or a fragment thereof, is increased or generated, or if the activity ycr102c-protein is increased or generated in a non-human organism, like a microorganism or a plant cell, plant or part thereof, especially with plastidic localization, whereby the respective line disclose in column 7 the fine chemical fumarate. For example, an increase of the fumarate of at least 1 percent, particularly in a range of 49 to 79-percent is conferred as compared to a corresponding non-transformed wild type non-human organism.

[73378] Accordingly, in one embodiment, an increase of fumarate in a non-human organism, as compared to a corresponding non-transformed wild type non-human organism, is conferred in the process of the invention, if the activity of a polypeptide showing the activity of a YDL159W-A-protein, or if the activity of the polypeptide Yd1159w-a, preferably represented by SEQ ID NO. 137499, or a homolog or fragment thereof, or if the activity of a polypeptide encoded by a nucleic acid molecule comprising the nucleic acid SEQ ID NO. 137498, preferably the coding region thereof, or a homolog or fragment thereof, e.g. derived from Saccharomyces cerevisiae, is increased or generated. For example the activity of a nucleic acid molecule or a polypeptide comprising the nucleic acid, preferably the coding region thereof, or polypeptide or the consensus sequence or the polypeptide motif, as depicted in Table I, II or IV, application No. 15, column 5 or 8 in the respective same line as the nucleic acid molecule SEQ ID NO. 137498 or polypeptide SEQ ID NO. 137499, respectively, or a homolog or a fragment thereof, is increased or generated, or if the activity YDL159W-A-protein is increased or generated in a non-human organism, like a microorganism or a plant cell, plant or part thereof, especially with non-targeted localization, whereby the respective line disclose in column 7 the fine chemical fumarate. For example, an increase of the fumarate of at least 1 percent, particularly in a range of 18 to 20-percent is conferred as compared to a corresponding non-transformed wild type non-human organism.

[73379] Accordingly, in one embodiment, an increase of fumarate in a non-human organism, as compared to a corresponding non-transformed wild type non-human organism, is conferred in the process of the invention, if the activity of a polypeptide showing the activity of a coproporphyrinogen III oxidase, or if the activity of the polypeptide Ydr044w, preferably represented by SEQ ID NO. 63335, or a homolog or fragment thereof, or if the activity of a polypeptide encoded by a nucleic acid molecule comprising the nucleic acid SEQ ID NO. 63334, preferably the coding region thereof, or a homolog or fragment thereof, e.g. derived from Saccharomyces cerevisiae, is increased or generated. For example the activity of a nucleic acid molecule or a polypeptide comprising the nucleic acid, preferably the coding region thereof, or polypeptide or the consensus sequence or the polypeptide motif, as depicted in Table I, II or IV, application No. 15, column 5 or 8 in the respective same line as the nucleic acid molecule SEQ ID NO. 63334 or polypeptide SEQ ID NO. 63335, respectively, or a homolog or a fragment thereof, is increased or generated, or if the activity coproporphyrinogen III oxidase is increased or generated in a non-human organism, like a microorganism or a plant cell, plant or part thereof, especially with plastidic localization, whereby the respective line disclose in column 7 the fine chemical fumarate. For example, an increase of the fumarate of at least 1 percent, particularly in a range of 198 to 494-percent is conferred as compared to a corresponding non-transformed wild type non-human organism.

[73380] Accordingly, in one embodiment, an increase of succinate in a non-human organism, as compared to a corresponding non-transformed wild type non-human organism, is conferred in the process of the invention, if the activity of a polypeptide showing the activity of a coproporphyrinogen III oxidase, or if the activity of the polypeptide Ydr044w, preferably represented by SEQ ID NO. 63335, or a homolog or fragment thereof, or if the activity of a polypeptide encoded by a nucleic acid molecule comprising the nucleic acid SEQ ID NO. 63334, preferably the coding region thereof, or a homolog or fragment thereof, e.g. derived from Saccharomyces cerevisiae, is increased or generated. For example the activity of a nucleic acid molecule or a polypeptide comprising the nucleic acid, preferably the coding region thereof, or polypeptide or the consensus sequence or the polypeptide motif, as depicted in Table I, II or IV, application No. 15, column 5 or 8 in the respective same line as the nucleic acid molecule SEQ ID NO. 63334 or polypeptide SEQ ID NO. 63335, respectively, or a homolog or a fragment thereof, is increased or generated, or if the activity coproporphyrinogen III oxidase is increased or generated in a non-human organism, like a microorganism or a plant cell, plant or part thereof, especially with plastidic localization, whereby the respective line disclose in column 7 the fine chemical succinate. For example, an increase of the succinate of at least 1 percent, particularly in a range of 112 to 267-percent is conferred as compared to a corresponding non-transformed wild type non-human organism.

[73381] Accordingly, in one embodiment, an increase of malate in a non-human organism, as compared to a corresponding non-transformed wild type non-human organism, is conferred in the process of the invention, if the activity of a polypeptide showing the activity of a ygl237c-protein, or if the activity of the polypeptide Ygl237c, preferably represented by SEQ ID NO. 64178, or a homolog or fragment thereof, or if the activity of a polypeptide encoded by a nucleic acid molecule comprising the nucleic acid SEQ ID NO. 64177, preferably the coding region thereof, or a homolog or fragment thereof, e.g. derived from Saccharomyces cerevisiae, is increased or generated. For example the activity of a nucleic acid molecule or a polypeptide comprising the nucleic acid, preferably the coding region thereof, or polypeptide or the consensus sequence or the polypeptide motif, as depicted in Table I, II or IV, application No. 15, column 5 or 8 in the respective same line as the nucleic acid molecule SEQ ID NO. 64177 or polypeptide SEQ ID NO. 64178, respectively, or a homolog or a fragment thereof, is increased or generated, or if the activity ygl237c-protein is increased or generated in a non-human organism, like a microorganism or a plant cell, plant or part thereof, especially with non-targeted localization, whereby the respective line disclose in column 7 the fine chemical malate. For example, an increase of the malate of at least 1 percent, particularly in a range of 54 to 178-percent is conferred as compared to a corganism responding non-transformed wild type non-human organism.

[73382] Accordingly, in one embodiment, an increase of succinate in a non-human organism, as compared to a corresponding non-transformed wild type non-human organism, is conferred in the process of the invention, if the activity of a polypeptide showing the activity of a ygl237c-protein, or if the activity of the polypeptide Ygl237c, preferably represented by SEQ ID NO. 64178, or a homolog or fragment thereof, or if the activity of a polypeptide encoded by a nucleic acid molecule comprising the nucleic acid SEQ ID NO. 64177, preferably the coding region thereof, or a homolog or fragment thereof, e.g. derived from Saccharomyces cerevisiae, is increased or generated. For example the activity of a nucleic acid molecule or a polypeptide comprising the nucleic acid, preferably the coding region thereof, or polypeptide or the consensus sequence or the polypeptide motif, as depicted in Table I, II or IV, application No. 15, column 5 or 8 in the respective same line as the nucleic acid molecule SEQ ID NO. 64177 or polypeptide SEQ ID NO. 64178, respectively, or a homolog or a fragment thereof, is increased or generated, or if the activity ygl237c-protein is increased or generated in a non-human organism, like a microorganism or a plant cell, plant or part thereof, especially with non-targeted localization, whereby the respective line disclose in column 7 the fine chemical succinate. For example, an increase of the succinate of at least 1 percent, particularly in a range of 33 to 110-percent is conferred as compared to a corresponding non-transformed wild type non-human organism.

[73383] Accordingly, in one embodiment, an increase of fumarate in a non-human organism, as compared to a corresponding non-transformed wild type non-human organism, is conferred in the process of the invention, if the activity of a polypeptide showing the activity of a YGR193C-protein, or if the activity of the polypeptide Ygr193c, preferably represented by SEQ ID NO. 108488, or a homolog or fragment thereof, or if the activity of a polypeptide encoded by a nucleic acid molecule comprising the nucleic acid SEQ ID NO. 108487, preferably the coding region thereof, or a homolog or fragment thereof, e.g. derived from Saccharomyces cerevisiae, is increased or generated. For example the activity of a nucleic acid molecule or a polypeptide comprising the nucleic acid, preferably the coding region thereof, or polypeptide or the consensus sequence or the polypeptide motif, as depicted in Table I, II or IV, application No. 15, column 5 or 8 in the respective same line as the nucleic acid molecule SEQ ID NO. 108487 or polypeptide SEQ ID NO. 108488, respectively, or a homolog or a fragment thereof, is increased or generated, or if the activity YGR193C-protein is increased or generated in a non-human organism , like a microorganism or a plant cell, plant or part thereof, especially with non-targeted localization, whereby the respective line disclose in column 7 the fine chemical fumarate. For example, an increase of the fumarate of at least 1 percent, particularly in a range of 50 to 287-percent is conferred as compared to a corresponding non-transformed wild type non-human organism.

[73384] Accordingly, in one embodiment, an increase of malate in a non-human organism, as compared to a corresponding non-transformed wild type non-human organism, is conferred in the process of the invention, if the activity of a polypeptide showing the activity of a YGR193C-protein, or if the activity of the polypeptide Ygr193c, preferably represented by SEQ ID NO. 108488, or a homolog or fragment thereof, or if the activity of a polypeptide encoded by a nucleic acid molecule comprising the nucleic acid SEQ ID NO. 108487, preferably the coding region thereof, or a homolog or fragment thereof, e.g. derived from Saccharomyces cerevisiae, is increased or generated. For example the activity of a nucleic acid molecule or a polypeptide comprising the nucleic acid, preferably the coding region thereof, or polypeptide or the consensus sequence or the polypeptide motif, as depicted in Table I, II or IV, application No. 15, column 5 or 8 in the respective same line as the nucleic acid molecule SEQ ID NO. 108487 or polypeptide SEQ ID NO. 108488, respectively, or a homolog or a fragment thereof, is increased or generated, or if the activity YGR193C-protein is increased or generated in a non-human organism, like a microorganism organism or a plant cell, plant or part thereof, especially with non-targeted localization, whereby the respective line disclose in column 7 the fine chemical malate. For example, an increase of the malate of at least 1 percent, particularly in a range of 58 to 96-percent is conferred as compared to a corresponding non-transformed wild type non-human organism.

[73385] Accordingly, in one embodiment, an increase of succinate in a non-human organism, as compared to a corresponding non-transformed wild type non-human organism, is conferred in the process of the invention, if the activity of a polypeptide showing the activity of a YGR193C-protein, or if the activity of the polypeptide Ygr193c, preferably represented by SEQ ID NO. 108488, or a homolog or fragment thereof, or if the activity of a polypeptide encoded by a nucleic acid molecule comprising the nucleic acid SEQ ID NO. 108487, preferably the coding region thereof, or a homolog or fragment thereof, e.g. derived from Saccharomyces cerevisiae, is increased or generated. For example the activity of a nucleic acid molecule or a polypeptide comprising the nucleic acid, preferably the coding region thereof, or polypeptide or the consensus sequence or the polypeptide motif, as depicted in Table I, II or IV, application No. 15, column 5 or 8 in the respective same line as the nucleic acid molecule SEQ ID NO. 108487 or polypeptide SEQ ID NO. 108488, respectively, or a homolog or a fragment thereof, is increased or generated, or if the activity YGR193C-protein is increased or generated in a non-human organism , like a microorganism or a plant cell, plant or part thereof, especially with non-targeted localization, whereby the respective line disclose in column 7 the fine chemical succinate. For example, an increase of the succinate of at least 1 percent, particularly in a range of 129 to 292-percent is conferred as compared to a corresponding non-transformed wild type non-human organism.

[73386] Accordingly, in one embodiment, an increase of malate in a non-human organism, as compared to a corresponding non-transformed wild type non-human organism, is conferred in the process of the invention, if the activity of a polypeptide showing the activity of a ygr221c-protein, or if the activity of the polypeptide Ygr221 c, preferably represented by SEQ ID NO. 64316, or a homolog or fragment thereof, or if the activity of a polypeptide encoded by a nucleic acid molecule comprising the nucleic acid SEQ ID NO. 64315, preferably the coding region thereof, or a homolog or fragment thereof, e.g. derived from Saccharomyces cerevisiae, is increased or generated.

[73387] For example the activity of a nucleic acid molecule or a polypeptide comprising the nucleic acid, preferably the coding region thereof, or polypeptide or the consensus sequence or the polypeptide motif, as depicted in Table I, II or IV, application No. 15, column 5 or 8 in the respective same line as the nucleic acid molecule SEQ ID NO. 64315 or polypeptide SEQ ID NO. 64316, respectively, or a homolog or a fragment thereof, is increased or generated, or if the activity ygr221c-protein is increased or generated in a non-human organism, like a microorganism or a plant cell, plant or part thereof, especially with plastidic localization, whereby the respective line disclose in column 7 the fine chemical malate. For example, an increase of the malate of at least 1 percent, particularly in a range of 59 to 80-percent is conferred as compared to a corresponding non-transformed wild type non-human organism.

[73388] Accordingly, in one embodiment, an increase of citrate in a non-human organism, as compared to a corresponding non-transformed wild type non-human organism, is conferred in the process of the invention, if the activity of a polypeptide showing the activity of a glycerol kinase, or if the activity of the polypeptide Yhl032c, preferably represented by SEQ ID NO. 101856, or a homolog or fragment thereof, or if the activity of a polypeptide encoded by a nucleic acid molecule comprising the nucleic acid SEQ ID NO. 101855, preferably the coding region thereof, or a homolog or fragment thereof, e.g. derived from Saccharomyces cerevisiae, is increased or generated. For example the activity of a nucleic acid molecule or a polypeptide comprising the nucleic acid, preferably the coding region thereof, or polypeptide or the consensus sequence or the polypeptide motif, as depicted in Table I, II or IV, application No. 15, column 5 or 8 in the respective same line as the nucleic acid molecule SEQ ID NO. 101855 or polypeptide SEQ ID NO. 101856, respectively, or a homolog or a fragment thereof, is increased or generated, or if the activity glycerol kinase is increased or generated in a non-human organism, like a microorganism or a plant cell, plant or part thereof, especially with plastidic localization, whereby the respective line disclose in column 7 the fine chemical citrate. For example, an increase of the citrate of at least 1 percent, particularly in a range of 73 to 311-percent is conferred as compared to a corresponding non-transformed wild type non-human organism.

[73389] Accordingly, in one embodiment, an increase of malate in a non-human organism, as compared to a corresponding non-transformed wild type non-human organism, is conferred in the process of the invention, if the activity of a polypeptide showing the activity of a yhr131c-protein, or if the activity of the polypeptide Yhr131c, preferably represented by SEQ ID NO. 97621, or a homolog or fragment thereof, or if the activity of a polypeptide encoded by a nucleic acid molecule comprising the nucleic acid SEQ ID NO. 97620, preferably the coding region thereof, or a homolog or fragment thereof, e.g. derived from Saccharomyces cerevisiae, is increased or generated. For example the activity of a nucleic acid molecule or a polypeptide comprising the nucleic acid, preferably the coding region thereof, or polypeptide or the consensus sequence or the polypeptide motif, as depicted in Table I, II or IV, application No. 15, column 5 or 8 in the respective same line as the nucleic acid molecule SEQ ID NO. 97620 or polypeptide SEQ ID NO. 97621, respectively, or a homolog or a fragment thereof, is increased or generated, or if the activity yhr131c-protein is increased or generated in a non-human organism, like a microorganism or a plant cell, plant or part thereof, especially with plastidic localization, whereby the respective line disclose in column 7 the fine chemical malate. For example, an increase of the malate of at least 1 percent, particularly in a range of 53 to 83-percent is conferred as compared to a corresponding non-transformed wild type non-human organism.

[73390] Accordingly, in one embodiment, an increase of succinate in a non-human organism, as compared to a corresponding non-transformed wild type non-human organism, is conferred in the process of the invention, if the activity of a polypeptide showing the activity of a yhr207c-protein, or if the activity of the polypeptide Yhr207c, preferably represented by SEQ ID NO. 64547, or a homolog or fragment thereof, or if the activity of a polypeptide encoded by a nucleic acid molecule comprising the nucleic acid SEQ ID NO. 64546, preferably the coding region thereof, or a homolog or fragment thereof, e.g. derived from Saccharomyces cerevisiae, is increased or generated. For example the activity of a nucleic acid molecule or a polypeptide comprising the nucleic acid, preferably the coding region thereof, or polypeptide or the consensus sequence or the polypeptide motif, as depicted in Table I, II or IV, application No. 15, column 5 or 8 in the respective same line as the nucleic acid molecule SEQ ID NO. 64546 or polypeptide SEQ ID NO. 64547, respectively, or a homolog or a fragment thereof, is increased or generated, or if the activity yhr207c-protein is increased or generated in a non-human organism, like a microorganism or a plant cell, plant or part thereof, especially with plastidic localization, whereby the respective line disclose in column 7 the fine chemical succinate. For example, an increase of the succinate of at least 1 percent, particularly in a range of 59 to 166-percent is conferred as compared to a corresponding non-transformed wild type non-human organism.

[73391] Accordingly, in one embodiment, an increase of glycerate in a non-human organism, as compared to a corresponding non-transformed wild type non-human organism, is conferred in the process of the invention, if the activity of a polypeptide showing the activity of a DnaJ-like chaperone, or if the activity of the polypeptide Yjl073w, preferably represented by SEQ ID NO. 64965, or a homolog or fragment thereof, or if the activity of a polypeptide encoded by a nucleic acid molecule comprising the nucleic acid SEQ ID NO. 64964, preferably the coding region thereof, or a homolog or fragment thereof, e.g. derived from Saccharomyces cerevisiae, is increased or generated. For example the activity of a nucleic acid molecule or a polypeptide comprising the nucleic acid, preferably the coding region thereof, or polypeptide or the consensus sequence or the polypeptide motif, as depicted in Table I, II or IV, application No. 15, column 5 or 8 in the respective same line as the nucleic acid molecule SEQ ID NO. 64964 or polypeptide SEQ ID NO. 64965, respectively, or a homolog or a fragment thereof, is increased or generated, or if the activity DnaJ-like chaperone is increased or generated in a non-human organism, like a microorganism or a plant cell, plant or part thereof, especially with plastidic localization, whereby the respective line disclose in column 7 the fine chemical glycerate. For example, an increase of the glycerate of at least 1 percent, particularly in a range of 31 to 37-percent is conferred as compared to a corresponding non-transformed wild type non-human organism.

[73392] Accordingly, in one embodiment, an increase of oxalate in a non-human organism, as compared to a corresponding non-transformed wild type non-human organism, is conferred in the process of the invention, if the activity of a polypeptide showing the activity of a hexose transporter, or if the activity of the polypeptide Yjl219w, preferably represented by SEQ ID NO. 97636, or a homolog or fragment thereof, or if the activity of a polypeptide encoded by a nucleic acid molecule comprising the nucleic acid SEQ ID NO. 97635, preferably the coding region thereof, or a homolog or fragment thereof, e.g. derived from Saccharomyces cerevisiae, is increased or generated. For example the activity of a nucleic acid molecule or a polypeptide comprising the nucleic acid, preferably the coding region thereof, or polypeptide or the consensus sequence or the polypeptide motif, as depicted in Table I, II or IV, application No. 15, column 5 or 8 in the respective same line as the nucleic acid molecule SEQ ID NO. 97635 or polypeptide SEQ ID NO. 97636, respectively, or a homolog or a fragment thereof, is increased or generated, or if the activity hexose transporter is increased or generated in a non-human organism, like a microorganism or a plant cell, plant or part thereof, especially with non-targeted localization, whereby the respective line disclose in column 7 the fine chemical oxalate. For example, an increase of the oxalate of at least 1 percent, particularly in a range of 33 to 194-percent is conferred as compared to a corresponding non-transformed wild type non-human organism.

[73393] Accordingly, in one embodiment, an increase of citramalate in a non-human organism, as compared to a corresponding non-transformed wild type non-human organism, is conferred in the process of the invention, if the activity of a polypeptide showing the activity of a branched chain aminotransferase, or if the activity of the polypeptide Yjr148w, preferably represented by SEQ ID NO. 90410, or a homolog or fragment thereof, or if the activity of a polypeptide encoded by a nucleic acid molecule comprising the nucleic acid SEQ ID NO. 90409, preferably the coding region thereof, or a homolog or fragment thereof, e.g. derived from Saccharomyces cerevisiae, is increased or generated. For example the activity of a nucleic acid molecule or a polypeptide comprising the nucleic acid, preferably the coding region thereof, or polypeptide or the consensus sequence or the polypeptide motif, as depicted in Table I, II or IV, application No. 15, column 5 or 8 in the respective same line as the nucleic acid molecule SEQ ID NO. 90409 or polypeptide SEQ ID NO. 90410, respectively, or a homolog or a fragment thereof, is increased or generated, or if the activity branched chain aminotransferase is increased or generated in a non-human organism, like a microorganism or a plant cell, plant or part thereof, especially with plastidic localization, whereby the respective line disclose in column 7 the fine chemical citramalate. For example, an increase of the citramalate of at least 1 percent, particularly in a range of 97 to 244-percent is conferred as compared to a corresponding non-transformed wild type non-human organism.

[73394] Accordingly, in one embodiment, an increase of fumarate in a non-human organism, as compared to a corresponding non-transformed wild type non-human organism, is conferred in the process of the invention, if the activity of a polypeptide showing the activity of a polygalacturonase, or if the activity of the polypeptide Yjr153w, preferably represented by SEQ ID NO. 66275, or a homolog or fragment thereof, or if the activity of a polypeptide encoded by a nucleic acid molecule comprising the nucleic acid SEQ ID NO. 66274, preferably the coding region thereof, or a homolog or fragment thereof, e.g. derived from Saccharomyces cerevisiae, is increased or generated. For example the activity of a nucleic acid molecule or a polypeptide comprising the nucleic acid, preferably the coding region thereof, or polypeptide or the consensus sequence or the polypeptide motif, as depicted in Table I, II or IV, application No. 15, column 5 or 8 in the respective same line as the nucleic acid molecule SEQ ID NO. 66274 or polypeptide SEQ ID NO. 66275, respectively, or a homolog or a fragment thereof, is increased or generated, or if the activity polygalacturonase is increased or generated in a non-human organism, like a microorganism or a plant cell, plant or part thereof, especially with non-targeted localization, whereby the respective line disclose in column 7 the fine chemical fumarate. For example, an increase of the fumarate of at least 1 percent, particularly in a range of 50 to 138-percent is conferred as compared to a corresponding non-transformed wild type non-human organism.

[73395] Accordingly, in one embodiment, an increase of malate in a non-human organism, as compared to a corresponding non-transformed wild type non-human organism, is conferred in the process of the invention, if the activity of a polypeptide showing the activity of a polygalacturonase, or if the activity of the polypeptide Yjr153w, preferably represented by SEQ ID NO. 66275, or a homolog or fragment thereof, or if the activity of a polypeptide encoded by a nucleic acid molecule comprising the nucleic acid SEQ ID NO. 66274, preferably the coding region thereof, or a homolog or fragment thereof, e.g. derived from Saccharomyces cerevisiae, is increased or generated. For example the activity of a nucleic acid molecule or a polypeptide comprising the nucleic acid, preferably the coding region thereof, or polypeptide or the consensus sequence or the polypeptide motif, as depicted in Table I, II or IV, application No. 15, column 5 or 8 in the respective same line as the nucleic acid molecule SEQ ID NO. 66274 or polypeptide SEQ ID NO. 66275, respectively, or a homolog or a fragment thereof, is increased or generated, or if the activity polygalacturonase is increased or generated in a non-human organism, like a microorganism or a plant cell, plant or part thereof, especially with non-targeted localization, whereby the respective line disclose in column 7 the fine chemical malate. For example, an increase of the malate of at least 1 percent, particularly in a range of 63 to 166-percent is conferred as compared to a corresponding non-transformed wild type non-human organism.

[73396] Accordingly, in one embodiment, an increase of malate in a non-human organism, as compared to a corresponding non-transformed wild type non-human organism, is conferred in the process of the invention, if the activity of a polypeptide showing the activity of a YKL038W-protein, or if the activity of the polypeptide YKL038W, preferably represented by SEQ ID NO. 90603, or a homolog or fragment thereof, or if the activity of a polypeptide encoded by a nucleic acid molecule comprising the nucleic acid SEQ ID NO. 90602, preferably the coding region thereof, or a homolog or fragment thereof, e.g. derived from Saccharomyces cerevisiae, is increased or generated. For example the activity of a nucleic acid molecule or a polypeptide comprising the nucleic acid, preferably the coding region thereof, or polypeptide or the consensus sequence or the polypeptide motif, as depicted in Table I, II or IV, application No. 15, column 5 or 8 in the respective same line as the nucleic acid molecule SEQ ID NO. 90602 or polypeptide SEQ ID NO. 90603, respectively, or a homolog or a fragment thereof, is increased or generated, or if the activity YKL038W-protein is increased or generated in a non-human organism, like a microorganism or a plant cell, plant or part thereof, especially with plastidic localization, whereby the respective line disclose in column 7 the fine chemical malate. For example, an increase of the malate of at least 1 percent, particularly in a range of 67 to 159-percent is conferred as compared to a corresponding non-transformed wild type non-human organism.

[73397] Accordingly, in one embodiment, an increase of vitamin c and/or threonic acid in a non-human organism, as compared to a corresponding non-transformed wild type non-human organism, is conferred in the process of the invention, if the activity of a polypeptide showing the activity of a YKL140W-protein, or if the activity of the polypeptide Ykl140w, preferably represented by SEQ ID NO. 137503, or a homolog or fragment thereof, or if the activity of a polypeptide encoded by a nucleic acid molecule comprising the nucleic acid SEQ ID NO. 137502, preferably the coding region thereof, or a homolog or fragment thereof, e.g. derived from Saccharomyces cerevisiae, is increased or generated. For example the activity of a nucleic acid molecule or a polypeptide comprising the nucleic acid, preferably the coding region thereof, or polypeptide or the consensus sequence or the polypeptide motif, as depicted in Table I, II or IV, application No. 15, column 5 or 8 in the respective same line as the nucleic acid molecule SEQ ID NO. 137502 or polypeptide SEQ ID NO. 137503, respectively, or a homolog or a fragment thereof, is increased or generated, or if the activity YKL140W-protein is increased or generated in a non-human organism , like a microorganism or a plant cell, plant or part thereof, especially with non-targeted localization, whereby the respective line disclose in column 7 the fine chemical vitamin c and/or threonic acid. For example, an increase of the vitamin c and/or threonic acid of at least 1 percent, particularly in a range of 39 to 145-percent is conferred as compared to a corresponding non-transformed wild type non-human organism.

[73398] Accordingly, in one embodiment, an increase of fumarate in a non-human organism, as compared to a corresponding non-transformed wild type non-human organism, is conferred in the process of the invention, if the activity of a polypeptide showing the activity of a ylr065c-protein, or if the activity of the polypeptide Ylr065c, preferably represented by SEQ ID NO. 66696, or a homolog or fragment thereof, or if the activity of a polypeptide encoded by a nucleic acid molecule comprising the nucleic acid SEQ ID NO. 66695, preferably the coding region thereof, or a homolog or fragment thereof, e.g. derived from Saccharomyces cerevisiae, is increased or generated. For example the activity of a nucleic acid molecule or a polypeptide comprising the nucleic acid, preferably the coding region thereof, or polypeptide or the consensus sequence or the polypeptide motif, as depicted in Table I, II or IV, application No. 15, column 5 or 8 in the respective same line as the nucleic acid molecule SEQ ID NO. 66695 or polypeptide SEQ ID NO. 66696, respectively, or a homolog or a fragment thereof, is increased or generated, or if the activity ylr065c-protein is increased or generated in a non-human organism, like a microorganism or a plant cell, plant or part thereof, especially with plastidic localization, whereby the respective line disclose in column 7 the fine chemical fumarate. For example, an increase of the fumarate of at least 1 percent, particularly in a range of 33 to 45-percent is conferred as compared to a corresponding non-transformed wild type non-human organism.

[73399] Accordingly, in one embodiment, an increase of succinate in a non-human organism, as compared to a corresponding non-transformed wild type non-human organism, is conferred in the process of the invention, if the activity of a polypeptide showing the activity of a isocitrate dehydrogenase, or if the activity of the polypeptide Ylr174w, preferably represented by SEQ ID NO. 137548, or a homolog or fragment thereof, or if the activity of a polypeptide encoded by a nucleic acid molecule comprising the nucleic acid SEQ ID NO. 137547, preferably the coding region thereof, or a homolog or fragment thereof, e.g. derived from Saccharomyces cerevisiae, is increased or generated. For example the activity of a nucleic acid molecule or a polypeptide comprising the nucleic acid, preferably the coding region thereof, or polypeptide or the consensus sequence or the polypeptide motif, as depicted in Table I, II or IV, application No. 15, column 5 or 8 in the respective same line as the nucleic acid molecule SEQ ID NO. 137547 or polypeptide SEQ ID NO. 137548, respectively, or a homolog or a fragment thereof, is increased or generated, or if the activity isocitrate dehydrogenase is increased or generated in a non-human organism, like a microorganism or a plant cell, plant or part thereof, especially with plastidic localization, whereby the respective line disclose in column 7 the fine chemical succinate. For example, an increase of the succinate of at least 1 percent, particularly in a range of 29 to 48-percent is conferred as compared to a corresponding non-transformed wild type non-human organism.

[73400] Accordingly, in one embodiment, an increase of fumarate in a non-human organism, as compared to a corresponding non-transformed wild type non-human organism, is conferred in the process of the invention, if the activity of a polypeptide showing the activity of a ylr326w-protein, or if the activity of the polypeptide Ylr326w, preferably represented by SEQ ID NO. 129124, or a homolog or fragment thereof, or if the activity of a polypeptide encoded by a nucleic acid molecule comprising the nucleic acid SEQ ID NO. 129123, preferably the coding region thereof, or a homolog or fragment thereof, e.g. derived from Saccharomyces cerevisiae, is increased or generated. For example the activity of a nucleic acid molecule or a polypeptide comprising the nucleic acid, preferably the coding region thereof, or polypeptide or the consensus sequence or the polypeptide motif, as depicted in Table I, II or IV, application No. 15, column 5 or 8 in the respective same line as the nucleic acid molecule SEQ ID NO. 129123 or polypeptide SEQ ID NO. 129124, respectively, or a homolog or a fragment thereof, is increased or generated, or if the activity ylr326w-protein is increased or generated in a non-human organism, like a microorganism or a plant cell, plant or part thereof, especially with plastidic localization, whereby the respective line disclose in column 7 the fine chemical fumarate. For example, an increase of the fumarate of at least 1 percent, particularly in a range of 71 to 254-percent is conferred as compared to a corresponding non-transformed wild type non-human organism.

[73401] Accordingly, in one embodiment, an increase of glycerate in a non-human organism, as compared to a corresponding non-transformed wild type non-human organism, is conferred in the process of the invention, if the activity of a polypeptide showing the activity of a ylr326w-protein, or if the activity of the polypeptide Ylr326w, preferably represented by SEQ ID NO. 129124, or a homolog or fragment thereof, or if the activity of a polypeptide encoded by a nucleic acid molecule comprising the nucleic acid SEQ ID NO. 129123, preferably the coding region thereof, or a homolog or fragment thereof, e.g. derived from Saccharomyces cerevisiae, is increased or generated. For example the activity of a nucleic acid molecule or a polypeptide comprising the nucleic acid, preferably the coding region thereof, or polypeptide or the consensus sequence or the polypeptide motif, as depicted in Table I, II or IV, application No. 15, column 5 or 8 in the respective same line as the nucleic acid molecule SEQ ID NO. 129123 or polypeptide SEQ ID NO. 129124, respectively, or a homolog or a fragment thereof, is increased or generated, or if the activity ylr326w-protein is increased or generated in a non-human organism, like a microorganism or a plant cell, plant or part thereof, especially with plastidic localization, whereby the respective line disclose in column 7 the fine chemical glycerate. For example, an increase of the glycerate of at least 1 percent, particularly in a range of 37 to 72-percent is conferred as compared to a corresponding non-transformed wild type non-human organism.

[73402] Accordingly, in one embodiment, an increase of vitamin c and/or threonic acid in a non-human organism, as compared to a corresponding non-transformed wild type non-human organism, is conferred in the process of the invention, if the activity of a polypeptide showing the activity of a ylr326w-protein, or if the activity of the polypeptide Ylr326w, preferably represented by SEQ ID NO. 129124, or a homolog or fragment thereof, or if the activity of a polypeptide encoded by a nucleic acid molecule comprising the nucleic acid SEQ ID NO. 129123, preferably the coding region thereof, or a homolog or fragment thereof, e.g. derived from Saccharomyces cerevisiae, is increased or generated. For example the activity of a nucleic acid molecule or a polypeptide comprising the nucleic acid, preferably the coding region thereof, or polypeptide or the consensus sequence or the polypeptide motif, as depicted in Table I, II or IV, application No. 15, column 5 or 8 in the respective same line as the nucleic acid molecule SEQ ID NO. 129123 or polypeptide SEQ ID NO. 129124, respectively, or a homolog or a fragment thereof, is increased or generated, or if the activity ylr326w-protein is increased or generated in a non-human organism, like a microorganism or a plant cell, plant or part thereof, especially with plastidic localization, whereby the respective line disclose in column 7 the fine chemical vitamin c and/or threonic acid. For example, an increase of the vitamin c and/or threonic acid of at least 1 percent, particularly in a range of 30 to 33-percent is conferred as compared to a corresponding non-transformed wild type non-human organism.

[73403] Accordingly, in one embodiment, an increase of fumarate in a non-human organism, as compared to a corresponding non-transformed wild type non-human organism, is conferred in the process of the invention, if the activity of a polypeptide showing the activity of a yml084w-protein, or if the activity of the polypeptide Yml084w, preferably represented by SEQ ID NO. 15176, or a homolog or fragment thereof, or if the activity of a polypeptide encoded by a nucleic acid molecule comprising the nucleic acid SEQ ID NO. 15175, preferably the coding region thereof, or a homolog or fragment thereof, e.g. derived from Saccharomyces cerevisiae, is increased or generated. For example the activity of a nucleic acid molecule or a polypeptide comprising the nucleic acid, preferably the coding region thereof, or polypeptide or the consensus sequence or the polypeptide motif, as depicted in Table I, II or IV, application No. 15, column 5 or 8 in the respective same line as the nucleic acid molecule SEQ ID NO. 15175 or polypeptide SEQ ID NO. 15176, respectively, or a homolog or a fragment thereof, is increased or generated, or if the activity yml084w-protein is increased or generated in a non-human organism, like a microorganism or a plant cell, plant or part thereof, especially with plastidic localization, whereby the respective line disclose in column 7 the fine chemical fumarate. For example, an increase of the fumarate of at least 1 percent, particularly in a range of 30 to 80-percent is conferred as compared to a corresponding non-transformed wild type non-human organism.

[73404] Accordingly, in one embodiment, an increase of succinate in a non-human organism, as compared to a corresponding non-transformed wild type non-human organism, is conferred in the process of the invention, if the activity of a polypeptide showing the activity of a yml084w-protein, or if the activity of the polypeptide Yml084w, preferably represented by SEQ ID NO. 15176, or a homolog or fragment thereof, or if the activity of a polypeptide encoded by a nucleic acid molecule comprising the nucleic acid SEQ ID NO. 15175, preferably the coding region thereof, or a homolog or fragment thereof, e.g. derived from Saccharomyces cerevisiae, is increased or generated. For example the activity of a nucleic acid molecule or a polypeptide comprising the nucleic acid, preferably the coding region thereof, or polypeptide or the consensus sequence or the polypeptide motif, as depicted in Table I, II or IV, application No. 15, column 5 or 8 in the respective same line as the nucleic acid molecule SEQ ID NO. 15175 or polypeptide SEQ ID NO. 15176, respectively, or a homolog or a fragment thereof, is increased or generated, or if the activity yml084w-protein is increased or generated in a non-human organism, like a microorganism or a plant cell, plant or part thereof, especially with plastidic localization, whereby the respective line disclose in column 7 the fine chemical succinate. For example, an increase of the succinate of at least 1 percent, particularly in a range of 53 to 165-percent is conferred as compared to a corresponding non-transformed wild type non-human organism.

[73405] Accordingly, in one embodiment, an increase of citramalate in a non-human organism, as compared to a corresponding non-transformed wild type non-human organism, is conferred in the process of the invention, if the activity of a polypeptide showing the activity of a yol073c-protein, or if the activity of the polypeptide Yol073c, preferably represented by SEQ ID NO. 137819, or a homolog or fragment thereof, or if the activity of a polypeptide encoded by a nucleic acid molecule comprising the nucleic acid SEQ ID NO. 137818, preferably the coding region thereof, or a homolog or fragment thereof, e.g. derived from Saccharomyces cerevisiae, is increased or generated. For example the activity of a nucleic acid molecule or a polypeptide comprising the nucleic acid, preferably the coding region thereof, or polypeptide or the consensus sequence or the polypeptide motif, as depicted in Table I, II or IV, application No. 15, column 5 or 8 in the respective same line as the nucleic acid molecule SEQ ID NO. 137818 or polypeptide SEQ ID NO. 137819, respectively, or a homolog or a fragment thereof, is increased or generated, or if the activity yol073c-protein is increased or generated in a non-human organism, like a microorganism or a plant cell, plant or part thereof, especially with plastidic localization, whereby the respective line disclose in column 7 the fine chemical citramalate. For example, an increase of the citramalate of at least 1 percent, particularly in a range of 43 to 59-percent is conferred as compared to a corresponding non-transformed wild type non-human organism.

[73406] Accordingly, in one embodiment, an increase of malate in a non-human organism, as compared to a corresponding non-transformed wild type non-human organism, is conferred in the process of the invention, if the activity of a polypeptide showing the activity of a yol073c-protein, or if the activity of the polypeptide Yol073c, preferably represented by SEQ ID NO. 137819, or a homolog or fragment thereof, or if the activity of a polypeptide encoded by a nucleic acid molecule comprising the nucleic acid SEQ ID NO. 137818, preferably the coding region thereof, or a homolog or fragment thereof, e.g. derived from Saccharomyces cerevisiae, is increased or generated. For example the activity of a nucleic acid molecule or a polypeptide comprising the nucleic acid, preferably the coding region thereof, or polypeptide or the consensus sequence or the polypeptide motif, as depicted in Table I, II or IV, application No. 15, column 5 or 8 in the respective same line as the nucleic acid molecule SEQ ID NO. 137818 or polypeptide SEQ ID NO. 137819, respectively, or a homolog or a fragment thereof, is increased or generated, or if the activity yol073c-protein is increased or generated in a non-human organism, like a microorganism or a plant cell, plant or part thereof, especially with plastidic localization, whereby the respective line disclose in column 7 the fine chemical malate. For example, an increase of the malate of at least 1 percent, particularly in a range of 62 to 188-percent is conferred as compared to a corresponding non-transformed wild type non-human organism.

[73407] Accordingly, in one embodiment, an increase of vitamin c and/or threonic acid in a non-human organism, as compared to a corresponding non-transformed wild type non-human organism, is conferred in the process of the invention, if the activity of a polypeptide showing the activity of a yol160w-protein, or if the activity of the polypeptide Yol160w, preferably represented by SEQ ID NO. 15180, or a homolog or fragment thereof, or if the activity of a polypeptide encoded by a nucleic acid molecule comprising the nucleic acid SEQ ID NO. 15179, preferably the coding region thereof, or a homolog or fragment thereof, e.g. derived from Saccharomyces cerevisiae, is increased or generated. For example the activity of a nucleic acid molecule or a polypeptide comprising the nucleic acid, preferably the coding region thereof, or polypeptide or the consensus sequence or the polypeptide motif, as depicted in Table I, II or IV, application No. 15, column 5 or 8 in the respective same line as the nucleic acid molecule SEQ ID NO. 15179 or polypeptide SEQ ID NO. 15180, respectively, or a homolog or a fragment thereof, is increased or generated, or if the activity yol160w-protein is increased or generated in a non-human organism, like a microorganism or a plant cell, plant or part thereof, especially with plastidic localization, whereby the respective line disclose in column 7 the fine chemical vitamin c and/or threonic acid. For example, an increase of the vitamin c and/or threonic acid of at least 1 percent, particularly in a range of 28 to 43-percent is conferred as compared to a corresponding non-transformed wild type non-human organism.

[73408] Accordingly, in one embodiment, an increase of malate in a non-human organism, as compared to a corresponding non-transformed wild type non-human organism, is conferred in the process of the invention, if the activity of a polypeptide showing the activity of a acetyl-CoA acetyltransferase, or if the activity of the polypeptide Ypl028w, preferably represented by SEQ ID NO. 92669, or a homolog or fragment thereof, or if the activity of a polypeptide encoded by a nucleic acid molecule comprising the nucleic acid SEQ ID NO. 92668, preferably the coding region thereof, or a homolog or fragment thereof, e.g. derived from Saccharomyces cerevisiae, is increased or generated. For example the activity of a nucleic acid molecule or a polypeptide comprising the nucleic acid, preferably the coding region thereof, or polypeptide or the consensus sequence or the polypeptide motif, as depicted in Table I, II or IV, application No. 15, column 5 or 8 in the respective same line as the nucleic acid molecule SEQ ID NO. 92668 or polypeptide SEQ ID NO. 92669, respectively, or a homolog or a fragment thereof, is increased or generated, or if the activity acetyl-CoA acetyltransferase is increased or generated in a non-human organism, like a microorganism or a plant cell, plant or part thereof, especially with non-targeted localization, whereby the respective line disclose in column 7 the fine chemical malate. For example, an increase of the malate of at least 1 percent, particularly in a range of 41 to 88-percent is conferred as compared to a corresponding non-transformed wild type non-human organism.

[73409] Accordingly, in one embodiment, an increase of vitamin c and/or threonic acid in a non-human organism, as compared to a corresponding non-transformed wild type non-human organism, is conferred in the process of the invention, if the activity of a polypeptide showing the activity of a ammonium transporter, or if the activity of the polypeptide Ypr138c, preferably represented by SEQ ID NO. 93219, or a homolog or fragment thereof, or if the activity of a polypeptide encoded by a nucleic acid molecule comprising the nucleic acid SEQ ID NO. 93218, preferably the coding region thereof, or a homolog or fragment thereof, e.g. derived from Saccharomyces cerevisiae, is increased or generated. For example the activity of a nucleic acid molecule or a polypeptide comprising the nucleic acid, preferably the coding region thereof, or polypeptide or the consensus sequence or the polypeptide motif, as depicted in Table I, II or IV, application No. 15, column 5 or 8 in the respective same line as the nucleic acid molecule SEQ ID NO. 93218 or polypeptide SEQ ID NO. 93219, respectively, or a homolog or a fragment thereof, is increased or generated, or if the activity ammonium transporter is increased or generated in a non-human organism, like a microorganism or a plant cell, plant or part thereof, especially with non-targeted localization, whereby the respective line disclose in column 7 the fine chemical vitamin c and/or threonic acid. For example, an increase of the vitamin c and/or threonic acid of at least 1 percent, particularly in a range of 37 to 125-percent is conferred as compared to a corresponding non-transformed wild type non-human organism.

[73410] Accordingly, in one embodiment, an increase of fumarate in a non-human organism, as compared to a corresponding non-transformed wild type non-human organism, is conferred in the process of the invention, if the activity of a polypeptide showing the activity of a 47266012protein, or if the activity of the polypeptide 47266012_SOYBEAN, preferably represented by SEQ ID NO. 15188, or a homolog or fragment thereof, or if the activity of a polypeptide encoded by a nucleic acid molecule comprising the nucleic acid SEQ ID NO. 15187, preferably the coding region thereof, or a homolog or fragment thereof, e.g. derived from Glycine max, is increased or generated. For example the activity of a nucleic acid molecule or a polypeptide comprising the nucleic acid, preferably the coding region thereof, or polypeptide or the consensus sequence or the polypeptide motif, as depicted in Table I, II or IV, application No. 15, column 5 or 8 in the respective same line as the nucleic acid molecule SEQ ID NO. 15187 or polypeptide SEQ ID NO. 15188, respectively, or a homolog or a fragment thereof, is increased or generated, or if the activity 47266012-protein is increased or generated in a non-human organism, like a microorganism or a plant cell, plant or part thereof, especially with non-targeted localization, whereby the respective line disclose in column 7 the fine chemical fumarate. For example, an increase of the fumarate of at least 1 percent, particularly in a range of 75 to 378-percent is conferred as compared to a corresponding non-transformed wild type non-human organism.

[73411] Accordingly, in one embodiment, an increase of malate in a non-human organism, as compared to a corresponding non-transformed wild type non-human organism, is conferred in the process of the invention, if the activity of a polypeptide showing the activity of a 47266012-protein, or if the activity of the polypeptide 47266012_SOYBEAN, preferably represented by SEQ ID NO. 15188, or a homolog or fragment thereof, or if the activity of a polypeptide encoded by a nucleic acid molecule comprising the nucleic acid SEQ ID NO. 15187, preferably the coding region thereof, or a homolog or fragment thereof, e.g. derived from Glycine max, is increased or generated. For example the activity of a nucleic acid molecule or a polypeptide comprising the nucleic acid, preferably the coding region thereof, or polypeptide or the consensus sequence or the polypeptide motif, as depicted in Table I, II or IV, application No. 15, column 5 or 8 in the respective same line as the nucleic acid molecule SEQ ID NO. 15187 or polypeptide SEQ ID NO. 15188, respectively, or a homolog or a fragment thereof, is increased or generated, or if the activity 47266012-protein is increased or generated in a non-human organism, like a microorganism or a plant cell, plant or part thereof, especially with non-targeted localization, whereby the respective line disclose in column 7 the fine chemical malate. For example, an increase of the malate of at least 1 percent, particularly in a range of 59 to 201-percent is conferred as compared to a corresponding non-transformed wild type non-human organism.

[73412] Accordingly, in one embodiment, an increase of succinate in a non-human organism, as compared to a corresponding non-transformed wild type non-human organism, is conferred in the process of the invention, if the activity of a polypeptide showing the activity of a 47266012-protein, or if the activity of the polypeptide 47266012_SOYBEAN, preferably represented by SEQ ID NO. 15188, or a homolog or fragment thereof, or if the activity of a polypeptide encoded by a nucleic acid molecule comprising the nucleic acid SEQ ID NO. 15187, preferably the coding region thereof, or a homolog or fragment thereof, e.g. derived from Glycine max, is increased or generated. For example the activity of a nucleic acid molecule or a polypeptide comprising the nucleic acid, preferably the coding region thereof, or polypeptide or the consensus sequence or the polypeptide motif, as depicted in Table I, II or IV, application No. 15, column 5 or 8 in the respective same line as the nucleic acid molecule SEQ ID NO. 15187 or polypeptide SEQ ID NO. 15188, respectively, or a homolog or a fragment thereof, is increased or generated, or if the activity 47266012-protein is increased or generated in a non-human organism, like a microorganism or a plant cell, plant or part thereof, especially with non-targeted localization, whereby the respective line disclose in column 7 the fine chemical succinate. For example, an increase of the succinate of at least 1 percent, particularly in a range of 46 to 112-percent is conferred as compared to a corresponding non-transformed wild type non-human organism.

[73413] Accordingly, in one embodiment, an increase of fumarate in a non-human organism, as compared to a corresponding non-transformed wild type non-human organism, is conferred in the process of the invention, if the activity of a polypeptide showing the activity of a 49747384_SOYBEAN-protein, or if the activity of the polypeptide 49747384_SOYBEAN, preferably represented by SEQ ID NO. 70, or a homolog or fragment thereof, or if the activity of a polypeptide encoded by a nucleic acid molecule comprising the nucleic acid SEQ ID NO. 69, preferably the coding region thereof, or a homolog or fragment thereof, e.g. derived from Glycine max, is increased or generated. For example the activity of a nucleic acid molecule or a polypeptide comprising the nucleic acid, preferably the coding region thereof, or polypeptide or the consensus sequence or the polypeptide motif, as depicted in Table I, II or IV, application No. 15, column 5 or 8 in the respective same line as the nucleic acid molecule SEQ ID NO. 69 or polypeptide SEQ ID NO. 70, respectively, or a homolog or a fragment thereof, is increased or generated, or if the activity 49747384_SOYBEAN-protein is increased or generated in a non-human organism, like a microorganism or a plant cell, plant or part thereof, especially with non-targeted localization, whereby the respective line disclose in column 7 the fine chemical fumarate. For example, an increase of the fumarate of at least 1 percent, particularly in a range of 100 to 340-percent is conferred as compared to a corresponding non-transformed wild type non-human organism.

[73414] Accordingly, in one embodiment, an increase of malate in a non-human organism, as compared to a corresponding non-transformed wild type non-human organism, is conferred in the process of the invention, if the activity of a polypeptide showing the activity of a 49747384_SOYBEAN-protein, or if the activity of the polypeptide 49747384_SOYBEAN, preferably represented by SEQ ID NO. 70, or a homolog or fragment thereof, or if the activity of a polypeptide encoded by a nucleic acid molecule comprising the nucleic acid SEQ ID NO. 69, preferably the coding region thereof, or a homolog or fragment thereof, e.g. derived from Glycine max, is increased or generated. For example the activity of a nucleic acid molecule or a polypeptide comprising the nucleic acid, preferably the coding region thereof, or polypeptide or the consensus sequence or the polypeptide motif, as depicted in Table I, II or IV, application No. 15, column 5 or 8 in the respective same line as the nucleic acid molecule SEQ ID NO. 69 or polypeptide SEQ ID NO. 70, respectively, or a homolog or a fragment thereof, is increased or generated, or if the activity 49747384_SOYBEAN-protein is increased or generated in a non-human organism, like a microorganism or a plant cell, plant or part thereof, especially with non-targeted localization, whereby the respective line disclose in column 7 the fine chemical malate. For example, an increase of the malate of at least 1 percent, particularly in a range of 54 to 202-percent is conferred as compared to a corresponding non-transformed wild type non-human organism.

[73415] Accordingly, in one embodiment, an increase of succinate in a non-human organism, as compared to a corresponding non-transformed wild type non-human organism, is conferred in the process of the invention, if the activity of a polypeptide showing the activity of a 49747384_SOYBEAN-protein, or if the activity of the polypeptide 49747384_SOYBEAN, preferably represented by SEQ ID NO. 70, or a homolog or fragment thereof, or if the activity of a polypeptide encoded by a nucleic acid molecule comprising the nucleic acid SEQ ID NO. 69, preferably the coding region thereof, or a homolog or fragment thereof, e.g. derived from Glycine max, is increased or generated. For example the activity of a nucleic acid molecule or a polypeptide comprising the nucleic acid, preferably the coding region thereof, or polypeptide or the consensus sequence or the polypeptide motif, as depicted in Table I, II or IV, application No. 15, column 5 or 8 in the respective same line as the nucleic acid molecule SEQ ID NO. 69 or polypeptide SEQ ID NO. 70, respectively, or a homolog or a fragment thereof, is increased or generated, or if the activity 49747384_SOYBEAN-protein is increased or generated in a non-human organism, like a microorganism or a plant cell, plant or part thereof, especially with non-targeted localization, whereby the respective line disclose in column 7 the fine chemical succinate. For example, an increase of the succinate of at least 1 percent, particularly in a range of 46 to 129-percent is conferred as compared to a corresponding non-transformed wild type non-human organism.

[73416] Accordingly, in one embodiment, an increase of vitamin c and/or threonic acid in a non-human organism, as compared to a corresponding non-transformed wild type non-human organism, is conferred in the process of the invention, if the activity of a polypeptide showing the activity of a 49747384_SOYBEAN-protein, or if the activity of the polypeptide 49747384_SOYBEAN, preferably represented by SEQ ID NO. 70, or a homolog or fragment thereof, or if the activity of a polypeptide encoded by a nucleic acid molecule comprising the nucleic acid SEQ ID NO. 69, preferably the coding region thereof, or a homolog or fragment thereof, e.g. derived from Glycine max, is increased or generated. For example the activity of a nucleic acid molecule or a polypeptide comprising the nucleic acid, preferably the coding region thereof, or polypeptide or the consensus sequence or the polypeptide motif, as depicted in Table I, II or IV, application No. 15, column 5 or 8 in the respective same line as the nucleic acid molecule SEQ ID NO. 69 or polypeptide SEQ ID NO. 70, respectively, or a homolog or a fragment thereof, is increased or generated, or if the activity 49747384_SOYBEAN-protein is increased or generated in a non-human organism, like a microorganism or a plant cell, plant or part thereof, especially with non-targeted localization, whereby the respective line disclose in column 7 the fine chemical vitamin c and/or threonic acid. For example, an increase of the vitamin c and/or threonic acid of at least 1 percent, particularly in a range of 32 to 64-percent is conferred as compared to a corresponding non-transformed wild type non-human organism.

[73417] Accordingly, in one embodiment, an increase of citramalate in a non-human organism, as compared to a corresponding non-transformed wild type non-human organism, is conferred in the process of the invention, if the activity of a polypeptide showing the activity of a pyruvate kinase, or if the activity of the polypeptide 51340801_CANOLA, preferably represented by SEQ ID NO. 15533, or a homolog or fragment thereof, or if the activity of a polypeptide encoded by a nucleic acid molecule comprising the nucleic acid SEQ ID NO. 15532, preferably the coding region thereof, or a homolog or fragment thereof, e.g. derived from Brassica napus, is increased or generated. For example the activity of a nucleic acid molecule or a polypeptide comprising the nucleic acid, preferably the coding region thereof, or polypeptide or the consensus sequence or the polypeptide motif, as depicted in Table I, II or IV, application No. 15, column 5 or 8 in the respective same line as the nucleic acid molecule SEQ ID NO. 15532 or polypeptide SEQ ID NO. 15533, respectively, or a homolog or a fragment thereof, is increased or generated, or if the activity pyruvate kinase is increased or generated in a non-human organism, like a microorganism or a plant cell, plant or part thereof, especially with plastidic localization, whereby the respective line disclose in column 7 the fine chemical citramalate. For example, an increase of the citramalate of at least 1 percent, particularly in a range of 49 to 420-percent is conferred as compared to a corresponding non-transformed wild type non-human organism.

[73418] Accordingly, in one embodiment, an increase of succinate in a non-human organism, as compared to a corresponding non-transformed wild type non-human organism, is conferred in the process of the invention, if the activity of a polypeptide showing the activity of a pyruvate kinase, or if the activity of the polypeptide 51340801_CANOLA, preferably represented by SEQ ID NO. 15533, or a homolog or fragment thereof, or if the activity of a polypeptide encoded by a nucleic acid molecule comprising the nucleic acid SEQ ID NO. 15532, preferably the coding region thereof, or a homolog or fragment thereof, e.g. derived from Brassica napus, is increased or generated. For example the activity of a nucleic acid molecule or a polypeptide comprising the nucleic acid, preferably the coding region thereof, or polypeptide or the consensus sequence or the polypeptide motif, as depicted in Table I, II or IV, application No. 15, column 5 or 8 in the respective same line as the nucleic acid molecule SEQ ID NO. 15532 or polypeptide SEQ ID NO. 15533, respectively, or a homolog or a fragment thereof, is increased or generated, or if the activity pyruvate kinase is increased or generated in a non-human organism, like a microorganism or a plant cell, plant or part thereof, especially with plastidic localization, whereby the respective line disclose in column 7 the fine chemical succinate. For example, an increase of the succinate of at least 1 percent, particularly in a range of 31 to 210-percent is conferred as compared to a corresponding non-transformed wild type non-human organism.

[73419] Accordingly, in one embodiment, an increase of citramalate in a non-human organism, as compared to a corresponding non-transformed wild type non-human organism, is conferred in the process of the invention, if the activity of a polypeptide showing the activity of a glucose-6-phosphate 1-dehydrogenase, or if the activity of the polypeptide 59582753_SOYBEAN, preferably represented by SEQ ID NO. 16884, or a homolog or fragment thereof, or if the activity of a polypeptide encoded by a nucleic acid molecule comprising the nucleic acid SEQ ID NO. 16883, preferably the coding region thereof, or a homolog or fragment thereof, e.g. derived from Glycine max, is increased or generated. For example the activity of a nucleic acid molecule or a polypeptide comprising the nucleic acid, preferably the coding region thereof, or polypeptide or the consensus sequence or the polypeptide motif, as depicted in Table I, II or IV, application No. 15, column 5 or 8 in the respective same line as the nucleic acid molecule SEQ ID NO. 16883 or polypeptide SEQ ID NO. 16884, respectively, or a homolog or a fragment thereof, is increased or generated, or if the activity glucose-6-phosphate 1-dehydrogenase is increased or generated in a non-human organism, like a microorganism or a plant cell, plant or part thereof, especially with plastidic localization, whereby the respective line disclose in column 7 the fine chemical citramalate. For example, an increase of the citramalate of at least 1 percent, particularly in a range of 70 to 246-percent is conferred as compared to a corresponding non-transformed wild type non-human organism.

[73420] [0096.1.7.15] to [0103.1.7.15] for the disclosure of these paragraphs see [0096.1.7.7] to [0103.1.7.7] above

[73421] In this paragraph “A” means “Goffeau et al., Science 274 (5287), 546 (1996)”, “B” means “Blattner et al., Science 277 (5331), 1453 (1997)”, “C” means “Nakamura et al., Nucleic Acids Res. 28(1), 72 (2000)”, “D” means “deposition of the sequences to the EMBL/GenBank/DDBJ databases under “Sequencing of the draft genome assembly of Azotobacter vinelandii AvOP”. in June 2005 by Copeland et al.”, “E” means “Henne et al., Nat. Biotechnol. 22 (5), 547 (2004)”, “F” means “Kaul et al., Nature 408 (6814), 796 (2000)”, and “G” means “Matsumoto et al., Nature 436 (7052), 793 (2005)”.

[73422] The nucleic acid sequence of At1g07430 from Arabidopsis thaliana, e.g. as shown in the respective line in column 5 of Table I, application no. 15, has been published in F. And the activity of the gene product thereof is the activity of protein phosphatase.

[73423] Accordingly, in one embodiment, the process of the present invention for producing succinate in a non-human organism, like a microorganism or a plant or a part thereof, comprises increasing or generating the activity of a gene product with the activity of a gene product conferring the activity of “protein phosphatase”, especially from Arabidopsis thaliana or its functional equivalent or its homolog, e.g. the increase of
[73424] (a) a gene product of a gene comprising the nucleic acid molecule as shown in the respective line in column 5 of Table I (whereby the respective line disclose in column 7 the fine chemical succinate), application no. 15, preferably the coding region thereof, or a homolog or a fragment thereof, and being depicted in the same respective line as said At1g07430, or a functional equivalent or a homolog thereof as shown in column 8 of Table I, application no. 15, preferably the coding region thereof, particularly a homolog or functional equivalent as shown in column 8 of Table I B, application no. 15, and being depicted in the same respective line as said At1g07430, and preferably the activity is increased non-targeted, or
[73425] (b) a polypeptide comprising a polypeptide, a consensus sequence or at least a polypeptide motif as shown in the respective line in column 5 of Table II or in column 8 of Table IV, application no. 15, respectively, and being depicted in the same respective line as said At1g07430, or a functional equivalent or a homolog thereof as depicted in column 8 of Table II, application no. 15, preferably a homolog or functional equivalent as depicted in column 8 of Table II B, application no. 15, and being depicted in the same respective line as said At1g07430, and preferably the activity is increased non-targeted, whereby the respective line disclose in column 7 the fine chemical succinate.

[73426] Accordingly, in one embodiment, the molecule which activity is to be increased in the process of the invention is the gene product with an activity as a “protein phosphatase”, preferably it is the molecule of section (a) or (b) of this paragraph.

[73427] In particular, it was observed that in plants, especially in Arabidopsis thaliana, increasing or generating the activity of a gene product non-targeted with the activity of a “protein phosphatase”, preferably being encoded by a gene comprising the nucleic acid sequence SEQ ID NO. 17451, preferably the coding region thereof, conferred the production of or the increase in succinate compared with the wild type control.

[73428] The nucleic acid sequence of At1g13930 from Arabidopsis thaliana, e.g. as shown in the respective line in column 5 of Table I, application no. 15, has been published in F. And the activity of the gene product thereof is the activity of At1g13930-protein.

[73429] Accordingly, in one embodiment, the process of the present invention for producing malate in a non-human organism, like a microorganism or a plant or a part thereof, comprises increasing or generating the activity of a gene product with the activity of a gene product conferring the activity of “At1g13930-protein”, especially from Arabidopsis thaliana or its functional equivalent or its homolog, e.g. the increase of
[73430] (a) a gene product of a gene comprising the nucleic acid molecule as shown in the respective line in column 5 of Table I (whereby the respective line disclose in column 7 the fine chemical malate), application no. 15, preferably the coding region thereof, or a homolog or a fragment thereof, and being depicted in the same respective line as said At1g13930, or a functional equivalent or a homolog thereof as shown in column 8 of Table I, application no. 15, preferably the coding region thereof, particularly a homolog or functional equivalent as shown in column 8 of Table I B, application no. 15, and being depicted in the same respective line as said At1g13930, and preferably the activity is increased non-targeted, or
[73431] (b) a polypeptide comprising a polypeptide, a consensus sequence or at least a polypeptide motif as shown in the respective line in column 5 of Table II or in column 8 of Table IV, application no. 15, respectively, and being depicted in the same respective line as said At1g13930, or a functional equivalent or a homolog thereof as depicted in column 8 of Table II, application no. 15, preferably a homolog or functional equivalent as depicted in column 8 of Table II B, application no. 15, and being depicted in the same respective line as said At1g13930, and preferably the activity is increased non-targeted, whereby the respective line disclose in column 7 the fine chemical malate.

[73432] Accordingly, in one embodiment, the molecule which activity is to be increased in the process of the invention is the gene product with an activity as a “At1g13930-protein”, preferably it is the molecule of section (a) or (b) of this paragraph.

[73433] In particular, it was observed that in plants, especially in Arabidopsis thaliana, increasing or generating the activity of a gene product non-targeted with the activity of a “At1g13930-protein”, preferably being encoded by a gene comprising the nucleic acid sequence SEQ ID NO. 133001, preferably the coding region thereof, conferred the production of or the increase in malate compared with the wild type control.

[73434] The nucleic acid sequence of At1g13930 from Arabidopsis thaliana, e.g. as shown in the respective line in column 5 of Table I, application no. 15, has been published in F. And the activity of the gene product thereof is the activity of At1g13930-protein.

[73435] Accordingly, in one embodiment, the process of the present invention for producing succinate in a non-human organism, like a microorganism or a plant or a part thereof, comprises increasing or generating the activity of a gene product with the activity of a gene product conferring the activity of “At1g13930-protein”, especially from Arabidopsis thaliana or its functional equivalent or its homolog, e.g. the increase of
[73436] (a) a gene product of a gene comprising the nucleic acid molecule as shown in the respective line in column 5 of Table I (whereby the respective line disclose in column 7 the fine chemical succinate), application no. 15, preferably the coding region thereof, or a homolog or a fragment thereof, and being depicted in the same respective line as said At1g13930, or a functional equivalent or a homolog thereof as shown in column 8 of Table I, application no. 15, preferably the coding region thereof, particularly a homolog or functional equivalent as shown in column 8 of Table I B, application no. 15, and being depicted in the same respective line as said At1g13930, and preferably the activity is increased non-targeted, or
[73437] (b) a polypeptide comprising a polypeptide, a consensus sequence or at least a polypeptide motif as shown in the respective line in column 5 of Table II or in column 8 of Table IV, application no. 15, respectively, and being depicted in the same respective line as said At1g13930, or a functional equivalent or a homolog thereof as depicted in column 8 of Table II, application no. 15, preferably a homolog or functional equivalent as depicted in column 8 of Table II B, application no. 15, and being depicted in the same respective line as said At1g13930, and preferably the activity is increased non-targeted, whereby the respective line disclose in column 7 the fine chemical succinate.

[73438] Accordingly, in one embodiment, the molecule which activity is to be increased in the process of the invention is the gene product with an activity as a “At1g13930-protein”, preferably it is the molecule of section (a) or (b) of this paragraph.

[73439] In particular, it was observed that in plants, especially in Arabidopsis thaliana, increasing or generating the activity of a gene product non-targeted with the activity of a “At1g13930-protein”, preferably being encoded by a gene comprising the nucleic acid sequence SEQ ID NO. 133001, preferably the coding region thereof, conferred the production of or the increase in succinate compared with the wild type control.

[73440] The nucleic acid sequence of At1g36730 from Arabidopsis thaliana, e.g. as shown in the respective line in column 5 of Table I, application no. 15, has been published in F. And the activity of the gene product thereof is the activity of eukaryotic translation initiation factor 5.

[73441] Accordingly, in one embodiment, the process of the present invention for producing malate in a non-human organism, like a microorganism or a plant or a part thereof, comprises increasing or generating the activity of a gene product with the activity of a gene product conferring the activity of “eukaryotic translation initiation factor 5”, especially from Arabidopsis thaliana or its functional equivalent or its homolog, e.g. the increase of
[73442] (a) a gene product of a gene comprising the nucleic acid molecule as shown in the respective line in column 5 of Table I (whereby the respective line disclose in column 7 the fine chemical malate), application no. 15, preferably the coding region thereof, or a homolog or a fragment thereof, and being depicted in the same respective line as said At1g36730, or a functional equivalent or a homolog thereof as shown in column 8 of Table I, application no. 15, preferably the coding region thereof, particularly a homolog or functional equivalent as shown in column 8 of Table I B, application no. 15, and being depicted in the same respective line as said At1g36730, and preferably the activity is increased non-targeted, or
[73443] (b) a polypeptide comprising a polypeptide, a consensus sequence or at least a polypeptide motif as shown in the respective line in column 5 of Table II or in column 8 of Table IV, application no. 15, respectively, and being depicted in the same respective line as said At1g36730, or a functional equivalent or a homolog thereof as depicted in column 8 of Table II, application no. 15, preferably a homolog or functional equivalent as depicted in column 8 of Table II B, application no. 15, and being depicted in the same respective line as said At1g36730, and preferably the activity is increased non-targeted, whereby the respective line disclose in column 7 the fine chemical malate.

[73444] Accordingly, in one embodiment, the molecule which activity is to be increased in the process of the invention is the gene product with an activity as a “eukaryotic translation initiation factor 5”, preferably it is the molecule of section (a) or (b) of this paragraph.

[73445] In particular, it was observed that in plants, especially in Arabidopsis thaliana, increasing or generating the activity of a gene product non-targeted with the activity of a “eukaryotic translation initiation factor 5”, preferably being encoded by a gene comprising the nucleic acid sequence SEQ ID NO. 17968, preferably the coding region thereof, conferred the production of or the increase in malate compared with the wild type control.

[73446] The nucleic acid sequence of At1g36730 from Arabidopsis thaliana, e.g. as shown in the respective line in column 5 of Table I, application no. 15, has been published in F. And the activity of the gene product thereof is the activity of eukaryotic translation initiation factor 5.

[73447] Accordingly, in one embodiment, the process of the present invention for producing vitamin c and/or threonic acid in a non-human organism, like a microorganism or a plant or a part thereof, comprises increasing or generating the activity of a gene product with the activity of a gene product conferring the activity of “eukaryotic translation initiation factor 5”, especially from Arabidopsis thaliana or its functional equivalent or its homolog, e.g. the increase of
[73448] (a) a gene product of a gene comprising the nucleic acid molecule as shown in the respective line in column 5 of Table I (whereby the respective line disclose in column 7 the fine chemical vitamin c and/or threonic acid), application no. 15, preferably the coding region thereof, or a homolog or a fragment thereof, and being depicted in the same respective line as said At1g36730, or a functional equivalent or a homolog thereof as shown in column 8 of Table I, application no. 15, preferably the coding region thereof, particularly a homolog or functional equivalent as shown in column 8 of Table I B, application no. 15, and being depicted in the same respective line as said At1g36730, and preferably the activity is increased non-targeted, or
[73449] (b) a polypeptide comprising a polypeptide, a consensus sequence or at least a polypeptide motif as shown in the respective line in column 5 of Table II or in column 8 of Table IV, application no. 15, respectively, and being depicted in the same respective line as said At1g36730, or a functional equivalent or a homolog thereof as depicted in column 8 of Table II, application no. 15, preferably a homolog or functional equivalent as depicted in column 8 of Table II B, application no. 15, and being depicted in the same respective line as said At1g36730, and preferably the activity is increased non-targeted, whereby the respective line disclose in column 7 the fine chemical vitamin c and/or threonic acid.

[73450] Accordingly, in one embodiment, the molecule which activity is to be increased in the process of the invention is the gene product with an activity as a “eukaryotic translation initiation factor 5”, preferably it is the molecule of section (a) or (b) of this paragraph.

[73451] In particular, it was observed that in plants, especially in Arabidopsis thaliana, increasing or generating the activity of a gene product non-targeted with the activity of a “eukaryotic translation initiation factor 5”, preferably being encoded by a gene comprising the nucleic acid sequence SEQ ID NO. 17968, preferably the coding region thereof, conferred the production of or the increase in vitamin c and/or threonic acid compared with the wild type control.

[73452] The nucleic acid sequence of At1g43850 from Arabidopsis thaliana, e.g. as shown in the respective line in column 5 of Table I, application no. 15, has been published in F. And the activity of the gene product thereof is the activity of transcriptional regulator.

[73453] Accordingly, in one embodiment, the process of the present invention for producing fumarate in a non-human organism, like a microorganism or a plant or a part thereof, comprises increasing or generating the activity of a gene product with the activity of a gene product conferring the activity of “transcriptional regulator”, especially from Arabidopsis thaliana or its functional equivalent or its homolog, e.g. the increase of
[73454] (a) a gene product of a gene comprising the nucleic acid molecule as shown in the respective line in column 5 of Table I (whereby the respective line disclose in column 7 the fine chemical fumarate), application no. 15, preferably the coding region thereof, or a homolog or a fragment thereof, and being depicted in the same respective line as said At1g43850, or a functional equivalent or a homolog thereof as shown in column 8 of Table I, application no. 15, preferably the coding region thereof, particularly a homolog or functional equivalent as shown in column 8 of Table I B, application no. 15, and being depicted in the same respective line as said At1g43850, and preferably the activity is increased non-targeted, or
[73455] (b) a polypeptide comprising a polypeptide, a consensus sequence or at least a polypeptide motif as shown in the respective line in column 5 of Table II or in column 8 of Table IV, application no. 15, respectively, and being depicted in the same respective line as said At1g43850, or a functional equivalent or a homolog thereof as depicted in column 8 of Table II, application no. 15, preferably a homolog or functional equivalent as depicted in column 8 of Table II B, application no. 15, and being depicted in the same respective line as said At1g43850, and preferably the activity is increased non-targeted, whereby the respective line disclose in column 7 the fine chemical fumarate.

[73456] Accordingly, in one embodiment, the molecule which activity is to be increased in the process of the invention is the gene product with an activity as a “transcriptional regulator”, preferably it is the molecule of section (a) or (b) of this paragraph.

[73457] In particular, it was observed that in plants, especially in Arabidopsis thaliana, increasing or generating the activity of a gene product non-targeted with the activity of a “transcriptional regulator”, preferably being encoded by a gene comprising the nucleic acid sequence SEQ ID NO. 18070, preferably the coding region thereof, conferred the production of or the increase in fumarate compared with the wild type control.

[73458] The nucleic acid sequence of At1g48040 from Arabidopsis thaliana, e.g. as shown in the respective line in column 5 of Table I, application no. 15, has been published in F. And the activity of the gene product thereof is the activity of protein phosphatase.

[73459] Accordingly, in one embodiment, the process of the present invention for producing fumarate in a non-human organism, like a microorganism or a plant or a part thereof, comprises increasing or generating the activity of a gene product with the activity of a gene product conferring the activity of “protein phosphatase”, especially from Arabidopsis thaliana or its functional equivalent or its homolog, e.g. the increase of
[73460] (a) a gene product of a gene comprising the nucleic acid molecule as shown in the respective line in column 5 of Table I (whereby the respective line disclose in column 7 the fine chemical fumarate), application no. 15, preferably the coding region thereof, or a homolog or a fragment thereof, and being depicted in the same respective line as said At1g48040, or a functional equivalent or a homolog thereof as shown in column 8 of Table I, application no. 15, preferably the coding region thereof, particularly a homolog or functional equivalent as shown in column 8 of Table I B, application no. 15, and being depicted in the same respective line as said At1g48040, and preferably the activity is increased non-targeted, or
[73461] (b) a polypeptide comprising a polypeptide, a consensus sequence or at least a polypeptide motif as shown in the respective line in column 5 of Table II or in column 8 of Table IV, application no. 15, respectively, and being depicted in the same respective line as said At1g48040, or a functional equivalent or a homolog thereof as depicted in column 8 of Table II, application no. 15, preferably a homolog or functional equivalent as depicted in column 8 of Table II B, application no. 15, and being depicted in the same respective line as said At1g48040, and preferably the activity is increased non-targeted, whereby the respective line disclose in column 7 the fine chemical fumarate.

[73462] Accordingly, in one embodiment, the molecule which activity is to be increased in the process of the invention is the gene product with an activity as a “protein phosphatase”, preferably it is the molecule of section (a) or (b) of this paragraph.

[73463] In particular, it was observed that in plants, especially in Arabidopsis thaliana, increasing or generating the activity of a gene product non-targeted with the activity of a “protein phosphatase”, preferably being encoded by a gene comprising the nucleic acid sequence SEQ ID NO. 812, preferably the coding region thereof, conferred the production of or the increase in fumarate compared with the wild type control.

[73464] The nucleic acid sequence of At1g72770 from Arabidopsis thaliana, e.g. as shown in the respective line in column 5 of Table I, application no. 15, has been published in F. And the activity of the gene product thereof is the activity of protein phosphatase.

[73465] Accordingly, in one embodiment, the process of the present invention for producing vitamin c and/or threonic acid in a non-human organism, like a microorganism or a plant or a part thereof, comprises increasing or generating the activity of a gene product with the activity of a gene product conferring the activity of “protein phosphatase”, especially from Arabidopsis thaliana or its functional equivalent or its homolog, e.g. the increase of
[73466] (a) a gene product of a gene comprising the nucleic acid molecule as shown in the respective line in column 5 of Table I (whereby the respective line disclose in column 7 the fine chemical vitamin c and/or threonic acid), application no. 15, preferably the coding region thereof, or a homolog or a fragment thereof, and being depicted in the same respective line as said At1g72770, or a functional equivalent or a homolog thereof as shown in column 8 of Table I, application no. 15, preferably the coding region thereof, particularly a homolog or functional equivalent as shown in column 8 of Table I B, application no. 15, and being depicted in the same respective line as said At1g72770, and preferably the activity is increased non-targeted, or
[73467] (b) a polypeptide comprising a polypeptide, a consensus sequence or at least a polypeptide motif as shown in the respective line in column 5 of Table II or in column 8 of Table IV, application no. 15, respectively, and being depicted in the same respective line as said At1g72770, or a functional equivalent or a homolog thereof as depicted in column 8 of Table II, application no. 15, preferably a homolog or functional equivalent as depicted in column 8 of Table II B, application no. 15, and being depicted in the same respective line as said At1g72770, and preferably the activity is increased non-targeted, whereby the respective line disclose in column 7 the fine chemical vitamin c and/or threonic acid.

[73468] Accordingly, in one embodiment, the molecule which activity is to be increased in the process of the invention is the gene product with an activity as a “protein phosphatase”, preferably it is the molecule of section (a) or (b) of this paragraph.

[73469] In particular, it was observed that in plants, especially in Arabidopsis thaliana, increasing or generating the activity of a gene product non-targeted with the activity of a “protein phosphatase”, preferably being encoded by a gene comprising the nucleic acid sequence SEQ ID NO. 19419, preferably the coding region thereof, conferred the production of or the increase in vitamin c and/or threonic acid compared with the wild type control.

[73470] The nucleic acid sequence of At2g30360 from Arabidopsis thaliana, e.g. as shown in the respective line in column 5 of Table I, application no. 15, has been published in F. And the activity of the gene product thereof is the activity of CBL-interacting protein kinase.

[73471] Accordingly, in one embodiment, the process of the present invention for producing fumarate in a non-human organism, like a microorganism or a plant or a part thereof, comprises increasing or generating the activity of a gene product with the activity of a gene product conferring the activity of “CBL-interacting protein kinase”, especially from Arabidopsis thaliana or its functional equivalent or its homolog, e.g. the increase of
[73472] (a) a gene product of a gene comprising the nucleic acid molecule as shown in the respective line in column 5 of Table I (whereby the respective line disclose in column 7 the fine chemical fumarate), application no. 15, preferably the coding region thereof, or a homolog or a fragment thereof, and being depicted in the same respective line as said At2g30360, or a functional equivalent or a homolog thereof as shown in column 8 of Table I, application no. 15, preferably the coding region thereof, particularly a homolog or functional equivalent as shown in column 8 of Table I B, application no. 15, and being depicted in the same respective line as said At2g30360, and preferably the activity is increased non-targeted, or
[73473] (b) a polypeptide comprising a polypeptide, a consensus sequence or at least a polypeptide motif as shown in the respective line in column 5 of Table II or in column 8 of Table IV, application no. 15, respectively, and being depicted in the same respective line as said At2g30360, or a functional equivalent or a homolog thereof as depicted in column 8 of Table II, application no. 15, preferably a homolog or functional equivalent as depicted in column 8 of Table II B, application no. 15, and being depicted in the same respective line as said At2g30360, and preferably the activity is increased non-targeted, whereby the respective line disclose in column 7 the fine chemical fumarate.

[73474] Accordingly, in one embodiment, the molecule which activity is to be increased in the process of the invention is the gene product with an activity as a “CBL-interacting protein kinase”, preferably it is the molecule of section (a) or (b) of this paragraph.

[73475] In particular, it was observed that in plants, especially in Arabidopsis thaliana, increasing or generating the activity of a gene product non-targeted with the activity of a “CBL-interacting protein kinase”, preferably being encoded by a gene comprising the nucleic acid sequence SEQ ID NO. 19919, preferably the coding region thereof, conferred the production of or the increase in fumarate compared with the wild type control.

[73476] The nucleic acid sequence of At2g30360 from Arabidopsis thaliana, e.g. as shown in the respective line in column 5 of Table I, application no. 15, has been published in F. And the activity of the gene product thereof is the activity of CBL-interacting protein kinase.

[73477] Accordingly, in one embodiment, the process of the present invention for producing malate in a non-human organism, like a microorganism or a plant or a part thereof, comprises increasing or generating the activity of a gene product with the activity of a gene product conferring the activity of “CBL-interacting protein kinase”, especially from Arabidopsis thaliana or its functional equivalent or its homolog, e.g. the increase of
[73478] (a) a gene product of a gene comprising the nucleic acid molecule as shown in the respective line in column 5 of Table I (whereby the respective line disclose in column 7 the fine chemical malate), application no. 15, preferably the coding region thereof, or a homolog or a fragment thereof, and being depicted in the same respective line as said At2g30360, or a functional equivalent or a homolog thereof as shown in column 8 of Table I, application no. 15, preferably the coding region thereof, particularly a homolog or functional equivalent as shown in column 8 of Table I B, application no. 15, and being depicted in the same respective line as said At2g30360, and preferably the activity is increased non-targeted, or
[73479] (b) a polypeptide comprising a polypeptide, a consensus sequence or at least a polypeptide motif as shown in the respective line in column 5 of Table II or in column 8 of Table IV, application no. 15, respectively, and being depicted in the same respective line as said At2g30360, or a functional equivalent or a homolog thereof as depicted in column 8 of Table II, application no. 15, preferably a homolog or functional equivalent as depicted in column 8 of Table II B, application no. 15, and being depicted in the same respective line as said At2g30360, and preferably the activity is increased non-targeted, whereby the respective line disclose in column 7 the fine chemical malate.

[73480] Accordingly, in one embodiment, the molecule which activity is to be increased in the process of the invention is the gene product with an activity as a “CBL-interacting protein kinase”, preferably it is the molecule of section (a) or (b) of this paragraph.

[73481] In particular, it was observed that in plants, especially in Arabidopsis thaliana, increasing or generating the activity of a gene product non-targeted with the activity of a “CBL-interacting protein kinase”, preferably being encoded by a gene comprising the nucleic acid sequence SEQ ID NO. 19919, preferably the coding region thereof, conferred the production of or the increase in malate compared with the wild type control.

[73482] The nucleic acid sequence of At2g30360 from Arabidopsis thaliana, e.g. as shown in the respective line in column 5 of Table I, application no. 15, has been published in F. And the activity of the gene product thereof is the activity of CBL-interacting protein kinase.

[73483] Accordingly, in one embodiment, the process of the present invention for producing succinate in a non-human organism, like a microorganism or a plant or a part thereof, comprises increasing or generating the activity of a gene product with the activity of a gene product conferring the activity of “CBL-interacting protein kinase”, especially from Arabidopsis thaliana or its functional equivalent or its homolog, e.g. the increase of
[73484] (a) a gene product of a gene comprising the nucleic acid molecule as shown in the respective line in column 5 of Table I (whereby the respective line disclose in column 7 the fine chemical succinate), application no. 15, preferably the coding region thereof, or a homolog or a fragment thereof, and being depicted in the same respective line as said At2g30360, or a functional equivalent or a homolog thereof as shown in column 8 of Table I, application no. 15, preferably the coding region thereof, particularly a homolog or functional equivalent as shown in column 8 of Table I B, application no. 15, and being depicted in the same respective line as said At2g30360, and preferably the activity is increased non-targeted, or
[73485] (b) a polypeptide comprising a polypeptide, a consensus sequence or at least a polypeptide motif as shown in the respective line in column 5 of Table II or in column 8 of Table IV, application no. 15, respectively, and being depicted in the same respective line as said At2g30360, or a functional equivalent or a homolog thereof as depicted in column 8 of Table II, application no. 15, preferably a homolog or functional equivalent as depicted in column 8 of Table II B, application no. 15, and being depicted in the same respective line as said At2g30360, and preferably the activity is increased non-targeted, whereby the respective line disclose in column 7 the fine chemical succinate.

[73486] Accordingly, in one embodiment, the molecule which activity is to be increased in the process of the invention is the gene product with an activity as a “CBL-interacting protein kinase”, preferably it is the molecule of section (a) or (b) of this paragraph.

[73487] In particular, it was observed that in plants, especially in Arabidopsis thaliana, increasing or generating the activity of a gene product non-targeted with the activity of a “CBL-interacting protein kinase”, preferably being encoded by a gene comprising the nucleic acid sequence SEQ ID NO. 19919, preferably the coding region thereof, conferred the production of or the increase in succinate compared with the wild type control.

[73488] The nucleic acid sequence of At2g37040 from Arabidopsis thaliana, e.g. as shown in the respective line in column 5 of Table I, application no. 15, has been published in F. And the activity of the gene product thereof is the activity of phenylalanine ammonia-lyase.

[73489] Accordingly, in one embodiment, the process of the present invention for producing fumarate in a non-human organism, like a microorganism or a plant or a part thereof, comprises increasing or generating the activity of a gene product with the activity of a gene product conferring the activity of “phenylalanine ammonia-lyase”, especially from Arabidopsis thaliana or its functional equivalent or its homolog, e.g. the increase of
[73490] (a) a gene product of a gene comprising the nucleic acid molecule as shown in the respective line in column 5 of Table I (whereby the respective line disclose in column 7 the fine chemical fumarate), application no. 15, preferably the coding region thereof, or a homolog or a fragment thereof, and being depicted in the same respective line as said At2g37040, or a functional equivalent or a homolog thereof as shown in column 8 of Table I, application no. 15, preferably the coding region thereof, particularly a homolog or functional equivalent as shown in column 8 of Table I B, application no. 15, and being depicted in the same respective line as said At2g37040, and preferably the activity is increased non-targeted, or
[73491] (b) a polypeptide comprising a polypeptide, a consensus sequence or at least a polypeptide motif as shown in the respective line in column 5 of Table II or in column 8 of Table IV, application no. 15, respectively, and being depicted in the same respective line as said At2g37040, or a functional equivalent or a homolog thereof as depicted in column 8 of Table II, application no. 15, preferably a homolog or functional equivalent as depicted in column 8 of Table II B, application no. 15, and being depicted in the same respective line as said At2g37040, and preferably the activity is increased non-targeted, whereby the respective line disclose in column 7 the fine chemical fumarate.

[73492] Accordingly, in one embodiment, the molecule which activity is to be increased in the process of the invention is the gene product with an activity as a “phenylalanine ammonia-lyase”, preferably it is the molecule of section (a) or (b) of this paragraph.

[73493] In particular, it was observed that in plants, especially in Arabidopsis thaliana, increasing or generating the activity of a gene product non-targeted with the activity of a “phenylalanine ammonia-lyase”, preferably being encoded by a gene comprising the nucleic acid sequence SEQ ID NO. 133042, preferably the coding region thereof, conferred the production of or the increase in fumarate compared with the wild type control.

[73494] The nucleic acid sequence of At2g41680 from Arabidopsis thaliana, e.g. as shown in the respective line in column 5 of Table I, application no. 15, has been published in F. And the activity of the gene product thereof is the activity of thioredoxin reductase.

[73495] Accordingly, in one embodiment, the process of the present invention for producing succinate in a non-human organism, like a microorganism or a plant or a part thereof, comprises increasing or generating the activity of a gene product with the activity of a gene product conferring the activity of “thioredoxin reductase”, especially from Arabidopsis thaliana or its functional equivalent or its homolog, e.g. the increase of
[73496] (a) a gene product of a gene comprising the nucleic acid molecule as shown in the respective line in column 5 of Table I (whereby the respective line disclose in column 7 the fine chemical succinate), application no. 15, preferably the coding region thereof, or a homolog or a fragment thereof, and being depicted in the same respective line as said At2g41680, or a functional equivalent or a homolog thereof as shown in column 8 of Table I, application no. 15, preferably the coding region thereof, particularly a homolog or functional equivalent as shown in column 8 of Table I B, application no. 15, and being depicted in the same respective line as said At2g41680, and preferably the activity is increased non-targeted, or
[73497] (b) a polypeptide comprising a polypeptide, a consensus sequence or at least a polypeptide motif as shown in the respective line in column 5 of Table II or in column 8 of Table IV, application no. 15, respectively, and being depicted in the same respective line as said At2g41680, or a functional equivalent or a homolog thereof as depicted in column 8 of Table II, application no. 15, preferably a homolog or functional equivalent as depicted in column 8 of Table II B, application no. 15, and being depicted in the same respective line as said At2g41680, and preferably the activity is increased non-targeted, whereby the respective line disclose in column 7 the fine chemical succinate.

[73498] Accordingly, in one embodiment, the molecule which activity is to be increased in the process of the invention is the gene product with an activity as a “thioredoxin reductase”, preferably it is the molecule of section (a) or (b) of this paragraph.

[73499] In particular, it was observed that in plants, especially in Arabidopsis thaliana, increasing or generating the activity of a gene product non-targeted with the activity of a “thioredoxin reductase”, preferably being encoded by a gene comprising the nucleic acid sequence SEQ ID NO. 133349, preferably the coding region thereof, conferred the production of or the increase in succinate compared with the wild type control.

[73500] The nucleic acid sequence of At2g44350 from Arabidopsis thaliana, e.g. as shown in the respective line in column 5 of Table I, application no. 15, has been published in F. And the activity of the gene product thereof is the activity of citrate synthase.

[73501] Accordingly, in one embodiment, the process of the present invention for producing succinate in a non-human organism, like a microorganism or a plant or a part thereof, comprises increasing or generating the activity of a gene product with the activity of a gene product conferring the activity of “citrate synthase”, especially from Arabidopsis thaliana or its functional equivalent or its homolog, e.g. the increase of
[73502] (a) a gene product of a gene comprising the nucleic acid molecule as shown in the respective line in column 5 of Table I (whereby the respective line disclose in column 7 the fine chemical succinate), application no. 15, preferably the coding region thereof, or a homolog or a fragment thereof, and being depicted in the same respective line as said At2g44350, or a functional equivalent or a homolog thereof as shown in column 8 of Table I, application no. 15, preferably the coding region thereof, particularly a homolog or functional equivalent as shown in column 8 of Table I B, application no. 15, and being depicted in the same respective line as said At2g44350, and preferably the activity is increased plastidic, or
[73503] (b) a polypeptide comprising a polypeptide, a consensus sequence or at least a polypeptide motif as shown in the respective line in column 5 of Table II or in column 8 of Table IV, application no. 15, respectively, and being depicted in the same respective line as said At2g44350, or a functional equivalent or a homolog thereof as depicted in column 8 of Table II, application no. 15, preferably a homolog or functional equivalent as depicted in column 8 of Table II B, application no. 15, and being depicted in the same respective line as said At2g44350, and preferably the activity is increased plastidic, whereby the respective line disclose in column 7 the fine chemical succinate.

[73504] Accordingly, in one embodiment, the molecule which activity is to be increased in the process of the invention is the gene product with an activity as a “citrate synthase”, preferably it is the molecule of section (a) or (b) of this paragraph.

[73505] In particular, it was observed that in plants, especially in Arabidopsis thaliana, increasing or generating the activity of a gene product plastidic with the activity of a “citrate synthase”, preferably being encoded by a gene comprising the nucleic acid sequence SEQ ID NO. 120810, preferably the coding region thereof, conferred the production of or the increase in succinate compared with the wild type control.

[73506] The nucleic acid sequence of At3g04050 from Arabidopsis thaliana, e.g. as shown in the respective line in column 5 of Table I, application no. 15, has been published in F. And the activity of the gene product thereof is the activity of pyruvate kinase.

[73507] Accordingly, in one embodiment, the process of the present invention for producing citramalate in a non-human organism, like a microorganism or a plant or a part thereof, comprises increasing or generating the activity of a gene product with the activity of a gene product conferring the activity of “pyruvate kinase”, especially from Arabidopsis thaliana or its functional equivalent or its homolog, e.g. the increase of
[73508] (a) a gene product of a gene comprising the nucleic acid molecule as shown in the respective line in column 5 of Table I (whereby the respective line disclose in column 7 the fine chemical citramalate), application no. 15, preferably the coding region thereof, or a homolog or a fragment thereof, and being depicted in the same respective line as said At3g04050, or a functional equivalent or a homolog thereof as shown in column 8 of Table I, application no. 15, preferably the coding region thereof, particularly a homolog or functional equivalent as shown in column 8 of Table I B, application no. 15, and being depicted in the same respective line as said At3g04050, and preferably the activity is increased plastidic, or
[73509] (b) a polypeptide comprising a polypeptide, a consensus sequence or at least a polypeptide motif as shown in the respective line in column 5 of Table II or in column 8 of Table IV, application no. 15, respectively, and being depicted in the same respective line as said At3g04050, or a functional equivalent or a homolog thereof as depicted in column 8 of Table II, application no. 15, preferably a homolog or functional equivalent as depicted in column 8 of Table II B, application no. 15, and being depicted in the same respective line as said At3g04050, and preferably the activity is increased plastidic, whereby the respective line disclose in column 7 the fine chemical citramalate.

[73510] Accordingly, in one embodiment, the molecule which activity is to be increased in the process of the invention is the gene product with an activity as a “pyruvate kinase”, preferably it is the molecule of section (a) or (b) of this paragraph.

[73511] In particular, it was observed that in plants, especially in Arabidopsis thaliana, increasing or generating the activity of a gene product plastidic with the activity of a “pyruvate kinase”, preferably being encoded by a gene comprising the nucleic acid sequence SEQ ID NO. 21497, preferably the coding region thereof, conferred the production of or the increase in citramalate compared with the wild type control.

[73512] The nucleic acid sequence of At3g04050 from Arabidopsis thaliana, e.g. as shown in the respective line in column 5 of Table I, application no. 15, has been published in F. And the activity of the gene product thereof is the activity of pyruvate kinase.

[73513] Accordingly, in one embodiment, the process of the present invention for producing succinate in a non-human organism, like a microorganism or a plant or a part thereof, comprises increasing or generating the activity of a gene product with the activity of a gene product conferring the activity of “pyruvate kinase”, especially from Arabidopsis thaliana or its functional equivalent or its homolog, e.g. the increase of
[73514] (a) a gene product of a gene comprising the nucleic acid molecule as shown in the respective line in column 5 of Table I (whereby the respective line disclose in column 7 the fine chemical succinate), application no. 15, preferably the coding region thereof, or a homolog or a fragment thereof, and being depicted in the same respective line as said At3g04050, or a functional equivalent or a homolog thereof as shown in column 8 of Table I, application no. 15, preferably the coding region thereof, particularly a homolog or functional equivalent as shown in column 8 of Table I B, application no. 15, and being depicted in the same respective line as said At3g04050, and preferably the activity is increased plastidic, or
[73515] (b) a polypeptide comprising a polypeptide, a consensus sequence or at least a polypeptide motif as shown in the respective line in column 5 of Table II or in column 8 of Table IV, application no. 15, respectively, and being depicted in the same respective line as said At3g04050, or a functional equivalent or a homolog thereof as depicted in column 8 of Table II, application no. 15, preferably a homolog or functional equivalent as depicted in column 8 of Table II B, application no. 15, and being depicted in the same respective line as said At3g04050, and preferably the activity is increased plastidic, whereby the respective line disclose in column 7 the fine chemical succinate.

[73516] Accordingly, in one embodiment, the molecule which activity is to be increased in the process of the invention is the gene product with an activity as a “pyruvate kinase”, preferably it is the molecule of section (a) or (b) of this paragraph.

[73517] In particular, it was observed that in plants, especially in Arabidopsis thaliana, increasing or generating the activity of a gene product plastidic with the activity of a “pyruvate kinase”, preferably being encoded by a gene comprising the nucleic acid sequence SEQ ID NO. 21497, preferably the coding region thereof, conferred the production of or the increase in succinate compared with the wild type control.

[73518] The nucleic acid sequence of At3g06270 from Arabidopsis thaliana, e.g. as shown in the respective line in column 5 of Table I, application no. 15, has been published in F. And the activity of the gene product thereof is the activity of protein phosphatase.

[73519] Accordingly, in one embodiment, the process of the present invention for producing malate in a non-human organism, like a microorganism or a plant or a part thereof, comprises increasing or generating the activity of a gene product with the activity of a gene product conferring the activity of “protein phosphatase”, especially from Arabidopsis thaliana or its functional equivalent or its homolog, e.g. the increase of
[73520] (a) a gene product of a gene comprising the nucleic acid molecule as shown in the respective line in column 5 of Table I (whereby the respective line disclose in column 7 the fine chemical malate), application no. 15, preferably the coding region thereof, or a homolog or a fragment thereof, and being depicted in the same respective line as said At3g06270, or a functional equivalent or a homolog thereof as shown in column 8 of Table I, application no. 15, preferably the coding region thereof, particularly a homolog or functional equivalent as shown in column 8 of Table I B, application no. 15, and being depicted in the same respective line as said At3g06270, and preferably the activity is increased non-targeted, or
[73521] (b) a polypeptide comprising a polypeptide, a consensus sequence or at least a polypeptide motif as shown in the respective line in column 5 of Table II or in column 8 of Table IV, application no. 15, respectively, and being depicted in the same respective line as said At3g06270, or a functional equivalent or a homolog thereof as depicted in column 8 of Table II, application no. 15, preferably a homolog or functional equivalent as depicted in column 8 of Table II B, application no. 15, and being depicted in the same respective line as said At3g06270, and preferably the activity is increased non-targeted, whereby the respective line disclose in column 7 the fine chemical malate.

[73522] Accordingly, in one embodiment, the molecule which activity is to be increased in the process of the invention is the gene product with an activity as a “protein phosphatase”, preferably it is the molecule of section (a) or (b) of this paragraph.

[73523] In particular, it was observed that in plants, especially in Arabidopsis thaliana, increasing or generating the activity of a gene product non-targeted with the activity of a “protein phosphatase”, preferably being encoded by a gene comprising the nucleic acid sequence SEQ ID NO. 22015, preferably the coding region thereof, conferred the production of or the increase in malate compared with the wild type control.

[73524] The nucleic acid sequence of At3g06270 from Arabidopsis thaliana, e.g. as shown in the respective line in column 5 of Table I, application no. 15, has been published in F. And the activity of the gene product thereof is the activity of protein phosphatase.

[73525] Accordingly, in one embodiment, the process of the present invention for producing succinate in a non-human organism, like a microorganism or a plant or a part thereof, comprises increasing or generating the activity of a gene product with the activity of a gene product conferring the activity of “protein phosphatase”, especially from Arabidopsis thaliana or its functional equivalent or its homolog, e.g. the increase of
[73526] (a) a gene product of a gene comprising the nucleic acid molecule as shown in the respective line in column 5 of Table I (whereby the respective line disclose in column 7 the fine chemical succinate), application no. 15, preferably the coding region thereof, or a homolog or a fragment thereof, and being depicted in the same respective line as said At3g06270, or a functional equivalent or a homolog thereof as shown in column 8 of Table I, application no. 15, preferably the coding region thereof, particularly a homolog or functional equivalent as shown in column 8 of Table I B, application no. 15, and being depicted in the same respective line as said At3g06270, and preferably the activity is increased non-targeted, or
[73527] (b) a polypeptide comprising a polypeptide, a consensus sequence or at least a polypeptide motif as shown in the respective line in column 5 of Table II or in column 8 of Table IV, application no. 15, respectively, and being depicted in the same respective line as said At3g06270, or a functional equivalent or a homolog thereof as depicted in column 8 of Table II, application no. 15, preferably a homolog or functional equivalent as depicted in column 8 of Table II B, application no. 15, and being depicted in the same respective line as said At3g06270, and preferably the activity is increased non-targeted, whereby the respective line disclose in column 7 the fine chemical succinate.

[73528] Accordingly, in one embodiment, the molecule which activity is to be increased in the process of the invention is the gene product with an activity as a “protein phosphatase”, preferably it is the molecule of section (a) or (b) of this paragraph.

[73529] In particular, it was observed that in plants, especially in Arabidopsis thaliana, increasing or generating the activity of a gene product non-targeted with the activity of a “protein phosphatase”, preferably being encoded by a gene comprising the nucleic acid sequence SEQ ID NO. 22015, preferably the coding region thereof, conferred the production of or the increase in succinate compared with the wild type control.

[73530] The nucleic acid sequence of At3g08710 from Arabidopsis thaliana, e.g. as shown in the respective line in column 5 of Table I, application no. 15, has been published in F. And the activity of the gene product thereof is the activity of thioredoxin family protein.

[73531] Accordingly, in one embodiment, the process of the present invention for producing fumarate in a non-human organism, like a microorganism or a plant or a part thereof, comprises increasing or generating the activity of a gene product with the activity of a gene product conferring the activity of “thioredoxin family protein”, especially from Arabidopsis thaliana or its functional equivalent or its homolog, e.g. the increase of
[73532] (a) a gene product of a gene comprising the nucleic acid molecule as shown in the respective line in column 5 of Table I (whereby the respective line disclose in column 7 the fine chemical fumarate), application no. 15, preferably the coding region thereof, or a homolog or a fragment thereof, and being depicted in the same respective line as said At3g08710, or a functional equivalent or a homolog thereof as shown in column 8 of Table I, application no. 15, preferably the coding region thereof, particularly a homolog or functional equivalent as shown in column 8 of Table I B, application no. 15, and being depicted in the same respective line as said At3g08710, and preferably the activity is increased non-targeted, or
[73533] (b) a polypeptide comprising a polypeptide, a consensus sequence or at least a polypeptide motif as shown in the respective line in column 5 of Table II or in column 8 of Table IV, application no. 15, respectively, and being depicted in the same respective line as said At3g08710, or a functional equivalent or a homolog thereof as depicted in column 8 of Table II, application no. 15, preferably a homolog or functional equivalent as depicted in column 8 of Table II B, application no. 15, and being depicted in the same respective line as said At3g08710, and preferably the activity is increased non-targeted, whereby the respective line disclose in column 7 the fine chemical fumarate.

[73534] Accordingly, in one embodiment, the molecule which activity is to be increased in the process of the invention is the gene product with an activity as a “thioredoxin family protein”, preferably it is the molecule of section (a) or (b) of this paragraph.

[73535] In particular, it was observed that in plants, especially in Arabidopsis thaliana, increasing or generating the activity of a gene product non-targeted with the activity of a “thioredoxin family protein”, preferably being encoded by a gene comprising the nucleic acid sequence SEQ ID NO. 22249, preferably the coding region thereof, conferred the production of or the increase in fumarate compared with the wild type control.

[73536] The nucleic acid sequence of At3g08710 from Arabidopsis thaliana, e.g. as shown in the respective line in column 5 of Table I, application no. 15, has been published in F. And the activity of the gene product thereof is the activity of thioredoxin family protein.

[73537] Accordingly, in one embodiment, the process of the present invention for producing malate in a non-human organism, like a microorganism or a plant or a part thereof, comprises increasing or generating the activity of a gene product with the activity of a gene product conferring the activity of “thioredoxin family protein”, especially from Arabidopsis thaliana or its functional equivalent or its homolog, e.g. the increase of
[73538] (a) a gene product of a gene comprising the nucleic acid molecule as shown in the respective line in column 5 of Table I (whereby the respective line disclose in column 7 the fine chemical malate), application no. 15, preferably the coding region thereof, or a homolog or a fragment thereof, and being depicted in the same respective line as said At3g08710, or a functional equivalent or a homolog thereof as shown in column 8 of Table I, application no. 15, preferably the coding region thereof, particularly a homolog or functional equivalent as shown in column 8 of Table I B, application no. 15, and being depicted in the same respective line as said At3g08710, and preferably the activity is increased non-targeted, or
[73539] (b) a polypeptide comprising a polypeptide, a consensus sequence or at least a polypeptide motif as shown in the respective line in column 5 of Table II or in column 8 of Table IV, application no. 15, respectively, and being depicted in the same respective line as said At3g08710, or a functional equivalent or a homolog thereof as depicted in column 8 of Table II, application no. 15, preferably a homolog or functional equivalent as depicted in column 8 of Table II B, application no. 15, and being depicted in the same respective line as said At3g08710, and preferably the activity is increased non-targeted, whereby the respective line disclose in column 7 the fine chemical malate.

[73540] Accordingly, in one embodiment, the molecule which activity is to be increased in the process of the invention is the gene product with an activity as a “thioredoxin family protein”, preferably it is the molecule of section (a) or (b) of this paragraph.

[73541] In particular, it was observed that in plants, especially in Arabidopsis thaliana, increasing or generating the activity of a gene product non-targeted with the activity of a “thioredoxin family protein”, preferably being encoded by a gene comprising the nucleic acid sequence SEQ ID NO. 22249, preferably the coding region thereof, conferred the production of or the increase in malate compared with the wild type control.

[73542] The nucleic acid sequence of At3g15360 from Arabidopsis thaliana, e.g. as shown in the respective line in column 5 of Table I, application no. 15, has been published in F. And the activity of the gene product thereof is the activity of thioredoxin.

[73543] Accordingly, in one embodiment, the process of the present invention for producing glycerate in a non-human organism, like a microorganism or a plant or a part thereof, comprises increasing or generating the activity of a gene product with the activity of a gene product conferring the activity of “thioredoxin”, especially from Arabidopsis thaliana or its functional equivalent or its homolog, e.g. the increase of
[73544] (a) a gene product of a gene comprising the nucleic acid molecule as shown in the respective line in column 5 of Table I (whereby the respective line disclose in column 7 the fine chemical glycerate), application no. 15, preferably the coding region thereof, or a homolog or a fragment thereof, and being depicted in the same respective line as said At3g15360, or a functional equivalent or a homolog thereof as shown in column 8 of Table I, application no. 15, preferably the coding region thereof, particularly a homolog or functional equivalent as shown in column 8 of Table I B, application no. 15, and being depicted in the same respective line as said At3g15360, and preferably the activity is increased non-targeted, or
[73545] (b) a polypeptide comprising a polypeptide, a consensus sequence or at least a polypeptide motif as shown in the respective line in column 5 of Table II or in column 8 of Table IV, application no. 15, respectively, and being depicted in the same respective line as said At3g15360, or a functional equivalent or a homolog thereof as depicted in column 8 of Table II, application no. 15, preferably a homolog or functional equivalent as depicted in column 8 of Table II B, application no. 15, and being depicted in the same respective line as said At3g15360, and preferably the activity is increased non-targeted, whereby the respective line disclose in column 7 the fine chemical glycerate.

[73546] Accordingly, in one embodiment, the molecule which activity is to be increased in the process of the invention is the gene product with an activity as a “thioredoxin”, preferably it is the molecule of section (a) or (b) of this paragraph.

[73547] In particular, it was observed that in plants, especially in Arabidopsis thaliana, increasing or generating the activity of a gene product non-targeted with the activity of a “thioredoxin”, preferably being encoded by a gene comprising the nucleic acid sequence SEQ ID NO. 130491, preferably the coding region thereof, conferred the production of or the increase in glycerate compared with the wild type control.

[73548] The nucleic acid sequence of At3g61830 from Arabidopsis thaliana, e.g. as shown in the respective line in column 5 of Table I, application no. 15, has been published in F. And the activity of the gene product thereof is the activity of auxin response factor.

[73549] Accordingly, in one embodiment, the process of the present invention for producing fumarate in a non-human organism, like a microorganism or a plant or a part thereof, comprises increasing or generating the activity of a gene product with the activity of a gene product conferring the activity of “auxin response factor”, especially from Arabidopsis thaliana or its functional equivalent or its homolog, e.g. the increase of
[73550] (a) a gene product of a gene comprising the nucleic acid molecule as shown in the respective line in column 5 of Table I (whereby the respective line disclose in column 7 the fine chemical fumarate), application no. 15, preferably the coding region thereof, or a homolog or a fragment thereof, and being depicted in the same respective line as said At3g61830, or a functional equivalent or a homolog thereof as shown in column 8 of Table I, application no. 15, preferably the coding region thereof, particularly a homolog or functional equivalent as shown in column 8 of Table I B, application no. 15, and being depicted in the same respective line as said At3g61830, and preferably the activity is increased non-targeted, or
[73551] (b) a polypeptide comprising a polypeptide, a consensus sequence or at least a polypeptide motif as shown in the respective line in column 5 of Table II or in column 8 of Table IV, application no. 15, respectively, and being depicted in the same respective line as said At3g61830, or a functional equivalent or a homolog thereof as depicted in column 8 of Table II, application no. 15, preferably a homolog or functional equivalent as depicted in column 8 of Table II B, application no. 15, and being depicted in the same respective line as said At3g61830, and preferably the activity is increased non-targeted, whereby the respective line disclose in column 7 the fine chemical fumarate.

[73552] Accordingly, in one embodiment, the molecule which activity is to be increased in the process of the invention is the gene product with an activity as a “auxin response factor”, preferably it is the molecule of section (a) or (b) of this paragraph.

[73553] In particular, it was observed that in plants, especially in Arabidopsis thaliana, increasing or generating the activity of a gene product non-targeted with the activity of a “auxin response factor”, preferably being encoded by a gene comprising the nucleic acid sequence SEQ ID NO. 2367, preferably the coding region thereof, conferred the production of or the increase in fumarate compared with the wild type control.

[73554] The nucleic acid sequence of At3g61830 from Arabidopsis thaliana, e.g. as shown in the respective line in column 5 of Table I, application no. 15, has been published in F. And the activity of the gene product thereof is the activity of auxin response factor.

[73555] Accordingly, in one embodiment, the process of the present invention for producing malate in a non-human organism, like a microorganism or a plant or a part thereof, comprises increasing or generating the activity of a gene product with the activity of a gene product conferring the activity of “auxin response factor”, especially from Arabidopsis thaliana or its functional equivalent or its homolog, e.g. the increase of
[73556] (a) a gene product of a gene comprising the nucleic acid molecule as shown in the respective line in column 5 of Table I (whereby the respective line disclose in column 7 the fine chemical malate), application no. 15, preferably the coding region thereof, or a homolog or a fragment thereof, and being depicted in the same respective line as said At3g61830, or a functional equivalent or a homolog thereof as shown in column 8 of Table I, application no. 15, preferably the coding region thereof, particularly a homolog or functional equivalent as shown in column 8 of Table I B, application no. 15, and being depicted in the same respective line as said At3g61830, and preferably the activity is increased non-targeted, or
[73557] (b) a polypeptide comprising a polypeptide, a consensus sequence or at least a polypeptide motif as shown in the respective line in column 5 of Table II or in column 8 of Table IV, application no. 15, respectively, and being depicted in the same respective line as said At3g61830, or a functional equivalent or a homolog thereof as depicted in column 8 of Table II, application no. 15, preferably a homolog or functional equivalent as depicted in column 8 of Table II B, application no. 15, and being depicted in the same respective line as said At3g61830, and preferably the activity is increased non-targeted, whereby the respective line disclose in column 7 the fine chemical malate.

[73558] Accordingly, in one embodiment, the molecule which activity is to be increased in the process of the invention is the gene product with an activity as a “auxin response factor”, preferably it is the molecule of section (a) or (b) of this paragraph.

[73559] In particular, it was observed that in plants, especially in Arabidopsis thaliana, increasing or generating the activity of a gene product non-targeted with the activity of a “auxin response factor”, preferably being encoded by a gene comprising the nucleic acid sequence SEQ ID NO. 2367, preferably the coding region thereof, conferred the production of or the increase in malate compared with the wild type control.

[73560] The nucleic acid sequence of At3g62930 from Arabidopsis thaliana, e.g. as shown in the respective line in column 5 of Table I, application no. 15, has been published in F. And the activity of the gene product thereof is the activity of monthiol glutaredoxin.

[73561] Accordingly, in one embodiment, the process of the present invention for producing citramalate in a non-human organism, like a microorganism or a plant or a part thereof, comprises increasing or generating the activity of a gene product with the activity of a gene product conferring the activity of “monthiol glutaredoxin”, especially from Arabidopsis thaliana or its functional equivalent or its homolog, e.g. the increase of
[73562] (a) a gene product of a gene comprising the nucleic acid molecule as shown in the respective line in column 5 of Table I (whereby the respective line disclose in column 7 the fine chemical citramalate), application no. 15, preferably the coding region thereof, or a homolog or a fragment thereof, and being depicted in the same respective line as said At3g62930, or a functional equivalent or a homolog thereof as shown in column 8 of Table I, application no. 15, preferably the coding region thereof, particularly a homolog or functional equivalent as shown in column 8 of Table I B, application no. 15, and being depicted in the same respective line as said At3g62930, and preferably the activity is increased non-targeted, or
[73563] (b) a polypeptide comprising a polypeptide, a consensus sequence or at least a polypeptide motif as shown in the respective line in column 5 of Table II or in column 8 of Table IV, application no. 15, respectively, and being depicted in the same respective line as said At3g62930, or a functional equivalent or a homolog thereof as depicted in column 8 of Table II, application no. 15, preferably a homolog or functional equivalent as depicted in column 8 of Table II B, application no. 15, and being depicted in the same respective line as said At3g62930, and preferably the activity is increased non-targeted, whereby the respective line disclose in column 7 the fine chemical citramalate.

[73564] Accordingly, in one embodiment, the molecule which activity is to be increased in the process of the invention is the gene product with an activity as a “monthiol glutaredoxin”, preferably it is the molecule of section (a) or (b) of this paragraph.

[73565] In particular, it was observed that in plants, especially in Arabidopsis thaliana, increasing or generating the activity of a gene product non-targeted with the activity of a “monthiol glutaredoxin”, preferably being encoded by a gene comprising the nucleic acid sequence SEQ ID NO. 2573, preferably the coding region thereof, conferred the production of or the increase in citramalate compared with the wild type control.

[73566] The nucleic acid sequence of At3g62930 from Arabidopsis thaliana, e.g. as shown in the respective line in column 5 of Table I, application no. 15, has been published in F. And the activity of the gene product thereof is the activity of monthiol glutaredoxin.

[73567] Accordingly, in one embodiment, the process of the present invention for producing fumarate in a non-human organism, like a microorganism or a plant or a part thereof, comprises increasing or generating the activity of a gene product with the activity of a gene product conferring the activity of “monthiol glutaredoxin”, especially from Arabidopsis thaliana or its functional equivalent or its homolog, e.g. the increase of
[73568] (a) a gene product of a gene comprising the nucleic acid molecule as shown in the respective line in column 5 of Table I (whereby the respective line disclose in column 7 the fine chemical fumarate), application no. 15, preferably the coding region thereof, or a homolog or a fragment thereof, and being depicted in the same respective line as said At3g62930, or a functional equivalent or a homolog thereof as shown in column 8 of Table I, application no. 15, preferably the coding region thereof, particularly a homolog or functional equivalent as shown in column 8 of Table I B, application no. 15, and being depicted in the same respective line as said At3g62930, and preferably the activity is increased non-targeted, or
[73569] (b) a polypeptide comprising a polypeptide, a consensus sequence or at least a polypeptide motif as shown in the respective line in column 5 of Table II or in column 8 of Table IV, application no. 15, respectively, and being depicted in the same respective line as said At3g62930, or a functional equivalent or a homolog thereof as depicted in column 8 of Table II, application no. 15, preferably a homolog or functional equivalent as depicted in column 8 of Table II B, application no. 15, and being depicted in the same respective line as said At3g62930, and preferably the activity is increased non-targeted, whereby the respective line disclose in column 7 the fine chemical fumarate.

[73570] Accordingly, in one embodiment, the molecule which activity is to be increased in the process of the invention is the gene product with an activity as a “monthiol glutaredoxin”, preferably it is the molecule of section (a) or (b) of this paragraph.

[73571] In particular, it was observed that in plants, especially in Arabidopsis thaliana, increasing or generating the activity of a gene product non-targeted with the activity of a “monthiol glutaredoxin”, preferably being encoded by a gene comprising the nucleic acid sequence SEQ ID NO. 2573, preferably the coding region thereof, conferred the production of or the increase in fumarate compared with the wild type control.

[73572] The nucleic acid sequence of At3g62930 from Arabidopsis thaliana, e.g. as shown in the respective line in column 5 of Table I, application no. 15, has been published in F. And the activity of the gene product thereof is the activity of monthiol glutaredoxin.

[73573] Accordingly, in one embodiment, the process of the present invention for producing glycerate in a non-human organism, like a microorganism or a plant or a part thereof, comprises increasing or generating the activity of a gene product with the activity of a gene product conferring the activity of “monthiol glutaredoxin”, especially from Arabidopsis thaliana or its functional equivalent or its homolog, e.g. the increase of
[73574] (a) a gene product of a gene comprising the nucleic acid molecule as shown in the respective line in column 5 of Table I (whereby the respective line disclose in column 7 the fine chemical glycerate), application no. 15, preferably the coding region thereof, or a homolog or a fragment thereof, and being depicted in the same respective line as said At3g62930, or a functional equivalent or a homolog thereof as shown in column 8 of Table I, application no. 15, preferably the coding region thereof, particularly a homolog or functional equivalent as shown in column 8 of Table I B, application no. 15, and being depicted in the same respective line as said At3g62930, and preferably the activity is increased non-targeted, or
[73575] (b) a polypeptide comprising a polypeptide, a consensus sequence or at least a polypeptide motif as shown in the respective line in column 5 of Table II or in column 8 of Table IV, application no. 15, respectively, and being depicted in the same respective line as said At3g62930, or a functional equivalent or a homolog thereof as depicted in column 8 of Table II, application no. 15, preferably a homolog or functional equivalent as depicted in column 8 of Table II B, application no. 15, and being depicted in the same respective line as said At3g62930, and preferably the activity is increased non-targeted, whereby the respective line disclose in column 7 the fine chemical glycerate.

[73576] Accordingly, in one embodiment, the molecule which activity is to be increased in the process of the invention is the gene product with an activity as a “monthiol glutaredoxin”, preferably it is the molecule of section (a) or (b) of this paragraph.

[73577] In particular, it was observed that in plants, especially in Arabidopsis thaliana, increasing or generating the activity of a gene product non-targeted with the activity of a “monthiol glutaredoxin”, preferably being encoded by a gene comprising the nucleic acid sequence SEQ ID NO. 2573, preferably the coding region thereof, conferred the production of or the increase in glycerate compared with the wild type control.

[73578] The nucleic acid sequence of At3g62930 from Arabidopsis thaliana, e.g. as shown in the respective line in column 5 of Table I, application no. 15, has been published in F. And the activity of the gene product thereof is the activity of monthiol glutaredoxin.

[73579] Accordingly, in one embodiment, the process of the present invention for producing malate in a non-human organism, like a microorganism or a plant or a part thereof, comprises increasing or generating the activity of a gene product with the activity of a gene product conferring the activity of “monthiol glutaredoxin”, especially from Arabidopsis thaliana or its functional equivalent or its homolog, e.g. the increase of
[73580] (a) a gene product of a gene comprising the nucleic acid molecule as shown in the respective line in column 5 of Table I (whereby the respective line disclose in column 7 the fine chemical malate), application no. 15, preferably the coding region thereof, or a homolog or a fragment thereof, and being depicted in the same respective line as said At3g62930, or a functional equivalent or a homolog thereof as shown in column 8 of Table I, application no. 15, preferably the coding region thereof, particularly a homolog or functional equivalent as shown in column 8 of Table I B, application no. 15, and being depicted in the same respective line as said At3g62930, and preferably the activity is increased non-targeted, or
[73581] (b) a polypeptide comprising a polypeptide, a consensus sequence or at least a polypeptide motif as shown in the respective line in column 5 of Table II or in column 8 of Table IV, application no. 15, respectively, and being depicted in the same respective line as said At3g62930, or a functional equivalent or a homolog thereof as depicted in column 8 of Table II, application no. 15, preferably a homolog or functional equivalent as depicted in column 8 of Table II B, application no. 15, and being depicted in the same respective line as said At3g62930, and preferably the activity is increased non-targeted, whereby the respective line disclose in column 7 the fine chemical malate.

[73582] Accordingly, in one embodiment, the molecule which activity is to be increased in the process of the invention is the gene product with an activity as a “monthiol glutaredoxin”, preferably it is the molecule of section (a) or (b) of this paragraph.

[73583] In particular, it was observed that in plants, especially in Arabidopsis thaliana, increasing or generating the activity of a gene product non-targeted with the activity of a “monthiol glutaredoxin”, preferably being encoded by a gene comprising the nucleic acid sequence SEQ ID NO. 2573, preferably the coding region thereof, conferred the production of or the increase in malate compared with the wild type control.

[73584] The nucleic acid sequence of At3g62930 from Arabidopsis thaliana, e.g. as shown in the respective line in column 5 of Table I, application no. 15, has been published in F. And the activity of the gene product thereof is the activity of monthiol glutaredoxin.

[73585] Accordingly, in one embodiment, the process of the present invention for producing succinate in a non-human organism, like a microorganism or a plant or a part thereof, comprises increasing or generating the activity of a gene product with the activity of a gene product conferring the activity of “monthiol glutaredoxin”, especially from Arabidopsis thaliana or its functional equivalent or its homolog, e.g. the increase of
[73586] (a) a gene product of a gene comprising the nucleic acid molecule as shown in the respective line in column 5 of Table I (whereby the respective line disclose in column 7 the fine chemical succinate), application no. 15, preferably the coding region thereof, or a homolog or a fragment thereof, and being depicted in the same respective line as said At3g62930, or a functional equivalent or a homolog thereof as shown in column 8 of Table I, application no. 15, preferably the coding region thereof, particularly a homolog or functional equivalent as shown in column 8 of Table I B, application no. 15, and being depicted in the same respective line as said At3g62930, and preferably the activity is increased non-targeted, or
[73587] (b) a polypeptide comprising a polypeptide, a consensus sequence or at least a polypeptide motif as shown in the respective line in column 5 of Table II or in column 8 of Table IV, application no. 15, respectively, and being depicted in the same respective line as said At3g62930, or a functional equivalent or a homolog thereof as depicted in column 8 of Table II, application no. 15, preferably a homolog or functional equivalent as depicted in column 8 of Table II B, application no. 15, and being depicted in the same respective line as said At3g62930, and preferably the activity is increased non-targeted, whereby the respective line disclose in column 7 the fine chemical succinate.

[73588] Accordingly, in one embodiment, the molecule which activity is to be increased in the process of the invention is the gene product with an activity as a “monthiol glutaredoxin”, preferably it is the molecule of section (a) or (b) of this paragraph.

[73589] In particular, it was observed that in plants, especially in Arabidopsis thaliana, increasing or generating the activity of a gene product non-targeted with the activity of a “monthiol glutaredoxin”, preferably being encoded by a gene comprising the nucleic acid sequence SEQ ID NO. 2573, preferably the coding region thereof, conferred the production of or the increase in succinate compared with the wild type control.

[73590] The nucleic acid sequence of At3g62930 from Arabidopsis thaliana, e.g. as shown in the respective line in column 5 of Table I, application no. 15, has been published in F. And the activity of the gene product thereof is the activity of monthiol glutaredoxin.

[73591] Accordingly, in one embodiment, the process of the present invention for producing vitamin c and/or threonic acid in a non-human organism, like a microorganism or a plant or a part thereof, comprises increasing or generating the activity of a gene product with the activity of a gene product conferring the activity of “monthiol glutaredoxin”, especially from Arabidopsis thaliana or its functional equivalent or its homolog, e.g. the increase of
[73592] (a) a gene product of a gene comprising the nucleic acid molecule as shown in the respective line in column 5 of Table I (whereby the respective line disclose in column 7 the fine chemical vitamin c and/or threonic acid), application no. 15, preferably the coding region thereof, or a homolog or a fragment thereof, and being depicted in the same respective line as said At3g62930, or a functional equivalent or a homolog thereof as shown in column 8 of Table I, application no. 15, preferably the coding region thereof, particularly a homolog or functional equivalent as shown in column 8 of Table I B, application no. 15, and being depicted in the same respective line as said At3g62930, and preferably the activity is increased non-targeted, or
[73593] (b) a polypeptide comprising a polypeptide, a consensus sequence or at least a polypeptide motif as shown in the respective line in column 5 of Table II or in column 8 of Table IV, application no. 15, respectively, and being depicted in the same respective line as said At3g62930, or a functional equivalent or a homolog thereof as depicted in column 8 of Table II, application no. 15, preferably a homolog or functional equivalent as depicted in column 8 of Table II B, application no. 15, and being depicted in the same respective line as said At3g62930, and preferably the activity is increased non-targeted, whereby the respective line disclose in column 7 the fine chemical vitamin c and/or threonic acid.

[73594] Accordingly, in one embodiment, the molecule which activity is to be increased in the process of the invention is the gene product with an activity as a “monthiol glutaredoxin”, preferably it is the molecule of section (a) or (b) of this paragraph.

[73595] In particular, it was observed that in plants, especially in Arabidopsis thaliana, increasing or generating the activity of a gene product non-targeted with the activity of a “monthiol glutaredoxin”, preferably being encoded by a gene comprising the nucleic acid sequence SEQ ID NO. 2573, preferably the coding region thereof, conferred the production of or the increase in vitamin c and/or threonic acid compared with the wild type control.

[73596] The nucleic acid sequence of At3g62950 from Arabidopsis thaliana, e.g. as shown in the respective line in column 5 of Table I, application no. 15, has been published in F. And the activity of the gene product thereof is the activity of glutaredoxin.

[73597] Accordingly, in one embodiment, the process of the present invention for producing citramalate in a non-human organism, like a microorganism or a plant or a part thereof, comprises increasing or generating the activity of a gene product with the activity of a gene product conferring the activity of “glutaredoxin”, especially from Arabidopsis thaliana or its functional equivalent or its homolog, e.g. the increase of
[73598] (a) a gene product of a gene comprising the nucleic acid molecule as shown in the respective line in column 5 of Table I (whereby the respective line disclose in column 7 the fine chemical citramalate), application no. 15, preferably the coding region thereof, or a homolog or a fragment thereof, and being depicted in the same respective line as said At3g62950, or a functional equivalent or a homolog thereof as shown in column 8 of Table I, application no. 15, preferably the coding region thereof, particularly a homolog or functional equivalent as shown in column 8 of Table I B, application no. 15, and being depicted in the same respective line as said At3g62950, and preferably the activity is increased non-targeted, or
[73599] (b) a polypeptide comprising a polypeptide, a consensus sequence or at least a polypeptide motif as shown in the respective line in column 5 of Table II or in column 8 of Table IV, application no. 15, respectively, and being depicted in the same respective line as said At3g62950, or a functional equivalent or a homolog thereof as depicted in column 8 of Table II, application no. 15, preferably a homolog or functional equivalent as depicted in column 8 of Table II B, application no. 15, and being depicted in the same respective line as said At3g62950, and preferably the activity is increased non-targeted, whereby the respective line disclose in column 7 the fine chemical citramalate.

[73600] Accordingly, in one embodiment, the molecule which activity is to be increased in the process of the invention is the gene product with an activity as a “glutaredoxin”, preferably it is the molecule of section (a) or (b) of this paragraph.

[73601] In particular, it was observed that in plants, especially in Arabidopsis thaliana, increasing or generating the activity of a gene product non-targeted with the activity of a “glutaredoxin”, preferably being encoded by a gene comprising the nucleic acid sequence SEQ ID NO. 2935, preferably the coding region thereof, conferred the production of or the increase in citramalate compared with the wild type control.

[73602] The nucleic acid sequence of At3g62950 from Arabidopsis thaliana, e.g. as shown in the respective line in column 5 of Table I, application no. 15, has been published in F. And the activity of the gene product thereof is the activity of glutaredoxin.

[73603] Accordingly, in one embodiment, the process of the present invention for producing fumarate in a non-human organism, like a microorganism or a plant or a part thereof, comprises increasing or generating the activity of a gene product with the activity of a gene product conferring the activity of “glutaredoxin”, especially from Arabidopsis thaliana or its functional equivalent or its homolog, e.g. the increase of
[73604] (a) a gene product of a gene comprising the nucleic acid molecule as shown in the respective line in column 5 of Table I (whereby the respective line disclose in column 7 the fine chemical fumarate), application no. 15, preferably the coding region thereof, or a homolog or a fragment thereof, and being depicted in the same respective line as said At3g62950, or a functional equivalent or a homolog thereof as shown in column 8 of Table I, application no. 15, preferably the coding region thereof, particularly a homolog or functional equivalent as shown in column 8 of Table I B, application no. 15, and being depicted in the same respective line as said At3g62950, and preferably the activity is increased non-targeted, or
[73605] (b) a polypeptide comprising a polypeptide, a consensus sequence or at least a polypeptide motif as shown in the respective line in column 5 of Table II or in column 8 of Table IV, application no. 15, respectively, and being depicted in the same respective line as said At3g62950, or a functional equivalent or a homolog thereof as depicted in column 8 of Table II, application no. 15, preferably a homolog or functional equivalent as depicted in column 8 of Table II B, application no. 15, and being depicted in the same respective line as said At3g62950, and preferably the activity is increased non-targeted, whereby the respective line disclose in column 7 the fine chemical fumarate.

[73606] Accordingly, in one embodiment, the molecule which activity is to be increased in the process of the invention is the gene product with an activity as a “glutaredoxin”, preferably it is the molecule of section (a) or (b) of this paragraph.

[73607] In particular, it was observed that in plants, especially in Arabidopsis thaliana, increasing or generating the activity of a gene product non-targeted with the activity of a “glutaredoxin”, preferably being encoded by a gene comprising the nucleic acid sequence SEQ ID NO. 2935, preferably the coding region thereof, conferred the production of or the increase in fumarate compared with the wild type control.

[73608] The nucleic acid sequence of At3g62950 from Arabidopsis thaliana, e.g. as shown in the respective line in column 5 of Table I, application no. 15, has been published in F. And the activity of the gene product thereof is the activity of glutaredoxin.

[73609] Accordingly, in one embodiment, the process of the present invention for producing glycerate in a non-human organism, like a microorganism or a plant or a part thereof, comprises increasing or generating the activity of a gene product with the activity of a gene product conferring the activity of “glutaredoxin”, especially from Arabidopsis thaliana or its functional equivalent or its homolog, e.g. the increase of
[73610] (a) a gene product of a gene comprising the nucleic acid molecule as shown in the respective line in column 5 of Table I (whereby the respective line disclose in column 7 the fine chemical glycerate), application no. 15, preferably the coding region thereof, or a homolog or a fragment thereof, and being depicted in the same respective line as said At3g62950, or a functional equivalent or a homolog thereof as shown in column 8 of Table I, application no. 15, preferably the coding region thereof, particularly a homolog or functional equivalent as shown in column 8 of Table I B, application no. 15, and being depicted in the same respective line as said At3g62950, and preferably the activity is increased non-targeted, or
[73611] (b) a polypeptide comprising a polypeptide, a consensus sequence or at least a polypeptide motif as shown in the respective line in column 5 of Table II or in column 8 of Table IV, application no. 15, respectively, and being depicted in the same respective line as said At3g62950, or a functional equivalent or a homolog thereof as depicted in column 8 of Table II, application no. 15, preferably a homolog or functional equivalent as depicted in column 8 of Table II B, application no. 15, and being depicted in the same respective line as said At3g62950, and preferably the activity is increased non-targeted, whereby the respective line disclose in column 7 the fine chemical glycerate.

[73612] Accordingly, in one embodiment, the molecule which activity is to be increased in the process of the invention is the gene product with an activity as a “glutaredoxin”, preferably it is the molecule of section (a) or (b) of this paragraph.

[73613] In particular, it was observed that in plants, especially in Arabidopsis thaliana, increasing or generating the activity of a gene product non-targeted with the activity of a “glutaredoxin”, preferably being encoded by a gene comprising the nucleic acid sequence SEQ ID NO. 2935, preferably the coding region thereof, conferred the production of or the increase in glycerate compared with the wild type control.

[73614] The nucleic acid sequence of At3g62950 from Arabidopsis thaliana, e.g. as shown in the respective line in column 5 of Table I, application no. 15, has been published in F. And the activity of the gene product thereof is the activity of glutaredoxin.

[73615] Accordingly, in one embodiment, the process of the present invention for producing malate in a non-human organism, like a microorganism or a plant or a part thereof, comprises increasing or generating the activity of a gene product with the activity of a gene product conferring the activity of “glutaredoxin”, especially from Arabidopsis thaliana or its functional equivalent or its homolog, e.g. the increase of
[73616] (a) a gene product of a gene comprising the nucleic acid molecule as shown in the respective line in column 5 of Table I (whereby the respective line disclose in column 7 the fine chemical malate), application no. 15, preferably the coding region thereof, or a homolog or a fragment thereof, and being depicted in the same respective line as said At3g62950, or a functional equivalent or a homolog thereof as shown in column 8 of Table I, application no. 15, preferably the coding region thereof, particularly a homolog or functional equivalent as shown in column 8 of Table I B, application no. 15, and being depicted in the same respective line as said At3g62950, and preferably the activity is increased non-targeted, or
[73617] (b) a polypeptide comprising a polypeptide, a consensus sequence or at least a polypeptide motif as shown in the respective line in column 5 of Table II or in column 8 of Table IV, application no. 15, respectively, and being depicted in the same respective line as said At3g62950, or a functional equivalent or a homolog thereof as depicted in column 8 of Table II, application no. 15, preferably a homolog or functional equivalent as depicted in column 8 of Table II B, application no. 15, and being depicted in the same respective line as said At3g62950, and preferably the activity is increased non-targeted, whereby the respective line disclose in column 7 the fine chemical malate.

[73618] Accordingly, in one embodiment, the molecule which activity is to be increased in the process of the invention is the gene product with an activity as a “glutaredoxin”, preferably it is the molecule of section (a) or (b) of this paragraph.

[73619] In particular, it was observed that in plants, especially in Arabidopsis thaliana, increasing or generating the activity of a gene product non-targeted with the activity of a “glutaredoxin”, preferably being encoded by a gene comprising the nucleic acid sequence SEQ ID NO. 2935, preferably the coding region thereof, conferred the production of or the increase in malate compared with the wild type control.

[73620] The nucleic acid sequence of At3g62950 from Arabidopsis thaliana, e.g. as shown in the respective line in column 5 of Table I, application no. 15, has been published in F. And the activity of the gene product thereof is the activity of glutaredoxin.

[73621] Accordingly, in one embodiment, the process of the present invention for producing succinate in a non-human organism, like a microorganism or a plant or a part thereof, comprises increasing or generating the activity of a gene product with the activity of a gene product conferring the activity of “glutaredoxin”, especially from Arabidopsis thaliana or its functional equivalent or its homolog, e.g. the increase of
[73622] (a) a gene product of a gene comprising the nucleic acid molecule as shown in the respective line in column 5 of Table I (whereby the respective line disclose in column 7 the fine chemical succinate), application no. 15, preferably the coding region thereof, or a homolog or a fragment thereof, and being depicted in the same respective line as said At3g62950, or a functional equivalent or a homolog thereof as shown in column 8 of Table I, application no. 15, preferably the coding region thereof, particularly a homolog or functional equivalent as shown in column 8 of Table I B, application no. 15, and being depicted in the same respective line as said At3g62950, and preferably the activity is increased non-targeted, or
[73623] (b) a polypeptide comprising a polypeptide, a consensus sequence or at least a polypeptide motif as shown in the respective line in column 5 of Table II or in column 8 of Table IV, application no. 15, respectively, and being depicted in the same respective line as said At3g62950, or a functional equivalent or a homolog thereof as depicted in column 8 of Table II, application no. 15, preferably a homolog or functional equivalent as depicted in column 8 of Table II B, application no. 15, and being depicted in the same respective line as said At3g62950, and preferably the activity is increased non-targeted, whereby the respective line disclose in column 7 the fine chemical succinate.

[73624] Accordingly, in one embodiment, the molecule which activity is to be increased in the process of the invention is the gene product with an activity as a “glutaredoxin”, preferably it is the molecule of section (a) or (b) of this paragraph.

[73625] In particular, it was observed that in plants, especially in Arabidopsis thaliana, increasing or generating the activity of a gene product non-targeted with the activity of a “glutaredoxin”, preferably being encoded by a gene comprising the nucleic acid sequence SEQ ID NO. 2935, preferably the coding region thereof, conferred the production of or the increase in succinate compared with the wild type control.

[73626] The nucleic acid sequence of At4g03520 from Arabidopsis thaliana, e.g. as shown in the respective line in column 5 of Table I, application no. 15, has been published in F. And the activity of the gene product thereof is the activity of thioredoxin.

[73627] Accordingly, in one embodiment, the process of the present invention for producing glycerate in a non-human organism, like a microorganism or a plant or a part thereof, comprises increasing or generating the activity of a gene product with the activity of a gene product conferring the activity of “thioredoxin”, especially from Arabidopsis thaliana or its functional equivalent or its homolog, e.g. the increase of
[73628] (a) a gene product of a gene comprising the nucleic acid molecule as shown in the respective line in column 5 of Table I (whereby the respective line disclose in column 7 the fine chemical glycerate), application no. 15, preferably the coding region thereof, or a homolog or a fragment thereof, and being depicted in the same respective line as said At4g03520, or a functional equivalent or a homolog thereof as shown in column 8 of Table I, application no. 15, preferably the coding region thereof, particularly a homolog or functional equivalent as shown in column 8 of Table I B, application no. 15, and being depicted in the same respective line as said At4g03520, and preferably the activity is increased non-targeted, or
[73629] (b) a polypeptide comprising a polypeptide, a consensus sequence or at least a polypeptide motif as shown in the respective line in column 5 of Table II or in column 8 of Table IV, application no. 15, respectively, and being depicted in the same respective line as said At4g03520, or a functional equivalent or a homolog thereof as depicted in column 8 of Table II, application no. 15, preferably a homolog or functional equivalent as depicted in column 8 of Table II B, application no. 15, and being depicted in the same respective line as said At4g03520, and preferably the activity is increased non-targeted, whereby the respective line disclose in column 7 the fine chemical glycerate.

[73630] Accordingly, in one embodiment, the molecule which activity is to be increased in the process of the invention is the gene product with an activity as a “thioredoxin”, preferably it is the molecule of section (a) or (b) of this paragraph.

[73631] In particular, it was observed that in plants, especially in Arabidopsis thaliana, increasing or generating the activity of a gene product non-targeted with the activity of a “thioredoxin”, preferably being encoded by a gene comprising the nucleic acid sequence SEQ ID NO. 133541, preferably the coding region thereof, conferred the production of or the increase in glycerate compared with the wild type control.

[73632] The nucleic acid sequence of At4g15660 from Arabidopsis thaliana, e.g. as shown in the respective line in column 5 of Table I, application no. 15, has been published in F. And the activity of the gene product thereof is the activity of monothiol glutaredoxin.

[73633] Accordingly, in one embodiment, the process of the present invention for producing citramalate in a non-human organism, like a microorganism or a plant or a part thereof, comprises increasing or generating the activity of a gene product with the activity of a gene product conferring the activity of “monothiol glutaredoxin”, especially from Arabidopsis thaliana or its functional equivalent or its homolog, e.g. the increase of
[73634] (a) a gene product of a gene comprising the nucleic acid molecule as shown in the respective line in column 5 of Table I (whereby the respective line disclose in column 7 the fine chemical citramalate), application no. 15, preferably the coding region thereof, or a homolog or a fragment thereof, and being depicted in the same respective line as said At4g15660, or a functional equivalent or a homolog thereof as shown in column 8 of Table I, application no. 15, preferably the coding region thereof, particularly a homolog or functional equivalent as shown in column 8 of Table I B, application no. 15, and being depicted in the same respective line as said At4g15660, and preferably the activity is increased non-targeted, or
[73635] (b) a polypeptide comprising a polypeptide, a consensus sequence or at least a polypeptide motif as shown in the respective line in column 5 of Table II or in column 8 of Table IV, application no. 15, respectively, and being depicted in the same respective line as said At4g15660, or a functional equivalent or a homolog thereof as depicted in column 8 of Table II, application no. 15, preferably a homolog or functional equivalent as depicted in column 8 of Table II B, application no. 15, and being depicted in the same respective line as said At4g15660, and preferably the activity is increased non-targeted, whereby the respective line disclose in column 7 the fine chemical citramalate.

[73636] Accordingly, in one embodiment, the molecule which activity is to be increased in the process of the invention is the gene product with an activity as a “monothiol glutaredoxin”, preferably it is the molecule of section (a) or (b) of this paragraph.

[73637] In particular, it was observed that in plants, especially in Arabidopsis thaliana, increasing or generating the activity of a gene product non-targeted with the activity of a “monothiol glutaredoxin”, preferably being encoded by a gene comprising the nucleic acid sequence SEQ ID NO. 23482, preferably the coding region thereof, conferred the production of or the increase in citramalate compared with the wild type control.

[73638] The nucleic acid sequence of At4g15660 from Arabidopsis thaliana, e.g. as shown in the respective line in column 5 of Table I, application no. 15, has been published in F. And the activity of the gene product thereof is the activity of monothiol glutaredoxin.

[73639] Accordingly, in one embodiment, the process of the present invention for producing fumarate in a non-human organism, like a microorganism or a plant or a part thereof, comprises increasing or generating the activity of a gene product with the activity of a gene product conferring the activity of “monothiol glutaredoxin”, especially from Arabidopsis thaliana or its functional equivalent or its homolog, e.g. the increase of
[73640] (a) a gene product of a gene comprising the nucleic acid molecule as shown in the respective line in column 5 of Table I (whereby the respective line disclose in column 7 the fine chemical fumarate), application no. 15, preferably the coding region thereof, or a homolog or a fragment thereof, and being depicted in the same respective line as said At4g15660, or a functional equivalent or a homolog thereof as shown in column 8 of Table I, application no. 15, preferably the coding region thereof, particularly a homolog or functional equivalent as shown in column 8 of Table I B, application no. 15, and being depicted in the same respective line as said At4g15660, and preferably the activity is increased non-targeted, or
[73641] (b) a polypeptide comprising a polypeptide, a consensus sequence or at least a polypeptide motif as shown in the respective line in column 5 of Table II or in column 8 of Table IV, application no. 15, respectively, and being depicted in the same respective line as said At4g15660, or a functional equivalent or a homolog thereof as depicted in column 8 of Table II, application no. 15, preferably a homolog or functional equivalent as depicted in column 8 of Table II B, application no. 15, and being depicted in the same respective line as said At4g15660, and preferably the activity is increased non-targeted, whereby the respective line disclose in column 7 the fine chemical fumarate.

[73642] Accordingly, in one embodiment, the molecule which activity is to be increased in the process of the invention is the gene product with an activity as a “monothiol glutaredoxin”, preferably it is the molecule of section (a) or (b) of this paragraph.

[73643] In particular, it was observed that in plants, especially in Arabidopsis thaliana, increasing or generating the activity of a gene product non-targeted with the activity of a “monothiol glutaredoxin”, preferably being encoded by a gene comprising the nucleic acid sequence SEQ ID NO. 23482, preferably the coding region thereof, conferred the production of or the increase in fumarate compared with the wild type control.

[73644] The nucleic acid sequence of At4g15660 from Arabidopsis thaliana, e.g. as shown in the respective line in column 5 of Table I, application no. 15, has been published in F. And the activity of the gene product thereof is the activity of monothiol glutaredoxin.

[73645] Accordingly, in one embodiment, the process of the present invention for producing glycerate in a non-human organism, like a microorganism or a plant or a part thereof, comprises increasing or generating the activity of a gene product with the activity of a gene product conferring the activity of “monothiol glutaredoxin”, especially from Arabidopsis thaliana or its functional equivalent or its homolog, e.g. the increase of
[73646] (a) a gene product of a gene comprising the nucleic acid molecule as shown in the respective line in column 5 of Table I (whereby the respective line disclose in column 7 the fine chemical glycerate), application no. 15, preferably the coding region thereof, or a homolog or a fragment thereof, and being depicted in the same respective line as said At4g15660, or a functional equivalent or a homolog thereof as shown in column 8 of Table I, application no. 15, preferably the coding region thereof, particularly a homolog or functional equivalent as shown in column 8 of Table I B, application no. 15, and being depicted in the same respective line as said At4g15660, and preferably the activity is increased non-targeted, or
[73647] (b) a polypeptide comprising a polypeptide, a consensus sequence or at least a polypeptide motif as shown in the respective line in column 5 of Table II or in column 8 of Table IV, application no. 15, respectively, and being depicted in the same respective line as said At4g15660, or a functional equivalent or a homolog thereof as depicted in column 8 of Table II, application no. 15, preferably a homolog or functional equivalent as depicted in column 8 of Table II B, application no. 15, and being depicted in the same respective line as said At4g15660, and preferably the activity is increased non-targeted, whereby the respective line disclose in column 7 the fine chemical glycerate.

[73648] Accordingly, in one embodiment, the molecule which activity is to be increased in the process of the invention is the gene product with an activity as a “monothiol glutaredoxin”, preferably it is the molecule of section (a) or (b) of this paragraph.

[73649] In particular, it was observed that in plants, especially in Arabidopsis thaliana, increasing or generating the activity of a gene product non-targeted with the activity of a “monothiol glutaredoxin”, preferably being encoded by a gene comprising the nucleic acid sequence SEQ ID NO. 23482, preferably the coding region thereof, conferred the production of or the increase in glycerate compared with the wild type control.

[73650] The nucleic acid sequence of At4g15660 from Arabidopsis thaliana, e.g. as shown in the respective line in column 5 of Table I, application no. 15, has been published in F. And the activity of the gene product thereof is the activity of monothiol glutaredoxin.

[73651] Accordingly, in one embodiment, the process of the present invention for producing malate in a non-human organism, like a microorganism or a plant or a part thereof, comprises increasing or generating the activity of a gene product with the activity of a gene product conferring the activity of “monothiol glutaredoxin”, especially from Arabidopsis thaliana or its functional equivalent or its homolog, e.g. the increase of
[73652] (a) a gene product of a gene comprising the nucleic acid molecule as shown in the respective line in column 5 of Table I (whereby the respective line disclose in column 7 the fine chemical malate), application no. 15, preferably the coding region thereof, or a homolog or a fragment thereof, and being depicted in the same respective line as said At4g15660, or a functional equivalent or a homolog thereof as shown in column 8 of Table I, application no. 15, preferably the coding region thereof, particularly a homolog or functional equivalent as shown in column 8 of Table I B, application no. 15, and being depicted in the same respective line as said At4g15660, and preferably the activity is increased non-targeted, or
[73653] (b) a polypeptide comprising a polypeptide, a consensus sequence or at least a polypeptide motif as shown in the respective line in column 5 of Table II or in column 8 of Table IV, application no. 15, respectively, and being depicted in the same respective line as said At4g15660, or a functional equivalent or a homolog thereof as depicted in column 8 of Table II, application no. 15, preferably a homolog or functional equivalent as depicted in column 8 of Table II B, application no. 15, and being depicted in the same respective line as said At4g15660, and preferably the activity is increased non-targeted, whereby the respective line disclose in column 7 the fine chemical malate.

[73654] Accordingly, in one embodiment, the molecule which activity is to be increased in the process of the invention is the gene product with an activity as a “monothiol glutaredoxin”, preferably it is the molecule of section (a) or (b) of this paragraph.

[73655] In particular, it was observed that in plants, especially in Arabidopsis thaliana, increasing or generating the activity of a gene product non-targeted with the activity of a “monothiol glutaredoxin”, preferably being encoded by a gene comprising the nucleic acid sequence SEQ ID NO. 23482, preferably the coding region thereof, conferred the production of or the increase in malate compared with the wild type control.

[73656] The nucleic acid sequence of At4g15660 from Arabidopsis thaliana, e.g. as shown in the respective line in column 5 of Table I, application no. 15, has been published in F. And the activity of the gene product thereof is the activity of monothiol glutaredoxin.

[73657] Accordingly, in one embodiment, the process of the present invention for producing succinate in a non-human organism, like a microorganism or a plant or a part thereof, comprises increasing or generating the activity of a gene product with the activity of a gene product conferring the activity of “monothiol glutaredoxin”, especially from Arabidopsis thaliana or its functional equivalent or its homolog, e.g. the increase of
[73658] (a) a gene product of a gene comprising the nucleic acid molecule as shown in the respective line in column 5 of Table I (whereby the respective line disclose in column 7 the fine chemical succinate), application no. 15, preferably the coding region thereof, or a homolog or a fragment thereof, and being depicted in the same respective line as said At4g15660, or a functional equivalent or a homolog thereof as shown in column 8 of Table I, application no. 15, preferably the coding region thereof, particularly a homolog or functional equivalent as shown in column 8 of Table I B, application no. 15, and being depicted in the same respective line as said At4g15660, and preferably the activity is increased non-targeted, or
[73659] (b) a polypeptide comprising a polypeptide, a consensus sequence or at least a polypeptide motif as shown in the respective line in column 5 of Table II or in column 8 of Table IV, application no. 15, respectively, and being depicted in the same respective line as said At4g15660, or a functional equivalent or a homolog thereof as depicted in column 8 of Table II, application no. 15, preferably a homolog or functional equivalent as depicted in column 8 of Table II B, application no. 15, and being depicted in the same respective line as said At4g15660, and preferably the activity is increased non-targeted, whereby the respective line disclose in column 7 the fine chemical succinate.

[73660] Accordingly, in one embodiment, the molecule which activity is to be increased in the process of the invention is the gene product with an activity as a “monothiol glutaredoxin”, preferably it is the molecule of section (a) or (b) of this paragraph.

[73661] In particular, it was observed that in plants, especially in Arabidopsis thaliana, increasing or generating the activity of a gene product non-targeted with the activity of a “monothiol glutaredoxin”, preferably being encoded by a gene comprising the nucleic acid sequence SEQ ID NO. 23482, preferably the coding region thereof, conferred the production of or the increase in succinate compared with the wild type control.

[73662] The nucleic acid sequence of At4g15660 from Arabidopsis thaliana, e.g. as shown in the respective line in column 5 of Table I, application no. 15, has been published in F. And the activity of the gene product thereof is the activity of monothiol glutaredoxin.

[73663] Accordingly, in one embodiment, the process of the present invention for producing vitamin c and/or threonic acid in a non-human organism, like a microorganism or a plant or a part thereof, comprises increasing or generating the activity of a gene product with the activity of a gene product conferring the activity of “monothiol glutaredoxin”, especially from Arabidopsis thaliana or its functional equivalent or its homolog, e.g. the increase of
[73664] (a) a gene product of a gene comprising the nucleic acid molecule as shown in the respective line in column 5 of Table I (whereby the respective line disclose in column 7 the fine chemical vitamin c and/or threonic acid), application no. 15, preferably the coding region thereof, or a homolog or a fragment thereof, and being depicted in the same respective line as said At4g15660, or a functional equivalent or a homolog thereof as shown in column 8 of Table I, application no. 15, preferably the coding region thereof, particularly a homolog or functional equivalent as shown in column 8 of Table I B, application no. 15, and being depicted in the same respective line as said At4g15660, and preferably the activity is increased non-targeted, or
[73665] (b) a polypeptide comprising a polypeptide, a consensus sequence or at least a polypeptide motif as shown in the respective line in column 5 of Table II or in column 8 of Table IV, application no. 15, respectively, and being depicted in the same respective line as said At4g15660, or a functional equivalent or a homolog thereof as depicted in column 8 of Table II, application no. 15, preferably a homolog or functional equivalent as depicted in column 8 of Table II B, application no. 15, and being depicted in the same respective line as said At4g15660, and preferably the activity is increased non-targeted, whereby the respective line disclose in column 7 the fine chemical vitamin c and/or threonic acid.

[73666] Accordingly, in one embodiment, the molecule which activity is to be increased in the process of the invention is the gene product with an activity as a “monothiol glutaredoxin”, preferably it is the molecule of section (a) or (b) of this paragraph.

[73667] In particular, it was observed that in plants, especially in Arabidopsis thaliana, increasing or generating the activity of a gene product non-targeted with the activity of a “monothiol glutaredoxin”, preferably being encoded by a gene comprising the nucleic acid sequence SEQ ID NO. 23482, preferably the coding region thereof, conferred the production of or the increase in vitamin c and/or threonic acid compared with the wild type control.

[73668] The nucleic acid sequence of At4g15670 from Arabidopsis thaliana, e.g. as shown in the respective line in column 5 of Table I, application no. 15, has been published in F. And the activity of the gene product thereof is the activity of monothiol glutaredoxin.

[73669] Accordingly, in one embodiment, the process of the present invention for producing fumarate in a non-human organism, like a microorganism or a plant or a part thereof, comprises increasing or generating the activity of a gene product with the activity of a gene product conferring the activity of “monothiol glutaredoxin”, especially from Arabidopsis thaliana or its functional equivalent or its homolog, e.g. the increase of
[73670] (a) a gene product of a gene comprising the nucleic acid molecule as shown in the respective line in column 5 of Table I (whereby the respective line disclose in column 7 the fine chemical fumarate), application no. 15, preferably the coding region thereof, or a homolog or a fragment thereof, and being depicted in the same respective line as said At4g15670, or a functional equivalent or a homolog thereof as shown in column 8 of Table I, application no. 15, preferably the coding region thereof, particularly a homolog or functional equivalent as shown in column 8 of Table I B, application no. 15, and being depicted in the same respective line as said At4g15670, and preferably the activity is increased non-targeted, or
[73671] (b) a polypeptide comprising a polypeptide, a consensus sequence or at least a polypeptide motif as shown in the respective line in column 5 of Table II or in column 8 of Table IV, application no. 15, respectively, and being depicted in the same respective line as said At4g15670, or a functional equivalent or a homolog thereof as depicted in column 8 of Table II, application no. 15, preferably a homolog or functional equivalent as depicted in column 8 of Table II B, application no. 15, and being depicted in the same respective line as said At4g15670, and preferably the activity is increased non-targeted, whereby the respective line disclose in column 7 the fine chemical fumarate.

[73672] Accordingly, in one embodiment, the molecule which activity is to be increased in the process of the invention is the gene product with an activity as a “monothiol glutaredoxin”, preferably it is the molecule of section (a) or (b) of this paragraph.

[73673] In particular, it was observed that in plants, especially in Arabidopsis thaliana, increasing or generating the activity of a gene product non-targeted with the activity of a “monothiol glutaredoxin”, preferably being encoded by a gene comprising the nucleic acid sequence SEQ ID NO. 3279, preferably the coding region thereof, conferred the production of or the increase in fumarate compared with the wild type control.

[73674] The nucleic acid sequence of At4g15670 from Arabidopsis thaliana, e.g. as shown in the respective line in column 5 of Table I, application no. 15, has been published in F. And the activity of the gene product thereof is the activity of monothiol glutaredoxin.

[73675] Accordingly, in one embodiment, the process of the present invention for producing glycerate in a non-human organism, like a microorganism or a plant or a part thereof, comprises increasing or generating the activity of a gene product with the activity of a gene product conferring the activity of “monothiol glutaredoxin”, especially from Arabidopsis thaliana or its functional equivalent or its homolog, e.g. the increase of
[73676] (a) a gene product of a gene comprising the nucleic acid molecule as shown in the respective line in column 5 of Table I (whereby the respective line disclose in column 7 the fine chemical glycerate), application no. 15, preferably the coding region thereof, or a homolog or a fragment thereof, and being depicted in the same respective line as said At4g15670, or a functional equivalent or a homolog thereof as shown in column 8 of Table I, application no. 15, preferably the coding region thereof, particularly a homolog or functional equivalent as shown in column 8 of Table I B, application no. 15, and being depicted in the same respective line as said At4g15670, and preferably the activity is increased non-targeted, or
[73677] (b) a polypeptide comprising a polypeptide, a consensus sequence or at least a polypeptide motif as shown in the respective line in column 5 of Table II or in column 8 of Table IV, application no. 15, respectively, and being depicted in the same respective line as said At4g15670, or a functional equivalent or a homolog thereof as depicted in column 8 of Table II, application no. 15, preferably a homolog or functional equivalent as depicted in column 8 of Table II B, application no. 15, and being depicted in the same respective line as said At4g15670, and preferably the activity is increased non-targeted, whereby the respective line disclose in column 7 the fine chemical glycerate.

[73678] Accordingly, in one embodiment, the molecule which activity is to be increased in the process of the invention is the gene product with an activity as a “monothiol glutaredoxin”, preferably it is the molecule of section (a) or (b) of this paragraph.

[73679] In particular, it was observed that in plants, especially in Arabidopsis thaliana, increasing or generating the activity of a gene product non-targeted with the activity of a “monothiol glutaredoxin”, preferably being encoded by a gene comprising the nucleic acid sequence SEQ ID NO. 3279, preferably the coding region thereof, conferred the production of or the increase in glycerate compared with the wild type control.

[73680] The nucleic acid sequence of At4g15670 from Arabidopsis thaliana, e.g. as shown in the respective line in column 5 of Table I, application no. 15, has been published in F. And the activity of the gene product thereof is the activity of monothiol glutaredoxin.

[73681] Accordingly, in one embodiment, the process of the present invention for producing malate in a non-human organism, like a microorganism or a plant or a part thereof, comprises increasing or generating the activity of a gene product with the activity of a gene product conferring the activity of “monothiol glutaredoxin”, especially from Arabidopsis thaliana or its functional equivalent or its homolog, e.g. the increase of
[73682] (a) a gene product of a gene comprising the nucleic acid molecule as shown in the respective line in column 5 of Table I (whereby the respective line disclose in column 7 the fine chemical malate), application no. 15, preferably the coding region thereof, or a homolog or a fragment thereof, and being depicted in the same respective line as said At4g15670, or a functional equivalent or a homolog thereof as shown in column 8 of Table I, application no. 15, preferably the coding region thereof, particularly a homolog or functional equivalent as shown in column 8 of Table I B, application no. 15, and being depicted in the same respective line as said At4g15670, and preferably the activity is increased non-targeted, or
[73683] (b) a polypeptide comprising a polypeptide, a consensus sequence or at least a polypeptide motif as shown in the respective line in column 5 of Table II or in column 8 of Table IV, application no. 15, respectively, and being depicted in the same respective line as said At4g15670, or a functional equivalent or a homolog thereof as depicted in column 8 of Table II, application no. 15, preferably a homolog or functional equivalent as depicted in column 8 of Table II B, application no. 15, and being depicted in the same respective line as said At4g15670, and preferably the activity is increased non-targeted, whereby the respective line disclose in column 7 the fine chemical malate.

[73684] Accordingly, in one embodiment, the molecule which activity is to be increased in the process of the invention is the gene product with an activity as a “monothiol glutaredoxin”, preferably it is the molecule of section (a) or (b) of this paragraph.

[73685] In particular, it was observed that in plants, especially in Arabidopsis thaliana, increasing or generating the activity of a gene product non-targeted with the activity of a “monothiol glutaredoxin”, preferably being encoded by a gene comprising the nucleic acid sequence SEQ ID NO. 3279, preferably the coding region thereof, conferred the production of or the increase in malate compared with the wild type control.

[73686] The nucleic acid sequence of At4g15670 from Arabidopsis thaliana, e.g. as shown in the respective line in column 5 of Table I, application no. 15, has been published in F. And the activity of the gene product thereof is the activity of monothiol glutaredoxin.

[73687] Accordingly, in one embodiment, the process of the present invention for producing succinate in a non-human organism, like a microorganism or a plant or a part thereof, comprises increasing or generating the activity of a gene product with the activity of a gene product conferring the activity of “monothiol glutaredoxin”, especially from Arabidopsis thaliana or its functional equivalent or its homolog, e.g. the increase of
[73688] (a) a gene product of a gene comprising the nucleic acid molecule as shown in the respective line in column 5 of Table I (whereby the respective line disclose in column 7 the fine chemical succinate), application no. 15, preferably the coding region thereof, or a homolog or a fragment thereof, and being depicted in the same respective line as said At4g15670, or a functional equivalent or a homolog thereof as shown in column 8 of Table I, application no. 15, preferably the coding region thereof, particularly a homolog or functional equivalent as shown in column 8 of Table I B, application no. 15, and being depicted in the same respective line as said At4g15670, and preferably the activity is increased non-targeted, or
[73689] (b) a polypeptide comprising a polypeptide, a consensus sequence or at least a polypeptide motif as shown in the respective line in column 5 of Table II or in column 8 of Table IV, application no. 15, respectively, and being depicted in the same respective line as said At4g15670, or a functional equivalent or a homolog thereof as depicted in column 8 of Table II, application no. 15, preferably a homolog or functional equivalent as depicted in column 8 of Table II B, application no. 15, and being depicted in the same respective line as said At4g15670, and preferably the activity is increased non-targeted, whereby the respective line disclose in column 7 the fine chemical succinate.

[73690] Accordingly, in one embodiment, the molecule which activity is to be increased in the process of the invention is the gene product with an activity as a “monothiol glutaredoxin”, preferably it is the molecule of section (a) or (b) of this paragraph.

[73691] In particular, it was observed that in plants, especially in Arabidopsis thaliana, increasing or generating the activity of a gene product non-targeted with the activity of a “monothiol glutaredoxin”, preferably being encoded by a gene comprising the nucleic acid sequence SEQ ID NO. 3279, preferably the coding region thereof, conferred the production of or the increase in succinate compared with the wild type control.

[73692] The nucleic acid sequence of At4g15690 from Arabidopsis thaliana, e.g. as shown in the respective line in column 5 of Table I, application no. 15, has been published in F. And the activity of the gene product thereof is the activity of monothiol glutaredoxin.

[73693] Accordingly, in one embodiment, the process of the present invention for producing citramalate in a non-human organism, like a microorganism or a plant or a part thereof, comprises increasing or generating the activity of a gene product with the activity of a gene product conferring the activity of “monothiol glutaredoxin”, especially from Arabidopsis thaliana or its functional equivalent or its homolog, e.g. the increase of
[73694] (a) a gene product of a gene comprising the nucleic acid molecule as shown in the respective line in column 5 of Table I (whereby the respective line disclose in column 7 the fine chemical citramalate), application no. 15, preferably the coding region thereof, or a homolog or a fragment thereof, and being depicted in the same respective line as said At4g15690, or a functional equivalent or a homolog thereof as shown in column 8 of Table I, application no. 15, preferably the coding region thereof, particularly a homolog or functional equivalent as shown in column 8 of Table I B, application no. 15, and being depicted in the same respective line as said At4g15690, and preferably the activity is increased non-targeted, or
[73695] (b) a polypeptide comprising a polypeptide, a consensus sequence or at least a polypeptide motif as shown in the respective line in column 5 of Table II or in column 8 of Table IV, application no. 15, respectively, and being depicted in the same respective line as said At4g15690, or a functional equivalent or a homolog thereof as depicted in column 8 of Table II, application no. 15, preferably a homolog or functional equivalent as depicted in column 8 of Table II B, application no. 15, and being depicted in the same respective line as said At4g15690, and preferably the activity is increased non-targeted, whereby the respective line disclose in column 7 the fine chemical citramalate.

[73696] Accordingly, in one embodiment, the molecule which activity is to be increased in the process of the invention is the gene product with an activity as a “monothiol glutaredoxin”, preferably it is the molecule of section (a) or (b) of this paragraph.

[73697] In particular, it was observed that in plants, especially in Arabidopsis thaliana, increasing or generating the activity of a gene product non-targeted with the activity of a “monothiol glutaredoxin”, preferably being encoded by a gene comprising the nucleic acid sequence SEQ ID NO. 23844, preferably the coding region thereof, conferred the production of or the increase in citramalate compared with the wild type control.

[73698] The nucleic acid sequence of At4g15690 from Arabidopsis thaliana, e.g. as shown in the respective line in column 5 of Table I, application no. 15, has been published in F. And the activity of the gene product thereof is the activity of monothiol glutaredoxin.

[73699] Accordingly, in one embodiment, the process of the present invention for producing fumarate in a non-human organism, like a microorganism or a plant or a part thereof, comprises increasing or generating the activity of a gene product with the activity of a gene product conferring the activity of “monothiol glutaredoxin”, especially from Arabidopsis thaliana or its functional equivalent or its homolog, e.g. the increase of
[73700] (a) a gene product of a gene comprising the nucleic acid molecule as shown in the respective line in column 5 of Table I (whereby the respective line disclose in column 7 the fine chemical fumarate), application no. 15, preferably the coding region thereof, or a homolog or a fragment thereof, and being depicted in the same respective line as said At4g15690, or a functional equivalent or a homolog thereof as shown in column 8 of Table I, application no. 15, preferably the coding region thereof, particularly a homolog or functional equivalent as shown in column 8 of Table I B, application no. 15, and being depicted in the same respective line as said At4g15690, and preferably the activity is increased non-targeted, or
[73701] (b) a polypeptide comprising a polypeptide, a consensus sequence or at least a polypeptide motif as shown in the respective line in column 5 of Table II or in column 8 of Table IV, application no. 15, respectively, and being depicted in the same respective line as said At4g15690, or a functional equivalent or a homolog thereof as depicted in column 8 of Table II, application no. 15, preferably a homolog or functional equivalent as depicted in column 8 of Table II B, application no. 15, and being depicted in the same respective line as said At4g15690, and preferably the activity is increased non-targeted, whereby the respective line disclose in column 7 the fine chemical fumarate.

[73702] Accordingly, in one embodiment, the molecule which activity is to be increased in the process of the invention is the gene product with an activity as a “monothiol glutaredoxin”, preferably it is the molecule of section (a) or (b) of this paragraph.

[73703] In particular, it was observed that in plants, especially in Arabidopsis thaliana, increasing or generating the activity of a gene product non-targeted with the activity of a “monothiol glutaredoxin”, preferably being encoded by a gene comprising the nucleic acid sequence SEQ ID NO. 23844, preferably the coding region thereof, conferred the production of or the increase in fumarate compared with the wild type control.

[73704] The nucleic acid sequence of At4g15690 from Arabidopsis thaliana, e.g. as shown in the respective line in column 5 of Table I, application no. 15, has been published in F. And the activity of the gene product thereof is the activity of monothiol glutaredoxin.

[73705] Accordingly, in one embodiment, the process of the present invention for producing malate in a non-human organism, like a microorganism or a plant or a part thereof, comprises increasing or generating the activity of a gene product with the activity of a gene product conferring the activity of “monothiol glutaredoxin”, especially from Arabidopsis thaliana or its functional equivalent or its homolog, e.g. the increase of
[73706] (a) a gene product of a gene comprising the nucleic acid molecule as shown in the respective line in column 5 of Table I (whereby the respective line disclose in column 7 the fine chemical malate), application no. 15, preferably the coding region thereof, or a homolog or a fragment thereof, and being depicted in the same respective line as said At4g15690, or a functional equivalent or a homolog thereof as shown in column 8 of Table I, application no. 15, preferably the coding region thereof, particularly a homolog or functional equivalent as shown in column 8 of Table I B, application no. 15, and being depicted in the same respective line as said At4g15690, and preferably the activity is increased non-targeted, or
[73707] (b) a polypeptide comprising a polypeptide, a consensus sequence or at least a polypeptide motif as shown in the respective line in column 5 of Table II or in column 8 of Table IV, application no. 15, respectively, and being depicted in the same respective line as said At4g15690, or a functional equivalent or a homolog thereof as depicted in column 8 of Table II, application no. 15, preferably a homolog or functional equivalent as depicted in column 8 of Table II B, application no. 15, and being depicted in the same respective line as said At4g15690, and preferably the activity is increased non-targeted, whereby the respective line disclose in column 7 the fine chemical malate.

[73708] Accordingly, in one embodiment, the molecule which activity is to be increased in the process of the invention is the gene product with an activity as a “monothiol glutaredoxin”, preferably it is the molecule of section (a) or (b) of this paragraph.

[73709] In particular, it was observed that in plants, especially in Arabidopsis thaliana, increasing or generating the activity of a gene product non-targeted with the activity of a “monothiol glutaredoxin”, preferably being encoded by a gene comprising the nucleic acid sequence SEQ ID NO. 23844, preferably the coding region thereof, conferred the production of or the increase in malate compared with the wild type control.

[73710] The nucleic acid sequence of At4g15690 from Arabidopsis thaliana, e.g. as shown in the respective line in column 5 of Table I, application no. 15, has been published in F. And the activity of the gene product thereof is the activity of monothiol glutaredoxin.

[73711] Accordingly, in one embodiment, the process of the present invention for producing succinate in a non-human organism, like a microorganism or a plant or a part thereof, comprises increasing or generating the activity of a gene product with the activity of a gene product conferring the activity of “monothiol glutaredoxin”, especially from Arabidopsis thaliana or its functional equivalent or its homolog, e.g. the increase of
[73712] (a) a gene product of a gene comprising the nucleic acid molecule as shown in the respective line in column 5 of Table I (whereby the respective line disclose in column 7 the fine chemical succinate), application no. 15, preferably the coding region thereof, or a homolog or a fragment thereof, and being depicted in the same respective line as said At4g15690, or a functional equivalent or a homolog thereof as shown in column 8 of Table I, application no. 15, preferably the coding region thereof, particularly a homolog or functional equivalent as shown in column 8 of Table I B, application no. 15, and being depicted in the same respective line as said At4g15690, and preferably the activity is increased non-targeted, or
[73713] (b) a polypeptide comprising a polypeptide, a consensus sequence or at least a polypeptide motif as shown in the respective line in column 5 of Table II or in column 8 of Table IV, application no. 15, respectively, and being depicted in the same respective line as said At4g15690, or a functional equivalent or a homolog thereof as depicted in column 8 of Table II, application no. 15, preferably a homolog or functional equivalent as depicted in column 8 of Table II B, application no. 15, and being depicted in the same respective line as said At4g15690, and preferably the activity is increased non-targeted, whereby the respective line disclose in column 7 the fine chemical succinate.

[73714] Accordingly, in one embodiment, the molecule which activity is to be increased in the process of the invention is the gene product with an activity as a “monothiol glutaredoxin”, preferably it is the molecule of section (a) or (b) of this paragraph.

[73715] In particular, it was observed that in plants, especially in Arabidopsis thaliana, increasing or generating the activity of a gene product non-targeted with the activity of a “monothiol glutaredoxin”, preferably being encoded by a gene comprising the nucleic acid sequence SEQ ID NO. 23844, preferably the coding region thereof, conferred the production of or the increase in succinate compared with the wild type control.

[73716] The nucleic acid sequence of At4g15690 from Arabidopsis thaliana, e.g. as shown in the respective line in column 5 of Table I, application no. 15, has been published in F. And the activity of the gene product thereof is the activity of monothiol glutaredoxin.

[73717] Accordingly, in one embodiment, the process of the present invention for producing vitamin c and/or threonic acid in a non-human organism, like a microorganism or a plant or a part thereof, comprises increasing or generating the activity of a gene product with the activity of a gene product conferring the activity of “monothiol glutaredoxin”, especially from Arabidopsis thaliana or its functional equivalent or its homolog, e.g. the increase of
[73718] (a) a gene product of a gene comprising the nucleic acid molecule as shown in the respective line in column 5 of Table I (whereby the respective line disclose in column 7 the fine chemical vitamin c and/or threonic acid), application no. 15, preferably the coding region thereof, or a homolog or a fragment thereof, and being depicted in the same respective line as said At4g15690, or a functional equivalent or a homolog thereof as shown in column 8 of Table I, application no. 15, preferably the coding region thereof, particularly a homolog or functional equivalent as shown in column 8 of Table I B, application no. 15, and being depicted in the same respective line as said At4g15690, and preferably the activity is increased non-targeted, or
[73719] (b) a polypeptide comprising a polypeptide, a consensus sequence or at least a polypeptide motif as shown in the respective line in column 5 of Table II or in column 8 of Table IV, application no. 15, respectively, and being depicted in the same respective line as said At4g15690, or a functional equivalent or a homolog thereof as depicted in column 8 of Table II, application no. 15, preferably a homolog or functional equivalent as depicted in column 8 of Table II B, application no. 15, and being depicted in the same respective line as said At4g15690, and preferably the activity is increased non-targeted, whereby the respective line disclose in column 7 the fine chemical vitamin c and/or threonic acid.

[73720] Accordingly, in one embodiment, the molecule which activity is to be increased in the process of the invention is the gene product with an activity as a “monothiol glutaredoxin”, preferably it is the molecule of section (a) or (b) of this paragraph.

[73721] In particular, it was observed that in plants, especially in Arabidopsis thaliana, increasing or generating the activity of a gene product non-targeted with the activity of a “monothiol glutaredoxin”, preferably being encoded by a gene comprising the nucleic acid sequence SEQ ID NO. 23844, preferably the coding region thereof, conferred the production of or the increase in vitamin c and/or threonic acid compared with the wild type control.

[73722] The nucleic acid sequence of At4g15700 from Arabidopsis thaliana, e.g. as shown in the respective line in column 5 of Table I, application no. 15, has been published in F. And the activity of the gene product thereof is the activity of monothiol glutaredoxin.

[73723] Accordingly, in one embodiment, the process of the present invention for producing glycerate in a non-human organism, like a microorganism or a plant or a part thereof, comprises increasing or generating the activity of a gene product with the activity of a gene product conferring the activity of “monothiol glutaredoxin”, especially from Arabidopsis thaliana or its functional equivalent or its homolog, e.g. the increase of
[73724] (a) a gene product of a gene comprising the nucleic acid molecule as shown in the respective line in column 5 of Table I (whereby the respective line disclose in column 7 the fine chemical glycerate), application no. 15, preferably the coding region thereof, or a homolog or a fragment thereof, and being depicted in the same respective line as said At4g15700, or a functional equivalent or a homolog thereof as shown in column 8 of Table I, application no. 15, preferably the coding region thereof, particularly a homolog or functional equivalent as shown in column 8 of Table I B, application no. 15, and being depicted in the same respective line as said At4g15700, and preferably the activity is increased non-targeted, or
[73725] (b) a polypeptide comprising a polypeptide, a consensus sequence or at least a polypeptide motif as shown in the respective line in column 5 of Table II or in column 8 of Table IV, application no. 15, respectively, and being depicted in the same respective line as said At4g15700, or a functional equivalent or a homolog thereof as depicted in column 8 of Table II, application no. 15, preferably a homolog or functional equivalent as depicted in column 8 of Table II B, application no. 15, and being depicted in the same respective line as said At4g15700, and preferably the activity is increased non-targeted, whereby the respective line disclose in column 7 the fine chemical glycerate.

[73726] Accordingly, in one embodiment, the molecule which activity is to be increased in the process of the invention is the gene product with an activity as a “monothiol glutaredoxin”, preferably it is the molecule of section (a) or (b) of this paragraph.

[73727] In particular, it was observed that in plants, especially in Arabidopsis thaliana, increasing or generating the activity of a gene product non-targeted with the activity of a “monothiol glutaredoxin”, preferably being encoded by a gene comprising the nucleic acid sequence SEQ ID NO. 3654, preferably the coding region thereof, conferred the production of or the increase in glycerate compared with the wild type control.

[73728] The nucleic acid sequence of At4g26080 from Arabidopsis thaliana, e.g. as shown in the respective line in column 5 of Table I, application no. 15, has been published in F. And the activity of the gene product thereof is the activity of protein phosphatase.

[73729] Accordingly, in one embodiment, the process of the present invention for producing citramalate in a non-human organism, like a microorganism or a plant or a part thereof, comprises increasing or generating the activity of a gene product with the activity of a gene product conferring the activity of “protein phosphatase”, especially from Arabidopsis thaliana or its functional equivalent or its homolog, e.g. the increase of
[73730] (a) a gene product of a gene comprising the nucleic acid molecule as shown in the respective line in column 5 of Table I (whereby the respective line disclose in column 7 the fine chemical citramalate), application no. 15, preferably the coding region thereof, or a homolog or a fragment thereof, and being depicted in the same respective line as said At4g26080, or a functional equivalent or a homolog thereof as shown in column 8 of Table I, application no. 15, preferably the coding region thereof, particularly a homolog or functional equivalent as shown in column 8 of Table I B, application no. 15, and being depicted in the same respective line as said At4g26080, and preferably the activity is increased non-targeted, or
[73731] (b) a polypeptide comprising a polypeptide, a consensus sequence or at least a polypeptide motif as shown in the respective line in column 5 of Table II or in column 8 of Table IV, application no. 15, respectively, and being depicted in the same respective line as said At4g26080, or a functional equivalent or a homolog thereof as depicted in column 8 of Table II, application no. 15, preferably a homolog or functional equivalent as depicted in column 8 of Table II B, application no. 15, and being depicted in the same respective line as said At4g26080, and preferably the activity is increased non-targeted, whereby the respective line disclose in column 7 the fine chemical citramalate.

[73732] Accordingly, in one embodiment, the molecule which activity is to be increased in the process of the invention is the gene product with an activity as a “protein phosphatase”, preferably it is the molecule of section (a) or (b) of this paragraph.

[73733] In particular, it was observed that in plants, especially in Arabidopsis thaliana, increasing or generating the activity of a gene product non-targeted with the activity of a “protein phosphatase”, preferably being encoded by a gene comprising the nucleic acid sequence SEQ ID NO. 68849, preferably the coding region thereof, conferred the production of or the increase in citramalate compared with the wild type control.

[73734] The nucleic acid sequence of At4g26080 from Arabidopsis thaliana, e.g. as shown in the respective line in column 5 of Table I, application no. 15, has been published in F. And the activity of the gene product thereof is the activity of protein phosphatase.

[73735] Accordingly, in one embodiment, the process of the present invention for producing succinate in a non-human organism, like a microorganism or a plant or a part thereof, comprises increasing or generating the activity of a gene product with the activity of a gene product conferring the activity of “protein phosphatase”, especially from Arabidopsis thaliana or its functional equivalent or its homolog, e.g. the increase of
[73736] (a) a gene product of a gene comprising the nucleic acid molecule as shown in the respective line in column 5 of Table I (whereby the respective line disclose in column 7 the fine chemical succinate), application no. 15, preferably the coding region thereof, or a homolog or a fragment thereof, and being depicted in the same respective line as said At4g26080, or a functional equivalent or a homolog thereof as shown in column 8 of Table I, application no. 15, preferably the coding region thereof, particularly a homolog or functional equivalent as shown in column 8 of Table I B, application no. 15, and being depicted in the same respective line as said At4g26080, and preferably the activity is increased non-targeted, or
[73737] (b) a polypeptide comprising a polypeptide, a consensus sequence or at least a polypeptide motif as shown in the respective line in column 5 of Table II or in column 8 of Table IV, application no. 15, respectively, and being depicted in the same respective line as said At4g26080, or a functional equivalent or a homolog thereof as depicted in column 8 of Table II, application no. 15, preferably a homolog or functional equivalent as depicted in column 8 of Table II B, application no. 15, and being depicted in the same respective line as said At4g26080, and preferably the activity is increased non-targeted, whereby the respective line disclose in column 7 the fine chemical succinate.

[73738] Accordingly, in one embodiment, the molecule which activity is to be increased in the process of the invention is the gene product with an activity as a “protein phosphatase”, preferably it is the molecule of section (a) or (b) of this paragraph.

[73739] In particular, it was observed that in plants, especially in Arabidopsis thaliana, increasing or generating the activity of a gene product non-targeted with the activity of a “protein phosphatase”, preferably being encoded by a gene comprising the nucleic acid sequence SEQ ID NO. 68849, preferably the coding region thereof, conferred the production of or the increase in succinate compared with the wild type control.

[73740] The nucleic acid sequence of At4g33040 from Arabidopsis thaliana, e.g. as shown in the respective line in column 5 of Table I, application no. 15, has been published in F. And the activity of the gene product thereof is the activity of glutaredoxin.

[73741] Accordingly, in one embodiment, the process of the present invention for producing citramalate in a non-human organism, like a microorganism or a plant or a part thereof, comprises increasing or generating the activity of a gene product with the activity of a gene product conferring the activity of “glutaredoxin”, especially from Arabidopsis thaliana or its functional equivalent or its homolog, e.g. the increase of
[73742] (a) a gene product of a gene comprising the nucleic acid molecule as shown in the respective line in column 5 of Table I (whereby the respective line disclose in column 7 the fine chemical citramalate), application no. 15, preferably the coding region thereof, or a homolog or a fragment thereof, and being depicted in the same respective line as said At4g33040, or a functional equivalent or a homolog thereof as shown in column 8 of Table I, application no. 15, preferably the coding region thereof, particularly a homolog or functional equivalent as shown in column 8 of Table I B, application no. 15, and being depicted in the same respective line as said At4g33040, and preferably the activity is increased non-targeted, or
[73743] (b) a polypeptide comprising a polypeptide, a consensus sequence or at least a polypeptide motif as shown in the respective line in column 5 of Table II or in column 8 of Table IV, application no. 15, respectively, and being depicted in the same respective line as said At4g33040, or a functional equivalent or a homolog thereof as depicted in column 8 of Table II, application no. 15, preferably a homolog or functional equivalent as depicted in column 8 of Table II B, application no. 15, and being depicted in the same respective line as said At4g33040, and preferably the activity is increased non-targeted, whereby the respective line disclose in column 7 the fine chemical citramalate.

[73744] Accordingly, in one embodiment, the molecule which activity is to be increased in the process of the invention is the gene product with an activity as a “glutaredoxin”, preferably it is the molecule of section (a) or (b) of this paragraph.

[73745] In particular, it was observed that in plants, especially in Arabidopsis thaliana, increasing or generating the activity of a gene product non-targeted with the activity of a “glutaredoxin”, preferably being encoded by a gene comprising the nucleic acid sequence SEQ ID NO. 4102, preferably the coding region thereof, conferred the production of or the increase in citramalate compared with the wild type control.

[73746] The nucleic acid sequence of At4g33040 from Arabidopsis thaliana, e.g. as shown in the respective line in column 5 of Table I, application no. 15, has been published in F. And the activity of the gene product thereof is the activity of glutaredoxin.

[73747] Accordingly, in one embodiment, the process of the present invention for producing fumarate in a non-human organism, like a microorganism or a plant or a part thereof, comprises increasing or generating the activity of a gene product with the activity of a gene product conferring the activity of “glutaredoxin”, especially from Arabidopsis thaliana or its functional equivalent or its homolog, e.g. the increase of
[73748] (a) a gene product of a gene comprising the nucleic acid molecule as shown in the respective line in column 5 of Table I (whereby the respective line disclose in column 7 the fine chemical fumarate), application no. 15, preferably the coding region thereof, or a homolog or a fragment thereof, and being depicted in the same respective line as said At4g33040, or a functional equivalent or a homolog thereof as shown in column 8 of Table I, application no. 15, preferably the coding region thereof, particularly a homolog or functional equivalent as shown in column 8 of Table I B, application no. 15, and being depicted in the same respective line as said At4g33040, and preferably the activity is increased non-targeted, or
[73749] (b) a polypeptide comprising a polypeptide, a consensus sequence or at least a polypeptide motif as shown in the respective line in column 5 of Table II or in column 8 of Table IV, application no. 15, respectively, and being depicted in the same respective line as said At4g33040, or a functional equivalent or a homolog thereof as depicted in column 8 of Table II, application no. 15, preferably a homolog or functional equivalent as depicted in column 8 of Table II B, application no. 15, and being depicted in the same respective line as said At4g33040, and preferably the activity is increased non-targeted, whereby the respective line disclose in column 7 the fine chemical fumarate.

[73750] Accordingly, in one embodiment, the molecule which activity is to be increased in the process of the invention is the gene product with an activity as a “glutaredoxin”, preferably it is the molecule of section (a) or (b) of this paragraph.

[73751] In particular, it was observed that in plants, especially in Arabidopsis thaliana, increasing or generating the activity of a gene product non-targeted with the activity of a “glutaredoxin”, preferably being encoded by a gene comprising the nucleic acid sequence SEQ ID NO. 4102, preferably the coding region thereof, conferred the production of or the increase in fumarate compared with the wild type control.

[73752] The nucleic acid sequence of At4g33040 from Arabidopsis thaliana, e.g. as shown in the respective line in column 5 of Table I, application no. 15, has been published in F. And the activity of the gene product thereof is the activity of glutaredoxin.

[73753] Accordingly, in one embodiment, the process of the present invention for producing malate in a non-human organism, like a microorganism or a plant or a part thereof, comprises increasing or generating the activity of a gene product with the activity of a gene product conferring the activity of “glutaredoxin”, especially from Arabidopsis thaliana or its functional equivalent or its homolog, e.g. the increase of
[73754] (a) a gene product of a gene comprising the nucleic acid molecule as shown in the respective line in column 5 of Table I (whereby the respective line disclose in column 7 the fine chemical malate), application no. 15, preferably the coding region thereof, or a homolog or a fragment thereof, and being depicted in the same respective line as said At4g33040, or a functional equivalent or a homolog thereof as shown in column 8 of Table I, application no. 15, preferably the coding region thereof, particularly a homolog or functional equivalent as shown in column 8 of Table I B, application no. 15, and being depicted in the same respective line as said At4g33040, and preferably the activity is increased non-targeted, or
[73755] (b) a polypeptide comprising a polypeptide, a consensus sequence or at least a polypeptide motif as shown in the respective line in column 5 of Table II or in column 8 of Table IV, application no. 15, respectively, and being depicted in the same respective line as said At4g33040, or a functional equivalent or a homolog thereof as depicted in column 8 of Table II, application no. 15, preferably a homolog or functional equivalent as depicted in column 8 of Table II B, application no. 15, and being depicted in the same respective line as said At4g33040, and preferably the activity is increased non-targeted, whereby the respective line disclose in column 7 the fine chemical malate.

[73756] Accordingly, in one embodiment, the molecule which activity is to be increased in the process of the invention is the gene product with an activity as a “glutaredoxin”, preferably it is the molecule of section (a) or (b) of this paragraph.

[73757] In particular, it was observed that in plants, especially in Arabidopsis thaliana, increasing or generating the activity of a gene product non-targeted with the activity of a “glutaredoxin”, preferably being encoded by a gene comprising the nucleic acid sequence SEQ ID NO. 4102, preferably the coding region thereof, conferred the production of or the increase in malate compared with the wild type control.

[73758] The nucleic acid sequence of At4g33040 from Arabidopsis thaliana, e.g. as shown in the respective line in column 5 of Table I, application no. 15, has been published in F. And the activity of the gene product thereof is the activity of glutaredoxin.

[73759] Accordingly, in one embodiment, the process of the present invention for producing succinate in a non-human organism, like a microorganism or a plant or a part thereof, comprises increasing or generating the activity of a gene product with the activity of a gene product conferring the activity of “glutaredoxin”, especially from Arabidopsis thaliana or its functional equivalent or its homolog, e.g. the increase of
[73760] (a) a gene product of a gene comprising the nucleic acid molecule as shown in the respective line in column 5 of Table I (whereby the respective line disclose in column 7 the fine chemical succinate), application no. 15, preferably the coding region thereof, or a homolog or a fragment thereof, and being depicted in the same respective line as said At4g33040, or a functional equivalent or a homolog thereof as shown in column 8 of Table I, application no. 15, preferably the coding region thereof, particularly a homolog or functional equivalent as shown in column 8 of Table I B, application no. 15, and being depicted in the same respective line as said At4g33040, and preferably the activity is increased non-targeted, or
[73761] (b) a polypeptide comprising a polypeptide, a consensus sequence or at least a polypeptide motif as shown in the respective line in column 5 of Table II or in column 8 of Table IV, application no. 15, respectively, and being depicted in the same respective line as said At4g33040, or a functional equivalent or a homolog thereof as depicted in column 8 of Table II, application no. 15, preferably a homolog or functional equivalent as depicted in column 8 of Table II B, application no. 15, and being depicted in the same respective line as said At4g33040, and preferably the activity is increased non-targeted, whereby the respective line disclose in column 7 the fine chemical succinate.

[73762] Accordingly, in one embodiment, the molecule which activity is to be increased in the process of the invention is the gene product with an activity as a “glutaredoxin”, preferably it is the molecule of section (a) or (b) of this paragraph.

[73763] In particular, it was observed that in plants, especially in Arabidopsis thaliana, increasing or generating the activity of a gene product non-targeted with the activity of a “glutaredoxin”, preferably being encoded by a gene comprising the nucleic acid sequence SEQ ID NO. 4102, preferably the coding region thereof, conferred the production of or the increase in succinate compared with the wild type control.

[73764] The nucleic acid sequence of At4g33040 from Arabidopsis thaliana, e.g. as shown in the respective line in column 5 of Table I, application no. 15, has been published in F. And the activity of the gene product thereof is the activity of glutaredoxin.

[73765] Accordingly, in one embodiment, the process of the present invention for producing vitamin c and/or threonic acid in a non-human organism, like a microorganism or a plant or a part thereof, comprises increasing or generating the activity of a gene product with the activity of a gene product conferring the activity of “glutaredoxin”, especially from Arabidopsis thaliana or its functional equivalent or its homolog, e.g. the increase of
[73766] (a) a gene product of a gene comprising the nucleic acid molecule as shown in the respective line in column 5 of Table I (whereby the respective line disclose in column 7 the fine chemical vitamin c and/or threonic acid), application no. 15, preferably the coding region thereof, or a homolog or a fragment thereof, and being depicted in the same respective line as said At4g33040, or a functional equivalent or a homolog thereof as shown in column 8 of Table I, application no. 15, preferably the coding region thereof, particularly a homolog or functional equivalent as shown in column 8 of Table I B, application no. 15, and being depicted in the same respective line as said At4g33040, and preferably the activity is increased non-targeted, or
[73767] (b) a polypeptide comprising a polypeptide, a consensus sequence or at least a polypeptide motif as shown in the respective line in column 5 of Table II or in column 8 of Table IV, application no. 15, respectively, and being depicted in the same respective line as said At4g33040, or a functional equivalent or a homolog thereof as depicted in column 8 of Table II, application no. 15, preferably a homolog or functional equivalent as depicted in column 8 of Table II B, application no. 15, and being depicted in the same respective line as said At4g33040, and preferably the activity is increased non-targeted, whereby the respective line disclose in column 7 the fine chemical vitamin c and/or threonic acid.

[73768] Accordingly, in one embodiment, the molecule which activity is to be increased in the process of the invention is the gene product with an activity as a “glutaredoxin”, preferably it is the molecule of section (a) or (b) of this paragraph.

[73769] In particular, it was observed that in plants, especially in Arabidopsis thaliana, increasing or generating the activity of a gene product non-targeted with the activity of a “glutaredoxin”, preferably being encoded by a gene comprising the nucleic acid sequence SEQ ID NO. 4102, preferably the coding region thereof, conferred the production of or the increase in vitamin c and/or threonic acid compared with the wild type control.

[73770] The nucleic acid sequence of At4g35310 from Arabidopsis thaliana, e.g. as shown in the respective line in column 5 of Table I, application no. 15, has been published in F. And the activity of the gene product thereof is the activity of calcium-dependent protein kinase.

[73771] Accordingly, in one embodiment, the process of the present invention for producing malate in a non-human organism, like a microorganism or a plant or a part thereof, comprises increasing or generating the activity of a gene product with the activity of a gene product conferring the activity of “calcium-dependent protein kinase”, especially from Arabidopsis thaliana or its functional equivalent or its homolog, e.g. the increase of
[73772] (a) a gene product of a gene comprising the nucleic acid molecule as shown in the respective line in column 5 of Table I (whereby the respective line disclose in column 7 the fine chemical malate), application no. 15, preferably the coding region thereof, or a homolog or a fragment thereof, and being depicted in the same respective line as said At4g35310, or a functional equivalent or a homolog thereof as shown in column 8 of Table I, application no. 15, preferably the coding region thereof, particularly a homolog or functional equivalent as shown in column 8 of Table I B, application no. 15, and being depicted in the same respective line as said At4g35310, and preferably the activity is increased non-targeted, or
[73773] (b) a polypeptide comprising a polypeptide, a consensus sequence or at least a polypeptide motif as shown in the respective line in column 5 of Table II or in column 8 of Table IV, application no. 15, respectively, and being depicted in the same respective line as said At4g35310, or a functional equivalent or a homolog thereof as depicted in column 8 of Table II, application no. 15, preferably a homolog or functional equivalent as depicted in column 8 of Table II B, application no. 15, and being depicted in the same respective line as said At4g35310, and preferably the activity is increased non-targeted, whereby the respective line disclose in column 7 the fine chemical malate.

[73774] Accordingly, in one embodiment, the molecule which activity is to be increased in the process of the invention is the gene product with an activity as a “calcium-dependent protein kinase”, preferably it is the molecule of section (a) or (b) of this paragraph.

[73775] In particular, it was observed that in plants, especially in Arabidopsis thaliana, increasing or generating the activity of a gene product non-targeted with the activity of a “calcium-dependent protein kinase”, preferably being encoded by a gene comprising the nucleic acid sequence SEQ ID NO. 4348, preferably the coding region thereof, conferred the production of or the increase in malate compared with the wild type control.

[73776] The nucleic acid sequence of At5g03720 from Arabidopsis thaliana, e.g. as shown in the respective line in column 5 of Table I, application no. 15, has been published in F. And the activity of the gene product thereof is the activity of heat shock transcription factor.

[73777] Accordingly, in one embodiment, the process of the present invention for producing fumarate in a non-human organism, like a microorganism or a plant or a part thereof, comprises increasing or generating the activity of a gene product with the activity of a gene product conferring the activity of “heat shock transcription factor”, especially from Arabidopsis thaliana or its functional equivalent or its homolog, e.g. the increase of
[73778] (a) a gene product of a gene comprising the nucleic acid molecule as shown in the respective line in column 5 of Table I (whereby the respective line disclose in column 7 the fine chemical fumarate), application no. 15, preferably the coding region thereof, or a homolog or a fragment thereof, and being depicted in the same respective line as said At5g03720, or a functional equivalent or a homolog thereof as shown in column 8 of Table I, application no. 15, preferably the coding region thereof, particularly a homolog or functional equivalent as shown in column 8 of Table I B, application no. 15, and being depicted in the same respective line as said At5g03720, and preferably the activity is increased non-targeted, or
[73779] (b) a polypeptide comprising a polypeptide, a consensus sequence or at least a polypeptide motif as shown in the respective line in column 5 of Table II or in column 8 of Table IV, application no. 15, respectively, and being depicted in the same respective line as said At5g03720, or a functional equivalent or a homolog thereof as depicted in column 8 of Table II, application no. 15, preferably a homolog or functional equivalent as depicted in column 8 of Table II B, application no. 15, and being depicted in the same respective line as said At5g03720, and preferably the activity is increased non-targeted, whereby the respective line disclose in column 7 the fine chemical fumarate.

[73780] Accordingly, in one embodiment, the molecule which activity is to be increased in the process of the invention is the gene product with an activity as a “heat shock transcription factor”, preferably it is the molecule of section (a) or (b) of this paragraph.

[73781] In particular, it was observed that in plants, especially in Arabidopsis thaliana, increasing or generating the activity of a gene product non-targeted with the activity of a “heat shock transcription factor”, preferably being encoded by a gene comprising the nucleic acid sequence SEQ ID NO. 24438, preferably the coding region thereof, conferred the production of or the increase in fumarate compared with the wild type control.

[73782] The nucleic acid sequence of At5g03720 from Arabidopsis thaliana, e.g. as shown in the respective line in column 5 of Table I, application no. 15, has been published in F. And the activity of the gene product thereof is the activity of heat shock transcription factor.

[73783] Accordingly, in one embodiment, the process of the present invention for producing malate in a non-human organism, like a microorganism or a plant or a part thereof, comprises increasing or generating the activity of a gene product with the activity of a gene product conferring the activity of “heat shock transcription factor”, especially from Arabidopsis thaliana or its functional equivalent or its homolog, e.g. the increase of
[73784] (a) a gene product of a gene comprising the nucleic acid molecule as shown in the respective line in column 5 of Table I (whereby the respective line disclose in column 7 the fine chemical malate), application no. 15, preferably the coding region thereof, or a homolog or a fragment thereof, and being depicted in the same respective line as said At5g03720, or a functional equivalent or a homolog thereof as shown in column 8 of Table I, application no. 15, preferably the coding region thereof, particularly a homolog or functional equivalent as shown in column 8 of Table I B, application no. 15, and being depicted in the same respective line as said At5g03720, and preferably the activity is increased non-targeted, or
[73785] (b) a polypeptide comprising a polypeptide, a consensus sequence or at least a polypeptide motif as shown in the respective line in column 5 of Table II or in column 8 of Table IV, application no. 15, respectively, and being depicted in the same respective line as said At5g03720, or a functional equivalent or a homolog thereof as depicted in column 8 of Table II, application no. 15, preferably a homolog or functional equivalent as depicted in column 8 of Table II B, application no. 15, and being depicted in the same respective line as said At5g03720, and preferably the activity is increased non-targeted, whereby the respective line disclose in column 7 the fine chemical malate.

[73786] Accordingly, in one embodiment, the molecule which activity is to be increased in the process of the invention is the gene product with an activity as a “heat shock transcription factor”, preferably it is the molecule of section (a) or (b) of this paragraph.

[73787] In particular, it was observed that in plants, especially in Arabidopsis thaliana, increasing or generating the activity of a gene product non-targeted with the activity of a “heat shock transcription factor”, preferably being encoded by a gene comprising the nucleic acid sequence SEQ ID NO. 24438, preferably the coding region thereof, conferred the production of or the increase in malate compared with the wild type control.

[73788] The nucleic acid sequence of At5g03720 from Arabidopsis thaliana, e.g. as shown in the respective line in column 5 of Table I, application no. 15, has been published in F. And the activity of the gene product thereof is the activity of heat shock transcription factor.

[73789] Accordingly, in one embodiment, the process of the present invention for producing succinate in a non-human organism, like a microorganism or a plant or a part thereof, comprises increasing or generating the activity of a gene product with the activity of a gene product conferring the activity of “heat shock transcription factor”, especially from Arabidopsis thaliana or its functional equivalent or its homolog, e.g. the increase of
[73790] (a) a gene product of a gene comprising the nucleic acid molecule as shown in the respective line in column 5 of Table I (whereby the respective line disclose in column 7 the fine chemical succinate), application no. 15, preferably the coding region thereof, or a homolog or a fragment thereof, and being depicted in the same respective line as said At5g03720, or a functional equivalent or a homolog thereof as shown in column 8 of Table I, application no. 15, preferably the coding region thereof, particularly a homolog or functional equivalent as shown in column 8 of Table I B, application no. 15, and being depicted in the same respective line as said At5g03720, and preferably the activity is increased non-targeted, or
[73791] (b) a polypeptide comprising a polypeptide, a consensus sequence or at least a polypeptide motif as shown in the respective line in column 5 of Table II or in column 8 of Table IV, application no. 15, respectively, and being depicted in the same respective line as said At5g03720, or a functional equivalent or a homolog thereof as depicted in column 8 of Table II, application no. 15, preferably a homolog or functional equivalent as depicted in column 8 of Table II B, application no. 15, and being depicted in the same respective line as said At5g03720, and preferably the activity is increased non-targeted, whereby the respective line disclose in column 7 the fine chemical succinate.

[73792] Accordingly, in one embodiment, the molecule which activity is to be increased in the process of the invention is the gene product with an activity as a “heat shock transcription factor”, preferably it is the molecule of section (a) or (b) of this paragraph.

[73793] In particular, it was observed that in plants, especially in Arabidopsis thaliana, increasing or generating the activity of a gene product non-targeted with the activity of a “heat shock transcription factor”, preferably being encoded by a gene comprising the nucleic acid sequence SEQ ID NO. 24438, preferably the coding region thereof, conferred the production of or the increase in succinate compared with the wild type control.

[73794] The nucleic acid sequence of At5g07200 from Arabidopsis thaliana, e.g. as shown in the respective line in column 5 of Table I, application no. 15, has been published in F. And the activity of the gene product thereof is the activity of gibberellin 20-oxidase.

[73795] Accordingly, in one embodiment, the process of the present invention for producing glycerate in a non-human organism, like a microorganism or a plant or a part thereof, comprises increasing or generating the activity of a gene product with the activity of a gene product conferring the activity of “gibberellin 20-oxidase”, especially from Arabidopsis thaliana or its functional equivalent or its homolog, e.g. the increase of
[73796] (a) a gene product of a gene comprising the nucleic acid molecule as shown in the respective line in column 5 of Table I (whereby the respective line disclose in column 7 the fine chemical glycerate), application no. 15, preferably the coding region thereof, or a homolog or a fragment thereof, and being depicted in the same respective line as said At5g07200, or a functional equivalent or a homolog thereof as shown in column 8 of Table I, application no. 15, preferably the coding region thereof, particularly a homolog or functional equivalent as shown in column 8 of Table I B, application no. 15, and being depicted in the same respective line as said At5g07200, and preferably the activity is increased non-targeted, or
[73797] (b) a polypeptide comprising a polypeptide, a consensus sequence or at least a polypeptide motif as shown in the respective line in column 5 of Table II or in column 8 of Table IV, application no. 15, respectively, and being depicted in the same respective line as said At5g07200, or a functional equivalent or a homolog thereof as depicted in column 8 of Table II, application no. 15, preferably a homolog or functional equivalent as depicted in column 8 of Table II B, application no. 15, and being depicted in the same respective line as said At5g07200, and preferably the activity is increased non-targeted, whereby the respective line disclose in column 7 the fine chemical glycerate.

[73798] Accordingly, in one embodiment, the molecule which activity is to be increased in the process of the invention is the gene product with an activity as a “gibberellin 20-oxidase”, preferably it is the molecule of section (a) or (b) of this paragraph.

[73799] In particular, it was observed that in plants, especially in Arabidopsis thaliana, increasing or generating the activity of a gene product non-targeted with the activity of a “gibberellin 20oxidase”, preferably being encoded by a gene comprising the nucleic acid sequence SEQ ID NO. 24492, preferably the coding region thereof, conferred the production of or the increase in glycerate compared with the wild type control.

[73800] The nucleic acid sequence of At5g07200 from Arabidopsis thaliana, e.g. as shown in the respective line in column 5 of Table I, application no. 15, has been published in F. And the activity of the gene product thereof is the activity of gibberellin 20-oxidase.

[73801] Accordingly, in one embodiment, the process of the present invention for producing malate in a non-human organism, like a microorganism or a plant or a part thereof, comprises increasing or generating the activity of a gene product with the activity of a gene product conferring the activity of “gibberellin 20-oxidase”, especially from Arabidopsis thaliana or its functional equivalent or its homolog, e.g. the increase of
[73802] (a) a gene product of a gene comprising the nucleic acid molecule as shown in the respective line in column 5 of Table I (whereby the respective line disclose in column 7 the fine chemical malate), application no. 15, preferably the coding region thereof, or a homolog or a fragment thereof, and being depicted in the same respective line as said At5g07200, or a functional equivalent or a homolog thereof as shown in column 8 of Table I, application no. 15, preferably the coding region thereof, particularly a homolog or functional equivalent as shown in column 8 of Table I B, application no. 15, and being depicted in the same respective line as said At5g07200, and preferably the activity is increased non-targeted, or
[73803] (b) a polypeptide comprising a polypeptide, a consensus sequence or at least a polypeptide motif as shown in the respective line in column 5 of Table II or in column 8 of Table IV, application no. 15, respectively, and being depicted in the same respective line as said At5g07200, or a functional equivalent or a homolog thereof as depicted in column 8 of Table II, application no. 15, preferably a homolog or functional equivalent as depicted in column 8 of Table II B, application no. 15, and being depicted in the same respective line as said At5g07200, and preferably the activity is increased non-targeted, whereby the respective line disclose in column 7 the fine chemical malate.

[73804] Accordingly, in one embodiment, the molecule which activity is to be increased in the process of the invention is the gene product with an activity as a “gibberellin 20-oxidase”, preferably it is the molecule of section (a) or (b) of this paragraph.

[73805] In particular, it was observed that in plants, especially in Arabidopsis thaliana, increasing or generating the activity of a gene product non-targeted with the activity of a “gibberellin 20-oxidase”, preferably being encoded by a gene comprising the nucleic acid sequence SEQ ID NO. 24492, preferably the coding region thereof, conferred the production of or the increase in malate compared with the wild type control.

[73806] The nucleic acid sequence of At5g18600 from Arabidopsis thaliana, e.g. as shown in the respective line in column 5 of Table I, application no. 15, has been published in F. And the activity of the gene product thereof is the activity of monothiol glutaredoxin.

[73807] Accordingly, in one embodiment, the process of the present invention for producing succinate in a non-human organism, like a microorganism or a plant or a part thereof, comprises increasing or generating the activity of a gene product with the activity of a gene product conferring the activity of “monothiol glutaredoxin”, especially from Arabidopsis thaliana or its functional equivalent or its homolog, e.g. the increase of
[73808] (a) a gene product of a gene comprising the nucleic acid molecule as shown in the respective line in column 5 of Table I (whereby the respective line disclose in column 7 the fine chemical succinate), application no. 15, preferably the coding region thereof, or a homolog or a fragment thereof, and being depicted in the same respective line as said At5g18600, or a functional equivalent or a homolog thereof as shown in column 8 of Table I, application no. 15, preferably the coding region thereof, particularly a homolog or functional equivalent as shown in column 8 of Table I B, application no. 15, and being depicted in the same respective line as said At5g18600, and preferably the activity is increased non-targeted, or
[73809] (b) a polypeptide comprising a polypeptide, a consensus sequence or at least a polypeptide motif as shown in the respective line in column 5 of Table II or in column 8 of Table IV, application no. 15, respectively, and being depicted in the same respective line as said At5g18600, or a functional equivalent or a homolog thereof as depicted in column 8 of Table II, application no. 15, preferably a homolog or functional equivalent as depicted in column 8 of Table II B, application no. 15, and being depicted in the same respective line as said At5g18600, and preferably the activity is increased non-targeted, whereby the respective line disclose in column 7 the fine chemical succinate.

[73810] Accordingly, in one embodiment, the molecule which activity is to be increased in the process of the invention is the gene product with an activity as a “monothiol glutaredoxin”, preferably it is the molecule of section (a) or (b) of this paragraph.

[73811] In particular, it was observed that in plants, especially in Arabidopsis thaliana, increasing or generating the activity of a gene product non-targeted with the activity of a “monothiol glutaredoxin”, preferably being encoded by a gene comprising the nucleic acid sequence SEQ ID NO. 4904, preferably the coding region thereof, conferred the production of or the increase in succinate compared with the wild type control.

[73812] The nucleic acid sequence of At5g27640 from Arabidopsis thaliana, e.g. as shown in the respective line in column 5 of Table I, application no. 15, has been published in F. And the activity of the gene product thereof is the activity of translation initiation factor subunit.

[73813] Accordingly, in one embodiment, the process of the present invention for producing malate in a non-human organism, like a microorganism or a plant or a part thereof, comprises increasing or generating the activity of a gene product with the activity of a gene product conferring the activity of “translation initiation factor subunit”, especially from Arabidopsis thaliana or its functional equivalent or its homolog, e.g. the increase of
[73814] (a) a gene product of a gene comprising the nucleic acid molecule as shown in the respective line in column 5 of Table I (whereby the respective line disclose in column 7 the fine chemical malate), application no. 15, preferably the coding region thereof, or a homolog or a fragment thereof, and being depicted in the same respective line as said At5g27640, or a functional equivalent or a homolog thereof as shown in column 8 of Table I, application no. 15, preferably the coding region thereof, particularly a homolog or functional equivalent as shown in column 8 of Table I B, application no. 15, and being depicted in the same respective line as said At5g27640, and preferably the activity is increased non-targeted, or
[73815] (b) a polypeptide comprising a polypeptide, a consensus sequence or at least a polypeptide motif as shown in the respective line in column 5 of Table II or in column 8 of Table IV, application no. 15, respectively, and being depicted in the same respective line as said At5g27640, or a functional equivalent or a homolog thereof as depicted in column 8 of Table II, application no. 15, preferably a homolog or functional equivalent as depicted in column 8 of Table II B, application no. 15, and being depicted in the same respective line as said At5g27640, and preferably the activity is increased non-targeted, whereby the respective line disclose in column 7 the fine chemical malate.

[73816] Accordingly, in one embodiment, the molecule which activity is to be increased in the process of the invention is the gene product with an activity as a “translation initiation factor subunit”, preferably it is the molecule of section (a) or (b) of this paragraph.

[73817] In particular, it was observed that in plants, especially in Arabidopsis thaliana, increasing or generating the activity of a gene product non-targeted with the activity of a “translation initiation factor subunit”, preferably being encoded by a gene comprising the nucleic acid sequence SEQ ID NO. 25344, preferably the coding region thereof, conferred the production of or the increase in malate compared with the wild type control.

[73818] The nucleic acid sequence of At5g39760 from Arabidopsis thaliana, e.g. as shown in the respective line in column 5 of Table I, application no. 15, has been published in F. And the activity of the gene product thereof is the activity of transcription factor.

[73819] Accordingly, in one embodiment, the process of the present invention for producing fumarate in a non-human organism, like a microorganism or a plant or a part thereof, comprises increasing or generating the activity of a gene product with the activity of a gene product conferring the activity of “transcription factor”, especially from Arabidopsis thaliana or its functional equivalent or its homolog, e.g. the increase of
[73820] (a) a gene product of a gene comprising the nucleic acid molecule as shown in the respective line in column 5 of Table I (whereby the respective line disclose in column 7 the fine chemical fumarate), application no. 15, preferably the coding region thereof, or a homolog or a fragment thereof, and being depicted in the same respective line as said At5g39760, or a functional equivalent or a homolog thereof as shown in column 8 of Table I, application no. 15, preferably the coding region thereof, particularly a homolog or functional equivalent as shown in column 8 of Table I B, application no. 15, and being depicted in the same respective line as said At5g39760, and preferably the activity is increased non-targeted, or
[73821] (b) a polypeptide comprising a polypeptide, a consensus sequence or at least a polypeptide motif as shown in the respective line in column 5 of Table II or in column 8 of Table IV, application no. 15, respectively, and being depicted in the same respective line as said At5g39760, or a functional equivalent or a homolog thereof as depicted in column 8 of Table II, application no. 15, preferably a homolog or functional equivalent as depicted in column 8 of Table II B, application no. 15, and being depicted in the same respective line as said At5g39760, and preferably the activity is increased non-targeted, whereby the respective line disclose in column 7 the fine chemical fumarate.

[73822] Accordingly, in one embodiment, the molecule which activity is to be increased in the process of the invention is the gene product with an activity as a “transcription factor”, preferably it is the molecule of section (a) or (b) of this paragraph.

[73823] In particular, it was observed that in plants, especially in Arabidopsis thaliana, increasing or generating the activity of a gene product non-targeted with the activity of a “transcription factor”, preferably being encoded by a gene comprising the nucleic acid sequence SEQ ID NO. 25428, preferably the coding region thereof, conferred the production of or the increase in fumarate compared with the wild type control.

[73824] The nucleic acid sequence of At5g39760 from Arabidopsis thaliana, e.g. as shown in the respective line in column 5 of Table I, application no. 15, has been published in F. And the activity of the gene product thereof is the activity of transcription factor.

[73825] Accordingly, in one embodiment, the process of the present invention for producing malate in a non-human organism, like a microorganism or a plant or a part thereof, comprises increasing or generating the activity of a gene product with the activity of a gene product conferring the activity of “transcription factor”, especially from Arabidopsis thaliana or its functional equivalent or its homolog, e.g. the increase of
[73826] (a) a gene product of a gene comprising the nucleic acid molecule as shown in the respective line in column 5 of Table I (whereby the respective line disclose in column 7 the fine chemical malate), application no. 15, preferably the coding region thereof, or a homolog or a fragment thereof, and being depicted in the same respective line as said At5g39760, or a functional equivalent or a homolog thereof as shown in column 8 of Table I, application no. 15, preferably the coding region thereof, particularly a homolog or functional equivalent as shown in column 8 of Table I B, application no. 15, and being depicted in the same respective line as said At5g39760, and preferably the activity is increased non-targeted, or
[73827] (b) a polypeptide comprising a polypeptide, a consensus sequence or at least a polypeptide motif as shown in the respective line in column 5 of Table II or in column 8 of Table IV, application no. 15, respectively, and being depicted in the same respective line as said At5g39760, or a functional equivalent or a homolog thereof as depicted in column 8 of Table II, application no. 15, preferably a homolog or functional equivalent as depicted in column 8 of Table II B, application no. 15, and being depicted in the same respective line as said At5g39760, and preferably the activity is increased non-targeted, whereby the respective line disclose in column 7 the fine chemical malate.

[73828] Accordingly, in one embodiment, the molecule which activity is to be increased in the process of the invention is the gene product with an activity as a “transcription factor”, preferably it is the molecule of section (a) or (b) of this paragraph.

[73829] In particular, it was observed that in plants, especially in Arabidopsis thaliana, increasing or generating the activity of a gene product non-targeted with the activity of a “transcription factor”, preferably being encoded by a gene comprising the nucleic acid sequence SEQ ID NO. 25428, preferably the coding region thereof, conferred the production of or the increase in malate compared with the wild type control.

[73830] The nucleic acid sequence of At5g59220 from Arabidopsis thaliana, e.g. as shown in the respective line in column 5 of Table I, application no. 15, has been published in F. And the activity of the gene product thereof is the activity of protein phosphatase.

[73831] Accordingly, in one embodiment, the process of the present invention for producing succinate in a non-human organism, like a microorganism or a plant or a part thereof, comprises increasing or generating the activity of a gene product with the activity of a gene product conferring the activity of “protein phosphatase”, especially from Arabidopsis thaliana or its functional equivalent or its homolog, e.g. the increase of
[73832] (a) a gene product of a gene comprising the nucleic acid molecule as shown in the respective line in column 5 of Table I (whereby the respective line disclose in column 7 the fine chemical succinate), application no. 15, preferably the coding region thereof, or a homolog or a fragment thereof, and being depicted in the same respective line as said At5g59220, or a functional equivalent or a homolog thereof as shown in column 8 of Table I, application no. 15, preferably the coding region thereof, particularly a homolog or functional equivalent as shown in column 8 of Table I B, application no. 15, and being depicted in the same respective line as said At5g59220, and preferably the activity is increased non-targeted, or
[73833] (b) a polypeptide comprising a polypeptide, a consensus sequence or at least a polypeptide motif as shown in the respective line in column 5 of Table II or in column 8 of Table IV, application no. 15, respectively, and being depicted in the same respective line as said At5g59220, or a functional equivalent or a homolog thereof as depicted in column 8 of Table II, application no. 15, preferably a homolog or functional equivalent as depicted in column 8 of Table II B, application no. 15, and being depicted in the same respective line as said At5g59220, and preferably the activity is increased non-targeted, whereby the respective line disclose in column 7 the fine chemical succinate.

[73834] Accordingly, in one embodiment, the molecule which activity is to be increased in the process of the invention is the gene product with an activity as a “protein phosphatase”, preferably it is the molecule of section (a) or (b) of this paragraph.

[73835] In particular, it was observed that in plants, especially in Arabidopsis thaliana, increasing or generating the activity of a gene product non-targeted with the activity of a “protein phosphatase”, preferably being encoded by a gene comprising the nucleic acid sequence SEQ ID NO. 25498, preferably the coding region thereof, conferred the production of or the increase in succinate compared with the wild type control.

[73836] The nucleic acid sequence of At5g63680 from Arabidopsis thaliana, e.g. as shown in the respective line in column 5 of Table I, application no. 15, has been published in F. And the activity of the gene product thereof is the activity of pyruvate kinase.

[73837] Accordingly, in one embodiment, the process of the present invention for producing succinate in a non-human organism, like a microorganism or a plant or a part thereof, comprises increasing or generating the activity of a gene product with the activity of a gene product conferring the activity of “pyruvate kinase”, especially from Arabidopsis thaliana or its functional equivalent or its homolog, e.g. the increase of
[73838] (a) a gene product of a gene comprising the nucleic acid molecule as shown in the respective line in column 5 of Table I (whereby the respective line disclose in column 7 the fine chemical succinate), application no. 15, preferably the coding region thereof, or a homolog or a fragment thereof, and being depicted in the same respective line as said At5g63680, or a functional equivalent or a homolog thereof as shown in column 8 of Table I, application no. 15, preferably the coding region thereof, particularly a homolog or functional equivalent as shown in column 8 of Table I B, application no. 15, and being depicted in the same respective line as said At5g63680, and preferably the activity is increased plastidic, or
[73839] (b) a polypeptide comprising a polypeptide, a consensus sequence or at least a polypeptide motif as shown in the respective line in column 5 of Table II or in column 8 of Table IV, application no. 15, respectively, and being depicted in the same respective line as said At5g63680, or a functional equivalent or a homolog thereof as depicted in column 8 of Table II, application no. 15, preferably a homolog or functional equivalent as depicted in column 8 of Table II B, application no. 15, and being depicted in the same respective line as said At5g63680, and preferably the activity is increased plastidic, whereby the respective line disclose in column 7 the fine chemical succinate.

[73840] Accordingly, in one embodiment, the molecule which activity is to be increased in the process of the invention is the gene product with an activity as a “pyruvate kinase”, preferably it is the molecule of section (a) or (b) of this paragraph.

[73841] In particular, it was observed that in plants, especially in Arabidopsis thaliana, increasing or generating the activity of a gene product plastidic with the activity of a “pyruvate kinase”, preferably being encoded by a gene comprising the nucleic acid sequence SEQ ID NO. 70038, preferably the coding region thereof, conferred the production of or the increase in succinate compared with the wild type control.

[73842] The nucleic acid sequence of At5g64920 from Arabidopsis thaliana, e.g. as shown in the respective line in column 5 of Table I, application no. 15, has been published in F. And the activity of the gene product thereof is the activity of zinc finger protein.

[73843] Accordingly, in one embodiment, the process of the present invention for producing fumarate in a non-human organism, like a microorganism or a plant or a part thereof, comprises increasing or generating the activity of a gene product with the activity of a gene product conferring the activity of “zinc finger protein”, especially from Arabidopsis thaliana or its functional equivalent or its homolog, e.g. the increase of
[73844] (a) a gene product of a gene comprising the nucleic acid molecule as shown in the respective line in column 5 of Table I (whereby the respective line disclose in column 7 the fine chemical fumarate), application no. 15, preferably the coding region thereof, or a homolog or a fragment thereof, and being depicted in the same respective line as said At5g64920, or a functional equivalent or a homolog thereof as shown in column 8 of Table I, application no. 15, preferably the coding region thereof, particularly a homolog or functional equivalent as shown in column 8 of Table I B, application no. 15, and being depicted in the same respective line as said At5g64920, and preferably the activity is increased non-targeted, or
[73845] (b) a polypeptide comprising a polypeptide, a consensus sequence or at least a polypeptide motif as shown in the respective line in column 5 of Table II or in column 8 of Table IV, application no. 15, respectively, and being depicted in the same respective line as said At5g64920, or a functional equivalent or a homolog thereof as depicted in column 8 of Table II, application no. 15, preferably a homolog or functional equivalent as depicted in column 8 of Table II B, application no. 15, and being depicted in the same respective line as said At5g64920, and preferably the activity is increased non-targeted, whereby the respective line disclose in column 7 the fine chemical fumarate.

[73846] Accordingly, in one embodiment, the molecule which activity is to be increased in the process of the invention is the gene product with an activity as a “zinc finger protein”, preferably it is the molecule of section (a) or (b) of this paragraph.

[73847] In particular, it was observed that in plants, especially in Arabidopsis thaliana, increasing or generating the activity of a gene product non-targeted with the activity of a “zinc finger protein”, preferably being encoded by a gene comprising the nucleic acid sequence SEQ ID NO. 5493, preferably the coding region thereof, conferred the production of or the increase in fumarate compared with the wild type control.

[73848] The nucleic acid sequence of AvinDRAFT_{—}0035 from Azotobacter vinelandii, e.g. as shown in the respective line in column 5 of Table I, application no. 15, has been published in D. And the activity of the gene product thereof is the activity of CDP-diacylglycerol-serine O-phosphatidyltransferase.

[73849] Accordingly, in one embodiment, the process of the present invention for producing citramalate in a non-human organism, like a microorganism or a plant or a part thereof, comprises increasing or generating the activity of a gene product with the activity of a gene product conferring the activity of “CDP-diacylglycerol-serine O-phosphatidyltransferase”, especially from Azotobacter vinelandii or its functional equivalent or its homolog, e.g. the increase of
[73850] (a) a gene product of a gene comprising the nucleic acid molecule as shown in the respective line in column 5 of Table I (whereby the respective line disclose in column 7 the fine chemical citramalate), application no. 15, preferably the coding region thereof, or a homolog or a fragment thereof, and being depicted in the same respective line as said AvinDRAFT_{—}0035, or a functional equivalent or a homolog thereof as shown in column 8 of Table I, application no. 15, preferably the coding region thereof, particularly a homolog or functional equivalent as shown in column 8 of Table I B, application no. 15, and being depicted in the same respective line as said AvinDRAFT_{—}0035, and preferably the activity is increased non-targeted, or
[73851] (b) a polypeptide comprising a polypeptide, a consensus sequence or at least a polypeptide motif as shown in the respective line in column 5 of Table II or in column 8 of Table IV, application no. 15, respectively, and being depicted in the same respective line as said AvinDRAFT_{—}0035, or a functional equivalent or a homolog thereof as depicted in column 8 of Table II, application no. 15, preferably a homolog or functional equivalent as depicted in column 8 of Table II B, application no. 15, and being depicted in the same respective line as said AvinDRAFT_{—}0035, and preferably the activity is increased non-targeted, whereby the respective line disclose in column 7 the fine chemical citramalate.

[73852] Accordingly, in one embodiment, the molecule which activity is to be increased in the process of the invention is the gene product with an activity as a “CDP-diacylglycerol-serine O-phosphatidyltransferase”, preferably it is the molecule of section (a) or (b) of this paragraph.

[73853] In particular, it was observed that in plants, especially in Arabidopsis thaliana, increasing or generating the activity of a gene product non-targeted with the activity of a “CDP-diacylglycerol-serine O-phosphatidyltransferase”, preferably being encoded by a gene comprising the nucleic acid sequence SEQ ID NO. 70583, preferably the coding region thereof, conferred the production of or the increase in citramalate compared with the wild type control.

[73854] The nucleic acid sequence of AvinDRAFT_{—}0035 from Azotobacter vinelandii, e.g. as shown in the respective line in column 5 of Table I, application no. 15, has been published in D. And the activity of the gene product thereof is the activity of CDP-diacylglycerol-serine O-phosphatidyltransferase.

[73855] Accordingly, in one embodiment, the process of the present invention for producing fumarate in a non-human organism, like a microorganism or a plant or a part thereof, comprises increasing or generating the activity of a gene product with the activity of a gene product conferring the activity of “CDP-diacylglycerol-serine O-phosphatidyltransferase”, especially from Azotobacter vinelandii or its functional equivalent or its homolog, e.g. the increase of
[73856] (a) a gene product of a gene comprising the nucleic acid molecule as shown in the respective line in column 5 of Table I (whereby the respective line disclose in column 7 the fine chemical fumarate), application no. 15, preferably the coding region thereof, or a homolog or a fragment thereof, and being depicted in the same respective line as said AvinDRAFT_{—}0035, or a functional equivalent or a homolog thereof as shown in column 8 of Table I, application no. 15, preferably the coding region thereof, particularly a homolog or functional equivalent as shown in column 8 of Table I B, application no. 15, and being depicted in the same respective line as said AvinDRAFT_{—}0035, and preferably the activity is increased non-targeted, or
[73857] (b) a polypeptide comprising a polypeptide, a consensus sequence or at least a polypeptide motif as shown in the respective line in column 5 of Table II or in column 8 of Table IV, application no. 15, respectively, and being depicted in the same respective line as said AvinDRAFT_{—}0035, or a functional equivalent or a homolog thereof as depicted in column 8 of Table II, application no. 15, preferably a homolog or functional equivalent as depicted in column 8 of Table II B, application no. 15, and being depicted in the same respective line as said AvinDRAFT_{—}0035, and preferably the activity is increased non-targeted, whereby the respective line disclose in column 7 the fine chemical fumarate.

[73858] Accordingly, in one embodiment, the molecule which activity is to be increased in the process of the invention is the gene product with an activity as a “CDP-diacylglycerol-serine O-phosphatidyltransferase”, preferably it is the molecule of section (a) or (b) of this paragraph.

[73859] In particular, it was observed that in plants, especially in Arabidopsis thaliana, increasing or generating the activity of a gene product non-targeted with the activity of a “CDP-diacylglycerolserine O-phosphatidyltransferase”, preferably being encoded by a gene comprising the nucleic acid sequence SEQ ID NO. 70583, preferably the coding region thereof, conferred the production of or the increase in fumarate compared with the wild type control.

[73860] The nucleic acid sequence of AvinDRAFT_{—}0035 from Azotobacter vinelandii, e.g. as shown in the respective line in column 5 of Table I, application no. 15, has been published in D. And the activity of the gene product thereof is the activity of CDP-diacylglycerol-serine O-phosphatidyltransferase.

[73861] Accordingly, in one embodiment, the process of the present invention for producing malate in a non-human organism, like a microorganism or a plant or a part thereof, comprises increasing or generating the activity of a gene product with the activity of a gene product conferring the activity of “CDP-diacylglycerol-serine O-phosphatidyltransferase”, especially from Azotobacter vinelandii or its functional equivalent or its homolog, e.g. the increase of
[73862] (a) a gene product of a gene comprising the nucleic acid molecule as shown in the respective line in column 5 of Table I (whereby the respective line disclose in column 7 the fine chemical malate), application no. 15, preferably the coding region thereof, or a homolog or a fragment thereof, and being depicted in the same respective line as said AvinDRAFT_{—}0035, or a functional equivalent or a homolog thereof as shown in column 8 of Table I, application no. 15, preferably the coding region thereof, particularly a homolog or functional equivalent as shown in column 8 of Table I B, application no. 15, and being depicted in the same respective line as said AvinDRAFT_{—}0035, and preferably the activity is increased non-targeted, or
[73863] (b) a polypeptide comprising a polypeptide, a consensus sequence or at least a polypeptide motif as shown in the respective line in column 5 of Table II or in column 8 of Table IV, application no. 15, respectively, and being depicted in the same respective line as said AvinDRAFT_{—}0035, or a functional equivalent or a homolog thereof as depicted in column 8 of Table II, application no. 15, preferably a homolog or functional equivalent as depicted in column 8 of Table II B, application no. 15, and being depicted in the same respective line as said AvinDRAFT_{—}0035, and preferably the activity is increased non-targeted, whereby the respective line disclose in column 7 the fine chemical malate.

[73864] Accordingly, in one embodiment, the molecule which activity is to be increased in the process of the invention is the gene product with an activity as a “CDP-diacylglycerol-serine O-phosphatidyltransferase”, preferably it is the molecule of section (a) or (b) of this paragraph.

[73865] In particular, it was observed that in plants, especially in Arabidopsis thaliana, increasing or generating the activity of a gene product non-targeted with the activity of a “CDP-diacylglycerolserine O-phosphatidyltransferase”, preferably being encoded by a gene comprising the nucleic acid sequence SEQ ID NO. 70583, preferably the coding region thereof, conferred the production of or the increase in malate compared with the wild type control.

[73866] The nucleic acid sequence of AVINDRAFT_{—}0539 from Azotobacter vinelandii, e.g. as shown in the respective line in column 5 of Table I, application no. 15, has been published in D. And the activity of the gene product thereof is the activity of Glycine cleavage system T aminomethyltransferase.

[73867] Accordingly, in one embodiment, the process of the present invention for producing malate in a non-human organism, like a microorganism or a plant or a part thereof, comprises increasing or generating the activity of a gene product with the activity of a gene product conferring the activity of “Glycine cleavage system T aminomethyltransferase”, especially from Azotobacter vinelandii or its functional equivalent or its homolog, e.g. the increase of
[73868] (a) a gene product of a gene comprising the nucleic acid molecule as shown in the respective line in column 5 of Table I (whereby the respective line disclose in column 7 the fine chemical malate), application no. 15, preferably the coding region thereof, or a homolog or a fragment thereof, and being depicted in the same respective line as said AVINDRAFT_{—}0539, or a functional equivalent or a homolog thereof as shown in column 8 of Table I, application no. 15, preferably the coding region thereof, particularly a homolog or functional equivalent as shown in column 8 of Table I B, application no. 15, and being depicted in the same respective line as said AVINDRAFT_{—}0539, and preferably the activity is increased non-targeted, or
[73869] (b) a polypeptide comprising a polypeptide, a consensus sequence or at least a polypeptide motif as shown in the respective line in column 5 of Table II or in column 8 of Table IV, application no. 15, respectively, and being depicted in the same respective line as said AVINDRAFT_{—}0539, or a functional equivalent or a homolog thereof as depicted in column 8 of Table II, application no. 15, preferably a homolog or functional equivalent as depicted in column 8 of Table II B, application no. 15, and being depicted in the same respective line as said AVINDRAFT_{—}0539, and preferably the activity is increased non-targeted, whereby the respective line disclose in column 7 the fine chemical malate.

[73870] Accordingly, in one embodiment, the molecule which activity is to be increased in the process of the invention is the gene product with an activity as a “Glycine cleavage system T aminomethyltransferase”, preferably it is the molecule of section (a) or (b) of this paragraph.

[73871] In particular, it was observed that in plants, especially in Arabidopsis thaliana, increasing or generating the activity of a gene product non-targeted with the activity of a “Glycine cleavage system T aminomethyltransferase”, preferably being encoded by a gene comprising the nucleic acid sequence SEQ ID NO. 70715, preferably the coding region thereof, conferred the production of or the increase in malate compared with the wild type control.

[73872] The nucleic acid sequence of AvinDRAFT_{—}1045 from Azotobacter vinelandii, e.g. as shown in the respective line in column 5 of Table I, application no. 15, has been published in D. And the activity of the gene product thereof is the activity of transcriptional regulator.

[73873] Accordingly, in one embodiment, the process of the present invention for producing malate in a non-human organism, like a microorganism or a plant or a part thereof, comprises increasing or generating the activity of a gene product with the activity of a gene product conferring the activity of “transcriptional regulator”, especially from Azotobacter vinelandii or its functional equivalent or its homolog, e.g. the increase of
[73874] (a) a gene product of a gene comprising the nucleic acid molecule as shown in the respective line in column 5 of Table I (whereby the respective line disclose in column 7 the fine chemical malate), application no. 15, preferably the coding region thereof, or a homolog or a fragment thereof, and being depicted in the same respective line as said AvinDRAFT_{—}1045, or a functional equivalent or a homolog thereof as shown in column 8 of Table I, application no. 15, preferably the coding region thereof, particularly a homolog or functional equivalent as shown in column 8 of Table I B, application no. 15, and being depicted in the same respective line as said AvinDRAFT_{—}1045, and preferably the activity is increased non-targeted, or
[73875] (b) a polypeptide comprising a polypeptide, a consensus sequence or at least a polypeptide motif as shown in the respective line in column 5 of Table II or in column 8 of Table IV, application no. 15, respectively, and being depicted in the same respective line as said AvinDRAFT_{—}1045, or a functional equivalent or a homolog thereof as depicted in column 8 of Table II, application no. 15, preferably a homolog or functional equivalent as depicted in column 8 of Table II B, application no. 15, and being depicted in the same respective line as said AvinDRAFT_{—}1045, and preferably the activity is increased non-targeted, whereby the respective line disclose in column 7 the fine chemical malate.

[73876] Accordingly, in one embodiment, the molecule which activity is to be increased in the process of the invention is the gene product with an activity as a “transcriptional regulator”, preferably it is the molecule of section (a) or (b) of this paragraph.

[73877] In particular, it was observed that in plants, especially in Arabidopsis thaliana, increasing or generating the activity of a gene product non-targeted with the activity of a “transcriptional regulator”, preferably being encoded by a gene comprising the nucleic acid sequence SEQ ID NO. 25676, preferably the coding region thereof, conferred the production of or the increase in malate compared with the wild type control.

[73878] The nucleic acid sequence of AvinDRAFT_{—}1398 from Azotobacter vinelandii, e.g. as shown in the respective line in column 5 of Table I, application no. 15, has been published in D. And the activity of the gene product thereof is the activity of adenylylsulfate kinase.

[73879] Accordingly, in one embodiment, the process of the present invention for producing malate in a non-human organism, like a microorganism or a plant or a part thereof, comprises increasing or generating the activity of a gene product with the activity of a gene product conferring the activity of “adenylylsulfate kinase”, especially from Azotobacter vinelandii or its functional equivalent or its homolog, e.g. the increase of
[73880] (a) a gene product of a gene comprising the nucleic acid molecule as shown in the respective line in column 5 of Table I (whereby the respective line disclose in column 7 the fine chemical malate), application no. 15, preferably the coding region thereof, or a homolog or a fragment thereof, and being depicted in the same respective line as said AvinDRAFT_{—}1398, or a functional equivalent or a homolog thereof as shown in column 8 of Table I, application no. 15, preferably the coding region thereof, particularly a homolog or functional equivalent as shown in column 8 of Table I B, application no. 15, and being depicted in the same respective line as said AvinDRAFT_{—}1398, and preferably the activity is increased non-targeted, or
[73881] (b) a polypeptide comprising a polypeptide, a consensus sequence or at least a polypeptide motif as shown in the respective line in column 5 of Table II or in column 8 of Table IV, application no. 15, respectively, and being depicted in the same respective line as said AvinDRAFT_{—}1398, or a functional equivalent or a homolog thereof as depicted in column 8 of Table II, application no. 15, preferably a homolog or functional equivalent as depicted in column 8 of Table II B, application no. 15, and being depicted in the same respective line as said AvinDRAFT_{—}1398, and preferably the activity is increased non-targeted, whereby the respective line disclose in column 7 the fine chemical malate.

[73882] Accordingly, in one embodiment, the molecule which activity is to be increased in the process of the invention is the gene product with an activity as a “adenylylsulfate kinase”, preferably it is the molecule of section (a) or (b) of this paragraph.

[73883] In particular, it was observed that in plants, especially in Arabidopsis thaliana, increasing or generating the activity of a gene product non-targeted with the activity of a “adenylylsulfate kinase”, preferably being encoded by a gene comprising the nucleic acid sequence SEQ ID NO. 25780, preferably the coding region thereof, conferred the production of or the increase in malate compared with the wild type control.

[73884] The nucleic acid sequence of AvinDRAFT_{—}1398 from Azotobacter vinelandii, e.g. as shown in the respective line in column 5 of Table I, application no. 15, has been published in D. And the activity of the gene product thereof is the activity of adenylylsulfate kinase.

[73885] Accordingly, in one embodiment, the process of the present invention for producing succinate in a non-human organism, like a microorganism or a plant or a part thereof, comprises increasing or generating the activity of a gene product with the activity of a gene product conferring the activity of “adenylylsulfate kinase”, especially from Azotobacter vinelandii or its functional equivalent or its homolog, e.g. the increase of
[73886] (a) a gene product of a gene comprising the nucleic acid molecule as shown in the respective line in column 5 of Table I (whereby the respective line disclose in column 7 the fine chemical succinate), application no. 15, preferably the coding region thereof, or a homolog or a fragment thereof, and being depicted in the same respective line as said AvinDRAFT_{—}1398, or a functional equivalent or a homolog thereof as shown in column 8 of Table I, application no. 15, preferably the coding region thereof, particularly a homolog or functional equivalent as shown in column 8 of Table I B, application no. 15, and being depicted in the same respective line as said AvinDRAFT_{—}1398, and preferably the activity is increased non-targeted, or
[73887] (b) a polypeptide comprising a polypeptide, a consensus sequence or at least a polypeptide motif as shown in the respective line in column 5 of Table II or in column 8 of Table IV, application no. 15, respectively, and being depicted in the same respective line as said AvinDRAFT_{—}1398, or a functional equivalent or a homolog thereof as depicted in column 8 of Table II, application no. 15, preferably a homolog or functional equivalent as depicted in column 8 of Table II B, application no. 15, and being depicted in the same respective line as said AvinDRAFT_{—}1398, and preferably the activity is increased non-targeted, whereby the respective line disclose in column 7 the fine chemical succinate.

[73888] Accordingly, in one embodiment, the molecule which activity is to be increased in the process of the invention is the gene product with an activity as a “adenylylsulfate kinase”, preferably it is the molecule of section (a) or (b) of this paragraph.

[73889] In particular, it was observed that in plants, especially in Arabidopsis thaliana, increasing or generating the activity of a gene product non-targeted with the activity of a “adenylylsulfate kinase”, preferably being encoded by a gene comprising the nucleic acid sequence SEQ ID NO. 25780, preferably the coding region thereof, conferred the production of or the increase in succinate compared with the wild type control.

[73890] The nucleic acid sequence of AvinDRAFT_{—}1624 from Azotobacter vinelandii, e.g. as shown in the respective line in column 5 of Table I, application no. 15, has been published in D. And the activity of the gene product thereof is the activity of sec-independent protein translocase.

[73891] Accordingly, in one embodiment, the process of the present invention for producing fumarate in a non-human organism, like a microorganism or a plant or a part thereof, comprises increasing or generating the activity of a gene product with the activity of a gene product conferring the activity of “sec-independent protein translocase”, especially from Azotobacter vinelandii or its functional equivalent or its homolog, e.g. the increase of
[73892] (a) a gene product of a gene comprising the nucleic acid molecule as shown in the respective line in column 5 of Table I (whereby the respective line disclose in column 7 the fine chemical fumarate), application no. 15, preferably the coding region thereof, or a homolog or a fragment thereof, and being depicted in the same respective line as said AvinDRAFT_{—}1624, or a functional equivalent or a homolog thereof as shown in column 8 of Table I, application no. 15, preferably the coding region thereof, particularly a homolog or functional equivalent as shown in column 8 of Table I B, application no. 15, and being depicted in the same respective line as said AvinDRAFT_{—}1624, and preferably the activity is increased non-targeted, or
[73893] (b) a polypeptide comprising a polypeptide, a consensus sequence or at least a polypeptide motif as shown in the respective line in column 5 of Table II or in column 8 of Table IV, application no. 15, respectively, and being depicted in the same respective line as said AvinDRAFT_{—}1624, or a functional equivalent or a homolog thereof as depicted in column 8 of Table II, application no. 15, preferably a homolog or functional equivalent as depicted in column 8 of Table II B, application no. 15, and being depicted in the same respective line as said AvinDRAFT_{—}1624, and preferably the activity is increased non-targeted, whereby the respective line disclose in column 7 the fine chemical fumarate.

[73894] Accordingly, in one embodiment, the molecule which activity is to be increased in the process of the invention is the gene product with an activity as a “sec-independent protein translocase”, preferably it is the molecule of section (a) or (b) of this paragraph.

[73895] In particular, it was observed that in plants, especially in Arabidopsis thaliana, increasing or generating the activity of a gene product non-targeted with the activity of a “sec-independent protein translocase”, preferably being encoded by a gene comprising the nucleic acid sequence SEQ ID NO. 26196, preferably the coding region thereof, conferred the production of or the increase in fumarate compared with the wild type control.

[73896] The nucleic acid sequence of AvinDRAFT_{—}1624 from Azotobacter vinelandii, e.g. as shown in the respective line in column 5 of Table I, application no. 15, has been published in D. And the activity of the gene product thereof is the activity of sec-independent protein translocase.

[73897] Accordingly, in one embodiment, the process of the present invention for producing malate in a non-human organism, like a microorganism or a plant or a part thereof, comprises increasing or generating the activity of a gene product with the activity of a gene product conferring the activity of “sec-independent protein translocase”, especially from Azotobacter vinelandii or its functional equivalent or its homolog, e.g. the increase of
[73898] (a) a gene product of a gene comprising the nucleic acid molecule as shown in the respective line in column 5 of Table I (whereby the respective line disclose in column 7 the fine chemical malate), application no. 15, preferably the coding region thereof, or a homolog or a fragment thereof, and being depicted in the same respective line as said AvinDRAFT_{—}1624, or a functional equivalent or a homolog thereof as shown in column 8 of Table I, application no. 15, preferably the coding region thereof, particularly a homolog or functional equivalent as shown in column 8 of Table I B, application no. 15, and being depicted in the same respective line as said AvinDRAFT_{—}1624, and preferably the activity is increased non-targeted, or
[73899] (b) a polypeptide comprising a polypeptide, a consensus sequence or at least a polypeptide motif as shown in the respective line in column 5 of Table II or in column 8 of Table IV, application no. 15, respectively, and being depicted in the same respective line as said AvinDRAFT_{—}1624, or a functional equivalent or a homolog thereof as depicted in column 8 of Table II, application no. 15, preferably a homolog or functional equivalent as depicted in column 8 of Table II B, application no. 15, and being depicted in the same respective line as said AvinDRAFT_{—}1624, and preferably the activity is increased non-targeted, whereby the respective line disclose in column 7 the fine chemical malate.

[73900] Accordingly, in one embodiment, the molecule which activity is to be increased in the process of the invention is the gene product with an activity as a “sec-independent protein translocase”, preferably it is the molecule of section (a) or (b) of this paragraph.

[73901] In particular, it was observed that in plants, especially in Arabidopsis thaliana, increasing or generating the activity of a gene product non-targeted with the activity of a “sec-independent protein translocase”, preferably being encoded by a gene comprising the nucleic acid sequence SEQ ID NO. 26196, preferably the coding region thereof, conferred the production of or the increase in malate compared with the wild type control.

[73902] The nucleic acid sequence of AvinDRAFT_{—}1699 from Azotobacter vinelandii, e.g. as shown in the respective line in column 5 of Table I, application no. 15, has been published in D. And the activity of the gene product thereof is the activity of fumarate hydratase.

[73903] Accordingly, in one embodiment, the process of the present invention for producing fumarate in a non-human organism, like a microorganism or a plant or a part thereof, comprises increasing or generating the activity of a gene product with the activity of a gene product conferring the activity of “fumarate hydratase”, especially from Azotobacter vinelandii or its functional equivalent or its homolog, e.g. the increase of
[73904] (a) a gene product of a gene comprising the nucleic acid molecule as shown in the respective line in column 5 of Table I (whereby the respective line disclose in column 7 the fine chemical fumarate), application no. 15, preferably the coding region thereof, or a homolog or a fragment thereof, and being depicted in the same respective line as said AvinDRAFT_{—}1699, or a functional equivalent or a homolog thereof as shown in column 8 of Table I, application no. 15, preferably the coding region thereof, particularly a homolog or functional equivalent as shown in column 8 of Table I B, application no. 15, and being depicted in the same respective line as said AvinDRAFT_{—}1699, and preferably the activity is increased non-targeted, or
[73905] (b) a polypeptide comprising a polypeptide, a consensus sequence or at least a polypeptide motif as shown in the respective line in column 5 of Table II or in column 8 of Table IV, application no. 15, respectively, and being depicted in the same respective line as said AvinDRAFT_{—}1699, or a functional equivalent or a homolog thereof as depicted in column 8 of Table II, application no. 15, preferably a homolog or functional equivalent as depicted in column 8 of Table II B, application no. 15, and being depicted in the same respective line as said AvinDRAFT_{—}1699, and preferably the activity is increased non-targeted, whereby the respective line disclose in column 7 the fine chemical fumarate.

[73906] Accordingly, in one embodiment, the molecule which activity is to be increased in the process of the invention is the gene product with an activity as a “fumarate hydratase”, preferably it is the molecule of section (a) or (b) of this paragraph.

[73907] In particular, it was observed that in plants, especially in Arabidopsis thaliana, increasing or generating the activity of a gene product non-targeted with the activity of a “fumarate hydratase”, preferably being encoded by a gene comprising the nucleic acid sequence SEQ ID NO. 133719, preferably the coding region thereof, conferred the production of or the increase in fumarate compared with the wild type control.

[73908] The nucleic acid sequence of AvinDRAFT_{—}1806 from Azotobacter vinelandii, e.g. as shown in the respective line in column 5 of Table I, application no. 15, has been published in D. And the activity of the gene product thereof is the activity of pyruvate kinase.

[73909] Accordingly, in one embodiment, the process of the present invention for producing succinate in a non-human organism, like a microorganism or a plant or a part thereof, comprises increasing or generating the activity of a gene product with the activity of a gene product conferring the activity of “pyruvate kinase”, especially from Azotobacter vinelandii or its functional equivalent or its homolog, e.g. the increase of
[73910] (a) a gene product of a gene comprising the nucleic acid molecule as shown in the respective line in column 5 of Table I (whereby the respective line disclose in column 7 the fine chemical succinate), application no. 15, preferably the coding region thereof, or a homolog or a fragment thereof, and being depicted in the same respective line as said AvinDRAFT_{—}1806, or a functional equivalent or a homolog thereof as shown in column 8 of Table I, application no. 15, preferably the coding region thereof, particularly a homolog or functional equivalent as shown in column 8 of Table I B, application no. 15, and being depicted in the same respective line as said AvinDRAFT_{—}1806, and preferably the activity is increased non-targeted, or
[73911] (b) a polypeptide comprising a polypeptide, a consensus sequence or at least a polypeptide motif as shown in the respective line in column 5 of Table II or in column 8 of Table IV, application no. 15, respectively, and being depicted in the same respective line as said AvinDRAFT_{—}1806, or a functional equivalent or a homolog thereof as depicted in column 8 of Table II, application no. 15, preferably a homolog or functional equivalent as depicted in column 8 of Table II B, application no. 15, and being depicted in the same respective line as said AvinDRAFT_{—}1806, and preferably the activity is increased non-targeted, whereby the respective line disclose in column 7 the fine chemical succinate.

[73912] Accordingly, in one embodiment, the molecule which activity is to be increased in the process of the invention is the gene product with an activity as a “pyruvate kinase”, preferably it is the molecule of section (a) or (b) of this paragraph.

[73913] In particular, it was observed that in plants, especially in Arabidopsis thaliana, increasing or generating the activity of a gene product non-targeted with the activity of a “pyruvate kinase”, preferably being encoded by a gene comprising the nucleic acid sequence SEQ ID NO. 26434, preferably the coding region thereof, conferred the production of or the increase in succinate compared with the wild type control.

[73914] The nucleic acid sequence of AvinDRAFT_{—}2010 from Azotobacter vinelandii, e.g. as shown in the respective line in column 5 of Table I, application no. 15, has been published in D. And the activity of the gene product thereof is the activity of transcriptional regulator protein.

[73915] Accordingly, in one embodiment, the process of the present invention for producing succinate in a non-human organism, like a microorganism or a plant or a part thereof, comprises increasing or generating the activity of a gene product with the activity of a gene product conferring the activity of “transcriptional regulator protein”, especially from Azotobacter vinelandii or its functional equivalent or its homolog, e.g. the increase of
[73916] (a) a gene product of a gene comprising the nucleic acid molecule as shown in the respective line in column 5 of Table I (whereby the respective line disclose in column 7 the fine chemical succinate), application no. 15, preferably the coding region thereof, or a homolog or a fragment thereof, and being depicted in the same respective line as said AvinDRAFT_{—}2010, or a functional equivalent or a homolog thereof as shown in column 8 of Table I, application no. 15, preferably the coding region thereof, particularly a homolog or functional equivalent as shown in column 8 of Table I B, application no. 15, and being depicted in the same respective line as said AvinDRAFT_{—}2010, and preferably the activity is increased non-targeted, or
[73917] (b) a polypeptide comprising a polypeptide, a consensus sequence or at least a polypeptide motif as shown in the respective line in column 5 of Table II or in column 8 of Table IV, application no. 15, respectively, and being depicted in the same respective line as said AvinDRAFT_{—}2010, or a functional equivalent or a homolog thereof as depicted in column 8 of Table II, application no. 15, preferably a homolog or functional equivalent as depicted in column 8 of Table II B, application no. 15, and being depicted in the same respective line as said AvinDRAFT_{—}2010, and preferably the activity is increased non-targeted, whereby the respective line disclose in column 7 the fine chemical succinate.

[73918] Accordingly, in one embodiment, the molecule which activity is to be increased in the process of the invention is the gene product with an activity as a “transcriptional regulator protein”, preferably it is the molecule of section (a) or (b) of this paragraph.

[73919] In particular, it was observed that in plants, especially in Arabidopsis thaliana, increasing or generating the activity of a gene product non-targeted with the activity of a “transcriptional regulator protein”, preferably being encoded by a gene comprising the nucleic acid sequence SEQ ID NO. 114198, preferably the coding region thereof, conferred the production of or the increase in succinate compared with the wild type control.

[73920] The nucleic acid sequence of AvinDRAFT_{—}2091 from Azotobacter vinelandii, e.g. as shown in the respective line in column 5 of Table I, application no. 15, has been published in D. And the activity of the gene product thereof is the activity of beta-hydroxylase.

[73921] Accordingly, in one embodiment, the process of the present invention for producing glycerate in a non-human organism, like a microorganism or a plant or a part thereof, comprises increasing or generating the activity of a gene product with the activity of a gene product conferring the activity of “beta-hydroxylase”, especially from Azotobacter vinelandii or its functional equivalent or its homolog, e.g. the increase of
[73922] (a) a gene product of a gene comprising the nucleic acid molecule as shown in the respective line in column 5 of Table I (whereby the respective line disclose in column 7 the fine chemical glycerate), application no. 15, preferably the coding region thereof, or a homolog or a fragment thereof, and being depicted in the same respective line as said AvinDRAFT_{—}2091, or a functional equivalent or a homolog thereof as shown in column 8 of Table I, application no. 15, preferably the coding region thereof, particularly a homolog or functional equivalent as shown in column 8 of Table I B, application no. 15, and being depicted in the same respective line as said AvinDRAFT_{—}2091, and preferably the activity is increased non-targeted, or
[73923] (b) a polypeptide comprising a polypeptide, a consensus sequence or at least a polypeptide motif as shown in the respective line in column 5 of Table II or in column 8 of Table IV, application no. 15, respectively, and being depicted in the same respective line as said AvinDRAFT_{—}2091, or a functional equivalent or a homolog thereof as depicted in column 8 of Table II, application no. 15, preferably a homolog or functional equivalent as depicted in column 8 of Table II B, application no. 15, and being depicted in the same respective line as said AvinDRAFT_{—}2091, and preferably the activity is increased non-targeted, whereby the respective line disclose in column 7 the fine chemical glycerate.

[73924] Accordingly, in one embodiment, the molecule which activity is to be increased in the process of the invention is the gene product with an activity as a “beta-hydroxylase”, preferably it is the molecule of section (a) or (b) of this paragraph.

[73925] In particular, it was observed that in plants, especially in Arabidopsis thaliana, increasing or generating the activity of a gene product non-targeted with the activity of a “beta-hydroxylase”, preferably being encoded by a gene comprising the nucleic acid sequence SEQ ID NO. 6040, preferably the coding region thereof, conferred the production of or the increase in glycerate compared with the wild type control.

[73926] The nucleic acid sequence of AvinDRAFT_{—}2365 from Azotobacter vinelandii, e.g. as shown in the respective line in column 5 of Table I, application no. 15, has been published in D. And the activity of the gene product thereof is the activity of 30S ribosomal protein S3.

[73927] Accordingly, in one embodiment, the process of the present invention for producing succinate in a non-human organism, like a microorganism or a plant or a part thereof, comprises increasing or generating the activity of a gene product with the activity of a gene product conferring the activity of “30S ribosomal protein S3”, especially from Azotobacter vinelandii or its functional equivalent or its homolog, e.g. the increase of
[73928] (a) a gene product of a gene comprising the nucleic acid molecule as shown in the respective line in column 5 of Table I (whereby the respective line disclose in column 7 the fine chemical succinate), application no. 15, preferably the coding region thereof, or a homolog or a fragment thereof, and being depicted in the same respective line as said AvinDRAFT_{—}2365, or a functional equivalent or a homolog thereof as shown in column 8 of Table I, application no. 15, preferably the coding region thereof, particularly a homolog or functional equivalent as shown in column 8 of Table I B, application no. 15, and being depicted in the same respective line as said AvinDRAFT_{—}2365, and preferably the activity is increased non-targeted, or
[73929] (b) a polypeptide comprising a polypeptide, a consensus sequence or at least a polypeptide motif as shown in the respective line in column 5 of Table II or in column 8 of Table IV, application no. 15, respectively, and being depicted in the same respective line as said AvinDRAFT_{—}2365, or a functional equivalent or a homolog thereof as depicted in column 8 of Table II, application no. 15, preferably a homolog or functional equivalent as depicted in column 8 of Table II B, application no. 15, and being depicted in the same respective line as said AvinDRAFT_{—}2365, and preferably the activity is increased non-targeted, whereby the respective line disclose in column 7 the fine chemical succinate.

[73930] Accordingly, in one embodiment, the molecule which activity is to be increased in the process of the invention is the gene product with an activity as a “30S ribosomal protein S3”, preferably it is the molecule of section (a) or (b) of this paragraph.

[73931] In particular, it was observed that in plants, especially in Arabidopsis thaliana, increasing or generating the activity of a gene product non-targeted with the activity of a “30S ribosomal protein S3”, preferably being encoded by a gene comprising the nucleic acid sequence SEQ ID NO. 71325, preferably the coding region thereof, conferred the production of or the increase in succinate compared with the wild type control.

[73932] The nucleic acid sequence of AvinDRAFT_{—}2369 from Azotobacter vinelandii, e.g. as shown in the respective line in column 5 of Table I, application no. 15, has been published in D. And the activity of the gene product thereof is the activity of 50S ribosomal protein L14.

[73933] Accordingly, in one embodiment, the process of the present invention for producing citramalate in a non-human organism, like a microorganism or a plant or a part thereof, comprises increasing or generating the activity of a gene product with the activity of a gene product conferring the activity of “50S ribosomal protein L14”, especially from Azotobacter vinelandii or its functional equivalent or its homolog, e.g. the increase of
[73934] (a) a gene product of a gene comprising the nucleic acid molecule as shown in the respective line in column 5 of Table I (whereby the respective line disclose in column 7 the fine chemical citramalate), application no. 15, preferably the coding region thereof, or a homolog or a fragment thereof, and being depicted in the same respective line as said AvinDRAFT_{—}2369, or a functional equivalent or a homolog thereof as shown in column 8 of Table I, application no. 15, preferably the coding region thereof, particularly a homolog or functional equivalent as shown in column 8 of Table I B, application no. 15, and being depicted in the same respective line as said AvinDRAFT_{—}2369, and preferably the activity is increased non-targeted, or
[73935] (b) a polypeptide comprising a polypeptide, a consensus sequence or at least a polypeptide motif as shown in the respective line in column 5 of Table II or in column 8 of Table IV, application no. 15, respectively, and being depicted in the same respective line as said AvinDRAFT_{—}2369, or a functional equivalent or a homolog thereof as depicted in column 8 of Table II, application no. 15, preferably a homolog or functional equivalent as depicted in column 8 of Table II B, application no. 15, and being depicted in the same respective line as said AvinDRAFT_{—}2369, and preferably the activity is increased non-targeted, whereby the respective line disclose in column 7 the fine chemical citramalate.

[73936] Accordingly, in one embodiment, the molecule which activity is to be increased in the process of the invention is the gene product with an activity as a “505 ribosomal protein L14”, preferably it is the molecule of section (a) or (b) of this paragraph.

[73937] In particular, it was observed that in plants, especially in Arabidopsis thaliana, increasing or generating the activity of a gene product non-targeted with the activity of a “505 ribosomal protein L14”, preferably being encoded by a gene comprising the nucleic acid sequence SEQ ID NO. 71763, preferably the coding region thereof, conferred the production of or the increase in citramalate compared with the wild type control.

[73938] The nucleic acid sequence of AvinDRAFT_{—}2754 from Azotobacter vinelandii, e.g. as shown in the respective line in column 5 of Table I, application no. 15, has been published in D. And the activity of the gene product thereof is the activity of acyl-CoA synthase.

[73939] Accordingly, in one embodiment, the process of the present invention for producing malate in a non-human organism, like a microorganism or a plant or a part thereof, comprises increasing or generating the activity of a gene product with the activity of a gene product conferring the activity of “acyl-CoA synthase”, especially from Azotobacter vinelandii or its functional equivalent or its homolog, e.g. the increase of
[73940] (a) a gene product of a gene comprising the nucleic acid molecule as shown in the respective line in column 5 of Table I (whereby the respective line disclose in column 7 the fine chemical malate), application no. 15, preferably the coding region thereof, or a homolog or a fragment thereof, and being depicted in the same respective line as said AvinDRAFT_{—}2754, or a functional equivalent or a homolog thereof as shown in column 8 of Table I, application no. 15, preferably the coding region thereof, particularly a homolog or functional equivalent as shown in column 8 of Table I B, application no. 15, and being depicted in the same respective line as said AvinDRAFT_{—}2754, and preferably the activity is increased non-targeted, or
[73941] (b) a polypeptide comprising a polypeptide, a consensus sequence or at least a polypeptide motif as shown in the respective line in column 5 of Table II or in column 8 of Table IV, application no. 15, respectively, and being depicted in the same respective line as said AvinDRAFT_{—}2754, or a functional equivalent or a homolog thereof as depicted in column 8 of Table II, application no. 15, preferably a homolog or functional equivalent as depicted in column 8 of Table II B, application no. 15, and being depicted in the same respective line as said AvinDRAFT_{—}2754, and preferably the activity is increased non-targeted, whereby the respective line disclose in column 7 the fine chemical malate.

[73942] Accordingly, in one embodiment, the molecule which activity is to be increased in the process of the invention is the gene product with an activity as a “acyl-CoA synthase”, preferably it is the molecule of section (a) or (b) of this paragraph.

[73943] In particular, it was observed that in plants, especially in Arabidopsis thaliana, increasing or generating the activity of a gene product non-targeted with the activity of a “acyl-CoA synthase”, preferably being encoded by a gene comprising the nucleic acid sequence SEQ ID NO. 28040, preferably the coding region thereof, conferred the production of or the increase in malate compared with the wild type control.

[73944] The nucleic acid sequence of AvinDRAFT_{—}3028 from Azotobacter vinelandii, e.g. as shown in the respective line in column 5 of Table I, application no. 15, has been published in D. And the activity of the gene product thereof is the activity of 2-oxoglutarate dehydrogenase E1 subunit.

[73945] Accordingly, in one embodiment, the process of the present invention for producing citramalate in a non-human organism, like a microorganism or a plant or a part thereof, comprises increasing or generating the activity of a gene product with the activity of a gene product conferring the activity of “2-oxoglutarate dehydrogenase E1 subunit”, especially from Azotobacter vinelandii or its functional equivalent or its homolog, e.g. the increase of
[73946] (a) a gene product of a gene comprising the nucleic acid molecule as shown in the respective line in column 5 of Table I (whereby the respective line disclose in column 7 the fine chemical citramalate), application no. 15, preferably the coding region thereof, or a homolog or a fragment thereof, and being depicted in the same respective line as said AvinDRAFT_{—}3028, or a functional equivalent or a homolog thereof as shown in column 8 of Table I, application no. 15, preferably the coding region thereof, particularly a homolog or functional equivalent as shown in column 8 of Table I B, application no. 15, and being depicted in the same respective line as said AvinDRAFT_{—}3028, and preferably the activity is increased non-targeted, or
[73947] (b) a polypeptide comprising a polypeptide, a consensus sequence or at least a polypeptide motif as shown in the respective line in column 5 of Table II or in column 8 of Table IV, application no. 15, respectively, and being depicted in the same respective line as said AvinDRAFT_{—}3028, or a functional equivalent or a homolog thereof as depicted in column 8 of Table II, application no. 15, preferably a homolog or functional equivalent as depicted in column 8 of Table II B, application no. 15, and being depicted in the same respective line as said AvinDRAFT_{—}3028, and preferably the activity is increased non-targeted, whereby the respective line disclose in column 7 the fine chemical citramalate.

[73948] Accordingly, in one embodiment, the molecule which activity is to be increased in the process of the invention is the gene product with an activity as a “2-oxoglutarate dehydrogenase E1 subunit”, preferably it is the molecule of section (a) or (b) of this paragraph.

[73949] In particular, it was observed that in plants, especially in Arabidopsis thaliana, increasing or generating the activity of a gene product non-targeted with the activity of a “2-oxoglutarate dehydrogenase E1 subunit”, preferably being encoded by a gene comprising the nucleic acid sequence SEQ ID NO. 6075, preferably the coding region thereof, conferred the production of or the increase in citramalate compared with the wild type control.

[73950] The nucleic acid sequence of AvinDRAFT_{—}3028 from Azotobacter vinelandii, e.g. as shown in the respective line in column 5 of Table I, application no. 15, has been published in D. And the activity of the gene product thereof is the activity of 2-oxoglutarate dehydrogenase E1 subunit.

[73951] Accordingly, in one embodiment, the process of the present invention for producing fumarate in a non-human organism, like a microorganism or a plant or a part thereof, comprises increasing or generating the activity of a gene product with the activity of a gene product conferring the activity of “2-oxoglutarate dehydrogenase E1 subunit”, especially from Azotobacter vinelandii or its functional equivalent or its homolog, e.g. the increase of
[73952] (a) a gene product of a gene comprising the nucleic acid molecule as shown in the respective line in column 5 of Table I (whereby the respective line disclose in column 7 the fine chemical fumarate), application no. 15, preferably the coding region thereof, or a homolog or a fragment thereof, and being depicted in the same respective line as said AvinDRAFT_{—}3028, or a functional equivalent or a homolog thereof as shown in column 8 of Table I, application no. 15, preferably the coding region thereof, particularly a homolog or functional equivalent as shown in column 8 of Table I B, application no. 15, and being depicted in the same respective line as said AvinDRAFT_{—}3028, and preferably the activity is increased non-targeted, or
[73953] (b) a polypeptide comprising a polypeptide, a consensus sequence or at least a polypeptide motif as shown in the respective line in column 5 of Table II or in column 8 of Table IV, application no. 15, respectively, and being depicted in the same respective line as said AvinDRAFT_{—}3028, or a functional equivalent or a homolog thereof as depicted in column 8 of Table II, application no. 15, preferably a homolog or functional equivalent as depicted in column 8 of Table II B, application no. 15, and being depicted in the same respective line as said AvinDRAFT_{—}3028, and preferably the activity is increased non-targeted, whereby the respective line disclose in column 7 the fine chemical fumarate.

[73954] Accordingly, in one embodiment, the molecule which activity is to be increased in the process of the invention is the gene product with an activity as a “2-oxoglutarate dehydrogenase E1 subunit”, preferably it is the molecule of section (a) or (b) of this paragraph.

[73955] In particular, it was observed that in plants, especially in Arabidopsis thaliana, increasing or generating the activity of a gene product non-targeted with the activity of a “2-oxoglutarate dehydrogenase E1 subunit”, preferably being encoded by a gene comprising the nucleic acid sequence SEQ ID NO. 6075, preferably the coding region thereof, conferred the production of or the increase in fumarate compared with the wild type control.

[73956] The nucleic acid sequence of AvinDRAFT_{—}3028 from Azotobacter vinelandii, e.g. as shown in the respective line in column 5 of Table I, application no. 15, has been published in D. And the activity of the gene product thereof is the activity of 2-oxoglutarate dehydrogenase E1 subunit.

[73957] Accordingly, in one embodiment, the process of the present invention for producing malate in a non-human organism, like a microorganism or a plant or a part thereof, comprises increasing or generating the activity of a gene product with the activity of a gene product conferring the activity of “2-oxoglutarate dehydrogenase E1 subunit”, especially from Azotobacter vinelandii or its functional equivalent or its homolog, e.g. the increase of
[73958] (a) a gene product of a gene comprising the nucleic acid molecule as shown in the respective line in column 5 of Table I (whereby the respective line disclose in column 7 the fine chemical malate), application no. 15, preferably the coding region thereof, or a homolog or a fragment thereof, and being depicted in the same respective line as said AvinDRAFT_{—}3028, or a functional equivalent or a homolog thereof as shown in column 8 of Table I, application no. 15, preferably the coding region thereof, particularly a homolog or functional equivalent as shown in column 8 of Table I B, application no. 15, and being depicted in the same respective line as said AvinDRAFT_{—}3028, and preferably the activity is increased non-targeted, or
[73959] (b) a polypeptide comprising a polypeptide, a consensus sequence or at least a polypeptide motif as shown in the respective line in column 5 of Table II or in column 8 of Table IV, application no. 15, respectively, and being depicted in the same respective line as said AvinDRAFT_{—}3028, or a functional equivalent or a homolog thereof as depicted in column 8 of Table II, application no. 15, preferably a homolog or functional equivalent as depicted in column 8 of Table II B, application no. 15, and being depicted in the same respective line as said AvinDRAFT_{—}3028, and preferably the activity is increased non-targeted, whereby the respective line disclose in column 7 the fine chemical malate.

[73960] Accordingly, in one embodiment, the molecule which activity is to be increased in the process of the invention is the gene product with an activity as a “2-oxoglutarate dehydrogenase E1 subunit”, preferably it is the molecule of section (a) or (b) of this paragraph.

[73961] In particular, it was observed that in plants, especially in Arabidopsis thaliana, increasing or generating the activity of a gene product non-targeted with the activity of a “2-oxoglutarate dehydrogenase E1 subunit”, preferably being encoded by a gene comprising the nucleic acid sequence SEQ ID NO. 6075, preferably the coding region thereof, conferred the production of or the increase in malate compared with the wild type control.

[73962] The nucleic acid sequence of AvinDRAFT_{—}3028 from Azotobacter vinelandii, e.g. as shown in the respective line in column 5 of Table I, application no. 15, has been published in D. And the activity of the gene product thereof is the activity of 2-oxoglutarate dehydrogenase E1 subunit.

[73963] Accordingly, in one embodiment, the process of the present invention for producing succinate in a non-human organism, like a microorganism or a plant or a part thereof, comprises increasing or generating the activity of a gene product with the activity of a gene product conferring the activity of “2-oxoglutarate dehydrogenase E1 subunit”, especially from Azotobacter vinelandii or its functional equivalent or its homolog, e.g. the increase of
[73964] (a) a gene product of a gene comprising the nucleic acid molecule as shown in the respective line in column 5 of Table I (whereby the respective line disclose in column 7 the fine chemical succinate), application no. 15, preferably the coding region thereof, or a homolog or a fragment thereof, and being depicted in the same respective line as said AvinDRAFT_{—}3028, or a functional equivalent or a homolog thereof as shown in column 8 of Table I, application no. 15, preferably the coding region thereof, particularly a homolog or functional equivalent as shown in column 8 of Table I B, application no. 15, and being depicted in the same respective line as said AvinDRAFT_{—}3028, and preferably the activity is increased non-targeted, or
[73965] (b) a polypeptide comprising a polypeptide, a consensus sequence or at least a polypeptide motif as shown in the respective line in column 5 of Table II or in column 8 of Table IV, application no. 15, respectively, and being depicted in the same respective line as said AvinDRAFT_{—}3028, or a functional equivalent or a homolog thereof as depicted in column 8 of Table II, application no. 15, preferably a homolog or functional equivalent as depicted in column 8 of Table II B, application no. 15, and being depicted in the same respective line as said AvinDRAFT_{—}3028, and preferably the activity is increased non-targeted, whereby the respective line disclose in column 7 the fine chemical succinate.

[73966] Accordingly, in one embodiment, the molecule which activity is to be increased in the process of the invention is the gene product with an activity as a “2-oxoglutarate dehydrogenase E1 subunit”, preferably it is the molecule of section (a) or (b) of this paragraph.

[73967] In particular, it was observed that in plants, especially in Arabidopsis thaliana, increasing or generating the activity of a gene product non-targeted with the activity of a “2-oxoglutarate dehydrogenase E1 subunit”, preferably being encoded by a gene comprising the nucleic acid sequence SEQ ID NO. 6075, preferably the coding region thereof, conferred the production of or the increase in succinate compared with the wild type control.

[73968] The nucleic acid sequence of AvinDRAFT_{—}3028 from Azotobacter vinelandii, e.g. as shown in the respective line in column 5 of Table I, application no. 15, has been published in D. And the activity of the gene product thereof is the activity of 2-oxoglutarate dehydrogenase E1 subunit.

[73969] Accordingly, in one embodiment, the process of the present invention for producing vitamin c and/or threonic acid in a non-human organism, like a microorganism or a plant or a part thereof, comprises increasing or generating the activity of a gene product with the activity of a gene product conferring the activity of “2-oxoglutarate dehydrogenase E1 subunit”, especially from Azotobacter vinelandii or its functional equivalent or its homolog, e.g. the increase of
[73970] (a) a gene product of a gene comprising the nucleic acid molecule as shown in the respective line in column 5 of Table I (whereby the respective line disclose in column 7 the fine chemical vitamin c and/or threonic acid), application no. 15, preferably the coding region thereof, or a homolog or a fragment thereof, and being depicted in the same respective line as said AvinDRAFT_{—}3028, or a functional equivalent or a homolog thereof as shown in column 8 of Table I, application no. 15, preferably the coding region thereof, particularly a homolog or functional equivalent as shown in column 8 of Table I B, application no. 15, and being depicted in the same respective line as said AvinDRAFT_{—}3028, and preferably the activity is increased non-targeted, or
[73971] (b) a polypeptide comprising a polypeptide, a consensus sequence or at least a polypeptide motif as shown in the respective line in column 5 of Table II or in column 8 of Table IV, application no. 15, respectively, and being depicted in the same respective line as said AvinDRAFT_{—}3028, or a functional equivalent or a homolog thereof as depicted in column 8 of Table II, application no. 15, preferably a homolog or functional equivalent as depicted in column 8 of Table II B, application no. 15, and being depicted in the same respective line as said AvinDRAFT_{—}3028, and preferably the activity is increased non-targeted, whereby the respective line disclose in column 7 the fine chemical vitamin c and/or threonic acid.

[73972] Accordingly, in one embodiment, the molecule which activity is to be increased in the process of the invention is the gene product with an activity as a “2-oxoglutarate dehydrogenase E1 subunit”, preferably it is the molecule of section (a) or (b) of this paragraph.

[73973] In particular, it was observed that in plants, especially in Arabidopsis thaliana, increasing or generating the activity of a gene product non-targeted with the activity of a “2-oxoglutarate dehydrogenase E1 subunit”, preferably being encoded by a gene comprising the nucleic acid sequence SEQ ID NO. 6075, preferably the coding region thereof, conferred the production of or the increase in vitamin c and/or threonic acid compared with the wild type control.

[73974] The nucleic acid sequence of AvinDRAFT_{—}3186 from Azotobacter vinelandii, e.g. as shown in the respective line in column 5 of Table I, application no. 15, has been published in D. And the activity of the gene product thereof is the activity of transcriptional regulator.

[73975] Accordingly, in one embodiment, the process of the present invention for producing citramalate in a non-human organism, like a microorganism or a plant or a part thereof, comprises increasing or generating the activity of a gene product with the activity of a gene product conferring the activity of “transcriptional regulator”, especially from Azotobacter vinelandii or its functional equivalent or its homolog, e.g. the increase of
[73976] (a) a gene product of a gene comprising the nucleic acid molecule as shown in the respective line in column 5 of Table I (whereby the respective line disclose in column 7 the fine chemical citramalate), application no. 15, preferably the coding region thereof, or a homolog or a fragment thereof, and being depicted in the same respective line as said AvinDRAFT_{—}3186, or a functional equivalent or a homolog thereof as shown in column 8 of Table I, application no. 15, preferably the coding region thereof, particularly a homolog or functional equivalent as shown in column 8 of Table I B, application no. 15, and being depicted in the same respective line as said AvinDRAFT_{—}3186, and preferably the activity is increased non-targeted, or
[73977] (b) a polypeptide comprising a polypeptide, a consensus sequence or at least a polypeptide motif as shown in the respective line in column 5 of Table II or in column 8 of Table IV, application no. 15, respectively, and being depicted in the same respective line as said AvinDRAFT_{—}3186, or a functional equivalent or a homolog thereof as depicted in column 8 of Table II, application no. 15, preferably a homolog or functional equivalent as depicted in column 8 of Table II B, application no. 15, and being depicted in the same respective line as said AvinDRAFT_{—}3186, and preferably the activity is increased non-targeted, whereby the respective line disclose in column 7 the fine chemical citramalate.

[73978] Accordingly, in one embodiment, the molecule which activity is to be increased in the process of the invention is the gene product with an activity as a “transcriptional regulator”, preferably it is the molecule of section (a) or (b) of this paragraph.

[73979] In particular, it was observed that in plants, especially in Arabidopsis thaliana, increasing or generating the activity of a gene product non-targeted with the activity of a “transcriptional regulator”, preferably being encoded by a gene comprising the nucleic acid sequence SEQ ID NO. 29246, preferably the coding region thereof, conferred the production of or the increase in citramalate compared with the wild type control.

[73980] The nucleic acid sequence of AvinDRAFT_{—}3186 from Azotobacter vinelandii, e.g. as shown in the respective line in column 5 of Table I, application no. 15, has been published in D. And the activity of the gene product thereof is the activity of transcriptional regulator.

[73981] Accordingly, in one embodiment, the process of the present invention for producing fumarate in a non-human organism, like a microorganism or a plant or a part thereof, comprises increasing or generating the activity of a gene product with the activity of a gene product conferring the activity of “transcriptional regulator”, especially from Azotobacter vinelandii or its functional equivalent or its homolog, e.g. the increase of
[73982] (a) a gene product of a gene comprising the nucleic acid molecule as shown in the respective line in column 5 of Table I (whereby the respective line disclose in column 7 the fine chemical fumarate), application no. 15, preferably the coding region thereof, or a homolog or a fragment thereof, and being depicted in the same respective line as said AvinDRAFT_{—}3186, or a functional equivalent or a homolog thereof as shown in column 8 of Table I, application no. 15, preferably the coding region thereof, particularly a homolog or functional equivalent as shown in column 8 of Table I B, application no. 15, and being depicted in the same respective line as said AvinDRAFT_{—}3186, and preferably the activity is increased non-targeted, or
[73983] (b) a polypeptide comprising a polypeptide, a consensus sequence or at least a polypeptide motif as shown in the respective line in column 5 of Table II or in column 8 of Table IV, application no. 15, respectively, and being depicted in the same respective line as said AvinDRAFT_{—}3186, or a functional equivalent or a homolog thereof as depicted in column 8 of Table II, application no. 15, preferably a homolog or functional equivalent as depicted in column 8 of Table II B, application no. 15, and being depicted in the same respective line as said AvinDRAFT_{—}3186, and preferably the activity is increased non-targeted, whereby the respective line disclose in column 7 the fine chemical fumarate.

[73984] Accordingly, in one embodiment, the molecule which activity is to be increased in the process of the invention is the gene product with an activity as a “transcriptional regulator”, preferably it is the molecule of section (a) or (b) of this paragraph.

[73985] In particular, it was observed that in plants, especially in Arabidopsis thaliana, increasing or generating the activity of a gene product non-targeted with the activity of a “transcriptional regulator”, preferably being encoded by a gene comprising the nucleic acid sequence SEQ ID NO. 29246, preferably the coding region thereof, conferred the production of or the increase in fumarate compared with the wild type control.

[73986] The nucleic acid sequence of AvinDRAFT_{—}3253 from Azotobacter vinelandii, e.g. as shown in the respective line in column 5 of Table I, application no. 15, has been published in D. And the activity of the gene product thereof is the activity of oxidoreductase.

[73987] Accordingly, in one embodiment, the process of the present invention for producing succinate in a non-human organism, like a microorganism or a plant or a part thereof, comprises increasing or generating the activity of a gene product with the activity of a gene product conferring the activity of “oxidoreductase”, especially from Azotobacter vinelandii or its functional equivalent or its homolog, e.g. the increase of
[73988] (a) a gene product of a gene comprising the nucleic acid molecule as shown in the respective line in column 5 of Table I (whereby the respective line disclose in column 7 the fine chemical succinate), application no. 15, preferably the coding region thereof, or a homolog or a fragment thereof, and being depicted in the same respective line as said AvinDRAFT_{—}3253, or a functional equivalent or a homolog thereof as shown in column 8 of Table I, application no. 15, preferably the coding region thereof, particularly a homolog or functional equivalent as shown in column 8 of Table I B, application no. 15, and being depicted in the same respective line as said AvinDRAFT_{—}3253, and preferably the activity is increased non-targeted, or
[73989] (b) a polypeptide comprising a polypeptide, a consensus sequence or at least a polypeptide motif as shown in the respective line in column 5 of Table II or in column 8 of Table IV, application no. 15, respectively, and being depicted in the same respective line as said AvinDRAFT_{—}3253, or a functional equivalent or a homolog thereof as depicted in column 8 of Table II, application no. 15, preferably a homolog or functional equivalent as depicted in column 8 of Table II B, application no. 15, and being depicted in the same respective line as said AvinDRAFT_{—}3253, and preferably the activity is increased non-targeted, whereby the respective line disclose in column 7 the fine chemical succinate.

[73990] Accordingly, in one embodiment, the molecule which activity is to be increased in the process of the invention is the gene product with an activity as a “oxidoreductase”, preferably it is the molecule of section (a) or (b) of this paragraph.

[73991] In particular, it was observed that in plants, especially in Arabidopsis thaliana, increasing or generating the activity of a gene product non-targeted with the activity of a “oxidoreductase”, preferably being encoded by a gene comprising the nucleic acid sequence SEQ ID NO. 29500, preferably the coding region thereof, conferred the production of or the increase in succinate compared with the wild type control.

[73992] The nucleic acid sequence of AvinDRAFT_{—}3605 from Azotobacter vinelandii, e.g. as shown in the respective line in column 5 of Table I, application no. 15, has been published in D. And the activity of the gene product thereof is the activity of CTP synthase.

[73993] Accordingly, in one embodiment, the process of the present invention for producing fumarate in a non-human organism, like a microorganism or a plant or a part thereof, comprises increasing or generating the activity of a gene product with the activity of a gene product conferring the activity of “CTP synthase”, especially from Azotobacter vinelandii or its functional equivalent or its homolog, e.g. the increase of
[73994] (a) a gene product of a gene comprising the nucleic acid molecule as shown in the respective line in column 5 of Table I (whereby the respective line disclose in column 7 the fine chemical fumarate), application no. 15, preferably the coding region thereof, or a homolog or a fragment thereof, and being depicted in the same respective line as said AvinDRAFT_{—}3605, or a functional equivalent or a homolog thereof as shown in column 8 of Table I, application no. 15, preferably the coding region thereof, particularly a homolog or functional equivalent as shown in column 8 of Table I B, application no. 15, and being depicted in the same respective line as said AvinDRAFT_{—}3605, and preferably the activity is increased non-targeted, or
[73995] (b) a polypeptide comprising a polypeptide, a consensus sequence or at least a polypeptide motif as shown in the respective line in column 5 of Table II or in column 8 of Table IV, application no. 15, respectively, and being depicted in the same respective line as said AvinDRAFT_{—}3605, or a functional equivalent or a homolog thereof as depicted in column 8 of Table II, application no. 15, preferably a homolog or functional equivalent as depicted in column 8 of Table II B, application no. 15, and being depicted in the same respective line as said AvinDRAFT_{—}3605, and preferably the activity is increased non-targeted, whereby the respective line disclose in column 7 the fine chemical fumarate.

[73996] Accordingly, in one embodiment, the molecule which activity is to be increased in the process of the invention is the gene product with an activity as a “CTP synthase”, preferably it is the molecule of section (a) or (b) of this paragraph.

[73997] In particular, it was observed that in plants, especially in Arabidopsis thaliana, increasing or generating the activity of a gene product non-targeted with the activity of a “CTP synthase”, preferably being encoded by a gene comprising the nucleic acid sequence SEQ ID NO. 31026, preferably the coding region thereof, conferred the production of or the increase in fumarate compared with the wild type control.

[73998] The nucleic acid sequence of AvinDRAFT_{—}3605 from Azotobacter vinelandii, e.g. as shown in the respective line in column 5 of Table I, application no. 15, has been published in D. And the activity of the gene product thereof is the activity of CTP synthase.

[73999] Accordingly, in one embodiment, the process of the present invention for producing malate in a non-human organism, like a microorganism or a plant or a part thereof, comprises increasing or generating the activity of a gene product with the activity of a gene product conferring the activity of “CTP synthase”, especially from Azotobacter vinelandii or its functional equivalent or its homolog, e.g. the increase of
[74000] (a) a gene product of a gene comprising the nucleic acid molecule as shown in the respective line in column 5 of Table I (whereby the respective line disclose in column 7 the fine chemical malate), application no. 15, preferably the coding region thereof, or a homolog or a fragment thereof, and being depicted in the same respective line as said AvinDRAFT_{—}3605, or a functional equivalent or a homolog thereof as shown in column 8 of Table I, application no. 15, preferably the coding region thereof, particularly a homolog or functional equivalent as shown in column 8 of Table I B, application no. 15, and being depicted in the same respective line as said AvinDRAFT_{—}3605, and preferably the activity is increased non-targeted, or
[74001] (b) a polypeptide comprising a polypeptide, a consensus sequence or at least a polypeptide motif as shown in the respective line in column 5 of Table II or in column 8 of Table IV, application no. 15, respectively, and being depicted in the same respective line as said AvinDRAFT_{—}3605, or a functional equivalent or a homolog thereof as depicted in column 8 of Table II, application no. 15, preferably a homolog or functional equivalent as depicted in column 8 of Table II B, application no. 15, and being depicted in the same respective line as said AvinDRAFT_{—}3605, and preferably the activity is increased non-targeted, whereby the respective line disclose in column 7 the fine chemical malate.

[74002] Accordingly, in one embodiment, the molecule which activity is to be increased in the process of the invention is the gene product with an activity as a “CTP synthase”, preferably it is the molecule of section (a) or (b) of this paragraph.

[74003] In particular, it was observed that in plants, especially in Arabidopsis thaliana, increasing or generating the activity of a gene product non-targeted with the activity of a “CTP synthase”, preferably being encoded by a gene comprising the nucleic acid sequence SEQ ID NO. 31026, preferably the coding region thereof, conferred the production of or the increase in malate compared with the wild type control.

[74004] The nucleic acid sequence of AvinDRAFT_{—}3605 from Azotobacter vinelandii, e.g. as shown in the respective line in column 5 of Table I, application no. 15, has been published in D. And the activity of the gene product thereof is the activity of CTP synthase.

[74005] Accordingly, in one embodiment, the process of the present invention for producing succinate in a non-human organism, like a microorganism or a plant or a part thereof, comprises increasing or generating the activity of a gene product with the activity of a gene product conferring the activity of “CTP synthase”, especially from Azotobacter vinelandii or its functional equivalent or its homolog, e.g. the increase of
[74006] (a) a gene product of a gene comprising the nucleic acid molecule as shown in the respective line in column 5 of Table I (whereby the respective line disclose in column 7 the fine chemical succinate), application no. 15, preferably the coding region thereof, or a homolog or a fragment thereof, and being depicted in the same respective line as said AvinDRAFT_{—}3605, or a functional equivalent or a homolog thereof as shown in column 8 of Table I, application no. 15, preferably the coding region thereof, particularly a homolog or functional equivalent as shown in column 8 of Table I B, application no. 15, and being depicted in the same respective line as said AvinDRAFT_{—}3605, and preferably the activity is increased non-targeted, or
[74007] (b) a polypeptide comprising a polypeptide, a consensus sequence or at least a polypeptide motif as shown in the respective line in column 5 of Table II or in column 8 of Table IV, application no. 15, respectively, and being depicted in the same respective line as said AvinDRAFT_{—}3605, or a functional equivalent or a homolog thereof as depicted in column 8 of Table II, application no. 15, preferably a homolog or functional equivalent as depicted in column 8 of Table II B, application no. 15, and being depicted in the same respective line as said AvinDRAFT_{—}3605, and preferably the activity is increased non-targeted, whereby the respective line disclose in column 7 the fine chemical succinate.

[74008] Accordingly, in one embodiment, the molecule which activity is to be increased in the process of the invention is the gene product with an activity as a “CTP synthase”, preferably it is the molecule of section (a) or (b) of this paragraph.

[74009] In particular, it was observed that in plants, especially in Arabidopsis thaliana, increasing or generating the activity of a gene product non-targeted with the activity of a “CTP synthase”, preferably being encoded by a gene comprising the nucleic acid sequence SEQ ID NO. 31026, preferably the coding region thereof, conferred the production of or the increase in succinate compared with the wild type control.

[74010] The nucleic acid sequence of AvinDRAFT_{—}3629 from Azotobacter vinelandii, e.g. as shown in the respective line in column 5 of Table I, application no. 15, has been published in D. And the activity of the gene product thereof is the activity of recombinase A.

[74011] Accordingly, in one embodiment, the process of the present invention for producing succinate in a non-human organism, like a microorganism or a plant or a part thereof, comprises increasing or generating the activity of a gene product with the activity of a gene product conferring the activity of “recombinase A”, especially from Azotobacter vinelandii or its functional equivalent or its homolog, e.g. the increase of
[74012] (a) a gene product of a gene comprising the nucleic acid molecule as shown in the respective line in column 5 of Table I (whereby the respective line disclose in column 7 the fine chemical succinate), application no. 15, preferably the coding region thereof, or a homolog or a fragment thereof, and being depicted in the same respective line as said AvinDRAFT_{—}3629, or a functional equivalent or a homolog thereof as shown in column 8 of Table I, application no. 15, preferably the coding region thereof, particularly a homolog or functional equivalent as shown in column 8 of Table I B, application no. 15, and being depicted in the same respective line as said AvinDRAFT_{—}3629, and preferably the activity is increased non-targeted, or
[74013] (b) a polypeptide comprising a polypeptide, a consensus sequence or at least a polypeptide motif as shown in the respective line in column 5 of Table II or in column 8 of Table IV, application no. 15, respectively, and being depicted in the same respective line as said AvinDRAFT_{—}3629, or a functional equivalent or a homolog thereof as depicted in column 8 of Table II, application no. 15, preferably a homolog or functional equivalent as depicted in column 8 of Table II B, application no. 15, and being depicted in the same respective line as said AvinDRAFT_{—}3629, and preferably the activity is increased non-targeted, whereby the respective line disclose in column 7 the fine chemical succinate.

[74014] Accordingly, in one embodiment, the molecule which activity is to be increased in the process of the invention is the gene product with an activity as a “recombinase A”, preferably it is the molecule of section (a) or (b) of this paragraph.

[74015] In particular, it was observed that in plants, especially in Arabidopsis thaliana, increasing or generating the activity of a gene product non-targeted with the activity of a “recombinase A”, preferably being encoded by a gene comprising the nucleic acid sequence SEQ ID NO. 114231, preferably the coding region thereof, conferred the production of or the increase in succinate compared with the wild type control.

[74016] The nucleic acid sequence of AvinDRAFT_{—}4384 from Azotobacter vinelandii, e.g. as shown in the respective line in column 5 of Table I, application no. 15, has been published in D. And the activity of the gene product thereof is the activity of glucose-1-phosphate cytidylyltransferase.

[74017] Accordingly, in one embodiment, the process of the present invention for producing malate in a non-human organism, like a microorganism or a plant or a part thereof, comprises increasing or generating the activity of a gene product with the activity of a gene product conferring the activity of “glucose-1-phosphate cytidylyltransferase”, especially from Azotobacter vinelandii or its functional equivalent or its homolog, e.g. the increase of
[74018] (a) a gene product of a gene comprising the nucleic acid molecule as shown in the respective line in column 5 of Table I (whereby the respective line disclose in column 7 the fine chemical malate), application no. 15, preferably the coding region thereof, or a homolog or a fragment thereof, and being depicted in the same respective line as said AvinDRAFT_{—}4384, or a functional equivalent or a homolog thereof as shown in column 8 of Table I, application no. 15, preferably the coding region thereof, particularly a homolog or functional equivalent as shown in column 8 of Table I B, application no. 15, and being depicted in the same respective line as said AvinDRAFT_{—}4384, and preferably the activity is increased non-targeted, or
[74019] (b) a polypeptide comprising a polypeptide, a consensus sequence or at least a polypeptide motif as shown in the respective line in column 5 of Table II or in column 8 of Table IV, application no. 15, respectively, and being depicted in the same respective line as said AvinDRAFT_{—}4384, or a functional equivalent or a homolog thereof as depicted in column 8 of Table II, application no. 15, preferably a homolog or functional equivalent as depicted in column 8 of Table II B, application no. 15, and being depicted in the same respective line as said AvinDRAFT_{—}4384, and preferably the activity is increased non-targeted, whereby the respective line disclose in column 7 the fine chemical malate.

[74020] Accordingly, in one embodiment, the molecule which activity is to be increased in the process of the invention is the gene product with an activity as a “glucose-1-phosphate cytidylyltransferase”, preferably it is the molecule of section (a) or (b) of this paragraph.

[74021] In particular, it was observed that in plants, especially in Arabidopsis thaliana, increasing or generating the activity of a gene product non-targeted with the activity of a “glucose-1-phosphate cytidylyltransferase”, preferably being encoded by a gene comprising the nucleic acid sequence SEQ ID NO. 31717, preferably the coding region thereof, conferred the production of or the increase in malate compared with the wild type control.

[74022] The nucleic acid sequence of AvinDRAFT_{—}4385 from Azotobacter vinelandii, e.g. as shown in the respective line in column 5 of Table I, application no. 15, has been published in D. And the activity of the gene product thereof is the activity of CDP-glucose-4,6-dehydratase.

[74023] Accordingly, in one embodiment, the process of the present invention for producing fumarate in a non-human organism, like a microorganism or a plant or a part thereof, comprises increasing or generating the activity of a gene product with the activity of a gene product conferring the activity of “CDP-glucose-4,6-dehydratase”, especially from Azotobacter vinelandii or its functional equivalent or its homolog, e.g. the increase of
[74024] (a) a gene product of a gene comprising the nucleic acid molecule as shown in the respective line in column 5 of Table I (whereby the respective line disclose in column 7 the fine chemical fumarate), application no. 15, preferably the coding region thereof, or a homolog or a fragment thereof, and being depicted in the same respective line as said AvinDRAFT_{—}4385, or a functional equivalent or a homolog thereof as shown in column 8 of Table I, application no. 15, preferably the coding region thereof, particularly a homolog or functional equivalent as shown in column 8 of Table I B, application no. 15, and being depicted in the same respective line as said AvinDRAFT_{—}4385, and preferably the activity is increased non-targeted, or
[74025] (b) a polypeptide comprising a polypeptide, a consensus sequence or at least a polypeptide motif as shown in the respective line in column 5 of Table II or in column 8 of Table IV, application no. 15, respectively, and being depicted in the same respective line as said AvinDRAFT_{—}4385, or a functional equivalent or a homolog thereof as depicted in column 8 of Table II, application no. 15, preferably a homolog or functional equivalent as depicted in column 8 of Table II B, application no. 15, and being depicted in the same respective line as said AvinDRAFT_{—}4385, and preferably the activity is increased non-targeted, whereby the respective line disclose in column 7 the fine chemical fumarate.

[74026] Accordingly, in one embodiment, the molecule which activity is to be increased in the process of the invention is the gene product with an activity as a “CDP-glucose-4,6-dehydratase”, preferably it is the molecule of section (a) or (b) of this paragraph.

[74027] In particular, it was observed that in plants, especially in Arabidopsis thaliana, increasing or generating the activity of a gene product non-targeted with the activity of a “CDP-glucose-4,6-dehydratase”, preferably being encoded by a gene comprising the nucleic acid sequence SEQ ID NO. 72935, preferably the coding region thereof, conferred the production of or the increase in fumarate compared with the wild type control.

[74028] The nucleic acid sequence of AvinDRAFT_{—}4385 from Azotobacter vinelandii, e.g. as shown in the respective line in column 5 of Table I, application no. 15, has been published in D. And the activity of the gene product thereof is the activity of CDP-glucose-4,6-dehydratase.

[74029] Accordingly, in one embodiment, the process of the present invention for producing malate in a non-human organism, like a microorganism or a plant or a part thereof, comprises increasing or generating the activity of a gene product with the activity of a gene product conferring the activity of “CDP-glucose-4,6-dehydratase”, especially from Azotobacter vinelandii or its functional equivalent or its homolog, e.g. the increase of
[74030] (a) a gene product of a gene comprising the nucleic acid molecule as shown in the respective line in column 5 of Table I (whereby the respective line disclose in column 7 the fine chemical malate), application no. 15, preferably the coding region thereof, or a homolog or a fragment thereof, and being depicted in the same respective line as said AvinDRAFT_{—}4385, or a functional equivalent or a homolog thereof as shown in column 8 of Table I, application no. 15, preferably the coding region thereof, particularly a homolog or functional equivalent as shown in column 8 of Table I B, application no. 15, and being depicted in the same respective line as said AvinDRAFT_{—}4385, and preferably the activity is increased non-targeted, or
[74031] (b) a polypeptide comprising a polypeptide, a consensus sequence or at least a polypeptide motif as shown in the respective line in column 5 of Table II or in column 8 of Table IV, application no. 15, respectively, and being depicted in the same respective line as said AvinDRAFT_{—}4385, or a functional equivalent or a homolog thereof as depicted in column 8 of Table II, application no. 15, preferably a homolog or functional equivalent as depicted in column 8 of Table II B, application no. 15, and being depicted in the same respective line as said AvinDRAFT_{—}4385, and preferably the activity is increased non-targeted, whereby the respective line disclose in column 7 the fine chemical malate.

[74032] Accordingly, in one embodiment, the molecule which activity is to be increased in the process of the invention is the gene product with an activity as a “CDP-glucose-4,6-dehydratase”, preferably it is the molecule of section (a) or (b) of this paragraph.

[74033] In particular, it was observed that in plants, especially in Arabidopsis thaliana, increasing or generating the activity of a gene product non-targeted with the activity of a “CDP-glucose-4,6-dehydratase”, preferably being encoded by a gene comprising the nucleic acid sequence SEQ ID NO. 72935, preferably the coding region thereof, conferred the production of or the increase in malate compared with the wild type control.

[74034] The nucleic acid sequence of AvinDRAFT_{—}4562 from Azotobacter vinelandii, e.g. as shown in the respective line in column 5 of Table I, application no. 15, has been published in D. And the activity of the gene product thereof is the activity of aminotransferase.

[74035] Accordingly, in one embodiment, the process of the present invention for producing malate in a non-human organism, like a microorganism or a plant or a part thereof, comprises increasing or generating the activity of a gene product with the activity of a gene product conferring the activity of “aminotransferase”, especially from Azotobacter vinelandii or its functional equivalent or its homolog, e.g. the increase of
[74036] (a) a gene product of a gene comprising the nucleic acid molecule as shown in the respective line in column 5 of Table I (whereby the respective line disclose in column 7 the fine chemical malate), application no. 15, preferably the coding region thereof, or a homolog or a fragment thereof, and being depicted in the same respective line as said AvinDRAFT_{—}4562, or a functional equivalent or a homolog thereof as shown in column 8 of Table I, application no. 15, preferably the coding region thereof, particularly a homolog or functional equivalent as shown in column 8 of Table I B, application no. 15, and being depicted in the same respective line as said AvinDRAFT_{—}4562, and preferably the activity is increased non-targeted, or
[74037] (b) a polypeptide comprising a polypeptide, a consensus sequence or at least a polypeptide motif as shown in the respective line in column 5 of Table II or in column 8 of Table IV, application no. 15, respectively, and being depicted in the same respective line as said AvinDRAFT_{—}4562, or a functional equivalent or a homolog thereof as depicted in column 8 of Table II, application no. 15, preferably a homolog or functional equivalent as depicted in column 8 of Table II B, application no. 15, and being depicted in the same respective line as said AvinDRAFT_{—}4562, and preferably the activity is increased non-targeted, whereby the respective line disclose in column 7 the fine chemical malate.

[74038] Accordingly, in one embodiment, the molecule which activity is to be increased in the process of the invention is the gene product with an activity as a “aminotransferase”, preferably it is the molecule of section (a) or (b) of this paragraph.

[74039] In particular, it was observed that in plants, especially in Arabidopsis thaliana, increasing or generating the activity of a gene product non-targeted with the activity of a “aminotransferase”, preferably being encoded by a gene comprising the nucleic acid sequence SEQ ID NO. 31926, preferably the coding region thereof, conferred the production of or the increase in malate compared with the wild type control.

[74040] The nucleic acid sequence of AvinDRAFT_{—}4594 from Azotobacter vinelandii, e.g. as shown in the respective line in column 5 of Table I, application no. 15, has been published in D. And the activity of the gene product thereof is the activity of isocitrate lyase.

[74041] Accordingly, in one embodiment, the process of the present invention for producing succinate in a non-human organism, like a microorganism or a plant or a part thereof, comprises increasing or generating the activity of a gene product with the activity of a gene product conferring the activity of “isocitrate lyase”, especially from Azotobacter vinelandii or its functional equivalent or its homolog, e.g. the increase of
[74042] (a) a gene product of a gene comprising the nucleic acid molecule as shown in the respective line in column 5 of Table I (whereby the respective line disclose in column 7 the fine chemical succinate), application no. 15, preferably the coding region thereof, or a homolog or a fragment thereof, and being depicted in the same respective line as said AvinDRAFT_{—}4594, or a functional equivalent or a homolog thereof as shown in column 8 of Table I, application no. 15, preferably the coding region thereof, particularly a homolog or functional equivalent as shown in column 8 of Table I B, application no. 15, and being depicted in the same respective line as said AvinDRAFT_{—}4594, and preferably the activity is increased non-targeted, or
[74043] (b) a polypeptide comprising a polypeptide, a consensus sequence or at least a polypeptide motif as shown in the respective line in column 5 of Table II or in column 8 of Table IV, application no. 15, respectively, and being depicted in the same respective line as said AvinDRAFT_{—}4594, or a functional equivalent or a homolog thereof as depicted in column 8 of Table II, application no. 15, preferably a homolog or functional equivalent as depicted in column 8 of Table II B, application no. 15, and being depicted in the same respective line as said AvinDRAFT_{—}4594, and preferably the activity is increased non-targeted, whereby the respective line disclose in column 7 the fine chemical succinate.

[74044] Accordingly, in one embodiment, the molecule which activity is to be increased in the process of the invention is the gene product with an activity as a “isocitrate lyase”, preferably it is the molecule of section (a) or (b) of this paragraph.

[74045] In particular, it was observed that in plants, especially in Arabidopsis thaliana, increasing or generating the activity of a gene product non-targeted with the activity of a “isocitrate lyase”, preferably being encoded by a gene comprising the nucleic acid sequence SEQ ID NO. 134171, preferably the coding region thereof, conferred the production of or the increase in succinate compared with the wild type control.

[74046] The nucleic acid sequence of AvinDRAFT_{—}4606 from Azotobacter vinelandii, e.g. as shown in the respective line in column 5 of Table I, application no. 15, has been published in D. And the activity of the gene product thereof is the activity of NADH-quinone oxidoreductase subunit.

[74047] Accordingly, in one embodiment, the process of the present invention for producing fumarate in a non-human organism, like a microorganism or a plant or a part thereof, comprises increasing or generating the activity of a gene product with the activity of a gene product conferring the activity of “NADH-quinone oxidoreductase subunit”, especially from Azotobacter vinelandii or its functional equivalent or its homolog, e.g. the increase of
[74048] (a) a gene product of a gene comprising the nucleic acid molecule as shown in the respective line in column 5 of Table I (whereby the respective line disclose in column 7 the fine chemical fumarate), application no. 15, preferably the coding region thereof, or a homolog or a fragment thereof, and being depicted in the same respective line as said AvinDRAFT_{—}4606, or a functional equivalent or a homolog thereof as shown in column 8 of Table I, application no. 15, preferably the coding region thereof, particularly a homolog or functional equivalent as shown in column 8 of Table I B, application no. 15, and being depicted in the same respective line as said AvinDRAFT_{—}4606, and preferably the activity is increased non-targeted, or
[74049] (b) a polypeptide comprising a polypeptide, a consensus sequence or at least a polypeptide motif as shown in the respective line in column 5 of Table II or in column 8 of Table IV, application no. 15, respectively, and being depicted in the same respective line as said AvinDRAFT_{—}4606, or a functional equivalent or a homolog thereof as depicted in column 8 of Table II, application no. 15, preferably a homolog or functional equivalent as depicted in column 8 of Table II B, application no. 15, and being depicted in the same respective line as said AvinDRAFT_{—}4606, and preferably the activity is increased non-targeted, whereby the respective line disclose in column 7 the fine chemical fumarate.

[74050] Accordingly, in one embodiment, the molecule which activity is to be increased in the process of the invention is the gene product with an activity as a “NADH-quinone oxidoreductase subunit”, preferably it is the molecule of section (a) or (b) of this paragraph.

[74051] In particular, it was observed that in plants, especially in Arabidopsis thaliana, increasing or generating the activity of a gene product non-targeted with the activity of a “NADH-quinone oxidoreductase subunit”, preferably being encoded by a gene comprising the nucleic acid sequence SEQ ID NO. 73719, preferably the coding region thereof, conferred the production of or the increase in fumarate compared with the wild type control.

[74052] The nucleic acid sequence of AvinDRAFT_{—}4606 from Azotobacter vinelandii, e.g. as shown in the respective line in column 5 of Table I, application no. 15, has been published in D. And the activity of the gene product thereof is the activity of NADH-quinone oxidoreductase subunit.

[74053] Accordingly, in one embodiment, the process of the present invention for producing malate in a non-human organism, like a microorganism or a plant or a part thereof, comprises increasing or generating the activity of a gene product with the activity of a gene product conferring the activity of “NADH-quinone oxidoreductase subunit”, especially from Azotobacter vinelandii or its functional equivalent or its homolog, e.g. the increase of
[74054] (a) a gene product of a gene comprising the nucleic acid molecule as shown in the respective line in column 5 of Table I (whereby the respective line disclose in column 7 the fine chemical malate), application no. 15, preferably the coding region thereof, or a homolog or a fragment thereof, and being depicted in the same respective line as said AvinDRAFT_{—}4606, or a functional equivalent or a homolog thereof as shown in column 8 of Table I, application no. 15, preferably the coding region thereof, particularly a homolog or functional equivalent as shown in column 8 of Table I B, application no. 15, and being depicted in the same respective line as said AvinDRAFT_{—}4606, and preferably the activity is increased non-targeted, or
[74055] (b) a polypeptide comprising a polypeptide, a consensus sequence or at least a polypeptide motif as shown in the respective line in column 5 of Table II or in column 8 of Table IV, application no. 15, respectively, and being depicted in the same respective line as said AvinDRAFT_{—}4606, or a functional equivalent or a homolog thereof as depicted in column 8 of Table II, application no. 15, preferably a homolog or functional equivalent as depicted in column 8 of Table II B, application no. 15, and being depicted in the same respective line as said AvinDRAFT_{—}4606, and preferably the activity is increased non-targeted, whereby the respective line disclose in column 7 the fine chemical malate.

[74056] Accordingly, in one embodiment, the molecule which activity is to be increased in the process of the invention is the gene product with an activity as a “NADH-quinone oxidoreductase subunit”, preferably it is the molecule of section (a) or (b) of this paragraph.

[74057] In particular, it was observed that in plants, especially in Arabidopsis thaliana, increasing or generating the activity of a gene product non-targeted with the activity of a “NADH-quinone oxidoreductase subunit”, preferably being encoded by a gene comprising the nucleic acid sequence SEQ ID NO. 73719, preferably the coding region thereof, conferred the production of or the increase in malate compared with the wild type control.

[74058] The nucleic acid sequence of AvinDRAFT_{—}4989 from Azotobacter vinelandii, e.g. as shown in the respective line in column 5 of Table I, application no. 15, has been published in D. And the activity of the gene product thereof is the activity of RNA polymerase sigma factor.

[74059] Accordingly, in one embodiment, the process of the present invention for producing malate in a non-human organism, like a microorganism or a plant or a part thereof, comprises increasing or generating the activity of a gene product with the activity of a gene product conferring the activity of “RNA polymerase sigma factor”, especially from Azotobacter vinelandii or its functional equivalent or its homolog, e.g. the increase of
[74060] (a) a gene product of a gene comprising the nucleic acid molecule as shown in the respective line in column 5 of Table I (whereby the respective line disclose in column 7 the fine chemical malate), application no. 15, preferably the coding region thereof, or a homolog or a fragment thereof, and being depicted in the same respective line as said AvinDRAFT_{—}4989, or a functional equivalent or a homolog thereof as shown in column 8 of Table I, application no. 15, preferably the coding region thereof, particularly a homolog or functional equivalent as shown in column 8 of Table I B, application no. 15, and being depicted in the same respective line as said AvinDRAFT_{—}4989, and preferably the activity is increased non-targeted, or
[74061] (b) a polypeptide comprising a polypeptide, a consensus sequence or at least a polypeptide motif as shown in the respective line in column 5 of Table II or in column 8 of Table IV, application no. 15, respectively, and being depicted in the same respective line as said AvinDRAFT_{—}4989, or a functional equivalent or a homolog thereof as depicted in column 8 of Table II, application no. 15, preferably a homolog or functional equivalent as depicted in column 8 of Table II B, application no. 15, and being depicted in the same respective line as said AvinDRAFT_{—}4989, and preferably the activity is increased non-targeted, whereby the respective line disclose in column 7 the fine chemical malate.

[74062] Accordingly, in one embodiment, the molecule which activity is to be increased in the process of the invention is the gene product with an activity as a “RNA polymerase sigma factor”, preferably it is the molecule of section (a) or (b) of this paragraph.

[74063] In particular, it was observed that in plants, especially in Arabidopsis thaliana, increasing or generating the activity of a gene product non-targeted with the activity of a “RNA polymerase sigma factor”, preferably being encoded by a gene comprising the nucleic acid sequence SEQ ID NO. 74452, preferably the coding region thereof, conferred the production of or the increase in malate compared with the wild type control.

[74064] The nucleic acid sequence of AvinDRAFT_{—}5103 from Azotobacter vinelandii, e.g. as shown in the respective line in column 5 of Table I, application no. 15, has been published in D. And the activity of the gene product thereof is the activity of hydrolase.

[74065] Accordingly, in one embodiment, the process of the present invention for producing malate in a non-human organism, like a microorganism or a plant or a part thereof, comprises increasing or generating the activity of a gene product with the activity of a gene product conferring the activity of “hydrolase”, especially from Azotobacter vinelandii or its functional equivalent or its homolog, e.g. the increase of
[74066] (a) a gene product of a gene comprising the nucleic acid molecule as shown in the respective line in column 5 of Table I (whereby the respective line disclose in column 7 the fine chemical malate), application no. 15, preferably the coding region thereof, or a homolog or a fragment thereof, and being depicted in the same respective line as said AvinDRAFT_{—}5103, or a functional equivalent or a homolog thereof as shown in column 8 of Table I, application no. 15, preferably the coding region thereof, particularly a homolog or functional equivalent as shown in column 8 of Table I B, application no. 15, and being depicted in the same respective line as said AvinDRAFT_{—}5103, and preferably the activity is increased non-targeted, or
[74067] (b) a polypeptide comprising a polypeptide, a consensus sequence or at least a polypeptide motif as shown in the respective line in column 5 of Table II or in column 8 of Table IV, application no. 15, respectively, and being depicted in the same respective line as said AvinDRAFT_{—}5103, or a functional equivalent or a homolog thereof as depicted in column 8 of Table II, application no. 15, preferably a homolog or functional equivalent as depicted in column 8 of Table II B, application no. 15, and being depicted in the same respective line as said AvinDRAFT_{—}5103, and preferably the activity is increased non-targeted, whereby the respective line disclose in column 7 the fine chemical malate.

[74068] Accordingly, in one embodiment, the molecule which activity is to be increased in the process of the invention is the gene product with an activity as a “hydrolase”, preferably it is the molecule of section (a) or (b) of this paragraph.

[74069] In particular, it was observed that in plants, especially in Arabidopsis thaliana, increasing or generating the activity of a gene product non-targeted with the activity of a “hydrolase”, preferably being encoded by a gene comprising the nucleic acid sequence SEQ ID NO. 6510, preferably the coding region thereof, conferred the production of or the increase in malate compared with the wild type control.

[74070] The nucleic acid sequence of AvinDRAFT_{—}5246 from Azotobacter vinelandii, e.g. as shown in the respective line in column 5 of Table I, application no. 15, has been published in D. And the activity of the gene product thereof is the activity of glutamate-ammonia-ligase.

[74071] Accordingly, in one embodiment, the process of the present invention for producing malate in a non-human organism, like a microorganism or a plant or a part thereof, comprises increasing or generating the activity of a gene product with the activity of a gene product conferring the activity of “glutamate-ammonia-ligase”, especially from Azotobacter vinelandii or its functional equivalent or its homolog, e.g. the increase of
[74072] (a) a gene product of a gene comprising the nucleic acid molecule as shown in the respective line in column 5 of Table I (whereby the respective line disclose in column 7 the fine chemical malate), application no. 15, preferably the coding region thereof, or a homolog or a fragment thereof, and being depicted in the same respective line as said AvinDRAFT_{—}5246, or a functional equivalent or a homolog thereof as shown in column 8 of Table I, application no. 15, preferably the coding region thereof, particularly a homolog or functional equivalent as shown in column 8 of Table I B, application no. 15, and being depicted in the same respective line as said AvinDRAFT_{—}5246, and preferably the activity is increased non-targeted, or
[74073] (b) a polypeptide comprising a polypeptide, a consensus sequence or at least a polypeptide motif as shown in the respective line in column 5 of Table II or in column 8 of Table IV, application no. 15, respectively, and being depicted in the same respective line as said AvinDRAFT_{—}5246, or a functional equivalent or a homolog thereof as depicted in column 8 of Table II, application no. 15, preferably a homolog or functional equivalent as depicted in column 8 of Table II B, application no. 15, and being depicted in the same respective line as said AvinDRAFT_{—}5246, and preferably the activity is increased non-targeted, whereby the respective line disclose in column 7 the fine chemical malate.

[74074] Accordingly, in one embodiment, the molecule which activity is to be increased in the process of the invention is the gene product with an activity as a “glutamate-ammonia-ligase”, preferably it is the molecule of section (a) or (b) of this paragraph.

[74075] In particular, it was observed that in plants, especially in Arabidopsis thaliana, increasing or generating the activity of a gene product non-targeted with the activity of a “glutamate-ammonia-ligase”, preferably being encoded by a gene comprising the nucleic acid sequence SEQ ID NO. 32037, preferably the coding region thereof, conferred the production of or the increase in malate compared with the wild type control.

[74076] The nucleic acid sequence of AvinDRAFT_{—}6679 from Azotobacter vinelandii, e.g. as shown in the respective line in column 5 of Table I, application no. 15, has been published in D. And the activity of the gene product thereof is the activity of electron transfer flavoprotein subunit beta.

[74077] Accordingly, in one embodiment, the process of the present invention for producing succinate in a non-human organism, like a microorganism or a plant or a part thereof, comprises increasing or generating the activity of a gene product with the activity of a gene product conferring the activity of “electron transfer flavoprotein subunit beta”, especially from Azotobacter vinelandii or its functional equivalent or its homolog, e.g. the increase of
[74078] (a) a gene product of a gene comprising the nucleic acid molecule as shown in the respective line in column 5 of Table I (whereby the respective line disclose in column 7 the fine chemical succinate), application no. 15, preferably the coding region thereof, or a homolog or a fragment thereof, and being depicted in the same respective line as said AvinDRAFT_{—}6679, or a functional equivalent or a homolog thereof as shown in column 8 of Table I, application no. 15, preferably the coding region thereof, particularly a homolog or functional equivalent as shown in column 8 of Table I B, application no. 15, and being depicted in the same respective line as said AvinDRAFT_{—}6679, and preferably the activity is increased non-targeted, or
[74079] (b) a polypeptide comprising a polypeptide, a consensus sequence or at least a polypeptide motif as shown in the respective line in column 5 of Table II or in column 8 of Table IV, application no. 15, respectively, and being depicted in the same respective line as said AvinDRAFT_{—}6679, or a functional equivalent or a homolog thereof as depicted in column 8 of Table II, application no. 15, preferably a homolog or functional equivalent as depicted in column 8 of Table II B, application no. 15, and being depicted in the same respective line as said AvinDRAFT_{—}6679, and preferably the activity is increased non-targeted, whereby the respective line disclose in column 7 the fine chemical succinate.

[74080] Accordingly, in one embodiment, the molecule which activity is to be increased in the process of the invention is the gene product with an activity as a “electron transfer flavoprotein subunit beta”, preferably it is the molecule of section (a) or (b) of this paragraph.

[74081] In particular, it was observed that in plants, especially in Arabidopsis thaliana, increasing or generating the activity of a gene product non-targeted with the activity of a “electron transfer flavoprotein subunit beta”, preferably being encoded by a gene comprising the nucleic acid sequence SEQ ID NO. 74729, preferably the coding region thereof, conferred the production of or the increase in succinate compared with the wild type control.

[74082] The nucleic acid sequence of AX653549 from Oryza sativa, e.g. as shown in the respective line in column 5 of Table I, application no. 15, has been published in G. And the activity of the gene product thereof is the activity of AX653549-protein.

[74083] Accordingly, in one embodiment, the process of the present invention for producing fumarate in a non-human organism, like a microorganism or a plant or a part thereof, comprises increasing or generating the activity of a gene product with the activity of a gene product conferring the activity of “AX653549-protein”, especially from Oryza sativa or its functional equivalent or its homolog, e.g. the increase of
[74084] (a) a gene product of a gene comprising the nucleic acid molecule as shown in the respective line in column 5 of Table I (whereby the respective line disclose in column 7 the fine chemical fumarate), application no. 15, preferably the coding region thereof, or a homolog or a fragment thereof, and being depicted in the same respective line as said AX653549, or a functional equivalent or a homolog thereof as shown in column 8 of Table I, application no. 15, preferably the coding region thereof, particularly a homolog or functional equivalent as shown in column 8 of Table I B, application no. 15, and being depicted in the same respective line as said AX653549, and preferably the activity is increased non-targeted, or
[74085] (b) a polypeptide comprising a polypeptide, a consensus sequence or at least a polypeptide motif as shown in the respective line in column 5 of Table II or in column 8 of Table IV, application no. 15, respectively, and being depicted in the same respective line as said AX653549, or a functional equivalent or a homolog thereof as depicted in column 8 of Table II, application no. 15, preferably a homolog or functional equivalent as depicted in column 8 of Table II B, application no. 15, and being depicted in the same respective line as said AX653549, and preferably the activity is increased non-targeted, whereby the respective line disclose in column 7 the fine chemical fumarate.

[74086] Accordingly, in one embodiment, the molecule which activity is to be increased in the process of the invention is the gene product with an activity as a “AX653549-protein”, preferably it is the molecule of section (a) or (b) of this paragraph.

[74087] In particular, it was observed that in plants, especially in Arabidopsis thaliana, increasing or generating the activity of a gene product non-targeted with the activity of a “AX653549-protein”, preferably being encoded by a gene comprising the nucleic acid sequence SEQ ID NO. 34301, preferably the coding region thereof, conferred the production of or the increase in fumarate compared with the wild type control.

[74088] The nucleic acid sequence of AX653549 from Oryza sativa, e.g. as shown in the respective line in column 5 of Table I, application no. 15, has been published in G. And the activity of the gene product thereof is the activity of AX653549-protein.

[74089] Accordingly, in one embodiment, the process of the present invention for producing malate in a non-human organism, like a microorganism or a plant or a part thereof, comprises increasing or generating the activity of a gene product with the activity of a gene product conferring the activity of “AX653549-protein”, especially from Oryza sativa or its functional equivalent or its homolog, e.g. the increase of
[74090] (a) a gene product of a gene comprising the nucleic acid molecule as shown in the respective line in column 5 of Table I (whereby the respective line disclose in column 7 the fine chemical malate), application no. 15, preferably the coding region thereof, or a homolog or a fragment thereof, and being depicted in the same respective line as said AX653549, or a functional equivalent or a homolog thereof as shown in column 8 of Table I, application no. 15, preferably the coding region thereof, particularly a homolog or functional equivalent as shown in column 8 of Table I B, application no. 15, and being depicted in the same respective line as said AX653549, and preferably the activity is increased non-targeted, or
[74091] (b) a polypeptide comprising a polypeptide, a consensus sequence or at least a polypeptide motif as shown in the respective line in column 5 of Table II or in column 8 of Table IV, application no. 15, respectively, and being depicted in the same respective line as said AX653549, or a functional equivalent or a homolog thereof as depicted in column 8 of Table II, application no. 15, preferably a homolog or functional equivalent as depicted in column 8 of Table II B, application no. 15, and being depicted in the same respective line as said AX653549, and preferably the activity is increased non-targeted, whereby the respective line disclose in column 7 the fine chemical malate.

[74092] Accordingly, in one embodiment, the molecule which activity is to be increased in the process of the invention is the gene product with an activity as a “AX653549-protein”, preferably it is the molecule of section (a) or (b) of this paragraph.

[74093] In particular, it was observed that in plants, especially in Arabidopsis thaliana, increasing or generating the activity of a gene product non-targeted with the activity of a “AX653549-protein”, preferably being encoded by a gene comprising the nucleic acid sequence SEQ ID NO. 34301, preferably the coding region thereof, conferred the production of or the increase in malate compared with the wild type control.

[74094] The nucleic acid sequence of AY087308 from Arabidopsis thaliana, e.g. as shown in the respective line in column 5 of Table I, application no. 15, has been published in F. And the activity of the gene product thereof is the activity of AY087308-protein.

[74095] Accordingly, in one embodiment, the process of the present invention for producing fumarate in a non-human organism, like a microorganism or a plant or a part thereof, comprises increasing or generating the activity of a gene product with the activity of a gene product conferring the activity of “AY087308-protein”, especially from Arabidopsis thaliana or its functional equivalent or its homolog, e.g. the increase of
[74096] (a) a gene product of a gene comprising the nucleic acid molecule as shown in the respective line in column 5 of Table I (whereby the respective line disclose in column 7 the fine chemical fumarate), application no. 15, preferably the coding region thereof, or a homolog or a fragment thereof, and being depicted in the same respective line as said AY087308, or a functional equivalent or a homolog thereof as shown in column 8 of Table I, application no. 15, preferably the coding region thereof, particularly a homolog or functional equivalent as shown in column 8 of Table I B, application no. 15, and being depicted in the same respective line as said AY087308, and preferably the activity is increased non-targeted, or
[74097] (b) a polypeptide comprising a polypeptide, a consensus sequence or at least a polypeptide motif as shown in the respective line in column 5 of Table II or in column 8 of Table IV, application no. 15, respectively, and being depicted in the same respective line as said AY087308, or a functional equivalent or a homolog thereof as depicted in column 8 of Table II, application no. 15, preferably a homolog or functional equivalent as depicted in column 8 of Table II B, application no. 15, and being depicted in the same respective line as said AY087308, and preferably the activity is increased non-targeted, whereby the respective line disclose in column 7 the fine chemical fumarate.

[74098] Accordingly, in one embodiment, the molecule which activity is to be increased in the process of the invention is the gene product with an activity as a “AY087308-protein”, preferably it is the molecule of section (a) or (b) of this paragraph.

[74099] In particular, it was observed that in plants, especially in Arabidopsis thaliana, increasing or generating the activity of a gene product non-targeted with the activity of a “AY087308-protein”, preferably being encoded by a gene comprising the nucleic acid sequence SEQ ID NO. 34602, preferably the coding region thereof, conferred the production of or the increase in fumarate compared with the wild type control.

[74100] The nucleic acid sequence of AY087308 from Arabidopsis thaliana, e.g. as shown in the respective line in column 5 of Table I, application no. 15, has been published in F. And the activity of the gene product thereof is the activity of AY087308-protein.

[74101] Accordingly, in one embodiment, the process of the present invention for producing malate in a non-human organism, like a microorganism or a plant or a part thereof, comprises increasing or generating the activity of a gene product with the activity of a gene product conferring the activity of “AY087308-protein”, especially from Arabidopsis thaliana or its functional equivalent or its homolog, e.g. the increase of
[74102] (a) a gene product of a gene comprising the nucleic acid molecule as shown in the respective line in column 5 of Table I (whereby the respective line disclose in column 7 the fine chemical malate), application no. 15, preferably the coding region thereof, or a homolog or a fragment thereof, and being depicted in the same respective line as said AY087308, or a functional equivalent or a homolog thereof as shown in column 8 of Table I, application no. 15, preferably the coding region thereof, particularly a homolog or functional equivalent as shown in column 8 of Table I B, application no. 15, and being depicted in the same respective line as said AY087308, and preferably the activity is increased non-targeted, or
[74103] (b) a polypeptide comprising a polypeptide, a consensus sequence or at least a polypeptide motif as shown in the respective line in column 5 of Table II or in column 8 of Table IV, application no. 15, respectively, and being depicted in the same respective line as said AY087308, or a functional equivalent or a homolog thereof as depicted in column 8 of Table II, application no. 15, preferably a homolog or functional equivalent as depicted in column 8 of Table II B, application no. 15, and being depicted in the same respective line as said AY087308, and preferably the activity is increased non-targeted, whereby the respective line disclose in column 7 the fine chemical malate.

[74104] Accordingly, in one embodiment, the molecule which activity is to be increased in the process of the invention is the gene product with an activity as a “AY087308-protein”, preferably it is the molecule of section (a) or (b) of this paragraph.

[74105] In particular, it was observed that in plants, especially in Arabidopsis thaliana, increasing or generating the activity of a gene product non-targeted with the activity of a “AY087308-protein”, preferably being encoded by a gene comprising the nucleic acid sequence SEQ ID NO. 34602, preferably the coding region thereof, conferred the production of or the increase in malate compared with the wild type control.

[74106] The nucleic acid sequence of AY087308 from Arabidopsis thaliana, e.g. as shown in the respective line in column 5 of Table I, application no. 15, has been published in F. And the activity of the gene product thereof is the activity of AY087308-protein.

[74107] Accordingly, in one embodiment, the process of the present invention for producing succinate in a non-human organism, like a microorganism or a plant or a part thereof, comprises increasing or generating the activity of a gene product with the activity of a gene product conferring the activity of “AY087308-protein”, especially from Arabidopsis thaliana or its functional equivalent or its homolog, e.g. the increase of
[74108] (a) a gene product of a gene comprising the nucleic acid molecule as shown in the respective line in column 5 of Table I (whereby the respective line disclose in column 7 the fine chemical succinate), application no. 15, preferably the coding region thereof, or a homolog or a fragment thereof, and being depicted in the same respective line as said AY087308, or a functional equivalent or a homolog thereof as shown in column 8 of Table I, application no. 15, preferably the coding region thereof, particularly a homolog or functional equivalent as shown in column 8 of Table I B, application no. 15, and being depicted in the same respective line as said AY087308, and preferably the activity is increased non-targeted, or
[74109] (b) a polypeptide comprising a polypeptide, a consensus sequence or at least a polypeptide motif as shown in the respective line in column 5 of Table II or in column 8 of Table IV, application no. 15, respectively, and being depicted in the same respective line as said AY087308, or a functional equivalent or a homolog thereof as depicted in column 8 of Table II, application no. 15, preferably a homolog or functional equivalent as depicted in column 8 of Table II B, application no. 15, and being depicted in the same respective line as said AY087308, and preferably the activity is increased non-targeted, whereby the respective line disclose in column 7 the fine chemical succinate.

[74110] Accordingly, in one embodiment, the molecule which activity is to be increased in the process of the invention is the gene product with an activity as a “AY087308-protein”, preferably it is the molecule of section (a) or (b) of this paragraph.

[74111] In particular, it was observed that in plants, especially in Arabidopsis thaliana, increasing or generating the activity of a gene product non-targeted with the activity of a “AY087308-protein”, preferably being encoded by a gene comprising the nucleic acid sequence SEQ ID NO. 34602, preferably the coding region thereof, conferred the production of or the increase in succinate compared with the wild type control.

[74112] The nucleic acid sequence of Bab08741 from Arabidopsis thaliana, e.g. as shown in the respective line in column 5 of Table I, application no. 15, has been published in F. And the activity of the gene product thereof is the activity of fumarate hydratase.

[74113] Accordingly, in one embodiment, the process of the present invention for producing fumarate in a non-human organism, like a microorganism or a plant or a part thereof, comprises increasing or generating the activity of a gene product with the activity of a gene product conferring the activity of “fumarate hydratase”, especially from Arabidopsis thaliana or its functional equivalent or its homolog, e.g. the increase of
[74114] (a) a gene product of a gene comprising the nucleic acid molecule as shown in the respective line in column 5 of Table I (whereby the respective line disclose in column 7 the fine chemical fumarate), application no. 15, preferably the coding region thereof, or a homolog or a fragment thereof, and being depicted in the same respective line as said Bab08741, or a functional equivalent or a homolog thereof as shown in column 8 of Table I, application no. 15, preferably the coding region thereof, particularly a homolog or functional equivalent as shown in column 8 of Table I B, application no. 15, and being depicted in the same respective line as said Bab08741, and preferably the activity is increased non-targeted, or
[74115] (b) a polypeptide comprising a polypeptide, a consensus sequence or at least a polypeptide motif as shown in the respective line in column 5 of Table II or in column 8 of Table IV, application no. 15, respectively, and being depicted in the same respective line as said Bab08741, or a functional equivalent or a homolog thereof as depicted in column 8 of Table II, application no. 15, preferably a homolog or functional equivalent as depicted in column 8 of Table II B, application no. 15, and being depicted in the same respective line as said Bab08741, and preferably the activity is increased non-targeted, whereby the respective line disclose in column 7 the fine chemical fumarate.

[74116] Accordingly, in one embodiment, the molecule which activity is to be increased in the process of the invention is the gene product with an activity as a “fumarate hydratase”, preferably it is the molecule of section (a) or (b) of this paragraph.

[74117] In particular, it was observed that in plants, especially in Arabidopsis thaliana, increasing or generating the activity of a gene product non-targeted with the activity of a “fumarate hydratase”, preferably being encoded by a gene comprising the nucleic acid sequence SEQ ID NO. 136120, preferably the coding region thereof, conferred the production of or the increase in fumarate compared with the wild type control.

[74118] The nucleic acid sequence of B0004 from Escherichia coli, e.g. as shown in the respective line in column 5 of Table I, application no. 15, has been published in B. And the activity of the gene product thereof is the activity of threonine synthase.

[74119] Accordingly, in one embodiment, the process of the present invention for producing malate in a non-human organism, like a microorganism or a plant or a part thereof, comprises increasing or generating the activity of a gene product with the activity of a gene product conferring the activity of “threonine synthase”, especially from Escherichia coli or its functional equivalent or its homolog, e.g. the increase of
[74120] (a) a gene product of a gene comprising the nucleic acid molecule as shown in the respective line in column 5 of Table I (whereby the respective line disclose in column 7 the fine chemical malate), application no. 15, preferably the coding region thereof, or a homolog or a fragment thereof, and being depicted in the same respective line as said B0004, or a functional equivalent or a homolog thereof as shown in column 8 of Table I, application no. 15, preferably the coding region thereof, particularly a homolog or functional equivalent as shown in column 8 of Table I B, application no. 15, and being depicted in the same respective line as said B0004, and preferably the activity is increased plastidic, or
[74121] (b) a polypeptide comprising a polypeptide, a consensus sequence or at least a polypeptide motif as shown in the respective line in column 5 of Table II or in column 8 of Table IV, application no. 15, respectively, and being depicted in the same respective line as said B0004, or a functional equivalent or a homolog thereof as depicted in column 8 of Table II, application no. 15, preferably a homolog or functional equivalent as depicted in column 8 of Table II B, application no. 15, and being depicted in the same respective line as said B0004, and preferably the activity is increased plastidic, whereby the respective line disclose in column 7 the fine chemical malate.

[74122] Accordingly, in one embodiment, the molecule which activity is to be increased in the process of the invention is the gene product with an activity as a “threonine synthase”, preferably it is the molecule of section (a) or (b) of this paragraph.

[74123] In particular, it was observed that in plants, especially in Arabidopsis thaliana, increasing or generating the activity of a gene product plastidic with the activity of a “threonine synthase”, preferably being encoded by a gene comprising the nucleic acid sequence SEQ ID NO. 34889, preferably the coding region thereof, conferred the production of or the increase in malate compared with the wild type control.

[74124] The nucleic acid sequence of B0063 from Escherichia coli, e.g. as shown in the respective line in column 5 of Table I, application no. 15, has been published in B. And the activity of the gene product thereof is the activity of ribulokinase.

[74125] Accordingly, in one embodiment, the process of the present invention for producing fumarate in a non-human organism, like a microorganism or a plant or a part thereof, comprises increasing or generating the activity of a gene product with the activity of a gene product conferring the activity of “ribulokinase”, especially from Escherichia coli or its functional equivalent or its homolog, e.g. the increase of
[74126] (a) a gene product of a gene comprising the nucleic acid molecule as shown in the respective line in column 5 of Table I (whereby the respective line disclose in column 7 the fine chemical fumarate), application no. 15, preferably the coding region thereof, or a homolog or a fragment thereof, and being depicted in the same respective line as said B0063, or a functional equivalent or a homolog thereof as shown in column 8 of Table I, application no. 15, preferably the coding region thereof, particularly a homolog or functional equivalent as shown in column 8 of Table I B, application no. 15, and being depicted in the same respective line as said B0063, and preferably the activity is increased non-targeted, or
[74127] (b) a polypeptide comprising a polypeptide, a consensus sequence or at least a polypeptide motif as shown in the respective line in column 5 of Table II or in column 8 of Table IV, application no. 15, respectively, and being depicted in the same respective line as said B0063, or a functional equivalent or a homolog thereof as depicted in column 8 of Table II, application no. 15, preferably a homolog or functional equivalent as depicted in column 8 of Table II B, application no. 15, and being depicted in the same respective line as said B0063, and preferably the activity is increased non-targeted, whereby the respective line disclose in column 7 the fine chemical fumarate.

[74128] Accordingly, in one embodiment, the molecule which activity is to be increased in the process of the invention is the gene product with an activity as a “ribulokinase”, preferably it is the molecule of section (a) or (b) of this paragraph.

[74129] In particular, it was observed that in plants, especially in Arabidopsis thaliana, increasing or generating the activity of a gene product non-targeted with the activity of a “ribulokinase”, preferably being encoded by a gene comprising the nucleic acid sequence SEQ ID NO. 134299, preferably the coding region thereof, conferred the production of or the increase in fumarate compared with the wild type control.

[74130] The nucleic acid sequence of B0063 from Escherichia coli, e.g. as shown in the respective line in column 5 of Table I, application no. 15, has been published in B. And the activity of the gene product thereof is the activity of ribulokinase.

[74131] Accordingly, in one embodiment, the process of the present invention for producing succinate in a non-human organism, like a microorganism or a plant or a part thereof, comprises increasing or generating the activity of a gene product with the activity of a gene product conferring the activity of “ribulokinase”, especially from Escherichia coli or its functional equivalent or its homolog, e.g. the increase of
[74132] (a) a gene product of a gene comprising the nucleic acid molecule as shown in the respective line in column 5 of Table I (whereby the respective line disclose in column 7 the fine chemical succinate), application no. 15, preferably the coding region thereof, or a homolog or a fragment thereof, and being depicted in the same respective line as said B0063, or a functional equivalent or a homolog thereof as shown in column 8 of Table I, application no. 15, preferably the coding region thereof, particularly a homolog or functional equivalent as shown in column 8 of Table I B, application no. 15, and being depicted in the same respective line as said B0063, and preferably the activity is increased non-targeted, or
[74133] (b) a polypeptide comprising a polypeptide, a consensus sequence or at least a polypeptide motif as shown in the respective line in column 5 of Table II or in column 8 of Table IV, application no. 15, respectively, and being depicted in the same respective line as said B0063, or a functional equivalent or a homolog thereof as depicted in column 8 of Table II, application no. 15, preferably a homolog or functional equivalent as depicted in column 8 of Table II B, application no. 15, and being depicted in the same respective line as said B0063, and preferably the activity is increased non-targeted, whereby the respective line disclose in column 7 the fine chemical succinate.

[74134] Accordingly, in one embodiment, the molecule which activity is to be increased in the process of the invention is the gene product with an activity as a “ribulokinase”, preferably it is the molecule of section (a) or (b) of this paragraph.

[74135] In particular, it was observed that in plants, especially in Arabidopsis thaliana, increasing or generating the activity of a gene product non-targeted with the activity of a “ribulokinase”, preferably being encoded by a gene comprising the nucleic acid sequence SEQ ID NO. 134299, preferably the coding region thereof, conferred the production of or the increase in succinate compared with the wild type control.

[74136] The nucleic acid sequence of B0124 from Escherichia coli, e.g. as shown in the respective line in column 5 of Table I, application no. 15, has been published in B. And the activity of the gene product thereof is the activity of glucose dehydrogenase.

[74137] Accordingly, in one embodiment, the process of the present invention for producing citrate in a non-human organism, like a microorganism or a plant or a part thereof, comprises increasing or generating the activity of a gene product with the activity of a gene product conferring the activity of “glucose dehydrogenase”, especially from Escherichia coli or its functional equivalent or its homolog, e.g. the increase of
[74138] (a) a gene product of a gene comprising the nucleic acid molecule as shown in the respective line in column 5 of Table I (whereby the respective line disclose in column 7 the fine chemical citrate), application no. 15, preferably the coding region thereof, or a homolog or a fragment thereof, and being depicted in the same respective line as said B0124, or a functional equivalent or a homolog thereof as shown in column 8 of Table I, application no. 15, preferably the coding region thereof, particularly a homolog or functional equivalent as shown in column 8 of Table I B, application no. 15, and being depicted in the same respective line as said B0124, and preferably the activity is increased non-targeted, or
[74139] (b) a polypeptide comprising a polypeptide, a consensus sequence or at least a polypeptide motif as shown in the respective line in column 5 of Table II or in column 8 of Table IV, application no. 15, respectively, and being depicted in the same respective line as said B0124, or a functional equivalent or a homolog thereof as depicted in column 8 of Table II, application no. 15, preferably a homolog or functional equivalent as depicted in column 8 of Table II B, application no. 15, and being depicted in the same respective line as said B0124, and preferably the activity is increased non-targeted, whereby the respective line disclose in column 7 the fine chemical citrate.

[74140] Accordingly, in one embodiment, the molecule which activity is to be increased in the process of the invention is the gene product with an activity as a “glucose dehydrogenase”, preferably it is the molecule of section (a) or (b) of this paragraph.

[74141] In particular, it was observed that in plants, especially in Arabidopsis thaliana, increasing or generating the activity of a gene product non-targeted with the activity of a “glucose dehydrogenase”, preferably being encoded by a gene comprising the nucleic acid sequence SEQ ID NO. 35482, preferably the coding region thereof, conferred the production of or the increase in citrate compared with the wild type control.

[74142] The nucleic acid sequence of B0221 from Escherichia coli, e.g. as shown in the respective line in column 5 of Table I, application no. 15, has been published in B. And the activity of the gene product thereof is the activity of acyl-CoA dehydrogenase.

[74143] Accordingly, in one embodiment, the process of the present invention for producing fumarate in a non-human organism, like a microorganism or a plant or a part thereof, comprises increasing or generating the activity of a gene product with the activity of a gene product conferring the activity of “acyl-CoA dehydrogenase”, especially from Escherichia coli or its functional equivalent or its homolog, e.g. the increase of
[74144] (a) a gene product of a gene comprising the nucleic acid molecule as shown in the respective line in column 5 of Table I (whereby the respective line disclose in column 7 the fine chemical fumarate), application no. 15, preferably the coding region thereof, or a homolog or a fragment thereof, and being depicted in the same respective line as said B0221, or a functional equivalent or a homolog thereof as shown in column 8 of Table I, application no. 15, preferably the coding region thereof, particularly a homolog or functional equivalent as shown in column 8 of Table I B, application no. 15, and being depicted in the same respective line as said B0221, and preferably the activity is increased non-targeted, or
[74145] (b) a polypeptide comprising a polypeptide, a consensus sequence or at least a polypeptide motif as shown in the respective line in column 5 of Table II or in column 8 of Table IV, application no. 15, respectively, and being depicted in the same respective line as said B0221, or a functional equivalent or a homolog thereof as depicted in column 8 of Table II, application no. 15, preferably a homolog or functional equivalent as depicted in column 8 of Table II B, application no. 15, and being depicted in the same respective line as said B0221, and preferably the activity is increased non-targeted, whereby the respective line disclose in column 7 the fine chemical fumarate.

[74146] Accordingly, in one embodiment, the molecule which activity is to be increased in the process of the invention is the gene product with an activity as a “acyl-CoA dehydrogenase”, preferably it is the molecule of section (a) or (b) of this paragraph.

[74147] In particular, it was observed that in plants, especially in Arabidopsis thaliana, increasing or generating the activity of a gene product non-targeted with the activity of a “acyl-CoA dehydrogenase”, preferably being encoded by a gene comprising the nucleic acid sequence SEQ ID NO. 35590, preferably the coding region thereof, conferred the production of or the increase in fumarate compared with the wild type control.

[74148] The nucleic acid sequence of B0312 from Escherichia coli, e.g. as shown in the respective line in column 5 of Table I, application no. 15, has been published in B. And the activity of the gene product thereof is the activity of betaine aldehyde dehydrogenase.

[74149] Accordingly, in one embodiment, the process of the present invention for producing citrate in a non-human organism, like a microorganism or a plant or a part thereof, comprises increasing or generating the activity of a gene product with the activity of a gene product conferring the activity of “betaine aldehyde dehydrogenase”, especially from Escherichia coli or its functional equivalent or its homolog, e.g. the increase of
[74150] (a) a gene product of a gene comprising the nucleic acid molecule as shown in the respective line in column 5 of Table I (whereby the respective line disclose in column 7 the fine chemical citrate), application no. 15, preferably the coding region thereof, or a homolog or a fragment thereof, and being depicted in the same respective line as said B0312, or a functional equivalent or a homolog thereof as shown in column 8 of Table I, application no. 15, preferably the coding region thereof, particularly a homolog or functional equivalent as shown in column 8 of Table I B, application no. 15, and being depicted in the same respective line as said B0312, and preferably the activity is increased non-targeted, or
[74151] (b) a polypeptide comprising a polypeptide, a consensus sequence or at least a polypeptide motif as shown in the respective line in column 5 of Table II or in column 8 of Table IV, application no. 15, respectively, and being depicted in the same respective line as said B0312, or a functional equivalent or a homolog thereof as depicted in column 8 of Table II, application no. 15, preferably a homolog or functional equivalent as depicted in column 8 of Table II B, application no. 15, and being depicted in the same respective line as said B0312, and preferably the activity is increased non-targeted, whereby the respective line disclose in column 7 the fine chemical citrate.

[74152] Accordingly, in one embodiment, the molecule which activity is to be increased in the process of the invention is the gene product with an activity as a “betaine aldehyde dehydrogenase”, preferably it is the molecule of section (a) or (b) of this paragraph.

[74153] In particular, it was observed that in plants, especially in Arabidopsis thaliana, increasing or generating the activity of a gene product non-targeted with the activity of a “betaine aldehyde dehydrogenase”, preferably being encoded by a gene comprising the nucleic acid sequence SEQ ID NO. 121111, preferably the coding region thereof, conferred the production of or the increase in citrate compared with the wild type control.

[74154] The nucleic acid sequence of B0449 from Escherichia coli, e.g. as shown in the respective line in column 5 of Table I, application no. 15, has been published in B. And the activity of the gene product thereof is the activity of ATP-binding component of a transport system.

[74155] Accordingly, in one embodiment, the process of the present invention for producing malate in a non-human organism, like a microorganism or a plant or a part thereof, comprises increasing or generating the activity of a gene product with the activity of a gene product conferring the activity of “ATP-binding component of a transport system”, especially from Escherichia coli or its functional equivalent or its homolog, e.g. the increase of
[74156] (a) a gene product of a gene comprising the nucleic acid molecule as shown in the respective line in column 5 of Table I (whereby the respective line disclose in column 7 the fine chemical malate), application no. 15, preferably the coding region thereof, or a homolog or a fragment thereof, and being depicted in the same respective line as said B0449, or a functional equivalent or a homolog thereof as shown in column 8 of Table I, application no. 15, preferably the coding region thereof, particularly a homolog or functional equivalent as shown in column 8 of Table I B, application no. 15, and being depicted in the same respective line as said B0449, and preferably the activity is increased non-targeted, or
[74157] (b) a polypeptide comprising a polypeptide, a consensus sequence or at least a polypeptide motif as shown in the respective line in column 5 of Table II or in column 8 of Table IV, application no. 15, respectively, and being depicted in the same respective line as said B0449, or a functional equivalent or a homolog thereof as depicted in column 8 of Table II, application no. 15, preferably a homolog or functional equivalent as depicted in column 8 of Table II B, application no. 15, and being depicted in the same respective line as said B0449, and preferably the activity is increased non-targeted, whereby the respective line disclose in column 7 the fine chemical malate.

[74158] Accordingly, in one embodiment, the molecule which activity is to be increased in the process of the invention is the gene product with an activity as a “ATP-binding component of a transport system”, preferably it is the molecule of section (a) or (b) of this paragraph.

[74159] In particular, it was observed that in plants, especially in Arabidopsis thaliana, increasing or generating the activity of a gene product non-targeted with the activity of a “ATP-binding component of a transport system”, preferably being encoded by a gene comprising the nucleic acid sequence SEQ ID NO. 7333, preferably the coding region thereof, conferred the production of or the increase in malate compared with the wild type control.

[74160] The nucleic acid sequence of B0486 from Escherichia coli, e.g. as shown in the respective line in column 5 of Table I, application no. 15, has been published in B. And the activity of the gene product thereof is the activity of membrane transport protein.

[74161] Accordingly, in one embodiment, the process of the present invention for producing malate in a non-human organism, like a microorganism or a plant or a part thereof, comprises increasing or generating the activity of a gene product with the activity of a gene product conferring the activity of “membrane transport protein”, especially from Escherichia coli or its functional equivalent or its homolog, e.g. the increase of
[74162] (a) a gene product of a gene comprising the nucleic acid molecule as shown in the respective line in column 5 of Table I (whereby the respective line disclose in column 7 the fine chemical malate), application no. 15, preferably the coding region thereof, or a homolog or a fragment thereof, and being depicted in the same respective line as said B0486, or a functional equivalent or a homolog thereof as shown in column 8 of Table I, application no. 15, preferably the coding region thereof, particularly a homolog or functional equivalent as shown in column 8 of Table I B, application no. 15, and being depicted in the same respective line as said B0486, and preferably the activity is increased non-targeted, or
[74163] (b) a polypeptide comprising a polypeptide, a consensus sequence or at least a polypeptide motif as shown in the respective line in column 5 of Table II or in column 8 of Table IV, application no. 15, respectively, and being depicted in the same respective line as said B0486, or a functional equivalent or a homolog thereof as depicted in column 8 of Table II, application no. 15, preferably a homolog or functional equivalent as depicted in column 8 of Table II B, application no. 15, and being depicted in the same respective line as said B0486, and preferably the activity is increased non-targeted, whereby the respective line disclose in column 7 the fine chemical malate.

[74164] Accordingly, in one embodiment, the molecule which activity is to be increased in the process of the invention is the gene product with an activity as a “membrane transport protein”, preferably it is the molecule of section (a) or (b) of this paragraph.

[74165] In particular, it was observed that in plants, especially in Arabidopsis thaliana, increasing or generating the activity of a gene product non-targeted with the activity of a “membrane transport protein”, preferably being encoded by a gene comprising the nucleic acid sequence SEQ ID NO. 7686, preferably the coding region thereof, conferred the production of or the increase in malate compared with the wild type control.

[74166] The nucleic acid sequence of B0486 from Escherichia coli, e.g. as shown in the respective line in column 5 of Table I, application no. 15, has been published in B. And the activity of the gene product thereof is the activity of membrane transport protein.

[74167] Accordingly, in one embodiment, the process of the present invention for producing succinate in a non-human organism, like a microorganism or a plant or a part thereof, comprises increasing or generating the activity of a gene product with the activity of a gene product conferring the activity of “membrane transport protein”, especially from Escherichia coli or its functional equivalent or its homolog, e.g. the increase of
[74168] (a) a gene product of a gene comprising the nucleic acid molecule as shown in the respective line in column 5 of Table I (whereby the respective line disclose in column 7 the fine chemical succinate), application no. 15, preferably the coding region thereof, or a homolog or a fragment thereof, and being depicted in the same respective line as said B0486, or a functional equivalent or a homolog thereof as shown in column 8 of Table I, application no. 15, preferably the coding region thereof, particularly a homolog or functional equivalent as shown in column 8 of Table I B, application no. 15, and being depicted in the same respective line as said B0486, and preferably the activity is increased non-targeted, or
[74169] (b) a polypeptide comprising a polypeptide, a consensus sequence or at least a polypeptide motif as shown in the respective line in column 5 of Table II or in column 8 of Table IV, application no. 15, respectively, and being depicted in the same respective line as said B0486, or a functional equivalent or a homolog thereof as depicted in column 8 of Table II, application no. 15, preferably a homolog or functional equivalent as depicted in column 8 of Table II B, application no. 15, and being depicted in the same respective line as said B0486, and preferably the activity is increased non-targeted, whereby the respective line disclose in column 7 the fine chemical succinate.

[74170] Accordingly, in one embodiment, the molecule which activity is to be increased in the process of the invention is the gene product with an activity as a “membrane transport protein”, preferably it is the molecule of section (a) or (b) of this paragraph.

[74171] In particular, it was observed that in plants, especially in Arabidopsis thaliana, increasing or generating the activity of a gene product non-targeted with the activity of a “membrane transport protein”, preferably being encoded by a gene comprising the nucleic acid sequence SEQ ID NO. 7686, preferably the coding region thereof, conferred the production of or the increase in succinate compared with the wild type control.

[74172] The nucleic acid sequence of B0514 from Escherichia coli, e.g. as shown in the respective line in column 5 of Table I, application no. 15, has been published in B. And the activity of the gene product thereof is the activity of glycerate kinase.

[74173] Accordingly, in one embodiment, the process of the present invention for producing citrate in a non-human organism, like a microorganism or a plant or a part thereof, comprises increasing or generating the activity of a gene product with the activity of a gene product conferring the activity of “glycerate kinase”, especially from Escherichia coli or its functional equivalent or its homolog, e.g. the increase of
[74174] (a) a gene product of a gene comprising the nucleic acid molecule as shown in the respective line in column 5 of Table I (whereby the respective line disclose in column 7 the fine chemical citrate), application no. 15, preferably the coding region thereof, or a homolog or a fragment thereof, and being depicted in the same respective line as said B0514, or a functional equivalent or a homolog thereof as shown in column 8 of Table I, application no. 15, preferably the coding region thereof, particularly a homolog or functional equivalent as shown in column 8 of Table I B, application no. 15, and being depicted in the same respective line as said B0514, and preferably the activity is increased non-targeted, or
[74175] (b) a polypeptide comprising a polypeptide, a consensus sequence or at least a polypeptide motif as shown in the respective line in column 5 of Table II or in column 8 of Table IV, application no. 15, respectively, and being depicted in the same respective line as said B0514, or a functional equivalent or a homolog thereof as depicted in column 8 of Table II, application no. 15, preferably a homolog or functional equivalent as depicted in column 8 of Table II B, application no. 15, and being depicted in the same respective line as said B0514, and preferably the activity is increased non-targeted, whereby the respective line disclose in column 7 the fine chemical citrate.

[74176] Accordingly, in one embodiment, the molecule which activity is to be increased in the process of the invention is the gene product with an activity as a “glycerate kinase”, preferably it is the molecule of section (a) or (b) of this paragraph.

[74177] In particular, it was observed that in plants, especially in Arabidopsis thaliana, increasing or generating the activity of a gene product non-targeted with the activity of a “glycerate kinase”, preferably being encoded by a gene comprising the nucleic acid sequence SEQ ID NO. 134402, preferably the coding region thereof, conferred the production of or the increase in citrate compared with the wild type control.

[74178] The nucleic acid sequence of B0593 from Escherichia coli, e.g. as shown in the respective line in column 5 of Table I, application no. 15, has been published in B. And the activity of the gene product thereof is the activity of isochorismate synthase.

[74179] Accordingly, in one embodiment, the process of the present invention for producing fumarate in a non-human organism, like a microorganism or a plant or a part thereof, comprises increasing or generating the activity of a gene product with the activity of a gene product conferring the activity of “isochorismate synthase”, especially from Escherichia coli or its functional equivalent or its homolog, e.g. the increase of
[74180] (a) a gene product of a gene comprising the nucleic acid molecule as shown in the respective line in column 5 of Table I (whereby the respective line disclose in column 7 the fine chemical fumarate), application no. 15, preferably the coding region thereof, or a homolog or a fragment thereof, and being depicted in the same respective line as said B0593, or a functional equivalent or a homolog thereof as shown in column 8 of Table I, application no. 15, preferably the coding region thereof, particularly a homolog or functional equivalent as shown in column 8 of Table I B, application no. 15, and being depicted in the same respective line as said B0593, and preferably the activity is increased plastidic, or
[74181] (b) a polypeptide comprising a polypeptide, a consensus sequence or at least a polypeptide motif as shown in the respective line in column 5 of Table II or in column 8 of Table IV, application no. 15, respectively, and being depicted in the same respective line as said B0593, or a functional equivalent or a homolog thereof as depicted in column 8 of Table II, application no. 15, preferably a homolog or functional equivalent as depicted in column 8 of Table II B, application no. 15, and being depicted in the same respective line as said B0593, and preferably the activity is increased plastidic, whereby the respective line disclose in column 7 the fine chemical fumarate.

[74182] Accordingly, in one embodiment, the molecule which activity is to be increased in the process of the invention is the gene product with an activity as a “isochorismate synthase”, preferably it is the molecule of section (a) or (b) of this paragraph.

[74183] In particular, it was observed that in plants, especially in Arabidopsis thaliana, increasing or generating the activity of a gene product plastidic with the activity of a “isochorismate synthase”, preferably being encoded by a gene comprising the nucleic acid sequence SEQ ID NO. 35967, preferably the coding region thereof, conferred the production of or the increase in fumarate compared with the wild type control.

[74184] The nucleic acid sequence of B0593 from Escherichia coli, e.g. as shown in the respective line in column 5 of Table I, application no. 15, has been published in B. And the activity of the gene product thereof is the activity of isochorismate synthase.

[74185] Accordingly, in one embodiment, the process of the present invention for producing malate in a non-human organism, like a microorganism or a plant or a part thereof, comprises increasing or generating the activity of a gene product with the activity of a gene product conferring the activity of “isochorismate synthase”, especially from Escherichia coli or its functional equivalent or its homolog, e.g. the increase of
[74186] (a) a gene product of a gene comprising the nucleic acid molecule as shown in the respective line in column 5 of Table I (whereby the respective line disclose in column 7 the fine chemical malate), application no. 15, preferably the coding region thereof, or a homolog or a fragment thereof, and being depicted in the same respective line as said B0593, or a functional equivalent or a homolog thereof as shown in column 8 of Table I, application no. 15, preferably the coding region thereof, particularly a homolog or functional equivalent as shown in column 8 of Table I B, application no. 15, and being depicted in the same respective line as said B0593, and preferably the activity is increased plastidic, or
[74187] (b) a polypeptide comprising a polypeptide, a consensus sequence or at least a polypeptide motif as shown in the respective line in column 5 of Table II or in column 8 of Table IV, application no. 15, respectively, and being depicted in the same respective line as said B0593, or a functional equivalent or a homolog thereof as depicted in column 8 of Table II, application no. 15, preferably a homolog or functional equivalent as depicted in column 8 of Table II B, application no. 15, and being depicted in the same respective line as said B0593, and preferably the activity is increased plastidic, whereby the respective line disclose in column 7 the fine chemical malate.

[74188] Accordingly, in one embodiment, the molecule which activity is to be increased in the process of the invention is the gene product with an activity as a “isochorismate synthase”, preferably it is the molecule of section (a) or (b) of this paragraph.

[74189] In particular, it was observed that in plants, especially in Arabidopsis thaliana, increasing or generating the activity of a gene product plastidic with the activity of a “isochorismate synthase”, preferably being encoded by a gene comprising the nucleic acid sequence SEQ ID NO. 35967, preferably the coding region thereof, conferred the production of or the increase in malate compared with the wild type control.

[74190] The nucleic acid sequence of B0752 from Escherichia coli, e.g. as shown in the respective line in column 5 of Table I, application no. 15, has been published in B. And the activity of the gene product thereof is the activity of zinc transporter.

[74191] Accordingly, in one embodiment, the process of the present invention for producing fumarate in a non-human organism, like a microorganism or a plant or a part thereof, comprises increasing or generating the activity of a gene product with the activity of a gene product conferring the activity of “zinc transporter”, especially from Escherichia coli or its functional equivalent or its homolog, e.g. the increase of
[74192] (a) a gene product of a gene comprising the nucleic acid molecule as shown in the respective line in column 5 of Table I (whereby the respective line disclose in column 7 the fine chemical fumarate), application no. 15, preferably the coding region thereof, or a homolog or a fragment thereof, and being depicted in the same respective line as said B0752, or a functional equivalent or a homolog thereof as shown in column 8 of Table I, application no. 15, preferably the coding region thereof, particularly a homolog or functional equivalent as shown in column 8 of Table I B, application no. 15, and being depicted in the same respective line as said B0752, and preferably the activity is increased non-targeted, or
[74193] (b) a polypeptide comprising a polypeptide, a consensus sequence or at least a polypeptide motif as shown in the respective line in column 5 of Table II or in column 8 of Table IV, application no. 15, respectively, and being depicted in the same respective line as said B0752, or a functional equivalent or a homolog thereof as depicted in column 8 of Table II, application no. 15, preferably a homolog or functional equivalent as depicted in column 8 of Table II B, application no. 15, and being depicted in the same respective line as said B0752, and preferably the activity is increased non-targeted, whereby the respective line disclose in column 7 the fine chemical fumarate.

[74194] Accordingly, in one embodiment, the molecule which activity is to be increased in the process of the invention is the gene product with an activity as a “zinc transporter”, preferably it is the molecule of section (a) or (b) of this paragraph.

[74195] In particular, it was observed that in plants, especially in Arabidopsis thaliana, increasing or generating the activity of a gene product non-targeted with the activity of a “zinc transporter”, preferably being encoded by a gene comprising the nucleic acid sequence SEQ ID NO. 36114, preferably the coding region thereof, conferred the production of or the increase in fumarate compared with the wild type control.

[74196] The nucleic acid sequence of B0801 from Escherichia coli, e.g. as shown in the respective line in column 5 of Table I, application no. 15, has been published in B. And the activity of the gene product thereof is the activity of b0801-protein.

[74197] Accordingly, in one embodiment, the process of the present invention for producing succinate in a non-human organism, like a microorganism or a plant or a part thereof, comprises increasing or generating the activity of a gene product with the activity of a gene product conferring the activity of “b0801-protein”, especially from Escherichia coli or its functional equivalent or its homolog, e.g. the increase of
[74198] (a) a gene product of a gene comprising the nucleic acid molecule as shown in the respective line in column 5 of Table I (whereby the respective line disclose in column 7 the fine chemical succinate), application no. 15, preferably the coding region thereof, or a homolog or a fragment thereof, and being depicted in the same respective line as said B0801, or a functional equivalent or a homolog thereof as shown in column 8 of Table I, application no. 15, preferably the coding region thereof, particularly a homolog or functional equivalent as shown in column 8 of Table I B, application no. 15, and being depicted in the same respective line as said B0801, and preferably the activity is increased non-targeted, or
[74199] (b) a polypeptide comprising a polypeptide, a consensus sequence or at least a polypeptide motif as shown in the respective line in column 5 of Table II or in column 8 of Table IV, application no. 15, respectively, and being depicted in the same respective line as said B0801, or a functional equivalent or a homolog thereof as depicted in column 8 of Table II, application no. 15, preferably a homolog or functional equivalent as depicted in column 8 of Table II B, application no. 15, and being depicted in the same respective line as said B0801, and preferably the activity is increased non-targeted, whereby the respective line disclose in column 7 the fine chemical succinate.

[74200] Accordingly, in one embodiment, the molecule which activity is to be increased in the process of the invention is the gene product with an activity as a “b0801-protein”, preferably it is the molecule of section (a) or (b) of this paragraph.

[74201] In particular, it was observed that in plants, especially in Arabidopsis thaliana, increasing or generating the activity of a gene product non-targeted with the activity of a “b0801-protein”, preferably being encoded by a gene comprising the nucleic acid sequence SEQ ID NO. 75807, preferably the coding region thereof, conferred the production of or the increase in succinate compared with the wild type control.

[74202] The nucleic acid sequence of B0885 from Escherichia coli, e.g. as shown in the respective line in column 5 of Table I, application no. 15, has been published in B. And the activity of the gene product thereof is the activity of leucyl/phenylalanyl-tRNA-protein transferase.

[74203] Accordingly, in one embodiment, the process of the present invention for producing malate in a non-human organism, like a microorganism or a plant or a part thereof, comprises increasing or generating the activity of a gene product with the activity of a gene product conferring the activity of “leucyl/phenylalanyl-tRNA-protein transferase”, especially from Escherichia coli or its functional equivalent or its homolog, e.g. the increase of
[74204] (a) a gene product of a gene comprising the nucleic acid molecule as shown in the respective line in column 5 of Table I (whereby the respective line disclose in column 7 the fine chemical malate), application no. 15, preferably the coding region thereof, or a homolog or a fragment thereof, and being depicted in the same respective line as said B0885, or a functional equivalent or a homolog thereof as shown in column 8 of Table I, application no. 15, preferably the coding region thereof, particularly a homolog or functional equivalent as shown in column 8 of Table I B, application no. 15, and being depicted in the same respective line as said B0885, and preferably the activity is increased non-targeted, or
[74205] (b) a polypeptide comprising a polypeptide, a consensus sequence or at least a polypeptide motif as shown in the respective line in column 5 of Table II or in column 8 of Table IV, application no. 15, respectively, and being depicted in the same respective line as said B0885, or a functional equivalent or a homolog thereof as depicted in column 8 of Table II, application no. 15, preferably a homolog or functional equivalent as depicted in column 8 of Table II B, application no. 15, and being depicted in the same respective line as said B0885, and preferably the activity is increased non-targeted, whereby the respective line disclose in column 7 the fine chemical malate.

[74206] Accordingly, in one embodiment, the molecule which activity is to be increased in the process of the invention is the gene product with an activity as a “leucyl/phenylalanyl-tRNA-protein transferase”, preferably it is the molecule of section (a) or (b) of this paragraph.

[74207] In particular, it was observed that in plants, especially in Arabidopsis thaliana, increasing or generating the activity of a gene product non-targeted with the activity of a “leucyl/phenylalanyl-tRNA-protein transferase”, preferably being encoded by a gene comprising the nucleic acid sequence SEQ ID NO. 36489, preferably the coding region thereof, conferred the production of or the increase in malate compared with the wild type control.

[74208] The nucleic acid sequence of B0963 from Escherichia coli, e.g. as shown in the respective line in column 5 of Table I, application no. 15, has been published in B. And the activity of the gene product thereof is the activity of methylglyoxal synthase.

[74209] Accordingly, in one embodiment, the process of the present invention for producing vitamin c and/or threonic acid in a non-human organism, like a microorganism or a plant or a part thereof, comprises increasing or generating the activity of a gene product with the activity of a gene product conferring the activity of “methylglyoxal synthase”, especially from Escherichia coli or its functional equivalent or its homolog, e.g. the increase of
[74210] (a) a gene product of a gene comprising the nucleic acid molecule as shown in the respective line in column 5 of Table I (whereby the respective line disclose in column 7 the fine chemical vitamin c and/or threonic acid), application no. 15, preferably the coding region thereof, or a homolog or a fragment thereof, and being depicted in the same respective line as said B0963, or a functional equivalent or a homolog thereof as shown in column 8 of Table I, application no. 15, preferably the coding region thereof, particularly a homolog or functional equivalent as shown in column 8 of Table I B, application no. 15, and being depicted in the same respective line as said B0963, and preferably the activity is increased non-targeted, or
[74211] (b) a polypeptide comprising a polypeptide, a consensus sequence or at least a polypeptide motif as shown in the respective line in column 5 of Table II or in column 8 of Table IV, application no. 15, respectively, and being depicted in the same respective line as said B0963, or a functional equivalent or a homolog thereof as depicted in column 8 of Table II, application no. 15, preferably a homolog or functional equivalent as depicted in column 8 of Table II B, application no. 15, and being depicted in the same respective line as said B0963, and preferably the activity is increased non-targeted, whereby the respective line disclose in column 7 the fine chemical vitamin c and/or threonic acid.

[74212] Accordingly, in one embodiment, the molecule which activity is to be increased in the process of the invention is the gene product with an activity as a “methylglyoxal synthase”, preferably it is the molecule of section (a) or (b) of this paragraph.

[74213] In particular, it was observed that in plants, especially in Arabidopsis thaliana, increasing or generating the activity of a gene product non-targeted with the activity of a “methylglyoxal synthase”, preferably being encoded by a gene comprising the nucleic acid sequence SEQ ID NO. 36670, preferably the coding region thereof, conferred the production of or the increase in vitamin c and/or threonic acid compared with the wild type control.

[74214] The nucleic acid sequence of B1003 from Escherichia coli, e.g. as shown in the respective line in column 5 of Table I, application no. 15, has been published in B. And the activity of the gene product thereof is the activity of b1003-protein.

[74215] Accordingly, in one embodiment, the process of the present invention for producing malate in a non-human organism, like a microorganism or a plant or a part thereof, comprises increasing or generating the activity of a gene product with the activity of a gene product conferring the activity of “b1003-protein”, especially from Escherichia coli or its functional equivalent or its homolog, e.g. the increase of
[74216] (a) a gene product of a gene comprising the nucleic acid molecule as shown in the respective line in column 5 of Table I (whereby the respective line disclose in column 7 the fine chemical malate), application no. 15, preferably the coding region thereof, or a homolog or a fragment thereof, and being depicted in the same respective line as said B1003, or a functional equivalent or a homolog thereof as shown in column 8 of Table I, application no. 15, preferably the coding region thereof, particularly a homolog or functional equivalent as shown in column 8 of Table I B, application no. 15, and being depicted in the same respective line as said B1003, and preferably the activity is increased non-targeted, or
[74217] (b) a polypeptide comprising a polypeptide, a consensus sequence or at least a polypeptide motif as shown in the respective line in column 5 of Table II or in column 8 of Table IV, application no. 15, respectively, and being depicted in the same respective line as said B1003, or a functional equivalent or a homolog thereof as depicted in column 8 of Table II, application no. 15, preferably a homolog or functional equivalent as depicted in column 8 of Table II B, application no. 15, and being depicted in the same respective line as said B1003, and preferably the activity is increased non-targeted, whereby the respective line disclose in column 7 the fine chemical malate.

[74218] Accordingly, in one embodiment, the molecule which activity is to be increased in the process of the invention is the gene product with an activity as a “b1003-protein”, preferably it is the molecule of section (a) or (b) of this paragraph.

[74219] In particular, it was observed that in plants, especially in Arabidopsis thaliana, increasing or generating the activity of a gene product non-targeted with the activity of a “b1003-protein”, preferably being encoded by a gene comprising the nucleic acid sequence SEQ ID NO. 7941, preferably the coding region thereof, conferred the production of or the increase in malate compared with the wild type control.

[74220] The nucleic acid sequence of B1255 from Escherichia coli, e.g. as shown in the respective line in column 5 of Table I, application no. 15, has been published in B. And the activity of the gene product thereof is the activity of membrane protein.

[74221] Accordingly, in one embodiment, the process of the present invention for producing malate in a non-human organism, like a microorganism or a plant or a part thereof, comprises increasing or generating the activity of a gene product with the activity of a gene product conferring the activity of “membrane protein”, especially from Escherichia coli or its functional equivalent or its homolog, e.g. the increase of
[74222] (a) a gene product of a gene comprising the nucleic acid molecule as shown in the respective line in column 5 of Table I (whereby the respective line disclose in column 7 the fine chemical malate), application no. 15, preferably the coding region thereof, or a homolog or a fragment thereof, and being depicted in the same respective line as said B1255, or a functional equivalent or a homolog thereof as shown in column 8 of Table I, application no. 15, preferably the coding region thereof, particularly a homolog or functional equivalent as shown in column 8 of Table I B, application no. 15, and being depicted in the same respective line as said B1255, and preferably the activity is increased non-targeted, or
[74223] (b) a polypeptide comprising a polypeptide, a consensus sequence or at least a polypeptide motif as shown in the respective line in column 5 of Table II or in column 8 of Table IV, application no. 15, respectively, and being depicted in the same respective line as said B1255, or a functional equivalent or a homolog thereof as depicted in column 8 of Table II, application no. 15, preferably a homolog or functional equivalent as depicted in column 8 of Table II B, application no. 15, and being depicted in the same respective line as said B1255, and preferably the activity is increased non-targeted, whereby the respective line disclose in column 7 the fine chemical malate.

[74224] Accordingly, in one embodiment, the molecule which activity is to be increased in the process of the invention is the gene product with an activity as a “membrane protein”, preferably it is the molecule of section (a) or (b) of this paragraph.

[74225] In particular, it was observed that in plants, especially in Arabidopsis thaliana, increasing or generating the activity of a gene product non-targeted with the activity of a “membrane protein”, preferably being encoded by a gene comprising the nucleic acid sequence SEQ ID NO. 37483, preferably the coding region thereof, conferred the production of or the increase in malate compared with the wild type control.

[74226] The nucleic acid sequence of B1285 from Escherichia coli, e.g. as shown in the respective line in column 5 of Table I, application no. 15, has been published in B. And the activity of the gene product thereof is the activity of b1285-protein.

[74227] Accordingly, in one embodiment, the process of the present invention for producing succinate in a non-human organism, like a microorganism or a plant or a part thereof, comprises increasing or generating the activity of a gene product with the activity of a gene product conferring the activity of “b1285-protein”, especially from Escherichia coli or its functional equivalent or its homolog, e.g. the increase of
[74228] (a) a gene product of a gene comprising the nucleic acid molecule as shown in the respective line in column 5 of Table I (whereby the respective line disclose in column 7 the fine chemical succinate), application no. 15, preferably the coding region thereof, or a homolog or a fragment thereof, and being depicted in the same respective line as said B1285, or a functional equivalent or a homolog thereof as shown in column 8 of Table I, application no. 15, preferably the coding region thereof, particularly a homolog or functional equivalent as shown in column 8 of Table I B, application no. 15, and being depicted in the same respective line as said B1285, and preferably the activity is increased non-targeted, or
[74229] (b) a polypeptide comprising a polypeptide, a consensus sequence or at least a polypeptide motif as shown in the respective line in column 5 of Table II or in column 8 of Table IV, application no. 15, respectively, and being depicted in the same respective line as said B1285, or a functional equivalent or a homolog thereof as depicted in column 8 of Table II, application no. 15, preferably a homolog or functional equivalent as depicted in column 8 of Table II B, application no. 15, and being depicted in the same respective line as said B1285, and preferably the activity is increased non-targeted, whereby the respective line disclose in column 7 the fine chemical succinate.

[74230] Accordingly, in one embodiment, the molecule which activity is to be increased in the process of the invention is the gene product with an activity as a “b1285-protein”, preferably it is the molecule of section (a) or (b) of this paragraph.

[74231] In particular, it was observed that in plants, especially in Arabidopsis thaliana, increasing or generating the activity of a gene product non-targeted with the activity of a “b1285-protein”, preferably being encoded by a gene comprising the nucleic acid sequence SEQ ID NO. 134655, preferably the coding region thereof, conferred the production of or the increase in succinate compared with the wild type control.

[74232] The nucleic acid sequence of B1390 from Escherichia coli, e.g. as shown in the respective line in column 5 of Table I, application no. 15, has been published in B. And the activity of the gene product thereof is the activity of phenylacetic acid degradation protein.

[74233] Accordingly, in one embodiment, the process of the present invention for producing malate in a non-human organism, like a microorganism or a plant or a part thereof, comprises increasing or generating the activity of a gene product with the activity of a gene product conferring the activity of “phenylacetic acid degradation protein”, especially from Escherichia coli or its functional equivalent or its homolog, e.g. the increase of
[74234] (a) a gene product of a gene comprising the nucleic acid molecule as shown in the respective line in column 5 of Table I (whereby the respective line disclose in column 7 the fine chemical malate), application no. 15, preferably the coding region thereof, or a homolog or a fragment thereof, and being depicted in the same respective line as said B1390, or a functional equivalent or a homolog thereof as shown in column 8 of Table I, application no. 15, preferably the coding region thereof, particularly a homolog or functional equivalent as shown in column 8 of Table I B, application no. 15, and being depicted in the same respective line as said B1390, and preferably the activity is increased non-targeted, or
[74235] (b) a polypeptide comprising a polypeptide, a consensus sequence or at least a polypeptide motif as shown in the respective line in column 5 of Table II or in column 8 of Table IV, application no. 15, respectively, and being depicted in the same respective line as said B1390, or a functional equivalent or a homolog thereof as depicted in column 8 of Table II, application no. 15, preferably a homolog or functional equivalent as depicted in column 8 of Table II B, application no. 15, and being depicted in the same respective line as said B1390, and preferably the activity is increased non-targeted, whereby the respective line disclose in column 7 the fine chemical malate.

[74236] Accordingly, in one embodiment, the molecule which activity is to be increased in the process of the invention is the gene product with an activity as a “phenylacetic acid degradation protein”, preferably it is the molecule of section (a) or (b) of this paragraph.

[74237] In particular, it was observed that in plants, especially in Arabidopsis thaliana, increasing or generating the activity of a gene product non-targeted with the activity of a “phenylacetic acid degradation protein”, preferably being encoded by a gene comprising the nucleic acid sequence SEQ ID NO. 134697, preferably the coding region thereof, conferred the production of or the increase in malate compared with the wild type control.

[74238] The nucleic acid sequence of B1425 from Escherichia coli, e.g. as shown in the respective line in column 5 of Table I, application no. 15, has been published in B. And the activity of the gene product thereof is the activity of b1425-protein.

[74239] Accordingly, in one embodiment, the process of the present invention for producing malate in a non-human organism, like a microorganism or a plant or a part thereof, comprises increasing or generating the activity of a gene product with the activity of a gene product conferring the activity of “b1425-protein”, especially from Escherichia coli or its functional equivalent or its homolog, e.g. the increase of
[74240] (a) a gene product of a gene comprising the nucleic acid molecule as shown in the respective line in column 5 of Table I (whereby the respective line disclose in column 7 the fine chemical malate), application no. 15, preferably the coding region thereof, or a homolog or a fragment thereof, and being depicted in the same respective line as said B1425, or a functional equivalent or a homolog thereof as shown in column 8 of Table I, application no. 15, preferably the coding region thereof, particularly a homolog or functional equivalent as shown in column 8 of Table I B, application no. 15, and being depicted in the same respective line as said B1425, and preferably the activity is increased non-targeted, or
[74241] (b) a polypeptide comprising a polypeptide, a consensus sequence or at least a polypeptide motif as shown in the respective line in column 5 of Table II or in column 8 of Table IV, application no. 15, respectively, and being depicted in the same respective line as said B1425, or a functional equivalent or a homolog thereof as depicted in column 8 of Table II, application no. 15, preferably a homolog or functional equivalent as depicted in column 8 of Table II B, application no. 15, and being depicted in the same respective line as said B1425, and preferably the activity is increased non-targeted, whereby the respective line disclose in column 7 the fine chemical malate.

[74242] Accordingly, in one embodiment, the molecule which activity is to be increased in the process of the invention is the gene product with an activity as a “b1425-protein”, preferably it is the molecule of section (a) or (b) of this paragraph.

[74243] In particular, it was observed that in plants, especially in Arabidopsis thaliana, increasing or generating the activity of a gene product non-targeted with the activity of a “b1425-protein”, preferably being encoded by a gene comprising the nucleic acid sequence SEQ ID NO. 134756, preferably the coding region thereof, conferred the production of or the increase in malate compared with the wild type control.

[74244] The nucleic acid sequence of B1431 from Escherichia coli, e.g. as shown in the respective line in column 5 of Table I, application no. 15, has been published in B. And the activity of the gene product thereof is the activity of lipoprotein precursor.

[74245] Accordingly, in one embodiment, the process of the present invention for producing succinate in a non-human organism, like a microorganism or a plant or a part thereof, comprises increasing or generating the activity of a gene product with the activity of a gene product conferring the activity of “lipoprotein precursor”, especially from Escherichia coli or its functional equivalent or its homolog, e.g. the increase of
[74246] (a) a gene product of a gene comprising the nucleic acid molecule as shown in the respective line in column 5 of Table I (whereby the respective line disclose in column 7 the fine chemical succinate), application no. 15, preferably the coding region thereof, or a homolog or a fragment thereof, and being depicted in the same respective line as said B1431, or a functional equivalent or a homolog thereof as shown in column 8 of Table I, application no. 15, preferably the coding region thereof, particularly a homolog or functional equivalent as shown in column 8 of Table I B, application no. 15, and being depicted in the same respective line as said B1431, and preferably the activity is increased plastidic, or
[74247] (b) a polypeptide comprising a polypeptide, a consensus sequence or at least a polypeptide motif as shown in the respective line in column 5 of Table II or in column 8 of Table IV, application no. 15, respectively, and being depicted in the same respective line as said B1431, or a functional equivalent or a homolog thereof as depicted in column 8 of Table II, application no. 15, preferably a homolog or functional equivalent as depicted in column 8 of Table II B, application no. 15, and being depicted in the same respective line as said B1431, and preferably the activity is increased plastidic, whereby the respective line disclose in column 7 the fine chemical succinate.

[74248] Accordingly, in one embodiment, the molecule which activity is to be increased in the process of the invention is the gene product with an activity as a “lipoprotein precursor”, preferably it is the molecule of section (a) or (b) of this paragraph.

[74249] In particular, it was observed that in plants, especially in Arabidopsis thaliana, increasing or generating the activity of a gene product plastidic with the activity of a “lipoprotein precursor”, preferably being encoded by a gene comprising the nucleic acid sequence SEQ ID NO. 38266, preferably the coding region thereof, conferred the production of or the increase in succinate compared with the wild type control.

[74250] The nucleic acid sequence of B1445 from Escherichia coli, e.g. as shown in the respective line in column 5 of Table I, application no. 15, has been published in B. And the activity of the gene product thereof is the activity of b1445-protein.

[74251] Accordingly, in one embodiment, the process of the present invention for producing citramalate in a non-human organism, like a microorganism or a plant or a part thereof, comprises increasing or generating the activity of a gene product with the activity of a gene product conferring the activity of “b1445-protein”, especially from Escherichia coli or its functional equivalent or its homolog, e.g. the increase of
[74252] (a) a gene product of a gene comprising the nucleic acid molecule as shown in the respective line in column 5 of Table I (whereby the respective line disclose in column 7 the fine chemical citramalate), application no. 15, preferably the coding region thereof, or a homolog or a fragment thereof, and being depicted in the same respective line as said B1445, or a functional equivalent or a homolog thereof as shown in column 8 of Table I, application no. 15, preferably the coding region thereof, particularly a homolog or functional equivalent as shown in column 8 of Table I B, application no. 15, and being depicted in the same respective line as said B1445, and preferably the activity is increased non-targeted, or
[74253] (b) a polypeptide comprising a polypeptide, a consensus sequence or at least a polypeptide motif as shown in the respective line in column 5 of Table II or in column 8 of Table IV, application no. 15, respectively, and being depicted in the same respective line as said B1445, or a functional equivalent or a homolog thereof as depicted in column 8 of Table II, application no. 15, preferably a homolog or functional equivalent as depicted in column 8 of Table II B, application no. 15, and being depicted in the same respective line as said B1445, and preferably the activity is increased non-targeted, whereby the respective line disclose in column 7 the fine chemical citramalate.

[74254] Accordingly, in one embodiment, the molecule which activity is to be increased in the process of the invention is the gene product with an activity as a “b1445-protein”, preferably it is the molecule of section (a) or (b) of this paragraph.

[74255] In particular, it was observed that in plants, especially in Arabidopsis thaliana, increasing or generating the activity of a gene product non-targeted with the activity of a “b1445-protein”, preferably being encoded by a gene comprising the nucleic acid sequence SEQ ID NO. 38289, preferably the coding region thereof, conferred the production of or the increase in citramalate compared with the wild type control.

[74256] The nucleic acid sequence of B1522 from Escherichia coli, e.g. as shown in the respective line in column 5 of Table I, application no. 15, has been published in B. And the activity of the gene product thereof is the activity of b1522-protein.

[74257] Accordingly, in one embodiment, the process of the present invention for producing citramalate in a non-human organism, like a microorganism or a plant or a part thereof, comprises increasing or generating the activity of a gene product with the activity of a gene product conferring the activity of “b1522-protein”, especially from Escherichia coli or its functional equivalent or its homolog, e.g. the increase of
[74258] (a) a gene product of a gene comprising the nucleic acid molecule as shown in the respective line in column 5 of Table I (whereby the respective line disclose in column 7 the fine chemical citramalate), application no. 15, preferably the coding region thereof, or a homolog or a fragment thereof, and being depicted in the same respective line as said B1522, or a functional equivalent or a homolog thereof as shown in column 8 of Table I, application no. 15, preferably the coding region thereof, particularly a homolog or functional equivalent as shown in column 8 of Table I B, application no. 15, and being depicted in the same respective line as said B1522, and preferably the activity is increased non-targeted, or
[74259] (b) a polypeptide comprising a polypeptide, a consensus sequence or at least a polypeptide motif as shown in the respective line in column 5 of Table II or in column 8 of Table IV, application no. 15, respectively, and being depicted in the same respective line as said B1522, or a functional equivalent or a homolog thereof as depicted in column 8 of Table II, application no. 15, preferably a homolog or functional equivalent as depicted in column 8 of Table II B, application no. 15, and being depicted in the same respective line as said B1522, and preferably the activity is increased non-targeted, whereby the respective line disclose in column 7 the fine chemical citramalate.

[74260] Accordingly, in one embodiment, the molecule which activity is to be increased in the process of the invention is the gene product with an activity as a “b1522-protein”, preferably it is the molecule of section (a) or (b) of this paragraph.

[74261] In particular, it was observed that in plants, especially in Arabidopsis thaliana, increasing or generating the activity of a gene product non-targeted with the activity of a “b1522-protein”, preferably being encoded by a gene comprising the nucleic acid sequence SEQ ID NO. 7947, preferably the coding region thereof, conferred the production of or the increase in citramalate compared with the wild type control.

[74262] The nucleic acid sequence of B1522 from Escherichia coli, e.g. as shown in the respective line in column 5 of Table I, application no. 15, has been published in B. And the activity of the gene product thereof is the activity of b1522-protein.

[74263] Accordingly, in one embodiment, the process of the present invention for producing malate in a non-human organism, like a microorganism or a plant or a part thereof, comprises increasing or generating the activity of a gene product with the activity of a gene product conferring the activity of “b1522-protein”, especially from Escherichia coli or its functional equivalent or its homolog, e.g. the increase of
[74264] (a) a gene product of a gene comprising the nucleic acid molecule as shown in the respective line in column 5 of Table I (whereby the respective line disclose in column 7 the fine chemical malate), application no. 15, preferably the coding region thereof, or a homolog or a fragment thereof, and being depicted in the same respective line as said B1522, or a functional equivalent or a homolog thereof as shown in column 8 of Table I, application no. 15, preferably the coding region thereof, particularly a homolog or functional equivalent as shown in column 8 of Table I B, application no. 15, and being depicted in the same respective line as said B1522, and preferably the activity is increased non-targeted, or
[74265] (b) a polypeptide comprising a polypeptide, a consensus sequence or at least a polypeptide motif as shown in the respective line in column 5 of Table II or in column 8 of Table IV, application no. 15, respectively, and being depicted in the same respective line as said B1522, or a functional equivalent or a homolog thereof as depicted in column 8 of Table II, application no. 15, preferably a homolog or functional equivalent as depicted in column 8 of Table II B, application no. 15, and being depicted in the same respective line as said B1522, and preferably the activity is increased non-targeted, whereby the respective line disclose in column 7 the fine chemical malate.

[74266] Accordingly, in one embodiment, the molecule which activity is to be increased in the process of the invention is the gene product with an activity as a “b1522-protein”, preferably it is the molecule of section (a) or (b) of this paragraph.

[74267] In particular, it was observed that in plants, especially in Arabidopsis thaliana, increasing or generating the activity of a gene product non-targeted with the activity of a “b1522-protein”, preferably being encoded by a gene comprising the nucleic acid sequence SEQ ID NO. 7947, preferably the coding region thereof, conferred the production of or the increase in malate compared with the wild type control.

[74268] The nucleic acid sequence of B1589 from Escherichia coli, e.g. as shown in the respective line in column 5 of Table I, application no. 15, has been published in B. And the activity of the gene product thereof is the activity of Fe—S subunit of oxidoreductase.

[74269] Accordingly, in one embodiment, the process of the present invention for producing fumarate in a non-human organism, like a microorganism or a plant or a part thereof, comprises increasing or generating the activity of a gene product with the activity of a gene product conferring the activity of “Fe—S subunit of oxidoreductase”, especially from Escherichia coli or its functional equivalent or its homolog, e.g. the increase of
[74270] (a) a gene product of a gene comprising the nucleic acid molecule as shown in the respective line in column 5 of Table I (whereby the respective line disclose in column 7 the fine chemical fumarate), application no. 15, preferably the coding region thereof, or a homolog or a fragment thereof, and being depicted in the same respective line as said B1589, or a functional equivalent or a homolog thereof as shown in column 8 of Table I, application no. 15, preferably the coding region thereof, particularly a homolog or functional equivalent as shown in column 8 of Table I B, application no. 15, and being depicted in the same respective line as said B1589, and preferably the activity is increased non-targeted, or
[74271] (b) a polypeptide comprising a polypeptide, a consensus sequence or at least a polypeptide motif as shown in the respective line in column 5 of Table II or in column 8 of Table IV, application no. 15, respectively, and being depicted in the same respective line as said B1589, or a functional equivalent or a homolog thereof as depicted in column 8 of Table II, application no. 15, preferably a homolog or functional equivalent as depicted in column 8 of Table II B, application no. 15, and being depicted in the same respective line as said B1589, and preferably the activity is increased non-targeted, whereby the respective line disclose in column 7 the fine chemical fumarate.

[74272] Accordingly, in one embodiment, the molecule which activity is to be increased in the process of the invention is the gene product with an activity as a “Fe—S subunit of oxidoreductase”, preferably it is the molecule of section (a) or (b) of this paragraph.

[74273] In particular, it was observed that in plants, especially in Arabidopsis thaliana, increasing or generating the activity of a gene product non-targeted with the activity of a “Fe—S subunit of oxidoreductase”, preferably being encoded by a gene comprising the nucleic acid sequence SEQ ID NO. 78154, preferably the coding region thereof, conferred the production of or the increase in fumarate compared with the wild type control.

[74274] The nucleic acid sequence of B1611 from Escherichia coli, e.g. as shown in the respective line in column 5 of Table I, application no. 15, has been published in B. And the activity of the gene product thereof is the activity of fumarate hydratase.

[74275] Accordingly, in one embodiment, the process of the present invention for producing fumarate in a non-human organism, like a microorganism or a plant or a part thereof, comprises increasing or generating the activity of a gene product with the activity of a gene product conferring the activity of “fumarate hydratase”, especially from Escherichia coli or its functional equivalent or its homolog, e.g. the increase of
[74276] (a) a gene product of a gene comprising the nucleic acid molecule as shown in the respective line in column 5 of Table I (whereby the respective line disclose in column 7 the fine chemical fumarate), application no. 15, preferably the coding region thereof, or a homolog or a fragment thereof, and being depicted in the same respective line as said B1611, or a functional equivalent or a homolog thereof as shown in column 8 of Table I, application no. 15, preferably the coding region thereof, particularly a homolog or functional equivalent as shown in column 8 of Table I B, application no. 15, and being depicted in the same respective line as said B1611, and preferably the activity is increased plastidic, or
[74277] (b) a polypeptide comprising a polypeptide, a consensus sequence or at least a polypeptide motif as shown in the respective line in column 5 of Table II or in column 8 of Table IV, application no. 15, respectively, and being depicted in the same respective line as said B1611, or a functional equivalent or a homolog thereof as depicted in column 8 of Table II, application no. 15, preferably a homolog or functional equivalent as depicted in column 8 of Table II B, application no. 15, and being depicted in the same respective line as said B1611, and preferably the activity is increased plastidic, whereby the respective line disclose in column 7 the fine chemical fumarate.

[74278] Accordingly, in one embodiment, the molecule which activity is to be increased in the process of the invention is the gene product with an activity as a “fumarate hydratase”, preferably it is the molecule of section (a) or (b) of this paragraph.

[74279] In particular, it was observed that in plants, especially in Arabidopsis thaliana, increasing or generating the activity of a gene product plastidic with the activity of a “fumarate hydratase”, preferably being encoded by a gene comprising the nucleic acid sequence SEQ ID NO. 115064, preferably the coding region thereof, conferred the production of or the increase in fumarate compared with the wild type control.

[74280] The nucleic acid sequence of B1627 from Escherichia coli, e.g. as shown in the respective line in column 5 of Table I, application no. 15, has been published in B. And the activity of the gene product thereof is the activity of electron transport complex protein.

[74281] Accordingly, in one embodiment, the process of the present invention for producing succinate in a non-human organism, like a microorganism or a plant or a part thereof, comprises increasing or generating the activity of a gene product with the activity of a gene product conferring the activity of “electron transport complex protein”, especially from Escherichia coli or its functional equivalent or its homolog, e.g. the increase of
[74282] (a) a gene product of a gene comprising the nucleic acid molecule as shown in the respective line in column 5 of Table I (whereby the respective line disclose in column 7 the fine chemical succinate), application no. 15, preferably the coding region thereof, or a homolog or a fragment thereof, and being depicted in the same respective line as said B1627, or a functional equivalent or a homolog thereof as shown in column 8 of Table I, application no. 15, preferably the coding region thereof, particularly a homolog or functional equivalent as shown in column 8 of Table I B, application no. 15, and being depicted in the same respective line as said B1627, and preferably the activity is increased non-targeted, or
[74283] (b) a polypeptide comprising a polypeptide, a consensus sequence or at least a polypeptide motif as shown in the respective line in column 5 of Table II or in column 8 of Table IV, application no. 15, respectively, and being depicted in the same respective line as said B1627, or a functional equivalent or a homolog thereof as depicted in column 8 of Table II, application no. 15, preferably a homolog or functional equivalent as depicted in column 8 of Table II B, application no. 15, and being depicted in the same respective line as said B1627, and preferably the activity is increased non-targeted, whereby the respective line disclose in column 7 the fine chemical succinate.

[74284] Accordingly, in one embodiment, the molecule which activity is to be increased in the process of the invention is the gene product with an activity as a “electron transport complex protein”, preferably it is the molecule of section (a) or (b) of this paragraph.

[74285] In particular, it was observed that in plants, especially in Arabidopsis thaliana, increasing or generating the activity of a gene product non-targeted with the activity of a “electron transport complex protein”, preferably being encoded by a gene comprising the nucleic acid sequence SEQ ID NO. 38345, preferably the coding region thereof, conferred the production of or the increase in succinate compared with the wild type control.

[74286] The nucleic acid sequence of B1651 from Escherichia coli, e.g. as shown in the respective line in column 5 of Table I, application no. 15, has been published in B. And the activity of the gene product thereof is the activity of methylglyoxalase.

[74287] Accordingly, in one embodiment, the process of the present invention for producing succinate in a non-human organism, like a microorganism or a plant or a part thereof, comprises increasing or generating the activity of a gene product with the activity of a gene product conferring the activity of “methylglyoxalase”, especially from Escherichia coli or its functional equivalent or its homolog, e.g. the increase of
[74288] (a) a gene product of a gene comprising the nucleic acid molecule as shown in the respective line in column 5 of Table I (whereby the respective line disclose in column 7 the fine chemical succinate), application no. 15, preferably the coding region thereof, or a homolog or a fragment thereof, and being depicted in the same respective line as said B1651, or a functional equivalent or a homolog thereof as shown in column 8 of Table I, application no. 15, preferably the coding region thereof, particularly a homolog or functional equivalent as shown in column 8 of Table I B, application no. 15, and being depicted in the same respective line as said B1651, and preferably the activity is increased non-targeted, or
[74289] (b) a polypeptide comprising a polypeptide, a consensus sequence or at least a polypeptide motif as shown in the respective line in column 5 of Table II or in column 8 of Table IV, application no. 15, respectively, and being depicted in the same respective line as said B1651, or a functional equivalent or a homolog thereof as depicted in column 8 of Table II, application no. 15, preferably a homolog or functional equivalent as depicted in column 8 of Table II B, application no. 15, and being depicted in the same respective line as said B1651, and preferably the activity is increased non-targeted, whereby the respective line disclose in column 7 the fine chemical succinate.

[74290] Accordingly, in one embodiment, the molecule which activity is to be increased in the process of the invention is the gene product with an activity as a “methylglyoxalase”, preferably it is the molecule of section (a) or (b) of this paragraph.

[74291] In particular, it was observed that in plants, especially in Arabidopsis thaliana, increasing or generating the activity of a gene product non-targeted with the activity of a “methylglyoxalase”, preferably being encoded by a gene comprising the nucleic acid sequence SEQ ID NO. 78265, preferably the coding region thereof, conferred the production of or the increase in succinate compared with the wild type control.

[74292] The nucleic acid sequence of B1670 from Escherichia coli, e.g. as shown in the respective line in column 5 of Table I, application no. 15, has been published in B. And the activity of the gene product thereof is the activity of b1670-protein.

[74293] Accordingly, in one embodiment, the process of the present invention for producing citramalate in a non-human organism, like a microorganism or a plant or a part thereof, comprises increasing or generating the activity of a gene product with the activity of a gene product conferring the activity of “b1670-protein”, especially from Escherichia coli or its functional equivalent or its homolog, e.g. the increase of
[74294] (a) a gene product of a gene comprising the nucleic acid molecule as shown in the respective line in column 5 of Table I (whereby the respective line disclose in column 7 the fine chemical citramalate), application no. 15, preferably the coding region thereof, or a homolog or a fragment thereof, and being depicted in the same respective line as said B1670, or a functional equivalent or a homolog thereof as shown in column 8 of Table I, application no. 15, preferably the coding region thereof, particularly a homolog or functional equivalent as shown in column 8 of Table I B, application no. 15, and being depicted in the same respective line as said B1670, and preferably the activity is increased non-targeted, or
[74295] (b) a polypeptide comprising a polypeptide, a consensus sequence or at least a polypeptide motif as shown in the respective line in column 5 of Table II or in column 8 of Table IV, application no. 15, respectively, and being depicted in the same respective line as said B1670, or a functional equivalent or a homolog thereof as depicted in column 8 of Table II, application no. 15, preferably a homolog or functional equivalent as depicted in column 8 of Table II B, application no. 15, and being depicted in the same respective line as said B1670, and preferably the activity is increased non-targeted, whereby the respective line disclose in column 7 the fine chemical citramalate.

[74296] Accordingly, in one embodiment, the molecule which activity is to be increased in the process of the invention is the gene product with an activity as a “b1670-protein”, preferably it is the molecule of section (a) or (b) of this paragraph.

[74297] In particular, it was observed that in plants, especially in Arabidopsis thaliana, increasing or generating the activity of a gene product non-targeted with the activity of a “b1670-protein”, preferably being encoded by a gene comprising the nucleic acid sequence SEQ ID NO. 78753, preferably the coding region thereof, conferred the production of or the increase in citramalate compared with the wild type control.

[74298] The nucleic acid sequence of B1670 from Escherichia coli, e.g. as shown in the respective line in column 5 of Table I, application no. 15, has been published in B. And the activity of the gene product thereof is the activity of b1670-protein.

[74299] Accordingly, in one embodiment, the process of the present invention for producing malate in a non-human organism, like a microorganism or a plant or a part thereof, comprises increasing or generating the activity of a gene product with the activity of a gene product conferring the activity of “b1670-protein”, especially from Escherichia coli or its functional equivalent or its homolog, e.g. the increase of
[74300] (a) a gene product of a gene comprising the nucleic acid molecule as shown in the respective line in column 5 of Table I (whereby the respective line disclose in column 7 the fine chemical malate), application no. 15, preferably the coding region thereof, or a homolog or a fragment thereof, and being depicted in the same respective line as said B1670, or a functional equivalent or a homolog thereof as shown in column 8 of Table I, application no. 15, preferably the coding region thereof, particularly a homolog or functional equivalent as shown in column 8 of Table I B, application no. 15, and being depicted in the same respective line as said B1670, and preferably the activity is increased non-targeted, or
[74301] (b) a polypeptide comprising a polypeptide, a consensus sequence or at least a polypeptide motif as shown in the respective line in column 5 of Table II or in column 8 of Table IV, application no. 15, respectively, and being depicted in the same respective line as said B1670, or a functional equivalent or a homolog thereof as depicted in column 8 of Table II, application no. 15, preferably a homolog or functional equivalent as depicted in column 8 of Table II B, application no. 15, and being depicted in the same respective line as said B1670, and preferably the activity is increased non-targeted, whereby the respective line disclose in column 7 the fine chemical malate.

[74302] Accordingly, in one embodiment, the molecule which activity is to be increased in the process of the invention is the gene product with an activity as a “b1670-protein”, preferably it is the molecule of section (a) or (b) of this paragraph.

[74303] In particular, it was observed that in plants, especially in Arabidopsis thaliana, increasing or generating the activity of a gene product non-targeted with the activity of a “b1670-protein”, preferably being encoded by a gene comprising the nucleic acid sequence SEQ ID NO. 78753, preferably the coding region thereof, conferred the production of or the increase in malate compared with the wild type control.

[74304] The nucleic acid sequence of B1672 from Escherichia coli, e.g. as shown in the respective line in column 5 of Table I, application no. 15, has been published in B. And the activity of the gene product thereof is the activity of b1672-protein.

[74305] Accordingly, in one embodiment, the process of the present invention for producing citramalate in a non-human organism, like a microorganism or a plant or a part thereof, comprises increasing or generating the activity of a gene product with the activity of a gene product conferring the activity of “b1672-protein”, especially from Escherichia coli or its functional equivalent or its homolog, e.g. the increase of
[74306] (a) a gene product of a gene comprising the nucleic acid molecule as shown in the respective line in column 5 of Table I (whereby the respective line disclose in column 7 the fine chemical citramalate), application no. 15, preferably the coding region thereof, or a homolog or a fragment thereof, and being depicted in the same respective line as said B1672, or a functional equivalent or a homolog thereof as shown in column 8 of Table I, application no. 15, preferably the coding region thereof, particularly a homolog or functional equivalent as shown in column 8 of Table I B, application no. 15, and being depicted in the same respective line as said B1672, and preferably the activity is increased non-targeted, or
[74307] (b) a polypeptide comprising a polypeptide, a consensus sequence or at least a polypeptide motif as shown in the respective line in column 5 of Table II or in column 8 of Table IV, application no. 15, respectively, and being depicted in the same respective line as said B1672, or a functional equivalent or a homolog thereof as depicted in column 8 of Table II, application no. 15, preferably a homolog or functional equivalent as depicted in column 8 of Table II B, application no. 15, and being depicted in the same respective line as said B1672, and preferably the activity is increased non-targeted, whereby the respective line disclose in column 7 the fine chemical citramalate.

[74308] Accordingly, in one embodiment, the molecule which activity is to be increased in the process of the invention is the gene product with an activity as a “b1672-protein”, preferably it is the molecule of section (a) or (b) of this paragraph.

[74309] In particular, it was observed that in plants, especially in Arabidopsis thaliana, increasing or generating the activity of a gene product non-targeted with the activity of a “b1672-protein”, preferably being encoded by a gene comprising the nucleic acid sequence SEQ ID NO. 78771, preferably the coding region thereof, conferred the production of or the increase in citramalate compared with the wild type control.

[74310] The nucleic acid sequence of B1672 from Escherichia coli, e.g. as shown in the respective line in column 5 of Table I, application no. 15, has been published in B. And the activity of the gene product thereof is the activity of b1672-protein.

[74311] Accordingly, in one embodiment, the process of the present invention for producing malate in a non-human organism, like a microorganism or a plant or a part thereof, comprises increasing or generating the activity of a gene product with the activity of a gene product conferring the activity of “b1672-protein”, especially from Escherichia coli or its functional equivalent or its homolog, e.g. the increase of
[74312] (a) a gene product of a gene comprising the nucleic acid molecule as shown in the respective line in column 5 of Table I (whereby the respective line disclose in column 7 the fine chemical malate), application no. 15, preferably the coding region thereof, or a homolog or a fragment thereof, and being depicted in the same respective line as said B1672, or a functional equivalent or a homolog thereof as shown in column 8 of Table I, application no. 15, preferably the coding region thereof, particularly a homolog or functional equivalent as shown in column 8 of Table I B, application no. 15, and being depicted in the same respective line as said B1672, and preferably the activity is increased non-targeted, or
[74313] (b) a polypeptide comprising a polypeptide, a consensus sequence or at least a polypeptide motif as shown in the respective line in column 5 of Table II or in column 8 of Table IV, application no. 15, respectively, and being depicted in the same respective line as said B1672, or a functional equivalent or a homolog thereof as depicted in column 8 of Table II, application no. 15, preferably a homolog or functional equivalent as depicted in column 8 of Table II B, application no. 15, and being depicted in the same respective line as said B1672, and preferably the activity is increased non-targeted, whereby the respective line disclose in column 7 the fine chemical malate.

[74314] Accordingly, in one embodiment, the molecule which activity is to be increased in the process of the invention is the gene product with an activity as a “b1672-protein”, preferably it is the molecule of section (a) or (b) of this paragraph.

[74315] In particular, it was observed that in plants, especially in Arabidopsis thaliana, increasing or generating the activity of a gene product non-targeted with the activity of a “b1672-protein”, preferably being encoded by a gene comprising the nucleic acid sequence SEQ ID NO. 78771, preferably the coding region thereof, conferred the production of or the increase in malate compared with the wild type control.

[74316] The nucleic acid sequence of B1672 from Escherichia coli, e.g. as shown in the respective line in column 5 of Table I, application no. 15, has been published in B. And the activity of the gene product thereof is the activity of b1672-protein.

[74317] Accordingly, in one embodiment, the process of the present invention for producing vitamin c and/or threonic acid in a non-human organism, like a microorganism or a plant or a part thereof, comprises increasing or generating the activity of a gene product with the activity of a gene product conferring the activity of “b1672-protein”, especially from Escherichia coli or its functional equivalent or its homolog, e.g. the increase of
[74318] (a) a gene product of a gene comprising the nucleic acid molecule as shown in the respective line in column 5 of Table I (whereby the respective line disclose in column 7 the fine chemical vitamin c and/or threonic acid), application no. 15, preferably the coding region thereof, or a homolog or a fragment thereof, and being depicted in the same respective line as said B1672, or a functional equivalent or a homolog thereof as shown in column 8 of Table I, application no. 15, preferably the coding region thereof, particularly a homolog or functional equivalent as shown in column 8 of Table I B, application no. 15, and being depicted in the same respective line as said B1672, and preferably the activity is increased non-targeted, or
[74319] (b) a polypeptide comprising a polypeptide, a consensus sequence or at least a polypeptide motif as shown in the respective line in column 5 of Table II or in column 8 of Table IV, application no. 15, respectively, and being depicted in the same respective line as said B1672, or a functional equivalent or a homolog thereof as depicted in column 8 of Table II, application no. 15, preferably a homolog or functional equivalent as depicted in column 8 of Table II B, application no. 15, and being depicted in the same respective line as said B1672, and preferably the activity is increased non-targeted, whereby the respective line disclose in column 7 the fine chemical vitamin c and/or threonic acid.

[74320] Accordingly, in one embodiment, the molecule which activity is to be increased in the process of the invention is the gene product with an activity as a “b1672-protein”, preferably it is the molecule of section (a) or (b) of this paragraph.

[74321] In particular, it was observed that in plants, especially in Arabidopsis thaliana, increasing or generating the activity of a gene product non-targeted with the activity of a “b1672-protein”, preferably being encoded by a gene comprising the nucleic acid sequence SEQ ID NO. 78771, preferably the coding region thereof, conferred the production of or the increase in vitamin c and/or threonic acid compared with the wild type control.

[74322] The nucleic acid sequence of B1742 from Escherichia coli, e.g. as shown in the respective line in column 5 of Table I, application no. 15, has been published in B. And the activity of the gene product thereof is the activity of b1742-protein.

[74323] Accordingly, in one embodiment, the process of the present invention for producing malate in a non-human organism, like a microorganism or a plant or a part thereof, comprises increasing or generating the activity of a gene product with the activity of a gene product conferring the activity of “b1742-protein”, especially from Escherichia coli or its functional equivalent or its homolog, e.g. the increase of
[74324] (a) a gene product of a gene comprising the nucleic acid molecule as shown in the respective line in column 5 of Table I (whereby the respective line disclose in column 7 the fine chemical malate), application no. 15, preferably the coding region thereof, or a homolog or a fragment thereof, and being depicted in the same respective line as said B1742, or a functional equivalent or a homolog thereof as shown in column 8 of Table I, application no. 15, preferably the coding region thereof, particularly a homolog or functional equivalent as shown in column 8 of Table I B, application no. 15, and being depicted in the same respective line as said B1742, and preferably the activity is increased non-targeted, or
[74325] (b) a polypeptide comprising a polypeptide, a consensus sequence or at least a polypeptide motif as shown in the respective line in column 5 of Table II or in column 8 of Table IV, application no. 15, respectively, and being depicted in the same respective line as said B1742, or a functional equivalent or a homolog thereof as depicted in column 8 of Table II, application no. 15, preferably a homolog or functional equivalent as depicted in column 8 of Table II B, application no. 15, and being depicted in the same respective line as said B1742, and preferably the activity is increased non-targeted, whereby the respective line disclose in column 7 the fine chemical malate.

[74326] Accordingly, in one embodiment, the molecule which activity is to be increased in the process of the invention is the gene product with an activity as a “b1742-protein”, preferably it is the molecule of section (a) or (b) of this paragraph.

[74327] In particular, it was observed that in plants, especially in Arabidopsis thaliana, increasing or generating the activity of a gene product non-targeted with the activity of a “b1742-protein”, preferably being encoded by a gene comprising the nucleic acid sequence SEQ ID NO. 134762, preferably the coding region thereof, conferred the production of or the increase in malate compared with the wild type control.

[74328] The nucleic acid sequence of B1742 from Escherichia coli, e.g. as shown in the respective line in column 5 of Table I, application no. 15, has been published in B. And the activity of the gene product thereof is the activity of b1742-protein.

[74329] Accordingly, in one embodiment, the process of the present invention for producing succinate in a non-human organism, like a microorganism or a plant or a part thereof, comprises increasing or generating the activity of a gene product with the activity of a gene product conferring the activity of “b1742-protein”, especially from Escherichia coli or its functional equivalent or its homolog, e.g. the increase of
[74330] (a) a gene product of a gene comprising the nucleic acid molecule as shown in the respective line in column 5 of Table I (whereby the respective line disclose in column 7 the fine chemical succinate), application no. 15, preferably the coding region thereof, or a homolog or a fragment thereof, and being depicted in the same respective line as said B1742, or a functional equivalent or a homolog thereof as shown in column 8 of Table I, application no. 15, preferably the coding region thereof, particularly a homolog or functional equivalent as shown in column 8 of Table I B, application no. 15, and being depicted in the same respective line as said B1742, and preferably the activity is increased non-targeted, or
[74331] (b) a polypeptide comprising a polypeptide, a consensus sequence or at least a polypeptide motif as shown in the respective line in column 5 of Table II or in column 8 of Table IV, application no. 15, respectively, and being depicted in the same respective line as said B1742, or a functional equivalent or a homolog thereof as depicted in column 8 of Table II, application no. 15, preferably a homolog or functional equivalent as depicted in column 8 of Table II B, application no. 15, and being depicted in the same respective line as said B1742, and preferably the activity is increased non-targeted, whereby the respective line disclose in column 7 the fine chemical succinate.

[74332] Accordingly, in one embodiment, the molecule which activity is to be increased in the process of the invention is the gene product with an activity as a “b1742-protein”, preferably it is the molecule of section (a) or (b) of this paragraph.

[74333] In particular, it was observed that in plants, especially in Arabidopsis thaliana, increasing or generating the activity of a gene product non-targeted with the activity of a “b1742-protein”, preferably being encoded by a gene comprising the nucleic acid sequence SEQ ID NO. 134762, preferably the coding region thereof, conferred the production of or the increase in succinate compared with the wild type control.

[74334] The nucleic acid sequence of B1747 from Escherichia coli, e.g. as shown in the respective line in column 5 of Table I, application no. 15, has been published in B. And the activity of the gene product thereof is the activity of arginine N-succinyltransferase.

[74335] Accordingly, in one embodiment, the process of the present invention for producing succinate in a non-human organism, like a microorganism or a plant or a part thereof, comprises increasing or generating the activity of a gene product with the activity of a gene product conferring the activity of “arginine N-succinyltransferase”, especially from Escherichia coli or its functional equivalent or its homolog, e.g. the increase of
[74336] (a) a gene product of a gene comprising the nucleic acid molecule as shown in the respective line in column 5 of Table I (whereby the respective line disclose in column 7 the fine chemical succinate), application no. 15, preferably the coding region thereof, or a homolog or a fragment thereof, and being depicted in the same respective line as said B1747, or a functional equivalent or a homolog thereof as shown in column 8 of Table I, application no. 15, preferably the coding region thereof, particularly a homolog or functional equivalent as shown in column 8 of Table I B, application no. 15, and being depicted in the same respective line as said B1747, and preferably the activity is increased plastidic, or
[74337] (b) a polypeptide comprising a polypeptide, a consensus sequence or at least a polypeptide motif as shown in the respective line in column 5 of Table II or in column 8 of Table IV, application no. 15, respectively, and being depicted in the same respective line as said B1747, or a functional equivalent or a homolog thereof as depicted in column 8 of Table II, application no. 15, preferably a homolog or functional equivalent as depicted in column 8 of Table II B, application no. 15, and being depicted in the same respective line as said B1747, and preferably the activity is increased plastidic, whereby the respective line disclose in column 7 the fine chemical succinate.

[74338] Accordingly, in one embodiment, the molecule which activity is to be increased in the process of the invention is the gene product with an activity as a “arginine N-succinyltransferase”, preferably it is the molecule of section (a) or (b) of this paragraph.

[74339] In particular, it was observed that in plants, especially in Arabidopsis thaliana, increasing or generating the activity of a gene product plastidic with the activity of a “arginine N-succinyltransferase”, preferably being encoded by a gene comprising the nucleic acid sequence SEQ ID NO. 78779, preferably the coding region thereof, conferred the production of or the increase in succinate compared with the wild type control.

[74340] The nucleic acid sequence of B1755 from Escherichia coli, e.g. as shown in the respective line in column 5 of Table I, application no. 15, has been published in B. And the activity of the gene product thereof is the activity of ABC transporter permease protein.

[74341] Accordingly, in one embodiment, the process of the present invention for producing vitamin c and/or threonic acid in a non-human organism, like a microorganism or a plant or a part thereof, comprises increasing or generating the activity of a gene product with the activity of a gene product conferring the activity of “ABC transporter permease protein”, especially from Escherichia coli or its functional equivalent or its homolog, e.g. the increase of
[74342] (a) a gene product of a gene comprising the nucleic acid molecule as shown in the respective line in column 5 of Table I (whereby the respective line disclose in column 7 the fine chemical vitamin c and/or threonic acid), application no. 15, preferably the coding region thereof, or a homolog or a fragment thereof, and being depicted in the same respective line as said B1755, or a functional equivalent or a homolog thereof as shown in column 8 of Table I, application no. 15, preferably the coding region thereof, particularly a homolog or functional equivalent as shown in column 8 of Table I B, application no. 15, and being depicted in the same respective line as said B1755, and preferably the activity is increased non-targeted, or
[74343] (b) a polypeptide comprising a polypeptide, a consensus sequence or at least a polypeptide motif as shown in the respective line in column 5 of Table II or in column 8 of Table IV, application no. 15, respectively, and being depicted in the same respective line as said B1755, or a functional equivalent or a homolog thereof as depicted in column 8 of Table II, application no. 15, preferably a homolog or functional equivalent as depicted in column 8 of Table II B, application no. 15, and being depicted in the same respective line as said B1755, and preferably the activity is increased non-targeted, whereby the respective line disclose in column 7 the fine chemical vitamin c and/or threonic acid.

[74344] Accordingly, in one embodiment, the molecule which activity is to be increased in the process of the invention is the gene product with an activity as a “ABC transporter permease protein”, preferably it is the molecule of section (a) or (b) of this paragraph.

[74345] In particular, it was observed that in plants, especially in Arabidopsis thaliana, increasing or generating the activity of a gene product non-targeted with the activity of a “ABC transporter permease protein”, preferably being encoded by a gene comprising the nucleic acid sequence SEQ ID NO. 78852, preferably the coding region thereof, conferred the production of or the increase in vitamin c and/or threonic acid compared with the wild type control.

[74346] The nucleic acid sequence of B1845 from Escherichia coli, e.g. as shown in the respective line in column 5 of Table I, application no. 15, has been published in B. And the activity of the gene product thereof is the activity of protease.

[74347] Accordingly, in one embodiment, the process of the present invention for producing malate in a non-human organism, like a microorganism or a plant or a part thereof, comprises increasing or generating the activity of a gene product with the activity of a gene product conferring the activity of “protease”, especially from Escherichia coli or its functional equivalent or its homolog, e.g. the increase of
[74348] (a) a gene product of a gene comprising the nucleic acid molecule as shown in the respective line in column 5 of Table I (whereby the respective line disclose in column 7 the fine chemical malate), application no. 15, preferably the coding region thereof, or a homolog or a fragment thereof, and being depicted in the same respective line as said B1845, or a functional equivalent or a homolog thereof as shown in column 8 of Table I, application no. 15, preferably the coding region thereof, particularly a homolog or functional equivalent as shown in column 8 of Table I B, application no. 15, and being depicted in the same respective line as said B1845, and preferably the activity is increased non-targeted, or
[74349] (b) a polypeptide comprising a polypeptide, a consensus sequence or at least a polypeptide motif as shown in the respective line in column 5 of Table II or in column 8 of Table IV, application no. 15, respectively, and being depicted in the same respective line as said B1845, or a functional equivalent or a homolog thereof as depicted in column 8 of Table II, application no. 15, preferably a homolog or functional equivalent as depicted in column 8 of Table II B, application no. 15, and being depicted in the same respective line as said B1845, and preferably the activity is increased non-targeted, whereby the respective line disclose in column 7 the fine chemical malate.

[74350] Accordingly, in one embodiment, the molecule which activity is to be increased in the process of the invention is the gene product with an activity as a “protease”, preferably it is the molecule of section (a) or (b) of this paragraph.

[74351] In particular, it was observed that in plants, especially in Arabidopsis thaliana, increasing or generating the activity of a gene product non-targeted with the activity of a “protease”, preferably being encoded by a gene comprising the nucleic acid sequence SEQ ID NO. 38573, preferably the coding region thereof, conferred the production of or the increase in malate compared with the wild type control.

[74352] The nucleic acid sequence of B1865 from Escherichia coli, e.g. as shown in the respective line in column 5 of Table I, application no. 15, has been published in B. And the activity of the gene product thereof is the activity of dATP pyrophosphohydrolase.

[74353] Accordingly, in one embodiment, the process of the present invention for producing vitamin c and/or threonic acid in a non-human organism, like a microorganism or a plant or a part thereof, comprises increasing or generating the activity of a gene product with the activity of a gene product conferring the activity of “dATP pyrophosphohydrolase”, especially from Escherichia coli or its functional equivalent or its homolog, e.g. the increase of
[74354] (a) a gene product of a gene comprising the nucleic acid molecule as shown in the respective line in column 5 of Table I (whereby the respective line disclose in column 7 the fine chemical vitamin c and/or threonic acid), application no. 15, preferably the coding region thereof, or a homolog or a fragment thereof, and being depicted in the same respective line as said B1865, or a functional equivalent or a homolog thereof as shown in column 8 of Table I, application no. 15, preferably the coding region thereof, particularly a homolog or functional equivalent as shown in column 8 of Table I B, application no. 15, and being depicted in the same respective line as said B1865, and preferably the activity is increased non-targeted, or
[74355] (b) a polypeptide comprising a polypeptide, a consensus sequence or at least a polypeptide motif as shown in the respective line in column 5 of Table II or in column 8 of Table IV, application no. 15, respectively, and being depicted in the same respective line as said B1865, or a functional equivalent or a homolog thereof as depicted in column 8 of Table II, application no. 15, preferably a homolog or functional equivalent as depicted in column 8 of Table II B, application no. 15, and being depicted in the same respective line as said B1865, and preferably the activity is increased non-targeted, whereby the respective line disclose in column 7 the fine chemical vitamin c and/or threonic acid.

[74356] Accordingly, in one embodiment, the molecule which activity is to be increased in the process of the invention is the gene product with an activity as a “dATP pyrophosphohydrolase”, preferably it is the molecule of section (a) or (b) of this paragraph.

[74357] In particular, it was observed that in plants, especially in Arabidopsis thaliana, increasing or generating the activity of a gene product non-targeted with the activity of a “dATP pyrophosphohydrolase”, preferably being encoded by a gene comprising the nucleic acid sequence SEQ ID NO. 134783, preferably the coding region thereof, conferred the production of or the increase in vitamin c and/or threonic acid compared with the wild type control.

[74358] The nucleic acid sequence of B1898 from Escherichia coli, e.g. as shown in the respective line in column 5 of Table I, application no. 15, has been published in B. And the activity of the gene product thereof is the activity of b1898-protein.

[74359] Accordingly, in one embodiment, the process of the present invention for producing succinate in a non-human organism, like a microorganism or a plant or a part thereof, comprises increasing or generating the activity of a gene product with the activity of a gene product conferring the activity of “b1898-protein”, especially from Escherichia coli or its functional equivalent or its homolog, e.g. the increase of
[74360] (a) a gene product of a gene comprising the nucleic acid molecule as shown in the respective line in column 5 of Table I (whereby the respective line disclose in column 7 the fine chemical succinate), application no. 15, preferably the coding region thereof, or a homolog or a fragment thereof, and being depicted in the same respective line as said B1898, or a functional equivalent or a homolog thereof as shown in column 8 of Table I, application no. 15, preferably the coding region thereof, particularly a homolog or functional equivalent as shown in column 8 of Table I B, application no. 15, and being depicted in the same respective line as said B1898, and preferably the activity is increased non-targeted, or
[74361] (b) a polypeptide comprising a polypeptide, a consensus sequence or at least a polypeptide motif as shown in the respective line in column 5 of Table II or in column 8 of Table IV, application no. 15, respectively, and being depicted in the same respective line as said B1898, or a functional equivalent or a homolog thereof as depicted in column 8 of Table II, application no. 15, preferably a homolog or functional equivalent as depicted in column 8 of Table II B, application no. 15, and being depicted in the same respective line as said B1898, and preferably the activity is increased non-targeted, whereby the respective line disclose in column 7 the fine chemical succinate.

[74362] Accordingly, in one embodiment, the molecule which activity is to be increased in the process of the invention is the gene product with an activity as a “b1898-protein”, preferably it is the molecule of section (a) or (b) of this paragraph.

[74363] In particular, it was observed that in plants, especially in Arabidopsis thaliana, increasing or generating the activity of a gene product non-targeted with the activity of a “b1898-protein”, preferably being encoded by a gene comprising the nucleic acid sequence SEQ ID NO. 38767, preferably the coding region thereof, conferred the production of or the increase in succinate compared with the wild type control.

[74364] The nucleic acid sequence of B1938 from Escherichia coli, e.g. as shown in the respective line in column 5 of Table I, application no. 15, has been published in B. And the activity of the gene product thereof is the activity of flagellar M-ring protein.

[74365] Accordingly, in one embodiment, the process of the present invention for producing fumarate in a non-human organism, like a microorganism or a plant or a part thereof, comprises increasing or generating the activity of a gene product with the activity of a gene product conferring the activity of “flagellar M-ring protein”, especially from Escherichia coli or its functional equivalent or its homolog, e.g. the increase of
[74366] (a) a gene product of a gene comprising the nucleic acid molecule as shown in the respective line in column 5 of Table I (whereby the respective line disclose in column 7 the fine chemical fumarate), application no. 15, preferably the coding region thereof, or a homolog or a fragment thereof, and being depicted in the same respective line as said B1938, or a functional equivalent or a homolog thereof as shown in column 8 of Table I, application no. 15, preferably the coding region thereof, particularly a homolog or functional equivalent as shown in column 8 of Table I B, application no. 15, and being depicted in the same respective line as said B1938, and preferably the activity is increased non-targeted, or
[74367] (b) a polypeptide comprising a polypeptide, a consensus sequence or at least a polypeptide motif as shown in the respective line in column 5 of Table II or in column 8 of Table IV, application no. 15, respectively, and being depicted in the same respective line as said B1938, or a functional equivalent or a homolog thereof as depicted in column 8 of Table II, application no. 15, preferably a homolog or functional equivalent as depicted in column 8 of Table II B, application no. 15, and being depicted in the same respective line as said B1938, and preferably the activity is increased non-targeted, whereby the respective line disclose in column 7 the fine chemical fumarate.

[74368] Accordingly, in one embodiment, the molecule which activity is to be increased in the process of the invention is the gene product with an activity as a “flagellar M-ring protein”, preferably it is the molecule of section (a) or (b) of this paragraph.

[74369] In particular, it was observed that in plants, especially in Arabidopsis thaliana, increasing or generating the activity of a gene product non-targeted with the activity of a “flagellar M-ring protein”, preferably being encoded by a gene comprising the nucleic acid sequence SEQ ID NO. 134864, preferably the coding region thereof, conferred the production of or the increase in fumarate compared with the wild type control.

[74370] The nucleic acid sequence of B1938 from Escherichia coli, e.g. as shown in the respective line in column 5 of Table I, application no. 15, has been published in B. And the activity of the gene product thereof is the activity of flagellar M-ring protein.

[74371] Accordingly, in one embodiment, the process of the present invention for producing malate in a non-human organism, like a microorganism or a plant or a part thereof, comprises increasing or generating the activity of a gene product with the activity of a gene product conferring the activity of “flagellar M-ring protein”, especially from Escherichia coli or its functional equivalent or its homolog, e.g. the increase of
[74372] (a) a gene product of a gene comprising the nucleic acid molecule as shown in the respective line in column 5 of Table I (whereby the respective line disclose in column 7 the fine chemical malate), application no. 15, preferably the coding region thereof, or a homolog or a fragment thereof, and being depicted in the same respective line as said B1938, or a functional equivalent or a homolog thereof as shown in column 8 of Table I, application no. 15, preferably the coding region thereof, particularly a homolog or functional equivalent as shown in column 8 of Table I B, application no. 15, and being depicted in the same respective line as said B1938, and preferably the activity is increased non-targeted, or
[74373] (b) a polypeptide comprising a polypeptide, a consensus sequence or at least a polypeptide motif as shown in the respective line in column 5 of Table II or in column 8 of Table IV, application no. 15, respectively, and being depicted in the same respective line as said B1938, or a functional equivalent or a homolog thereof as depicted in column 8 of Table II, application no. 15, preferably a homolog or functional equivalent as depicted in column 8 of Table II B, application no. 15, and being depicted in the same respective line as said B1938, and preferably the activity is increased non-targeted, whereby the respective line disclose in column 7 the fine chemical malate.

[74374] Accordingly, in one embodiment, the molecule which activity is to be increased in the process of the invention is the gene product with an activity as a “flagellar M-ring protein”, preferably it is the molecule of section (a) or (b) of this paragraph.

[74375] In particular, it was observed that in plants, especially in Arabidopsis thaliana, increasing or generating the activity of a gene product non-targeted with the activity of a “flagellar M-ring protein”, preferably being encoded by a gene comprising the nucleic acid sequence SEQ ID NO. 134864, preferably the coding region thereof, conferred the production of or the increase in malate compared with the wild type control.

[74376] The nucleic acid sequence of B1938 from Escherichia coli, e.g. as shown in the respective line in column 5 of Table I, application no. 15, has been published in B. And the activity of the gene product thereof is the activity of flagellar M-ring protein.

[74377] Accordingly, in one embodiment, the process of the present invention for producing succinate in a non-human organism, like a microorganism or a plant or a part thereof, comprises increasing or generating the activity of a gene product with the activity of a gene product conferring the activity of “flagellar M-ring protein”, especially from Escherichia coli or its functional equivalent or its homolog, e.g. the increase of
[74378] (a) a gene product of a gene comprising the nucleic acid molecule as shown in the respective line in column 5 of Table I (whereby the respective line disclose in column 7 the fine chemical succinate), application no. 15, preferably the coding region thereof, or a homolog or a fragment thereof, and being depicted in the same respective line as said B1938, or a functional equivalent or a homolog thereof as shown in column 8 of Table I, application no. 15, preferably the coding region thereof, particularly a homolog or functional equivalent as shown in column 8 of Table I B, application no. 15, and being depicted in the same respective line as said B1938, and preferably the activity is increased non-targeted, or
[74379] (b) a polypeptide comprising a polypeptide, a consensus sequence or at least a polypeptide motif as shown in the respective line in column 5 of Table II or in column 8 of Table IV, application no. 15, respectively, and being depicted in the same respective line as said B1938, or a functional equivalent or a homolog thereof as depicted in column 8 of Table II, application no. 15, preferably a homolog or functional equivalent as depicted in column 8 of Table II B, application no. 15, and being depicted in the same respective line as said B1938, and preferably the activity is increased non-targeted, whereby the respective line disclose in column 7 the fine chemical succinate.

[74380] Accordingly, in one embodiment, the molecule which activity is to be increased in the process of the invention is the gene product with an activity as a “flagellar M-ring protein”, preferably it is the molecule of section (a) or (b) of this paragraph.

[74381] In particular, it was observed that in plants, especially in Arabidopsis thaliana, increasing or generating the activity of a gene product non-targeted with the activity of a “flagellar M-ring protein”, preferably being encoded by a gene comprising the nucleic acid sequence SEQ ID NO. 134864, preferably the coding region thereof, conferred the production of or the increase in succinate compared with the wild type control.

[74382] The nucleic acid sequence of B2027 from Escherichia coli, e.g. as shown in the respective line in column 5 of Table I, application no. 15, has been published in B. And the activity of the gene product thereof is the activity of O-antigen chain length determinant.

[74383] Accordingly, in one embodiment, the process of the present invention for producing malate in a non-human organism, like a microorganism or a plant or a part thereof, comprises increasing or generating the activity of a gene product with the activity of a gene product conferring the activity of “O-antigen chain length determinant”, especially from Escherichia coli or its functional equivalent or its homolog, e.g. the increase of
[74384] (a) a gene product of a gene comprising the nucleic acid molecule as shown in the respective line in column 5 of Table I (whereby the respective line disclose in column 7 the fine chemical malate), application no. 15, preferably the coding region thereof, or a homolog or a fragment thereof, and being depicted in the same respective line as said B2027, or a functional equivalent or a homolog thereof as shown in column 8 of Table I, application no. 15, preferably the coding region thereof, particularly a homolog or functional equivalent as shown in column 8 of Table I B, application no. 15, and being depicted in the same respective line as said B2027, and preferably the activity is increased non-targeted, or
[74385] (b) a polypeptide comprising a polypeptide, a consensus sequence or at least a polypeptide motif as shown in the respective line in column 5 of Table II or in column 8 of Table IV, application no. 15, respectively, and being depicted in the same respective line as said B2027, or a functional equivalent or a homolog thereof as depicted in column 8 of Table II, application no. 15, preferably a homolog or functional equivalent as depicted in column 8 of Table II B, application no. 15, and being depicted in the same respective line as said B2027, and preferably the activity is increased non-targeted, whereby the respective line disclose in column 7 the fine chemical malate.

[74386] Accordingly, in one embodiment, the molecule which activity is to be increased in the process of the invention is the gene product with an activity as a “O-antigen chain length determinant”, preferably it is the molecule of section (a) or (b) of this paragraph.

[74387] In particular, it was observed that in plants, especially in Arabidopsis thaliana, increasing or generating the activity of a gene product non-targeted with the activity of a “O-antigen chain length determinant”, preferably being encoded by a gene comprising the nucleic acid sequence SEQ ID NO. 79217, preferably the coding region thereof, conferred the production of or the increase in malate compared with the wild type control.

[74388] The nucleic acid sequence of B2399 from Escherichia coli, e.g. as shown in the respective line in column 5 of Table I, application no. 15, has been published in B. And the activity of the gene product thereof is the activity of b2399-protein.

[74389] Accordingly, in one embodiment, the process of the present invention for producing fumarate in a non-human organism, like a microorganism or a plant or a part thereof, comprises increasing or generating the activity of a gene product with the activity of a gene product conferring the activity of “b2399-protein”, especially from Escherichia coli or its functional equivalent or its homolog, e.g. the increase of
[74390] (a) a gene product of a gene comprising the nucleic acid molecule as shown in the respective line in column 5 of Table I (whereby the respective line disclose in column 7 the fine chemical fumarate), application no. 15, preferably the coding region thereof, or a homolog or a fragment thereof, and being depicted in the same respective line as said B2399, or a functional equivalent or a homolog thereof as shown in column 8 of Table I, application no. 15, preferably the coding region thereof, particularly a homolog or functional equivalent as shown in column 8 of Table I B, application no. 15, and being depicted in the same respective line as said B2399, and preferably the activity is increased non-targeted, or
[74391] (b) a polypeptide comprising a polypeptide, a consensus sequence or at least a polypeptide motif as shown in the respective line in column 5 of Table II or in column 8 of Table IV, application no. 15, respectively, and being depicted in the same respective line as said B2399, or a functional equivalent or a homolog thereof as depicted in column 8 of Table II, application no. 15, preferably a homolog or functional equivalent as depicted in column 8 of Table II B, application no. 15, and being depicted in the same respective line as said B2399, and preferably the activity is increased non-targeted, whereby the respective line disclose in column 7 the fine chemical fumarate.

[74392] Accordingly, in one embodiment, the molecule which activity is to be increased in the process of the invention is the gene product with an activity as a “b2399-protein”, preferably it is the molecule of section (a) or (b) of this paragraph.

[74393] In particular, it was observed that in plants, especially in Arabidopsis thaliana, increasing or generating the activity of a gene product non-targeted with the activity of a “b2399-protein”, preferably being encoded by a gene comprising the nucleic acid sequence SEQ ID NO. 39237, preferably the coding region thereof, conferred the production of or the increase in fumarate compared with the wild type control.

[74394] The nucleic acid sequence of B2399 from Escherichia coli, e.g. as shown in the respective line in column 5 of Table I, application no. 15, has been published in B. And the activity of the gene product thereof is the activity of b2399-protein.

[74395] Accordingly, in one embodiment, the process of the present invention for producing succinate in a non-human organism, like a microorganism or a plant or a part thereof, comprises increasing or generating the activity of a gene product with the activity of a gene product conferring the activity of “b2399-protein”, especially from Escherichia coli or its functional equivalent or its homolog, e.g. the increase of
[74396] (a) a gene product of a gene comprising the nucleic acid molecule as shown in the respective line in column 5 of Table I (whereby the respective line disclose in column 7 the fine chemical succinate), application no. 15, preferably the coding region thereof, or a homolog or a fragment thereof, and being depicted in the same respective line as said B2399, or a functional equivalent or a homolog thereof as shown in column 8 of Table I, application no. 15, preferably the coding region thereof, particularly a homolog or functional equivalent as shown in column 8 of Table I B, application no. 15, and being depicted in the same respective line as said B2399, and preferably the activity is increased non-targeted, or
[74397] (b) a polypeptide comprising a polypeptide, a consensus sequence or at least a polypeptide motif as shown in the respective line in column 5 of Table II or in column 8 of Table IV, application no. 15, respectively, and being depicted in the same respective line as said B2399, or a functional equivalent or a homolog thereof as depicted in column 8 of Table II, application no. 15, preferably a homolog or functional equivalent as depicted in column 8 of Table II B, application no. 15, and being depicted in the same respective line as said B2399, and preferably the activity is increased non-targeted, whereby the respective line disclose in column 7 the fine chemical succinate.

[74398] Accordingly, in one embodiment, the molecule which activity is to be increased in the process of the invention is the gene product with an activity as a “b2399-protein”, preferably it is the molecule of section (a) or (b) of this paragraph.

[74399] In particular, it was observed that in plants, especially in Arabidopsis thaliana, increasing or generating the activity of a gene product non-targeted with the activity of a “b2399-protein”, preferably being encoded by a gene comprising the nucleic acid sequence SEQ ID NO. 39237, preferably the coding region thereof, conferred the production of or the increase in succinate compared with the wild type control.

[74400] The nucleic acid sequence of B2399 from Escherichia coli, e.g. as shown in the respective line in column 5 of Table I, application no. 15, has been published in B. And the activity of the gene product thereof is the activity of b2399-protein.

[74401] Accordingly, in one embodiment, the process of the present invention for producing vitamin c and/or threonic acid in a non-human organism, like a microorganism or a plant or a part thereof, comprises increasing or generating the activity of a gene product with the activity of a gene product conferring the activity of “b2399-protein”, especially from Escherichia coli or its functional equivalent or its homolog, e.g. the increase of
[74402] (a) a gene product of a gene comprising the nucleic acid molecule as shown in the respective line in column 5 of Table I (whereby the respective line disclose in column 7 the fine chemical vitamin c and/or threonic acid), application no. 15, preferably the coding region thereof, or a homolog or a fragment thereof, and being depicted in the same respective line as said B2399, or a functional equivalent or a homolog thereof as shown in column 8 of Table I, application no. 15, preferably the coding region thereof, particularly a homolog or functional equivalent as shown in column 8 of Table I B, application no. 15, and being depicted in the same respective line as said B2399, and preferably the activity is increased non-targeted, or
[74403] (b) a polypeptide comprising a polypeptide, a consensus sequence or at least a polypeptide motif as shown in the respective line in column 5 of Table II or in column 8 of Table IV, application no. 15, respectively, and being depicted in the same respective line as said B2399, or a functional equivalent or a homolog thereof as depicted in column 8 of Table II, application no. 15, preferably a homolog or functional equivalent as depicted in column 8 of Table II B, application no. 15, and being depicted in the same respective line as said B2399, and preferably the activity is increased non-targeted, whereby the respective line disclose in column 7 the fine chemical vitamin c and/or threonic acid.

[74404] Accordingly, in one embodiment, the molecule which activity is to be increased in the process of the invention is the gene product with an activity as a “b2399-protein”, preferably it is the molecule of section (a) or (b) of this paragraph.

[74405] In particular, it was observed that in plants, especially in Arabidopsis thaliana, increasing or generating the activity of a gene product non-targeted with the activity of a “b2399-protein”, preferably being encoded by a gene comprising the nucleic acid sequence SEQ ID NO. 39237, preferably the coding region thereof, conferred the production of or the increase in vitamin c and/or threonic acid compared with the wild type control.

[74406] The nucleic acid sequence of B2414 from Escherichia coli, e.g. as shown in the respective line in column 5 of Table I, application no. 15, has been published in B. And the activity of the gene product thereof is the activity of cysteine synthase A.

[74407] Accordingly, in one embodiment, the process of the present invention for producing vitamin c and/or threonic acid in a non-human organism, like a microorganism or a plant or a part thereof, comprises increasing or generating the activity of a gene product with the activity of a gene product conferring the activity of “cysteine synthase A”, especially from Escherichia coli or its functional equivalent or its homolog, e.g. the increase of
[74408] (a) a gene product of a gene comprising the nucleic acid molecule as shown in the respective line in column 5 of Table I (whereby the respective line disclose in column 7 the fine chemical vitamin c and/or threonic acid), application no. 15, preferably the coding region thereof, or a homolog or a fragment thereof, and being depicted in the same respective line as said B2414, or a functional equivalent or a homolog thereof as shown in column 8 of Table I, application no. 15, preferably the coding region thereof, particularly a homolog or functional equivalent as shown in column 8 of Table I B, application no. 15, and being depicted in the same respective line as said B2414, and preferably the activity is increased non-targeted, or
[74409] (b) a polypeptide comprising a polypeptide, a consensus sequence or at least a polypeptide motif as shown in the respective line in column 5 of Table II or in column 8 of Table IV, application no. 15, respectively, and being depicted in the same respective line as said B2414, or a functional equivalent or a homolog thereof as depicted in column 8 of Table II, application no. 15, preferably a homolog or functional equivalent as depicted in column 8 of Table II B, application no. 15, and being depicted in the same respective line as said B2414, and preferably the activity is increased non-targeted, whereby the respective line disclose in column 7 the fine chemical vitamin c and/or threonic acid.

[74410] Accordingly, in one embodiment, the molecule which activity is to be increased in the process of the invention is the gene product with an activity as a “cysteine synthase A”, preferably it is the molecule of section (a) or (b) of this paragraph.

[74411] In particular, it was observed that in plants, especially in Arabidopsis thaliana, increasing or generating the activity of a gene product non-targeted with the activity of a “cysteine synthase A”, preferably being encoded by a gene comprising the nucleic acid sequence SEQ ID NO. 39300, preferably the coding region thereof, conferred the production of or the increase in vitamin c and/or threonic acid compared with the wild type control.

[74412] The nucleic acid sequence of B2421 from Escherichia coli, e.g. as shown in the respective line in column 5 of Table I, application no. 15, has been published in B. And the activity of the gene product thereof is the activity of cysteine synthase B.

[74413] Accordingly, in one embodiment, the process of the present invention for producing vitamin c and/or threonic acid in a non-human organism, like a microorganism or a plant or a part thereof, comprises increasing or generating the activity of a gene product with the activity of a gene product conferring the activity of “cysteine synthase B”, especially from Escherichia coli or its functional equivalent or its homolog, e.g. the increase of
[74414] (a) a gene product of a gene comprising the nucleic acid molecule as shown in the respective line in column 5 of Table I (whereby the respective line disclose in column 7 the fine chemical vitamin c and/or threonic acid), application no. 15, preferably the coding region thereof, or a homolog or a fragment thereof, and being depicted in the same respective line as said B2421, or a functional equivalent or a homolog thereof as shown in column 8 of Table I, application no. 15, preferably the coding region thereof, particularly a homolog or functional equivalent as shown in column 8 of Table I B, application no. 15, and being depicted in the same respective line as said B2421, and preferably the activity is increased plastidic, or
[74415] (b) a polypeptide comprising a polypeptide, a consensus sequence or at least a polypeptide motif as shown in the respective line in column 5 of Table II or in column 8 of Table IV, application no. 15, respectively, and being depicted in the same respective line as said B2421, or a functional equivalent or a homolog thereof as depicted in column 8 of Table II, application no. 15, preferably a homolog or functional equivalent as depicted in column 8 of Table II B, application no. 15, and being depicted in the same respective line as said B2421, and preferably the activity is increased plastidic, whereby the respective line disclose in column 7 the fine chemical vitamin c and/or threonic acid.

[74416] Accordingly, in one embodiment, the molecule which activity is to be increased in the process of the invention is the gene product with an activity as a “cysteine synthase B”, preferably it is the molecule of section (a) or (b) of this paragraph.

[74417] In particular, it was observed that in plants, especially in Arabidopsis thaliana, increasing or generating the activity of a gene product plastidic with the activity of a “cysteine synthase B”, preferably being encoded by a gene comprising the nucleic acid sequence SEQ ID NO. 134924, preferably the coding region thereof, conferred the production of or the increase in vitamin c and/or threonic acid compared with the wild type control.

[74418] The nucleic acid sequence of B2634 from Escherichia coli, e.g. as shown in the respective line in column 5 of Table I, application no. 15, has been published in B. And the activity of the gene product thereof is the activity of transcriptional regulator.

[74419] Accordingly, in one embodiment, the process of the present invention for producing fumarate in a non-human organism, like a microorganism or a plant or a part thereof, comprises increasing or generating the activity of a gene product with the activity of a gene product conferring the activity of “transcriptional regulator”, especially from Escherichia coli or its functional equivalent or its homolog, e.g. the increase of
[74420] (a) a gene product of a gene comprising the nucleic acid molecule as shown in the respective line in column 5 of Table I (whereby the respective line disclose in column 7 the fine chemical fumarate), application no. 15, preferably the coding region thereof, or a homolog or a fragment thereof, and being depicted in the same respective line as said B2634, or a functional equivalent or a homolog thereof as shown in column 8 of Table I, application no. 15, preferably the coding region thereof, particularly a homolog or functional equivalent as shown in column 8 of Table I B, application no. 15, and being depicted in the same respective line as said B2634, and preferably the activity is increased non-targeted, or
[74421] (b) a polypeptide comprising a polypeptide, a consensus sequence or at least a polypeptide motif as shown in the respective line in column 5 of Table II or in column 8 of Table IV, application no. 15, respectively, and being depicted in the same respective line as said B2634, or a functional equivalent or a homolog thereof as depicted in column 8 of Table II, application no. 15, preferably a homolog or functional equivalent as depicted in column 8 of Table II B, application no. 15, and being depicted in the same respective line as said B2634, and preferably the activity is increased non-targeted, whereby the respective line disclose in column 7 the fine chemical fumarate.

[74422] Accordingly, in one embodiment, the molecule which activity is to be increased in the process of the invention is the gene product with an activity as a “transcriptional regulator”, preferably it is the molecule of section (a) or (b) of this paragraph.

[74423] In particular, it was observed that in plants, especially in Arabidopsis thaliana, increasing or generating the activity of a gene product non-targeted with the activity of a “transcriptional regulator”, preferably being encoded by a gene comprising the nucleic acid sequence SEQ ID NO. 40726, preferably the coding region thereof, conferred the production of or the increase in fumarate compared with the wild type control.

[74424] The nucleic acid sequence of B2634 from Escherichia coli, e.g. as shown in the respective line in column 5 of Table I, application no. 15, has been published in B. And the activity of the gene product thereof is the activity of transcriptional regulator.

[74425] Accordingly, in one embodiment, the process of the present invention for producing malate in a non-human organism, like a microorganism or a plant or a part thereof, comprises increasing or generating the activity of a gene product with the activity of a gene product conferring the activity of “transcriptional regulator”, especially from Escherichia coli or its functional equivalent or its homolog, e.g. the increase of
[74426] (a) a gene product of a gene comprising the nucleic acid molecule as shown in the respective line in column 5 of Table I (whereby the respective line disclose in column 7 the fine chemical malate), application no. 15, preferably the coding region thereof, or a homolog or a fragment thereof, and being depicted in the same respective line as said B2634, or a functional equivalent or a homolog thereof as shown in column 8 of Table I, application no. 15, preferably the coding region thereof, particularly a homolog or functional equivalent as shown in column 8 of Table I B, application no. 15, and being depicted in the same respective line as said B2634, and preferably the activity is increased non-targeted, or
[74427] (b) a polypeptide comprising a polypeptide, a consensus sequence or at least a polypeptide motif as shown in the respective line in column 5 of Table II or in column 8 of Table IV, application no. 15, respectively, and being depicted in the same respective line as said B2634, or a functional equivalent or a homolog thereof as depicted in column 8 of Table II, application no. 15, preferably a homolog or functional equivalent as depicted in column 8 of Table II B, application no. 15, and being depicted in the same respective line as said B2634, and preferably the activity is increased non-targeted, whereby the respective line disclose in column 7 the fine chemical malate.

[74428] Accordingly, in one embodiment, the molecule which activity is to be increased in the process of the invention is the gene product with an activity as a “transcriptional regulator”, preferably it is the molecule of section (a) or (b) of this paragraph.

[74429] In particular, it was observed that in plants, especially in Arabidopsis thaliana, increasing or generating the activity of a gene product non-targeted with the activity of a “transcriptional regulator”, preferably being encoded by a gene comprising the nucleic acid sequence SEQ ID NO. 40726, preferably the coding region thereof, conferred the production of or the increase in malate compared with the wild type control.

[74430] The nucleic acid sequence of B2701 from Escherichia coli, e.g. as shown in the respective line in column 5 of Table I, application no. 15, has been published in B. And the activity of the gene product thereof is the activity of murein transglycosylase.

[74431] Accordingly, in one embodiment, the process of the present invention for producing succinate in a non-human organism, like a microorganism or a plant or a part thereof, comprises increasing or generating the activity of a gene product with the activity of a gene product conferring the activity of “murein transglycosylase”, especially from Escherichia coli or its functional equivalent or its homolog, e.g. the increase of
[74432] (a) a gene product of a gene comprising the nucleic acid molecule as shown in the respective line in column 5 of Table I (whereby the respective line disclose in column 7 the fine chemical succinate), application no. 15, preferably the coding region thereof, or a homolog or a fragment thereof, and being depicted in the same respective line as said B2701, or a functional equivalent or a homolog thereof as shown in column 8 of Table I, application no. 15, preferably the coding region thereof, particularly a homolog or functional equivalent as shown in column 8 of Table I B, application no. 15, and being depicted in the same respective line as said B2701, and preferably the activity is increased non-targeted, or
[74433] (b) a polypeptide comprising a polypeptide, a consensus sequence or at least a polypeptide motif as shown in the respective line in column 5 of Table II or in column 8 of Table IV, application no. 15, respectively, and being depicted in the same respective line as said B2701, or a functional equivalent or a homolog thereof as depicted in column 8 of Table II, application no. 15, preferably a homolog or functional equivalent as depicted in column 8 of Table II B, application no. 15, and being depicted in the same respective line as said B2701, and preferably the activity is increased non-targeted, whereby the respective line disclose in column 7 the fine chemical succinate.

[74434] Accordingly, in one embodiment, the molecule which activity is to be increased in the process of the invention is the gene product with an activity as a “murein transglycosylase”, preferably it is the molecule of section (a) or (b) of this paragraph.

[74435] In particular, it was observed that in plants, especially in Arabidopsis thaliana, increasing or generating the activity of a gene product non-targeted with the activity of a “murein transglycosylase”, preferably being encoded by a gene comprising the nucleic acid sequence SEQ ID NO. 80756, preferably the coding region thereof, conferred the production of or the increase in succinate compared with the wild type control.

[74436] The nucleic acid sequence of B2747 from Escherichia coli, e.g. as shown in the respective line in column 5 of Table I, application no. 15, has been published in B. And the activity of the gene product thereof is the activity of 2-C-methyl-D-erythritol 4-phosphate cytidylyltransferase.

[74437] Accordingly, in one embodiment, the process of the present invention for producing succinate in a non-human organism, like a microorganism or a plant or a part thereof, comprises increasing or generating the activity of a gene product with the activity of a gene product conferring the activity of “2-C-methyl-D-erythritol 4-phosphate cytidylyltransferase”, especially from Escherichia coli or its functional equivalent or its homolog, e.g. the increase of
[74438] (a) a gene product of a gene comprising the nucleic acid molecule as shown in the respective line in column 5 of Table I (whereby the respective line disclose in column 7 the fine chemical succinate), application no. 15, preferably the coding region thereof, or a homolog or a fragment thereof, and being depicted in the same respective line as said B2747, or a functional equivalent or a homolog thereof as shown in column 8 of Table I, application no. 15, preferably the coding region thereof, particularly a homolog or functional equivalent as shown in column 8 of Table I B, application no. 15, and being depicted in the same respective line as said B2747, and preferably the activity is increased non-targeted, or
[74439] (b) a polypeptide comprising a polypeptide, a consensus sequence or at least a polypeptide motif as shown in the respective line in column 5 of Table II or in column 8 of Table IV, application no. 15, respectively, and being depicted in the same respective line as said B2747, or a functional equivalent or a homolog thereof as depicted in column 8 of Table II, application no. 15, preferably a homolog or functional equivalent as depicted in column 8 of Table II B, application no. 15, and being depicted in the same respective line as said B2747, and preferably the activity is increased non-targeted, whereby the respective line disclose in column 7 the fine chemical succinate.

[74440] Accordingly, in one embodiment, the molecule which activity is to be increased in the process of the invention is the gene product with an activity as a “2-C-methyl-D-erythritol 4-phosphate cytidylyltransferase”, preferably it is the molecule of section (a) or (b) of this paragraph.

[74441] In particular, it was observed that in plants, especially in Arabidopsis thaliana, increasing or generating the activity of a gene product non-targeted with the activity of a “2-C-methyl-D-erythritol 4-phosphate cytidylyltransferase”, preferably being encoded by a gene comprising the nucleic acid sequence SEQ ID NO. 81075, preferably the coding region thereof, conferred the production of or the increase in succinate compared with the wild type control.

[74442] The nucleic acid sequence of B2818 from Escherichia coli, e.g. as shown in the respective line in column 5 of Table I, application no. 15, has been published in B. And the activity of the gene product thereof is the activity of amino-acid acetyltransferase.

[74443] Accordingly, in one embodiment, the process of the present invention for producing succinate in a non-human organism, like a microorganism or a plant or a part thereof, comprises increasing or generating the activity of a gene product with the activity of a gene product conferring the activity of “amino-acid acetyltransferase”, especially from Escherichia coli or its functional equivalent or its homolog, e.g. the increase of
[74444] (a) a gene product of a gene comprising the nucleic acid molecule as shown in the respective line in column 5 of Table I (whereby the respective line disclose in column 7 the fine chemical succinate), application no. 15, preferably the coding region thereof, or a homolog or a fragment thereof, and being depicted in the same respective line as said B2818, or a functional equivalent or a homolog thereof as shown in column 8 of Table I, application no. 15, preferably the coding region thereof, particularly a homolog or functional equivalent as shown in column 8 of Table I B, application no. 15, and being depicted in the same respective line as said B2818, and preferably the activity is increased non-targeted, or
[74445] (b) a polypeptide comprising a polypeptide, a consensus sequence or at least a polypeptide motif as shown in the respective line in column 5 of Table II or in column 8 of Table IV, application no. 15, respectively, and being depicted in the same respective line as said B2818, or a functional equivalent or a homolog thereof as depicted in column 8 of Table II, application no. 15, preferably a homolog or functional equivalent as depicted in column 8 of Table II B, application no. 15, and being depicted in the same respective line as said B2818, and preferably the activity is increased non-targeted, whereby the respective line disclose in column 7 the fine chemical succinate.

[74446] Accordingly, in one embodiment, the molecule which activity is to be increased in the process of the invention is the gene product with an activity as a “amino-acid acetyltransferase”, preferably it is the molecule of section (a) or (b) of this paragraph.

[74447] In particular, it was observed that in plants, especially in Arabidopsis thaliana, increasing or generating the activity of a gene product non-targeted with the activity of a “amino-acid acetyltransferase”, preferably being encoded by a gene comprising the nucleic acid sequence SEQ ID NO. 81576, preferably the coding region thereof, conferred the production of or the increase in succinate compared with the wild type control.

[74448] The nucleic acid sequence of B2866 from Escherichia coli, e.g. as shown in the respective line in column 5 of Table I, application no. 15, has been published in B. And the activity of the gene product thereof is the activity of xanthine dehydrogenase.

[74449] Accordingly, in one embodiment, the process of the present invention for producing succinate in a non-human organism, like a microorganism or a plant or a part thereof, comprises increasing or generating the activity of a gene product with the activity of a gene product conferring the activity of “xanthine dehydrogenase”, especially from Escherichia coli or its functional equivalent or its homolog, e.g. the increase of
[74450] (a) a gene product of a gene comprising the nucleic acid molecule as shown in the respective line in column 5 of Table I (whereby the respective line disclose in column 7 the fine chemical succinate), application no. 15, preferably the coding region thereof, or a homolog or a fragment thereof, and being depicted in the same respective line as said B2866, or a functional equivalent or a homolog thereof as shown in column 8 of Table I, application no. 15, preferably the coding region thereof, particularly a homolog or functional equivalent as shown in column 8 of Table I B, application no. 15, and being depicted in the same respective line as said B2866, and preferably the activity is increased non-targeted, or
[74451] (b) a polypeptide comprising a polypeptide, a consensus sequence or at least a polypeptide motif as shown in the respective line in column 5 of Table II or in column 8 of Table IV, application no. 15, respectively, and being depicted in the same respective line as said B2866, or a functional equivalent or a homolog thereof as depicted in column 8 of Table II, application no. 15, preferably a homolog or functional equivalent as depicted in column 8 of Table II B, application no. 15, and being depicted in the same respective line as said B2866, and preferably the activity is increased non-targeted, whereby the respective line disclose in column 7 the fine chemical succinate.

[74452] Accordingly, in one embodiment, the molecule which activity is to be increased in the process of the invention is the gene product with an activity as a “xanthine dehydrogenase”, preferably it is the molecule of section (a) or (b) of this paragraph.

[74453] In particular, it was observed that in plants, especially in Arabidopsis thaliana, increasing or generating the activity of a gene product non-targeted with the activity of a “xanthine dehydrogenase”, preferably being encoded by a gene comprising the nucleic acid sequence SEQ ID NO. 115864, preferably the coding region thereof, conferred the production of or the increase in succinate compared with the wild type control.

[74454] The nucleic acid sequence of B3008 from Escherichia coli, e.g. as shown in the respective line in column 5 of Table I, application no. 15, has been published in B. And the activity of the gene product thereof is the activity of cystathionine beta-lyase.

[74455] Accordingly, in one embodiment, the process of the present invention for producing succinate in a non-human organism, like a microorganism or a plant or a part thereof, comprises increasing or generating the activity of a gene product with the activity of a gene product conferring the activity of “cystathionine beta-lyase”, especially from Escherichia coli or its functional equivalent or its homolog, e.g. the increase of
[74456] (a) a gene product of a gene comprising the nucleic acid molecule as shown in the respective line in column 5 of Table I (whereby the respective line disclose in column 7 the fine chemical succinate), application no. 15, preferably the coding region thereof, or a homolog or a fragment thereof, and being depicted in the same respective line as said B3008, or a functional equivalent or a homolog thereof as shown in column 8 of Table I, application no. 15, preferably the coding region thereof, particularly a homolog or functional equivalent as shown in column 8 of Table I B, application no. 15, and being depicted in the same respective line as said B3008, and preferably the activity is increased non-targeted, or
[74457] (b) a polypeptide comprising a polypeptide, a consensus sequence or at least a polypeptide motif as shown in the respective line in column 5 of Table II or in column 8 of Table IV, application no. 15, respectively, and being depicted in the same respective line as said B3008, or a functional equivalent or a homolog thereof as depicted in column 8 of Table II, application no. 15, preferably a homolog or functional equivalent as depicted in column 8 of Table II B, application no. 15, and being depicted in the same respective line as said B3008, and preferably the activity is increased non-targeted, whereby the respective line disclose in column 7 the fine chemical succinate.

[74458] Accordingly, in one embodiment, the molecule which activity is to be increased in the process of the invention is the gene product with an activity as a “cystathionine beta-lyase”, preferably it is the molecule of section (a) or (b) of this paragraph.

[74459] In particular, it was observed that in plants, especially in Arabidopsis thaliana, increasing or generating the activity of a gene product non-targeted with the activity of a “cystathionine betalyase”, preferably being encoded by a gene comprising the nucleic acid sequence SEQ ID NO. 135893, preferably the coding region thereof, conferred the production of or the increase in succinate compared with the wild type control.

[74460] The nucleic acid sequence of B3262 from Escherichia coli, e.g. as shown in the respective line in column 5 of Table I, application no. 15, has been published in B. And the activity of the gene product thereof is the activity of methyltransferase.

[74461] Accordingly, in one embodiment, the process of the present invention for producing fumarate in a non-human organism, like a microorganism or a plant or a part thereof, comprises increasing or generating the activity of a gene product with the activity of a gene product conferring the activity of “methyltransferase”, especially from Escherichia coli or its functional equivalent or its homolog, e.g. the increase of
[74462] (a) a gene product of a gene comprising the nucleic acid molecule as shown in the respective line in column 5 of Table I (whereby the respective line disclose in column 7 the fine chemical fumarate), application no. 15, preferably the coding region thereof, or a homolog or a fragment thereof, and being depicted in the same respective line as said B3262, or a functional equivalent or a homolog thereof as shown in column 8 of Table I, application no. 15, preferably the coding region thereof, particularly a homolog or functional equivalent as shown in column 8 of Table I B, application no. 15, and being depicted in the same respective line as said B3262, and preferably the activity is increased non-targeted, or
[74463] (b) a polypeptide comprising a polypeptide, a consensus sequence or at least a polypeptide motif as shown in the respective line in column 5 of Table II or in column 8 of Table IV, application no. 15, respectively, and being depicted in the same respective line as said B3262, or a functional equivalent or a homolog thereof as depicted in column 8 of Table II, application no. 15, preferably a homolog or functional equivalent as depicted in column 8 of Table II B, application no. 15, and being depicted in the same respective line as said B3262, and preferably the activity is increased non-targeted, whereby the respective line disclose in column 7 the fine chemical fumarate.

[74464] Accordingly, in one embodiment, the molecule which activity is to be increased in the process of the invention is the gene product with an activity as a “methyltransferase”, preferably it is the molecule of section (a) or (b) of this paragraph.

[74465] In particular, it was observed that in plants, especially in Arabidopsis thaliana, increasing or generating the activity of a gene product non-targeted with the activity of a “methyltransferase”, preferably being encoded by a gene comprising the nucleic acid sequence SEQ ID NO. 42502, preferably the coding region thereof, conferred the production of or the increase in fumarate compared with the wild type control.

[74466] The nucleic acid sequence of B3262 from Escherichia coli, e.g. as shown in the respective line in column 5 of Table I, application no. 15, has been published in B. And the activity of the gene product thereof is the activity of methyltransferase.

[74467] Accordingly, in one embodiment, the process of the present invention for producing malate in a non-human organism, like a microorganism or a plant or a part thereof, comprises increasing or generating the activity of a gene product with the activity of a gene product conferring the activity of “methyltransferase”, especially from Escherichia coli or its functional equivalent or its homolog, e.g. the increase of
[74468] (a) a gene product of a gene comprising the nucleic acid molecule as shown in the respective line in column 5 of Table I (whereby the respective line disclose in column 7 the fine chemical malate), application no. 15, preferably the coding region thereof, or a homolog or a fragment thereof, and being depicted in the same respective line as said B3262, or a functional equivalent or a homolog thereof as shown in column 8 of Table I, application no. 15, preferably the coding region thereof, particularly a homolog or functional equivalent as shown in column 8 of Table I B, application no. 15, and being depicted in the same respective line as said B3262, and preferably the activity is increased non-targeted, or
[74469] (b) a polypeptide comprising a polypeptide, a consensus sequence or at least a polypeptide motif as shown in the respective line in column 5 of Table II or in column 8 of Table IV, application no. 15, respectively, and being depicted in the same respective line as said B3262, or a functional equivalent or a homolog thereof as depicted in column 8 of Table II, application no. 15, preferably a homolog or functional equivalent as depicted in column 8 of Table II B, application no. 15, and being depicted in the same respective line as said B3262, and preferably the activity is increased non-targeted, whereby the respective line disclose in column 7 the fine chemical malate.

[74470] Accordingly, in one embodiment, the molecule which activity is to be increased in the process of the invention is the gene product with an activity as a “methyltransferase”, preferably it is the molecule of section (a) or (b) of this paragraph.

[74471] In particular, it was observed that in plants, especially in Arabidopsis thaliana, increasing or generating the activity of a gene product non-targeted with the activity of a “methyltransferase”, preferably being encoded by a gene comprising the nucleic acid sequence SEQ ID NO. 42502, preferably the coding region thereof, conferred the production of or the increase in malate compared with the wild type control.

[74472] The nucleic acid sequence of B3624 from Escherichia coli, e.g. as shown in the respective line in column 5 of Table I, application no. 15, has been published in B. And the activity of the gene product thereof is the activity of lipopolysaccharide core biosynthesis protein.

[74473] Accordingly, in one embodiment, the process of the present invention for producing fumarate in a non-human organism, like a microorganism or a plant or a part thereof, comprises increasing or generating the activity of a gene product with the activity of a gene product conferring the activity of “lipopolysaccharide core biosynthesis protein”, especially from Escherichia coli or its functional equivalent or its homolog, e.g. the increase of
[74474] (a) a gene product of a gene comprising the nucleic acid molecule as shown in the respective line in column 5 of Table I (whereby the respective line disclose in column 7 the fine chemical fumarate), application no. 15, preferably the coding region thereof, or a homolog or a fragment thereof, and being depicted in the same respective line as said B3624, or a functional equivalent or a homolog thereof as shown in column 8 of Table I, application no. 15, preferably the coding region thereof, particularly a homolog or functional equivalent as shown in column 8 of Table I B, application no. 15, and being depicted in the same respective line as said B3624, and preferably the activity is increased non-targeted, or
[74475] (b) a polypeptide comprising a polypeptide, a consensus sequence or at least a polypeptide motif as shown in the respective line in column 5 of Table II or in column 8 of Table IV, application no. 15, respectively, and being depicted in the same respective line as said B3624, or a functional equivalent or a homolog thereof as depicted in column 8 of Table II, application no. 15, preferably a homolog or functional equivalent as depicted in column 8 of Table II B, application no. 15, and being depicted in the same respective line as said B3624, and preferably the activity is increased non-targeted, whereby the respective line disclose in column 7 the fine chemical fumarate.

[74476] Accordingly, in one embodiment, the molecule which activity is to be increased in the process of the invention is the gene product with an activity as a “lipopolysaccharide core biosynthesis protein”, preferably it is the molecule of section (a) or (b) of this paragraph.

[74477] In particular, it was observed that in plants, especially in Arabidopsis thaliana, increasing or generating the activity of a gene product non-targeted with the activity of a “lipopolysaccharide core biosynthesis protein”, preferably being encoded by a gene comprising the nucleic acid sequence SEQ ID NO. 136077, preferably the coding region thereof, conferred the production of or the increase in fumarate compared with the wild type control.

[74478] The nucleic acid sequence of B3777 from Escherichia coli, e.g. as shown in the respective line in column 5 of Table I, application no. 15, has been published in B. And the activity of the gene product thereof is the activity of b3777-protein.

[74479] Accordingly, in one embodiment, the process of the present invention for producing succinate in a non-human organism, like a microorganism or a plant or a part thereof, comprises increasing or generating the activity of a gene product with the activity of a gene product conferring the activity of “b3777-protein”, especially from Escherichia coli or its functional equivalent or its homolog, e.g. the increase of
[74480] (a) a gene product of a gene comprising the nucleic acid molecule as shown in the respective line in column 5 of Table I (whereby the respective line disclose in column 7 the fine chemical succinate), application no. 15, preferably the coding region thereof, or a homolog or a fragment thereof, and being depicted in the same respective line as said B3777, or a functional equivalent or a homolog thereof as shown in column 8 of Table I, application no. 15, preferably the coding region thereof, particularly a homolog or functional equivalent as shown in column 8 of Table I B, application no. 15, and being depicted in the same respective line as said B3777, and preferably the activity is increased non-targeted, or
[74481] (b) a polypeptide comprising a polypeptide, a consensus sequence or at least a polypeptide motif as shown in the respective line in column 5 of Table II or in column 8 of Table IV, application no. 15, respectively, and being depicted in the same respective line as said B3777, or a functional equivalent or a homolog thereof as depicted in column 8 of Table II, application no. 15, preferably a homolog or functional equivalent as depicted in column 8 of Table II B, application no. 15, and being depicted in the same respective line as said B3777, and preferably the activity is increased non-targeted, whereby the respective line disclose in column 7 the fine chemical succinate.

[74482] Accordingly, in one embodiment, the molecule which activity is to be increased in the process of the invention is the gene product with an activity as a “b3777-protein”, preferably it is the molecule of section (a) or (b) of this paragraph.

[74483] In particular, it was observed that in plants, especially in Arabidopsis thaliana, increasing or generating the activity of a gene product non-targeted with the activity of a “b3777-protein”, preferably being encoded by a gene comprising the nucleic acid sequence SEQ ID NO. 136098, preferably the coding region thereof, conferred the production of or the increase in succinate compared with the wild type control.

[74484] The nucleic acid sequence of B3791 from Escherichia coli, e.g. as shown in the respective line in column 5 of Table I, application no. 15, has been published in B. And the activity of the gene product thereof is the activity of b3791-protein.

[74485] Accordingly, in one embodiment, the process of the present invention for producing malate in a non-human organism, like a microorganism or a plant or a part thereof, comprises increasing or generating the activity of a gene product with the activity of a gene product conferring the activity of “b3791-protein”, especially from Escherichia coli or its functional equivalent or its homolog, e.g. the increase of
[74486] (a) a gene product of a gene comprising the nucleic acid molecule as shown in the respective line in column 5 of Table I (whereby the respective line disclose in column 7 the fine chemical malate), application no. 15, preferably the coding region thereof, or a homolog or a fragment thereof, and being depicted in the same respective line as said B3791, or a functional equivalent or a homolog thereof as shown in column 8 of Table I, application no. 15, preferably the coding region thereof, particularly a homolog or functional equivalent as shown in column 8 of Table I B, application no. 15, and being depicted in the same respective line as said B3791, and preferably the activity is increased non-targeted, or
[74487] (b) a polypeptide comprising a polypeptide, a consensus sequence or at least a polypeptide motif as shown in the respective line in column 5 of Table II or in column 8 of Table IV, application no. 15, respectively, and being depicted in the same respective line as said B3791, or a functional equivalent or a homolog thereof as depicted in column 8 of Table II, application no. 15, preferably a homolog or functional equivalent as depicted in column 8 of Table II B, application no. 15, and being depicted in the same respective line as said B3791, and preferably the activity is increased non-targeted, whereby the respective line disclose in column 7 the fine chemical malate.

[74488] Accordingly, in one embodiment, the molecule which activity is to be increased in the process of the invention is the gene product with an activity as a “b3791-protein”, preferably it is the molecule of section (a) or (b) of this paragraph.

[74489] In particular, it was observed that in plants, especially in Arabidopsis thaliana, increasing or generating the activity of a gene product non-targeted with the activity of a “b3791-protein”, preferably being encoded by a gene comprising the nucleic acid sequence SEQ ID NO. 83726, preferably the coding region thereof, conferred the production of or the increase in malate compared with the wild type control.

[74490] The nucleic acid sequence of B3791 from Escherichia coli, e.g. as shown in the respective line in column 5 of Table I, application no. 15, has been published in B. And the activity of the gene product thereof is the activity of b3791-protein.

[74491] Accordingly, in one embodiment, the process of the present invention for producing succinate in a non-human organism, like a microorganism or a plant or a part thereof, comprises increasing or generating the activity of a gene product with the activity of a gene product conferring the activity of “b3791-protein”, especially from Escherichia coli or its functional equivalent or its homolog, e.g. the increase of
[74492] (a) a gene product of a gene comprising the nucleic acid molecule as shown in the respective line in column 5 of Table I (whereby the respective line disclose in column 7 the fine chemical succinate), application no. 15, preferably the coding region thereof, or a homolog or a fragment thereof, and being depicted in the same respective line as said B3791, or a functional equivalent or a homolog thereof as shown in column 8 of Table I, application no. 15, preferably the coding region thereof, particularly a homolog or functional equivalent as shown in column 8 of Table I B, application no. 15, and being depicted in the same respective line as said B3791, and preferably the activity is increased non-targeted, or
[74493] (b) a polypeptide comprising a polypeptide, a consensus sequence or at least a polypeptide motif as shown in the respective line in column 5 of Table II or in column 8 of Table IV, application no. 15, respectively, and being depicted in the same respective line as said B3791, or a functional equivalent or a homolog thereof as depicted in column 8 of Table II, application no. 15, preferably a homolog or functional equivalent as depicted in column 8 of Table II B, application no. 15, and being depicted in the same respective line as said B3791, and preferably the activity is increased non-targeted, whereby the respective line disclose in column 7 the fine chemical succinate.

[74494] Accordingly, in one embodiment, the molecule which activity is to be increased in the process of the invention is the gene product with an activity as a “b3791-protein”, preferably it is the molecule of section (a) or (b) of this paragraph.

[74495] In particular, it was observed that in plants, especially in Arabidopsis thaliana, increasing or generating the activity of a gene product non-targeted with the activity of a “b3791-protein”, preferably being encoded by a gene comprising the nucleic acid sequence SEQ ID NO. 83726, preferably the coding region thereof, conferred the production of or the increase in succinate compared with the wild type control.

[74496] The nucleic acid sequence of B3814 from Escherichia coli, e.g. as shown in the respective line in column 5 of Table I, application no. 15, has been published in B. And the activity of the gene product thereof is the activity of b3814-protein.

[74497] Accordingly, in one embodiment, the process of the present invention for producing citramalate in a non-human organism, like a microorganism or a plant or a part thereof, comprises increasing or generating the activity of a gene product with the activity of a gene product conferring the activity of “b3814-protein”, especially from Escherichia coli or its functional equivalent or its homolog, e.g. the increase of
[74498] (a) a gene product of a gene comprising the nucleic acid molecule as shown in the respective line in column 5 of Table I (whereby the respective line disclose in column 7 the fine chemical citramalate), application no. 15, preferably the coding region thereof, or a homolog or a fragment thereof, and being depicted in the same respective line as said B3814, or a functional equivalent or a homolog thereof as shown in column 8 of Table I, application no. 15, preferably the coding region thereof, particularly a homolog or functional equivalent as shown in column 8 of Table I B, application no. 15, and being depicted in the same respective line as said B3814, and preferably the activity is increased non-targeted, or
[74499] (b) a polypeptide comprising a polypeptide, a consensus sequence or at least a polypeptide motif as shown in the respective line in column 5 of Table II or in column 8 of Table IV, application no. 15, respectively, and being depicted in the same respective line as said B3814, or a functional equivalent or a homolog thereof as depicted in column 8 of Table II, application no. 15, preferably a homolog or functional equivalent as depicted in column 8 of Table II B, application no. 15, and being depicted in the same respective line as said B3814, and preferably the activity is increased non-targeted, whereby the respective line disclose in column 7 the fine chemical citramalate.

[74500] Accordingly, in one embodiment, the molecule which activity is to be increased in the process of the invention is the gene product with an activity as a “b3814-protein”, preferably it is the molecule of section (a) or (b) of this paragraph.

[74501] In particular, it was observed that in plants, especially in Arabidopsis thaliana, increasing or generating the activity of a gene product non-targeted with the activity of a “b3814-protein”, preferably being encoded by a gene comprising the nucleic acid sequence SEQ ID NO. 44196, preferably the coding region thereof, conferred the production of or the increase in citramalate compared with the wild type control.

[74502] The nucleic acid sequence of B3817 from Escherichia coli, e.g. as shown in the respective line in column 5 of Table I, application no. 15, has been published in B. And the activity of the gene product thereof is the activity of b3817-protein.

[74503] Accordingly, in one embodiment, the process of the present invention for producing fumarate in a non-human organism, like a microorganism or a plant or a part thereof, comprises increasing or generating the activity of a gene product with the activity of a gene product conferring the activity of “b3817-protein”, especially from Escherichia coli or its functional equivalent or its homolog, e.g. the increase of
[74504] (a) a gene product of a gene comprising the nucleic acid molecule as shown in the respective line in column 5 of Table I (whereby the respective line disclose in column 7 the fine chemical fumarate), application no. 15, preferably the coding region thereof, or a homolog or a fragment thereof, and being depicted in the same respective line as said B3817, or a functional equivalent or a homolog thereof as shown in column 8 of Table I, application no. 15, preferably the coding region thereof, particularly a homolog or functional equivalent as shown in column 8 of Table I B, application no. 15, and being depicted in the same respective line as said B3817, and preferably the activity is increased non-targeted, or
[74505] (b) a polypeptide comprising a polypeptide, a consensus sequence or at least a polypeptide motif as shown in the respective line in column 5 of Table II or in column 8 of Table IV, application no. 15, respectively, and being depicted in the same respective line as said B3817, or a functional equivalent or a homolog thereof as depicted in column 8 of Table II, application no. 15, preferably a homolog or functional equivalent as depicted in column 8 of Table II B, application no. 15, and being depicted in the same respective line as said B3817, and preferably the activity is increased non-targeted, whereby the respective line disclose in column 7 the fine chemical fumarate.

[74506] Accordingly, in one embodiment, the molecule which activity is to be increased in the process of the invention is the gene product with an activity as a “b3817-protein”, preferably it is the molecule of section (a) or (b) of this paragraph.

[74507] In particular, it was observed that in plants, especially in Arabidopsis thaliana, increasing or generating the activity of a gene product non-targeted with the activity of a “b3817-protein”, preferably being encoded by a gene comprising the nucleic acid sequence SEQ ID NO. 10708, preferably the coding region thereof, conferred the production of or the increase in fumarate compared with the wild type control.

[74508] The nucleic acid sequence of B3823 from Escherichia coli, e.g. as shown in the respective line in column 5 of Table I, application no. 15, has been published in B. And the activity of the gene product thereof is the activity of threonine efflux protein.

[74509] Accordingly, in one embodiment, the process of the present invention for producing citramalate in a non-human organism, like a microorganism or a plant or a part thereof, comprises increasing or generating the activity of a gene product with the activity of a gene product conferring the activity of “threonine efflux protein”, especially from Escherichia coli or its functional equivalent or its homolog, e.g. the increase of
[74510] (a) a gene product of a gene comprising the nucleic acid molecule as shown in the respective line in column 5 of Table I (whereby the respective line disclose in column 7 the fine chemical citramalate), application no. 15, preferably the coding region thereof, or a homolog or a fragment thereof, and being depicted in the same respective line as said B3823, or a functional equivalent or a homolog thereof as shown in column 8 of Table I, application no. 15, preferably the coding region thereof, particularly a homolog or functional equivalent as shown in column 8 of Table I B, application no. 15, and being depicted in the same respective line as said B3823, and preferably the activity is increased non-targeted, or
[74511] (b) a polypeptide comprising a polypeptide, a consensus sequence or at least a polypeptide motif as shown in the respective line in column 5 of Table II or in column 8 of Table IV, application no. 15, respectively, and being depicted in the same respective line as said B3823, or a functional equivalent or a homolog thereof as depicted in column 8 of Table II, application no. 15, preferably a homolog or functional equivalent as depicted in column 8 of Table II B, application no. 15, and being depicted in the same respective line as said B3823, and preferably the activity is increased non-targeted, whereby the respective line disclose in column 7 the fine chemical citramalate.

[74512] Accordingly, in one embodiment, the molecule which activity is to be increased in the process of the invention is the gene product with an activity as a “threonine efflux protein”, preferably it is the molecule of section (a) or (b) of this paragraph.

[74513] In particular, it was observed that in plants, especially in Arabidopsis thaliana, increasing or generating the activity of a gene product non-targeted with the activity of a “threonine efflux protein”, preferably being encoded by a gene comprising the nucleic acid sequence SEQ ID NO. 10726, preferably the coding region thereof, conferred the production of or the increase in citramalate compared with the wild type control.

[74514] The nucleic acid sequence of B3823 from Escherichia coli, e.g. as shown in the respective line in column 5 of Table I, application no. 15, has been published in B. And the activity of the gene product thereof is the activity of threonine efflux protein.

[74515] Accordingly, in one embodiment, the process of the present invention for producing malate in a non-human organism, like a microorganism or a plant or a part thereof, comprises increasing or generating the activity of a gene product with the activity of a gene product conferring the activity of “threonine efflux protein”, especially from Escherichia coli or its functional equivalent or its homolog, e.g. the increase of
[74516] (a) a gene product of a gene comprising the nucleic acid molecule as shown in the respective line in column 5 of Table I (whereby the respective line disclose in column 7 the fine chemical malate), application no. 15, preferably the coding region thereof, or a homolog or a fragment thereof, and being depicted in the same respective line as said B3823, or a functional equivalent or a homolog thereof as shown in column 8 of Table I, application no. 15, preferably the coding region thereof, particularly a homolog or functional equivalent as shown in column 8 of Table I B, application no. 15, and being depicted in the same respective line as said B3823, and preferably the activity is increased non-targeted, or
[74517] (b) a polypeptide comprising a polypeptide, a consensus sequence or at least a polypeptide motif as shown in the respective line in column 5 of Table II or in column 8 of Table IV, application no. 15, respectively, and being depicted in the same respective line as said B3823, or a functional equivalent or a homolog thereof as depicted in column 8 of Table II, application no. 15, preferably a homolog or functional equivalent as depicted in column 8 of Table II B, application no. 15, and being depicted in the same respective line as said B3823, and preferably the activity is increased non-targeted, whereby the respective line disclose in column 7 the fine chemical malate.

[74518] Accordingly, in one embodiment, the molecule which activity is to be increased in the process of the invention is the gene product with an activity as a “threonine efflux protein”, preferably it is the molecule of section (a) or (b) of this paragraph.

[74519] In particular, it was observed that in plants, especially in Arabidopsis thaliana, increasing or generating the activity of a gene product non-targeted with the activity of a “threonine efflux protein”, preferably being encoded by a gene comprising the nucleic acid sequence SEQ ID NO. 10726, preferably the coding region thereof, conferred the production of or the increase in malate compared with the wild type control.

[74520] The nucleic acid sequence of B3989 from Escherichia coli, e.g. as shown in the respective line in column 5 of Table I, application no. 15, has been published in B. And the activity of the gene product thereof is the activity of b3989-protein.

[74521] Accordingly, in one embodiment, the process of the present invention for producing succinate in a non-human organism, like a microorganism or a plant or a part thereof, comprises increasing or generating the activity of a gene product with the activity of a gene product conferring the activity of “b3989-protein”, especially from Escherichia coli or its functional equivalent or its homolog, e.g. the increase of
[74522] (a) a gene product of a gene comprising the nucleic acid molecule as shown in the respective line in column 5 of Table I (whereby the respective line disclose in column 7 the fine chemical succinate), application no. 15, preferably the coding region thereof, or a homolog or a fragment thereof, and being depicted in the same respective line as said B3989, or a functional equivalent or a homolog thereof as shown in column 8 of Table I, application no. 15, preferably the coding region thereof, particularly a homolog or functional equivalent as shown in column 8 of Table I B, application no. 15, and being depicted in the same respective line as said B3989, and preferably the activity is increased non-targeted, or
[74523] (b) a polypeptide comprising a polypeptide, a consensus sequence or at least a polypeptide motif as shown in the respective line in column 5 of Table II or in column 8 of Table IV, application no. 15, respectively, and being depicted in the same respective line as said B3989, or a functional equivalent or a homolog thereof as depicted in column 8 of Table II, application no. 15, preferably a homolog or functional equivalent as depicted in column 8 of Table II B, application no. 15, and being depicted in the same respective line as said B3989, and preferably the activity is increased non-targeted, whereby the respective line disclose in column 7 the fine chemical succinate.

[74524] Accordingly, in one embodiment, the molecule which activity is to be increased in the process of the invention is the gene product with an activity as a “b3989-protein”, preferably it is the molecule of section (a) or (b) of this paragraph.

[74525] In particular, it was observed that in plants, especially in Arabidopsis thaliana, increasing or generating the activity of a gene product non-targeted with the activity of a “b3989-protein”, preferably being encoded by a gene comprising the nucleic acid sequence SEQ ID NO. 44372, preferably the coding region thereof, conferred the production of or the increase in succinate compared with the wild type control.

[74526] The nucleic acid sequence of B4012 from Escherichia coli, e.g. as shown in the respective line in column 5 of Table I, application no. 15, has been published in B. And the activity of the gene product thereof is the activity of acetyltransferase.

[74527] Accordingly, in one embodiment, the process of the present invention for producing fumarate in a non-human organism, like a microorganism or a plant or a part thereof, comprises increasing or generating the activity of a gene product with the activity of a gene product conferring the activity of “acetyltransferase”, especially from Escherichia coli or its functional equivalent or its homolog, e.g. the increase of
[74528] (a) a gene product of a gene comprising the nucleic acid molecule as shown in the respective line in column 5 of Table I (whereby the respective line disclose in column 7 the fine chemical fumarate), application no. 15, preferably the coding region thereof, or a homolog or a fragment thereof, and being depicted in the same respective line as said B4012, or a functional equivalent or a homolog thereof as shown in column 8 of Table I, application no. 15, preferably the coding region thereof, particularly a homolog or functional equivalent as shown in column 8 of Table I B, application no. 15, and being depicted in the same respective line as said B4012, and preferably the activity is increased non-targeted, or
[74529] (b) a polypeptide comprising a polypeptide, a consensus sequence or at least a polypeptide motif as shown in the respective line in column 5 of Table II or in column 8 of Table IV, application no. 15, respectively, and being depicted in the same respective line as said B4012, or a functional equivalent or a homolog thereof as depicted in column 8 of Table II, application no. 15, preferably a homolog or functional equivalent as depicted in column 8 of Table II B, application no. 15, and being depicted in the same respective line as said B4012, and preferably the activity is increased non-targeted, whereby the respective line disclose in column 7 the fine chemical fumarate.

[74530] Accordingly, in one embodiment, the molecule which activity is to be increased in the process of the invention is the gene product with an activity as a “acetyltransferase”, preferably it is the molecule of section (a) or (b) of this paragraph.

[74531] In particular, it was observed that in plants, especially in Arabidopsis thaliana, increasing or generating the activity of a gene product non-targeted with the activity of a “acetyltransferase”, preferably being encoded by a gene comprising the nucleic acid sequence SEQ ID NO. 44378, preferably the coding region thereof, conferred the production of or the increase in fumarate compared with the wild type control.

[74532] The nucleic acid sequence of B4029 from Escherichia coli, e.g. as shown in the respective line in column 5 of Table I, application no. 15, has been published in B. And the activity of the gene product thereof is the activity of b4029-protein.

[74533] Accordingly, in one embodiment, the process of the present invention for producing fumarate in a non-human organism, like a microorganism or a plant or a part thereof, comprises increasing or generating the activity of a gene product with the activity of a gene product conferring the activity of “b4029-protein”, especially from Escherichia coli or its functional equivalent or its homolog, e.g. the increase of
[74534] (a) a gene product of a gene comprising the nucleic acid molecule as shown in the respective line in column 5 of Table I (whereby the respective line disclose in column 7 the fine chemical fumarate), application no. 15, preferably the coding region thereof, or a homolog or a fragment thereof, and being depicted in the same respective line as said B4029, or a functional equivalent or a homolog thereof as shown in column 8 of Table I, application no. 15, preferably the coding region thereof, particularly a homolog or functional equivalent as shown in column 8 of Table I B, application no. 15, and being depicted in the same respective line as said B4029, and preferably the activity is increased non-targeted, or
[74535] (b) a polypeptide comprising a polypeptide, a consensus sequence or at least a polypeptide motif as shown in the respective line in column 5 of Table II or in column 8 of Table IV, application no. 15, respectively, and being depicted in the same respective line as said B4029, or a functional equivalent or a homolog thereof as depicted in column 8 of Table II, application no. 15, preferably a homolog or functional equivalent as depicted in column 8 of Table II B, application no. 15, and being depicted in the same respective line as said B4029, and preferably the activity is increased non-targeted, whereby the respective line disclose in column 7 the fine chemical fumarate.

[74536] Accordingly, in one embodiment, the molecule which activity is to be increased in the process of the invention is the gene product with an activity as a “b4029-protein”, preferably it is the molecule of section (a) or (b) of this paragraph.

[74537] In particular, it was observed that in plants, especially in Arabidopsis thaliana, increasing or generating the activity of a gene product non-targeted with the activity of a “b4029-protein”, preferably being encoded by a gene comprising the nucleic acid sequence SEQ ID NO. 10740, preferably the coding region thereof, conferred the production of or the increase in fumarate compared with the wild type control.

[74538] The nucleic acid sequence of B4029 from Escherichia coli, e.g. as shown in the respective line in column 5 of Table I, application no. 15, has been published in B. And the activity of the gene product thereof is the activity of b4029-protein.

[74539] Accordingly, in one embodiment, the process of the present invention for producing malate in a non-human organism, like a microorganism or a plant or a part thereof, comprises increasing or generating the activity of a gene product with the activity of a gene product conferring the activity of “b4029-protein”, especially from Escherichia coli or its functional equivalent or its homolog, e.g. the increase of
[74540] (a) a gene product of a gene comprising the nucleic acid molecule as shown in the respective line in column 5 of Table I (whereby the respective line disclose in column 7 the fine chemical malate), application no. 15, preferably the coding region thereof, or a homolog or a fragment thereof, and being depicted in the same respective line as said B4029, or a functional equivalent or a homolog thereof as shown in column 8 of Table I, application no. 15, preferably the coding region thereof, particularly a homolog or functional equivalent as shown in column 8 of Table I B, application no. 15, and being depicted in the same respective line as said B4029, and preferably the activity is increased non-targeted, or
[74541] (b) a polypeptide comprising a polypeptide, a consensus sequence or at least a polypeptide motif as shown in the respective line in column 5 of Table II or in column 8 of Table IV, application no. 15, respectively, and being depicted in the same respective line as said B4029, or a functional equivalent or a homolog thereof as depicted in column 8 of Table II, application no. 15, preferably a homolog or functional equivalent as depicted in column 8 of Table II B, application no. 15, and being depicted in the same respective line as said B4029, and preferably the activity is increased non-targeted, whereby the respective line disclose in column 7 the fine chemical malate.

[74542] Accordingly, in one embodiment, the molecule which activity is to be increased in the process of the invention is the gene product with an activity as a “b4029-protein”, preferably it is the molecule of section (a) or (b) of this paragraph.

[74543] In particular, it was observed that in plants, especially in Arabidopsis thaliana, increasing or generating the activity of a gene product non-targeted with the activity of a “b4029-protein”, preferably being encoded by a gene comprising the nucleic acid sequence SEQ ID NO. 10740, preferably the coding region thereof, conferred the production of or the increase in malate compared with the wild type control.

[74544] The nucleic acid sequence of B4029 from Escherichia coli, e.g. as shown in the respective line in column 5 of Table I, application no. 15, has been published in B. And the activity of the gene product thereof is the activity of b4029-protein.

[74545] Accordingly, in one embodiment, the process of the present invention for producing succinate in a non-human organism, like a microorganism or a plant or a part thereof, comprises increasing or generating the activity of a gene product with the activity of a gene product conferring the activity of “b4029-protein”, especially from Escherichia coli or its functional equivalent or its homolog, e.g. the increase of
[74546] (a) a gene product of a gene comprising the nucleic acid molecule as shown in the respective line in column 5 of Table I (whereby the respective line disclose in column 7 the fine chemical succinate), application no. 15, preferably the coding region thereof, or a homolog or a fragment thereof, and being depicted in the same respective line as said B4029, or a functional equivalent or a homolog thereof as shown in column 8 of Table I, application no. 15, preferably the coding region thereof, particularly a homolog or functional equivalent as shown in column 8 of Table I B, application no. 15, and being depicted in the same respective line as said B4029, and preferably the activity is increased non-targeted, or
[74547] (b) a polypeptide comprising a polypeptide, a consensus sequence or at least a polypeptide motif as shown in the respective line in column 5 of Table II or in column 8 of Table IV, application no. 15, respectively, and being depicted in the same respective line as said B4029, or a functional equivalent or a homolog thereof as depicted in column 8 of Table II, application no. 15, preferably a homolog or functional equivalent as depicted in column 8 of Table II B, application no. 15, and being depicted in the same respective line as said B4029, and preferably the activity is increased non-targeted, whereby the respective line disclose in column 7 the fine chemical succinate.

[74548] Accordingly, in one embodiment, the molecule which activity is to be increased in the process of the invention is the gene product with an activity as a “b4029-protein”, preferably it is the molecule of section (a) or (b) of this paragraph.

[74549] In particular, it was observed that in plants, especially in Arabidopsis thaliana, increasing or generating the activity of a gene product non-targeted with the activity of a “b4029-protein”, preferably being encoded by a gene comprising the nucleic acid sequence SEQ ID NO. 10740, preferably the coding region thereof, conferred the production of or the increase in succinate compared with the wild type control.

[74550] The nucleic acid sequence of B4050 from Escherichia coli, e.g. as shown in the respective line in column 5 of Table I, application no. 15, has been published in B. And the activity of the gene product thereof is the activity of b4050-protein.

[74551] Accordingly, in one embodiment, the process of the present invention for producing fumarate in a non-human organism, like a microorganism or a plant or a part thereof, comprises increasing or generating the activity of a gene product with the activity of a gene product conferring the activity of “b4050-protein”, especially from Escherichia coli or its functional equivalent or its homolog, e.g. the increase of
[74552] (a) a gene product of a gene comprising the nucleic acid molecule as shown in the respective line in column 5 of Table I (whereby the respective line disclose in column 7 the fine chemical fumarate), application no. 15, preferably the coding region thereof, or a homolog or a fragment thereof, and being depicted in the same respective line as said B4050, or a functional equivalent or a homolog thereof as shown in column 8 of Table I, application no. 15, preferably the coding region thereof, particularly a homolog or functional equivalent as shown in column 8 of Table I B, application no. 15, and being depicted in the same respective line as said B4050, and preferably the activity is increased non-targeted, or
[74553] (b) a polypeptide comprising a polypeptide, a consensus sequence or at least a polypeptide motif as shown in the respective line in column 5 of Table II or in column 8 of Table IV, application no. 15, respectively, and being depicted in the same respective line as said B4050, or a functional equivalent or a homolog thereof as depicted in column 8 of Table II, application no. 15, preferably a homolog or functional equivalent as depicted in column 8 of Table II B, application no. 15, and being depicted in the same respective line as said B4050, and preferably the activity is increased non-targeted, whereby the respective line disclose in column 7 the fine chemical fumarate.

[74554] Accordingly, in one embodiment, the molecule which activity is to be increased in the process of the invention is the gene product with an activity as a “b4050-protein”, preferably it is the molecule of section (a) or (b) of this paragraph.

[74555] In particular, it was observed that in plants, especially in Arabidopsis thaliana, increasing or generating the activity of a gene product non-targeted with the activity of a “b4050-protein”, preferably being encoded by a gene comprising the nucleic acid sequence SEQ ID NO. 106532, preferably the coding region thereof, conferred the production of or the increase in fumarate compared with the wild type control.

[74556] The nucleic acid sequence of B4050 from Escherichia coli, e.g. as shown in the respective line in column 5 of Table I, application no. 15, has been published in B. And the activity of the gene product thereof is the activity of b4050-protein.

[74557] Accordingly, in one embodiment, the process of the present invention for producing malate in a non-human organism, like a microorganism or a plant or a part thereof, comprises increasing or generating the activity of a gene product with the activity of a gene product conferring the activity of “b4050-protein”, especially from Escherichia coli or its functional equivalent or its homolog, e.g. the increase of
[74558] (a) a gene product of a gene comprising the nucleic acid molecule as shown in the respective line in column 5 of Table I (whereby the respective line disclose in column 7 the fine chemical malate), application no. 15, preferably the coding region thereof, or a homolog or a fragment thereof, and being depicted in the same respective line as said B4050, or a functional equivalent or a homolog thereof as shown in column 8 of Table I, application no. 15, preferably the coding region thereof, particularly a homolog or functional equivalent as shown in column 8 of Table I B, application no. 15, and being depicted in the same respective line as said B4050, and preferably the activity is increased non-targeted, or
[74559] (b) a polypeptide comprising a polypeptide, a consensus sequence or at least a polypeptide motif as shown in the respective line in column 5 of Table II or in column 8 of Table IV, application no. 15, respectively, and being depicted in the same respective line as said B4050, or a functional equivalent or a homolog thereof as depicted in column 8 of Table II, application no. 15, preferably a homolog or functional equivalent as depicted in column 8 of Table II B, application no. 15, and being depicted in the same respective line as said B4050, and preferably the activity is increased non-targeted, whereby the respective line disclose in column 7 the fine chemical malate.

[74560] Accordingly, in one embodiment, the molecule which activity is to be increased in the process of the invention is the gene product with an activity as a “b4050-protein”, preferably it is the molecule of section (a) or (b) of this paragraph.

[74561] In particular, it was observed that in plants, especially in Arabidopsis thaliana, increasing or generating the activity of a gene product non-targeted with the activity of a “b4050-protein”, preferably being encoded by a gene comprising the nucleic acid sequence SEQ ID NO. 106532, preferably the coding region thereof, conferred the production of or the increase in malate compared with the wild type control.

[74562] The nucleic acid sequence of B4056 from Escherichia coli, e.g. as shown in the respective line in column 5 of Table I, application no. 15, has been published in B. And the activity of the gene product thereof is the activity of b4056-protein.

[74563] Accordingly, in one embodiment, the process of the present invention for producing citramalate in a non-human organism, like a microorganism or a plant or a part thereof, comprises increasing or generating the activity of a gene product with the activity of a gene product conferring the activity of “b4056-protein”, especially from Escherichia coli or its functional equivalent or its homolog, e.g. the increase of
[74564] (a) a gene product of a gene comprising the nucleic acid molecule as shown in the respective line in column 5 of Table I (whereby the respective line disclose in column 7 the fine chemical citramalate), application no. 15, preferably the coding region thereof, or a homolog or a fragment thereof, and being depicted in the same respective line as said B4056, or a functional equivalent or a homolog thereof as shown in column 8 of Table I, application no. 15, preferably the coding region thereof, particularly a homolog or functional equivalent as shown in column 8 of Table I B, application no. 15, and being depicted in the same respective line as said B4056, and preferably the activity is increased non-targeted, or
[74565] (b) a polypeptide comprising a polypeptide, a consensus sequence or at least a polypeptide motif as shown in the respective line in column 5 of Table II or in column 8 of Table IV, application no. 15, respectively, and being depicted in the same respective line as said B4056, or a functional equivalent or a homolog thereof as depicted in column 8 of Table II, application no. 15, preferably a homolog or functional equivalent as depicted in column 8 of Table II B, application no. 15, and being depicted in the same respective line as said B4056, and preferably the activity is increased non-targeted, whereby the respective line disclose in column 7 the fine chemical citramalate.

[74566] Accordingly, in one embodiment, the molecule which activity is to be increased in the process of the invention is the gene product with an activity as a “b4056-protein”, preferably it is the molecule of section (a) or (b) of this paragraph.

[74567] In particular, it was observed that in plants, especially in Arabidopsis thaliana, increasing or generating the activity of a gene product non-targeted with the activity of a “b4056-protein”, preferably being encoded by a gene comprising the nucleic acid sequence SEQ ID NO. 94542, preferably the coding region thereof, conferred the production of or the increase in citramalate compared with the wild type control.

[74568] The nucleic acid sequence of B4139 from Escherichia coli, e.g. as shown in the respective line in column 5 of Table I, application no. 15, has been published in B. And the activity of the gene product thereof is the activity of aspartase.

[74569] Accordingly, in one embodiment, the process of the present invention for producing citrate in a non-human organism, like a microorganism or a plant or a part thereof, comprises increasing or generating the activity of a gene product with the activity of a gene product conferring the activity of “aspartase”, especially from Escherichia coli or its functional equivalent or its homolog, e.g. the increase of
[74570] (a) a gene product of a gene comprising the nucleic acid molecule as shown in the respective line in column 5 of Table I (whereby the respective line disclose in column 7 the fine chemical citrate), application no. 15, preferably the coding region thereof, or a homolog or a fragment thereof, and being depicted in the same respective line as said B4139, or a functional equivalent or a homolog thereof as shown in column 8 of Table I, application no. 15, preferably the coding region thereof, particularly a homolog or functional equivalent as shown in column 8 of Table I B, application no. 15, and being depicted in the same respective line as said B4139, and preferably the activity is increased non-targeted, or
[74571] (b) a polypeptide comprising a polypeptide, a consensus sequence or at least a polypeptide motif as shown in the respective line in column 5 of Table II or in column 8 of Table IV, application no. 15, respectively, and being depicted in the same respective line as said B4139, or a functional equivalent or a homolog thereof as depicted in column 8 of Table II, application no. 15, preferably a homolog or functional equivalent as depicted in column 8 of Table II B, application no. 15, and being depicted in the same respective line as said B4139, and preferably the activity is increased non-targeted, whereby the respective line disclose in column 7 the fine chemical citrate.

[74572] Accordingly, in one embodiment, the molecule which activity is to be increased in the process of the invention is the gene product with an activity as a “aspartase”, preferably it is the molecule of section (a) or (b) of this paragraph.

[74573] In particular, it was observed that in plants, especially in Arabidopsis thaliana, increasing or generating the activity of a gene product non-targeted with the activity of a “aspartase”, preferably being encoded by a gene comprising the nucleic acid sequence SEQ ID NO. 45022, preferably the coding region thereof, conferred the production of or the increase in citrate compared with the wild type control.

[74574] The nucleic acid sequence of B4256 from Escherichia coli, e.g. as shown in the respective line in column 5 of Table I, application no. 15, has been published in B. And the activity of the gene product thereof is the activity of acetyltransferase.

[74575] Accordingly, in one embodiment, the process of the present invention for producing fumarate in a non-human organism, like a microorganism or a plant or a part thereof, comprises increasing or generating the activity of a gene product with the activity of a gene product conferring the activity of “acetyltransferase”, especially from Escherichia coli or its functional equivalent or its homolog, e.g. the increase of
[74576] (a) a gene product of a gene comprising the nucleic acid molecule as shown in the respective line in column 5 of Table I (whereby the respective line disclose in column 7 the fine chemical fumarate), application no. 15, preferably the coding region thereof, or a homolog or a fragment thereof, and being depicted in the same respective line as said B4256, or a functional equivalent or a homolog thereof as shown in column 8 of Table I, application no. 15, preferably the coding region thereof, particularly a homolog or functional equivalent as shown in column 8 of Table I B, application no. 15, and being depicted in the same respective line as said B4256, and preferably the activity is increased non-targeted, or
[74577] (b) a polypeptide comprising a polypeptide, a consensus sequence or at least a polypeptide motif as shown in the respective line in column 5 of Table II or in column 8 of Table IV, application no. 15, respectively, and being depicted in the same respective line as said B4256, or a functional equivalent or a homolog thereof as depicted in column 8 of Table II, application no. 15, preferably a homolog or functional equivalent as depicted in column 8 of Table II B, application no. 15, and being depicted in the same respective line as said B4256, and preferably the activity is increased non-targeted, whereby the respective line disclose in column 7 the fine chemical fumarate.

[74578] Accordingly, in one embodiment, the molecule which activity is to be increased in the process of the invention is the gene product with an activity as a “acetyltransferase”, preferably it is the molecule of section (a) or (b) of this paragraph.

[74579] In particular, it was observed that in plants, especially in Arabidopsis thaliana, increasing or generating the activity of a gene product non-targeted with the activity of a “acetyltransferase”, preferably being encoded by a gene comprising the nucleic acid sequence SEQ ID NO. 45321, preferably the coding region thereof, conferred the production of or the increase in fumarate compared with the wild type control.

[74580] The nucleic acid sequence of B4256 from Escherichia coli, e.g. as shown in the respective line in column 5 of Table I, application no. 15, has been published in B. And the activity of the gene product thereof is the activity of acetyltransferase.

[74581] Accordingly, in one embodiment, the process of the present invention for producing malate in a non-human organism, like a microorganism or a plant or a part thereof, comprises increasing or generating the activity of a gene product with the activity of a gene product conferring the activity of “acetyltransferase”, especially from Escherichia coli or its functional equivalent or its homolog, e.g. the increase of
[74582] (a) a gene product of a gene comprising the nucleic acid molecule as shown in the respective line in column 5 of Table I (whereby the respective line disclose in column 7 the fine chemical malate), application no. 15, preferably the coding region thereof, or a homolog or a fragment thereof, and being depicted in the same respective line as said B4256, or a functional equivalent or a homolog thereof as shown in column 8 of Table I, application no. 15, preferably the coding region thereof, particularly a homolog or functional equivalent as shown in column 8 of Table I B, application no. 15, and being depicted in the same respective line as said B4256, and preferably the activity is increased non-targeted, or
[74583] (b) a polypeptide comprising a polypeptide, a consensus sequence or at least a polypeptide motif as shown in the respective line in column 5 of Table II or in column 8 of Table IV, application no. 15, respectively, and being depicted in the same respective line as said B4256, or a functional equivalent or a homolog thereof as depicted in column 8 of Table II, application no. 15, preferably a homolog or functional equivalent as depicted in column 8 of Table II B, application no. 15, and being depicted in the same respective line as said B4256, and preferably the activity is increased non-targeted, whereby the respective line disclose in column 7 the fine chemical malate.

[74584] Accordingly, in one embodiment, the molecule which activity is to be increased in the process of the invention is the gene product with an activity as a “acetyltransferase”, preferably it is the molecule of section (a) or (b) of this paragraph.

[74585] In particular, it was observed that in plants, especially in Arabidopsis thaliana, increasing or generating the activity of a gene product non-targeted with the activity of a “acetyltransferase”, preferably being encoded by a gene comprising the nucleic acid sequence SEQ ID NO. 45321, preferably the coding region thereof, conferred the production of or the increase in malate compared with the wild type control.

[74586] The nucleic acid sequence of B4384 from Escherichia coli, e.g. as shown in the respective line in column 5 of Table I, application no. 15, has been published in B. And the activity of the gene product thereof is the activity of purine-nucleoside phosphorylase.

[74587] Accordingly, in one embodiment, the process of the present invention for producing vitamin c and/or threonic acid in a non-human organism, like a microorganism or a plant or a part thereof, comprises increasing or generating the activity of a gene product with the activity of a gene product conferring the activity of “purine-nucleoside phosphorylase”, especially from Escherichia coli or its functional equivalent or its homolog, e.g. the increase of
[74588] (a) a gene product of a gene comprising the nucleic acid molecule as shown in the respective line in column 5 of Table I (whereby the respective line disclose in column 7 the fine chemical vitamin c and/or threonic acid), application no. 15, preferably the coding region thereof, or a homolog or a fragment thereof, and being depicted in the same respective line as said B4384, or a functional equivalent or a homolog thereof as shown in column 8 of Table I, application no. 15, preferably the coding region thereof, particularly a homolog or functional equivalent as shown in column 8 of Table I B, application no. 15, and being depicted in the same respective line as said B4384, and preferably the activity is increased non-targeted, or
[74589] (b) a polypeptide comprising a polypeptide, a consensus sequence or at least a polypeptide motif as shown in the respective line in column 5 of Table II or in column 8 of Table IV, application no. 15, respectively, and being depicted in the same respective line as said B4384, or a functional equivalent or a homolog thereof as depicted in column 8 of Table II, application no. 15, preferably a homolog or functional equivalent as depicted in column 8 of Table II B, application no. 15, and being depicted in the same respective line as said B4384, and preferably the activity is increased non-targeted, whereby the respective line disclose in column 7 the fine chemical vitamin c and/or threonic acid.

[74590] Accordingly, in one embodiment, the molecule which activity is to be increased in the process of the invention is the gene product with an activity as a “purine-nucleoside phosphorylase”, preferably it is the molecule of section (a) or (b) of this paragraph.

[74591] In particular, it was observed that in plants, especially in Arabidopsis thaliana, increasing or generating the activity of a gene product non-targeted with the activity of a “purine-nucleoside phosphorylase”, preferably being encoded by a gene comprising the nucleic acid sequence SEQ ID NO. 45556, preferably the coding region thereof, conferred the production of or the increase in vitamin c and/or threonic acid compared with the wild type control.

[74592] The nucleic acid sequence of D90900 from Synechocystis sp., e.g. as shown in the respective line in column 5 of Table I, application no. 15, has been published in C. And the activity of the gene product thereof is the activity of lysine decarboxylase.

[74593] Accordingly, in one embodiment, the process of the present invention for producing succinate in a non-human organism, like a microorganism or a plant or a part thereof, comprises increasing or generating the activity of a gene product with the activity of a gene product conferring the activity of “lysine decarboxylase”, especially from Synechocystis sp. or its functional equivalent or its homolog, e.g. the increase of
[74594] (a) a gene product of a gene comprising the nucleic acid molecule as shown in the respective line in column 5 of Table I (whereby the respective line disclose in column 7 the fine chemical succinate), application no. 15, preferably the coding region thereof, or a homolog or a fragment thereof, and being depicted in the same respective line as said D90900, or a functional equivalent or a homolog thereof as shown in column 8 of Table I, application no. 15, preferably the coding region thereof, particularly a homolog or functional equivalent as shown in column 8 of Table I B, application no. 15, and being depicted in the same respective line as said D90900, and preferably the activity is increased plastidic, or
[74595] (b) a polypeptide comprising a polypeptide, a consensus sequence or at least a polypeptide motif as shown in the respective line in column 5 of Table II or in column 8 of Table IV, application no. 15, respectively, and being depicted in the same respective line as said D90900, or a functional equivalent or a homolog thereof as depicted in column 8 of Table II, application no. 15, preferably a homolog or functional equivalent as depicted in column 8 of Table II B, application no. 15, and being depicted in the same respective line as said D90900, and preferably the activity is increased plastidic, whereby the respective line disclose in column 7 the fine chemical succinate.

[74596] Accordingly, in one embodiment, the molecule which activity is to be increased in the process of the invention is the gene product with an activity as a “lysine decarboxylase”, preferably it is the molecule of section (a) or (b) of this paragraph.

[74597] In particular, it was observed that in plants, especially in Arabidopsis thaliana, increasing or generating the activity of a gene product plastidic with the activity of a “lysine decarboxylase”, preferably being encoded by a gene comprising the nucleic acid sequence SEQ ID NO. 84079, preferably the coding region thereof, conferred the production of or the increase in succinate compared with the wild type control.

[74598] The nucleic acid sequence of GM02LC12622 from Glycine max, e.g. as shown in the respective line in column 5 of Table I, application no. 15, is unpublished. And the activity of the gene product thereof is the activity of glutaredoxin.

[74599] Accordingly, in one embodiment, the process of the present invention for producing succinate in a non-human organism, like a microorganism or a plant or a part thereof, comprises increasing or generating the activity of a gene product with the activity of a gene product conferring the activity of “glutaredoxin”, especially from Glycine max or its functional equivalent or its homolog, e.g. the increase of
[74600] (a) a gene product of a gene comprising the nucleic acid molecule as shown in the respective line in column 5 of Table I (whereby the respective line disclose in column 7 the fine chemical succinate), application no. 15, preferably the coding region thereof, or a homolog or a fragment thereof, and being depicted in the same respective line as said GM02LC12622, or a functional equivalent or a homolog thereof as shown in column 8 of Table I, application no. 15, preferably the coding region thereof, particularly a homolog or functional equivalent as shown in column 8 of Table I B, application no. 15, and being depicted in the same respective line as said GM02LC12622, and preferably the activity is increased non-targeted, or
[74601] (b) a polypeptide comprising a polypeptide, a consensus sequence or at least a polypeptide motif as shown in the respective line in column 5 of Table II or in column 8 of Table IV, application no. 15, respectively, and being depicted in the same respective line as said GM02LC12622, or a functional equivalent or a homolog thereof as depicted in column 8 of Table II, application no. 15, preferably a homolog or functional equivalent as depicted in column 8 of Table II B, application no. 15, and being depicted in the same respective line as said GM02LC12622, and preferably the activity is increased non-targeted, whereby the respective line disclose in column 7 the fine chemical succinate.

[74602] Accordingly, in one embodiment, the molecule which activity is to be increased in the process of the invention is the gene product with an activity as a “glutaredoxin”, preferably it is the molecule of section (a) or (b) of this paragraph.

[74603] In particular, it was observed that in plants, especially in Arabidopsis thaliana, increasing or generating the activity of a gene product non-targeted with the activity of a “glutaredoxin”, preferably being encoded by a gene comprising the nucleic acid sequence SEQ ID NO. 10811, preferably the coding region thereof, conferred the production of or the increase in succinate compared with the wild type control.

[74604] The nucleic acid sequence of GM02LC17485 from Glycine max, e.g. as shown in the respective line in column 5 of Table I, application no. 15, is unpublished. And the activity of the gene product thereof is the activity of GM02LC17485-protein.

[74605] Accordingly, in one embodiment, the process of the present invention for producing fumarate in a non-human organism, like a microorganism or a plant or a part thereof, comprises increasing or generating the activity of a gene product with the activity of a gene product conferring the activity of “GM02LC17485-protein”, especially from Glycine max or its functional equivalent or its homolog, e.g. the increase of
[74606] (a) a gene product of a gene comprising the nucleic acid molecule as shown in the respective line in column 5 of Table I (whereby the respective line disclose in column 7 the fine chemical fumarate), application no. 15, preferably the coding region thereof, or a homolog or a fragment thereof, and being depicted in the same respective line as said GM02LC17485, or a functional equivalent or a homolog thereof as shown in column 8 of Table I, application no. 15, preferably the coding region thereof, particularly a homolog or functional equivalent as shown in column 8 of Table I B, application no. 15, and being depicted in the same respective line as said GM02LC17485, and preferably the activity is increased non-targeted, or
[74607] (b) a polypeptide comprising a polypeptide, a consensus sequence or at least a polypeptide motif as shown in the respective line in column 5 of Table II or in column 8 of Table IV, application no. 15, respectively, and being depicted in the same respective line as said GM02LC17485, or a functional equivalent or a homolog thereof as depicted in column 8 of Table II, application no. 15, preferably a homolog or functional equivalent as depicted in column 8 of Table II B, application no. 15, and being depicted in the same respective line as said GM02LC17485, and preferably the activity is increased non-targeted, whereby the respective line disclose in column 7 the fine chemical fumarate.

[74608] Accordingly, in one embodiment, the molecule which activity is to be increased in the process of the invention is the gene product with an activity as a “GM02LC17485-protein”, preferably it is the molecule of section (a) or (b) of this paragraph.

[74609] In particular, it was observed that in plants, especially in Arabidopsis thaliana, increasing or generating the activity of a gene product non-targeted with the activity of a “GM02LC17485-protein”, preferably being encoded by a gene comprising the nucleic acid sequence SEQ ID NO. 46405, preferably the coding region thereof, conferred the production of or the increase in fumarate compared with the wild type control.

[74610] The nucleic acid sequence of GM02LC21368 from Glycine max, e.g. as shown in the respective line in column 5 of Table I, application no. 15, is unpublished. And the activity of the gene product thereof is the activity of transcription factor.

[74611] Accordingly, in one embodiment, the process of the present invention for producing citramalate in a non-human organism, like a microorganism or a plant or a part thereof, comprises increasing or generating the activity of a gene product with the activity of a gene product conferring the activity of “transcription factor”, especially from Glycine max or its functional equivalent or its homolog, e.g. the increase of
[74612] (a) a gene product of a gene comprising the nucleic acid molecule as shown in the respective line in column 5 of Table I (whereby the respective line disclose in column 7 the fine chemical citramalate), application no. 15, preferably the coding region thereof, or a homolog or a fragment thereof, and being depicted in the same respective line as said GM02LC21368, or a functional equivalent or a homolog thereof as shown in column 8 of Table I, application no. 15, preferably the coding region thereof, particularly a homolog or functional equivalent as shown in column 8 of Table I B, application no. 15, and being depicted in the same respective line as said GM02LC21368, and preferably the activity is increased non-targeted, or
[74613] (b) a polypeptide comprising a polypeptide, a consensus sequence or at least a polypeptide motif as shown in the respective line in column 5 of Table II or in column 8 of Table IV, application no. 15, respectively, and being depicted in the same respective line as said GM02LC21368, or a functional equivalent or a homolog thereof as depicted in column 8 of Table II, application no. 15, preferably a homolog or functional equivalent as depicted in column 8 of Table II B, application no. 15, and being depicted in the same respective line as said GM02LC21368, and preferably the activity is increased non-targeted, whereby the respective line disclose in column 7 the fine chemical citramalate.

[74614] Accordingly, in one embodiment, the molecule which activity is to be increased in the process of the invention is the gene product with an activity as a “transcription factor”, preferably it is the molecule of section (a) or (b) of this paragraph.

[74615] In particular, it was observed that in plants, especially in Arabidopsis thaliana, increasing or generating the activity of a gene product non-targeted with the activity of a “transcription factor”, preferably being encoded by a gene comprising the nucleic acid sequence SEQ ID NO. 84198, preferably the coding region thereof, conferred the production of or the increase in citramalate compared with the wild type control.

[74616] The nucleic acid sequence of GM02LC21368 from Glycine max, e.g. as shown in the respective line in column 5 of Table I, application no. 15, is unpublished. And the activity of the gene product thereof is the activity of transcription factor.

[74617] Accordingly, in one embodiment, the process of the present invention for producing fumarate in a non-human organism, like a microorganism or a plant or a part thereof, comprises increasing or generating the activity of a gene product with the activity of a gene product conferring the activity of “transcription factor”, especially from Glycine max or its functional equivalent or its homolog, e.g. the increase of
[74618] (a) a gene product of a gene comprising the nucleic acid molecule as shown in the respective line in column 5 of Table I (whereby the respective line disclose in column 7 the fine chemical fumarate), application no. 15, preferably the coding region thereof, or a homolog or a fragment thereof, and being depicted in the same respective line as said GM02LC21368, or a functional equivalent or a homolog thereof as shown in column 8 of Table I, application no. 15, preferably the coding region thereof, particularly a homolog or functional equivalent as shown in column 8 of Table I B, application no. 15, and being depicted in the same respective line as said GM02LC21368, and preferably the activity is increased non-targeted, or
[74619] (b) a polypeptide comprising a polypeptide, a consensus sequence or at least a polypeptide motif as shown in the respective line in column 5 of Table II or in column 8 of Table IV, application no. 15, respectively, and being depicted in the same respective line as said GM02LC21368, or a functional equivalent or a homolog thereof as depicted in column 8 of Table II, application no. 15, preferably a homolog or functional equivalent as depicted in column 8 of Table II B, application no. 15, and being depicted in the same respective line as said GM02LC21368, and preferably the activity is increased non-targeted, whereby the respective line disclose in column 7 the fine chemical fumarate.

[74620] Accordingly, in one embodiment, the molecule which activity is to be increased in the process of the invention is the gene product with an activity as a “transcription factor”, preferably it is the molecule of section (a) or (b) of this paragraph.

[74621] In particular, it was observed that in plants, especially in Arabidopsis thaliana, increasing or generating the activity of a gene product non-targeted with the activity of a “transcription factor”, preferably being encoded by a gene comprising the nucleic acid sequence SEQ ID NO. 84198, preferably the coding region thereof, conferred the production of or the increase in fumarate compared with the wild type control.

[74622] The nucleic acid sequence of GM02LC21368 from Glycine max, e.g. as shown in the respective line in column 5 of Table I, application no. 15, is unpublished. And the activity of the gene product thereof is the activity of transcription factor.

[74623] Accordingly, in one embodiment, the process of the present invention for producing malate in a non-human organism, like a microorganism or a plant or a part thereof, comprises increasing or generating the activity of a gene product with the activity of a gene product conferring the activity of “transcription factor”, especially from Glycine max or its functional equivalent or its homolog, e.g. the increase of
[74624] (a) a gene product of a gene comprising the nucleic acid molecule as shown in the respective line in column 5 of Table I (whereby the respective line disclose in column 7 the fine chemical malate), application no. 15, preferably the coding region thereof, or a homolog or a fragment thereof, and being depicted in the same respective line as said GM02LC21368, or a functional equivalent or a homolog thereof as shown in column 8 of Table I, application no. 15, preferably the coding region thereof, particularly a homolog or functional equivalent as shown in column 8 of Table I B, application no. 15, and being depicted in the same respective line as said GM02LC21368, and preferably the activity is increased non-targeted, or
[74625] (b) a polypeptide comprising a polypeptide, a consensus sequence or at least a polypeptide motif as shown in the respective line in column 5 of Table II or in column 8 of Table IV, application no. 15, respectively, and being depicted in the same respective line as said GM02LC21368, or a functional equivalent or a homolog thereof as depicted in column 8 of Table II, application no. 15, preferably a homolog or functional equivalent as depicted in column 8 of Table II B, application no. 15, and being depicted in the same respective line as said GM02LC21368, and preferably the activity is increased non-targeted, whereby the respective line disclose in column 7 the fine chemical malate.

[74626] Accordingly, in one embodiment, the molecule which activity is to be increased in the process of the invention is the gene product with an activity as a “transcription factor”, preferably it is the molecule of section (a) or (b) of this paragraph.

[74627] In particular, it was observed that in plants, especially in Arabidopsis thaliana, increasing or generating the activity of a gene product non-targeted with the activity of a “transcription factor”, preferably being encoded by a gene comprising the nucleic acid sequence SEQ ID NO. 84198, preferably the coding region thereof, conferred the production of or the increase in malate compared with the wild type control.

[74628] The nucleic acid sequence of GM02LC5744 from Glycine max, e.g. as shown in the respective line in column 5 of Table I, application no. 15, is unpublished. And the activity of the gene product thereof is the activity of GM02LC5744-protein.

[74629] Accordingly, in one embodiment, the process of the present invention for producing citramalate in a non-human organism, like a microorganism or a plant or a part thereof, comprises increasing or generating the activity of a gene product with the activity of a gene product conferring the activity of “GM02LC5744-protein”, especially from Glycine max or its functional equivalent or its homolog, e.g. the increase of
[74630] (a) a gene product of a gene comprising the nucleic acid molecule as shown in the respective line in column 5 of Table I (whereby the respective line disclose in column 7 the fine chemical citramalate), application no. 15, preferably the coding region thereof, or a homolog or a fragment thereof, and being depicted in the same respective line as said GM02LC5744, or a functional equivalent or a homolog thereof as shown in column 8 of Table I, application no. 15, preferably the coding region thereof, particularly a homolog or functional equivalent as shown in column 8 of Table I B, application no. 15, and being depicted in the same respective line as said GM02LC5744, and preferably the activity is increased non-targeted, or
[74631] (b) a polypeptide comprising a polypeptide, a consensus sequence or at least a polypeptide motif as shown in the respective line in column 5 of Table II or in column 8 of Table IV, application no. 15, respectively, and being depicted in the same respective line as said GM02LC5744, or a functional equivalent or a homolog thereof as depicted in column 8 of Table II, application no. 15, preferably a homolog or functional equivalent as depicted in column 8 of Table II B, application no. 15, and being depicted in the same respective line as said GM02LC5744, and preferably the activity is increased non-targeted, whereby the respective line disclose in column 7 the fine chemical citramalate.

[74632] Accordingly, in one embodiment, the molecule which activity is to be increased in the process of the invention is the gene product with an activity as a “GM02LC5744-protein”, preferably it is the molecule of section (a) or (b) of this paragraph.

[74633] In particular, it was observed that in plants, especially in Arabidopsis thaliana, increasing or generating the activity of a gene product non-targeted with the activity of a “GM02LC5744-protein”, preferably being encoded by a gene comprising the nucleic acid sequence SEQ ID NO. 47076, preferably the coding region thereof, conferred the production of or the increase in citramalate compared with the wild type control.

[74634] The nucleic acid sequence of GM02LC5744 from Glycine max, e.g. as shown in the respective line in column 5 of Table I, application no. 15, is unpublished. And the activity of the gene product thereof is the activity of GM02LC5744-protein.

[74635] Accordingly, in one embodiment, the process of the present invention for producing fumarate in a non-human organism, like a microorganism or a plant or a part thereof, comprises increasing or generating the activity of a gene product with the activity of a gene product conferring the activity of “GM02LC5744-protein”, especially from Glycine max or its functional equivalent or its homolog, e.g. the increase of
[74636] (a) a gene product of a gene comprising the nucleic acid molecule as shown in the respective line in column 5 of Table I (whereby the respective line disclose in column 7 the fine chemical fumarate), application no. 15, preferably the coding region thereof, or a homolog or a fragment thereof, and being depicted in the same respective line as said GM02LC5744, or a functional equivalent or a homolog thereof as shown in column 8 of Table I, application no. 15, preferably the coding region thereof, particularly a homolog or functional equivalent as shown in column 8 of Table I B, application no. 15, and being depicted in the same respective line as said GM02LC5744, and preferably the activity is increased non-targeted, or
[74637] (b) a polypeptide comprising a polypeptide, a consensus sequence or at least a polypeptide motif as shown in the respective line in column 5 of Table II or in column 8 of Table IV, application no. 15, respectively, and being depicted in the same respective line as said GM02LC5744, or a functional equivalent or a homolog thereof as depicted in column 8 of Table II, application no. 15, preferably a homolog or functional equivalent as depicted in column 8 of Table II B, application no. 15, and being depicted in the same respective line as said GM02LC5744, and preferably the activity is increased non-targeted, whereby the respective line disclose in column 7 the fine chemical fumarate.

[74638] Accordingly, in one embodiment, the molecule which activity is to be increased in the process of the invention is the gene product with an activity as a “GM02LC5744-protein”, preferably it is the molecule of section (a) or (b) of this paragraph.

[74639] In particular, it was observed that in plants, especially in Arabidopsis thaliana, increasing or generating the activity of a gene product non-targeted with the activity of a “GM02LC5744-protein”, preferably being encoded by a gene comprising the nucleic acid sequence SEQ ID NO. 47076, preferably the coding region thereof, conferred the production of or the increase in fumarate compared with the wild type control.

[74640] The nucleic acid sequence of Sll0170 from Synechocystis sp., e.g. as shown in the respective line in column 5 of Table I, application no. 15, has been published in C. And the activity of the gene product thereof is the activity of heat shock protein.

[74641] Accordingly, in one embodiment, the process of the present invention for producing citramalate in a non-human organism, like a microorganism or a plant or a part thereof, comprises increasing or generating the activity of a gene product with the activity of a gene product conferring the activity of “heat shock protein”, especially from Synechocystis sp. or its functional equivalent or its homolog, e.g. the increase of
[74642] (a) a gene product of a gene comprising the nucleic acid molecule as shown in the respective line in column 5 of Table I (whereby the respective line disclose in column 7 the fine chemical citramalate), application no. 15, preferably the coding region thereof, or a homolog or a fragment thereof, and being depicted in the same respective line as said Sll0170, or a functional equivalent or a homolog thereof as shown in column 8 of Table I, application no. 15, preferably the coding region thereof, particularly a homolog or functional equivalent as shown in column 8 of Table I B, application no. 15, and being depicted in the same respective line as said Sll0170, and preferably the activity is increased non-targeted, or
[74643] (b) a polypeptide comprising a polypeptide, a consensus sequence or at least a polypeptide motif as shown in the respective line in column 5 of Table II or in column 8 of Table IV, application no. 15, respectively, and being depicted in the same respective line as said Sll0170, or a functional equivalent or a homolog thereof as depicted in column 8 of Table II, application no. 15, preferably a homolog or functional equivalent as depicted in column 8 of Table II B, application no. 15, and being depicted in the same respective line as said Sll0170, and preferably the activity is increased non-targeted, whereby the respective line disclose in column 7 the fine chemical citramalate.

[74644] Accordingly, in one embodiment, the molecule which activity is to be increased in the process of the invention is the gene product with an activity as a “heat shock protein”, preferably it is the molecule of section (a) or (b) of this paragraph.

[74645] In particular, it was observed that in plants, especially in Arabidopsis thaliana, increasing or generating the activity of a gene product non-targeted with the activity of a “heat shock protein”, preferably being encoded by a gene comprising the nucleic acid sequence SEQ ID NO. 48138, preferably the coding region thereof, conferred the production of or the increase in citramalate compared with the wild type control.

[74646] The nucleic acid sequence of Sll0228 from Synechocystis sp., e.g. as shown in the respective line in column 5 of Table I, application no. 15, has been published in C. And the activity of the gene product thereof is the activity of agmatinase.

[74647] Accordingly, in one embodiment, the process of the present invention for producing fumarate in a non-human organism, like a microorganism or a plant or a part thereof, comprises increasing or generating the activity of a gene product with the activity of a gene product conferring the activity of “agmatinase”, especially from Synechocystis sp. or its functional equivalent or its homolog, e.g. the increase of
[74648] (a) a gene product of a gene comprising the nucleic acid molecule as shown in the respective line in column 5 of Table I (whereby the respective line disclose in column 7 the fine chemical fumarate), application no. 15, preferably the coding region thereof, or a homolog or a fragment thereof, and being depicted in the same respective line as said Sll0228, or a functional equivalent or a homolog thereof as shown in column 8 of Table I, application no. 15, preferably the coding region thereof, particularly a homolog or functional equivalent as shown in column 8 of Table I B, application no. 15, and being depicted in the same respective line as said Sll0228, and preferably the activity is increased plastidic, or
[74649] (b) a polypeptide comprising a polypeptide, a consensus sequence or at least a polypeptide motif as shown in the respective line in column 5 of Table II or in column 8 of Table IV, application no. 15, respectively, and being depicted in the same respective line as said Sll0228, or a functional equivalent or a homolog thereof as depicted in column 8 of Table II, application no. 15, preferably a homolog or functional equivalent as depicted in column 8 of Table II B, application no. 15, and being depicted in the same respective line as said Sll0228, and preferably the activity is increased plastidic, whereby the respective line disclose in column 7 the fine chemical fumarate.

[74650] Accordingly, in one embodiment, the molecule which activity is to be increased in the process of the invention is the gene product with an activity as a “agmatinase”, preferably it is the molecule of section (a) or (b) of this paragraph.

[74651] In particular, it was observed that in plants, especially in Arabidopsis thaliana, increasing or generating the activity of a gene product plastidic with the activity of a “agmatinase”, preferably being encoded by a gene comprising the nucleic acid sequence SEQ ID NO. 84265, preferably the coding region thereof, conferred the production of or the increase in fumarate compared with the wild type control.

[74652] The nucleic acid sequence of Sll0240 from Synechocystis sp., e.g. as shown in the respective line in column 5 of Table I, application no. 15, has been published in C. And the activity of the gene product thereof is the activity of ABC transporter ATP binding component.

[74653] Accordingly, in one embodiment, the process of the present invention for producing malate in a non-human organism, like a microorganism or a plant or a part thereof, comprises increasing or generating the activity of a gene product with the activity of a gene product conferring the activity of “ABC transporter ATP binding component”, especially from Synechocystis sp. or its functional equivalent or its homolog, e.g. the increase of
[74654] (a) a gene product of a gene comprising the nucleic acid molecule as shown in the respective line in column 5 of Table I (whereby the respective line disclose in column 7 the fine chemical malate), application no. 15, preferably the coding region thereof, or a homolog or a fragment thereof, and being depicted in the same respective line as said Sll0240, or a functional equivalent or a homolog thereof as shown in column 8 of Table I, application no. 15, preferably the coding region thereof, particularly a homolog or functional equivalent as shown in column 8 of Table I B, application no. 15, and being depicted in the same respective line as said Sll0240, and preferably the activity is increased plastidic, or
[74655] (b) a polypeptide comprising a polypeptide, a consensus sequence or at least a polypeptide motif as shown in the respective line in column 5 of Table II or in column 8 of Table IV, application no. 15, respectively, and being depicted in the same respective line as said Sll0240, or a functional equivalent or a homolog thereof as depicted in column 8 of Table II, application no. 15, preferably a homolog or functional equivalent as depicted in column 8 of Table II B, application no. 15, and being depicted in the same respective line as said Sll0240, and preferably the activity is increased plastidic, whereby the respective line disclose in column 7 the fine chemical malate.

[74656] Accordingly, in one embodiment, the molecule which activity is to be increased in the process of the invention is the gene product with an activity as a “ABC transporter ATP binding component”, preferably it is the molecule of section (a) or (b) of this paragraph.

[74657] In particular, it was observed that in plants, especially in Arabidopsis thaliana, increasing or generating the activity of a gene product plastidic with the activity of a “ABC transporter ATP binding component”, preferably being encoded by a gene comprising the nucleic acid sequence SEQ ID NO. 84441, preferably the coding region thereof, conferred the production of or the increase in malate compared with the wild type control.

[74658] The nucleic acid sequence of Sll0240 from Synechocystis sp., e.g. as shown in the respective line in column 5 of Table I, application no. 15, has been published in C. And the activity of the gene product thereof is the activity of ABC transporter ATP binding component.

[74659] Accordingly, in one embodiment, the process of the present invention for producing succinate in a non-human organism, like a microorganism or a plant or a part thereof, comprises increasing or generating the activity of a gene product with the activity of a gene product conferring the activity of “ABC transporter ATP binding component”, especially from Synechocystis sp. or its functional equivalent or its homolog, e.g. the increase of
[74660] (a) a gene product of a gene comprising the nucleic acid molecule as shown in the respective line in column 5 of Table I (whereby the respective line disclose in column 7 the fine chemical succinate), application no. 15, preferably the coding region thereof, or a homolog or a fragment thereof, and being depicted in the same respective line as said Sll0240, or a functional equivalent or a homolog thereof as shown in column 8 of Table I, application no. 15, preferably the coding region thereof, particularly a homolog or functional equivalent as shown in column 8 of Table I B, application no. 15, and being depicted in the same respective line as said Sll0240, and preferably the activity is increased plastidic, or
[74661] (b) a polypeptide comprising a polypeptide, a consensus sequence or at least a polypeptide motif as shown in the respective line in column 5 of Table II or in column 8 of Table IV, application no. 15, respectively, and being depicted in the same respective line as said Sll0240, or a functional equivalent or a homolog thereof as depicted in column 8 of Table II, application no. 15, preferably a homolog or functional equivalent as depicted in column 8 of Table II B, application no. 15, and being depicted in the same respective line as said Sll0240, and preferably the activity is increased plastidic, whereby the respective line disclose in column 7 the fine chemical succinate.

[74662] Accordingly, in one embodiment, the molecule which activity is to be increased in the process of the invention is the gene product with an activity as a “ABC transporter ATP binding component”, preferably it is the molecule of section (a) or (b) of this paragraph.

[74663] In particular, it was observed that in plants, especially in Arabidopsis thaliana, increasing or generating the activity of a gene product plastidic with the activity of a “ABC transporter ATP binding component”, preferably being encoded by a gene comprising the nucleic acid sequence SEQ ID NO. 84441, preferably the coding region thereof, conferred the production of or the increase in succinate compared with the wild type control.

[74664] The nucleic acid sequence of Sll0816 from Synechocystis sp., e.g. as shown in the respective line in column 5 of Table I, application no. 15, has been published in C. And the activity of the gene product thereof is the activity of oxireductase.

[74665] Accordingly, in one embodiment, the process of the present invention for producing fumarate in a non-human organism, like a microorganism or a plant or a part thereof, comprises increasing or generating the activity of a gene product with the activity of a gene product conferring the activity of “oxireductase”, especially from Synechocystis sp. or its functional equivalent or its homolog, e.g. the increase of
[74666] (a) a gene product of a gene comprising the nucleic acid molecule as shown in the respective line in column 5 of Table I (whereby the respective line disclose in column 7 the fine chemical fumarate), application no. 15, preferably the coding region thereof, or a homolog or a fragment thereof, and being depicted in the same respective line as said Sll0816, or a functional equivalent or a homolog thereof as shown in column 8 of Table I, application no. 15, preferably the coding region thereof, particularly a homolog or functional equivalent as shown in column 8 of Table I B, application no. 15, and being depicted in the same respective line as said Sll0816, and preferably the activity is increased non-targeted, or
[74667] (b) a polypeptide comprising a polypeptide, a consensus sequence or at least a polypeptide motif as shown in the respective line in column 5 of Table II or in column 8 of Table IV, application no. 15, respectively, and being depicted in the same respective line as said Sll0816, or a functional equivalent or a homolog thereof as depicted in column 8 of Table II, application no. 15, preferably a homolog or functional equivalent as depicted in column 8 of Table II B, application no. 15, and being depicted in the same respective line as said Sll0816, and preferably the activity is increased non-targeted, whereby the respective line disclose in column 7 the fine chemical fumarate.

[74668] Accordingly, in one embodiment, the molecule which activity is to be increased in the process of the invention is the gene product with an activity as a “oxireductase”, preferably it is the molecule of section (a) or (b) of this paragraph.

[74669] In particular, it was observed that in plants, especially in Arabidopsis thaliana, increasing or generating the activity of a gene product non-targeted with the activity of a “oxireductase”, preferably being encoded by a gene comprising the nucleic acid sequence SEQ ID NO. 51198, preferably the coding region thereof, conferred the production of or the increase in fumarate compared with the wild type control.

[74670] The nucleic acid sequence of Sll0895 from Synechocystis sp., e.g. as shown in the respective line in column 5 of Table I, application no. 15, has been published in C. And the activity of the gene product thereof is the activity of phosphatase.

[74671] Accordingly, in one embodiment, the process of the present invention for producing succinate in a non-human organism, like a microorganism or a plant or a part thereof, comprises increasing or generating the activity of a gene product with the activity of a gene product conferring the activity of “phosphatase”, especially from Synechocystis sp. or its functional equivalent or its homolog, e.g. the increase of
[74672] (a) a gene product of a gene comprising the nucleic acid molecule as shown in the respective line in column 5 of Table I (whereby the respective line disclose in column 7 the fine chemical succinate), application no. 15, preferably the coding region thereof, or a homolog or a fragment thereof, and being depicted in the same respective line as said Sll0895, or a functional equivalent or a homolog thereof as shown in column 8 of Table I, application no. 15, preferably the coding region thereof, particularly a homolog or functional equivalent as shown in column 8 of Table I B, application no. 15, and being depicted in the same respective line as said Sll0895, and preferably the activity is increased non-targeted, or
[74673] (b) a polypeptide comprising a polypeptide, a consensus sequence or at least a polypeptide motif as shown in the respective line in column 5 of Table II or in column 8 of Table IV, application no. 15, respectively, and being depicted in the same respective line as said Sll0895, or a functional equivalent or a homolog thereof as depicted in column 8 of Table II, application no. 15, preferably a homolog or functional equivalent as depicted in column 8 of Table II B, application no. 15, and being depicted in the same respective line as said Sll0895, and preferably the activity is increased non-targeted, whereby the respective line disclose in column 7 the fine chemical succinate.

[74674] Accordingly, in one embodiment, the molecule which activity is to be increased in the process of the invention is the gene product with an activity as a “phosphatase”, preferably it is the molecule of section (a) or (b) of this paragraph.

[74675] In particular, it was observed that in plants, especially in Arabidopsis thaliana, increasing or generating the activity of a gene product non-targeted with the activity of a “phosphatase”, preferably being encoded by a gene comprising the nucleic acid sequence SEQ ID NO. 127109, preferably the coding region thereof, conferred the production of or the increase in succinate compared with the wild type control.

[74676] The nucleic acid sequence of Sll1522 from Synechocystis sp., e.g. as shown in the respective line in column 5 of Table I, application no. 15, has been published in C. And the activity of the gene product thereof is the activity of CDP-diacylglycerol-glycerol-3-phosphate 3-phosphatidyltransferase.

[74677] Accordingly, in one embodiment, the process of the present invention for producing citramalate in a non-human organism, like a microorganism or a plant or a part thereof, comprises increasing or generating the activity of a gene product with the activity of a gene product conferring the activity of “CDP-diacylglycerol-glycerol-3-phosphate 3-phosphatidyltransferase”, especially from Synechocystis sp. or its functional equivalent or its homolog, e.g. the increase of
[74678] (a) a gene product of a gene comprising the nucleic acid molecule as shown in the respective line in column 5 of Table I (whereby the respective line disclose in column 7 the fine chemical citramalate), application no. 15, preferably the coding region thereof, or a homolog or a fragment thereof, and being depicted in the same respective line as said Sll1522, or a functional equivalent or a homolog thereof as shown in column 8 of Table I, application no. 15, preferably the coding region thereof, particularly a homolog or functional equivalent as shown in column 8 of Table I B, application no. 15, and being depicted in the same respective line as said Sll1522, and preferably the activity is increased plastidic, or
[74679] (b) a polypeptide comprising a polypeptide, a consensus sequence or at least a polypeptide motif as shown in the respective line in column 5 of Table II or in column 8 of Table IV, application no. 15, respectively, and being depicted in the same respective line as said Sll1522, or a functional equivalent or a homolog thereof as depicted in column 8 of Table II, application no. 15, preferably a homolog or functional equivalent as depicted in column 8 of Table II B, application no. 15, and being depicted in the same respective line as said Sll1522, and preferably the activity is increased plastidic, whereby the respective line disclose in column 7 the fine chemical citramalate.

[74680] Accordingly, in one embodiment, the molecule which activity is to be increased in the process of the invention is the gene product with an activity as a “CDP-diacylglycerol-glycerol-3-phosphate 3-phosphatidyltransferase”, preferably it is the molecule of section (a) or (b) of this paragraph.

[74681] In particular, it was observed that in plants, especially in Arabidopsis thaliana, increasing or generating the activity of a gene product plastidic with the activity of a “CDP-diacylglycerolglycerol-3-phosphate 3-phosphatidyltransferase”, preferably being encoded by a gene comprising the nucleic acid sequence SEQ ID NO. 54452, preferably the coding region thereof, conferred the production of or the increase in citramalate compared with the wild type control.

[74682] The nucleic acid sequence of Sll1522 from Synechocystis sp., e.g. as shown in the respective line in column 5 of Table I, application no. 15, has been published in C. And the activity of the gene product thereof is the activity of CDP-diacylglycerol-glycerol-3-phosphate 3-phosphatidyltransferase.

[74683] Accordingly, in one embodiment, the process of the present invention for producing malate in a non-human organism, like a microorganism or a plant or a part thereof, comprises increasing or generating the activity of a gene product with the activity of a gene product conferring the activity of “CDP-diacylglycerol-glycerol-3-phosphate 3-phosphatidyltransferase”, especially from Synechocystis sp. or its functional equivalent or its homolog, e.g. the increase of
[74684] (a) a gene product of a gene comprising the nucleic acid molecule as shown in the respective line in column 5 of Table I (whereby the respective line disclose in column 7 the fine chemical malate), application no. 15, preferably the coding region thereof, or a homolog or a fragment thereof, and being depicted in the same respective line as said Sll1522, or a functional equivalent or a homolog thereof as shown in column 8 of Table I, application no. 15, preferably the coding region thereof, particularly a homolog or functional equivalent as shown in column 8 of Table I B, application no. 15, and being depicted in the same respective line as said Sll1522, and preferably the activity is increased plastidic, or
[74685] (b) a polypeptide comprising a polypeptide, a consensus sequence or at least a polypeptide motif as shown in the respective line in column 5 of Table II or in column 8 of Table IV, application no. 15, respectively, and being depicted in the same respective line as said Sll1522, or a functional equivalent or a homolog thereof as depicted in column 8 of Table II, application no. 15, preferably a homolog or functional equivalent as depicted in column 8 of Table II B, application no. 15, and being depicted in the same respective line as said Sll1522, and preferably the activity is increased plastidic, whereby the respective line disclose in column 7 the fine chemical malate.

[74686] Accordingly, in one embodiment, the molecule which activity is to be increased in the process of the invention is the gene product with an activity as a “CDP-diacylglycerol-glycerol-3-phosphate 3-phosphatidyltransferase”, preferably it is the molecule of section (a) or (b) of this paragraph.

[74687] In particular, it was observed that in plants, especially in Arabidopsis thaliana, increasing or generating the activity of a gene product plastidic with the activity of a “CDP-diacylglycerolglycerol-3-phosphate 3-phosphatidyltransferase”, preferably being encoded by a gene comprising the nucleic acid sequence SEQ ID NO. 54452, preferably the coding region thereof, conferred the production of or the increase in malate compared with the wild type control.

[74688] The nucleic acid sequence of Sll1815 from Synechocystis sp., e.g. as shown in the respective line in column 5 of Table I, application no. 15, has been published in C. And the activity of the gene product thereof is the activity of adenylate kinase.

[74689] Accordingly, in one embodiment, the process of the present invention for producing succinate in a non-human organism, like a microorganism or a plant or a part thereof, comprises increasing or generating the activity of a gene product with the activity of a gene product conferring the activity of “adenylate kinase”, especially from Synechocystis sp. or its functional equivalent or its homolog, e.g. the increase of
[74690] (a) a gene product of a gene comprising the nucleic acid molecule as shown in the respective line in column 5 of Table I (whereby the respective line disclose in column 7 the fine chemical succinate), application no. 15, preferably the coding region thereof, or a homolog or a fragment thereof, and being depicted in the same respective line as said Sll1815, or a functional equivalent or a homolog thereof as shown in column 8 of Table I, application no. 15, preferably the coding region thereof, particularly a homolog or functional equivalent as shown in column 8 of Table I B, application no. 15, and being depicted in the same respective line as said Sll1815, and preferably the activity is increased mitochondrial, or
[74691] (b) a polypeptide comprising a polypeptide, a consensus sequence or at least a polypeptide motif as shown in the respective line in column 5 of Table II or in column 8 of Table IV, application no. 15, respectively, and being depicted in the same respective line as said Sll1815, or a functional equivalent or a homolog thereof as depicted in column 8 of Table II, application no. 15, preferably a homolog or functional equivalent as depicted in column 8 of Table II B, application no. 15, and being depicted in the same respective line as said Sll1815, and preferably the activity is increased mitochondrial, whereby the respective line disclose in column 7 the fine chemical succinate.

[74692] Accordingly, in one embodiment, the molecule which activity is to be increased in the process of the invention is the gene product with an activity as a “adenylate kinase”, preferably it is the molecule of section (a) or (b) of this paragraph.

[74693] In particular, it was observed that in plants, especially in Arabidopsis thaliana, increasing or generating the activity of a gene product mitochondrial with the activity of a “adenylate kinase”, preferably being encoded by a gene comprising the nucleic acid sequence SEQ ID NO. 85808, preferably the coding region thereof, conferred the production of or the increase in succinate compared with the wild type control.

[74694] The nucleic acid sequence of Sll1920 from Synechocystis sp., e.g. as shown in the respective line in column 5 of Table I, application no. 15, has been published in C. And the activity of the gene product thereof is the activity of cation-transporting ATPase.

[74695] Accordingly, in one embodiment, the process of the present invention for producing citramalate in a non-human organism, like a microorganism or a plant or a part thereof, comprises increasing or generating the activity of a gene product with the activity of a gene product conferring the activity of “cation-transporting ATPase”, especially from Synechocystis sp. or its functional equivalent or its homolog, e.g. the increase of
[74696] (a) a gene product of a gene comprising the nucleic acid molecule as shown in the respective line in column 5 of Table I (whereby the respective line disclose in column 7 the fine chemical citramalate), application no. 15, preferably the coding region thereof, or a homolog or a fragment thereof, and being depicted in the same respective line as said Sll1920, or a functional equivalent or a homolog thereof as shown in column 8 of Table I, application no. 15, preferably the coding region thereof, particularly a homolog or functional equivalent as shown in column 8 of Table I B, application no. 15, and being depicted in the same respective line as said Sll1920, and preferably the activity is increased non-targeted, or
[74697] (b) a polypeptide comprising a polypeptide, a consensus sequence or at least a polypeptide motif as shown in the respective line in column 5 of Table II or in column 8 of Table IV, application no. 15, respectively, and being depicted in the same respective line as said Sll1920, or a functional equivalent or a homolog thereof as depicted in column 8 of Table II, application no. 15, preferably a homolog or functional equivalent as depicted in column 8 of Table II B, application no. 15, and being depicted in the same respective line as said Sll1920, and preferably the activity is increased non-targeted, whereby the respective line disclose in column 7 the fine chemical citramalate.

[74698] Accordingly, in one embodiment, the molecule which activity is to be increased in the process of the invention is the gene product with an activity as a “cation-transporting ATPase”, preferably it is the molecule of section (a) or (b) of this paragraph.

[74699] In particular, it was observed that in plants, especially in Arabidopsis thaliana, increasing or generating the activity of a gene product non-targeted with the activity of a “cation-transporting

[74700] ATPase”, preferably being encoded by a gene comprising the nucleic acid sequence SEQ ID NO. 55385, preferably the coding region thereof, conferred the production of or the increase in citramalate compared with the wild type control.

[74701] The nucleic acid sequence of Sll1920 from Synechocystis sp., e.g. as shown in the respective line in column 5 of Table I, application no. 15, has been published in C. And the activity of the gene product thereof is the activity of cation-transporting ATPase.

[74702] Accordingly, in one embodiment, the process of the present invention for producing malate in a non-human organism, like a microorganism or a plant or a part thereof, comprises increasing or generating the activity of a gene product with the activity of a gene product conferring the activity of “cation-transporting ATPase”, especially from Synechocystis sp. or its functional equivalent or its homolog, e.g. the increase of
[74703] (a) a gene product of a gene comprising the nucleic acid molecule as shown in the respective line in column 5 of Table I (whereby the respective line disclose in column 7 the fine chemical malate), application no. 15, preferably the coding region thereof, or a homolog or a fragment thereof, and being depicted in the same respective line as said Sll1920, or a functional equivalent or a homolog thereof as shown in column 8 of Table I, application no. 15, preferably the coding region thereof, particularly a homolog or functional equivalent as shown in column 8 of Table I B, application no. 15, and being depicted in the same respective line as said Sll1920, and preferably the activity is increased mitochondrial, or
[74704] (b) a polypeptide comprising a polypeptide, a consensus sequence or at least a polypeptide motif as shown in the respective line in column 5 of Table II or in column 8 of Table IV, application no. 15, respectively, and being depicted in the same respective line as said Sll1920, or a functional equivalent or a homolog thereof as depicted in column 8 of Table II, application no. 15, preferably a homolog or functional equivalent as depicted in column 8 of Table II B, application no. 15, and being depicted in the same respective line as said Sll1920, and preferably the activity is increased mitochondrial, whereby the respective line disclose in column 7 the fine chemical malate.

[74705] Accordingly, in one embodiment, the molecule which activity is to be increased in the process of the invention is the gene product with an activity as a “cation-transporting ATPase”, preferably it is the molecule of section (a) or (b) of this paragraph.

[74706] In particular, it was observed that in plants, especially in Arabidopsis thaliana, increasing or generating the activity of a gene product mitochondrial with the activity of a “cation-transporting ATPase”, preferably being encoded by a gene comprising the nucleic acid sequence SEQ ID NO. 55385, preferably the coding region thereof, conferred the production of or the increase in malate compared with the wild type control.

[74707] The nucleic acid sequence of Slr0018 from Synechocystis sp., e.g. as shown in the respective line in column 5 of Table I, application no. 15, has been published in C. And the activity of the gene product thereof is the activity of fumarate hydratase.

[74708] Accordingly, in one embodiment, the process of the present invention for producing fumarate in a non-human organism, like a microorganism or a plant or a part thereof, comprises increasing or generating the activity of a gene product with the activity of a gene product conferring the activity of “fumarate hydratase”, especially from Synechocystis sp. or its functional equivalent or its homolog, e.g. the increase of
[74709] (a) a gene product of a gene comprising the nucleic acid molecule as shown in the respective line in column 5 of Table I (whereby the respective line disclose in column 7 the fine chemical fumarate), application no. 15, preferably the coding region thereof, or a homolog or a fragment thereof, and being depicted in the same respective line as said Slr0018, or a functional equivalent or a homolog thereof as shown in column 8 of Table I, application no. 15, preferably the coding region thereof, particularly a homolog or functional equivalent as shown in column 8 of Table I B, application no. 15, and being depicted in the same respective line as said Slr0018, and preferably the activity is increased plastidic, or
[74710] (b) a polypeptide comprising a polypeptide, a consensus sequence or at least a polypeptide motif as shown in the respective line in column 5 of Table II or in column 8 of Table IV, application no. 15, respectively, and being depicted in the same respective line as said Slr0018, or a functional equivalent or a homolog thereof as depicted in column 8 of Table II, application no. 15, preferably a homolog or functional equivalent as depicted in column 8 of Table II B, application no. 15, and being depicted in the same respective line as said Slr0018, and preferably the activity is increased plastidic, whereby the respective line disclose in column 7 the fine chemical fumarate.

[74711] Accordingly, in one embodiment, the molecule which activity is to be increased in the process of the invention is the gene product with an activity as a “fumarate hydratase”, preferably it is the molecule of section (a) or (b) of this paragraph.

[74712] In particular, it was observed that in plants, especially in Arabidopsis thaliana, increasing or generating the activity of a gene product plastidic with the activity of a “fumarate hydratase”, preferably being encoded by a gene comprising the nucleic acid sequence SEQ ID NO. 136533, preferably the coding region thereof, conferred the production of or the increase in fumarate compared with the wild type control.

[74713] The nucleic acid sequence of Slr0338 from Synechocystis sp., e.g. as shown in the respective line in column 5 of Table I, application no. 15, has been published in C. And the activity of the gene product thereof is the activity of oxidoreductase.

[74714] Accordingly, in one embodiment, the process of the present invention for producing citramalate in a non-human organism, like a microorganism or a plant or a part thereof, comprises increasing or generating the activity of a gene product with the activity of a gene product conferring the activity of “oxidoreductase”, especially from Synechocystis sp. or its functional equivalent or its homolog, e.g. the increase of
[74715] (a) a gene product of a gene comprising the nucleic acid molecule as shown in the respective line in column 5 of Table I (whereby the respective line disclose in column 7 the fine chemical citramalate), application no. 15, preferably the coding region thereof, or a homolog or a fragment thereof, and being depicted in the same respective line as said Slr0338, or a functional equivalent or a homolog thereof as shown in column 8 of Table I, application no. 15, preferably the coding region thereof, particularly a homolog or functional equivalent as shown in column 8 of Table I B, application no. 15, and being depicted in the same respective line as said Slr0338, and preferably the activity is increased plastidic, or
[74716] (b) a polypeptide comprising a polypeptide, a consensus sequence or at least a polypeptide motif as shown in the respective line in column 5 of Table II or in column 8 of Table IV, application no. 15, respectively, and being depicted in the same respective line as said Slr0338, or a functional equivalent or a homolog thereof as depicted in column 8 of Table II, application no. 15, preferably a homolog or functional equivalent as depicted in column 8 of Table II B, application no. 15, and being depicted in the same respective line as said Slr0338, and preferably the activity is increased plastidic, whereby the respective line disclose in column 7 the fine chemical citramalate.

[74717] Accordingly, in one embodiment, the molecule which activity is to be increased in the process of the invention is the gene product with an activity as a “oxidoreductase”, preferably it is the molecule of section (a) or (b) of this paragraph.

[74718] In particular, it was observed that in plants, especially in Arabidopsis thaliana, increasing or generating the activity of a gene product plastidic with the activity of a “oxidoreductase”, preferably being encoded by a gene comprising the nucleic acid sequence SEQ ID NO. 11990, preferably the coding region thereof, conferred the production of or the increase in citramalate compared with the wild type control.

[74719] The nucleic acid sequence of Slr0597 from Synechocystis sp., e.g. as shown in the respective line in column 5 of Table I, application no. 15, has been published in C. And the activity of the gene product thereof is the activity of bifunctional purine biosynthesis protein.

[74720] Accordingly, in one embodiment, the process of the present invention for producing fumarate in a non-human organism, like a microorganism or a plant or a part thereof, comprises increasing or generating the activity of a gene product with the activity of a gene product conferring the activity of “bifunctional purine biosynthesis protein”, especially from Synechocystis sp. or its functional equivalent or its homolog, e.g. the increase of
[74721] (a) a gene product of a gene comprising the nucleic acid molecule as shown in the respective line in column 5 of Table I (whereby the respective line disclose in column 7 the fine chemical fumarate), application no. 15, preferably the coding region thereof, or a homolog or a fragment thereof, and being depicted in the same respective line as said Slr0597, or a functional equivalent or a homolog thereof as shown in column 8 of Table I, application no. 15, preferably the coding region thereof, particularly a homolog or functional equivalent as shown in column 8 of Table I B, application no. 15, and being depicted in the same respective line as said Slr0597, and preferably the activity is increased plastidic, or
[74722] (b) a polypeptide comprising a polypeptide, a consensus sequence or at least a polypeptide motif as shown in the respective line in column 5 of Table II or in column 8 of Table IV, application no. 15, respectively, and being depicted in the same respective line as said Slr0597, or a functional equivalent or a homolog thereof as depicted in column 8 of Table II, application no. 15, preferably a homolog or functional equivalent as depicted in column 8 of Table II B, application no. 15, and being depicted in the same respective line as said Slr0597, and preferably the activity is increased plastidic, whereby the respective line disclose in column 7 the fine chemical fumarate.

[74723] Accordingly, in one embodiment, the molecule which activity is to be increased in the process of the invention is the gene product with an activity as a “bifunctional purine biosynthesis protein”, preferably it is the molecule of section (a) or (b) of this paragraph.

[74724] In particular, it was observed that in plants, especially in Arabidopsis thaliana, increasing or generating the activity of a gene product plastidic with the activity of a “bifunctional purine biosynthesis protein”, preferably being encoded by a gene comprising the nucleic acid sequence SEQ ID NO. 56153, preferably the coding region thereof, conferred the production of or the increase in fumarate compared with the wild type control.

[74725] The nucleic acid sequence of Slr0721 from Synechocystis sp., e.g. as shown in the respective line in column 5 of Table I, application no. 15, has been published in C. And the activity of the gene product thereof is the activity of malate dehydrogenase.

[74726] Accordingly, in one embodiment, the process of the present invention for producing citramalate in a non-human organism, like a microorganism or a plant or a part thereof, comprises increasing or generating the activity of a gene product with the activity of a gene product conferring the activity of “malate dehydrogenase”, especially from Synechocystis sp. or its functional equivalent or its homolog, e.g. the increase of
[74727] (a) a gene product of a gene comprising the nucleic acid molecule as shown in the respective line in column 5 of Table I (whereby the respective line disclose in column 7 the fine chemical citramalate), application no. 15, preferably the coding region thereof, or a homolog or a fragment thereof, and being depicted in the same respective line as said Slr0721, or a functional equivalent or a homolog thereof as shown in column 8 of Table I, application no. 15, preferably the coding region thereof, particularly a homolog or functional equivalent as shown in column 8 of Table I B, application no. 15, and being depicted in the same respective line as said Slr0721, and preferably the activity is increased plastidic, or
[74728] (b) a polypeptide comprising a polypeptide, a consensus sequence or at least a polypeptide motif as shown in the respective line in column 5 of Table II or in column 8 of Table IV, application no. 15, respectively, and being depicted in the same respective line as said Slr0721, or a functional equivalent or a homolog thereof as depicted in column 8 of Table II, application no. 15, preferably a homolog or functional equivalent as depicted in column 8 of Table II B, application no. 15, and being depicted in the same respective line as said Slr0721, and preferably the activity is increased plastidic, whereby the respective line disclose in column 7 the fine chemical citramalate.

[74729] Accordingly, in one embodiment, the molecule which activity is to be increased in the process of the invention is the gene product with an activity as a “malate dehydrogenase”, preferably it is the molecule of section (a) or (b) of this paragraph.

[74730] In particular, it was observed that in plants, especially in Arabidopsis thaliana, increasing or generating the activity of a gene product plastidic with the activity of a “malate dehydrogenase”, preferably being encoded by a gene comprising the nucleic acid sequence SEQ ID NO. 87397, preferably the coding region thereof, conferred the production of or the increase in citramalate compared with the wild type control.

[74731] The nucleic acid sequence of Slr0721 from Synechocystis sp., e.g. as shown in the respective line in column 5 of Table I, application no. 15, has been published in C. And the activity of the gene product thereof is the activity of malate dehydrogenase.

[74732] Accordingly, in one embodiment, the process of the present invention for producing succinate in a non-human organism, like a microorganism or a plant or a part thereof, comprises increasing or generating the activity of a gene product with the activity of a gene product conferring the activity of “malate dehydrogenase”, especially from Synechocystis sp. or its functional equivalent or its homolog, e.g. the increase of
[74733] (a) a gene product of a gene comprising the nucleic acid molecule as shown in the respective line in column 5 of Table I (whereby the respective line disclose in column 7 the fine chemical succinate), application no. 15, preferably the coding region thereof, or a homolog or a fragment thereof, and being depicted in the same respective line as said Slr0721, or a functional equivalent or a homolog thereof as shown in column 8 of Table I, application no. 15, preferably the coding region thereof, particularly a homolog or functional equivalent as shown in column 8 of Table I B, application no. 15, and being depicted in the same respective line as said Slr0721, and preferably the activity is increased plastidic, or
[74734] (b) a polypeptide comprising a polypeptide, a consensus sequence or at least a polypeptide motif as shown in the respective line in column 5 of Table II or in column 8 of Table IV, application no. 15, respectively, and being depicted in the same respective line as said Slr0721, or a functional equivalent or a homolog thereof as depicted in column 8 of Table II, application no. 15, preferably a homolog or functional equivalent as depicted in column 8 of Table II B, application no. 15, and being depicted in the same respective line as said Slr0721, and preferably the activity is increased plastidic, whereby the respective line disclose in column 7 the fine chemical succinate.

[74735] Accordingly, in one embodiment, the molecule which activity is to be increased in the process of the invention is the gene product with an activity as a “malate dehydrogenase”, preferably it is the molecule of section (a) or (b) of this paragraph.

[74736] In particular, it was observed that in plants, especially in Arabidopsis thaliana, increasing or generating the activity of a gene product plastidic with the activity of a “malate dehydrogenase”, preferably being encoded by a gene comprising the nucleic acid sequence SEQ ID NO. 87397, preferably the coding region thereof, conferred the production of or the increase in succinate compared with the wild type control.

[74737] The nucleic acid sequence of Slr1096 from Synechocystis sp., e.g. as shown in the respective line in column 5 of Table I, application no. 15, has been published in C. And the activity of the gene product thereof is the activity of dihydrolipoamide dehydrogenase.

[74738] Accordingly, in one embodiment, the process of the present invention for producing glycerate in a non-human organism, like a microorganism or a plant or a part thereof, comprises increasing or generating the activity of a gene product with the activity of a gene product conferring the activity of “dihydrolipoamide dehydrogenase”, especially from Synechocystis sp. or its functional equivalent or its homolog, e.g. the increase of
[74739] (a) a gene product of a gene comprising the nucleic acid molecule as shown in the respective line in column 5 of Table I (whereby the respective line disclose in column 7 the fine chemical glycerate), application no. 15, preferably the coding region thereof, or a homolog or a fragment thereof, and being depicted in the same respective line as said Slr1096, or a functional equivalent or a homolog thereof as shown in column 8 of Table I, application no. 15, preferably the coding region thereof, particularly a homolog or functional equivalent as shown in column 8 of Table I B, application no. 15, and being depicted in the same respective line as said Slr1096, and preferably the activity is increased non-targeted, or
[74740] (b) a polypeptide comprising a polypeptide, a consensus sequence or at least a polypeptide motif as shown in the respective line in column 5 of Table II or in column 8 of Table IV, application no. 15, respectively, and being depicted in the same respective line as said Slr1096, or a functional equivalent or a homolog thereof as depicted in column 8 of Table II, application no. 15, preferably a homolog or functional equivalent as depicted in column 8 of Table II B, application no. 15, and being depicted in the same respective line as said Slr1096, and preferably the activity is increased non-targeted, whereby the respective line disclose in column 7 the fine chemical glycerate.

[74741] Accordingly, in one embodiment, the molecule which activity is to be increased in the process of the invention is the gene product with an activity as a “dihydrolipoamide dehydrogenase”, preferably it is the molecule of section (a) or (b) of this paragraph.

[74742] In particular, it was observed that in plants, especially in Arabidopsis thaliana, increasing or generating the activity of a gene product non-targeted with the activity of a “dihydrolipoamide dehydrogenase”, preferably being encoded by a gene comprising the nucleic acid sequence SEQ ID NO. 57734, preferably the coding region thereof, conferred the production of or the increase in glycerate compared with the wild type control.

[74743] The nucleic acid sequence of Slr1096 from Synechocystis sp., e.g. as shown in the respective line in column 5 of Table I, application no. 15, has been published in C. And the activity of the gene product thereof is the activity of dihydrolipoamide dehydrogenase.

[74744] Accordingly, in one embodiment, the process of the present invention for producing succinate in a non-human organism, like a microorganism or a plant or a part thereof, comprises increasing or generating the activity of a gene product with the activity of a gene product conferring the activity of “dihydrolipoamide dehydrogenase”, especially from Synechocystis sp. or its functional equivalent or its homolog, e.g. the increase of
[74745] (a) a gene product of a gene comprising the nucleic acid molecule as shown in the respective line in column 5 of Table I (whereby the respective line disclose in column 7 the fine chemical succinate), application no. 15, preferably the coding region thereof, or a homolog or a fragment thereof, and being depicted in the same respective line as said Slr1096, or a functional equivalent or a homolog thereof as shown in column 8 of Table I, application no. 15, preferably the coding region thereof, particularly a homolog or functional equivalent as shown in column 8 of Table I B, application no. 15, and being depicted in the same respective line as said Slr1096, and preferably the activity is increased non-targeted, or
[74746] (b) a polypeptide comprising a polypeptide, a consensus sequence or at least a polypeptide motif as shown in the respective line in column 5 of Table II or in column 8 of Table IV, application no. 15, respectively, and being depicted in the same respective line as said Slr1096, or a functional equivalent or a homolog thereof as depicted in column 8 of Table II, application no. 15, preferably a homolog or functional equivalent as depicted in column 8 of Table II B, application no. 15, and being depicted in the same respective line as said Slr1096, and preferably the activity is increased non-targeted, whereby the respective line disclose in column 7 the fine chemical succinate.

[74747] Accordingly, in one embodiment, the molecule which activity is to be increased in the process of the invention is the gene product with an activity as a “dihydrolipoamide dehydrogenase”, preferably it is the molecule of section (a) or (b) of this paragraph.

[74748] In particular, it was observed that in plants, especially in Arabidopsis thaliana, increasing or generating the activity of a gene product non-targeted with the activity of a “dihydrolipoamide dehydrogenase”, preferably being encoded by a gene comprising the nucleic acid sequence SEQ ID NO. 57734, preferably the coding region thereof, conferred the production of or the increase in succinate compared with the wild type control.

[74749] The nucleic acid sequence of Slr1170 from Synechocystis sp., e.g. as shown in the respective line in column 5 of Table I, application no. 15, has been published in C. And the activity of the gene product thereof is the activity of slr1170-protein.

[74750] Accordingly, in one embodiment, the process of the present invention for producing succinate in a non-human organism, like a microorganism or a plant or a part thereof, comprises increasing or generating the activity of a gene product with the activity of a gene product conferring the activity of “s1r1170-protein”, especially from Synechocystis sp. or its functional equivalent or its homolog, e.g. the increase of
[74751] (a) a gene product of a gene comprising the nucleic acid molecule as shown in the respective line in column 5 of Table I (whereby the respective line disclose in column 7 the fine chemical succinate), application no. 15, preferably the coding region thereof, or a homolog or a fragment thereof, and being depicted in the same respective line as said Slr1170, or a functional equivalent or a homolog thereof as shown in column 8 of Table I, application no. 15, preferably the coding region thereof, particularly a homolog or functional equivalent as shown in column 8 of Table I B, application no. 15, and being depicted in the same respective line as said Slr1170, and preferably the activity is increased non-targeted, or
[74752] (b) a polypeptide comprising a polypeptide, a consensus sequence or at least a polypeptide motif as shown in the respective line in column 5 of Table II or in column 8 of Table IV, application no. 15, respectively, and being depicted in the same respective line as said Slr1170, or a functional equivalent or a homolog thereof as depicted in column 8 of Table II, application no. 15, preferably a homolog or functional equivalent as depicted in column 8 of Table II B, application no. 15, and being depicted in the same respective line as said Slr1170, and preferably the activity is increased non-targeted, whereby the respective line disclose in column 7 the fine chemical succinate.

[74753] Accordingly, in one embodiment, the molecule which activity is to be increased in the process of the invention is the gene product with an activity as a “slr1170-protein”, preferably it is the molecule of section (a) or (b) of this paragraph.

[74754] In particular, it was observed that in plants, especially in Arabidopsis thaliana, increasing or generating the activity of a gene product non-targeted with the activity of a “slr1170-protein”, preferably being encoded by a gene comprising the nucleic acid sequence SEQ ID NO. 136869, preferably the coding region thereof, conferred the production of or the increase in succinate compared with the wild type control.

[74755] The nucleic acid sequence of Slr1250 from Synechocystis sp., e.g. as shown in the respective line in column 5 of Table I, application no. 15, has been published in C. And the activity of the gene product thereof is the activity of phosphate import ATP-binding protein.

[74756] Accordingly, in one embodiment, the process of the present invention for producing fumarate in a non-human organism, like a microorganism or a plant or a part thereof, comprises increasing or generating the activity of a gene product with the activity of a gene product conferring the activity of “phosphate import ATP-binding protein”, especially from Synechocystis sp. or its functional equivalent or its homolog, e.g. the increase of
[74757] (a) a gene product of a gene comprising the nucleic acid molecule as shown in the respective line in column 5 of Table I (whereby the respective line disclose in column 7 the fine chemical fumarate), application no. 15, preferably the coding region thereof, or a homolog or a fragment thereof, and being depicted in the same respective line as said Slr1250, or a functional equivalent or a homolog thereof as shown in column 8 of Table I, application no. 15, preferably the coding region thereof, particularly a homolog or functional equivalent as shown in column 8 of Table I B, application no. 15, and being depicted in the same respective line as said Slr1250, and preferably the activity is increased mitochondrial, or
[74758] (b) a polypeptide comprising a polypeptide, a consensus sequence or at least a polypeptide motif as shown in the respective line in column 5 of Table II or in column 8 of Table IV, application no. 15, respectively, and being depicted in the same respective line as said Slr1250, or a functional equivalent or a homolog thereof as depicted in column 8 of Table II, application no. 15, preferably a homolog or functional equivalent as depicted in column 8 of Table II B, application no. 15, and being depicted in the same respective line as said Slr1250, and preferably the activity is increased mitochondrial, whereby the respective line disclose in column 7 the fine chemical fumarate.

[74759] Accordingly, in one embodiment, the molecule which activity is to be increased in the process of the invention is the gene product with an activity as a “phosphate import ATP-binding protein”, preferably it is the molecule of section (a) or (b) of this paragraph.

[74760] In particular, it was observed that in plants, especially in Arabidopsis thaliana, increasing or generating the activity of a gene product mitochondrial with the activity of a “phosphate import ATP-binding protein”, preferably being encoded by a gene comprising the nucleic acid sequence SEQ ID NO. 116460, preferably the coding region thereof, conferred the production of or the increase in fumarate compared with the wild type control.

[74761] The nucleic acid sequence of Slr1269 from Synechocystis sp., e.g. as shown in the respective line in column 5 of Table I, application no. 15, has been published in C. And the activity of the gene product thereof is the activity of gamma-glutamyltranspeptidase.

[74762] Accordingly, in one embodiment, the process of the present invention for producing succinate in a non-human organism, like a microorganism or a plant or a part thereof, comprises increasing or generating the activity of a gene product with the activity of a gene product conferring the activity of “gamma-glutamyltranspeptidase”, especially from Synechocystis sp. or its functional equivalent or its homolog, e.g. the increase of
[74763] (a) a gene product of a gene comprising the nucleic acid molecule as shown in the respective line in column 5 of Table I (whereby the respective line disclose in column 7 the fine chemical succinate), application no. 15, preferably the coding region thereof, or a homolog or a fragment thereof, and being depicted in the same respective line as said Slr1269, or a functional equivalent or a homolog thereof as shown in column 8 of Table I, application no. 15, preferably the coding region thereof, particularly a homolog or functional equivalent as shown in column 8 of Table I B, application no. 15, and being depicted in the same respective line as said Slr1269, and preferably the activity is increased non-targeted, or
[74764] (b) a polypeptide comprising a polypeptide, a consensus sequence or at least a polypeptide motif as shown in the respective line in column 5 of Table II or in column 8 of Table IV, application no. 15, respectively, and being depicted in the same respective line as said Slr1269, or a functional equivalent or a homolog thereof as depicted in column 8 of Table II, application no. 15, preferably a homolog or functional equivalent as depicted in column 8 of Table II B, application no. 15, and being depicted in the same respective line as said Slr1269, and preferably the activity is increased non-targeted, whereby the respective line disclose in column 7 the fine chemical succinate.

[74765] Accordingly, in one embodiment, the molecule which activity is to be increased in the process of the invention is the gene product with an activity as a “gamma-glutamyltranspeptidase”, preferably it is the molecule of section (a) or (b) of this paragraph.

[74766] In particular, it was observed that in plants, especially in Arabidopsis thaliana, increasing or generating the activity of a gene product non-targeted with the activity of a “gamma-glutamyltranspeptidase”, preferably being encoded by a gene comprising the nucleic acid sequence SEQ ID NO. 58058, preferably the coding region thereof, conferred the production of or the increase in succinate compared with the wild type control.

[74767] The nucleic acid sequence of Slr1739 from Synechocystis sp., e.g. as shown in the respective line in column 5 of Table I, application no. 15, has been published in C. And the activity of the gene product thereof is the activity of photosystem II protein.

[74768] Accordingly, in one embodiment, the process of the present invention for producing malate in a non-human organism, like a microorganism or a plant or a part thereof, comprises increasing or generating the activity of a gene product with the activity of a gene product conferring the activity of “photosystem II protein”, especially from Synechocystis sp. or its functional equivalent or its homolog, e.g. the increase of
[74769] (a) a gene product of a gene comprising the nucleic acid molecule as shown in the respective line in column 5 of Table I (whereby the respective line disclose in column 7 the fine chemical malate), application no. 15, preferably the coding region thereof, or a homolog or a fragment thereof, and being depicted in the same respective line as said Slr1739, or a functional equivalent or a homolog thereof as shown in column 8 of Table I, application no. 15, preferably the coding region thereof, particularly a homolog or functional equivalent as shown in column 8 of Table I B, application no. 15, and being depicted in the same respective line as said Slr1739, and preferably the activity is increased plastidic, or
[74770] (b) a polypeptide comprising a polypeptide, a consensus sequence or at least a polypeptide motif as shown in the respective line in column 5 of Table II or in column 8 of Table IV, application no. 15, respectively, and being depicted in the same respective line as said Slr1739, or a functional equivalent or a homolog thereof as depicted in column 8 of Table II, application no. 15, preferably a homolog or functional equivalent as depicted in column 8 of Table II B, application no. 15, and being depicted in the same respective line as said Slr1739, and preferably the activity is increased plastidic, whereby the respective line disclose in column 7 the fine chemical malate.

[74771] Accordingly, in one embodiment, the molecule which activity is to be increased in the process of the invention is the gene product with an activity as a “photosystem II protein”, preferably it is the molecule of section (a) or (b) of this paragraph.

[74772] In particular, it was observed that in plants, especially in Arabidopsis thaliana, increasing or generating the activity of a gene product plastidic with the activity of a “photosystem II protein”, preferably being encoded by a gene comprising the nucleic acid sequence SEQ ID NO. 58731, preferably the coding region thereof, conferred the production of or the increase in malate compared with the wild type control.

[74773] The nucleic acid sequence of Slr2023 from Synechocystis sp., e.g. as shown in the respective line in column 5 of Table I, application no. 15, has been published in C. And the activity of the gene product thereof is the activity of malonyl CoA-acyl carrier protein transacylase.

[74774] Accordingly, in one embodiment, the process of the present invention for producing fumarate in a non-human organism, like a microorganism or a plant or a part thereof, comprises increasing or generating the activity of a gene product with the activity of a gene product conferring the activity of “malonyl CoA-acyl carrier protein transacylase”, especially from Synechocystis sp. or its functional equivalent or its homolog, e.g. the increase of
[74775] (a) a gene product of a gene comprising the nucleic acid molecule as shown in the respective line in column 5 of Table I (whereby the respective line disclose in column 7 the fine chemical fumarate), application no. 15, preferably the coding region thereof, or a homolog or a fragment thereof, and being depicted in the same respective line as said Slr2023, or a functional equivalent or a homolog thereof as shown in column 8 of Table I, application no. 15, preferably the coding region thereof, particularly a homolog or functional equivalent as shown in column 8 of Table I B, application no. 15, and being depicted in the same respective line as said Slr2023, and preferably the activity is increased plastidic, or
[74776] (b) a polypeptide comprising a polypeptide, a consensus sequence or at least a polypeptide motif as shown in the respective line in column 5 of Table II or in column 8 of Table IV, application no. 15, respectively, and being depicted in the same respective line as said Slr2023, or a functional equivalent or a homolog thereof as depicted in column 8 of Table II, application no. 15, preferably a homolog or functional equivalent as depicted in column 8 of Table II B, application no. 15, and being depicted in the same respective line as said Slr2023, and preferably the activity is increased plastidic, whereby the respective line disclose in column 7 the fine chemical fumarate.

[74777] Accordingly, in one embodiment, the molecule which activity is to be increased in the process of the invention is the gene product with an activity as a “malonyl CoA-acyl carrier protein transacylase”, preferably it is the molecule of section (a) or (b) of this paragraph.

[74778] In particular, it was observed that in plants, especially in Arabidopsis thaliana, increasing or generating the activity of a gene product plastidic with the activity of a “malonyl CoA-acyl carrier protein transacylase”, preferably being encoded by a gene comprising the nucleic acid sequence SEQ ID NO. 59165, preferably the coding region thereof, conferred the production of or the increase in fumarate compared with the wild type control.

[74779] The nucleic acid sequence of Slr2023 from Synechocystis sp., e.g. as shown in the respective line in column 5 of Table I, application no. 15, has been published in C. And the activity of the gene product thereof is the activity of malonyl CoA-acyl carrier protein transacylase.

[74780] Accordingly, in one embodiment, the process of the present invention for producing succinate in a non-human organism, like a microorganism or a plant or a part thereof, comprises increasing or generating the activity of a gene product with the activity of a gene product conferring the activity of “malonyl CoA-acyl carrier protein transacylase”, especially from Synechocystis sp. or its functional equivalent or its homolog, e.g. the increase of
[74781] (a) a gene product of a gene comprising the nucleic acid molecule as shown in the respective line in column 5 of Table I (whereby the respective line disclose in column 7 the fine chemical succinate), application no. 15, preferably the coding region thereof, or a homolog or a fragment thereof, and being depicted in the same respective line as said

[74782] Slr2023, or a functional equivalent or a homolog thereof as shown in column 8 of Table I, application no. 15, preferably the coding region thereof, particularly a homolog or functional equivalent as shown in column 8 of Table I B, application no. 15, and being depicted in the same respective line as said Slr2023, and preferably the activity is increased plastidic, or
[74783] (b) a polypeptide comprising a polypeptide, a consensus sequence or at least a polypeptide motif as shown in the respective line in column 5 of Table II or in column 8 of Table IV, application no. 15, respectively, and being depicted in the same respective line as said Slr2023, or a functional equivalent or a homolog thereof as depicted in column 8 of Table II, application no. 15, preferably a homolog or functional equivalent as depicted in column 8 of Table II B, application no. 15, and being depicted in the same respective line as said Slr2023, and preferably the activity is increased plastidic, whereby the respective line disclose in column 7 the fine chemical succinate.

[74784] Accordingly, in one embodiment, the molecule which activity is to be increased in the process of the invention is the gene product with an activity as a “malonyl CoA-acyl carrier protein transacylase”, preferably it is the molecule of section (a) or (b) of this paragraph.

[74785] In particular, it was observed that in plants, especially in Arabidopsis thaliana, increasing or generating the activity of a gene product plastidic with the activity of a “malonyl CoA-acyl carrier protein transacylase”, preferably being encoded by a gene comprising the nucleic acid sequence SEQ ID NO. 59165, preferably the coding region thereof, conferred the production of or the increase in succinate compared with the wild type control.

[74786] The nucleic acid sequence of Smr0004 from Synechocystis sp., e.g. as shown in the respective line in column 5 of Table I, application no. 15, has been published in C. And the activity of the gene product thereof is the activity of photosystem I reaction centre subunit.

[74787] Accordingly, in one embodiment, the process of the present invention for producing glycerate in a non-human organism, like a microorganism or a plant or a part thereof, comprises increasing or generating the activity of a gene product with the activity of a gene product conferring the activity of “photosystem I reaction centre subunit”, especially from Synechocystis sp. or its functional equivalent or its homolog, e.g. the increase of
[74788] (a) a gene product of a gene comprising the nucleic acid molecule as shown in the respective line in column 5 of Table I (whereby the respective line disclose in column 7 the fine chemical glycerate), application no. 15, preferably the coding region thereof, or a homolog or a fragment thereof, and being depicted in the same respective line as said Smr0004, or a functional equivalent or a homolog thereof as shown in column 8 of Table I, application no. 15, preferably the coding region thereof, particularly a homolog or functional equivalent as shown in column 8 of Table I B, application no. 15, and being depicted in the same respective line as said Smr0004, and preferably the activity is increased plastidic, or
[74789] (b) a polypeptide comprising a polypeptide, a consensus sequence or at least a polypeptide motif as shown in the respective line in column 5 of Table II or in column 8 of Table IV, application no. 15, respectively, and being depicted in the same respective line as said Smr0004, or a functional equivalent or a homolog thereof as depicted in column 8 of Table II, application no. 15, preferably a homolog or functional equivalent as depicted in column 8 of Table II B, application no. 15, and being depicted in the same respective line as said Smr0004, and preferably the activity is increased plastidic, whereby the respective line disclose in column 7 the fine chemical glycerate.

[74790] Accordingly, in one embodiment, the molecule which activity is to be increased in the process of the invention is the gene product with an activity as a “photosystem I reaction centre subunit”, preferably it is the molecule of section (a) or (b) of this paragraph.

[74791] In particular, it was observed that in plants, especially in Arabidopsis thaliana, increasing or generating the activity of a gene product plastidic with the activity of a “photosystem I reaction centre subunit”, preferably being encoded by a gene comprising the nucleic acid sequence SEQ ID NO. 136907, preferably the coding region thereof, conferred the production of or the increase in glycerate compared with the wild type control.

[74792] The nucleic acid sequence of TTC0019 from Thermus thermophilus, e.g. as shown in the respective line in column 5 of Table I, application no. 15, has been published in E. And the activity of the gene product thereof is the activity of Sec-independent protein translocase subunit.

[74793] Accordingly, in one embodiment, the process of the present invention for producing fumarate in a non-human organism, like a microorganism or a plant or a part thereof, comprises increasing or generating the activity of a gene product with the activity of a gene product conferring the activity of “Sec-independent protein translocase subunit”, especially from Thermus thermophilus or its functional equivalent or its homolog, e.g. the increase of
[74794] (a) a gene product of a gene comprising the nucleic acid molecule as shown in the respective line in column 5 of Table I (whereby the respective line disclose in column 7 the fine chemical fumarate), application no. 15, preferably the coding region thereof, or a homolog or a fragment thereof, and being depicted in the same respective line as said TTC0019, or a functional equivalent or a homolog thereof as shown in column 8 of Table I, application no. 15, preferably the coding region thereof, particularly a homolog or functional equivalent as shown in column 8 of Table I B, application no. 15, and being depicted in the same respective line as said TTC0019, and preferably the activity is increased non-targeted, or
[74795] (b) a polypeptide comprising a polypeptide, a consensus sequence or at least a polypeptide motif as shown in the respective line in column 5 of Table II or in column 8 of Table IV, application no. 15, respectively, and being depicted in the same respective line as said TTC0019, or a functional equivalent or a homolog thereof as depicted in column 8 of Table II, application no. 15, preferably a homolog or functional equivalent as depicted in column 8 of Table II B, application no. 15, and being depicted in the same respective line as said TTC0019, and preferably the activity is increased non-targeted, whereby the respective line disclose in column 7 the fine chemical fumarate.

[74796] Accordingly, in one embodiment, the molecule which activity is to be increased in the process of the invention is the gene product with an activity as a “Sec-independent protein translocase subunit”, preferably it is the molecule of section (a) or (b) of this paragraph.

[74797] In particular, it was observed that in plants, especially in Arabidopsis thaliana, increasing or generating the activity of a gene product non-targeted with the activity of a “Sec-independent protein translocase subunit”, preferably being encoded by a gene comprising the nucleic acid sequence SEQ ID NO. 12698, preferably the coding region thereof, conferred the production of or the increase in fumarate compared with the wild type control.

[74798] The nucleic acid sequence of TTC0019 from Thermus thermophilus, e.g. as shown in the respective line in column 5 of Table I, application no. 15, has been published in E. And the activity of the gene product thereof is the activity of Sec-independent protein translocase subunit.

[74799] Accordingly, in one embodiment, the process of the present invention for producing succinate in a non-human organism, like a microorganism or a plant or a part thereof, comprises increasing or generating the activity of a gene product with the activity of a gene product conferring the activity of “Sec-independent protein translocase subunit”, especially from Thermus thermophilus or its functional equivalent or its homolog, e.g. the increase of
[74800] (a) a gene product of a gene comprising the nucleic acid molecule as shown in the respective line in column 5 of Table I (whereby the respective line disclose in column 7 the fine chemical succinate), application no. 15, preferably the coding region thereof, or a homolog or a fragment thereof, and being depicted in the same respective line as said TTC0019, or a functional equivalent or a homolog thereof as shown in column 8 of Table I, application no. 15, preferably the coding region thereof, particularly a homolog or functional equivalent as shown in column 8 of Table I B, application no. 15, and being depicted in the same respective line as said TTC0019, and preferably the activity is increased non-targeted, or
[74801] (b) a polypeptide comprising a polypeptide, a consensus sequence or at least a polypeptide motif as shown in the respective line in column 5 of Table II or in column 8 of Table IV, application no. 15, respectively, and being depicted in the same respective line as said TTC0019, or a functional equivalent or a homolog thereof as depicted in column 8 of Table II, application no. 15, preferably a homolog or functional equivalent as depicted in column 8 of Table II B, application no. 15, and being depicted in the same respective line as said TTC0019, and preferably the activity is increased non-targeted, whereby the respective line disclose in column 7 the fine chemical succinate.

[74802] Accordingly, in one embodiment, the molecule which activity is to be increased in the process of the invention is the gene product with an activity as a “Sec-independent protein translocase subunit”, preferably it is the molecule of section (a) or (b) of this paragraph.

[74803] In particular, it was observed that in plants, especially in Arabidopsis thaliana, increasing or generating the activity of a gene product non-targeted with the activity of a “Sec-independent protein translocase subunit”, preferably being encoded by a gene comprising the nucleic acid sequence SEQ ID NO. 12698, preferably the coding region thereof, conferred the production of or the increase in succinate compared with the wild type control.

[74804] The nucleic acid sequence of TTC0849 from Thermus thermophilus, e.g. as shown in the respective line in column 5 of Table I, application no. 15, has been published in E. And the activity of the gene product thereof is the activity of 2-isopropylmalate synthase.

[74805] Accordingly, in one embodiment, the process of the present invention for producing citramalate in a non-human organism, like a microorganism or a plant or a part thereof, comprises increasing or generating the activity of a gene product with the activity of a gene product conferring the activity of “2-isopropylmalate synthase”, especially from Thermus thermophilus or its functional equivalent or its homolog, e.g. the increase of
[74806] (a) a gene product of a gene comprising the nucleic acid molecule as shown in the respective line in column 5 of Table I (whereby the respective line disclose in column 7 the fine chemical citramalate), application no. 15, preferably the coding region thereof, or a homolog or a fragment thereof, and being depicted in the same respective line as said TTC0849, or a functional equivalent or a homolog thereof as shown in column 8 of Table I, application no. 15, preferably the coding region thereof, particularly a homolog or functional equivalent as shown in column 8 of Table I B, application no. 15, and being depicted in the same respective line as said TTC0849, and preferably the activity is increased non-targeted, or
[74807] (b) a polypeptide comprising a polypeptide, a consensus sequence or at least a polypeptide motif as shown in the respective line in column 5 of Table II or in column 8 of Table IV, application no. 15, respectively, and being depicted in the same respective line as said TTC0849, or a functional equivalent or a homolog thereof as depicted in column 8 of Table II, application no. 15, preferably a homolog or functional equivalent as depicted in column 8 of Table II B, application no. 15, and being depicted in the same respective line as said TTC0849, and preferably the activity is increased non-targeted, whereby the respective line disclose in column 7 the fine chemical citramalate.

[74808] Accordingly, in one embodiment, the molecule which activity is to be increased in the process of the invention is the gene product with an activity as a “2-isopropylmalate synthase”, preferably it is the molecule of section (a) or (b) of this paragraph.

[74809] In particular, it was observed that in plants, especially in Arabidopsis thaliana, increasing or generating the activity of a gene product non-targeted with the activity of a “2-isopropylmalate synthase”, preferably being encoded by a gene comprising the nucleic acid sequence SEQ ID NO. 107556, preferably the coding region thereof, conferred the production of or the increase in citramalate compared with the wild type control.

[74810] The nucleic acid sequence of TTC1193 from Thermus thermophilus, e.g. as shown in the respective line in column 5 of Table I, application no. 15, has been published in E. And the activity of the gene product thereof is the activity of multiple antibiotic resistance protein.

[74811] Accordingly, in one embodiment, the process of the present invention for producing fumarate in a non-human organism, like a microorganism or a plant or a part thereof, comprises increasing or generating the activity of a gene product with the activity of a gene product conferring the activity of “multiple antibiotic resistance protein”, especially from Thermus thermophilus or its functional equivalent or its homolog, e.g. the increase of
[74812] (a) a gene product of a gene comprising the nucleic acid molecule as shown in the respective line in column 5 of Table I (whereby the respective line disclose in column 7 the fine chemical fumarate), application no. 15, preferably the coding region thereof, or a homolog or a fragment thereof, and being depicted in the same respective line as said TTC1193, or a functional equivalent or a homolog thereof as shown in column 8 of Table I, application no. 15, preferably the coding region thereof, particularly a homolog or functional equivalent as shown in column 8 of Table I B, application no. 15, and being depicted in the same respective line as said TTC1193, and preferably the activity is increased non-targeted, or
[74813] (b) a polypeptide comprising a polypeptide, a consensus sequence or at least a polypeptide motif as shown in the respective line in column 5 of Table II or in column 8 of Table IV, application no. 15, respectively, and being depicted in the same respective line as said TTC1193, or a functional equivalent or a homolog thereof as depicted in column 8 of Table II, application no. 15, preferably a homolog or functional equivalent as depicted in column 8 of Table II B, application no. 15, and being depicted in the same respective line as said TTC1193, and preferably the activity is increased non-targeted, whereby the respective line disclose in column 7 the fine chemical fumarate.

[74814] Accordingly, in one embodiment, the molecule which activity is to be increased in the process of the invention is the gene product with an activity as a “multiple antibiotic resistance protein”, preferably it is the molecule of section (a) or (b) of this paragraph.

[74815] In particular, it was observed that in plants, especially in Arabidopsis thaliana, increasing or generating the activity of a gene product non-targeted with the activity of a “multiple antibiotic resistance protein”, preferably being encoded by a gene comprising the nucleic acid sequence SEQ ID NO. 61723, preferably the coding region thereof, conferred the production of or the increase in fumarate compared with the wild type control.

[74816] The nucleic acid sequence of TTC1193 from Thermus thermophilus, e.g. as shown in the respective line in column 5 of Table I, application no. 15, has been published in E. And the activity of the gene product thereof is the activity of multiple antibiotic resistance protein.

[74817] Accordingly, in one embodiment, the process of the present invention for producing succinate in a non-human organism, like a microorganism or a plant or a part thereof, comprises increasing or generating the activity of a gene product with the activity of a gene product conferring the activity of “multiple antibiotic resistance protein”, especially from Thermus thermophilus or its functional equivalent or its homolog, e.g. the increase of
[74818] (a) a gene product of a gene comprising the nucleic acid molecule as shown in the respective line in column 5 of Table I (whereby the respective line disclose in column 7 the fine chemical succinate), application no. 15, preferably the coding region thereof, or a homolog or a fragment thereof, and being depicted in the same respective line as said TTC1193, or a functional equivalent or a homolog thereof as shown in column 8 of Table I, application no. 15, preferably the coding region thereof, particularly a homolog or functional equivalent as shown in column 8 of Table I B, application no. 15, and being depicted in the same respective line as said TTC1193, and preferably the activity is increased non-targeted, or
[74819] (b) a polypeptide comprising a polypeptide, a consensus sequence or at least a polypeptide motif as shown in the respective line in column 5 of Table II or in column 8 of Table IV, application no. 15, respectively, and being depicted in the same respective line as said TTC1193, or a functional equivalent or a homolog thereof as depicted in column 8 of Table II, application no. 15, preferably a homolog or functional equivalent as depicted in column 8 of Table II B, application no. 15, and being depicted in the same respective line as said TTC1193, and preferably the activity is increased non-targeted, whereby the respective line disclose in column 7 the fine chemical succinate.

[74820] Accordingly, in one embodiment, the molecule which activity is to be increased in the process of the invention is the gene product with an activity as a “multiple antibiotic resistance protein”, preferably it is the molecule of section (a) or (b) of this paragraph.

[74821] In particular, it was observed that in plants, especially in Arabidopsis thaliana, increasing or generating the activity of a gene product non-targeted with the activity of a “multiple antibiotic resistance protein”, preferably being encoded by a gene comprising the nucleic acid sequence SEQ ID NO. 61723, preferably the coding region thereof, conferred the production of or the increase in succinate compared with the wild type control.

[74822] The nucleic acid sequence of TTC1386 from Thermus thermophilus, e.g. as shown in the respective line in column 5 of Table I, application no. 15, has been published in E. And the activity of the gene product thereof is the activity of TTC1386-protein.

[74823] Accordingly, in one embodiment, the process of the present invention for producing fumarate in a non-human organism, like a microorganism or a plant or a part thereof, comprises increasing or generating the activity of a gene product with the activity of a gene product conferring the activity of “TTC1386-protein”, especially from Thermus thermophilus or its functional equivalent or its homolog, e.g. the increase of
[74824] (a) a gene product of a gene comprising the nucleic acid molecule as shown in the respective line in column 5 of Table I (whereby the respective line disclose in column 7 the fine chemical fumarate), application no. 15, preferably the coding region thereof, or a homolog or a fragment thereof, and being depicted in the same respective line as said TTC1386, or a functional equivalent or a homolog thereof as shown in column 8 of Table I, application no. 15, preferably the coding region thereof, particularly a homolog or functional equivalent as shown in column 8 of Table I B, application no. 15, and being depicted in the same respective line as said TTC1386, and preferably the activity is increased non-targeted, or
[74825] (b) a polypeptide comprising a polypeptide, a consensus sequence or at least a polypeptide motif as shown in the respective line in column 5 of Table II or in column 8 of Table IV, application no. 15, respectively, and being depicted in the same respective line as said TTC1386, or a functional equivalent or a homolog thereof as depicted in column 8 of Table II, application no. 15, preferably a homolog or functional equivalent as depicted in column 8 of Table II B, application no. 15, and being depicted in the same respective line as said TTC1386, and preferably the activity is increased non-targeted, whereby the respective line disclose in column 7 the fine chemical fumarate.

[74826] Accordingly, in one embodiment, the molecule which activity is to be increased in the process of the invention is the gene product with an activity as a “TTC1386-protein”, preferably it is the molecule of section (a) or (b) of this paragraph.

[74827] In particular, it was observed that in plants, especially in Arabidopsis thaliana, increasing or generating the activity of a gene product non-targeted with the activity of a “TTC1386-protein”, preferably being encoded by a gene comprising the nucleic acid sequence SEQ ID NO. 62079, preferably the coding region thereof, conferred the production of or the increase in fumarate compared with the wild type control.

[74828] The nucleic acid sequence of TTC1386 from Thermus thermophilus, e.g. as shown in the respective line in column 5 of Table I, application no. 15, has been published in E. And the activity of the gene product thereof is the activity of TTC1386-protein.

[74829] Accordingly, in one embodiment, the process of the present invention for producing malate in a non-human organism, like a microorganism or a plant or a part thereof, comprises increasing or generating the activity of a gene product with the activity of a gene product conferring the activity of “TTC1386-protein”, especially from Thermus thermophilus or its functional equivalent or its homolog, e.g. the increase of
[74830] (a) a gene product of a gene comprising the nucleic acid molecule as shown in the respective line in column 5 of Table I (whereby the respective line disclose in column 7 the fine chemical malate), application no. 15, preferably the coding region thereof, or a homolog or a fragment thereof, and being depicted in the same respective line as said TTC1386, or a functional equivalent or a homolog thereof as shown in column 8 of Table I, application no. 15, preferably the coding region thereof, particularly a homolog or functional equivalent as shown in column 8 of Table I B, application no. 15, and being depicted in the same respective line as said TTC1386, and preferably the activity is increased non-targeted, or
[74831] (b) a polypeptide comprising a polypeptide, a consensus sequence or at least a polypeptide motif as shown in the respective line in column 5 of Table II or in column 8 of Table IV, application no. 15, respectively, and being depicted in the same respective line as said TTC1386, or a functional equivalent or a homolog thereof as depicted in column 8 of Table II, application no. 15, preferably a homolog or functional equivalent as depicted in column 8 of Table II B, application no. 15, and being depicted in the same respective line as said TTC1386, and preferably the activity is increased non-targeted, whereby the respective line disclose in column 7 the fine chemical malate.

[74832] Accordingly, in one embodiment, the molecule which activity is to be increased in the process of the invention is the gene product with an activity as a “TTC1386-protein”, preferably it is the molecule of section (a) or (b) of this paragraph.

[74833] In particular, it was observed that in plants, especially in Arabidopsis thaliana, increasing or generating the activity of a gene product non-targeted with the activity of a “TTC1386-protein”, preferably being encoded by a gene comprising the nucleic acid sequence SEQ ID NO. 62079, preferably the coding region thereof, conferred the production of or the increase in malate compared with the wild type control.

[74834] The nucleic acid sequence of TTC1386 from Thermus thermophilus, e.g. as shown in the respective line in column 5 of Table I, application no. 15, has been published in E. And the activity of the gene product thereof is the activity of TTC1386-protein.

[74835] Accordingly, in one embodiment, the process of the present invention for producing succinate in a non-human organism, like a microorganism or a plant or a part thereof, comprises increasing or generating the activity of a gene product with the activity of a gene product conferring the activity of “TTC1386-protein”, especially from Thermus thermophilus or its functional equivalent or its homolog, e.g. the increase of
[74836] (a) a gene product of a gene comprising the nucleic acid molecule as shown in the respective line in column 5 of Table I (whereby the respective line disclose in column 7 the fine chemical succinate), application no. 15, preferably the coding region thereof, or a homolog or a fragment thereof, and being depicted in the same respective line as said TTC1386, or a functional equivalent or a homolog thereof as shown in column 8 of Table I, application no. 15, preferably the coding region thereof, particularly a homolog or functional equivalent as shown in column 8 of Table I B, application no. 15, and being depicted in the same respective line as said TTC1386, and preferably the activity is increased non-targeted, or
[74837] (b) a polypeptide comprising a polypeptide, a consensus sequence or at least a polypeptide motif as shown in the respective line in column 5 of Table II or in column 8 of Table IV, application no. 15, respectively, and being depicted in the same respective line as said TTC1386, or a functional equivalent or a homolog thereof as depicted in column 8 of Table II, application no. 15, preferably a homolog or functional equivalent as depicted in column 8 of Table II B, application no. 15, and being depicted in the same respective line as said TTC1386, and preferably the activity is increased non-targeted, whereby the respective line disclose in column 7 the fine chemical succinate.

[74838] Accordingly, in one embodiment, the molecule which activity is to be increased in the process of the invention is the gene product with an activity as a “TTC1386-protein”, preferably it is the molecule of section (a) or (b) of this paragraph.

[74839] In particular, it was observed that in plants, especially in Arabidopsis thaliana, increasing or generating the activity of a gene product non-targeted with the activity of a “TTC1386-protein”, preferably being encoded by a gene comprising the nucleic acid sequence SEQ ID NO. 62079, preferably the coding region thereof, conferred the production of or the increase in succinate compared with the wild type control.

[74840] The nucleic acid sequence of TTC1918 from Thermus thermophilus, e.g. as shown in the respective line in column 5 of Table I, application no. 15, has been published in E. And the activity of the gene product thereof is the activity of oxidoreductase subunit.

[74841] Accordingly, in one embodiment, the process of the present invention for producing citramalate in a non-human organism, like a microorganism or a plant or a part thereof, comprises increasing or generating the activity of a gene product with the activity of a gene product conferring the activity of “oxidoreductase subunit”, especially from Thermus thermophilus or its functional equivalent or its homolog, e.g. the increase of
[74842] (a) a gene product of a gene comprising the nucleic acid molecule as shown in the respective line in column 5 of Table I (whereby the respective line disclose in column 7 the fine chemical citramalate), application no. 15, preferably the coding region thereof, or a homolog or a fragment thereof, and being depicted in the same respective line as said TTC1918, or a functional equivalent or a homolog thereof as shown in column 8 of Table I, application no. 15, preferably the coding region thereof, particularly a homolog or functional equivalent as shown in column 8 of Table I B, application no. 15, and being depicted in the same respective line as said TTC1918, and preferably the activity is increased non-targeted, or
[74843] (b) a polypeptide comprising a polypeptide, a consensus sequence or at least a polypeptide motif as shown in the respective line in column 5 of Table II or in column 8 of Table IV, application no. 15, respectively, and being depicted in the same respective line as said TTC1918, or a functional equivalent or a homolog thereof as depicted in column 8 of Table II, application no. 15, preferably a homolog or functional equivalent as depicted in column 8 of Table II B, application no. 15, and being depicted in the same respective line as said TTC1918, and preferably the activity is increased non-targeted, whereby the respective line disclose in column 7 the fine chemical citramalate.

[74844] Accordingly, in one embodiment, the molecule which activity is to be increased in the process of the invention is the gene product with an activity as a “oxidoreductase subunit”, preferably it is the molecule of section (a) or (b) of this paragraph.

[74845] In particular, it was observed that in plants, especially in Arabidopsis thaliana, increasing or generating the activity of a gene product non-targeted with the activity of a “oxidoreductase subunit”, preferably being encoded by a gene comprising the nucleic acid sequence SEQ ID NO. 62160, preferably the coding region thereof, conferred the production of or the increase in citramalate compared with the wild type control.

[74846] The nucleic acid sequence of TTC1918 from Thermus thermophilus, e.g. as shown in the respective line in column 5 of Table I, application no. 15, has been published in E. And the activity of the gene product thereof is the activity of oxidoreductase subunit.

[74847] Accordingly, in one embodiment, the process of the present invention for producing glycerate in a non-human organism, like a microorganism or a plant or a part thereof, comprises increasing or generating the activity of a gene product with the activity of a gene product conferring the activity of “oxidoreductase subunit”, especially from Thermus thermophilus or its functional equivalent or its homolog, e.g. the increase of
[74848] (a) a gene product of a gene comprising the nucleic acid molecule as shown in the respective line in column 5 of Table I (whereby the respective line disclose in column 7 the fine chemical glycerate), application no. 15, preferably the coding region thereof, or a homolog or a fragment thereof, and being depicted in the same respective line as said TTC1918, or a functional equivalent or a homolog thereof as shown in column 8 of Table I, application no. 15, preferably the coding region thereof, particularly a homolog or functional equivalent as shown in column 8 of Table I B, application no. 15, and being depicted in the same respective line as said TTC1918, and preferably the activity is increased non-targeted, or
[74849] (b) a polypeptide comprising a polypeptide, a consensus sequence or at least a polypeptide motif as shown in the respective line in column 5 of Table II or in column 8 of Table IV, application no. 15, respectively, and being depicted in the same respective line as said TTC1918, or a functional equivalent or a homolog thereof as depicted in column 8 of Table II, application no. 15, preferably a homolog or functional equivalent as depicted in column 8 of Table II B, application no. 15, and being depicted in the same respective line as said TTC1918, and preferably the activity is increased non-targeted, whereby the respective line disclose in column 7 the fine chemical glycerate.

[74850] Accordingly, in one embodiment, the molecule which activity is to be increased in the process of the invention is the gene product with an activity as a “oxidoreductase subunit”, preferably it is the molecule of section (a) or (b) of this paragraph.

[74851] In particular, it was observed that in plants, especially in Arabidopsis thaliana, increasing or generating the activity of a gene product non-targeted with the activity of a “oxidoreductase subunit”, preferably being encoded by a gene comprising the nucleic acid sequence SEQ ID NO. 62160, preferably the coding region thereof, conferred the production of or the increase in glycerate compared with the wild type control.

[74852] The nucleic acid sequence of TTC1918 from Thermus thermophilus, e.g. as shown in the respective line in column 5 of Table I, application no. 15, has been published in E. And the activity of the gene product thereof is the activity of oxidoreductase subunit.

[74853] Accordingly, in one embodiment, the process of the present invention for producing malate in a non-human organism, like a microorganism or a plant or a part thereof, comprises increasing or generating the activity of a gene product with the activity of a gene product conferring the activity of “oxidoreductase subunit”, especially from Thermus thermophilus or its functional equivalent or its homolog, e.g. the increase of
[74854] (a) a gene product of a gene comprising the nucleic acid molecule as shown in the respective line in column 5 of Table I (whereby the respective line disclose in column 7 the fine chemical malate), application no. 15, preferably the coding region thereof, or a homolog or a fragment thereof, and being depicted in the same respective line as said TTC1918, or a functional equivalent or a homolog thereof as shown in column 8 of Table I, application no. 15, preferably the coding region thereof, particularly a homolog or functional equivalent as shown in column 8 of Table I B, application no. 15, and being depicted in the same respective line as said TTC1918, and preferably the activity is increased non-targeted, or
[74855] (b) a polypeptide comprising a polypeptide, a consensus sequence or at least a polypeptide motif as shown in the respective line in column 5 of Table II or in column 8 of Table IV, application no. 15, respectively, and being depicted in the same respective line as said TTC1918, or a functional equivalent or a homolog thereof as depicted in column 8 of Table II, application no. 15, preferably a homolog or functional equivalent as depicted in column 8 of Table II B, application no. 15, and being depicted in the same respective line as said TTC1918, and preferably the activity is increased non-targeted, whereby the respective line disclose in column 7 the fine chemical malate.

[74856] Accordingly, in one embodiment, the molecule which activity is to be increased in the process of the invention is the gene product with an activity as a “oxidoreductase subunit”, preferably it is the molecule of section (a) or (b) of this paragraph.

[74857] In particular, it was observed that in plants, especially in Arabidopsis thaliana, increasing or generating the activity of a gene product non-targeted with the activity of a “oxidoreductase subunit”, preferably being encoded by a gene comprising the nucleic acid sequence SEQ ID NO. 62160, preferably the coding region thereof, conferred the production of or the increase in malate compared with the wild type control.

[74858] The nucleic acid sequence of XM_{—}473199 from Oryza sativa, e.g. as shown in the respective line in column 5 of Table I, application no. 15, has been published in G. And the activity of the gene product thereof is the activity of XM_{—}473199-protein.

[74859] Accordingly, in one embodiment, the process of the present invention for producing fumarate in a non-human organism, like a microorganism or a plant or a part thereof, comprises increasing or generating the activity of a gene product with the activity of a gene product conferring the activity of “XM_{—}473199-protein”, especially from Oryza sativa or its functional equivalent or its homolog, e.g. the increase of
[74860] (a) a gene product of a gene comprising the nucleic acid molecule as shown in the respective line in column 5 of Table I (whereby the respective line disclose in column 7 the fine chemical fumarate), application no. 15, preferably the coding region thereof, or a homolog or a fragment thereof, and being depicted in the same respective line as said XM_{—}473199, or a functional equivalent or a homolog thereof as shown in column 8 of Table I, application no. 15, preferably the coding region thereof, particularly a homolog or functional equivalent as shown in column 8 of Table I B, application no. 15, and being depicted in the same respective line as said XM_{—}473199, and preferably the activity is increased non-targeted, or
[74861] (b) a polypeptide comprising a polypeptide, a consensus sequence or at least a polypeptide motif as shown in the respective line in column 5 of Table II or in column 8 of Table IV, application no. 15, respectively, and being depicted in the same respective line as said XM_{—}473199, or a functional equivalent or a homolog thereof as depicted in column 8 of Table II, application no. 15, preferably a homolog or functional equivalent as depicted in column 8 of Table II B, application no. 15, and being depicted in the same respective line as said XM_{—}473199, and preferably the activity is increased non-targeted, whereby the respective line disclose in column 7 the fine chemical fumarate.

[74862] Accordingly, in one embodiment, the molecule which activity is to be increased in the process of the invention is the gene product with an activity as a “XM_{—}473199-protein”, preferably it is the molecule of section (a) or (b) of this paragraph.

[74863] In particular, it was observed that in plants, especially in Arabidopsis thaliana, increasing or generating the activity of a gene product non-targeted with the activity of a “XM_{—}473199protein”, preferably being encoded by a gene comprising the nucleic acid sequence SEQ ID NO. 62244, preferably the coding region thereof, conferred the production of or the increase in fumarate compared with the wild type control.

[74864] The nucleic acid sequence of XM_{—}473199 from Oryza sativa, e.g. as shown in the respective line in column 5 of Table I, application no. 15, has been published in G. And the activity of the gene product thereof is the activity of XM_{—}473199-protein.

[74865] Accordingly, in one embodiment, the process of the present invention for producing malate in a non-human organism, like a microorganism or a plant or a part thereof, comprises increasing or generating the activity of a gene product with the activity of a gene product conferring the activity of “XM_{—}473199-protein”, especially from Oryza sativa or its functional equivalent or its homolog, e.g. the increase of
[74866] (a) a gene product of a gene comprising the nucleic acid molecule as shown in the respective line in column 5 of Table I (whereby the respective line disclose in column 7 the fine chemical malate), application no. 15, preferably the coding region thereof, or a homolog or a fragment thereof, and being depicted in the same respective line as said XM_{—}473199, or a functional equivalent or a homolog thereof as shown in column 8 of Table I, application no. 15, preferably the coding region thereof, particularly a homolog or functional equivalent as shown in column 8 of Table I B, application no. 15, and being depicted in the same respective line as said XM_{—}473199, and preferably the activity is increased non-targeted, or
[74867] (b) a polypeptide comprising a polypeptide, a consensus sequence or at least a polypeptide motif as shown in the respective line in column 5 of Table II or in column 8 of Table IV, application no. 15, respectively, and being depicted in the same respective line as said XM_{—}473199, or a functional equivalent or a homolog thereof as depicted in column 8 of Table II, application no. 15, preferably a homolog or functional equivalent as depicted in column 8 of Table II B, application no. 15, and being depicted in the same respective line as said XM_{—}473199, and preferably the activity is increased non-targeted, whereby the respective line disclose in column 7 the fine chemical malate.

[74868] Accordingly, in one embodiment, the molecule which activity is to be increased in the process of the invention is the gene product with an activity as a “XM_{—}473199-protein”, preferably it is the molecule of section (a) or (b) of this paragraph.

[74869] In particular, it was observed that in plants, especially in Arabidopsis thaliana, increasing or generating the activity of a gene product non-targeted with the activity of a “XM_{—}473199-protein”, preferably being encoded by a gene comprising the nucleic acid sequence SEQ ID NO. 62244, preferably the coding region thereof, conferred the production of or the increase in malate compared with the wild type control.

[74870] The nucleic acid sequence of XM_{—}473199 from Oryza sativa, e.g. as shown in the respective line in column 5 of Table I, application no. 15, has been published in G. And the activity of the gene product thereof is the activity of XM_{—}473199-protein.

[74871] Accordingly, in one embodiment, the process of the present invention for producing succinate in a non-human organism, like a microorganism or a plant or a part thereof, comprises increasing or generating the activity of a gene product with the activity of a gene product conferring the activity of “XM_{—}473199-protein”, especially from Oryza sativa or its functional equivalent or its homolog, e.g. the increase of
[74872] (a) a gene product of a gene comprising the nucleic acid molecule as shown in the respective line in column 5 of Table I (whereby the respective line disclose in column 7 the fine chemical succinate), application no. 15, preferably the coding region thereof, or a homolog or a fragment thereof, and being depicted in the same respective line as said XM_{—}473199, or a functional equivalent or a homolog thereof as shown in column 8 of Table I, application no. 15, preferably the coding region thereof, particularly a homolog or functional equivalent as shown in column 8 of Table I B, application no. 15, and being depicted in the same respective line as said XM_{—}473199, and preferably the activity is increased non-targeted, or
[74873] (b) a polypeptide comprising a polypeptide, a consensus sequence or at least a polypeptide motif as shown in the respective line in column 5 of Table II or in column 8 of Table IV, application no. 15, respectively, and being depicted in the same respective line as said XM_{—}473199, or a functional equivalent or a homolog thereof as depicted in column 8 of Table II, application no. 15, preferably a homolog or functional equivalent as depicted in column 8 of Table II B, application no. 15, and being depicted in the same respective line as said XM_{—}473199, and preferably the activity is increased non-targeted, whereby the respective line disclose in column 7 the fine chemical succinate.

[74874] Accordingly, in one embodiment, the molecule which activity is to be increased in the process of the invention is the gene product with an activity as a “XM_{—}473199-protein”, preferably it is the molecule of section (a) or (b) of this paragraph.

[74875] In particular, it was observed that in plants, especially in Arabidopsis thaliana, increasing or generating the activity of a gene product non-targeted with the activity of a “XM_{—}473199-protein”, preferably being encoded by a gene comprising the nucleic acid sequence SEQ ID NO. 62244, preferably the coding region thereof, conferred the production of or the increase in succinate compared with the wild type control.

[74876] The nucleic acid sequence of Yal062w from Saccharomyces cerevisiae, e.g. as shown in the respective line in column 5 of Table I, application no. 15, has been published in A. And the activity of the gene product thereof is the activity of glutamate dehydrogenase.

[74877] Accordingly, in one embodiment, the process of the present invention for producing succinate in a non-human organism, like a microorganism or a plant or a part thereof, comprises increasing or generating the activity of a gene product with the activity of a gene product conferring the activity of “glutamate dehydrogenase”, especially from Saccharomyces cerevisiae or its functional equivalent or its homolog, e.g. the increase of
[74878] (a) a gene product of a gene comprising the nucleic acid molecule as shown in the respective line in column 5 of Table I (whereby the respective line disclose in column 7 the fine chemical succinate), application no. 15, preferably the coding region thereof, or a homolog or a fragment thereof, and being depicted in the same respective line as said Yal062w, or a functional equivalent or a homolog thereof as shown in column 8 of Table I, application no. 15, preferably the coding region thereof, particularly a homolog or functional equivalent as shown in column 8 of Table I B, application no. 15, and being depicted in the same respective line as said Yal062w, and preferably the activity is increased plastidic, or
[74879] (b) a polypeptide comprising a polypeptide, a consensus sequence or at least a polypeptide motif as shown in the respective line in column 5 of Table II or in column 8 of Table IV, application no. 15, respectively, and being depicted in the same respective line as said Yal062w, or a functional equivalent or a homolog thereof as depicted in column 8 of Table II, application no. 15, preferably a homolog or functional equivalent as depicted in column 8 of Table II B, application no. 15, and being depicted in the same respective line as said Yal062w, and preferably the activity is increased plastidic, whereby the respective line disclose in column 7 the fine chemical succinate.

[74880] Accordingly, in one embodiment, the molecule which activity is to be increased in the process of the invention is the gene product with an activity as a “glutamate dehydrogenase”, preferably it is the molecule of section (a) or (b) of this paragraph.

[74881] In particular, it was observed that in plants, especially in Arabidopsis thaliana, increasing or generating the activity of a gene product plastidic with the activity of a “glutamate dehydrogenase”, preferably being encoded by a gene comprising the nucleic acid sequence SEQ ID NO. 136943, preferably the coding region thereof, conferred the production of or the increase in succinate compared with the wild type control.

[74882] The nucleic acid sequence of Ybl015w from Saccharomyces cerevisiae, e.g. as shown in the respective line in column 5 of Table I, application no. 15, has been published in A. And the activity of the gene product thereof is the activity of acetyl-CoA hydrolase.

[74883] Accordingly, in one embodiment, the process of the present invention for producing citramalate in a non-human organism, like a microorganism or a plant or a part thereof, comprises increasing or generating the activity of a gene product with the activity of a gene product conferring the activity of “acetyl-CoA hydrolase”, especially from Saccharomyces cerevisiae or its functional equivalent or its homolog, e.g. the increase of
[74884] (a) a gene product of a gene comprising the nucleic acid molecule as shown in the respective line in column 5 of Table I (whereby the respective line disclose in column 7 the fine chemical citramalate), application no. 15, preferably the coding region thereof, or a homolog or a fragment thereof, and being depicted in the same respective line as said Ybl015w, or a functional equivalent or a homolog thereof as shown in column 8 of Table I, application no. 15, preferably the coding region thereof, particularly a homolog or functional equivalent as shown in column 8 of Table I B, application no. 15, and being depicted in the same respective line as said Ybl015w, and preferably the activity is increased non-targeted, or
[74885] (b) a polypeptide comprising a polypeptide, a consensus sequence or at least a polypeptide motif as shown in the respective line in column 5 of Table II or in column 8 of Table IV, application no. 15, respectively, and being depicted in the same respective line as said Ybl015w, or a functional equivalent or a homolog thereof as depicted in column 8 of Table II, application no. 15, preferably a homolog or functional equivalent as depicted in column 8 of Table II B, application no. 15, and being depicted in the same respective line as said Ybl015w, and preferably the activity is increased non-targeted, whereby the respective line disclose in column 7 the fine chemical citramalate.

[74886] Accordingly, in one embodiment, the molecule which activity is to be increased in the process of the invention is the gene product with an activity as a “acetyl-CoA hydrolase”, preferably it is the molecule of section (a) or (b) of this paragraph.

[74887] In particular, it was observed that in plants, especially in Arabidopsis thaliana, increasing or generating the activity of a gene product non-targeted with the activity of a “acetyl-CoA hydrolase”, preferably being encoded by a gene comprising the nucleic acid sequence SEQ ID NO. 137387, preferably the coding region thereof, conferred the production of or the increase in citramalate compared with the wild type control.

[74888] The nucleic acid sequence of Ybl015w from Saccharomyces cerevisiae, e.g. as shown in the respective line in column 5 of Table I, application no. 15, has been published in A. And the activity of the gene product thereof is the activity of acetyl-CoA hydrolase.

[74889] Accordingly, in one embodiment, the process of the present invention for producing pyruvate in a non-human organism, like a microorganism or a plant or a part thereof, comprises increasing or generating the activity of a gene product with the activity of a gene product conferring the activity of “acetyl-CoA hydrolase”, especially from Saccharomyces cerevisiae or its functional equivalent or its homolog, e.g. the increase of
[74890] (a) a gene product of a gene comprising the nucleic acid molecule as shown in the respective line in column 5 of Table I (whereby the respective line disclose in column 7 the fine chemical pyruvate), application no. 15, preferably the coding region thereof, or a homolog or a fragment thereof, and being depicted in the same respective line as said Ybl015w, or a functional equivalent or a homolog thereof as shown in column 8 of Table I, application no. 15, preferably the coding region thereof, particularly a homolog or functional equivalent as shown in column 8 of Table I B, application no. 15, and being depicted in the same respective line as said Ybl015w, and preferably the activity is increased non-targeted, or
[74891] (b) a polypeptide comprising a polypeptide, a consensus sequence or at least a polypeptide motif as shown in the respective line in column 5 of Table II or in column 8 of Table IV, application no. 15, respectively, and being depicted in the same respective line as said Ybl015w, or a functional equivalent or a homolog thereof as depicted in column 8 of Table II, application no. 15, preferably a homolog or functional equivalent as depicted in column 8 of Table II B, application no. 15, and being depicted in the same respective line as said Ybl015w, and preferably the activity is increased non-targeted, whereby the respective line disclose in column 7 the fine chemical pyruvate.

[74892] Accordingly, in one embodiment, the molecule which activity is to be increased in the process of the invention is the gene product with an activity as a “acetyl-CoA hydrolase”, preferably it is the molecule of section (a) or (b) of this paragraph.

[74893] In particular, it was observed that in plants, especially in Arabidopsis thaliana, increasing or generating the activity of a gene product non-targeted with the activity of a “acetyl-CoA hydrolase”, preferably being encoded by a gene comprising the nucleic acid sequence SEQ ID NO. 137387, preferably the coding region thereof, conferred the production of or the increase in pyruvate compared with the wild type control.

[74894] The nucleic acid sequence of Ybr218c from Saccharomyces cerevisiae, e.g. as shown in the respective line in column 5 of Table I, application no. 15, has been published in A. And the activity of the gene product thereof is the activity of pyruvate carboxylase.

[74895] Accordingly, in one embodiment, the process of the present invention for producing malate in a non-human organism, like a microorganism or a plant or a part thereof, comprises increasing or generating the activity of a gene product with the activity of a gene product conferring the activity of “pyruvate carboxylase”, especially from Saccharomyces cerevisiae or its functional equivalent or its homolog, e.g. the increase of
[74896] (a) a gene product of a gene comprising the nucleic acid molecule as shown in the respective line in column 5 of Table I (whereby the respective line disclose in column 7 the fine chemical malate), application no. 15, preferably the coding region thereof, or a homolog or a fragment thereof, and being depicted in the same respective line as said Ybr218c, or a functional equivalent or a homolog thereof as shown in column 8 of Table I, application no. 15, preferably the coding region thereof, particularly a homolog or functional equivalent as shown in column 8 of Table I B, application no. 15, and being depicted in the same respective line as said Ybr218c, and preferably the activity is increased plastidic, or
[74897] (b) a polypeptide comprising a polypeptide, a consensus sequence or at least a polypeptide motif as shown in the respective line in column 5 of Table II or in column 8 of Table IV, application no. 15, respectively, and being depicted in the same respective line as said Ybr218c, or a functional equivalent or a homolog thereof as depicted in column 8 of Table II, application no. 15, preferably a homolog or functional equivalent as depicted in column 8 of Table II B, application no. 15, and being depicted in the same respective line as said Ybr218c, and preferably the activity is increased plastidic, whereby the respective line disclose in column 7 the fine chemical malate.

[74898] Accordingly, in one embodiment, the molecule which activity is to be increased in the process of the invention is the gene product with an activity as a “pyruvate carboxylase”, preferably it is the molecule of section (a) or (b) of this paragraph.

[74899] In particular, it was observed that in plants, especially in Arabidopsis thaliana, increasing or generating the activity of a gene product plastidic with the activity of a “pyruvate carboxylase”, preferably being encoded by a gene comprising the nucleic acid sequence SEQ ID NO. 96779, preferably the coding region thereof, conferred the production of or the increase in malate compared with the wild type control.

[74900] The nucleic acid sequence of Ycr102c from Saccharomyces cerevisiae, e.g. as shown in the respective line in column 5 of Table I, application no. 15, has been published in A. And the activity of the gene product thereof is the activity of ycr102c-protein.

[74901] Accordingly, in one embodiment, the process of the present invention for producing fumarate in a non-human organism, like a microorganism or a plant or a part thereof, comprises increasing or generating the activity of a gene product with the activity of a gene product conferring the activity of “ycr102c-protein”, especially from Saccharomyces cerevisiae or its functional equivalent or its homolog, e.g. the increase of
[74902] (a) a gene product of a gene comprising the nucleic acid molecule as shown in the respective line in column 5 of Table I (whereby the respective line disclose in column 7 the fine chemical fumarate), application no. 15, preferably the coding region thereof, or a homolog or a fragment thereof, and being depicted in the same respective line as said Ycr102c, or a functional equivalent or a homolog thereof as shown in column 8 of Table I, application no. 15, preferably the coding region thereof, particularly a homolog or functional equivalent as shown in column 8 of Table I B, application no. 15, and being depicted in the same respective line as said Ycr102c, and preferably the activity is increased plastidic, or
[74903] (b) a polypeptide comprising a polypeptide, a consensus sequence or at least a polypeptide motif as shown in the respective line in column 5 of Table II or in column 8 of Table IV, application no. 15, respectively, and being depicted in the same respective line as said Ycr102c, or a functional equivalent or a homolog thereof as depicted in column 8 of Table II, application no. 15, preferably a homolog or functional equivalent as depicted in column 8 of Table II B, application no. 15, and being depicted in the same respective line as said Ycr102c, and preferably the activity is increased plastidic, whereby the respective line disclose in column 7 the fine chemical fumarate.

[74904] Accordingly, in one embodiment, the molecule which activity is to be increased in the process of the invention is the gene product with an activity as a “ycr102c-protein”, preferably it is the molecule of section (a) or (b) of this paragraph.

[74905] In particular, it was observed that in plants, especially in Arabidopsis thaliana, increasing or generating the activity of a gene product plastidic with the activity of a “ycr102c-protein”, preferably being encoded by a gene comprising the nucleic acid sequence SEQ ID NO. 63264, preferably the coding region thereof, conferred the production of or the increase in fumarate compared with the wild type control.

[74906] The nucleic acid sequence of Ydl159w-a from Saccharomyces cerevisiae, e.g. as shown in the respective line in column 5 of Table I, application no. 15, has been published in A. And the activity of the gene product thereof is the activity of YDL159W-A-protein.

[74907] Accordingly, in one embodiment, the process of the present invention for producing fumarate in a non-human organism, like a microorganism or a plant or a part thereof, comprises increasing or generating the activity of a gene product with the activity of a gene product conferring the activity of “YDL159W-A-protein”, especially from Saccharomyces cerevisiae or its functional equivalent or its homolog, e.g. the increase of
[74908] (a) a gene product of a gene comprising the nucleic acid molecule as shown in the respective line in column 5 of Table I (whereby the respective line disclose in column 7 the fine chemical fumarate), application no. 15, preferably the coding region thereof, or a homolog or a fragment thereof, and being depicted in the same respective line as said Ydl159w-a, or a functional equivalent or a homolog thereof as shown in column 8 of Table I, application no. 15, preferably the coding region thereof, particularly a homolog or functional equivalent as shown in column 8 of Table I B, application no. 15, and being depicted in the same respective line as said Ydl159w-a, and preferably the activity is increased non-targeted, or
[74909] (b) a polypeptide comprising a polypeptide, a consensus sequence or at least a polypeptide motif as shown in the respective line in column 5 of Table II or in column 8 of Table IV, application no. 15, respectively, and being depicted in the same respective line as said Ydl159w-a, or a functional equivalent or a homolog thereof as depicted in column 8 of Table II, application no. 15, preferably a homolog or functional equivalent as depicted in column 8 of Table II B, application no. 15, and being depicted in the same respective line as said Yd1159w-a, and preferably the activity is increased non-targeted, whereby the respective line disclose in column 7 the fine chemical fumarate.

[74910] Accordingly, in one embodiment, the molecule which activity is to be increased in the process of the invention is the gene product with an activity as a “YDL159W-A-protein”, preferably it is the molecule of section (a) or (b) of this paragraph.

[74911] In particular, it was observed that in plants, especially in Arabidopsis thaliana, increasing or generating the activity of a gene product non-targeted with the activity of a “YDL159W-A-protein”, preferably being encoded by a gene comprising the nucleic acid sequence SEQ ID NO. 137498, preferably the coding region thereof, conferred the production of or the increase in fumarate compared with the wild type control.

[74912] The nucleic acid sequence of Ydr044w from Saccharomyces cerevisiae, e.g. as shown in the respective line in column 5 of Table I, application no. 15, has been published in A. And the activity of the gene product thereof is the activity of coproporphyrinogen III oxidase.

[74913] Accordingly, in one embodiment, the process of the present invention for producing fumarate in a non-human organism, like a microorganism or a plant or a part thereof, comprises increasing or generating the activity of a gene product with the activity of a gene product conferring the activity of “coproporphyrinogen III oxidase”, especially from Saccharomyces cerevisiae or its functional equivalent or its homolog, e.g. the increase of
[74914] (a) a gene product of a gene comprising the nucleic acid molecule as shown in the respective line in column 5 of Table I (whereby the respective line disclose in column 7 the fine chemical fumarate), application no. 15, preferably the coding region thereof, or a homolog or a fragment thereof, and being depicted in the same respective line as said Ydr044w, or a functional equivalent or a homolog thereof as shown in column 8 of Table I, application no. 15, preferably the coding region thereof, particularly a homolog or functional equivalent as shown in column 8 of Table I B, application no. 15, and being depicted in the same respective line as said Ydr044w, and preferably the activity is increased plastidic, or
[74915] (b) a polypeptide comprising a polypeptide, a consensus sequence or at least a polypeptide motif as shown in the respective line in column 5 of Table II or in column 8 of Table IV, application no. 15, respectively, and being depicted in the same respective line as said Ydr044w, or a functional equivalent or a homolog thereof as depicted in column 8 of Table II, application no. 15, preferably a homolog or functional equivalent as depicted in column 8 of Table II B, application no. 15, and being depicted in the same respective line as said Ydr044w, and preferably the activity is increased plastidic, whereby the respective line disclose in column 7 the fine chemical fumarate.

[74916] Accordingly, in one embodiment, the molecule which activity is to be increased in the process of the invention is the gene product with an activity as a “coproporphyrinogen III oxidase”, preferably it is the molecule of section (a) or (b) of this paragraph.

[74917] In particular, it was observed that in plants, especially in Arabidopsis thaliana, increasing or generating the activity of a gene product plastidic with the activity of a “coproporphyrinogen III oxidase”, preferably being encoded by a gene comprising the nucleic acid sequence SEQ ID NO. 63334, preferably the coding region thereof, conferred the production of or the increase in fumarate compared with the wild type control.

[74918] The nucleic acid sequence of Ydr044w from Saccharomyces cerevisiae, e.g. as shown in the respective line in column 5 of Table I, application no. 15, has been published in A. And the activity of the gene product thereof is the activity of coproporphyrinogen III oxidase.

[74919] Accordingly, in one embodiment, the process of the present invention for producing succinate in a non-human organism, like a microorganism or a plant or a part thereof, comprises increasing or generating the activity of a gene product with the activity of a gene product conferring the activity of “coproporphyrinogen III oxidase”, especially from Saccharomyces cerevisiae or its functional equivalent or its homolog, e.g. the increase of
[74920] (a) a gene product of a gene comprising the nucleic acid molecule as shown in the respective line in column 5 of Table I (whereby the respective line disclose in column 7 the fine chemical succinate), application no. 15, preferably the coding region thereof, or a homolog or a fragment thereof, and being depicted in the same respective line as said Ydr044w, or a functional equivalent or a homolog thereof as shown in column 8 of Table I, application no. 15, preferably the coding region thereof, particularly a homolog or functional equivalent as shown in column 8 of Table I B, application no. 15, and being depicted in the same respective line as said Ydr044w, and preferably the activity is increased plastidic, or
[74921] (b) a polypeptide comprising a polypeptide, a consensus sequence or at least a polypeptide motif as shown in the respective line in column 5 of Table II or in column 8 of Table IV, application no. 15, respectively, and being depicted in the same respective line as said Ydr044w, or a functional equivalent or a homolog thereof as depicted in column 8 of Table II, application no. 15, preferably a homolog or functional equivalent as depicted in column 8 of Table II B, application no. 15, and being depicted in the same respective line as said Ydr044w, and preferably the activity is increased plastidic, whereby the respective line disclose in column 7 the fine chemical succinate.

[74922] Accordingly, in one embodiment, the molecule which activity is to be increased in the process of the invention is the gene product with an activity as a “coproporphyrinogen III oxidase”, preferably it is the molecule of section (a) or (b) of this paragraph.

[74923] In particular, it was observed that in plants, especially in Arabidopsis thaliana, increasing or generating the activity of a gene product plastidic with the activity of a “coproporphyrinogen III oxidase”, preferably being encoded by a gene comprising the nucleic acid sequence SEQ ID NO. 63334, preferably the coding region thereof, conferred the production of or the increase in succinate compared with the wild type control.

[74924] The nucleic acid sequence of Ygl237c from Saccharomyces cerevisiae, e.g. as shown in the respective line in column 5 of Table I, application no. 15, has been published in A. And the activity of the gene product thereof is the activity of ygl237c-protein.

[74925] Accordingly, in one embodiment, the process of the present invention for producing malate in a non-human organism, like a microorganism or a plant or a part thereof, comprises increasing or generating the activity of a gene product with the activity of a gene product conferring the activity of “ygl237c-protein”, especially from Saccharomyces cerevisiae or its functional equivalent or its homolog, e.g. the increase of
[74926] (a) a gene product of a gene comprising the nucleic acid molecule as shown in the respective line in column 5 of Table I (whereby the respective line disclose in column 7 the fine chemical malate), application no. 15, preferably the coding region thereof, or a homolog or a fragment thereof, and being depicted in the same respective line as said Ygl237c, or a functional equivalent or a homolog thereof as shown in column 8 of Table I, application no. 15, preferably the coding region thereof, particularly a homolog or functional equivalent as shown in column 8 of Table I B, application no. 15, and being depicted in the same respective line as said Ygl237c, and preferably the activity is increased non-targeted, or
[74927] (b) a polypeptide comprising a polypeptide, a consensus sequence or at least a polypeptide motif as shown in the respective line in column 5 of Table II or in column 8 of Table IV, application no. 15, respectively, and being depicted in the same respective line as said Ygl237c, or a functional equivalent or a homolog thereof as depicted in column 8 of Table II, application no. 15, preferably a homolog or functional equivalent as depicted in column 8 of Table II B, application no. 15, and being depicted in the same respective line as said Ygl237c, and preferably the activity is increased non-targeted, whereby the respective line disclose in column 7 the fine chemical malate.

[74928] Accordingly, in one embodiment, the molecule which activity is to be increased in the process of the invention is the gene product with an activity as a “ygl237c-protein”, preferably it is the molecule of section (a) or (b) of this paragraph.

[74929] In particular, it was observed that in plants, especially in Arabidopsis thaliana, increasing or generating the activity of a gene product non-targeted with the activity of a “ygl237c-protein”, preferably being encoded by a gene comprising the nucleic acid sequence SEQ ID NO. 64177, preferably the coding region thereof, conferred the production of or the increase in malate compared with the wild type control.

[74930] The nucleic acid sequence of Ygl237c from Saccharomyces cerevisiae, e.g. as shown in the respective line in column 5 of Table I, application no. 15, has been published in A. And the activity of the gene product thereof is the activity of ygl237c-protein.

[74931] Accordingly, in one embodiment, the process of the present invention for producing succinate in a non-human organism, like a microorganism or a plant or a part thereof, comprises increasing or generating the activity of a gene product with the activity of a gene product conferring the activity of “ygl237c-protein”, especially from Saccharomyces cerevisiae or its functional equivalent or its homolog, e.g. the increase of
[74932] (a) a gene product of a gene comprising the nucleic acid molecule as shown in the respective line in column 5 of Table I (whereby the respective line disclose in column 7 the fine chemical succinate), application no. 15, preferably the coding region thereof, or a homolog or a fragment thereof, and being depicted in the same respective line as said Ygl237c, or a functional equivalent or a homolog thereof as shown in column 8 of Table I, application no. 15, preferably the coding region thereof, particularly a homolog or functional equivalent as shown in column 8 of Table I B, application no. 15, and being depicted in the same respective line as said Ygl237c, and preferably the activity is increased non-targeted, or
[74933] (b) a polypeptide comprising a polypeptide, a consensus sequence or at least a polypeptide motif as shown in the respective line in column 5 of Table II or in column 8 of Table IV, application no. 15, respectively, and being depicted in the same respective line as said Ygl237c, or a functional equivalent or a homolog thereof as depicted in column 8 of Table II, application no. 15, preferably a homolog or functional equivalent as depicted in column 8 of Table II B, application no. 15, and being depicted in the same respective line as said Ygl237c, and preferably the activity is increased non-targeted, whereby the respective line disclose in column 7 the fine chemical succinate.

[74934] Accordingly, in one embodiment, the molecule which activity is to be increased in the process of the invention is the gene product with an activity as a “ygl237c-protein”, preferably it is the molecule of section (a) or (b) of this paragraph.

[74935] In particular, it was observed that in plants, especially in Arabidopsis thaliana, increasing or generating the activity of a gene product non-targeted with the activity of a “ygl237c-protein”, preferably being encoded by a gene comprising the nucleic acid sequence SEQ ID NO. 64177, preferably the coding region thereof, conferred the production of or the increase in succinate compared with the wild type control.

[74936] The nucleic acid sequence of Ygr193c from Saccharomyces cerevisiae, e.g. as shown in the respective line in column 5 of Table I, application no. 15, has been published in A. And the activity of the gene product thereof is the activity of YGR193C-protein.

[74937] Accordingly, in one embodiment, the process of the present invention for producing fumarate in a non-human organism, like a microorganism or a plant or a part thereof, comprises increasing or generating the activity of a gene product with the activity of a gene product conferring the activity of “YGR193C-protein”, especially from Saccharomyces cerevisiae or its functional equivalent or its homolog, e.g. the increase of
[74938] (a) a gene product of a gene comprising the nucleic acid molecule as shown in the respective line in column 5 of Table I (whereby the respective line disclose in column 7 the fine chemical fumarate), application no. 15, preferably the coding region thereof, or a homolog or a fragment thereof, and being depicted in the same respective line as said Ygr193c, or a functional equivalent or a homolog thereof as shown in column 8 of Table I, application no. 15, preferably the coding region thereof, particularly a homolog or functional equivalent as shown in column 8 of Table I B, application no. 15, and being depicted in the same respective line as said Ygr193c, and preferably the activity is increased non-targeted, or
[74939] (b) a polypeptide comprising a polypeptide, a consensus sequence or at least a polypeptide motif as shown in the respective line in column 5 of Table II or in column 8 of Table IV, application no. 15, respectively, and being depicted in the same respective line as said Ygr193c, or a functional equivalent or a homolog thereof as depicted in column 8 of Table II, application no. 15, preferably a homolog or functional equivalent as depicted in column 8 of Table II B, application no. 15, and being depicted in the same respective line as said Ygr193c, and preferably the activity is increased non-targeted, whereby the respective line disclose in column 7 the fine chemical fumarate.

[74940] Accordingly, in one embodiment, the molecule which activity is to be increased in the process of the invention is the gene product with an activity as a “YGR193C-protein”, preferably it is the molecule of section (a) or (b) of this paragraph.

[74941] In particular, it was observed that in plants, especially in Arabidopsis thaliana, increasing or generating the activity of a gene product non-targeted with the activity of a “YGR193C-protein”, preferably being encoded by a gene comprising the nucleic acid sequence SEQ ID NO. 108487, preferably the coding region thereof, conferred the production of or the increase in fumarate compared with the wild type control.

[74942] The nucleic acid sequence of Ygr193c from Saccharomyces cerevisiae, e.g. as shown in the respective line in column 5 of Table I, application no. 15, has been published in A. And the activity of the gene product thereof is the activity of YGR193C-protein.

[74943] Accordingly, in one embodiment, the process of the present invention for producing malate in a non-human organism, like a microorganism or a plant or a part thereof, comprises increasing or generating the activity of a gene product with the activity of a gene product conferring the activity of “YGR193C-protein”, especially from Saccharomyces cerevisiae or its functional equivalent or its homolog, e.g. the increase of
[74944] (a) a gene product of a gene comprising the nucleic acid molecule as shown in the respective line in column 5 of Table I (whereby the respective line disclose in column 7 the fine chemical malate), application no. 15, preferably the coding region thereof, or a homolog or a fragment thereof, and being depicted in the same respective line as said Ygr193c, or a functional equivalent or a homolog thereof as shown in column 8 of Table I, application no. 15, preferably the coding region thereof, particularly a homolog or functional equivalent as shown in column 8 of Table I B, application no. 15, and being depicted in the same respective line as said Ygr193c, and preferably the activity is increased non-targeted, or
[74945] (b) a polypeptide comprising a polypeptide, a consensus sequence or at least a polypeptide motif as shown in the respective line in column 5 of Table II or in column 8 of Table IV, application no. 15, respectively, and being depicted in the same respective line as said Ygr193c, or a functional equivalent or a homolog thereof as depicted in column 8 of Table II, application no. 15, preferably a homolog or functional equivalent as depicted in column 8 of Table II B, application no. 15, and being depicted in the same respective line as said Ygr193c, and preferably the activity is increased non-targeted, whereby the respective line disclose in column 7 the fine chemical malate.

[74946] Accordingly, in one embodiment, the molecule which activity is to be increased in the process of the invention is the gene product with an activity as a “YGR193C-protein”, preferably it is the molecule of section (a) or (b) of this paragraph.

[74947] In particular, it was observed that in plants, especially in Arabidopsis thaliana, increasing or generating the activity of a gene product non-targeted with the activity of a “YGR193C-protein”, preferably being encoded by a gene comprising the nucleic acid sequence SEQ ID NO. 108487, preferably the coding region thereof, conferred the production of or the increase in malate compared with the wild type control.

[74948] The nucleic acid sequence of Ygr193c from Saccharomyces cerevisiae, e.g. as shown in the respective line in column 5 of Table I, application no. 15, has been published in A. And the activity of the gene product thereof is the activity of YGR193C-protein.

[74949] Accordingly, in one embodiment, the process of the present invention for producing succinate in a non-human organism, like a microorganism or a plant or a part thereof, comprises increasing or generating the activity of a gene product with the activity of a gene product conferring the activity of “YGR193C-protein”, especially from Saccharomyces cerevisiae or its functional equivalent or its homolog, e.g. the increase of
[74950] (a) a gene product of a gene comprising the nucleic acid molecule as shown in the respective line in column 5 of Table I (whereby the respective line disclose in column 7 the fine chemical succinate), application no. 15, preferably the coding region thereof, or a homolog or a fragment thereof, and being depicted in the same respective line as said Ygr193c, or a functional equivalent or a homolog thereof as shown in column 8 of Table I, application no. 15, preferably the coding region thereof, particularly a homolog or functional equivalent as shown in column 8 of Table I B, application no. 15, and being depicted in the same respective line as said Ygr193c, and preferably the activity is increased non-targeted, or
[74951] (b) a polypeptide comprising a polypeptide, a consensus sequence or at least a polypeptide motif as shown in the respective line in column 5 of Table II or in column 8 of Table IV, application no. 15, respectively, and being depicted in the same respective line as said Ygr193c, or a functional equivalent or a homolog thereof as depicted in column 8 of Table II, application no. 15, preferably a homolog or functional equivalent as depicted in column 8 of Table II B, application no. 15, and being depicted in the same respective line as said Ygr193c, and preferably the activity is increased non-targeted, whereby the respective line disclose in column 7 the fine chemical succinate.

[74952] Accordingly, in one embodiment, the molecule which activity is to be increased in the process of the invention is the gene product with an activity as a “YGR193C-protein”, preferably it is the molecule of section (a) or (b) of this paragraph.

[74953] In particular, it was observed that in plants, especially in Arabidopsis thaliana, increasing or generating the activity of a gene product non-targeted with the activity of a “YGR193C-protein”, preferably being encoded by a gene comprising the nucleic acid sequence SEQ ID NO. 108487, preferably the coding region thereof, conferred the production of or the increase in succinate compared with the wild type control.

[74954] The nucleic acid sequence of Ygr221 c from Saccharomyces cerevisiae, e.g. as shown in the respective line in column 5 of Table I, application no. 15, has been published in A. And the activity of the gene product thereof is the activity of ygr221c-protein.

[74955] Accordingly, in one embodiment, the process of the present invention for producing malate in a non-human organism, like a microorganism or a plant or a part thereof, comprises increasing or generating the activity of a gene product with the activity of a gene product conferring the activity of “ygr221 c-protein”, especially from Saccharomyces cerevisiae or its functional equivalent or its homolog, e.g. the increase of
[74956] (a) a gene product of a gene comprising the nucleic acid molecule as shown in the respective line in column 5 of Table I (whereby the respective line disclose in column 7 the fine chemical malate), application no. 15, preferably the coding region thereof, or a homolog or a fragment thereof, and being depicted in the same respective line as said Ygr221 c, or a functional equivalent or a homolog thereof as shown in column 8 of Table I, application no. 15, preferably the coding region thereof, particularly a homolog or functional equivalent as shown in column 8 of Table I B, application no. 15, and being depicted in the same respective line as said Ygr221c, and preferably the activity is increased plastidic, or
[74957] (b) a polypeptide comprising a polypeptide, a consensus sequence or at least a polypeptide motif as shown in the respective line in column 5 of Table II or in column 8 of Table IV, application no. 15, respectively, and being depicted in the same respective line as said Ygr221c, or a functional equivalent or a homolog thereof as depicted in column 8 of Table II, application no. 15, preferably a homolog or functional equivalent as depicted in column 8 of Table II B, application no. 15, and being depicted in the same respective line as said Ygr221 c, and preferably the activity is increased plastidic, whereby the respective line disclose in column 7 the fine chemical malate.

[74958] Accordingly, in one embodiment, the molecule which activity is to be increased in the process of the invention is the gene product with an activity as a “ygr221c-protein”, preferably it is the molecule of section (a) or (b) of this paragraph.

[74959] In particular, it was observed that in plants, especially in Arabidopsis thaliana, increasing or generating the activity of a gene product plastidic with the activity of a “ygr221 c-protein”, preferably being encoded by a gene comprising the nucleic acid sequence SEQ ID NO. 64315, preferably the coding region thereof, conferred the production of or the increase in malate compared with the wild type control.

[74960] The nucleic acid sequence of Yhl032c from Saccharomyces cerevisiae, e.g. as shown in the respective line in column 5 of Table I, application no. 15, has been published in A. And the activity of the gene product thereof is the activity of glycerol kinase.

[74961] Accordingly, in one embodiment, the process of the present invention for producing citrate in a non-human organism, like a microorganism or a plant or a part thereof, comprises increasing or generating the activity of a gene product with the activity of a gene product conferring the activity of “glycerol kinase”, especially from Saccharomyces cerevisiae or its functional equivalent or its homolog, e.g. the increase of
[74962] (a) a gene product of a gene comprising the nucleic acid molecule as shown in the respective line in column 5 of Table I (whereby the respective line disclose in column 7 the fine chemical citrate), application no. 15, preferably the coding region thereof, or a homolog or a fragment thereof, and being depicted in the same respective line as said Yhl032c, or a functional equivalent or a homolog thereof as shown in column 8 of Table I, application no. 15, preferably the coding region thereof, particularly a homolog or functional equivalent as shown in column 8 of Table I B, application no. 15, and being depicted in the same respective line as said Yhl032c, and preferably the activity is increased plastidic, or
[74963] (b) a polypeptide comprising a polypeptide, a consensus sequence or at least a polypeptide motif as shown in the respective line in column 5 of Table II or in column 8 of Table IV, application no. 15, respectively, and being depicted in the same respective line as said Yhl032c, or a functional equivalent or a homolog thereof as depicted in column 8 of Table II, application no. 15, preferably a homolog or functional equivalent as depicted in column 8 of Table II B, application no. 15, and being depicted in the same respective line as said Yhl032c, and preferably the activity is increased plastidic, whereby the respective line disclose in column 7 the fine chemical citrate.

[74964] Accordingly, in one embodiment, the molecule which activity is to be increased in the process of the invention is the gene product with an activity as a “glycerol kinase”, preferably it is the molecule of section (a) or (b) of this paragraph.

[74965] In particular, it was observed that in plants, especially in Arabidopsis thaliana, increasing or generating the activity of a gene product plastidic with the activity of a “glycerol kinase”, preferably being encoded by a gene comprising the nucleic acid sequence SEQ ID NO. 101855, preferably the coding region thereof, conferred the production of or the increase in citrate compared with the wild type control.

[74966] The nucleic acid sequence of Yhr131c from Saccharomyces cerevisiae, e.g. as shown in the respective line in column 5 of Table I, application no. 15, has been published in A. And the activity of the gene product thereof is the activity of yhr131c-protein.

[74967] Accordingly, in one embodiment, the process of the present invention for producing malate in a non-human organism, like a microorganism or a plant or a part thereof, comprises increasing or generating the activity of a gene product with the activity of a gene product conferring the activity of “yhr131c-protein”, especially from Saccharomyces cerevisiae or its functional equivalent or its homolog, e.g. the increase of
[74968] (a) a gene product of a gene comprising the nucleic acid molecule as shown in the respective line in column 5 of Table I (whereby the respective line disclose in column 7 the fine chemical malate), application no. 15, preferably the coding region thereof, or a homolog or a fragment thereof, and being depicted in the same respective line as said Yhr131c, or a functional equivalent or a homolog thereof as shown in column 8 of Table I, application no. 15, preferably the coding region thereof, particularly a homolog or functional equivalent as shown in column 8 of Table I B, application no. 15, and being depicted in the same respective line as said Yhr131c, and preferably the activity is increased plastidic, or
[74969] (b) a polypeptide comprising a polypeptide, a consensus sequence or at least a polypeptide motif as shown in the respective line in column 5 of Table II or in column 8 of Table IV, application no. 15, respectively, and being depicted in the same respective line as said Yhr131c, or a functional equivalent or a homolog thereof as depicted in column 8 of Table II, application no. 15, preferably a homolog or functional equivalent as depicted in column 8 of Table II B, application no. 15, and being depicted in the same respective line as said Yhr131c, and preferably the activity is increased plastidic, whereby the respective line disclose in column 7 the fine chemical malate.

[74970] Accordingly, in one embodiment, the molecule which activity is to be increased in the process of the invention is the gene product with an activity as a “yhr131c-protein”, preferably it is the molecule of section (a) or (b) of this paragraph.

[74971] In particular, it was observed that in plants, especially in Arabidopsis thaliana, increasing or generating the activity of a gene product plastidic with the activity of a “yhr131c-protein”, preferably being encoded by a gene comprising the nucleic acid sequence SEQ ID NO. 97620, preferably the coding region thereof, conferred the production of or the increase in malate compared with the wild type control.

[74972] The nucleic acid sequence of Yhr207c from Saccharomyces cerevisiae, e.g. as shown in the respective line in column 5 of Table I, application no. 15, has been published in A. And the activity of the gene product thereof is the activity of yhr207c-protein.

[74973] Accordingly, in one embodiment, the process of the present invention for producing succinate in a non-human organism, like a microorganism or a plant or a part thereof, comprises increasing or generating the activity of a gene product with the activity of a gene product conferring the activity of “yhr207c-protein”, especially from Saccharomyces cerevisiae or its functional equivalent or its homolog, e.g. the increase of
[74974] (a) a gene product of a gene comprising the nucleic acid molecule as shown in the respective line in column 5 of Table I (whereby the respective line disclose in column 7 the fine chemical succinate), application no. 15, preferably the coding region thereof, or a homolog or a fragment thereof, and being depicted in the same respective line as said Yhr207c, or a functional equivalent or a homolog thereof as shown in column 8 of Table I, application no. 15, preferably the coding region thereof, particularly a homolog or functional equivalent as shown in column 8 of Table I B, application no. 15, and being depicted in the same respective line as said Yhr207c, and preferably the activity is increased plastidic, or
[74975] (b) a polypeptide comprising a polypeptide, a consensus sequence or at least a polypeptide motif as shown in the respective line in column 5 of Table II or in column 8 of Table IV, application no. 15, respectively, and being depicted in the same respective line as said Yhr207c, or a functional equivalent or a homolog thereof as depicted in column 8 of Table II, application no. 15, preferably a homolog or functional equivalent as depicted in column 8 of Table II B, application no. 15, and being depicted in the same respective line as said

[74976] Yhr207c, and preferably the activity is increased plastidic, whereby the respective line disclose in column 7 the fine chemical succinate.

[74977] Accordingly, in one embodiment, the molecule which activity is to be increased in the process of the invention is the gene product with an activity as a “yhr207c-protein”, preferably it is the molecule of section (a) or (b) of this paragraph.

[74978] In particular, it was observed that in plants, especially in Arabidopsis thaliana, increasing or generating the activity of a gene product plastidic with the activity of a “yhr207c-protein”, preferably being encoded by a gene comprising the nucleic acid sequence SEQ ID NO. 64546, preferably the coding region thereof, conferred the production of or the increase in succinate compared with the wild type control.

[74979] The nucleic acid sequence of Yjl073w from Saccharomyces cerevisiae, e.g. as shown in the respective line in column 5 of Table I, application no. 15, has been published in A. And the activity of the gene product thereof is the activity of DnaJ-like chaperone.

[74980] Accordingly, in one embodiment, the process of the present invention for producing glycerate in a non-human organism, like a microorganism or a plant or a part thereof, comprises increasing or generating the activity of a gene product with the activity of a gene product conferring the activity of “DnaJ-like chaperone”, especially from Saccharomyces cerevisiae or its functional equivalent or its homolog, e.g. the increase of
[74981] (a) a gene product of a gene comprising the nucleic acid molecule as shown in the respective line in column 5 of Table I (whereby the respective line disclose in column 7 the fine chemical glycerate), application no. 15, preferably the coding region thereof, or a homolog or a fragment thereof, and being depicted in the same respective line as said Yjl073w, or a functional equivalent or a homolog thereof as shown in column 8 of Table I, application no. 15, preferably the coding region thereof, particularly a homolog or functional equivalent as shown in column 8 of Table I B, application no. 15, and being depicted in the same respective line as said Yjl073w, and preferably the activity is increased plastidic, or
[74982] (b) a polypeptide comprising a polypeptide, a consensus sequence or at least a polypeptide motif as shown in the respective line in column 5 of Table II or in column 8 of Table IV, application no. 15, respectively, and being depicted in the same respective line as said Yjl073w, or a functional equivalent or a homolog thereof as depicted in column 8 of Table II, application no. 15, preferably a homolog or functional equivalent as depicted in column 8 of Table II B, application no. 15, and being depicted in the same respective line as said Yjl073w, and preferably the activity is increased plastidic, whereby the respective line disclose in column 7 the fine chemical glycerate.

[74983] Accordingly, in one embodiment, the molecule which activity is to be increased in the process of the invention is the gene product with an activity as a “DnaJ-like chaperone”, preferably it is the molecule of section (a) or (b) of this paragraph.

[74984] In particular, it was observed that in plants, especially in Arabidopsis thaliana, increasing or generating the activity of a gene product plastidic with the activity of a “DnaJ-like chaperone”, preferably being encoded by a gene comprising the nucleic acid sequence SEQ ID NO. 64964, preferably the coding region thereof, conferred the production of or the increase in glycerate compared with the wild type control.

[74985] The nucleic acid sequence of Yjl219w from Saccharomyces cerevisiae, e.g. as shown in the respective line in column 5 of Table I, application no. 15, has been published in A. And the activity of the gene product thereof is the activity of hexose transporter.

[74986] Accordingly, in one embodiment, the process of the present invention for producing oxalate in a non-human organism, like a microorganism or a plant or a part thereof, comprises increasing or generating the activity of a gene product with the activity of a gene product conferring the activity of “hexose transporter”, especially from Saccharomyces cerevisiae or its functional equivalent or its homolog, e.g. the increase of
[74987] (a) a gene product of a gene comprising the nucleic acid molecule as shown in the respective line in column 5 of Table I (whereby the respective line disclose in column 7 the fine chemical oxalate), application no. 15, preferably the coding region thereof, or a homolog or a fragment thereof, and being depicted in the same respective line as said Yjl219w, or a functional equivalent or a homolog thereof as shown in column 8 of Table I, application no. 15, preferably the coding region thereof, particularly a homolog or functional equivalent as shown in column 8 of Table I B, application no. 15, and being depicted in the same respective line as said Yjl219w, and preferably the activity is increased non-targeted, or
[74988] (b) a polypeptide comprising a polypeptide, a consensus sequence or at least a polypeptide motif as shown in the respective line in column 5 of Table II or in column 8 of Table IV, application no. 15, respectively, and being depicted in the same respective line as said Yjl219w, or a functional equivalent or a homolog thereof as depicted in column 8 of Table II, application no. 15, preferably a homolog or functional equivalent as depicted in column 8 of Table II B, application no. 15, and being depicted in the same respective line as said Yjl219w, and preferably the activity is increased non-targeted, whereby the respective line disclose in column 7 the fine chemical oxalate.

[74989] Accordingly, in one embodiment, the molecule which activity is to be increased in the process of the invention is the gene product with an activity as a “hexose transporter”, preferably it is the molecule of section (a) or (b) of this paragraph.

[74990] In particular, it was observed that in plants, especially in Arabidopsis thaliana, increasing or generating the activity of a gene product non-targeted with the activity of a “hexose transporter”, preferably being encoded by a gene comprising the nucleic acid sequence SEQ ID NO. 97635, preferably the coding region thereof, conferred the production of or the increase in oxalate compared with the wild type control.

[74991] The nucleic acid sequence of Yjr148w from Saccharomyces cerevisiae, e.g. as shown in the respective line in column 5 of Table I, application no. 15, has been published in A. And the activity of the gene product thereof is the activity of branched chain aminotransferase.

[74992] Accordingly, in one embodiment, the process of the present invention for producing citramalate in a non-human organism, like a microorganism or a plant or a part thereof, comprises increasing or generating the activity of a gene product with the activity of a gene product conferring the activity of “branched chain aminotransferase”, especially from Saccharomyces cerevisiae or its functional equivalent or its homolog, e.g. the increase of
[74993] (a) a gene product of a gene comprising the nucleic acid molecule as shown in the respective line in column 5 of Table I (whereby the respective line disclose in column 7 the fine chemical citramalate), application no. 15, preferably the coding region thereof, or a homolog or a fragment thereof, and being depicted in the same respective line as said Yjr148w, or a functional equivalent or a homolog thereof as shown in column 8 of Table I, application no. 15, preferably the coding region thereof, particularly a homolog or functional equivalent as shown in column 8 of Table I B, application no. 15, and being depicted in the same respective line as said Yjr148w, and preferably the activity is increased plastidic, or
[74994] (b) a polypeptide comprising a polypeptide, a consensus sequence or at least a polypeptide motif as shown in the respective line in column 5 of Table II or in column 8 of Table IV, application no. 15, respectively, and being depicted in the same respective line as said Yjr148w, or a functional equivalent or a homolog thereof as depicted in column 8 of Table II, application no. 15, preferably a homolog or functional equivalent as depicted in column 8 of Table II B, application no. 15, and being depicted in the same respective line as said Yjr148w, and preferably the activity is increased plastidic, whereby the respective line disclose in column 7 the fine chemical citramalate.

[74995] Accordingly, in one embodiment, the molecule which activity is to be increased in the process of the invention is the gene product with an activity as a “branched chain aminotransferase”, preferably it is the molecule of section (a) or (b) of this paragraph.

[74996] In particular, it was observed that in plants, especially in Arabidopsis thaliana, increasing or generating the activity of a gene product plastidic with the activity of a “branched chain aminotransferase”, preferably being encoded by a gene comprising the nucleic acid sequence SEQ ID NO. 90409, preferably the coding region thereof, conferred the production of or the increase in citramalate compared with the wild type control.

[74997] The nucleic acid sequence of Yjr153w from Saccharomyces cerevisiae, e.g. as shown in the respective line in column 5 of Table I, application no. 15, has been published in A. And the activity of the gene product thereof is the activity of polygalacturonase.

[74998] Accordingly, in one embodiment, the process of the present invention for producing fumarate in a non-human organism, like a microorganism or a plant or a part thereof, comprises increasing or generating the activity of a gene product with the activity of a gene product conferring the activity of “polygalacturonase”, especially from Saccharomyces cerevisiae or its functional equivalent or its homolog, e.g. the increase of
[74999] (a) a gene product of a gene comprising the nucleic acid molecule as shown in the respective line in column 5 of Table I (whereby the respective line disclose in column 7 the fine chemical fumarate), application no. 15, preferably the coding region thereof, or a homolog or a fragment thereof, and being depicted in the same respective line as said Yjr153w, or a functional equivalent or a homolog thereof as shown in column 8 of Table I, application no. 15, preferably the coding region thereof, particularly a homolog or functional equivalent as shown in column 8 of Table I B, application no. 15, and being depicted in the same respective line as said Yjr153w, and preferably the activity is increased non-targeted, or
[75000] (b) a polypeptide comprising a polypeptide, a consensus sequence or at least a polypeptide motif as shown in the respective line in column 5 of Table II or in column 8 of Table IV, application no. 15, respectively, and being depicted in the same respective line as said Yjr153w, or a functional equivalent or a homolog thereof as depicted in column 8 of Table II, application no. 15, preferably a homolog or functional equivalent as depicted in column 8 of Table II B, application no. 15, and being depicted in the same respective line as said Yjr153w, and preferably the activity is increased non-targeted, whereby the respective line disclose in column 7 the fine chemical fumarate.

[75001] Accordingly, in one embodiment, the molecule which activity is to be increased in the process of the invention is the gene product with an activity as a “polygalacturonase”, preferably it is the molecule of section (a) or (b) of this paragraph.

[75002] In particular, it was observed that in plants, especially in Arabidopsis thaliana, increasing or generating the activity of a gene product non-targeted with the activity of a “polygalacturonase”, preferably being encoded by a gene comprising the nucleic acid sequence SEQ ID NO. 66274, preferably the coding region thereof, conferred the production of or the increase in fumarate compared with the wild type control.

[75003] The nucleic acid sequence of Yjr153w from Saccharomyces cerevisiae, e.g. as shown in the respective line in column 5 of Table I, application no. 15, has been published in A. And the activity of the gene product thereof is the activity of polygalacturonase.

[75004] Accordingly, in one embodiment, the process of the present invention for producing malate in a non-human organism, like a microorganism or a plant or a part thereof, comprises increasing or generating the activity of a gene product with the activity of a gene product conferring the activity of “polygalacturonase”, especially from Saccharomyces cerevisiae or its functional equivalent or its homolog, e.g. the increase of
[75005] (a) a gene product of a gene comprising the nucleic acid molecule as shown in the respective line in column 5 of Table I (whereby the respective line disclose in column 7 the fine chemical malate), application no. 15, preferably the coding region thereof, or a homolog or a fragment thereof, and being depicted in the same respective line as said Yjr153w, or a functional equivalent or a homolog thereof as shown in column 8 of Table I, application no. 15, preferably the coding region thereof, particularly a homolog or functional equivalent as shown in column 8 of Table I B, application no. 15, and being depicted in the same respective line as said Yjr153w, and preferably the activity is increased non-targeted, or
[75006] (b) a polypeptide comprising a polypeptide, a consensus sequence or at least a polypeptide motif as shown in the respective line in column 5 of Table II or in column 8 of Table IV, application no. 15, respectively, and being depicted in the same respective line as said Yjr153w, or a functional equivalent or a homolog thereof as depicted in column 8 of Table II, application no. 15, preferably a homolog or functional equivalent as depicted in column 8 of Table II B, application no. 15, and being depicted in the same respective line as said Yjr153w, and preferably the activity is increased non-targeted, whereby the respective line disclose in column 7 the fine chemical malate.

[75007] Accordingly, in one embodiment, the molecule which activity is to be increased in the process of the invention is the gene product with an activity as a “polygalacturonase”, preferably it is the molecule of section (a) or (b) of this paragraph.

[75008] In particular, it was observed that in plants, especially in Arabidopsis thaliana, increasing or generating the activity of a gene product non-targeted with the activity of a “polygalacturonase”, preferably being encoded by a gene comprising the nucleic acid sequence SEQ ID NO. 66274, preferably the coding region thereof, conferred the production of or the increase in malate compared with the wild type control.

[75009] The nucleic acid sequence of YKL038W from Saccharomyces cerevisiae, e.g. as shown in the respective line in column 5 of Table I, application no. 15, has been published in A. And the activity of the gene product thereof is the activity of YKL038W-protein.

[75010] Accordingly, in one embodiment, the process of the present invention for producing malate in a non-human organism, like a microorganism or a plant or a part thereof, comprises increasing or generating the activity of a gene product with the activity of a gene product conferring the activity of “YKL038W-protein”, especially from Saccharomyces cerevisiae or its functional equivalent or its homolog, e.g. the increase of
[75011] (a) a gene product of a gene comprising the nucleic acid molecule as shown in the respective line in column 5 of Table I (whereby the respective line disclose in column 7 the fine chemical malate), application no. 15, preferably the coding region thereof, or a homolog or a fragment thereof, and being depicted in the same respective line as said YKL038W, or a functional equivalent or a homolog thereof as shown in column 8 of Table I, application no. 15, preferably the coding region thereof, particularly a homolog or functional equivalent as shown in column 8 of Table I B, application no. 15, and being depicted in the same respective line as said YKL038W, and preferably the activity is increased plastidic, or
[75012] (b) a polypeptide comprising a polypeptide, a consensus sequence or at least a polypeptide motif as shown in the respective line in column 5 of Table II or in column 8 of Table IV, application no. 15, respectively, and being depicted in the same respective line as said YKL038W, or a functional equivalent or a homolog thereof as depicted in column 8 of Table II, application no. 15, preferably a homolog or functional equivalent as depicted in column 8 of Table II B, application no. 15, and being depicted in the same respective line as said YKL038W, and preferably the activity is increased plastidic, whereby the respective line disclose in column 7 the fine chemical malate.

[75013] Accordingly, in one embodiment, the molecule which activity is to be increased in the process of the invention is the gene product with an activity as a “YKL038W-protein”, preferably it is the molecule of section (a) or (b) of this paragraph.

[75014] In particular, it was observed that in plants, especially in Arabidopsis thaliana, increasing or generating the activity of a gene product plastidic with the activity of a “YKL038W-protein”, preferably being encoded by a gene comprising the nucleic acid sequence SEQ ID NO. 90602, preferably the coding region thereof, conferred the production of or the increase in malate compared with the wild type control.

[75015] The nucleic acid sequence of Ykl140w from Saccharomyces cerevisiae, e.g. as shown in the respective line in column 5 of Table I, application no. 15, has been published in A. And the activity of the gene product thereof is the activity of YKL140W-protein.

[75016] Accordingly, in one embodiment, the process of the present invention for producing vitamin c and/or threonic acid in a non-human organism, like a microorganism or a plant or a part thereof, comprises increasing or generating the activity of a gene product with the activity of a gene product conferring the activity of “YKL140W-protein”, especially from Saccharomyces cerevisiae or its functional equivalent or its homolog, e.g. the increase of
[75017] (a) a gene product of a gene comprising the nucleic acid molecule as shown in the respective line in column 5 of Table I (whereby the respective line disclose in column 7 the fine chemical vitamin c and/or threonic acid), application no. 15, preferably the coding region thereof, or a homolog or a fragment thereof, and being depicted in the same respective line as said Ykl140w, or a functional equivalent or a homolog thereof as shown in column 8 of Table I, application no. 15, preferably the coding region thereof, particularly a homolog or functional equivalent as shown in column 8 of Table I B, application no. 15, and being depicted in the same respective line as said Ykl140w, and preferably the activity is increased non-targeted, or
[75018] (b) a polypeptide comprising a polypeptide, a consensus sequence or at least a polypeptide motif as shown in the respective line in column 5 of Table II or in column 8 of Table IV, application no. 15, respectively, and being depicted in the same respective line as said Ykl140w, or a functional equivalent or a homolog thereof as depicted in column 8 of Table II, application no. 15, preferably a homolog or functional equivalent as depicted in column 8 of Table II B, application no. 15, and being depicted in the same respective line as said Ykl140w, and preferably the activity is increased non-targeted, whereby the respective line disclose in column 7 the fine chemical vitamin c and/or threonic acid.

[75019] Accordingly, in one embodiment, the molecule which activity is to be increased in the process of the invention is the gene product with an activity as a “YKL140W-protein”, preferably it is the molecule of section (a) or (b) of this paragraph.

[75020] In particular, it was observed that in plants, especially in Arabidopsis thaliana, increasing or generating the activity of a gene product non-targeted with the activity of a “YKL140W-protein”, preferably being encoded by a gene comprising the nucleic acid sequence SEQ ID NO. 137502, preferably the coding region thereof, conferred the production of or the increase in vitamin c and/or threonic acid compared with the wild type control.

[75021] The nucleic acid sequence of Ylr065c from Saccharomyces cerevisiae, e.g. as shown in the respective line in column 5 of Table I, application no. 15, has been published in A. And the activity of the gene product thereof is the activity of ylr065c-protein.

[75022] Accordingly, in one embodiment, the process of the present invention for producing fumarate in a non-human organism, like a microorganism or a plant or a part thereof, comprises increasing or generating the activity of a gene product with the activity of a gene product conferring the activity of “ylr065c-protein”, especially from Saccharomyces cerevisiae or its functional equivalent or its homolog, e.g. the increase of
[75023] (a) a gene product of a gene comprising the nucleic acid molecule as shown in the respective line in column 5 of Table I (whereby the respective line disclose in column 7 the fine chemical fumarate), application no. 15, preferably the coding region thereof, or a homolog or a fragment thereof, and being depicted in the same respective line as said Ylr065c, or a functional equivalent or a homolog thereof as shown in column 8 of Table I, application no. 15, preferably the coding region thereof, particularly a homolog or functional equivalent as shown in column 8 of Table I B, application no. 15, and being depicted in the same respective line as said Ylr065c, and preferably the activity is increased plastidic, or
[75024] (b) a polypeptide comprising a polypeptide, a consensus sequence or at least a polypeptide motif as shown in the respective line in column 5 of Table II or in column 8 of Table IV, application no. 15, respectively, and being depicted in the same respective line as said Ylr065c, or a functional equivalent or a homolog thereof as depicted in column 8 of Table II, application no. 15, preferably a homolog or functional equivalent as depicted in column 8 of Table II B, application no. 15, and being depicted in the same respective line as said Ylr065c, and preferably the activity is increased plastidic, whereby the respective line disclose in column 7 the fine chemical fumarate.

[75025] Accordingly, in one embodiment, the molecule which activity is to be increased in the process of the invention is the gene product with an activity as a “ylr065c-protein”, preferably it is the molecule of section (a) or (b) of this paragraph.

[75026] In particular, it was observed that in plants, especially in Arabidopsis thaliana, increasing or generating the activity of a gene product plastidic with the activity of a “ylr065c-protein”, preferably being encoded by a gene comprising the nucleic acid sequence SEQ ID NO. 66695, preferably the coding region thereof, conferred the production of or the increase in fumarate compared with the wild type control.

[75027] The nucleic acid sequence of Ylr174w from Saccharomyces cerevisiae, e.g. as shown in the respective line in column 5 of Table I, application no. 15, has been published in A. And the activity of the gene product thereof is the activity of isocitrate dehydrogenase.

[75028] Accordingly, in one embodiment, the process of the present invention for producing succinate in a non-human organism, like a microorganism or a plant or a part thereof, comprises increasing or generating the activity of a gene product with the activity of a gene product conferring the activity of “isocitrate dehydrogenase”, especially from Saccharomyces cerevisiae or its functional equivalent or its homolog, e.g. the increase of
[75029] (a) a gene product of a gene comprising the nucleic acid molecule as shown in the respective line in column 5 of Table I (whereby the respective line disclose in column 7 the fine chemical succinate), application no. 15, preferably the coding region thereof, or a homolog or a fragment thereof, and being depicted in the same respective line as said Ylr174w, or a functional equivalent or a homolog thereof as shown in column 8 of Table I, application no. 15, preferably the coding region thereof, particularly a homolog or functional equivalent as shown in column 8 of Table I B, application no. 15, and being depicted in the same respective line as said Ylr174w, and preferably the activity is increased plastidic, or
[75030] (b) a polypeptide comprising a polypeptide, a consensus sequence or at least a polypeptide motif as shown in the respective line in column 5 of Table II or in column 8 of Table IV, application no. 15, respectively, and being depicted in the same respective line as said Ylr174w, or a functional equivalent or a homolog thereof as depicted in column 8 of Table II, application no. 15, preferably a homolog or functional equivalent as depicted in column 8 of Table II B, application no. 15, and being depicted in the same respective line as said Ylr174w, and preferably the activity is increased plastidic, whereby the respective line disclose in column 7 the fine chemical succinate.

[75031] Accordingly, in one embodiment, the molecule which activity is to be increased in the process of the invention is the gene product with an activity as a “isocitrate dehydrogenase”, preferably it is the molecule of section (a) or (b) of this paragraph.

[75032] In particular, it was observed that in plants, especially in Arabidopsis thaliana, increasing or generating the activity of a gene product plastidic with the activity of a “isocitrate dehydrogenase”, preferably being encoded by a gene comprising the nucleic acid sequence SEQ ID NO. 137547, preferably the coding region thereof, conferred the production of or the increase in succinate compared with the wild type control.

[75033] The nucleic acid sequence of Ylr326w from Saccharomyces cerevisiae, e.g. as shown in the respective line in column 5 of Table I, application no. 15, has been published in A. And the activity of the gene product thereof is the activity of ylr326w-protein.

[75034] Accordingly, in one embodiment, the process of the present invention for producing fumarate in a non-human organism, like a microorganism or a plant or a part thereof, comprises increasing or generating the activity of a gene product with the activity of a gene product conferring the activity of “ylr326w-protein”, especially from Saccharomyces cerevisiae or its functional equivalent or its homolog, e.g. the increase of
[75035] (a) a gene product of a gene comprising the nucleic acid molecule as shown in the respective line in column 5 of Table I (whereby the respective line disclose in column 7 the fine chemical fumarate), application no. 15, preferably the coding region thereof, or a homolog or a fragment thereof, and being depicted in the same respective line as said Ylr326w, or a functional equivalent or a homolog thereof as shown in column 8 of Table I, application no. 15, preferably the coding region thereof, particularly a homolog or functional equivalent as shown in column 8 of Table I B, application no. 15, and being depicted in the same respective line as said Ylr326w, and preferably the activity is increased plastidic, or
[75036] (b) a polypeptide comprising a polypeptide, a consensus sequence or at least a polypeptide motif as shown in the respective line in column 5 of Table II or in column 8 of Table IV, application no. 15, respectively, and being depicted in the same respective line as said Ylr326w, or a functional equivalent or a homolog thereof as depicted in column 8 of Table II, application no. 15, preferably a homolog or functional equivalent as depicted in column 8 of Table II B, application no. 15, and being depicted in the same respective line as said Ylr326w, and preferably the activity is increased plastidic, whereby the respective line disclose in column 7 the fine chemical fumarate.

[75037] Accordingly, in one embodiment, the molecule which activity is to be increased in the process of the invention is the gene product with an activity as a “ylr326w-protein”, preferably it is the molecule of section (a) or (b) of this paragraph.

[75038] In particular, it was observed that in plants, especially in Arabidopsis thaliana, increasing or generating the activity of a gene product plastidic with the activity of a “ylr326w-protein”, preferably being encoded by a gene comprising the nucleic acid sequence SEQ ID NO. 129123, preferably the coding region thereof, conferred the production of or the increase in fumarate compared with the wild type control.

[75039] The nucleic acid sequence of Ylr326w from Saccharomyces cerevisiae, e.g. as shown in the respective line in column 5 of Table I, application no. 15, has been published in A. And the activity of the gene product thereof is the activity of ylr326w-protein.

[75040] Accordingly, in one embodiment, the process of the present invention for producing glycerate in a non-human organism, like a microorganism or a plant or a part thereof, comprises increasing or generating the activity of a gene product with the activity of a gene product conferring the activity of “ylr326w-protein”, especially from Saccharomyces cerevisiae or its functional equivalent or its homolog, e.g. the increase of
[75041] (a) a gene product of a gene comprising the nucleic acid molecule as shown in the respective line in column 5 of Table I (whereby the respective line disclose in column 7 the fine chemical glycerate), application no. 15, preferably the coding region thereof, or a homolog or a fragment thereof, and being depicted in the same respective line as said Ylr326w, or a functional equivalent or a homolog thereof as shown in column 8 of Table I, application no. 15, preferably the coding region thereof, particularly a homolog or functional equivalent as shown in column 8 of Table I B, application no. 15, and being depicted in the same respective line as said Ylr326w, and preferably the activity is increased plastidic, or
[75042] (b) a polypeptide comprising a polypeptide, a consensus sequence or at least a polypeptide motif as shown in the respective line in column 5 of Table II or in column 8 of Table IV, application no. 15, respectively, and being depicted in the same respective line as said Ylr326w, or a functional equivalent or a homolog thereof as depicted in column 8 of Table II, application no. 15, preferably a homolog or functional equivalent as depicted in column 8 of Table II B, application no. 15, and being depicted in the same respective line as said Ylr326w, and preferably the activity is increased plastidic, whereby the respective line disclose in column 7 the fine chemical glycerate.

[75043] Accordingly, in one embodiment, the molecule which activity is to be increased in the process of the invention is the gene product with an activity as a “ylr326w-protein”, preferably it is the molecule of section (a) or (b) of this paragraph.

[75044] In particular, it was observed that in plants, especially in Arabidopsis thaliana, increasing or generating the activity of a gene product plastidic with the activity of a “ylr326w-protein”, preferably being encoded by a gene comprising the nucleic acid sequence SEQ ID NO. 129123, preferably the coding region thereof, conferred the production of or the increase in glycerate compared with the wild type control.

[75045] The nucleic acid sequence of Ylr326w from Saccharomyces cerevisiae, e.g. as shown in the respective line in column 5 of Table I, application no. 15, has been published in A. And the activity of the gene product thereof is the activity of ylr326w-protein.

[75046] Accordingly, in one embodiment, the process of the present invention for producing vitamin c and/or threonic acid in a non-human organism, like a microorganism or a plant or a part thereof, comprises increasing or generating the activity of a gene product with the activity of a gene product conferring the activity of “ylr326w-protein”, especially from Saccharomyces cerevisiae or its functional equivalent or its homolog, e.g. the increase of
[75047] (a) a gene product of a gene comprising the nucleic acid molecule as shown in the respective line in column 5 of Table I (whereby the respective line disclose in column 7 the fine chemical vitamin c and/or threonic acid), application no. 15, preferably the coding region thereof, or a homolog or a fragment thereof, and being depicted in the same respective line as said Ylr326w, or a functional equivalent or a homolog thereof as shown in column 8 of Table I, application no. 15, preferably the coding region thereof, particularly a homolog or functional equivalent as shown in column 8 of Table I B, application no. 15, and being depicted in the same respective line as said Ylr326w, and preferably the activity is increased plastidic, or
[75048] (b) a polypeptide comprising a polypeptide, a consensus sequence or at least a polypeptide motif as shown in the respective line in column 5 of Table II or in column 8 of Table IV, application no. 15, respectively, and being depicted in the same respective line as said Ylr326w, or a functional equivalent or a homolog thereof as depicted in column 8 of Table II, application no. 15, preferably a homolog or functional equivalent as depicted in column 8 of Table II B, application no. 15, and being depicted in the same respective line as said Ylr326w, and preferably the activity is increased plastidic, whereby the respective line disclose in column 7 the fine chemical vitamin c and/or threonic acid.

[75049] Accordingly, in one embodiment, the molecule which activity is to be increased in the process of the invention is the gene product with an activity as a “ylr326w-protein”, preferably it is the molecule of section (a) or (b) of this paragraph.

[75050] In particular, it was observed that in plants, especially in Arabidopsis thaliana, increasing or generating the activity of a gene product plastidic with the activity of a “ylr326w-protein”, preferably being encoded by a gene comprising the nucleic acid sequence SEQ ID NO. 129123, preferably the coding region thereof, conferred the production of or the increase in vitamin c and/or threonic acid compared with the wild type control.

[75051] The nucleic acid sequence of Yml084w from Saccharomyces cerevisiae, e.g. as shown in the respective line in column 5 of Table I, application no. 15, has been published in A. And the activity of the gene product thereof is the activity of yml084w-protein.

[75052] Accordingly, in one embodiment, the process of the present invention for producing fumarate in a non-human organism, like a microorganism or a plant or a part thereof, comprises increasing or generating the activity of a gene product with the activity of a gene product conferring the activity of “yml084w-protein”, especially from Saccharomyces cerevisiae or its functional equivalent or its homolog, e.g. the increase of
[75053] (a) a gene product of a gene comprising the nucleic acid molecule as shown in the respective line in column 5 of Table I (whereby the respective line disclose in column 7 the fine chemical fumarate), application no. 15, preferably the coding region thereof, or a homolog or a fragment thereof, and being depicted in the same respective line as said Yml084w, or a functional equivalent or a homolog thereof as shown in column 8 of Table I, application no. 15, preferably the coding region thereof, particularly a homolog or functional equivalent as shown in column 8 of Table I B, application no. 15, and being depicted in the same respective line as said Yml084w, and preferably the activity is increased plastidic, or
[75054] (b) a polypeptide comprising a polypeptide, a consensus sequence or at least a polypeptide motif as shown in the respective line in column 5 of Table II or in column 8 of Table IV, application no. 15, respectively, and being depicted in the same respective line as said Yml084w, or a functional equivalent or a homolog thereof as depicted in column 8 of Table II, application no. 15, preferably a homolog or functional equivalent as depicted in column 8 of Table II B, application no. 15, and being depicted in the same respective line as said Yml084w, and preferably the activity is increased plastidic, whereby the respective line disclose in column 7 the fine chemical fumarate.

[75055] Accordingly, in one embodiment, the molecule which activity is to be increased in the process of the invention is the gene product with an activity as a “yml084w-protein”, preferably it is the molecule of section (a) or (b) of this paragraph.

[75056] In particular, it was observed that in plants, especially in Arabidopsis thaliana, increasing or generating the activity of a gene product plastidic with the activity of a “yml084w-protein”, preferably being encoded by a gene comprising the nucleic acid sequence SEQ ID NO. 15175, preferably the coding region thereof, conferred the production of or the increase in fumarate compared with the wild type control.

[75057] The nucleic acid sequence of Yml084w from Saccharomyces cerevisiae, e.g. as shown in the respective line in column 5 of Table I, application no. 15, has been published in A. And the activity of the gene product thereof is the activity of yml084w-protein.

[75058] Accordingly, in one embodiment, the process of the present invention for producing succinate in a non-human organism, like a microorganism or a plant or a part thereof, comprises increasing or generating the activity of a gene product with the activity of a gene product conferring the activity of “yml084w-protein”, especially from Saccharomyces cerevisiae or its functional equivalent or its homolog, e.g. the increase of
[75059] (a) a gene product of a gene comprising the nucleic acid molecule as shown in the respective line in column 5 of Table I (whereby the respective line disclose in column 7 the fine chemical succinate), application no. 15, preferably the coding region thereof, or a homolog or a fragment thereof, and being depicted in the same respective line as said Yml084w, or a functional equivalent or a homolog thereof as shown in column 8 of Table 1, application no. 15, preferably the coding region thereof, particularly a homolog or functional equivalent as shown in column 8 of Table I B, application no. 15, and being depicted in the same respective line as said Yml084w, and preferably the activity is increased plastidic, or
[75060] (b) a polypeptide comprising a polypeptide, a consensus sequence or at least a polypeptide motif as shown in the respective line in column 5 of Table II or in column 8 of Table IV, application no. 15, respectively, and being depicted in the same respective line as said Yml084w, or a functional equivalent or a homolog thereof as depicted in column 8 of Table II, application no. 15, preferably a homolog or functional equivalent as depicted in column 8 of Table II B, application no. 15, and being depicted in the same respective line as said Yml084w, and preferably the activity is increased plastidic, whereby the respective line disclose in column 7 the fine chemical succinate.

[75061] Accordingly, in one embodiment, the molecule which activity is to be increased in the process of the invention is the gene product with an activity as a “yml084w-protein”, preferably it is the molecule of section (a) or (b) of this paragraph.

[75062] In particular, it was observed that in plants, especially in Arabidopsis thaliana, increasing or generating the activity of a gene product plastidic with the activity of a “yml084w-protein”, preferably being encoded by a gene comprising the nucleic acid sequence SEQ ID NO. 15175, preferably the coding region thereof, conferred the production of or the increase in succinate compared with the wild type control.

[75063] The nucleic acid sequence of Yol073c from Saccharomyces cerevisiae, e.g. as shown in the respective line in column 5 of Table I, application no. 15, has been published in A. And the activity of the gene product thereof is the activity of yol073c-protein.

[75064] Accordingly, in one embodiment, the process of the present invention for producing citramalate in a non-human organism, like a microorganism or a plant or a part thereof, comprises increasing or generating the activity of a gene product with the activity of a gene product conferring the activity of “yol073c-protein”, especially from Saccharomyces cerevisiae or its functional equivalent or its homolog, e.g. the increase of
[75065] (a) a gene product of a gene comprising the nucleic acid molecule as shown in the respective line in column 5 of Table I (whereby the respective line disclose in column 7 the fine chemical citramalate), application no. 15, preferably the coding region thereof, or a homolog or a fragment thereof, and being depicted in the same respective line as said Yol073c, or a functional equivalent or a homolog thereof as shown in column 8 of Table I, application no. 15, preferably the coding region thereof, particularly a homolog or functional equivalent as shown in column 8 of Table I B, application no. 15, and being depicted in the same respective line as said Yol073c, and preferably the activity is increased plastidic, or
[75066] (b) a polypeptide comprising a polypeptide, a consensus sequence or at least a polypeptide motif as shown in the respective line in column 5 of Table II or in column 8 of Table IV, application no. 15, respectively, and being depicted in the same respective line as said Yol073c, or a functional equivalent or a homolog thereof as depicted in column 8 of Table II, application no. 15, preferably a homolog or functional equivalent as depicted in column 8 of Table II B, application no. 15, and being depicted in the same respective line as said Yol073c, and preferably the activity is increased plastidic, whereby the respective line disclose in column 7 the fine chemical citramalate.

[75067] Accordingly, in one embodiment, the molecule which activity is to be increased in the process of the invention is the gene product with an activity as a “yol073c-protein”, preferably it is the molecule of section (a) or (b) of this paragraph.

[75068] In particular, it was observed that in plants, especially in Arabidopsis thaliana, increasing or generating the activity of a gene product plastidic with the activity of a “yol073c-protein”, preferably being encoded by a gene comprising the nucleic acid sequence SEQ ID NO. 137818, preferably the coding region thereof, conferred the production of or the increase in citramalate compared with the wild type control.

[75069] The nucleic acid sequence of Yol073c from Saccharomyces cerevisiae, e.g. as shown in the respective line in column 5 of Table I, application no. 15, has been published in A. And the activity of the gene product thereof is the activity of yol073c-protein.

[75070] Accordingly, in one embodiment, the process of the present invention for producing malate in a non-human organism, like a microorganism or a plant or a part thereof, comprises increasing or generating the activity of a gene product with the activity of a gene product conferring the activity of “yol073c-protein”, especially from Saccharomyces cerevisiae or its functional equivalent or its homolog, e.g. the increase of
[75071] (a) a gene product of a gene comprising the nucleic acid molecule as shown in the respective line in column 5 of Table I (whereby the respective line disclose in column 7 the fine chemical malate), application no. 15, preferably the coding region thereof, or a homolog or a fragment thereof, and being depicted in the same respective line as said Yol073c, or a functional equivalent or a homolog thereof as shown in column 8 of Table I, application no. 15, preferably the coding region thereof, particularly a homolog or functional equivalent as shown in column 8 of Table I B, application no. 15, and being depicted in the same respective line as said Yol073c, and preferably the activity is increased plastidic, or
[75072] (b) a polypeptide comprising a polypeptide, a consensus sequence or at least a polypeptide motif as shown in the respective line in column 5 of Table II or in column 8 of Table IV, application no. 15, respectively, and being depicted in the same respective line as said Yol073c, or a functional equivalent or a homolog thereof as depicted in column 8 of Table II, application no. 15, preferably a homolog or functional equivalent as depicted in column 8 of Table II B, application no. 15, and being depicted in the same respective line as said Yol073c, and preferably the activity is increased plastidic, whereby the respective line disclose in column 7 the fine chemical malate.

[75073] Accordingly, in one embodiment, the molecule which activity is to be increased in the process of the invention is the gene product with an activity as a “yol073c-protein”, preferably it is the molecule of section (a) or (b) of this paragraph.

[75074] In particular, it was observed that in plants, especially in Arabidopsis thaliana, increasing or generating the activity of a gene product plastidic with the activity of a “yol073c-protein”, preferably being encoded by a gene comprising the nucleic acid sequence SEQ ID NO. 137818, preferably the coding region thereof, conferred the production of or the increase in malate compared with the wild type control.

[75075] The nucleic acid sequence of Yol160w from Saccharomyces cerevisiae, e.g. as shown in the respective line in column 5 of Table I, application no. 15, has been published in A. And the activity of the gene product thereof is the activity of yol160w-protein.

[75076] Accordingly, in one embodiment, the process of the present invention for producing vitamin c and/or threonic acid in a non-human organism, like a microorganism or a plant or a part thereof, comprises increasing or generating the activity of a gene product with the activity of a gene product conferring the activity of “yol160w-protein”, especially from Saccharomyces cerevisiae or its functional equivalent or its homolog, e.g. the increase of
[75077] (a) a gene product of a gene comprising the nucleic acid molecule as shown in the respective line in column 5 of Table I (whereby the respective line disclose in column 7 the fine chemical vitamin c and/or threonic acid), application no. 15, preferably the coding region thereof, or a homolog or a fragment thereof, and being depicted in the same respective line as said Yol160w, or a functional equivalent or a homolog thereof as shown in column 8 of Table I, application no. 15, preferably the coding region thereof, particularly a homolog or functional equivalent as shown in column 8 of Table I B, application no. 15, and being depicted in the same respective line as said Yol160w, and preferably the activity is increased plastidic, or
[75078] (b) a polypeptide comprising a polypeptide, a consensus sequence or at least a polypeptide motif as shown in the respective line in column 5 of Table II or in column 8 of Table IV, application no. 15, respectively, and being depicted in the same respective line as said Yol160w, or a functional equivalent or a homolog thereof as depicted in column 8 of Table II, application no. 15, preferably a homolog or functional equivalent as depicted in column 8 of Table II B, application no. 15, and being depicted in the same respective line as said Yol160w, and preferably the activity is increased plastidic, whereby the respective line disclose in column 7 the fine chemical vitamin c and/or threonic acid.

[75079] Accordingly, in one embodiment, the molecule which activity is to be increased in the process of the invention is the gene product with an activity as a “yol160w-protein”, preferably it is the molecule of section (a) or (b) of this paragraph.

[75080] In particular, it was observed that in plants, especially in Arabidopsis thaliana, increasing or generating the activity of a gene product plastidic with the activity of a “yol160w-protein”, preferably being encoded by a gene comprising the nucleic acid sequence SEQ ID NO. 15179, preferably the coding region thereof, conferred the production of or the increase in vitamin c and/or threonic acid compared with the wild type control.

[75081] The nucleic acid sequence of Ypl028w from Saccharomyces cerevisiae, e.g. as shown in the respective line in column 5 of Table I, application no. 15, has been published in A. And the activity of the gene product thereof is the activity of acetyl-CoA acetyltransferase.

[75082] Accordingly, in one embodiment, the process of the present invention for producing malate in a non-human organism, like a microorganism or a plant or a part thereof, comprises increasing or generating the activity of a gene product with the activity of a gene product conferring the activity of “acetyl-CoA acetyltransferase”, especially from Saccharomyces cerevisiae or its functional equivalent or its homolog, e.g. the increase of
[75083] (a) a gene product of a gene comprising the nucleic acid molecule as shown in the respective line in column 5 of Table I (whereby the respective line disclose in column 7 the fine chemical malate), application no. 15, preferably the coding region thereof, or a homolog or a fragment thereof, and being depicted in the same respective line as said Ypl028w, or a functional equivalent or a homolog thereof as shown in column 8 of Table I, application no. 15, preferably the coding region thereof, particularly a homolog or functional equivalent as shown in column 8 of Table I B, application no. 15, and being depicted in the same respective line as said Ypl028w, and preferably the activity is increased non-targeted, or
[75084] (b) a polypeptide comprising a polypeptide, a consensus sequence or at least a polypeptide motif as shown in the respective line in column 5 of Table II or in column 8 of Table IV, application no. 15, respectively, and being depicted in the same respective line as said Ypl028w, or a functional equivalent or a homolog thereof as depicted in column 8 of Table II, application no. 15, preferably a homolog or functional equivalent as depicted in column 8 of Table II B, application no. 15, and being depicted in the same respective line as said Ypl028w, and preferably the activity is increased non-targeted, whereby the respective line disclose in column 7 the fine chemical malate.

[75085] Accordingly, in one embodiment, the molecule which activity is to be increased in the process of the invention is the gene product with an activity as a “acetyl-CoA acetyltransferase”, preferably it is the molecule of section (a) or (b) of this paragraph.

[75086] In particular, it was observed that in plants, especially in Arabidopsis thaliana, increasing or generating the activity of a gene product non-targeted with the activity of a “acetyl-CoA acetyltransferase”, preferably being encoded by a gene comprising the nucleic acid sequence SEQ ID NO. 92668, preferably the coding region thereof, conferred the production of or the increase in malate compared with the wild type control.

[75087] The nucleic acid sequence of Ypr138c from Saccharomyces cerevisiae, e.g. as shown in the respective line in column 5 of Table I, application no. 15, has been published in A. And the activity of the gene product thereof is the activity of ammonium transporter.

[75088] Accordingly, in one embodiment, the process of the present invention for producing vitamin c and/or threonic acid in a non-human organism, like a microorganism or a plant or a part thereof, comprises increasing or generating the activity of a gene product with the activity of a gene product conferring the activity of “ammonium transporter”, especially from Saccharomyces cerevisiae or its functional equivalent or its homolog, e.g. the increase of
[75089] (a) a gene product of a gene comprising the nucleic acid molecule as shown in the respective line in column 5 of Table I (whereby the respective line disclose in column 7 the fine chemical vitamin c and/or threonic acid), application no. 15, preferably the coding region thereof, or a homolog or a fragment thereof, and being depicted in the same respective line as said Ypr138c, or a functional equivalent or a homolog thereof as shown in column 8 of Table I, application no. 15, preferably the coding region thereof, particularly a homolog or functional equivalent as shown in column 8 of Table I B, application no. 15, and being depicted in the same respective line as said Ypr138c, and preferably the activity is increased non-targeted, or
[75090] (b) a polypeptide comprising a polypeptide, a consensus sequence or at least a polypeptide motif as shown in the respective line in column 5 of Table II or in column 8 of Table IV, application no. 15, respectively, and being depicted in the same respective line as said Ypr138c, or a functional equivalent or a homolog thereof as depicted in column 8 of Table II, application no. 15, preferably a homolog or functional equivalent as depicted in column 8 of Table II B, application no. 15, and being depicted in the same respective line as said Ypr138c, and preferably the activity is increased non-targeted, whereby the respective line disclose in column 7 the fine chemical vitamin c and/or threonic acid.

[75091] Accordingly, in one embodiment, the molecule which activity is to be increased in the process of the invention is the gene product with an activity as a “ammonium transporter”, preferably it is the molecule of section (a) or (b) of this paragraph.

[75092] In particular, it was observed that in plants, especially in Arabidopsis thaliana, increasing or generating the activity of a gene product non-targeted with the activity of a “ammonium transporter”, preferably being encoded by a gene comprising the nucleic acid sequence SEQ ID NO. 93218, preferably the coding region thereof, conferred the production of or the increase in vitamin c and/or threonic acid compared with the wild type control.

[75093] The nucleic acid sequence of 47266012_SOYBEAN from Glycine max, e.g. as shown in the respective line in column 5 of Table I, application no. 15, is unpublished. And the activity of the gene product thereof is the activity of 47266012-protein.

[75094] Accordingly, in one embodiment, the process of the present invention for producing fumarate in a non-human organism, like a microorganism or a plant or a part thereof, comprises increasing or generating the activity of a gene product with the activity of a gene product conferring the activity of “47266012-protein”, especially from Glycine max or its functional equivalent or its homolog, e.g. the increase of
[75095] (a) a gene product of a gene comprising the nucleic acid molecule as shown in the respective line in column 5 of Table I (whereby the respective line disclose in column 7 the fine chemical fumarate), application no. 15, preferably the coding region thereof, or a homolog or a fragment thereof, and being depicted in the same respective line as said 47266012_SOYBEAN, or a functional equivalent or a homolog thereof as shown in column 8 of Table I, application no. 15, preferably the coding region thereof, particularly a homolog or functional equivalent as shown in column 8 of Table I B, application no. 15, and being depicted in the same respective line as said 47266012_SOYBEAN, and preferably the activity is increased non-targeted, or
[75096] (b) a polypeptide comprising a polypeptide, a consensus sequence or at least a polypeptide motif as shown in the respective line in column 5 of Table II or in column 8 of Table IV, application no. 15, respectively, and being depicted in the same respective line as said 47266012_SOYBEAN, or a functional equivalent or a homolog thereof as depicted in column 8 of Table II, application no. 15, preferably a homolog or functional equivalent as depicted in column 8 of Table II B, application no. 15, and being depicted in the same respective line as said 47266012_SOYBEAN, and preferably the activity is increased non-targeted, whereby the respective line disclose in column 7 the fine chemical fumarate.

[75097] Accordingly, in one embodiment, the molecule which activity is to be increased in the process of the invention is the gene product with an activity as a “47266012-protein”, preferably it is the molecule of section (a) or (b) of this paragraph.

[75098] In particular, it was observed that in plants, especially in Arabidopsis thaliana, increasing or generating the activity of a gene product non-targeted with the activity of a “47266012-protein”, preferably being encoded by a gene comprising the nucleic acid sequence SEQ ID NO. 15187, preferably the coding region thereof, conferred the production of or the increase in fumarate compared with the wild type control.

[75099] The nucleic acid sequence of 47266012_SOYBEAN from Glycine max, e.g. as shown in the respective line in column 5 of Table I, application no. 15, is unpublished. And the activity of the gene product thereof is the activity of 47266012-protein.

[75100] Accordingly, in one embodiment, the process of the present invention for producing malate in a non-human organism, like a microorganism or a plant or a part thereof, comprises increasing or generating the activity of a gene product with the activity of a gene product conferring the activity of “47266012-protein”, especially from Glycine max or its functional equivalent or its homolog, e.g. the increase of
[75101] (a) a gene product of a gene comprising the nucleic acid molecule as shown in the respective line in column 5 of Table I (whereby the respective line disclose in column 7 the fine chemical malate), application no. 15, preferably the coding region thereof, or a homolog or a fragment thereof, and being depicted in the same respective line as said 47266012_SOYBEAN, or a functional equivalent or a homolog thereof as shown in column 8 of Table I, application no. 15, preferably the coding region thereof, particularly a homolog or functional equivalent as shown in column 8 of Table I B, application no. 15, and being depicted in the same respective line as said 47266012_SOYBEAN, and preferably the activity is increased non-targeted, or
[75102] (b) a polypeptide comprising a polypeptide, a consensus sequence or at least a polypeptide motif as shown in the respective line in column 5 of Table II or in column 8 of Table IV, application no. 15, respectively, and being depicted in the same respective line as said 47266012_SOYBEAN, or a functional equivalent or a homolog thereof as depicted in column 8 of Table II, application no. 15, preferably a homolog or functional equivalent as depicted in column 8 of Table II B, application no. 15, and being depicted in the same respective line as said 47266012_SOYBEAN, and preferably the activity is increased non-targeted, whereby the respective line disclose in column 7 the fine chemical malate.

[75103] Accordingly, in one embodiment, the molecule which activity is to be increased in the process of the invention is the gene product with an activity as a “47266012-protein”, preferably it is the molecule of section (a) or (b) of this paragraph.

[75104] In particular, it was observed that in plants, especially in Arabidopsis thaliana, increasing or generating the activity of a gene product non-targeted with the activity of a “47266012-protein”, preferably being encoded by a gene comprising the nucleic acid sequence SEQ ID NO. 15187, preferably the coding region thereof, conferred the production of or the increase in malate compared with the wild type control.

[75105] The nucleic acid sequence of 47266012_SOYBEAN from Glycine max, e.g. as shown in the respective line in column 5 of Table I, application no. 15, is unpublished. And the activity of the gene product thereof is the activity of 47266012-protein.

[75106] Accordingly, in one embodiment, the process of the present invention for producing succinate in a non-human organism, like a microorganism or a plant or a part thereof, comprises increasing or generating the activity of a gene product with the activity of a gene product conferring the activity of “47266012-protein”, especially from Glycine max or its functional equivalent or its homolog, e.g. the increase of
[75107] (a) a gene product of a gene comprising the nucleic acid molecule as shown in the respective line in column 5 of Table I (whereby the respective line disclose in column 7 the fine chemical succinate), application no. 15, preferably the coding region thereof, or a homolog or a fragment thereof, and being depicted in the same respective line as said 47266012_SOYBEAN, or a functional equivalent or a homolog thereof as shown in column 8 of Table I, application no. 15, preferably the coding region thereof, particularly a homolog or functional equivalent as shown in column 8 of Table I B, application no. 15, and being depicted in the same respective line as said 47266012_SOYBEAN, and preferably the activity is increased non-targeted, or
[75108] (b) a polypeptide comprising a polypeptide, a consensus sequence or at least a polypeptide motif as shown in the respective line in column 5 of Table II or in column 8 of Table IV, application no. 15, respectively, and being depicted in the same respective line as said 47266012_SOYBEAN, or a functional equivalent or a homolog thereof as depicted in column 8 of Table II, application no. 15, preferably a homolog or functional equivalent as depicted in column 8 of Table II B, application no. 15, and being depicted in the same respective line as said 47266012_SOYBEAN, and preferably the activity is increased non-targeted, whereby the respective line disclose in column 7 the fine chemical succinate.

[75109] Accordingly, in one embodiment, the molecule which activity is to be increased in the process of the invention is the gene product with an activity as a “47266012-protein”, preferably it is the molecule of section (a) or (b) of this paragraph.

[75110] In particular, it was observed that in plants, especially in Arabidopsis thaliana, increasing or generating the activity of a gene product non-targeted with the activity of a “47266012-protein”, preferably being encoded by a gene comprising the nucleic acid sequence SEQ ID NO. 15187, preferably the coding region thereof, conferred the production of or the increase in succinate compared with the wild type control.

[75111] The nucleic acid sequence of 49747384_SOYBEAN from Glycine max, e.g. as shown in the respective line in column 5 of Table I, application no. 15, is unpublished. And the activity of the gene product thereof is the activity of 49747384_SOYBEAN-protein.

[75112] Accordingly, in one embodiment, the process of the present invention for producing fumarate in a non-human organism, like a microorganism or a plant or a part thereof, comprises increasing or generating the activity of a gene product with the activity of a gene product conferring the activity of “49747384_SOYBEAN-protein”, especially from Glycine max or its functional equivalent or its homolog, e.g. the increase of
[75113] (a) a gene product of a gene comprising the nucleic acid molecule as shown in the respective line in column 5 of Table I (whereby the respective line disclose in column 7 the fine chemical fumarate), application no. 15, preferably the coding region thereof, or a homolog or a fragment thereof, and being depicted in the same respective line as said 49747384_SOYBEAN, or a functional equivalent or a homolog thereof as shown in column 8 of Table I, application no. 15, preferably the coding region thereof, particularly a homolog or functional equivalent as shown in column 8 of Table I B, application no. 15, and being depicted in the same respective line as said 49747384_SOYBEAN, and preferably the activity is increased non-targeted, or
[75114] (b) a polypeptide comprising a polypeptide, a consensus sequence or at least a polypeptide motif as shown in the respective line in column 5 of Table II or in column 8 of Table IV, application no. 15, respectively, and being depicted in the same respective line as said 49747384_SOYBEAN, or a functional equivalent or a homolog thereof as depicted in column 8 of Table II, application no. 15, preferably a homolog or functional equivalent as depicted in column 8 of Table II B, application no. 15, and being depicted in the same respective line as said 49747384_SOYBEAN, and preferably the activity is increased non-targeted, whereby the respective line disclose in column 7 the fine chemical fumarate.

[75115] Accordingly, in one embodiment, the molecule which activity is to be increased in the process of the invention is the gene product with an activity as a “49747384_SOYBEAN-protein”, preferably it is the molecule of section (a) or (b) of this paragraph.

[75116] In particular, it was observed that in plants, especially in Arabidopsis thaliana, increasing or generating the activity of a gene product non-targeted with the activity of a “49747384_SOYBEAN-protein”, preferably being encoded by a gene comprising the nucleic acid sequence SEQ ID NO. 69, preferably the coding region thereof, conferred the production of or the increase in fumarate compared with the wild type control.

[75117] The nucleic acid sequence of 49747384_SOYBEAN from Glycine max, e.g. as shown in the respective line in column 5 of Table I, application no. 15, is unpublished. And the activity of the gene product thereof is the activity of 49747384_SOYBEAN-protein.

[75118] Accordingly, in one embodiment, the process of the present invention for producing malate in a non-human organism, like a microorganism or a plant or a part thereof, comprises increasing or generating the activity of a gene product with the activity of a gene product conferring the activity of “49747384_SOYBEAN-protein”, especially from Glycine max or its functional equivalent or its homolog, e.g. the increase of
[75119] (a) a gene product of a gene comprising the nucleic acid molecule as shown in the respective line in column 5 of Table I (whereby the respective line disclose in column 7 the fine chemical malate), application no. 15, preferably the coding region thereof, or a homolog or a fragment thereof, and being depicted in the same respective line as said 49747384_SOYBEAN, or a functional equivalent or a homolog thereof as shown in column 8 of Table I, application no. 15, preferably the coding region thereof, particularly a homolog or functional equivalent as shown in column 8 of Table I B, application no. 15, and being depicted in the same respective line as said 49747384_SOYBEAN, and preferably the activity is increased non-targeted, or
[75120] (b) a polypeptide comprising a polypeptide, a consensus sequence or at least a polypeptide motif as shown in the respective line in column 5 of Table II or in column 8 of Table IV, application no. 15, respectively, and being depicted in the same respective line as said 49747384_SOYBEAN, or a functional equivalent or a homolog thereof as depicted in column 8 of Table II, application no. 15, preferably a homolog or functional equivalent as depicted in column 8 of Table II B, application no. 15, and being depicted in the same respective line as said 49747384_SOYBEAN, and preferably the activity is increased non-targeted, whereby the respective line disclose in column 7 the fine chemical malate.

[75121] Accordingly, in one embodiment, the molecule which activity is to be increased in the process of the invention is the gene product with an activity as a “49747384_SOYBEAN-protein”, preferably it is the molecule of section (a) or (b) of this paragraph.

[75122] In particular, it was observed that in plants, especially in Arabidopsis thaliana, increasing or generating the activity of a gene product non-targeted with the activity of a “49747384_SOYBEAN-protein”, preferably being encoded by a gene comprising the nucleic acid sequence SEQ ID NO. 69, preferably the coding region thereof, conferred the production of or the increase in malate compared with the wild type control.

[75123] The nucleic acid sequence of 49747384_SOYBEAN from Glycine max, e.g. as shown in the respective line in column 5 of Table I, application no. 15, is unpublished. And the activity of the gene product thereof is the activity of 49747384_SOYBEAN-protein.

[75124] Accordingly, in one embodiment, the process of the present invention for producing succinate in a non-human organism, like a microorganism or a plant or a part thereof, comprises increasing or generating the activity of a gene product with the activity of a gene product conferring the activity of “49747384_SOYBEAN-protein”, especially from Glycine max or its functional equivalent or its homolog, e.g. the increase of
[75125] (a) a gene product of a gene comprising the nucleic acid molecule as shown in the respective line in column 5 of Table I (whereby the respective line disclose in column 7 the fine chemical succinate), application no. 15, preferably the coding region thereof, or a homolog or a fragment thereof, and being depicted in the same respective line as said 49747384_SOYBEAN, or a functional equivalent or a homolog thereof as shown in column 8 of Table I, application no. 15, preferably the coding region thereof, particularly a homolog or functional equivalent as shown in column 8 of Table I B, application no. 15, and being depicted in the same respective line as said 49747384_SOYBEAN, and preferably the activity is increased non-targeted, or
[75126] (b) a polypeptide comprising a polypeptide, a consensus sequence or at least a polypeptide motif as shown in the respective line in column 5 of Table II or in column 8 of Table IV, application no. 15, respectively, and being depicted in the same respective line as said 49747384_SOYBEAN, or a functional equivalent or a homolog thereof as depicted in column 8 of Table II, application no. 15, preferably a homolog or functional equivalent as depicted in column 8 of Table II B, application no. 15, and being depicted in the same respective line as said 49747384_SOYBEAN, and preferably the activity is increased non-targeted, whereby the respective line disclose in column 7 the fine chemical succinate.

[75127] Accordingly, in one embodiment, the molecule which activity is to be increased in the process of the invention is the gene product with an activity as a “49747384_SOYBEAN-protein”, preferably it is the molecule of section (a) or (b) of this paragraph.

[75128] In particular, it was observed that in plants, especially in Arabidopsis thaliana, increasing or generating the activity of a gene product non-targeted with the activity of a “49747384_SOYBEAN-protein”, preferably being encoded by a gene comprising the nucleic acid sequence SEQ ID NO. 69, preferably the coding region thereof, conferred the production of or the increase in succinate compared with the wild type control.

[75129] The nucleic acid sequence of 49747384_SOYBEAN from Glycine max, e.g. as shown in the respective line in column 5 of Table I, application no. 15, is unpublished. And the activity of the gene product thereof is the activity of 49747384_SOYBEAN-protein.

[75130] Accordingly, in one embodiment, the process of the present invention for producing vitamin c and/or threonic acid in a non-human organism, like a microorganism or a plant or a part thereof, comprises increasing or generating the activity of a gene product with the activity of a gene product conferring the activity of “49747384_SOYBEAN-protein”, especially from Glycine max or its functional equivalent or its homolog, e.g. the increase of
[75131] (a) a gene product of a gene comprising the nucleic acid molecule as shown in the respective line in column 5 of Table I (whereby the respective line disclose in column 7 the fine chemical vitamin c and/or threonic acid), application no. 15, preferably the coding region thereof, or a homolog or a fragment thereof, and being depicted in the same respective line as said 49747384_SOYBEAN, or a functional equivalent or a homolog thereof as shown in column 8 of Table I, application no. 15, preferably the coding region thereof, particularly a homolog or functional equivalent as shown in column 8 of Table I B, application no. 15, and being depicted in the same respective line as said 49747384_SOYBEAN, and preferably the activity is increased non-targeted, or
[75132] (b) a polypeptide comprising a polypeptide, a consensus sequence or at least a polypeptide motif as shown in the respective line in column 5 of Table II or in column 8 of Table IV, application no. 15, respectively, and being depicted in the same respective line as said 49747384_SOYBEAN, or a functional equivalent or a homolog thereof as depicted in column 8 of Table II, application no. 15, preferably a homolog or functional equivalent as depicted in column 8 of Table II B, application no. 15, and being depicted in the same respective line as said 49747384_SOYBEAN, and preferably the activity is increased non-targeted, whereby the respective line disclose in column 7 the fine chemical vitamin c and/or threonic acid.

[75133] Accordingly, in one embodiment, the molecule which activity is to be increased in the process of the invention is the gene product with an activity as a “49747384_SOYBEAN-protein”, preferably it is the molecule of section (a) or (b) of this paragraph.

[75134] In particular, it was observed that in plants, especially in Arabidopsis thaliana, increasing or generating the activity of a gene product non-targeted with the activity of a “49747384_SOYBEAN-protein”, preferably being encoded by a gene comprising the nucleic acid sequence SEQ ID NO. 69, preferably the coding region thereof, conferred the production of or the increase in vitamin c and/or threonic acid compared with the wild type control.

[75135] The nucleic acid sequence of 51340801_CANOLA from Brassica napus, e.g. as shown in the respective line in column 5 of Table I, application no. 15, is unpublished. And the activity of the gene product thereof is the activity of pyruvate kinase.

[75136] Accordingly, in one embodiment, the process of the present invention for producing citramalate in a non-human organism, like a microorganism or a plant or a part thereof, comprises increasing or generating the activity of a gene product with the activity of a gene product conferring the activity of “pyruvate kinase”, especially from Brassica napus or its functional equivalent or its homolog, e.g. the increase of
[75137] (a) a gene product of a gene comprising the nucleic acid molecule as shown in the respective line in column 5 of Table I (whereby the respective line disclose in column 7 the fine chemical citramalate), application no. 15, preferably the coding region thereof, or a homolog or a fragment thereof, and being depicted in the same respective line as said 51340801_CANOLA, or a functional equivalent or a homolog thereof as shown in column 8 of Table I, application no. 15, preferably the coding region thereof, particularly a homolog or functional equivalent as shown in column 8 of Table I B, application no. 15, and being depicted in the same respective line as said 51340801_CANOLA, and preferably the activity is increased plastidic, or
[75138] (b) a polypeptide comprising a polypeptide, a consensus sequence or at least a polypeptide motif as shown in the respective line in column 5 of Table II or in column 8 of Table IV, application no. 15, respectively, and being depicted in the same respective line as said 51340801_CANOLA, or a functional equivalent or a homolog thereof as depicted in column 8 of Table II, application no. 15, preferably a homolog or functional equivalent as depicted in column 8 of Table II B, application no. 15, and being depicted in the same respective line as said 51340801_CANOLA, and preferably the activity is increased plastidic, whereby the respective line disclose in column 7 the fine chemical citramalate.

[75139] Accordingly, in one embodiment, the molecule which activity is to be increased in the process of the invention is the gene product with an activity as a “pyruvate kinase”, preferably it is the molecule of section (a) or (b) of this paragraph.

[75140] In particular, it was observed that in plants, especially in Arabidopsis thaliana, increasing or generating the activity of a gene product plastidic with the activity of a “pyruvate kinase”, preferably being encoded by a gene comprising the nucleic acid sequence SEQ ID NO. 15532, preferably the coding region thereof, conferred the production of or the increase in citramalate compared with the wild type control.

[75141] The nucleic acid sequence of 51340801_CANOLA from Brassica napus, e.g. as shown in the respective line in column 5 of Table I, application no. 15, is unpublished. And the activity of the gene product thereof is the activity of pyruvate kinase.

[75142] Accordingly, in one embodiment, the process of the present invention for producing succinate in a non-human organism, like a microorganism or a plant or a part thereof, comprises increasing or generating the activity of a gene product with the activity of a gene product conferring the activity of “pyruvate kinase”, especially from Brassica napus or its functional equivalent or its homolog, e.g. the increase of
[75143] (a) a gene product of a gene comprising the nucleic acid molecule as shown in the respective line in column 5 of Table I (whereby the respective line disclose in column 7 the fine chemical succinate), application no. 15, preferably the coding region thereof, or a homolog or a fragment thereof, and being depicted in the same respective line as said 51340801_CANOLA, or a functional equivalent or a homolog thereof as shown in column 8 of Table I, application no. 15, preferably the coding region thereof, particularly a homolog or functional equivalent as shown in column 8 of Table I B, application no. 15, and being depicted in the same respective line as said 51340801_CANOLA, and preferably the activity is increased plastidic, or
[75144] (b) a polypeptide comprising a polypeptide, a consensus sequence or at least a polypeptide motif as shown in the respective line in column 5 of Table II or in column 8 of Table IV, application no. 15, respectively, and being depicted in the same respective line as said 51340801_CANOLA, or a functional equivalent or a homolog thereof as depicted in column 8 of Table II, application no. 15, preferably a homolog or functional equivalent as depicted in column 8 of Table II B, application no. 15, and being depicted in the same respective line as said 51340801_CANOLA, and preferably the activity is increased plastidic, whereby the respective line disclose in column 7 the fine chemical succinate.

[75145] Accordingly, in one embodiment, the molecule which activity is to be increased in the process of the invention is the gene product with an activity as a “pyruvate kinase”, preferably it is the molecule of section (a) or (b) of this paragraph.

[75146] In particular, it was observed that in plants, especially in Arabidopsis thaliana, increasing or generating the activity of a gene product plastidic with the activity of a “pyruvate kinase”, preferably being encoded by a gene comprising the nucleic acid sequence SEQ ID NO. 15532, preferably the coding region thereof, conferred the production of or the increase in succinate compared with the wild type control.

[75147] The nucleic acid sequence of 59582753_SOYBEAN from Glycine max, e.g. as shown in the respective line in column 5 of Table I, application no. 15, is unpublished. And the activity of the gene product thereof is the activity of glucose-6-phosphate 1-dehydrogenase.

[75148] Accordingly, in one embodiment, the process of the present invention for producing citramalate in a non-human organism, like a microorganism or a plant or a part thereof, comprises increasing or generating the activity of a gene product with the activity of a gene product conferring the activity of “glucose-6-phosphate 1-dehydrogenase”, especially from Glycine max or its functional equivalent or its homolog, e.g. the increase of
[75149] (a) a gene product of a gene comprising the nucleic acid molecule as shown in the respective line in column 5 of Table I (whereby the respective line disclose in column 7 the fine chemical citramalate), application no. 15, preferably the coding region thereof, or a homolog or a fragment thereof, and being depicted in the same respective line as said 59582753_SOYBEAN, or a functional equivalent or a homolog thereof as shown in column 8 of Table I, application no. 15, preferably the coding region thereof, particularly a homolog or functional equivalent as shown in column 8 of Table I B, application no. 15, and being depicted in the same respective line as said 59582753_SOYBEAN, and preferably the activity is increased plastidic, or
[75150] (b) a polypeptide comprising a polypeptide, a consensus sequence or at least a polypeptide motif as shown in the respective line in column 5 of Table II or in column 8 of Table IV, application no. 15, respectively, and being depicted in the same respective line as said 59582753_SOYBEAN, or a functional equivalent or a homolog thereof as depicted in column 8 of Table II, application no. 15, preferably a homolog or functional equivalent as depicted in column 8 of Table II B, application no. 15, and being depicted in the same respective line as said 59582753_SOYBEAN, and preferably the activity is increased plastidic, whereby the respective line disclose in column 7 the fine chemical citramalate.

[75151] Accordingly, in one embodiment, the molecule which activity is to be increased in the process of the invention is the gene product with an activity as a “glucose-6-phosphate 1-dehydrogenase”, preferably it is the molecule of section (a) or (b) of this paragraph.

[75152] In particular, it was observed that in plants, especially in Arabidopsis thaliana, increasing or generating the activity of a gene product plastidic with the activity of a “glucose-6-phosphate 1-dehydrogenase”, preferably being encoded by a gene comprising the nucleic acid sequence SEQ ID NO. 16883, preferably the coding region thereof, conferred the production of or the increase in citramalate compared with the wild type control.

[75153] [0105.1.7.15] to [0107.1.7.15] for the disclosure of these paragraphs see [0105.1.7.7] to [0107.1.7.7] above

[75154] A protein having an activity conferring an increase in the amount or level of the fine chemical citramalate, citrate, fumarate, glycerate, malate, oxalate, pyruvate, succinate, or vitamin c and/or threonic acid, upon targeting to the plastids or mitochondria or upon non-targeting, preferably has the structure of the respective polypeptide described herein, in particular of the polypeptides comprising the consensus sequence or at least one polypeptide motifs as shown in the respective line in Table IV, application no. 15, column 8 or of the polypeptide comprising an amino acid sequence as disclosed in the respective line in Table II, application no. 15, columns 5 or 8, or homologs or fragments thereof as described herein, or is encoded by the nucleic acid molecule characterized herein or the nucleic acid molecule according to the invention, for example by the nucleic acid molecule as shown in the respective line in Table I, application no. 15, columns 5 or 8, preferably the coding region thereof, or homologs or fragments thereof and has the herein mentioned activity.

[75155] for the disclosure of this paragraph see [0109.1.7.7] above

[75156] for the disclosure of this paragraph see [0110.1.7.7] above

[75157] In one embodiment, the process of the present invention comprises one or more of the following steps
[75158] (a) stabilizing a protein conferring the generation or increased expression of a protein encoded by the nucleic acid molecule of the invention or of the polypeptide of the invention, e.g. of a polypeptide having the activity selected from the group consisting of 2-C-methyl-D-erythritol 4-phosphate cytidylyltransferase, 2-isopropylmalate synthase, 2-oxoglutarate dehydrogenase E1 subunit, 30S ribosomal protein S3, 47266012-protein, 49747384_SOYBEAN-protein, 50S ribosomal protein L14, ABC transporter ATP binding component, ABC transporter permease protein, acetyl-CoA acetyltransferase, acetyl-CoA hydrolase, acetyltransferase, acyl-CoA dehydrogenase, acyl-CoA synthase, adenylate kinase, adenylylsulfate kinase, agmatinase, amino-acid acetyltransferase, aminotransferase, ammonium transporter, arginine N-succinyltransferase, aspartase, AO g13930-protein, ATP-binding component of a transport system, auxin response factor, AX653549-protein, AY087308-protein, b0801-protein, b1003-protein, b1285-protein, b1425-protein, b1445-protein, b1522-protein, b1670-protein, b1672-protein, b1742-protein, b1898-protein, b2399-protein, b3777-protein, b3791-protein, b3814-protein, b3817-protein, b3989-protein, b4029-protein, b4050-protein, b4056-protein, beta-hydroxylase, betaine aldehyde dehydrogenase, bifunctional purine biosynthesis protein, branched chain aminotransferase, calcium-dependent protein kinase, cation-transporting ATPase, CBL-interacting protein kinase, CDP-diacylglycerol-glycerol-3-phosphate 3-phosphatidyltransferase, CDP-diacylglycerol-serine O-phosphatidyltransferase, CDP-glucose-4,6-dehydratase, citrate synthase, coproporphyrinogen III oxidase, CTP synthase, cystathionine beta-lyase, cysteine synthase A, cysteine synthase B, dATP pyrophosphohydrolase, dihydrolipoamide dehydrogenase, DnaJ-like chaperone, electron transfer flavoprotein subunit beta, electron transport complex protein, eukaryotic translation initiation factor 5, Fe—S subunit of oxidoreductase, flagellar M-ring protein, fumarate hydratase, gamma-glutamyltranspeptidase, gibberellin 20-oxidase, glucose dehydrogenase, glucose-1-phosphate cytidylyltransferase, glucose-6-phosphate 1-dehydrogenase, glutamate dehydrogenase, glutamate-ammonia-ligase, glutaredoxin, glycerate kinase, glycerol kinase, Glycine cleavage system T aminomethyltransferase, GM02LC17485-protein, GM02LC5744-protein, heat shock protein, heat shock transcription factor, hexose transporter, hydrolase, isochorismate synthase, isocitrate dehydrogenase, isocitrate lyase, leucyl/phenylalanyl-tRNA-protein transferase, lipopolysaccharide core biosynthesis protein, lipoprotein precursor, lysine decarboxylase, malate dehydrogenase, malonyl CoA-acyl carrier protein transacylase, membrane protein, membrane transport protein, methylglyoxal synthase, methylglyoxalase, methyltransferase, monothiol glutaredoxin, monthiol glutaredoxin, multiple antibiotic resistance protein, murein transglycosylase, NADH-quinone oxidoreductase subunit, O-antigen chain length determinant, oxidoreductase, oxidoreductase subunit, oxireductase, phenylacetic acid degradation protein, phenylalanine ammonia-lyase, phosphatase, phosphate import ATP-binding protein, photosystem I reaction centre subunit, photosystem II protein, polygalacturonase, protease, protein phosphatase, purine-nucleoside phosphorylase, pyruvate carboxylase, pyruvate kinase, recombinase A, ribulokinase, RNA polymerase sigma factor, sec-independent protein translocase, Sec-independent protein translocase subunit, slr1170-protein, thioredoxin, thioredoxin family protein, thioredoxin reductase, threonine efflux protein, threonine synthase, transcription factor, transcriptional regulator, transcriptional regulator protein, translation initiation factor subunit, TTC1386-protein, xanthine dehydrogenase, XM_{—}473199-protein, ycrl 02c-protein, YDL159W-A-protein, ygl237c-protein, YGR193C-protein, ygr221 c-protein, yhr131c-protein, yhr207c-protein, YKL038W-protein, YKL140W-protein, ylr065c-protein, ylr326w-protein, yml084w-protein, yol073c-protein, yol160w-protein, zinc finger protein, and zinc transporter, or of a polypeptide as indicated in the respective line in Table II, application no. 15, columns 5 or 8, or its homologs or fragments, and conferring the production of or an increase in citramalate, citrate, fumarate, glycerate, malate, oxalate, pyruvate, succinate, or vitamin c and/or threonic acid, respectively; and/or
[75159] (b) stabilizing a mRNA conferring the generation or increased expression of a FCRP, e.g. protein encoded by the nucleic acid molecule of the invention or its homologs or fragments, or of a mRNA encoding the polypeptide of the present invention having the hereinmentioned activity selected from the group consisting of said activities mentioned in (a) and conferring the production of or an increase in citramalate, citrate, fumarate, glycerate, malate, oxalate, pyruvate, succinate, or vitamin c and/or threonic acid, respectively; and/or
[75160] (c) increasing the specific activity of a protein conferring the increased expression of a FCRP, e.g. a protein encoded by the nucleic acid molecule of the invention or of the polypeptide of the present invention having herein-mentioned citramalate, citrate, fumarate, glycerate, malate, oxalate, pyruvate, succinate, or vitamin c and/or threonic acid generating or increasing activity, respectively, e.g. of a polypeptide having the activity of a protein as indicated in the respective line in Table II, application no. 15, columns 5 or 8, or its homologs or fragments, or decreasing the inhibitory regulation of the polypeptide of the invention; and/or
[75161] (d) generating or increasing the expression of an endogenous or artificial transcription factor mediating the expression of a protein conferring the generation or increased expression of a FCRP, e.g. a protein encoded by the nucleic acid molecule of the invention or of the polypeptide of the invention having herein-mentioned activity selected from the group consisting of said activities mentioned in (a) and conferring a citramalate, citrate, fumarate, glycerate, malate, oxalate, pyruvate, succinate, or vitamin c and/or threonic acid increasing activity, respectively, e.g. of a polypeptide having the activity of a protein as indicated in the respective line in Table II, application no. 15, columns 5 or 8 or its homologs; and/or
[75162] (e) stimulating activity of a protein conferring the increased expression of a FCRP, e.g. a protein encoded by the nucleic acid molecule of the present invention or a polypeptide of the present invention having herein-mentioned activity selected from the group consisting of said activities mentioned in (a) and conferring a citramalate, citrate, fumarate, glycerate, malate, oxalate, pyruvate, succinate, or vitamin c and/or threonic acid increasing activity, respectively, e.g. of a polypeptide having the activity of a protein as indicated in the respective line in Table II, application no. 15, columns 5 or 8, or its homologs or fragments, by adding one or more exogenous inducing factors to the non-human organism or parts thereof; and/or
[75163] (f) expressing a transgenic gene encoding a protein conferring the increased expression of a FCRP, e.g. a polypeptide encoded by the nucleic acid molecule of the present invention or a polypeptide of the present invention, having herein-mentioned activity selected from the group consisting of said activities mentioned in (a) and conferring a citramalate, citrate, fumarate, glycerate, malate, oxalate, pyruvate, succinate, or vitamin c and/or threonic acid increasing activity, respectively, e.g. of a polypeptide having the activity of a protein as indicated in the respective line in Table II, application no. 15, columns 5 or 8, or its homologs or fragments, and/or
[75164] (g) increasing the copy number of a gene conferring the increased expression of a nucleic acid molecule encoding a FCRP, e.g. a polypeptide encoded by the nucleic acid molecule of the invention or the polypeptide of the invention having herein-mentioned activity selected from the group consisting of said activities mentioned in (a) and conferring a citramalate, citrate, fumarate, glycerate, malate, oxalate, pyruvate, succinate, or vitamin c and/or threonic acid increasing activity, respectively, e.g. of a polypeptide having the activity of a protein as indicated in the respective line in Table II, application no. 15, columns 5 or 8, or its homologs or fragments; and/or
[75165] (h) increasing the expression of the endogenous gene encoding the FCRP, polypeptide of the invention, e.g. a polypeptide encoded by the nucleic acid molecule of the invention or the polypeptide of the invention having herein-mentioned activity selected from the group consisting of said activities mentioned in (a) and conferring a citramalate, citrate, fumarate, glycerate, malate, oxalate, pyruvate, succinate, or vitamin c and/or threonic acid; increasing activity, respectively, e.g. of a polypeptide having the activity of a protein as indicated in the respective line in Table II, application no. 15, columns 5 or 8, or its homologs or fragments, by adding positive expression or removing negative expression elements, e.g. homologous recombination can be used to either introduce positive regulatory elements like for plants the 35S enhancer into the promoter or to remove repressor elements form regulatory regions. Further gene conversion methods can be used to disrupt repressor elements or to enhance to activity of positive elements. Positive elements can be randomly introduced in plants by T-DNA or transposon mutagenesis and lines can be identified in which the positive elements have be integrated near to a gene of the invention, the expression of which is thereby enhanced; and/or
[75166] (i) modulating growth conditions of the non-human organism in such a manner, that the expression or activity of the gene encoding the FCRP, e.g. a protein of the invention or the protein itself is enhanced, for example microorganisms or plants can be grown for example under a higher temperature regime leading to an enhanced expression of heat shock proteins, which can lead to an enhanced citramalate, citrate, fumarate, glycerate, malate, oxalate, pyruvate, succinate, or vitamin c and/or threonic acid production, respectively; and/or
[75167] (j) selecting of non-human organisms with especially high activity of the proteins of the invention from natural or from mutagenized resources and breeding them into the target organisms, e.g. the elite crops; and/or
[75168] (k) directing a protein encoded by the nucleic acid molecule of the invention or of the polypeptide of the present invention having herein-mentioned activity selected from the group consisting of said activities mentioned in (a) and conferring a citramalate, citrate, fumarate, glycerate, malate, oxalate, pyruvate, succinate, or vitamin c and/or threonic acid increasing activity, respectively, e.g. of a polypeptide having the activity of a protein as indicated in the respective line in Table II, application no. 15, columns 5 or 8, or its homologs or fragments, if for the corresponding nucleic acid molecule in the respective line in column 6 of Table I the term “plastidic” is indicated, to the plastids by the addition of a plastidial targeting sequence or if for the corresponding nucleic acid molecule in the respective line in column 6 of Table I the term “mitochondric” is indicated, to the mitochondria by the addition of a mitochondrial targeting sequence; and/or
[75169] (l) generating the expression of a protein encoded by the nucleic acid molecule of the invention or of the polypeptide of the present invention having herein-mentioned activity selected from the group consisting of said activities mentioned in (a) and conferring a citramalate, citrate, fumarate, glycerate, malate, oxalate, pyruvate, succinate, or vitamin c and/or threonic acid increasing activity, respectively, e.g. of a polypeptide having the activity of a protein as indicated in the respective line in Table II, application no. 15, columns 5 or 8, or its homologs or fragments, if for the corresponding nucleic acid molecule in the respective line in column 6 of Table I the term “plastidic” or “mitochondric” is indicated, in these organelles by the stable or transient transformation, advantageously stable transformation, of organelles, preferably plastids or mitochondria, with an inventive nucleic acid sequence preferably in form of an expression cassette containing said sequence leading to the expression of the nucleic acids or polypeptides of the invention in the respective organelle; and/or
[75170] (m) generating the expression of a protein encoded by the nucleic acid molecule of the invention or of the polypeptide of the present invention having herein-mentioned activity selected from the group consisting of said activities mentioned in (a) and conferring a citramalate, citrate, fumarate, glycerate, malate, oxalate, pyruvate, succinate, and/or vitamin c and/or threonic acid increasing activity, respectively, e.g. of a polypeptide having the activity of a protein as indicated in the respective line in Table II, application no. 15, columns 5 or 8, or its homologs or fragments, if for the corresponding nucleic acid molecule in the respective line in column 6 of Table I the term “plastidic” or “mitochondric” is indicated, in these organelles by integration of a nucleic acid of the invention into the genome of the respective organelle under control of preferable a promoter selective for the respective organelle.

[75171] Preferably, said mRNA is the coding region of the nucleic acid molecule of the present invention and/or the protein conferring the increased expression of a protein encoded by the coding region of the nucleic acid molecule of the present invention alone or linked to a transit nucleic acid sequence or transit peptide encoding nucleic acid sequence or the polypeptide having the herein mentioned activity, e.g. conferring the generation of or increase of citramalate, citrate, fumarate, glycerate, malate, oxalate, pyruvate, succinate, or vitamin c and/or threonic acid, respectively, after increasing the expression or activity of the encoded polypeptide, non-targeted or in organelles such as plastids and/or mitochondria, preferably plastids, or having the activity of a polypeptide having an activity as the protein as shown in the respective line in Table II, application no. 15, column 3, or its homologs. Preferably the increase of citramalate, citrate, fumarate, glycerate, malate, oxalate, pyruvate, succinate, or vitamin c and/or threonic acid, respectively, takes place non-targeted or in plastids and/or mitochondria, preferably non-targeted or in plastids.

[75172] [0113.1.7.15] to [0122.1.7.15] for the disclosure of these paragraphs see [0113.1.7.7] to [0122.1.7.7] above

[75173] The activation of an endogenous polypeptide having above-mentioned activity, e.g. having the activity of a protein as shown in the respective line in Table II, application no. 15, column 3 or of the polypeptide of the invention, e.g. conferring the increase of the fine chemical citramalate, citrate, fumarate, glycerate, malate, oxalate, pyruvate, succinate, or vitamin c and/or threonic acid, respectively, by increase of expression or activity in the cytoplasm, and/or in the cytosol, and/or in an organelle, such as plastids or mitochondria, can also be increased by introducing a synthetic transcription factor, which binds close to the coding region of the gene encoding the protein as shown in the respective line in Table II, application no. 15, column 5 or 8, or homologs or fragments thereof, and activates its transcription. A chimeric zinc finger protein can be constructed, which comprises a specific DNA-binding domain and an activation domain as e.g. the VP16 domain of Herpes Simplex virus. The specific binding domain can bind to the regulatory region of the gene encoding the protein as shown in the respective line in Table II, application no. 15, column 5 or 8, or homologs or fragments thereof. The expression of the chimeric transcription factor in a non-human organism, in particular in a plant, leads to a specific expression of the protein as shown in the respective line in Table II, application no. 15, column 5 or 8, or homologs or fragments thereof, see e.g. in W001/52620, Oriz, Proc. Natl. Acad. Sci. USA 99, 13290 (2002), or Guan, Proc. Natl. Acad. Sci. USA 99, 13296 (2002).

[75174] [0124.1.7.15] to [0127.1.7.15] for the disclosure of these paragraphs see [0124.1.7.7] to [0127.1.7.7] above

[75175] Owing to the introduction of a gene or a plurality of genes conferring the expression of the nucleic acid molecule of the invention or the polypeptide of the invention, for example the nucleic acid construct mentioned below, or encoding the protein as shown in the respective line in Table II, application no. 15, column 5 or 8, or homologs or fragments thereof, into a non-human organism alone or in combination with other genes, it is possible not only to increase the biosynthetic flux towards the end product, but also to increase, modify or create de novo an advantageous, preferably novel metabolites composition in the non-human organism, e.g. an advantageous composition comprising a higher content of (from a viewpoint of nutritional physiology limited) citramalate, citrate, fumarate, glycerate, malate, oxalate, pyruvate, succinate, or vitamin c and/or threonic acid and if desired other substrate or product of the citric acid cycle, or a derivate of one of the substrates or products, and/or other metabolites, in free or bound form.

[75176] for the disclosure of this paragraph see [0129.1.7.7] above

[75177] Accordingly, in one embodiment, the process according to the invention relates to a process, which comprises:
[75178] (a) providing a non-human organism, preferably a microorganism, a plant cell, a plant tissue, a plant or a part thereof, more preferably a microorganism, a plant tissue, a plant or a part thereof;
[75179] (b) increasing the activity of a protein as shown in the respective line in Table II, application no. 15, column 3 or of a polypeptide being encoded by the respective nucleic acid molecule of the present invention and described below, e.g. conferring an increase of the fine chemical citramalate, citrate, fumarate, glycerate, malate, oxalate, pyruvate, succinate, or vitamin c and/or threonic acid, respectively, in the non-human organism, preferably in the microorganism, the plant cell, the plant tissue, the plant or a part thereof, more preferably a microorganism, a plant tissue, a plant or a part thereof, especially cytoplasmic or in an organelle, like plastids or mitochondria,
[75180] (c) growing the non-human organism, preferably the microorganism, the plant cell, the plant tissue, the plant or a part thereof, under conditions which permit the production of said chemical in the non-human organism, preferably the microorganism, the plant cell, the plant tissue, the plant or a part thereof; and
[75181] (d) if desired, recovering, optionally isolating, said fine chemical, in free and/or bound form, and, optionally further free and/or bound substrate or product of the citric acid cycle, or at least one derivate of one of the substrates or products, and/or other metabolites synthesized by the non-human organism, the microorganism, the plant cell, the plant tissue, the plant or a part thereof.

[75182] [0131.1.7.15] to [0133.1.7.15] for the disclosure of these paragraphs see [0131.1.7.7] to [0133.1.7.7] above

[75183] The non-human organism, in particular the microorganism, plant or part thereof, is advantageously grown in such a way that it is not only possible to recover, if desired to isolate the free or bound fine chemical or the free and bound fine chemical but as option it is also possible to produce, recover and, if desired to isolate, other free or/and bound vitamins and/or other metabolites.

[75184] The organisms are harvested in a manner known per se and appropriate for the particular organism. Microorganisms such as bacteria, mosses, yeasts and fungi or plant cells which are cultured in liquid media by fermentation may be removed, for example, by centrifugation, decanting or filtration. Plants are grown on solid media in a manner known per se and harvested accordingly.

[75185] The organisms, its cells or a part thereof or the recovered, and if desired isolated fine chemical citramalate, citrate, fumarate, glycerate, malate, oxalate, pyruvate, succinate, or vitamin c and/or threonic acid or compounds comprising said fine chemical citramalate, citrate, fumarate, glycerate, malate, oxalate, pyruvate, succinate, or vitamin c and/or threonic acid can then be processed further directly into foodstuffs or animal feeds or for other applications, for example according to the disclosures made in WO/2005/083093 or WO2005/012316, which are expressly incorporated herein by reference.

[75186] [0135.1.7.15] to [0139.1.7.15] for the disclosure of these paragraphs see [0135.1.7.7] to [0139.1.7.7] above

[75187] In another embodiment, the invention relates to a (isolated) nucleic acid molecule, which comprises a nucleic acid molecule selected from the group consisting of:
[75188] (a) a nucleic acid molecule encoding a polypeptide shown in Table II, application no. 15, column 5 or 8, preferably shown in Table II B, application no. 15, column 8, or a homolog or a fragment thereof;
[75189] (b) a nucleic acid molecule shown in Table I, application no. 15, column 5 or 8, preferably shown in Table I B, application no. 15, column 8, preferably the coding region thereof, or a homolog or a fragment thereof;
[75190] (c) a nucleic acid molecule, which, as a result of the degeneracy of the genetic code, can be derived from a polypeptide sequence depicted in column 5 or 8 of Table II, application no. 15, preferably in column 8 of Table II B, application no. 15;
[75191] (d) a nucleic acid molecule having at least 30% identity, preferably at least 40%, 50%, 60%, 70%, 75%, 80%, 85%, 90%, 95%, 96%, 97%, 98%, 99%, 99.5%, with the nucleic acid molecule sequence of a polynucleotide comprising the nucleic acid molecule shown in column 5 or 8 of Table I, application no. 15, preferably shown in column 8 of Table I B, application no. 15, preferably the coding region thereof;
[75192] (e) a nucleic acid molecule encoding a polypeptide having at least 30% identity, preferably at least 40%, 50% 60%, 70%, 75%, 80%, 85%, 90%, 95%, 96%, 97%, 98%, 99%, 99.5%, identity with the amino acid sequence of the polypeptide encoded by the nucleic acid molecule of (a), (b), (c) or (d);
[75193] (f) a nucleic acid molecule which hybridizes with a nucleic acid molecule of (a), (b), (c), (d) or (e) under stringent hybridization conditions;
[75194] (g) a nucleic acid molecule encoding a polypeptide which can be isolated with the aid of monoclonal or polyclonal antibodies made against a polypeptide encoded by one of the nucleic acid molecules of (a), (b), (c), (d), (e) or (f);
[75195] (h) a nucleic acid molecule encoding a polypeptide comprising the consensus sequence or one or more polypeptide motifs as shown in column 8 of Table IV, application no. 15;
[75196] (i) a nucleic acid molecule encoding a polypeptide having the activity represented by a respective protein as depicted in column 5 of Table II, application no. 15;
[75197] (j) a nucleic acid molecule comprising a polynucleotide which is obtained by amplifying a cDNA library or a genomic library using the primers in Table III, application no. 15, column 8;
[75198] and
[75199] (k) nucleic acid molecule which is obtainable by screening a suitable nucleic acid library, especially a cDNA library and/or a genomic library, under stringent hybridization conditions with a probe comprising one of the sequences of the nucleic acid molecule of (a), (b), (c), (d), (e), (f), (g), (h), (i) or (j) or with a fragment of at least 15 nt, preferably 20 nt, 30 nt, 50 nt, 100 nt, 200 nt,500 nt, 1000 nt, 1500 nt, 2000 nt or 3000 nt of the nucleic acid molecule characterized in (a), (b), (c), (d), (e), (f), (g), (h), (i) or (j) ;
[75200] or a nucleic acid molecule comprising a sequence which is complementary thereto.
   (All the references to Tables I to IV are references to the corresponding lines of Tables I to IV.)

[75201] In a preferred embodiment thereof said nucleic acid molecule according to (a), (b), (c), (d), (e), (f), (g), (h), (i), (j) or (k) encodes a polypeptide which has the activity of the respective polypeptide represented by a protein comprising a polypeptide as depicted in the respective line in column 5 of Table II, application no. 15.

[75202] In another preferred embodiment thereof said nucleic acid molecule according to (a), (b), (c), (d), (e), (f), (g), (h), (i), (j) or (k) confers a generation or an increase of the respective fine chemical in a non-human organism or a part thereof as compared to a corresponding wild-type non-human organism or part thereof.

[75203] In another preferred embodiment thereof said nucleic acid molecule according to (a), (b), (c), (d), (e), (f), (g), (h), (i), (j) or (k) encodes a polypeptide which has the activity of the respective polypeptide represented by a protein as depicted in the respective line in column 5 of Table II application no. 15 and confers a generation or an increase of the respective fine chemical in a non-human organism or a part thereof as compared to a corresponding wild-type non-human organism or part thereof.

[75204] In another embodiment, the invention relates to a (isolated) nucleic acid molecule, which comprises a nucleic acid molecule selected from the group consisting of:
[75205] (a) a nucleic acid molecule encoding a polypeptide shown in Table II, column 5 or 8, application no. 15, preferably shown in Table II A, application no. 15, in column 5 or in Table II A, application no. 15, column 8 or in Table II B, application no. 15, column 8, or a homolog or a fragment thereof;
[75206] (b) a nucleic acid molecule shown in Table I, application no. 15, column 5 or 8, preferably shown in Table I A, application no. 15, in column 5 or in Table I A, application no. 15, column 8 or in Table I B, application no. 15, column 8, preferably the coding region thereof, or a homolog or a fragment thereof;
[75207] (c) a nucleic acid molecule, which, as a result of the degeneracy of the genetic code, can be derived from a polypeptide sequence depicted in column 5 or 8 of Table II, application no. 15, preferably shown in Table II A, application no. 15, in column 5 or in Table II A, application no. 15, column 8 or in Table II B, application no. 15, column 8;
[75208] (d) a nucleic acid molecule having at least 30% identity, preferably at least 40%, 50%, 60%, 70%, 75%, 80%, 85%, 90%, 95%, 96%, 97%, 98%, 99%, 99.5%, with the nucleic acid molecule sequence of a polynucleotide comprising the nucleic acid molecule shown in column 5 or 8 of Table I, application no. 15, preferably shown in Table I A, application no. 15, in column 5 or in Table I A, application no. 15, column 8 or in Table I B column 8, preferably the coding region thereof;
[75209] (e) a nucleic acid molecule encoding a polypeptide having at least 30% identity, preferably at least 40%, 50% 60%, 70%, 75%, 80%, 85%, 90%, 95%, 96%, 97%, 98%, 99%, 99.5%, identity with the amino acid sequence of the polypeptide encoded by the nucleic acid molecule of (a), (b), (c) or (d);
[75210] (f) a nucleic acid molecule which hybridizes with a nucleic acid molecule of (a), (b), (c), (d) or (e) under stringent hybridization conditions;
[75211] (g) a nucleic acid molecule encoding a polypeptide which can be isolated with the aid of monoclonal or polyclonal antibodies made against a polypeptide encoded by one of the nucleic acid molecules of (a), (b), (c), (d), (e) or (f);
[75212] (h) a nucleic acid molecule encoding a polypeptide comprising the consensus sequence or one or more polypeptide motifs as shown in column 8 of Table IV, application no. 15;
[75213] (i) a nucleic acid molecule encoding a polypeptide having the activity represented by a respective protein as depicted in column 5 of Table II, application no. 15;
[75214] (j) a nucleic acid molecule comprising a polynucleotide which is obtained by amplifying a cDNA library or a genomic library using the primers in Table III, application no. 15, column 8;
[75215] and
[75216] (k) nucleic acid molecule which is obtainable by screening a suitable nucleic acid library, especially a cDNA library and/or a genomic library, under stringent hybridization conditions with a probe comprising one of the sequences of the nucleic acid molecule of (a), (b), (c), (d), (e), (f), (g), (h), (i) or (j) or with a fragment thereof having at least 15 nt, preferably 20 nt, 30 nt, 50 nt, 100 nt, 200 nt,500 nt, 1000 nt, 1500 nt, 2000 nt or 3000 nt of the nucleic acid molecule complementary to a nucleic acid sequence characterized in (a), (b), (c), (d), (e), (f), (g), (h), (i) or (j);
[75217] or a nucleic acid molecule comprising a sequence which is complementary thereto;
   whereby, preferably, the nucleic acid molecule according to (a), (b), (c), (d), (e), (f), (g), (h), (i), (j) or (k) distinguishes over the sequence depicted in Table I A and/or I B, application no. 15, column 5 or 8, or the coding regions thereof, by one or more nucleotides (especially but not exceeding 5%, preferably 4%, 3%, 2%, 1%, 0.5%, 0.2% or 0.1%). In an embodiment, the nucleic acid molecule of the invention does not consist of the sequence shown in Table I A and/or I B, application no. 15, column 5 or 8, or the coding region thereof. In another embodiment, the nucleic acid molecule of the present invention, preferably the coding region thereof, is at least 30%, 40%, 50%, 60%, 70%, 80%, 90%, 95% identical but less than 100%, 99.999%, 99.99%, 99.9%, 99%, 98%, 97%, 96% or 95% identical to the sequence shown in Table I A and/or I B, application no. 15, column 5 or 8, or the coding region thereof, respectively. In a further embodiment the nucleic acid molecule does not encode the polypeptide sequence shown in Table II A and/or II B, application no. 15, column 5 or 8 but homologs thereof. Accordingly, in one embodiment, the nucleic acid molecule of the present invention encodes in one embodiment a polypeptide which differs at least in one or more amino acids (especially but not exceeding 5%, preferably 4%, 3%, 2%, 1%, 0.5%, 0.2% or 0.1%) from the polypeptide shown in Table II, application no. 15, column 5 or 8 and does not encode a protein of the sequence shown in Table II A and/or II B, application no. 15, column 5 or 8. Accordingly, in one embodiment, the protein encoded by a sequence of a nucleic acid according to (a), (b), (c), (d), (e), (f), (g), (h), (i), (j) or (k) does not consist of the sequence shown in Table I A and/or I B, application no. 15, column 5 or 8, or the coding region thereof. In a further embodiment, the protein of the present invention is at least 30%, 40%, 50%, 60%, 70%, 80%, 90%, 95% identical to protein sequence depicted in Table II A and/or II B, application no. 15, column 5 or 8 but less than 100%, preferably less than 99.999%, 99.99%, 99.9%, 99%, 98%, 97%, 96% or 95% identical to the sequence shown in Table II A and/or II B, application no. 15, column 5 or 8.
   (All the references to Tables I to IV are references to the corresponding lines of Tables I to IV.)

[75218] In a preferred embodiment thereof said nucleic acid molecule according to (a), (b), (c), (d), (e), (f), (g), (h), (i), (j) or (k) encodes a polypeptide which has the activity of the respective polypeptide represented by a protein comprising a polypeptide as depicted in the respective line in column 5 of Table II, application no. 15.

[75219] In another preferred embodiment thereof said nucleic acid molecule according to (a), (b), (c), (d), (e), (f), (g), (h), (i), (j) or (k) confers a generation or an increase of the respective fine chemical in a non-human organism or a part thereof as compared to a corresponding wild-type non-human organism or part thereof.

[75220] In another preferred embodiment thereof said nucleic acid molecule according to (a), (b), (c), (d), (e), (f), (g), (h), (i), (j) or (k) encodes a polypeptide which has the activity of the respective polypeptide represented by a protein as depicted in the respective line in column 5 of Table II, application no. 15, and confers a generation or an increase of the respective fine chemical in a non-human organism or a part thereof as compared to a corresponding wild-type non-human organism or part thereof.

[75221] [0144.1.7.15] to [0155.1.7.15] for the disclosure of these paragraphs see [0144.1.7.7] to [0155.1.7.7] above

[75222] In a preferred embodiment a nucleic acid construct, for example an expression cassette, comprises upstream, i.e. at the 5′ end of the encoding sequence, a promoter and downstream, i.e. at the 3′ end, a polyadenylation signal and optionally other regulatory elements which are operably linked to the intervening encoding sequence with one of the nucleic acids as depicted in the respective line in Table I, application no. 15, column 5 or 8, preferably the coding region thereof, or a homolog or a fragment thereof. By an operable linkage is meant the sequential arrangement of promoter, encoding sequence, terminator, optionally other regulatory elements and optionally targeting sequences in such a way that each of the regulatory elements/targeting sequence can fulfill its function in the expression of the encoding sequence in due manner. In one embodiment the sequences preferred for operable linkage are targeting sequences for ensuring subcellular localization in organelles, like plastids or mitochondria.

[75223] However, targeting sequences for ensuring subcellular localization in the endoplasmic reticulum (=ER), in the nucleus, in oil corpuscles or other compartments may also be employed as well as translation promoters such as the 5′ lead sequence in tobacco mosaic virus (Gallie et al., Nucl. Acids Res. 15, 8693 (1987)).

[75224] for the disclosure of this paragraph see [0157.1.7.7] above

[75225] In an embodiment, the invention relates to an expression cassette, comprising
[75226] 1) a promoter, preferably a promoter selected from the group consisting of Big35S, PCUbi, Super and USP;
[75227] 2) a nucleic acid molecule selected from the group consisting of
   [75228] (a) a nucleic acid molecule encoding a polypeptide shown in Table II, application no. 15, column 5 or 8, preferably shown in Table II A, application no. 15, column 5, or in Table II A, application no. 15, column 8, or in Table II B, application no. 15, column 8, or a homolog or a fragment thereof;
   [75229] (b) a nucleic acid molecule shown in Table I, application no. 15, column 5 or 8, preferably shown in Table I A, application no. 15, column 5, or in Table I A, application no. 15, column 8, or in Table I B, application no. 15, column 8, preferably the coding region thereof, or a homolog or a fragment thereof;
   [75230] (c) a nucleic acid molecule, which, as a result of the degeneracy of the genetic code, can be derived from a polypeptide sequence depicted in column 5 or 8 of Table II, application no. 15, preferably shown in Table II A, application no. 15, column 5, or in Table II A, application no. 15, column 8, or in Table II B, application no. 15, column 8;
   [75231] (d) a nucleic acid molecule having at least 30% identity, preferably at least 40%, 50%, 60%, 70%, 75%, 80%, 85%, 90%, 95%, 96%, 97%, 98%, 99%, 99.5%, with the nuoleic acid molecule sequence of a polynucleotide comprising the nucleic acid molecule shown in column 5 or 8 of Table I, application no. 15, preferably shown in Table I A, application no. 15, column 5, or in Table I A, application no. 15, column 8, or in Table I B, application no. 15, column 8, preferably the coding region thereof;
   [75232] (e) a nucleic acid molecule encoding a polypeptide having at least 30% identity, preferably at least 40%, 50% 60%, 70%, 75%, 80%, 85%, 90%, 95%, 96%, 97%, 98%, 99%, 99.5%, identity with the amino acid sequence of the polypeptide encoded by the nucleic acid molecule of (a), (b), (c) or (d);
   [75233] (f) a nucleic acid molecule which hybridizes with a nucleic acid molecule of (a), (b), (c), (d) or (e) under stringent hybridization conditions;
   [75234] (g) a nucleic acid molecule encoding a polypeptide which can be isolated with the aid of monoclonal or polyclonal antibodies made against a polypeptide encoded by one of the nucleic acid molecules of (a), (b), (c), (d), (e) or (f);
   [75235] (h) a nucleic acid molecule encoding a polypeptide comprising the consensus sequence or one or more polypeptide motifs as shown in column 8 of Table IV, application no. 15;
   [75236] (i) a nucleic acid molecule encoding a polypeptide having the activity represented by a respective protein as depicted in column 5 of Table II, application no. 15;
   [75237] (j) a nucleic acid molecule comprising a polynucleotide which is obtained by amplifying a cDNA library or a genomic library using the primers in Table III, application no. 15, column 8;
   [75238] and
   [75239] (k) nucleic acid molecule which is obtainable by screening a suitable nucleic acid library, especially a cDNA library and/or a genomic library, under stringent hybridization conditions with a probe comprising one of the sequences of the nucleic acid molecule of (a), (b), (c), (d), (e), (f), (g), (h), (i) or (j) or with a fragment of at least 15 nt, preferably 20 nt, 30 nt, 50 nt, 100 nt, 200 nt,500 nt, 1000 nt, 1500 nt, 2000 nt or 3000 nt of the nucleic acid molecule characterized in (a), (b), (c), (d), (e), (f), (g), (h), (i) or (j);
   [75240] or a nucleic acid molecule comprising a sequence which is complementary thereto.
      and, optionally
[75241] 3) nucleic acid molecule encoding a transit peptide, preferably encoding a plastidal transit peptide or a mitochondrial transit peptide;
   which are operable linked.
   (All the references to Tables I to IV are references to the corresponding lines of Tables I to IV.)

[75242] In a preferred embodiment thereof said nucleic acid molecule according to 2 (a), (b), (c), (d), (e), (f), (g), (h), (i), (j) or (k) encodes a polypeptide which has the activity of the respective polypeptide represented by a protein comprising a polypeptide as depicted in the respective line in column 5 of Table II, application no. 15.

[75243] In another preferred embodiment thereof said nucleic acid molecule according to 2 (a), (b), (c), (d), (e), (f), (g), (h), (i), (j) or (k) confers a generation or an increase of the respective fine chemical in a non-human organism or a part thereof as compared to a corresponding wild-type non-human organism or part thereof.

[75244] In another preferred embodiment thereof said nucleic acid molecule according to 2 (a), (b), (c), (d), (e), (f), (g), (h), (i), (j) or (k) encodes a polypeptide which has the activity of the respective polypeptide represented by a protein as depicted in the respective line in column 5 of Table II application no. 15 and confers a generation or an increase of the respective fine chemical in a non-human organism or a part thereof as compared to a corresponding wild-type non-human organism or part thereof.

[75245] In another embodiment thereof the expression cassette comprises 3) a nucleic acid molecule encoding a transit peptide, preferably encoding a plastidal transit peptide, especially in case in column 6 of Table I, application no. 15, in the same line as of the respective nucleic acid molecule according to 2) “plastidic” is depicted, or encoding a mitochondrial transit peptide, especially in case in column 6 of Table I, application no. 15, in the same line as of the respective nucleic acid molecule according to 2) “mitochondric” is depicted.

[75246] In another embodiment thereof the expression cassette does not comprise 3) a nucleic acid molecule encoding a transit peptide, especially in case in column 6 of Table I, application no. 15, in the same line as of the respective nucleic acid molecule according to 2) “non-targeted” is depicted.

[75247] In a further embodiment, the invention relates to an expression cassette, comprising
[75248] 1) a promoter, preferably a promoter selected from the group consisting of Big35S, PCUbi, Super and USP;
[75249] 2) a nucleic acid molecule selected from the group consisting of
   [75250] (a) a nucleic acid molecule encoding a polypeptide shown in Table II, application no. 15, column 5 or 8, preferably shown in Table II A, application no. 15, column 5, or in Table II A, application no. 15, column 8, or in Table II B, application no. 15, column 8, or a homolog or a fragment thereof;
   [75251] (b) a nucleic acid molecule shown in Table I, application no. 15, column 5 or 8, preferably shown in Table I A, application no. 15, column 5, or in Table I A, application no. 15, column 8, or in Table I B, application no. 15, column 8, preferably the coding region thereof, or a homolog or a fragment thereof;
   [75252] (c) a nucleic acid molecule, which, as a result of the degeneracy of the genetic code, can be derived from a polypeptide sequence depicted in column 5 or 8 of Table II, application no. 15, preferably shown in Table II A, application no. 15, column 5, or in Table II A, application no. 15, column 8, or in Table II B, application no. 15, column 8;
   [75253] (d) a nucleic acid molecule having at least 30% identity, preferably at least 40%, 50%, 60%, 70%, 75%, 80%, 85%, 90%, 95%, 96%, 97%, 98%, 99%, 99.5%, with the nucleic acid molecule sequence of a polynucleotide comprising the nucleic acid molecule shown in column 5 or 8 of Table I, application no. 15, preferably shown in Table I A, application no. 15, column 5, or in Table I A, application no. 15, column 8,or in Table I B, application no. 15, column 8, preferably the coding region thereof;
   [75254] (e) a nucleic acid molecule encoding a polypeptide having at least 30% identity, preferably at least 40%, 50% 60%, 70%, 75%, 80%, 85%, 90%, 95%, 96%, 97%, 98%, 99%, 99.5%, identity with the amino acid sequence of the polypeptide encoded by the nucleic acid molecule of (a), (b), (c) or (d);
   [75255] (f) a nucleic acid molecule which hybridizes with a nucleic acid molecule of (a), (b), (c), (d) or (e) under stringent hybridization conditions;
   [75256] (g) a nucleic acid molecule encoding a polypeptide which can be isolated with the aid of monoclonal or polyclonal antibodies made against a polypeptide encoded by one of the nucleic acid molecules of (a), (b), (c), (d), (e) or (f);
   [75257] (h) a nucleic acid molecule encoding a polypeptide comprising the consensus sequence or one or more polypeptide motifs as shown in column 8 of Table IV, application no. 15;
   [75258] (i) a nucleic acid molecule encoding a polypeptide having the activity represented by a respective protein as depicted in column 5 of Table II, application no. 15;
   [75259] (j) a nucleic acid molecule comprising a polynucleotide which is obtained by amplifying a cDNA library or a genomic library using the primers in Table III, application no. 15, column 8;
   [75260] and
   [75261] (k) nucleic acid molecule which is obtainable by screening a suitable nucleic acid library, especially a cDNA library and/or a genomic library, under stringent hybridization conditions with a probe comprising one of the sequences of the nucleic acid molecule of (a), (b), (c), (d), (e), (f), (g), (h), (i) or (j) or with a fragment of at least 15 nt, preferably 20 nt, 30 nt, 50 nt, 100 nt, 200 nt,500 nt, 1000 nt, 1500 nt, 2000 nt or 3000 nt of the nucleic acid molecule characterized in (a), (b), (c), (d), (e), (f), (g), (h), (i) or (j);
   [75262] or a nucleic acid molecule comprising a sequence which is complementary thereto;
      and, optionally
[75263] 3) nucleic acid molecule encoding a transit peptide, preferably encoding a plastidal transit peptide or a mitochondrial transit peptide;
   which are operable linked and
   whereby, preferably, the nucleic acid molecule according to 2 (a), (b), (c), (d), (e), (f), (g), (h), (i), (j) or (k) distinguishes over the sequence depicted in Table I A and/or I B, application no. 15, column 5 or 8, or the coding region thereof, by one or more nucleotides (especially but not exceeding 5%, preferably 4%, 3%, 2%, 1%, 0.5%, 0.2% or 0.1%). In an embodiment, the nucleic acid molecule of the invention according to 2) does not consist of the sequence shown in Table

[75264] I A and/or I B, application no. 15, column 5 or 8, or the coding region thereof. In another embodiment, the nucleic acid molecule of the present invention, preferably the coding region thereof, is at least 30%, 40%, 50%, 60%, 70%, 80%, 90%, 95% identical but less than 100%, 99.999%, 99.99%, 99.9%, 99%, 98%, 97%, 96% or 95% identical to the sequence shown in Table I A and/or I B, application no. 15, column 5 or 8, or the coding region thereof, respectively. In a further embodiment the nucleic acid molecule does not encode the polypeptide sequence shown in Table II A and/or II B, application no. 15, column 5 or 8 but homologs thereof.

[75265] Accordingly, in one embodiment, the nucleic acid molecule of the present invention encodes in one embodiment a polypeptide which differs at least in one or more amino acids (especially but not exceeding 5%, preferably 4%, 3%, 2%, 1%, 0.5%, 0.2% or 0.1%) from the polypeptide shown in Table II, application no. 15, column 5 or 8 and does not encode a protein of the sequence shown in Table II A and/or II B, application no. 15, column 5 or 8. Accordingly, in one embodiment, the protein encoded by a sequence of a nucleic acid according to 2(a), (b), (c), (d), (e), (f), (g), (h), (i), (j) or (k) does not consist of the sequence shown in Table I A and/or I B, application no. 15, column 5 or 8, or the coding region thereof. In a further embodiment, the protein of the present invention is at least 30%, 40%, 50%, 60%, 70%, 80%, 90%, 95% identical to protein sequence depicted in Table II A and/or II B, application no. 15, column 5 or 8 but less than 100%, 99.999%, 99.99%, 99.9%, 99%, 98%, 97%, 96% or 95% identical to the sequence shown in Table II A and/or II B, application no. 15, column 5 or 8.

(All the references to Tables I to IV are references to the corresponding lines of Tables I to IV.)

[75266] In a preferred embodiment thereof said nucleic acid molecule according to 2 (a), (b), (c), (d), (e), (f), (g), (h), (i), (j) or (k) encodes a polypeptide which has the activity of the respective polypeptide represented by a protein comprising a polypeptide as depicted in the respective line in column 5 of Table II, application no. 15.

[75267] In another preferred embodiment thereof said nucleic acid molecule according to 2 (a), (b), (c), (d), (e), (f), (g), (h), (i), (j) or (k) confers a generation or an increase of the respective fine chemical in a non-human organism or a part thereof as compared to a corresponding wild-type non-human organism or part thereof.

[75268] In another preferred embodiment thereof said nucleic acid molecule according to 2 (a), (b), (c), (d), (e), (f), (g), (h), (i), (j) or (k) encodes a polypeptide which has the activity of the respective polypeptide represented by a protein as depicted in the respective line in column 5 of Table II application no. 15 and confers a generation or an increase of the respective fine chemical in a non-human organism or a part thereof as compared to a corresponding wild-type non-human organism or part thereof.

[75269] In another embodiment thereof the expression cassette comprises 3) a nucleic acid molecule encoding a transit peptide, preferably encoding a plastidal transit peptide, especially in case in column 6 of Table I, application no. 15, in the same line as of the respective nucleic acid molecule according to 2) “plastidic” is depicted, or encoding a mitochondrial transit peptide, especially in case in column 6 of Table I, application no. 15, in the same line as of the respective nucleic acid molecule according to 2) “mitochondric” is depicted.

[75270] In another embodiment thereof the expression cassette does not comprise 3) a nucleic acid molecule encoding a transit peptide, especially in case in column 6 of Table I, application no. 15, in the same line as of the respective nucleic acid molecule according to 2) “non-targeted” is depicted.

[75271] In an embodiment the present invention relates to an expresssion cassette comprising a) a promoter, preferably a promoter selected from the group consisting of Big35S, PCUbi, Super and USP, in particular p-PcUBI; and b) the nucleic acid SEQ ID NO. 17451, or a homolog or fragment thereof, or a homolog thereof being depicted in Table I, application no. 15, column 8, in the same line as SEQ ID NO. 17451, preferably the coding region thereof, a homolog or a fragment thereof; which are operable linked.

[75272] In an embodiment thereof the expression cassette comprises in addition c) a nucleic acid molecule encoding a transit peptide, especially a plastidal transit petide in case in Table I, application no. 15, in column 6 in the same line as SEQ ID NO. 17451 is depicted, plastidic is mentioned, or a mitochondrial transit peptide in case in Table I, application no. 15, in column 6 in the same line as SEQ ID NO. 17451 is depicted, mitochondric is mentioned; which is operable linked, too.

[75273] In another embodiment thereof the expression cassette does not comprise an additional transit peptide in case in Table I, application no. 15, in column 6 in the same line as SEQ ID NO. 17451 is depicted, non-targeted is mentioned.

[75274] In an embodiment the present invention relates to an expresssion cassette comprising a) a promoter, preferably a promoter selected from the group consisting of Big35S, PCUbi, Super and USP, in particular p-PcUBI; and b) the nucleic acid SEQ ID NO. 133001, or a homolog or fragment thereof, or a homolog thereof being depicted in Table I, application no. 15, column 8, in the same line as SEQ ID NO. 133001, preferably the coding region thereof, a homolog or a fragment thereof; which are operable linked.

[75275] In an embodiment thereof the expression cassette comprises in addition c) a nucleic acid molecule encoding a transit peptide, especially a plastidal transit petide in case in Table I, application no. 15, in column 6 in the same line as SEQ ID NO. 133001 is depicted, plastidic is mentioned, or a mitochondrial transit peptide in case in Table I, application no. 15, in column 6 in the same line as SEQ ID NO. 133001 is depicted, mitochondric is mentioned; which is operable linked, too.

[75276] In another embodiment thereof the expression cassette does not comprise an additional transit peptide in case in Table I, application no. 15, in column 6 in the same line as SEQ ID NO. 133001 is depicted, non-targeted is mentioned.

[75277] In an embodiment the present invention relates to an expresssion cassette comprising a) a promoter, preferably a promoter selected from the group consisting of Big35S, PCUbi, Super and USP, in particular p-PcUBI; and b) the nucleic acid SEQ ID NO. 17968, or a homolog or fragment thereof, or a homolog thereof being depicted in Table I, application no. 15, column 8, in the same line as SEQ ID NO. 17968, preferably the coding region thereof, a homolog or a fragment thereof; which are operable linked.

[75278] In an embodiment thereof the expression cassette comprises in addition c) a nucleic acid molecule encoding a transit peptide, especially a plastidal transit petide in case in Table I, application no. 15, in column 6 in the same line as SEQ ID NO. 17968 is depicted, plastidic is mentioned, or a mitochondrial transit peptide in case in Table I, application no. 15, in column 6 in the same line as SEQ ID NO. 17968 is depicted, mitochondric is mentioned; which is bpenlithBlireketIoditment thereof the expression cassette does not comprise an additional transit peptide in case in Table I, application no. 15, in column 6 in the same line as SEQ ID NO. 17968 is depicted, non-targeted is mentioned.

[75279] In an embodiment the present invention relates to an expresssion cassette comprising a) a promoter, preferably a promoter selected from the group consisting of Big35S, PCUbi, Super and USP, in particular p-PcUBI; and b) the nucleic acid SEQ ID NO. 18070, or a homolog or fragment thereof, or a homolog thereof being depicted in Table I, application no. 15, column 8, in the same line as SEQ ID NO. 18070, preferably the coding region thereof, a homolog or a fragment thereof; which are operable linked.

[75280] In an embodiment thereof the expression cassette comprises in addition c) a nucleic acid molecule encoding a transit peptide, especially a plastidal transit petide in case in Table I, application no. 15, in column 6 in the same line as SEQ ID NO. 18070 is depicted, plastidic is mentioned, or a mitochondrial transit peptide in case in Table I, application no. 15, in column 6 in the same line as SEQ ID NO. 18070 is depicted, mitochondric is mentioned; which is operable linked, too.

[75281] In another embodiment thereof the expression cassette does not comprise an additional transit peptide in case in Table I, application no. 15, in column 6 in the same line as SEQ ID NO. 18070 is depicted, non-targeted is mentioned.

[75282] In an embodiment the present invention relates to an expresssion cassette comprising a) a promoter, preferably a promoter selected from the group consisting of Big35S, PCUbi, Super and USP, in particular p-PcUBI; and b) the nucleic acid SEQ ID NO. 812, or a homolog or fragment thereof, or a homolog thereof being depicted in Table I, application no. 15, column 8, in the same line as SEQ ID NO. 812, preferably the coding region thereof, a homolog or a fragment thereof; which are operable linked.

[75283] In an embodiment thereof the expression cassette comprises in addition c) a nucleic acid molecule encoding a transit peptide, especially a plastidal transit petide in case in Table I, application no. 15, in column 6 in the same line as SEQ ID NO. 812 is depicted, plastidic is mentioned, or a mitochondrial transit peptide in case in Table I, application no. 15, in column 6 in the same line as SEQ ID NO. 812 is depicted, mitochondric is mentioned; which is operable linked, too.

[75284] In another embodiment thereof the expression cassette does not comprise an additional transit peptide in case in Table I, application no. 15, in column 6 in the same line as SEQ ID NO. 812 is depicted, non-targeted is mentioned.

[75285] In an embodiment the present invention relates to an expresssion cassette comprising a) a promoter, preferably a promoter selected from the group consisting of Big35S, PCUbi, Super and USP, in particular p-PcUBI; and b) the nucleic acid SEQ ID NO. 19419, or a homolog or fragment thereof, or a homolog thereof being depicted in Table I, application no. 15, column 8, in the same line as SEQ ID NO. 19419, preferably the coding region thereof, a homolog or a fragment thereof; which are operable linked.

[75286] In an embodiment thereof the expression cassette comprises in addition c) a nucleic acid molecule encoding a transit peptide, especially a plastidal transit petide in case in Table I, application no. 15, in column 6 in the same line as SEQ ID NO. 19419 is depicted, plastidic is mentioned, or a mitochondrial transit peptide in case in Table I, application no. 15, in column 6 in the same line as SEQ ID NO. 19419 is depicted, mitochondric is mentioned; which is operable linked, too.

[75287] In another embodiment thereof the expression cassette does not comprise an additional transit peptide in case in Table I, application no. 15, in column 6 in the same line as SEQ ID NO. 19419 is depicted, non-targeted is mentioned.

[75288] In an embodiment the present invention relates to an expresssion cassette comprising a) a promoter, preferably a promoter selected from the group consisting of Big35S, PCUbi, Super and USP, in particular p-PcUBI; and b) the nucleic acid SEQ ID NO. 19919, or a homolog or fragment thereof, or a homolog thereof being depicted in Table I, application no. 15, column 8, in the same line as SEQ ID NO. 19919, preferably the coding region thereof, a homolog or a fragment thereof; which are operable linked.

[75289] In an embodiment thereof the expression cassette comprises in addition c) a nucleic acid molecule encoding a transit peptide, especially a plastidal transit petide in case in Table I, application no. 15, in column 6 in the same line as SEQ ID NO. 19919 is depicted, plastidic is mentioned, or a mitochondrial transit peptide in case in Table I, application no. 15, in column 6 in the same line as SEQ ID NO. 19919 is depicted, mitochondric is mentioned; which is operable linked, too.

[75290] In another embodiment thereof the expression cassette does not comprise an additional transit peptide in case in Table I, application no. 15, in column 6 in the same line as SEQ ID NO. 19919 is depicted, non-targeted is mentioned.

[75291] In an embodiment the present invention relates to an expresssion cassette comprising a) a promoter, preferably a promoter selected from the group consisting of Big35S, PCUbi, Super and USP, in particular p-PcUBI; and b) the nucleic acid SEQ ID NO. 133042, or a homolog or fragment thereof, or a homolog thereof being depicted in Table I, application no. 15, column 8, in the same line as SEQ ID NO. 133042, preferably the coding region thereof, a homolog or a fragment thereof; which are operable linked.

[75292] In an embodiment thereof the expression cassette comprises in addition c) a nucleic acid molecule encoding a transit peptide, especially a plastidal transit petide in case in Table I, application no. 15, in column 6 in the same line as SEQ ID NO. 133042 is depicted, plastidic is mentioned, or a mitochondrial transit peptide in case in Table I, application no. 15, in column 6 in the same line as SEQ ID NO. 133042 is depicted, mitochondric is mentioned; which is operable linked, too.

[75293] In another embodiment thereof the expression cassette does not comprise an additional transit peptide in case in Table I, application no. 15, in column 6 in the same line as SEQ ID NO. 133042 is depicted, non-targeted is mentioned.

[75294] In an embodiment the present invention relates to an expresssion cassette comprising a) a promoter, preferably a promoter selected from the group consisting of Big35S, PCUbi, Super and USP, in particular p-PcUBI; and b) the nucleic acid SEQ ID NO. 133349, or a homolog or fragment thereof, or a homolog thereof being depicted in Table I, application no. 15, column 8, in the same line as SEQ ID NO. 133349, preferably the coding region thereof, a homolog or a fragment thereof; which are operable linked.

[75295] In an embodiment thereof the expression cassette comprises in addition c) a nucleic acid molecule encoding a transit peptide, especially a plastidal transit petide in case in Table I, application no. 15, in column 6 in the same line as SEQ ID NO. 133349 is depicted, plastidic is mentioned, or a mitochondrial transit peptide in case in Table I, application no. 15, in column 6 in the same line as SEQ ID NO. 133349 is depicted, mitochondric is mentioned; which is operable linked, too.

[75296] In another embodiment thereof the expression cassette does not comprise an additional transit peptide in case in Table I, application no. 15, in column 6 in the same line as SEQ ID NO. 133349 is depicted, non-targeted is mentioned.

[75297] In an embodiment the present invention relates to an expresssion cassette comprising a) a promoter, preferably a promoter selected from the group consisting of Big35S, PCUbi, Super and USP, in particular p-Super; and b) the nucleic acid SEQ ID NO. 120810, or a homolog or fragment thereof, or a homolog thereof being depicted in Table I, application no. 15, column 8, in the same line as SEQ ID NO. 120810, preferably the coding region thereof, a homolog or a fragment thereof; which are operable linked.

[75298] In an embodiment thereof the expression cassette comprises in addition c) a nucleic acid molecule encoding a transit peptide, especially a plastidal transit petide in case in Table I, application no. 15, in column 6 in the same line as SEQ ID NO. 120810 is depicted, plastidic is mentioned, or a mitochondrial transit peptide in case in Table I, application no. 15, in column 6 in the same line as SEQ ID NO. 120810 is depicted, mitochondric is mentioned; which is operable linked, too.

[75299] In another embodiment thereof the expression cassette does not comprise an additional transit peptide in case in Table I, application no. 15, in column 6 in the same line as SEQ ID NO. 120810 is depicted, non-targeted is mentioned.

[75300] In an embodiment the present invention relates to an expresssion cassette comprising a) a promoter, preferably a promoter selected from the group consisting of Big35S, PCUbi, Super and USP, in particular p-PcUBI; and b) the nucleic acid SEQ ID NO. 21497, or a homolog or fragment thereof, or a homolog thereof being depicted in Table I, application no. 15, column 8, in the same line as SEQ ID NO. 21497, preferably the coding region thereof, a homolog or a fragment thereof; which are operable linked.

[75301] In an embodiment thereof the expression cassette comprises in addition c) a nucleic acid molecule encoding a transit peptide, especially a plastidal transit petide in case in Table I, application no. 15, in column 6 in the same line as SEQ ID NO. 21497 is depicted, plastidic is mentioned, or a mitochondrial transit peptide in case in Table I, application no. 15, in column 6 in the same line as SEQ ID NO. 21497 is depicted, mitochondric is mentioned; which is operable linked, too.

[75302] In another embodiment thereof the expression cassette does not comprise an additional transit peptide in case in Table I, application no. 15, in column 6 in the same line as SEQ ID NO. 21497 is depicted, non-targeted is mentioned.

[75303] In an embodiment the present invention relates to an expresssion cassette comprising a) a promoter, preferably a promoter selected from the group consisting of Big35S, PCUbi, Super and USP, in particular p-PcUBI; and b) the nucleic acid SEQ ID NO. 22015, or a homolog or fragment thereof, or a homolog thereof being depicted in Table I, application no. 15, column 8, in the same line as SEQ ID NO. 22015, preferably the coding region thereof, a homolog or a fragment thereof; which are operable linked.

[75304] In an embodiment thereof the expression cassette comprises in addition c) a nucleic acid molecule encoding a transit peptide, especially a plastidal transit petide in case in Table I, application no. 15, in column 6 in the same line as SEQ ID NO. 22015 is depicted, plastidic is mentioned, or a mitochondrial transit peptide in case in Table I, application no. 15, in column 6 in the same line as SEQ ID NO. 22015 is depicted, mitochondric is mentioned; which is operable linked, too.

[75305] In another embodiment thereof the expression cassette does not comprise an additional transit peptide in case in Table I, application no. 15, in column 6 in the same line as SEQ ID NO. 22015 is depicted, non-targeted is mentioned.

[75306] In an embodiment the present invention relates to an expresssion cassette comprising a) a promoter, preferably a promoter selected from the group consisting of Big35S, PCUbi, Super and USP, in particular p-PcUBI; and b) the nucleic acid SEQ ID NO. 22249, or a homolog or fragment thereof, or a homolog thereof being depicted in Table I, application no. 15, column 8, in the same line as SEQ ID NO. 22249, preferably the coding region thereof, a homolog or a fragment thereof; which are operable linked.

[75307] In an embodiment thereof the expression cassette comprises in addition c) a nucleic acid molecule encoding a transit peptide, especially a plastidal transit petide in case in Table I, application no. 15, in column 6 in the same line as SEQ ID NO. 22249 is depicted, plastidic is mentioned, or a mitochondrial transit peptide in case in Table I, application no. 15, in column 6 in the same line as SEQ ID NO. 22249 is depicted, mitochondric is mentioned; which is operable linked, too.

[75308] In another embodiment thereof the expression cassette does not comprise an additional transit peptide in case in Table I, application no. 15, in column 6 in the same line as SEQ ID NO. 22249 is depicted, non-targeted is mentioned.

[75309] In an embodiment the present invention relates to an expresssion cassette comprising a) a promoter, preferably a promoter selected from the group consisting of Big35S, PCUbi, Super and USP, in particular p-PcUBI; and b) the nucleic acid SEQ ID NO. 130491, or a homolog or fragment thereof, or a homolog thereof being depicted in Table I, application no. 15, column 8, in the same line as SEQ ID NO. 130491, preferably the coding region thereof, a homolog or a fragment thereof; which are operable linked.

[75310] In an embodiment thereof the expression cassette comprises in addition c) a nucleic acid molecule encoding a transit peptide, especially a plastidal transit petide in case in Table I, application no. 15, in column 6 in the same line as SEQ ID NO. 130491 is depicted, plastidic is mentioned, or a mitochondrial transit peptide in case in Table I, application no. 15, in column 6 in the same line as SEQ ID NO. 130491 is depicted, mitochondric is mentioned; which is operable linked, too.

[75311] In another embodiment thereof the expression cassette does not comprise an additional transit peptide in case in Table I, application no. 15, in column 6 in the same line as SEQ ID NO. 130491 is depicted, non-targeted is mentioned.

[75312] In an embodiment the present invention relates to an expresssion cassette comprising a) a promoter, preferably a promoter selected from the group consisting of Big35S, PCUbi, Super and USP, in particular p-PcUBI; and b) the nucleic acid SEQ ID NO. 2367, or a homolog or fragment thereof, or a homolog thereof being depicted in Table I, application no. 15, column 8, in the same line as SEQ ID NO. 2367, preferably the coding region thereof, a homolog or a fragment thereof; which are operable linked.

[75313] In an embodiment thereof the expression cassette comprises in addition c) a nucleic acid molecule encoding a transit peptide, especially a plastidal transit petide in case in Table I, application no. 15, in column 6 in the same line as SEQ ID NO. 2367 is depicted, plastidic is mentioned, or a mitochondrial transit peptide in case in Table I, application no. 15, in column 6 in the same line as SEQ ID NO. 2367 is depicted, mitochondric is mentioned; which is operable linked, too.

[75314] In another embodiment thereof the expression cassette does not comprise an additional transit peptide in case in Table I, application no. 15, in column 6 in the same line as SEQ ID NO. 2367 is depicted, non-targeted is mentioned.

[75315] In an embodiment the present invention relates to an expresssion cassette comprising a) a promoter, preferably a promoter selected from the group consisting of Big35S, PCUbi, Super and USP, in particular p-PcUBI; and b) the nucleic acid SEQ ID NO. 2573, or a homolog or fragment thereof, or a homolog thereof being depicted in Table I, application no. 15, column 8, in the same line as SEQ ID NO. 2573, preferably the coding region thereof, a homolog or a fragment thereof; which are operable linked.

[75316] In an embodiment thereof the expression cassette comprises in addition c) a nucleic acid molecule encoding a transit peptide, especially a plastidal transit petide in case in Table I, application no. 15, in column 6 in the same line as SEQ ID NO. 2573 is depicted, plastidic is mentioned, or a mitochondrial transit peptide in case in Table I, application no. 15, in column 6 in the same line as SEQ ID NO. 2573 is depicted, mitochondric is mentioned; which is operable linked, too.

[75317] In another embodiment thereof the expression cassette does not comprise an additional transit peptide in case in Table I, application no. 15, in column 6 in the same line as SEQ ID NO. 2573 is depicted, non-targeted is mentioned.

[75318] In an embodiment the present invention relates to an expresssion cassette comprising a) a promoter, preferably a promoter selected from the group consisting of Big35S, PCUbi, Super and USP, in particular p-PcUBI; and b) the nucleic acid SEQ ID NO. 2935, or a homolog or fragment thereof, or a homolog thereof being depicted in Table I, application no. 15, column 8, in the same line as SEQ ID NO. 2935, preferably the coding region thereof, a homolog or a fragment thereof; which are operable linked.

[75319] In an embodiment thereof the expression cassette comprises in addition c) a nucleic acid molecule encoding a transit peptide, especially a plastidal transit petide in case in Table I, application no. 15, in column 6 in the same line as SEQ ID NO. 2935 is depicted, plastidic is mentioned, or a mitochondrial transit peptide in case in Table I, application no. 15, in column 6 in the same line as SEQ ID NO. 2935 is depicted, mitochondric is mentioned; which is operable linked, too.

[75320] In another embodiment thereof the expression cassette does not comprise an additional transit peptide in case in Table I, application no. 15, in column 6 in the same line as SEQ ID NO. 2935 is depicted, non-targeted is mentioned.

[75321] In an embodiment the present invention relates to an expresssion cassette comprising a) a promoter, preferably a promoter selected from the group consisting of Big35S, PCUbi, Super and USP, in particular p-PcUBI; and b) the nucleic acid SEQ ID NO. 133541, or a homolog or fragment thereof, or a homolog thereof being depicted in Table I, application no. 15, column 8, in the same line as SEQ ID NO. 133541, preferably the coding region thereof, a homolog or a fragment thereof; which are operable linked.

[75322] In an embodiment thereof the expression cassette comprises in addition c) a nucleic acid molecule encoding a transit peptide, especially a plastidal transit petide in case in Table I, application no. 15, in column 6 in the same line as SEQ ID NO. 133541 is depicted, plastidic is mentioned, or a mitochondrial transit peptide in case in Table I, application no. 15, in column 6 in the same line as SEQ ID NO. 133541 is depicted, mitochondric is mentioned; which is operable linked, too.

[75323] In another embodiment thereof the expression cassette does not comprise an additional transit peptide in case in Table I, application no. 15, in column 6 in the same line as SEQ ID NO. 133541 is depicted, non-targeted is mentioned.

[75324] In an embodiment the present invention relates to an expresssion cassette comprising a) a promoter, preferably a promoter selected from the group consisting of Big35S, PCUbi, Super and USP, in particular p-PcUBI; and b) the nucleic acid SEQ ID NO. 23482, or a homolog or fragment thereof, or a homolog thereof being depicted in Table I, application no. 15, column 8, in the same line as SEQ ID NO. 23482, preferably the coding region thereof, a homolog or a fragment thereof; which are operable linked.

[75325] In an embodiment thereof the expression cassette comprises in addition c) a nucleic acid molecule encoding a transit peptide, especially a plastidal transit petide in case in Table I, application no. 15, in column 6 in the same line as SEQ ID NO. 23482 is depicted, plastidic is mentioned, or a mitochondrial transit peptide in case in Table I, application no. 15, in column 6 in the same line as SEQ ID NO. 23482 is depicted, mitochondric is mentioned; which is operable linked, too.

[75326] In another embodiment thereof the expression cassette does not comprise an additional transit peptide in case in Table I, application no. 15, in column 6 in the same line as SEQ ID NO. 23482 is depicted, non-targeted is mentioned.

[75327] In an embodiment the present invention relates to an expresssion cassette comprising a) a promoter, preferably a promoter selected from the group consisting of Big35S, PCUbi, Super and USP, in particular p-PcUBI; and b) the nucleic acid SEQ ID NO. 3279, or a homolog or fragment thereof, or a homolog thereof being depicted in Table I, application no. 15, column 8, in the same line as SEQ ID NO. 3279, preferably the coding region thereof, a homolog or a fragment thereof; which are operable linked.

[75328] In an embodiment thereof the expression cassette comprises in addition c) a nucleic acid molecule encoding a transit peptide, especially a plastidal transit petide in case in Table I, application no. 15, in column 6 in the same line as SEQ ID NO. 3279 is depicted, plastidic is mentioned, or a mitochondrial transit peptide in case in Table I, application no. 15, in column 6 in the same line as SEQ ID NO. 3279 is depicted, mitochondric is mentioned; which is operable linked, too.

[75329] In another embodiment thereof the expression cassette does not comprise an additional transit peptide in case in Table I, application no. 15, in column 6 in the same line as SEQ ID NO. 3279 is depicted, non-targeted is mentioned.

[75330] In an embodiment the present invention relates to an expresssion cassette comprising a) a promoter, preferably a promoter selected from the group consisting of Big35S, PCUbi, Super and USP, in particular p-PcUBI; and b) the nucleic acid SEQ ID NO. 23844, or a homolog or fragment thereof, or a homolog thereof being depicted in Table I, application no. 15, column 8, in the same line as SEQ ID NO. 23844, preferably the coding region thereof, a homolog or a fragment thereof; which are operable linked.

[75331] In an embodiment thereof the expression cassette comprises in addition c) a nucleic acid molecule encoding a transit peptide, especially a plastidal transit petide in case in Table I, application no. 15, in column 6 in the same line as SEQ ID NO. 23844 is depicted, plastidic is mentioned, or a mitochondrial transit peptide in case in Table I, application no. 15, in column 6 in the same line as SEQ ID NO. 23844 is depicted, mitochondric is mentioned; which is operable linked, too.

[75332] In another embodiment thereof the expression cassette does not comprise an additional transit peptide in case in Table I, application no. 15, in column 6 in the same line as SEQ ID NO. 23844 is depicted, non-targeted is mentioned.

[75333] In an embodiment the present invention relates to an expresssion cassette comprising a) a promoter, preferably a promoter selected from the group consisting of Big35S, PCUbi, Super and USP, in particular p-PcUBI; and b) the nucleic acid SEQ ID NO. 3654, or a homolog or fragment thereof, or a homolog thereof being depicted in Table I, application no. 15, column 8, in the same line as SEQ ID NO. 3654, preferably the coding region thereof, a homolog or a fragment thereof; which are operable linked.

[75334] In an embodiment thereof the expression cassette comprises in addition c) a nucleic acid molecule encoding a transit peptide, especially a plastidal transit petide in case in Table I, application no. 15, in column 6 in the same line as SEQ ID NO. 3654 is depicted, plastidic is mentioned, or a mitochondrial transit peptide in case in Table I, application no. 15, in column 6 in the same line as SEQ ID NO. 3654 is depicted, mitochondric is mentioned; which is operable linked, too.

[75335] In another embodiment thereof the expression cassette does not comprise an additional transit peptide in case in Table I, application no. 15, in column 6 in the same line as SEQ ID NO. 3654 is depicted, non-targeted is mentioned.

[75336] In an embodiment the present invention relates to an expresssion cassette comprising a) a promoter, preferably a promoter selected from the group consisting of Big35S, PCUbi, Super and USP, in particular p-PcUBI; and b) the nucleic acid SEQ ID NO. 68849, or a homolog or fragment thereof, or a homolog thereof being depicted in Table I, application no. 15, column 8, in the same line as SEQ ID NO. 68849, preferably the coding region thereof, a homolog or a fragment thereof; which are operable linked.

[75337] In an embodiment thereof the expression cassette comprises in addition c) a nucleic acid molecule encoding a transit peptide, especially a plastidal transit petide in case in Table I, application no. 15, in column 6 in the same line as SEQ ID NO. 68849 is depicted, plastidic is mentioned, or a mitochondrial transit peptide in case in Table I, application no. 15, in column 6 in the same line as SEQ ID NO. 68849 is depicted, mitochondric is mentioned; which is operable linked, too.

[75338] In another embodiment thereof the expression cassette does not comprise an additional transit peptide in case in Table I, application no. 15, in column 6 in the same line as SEQ ID NO. 68849 is depicted, non-targeted is mentioned.

[75339] In an embodiment the present invention relates to an expresssion cassette comprising a) a promoter, preferably a promoter selected from the group consisting of Big35S, PCUbi, Super and USP, in particular p-PcUBI; and b) the nucleic acid SEQ ID NO. 4102, or a homolog or fragment thereof, or a homolog thereof being depicted in Table I, application no. 15, column 8, in the same line as SEQ ID NO. 4102, preferably the coding region thereof, a homolog or a fragment thereof; which are operable linked.

[75340] In an embodiment thereof the expression cassette comprises in addition c) a nucleic acid molecule encoding a transit peptide, especially a plastidal transit petide in case in Table I, application no. 15, in column 6 in the same line as SEQ ID NO. 4102 is depicted, plastidic is mentioned, or a mitochondrial transit peptide in case in Table I, application no. 15, in column 6 in the same line as SEQ ID NO. 4102 is depicted, mitochondric is mentioned; which is operable linked, too.

[75341] In another embodiment thereof the expression cassette does not comprise an additional transit peptide in case in Table I, application no. 15, in column 6 in the same line as SEQ ID NO. 4102 is depicted, non-targeted is mentioned.

[75342] In an embodiment the present invention relates to an expresssion cassette comprising a) a promoter, preferably a promoter selected from the group consisting of Big35S, PCUbi, Super and USP, in particular p-PcUBI; and b) the nucleic acid SEQ ID NO. 4348, or a homolog or fragment thereof, or a homolog thereof being depicted in Table I, application no. 15, column 8, in the same line as SEQ ID NO. 4348, preferably the coding region thereof, a homolog or a fragment thereof; which are operable linked.

[75343] In an embodiment thereof the expression cassette comprises in addition c) a nucleic acid molecule encoding a transit peptide, especially a plastidal transit petide in case in Table I, application no. 15, in column 6 in the same line as SEQ ID NO. 4348 is depicted, plastidic is mentioned, or a mitochondrial transit peptide in case in Table I, application no. 15, in column 6 in the same line as SEQ ID NO. 4348 is depicted, mitochondric is mentioned; which is operable linked, too.

[75344] In another embodiment thereof the expression cassette does not comprise an additional transit peptide in case in Table I, application no. 15, in column 6 in the same line as SEQ ID NO. 4348 is depicted, non-targeted is mentioned.

[75345] In an embodiment the present invention relates to an expresssion cassette comprising a) a promoter, preferably a promoter selected from the group consisting of Big35S, PCUbi, Super and USP, in particular p-PcUBI; and b) the nucleic acid SEQ ID NO. 24438, or a homolog or fragment thereof, or a homolog thereof being depicted in Table I, application no. 15, column 8, in the same line as SEQ ID NO. 24438, preferably the coding region thereof, a homolog or a fragment thereof; which are operable linked.

[75346] In an embodiment thereof the expression cassette comprises in addition c) a nucleic acid molecule encoding a transit peptide, especially a plastidal transit petide in case in Table I, application no. 15, in column 6 in the same line as SEQ ID NO. 24438 is depicted, plastidic is mentioned, or a mitochondrial transit peptide in case in Table I, application no. 15, in column 6 in the same line as SEQ ID NO. 24438 is depicted, mitochondric is mentioned; which is operable linked, too.

[75347] In another embodiment thereof the expression cassette does not comprise an additional transit peptide in case in Table I, application no. 15, in column 6 in the same line as SEQ ID NO. 24438 is depicted, non-targeted is mentioned.

[75348] In an embodiment the present invention relates to an expresssion cassette comprising a) a promoter, preferably a promoter selected from the group consisting of Big35S, PCUbi, Super and USP, in particular p-PcUBI; and b) the nucleic acid SEQ ID NO. 24492, or a homolog or fragment thereof, or a homolog thereof being depicted in Table I, application no. 15, column 8, in the same line as SEQ ID NO. 24492, preferably the coding region thereof, a homolog or a fragment thereof; which are operable linked.

[75349] In an embodiment thereof the expression cassette comprises in addition c) a nucleic acid molecule encoding a transit peptide, especially a plastidal transit petide in case in Table I, application no. 15, in column 6 in the same line as SEQ ID NO. 24492 is depicted, plastidic is mentioned, or a mitochondrial transit peptide in case in Table I, application no. 15, in column 6 in the same line as SEQ ID NO. 24492 is depicted, mitochondric is mentioned; which is operable linked, too.

[75350] In another embodiment thereof the expression cassette does not comprise an additional transit peptide in case in Table I, application no. 15, in column 6 in the same line as SEQ ID NO. 24492 is depicted, non-targeted is mentioned.

[75351] In an embodiment the present invention relates to an expresssion cassette comprising a) a promoter, preferably a promoter selected from the group consisting of Big35S, PCUbi, Super and USP, in particular p-PcUBI; and b) the nucleic acid SEQ ID NO. 4904, or a homolog or fragment thereof, or a homolog thereof being depicted in Table I, application no. 15, column 8, in the same line as SEQ ID NO. 4904, preferably the coding region thereof, a homolog or a fragment thereof; which are operable linked.

[75352] In an embodiment thereof the expression cassette comprises in addition c) a nucleic acid molecule encoding a transit peptide, especially a plastidal transit petide in case in Table I, application no. 15, in column 6 in the same line as SEQ ID NO. 4904 is depicted, plastidic is mentioned, or a mitochondrial transit peptide in case in Table I, application no. 15, in column 6 in the same line as SEQ ID NO. 4904 is depicted, mitochondric is mentioned; which is operable linked, too.

[75353] In another embodiment thereof the expression cassette does not comprise an additional transit peptide in case in Table I, application no. 15, in column 6 in the same line as SEQ ID NO. 4904 is depicted, non-targeted is mentioned.

[75354] In an embodiment the present invention relates to an expresssion cassette comprising a) a promoter, preferably a promoter selected from the group consisting of Big35S, PCUbi, Super and USP, in particular p-PcUBI; and b) the nucleic acid SEQ ID NO. 25344, or a homolog or fragment thereof, or a homolog thereof being depicted in Table I, application no. 15, column 8, in the same line as SEQ ID NO. 25344, preferably the coding region thereof, a homolog or a fragment thereof; which are operable linked.

[75355] In an embodiment thereof the expression cassette comprises in addition c) a nucleic acid molecule encoding a transit peptide, especially a plastidal transit petide in case in Table I, application no. 15, in column 6 in the same line as SEQ ID NO. 25344 is depicted, plastidic is mentioned, or a mitochondrial transit peptide in case in Table I, application no. 15, in column 6 in the same line as SEQ ID NO. 25344 is depicted, mitochondric is mentioned; which is operable linked, too.

[75356] In another embodiment thereof the expression cassette does not comprise an additional transit peptide in case in Table I, application no. 15, in column 6 in the same line as SEQ ID NO. 25344 is depicted, non-targeted is mentioned.

[75357] In an embodiment the present invention relates to an expresssion cassette comprising a) a promoter, preferably a promoter selected from the group consisting of Big35S, PCUbi, Super and USP, in particular p-PcUBI; and b) the nucleic acid SEQ ID NO. 25428, or a homolog or fragment thereof, or a homolog thereof being depicted in Table I, application no. 15, column 8, in the same line as SEQ ID NO. 25428, preferably the coding region thereof, a homolog or a fragment thereof; which are operable linked.

[75358] In an embodiment thereof the expression cassette comprises in addition c) a nucleic acid molecule encoding a transit peptide, especially a plastidal transit petide in case in Table I, application no. 15, in column 6 in the same line as SEQ ID NO. 25428 is depicted, plastidic is mentioned, or a mitochondrial transit peptide in case in Table I, application no. 15, in column 6 in the same line as SEQ ID NO. 25428 is depicted, mitochondric is mentioned; which is operable linked, too.

[75359] In another embodiment thereof the expression cassette does not comprise an additional transit peptide in case in Table I, application no. 15, in column 6 in the same line as SEQ ID NO. 25428 is depicted, non-targeted is mentioned.

[75360] In an embodiment the present invention relates to an expresssion cassette comprising a) a promoter, preferably a promoter selected from the group consisting of Big35S, PCUbi, Super and USP, in particular p-PcUBI; and b) the nucleic acid SEQ ID NO. 25498, or a homolog or fragment thereof, or a homolog thereof being depicted in Table I, application no. 15, column 8, in the same line as SEQ ID NO. 25498, preferably the coding region thereof, a homolog or a fragment thereof; which are operable linked.

[75361] In an embodiment thereof the expression cassette comprises in addition c) a nucleic acid molecule encoding a transit peptide, especially a plastidal transit petide in case in Table I, application no. 15, in column 6 in the same line as SEQ ID NO. 25498 is depicted, plastidic is mentioned, or a mitochondrial transit peptide in case in Table I, application no. 15, in column 6 in the same line as SEQ ID NO. 25498 is depicted, mitochondric is mentioned; which is operable linked, too.

[75362] In another embodiment thereof the expression cassette does not comprise an additional transit peptide in case in Table I, application no. 15, in column 6 in the same line as SEQ ID NO. 25498 is depicted, non-targeted is mentioned.

[75363] In an embodiment the present invention relates to an expresssion cassette comprising a) a promoter, preferably a promoter selected from the group consisting of Big35S, PCUbi, Super and USP, in particular p-PcUBI; and b) the nucleic acid SEQ ID NO. 70038, or a homolog or fragment thereof, or a homolog thereof being depicted in Table I, application no. 15, column 8, in the same line as SEQ ID NO. 70038, preferably the coding region thereof, a homolog or a fragment thereof; which are operable linked.

[75364] In an embodiment thereof the expression cassette comprises in addition c) a nucleic acid molecule encoding a transit peptide, especially a plastidal transit petide in case in Table I, application no. 15, in column 6 in the same line as SEQ ID NO. 70038 is depicted, plastidic is mentioned, or a mitochondrial transit peptide in case in Table I, application no. 15, in column 6 in the same line as SEQ ID NO. 70038 is depicted, mitochondric is mentioned; which is operable linked, too.

[75365] In another embodiment thereof the expression cassette does not comprise an additional transit peptide in case in Table I, application no. 15, in column 6 in the same line as SEQ ID NO. 70038 is depicted, non-targeted is mentioned.

[75366] In an embodiment the present invention relates to an expresssion cassette comprising a) a promoter, preferably a promoter selected from the group consisting of Big35S, PCUbi, Super and USP, in particular p-PcUBI; and b) the nucleic acid SEQ ID NO. 5493, or a homolog or fragment thereof, or a homolog thereof being depicted in Table I, application no. 15, column 8, in the same line as SEQ ID NO. 5493, preferably the coding region thereof, a homolog or a fragment thereof; which are operable linked.

[75367] In an embodiment thereof the expression cassette comprises in addition c) a nucleic acid molecule encoding a transit peptide, especially a plastidal transit petide in case in Table I, application no. 15, in column 6 in the same line as SEQ ID NO. 5493 is depicted, plastidic is mentioned, or a mitochondrial transit peptide in case in Table I, application no. 15, in column 6 in the same line as SEQ ID NO. 5493 is depicted, mitochondric is mentioned; which is operable linked, too.

[75368] In another embodiment thereof the expression cassette does not comprise an additional transit peptide in case in Table I, application no. 15, in column 6 in the same line as SEQ ID NO. 5493 is depicted, non-targeted is mentioned.

[75369] In an embodiment the present invention relates to an expresssion cassette comprising a) a promoter, preferably a promoter selected from the group consisting of Big35S, PCUbi, Super and USP, in particular p-PcUBI; and b) the nucleic acid SEQ ID NO. 70583, or a homolog or fragment thereof, or a homolog thereof being depicted in Table I, application no. 15, column 8, in the same line as SEQ ID NO. 70583, preferably the coding region thereof, a homolog or a fragment thereof; which are operable linked.

[75370] In an embodiment thereof the expression cassette comprises in addition c) a nucleic acid molecule encoding a transit peptide, especially a plastidal transit petide in case in Table I, application no. 15, in column 6 in the same line as SEQ ID NO. 70583 is depicted, plastidic is mentioned, or a mitochondrial transit peptide in case in Table I, application no. 15, in column 6 in the same line as SEQ ID NO. 70583 is depicted, mitochondric is mentioned; which is operable linked, too.

[75371] In another embodiment thereof the expression cassette does not comprise an additional transit peptide in case in Table I, application no. 15, in column 6 in the same line as SEQ ID NO. 70583 is depicted, non-targeted is mentioned.

[75372] In an embodiment the present invention relates to an expresssion cassette comprising a) a promoter, preferably a promoter selected from the group consisting of Big35S, PCUbi, Super and USP, in particular p-PcUBI; and b) the nucleic acid SEQ ID NO. 70715, or a homolog or fragment thereof, or a homolog thereof being depicted in Table I, application no. 15, column 8, in the same line as SEQ ID NO. 70715, preferably the coding region thereof, a homolog or a fragment thereof; which are operable linked.

[75373] In an embodiment thereof the expression cassette comprises in addition c) a nucleic acid molecule encoding a transit peptide, especially a plastidal transit petide in case in Table I, application no. 15, in column 6 in the same line as SEQ ID NO. 70715 is depicted, plastidic is mentioned, or a mitochondrial transit peptide in case in Table I, application no. 15, in column 6 in the same line as SEQ ID NO. 70715 is depicted, mitochondric is mentioned; which is operable linked, too.

[75374] In another embodiment thereof the expression cassette does not comprise an additional transit peptide in case in Table I, application no. 15, in column 6 in the same line as SEQ ID NO. 70715 is depicted, non-targeted is mentioned.

[75375] In an embodiment the present invention relates to an expresssion cassette comprising a) a promoter, preferably a promoter selected from the group consisting of Big35S, PCUbi, Super and USP, in particular p-PcUBI; and b) the nucleic acid SEQ ID NO. 25676, or a homolog or fragment thereof, or a homolog thereof being depicted in Table I, application no. 15, column 8, in the same line as SEQ ID NO. 25676, preferably the coding region thereof, a homolog or a fragment thereof; which are operable linked.

[75376] In an embodiment thereof the expression cassette comprises in addition c) a nucleic acid molecule encoding a transit peptide, especially a plastidal transit petide in case in Table I, application no. 15, in column 6 in the same line as SEQ ID NO. 25676 is depicted, plastidic is mentioned, or a mitochondrial transit peptide in case in Table I, application no. 15, in column 6 in the same line as SEQ ID NO. 25676 is depicted, mitochondric is mentioned; which is operable linked, too.

[75377] In another embodiment thereof the expression cassette does not comprise an additional transit peptide in case in Table I, application no. 15, in column 6 in the same line as SEQ ID NO. 25676 is depicted, non-targeted is mentioned.

[75378] In an embodiment the present invention relates to an expresssion cassette comprising a) a promoter, preferably a promoter selected from the group consisting of Big35S, PCUbi, Super and USP, in particular p-PcUBI; and b) the nucleic acid SEQ ID NO. 25780, or a homolog or fragment thereof, or a homolog thereof being depicted in Table I, application no. 15, column 8, in the same line as SEQ ID NO. 25780, preferably the coding region thereof, a homolog or a fragment thereof; which are operable linked.

[75379] In an embodiment thereof the expression cassette comprises in addition c) a nucleic acid molecule encoding a transit peptide, especially a plastidal transit petide in case in Table I, application no. 15, in column 6 in the same line as SEQ ID NO. 25780 is depicted, plastidic is mentioned, or a mitochondrial transit peptide in case in Table I, application no. 15, in column 6 in the same line as SEQ ID NO. 25780 is depicted, mitochondric is mentioned; which is operable linked, too.

[75380] In another embodiment thereof the expression cassette does not comprise an additional transit peptide in case in Table I, application no. 15, in column 6 in the same line as SEQ ID NO. 25780 is depicted, non-targeted is mentioned.

[75381] In an embodiment the present invention relates to an expresssion cassette comprising a) a promoter, preferably a promoter selected from the group consisting of Big35S, PCUbi, Super and USP, in particular p-PcUBI; and b) the nucleic acid SEQ ID NO. 26196, or a homolog or fragment thereof, or a homolog thereof being depicted in Table I, application no. 15, column 8, in the same line as SEQ ID NO. 26196, preferably the coding region thereof, a homolog or a fragment thereof; which are operable linked.

[75382] In an embodiment thereof the expression cassette comprises in addition c) a nucleic acid molecule encoding a transit peptide, especially a plastidal transit petide in case in Table I, application no. 15, in column 6 in the same line as SEQ ID NO. 26196 is depicted, plastidic is mentioned, or a mitochondrial transit peptide in case in Table I, application no. 15, in column 6 in the same line as SEQ ID NO. 26196 is depicted, mitochondric is mentioned; which is operable linked, too.

[75383] In another embodiment thereof the expression cassette does not comprise an additional transit peptide in case in Table I, application no. 15, in column 6 in the same line as SEQ ID NO. 26196 is depicted, non-targeted is mentioned.

[75384] In an embodiment the present invention relates to an expresssion cassette comprising a) a promoter, preferably a promoter selected from the group consisting of Big35S, PCUbi, Super and USP, in particular p-PcUBI; and b) the nucleic acid SEQ ID NO. 133719, or a homolog or fragment thereof, or a homolog thereof being depicted in Table I, application no. 15, column 8, in the same line as SEQ ID NO. 133719, preferably the coding region thereof, a homolog or a fragment thereof; which are operable linked.

[75385] In an embodiment thereof the expression cassette comprises in addition c) a nucleic acid molecule encoding a transit peptide, especially a plastidal transit petide in case in Table I, application no. 15, in column 6 in the same line as SEQ ID NO. 133719 is depicted, plastidic is mentioned, or a mitochondrial transit peptide in case in Table I, application no. 15, in column 6 in the same line as SEQ ID NO. 133719 is depicted, mitochondric is mentioned; which is operable linked, too.

[75386] In another embodiment thereof the expression cassette does not comprise an additional transit peptide in case in Table I, application no. 15, in column 6 in the same line as SEQ ID NO. 133719 is depicted, non-targeted is mentioned.

[75387] In an embodiment the present invention relates to an expresssion cassette comprising a) a promoter, preferably a promoter selected from the group consisting of Big35S, PCUbi, Super and USP, in particular p-PcUBI; and b) the nucleic acid SEQ ID NO. 26434, or a homolog or fragment thereof, or a homolog thereof being depicted in Table I, application no. 15, column 8, in the same line as SEQ ID NO. 26434, preferably the coding region thereof, a homolog or a fragment thereof; which are operable linked.

[75388] In an embodiment thereof the expression cassette comprises in addition c) a nucleic acid molecule encoding a transit peptide, especially a plastidal transit petide in case in Table I, application no. 15, in column 6 in the same line as SEQ ID NO. 26434 is depicted, plastidic is mentioned, or a mitochondrial transit peptide in case in Table I, application no. 15, in column 6 in the same line as SEQ ID NO. 26434 is depicted, mitochondric is mentioned; which is operable linked, too.

[75389] In another embodiment thereof the expression cassette does not comprise an additional transit peptide in case in Table I, application no. 15, in column 6 in the same line as SEQ ID NO. 26434 is depicted, non-targeted is mentioned.

[75390] In an embodiment the present invention relates to an expresssion cassette comprising a) a promoter, preferably a promoter selected from the group consisting of Big35S, PCUbi, Super and USP, in particular p-PcUBI; and b) the nucleic acid SEQ ID NO. 114198, or a homolog or fragment thereof, or a homolog thereof being depicted in Table I, application no. 15, column 8, in the same line as SEQ ID NO. 114198, preferably the coding region thereof, a homolog or a fragment thereof; which are operable linked.

[75391] In an embodiment thereof the expression cassette comprises in addition c) a nucleic acid molecule encoding a transit peptide, especially a plastidal transit petide in case in Table I, application no. 15, in column 6 in the same line as SEQ ID NO. 114198 is depicted, plastidic is mentioned, or a mitochondrial transit peptide in case in Table I, application no. 15, in column 6 in the same line as SEQ ID NO. 114198 is depicted, mitochondric is mentioned; which is operable linked, too.

[75392] In another embodiment thereof the expression cassette does not comprise an additional transit peptide in case in Table I, application no. 15, in column 6 in the same line as SEQ ID NO. 114198 is depicted, non-targeted is mentioned.

[75393] In an embodiment the present invention relates to an expresssion cassette comprising a) a promoter, preferably a promoter selected from the group consisting of Big35S, PCUbi, Super and USP, in particular p-PcUBI; and b) the nucleic acid SEQ ID NO. 6040, or a homolog or fragment thereof, or a homolog thereof being depicted in Table I, application no. 15, column 8, in the same line as SEQ ID NO. 6040, preferably the coding region thereof, a homolog or a fragment thereof; which are operable linked.

[75394] In an embodiment thereof the expression cassette comprises in addition c) a nucleic acid molecule encoding a transit peptide, especially a plastidal transit petide in case in Table I, application no. 15, in column 6 in the same line as SEQ ID NO. 6040 is depicted, plastidic is mentioned, or a mitochondrial transit peptide in case in Table I, application no. 15, in column 6 in the same line as SEQ ID NO. 6040 is depicted, mitochondric is mentioned; which is operable linked, too.

[75395] In another embodiment thereof the expression cassette does not comprise an additional transit peptide in case in Table I, application no. 15, in column 6 in the same line as SEQ ID NO. 6040 is depicted, non-targeted is mentioned.

[75396] In an embodiment the present invention relates to an expresssion cassette comprising a) a promoter, preferably a promoter selected from the group consisting of Big35S, PCUbi, Super and USP, in particular p-PcUBI; and b) the nucleic acid SEQ ID NO. 71325, or a homolog or fragment thereof, or a homolog thereof being depicted in Table I, application no. 15, column 8, in the same line as SEQ ID NO. 71325, preferably the coding region thereof, a homolog or a fragment thereof; which are operable linked.

[75397] In an embodiment thereof the expression cassette comprises in addition c) a nucleic acid molecule encoding a transit peptide, especially a plastidal transit petide in case in Table I, application no. 15, in column 6 in the same line as SEQ ID NO. 71325 is depicted, plastidic is mentioned, or a mitochondrial transit peptide in case in Table I, application no. 15, in column 6 in the same line as SEQ ID NO. 71325 is depicted, mitochondric is mentioned; which is operable linked, too.

[75398] In another embodiment thereof the expression cassette does not comprise an additional transit peptide in case in Table I, application no. 15, in column 6 in the same line as SEQ ID NO. 71325 is depicted, non-targeted is mentioned.

[75399] In an embodiment the present invention relates to an expresssion cassette comprising a) a promoter, preferably a promoter selected from the group consisting of Big35S, PCUbi, Super and USP, in particular p-PcUBI; and b) the nucleic acid SEQ ID NO. 71763, or a homolog or fragment thereof, or a homolog thereof being depicted in Table I, application no. 15, column 8, in the same line as SEQ ID NO. 71763, preferably the coding region thereof, a homolog or a fragment thereof; which are operable linked.

[75400] In an embodiment thereof the expression cassette comprises in addition c) a nucleic acid molecule encoding a transit peptide, especially a plastidal transit petide in case in Table I, application no. 15, in column 6 in the same line as SEQ ID NO. 71763 is depicted, plastidic is mentioned, or a mitochondrial transit peptide in case in Table I, application no. 15, in column 6 in the same line as SEQ ID NO. 71763 is depicted, mitochondric is mentioned; which is operable linked, too.

[75401] In another embodiment thereof the expression cassette does not comprise an additional transit peptide in case in Table I, application no. 15, in column 6 in the same line as SEQ ID NO. 71763 is depicted, non-targeted is mentioned.

[75402] In an embodiment the present invention relates to an expresssion cassette comprising a) a promoter, preferably a promoter selected from the group consisting of Big35S, PCUbi, Super and USP, in particular p-PcUBI; and b) the nucleic acid SEQ ID NO. 28040, or a homolog or fragment thereof, or a homolog thereof being depicted in Table I, application no. 15, column 8, in the same line as SEQ ID NO. 28040, preferably the coding region thereof, a homolog or a fragment thereof; which are operable linked.

[75403] In an embodiment thereof the expression cassette comprises in addition c) a nucleic acid molecule encoding a transit peptide, especially a plastidal transit petide in case in Table I, application no. 15, in column 6 in the same line as SEQ ID NO. 28040 is depicted, plastidic is mentioned, or a mitochondrial transit peptide in case in Table I, application no. 15, in column 6 in the same line as SEQ ID NO. 28040 is depicted, mitochondric is mentioned; which is operable linked, too.

[75404] In another embodiment thereof the expression cassette does not comprise an additional transit peptide in case in Table I, application no. 15, in column 6 in the same line as SEQ ID NO. 28040 is depicted, non-targeted is mentioned.

[75405] In an embodiment the present invention relates to an expresssion cassette comprising a) a promoter, preferably a promoter selected from the group consisting of Big35S, PCUbi, Super and USP, in particular p-PcUBI; and b) the nucleic acid SEQ ID NO. 6075, or a homolog or fragment thereof, or a homolog thereof being depicted in Table I, application no. 15, column 8, in the same line as SEQ ID NO. 6075, preferably the coding region thereof, a homolog or a fragment thereof; which are operable linked.

[75406] In an embodiment thereof the expression cassette comprises in addition c) a nucleic acid molecule encoding a transit peptide, especially a plastidal transit petide in case in Table I, application no. 15, in column 6 in the same line as SEQ ID NO. 6075 is depicted, plastidic is mentioned, or a mitochondrial transit peptide in case in Table I, application no. 15, in column 6 in the same line as SEQ ID NO. 6075 is depicted, mitochondric is mentioned; which is operable linked, too.

[75407] In another embodiment thereof the expression cassette does not comprise an additional transit peptide in case in Table I, application no. 15, in column 6 in the same line as SEQ ID NO. 6075 is depicted, non-targeted is mentioned.

[75408] In an embodiment the present invention relates to an expresssion cassette comprising a) a promoter, preferably a promoter selected from the group consisting of Big35S, PCUbi, Super and USP, in particular p-PcUBI; and b) the nucleic acid SEQ ID NO. 29246, or a homolog or fragment thereof, or a homolog thereof being depicted in Table I, application no. 15, column 8, in the same line as SEQ ID NO. 29246, preferably the coding region thereof, a homolog or a fragment thereof; which are operable linked.

[75409] In an embodiment thereof the expression cassette comprises in addition c) a nucleic acid molecule encoding a transit peptide, especially a plastidal transit petide in case in Table I, application no. 15, in column 6 in the same line as SEQ ID NO. 29246 is depicted, plastidic is mentioned, or a mitochondrial transit peptide in case in Table I, application no. 15, in column 6 in the same line as SEQ ID NO. 29246 is depicted, mitochondric is mentioned; which is operable linked, too.

[75410] In another embodiment thereof the expression cassette does not comprise an additional transit peptide in case in Table I, application no. 15, in column 6 in the same line as SEQ ID NO. 29246 is depicted, non-targeted is mentioned.

[75411] In an embodiment the present invention relates to an expresssion cassette comprising a) a promoter, preferably a promoter selected from the group consisting of Big35S, PCUbi, Super and USP, in particular p-PcUBI; and b) the nucleic acid SEQ ID NO. 29500, or a homolog or fragment thereof, or a homolog thereof being depicted in Table I, application no. 15, column 8, in the same line as SEQ ID NO. 29500, preferably the coding region thereof, a homolog or a fragment thereof; which are operable linked.

[75412] In an embodiment thereof the expression cassette comprises in addition c) a nucleic acid molecule encoding a transit peptide, especially a plastidal transit petide in case in Table I, application no. 15, in column 6 in the same line as SEQ ID NO. 29500 is depicted, plastidic is mentioned, or a mitochondrial transit peptide in case in Table I, application no. 15, in column 6 in the same line as SEQ ID NO. 29500 is depicted, mitochondric is mentioned; which is operable linked, too.

[75413] In another embodiment thereof the expression cassette does not comprise an additional transit peptide in case in Table I, application no. 15, in column 6 in the same line as SEQ ID NO. 29500 is depicted, non-targeted is mentioned.

[75414] In an embodiment the present invention relates to an expresssion cassette comprising a) a promoter, preferably a promoter selected from the group consisting of Big35S, PCUbi, Super and USP, in particular p-PcUBI; and b) the nucleic acid SEQ ID NO. 31026, or a homolog or fragment thereof, or a homolog thereof being depicted in Table I, application no. 15, column 8, in the same line as SEQ ID NO. 31026, preferably the coding region thereof, a homolog or a fragment thereof; which are operable linked.

[75415] In an embodiment thereof the expression cassette comprises in addition c) a nucleic acid molecule encoding a transit peptide, especially a plastidal transit petide in case in Table I, application no. 15, in column 6 in the same line as SEQ ID NO. 31026 is depicted, plastidic is mentioned, or a mitochondrial transit peptide in case in Table I, application no. 15, in column 6 in the same line as SEQ ID NO. 31026 is depicted, mitochondric is mentioned; which is operable linked, too.

[75416] In another embodiment thereof the expression cassette does not comprise an additional transit peptide in case in Table I, application no. 15, in column 6 in the same line as SEQ ID NO. 31026 is depicted, non-targeted is mentioned.

[75417] In an embodiment the present invention relates to an expresssion cassette comprising a) a promoter, preferably a promoter selected from the group consisting of Big35S, PCUbi, Super and USP, in particular p-PcUBI; and b) the nucleic acid SEQ ID NO. 114231, or a homolog or fragment thereof, or a homolog thereof being depicted in Table I, application no. 15, column 8, in the same line as SEQ ID NO. 114231, preferably the coding region thereof, a homolog or a fragment thereof; which are operable linked.

[75418] In an embodiment thereof the expression cassette comprises in addition c) a nucleic acid molecule encoding a transit peptide, especially a plastidal transit petide in case in Table I, application no. 15, in column 6 in the same line as SEQ ID NO. 114231 is depicted, plastidic is mentioned, or a mitochondrial transit peptide in case in Table I, application no. 15, in column 6 in the same line as SEQ ID NO. 114231 is depicted, mitochondric is mentioned; which is operable linked, too.

[75419] In another embodiment thereof the expression cassette does not comprise an additional transit peptide in case in Table I, application no. 15, in column 6 in the same line as SEQ ID NO. 114231 is depicted, non-targeted is mentioned.

[75420] In an embodiment the present invention relates to an expresssion cassette comprising a) a promoter, preferably a promoter selected from the group consisting of Big35S, PCUbi, Super and USP, in particular p-PcUBI; and b) the nucleic acid SEQ ID NO. 31717, or a homolog or fragment thereof, or a homolog thereof being depicted in Table I, application no. 15, column 8, in the same line as SEQ ID NO. 31717, preferably the coding region thereof, a homolog or a fragment thereof; which are operable linked.

[75421] In an embodiment thereof the expression cassette comprises in addition c) a nucleic acid molecule encoding a transit peptide, especially a plastidal transit petide in case in Table I, application no. 15, in column 6 in the same line as SEQ ID NO. 31717 is depicted, plastidic is mentioned, or a mitochondrial transit peptide in case in Table I, application no. 15, in column 6 in the same line as SEQ ID NO. 31717 is depicted, mitochondric is mentioned; which is operable linked, too.

[75422] In another embodiment thereof the expression cassette does not comprise an additional transit peptide in case in Table I, application no. 15, in column 6 in the same line as SEQ ID NO. 31717 is depicted, non-targeted is mentioned.

[75423] In an embodiment the present invention relates to an expresssion cassette comprising a) a promoter, preferably a promoter selected from the group consisting of Big35S, PCUbi, Super and USP, in particular p-PcUBI; and b) the nucleic acid SEQ ID NO. 72935, or a homolog or fragment thereof, or a homolog thereof being depicted in Table I, application no. 15, column 8, in the same line as SEQ ID NO. 72935, preferably the coding region thereof, a homolog or a fragment thereof; which are operable linked.

[75424] In an embodiment thereof the expression cassette comprises in addition c) a nucleic acid molecule encoding a transit peptide, especially a plastidal transit petide in case in Table I, application no. 15, in column 6 in the same line as SEQ ID NO. 72935 is depicted, plastidic is mentioned, or a mitochondrial transit peptide in case in Table I, application no. 15, in column 6 in the same line as SEQ ID NO. 72935 is depicted, mitochondric is mentioned; which is operable linked, too.

[75425] In another embodiment thereof the expression cassette does not comprise an additional transit peptide in case in Table I, application no. 15, in column 6 in the same line as SEQ ID NO. 72935 is depicted, non-targeted is mentioned.

[75426] In an embodiment the present invention relates to an expresssion cassette comprising a) a promoter, preferably a promoter selected from the group consisting of Big35S, PCUbi, Super and USP, in particular p-PcUBI; and b) the nucleic acid SEQ ID NO. 31926, or a homolog or fragment thereof, or a homolog thereof being depicted in Table I, application no. 15, column 8, in the same line as SEQ ID NO. 31926, preferably the coding region thereof, a homolog or a fragment thereof; which are operable linked.

[75427] In an embodiment thereof the expression cassette comprises in addition c) a nucleic acid molecule encoding a transit peptide, especially a plastidal transit petide in case in Table I, application no. 15, in column 6 in the same line as SEQ ID NO. 31926 is depicted, plastidic is mentioned, or a mitochondrial transit peptide in case in Table I, application no. 15, in column 6 in the same line as SEQ ID NO. 31926 is depicted, mitochondric is mentioned; which is operable linked, too.

[75428] In another embodiment thereof the expression cassette does not comprise an additional transit peptide in case in Table I, application no. 15, in column 6 in the same line as SEQ ID NO. 31926 is depicted, non-targeted is mentioned.

[75429] In an embodiment the present invention relates to an expresssion cassette comprising a) a promoter, preferably a promoter selected from the group consisting of Big35S, PCUbi, Super and USP, in particular p-PcUBI; and b) the nucleic acid SEQ ID NO. 134171, or a homolog or fragment thereof, or a homolog thereof being depicted in Table I, application no. 15, column 8, in the same line as SEQ ID NO. 134171, preferably the coding region thereof, a homolog or a fragment thereof; which are operable linked.

[75430] In an embodiment thereof the expression cassette comprises in addition c) a nucleic acid molecule encoding a transit peptide, especially a plastidal transit petide in case in Table I, application no. 15, in column 6 in the same line as SEQ ID NO. 134171 is depicted, plastidic is mentioned, or a mitochondrial transit peptide in case in Table I, application no. 15, in column 6 in the same line as SEQ ID NO. 134171 is depicted, mitochondric is mentioned; which is operable linked, too.

[75431] In another embodiment thereof the expression cassette does not comprise an additional transit peptide in case in Table I, application no. 15, in column 6 in the same line as SEQ ID NO. 134171 is depicted, non-targeted is mentioned.

[75432] In an embodiment the present invention relates to an expresssion cassette comprising a) a promoter, preferably a promoter selected from the group consisting of Big35S, PCUbi, Super and USP, in particular p-PcUBI; and b) the nucleic acid SEQ ID NO. 73719, or a homolog or fragment thereof, or a homolog thereof being depicted in Table I, application no. 15, column 8, in the same line as SEQ ID NO. 73719, preferably the coding region thereof, a homolog or a fragment thereof; which are operable linked.

[75433] In an embodiment thereof the expression cassette comprises in addition c) a nucleic acid molecule encoding a transit peptide, especially a plastidal transit petide in case in Table I, application no. 15, in column 6 in the same line as SEQ ID NO. 73719 is depicted, plastidic is mentioned, or a mitochondrial transit peptide in case in Table I, application no. 15, in column 6 in the same line as SEQ ID NO. 73719 is depicted, mitochondric is mentioned; which is operable linked, too.

[75434] In another embodiment thereof the expression cassette does not comprise an additional transit peptide in case in Table I, application no. 15, in column 6 in the same line as SEQ ID NO. 73719 is depicted, non-targeted is mentioned.

[75435] In an embodiment the present invention relates to an expresssion cassette comprising a) a promoter, preferably a promoter selected from the group consisting of Big35S, PCUbi, Super and USP, in particular p-PcUBI; and b) the nucleic acid SEQ ID NO. 74452, or a homolog or fragment thereof, or a homolog thereof being depicted in Table I, application no. 15, column 8, in the same line as SEQ ID NO. 74452, preferably the coding region thereof, a homolog or a fragment thereof; which are operable linked.

[75436] In an embodiment thereof the expression cassette comprises in addition c) a nucleic acid molecule encoding a transit peptide, especially a plastidal transit petide in case in Table I, application no. 15, in column 6 in the same line as SEQ ID NO. 74452 is depicted, plastidic is mentioned, or a mitochondrial transit peptide in case in Table I, application no. 15, in column 6 in the same line as SEQ ID NO. 74452 is depicted, mitochondric is mentioned; which is operable linked, too.

[75437] In another embodiment thereof the expression cassette does not comprise an additional transit peptide in case in Table I, application no. 15, in column 6 in the same line as SEQ ID NO. 74452 is depicted, non-targeted is mentioned.

[75438] In an embodiment the present invention relates to an expresssion cassette comprising a) a promoter, preferably a promoter selected from the group consisting of Big35S, PCUbi, Super and USP, in particular p-PcUBI; and b) the nucleic acid SEQ ID NO. 6510, or a homolog or fragment thereof, or a homolog thereof being depicted in Table I, application no. 15, column 8, in the same line as SEQ ID NO. 6510, preferably the coding region thereof, a homolog or a fragment thereof; which are operable linked.

[75439] In an embodiment thereof the expression cassette comprises in addition c) a nucleic acid molecule encoding a transit peptide, especially a plastidal transit petide in case in Table I, application no. 15, in column 6 in the same line as SEQ ID NO. 6510 is depicted, plastidic is mentioned, or a mitochondrial transit peptide in case in Table I, application no. 15, in column 6 in the same line as SEQ ID NO. 6510 is depicted, mitochondric is mentioned; which is operable linked, too.

[75440] In another embodiment thereof the expression cassette does not comprise an additional transit peptide in case in Table I, application no. 15, in column 6 in the same line as SEQ ID NO. 6510 is depicted, non-targeted is mentioned.

[75441] In an embodiment the present invention relates to an expresssion cassette comprising a) a promoter, preferably a promoter selected from the group consisting of Big35S, PCUbi, Super and USP, in particular p-PcUBI; and b) the nucleic acid SEQ ID NO. 32037, or a homolog or fragment thereof, or a homolog thereof being depicted in Table I, application no. 15, column 8, in the same line as SEQ ID NO. 32037, preferably the coding region thereof, a homolog or a fragment thereof; which are operable linked.

[75442] In an embodiment thereof the expression cassette comprises in addition c) a nucleic acid molecule encoding a transit peptide, especially a plastidal transit petide in case in Table I, application no. 15, in column 6 in the same line as SEQ ID NO. 32037 is depicted, plastidic is mentioned, or a mitochondrial transit peptide in case in Table I, application no. 15, in column 6 in the same line as SEQ ID NO. 32037 is depicted, mitochondric is mentioned; which is operable linked, too.

[75443] In another embodiment thereof the expression cassette does not comprise an additional transit peptide in case in Table I, application no. 15, in column 6 in the same line as SEQ ID NO. 32037 is depicted, non-targeted is mentioned.

[75444] In an embodiment the present invention relates to an expresssion cassette comprising a) a promoter, preferably a promoter selected from the group consisting of Big35S, PCUbi, Super and USP, in particular p-PcUBI; and b) the nucleic acid SEQ ID NO. 74729, or a homolog or fragment thereof, or a homolog thereof being depicted in Table I, application no. 15, column 8, in the same line as SEQ ID NO. 74729, preferably the coding region thereof, a homolog or a fragment thereof; which are operable linked.

[75445] In an embodiment thereof the expression cassette comprises in addition c) a nucleic acid molecule encoding a transit peptide, especially a plastidal transit petide in case in Table I, application no. 15, in column 6 in the same line as SEQ ID NO. 74729 is depicted, plastidic is mentioned, or a mitochondrial transit peptide in case in Table I, application no. 15, in column 6 in the same line as SEQ ID NO. 74729 is depicted, mitochondric is mentioned; which is operable linked, too.

[75446] In another embodiment thereof the expression cassette does not comprise an additional transit peptide in case in Table I, application no. 15, in column 6 in the same line as SEQ ID NO. 74729 is depicted, non-targeted is mentioned.

[75447] In an embodiment the present invention relates to an expresssion cassette comprising a) a promoter, preferably a promoter selected from the group consisting of Big35S, PCUbi, Super and USP, in particular p-PcUBI; and b) the nucleic acid SEQ ID NO. 34301, or a homolog or fragment thereof, or a homolog thereof being depicted in Table I, application no. 15, column 8, in the same line as SEQ ID NO. 34301, preferably the coding region thereof, a homolog or a fragment thereof; which are operable linked.

[75448] In an embodiment thereof the expression cassette comprises in addition c) a nucleic acid molecule encoding a transit peptide, especially a plastidal transit petide in case in Table I, application no. 15, in column 6 in the same line as SEQ ID NO. 34301 is depicted, plastidic is mentioned, or a mitochondrial transit peptide in case in Table I, application no. 15, in column 6 in the same line as SEQ ID NO. 34301 is depicted, mitochondric is mentioned; which is operable linked, too.

[75449] In another embodiment thereof the expression cassette does not comprise an additional transit peptide in case in Table I, application no. 15, in column 6 in the same line as SEQ ID NO. 34301 is depicted, non-targeted is mentioned.

[75450] In an embodiment the present invention relates to an expresssion cassette comprising a) a promoter, preferably a promoter selected from the group consisting of Big35S, PCUbi, Super and USP, in particular p-PcUBI; and b) the nucleic acid SEQ ID NO. 34602, or a homolog or fragment thereof, or a homolog thereof being depicted in Table I, application no. 15, column 8, in the same line as SEQ ID NO. 34602, preferably the coding region thereof, a homolog or a fragment thereof; which are operable linked.

[75451] In an embodiment thereof the expression cassette comprises in addition c) a nucleic acid molecule encoding a transit peptide, especially a plastidal transit petide in case in Table I, application no. 15, in column 6 in the same line as SEQ ID NO. 34602 is depicted, plastidic is mentioned, or a mitochondrial transit peptide in case in Table I, application no. 15, in column 6 in the same line as SEQ ID NO. 34602 is depicted, mitochondric is mentioned; which is operable linked, too.

[75452] In another embodiment thereof the expression cassette does not comprise an additional transit peptide in case in Table I, application no. 15, in column 6 in the same line as SEQ ID NO. 34602 is depicted, non-targeted is mentioned.

[75453] In an embodiment the present invention relates to an expresssion cassette comprising a) a promoter, preferably a promoter selected from the group consisting of Big35S, PCUbi, Super and USP, in particular p-PcUBI; and b) the nucleic acid SEQ ID NO. 136120, or a homolog or fragment thereof, or a homolog thereof being depicted in Table I, application no. 15, column 8, in the same line as SEQ ID NO. 136120, preferably the coding region thereof, a homolog or a fragment thereof; which are operable linked.

[75454] In an embodiment thereof the expression cassette comprises in addition c) a nucleic acid molecule encoding a transit peptide, especially a plastidal transit petide in case in Table I, application no. 15, in column 6 in the same line as SEQ ID NO. 136120 is depicted, plastidic is mentioned, or a mitochondrial transit peptide in case in Table I, application no. 15, in column 6 in the same line as SEQ ID NO. 136120 is depicted, mitochondric is mentioned; which is operable linked, too.

[75455] In another embodiment thereof the expression cassette does not comprise an additional transit peptide in case in Table I, application no. 15, in column 6 in the same line as SEQ ID NO. 136120 is depicted, non-targeted is mentioned.

[75456] In an embodiment the present invention relates to an expresssion cassette comprising a) a promoter, preferably a promoter selected from the group consisting of Big35S, PCUbi, Super and USP, in particular p-Super; and b) the nucleic acid SEQ ID NO. 34889, or a homolog or fragment thereof, or a homolog thereof being depicted in Table I, application no. 15, column 8, in the same line as SEQ ID NO. 34889, preferably the coding region thereof, a homolog or a fragment thereof; which are operable linked.

[75457] In an embodiment thereof the expression cassette comprises in addition c) a nucleic acid molecule encoding a transit peptide, especially a plastidal transit petide in case in Table I, application no. 15, in column 6 in the same line as SEQ ID NO. 34889 is depicted, plastidic is mentioned, or a mitochondrial transit peptide in case in Table I, application no. 15, in column 6 in the same line as SEQ ID NO. 34889 is depicted, mitochondric is mentioned; which is operable linked, too.

[75458] In another embodiment thereof the expression cassette does not comprise an additional transit peptide in case in Table I, application no. 15, in column 6 in the same line as SEQ ID NO. 34889 is depicted, non-targeted is mentioned.

[75459] In an embodiment the present invention relates to an expresssion cassette comprising a) a promoter, preferably a promoter selected from the group consisting of Big35S, PCUbi, Super and USP, in particular p-Super; and b) the nucleic acid SEQ ID NO. 134299, or a homolog or fragment thereof, or a homolog thereof being depicted in Table I, application no. 15, column 8, in the same line as SEQ ID NO. 134299, preferably the coding region thereof, a homolog or a fragment thereof; which are operable linked.

[75460] In an embodiment thereof the expression cassette comprises in addition c) a nucleic acid molecule encoding a transit peptide, especially a plastidal transit petide in case in Table I, application no. 15, in column 6 in the same line as SEQ ID NO. 134299 is depicted, plastidic is mentioned, or a mitochondrial transit peptide in case in Table I, application no. 15, in column 6 in the same line as SEQ ID NO. 134299 is depicted, mitochondric is mentioned; which is operable linked, too.

[75461] In another embodiment thereof the expression cassette does not comprise an additional transit peptide in case in Table I, application no. 15, in column 6 in the same line as SEQ ID NO. 134299 is depicted, non-targeted is mentioned.

[75462] In an embodiment the present invention relates to an expresssion cassette comprising a) a promoter, preferably a promoter selected from the group consisting of Big35S, PCUbi, Super and USP, in particular p-USP; and b) the nucleic acid SEQ ID NO. 35482, or a homolog or fragment thereof, or a homolog thereof being depicted in Table I, application no. 15, column 8, in the same line as SEQ ID NO. 35482, preferably the coding region thereof, a homolog or a fragment thereof; which are operable linked.

[75463] In an embodiment thereof the expression cassette comprises in addition c) a nucleic acid molecule encoding a transit peptide, especially a plastidal transit petide in case in Table I, application no. 15, in column 6 in the same line as SEQ ID NO. 35482 is depicted, plastidic is mentioned, or a mitochondrial transit peptide in case in Table I, application no. 15, in column 6 in the same line as SEQ ID NO. 35482 is depicted, mitochondric is mentioned; which is operable linked, too.

[75464] In another embodiment thereof the expression cassette does not comprise an additional transit peptide in case in Table I, application no. 15, in column 6 in the same line as SEQ ID NO. 35482 is depicted, non-targeted is mentioned.

[75465] In an embodiment the present invention relates to an expresssion cassette comprising a) a promoter, preferably a promoter selected from the group consisting of Big35S, PCUbi, Super and USP, in particular p-Super; and b) the nucleic acid SEQ ID NO. 35590, or a homolog or fragment thereof, or a homolog thereof being depicted in Table I, application no. 15, column 8, in the same line as SEQ ID NO. 35590, preferably the coding region thereof, a homolog or a fragment thereof; which are operable linked.

[75466] In an embodiment thereof the expression cassette comprises in addition c) a nucleic acid molecule encoding a transit peptide, especially a plastidal transit petide in case in Table I, application no. 15, in column 6 in the same line as SEQ ID NO. 35590 is depicted, plastidic is mentioned, or a mitochondrial transit peptide in case in Table I, application no. 15, in column 6 in the same line as SEQ ID NO. 35590 is depicted, mitochondric is mentioned; which is operable linked, too.

[75467] In another embodiment thereof the expression cassette does not comprise an additional transit peptide in case in Table I, application no. 15, in column 6 in the same line as SEQ ID NO. 35590 is depicted, non-targeted is mentioned.

[75468] In an embodiment the present invention relates to an expresssion cassette comprising a) a promoter, preferably a promoter selected from the group consisting of Big35S, PCUbi, Super and USP, in particular p-USP; and b) the nucleic acid SEQ ID NO. 121111, or a homolog or fragment thereof, or a homolog thereof being depicted in Table I, application no. 15, column 8, in the same line as SEQ ID NO. 121111, preferably the coding region thereof, a homolog or a fragment thereof; which are operable linked.

[75469] In an embodiment thereof the expression cassette comprises in addition c) a nucleic acid molecule encoding a transit peptide, especially a plastidal transit petide in case in Table I, application no. 15, in column 6 in the same line as SEQ ID NO. 121111 is depicted, plastidic is mentioned, or a mitochondrial transit peptide in case in Table I, application no. 15, in column 6 in the same line as SEQ ID NO. 121111 is depicted, mitochondric is mentioned; which is operable linked, too.

[75470] In another embodiment thereof the expression cassette does not comprise an additional transit peptide in case in Table I, application no. 15, in column 6 in the same line as SEQ ID NO. 121111 is depicted, non-targeted is mentioned.

[75471] In an embodiment the present invention relates to an expresssion cassette comprising a) a promoter, preferably a promoter selected from the group consisting of Big35S, PCUbi, Super and USP, in particular p-Super; and b) the nucleic acid SEQ ID NO. 7333, or a homolog or fragment thereof, or a homolog thereof being depicted in Table I, application no. 15, column 8, in the same line as SEQ ID NO. 7333, preferably the coding region thereof, a homolog or a fragment thereof; which are operable linked.

[75472] In an embodiment thereof the expression cassette comprises in addition c) a nucleic acid molecule encoding a transit peptide, especially a plastidal transit petide in case in Table I, application no. 15, in column 6 in the same line as SEQ ID NO. 7333 is depicted, plastidic is mentioned, or a mitochondrial transit peptide in case in Table I, application no. 15, in column 6 in the same line as SEQ ID NO. 7333 is depicted, mitochondric is mentioned; which is operable linked, too.

[75473] In another embodiment thereof the expression cassette does not comprise an additional transit peptide in case in Table I, application no. 15, in column 6 in the same line as SEQ ID NO. 7333 is depicted, non-targeted is mentioned.

[75474] In an embodiment the present invention relates to an expresssion cassette comprising a) a promoter, preferably a promoter selected from the group consisting of Big35S, PCUbi, Super and USP, in particular p-Super; and b) the nucleic acid SEQ ID NO. 7686, or a homolog or fragment thereof, or a homolog thereof being depicted in Table I, application no. 15, column 8, in the same line as SEQ ID NO. 7686, preferably the coding region thereof, a homolog or a fragment thereof; which are operable linked.

[75475] In an embodiment thereof the expression cassette comprises in addition c) a nucleic acid molecule encoding a transit peptide, especially a plastidal transit petide in case in Table I, application no. 15, in column 6 in the same line as SEQ ID NO. 7686 is depicted, plastidic is mentioned, or a mitochondrial transit peptide in case in Table I, application no. 15, in column 6 in the same line as SEQ ID NO. 7686 is depicted, mitochondric is mentioned; which is operable linked, too.

[75476] In another embodiment thereof the expression cassette does not comprise an additional transit peptide in case in Table I, application no. 15, in column 6 in the same line as SEQ ID NO. 7686 is depicted, non-targeted is mentioned.

[75477] In an embodiment the present invention relates to an expresssion cassette comprising a) a promoter, preferably a promoter selected from the group consisting of Big35S, PCUbi, Super and USP, in particular p-USP; and b) the nucleic acid SEQ ID NO. 134402, or a homolog or fragment thereof, or a homolog thereof being depicted in Table I, application no. 15, column 8, in the same line as SEQ ID NO. 134402, preferably the coding region thereof, a homolog or a fragment thereof; which are operable linked.

[75478] In an embodiment thereof the expression cassette comprises in addition c) a nucleic acid molecule encoding a transit peptide, especially a plastidal transit petide in case in Table I, application no. 15, in column 6 in the same line as SEQ ID NO. 134402 is depicted, plastidic is mentioned, or a mitochondrial transit peptide in case in Table I, application no. 15, in column 6 in the same line as SEQ ID NO. 134402 is depicted, mitochondric is mentioned; which is operable linked, too.

[75479] In another embodiment thereof the expression cassette does not comprise an additional transit peptide in case in Table I, application no. 15, in column 6 in the same line as SEQ ID NO. 134402 is depicted, non-targeted is mentioned.

[75480] In an embodiment the present invention relates to an expresssion cassette comprising a) a promoter, preferably a promoter selected from the group consisting of Big35S, PCUbi, Super and USP, in particular p-Super; and b) the nucleic acid SEQ ID NO. 35967, or a homolog or fragment thereof, or a homolog thereof being depicted in Table I, application no. 15, column 8, in the same line as SEQ ID NO. 35967, preferably the coding region thereof, a homolog or a fragment thereof; which are operable linked.

[75481] In an embodiment thereof the expression cassette comprises in addition c) a nucleic acid molecule encoding a transit peptide, especially a plastidal transit petide in case in Table I, application no. 15, in column 6 in the same line as SEQ ID NO. 35967 is depicted, plastidic is mentioned, or a mitochondrial transit peptide in case in Table I, application no. 15, in column 6 in the same line as SEQ ID NO. 35967 is depicted, mitochondric is mentioned; which is operable linked, too.

[75482] In another embodiment thereof the expression cassette does not comprise an additional transit peptide in case in Table I, application no. 15, in column 6 in the same line as SEQ ID NO. 35967 is depicted, non-targeted is mentioned.

[75483] In an embodiment the present invention relates to an expresssion cassette comprising a) a promoter, preferably a promoter selected from the group consisting of Big35S, PCUbi, Super and USP, in particular p-Super; and b) the nucleic acid SEQ ID NO. 36114, or a homolog or fragment thereof, or a homolog thereof being depicted in Table I, application no. 15, column 8, in the same line as SEQ ID NO. 36114, preferably the coding region thereof, a homolog or a fragment thereof; which are operable linked.

[75484] In an embodiment thereof the expression cassette comprises in addition c) a nucleic acid molecule encoding a transit peptide, especially a plastidal transit petide in case in Table I, application no. 15, in column 6 in the same line as SEQ ID NO. 36114 is depicted, plastidic is mentioned, or a mitochondrial transit peptide in case in Table I, application no. 15, in column 6 in the same line as SEQ ID NO. 36114 is depicted, mitochondric is mentioned; which is operable linked, too.

[75485] In another embodiment thereof the expression cassette does not comprise an additional transit peptide in case in Table I, application no. 15, in column 6 in the same line as SEQ ID NO. 36114 is depicted, non-targeted is mentioned.

[75486] In an embodiment the present invention relates to an expresssion cassette comprising a) a promoter, preferably a promoter selected from the group consisting of Big35S, PCUbi, Super and USP, in particular p-Super; and b) the nucleic acid SEQ ID NO. 75807, or a homolog or fragment thereof, or a homolog thereof being depicted in Table I, application no. 15, column 8, in the same line as SEQ ID NO. 75807, preferably the coding region thereof, a homolog or a fragment thereof; which are operable linked.

[75487] In an embodiment thereof the expression cassette comprises in addition c) a nucleic acid molecule encoding a transit peptide, especially a plastidal transit petide in case in Table I, application no. 15, in column 6 in the same line as SEQ ID NO. 75807 is depicted, plastidic is mentioned, or a mitochondrial transit peptide in case in Table I, application no. 15, in column 6 in the same line as SEQ ID NO. 75807 is depicted, mitochondric is mentioned; which is operable linked, too.

[75488] In another embodiment thereof the expression cassette does not comprise an additional transit peptide in case in Table I, application no. 15, in column 6 in the same line as SEQ ID NO. 75807 is depicted, non-targeted is mentioned.

[75489] In an embodiment the present invention relates to an expresssion cassette comprising a) a promoter, preferably a promoter selected from the group consisting of Big35S, PCUbi, Super and USP, in particular p-Super; and b) the nucleic acid SEQ ID NO. 36489, or a homolog or fragment thereof, or a homolog thereof being depicted in Table I, application no. 15, column 8, in the same line as SEQ ID NO. 36489, preferably the coding region thereof, a homolog or a fragment thereof; which are operable linked.

[75490] In an embodiment thereof the expression cassette comprises in addition c) a nucleic acid molecule encoding a transit peptide, especially a plastidal transit petide in case in Table I, application no. 15, in column 6 in the same line as SEQ ID NO. 36489 is depicted, plastidic is mentioned, or a mitochondrial transit peptide in case in Table I, application no. 15, in column 6 in the same line as SEQ ID NO. 36489 is depicted, mitochondric is mentioned; which is operable linked, too.

[75491] In another embodiment thereof the expression cassette does not comprise an additional transit peptide in case in Table I, application no. 15, in column 6 in the same line as SEQ ID NO. 36489 is depicted, non-targeted is mentioned.

[75492] In an embodiment the present invention relates to an expresssion cassette comprising a) a promoter, preferably a promoter selected from the group consisting of Big35S, PCUbi, Super and USP, in particular p-Super; and b) the nucleic acid SEQ ID NO. 36670, or a homolog or fragment thereof, or a homolog thereof being depicted in Table I, application no. 15, column 8, in the same line as SEQ ID NO. 36670, preferably the coding region thereof, a homolog or a fragment thereof; which are operable linked.

[75493] In an embodiment thereof the expression cassette comprises in addition c) a nucleic acid molecule encoding a transit peptide, especially a plastidal transit petide in case in Table I, application no. 15, in column 6 in the same line as SEQ ID NO. 36670 is depicted, plastidic is mentioned, or a mitochondrial transit peptide in case in Table I, application no. 15, in column 6 in the same line as SEQ ID NO. 36670 is depicted, mitochondric is mentioned; which is operable linked, too.

[75494] In another embodiment thereof the expression cassette does not comprise an additional transit peptide in case in Table I, application no. 15, in column 6 in the same line as SEQ ID NO. 36670 is depicted, non-targeted is mentioned.

[75495] In an embodiment the present invention relates to an expresssion cassette comprising a) a promoter, preferably a promoter selected from the group consisting of Big35S, PCUbi, Super and USP, in particular p-Super; and b) the nucleic acid SEQ ID NO. 7941, or a homolog or fragment thereof, or a homolog thereof being depicted in Table I, application no. 15, column 8, in the same line as SEQ ID NO. 7941, preferably the coding region thereof, a homolog or a fragment thereof; which are operable linked.

[75496] In an embodiment thereof the expression cassette comprises in addition c) a nucleic acid molecule encoding a transit peptide, especially a plastidal transit petide in case in Table I, application no. 15, in column 6 in the same line as SEQ ID NO. 7941 is depicted, plastidic is mentioned, or a mitochondrial transit peptide in case in Table I, application no. 15, in column 6 in the same line as SEQ ID NO. 7941 is depicted, mitochondric is mentioned; which is operable linked, too.

[75497] In another embodiment thereof the expression cassette does not comprise an additional transit peptide in case in Table I, application no. 15, in column 6 in the same line as SEQ ID NO. 7941 is depicted, non-targeted is mentioned.

[75498] In an embodiment the present invention relates to an expresssion cassette comprising a) a promoter, preferably a promoter selected from the group consisting of Big35S, PCUbi, Super and USP, in particular p-Super; and b) the nucleic acid SEQ ID NO. 37483, or a homolog or fragment thereof, or a homolog thereof being depicted in Table I, application no. 15, column 8, in the same line as SEQ ID NO. 37483, preferably the coding region thereof, a homolog or a fragment thereof; which are operable linked.

[75499] In an embodiment thereof the expression cassette comprises in addition c) a nucleic acid molecule encoding a transit peptide, especially a plastidal transit petide in case in Table I, application no. 15, in column 6 in the same line as SEQ ID NO. 37483 is depicted, plastidic is mentioned, or a mitochondrial transit peptide in case in Table I, application no. 15, in column 6 in the same line as SEQ ID NO. 37483 is depicted, mitochondric is mentioned; which is operable linked, too.

[75500] In another embodiment thereof the expression cassette does not comprise an additional transit peptide in case in Table I, application no. 15, in column 6 in the same line as SEQ ID NO. 37483 is depicted, non-targeted is mentioned.

[75501] In an embodiment the present invention relates to an expresssion cassette comprising a) a promoter, preferably a promoter selected from the group consisting of Big35S, PCUbi, Super and USP, in particular p-Super; and b) the nucleic acid SEQ ID NO. 134655, or a homolog or fragment thereof, or a homolog thereof being depicted in Table I, application no. 15, column 8, in the same line as SEQ ID NO. 134655, preferably the coding region thereof, a homolog or a fragment thereof; which are operable linked.

[75502] In an embodiment thereof the expression cassette comprises in addition c) a nucleic acid molecule encoding a transit peptide, especially a plastidal transit petide in case in Table I, application no. 15, in column 6 in the same line as SEQ ID NO. 134655 is depicted, plastidic is mentioned, or a mitochondrial transit peptide in case in Table I, application no. 15, in column 6 in the same line as SEQ ID NO. 134655 is depicted, mitochondric is mentioned; which is operable linked, too.

[75503] In another embodiment thereof the expression cassette does not comprise an additional transit peptide in case in Table I, application no. 15, in column 6 in the same line as SEQ ID NO. 134655 is depicted, non-targeted is mentioned.

[75504] In an embodiment the present invention relates to an expresssion cassette comprising a) a promoter, preferably a promoter selected from the group consisting of Big35S, PCUbi, Super and USP, in particular p-Super; and b) the nucleic acid SEQ ID NO. 134697, or a homolog or fragment thereof, or a homolog thereof being depicted in Table I, application no. 15, column 8, in the same line as SEQ ID NO. 134697, preferably the coding region thereof, a homolog or a fragment thereof; which are operable linked.

[75505] In an embodiment thereof the expression cassette comprises in addition c) a nucleic acid molecule encoding a transit peptide, especially a plastidal transit petide in case in Table I, application no. 15, in column 6 in the same line as SEQ ID NO. 134697 is depicted, plastidic is mentioned, or a mitochondrial transit peptide in case in Table I, application no. 15, in column 6 in the same line as SEQ ID NO. 134697 is depicted, mitochondric is mentioned; which is operable linked, too.

[75506] In another embodiment thereof the expression cassette does not comprise an additional transit peptide in case in Table I, application no. 15, in column 6 in the same line as SEQ ID NO. 134697 is depicted, non-targeted is mentioned.

[75507] In an embodiment the present invention relates to an expresssion cassette comprising a) a promoter, preferably a promoter selected from the group consisting of Big35S, PCUbi, Super and USP, in particular p-Super; and b) the nucleic acid SEQ ID NO. 134756, or a homolog or fragment thereof, or a homolog thereof being depicted in Table I, application no. 15, column 8, in the same line as SEQ ID NO. 134756, preferably the coding region thereof, a homolog or a fragment thereof; which are operable linked.

[75508] In an embodiment thereof the expression cassette comprises in addition c) a nucleic acid molecule encoding a transit peptide, especially a plastidal transit petide in case in Table I, application no. 15, in column 6 in the same line as SEQ ID NO. 134756 is depicted, plastidic is mentioned, or a mitochondrial transit peptide in case in Table I, application no. 15, in column 6 in the same line as SEQ ID NO. 134756 is depicted, mitochondric is mentioned; which is operable linked, too.

[75509] In another embodiment thereof the expression cassette does not comprise an additional transit peptide in case in Table I, application no. 15, in column 6 in the same line as SEQ ID NO. 134756 is depicted, non-targeted is mentioned.

[75510] In an embodiment the present invention relates to an expresssion cassette comprising a) a promoter, preferably a promoter selected from the group consisting of Big35S, PCUbi, Super and USP, in particular p-Super; and b) the nucleic acid SEQ ID NO. 38266, or a homolog or fragment thereof, or a homolog thereof being depicted in Table I, application no. 15, column 8, in the same line as SEQ ID NO. 38266, preferably the coding region thereof, a homolog or a fragment thereof; which are operable linked.

[75511] In an embodiment thereof the expression cassette comprises in addition c) a nucleic acid molecule encoding a transit peptide, especially a plastidal transit petide in case in Table I, application no. 15, in column 6 in the same line as SEQ ID NO. 38266 is depicted, plastidic is mentioned, or a mitochondrial transit peptide in case in Table I, application no. 15, in column 6 in the same line as SEQ ID NO. 38266 is depicted, mitochondric is mentioned; which is operable linked, too.

[75512] In another embodiment thereof the expression cassette does not comprise an additional transit peptide in case in Table I, application no. 15, in column 6 in the same line as SEQ ID NO. 38266 is depicted, non-targeted is mentioned.

[75513] In an embodiment the present invention relates to an expresssion cassette comprising a) a promoter, preferably a promoter selected from the group consisting of Big35S, PCUbi, Super and USP, in particular p-Super; and b) the nucleic acid SEQ ID NO. 38289, or a homolog or fragment thereof, or a homolog thereof being depicted in Table I, application no. 15, column 8, in the same line as SEQ ID NO. 38289, preferably the coding region thereof, a homolog or a fragment thereof; which are operable linked.

[75514] In an embodiment thereof the expression cassette comprises in addition c) a nucleic acid molecule encoding a transit peptide, especially a plastidal transit petide in case in Table I, application no. 15, in column 6 in the same line as SEQ ID NO. 38289 is depicted, plastidic is mentioned, or a mitochondrial transit peptide in case in Table I, application no. 15, in column 6 in the same line as SEQ ID NO. 38289 is depicted, mitochondric is mentioned; which is operable linked, too.

[75515] In another embodiment thereof the expression cassette does not comprise an additional transit peptide in case in Table I, application no. 15, in column 6 in the same line as SEQ ID NO. 38289 is depicted, non-targeted is mentioned.

[75516] In an embodiment the present invention relates to an expresssion cassette comprising a) a promoter, preferably a promoter selected from the group consisting of Big35S, PCUbi, Super and USP, in particular p-Super; and b) the nucleic acid SEQ ID NO. 7947, or a homolog or fragment thereof, or a homolog thereof being depicted in Table I, application no. 15, column 8, in the same line as SEQ ID NO. 7947, preferably the coding region thereof, a homolog or a fragment thereof; which are operable linked.

[75517] In an embodiment thereof the expression cassette comprises in addition c) a nucleic acid molecule encoding a transit peptide, especially a plastidal transit petide in case in Table I, application no. 15, in column 6 in the same line as SEQ ID NO. 7947 is depicted, plastidic is mentioned, or a mitochondrial transit peptide in case in Table I, application no. 15, in column 6 in the same line as SEQ ID NO. 7947 is depicted, mitochondric is mentioned; which is operable linked, too.

[75518] In another embodiment thereof the expression cassette does not comprise an additional transit peptide in case in Table I, application no. 15, in column 6 in the same line as SEQ ID NO. 7947 is depicted, non-targeted is mentioned.

[75519] In an embodiment the present invention relates to an expresssion cassette comprising a) a promoter, preferably a promoter selected from the group consisting of Big35S, PCUbi, Super and USP, in particular p-Super; and b) the nucleic acid SEQ ID NO. 78154, or a homolog or fragment thereof, or a homolog thereof being depicted in Table I, application no. 15, column 8, in the same line as SEQ ID NO. 78154, preferably the coding region thereof, a homolog or a fragment thereof; which are operable linked.

[75520] In an embodiment thereof the expression cassette comprises in addition c) a nucleic acid molecule encoding a transit peptide, especially a plastidal transit petide in case in Table I, application no. 15, in column 6 in the same line as SEQ ID NO. 78154 is depicted, plastidic is mentioned, or a mitochondrial transit peptide in case in Table I, application no. 15, in column 6 in the same line as SEQ ID NO. 78154 is depicted, mitochondric is mentioned; which is operable linked, too.

[75521] In another embodiment thereof the expression cassette does not comprise an additional transit peptide in case in Table I, application no. 15, in column 6 in the same line as SEQ ID NO. 78154 is depicted, non-targeted is mentioned.

[75522] In an embodiment the present invention relates to an expresssion cassette comprising a) a promoter, preferably a promoter selected from the group consisting of Big35S, PCUbi, Super and USP, in particular p-Super; and b) the nucleic acid SEQ ID NO. 115064, or a homolog or fragment thereof, or a homolog thereof being depicted in Table I, application no. 15, column 8, in the same line as SEQ ID NO. 115064, preferably the coding region thereof, a homolog or a fragment thereof; which are operable linked.

[75523] In an embodiment thereof the expression cassette comprises in addition c) a nucleic acid molecule encoding a transit peptide, especially a plastidal transit petide in case in Table I, application no. 15, in column 6 in the same line as SEQ ID NO. 115064 is depicted, plastidic is mentioned, or a mitochondrial transit peptide in case in Table I, application no. 15, in column 6 in the same line as SEQ ID NO. 115064 is depicted, mitochondric is mentioned; which is operable linked, too.

[75524] In another embodiment thereof the expression cassette does not comprise an additional transit peptide in case in Table I, application no. 15, in column 6 in the same line as SEQ ID NO. 115064 is depicted, non-targeted is mentioned.

[75525] In an embodiment the present invention relates to an expresssion cassette comprising a) a promoter, preferably a promoter selected from the group consisting of Big35S, PCUbi, Super and USP, in particular p-Super; and b) the nucleic acid SEQ ID NO. 38345, or a homolog or fragment thereof, or a homolog thereof being depicted in Table I, application no. 15, column 8, in the same line as SEQ ID NO. 38345, preferably the coding region thereof, a homolog or a fragment thereof; which are operable linked.

[75526] In an embodiment thereof the expression cassette comprises in addition c) a nucleic acid molecule encoding a transit peptide, especially a plastidal transit petide in case in Table I, application no. 15, in column 6 in the same line as SEQ ID NO. 38345 is depicted, plastidic is mentioned, or a mitochondrial transit peptide in case in Table I, application no. 15, in column 6 in the same line as SEQ ID NO. 38345 is depicted, mitochondric is mentioned; which is operable linked, too.

[75527] In another embodiment thereof the expression cassette does not comprise an additional transit peptide in case in Table I, application no. 15, in column 6 in the same line as SEQ ID NO. 38345 is depicted, non-targeted is mentioned.

[75528] In an embodiment the present invention relates to an expresssion cassette comprising a) a promoter, preferably a promoter selected from the group consisting of Big35S, PCUbi, Super and USP, in particular p-Super; and b) the nucleic acid SEQ ID NO. 78265, or a homolog or fragment thereof, or a homolog thereof being depicted in Table I, application no. 15, column 8, in the same line as SEQ ID NO. 78265, preferably the coding region thereof, a homolog or a fragment thereof; which are operable linked.

[75529] In an embodiment thereof the expression cassette comprises in addition c) a nucleic acid molecule encoding a transit peptide, especially a plastidal transit petide in case in Table I, application no. 15, in column 6 in the same line as SEQ ID NO. 78265 is depicted, plastidic is mentioned, or a mitochondrial transit peptide in case in Table I, application no. 15, in column 6 in the same line as SEQ ID NO. 78265 is depicted, mitochondric is mentioned; which is operable linked, too.

[75530] In another embodiment thereof the expression cassette does not comprise an additional transit peptide in case in Table I, application no. 15, in column 6 in the same line as SEQ ID NO. 78265 is depicted, non-targeted is mentioned.

[75531] In an embodiment the present invention relates to an expresssion cassette comprising a) a promoter, preferably a promoter selected from the group consisting of Big35S, PCUbi, Super and USP, in particular p-Super; and b) the nucleic acid SEQ ID NO. 78753, or a homolog or fragment thereof, or a homolog thereof being depicted in Table I, application no. 15, column 8, in the same line as SEQ ID NO. 78753, preferably the coding region thereof, a homolog or a fragment thereof; which are operable linked.

[75532] In an embodiment thereof the expression cassette comprises in addition c) a nucleic acid molecule encoding a transit peptide, especially a plastidal transit petide in case in Table I, application no. 15, in column 6 in the same line as SEQ ID NO. 78753 is depicted, plastidic is mentioned, or a mitochondrial transit peptide in case in Table I, application no. 15, in column 6 in the same line as SEQ ID NO. 78753 is depicted, mitochondric is mentioned; which is operable linked, too.

[75533] In another embodiment thereof the expression cassette does not comprise an additional transit peptide in case in Table I, application no. 15, in column 6 in the same line as SEQ ID NO. 78753 is depicted, non-targeted is mentioned.

[75534] In an embodiment the present invention relates to an expresssion cassette comprising a) a promoter, preferably a promoter selected from the group consisting of Big35S, PCUbi, Super and USP, in particular p-Super; and b) the nucleic acid SEQ ID NO. 78771, or a homolog or fragment thereof, or a homolog thereof being depicted in Table I, application no. 15, column 8, in the same line as SEQ ID NO. 78771, preferably the coding region thereof, a homolog or a fragment thereof; which are operable linked.

[75535] In an embodiment thereof the expression cassette comprises in addition c) a nucleic acid molecule encoding a transit peptide, especially a plastidal transit petide in case in Table I, application no. 15, in column 6 in the same line as SEQ ID NO. 78771 is depicted, plastidic is mentioned, or a mitochondrial transit peptide in case in Table I, application no. 15, in column 6 in the same line as SEQ ID NO. 78771 is depicted, mitochondric is mentioned; which is operable linked, too.

[75536] In another embodiment thereof the expression cassette does not comprise an additional transit peptide in case in Table I, application no. 15, in column 6 in the same line as SEQ ID NO. 78771 is depicted, non-targeted is mentioned.

[75537] In an embodiment the present invention relates to an expresssion cassette comprising a) a promoter, preferably a promoter selected from the group consisting of Big35S, PCUbi, Super and USP, in particular p-Super; and b) the nucleic acid SEQ ID NO. 134762, or a homolog or fragment thereof, or a homolog thereof being depicted in Table I, application no. 15, column 8, in the same line as SEQ ID NO. 134762, preferably the coding region thereof, a homolog or a fragment thereof; which are operable linked.

[75538] In an embodiment thereof the expression cassette comprises in addition c) a nucleic acid molecule encoding a transit peptide, especially a plastidal transit petide in case in Table I, application no. 15, in column 6 in the same line as SEQ ID NO. 134762 is depicted, plastidic is mentioned, or a mitochondrial transit peptide in case in Table I, application no. 15, in column 6 in the same line as SEQ ID NO. 134762 is depicted, mitochondric is mentioned; which is operable linked, too.

[75539] In another embodiment thereof the expression cassette does not comprise an additional transit peptide in case in Table I, application no. 15, in column 6 in the same line as SEQ ID NO. 134762 is depicted, non-targeted is mentioned.

[75540] In an embodiment the present invention relates to an expresssion cassette comprising a) a promoter, preferably a promoter selected from the group consisting of Big35S, PCUbi, Super and USP, in particular p-USP; and b) the nucleic acid SEQ ID NO. 78779, or a homolog or fragment thereof, or a homolog thereof being depicted in Table I, application no. 15, column 8, in the same line as SEQ ID NO. 78779, preferably the coding region thereof, a homolog or a fragment thereof; which are operable linked.

[75541] In an embodiment thereof the expression cassette comprises in addition c) a nucleic acid molecule encoding a transit peptide, especially a plastidal transit petide in case in Table I, application no. 15, in column 6 in the same line as SEQ ID NO. 78779 is depicted, plastidic is mentioned, or a mitochondrial transit peptide in case in Table I, application no. 15, in column 6 in the same line as SEQ ID NO. 78779 is depicted, mitochondric is mentioned; which is operable linked, too.

[75542] In another embodiment thereof the expression cassette does not comprise an additional transit peptide in case in Table I, application no. 15, in column 6 in the same line as SEQ ID NO. 78779 is depicted, non-targeted is mentioned.

[75543] In an embodiment the present invention relates to an expresssion cassette comprising a) a promoter, preferably a promoter selected from the group consisting of Big35S, PCUbi, Super and USP, in particular p-Super; and b) the nucleic acid SEQ ID NO. 78852, or a homolog or fragment thereof, or a homolog thereof being depicted in Table I, application no. 15, column 8, in the same line as SEQ ID NO. 78852, preferably the coding region thereof, a homolog or a fragment thereof; which are operable linked.

[75544] In an embodiment thereof the expression cassette comprises in addition c) a nucleic acid molecule encoding a transit peptide, especially a plastidal transit petide in case in Table I, application no. 15, in column 6 in the same line as SEQ ID NO. 78852 is depicted, plastidic is mentioned, or a mitochondrial transit peptide in case in Table I, application no. 15, in column 6 in the same line as SEQ ID NO. 78852 is depicted, mitochondric is mentioned; which is operable linked, too.

[75545] In another embodiment thereof the expression cassette does not comprise an additional transit peptide in case in Table I, application no. 15, in column 6 in the same line as SEQ ID NO. 78852 is depicted, non-targeted is mentioned.

[75546] In an embodiment the present invention relates to an expresssion cassette comprising a) a promoter, preferably a promoter selected from the group consisting of Big35S, PCUbi, Super and USP, in particular p-Super; and b) the nucleic acid SEQ ID NO. 38573, or a homolog or fragment thereof, or a homolog thereof being depicted in Table I, application no. 15, column 8, in the same line as SEQ ID NO. 38573, preferably the coding region thereof, a homolog or a fragment thereof; which are operable linked.

[75547] In an embodiment thereof the expression cassette comprises in addition c) a nucleic acid molecule encoding a transit peptide, especially a plastidal transit petide in case in Table I, application no. 15, in column 6 in the same line as SEQ ID NO. 38573 is depicted, plastidic is mentioned, or a mitochondrial transit peptide in case in Table I, application no. 15, in column 6 in the same line as SEQ ID NO. 38573 is depicted, mitochondric is mentioned; which is operable linked, too.

[75548] In another embodiment thereof the expression cassette does not comprise an additional transit peptide in case in Table I, application no. 15, in column 6 in the same line as SEQ ID NO. 38573 is depicted, non-targeted is mentioned.

[75549] In an embodiment the present invention relates to an expresssion cassette comprising a) a promoter, preferably a promoter selected from the group consisting of Big35S, PCUbi, Super and USP, in particular p-USP; and b) the nucleic acid SEQ ID NO. 134783, or a homolog or fragment thereof, or a homolog thereof being depicted in Table I, application no. 15, column 8, in the same line as SEQ ID NO. 134783, preferably the coding region thereof, a homolog or a fragment thereof; which are operable linked.

[75550] In an embodiment thereof the expression cassette comprises in addition c) a nucleic acid molecule encoding a transit peptide, especially a plastidal transit petide in case in Table I, application no. 15, in column 6 in the same line as SEQ ID NO. 134783 is depicted, plastidic is mentioned, or a mitochondrial transit peptide in case in Table I, application no. 15, in column 6 in the same line as SEQ ID NO. 134783 is depicted, mitochondric is mentioned; which is operable linked, too.

[75551] In another embodiment thereof the expression cassette does not comprise an additional transit peptide in case in Table I, application no. 15, in column 6 in the same line as SEQ ID NO. 134783 is depicted, non-targeted is mentioned.

[75552] In an embodiment the present invention relates to an expresssion cassette comprising a) a promoter, preferably a promoter selected from the group consisting of Big35S, PCUbi, Super and USP, in particular p-Super; and b) the nucleic acid SEQ ID NO. 38767, or a homolog or fragment thereof, or a homolog thereof being depicted in Table I, application no. 15, column 8, in the same line as SEQ ID NO. 38767, preferably the coding region thereof, a homolog or a fragment thereof; which are operable linked.

[75553] In an embodiment thereof the expression cassette comprises in addition c) a nucleic acid molecule encoding a transit peptide, especially a plastidal transit petide in case in Table I, application no. 15, in column 6 in the same line as SEQ ID NO. 38767 is depicted, plastidic is mentioned, or a mitochondrial transit peptide in case in Table I, application no. 15, in column 6 in the same line as SEQ ID NO. 38767 is depicted, mitochondric is mentioned; which is operable linked, too.

[75554] In another embodiment thereof the expression cassette does not comprise an additional transit peptide in case in Table I, application no. 15, in column 6 in the same line as SEQ ID NO. 38767 is depicted, non-targeted is mentioned.

[75555] In an embodiment the present invention relates to an expresssion cassette comprising a) a promoter, preferably a promoter selected from the group consisting of Big35S, PCUbi, Super and USP, in particular p-Super; and b) the nucleic acid SEQ ID NO. 134864, or a homolog or fragment thereof, or a homolog thereof being depicted in Table I, application no. 15, column 8, in the same line as SEQ ID NO. 134864, preferably the coding region thereof, a homolog or a fragment thereof; which are operable linked.

[75556] In an embodiment thereof the expression cassette comprises in addition c) a nucleic acid molecule encoding a transit peptide, especially a plastidal transit petide in case in Table I, application no. 15, in column 6 in the same line as SEQ ID NO. 134864 is depicted, plastidic is mentioned, or a mitochondrial transit peptide in case in Table I, application no. 15, in column 6 in the same line as SEQ ID NO. 134864 is depicted, mitochondric is mentioned; which is operable linked, too.

[75557] In another embodiment thereof the expression cassette does not comprise an additional transit peptide in case in Table I, application no. 15, in column 6 in the same line as SEQ ID NO. 134864 is depicted, non-targeted is mentioned.

[75558] In an embodiment the present invention relates to an expresssion cassette comprising a) a promoter, preferably a promoter selected from the group consisting of Big35S, PCUbi, Super and USP, in particular p-Super; and b) the nucleic acid SEQ ID NO. 79217, or a homolog or fragment thereof, or a homolog thereof being depicted in Table I, application no. 15, column 8, in the same line as SEQ ID NO. 79217, preferably the coding region thereof, a homolog or a fragment thereof; which are operable linked.

[75559] In an embodiment thereof the expression cassette comprises in addition c) a nucleic acid molecule encoding a transit peptide, especially a plastidal transit petide in case in Table I, application no. 15, in column 6 in the same line as SEQ ID NO. 79217 is depicted, plastidic is mentioned, or a mitochondrial transit peptide in case in Table I, application no. 15, in column 6 in the same line as SEQ ID NO. 79217 is depicted, mitochondric is mentioned; which is operable linked, too.

[75560] In another embodiment thereof the expression cassette does not comprise an additional transit peptide in case in Table I, application no. 15, in column 6 in the same line as SEQ ID NO. 79217 is depicted, non-targeted is mentioned.

[75561] In an embodiment the present invention relates to an expresssion cassette comprising a) a promoter, preferably a promoter selected from the group consisting of Big35S, PCUbi, Super and USP, in particular p-Super; and b) the nucleic acid SEQ ID NO. 39237, or a homolog or fragment thereof, or a homolog thereof being depicted in Table I, application no. 15, column 8, in the same line as SEQ ID NO. 39237, preferably the coding region thereof, a homolog or a fragment thereof; which are operable linked.

[75562] In an embodiment thereof the expression cassette comprises in addition c) a nucleic acid molecule encoding a transit peptide, especially a plastidal transit petide in case in Table I, application no. 15, in column 6 in the same line as SEQ ID NO. 39237 is depicted, plastidic is mentioned, or a mitochondrial transit peptide in case in Table I, application no. 15, in column 6 in the same line as SEQ ID NO. 39237 is depicted, mitochondric is mentioned; which is operable linked, too.

[75563] In another embodiment thereof the expression cassette does not comprise an additional transit peptide in case in Table I, application no. 15, in column 6 in the same line as SEQ ID NO. 39237 is depicted, non-targeted is mentioned.

[75564] In an embodiment the present invention relates to an expresssion cassette comprising a) a promoter, preferably a promoter selected from the group consisting of Big35S, PCUbi, Super and USP, in particular p-Super; and b) the nucleic acid SEQ ID NO. 39300, or a homolog or fragment thereof, or a homolog thereof being depicted in Table I, application no. 15, column 8, in the same line as SEQ ID NO. 39300, preferably the coding region thereof, a homolog or a fragment thereof; which are operable linked.

[75565] In an embodiment thereof the expression cassette comprises in addition c) a nucleic acid molecule encoding a transit peptide, especially a plastidal transit petide in case in Table I, application no. 15, in column 6 in the same line as SEQ ID NO. 39300 is depicted, plastidic is mentioned, or a mitochondrial transit peptide in case in Table I, application no. 15, in column 6 in the same line as SEQ ID NO. 39300 is depicted, mitochondric is mentioned; which is operable linked, too.

[75566] In another embodiment thereof the expression cassette does not comprise an additional transit peptide in case in Table I, application no. 15, in column 6 in the same line as SEQ ID NO. 39300 is depicted, non-targeted is mentioned.

[75567] In an embodiment the present invention relates to an expresssion cassette comprising a) a promoter, preferably a promoter selected from the group consisting of Big35S, PCUbi, Super and USP, in particular p-USP; and b) the nucleic acid SEQ ID NO. 134924, or a homolog or fragment thereof, or a homolog thereof being depicted in Table I, application no. 15, column 8, in the same line as SEQ ID NO. 134924, preferably the coding region thereof, a homolog or a fragment thereof; which are operable linked.

[75568] In an embodiment thereof the expression cassette comprises in addition c) a nucleic acid molecule encoding a transit peptide, especially a plastidal transit petide in case in Table I, application no. 15, in column 6 in the same line as SEQ ID NO. 134924 is depicted, plastidic is mentioned, or a mitochondrial transit peptide in case in Table I, application no. 15, in column 6 in the same line as SEQ ID NO. 134924 is depicted, mitochondric is mentioned; which is operable linked, too.

[75569] In another embodiment thereof the expression cassette does not comprise an additional transit peptide in case in Table I, application no. 15, in column 6 in the same line as SEQ ID NO. 134924 is depicted, non-targeted is mentioned.

[75570] In an embodiment the present invention relates to an expresssion cassette comprising a) a promoter, preferably a promoter selected from the group consisting of Big35S, PCUbi, Super and USP, in particular p-Super; and b) the nucleic acid SEQ ID NO. 40726, or a homolog or fragment thereof, or a homolog thereof being depicted in Table I, application no. 15, column 8, in the same line as SEQ ID NO. 40726, preferably the coding region thereof, a homolog or a fragment thereof; which are operable linked.

[75571] In an embodiment thereof the expression cassette comprises in addition c) a nucleic acid molecule encoding a transit peptide, especially a plastidal transit petide in case in Table I, application no. 15, in column 6 in the same line as SEQ ID NO. 40726 is depicted, plastidic is mentioned, or a mitochondrial transit peptide in case in Table I, application no. 15, in column 6 in the same line as SEQ ID NO. 40726 is depicted, mitochondric is mentioned; which is operable linked, too.

[75572] In another embodiment thereof the expression cassette does not comprise an additional transit peptide in case in Table I, application no. 15, in column 6 in the same line as SEQ ID NO. 40726 is depicted, non-targeted is mentioned.

[75573] In an embodiment the present invention relates to an expresssion cassette comprising a) a promoter, preferably a promoter selected from the group consisting of Big35S, PCUbi, Super and USP, in particular p-Super; and b) the nucleic acid SEQ ID NO. 80756, or a homolog or fragment thereof, or a homolog thereof being depicted in Table I, application no. 15, column 8, in the same line as SEQ ID NO. 80756, preferably the coding region thereof, a homolog or a fragment thereof; which are operable linked.

[75574] In an embodiment thereof the expression cassette comprises in addition c) a nucleic acid molecule encoding a transit peptide, especially a plastidal transit petide in case in Table I, application no. 15, in column 6 in the same line as SEQ ID NO. 80756 is depicted, plastidic is mentioned, or a mitochondrial transit peptide in case in Table I, application no. 15, in column 6 in the same line as SEQ ID NO. 80756 is depicted, mitochondric is mentioned; which is operable linked, too.

[75575] In another embodiment thereof the expression cassette does not comprise an additional transit peptide in case in Table I, application no. 15, in column 6 in the same line as SEQ ID NO. 80756 is depicted, non-targeted is mentioned.

[75576] In an embodiment the present invention relates to an expresssion cassette comprising a) a promoter, preferably a promoter selected from the group consisting of Big35S, PCUbi, Super and USP, in particular p-Super; and b) the nucleic acid SEQ ID NO. 81075, or a homolog or fragment thereof, or a homolog thereof being depicted in Table I, application no. 15, column 8, in the same line as SEQ ID NO. 81075, preferably the coding region thereof, a homolog or a fragment thereof; which are operable linked.

[75577] In an embodiment thereof the expression cassette comprises in addition c) a nucleic acid molecule encoding a transit peptide, especially a plastidal transit petide in case in Table I, application no. 15, in column 6 in the same line as SEQ ID NO. 81075 is depicted, plastidic is mentioned, or a mitochondrial transit peptide in case in Table I, application no. 15, in column 6 in the same line as SEQ ID NO. 81075 is depicted, mitochondric is mentioned; which is operable linked, too.

[75578] In another embodiment thereof the expression cassette does not comprise an additional transit peptide in case in Table I, application no. 15, in column 6 in the same line as SEQ ID NO. 81075 is depicted, non-targeted is mentioned.

[75579] In an embodiment the present invention relates to an expresssion cassette comprising a) a promoter, preferably a promoter selected from the group consisting of Big35S, PCUbi, Super and USP, in particular p-Super; and b) the nucleic acid SEQ ID NO. 81576, or a homolog or fragment thereof, or a homolog thereof being depicted in Table I, application no. 15, column 8, in the same line as SEQ ID NO. 81576, preferably the coding region thereof, a homolog or a fragment thereof; which are operable linked.

[75580] In an embodiment thereof the expression cassette comprises in addition c) a nucleic acid molecule encoding a transit peptide, especially a plastidal transit petide in case in Table I, application no. 15, in column 6 in the same line as SEQ ID NO. 81576 is depicted, plastidic is mentioned, or a mitochondrial transit peptide in case in Table I, application no. 15, in column 6 in the same line as SEQ ID NO. 81576 is depicted, mitochondric is mentioned; which is operable linked, too.

[75581] In another embodiment thereof the expression cassette does not comprise an additional transit peptide in case in Table I, application no. 15, in column 6 in the same line as SEQ ID NO. 81576 is depicted, non-targeted is mentioned.

[75582] In an embodiment the present invention relates to an expresssion cassette comprising a) a promoter, preferably a promoter selected from the group consisting of Big35S, PCUbi, Super and USP, in particular p-Super; and b) the nucleic acid SEQ ID NO. 115864, or a homolog or fragment thereof, or a homolog thereof being depicted in Table I, application no. 15, column 8, in the same line as SEQ ID NO. 115864, preferably the coding region thereof, a homolog or a fragment thereof; which are operable linked.

[75583] In an embodiment thereof the expression cassette comprises in addition c) a nucleic acid molecule encoding a transit peptide, especially a plastidal transit petide in case in Table I, application no. 15, in column 6 in the same line as SEQ ID NO. 115864 is depicted, plastidic is mentioned, or a mitochondrial transit peptide in case in Table I, application no. 15, in column 6 in the same line as SEQ ID NO. 115864 is depicted, mitochondric is mentioned; which is operable linked, too.

[75584] In another embodiment thereof the expression cassette does not comprise an additional transit peptide in case in Table I, application no. 15, in column 6 in the same line as SEQ ID NO. 115864 is depicted, non-targeted is mentioned.

[75585] In an embodiment the present invention relates to an expresssion cassette comprising a) a promoter, preferably a promoter selected from the group consisting of Big35S, PCUbi, Super and USP, in particular p-Super; and b) the nucleic acid SEQ ID NO. 135893, or a homolog or fragment thereof, or a homolog thereof being depicted in Table I, application no. 15, column 8, in the same line as SEQ ID NO. 135893, preferably the coding region thereof, a homolog or a fragment thereof; which are operable linked.

[75586] In an embodiment thereof the expression cassette comprises in addition c) a nucleic acid molecule encoding a transit peptide, especially a plastidal transit petide in case in Table I, application no. 15, in column 6 in the same line as SEQ ID NO. 135893 is depicted, plastidic is mentioned, or a mitochondrial transit peptide in case in Table I, application no. 15, in column 6 in the same line as SEQ ID NO. 135893 is depicted, mitochondric is mentioned; which is operable linked, too.

[75587] In another embodiment thereof the expression cassette does not comprise an additional transit peptide in case in Table I, application no. 15, in column 6 in the same line as SEQ ID NO. 135893 is depicted, non-targeted is mentioned.

[75588] In an embodiment the present invention relates to an expresssion cassette comprising a) a promoter, preferably a promoter selected from the group consisting of Big35S, PCUbi, Super and USP, in particular p-Super; and b) the nucleic acid SEQ ID NO. 42502, or a homolog or fragment thereof, or a homolog thereof being depicted in Table I, application no. 15, column 8, in the same line as SEQ ID NO. 42502, preferably the coding region thereof, a homolog or a fragment thereof; which are operable linked.

[75589] In an embodiment thereof the expression cassette comprises in addition c) a nucleic acid molecule encoding a transit peptide, especially a plastidal transit petide in case in Table I, application no. 15, in column 6 in the same line as SEQ ID NO. 42502 is depicted, plastidic is mentioned, or a mitochondrial transit peptide in case in Table I, application no. 15, in column 6 in the same line as SEQ ID NO. 42502 is depicted, mitochondric is mentioned; which is operable linked, too.

[75590] In another embodiment thereof the expression cassette does not comprise an additional transit peptide in case in Table I, application no. 15, in column 6 in the same line as SEQ ID NO. 42502 is depicted, non-targeted is mentioned.

[75591] In an embodiment the present invention relates to an expresssion cassette comprising a) a promoter, preferably a promoter selected from the group consisting of Big35S, PCUbi, Super and USP, in particular p-Super; and b) the nucleic acid SEQ ID NO. 136077, or a homolog or fragment thereof, or a homolog thereof being depicted in Table I, application no. 15, column 8, in the same line as SEQ ID NO. 136077, preferably the coding region thereof, a homolog or a fragment thereof; which are operable linked.

[75592] In an embodiment thereof the expression cassette comprises in addition c) a nucleic acid molecule encoding a transit peptide, especially a plastidal transit petide in case in Table I, application no. 15, in column 6 in the same line as SEQ ID NO. 136077 is depicted, plastidic is mentioned, or a mitochondrial transit peptide in case in Table I, application no. 15, in column 6 in the same line as SEQ ID NO. 136077 is depicted, mitochondric is mentioned; which is operable linked, too.

[75593] In another embodiment thereof the expression cassette does not comprise an additional transit peptide in case in Table I, application no. 15, in column 6 in the same line as SEQ ID NO. 136077 is depicted, non-targeted is mentioned.

[75594] In an embodiment the present invention relates to an expresssion cassette comprising a) a promoter, preferably a promoter selected from the group consisting of Big35S, PCUbi, Super and USP, in particular p-Super; and b) the nucleic acid SEQ ID NO. 136098, or a homolog or fragment thereof, or a homolog thereof being depicted in Table I, application no. 15, column 8, in the same line as SEQ ID NO. 136098, preferably the coding region thereof, a homolog or a fragment thereof; which are operable linked.

[75595] In an embodiment thereof the expression cassette comprises in addition c) a nucleic acid molecule encoding a transit peptide, especially a plastidal transit petide in case in Table I, application no. 15, in column 6 in the same line as SEQ ID NO. 136098 is depicted, plastidic is mentioned, or a mitochondrial transit peptide in case in Table I, application no. 15, in column 6 in the same line as SEQ ID NO. 136098 is depicted, mitochondric is mentioned; which is operable linked, too.

[75596] In another embodiment thereof the expression cassette does not comprise an additional transit peptide in case in Table I, application no. 15, in column 6 in the same line as SEQ ID NO. 136098 is depicted, non-targeted is mentioned.

[75597] In an embodiment the present invention relates to an expresssion cassette comprising a) a promoter, preferably a promoter selected from the group consisting of Big35S, PCUbi, Super and USP, in particular p-Super; and b) the nucleic acid SEQ ID NO. 83726, or a homolog or fragment thereof, or a homolog thereof being depicted in Table I, application no. 15, column 8, in the same line as SEQ ID NO. 83726, preferably the coding region thereof, a homolog or a fragment thereof; which are operable linked.

[75598] In an embodiment thereof the expression cassette comprises in addition c) a nucleic acid molecule encoding a transit peptide, especially a plastidal transit petide in case in Table I, application no. 15, in column 6 in the same line as SEQ ID NO. 83726 is depicted, plastidic is mentioned, or a mitochondrial transit peptide in case in Table I, application no. 15, in column 6 in the same line as SEQ ID NO. 83726 is depicted, mitochondric is mentioned; which is operable linked, too.

[75599] In another embodiment thereof the expression cassette does not comprise an additional transit peptide in case in Table I, application no. 15, in column 6 in the same line as SEQ ID NO. 83726 is depicted, non-targeted is mentioned.

[75600] In an embodiment the present invention relates to an expresssion cassette comprising a) a promoter, preferably a promoter selected from the group consisting of Big35S, PCUbi, Super and USP, in particular p-Super; and b) the nucleic acid SEQ ID NO. 44196, or a homolog or fragment thereof, or a homolog thereof being depicted in Table I, application no. 15, column 8, in the same line as SEQ ID NO. 44196, preferably the coding region thereof, a homolog or a fragment thereof; which are operable linked.

[75601] In an embodiment thereof the expression cassette comprises in addition c) a nucleic acid molecule encoding a transit peptide, especially a plastidal transit petide in case in Table I, application no. 15, in column 6 in the same line as SEQ ID NO. 44196 is depicted, plastidic is mentioned, or a mitochondrial transit peptide in case in Table I, application no. 15, in column 6 in the same line as SEQ ID NO. 44196 is depicted, mitochondric is mentioned; which is operable linked, too.

[75602] In another embodiment thereof the expression cassette does not comprise an additional transit peptide in case in Table I, application no. 15, in column 6 in the same line as SEQ ID NO. 44196 is depicted, non-targeted is mentioned.

[75603] In an embodiment the present invention relates to an expresssion cassette comprising a) a promoter, preferably a promoter selected from the group consisting of Big35S, PCUbi, Super and USP, in particular p-Super; and b) the nucleic acid SEQ ID NO. 10708, or a homolog or fragment thereof, or a homolog thereof being depicted in Table I, application no. 15, column 8, in the same line as SEQ ID NO. 10708, preferably the coding region thereof, a homolog or a fragment thereof; which are operable linked.

[75604] In an embodiment thereof the expression cassette comprises in addition c) a nucleic acid molecule encoding a transit peptide, especially a plastidal transit petide in case in Table I, application no. 15, in column 6 in the same line as SEQ ID NO. 10708 is depicted, plastidic is mentioned, or a mitochondrial transit peptide in case in Table I, application no. 15, in column 6 in the same line as SEQ ID NO. 10708 is depicted, mitochondric is mentioned; which is operable linked, too.

[75605] In another embodiment thereof the expression cassette does not comprise an additional transit peptide in case in Table I, application no. 15, in column 6 in the same line as SEQ ID NO. 10708 is depicted, non-targeted is mentioned.

[75606] In an embodiment the present invention relates to an expresssion cassette comprising a) a promoter, preferably a promoter selected from the group consisting of Big35S, PCUbi, Super and USP, in particular p-Super; and b) the nucleic acid SEQ ID NO. 10726, or a homolog or fragment thereof, or a homolog thereof being depicted in Table I, application no. 15, column 8, in the same line as SEQ ID NO. 10726, preferably the coding region thereof, a homolog or a fragment thereof; which are operable linked.

[75607] In an embodiment thereof the expression cassette comprises in addition c) a nucleic acid molecule encoding a transit peptide, especially a plastidal transit petide in case in Table I, application no. 15, in column 6 in the same line as SEQ ID NO. 10726 is depicted, plastidic is mentioned, or a mitochondrial transit peptide in case in Table I, application no. 15, in column 6 in the same line as SEQ ID NO. 10726 is depicted, mitochondric is mentioned; which is operable linked, too.

[75608] In another embodiment thereof the expression cassette does not comprise an additional transit peptide in case in Table I, application no. 15, in column 6 in the same line as SEQ ID NO. 10726 is depicted, non-targeted is mentioned.

[75609] In an embodiment the present invention relates to an expresssion cassette comprising a) a promoter, preferably a promoter selected from the group consisting of Big35S, PCUbi, Super and USP, in particular p-Super; and b) the nucleic acid SEQ ID NO. 44372, or a homolog or fragment thereof, or a homolog thereof being depicted in Table I, application no. 15, column 8, in the same line as SEQ ID NO. 44372, preferably the coding region thereof, a homolog or a fragment thereof; which are operable linked.

[75610] In an embodiment thereof the expression cassette comprises in addition c) a nucleic acid molecule encoding a transit peptide, especially a plastidal transit petide in case in Table I, application no. 15, in column 6 in the same line as SEQ ID NO. 44372 is depicted, plastidic is mentioned, or a mitochondrial transit peptide in case in Table I, application no. 15, in column 6 in the same line as SEQ ID NO. 44372 is depicted, mitochondric is mentioned; which is operable linked, too.

[75611] In another embodiment thereof the expression cassette does not comprise an additional transit peptide in case in Table I, application no. 15, in column 6 in the same line as SEQ ID NO. 44372 is depicted, non-targeted is mentioned.

[75612] In an embodiment the present invention relates to an expresssion cassette comprising a) a promoter, preferably a promoter selected from the group consisting of Big35S, PCUbi, Super and USP, in particular p-USP; and b) the nucleic acid SEQ ID NO. 44378, or a homolog or fragment thereof, or a homolog thereof being depicted in Table I, application no. 15, column 8, in the same line as SEQ ID NO. 44378, preferably the coding region thereof, a homolog or a fragment thereof; which are operable linked.

[75613] In an embodiment thereof the expression cassette comprises in addition c) a nucleic acid molecule encoding a transit peptide, especially a plastidal transit petide in case in Table I, application no. 15, in column 6 in the same line as SEQ ID NO. 44378 is depicted, plastidic is mentioned, or a mitochondrial transit peptide in case in Table I, application no. 15, in column 6 in the same line as SEQ ID NO. 44378 is depicted, mitochondric is mentioned; which is operable linked, too.

[75614] In another embodiment thereof the expression cassette does not comprise an additional transit peptide in case in Table I, application no. 15, in column 6 in the same line as SEQ ID NO. 44378 is depicted, non-targeted is mentioned.

[75615] In an embodiment the present invention relates to an expresssion cassette comprising a) a promoter, preferably a promoter selected from the group consisting of Big35S, PCUbi, Super and USP, in particular p-Super; and b) the nucleic acid SEQ ID NO. 10740, or a homolog or fragment thereof, or a homolog thereof being depicted in Table I, application no. 15, column 8, in the same line as SEQ ID NO. 10740, preferably the coding region thereof, a homolog or a fragment thereof; which are operable linked.

[75616] In an embodiment thereof the expression cassette comprises in addition c) a nucleic acid molecule encoding a transit peptide, especially a plastidal transit petide in case in Table I, application no. 15, in column 6 in the same line as SEQ ID NO. 10740 is depicted, plastidic is mentioned, or a mitochondrial transit peptide in case in Table I, application no. 15, in column 6 in the same line as SEQ ID NO. 10740 is depicted, mitochondric is mentioned; which is operable linked, too.

[75617] In another embodiment thereof the expression cassette does not comprise an additional transit peptide in case in Table I, application no. 15, in column 6 in the same line as SEQ ID NO. 10740 is depicted, non-targeted is mentioned.

[75618] In an embodiment the present invention relates to an expresssion cassette comprising a) a promoter, preferably a promoter selected from the group consisting of Big35S, PCUbi, Super and USP, in particular p-Super; and b) the nucleic acid SEQ ID NO. 106532, or a homolog or fragment thereof, or a homolog thereof being depicted in Table I, application no. 15, column 8, in the same line as SEQ ID NO. 106532, preferably the coding region thereof, a homolog or a fragment thereof; which are operable linked.

[75619] In an embodiment thereof the expression cassette comprises in addition c) a nucleic acid molecule encoding a transit peptide, especially a plastidal transit petide in case in Table I, application no. 15, in column 6 in the same line as SEQ ID NO. 106532 is depicted, plastidic is mentioned, or a mitochondrial transit peptide in case in Table I, application no. 15, in column 6 in the same line as SEQ ID NO. 106532 is depicted, mitochondric is mentioned; which is operable linked, too.

[75620] In another embodiment thereof the expression cassette does not comprise an additional transit peptide in case in Table I, application no. 15, in column 6 in the same line as SEQ ID NO. 106532 is depicted, non-targeted is mentioned.

[75621] In an embodiment the present invention relates to an expresssion cassette comprising a) a promoter, preferably a promoter selected from the group consisting of Big35S, PCUbi, Super and USP, in particular p-Super; and b) the nucleic acid SEQ ID NO. 94542, or a homolog or fragment thereof, or a homolog thereof being depicted in Table I, application no. 15, column 8, in the same line as SEQ ID NO. 94542, preferably the coding region thereof, a homolog or a fragment thereof; which are operable linked.

[75622] In an embodiment thereof the expression cassette comprises in addition c) a nucleic acid molecule encoding a transit peptide, especially a plastidal transit petide in case in Table I, application no. 15, in column 6 in the same line as SEQ ID NO. 94542 is depicted, plastidic is mentioned, or a mitochondrial transit peptide in case in Table I, application no. 15, in column 6 in the same line as SEQ ID NO. 94542 is depicted, mitochondric is mentioned; which is operable linked, too.

[75623] In another embodiment thereof the expression cassette does not comprise an additional transit peptide in case in Table I, application no. 15, in column 6 in the same line as SEQ ID NO. 94542 is depicted, non-targeted is mentioned.

[75624] In an embodiment the present invention relates to an expresssion cassette comprising a) a promoter, preferably a promoter selected from the group consisting of Big35S, PCUbi, Super and USP, in particular p-USP; and b) the nucleic acid SEQ ID NO. 45022, or a homolog or fragment thereof, or a homolog thereof being depicted in Table I, application no. 15, column 8, in the same line as SEQ ID NO. 45022, preferably the coding region thereof, a homolog or a fragment thereof; which are operable linked.

[75625] In an embodiment thereof the expression cassette comprises in addition c) a nucleic acid molecule encoding a transit peptide, especially a plastidal transit petide in case in Table I, application no. 15, in column 6 in the same line as SEQ ID NO. 45022 is depicted, plastidic is mentioned, or a mitochondrial transit peptide in case in Table I, application no. 15, in column 6 in the same line as SEQ ID NO. 45022 is depicted, mitochondric is mentioned; which is operable linked, too.

[75626] In another embodiment thereof the expression cassette does not comprise an additional transit peptide in case in Table I, application no. 15, in column 6 in the same line as SEQ ID NO. 45022 is depicted, non-targeted is mentioned.

[75627] In an embodiment the present invention relates to an expresssion cassette comprising a) a promoter, preferably a promoter selected from the group consisting of Big35S, PCUbi, Super and USP, in particular p-Super; and b) the nucleic acid SEQ ID NO. 45321, or a homolog or fragment thereof, or a homolog thereof being depicted in Table I, application no. 15, column 8, in the same line as SEQ ID NO. 45321, preferably the coding region thereof, a homolog or a fragment thereof; which are operable linked.

[75628] In an embodiment thereof the expression cassette comprises in addition c) a nucleic acid molecule encoding a transit peptide, especially a plastidal transit petide in case in Table I, application no. 15, in column 6 in the same line as SEQ ID NO. 45321 is depicted, plastidic is mentioned, or a mitochondrial transit peptide in case in Table I, application no. 15, in column 6 in the same line as SEQ ID NO. 45321 is depicted, mitochondric is mentioned; which is operable linked, too.

[75629] In another embodiment thereof the expression cassette does not comprise an additional transit peptide in case in Table I, application no. 15, in column 6 in the same line as SEQ ID NO. 45321 is depicted, non-targeted is mentioned.

[75630] In an embodiment the present invention relates to an expresssion cassette comprising a) a promoter, preferably a promoter selected from the group consisting of Big35S, PCUbi, Super and USP, in particular p-USP; and b) the nucleic acid SEQ ID NO. 45556, or a homolog or fragment thereof, or a homolog thereof being depicted in Table I, application no. 15, column 8, in the same line as SEQ ID NO. 45556, preferably the coding region thereof, a homolog or a fragment thereof; which are operable linked.

[75631] In an embodiment thereof the expression cassette comprises in addition c) a nucleic acid molecule encoding a transit peptide, especially a plastidal transit petide in case in Table I, application no. 15, in column 6 in the same line as SEQ ID NO. 45556 is depicted, plastidic is mentioned, or a mitochondrial transit peptide in case in Table I, application no. 15, in column 6 in the same line as SEQ ID NO. 45556 is depicted, mitochondric is mentioned; which is operable linked, too.

[75632] In another embodiment thereof the expression cassette does not comprise an additional transit peptide in case in Table I, application no. 15, in column 6 in the same line as SEQ ID NO. 45556 is depicted, non-targeted is mentioned.

[75633] In an embodiment the present invention relates to an expresssion cassette comprising a) a promoter, preferably a promoter selected from the group consisting of Big35S, PCUbi, Super and USP, in particular p-PcUBI; and b) the nucleic acid SEQ ID NO. 84079, or a homolog or fragment thereof, or a homolog thereof being depicted in Table I, application no. 15, column 8, in the same line as SEQ ID NO. 84079, preferably the coding region thereof, a homolog or a fragment thereof; which are operable linked.

[75634] In an embodiment thereof the expression cassette comprises in addition c) a nucleic acid molecule encoding a transit peptide, especially a plastidal transit petide in case in Table I, application no. 15, in column 6 in the same line as SEQ ID NO. 84079 is depicted, plastidic is mentioned, or a mitochondrial transit peptide in case in Table I, application no. 15, in column 6 in the same line as SEQ ID NO. 84079 is depicted, mitochondric is mentioned; which is operable linked, too.

[75635] In another embodiment thereof the expression cassette does not comprise an additional transit peptide in case in Table I, application no. 15, in column 6 in the same line as SEQ ID NO. 84079 is depicted, non-targeted is mentioned.

[75636] In an embodiment the present invention relates to an expresssion cassette comprising a) a promoter, preferably a promoter selected from the group consisting of Big35S, PCUbi, Super and USP, in particular p-PcUBI; and b) the nucleic acid SEQ ID NO. 10811, or a homolog or fragment thereof, or a homolog thereof being depicted in Table I, application no. 15, column 8, in the same line as SEQ ID NO. 10811, preferably the coding region thereof, a homolog or a fragment thereof; which are operable linked.

[75637] In an embodiment thereof the expression cassette comprises in addition c) a nucleic acid molecule encoding a transit peptide, especially a plastidal transit petide in case in Table I, application no. 15, in column 6 in the same line as SEQ ID NO. 10811 is depicted, plastidic is mentioned, or a mitochondrial transit peptide in case in Table I, application no. 15, in column 6 in the same line as SEQ ID NO. 10811 is depicted, mitochondric is mentioned; which is operable linked, too.

[75638] In another embodiment thereof the expression cassette does not comprise an additional transit peptide in case in Table I, application no. 15, in column 6 in the same line as SEQ ID NO. 10811 is depicted, non-targeted is mentioned.

[75639] In an embodiment the present invention relates to an expresssion cassette comprising a) a promoter, preferably a promoter selected from the group consisting of Big35S, PCUbi, Super and USP, in particular p-PcUBI; and b) the nucleic acid SEQ ID NO. 46405, or a homolog or fragment thereof, or a homolog thereof being depicted in Table I, application no. 15, column 8, in the same line as SEQ ID NO. 46405, preferably the coding region thereof, a homolog or a fragment thereof; which are operable linked.

[75640] In an embodiment thereof the expression cassette comprises in addition c) a nucleic acid molecule encoding a transit peptide, especially a plastidal transit petide in case in Table I, application no. 15, in column 6 in the same line as SEQ ID NO. 46405 is depicted, plastidic is mentioned, or a mitochondrial transit peptide in case in Table I, application no. 15, in column 6 in the same line as SEQ ID NO. 46405 is depicted, mitochondric is mentioned; which is operable linked, too.

[75641] In another embodiment thereof the expression cassette does not comprise an additional transit peptide in case in Table I, application no. 15, in column 6 in the same line as SEQ ID NO. 46405 is depicted, non-targeted is mentioned.

[75642] In an embodiment the present invention relates to an expresssion cassette comprising a) a promoter, preferably a promoter selected from the group consisting of Big35S, PCUbi, Super and USP, in particular p-PcUBI; and b) the nucleic acid SEQ ID NO. 84198, or a homolog or fragment thereof, or a homolog thereof being depicted in Table I, application no. 15, column 8, in the same line as SEQ ID NO. 84198, preferably the coding region thereof, a homolog or a fragment thereof; which are operable linked.

[75643] In an embodiment thereof the expression cassette comprises in addition c) a nucleic acid molecule encoding a transit peptide, especially a plastidal transit petide in case in Table I, application no. 15, in column 6 in the same line as SEQ ID NO. 84198 is depicted, plastidic is mentioned, or a mitochondrial transit peptide in case in Table I, application no. 15, in column 6 in the same line as SEQ ID NO. 84198 is depicted, mitochondric is mentioned; which is operable linked, too.

[75644] In another embodiment thereof the expression cassette does not comprise an additional transit peptide in case in Table I, application no. 15, in column 6 in the same line as SEQ ID NO. 84198 is depicted, non-targeted is mentioned.

[75645] In an embodiment the present invention relates to an expresssion cassette comprising a) a promoter, preferably a promoter selected from the group consisting of Big35S, PCUbi, Super and USP, in particular p-PcUBI; and b) the nucleic acid SEQ ID NO. 47076, or a homolog or fragment thereof, or a homolog thereof being depicted in Table I, application no. 15, column 8, in the same line as SEQ ID NO. 47076, preferably the coding region thereof, a homolog or a fragment thereof; which are operable linked.

[75646] In an embodiment thereof the expression cassette comprises in addition c) a nucleic acid molecule encoding a transit peptide, especially a plastidal transit petide in case in Table I, application no. 15, in column 6 in the same line as SEQ ID NO. 47076 is depicted, plastidic is mentioned, or a mitochondrial transit peptide in case in Table I, application no. 15, in column 6 in the same line as SEQ ID NO. 47076 is depicted, mitochondric is mentioned; which is operable linked, too.

[75647] In another embodiment thereof the expression cassette does not comprise an additional transit peptide in case in Table I, application no. 15, in column 6 in the same line as SEQ ID NO. 47076 is depicted, non-targeted is mentioned.

[75648] In an embodiment the present invention relates to an expresssion cassette comprising a) a promoter, preferably a promoter selected from the group consisting of Big35S, PCUbi, Super and USP, in particular p-PcUBI; and b) the nucleic acid SEQ ID NO. 48138, or a homolog or fragment thereof, or a homolog thereof being depicted in Table I, application no. 15, column 8, in the same line as SEQ ID NO. 48138, preferably the coding region thereof, a homolog or a fragment thereof; which are operable linked.

[75649] In an embodiment thereof the expression cassette comprises in addition c) a nucleic acid molecule encoding a transit peptide, especially a plastidal transit petide in case in Table I, application no. 15, in column 6 in the same line as SEQ ID NO. 48138 is depicted, plastidic is mentioned, or a mitochondrial transit peptide in case in Table I, application no. 15, in column 6 in the same line as SEQ ID NO. 48138 is depicted, mitochondric is mentioned; which is operable linked, too.

[75650] In another embodiment thereof the expression cassette does not comprise an additional transit peptide in case in Table I, application no. 15, in column 6 in the same line as SEQ ID NO. 48138 is depicted, non-targeted is mentioned.

[75651] In an embodiment the present invention relates to an expresssion cassette comprising a) a promoter, preferably a promoter selected from the group consisting of Big35S, PCUbi, Super and USP, in particular p-PcUBI; and b) the nucleic acid SEQ ID NO. 84265, or a homolog or fragment thereof, or a homolog thereof being depicted in Table I, application no. 15, column 8, in the same line as SEQ ID NO. 84265, preferably the coding region thereof, a homolog or a fragment thereof; which are operable linked.

[75652] In an embodiment thereof the expression cassette comprises in addition c) a nucleic acid molecule encoding a transit peptide, especially a plastidal transit petide in case in Table I, application no. 15, in column 6 in the same line as SEQ ID NO. 84265 is depicted, plastidic is mentioned, or a mitochondrial transit peptide in case in Table I, application no. 15, in column 6 in the same line as SEQ ID NO. 84265 is depicted, mitochondric is mentioned; which is operable linked, too.

[75653] In another embodiment thereof the expression cassette does not comprise an additional transit peptide in case in Table I, application no. 15, in column 6 in the same line as SEQ ID NO. 84265 is depicted, non-targeted is mentioned.

[75654] In an embodiment the present invention relates to an expresssion cassette comprising a) a promoter, preferably a promoter selected from the group consisting of Big35S, PCUbi, Super and USP, in particular p-PcUBI; and b) the nucleic acid SEQ ID NO. 84441, or a homolog or fragment thereof, or a homolog thereof being depicted in Table I, application no. 15, column 8, in the same line as SEQ ID NO. 84441, preferably the coding region thereof, a homolog or a fragment thereof; which are operable linked.

[75655] In an embodiment thereof the expression cassette comprises in addition c) a nucleic acid molecule encoding a transit peptide, especially a plastidal transit petide in case in Table I, application no. 15, in column 6 in the same line as SEQ ID NO. 84441 is depicted, plastidic is mentioned, or a mitochondrial transit peptide in case in Table I, application no. 15, in column 6 in the same line as SEQ ID NO. 84441 is depicted, mitochondric is mentioned; which is operable linked, too.

[75656] In another embodiment thereof the expression cassette does not comprise an additional transit peptide in case in Table I, application no. 15, in column 6 in the same line as SEQ ID NO. 84441 is depicted, non-targeted is mentioned.

[75657] In an embodiment the present invention relates to an expresssion cassette comprising a) a promoter, preferably a promoter selected from the group consisting of Big35S, PCUbi, Super and USP, in particular p-PcUBI; and b) the nucleic acid SEQ ID NO. 51198, or a homolog or fragment thereof, or a homolog thereof being depicted in Table I, application no. 15, column 8, in the same line as SEQ ID NO. 51198, preferably the coding region thereof, a homolog or a fragment thereof; which are operable linked.

[75658] In an embodiment thereof the expression cassette comprises in addition c) a nucleic acid molecule encoding a transit peptide, especially a plastidal transit petide in case in Table I, application no. 15, in column 6 in the same line as SEQ ID NO. 51198 is depicted, plastidic is mentioned, or a mitochondrial transit peptide in case in Table I, application no. 15, in column 6 in the same line as SEQ ID NO. 51198 is depicted, mitochondric is mentioned; which is operable linked, too.

[75659] In another embodiment thereof the expression cassette does not comprise an additional transit peptide in case in Table I, application no. 15, in column 6 in the same line as SEQ ID NO. 51198 is depicted, non-targeted is mentioned.

[75660] In an embodiment the present invention relates to an expresssion cassette comprising a) a promoter, preferably a promoter selected from the group consisting of Big35S, PCUbi, Super and USP, in particular p-PcUBI; and b) the nucleic acid SEQ ID NO. 127109, or a homolog or fragment thereof, or a homolog thereof being depicted in Table I, application no. 15, column 8, in the same line as SEQ ID NO. 127109, preferably the coding region thereof, a homolog or a fragment thereof; which are operable linked.

[75661] In an embodiment thereof the expression cassette comprises in addition c) a nucleic acid molecule encoding a transit peptide, especially a plastidal transit petide in case in Table I, application no. 15, in column 6 in the same line as SEQ ID NO. 127109 is depicted, plastidic is mentioned, or a mitochondrial transit peptide in case in Table I, application no. 15, in column 6 in the same line as SEQ ID NO. 127109 is depicted, mitochondric is mentioned; which is operable linked, too.

[75662] In another embodiment thereof the expression cassette does not comprise an additional transit peptide in case in Table I, application no. 15, in column 6 in the same line as SEQ ID NO. 127109 is depicted, non-targeted is mentioned.

[75663] In an embodiment the present invention relates to an expresssion cassette comprising a) a promoter, preferably a promoter selected from the group consisting of Big35S, PCUbi, Super and USP, in particular p-PcUBI; and b) the nucleic acid SEQ ID NO. 54452, or a homolog or fragment thereof, or a homolog thereof being depicted in Table I, application no. 15, column 8, in the same line as SEQ ID NO. 54452, preferably the coding region thereof, a homolog or a fragment thereof; which are operable linked.

[75664] In an embodiment thereof the expression cassette comprises in addition c) a nucleic acid molecule encoding a transit peptide, especially a plastidal transit petide in case in Table I, application no. 15, in column 6 in the same line as SEQ ID NO. 54452 is depicted, plastidic is mentioned, or a mitochondrial transit peptide in case in Table I, application no. 15, in column 6 in the same line as SEQ ID NO. 54452 is depicted, mitochondric is mentioned; which is operable linked, too.

[75665] In another embodiment thereof the expression cassette does not comprise an additional transit peptide in case in Table I, application no. 15, in column 6 in the same line as SEQ ID NO. 54452 is depicted, non-targeted is mentioned.

[75666] In an embodiment the present invention relates to an expresssion cassette comprising a) a promoter, preferably a promoter selected from the group consisting of Big35S, PCUbi, Super and USP, in particular p-PcUBI; and b) the nucleic acid SEQ ID NO. 85808, or a homolog or fragment thereof, or a homolog thereof being depicted in Table I, application no. 15, column 8, in the same line as SEQ ID NO. 85808, preferably the coding region thereof, a homolog or a fragment thereof; which are operable linked.

[75667] In an embodiment thereof the expression cassette comprises in addition c) a nucleic acid molecule encoding a transit peptide, especially a plastidal transit petide in case in Table I, application no. 15, in column 6 in the same line as SEQ ID NO. 85808 is depicted, plastidic is mentioned, or a mitochondrial transit peptide in case in Table I, application no. 15, in column 6 in the same line as SEQ ID NO. 85808 is depicted, mitochondric is mentioned; which is operable linked, too.

[75668] In another embodiment thereof the expression cassette does not comprise an additional transit peptide in case in Table I, application no. 15, in column 6 in the same line as SEQ ID NO. 85808 is depicted, non-targeted is mentioned.

[75669] In an embodiment the present invention relates to an expresssion cassette comprising a) a promoter, preferably a promoter selected from the group consisting of Big35S, PCUbi, Super and USP, in particular p-PcUBI; and b) the nucleic acid SEQ ID NO. 55385, or a homolog or fragment thereof, or a homolog thereof being depicted in Table I, application no. 15, column 8, in the same line as SEQ ID NO. 55385, preferably the coding region thereof, a homolog or a fragment thereof; which are operable linked.

[75670] In an embodiment thereof the expression cassette comprises in addition c) a nucleic acid molecule encoding a transit peptide, especially a plastidal transit petide in case in Table I, application no. 15, in column 6 in the same line as SEQ ID NO. 55385 is depicted, plastidic is mentioned, or a mitochondrial transit peptide in case in Table I, application no. 15, in column 6 in the same line as SEQ ID NO. 55385 is depicted, mitochondric is mentioned; which is operable linked, too.

[75671] In another embodiment thereof the expression cassette does not comprise an additional transit peptide in case in Table I, application no. 15, in column 6 in the same line as SEQ ID NO. 55385 is depicted, non-targeted is mentioned.

[75672] In an embodiment the present invention relates to an expresssion cassette comprising a) a promoter, preferably a promoter selected from the group consisting of Big35S, PCUbi, Super and USP, in particular p-PcUBI; and b) the nucleic acid SEQ ID NO. 136533, or a homolog or fragment thereof, or a homolog thereof being depicted in Table I, application no. 15, column 8, in the same line as SEQ ID NO. 136533, preferably the coding region thereof, a homolog or a fragment thereof; which are operable linked.

[75673] In an embodiment thereof the expression cassette comprises in addition c) a nucleic acid molecule encoding a transit peptide, especially a plastidal transit petide in case in Table I, application no. 15, in column 6 in the same line as SEQ ID NO. 136533 is depicted, plastidic is mentioned, or a mitochondrial transit peptide in case in Table I, application no. 15, in column 6 in the same line as SEQ ID NO. 136533 is depicted, mitochondric is mentioned; which is operable linked, too.

[75674] In another embodiment thereof the expression cassette does not comprise an additional transit peptide in case in Table I, application no. 15, in column 6 in the same line as SEQ ID NO. 136533 is depicted, non-targeted is mentioned.

[75675] In an embodiment the present invention relates to an expresssion cassette comprising a) a promoter, preferably a promoter selected from the group consisting of Big35S, PCUbi, Super and USP, in particular p-PcUBI; and b) the nucleic acid SEQ ID NO. 11990, or a homolog or fragment thereof, or a homolog thereof being depicted in Table I, application no. 15, column 8, in the same line as SEQ ID NO. 11990, preferably the coding region thereof, a homolog or a fragment thereof; which are operable linked.

[75676] In an embodiment thereof the expression cassette comprises in addition c) a nucleic acid molecule encoding a transit peptide, especially a plastidal transit petide in case in Table I, application no. 15, in column 6 in the same line as SEQ ID NO. 11990 is depicted, plastidic is mentioned, or a mitochondrial transit peptide in case in Table I, application no. 15, in column 6 in the same line as SEQ ID NO. 11990 is depicted, mitochondric is mentioned; which is operable linked, too.

[75677] In another embodiment thereof the expression cassette does not comprise an additional transit peptide in case in Table I, application no. 15, in column 6 in the same line as SEQ ID NO. 11990 is depicted, non-targeted is mentioned.

[75678] In an embodiment the present invention relates to an expresssion cassette comprising a) a promoter, preferably a promoter selected from the group consisting of Big35S, PCUbi, Super and USP, in particular p-PcUBI; and b) the nucleic acid SEQ ID NO. 56153, or a homolog or fragment thereof, or a homolog thereof being depicted in Table I, application no. 15, column 8, in the same line as SEQ ID NO. 56153, preferably the coding region thereof, a homolog or a fragment thereof; which are operable linked.

[75679] In an embodiment thereof the expression cassette comprises in addition c) a nucleic acid molecule encoding a transit peptide, especially a plastidal transit petide in case in Table I, application no. 15, in column 6 in the same line as SEQ ID NO. 56153 is depicted, plastidic is mentioned, or a mitochondrial transit peptide in case in Table I, application no. 15, in column 6 in the same line as SEQ ID NO. 56153 is depicted, mitochondric is mentioned; which is operable linked, too.

[75680] In another embodiment thereof the expression cassette does not comprise an additional transit peptide in case in Table I, application no. 15, in column 6 in the same line as SEQ ID NO. 56153 is depicted, non-targeted is mentioned.

[75681] In an embodiment the present invention relates to an expresssion cassette comprising a) a promoter, preferably a promoter selected from the group consisting of Big35S, PCUbi, Super and USP, in particular p-PcUBI; and b) the nucleic acid SEQ ID NO. 87397, or a homolog or fragment thereof, or a homolog thereof being depicted in Table I, application no. 15, column 8, in the same line as SEQ ID NO. 87397, preferably the coding region thereof, a homolog or a fragment thereof; which are operable linked.

[75682] In an embodiment thereof the expression cassette comprises in addition c) a nucleic acid molecule encoding a transit peptide, especially a plastidal transit petide in case in Table I, application no. 15, in column 6 in the same line as SEQ ID NO. 87397 is depicted, plastidic is mentioned, or a mitochondrial transit peptide in case in Table I, application no. 15, in column 6 in the same line as SEQ ID NO. 87397 is depicted, mitochondric is mentioned; which is operable linked, too.

[75683] In another embodiment thereof the expression cassette does not comprise an additional transit peptide in case in Table I, application no. 15, in column 6 in the same line as SEQ ID NO. 87397 is depicted, non-targeted is mentioned.

[75684] In an embodiment the present invention relates to an expresssion cassette comprising a) a promoter, preferably a promoter selected from the group consisting of Big35S, PCUbi, Super and USP, in particular p-PcUBI; and b) the nucleic acid SEQ ID NO. 57734, or a homolog or fragment thereof, or a homolog thereof being depicted in Table I, application no. 15, column 8, in the same line as SEQ ID NO. 57734, preferably the coding region thereof, a homolog or a fragment thereof; which are operable linked.

[75685] In an embodiment thereof the expression cassette comprises in addition c) a nucleic acid molecule encoding a transit peptide, especially a plastidal transit petide in case in Table I, application no. 15, in column 6 in the same line as SEQ ID NO. 57734 is depicted, plastidic is mentioned, or a mitochondrial transit peptide in case in Table I, application no. 15, in column 6 in the same line as SEQ ID NO. 57734 is depicted, mitochondric is mentioned; which is operable linked, too.

[75686] In another embodiment thereof the expression cassette does not comprise an additional transit peptide in case in Table I, application no. 15, in column 6 in the same line as SEQ ID NO. 57734 is depicted, non-targeted is mentioned.

[75687] In an embodiment the present invention relates to an expresssion cassette comprising a) a promoter, preferably a promoter selected from the group consisting of Big35S, PCUbi, Super and USP, in particular p-PcUBI; and b) the nucleic acid SEQ ID NO. 136869, or a homolog or fragment thereof, or a homolog thereof being depicted in Table I, application no. 15, column 8, in the same line as SEQ ID NO. 136869, preferably the coding region thereof, a homolog or a fragment thereof; which are operable linked.

[75688] In an embodiment thereof the expression cassette comprises in addition c) a nucleic acid molecule encoding a transit peptide, especially a plastidal transit petide in case in Table I, application no. 15, in column 6 in the same line as SEQ ID NO. 136869 is depicted, plastidic is mentioned, or a mitochondrial transit peptide in case in Table I, application no. 15, in column 6 in the same line as SEQ ID NO. 136869 is depicted, mitochondric is mentioned; which is operable linked, too.

[75689] In another embodiment thereof the expression cassette does not comprise an additional transit peptide in case in Table I, application no. 15, in column 6 in the same line as SEQ ID NO. 136869 is depicted, non-targeted is mentioned.

[75690] In an embodiment the present invention relates to an expresssion cassette comprising a) a promoter, preferably a promoter selected from the group consisting of Big35S, PCUbi, Super and USP, in particular p-PcUBI; and b) the nucleic acid SEQ ID NO. 116460, or a homolog or fragment thereof, or a homolog thereof being depicted in Table I, application no. 15, column 8, in the same line as SEQ ID NO. 116460, preferably the coding region thereof, a homolog or a fragment thereof; which are operable linked.

[75691] In an embodiment thereof the expression cassette comprises in addition c) a nucleic acid molecule encoding a transit peptide, especially a plastidal transit petide in case in Table I, application no. 15, in column 6 in the same line as SEQ ID NO. 116460 is depicted, plastidic is mentioned, or a mitochondrial transit peptide in case in Table I, application no. 15, in column 6 in the same line as SEQ ID NO. 116460 is depicted, mitochondric is mentioned; which is operable linked, too.

[75692] In another embodiment thereof the expression cassette does not comprise an additional transit peptide in case in Table I, application no. 15, in column 6 in the same line as SEQ ID NO. 116460 is depicted, non-targeted is mentioned.

[75693] In an embodiment the present invention relates to an expresssion cassette comprising a) a promoter, preferably a promoter selected from the group consisting of Big35S, PCUbi, Super and USP, in particular p-PcUBI; and b) the nucleic acid SEQ ID NO. 58058, or a homolog or fragment thereof, or a homolog thereof being depicted in Table I, application no. 15, column 8, in the same line as SEQ ID NO. 58058, preferably the coding region thereof, a homolog or a fragment thereof; which are operable linked.

[75694] In an embodiment thereof the expression cassette comprises in addition c) a nucleic acid molecule encoding a transit peptide, especially a plastidal transit petide in case in Table I, application no. 15, in column 6 in the same line as SEQ ID NO. 58058 is depicted, plastidic is mentioned, or a mitochondrial transit peptide in case in Table I, application no. 15, in column 6 in the same line as SEQ ID NO. 58058 is depicted, mitochondric is mentioned; which is operable linked, too.

[75695] In another embodiment thereof the expression cassette does not comprise an additional transit peptide in case in Table I, application no. 15, in column 6 in the same line as SEQ ID NO. 58058 is depicted, non-targeted is mentioned.

[75696] In an embodiment the present invention relates to an expresssion cassette comprising a) a promoter, preferably a promoter selected from the group consisting of Big35S, PCUbi, Super and USP, in particular p-PcUBI; and b) the nucleic acid SEQ ID NO. 58731, or a homolog or fragment thereof, or a homolog thereof being depicted in Table I, application no. 15, column 8, in the same line as SEQ ID NO. 58731, preferably the coding region thereof, a homolog or a fragment thereof; which are operable linked.

[75697] In an embodiment thereof the expression cassette comprises in addition c) a nucleic acid molecule encoding a transit peptide, especially a plastidal transit petide in case in Table I, application no. 15, in column 6 in the same line as SEQ ID NO. 58731 is depicted, plastidic is mentioned, or a mitochondrial transit peptide in case in Table I, application no. 15, in column 6 in the same line as SEQ ID NO. 58731 is depicted, mitochondric is mentioned; which is operable linked, too.

[75698] In another embodiment thereof the expression cassette does not comprise an additional transit peptide in case in Table I, application no. 15, in column 6 in the same line as SEQ ID NO. 58731 is depicted, non-targeted is mentioned.

[75699] In an embodiment the present invention relates to an expresssion cassette comprising a) a promoter, preferably a promoter selected from the group consisting of Big35S, PCUbi, Super and USP, in particular p-PcUBI; and b) the nucleic acid SEQ ID NO. 59165, or a homolog or fragment thereof, or a homolog thereof being depicted in Table I, application no. 15, column 8, in the same line as SEQ ID NO. 59165, preferably the coding region thereof, a homolog or a fragment thereof; which are operable linked.

[75700] In an embodiment thereof the expression cassette comprises in addition c) a nucleic acid molecule encoding a transit peptide, especially a plastidal transit petide in case in Table I, application no. 15, in column 6 in the same line as SEQ ID NO. 59165 is depicted, plastidic is mentioned, or a mitochondrial transit peptide in case in Table I, application no. 15, in column 6 in the same line as SEQ ID NO. 59165 is depicted, mitochondric is mentioned; which is operable linked, too.

[75701] In another embodiment thereof the expression cassette does not comprise an additional transit peptide in case in Table I, application no. 15, in column 6 in the same line as SEQ ID NO. 59165 is depicted, non-targeted is mentioned.

[75702] In an embodiment the present invention relates to an expresssion cassette comprising a) a promoter, preferably a promoter selected from the group consisting of Big35S, PCUbi, Super and USP, in particular p-PcUBI; and b) the nucleic acid SEQ ID NO. 136907, or a homolog or fragment thereof, or a homolog thereof being depicted in Table I, application no. 15, column 8, in the same line as SEQ ID NO. 136907, preferably the coding region thereof, a homolog or a fragment thereof; which are operable linked.

[75703] In an embodiment thereof the expression cassette comprises in addition c) a nucleic acid molecule encoding a transit peptide, especially a plastidal transit petide in case in Table I, application no. 15, in column 6 in the same line as SEQ ID NO. 136907 is depicted, plastidic is mentioned, or a mitochondrial transit peptide in case in Table I, application no. 15, in column 6 in the same line as SEQ ID NO. 136907 is depicted, mitochondric is mentioned; which is operable linked, too.

[75704] In another embodiment thereof the expression cassette does not comprise an additional transit peptide in case in Table I, application no. 15, in column 6 in the same line as SEQ ID NO. 136907 is depicted, non-targeted is mentioned.

[75705] In an embodiment the present invention relates to an expresssion cassette comprising a) a promoter, preferably a promoter selected from the group consisting of Big35S, PCUbi, Super and USP, in particular p-PcUBI; and b) the nucleic acid SEQ ID NO. 12698, or a homolog or fragment thereof, or a homolog thereof being depicted in Table I, application no. 15, column 8, in the same line as SEQ ID NO. 12698, preferably the coding region thereof, a homolog or a fragment thereof; which are operable linked.

[75706] In an embodiment thereof the expression cassette comprises in addition c) a nucleic acid molecule encoding a transit peptide, especially a plastidal transit petide in case in Table I, application no. 15, in column 6 in the same line as SEQ ID NO. 12698 is depicted, plastidic is mentioned, or a mitochondrial transit peptide in case in Table I, application no. 15, in column 6 in the same line as SEQ ID NO. 12698 is depicted, mitochondric is mentioned; which is operable linked, too.

[75707] In another embodiment thereof the expression cassette does not comprise an additional transit peptide in case in Table I, application no. 15, in column 6 in the same line as SEQ ID NO. 12698 is depicted, non-targeted is mentioned.

[75708] In an embodiment the present invention relates to an expresssion cassette comprising a) a promoter, preferably a promoter selected from the group consisting of Big35S, PCUbi, Super and USP, in particular p-PcUBI; and b) the nucleic acid SEQ ID NO. 107556, or a homolog or fragment thereof, or a homolog thereof being depicted in Table I, application no. 15, column 8, in the same line as SEQ ID NO. 107556, preferably the coding region thereof, a homolog or a fragment thereof; which are operable linked.

[75709] In an embodiment thereof the expression cassette comprises in addition c) a nucleic acid molecule encoding a transit peptide, especially a plastidal transit petide in case in Table I, application no. 15, in column 6 in the same line as SEQ ID NO. 107556 is depicted, plastidic is mentioned, or a mitochondrial transit peptide in case in Table I, application no. 15, in column 6 in the same line as SEQ ID NO. 107556 is depicted, mitochondric is mentioned; which is operable linked, too.

[75710] In another embodiment thereof the expression cassette does not comprise an additional transit peptide in case in Table I, application no. 15, in column 6 in the same line as SEQ ID NO. 107556 is depicted, non-targeted is mentioned.

[75711] In an embodiment the present invention relates to an expresssion cassette comprising a) a promoter, preferably a promoter selected from the group consisting of Big35S, PCUbi, Super and USP, in particular p-PcUBI; and b) the nucleic acid SEQ ID NO. 61723, or a homolog or fragment thereof, or a homolog thereof being depicted in Table I, application no. 15, column 8, in the same line as SEQ ID NO. 61723, preferably the coding region thereof, a homolog or a fragment thereof; which are operable linked.

[75712] In an embodiment thereof the expression cassette comprises in addition c) a nucleic acid molecule encoding a transit peptide, especially a plastidal transit petide in case in Table I, application no. 15, in column 6 in the same line as SEQ ID NO. 61723 is depicted, plastidic is mentioned, or a mitochondrial transit peptide in case in Table I, application no. 15, in column 6 in the same line as SEQ ID NO. 61723 is depicted, mitochondric is mentioned; which is operable linked, too.

[75713] In another embodiment thereof the expression cassette does not comprise an additional transit peptide in case in Table I, application no. 15, in column 6 in the same line as SEQ ID NO. 61723 is depicted, non-targeted is mentioned.

[75714] In an embodiment the present invention relates to an expresssion cassette comprising a) a promoter, preferably a promoter selected from the group consisting of Big35S, PCUbi, Super and USP, in particular p-PcUBI; and b) the nucleic acid SEQ ID NO. 62079, or a homolog or fragment thereof, or a homolog thereof being depicted in Table I, application no. 15, column 8, in the same line as SEQ ID NO. 62079, preferably the coding region thereof, a homolog or a fragment thereof; which are operable linked.

[75715] In an embodiment thereof the expression cassette comprises in addition c) a nucleic acid molecule encoding a transit peptide, especially a plastidal transit petide in case in Table I, application no. 15, in column 6 in the same line as SEQ ID NO. 62079 is depicted, plastidic is mentioned, or a mitochondrial transit peptide in case in Table I, application no. 15, in column 6 in the same line as SEQ ID NO. 62079 is depicted, mitochondric is mentioned; which is operable linked, too.

[75716] In another embodiment thereof the expression cassette does not comprise an additional transit peptide in case in Table I, application no. 15, in column 6 in the same line as SEQ ID NO. 62079 is depicted, non-targeted is mentioned.

[75717] In an embodiment the present invention relates to an expresssion cassette comprising a) a promoter, preferably a promoter selected from the group consisting of Big35S, PCUbi, Super and USP, in particular p-PcUBI; and b) the nucleic acid SEQ ID NO. 62160, or a homolog or fragment thereof, or a homolog thereof being depicted in Table I, application no. 15, column 8, in the same line as SEQ ID NO. 62160, preferably the coding region thereof, a homolog or a fragment thereof; which are operable linked.

[75718] In an embodiment thereof the expression cassette comprises in addition c) a nucleic acid molecule encoding a transit peptide, especially a plastidal transit petide in case in Table I, application no. 15, in column 6 in the same line as SEQ ID NO. 62160 is depicted, plastidic is mentioned, or a mitochondrial transit peptide in case in Table I, application no. 15, in column 6 in the same line as SEQ ID NO. 62160 is depicted, mitochondric is mentioned; which is operable linked, too.

[75719] In another embodiment thereof the expression cassette does not comprise an additional transit peptide in case in Table I, application no. 15, in column 6 in the same line as SEQ ID NO. 62160 is depicted, non-targeted is mentioned.

[75720] In an embodiment the present invention relates to an expresssion cassette comprising a) a promoter, preferably a promoter selected from the group consisting of Big35S, PCUbi, Super and USP, in particular p-PcUBI; and b) the nucleic acid SEQ ID NO. 62244, or a homolog or fragment thereof, or a homolog thereof being depicted in Table I, application no. 15, column 8, in the same line as SEQ ID NO. 62244, preferably the coding region thereof, a homolog or a fragment thereof; which are operable linked.

[75721] In an embodiment thereof the expression cassette comprises in addition c) a nucleic acid molecule encoding a transit peptide, especially a plastidal transit petide in case in Table I, application no. 15, in column 6 in the same line as SEQ ID NO. 62244 is depicted, plastidic is mentioned, or a mitochondrial transit peptide in case in Table I, application no. 15, in column 6 in the same line as SEQ ID NO. 62244 is depicted, mitochondric is mentioned; which is operable linked, too.

[75722] In another embodiment thereof the expression cassette does not comprise an additional transit peptide in case in Table I, application no. 15, in column 6 in the same line as SEQ ID NO. 62244 is depicted, non-targeted is mentioned.

[75723] In an embodiment the present invention relates to an expresssion cassette comprising a) a promoter, preferably a promoter selected from the group consisting of Big35S, PCUbi, Super and USP, in particular p-PcUBI; and b) the nucleic acid SEQ ID NO. 136943, or a homolog or fragment thereof, or a homolog thereof being depicted in Table I, application no. 15, column 8, in the same line as SEQ ID NO. 136943, preferably the coding region thereof, a homolog or a fragment thereof; which are operable linked.

[75724] In an embodiment thereof the expression cassette comprises in addition c) a nucleic acid molecule encoding a transit peptide, especially a plastidal transit petide in case in Table I, application no. 15, in column 6 in the same line as SEQ ID NO. 136943 is depicted, plastidic is mentioned, or a mitochondrial transit peptide in case in Table I, application no. 15, in column 6 in the same line as SEQ ID NO. 136943 is depicted, mitochondric is mentioned; which is operable linked, too.

[75725] In another embodiment thereof the expression cassette does not comprise an additional transit peptide in case in Table I, application no. 15, in column 6 in the same line as SEQ ID NO. 136943 is depicted, non-targeted is mentioned.

[75726] In an embodiment the present invention relates to an expresssion cassette comprising a) a promoter, preferably a promoter selected from the group consisting of Big35S, PCUbi, Super and USP, in particular Big35S; and b) the nucleic acid SEQ ID NO. 137387, or a homolog or fragment thereof, or a homolog thereof being depicted in Table I, application no. 15, column 8, in the same line as SEQ ID NO. 137387, preferably the coding region thereof, a homolog or a fragment thereof; which are operable linked.

[75727] In an embodiment thereof the expression cassette comprises in addition c) a nucleic acid molecule encoding a transit peptide, especially a plastidal transit petide in case in Table I, application no. 15, in column 6 in the same line as SEQ ID NO. 137387 is depicted, plastidic is mentioned, or a mitochondrial transit peptide in case in Table I, application no. 15, in column 6 in the same line as SEQ ID NO. 137387 is depicted, mitochondric is mentioned; which is operable linked, too.

[75728] In another embodiment thereof the expression cassette does not comprise an additional transit peptide in case in Table I, application no. 15, in column 6 in the same line as SEQ ID NO. 137387 is depicted, non-targeted is mentioned.

[75729] In an embodiment the present invention relates to an expresssion cassette comprising a) a promoter, preferably a promoter selected from the group consisting of Big35S, PCUbi, Super and USP, in particular p-Super; and b) the nucleic acid SEQ ID NO. 96779, or a homolog or fragment thereof, or a homolog thereof being depicted in Table I, application no. 15, column 8, in the same line as SEQ ID NO. 96779, preferably the coding region thereof, a homolog or a fragment thereof; which are operable linked.

[75730] In an embodiment thereof the expression cassette comprises in addition c) a nucleic acid molecule encoding a transit peptide, especially a plastidal transit petide in case in Table I, application no. 15, in column 6 in the same line as SEQ ID NO. 96779 is depicted, plastidic is mentioned, or a mitochondrial transit peptide in case in Table I, application no. 15, in column 6 in the same line as SEQ ID NO. 96779 is depicted, mitochondric is mentioned; which is operable linked, too.

[75731] In another embodiment thereof the expression cassette does not comprise an additional transit peptide in case in Table I, application no. 15, in column 6 in the same line as SEQ ID NO. 96779 is depicted, non-targeted is mentioned.

[75732] In an embodiment the present invention relates to an expresssion cassette comprising a) a promoter, preferably a promoter selected from the group consisting of Big35S, PCUbi, Super and USP, in particular p-Super; and b) the nucleic acid SEQ ID NO. 63264, or a homolog or fragment thereof, or a homolog thereof being depicted in Table I, application no. 15, column 8, in the same line as SEQ ID NO. 63264, preferably the coding region thereof, a homolog or a fragment thereof; which are operable linked.

[75733] In an embodiment thereof the expression cassette comprises in addition c) a nucleic acid molecule encoding a transit peptide, especially a plastidal transit petide in case in Table I, application no. 15, in column 6 in the same line as SEQ ID NO. 63264 is depicted, plastidic is mentioned, or a mitochondrial transit peptide in case in Table I, application no. 15, in column 6 in the same line as SEQ ID NO. 63264 is depicted, mitochondric is mentioned; which is operable linked, too.

[75734] In another embodiment thereof the expression cassette does not comprise an additional transit peptide in case in Table I, application no. 15, in column 6 in the same line as SEQ ID NO. 63264 is depicted, non-targeted is mentioned.

[75735] In an embodiment the present invention relates to an expresssion cassette comprising a) a promoter, preferably a promoter selected from the group consisting of Big35S, PCUbi, Super and USP, in particular Big35S; and b) the nucleic acid SEQ ID NO. 137498, or a homolog or fragment thereof, or a homolog thereof being depicted in Table I, application no. 15, column 8, in the same line as SEQ ID NO. 137498, preferably the coding region thereof, a homolog or a fragment thereof; which are operable linked.

[75736] In an embodiment thereof the expression cassette comprises in addition c) a nucleic acid molecule encoding a transit peptide, especially a plastidal transit petide in case in Table I, application no. 15, in column 6 in the same line as SEQ ID NO. 137498 is depicted, plastidic is mentioned, or a mitochondrial transit peptide in case in Table I, application no. 15, in column 6 in the same line as SEQ ID NO. 137498 is depicted, mitochondric is mentioned; which is operable linked, too.

[75737] In another embodiment thereof the expression cassette does not comprise an additional transit peptide in case in Table I, application no. 15, in column 6 in the same line as SEQ ID NO. 137498 is depicted, non-targeted is mentioned.

[75738] In an embodiment the present invention relates to an expresssion cassette comprising a) a promoter, preferably a promoter selected from the group consisting of Big35S, PCUbi, Super and USP, in particular p-PcUBI; and b) the nucleic acid SEQ ID NO. 63334, or a homolog or fragment thereof, or a homolog thereof being depicted in Table I, application no. 15, column 8, in the same line as SEQ ID NO. 63334, preferably the coding region thereof, a homolog or a fragment thereof; which are operable linked.

[75739] In an embodiment thereof the expression cassette comprises in addition c) a nucleic acid molecule encoding a transit peptide, especially a plastidal transit petide in case in Table I, application no. 15, in column 6 in the same line as SEQ ID NO. 63334 is depicted, plastidic is mentioned, or a mitochondrial transit peptide in case in Table I, application no. 15, in column 6 in the same line as SEQ ID NO. 63334 is depicted, mitochondric is mentioned; which is operable linked, too.

[75740] In another embodiment thereof the expression cassette does not comprise an additional transit peptide in case in Table I, application no. 15, in column 6 in the same line as SEQ ID NO. 63334 is depicted, non-targeted is mentioned.

[75741] In an embodiment the present invention relates to an expresssion cassette comprising a) a promoter, preferably a promoter selected from the group consisting of Big35S, PCUbi, Super and USP, in particular Big35S; and b) the nucleic acid SEQ ID NO. 64177, or a homolog or fragment thereof, or a homolog thereof being depicted in Table I, application no. 15, column 8, in the same line as SEQ ID NO. 64177, preferably the coding region thereof, a homolog or a fragment thereof; which are operable linked.

[75742] In an embodiment thereof the expression cassette comprises in addition c) a nucleic acid molecule encoding a transit peptide, especially a plastidal transit petide in case in Table I, application no. 15, in column 6 in the same line as SEQ ID NO. 64177 is depicted, plastidic is mentioned, or a mitochondrial transit peptide in case in Table I, application no. 15, in column 6 in the same line as SEQ ID NO. 64177 is depicted, mitochondric is mentioned; which is operable linked, too.

[75743] In another embodiment thereof the expression cassette does not comprise an additional transit peptide in case in Table I, application no. 15, in column 6 in the same line as SEQ ID NO. 64177 is depicted, non-targeted is mentioned.

[75744] In an embodiment the present invention relates to an expresssion cassette comprising a) a promoter, preferably a promoter selected from the group consisting of Big35S, PCUbi, Super and USP, in particular p-PcUBI; and b) the nucleic acid SEQ ID NO. 108487, or a homolog or fragment thereof, or a homolog thereof being depicted in Table I, application no. 15, column 8, in the same line as SEQ ID NO. 108487, preferably the coding region thereof, a homolog or a fragment thereof; which are operable linked.

[75745] In an embodiment thereof the expression cassette comprises in addition c) a nucleic acid molecule encoding a transit peptide, especially a plastidal transit petide in case in Table I, application no. 15, in column 6 in the same line as SEQ ID NO. 108487 is depicted, plastidic is mentioned, or a mitochondrial transit peptide in case in Table I, application no. 15, in column 6 in the same line as SEQ ID NO. 108487 is depicted, mitochondric is mentioned; which is operable linked, too.

[75746] In another embodiment thereof the expression cassette does not comprise an additional transit peptide in case in Table I, application no. 15, in column 6 in the same line as SEQ ID NO. 108487 is depicted, non-targeted is mentioned.

[75747] In an embodiment the present invention relates to an expresssion cassette comprising a) a promoter, preferably a promoter selected from the group consisting of Big35S, PCUbi, Super and USP, in particular p-Super; and b) the nucleic acid SEQ ID NO. 64315, or a homolog or fragment thereof, or a homolog thereof being depicted in Table I, application no. 15, column 8, in the same line as SEQ ID NO. 64315, preferably the coding region thereof, a homolog or a fragment thereof; which are operable linked.

[75748] In an embodiment thereof the expression cassette comprises in addition c) a nucleic acid molecule encoding a transit peptide, especially a plastidal transit petide in case in Table I, application no. 15, in column 6 in the same line as SEQ ID NO. 64315 is depicted, plastidic is mentioned, or a mitochondrial transit peptide in case in Table I, application no. 15, in column 6 in the same line as SEQ ID NO. 64315 is depicted, mitochondric is mentioned; which is operable linked, too.

[75749] In another embodiment thereof the expression cassette does not comprise an additional transit peptide in case in Table I, application no. 15, in column 6 in the same line as SEQ ID NO. 64315 is depicted, non-targeted is mentioned.

[75750] In an embodiment the present invention relates to an expresssion cassette comprising a) a promoter, preferably a promoter selected from the group consisting of Big35S, PCUbi, Super and USP, in particular p-USP; and b) the nucleic acid SEQ ID NO. 101855, or a homolog or fragment thereof, or a homolog thereof being depicted in Table I, application no. 15, column 8, in the same line as SEQ ID NO. 101855, preferably the coding region thereof, a homolog or a fragment thereof; which are operable linked.

[75751] In an embodiment thereof the expression cassette comprises in addition c) a nucleic acid molecule encoding a transit peptide, especially a plastidal transit petide in case in Table I, application no. 15, in column 6 in the same line as SEQ ID NO. 101855 is depicted, plastidic is mentioned, or a mitochondrial transit peptide in case in Table I, application no. 15, in column 6 in the same line as SEQ ID NO. 101855 is depicted, mitochondric is mentioned; which is operable linked, too.

[75752] In another embodiment thereof the expression cassette does not comprise an additional transit peptide in case in Table I, application no. 15, in column 6 in the same line as SEQ ID NO. 101855 is depicted, non-targeted is mentioned.

[75753] In an embodiment the present invention relates to an expresssion cassette comprising a) a promoter, preferably a promoter selected from the group consisting of Big35S, PCUbi, Super and USP, in particular p-Super; and b) the nucleic acid SEQ ID NO. 97620, or a homolog or fragment thereof, or a homolog thereof being depicted in Table I, application no. 15, column 8, in the same line as SEQ ID NO. 97620, preferably the coding region thereof, a homolog or a fragment thereof; which are operable linked.

[75754] In an embodiment thereof the expression cassette comprises in addition c) a nucleic acid molecule encoding a transit peptide, especially a plastidal transit petide in case in Table I, application no. 15, in column 6 in the same line as SEQ ID NO. 97620 is depicted, plastidic is mentioned, or a mitochondrial transit peptide in case in Table I, application no. 15, in column 6 in the same line as SEQ ID NO. 97620 is depicted, mitochondric is mentioned; which is operable linked, too.

[75755] In another embodiment thereof the expression cassette does not comprise an additional transit peptide in case in Table I, application no. 15, in column 6 in the same line as SEQ ID NO. 97620 is depicted, non-targeted is mentioned.

[75756] In an embodiment the present invention relates to an expresssion cassette comprising a) a promoter, preferably a promoter selected from the group consisting of Big35S, PCUbi, Super and USP, in particular p-Super; and b) the nucleic acid SEQ ID NO. 64546, or a homolog or fragment thereof, or a homolog thereof being depicted in Table I, application no. 15, column 8, in the same line as SEQ ID NO. 64546, preferably the coding region thereof, a homolog or a fragment thereof; which are operable linked.

[75757] In an embodiment thereof the expression cassette comprises in addition c) a nucleic acid molecule encoding a transit peptide, especially a plastidal transit petide in case in Table I, application no. 15, in column 6 in the same line as SEQ ID NO. 64546 is depicted, plastidic is mentioned, or a mitochondrial transit peptide in case in Table I, application no. 15, in column 6 in the same line as SEQ ID NO. 64546 is depicted, mitochondric is mentioned; which is operable linked, too.

[75758] In another embodiment thereof the expression cassette does not comprise an additional transit peptide in case in Table I, application no. 15, in column 6 in the same line as SEQ ID NO. 64546 is depicted, non-targeted is mentioned.

[75759] In an embodiment the present invention relates to an expresssion cassette comprising a) a promoter, preferably a promoter selected from the group consisting of Big35S, PCUbi, Super and USP, in particular p-Super; and b) the nucleic acid SEQ ID NO. 64964, or a homolog or fragment thereof, or a homolog thereof being depicted in Table I, application no. 15, column 8, in the same line as SEQ ID NO. 64964, preferably the coding region thereof, a homolog or a fragment thereof; which are operable linked.

[75760] In an embodiment thereof the expression cassette comprises in addition c) a nucleic acid molecule encoding a transit peptide, especially a plastidal transit petide in case in Table I, application no. 15, in column 6 in the same line as SEQ ID NO. 64964 is depicted, plastidic is mentioned, or a mitochondrial transit peptide in case in Table I, application no. 15, in column 6 in the same line as SEQ ID NO. 64964 is depicted, mitochondric is mentioned; which is operable linked, too.

[75761] In another embodiment thereof the expression cassette does not comprise an additional transit peptide in case in Table I, application no. 15, in column 6 in the same line as SEQ ID NO. 64964 is depicted, non-targeted is mentioned.

[75762] In an embodiment the present invention relates to an expresssion cassette comprising a) a promoter, preferably a promoter selected from the group consisting of Big35S, PCUbi, Super and USP, in particular p-PcUBI; and b) the nucleic acid SEQ ID NO. 97635, or a homolog or fragment thereof, or a homolog thereof being depicted in Table I, application no. 15, column 8, in the same line as SEQ ID NO. 97635, preferably the coding region thereof, a homolog or a fragment thereof; which are operable linked.

[75763] In an embodiment thereof the expression cassette comprises in addition c) a nucleic acid molecule encoding a transit peptide, especially a plastidal transit petide in case in Table I, application no. 15, in column 6 in the same line as SEQ ID NO. 97635 is depicted, plastidic is mentioned, or a mitochondrial transit peptide in case in Table I, application no. 15, in column 6 in the same line as SEQ ID NO. 97635 is depicted, mitochondric is mentioned; which is operable linked, too.

[75764] In another embodiment thereof the expression cassette does not comprise an additional transit peptide in case in Table I, application no. 15, in column 6 in the same line as SEQ ID NO. 97635 is depicted, non-targeted is mentioned.

[75765] In an embodiment the present invention relates to an expresssion cassette comprising a) a promoter, preferably a promoter selected from the group consisting of Big35S, PCUbi, Super and USP, in particular p-Super; and b) the nucleic acid SEQ ID NO. 90409, or a homolog or fragment thereof, or a homolog thereof being depicted in Table I, application no. 15, column 8, in the same line as SEQ ID NO. 90409, preferably the coding region thereof, a homolog or a fragment thereof; which are operable linked.

[75766] In an embodiment thereof the expression cassette comprises in addition c) a nucleic acid molecule encoding a transit peptide, especially a plastidal transit petide in case in Table I, application no. 15, in column 6 in the same line as SEQ ID NO. 90409 is depicted, plastidic is mentioned, or a mitochondrial transit peptide in case in Table I, application no. 15, in column 6 in the same line as SEQ ID NO. 90409 is depicted, mitochondric is mentioned; which is operable linked, too.

[75767] In another embodiment thereof the expression cassette does not comprise an additional transit peptide in case in Table I, application no. 15, in column 6 in the same line as SEQ ID NO. 90409 is depicted, non-targeted is mentioned.

[75768] In an embodiment the present invention relates to an expresssion cassette comprising a) a promoter, preferably a promoter selected from the group consisting of Big35S, PCUbi, Super and USP, in particular p-PcUBI; and b) the nucleic acid SEQ ID NO. 66274, or a homolog or fragment thereof, or a homolog thereof being depicted in Table I, application no. 15, column 8, in the same line as SEQ ID NO. 66274, preferably the coding region thereof, a homolog or a fragment thereof; which are operable linked.

[75769] In an embodiment thereof the expression cassette comprises in addition c) a nucleic acid molecule encoding a transit peptide, especially a plastidal transit petide in case in Table I, application no. 15, in column 6 in the same line as SEQ ID NO. 66274 is depicted, plastidic is mentioned, or a mitochondrial transit peptide in case in Table I, application no. 15, in column 6 in the same line as SEQ ID NO. 66274 is depicted, mitochondric is mentioned; which is operable linked, too.

[75770] In another embodiment thereof the expression cassette does not comprise an additional transit peptide in case in Table I, application no. 15, in column 6 in the same line as SEQ ID NO. 66274 is depicted, non-targeted is mentioned.

[75771] In an embodiment the present invention relates to an expresssion cassette comprising a) a promoter, preferably a promoter selected from the group consisting of Big35S, PCUbi, Super and USP, in particular p-PcUBI; and b) the nucleic acid SEQ ID NO. 90602, or a homolog or fragment thereof, or a homolog thereof being depicted in Table I, application no. 15, column 8, in the same line as SEQ ID NO. 90602, preferably the coding region thereof, a homolog or a fragment thereof; which are operable linked.

[75772] In an embodiment thereof the expression cassette comprises in addition c) a nucleic acid molecule encoding a transit peptide, especially a plastidal transit petide in case in Table I, application no. 15, in column 6 in the same line as SEQ ID NO. 90602 is depicted, plastidic is mentioned, or a mitochondrial transit peptide in case in Table I, application no. 15, in column 6 in the same line as SEQ ID NO. 90602 is depicted, mitochondric is mentioned; which is operable linked, too.

[75773] In another embodiment thereof the expression cassette does not comprise an additional transit peptide in case in Table I, application no. 15, in column 6 in the same line as SEQ ID NO. 90602 is depicted, non-targeted is mentioned.

[75774] In an embodiment the present invention relates to an expresssion cassette comprising a) a promoter, preferably a promoter selected from the group consisting of Big35S, PCUbi, Super and USP, in particular p-PcUBI; and b) the nucleic acid SEQ ID NO. 137502, or a homolog or fragment thereof, or a homolog thereof being depicted in Table I, application no. 15, column 8, in the same line as SEQ ID NO. 137502, preferably the coding region thereof, a homolog or a fragment thereof; which are operable linked.

[75775] In an embodiment thereof the expression cassette comprises in addition c) a nucleic acid molecule encoding a transit peptide, especially a plastidal transit petide in case in Table I, application no. 15, in column 6 in the same line as SEQ ID NO. 137502 is depicted, plastidic is mentioned, or a mitochondrial transit peptide in case in Table I, application no. 15, in column 6 in the same line as SEQ ID NO. 137502 is depicted, mitochondric is mentioned; which is operable linked, too.

[75776] In another embodiment thereof the expression cassette does not comprise an additional transit peptide in case in Table I, application no. 15, in column 6 in the same line as SEQ ID NO. 137502 is depicted, non-targeted is mentioned.

[75777] In an embodiment the present invention relates to an expresssion cassette comprising a) a promoter, preferably a promoter selected from the group consisting of Big35S, PCUbi, Super and USP, in particular p-Super; and b) the nucleic acid SEQ ID NO. 66695, or a homolog or fragment thereof, or a homolog thereof being depicted in Table I, application no. 15, column 8, in the same line as SEQ ID NO. 66695, preferably the coding region thereof, a homolog or a fragment thereof; which are operable linked.

[75778] In an embodiment thereof the expression cassette comprises in addition c) a nucleic acid molecule encoding a transit peptide, especially a plastidal transit petide in case in Table I, application no. 15, in column 6 in the same line as SEQ ID NO. 66695 is depicted, plastidic is mentioned, or a mitochondrial transit peptide in case in Table I, application no. 15, in column 6 in the same line as SEQ ID NO. 66695 is depicted, mitochondric is mentioned; which is operable linked, too.

[75779] In another embodiment thereof the expression cassette does not comprise an additional transit peptide in case in Table I, application no. 15, in column 6 in the same line as SEQ ID NO. 66695 is depicted, non-targeted is mentioned.

[75780] In an embodiment the present invention relates to an expresssion cassette comprising a) a promoter, preferably a promoter selected from the group consisting of Big35S, PCUbi, Super and USP, in particular p-Super; and b) the nucleic acid SEQ ID NO. 137547, or a homolog or fragment thereof, or a homolog thereof being depicted in Table I, application no. 15, column 8, in the same line as SEQ ID NO. 137547, preferably the coding region thereof, a homolog or a fragment thereof; which are operable linked.

[75781] In an embodiment thereof the expression cassette comprises in addition c) a nucleic acid molecule encoding a transit peptide, especially a plastidal transit petide in case in Table I, application no. 15, in column 6 in the same line as SEQ ID NO. 137547 is depicted, plastidic is mentioned, or a mitochondrial transit peptide in case in Table I, application no. 15, in column 6 in the same line as SEQ ID NO. 137547 is depicted, mitochondric is mentioned; which is operable linked, too.

[75782] In another embodiment thereof the expression cassette does not comprise an additional transit peptide in case in Table I, application no. 15, in column 6 in the same line as SEQ ID NO. 137547 is depicted, non-targeted is mentioned.

[75783] In an embodiment the present invention relates to an expresssion cassette comprising a) a promoter, preferably a promoter selected from the group consisting of Big35S, PCUbi, Super and USP, in particular p-Super; and b) the nucleic acid SEQ ID NO. 129123, or a homolog or fragment thereof, or a homolog thereof being depicted in Table I, application no. 15, column 8, in the same line as SEQ ID NO. 129123, preferably the coding region thereof, a homolog or a fragment thereof; which are operable linked.

[75784] In an embodiment thereof the expression cassette comprises in addition c) a nucleic acid molecule encoding a transit peptide, especially a plastidal transit petide in case in Table I, application no. 15, in column 6 in the same line as SEQ ID NO. 129123 is depicted, plastidic is mentioned, or a mitochondrial transit peptide in case in Table I, application no. 15, in column 6 in the same line as SEQ ID NO. 129123 is depicted, mitochondric is mentioned; which is operable linked, too.

[75785] In another embodiment thereof the expression cassette does not comprise an additional transit peptide in case in Table I, application no. 15, in column 6 in the same line as SEQ ID NO. 129123 is depicted, non-targeted is mentioned.

[75786] In an embodiment the present invention relates to an expresssion cassette comprising a) a promoter, preferably a promoter selected from the group consisting of Big35S, PCUbi, Super and USP, in particular p-Super; and b) the nucleic acid SEQ ID NO. 15175, or a homolog or fragment thereof, or a homolog thereof being depicted in Table I, application no. 15, column 8, in the same line as SEQ ID NO. 15175, preferably the coding region thereof, a homolog or a fragment thereof; which are operable linked.

[75787] In an embodiment thereof the expression cassette comprises in addition c) a nucleic acid molecule encoding a transit peptide, especially a plastidal transit petide in case in Table I, application no. 15, in column 6 in the same line as SEQ ID NO. 15175 is depicted, plastidic is mentioned, or a mitochondrial transit peptide in case in Table I, application no. 15, in column 6 in the same line as SEQ ID NO. 15175 is depicted, mitochondric is mentioned; which is operable linked, too.

[75788] In another embodiment thereof the expression cassette does not comprise an additional transit peptide in case in Table I, application no. 15, in column 6 in the same line as SEQ ID NO. 15175 is depicted, non-targeted is mentioned.

[75789] In an embodiment the present invention relates to an expresssion cassette comprising a) a promoter, preferably a promoter selected from the group consisting of Big35S, PCUbi, Super and USP, in particular p-Super; and b) the nucleic acid SEQ ID NO. 137818, or a homolog or fragment thereof, or a homolog thereof being depicted in Table I, application no. 15, column 8, in the same line as SEQ ID NO. 137818, preferably the coding region thereof, a homolog or a fragment thereof; which are operable linked.

[75790] In an embodiment thereof the expression cassette comprises in addition c) a nucleic acid molecule encoding a transit peptide, especially a plastidal transit petide in case in Table I, application no. 15, in column 6 in the same line as SEQ ID NO. 137818 is depicted, plastidic is mentioned, or a mitochondrial transit peptide in case in Table I, application no. 15, in column 6 in the same line as SEQ ID NO. 137818 is depicted, mitochondric is mentioned; which is operable linked, too.

[75791] In another embodiment thereof the expression cassette does not comprise an additional transit peptide in case in Table I, application no. 15, in column 6 in the same line as SEQ ID NO. 137818 is depicted, non-targeted is mentioned.

[75792] In an embodiment the present invention relates to an expresssion cassette comprising a) a promoter, preferably a promoter selected from the group consisting of Big35S, PCUbi, Super and USP, in particular p-Super; and b) the nucleic acid SEQ ID NO. 15179, or a homolog or fragment thereof, or a homolog thereof being depicted in Table I, application no. 15, column 8, in the same line as SEQ ID NO. 15179, preferably the coding region thereof, a homolog or a fragment thereof; which are operable linked.

[75793] In an embodiment thereof the expression cassette comprises in addition c) a nucleic acid molecule encoding a transit peptide, especially a plastidal transit petide in case in Table I, application no. 15, in column 6 in the same line as SEQ ID NO. 15179 is depicted, plastidic is mentioned, or a mitochondrial transit peptide in case in Table I, application no. 15, in column 6 in the same line as SEQ ID NO. 15179 is depicted, mitochondric is mentioned; which is operable linked, too.

[75794] In another embodiment thereof the expression cassette does not comprise an additional transit peptide in case in Table I, application no. 15, in column 6 in the same line as SEQ ID NO. 15179 is depicted, non-targeted is mentioned.

[75795] In an embodiment the present invention relates to an expresssion cassette comprising a) a promoter, preferably a promoter selected from the group consisting of Big35S, PCUbi, Super and USP, in particular Big35S; and b) the nucleic acid SEQ ID NO. 92668, or a homolog or fragment thereof, or a homolog thereof being depicted in Table I, application no. 15, column 8, in the same line as SEQ ID NO. 92668, preferably the coding region thereof, a homolog or a fragment thereof; which are operable linked.

[75796] In an embodiment thereof the expression cassette comprises in addition c) a nucleic acid molecule encoding a transit peptide, especially a plastidal transit petide in case in Table I, application no. 15, in column 6 in the same line as SEQ ID NO. 92668 is depicted, plastidic is mentioned, or a mitochondrial transit peptide in case in Table I, application no. 15, in column 6 in the same line as SEQ ID NO. 92668 is depicted, mitochondric is mentioned; which is operable linked, too.

[75797] In another embodiment thereof the expression cassette does not comprise an additional transit peptide in case in Table I, application no. 15, in column 6 in the same line as SEQ ID NO. 92668 is depicted, non-targeted is mentioned.

[75798] In an embodiment the present invention relates to an expresssion cassette comprising a) a promoter, preferably a promoter selected from the group consisting of Big35S, PCUbi, Super and USP, in particular p-USP; and b) the nucleic acid SEQ ID NO. 93218, or a homolog or fragment thereof, or a homolog thereof being depicted in Table I, application no. 15, column 8, in the same line as SEQ ID NO. 93218, preferably the coding region thereof, a homolog or a fragment thereof; which are operable linked.

[75799] In an embodiment thereof the expression cassette comprises in addition c) a nucleic acid molecule encoding a transit peptide, especially a plastidal transit petide in case in Table I, application no. 15, in column 6 in the same line as SEQ ID NO. 93218 is depicted, plastidic is mentioned, or a mitochondrial transit peptide in case in Table I, application no. 15, in column 6 in the same line as SEQ ID NO. 93218 is depicted, mitochondric is mentioned; which is operable linked, too.

[75800] In another embodiment thereof the expression cassette does not comprise an additional transit peptide in case in Table I, application no. 15, in column 6 in the same line as SEQ ID NO. 93218 is depicted, non-targeted is mentioned.

[75801] In an embodiment the present invention relates to an expresssion cassette comprising a) a promoter, preferably a promoter selected from the group consisting of Big35S, PCUbi, Super and USP, in particular p-PcUBI; and b) the nucleic acid SEQ ID NO. 15187, or a homolog or fragment thereof, or a homolog thereof being depicted in Table I, application no. 15, column 8, in the same line as SEQ ID NO. 15187, preferably the coding region thereof, a homolog or a fragment thereof; which are operable linked.

[75802] In an embodiment thereof the expression cassette comprises in addition c) a nucleic acid molecule encoding a transit peptide, especially a plastidal transit petide in case in Table I, application no. 15, in column 6 in the same line as SEQ ID NO. 15187 is depicted, plastidic is mentioned, or a mitochondrial transit peptide in case in Table I, application no. 15, in column 6 in the same line as SEQ ID NO. 15187 is depicted, mitochondric is mentioned; which is operable linked, too.

[75803] In another embodiment thereof the expression cassette does not comprise an additional transit peptide in case in Table I, application no. 15, in column 6 in the same line as SEQ ID NO. 15187 is depicted, non-targeted is mentioned.

[75804] In an embodiment the present invention relates to an expresssion cassette comprising a) a promoter, preferably a promoter selected from the group consisting of Big35S, PCUbi, Super and USP, in particular p-PcUBI; and b) the nucleic acid SEQ ID NO. 69, or a homolog or fragment thereof, or a homolog thereof being depicted in Table I, application no. 15, column 8, in the same line as SEQ ID NO. 69, preferably the coding region thereof, a homolog or a fragment thereof; which are operable linked.

[75805] In an embodiment thereof the expression cassette comprises in addition c) a nucleic acid molecule encoding a transit peptide, especially a plastidal transit petide in case in Table I, application no. 15, in column 6 in the same line as SEQ ID NO. 69 is depicted, plastidic is mentioned, or a mitochondrial transit peptide in case in Table I, application no. 15, in column 6 in the same line as SEQ ID NO. 69 is depicted, mitochondric is mentioned; which is operable limiant,them.embodiment thereof the expression cassette does not comprise an additional transit peptide in case in Table I, application no. 15, in column 6 in the same line as SEQ ID NO. 69 is depicted, non-targeted is mentioned.

[75806] In an embodiment the present invention relates to an expresssion cassette comprising a) a promoter, preferably a promoter selected from the group consisting of Big35S, PCUbi, Super and USP, in particular p-PcUBI; and b) the nucleic acid SEQ ID NO. 15532, or a homolog or fragment thereof, or a homolog thereof being depicted in Table I, application no. 15, column 8, in the same line as SEQ ID NO. 15532, preferably the coding region thereof, a homolog or a fragment thereof; which are operable linked.

[75807] In an embodiment thereof the expression cassette comprises in addition c) a nucleic acid molecule encoding a transit peptide, especially a plastidal transit petide in case in Table I, application no. 15, in column 6 in the same line as SEQ ID NO. 15532 is depicted, plastidic is mentioned, or a mitochondrial transit peptide in case in Table I, application no. 15, in column 6 in the same line as SEQ ID NO. 15532 is depicted, mitochondric is mentioned; which is operable linked, too.

[75808] In another embodiment thereof the expression cassette does not comprise an additional transit peptide in case in Table I, application no. 15, in column 6 in the same line as SEQ ID NO. 15532 is depicted, non-targeted is mentioned.

[75809] In an embodiment the present invention relates to an expresssion cassette comprising a) a promoter, preferably a promoter selected from the group consisting of Big35S, PCUbi, Super and USP, in particular p-PcUBI; and b) the nucleic acid SEQ ID NO. 16883, or a homolog or fragment thereof, or a homolog thereof being depicted in Table I, application no. 15, column 8, in the same line as SEQ ID NO. 16883, preferably the coding region thereof, a homolog or a fragment thereof; which are operable linked.

[75810] In an embodiment thereof the expression cassette comprises in addition c) a nucleic acid molecule encoding a transit peptide, especially a plastidal transit petide in case in Table I, application no. 15, in column 6 in the same line as SEQ ID NO. 16883 is depicted, plastidic is mentioned, or a mitochondrial transit peptide in case in Table I, application no. 15, in column 6 in the same line as SEQ ID NO. 16883 is depicted, mitochondric is mentioned; which is operable linked, too.

[75811] In another embodiment thereof the expression cassette does not comprise an additional transit peptide in case in Table I, application no. 15, in column 6 in the same line as SEQ ID NO. 16883 is depicted, non-targeted is mentioned.

[75812] [0165.1.7.15] to [0170.1.7.15] for the disclosure of these paragraphs see [0165.1.7.7] to [0170.1.7.7] above

[75813] The invention further provides a vector, comprising a nucleic acid molecule comprising 1) a nucleic acid molecule selected from the group consisting of:
[75814] (a) a nucleic acid molecule encoding a polypeptide shown in Table II, column 5 or 8, application no. 15, preferably shown in Table II A, application no. 15, in column 5, or in Table II A, application no. 15, column 8, or in Table II B, application no. 15, column 8, or a homolog or a fragment thereof;
[75815] (b) a nucleic acid molecule shown in Table I, application no. 15, column 5 or 8, preferably shown in Table I A, application no. 15, in column 5, or in Table I A, application no. 15, column 8, or in Table I B, application no. 15, column 8, preferably the coding region thereof, or a homolog or a fragment thereof;
[75816] (c) a nucleic acid molecule, which, as a result of the degeneracy of the genetic code, can be derived from a polypeptide sequence depicted in column 5 or 8 of Table II, application no. 15, preferably shown in Table II A, application no. 15, in column 5, or in Table II A, application no. 15, column 8, or in Table II B, application no. 15, column 8;
[75817] (d) a nucleic acid molecule having at least 30% identity, preferably at least 40%, 50%, 60%, 70%, 75%, 80%, 85%, 90%, 95%, 96%, 97%, 98%, 99%, 99.5%, with the nucleic acid molecule sequence of a polynucleotide comprising the nucleic acid molecule shown in column 5 or 8 of Table I, application no. 15, preferably shown in Table I A, application no. 15, in column 5, or in Table I A, application no. 15, column 8, or in Table I B, application no. 15, column 8, preferably the coding region thereof;
[75818] (e) a nucleic acid molecule encoding a polypeptide having at least 30% identity, preferably at least 40%, 50% 60%, 70%, 75%, 80%, 85%, 90%, 95%, 96%, 97%, 98%, 99%, 99.5%, identity with the amino acid sequence of the polypeptide encoded by the nucleic acid molecule of (a), (b), (c), or (d);
[75819] (f) a nucleic acid molecule which hybridizes with a nucleic acid molecule of (a), (b), (c), (d), or (e) under stringent hybridization conditions;
[75820] (g) a nucleic acid molecule encoding a polypeptide which can be isolated with the aid of monoclonal or polyclonal antibodies made against a polypeptide encoded by one of the nucleic acid molecules of (a), (b), (c), (d), (e) or (f);
[75821] (h) a nucleic acid molecule encoding a polypeptide comprising the consensus sequence or one or more polypeptide motifs as shown in column 8 of Table IV, application no. 15;
[75822] (i) a nucleic acid molecule encoding a polypeptide having the activity represented by a protein as depicted in column 5 of Table II, application no. 15;
[75823] (j) a nucleic acid molecule comprising a polynucleotide which is obtained by amplifying a cDNA library or a genomic library using the primers in Table III, application no. 15, column 8;
[75824] and
[75825] (k) nucleic acid molecule which is obtainable by screening a suitable nucleic acid library, especially a cDNA library and/or a genomic library, under stringent hybridization conditions with a probe comprising one of the sequences of the nucleic acid molecule of (a), (b), (c), (d), (e), (f), (g), (h), (i) or (j) or with a fragment thereof having at least 15 nt, preferably 20 nt, 30 nt, 50 nt, 100 nt, 200 nt, 500 nt, 1000 nt, 1500 nt, 2000 nt or 3000 nt of the nucleic acid molecule complementary to a nucleic acid sequence characterized in (a), (b), (c), (d), (e), (f), (g), (h), (i) or (j);
[75826] or a nucleic acid molecule comprising a sequence which is complementary thereto.
   (All the references to Tables I to IV are references to the corresponding lines of Tables I to IV.)

[75827] In a preferred embodiment of said vector said nucleic acid molecule according to 1 (a), (b), (c), (d), (e), (f), (g), (h), (i), (j) or (k) encodes a polypeptide which has the activity of the respective polypeptide represented by a protein comprising a polypeptide as depicted in the respective line in column 5 of Table II, application no. 15.

[75828] In another preferred embodiment of said vector said nucleic acid molecule according to 1 (a), (b), (c), (d), (e), (f), (g), (h), (i), (j) or (k) confers a generation or an increase of the respective fine chemical in a non-human organism or a part thereof as compared to a corresponding wildtype non-human organism or part thereof.

[75829] In another preferred embodiment of said vector said nucleic acid molecule according to 1 (a), (b), (c), (d), (e), (f), (g), (h), (i), (j) or (k) encodes a polypeptide which has the activity of the respective polypeptide represented by a protein as depicted in the respective line in column 5 of Table II, application no. 15, and confers a generation or an increase of the respective fine chemical in a non-human organism or a part thereof as compared to a corresponding wild-type non-human organism or part thereof.

[75830] In another embodiment thereof said vector comprises beneath said nucleic acid molecule according to 1 (a), (b), (c), (d), (e), (f), (g), (h), (i), (j) or (k), a promoter, preferably a promoter selected from the group consisting of Big35S, PCUbi, Super and USP, which are operable linked.

[75831] In a preferred embodiment thereof said vector comprises beneath said nucleic acid molecule according to 1 (a), (b), (c), (d), (e), (f), (g), (h), (i), (j) or (k), a promoter, preferably a promoter selected from the group consisting of Big35S, PCUbi, Super and USP, which are operable linked; and said nucleic acid molecule according to 1 (a), (b), (c), (d), (e), (f), (g), (h), (i), (j) or (k) encodes a polypeptide which has the activity of the respective polypeptide represented by a protein comprising a polypeptide as depicted in the respective line in column 5 of Table II, application no. 15.

[75832] In another preferred embodiment thereof said vector comprises beneath said nucleic acid molecule according to 1 (a), (b), (c), (d), (e), (f), (g), (h), (i), (j) or (k), a promoter, preferably a promoter selected from the group consisting of Big35S, PCUbi, Super and USP, which are operable linked; and said nucleic acid molecule according to 1 (a), (b), (c), (d), (e), (f), (g), (h), (i), (j) or (k) confers a generation or an increase of the respective fine chemical in a non-human organism or a part thereof as compared to a corresponding wild-type non-human organism or part thereof.

[75833] In another preferred embodiment thereof said vector comprises beneath said nucleic acid molecule according to 1 (a), (b), (c), (d), (e), (f), (g), (h), (i), (j) or (k), a promoter, preferably a promoter selected from the group consisting of Big35S, PCUbi, Super and USP, which are operable linked; and said nucleic acid molecule according to 1 (a), (b), (c), (d), (e), (f), (g), (h), (i), (j) or (k) encodes a polypeptide which has the activity of the respective polypeptide represented by a protein as depicted in the respective line in column 5 of Table II, application no. 15, and confers a generation or an increase of the respective fine chemical in a non-human organism or a part thereof as compared to a corresponding wild-type non-human organism or part thereof.

[75834] In another embodiment thereof said vector comprises beneath said nucleic acid molecule according to 1 (a), (b), (c), (d), (e), (f), (g), (h), (i), (j) or (k), a nucleic acid molecule encoding a transit peptide, preferably encoding a plastidal transit peptide, especially in case in column 6 of Table I, application no. 15, in the same line as of the respective nucleic acid molecule according to 1) “plastidic” is depicted, or encoding a mitochondrial transit peptide, especially in case in column 6 of Table I, application no. 15, in the same line as of the respective nucleic acid molecule according to 1) “mitochondric” is depicted, which are operable linked.

[75835] In another embodiment thereof said vector does not comprise beneath said nucleic acid molecule according to 1 (a), (b), (c), (d), (e), (f), (g), (h), (i), (j) or (k), a nucleic acid molecule encoding a transit peptide in case in column 6 of Table I, application no. 15, in the same line as of the respective nucleic acid molecule according to 1) “non-targeted” is depicted.

[75836] In another embodiment thereof said vector comprises beneath said nucleic acid molecule according to 1 (a), (b), (c), (d), (e), (f), (g), (h), (i), (j) or (k), and a promoter, preferably a promoter selected from the group consisting of Big35S, PCUbi, Super and USP; a nucleic acid molecule encoding a transit peptide, preferably encoding a plastidal transit peptide, especially in case in column 6 of Table I, application no. 15, in the same line as of the respective nucleic acid molecule according to 1) “plastidic” is depicted, or encoding a mitochondrial transit peptide, especially in case in column 6 of Table I, application no. 15, in the same line as of the respective nucleic acid molecule according to 1) “mitochondric” is depicted, which are operable linked.

[75837] In another embodiment thereof said vector does not comprise beneath said nucleic acid molecule according to 1 (a), (b), (c), (d), (e), (f), (g), (h), (i), (j) or (k), and a promoter, preferably a promoter selected from the group consisting of Big35S, PCUbi, Super and USP, which are operable linked; a nucleic acid molecule encoding a transit peptide, especially in case in column 6 of Table I, application no. 15, in the same line as of the respective nucleic acid molecule according to 1) “non-targeted” is depicted.

[75838] In another embodiment thereof said vector comprises beneath said nucleic acid molecule according to 1 (a), (b), (c), (d), (e), (f), (g), (h), (i), (j) or (k), and a promoter, preferably a promoter selected from the group consisting of Big35S, PCUbi, Super and USP; a nucleic acid molecule encoding a transit peptide, preferably encoding a plastidal transit peptide, especially in case in column 6 of Table I, application no. 15, in the same line as of the respective nucleic acid molecule according to 1) “plastidic” is depicted, or encoding a mitochondrial transit peptide, especially in case in column 6 of Table I, application no. 15, in the same line as of the respective nucleic acid molecule according to 1) “mitochondric” is depicted, which are operable linked; and wherein said nucleic acid molecule according to 1 (a), (b), (c), (d), (e), (f), (g), (h), (i), (j) or (k) encodes a polypeptide which has the activity of the respective polypeptide represented by a protein comprising a polypeptide as depicted in column 5 of Table II, application no. 15 (in the same line).

[75839] In another embodiment thereof said vector does not comprise beneath said nucleic acid molecule according to 1 (a), (b), (c), (d), (e), (f), (g), (h), (i), (j) or (k), and a promoter, preferably a promoter selected from the group consisting of Big35S, PCUbi, Super and USP, which are operatively linked; a nucleic acid molecule encoding a transit peptide, especially in case in column 6 of Table I, application no. 15, in the same line as of the respective nucleic acid molecule according to 1) “non-targeted” is depicted; and wherein said nucleic acid molecule according to 1 (a), (b), (c), (d), (e), (f), (g), (h), (i), (j) or (k) encodes a polypeptide which has the activity of the respective polypeptide represented by a protein comprising a polypeptide as depicted in column 5 of Table II, application no. 15.

[75840] In another embodiment thereof said vector comprises beneath said nucleic acid molecule according to 1 (a), (b), (c), (d), (e), (f), (g), (h), (i), (j) or (k), and a promoter, preferably a promoter selected from the group consisting of Big35S, PCUbi, Super and USP; a nucleic acid molecule encoding a transit peptide, preferably encoding a plastidal transit peptide, especially in case in column 6 of Table I, application no. 15, in the same line as of the respective nucleic acid molecule according to 1) “plastidic” is depicted, or encoding a mitochondrial transit peptide, especially in case in column 6 of Table I, application no. 15, in the same line as of the respective nucleic acid molecule according to 1) “mitochondric” is depicted, which are operable linked; and wherein said nucleic acid molecule according to 1 (a), (b), (c), (d), (e), (f), (g), (h), (i), (j) or (k) confers a generation or an increase of the respective fine chemical in a non-human organism or a part thereof as compared to a corresponding wild-type non-human organism or part thereof.

[75841] In another embodiment thereof said vector does not comprise beneath said nucleic acid molecule according to 1 (a), (b), (c), (d), (e), (f), (g), (h), (i), (j) or (k), and a promoter, preferably a promoter selected from the group consisting of Big35S, PCUbi, Super and USP, which are operatively linked; a nucleic acid molecule encoding a transit peptide, especially in case in column 6 of Table I, application no. 15, in the same line as of the respective nucleic acid molecule according to 1) “non-targeted” is depicted; and wherein said nucleic acid molecule according to 1 (a), (b), (c), (d), (e), (f), (g), (h), (i), (j) or (k) confers a generation or an increase of the respective fine chemical in a non-human organism or a part thereof as compared to a corresponding wild-type non-human organism or part thereof.

[75842] In another embodiment thereof said vector comprises beneath said nucleic acid molecule according to 1 (a), (b), (c), (d), (e), (f), (g), (h), (i), (j) or (k), and a promoter, preferably a promoter selected from the group consisting of Big35S, PCUbi, Super and USP; a nucleic acid molecule encoding a transit peptide, preferably encoding a plastidal transit peptide, especially in case in column 6 of Table I, application no. 15, in the same line as of the respective nucleic acid molecule according to 1) “plastidic” is depicted, or encoding a mitochondrial transit peptide, especially in case in column 6 of Table I, application no. 15, in the same line as of the respective nucleic acid molecule according to 1) “mitochondric” is depicted, which are operable linked; and wherein said nucleic acid molecule according to 1 (a), (b), (c), (d), (e), (f), (g), (h), (i), (j) or (k) encodes a polypeptide which has the activity of the respective polypeptide represented by a protein as depicted in column 5 of Table II application no. 15 and confers a generation or an increase of the respective fine chemical in a non-human organism or a part thereof as compared to a corresponding wild-type non-human organism or part thereof.

[75843] In another embodiment thereof said vector does not comprise beneath said nucleic acid molecule according to 1 (a), (b), (c), (d), (e), (f), (g), (h), (i), (j) or (k), and a promoter, preferably a promoter selected from the group consisting of Big35S, PCUbi, Super and USP, which are operatively linked; a nucleic acid molecule encoding a transit peptide, especially in case in column 6 of Table I, application no. 15, in the same line as of the respective nucleic acid molecule according to 1) “non-targeted” is depicted; and wherein said nucleic acid molecule according to 1 (a), (b), (c), (d), (e), (f), (g), (h), (i), (j) or (k) encodes a polypeptide which has the activity of the respective polypeptide represented by a protein as depicted in column 5 of Table II application no. 15 (in the same line) and confers a generation or an increase of the respective fine chemical in a non-human organism or a part thereof as compared to a corresponding wild-type non-human organism or part thereof.

[75844] In a preferred embodiment of said vector said nucleic acid molecule according to 1 (a), (b), (c), (d), (e), (f), (g), (h), (i), (j) or (k), said promoter and optionally said nucleic acid molecule encoding a transit peptide are encompassed in an expression cassette. Accordingly in an embodiment the invention provides a vector comprising an expression cassette comprising said nucleic acid molecule according to 1 (a), (b), (c), (d), (e), (f), (g), (h), (i), (j) or (k), said promoter and optionally said a nucleic acid molecule encoding a transit peptide, operable linked. Said expression cassette may encompass a terminator, too.

[75845] The invention further provides a vector comprising a nucleic acid molecule comprising 1) a nucleic acid molecule selected from the group consisting of:
[75846] (a) a nucleic acid molecule encoding a polypeptide shown in Table II, column 5 or 8, application no. 15, preferably shown in Table II A, application no. 15, in column 5, or in Table II A, application no. 15, column 8, or in Table II B, application no. 15, column 8, or a homolog or a fragment thereof;
[75847] (b) a nucleic acid molecule shown in Table I, application no. 15, column 5 or 8, preferably shown in Table I A, application no. 15, in column 5, or in Table I A, application no. 15, column 8, or in Table I B, application no. 15, column 8, preferably the coding region thereof, or a homolog or a fragment thereof;
[75848] (c) a nucleic acid molecule, which, as a result of the degeneracy of the genetic code, can be derived from a polypeptide sequence depicted in column 5 or 8 of Table II, application no. 15, preferably shown in Table II A, application no. 15, in column 5, or in Table II A, application no. 15, column 8, or in Table II B, application no. 15, column 8;
[75849] (d) a nucleic acid molecule having at least 30% identity, preferably at least 40%, 50%, 60%, 70%, 75%, 80%, 85%, 90%, 95%, 96%, 97%, 98%, 99%, 99.5%, with the nucleic acid molecule sequence of a polynucleotide comprising the nucleic acid molecule shown in column 5 or 8 of Table I, application no. 15, preferably shown in Table I A, application no. 15, in column 5, or in Table I A, application no. 15, column 8, or in Table I B, application no. 15, column 8, preferably the coding region thereof;
[75850] (e) a nucleic acid molecule encoding a polypeptide having at least 30% identity, preferably at least 40%, 50% 60%, 70%, 75%, 80%, 85%, 90%, 95%, 96%, 97%, 98%, 99%, 99.5%, identity with the amino acid sequence of the polypeptide encoded by the nucleic acid molecule of (a), (b), (c), or (d);
[75851] (f) a nucleic acid molecule which hybridizes with a nucleic acid molecule of (a), (b), (c), (d), or (e) under stringent hybridization conditions;
[75852] (g) a nucleic acid molecule encoding a polypeptide which can be isolated with the aid of monoclonal or polyclonal antibodies made against a polypeptide encoded by one of the nucleic acid molecules of (a), (b), (c), (d), (e) or (f);
[75853] (h) a nucleic acid molecule encoding a polypeptide comprising the consensus sequence or one or more polypeptide motifs as shown in column 8 of Table IV, application no. 15;
[75854] (i) a nucleic acid molecule encoding a polypeptide having the activity represented by a protein as depicted in column 5 of Table II, application no. 15;
[75855] (j) a nucleic acid molecule comprising a polynucleotide which is obtained by amplifying a cDNA library or a genomic library using the primers in Table III, application no. 15, column 8;
[75856] and
[75857] (k) nucleic acid molecule which is obtainable by screening a suitable nucleic acid library, especially a cDNA library and/or a genomic library, under stringent hybridization conditions with a probe comprising one of the sequences of the nucleic acid molecule of (a), (b), (c), (d), (e), (f), (g), (h), (i) or (j) or with a fragment thereof having at least 15 nt, preferably 20 nt, 30 nt, 50 nt, 100 nt, 200 nt, 500 nt, 1000 nt, 1500 nt, 2000 nt or 3000 nt of the nucleic acid molecule complementary to a nucleic acid sequence characterized in (a), (b), (c), (d), (e), (f), (g), (h), (i) or (j);
[75858] or a nucleic acid molecule comprising a sequence which is complementary thereto;
   whereby, preferably, the nucleic acid molecule according to 1 (a), (b), (c), (d), (e), (f), (g), (h), (i), (j) or (k) distinguishes over the sequence depicted in Table I A and/or I B, application no. 15, column 5 or 8, or the coding region thereof, by one or more nucleotides (especially but not exceeding 5%, preferably 4%, 3%, 2%, 1%, 0.5%, 0.2% or 0.1%). In an embodiment, the nucleic acid molecule of the invention does not consist of the sequence shown in Table I A and/or I B, application no. 15, column 5 or 8, or the coding region thereof, respectively. In another embodiment, the nucleic acid molecule of the present invention, preferably the coding region thereof, is 30%, 40%, 50%, 60%, 70%, 80%, 90%, 95% identical but less than 100%, 99.999%, 99.99%, 99.9%, 99%, 98%, 97%, 96% or 95% identical to the sequence shown in Table I A and/or I B, application no. 15, column 5 or 8, or the coding region thereof, respectively. In a further embodiment the nucleic acid molecule does not encode the polypeptide sequence shown in Table II A and/or II B, application no. 15, column 5 or 8 but homologs thereof. Accordingly, in one embodiment, the nucleic acid molecule of the present invention encodes in one embodiment a polypeptide which differs at least in one or more amino acids (especially but not exceeding 5%, preferably 4%, 3%, 2%, 1%, 0.5%, 0.2% or 0.1%) from the polypeptide shown in Table II, application no. 15, column 5 or 8 and does not encode a protein of the sequence shown in Table II A and/or II B, application no. 15, column 5 or 8.

[75859] Accordingly, in one embodiment, the protein encoded by a sequence of a nucleic acid according to (a), (b), (c), (d), (e), (f), (g), (h), (i), (j) or (k) does not consist of the sequence shown in Table I A and/or I B, application no. 15, column 5 and 8, or the coding region thereof. In a further embodiment, the protein of the present invention is at least 30%,40%, 50%, 60%, 70%, 80%, 90%, 95% identical to protein sequence depicted in Table II A and/or II B, application no. 15, column 5 or 8 but less than 100%, preferably less than 99.999%, 99.99% or 99.9%, more preferably less than 99%, 985, 97%, 96% or 95% identical to the sequence shown in Table II A and/or II B, application no. 15, column 5 or 8.

(All the references to Tables I to IV are references to the corresponding lines of Tables I to IV.)

[75860] In a preferred embodiment of said vector said nucleic acid molecule according to 1 (a), (b), (c), (d), (e), (f), (g), (h), (i), (j) or (k) encodes a polypeptide which has the activity of the respective polypeptide represented by a protein comprising a polypeptide as depicted in the respective line in column 5 of Table II, application no. 15.

[75861] In another preferred embodiment of said vector said nucleic acid molecule according to 1 (a), (b), (c), (d), (e), (f), (g), (h), (i), (j) or (k) confers a generation or an increase of the respective fine chemical in a non-human organism or a part thereof as compared to a corresponding wildtype non-human organism or part thereof.

[75862] In another preferred embodiment of said vector said nucleic acid molecule according to 1 (a), (b), (c), (d), (e), (f), (g), (h), (i), (j) or (k) encodes a polypeptide which has the activity of the respective polypeptide represented by a protein as depicted in the respective line in column 5 of Table II, application no. 15, and confers a generation or an increase of the respective fine chemical in a non-human organism or a part thereof as compared to a corresponding wild-type non-human organism or part thereof.

[75863] In another embodiment thereof said vector comprises beneath said nucleic acid molecule according to 1 (a), (b), (c), (d), (e), (f), (g), (h), (i), (j) or (k), a promoter, preferably a promoter selected from the group consisting of Big35S, PCUbi, Super and USP, which are operable linked.

[75864] In a preferred embodiment thereof said vector comprises beneath said nucleic acid molecule according to 1 (a), (b), (c), (d), (e), (f), (g), (h), (i), (j) or (k), a promoter, preferably a promoter selected from the group consisting of Big35S, PCUbi, Super and USP, which are operable linked; and said nucleic acid molecule according to 1 (a), (b), (c), (d), (e), (f), (g), (h), (i), (j) or (k) encodes a polypeptide which has the activity of the respective polypeptide represented by a protein comprising a polypeptide as depicted in the respective line in column 5 of Table II, application no. 15.

[75865] In another preferred embodiment thereof said vector comprises beneath said nucleic acid molecule according to 1 (a), (b), (c), (d), (e), (f), (g), (h), (i), (j) or (k), a promoter, preferably a promoter selected from the group consisting of Big35S, PCUbi, Super and USP, which are operable linked; and said nucleic acid molecule according to 1 (a), (b), (c), (d), (e), (f), (g), (h), (i), (j) or (k) confers a generation or an increase of the respective fine chemical in a non-human organism or a part thereof as compared to a corresponding wild-type non-human organism or part thereof.

[75866] In another preferred embodiment thereof said vector comprises beneath said nucleic acid molecule according to 1 (a), (b), (c), (d), (e), (f), (g), (h), (i), (j) or (k), a promoter, preferably a promoter selected from the group consisting of Big35S, PCUbi, Super and USP, which are operable linked; and said nucleic acid molecule according to 1 (a), (b), (c), (d), (e), (f), (g), (h), (i), (j) or (k) encodes a polypeptide which has the activity of the respective polypeptide represented by a protein as depicted in the respective line in column 5 of Table II, application no. 15, and confers a generation or an increase of the respective fine chemical in a non-human organism or a part thereof as compared to a corresponding wild-type non-human organism or part thereof.

[75867] In another embodiment thereof said vector comprises beneath said nucleic acid molecule according to 1 (a), (b), (c), (d), (e), (f), (g), (h), (i), (j) or (k), a nucleic acid molecule encoding a transit peptide, preferably encoding a plastidal transit peptide, especially in case in column 6 of Table I, application no. 15, in the same line as of the respective nucleic acid molecule according to 1) “plastidic” is depicted, or encoding a mitochondrial transit peptide, especially in case in column 6 of Table I, application no. 15, in the same line as of the respective nucleic acid molecule according to 1) “mitochondric” is depicted, which are operable linked.

[75868] In another embodiment thereof said vector does not comprise beneath said nucleic acid molecule according to 1 (a), (b), (c), (d), (e), (f), (g), (h), (i), (j) or (k), a nucleic acid molecule encoding a transit peptide in case in column 6 of Table I, application no. 15, in the same line as of the respective nucleic acid molecule according to 1) “non-targeted” is depicted.

[75869] In another embodiment thereof said vector comprises beneath said nucleic acid molecule according to 1 (a), (b), (c), (d), (e), (f), (g), (h), (i), (j) or (k), and a promoter, preferably a promoter selected from the group consisting of Big35S, PCUbi, Super and USP; a nucleic acid molecule encoding a transit peptide, preferably encoding a plastidal transit peptide, especially in case in column 6 of Table I, application no. 15, in the same line as of the respective nucleic acid molecule according to 1) “plastidic” is depicted, or encoding a mitochondrial transit peptide, especially in case in column 6 of Table I, application no. 15, in the same line as of the respective nucleic acid molecule according to 1) “mitochondric” is depicted, which are operable linked.

[75870] In another embodiment thereof said vector does not comprise beneath said nucleic acid molecule according to 1 (a), (b), (c), (d), (e), (f), (g), (h), (i), (j) or (k), and a promoter, preferably a promoter selected from the group consisting of Big35S, PCUbi, Super and USP, which are operatively linked; a nucleic acid molecule encoding a transit peptide, especially in case in column 6 of Table I, application no. 15, in the same line as of the respective nucleic acid molecule according to 1) “non-targeted” is depicted.

[75871] In another embodiment thereof said vector comprises beneath said nucleic acid molecule according to 1 (a), (b), (c), (d), (e), (f), (g), (h), (i), (j) or (k), and a promoter, preferably a promoter selected from the group consisting of Big35S, PCUbi, Super and USP; a nucleic acid molecule encoding a transit peptide, preferably encoding a plastidal transit peptide, especially in case in column 6 of Table I, application no. 15, in the same line as of the respective nucleic acid molecule according to 1) “plastidic” is depicted, or encoding a mitochondrial transit peptide, especially in case in column 6 of Table I, application no. 15, in the same line as of the respective nucleic acid molecule according to 1) “mitochondric” is depicted, which are operable linked; and wherein said nucleic acid molecule according to 1 (a), (b), (c), (d), (e), (f), (g), (h), (i), (j) or (k) encodes a polypeptide which has the activity of the respective polypeptide represented by a protein comprising a polypeptide as depicted in column 5 of Table II, application no. 15.

[75872] In another embodiment thereof said vector does not comprise beneath said nucleic acid molecule according to 1 (a), (b), (c), (d), (e), (f), (g), (h), (i), (j) or (k), and a promoter, preferably a promoter selected from the group consisting of Big35S, PCUbi, Super and USP, which are operatively linked; a nucleic acid molecule encoding a transit peptide, especially in case in column 6 of Table I, application no. 15, in the same line as of the respective nucleic acid molecule according to 1) “non-targeted” is depicted; and wherein said nucleic acid molecule according to 1 (a), (b), (c), (d), (e), (f), (g), (h), (i), (j) or (k) encodes a polypeptide which has the activity of the respective polypeptide represented by a protein comprising a polypeptide as depicted in column 5 of Table II, application no. 15.

[75873] In another embodiment thereof said vector comprises beneath said nucleic acid molecule according to 1 (a), (b), (c), (d), (e), (f), (g), (h), (i), (j) or (k), and a promoter, preferably a promoter selected from the group consisting of Big35S, PCUbi, Super and USP; a nucleic acid molecule encoding a transit peptide, preferably encoding a plastidal transit peptide, especially in case in column 6 of Table I, application no. 15, in the same line as of the respective nucleic acid molecule according to 1) “plastidic” is depicted, or encoding a mitochondrial transit peptide, especially in case in column 6 of Table I, application no. 15, in the same line as of the respective nucleic acid molecule according to 1) “mitochondric” is depicted, which are operable linked; and wherein said nucleic acid molecule according to 1 (a), (b), (c), (d), (e), (f), (g), (h), (i), (j) or (k) confers a generation or an increase of the respective fine chemical in a non-human organism or a part thereof as compared to a corresponding wild-type non-human organism or part thereof.

[75874] In another embodiment thereof said vector does not comprise beneath said nucleic acid molecule according to 1 (a), (b), (c), (d), (e), (f), (g), (h), (i), (j) or (k), and a promoter, preferably a promoter selected from the group consisting of Big35S, PCUbi, Super and USP, which are operatively linked; a nucleic acid molecule encoding a transit peptide, especially in case in column 6 of Table I, application no. 15, in the same line as of the respective nucleic acid molecule according to 1) “non-targeted” is depicted; and wherein said nucleic acid molecule according to 1 (a), (b), (c), (d), (e), (f), (g), (h), (i), (j) or (k) confers a generation or an increase of the respective fine chemical in a non-human organism or a part thereof as compared to a corresponding wild-type non-human organism or part thereof.

[75875] In another embodiment thereof said vector comprises beneath said nucleic acid molecule according to 1 (a), (b), (c), (d), (e), (f), (g), (h), (i), (j) or (k), and a promoter, preferably a promoter selected from the group consisting of Big35S, PCUbi, Super and USP; a nucleic acid molecule encoding a transit peptide, preferably encoding a plastidal transit peptide, especially in case in column 6 of Table I, application no. 15, in the same line as of the respective nucleic acid molecule according to 1) “plastidic” is depicted, or encoding a mitochondrial transit peptide, especially in case in column 6 of Table I, application no. 15, in the same line as of the respective nucleic acid molecule according to 1) “mitochondric” is depicted, which are operable linked; and wherein said nucleic acid molecule according to 1 (a), (b), (c), (d), (e), (f), (g), (h), (i), (j) or (k) encodes a polypeptide which has the activity of the respective polypeptide represented by a protein as depicted in column 5 of Table II application no. 15 and confers a generation or an increase of the respective fine chemical in a non-human organism or a part thereof as compared to a corresponding wild-type non-human organism or part thereof.

[75876] In another embodiment thereof said vector does not comprise beneath said nucleic acid molecule according to 1 (a), (b), (c), (d), (e), (f), (g), (h), (i), (j) or (k), and a promoter, preferably a promoter selected from the group consisting of Big35S, PCUbi, Super and USP, which are operatively linked; a nucleic acid molecule encoding a transit peptide, especially in case in column 6 of Table I, application no. 15, in the same line as of the respective nucleic acid molecule according to 1) “non-targeted” is depicted; and wherein said nucleic acid molecule according to 1 (a), (b), (c), (d), (e), (f), (g), (h), (i), (j) or (k) encodes a polypeptide which has the activity of the respective polypeptide represented by a protein as depicted in column 5 of Table II application no. 15 and confers a generation or an increase of the respective fine chemical in a non-human organism or a part thereof as compared to a corresponding wild-type non-human organism or part thereof.

[75877] [0181.1.7.15] to [0209.1.7.15] for the disclosure of these paragraphs see [0181.1.7.7] to [0209.1.7.7] above

[75878] The genes of the invention, coding in one embodiment for an activity selected from the group consisting of 2-C-methyl-D-erythritol 4-phosphate cytidylyltransferase, 2-isopropylmalate synthase, 2-oxoglutarate dehydrogenase E1 subunit, 30S ribosomal protein S3, 47266012-protein, 49747384_SOYBEAN-protein, 50S ribosomal protein L14, ABC transporter ATP binding component, ABC transporter permease protein, acetyl-CoA acetyltransferase, acetyl-CoA hydrolase, acetyltransferase, acyl-CoA dehydrogenase, acyl-CoA synthase, adenylate kinase, adenylylsulfate kinase, agmatinase, amino-acid acetyltransferase, aminotransferase, ammonium transporter, arginine N-succinyltransferase, aspartase, Atl g13930-protein, ATP-binding component of a transport system, auxin response factor, AX653549-protein, AY087308-protein, b0801-protein, b1003-protein, b1285-protein, b1425-protein, b1445-protein, b1522-protein, b1670-protein, b1672-protein, b1742-protein, b1898-protein, b2399-protein, b3777-protein, b3791-protein, b3814-protein, b3817-protein, b3989-protein, b4029-protein, b4050-protein, b4056-protein, beta-hydroxylase, betaine aldehyde dehydrogenase, bifunctional purine biosynthesis protein, branched chain aminotransferase, calcium-dependent protein kinase, cation-transporting ATPase, CBL-interacting protein kinase, CDP-diacylglycerol-glycerol-3-phosphate 3-phosphatidyltransferase, CDP-diacylglycerol-serine O-phosphatidyltransferase, CDP-glucose-4,6-dehydratase, citrate synthase, coproporphyrinogen III oxidase, CTP synthase, cystathionine beta-lyase, cysteine synthase A, cysteine synthase B, dATP pyrophosphohydrolase, dihydrolipoamide dehydrogenase, DnaJ-like chaperone, electron transfer flavoprotein subunit beta, electron transport complex protein, eukaryotic translation initiation factor 5, Fe—S subunit of oxidoreductase, flagellar M-ring protein, fumarate hydratase, gamma-glutamyltranspeptidase, gibberellin 20-oxidase, glucose dehydrogenase, glucose-1-phosphate cytidylyltransferase, glucose-6-phosphate 1-dehydrogenase, glutamate dehydrogenase, glutamate-ammonia-ligase, glutaredoxin, glycerate kinase, glycerol kinase, Glycine cleavage system T aminomethyltransferase, GM02LC17485-protein, GM02LC5744-protein, heat shock protein, heat shock transcription factor, hexose transporter, hydrolase, isochorismate synthase, isocitrate dehydrogenase, isocitrate lyase, leucyl/phenylalanyl-tRNA-protein transferase, lipopolysaccharide core biosynthesis protein, lipoprotein precursor, lysine decarboxylase, malate dehydrogenase, malonyl CoA-acyl carrier protein transacylase, membrane protein, membrane transport protein, methylglyoxal synthase, methylglyoxalase, methyltransferase, monothiol glutaredoxin, monthiol glutaredoxin, multiple antibiotic resistance protein, murein transglycosylase, NADH-quinone oxidoreductase subunit, O-antigen chain length determinant, oxidoreductase, oxidoreductase subunit, oxireductase, phenylacetic acid degradation protein, phenylalanine ammonialyase, phosphatase, phosphate import ATP-binding protein, photosystem I reaction centre subunit, photosystem II protein, polygalacturonase, protease, protein phosphatase, purinenucleoside phosphorylase, pyruvate carboxylase, pyruvate kinase, recombinase A, ribulokinase, RNA polymerase sigma factor, sec-independent protein translocase, Sec-independent protein translocase subunit, slr1170-protein, thioredoxin, thioredoxin family protein, thioredoxin reductase, threonine efflux protein, threonine synthase, transcription factor, transcriptional regulator, transcriptional regulator protein, translation initiation factor subunit, TTC1386-protein, xanthine dehydrogenase, XM_{—}473199-protein, ycr102c-protein, YDL159W-A-protein, ygl237c-protein, YGR193C-protein, ygr221 c-protein, yhr131c-protein, yhr207c-protein, YKL038W-protein, YKL140W-protein, ylr065c-protein, ylr326w-protein, yml084w-protein, yol073c-protein, yol160w-protein, zinc finger protein, and zinc transporter are also called “FCRP genes”.

[75879] [0211.1.7.15] to [0225.1.7.15] for the disclosure of these paragraphs see [0211.1.7.7] to [0225.1.7.7] above

[75880] In addition to the sequence mentioned in Table I, application no. 15, column 5 or 8, preferably the coding region thereof, or its homologs or fragments, it may be advantageous additionally to express and/or mutate further genes in the non-human organisms. Especially advantageously, additionally at least one further gene of the biosynthetic pathway of the fine chemical is expressed in the non-human organisms such as plants or microorganisms. It is also possible that the regulation of the natural genes has been modified advantageously so that the gene and/or its gene product is no longer subject to the regulatory mechanisms which exist in the non-human organisms. This leads to an increased synthesis of the respective amino acid since, for example, feedback regulations no longer exist to the same extent or not at all. In addition it might be advantageously to combine the nucleic acids sequences of the invention containing the sequences shown in the respective line in Table I, application no. 15, column 5 or 8, preferably the coding region thereof, or homologs or fragments thereof, with genes which generally support or enhance the growth or yield of the target non-human organisms, for example genes which lead to faster growth rate of non human organism like microorganisms or plants or genes which produce stress-, pathogen-, or herbicide-resistant plants.

[75881] In a further embodiment of the process of the invention, non-human organisms are grown, in which there is in addition to the expression of the nucleic acid molecule according to the invention simultaneous expression of at least one nucleic acid molecule or one of the genes which code for proteins involved in the citric acid cyle or vitamin c metabolism, in particular in genes of the amino acid metabolism, of glycolysis, of the tricarboxylic acid metabolism or their combinations. in the cytosol or in an organelle, like plastids or mitochondria.

[75882] [0228.1.7.15] to [0239.1.7.15] for the disclosure of these paragraphs see [0228.1.7.7] to [0239.1.7.7] above

[75883] In an embodiment of the present invention the nucleic acid construct of the present invention comprises a nucleic acid molecule as depicted in the respective line in Table I, application no. 15, column 5 or 8, preferably the coding region thereof, a fragment or a homolog thereof, and a plant promoter, such as the Big 35S promoter, the DC3 promoter, the PC Ubi promoter, the LegB4-promoter, the Super promoter, the USP promoter or the like. In another embodiment the nucleic acid construct of the present invention comprises a nucleic acid molecule as depicted in the respective line in Table I, application no. 15, column 5 or 8, preferably the coding region thereof, a fragment or a homolog thereof, and a plant promoter such as, for example, the USP, the LegB4-, the DC3 promoter or the ubiquitin promoter from parsley or other herein mentioned promoters. In a further embodiment the nucleic acid construct of the present invention comprises a nucleic acid molecule as depicted in the respective line in Table I, application no. 15, column 5 or 8, preferably the coding region thereof, a fragment or a homolog thereof, and a plant promoter, such as the Big 35S promoter, the PC Ubi promoter, the Super promoter, the USP promoter or the like. In addition different terminators may advantageously be used in these nucleic acid constructs; examples for transcriptional termination are polyadenylation signals.

[75884] [0241.1.7.15] to [0245.1.7.15] for the disclosure of these paragraphs see [0241.1.7.7] to [0245.1.7.7] above

[75885] Other preferred sequences for use in operable linkage in gene expression constructs are targeting sequences, which are required for targeting the gene product into specific cell compartments (for a review, see Kermode, Crit. Rev. Plant Sci. 15 (4), 285 (1996) and references cited therein), for example into the vacuole, the nucleus, all types of plastids, such as amyloplasts, chloroplasts, chromoplasts, the extracellular space, the mitochondria, the endoplasmic reticulum, elaioplasts, peroxisomes, glycosomes, and other compartments of cells or extracellular; preferred are sequences, which are involved in targeting to plastids as mentioned above. Sequences, which must be mentioned in this context are, in particular, the signal-peptide- or transit-peptide-encoding sequences which are known per se. For example, plastidtransit-peptide-encoding sequences enable the targeting of the expression product into the plastids of a plant cell. Targeting sequences are also known for eukaryotic and to a lower extent for prokaryotic organisms and can advantageously be operable linked with the nucleic acid molecule of the present invention as shown in Table I, application no. 15, columns 5 and 8, preferably the coding region thereof, or homologs or fragments thereof, and described herein to achieve an expression in one of said compartments or extracellular.

[75886] [0247.1.7.15] to [0249.1.7.15] for the disclosure of these paragraphs see [0247.1.7.7] to [0249.1.7.7] above

[75887] Preferred promoters are in particular those which bring about gene expression in tissues and organs, such as leaves, roots, seeds, pollen or xylem. Examples of tissue preferred or organ preferred promoters include, but are not limited to fruit-preferred, ovule-preferred, male tissue-preferred, seed-preferred, pollen-preferred integument-preferred, tuber-preferred, stalk-preferred, pericarp-preferred, leaf-preferred, stigma-preferred, pollen-preferred, anther-preferred, petal-preferred, sepal-preferred, pedicel-preferred, silique-preferred, stem-preferred, root-preferred promoters, and the like. Especially those promoters are preferred which bring about gene expression in tissues and organs in which the biosynthesis of at least one substrate or product of the citric acid cycle, a derivate of one of the substrates or products (for example pyruvate and malate as derivates of citramalate, acetyl-CoA as derivate of pyruvate or citrate, pyruvate as derivate of glycerate) or vitamin c, ascorbic acid or ascorbate and derivates like oxalate and/or threonic acidtakes place, like in seed cells, such as endosperm cells and cells of the developing embryo. Seed promoters are preferentially expressed during seed development and/or germination. For example, seed preferred promoters can be embryopreferred, endosperm preferred and seed coat-preferred (see Thompson et al., BioEssays 10, 108 (1989)). Examples of seed preferred promoters include, but are not limited to, cellulose synthase (celA), Cim1, gamma-zein, globulin-1, maize 19 kD zein (cZ19B1), and the like. Other suitable promoters are the oilseed rape napin gene promoter (U.S. Pat. No. 5,608,152), the Vicia faba USP promoter (Baeumlein et al., Mol Gen Genet, 225 (3), 459 (1991)), the Arabidopsis oleosin promoter (WO 98/45461), the Phaseolus vulgaris phaseolin promoter (U.S. Pat. No. 5,504,200), the Brassica Bce4 promoter (WO 91/13980), the bean arcs promoter, the carrot DcG3 promoter, or the Legumin B4 promoter (LeB4) (Baeumlein et al., Plant Journal, 2 (2), 233 (1992)), and promoters which bring about the seed-specific expression in monocotyledonous plants such as maize, barley, wheat, rye, rice and the like. Advantageous seed-specific promoters are the sucrose binding protein promoter (WO 00/26388), the phaseolin promoter and the napin promoter. Suitable promoters which must be considered are the barley Ipt2 or Ipt1 gene promoter (WO 95/15389 and WO 95/23230), and the promoters described in WO 99/16890 (promoters from the barley hordein gene, the rice glutelin gene, the rice oryzin gene, the rice prolamin gene, the wheat gliadin gene, the wheat glutelin gene, the maize zein gene, the oat glutelin gene, the sorghum kasirin gene and the rye secalin gene). Further suitable promoters are Amy32b, Amy 6-6 and Aleurain (U.S. Pat. No. 5,677,474), Bce4 (oilseed rape) (U.S. Pat. No. 5,530,149), glycinin (soya) (EP 571 741], phosphoenolpyruvate carboxylase (soya) (JP 06/62870), ADR12-2 (soya) (WO 98/08962), isocitrate lyase (oilseed rape) (U.S. Pat. No. 5,689,040]) or α-amylase (barley) (EP 781 8499. Other promoters which are available for the expression of genes in plants are leaf-specific promoters such as those described in DE-A 19 644 478 or light-regulated promoters such as, for example, the pea petE promoter.

[75888] [0251.1.7.15] to [0266.1.7.15] for the disclosure of these paragraphs see [0251.1.7.7] to [0266.1.7.7] above

[75889] An embodiment of the invention relates to a vector where the nucleic acid molecule according to the invention is linked operably to regulatory sequences which permit the expression in a prokaryotic or eukaryotic host. A further embodiment of the invention relates to a vector in which a nucleic acid sequence encoding one of the polypeptides shown in the respective line in Table II, application no. 15, columns 5 or 8, or homologs or fragments thereof, is functionally linked to a targeting sequence such as a plastidial or mitochondrial targeting sequence. A further embodiment of the invention relates to a vector in which a nucleic acid sequence encoding one of the polypeptides shown in the respective line in Table II, application no. 15, columns 5 or 8, or homologs or fragments thereof, is functionally linked to (a) regulatory sequence which permit the expression in an organelle, such as plastids or mitochondria, preferably plastids.

[75890] A further embodiment of the invention relates to a vector which comprises a nucleic acid sequence encoding one of the polypeptides shown in the respective line in Table II, application no. 15, columns 5 or 8, or homologs or fragments thereof, but no additional targeting sequence.

[75891] [0268.1.7.15] to [0273.1.7.15] for the disclosure of these paragraphs see [0268.1.7.7] to [0273.1.7.7] above

[75892] A further object of the invention relates to the use of a nucleic acid construct, e.g. an expression cassette, comprising one or more nucleic acid molecules encoding one or more polypeptides as depicted in the respective line(s) in Table II, application no. 15, columns 5 or 8, or homologs or fragments thereof, or comprising one or more nucleic acid molecules as depicted in the respective line(s) in Table I, application no. 15, columns 5 or 8, preferably the coding region thereof, or homologs or fragments thereof, or comprising a nucleic acid molecule hybridizing therewith for the transformation of a microorganism or a plant cell, plant tissues or a part of a plant

[75893] In doing so, depending on the choice of promoter, the nucleic acid molecules shown in the respective line in Table I, application no. 15, column 5 or 8, preferably the coding region thereof, or homologs or fragments thereof, or the nucleic acid molecules encoding a polypeptide as depicted in the respective line in Table II, application no. 15, column 5 or 8, or homologs or fragments thereof, can be expressed in the whole plant or specifically e.g. in the leaves, in the seeds, the nodules, in roots, in the stem or other parts of the plant. Those transgenic plants overproducing sequences, e.g. as depicted in the respective line in Table I, application no. 15, column 5 or 8, preferably the coding region thereof, or homologs or fragments thereof, the plant cell, plant tissues, plants, the reproductive material thereof, or parts thereof are a further object of the present invention.

[75894] Within the framework of the present invention, the production of the citramalate, citrate, fumarate, glycerate, malate, oxalate, pyruvate, succinate, or vitamin c and/or threonic acid is due to the generation or over-expression of one or more polypeptides as depicted in the respective line(s) in Table II, application no. 15, column 5 or 8, or homologs or fragments thereof, or encoded by the corresponding nucleic acid molecules as depicted in the respective line(s) in Table I, application no. 15, column 5 or 8, preferably the coding region thereof, or homologs or fragments thereof, in the non-human organism according to the invention, advantageously in the transgenic microorganism or plant according to the invention, at least for the duration of at least one plant generation.

[75895] A constitutive expression of the polypeptide as depicted in the respective line in Table II, application no. 15, column 5 or 8, or homologs or fragments thereof, or encoded by the respective nucleic acid molecule as depicted in the respective line in Table I, application no. 15, column 5 or 8, preferably the coding region thereof, or homologs or fragments thereof, may be advantageous. On the other hand, an inducible expression may also appear desirable. Expression of the polypeptide sequences of the invention can be either directed to the cytosol or to the organelles, such as plastids or mitochondria, preferably the plastids of the host cells, preferably the plant cells, or non-targeted.

[75896] for the disclosure of this paragraph see [0278.1.7.7] above

[75897] In a further embodiment the invention relates to a transgenic non-human organisms such as transgenic microorganism or transgenic plant comprising a nucleic acid molecule comprising
[75898] [1) a nucleic acid molecule selected from the group consisting of
   [75899] (a) a nucleic acid molecule encoding a polypeptide shown in Table II, application no.

[75900] 15, column 5 or 8, preferably shown in Table II A, application no. 15, column 5, or in Table II A, application no. 15, column 8, or in Table II B, application no. 15, column 8, or a homolog or a fragment thereof;
[75901] (b) a nucleic acid molecule shown in Table I, application no. 15, column 5 or 8, preferably shown in Table I A, application no. 15, column 5, or in Table I A, application no. 15, column 8, or in Table I B, application no. 15, column 8, preferably the coding region thereof, or a homolog or a fragment thereof;
[75902] (c) a nucleic acid molecule, which, as a result of the degeneracy of the genetic code, can be derived from a polypeptide sequence depicted in column 5 or 8 of Table II, application no. 15, preferably shown in Table II A, application no. 15, column 5, or in Table II A, application no. 15, column 8, or in Table II B, application no. 15, column 8;
[75903] (d) a nucleic acid molecule having at least 30% identity, preferably at least 40%, 50%, 60%, 70%, 75%, 80%, 85%, 90%, 95%, 96%, 97%, 98%, 99%, 99.5%, with the nuoleic acid molecule sequence of a polynucleotide comprising the nucleic acid molecule shown in column 5 or 8 of Table I, application no. 15, preferably shown in Table I A, application no. 15, column 5, or in Table I A, application no. 15, column 8, or in Table I B, application no. 15, column 8, preferably the coding region thereof;
[75904] (e) a nucleic acid molecule encoding a polypeptide having at least 30% identity, preferably at least 40%, 50% 60%, 70%, 75%, 80%, 85%, 90%, 95%, 96%, 97%, 98%, 99%, 99.5%, identity with the amino acid sequence of the polypeptide encoded by the nucleic acid molecule of (a), (b), (c) or (d);
[75905] (f) a nucleic acid molecule which hybridizes with a nucleic acid molecule of (a), (b), (c), (d) or (e) under stringent hybridization conditions;
[75906] (g) a nucleic acid molecule encoding a polypeptide which can be isolated with the aid of monoclonal or polyclonal antibodies made against a polypeptide encoded by one of the nucleic acid molecules of (a), (b), (c), (d), (e) or (f);
[75907] (h) a nucleic acid molecule encoding a polypeptide comprising the consensus sequence or one or more polypeptide motifs as shown in column 8 of Table IV, application no. 15;
[75908] (i) a nucleic acid molecule encoding a polypeptide having the activity represented by a respective protein as depicted in column 5 of Table II, application no. 15;
[75909] (j) a nucleic acid molecule comprising a polynucleotide which is obtained by amplifying a cDNA library or a genomic library using the primers in Table III, application no. 15, column 8;
[75910] and
[75911] (k) nucleic acid molecule which is obtainable by screening a suitable nucleic acid library, especially a cDNA library and/or a genomic library, under stringent hybridization conditions with a probe comprising one of the sequences of the nucleic acid molecule of (a), (b), (c), (d), (e), (f), (g), (h), (i) or (j) or with a fragment of at least 15 nt, preferably 20 nt, 30 nt, 50 nt, 100 nt, 200 nt,500 nt, 1000 nt, 1500 nt, 2000 nt or 3000 nt of the nucleic acid molecule characterized in (a), (b), (c), (d), (e), (f), (g), (h), (i) or (j);
[75912] or a nucleic acid molecule comprising a sequence which is complementary thereto;
   and, if desired
[75913] 2) nucleic acid molecule encoding a transit peptide, preferably encoding a plastidal transit peptide or a mitochondrial transit peptide;
   which are operable linked;]
   or comprising an expression cassette comprising
[75914] [0) a promoter, preferably a promoter selected from the group consisting of Big35S, PCUbi, Super and USP; and
[75915] 1) a nucleic acid molecule selected from the group consisting of
   [75916] (a) a nucleic acid molecule encoding a polypeptide shown in Table II, application no. 15, column 5 or 8, preferably shown in Table II A, application no. 15, column 5, or in Table II A, application no. 15, column 8, or in Table II B, application no. 15, column 8, or a homolog or a fragment thereof;
   [75917] (b) a nucleic acid molecule shown in Table I, application no. 15, column 5 or 8, preferably shown in Table I A, application no. 15, column 5, or in Table I A, application no. 15, column 8, or in Table I B, application no. 15, column 8, preferably the coding region thereof, or a homolog or a fragment thereof;
   [75918] (c) a nucleic acid molecule, which, as a result of the degeneracy of the genetic code, can be derived from a polypeptide sequence depicted in column 5 or 8 of Table II, application no. 15, preferably shown in Table II A, application no. 15, column 5, or in Table II A, application no. 15, column 8, or in Table II B, application no. 15, column 8;
   [75919] (d) a nucleic acid molecule having at least 30% identity, preferably at least 40%, 50%, 60%, 70%, 75%, 80%, 85%, 90%, 95%, 96%, 97%, 98%, 99%, 99.5%, with the nucleic acid molecule sequence of a polynucleotide comprising the nucleic acid molecule shown in column 5 or 8 of Table I, application no. 15, preferably shown in Table I A, application no. 15, column 5, or in Table I A, application no. 15, column 8, or in Table I B, application no. 15, column 8, preferably the coding region thereof;
   [75920] (e) a nucleic acid molecule encoding a polypeptide having at least 30% identity, preferably at least 40%, 50% 60%, 70%, 75%, 80%, 85%, 90%, 95%, 96%, 97%, 98%, 99%, 99.5%, identity with the amino acid sequence of the polypeptide encoded by the nucleic acid molecule of (a), (b), (c) or (d);
   [75921] (f) a nucleic acid molecule which hybridizes with a nucleic acid molecule of (a), (b), (c), (d) or (e) under stringent hybridization conditions;
   [75922] (g) a nucleic acid molecule encoding a polypeptide which can be isolated with the aid of monoclonal or polyclonal antibodies made against a polypeptide encoded by one of the nucleic acid molecules of (a), (b), (c), (d), (e) or (f);
   [75923] (h) a nucleic acid molecule encoding a polypeptide comprising the consensus sequence or one or more polypeptide motifs as shown in column 8 of Table IV, application no. 15;
   [75924] (i) a nucleic acid molecule encoding a polypeptide having the activity represented by a respective protein as depicted in column 5 of Table II, application no. 15;
   [75925] (j) a nucleic acid molecule comprising a polynucleotide which is obtained by amplifying a cDNA library or a genomic library using the primers in Table III, application no. 15, column 8;
   [75926] and
   [75927] (k) nucleic acid molecule which is obtainable by screening a suitable nucleic acid library, especially a cDNA library and/or a genomic library, under stringent hybridization conditions with a probe comprising one of the sequences of the nucleic acid molecule of (a), (b), (c), (d), (e), (f), (g), (h), (i) or (j) or with a fragment of at least 15 nt, preferably 20 nt, 30 nt, 50 nt, 100 nt, 200 nt,500 nt, 1000 nt, 1500 nt, 2000 nt or 3000 nt of the nucleic acid molecule characterized in (a), (b), (c), (d), (e), (f), (g), (h), (i) or (j);
   [75928] or a nucleic acid molecule comprising a sequence which is complementary thereto;
      and, if desired
[75929] 2) nucleic acid molecule encoding a transit peptide, preferably encoding a plastidal transit peptide or a mitochondrial transit peptide;
   which are operable linked;]
   or comprising or being transformed by a vector comprising
[75930] [1) a nucleic acid molecule selected from the group consisting of
   [75931] (a) a nucleic acid molecule encoding a polypeptide shown in Table II, application no. 15, column 5 or 8, preferably shown in Table II A, application no. 15, column 5, or in Table II A, application no. 15, column 8, or in Table II B, application no. 15, column 8, or a homolog or a fragment thereof;
   [75932] (b) a nucleic acid molecule shown in Table I, application no. 15, column 5 or 8, preferably shown in Table I A, application no. 15, column 5, or in Table I A, application no. 15, column 8, or in Table I B, application no. 15, column 8, preferably the coding region thereof, or a homolog or a fragment thereof;
   [75933] (c) a nucleic acid molecule, which, as a result of the degeneracy of the genetic code, can be derived from a polypeptide sequence depicted in column 5 or 8 of Table II, application no. 15, preferably shown in Table II A, application no. 15, column 5, or in Table II A, application no. 15, column 8, or in Table II B, application no. 15, column 8;
   [75934] (d) a nucleic acid molecule having at least 30% identity, preferably at least 40%, 50%, 60%, 70%, 75%, 80%, 85%, 90%, 95%, 96%, 97%, 98%, 99%, 99.5%, with the nucleic acid molecule sequence of a polynucleotide comprising the nucleic acid molecule shown in column 5 or 8 of Table I, application no. 15, preferably shown in Table I A, application no. 15, column 5, or in Table I A, application no. 15, column 8, or in Table I B, application no. 15, column 8, preferably the coding region thereof;
   [75935] (e) a nucleic acid molecule encoding a polypeptide having at least 30% identity, preferably at least 40%, 50% 60%, 70%, 75%, 80%, 85%, 90%, 95%, 96%, 97%, 98%, 99%, 99.5%, identity with the amino acid sequence of the polypeptide encoded by the nucleic acid molecule of (a), (b), (c) or (d);
   [75936] (f) a nucleic acid molecule which hybridizes with a nucleic acid molecule of (a), (b), (c), (d) or (e) under stringent hybridization conditions;
   [75937] (g) a nucleic acid molecule encoding a polypeptide which can be isolated with the aid of monoclonal or polyclonal antibodies made against a polypeptide encoded by one of the nucleic acid molecules of (a), (b), (c), (d), (e) or (f);
   [75938] (h) a nucleic acid molecule encoding a polypeptide comprising the consensus sequence or one or more polypeptide motifs as shown in column 8 of Table IV, application no. 15;
   [75939] (i) a nucleic acid molecule encoding a polypeptide having the activity represented by a respective protein as depicted in column 5 of Table II, application no. 15;
   [75940] (j) a nucleic acid molecule comprising a polynucleotide which is obtained by amplifying a cDNA library or a genomic library using the primers in Table III, application no. 15, column 8;
   [75941] and
   [75942] (k) nucleic acid molecule which is obtainable by screening a suitable nucleic acid library, especially a cDNA library and/or a genomic library, under stringent hybridization conditions with a probe comprising one of the sequences of the nucleic acid molecule of (a), (b), (c), (d), (e), (f), (g), (h), (i) or (j) or with a fragment of at least 15 nt, preferably 20 nt, 30 nt, 50 nt, 100 nt, 200 nt,500 nt, 1000 nt, 1500 nt, 2000 nt or 3000 nt of the nucleic acid molecule characterized in (a), (b), (c), (d), (e), (f), (g), (h), (i) or (j);
   [75943] or a nucleic acid molecule comprising a sequence which is complementary thereto;]

[75944] as well as respective transgenic cells, tissue, parts of such non-human organism, e.g. plant cells, plant tissue, part of plants, like leaves, roots, stems, blossoms, seeds, fruits, pollen and the like.

(All the references to Tables I to IV are references to the corresponding lines of Tables I to IV.)

[75945] In a preferred embodiment of said transgenic non-human organism said nucleic acid molecule according to 1 (a), (b), (c), (d), (e), (f), (g), (h), (i), (j) or (k) encodes a polypeptide which has the activity of the respective polypeptide represented by a protein comprising a polypeptide as depicted in the respective line in column 5 of Table II, application no. 15.

[75946] In another preferred embodiment of said transgenic non-human organism said nucleic acid molecule according to 1 (a), (b), (c), (d), (e), (f), (g), (h), (i), (j) or (k) confers a generation or an increase of the respective fine chemical in a non-human organism or a part thereof as compared to a corresponding wild-type non-human organism or part thereof.

[75947] In another preferred embodiment of said transgenic non-human organism said nucleic acid molecule according to 1 (a), (b), (c), (d), (e), (f), (g), (h), (i), (j) or (k) encodes a polypeptide which has the activity of the respective polypeptide represented by a protein as depicted in the respective line in column 5 of Table II application no. 15 and confers a generation or an increase of the respective fine chemical in a non-human organism or a part thereof as compared to a corresponding wild-type non-human organism or part thereof.

[75948] In another embodiment of said transgenic non-human organism the expression cassette comprises 2) a nucleic acid molecule encoding a transit peptide, preferably encoding a plastidal transit peptide, especially in case in column 6 of Table I, application no. 15, in the same line as of the respective nucleic acid molecule according to 1) “plastidic” is depicted, or encoding a mitochondrial transit peptide, especially in case in column 6 of Table I, application no. 15, in the same line as of the respective nucleic acid molecule according to 1) “mitochondric” is depicted.

[75949] In another embodiment of said transgenic non-human organism the expression cassette does not comprise 2) a nucleic acid molecule encoding a transit peptide, especially in case in column 6 of Table I, application no. 15, in the same line as of the respective nucleic acid molecule according to 1) “non-targeted” is depicted.

[75950] In another embodiment of said transgenic non-human organism said vector comprises beneath said nucleic acid molecule according to 1 (a), (b), (c), (d), (e), (f), (g), (h), (i), (j) or (k), a promoter, preferably a promoter selected from the group consisting of Big35S, PCUbi, Super and USP, which are operable linked.

[75951] In a preferred embodiment of said transgenic non-human organism said vector comprises beneath said nucleic acid molecule according to 1 (a), (b), (c), (d), (e), (f), (g), (h), (i), (j) or (k), a promoter, preferably a promoter selected from the group consisting of Big35S, PCUbi, Super and USP, which are operable linked; and said nucleic acid molecule according to 1 (a), (b), (c), (d), (e), (f), (g), (h), (i), (j) or (k) encodes a polypeptide which has the activity of the respective polypeptide represented by a protein comprising a polypeptide as depicted in the respective line in column 5 of Table II, application no. 15.

[75952] In another preferred embodiment of said transgenic non-human organism said vector comprises beneath said nucleic acid molecule according to 1 (a), (b), (c), (d), (e), (f), (g), (h), (i), (j) or (k), a promoter, preferably a promoter selected from the group consisting of Big35S, PCUbi, Super and USP, which are operable linked; and said nucleic acid molecule according to 1 (a), (b), (c), (d), (e), (f), (g), (h), (i), (j) or (k) confers a generation or an increase of the respective fine chemical in a non-human organism or a part thereof as compared to a corresponding wild-type non-human organism or part thereof.

[75953] In another preferred embodiment of said transgenic non-human organism said vector comprises beneath said nucleic acid molecule according to 1 (a), (b), (c), (d), (e), (f), (g), (h), (i), (j) or (k), a promoter, preferably a promoter selected from the group consisting of Big35S, PCUbi, Super and USP, which are operable linked; and said nucleic acid molecule according to 1 (a), (b), (c), (d), (e), (f), (g), (h), (i), (j) or (k) encodes a polypeptide which has the activity of the respective polypeptide represented by a protein as depicted in the respective line in column 5 of Table II, application no. 15, and confers a generation or an increase of the respective fine chemical in a non-human organism or a part thereof as compared to a corresponding wild-type non-human organism or part thereof.

[75954] In another embodiment of said transgenic non-human organism said vector comprises beneath said nucleic acid molecule according to 1 (a), (b), (c), (d), (e), (f), (g), (h), (i), (j) or (k), a nucleic acid molecule encoding a transit peptide, preferably encoding a plastidal transit peptide, especially in case in column 6 of Table I, application no. 15, in the same line as of the respective nucleic acid molecule according to 1) “plastidic” is depicted, or encoding a mitochondrial transit peptide, especially in case in column 6 of Table I, application no. 15, in the same line as of the respective nucleic acid molecule according to 1) “mitochondric” is depicted, which are operable linked.

[75955] In another embodiment of said transgenic non-human organism said vector does not comprise beneath said nucleic acid molecule according to 1 (a), (b), (c), (d), (e), (f), (g), (h), (i), (j) or (k), a nucleic acid molecule encoding a transit peptide in case in column 6 of Table I, application no. 15, in the same line as of the respective nucleic acid molecule according to 1) “non-targeted” is depicted, which are operable linked.

[75956] In another embodiment of said transgenic non-human organism said vector comprises beneath said nucleic acid molecule according to 1 (a), (b), (c), (d), (e), (f), (g), (h), (i), (j) or (k), and a promoter, preferably a promoter selected from the group consisting of Big35S, PCUbi, Super and USP; a nucleic acid molecule encoding a transit peptide, preferably encoding a plastidal transit peptide, especially in case in column 6 of Table I, application no. 15, in the same line as of the respective nucleic acid molecule according to 1) “plastidic” is depicted, or encoding a mitochondrial transit peptide, especially in case in column 6 of Table I, application no. 15, in the same line as of the respective nucleic acid molecule according to 1) “mitochondric” is depicted, which are operable linked.

[75957] In another embodiment of said transgenic non-human organism said vector does not comprise beneath said nucleic acid molecule according to 1 (a), (b), (c), (d), (e), (f), (g), (h), (i), (j) or (k), and a promoter, preferably a promoter selected from the group consisting of Big35S, PCUbi, Super and USP; a nucleic acid molecule encoding a transit peptide, especially in case in column 6 of Table I, application no. 15, in the same line as of the respective nucleic acid molecule according to 1) “non-targeted” is depicted, which are operable linked.

[75958] In another embodiment of said transgenic non-human organism said vector comprises beneath said nucleic acid molecule according to 1 (a), (b), (c), (d), (e), (f), (g), (h), (i), (j) or (k), and a promoter, preferably a promoter selected from the group consisting of Big35S, PCUbi, Super and USP; a nucleic acid molecule encoding a transit peptide, preferably encoding a plastidal transit peptide, especially in case in column 6 of Table I, application no. 15, in the same line as of the respective nucleic acid molecule according to 1) “plastidic” is depicted, or encoding a mitochondrial transit peptide, especially in case in column 6 of Table I, application no. 15, in the same line as of the respective nucleic acid molecule according to 1) “mitochondric” is depicted, which are operable linked; and wherein said nucleic acid molecule according to 1 (a), (b), (c), (d), (e), (f), (g), (h), (i), (j) or (k) encodes a polypeptide which has the activity of the respective polypeptide represented by a protein comprising a polypeptide as depicted in the respective line in column 5 of Table II, application no. 15.

[75959] In another embodiment of said transgenic non-human organism said vector does not comprise beneath said nucleic acid molecule according to 1 (a), (b), (c), (d), (e), (f), (g), (h), (i), (j) or (k), and a promoter, preferably a promoter selected from the group consisting of Big35S, PCUbi, Super and USP; a nucleic acid molecule encoding a transit peptide, especially in case in column 6 of Table I, application no. 15, in the same line as of the respective nucleic acid molecule according to 1) “non-targeted” is depicted, which are operable linked; and wherein said nucleic acid molecule according to 1 (a), (b), (c), (d), (e), (f), (g), (h), (i), (j) or (k) encodes a polypeptide which has the activity of the respective polypeptide represented by a protein comprising a polypeptide as depicted in the respective line in column 5 of Table II, application no. 15.

[75960] In another embodiment of said transgenic non-human organism said vector comprises beneath said nucleic acid molecule according to 1 (a), (b), (c), (d), (e), (f), (g), (h), (i), (j) or (k), and a promoter, preferably a promoter selected from the group consisting of Big35S, PCUbi, Super and USP; a nucleic acid molecule encoding a transit peptide, preferably encoding a plastidal transit peptide, especially in case in column 6 of Table I, application no. 15, in the same line as of the respective nucleic acid molecule according to 1) “plastidic” is depicted, or encoding a mitochondrial transit peptide, especially in case in column 6 of Table I, application no. 15, in the same line as of the respective nucleic acid molecule according to 1) “mitochondric” is depicted, which are operable linked; and wherein said nucleic acid molecule according to 1 (a), (b), (c), (d), (e), (f), (g), (h), (i), (j) or (k) confers a generation or an increase of the respective fine chemical in a non-human organism or a part thereof as compared to a corresponding wild-type non-human organism or part thereof.

[75961] In another embodiment of said transgenic non-human organism said vector does not comprise beneath said nucleic acid molecule according to 1 (a), (b), (c), (d), (e), (f), (g), (h), (i), (j) or (k), and a promoter, preferably a promoter selected from the group consisting of Big35S, PCUbi, Super and USP; a nucleic acid molecule encoding a transit peptide, especially in case in column 6 of Table I, application no. 15, in the same line as of the respective nucleic acid molecule according to 1) “non-targeted” is depicted, which are operable linked; and wherein said nucleic acid molecule according to 1 (a), (b), (c), (d), (e), (f), (g), (h), (i), (j) or (k) confers a generation or an increase of the respective fine chemical in a non-human organism or a part thereof as compared to a corresponding wild-type non-human organism or part thereof.

[75962] In another embodiment of said transgenic non-human organism said vector comprises beneath said nucleic acid molecule according to 1 (a), (b), (c), (d), (e), (f), (g), (h), (i), (j) or (k), and a promoter, preferably a promoter selected from the group consisting of Big35S, PCUbi, Super and USP; a nucleic acid molecule encoding a transit peptide, preferably encoding a plastidal transit peptide, especially in case in column 6 of Table I, application no. 15, in the same line as of the respective nucleic acid molecule according to 1) “plastidic” is depicted, or encoding a mitochondrial transit peptide, especially in case in column 6 of Table I, application no. 15, in the same line as of the respective nucleic acid molecule according to 1) “mitochondric” is depicted, which are operable linked; and wherein said nucleic acid molecule according to 1 (a), (b), (c), (d), (e), (f), (g), (h), (i), (j) or (k) encodes a polypeptide which has the activity of the respective polypeptide represented by a protein as depicted in the respective line in column 5 of Table II application no. 15 and confers a generation or an increase of the respective fine chemical in a non-human organism or a part thereof as compared to a corresponding wild-type non-human organism or part thereof.

[75963] In another embodiment of said transgenic non-human organism said vector does not comprise beneath said nucleic acid molecule according to 1 (a), (b), (c), (d), (e), (f), (g), (h), (i), (j) or (k), and a promoter, preferably a promoter selected from the group consisting of Big35S, PCUbi, Super and USP; a nucleic acid molecule encoding a transit peptide, especially in case in column 6 of Table I, application no. 15, in the same line as of the respective nucleic acid molecule according to 1) “non-targeted” is depicted, which are operable linked; and wherein said nucleic acid molecule according to 1 (a), (b), (c), (d), (e), (f), (g), (h), (i), (j) or (k) encodes a polypeptide which has the activity of the respective polypeptide represented by a protein as depicted in the respective line in column 5 of Table II application no. 15 (in the same line) and confers a generation or an increase of the respective fine chemical in a non-human organism or a part thereof as compared to a corresponding wild-type non-human organism or part thereof.

[75964] In a preferred embodiment of said transgenic non-human organism said nucleic acid molecule according to 1 (a), (b), (c), (d), (e), (f), (g), (h), (i), (j) or (k), said promoter and optionally said nucleic acid molecule encoding a transit peptide are encompassed in an expression cassette in said vector. Accordingly an embodiment the invention provides a non-human organism comprising or being transformed by a vector comprising an expression cassette comprising said nucleic acid molecule according to 1 (a), (b), (c), (d), (e), (f), (g), (h), (i), (j) or (k), said promoter and optionally said a nucleic acid molecule encoding a transit peptide, operable linked. Said expression cassette may encompass a terminator, too.

[75965] In a further embodiment the invention relates to a transgenic non-human organisms such as transgenic microorganism or transgenic plant comprising a nucleic acid molecule comprising
[75966] [1) a nucleic acid molecule selected from the group consisting of
   [75967] (a) a nucleic acid molecule encoding a polypeptide shown in Table II, application no. 15, column 5 or 8, preferably shown in Table II A, application no. 15, column 5, or in Table II A, application no. 15, column 8, or in Table II B, application no. 15, column 8, or a homolog or a fragment thereof;
   [75968] (b) a nucleic acid molecule shown in Table I, application no. 15, column 5 or 8, preferably shown in Table I A, application no. 15, column 5, or in Table I A, application no. 15, column 8, or in Table I B, application no. 15, column 8, preferably the coding region thereof, or a homolog or a fragment thereof;
   [75969] (c) a nucleic acid molecule, which, as a result of the degeneracy of the genetic code, can be derived from a polypeptide sequence depicted in column 5 or 8 of Table II, application no. 15, preferably shown in Table II A, application no. 15, column 5, or in Table II A, application no. 15, column 8, or in Table II B, application no. 15, column 8;
   [75970] (d) a nucleic acid molecule having at least 30% identity, preferably at least 40%, 50%, 60%, 70%, 75%, 80%, 85%, 90%, 95%, 96%, 97%, 98%, 99%, 99.5%, with the nucleic acid molecule sequence of a polynucleotide comprising the nucleic acid molecule shown in column 5 or 8 of Table I, application no. 15, preferably shown in Table I A, application no. 15, column 5, or in Table I A, application no. 15, column 8, or in Table I B, application no. 15, column 8, preferably the coding region thereof;
   [75971] (e) a nucleic acid molecule encoding a polypeptide having at least 30% identity, preferably at least 40%, 50% 60%, 70%, 75%, 80%, 85%, 90%, 95%, 96%, 97%, 98%, 99%, 99.5%, identity with the amino acid sequence of the polypeptide encoded by the nucleic acid molecule of (a), (b), (c) or (d);
   [75972] (f) a nucleic acid molecule which hybridizes with a nucleic acid molecule of (a), (b), (c), (d) or (e) under stringent hybridization conditions;
   [75973] (g) a nucleic acid molecule encoding a polypeptide which can be isolated with the aid of monoclonal or polyclonal antibodies made against a polypeptide encoded by one of the nucleic acid molecules of (a), (b), (c), (d), (e) or (f);
   [75974] (h) a nucleic acid molecule encoding a polypeptide comprising the consensus sequence or one or more polypeptide motifs as shown in column 8 of Table IV, application no. 15;
   [75975] (i) a nucleic acid molecule encoding a polypeptide having the activity represented by a respective protein as depicted in column 5 of Table II, application no. 15;
   [75976] (j) a nucleic acid molecule comprising a polynucleotide which is obtained by amplifying a cDNA library or a genomic library using the primers in Table III, application no. 15, column 8;
   [75977] and
   [75978] (k) nucleic acid molecule which is obtainable by screening a suitable nucleic acid library, especially a cDNA library and/or a genomic library, under stringent hybridization conditions with a probe comprising one of the sequences of the nucleic acid molecule of (a), (b), (c), (d), (e), (f), (g), (h), (i) or (j) or with a fragment of at least 15 nt, preferably 20 nt, 30 nt, 50 nt, 100 nt, 200 nt,500 nt, 1000 nt, 1500 nt, 2000 nt or 3000 nt of the nucleic acid molecule characterized in (a), (b), (c), (d), (e), (f), (g), (h), (i) or (j);
   [75979] or a nucleic acid molecule comprising a sequence which is complementary thereto;
      and, if desired
[75980] 2) nucleic acid molecule encoding a transit peptide, preferably encoding a plastidal transit peptide or a mitochondrial transit peptide;
   which are operable linked;]
   or comprising an expression cassette comprising
[75981] [0) a promoter, preferably a promoter selected from the group consisting of Big35S, PCUbi, Super and USP; and
[75982] 1) a nucleic acid molecule selected from the group consisting of
   [75983] (a) a nucleic acid molecule encoding a polypeptide shown in Table II, application no. 15, column 5 or 8, preferably shown in Table II A, application no. 15, column 5, or in Table II A, application no. 15, column 8, or in Table II B, application no. 15, column 8, or a homolog or a fragment thereof;
   [75984] (b) a nucleic acid molecule shown in Table I, application no. 15, column 5 or 8, preferably shown in Table I A, application no. 15, column 5, or in Table I A, application no. 15, column 8, or in Table I B, application no. 15, column 8, preferably the coding region thereof, or a homolog or a fragment thereof;
   [75985] (c) a nucleic acid molecule, which, as a result of the degeneracy of the genetic code, can be derived from a polypeptide sequence depicted in column 5 or 8 of Table II, application no. 15, preferably shown in Table II A, application no. 15, column 5, or in Table II A, application no. 15, column 8, or in Table II B, application no. 15, column 8;
   [75986] (d) a nucleic acid molecule having at least 30% identity, preferably at least 40%, 50%, 60%, 70%, 75%, 80%, 85%, 90%, 95%, 96%, 97%, 98%, 99%, 99.5%, with the nucleic acid molecule sequence of a polynucleotide comprising the nucleic acid molecule shown in column 5 or 8 of Table I, application no. 15, preferably shown in Table I A, application no. 15, column 5, or in Table I A, application no. 15, column 8, or in Table I B, application no. 15, column 8, preferably the coding region thereof;
   [75987] (e) a nucleic acid molecule encoding a polypeptide having at least 30% identity, preferably at least 40%, 50% 60%, 70%, 75%, 80%, 85%, 90%, 95%, 96%, 97%, 98%, 99%, 99.5%, identity with the amino acid sequence of the polypeptide encoded by the nucleic acid molecule of (a), (b), (c) or (d);
   [75988] (f) a nucleic acid molecule which hybridizes with a nucleic acid molecule of (a), (b), (c), (d) or (e) under stringent hybridization conditions;
   [75989] (g) a nucleic acid molecule encoding a polypeptide which can be isolated with the aid of monoclonal or polyclonal antibodies made against a polypeptide encoded by one of the nucleic acid molecules of (a), (b), (c), (d), (e) or (f);
   [75990] (h) a nucleic acid molecule encoding a polypeptide comprising the consensus sequence or one or more polypeptide motifs as shown in column 8 of Table IV, application no. 15;
   [75991] (i) a nucleic acid molecule encoding a polypeptide having the activity represented by a respective protein as depicted in column 5 of Table II, application no. 15;
   [75992] (j) a nucleic acid molecule comprising a polynucleotide which is obtained by amplifying a cDNA library or a genomic library using the primers in Table III, application no. 15, column 8;
   [75993] and
   [75994] (k) nucleic acid molecule which is obtainable by screening a suitable nucleic acid library, especially a cDNA library and/or a genomic library, under stringent hybridization conditions with a probe comprising one of the sequences of the nucleic acid molecule of (a), (b), (c), (d), (e), (f), (g), (h), (i) or (j) or with a fragment of at least 15 nt, preferably 20 nt, 30 nt, 50 nt, 100 nt, 200 nt,500 nt, 1000 nt, 1500 nt, 2000 nt or 3000 nt of the nucleic acid molecule characterized in (a), (b), (c), (d), (e), (f), (g), (h), (i) or (j);
   [75995] or a nucleic acid molecule comprising a sequence which is complementary thereto;]
      and, if desired
[75996] 2) nucleic acid molecule encoding a transit peptide, preferably encoding a plastidal transit peptide or a mitochondrial transit peptide;
   which are operable linked;]
   or comprising or being transformed by a vector comprising
[75997] [1) a nucleic acid molecule selected from the group consisting of
   [75998] (a) a nucleic acid molecule encoding a polypeptide shown in Table II, application no. 15, column 5 or 8, preferably shown in Table II A, application no. 15, column 5, or in Table II A, application no. 15, column 8, or in Table II B, application no. 15, column 8, or a homolog or a fragment thereof;
   [75999] (b) a nucleic acid molecule shown in Table I, application no. 15, column 5 or 8, preferably shown in Table I A, application no. 15, column 5, or in Table I A, application no. 15, column 8, or in Table I B, application no. 15, column 8, preferably the coding region thereof, or a homolog or a fragment thereof;
   [76000] (c) a nucleic acid molecule, which, as a result of the degeneracy of the genetic code, can be derived from a polypeptide sequence depicted in column 5 or 8 of Table II, application no. 15, preferably shown in Table II A, application no. 15, column 5, or in Table II A, application no. 15, column 8, or in Table II B, application no. 15, column 8;
   [76001] (d) a nucleic acid molecule having at least 30% identity, preferably at least 40%, 50%, 60%, 70%, 75%, 80%, 85%, 90%, 95%, 96%, 97%, 98%, 99%, 99.5%, with the nucleic acid molecule sequence of a polynucleotide comprising the nucleic acid molecule shown in column 5 or 8 of Table I, application no. 15, preferably shown in Table I A, application no. 15, column 5, or in Table I A, application no. 15, column 8, or in Table I B, application no. 15, column 8, preferably the coding region thereof;
   [76002] (e) a nucleic acid molecule encoding a polypeptide having at least 30% identity, preferably at least 40%, 50% 60%, 70%, 75%, 80%, 85%, 90%, 95%, 96%, 97%, 98%, 99%, 99.5%, identity with the amino acid sequence of the polypeptide encoded by the nucleic acid molecule of (a), (b), (c) or (d);
   [76003] (f) a nucleic acid molecule which hybridizes with a nucleic acid molecule of (a), (b), (c), (d) or (e) under stringent hybridization conditions;
   [76004] (g) a nucleic acid molecule encoding a polypeptide which can be isolated with the aid of monoclonal or polyclonal antibodies made against a polypeptide encoded by one of the nucleic acid molecules of (a), (b), (c), (d), (e) or (f);
   [76005] (h) a nucleic acid molecule encoding a polypeptide comprising the consensus sequence or one or more polypeptide motifs as shown in column 8 of Table IV, application no. 15;
   [76006] (i) a nucleic acid molecule encoding a polypeptide having the activity represented by a respective protein as depicted in column 5 of Table II, application no. 15;
   [76007] (j) a nucleic acid molecule comprising a polynucleotide which is obtained by amplifying a cDNA library or a genomic library using the primers in Table III, application no. 15, column 8;
   [76008] and
   [76009] (k) nucleic acid molecule which is obtainable by screening a suitable nucleic acid library, especially a cDNA library and/or a genomic library, under stringent hybridization conditions with a probe comprising one of the sequences of the nucleic acid molecule of (a), (b), (c), (d), (e), (f), (g), (h), (i) or (j) or with a fragment of at least 15 nt, preferably 20 nt, 30 nt, 50 nt, 100 nt, 200 nt,500 nt, 1000 nt, 1500 nt, 2000 nt or 3000 nt of the nucleic acid molecule characterized in (a), (b), (c), (d), (e), (f), (g), (h), (i) or (j);
   [76010] or a nucleic acid molecule comprising a sequence which is complementary thereto;]
      whereby, preferably, the nucleic acid molecule according to 1 (a), (b), (c), (d), (e), (f), (g), (h), (i), (j) or (k) distinguishes over the sequence depicted in Table I A and/or I B, application no. 15, column 5 or 8, or the coding regions thereof, by one or more nucleotides (especially but not exceeding 5%, preferably 4%, 3%, 2%, 1%, 0.5%, 0.2% or 0.1%). In an embodiment, the nucleic acid molecule of the invention does not consist of the sequence shown in Table I A and/or I B, application no. 15, column 5 or 8, or the coding region thereof. In another embodiment, the nucleic acid molecule of the present invention, preferably the coding region thereof, is at least 30%, 40%, 50%, 60%, 70%, 80%, 90%, 95% identical but less than 100%, 99.999%, 99.99%, 99.9%, 99%, 98%, 97%, 96% or 95% identical to the sequence shown in Table I A and/or I B, application no. 15, column 5 or 8, or the coding region thereof, respectively. In a further embodiment the nucleic acid molecule does not encode the polypeptide sequence shown in Table II A and/or II B, application no. 15, column 5 or 8 but homologs thereof. Accordingly, in one embodiment, the nucleic acid molecule of the present invention encodes in one embodiment a polypeptide which differs at least in one or more amino acids (especially but not exceeding 5%, preferably 4%, 3%, 2%, 1%, 0.5%, 0.2% or 0.1%) from the polypeptide shown in Table II, application no. 15, column 5 or 8 and does not encode a protein of the sequence shown in Table II A and/or II B, application no. 15, column 5 or 8. Accordingly, in one embodiment, the protein encoded by a sequence of a nucleic acid according to 1 (a), (b), (c), (d), (e), (f), (g), (h), (i), (j) or (k) does not consist of the sequence shown in Table I A and/or I B, application no. 15, column 5 or 8, or the coding region thereof. In a further embodiment, the protein of the present invention is at least 30%, 40%, 50%, 60%, 70%, 80%, 90%, 95% identical to protein sequence depicted in Table II A and/or II B, application no. 15, column 5 or 8 but less than 100%, preferably less than 99.999%, 99.99%, 99.9%, 99%, 98%, 97%, 96% or 95% identical to the sequence shown in Table II A and/or II B, application no. 15, column 5 or 8;
      as well as respective transgenic cells, tissue, parts of such non-human organism, e.g. plant cells, plant tissue, part of plants, like leaves, roots, stems, blossoms, seeds, fruits, pollen and the like.
      (All the references to Tables I to IV are references to the corresponding lines of Tables I to IV.)

[76011] In a preferred embodiment of said transgenic non-human organism said nucleic acid molecule according to 1 (a), (b), (c), (d), (e), (f), (g), (h), (i), (j) or (k) encodes a polypeptide which has the activity of the respective polypeptide represented by a protein comprising a polypeptide as depicted in the respective line in column 5 of Table II, application no. 15.

[76012] In another preferred embodiment of said transgenic non-human organism said nucleic acid molecule according to 1 (a), (b), (c), (d), (e), (f), (g), (h), (i), (j) or (k) confers a generation or an increase of the respective fine chemical in a non-human organism or a part thereof as compared to a corresponding wild-type non-human organism or part thereof.

[76013] In another preferred embodiment of said transgenic non-human organism said nucleic acid molecule according to 1 (a), (b), (c), (d), (e), (f), (g), (h), (i), (j) or (k) encodes a polypeptide which has the activity of the respective polypeptide represented by a protein as depicted in the respective line in column 5 of Table II application no. 15 and confers a generation or an increase of the respective fine chemical in a non-human organism or a part thereof as compared to a corresponding wild-type non-human organism or part thereof.

[76014] In another embodiment of said transgenic non-human organism the expression cassette comprises 2) a nucleic acid molecule encoding a transit peptide, preferably encoding a plastidal transit peptide, especially in case in column 6 of Table I, application no. 15, in the same line as of the respective nucleic acid molecule according to 1) “plastidic” is depicted, or encoding a mitochondrial transit peptide, especially in case in column 6 of Table I, application no. 15, in the same line as of the respective nucleic acid molecule according to 1) “mitochondric” is depicted.

[76015] In another embodiment thereof the expression cassette does not comprise 2) a nucleic acid molecule encoding a transit peptide, especially in case in column 6 of Table I, application no. 15, in the same line as of the respective nucleic acid molecule according to 1) “non-targeted” is depicted.

[76016] In another embodiment of said transgenic non-human organism said vector comprises beneath said nucleic acid molecule according to 1 (a), (b), (c), (d), (e), (f), (g), (h), (i), (j) or (k), a promoter, preferably a promoter selected from the group consisting of Big35S, PCUbi, Super and USP, which are operable linked.

[76017] In a preferred embodiment of said transgenic non-human organism said vector comprises beneath said nucleic acid molecule according to 1 (a), (b), (c), (d), (e), (f), (g), (h), (i), (j) or (k), a promoter, preferably a promoter selected from the group consisting of Big35S, PCUbi, Super and USP, which are operable linked; and said nucleic acid molecule according to 1 (a), (b), (c), (d), (e), (f), (g), (h), (i), (j) or (k) encodes a polypeptide which has the activity of the respective polypeptide represented by a protein comprising a polypeptide as depicted in the respective line in column 5 of Table II, application no. 15.

[76018] In another preferred embodiment of said transgenic non-human organism said vector comprises beneath said nucleic acid molecule according to 1 (a), (b), (c), (d), (e), (f), (g), (h), (i), (j) or (k), a promoter, preferably a promoter selected from the group consisting of Big35S, PCUbi, Super and USP, which are operable linked; and said nucleic acid molecule according to 1 (a), (b), (c), (d), (e), (f), (g), (h), (i), (j) or (k) confers a generation or an increase of the respective fine chemical in a non-human organism or a part thereof as compared to a corresponding wild-type non-human organism or part thereof.

[76019] In another preferred embodiment of said transgenic non-human organism said vector comprises beneath said nucleic acid molecule according to 1 (a), (b), (c), (d), (e), (f), (g), (h), (i), (j) or (k), a promoter, preferably a promoter selected from the group consisting of Big35S, PCUbi, Super and USP, which are operable linked; and said nucleic acid molecule according to 1 (a), (b), (c), (d), (e), (f), (g), (h), (i), (j) or (k) encodes a polypeptide which has the activity of the respective polypeptide represented by a protein as depicted in the same line in column 5 of Table II, application no. 15, and confers a generation or an increase of the respective fine chemical in a non-human organism or a part thereof as compared to a corresponding wild-type non-human organism or part thereof.

[76020] In another embodiment of said transgenic non-human organism said vector comprises beneath said nucleic acid molecule according to 1 (a), (b), (c), (d), (e), (f), (g), (h), (i), (j) or (k), a nucleic acid molecule encoding a transit peptide, preferably encoding a plastidal transit peptide, especially in case in column 6 of Table I, application no. 15, in the same line as of the respective nucleic acid molecule according to 1) “plastidic” is depicted, or encoding a mitochondrial transit peptide, especially in case in column 6 of Table I, application no. 15, in the same line as of the respective nucleic acid molecule according to 1) “mitochondric” is depicted, which are operable linked.

[76021] In another embodiment of said transgenic non-human organism said vector does not comprise beneath said nucleic acid molecule according to 1 (a), (b), (c), (d), (e), (f), (g), (h), (i), (j) or (k), a nucleic acid molecule encoding a transit peptide in case in column 6 of Table I, application no. 15, in the same line as of the respective nucleic acid molecule according to 1) “non-targeted” is depicted, which are operable linked.

[76022] In another embodiment of said transgenic non-human organism said vector comprises beneath said nucleic acid molecule according to 1 (a), (b), (c), (d), (e), (f), (g), (h), (i), (j) or (k), and a promoter, preferably a promoter selected from the group consisting of Big35S, PCUbi, Super and USP; a nucleic acid molecule encoding a transit peptide, preferably encoding a plastidal transit peptide, especially in case in column 6 of Table I, application no. 15, in the same line as of the respective nucleic acid molecule according to 1) “plastidic” is depicted, or encoding a mitochondrial transit peptide, especially in case in column 6 of Table I, application no. 15, in the same line as of the respective nucleic acid molecule according to 1) “mitochondric” is depicted, which are operable linked.

[76023] In another embodiment of said transgenic non-human organism said vector does not comprise beneath said nucleic acid molecule according to 1 (a), (b), (c), (d), (e), (f), (g), (h), (i), (j) or (k), and a promoter, preferably a promoter selected from the group consisting of Big35S, PCUbi, Super and USP; a nucleic acid molecule encoding a transit peptide, especially in case in column 6 of Table I, application no. 15, in the same line as of the respective nucleic acid molecule according to 1) “non-targeted” is depicted, which are operable linked.

[76024] In another embodiment of said transgenic non-human organism said vector comprises beneath said nucleic acid molecule according to 1 (a), (b), (c), (d), (e), (f), (g), (h), (i), (j) or (k), and a promoter, preferably a promoter selected from the group consisting of Big35S, PCUbi, Super and USP; a nucleic acid molecule encoding a transit peptide, preferably encoding a plastidal transit peptide, especially in case in column 6 of Table I, application no. 15, in the same line as of the respective nucleic acid molecule according to 1) “plastidic” is depicted, or encoding a mitochondrial transit peptide, especially in case in column 6 of Table I, application no. 15, in the same line as of the respective nucleic acid molecule according to 1) “mitochondric” is depicted, which are operable linked; and wherein said nucleic acid molecule according to 1 (a), (b), (c), (d), (e), (f), (g), (h), (i), (j) or (k) encodes a polypeptide which has the activity of the respective polypeptide represented by a protein comprising a polypeptide as depicted in the respective line in column 5 of Table II, application no. 15.

[76025] In another embodiment of said transgenic non-human organism said vector does not comprise beneath said nucleic acid molecule according to 1 (a), (b), (c), (d), (e), (f), (g), (h), (i), (j) or (k), and a promoter, preferably a promoter selected from the group consisting of Big35S, PCUbi, Super and USP; a nucleic acid molecule encoding a transit peptide, especially in case in column 6 of Table I, application no. 15, in the same line as of the respective nucleic acid molecule according to 1) “non-targeted” is depicted, which are operable linked; and wherein said nucleic acid molecule according to 1 (a), (b), (c), (d), (e), (f), (g), (h), (i), (j) or (k) encodes a polypeptide which has the activity of the respective polypeptide represented by a protein comprising a polypeptide as depicted in the respective line in column 5 of Table II, application no. 15.

[76026] In another embodiment of said transgenic non-human organism said vector comprises beneath said nucleic acid molecule according to 1 (a), (b), (c), (d), (e), (f), (g), (h), (i), (j) or (k), and a promoter, preferably a promoter selected from the group consisting of Big35S, PCUbi, Super and USP; a nucleic acid molecule encoding a transit peptide, preferably encoding a plastidal transit peptide, especially in case in column 6 of Table I, application no. 15, in the same line as of the respective nucleic acid molecule according to 1) “plastidic” is depicted, or encoding a mitochondrial transit peptide, especially in case in column 6 of Table I, application no. 15, in the same line as of the respective nucleic acid molecule according to 1) “mitochondric” is depicted, which are operable linked; and wherein said nucleic acid molecule according to 1 (a), (b), (c), (d), (e), (f), (g), (h), (i), (j) or (k) confers a generation or an increase of the respective fine chemical in a non-human organism or a part thereof as compared to a corresponding wild-type non-human organism or part thereof.

[76027] In another embodiment of said transgenic non-human organism said vector does not comprise beneath said nucleic acid molecule according to 1 (a), (b), (c), (d), (e), (f), (g), (h), (i), (j) or (k), and a promoter, preferably a promoter selected from the group consisting of Big35S, PCUbi, Super and USP; a nucleic acid molecule encoding a transit peptide, especially in case in column 6 of Table I, application no. 15, in the same line as of the respective nucleic acid molecule according to 1) “non-targeted” is depicted, which are operable linked; and wherein said nucleic acid molecule according to 1 (a), (b), (c), (d), (e), (f), (g), (h), (i), (j) or (k) confers a generation or an increase of the respective fine chemical in a non-human organism or a part thereof as compared to a corresponding wild-type non-human organism or part thereof.

[76028] In another embodiment of said transgenic non-human organism said vector comprises beneath said nucleic acid molecule according to 1 (a), (b), (c), (d), (e), (f), (g), (h), (i), (j) or (k), and a promoter, preferably a promoter selected from the group consisting of Big35S, PCUbi, Super and USP; a nucleic acid molecule encoding a transit peptide, preferably encoding a plastidal transit peptide, especially in case in column 6 of Table I, application no. 15, in the same line as of the respective nucleic acid molecule according to 1) “plastidic” is depicted, or encoding a mitochondrial transit peptide, especially in case in column 6 of Table I, application no. 15, in the same line as of the respective nucleic acid molecule according to 1) “mitochondric” is depicted, which are operable linked; and wherein said nucleic acid molecule according to 1 (a), (b), (c), (d), (e), (f), (g), (h), (i), (j) or (k) encodes a polypeptide which has the activity of the respective polypeptide represented by a protein as depicted in the respective line in column 5 of Table II application no. 15 and confers a generation or an increase of the respective fine chemical in a non-human organism or a part thereof as compared to a corresponding wild-type non-human organism or part thereof.

[76029] In another embodiment of said transgenic non-human organism said vector does not comprise beneath said nucleic acid molecule according to 1 (a), (b), (c), (d), (e), (f), (g), (h), (i), (j) or (k), and a promoter, preferably a promoter selected from the group consisting of Big35S, PCUbi,

[76030] Super and USP; a nucleic acid molecule encoding a transit peptide, especially in case in column 6 of Table I, application no. 15, in the same line as of the respective nucleic acid molecule according to 1) “non-targeted” is depicted, which are operable linked; and wherein said nucleic acid molecule according to 1 (a), (b), (c), (d), (e), (f), (g), (h), (i), (j) or (k) encodes a polypeptide which has the activity of the respective polypeptide represented by a protein as depicted in the respective line in column 5 of Table II application no. 15 and confers a generation or an increase of the respective fine chemical in a non-human organism or a part thereof as compared to a corresponding wild-type non-human organism or part thereof.

[76031] In a preferred embodiment of said transgenic non-human organism said nucleic acid molecule according to 1 (a), (b), (c), (d), (e), (f), (g), (h), (i), (j) or (k), said promoter and optionally said nucleic acid molecule encoding a transit peptide are encompassed in an expression cassette in said vector. Accordingly an embodiment the invention provides a non-human organism comprising or being transformed by a vector comprising an expression cassette comprising said nucleic acid molecule according to 1 (a), (b), (c), (d), (e), (f), (g), (h), (i), (j) or (k), said promoter and optionally said a nucleic acid molecule encoding a transit peptide, operable linked. Said expression cassette may encompass a terminator, too.

[76032] [0291.1.7.15] to [0299.1.7.15] for the disclosure of these paragraphs see [0291.1.7.7] to [0299.1.7.7] above

[76033] The term “biological active portion” or “biological activity” means a polypeptide as depicted in the respective line in Table II, application no. 15, column 3 or a portion of said polypeptide which still has at least 10% or 20%, preferably 30%, 40%, 50% or 60%, especially preferably 70%, 75%, 80%, 90% or 95% of the enzymatic or biological activity of the natural or starting enzyme or protein.

[76034] [0301.1.7.15] to [0304.1.7.15] for the disclosure of these paragraphs see [0301.1.7.7] to [0304.1.7.7] above

[76035] Synthetic oligonucleotide primers for the amplification, e.g. as shown in the respective line in Table III, application no. 15, column 8, by means of polymerase chain reaction can be generated on the basis of a sequence shown herein, for example the sequence shown in the respective line in Table I, application no. 15, columns 5 or 8, or the sequences derived from Table II, application no. 15, columns 5 or 8, respectively.

[76036] Moreover, it is possible to identify a conserved region of a protein from various organism by carrying out protein sequence alignments with the polypeptide encoded by the nucleic acid molecules of the present invention, in particular with the sequences encoded by the nucleic acid molecule shown in the respective line in column 5 or 8 of Table I, application no. 15, from which conserved regions, and in turn, degenerate primers can be derived. Conserved regions are those, which show a very little variation in the amino acid in one particular position of several homologs from different origin. The consensus sequence and polypeptide motifs shown in the respective line in column 8 of Table IV, application no. 15, are derived from such alignments of homologous proteins.

[76037] In an embodiment of the present invention, in the method of the present invention the activity of a polypeptide comprising or consisting of a consensus sequence or at least one polypeptide motif shown in the respective line in Table IV, application no. 15, column 8, is increased. In another embodiment thereof, the method of the present invention relates to a polypeptide comprising or consisting of a consensus sequence shown in the respective line in Table IV, application no. 15, column 8 or comprising at least one polypeptide motif shown in the respective line in Table IV, application no. 15, column 8, whereby not more than 20, 15, 10, 9, 8, 7, 6, 5 4, 3, 2 or 1, or 0 of the amino acid positions indicated can be replaced by any amino acid. In another embodiment thereof, the method of the present invention relates to a polypeptide comprising or consisting of a consensus sequence shown in the respective line in Table IV, application no. 15, column 8 or comprising at least one polypeptide motif shown in the respective line in Table IV, application no. 15, column 8, whereby not more than 15%, 10%, 5%, 4%, 3%, 2% or 1%, or 0% of the amino acid positions defined as distinct specific amino acids are/is replaced by another amino acid. In another embodiment thereof, the method of the present invention relates to a polypeptide comprising or consisting of a consensus sequence shown in the respective line in Table IV, application no. 15, column 8 or comprising at least one polypeptide motif shown in the respective line in Table IV, application no. 15, column 8, whereby not more than 20, 15, 10, 9, 8, 7, 6, 5, 4, 3, 2 or 1, or 0 amino acids are inserted into a consensus sequence or polypeptide motif.

[76038] In an embodiment of the present invention, in the method of the present invention the activity of a polypeptide comprising or consisting of a consensus sequence or at least one polypeptide motif shown in the respective line in Table IV, application no. 15, column 8, is increased, whereby said polypeptide distinguishes over the sequence depicted in Table II, application no. 15, columns 5 or 8 by one or more amino acids.

[76039] In one embodiment, said polypeptide of the invention distinguishes over the sequence shown in the respective line in Table II, application no. 15, columns 5 and 8 by more than 5, 6, 7, 8 or 9 amino acids, preferably by more than 10, 15, 20, 25 or 30 amino acids, even more preferred are more than 40, 50, or 60 amino acids and, preferably, the sequence of the polypeptide of the invention distinguishes from the sequence shown in the respective line in Table II B, application no. 15, columns 5 and 8 by not more than 80%, 70%, 60%, 50%, 40%, 30%, 20%, 10%, 5%, 4%, 3%, 2%, 1% or 0.5%. In another embodiment, said polypeptide of the invention does not consist of the sequence shown in Table II, application no. 15, columns 5 or 8.

[76040] [0309.1.7.15] to [0321.1.7.15] for the disclosure of these paragraphs see [0309.1.7.7] to [0321.1.7.7.] above

[76041] Polypeptides having above-mentioned activity, i.e. conferring the production or the increased production of the fine chemical citramalate, citrate, fumarate, glycerate, malate, oxalate, pyruvate, succinate, or vitamin c and/or threonic acid as compared to a corresponding, e.g. non-transformed, wild type non-human organism, like a microorganism or a plant cell, plant or part thereof, can be encoded by other DNA sequences which hybridize to the sequences shown in the respective line in Table I, application no. 15, columns 5 and 8, preferably the coding region thereof, at least under relaxed hybridization conditions and which encode the expression of polypeptides conferring the production or the increased production of the respective fine chemical citramalate, citrate, fumarate, glycerate, malate, oxalate, pyruvate, succinate, or vitamin c and/or threonic acid as compared to a corresponding, e.g. non-transformed, wild type non-human organism, like a microorganism or a plant cell, plant or part thereof.

[76042] [0323.1.7.15] to [0329.1.7.15] for the disclosure of these paragraphs see [0323.1.7.7] to [0329.1.7.7] above

[76043] Further, the nucleic acid molecule of the invention comprises a nucleic acid molecule, which is a complement of one of the nucleotide sequences of above-mentioned nucleic acid molecules or a portion thereof. A nucleic acid molecule or its sequence which is complementary to one of the nucleotide molecules or sequences shown in the respective line in Table I, application no. 15, columns 5 or 8, preferably the coding region thereof, homologs or fragments thereof, is one which is sufficiently complementary to one of the nucleotide molecules or sequences shown in the respective line in Table I, application no. 15, columns 5 or 8, preferably the coding region thereof, homologs or fragments thereof, such that it can hybridize to one of the nucleotide sequences shown in Table I, application no. 15, columns 5 or 8, preferably the coding region thereof, homologs or fragments thereof, thereby forming a stable duplex. Preferably, the hybridization is performed under stringent hybridization conditions. However, a complement of one of the herein disclosed sequences is preferably a sequence complement thereto according to the base pairing of nucleic acid molecules well known to the skilled person. For example, the bases A and G undergo base pairing with the bases T and U or C, resp. and visa versa. Modifications of the bases can influence the base-pairing partner.

[76044] The nucleic acid molecule of the invention comprises a nucleotide sequence which is at least about 30%, 35%, 40%, 45%, 50%, 55%, 60%, 65%, 70%, 75%, 80%, 90%, 95%, 96%, 97%, 98%, 99%, 99.5% or more homologous to a nucleotide sequence shown in Table I, application no. 15, columns 5 or 8, preferably the coding region thereof, homologs or fragments thereof, and preferably has above-mentioned activity, in particular conferring the production or the increased production of the fine chemical citramalate, citrate, fumarate, glycerate, malate, oxalate, pyruvate, succinate, or vitamin c and/or threonic acid, respectively, after increasing the activity or an activity of a gene as shown in the respective line in Table I or of a gene product, e.g. as shown in the respective line in Table II, application no. 15, column 5 or 8, by for example in one embodiment expression either in the cytosol or in an organelle such as a plastid or mitochondria or both, preferably in a plastid, or in another embodiment non-targeted or targeted.

[76045] The nucleic acid molecule of the invention comprises a nucleotide sequence or molecule which hybridizes, preferably hybridizes under stringent conditions as defined herein, to one of the nucleic acid molecule shown in the respective line in Table I, preferably Table IB, application no. 15, columns 5 or 8, preferably the coding region thereof, fragments or homologs thereof, and encodes a protein having above-mentioned activity, e.g. conferring the production or the increased production of the respective fine chemical citramalate, citrate, fumarate, glycerate, malate, oxalate, pyruvate, succinate, or vitamin c and/or threonic acid as compared to a corresponding, e.g. non-transformed, wild type non-human organism, like a microorganism or a plant cell, plant or part thereof, by for example in one embodiment expression either in the cytosol or in an organelle such as a plastid or mitochondria or both, preferably in a plastid, or in another embodiment non-targeted or targeted, and optionally, the activity thereof is selected from the group consisting of 2-C-methyl-D-erythritol 4-phosphate cytidylyltransferase, 2-isopropylmalate synthase, 2-oxoglutarate dehydrogenase E1 subunit, 30S ribosomal protein S3, 47266012-protein, 49747384_SOYBEAN-protein, 50S ribosomal protein L14, ABC transporter ATP binding component, ABC transporter permease protein, acetyl-CoA acetyltransferase, acetyl-CoA hydrolase, acetyltransferase, acyl-CoA dehydrogenase, acyl-CoA synthase, adenylate kinase, adenylylsulfate kinase, agmatinase, amino-acid acetyltransferase, aminotransferase, ammonium transporter, arginine N-succinyltransferase, aspartase, Atl g13930-protein, ATP-binding component of a transport system, auxin response factor, AX653549-protein, AY087308-protein, b0801-protein, b1003-protein, b1285-protein, b1425-protein, b1445-protein, b1522-protein, b1670-protein, b1672-protein, b1742-protein, b1898-protein, b2399-protein, b3777-protein, b3791-protein, b3814-protein, b3817-protein, b3989-protein, b4029-protein, b4050-protein, b4056-protein, beta-hydroxylase, betaine aldehyde dehydrogenase, bifunctional purine biosynthesis protein, branched chain aminotransferase, calcium-dependent protein kinase, cation-transporting ATPase, CBL-interacting protein kinase, CDP-diacylglycerol-glycerol-3-phosphate 3-phosphatidyltransferase, CDP-diacylglycerol-serine O-phosphatidyl-transferase, CDP-glucose-4,6-dehydratase, citrate synthase, coproporphyrinogen III oxidase, CTP synthase, cystathionine beta-lyase, cysteine synthase A, cysteine synthase B, dATP pyrophosphohydrolase, dihydrolipoamide dehydrogenase, DnaJ-like chaperone, electron transfer flavoprotein subunit beta, electron transport complex protein, eukaryotic translation initiation factor 5, Fe—S subunit of oxidoreductase, flagellar M-ring protein, fumarate hydratase, gamma-glutamyltranspeptidase, gibberellin 20-oxidase, glucose dehydrogenase, glucose-1-phosphate cytidylyltransferase, glucose-6-phosphate 1-dehydrogenase, glutamate dehydrogenase, glutamate-ammonia-ligase, glutaredoxin, glycerate kinase, glycerol kinase, Glycine cleavage system T aminomethyltransferase, GM02LC17485-protein, GM02LC5744-protein, heat shock protein, heat shock transcription factor, hexose transporter, hydrolase, isochorismate synthase, isocitrate dehydrogenase, isocitrate lyase, leucyl/phenylalanyl-tRNA-protein transferase, lipopolysaccharide core biosynthesis protein, lipoprotein precursor, lysine decarboxylase, malate dehydrogenase, malonyl CoA-acyl carrier protein transacylase, membrane protein, membrane transport protein, methylglyoxal synthase, methylglyoxalase, methyltransferase, monothiol glutaredoxin, monthiol glutaredoxin, multiple antibiotic resistance protein, murein transglycosylase, NADH-quinone oxidoreductase subunit, O-antigen chain length determinant, oxidoreductase, oxidoreductase subunit, oxireductase, phenylacetic acid degradation protein, phenylalanine ammonialyase, phosphatase, phosphate import ATP-binding protein, photosystem I reaction centre subunit, photosystem II protein, polygalacturonase, protease, protein phosphatase, purinenucleoside phosphorylase, pyruvate carboxylase, pyruvate kinase, recombinase A, ribulokinase, RNA polymerase sigma factor, sec-independent protein translocase, Sec-independent protein translocase subunit, slr1170-protein, thioredoxin, thioredoxin family protein, thioredoxin reductase, threonine efflux protein, threonine synthase, transcription factor, transcriptional regulator, transcriptional regulator protein, translation initiation factor subunit, TTC1386-protein, xanthine dehydrogenase, XM_{—}473199-protein, ycr102c-protein, YDL159W-A-protein, ygl237c-protein, YGR193C-protein, ygr221c-protein, yhr131c-protein, yhr207c-protein, YKL038W-protein, YKL140W-protein, ylr065c-protein, ylr326w-protein, yml084w-protein, yol073c-protein, yol160w-protein, zinc finger protein, and zinc transporter, respectively.

[76046] Moreover, the nucleic acid molecule of the invention can comprise only a porganism tion of the coding region of one of the nucleic acid molecules depicted in Table I, application no. 15, columns 5 or 8, for example a fragment which can be used as a probe or primer or a fragment encoding a biologically active portion of the polypeptide of the present invention or of a polypeptide used in the process of the present invention, i.e. having above-mentioned activity, e.g. conferring the production or the increased production of the respective fine chemical citramalate, citrate, fumarate, glycerate, malate, oxalate, pyruvate, succinate, or vitamin c and/or threonic acid as compared to a corresponding, e.g. non-transformed, wild type non-human organism, like a microorganism or a plant cell, plant or part thereof, by for example in one embodiment expression either in the cytosol or in an organelle such as a plastid or mitochondria or both, preferably in a plastid, or in another embodiment non-targeted or targeted. The nucleotide sequences determined from the cloning of the present protein-according-to-the-invention-encoding gene allows for the generation of probes and primers designed for use in identifying and/or cloning its homologues from other cell types and organisms. The probe/primer typically comprises a substantially purified oligonucleotide. The oligonucleotide typically comprises a region of nucleotide sequence that hybridizes under stringent conditions to at least about 12, 15 preferably about 20 or 25, more preferably about 40, 50 or 75 consecutive nucleotides of a sense strand of one of the sequences set forth, e.g., in the respective line in Table I, application no. 15, column 5 or 8, preferably the coding region thereof, or a homolog or a fragment thereof, an anti-sense sequence of one of the sequences, e.g., set forth in the respective line in Table I, application no. 15, columns 5 or 8, preferably the coding region thereof, or a homolog or a fragment thereof or naturally occurring mutants thereof. Primers based on a nucleic acid molecule of invention can be used in PCR reactions to clone homologs of the polypeptide of the invention or of the polypeptide used in the process of the invention, e.g. as the primers described in the examples of the present invention, e.g. as shown in the examples. A PCR with the primers shown in the respective line in Table III, column 8 will result in a fragment of the gene product as shown in Table II, application no. 15, column 5.

[76047] Primer sets are interchangeable. The person skilled in the art knows how to design and combine said primers to result in the desired product, e.g. in a full length clone or a partial sequence. Probes based on the sequences of the nucleic acid molecule of the invention or used in the process of the present invention can be used to detect transcripts or genomic sequences encoding the same or homologous proteins. The probe can further comprise a label group attached thereto, e.g. the label group can be a radioisotope, a fluorescent compound, an enzyme, or an enzyme co-factor. Such probes can be used as a part of a genomic marker test kit for identifying cells which express a polypeptide of the invention or used in the process of the present invention, such as by measuring a level of an encoding nucleic acid molecule in a sample of cells, e.g. detecting mRNA levels or determining, whether a genomic gene comprising the sequence of the polynucleotide of the invention or used in the processes of the present invention has been mutated or deleted.

[76048] As the expression of a respective nucleic acids of the invention is related to the synthesis of the respective fine chemical citramalate, citrate, fumarate, glycerate, malate, oxalate, pyruvate, succinate, or vitamin c and/or threonic acid its function as a probe extends to the detection of microorganisms, plant tissues, plants, plant variets, plant ecotypes or plant genera with varying capability or potential for synthesis of the respective fine chemical citramalate, citrate, fumarate, glycerate, malate, oxalate, pyruvate, succinate, or vitamin c and/or threonic acid. Therefore in one embodiment the present invention relates to a method for analyzing the capability or potential of a plant tissue, a plant, a plant variety or plant ecotype to produce the fine chemical citramalate, citrate, fumarate, glycerate, malate, oxalate, pyruvate, succinate, or vitamin c and/or threonic acid by using the nucleic acid of the invention or parts thereof as a probe to detect the amount of the nucleic acid of the invention in the non-human organism or a part thereof in comparison to another non-human organism.

[76049] The nucleic acid molecule of the invention encodes a polypeptide or portion thereof which includes an amino acid sequence which is sufficiently homologous to the amino acid sequence shown in respective line in Table II, application no. 15, columns 5 or 8 such that the protein or portion thereof maintains the ability to confer the production or the increased production of the respective fine chemical citramalate, citrate, fumarate, glycerate, malate, oxalate, pyruvate, succinate, or vitamin c and/or threonic acid as compared to a corresponding, e.g. non-transformed, wild type non-human organism, like a microorganism or a plant cell, plant or part thereof, in particular increasing the activity as mentioned above or as described in the examples in microorganisms or plants.

[76050] As used herein, the language “sufficiently homologous” refers to proteins or portions thereof which have amino acid sequences which include a minimum number of identical or equivalent amino acids (e.g. an amino acid which has a similar side chain as an amino acid in one of the sequences of the polypeptide of the present invention) to an amino acid sequence shown in the respective line in Table II, application no. 15, columns 5 or 8 such that the protein or portion thereof is able to confer the production or the increased production of the respective fine chemical citramalate, citrate, fumarate, glycerate, malate, oxalate, pyruvate, succinate, or vitamin c and/or threonic acid as compared to a corresponding, e.g. non-transformed, wild type non-human organism, like a microorganism or a plant cell, plant or part thereof. For example having the activity of a protein as shown in the respective line in Table II, application no. 15, column 3 and as described herein.

[76051] In an embodiment of the present invention, the nucleic acid molecule of the present invention comprises a nucleic acid molecule that encodes a portion of the protein of the present invention. The protein is at least about 30%, 35%, 40%, 45% 50%, 55%, 60%, 65%, 70%, 75%, 80%, 85%, 90%, 91%, 92%, 93%, 94%, 95%, 96%, 97%, 98%, 99%, 99.5% or more homologous to an entire amino acid sequence shown in the respective line of Table II, application no. 15, column 5 or 8 and has the above-mentioned activity, e.g. conferring the production or the increased production of the respective fine chemical citramalate, citrate, fumarate, glycerate, malate, oxalate, pyruvate, succinate, or vitamin c and/or threonic acid as compared to a corresponding, e.g. non-transformed, wild type non-human organism, like a microorganism or a plant cell, plant or part thereof by, for example in a embodiment expression either in the cytosol or in an organelle such as a plastid or mitochondria or both, preferably in a plastid, or in another embodiment by targeted or non-targeted expression.

[76052] for the disclosure of this paragraph see [0338.1.7.7] above

[76053] for the disclosure of this paragraph see [0339.1.7.7] above

[76054] The invention further relates to nucleic acid molecules or methods using said nucleic acid molecules that differ from one of the nucleotide sequences shown in the respective line in Table I, application no. 15, columns 5 or 8, preferably the coding region thereof, or fragments or homologs thereof, due to degeneracy of the genetic code but encode a polypeptide of the present invention, in particular a polypeptide having the above-mentioned activity, e.g. as those polypeptides depicted in the respective line in Table II, application no. 15, columns 5 or 8, fragments or homologs thereof. Advantageously, the nucleic acid molecule of the invention comprises, or in an other embodiment has, a nucleotide sequence encoding a protein comprising, or in an other embodiment having, an amino acid sequence shown in the respective line in Table II, application no. 15, columns 5 or 8, fragments or homologs thereof. In a further embodiment, the nucleic acid molecule of the invention encodes a full length protein which is substantially homologous to an amino acid sequence shown in the respective line in Table II, application no. 15, columns 5 or 8, or homologs thereof. However, in an embodiment, the nucleic acid molecule of the present invention does not consist of the sequence shown in the respective line in Table I, preferably Table IA, application no. 15, columns 5 or 8, preferably the coding region thereof, but the functional homologs thereof.

[76055] [0341.1.7.15] to [0343.1.7.15] for the disclosure of these paragraphs see [0341.1.7.7] to [0343.1.7.7] above

[76056] Accordingly, in another embodiment, a nucleic acid molecule of the invention is at least 15, 20, 25 or 30 nucleotides in length. Preferably, it hybridizes under stringent conditions to a nucleic acid molecule comprising a nucleotide sequence of the nucleic acid molecule of the present invention or used in the process of the present invention, e.g. comprising the sequence shown in the respective line in Table I, application no. 15, columns 5 or 8, preferably the coding region thereof. In another embodiment the nucleic acid molecule is preferably at least 20, 30, 50, 100, 250 or more nucleotides in length.

[76057] for the disclosure of this paragraph see [0345.1.7.7] above

[76058] Preferably, a nucleic acid molecule of the invention that hybridizes under stringent conditions to a sequence shown in the respective line in Table I, application no. 15, columns 5 or 8, preferably the coding region thereof, corresponds to a naturally-occurring nucleic acid molecule of the invention. As used herein, a “naturally-occurring” nucleic acid molecule refers to a RNA or DNA molecule having a nucleotide sequence that occurs in nature (e.g. encodes a natural protein). Preferably, the nucleic acid molecule encodes a natural protein having above-mentioned activity, e.g. conferring the production or the increased production of the respective fine chemical citramalate, citrate, fumarate, glycerate, malate, oxalate, pyruvate, succinate, or vitamin c and/or threonic acid as compared to a corresponding, e.g. non-transformed, wild type non-human organism, like a microorganism or a plant cell, plant or part thereof after increasing the expression or activity thereof or the activity of a protein of the invention or used in the process of the invention, in an embodiment for example expression either in the cytosol or in an organelle such as a plastid or mitochondria, preferably in plastids, or, in another embodiment by targeted or non-targeted expression.

[76059] for the disclosure of this paragraph see [0347.1.7.7] above

[76060] For example, nucleotide substitutions leading to amino acid substitutions at “non-essential” amino acid residues can be made in a sequence of the nucleic acid molecule of the invention or used in the process of the invention, e.g. shown in the respective line in Table I, application no. 15, columns 5 or 8, preferably the coding region thereof, or fragments or homologs thereof.

[76061] for the disclosure of this paragraph see [0349.1.7.7] above

[76062] for the disclosure of this paragraph see [0350.1.7.7] above

[76063] Accordingly, the invention relates to nucleic acid molecules encoding a polypeptide having above-mentioned activity, in a non-human organisms or parts thereof by for example expression either in the cytosol or in an organelle such as a plastid or mitochondria or both, preferably in plastids, that contain changes in amino acid residues that are not essential for said activity. Such polypeptides differ in amino acid sequence from a sequence depicted in the respective line in Table II, especially Table IIA, application no. 15, columns 5 or 8, but retain said activity described herein. The nucleic acid molecule can comprise a nucleotide sequence encoding a polypeptide, wherein the polypeptide comprises an amino acid sequence at least about 50% identical to an amino acid sequence shown in the respective line in Table II, application no. 15, columns 5 or 8, and is capable of conferring the production or the increased production of the respective fine chemical citramalate, citrate, fumarate, glycerate, malate, oxalate, pyruvate, succinate, or vitamin c and/or threonic acid as compared to a corresponding, e.g. non-transformed, wild type non-human organism, like a microorganism or a plant cell, plant or part thereof, after increasing its activity for example in an embodiment by expression either in the cytosol or in an organelle such as a plastid or mitochondria or both, preferably in plastids, or, in another embodiment by targeted or non-targeted expression. Preferably, the protein encoded by the nucleic acid molecule is at least about 60%, 70%, 80%, 90%, 95%, 96%, 97%, 98%, 99% or 99.5% identical to the sequence shown in the respective line in Table II, application no. 15, columns 5 or 8.

[76064] [0352.1.7.15] to [0357.1.7.15] for the disclosure of these paragraphs see [0352.1.7.7] to [0357.1.7.7] above

[76065] Functional equivalents of the nucleic acid molecules according to the present invention and/or used in the process according to the present invention represent an embodiment of homologs. Functional equivalents derived from the nucleic acid molecules as shown in the respective line in Table I, application no. 15, columns 5 or 8, preferably the coding region thereof, according to the invention by substitution, insertion or deletion have at least 30%, 35%, 40%, 45%, 50%, 55%, 60%, 65%, 70%, 75%, 80%, 85%, 90%, 91%, 92%, 93%, 94%, 95%, 96%, 97%, 98%, 99% or 99.5% homology with one of the nucleic acid molecules as shown in the respective line in Table I, application no. 15, columns 5 or 8, preferably the coding region thereof, according to the invention and encode polypeptides having essentially the same properties as the polypeptide as shown in the respective line in Table II, application no. 15, columns 5 or 8.

[76066] Functional equivalents derived from one of the polypeptides as shown in the respective line in Table II, application no. 15, columns 5 or 8 according to the invention by substitution, insertion or deletion have at least 30%, 35%, 40%, 45%, 50%, 55%, 60%, 65%, 70%, 75%, 80%, 85%, 90%, 91%, 92%, 93%, 94%, 95%, 96%, 97%, 98%, 99% or 99.5% homology with one of the polypeptides as shown in the respective line in Table II, application no. 15, columns 5 or 8 according to the invention and having essentially the same properties as the polypeptide as shown in the respective line in Table II, application no. 15, columns 5 or 8.

[76067] for the disclosure of this paragraph see [0359.1.7.7] above

[76068] A nucleic acid molecule encoding a homolog to a polypeptide depicted in the respective line in Table II, application no. 15, columns 5 or 8 can be created by introducing one or more nucleotide substitutions, additions or deletions into the nucleic acid molecule of the present invention, in particular of Table I, application no. 15, columns 5 or 8, in the respective line, such that one or more amino acid substitutions, additions or deletions are introduced into the encoded protein. Mutations can be introduced into the nucleic acid molecules as depicted in the respective line in Table I, application no. 15, columns 5 or 8, preferably the coding region thereof, by standard techniques, such as site-directed mutagenesis, PCR-mediated mutagenesis or other methods known to the person skilled in the art.

[76069] [0361.1.7.15] to [0363.1.7.15] for the disclosure of these paragraphs see [0361.1.7.7] to [0363.1.7.7] above

[76070] Homologues of the nucleic acid sequences used, with the sequences shown in the respective line in Table I, application no. 15, columns 5 or 8, preferably the coding region thereof, comprise also allelic variants with at least approximately 30%, 35%, 40%, 45%, 50%, 55%, 60%, 65%, 70%, 75%, 80%, 85%, 90%, 91%, 92%, 93%, 94% 95%. 96%, 97%, 98%, 99%, 99.5% or more % homology with one of the nucleotide sequences shown or the abovementioned derived nucleic acid sequences or their homologues or derivatives or parts of these. Allelic variants encompass in particular functional variants which can be obtained by deletion, insertion or substitution of nucleotides from the sequences shown in the respective line, preferably in Table I, columns 5 or 8, preferably the coding region thereof, or from the derived nucleic acid sequences, the intention being, however, that the enzymatic activity or the biological activity of the resulting proteins synthesized is advantageously retained or increased.

[76071] In one embodiment of the present invention, the nucleic acid molecule of the invention or used in the process of the invention comprises the sequences shown in the respective line in any of the Table I, application no. 15, columns 5 or 8, preferably the coding region thereof, fragments or homologs thereof. It is preferred that the nucleic acid molecule comprises as little as possible other nucleotides not shown in the respective line in any one of Table I, application no. 15, columns 5 or 8, preferably the coding region thereof, fragments or homologs thereof. In one embodiment, the nucleic acid molecule comprises less than 500, 400, 300, 200, 100, 90, 80, 70, 60, 50 or 40 further nucleotides. In a further embodiment, the nucleic acid molecule comprises less than 30, 20 or 10 further nucleotides. In one embodiment, the nucleic acid molecule used in the process of the invention is identical to the sequences shown in the respective line in Table I, application no. 15, columns 5 or 8, preferably the coding region thereof.

[76072] Also preferred is that the nucleic acid molecule used in the process of the invention encodes a polypeptide comprising the sequence shown in the respective line in Table II, application no. 15, columns 5 or 8, fragments or homologs thereof. In one embodiment, the nucleic acid molecule encodes less than 150, 130, 100, 80, 60, 50, 40 or 30 further amino acids. In a further embodiment, the encoded polypeptide comprises less than 20, 15, 10, 9, 8, 7, 6 or 5 further amino acids. In one embodiment used in the inventive process, the encoded polypeptide is identical to the sequences shown in the respective line in Table II, application no. 15, columns 5 or 8.

[76073] In one embodiment, the nucleic acid molecule of the invention or used in the process encodes a polypeptide comprising the sequence shown in the respective line in Table II, application no. 15, columns 5 or 8, or fragments or homologs thereof, and comprises less than 100 further nucleotides. In a further embodiment, said nucleic acid molecule comprises less than 30 further nucleotides. In one embodiment, the nucleic acid molecule used in the process is identical to a coding sequence of the sequences shown in the respective line in Table I, application no. 15, columns 5 or 8.

[76074] Polypeptides (=proteins), which still have the essential biological or enzymatic activity of the polypeptide of the present invention conferring the production or the increased production of the respective fine chemical citramalate, citrate, fumarate, glycerate, malate, oxalate, pyruvate, succinate, or vitamin c and/or threonic acid as compared to a corresponding, e.g. non-transformed, wild type non-human organism, like a microorganism or a plant cell, plant or part thereof, i.e. whose activity is essentially not reduced, are polypeptides with at least 10%, 20%, 30%, 40%, 50%, 60%, 70%, 80%, 90%, 95% or more of the wild type biological activity or enzymatic activity, advantageously, the activity is essentially not reduced in comparison with the activity of a polypeptide shown in the respective line in Table II, application no. 15, columns 5 or 8 expressed under identical conditions.

[76075] Homologues of nucleic acid molecules shown in the respective line in Table I, application no. 15, columns 5 or 8, preferably the coding region thereof, or fragments thereof, or of the derived sequences shown in the respective line in Table II, application no. 15, columns 5 or 8, or fragments thereof, also mean truncated sequences, cDNA, single-stranded DNA or RNA of the coding and noncoding DNA sequence. Homologues of said sequences are also understood as meaning derivatives, which comprise noncoding regions such as, for example, UTRs, introns, terminators, enhancers or promoter variants. The promoters upstream of the nucleotide sequences stated can be modified by one or more nucleotide substitution(s), insertion(s) and/or deletion(s) without, however, interfering with the functionality or activity either of the promoters, the open reading frame (=ORF) or with the 3′-regulatory region such as terminators or other 3′-regulatory regions, which are far away from the ORF. It is furthermore possible that the activity of the promoters is increased by modification of their sequence, or that they are replaced completely by more active promoters, even promoters from heterologous organisms. Appropriate promoters are known to the person skilled in the art and are mentioned herein below.

[76076] [0370.1.7.15] to [0379.1.7.15] for the disclosure of theses paragraphs see [0370.1.7.7] to [0379.1.7.7] above

[76077] Moreover, a native polypeptide conferring the increase of the respective fine chemical citramalate, citrate, fumarate, glycerate, malate, oxalate, pyruvate, succinate, or vitamin c and/or threonic acid in a non-human organism or a part thereof can be isolated from cells (e.g., endothelial cells), for example using the antibody of the present invention as described below, in particular, an antibody against proteins having 2-C-methyl-D-erythritol 4-phosphate cytidylyltransferase, 2-isopropylmalate synthase, 2-oxoglutarate dehydrogenase E1 subunit, 30S ribosomal protein S3, 47266012-protein, 49747384_SOYBEAN-protein, 50S ribosomal protein L14, ABC transporter ATP binding component, ABC transporter permease protein, acetyl-CoA acetyltransferase, acetyl-CoA hydrolase, acetyltransferase, acyl-CoA dehydrogenase, acyl-CoA synthase, adenylate kinase, adenylylsulfate kinase, agmatinase, amino-acid acetyltransferase, aminotransferase, ammonium transporter, arginine N-succinyltransferase, aspartase, At1g13930-protein, ATP-binding component of a transport system, auxin response factor, AX653549-protein, AY087308-protein, b0801-protein, b1003-protein, b1285-protein, b1425-protein, b1445-protein, b1522-protein, b1670-protein, b1672-protein, b1742-protein, b1898-protein, b2399-protein, b3777-protein, b3791-protein, b3814-protein, b3817-protein, b3989-protein, b4029-protein, b4050-protein, b4056-protein, beta-hydroxylase, betaine aldehyde dehydrogenase, bifunctional purine biosynthesis protein, branched chain aminotransferase, calcium-dependent protein kinase, cation-transporting ATPase, CBL-interacting protein kinase, CDP-diacylglycerol-glycerol-3-phosphate 3-phosphatidyltransferase, CDP-d iacylglycerolserine O-phosphatidyltransferase, CDP-glucose-4,6-dehydratase, citrate synthase, coproporganism phyrinogen III oxidase, CTP synthase, cystathionine beta-lyase, cysteine synthase A, cysteine synthase B, dATP pyrophosphohydrolase, dihydrolipoamide dehydrogenase, DnaJ-like chaperone, electron transfer flavoprotein subunit beta, electron transport complex protein, eukaryotic translation initiation factor 5, Fe—S subunit of oxidoreductase, flagellar M-ring protein, fumarate hydratase, gamma-glutamyltranspeptidase, gibberellin 20-oxidase, glucose dehydrogenase, glucose-1-phosphate cytidylyltransferase, glucose-6-phosphate 1-dehydrogenase, glutamate dehydrogenase, glutamate-ammonia-ligase, glutaredoxin, glycerate kinase, glycerol kinase, Glycine cleavage system T aminomethyltransferase, GM02LC17485-protein, GM02LC5744-protein, heat shock protein, heat shock transcription factor, hexose transporter, hydrolase, isochorismate synthase, isocitrate dehydrogenase, isocitrate lyase, leucyl/phenylalanyl-tRNA-protein transferase, lipopolysaccharide core biosynthesis protein, lipoprotein precursor, lysine decarboxylase, malate dehydrogenase, malonyl CoA-acyl carrier protein transacylase, membrane protein, membrane transport protein, methylglyoxal synthase, methylglyoxalase, methyltransferase, monothiol glutaredoxin, monthiol glutaredoxin, multiple antibiotic resistance protein, murein transglycosylase, NADH-quinone oxidoreductase subunit, O-antigen chain length determinant, oxidoreductase, oxidoreductase subunit, oxireductase, phenylacetic acid degradation protein, phenylalanine ammonia-lyase, phosphatase, phosphate import ATP-binding protein, photosystem I reaction centre subunit, photosystem II protein, polygalacturonase, protease, protein phosphatase, purine-nucleoside phosphorylase, pyruvate carboxylase, pyruvate kinase, recombinase A, ribulokinase, RNA polymerase sigma factor, sec-independent protein translocase, Sec-independent protein translocase subunit, slr1170-protein, thioredoxin, thioredoxin family protein, thioredoxin reductase, threonine efflux protein, threonine synthase, transcription factor, transcriptional regulator, transcriptional regulator protein, translation initiation factor subunit, TTC1386-protein, xanthine dehydrogenase, XM_{—}473199-protein, ycr102c-protein, YDL159W-A-protein, ygl237c-protein, YGR193C-protein, ygr221c-protein, yhr131c-protein, yhr207c-protein, YKL038W-protein, YKL140W-protein, ylr065c-protein, ylr326w-protein, yml084w-protein, yol073c-protein, yol160w-protein, zinc finger protein, or zinc transporter activity, respectively, or an antibody against polypeptides as shown in the respective line in Table II, application no. 15, columns 5 or 8, or fragments or homologs thereof which can be produced by standard techniques utilizing the polypeptid of the present invention or fragment thereof, i.e., the polypeptide of this invention (FCRP). Preferred are monoclonal antibodies.

[76078] for the disclosure of this paragraph see [0381.1.7.7] above

[76079] In one embodiment, the present invention relates to a polypeptide as depicted in the respective line in Table II, especially in Table IIA or especially in Table IIB, application no. 15, columns 5 or 8, or fragment or homolog thereof or as coded by the nucleic acid molecule shown in the respective line in Table I, especially Table IA or especially Table IB, application no. 15, columns 5 or 8, preferably the coding region thereof, or fragment or homolog thereof.

[76080] In an embodiment, the present invention relates to a polypeptide comprising or consisting of a consensus sequence shown in the respective line in Table IV, application no. 15, column 8 or at least one polypeptide motif shown in the respective line in Table IV, application no. 15, column 8.

[76081] In an embodiment thereof, the present invention relates to a polypeptide comprising or consisting of a consensus sequence shown in the respective line in Table IV, application no. 15, column 8 or comprising at least one polypeptide motif shown in the respective line in Table IV, application no. 15, column 8, whereby not more than 20, 15, 10, 9, 8, 7, 6, 5, 4, 3, 2, or 1, or 0 of the amino acids can be replaced by any amino acid.

[76082] In another embodiment thereof, the present invention relates to a polypeptide comprising or consisting of a consensus sequence shown in the respective line in Table IV, application no. 15, column 8 or comprising at least one polypeptide motif shown in the respective line in Table IV, application no. 15, column 8, whereby not more than 15%, 10%, 5%, 4%, 3%, 2% or1% or 0% of the amino acids defined as distinct specific amino acids are/is replaced by another amino acid.

[76083] In another embodiment thereof, the present invention relates to a polypeptide comprising or consisting of a consensus sequence shown in the respective line in Table IV, application no. 15, column 8 or comprising at least one polypeptide motif shown in the respective line in Table IV, application no. 15, column 8, whereby not more than 20, 15, 10, 9, 8, 7, 6, 5, 4, 3, 2, or 1, or 0 amino acids are inserted into the consensus sequence or polypeptide motif.

[76084] In an embodiment of the present invention, the polypeptide of the present invention comprises or consists of a consensus sequence or at least one polypeptide motif shown in the respective line in Table IV, application no. 15, column 8, whereby said polypeptide distinguishes over the sequence depicted in the respective line in Table II, application no. 15, columns 5 or 8 by one or more amino acids. In one embodiment, said polypeptide of the invention distinguishes over the sequence shown in the respective line in Table II, application no. 15, columns 5 and 8 by more than 5, 6, 7, 8 or 9 amino acids, preferably by more than 10, 15, 20, 25 or 30 amino acids, even more preferred are more than 40, 50, or 60 amino acids and, preferably, the sequence of the polypeptide of the invention distinguishes from the sequence shown in the respective line in Table II, application no. 15, columns 5 and 8 by not more than 80%, 70%, 60%, 50%, 40%, 30%, 20%, 10%, 5%, 4%, 3%, 2%, 1% or 0.5%. In another embodiment, said polypeptide of the invention does not consist of the sequence shown in the respective line in Table II, application no. 15, columns 5 and 8.

[76085] In an embodiment, the invention relates to a polypeptide conferring an increase in the respective fine chemical citramalate, citrate, fumarate, glycerate, malate, oxalate, pyruvate, succinate, or vitamin c and/or threonic acid in a non-human organism, especially a microorganism or a plant, or a part thereof, being encoded by the nucleic acid molecule of the invention or used in the process of the invention and having a sequence which distinguishes over the sequence as shown in the respective line in Table II, application no. 15, columns 5 or 8 by one or more amino acids (but not exceeding 5%, preferably 4%, 3%, 2%, 1%, 0.5%, 0.2% or 0.1%). In an embodiment, said polypeptide of the invention does not comprise or consist of the sequence shown in the respective line in Table II, application no. 15, columns 5 or 8. In an embodiment, said polypeptide of the present invention is less than 100%, 99.999%, 99.99%, 99.9% or 99% identical. In one embodiment, said polypeptide which differs at least in one or more amino acids (but not exceeding 5%, preferably 4%, 3%, 2%, 1%, 0.5%, 0.2% or 0.1%) from the polypeptide shown in the respective line in Table II, application no. 15, columns 5 and 8 does not comprise a protein of the sequence shown in the respective line in Table II A and/or II B, application no. 15, columns 5 or 8.

[76086] In an embodiment, the present invention relates to a polypeptide having the activity of the protein as shown in the respective line in Table II, application no. 15, column 3, which distinguishes over the sequence depicted in the respective line in Table II, application no. 15, columns 5 or 8 by one or more amino acids, preferably by more than 5, 6, 7, 8 or 9 amino acids, preferably by more than 10, 15, 20, 25 or 30 amino acids, even more preferred are more than 40, 50, or 60 amino acids and, preferably, the sequence of the polypeptide of the invention distinguishes from the sequence shown in the respective line in Table II, application no. 15, columns 5 and 8 by not more than 80%, 70%, 60%, 50%, 40%, 30%, 20%, 10%, 5%, 4%, 3%, 2%, 1% or 0.5%.

[76087] In another embodiment the polypeptide of the invention takes the form of a preprotein consisting of a plastidial or mitochondrial transit peptide joint to a polypeptide having the activity of the protein as shown in Table II, column 3, from which the transit peptide is preferably cleaved off upon transport of the preprotein into the organelle for example into the plastid or mitochondrion.

[76088] In another embodiment the polypeptide of the invention takes not the form of a preprotein.

[76089] for the disclosure of this paragraph see [0390.1.7.7] above

[76090] for the disclosure of this paragraph see [0391.1.7.7] above

[76091] A polypeptide of the invention can participate in the process of the present invention. The polypeptide or a portion thereof comprises preferably an amino acid sequence, which is sufficiently homologous to an amino acid sequence shown in the respective line in Table II A and/or II B, application no. 15, columns 5 or 8.

[76092] Further, the polypeptide can have an amino acid sequence which is encoded by a nucleotide sequence which hybridizes, preferably hybridizes under stringent conditions as described above, to a nucleotide sequence of the nucleic acid molecule of the present invention.

[76093] Accordingly, the polypeptide has an amino acid sequence which is encoded by a nucleotide sequence that is at least about 35%, 40%, 45%, 50%, 55%, 60%, 65%, 70%, 75%, 80%, 85%, 90%, 91%, 92%, 93%, 94%, 95%, 96%, 97%, 98%, 99%, 99.5% or more homologous to one of the amino acid sequences as shown in the respective line in Table II A and/or II B, application no. 15, columns 5 or 8, or fragments thereof. The preferred polypeptide of the present invention preferably possesses at least one of the activities according to the invention and described herein. A preferred polypeptide of the present invention includes an amino acid sequence encoded by a nucleotide sequence which hybridizes, preferably hybridizes under stringent conditions, to a nucleotide sequence shown in the respective line in Table I A and/or I B, application no. 15, columns 5 or 8, preferably the coding region thereof, or fragments thereto or which is homologous thereto, as defined above

[76094] The polypeptide of the present invention can vary from the sequences shown in the respective line in Table II A and/or II B, application no. 15, columns 5 or 8 in amino acid sequence due to natural variation or mutagenesis, as described in detail herein. Accordingly, the polypeptide comprise an amino acid sequence which is at least about 35%, 40%, 45%, 50%, 55%, 60%, 65%, 70%, 75%, 80%, 85% or 90, 91%, 92%, 93%, 94%, 95%, 96%, 97%, 98%, 99%, 99.5% or more homologous to an entire amino acid sequence shown in the respective line in Table II A and/or II B, application no. 15, columns 5 or 8.

[76095] Biologically active portions of a polypeptide of the present invention include peptides comprising amino acid sequences derived from the amino acid sequence of the polypeptide of the present invention or used in the process of the present invention, e.g., the amino acid sequence shown in the respective line in Table II, application no. 15, columns 5 or 8 or the amino acid sequence of a protein homologous thereto, which include fewer amino acids than a full length polypeptide of the present invention or used in the process of the present invention or the full length protein which is homologous to a polypeptide of the present invention or used in the process of the present invention depicted herein, and exhibit at least one activity of a polypeptide of the present invention or used in the process of the present invention.

[76096] for the disclosure of this paragraph see [0396.1.7.7] above

[76097] Manipulation of the nucleic acid molecule of the invention may result in the production of a protein having differences from the protein as shown in the respective line in Table II, application no. 15, column 5 or 8. Differences shall mean at least one amino acid different from the sequences as shown in the respective line in Table II, application no. 15, column 5 or 8, preferably at least 2, 3, 4, 5, 6, 7, 8, 9 or 10 amino acids (especially but not exceeding 0.1%, preferably 0.2%, 0.5%, 1%, 2%, 3% 4% or 5%), more preferably at least 15, 20, 25, 30, 35, 40, 45 or 50 amino acids (especially but not exceeding 0.5%, preferably 1%, 2%, 3% 4%, 5%, 10% or 25%) different from the sequences as shown in the respective line in Table II, application no. 15, column 5 or 8. These proteins may be improved in efficiency or activity, or may be more stable and therefore present in greater numbers in the cell as compared to the wild-type cell.

[76098] Any mutagenesis strategies for the polypeptide of the present invention or the polypeptide used in the process of the present invention to result in increasing said activity are not meant to be limiting; variations on these strategies will be readily apparent to one skilled in the art. Using such strategies, and incorporating the mechanisms disclosed herein, the nucleic acid molecule and polypeptide of the invention may be utilized to generate algae, ciliates, fungi, other microorganisms like C. glutamicum or plants or parts thereof, expressing proteins as shown in the respective line in Table II, application no. 15, column 5 or 8, or mutated proteins thereof. The nucleic acid molecules and polypeptide molecules of the invention are expressed such that the yield, production, and/or efficiency of production of a desired compound is improved.

[76099] [0399.1.7.15] to [0401.1.7.15] for the disclosure of theses paragraphs see [0399.1.7.7] to [0401.1.7.7] above

[76100] In one embodiment, a protein (=polypeptide) as shown in the respective line in Table II, application no. 15, column 5 or 8 refers to a polypeptide having an amino acid sequence corresponding to the polypeptide of the invention, especially to a polypeptide as shown in Table II, application no. 15, columns 5 or 8 or homologs thereof, or used in the process of the invention, whereas a “non-inventive protein or polypeptide” or “other polypeptide” refers to a polypeptide having an amino acid sequence corresponding to a protein which is not substantially homologous to a polypeptide of the invention, preferably which is not substantially homologous to a polypeptide or protein as shown in the respective line in Table II, application no. 15, column 5 or 8 or homologs thereof, e.g., a protein which does not confer the activity described herein and which is derived from the same or a different organism.

[76101] [0403.1.7.15] to [0409.1.7.15] for the disclosure of these paragraphs see [0403.1.7.7] to [0409.1.7.7] above

[76102] As the nucleic acid molecules of the invention and/or the expression thereof is related to the synthesis of the respective fine chemical citramalate, citrate, fumarate, glycerate, malate, oxalate, pyruvate, succinate, or vitamin c and/or threonic acid its function as a probe extends to the detection of microorganisms, plant tissues, plants, plant variets, plant ecotypes or plant genera with varying, advantageously increased, capability or potential for synthesis of the respective fine chemical citramalate, citrate, fumarate, glycerate, malate, oxalate, pyruvate, succinate, or vitamin c and/or threonic acid. Therefore in one embodiment the present invention relates to a method for analyzing the capability or potential of a plant tissue, a plant, a plant variety or ecotype to produce the respective fine chemical citramalate, citrate, fumarate, glycerate, malate, oxalate, pyruvate, succinate, or vitamin c and/or threonic acid by using the respective antibody of the invention as a probe to detect the amount of the polypeptide encoded by said nucleic acid molecule of the invention in a non-human organism in comparison to another organism.

[76103] Therefore in one embodiment the invention relates to a method to probe a non-human organism for its capability for the production of the respective fine chemical comprising the steps of
[76104] a) analyzing the sequence and/or the expression of the respective nucleic acid molecule of the invention in least two non-human organisms which differ in the capability to produce the respective fine chemical;
[76105] b) associate the different sequence and/or expression level of the nucleic acid molecules of the invention with their different capability to produce the respective fine chemical;
[76106] c) analyze the sequence and/or the expression of the nucleic acid molecule of the invention in at least a third non-human organism;
[76107] d) predict the capability of the at least third organism to produce the respective fine chemical based by comparing the sequence and/or expression of the nucleic acid of the invention to the sequences and/or expression levels of the nucleic acid molecule of the invention of the at least two organisms analyzed in step a.

[76108] [0411.1.7.15] to [0430.1.7.15] for the disclosure of these paragraphs see [0411.1.7.7] to [0430.1.7.7] above

[76109] Accordingly the present invention relates to any cell transgenic for any nucleic acid characterized as part of the invention, e.g. conferring the increase of the respective fine chemical citramalate, citrate, fumarate, glycerate, malate, oxalate, pyruvate, succinate, or vitamin c and/or threonic acid in a cell or a non-human organism or a part thereof, e.g. the nucleic acid molecule of the invention, the nucleic acid construct of the invention, the vector of the invention, the expression cassette according to the invention, or a nucleic acid molecule encoding the polypeptide of the invention, e.g. encoding a polypeptide having an activity as the protein as shown in the respective line in Table II, application no. 15, column 3. Due to the abovementioned activity the respective fine chemical citramalate, citrate, fumarate, glycerate, malate, oxalate, pyruvate, succinate, or vitamin c and/or threonic acid content in a cell or a non-human organism is increased. For example, due to modulation or manipulation, the cellular activity is increased, in a preferred embodiment in organelles such as plastids or mitochondria, e.g. due to an increased expression or specific activity or specific targeting of the subject matters of the invention in a cell or a non-human organism or a part thereof especially in organelles such as plastids or mitochondria, or in another embodiment in the cytosol. Transgenic for a polypeptide having a protein or a protein activity means herein that due to modulation or manipulation of the genome, the activity of protein as shown in the respective line in Table II, application no. 15, column 3 or a protein as shown in the respective line in Table II, application no. 15, column alike activity is increased in the cell or non-human organism or part thereof, especially in organism elles such as plastids or mitochondria, or especially in the cytosol. Examples are described above in context with the process of the invention.

[76110] for the disclosure of this paragraph see [0432.1.7.7] above

[76111] A naturally occurring expression cassette—for example the naturally occurring combination of the promoter of the gene encoding a protein as shown in the respective line in Table II, application no. 15, column 5 or 8, preferably the coding region thereof, or fragments or homologs thereof with the corresponding encoding gene—becomes a transgenic expression cassette when it is modified by non-natural, synthetic “artificial” methods such as, for example, mutagenesis. Such methods have been described (U.S. Pat. No. 5,565,350; WO 00/15815; also see above).

[76112] for the disclosure of this paragraph see [0434.1.7.7] above

[76113] for the disclosure of this paragraph see [0435.1.7.7] above

[76114] Transgenic plants comprising the respective fine chemical(s) synthesized in the process according to the invention can be marketed directly without isolation of the fine chemical synthesized. In the process according to the invention, plants are understood as meaning all plant parts, plant organs such as leaf, stalk, root, tubers or seeds or propagation material or harvested material or the intact plant. In this context, the seed encompasses all parts of the seed such as the seed coats, epidermal cells, seed cells, endosperm or embryonic tissue. The fine chemical produced in the process according to the invention may, however, also be isolated from the plant. In case of citramalate, citrate, fumarate, glycerate, malate, oxalate, pyruvate, succinate, or vitamin c and/or threonic acid this can be in free form or bound to proteins. Fine chemical(s) produced by this process can be harvested by harvesting the non-human organisms either from the culture in which they grow or from the field. For example, this can be done via squeezing, grinding and/or extraction, salt precipitation and/or ion-exchange chromatography of the plant parts, preferably the plant seeds, plant fruits, plant tubers and the like.

[76115] [0437.1.7.15] to [0447.1.7.15] for the disclosure of these paragraphs see [0437.1.7.7] to [0447.1.7.7] above

[76116] The identity and purity of the isolated compound(s) can be determined by prior art techniques. These include high performance liquid chromatography (HPLC), spectroscopic methods, mass spectrometry (MS), staining methods, thin-layer chromatography, NIRS, enzyme assay or microbiological assays. These analytical methods are summarized for example in: Patek et al., Appl. Environ. Microbiol. 60, 133 (1994), Malakhova et al., Biotekhnologiya 11, 27 (1996); Schmidt et al., Bioprocess Engineer. 19, 67 (1998), Ullmann's Encyclopedia of Industrial Chemistry (1996) Vol. A27, VCH, Weinheim, pp. 89-90, pp. 521-540, pp. 540-547, pp. 559566, 575-581 and pp. 581-587, Michal G., “Biochemical Pathways: An Atlas of Biochemistry and Molecular Biology”, John Wiley and Sons (1999); Fallon A. et al. “Applications of HPLC in Biochemistry” in “Laboratory Techniques in Biochemistry and Molecular Biology”, Vol. 17 (1987). The fine chemical of the invention can for example be analyzed advantageously via HPLC or GC separation methods and detected by MS or MSMS methods. The unambiguous detection for the presence of the fine chemical containing products can be obtained by analyzing recombinant organisms using analytical standard methods: GC, GC-MS or TLC, as described on several occasions by Christie and the references therein (1997, in: Advances on Lipid Methodology, Fourth Edition: Christie, Oily Press, Dundee, 119-169; 1998, Gaschromatographie-Massenspektrometrie-Verfahren [Gas chromatography/mass spectrometric methods], Lipide 33:343-353). The material to be analyzed can be disrupted by sonication, grinding in a glass mill, liquid nitrogen and grinding, cooking, or via other applicable methods; see also Biotechnology of Vitamins, Pigments and Growth Factors, Edited by Erik J. Vandamme, London, 1989, p.96 to 103.

[76117] The fine chemical obtained in the process are suitable as starting material for the synthesis of further products of value. For example, in case of vitamin c or ascorbate and derivates and/or threonic acid they can be used in combination with each other or alone for the production of pharmaceuticals, foodstuffs, animal feeds or cosmetics.

[76118] The fine chemical vitamin c or ascorbate and derivates and/or threonic acid can then be processed further directly into foodstuffs or animal feeds or for other applications, for example according to the disclosures made in U.S. Pat. No. 6,399,059: Thermally stable enzyme composition and method of preparing the same, U.S. Pat. No. 6,361,800: Multi-vitamin and mineral supplement , U.S. Pat. No. 6,348,200: Cosmetic composition, U.S. Pat. No. 6,338,854: Photoaging skin-care preparation and method of treating wrinkled skin, U.S. Pat. No. 6,323,188: Treatment and prevention of cardiovascular diseases, heart attack, and stroke, primary and subsequent, with help of aspirin and certain vitamins, U.S. Pat. No. 6,299,896: Multi-vitamin and mineral supplement, U.S. Pat. No. 6,344,573: Process for extraction and concentration of liposoluble vitamins and provitamins, growth factors and animal and vegetable hormones from residues and by-products of industrialized animal and vegetable products, U.S. Pat. No. 6,242,227: Method of vitamin production, which are expressly incorporated herein by reference. The fermentation broth, fermentation products, plants or plant products can be purified as described in above mentioned applications or by other methods known to the person skilled in the art and described herein below.

[76119] Accordingly, the present invention relates a method for the production of a pharmaceuticals, food stuff, animal feeds, nutrients or cosmetics comprising the steps of the process according to the invention, including the isolation of the fine chemical produced or a composition produced comprising the fine chemical, and, if desired, formulating the product with a pharmaceutical acceptable carrier or formulating the product in a form acceptable for an application in agriculture or formulating the product in a form acceptable for an application as food stuff, animal feed, nutrient or cosmetic. A further embodiment according to the invention is the use of the fine chemical produced in the process or of the transgenic non-human organisms in animal feeds, foodstuffs, medicines, food supplements, cosmetics or pharmaceuticals.

[76120] A further embodiment according to the invention is the use of L-threonic acid for increasing the action or “potency” of vitamin C. Simultaneous feeding of threonic acid and ascorbate can enhance ascorbate uptake.

[76121] L-threonic acid calcium is a major calcium treatment project.Threonic acid is a natural constituent in leaves of certain plants. It is derived from ascorbate either by enzymatic or natural oxidation.The metabolism of ascorbic acid involves its oxidation to dehydroascorbic acid, followed by the formation of the aldonic acids L-lyxonic acid, L-xylonic acid, and L-threonic acid.

[76122] A further embodiment according to the invention is the use of the fumarate as substrate in electrochemical bioreactor systems.

[76123] A further embodiment according to the invention is the use of glyceric acid in glycerate-based surfactants, which are a new class of swelling amphiphiles which swell to a finite degree with water. It is further used as an unusual acyl substituent in gellan gum, or in glycerate phosphates as activated precursor for biosynthetic processes.

[76124] A further embodiment according to the invention is the use of pyruvate as starting material for the production of lactate which then can be used to produce acrylates such as sealants, coatings, textiles, and biodegradable plastics.

[76125] A further embodiment according to the invention is the use of succinate to produce succinate semialdehyde, 1,4-butanediol (BDO) and related products, tetrahydrofuran and y-butyrolactone, N-methyl pyrrolidinone (NMP) and 2-pyrrolidinone, adipic acid, linear aliphatic succinate esters and related compounds that can serve as precursors for industrial production of polymers. Succinate salts are further used according to the invention as de-icers and herbicide additives.

[76126] A further embodiment according to the invention is the use of citrate (E330) in foodstuff for conservation and to create a soure taste. Further embodiment is the use of citrate pharmaceutically used as a dispersing agent for creation of stable suspensions. A further embodiment according to the invention is the use of citrate as a component in buffer solutions, including the commonly used SSC 20×hybridization buffer. A further embodiment according to the invention is the use of citrate trinatrium- and trilithiumsalts to modify the hardening speed of concrete and other cementitious materials.

[76127] A further embodiment according to the invention is the use of oxalate to reduce dentin permeability under adhesive restorations.

[76128] [0450.1.7.15] to [0452.1.7.15] for the disclosure of these paragraphs see [0450.1.7.7] to [0452.1.7.7] above

[76129] Further in another embodiment, the present invention relates to the use of the nucleic acid molecule of the invention or used in the method of the invention alone or in combination with other genes of the respective fine chemical synthesis for example of the biosynthesis of a substrate or product of the citric acid cycle, a derivate of one of the substrates or products (for example pyruvate and malate as derivates of citramalate, acetyl-CoA as derivate of pyruvate or citrate, pyruvate as derivate of glycerate) or vitamin c, ascorbic acid or ascorbate and derivates like oxalate and/or threonic acid, the polypeptide of the invention or used in the method of the invention, the nucleic acid construct of the invention, the expression cassette of the invention, the vector of the invention, the plant or plant tissue or the host cell of the invention, for the production of plant resistant to a herbicide inhibiting eventually the production of the fine chemical.

[76130] for the disclosure of this paragraph see [0454.1.7.7] above

[76131] In one embodiment, the present invention relates to a method for the identification of a gene product conferring the production of or an increase in the fine chemical production in a non-human cell, comprising the following steps:
[76132] (a) contacting, e.g. hybridizing, a, some or all nucleic acid molecules of a sample, e.g. cells, tissues, plants or microorganisms or a nucleic acid library, which can contain a candidate gene encoding a gene product conferring the production of or an increase in the fine chemical after expression, with the nucleic acid molecule of the present invention as shown in the respective line in column 5 or 8 of Table I A or B of application no. 15, preferably the coding region thereof, or a fragment or homolog thereof;
[76133] (b) identifying the nucleic acid molecules, which hybridize under relaxed stringent conditions with the nucleic acid molecule of the present invention in particular to the nucleic acid molecule sequence shown in the respective line in Table I, application no. 15, columns 5 or 8, preferably the coding region thereof, of a fragment or a homolog thereof, preferably in Table I B, application no. 15, columns 5 or 8, preferably the coding region thereof, of a fragment or a homolog thereof, and, optionally, isolating the full length cDNA clone or complete genomic clone;
[76134] (c) introducing the candidate nucleic acid molecules or a fragment thereof in host cells, preferably in a plant cell or a microorganism, appropriate for producing the fine chemical;
[76135] (d) expressing the identified nucleic acid molecules in the host cells for which the production of or the increased production of the fine chemical is desired;
[76136] (e) assaying the fine chemical level in the non-human host cells; and
[76137] (f) identifying the nucleic acid molecule and/or its gene product which expression confers the production of or an increase in the fine chemical level in the non-human host cell after expression compared to the wild type.

[76138] for the disclosure of this paragraph see [0456.1.7.7] above

[76139] In another embodiment, the present invention relates to a method for the identification of a gene product conferring the production of or an increase in the fine chemical production in a cell, comprising the following steps:
[76140] (a) identifying a nucleic acid molecule of a non-human organism, which is at least 20%, 25%, 30%, 35%, 40%, 50%, 60%, 70%, 80%, 90%, 95%, 96%, 97%, 98%, 99%, 99.5% or more homolog to the nucleic acid molecule encoding a polypeptide comprising the polypeptide molecule as shown in the respective line in column 5 or 8 of Table II, application no. 15, or comprising a consensus sequence or a polypeptide motif as shown in the respective line in column 8 of Table IV, application no. 15, or being encoded by a nucleic acid molecule comprising a polynucleotide as shown in the respective line in column 5 or 8 of Table I, application no. 15, preferably the coding region thereof, or a homologue thereof as described herein, for example via homology search in a data bank;
[76141] (b) introducing the candidate nucleic acid molecule in non-human host cells, preferably in a plant cell or a microorganism, appropriate for producing the fine chemical;
[76142] (c) expressing the identified nucleic acid molecule in the non-human host cells;
[76143] (d) assaying the fine chemical level in the non-human host cells; and
[76144] (e) identifying the nucleic acid molecule and its gene product which expression confers the production of or an increase in the fine chemical level in the non-human host cell after expression compared to the wild type.

[76145] for the disclosure of this paragraph see [0458.1.7.7] above

[76146] Further, the nucleic acid molecules disclosed herein, in particular the nucleic acid molecules shown in the respective line in column 5 or 8 of Table I A or B of application no. 15, may be sufficiently homologous to the sequences of related species such that these nucleic acid molecules may serve as markers for the construction of a genomic map in related organism or for association mapping. Furthermore natural variation in the genomic regions corresponding to nucleic acids disclosed herein, in particular the nucleic acid molecule shown in the respective line in column 5 or 8 of Table I A or B, of application no. 15 or homologous thereof, may lead to variation in the activity of the proteins disclosed herein, in particular the proteins comprising polypeptides as shown in the respective lines in column 5 or 8 of Table II A or B, of application no. 15 or their homologous, or comprising the consensus sequence or the polypeptide motif as shown in the respective line in column 8 of Table IV, and in consequence in a natural variation of an increased fine chemical production.

[76147] In consequence natural variation eventually also exists in form of more active allelic variants leading already to a relative increase in the fine chemical. Different variants of the nucleic acid molecules disclosed herein, in particular the nucleic acid molecules comprising the nucleic acid molecules as shown in the respective line in column 5 or 8 of Table I A or B of application no. 15, preferably the coding region thereof, which corresponds to different levels of increase in fine chemical, e.g. different levels of increase in fine chemical, can be indentified and used for marker assisted breeding for an enhanced production of the fine chemical.

[76148] Natural variation may also exist in the regulatory regions, e.g. the promoters of the natural genes comprising the nucleic acid molecules as shown in the respective line column 5 or 8 of Table I A or B of application no. 15, preferably the coding region thereof, which can similarly correspond to different levels of increase in the fine chemical, e.g. different levels of increase in the fine chemical can be identified and used for marker assisted breeding for an enhanced production of the fine chemical.

[76149] Accordingly, the present invention relates to a method for breeding plants for the production of the fine chemical, comprising
[76150] (a) selecting a first plant variety with an increased production of the fine chemical, e.g. based on an increased expression of a nucleic acid molecule of the invention as disclosed herein, in particular of a nucleic acid molecule comprising a nucleic acid molecule as shown in the respective line in column 5 or 8 of Table I A or B of application no. 15, preferably the coding region thereof, or fragments or homologs thereof, or a polypeptide comprising a polypeptide as shown in the respective line in column 5 or 8 of Table II A or B of application no. 15, or fragments or homologs thereof, or comprising a consensus sequence or a polypeptide motif as shown in the respective line in column 8 of Table IV, or a homolog thereof, as described herein;
[76151] (b) associating the level of increased production of the fine chemical, with the expression level or the genomic structure of a gene encoding said polypeptide or said nucleic acid molecule;
[76152] (c) crossing the first plant variety with a second plant variety, which significantly differs in its level of fine chemical; and
[76153] (d) identifying, which of the offspring varieties has got increased production of the fine chemical by the expression level of said polypeptide or nucleic acid molecule or the genomic structure of the gene(s) encoding said polypeptide or nucleic acid molecule of the invention.

[76154] [0462.1.7.15] to [0479.1.7.15] for the disclosure of these paragraphs see [0462.1.7.7] to [0479.1.7.7] above

[76155] In a further embodiment the nucleic acid molecule of the invention, the polypeptide of the invention, the nucleic acid construct of the invention, the expression cassette of the invention, the non-human organisms, the non-human host cell, the microorganisms, the plant, plant cell, or the part thereof, of the invention, the vector of the invention, the agonist identified with the method of the invention, the nucleic acid molecule identified with the method of the present invention, can be used for the production of the fine chemical or of the fine chemical and one or more substrate or product of the citric acid cycle, a derivate of one of the substrates or products or vitamin c or derivates of ascorbic acid and/or threonic acid.

[76156] Accordingly, the nucleic acid molecule of the invention, or the nucleic acid molecule identified with the method of the present invention or the complement sequences thereof, the polypeptide of the invention, the nucleic acid construct of the invention, the expression cassette of the invention, the non-human organism, the non-human host cell, the microorganism, the plant, plant cell, or the part thereof of the invention, the vector of the invention, the agonist identified with the method of the invention, the antibody of the present invention, can be used for the production of or the increase in the fine chemical in a non-human organism or part thereof, e.g. in a cell.

[76157] for the disclosure of this paragraph see [0481.1.7.7] above

[76158] for the disclosure of this paragraph see [0482.1.7.7] above

[76159] A special embodiment of this invention is related to genes which increase or generate the production of the fine chemical citramalate, citrate, fumarate, malate and/or succinate in plant cells, plants or part thereof. Phenotypes thereto are associated with yield of plants (=yield related phenotypes). In accordance with the invention, therefore, the respective genes identified in Table I, wherein in column 7 citramalate, citrate, fumarate, malate and/or succinate are mentioned, especially the coding region thereof, or homologs or fragments thereof,may be employed to enhance any yield-related phenotype. Increased yield may be determined in field trials of transgenic plants and suitable control plants. Alternatively, a transgene's ability to increase yield may be determined in a model plant. An increased yield phenotype may be determined in the field test or in a model plant by measuring any one or any combination of the following phenotypes, in comparison to a control plant: yield of dry harvestable parts of the plant, yield of dry aerial harvestable parts of the plant, yield of underground dry harvestable parts of the plant, yield of fresh weight harvestable parts of the plant, yield of aerial fresh weight harvestable parts of the plant yield of underground fresh weight harvestable parts of the plant, yield of the plant's fruit (both fresh and dried), grain dry weight, yield of seeds (both fresh and dry), and the like.

[76160] The most basic yield-related phenotype is increased yield associated with the presence of the gene or a homolog or a fragment thereof as a transgene in the plant, i.e., the intrinsic yield of the plant. Intrinsic yield capacity of a plant can be, for example, manifested in a field test or in a model system by demonstrating an improvement of seed yield (e.g. in terms of increased seed/grain size, increased ear number, increased seed number per ear, improvement of seed filling, improvement of seed composition, embryo and/or endosperm improvements, and the like); modification and improvement of inherent growth and development mechanisms of a plant (such as plant height, plant growth rate, pod number, pod position on the plant, number of internodes, incidence of pod shatter, efficiency of nodulation and nitrogen fixation, efficiency of carbon assimilation, improvement of seedling vigour/early vigour, enhanced efficiency of germination (under non-stressed conditions), improvement in plant architecture.

[76161] Increased yield-related phenotypes may also be measured to determine tolerance to abiotic environmental stress. Abiotic stresses include drought, low temperature, salinity, osmotic stress, shade, high plant density, mechanical stresses, and oxidative stress, and yield-related phenotypes are encompassed by tolerance to such abiotic stresses. Additional phenotypes that can be monitored to determine enhanced tolerance to abiotic environmental stress include, without limitation, wilting; leaf browning; loss of turgor, which results in drooping of leaves or needles stems, and flowers; drooping and/or shedding of leaves or needles; the leaves are green but leaf angled slightly toward the ground compared with controls; leaf blades begun to fold (curl) inward; premature senescence of leaves or needles; loss of chlorophyll in leaves or needles and/or yellowing. Any of the yield-related phenotypes described above may be monitored in field tests or in model plants to demonstrate that a transgenic plant has increased tolerance to abiotic environmental stress. In accordance with the invention, the respective genes identified in Table 1, in case in column 7 citramalate, citrate, fumarate, malate and/or succinate is indicated, especially the coding region thereof, or homologs or fragments thereof, may be employed to enhance tolerance to abiotic environmental stress in a plant means that the plant, when confronted with abiotic environmental stress.

[76162] A polypeptide conferring an yield-increasing activity can be encoded by a respective nucleic acid sequence as shown in Table I, column 5 or 8, and/or comprises or consists of a respective polypeptide as depicted in Table II, column 5 and 8, and/or can be amplified with the respective primer set shown in Table III, column 8, in case in column 7 citramalate, citrate, fumarate, malate and/or succinate is indicated.

[76163] “Improved adaptation” to environmental stress like e.g. freezing and/or chilling temperatures refers to an improved plant performance under environmental stress conditions.

[76164] A modification, i.e. an increase, can be caused by endogenous or exogenous factors. For example, an increase in activity in an organism or a part thereof can be caused by adding a gene product or a precursor or an activator or an agonist to the media or nutrition or can be caused by introducing said subjects into an organism, transient or stable. Furthermore such an increase can be reached by the introduction of the respective inventive nucleic acid sequence or the encoded protein in the correct cell compartment for example into the nucleus or cytoplasmic respectively or into plastids either by transformation and/or targeting.

[76165] The term “yield” as used herein generally refers to a measurable produce from a plant, particularly a crop. Yield and yield increase (in comparison to a non-transformed starting or wild-type plant) can be measured in a number of ways, and it is understood that a skilled person will be able to apply the correct meaning in view of the particular embodiments, the particular crop concerned and the specific purpose or application concerned. The terms “improved yield” or “increased yield” can be used interchangeable.

[76166] As used herein, the term “improved yield” or the term “increased yield” means any improvement in the yield of any measured plant product, such as grain, fruit or fiber. In accordance with the invention, changes in different phenotypic traits may improve yield. For example, and without limitation, parameters such as floral organ development, root initiation, root biomass, seed number, seed weight, harvest index, tolerance to abiotic environmental stress, leaf formation, phototropism, apical dominance, and fruit development, are suitable measurements of improved yield. Any increase in yield is an improved yield in accordance with the invention. For example, the improvement in yield can comprise a 0.1%, 0.5%, 1%, 3%, 5%, 10%, 15%, 20%, 30%, 40%, 50%, 60%, 70%, 80%, 90% or greater increase in any measured parameter. For example, an increase in the bushel/acre yield of soybeans or corn derived from a crop comprising plants which are transgenic for the nucleotides and polypeptides of Table I, in case in column 7 citramalate, citrate, fumarate, malate and/or succinate is mentioned, as compared with the bushel/acre yield from untreated soybeans or corn cultivated under the same conditions, is an improved yield in accordance with the invention. The increased or improved yield can be achieved in the absence or presence of stress conditions.

[76167] For example, enhanced or increased “yield” refers to one or more yield parameters selected from the group consisting of biomass yield, dry biomass yield, aerial dry biomass yield, underground dry biomass yield, fresh-weight biomass yield, aerial fresh-weight biomass yield, underground fresh-weight biomass yield; enhanced yield of harvestable parts, either dry or freshweight or both, either aerial or underground or both; enhanced yield of crop fruit, either dry or fresh-weight or both, either aerial or underground or both; and preferably enhanced yield of seeds, either dry or fresh-weight or both, either aerial or underground or both.

[76168] Crop yield is defined herein as the number of bushels of relevant agricultural product (such as grain, forage, or seed) harvested per acre. Crop yield is impacted by abiotic stresses, such as drought, heat, salinity, and cold stress, and by the size (biomass) of the plant. Traditional plant breeding strategies are relatively slow and have in general not been successful in conferring increased tolerance to abiotic stresses. Grain yield improvements by conventional breeding have nearly reached a plateau in maize.

[76169] Accordingly, the yield of a plant can depend on the specific plant/crop of interest as well as its intended application (such as food production, feed production, processed food production, biofuel, biogas or alcohol production, or the like) of interest in each particular case. Thus, in one embodiment, yield is calculated as harvest index (expressed as a ratio of the weight of the respective harvestable parts divided by the total biomass), harvestable parts weight per area (acre, square meter, or the like); and the like. The harvest index, i.e., the ratio of yield biomass to the total cumulative biomass at harvest, in maize has remained essentially unchanged during selective breeding for grain yield over the last hundred years. Accordingly, recent yield improvements that have occurred in maize are the result of the increased total biomass production per unit land area. This increased total biomass has been achieved by increasing planting density, which has led to adaptive phenotypic alterations, such as a reduction in leaf angle, which may reduce shading of lower leaves, and tassel size, which may increase harvest index. Harvest index is relatively stable under many environmental conditions, and so a robust correlation between plant size and grain yield is possible. Plant size and grain yield are intrinsically linked, because the majority of grain biomass is dependent on current or stored photosynthetic productivity by the leaves and stem of the plant. As with abiotic stress tolerance, measurements of plant size in early development, under standardized conditions in a growth chamber or greenhouse, are standard practices to measure potential yield advantages conferred by the presence of a transgene.

[76170] Acccordingly, the yield of a plant can be increased by improving one or more of the yield-related phenotypes.

[76171] Such yield-related phenotypes or traits of a plant the improvement of which results in increased yield comprise, without limitation, the increase of the intrinsic yield capacity of a plant, improved nutrient use efficiency, and/or increased stress tolerance.

[76172] For example, yield refers to biomass yield, e.g. to dry weight biomass yield and/or fresh-weight biomass yield. Biomass yield refers to the aerial or underground parts of a plant, depending on the specific circumstances (test conditions, specific crop of interest, application of interest, and the like). In one embodiment, biomass yield refers to the aerial and underground parts. Biomass yield may be calculated as fresh-weight, dry weight or a moisture adjusted basis. Biomass yield may be calculated on a per plant basis or in relation to a specific area (e.g. biomass yield per acre/square meter/ or the like).

[76173] In other embodiment, “yield” refers to seed yield which can be measured by one or more of the following parameters: number of seeds or number of filled seeds (per plant or per area (acre/square meter/ or the like)); seed filling rate (ratio between number of filled seeds and total number of seeds); number of flowers per plant; seed biomass or total seeds weight (per plant or per area (acre/square meter/ or the like); thousand kernel weight (TKW; extrapolated from the number of filled seeds counted and their total weight; an increase in TKW may be caused by an increased seed size, an increased seed weight, an increased embryo size, and/or an increased endosperm). Other parameters allowing to measure seed yield are also known in the art. Seed yield may be determined on a dry weight or on a fresh weight basis, or typically on a moisture adjusted basis, e.g. at 15.5 percent moisture.

[76174] For example, the term “increased yield” means that the plant, exhibits an increased growth rate, under conditions of abiotic environmental stress, compared to the corresponding wild-type plant.

[76175] An increased growth rate may be reflected inter alia by or confers an increased biomass production of the whole plant, or an increased biomass production of the aerial parts of a plant, or by an increased biomass production of the underground parts of a plant, or by an increased biomass production of parts of a plant, like stems, leaves, blossoms, fruits, and/or seeds. Increased yield includes higher fruit yields, higher seed yields, higher fresh matter production, and/or higher dry matter production.

[76176] The term “increased yield” means that the plant, exhibits a prolonged growth under conditions of abiotic environmental stress, as compared to the corresponding, e.g. non-transformed, wild type organism. A prolonged growth comprises survival and/or continued growth of the plant, at the moment when the non-transformed wild type organism shows visual symptoms of deficiency and/or death.

[76177] When the plant of the invention is a corn plant increased yield for corn plants means, for example, increased seed yield, in particular for corn varieties used for feed or food. Increased seed yield of corn refers to an increased kernel size or weight, an increased kernel per ear, or increased ears per plant. Alternatively or in addition the cob yield may be increased, or the length or size of the cob is increased, or the kernel per cob ratio is improved.

[76178] When the plant of the invention is a soy plant, increased yield for soy plants means increased seed yield, in particular for soy varieties used for feed or food. Increased seed yield of soy refers for example to an increased kernel size or weight, an increased kernel per pod, or increased pods per plant.

[76179] When the plant of the invention is an oil seed rape (OSR) plant, increased yield for OSR plants means increased seed yield, in particular for OSR varieties used for feed or food. Increased seed yield of OSR refers to an increased seed size or weight, an increased seed number per silique, or increased siliques per plant.

[76180] When the plant of the invention is a cotton plant,increased yield for cotton plants means increased lint yield. Increased lint yield of cotton refers in one embodiment to an increased length of lint.

[76181] When the plant of the invention is a wheat plant increased yield for wheat plants means, for example, increased seed yield, in particular for wheat varieties used for feed or food. Increased seed yield of wheat refers to an increased kernel size or weight, an increased kernel per ear, or increased ears per plant. Increased seed yield of wheat refers also to an increased grain size or weight, an increased number of grains per spike, or increased number of spikes per plant. Alternatively or in addition increased seed yield of wheat refers also to an increased grain yield, increased length of spikes, increased number of spikelets per spike , increased 1000 grain weight or increased flag leaf area (flag leaf is the leaf directely below the spike). Said increased yield can typically be achieved by enhancing or improving, one or more yield-related traits of the plant. Such yield-related traits of a plant comprise, without limitation, the increase of the intrinsic yield capacity of a plant, improved nutrient use efficiency, and/or increased stress tolerance, in particular increased abiotic stress tolerance.

[76182] Intrinsic yield capacity of a plant can be, for example, manifested by improving the specific (intrinsic) seed yield (e.g. in terms of increased seed/ grain size, increased ear number, increased seed number per ear, improvement of seed filling, improvement of seed composition, embryo and/or endosperm improvements, or the like); modification and improvement of inherent growth and development mechanisms of a plant (such as plant height, plant growth rate, pod number, pod position on the plant, number of internodes, incidence of pod shatter, efficiency of nodulation and nitrogen fixation, efficiency of carbon assimilation, improvement of seedling vigour/early vigour, enhanced efficiency of germination (under stressed or non-stressed conditions), improvement in plant architecture, cell cycle modifications, photosynthesis modifications, various signaling pathway modifications, modification of transcriptional regulation, modification of translational regulation, modification of enzyme activities, and the like); and/or the like. The improvement or increase of stress tolerance of a plant can for example be manifested by improving or increasing a plant's tolerance against stress, particularly abiotic stress. In the present application, abiotic stress refers generally to abiotic environmental conditions a plant is typically confronted with, including, but not limited to, drought (tolerance to drought may be achieved as a result of improved water use efficiency), heat, low temperatures and cold conditions (such as freezing and chilling conditions), salinity, osmotic stress , shade, high plant density, mechanical stress, oxidative stress, and the like.

[76183] The increased plant yield can also be mediated by increasing the “nutrient use efficiency of a plant”, e.g. by improving the use efficiency of nutrients including, but not limited to, phosphorus, potassium, and nitrogen. Further, higher yields may be obtained with current or standard levels of nitrogen use.

[76184] Generally, the term “increased tolerance to stress” can be defined as survival of plants, and/or higher yield production, under stress conditions as compared to a non-transformed wild type or starting plant: For example, the plant of the invention or produced according to the method of the invention is better adapted to the stress conditions. “Improved adaptation” to environmental stress like e.g. drought, heat, nutrient depletion, freezing and/or chilling temperatures refers herein to an improved plant performance resulting in an increased yield, particularly with regard to one or more of the yield related traits as defined in more detail above.

[76185] During its life-cycle, a plant is generally confronted with a diversity of environmental conditions. Any such conditions, which may, under certain circumstances, have an impact on plant yield, are herein referred to as “stress” condition. Environmental stresses may generally be divided into biotic and abiotic (environmental) stresses. Unfavorable nutrient conditions are sometimes also referred to as “environmental stress”. The present invention does also contemplate solutions for this kind of environmental stress, e.g. referring to increased nutrient use efficiency.

[76186] For the purposes of the description of the present invention, the terms “enhanced tolerance to abiotic stress”, “enhanced resistance to abiotic environmental stress”, “enhanced tolerance to environmental stress”, “improved adaptation to environmental stress” and other variations and expressions similar in its meaning are used interchangeably and refer, without limitation, to an improvement in tolerance to one or more abiotic environmental stress(es) as described herein and as compared to a corresponding origin or wild type plant or a part thereof.

[76187] The term abiotic stress tolerance(s) refers for example low temperature tolerance, drought tolerance or improved water use efficiency (WUE), heat tolerance, salt stress tolerance and others. Studies of a plant's response to desiccation, osmotic shock, and temperature extremes are also employed to determine the plant's tolerance or resistance to abiotic stresses. Water use efficiency (WUE) is a parameter often correlated with drought tolerance. In selecting traits for improving crops, a decrease in water use, without a change in growth would have particular merit in an irrigated agricultural system where the water input costs were high. An increase in growth without a corresponding jump in water use would have applicability to all agricultural systems. In many agricultural systems where water supply is not limiting, an increase in growth, even if it came at the expense of an increase in water use also increases yield.

[76188] Drought stress means any environmental stress which leads to a lack of water in plants or reduction of water supply to plants, including a secondary stress by low temperature and/or salt, and/or a primary stress during drought or heat, e.g. desiccation etc.

### Specific Embodiments

[76189] Accordingly, this invention provides respective measures and methods to produce plants with increased yield, e.g. genes conferring an increased yield-related trait, for example enhanced tolerance to abiotic environmental stress, for example an increased drought tolerance and/or low temperature tolerance and/or an increased nutrient use efficiency, intrinsic yield and/or another increased yield-related trait, upon expression or over-expression. Accordingly, the present invention provides such genes in case in column 7 of the respective Table or citramalate, citrate, fumarate, malate and/or succinate is indicated. In particular, such genes are described in column 5 as well as in column 8 of Tables I, especially the coding region thereof, or homologs or fragments thereof, in case citramalate, citrate, fumarate, malate and/or succinate are indicated in column 7 or the respective polypeptides are described in column 5 as well as in column 8 of Table II, or homologs or fragments thereof, in case citramalate, citrate, fumarate, malate and/or succinate are indicated in column 7.

[76190] Accordingly, the present invention provides respective transgenic plants showing one or more improved yield-related traits as compared to the corresponding origin or the wild type plant and methods for producing such transgenic plants with increased yield in case in column 7 of the respective Table “citramalate ” or “citrate” or “fumarate”or “malate”or “succinate” is indicated.

[76191] In one embodiment, one or more of said yield-increasing activities are increased by increasing the amount and/or the specific activity of one or more proteins listed in Table II, column 5 or 8 in a compartment of a cell indicated in Table II, column 6, in case in column 7 of the respective Table “citramalate ” or “citrate” or “fumarate”or “malate”or “succinate” is indicated.

[76192] Accordingly to present invention, the yield of the plant of the invention is increased by improving one or more of the yield-related traits as defined herein. Said increased yield in accordance with the present invention can typically be achieved by enhancing or improving, in comparison to an origin or wild-type plant, one or more yield-related traits of said plant. Such yield-related traits of a plant the improvement of which results in increased yield comprise, without limitation, the increase of the intrinsic yield capacity of a plant, improved nutrient use efficiency, like nitrogen use efficiency, and/or increased stress tolerance.

[76193] In one embodiment, the present invention provides respective transgenic plants showing one or more improved yield-related traits, preferably increased drought tolerance as compared to the corresponding origin or the wild type plant and methods for producing such transgenic plants with increased yield in case in column 7 of the respective Table “citramalate” or “citrate” or “fumarate” or “malate” or “succinate” is indicated.

[76194] In a further embodiment the present invention is characterized by the features as disclosed in the following items:

[76195] Item 1. A process for the production of a fine chemical selected from the group consisting of: citramalate, citrate, fumarate, glycerate, malate, oxalate, pyruvate, succinate and/or vitamin c and/or threonic acid
[76196] (a) increasing or generating one or more activities selected from the group consisting of 2-C-methyl-D-erythritol 4-phosphate cytidylyltransferase, 2-isopropylmalate synthase, 2-oxoglutarate dehydrogenase E1 subunit, 30S ribosomal protein S3, 47266012-protein, 49747384_SOYBEAN-protein, 50S ribosomal protein L14, ABC transporter ATP binding component, ABC transporter permease protein, acetyl-CoA acetyltransferase, acetyl-CoA hydrolase, acetyltransferase, acyl-CoA dehydrogenase, acyl-CoA synthase, adenylate kinase, adenylylsulfate kinase, agmatinase, amino-acid acetyltransferase, aminotransferase, ammonium transporter, arginine N-succinyltransferase, aspartase, AO g13930-protein, ATP-binding component of a transport system, auxin response factor, AX653549-protein, AY087308-protein, b0801-protein, b1003-protein, b1285-protein, b1425-protein, b1445-protein, b1522-protein, b1670-protein, b1672-protein, b1742-protein, b1898-protein, b2399-protein, b3777-protein, b3791-protein, b3814-protein, b3817-protein, b3989-protein, b4029-protein, b4050-protein, b4056-protein, beta-hydroxylase, betaine aldehyde dehydrogenase, bifunctional purine biosynthesis protein, branched chain aminotransferase, calcium-dependent protein kinase, cation-transporting ATPase, CBL-interacting protein kinase, CDP-diacylglycerol-glycerol-3-phosphate 3-phosphatidyltransferase, CDP-diacylglycerol-serine O-phosphatidyltransferase, CDP-glucose-4,6-dehydratase, citrate synthase, coproporphyrinogen III oxidase, CTP synthase, cystathionine beta-lyase, cysteine synthase A, cysteine synthase B, dATP pyrophosphohydrolase, dihydrolipoamide dehydrogenase, DnaJ-like chaperone, electron transfer flavoprotein subunit beta, electron transport complex protein, eukaryotic translation initiation factor 5, Fe—S subunit of oxidoreductase, flagellar M-ring protein, fumarate hydratase, gamma-glutamyltranspeptidase, gibberellin 20-oxidase, glucose dehydrogenase, glucose-1-phosphate cytidylyltransferase, glucose-6-phosphate 1-dehydrogenase, glutamate dehydrogenase, glutamate-ammonia-ligase, glutaredoxin, glycerate kinase, glycerol kinase, Glycine cleavage system T aminomethyl-transferase, GM02LC17485-protein, GM02LC5744-protein, heat shock protein, heat shock transcription factor, hexose transporter, hydrolase, isochorismate synthase, isocitrate dehydrogenase, isocitrate lyase, leucyl/phenylalanyl-tRNA-protein transferase, lipopolysaccharide core biosynthesis protein, lipoprotein precursor, lysine decarboxylase, malate dehydrogenase, malonyl CoA-acyl carrier protein transacylase, membrane protein, membrane transport protein, methylglyoxal synthase, methylglyoxalase, methyltransferase, monothiol glutaredoxin, monthiol glutaredoxin, multiple antibiotic resistance protein, murein transglycosylase, NADH-quinone oxidoreductase subunit, O-antigen chain length determinant, oxidoreductase, oxidoreductase subunit, oxireductase, phenylacetic acid degradation protein, phenylalanine ammonia-lyase, phosphatase, phosphate import ATP-binding protein, photosystem I reaction centre subunit, photosystem 11-protein, polygalacturonase, protease, protein phosphatase, purine-nucleoside phosphorylase, pyruvate carboxylase, pyruvate kinase, recombinase A, ribulokinase, RNA polymerase sigma factor, sec-independent protein translocase, Sec-independent protein translocase subunit, slr1170-protein, thioredoxin, thioredoxin family protein, thioredoxin reductase, threonine efflux protein, threonine synthase, transcription factor, transcriptional regulator, transcriptional regulator protein, translation initiation factor subunit, TTC1386-protein, xanthine dehydrogenase, XM_{—}473199-protein, ycr102c-protein, YDL159W-A-protein, ygl237c-protein, YGR193C-protein, ygr221 c-protein, yhr131c-protein, yhr207c-protein, YKL038W-protein, YKL140W-protein, ylr065c-protein, ylr326w-protein, yml084w-protein, yol073c-protein, yol160w-protein, zinc finger protein, and zinc transporter, in a non-human organism or a part thereof, preferably a microorganism, a plant cell, a plant or a part thereof, as compared to a corresponding non-transformed wild type non-human organism or a part thereof; and
[76197] (b) growing the non-human organism or a part thereof under conditions which permit the production of citramalate, citrate, fumarate, glycerate, malate, oxalate, pyruvate, succinate and/or vitamin c and/or threonic acid or a composition comprising citramalate, citrate, fumarate, glycerate, malate, oxalate, pyruvate, succinate and/or vitamin c and/or threonic acid in said non-human organism or in the culture medium surrounding said non-human organism.

[76198] Item 2. A process for the production of a fine chemical selected from the group consisting of: citramalate, citrate, fumarate, glycerate, malate, oxalate, pyruvate, succinate and/or vitamin c and/or threonic acid, which comprises
[76199] (A)
   [76200] (i) increasing or generating of the expression of; and/or
   [76201] (ii) increasing or generating the expression of an expression product of; and/or
   [76202] (iii) increasing or generating one or more activities of an expression product encoded by;
   [76203] at least one respective nucleic acid molecule comprising a nucleic acid molecule selected from the group consisting of:
   [76204] (a) a nucleic acid molecule encoding the polypeptide shown in column 5 or 8 of Table II, preferably Table II B, application no.15, or a homolog or a fragment thereof;
   [76205] (b) a nucleic acid molecule shown in column 5 or 8 of Table I, preferably Table I B, application no.15, or a homolog or a fragment thereof (preferably the coding region thereof);
   [76206] (c) a nucleic acid molecule, which, as a result of the degeneracy of the genetic code, can be derived from a polypeptide sequence depicted in column 5 or 8 of Table II, preferably Table II B, application no.15;
   [76207] (d) a nucleic acid molecule having at least 30%, in particular at least 50%, 60%, 70%, 80%, 85%, 90%, 95%, 97%, 98%, 99% or 99.5% identity with the nucleic acid molecule sequence of a polynucleotide comprising the nucleic acid molecule shown in column 5 or 8 of Table I, preferably Table I B, application no. 15, or the coding region thereof;
   [76208] (e) a nucleic acid molecule encoding a polypeptide having at least 30%, in particular 50%, 60%, 70%, 80%, 85%, 90%, 95%, 97%, 98%, 99% or 99.5% identity with the amino acid sequence of the polypeptide encoded by the nucleic acid molecule of (a), (b), (c) or (d);
   [76209] (f) a nucleic acid molecule which hybridizes with a nucleic acid molecule of (a), (b), (c), (d) or (e) under stringent hybridization conditions;
   [76210] (g) a nucleic acid molecule encoding a polypeptide which can be isolated with the aid of monoclonal or polyclonal antibodies made against a polypeptide encoded by one of the nucleic acid molecules of (a), (b), (c), (d), (e) or (f);
   [76211] (h) a nucleic acid molecule encoding a polypeptide comprising the consensus sequence or one or more polypeptide motifs as shown in column 8 of Table IV, application no.15;
   [76212] (i) a nucleic acid molecule encoding a polypeptide having the activity represented by a respective protein as depicted in column 5 of Table II, application no. 15;
   [76213] (j) a nucleic acid molecule which comprises a polynucleotide, which is obtained by amplifying a cDNA library or a genomic library using the primers as depicted in column 8 of Table III, application no. 15; and
   [76214] (k) a nucleic acid molecule which is obtainable by screening a suitable nucleic acid library, especially a cDNA library and/or a genomic library, under stringent hybridization conditions with a probe comprising a complementary sequence of a nucleic acid molecule of (a), (b), (c), (d), (e), (f), (g), (h), (i) or (j) or with a fragment thereof, having at least 15 nt, preferably 20 nt, 30 nt, 50 nt, 100 nt, 200 nt, 500 nt, 1000 nt, 1500 nt, 2000 nt or 3000 nt of a nucleic acid molecule complementary to a nucleic acid molecule sequence characterized in (a), (b), (c), (d), (e), (f), (g), (h), (i) or (j);
   [76215] or a nucleic acid molecule comprising a sequence which is complementary thereto; in a non-human organism or a part thereof, preferably a microorganism, a plant cell, a plant or a part thereof, as compared to a corresponding non-transformed wild type non-human organism or a part thereof; and
[76216] (B) growing the non-human organism or a part thereof under conditions which permit the production of citramalate, citrate, fumarate, glycerate, malate, oxalate, pyruvate, succinate and/or vitamin c and/or threonic acid or a composition comprising citramalate, citrate, fumarate, glycerate, malate, oxalate, pyruvate, succinate and/or vitamin c and/or threonic acid in said non-human organism or in the culture medium surrounding said non-human organism.

[76217] Item 3. A process of items 1 or 2, comprising of recovering citramalate, citrate, fumarate, glycerate, malate, oxalate, pyruvate, succinate and/or vitamin c and/or threonic acid in its free or bound form.

[76218] Item 4. The process of any one of items 1 to 3, comprising the folowing steps:
[76219] (a) selecting a non-human organism or a part thereof expressing a polypeptide encoded by the nucleic acid molecule characterized in item 2;
[76220] (b) mutagenizing the selected non-human organism or the part thereof;
[76221] (c) comparing the activity or the expression level of said polypeptide in the mutagenized non-human organism or the part thereof with the activity or the expression of said polypeptide of the selected non-human organisms or the part thereof;
[76222] (d) selecting the mutated non-human organisms or parts thereof, which comprise an increased activity or expression level of said polypeptide compared to the selected non-human organism or the part thereof;
[76223] (e) optionally, growing and cultivating the non-human organisms or the parts thereof; and
[76224] (f) recovering, and optionally isolating, the free or bound citramalate, citrate, fumarate, glycerate, malate, oxalate, pyruvate, succinate and/or vitamin c and/or threonic acid produced by the selected mutated non-human organisms or parts thereof.

[76225] Item 5. The process of any one of items 1 to 4 wherein the activity of said protein or the expression of said nucleic acid molecule is increased or generated transiently or stably.

[76226] Item 6. An isolated nucleic acid molecule comprising a nucleic acid molecule selected from the group consisting of:
[76227] (a) a nucleic acid molecule encoding a polypeptide shown in Table II, application no. 15, column 5 or 8, preferably shown in Table II B, application no. 15, column 8, or a homolog or a fragment thereof;
[76228] (b) a nucleic acid molecule shown in Table I, application no. 15, column 5 or 8, preferably shown in Table I B, application no. 15, column 8, preferably the coding region thereof, or a homolog or a fragment thereof;
[76229] (c) a nucleic acid molecule, which, as a result of the degeneracy of the genetic code, can be derived from a polypeptide sequence depicted in column 5 or 8 of Table II, application no. 15, preferably in column 8 of Table II B, application no. 8;
[76230] (d) a nucleic acid molecule having at least 30% identity, preferably at least 40%, 50%, 60%, 70%, 75%, 80%, 85%, 90%, 95%, 96%, 97%, 98%, 99%, 99.5%, with the nucleic acid molecule sequence of a polynucleotide comprising the nucleic acid molecule shown in column 5 or 8 of Table I, application no. 8, preferably shown in column 8 of Table I B, application no. 15, preferably the coding region thereof;
[76231] (e) a nucleic acid molecule encoding a polypeptide having at least 30% identity, preferably at least 40%, 50% 60%, 70%, 75%, 80%, 85%, 90%, 95%, 96%, 97%, 98%, 99%, 99.5%, identity with the amino acid sequence of the polypeptide encoded by the nucleic acid molecule of (a), (b), (c) or (d);
[76232] (f) a nucleic acid molecule which hybridizes with a nucleic acid molecule of (a), (b), (c), (d) or (e) under stringent hybridisation conditions;
[76233] (g) a nucleic acid molecule encoding a polypeptide which can be isolated with the aid of monoclonal or polyclonal antibodies made against a polypeptide encoded by one of the nucleic acid molecules of (a), (b), (c), (d), (e) or (f);
[76234] (h) a nucleic acid molecule encoding a polypeptide comprising the consensus sequence or one or more polypeptide motifs as shown in column 8 of Table IV, application no. 15;
[76235] (i) a nucleic acid molecule encoding a polypeptide having the activity represented by a respective protein as depicted in column 5 of Table II, application no. 15;
[76236] (j) a nucleic acid molecule comprising a polynucleotide which is obtained by amplifying a cDNA library or a genomic library using the primers in Table III, application no. 15, column 8;
[76237] and
[76238] (k) nucleic acid molecule which is obtainable by screening a suitable nucleic acid library, especially a cDNA library and/or a genomic library, under stringent hybridization conditions with a probe comprising one of the sequences of the nucleic acid molecule of (a), (b), (c), (d), (e), (f), (g), (h), (i) or (j) or with a fragment of at least 15 nt, preferably 20 nt, 30 nt, 50 nt, 100 nt, 200 nt,500 nt, 1000 nt, 1500 nt, 2000 nt or 3000 nt of the nucleic acid molecule characterized in (a), (b), (c), (d), (e), (f), (g), (h), (i) or (j);
[76239] or a nucleic acid molecule comprising a sequence which is complementary thereto.

[76240] Item 7. A nucleic acid construct which confers the expression of the nucleic acid molecule as defined in item 6, comprising one or more regulatory elements.

[76241] Item 8. An expression cassette comprising
[76242] (a) a promoter, preferably selected from the group consisting of Big35S, PCUbi, Super and USP;
[76243] (b) a nucleic acid molecule as defined in item6.

[76244] Item 9. A vector comprising the nucleic acid molecule as defined in item 6 or the nucleic acid construct as claimed in item 7 or the expression cassette as claimed in item 8.

[76245] Item 10. A host cell or a plant organelle, which has been transformed with the vector as claimed in item 9 or the nucleic acid molecule as defined in item 6 or the nucleic acid construct as claimed in item 7 or the expression cassette as claimed in item 8.

[76246] Item 11. The host cell of item 10, which is a plant cell or a microorganism.

[76247] Item 12. A process for producing a polypeptide, wherein the polypeptide is expressed in a host cell as claimed in item 10 or 11.

[76248] Item 13. A polypeptide produced by the process as claimed in item 12 or encoded by the nucleic acid molecule as defined in item 6.

[76249] Item 14. An antibody, which binds specifically to the polypeptide as claimed in item 13.

[76250] Item 15. A plant tissue, propagation material, harvested material or a plant comprising the host cell as claimed in item 10 or 11.

[76251] Item 16. A process for the identification of a compound conferring an increase in citramalate, citrate, fumarate, glycerate, malate, oxalate, pyruvate, succinate and/or vitamin c and/or threonic acid production in a non-human organism, comprising the steps:
[76252] (a) culturing a plant cell or tissue or microorganism or maintaining a plant expressing the polypeptide encoded by the nucleic acid molecule as defined in item 6 conferring an increase in the amount of citramalate, citrate, fumarate, glycerate, malate, oxalate, pyruvate, succinate and/or vitamin c and/or threonic acid in a non-human organism or a part thereof and a readout system capable of interacting with the polypeptide under suitable conditions which permit the interaction of the polypeptide with said readout system in the presence of a compound or a sample comprising a plurality of compounds and capable of providing a detectable signal in response to the binding of a compound to said polypeptide under conditions which permit the expression of said readout system and of the polypeptide encoded by the nucleic acid molecule of item 6 conferring an increase in the amount of citramalate, citrate, fumarate, glycerate, malate, oxalate, pyruvate, succinate and/or vitamin c and/or threonic acid in a non-human organism or a part thereof;
[76253] (b) identifying if the compound is an effective agonist by detecting the presence or absence or increase of a signal produced by said readout system.

[76254] Item 17. A method for the production of an agricultural composition comprising the steps of the method of item 16 and formulating the compound identified in item 16 in a form acceptable for an application in agriculture.

[76255] Item 18. A composition comprising the nucleic acid molecule as defined in item 6, the polypeptide as claimed in item 13, the nucleic acid construct as claimed in item 7, the expression cassette as claimed in item 8, the vector as claimed in item 9, the compound as claimed in item 16, the antibody as claimed in item 14, and optionally an agricultural acceptable carrier.

[76256] Item 19. Use of the nucleic acid molecule as defined in item 6 for the identification of a nucleic acid molecule conferring an increase in citramalate, citrate, fumarate, glycerate, malate, oxalate, pyruvate, succinate and/or vitamin c and/or threonic acid after expression.

[76257] Item 20. Cosmetic, pharmaceutical, food or feed composition comprising the nucleic acid moleculeas defined in item 6, the polypeptide as claimed in item 13, the nucleic acid construct as claimed in item 7, the expression cassette as claimed in item 8, the vector as claimed in item 9, the antibody as claimed in item 14 , the plant or plant tissue as claimed in item 15, the harvested material as claimed in item 15 or the host cell of claim as claimed in items 10 or 11.

[76258] Item 21. Use of the nuclei acid molecule as defined in item 6, the polypeptide as claimed in item 13, the nucleic acid construct as claimed in item 7, the expression cassette as claimed in item 8, the vector as claimed in item 9, the plant or plant tissue as claimed in item 15, or the host cell of item 10 to 11 for the production of plant resistant to a herbicide inhibiting the production of citramalate, citrate, fumarate, glycerate, malate, oxalate, pyruvate, succinate and/or vitamin c and/or threonic acid.

[76259] Item 22. A method for producing a plant with increased yield as compared to a corresponding non-transformed wild type plant, whereby the method comprises
[76260] (i) increasing or generating of the expression of; and/or
[76261] (ii) increasing or generating the expression of an expression product of; and/or
[76262] (iii) increasing or generating one or more activities of an expression product encoded by; at least one respective nucleic acid molecule comprising a nucleic acid molecule selected from the group consisting of:
[76263] (a) a nucleic acid molecule encoding the polypeptide shown in column 5 or 8 of Table II, preferably Table II B, application no. 15, or a homolog or a fragment thereof, in case in column 7 citramalate, citrate, fumarate, malate and/or succinate is indicated;
[76264] (b) a nucleic acid molecule shown in column 5 or 8 of Table I, preferably Table I B, application no. 15, or a homolog or a fragment thereof (preferably the coding region thereof) , in case in column 7 citramalate, citrate, fumarate, malate and/or succinate is indicated;
[76265] (c) a nucleic acid molecule, which, as a result of the degeneracy of the genetic code, can be derived from a polypeptide sequence depicted in column 5 or 8 of Table II, preferably Table II B, application no. 15, in case in column 7 citramalate, citrate, fumarate, malate and/or succinate is indicated;
[76266] (d) a nucleic acid molecule having at least 30%, in particular at least 50%, 60%, 70%, 80%, 85%, 90%, 95%, 97%, 98%, 99% or 99.5% identity with the nucleic acid molecule sequence of a polynucleotide comprising the nucleic acid molecule shown in column 5 or 8 of Table I, preferably Table I B, application no. 15, or the coding region thereof, in case in column 7 citramalate, citrate, fumarate, malate and/or succinate is indicated;
[76267] (e) a nucleic acid molecule encoding a polypeptide having at least 30%, in particular 50%, 60%, 70%, 80%, 85%, 90%, 95%, 97%, 98%, 99% or 99.5% identity with the amino acid sequence of the polypeptide encoded by the nucleic acid molecule of (a), (b), (c) or (d);
[76268] (f) a nucleic acid molecule which hybridizes with a nucleic acid molecule of (a), (b), (c), (d) or (e) under stringent hybridization conditions;
[76269] (g) a nucleic acid molecule encoding a polypeptide which can be isolated with the aid of monoclonal or polyclonal antibodies made against a polypeptide encoded by one of the nucleic acid molecules of (a), (b), (c), (d), (e) or (f);
[76270] (h) a nucleic acid molecule encoding a polypeptide comprising the consensus sequence or one or more polypeptide motifs as shown in column 8 of Table IV, application no. 15, in case in column 7 citramalate, citrate, fumarate, malate and/or succinate is indicated;
[76271] (i) a nucleic acid molecule encoding a polypeptide having the activity represented by a respective protein as depicted in column 5 of Table II, application no. 15, in case in column 7 citramalate, citrate, fumarate, malate and/or succinate is indicated;
[76272] (j) a nucleic acid molecule which comprises a polynucleotide, which is obtained by amplifying a cDNA library or a genomic library using the primers as depicted in column 8 of Table III, application no. 15, in case in column 7 citramalate, citrate, fumarate, malate and/or succinate is indicated; and
[76273] (k) a nucleic acid molecule which is obtainable by screening a suitable nucleic acid library, especially a cDNA library and/or a genomic library, under stringent hybridization conditions with a probe comprising a complementary sequence of a nucleic acid molecule of (a), (b), (c), (d), (e), (f), (g), (h), (i) or (j) or with a fragment thereof, having at least 15 nt, preferably 20 nt, 30 nt, 50 nt, 100 nt, 200 nt, 500 nt, 1000 nt, 1500 nt, 2000 nt or 3000 nt of a nucleic acid molecule complementary to a nucleic acid molecule sequence characterized in (a), (b), (c), (d), (e), (f), (g), (h), (i) or (j);
[76274] or a nucleic acid molecule comprising a sequence which is complementary thereto;
   in a plant cell, plant or a part thereof.

[76275] Item 23. A method for producing a plant with increased yield according to item 22, which comprises in addition the regeneration of a plant from such transformed plant cell, plant cell compartment, plant cell nucleus, plant cell or plant tissue with increased yield.

[76276] [0483.1.7.15] to [0492.1.7.15] for the disclosure of these paragraphs see [0483.1.7.7] to [0492.1.7.7] above

### Example 10

### Purification of a Fine Chemical e.g. Citramalate, Citrate, Fumarate, Glycerate, Malate, Oxalate, Pyruvate, Succinate and/or Vitamin C and/or Threonic Acid

[76277] The unambiguous detection for the presence of citramalate, citrate, fumarate, glycerate, malate, oxalate, pyruvate, succinate and/or vitamin c and/or threonic acid can be obtained by analyzing recombinant organisms using analytical standard methods: GC, GC-MS or TLC, as described (1997, in: Advances on Lipid Methodology, Fourth Edition: Christie, Oily Press, Dundee, 119-169; 1998, Gaschromatographie-Massenspektrometrie-Verfahren [Gas chromatography/mass spectrometric methods], Lipide 33:343-353).

[76278] The fine chemical citramalate, citrate, fumarate, glycerate, malate, oxalate, pyruvate, succinate and/or vitamin c and/or threonic acid produced in the organism can be recovered from cells or from the supernatant of the above-described culture by a variety of methods known in the art. For example, the culture supernatant is recovered first. To this end, the cells are harvested from the culture by slow centrifugation. Cells can generally be disrupted or lysed by standard techniques such as mechanical force or sonication. The cell debris is removed by centrifugation and the supernatant fraction, if appropriate together with the culture supernatant, is used for the further purification of the fine chemical citramalate, citrate, fumarate, glycerate, malate, oxalate, pyruvate, succinate and/or vitamin c and/or threonic acid. However, it is also possible to process the supernatant alone if the fine chemical citramalate, citrate, fumarate, glycerate, malate, oxalate, pyruvate, succinate and/or vitamin c and/or threonic acid are present in the supernatant in sufficiently high a concentration. In this case, the fine chemical citramalate, citrate, fumarate, glycerate, malate, oxalate, pyruvate, succinate and/or vitamin c and/or threonic acid, or mixture thereof, can be purified further for example via extraction and/or salt precipitation or via ion-exchange chromatography or as described above.

[76279] Identity and purity of the fine chemical citramalate, citrate, fumarate, glycerate, malate, oxalate, pyruvate, succinate and/or vitamin c and/or threonic acid isolated can be determined by standard techniques of the art. They encompass old techniques such as photometric methods and new techniques such as high-performance liquid chromatography (HPLC), gas chromatography (GC), spectroscopic methods, mass spectrometry (MS), staining methods, thin-layer chromatography, NIRS, enzyme assay or microbiological assays.

[76280] for the disclosure of this paragraph see [0494.1.7.7] above

### Example 11a

### PCR Amplification of the Sequences

[76281] Unless otherwise specified, standard methods as described in Sambrook et al., Molecular Cloning: A laboratory manual, Cold Spring Harbor 1989, Cold Spring Harbor Laboratory Press are used.

[76282] The inventive sequences as shown in the respective line in Table I, column 5, preferably the coding region thereof, were amplified by PCR as described in the protocol of the Pfu Ultra, Pfu Turbo or Herculase DNA polymerase (Stratagene). The composition for the protocol of the Pfu Ultra, Pfu Turbo or Herculase DNA polymerase was as follows: 1×PCR buffer (Stratagene), 0.2 mM of each dNTP, 100 ng genomic DNA of Saccharomyces cerevisiae (strain S288C; Research Genetics, Inc., now Invitrogen), Escherichia coli (strain MG1655; E. coli Genetic Stock Center), Synechocystis sp. (strain PCC6803), Azotobacter vinelandii (strain N.R. Smith,16), Thermus thermophilus (H B8) or 50 ng cDNA from various tissues and development stages of Arabidopsis thaliana (ecotype Columbia), Physcomitrella patens, Glycine max (variety Resnick), Brassica napus, Oryza sativa or Zea mays (variety B73, Mo17, A188), 50 pmol forward primer, 50 pmol reverse primer, with or without 1 M Betaine, 2.5 u Pfu Ultra, Pfu Turbo or Herculase DNA polymerase.

[76283] The amplification cycles were as follows:

[76284] 1 cycle of 2-3 minutes at 94-95° C., then 25-36 cycles with 30-60 seconds at 94-95° C., 30-45 seconds at 50-60° C. and 210-480 seconds at 72° C., followed by 1 cycle of 5-10 minutes at 72° C., then 4-16° C.—preferably for Saccharomyces cerevisiae, Escherichia coli, Synechocystis sp., Azotobacter vinelandii, Thermus thermophilus.

[76285] In case of Arabidopsis thaliana, Brassica napus, Glycine max, Oryza sativa, Physcomitrella patens, Zea mays the amplification cycles were as follows:

[76286] 1 cycle with 30 seconds at 94° C., 30 seconds at 61° C., 15 minutes at 72° C., then 2 cycles with 30 seconds at 94° C., 30 seconds at 60° C., 15 minutes at 72° C., then 3 cycles with 30 seconds at 94° C., 30 seconds at 59° C., 15 minutes at 72° C., then 4 cycles with 30 seconds at 94° C., 30 seconds at 58° C., 15 minutes at 72° C., then 25 cycles with 30 seconds at 94° C., 30 seconds at 57° C., 15 minutes at 72° C., then 1 cycle with 10 minutes at 72° C., then finally 4-16° C.

[76287] RNAs were generated with the RNeasy Plant Kit according to the standard protocol (Qiagen) and Superscript II Reverse Transkriptase was used to produce double stranded cDNA according to the standard protocol (Invitrogen).

[76288] ORF specific primer pairs for the genes to be expressed are shown in the respective line in Table III, column 8. The following adapter sequences were added to Saccharomyces cerevisiae ORF specific primers (see Table III) for cloning purposes:

SEQ ID NO: 20

| | | |
|---|---|---|
| i) | foward primer: | 5′-GGAATTCCAGCTGACCACC-3′ |

SEQ ID NO: 21

| | | |
|---|---|---|
| ii) | reverse primer: | 5′-GATCCCCGGGAATTGCCATG-3′ |

[76289] These adaptor sequences allow cloning of the ORF into the various vectors containing the Resgen adaptors, see table column E of Table c.

[76290] The following adapter sequences were added to Saccharomyces cerevisiae, Escherichia coli, Synechocystis sp., Azotobacter vinelandii, Thermus thermophilus, Arabidopsis thaliana, Brassica napus, Glycine max, Oryza sativa , Physcomitrella patens, or Zea mays ORF specific primers for cloning purposes:

| SEQ ID NO: 22 | | |
|---|---|---|
| iii) | forward primer: | 5′-TTGCTCTTCC-3′ |
| SEQ ID NO: 23 | | |
| iiii) | reverse primer: | 5′-TTGCTCTTCG-3′ |

[76291] The adaptor sequences allow cloning of the ORF into the various vectors containing the Colic adaptors, see table column E of Table c.

[76292] Therefore for amplification and cloning of Saccharomyces cerevisiae SEQ ID NO: 64177, a primer consisting of the adaptor sequence i) and the ORF specific sequence SEQ ID NO: 64193 and a second primer consisting of the adaptor sequence ii) and the ORF specific sequence SEQ ID NO: 64194 were used.

[76293] For amplification and cloning of Escherichia coli SEQ ID NO: 7333, a primer consisting of the adaptor sequence iii) and the ORF specific sequence SEQ ID NO: 7679 and a second primer consisting of the adaptor sequence iiii) and the ORF specific sequence SEQ ID NO: 7680 were used.

[76294] For amplification and cloning of Synechocystis sp. SEQ ID NO: 11990, a primer consisting of the adaptor sequence iii) and the ORF specific sequence SEQ ID NO: 12064 and a second primer consisting of the adaptor sequence iiii) and the ORF specific sequence SEQ ID NO: 12065 were used.

[76295] For amplification and cloning of Arabidopsis thaliana SEQ ID NO: 812, a primer consisting of the adaptor sequence iii) and the ORF specific sequence SEQ ID NO: 1054 and a second primer consisting of the adaptor sequence iiii) and the ORF specific sequence SEQ ID NO: 1055 were used.

[76296] For amplification and cloning of Azotobacter vinelandii SEQ ID NO: 6040, a primer consisting of the adaptor sequence iii) and the ORF specific sequence SEQ ID NO: 6070 and a second primer consisting of the adaptor sequence iiii) and the ORF specific sequence SEQ ID NO: 6071 were used.

[76297] For amplification and cloning of Brassica napus SEQ ID NO: 15532, a primer consisting of the adaptor sequence iii) and the ORF specific sequence SEQ ID NO: 16150 and a second primer consisting of the adaptor sequence iiii) and the ORF specific sequence SEQ ID NO: 16151 were used.

[76298] For amplification and cloning of Glycine max SEQ ID NO: 69, a primer consisting of the adaptor sequence iii) and the ORF specific sequence SEQ ID NO: 343 and a second primer consisting of the adaptor sequence iiii) and the ORF specific sequence SEQ ID NO: 344 were used.

[76299] For amplification and cloning of Oryza sativa SEQ ID NO: 34301, a primer consisting of the adaptor sequence iii) and the ORF specific sequence SEQ ID NO: 34595 and a second primer consisting of the adaptor sequence iiii) and the ORF specific sequence SEQ ID NO: 34596 were used.

[76300] For amplification and cloning of Thermus thermophilus SEQ ID NO: 12698 , a primer consisting of the adaptor sequence iii) and the ORF specific sequence SEQ ID NO: 12970 and a second primer consisting of the adaptor sequence iiii) and the ORF specific sequence SEQ ID NO: 12971 were used.

[76301] Following these examples every sequence disclosed in Table I, preferably column 5, especially the coding region thereof can be cloned by fusing the adaptor sequences to the respective specific primers sequences as disclosed in Table III, column 8 using the respective vectors shown in Table c.

[76302] [0496.1.7.15] to [0499.1.7.15] for the disclosure of these paragraphs see [0496.1.7.7] to [0499.1.7.7] above

### Example 11e

### Cloning of Inventive Sequences as Shown in Table I, Column 5 in the Different Expression Vectors

[76303] For cloning of for example SEQ ID NO: 7333 from Escherichia coli or any other ORF from Escherichia coli, Synechocystis sp., Azotobacter vinelandii, Thermus thermophilus, Arabidopsis thaliana, Brassica napus, Glycine max, or Oryza sativa the vector DNA was treated with the restriction enzymes Pacl and Ncol following the standard protocol (MBI Fermentas).

[76304] For cloning for example the ORFs of SEQ ID NO: 64177 from Saccharomyces cerevisiae or any other ORF from Saccharomyces cerevisiae into vectors containing the Resgen adaptor sequence the respective vector DNA was treated with the restriction enzyme Ncol.

[76305] For cloning of for example ORFs SEQ ID NO: 63334 from Saccharomyces cerevisiae or any other ORF from Saccharomyces cerevisiae into vectors containing the Colic adaptor sequence, the respective vector DNA was treated with the restriction enzymes Pacl and Ncol following the standard protocol (MBI Fermentas).

[76306] In all cases the reaction was stopped by inactivation at 70° C. for 20 minutes and purified over QlAquick or NucleoSpin Extract II columns following the standard protocol (Qiagen or Macherey-Nagel).

[76307] Then the PCR-product representing the amplified ORF with the respective adapter sequences and the vector DNA were treated with T4 DNA polymerase according to the standard protocol (MBI Fermentas) to produce single stranded overhangs with the parameters 1 unit T4 DNA polymerase at 37° C. for 2-10 minutes for the vector and 1-2 u T4 DNA polymerase at 15-17° C. for 10-60 minutes for the PCR product representing SEQ ID NO: 7333.

[76308] The reaction was stopped by addition of high-salt buffer and purified over QlAquick or NucleoSpin Extract II columns following the standard protocol (Qiagen or Macherey-Nagel).

[76309] According to this example the skilled person is able to clone all sequences disclosed in Table I, preferably column 5 or column 8, especially the coding region thereof.

[76310] Approximately 30-60 ng of prepared vector and a defined amount of prepared amplificate were mixed and hybridized at 65° C. for 15 minutes followed by 37° C. 0.1° C/1 seconds, followed by 37° C. 10 minutes, followed by 0.1° C/1 seconds, then 4-10° C.

[76311] The ligated constructs were transformed in the same reaction vessel by addition of competent E. coli cells (strain DHSalpha) and incubation for 20 minutes at 1° C. followed by a heat shock for 90 seconds at 42° C. and cooling to 1-4° C. Then, complete medium (SOC) was added and the mixture was incubated for 45 minutes at 37° C. The entire mixture was subsequently plated onto an agar plate with 0.05 mg/ml kanamycin and incubated overnight at 37° C.

[76312] The outcome of the cloning step was verified by amplification with the aid of primers which bind upstream and downstream of the integration site, thus allowing the amplification of the insertion. The amplifications were carried out as described in the protocol of Taq DNA polymerase (Gibco-BRL).

[76313] The amplification cycles were as follows:

[76314] 1 cycle of 1-5 minutes at 94° C., followed by 35 cycles of in each case 15-60 seconds at 94° C., 15-60 seconds at 50-66° C. and 5-15 minutes at 72° C., followed by 1 cycle of 10 minutes at 72° C., then 4-16° C.

[76315] Several colonies were checked, but only one colony for which a PCR product of the expected size was detected was used in the following steps.

[76316] A portion of this positive colony was transferred into a reaction vessel filled with complete medium (LB) supplemented with kanamycin and incubated overnight at 37° C.

[76317] The plasmid preparation was carried out as specified in the Qiaprep or NucleoSpin Multi-96 Plus standard protocol (Qiagen or Macherey-Nagel).

[76318] [0501.1.7.15] to [0503.1.7.15] for the disclosure of these paragraphs see [0501.1.7.7] to [0503.1.7.7] above

[76319] Table d showing results of plant analyses

TABLE d

| SeqID | Target | Locus | Metabolite | Source | Promotor | Method | Min | Max |
|---|---|---|---|---|---|---|---|---|
| 17451 | non-targ | At1g07430 | succinate | ARA_LEAF | p-PcUBI | GC | 47 | 67 |
| 133001 | non-targ | At1g13930 | malate | ARA_LEAF | p-PcUBI | GC | 82 | 90 |
| 133001 | non-targ | At1g13930 | succinate | ARA_LEAF | p-PcUBI | LC | 33 | 79 |
| 17968 | non-targ | At1g36730 | malate | ARA_LEAF | p-PcUBI | GC | 65 | 137 |
| 17968 | non-targ | At1g36730 | vitc a/o thra | ARA_LEAF | p-PcUBI | GC | 31 | 56 |
| 18070 | non-targ | At1g43850 | fumarate | ARA_LEAF | p-PcUBI | GC | 63 | 108 |
| 812 | non-targ | At1g48040 | fumarate | ARA_LEAF | p-PcUBI | LC | 49 | 81 |
| 19419 | non-targ | At1g72770 | vitc a/o thra | ARA_LEAF | p-PcUBI | GC | 31 | 109 |
| 19919 | non-targ | At2g30360 | fumarate | ARA_LEAF | p-PcUBI | GC | 75 | 420 |
| 19919 | non-targ | At2g30360 | malate | ARA_LEAF | p-PcUBI | GC | 52 | 364 |
| 19919 | non-targ | At2g30360 | succinate | ARA_LEAF | p-PcUBI | GC | 24 | 75 |
| 133042 | non-targ | At2g37040 | fumarate | ARA_LEAF | p-PcUBI | GC | 70 | 89 |
| 133349 | non-targ | At2g41680 | succinate | ARA_LEAF | p-PcUBI | LC | 34 | 91 |
| 120810 | plastidic | At2g44350 | succinate | ARA_LEAF | p-Super | LC | 46 | 132 |
| 21497 | plastidic | At3g04050 | citramalate | ARA_LEAF | p-PcUBI | GC | 49 | 721 |
| 21497 | plastidic | At3g04050 | succinate | ARA_LEAF | p-PcUBI | GC | 25 | 537 |
| 22015 | non-targ | At3g06270 | malate | ARA_LEAF | p-PcUBI | GC | 63 | 203 |
| 22015 | non-targ | At3g06270 | succinate | ARA_LEAF | p-PcUBI | GC | 24 | 55 |
| 22249 | non-targ | At3g08710 | fumarate | ARA_LEAF | p-PcUBI | GC | 72 | 165 |
| 22249 | non-targ | At3g08710 | malate | ARA_LEAF | p-PcUBI | GC | 62 | 162 |
| 130491 | non-targ | At3g15360 | glycerate | ARA_LEAF | p-PcUBI | GC | 31 | 129 |
| 2367 | non-targ | At3g61830 | fumarate | ARA_LEAF | p-PcUBI | GC | 78 | 248 |
| 2367 | non-targ | At3g61830 | malate | ARA_LEAF | p-PcUBI | GC | 93 | 115 |
| 2573 | non-targ | At3g62930 | citramalate | ARA_LEAF | p-PcUBI | GC | 70 | 163 |
| 2573 | non-targ | At3g62930 | fumarate | ARA_LEAF | p-PcUBI | GC | 62 | 222 |
| 2573 | non-targ | At3g62930 | glycerate | ARA_LEAF | p-PcUBI | GC | 35 | 101 |
| 2573 | non-targ | At3g62930 | malate | ARA_LEAF | p-PcUBI | GC | 57 | 206 |
| 2573 | non-targ | At3g62930 | succinate | ARA_LEAF | p-PcUBI | LC | 30 | 137 |
| 2573 | non-targ | At3g62930 | vitc a/o thra | ARA_LEAF | p-PcUBI | GC | 51 | 96 |
| 2935 | non-targ | At3g62950 | citramalate | ARA_LEAF | p-PcUBI | GC | 65 | 235 |
| 2935 | non-targ | At3g62950 | fumarate | ARA_LEAF | p-PcUBI | GC | 64 | 136 |
| 2935 | non-targ | At3g62950 | glycerate | ARA_LEAF | p-PcUBI | GC | 31 | 113 |
| 2935 | non-targ | At3g62950 | malate | ARA_LEAF | p-PcUBI | GC | 100 | 274 |
| 2935 | non-targ | At3g62950 | succinate | ARA_LEAF | p-PcUBI | LC | 30 | 257 |
| 133541 | non-targ | At4g03520 | glycerate | ARA_LEAF | p-PcUBI | GC | 35 | 112 |
| 23482 | non-targ | At4g15660 | citramalate | ARA_LEAF | p-PcUBI | GC | 71 | 156 |
| 23482 | non-targ | At4g15660 | fumarate | ARA_LEAF | p-PcUBI | GC | 195 | 463 |
| 23482 | non-targ | At4g15660 | glycerate | ARA_LEAF | p-PcUBI | GC | 41 | 158 |
| 23482 | non-targ | At4g15660 | malate | ARA_LEAF | p-PcUBI | GC | 123 | 321 |
| 23482 | non-targ | At4g15660 | succinate | ARA_LEAF | p-PcUBI | LC | 133 | 346 |
| 23482 | non-targ | At4g15660 | vitc a/o thra | ARA_LEAF | p-PcUBI | GC | 29 | 89 |
| 3279 | non-targ | At4g15670 | fumarate | ARA_LEAF | p-PcUBI | GC | 196 | 830 |
| 3279 | non-targ | At4g15670 | glycerate | ARA_LEAF | p-PcUBI | GC | 49 | 224 |
| 3279 | non-targ | At4g15670 | malate | ARA_LEAF | p-PcUBI | GC | 117 | 935 |
| 3279 | non-targ | At4g15670 | succinate | ARA_LEAF | p-PcUBI | LC | 77 | 314 |
| 23844 | non-targ | At4g15690 | citramalate | ARA_LEAF | p-PcUBI | GC | 47 | 204 |
| 23844 | non-targ | At4g15690 | fumarate | ARA_LEAF | p-PcUBI | GC | 66 | 427 |
| 23844 | non-targ | At4g15690 | malate | ARA_LEAF | p-PcUBI | GC | 76 | 386 |
| 23844 | non-targ | At4g15690 | succinate | ARA_LEAF | p-PcUBI | GC | 32 | 158 |
| 23844 | non-targ | At4g15690 | vitc a/o thra | ARA_LEAF | p-PcUBI | GC | 30 | 86 |
| 3654 | non-targ | At4g15700 | glycerate | ARA_LEAF | p-PcUBI | GC | 48 | 198 |
| 68849 | non-targ | At4g26080 | citramalate | ARA_LEAF | p-PcUBI | GC | 47 | 70 |
| 68849 | non-targ | At4g26080 | succinate | ARA_LEAF | p-PcUBI | LC | 30 | 52 |
| 4102 | non-targ | At4g33040 | citramalate | ARA_LEAF | p-PcUBI | GC | 43 | 136 |
| 4102 | non-targ | At4g33040 | fumarate | ARA_LEAF | p-PcUBI | GC | 72 | 537 |
| 4102 | non-targ | At4g33040 | malate | ARA_LEAF | p-PcUBI | GC | 65 | 296 |
| 4102 | non-targ | At4g33040 | succinate | ARA_LEAF | p-PcUBI | LC | 42 | 149 |
| 4102 | non-targ | At4g33040 | vitc a/o thra | ARA_LEAF | p-PcUBI | GC | 32 | 102 |
| 4348 | non-targ | At4g35310 | malate | ARA_LEAF | p-PcUBI | GC | 70 | 296 |
| 24438 | non-targ | At5g03720 | fumarate | ARA_LEAF | p-PcUBI | GC | 66 | 1135 |
| 24438 | non-targ | At5g03720 | malate | ARA_LEAF | p-PcUBI | GC | 133 | 687 |
| 24438 | non-targ | At5g03720 | succinate | ARA_LEAF | p-PcUBI | GC | 30 | 376 |
| 24492 | non-targ | At5g07200 | glycerate | ARA_LEAF | p-PcUBI | GC | 33 | 74 |
| 24492 | non-targ | At5g07200 | malate | ARA_LEAF | p-PcUBI | GC | 52 | 329 |
| 4904 | non-targ | At5g18600 | succinate | ARA_LEAF | p-PcUBI | LC | 39 | 132 |
| 25344 | non-targ | At5g27640 | malate | ARA_LEAF | p-PcUBI | GC | 52 | 173 |
| 25428 | non-targ | At5g39760 | fumarate | ARA_LEAF | p-PcUBI | LC | 54 | 110 |
| 25428 | non-targ | At5g39760 | malate | ARA_LEAF | p-PcUBI | GC | 52 | 175 |
| 25498 | non-targ | At5g59220 | succinate | ARA_LEAF | p-PcUBI | LC | 30 | 67 |
| 70038 | plastidic | At5g63680 | succinate | ARA_LEAF | p-PcUBI | GC | 31 | 226 |
| 5493 | non-targ | At5g64920 | fumarate | ARA_LEAF | p-PcUBI | GC | 81 | 158 |
| 70583 | non-targ | Avin- | citramalate | ARA_LEAF | p-PcUBI | GC | 41 | 106 |
| | | DRAFT-_0035 | | | | | | |
| 70583 | non-targ | Avin- | fumarate | ARA_LEAF | p-PcUBI | LC | 63 | 130 |
| | | DRAFT-_0035 | | | | | | |
| 70583 | non-targ | Avin- | malate | ARA_LEAF | p-PcUBI | GC | 55 | 281 |
| | | DRAFT-_0035 | | | | | | |
| 70715 | non-targ | AVIN- | malate | ARA_LEAF | p-PcUBI | GC | 52 | 146 |
| | | DRAFT-_0539 | | | | | | |
| 25676 | non-targ | Avin- | malate | ARA_LEAF | p-PcUBI | GC | 64 | 122 |
| | | DRAFT-_1045 | | | | | | |
| 25780 | non-targ | Avin- | malate | ARA_LEAF | p-PcUBI | GC | 54 | 91 |
| | | DRAFT-_1398 | | | | | | |
| 25780 | non-targ | Avin- | succinate | ARA_LEAF | p-PcUBI | LC | 32 | 90 |
| | | DRAFT-_1398 | | | | | | |
| 26196 | non-targ | Avin- | fumarate | ARA_LEAF | p-PcUBI | GC | 66 | 110 |
| | | DRAFT-_1624 | | | | | | |
| 26196 | non-targ | Avin- | malate | ARA_LEAF | p-PcUBI | GC | 67 | 120 |
| | | DRAFT-_1624 | | | | | | |
| 133719 | non-targ | Avin- | fumarate | ARA_LEAF | p-PcUBI | GC | 148 | 507 |
| | | DRAFT-_1699 | | | | | | |
| 26434 | non-targ | Avin- | succinate | ARA_LEAF | p-PcUBI | LC | 51 | 154 |
| | | DRAFT-_1806 | | | | | | |
| 114198 | non-targ | Avin- | succinate | ARA_LEAF | p-PcUBI | LC | 30 | 43 |
| | | DRAFT-_2010 | | | | | | |
| 6040 | non-targ | Avin- | glycerate | ARA_LEAF | p-PcUBI | GC | 31 | 81 |
| | | DRAFT-_2091 | | | | | | |
| 71325 | non-targ | Avin- | succinate | ARA_LEAF | p-PcUBI | LC | 45 | 203 |
| | | DRAFT-_2365 | | | | | | |
| 71763 | non-targ | Avin- | citramalate | ARA_LEAF | p-PcUBI | GC | 41 | 49 |
| | | DRAFT-_2369 | | | | | | |
| 28040 | non-targ | Avin- | malate | ARA_LEAF | p-PcUBI | GC | 121 | 517 |
| | | DRAFT-_2754 | | | | | | |
| 6075 | non-targ | Avin- | citramalate | ARA_LEAF | p-PcUBI | GC | 47 | 117 |
| | | DRAFT-_3028 | | | | | | |
| 6075 | non-targ | Avin- | fumarate | ARA_LEAF | p-PcUBI | GC | 98 | 406 |
| | | DRAFT-_3028 | | | | | | |
| 6075 | non-targ | Avin- | malate | ARA_LEAF | p-PcUBI | GC | 57 | 323 |
| | | DRAFT-_3028 | | | | | | |
| 6075 | non-targ | Avin- | succinate | ARA_LEAF | p-PcUBI | LC | 97 | 190 |
| | | DRAFT-_3028 | | | | | | |
| 6075 | non-targ | Avin- | vitc a/o thra | ARA_LEAF | p-PcUBI | GC | 31 | 137 |
| | | DRAFT-_3028 | | | | | | |
| 29246 | non-targ | Avin- | citramalate | ARA_LEAF | p-PcUBI | GC | 41 | 84 |
| | | DRAFT-_3186 | | | | | | |
| 29246 | non-targ | Avin- | fumarate | ARA_LEAF | p-PcUBI | GC | 100 | 236 |
| | | DRAFT-_3186 | | | | | | |
| 29500 | non-targ | Avin- | succinate | ARA_LEAF | p-PcUBI | LC | 29 | 139 |
| | | DRAFT-_3253 | | | | | | |
| 31026 | non-targ | Avin- | fumarate | ARA_LEAF | p-PcUBI | GC | 61 | 240 |
| | | DRAFT-_3605 | | | | | | |
| 31026 | non-targ | Avin- | malate | ARA_LEAF | p-PcUBI | GC | 53 | 314 |
| | | DRAFT-_3605 | | | | | | |
| 31026 | non-targ | Avin- | succinate | ARA_LEAF | p-PcUBI | GC | 66 | 203 |
| | | DRAFT-_3605 | | | | | | |
| 114231 | non-targ | Avin- | succinate | ARA_LEAF | p-PcUBI | LC | 33 | 291 |
| | | DRAFT-_3629 | | | | | | |
| 31717 | non-targ | Avin- | malate | ARA_LEAF | p-PcUBI | GC | 73 | 137 |
| | | DRAFT-_4384 | | | | | | |
| 72935 | non-targ | Avin- | fumarate | ARA_LEAF | p-PcUBI | LC | 57 | 91 |
| | | DRAFT-_4385 | | | | | | |
| 72935 | non-targ | Avin- | malate | ARA_LEAF | p-PcUBI | GC | 82 | 144 |
| | | DRAFT-_4385 | | | | | | |
| 31926 | non-targ | Avin- | malate | ARA_LEAF | p-PcUBI | GC | 59 | 109 |
| | | DRAFT-_4562 | | | | | | |
| 134171 | non-targ | Avin- | succinate | ARA_LEAF | p-PcUBI | LC | 33 | 110 |
| | | DRAFT-_4594 | | | | | | |
| 73719 | non-targ | Avin- | fumarate | ARA_LEAF | p-PcUBI | LC | 52 | 113 |
| | | DRAFT-_4606 | | | | | | |
| 73719 | non-targ | Avin- | malate | ARA_LEAF | p-PcUBI | GC | 70 | 81 |
| | | DRAFT-_4606 | | | | | | |
| 74452 | non-targ | Avin- | malate | ARA_LEAF | p-PcUBI | GC | 59 | 107 |
| | | DRAFT-_4989 | | | | | | |
| 6510 | non-targ | Avin- | malate | ARA_LEAF | p-PcUBI | GC | 74 | 412 |
| | | DRAFT-_5103 | | | | | | |
| 32037 | non-targ | Avin- | malate | ARA_LEAF | p-PcUBI | GC | 181 | 293 |
| | | DRAFT-_5246 | | | | | | |
| 74729 | non-targ | Avin- | succinate | ARA_LEAF | p-PcUBI | GC | 26 | 107 |
| | | DRAFT-_6679 | | | | | | |
| 34301 | non-targ | AX653549 | fumarate | ARA_LEAF | p-PcUBI | GC | 92 | 266 |
| 34301 | non-targ | AX653549 | malate | ARA_LEAF | p-PcUBI | GC | 62 | 106 |
| 34602 | non-targ | AY087308 | fumarate | ARA_LEAF | p-PcUBI | GC | 84 | 224 |
| 34602 | non-targ | AY087308 | malate | ARA_LEAF | p-PcUBI | GC | 51 | 252 |
| 34602 | non-targ | AY087308 | succinate | ARA_LEAF | p-PcUBI | LC | 33 | 109 |
| 136120 | non-targ | Bab08741 | fumarate | ARA_LEAF | p-PcUBI | GC | 165 | 582 |
| 34889 | plastidic | B0004 | malate | ARA_LEAF | p-Super | GC | 61 | 169 |
| 134299 | non-targ | B0063 | fumarate | ARA_LEAF | p-Super | GC | 63 | 529 |
| 134299 | non-targ | B0063 | succinate | ARA_LEAF | p-Super | LC | 39 | 119 |
| 35482 | non-targ | B0124 | citrate | ARA_SEED_2 | p-USP | GC | 91 | 837 |
| 35590 | non-targ | B0221 | fumarate | ARA_LEAF | p-Super | LC | 49 | 70 |
| 121111 | non-targ | B0312 | citrate | ARA_SEED_2 | p-USP | LC | 126 | 165 |
| 7333 | non-targ | B0449 | malate | ARA_LEAF | p-Super | GC | 94 | 471 |
| 7686 | non-targ | B0486 | malate | ARA_LEAF | p-Super | GC | 61 | 99 |
| 7686 | non-targ | B0486 | succinate | ARA_LEAF | p-Super | LC | 31 | 56 |
| 134402 | non-targ | B0514 | citrate | ARA_SEED_2 | p-USP | LC | 88 | 115 |
| 35967 | plastidic | B0593 | fumarate | ARA_LEAF | p-Super | GC | 130 | 365 |
| 35967 | plastidic | B0593 | malate | ARA_LEAF | p-Super | GC | 168 | 536 |
| 36114 | non-targ | B0752 | fumarate | ARA_LEAF | p-Super | GC | 158 | 628 |
| 75807 | non-targ | B0801 | succinate | ARA_LEAF | p-Super | LC | 67 | 135 |
| 36489 | non-targ | B0885 | malate | ARA_LEAF | p-Super | GC | 134 | 141 |
| 36670 | non-targ | B0963 | vitc a/o thra | ARA_LEAF | p-Super | GC | 43 | 81 |
| 7941 | non-targ | B1003 | malate | ARA_LEAF | p-Super | GC | 107 | 1076 |
| 37483 | non-targ | B1255 | malate | ARA_LEAF | p-Super | GC | 50 | 119 |
| 134655 | non-targ | B1285 | succinate | ARA_LEAF | p-Super | LC | 31 | 37 |
| 134697 | non-targ | B1390 | malate | ARA_LEAF | p-Super | GC | 60 | 182 |
| 134756 | non-targ | B1425 | malate | ARA_LEAF | p-Super | GC | 61 | 256 |
| 38266 | plastidic | B1431 | succinate | ARA_LEAF | p-Super | LC | 29 | 44 |
| 38289 | non-targ | B1445 | citramalate | ARA_LEAF | p-Super | GC | 67 | 102 |
| 7947 | non-targ | B1522 | citramalate | ARA_LEAF | p-Super | GC | 41 | 92 |
| 7947 | non-targ | B1522 | malate | ARA_LEAF | p-Super | GC | 52 | 311 |
| 78154 | non-targ | B1589 | fumarate | ARA_LEAF | p-Super | GC | 117 | 167 |
| 115064 | plastidic | B1611 | fumarate | ARA_LEAF | p-Super | GC | 187 | 514 |
| 38345 | non-targ | B1627 | succinate | ARA_LEAF | p-Super | GC | 35 | 56 |
| 78265 | non-targ | B1651 | succinate | ARA_LEAF | p-Super | GC | 27 | 37 |
| 78753 | non-targ | B1670 | citramalate | ARA_LEAF | p-Super | GC | 49 | 89 |
| 78753 | non-targ | B1670 | malate | ARA_LEAF | p-Super | GC | 60 | 138 |
| 78771 | non-targ | B1672 | citramalate | ARA_LEAF | p-Super | GC | 43 | 84 |
| 78771 | non-targ | B1672 | malate | ARA_LEAF | p-Super | GC | 79 | 152 |
| 78771 | non-targ | B1672 | vitc a/o thra | ARA_LEAF | p-Super | GC | 30 | 48 |
| 134762 | non-targ | B1742 | malate | ARA_LEAF | p-Super | GC | 48 | 86 |
| 134762 | non-targ | B1742 | succinate | ARA_LEAF | p-Super | LC | 33 | 52 |
| 78779 | plastidic | B1747 | succinate | ARA_SEED_2 | p-USP | LC | 51 | 158 |
| 78852 | non-targ | B1755 | vitc a/o thra | ARA_LEAF | p-Super | GC | 30 | 46 |
| 38573 | non-targ | B1845 | malate | ARA_LEAF | p-Super | GC | 92 | 424 |
| 134783 | non-targ | B1865 | vitc a/o thra | ARA_SEED_2 | p-USP | GC | 38 | 301 |
| 38767 | non-targ | B1898 | succinate | ARA_LEAF | p-Super | LC | 35 | 94 |
| 134864 | non-targ | B1938 | fumarate | ARA_LEAF | p-Super | GC | 71 | 324 |
| 134864 | non-targ | B1938 | malate | ARA_LEAF | p-Super | GC | 62 | 332 |
| 134864 | non-targ | B1938 | succinate | ARA_LEAF | p-Super | GC | 41 | 171 |
| 79217 | non-targ | B2027 | malate | ARA_LEAF | p-Super | GC | 77 | 186 |
| 39237 | non-targ | B2399 | fumarate | ARA_LEAF | p-Super | GC | 190 | 3230 |
| 39237 | non-targ | B2399 | succinate | ARA_LEAF | p-Super | LC | 86 | 421 |
| 39237 | non-targ | B2399 | vitc a/o thra | ARA_LEAF | p-Super | GC | 45 | 235 |
| 39300 | non-targ | B2414 | vitc a/o thra | ARA_LEAF | p-Super | GC | 30 | 46 |
| 134924 | plastidic | B2421 | vitc a/o thra | ARA_SEED_2 | p-USP | GC | 38 | 197 |
| 40726 | non-targ | B2634 | fumarate | ARA_LEAF | p-Super | GC | 134 | 861 |
| 40726 | non-targ | B2634 | malate | ARA_LEAF | p-Super | GC | 139 | 511 |
| 80756 | non-targ | B2701 | succinate | ARA_LEAF | p-Super | GC | 33 | 60 |
| 81075 | non-targ | B2747 | succinate | ARA_LEAF | p-Super | GC | 33 | 53 |
| 81576 | non-targ | B2818 | succinate | ARA_LEAF | p-Super | GC | 30 | 59 |
| 115864 | non-targ | B2866 | succinate | ARA_LEAF | p-Super | GC | 26 | 34 |
| 135893 | non-targ | B3008 | succinate | ARA_LEAF | p-Super | GC | 26 | 63 |
| 42502 | non-targ | B3262 | fumarate | ARA_LEAF | p-Super | LC | 69 | 208 |
| 42502 | non-targ | B3262 | malate | ARA_LEAF | p-Super | GC | 76 | 135 |
| 136077 | non-targ | B3624 | fumarate | ARA_LEAF | p-Super | GC | 69 | 1749 |
| 136098 | non-targ | B3777 | succinate | ARA_LEAF | p-Super | LC | 29 | 54 |
| 83726 | non-targ | B3791 | malate | ARA_LEAF | p-Super | GC | 52 | 264 |
| 83726 | non-targ | B3791 | succinate | ARA_LEAF | p-Super | LC | 29 | 160 |
| 44196 | non-targ | B3814 | citramalate | ARA_LEAF | p-Super | GC | 41 | 45 |
| 10708 | non-targ | B3817 | fumarate | ARA_LEAF | p-Super | GC | 122 | 198 |
| 10726 | non-targ | B3823 | citramalate | ARA_LEAF | p-Super | GC | 44 | 151 |
| 10726 | non-targ | B3823 | malate | ARA_LEAF | p-Super | GC | 56 | 84 |
| 44372 | non-targ | B3989 | succinate | ARA_LEAF | p-Super | LC | 53 | 90 |
| 44378 | non-targ | B4012 | fumarate | ARA_SEED_2 | p-USP | GC | 58 | 204 |
| 10740 | non-targ | B4029 | fumarate | ARA_LEAF | p-Super | GC | 76 | 467 |
| 10740 | non-targ | B4029 | malate | ARA_LEAF | p-Super | GC | 81 | 511 |
| 10740 | non-targ | B4029 | succinate | ARA_LEAF | p-Super | GC | 29 | 444 |
| 106532 | non-targ | B4050 | fumarate | ARA_LEAF | p-Super | GC | 127 | 1497 |
| 106532 | non-targ | B4050 | malate | ARA_LEAF | p-Super | GC | 52 | 553 |
| 94542 | non-targ | B4056 | citramalate | ARA_LEAF | p-Super | GC | 41 | 94 |
| 45022 | non-targ | B4139 | citrate | ARA_SEED_2 | p-USP | GC | 119 | 342 |
| 45321 | non-targ | B4256 | fumarate | ARA_LEAF | p-Super | LC | 40 | 45 |
| 45321 | non-targ | B4256 | malate | ARA_LEAF | p-Super | GC | 201 | 278 |
| 45556 | non-targ | B4384 | vitc a/o thra | ARA_SEED_2 | p-USP | GC | 36 | 222 |
| 84079 | plastidic | D90900 | succinate | ARA_LEAF | p-PcUBI | LC | 33 | 49 |
| 10811 | non-targ | GM02LC12622 | succinate | ARA_LEAF | p-PcUBI | LC | 32 | 137 |
| 46405 | non-targ | GM02LC17485 | fumarate | ARA_LEAF | p-PcUBI | GC | 67 | 224 |
| 84198 | non-targ | GM02LC21368 | citramalate | ARA_LEAF | p-PcUBI | GC | 42 | 177 |
| 84198 | non-targ | GM02LC21368 | fumarate | ARA_LEAF | p-PcUBI | GC | 71 | 316 |
| 84198 | non-targ | GM02LC21368 | malate | ARA_LEAF | p-PcUBI | GC | 102 | 632 |
| 47076 | non-targ | GM02LC5744 | citramalate | ARA_LEAF | p-PcUBI | GC | 47 | 69 |
| 47076 | non-targ | GM02LC5744 | fumarate | ARA_LEAF | p-PcUBI | LC | 49 | 104 |
| 48138 | non-targ | Sll0170 | citramalate | ARA_LEAF | p-PcUBI | GC | 49 | 116 |
| 84265 | plastidic | Sll0228 | fumarate | ARA_LEAF | p-PcUBI | GC | 67 | 78 |
| 84441 | plastidic | Sll0240 | malate | ARA_LEAF | p-PcUBI | GC | 73 | 176 |
| 84441 | plastidic | Sll0240 | succinate | ARA_LEAF | p-PcUBI | GC | 26 | 91 |
| 51198 | non-targ | Sll0816 | fumarate | ARA_LEAF | p-PcUBI | GC | 64 | 228 |
| 127109 | non-targ | Sll0895 | succinate | ARA_LEAF | p-PcUBI | LC | 34 | 83 |
| 54452 | plastidic | Sll1522 | citramalate | ARA_LEAF | p-PcUBI | GC | 43 | 57 |
| 54452 | plastidic | Sll1522 | malate | ARA_LEAF | p-PcUBI | GC | 55 | 206 |
| 85808 | mitoch | Sll1815 | succinate | ARA_LEAF | p-PcUBI | LC | 35 | 414 |
| 55385 | non-targ | Sll1920 | citramalate | ARA_LEAF | p-PcUBI | GC | 42 | 70 |
| 55385 | mitoch | Sll1920 | malate | ARA_LEAF | p-PcUBI | GC | 63 | 120 |
| 136533 | plastidic | Slr0018 | fumarate | ARA_LEAF | p-PcUBI | GC | 167 | 367 |
| 11990 | plastidic | Slr0338 | citramalate | ARA_LEAF | p-PcUBI | GC | 58 | 138 |
| 56153 | plastidic | Slr0597 | fumarate | ARA_LEAF | p-PcUBI | GC | 65 | 115 |
| 87397 | plastidic | Slr0721 | citramalate | ARA_LEAF | p-PcUBI | GC | 55 | 692 |
| 87397 | plastidic | Slr0721 | succinate | ARA_LEAF | p-PcUBI | GC | 63 | 291 |
| 57734 | non-targ | Slr1096 | glycerate | ARA_LEAF | p-PcUBI | GC | 31 | 42 |
| 57734 | non-targ | Slr1096 | succinate | ARA_LEAF | p-PcUBI | LC | 24 | 59 |
| 136869 | non-targ | Slr1170 | succinate | ARA_LEAF | p-PcUBI | LC | 39 | 81 |
| 116460 | mitoch | Slr1250 | fumarate | ARA_LEAF | p-PcUBI | LC | 53 | 59 |
| 58058 | non-targ | Slr1269 | succinate | ARA_LEAF | p-PcUBI | LC | 32 | 75 |
| 58731 | plastidic | Slr1739 | malate | ARA_LEAF | p-PcUBI | GC | 73 | 318 |
| 59165 | plastidic | Slr2023 | fumarate | ARA_LEAF | p-PcUBI | GC | 108 | 384 |
| 59165 | plastidic | Slr2023 | succinate | ARA_LEAF | p-PcUBI | GC | 38 | 152 |
| 136907 | plastidic | Smr0004 | glycerate | ARA_LEAF | p-PcUBI | GC | 29 | 32 |
| 12698 | non-targ | TTC0019 | fumarate | ARA_LEAF | p-PcUBI | GC | 181 | 395 |
| 12698 | non-targ | TTC0019 | succinate | ARA_LEAF | p-PcUBI | LC | 31 | 106 |
| 107556 | non-targ | TTC0849 | citramalate | ARA_LEAF | p-PcUBI | GC | 40 | 352 |
| 61723 | non-targ | TTC1193 | fumarate | ARA_LEAF | p-PcUBI | LC | 72 | 132 |
| 61723 | non-targ | TTC1193 | succinate | ARA_LEAF | p-PcUBI | LC | 36 | 110 |
| 62079 | non-targ | TTC1386 | fumarate | ARA_LEAF | p-PcUBI | GC | 64 | 848 |
| 62079 | non-targ | TTC1386 | malate | ARA_LEAF | p-PcUBI | GC | 241 | 353 |
| 62079 | non-targ | TTC1386 | succinate | ARA_LEAF | p-PcUBI | GC | 31 | 161 |
| 62160 | non-targ | TTC1918 | citramalate | ARA_LEAF | p-PcUBI | GC | 43 | 80 |
| 62160 | non-targ | TTC1918 | glycerate | ARA_LEAF | p-PcUBI | GC | 32 | 61 |
| 62160 | non-targ | TTC1918 | malate | ARA_LEAF | p-PcUBI | GC | 58 | 241 |
| 62244 | non-targ | XM_473199 | fumarate | ARA_LEAF | p-PcUBI | GC | 76 | 257 |
| 62244 | non-targ | XM_473199 | malate | ARA_LEAF | p-PcUBI | GC | 54 | 129 |
| 62244 | non-targ | XM_473199 | succinate | ARA_LEAF | p-PcUBI | LC | 31 | 75 |
| 136943 | plastidic | Yal062w | succinate | ARA_LEAF | p-PcUBI | LC | 35 | 75 |
| 137387 | non-targ | Ybl015w | citramalate | ARA_LEAF | Big35S | GC | 39 | 127 |
| 137387 | non-targ | Ybl015w | pyruvate | ARA_LEAF | Big35S | GC | 44 | 74 |
| 96779 | plastidic | Ybr218c | malate | ARA_LEAF | p-Super | GC | 49 | 99 |
| 63264 | plastidic | Ycr102c | fumarate | ARA_LEAF | p-Super | LC | 49 | 79 |
| 137498 | non-targ | Ydl159w-a | fumarate | ARA_LEAF | Big35S | GC | 18 | 20 |
| 63334 | plastidic | Ydr044w | fumarate | ARA_LEAF | p-PcUBI | GC | 198 | 494 |
| 63334 | plastidic | Ydr044w | succinate | ARA_LEAF | p-PcUBI | GC | 112 | 267 |
| 64177 | non-targ | Ygl237c | malate | ARA_LEAF | Big35S | GC | 54 | 178 |
| 64177 | non-targ | Ygl237c | succinate | ARA_LEAF | Big35S | LC | 33 | 110 |
| 108487 | non-targ | Ygr193c | fumarate | ARA_SEED_2 | p-PcUBI | LC | 50 | 287 |
| 108487 | non-targ | Ygr193c | malate | ARA_SEED_2 | p-PcUBI | LC | 58 | 96 |
| 108487 | non-targ | Ygr193c | succinate | ARA_SEED_2 | p-PcUBI | LC | 129 | 292 |
| 64315 | plastidic | Ygr221c | malate | ARA_LEAF | p-Super | GC | 59 | 80 |
| 101855 | plastidic | Yhl032c | citrate | ARA_SEED_2 | p-USP | LC | 73 | 311 |
| 97620 | plastidic | Yhr131c | malate | ARA_LEAF | p-Super | GC | 53 | 83 |
| 64546 | plastidic | Yhr207c | succinate | ARA_LEAF | p-Super | LC | 59 | 166 |
| 64964 | plastidic | Yjl073w | glycerate | ARA_LEAF | p-Super | GC | 31 | 37 |
| 97635 | non-targ | Yjl219w | oxalate | ARA_SEED_2 | p-PcUBI | GC | 33 | 194 |
| 90409 | plastidic | Yjr148w | citramalate | ARA_LEAF | p-Super | GC | 97 | 244 |
| 66274 | non-targ | Yjr153w | fumarate | ARA_LEAF | p-PcUBI | LC | 50 | 138 |
| 66274 | non-targ | Yjr153w | malate | ARA_LEAF | p-PcUBI | GC | 63 | 166 |
| 90602 | plastidic | YKL038W | malate | ARA_LEAF | p-PcUBI | GC | 67 | 159 |
| 137502 | non-targ | Ykl140w | vitc a/o thra | ARA_SEED_2 | p-PcUBI | GC | 39 | 145 |
| 66695 | plastidic | Ylr065c | fumarate | ARA_LEAF | p-Super | LC | 33 | 45 |
| 137547 | plastidic | Ylr174w | succinate | ARA_LEAF | p-Super | GC | 29 | 48 |
| 129123 | plastidic | Ylr326w | fumarate | ARA_LEAF | p-Super | GC | 71 | 254 |
| 129123 | plastidic | Ylr326w | glycerate | ARA_LEAF | p-Super | GC | 37 | 72 |
| 129123 | plastidic | Ylr326w | vitc a/o thra | ARA_LEAF | p-Super | GC | 30 | 33 |
| 15175 | plastidic | Yml084w | fumarate | ARA_LEAF | p-Super | LC | 30 | 80 |
| 15175 | plastidic | Yml084w | succinate | ARA_LEAF | p-Super | LC | 53 | 165 |
| 137818 | plastidic | Yol073c | citramalate | ARA_LEAF | p-Super | GC | 43 | 59 |
| 137818 | plastidic | Yol073c | malate | ARA_LEAF | p-Super | GC | 62 | 188 |
| 15179 | plastidic | Yol160w | vitc a/o thra | ARA_LEAF | p-Super | GC | 28 | 43 |
| 92668 | non-targ | Ypl028w | malate | ARA_LEAF | Big35S | LC | 41 | 88 |
| 93218 | non-targ | Ypr138c | vitc a/o thra | ARA_SEED_2 | p-USP | GC | 37 | 125 |
| 15187 | non-targ | 47266012_SOYBEAN | fumarate | ARA_LEAF | p-PcUBI | GC | 75 | 378 |
| 15187 | non-targ | 47266012_SOYBEAN | malate | ARA_LEAF | p-PcUBI | GC | 59 | 201 |
| 15187 | non-targ | 47266012_SOYBEAN | succinate | ARA_LEAF | p-PcUBI | GC | 46 | 112 |
| 69 | non-targ | 49747384_SOYBEAN | fumarate | ARA_LEAF | p-PcUBI | GC | 100 | 340 |
| 69 | non-targ | 49747384_SOYBEAN | malate | ARA_LEAF | p-PcUBI | GC | 54 | 202 |
| 69 | non-targ | 49747384_SOYBEAN | succinate | ARA_LEAF | p-PcUBI | LC | 46 | 129 |
| 69 | non-targ | 49747384_SOYBEAN | vitc a/o thra | ARA_LEAF | p-PcUBI | GC | 32 | 64 |
| 15532 | plastidic | 51340801_CANOLA | citramalate | ARA_LEAF | p-PcUBI | GC | 49 | 420 |
| 15532 | plastidic | 51340801_CANOLA | succinate | ARA_LEAF | p-PcUBI | LC | 31 | 210 |
| 16883 | plastidic | 59582753_SOYBEAN | citramalate | ARA_LEAF | p-PcUBI | GC | 70 | 246 |

[76320] Column 1 shows the SEQ ID NO, Column 2 shows the expression type (targeted or non-targeted), Column 3 shows the “gene name” (locus), Column 4 shows the metabolite analyzed, Column 5 indicates the A. thaliana source tissue analyzed, Column 6 indicates the used promoter for expression, Column 7 indicates the analytical method. Columns 8 and 9 show the minimum and the maximum increase of the analyzed metabolite (in percent) in comparison to the wild type (ratio_by_WT, given as percent increase).

[76321] The term “non-targ” in Table d, Column 2 which shows the expression type means “non-targeted”.

[76322] The term “mitoch” in Table d, Column 2 which shows the expression type means “mitochondrial”.

[76323] The term “vit c a/o thra” in Table d, Column 2 which shows the expression type means “vitamin c and/or threonic acid”.

[76324] When the analyses were repeated independently, all results proved to be significant. [0505.1.7.15] to [0515.1.7.15] for the disclosure of these paragraphs see [0505.1.7.7] to [0515.1.7.7] above

[76325] In a further embodiment, the present invention relates in paragraphs [0000.1.7.16.] to [0514.1.7.16.] to a further process for the production of the fine chemical coenzyme Q10, coenzyme Q9, lipoic acid, and/or nicotinic acid as defined below and corresponding embodiments as described herein as follows.

[76326] for the disclosure of this paragraph see [0001.1.7.7] above

[76327] Cofactors are non-protein chemical compounds which bound to enzymes. They are required for the biological activity of the enzymes and function in association with these. In other words cofactors are required by inactive apoenzymes to convert them into active holoenzymes.

[76328] Cofactors can be divided into two broad groups: organic cofactors, such as flavin or heme, and inorganic cofactors: such as the metal ions Mg2+, Cu+, Mn2+or iron-sulfur clusters.

[76329] Organic cofactors are small organic molecules (typically a molecular mass less than 1000 Da) that can be either loosely or tightly bound to the enzyme and directly participate in the reaction. Vitamins can serve as precursors to many organic cofactors (e.g. vitamins B1, B2, B6, B12, niacin, folic acid). Many organic cofactors also contain a nucleotide: such as the electron carriers NAD and FAD, or coenzyme A, which carries acyl groups. Most of these cofactors are found in a huge variety of species, and some are universal to all forms of life.

[76330] Like enzymes, cofactors are not irreversibly changed during catalysis; they are either unmodifled or regenerated. Each kind of cofactor has a particular chemical function. Cofactors may either be attached by covalent bonds to a particular enzyme or exist freely in solution, but in either case they participate intimately in the chemical reactions catalyzed by the enzyme.

[76331] A well known cofactor is Coenzyme Q10 (CoQ 10) or ubiquinone, which is essentially a vitamin or vitamin-like substance. Disagreements on nomenclature notwithstanding, vitamins are defined as organic compounds essential in minute amounts for normal body function acting as coenzymes or precursors to coenzymes. Coenzyme Q10 or CoQ10 belongs to a family of substances called ubiquinones. Ubiquinones, also known as coenzymes Q and mitoquinones, are lipophilic, water-insoluble substances involved in electron transport and energy production in mitochondria. The basic structure of ubiquinones consists of a benzoquinone “head” and a terpinoid “tail.” The “head” structure participates in the redox activity of the electron transport chain. The major difference among the various coenzymes Q is in the number of isoprenoid units (5-carbon structures) in the “tail.” Coenzymes Q contain one to 12 isoprenoid units in the “tail”; 10 isoprenoid units are common in animals. Coenzymes Q occur in the majorganism ity of aerobic organisms, from bacteria to plants and animals. Two numbering systems exist for designation of the number of isoprenoid units in the terpinoid “tail”: coenzyme Qn and coenzyme Q(x). N refers to the number of isoprenoid side chains, and×refers to the number of carbons in the terpinoid “tail” and can be any multiple of five. Thus, coenzyme Q10 refers to a coenzyme Q having 10 isoprenoid units in the “tail.” Since each isoprenoid unit has five carbons, coenzyme Q10 can also be designated coenzyme Q(50). The structures of coenzymes Q are analogous to those of vitamin K2. Coenzyme Q10 is also known as Coenzyme Q(50), CoQ10,

[76332] CoQ(50), ubiquinone (50), ubiquino-10 and ubidecarerone.

[76333] They are present naturally in foods and sometimes are also synthesized in the body. CoQ10 likewise is found in small amounts in a wide variety of foods and is synthesized in all tissues. The biosynthesis of CoQ10 from the amino acid tyrosine is a multistage process requiring at least eight vitamins and several trace elements. Coenzymes are cofactors upon which the comparatively large and complex enzymes absolutely depend for their function. Coenzyme Q10 is the coenzyme for at least three mitochondrial enzymes (complexes I, II and III) as well as enzymes in other parts of the cell. Mitochondrial enzymes of the oxidative phosphorylation pathway are essential for the production of the high-energy phosphate, adenosine triphosphate (ATP), upon which all cellular functions depend. The electron and proton transfer functions of the quinone ring are of fundamental importance to all life forms; ubiquinone in the mitochondria of animals, plastoquinone in the chloroplast of plants, and menaquinone in bacteria. The term “bioenergetics” has been used to describe the field of biochemistry looking specifically at cellular energy production. In the related field of free radical chemistry, CoQ10 has been studied in its reduced form as a potent antioxidant. The bioenergetics and free radical chemistry of CoQ10 are reviewed in Gian Paolo Littarru's book, Energy and Defense, published in 1994. The precise chemical structure of CoQ10 is 2,3 dimethoxy-5 methyl-6 decaprenyl benzoquinone

[76334] Discovered in 1957, CoQ-10 is also called ubiquinone because it belongs to a class of compounds called quinones, and because it's ubiquitous in living organisms, especially in the heart, liver, and kidneys. It plays a crucial role in producing energy in cells. And it acts as a powerful antioxidant, meaning that it helps neutralize cell-damaging molecules called free radicals. Manufactured by all cells in the body, CoQ-10 is also found in small amounts in foods, notably meat and fish. By the mid-1970′s, the industrial technology to produce pure CoQ10 in quantities sufficient for larger clinical trials was established. Principally CoQ10 can be isolated from microorganisms or plants or algae; in particular mitochondria are a common source for CoQ10. Alternatively, they are obtained advantageously from animals or fish.

[76335] Since the actions of supplemental CoQ10 have yet to be clarified, the mechanism of these actions is a matter of speculation. However, much is known about the biochemistry of CoQ10. CoQ10 is an essential cofactor in the mitochondrial electron transport chain, where it accepts electrons from complex I and II, an activity that is vital for the production of ATP. CoQ10 has antioxidant activity in mitochondria and cellular membranes, protecting against peroxidation of lipid membranes. It also inhibits the oxidation of LDL-cholesterol. LDL-cholesterol oxidation is believed to play a significant role in the pathogenesis of atherosclerosis. CoQ10 is biosynthesized in the body and shares a common synthetic pathway with cholesterol.

[76336] CoQ10 levels decrease with aging in humans. Why this occurs is not known but may be due to decreased synthesis and/or increased lipid peroxidation which occurs with aging. Significantly decreased levels of CoQ10 have been noted in a wide variety of diseases in both animal and human studies. CoQ10 deficiency may be caused by insufficient dietary CoQ10, impairment in CoQ10 biosynthesis, excessive utilization of CoQ10 by the body, or any combination of the three. Decreased dietary intake is presumed in chronic malnutrition and cachexia.

[76337] The relative contribution of CoQ10 biosynthesis versus dietary CoQ10 is under investigation. Karl Folkers takes the position that the dominant source of CoQ10 in man is biosynthesis. This complex, 17 step process, requiring at least seven vitamins (vitamin B2- riboflavin, vitamin B3- niacinamide, vitamin B6, folic acid, vitamin B12, vitamin C, and pantothenic acid) and several trace elements, is, by its nature, highly vulnerable. Karl Folkers argues that suboptimal nutrient intake in man is almost universal and that there is subsequent secondary impairment in CoQ10 biosynthesis. This would mean that average or “normal” levels of CoQ10 are really suboptimal and the very low levels observed in advanced disease states represent only the tip of a deficiency “ice berg”.

[76338] Supplemental CoQ10 may have cardioprotective, cytoprotective and neuroprotective activities. There are claims that it has positive effects in cancer, muscular dystrophy and immune dysfunction. Similarly, it may inhibit obesity or enhance athletic performance. HMG-CoA reductase inhibitors used to treat elevated blood cholesterol levels by blocking cholesterol biosynthesis also block CoQ10 biosynthesis. The resulting lowering of blood CoQ10 level is due to the partially shared biosynthetic pathway of CoQ10 and cholesterol. In patients with heart failure this is more than a laboratory observation. It has a significant harmful effect which can be negated by oral CoQ10 supplementation.

[76339] Increased body consumption of CoQ10 is the presumed cause of low blood CoQ10 levels seen in excessive exertion, hypermetabolism, and acute shock states. It is likely that all three mechanisms (insufficient dietary CoQ10, impaired CoQ10 biosynthesis, and excessive utilization of CoQ10) are operable to varying degrees in most cases of observed CoQ10 deficiency.

[76340] In nature, Coenzymes QO to Q9 are found as well. E.g. Coenzyme Q9 is a derivative of CoQ10 found e.g. in the chloroplast of plants. Coenzyme Q9 has a shorter aliphatic group bound to the ring structure. Due to the high structural homology of Coenzymes QO to Q9 are expected to provide the same or very similar activities as CoQ10 in cells or organisms.

[76341] However, Matsura et al., Biochim Biophys Acta, 1992, 1123(3) pp. 309-15 concluded from their study that CoQ9 constantly acts as a potential antioxidant in hepatocytes whereas CoQ10 manly exhibit its antioxidant activity in cells containing CoQ10 as the predominate CoQ homolog. Coenzyme Q10 is actual a very common ingredient in different types of cosmetics, due to its protective role against radicals and its predicted function in skin tautening.

[76342] Lipoic acid (lipoate) is a sulfur-containing cofactor involved in several multienzyme complexes such as pyruvate dehydrogenase, a-ketoglutarate dehydrogenase, branchedchain keto acid dehydrogenase, and glycine decarboxylase complex. Lipoic acid is also knon as (R)-5-(1,2-dithiolan-3-yl)pentanoic acid, alpha lipoic acid, 6,8-dithiooctanoic acid with a CAS-No: 1200-22-2.

[76343] Lipoic acid contains on chiral carbon atom. The R-(+)-enantiomere (RLA) is disovered in nature and is an essential cofactor for mitochondrial enzyme complexes.

[76344] One decade ago, several studies highlighted the potential of free lipoic acid and dihydrolipoic acid as powerful metabolic antioxidants that are able to scavenge the reactive oxygen species, to recycle other antioxidants (vitamin C, glutathione, and vitamin E), and even to intervene in redox regulation of gene transcription. Consequently, lipoic acid saw an upshift in use as a therapeutic agent in pathologies associated with oxidative stress (Gueguen et al., JOURNAL OF BIOLOGICAL CHEMISTRY (2000), Vol. 275, No. 7, pp. 5016-5025).

[76345] In the cell, very little lipoate exists as free acid almost all is tethered (via a peptide bond involving the lipoic acid carboxyl function) to the side chain amino group of a conserved lysine resiude in some enzyme complex dependent of lipoic acid as cofactor. (Booker, S., Chemistry & Biology, 2004, 10-12)

[76346] Nicotinic acid (also known as vitamin B3, niacin, nicotinate, vitamin PP, pyridine-3-carboxylic acid and vitamin PP and the CAS NO 59-67-6) is an organic cofactor and one of the forty to eighty essential human nutrients. This colorless, water-soluble solid is a derivative of pyridine, with a carboxyl group (COOH) at the 3-position. Nicotinic acid and its amide derivative, nicotinamide (niacinamide) are biosynthetically linked the coenzymes nicotinamide adenine dinucleotide (NAD) and nicotinamide adenine dinucleotide phosphate (NADP).

[76347] The late stage of severe niacin deficiency is known as pellagra. Niacin deficiency or pellagra may result from inadequate dietary intake of niacin and/or tryptophan. Other nutrient deficiencies may also contribute to the development of niacin deficiency. For instance, patients with

[76348] Hartnup's disease, a hereditary disorder resulting in defective tryptophan absorption, have developed pellagra.

[76349] Nicotinic acid is used as food supplement and for food fortification. Niacin is found in variety of foods, including liver, chicken, beef, fish, cereal, peanuts and legumes, and is also synthesized from tryptophan, which is found in meat, dairy and eggs.

[76350] Thus, cofactors, in particular coenzyme Q10, coenzyme Q9, lipoic acid, and/or nicotinic acid can be used in a lot of different applications, for example in cosmetics, pharmaceuticals and in feed and food.

[76351] Therefore improving the productivity of said cofactors and improving the quality of cosmetics, pharmaceuticals, foodstuffs and animal feeds, in particular of nutrition supplements, is an imporganism tant task of the different industries.

[76352] The content of coenzyme Q10 and coenzyme Q9 in a cell was also increased by increasing or decreasing certain activities as disclosed in WO2006/069610, WO2007/087815 or WO2008/034648.

[76353] To ensure a high productivity of said cofactors, in particular coenzyme Q10, coenzyme Q9, lipoic acid, and/or nicotinic acid in plants or microorganism, it is necessary to manipulate the natural biosynthesis of said cofactors in said organisms.

[76354] Accordingly, there is still a great demand for new and more suitable genes which encode enzymes or other regulators which participate in the biosynthesis of said cofactors, in particular coenzyme Q10, coenzyme Q9, lipoic acid, and/or nicotinic acid and make it possible to produce certain said cofactors specifically on an industrial scale without unwanted byproducts forming. In the selection of genes for biosynthesis two characteristics above all are particularly important. On the one hand, there is as ever a need for improved processes for obtaining the highest possible contents of said cofactors on the other hand as less as possible byproducts should be produced in the production process.

[76355] It is an object of the present invention to develop an inexpensive process for the synthesis of coenzyme Q10, coenzyme Q9, lipoic acid, and/or nicotinic acid.

[76356] It is a further object of the present invention to develop an inexpensive process for the synthesis of cofactors, in particular coenzyme Q10, coenzyme Q9, lipoic acid, and/or nicotinic acid and to assure that the cofactors, in particular coenzyme Q10, coenzyme Q9, lipoic acid, and/or nicotinic acid are more accessible and facilely to isolate and recover in an industrial scale from the producing organism, preferably from a plant.

[76357] for the disclosure of this paragraph see [0013.1.7.7] above

[76358] Accordingly, in a first embodiment, the invention relates to a process for the production of at least one fine chemical selected from the group of cofactors, in particular from the group consisting of: coenzyme Q10, coenzyme Q9, lipoic acid, and/or nicotinic acid, or, in other words, of the “fine chemical” or “fine chemical of the invention”.

[76359] The terms “fine chemical of the invention”, “fine chemical” or “the fine chemical” are used herein equally and relate in context of the paragraphs or sections [0014.1.16.16] to [0514.1.7.16] essentially to the metabolite or the metabolites indicated in column 7, application no. 16 of Tables I, II and IV in the respective line.

[76360] Further, the term “in context of any of the paragraphs [0014.1.16.16] to [0514.1.7.16]” as used herein means that for any of said paragraphs [0014.1.16.16] to [0514.1.7.16] the term “the fine chemical” is understood to follow the definition of paragraphs or sections [0014.1.16.16] and [0015.1.16.16], independently whether it refers to any other paragraph or not and whether the reference recites the term “fine chemical” in an other context.

[76361] Thus, in cases where one or more paragraphs or sections are incorporated by reference into any of the present paragraphs [0014.1.16.16] to [0514.1.7.16], e.g. by usage of the term “see paragraph” or the term “for the disclosure of this paragraph see the disclosure of paragraph” or the term “incorporated by reference” or a corresponding term, the incorporated paragraph, section or term “the fine chemical” is also understood to have the meaning according to the definition of paragraph [0014.1.16.16] and [0015.1.16.16].

[76362] Accordingly, in one embodiment, the term “fine chemical of the invention”, “fine chemical” or “the fine chemical” as used herein (alone or in combination, like in FCRP) means “coenzyme Q10” in context of the nucleic acid or polypeptide sequences listed in the respective same line of any one of Tables I to IV of application no. 16 and indicating in column 7 the metabolite “coenzyme Q10”.

[76363] In one embodiment, the term coenzyme Q10 or the term “fine chemical” mean in context of the paragraphs or sections [0014.1.16.16] to [0514.1.7.16] at least one chemical compound with an activity of the above mentioned coenzyme Q10, respectively.

[76364] Accordingly, in one embodiment, the term “fine chemical of the invention”, “fine chemical” or “the fine chemical” as used herein (alone or in combination, like in FCRP) means “coenzyme Q9” in context of the nucleic acid or polypeptide sequences listed in the respective same line of any one of Tables I to IV of application no. 16 and indicating in column 7 the metabolite “coenzyme Q9”.

[76365] In one embodiment, the term coenzyme Q9 or the term “fine chemical” mean in context of the paragraphs or sections [0014.1.16.16] to [0514.1.7.16] at least one chemical compound with an activity of the above mentioned coenzyme Q9, respectively.

[76366] Accordingly, in one embodiment, the term “fine chemical of the invention”, “fine chemical” or “the fine chemical” as used herein (alone or in combination, like in FCRP) means “lipoic acid” in context of the nucleic acid or polypeptide sequences listed in the respective same line of any one of Tables Ito IV of application no. 16 and indicating in column 7 the metabolite “lipoic acid”.

[76367] In one embodiment, the term lipoic acid or the term “fine chemical” mean in context of the paragraphs or sections [0014.1.16.16] to [0514.1.7.16] at least one chemical compound with an activity of the above mentioned lipoic acid, respectively.

[76368] Accordingly, in one embodiment, the term “fine chemical of the invention”, “fine chemical” or “the fine chemical” as used herein (alone or in combination, like in FCRP) means “nicotinic acid” in context of the nucleic acid or polypeptide sequences listed in the respective same line of any one of Tables I to IV of application no. 16 and indicating in column 7 the metabolite “nicotinic acid”.

[76369] In one embodiment, the term nicotinic acid or the term “fine chemical” mean in context of the paragraphs or sections [0014.1.16.16] to [0514.1.7.16] at least one chemical compound with an activity of the above mentioned nicotinic acid, respectively.

[76370] Accordingly, in one embodiment, the terms “fine chemical of the invention”, “fine chemical” or “the fine chemical” mean in context of any of the paragraphs [0014.1.16.16] to [0514.1.7.16] coenzyme Q10, in any one of the three redox states of Coenzyme Q10: fully oxidized (ubiquinone), semiquinone (ubisemiquinone), and fully reduced (ubiquinol), their salts, ester or ether in free form or bound form. In a preferred embodiment, the term “the fine chemical” means coenzyme Q10 in any one of the three redox states of Coenzyme Q10: fully oxidized (ubiquinone), semiquinone (ubisemiquinone), and fully reduced (ubiquinol), or their salts, ester or ether, in free form or bound form, preferably bound to peptide(s) or protein(s). In a preferred embodiment “coenzyme Q10” means coenzyme Q10 in free form.

[76371] Accordingly, in one embodiment, the terms “fine chemical of the invention”, “fine chemical” or “the fine chemical” mean in context of any of the paragraphs [0014.1.16.16] to [0514.1.7.16] coenzyme Q9, in any one of the three redox states of Coenzyme Q9: fully oxidized, semiquinone, and fully reduced, their salts, ester or ether in free form or bound form. In a preferred embodiment, the term “the fine chemical” means coenzyme Q9 in any one of the three redox states of Coenzyme Q9: fully oxidized, semiquinone, and fully reduced, or their salts, ester or ether, in free form or bound form, preferably bound to peptide(s) or protein(s).

[76372] In a preferred embodiment “coenzyme Q9” means coenzyme Q9 in free form.

[76373] Accordingly, in one embodiment, the terms “fine chemical of the invention”, “fine chemical” or “the fine chemical” mean in context of any of the paragraphs [0014.1.16.16] to [0514.1.7.16] lipoic acid, its salts, ester or ether in free form or bound form. In a preferred embodiment, the term “the fine chemical” means lipoic acid or its salts, ester or ether, in free form or bound form, preferably bound to peptide(s) or protein(s).

[76374] In a preferred embodiment “lipoic acid” means lipoic acid in free form.

[76375] The state of (de-)protonsation is not considered here (lipoic acid treated as lipoate and visa versa).

[76376] Accordingly, in one embodiment, the terms “fine chemical of the invention”, “fine chemical” or “the fine chemical” mean in context of any of the paragraphs [0014.1.16.16] to [0514.1.7.16] nicotinic acid, its salts, ester or ether in free form or bound form. In a preferred embodiment, the term “the fine chemical” means nicotinic acid or its salts, ester or ether, in free form or bound form, preferably bound to peptide(s) or protein(s).

[76377] In a preferred embodiment “nicotinic acid” means nicotinic acid in free form.

[76378] The state of (de-)protonsation is not considered here (nicotinic acid treated as nicotinate and visa versa). The terms nicotinic acid, niacin, nicotinamide, and vitamin B3 are used interchangeably to refer to any member of this family of compounds, since they have the same biochemical activity.

[76379] Further, the term “in context of any of the paragraphs [0014.1.16.16] to [0514.1.7.16]” as used herein means that for any of said paragraphs [0014.1.16.16] to [0514.1.7.16] the term “the fine chemical” is understood to follow the definition of section [0014.1.16.16] or section [0015.1.16.16], independently whether it refers to any other paragraph or not and whether the reference recites the term “fine chemical” in an other context.

[76380] Thus, in cases where one or more paragraphs or sections are incorporated by reference into any of the present paragraphs [0014.1.16.16] to [0514.1.7.16], e.g. by usage of the term “see paragraph” or the term “for the disclosure of this paragraph see the disclosure of paragraph” or the term “incorporated by reference” or a corresponding term, the incorporated paragraph, section or term “the fine chemical” is also understood to have the meaning according to this definition of this paragraph [0015.1.16.16].

[76381] Further, the term “fine chemicals” as used herein relates to compositions comprising said fine chemical(s), i.e. comprising coenzyme Q10, coenzyme Q9, lipoic acid, and/or nicotinic acid, respectively.

[76382] Accordingly, the present invention relates to a process for the production of coenzyme Q10, which comprises
[76383] (a) increasing or generating one or more activities selected from the group consisting of amino acid acetyltransferase in a non-human organism or a part thereof, preferably a microorganism, a plant cell, a plant or a part thereof, as compared to a corresponding non-transformed wild type non-human organism or a part thereof; and
[76384] (b) growing the non-human organism or a part thereof under conditions which permit the pro-duction of coenzyme Q10 or a composition comprising coenzyme Q10 in said non-human organism or in the culture medium surrounding said non-human organism.

[76385] Accordingly, the present invention relates to a process for the production of coenzyme Q9, which comprises
[76386] (a) increasing or generating one or more activities selected from the group consisting of transcriptional regulator in a non-human organism or a part thereof, preferably a microorganism, a plant cell, a plant or a part thereof, as compared to a corresponding non-transformed wild type non-human organism or a part thereof; and
[76387] (b) growing the non-human organism or a part thereof under conditions which permit the production of coenzyme Q9 or a composition comprising coenzyme Q9 in said non-human organism or in the culture medium surrounding said non-human organism.

[76388] Accordingly, the present invention relates to a process for the production of coenzyme Q9, which comprises
[76389] (a) increasing or generating one or more activities selected from the group consisting of At1 g47380-protein in a non-human organism or a part thereof, preferably a microorganism, a plant cell, a plant or a part thereof, as compared to a corresponding non-transformed wild type non-human organism or a part thereof; and
[76390] (b) growing the non-human organism or a part thereof under conditions which permit the production of coenzyme Q9 or a composition comprising coenzyme Q9 in said non-human organism or in the culture medium surrounding said non-human organism.

[76391] Accordingly, the present invention relates to a process for the production of coenzyme Q9, which comprises
[76392] (a) increasing or generating one or more activities selected from the group consisting of protein phosphatase in a non-human organism or a part thereof, preferably a microorganism, a plant cell, a plant or a part thereof, as compared to a corresponding non-transformed wild type non-human organism or a part thereof; and
[76393] (b) growing the non-human organism or a part thereof under conditions which permit the production of coenzyme Q9 or a composition comprising coenzyme Q9 in said non-human organism or in the culture medium surrounding said non-human organism.

[76394] Accordingly, the present invention relates to a process for the production of coenzyme Q9, which comprises
[76395] (a) increasing or generating one or more activities selected from the group consisting of phenylalanine ammonia-lyase in a non-human organism or a part thereof, preferably a microorganism, a plant cell, a plant or a part thereof, as compared to a corresponding non-transformed wild type non-human organism or a part thereof; and
[76396] (b) growing the non-human organism or a part thereof under conditions which permit the production of coenzyme Q9 or a composition comprising coenzyme Q9 in said non-human organism or in the culture medium surrounding said non-human organism.

[76397] Accordingly, the present invention relates to a process for the production of coenzyme Q9, which comprises
[76398] (a) increasing or generating one or more activities selected from the group consisting of MADS box protein transcription factor in a non-human organism or a part thereof, preferably a microorganism, a plant cell, a plant or a part thereof, as compared to a corresponding non-transformed wild type non-human organism or a part thereof; and
[76399] (b) growing the non-human organism or a part thereof under conditions which permit the production of coenzyme Q9 or a composition comprising coenzyme Q9 in said non-human organism or in the culture medium surrounding said non-human organism.

[76400] Accordingly, the present invention relates to a process for the production of coenzyme Q10, which comprises
[76401] (a) increasing or generating one or more activities selected from the group consisting of glutaredoxin in a non-human organism or a part thereof, preferably a microorganism, a plant cell, a plant or a part thereof, as compared to a corresponding non-transformed wild type non-human organism or a part thereof; and
[76402] (b) growing the non-human organism or a part thereof under conditions which permit the production of coenzyme Q10 or a composition comprising coenzyme Q10 in said non-human organism or in the culture medium surrounding said non-human organism.

[76403] Accordingly, the present invention relates to a process for the production of coenzyme Q9, which comprises
[76404] (a) increasing or generating one or more activities selected from the group consisting of heat shock transcription factor in a non-human organism or a part thereof, preferably a microorganism, a plant cell, a plant or a part thereof, as compared to a corresponding non-transformed wild type non-human organism or a part thereof; and
[76405] (b) growing the non-human organism or a part thereof under conditions which permit the production of coenzyme Q9 or a composition comprising coenzyme Q9 in said non-human organism or in the culture medium surrounding said non-human organism.

[76406] Accordingly, the present invention relates to a process for the production of coenzyme Q10, which comprises
[76407] (a) increasing or generating one or more activities selected from the group consisting of pyruvate kinase in a non-human organism or a part thereof, preferably a microorganism, a plant cell, a plant or a part thereof, as compared to a corresponding non-transformed wild type non-human organism or a part thereof; and
[76408] (b) growing the non-human organism or a part thereof under conditions which permit the production of coenzyme Q10 or a composition comprising coenzyme Q10 in said non-human organism or in the culture medium surrounding said non-human organism.

[76409] Accordingly, the present invention relates to a process for the production of coenzyme Q9, which comprises
[76410] (a) increasing or generating one or more activities selected from the group consisting of F-box protein in a non-human organism or a part thereof, preferably a microorganism, a plant cell, a plant or a part thereof, as compared to a corresponding non-transformed wild type non-human organism or a part thereof; and
[76411] (b) growing the non-human organism or a part thereof under conditions which permit the production of coenzyme Q9 or a composition comprising coenzyme Q9 in said non-human organism or in the culture medium surrounding said non-human organism.

[76412] Accordingly, the present invention relates to a process for the production of coenzyme Q10, which comprises
[76413] (a) increasing or generating one or more activities selected from the group consisting of CCAAT-binding transcription factor in a non-human organism or a part thereof, preferably a microorganism, a plant cell, a plant or a part thereof, as compared to a corresponding non-transformed wild type non-human organism or a part thereof; and
[76414] (b) growing the non-human organism or a part thereof under conditions which permit the production of coenzyme Q10 or a composition comprising coenzyme Q10 in said non-human organism or in the culture medium surrounding said non-human organism.

[76415] Accordingly, the present invention relates to a process for the production of coenzyme Q9, which comprises
[76416] (a) increasing or generating one or more activities selected from the group consisting of CCAAT-binding transcription factor in a non-human organism or a part thereof, preferably a microorganism, a plant cell, a plant or a part thereof, as compared to a corresponding non-transformed wild type non-human organism or a part thereof; and
[76417] (b) growing the non-human organism or a part thereof under conditions which permit the production of coenzyme Q9 or a composition comprising coenzyme Q9 in said non-human organism or in the culture medium surrounding said non-human organism.

[76418] Accordingly, the present invention relates to a process for the production of coenzyme Q9, which comprises
[76419] (a) increasing or generating one or more activities selected from the group consisting of glycosyl transferase in a non-human organism or a part thereof, preferably a microorganism, a plant cell, a plant or a part thereof, as compared to a corresponding non-transformed wild type non-human organism or a part thereof; and
[76420] (b) growing the non-human organism or a part thereof under conditions which permit the production of coenzyme Q9 or a composition comprising coenzyme Q9 in said non-human organism or in the culture medium surrounding said non-human organism.

[76421] Accordingly, the present invention relates to a process for the production of coenzyme Q9, which comprises
[76422] (a) increasing or generating one or more activities selected from the group consisting of auxin response factor in a non-human organism or a part thereof, preferably a microorganism, a plant cell, a plant or a part thereof, as compared to a corresponding non-transformed wild type non-human organism or a part thereof; and
[76423] (b) growing the non-human organism or a part thereof under conditions which permit the production of coenzyme Q9 or a composition comprising coenzyme Q9 in said non-human organism or in the culture medium surrounding said non-human organism.

[76424] Accordingly, the present invention relates to a process for the production of coenzyme Q10, which comprises
[76425] (a) increasing or generating one or more activities selected from the group consisting of glutaredoxin in a non-human organism or a part thereof, preferably a microorganism, a plant cell, a plant or a part thereof, as compared to a corresponding non-transformed wild type non-human organism or a part thereof; and
[76426] (b) growing the non-human organism or a part thereof under conditions which permit the production of coenzyme Q10 or a composition comprising coenzyme Q10 in said non-human organism or in the culture medium surrounding said non-human organism.

[76427] Accordingly, the present invention relates to a process for the production of coenzyme Q9, which comprises
[76428] (a) increasing or generating one or more activities selected from the group consisting of glutaredoxin in a non-human organism or a part thereof, preferably a microorganism, a plant cell, a plant or a part thereof, as compared to a corresponding non-transformed wild type non-human organism or a part thereof; and
[76429] (b) growing the non-human organism or a part thereof under conditions which permit the production of coenzyme Q9 or a composition comprising coenzyme Q9 in said non-human organism or in the culture medium surrounding said non-human organism.

[76430] Accordingly, the present invention relates to a process for the production of coenzyme Q10, which comprises
[76431] (a) increasing or generating one or more activities selected from the group consisting of sterol desaturase in a non-human organism or a part thereof, preferably a microorganism, a plant cell, a plant or a part thereof, as compared to a corresponding non-transformed wild type non-human organism or a part thereof; and
[76432] (b) growing the non-human organism or a part thereof under conditions which permit the production of coenzyme Q10 or a composition comprising coenzyme Q10 in said non-human organism or in the culture medium surrounding said non-human organism.

[76433] Accordingly, the present invention relates to a process for the production of coenzyme Q10, which comprises
[76434] (a) increasing or generating one or more activities selected from the group consisting of monothiol glutaredoxin in a non-human organism or a part thereof, preferably a microorganism, a plant cell, a plant or a part thereof, as compared to a corresponding non-transformed wild type non-human organism or a part thereof; and
[76435] (b) growing the non-human organism or a part thereof under conditions which permit the production of coenzyme Q10 or a composition comprising coenzyme Q10 in said non-human organism or in the culture medium surrounding said non-human organism.

[76436] Accordingly, the present invention relates to a process for the production of coenzyme Q9, which comprises
[76437] (a) increasing or generating one or more activities selected from the group consisting of monothiol glutaredoxin in a non-human organism or a part thereof, preferably a microorganism, a plant cell, a plant or a part thereof, as compared to a corresponding non-transformed wild type non-human organism or a part thereof; and
[76438] (b) growing the non-human organism or a part thereof under conditions which permit the production of coenzyme Q9 or a composition comprising coenzyme Q9 in said non-human organism or in the culture medium surrounding said non-human organism.

[76439] Accordingly, the present invention relates to a process for the production of coenzyme Q10, which comprises
[76440] (a) increasing or generating one or more activities selected from the group consisting of cy- clin D in a non-human organism or a part thereof, preferably a microorganism, a plant cell, a plant or a part thereof, as compared to a corresponding non-transformed wild type non-human organism or a part thereof; and
[76441] (b) growing the non-human organism or a part thereof under conditions which permit the production of coenzyme Q10 or a composition comprising coenzyme Q10 in said non-human organism or in the culture medium surrounding said non-human organism.

[76442] Accordingly, the present invention relates to a process for the production of coenzyme Q9, which comprises
[76443] (a) increasing or generating one or more activities selected from the group consisting of cyclin D in a non-human organism or a part thereof, preferably a microorganism, a plant cell, a plant or a part thereof, as compared to a corresponding non-transformed wild type non-human organism or a part thereof; and
[76444] (b) growing the non-human organism or a part thereof under conditions which permit the production of coenzyme Q9 or a composition comprising coenzyme Q9 in said non-human organism or in the culture medium surrounding said non-human organism.

[76445] Accordingly, the present invention relates to a process for the production of coenzyme Q10, which comprises
[76446] (a) increasing or generating one or more activities selected from the group consisting of calcium-dependent protein kinase in a non-human organism or a part thereof, preferably a microorganism, a plant cell, a plant or a part thereof, as compared to a corresponding non-transformed wild type non-human organism or a part thereof; and
[76447] (b) growing the non-human organism or a part thereof under conditions which permit the pro- duction of coenzyme Q10 or a composition comprising coenzyme Q10 in said non-human organism or in the culture medium surrounding said non-human organism.

[76448] Accordingly, the present invention relates to a process for the production of coenzyme Q9, which comprises
[76449] (a) increasing or generating one or more activities selected from the group consisting of calcium-dependent protein kinase in a non-human organism or a part thereof, preferably a microorganism, a plant cell, a plant or a part thereof, as compared to a corresponding non-transformed wild type non-human organism or a part thereof; and
[76450] (b) growing the non-human organism or a part thereof under conditions which permit the production of coenzyme Q9 or a composition comprising coenzyme Q9 in said non-human organism or in the culture medium surrounding said non-human organism.

[76451] Accordingly, the present invention relates to a process for the production of coenzyme Q9, which comprises
[76452] (a) increasing or generating one or more activities selected from the group consisting of heat shock transcription factor in a non-human organism or a part thereof, preferably a microorganism, a plant cell, a plant or a part thereof, as compared to a corresponding non-transformed wild type non-human organism or a part thereof; and
[76453] (b) growing the non-human organism or a part thereof under conditions which permit the production of coenzyme Q9 or a composition comprising coenzyme Q9 in said non-human organism or in the culture medium surrounding said non-human organism.

[76454] Accordingly, the present invention relates to a process for the production of coenzyme Q10, which comprises
[76455] (a) increasing or generating one or more activities selected from the group consisting of monothiol glutaredoxin in a non-human organism or a part thereof, preferably a microorganism, a plant cell, a plant or a part thereof, as compared to a corresponding non-transformed wild type non-human organism or a part thereof; and
[76456] (b) growing the non-human organism or a part thereof under conditions which permit the production of coenzyme Q10 or a composition comprising coenzyme Q10 in said non-human organism or in the culture medium surrounding said non-human organism.

[76457] Accordingly, the present invention relates to a process for the production of coenzyme Q9, which comprises
[76458] (a) increasing or generating one or more activities selected from the group consisting of disease resistance protein in a non-human organism or a part thereof, preferably a microorganism, a plant cell, a plant or a part thereof, as compared to a corresponding non-transformed wild type non-human organism or a part thereof; and
[76459] (b) growing the non-human organism or a part thereof under conditions which permit the production of coenzyme Q9 or a composition comprising coenzyme Q9 in said non-human organism or in the culture medium surrounding said non-human organism.

[76460] Accordingly, the present invention relates to a process for the production of coenzyme Q9, which comprises
[76461] (a) increasing or generating one or more activities selected from the group consisting of protein phosphatase in a non-human organism or a part thereof, preferably a microorganism, a plant cell, a plant or a part thereof, as compared to a corresponding non-transformed wild type non-human organism or a part thereof; and
[76462] (b) growing the non-human organism or a part thereof under conditions which permit the production of coenzyme Q9 or a composition comprising coenzyme Q9 in said non-human organism or in the culture medium surrounding said non-human organism.

[76463] Accordingly, the present invention relates to a process for the production of coenzyme Q9, which comprises
[76464] (a) increasing or generating one or more activities selected from the group consisting of zinc finger protein in a non-human organism or a part thereof, preferably a microorganism, a plant cell, a plant or a part thereof, as compared to a corresponding non-transformed wild type non-human organism or a part thereof; and
[76465] (b) growing the non-human organism or a part thereof under conditions which permit the production of coenzyme Q9 or a composition comprising coenzyme Q9 in said non-human organism or in the culture medium surrounding said non-human organism.

[76466] Accordingly, the present invention relates to a process for the production of coenzyme Q9, which comprises
[76467] (a) increasing or generating one or more activities selected from the group consisting of transcriptional regulator in a non-human organism or a part thereof, preferably a microorganism, a plant cell, a plant or a part thereof, as compared to a corresponding non-transformed wild type non-human organism or a part thereof; and
[76468] (b) growing the non-human organism or a part thereof under conditions which permit the production of coenzyme Q9 or a composition comprising coenzyme Q9 in said non-human organism or in the culture medium surrounding said non-human organism.

[76469] Accordingly, the present invention relates to a process for the production of coenzyme Q9, which comprises
[76470] (a) increasing or generating one or more activities selected from the group consisting of CTP synthase in a non-human organism or a part thereof, preferably a microorganism, a plant cell, a plant or a part thereof, as compared to a corresponding non-transformed wild type non-human organism or a part thereof; and
[76471] (b) growing the non-human organism or a part thereof under conditions which permit the production of coenzyme Q9 or a composition comprising coenzyme Q9 in said non-human organism or in the culture medium surrounding said non-human organism.

[76472] Accordingly, the present invention relates to a process for the production of coenzyme Q9, which comprises
[76473] (a) increasing or generating one or more activities selected from the group consisting of recombinase A in a non-human organism or a part thereof, preferably a microorganism, a plant cell, a plant or a part thereof, as compared to a corresponding non-transformed wild type non-human organism or a part thereof; and
[76474] (b) growing the non-human organism or a part thereof under conditions which permit the production of coenzyme Q9 or a composition comprising coenzyme Q9 in said non-human organism or in the culture medium surrounding said non-human organism.

[76475] Accordingly, the present invention relates to a process for the production of coenzyme Q10, which comprises
[76476] (a) increasing or generating one or more activities selected from the group consisting of enoyl-CoA hydratase in a non-human organism or a part thereof, preferably a microorganism, a plant cell, a plant or a part thereof, as compared to a corresponding non-transformed wild type non-human organism or a part thereof; and
[76477] (b) growing the non-human organism or a part thereof under conditions which permit the production of coenzyme Q10 or a composition comprising coenzyme Q10 in said non-human organism or in the culture medium surrounding said non-human organism.

[76478] Accordingly, the present invention relates to a process for the production of coenzyme Q9, which comprises
[76479] (a) increasing or generating one or more activities selected from the group consisting of enoyl-CoA hydratase in a non-human organism or a part thereof, preferably a microorganism, a plant cell, a plant or a part thereof, as compared to a corresponding non-transformed wild type non-human organism or a part thereof; and
[76480] (b) growing the non-human organism or a part thereof under conditions which permit the production of coenzyme Q9 or a composition comprising coenzyme Q9 in said non-human organism or in the culture medium surrounding said non-human organism.

[76481] Accordingly, the present invention relates to a process for the production of coenzyme Q9, which comprises
[76482] (a) increasing or generating one or more activities selected from the group consisting of isopropylmalate isomerase large subunit in a non-human organism or a part thereof, preferably a microorganism, a plant cell, a plant or a part thereof, as compared to a corresponding non-transformed wild type non-human organism or a part thereof; and
[76483] (b) growing the non-human organism or a part thereof under conditions which permit the production of coenzyme Q9 or a composition comprising coenzyme Q9 in said non-human organism or in the culture medium surrounding said non-human organism.

[76484] Accordingly, the present invention relates to a process for the production of coenzyme Q9, which comprises
[76485] (a) increasing or generating one or more activities selected from the group consisting of hydrolase in a non-human organism or a part thereof, preferably a microorganism, a plant cell, a plant or a part thereof, as compared to a corresponding non-transformed wild type non-human organism or a part thereof; and
[76486] (b) growing the non-human organism or a part thereof under conditions which permit the production of coenzyme Q9 or a composition comprising coenzyme Q9 in said non-human organism or in the culture medium surrounding said non-human organism.

[76487] Accordingly, the present invention relates to a process for the production of coenzyme Q9, which comprises
[76488] (a) increasing or generating one or more activities selected from the group consisting of AX653549-protein in a non-human organism or a part thereof, preferably a microorganism, a plant cell, a plant or a part thereof, as compared to a corresponding non-transformed wild type non-human organism or a part thereof; and
[76489] (b) growing the non-human organism or a part thereof under conditions which permit the production of coenzyme Q9 or a composition comprising coenzyme Q9 in said non-human organism or in the culture medium surrounding said non-human organism.

[76490] Accordingly, the present invention relates to a process for the production of coenzyme Q10, which comprises
[76491] (a) increasing or generating one or more activities selected from the group consisting of AY087308-protein in a non-human organism or a part thereof, preferably a microorganism, a plant cell, a plant or a part thereof, as compared to a corresponding non-transformed wild type non-human organism or a part thereof; and
[76492] (b) growing the non-human organism or a part thereof under conditions which permit the production of coenzyme Q10 or a composition comprising coenzyme Q10 in said non-human organism or in the culture medium surrounding said non-human organism.

[76493] Accordingly, the present invention relates to a process for the production of coenzyme Q10, which comprises
[76494] (a) increasing or generating one or more activities selected from the group consisting of threonine synthase in a non-human organism or a part thereof, preferably a microorganism, a plant cell, a plant or a part thereof, as compared to a corresponding non-transformed wild type non-human organism or a part thereof; and
[76495] (b) growing the non-human organism or a part thereof under conditions which permit the production of coenzyme Q10 or a composition comprising coenzyme Q10 in said non-human organism or in the culture medium surrounding said non-human organism.

[76496] Accordingly, the present invention relates to a process for the production of coenzyme Q10, which comprises
[76497] (a) increasing or generating one or more activities selected from the group consisting of acetolactate synthase III large subunit in a non-human organism or a part thereof, preferably a microorganism, a plant cell, a plant or a part thereof, as compared to a corresponding non-transformed wild type non-human organism or a part thereof; and
[76498] (b) growing the non-human organism or a part thereof under conditions which permit the production of coenzyme Q10 or a composition comprising coenzyme Q10 in said non-human organism or in the culture medium surrounding said non-human organism.

[76499] Accordingly, the present invention relates to a process for the production of coenzyme Q9, which comprises
[76500] (a) increasing or generating one or more activities selected from the group consisting of serine protease in a non-human organism or a part thereof, preferably a microorganism, a plant cell, a plant or a part thereof, as compared to a corresponding non-transformed wild type non-human organism or a part thereof; and
[76501] (b) growing the non-human organism or a part thereof under conditions which permit the production of coenzyme Q9 or a composition comprising coenzyme Q9 in said non-human organism or in the culture medium surrounding said non-human organism.

[76502] Accordingly, the present invention relates to a process for the production of coenzyme Q9, which comprises
[76503] (a) increasing or generating one or more activities selected from the group consisting of beta-galactosidase in a non-human organism or a part thereof, preferably a microorganism, a plant cell, a plant or a part thereof, as compared to a corresponding non-transformed wild type non-human organism or a part thereof; and
[76504] (b) growing the non-human organism or a part thereof under conditions which permit the production of coenzyme Q9 or a composition comprising coenzyme Q9 in said non-human organism or in the culture medium surrounding said non-human organism.

[76505] Accordingly, the present invention relates to a process for the production of coenzyme Q10, which comprises
[76506] (a) increasing or generating one or more activities selected from the group consisting of ATP-binding component of a transport system in a non-human organism or a part thereof, preferably a microorganism, a plant cell, a plant or a part thereof, as compared to a corresponding non-transformed wild type non-human organism or a part thereof; and
[76507] (b) growing the non-human organism or a part thereof under conditions which permit the production of coenzyme Q10 or a composition comprising coenzyme Q10 in said non-human organism or in the culture medium surrounding said non-human organism.

[76508] Accordingly, the present invention relates to a process for the production of coenzyme Q9, which comprises
[76509] (a) increasing or generating one or more activities selected from the group consisting of ATP-binding component of a transport system in a non-human organism or a part thereof, preferably a microorganism, a plant cell, a plant or a part thereof, as compared to a corresponding non-transformed wild type non-human organism or a part thereof; and
[76510] (b) growing the non-human organism or a part thereof under conditions which permit the production of coenzyme Q9 or a composition comprising coenzyme Q9 in said non-human organism or in the culture medium surrounding said non-human organism.

[76511] Accordingly, the present invention relates to a process for the production of coenzyme Q10, which comprises
[76512] (a) increasing or generating one or more activities selected from the group consisting of zinc transporter in a non-human organism or a part thereof, preferably a microorganism, a plant cell, a plant or a part thereof, as compared to a corresponding non-transformed wild type non-human organism or a part thereof; and
[76513] (b) growing the non-human organism or a part thereof under conditions which permit the production of coenzyme Q10 or a composition comprising coenzyme Q10 in said non-human organism or in the culture medium surrounding said non-human organism.

[76514] Accordingly, the present invention relates to a process for the production of coenzyme Q9, which comprises
[76515] (a) increasing or generating one or more activities selected from the group consisting of zinc transporter in a non-human organism or a part thereof, preferably a microorganism, a plant cell, a plant or a part thereof, as compared to a corresponding non-transformed wild type non-human organism or a part thereof; and
[76516] (b) growing the non-human organism or a part thereof under conditions which permit the production of coenzyme Q9 or a composition comprising coenzyme Q9 in said non-human organism or in the culture medium surrounding said non-human organism.

[76517] Accordingly, the present invention relates to a process for the production of coenzyme Q10, which comprises
[76518] (a) increasing or generating one or more activities selected from the group consisting of methylglyoxal synthase in a non-human organism or a part thereof, preferably a microorganism, a plant cell, a plant or a part thereof, as compared to a corresponding non-transformed wild type non-human organism or a part thereof; and
[76519] (b) growing the non-human organism or a part thereof under conditions which permit the production of coenzyme Q10 or a composition comprising coenzyme Q10 in said non-human organism or in the culture medium surrounding said non-human organism.

[76520] Accordingly, the present invention relates to a process for the production of coenzyme Q9, which comprises
[76521] (a) increasing or generating one or more activities selected from the group consisting of methylglyoxal synthase in a non-human organism or a part thereof, preferably a microorganism, a plant cell, a plant or a part thereof, as compared to a corresponding non-transformed wild type non-human organism or a part thereof; and
[76522] (b) growing the non-human organism or a part thereof under conditions which permit the production of coenzyme Q9 or a composition comprising coenzyme Q9 in said non-human organism or in the culture medium surrounding said non-human organism.

[76523] Accordingly, the present invention relates to a process for the production of coenzyme Q9, which comprises
[76524] (a) increasing or generating one or more activities selected from the group consisting of b1003-protein in a non-human organism or a part thereof, preferably a microorganism, a plant cell, a plant or a part thereof, as compared to a corresponding non-transformed wild type non-human organism or a part thereof; and
[76525] (b) growing the non-human organism or a part thereof under conditions which permit the production of coenzyme Q9 or a composition comprising coenzyme Q9 in said non-human organism or in the culture medium surrounding said non-human organism.

[76526] Accordingly, the present invention relates to a process for the production of coenzyme Q9, which comprises
[76527] (a) increasing or generating one or more activities selected from the group consisting of b1097-protein in a non-human organism or a part thereof, preferably a microorganism, a plant cell, a plant or a part thereof, as compared to a corresponding non-transformed wild type non-human organism or a part thereof; and
[76528] (b) growing the non-human organism or a part thereof under conditions which permit the production of coenzyme Q9 or a composition comprising coenzyme Q9 in said non-human organism or in the culture medium surrounding said non-human organism.

[76529] Accordingly, the present invention relates to a process for the production of coenzyme Q10, which comprises
[76530] (a) increasing or generating one or more activities selected from the group consisting of b1522-protein in a non-human organism or a part thereof, preferably a microorganism, a plant cell, a plant or a part thereof, as compared to a corresponding non-transformed wild type non-human organism or a part thereof; and
[76531] (b) growing the non-human organism or a part thereof under conditions which permit the production of coenzyme Q10 or a composition comprising coenzyme Q10 in said non-human organism or in the culture medium surrounding said non-human organism.

[76532] Accordingly, the present invention relates to a process for the production of coenzyme Q9, which comprises
[76533] (a) increasing or generating one or more activities selected from the group consisting of b1522-protein in a non-human organism or a part thereof, preferably a microorganism, a plant cell, a plant or a part thereof, as compared to a corresponding non-transformed wild type non-human organism or a part thereof; and
[76534] (b) growing the non-human organism or a part thereof under conditions which permit the production of coenzyme Q9 or a composition comprising coenzyme Q9 in said non-human organism or in the culture medium surrounding said non-human organism.

[76535] Accordingly, the present invention relates to a process for the production of coenzyme Q10, which comprises
[76536] (a) increasing or generating one or more activities selected from the group consisting of acid shock protein in a non-human organism or a part thereof, preferably a microorganism, a plant cell, a plant or a part thereof, as compared to a corresponding non-transformed wild type non-human organism or a part thereof; and
[76537] (b) growing the non-human organism or a part thereof under conditions which permit the production of coenzyme Q10 or a composition comprising coenzyme Q10 in said non-human organism or in the culture medium surrounding said non-human organism.

[76538] Accordingly, the present invention relates to a process for the production of coenzyme Q9, which comprises
[76539] (a) increasing or generating one or more activities selected from the group consisting of acid shock protein in a non-human organism or a part thereof, preferably a microorganism, a plant cell, a plant or a part thereof, as compared to a corresponding non-transformed wild type non-human organism or a part thereof; and
[76540] (b) growing the non-human organism or a part thereof under conditions which permit the production of coenzyme Q9 or a composition comprising coenzyme Q9 in said non-human organism or in the culture medium surrounding said non-human organism.

[76541] Accordingly, the present invention relates to a process for the production of coenzyme Q9, which comprises
[76542] (a) increasing or generating one or more activities selected from the group consisting of serine/threonine-protein phosphatase in a non-human organism or a part thereof, preferably a microorganism, a plant cell, a plant or a part thereof, as compared to a corresponding non-transformed wild type non-human organism or a part thereof; and
[76543] (b) growing the non-human organism or a part thereof under conditions which permit the production of coenzyme Q9 or a composition comprising coenzyme Q9 in said non-human organism or in the culture medium surrounding said non-human organism.

[76544] Accordingly, the present invention relates to a process for the production of coenzyme Q9, which comprises
[76545] (a) increasing or generating one or more activities selected from the group consisting of b2032-protein in a non-human organism or a part thereof, preferably a microorganism, a plant cell, a plant or a part thereof, as compared to a corresponding non-transformed wild type non-human organism or a part thereof; and
[76546] (b) growing the non-human organism or a part thereof under conditions which permit the production of coenzyme Q9 or a composition comprising coenzyme Q9 in said non-human organism or in the culture medium surrounding said non-human organism.

[76547] Accordingly, the present invention relates to a process for the production of coenzyme Q10, which comprises
[76548] (a) increasing or generating one or more activities selected from the group consisting of colanic acid biosynthesis protein in a non-human organism or a part thereof, preferably a microorganism, a plant cell, a plant or a part thereof, as compared to a corresponding non-transformed wild type non-human organism or a part thereof; and
[76549] (b) growing the non-human organism or a part thereof under conditions which permit the production of coenzyme Q10 or a composition comprising coenzyme Q10 in said non-human organism or in the culture medium surrounding said non-human organism.

[76550] Accordingly, the present invention relates to a process for the production of coenzyme Q9, which comprises
[76551] (a) increasing or generating one or more activities selected from the group consisting of NADH dehydrogenase I chain I in a non-human organism or a part thereof, preferably a microorganism, a plant cell, a plant or a part thereof, as compared to a corresponding non-transformed wild type non-human organism or a part thereof; and
[76552] (b) growing the non-human organism or a part thereof under conditions which permit the production of coenzyme Q9 or a composition comprising coenzyme Q9 in said non-human organism or in the culture medium surrounding said non-human organism.

[76553] Accordingly, the present invention relates to a process for the production of nicotinic acid, which comprises
[76554] (a) increasing or generating one or more activities selected from the group consisting of ATP synthase subunit E in a non-human organism or a part thereof, preferably a microorganism, a plant cell, a plant or a part thereof, as compared to a corresponding non-transformed wild type non-human organism or a part thereof; and
[76555] (b) growing the non-human organism or a part thereof under conditions which permit the production of nicotinic acid or a composition comprising nicotinic acid in said non-human organism or in the culture medium surrounding said non-human organism.

[76556] Accordingly, the present invention relates to a process for the production of nicotinic acid, which comprises
[76557] (a) increasing or generating one or more activities selected from the group consisting of L-aspartate oxidase in a non-human organism or a part thereof, preferably a microorganism, a plant cell, a plant or a part thereof, as compared to a corresponding non-transformed wild type non-human organism or a part thereof; and
[76558] (b) growing the non-human organism or a part thereof under conditions which permit the production of nicotinic acid or a composition comprising nicotinic acid in said non-human organism or in the culture medium surrounding said non-human organism.

[76559] Accordingly, the present invention relates to a process for the production of coenzyme Q9, which comprises
[76560] (a) increasing or generating one or more activities selected from the group consisting of b2739-protein in a non-human organism or a part thereof, preferably a microorganism, a plant cell, a plant or a part thereof, as compared to a corresponding non-transformed wild type non-human organism or a part thereof; and
[76561] (b) growing the non-human organism or a part thereof under conditions which permit the production of coenzyme Q9 or a composition comprising coenzyme Q9 in said non-human organism or in the culture medium surrounding said non-human organism.

[76562] Accordingly, the present invention relates to a process for the production of coenzyme Q9, which comprises
[76563] (a) increasing or generating one or more activities selected from the group consisting of 2-C-methyl-D-erythritol 4-phosphate cytidylyltransferase in a non-human organism or a part thereof, preferably a microorganism, a plant cell, a plant or a part thereof, as compared to a corresponding non-transformed wild type non-human organism or a part thereof; and
[76564] (b) growing the non-human organism or a part thereof under conditions which permit the production of coenzyme Q9 or a composition comprising coenzyme Q9 in said non-human organism or in the culture medium surrounding said non-human organism.

[76565] Accordingly, the present invention relates to a process for the production of lipoic acid, which comprises
[76566] (a) increasing or generating one or more activities selected from the group consisting of phosphoadenosine phosphosulfate reductase in a non-human organism or a part thereof, preferably a microorganism, a plant cell, a plant or a part thereof, as compared to a corresponding non-transformed wild type non-human organism or a part thereof; and
[76567] (b) growing the non-human organism or a part thereof under conditions which permit the production of lipoic acid or a composition comprising lipoic acid in said non-human organism or in the culture medium surrounding said non-human organism.

[76568] Accordingly, the present invention relates to a process for the production of coenzyme Q9, which comprises
[76569] (a) increasing or generating one or more activities selected from the group consisting of b2849-protein in a non-human organism or a part thereof, preferably a microorganism, a plant cell, a plant or a part thereof, as compared to a corresponding non-transformed wild type non-human organism or a part thereof; and
[76570] (b) growing the non-human organism or a part thereof under conditions which permit the production of coenzyme Q9 or a composition comprising coenzyme Q9 in said non-human organism or in the culture medium surrounding said non-human organism.

[76571] Accordingly, the present invention relates to a process for the production of coenzyme Q9, which comprises
[76572] (a) increasing or generating one or more activities selected from the group consisting of methyltransferase in a non-human organism or a part thereof, preferably a microorganism, a plant cell, a plant or a part thereof, as compared to a corresponding non-transformed wild type non-human organism or a part thereof; and
[76573] (b) growing the non-human organism or a part thereof under conditions which permit the production of coenzyme Q9 or a composition comprising coenzyme Q9 in said non-human organism or in the culture medium surrounding said non-human organism.

[76574] Accordingly, the present invention relates to a process for the production of coenzyme Q10, which comprises
[76575] (a) increasing or generating one or more activities selected from the group consisting of Ribose import ATP-binding protein in a non-human organism or a part thereof, preferably a microorganism, a plant cell, a plant or a part thereof, as compared to a corresponding non-transformed wild type non-human organism or a part thereof; and
[76576] (b) growing the non-human organism or a part thereof under conditions which permit the production of coenzyme Q10 or a composition comprising coenzyme Q10 in said non-human organism or in the culture medium surrounding said non-human organism.

[76577] Accordingly, the present invention relates to a process for the production of coenzyme Q9, which comprises
[76578] (a) increasing or generating one or more activities selected from the group consisting of b3817-protein in a non-human organism or a part thereof, preferably a microorganism, a plant cell, a plant or a part thereof, as compared to a corresponding non-transformed wild type non-human organism or a part thereof; and
[76579] (b) growing the non-human organism or a part thereof under conditions which permit the production of coenzyme Q9 or a composition comprising coenzyme Q9 in said non-human organism or in the culture medium surrounding said non-human organism.

[76580] Accordingly, the present invention relates to a process for the production of coenzyme Q9, which comprises
[76581] (a) increasing or generating one or more activities selected from the group consisting of glycerol dehydrogenase in a non-human organism or a part thereof, preferably a microorganism, a plant cell, a plant or a part thereof, as compared to a corresponding non-transformed wild type non-human organism or a part thereof; and
[76582] (b) growing the non-human organism or a part thereof under conditions which permit the production of coenzyme Q9 or a composition comprising coenzyme Q9 in said non-human organism or in the culture medium surrounding said non-human organism.

[76583] Accordingly, the present invention relates to a process for the production of coenzyme Q10, which comprises
[76584] (a) increasing or generating one or more activities selected from the group consisting of N-acetyl-gamma-glutamylphosphate reductase in a non-human organism or a part thereof, preferably a microorganism, a plant cell, a plant or a part thereof, as compared to a corresponding non-transformed wild type non-human organism or a part thereof; and
[76585] (b) growing the non-human organism or a part thereof under conditions which permit the production of coenzyme Q10 or a composition comprising coenzyme Q10 in said non-human organism or in the culture medium surrounding said non-human organism.

[76586] Accordingly, the present invention relates to a process for the production of coenzyme Q9, which comprises
[76587] (a) increasing or generating one or more activities selected from the group consisting of b4029-protein in a non-human organism or a part thereof, preferably a microorganism, a plant cell, a plant or a part thereof, as compared to a corresponding non-transformed wild type non-human organism or a part thereof; and
[76588] (b) growing the non-human organism or a part thereof under conditions which permit the production of coenzyme Q9 or a composition comprising coenzyme Q9 in said non-human organism or in the culture medium surrounding said non-human organism.

[76589] Accordingly, the present invention relates to a process for the production of coenzyme Q9, which comprises
[76590] (a) increasing or generating one or more activities selected from the group consisting of acetyltransferase in a non-human organism or a part thereof, preferably a microorganism, a plant cell, a plant or a part thereof, as compared to a corresponding non-transformed wild type non-human organism or a part thereof; and
[76591] (b) growing the non-human organism or a part thereof under conditions which permit the production of coenzyme Q9 or a composition comprising coenzyme Q9 in said non-human organism or in the culture medium surrounding said non-human organism.

[76592] Accordingly, the present invention relates to a process for the production of coenzyme Q9, which comprises
[76593] (a) increasing or generating one or more activities selected from the group consisting of gluconate transport system permease 3 in a non-human organism or a part thereof, preferably a microorganism, a plant cell, a plant or a part thereof, as compared to a corresponding non-transformed wild type non-human organism or a part thereof; and
[76594] (b) growing the non-human organism or a part thereof under conditions which permit the production of coenzyme Q9 or a composition comprising coenzyme Q9 in said non-human organism or in the culture medium surrounding said non-human organism.

[76595] Accordingly, the present invention relates to a process for the production of coenzyme Q10, which comprises
[76596] (a) increasing or generating one or more activities selected from the group consisting of transcription factor in a non-human organism or a part thereof, preferably a microorganism, a plant cell, a plant or a part thereof, as compared to a corresponding non-transformed wild type non-human organism or a part thereof; and
[76597] (b) growing the non-human organism or a part thereof under conditions which permit the production of coenzyme Q10 or a composition comprising coenzyme Q10 in said non-human organism or in the culture medium surrounding said non-human organism.

[76598] Accordingly, the present invention relates to a process for the production of coenzyme Q9, which comprises
[76599] (a) increasing or generating one or more activities selected from the group consisting of transcription factor in a non-human organism or a part thereof, preferably a microorganism, a plant cell, a plant or a part thereof, as compared to a corresponding non-transformed wild type non-human organism or a part thereof; and
[76600] (b) growing the non-human organism or a part thereof under conditions which permit the production of coenzyme Q9 or a composition comprising coenzyme Q9 in said non-human organism or in the culture medium surrounding said non-human organism.

[76601] Accordingly, the present invention relates to a process for the production of coenzyme Q10, which comprises
[76602] (a) increasing or generating one or more activities selected from the group consisting of transcription factor in a non-human organism or a part thereof, preferably a microorganism, a plant cell, a plant or a part thereof, as compared to a corresponding non-transformed wild type non-human organism or a part thereof; and
[76603] (b) growing the non-human organism or a part thereof under conditions which permit the production of coenzyme Q10 or a composition comprising coenzyme Q10 in said non-human organism or in the culture medium surrounding said non-human organism.

[76604] Accordingly, the present invention relates to a process for the production of coenzyme Q10, which comprises
[76605] (a) increasing or generating one or more activities selected from the group consisting of flavodoxin in a non-human organism or a part thereof, preferably a microorganism, a plant cell, a plant or a part thereof, as compared to a corresponding non-transformed wild type non-human organism or a part thereof; and
[76606] (b) growing the non-human organism or a part thereof under conditions which permit the production of coenzyme Q10 or a composition comprising coenzyme Q10 in said non-human organism or in the culture medium surrounding said non-human organism.

[76607] Accordingly, the present invention relates to a process for the production of coenzyme Q10, which comprises
[76608] (a) increasing or generating one or more activities selected from the group consisting of uroporphyrin-III C-methyltransferase in a non-human organism or a part thereof, preferably a microorganism, a plant cell, a plant or a part thereof, as compared to a corresponding non-transformed wild type non-human organism or a part thereof; and
[76609] (b) growing the non-human organism or a part thereof under conditions which permit the production of coenzyme Q10 or a composition comprising coenzyme Q10 in said non-human organism or in the culture medium surrounding said non-human organism.

[76610] Accordingly, the present invention relates to a process for the production of coenzyme Q10, which comprises
[76611] (a) increasing or generating one or more activities selected from the group consisting of sll1761-protein in a non-human organism or a part thereof, preferably a microorganism, a plant cell, a plant or a part thereof, as compared to a corresponding non-transformed wild type non-human organism or a part thereof; and
[76612] (b) growing the non-human organism or a part thereof under conditions which permit the production of coenzyme Q10 or a composition comprising coenzyme Q10 in said non-human organism or in the culture medium surrounding said non-human organism.

[76613] Accordingly, the present invention relates to a process for the production of coenzyme Q9, which comprises
[76614] (a) increasing or generating one or more activities selected from the group consisting of sll1761-protein in a non-human organism or a part thereof, preferably a microorganism, a plant cell, a plant or a part thereof, as compared to a corresponding non-transformed wild type non-human organism or a part thereof; and
[76615] (b) growing the non-human organism or a part thereof under conditions which permit the production of coenzyme Q9 or a composition comprising coenzyme Q9 in said non-human organism or in the culture medium surrounding said non-human organism.

[76616] Accordingly, the present invention relates to a process for the production of coenzyme Q9, which comprises
[76617] (a) increasing or generating one or more activities selected from the group consisting of cation-transporting ATPase in a non-human organism or a part thereof, preferably a microorganism, a plant cell, a plant or a part thereof, as compared to a corresponding non-transformed wild type non-human organism or a part thereof; and
[76618] (b) growing the non-human organism or a part thereof under conditions which permit the production of coenzyme Q9 or a composition comprising coenzyme Q9 in said non-human organism or in the culture medium surrounding said non-human organism.

[76619] Accordingly, the present invention relates to a process for the production of coenzyme Q9, which comprises
[76620] (a) increasing or generating one or more activities selected from the group consisting of oxidoreductase in a non-human organism or a part thereof, preferably a microorganism, a plant cell, a plant or a part thereof, as compared to a corresponding non-transformed wild type non-human organism or a part thereof; and
[76621] (b) growing the non-human organism or a part thereof under conditions which permit the production of coenzyme Q9 or a composition comprising coenzyme Q9 in said non-human organism or in the culture medium surrounding said non-human organism.

[76622] Accordingly, the present invention relates to a process for the production of coenzyme Q10, which comprises
[76623] (a) increasing or generating one or more activities selected from the group consisting of malate dehydrogenase in a non-human organism or a part thereof, preferably a microorganism, a plant cell, a plant or a part thereof, as compared to a corresponding non-transformed wild type non-human organism or a part thereof; and
[76624] (b) growing the non-human organism or a part thereof under conditions which permit the production of coenzyme Q10 or a composition comprising coenzyme Q10 in said non-human organism or in the culture medium surrounding said non-human organism.

[76625] Accordingly, the present invention relates to a process for the production of coenzyme Q9, which comprises
[76626] (a) increasing or generating one or more activities selected from the group consisting of malate dehydrogenase in a non-human organism or a part thereof, preferably a microorganism, a plant cell, a plant or a part thereof, as compared to a corresponding non-transformed wild type non-human organism or a part thereof; and
[76627] (b) growing the non-human organism or a part thereof under conditions which permit the production of coenzyme Q9 or a composition comprising coenzyme Q9 in said non-human organism or in the culture medium surrounding said non-human organism.

[76628] Accordingly, the present invention relates to a process for the production of coenzyme Q9, which comprises
[76629] (a) increasing or generating one or more activities selected from the group consisting of permease protein of ABC transporter in a non-human organism or a part thereof, preferably a microorganism, a plant cell, a plant or a part thereof, as compared to a corresponding non-transformed wild type non-human organism or a part thereof; and
[76630] (b) growing the non-human organism or a part thereof under conditions which permit the production of coenzyme Q9 or a composition comprising coenzyme Q9 in said non-human organism or in the culture medium surrounding said non-human organism.

[76631] Accordingly, the present invention relates to a process for the production of coenzyme Q9, which comprises
[76632] (a) increasing or generating one or more activities selected from the group consisting of slr1107-protein in a non-human organism or a part thereof, preferably a microorganism, a plant cell, a plant or a part thereof, as compared to a corresponding non-transformed wild type non-human organism or a part thereof; and
[76633] (b) growing the non-human organism or a part thereof under conditions which permit the production of coenzyme Q9 or a composition comprising coenzyme Q9 in said non-human organism or in the culture medium surrounding said non-human organism.

[76634] Accordingly, the present invention relates to a process for the production of coenzyme Q9, which comprises
[76635] (a) increasing or generating one or more activities selected from the group consisting of fatty acid desaturase in a non-human organism or a part thereof, preferably a microorganism, a plant cell, a plant or a part thereof, as compared to a corresponding non-transformed wild type non-human organism or a part thereof; and
[76636] (b) growing the non-human organism or a part thereof under conditions which permit the production of coenzyme Q9 or a composition comprising coenzyme Q9 in said non-human organism or in the culture medium surrounding said non-human organism.

[76637] Accordingly, the present invention relates to a process for the production of coenzyme Q9, which comprises
[76638] (a) increasing or generating one or more activities selected from the group consisting of photosystem II protein in a non-human organism or a part thereof, preferably a microorganism, a plant cell, a plant or a part thereof, as compared to a corresponding non-transformed wild type non-human organism or a part thereof; and
[76639] (b) growing the non-human organism or a part thereof under conditions which permit the production of coenzyme Q9 or a composition comprising coenzyme Q9 in said non-human organism or in the culture medium surrounding said non-human organism.

[76640] Accordingly, the present invention relates to a process for the production of coenzyme Q10, which comprises
[76641] (a) increasing or generating one or more activities selected from the group consisting of glutamine amidotransferase in a non-human organism or a part thereof, preferably a microorganism, a plant cell, a plant or a part thereof, as compared to a corresponding non-transformed wild type non-human organism or a part thereof; and
[76642] (b) growing the non-human organism or a part thereof under conditions which permit the production of coenzyme Q10 or a composition comprising coenzyme Q10 in said non-human organism or in the culture medium surrounding said non-human organism.

[76643] Accordingly, the present invention relates to a process for the production of coenzyme Q10, which comprises
[76644] (a) increasing or generating one or more activities selected from the group consisting of glycerol-3-phosphate dehydrogenase in a non-human organism or a part thereof, preferably a microorganism, a plant cell, a plant or a part thereof, as compared to a corresponding non-transformed wild type non-human organism or a part thereof; and
[76645] (b) growing the non-human organism or a part thereof under conditions which permit the production of coenzyme Q10 or a composition comprising coenzyme Q10 in said non-human organism or in the culture medium surrounding said non-human organism.

[76646] Accordingly, the present invention relates to a process for the production of coenzyme Q9, which comprises
[76647] (a) increasing or generating one or more activities selected from the group consisting of glycerol-3-phosphate dehydrogenase in a non-human organism or a part thereof, preferably a microorganism, a plant cell, a plant or a part thereof, as compared to a corresponding non-transformed wild type non-human organism or a part thereof; and
[76648] (b) growing the non-human organism or a part thereof under conditions which permit the production of coenzyme Q9 or a composition comprising coenzyme Q9 in said non-human organism or in the culture medium surrounding said non-human organism.

[76649] Accordingly, the present invention relates to a process for the production of coenzyme Q9, which comprises
[76650] (a) increasing or generating one or more activities selected from the group consisting of Sec-independent protein translocase subunit in a non-human organism or a part thereof, preferably a microorganism, a plant cell, a plant or a part thereof, as compared to a corresponding non-transformed wild type non-human organism or a part thereof; and
[76651] (b) growing the non-human organism or a part thereof under conditions which permit the production of coenzyme Q9 or a composition comprising coenzyme Q9 in said non-human organism or in the culture medium surrounding said non-human organism.

[76652] Accordingly, the present invention relates to a process for the production of coenzyme Q10, which comprises
[76653] (a) increasing or generating one or more activities selected from the group consisting of amino acid ABC transporter permease protein in a non-human organism or a part thereof, preferably a microorganism, a plant cell, a plant or a part thereof, as compared to a corresponding non-transformed wild type non-human organism or a part thereof; and
[76654] (b) growing the non-human organism or a part thereof under conditions which permit the production of coenzyme Q10 or a composition comprising coenzyme Q10 in said non-human organism or in the culture medium surrounding said non-human organism.

[76655] Accordingly, the present invention relates to a process for the production of coenzyme Q9, which comprises
[76656] (a) increasing or generating one or more activities selected from the group consisting of multiple antibiotic resistance protein in a non-human organism or a part thereof, preferably a microorganism, a plant cell, a plant or a part thereof, as compared to a corresponding non-transformed wild type non-human organism or a part thereof; and
[76657] (b) growing the non-human organism or a part thereof under conditions which permit the production of coenzyme Q9 or a composition comprising coenzyme Q9 in said non-human organism or in the culture medium surrounding said non-human organism.

[76658] Accordingly, the present invention relates to a process for the production of coenzyme Q9, which comprises
[76659] (a) increasing or generating one or more activities selected from the group consisting of TTC1386-protein in a non-human organism or a part thereof, preferably a microorganism, a plant cell, a plant or a part thereof, as compared to a corresponding non-transformed wild type non-human organism or a part thereof; and
[76660] (b) growing the non-human organism or a part thereof under conditions which permit the production of coenzyme Q9 or a composition comprising coenzyme Q9 in said non-human organism or in the culture medium surrounding said non-human organism.

[76661] Accordingly, the present invention relates to a process for the production of coenzyme Q9, which comprises
[76662] (a) increasing or generating one or more activities selected from the group consisting of cell division control protein in a non-human organism or a part thereof, preferably a microorganism, a plant cell, a plant or a part thereof, as compared to a corresponding non-transformed wild type non-human organism or a part thereof; and
[76663] (b) growing the non-human organism or a part thereof under conditions which permit the production of coenzyme Q9 or a composition comprising coenzyme Q9 in said non-human organism or in the culture medium surrounding said non-human organism.

[76664] Accordingly, the present invention relates to a process for the production of coenzyme Q10, which comprises
[76665] (a) increasing or generating one or more activities selected from the group consisting of ycl027w-protein in a non-human organism or a part thereof, preferably a microorganism, a plant cell, a plant or a part thereof, as compared to a corresponding non-transformed wild type non-human organism or a part thereof; and
[76666] (b) growing the non-human organism or a part thereof under conditions which permit the production of coenzyme Q10 or a composition comprising coenzyme Q10 in said non-human organism or in the culture medium surrounding said non-human organism.

[76667] Accordingly, the present invention relates to a process for the production of coenzyme Q9, which comprises
[76668] (a) increasing or generating one or more activities selected from the group consisting of protein kinase in a non-human organism or a part thereof, preferably a microorganism, a plant cell, a plant or a part thereof, as compared to a corresponding non-transformed wild type non-human organism or a part thereof; and
[76669] (b) growing the non-human organism or a part thereof under conditions which permit the production of coenzyme Q9 or a composition comprising coenzyme Q9 in said non-human organism or in the culture medium surrounding said non-human organism.

[76670] Accordingly, the present invention relates to a process for the production of coenzyme Q9, which comprises
[76671] (a) increasing or generating one or more activities selected from the group consisting of halotolerance protein in a non-human organism or a part thereof, preferably a microorganism, a plant cell, a plant or a part thereof, as compared to a corresponding non-transformed wild type non-human organism or a part thereof; and
[76672] (b) growing the non-human organism or a part thereof under conditions which permit the production of coenzyme Q9 or a composition comprising coenzyme Q9 in said non-human organism or in the culture medium surrounding said non-human organism.

[76673] Accordingly, the present invention relates to a process for the production of nicotinic acid, which comprises
[76674] (a) increasing or generating one or more activities selected from the group consisting of lipase in a non-human organism or a part thereof, preferably a microorganism, a plant cell, a plant or a part thereof, as compared to a corresponding non-transformed wild type non-human organism or a part thereof; and
[76675] (b) growing the non-human organism or a part thereof under conditions which permit the production of nicotinic acid or a composition comprising nicotinic acid in said non-human organism or in the culture medium surrounding said non-human organism.

[76676] Accordingly, the present invention relates to a process for the production of coenzyme Q10, which comprises
[76677] (a) increasing or generating one or more activities selected from the group consisting of heat shock protein Hsp40 in a non-human organism or a part thereof, preferably a microorganism, a plant cell, a plant or a part thereof, as compared to a corresponding non-transformed wild type non-human organism or a part thereof; and
[76678] (b) growing the non-human organism or a part thereof under conditions which permit the production of coenzyme Q10 or a composition comprising coenzyme Q10 in said non-human organism or in the culture medium surrounding said non-human organism.

[76679] Accordingly, the present invention relates to a process for the production of coenzyme Q9, which comprises
[76680] (a) increasing or generating one or more activities selected from the group consisting of heat shock protein Hsp40 in a non-human organism or a part thereof, preferably a microorganism, a plant cell, a plant or a part thereof, as compared to a corresponding non-transformed wild type non-human organism or a part thereof; and
[76681] (b) growing the non-human organism or a part thereof under conditions which permit the production of coenzyme Q9 or a composition comprising coenzyme Q9 in said non-human organism or in the culture medium surrounding said non-human organism.

[76682] Accordingly, the present invention relates to a process for the production of coenzyme Q9, which comprises
[76683] (a) increasing or generating one or more activities selected from the group consisting of histone acetyltransferase in a non-human organism or a part thereof, preferably a microorganism, a plant cell, a plant or a part thereof, as compared to a corresponding non-transformed wild type non-human organism or a part thereof; and
[76684] (b) growing the non-human organism or a part thereof under conditions which permit the production of coenzyme Q9 or a composition comprising coenzyme Q9 in said non-human organism or in the culture medium surrounding said non-human organism.

[76685] Accordingly, the present invention relates to a process for the production of coenzyme Q10, which comprises
[76686] (a) increasing or generating one or more activities selected from the group consisting of mitogen-activated protein kinase in a non-human organism or a part thereof, preferably a microorganism, a plant cell, a plant or a part thereof, as compared to a corresponding non-transformed wild type non-human organism or a part thereof; and
[76687] (b) growing the non-human organism or a part thereof under conditions which permit the production of coenzyme Q10 or a composition comprising coenzyme Q10 in said non-human organism or in the culture medium surrounding said non-human organism.

[76688] Accordingly, the present invention relates to a process for the production of coenzyme Q10, which comprises
[76689] (a) increasing or generating one or more activities selected from the group consisting of phosphopantothenoylcysteine decarboxylase in a non-human organism or a part thereof, preferably a microorganism, a plant cell, a plant or a part thereof, as compared to a corresponding non-transformed wild type non-human organism or a part thereof; and
[76690] (b) growing the non-human organism or a part thereof under conditions which permit the production of coenzyme Q10 or a composition comprising coenzyme Q10 in said non-human organism or in the culture medium surrounding said non-human organism.

[76691] An embodiment of the present invention relates to a process for the production of coenzyme Q10, which comprises
[76692] (a1) increasing or generating the activity of a polypeptide comprising a polypeptide as depicted in a respective line in column 5 or 8 of Table II, application no. 16, or a homolog or a fragment thereof, a consensus sequence or at least one polypeptide motif as depicted in the respective line in column 8 of Table IV, application no. 16, whereby the respective line disclose in column 7 the fine chemical coenzyme Q10; or
[76693] (a2) increasing or generating the activity of an expression product of one or more nucleic acid molecule(s) comprising a polynucleotide as depicted in the respective line in column 5 or 8 of Table I, application no. 16, preferably the coding region thereof, or a homolog or a fragment thereof, whereby the respective line disclose in column 7 the fine chemical coenzyme Q10; or
[76694] (a3) increasing or generating the activity of a functional equivalent of (a1) or (a2);
[76695] in a non-human organism or a part thereof; preferably a microorganism, a plant cell, a plant or a part thereof, as compared to a corresponding non-transformed wild type non-human organism or a part thereof; and
[76696] (b) growing the non-human organism under conditions which permit the production of coenzyme Q10 or a composition comprising coenzyme Q10 in said non-human organism or in the culture medium surrounding said non-human organism.

[76697] An embodiment of the present invention relates to a process for the production of coenzyme Q9, which comprises
[76698] (a1) increasing or generating the activity of a polypeptide comprising a polypeptide as depicted in a respective line in column 5 or 8 of Table II, application no. 16, or a homolog or a fragment thereof, a consensus sequence or at least one polypeptide motif as depicted in the respective line in column 8 of Table IV, application no. 16, whereby the respective line disclose in column 7 the fine chemical coenzyme Q9; or
[76699] (a2) increasing or generating the activity of an expression product of one or more nucleic acid molecule(s) comprising a polynucleotide as depicted in the respective line in column 5 or 8 of Table I, application no. 16, preferably the coding region thereof, or a homolog or a fragment thereof, whereby the respective line disclose in column 7 the fine chemical coenzyme Q9; or
[76700] (a3) increasing or generating the activity of a functional equivalent of (a1) or (a2);
[76701] in a non-human organism or a part thereof; preferably a microorganism, a plant cell, a plant or a part thereof, as compared to a corresponding non-transformed wild type non-human organism or a part thereof; and
[76702] (b) growing the non-human organism under conditions which permit the production of coenzyme Q9 or a composition comprising coenzyme Q9 in said non-human organism or in the culture medium surrounding said non-human organism.

[76703] An embodiment of the present invention relates to a process for the production of lipoic acid, which comprises
[76704] (a1) increasing or generating the activity of a polypeptide comprising a polypeptide as depicted in a respective line in column 5 or 8 of Table II, application no. 16, or a homolog or a fragment thereof, a consensus sequence or at least one polypeptide motif as depicted in the respective line in column 8 of Table IV, application no. 16, whereby the respective line disclose in column 7 the fine chemical lipoic acid; or
[76705] (a2) increasing or generating the activity of an expression product of one or more nucleic acid molecule(s) comprising a polynucleotide as depicted in the respective line in column 5 or 8 of Table I, application no. 16, preferably the coding region thereof, or a homolog or a fragment thereof, whereby the respective line disclose in column 7 the fine chemical lipoic acid; or
[76706] (a3) increasing or generating the activity of a functional equivalent of (a1) or (a2);
[76707] in a non-human organism or a part thereof; preferably a microorganism, a plant cell, a plant or a part thereof, as compared to a corresponding non-transformed wild type non-human organism or a part thereof; and
[76708] (b) growing the non-human organism under conditions which permit the production of lipoic acid or a composition comprising lipoic acid in said non-human organism or in the culture medium surrounding said non-human organism.

[76709] An embodiment of the present invention relates to a process for the production of nicotinic acid, which comprises
[76710] (a1) increasing or generating the activity of a polypeptide comprising a polypeptide as depicted in a respective line in column 5 or 8 of Table II, application no. 16, or a homolog or a fragment thereof, a consensus sequence or at least one polypeptide motif as depicted in the respective line in column 8 of Table IV, application no. 16, whereby the respective line disclose in column 7 the fine chemical nicotinic acid; or
[76711] (a2) increasing or generating the activity of an expression product of one or more nucleic acid molecule(s) comprising a polynucleotide as depicted in the respective line in column 5 or 8 of Table I, application no. 16, preferably the coding region thereof, or a homolog or a fragment thereof, whereby the respective line disclose in column 7 the fine chemical nicotinic acid; or
[76712] (a3) increasing or generating the activity of a functional equivalent of (a1) or (a2);
[76713] in a non-human organism or a part thereof; preferably a microorganism, a plant cell, a plant or a part thereof, as compared to a corresponding non-transformed wild type non-human organism or a part thereof; and
[76714] (b) growing the non-human organism under conditions which permit the production of nicotinic acid or a composition comprising nicotinic acid in said non-human organism or in the culture medium surrounding said non-human organism.

[76715] Accordingly, the increase or generation of one or more said activities is for example conferred by one or more expression products of said nucleic acid molecule, e.g. proteins.

[76716] Accordingly, in the present invention described above, the increase or generation of one or more said activities is for example conferred by one or more protein(s) each comprising a polypeptide selected from the group as depicted in Table II, application no. 16, column 5 and 8, or a homolog or a fragment thereof.

[76717] The process of the invention comprises in one embodiment the following steps:
[76718] (i) increasing or generating of the expression of; and/or
[76719] (ii) increasing or generating the expression of an expression product of; and/or
[76720] (iii) increasing or generating one or more activities of an expression product encoded by;
[76721] at least one nucleic acid molecule (in the following “Fine Chemical Related Protein (FCRP)”-encoding gene or “FCRP”-gene) comprising a nucleic acid molecule selected from the group consisting of:
[76722] (a) a nucleic acid molecule encoding the polypeptide shown in column 5 or 8 of Table II, preferably Table II B, application no. 16, or a homolog or a fragment thereof;
[76723] (b) a nucleic acid molecule shown in column 5 or 8 of Table I, preferably Table I B, application no. 16, or a homolog or a fragment thereof (preferably the coding region thereof);
[76724] (c) a nucleic acid molecule, which, as a result of the degeneracy of the genetic code, can be derived from a polypeptide sequence depicted in column 5 or 8 of Table II, preferably Table II B, application no. 16;
[76725] (d) a nucleic acid molecule having at least 30%, in particular at least 50%, 60%, 70%, 80%, 85%, 90%, 95%, 97%, 98%, 99% or 99.5% identity with the nucleic acid molecule sequence of a polynucleotide comprising the nucleic acid molecule shown in column 5 or 8 of Table I, preferably Table I B, application no. 16, or the coding region thereof;
[76726] (e) a nucleic acid molecule encoding a polypeptide having at least 30%, in particular 50%, 60%, 70%, 80%, 85%, 90%, 95%, 97%, 98%, 99% or 99.5% identity with the amino acid sequence of the polypeptide encoded by the nucleic acid molecule of (a), (b), (c) or (d),
[76727] (f) a nucleic acid molecule which hybridizes with a nucleic acid molecule of (a), (b), (c), (d) or (e) under stringent hybridization conditions;
[76728] (g) a nucleic acid molecule encoding a polypeptide which can be isolated with the aid of monoclonal or polyclonal antibodies made against a polypeptide encoded by one of the nucleic acid molecules of (a), (b), (c), (d), (e) or (f);
[76729] (h) a nucleic acid molecule encoding a polypeptide comprising the consensus sequence or one or more polypeptide motifs as shown in column 8 of Table IV, application no. 16;
[76730] (i) a nucleic acid molecule encoding a polypeptide having the activity represented by a respective protein as depicted in column 5 of Table II, application no. 16;
[76731] (j) a nucleic acid molecule which comprises a polynucleotide, which is obtained by amplifying a cDNA library or a genomic library using the primers as depicted in column 8 of Table III, application no. 16; and
[76732] (k) a nucleic acid molecule which is obtainable by screening a suitable nucleic acid library, especially a cDNA library and/or a genomic library, under stringent hybridization conditions with a probe comprising a complementary sequence of a nucleic acid molecule of (a), (b), (c), (d), (e), (f), (g), (h), (i) or (j) or with a fragment thereof, having at least 15 nt, preferably 20 nt, 30 nt, 50 nt, 100 nt, 200 nt, 500 nt, 1000 nt, 1500 nt, 2000 nt or 3000 nt of a nucleic acid molecule complementary to a nucleic acid molecule sequence characterized in (a), (b), (c), (d), (e), (f), (g), (h), (i) or (j);
[76733] or a nucleic acid molecule comprising a sequence which is complementary thereto.
   (All the references to Tables I to IV are references to the corresponding lines of Tables I to IV.)

[76734] In a preferred embodiment thereof said nucleic acid molecule encodes a polypeptide which has the activity of the polypeptide represented by a protein comprising a polypeptide as depicted in the corresponding hit in column 5 of Table II, application no. 16.

[76735] In another preferred embodiment thereof said nucleic acid molecule confers a generation or an increase of the respective fine chemical in a non-human organism or a part thereof as compared to a corresponding wild-type non-human organism or part thereof.

[76736] In another preferred embodiment thereof said nucleic acid molecule encodes a polypeptide which has the activity of the polypeptide represented by a protein as depicted in the corresponding hit in column 5 of Table II, application no. 16, and confers a generation or an increase of the respective fine chemical in a non-human organism or a part thereof as compared to a corresponding wild-type non-human organism or part thereof.

[76737] Accordingly, the genes of the present invention or used in accordance with the present invention, which respectively encode a protein having an activity of 2-C-methyl-D-erythritol 4-phosphate cytidylyltransferase, acetolactate synthase III large subunit, acetyltransferase, acid shock protein, amino acid ABC transporter permease protein, amino acid acetyltransferase, At1g47380-protein, ATP synthase subunit E, ATP-binding component of a transport system, auxin response factor, AX653549-protein, AY087308-protein, b1003-protein, b1097-protein, b1522-protein, b2032-protein, b2739-protein, b2849-protein, b3817-protein, b4029-protein, beta-galactosidase, calcium-dependent protein kinase, cation-transporting ATPase, CCAAT-binding transcription factor, cell division control protein, colanic acid biosynthesis protein, CTP synthase, cyclin D , disease resistance protein, enoyl-CoA hydratase, fatty acid desaturase, F-box protein, flavodoxin, gluconate transport system permease 3, glutamine amidotransferase, glutaredoxin, glycerol dehydrogenase, glycerol-3-phosphate dehydrogenase, glycosyl transferase, halotolerance protein, heat shock protein Hsp40, heat shock transcription factor, histone acetyltransferase, hydrolase, isopropylmalate isomerase large subunit, L-aspartate oxidase, lipase, MADS box protein transcription factor, malate dehydrogenase, methylglyoxal synthase, methyltransferase, mitogen-activated protein kinase, monothiol glutaredoxin, multiple antibiotic resistance protein, N-acetyl-gamma-glutamylphosphate reductase, NADH dehydrogenase I chain I, oxidoreductase, permease protein of ABC transporter, phenylalanine ammonia-lyase, phosphoadenosine phosphosulfate reductase, phosphopantothenoylcysteine decarboxylase, photosystem II protein, protein kinase, protein phosphatase, pyruvate kinase, recombinase A, Ribose import ATP-binding protein, Sec-independent protein translocase subunit, serine protease, serine/threonine-protein phosphatase, sll1761-protein, slr1107-protein, sterol desaturase, threonine synthase, transcription factor, transcriptional regulator, TTC1386-protein, uroporphyrin-111 C-methyltransferase, ycl027w-protein, zinc finger protein, or zinc transporter, which respectively encode a protein comprising a polypeptide encoded by a nucleic acid sequence as shown in Table I, application no. 16, column 5 or 8, (preferably the coding region thereof), or a homolog or a fragment thereof, which respectively encode a protein comprising a polypeptide as depicted in Table II, application no. 16, column 5 or 8, or a homolg or a fragment thereof, and/or which respectively can be amplified with the primer set shown in Table III, application no. 16, column 8, are also referred to as “FCRP genes”.

[76738] Proteins or polypeptides encoded by “FCRP-genes” are referred to as “Fine Chemical Related Proteins” or “FCRP”. For the purposes of the description of the present invention, the respective protein having an activity of 2-C-methyl-D-erythritol 4-phosphate cytidylyltransferase, acetolactate synthase III large subunit, acetyltransferase, acid shock protein, amino acid ABC transporter permease protein, amino acid acetyltransferase, At1g47380-protein, ATP synthase subunit E, ATP-binding component of a transport system, auxin response factor, AX653549-protein, AY087308-protein, b1003-protein, b1097-protein, b1522-protein, b2032-protein, b2739-protein, b2849-protein, b3817-protein, b4029-protein, beta-galactosidase, calcium-dependent protein kinase, cation-transporting ATPase, CCAAT-binding transcription factor, cell division control protein, colanic acid biosynthesis protein, CTP synthase, cyclin D , disease resistance protein, enoyl-CoA hydratase, fatty acid desaturase, F-box protein, flavodoxin, gluconate transport system permease 3, glutamine amidotransferase, glutaredoxin, glycerol dehydrogenase, glycerol-3-phosphate dehydrogenase, glycosyl transferase, halotolerance protein, heat shock protein Hsp40, heat shock transcription factor, histone acetyltransferase, hydrolase, isopropylmalate isomerase large subunit, L-aspartate oxidase, lipase, MADS box protein transcription factor, malate dehydrogenase, methylglyoxal synthase, methyltransferase, mitogen-activated protein kinase, monothiol glutaredoxin, multiple antibiotic resistance protein, N-acetyl-gamma-glutamylphosphate reductase, NADH dehydrogenase I chain I, oxidoreductase, permease protein of ABC transporter, phenylalanine ammonia-lyase, phosphoadenosine phosphosulfate reductase, phosphopantothenoylcysteine decarboxylase, photosystem II protein, protein kinase, protein phosphatase, pyruvate kinase, recombinase A, Ribose import ATP-binding protein, Sec-independent protein translocase subunit, serine protease, serine/threonineprotein phosphatase, sll1761-protein, slr1107-protein, sterol desaturase, threonine synthase, transcription factor, transcriptional regulator, TTC1386-protein, uroporphyrin-III C-methyltransferase, ycl027w-protein, zinc finger protein, or zinc transporter, the respective protein comprising a polypeptide encoded by one or more respective nucleic acid sequences as shown in Table I , application no. 16, column 5 or 8, (preferably the coding region thereof), or a homolog or fragment thereof, the respective protein comprising a respective polypeptide as depicted in Table II, application no. 16, column 5 or 8, or a homolog or fragment thereof, the respective protein comprising a sequence corresponding to the consensus sequence as shown in Table IV, application no. 16, column 8, and/or the respective protein comprising at least one polypeptide motif as shown in Table IV, application no. 16, column 8 is also referred to as Fine Chemical Related Protein” or “FCRP”.

[76739] Thus, in one embodiment, the present invention provides a process of the production of coenzyme Q10, coenzyme Q9, lipoic acid, and/or nicotinic acid, by increasing or generating one or more activities, especially selected from the group consisting of 2-C-methyl-D-erythritol 4-phosphate cytidylyltransferase, acetolactate synthase III large subunit, acetyltransferase, acid shock protein, amino acid ABC transporter permease protein, amino acid acetyltransferase, At1g47380-protein, ATP synthase subunit E, ATP-binding component of a transport system, auxin response factor, AX653549-protein, AY087308-protein, b1003-protein, b1097-protein, b1522-protein, b2032-protein, b2739-protein, b2849-protein, b3817-protein, b4029-protein, beta-galactosidase, calcium-dependent protein kinase, cation-transporting ATPase, CCAAT-binding transcription factor, cell division control protein, colanic acid biosynthesis protein, CTP synthase, cyclin D , disease resistance protein, enoyl-CoA hydratase, fatty acid desaturase, F-box protein, flavodoxin, gluconate transport system permease 3, glutamine amidotransferase, glutaredoxin, glycerol dehydrogenase, glycerol-3-phosphate dehydrogenase, glycosyl transferase, halotolerance protein, heat shock protein Hsp40, heat shock transcription factor, histone acetyltransferase, hydrolase, isopropylmalate isomerase large subunit, L-aspartate oxidase, lipase, MADS box protein transcription factor, malate dehydrogenase, methylglyoxal synthase, methyltransferase, mitogen-activated protein kinase, monothiol glutaredoxin, multiple antibiotic resistance protein, N-acetyl-gamma-glutamylphosphate reductase, NADH dehydrogenase I chain I, oxidoreductase, permease protein of ABC transporter, phenylalanine ammonia-lyase, phosphoadenosine phosphosulfate reductase, phosphopantothenoylcysteine decarboxylase, photosystem II protein, protein kinase, protein phosphatase, pyruvate kinase, recombinase A, Ribose import ATP-binding protein, Sec-independent protein translocase subunit, serine protease, serine/threonine-protein phosphatase, sll1761-protein, slr1107-protein, sterol desaturase, threonine synthase, transcription factor, transcriptional regulator, TTC1386-protein, uroporphyrin-111 C-methyltransferase, ycl027w-protein, zinc finger protein, and zinc transporter, which is conferred by one or more FCRPs or the gene product of one or more FCRP-genes, for example by the gene product of a nucleic acid sequences comprising a polynucleotide selected from the group as shown in Table I, application no. 16, column 5 or 8, (preferably by the coding region thereof), or a homolog or a fragment thereof, e.g. or by one or more proteins each comprising a polypeptide encoded by one or more nucleic acid sequences selected from the group as shown in Table I, application no. 16, column 5 or 8, (preferably by the coding region thereof), or a homolog or a fragment thereof, or by one or more protein(s) each comprising a polypeptide selected from the group as depicted in Table II, application no. 16, column 5 and 8, or a homolog thereof, or a protein comprising a sequence corresponding to the consensus sequence or comprising at least one polypeptide motif as shown in Table IV, application no. 16, column 8.

[76740] for the disclosure of this paragraph see [0025.1.7.7] above

[76741] In an embodiment, the process comprises increasing or generating the activity of one or more polypeptides having said activity, e.g. by generating or increasing the amount and/or specific activity in the cell or a compartment of a cell of one of more FCRP, especially selected from the group consisting of 2-C-methyl-D-erythritol 4-phosphate cytidylyltransferase, acetolactate synthase III large subunit, acetyltransferase, acid shock protein, amino acid ABC transporter permease protein, amino acid acetyltransferase, At1g47380-protein, ATP synthase subunit E, ATP-binding component of a transport system, auxin response factor, AX653549-protein, AY087308-protein, b1003-protein, b1097-protein, b1522-protein, b2032-protein, b2739-protein, b2849-protein, b3817-protein, b4029-protein, beta-galactosidase, calcium-dependent protein kinase, cation-transporting ATPase, CCAAT-binding transcription factor, cell division control protein, colanic acid biosynthesis protein, CTP synthase, cyclin D , disease resistance protein, enoyl-CoA hydratase, fatty acid desaturase, F-box protein, flavodoxin, gluconate transport system permease 3, glutamine amidotransferase, glutaredoxin, glycerol dehydrogenase, glycerol-3-phosphate dehydrogenase, glycosyl transferase, halotolerance protein, heat shock protein Hsp40, heat shock transcription factor, histone acetyltransferase, hydrolase, isopropylmalate isomerase large subunit, L-inaspartate oxidase, lipase, MADS box protein transcription factor, malate dehydrogenase, methylglyoxal synthase, methyltransferase, mitogen-activated protein kinase, monothiol glutaredoxin, multiple antibiotic resistance protein, N-acetyl-gamma-glutamylphosphate reductase, NADH dehydrogenase I chain I, oxidoreductase, permease protein of ABC transporter, phenylalanine ammonia-lyase, phosphoadenosine phosphosulfate reductase, phosphopantothenoylcysteine decarboxylase, photosystem 11 -protein, protein kinase, protein phosphatase, pyruvate kinase, recombinase A, Ribose import ATP-binding protein, Sec-independent protein translocase subunit, serine protease, serine/threonine-protein phosphatase, sll1761-protein, slr1107-protein, sterol desaturase, threonine synthase, transcription factor, transcriptional regulator, TTC1386-protein, uroporphyrin-III C-methyltransferase, ycl027w-protein, zinc finger protein, and zinc transporter, for example of the respective polypeptide as depicted in Table II, application no. 16, column 5 and 8, or a homolog or a fragment thereof, or the respective polypeptide comprising a sequence corresponding to the consensus sequences as shown in Table IV, application no. 16, column 8, or the respective polypeptide comprising at least one polypeptide motif as depicted in Table IV, application no. 16, column 8.

[76742] A further embodiment of the present invention relates to a process for the production of coenzyme Q10, which comprises
[76743] (a) increasing or generating the activity of a amino acid acetyltransferase non-targeted in a non-human organism or a part thereof, preferably a microorganism, a plant cell, a plant or a part thereof, as compared to a corresponding non-transformed wild type non-human organism or a part thereof; and
[76744] (b) growing the non-human organism or a part thereof under conditions which permit the production of coenzyme Q10 or a composition comprising coenzyme Q10 in said non-human organism or in the culture medium surrounding said non-human organism.

[76745] A further embodiment of the present invention relates to a process for the production of coenzyme Q9, which comprises
[76746] (a) increasing or generating the activity of a transcriptional regulator non-targeted in a non-human organism or a part thereof, preferably a microorganism, a plant cell, a plant or a part thereof, as compared to a corresponding non-transformed wild type non-human organism or a part thereof; and
[76747] (b) growing the non-human organism or a part thereof under conditions which permit the production of coenzyme Q9 or a composition comprising coenzyme Q9 in said non-human organism or in the culture medium surrounding said non-human organism.

[76748] A further embodiment of the present invention relates to a process for the production of coenzyme Q9, which comprises
[76749] (a) increasing or generating the activity of a At1g47380-protein non-targeted in a non-human organism or a part thereof, preferably a microorganism, a plant cell, a plant or a part thereof, as compared to a corresponding non-transformed wild type non-human organism or a part thereof; and
[76750] (b) growing the non-human organism or a part thereof under conditions which permit the production of coenzyme Q9 or a composition comprising coenzyme Q9 in said non-human organism or in the culture medium surrounding said non-human organism.

[76751] A further embodiment of the present invention relates to a process for the production of coenzyme Q9, which comprises
[76752] (a) increasing or generating the activity of a protein phosphatase non-targeted in a non-human organism or a part thereof, preferably a microorganism, a plant cell, a plant or a part thereof, as compared to a corresponding non-transformed wild type non-human organism or a part thereof; and
[76753] (b) growing the non-human organism or a part thereof under conditions which permit the production of coenzyme Q9 or a composition comprising coenzyme Q9 in said non-human organism or in the culture medium surrounding said non-human organism.

[76754] A further embodiment of the present invention relates to a process for the production of coenzyme Q9, which comprises
[76755] (a) increasing or generating the activity of a phenylalanine ammonia-lyase non-targeted in a non-human organism or a part thereof, preferably a microorganism, a plant cell, a plant or a part thereof, as compared to a corresponding non-transformed wild type non-human organism or a part thereof; and
[76756] (b) growing the non-human organism or a part thereof under conditions which permit the production of coenzyme Q9 or a composition comprising coenzyme Q9 in said non-human organism or in the culture medium surrounding said non-human organism.

[76757] A further embodiment of the present invention relates to a process for the production of coenzyme Q9, which comprises
[76758] (a) increasing or generating the activity of a MADS box protein transcription factor non-targeted in a non-human organism or a part thereof, preferably a microorganism, a plant cell, a plant or a part thereof, as compared to a corresponding non-transformed wild type non-human organism or a part thereof; and
[76759] (b) growing the non-human organism or a part thereof under conditions which permit the production of coenzyme Q9 or a composition comprising coenzyme Q9 in said non-human organism or in the culture medium surrounding said non-human organism.

[76760] A further embodiment of the present invention relates to a process for the production of coenzyme Q10, which comprises
[76761] (a) increasing or generating the activity of a glutaredoxin non-targeted in a non-human organism or a part thereof, preferably a microorganism, a plant cell, a plant or a part thereof, as compared to a corresponding non-transformed wild type non-human organism or a part thereof; and
[76762] (b) growing the non-human organism or a part thereof under conditions which permit the production of coenzyme Q10 or a composition comprising coenzyme Q10 in said non-human organism or in the culture medium surrounding said non-human organism.

[76763] A further embodiment of the present invention relates to a process for the production of coenzyme Q9, which comprises
[76764] (a) increasing or generating the activity of a heat shock transcription factor non-targeted in a non-human organism or a part thereof, preferably a microorganism, a plant cell, a plant or a part thereof, as compared to a corresponding non-transformed wild type non-human organism or a part thereof; and
[76765] (b) growing the non-human organism or a part thereof under conditions which permit the production of coenzyme Q9 or a composition comprising coenzyme Q9 in said non-human organism or in the culture medium surrounding said non-human organism.

[76766] A further embodiment of the present invention relates to a process for the production of coenzyme Q10, which comprises
[76767] (a) increasing or generating the activity of a pyruvate kinase non-targeted in a non-human organism or a part thereof, preferably a microorganism, a plant cell, a plant or a part thereof, as compared to a corresponding non-transformed wild type non-human organism or a part thereof; and
[76768] (b) growing the non-human organism or a part thereof under conditions which permit the production of coenzyme Q10 or a composition comprising coenzyme Q10 in said non-human organism or in the culture medium surrounding said non-human organism.

[76769] A further embodiment of the present invention relates to a process for the production of coenzyme Q9, which comprises
[76770] (a) increasing or generating the activity of a F-box protein non-targeted in a non-human organism or a part thereof, preferably a microorganism, a plant cell, a plant or a part thereof, as compared to a corresponding non-transformed wild type non-human organism or a part thereof; and
[76771] (b) growing the non-human organism or a part thereof under conditions which permit the production of coenzyme Q9 or a composition comprising coenzyme Q9 in said non-human organism or in the culture medium surrounding said non-human organism.

[76772] A further embodiment of the present invention relates to a process for the production of coenzyme Q10, which comprises
[76773] (a) increasing or generating the activity of a CCAAT-binding transcription factor non-targeted in a non-human organism or a part thereof, preferably a microorganism, a plant cell, a plant or a part thereof, as compared to a corresponding non-transformed wild type non-human organism or a part thereof; and
[76774] (b) growing the non-human organism or a part thereof under conditions which permit the production of coenzyme Q10 or a composition comprising coenzyme Q10 in said non-human organism or in the culture medium surrounding said non-human organism.

[76775] A further embodiment of the present invention relates to a process for the production of coenzyme Q9, which comprises
[76776] (a) increasing or generating the activity of a CCAAT-binding transcription factor non-targeted in a non-human organism or a part thereof, preferably a microorganism, a plant cell, a plant or a part thereof, as compared to a corresponding non-transformed wild type non-human organism or a part thereof; and
[76777] (b) growing the non-human organism or a part thereof under conditions which permit the production of coenzyme Q9 or a composition comprising coenzyme Q9 in said non-human organism or in the culture medium surrounding said non-human organism.

[76778] A further embodiment of the present invention relates to a process for the production of coenzyme Q9, which comprises
[76779] (a) increasing or generating the activity of a glycosyl transferase non-targeted in a non-human organism or a part thereof, preferably a microorganism, a plant cell, a plant or a part thereof, as compared to a corresponding non-transformed wild type non-human organism or a part thereof; and
[76780] (b) growing the non-human organism or a part thereof under conditions which permit the production of coenzyme Q9 or a composition comprising coenzyme Q9 in said non-human organism or in the culture medium surrounding said non-human organism.

[76781] A further embodiment of the present invention relates to a process for the production of coenzyme Q9, which comprises
[76782] (a) increasing or generating the activity of a auxin response factor non-targeted in a non-human organism or a part thereof, preferably a microorganism, a plant cell, a plant or a part thereof, as compared to a corresponding non-transformed wild type non-human organism or a part thereof; and
[76783] (b) growing the non-human organism or a part thereof under conditions which permit the production of coenzyme Q9 or a composition comprising coenzyme Q9 in said non-human organism or in the culture medium surrounding said non-human organism.

[76784] A further embodiment of the present invention relates to a process for the production of coenzyme Q10, which comprises
[76785] (a) increasing or generating the activity of a glutaredoxin non-targeted in a non-human organism or a part thereof, preferably a microorganism, a plant cell, a plant or a part thereof, as compared to a corresponding non-transformed wild type non-human organism or a part thereof; and
[76786] (b) growing the non-human organism or a part thereof under conditions which permit the production of coenzyme Q10 or a composition comprising coenzyme Q10 in said non-human organism or in the culture medium surrounding said non-human organism.

[76787] A further embodiment of the present invention relates to a process for the production of coenzyme Q9, which comprises
[76788] (a) increasing or generating the activity of a glutaredoxin non-targeted in a non-human organism or a part thereof, preferably a microorganism, a plant cell, a plant or a part thereof, as compared to a corresponding non-transformed wild type non-human organism or a part thereof; and
[76789] (b) growing the non-human organism or a part thereof under conditions which permit the production of coenzyme Q9 or a composition comprising coenzyme Q9 in said non-human organism or in the culture medium surrounding said non-human organism.

[76790] A further embodiment of the present invention relates to a process for the production of coenzyme Q10, which comprises
[76791] (a) increasing or generating the activity of a sterol desaturase non-targeted in a non-human organism or a part thereof, preferably a microorganism, a plant cell, a plant or a part thereof, as compared to a corresponding non-transformed wild type non-human organism or a part thereof; and
[76792] (b) growing the non-human organism or a part thereof under conditions which permit the production of coenzyme Q10 or a composition comprising coenzyme Q10 in said non-human organism or in the culture medium surrounding said non-human organism.

[76793] A further embodiment of the present invention relates to a process for the production of coenzyme Q10, which comprises
[76794] (a) increasing or generating the activity of a monothiol glutaredoxin non-targeted in a non-human organism or a part thereof, preferably a microorganism, a plant cell, a plant or a part thereof, as compared to a corresponding non-transformed wild type non-human organism or a part thereof; and
[76795] (b) growing the non-human organism or a part thereof under conditions which permit the production of coenzyme Q10 or a composition comprising coenzyme Q10 in said non-human organism or in the culture medium surrounding said non-human organism.

[76796] A further embodiment of the present invention relates to a process for the production of coenzyme Q9, which comprises
[76797] (a) increasing or generating the activity of a monothiol glutaredoxin non-targeted in a non-human organism or a part thereof, preferably a microorganism, a plant cell, a plant or a part thereof, as compared to a corresponding non-transformed wild type non-human organism or a part thereof; and
[76798] (b) growing the non-human organism or a part thereof under conditions which permit the production of coenzyme Q9 or a composition comprising coenzyme Q9 in said non-human organism or in the culture medium surrounding said non-human organism.

[76799] A further embodiment of the present invention relates to a process for the production of coenzyme Q10, which comprises
[76800] (a) increasing or generating the activity of a cyclin D non-targeted in a non-human organism or a part thereof, preferably a microorganism, a plant cell, a plant or a part thereof, as compared to a corresponding non-transformed wild type non-human organism or a part thereof; and
[76801] (b) growing the non-human organism or a part thereof under conditions which permit the production of coenzyme Q10 or a composition comprising coenzyme Q10 in said non-human organism or in the culture medium surrounding said non-human organism.

[76802] A further embodiment of the present invention relates to a process for the production of coenzyme Q9, which comprises
[76803] (a) increasing or generating the activity of a cyclin D non-targeted in a non-human organism or a part thereof, preferably a microorganism, a plant cell, a plant or a part thereof, as compared to a corresponding non-transformed wild type non-human organism or a part thereof; and
[76804] (b) growing the non-human organism or a part thereof under conditions which permit the production of coenzyme Q9 or a composition comprising coenzyme Q9 in said non-human organism or in the culture medium surrounding said non-human organism.

[76805] A further embodiment of the present invention relates to a process for the production of coenzyme Q10, which comprises
[76806] (a) increasing or generating the activity of a calcium-dependent protein kinase non-targeted in a non-human organism or a part thereof, preferably a microorganism, a plant cell, a plant or a part thereof, as compared to a corresponding non-transformed wild type non-human organism or a part thereof; and
[76807] (b) growing the non-human organism or a part thereof under conditions which permit the production of coenzyme Q10 or a composition comprising coenzyme Q10 in said non-human organism or in the culture medium surrounding said non-human organism.

[76808] A further embodiment of the present invention relates to a process for the production of coenzyme Q9, which comprises
[76809] (a) increasing or generating the activity of a calcium-dependent protein kinase non-targeted in a non-human organism or a part thereof, preferably a microorganism, a plant cell, a plant or a part thereof, as compared to a corresponding non-transformed wild type non-human organism or a part thereof; and
[76810] (b) growing the non-human organism or a part thereof under conditions which permit the production of coenzyme Q9 or a composition comprising coenzyme Q9 in said non-human organism or in the culture medium surrounding said non-human organism.

[76811] A further embodiment of the present invention relates to a process for the production of coenzyme Q9, which comprises
[76812] (a) increasing or generating the activity of a heat shock transcription factor non-targeted in a non-human organism or a part thereof, preferably a microorganism, a plant cell, a plant or a part thereof, as compared to a corresponding non-transformed wild type non-human organism or a part thereof; and
[76813] (b) growing the non-human organism or a part thereof under conditions which permit the production of coenzyme Q9 or a composition comprising coenzyme Q9 in said non-human organism or in the culture medium surrounding said non-human organism.

[76814] A further embodiment of the present invention relates to a process for the production of coenzyme Q10, which comprises
[76815] (a) increasing or generating the activity of a monothiol glutaredoxin non-targeted in a non-human organism or a part thereof, preferably a microorganism, a plant cell, a plant or a part thereof, as compared to a corresponding non-transformed wild type non-human organism or a part thereof; and
[76816] (b) growing the non-human organism or a part thereof under conditions which permit the production of coenzyme Q10 or a composition comprising coenzyme Q10 in said non-human organism or in the culture medium surrounding said non-human organism.

[76817] A further embodiment of the present invention relates to a process for the production of coenzyme Q9, which comprises
[76818] (a) increasing or generating the activity of a disease resistance protein non-targeted in a non-human organism or a part thereof, preferably a microorganism, a plant cell, a plant or a part thereof, as compared to a corresponding non-transformed wild type non-human organism or a part thereof; and
[76819] (b) growing the non-human organism or a part thereof under conditions which permit the production of coenzyme Q9 or a composition comprising coenzyme Q9 in said non-human organism or in the culture medium surrounding said non-human organism.

[76820] A further embodiment of the present invention relates to a process for the production of coenzyme Q9, which comprises
[76821] (a) increasing or generating the activity of a protein phosphatase non-targeted in a non-human organism or a part thereof, preferably a microorganism, a plant cell, a plant or a part thereof, as compared to a corresponding non-transformed wild type non-human organism or a part thereof; and
[76822] (b) growing the non-human organism or a part thereof under conditions which permit the production of coenzyme Q9 or a composition comprising coenzyme Q9 in said non-human organism or in the culture medium surrounding said non-human organism.

[76823] A further embodiment of the present invention relates to a process for the production of coenzyme Q9, which comprises
[76824] (a) increasing or generating the activity of a zinc finger protein non-targeted in a non-human organism or a part thereof, preferably a microorganism, a plant cell, a plant or a part thereof, as compared to a corresponding non-transformed wild type non-human organism or a part thereof; and
[76825] (b) growing the non-human organism or a part thereof under conditions which permit the production of coenzyme Q9 or a composition comprising coenzyme Q9 in said non-human organism or in the culture medium surrounding said non-human organism.

[76826] A further embodiment of the present invention relates to a process for the production of coenzyme Q9, which comprises
[76827] (a) increasing or generating the activity of a transcriptional regulator non-targeted in a non-human organism or a part thereof, preferably a microorganism, a plant cell, a plant or a part thereof, as compared to a corresponding non-transformed wild type non-human organism or a part thereof; and
[76828] (b) growing the non-human organism or a part thereof under conditions which permit the production of coenzyme Q9 or a composition comprising coenzyme Q9 in said non-human organism or in the culture medium surrounding said non-human organism.

[76829] A further embodiment of the present invention relates to a process for the production of coenzyme Q9, which comprises
[76830] (a) increasing or generating the activity of a CTP synthase non-targeted in a non-human organism or a part thereof, preferably a microorganism, a plant cell, a plant or a part thereof, as compared to a corresponding non-transformed wild type non-human organism or a part thereof; and
[76831] (b) growing the non-human organism or a part thereof under conditions which permit the production of coenzyme Q9 or a composition comprising coenzyme Q9 in said non-human organism or in the culture medium surrounding said non-human organism.

[76832] A further embodiment of the present invention relates to a process for the production of coenzyme Q9, which comprises
[76833] (a) increasing or generating the activity of a recombinase A non-targeted in a non-human organism or a part thereof, preferably a microorganism, a plant cell, a plant or a part thereof, as compared to a corresponding non-transformed wild type non-human organism or a part thereof; and
[76834] (b) growing the non-human organism or a part thereof under conditions which permit the production of coenzyme Q9 or a composition comprising coenzyme Q9 in said non-human organism or in the culture medium surrounding said non-human organism.

[76835] A further embodiment of the present invention relates to a process for the production of coenzyme Q10, which comprises
[76836] (a) increasing or generating the activity of a enoyl-CoA hydratase non-targeted in a non-human organism or a part thereof, preferably a microorganism, a plant cell, a plant or a part thereof, as compared to a corresponding non-transformed wild type non-human organism or a part thereof; and
[76837] (b) growing the non-human organism or a part thereof under conditions which permit the production of coenzyme Q10 or a composition comprising coenzyme Q10 in said non-human organism or in the culture medium surrounding said non-human organism.

[76838] A further embodiment of the present invention relates to a process for the production of coenzyme Q9, which comprises
[76839] (a) increasing or generating the activity of a enoyl-CoA hydratase non-targeted in a non-human organism or a part thereof, preferably a microorganism, a plant cell, a plant or a part thereof, as compared to a corresponding non-transformed wild type non-human organism or a part thereof; and
[76840] (b) growing the non-human organism or a part thereof under conditions which permit the production of coenzyme Q9 or a composition comprising coenzyme Q9 in said non-human organism or in the culture medium surrounding said non-human organism.

[76841] A further embodiment of the present invention relates to a process for the production of coenzyme Q9, which comprises
[76842] (a) increasing or generating the activity of a isopropylmalate isomerase large subunit non-targeted in a non-human organism or a part thereof, preferably a microorganism, a plant cell, a plant or a part thereof, as compared to a corresponding non-transformed wild type non-human organism or a part thereof; and
[76843] (b) growing the non-human organism or a part thereof under conditions which permit the production of coenzyme Q9 or a composition comprising coenzyme Q9 in said non-human organism or in the culture medium surrounding said non-human organism.

[76844] A further embodiment of the present invention relates to a process for the production of coenzyme Q9, which comprises
[76845] (a) increasing or generating the activity of a hydrolase non-targeted in a non-human organism or a part thereof, preferably a microorganism, a plant cell, a plant or a part thereof, as compared to a corresponding non-transformed wild type non-human organism or a part thereof; and
[76846] (b) growing the non-human organism or a part thereof under conditions which permit the production of coenzyme Q9 or a composition comprising coenzyme Q9 in said non-human organism or in the culture medium surrounding said non-human organism.

[76847] A further embodiment of the present invention relates to a process for the production of coenzyme Q9, which comprises
[76848] (a) increasing or generating the activity of a AX653549-protein non-targeted in a non-human organism or a part thereof, preferably a microorganism, a plant cell, a plant or a part thereof, as compared to a corresponding non-transformed wild type non-human organism or a part thereof; and
[76849] (b) growing the non-human organism or a part thereof under conditions which permit the production of coenzyme Q9 or a composition comprising coenzyme Q9 in said non-human organism or in the culture medium surrounding said non-human organism.

[76850] A further embodiment of the present invention relates to a process for the production of coenzyme Q10, which comprises
[76851] (a) increasing or generating the activity of a AY087308-protein non-targeted in a non-human organism or a part thereof, preferably a microorganism, a plant cell, a plant or a part thereof, as compared to a corresponding non-transformed wild type non-human organism or a part thereof; and
[76852] (b) growing the non-human organism or a part thereof under conditions which permit the production of coenzyme Q10 or a composition comprising coenzyme Q10 in said non-human organism or in the culture medium surrounding said non-human organism.

[76853] A further embodiment of the present invention relates to a process for the production of coenzyme Q10, which comprises
[76854] (a) increasing or generating the activity of a threonine synthase non-targeted in a non-human organism or a part thereof, preferably a microorganism, a plant cell, a plant or a part thereof, as compared to a corresponding non-transformed wild type non-human organism or a part thereof; and
[76855] (b) growing the non-human organism or a part thereof under conditions which permit the production of coenzyme Q10 or a composition comprising coenzyme Q10 in said non-human organism or in the culture medium surrounding said non-human organism.

[76856] A further embodiment of the present invention relates to a process for the production of coenzyme Q10, which comprises
[76857] (a) increasing or generating the activity of a acetolactate synthase III large subunit non-targeted in a non-human organism or a part thereof, preferably a microorganism, a plant cell, a plant or a part thereof, as compared to a corresponding non-transformed wild type non-human organism or a part thereof; and
[76858] (b) growing the non-human organism or a part thereof under conditions which permit the production of coenzyme Q10 or a composition comprising coenzyme Q10 in said non-human organism or in the culture medium surrounding said non-human organism.

[76859] A further embodiment of the present invention relates to a process for the production of coenzyme Q9, which comprises
[76860] (a) increasing or generating the activity of a serine protease non-targeted in a non-human organism or a part thereof, preferably a microorganism, a plant cell, a plant or a part thereof, as compared to a corresponding non-transformed wild type non-human organism or a part thereof; and
[76861] (b) growing the non-human organism or a part thereof under conditions which permit the production of coenzyme Q9 or a composition comprising coenzyme Q9 in said non-human organism or in the culture medium surrounding said non-human organism.

[76862] A further embodiment of the present invention relates to a process for the production of coenzyme Q9, which comprises
[76863] (a) increasing or generating the activity of a beta-galactosidase non-targeted in a non-human organism or a part thereof, preferably a microorganism, a plant cell, a plant or a part thereof, as compared to a corresponding non-transformed wild type non-human organism or a part thereof; and
[76864] (b) growing the non-human organism or a part thereof under conditions which permit the production of coenzyme Q9 or a composition comprising coenzyme Q9 in said non-human organism or in the culture medium surrounding said non-human organism.

[76865] A further embodiment of the present invention relates to a process for the production of coenzyme Q10, which comprises
[76866] (a) increasing or generating the activity of a ATP-binding component of a transport system non-targeted in a non-human organism or a part thereof, preferably a microorganism, a plant cell, a plant or a part thereof, as compared to a corresponding non-transformed wild type non-human organism or a part thereof; and
[76867] (b) growing the non-human organism or a part thereof under conditions which permit the production of coenzyme Q10 or a composition comprising coenzyme Q10 in said non-human organism or in the culture medium surrounding said non-human organism.

[76868] A further embodiment of the present invention relates to a process for the production of coenzyme Q9, which comprises
[76869] (a) increasing or generating the activity of a ATP-binding component of a transport system non-targeted in a non-human organism or a part thereof, preferably a microorganism, a plant cell, a plant or a part thereof, as compared to a corresponding non-transformed wild type non-human organism or a part thereof; and
[76870] (b) growing the non-human organism or a part thereof under conditions which permit the production of coenzyme Q9 or a composition comprising coenzyme Q9 in said non-human organism or in the culture medium surrounding said non-human organism.

[76871] A further embodiment of the present invention relates to a process for the production of coenzyme Q10, which comprises
[76872] (a) increasing or generating the activity of a zinc transporter non-targeted in a non-human organism or a part thereof, preferably a microorganism, a plant cell, a plant or a part thereof, as compared to a corresponding non-transformed wild type non-human organism or a part thereof; and
[76873] (b) growing the non-human organism or a part thereof under conditions which permit the production of coenzyme Q10 or a composition comprising coenzyme Q10 in said non-human organism or in the culture medium surrounding said non-human organism.

[76874] A further embodiment of the present invention relates to a process for the production of coenzyme Q9, which comprises
[76875] (a) increasing or generating the activity of a zinc transporter non-targeted in a non-human organism or a part thereof, preferably a microorganism, a plant cell, a plant or a part thereof, as compared to a corresponding non-transformed wild type non-human organism or a part thereof; and
[76876] (b) growing the non-human organism or a part thereof under conditions which permit the production of coenzyme Q9 or a composition comprising coenzyme Q9 in said non-human organism or in the culture medium surrounding said non-human organism.

[76877] A further embodiment of the present invention relates to a process for the production of coenzyme Q10, which comprises
[76878] (a) increasing or generating the activity of a methylglyoxal synthase non-targeted in a non-human organism or a part thereof, preferably a microorganism, a plant cell, a plant or a part thereof, as compared to a corresponding non-transformed wild type non-human organism or a part thereof; and
[76879] (b) growing the non-human organism or a part thereof under conditions which permit the production of coenzyme Q10 or a composition comprising coenzyme Q10 in said non-human organism or in the culture medium surrounding said non-human organism.

[76880] A further embodiment of the present invention relates to a process for the production of coenzyme Q9, which comprises
[76881] (a) increasing or generating the activity of a methylglyoxal synthase non-targeted in a non-human organism or a part thereof, preferably a microorganism, a plant cell, a plant or a part thereof, as compared to a corresponding non-transformed wild type non-human organism or a part thereof; and
[76882] (b) growing the non-human organism or a part thereof under conditions which permit the production of coenzyme Q9 or a composition comprising coenzyme Q9 in said non-human organism or in the culture medium surrounding said non-human organism.

[76883] A further embodiment of the present invention relates to a process for the production of coenzyme Q9, which comprises
[76884] (a) increasing or generating the activity of a b1003-protein non-targeted in a non-human organism or a part thereof, preferably a microorganism, a plant cell, a plant or a part thereof, as compared to a corresponding non-transformed wild type non-human organism or a part thereof; and
[76885] (b) growing the non-human organism or a part thereof under conditions which permit the production of coenzyme Q9 or a composition comprising coenzyme Q9 in said non-human organism or in the culture medium surrounding said non-human organism.

[76886] A further embodiment of the present invention relates to a process for the production of coenzyme Q9, which comprises
[76887] (a) increasing or generating the activity of a b1097-protein non-targeted in a non-human organism or a part thereof, preferably a microorganism, a plant cell, a plant or a part thereof, as compared to a corresponding non-transformed wild type non-human organism or a part thereof; and
[76888] (b) growing the non-human organism or a part thereof under conditions which permit the production of coenzyme Q9 or a composition comprising coenzyme Q9 in said non-human organism or in the culture medium surrounding said non-human organism.

[76889] A further embodiment of the present invention relates to a process for the production of coenzyme Q10, which comprises
[76890] (a) increasing or generating the activity of a b1522-protein non-targeted in a non-human organism or a part thereof, preferably a microorganism, a plant cell, a plant or a part thereof, as compared to a corresponding non-transformed wild type non-human organism or a part thereof; and
[76891] (b) growing the non-human organism or a part thereof under conditions which permit the production of coenzyme Q10 or a composition comprising coenzyme Q10 in said non-human organism or in the culture medium surrounding said non-human organism.

[76892] A further embodiment of the present invention relates to a process for the production of coenzyme Q9, which comprises
[76893] (a) increasing or generating the activity of a b1522-protein non-targeted in a non-human organism or a part thereof, preferably a microorganism, a plant cell, a plant or a part thereof, as compared to a corresponding non-transformed wild type non-human organism or a part thereof; and
[76894] (b) growing the non-human organism or a part thereof under conditions which permit the production of coenzyme Q9 or a composition comprising coenzyme Q9 in said non-human organism or in the culture medium surrounding said non-human organism.

[76895] A further embodiment of the present invention relates to a process for the production of coenzyme Q10, which comprises
[76896] (a) increasing or generating the activity of a acid shock protein non-targeted in a non-human organism or a part thereof, preferably a microorganism, a plant cell, a plant or a part thereof, as compared to a corresponding non-transformed wild type non-human organism or a part thereof; and
[76897] (b) growing the non-human organism or a part thereof under conditions which permit the production of coenzyme Q10 or a composition comprising coenzyme Q10 in said non-human organism or in the culture medium surrounding said non-human organism.

[76898] A further embodiment of the present invention relates to a process for the production of coenzyme Q9, which comprises
[76899] (a) increasing or generating the activity of a acid shock protein non-targeted in a non-human organism or a part thereof, preferably a microorganism, a plant cell, a plant or a part thereof, as compared to a corresponding non-transformed wild type non-human organism or a part thereof; and
[76900] (b) growing the non-human organism or a part thereof under conditions which permit the production of coenzyme Q9 or a composition comprising coenzyme Q9 in said non-human organism or in the culture medium surrounding said non-human organism.

[76901] A further embodiment of the present invention relates to a process for the production of coenzyme Q9, which comprises
[76902] (a) increasing or generating the activity of a serine/threonine-protein phosphatase non-targeted in a non-human organism or a part thereof, preferably a microorganism, a plant cell, a plant or a part thereof, as compared to a corresponding non-transformed wild type non-human organism or a part thereof; and
[76903] (b) growing the non-human organism or a part thereof under conditions which permit the production of coenzyme Q9 or a composition comprising coenzyme Q9 in said non-human organism or in the culture medium surrounding said non-human organism.

[76904] A further embodiment of the present invention relates to a process for the production of coenzyme Q9, which comprises
[76905] (a) increasing or generating the activity of a b2032-protein non-targeted in a non-human organism or a part thereof, preferably a microorganism, a plant cell, a plant or a part thereof, as compared to a corresponding non-transformed wild type non-human organism or a part thereof; and
[76906] (b) growing the non-human organism or a part thereof under conditions which permit the production of coenzyme Q9 or a composition comprising coenzyme Q9 in said non-human organism or in the culture medium surrounding said non-human organism.

[76907] A further embodiment of the present invention relates to a process for the production of coenzyme Q10, which comprises
[76908] (a) increasing or generating the activity of a colanic acid biosynthesis protein non-targeted in a non-human organism or a part thereof, preferably a microorganism, a plant cell, a plant or a part thereof, as compared to a corresponding non-transformed wild type non-human organism or a part thereof; and
[76909] (b) growing the non-human organism or a part thereof under conditions which permit the production of coenzyme Q10 or a composition comprising coenzyme Q10 in said non-human organism or in the culture medium surrounding said non-human organism.

[76910] A further embodiment of the present invention relates to a process for the production of coenzyme Q9, which comprises
[76911] (a) increasing or generating the activity of a NADH dehydrogenase I chain I non-targeted in a non-human organism or a part thereof, preferably a microorganism, a plant cell, a plant or a part thereof, as compared to a corresponding non-transformed wild type non-human organism or a part thereof; and
[76912] (b) growing the non-human organism or a part thereof under conditions which permit the production of coenzyme Q9 or a composition comprising coenzyme Q9 in said non-human organism or in the culture medium surrounding said non-human organism.

[76913] A further embodiment of the present invention relates to a process for the production of nicotinic acid, which comprises
[76914] (a) increasing or generating the activity of a ATP synthase subunit E non-targeted in a non-human organism or a part thereof, preferably a microorganism, a plant cell, a plant or a part thereof, as compared to a corresponding non-transformed wild type non-human organism or a part thereof; and
[76915] (b) growing the non-human organism or a part thereof under conditions which permit the production of nicotinic acid or a composition comprising nicotinic acid in said non-human organism or in the culture medium surrounding said non-human organism.

[76916] A further embodiment of the present invention relates to a process for the production of nicotinic acid, which comprises
[76917] (a) increasing or generating the activity of a L-aspartate oxidase non-targeted in a non-human organism or a part thereof, preferably a microorganism, a plant cell, a plant or a part thereof, as compared to a corresponding non-transformed wild type non-human organism or a part thereof; and
[76918] (b) growing the non-human organism or a part thereof under conditions which permit the production of nicotinic acid or a composition comprising nicotinic acid in said non-human organism or in the culture medium surrounding said non-human organism.

[76919] A further embodiment of the present invention relates to a process for the production of coenzyme Q9, which comprises
[76920] (a) increasing or generating the activity of a b2739-protein non-targeted in a non-human organism or a part thereof, preferably a microorganism, a plant cell, a plant or a part thereof, as compared to a corresponding non-transformed wild type non-human organism or a part thereof; and
[76921] (b) growing the non-human organism or a part thereof under conditions which permit the production of coenzyme Q9 or a composition comprising coenzyme Q9 in said non-human organism or in the culture medium surrounding said non-human organism.

[76922] A further embodiment of the present invention relates to a process for the production of coenzyme Q9, which comprises
[76923] (a) increasing or generating the activity of a 2-C-methyl-D-erythritol 4-phosphate cytidylyltransferase non-targeted in a non-human organism or a part thereof, preferably a microorganism, a plant cell, a plant or a part thereof, as compared to a corresponding non-transformed wild type non-human organism or a part thereof; and
[76924] (b) growing the non-human organism or a part thereof under conditions which permit the production of coenzyme Q9 or a composition comprising coenzyme Q9 in said non-human organism or in the culture medium surrounding said non-human organism.

[76925] A further embodiment of the present invention relates to a process for the production of lipoic acid, which comprises
[76926] (a) increasing or generating the activity of a phosphoadenosine phosphosulfate reductase non-targeted in a non-human organism or a part thereof, preferably a microorganism, a plant cell, a plant or a part thereof, as compared to a corresponding non-transformed wild type non-human organism or a part thereof; and
[76927] (b) growing the non-human organism or a part thereof under conditions which permit the production of lipoic acid or a composition comprising lipoic acid in said non-human organism or in the culture medium surrounding said non-human organism.

[76928] A further embodiment of the present invention relates to a process for the production of coenzyme Q9, which comprises
[76929] (a) increasing or generating the activity of a b2849-protein non-targeted in a non-human organism or a part thereof, preferably a microorganism, a plant cell, a plant or a part thereof, as compared to a corresponding non-transformed wild type non-human organism or a part thereof; and
[76930] (b) growing the non-human organism or a part thereof under conditions which permit the production of coenzyme Q9 or a composition comprising coenzyme Q9 in said non-human organism or in the culture medium surrounding said non-human organism.

[76931] A further embodiment of the present invention relates to a process for the production of coenzyme Q9, which comprises
[76932] (a) increasing or generating the activity of a methyltransferase non-targeted in a non-human organism or a part thereof, preferably a microorganism, a plant cell, a plant or a part thereof, as compared to a corresponding non-transformed wild type non-human organism or a part thereof; and
[76933] (b) growing the non-human organism or a part thereof under conditions which permit the production of coenzyme Q9 or a composition comprising coenzyme Q9 in said non-human organism or in the culture medium surrounding said non-human organism.

[76934] A further embodiment of the present invention relates to a process for the production of coenzyme Q10, which comprises
[76935] (a) increasing or generating the activity of a Ribose import ATP-binding protein non-targeted in a non-human organism or a part thereof, preferably a microorganism, a plant cell, a plant or a part thereof, as compared to a corresponding non-transformed wild type non-human organism or a part thereof; and
[76936] (b) growing the non-human organism or a part thereof under conditions which permit the production of coenzyme Q10 or a composition comprising coenzyme Q10 in said non-human organism or in the culture medium surrounding said non-human organism.

[76937] A further embodiment of the present invention relates to a process for the production of coenzyme Q9, which comprises
[76938] (a) increasing or generating the activity of a b3817-protein non-targeted in a non-human organism or a part thereof, preferably a microorganism, a plant cell, a plant or a part thereof, as compared to a corresponding non-transformed wild type non-human organism or a part thereof; and
[76939] (b) growing the non-human organism or a part thereof under conditions which permit the production of coenzyme Q9 or a composition comprising coenzyme Q9 in said non-human organism or in the culture medium surrounding said non-human organism.

[76940] A further embodiment of the present invention relates to a process for the production of coenzyme Q9, which comprises
[76941] (a) increasing or generating the activity of a glycerol dehydrogenase non-targeted in a non-human organism or a part thereof, preferably a microorganism, a plant cell, a plant or a part thereof, as compared to a corresponding non-transformed wild type non-human organism or a part thereof; and
[76942] (b) growing the non-human organism or a part thereof under conditions which permit the production of coenzyme Q9 or a composition comprising coenzyme Q9 in said non-human organism or in the culture medium surrounding said non-human organism.

[76943] A further embodiment of the present invention relates to a process for the production of coenzyme Q10, which comprises
[76944] (a) increasing or generating the activity of a N-acetyl-gamma-glutamylphosphate reductase non-targeted in a non-human organism or a part thereof, preferably a microorganism, a plant cell, a plant or a part thereof, as compared to a corresponding non-transformed wild type non-human organism or a part thereof; and
[76945] (b) growing the non-human organism or a part thereof under conditions which permit the production of coenzyme Q10 or a composition comprising coenzyme Q10 in said non-human organism or in the culture medium surrounding said non-human organism.

[76946] A further embodiment of the present invention relates to a process for the production of coenzyme Q9, which comprises
[76947] (a) increasing or generating the activity of a b4029-protein non-targeted in a non-human organism or a part thereof, preferably a microorganism, a plant cell, a plant or a part thereof, as compared to a corresponding non-transformed wild type non-human organism or a part thereof; and
[76948] (b) growing the non-human organism or a part thereof under conditions which permit the production of coenzyme Q9 or a composition comprising coenzyme Q9 in said non-human organism or in the culture medium surrounding said non-human organism.

[76949] A further embodiment of the present invention relates to a process for the production of coenzyme Q9, which comprises
[76950] (a) increasing or generating the activity of a acetyltransferase non-targeted in a non-human organism or a part thereof, preferably a microorganism, a plant cell, a plant or a part thereof, as compared to a corresponding non-transformed wild type non-human organism or a part thereof; and
[76951] (b) growing the non-human organism or a part thereof under conditions which permit the production of coenzyme Q9 or a composition comprising coenzyme Q9 in said non-human organism or in the culture medium surrounding said non-human organism.

[76952] A further embodiment of the present invention relates to a process for the production of coenzyme Q9, which comprises
[76953] (a) increasing or generating the activity of a gluconate transport system permease 3 non-targeted in a non-human organism or a part thereof, preferably a microorganism, a plant cell, a plant or a part thereof, as compared to a corresponding non-transformed wild type non-human organism or a part thereof; and
[76954] (b) growing the non-human organism or a part thereof under conditions which permit the production of coenzyme Q9 or a composition comprising coenzyme Q9 in said non-human organism or in the culture medium surrounding said non-human organism.

[76955] A further embodiment of the present invention relates to a process for the production of coenzyme Q10, which comprises
[76956] (a) increasing or generating the activity of a transcription factor non-targeted in a non-human organism or a part thereof, preferably a microorganism, a plant cell, a plant or a part thereof, as compared to a corresponding non-transformed wild type non-human organism or a part thereof; and
[76957] (b) growing the non-human organism or a part thereof under conditions which permit the production of coenzyme Q10 or a composition comprising coenzyme Q10 in said non-human organism or in the culture medium surrounding said non-human organism.

[76958] A further embodiment of the present invention relates to a process for the production of coenzyme Q9, which comprises
[76959] (a) increasing or generating the activity of a transcription factor non-targeted in a non-human organism or a part thereof, preferably a microorganism, a plant cell, a plant or a part thereof, as compared to a corresponding non-transformed wild type non-human organism or a part thereof; and
[76960] (b) growing the non-human organism or a part thereof under conditions which permit the production of coenzyme Q9 or a composition comprising coenzyme Q9 in said non-human organism or in the culture medium surrounding said non-human organism.

[76961] A further embodiment of the present invention relates to a process for the production of coenzyme Q10, which comprises
[76962] (a) increasing or generating the activity of a transcription factor non-targeted in a non-human organism or a part thereof, preferably a microorganism, a plant cell, a plant or a part thereof, as compared to a corresponding non-transformed wild type non-human organism or a part thereof; and
[76963] (b) growing the non-human organism or a part thereof under conditions which permit the production of coenzyme Q10 or a composition comprising coenzyme Q10 in said non-human organism or in the culture medium surrounding said non-human organism.

[76964] A further embodiment of the present invention relates to a process for the production of coenzyme Q10, which comprises
[76965] (a) increasing or generating the activity of a flavodoxin non-targeted in a non-human organism or a part thereof, preferably a microorganism, a plant cell, a plant or a part thereof, as compared to a corresponding non-transformed wild type non-human organism or a part thereof; and
[76966] (b) growing the non-human organism or a part thereof under conditions which permit the production of coenzyme Q10 or a composition comprising coenzyme Q10 in said non-human organism or in the culture medium surrounding said non-human organism.

[76967] A further embodiment of the present invention relates to a process for the production of coenzyme Q10, which comprises
[76968] (a) increasing or generating the activity of a uroporphyrin-III C-methyltransferase non-targeted in a non-human organism or a part thereof, preferably a microorganism, a plant cell, a plant or a part thereof, as compared to a corresponding non-transformed wild type non-human organism or a part thereof; and
[76969] (b) growing the non-human organism or a part thereof under conditions which permit the production of coenzyme Q10 or a composition comprising coenzyme Q10 in said non-human organism or in the culture medium surrounding said non-human organism.

[76970] A further embodiment of the present invention relates to a process for the production of coenzyme Q10, which comprises
[76971] (a) increasing or generating the activity of a sll1761-protein non-targeted in a non-human organism or a part thereof, preferably a microorganism, a plant cell, a plant or a part thereof, as compared to a corresponding non-transformed wild type non-human organism or a part thereof; and
[76972] (b) growing the non-human organism or a part thereof under conditions which permit the production of coenzyme Q10 or a composition comprising coenzyme Q10 in said non-human organism or in the culture medium surrounding said non-human organism.

[76973] A further embodiment of the present invention relates to a process for the production of coenzyme Q9, which comprises
[76974] (a) increasing or generating the activity of a sll1761-protein non-targeted in a non-human organism or a part thereof, preferably a microorganism, a plant cell, a plant or a part thereof, as compared to a corresponding non-transformed wild type non-human organism or a part thereof; and
[76975] (b) growing the non-human organism or a part thereof under conditions which permit the production of coenzyme Q9 or a composition comprising coenzyme Q9 in said non-human organism or in the culture medium surrounding said non-human organism.

[76976] A further embodiment of the present invention relates to a process for the production of coenzyme Q9, which comprises
[76977] (a) increasing or generating the activity of a cation-transporting ATPase non-targeted in a non-human organism or a part thereof, preferably a microorganism, a plant cell, a plant or a part thereof, as compared to a corresponding non-transformed wild type non-human organism or a part thereof; and
[76978] (b) growing the non-human organism or a part thereof under conditions which permit the production of coenzyme Q9 or a composition comprising coenzyme Q9 in said non-human organism or in the culture medium surrounding said non-human organism.

[76979] A further embodiment of the present invention relates to a process for the production of coenzyme Q9, which comprises
[76980] (a) increasing or generating the activity of a oxidoreductase non-targeted in a non-human organism or a part thereof, preferably a microorganism, a plant cell, a plant or a part thereof, as compared to a corresponding non-transformed wild type non-human organism or a part thereof; and
[76981] (b) growing the non-human organism or a part thereof under conditions which permit the production of coenzyme Q9 or a composition comprising coenzyme Q9 in said non-human organism or in the culture medium surrounding said non-human organism.

[76982] A further embodiment of the present invention relates to a process for the production of coenzyme Q10, which comprises
[76983] (a) increasing or generating the activity of a malate dehydrogenase non-targeted in a non-human organism or a part thereof, preferably a microorganism, a plant cell, a plant or a part thereof, as compared to a corresponding non-transformed wild type non-human organism or a part thereof; and
[76984] (b) growing the non-human organism or a part thereof under conditions which permit the production of coenzyme Q10 or a composition comprising coenzyme Q10 in said non-human organism or in the culture medium surrounding said non-human organism.

[76985] A further embodiment of the present invention relates to a process for the production of coenzyme Q9, which comprises
[76986] (a) increasing or generating the activity of a malate dehydrogenase non-targeted in a non-human organism or a part thereof, preferably a microorganism, a plant cell, a plant or a part thereof, as compared to a corresponding non-transformed wild type non-human organism or a part thereof; and
[76987] (b) growing the non-human organism or a part thereof under conditions which permit the production of coenzyme Q9 or a composition comprising coenzyme Q9 in said non-human organism or in the culture medium surrounding said non-human organism.

[76988] A further embodiment of the present invention relates to a process for the production of coenzyme Q9, which comprises
[76989] (a) increasing or generating the activity of a permease protein of ABC transporter non-targeted in a non-human organism or a part thereof, preferably a microorganism, a plant cell, a plant or a part thereof, as compared to a corresponding non-transformed wild type non-human organism or a part thereof; and
[76990] (b) growing the non-human organism or a part thereof under conditions which permit the production of coenzyme Q9 or a composition comprising coenzyme Q9 in said non-human organism or in the culture medium surrounding said non-human organism.

[76991] A further embodiment of the present invention relates to a process for the production of coenzyme Q9, which comprises
[76992] (a) increasing or generating the activity of a slr1107-protein non-targeted in a non-human organism or a part thereof, preferably a microorganism, a plant cell, a plant or a part thereof, as compared to a corresponding non-transformed wild type non-human organism or a part thereof; and
[76993] (b) growing the non-human organism or a part thereof under conditions which permit the production of coenzyme Q9 or a composition comprising coenzyme Q9 in said non-human organism or in the culture medium surrounding said non-human organism.

[76994] A further embodiment of the present invention relates to a process for the production of coenzyme Q9, which comprises
[76995] (a) increasing or generating the activity of a fatty acid desaturase non-targeted in a non-human organism or a part thereof, preferably a microorganism, a plant cell, a plant or a part thereof, as compared to a corresponding non-transformed wild type non-human organism or a part thereof; and
[76996] (b) growing the non-human organism or a part thereof under conditions which permit the production of coenzyme Q9 or a composition comprising coenzyme Q9 in said non-human organism or in the culture medium surrounding said non-human organism.

[76997] A further embodiment of the present invention relates to a process for the production of coenzyme Q9, which comprises
[76998] (a) increasing or generating the activity of a photosystem II protein non-targeted in a non-human organism or a part thereof, preferably a microorganism, a plant cell, a plant or a part thereof, as compared to a corresponding non-transformed wild type non-human organism or a part thereof; and
[76999] (b) growing the non-human organism or a part thereof under conditions which permit the production of coenzyme Q9 or a composition comprising coenzyme Q9 in said non-human organism or in the culture medium surrounding said non-human organism.

[77000] A further embodiment of the present invention relates to a process for the production of coenzyme Q10, which comprises
[77001] (a) increasing or generating the activity of a glutamine amidotransferase non-targeted in a non-human organism or a part thereof, preferably a microorganism, a plant cell, a plant or a part thereof, as compared to a corresponding non-transformed wild type non-human organism or a part thereof; and
[77002] (b) growing the non-human organism or a part thereof under conditions which permit the production of coenzyme Q10 or a composition comprising coenzyme Q10 in said non-human organism or in the culture medium surrounding said non-human organism.

[77003] A further embodiment of the present invention relates to a process for the production of coenzyme Q10, which comprises
[77004] (a) increasing or generating the activity of a glycerol-3-phosphate dehydrogenase non-targeted in a non-human organism or a part thereof, preferably a microorganism, a plant cell, a plant or a part thereof, as compared to a corresponding non-transformed wild type non-human organism or a part thereof; and
[77005] (b) growing the non-human organism or a part thereof under conditions which permit the production of coenzyme Q10 or a composition comprising coenzyme Q10 in said non-human organism or in the culture medium surrounding said non-human organism.

[77006] A further embodiment of the present invention relates to a process for the production of coenzyme Q9, which comprises
[77007] (a) increasing or generating the activity of a glycerol-3-phosphate dehydrogenase non-targeted in a non-human organism or a part thereof, preferably a microorganism, a plant cell, a plant or a part thereof, as compared to a corresponding non-transformed wild type non-human organism or a part thereof; and
[77008] (b) growing the non-human organism or a part thereof under conditions which permit the production of coenzyme Q9 or a composition comprising coenzyme Q9 in said non-human organism or in the culture medium surrounding said non-human organism.

[77009] A further embodiment of the present invention relates to a process for the production of coenzyme Q9, which comprises
[77010] (a) increasing or generating the activity of a Sec-independent protein translocase subunit non-targeted in a non-human organism or a part thereof, preferably a microorganism, a plant cell, a plant or a part thereof, as compared to a corresponding non-transformed wild type non-human organism or a part thereof; and
[77011] (b) growing the non-human organism or a part thereof under conditions which permit the production of coenzyme Q9 or a composition comprising coenzyme Q9 in said non-human organism or in the culture medium surrounding said non-human organism.

[77012] A further embodiment of the present invention relates to a process for the production of coenzyme Q10, which comprises
[77013] (a) increasing or generating the activity of a amino acid ABC transporter permease protein non-targeted in a non-human organism or a part thereof, preferably a microorganism, a plant cell, a plant or a part thereof, as compared to a corresponding non-transformed wild type non-human organism or a part thereof; and
[77014] (b) growing the non-human organism or a part thereof under conditions which permit the production of coenzyme Q10 or a composition comprising coenzyme Q10 in said non-human organism or in the culture medium surrounding said non-human organism.

[77015] A further embodiment of the present invention relates to a process for the production of coenzyme Q9, which comprises
[77016] (a) increasing or generating the activity of a multiple antibiotic resistance protein non-targeted in a non-human organism or a part thereof, preferably a microorganism, a plant cell, a plant or a part thereof, as compared to a corresponding non-transformed wild type non-human organism or a part thereof; and
[77017] (b) growing the non-human organism or a part thereof under conditions which permit the production of coenzyme Q9 or a composition comprising coenzyme Q9 in said non-human organism or in the culture medium surrounding said non-human organism.

[77018] A further embodiment of the present invention relates to a process for the production of coenzyme Q9, which comprises
[77019] (a) increasing or generating the activity of a TTC1386-protein non-targeted in a non-human organism or a part thereof, preferably a microorganism, a plant cell, a plant or a part thereof, as compared to a corresponding non-transformed wild type non-human organism or a part thereof; and
[77020] (b) growing the non-human organism or a part thereof under conditions which permit the production of coenzyme Q9 or a composition comprising coenzyme Q9 in said non-human organism or in the culture medium surrounding said non-human organism.

[77021] A further embodiment of the present invention relates to a process for the production of coenzyme Q9, which comprises
[77022] (a) increasing or generating the activity of a cell division control protein non-targeted in a non-human organism or a part thereof, preferably a microorganism, a plant cell, a plant or a part thereof, as compared to a corresponding non-transformed wild type non-human organism or a part thereof; and
[77023] (b) growing the non-human organism or a part thereof under conditions which permit the production of coenzyme Q9 or a composition comprising coenzyme Q9 in said non-human organism or in the culture medium surrounding said non-human organism.

[77024] A further embodiment of the present invention relates to a process for the production of coenzyme Q10, which comprises
[77025] (a) increasing or generating the activity of a ycl027w-protein non-targeted in a non-human organism or a part thereof, preferably a microorganism, a plant cell, a plant or a part thereof, as compared to a corresponding non-transformed wild type non-human organism or a part thereof; and
[77026] (b) growing the non-human organism or a part thereof under conditions which permit the production of coenzyme Q10 or a composition comprising coenzyme Q10 in said non-human organism or in the culture medium surrounding said non-human organism.

[77027] A further embodiment of the present invention relates to a process for the production of coenzyme Q9, which comprises
[77028] (a) increasing or generating the activity of a protein kinase non-targeted in a non-human organism or a part thereof, preferably a microorganism, a plant cell, a plant or a part thereof, as compared to a corresponding non-transformed wild type non-human organism or a part thereof; and
[77029] (b) growing the non-human organism or a part thereof under conditions which permit the production of coenzyme Q9 or a composition comprising coenzyme Q9 in said non-human organism or in the culture medium surrounding said non-human organism.

[77030] A further embodiment of the present invention relates to a process for the production of coenzyme Q9, which comprises
[77031] (a) increasing or generating the activity of a halotolerance protein non-targeted in a non-human organism or a part thereof, preferably a microorganism, a plant cell, a plant or a part thereof, as compared to a corresponding non-transformed wild type non-human organism or a part thereof; and
[77032] (b) growing the non-human organism or a part thereof under conditions which permit the production of coenzyme Q9 or a composition comprising coenzyme Q9 in said non-human organism or in the culture medium surrounding said non-human organism.

[77033] A further embodiment of the present invention relates to a process for the production of nicotinic acid, which comprises
[77034] (a) increasing or generating the activity of a lipase non-targeted in a non-human organism or a part thereof, preferably a microorganism, a plant cell, a plant or a part thereof, as compared to a corresponding non-transformed wild type non-human organism or a part thereof; and
[77035] (b) growing the non-human organism or a part thereof under conditions which permit the production of nicotinic acid or a composition comprising nicotinic acid in said non-human organism or in the culture medium surrounding said non-human organism.

[77036] A further embodiment of the present invention relates to a process for the production of coenzyme Q10, which comprises
[77037] (a) increasing or generating the activity of a heat shock protein Hsp40 non-targeted in a non-human organism or a part thereof, preferably a microorganism, a plant cell, a plant or a part thereof, as compared to a corresponding non-transformed wild type non-human organism or a part thereof; and
[77038] (b) growing the non-human organism or a part thereof under conditions which permit the production of coenzyme Q10 or a composition comprising coenzyme Q10 in said non-human organism or in the culture medium surrounding said non-human organism.

[77039] A further embodiment of the present invention relates to a process for the production of coenzyme Q9, which comprises
[77040] (a) increasing or generating the activity of a heat shock protein Hsp40 non-targeted in a non-human organism or a part thereof, preferably a microorganism, a plant cell, a plant or a part thereof, as compared to a corresponding non-transformed wild type non-human organism or a part thereof; and
[77041] (b) growing the non-human organism or a part thereof under conditions which permit the production of coenzyme Q9 or a composition comprising coenzyme Q9 in said non-human organism or in the culture medium surrounding said non-human organism.

[77042] A further embodiment of the present invention relates to a process for the production of coenzyme Q9, which comprises
[77043] (a) increasing or generating the activity of a histone acetyltransferase non-targeted in a non-human organism or a part thereof, preferably a microorganism, a plant cell, a plant or a part thereof, as compared to a corresponding non-transformed wild type non-human organism or a part thereof; and
[77044] (b) growing the non-human organism or a part thereof under conditions which permit the production of coenzyme Q9 or a composition comprising coenzyme Q9 in said non-human organism or in the culture medium surrounding said non-human organism.

[77045] A further embodiment of the present invention relates to a process for the production of coenzyme Q10, which comprises
[77046] (a) increasing or generating the activity of a mitogen-activated protein kinase non-targeted in a non-human organism or a part thereof, preferably a microorganism, a plant cell, a plant or a part thereof, as compared to a corresponding non-transformed wild type non-human organism or a part thereof; and
[77047] (b) growing the non-human organism or a part thereof under conditions which permit the production of coenzyme Q10 or a composition comprising coenzyme Q10 in said non-human organism or in the culture medium surrounding said non-human organism.

[77048] A further embodiment of the present invention relates to a process for the production of coenzyme Q10, which comprises
[77049] (a) increasing or generating the activity of a phosphopantothenoylcysteine decarboxylase non-targeted in a non-human organism or a part thereof, preferably a microorganism, a plant cell, a plant or a part thereof, as compared to a corresponding non-transformed wild type non-human organism or a part thereof; and
[77050] (b) growing the non-human organism or a part thereof under conditions which permit the production of coenzyme Q10 or a composition comprising coenzyme Q10 in said non-human organism or in the culture medium surrounding said non-human organism.

[77051] A further embodiment of the present invention relates to a process for the production of coenzyme Q10, which comprises
[77052] (a) increasing or generating the activity of a polypeptide comprising a polypeptide as depicted in the respective line in column 5 or 8 of Table II, application no. 16, or a homolog or a fragment thereof, a consensus sequence or at least one polypeptide motif as depicted in the respective line in column 8 of Table IV, application no. 16, whereby the respective line disclose in column 7 the fine chemical coenzyme Q10; or
[77053] increasing or generating the activity of an expression product of one or more nucleic acid molecule(s) comprising a polynucleotide as depicted in the respective line in column 5 or 8 of Table I, application no. 16, preferably the coding region thereof, or a homolog or a fragment thereof, whereby the respective line disclose in column 7 the fine chemical coenzyme Q10;
[77054] non-targeted in a non-human organism or a part thereof; preferably a microorganism, a plant cell, a plant or a part thereof, as compared to a corresponding non-transformed wild type non-human organism or a part thereof; and
[77055] (b) growing the non-human organism under conditions which permit the production of coenzyme Q10, or a composition comprising coenzyme Q10 in said non-human organism or in the culture medium surrounding said non-human organism.

[77056] A further embodiment of the present invention relates to a process for the production of coenzyme Q9, which comprises
[77057] (a) increasing or generating the activity of a polypeptide comprising a polypeptide as depicted in the respective line in column 5 or 8 of Table II, application no. 16, or a homolog or a fragment thereof, a consensus sequence or at least one polypeptide motif as depicted in the respective line in column 8 of Table IV, application no. 16, whereby the respective line disclose in column 7 the fine chemical coenzyme Q9; or
[77058] increasing or generating the activity of an expression product of one or more nucleic acid molecule(s) comprising a polynucleotide as depicted in the respective line in column 5 or 8 of Table I, application no. 16, preferably the coding region thereof, or a homolog or a fragment thereof, whereby the respective line disclose in column 7 the fine chemical coenzyme Q9;
[77059] non-targeted in a non-human organism or a part thereof; preferably a microorganism, a plant cell, a plant or a part thereof, as compared to a corresponding non-transformed wild type non-human organism or a part thereof; and
[77060] (b) growing the non-human organism under conditions which permit the production of coenzyme Q9, or a composition comprising coenzyme Q9 in said non-human organism or in the culture medium surrounding said non-human organism.

[77061] A further embodiment of the present invention relates to a process for the production of lipoic acid, which comprises
[77062] (a) increasing or generating the activity of a polypeptide comprising a polypeptide as depicted in the respective line in column 5 or 8 of Table II, application no. 16, or a homolog or a fragment thereof, a consensus sequence or at least one polypeptide motif as depicted in the respective line in column 8 of Table IV, application no. 16, whereby the respective line disclose in column 7 the fine chemical lipoic acid; or
[77063] increasing or generating the activity of an expression product of one or more nucleic acid molecule(s) comprising a polynucleotide as depicted in the respective line in column 5 or 8 of Table I, application no. 16, preferably the coding region thereof, or a homolog or a fragment thereof, whereby the respective line disclose in column 7 the fine chemical lipoic acid;
[77064] non-targeted in a non-human organism or a part thereof; preferably a microorganism, a plant cell, a plant or a part thereof, as compared to a corresponding non-transformed wild type non-human organism or a part thereof; and
[77065] (b) growing the non-human organism under conditions which permit the production of lipoic acid, or a composition comprising lipoic acid in said non-human organism or in the culture medium surrounding said non-human organism.

[77066] A further embodiment of the present invention relates to a process for the production of nicotinic acid, which comprises
[77067] (a) increasing or generating the activity of a polypeptide comprising a polypeptide as depicted in the respective line in column 5 or 8 of Table II, application no. 16, or a homolog or a fragment thereof, a consensus sequence or at least one polypeptide motif as depicted in the respective line in column 8 of Table IV, application no. 16, whereby the respective line disclose in column 7 the fine chemical nicotinic acid; or
[77068] increasing or generating the activity of an expression product of one or more nucleic acid molecule(s) comprising a polynucleotide as depicted in the respective line in column 5 or 8 of Table I, application no. 16, preferably the coding region thereof, or a homolog or a fragment thereof, whereby the respective line disclose in column 7 the fine chemical nicotinic acid;
[77069] non-targeted in a non-human organism or a part thereof; preferably a microorganism, a plant cell, a plant or a part thereof, as compared to a corresponding non-transformed wild type non-human organism or a part thereof; and
[77070] (b) growing the non-human organism under conditions which permit the production of nicotinic acid, or a composition comprising nicotinic acid in said non-human organism or in the culture medium surrounding said non-human organism.

[77071] A further embodiment of the present invention relates to a process for the production of coenzyme Q10, which comprises
[77072] (a) increasing or generating one or more activities selected from the group consisting of amino acid acetyltransferase in an organelle, preferably in plastids or mitochondria, especially in plastids, of a non-human organism or a part thereof, preferably a microorganism, a plant cell, a plant or a part thereof, as compared to a corresponding non-transformed wild type non-human organism or a part thereof; and
[77073] (b) growing the non-human organism or a part thereof under conditions which permit the production of coenzyme Q10 or a composition comprising coenzyme Q10 in said non-human organism or in the culture medium surrounding said non-human organism.

[77074] A further embodiment of the present invention relates to a process for the production of coenzyme Q9, which comprises
[77075] (a) increasing or generating one or more activities selected from the group consisting of transcriptional regulator in an organelle, preferably in plastids or mitochondria, especially in plastids, of a non-human organism or a part thereof, preferably a microorganism, a plant cell, a plant or a part thereof, as compared to a corresponding non-transformed wild type non-human organism or a part thereof; and
[77076] (b) growing the non-human organism or a part thereof under conditions which permit the production of coenzyme Q9 or a composition comprising coenzyme Q9 in said non-human organism or in the culture medium surrounding said non-human organism.

[77077] A further embodiment of the present invention relates to a process for the production of coenzyme Q9, which comprises
[77078] (a) increasing or generating one or more activities selected from the group consisting of At1g47380-protein in an organelle, preferably in plastids or mitochondria, especially in plastids, of a non-human organism or a part thereof, preferably a microorganism, a plant cell, a plant or a part thereof, as compared to a corresponding non-transformed wild type non-human organism or a part thereof; and
[77079] (b) growing the non-human organism or a part thereof under conditions which permit the production of coenzyme Q9 or a composition comprising coenzyme Q9 in said non-human organism or in the culture medium surrounding said non-human organism.

[77080] A further embodiment of the present invention relates to a process for the production of coenzyme Q9, which comprises
[77081] (a) increasing or generating one or more activities selected from the group consisting of protein phosphatase in an organelle, preferably in plastids or mitochondria, especially in plastids, of a non-human organism or a part thereof, preferably a microorganism, a plant cell, a plant or a part thereof, as compared to a corresponding non-transformed wild type non-human organism or a part thereof; and
[77082] (b) growing the non-human organism or a part thereof under conditions which permit the production of coenzyme Q9 or a composition comprising coenzyme Q9 in said non-human organism or in the culture medium surrounding said non-human organism.

[77083] A further embodiment of the present invention relates to a process for the production of coenzyme Q9, which comprises
[77084] (a) increasing or generating one or more activities selected from the group consisting of phenylalanine ammonia-lyase in an organelle, preferably in plastids or mitochondria, especially in plastids, of a non-human organism or a part thereof, preferably a microorganism, a plant cell, a plant or a part thereof, as compared to a corresponding non-transformed wild type non-human organism or a part thereof; and
[77085] (b) growing the non-human organism or a part thereof under conditions which permit the production of coenzyme Q9 or a composition comprising coenzyme Q9 in said non-human organism or in the culture medium surrounding said non-human organism.

[77086] A further embodiment of the present invention relates to a process for the production of coenzyme Q9, which comprises
[77087] (a) increasing or generating one or more activities selected from the group consisting of MADS box protein transcription factor in an organelle, preferably in plastids or mitochondria, especially in plastids, of a non-human organism or a part thereof, preferably a microorganism, a plant cell, a plant or a part thereof, as compared to a corresponding non-transformed wild type non-human organism or a part thereof; and
[77088] (b) growing the non-human organism or a part thereof under conditions which permit the production of coenzyme Q9 or a composition comprising coenzyme Q9 in said non-human organism or in the culture medium surrounding said non-human organism.

[77089] A further embodiment of the present invention relates to a process for the production of coenzyme Q10, which comprises
[77090] (a) increasing or generating one or more activities selected from the group consisting of glutaredoxin in an organelle, preferably in plastids or mitochondria, especially in plastids, of a non-human organism or a part thereof, preferably a microorganism, a plant cell, a plant or a part thereof, as compared to a corresponding non-transformed wild type non-human organism or a part thereof; and
[77091] (b) growing the non-human organism or a part thereof under conditions which permit the production of coenzyme Q10 or a composition comprising coenzyme Q10 in said non-human organism or in the culture medium surrounding said non-human organism.

[77092] A further embodiment of the present invention relates to a process for the production of coenzyme Q9, which comprises
[77093] (a) increasing or generating one or more activities selected from the group consisting of heat shock transcription factor in an organelle, preferably in plastids or mitochondria, especially in plastids, of a non-human organism or a part thereof, preferably a microorganism, a plant cell, a plant or a part thereof, as compared to a corresponding non-transformed wild type non-human organism or a part thereof; and
[77094] (b) growing the non-human organism or a part thereof under conditions which permit the production of coenzyme Q9 or a composition comprising coenzyme Q9 in said non-human organism or in the culture medium surrounding said non-human organism.

[77095] A further embodiment of the present invention relates to a process for the production of coenzyme Q10, which comprises
[77096] (a) increasing or generating one or more activities selected from the group consisting of pyruvate kinase in an organelle, preferably in plastids or mitochondria, especially in plastids, of a non-human organism or a part thereof, preferably a microorganism, a plant cell, a plant or a part thereof, as compared to a corresponding non-transformed wild type non-human organism or a part thereof; and
[77097] (b) growing the non-human organism or a part thereof under conditions which permit the production of coenzyme Q10 or a composition comprising coenzyme Q10 in said non-human organism or in the culture medium surrounding said non-human organism.

[77098] A further embodiment of the present invention relates to a process for the production of coenzyme Q9, which comprises
[77099] (a) increasing or generating one or more activities selected from the group consisting of F-box protein in an organelle, preferably in plastids or mitochondria, especially in plastids, of a non-human organism or a part thereof, preferably a microorganism, a plant cell, a plant or a part thereof, as compared to a corresponding non-transformed wild type non-human organism or a part thereof; and
[77100] (b) growing the non-human organism or a part thereof under conditions which permit the production of coenzyme Q9 or a composition comprising coenzyme Q9 in said non-human organism or in the culture medium surrounding said non-human organism.

[77101] A further embodiment of the present invention relates to a process for the production of coenzyme Q10, which comprises
[77102] (a) increasing or generating one or more activities selected from the group consisting of CCAAT-binding transcription factor in an organelle, preferably in plastids or mitochondria, especially in plastids, of a non-human organism or a part thereof, preferably a microorganism, a plant cell, a plant or a part thereof, as compared to a corresponding non-transformed wild type non-human organism or a part thereof; and
[77103] (b) growing the non-human organism or a part thereof under conditions which permit the production of coenzyme Q10 or a composition comprising coenzyme Q10 in said non-human organism or in the culture medium surrounding said non-human organism.

[77104] A further embodiment of the present invention relates to a process for the production of coenzyme Q9, which comprises
[77105] (a) increasing or generating one or more activities selected from the group consisting of CCAAT-binding transcription factor in an organelle, preferably in plastids or mitochondria, especially in plastids, of a non-human organism or a part thereof, preferably a microorganism, a plant cell, a plant or a part thereof, as compared to a corresponding non-transformed wild type non-human organism or a part thereof; and
[77106] (b) growing the non-human organism or a part thereof under conditions which permit the production of coenzyme Q9 or a composition comprising coenzyme Q9 in said non-human organism or in the culture medium surrounding said non-human organism.

[77107] A further embodiment of the present invention relates to a process for the production of coenzyme Q9, which comprises
[77108] (a) increasing or generating one or more activities selected from the group consisting of glycosyl transferase in an organelle, preferably in plastids or mitochondria, especially in plastids, of a non-human organism or a part thereof, preferably a microorganism, a plant cell, a plant or a part thereof, as compared to a corresponding non-transformed wild type non-human organism or a part thereof; and
[77109] (b) growing the non-human organism or a part thereof under conditions which permit the production of coenzyme Q9 or a composition comprising coenzyme Q9 in said non-human organism or in the culture medium surrounding said non-human organism.

[77110] A further embodiment of the present invention relates to a process for the production of coenzyme Q9, which comprises
[77111] (a) increasing or generating one or more activities selected from the group consisting of auxin response factor in an organelle, preferably in plastids or mitochondria, especially in plastids, of a non-human organism or a part thereof, preferably a microorganism, a plant cell, a plant or a part thereof, as compared to a corresponding non-transformed wild type non-human organism or a part thereof; and
[77112] (b) growing the non-human organism or a part thereof under conditions which permit the production of coenzyme Q9 or a composition comprising coenzyme Q9 in said non-human organism or in the culture medium surrounding said non-human organism.

[77113] A further embodiment of the present invention relates to a process for the production of coenzyme Q10, which comprises
[77114] (a) increasing or generating one or more activities selected from the group consisting of glutaredoxin in an organelle, preferably in plastids or mitochondria, especially in plastids, of a non-human organism or a part thereof, preferably a microorganism, a plant cell, a plant or a part thereof, as compared to a corresponding non-transformed wild type non-human organism or a part thereof; and
[77115] (b) growing the non-human organism or a part thereof under conditions which permit the production of coenzyme Q10 or a composition comprising coenzyme Q10 in said non-human organism or in the culture medium surrounding said non-human organism.

[77116] A further embodiment of the present invention relates to a process for the production of coenzyme Q9, which comprises
[77117] (a) increasing or generating one or more activities selected from the group consisting of glutaredoxin in an organelle, preferably in plastids or mitochondria, especially in plastids, of a non-human organism or a part thereof, preferably a microorganism, a plant cell, a plant or a part thereof, as compared to a corresponding non-transformed wild type non-human organism or a part thereof; and
[77118] (b) growing the non-human organism or a part thereof under conditions which permit the production of coenzyme Q9 or a composition comprising coenzyme Q9 in said non-human organism or in the culture medium surrounding said non-human organism.

[77119] A further embodiment of the present invention relates to a process for the production of coenzyme Q10, which comprises
[77120] (a) increasing or generating one or more activities selected from the group consisting of sterol desaturase in an organelle, preferably in plastids or mitochondria, especially in plastids, of a non-human organism or a part thereof, preferably a microorganism, a plant cell, a plant or a part thereof, as compared to a corresponding non-transformed wild type non-human organism or a part thereof; and
[77121] (b) growing the non-human organism or a part thereof under conditions which permit the production of coenzyme Q10 or a composition comprising coenzyme Q10 in said non-human organism or in the culture medium surrounding said non-human organism.

[77122] A further embodiment of the present invention relates to a process for the production of coenzyme Q10, which comprises
[77123] (a) increasing or generating one or more activities selected from the group consisting of monothiol glutaredoxin in an organelle, preferably in plastids or mitochondria, especially in plastids, of a non-human organism or a part thereof, preferably a microorganism, a plant cell, a plant or a part thereof, as compared to a corresponding non-transformed wild type non-human organism or a part thereof; and
[77124] (b) growing the non-human organism or a part thereof under conditions which permit the production of coenzyme Q10 or a composition comprising coenzyme Q10 in said non-human organism or in the culture medium surrounding said non-human organism.

[77125] A further embodiment of the present invention relates to a process for the production of coenzyme Q9, which comprises
[77126] (a) increasing or generating one or more activities selected from the group consisting of monothiol glutaredoxin in an organelle, preferably in plastids or mitochondria, especially in plastids, of a non-human organism or a part thereof, preferably a microorganism, a plant cell, a plant or a part thereof, as compared to a corresponding non-transformed wild type non-human organism or a part thereof; and
[77127] (b) growing the non-human organism or a part thereof under conditions which permit the production of coenzyme Q9 or a composition comprising coenzyme Q9 in said non-human organism or in the culture medium surrounding said non-human organism.

[77128] A further embodiment of the present invention relates to a process for the production of coenzyme Q10, which comprises
[77129] (a) increasing or generating one or more activities selected from the group consisting of cyclin D in an organelle, preferably in plastids or mitochondria, especially in plastids, of a non-human organism or a part thereof, preferably a microorganism, a plant cell, a plant or a part thereof, as compared to a corresponding non-transformed wild type non-human organism or a part thereof; and
[77130] (b) growing the non-human organism or a part thereof under conditions which permit the production of coenzyme Q10 or a composition comprising coenzyme Q10 in said non-human organism or in the culture medium surrounding said non-human organism.

[77131] A further embodiment of the present invention relates to a process for the production of coenzyme Q9, which comprises
[77132] (a) increasing or generating one or more activities selected from the group consisting of cyclin D in an organelle, preferably in plastids or mitochondria, especially in plastids, of a non-human organism or a part thereof, preferably a microorganism, a plant cell, a plant or a part thereof, as compared to a corresponding non-transformed wild type non-human organism or a part thereof; and
[77133] (b) growing the non-human organism or a part thereof under conditions which permit the production of coenzyme Q9 or a composition comprising coenzyme Q9 in said non-human organism or in the culture medium surrounding said non-human organism.

[77134] A further embodiment of the present invention relates to a process for the production of coenzyme Q10, which comprises
[77135] (a) increasing or generating one or more activities selected from the group consisting of calcium-dependent protein kinase in an organelle, preferably in plastids or mitochondria, especially in plastids, of a non-human organism or a part thereof, preferably a microorganism, a plant cell, a plant or a part thereof, as compared to a corresponding non-transformed wild type non-human organism or a part thereof; and
[77136] (b) growing the non-human organism or a part thereof under conditions which permit the production of coenzyme Q10 or a composition comprising coenzyme Q10 in said non-human organism or in the culture medium surrounding said non-human organism.

[77137] A further embodiment of the present invention relates to a process for the production of coenzyme Q9, which comprises
[77138] (a) increasing or generating one or more activities selected from the group consisting of calcium-dependent protein kinase in an organelle, preferably in plastids or mitochondria, especially in plastids, of a non-human organism or a part thereof, preferably a microorganism, a plant cell, a plant or a part thereof, as compared to a corresponding non-transformed wild type non-human organism or a part thereof; and
[77139] (b) growing the non-human organism or a part thereof under conditions which permit the production of coenzyme Q9 or a composition comprising coenzyme Q9 in said non-human organism or in the culture medium surrounding said non-human organism.

[77140] A further embodiment of the present invention relates to a process for the production of coenzyme Q9, which comprises
[77141] (a) increasing or generating one or more activities selected from the group consisting of heat shock transcription factor in an organelle, preferably in plastids or mitochondria, especially in plastids, of a non-human organism or a part thereof, preferably a microorganism, a plant cell, a plant or a part thereof, as compared to a corresponding non-transformed wild type non-human organism or a part thereof; and
[77142] (b) growing the non-human organism or a part thereof under conditions which permit the production of coenzyme Q9 or a composition comprising coenzyme Q9 in said non-human organism or in the culture medium surrounding said non-human organism.

[77143] A further embodiment of the present invention relates to a process for the production of coenzyme Q10, which comprises
[77144] (a) increasing or generating one or more activities selected from the group consisting of monothiol glutaredoxin in an organelle, preferably in plastids or mitochondria, especially in plastids, of a non-human organism or a part thereof, preferably a microorganism, a plant cell, a plant or a part thereof, as compared to a corresponding non-transformed wild type non-human organism or a part thereof; and
[77145] (b) growing the non-human organism or a part thereof under conditions which permit the production of coenzyme Q10 or a composition comprising coenzyme Q10 in said non-human organism or in the culture medium surrounding said non-human organism.

[77146] A further embodiment of the present invention relates to a process for the production of coenzyme Q9, which comprises
[77147] (a) increasing or generating one or more activities selected from the group consisting of disease resistance protein in an organelle, preferably in plastids or mitochondria, especially in plastids, of a non-human organism or a part thereof, preferably a microorganism, a plant cell, a plant or a part thereof, as compared to a corresponding non-transformed wild type non-human organism or a part thereof; and
[77148] (b) growing the non-human organism or a part thereof under conditions which permit the production of coenzyme Q9 or a composition comprising coenzyme Q9 in said non-human organism or in the culture medium surrounding said non-human organism.

[77149] A further embodiment of the present invention relates to a process for the production of coenzyme Q9, which comprises
[77150] (a) increasing or generating one or more activities selected from the group consisting of protein phosphatase in an organelle, preferably in plastids or mitochondria, especially in plastids, of a non-human organism or a part thereof, preferably a microorganism, a plant cell, a plant or a part thereof, as compared to a corresponding non-transformed wild type non-human organism or a part thereof; and
[77151] (b) growing the non-human organism or a part thereof under conditions which permit the production of coenzyme Q9 or a composition comprising coenzyme Q9 in said non-human organism or in the culture medium surrounding said non-human organism.

[77152] A further embodiment of the present invention relates to a process for the production of coenzyme Q9, which comprises
[77153] (a) increasing or generating one or more activities selected from the group consisting of zinc finger protein in an organelle, preferably in plastids or mitochondria, especially in plastids, of a non-human organism or a part thereof, preferably a microorganism, a plant cell, a plant or a part thereof, as compared to a corresponding non-transformed wild type non-human organism or a part thereof; and
[77154] (b) growing the non-human organism or a part thereof under conditions which permit the production of coenzyme Q9 or a composition comprising coenzyme Q9 in said non-human organism or in the culture medium surrounding said non-human organism.

[77155] A further embodiment of the present invention relates to a process for the production of coenzyme Q9, which comprises
[77156] (a) increasing or generating one or more activities selected from the group consisting of transcriptional regulator in an organelle, preferably in plastids or mitochondria, especially in plastids, of a non-human organism or a part thereof, preferably a microorganism, a plant cell, a plant or a part thereof, as compared to a corresponding non-transformed wild type non-human organism or a part thereof; and
[77157] (b) growing the non-human organism or a part thereof under conditions which permit the production of coenzyme Q9 or a composition comprising coenzyme Q9 in said non-human organism or in the culture medium surrounding said non-human organism.

[77158] A further embodiment of the present invention relates to a process for the production of coenzyme Q9, which comprises
[77159] (a) increasing or generating one or more activities selected from the group consisting of CTP synthase in an organelle, preferably in plastids or mitochondria, especially in plastids, of a non-human organism or a part thereof, preferably a microorganism, a plant cell, a plant or a part thereof, as compared to a corresponding non-transformed wild type non-human organism or a part thereof; and
[77160] (b) growing the non-human organism or a part thereof under conditions which permit the production of coenzyme Q9 or a composition comprising coenzyme Q9 in said non-human organism or in the culture medium surrounding said non-human organism.

[77161] A further embodiment of the present invention relates to a process for the production of coenzyme Q9, which comprises
[77162] (a) increasing or generating one or more activities selected from the group consisting of recombinase A in an organelle, preferably in plastids or mitochondria, especially in plastids, of a non-human organism or a part thereof, preferably a microorganism, a plant cell, a plant or a part thereof, as compared to a corresponding non-transformed wild type non-human organism or a part thereof; and
[77163] (b) growing the non-human organism or a part thereof under conditions which permit the production of coenzyme Q9 or a composition comprising coenzyme Q9 in said non-human organism or in the culture medium surrounding said non-human organism.

[77164] A further embodiment of the present invention relates to a process for the production of coenzyme Q10, which comprises
[77165] (a) increasing or generating one or more activities selected from the group consisting of enoyl-CoA hydratase in an organelle, preferably in plastids or mitochondria, especially in plastids, of a non-human organism or a part thereof, preferably a microorganism, a plant cell, a plant or a part thereof, as compared to a corresponding non-transformed wild type non-human organism or a part thereof; and
[77166] (b) growing the non-human organism or a part thereof under conditions which permit the production of coenzyme Q10 or a composition comprising coenzyme Q10 in said non-human organism or in the culture medium surrounding said non-human organism.

[77167] A further embodiment of the present invention relates to a process for the production of coenzyme Q9, which comprises
[77168] (a) increasing or generating one or more activities selected from the group consisting of enoyl-CoA hydratase in an organelle, preferably in plastids or mitochondria, especially in plastids, of a non-human organism or a part thereof, preferably a microorganism, a plant cell, a plant or a part thereof, as compared to a corresponding non-transformed wild type non-human organism or a part thereof; and
[77169] (b) growing the non-human organism or a part thereof under conditions which permit the production of coenzyme Q9 or a composition comprising coenzyme Q9 in said non-human organism or in the culture medium surrounding said non-human organism.

[77170] A further embodiment of the present invention relates to a process for the production of coenzyme Q9, which comprises
[77171] (a) increasing or generating one or more activities selected from the group consisting of isopropylmalate isomerase large subunit in an organelle, preferably in plastids or mitochondria, especially in plastids, of a non-human organism or a part thereof, preferably a microorganism, a plant cell, a plant or a part thereof, as compared to a corresponding non-transformed wild type non-human organism or a part thereof; and
[77172] (b) growing the non-human organism or a part thereof under conditions which permit the production of coenzyme Q9 or a composition comprising coenzyme Q9 in said non-human organism or in the culture medium surrounding said non-human organism.

[77173] A further embodiment of the present invention relates to a process for the production of coenzyme Q9, which comprises
[77174] (a) increasing or generating one or more activities selected from the group consisting of hydrolase in an organelle, preferably in plastids or mitochondria, especially in plastids, of a non-human organism or a part thereof, preferably a microorganism, a plant cell, a plant or a part thereof, as compared to a corresponding non-transformed wild type non-human organism or a part thereof; and
[77175] (b) growing the non-human organism or a part thereof under conditions which permit the production of coenzyme Q9 or a composition comprising coenzyme Q9 in said non-human organism or in the culture medium surrounding said non-human organism.

[77176] A further embodiment of the present invention relates to a process for the production of coenzyme Q9, which comprises
[77177] (a) increasing or generating one or more activities selected from the group consisting of AX653549-protein in an organelle, preferably in plastids or mitochondria, especially in plastids, of a non-human organism or a part thereof, preferably a microorganism, a plant cell, a plant or a part thereof, as compared to a corresponding non-transformed wild type non-human organism or a part thereof; and
[77178] (b) growing the non-human organism or a part thereof under conditions which permit the production of coenzyme Q9 or a composition comprising coenzyme Q9 in said non-human organism or in the culture medium surrounding said non-human organism.

[77179] A further embodiment of the present invention relates to a process for the production of coenzyme Q10, which comprises
[77180] (a) increasing or generating one or more activities selected from the group consisting of AY087308-protein in an organelle, preferably in plastids or mitochondria, especially in plastids, of a non-human organism or a part thereof, preferably a microorganism, a plant cell, a plant or a part thereof, as compared to a corresponding non-transformed wild type non-human organism or a part thereof; and
[77181] (b) growing the non-human organism or a part thereof under conditions which permit the production of coenzyme Q10 or a composition comprising coenzyme Q10 in said non-human organism or in the culture medium surrounding said non-human organism.

[77182] A further embodiment of the present invention relates to a process for the production of coenzyme Q10, which comprises
[77183] (a) increasing or generating one or more activities selected from the group consisting of threonine synthase in an organelle, preferably in plastids or mitochondria, especially in plastids, of a non-human organism or a part thereof, preferably a microorganism, a plant cell, a plant or a part thereof, as compared to a corresponding non-transformed wild type non-human organism or a part thereof; and
[77184] (b) growing the non-human organism or a part thereof under conditions which permit the production of coenzyme Q10 or a composition comprising coenzyme Q10 in said non-human organism or in the culture medium surrounding said non-human organism.

[77185] A further embodiment of the present invention relates to a process for the production of coenzyme Q10, which comprises
[77186] (a) increasing or generating one or more activities selected from the group consisting of acetolactate synthase III large subunit in an organelle, preferably in plastids or mitochondria, especially in plastids, of a non-human organism or a part thereof, preferably a microorganism, a plant cell, a plant or a part thereof, as compared to a corresponding non-transformed wild type non-human organism or a part thereof; and
[77187] (b) growing the non-human organism or a part thereof under conditions which permit the production of coenzyme Q10 or a composition comprising coenzyme Q10 in said non-human organism or in the culture medium surrounding said non-human organism.

[77188] A further embodiment of the present invention relates to a process for the production of coenzyme Q9, which comprises
[77189] (a) increasing or generating one or more activities selected from the group consisting of serine protease in an organelle, preferably in plastids or mitochondria, especially in plastids, of a non-human organism or a part thereof, preferably a microorganism, a plant cell, a plant or a part thereof, as compared to a corresponding non-transformed wild type non-human organism or a part thereof; and
[77190] (b) growing the non-human organism or a part thereof under conditions which permit the production of coenzyme Q9 or a composition comprising coenzyme Q9 in said non-human organism or in the culture medium surrounding said non-human organism.

[77191] A further embodiment of the present invention relates to a process for the production of coenzyme Q9, which comprises
[77192] (a) increasing or generating one or more activities selected from the group consisting of beta-galactosidase in an organelle, preferably in plastids or mitochondria, especially in plastids, of a non-human organism or a part thereof, preferably a microorganism, a plant cell, a plant or a part thereof, as compared to a corresponding non-transformed wild type non-human organism or a part thereof; and
[77193] (b) growing the non-human organism or a part thereof under conditions which permit the production of coenzyme Q9 or a composition comprising coenzyme Q9 in said non-human organism or in the culture medium surrounding said non-human organism.

[77194] A further embodiment of the present invention relates to a process for the production of coenzyme Q10, which comprises
[77195] (a) increasing or generating one or more activities selected from the group consisting of ATP-binding component of a transport system in an organelle, preferably in plastids or mitochondria, especially in plastids, of a non-human organism or a part thereof, preferably a microorganism, a plant cell, a plant or a part thereof, as compared to a corresponding non-transformed wild type non-human organism or a part thereof; and
[77196] (b) growing the non-human organism or a part thereof under conditions which permit the production of coenzyme Q10 or a composition comprising coenzyme Q10 in said non-human organism or in the culture medium surrounding said non-human organism.

[77197] A further embodiment of the present invention relates to a process for the production of coenzyme Q9, which comprises
[77198] (a) increasing or generating one or more activities selected from the group consisting of ATP-binding component of a transport system in an organelle, preferably in plastids or mitochondria, especially in plastids, of a non-human organism or a part thereof, preferably a microorganism, a plant cell, a plant or a part thereof, as compared to a corresponding non-transformed wild type non-human organism or a part thereof; and
[77199] (b) growing the non-human organism or a part thereof under conditions which permit the production of coenzyme Q9 or a composition comprising coenzyme Q9 in said non-human organism or in the culture medium surrounding said non-human organism.

[77200] A further embodiment of the present invention relates to a process for the production of coenzyme Q10, which comprises
[77201] (a) increasing or generating one or more activities selected from the group consisting of zinc transporter in an organelle, preferably in plastids or mitochondria, especially in plastids, of a non-human organism or a part thereof, preferably a microorganism, a plant cell, a plant or a part thereof, as compared to a corresponding non-transformed wild type non-human organism or a part thereof; and
[77202] (b) growing the non-human organism or a part thereof under conditions which permit the production of coenzyme Q10 or a composition comprising coenzyme Q10 in said non-human organism or in the culture medium surrounding said non-human organism.

[77203] A further embodiment of the present invention relates to a process for the production of coenzyme Q9, which comprises
[77204] (a) increasing or generating one or more activities selected from the group consisting of zinc transporter in an organelle, preferably in plastids or mitochondria, especially in plastids, of a non-human organism or a part thereof, preferably a microorganism, a plant cell, a plant or a part thereof, as compared to a corresponding non-transformed wild type non-human organism or a part thereof; and
[77205] (b) growing the non-human organism or a part thereof under conditions which permit the production of coenzyme Q9 or a composition comprising coenzyme Q9 in said non-human organism or in the culture medium surrounding said non-human organism.

[77206] A further embodiment of the present invention relates to a process for the production of coenzyme Q10, which comprises
[77207] (a) increasing or generating one or more activities selected from the group consisting of methylglyoxal synthase in an organelle, preferably in plastids or mitochondria, especially in plastids, of a non-human organism or a part thereof, preferably a microorganism, a plant cell, a plant or a part thereof, as compared to a corresponding non-transformed wild type non-human organism or a part thereof; and
[77208] (b) growing the non-human organism or a part thereof under conditions which permit the production of coenzyme Q10 or a composition comprising coenzyme Q10 in said non-human organism or in the culture medium surrounding said non-human organism.

[77209] A further embodiment of the present invention relates to a process for the production of coenzyme Q9, which comprises
[77210] (a) increasing or generating one or more activities selected from the group consisting of methylglyoxal synthase in an organelle, preferably in plastids or mitochondria, especially in plastids, of a non-human organism or a part thereof, preferably a microorganism, a plant cell, a plant or a part thereof, as compared to a corresponding non-transformed wild type non-human organism or a part thereof; and
[77211] (b) growing the non-human organism or a part thereof under conditions which permit the production of coenzyme Q9 or a composition comprising coenzyme Q9 in said non-human organism or in the culture medium surrounding said non-human organism.

[77212] A further embodiment of the present invention relates to a process for the production of coenzyme Q9, which comprises
[77213] (a) increasing or generating one or more activities selected from the group consisting of b1003-protein in an organelle, preferably in plastids or mitochondria, especially in plastids, of a non-human organism or a part thereof, preferably a microorganism, a plant cell, a plant or a part thereof, as compared to a corresponding non-transformed wild type non-human organism or a part thereof; and
[77214] (b) growing the non-human organism or a part thereof under conditions which permit the production of coenzyme Q9 or a composition comprising coenzyme Q9 in said non-human organism or in the culture medium surrounding said non-human organism.

[77215] A further embodiment of the present invention relates to a process for the production of coenzyme Q9, which comprises
[77216] (a) increasing or generating one or more activities selected from the group consisting of b1097-protein in an organelle, preferably in plastids or mitochondria, especially in plastids, of a non-human organism or a part thereof, preferably a microorganism, a plant cell, a plant or a part thereof, as compared to a corresponding non-transformed wild type non-human organism or a part thereof; and
[77217] (b) growing the non-human organism or a part thereof under conditions which permit the production of coenzyme Q9 or a composition comprising coenzyme Q9 in said non-human organism or in the culture medium surrounding said non-human organism.

[77218] A further embodiment of the present invention relates to a process for the production of coenzyme Q10, which comprises
[77219] (a) increasing or generating one or more activities selected from the group consisting of b1522-protein in an organelle, preferably in plastids or mitochondria, especially in plastids, of a non-human organism or a part thereof, preferably a microorganism, a plant cell, a plant or a part thereof, as compared to a corresponding non-transformed wild type non-human organism or a part thereof; and
[77220] (b) growing the non-human organism or a part thereof under conditions which permit the production of coenzyme Q10 or a composition comprising coenzyme Q10 in said non-human organism or in the culture medium surrounding said non-human organism.

[77221] A further embodiment of the present invention relates to a process for the production of coenzyme Q9, which comprises
[77222] (a) increasing or generating one or more activities selected from the group consisting of b1522-protein in an organelle, preferably in plastids or mitochondria, especially in plastids, of a non-human organism or a part thereof, preferably a microorganism, a plant cell, a plant or a part thereof, as compared to a corresponding non-transformed wild type non-human organism or a part thereof; and
[77223] (b) growing the non-human organism or a part thereof under conditions which permit the production of coenzyme Q9 or a composition comprising coenzyme Q9 in said non-human organism or in the culture medium surrounding said non-human organism.

[77224] A further embodiment of the present invention relates to a process for the production of coenzyme Q10, which comprises
[77225] (a) increasing or generating one or more activities selected from the group consisting of acid shock protein in an organelle, preferably in plastids or mitochondria, especially in plastids, of a non-human organism or a part thereof, preferably a microorganism, a plant cell, a plant or a part thereof, as compared to a corresponding non-transformed wild type non-human organism or a part thereof; and
[77226] (b) growing the non-human organism or a part thereof under conditions which permit the production of coenzyme Q10 or a composition comprising coenzyme Q10 in said non-human organism or in the culture medium surrounding said non-human organism.

[77227] A further embodiment of the present invention relates to a process for the production of coenzyme Q9, which comprises
[77228] (a) increasing or generating one or more activities selected from the group consisting of acid shock protein in an organelle, preferably in plastids or mitochondria, especially in plastids, of a non-human organism or a part thereof, preferably a microorganism, a plant cell, a plant or a part thereof, as compared to a corresponding non-transformed wild type non-human organism or a part thereof; and
[77229] (b) growing the non-human organism or a part thereof under conditions which permit the production of coenzyme Q9 or a composition comprising coenzyme Q9 in said non-human organism or in the culture medium surrounding said non-human organism.

[77230] A further embodiment of the present invention relates to a process for the production of coenzyme Q9, which comprises
[77231] (a) increasing or generating one or more activities selected from the group consisting of serine/threonine-protein phosphatase in an organelle, preferably in plastids or mitochondria, especially in plastids, of a non-human organism or a part thereof, preferably a microorganism, a plant cell, a plant or a part thereof, as compared to a corresponding non-transformed wild type non-human organism or a part thereof; and
[77232] (b) growing the non-human organism or a part thereof under conditions which permit the production of coenzyme Q9 or a composition comprising coenzyme Q9 in said non-human organism or in the culture medium surrounding said non-human organism.

[77233] A further embodiment of the present invention relates to a process for the production of coenzyme Q9, which comprises
[77234] (a) increasing or generating one or more activities selected from the group consisting of b2032-protein in an organelle, preferably in plastids or mitochondria, especially in plastids, of a non-human organism or a part thereof, preferably a microorganism, a plant cell, a plant or a part thereof, as compared to a corresponding non-transformed wild type non-human organism or a part thereof; and
[77235] (b) growing the non-human organism or a part thereof under conditions which permit the production of coenzyme Q9 or a composition comprising coenzyme Q9 in said non-human organism or in the culture medium surrounding said non-human organism.

[77236] A further embodiment of the present invention relates to a process for the production of coenzyme Q10, which comprises
[77237] (a) increasing or generating one or more activities selected from the group consisting of colanic acid biosynthesis protein in an organelle, preferably in plastids or mitochondria, especially in plastids, of a non-human organism or a part thereof, preferably a microorganism, a plant cell, a plant or a part thereof, as compared to a corresponding non-transformed wild type non-human organism or a part thereof; and
[77238] (b) growing the non-human organism or a part thereof under conditions which permit the production of coenzyme Q10 or a composition comprising coenzyme Q10 in said non-human organism or in the culture medium surrounding said non-human organism.

[77239] A further embodiment of the present invention relates to a process for the production of coenzyme Q9, which comprises
[77240] (a) increasing or generating one or more activities selected from the group consisting of NADH dehydrogenase I chain I in an organelle, preferably in plastids or mitochondria, especially in plastids, of a non-human organism or a part thereof, preferably a microorganism, a plant cell, a plant or a part thereof, as compared to a corresponding non-transformed wild type non-human organism or a part thereof; and
[77241] (b) growing the non-human organism or a part thereof under conditions which permit the production of coenzyme Q9 or a composition comprising coenzyme Q9 in said non-human organism or in the culture medium surrounding said non-human organism.

[77242] A further embodiment of the present invention relates to a process for the production of nicotinic acid, which comprises
[77243] (a) increasing or generating one or more activities selected from the group consisting of ATP synthase subunit E in an organelle, preferably in plastids or mitochondria, especially in plastids, of a non-human organism or a part thereof, preferably a microorganism, a plant cell, a plant or a part thereof, as compared to a corresponding non-transformed wild type non-human organism or a part thereof; and
[77244] (b) growing the non-human organism or a part thereof under conditions which permit the production of nicotinic acid or a composition comprising nicotinic acid in said non-human organism or in the culture medium surrounding said non-human organism.

[77245] A further embodiment of the present invention relates to a process for the production of nicotinic acid, which comprises
[77246] (a) increasing or generating one or more activities selected from the group consisting of L-aspartate oxidase in an organelle, preferably in plastids or mitochondria, especially in plastids, of a non-human organism or a part thereof, preferably a microorganism, a plant cell, a plant or a part thereof, as compared to a corresponding non-transformed wild type non-human organism or a part thereof; and
[77247] (b) growing the non-human organism or a part thereof under conditions which permit the production of nicotinic acid or a composition comprising nicotinic acid in said non-human organism or in the culture medium surrounding said non-human organism.

[77248] A further embodiment of the present invention relates to a process for the production of coenzyme Q9, which comprises
[77249] (a) increasing or generating one or more activities selected from the group consisting of b2739-protein in an organelle, preferably in plastids or mitochondria, especially in plastids, of a non-human organism or a part thereof, preferably a microorganism, a plant cell, a plant or a part thereof, as compared to a corresponding non-transformed wild type non-human organism or a part thereof; and
[77250] (b) growing the non-human organism or a part thereof under conditions which permit the production of coenzyme Q9 or a composition comprising coenzyme Q9 in said non-human organism or in the culture medium surrounding said non-human organism.

[77251] A further embodiment of the present invention relates to a process for the production of coenzyme Q9, which comprises
[77252] (a) increasing or generating one or more activities selected from the group consisting of 2-C-methyl-D-erythritol 4-phosphate cytidylyltransferase in an organelle, preferably in plastids or mitochondria, especially in plastids, of a non-human organism or a part thereof, preferably a microorganism, a plant cell, a plant or a part thereof, as compared to a corresponding non-transformed wild type non-human organism or a part thereof; and
[77253] (b) growing the non-human organism or a part thereof under conditions which permit the production of coenzyme Q9 or a composition comprising coenzyme Q9 in said non-human organism or in the culture medium surrounding said non-human organism.

[77254] A further embodiment of the present invention relates to a process for the production of lipoic acid, which comprises
[77255] (a) increasing or generating one or more activities selected from the group consisting of phosphoadenosine phosphosulfate reductase in an organelle, preferably in plastids or mitochondria, especially in plastids, of a non-human organism or a part thereof, preferably a microorganism, a plant cell, a plant or a part thereof, as compared to a corresponding non-transformed wild type non-human organism or a part thereof; and
[77256] (b) growing the non-human organism or a part thereof under conditions which permit the production of lipoic acid or a composition comprising lipoic acid in said non-human organism or in the culture medium surrounding said non-human organism.

[77257] A further embodiment of the present invention relates to a process for the production of coenzyme Q9, which comprises
[77258] (a) increasing or generating one or more activities selected from the group consisting of b2849-protein in an organelle, preferably in plastids or mitochondria, especially in plastids, of a non-human organism or a part thereof, preferably a microorganism, a plant cell, a plant or a part thereof, as compared to a corresponding non-transformed wild type non-human organism or a part thereof; and
[77259] (b) growing the non-human organism or a part thereof under conditions which permit the production of coenzyme Q9 or a composition comprising coenzyme Q9 in said non-human organism or in the culture medium surrounding said non-human organism.

[77260] A further embodiment of the present invention relates to a process for the production of coenzyme Q9, which comprises
[77261] (a) increasing or generating one or more activities selected from the group consisting of methyltransferase in an organelle, preferably in plastids or mitochondria, especially in plastids, of a non-human organism or a part thereof, preferably a microorganism, a plant cell, a plant or a part thereof, as compared to a corresponding non-transformed wild type non-human organism or a part thereof; and
[77262] (b) growing the non-human organism or a part thereof under conditions which permit the production of coenzyme Q9 or a composition comprising coenzyme Q9 in said non-human organism or in the culture medium surrounding said non-human organism.

[77263] A further embodiment of the present invention relates to a process for the production of coenzyme Q10, which comprises
[77264] (a) increasing or generating one or more activities selected from the group consisting of Ribose import ATP-binding protein in an organelle, preferably in plastids or mitochondria, especially in plastids, of a non-human organism or a part thereof, preferably a microorganism, a plant cell, a plant or a part thereof, as compared to a corresponding non-transformed wild type non-human organism or a part thereof; and
[77265] (b) growing the non-human organism or a part thereof under conditions which permit the production of coenzyme Q10 or a composition comprising coenzyme Q10 in said non-human organism or in the culture medium surrounding said non-human organism.

[77266] A further embodiment of the present invention relates to a process for the production of coenzyme Q9, which comprises
[77267] (a) increasing or generating one or more activities selected from the group consisting of b3817-protein in an organelle, preferably in plastids or mitochondria, especially in plastids, of a non-human organism or a part thereof, preferably a microorganism, a plant cell, a plant or a part thereof, as compared to a corresponding non-transformed wild type non-human organism or a part thereof; and
[77268] (b) growing the non-human organism or a part thereof under conditions which permit the production of coenzyme Q9 or a composition comprising coenzyme Q9 in said non-human organism or in the culture medium surrounding said non-human organism.

[77269] A further embodiment of the present invention relates to a process for the production of coenzyme Q9, which comprises
[77270] (a) increasing or generating one or more activities selected from the group consisting of glycerol dehydrogenase in an organelle, preferably in plastids or mitochondria, especially in plastids, of a non-human organism or a part thereof, preferably a microorganism, a plant cell, a plant or a part thereof, as compared to a corresponding non-transformed wild type non-human organism or a part thereof; and
[77271] (b) growing the non-human organism or a part thereof under conditions which permit the production of coenzyme Q9 or a composition comprising coenzyme Q9 in said non-human organism or in the culture medium surrounding said non-human organism.

[77272] A further embodiment of the present invention relates to a process for the production of coenzyme Q10, which comprises
[77273] (a) increasing or generating one or more activities selected from the group consisting of N-acetyl-gamma-glutamylphosphate reductase in an organelle, preferably in plastids or mitochondria, especially in plastids, of a non-human organism or a part thereof, preferably a microorganism, a plant cell, a plant or a part thereof, as compared to a corresponding non-transformed wild type non-human organism or a part thereof; and
[77274] (b) growing the non-human organism or a part thereof under conditions which permit the production of coenzyme Q10 or a composition comprising coenzyme Q10 in said non-human organism or in the culture medium surrounding said non-human organism.

[77275] A further embodiment of the present invention relates to a process for the production of coenzyme Q9, which comprises
[77276] (a) increasing or generating one or more activities selected from the group consisting of b4029-protein in an organelle, preferably in plastids or mitochondria, especially in plastids, of a non-human organism or a part thereof, preferably a microorganism, a plant cell, a plant or a part thereof, as compared to a corresponding non-transformed wild type non-human organism or a part thereof; and
[77277] (b) growing the non-human organism or a part thereof under conditions which permit the production of coenzyme Q9 or a composition comprising coenzyme Q9 in said non-human organism or in the culture medium surrounding said non-human organism.

[77278] A further embodiment of the present invention relates to a process for the production of coenzyme Q9, which comprises
[77279] (a) increasing or generating one or more activities selected from the group consisting of acetyltransferase in an organelle, preferably in plastids or mitochondria, especially in plastids, of a non-human organism or a part thereof, preferably a microorganism, a plant cell, a plant or a part thereof, as compared to a corresponding non-transformed wild type non-human organism or a part thereof; and
[77280] (b) growing the non-human organism or a part thereof under conditions which permit the production of coenzyme Q9 or a composition comprising coenzyme Q9 in said non-human organism or in the culture medium surrounding said non-human organism.

[77281] A further embodiment of the present invention relates to a process for the production of coenzyme Q9, which comprises
[77282] (a) increasing or generating one or more activities selected from the group consisting of gluconate transport system permease 3 in an organelle, preferably in plastids or mitochondria, especially in plastids, of a non-human organism or a part thereof, preferably a microorganism, a plant cell, a plant or a part thereof, as compared to a corresponding non-transformed wild type non-human organism or a part thereof; and
[77283] (b) growing the non-human organism or a part thereof under conditions which permit the production of coenzyme Q9 or a composition comprising coenzyme Q9 in said non-human organism or in the culture medium surrounding said non-human organism.

[77284] A further embodiment of the present invention relates to a process for the production of coenzyme Q10, which comprises
[77285] (a) increasing or generating one or more activities selected from the group consisting of transcription factor in an organelle, preferably in plastids or mitochondria, especially in plastids, of a non-human organism or a part thereof, preferably a microorganism, a plant cell, a plant or a part thereof, as compared to a corresponding non-transformed wild type non-human organism or a part thereof; and
[77286] (b) growing the non-human organism or a part thereof under conditions which permit the production of coenzyme Q10 or a composition comprising coenzyme Q10 in said non-human organism or in the culture medium surrounding said non-human organism.

[77287] A further embodiment of the present invention relates to a process for the production of coenzyme Q9, which comprises
[77288] (a) increasing or generating one or more activities selected from the group consisting of transcription factor in an organelle, preferably in plastids or mitochondria, especially in plastids, of a non-human organism or a part thereof, preferably a microorganism, a plant cell, a plant or a part thereof, as compared to a corresponding non-transformed wild type non-human organism or a part thereof; and
[77289] (b) growing the non-human organism or a part thereof under conditions which permit the production of coenzyme Q9 or a composition comprising coenzyme Q9 in said non-human organism or in the culture medium surrounding said non-human organism.

[77290] A further embodiment of the present invention relates to a process for the production of coenzyme Q10, which comprises
[77291] (a) increasing or generating one or more activities selected from the group consisting of transcription factor in an organelle, preferably in plastids or mitochondria, especially in plastids, of a non-human organism or a part thereof, preferably a microorganism, a plant cell, a plant or a part thereof, as compared to a corresponding non-transformed wild type non-human organism or a part thereof; and
[77292] (b) growing the non-human organism or a part thereof under conditions which permit the production of coenzyme Q10 or a composition comprising coenzyme Q10 in said non-human organism or in the culture medium surrounding said non-human organism.

[77293] A further embodiment of the present invention relates to a process for the production of coenzyme Q10, which comprises
[77294] (a) increasing or generating one or more activities selected from the group consisting of flavodoxin in an organelle, preferably in plastids or mitochondria, especially in plastids, of a non-human organism or a part thereof, preferably a microorganism, a plant cell, a plant or a part thereof, as compared to a corresponding non-transformed wild type non-human organism or a part thereof; and
[77295] (b) growing the non-human organism or a part thereof under conditions which permit the production of coenzyme Q10 or a composition comprising coenzyme Q10 in said non-human organism or in the culture medium surrounding said non-human organism.

[77296] A further embodiment of the present invention relates to a process for the production of coenzyme Q10, which comprises
[77297] (a) increasing or generating one or more activities selected from the group consisting of uroporphyrin-III C-methyltransferase in an organelle, preferably in plastids or mitochondria, especially in plastids, of a non-human organism or a part thereof, preferably a microorganism, a plant cell, a plant or a part thereof, as compared to a corresponding non-transformed wild type non-human organism or a part thereof; and
[77298] (b) growing the non-human organism or a part thereof under conditions which permit the production of coenzyme Q10 or a composition comprising coenzyme Q10 in said non-human organism or in the culture medium surrounding said non-human organism.

[77299] A further embodiment of the present invention relates to a process for the production of coenzyme Q10, which comprises
[77300] (a) increasing or generating one or more activities selected from the group consisting of sll1761-protein in an organelle, preferably in plastids or mitochondria, especially in plastids, of a non-human organism or a part thereof, preferably a microorganism, a plant cell, a plant or a part thereof, as compared to a corresponding non-transformed wild type non-human organism or a part thereof; and
[77301] (b) growing the non-human organism or a part thereof under conditions which permit the production of coenzyme Q10 or a composition comprising coenzyme Q10 in said non-human organism or in the culture medium surrounding said non-human organism.

[77302] A further embodiment of the present invention relates to a process for the production of coenzyme Q9, which comprises
[77303] (a) increasing or generating one or more activities selected from the group consisting of sll1761-protein in an organelle, preferably in plastids or mitochondria, especially in plastids, of a non-human organism or a part thereof, preferably a microorganism, a plant cell, a plant or a part thereof, as compared to a corresponding non-transformed wild type non-human organism or a part thereof; and
[77304] (b) growing the non-human organism or a part thereof under conditions which permit the production of coenzyme Q9 or a composition comprising coenzyme Q9 in said non-human organism or in the culture medium surrounding said non-human organism.

[77305] A further embodiment of the present invention relates to a process for the production of coenzyme Q9, which comprises
[77306] (a) increasing or generating one or more activities selected from the group consisting of cation-transporting ATPase in an organelle, preferably in plastids or mitochondria, especially in plastids, of a non-human organism or a part thereof, preferably a microorganism, a plant cell, a plant or a part thereof, as compared to a corresponding non-transformed wild type non-human organism or a part thereof; and
[77307] (b) growing the non-human organism or a part thereof under conditions which permit the production of coenzyme Q9 or a composition comprising coenzyme Q9 in said non-human organism or in the culture medium surrounding said non-human organism.

[77308] A further embodiment of the present invention relates to a process for the production of coenzyme Q9, which comprises
[77309] (a) increasing or generating one or more activities selected from the group consisting of oxidoreductase in an organelle, preferably in plastids or mitochondria, especially in plastids, of a non-human organism or a part thereof, preferably a microorganism, a plant cell, a plant or a part thereof, as compared to a corresponding non-transformed wild type non-human organism or a part thereof; and
[77310] (b) growing the non-human organism or a part thereof under conditions which permit the production of coenzyme Q9 or a composition comprising coenzyme Q9 in said non-human organism or in the culture medium surrounding said non-human organism.

[77311] A further embodiment of the present invention relates to a process for the production of coenzyme Q10, which comprises
[77312] (a) increasing or generating one or more activities selected from the group consisting of malate dehydrogenase in an organelle, preferably in plastids or mitochondria, especially in plastids, of a non-human organism or a part thereof, preferably a microorganism, a plant cell, a plant or a part thereof, as compared to a corresponding non-transformed wild type non-human organism or a part thereof; and
[77313] (b) growing the non-human organism or a part thereof under conditions which permit the production of coenzyme Q10 or a composition comprising coenzyme Q10 in said non-human organism or in the culture medium surrounding said non-human organism.

[77314] A further embodiment of the present invention relates to a process for the production of coenzyme Q9, which comprises
[77315] (a) increasing or generating one or more activities selected from the group consisting of malate dehydrogenase in an organelle, preferably in plastids or mitochondria, especially in plastids, of a non-human organism or a part thereof, preferably a microorganism, a plant cell, a plant or a part thereof, as compared to a corresponding non-transformed wild type non-human organism or a part thereof; and
[77316] (b) growing the non-human organism or a part thereof under conditions which permit the production of coenzyme Q9 or a composition comprising coenzyme Q9 in said non-human organism or in the culture medium surrounding said non-human organism.

[77317] A further embodiment of the present invention relates to a process for the production of coenzyme Q9, which comprises
[77318] (a) increasing or generating one or more activities selected from the group consisting of permease protein of ABC transporter in an organelle, preferably in plastids or mitochondria, especially in plastids, of a non-human organism or a part thereof, preferably a microorganism, a plant cell, a plant or a part thereof, as compared to a corresponding non-transformed wild type non-human organism or a part thereof; and
[77319] (b) growing the non-human organism or a part thereof under conditions which permit the production of coenzyme Q9 or a composition comprising coenzyme Q9 in said non-human organism or in the culture medium surrounding said non-human organism.

[77320] A further embodiment of the present invention relates to a process for the production of coenzyme Q9, which comprises
[77321] (a) increasing or generating one or more activities selected from the group consisting of slr1107-protein in an organelle, preferably in plastids or mitochondria, especially in plastids, of a non-human organism or a part thereof, preferably a microorganism, a plant cell, a plant or a part thereof, as compared to a corresponding non-transformed wild type non-human organism or a part thereof; and
[77322] (b) growing the non-human organism or a part thereof under conditions which permit the production of coenzyme Q9 or a composition comprising coenzyme Q9 in said non-human organism or in the culture medium surrounding said non-human organism.

[77323] A further embodiment of the present invention relates to a process for the production of coenzyme Q9, which comprises
[77324] (a) increasing or generating one or more activities selected from the group consisting of fatty acid desaturase in an organelle, preferably in plastids or mitochondria, especially in plastids, of a non-human organism or a part thereof, preferably a microorganism, a plant cell, a plant or a part thereof, as compared to a corresponding non-transformed wild type non-human organism or a part thereof; and
[77325] (b) growing the non-human organism or a part thereof under conditions which permit the production of coenzyme Q9 or a composition comprising coenzyme Q9 in said non-human organism or in the culture medium surrounding said non-human organism.

[77326] A further embodiment of the present invention relates to a process for the production of coenzyme Q9, which comprises
[77327] (a) increasing or generating one or more activities selected from the group consisting of photosystem II protein in an organelle, preferably in plastids or mitochondria, especially in plastids, of a non-human organism or a part thereof, preferably a microorganism, a plant cell, a plant or a part thereof, as compared to a corresponding non-transformed wild type non-human organism or a part thereof; and
[77328] (b) growing the non-human organism or a part thereof under conditions which permit the production of coenzyme Q9 or a composition comprising coenzyme Q9 in said non-human organism or in the culture medium surrounding said non-human organism.

[77329] A further embodiment of the present invention relates to a process for the production of coenzyme Q10, which comprises
[77330] (a) increasing or generating one or more activities selected from the group consisting of glutamine amidotransferase in an organelle, preferably in plastids or mitochondria, especially in plastids, of a non-human organism or a part thereof, preferably a microorganism, a plant cell, a plant or a part thereof, as compared to a corresponding non-transformed wild type non-human organism or a part thereof; and
[77331] (b) growing the non-human organism or a part thereof under conditions which permit the production of coenzyme Q10 or a composition comprising coenzyme Q10 in said non-human organism or in the culture medium surrounding said non-human organism.

[77332] A further embodiment of the present invention relates to a process for the production of coenzyme Q10, which comprises
[77333] (a) increasing or generating one or more activities selected from the group consisting of glycerol-3-phosphate dehydrogenase in an organelle, preferably in plastids or mitochondria, especially in plastids, of a non-human organism or a part thereof, preferably a microorganism, a plant cell, a plant or a part thereof, as compared to a corresponding non-transformed wild type non-human organism or a part thereof; and
[77334] (b) growing the non-human organism or a part thereof under conditions which permit the production of coenzyme Q10 or a composition comprising coenzyme Q10 in said non-human organism or in the culture medium surrounding said non-human organism.

[77335] A further embodiment of the present invention relates to a process for the production of coenzyme Q9, which comprises
[77336] (a) increasing or generating one or more activities selected from the group consisting of glycerol-3-phosphate dehydrogenase in an organelle, preferably in plastids or mitochondria, especially in plastids, of a non-human organism or a part thereof, preferably a microorganism, a plant cell, a plant or a part thereof, as compared to a corresponding non-transformed wild type non-human organism or a part thereof; and
[77337] (b) growing the non-human organism or a part thereof under conditions which permit the production of coenzyme Q9 or a composition comprising coenzyme Q9 in said non-human organism or in the culture medium surrounding said non-human organism.

[77338] A further embodiment of the present invention relates to a process for the production of coenzyme Q9, which comprises
[77339] (a) increasing or generating one or more activities selected from the group consisting of Sec-independent protein translocase subunit in an organelle, preferably in plastids or mitochondria, especially in plastids, of a non-human organism or a part thereof, preferably a microorganism, a plant cell, a plant or a part thereof, as compared to a corresponding non-transformed wild type non-human organism or a part thereof; and
[77340] (b) growing the non-human organism or a part thereof under conditions which permit the production of coenzyme Q9 or a composition comprising coenzyme Q9 in said non-human organism or in the culture medium surrounding said non-human organism.

[77341] A further embodiment of the present invention relates to a process for the production of coenzyme Q10, which comprises
[77342] (a) increasing or generating one or more activities selected from the group consisting of amino acid ABC transporter permease protein in an organelle, preferably in plastids or mitochondria, especially in plastids, of a non-human organism or a part thereof, preferably a microorganism, a plant cell, a plant or a part thereof, as compared to a corresponding non-transformed wild type non-human organism or a part thereof; and
[77343] (b) growing the non-human organism or a part thereof under conditions which permit the production of coenzyme Q10 or a composition comprising coenzyme Q10 in said non-human organism or in the culture medium surrounding said non-human organism.

[77344] A further embodiment of the present invention relates to a process for the production of coenzyme Q9, which comprises
[77345] (a) increasing or generating one or more activities selected from the group consisting of multiple antibiotic resistance protein in an organelle, preferably in plastids or mitochondria, especially in plastids, of a non-human organism or a part thereof, preferably a microorganism, a plant cell, a plant or a part thereof, as compared to a corresponding non-transformed wild type non-human organism or a part thereof; and
[77346] (b) growing the non-human organism or a part thereof under conditions which permit the production of coenzyme Q9 or a composition comprising coenzyme Q9 in said non-human organism or in the culture medium surrounding said non-human organism.

[77347] A further embodiment of the present invention relates to a process for the production of coenzyme Q9, which comprises
[77348] (a) increasing or generating one or more activities selected from the group consisting of TTC1386-protein in an organelle, preferably in plastids or mitochondria, especially in plastids, of a non-human organism or a part thereof, preferably a microorganism, a plant cell, a plant or a part thereof, as compared to a corresponding non-transformed wild type non-human organism or a part thereof; and
[77349] (b) growing the non-human organism or a part thereof under conditions which permit the production of coenzyme Q9 or a composition comprising coenzyme Q9 in said non-human organism or in the culture medium surrounding said non-human organism.

[77350] A further embodiment of the present invention relates to a process for the production of coenzyme Q9, which comprises
[77351] (a) increasing or generating one or more activities selected from the group consisting of cell division control protein in an organelle, preferably in plastids or mitochondria, especially in plastids, of a non-human organism or a part thereof, preferably a microorganism, a plant cell, a plant or a part thereof, as compared to a corresponding non-transformed wild type non-human organism or a part thereof; and
[77352] (b) growing the non-human organism or a part thereof under conditions which permit the production of coenzyme Q9 or a composition comprising coenzyme Q9 in said non-human organism or in the culture medium surrounding said non-human organism.

[77353] A further embodiment of the present invention relates to a process for the production of coenzyme Q10, which comprises
[77354] (a) increasing or generating one or more activities selected from the group consisting of ycl027w-protein in an organelle, preferably in plastids or mitochondria, especially in plastids, of a non-human organism or a part thereof, preferably a microorganism, a plant cell, a plant or a part thereof, as compared to a corresponding non-transformed wild type non-human organism or a part thereof; and
[77355] (b) growing the non-human organism or a part thereof under conditions which permit the production of coenzyme Q10 or a composition comprising coenzyme Q10 in said non-human organism or in the culture medium surrounding said non-human organism.

[77356] A further embodiment of the present invention relates to a process for the production of coenzyme Q9, which comprises
[77357] (a) increasing or generating one or more activities selected from the group consisting of protein kinase in an organelle, preferably in plastids or mitochondria, especially in plastids, of a non-human organism or a part thereof, preferably a microorganism, a plant cell, a plant or a part thereof, as compared to a corresponding non-transformed wild type non-human organism or a part thereof; and
[77358] (b) growing the non-human organism or a part thereof under conditions which permit the production of coenzyme Q9 or a composition comprising coenzyme Q9 in said non-human organism or in the culture medium surrounding said non-human organism.

[77359] A further embodiment of the present invention relates to a process for the production of coenzyme Q9, which comprises
[77360] (a) increasing or generating one or more activities selected from the group consisting of halotolerance protein in an organelle, preferably in plastids or mitochondria, especially in plastids, of a non-human organism or a part thereof, preferably a microorganism, a plant cell, a plant or a part thereof, as compared to a corresponding non-transformed wild type non-human organism or a part thereof; and
[77361] (b) growing the non-human organism or a part thereof under conditions which permit the production of coenzyme Q9 or a composition comprising coenzyme Q9 in said non-human organism or in the culture medium surrounding said non-human organism.

[77362] A further embodiment of the present invention relates to a process for the production of nicotinic acid, which comprises
[77363] (a) increasing or generating one or more activities selected from the group consisting of lipase in an organelle, preferably in plastids or mitochondria, especially in plastids, of a non-human organism or a part thereof, preferably a microorganism, a plant cell, a plant or a part thereof, as compared to a corresponding non-transformed wild type non-human organism or a part thereof; and
[77364] (b) growing the non-human organism or a part thereof under conditions which permit the production of nicotinic acid or a composition comprising nicotinic acid in said non-human organism or in the culture medium surrounding said non-human organism.

[77365] A further embodiment of the present invention relates to a process for the production of coenzyme Q10, which comprises
[77366] (a) increasing or generating one or more activities selected from the group consisting of heat shock protein Hsp40 in an organelle, preferably in plastids or mitochondria, especially in plastids, of a non-human organism or a part thereof, preferably a microorganism, a plant cell, a plant or a part thereof, as compared to a corresponding non-transformed wild type non-human organism or a part thereof; and
[77367] (b) growing the non-human organism or a part thereof under conditions which permit the production of coenzyme Q10 or a composition comprising coenzyme Q10 in said non-human organism or in the culture medium surrounding said non-human organism.

[77368] A further embodiment of the present invention relates to a process for the production of coenzyme Q9, which comprises
[77369] (a) increasing or generating one or more activities selected from the group consisting of heat shock protein Hsp40 in an organelle, preferably in plastids or mitochondria, especially in plastids, of a non-human organism or a part thereof, preferably a microorganism, a plant cell, a plant or a part thereof, as compared to a corresponding non-transformed wild type non-human organism or a part thereof; and
[77370] (b) growing the non-human organism or a part thereof under conditions which permit the production of coenzyme Q9 or a composition comprising coenzyme Q9 in said non-human organism or in the culture medium surrounding said non-human organism.

[77371] A further embodiment of the present invention relates to a process for the production of coenzyme Q9, which comprises
[77372] (a) increasing or generating one or more activities selected from the group consisting of histone acetyltransferase in an organelle, preferably in plastids or mitochondria, especially in plastids, of a non-human organism or a part thereof, preferably a microorganism, a plant cell, a plant or a part thereof, as compared to a corresponding non-transformed wild type non-human organism or a part thereof; and
[77373] (b) growing the non-human organism or a part thereof under conditions which permit the production of coenzyme Q9 or a composition comprising coenzyme Q9 in said non-human organism or in the culture medium surrounding said non-human organism.

[77374] A further embodiment of the present invention relates to a process for the production of coenzyme Q10, which comprises
[77375] (a) increasing or generating one or more activities selected from the group consisting of mitogen-activated protein kinase in an organelle, preferably in plastids or mitochondria, especially in plastids, of a non-human organism or a part thereof, preferably a microorganism, a plant cell, a plant or a part thereof, as compared to a corresponding non-transformed wild type non-human organism or a part thereof; and
[77376] (b) growing the non-human organism or a part thereof under conditions which permit the production of coenzyme Q10 or a composition comprising coenzyme Q10 in said non-human organism or in the culture medium surrounding said non-human organism.

[77377] A further embodiment of the present invention relates to a process for the production of coenzyme Q10, which comprises
[77378] (a) increasing or generating one or more activities selected from the group consisting of phosphopantothenoylcysteine decarboxylase in an organelle, preferably in plastids or mitochondria, especially in plastids, of a non-human organism or a part thereof, preferably a microorganism, a plant cell, a plant or a part thereof, as compared to a corresponding non-transformed wild type non-human organism or a part thereof; and
[77379] (b) growing the non-human organism or a part thereof under conditions which permit the production of coenzyme Q10 or a composition comprising coenzyme Q10 in said non-human organism or in the culture medium surrounding said non-human organism.

[77380] A further embodiment of the present invention relates to a process for the production of coenzyme Q10, which comprises
[77381] (a1) increasing or generating the activity of a polypeptide comprising a polypeptide as depicted in the respective line in column 5 or 8 of Table II, application no. 16, or a homolog or fragment thereof, a consensus sequence or at least one polypeptide motif as depicted in column 8 of Table IV, application no. 16, whereby the respective line disclose in column 7 the fine chemical coenzyme Q10; or
[77382] increasing or generating the activity of an expression product of one or more nucleic acid molecule(s) comprising a polynucleotide as depicted in the respective line in column 5 or 8 of Table I, application no. 16, preferably the coding region thereof, or a homolog or a fragment thereof, whereby the respective line disclose in column 7 the fine chemical coenzyme Q10;
[77383] in an organelle, preferably in plastids or mitochondria, especially in plastids, in a non-human organism or a part thereof; preferably a microorganism, a plant cell, a plant or a part thereof, as compared to a corresponding non-transformed wild type non-human organism or a part thereof; or
[77384] (a2) increasing or generating the activity of a polypeptide comprising a polypeptide as depicted in the respective line in column 5 or 8 of Table II, application no. 16, or a homolog or a fragment thereof, a consensus sequence or at least one polypeptide motif as depicted in the respective line in column 8 of Table IV, application no. 16, which is joined to a transit peptide, whereby the respective line disclose in column 7 the fine chemical coenzyme Q10; or
[77385] increasing or generating the activity of an expression product of one or more nucleic acid molecule(s) comprising a polynucleotide as depicted in the respective line in column 5 or 8 of Table I, application no. 16, preferably the coding region thereof, or a homolog or a fragment thereof, which is joined to a nucleic acid sequence encoding an organelle localization sequence, preferably a plastid or a mitochondrion localization sequence, especially a plastid localization sequence, whereby the respective line disclose in column 7 the fine chemical coenzyme Q10;
[77386] in a non-human organism or a part thereof; preferably a microorganism, a plant cell, a plant or a part thereof, as compared to a corresponding non-transformed wild type non-human organism or a part thereof; or
[77387] (a3) increasing or generating the activity of a polypeptide comprising a polypeptide as depicted in the respective line in column 5 or 8 of Table II, application no. 16, or a homolog or a fragment thereof, a consensus sequence or at least one polypeptide motif as depicted in the respective line in column 8 of Table IV, application no. 16, whereby the respective line disclose in column 7 the fine chemical coenzyme Q10; or
[77388] increasing or generating the activity of an expression product of one or more nucleic acid molecule(s) comprising a polynucleotide as depicted in the respective line in column 5 or 8 of Table I, application no. 16, preferably the coding region thereof, or a homolog or a fragment thereof, whereby the respective line disclose in column 7 the fine chemical coenzyme Q10;
[77389] in an organelle, preferably in plastids or mitochondria, especially in plastids, in a non-human organism or a part thereof; preferably a microorganism, a plant cell, a plant or a part thereof, through transformation of the organelle, as compared to a corresponding non-transformed wild type non-human organism or a part thereof; and
[77390] (b) growing the non-human organism under conditions which permit the production of coenzyme Q10, or a composition comprising coenzyme Q10 in said non-human organism or in the culture medium surrounding said non-human organism.

[77391] A further embodiment of the present invention relates to a process for the production of coenzyme Q9, which comprises
[77392] (a1) increasing or generating the activity of a polypeptide comprising a polypeptide as depicted in the respective line in column 5 or 8 of Table II, application no. 16, or a homolog or fragment thereof, a consensus sequence or at least one polypeptide motif as depicted in column 8 of Table IV, application no. 16, whereby the respective line disclose in column 7 the fine chemical coenzyme Q9; or
[77393] increasing or generating the activity of an expression product of one or more nucleic acid molecule(s) comprising a polynucleotide as depicted in the respective line in column 5 or 8 of Table I, application no. 16, preferably the coding region thereof, or a homolog or a fragment thereof, whereby the respective line disclose in column 7 the fine chemical coenzyme Q9;
[77394] in an organelle, preferably in plastids or mitochondria, especially in plastids, in a non-human organism or a part thereof; preferably a microorganism, a plant cell, a plant or a part thereof, as compared to a corresponding non-transformed wild type non-human organism or a part thereof; or
[77395] (a2) increasing or generating the activity of a polypeptide comprising a polypeptide as depicted in the respective line in column 5 or 8 of Table II, application no. 16, or a homolog or a fragment thereof, a consensus sequence or at least one polypeptide motif as depicted in the respective line in column 8 of Table IV, application no. 16, which is joined to a transit peptide, whereby the respective line disclose in column 7 the fine chemical coenzyme Q9; or
[77396] increasing or generating the activity of an expression product of one or more nucleic acid molecule(s) comprising a polynucleotide as depicted in the respective line in column 5 or 8 of Table I, application no. 16, preferably the coding region thereof, or a homolog or a fragment thereof, which is joined to a nucleic acid sequence encoding an organelle localization sequence, preferably a plastid or a mitochondrion localization sequence, especially a plastid localization sequence, whereby the respective line disclose in column 7 the fine chemical coenzyme Q9;
[77397] in a non-human organism or a part thereof; preferably a microorganism, a plant cell, a plant or a part thereof, as compared to a corresponding non-transformed wild type non-human organism or a part thereof; or
[77398] (a3) increasing or generating the activity of a polypeptide comprising a polypeptide as depicted in the respective line in column 5 or 8 of Table II, application no. 16, or a homolog or a fragment thereof, a consensus sequence or at least one polypeptide motif as depicted in the respective line in column 8 of Table IV, application no. 16, whereby the respective line disclose in column 7 the fine chemical coenzyme Q9; or
[77399] increasing or generating the activity of an expression product of one or more nucleic acid molecule(s) comprising a polynucleotide as depicted in the respective line in column 5 or 8 of Table I, application no. 16, preferably the coding region thereof, or a homolog or a fragment thereof, whereby the respective line disclose in column 7 the fine chemical coenzyme Q9;
[77400] in an organelle, preferably in plastids or mitochondria, especially in plastids, in a non-human organism or a part thereof; preferably a microorganism, a plant cell, a plant or a part thereof, through transformation of the organelle, as compared to a corresponding non-transformed wild type non-human organism or a part thereof; and
[77401] (b) growing the non-human organism under conditions which permit the production of coenzyme Q9, or a composition comprising coenzyme Q9 in said non-human organism or in the culture medium surrounding said non-human organism.

[77402] A further embodiment of the present invention relates to a process for the production of lipoic acid, which comprises
[77403] (a1) increasing or generating the activity of a polypeptide comprising a polypeptide as depicted in the respective line in column 5 or 8 of Table II, application no. 16, or a homolog or fragment thereof, a consensus sequence or at least one polypeptide motif as depicted in column 8 of Table IV, application no. 16, whereby the respective line disclose in column 7 the fine chemical lipoic acid; or
[77404] increasing or generating the activity of an expression product of one or more nucleic acid molecule(s) comprising a polynucleotide as depicted in the respective line in column 5 or 8 of Table I, application no. 16, preferably the coding region thereof, or a homolog or a fragment thereof, whereby the respective line disclose in column 7 the fine chemical lipoic acid;
[77405] in an organelle, preferably in plastids or mitochondria, especially in plastids, in a non-human organism or a part thereof; preferably a microorganism, a plant cell, a plant or a part thereof, as compared to a corresponding non-transformed wild type non-human organism or a part thereof; or
[77406] (a2) increasing or generating the activity of a polypeptide comprising a polypeptide as depicted in the respective line in column 5 or 8 of Table II, application no. 16, or a homolog or a fragment thereof, a consensus sequence or at least one polypeptide motif as depicted in the respective line in column 8 of Table IV, application no. 16, which is joined to a transit peptide, whereby the respective line disclose in column 7 the fine chemical lipoic acid; or
[77407] increasing or generating the activity of an expression product of one or more nucleic acid molecule(s) comprising a polynucleotide as depicted in the respective line in column 5 or 8 of Table I, application no. 16, preferably the coding region thereof, or a homolog or a fragment thereof, which is joined to a nucleic acid sequence encoding an organelle localization sequence, preferably a plastid or a mitochondrion localization sequence, especially a plastid localization sequence, whereby the respective line disclose in column 7 the fine chemical lipoic acid;
[77408] in a non-human organism or a part thereof; preferably a microorganism, a plant cell, a plant or a part thereof, as compared to a corresponding non-transformed wild type non-human organism or a part thereof; or
[77409] (a3) increasing or generating the activity of a polypeptide comprising a polypeptide as depicted in the respective line in column 5 or 8 of Table II, application no. 16, or a homolog or a fragment thereof, a consensus sequence or at least one polypeptide motif as depicted in the respective line in column 8 of Table IV, application no. 16, whereby the respective line disclose in column 7 the fine chemical lipoic acid; or
[77410] increasing or generating the activity of an expression product of one or more nucleic acid molecule(s) comprising a polynucleotide as depicted in the respective line in column 5 or 8 of Table I, application no. 16, preferably the coding region thereof, or a homolog or a fragment thereof, whereby the respective line disclose in column 7 the fine chemical lipoic acid;
[77411] in an organelle, preferably in plastids or mitochondria, especially in plastids, in a non-human organism or a part thereof; preferably a microorganism, a plant cell, a plant or a part thereof, through transformation of the organelle, as compared to a corresponding non-transformed wild type non-human organism or a part thereof; and
[77412] (b) growing the non-human organism under conditions which permit the production of lipoic acid, or a composition comprising lipoic acid in said non-human organism or in the culture medium surrounding said non-human organism.

[77413] A further embodiment of the present invention relates to a process for the production of nicotinic acid, which comprises
[77414] (a1) increasing or generating the activity of a polypeptide comprising a polypeptide as depicted in the respective line in column 5 or 8 of Table II, application no. 16, or a homolog or fragment thereof, a consensus sequence or at least one polypeptide motif as depicted in column 8 of Table IV, application no. 16, whereby the respective line disclose in column 7 the fine chemical nicotinic acid; or
[77415] increasing or generating the activity of an expression product of one or more nucleic acid molecule(s) comprising a polynucleotide as depicted in the respective line in column 5 or 8 of Table I, application no. 16, preferably the coding region thereof, or a homolog or a fragment thereof, whereby the respective line disclose in column 7 the fine chemical nicotinic acid;
[77416] in an organelle, preferably in plastids or mitochondria, especially in plastids, in a non-human organism or a part thereof; preferably a microorganism, a plant cell, a plant or a part thereof, as compared to a corresponding non-transformed wild type non-human organism or a part thereof; or
[77417] (a2) increasing or generating the activity of a polypeptide comprising a polypeptide as depicted in the respective line in column 5 or 8 of Table II, application no. 16, or a homolog or a fragment thereof, a consensus sequence or at least one polypeptide motif as depicted in the respective line in column 8 of Table IV, application no. 16, which is joined to a transit peptide, whereby the respective line disclose in column 7 the fine chemical nicotinic acid; or
[77418] increasing or generating the activity of an expression product of one or more nucleic acid molecule(s) comprising a polynucleotide as depicted in the respective line in column 5 or 8 of Table I, application no. 16, preferably the coding region thereof, or a homolog or a fragment thereof, which is joined to a nucleic acid sequence encoding an organelle localization sequence, preferably a plastid or a mitochondrion localization sequence, especially a plastid localization sequence, whereby the respective line disclose in column 7 the fine chemical nicotinic acid;
[77419] in a non-human organism or a part thereof; preferably a microorganism, a plant cell, a plant or a part thereof, as compared to a corresponding non-transformed wild type non-human organism or a part thereof; or
[77420] (a3) increasing or generating the activity of a polypeptide comprising a polypeptide as depicted in the respective line in column 5 or 8 of Table II, application no. 16, or a homolog or a fragment thereof, a consensus sequence or at least one polypeptide motif as depicted in the respective line in column 8 of Table IV, application no. 16, whereby the respective line disclose in column 7 the fine chemical nicotinic acid; or
[77421] increasing or generating the activity of an expression product of one or more nucleic acid molecule(s) comprising a polynucleotide as depicted in the respective line in column 5 or 8 of Table I, application no. 16, preferably the coding region thereof, or a homolog or a fragment thereof, whereby the respective line disclose in column 7 the fine chemical nicotinic acid;
[77422] in an organelle, preferably in plastids or mitochondria, especially in plastids, in a non-human organism or a part thereof; preferably a microorganism, a plant cell, a plant or a part thereof, through transformation of the organelle, as compared to a corresponding non-transformed wild type non-human organism or a part thereof; and
[77423] (b) growing the non-human organism under conditions which permit the production of nicotinic acid, or a composition comprising nicotinic acid in said non-human organism or in the culture medium surrounding said non-human organism.

[77424] Accordingly, the present invention relates to a process for the production of coenzyme Q10, which comprises
[77425] (a) increasing or generating the activity of a amino acid acetyltransferase in the cytosol of a cell of a non-human organism or a part thereof, preferably a microorganism, a plant cell, a plant or a part thereof, as compared to a corresponding non-transformed wild type non-human organism or a part thereof; and
[77426] (b) growing the non-human organism or a part thereof under conditions which permit the production of coenzyme Q10 or a composition comprising coenzyme Q10 in said non-human organism or in the culture medium surrounding said non-human organism.

[77427] Accordingly, the present invention relates to a process for the production of coenzyme Q9, which comprises
[77428] (a) increasing or generating the activity of a transcriptional regulator in the cytosol of a cell of a non-human organism or a part thereof, preferably a microorganism, a plant cell, a plant or a part thereof, as compared to a corresponding non-transformed wild type non-human organism or a part thereof; and
[77429] (b) growing the non-human organism or a part thereof under conditions which permit the production of coenzyme Q9 or a composition comprising coenzyme Q9 in said non-human organism or in the culture medium surrounding said non-human organism.

[77430] Accordingly, the present invention relates to a process for the production of coenzyme Q9, which comprises
[77431] (a) increasing or generating the activity of a At1g47380-protein in the cytosol of a cell of a non-human organism or a part thereof, preferably a microorganism, a plant cell, a plant or a part thereof, as compared to a corresponding non-transformed wild type non-human organism or a part thereof; and
[77432] (b) growing the non-human organism or a part thereof under conditions which permit the production of coenzyme Q9 or a composition comprising coenzyme Q9 in said non-human organism or in the culture medium surrounding said non-human organism.

[77433] Accordingly, the present invention relates to a process for the production of coenzyme Q9, which comprises
[77434] (a) increasing or generating the activity of a protein phosphatase in the cytosol of a cell of a non-human organism or a part thereof, preferably a microorganism, a plant cell, a plant or a part thereof, as compared to a corresponding non-transformed wild type non-human organism or a part thereof; and
[77435] (b) growing the non-human organism or a part thereof under conditions which permit the production of coenzyme Q9 or a composition comprising coenzyme Q9 in said non-human organism or in the culture medium surrounding said non-human organism.

[77436] Accordingly, the present invention relates to a process for the production of coenzyme Q9, which comprises
[77437] (a) increasing or generating the activity of a phenylalanine ammonia-lyase in the cytosol of a cell of a non-human organism or a part thereof, preferably a microorganism, a plant cell, a plant or a part thereof, as compared to a corresponding non-transformed wild type non-human organism or a part thereof; and
[77438] (b) growing the non-human organism or a part thereof under conditions which permit the production of coenzyme Q9 or a composition comprising coenzyme Q9 in said non-human organism or in the culture medium surrounding said non-human organism.

[77439] Accordingly, the present invention relates to a process for the production of coenzyme Q9, which comprises
[77440] (a) increasing or generating the activity of a MADS box protein transcription factor in the cytosol of a cell of a non-human organism or a part thereof, preferably a microorganism, a plant cell, a plant or a part thereof, as compared to a corresponding non-transformed wild type non-human organism or a part thereof; and
[77441] (b) growing the non-human organism or a part thereof under conditions which permit the production of coenzyme Q9 or a composition comprising coenzyme Q9 in said non-human organism or in the culture medium surrounding said non-human organism.

[77442] Accordingly, the present invention relates to a process for the production of coenzyme Q10, which comprises
[77443] (a) increasing or generating the activity of a glutaredoxin in the cytosol of a cell of a non-human organism or a part thereof, preferably a microorganism, a plant cell, a plant or a part thereof, as compared to a corresponding non-transformed wild type non-human organism or a part thereof; and
[77444] (b) growing the non-human organism or a part thereof under conditions which permit the production of coenzyme Q10 or a composition comprising coenzyme Q10 in said non-human organism or in the culture medium surrounding said non-human organism.

[77445] Accordingly, the present invention relates to a process for the production of coenzyme Q9, which comprises
[77446] (a) increasing or generating the activity of a heat shock transcription factor in the cytosol of a cell of a non-human organism or a part thereof, preferably a microorganism, a plant cell, a plant or a part thereof, as compared to a corresponding non-transformed wild type non-human organism or a part thereof; and
[77447] (b) growing the non-human organism or a part thereof under conditions which permit the production of coenzyme Q9 or a composition comprising coenzyme Q9 in said non-human organism or in the culture medium surrounding said non-human organism.

[77448] Accordingly, the present invention relates to a process for the production of coenzyme Q10, which comprises
[77449] (a) increasing or generating the activity of a pyruvate kinase in the cytosol of a cell of a non-human organism or a part thereof, preferably a microorganism, a plant cell, a plant or a part thereof, as compared to a corresponding non-transformed wild type non-human organism or a part thereof; and
[77450] (b) growing the non-human organism or a part thereof under conditions which permit the production of coenzyme Q10 or a composition comprising coenzyme Q10 in said non-human organism or in the culture medium surrounding said non-human organism.

[77451] Accordingly, the present invention relates to a process for the production of coenzyme Q9, which comprises
[77452] (a) increasing or generating the activity of a F-box protein in the cytosol of a cell of a non-human organism or a part thereof, preferably a microorganism, a plant cell, a plant or a part thereof, as compared to a corresponding non-transformed wild type non-human organism or a part thereof; and
[77453] (b) growing the non-human organism or a part thereof under conditions which permit the production of coenzyme Q9 or a composition comprising coenzyme Q9 in said non-human organism or in the culture medium surrounding said non-human organism.

[77454] Accordingly, the present invention relates to a process for the production of coenzyme Q10, which comprises
[77455] (a) increasing or generating the activity of a CCAAT-binding transcription factor in the cytosol of a cell of a non-human organism or a part thereof, preferably a microorganism, a plant cell, a plant or a part thereof, as compared to a corresponding non-transformed wild type non-human organism or a part thereof; and
[77456] (b) growing the non-human organism or a part thereof under conditions which permit the production of coenzyme Q10 or a composition comprising coenzyme Q10 in said non-human organism or in the culture medium surrounding said non-human organism.

[77457] Accordingly, the present invention relates to a process for the production of coenzyme Q9, which comprises
[77458] (a) increasing or generating the activity of a CCAAT-binding transcription factor in the cytosol of a cell of a non-human organism or a part thereof, preferably a microorganism, a plant cell, a plant or a part thereof, as compared to a corresponding non-transformed wild type non-human organism or a part thereof; and
[77459] (b) growing the non-human organism or a part thereof under conditions which permit the production of coenzyme Q9 or a composition comprising coenzyme Q9 in said non-human organism or in the culture medium surrounding said non-human organism.

[77460] Accordingly, the present invention relates to a process for the production of coenzyme Q9, which comprises
[77461] (a) increasing or generating the activity of a glycosyl transferase in the cytosol of a cell of a non-human organism or a part thereof, preferably a microorganism, a plant cell, a plant or a part thereof, as compared to a corresponding non-transformed wild type non-human organism or a part thereof; and
[77462] (b) growing the non-human organism or a part thereof under conditions which permit the production of coenzyme Q9 or a composition comprising coenzyme Q9 in said non-human organism or in the culture medium surrounding said non-human organism.

[77463] Accordingly, the present invention relates to a process for the production of coenzyme Q9, which comprises
[77464] (a) increasing or generating the activity of a auxin response factor in the cytosol of a cell of a non-human organism or a part thereof, preferably a microorganism, a plant cell, a plant or a part thereof, as compared to a corresponding non-transformed wild type non-human organism or a part thereof; and
[77465] (b) growing the non-human organism or a part thereof under conditions which permit the production of coenzyme Q9 or a composition comprising coenzyme Q9 in said non-human organism or in the culture medium surrounding said non-human organism.

[77466] Accordingly, the present invention relates to a process for the production of coenzyme Q10, which comprises
[77467] (a) increasing or generating the activity of a glutaredoxin in the cytosol of a cell of a non-human organism or a part thereof, preferably a microorganism, a plant cell, a plant or a part thereof, as compared to a corresponding non-transformed wild type non-human organism or a part thereof; and
[77468] (b) growing the non-human organism or a part thereof under conditions which permit the production of coenzyme Q10 or a composition comprising coenzyme Q10 in said non-human organism or in the culture medium surrounding said non-human organism.

[77469] Accordingly, the present invention relates to a process for the production of coenzyme Q9, which comprises
[77470] (a) increasing or generating the activity of a glutaredoxin in the cytosol of a cell of a non-human organism or a part thereof, preferably a microorganism, a plant cell, a plant or a part thereof, as compared to a corresponding non-transformed wild type non-human organism or a part thereof; and
[77471] (b) growing the non-human organism or a part thereof under conditions which permit the production of coenzyme Q9 or a composition comprising coenzyme Q9 in said non-human organism or in the culture medium surrounding said non-human organism.

[77472] Accordingly, the present invention relates to a process for the production of coenzyme Q10, which comprises
[77473] (a) increasing or generating the activity of a sterol desaturase in the cytosol of a cell of a non-human organism or a part thereof, preferably a microorganism, a plant cell, a plant or a part thereof, as compared to a corresponding non-transformed wild type non-human organism or a part thereof; and
[77474] (b) growing the non-human organism or a part thereof under conditions which permit the production of coenzyme Q10 or a composition comprising coenzyme Q10 in said non-human organism or in the culture medium surrounding said non-human organism.

[77475] Accordingly, the present invention relates to a process for the production of coenzyme Q10, which comprises
[77476] (a) increasing or generating the activity of a monothiol glutaredoxin in the cytosol of a cell of a non-human organism or a part thereof, preferably a microorganism, a plant cell, a plant or a part thereof, as compared to a corresponding non-transformed wild type non-human organism or a part thereof; and
[77477] (b) growing the non-human organism or a part thereof under conditions which permit the production of coenzyme Q10 or a composition comprising coenzyme Q10 in said non-human organism or in the culture medium surrounding said non-human organism.

[77478] Accordingly, the present invention relates to a process for the production of coenzyme Q9, which comprises
[77479] (a) increasing or generating the activity of a monothiol glutaredoxin in the cytosol of a cell of a non-human organism or a part thereof, preferably a microorganism, a plant cell, a plant or a part thereof, as compared to a corresponding non-transformed wild type non-human organism or a part thereof; and
[77480] (b) growing the non-human organism or a part thereof under conditions which permit the production of coenzyme Q9 or a composition comprising coenzyme Q9 in said non-human organism or in the culture medium surrounding said non-human organism.

[77481] Accordingly, the present invention relates to a process for the production of coenzyme Q10, which comprises
[77482] (a) increasing or generating the activity of a cyclin D in the cytosol of a cell of a non-human organism or a part thereof, preferably a microorganism, a plant cell, a plant or a part thereof, as compared to a corresponding non-transformed wild type non-human organism or a part thereof; and
[77483] (b) growing the non-human organism or a part thereof under conditions which permit the production of coenzyme Q10 or a composition comprising coenzyme Q10 in said non-human organism or in the culture medium surrounding said non-human organism.

[77484] Accordingly, the present invention relates to a process for the production of coenzyme Q9, which comprises
[77485] (a) increasing or generating the activity of a cyclin D in the cytosol of a cell of a non-human organism or a part thereof, preferably a microorganism, a plant cell, a plant or a part thereof, as compared to a corresponding non-transformed wild type non-human organism or a part thereof; and
[77486] (b) growing the non-human organism or a part thereof under conditions which permit the production of coenzyme Q9 or a composition comprising coenzyme Q9 in said non-human organism or in the culture medium surrounding said non-human organism.

[77487] Accordingly, the present invention relates to a process for the production of coenzyme Q10, which comprises
[77488] (a) increasing or generating the activity of a calcium-dependent protein kinase in the cytosol of a cell of a non-human organism or a part thereof, preferably a microorganism, a plant cell, a plant or a part thereof, as compared to a corresponding non-transformed wild type non-human organism or a part thereof; and
[77489] (b) growing the non-human organism or a part thereof under conditions which permit the production of coenzyme Q10 or a composition comprising coenzyme Q10 in said non-human organism or in the culture medium surrounding said non-human organism.

[77490] Accordingly, the present invention relates to a process for the production of coenzyme Q9, which comprises
[77491] (a) increasing or generating the activity of a calcium-dependent protein kinase in the cytosol of a cell of a non-human organism or a part thereof, preferably a microorganism, a plant cell, a plant or a part thereof, as compared to a corresponding non-transformed wild type non-human organism or a part thereof; and
[77492] (b) growing the non-human organism or a part thereof under conditions which permit the production of coenzyme Q9 or a composition comprising coenzyme Q9 in said non-human organism or in the culture medium surrounding said non-human organism.

[77493] Accordingly, the present invention relates to a process for the production of coenzyme Q9, which comprises
[77494] (a) increasing or generating the activity of a heat shock transcription factor in the cytosol of a cell of a non-human organism or a part thereof, preferably a microorganism, a plant cell, a plant or a part thereof, as compared to a corresponding non-transformed wild type non-human organism or a part thereof; and
[77495] (b) growing the non-human organism or a part thereof under conditions which permit the production of coenzyme Q9 or a composition comprising coenzyme Q9 in said non-human organism or in the culture medium surrounding said non-human organism.

[77496] Accordingly, the present invention relates to a process for the production of coenzyme Q10, which comprises
[77497] (a) increasing or generating the activity of a monothiol glutaredoxin in the cytosol of a cell of a non-human organism or a part thereof, preferably a microorganism, a plant cell, a plant or a part thereof, as compared to a corresponding non-transformed wild type non-human organism or a part thereof; and
[77498] (b) growing the non-human organism or a part thereof under conditions which permit the production of coenzyme Q10 or a composition comprising coenzyme Q10 in said non-human organism or in the culture medium surrounding said non-human organism.

[77499] Accordingly, the present invention relates to a process for the production of coenzyme Q9, which comprises
[77500] (a) increasing or generating the activity of a disease resistance protein in the cytosol of a cell of a non-human organism or a part thereof, preferably a microorganism, a plant cell, a plant or a part thereof, as compared to a corresponding non-transformed wild type non-human organism or a part thereof; and
[77501] (b) growing the non-human organism or a part thereof under conditions which permit the production of coenzyme Q9 or a composition comprising coenzyme Q9 in said non-human organism or in the culture medium surrounding said non-human organism.

[77502] Accordingly, the present invention relates to a process for the production of coenzyme Q9, which comprises
[77503] (a) increasing or generating the activity of a protein phosphatase in the cytosol of a cell of a non-human organism or a part thereof, preferably a microorganism, a plant cell, a plant or a part thereof, as compared to a corresponding non-transformed wild type non-human organism or a part thereof; and
[77504] (b) growing the non-human organism or a part thereof under conditions which permit the production of coenzyme Q9 or a composition comprising coenzyme Q9 in said non-human organism or in the culture medium surrounding said non-human organism.

[77505] Accordingly, the present invention relates to a process for the production of coenzyme Q9, which comprises
[77506] (a) increasing or generating the activity of a zinc finger protein in the cytosol of a cell of a non-human organism or a part thereof, preferably a microorganism, a plant cell, a plant or a part thereof, as compared to a corresponding non-transformed wild type non-human organism or a part thereof; and
[77507] (b) growing the non-human organism or a part thereof under conditions which permit the production of coenzyme Q9 or a composition comprising coenzyme Q9 in said non-human organism or in the culture medium surrounding said non-human organism.

[77508] Accordingly, the present invention relates to a process for the production of coenzyme Q9, which comprises
[77509] (a) increasing or generating the activity of a transcriptional regulator in the cytosol of a cell of a non-human organism or a part thereof, preferably a microorganism, a plant cell, a plant or a part thereof, as compared to a corresponding non-transformed wild type non-human organism or a part thereof; and
[77510] (b) growing the non-human organism or a part thereof under conditions which permit the production of coenzyme Q9 or a composition comprising coenzyme Q9 in said non-human organism or in the culture medium surrounding said non-human organism.

[77511] Accordingly, the present invention relates to a process for the production of coenzyme Q9, which comprises
[77512] (a) increasing or generating the activity of a CTP synthase in the cytosol of a cell of a non-human organism or a part thereof, preferably a microorganism, a plant cell, a plant or a part thereof, as compared to a corresponding non-transformed wild type non-human organism or a part thereof; and
[77513] (b) growing the non-human organism or a part thereof under conditions which permit the production of coenzyme Q9 or a composition comprising coenzyme Q9 in said non-human organism or in the culture medium surrounding said non-human organism.

[77514] Accordingly, the present invention relates to a process for the production of coenzyme Q9, which comprises
[77515] (a) increasing or generating the activity of a recombinase A in the cytosol of a cell of a non-human organism or a part thereof, preferably a microorganism, a plant cell, a plant or a part thereof, as compared to a corresponding non-transformed wild type non-human organism or a part thereof; and
[77516] (b) growing the non-human organism or a part thereof under conditions which permit the production of coenzyme Q9 or a composition comprising coenzyme Q9 in said non-human organism or in the culture medium surrounding said non-human organism.

[77517] Accordingly, the present invention relates to a process for the production of coenzyme Q10, which comprises
[77518] (a) increasing or generating the activity of a enoyl-CoA hydratase in the cytosol of a cell of a non-human organism or a part thereof, preferably a microorganism, a plant cell, a plant or a part thereof, as compared to a corresponding non-transformed wild type non-human organism or a part thereof; and
[77519] (b) growing the non-human organism or a part thereof under conditions which permit the production of coenzyme Q10 or a composition comprising coenzyme Q10 in said non-human organism or in the culture medium surrounding said non-human organism.

[77520] Accordingly, the present invention relates to a process for the production of coenzyme Q9, which comprises
[77521] (a) increasing or generating the activity of a enoyl-CoA hydratase in the cytosol of a cell of a non-human organism or a part thereof, preferably a microorganism, a plant cell, a plant or a part thereof, as compared to a corresponding non-transformed wild type non-human organism or a part thereof; and
[77522] (b) growing the non-human organism or a part thereof under conditions which permit the production of coenzyme Q9 or a composition comprising coenzyme Q9 in said non-human organism or in the culture medium surrounding said non-human organism.

[77523] Accordingly, the present invention relates to a process for the production of coenzyme Q9, which comprises
[77524] (a) increasing or generating the activity of a isopropylmalate isomerase large subunit in the cytosol of a cell of a non-human organism or a part thereof, preferably a microorganism, a plant cell, a plant or a part thereof, as compared to a corresponding non-transformed wild type non-human organism or a part thereof; and
[77525] (b) growing the non-human organism or a part thereof under conditions which permit the production of coenzyme Q9 or a composition comprising coenzyme Q9 in said non-human organism or in the culture medium surrounding said non-human organism.

[77526] Accordingly, the present invention relates to a process for the production of coenzyme Q9, which comprises
[77527] (a) increasing or generating the activity of a hydrolase in the cytosol of a cell of a non-human organism or a part thereof, preferably a microorganism, a plant cell, a plant or a part thereof, as compared to a corresponding non-transformed wild type non-human organism or a part thereof; and
[77528] (b) growing the non-human organism or a part thereof under conditions which permit the production of coenzyme Q9 or a composition comprising coenzyme Q9 in said non-human organism or in the culture medium surrounding said non-human organism.

[77529] Accordingly, the present invention relates to a process for the production of coenzyme Q9, which comprises
[77530] (a) increasing or generating the activity of a AX653549-protein in the cytosol of a cell of a non-human organism or a part thereof, preferably a microorganism, a plant cell, a plant or a part thereof, as compared to a corresponding non-transformed wild type non-human organism or a part thereof; and
[77531] (b) growing the non-human organism or a part thereof under conditions which permit the production of coenzyme Q9 or a composition comprising coenzyme Q9 in said non-human organism or in the culture medium surrounding said non-human organism.

[77532] Accordingly, the present invention relates to a process for the production of coenzyme Q10, which comprises
[77533] (a) increasing or generating the activity of a AY087308-protein in the cytosol of a cell of a non-human organism or a part thereof, preferably a microorganism, a plant cell, a plant or a part thereof, as compared to a corresponding non-transformed wild type non-human organism or a part thereof; and
[77534] (b) growing the non-human organism or a part thereof under conditions which permit the production of coenzyme Q10 or a composition comprising coenzyme Q10 in said non-human organism or in the culture medium surrounding said non-human organism.

[77535] Accordingly, the present invention relates to a process for the production of coenzyme Q10, which comprises
[77536] (a) increasing or generating the activity of a threonine synthase in the cytosol of a cell of a non-human organism or a part thereof, preferably a microorganism, a plant cell, a plant or a part thereof, as compared to a corresponding non-transformed wild type non-human organism or a part thereof; and
[77537] (b) growing the non-human organism or a part thereof under conditions which permit the production of coenzyme Q10 or a composition comprising coenzyme Q10 in said non-human organism or in the culture medium surrounding said non-human organism.

[77538] Accordingly, the present invention relates to a process for the production of coenzyme Q10, which comprises
[77539] (a) increasing or generating the activity of a acetolactate synthase III large subunit in the cytosol of a cell of a non-human organism or a part thereof, preferably a microorganism, a plant cell, a plant or a part thereof, as compared to a corresponding non-transformed wild type non-human organism or a part thereof; and
[77540] (b) growing the non-human organism or a part thereof under conditions which permit the production of coenzyme Q10 or a composition comprising coenzyme Q10 in said non-human organism or in the culture medium surrounding said non-human organism.

[77541] Accordingly, the present invention relates to a process for the production of coenzyme Q9, which comprises
[77542] (a) increasing or generating the activity of a serine protease in the cytosol of a cell of a non-human organism or a part thereof, preferably a microorganism, a plant cell, a plant or a part thereof, as compared to a corresponding non-transformed wild type non-human organism or a part thereof; and
[77543] (b) growing the non-human organism or a part thereof under conditions which permit the production of coenzyme Q9 or a composition comprising coenzyme Q9 in said non-human organism or in the culture medium surrounding said non-human organism.

[77544] Accordingly, the present invention relates to a process for the production of coenzyme Q9, which comprises
[77545] (a) increasing or generating the activity of a beta-galactosidase in the cytosol of a cell of a non-human organism or a part thereof, preferably a microorganism, a plant cell, a plant or a part thereof, as compared to a corresponding non-transformed wild type non-human organism or a part thereof; and
[77546] (b) growing the non-human organism or a part thereof under conditions which permit the production of coenzyme Q9 or a composition comprising coenzyme Q9 in said non-human organism or in the culture medium surrounding said non-human organism.

[77547] Accordingly, the present invention relates to a process for the production of coenzyme Q10, which comprises
[77548] (a) increasing or generating the activity of a ATP-binding component of a transport system in the cytosol of a cell of a non-human organism or a part thereof, preferably a microorganism, a plant cell, a plant or a part thereof, as compared to a corresponding non-transformed wild type non-human organism or a part thereof; and
[77549] (b) growing the non-human organism or a part thereof under conditions which permit the production of coenzyme Q10 or a composition comprising coenzyme Q10 in said non-human organism or in the culture medium surrounding said non-human organism.

[77550] Accordingly, the present invention relates to a process for the production of coenzyme Q9, which comprises
[77551] (a) increasing or generating the activity of a ATP-binding component of a transport system in the cytosol of a cell of a non-human organism or a part thereof, preferably a microorganism, a plant cell, a plant or a part thereof, as compared to a corresponding non-transformed wild type non-human organism or a part thereof; and
[77552] (b) growing the non-human organism or a part thereof under conditions which permit the production of coenzyme Q9 or a composition comprising coenzyme Q9 in said non-human organism or in the culture medium surrounding said non-human organism.

[77553] Accordingly, the present invention relates to a process for the production of coenzyme Q10, which comprises
[77554] (a) increasing or generating the activity of a zinc transporter in the cytosol of a cell of a non-human organism or a part thereof, preferably a microorganism, a plant cell, a plant or a part thereof, as compared to a corresponding non-transformed wild type non-human organism or a part thereof; and
[77555] (b) growing the non-human organism or a part thereof under conditions which permit the production of coenzyme Q10 or a composition comprising coenzyme Q10 in said non-human organism or in the culture medium surrounding said non-human organism.

[77556] Accordingly, the present invention relates to a process for the production of coenzyme Q9, which comprises
[77557] (a) increasing or generating the activity of a zinc transporter in the cytosol of a cell of a non-human organism or a part thereof, preferably a microorganism, a plant cell, a plant or a part thereof, as compared to a corresponding non-transformed wild type non-human organism or a part thereof; and
[77558] (b) growing the non-human organism or a part thereof under conditions which permit the production of coenzyme Q9 or a composition comprising coenzyme Q9 in said non-human organism or in the culture medium surrounding said non-human organism.

[77559] Accordingly, the present invention relates to a process for the production of coenzyme Q10, which comprises
[77560] (a) increasing or generating the activity of a methylglyoxal synthase in the cytosol of a cell of a non-human organism or a part thereof, preferably a microorganism, a plant cell, a plant or a part thereof, as compared to a corresponding non-transformed wild type non-human organism or a part thereof; and
[77561] (b) growing the non-human organism or a part thereof under conditions which permit the production of coenzyme Q10 or a composition comprising coenzyme Q10 in said non-human organism or in the culture medium surrounding said non-human organism.

[77562] Accordingly, the present invention relates to a process for the production of coenzyme Q9, which comprises
[77563] (a) increasing or generating the activity of a methylglyoxal synthase in the cytosol of a cell of a non-human organism or a part thereof, preferably a microorganism, a plant cell, a plant or a part thereof, as compared to a corresponding non-transformed wild type non-human organism or a part thereof; and
[77564] (b) growing the non-human organism or a part thereof under conditions which permit the production of coenzyme Q9 or a composition comprising coenzyme Q9 in said non-human organism or in the culture medium surrounding said non-human organism.

[77565] Accordingly, the present invention relates to a process for the production of coenzyme Q9, which comprises
[77566] (a) increasing or generating the activity of a b1003-protein in the cytosol of a cell of a non-human organism or a part thereof, preferably a microorganism, a plant cell, a plant or a part thereof, as compared to a corresponding non-transformed wild type non-human organism or a part thereof; and
[77567] (b) growing the non-human organism or a part thereof under conditions which permit the production of coenzyme Q9 or a composition comprising coenzyme Q9 in said non-human organism or in the culture medium surrounding said non-human organism.

[77568] Accordingly, the present invention relates to a process for the production of coenzyme Q9, which comprises
[77569] (a) increasing or generating the activity of a b1097-protein in the cytosol of a cell of a non-human organism or a part thereof, preferably a microorganism, a plant cell, a plant or a part thereof, as compared to a corresponding non-transformed wild type non-human organism or a part thereof; and
[77570] (b) growing the non-human organism or a part thereof under conditions which permit the production of coenzyme Q9 or a composition comprising coenzyme Q9 in said non-human organism or in the culture medium surrounding said non-human organism.

[77571] Accordingly, the present invention relates to a process for the production of coenzyme Q10, which comprises
[77572] (a) increasing or generating the activity of a b1522-protein in the cytosol of a cell of a non-human organism or a part thereof, preferably a microorganism, a plant cell, a plant or a part thereof, as compared to a corresponding non-transformed wild type non-human organism or a part thereof; and
[77573] (b) growing the non-human organism or a part thereof under conditions which permit the production of coenzyme Q10 or a composition comprising coenzyme Q10 in said non-human organism or in the culture medium surrounding said non-human organism.

[77574] Accordingly, the present invention relates to a process for the production of coenzyme Q9, which comprises
[77575] (a) increasing or generating the activity of a b1522-protein in the cytosol of a cell of a non-human organism or a part thereof, preferably a microorganism, a plant cell, a plant or a part thereof, as compared to a corresponding non-transformed wild type non-human organism or a part thereof; and
[77576] (b) growing the non-human organism or a part thereof under conditions which permit the production of coenzyme Q9 or a composition comprising coenzyme Q9 in said non-human organism or in the culture medium surrounding said non-human organism.

[77577] Accordingly, the present invention relates to a process for the production of coenzyme Q10, which comprises
[77578] (a) increasing or generating the activity of a acid shock protein in the cytosol of a cell of a non-human organism or a part thereof, preferably a microorganism, a plant cell, a plant or a part thereof, as compared to a corresponding non-transformed wild type non-human organism or a part thereof; and
[77579] (b) growing the non-human organism or a part thereof under conditions which permit the production of coenzyme Q10 or a composition comprising coenzyme Q10 in said non-human organism or in the culture medium surrounding said non-human organism.

[77580] Accordingly, the present invention relates to a process for the production of coenzyme Q9, which comprises
[77581] (a) increasing or generating the activity of a acid shock protein in the cytosol of a cell of a non-human organism or a part thereof, preferably a microorganism, a plant cell, a plant or a part thereof, as compared to a corresponding non-transformed wild type non-human organism or a part thereof; and
[77582] (b) growing the non-human organism or a part thereof under conditions which permit the production of coenzyme Q9 or a composition comprising coenzyme Q9 in said non-human organism or in the culture medium surrounding said non-human organism.

[77583] Accordingly, the present invention relates to a process for the production of coenzyme Q9, which comprises
[77584] (a) increasing or generating the activity of a serine/threonine-protein phosphatase in the cytosol of a cell of a non-human organism or a part thereof, preferably a microorganism, a plant cell, a plant or a part thereof, as compared to a corresponding non-transformed wild type non-human organism or a part thereof; and
[77585] (b) growing the non-human organism or a part thereof under conditions which permit the production of coenzyme Q9 or a composition comprising coenzyme Q9 in said non-human organism or in the culture medium surrounding said non-human organism.

[77586] Accordingly, the present invention relates to a process for the production of coenzyme Q9, which comprises
[77587] (a) increasing or generating the activity of a b2032-protein in the cytosol of a cell of a non-human organism or a part thereof, preferably a microorganism, a plant cell, a plant or a part thereof, as compared to a corresponding non-transformed wild type non-human organism or a part thereof; and
[77588] (b) growing the non-human organism or a part thereof under conditions which permit the production of coenzyme Q9 or a composition comprising coenzyme Q9 in said non-human organism or in the culture medium surrounding said non-human organism.

[77589] Accordingly, the present invention relates to a process for the production of coenzyme Q10, which comprises
[77590] (a) increasing or generating the activity of a colanic acid biosynthesis protein in the cytosol of a cell of a non-human organism or a part thereof, preferably a microorganism, a plant cell, a plant or a part thereof, as compared to a corresponding non-transformed wild type non-human organism or a part thereof; and
[77591] (b) growing the non-human organism or a part thereof under conditions which permit the production of coenzyme Q10 or a composition comprising coenzyme Q10 in said non-human organism or in the culture medium surrounding said non-human organism.

[77592] Accordingly, the present invention relates to a process for the production of coenzyme Q9, which comprises
[77593] (a) increasing or generating the activity of a NADH dehydrogenase I chain I in the cytosol of a cell of a non-human organism or a part thereof, preferably a microorganism, a plant cell, a plant or a part thereof, as compared to a corresponding non-transformed wild type non-human organism or a part thereof; and
[77594] (b) growing the non-human organism or a part thereof under conditions which permit the production of coenzyme Q9 or a composition comprising coenzyme Q9 in said non-human organism or in the culture medium surrounding said non-human organism.

[77595] Accordingly, the present invention relates to a process for the production of nicotinic acid, which comprises
[77596] (a) increasing or generating the activity of a ATP synthase subunit E in the cytosol of a cell of a non-human organism or a part thereof, preferably a microorganism, a plant cell, a plant or a part thereof, as compared to a corresponding non-transformed wild type non-human organism or a part thereof; and
[77597] (b) growing the non-human organism or a part thereof under conditions which permit the production of nicotinic acid or a composition comprising nicotinic acid in said non-human organism or in the culture medium surrounding said non-human organism.

[77598] Accordingly, the present invention relates to a process for the production of nicotinic acid, which comprises
[77599] (a) increasing or generating the activity of a L-aspartate oxidase in the cytosol of a cell of a non-human organism or a part thereof, preferably a microorganism, a plant cell, a plant or a part thereof, as compared to a corresponding non-transformed wild type non-human organism or a part thereof; and
[77600] (b) growing the non-human organism or a part thereof under conditions which permit the production of nicotinic acid or a composition comprising nicotinic acid in said non-human organism or in the culture medium surrounding said non-human organism.

[77601] Accordingly, the present invention relates to a process for the production of coenzyme Q9, which comprises
[77602] (a) increasing or generating the activity of a b2739-protein in the cytosol of a cell of a non-human organism or a part thereof, preferably a microorganism, a plant cell, a plant or a part thereof, as compared to a corresponding non-transformed wild type non-human organism or a part thereof; and
[77603] (b) growing the non-human organism or a part thereof under conditions which permit the production of coenzyme Q9 or a composition comprising coenzyme Q9 in said non-human organism or in the culture medium surrounding said non-human organism.

[77604] Accordingly, the present invention relates to a process for the production of coenzyme Q9, which comprises
[77605] (a) increasing or generating the activity of a 2-C-methyl-D-erythritol 4-phosphate cytidylyltransferase in the cytosol of a cell of a non-human organism or a part thereof, preferably a microorganism, a plant cell, a plant or a part thereof, as compared to a corresponding non-transformed wild type non-human organism or a part thereof; and
[77606] (b) growing the non-human organism or a part thereof under conditions which permit the production of coenzyme Q9 or a composition comprising coenzyme Q9 in said non-human organism or in the culture medium surrounding said non-human organism.

[77607] Accordingly, the present invention relates to a process for the production of lipoic acid, which comprises
[77608] (a) increasing or generating the activity of a phosphoadenosine phosphosulfate reductase in the cytosol of a cell of a non-human organism or a part thereof, preferably a microorganism, a plant cell, a plant or a part thereof, as compared to a corresponding non-transformed wild type non-human organism or a part thereof; and
[77609] (b) growing the non-human organism or a part thereof under conditions which permit the production of lipoic acid or a composition comprising lipoic acid in said non-human organism or in the culture medium surrounding said non-human organism.

[77610] Accordingly, the present invention relates to a process for the production of coenzyme Q9, which comprises
[77611] (a) increasing or generating the activity of a b2849-protein in the cytosol of a cell of a non-human organism or a part thereof, preferably a microorganism, a plant cell, a plant or a part thereof, as compared to a corresponding non-transformed wild type non-human organism or a part thereof; and
[77612] (b) growing the non-human organism or a part thereof under conditions which permit the production of coenzyme Q9 or a composition comprising coenzyme Q9 in said non-human organism or in the culture medium surrounding said non-human organism.

[77613] Accordingly, the present invention relates to a process for the production of coenzyme Q9, which comprises
[77614] (a) increasing or generating the activity of a methyltransferase in the cytosol of a cell of a non-human organism or a part thereof, preferably a microorganism, a plant cell, a plant or a part thereof, as compared to a corresponding non-transformed wild type non-human organism or a part thereof; and
[77615] (b) growing the non-human organism or a part thereof under conditions which permit the production of coenzyme Q9 or a composition comprising coenzyme Q9 in said non-human organism or in the culture medium surrounding said non-human organism.

[77616] Accordingly, the present invention relates to a process for the production of coenzyme Q10, which comprises
[77617] (a) increasing or generating the activity of a Ribose import ATP-binding protein in the cytosol of a cell of a non-human organism or a part thereof, preferably a microorganism, a plant cell, a plant or a part thereof, as compared to a corresponding non-transformed wild type non-human organism or a part thereof; and
[77618] (b) growing the non-human organism or a part thereof under conditions which permit the production of coenzyme Q10 or a composition comprising coenzyme Q10 in said non-human organism or in the culture medium surrounding said non-human organism.

[77619] Accordingly, the present invention relates to a process for the production of coenzyme Q9, which comprises
[77620] (a) increasing or generating the activity of a b3817-protein in the cytosol of a cell of a non-human organism or a part thereof, preferably a microorganism, a plant cell, a plant or a part thereof, as compared to a corresponding non-transformed wild type non-human organism or a part thereof; and
[77621] (b) growing the non-human organism or a part thereof under conditions which permit the production of coenzyme Q9 or a composition comprising coenzyme Q9 in said non-human organism or in the culture medium surrounding said non-human organism.

[77622] Accordingly, the present invention relates to a process for the production of coenzyme Q9, which comprises
[77623] (a) increasing or generating the activity of a glycerol dehydrogenase in the cytosol of a cell of a non-human organism or a part thereof, preferably a microorganism, a plant cell, a plant or a part thereof, as compared to a corresponding non-transformed wild type non-human organism or a part thereof; and
[77624] (b) growing the non-human organism or a part thereof under conditions which permit the production of coenzyme Q9 or a composition comprising coenzyme Q9 in said non-human organism or in the culture medium surrounding said non-human organism.

[77625] Accordingly, the present invention relates to a process for the production of coenzyme Q10, which comprises
[77626] (a) increasing or generating the activity of a N-acetyl-gamma-glutamylphosphate reductase in the cytosol of a cell of a non-human organism or a part thereof, preferably a microorganism, a plant cell, a plant or a part thereof, as compared to a corresponding non-transformed wild type non-human organism or a part thereof; and
[77627] (b) growing the non-human organism or a part thereof under conditions which permit the production of coenzyme Q10 or a composition comprising coenzyme Q10 in said non-human organism or in the culture medium surrounding said non-human organism.

[77628] Accordingly, the present invention relates to a process for the production of coenzyme Q9, which comprises
[77629] (a) increasing or generating the activity of a b4029-protein in the cytosol of a cell of a non-human organism or a part thereof, preferably a microorganism, a plant cell, a plant or a part thereof, as compared to a corresponding non-transformed wild type non-human organism or a part thereof; and
[77630] (b) growing the non-human organism or a part thereof under conditions which permit the production of coenzyme Q9 or a composition comprising coenzyme Q9 in said non-human organism or in the culture medium surrounding said non-human organism.

[77631] Accordingly, the present invention relates to a process for the production of coenzyme Q9, which comprises
[77632] (a) increasing or generating the activity of a acetyltransferase in the cytosol of a cell of a non-human organism or a part thereof, preferably a microorganism, a plant cell, a plant or a part thereof, as compared to a corresponding non-transformed wild type non-human organism or a part thereof; and
[77633] (b) growing the non-human organism or a part thereof under conditions which permit the production of coenzyme Q9 or a composition comprising coenzyme Q9 in said non-human organism or in the culture medium surrounding said non-human organism.

[77634] Accordingly, the present invention relates to a process for the production of coenzyme Q9, which comprises
[77635] (a) increasing or generating the activity of a gluconate transport system permease 3 in the cytosol of a cell of a non-human organism or a part thereof, preferably a microorganism, a plant cell, a plant or a part thereof, as compared to a corresponding non-transformed wild type non-human organism or a part thereof; and
[77636] (b) growing the non-human organism or a part thereof under conditions which permit the production of coenzyme Q9 or a composition comprising coenzyme Q9 in said non-human organism or in the culture medium surrounding said non-human organism.

[77637] Accordingly, the present invention relates to a process for the production of coenzyme Q10, which comprises
[77638] (a) increasing or generating the activity of a transcription factor in the cytosol of a cell of a non-human organism or a part thereof, preferably a microorganism, a plant cell, a plant or a part thereof, as compared to a corresponding non-transformed wild type non-human organism or a part thereof; and
[77639] (b) growing the non-human organism or a part thereof under conditions which permit the production of coenzyme Q10 or a composition comprising coenzyme Q10 in said non-human organism or in the culture medium surrounding said non-human organism.

[77640] Accordingly, the present invention relates to a process for the production of coenzyme Q9, which comprises
[77641] (a) increasing or generating the activity of a transcription factor in the cytosol of a cell of a non-human organism or a part thereof, preferably a microorganism, a plant cell, a plant or a part thereof, as compared to a corresponding non-transformed wild type non-human organism or a part thereof; and
[77642] (b) growing the non-human organism or a part thereof under conditions which permit the production of coenzyme Q9 or a composition comprising coenzyme Q9 in said non-human organism or in the culture medium surrounding said non-human organism.

[77643] Accordingly, the present invention relates to a process for the production of coenzyme Q10, which comprises
[77644] (a) increasing or generating the activity of a transcription factor in the cytosol of a cell of a non-human organism or a part thereof, preferably a microorganism, a plant cell, a plant or a part thereof, as compared to a corresponding non-transformed wild type non-human organism or a part thereof; and
[77645] (b) growing the non-human organism or a part thereof under conditions which permit the production of coenzyme Q10 or a composition comprising coenzyme Q10 in said non-human organism or in the culture medium surrounding said non-human organism.

[77646] Accordingly, the present invention relates to a process for the production of coenzyme Q10, which comprises
[77647] (a) increasing or generating the activity of a flavodoxin in the cytosol of a cell of a non-human organism or a part thereof, preferably a microorganism, a plant cell, a plant or a part thereof, as compared to a corresponding non-transformed wild type non-human organism or a part thereof; and
[77648] (b) growing the non-human organism or a part thereof under conditions which permit the production of coenzyme Q10 or a composition comprising coenzyme Q10 in said non-human organism or in the culture medium surrounding said non-human organism.

[77649] Accordingly, the present invention relates to a process for the production of coenzyme Q10, which comprises
[77650] (a) increasing or generating the activity of a uroporphyrin-III C-methyltransferase in the cytosol of a cell of a non-human organism or a part thereof, preferably a microorganism, a plant cell, a plant or a part thereof, as compared to a corresponding non-transformed wild type non-human organism or a part thereof; and
[77651] (b) growing the non-human organism or a part thereof under conditions which permit the production of coenzyme Q10 or a composition comprising coenzyme Q10 in said non-human organism or in the culture medium surrounding said non-human organism.

[77652] Accordingly, the present invention relates to a process for the production of coenzyme Q10, which comprises
[77653] (a) increasing or generating the activity of a sll1761-protein in the cytosol of a cell of a non-human organism or a part thereof, preferably a microorganism, a plant cell, a plant or a part thereof, as compared to a corresponding non-transformed wild type non-human organism or a part thereof; and
[77654] (b) growing the non-human organism or a part thereof under conditions which permit the production of coenzyme Q10 or a composition comprising coenzyme Q10 in said non-human organism or in the culture medium surrounding said non-human organism.

[77655] Accordingly, the present invention relates to a process for the production of coenzyme Q9, which comprises
[77656] (a) increasing or generating the activity of a sll1761-protein in the cytosol of a cell of a non-human organism or a part thereof, preferably a microorganism, a plant cell, a plant or a part thereof, as compared to a corresponding non-transformed wild type non-human organism or a part thereof; and
[77657] (b) growing the non-human organism or a part thereof under conditions which permit the production of coenzyme Q9 or a composition comprising coenzyme Q9 in said non-human organism or in the culture medium surrounding said non-human organism.

[77658] Accordingly, the present invention relates to a process for the production of coenzyme Q9, which comprises
[77659] (a) increasing or generating the activity of a cation-transporting ATPase in the cytosol of a cell of a non-human organism or a part thereof, preferably a microorganism, a plant cell, a plant or a part thereof, as compared to a corresponding non-transformed wild type non-human organism or a part thereof; and
[77660] (b) growing the non-human organism or a part thereof under conditions which permit the production of coenzyme Q9 or a composition comprising coenzyme Q9 in said non-human organism or in the culture medium surrounding said non-human organism.

[77661] Accordingly, the present invention relates to a process for the production of coenzyme Q9, which comprises
[77662] (a) increasing or generating the activity of a oxidoreductase in the cytosol of a cell of a non-human organism or a part thereof, preferably a microorganism, a plant cell, a plant or a part thereof, as compared to a corresponding non-transformed wild type non-human organism or a part thereof; and
[77663] (b) growing the non-human organism or a part thereof under conditions which permit the production of coenzyme Q9 or a composition comprising coenzyme Q9 in said non-human organism or in the culture medium surrounding said non-human organism.

[77664] Accordingly, the present invention relates to a process for the production of coenzyme Q10, which comprises
[77665] (a) increasing or generating the activity of a malate dehydrogenase in the cytosol of a cell of a non-human organism or a part thereof, preferably a microorganism, a plant cell, a plant or a part thereof, as compared to a corresponding non-transformed wild type non-human organism or a part thereof; and
[77666] (b) growing the non-human organism or a part thereof under conditions which permit the production of coenzyme Q10 or a composition comprising coenzyme Q10 in said non-human organism or in the culture medium surrounding said non-human organism.

[77667] Accordingly, the present invention relates to a process for the production of coenzyme Q9, which comprises
[77668] (a) increasing or generating the activity of a malate dehydrogenase in the cytosol of a cell of a non-human organism or a part thereof, preferably a microorganism, a plant cell, a plant or a part thereof, as compared to a corresponding non-transformed wild type non-human organism or a part thereof; and
[77669] (b) growing the non-human organism or a part thereof under conditions which permit the production of coenzyme Q9 or a composition comprising coenzyme Q9 in said non-human organism or in the culture medium surrounding said non-human organism.

[77670] Accordingly, the present invention relates to a process for the production of coenzyme Q9, which comprises
[77671] (a) increasing or generating the activity of a permease protein of ABC transporter in the cytosol of a cell of a non-human organism or a part thereof, preferably a microorganism, a plant cell, a plant or a part thereof, as compared to a corresponding non-transformed wild type non-human organism or a part thereof; and
[77672] (b) growing the non-human organism or a part thereof under conditions which permit the production of coenzyme Q9 or a composition comprising coenzyme Q9 in said non-human organism or in the culture medium surrounding said non-human organism.

[77673] Accordingly, the present invention relates to a process for the production of coenzyme Q9, which comprises
[77674] (a) increasing or generating the activity of a slr1107-protein in the cytosol of a cell of a non-human organism or a part thereof, preferably a microorganism, a plant cell, a plant or a part thereof, as compared to a corresponding non-transformed wild type non-human organism or a part thereof; and
[77675] (b) growing the non-human organism or a part thereof under conditions which permit the production of coenzyme Q9 or a composition comprising coenzyme Q9 in said non-human organism or in the culture medium surrounding said non-human organism.

[77676] Accordingly, the present invention relates to a process for the production of coenzyme Q9, which comprises
[77677] (a) increasing or generating the activity of a fatty acid desaturase in the cytosol of a cell of a non-human organism or a part thereof, preferably a microorganism, a plant cell, a plant or a part thereof, as compared to a corresponding non-transformed wild type non-human organism or a part thereof; and
[77678] (b) growing the non-human organism or a part thereof under conditions which permit the production of coenzyme Q9 or a composition comprising coenzyme Q9 in said non-human organism or in the culture medium surrounding said non-human organism.

[77679] Accordingly, the present invention relates to a process for the production of coenzyme Q9, which comprises
[77680] (a) increasing or generating the activity of a photosystem II protein in the cytosol of a cell of a non-human organism or a part thereof, preferably a microorganism, a plant cell, a plant or a part thereof, as compared to a corresponding non-transformed wild type non-human organism or a part thereof; and
[77681] (b) growing the non-human organism or a part thereof under conditions which permit the production of coenzyme Q9 or a composition comprising coenzyme Q9 in said non-human organism or in the culture medium surrounding said non-human organism.

[77682] Accordingly, the present invention relates to a process for the production of coenzyme Q10, which comprises
[77683] (a) increasing or generating the activity of a glutamine amidotransferase in the cytosol of a cell of a non-human organism or a part thereof, preferably a microorganism, a plant cell, a plant or a part thereof, as compared to a corresponding non-transformed wild type non-human organism or a part thereof; and
[77684] (b) growing the non-human organism or a part thereof under conditions which permit the production of coenzyme Q10 or a composition comprising coenzyme Q10 in said non-human organism or in the culture medium surrounding said non-human organism.

[77685] Accordingly, the present invention relates to a process for the production of coenzyme Q10, which comprises
[77686] (a) increasing or generating the activity of a glycerol-3-phosphate dehydrogenase in the cytosol of a cell of a non-human organism or a part thereof, preferably a microorganism, a plant cell, a plant or a part thereof, as compared to a corresponding non-transformed wild type non-human organism or a part thereof; and
[77687] (b) growing the non-human organism or a part thereof under conditions which permit the production of coenzyme Q10 or a composition comprising coenzyme Q10 in said non-human organism or in the culture medium surrounding said non-human organism.

[77688] Accordingly, the present invention relates to a process for the production of coenzyme Q9, which comprises
[77689] (a) increasing or generating the activity of a glycerol-3-phosphate dehydrogenase in the cytosol of a cell of a non-human organism or a part thereof, preferably a microorganism, a plant cell, a plant or a part thereof, as compared to a corresponding non-transformed wild type non-human organism or a part thereof; and
[77690] (b) growing the non-human organism or a part thereof under conditions which permit the production of coenzyme Q9 or a composition comprising coenzyme Q9 in said non-human organism or in the culture medium surrounding said non-human organism.

[77691] Accordingly, the present invention relates to a process for the production of coenzyme Q9, which comprises
[77692] (a) increasing or generating the activity of a Sec-independent protein translocase subunit in the cytosol of a cell of a non-human organism or a part thereof, preferably a microorganism, a plant cell, a plant or a part thereof, as compared to a corresponding non-transformed wild type non-human organism or a part thereof; and
[77693] (b) growing the non-human organism or a part thereof under conditions which permit the production of coenzyme Q9 or a composition comprising coenzyme Q9 in said non-human organism or in the culture medium surrounding said non-human organism.

[77694] Accordingly, the present invention relates to a process for the production of coenzyme Q10, which comprises
[77695] (a) increasing or generating the activity of a amino acid ABC transporter permease protein in the cytosol of a cell of a non-human organism or a part thereof, preferably a microorganism, a plant cell, a plant or a part thereof, as compared to a corresponding non-transformed wild type non-human organism or a part thereof; and
[77696] (b) growing the non-human organism or a part thereof under conditions which permit the production of coenzyme Q10 or a composition comprising coenzyme Q10 in said non-human organism or in the culture medium surrounding said non-human organism.

[77697] Accordingly, the present invention relates to a process for the production of coenzyme Q9, which comprises
[77698] (a) increasing or generating the activity of a multiple antibiotic resistance protein in the cytosol of a cell of a non-human organism or a part thereof, preferably a microorganism, a plant cell, a plant or a part thereof, as compared to a corresponding non-transformed wild type non-human organism or a part thereof; and
[77699] (b) growing the non-human organism or a part thereof under conditions which permit the production of coenzyme Q9 or a composition comprising coenzyme Q9 in said non-human organism or in the culture medium surrounding said non-human organism.

[77700] Accordingly, the present invention relates to a process for the production of coenzyme Q9, which comprises
[77701] (a) increasing or generating the activity of a TTC1386-protein in the cytosol of a cell of a non-human organism or a part thereof, preferably a microorganism, a plant cell, a plant or a part thereof, as compared to a corresponding non-transformed wild type non-human organism or a part thereof; and
[77702] (b) growing the non-human organism or a part thereof under conditions which permit the production of coenzyme Q9 or a composition comprising coenzyme Q9 in said non-human organism or in the culture medium surrounding said non-human organism.

[77703] Accordingly, the present invention relates to a process for the production of coenzyme Q9, which comprises
[77704] (a) increasing or generating the activity of a cell division control protein in the cytosol of a cell of a non-human organism or a part thereof, preferably a microorganism, a plant cell, a plant or a part thereof, as compared to a corresponding non-transformed wild type non-human organism or a part thereof; and
[77705] (b) growing the non-human organism or a part thereof under conditions which permit the production of coenzyme Q9 or a composition comprising coenzyme Q9 in said non-human organism or in the culture medium surrounding said non-human organism.

[77706] Accordingly, the present invention relates to a process for the production of coenzyme Q10, which comprises
[77707] (a) increasing or generating the activity of a ycl027w-protein in the cytosol of a cell of a non-human organism or a part thereof, preferably a microorganism, a plant cell, a plant or a part thereof, as compared to a corresponding non-transformed wild type non-human organism or a part thereof; and
[77708] (b) growing the non-human organism or a part thereof under conditions which permit the production of coenzyme Q10 or a composition comprising coenzyme Q10 in said non-human organism or in the culture medium surrounding said non-human organism.

[77709] Accordingly, the present invention relates to a process for the production of coenzyme Q9, which comprises
[77710] (a) increasing or generating the activity of a protein kinase in the cytosol of a cell of a non-human organism or a part thereof, preferably a microorganism, a plant cell, a plant or a part thereof, as compared to a corresponding non-transformed wild type non-human organism or a part thereof; and
[77711] (b) growing the non-human organism or a part thereof under conditions which permit the production of coenzyme Q9 or a composition comprising coenzyme Q9 in said non-human organism or in the culture medium surrounding said non-human organism.

[77712] Accordingly, the present invention relates to a process for the production of coenzyme Q9, which comprises
[77713] (a) increasing or generating the activity of a halotolerance protein in the cytosol of a cell of a non-human organism or a part thereof, preferably a microorganism, a plant cell, a plant or a part thereof, as compared to a corresponding non-transformed wild type non-human organism or a part thereof; and
[77714] (b) growing the non-human organism or a part thereof under conditions which permit the production of coenzyme Q9 or a composition comprising coenzyme Q9 in said non-human organism or in the culture medium surrounding said non-human organism.

[77715] Accordingly, the present invention relates to a process for the production of nicotinic acid, which comprises
[77716] (a) increasing or generating the activity of a lipase in the cytosol of a cell of a non-human organism or a part thereof, preferably a microorganism, a plant cell, a plant or a part thereof, as compared to a corresponding non-transformed wild type non-human organism or a part thereof; and
[77717] (b) growing the non-human organism or a part thereof under conditions which permit the production of nicotinic acid or a composition comprising nicotinic acid in said non-human organism or in the culture medium surrounding said non-human organism.

[77718] Accordingly, the present invention relates to a process for the production of coenzyme Q10, which comprises
[77719] (a) increasing or generating the activity of a heat shock protein Hsp40 in the cytosol of a cell of a non-human organism or a part thereof, preferably a microorganism, a plant cell, a plant or a part thereof, as compared to a corresponding non-transformed wild type non-human organism or a part thereof; and
[77720] (b) growing the non-human organism or a part thereof under conditions which permit the production of coenzyme Q10 or a composition comprising coenzyme Q10 in said non-human organism or in the culture medium surrounding said non-human organism.

[77721] Accordingly, the present invention relates to a process for the production of coenzyme Q9, which comprises
[77722] (a) increasing or generating the activity of a heat shock protein Hsp40 in the cytosol of a cell of a non-human organism or a part thereof, preferably a microorganism, a plant cell, a plant or a part thereof, as compared to a corresponding non-transformed wild type non-human organism or a part thereof; and
[77723] (b) growing the non-human organism or a part thereof under conditions which permit the production of coenzyme Q9 or a composition comprising coenzyme Q9 in said non-human organism or in the culture medium surrounding said non-human organism.

[77724] Accordingly, the present invention relates to a process for the production of coenzyme Q9, which comprises
[77725] (a) increasing or generating the activity of a histone acetyltransferase in the cytosol of a cell of a non-human organism or a part thereof, preferably a microorganism, a plant cell, a plant or a part thereof, as compared to a corresponding non-transformed wild type non-human organism or a part thereof; and
[77726] (b) growing the non-human organism or a part thereof under conditions which permit the production of coenzyme Q9 or a composition comprising coenzyme Q9 in said non-human organism or in the culture medium surrounding said non-human organism.

[77727] Accordingly, the present invention relates to a process for the production of coenzyme Q10, which comprises
[77728] (a) increasing or generating the activity of a mitogen-activated protein kinase in the cytosol of a cell of a non-human organism or a part thereof, preferably a microorganism, a plant cell, a plant or a part thereof, as compared to a corresponding non-transformed wild type non-human organism or a part thereof; and
[77729] (b) growing the non-human organism or a part thereof under conditions which permit the production of coenzyme Q10 or a composition comprising coenzyme Q10 in said non-human organism or in the culture medium surrounding said non-human organism.

[77730] Accordingly, the present invention relates to a process for the production of coenzyme Q10, which comprises
[77731] (a) increasing or generating the activity of a phosphopantothenoylcysteine decarboxylase in the cytosol of a cell of a non-human organism or a part thereof, preferably a microorganism, a plant cell, a plant or a part thereof, as compared to a corresponding non-transformed wild type non-human organism or a part thereof; and
[77732] (b) growing the non-human organism or a part thereof under conditions which permit the production of coenzyme Q10 or a composition comprising coenzyme Q10 in said non-human organism or in the culture medium surrounding said non-human organism.

[77733] Accordingly, the present invention relates to a process for the production of coenzyme Q10, which comprises
[77734] (a) increasing or generating the activity of a polypeptide comprising a polypeptide as depicted in the respective line in column 5 or 8 of Table II, application no. 16, or a homolog or a fragment thereof, a consensus sequence or at least one polypeptide motif as depicted in the respective line in column 8 of Table IV, application no. 16, whereby the respective line disclose in column 7 the fine chemical coenzyme Q10; or
[77735] increasing or generating the activity of an expression product of one or more nucleic acid molecule(s) comprising a polynucleotide as depicted in the respective line in column 5 or 8 of Table I, application no. 16, preferably the coding region thereof, or a homolog or a fragment thereof, whereby the respective line disclose in column 7 the fine chemical coenzyme Q10;
[77736] in the cytosol of a cell of a non-human organism or a part thereof; preferably a microorganism, a plant cell, a plant or a part thereof, as compared to a corresponding non-transformed wild type non-human organism or a part thereof; and
[77737] (b) growing the non-human organism under conditions which permit the production of coenzyme Q10, or a composition comprising coenzyme Q10 in said non-human organism or in the culture medium surrounding said non-human organism.

[77738] Accordingly, the present invention relates to a process for the production of coenzyme Q9, which comprises
[77739] (a) increasing or generating the activity of a polypeptide comprising a polypeptide as depicted in the respective line in column 5 or 8 of Table II, application no. 16, or a homolog or a fragment thereof, a consensus sequence or at least one polypeptide motif as depicted in the respective line in column 8 of Table IV, application no. 16, whereby the respective line disclose in column 7 the fine chemical coenzyme Q9; or
[77740] increasing or generating the activity of an expression product of one or more nucleic acid molecule(s) comprising a polynucleotide as depicted in the respective line in column 5 or 8 of Table I, application no. 16, preferably the coding region thereof, or a homolog or a fragment thereof, whereby the respective line disclose in column 7 the fine chemical coenzyme Q9;
[77741] in the cytosol of a cell of a non-human organism or a part thereof; preferably a microorganism, a plant cell, a plant or a part thereof, as compared to a corresponding non-transformed wild type non-human organism or a part thereof; and
[77742] (b) growing the non-human organism under conditions which permit the production of coenzyme Q9, or a composition comprising coenzyme Q9 in said non-human organism or in the culture medium surrounding said non-human organism.

[77743] Accordingly, the present invention relates to a process for the production of lipoic acid, which comprises
[77744] (a) increasing or generating the activity of a polypeptide comprising a polypeptide as depicted in the respective line in column 5 or 8 of Table II, application no. 16, or a homolog or a fragment thereof, a consensus sequence or at least one polypeptide motif as depicted in the respective line in column 8 of Table IV, application no. 16, whereby the respective line disclose in column 7 the fine chemical lipoic acid; or
[77745] increasing or generating the activity of an expression product of one or more nucleic acid molecule(s) comprising a polynucleotide as depicted in the respective line in column 5 or 8 of Table I, application no. 16, preferably the coding region thereof, or a homolog or a fragment thereof, whereby the respective line disclose in column 7 the fine chemical lipoic acid;
[77746] in the cytosol of a cell of a non-human organism or a part thereof; preferably a microorganism, a plant cell, a plant or a part thereof, as compared to a corresponding non-transformed wild type non-human organism or a part thereof; and
[77747] (b) growing the non-human organism under conditions which permit the production of lipoic acid, or a composition comprising lipoic acid in said non-human organism or in the culture medium surrounding said non-human organism.

[77748] Accordingly, the present invention relates to a process for the production of nicotinic acid, which comprises
[77749] (a) increasing or generating the activity of a polypeptide comprising a polypeptide as depicted in the respective line in column 5 or 8 of Table II, application no. 16, or a homolog or a fragment thereof, a consensus sequence or at least one polypeptide motif as depicted in the respective line in column 8 of Table IV, application no. 16, whereby the respective line disclose in column 7 the fine chemical nicotinic acid; or
[77750] increasing or generating the activity of an expression product of one or more nucleic acid molecule(s) comprising a polynucleotide as depicted in the respective line in column 5 or 8 of Table I, application no. 16, preferably the coding region thereof, or a homolog or a fragment thereof, whereby the respective line disclose in column 7 the fine chemical nicotinic acid;
[77751] in the cytosol of a cell of a non-human organism or a part thereof; preferably a microorganism, a plant cell, a plant or a part thereof, as compared to a corresponding non-transformed wild type non-human organism or a part thereof; and
[77752] (b) growing the non-human organism under conditions which permit the production of nicotinic acid, or a composition comprising nicotinic acid in said non-human organism or in the culture medium surrounding said non-human organism.

[77753] In a further embodiment the activity of the polypeptide comprising a polypeptide as depicted in the respective line in column 5 or 8 of Table II, application no. 16, or a homolog or a fragment thereof, a consensus sequence or at least one polypeptide motif as depicted in the respective line in column 8 of Table IV, application no. 16, is increased or generated non-targeted in the above-mentioned process in a microorganism or plant or a part thereof.

[77754] In a further embodiment said polypeptide has the activity of the respective polypeptide represented by a protein comprising a polypeptide as depicted in the respective line in column 5 of Table II, application no. 16.

[77755] In a further embodiment the activity of the expression product of one or more nucleic acid molecule(s) comprising a polynucleotide as depicted in the respective line in column 5 or 8 of Table I, application no. 16, preferably the coding region thereof, or a homolog or a fragment thereof, is increased or generated non-targeted in the above-mentioned process in a microorganism or plant or a part thereof.

[77756] In a further embodiment the activity of the polypeptide comprising a polypeptide as depicted in the respective line in column 5 or 8 of Table II, application no. 16, or a homolog or a fragment thereof, a consensus sequence or at least one polypeptide motif as depicted in the respective line in column 8 of Table IV, application no. 16, is increased or generated in the above-mentioned process in an organelle preferably in plastids or mitochondria, especially in plastids, of a microorganism or plant.

[77757] In a further embodiment said polypeptide has the activity of the respective polypeptide represented by a protein comprising a polypeptide as depicted in the respective line in column 5 of Table II, application no. 16.

[77758] In a further embodiment the activity of the expression product of one or more nucleic acid molecule(s) comprising a polynucleotide as depicted in the respective line in column 5 or 8 of Table I, application no. 16, preferably the coding region thereof, or a homolog or a fragment thereof, is increased or generated in the above-mentioned process in an organelle, preferably in plasids or mitochondria, especially in plastids, of a microorganism or plant.

[77759] In a further embodiment the activity of the polypeptide comprising a polypeptide as depicted in the respective line in column 5 or 8 of Table II, application no. 16, or a homolog or a fragment thereof, a consensus sequence or at least one polypeptide motif as depicted in the respective line in column 8 of Table IV, application no. 16, is increased or generated in the above-mentioned process in the cyctosol of a cell, of a microorganism or plant.

[77760] In a further embodiment said polypeptide has the activity of the respective polypeptide represented by a protein comprising a polypeptide as depicted in the respective line in column 5 of Table II, application no. 16.

[77761] In a further embodiment the activity of the expression product of one or more nucleic acid molecule(s) comprising a polynucleotide as depicted in the respective line in column 5 or 8 of Table I, application no. 16, preferably the coding region thereof, or a homolog or a fragment thereof, is increased or generated in the above-mentioned process in the cytosol of a cell, of a microorganism or plant.

[77762] [0039.1.7.16] to [0066.1.7.16] for the disclosure of these paragraphs see [0039.1.7.7] to [0066.1.7.7] above

[77763] As mentioned above the nucleic acid sequences coding for the proteins as shown in Table II, application no. 16, column 5 or 8, or homologs or fragments thereof, are joined to a nucleic acid sequence encoding a plastidic transit peptide, e.g, if for the nucleic acid molecule in Table I, column 6 the term “plastidic” is indicated. This nucleic acid sequence encoding a transit peptide ensures transport of the protein to the organelle. The nucleic acid sequence of the gene to be expressed and the nucleic acid sequence encoding the transit peptide are operably linked. Therefore the transit peptide coding sequence is fused in frame to the nucleic acid sequence coding for proteins as shown in Table II, application no. 16, column 5 or 8, or homologs or fragments thereof, e.g., if for the nucleic acid molecule in Table I, column 6 the term “plastidic” is indicated.

[77764] [0068.1.7.16] to [0072.1.7.16] for the disclosure of these paragraphs see [0068.1.7.7] to [0072.1.7.7] above

[77765] As mentioned above the nucleic acid sequences coding for the proteins as shown in the respective line in Table II, application no. 16, column 5 or 8, or homologs or fragments thereof, are joined to a nucleic acid sequence encoding a mitochondric transit peptide, e.g., if for the respective nucleic acid molecule in Table I, column 6 the term “mitochondric” is indicated. This nucleic acid sequence encoding a transit peptide ensures transport of the protein to the organelle. The nucleic acid sequence of the gene to be expressed and the nucleic acid sequence encoding the transit peptide are operably linked. Therefore the transit peptide encoding sequence is fused in frame to the nucleic acid sequence coding for proteins as shown in the respective line in Table II, application no. 16, column 5 or 8, or homologs or fragments thereof, e.g., if for the nucleic acid molecule in the respective line in Table I, column 6 the term “mitochondric” is indicated.

[77766] for the disclosure of this paragraph see [0074.1.7.7] above

[77767] for the disclosure of this paragraph see [0075.1.7.7] above

[77768] Nucleic acid sequences coding for the transit peptides may be chemically synthesized either in part or wholly according to structure of transit peptide sequences disclosed in the prior art. Said natural or chemically synthesized sequences can be directly linked to the sequences encoding the mature protein or via a linker nucleic acid sequence, which may be typically less than 500 base pairs, preferably less than 450, 400, 350, 300, 250 or 200 base pairs, more preferably less than 150, 100, 90, 80, 70, 60, 50, 40 or 30 base pairs and most preferably less than 25, 20, 15, 12, 9, 6 or 3 base pairs in length and are in frame to the coding sequence. Furthermore favorable nucleic acid sequences encoding transit peptides may comprise sequences derived from more than one biological and/or chemical source and may include a nucleic acid sequence derived from the amino-terminal region of the mature protein, which in its native state is linked to the transit peptide. In a preferred embodiment of the invention said amino-terminal region of the mature protein is typically less than 150 amino acids, preferably less than 140, 130, 120, 110, 100 or 90 amino acids, more preferably less than 80, 70, 60, 50, 40, 35, 30, 25 or 20 amino acids and most preferably less than 19, 18, 17, 16, 15, 14, 13, 12, 11 or 10 amino acids in length. But even shorter or longer stretches are also possible. In addition target sequences, which facilitate the transport of proteins to other cell compartments such as the vacuole, endoplasmic reticulum, golgi complex, glyoxysomes, peroxisomes, mitochondria (in case of a plastidal transit peptide) or plastids, especially chloroplasts (in case of a mitochondric transit peptide) may be also part of the inventive nucleic acid sequence. The proteins translated from said inventive nucleic acid sequences are a kind of fusion proteins that means the nucleic acid sequences encoding the plastidal transit peptide for example the ones shown in Table a, preferably the last one of the Table a are joint to the respective nucleic acid sequences shown in Table I, application no. 16, columns 5 or 8, especially the coding region thereof, or homologs or fragments thereof, in case of nucleic acid sequences being expressed in plastids, and that means the nucleic acid sequences encoding the mitochondric transit peptide for example the ones shown in Table b, preferably the last one of the Table b are joint to the respective nucleic acid sequences shown in Table I, application no. 16, columns 5 or 8, especially the coding region thereof, or homologs or fragments thereof, in case of nucleic acid sequences being expressed in mitochondria. The person skilled in the art is able to join said sequences in a functional manner. Advantageously the transit peptide part is cleaved off from the protein part shown in Table II, application no. 16, columns 5 or 8, or a homolog or fragment thereof, during or after the transport into the organelles, preferably into the plastids or mitochondria, respectively.

[77769] All products of the cleavage of the preferred transit peptide shown in the last line of Table a have preferably the N-terminal amino acid sequences QIA CSS or QIA EFQLTT in front of the start methionine of the respective protein mentioned in Table II, application no. 16, column 5 or 8. or homologs or fragments thereof. Other short amino acid sequences of an range of 1 to 20 amino acids preferable 2 to 15 amino acids, more preferable 3 to 10 amino acids most preferably 4 to 8 amino acids are also possible in front of the start methionine of the protein mentioned in Table II, application no. 16, columns 5 or 8, or homologs or fragments thereof. In case of the amino acid sequence QIA CSS the three amino acids in front of the start methionine are stemming from the LIC (=ligatation independent cloning) cassette. Said short amino acid sequence is preferred in the case of the expression of E. coli genes. In case of the amino acid sequence QIA EFQLTT the six amino acids in front of the start methionine are stemming from the LIC cassette. Said short amino acid sequence is preferred in the case of the expression of S. cerevisiae genes. The skilled worker knowns that other short sequences are also useful in the expression of the respective nucleic acid molecule comprising a polynucleotide as depicted in Table I, application no. 16, column 5 or 8, preferably the coding region thereof, or a homolog or a fragment thereof. Furthermore the skilled worker is aware of the fact that there is not a need for such short sequences in the expression of the genes.

[77770] for the disclosure of this paragraph see [0077.1.7.7] above

[77771] for the disclosure of this paragraph see [0078.1.7.7] above

[77772] Alternatively to the targeting of the respective sequences shown in Table II, application no. 16, columns 5 or 8, or homologs or fragments thereof, preferably of sequences in general encoded in the nucleus with the aid of the targeting sequences mentioned for example in Table a alone, Table b alone, or in combination with other targeting sequences preferably into plastids or mitochondria, respectively, the nucleic acids of the invention can directly be introduced into the plastidal or mitochondrial genome. Therefore in a preferred embodiment the respective nucleic acid sequences shown in the respective line in Table I, application no. 16, columns 5 or 8, preferably the coding region thereof, or homologs or fragments thereof, are directly introduced and expressed in plastids e.g., if for the nucleic acid molecule in the respective line in Table I, column 6, the term “plastidic” is indicated, or are directly introduced and expressed in mitochondria e.g., if for the nucleic acid molecule in the respective line in Table I, column 6 the term “mitochondric” is indicated.

[77773] The term “introduced” in the context of this specification shall mean the insertion of a nucleic acid sequence into the organism by means of a “transfection”, “transduction” or preferably by “transformation”.

[77774] A plastid, such as a chloroplast, or a mitochondrion, has been “transformed” by an exogenous (preferably foreign) nucleic acid sequence if a nucleic acid sequence has been introduced into the plastid or mitochondrion that means that this sequence has crossed the membrane or the membranes of the plastid or of the mitochondrion. The exogenous, preferably foreign, DNA may be integrated (covalently linked) into plastid or mitochondrial DNA making up the genome of the plastid or mitochondrion, or it may remain unintegrated (e.g., by including a chloroplast origin of replication). “Stably” integrated DNA sequences are those, which are inherited through plastid or mitochondrion replication, thereby transferring new plastids or mitochondria, with the features of the integrated DNA sequence to the progeny.

[77775] [0080.1.7.16] to [0083.1.7.16] for the disclosure of these paragraphs see [0080.1.7.7] to [0083.1.7.7] above

[77776] For the process of the present invention it may be of great advantage that by transforming the plastids the intraspecies specific transgene flow is blocked, because a lot of species such as corn, cotton and rice have a strict maternal inheritance of plastids. By placing the respective genes specified in the respective line in Table I, application no. 16, columns 5 or 8, preferably the coding region, or homologs or fragments thereof, e.g. if for the nucleic acid molecule in the respective line in column 6 of Table I the term “plastidic” is indicated, in the plastids of plants, these genes will not be present in the pollen of said plants.

[77777] A further preferred embodiment of the invention relates to the use of so called “chloroplast localization sequences”, in which a first RNA sequence or molecule is capable of transporting or “chaperoning” a second RNA sequence, such as a RNA sequence transcribed from the sequences depicted in the respective line in Table I, application no. 16, columns 5 or 8, preferably the coding region thereof, or a homolog or a fragment thereof, or a sequence encoding a protein, as depicted in the respective line in Table II, application no. 16, columns 5 and 8, or a homolog or a fragment thereof, from an external environment inside a cell or outside a plastid into a chloroplast. In one embodiment the chloroplast localization signal is substantially similar or complementary to a complete or intact viroid sequence. The chloroplast localization signal may be encoded by a DNA sequence, which is transcribed into the chloroplast localization RNA. The term “viroid” refers to a naturally occurring single stranded RNA molecule (Flores, C. R. Acad. Sci. III. 324 (10), 943 (2001)). Viroids usually contain about 200-500 nucleotides and generally exist as circular molecules. Examples of viroids that contain chloroplast localization signals include but are not limited to ASBVd, PLMVd, CChMVd and ELVd. The viroid sequence or a functional part of it can be fused to the sequences depicted in the respective line in Table I, application no. 16, columns 5 or 8, preferably the coding region thereof, or a homolog or a fragment thereof, or a sequence encoding a protein, as depicted in the respective line in Table II, application no. 16, columns 5 or 8, or a homolog or a fragment thereof, in such a manner that the viroid sequence transports a sequence transcribed from a sequence as depicted in the respective line in Table I, application no. 16 columns 5 or 8, preferably the coding region thereof, or a homolog or a fragment thereof, or a sequence encoding a protein as depicted in the respective line in Table II, application no. 16 columns 5 or 8, or a homolog or a fragment thereof, into the chloroplasts, e.g. if for the nucleic acid molecule in column 6 of Table I the term “plastidic” is indicated. A preferred embodiment uses a modified ASBVd (Navarro et al., Virology. 268 (1), 218 (2000)).

[77778] In a further specific embodiment the protein to be expressed in the plastids such as the proteins depicted in the respective line in Table II, application no. 16, columns 5 or 8, or a homolog or a fragment thereof, e.g. if for the nucleic acid molecule in the respective line in column 6 of Table I the term “plastidic” is indicated, are encoded by different nucleic acids. Such a method is disclosed in WO 2004/040973, which shall be incorporated by reference. WO 2004/040973 teaches a method, which relates to the translocation of an RNA corresponding to a gene or gene fragment into the chloroplast by means of a chloroplast localization sequence.

[77779] The genes, which should be expressed in the plant or plant cells, are split into nucleic acid fragments, which are introduced into different compartments in the plant e.g. the nucleus, the plastids and/or mitochondria. Additionally plant cells are described in which the chloroplast contains a ribozyme fused at one end to an RNA encoding a fragment of a protein used in the inventive process such that the ribozyme can trans-splice the translocated fusion RNA to the RNA encoding the gene fragment to form and as the case may be reunite the nucleic acid fragments to an intact mRNA encoding a functional protein for example as disclosed in the respective line in Table II, application no. 16, columns 5 or 8, or a homolog or a fragment thereof.

[77780] In a preferred embodiment of the invention the nucleic acid sequences as shown in the respective line in Table I, application no. 16, columns 5 or 8, preferably the coding region thereof, or homologs or fragments thereof, e.g. if for the nucleic acid molecule in the respective line in column 6 of Table I the term “plastidic” is indicated, used in the inventive process are transformed into plastids, which are metabolically active. Those plastids should preferably maintain at a high copy number in the plant or plant tissue of interest, most preferably the chloroplasts found in green plant tissues, such as leaves or cotyledons or in seeds.

[77781] For a good expression in the plastids the nucleic acid sequences as shown in the respective line in Table I, application no. 16, columns 5 or 8, preferably the coding region thereof, or homologs or fragments thereof, e.g. if for the nucleic acid molecule in the respective line in column 6 of Table I the term “plastidic” is indicated, are introduced into an expression cassette using preferably a promoter and terminater, which are active in plastids preferably a chloroplast promoter. Examples of such promoters include the psbA promoter from the gene from spinach or pea, the rbcL promoter, and the atpB promoter from corn.

[77782] [0089.1.7.16] to [0092.1.7.16] for the disclosure of these paragraphs see [0089.1.7.7] to [0092.1.7.7] above

[77783] Advantageously the process for the production of the fine chemical coenzyme Q10, coenzyme Q9, lipoic acid, and/or nicotinic acid leads to an enhanced production of the respective fine chemical. The terms “enhanced” or “increase” mean at least a 10%, 20%, 30%, 40% or 50%, preferably at least 60%, 70%, 80%, 90% or 100%, more preferably 150%, 200%, 300%, 400% or 500% higher production of the respective fine chemical coenzyme Q10, coenzyme Q9, lipoic acid, and/or nicotinic acid in comparison to the wild-type as defined above, e.g. that means in comparison to a non-human organism without the aforementioned modification of the activity of a protein as shown in the respective line in Table II, application no. 16, column 5 or 8, or a fragment or a homolog thereof. The modification of the activity of a protein as shown in the respective line in Table II, application no. 16, column 5 or 8, or a homolog or a fragment thereof, or their combination can be achieved by joining the protein to a respective transit peptide, e.g. if for the respective encoding nucleic acid molecule in column 6 of Table I the term “plastidic” or “mitochondric” is indicated.

[77784] Surprisingly it was found, that the transgenic expression of a protein as shown in the respective line in Table II, application no. 16, column 5, especially from the Saccaromyces cerevisiae, E. coli, Arabidopsis thaliana, Azotobacter vinelandii, Brassica napus, Glycine max, Oryza sativa, Physcomitrella patens, Synechocystis sp., Thermus thermophilus, Zea mays in a non-human organism, like a plant or a part thereof, such as Arabidopsis thaliana for example, or a microorganism, conferred a production of or an increase in coenzyme Q10, coenzyme Q9, lipoic acid, and/or nicotinic acid,respectively, to the transgenic non-human organism as compared to a corresponding non-transformed wild type.

[77785] In one embodiment the transgenic expression of a protein as shown in the respective line in Table II, application no. 16, column 5 or 8, or a homolog or a fragment thereof, especially from the Saccaromyces cerevisiae, E. coli, Arabidopsis thaliana, Azotobacter vinelandii, Brassica napus, Glycine max, Oryza sativa, Physcomitrella patens, Synechocystis sp., Thermus thermophilus, Zea mays in a non-human organism, like a plant or a part thereof, such as Arabidopsis thaliana for example, or a microorganism, confers a production of or an increase in coenzyme Q10, coenzyme Q9, lipoic acid, and/or nicotinic acid, respectively, to the transgenic non-human organism as compared to a corresponding non-transformed wild type.

[77786] Accordingly, in one embodiment, an increase of coenzyme Q10 in a non-human organism, as compared to a corresponding non-transformed wild type non-human organism, is conferred in the process of the invention, if the activity of a polypeptide showing the activity of a amino acid acetyltransferase, or if the activity of the polypeptide AAC43185, preferably represented by SEQ ID NO. 17357, or a homolog or fragment thereof, or if the activity of a polypeptide encoded by a nucleic acid molecule comprising the nucleic acid SEQ ID NO. 17356, preferably the coding region thereof, or a homolog or fragment thereof, e.g. derived from Arabidopsis thaliana, is increased or generated. For example the activity of a nucleic acid molecule or a polypeptide comprising the nucleic acid, preferably the coding region thereof, or polypeptide or the consensus sequence or the polypeptide motif, as depicted in Table I, II or IV, application No. 16, column 5 or 8 in the respective same line as the nucleic acid molecule SEQ ID NO. 17356 or polypeptide SEQ ID NO. 17357, respectively, or a homolog or a fragment thereof, is increased or generated, or if the activity amino acid acetyltransferase is increased or generated in a non-human organism, like a microorganism or a plant cell, plant or part thereof, especially with plastidic localization, whereby the respective line disclose in column 7 the fine chemical coenzyme Q10. For example, an increase of the coenzyme Q10 of at least 1 percent, particularly in a range of 67 to 296-percent is conferred as compared to a corresponding non-transformed wild type non-human organism.

[77787] Accordingly, in one embodiment, an increase of coenzyme Q9 in a non-human organism, as compared to a corresponding non-transformed wild type non-human organism, is conferred in the process of the invention, if the activity of a polypeptide showing the activity of a transcriptional regulator, or if the activity of the polypeptide At1g43850, preferably represented by SEQ ID NO. 18071, or a homolog or fragment thereof, or if the activity of a polypeptide encoded by a nucleic acid molecule comprising the nucleic acid SEQ ID NO. 18070, preferably the coding region thereof, or a homolog or fragment thereof, e.g. derived from Arabidopsis thaliana, is increased or generated. For example the activity of a nucleic acid molecule or a polypeptide comprising the nucleic acid, preferably the coding region thereof, or polypeptide or the consensus sequence or the polypeptide motif, as depicted in Table I, II or IV, application No. 16, column 5 or 8 in the respective same line as the nucleic acid molecule SEQ ID NO. 18070 or polypeptide SEQ ID NO. 18071, respectively, or a homolog or a fragment thereof, is increased or generated, or if the activity transcriptional regulator is increased or generated in a non-human organism, like a microorganism or a plant cell, plant or part thereof, especially with non-targeted localization, whereby the respective line disclose in column 7 the fine chemical coenzyme Q9. For example, an increase of the coenzyme Q9 of at least 1 percent, particularly in a range of 37 to 123-percent is conferred as compared to a corresponding non-transformed wild type non-human organism.

[77788] Accordingly, in one embodiment, an increase of coenzyme Q9 in a non-human organism, as compared to a corresponding non-transformed wild type non-human organism, is conferred in the process of the invention, if the activity of a polypeptide showing the activity of a At1g47380-protein, or if the activity of the polypeptide At1g47380, preferably represented by SEQ ID NO. 18123, or a homolog or fragment thereof, or if the activity of a polypeptide encoded by a nucleic acid molecule comprising the nucleic acid SEQ ID NO. 18122, preferably the coding region thereof, or a homolog or fragment thereof, e.g. derived from Arabidopsis thaliana, is increased or generated. For example the activity of a nucleic acid molecule or a polypeptide comprising the nucleic acid, preferably the coding region thereof, or polypeptide or the consensus sequence or the polypeptide motif, as depicted in Table I, II or IV, application No. 16, column 5 or 8 in the respective same line as the nucleic acid molecule SEQ ID NO. 18122 or polypeptide SEQ ID NO. 18123, respectively, or a homolog or a fragment thereof, is increased or generated, or if the activity At1g47380-protein is increased or generated in a non-human organism, like a microorganism or a plant cell, plant or part thereof, especially with non-targeted localization, whereby the respective line disclose in column 7 the fine chemical coenzyme Q9. For example, an increase of the coenzyme Q9 of at least 1 percent, particularly in a range of 36 to 98-percent is conferred as compared to a corresponding non-transformed wild type non-human organism.

[77789] Accordingly, in one embodiment, an increase of coenzyme Q9 in a non-human organism, as compared to a corresponding non-transformed wild type non-human organism, is conferred in the process of the invention, if the activity of a polypeptide showing the activity of a protein phosphatase, or if the activity of the polypeptide At1g72770, preferably represented by SEQ ID NO. 19420, or a homolog or fragment thereof, or if the activity of a polypeptide encoded by a nucleic acid molecule comprising the nucleic acid SEQ ID NO. 19419, preferably the coding region thereof, or a homolog or fragment thereof, e.g. derived from Arabidopsis thaliana, is increased or generated. For example the activity of a nucleic acid molecule or a polypeptide comprising the nucleic acid, preferably the coding region thereof, or polypeptide or the consensus sequence or the polypeptide motif, as depicted in Table I, II or IV, application No. 16, column 5 or 8 in the respective same line as the nucleic acid molecule SEQ ID NO. 19419 or polypeptide SEQ ID NO. 19420, respectively, or a homolog or a fragment thereof, is increased or generated, or if the activity protein phosphatase is increased or generated in a non-human organism, like a microorganism or a plant cell, plant or part thereof, especially with non-targeted localization, whereby the respective line disclose in column 7 the fine chemical coenzyme Q9. For example, an increase of the coenzyme Q9 of at least 1 percent, particularly in a range of 52 to 65-percent is conferred as compared to a corresponding non-transformed wild type non-human organism.

[77790] Accordingly, in one embodiment, an increase of coenzyme Q9 in a non-human organism, as compared to a corresponding non-transformed wild type non-human organism, is conferred in the process of the invention, if the activity of a polypeptide showing the activity of a phenylalanine ammonia-lyase, or if the activity of the polypeptide At2g37040, preferably represented by SEQ ID NO. 133043, or a homolog or fragment thereof, or if the activity of a polypeptide encoded by a nucleic acid molecule comprising the nucleic acid SEQ ID NO. 133042, preferably the coding region thereof, or a homolog or fragment thereof, e.g. derived from Arabidopsis thaliana, is increased or generated. For example the activity of a nucleic acid molecule or a polypeptide comprising the nucleic acid, preferably the coding region thereof, or polypeptide or the consensus sequence or the polypeptide motif, as depicted in Table I, II or IV, application No. 16, column 5 or 8 in the respective same line as the nucleic acid molecule SEQ ID NO. 133042 or polypeptide SEQ ID NO. 133043, respectively, or a homolog or a fragment thereof, is increased or generated, or if the activity phenylalanine ammonia-lyase is increased or generated in a non-human organism, like a microorganism or a plant cell, plant or part thereof, especially with non-targeted localization, whereby the respective line disclose in column 7 the fine chemical coenzyme Q9. For example, an increase of the coenzyme Q9 of at least 1 percent, particularly in a range of 39 to 85-percent is conferred as compared to a corresponding non-transformed wild type non-human organism.

[77791] Accordingly, in one embodiment, an increase of coenzyme Q9 in a non-human organism, as compared to a corresponding non-transformed wild type non-human organism, is conferred in the process of the invention, if the activity of a polypeptide showing the activity of a MADS box protein transcription factor, or if the activity of the polypeptide At2g42830, preferably represented by SEQ ID NO. 108728, or a homolog or fragment thereof, or if the activity of a polypeptide encoded by a nucleic acid molecule comprising the nucleic acid SEQ ID NO. 108727, preferably the coding region thereof, or a homolog or fragment thereof, e.g. derived from Arabidopsis thaliana, is increased or generated. For example the activity of a nucleic acid molecule or a polypeptide comprising the nucleic acid, preferably the coding region thereof, or polypeptide or the consensus sequence or the polypeptide motif, as depicted in Table I, II or IV, application No. 16, column 5 or 8 in the respective same line as the nucleic acid molecule SEQ ID NO. 108727 or polypeptide SEQ ID NO. 108728, respectively, or a homolog or a fragment thereof, is increased or generated, or if the activity MADS box protein transcription factor is increased or generated in a non-human organism, like a microorganism or a plant cell, plant or part thereof, especially with non-targeted localization, whereby the respective line disclose in column 7 the fine chemical coenzyme Q9. For example, an increase of the coenzyme Q9 of at least 1 percent, particularly in a range of 37 to 91-percent is conferred as compared to a corresponding non-transformed wild type non-human organism.

[77792] Accordingly, in one embodiment, an increase of coenzyme Q10 in a non-human organism, as compared to a corresponding non-transformed wild type non-human organism, is conferred in the process of the invention, if the activity of a polypeptide showing the activity of a glutaredoxin, or if the activity of the polypeptide At2g47880, preferably represented by SEQ ID NO. 21160, or a homolog or fragment thereof, or if the activity of a polypeptide encoded by a nucleic acid molecule comprising the nucleic acid SEQ ID NO. 21159, preferably the coding region thereof, or a homolog or fragment thereof, e.g. derived from Arabidopsis thaliana, is increased or generated. For example the activity of a nucleic acid molecule or a polypeptide comprising the nucleic acid, preferably the coding region thereof, or polypeptide or the consensus sequence or the polypeptide motif, as depicted in Table I, II or IV, application No. 16, column 5 or 8 in the respective same line as the nucleic acid molecule SEQ ID NO. 21159 or polypeptide SEQ ID NO. 21160, respectively, or a homolog or a fragment thereof, is increased or generated, or if the activity glutaredoxin is increased or generated in a non-human organism, like a microorganism or a plant cell, plant or part thereof, especially with non-targeted localization, whereby the respective line disclose in column 7 the fine chemical coenzyme Q10. For example, an increase of the coenzyme Q10 of at least 1 percent, particularly in a range of 79 to 87-percent is conferred as compared to a corresponding non-transformed wild type non-human organism.

[77793] Accordingly, in one embodiment, an increase of coenzyme Q9 in a non-human organism, as compared to a corresponding non-transformed wild type non-human organism, is conferred in the process of the invention, if the activity of a polypeptide showing the activity of a heat shock transcription factor, or if the activity of the polypeptide At3g02990, preferably represented by SEQ ID NO. 68658, or a homolog or fragment thereof, or if the activity of a polypeptide encoded by a nucleic acid molecule comprising the nucleic acid SEQ ID NO. 68657, preferably the coding region thereof, or a homolog or fragment thereof, e.g. derived from Arabidopsis thaliana, is increased or generated. For example the activity of a nucleic acid molecule or a polypeptide comprising the nucleic acid, preferably the coding region thereof, or polypeptide or the consensus sequence or the polypeptide motif, as depicted in Table I, II or IV, application No. 16, column 5 or 8 in the respective same line as the nucleic acid molecule SEQ ID NO. 68657 or polypeptide SEQ ID NO. 68658, respectively, or a homolog or a fragment thereof, is increased or generated, or if the activity heat shock transcription factor is increased or generated in a non-human organism, like a microorganism or a plant cell, plant or part thereof, especially with non-targeted localization, whereby the respective line disclose in column 7 the fine chemical coenzyme Q9. For example, an increase of the coenzyme Q9 of at least 1 percent, particularly in a range of 40 to 148-percent is conferred as compared to a corresponding non-transformed wild type non-human organism.

[77794] Accordingly, in one embodiment, an increase of coenzyme Q10 in a non-human organism, as compared to a corresponding non-transformed wild type non-human organism, is conferred in the process of the invention, if the activity of a polypeptide showing the activity of a pyruvate kinase, or if the activity of the polypeptide At3g04050, preferably represented by SEQ ID NO. 21498, or a homolog or fragment thereof, or if the activity of a polypeptide encoded by a nucleic acid molecule comprising the nucleic acid SEQ ID NO. 21497, preferably the coding region thereof, or a homolog or fragment thereof, e.g. derived from Arabidopsis thaliana, is increased or generated. For example the activity of a nucleic acid molecule or a polypeptide comprising the nucleic acid, preferably the coding region thereof, or polypeptide or the consensus sequence or the polypeptide motif, as depicted in Table I, II or IV, application No. 16, column 5 or 8 in the respective same line as the nucleic acid molecule SEQ ID NO. 21497 or polypeptide SEQ ID NO. 21498, respectively, or a homolog or a fragment thereof, is increased or generated, or if the activity pyruvate kinase is increased or generated in a non-human organism, like a microorganism or a plant cell, plant or part thereof, especially with plastidic localization, whereby the respective line disclose in column 7 the fine chemical coenzyme Q10. For example, an increase of the coenzyme Q10 of at least 1 percent, particularly in a range of 85 to 142-percent is conferred as compared to a corresponding non-transformed wild type non-human organism.

[77795] Accordingly, in one embodiment, an increase of coenzyme Q9 in a non-human organism, as compared to a corresponding non-transformed wild type non-human organism, is conferred in the process of the invention, if the activity of a polypeptide showing the activity of a F-box protein, or if the activity of the polypeptide At3g16820, preferably represented by SEQ ID NO. 120953, or a homolog or fragment thereof, or if the activity of a polypeptide encoded by a nucleic acid molecule comprising the nucleic acid SEQ ID NO. 120952, preferably the coding region thereof, or a homolog or fragment thereof, e.g. derived from Arabidopsis thaliana, is increased or generated. For example the activity of a nucleic acid molecule or a polypeptide comprising the nucleic acid, preferably the coding region thereof, or polypeptide or the consensus sequence or the polypeptide motif, as depicted in Table I, II or IV, application No. 16, column 5 or 8 in the respective same line as the nucleic acid molecule SEQ ID NO. 120952 or polypeptide SEQ ID NO. 120953, respectively, or a homolog or a fragment thereof, is increased or generated, or if the activity F-box protein is increased or generated in a non-human organism, like a microorganism or a plant cell, plant or part thereof, especially with non-targeted localization, whereby the respective line disclose in column 7 the fine chemical coenzyme Q9. For example, an increase of the coenzyme Q9 of at least 1 percent, particularly in a range of 45 to 114-percent is conferred as compared to a corresponding non-transformed wild type non-human organism.

[77796] Accordingly, in one embodiment, an increase of coenzyme Q10 in a non-human organism, as compared to a corresponding non-transformed wild type non-human organism, is conferred in the process of the invention, if the activity of a polypeptide showing the activity of a CCAAT-binding transcription factor, or if the activity of the polypeptide At3g20910, preferably represented by SEQ ID NO. 22922, or a homolog or fragment thereof, or if the activity of a polypeptide encoded by a nucleic acid molecule comprising the nucleic acid SEQ ID NO. 22921, preferably the coding region thereof, or a homolog or fragment thereof, e.g. derived from Arabidopsis thaliana, is increased or generated. For example the activity of a nucleic acid molecule or a polypeptide comprising the nucleic acid, preferably the coding region thereof, or polypeptide or the consensus sequence or the polypeptide motif, as depicted in Table I, II or IV, application No. 16, column 5 or 8 in the respective same line as the nucleic acid molecule SEQ ID NO. 22921 or polypeptide SEQ ID NO. 22922, respectively, or a homolog or a fragment thereof, is increased or generated, or if the activity CCAAT-binding transcription factor is increased or generated in a non-human organism, like a microorganism or a plant cell, plant or part thereof, especially with non-targeted localization, whereby the respective line disclose in column 7 the fine chemical coenzyme Q10. For example, an increase of the coenzyme Q10 of at least 1 percent, particularly in a range of 67 to 438-percent is conferred as compared to a corresponding non-transformed wild type non-human organism.

[77797] Accordingly, in one embodiment, an increase of coenzyme Q9 in a non-human organism, as compared to a corresponding non-transformed wild type non-human organism, is conferred in the process of the invention, if the activity of a polypeptide showing the activity of a CCAATbinding transcription factor, or if the activity of the polypeptide At3g20910, preferably represented by SEQ ID NO. 22922, or a homolog or fragment thereof, or if the activity of a polypeptide encoded by a nucleic acid molecule comprising the nucleic acid SEQ ID NO. 22921, preferably the coding region thereof, or a homolog or fragment thereof, e.g. derived from Arabidopsis thaliana, is increased or generated. For example the activity of a nucleic acid molecule or a polypeptide comprising the nucleic acid, preferably the coding region thereof, or polypeptide or the consensus sequence or the polypeptide motif, as depicted in Table I, II or IV, application No. 16, column 5 or 8 in the respective same line as the nucleic acid molecule SEQ ID NO. 22921 or polypeptide SEQ ID NO. 22922, respectively, or a homolog or a fragment thereof, is increased or generated, or if the activity CCAAT-binding transcription factor is increased or generated in a non-human organism, like a microorganism or a plant cell, plant or part thereof, especially with non-targeted localization, whereby the respective line disclose in column 7 the fine chemical coenzyme Q9. For example, an increase of the coenzyme Q9 of at least 1 percent, particularly in a range of 37 to 70-percent is conferred as compared to a corresponding non-transformed wild type non-human organism.

[77798] Accordingly, in one embodiment, an increase of coenzyme Q9 in a non-human organism, as compared to a corresponding non-transformed wild type non-human organism, is conferred in the process of the invention, if the activity of a polypeptide showing the activity of a glycosyl transferase, or if the activity of the polypeptide At3g27540, preferably represented by SEQ ID NO. 68778, or a homolog or fragment thereof, or if the activity of a polypeptide encoded by a nucleic acid molecule comprising the nucleic acid SEQ ID NO. 68777, preferably the coding region thereof, or a homolog or fragment thereof, e.g. derived from Arabidopsis thaliana, is increased or generated. For example the activity of a nucleic acid molecule or a polypeptide comprising the nucleic acid, preferably the coding region thereof, or polypeptide or the consensus sequence or the polypeptide motif, as depicted in Table I, II or IV, application No. 16, column 5 or 8 in the respective same line as the nucleic acid molecule SEQ ID NO. 68777 or polypeptide SEQ ID NO. 68778, respectively, or a homolog or a fragment thereof, is increased or generated, or if the activity glycosyl transferase is increased or generated in a non-human organism, like a microorganism or a plant cell, plant or part thereof, especially with non-targeted localization, whereby the respective line disclose in column 7 the fine chemical coenzyme Q9. For example, an increase of the coenzyme Q9 of at least 1 percent, particularly in a range of 36 to 86-percent is conferred as compared to a corresponding non-transformed wild type non-human organism.

[77799] Accordingly, in one embodiment, an increase of coenzyme Q9 in a non-human organism, as compared to a corresponding non-transformed wild type non-human organism, is conferred in the process of the invention, if the activity of a polypeptide showing the activity of a auxin response factor, or if the activity of the polypeptide At3g61830, preferably represented by SEQ ID NO. 2368, or a homolog or fragment thereof, or if the activity of a polypeptide encoded by a nucleic acid molecule comprising the nucleic acid SEQ ID NO. 2367, preferably the coding region thereof, or a homolog or fragment thereof, e.g. derived from Arabidopsis thaliana, is increased or generated. For example the activity of a nucleic acid molecule or a polypeptide comprising the nucleic acid, preferably the coding region thereof, or polypeptide or the consensus sequence or the polypeptide motif, as depicted in Table I, II or IV, application No. 16, column 5 or 8 in the respective same line as the nucleic acid molecule SEQ ID NO. 2367 or polypeptide SEQ ID NO. 2368, respectively, or a homolog or a fragment thereof, is increased or generated, or if the activity auxin response factor is increased or generated in a non-human organism, like a microorganism or a plant cell, plant or part thereof, especially with non-targeted localization, whereby the respective line disclose in column 7 the fine chemical coenzyme Q9. For example, an increase of the coenzyme Q9 of at least 1 percent, particularly in a range of 36 to 177-percent is conferred as compared to a corresponding non-transformed wild type non-human organism.

[77800] Accordingly, in one embodiment, an increase of coenzyme Q10 in a non-human organism, as compared to a corresponding non-transformed wild type non-human organism, is conferred in the process of the invention, if the activity of a polypeptide showing the activity of a glutaredoxin, or if the activity of the polypeptide At3g62950, preferably represented by SEQ ID NO. 2936, or a homolog or fragment thereof, or if the activity of a polypeptide encoded by a nucleic acid molecule comprising the nucleic acid SEQ ID NO. 2935, preferably the coding region thereof, or a homolog or fragment thereof, e.g. derived from Arabidopsis thaliana, is increased or generated. For example the activity of a nucleic acid molecule or a polypeptide comprising the nucleic acid, preferably the coding region thereof, or polypeptide or the consensus sequence or the polypeptide motif, as depicted in Table I, II or IV, application No. 16, column 5 or 8 in the respective same line as the nucleic acid molecule SEQ ID NO. 2935 or polypeptide SEQ ID NO. 2936, respectively, or a homolog or a fragment thereof, is increased or generated, or if the activity glutaredoxin is increased or generated in a non-human organism, like a microorganism or a plant cell, plant or part thereof, especially with non-targeted localization, whereby the respective line disclose in column 7 the fine chemical coenzyme Q10. For example, an increase of the coenzyme Q10 of at least 1 percent, particularly in a range of 52 to 102-percent is conferred as compared to a corresponding non-transformed wild type non-human organism.

[77801] Accordingly, in one embodiment, an increase of coenzyme Q9 in a non-human organism, as compared to a corresponding non-transformed wild type non-human organism, is conferred in the process of the invention, if the activity of a polypeptide showing the activity of a glutaredoxin, or if the activity of the polypeptide At3g62950, preferably represented by SEQ ID NO. 2936, or a homolog or fragment thereof, or if the activity of a polypeptide encoded by a nucleic acid molecule comprising the nucleic acid SEQ ID NO. 2935, preferably the coding region thereof, or a homolog or fragment thereof, e.g. derived from Arabidopsis thaliana, is increased or generated. For example the activity of a nucleic acid molecule or a polypeptide comprising the nucleic acid, preferably the coding region thereof, or polypeptide or the consensus sequence or the polypeptide motif, as depicted in Table I, II or IV, application No. 16, column 5 or 8 in the respective same line as the nucleic acid molecule SEQ ID NO. 2935 or polypeptide SEQ ID NO. 2936, respectively, or a homolog or a fragment thereof, is increased or generated, or if the activity glutaredoxin is increased or generated in a non-human organism, like a microorganism or a plant cell, plant or part thereof, especially with non-targeted localization, whereby the respective line disclose in column 7 the fine chemical coenzyme Q9. For example, an increase of the coenzyme Q9 of at least 1 percent, particularly in a range of 52 to 91-percent is conferred as compared to a corresponding non-transformed wild type non-human organism.

[77802] Accordingly, in one embodiment, an increase of coenzyme Q10 in a non-human organism, as compared to a corresponding non-transformed wild type non-human organism, is conferred in the process of the invention, if the activity of a polypeptide showing the activity of a sterol desaturase, or if the activity of the polypeptide At4g12110, preferably represented by SEQ ID NO. 131209, or a homolog or fragment thereof, or if the activity of a polypeptide encoded by a nucleic acid molecule comprising the nucleic acid SEQ ID NO. 131208, preferably the coding region thereof, or a homolog or fragment thereof, e.g. derived from Arabidopsis thaliana, is increased or generated. For example the activity of a nucleic acid molecule or a polypeptide comprising the nucleic acid, preferably the coding region thereof, or polypeptide or the consensus sequence or the polypeptide motif, as depicted in Table I, II or IV, application No. 16, column 5 or 8 in the respective same line as the nucleic acid molecule SEQ ID NO. 131208 or polypeptide SEQ ID NO. 131209, respectively, or a homolog or a fragment thereof, is increased or generated, or if the activity sterol desaturase is increased or generated in a non-human organism, like a microorganism or a plant cell, plant or part thereof, especially with non-targeted localization, whereby the respective line disclose in column 7 the fine chemical coenzyme Q10. For example, an increase of the coenzyme Q10 of at least 1 percent, particularly in a range of 72 to 96-percent is conferred as compared to a corresponding non-transformed wild type non-human organism.

[77803] Accordingly, in one embodiment, an increase of coenzyme Q10 in a non-human organism, as compared to a corresponding non-transformed wild type non-human organism, is conferred in the process of the invention, if the activity of a polypeptide showing the activity of a monothiol glutaredoxin, or if the activity of the polypeptide At4g15660, preferably represented by SEQ ID NO. 23483, or a homolog or fragment thereof, or if the activity of a polypeptide encoded by a nucleic acid molecule comprising the nucleic acid SEQ ID NO. 23482, preferably the coding region thereof, or a homolog or fragment thereof, e.g. derived from Arabidopsis thaliana, is increased or generated. For example the activity of a nucleic acid molecule or a polypeptide comprising the nucleic acid, preferably the coding region thereof, or polypeptide or the consensus sequence or the polypeptide motif, as depicted in Table I, II or IV, application No. 16, column 5 or 8 in the respective same line as the nucleic acid molecule SEQ ID NO. 23482 or polypeptide SEQ ID NO. 23483, respectively, or a homolog or a fragment thereof, is increased or generated, or if the activity monothiol glutaredoxin is increased or generated in a non-human organism, like a microorganism or a plant cell, plant or part thereof, especially with non-targeted localization, whereby the respective line disclose in column 7 the fine chemical coenzyme Q10. For example, an increase of the coenzyme Q10 of at least 1 percent, particularly in a range of 89 to 174 percent is conferred as compared to a corresponding non-transformed wild type non-human organism.

[77804] Accordingly, in one embodiment, an increase of coenzyme Q9 in a non-human organism, as compared to a corresponding non-transformed wild type non-human organism, is conferred in the process of the invention, if the activity of a polypeptide showing the activity of a monothiol glutaredoxin, or if the activity of the polypeptide At4g15660, preferably represented by SEQ ID NO. 23483, or a homolog or fragment thereof, or if the activity of a polypeptide encoded by a nucleic acid molecule comprising the nucleic acid SEQ ID NO. 23482, preferably the coding region thereof, or a homolog or fragment thereof, e.g. derived from Arabidopsis thaliana, is increased or generated. For example the activity of a nucleic acid molecule or a polypeptide comprising the nucleic acid, preferably the coding region thereof, or polypeptide or the consensus sequence or the polypeptide motif, as depicted in Table I, II or IV, application No. 16, column 5 or 8 in the respective same line as the nucleic acid molecule SEQ ID NO. 23482 or polypeptide SEQ ID NO. 23483, respectively, or a homolog or a fragment thereof, is increased or generated, or if the activity monothiol glutaredoxin is increased or generated in a non-human organism, like a microorganism or a plant cell, plant or part thereof, especially with non-targeted localization, whereby the respective line disclose in column 7 the fine chemical coenzyme Q9. For example, an increase of the coenzyme Q9 of at least 1 percent, particularly in a range of 53 to 105-percent is conferred as compared to a corresponding non-transformed wild type non-human organism.

[77805] Accordingly, in one embodiment, an increase of coenzyme Q10 in a non-human organism, as compared to a corresponding non-transformed wild type non-human organism, is conferred in the process of the invention, if the activity of a polypeptide showing the activity of a cyclin D , or if the activity of the polypeptide At4g34160, preferably represented by SEQ ID NO. 24312, or a homolog or fragment thereof, or if the activity of a polypeptide encoded by a nucleic acid molecule comprising the nucleic acid SEQ ID NO. 24311, preferably the coding region thereof, or a homolog or fragment thereof, e.g. derived from Arabidopsis thaliana, is increased or generated. For example the activity of a nucleic acid molecule or a polypeptide comprising the nucleic acid, preferably the coding region thereof, or polypeptide or the consensus sequence or the polypeptide motif, as depicted in Table I, II or IV, application No. 16, column 5 or 8 in the respective same line as the nucleic acid molecule SEQ ID NO. 24311 or polypeptide SEQ ID NO. 24312, respectively, or a homolog or a fragment thereof, is increased or generated, or if the activity cyclin D is increased or generated in a non-human organism, like a microorganism or a plant cell, plant or part thereof, especially with non-targeted localization, whereby the respective line disclose in column 7 the fine chemical coenzyme Q10. For example, an increase of the coenzyme Q10 of at least 1 percent, particularly in a range of 78 to 175-percent is conferred as compared to a corresponding non-transformed wild type non-human organism.

[77806] Accordingly, in one embodiment, an increase of coenzyme Q9 in a non-human organism, as compared to a corresponding non-transformed wild type non-human organism, is conferred in the process of the invention, if the activity of a polypeptide showing the activity of a cyclin D , or if the activity of the polypeptide At4g34160, preferably represented by SEQ ID NO. 24312, or a homolog or fragment thereof, or if the activity of a polypeptide encoded by a nucleic acid molecule comprising the nucleic acid SEQ ID NO. 24311, preferably the coding region thereof, or a homolog or fragment thereof, e.g. derived from Arabidopsis thaliana, is increased or generated. For example the activity of a nucleic acid molecule or a polypeptide comprising the nucleic acid, preferably the coding region thereof, or polypeptide or the consensus sequence or the polypeptide motif, as depicted in Table I, II or IV, application No. 16, column 5 or 8 in the respective same line as the nucleic acid molecule SEQ ID NO. 24311 or polypeptide SEQ ID NO. 24312, respectively, or a homolog or a fragment thereof, is increased or generated, or if the activity cyclin D is increased or generated in a non-human organism, like a microorganism or a plant cell, plant or part thereof, especially with non-targeted localization, whereby the respective line disclose in column 7 the fine chemical coenzyme Q9. For example, an increase of the coenzyme Q9 of at least 1 percent, particularly in a range of 38 to 131-percent is conferred as compared to a corresponding non-transformed wild type non-human organism.

[77807] Accordingly, in one embodiment, an increase of coenzyme Q10 in a non-human organism, as compared to a corresponding non-transformed wild type non-human organism, is conferred in the process of the invention, if the activity of a polypeptide showing the activity of a calcium-dependent protein kinase, or if the activity of the polypeptide At4g35310, preferably represented by SEQ ID NO. 4349, or a homolog or fragment thereof, or if the activity of a polypeptide encoded by a nucleic acid molecule comprising the nucleic acid SEQ ID NO. 4348, preferably the coding region thereof, or a homolog or fragment thereof, e.g. derived from Arabidopsis thaliana, is increased or generated. For example the activity of a nucleic acid molecule or a polypeptide comprising the nucleic acid, preferably the coding region thereof, or polypeptide or the consensus sequence or the polypeptide motif, as depicted in Table I, II or IV, application No. 16, column 5 or 8 in the respective same line as the nucleic acid molecule SEQ ID NO. 4348 or polypeptide SEQ ID NO. 4349, respectively, or a homolog or a fragment thereof, is increased or generated, or if the activity calcium-dependent protein kinase is increased or generated in a non-human organism, like a microorganism or a plant cell, plant or part thereof, especially with non-targeted localization, whereby the respective line disclose in column 7 the fine chemical coenzyme Q10. For example, an increase of the coenzyme Q10 of at least 1 percent, particularly in a range of 72 to 393-percent is conferred as compared to a corresponding non-transformed wild type non-human organism.

[77808] Accordingly, in one embodiment, an increase of coenzyme Q9 in a non-human organism, as compared to a corresponding non-transformed wild type non-human organism, is conferred in the process of the invention, if the activity of a polypeptide showing the activity of a calcium-dependent protein kinase, or if the activity of the polypeptide At4g35310, preferably represented by SEQ ID NO. 4349, or a homolog or fragment thereof, or if the activity of a polypeptide encoded by a nucleic acid molecule comprising the nucleic acid SEQ ID NO. 4348, preferably the coding region thereof, or a homolog or fragment thereof, e.g. derived from Arabidopsis thaliana, is increased or generated. For example the activity of a nucleic acid molecule or a polypeptide comprising the nucleic acid, preferably the coding region thereof, or polypeptide or the consensus sequence or the polypeptide motif, as depicted in Table I, II or IV, application No. 16, column 5 or 8 in the respective same line as the nucleic acid molecule SEQ ID NO. 4348 or polypeptide SEQ ID NO. 4349, respectively, or a homolog or a fragment thereof, is increased or generated, or if the activity calcium-dependent protein kinase is increased or generated in a non-human organism, like a microorganism or a plant cell, plant or part thereof, especially with non-targeted localization, whereby the respective line disclose in column 7 the fine chemical coenzyme Q9. For example, an increase of the coenzyme Q9 of at least 1 percent, particularly in a range of 36 to 244-percent is conferred as compared to a corresponding non-transformed wild type non-human organism.

[77809] Accordingly, in one embodiment, an increase of coenzyme Q9 in a non-human organism, as compared to a corresponding non-transformed wild type non-human organism, is conferred in the process of the invention, if the activity of a polypeptide showing the activity of a heat shock transcription factor, or if the activity of the polypeptide At5g03720, preferably represented by SEQ ID NO. 24439, or a homolog or fragment thereof, or if the activity of a polypeptide encoded by a nucleic acid molecule comprising the nucleic acid SEQ ID NO. 24438, preferably the coding region thereof, or a homolog or fragment thereof, e.g. derived from Arabidopsis thaliana, is increased or generated. For example the activity of a nucleic acid molecule or a polypeptide comprising the nucleic acid, preferably the coding region thereof, or polypeptide or the consensus sequence or the polypeptide motif, as depicted in Table I, II or IV, application No. 16, column 5 or 8 in the respective same line as the nucleic acid molecule SEQ ID NO. 24438 or polypeptide SEQ ID NO. 24439, respectively, or a homolog or a fragment thereof, is increased or generated, or if the activity heat shock transcription factor is increased or generated in a non-human organism, like a microorganism or a plant cell, plant or part thereof, especially with non-targeted localization, whereby the respective line disclose in column 7 the fine chemical coenzyme Q9. For example, an increase of the coenzyme Q9 of at least 1 percent, particularly in a range of 46 to 53-percent is conferred as compared to a corresponding non-transformed wild type non-human organism.

[77810] Accordingly, in one embodiment, an increase of coenzyme Q10 in a non-human organism, as compared to a corresponding non-transformed wild type non-human organism, is conferred in the process of the invention, if the activity of a polypeptide showing the activity of a monothiol glutaredoxin, or if the activity of the polypeptide At5g18600, preferably represented by SEQ ID NO. 4905, or a homolog or fragment thereof, or if the activity of a polypeptide encoded by a nucleic acid molecule comprising the nucleic acid SEQ ID NO. 4904, preferably the coding region thereof, or a homolog or fragment thereof, e.g. derived from Arabidopsis thaliana, is increased or generated. For example the activity of a nucleic acid molecule or a polypeptide comprising the nucleic acid, preferably the coding region thereof, or polypeptide or the consensus sequence or the polypeptide motif, as depicted in Table I, II or IV, application No. 16, column 5 or 8 in the respective same line as the nucleic acid molecule SEQ ID NO. 4904 or polypeptide SEQ ID NO. 4905, respectively, or a homolog or a fragment thereof, is increased or generated, or if the activity monothiol glutaredoxin is increased or generated in a non-human organism, like a microorganism or a plant cell, plant or part thereof, especially with non-targeted localization, whereby the respective line disclose in column 7 the fine chemical coenzyme Q10. For example, an increase of the coenzyme Q10 of at least 1 percent, particularly in a range of 57 to 63 percent is conferred as compared to a corresponding non-transformed wild type non-human organism.

[77811] Accordingly, in one embodiment, an increase of coenzyme Q9 in a non-human organism, as compared to a corresponding non-transformed wild type non-human organism, is conferred in the process of the invention, if the activity of a polypeptide showing the activity of a disease resistance protein, or if the activity of the polypeptide At5g45060, preferably represented by SEQ ID NO. 102224, or a homolog or fragment thereof, or if the activity of a polypeptide encoded by a nucleic acid molecule comprising the nucleic acid SEQ ID NO. 102223, preferably the coding region thereof, or a homolog or fragment thereof, e.g. derived from Arabidopsis thaliana, is increased or generated. For example the activity of a nucleic acid molecule or a polypeptide comprising the nucleic acid, preferably the coding region thereof, or polypeptide or the consensus sequence or the polypeptide motif, as depicted in Table I, II or IV, application No. 16, column 5 or 8 in the respective same line as the nucleic acid molecule SEQ ID NO. 102223 or polypeptide SEQ ID NO. 102224, respectively, or a homolog or a fragment thereof, is increased or generated, or if the activity disease resistance protein is increased or generated in a non-human organism, like a microorganism or a plant cell, plant or part thereof, especially with non-targeted localization, whereby the respective line disclose in column 7 the fine chemical coenzyme Q9. For example, an increase of the coenzyme Q9 of at least 1 percent, particularly in a range of 41 to 53-percent is conferred as compared to a corresponding non-transformed wild type non-human organism.

[77812] Accordingly, in one embodiment, an increase of coenzyme Q9 in a non-human organism, as compared to a corresponding non-transformed wild type non-human organism, is conferred in the process of the invention, if the activity of a polypeptide showing the activity of a protein phosphatase, or if the activity of the polypeptide At5g59220, preferably represented by SEQ ID NO. 25499, or a homolog or fragment thereof, or if the activity of a polypeptide encoded by a nucleic acid molecule comprising the nucleic acid SEQ ID NO. 25498, preferably the coding region thereof, or a homolog or fragment thereof, e.g. derived from Arabidopsis thaliana, is increased or generated. For example the activity of a nucleic acid molecule or a polypeptide comprising the nucleic acid, preferably the coding region thereof, or polypeptide or the consensus sequence or the polypeptide motif, as depicted in Table I, II or IV, application No. 16, column 5 or 8 in the respective same line as the nucleic acid molecule SEQ ID NO. 25498 or polypeptide SEQ ID NO. 25499, respectively, or a homolog or a fragment thereof, is increased or generated, or if the activity protein phosphatase is increased or generated in a non-human organism, like a microorganism or a plant cell, plant or part thereof, especially with non-targeted localization, whereby the respective line disclose in column 7 the fine chemical coenzyme Q9. For example, an increase of the coenzyme Q9 of at least 1 percent, particularly in a range of 36 to 97-percent is conferred as compared to a corresponding non-transformed wild type non-human organism.

[77813] Accordingly, in one embodiment, an increase of coenzyme Q9 in a non-human organism, as compared to a corresponding non-transformed wild type non-human organism, is conferred in the process of the invention, if the activity of a polypeptide showing the activity of a zinc finger protein, or if the activity of the polypeptide At5g64920, preferably represented by SEQ ID NO. 5494, or a homolog or fragment thereof, or if the activity of a polypeptide encoded by a nucleic acid molecule comprising the nucleic acid SEQ ID NO. 5493, preferably the coding region thereof, or a homolog or fragment thereof, e.g. derived from Arabidopsis thaliana, is increased or generated. For example the activity of a nucleic acid molecule or a polypeptide comprising the nucleic acid, preferably the coding region thereof, or polypeptide or the consensus sequence or the polypeptide motif, as depicted in Table I, II or IV, application No. 16, column 5 or 8 in the respective same line as the nucleic acid molecule SEQ ID NO. 5493 or polypeptide SEQ ID NO. 5494, respectively, or a homolog or a fragment thereof, is increased or generated, or if the activity zinc finger protein is increased or generated in a non-human organism, like a microorganism or a plant cell, plant or part thereof, especially with non-targeted localization, whereby the respective line disclose in column 7 the fine chemical coenzyme Q9. For example, an increase of the coenzyme Q9 of at least 1 percent, particularly in a range of 36 to 114-percent is conferred as compared to a corresponding non-transformed wild type non-human organism.

[77814] Accordingly, in one embodiment, an increase of coenzyme Q9 in a non-human organism, as compared to a corresponding non-transformed wild type non-human organism, is conferred in the process of the invention, if the activity of a polypeptide showing the activity of a transcriptional regulator, or if the activity of the polypeptide AvinDRAFT_{—}3209, preferably represented by SEQ ID NO. 29287, or a homolog or fragment thereof, or if the activity of a polypeptide encoded by a nucleic acid molecule comprising the nucleic acid SEQ ID NO. 29286, preferably the coding region thereof, or a homolog or fragment thereof, e.g. derived from Azotobacter vinelandii, is increased or generated. For example the activity of a nucleic acid molecule or a polypeptide comprising the nucleic acid, preferably the coding region thereof, or polypeptide or the consensus sequence or the polypeptide motif, as depicted in Table I, II or IV, application No. 16, column 5 or 8 in the respective same line as the nucleic acid molecule SEQ ID NO. 29286 or polypeptide SEQ ID NO. 29287, respectively, or a homolog or a fragment thereof, is increased or generated, or if the activity transcriptional regulator is increased or generated in a non-human organism, like a microorganism or a plant cell, plant or part thereof, especially with non-targeted localization, whereby the respective line disclose in column 7 the fine chemical coenzyme Q9. For example, an increase of the coenzyme Q9 of at least 1 percent, particularly in a range of 52 to 101-percent is conferred as compared to a corresponding non-transformed wild type non-human organism.

[77815] Accordingly, in one embodiment, an increase of coenzyme Q9 in a non-human organism, as compared to a corresponding non-transformed wild type non-human organism, is conferred in the process of the invention, if the activity of a polypeptide showing the activity of a CTP synthase, or if the activity of the polypeptide AvinDRAFT_{—}3605, preferably represented by SEQ ID NO. 31027, or a homolog or fragment thereof, or if the activity of a polypeptide encoded by a nucleic acid molecule comprising the nucleic acid SEQ ID NO. 31026, preferably the coding region thereof, or a homolog or fragment thereof, e.g. derived from Azotobacter vinelandii, is increased or generated. For example the activity of a nucleic acid molecule or a polypeptide comprising the nucleic acid, preferably the coding region thereof, or polypeptide or the consensus sequence or the polypeptide motif, as depicted in Table I, II or IV, application No. 16, column 5 or 8 in the respective same line as the nucleic acid molecule SEQ ID NO. 31026 or polypeptide SEQ ID NO. 31027, respectively, or a homolog or a fragment thereof, is increased or generated, or if the activity CTP synthase is increased or generated in a non-human organism, like a microorganism or a plant cell, plant or part thereof, especially with non-targeted localization, whereby the respective line disclose in column 7 the fine chemical coenzyme Q9. For example, an increase of the coenzyme Q9 of at least 1 percent, particularly in a range of 46 to 176-percent is conferred as compared to a corresponding non-transformed wild type non-human organism.

[77816] Accordingly, in one embodiment, an increase of coenzyme Q9 in a non-human organism, as compared to a corresponding non-transformed wild type non-human organism, is conferred in the process of the invention, if the activity of a polypeptide showing the activity of a recombinase A, or if the activity of the polypeptide AvinDRAFT_{—}3629, preferably represented by SEQ ID NO. 114232, or a homolog or fragment thereof, or if the activity of a polypeptide encoded by a nucleic acid molecule comprising the nucleic acid SEQ ID NO. 114231, preferably the coding region thereof, or a homolog or fragment thereof, e.g. derived from Azotobacter vinelandii, is increased or generated. For example the activity of a nucleic acid molecule or a polypeptide comprising the nucleic acid, preferably the coding region thereof, or polypeptide or the consensus sequence or the polypeptide motif, as depicted in Table I, II or IV, application No. 16, column 5 or 8 in the respective same line as the nucleic acid molecule SEQ ID NO. 114231 or polypeptide SEQ ID NO. 114232, respectively, or a homolog or a fragment thereof, is increased or generated, or if the activity recombinase A is increased or generated in a non-human organism, like a microorganism or a plant cell, plant or part thereof, especially with non-targeted localization, whereby the respective line disclose in column 7 the fine chemical coenzyme Q9. For example, an increase of the coenzyme Q9 of at least 1 percent, particularly in a range of 42 to 171-percent is conferred as compared to a corresponding non-transformed wild type non-human organism.

[77817] Accordingly, in one embodiment, an increase of coenzyme Q10 in a non-human organism, as compared to a corresponding non-transformed wild type non-human organism, is conferred in the process of the invention, if the activity of a polypeptide showing the activity of a enoyl-CoA hydratase, or if the activity of the polypeptide AvinDRAFT_{—}4420, preferably represented by SEQ ID NO. 73039, or a homolog or fragment thereof, or if the activity of a polypeptide encoded by a nucleic acid molecule comprising the nucleic acid SEQ ID NO. 73038, preferably the coding region thereof, or a homolog or fragment thereof, e.g. derived from Azotobacter vinelandii, is increased or generated. For example the activity of a nucleic acid molecule or a polypeptide comprising the nucleic acid, preferably the coding region thereof, or polypeptide or the consensus sequence or the polypeptide motif, as depicted in Table I, II or IV, application No. 16, column 5 or 8 in the respective same line as the nucleic acid molecule SEQ ID NO. 73038 or polypeptide SEQ ID NO. 73039, respectively, or a homolog or a fragment thereof, is increased or generated, or if the activity enoyl-CoA hydratase is increased or generated in a non-human organism, like a microorganism or a plant cell, plant or part thereof, especially with non-targeted localization, whereby the respective line disclose in column 7 the fine chemical coenzyme Q10. For example, an increase of the coenzyme Q10 of at least 1 percent, particularly in a range of 109 to 257-percent is conferred as compared to a corresponding non-transformed wild type non-human organism.

[77818] Accordingly, in one embodiment, an increase of coenzyme Q9 in a non-human organism, as compared to a corresponding non-transformed wild type non-human organism, is conferred in the process of the invention, if the activity of a polypeptide showing the activity of a enoyl-CoA hydratase, or if the activity of the polypeptide AvinDRAFT_{—}4420, preferably represented by SEQ ID NO. 73039, or a homolog or fragment thereof, or if the activity of a polypeptide encoded by a nucleic acid molecule comprising the nucleic acid SEQ ID NO. 73038, preferably the coding region thereof, or a homolog or fragment thereof, e.g. derived from Azotobacter vinelandii, is increased or generated. For example the activity of a nucleic acid molecule or a polypeptide comprising the nucleic acid, preferably the coding region thereof, or polypeptide or the consensus sequence or the polypeptide motif, as depicted in Table I, II or IV, application No. 16, column 5 or 8 in the respective same line as the nucleic acid molecule SEQ ID NO. 73038 or polypeptide SEQ ID NO. 73039, respectively, or a homolog or a fragment thereof, is increased or generated, or if the activity enoyl-CoA hydratase is increased or generated in a non-human organism, like a microorganism or a plant cell, plant or part thereof, especially with non-targeted localization, whereby the respective line disclose in column 7 the fine chemical coenzyme Q9. For example, an increase of the coenzyme Q9 of at least 1 percent, particularly in a range of 98 to 220-percent is conferred as compared to a corresponding non-transformed wild type non-human organism.

[77819] Accordingly, in one embodiment, an increase of coenzyme Q9 in a non-human organism, as compared to a corresponding non-transformed wild type non-human organism, is conferred in the process of the invention, if the activity of a polypeptide showing the activity of a isopropylmalate isomerase large subunit, or if the activity of the polypeptide AvinDRAFT_{—}4847, preferably represented by SEQ ID NO. 102942, or a homolog or fragment thereof, or if the activity of a polypeptide encoded by a nucleic acid molecule comprising the nucleic acid SEQ ID NO. 102941, preferably the coding region thereof, or a homolog or fragment thereof, e.g. derived from Azotobacter vinelandii, is increased or generated. For example the activity of a nucleic acid molecule or a polypeptide comprising the nucleic acid, preferably the coding region thereof, or polypeptide or the consensus sequence or the polypeptide motif, as depicted in Table I, II or IV, application No. 16, column 5 or 8 in the respective same line as the nucleic acid molecule SEQ ID NO. 102941 or polypeptide SEQ ID NO. 102942, respectively, or a homolog or a fragment thereof, is increased or generated, or if the activity isopropylmalate isomerase large subunit is increased or generated in a non-human organism, like a microorganism or a plant cell, plant or part thereof, especially with non-targeted localization, whereby the respective line disclose in column 7 the fine chemical coenzyme Q9. For example, an increase of the coenzyme Q9 of at least 1 percent, particularly in a range of 36 to 79-percent is conferred as compared to a corresponding non-transformed wild type non-human organism.

[77820] Accordingly, in one embodiment, an increase of coenzyme Q9 in a non-human organism, as compared to a corresponding non-transformed wild type non-human organism, is conferred in the process of the invention, if the activity of a polypeptide showing the activity of a hydrolase, or if the activity of the polypeptide AvinDRAFT_{—}5103, preferably represented by SEQ ID NO. 6511, or a homolog or fragment thereof, or if the activity of a polypeptide encoded by a nucleic acid molecule comprising the nucleic acid SEQ ID NO. 6510, preferably the coding region thereof, or a homolog or fragment thereof, e.g. derived from Azotobacter vinelandii, is increased or generated. For example the activity of a nucleic acid molecule or a polypeptide comprising the nucleic acid, preferably the coding region thereof, or polypeptide or the consensus sequence or the polypeptide motif, as depicted in Table I, II or IV, application No. 16, column 5 or 8 in the respective same line as the nucleic acid molecule SEQ ID NO. 6510 or polypeptide SEQ ID NO. 6511, respectively, or a homolog or a fragment thereof, is increased or generated, or if the activity hydrolase is increased or generated in a non-human organism, like a microorganism or a plant cell, plant or part thereof, especially with non-targeted localization, whereby the respective line disclose in column 7 the fine chemical coenzyme Q9. For example, an increase of the coenzyme Q9 of at least 1 percent, particularly in a range of 195 to 240-percent is conferred as compared to a corresponding non-transformed wild type non-human organism.

[77821] Accordingly, in one embodiment, an increase of coenzyme Q9 in a non-human organism, as compared to a corresponding non-transformed wild type non-human organism, is conferred in the process of the invention, if the activity of a polypeptide showing the activity of a AX653549-protein, or if the activity of the polypeptide AX653549, preferably represented by SEQ ID NO. 34302, or a homolog or fragment thereof, or if the activity of a polypeptide encoded by a nucleic acid molecule comprising the nucleic acid SEQ ID NO. 34301, preferably the coding region thereof, or a homolog or fragment thereof, e.g. derived from Oryza sativa, is increased or generated. For example the activity of a nucleic acid molecule or a polypeptide comprising the nucleic acid, preferably the coding region thereof, or polypeptide or the consensus sequence or the polypeptide motif, as depicted in Table I, II or IV, application No. 16, column 5 or 8 in the respective same line as the nucleic acid molecule SEQ ID NO. 34301 or polypeptide SEQ ID NO. 34302, respectively, or a homolog or a fragment thereof, is increased or generated, or if the activity AX653549-protein is increased or generated in a non-human organism, like a microorganism or a plant cell, plant or part thereof, especially with non-targeted localization, whereby the respective line disclose in column 7 the fine chemical coenzyme Q9. For example, an increase of the coenzyme Q9 of at least 1 percent, particularly in a range of 44 to 55-percent is conferred as compared to a corresponding non-transformed wild type non-human organism.

[77822] Accordingly, in one embodiment, an increase of coenzyme Q10 in a non-human organism, as compared to a corresponding non-transformed wild type non-human organism, is conferred in the process of the invention, if the activity of a polypeptide showing the activity of a AY087308-protein, or if the activity of the polypeptide AY087308, preferably represented by SEQ ID NO. 34603, or a homolog or fragment thereof, or if the activity of a polypeptide encoded by a nucleic acid molecule comprising the nucleic acid SEQ ID NO. 34602, preferably the coding region thereof, or a homolog or fragment thereof, e.g. derived from Arabidopsis thaliana, is increased or generated. For example the activity of a nucleic acid molecule or a polypeptide comprising the nucleic acid, preferably the coding region thereof, or polypeptide or the consensus sequence or the polypeptide motif, as depicted in Table I, II or IV, application No. 16, column 5 or 8 in the respective same line as the nucleic acid molecule SEQ ID NO. 34602 or polypeptide SEQ ID NO. 34603, respectively, or a homolog or a fragment thereof, is increased or generated, or if the activity AY087308-protein is increased or generated in a non-human organism, like a microorganism or a plant cell, plant or part thereof, especially with non-targeted localization, whereby the respective line disclose in column 7 the fine chemical coenzyme Q10. For example, an increase of the coenzyme Q10 of at least 1 percent, particularly in a range of 60 to 92-percent is conferred as compared to a corresponding non-transformed wild type non-human organism.

[77823] Accordingly, in one embodiment, an increase of coenzyme Q10 in a non-human organism, as compared to a corresponding non-transformed wild type non-human organism, is conferred in the process of the invention, if the activity of a polypeptide showing the activity of a threonine synthase, or if the activity of the polypeptide B0004, preferably represented by SEQ ID NO. 34890, or a homolog or fragment thereof, or if the activity of a polypeptide encoded by a nucleic acid molecule comprising the nucleic acid SEQ ID NO. 34889, preferably the coding region thereof, or a homolog or fragment thereof, e.g. derived from Escherichia coli, is increased or generated. For example the activity of a nucleic acid molecule or a polypeptide comprising the nucleic acid, preferably the coding region thereof, or polypeptide or the consensus sequence or the polypeptide motif, as depicted in Table I, II or IV, application No. 16, column 5 or 8 in the respective same line as the nucleic acid molecule SEQ ID NO. 34889 or polypeptide SEQ ID NO. 34890, respectively, or a homolog or a fragment thereof, is increased or generated, or if the activity threonine synthase is increased or generated in a non-human organism, like a microorganism or a plant cell, plant or part thereof, especially with plastidic localization, whereby the respective line disclose in column 7 the fine chemical coenzyme Q10. For example, an increase of the coenzyme Q10 of at least 1 percent, particularly in a range of 70 to 558-percent is conferred as compared to a corresponding non-transformed wild type non-human organism.

[77824] Accordingly, in one embodiment, an increase of coenzyme Q10 in a non-human organism, as compared to a corresponding non-transformed wild type non-human organism, is conferred in the process of the invention, if the activity of a polypeptide showing the activity of a acetolactate synthase III large subunit, or if the activity of the polypeptide B0077, preferably represented by SEQ ID NO. 137835, or a homolog or fragment thereof, or if the activity of a polypeptide encoded by a nucleic acid molecule comprising the nucleic acid SEQ ID NO. 137834, preferably the coding region thereof, or a homolog or fragment thereof, e.g. derived from Escherichia coli, is increased or generated. For example the activity of a nucleic acid molecule or a polypeptide comprising the nucleic acid, preferably the coding region thereof, or polypeptide or the consensus sequence or the polypeptide motif, as depicted in Table I, II or IV, application No. 16, column 5 or 8 in the respective same line as the nucleic acid molecule SEQ ID NO. 137834 or polypeptide SEQ ID NO. 137835, respectively, or a homolog or a fragment thereof, is increased or generated, or if the activity acetolactate synthase III large subunit is increased or generated in a non-human organism, like a microorganism or a plant cell, plant or part thereof, especially with plastidic localization, whereby the respective line disclose in column 7 the fine chemical coenzyme Q10. For example, an increase of the coenzyme Q10 of at least 1 percent, particularly in a range of 21 to 34-percent is conferred as compared to a corresponding non-transformed wild type non-human organism.

[77825] Accordingly, in one embodiment, an increase of coenzyme Q9 in a non-human organism, as compared to a corresponding non-transformed wild type non-human organism, is conferred in the process of the invention, if the activity of a polypeptide showing the activity of a serine protease, or if the activity of the polypeptide B0161, preferably represented by SEQ ID NO. 7082, or a homolog or fragment thereof, or if the activity of a polypeptide encoded by a nucleic acid molecule comprising the nucleic acid SEQ ID NO. 7081, preferably the coding region thereof, or a homolog or fragment thereof, e.g. derived from Escherichia coli, is increased or generated. For example the activity of a nucleic acid molecule or a polypeptide comprising the nucleic acid, preferably the coding region thereof, or polypeptide or the consensus sequence or the polypeptide motif, as depicted in Table I, II or IV, application No. 16, column 5 or 8 in the respective same line as the nucleic acid molecule SEQ ID NO. 7081 or polypeptide SEQ ID NO. 7082, respectively, or a homolog or a fragment thereof, is increased or generated, or if the activity serine protease is increased or generated in a non-human organism, like a microorganism or a plant cell, plant or part thereof, especially with non-targeted localization, whereby the respective line disclose in column 7 the fine chemical coenzyme Q9. For example, an increase of the coenzyme Q9 of at least 1 percent, particularly in a range of 38 to 146-percent is conferred as compared to a corresponding non-transformed wild type non-human organism.

[77826] Accordingly, in one embodiment, an increase of coenzyme Q9 in a non-human organism, as compared to a corresponding non-transformed wild type non-human organism, is conferred in the process of the invention, if the activity of a polypeptide showing the activity of a beta-galactosidase, or if the activity of the polypeptide B0344, preferably represented by SEQ ID NO. 35734, or a homolog or fragment thereof, or if the activity of a polypeptide encoded by a nucleic acid molecule comprising the nucleic acid SEQ ID NO. 35733, preferably the coding region thereof, or a homolog or fragment thereof, e.g. derived from Escherichia coli, is increased or generated. For example the activity of a nucleic acid molecule or a polypeptide comprising the nucleic acid, preferably the coding region thereof, or polypeptide or the consensus sequence or the polypeptide motif, as depicted in Table I, II or IV, application No. 16, column 5 or 8 in the respective same line as the nucleic acid molecule SEQ ID NO. 35733 or polypeptide SEQ ID NO. 35734, respectively, or a homolog or a fragment thereof, is increased or generated, or if the activity beta-galactosidase is increased or generated in a non-human organism, like a microorganism or a plant cell, plant or part thereof, especially with plastidic localization, whereby the respective line disclose in column 7 the fine chemical coenzyme Q9. For example, an increase of the coenzyme Q9 of at least 1 percent, particularly in a range of 17 to 59-percent is conferred as compared to a corresponding non-transformed wild type non-human organism.

[77827] Accordingly, in one embodiment, an increase of coenzyme Q10 in a non-human organism, as compared to a corresponding non-transformed wild type non-human organism, is conferred in the process of the invention, if the activity of a polypeptide showing the activity of a ATP-binding component of a transport system, or if the activity of the polypeptide B0449, preferably represented by SEQ ID NO. 7334, or a homolog or fragment thereof, or if the activity of a polypeptide encoded by a nucleic acid molecule comprising the nucleic acid SEQ ID NO. 7333, preferably the coding region thereof, or a homolog or fragment thereof, e.g. derived from Escherichia coli, is increased or generated. For example the activity of a nucleic acid molecule or a polypeptide comprising the nucleic acid, preferably the coding region thereof, or polypeptide or the consensus sequence or the polypeptide motif, as depicted in Table I, II or IV, application No. 16, column 5 or 8 in the respective same line as the nucleic acid molecule SEQ ID NO. 7333 or polypeptide SEQ ID NO. 7334, respectively, or a homolog or a fragment thereof, is increased or generated, or if the activity ATP-binding component of a transport system is increased or generated in a non-human organism, like a microorganism or a plant cell, plant or part thereof, especially with non-targeted localization, whereby the respective line disclose in column 7 the fine chemical coenzyme Q10. For example, an increase of the coenzyme Q10 of at least 1 percent, particularly in a range of 69 to 266-percent is conferred as compared to a corresponding non-transformed wild type non-human organism.

[77828] Accordingly, in one embodiment, an increase of coenzyme Q9 in a non-human organism, as compared to a corresponding non-transformed wild type non-human organism, is conferred in the process of the invention, if the activity of a polypeptide showing the activity of a ATP-binding component of a transport system, or if the activity of the polypeptide B0449, preferably represented by SEQ ID NO. 7334, or a homolog or fragment thereof, or if the activity of a polypeptide encoded by a nucleic acid molecule comprising the nucleic acid SEQ ID NO. 7333, preferably the coding region thereof, or a homolog or fragment thereof, e.g. derived from Escherichia coli, is increased or generated. For example the activity of a nucleic acid molecule or a polypeptide comprising the nucleic acid, preferably the coding region thereof, or polypeptide or the consensus sequence or the polypeptide motif, as depicted in Table I, II or IV, application No. 16, column 5 or 8 in the respective same line as the nucleic acid molecule SEQ ID NO. 7333 or polypeptide SEQ ID NO. 7334, respectively, or a homolog or a fragment thereof, is increased or generated, or if the activity ATP-binding component of a transport system is increased or generated in a non-human organism, like a microorganism or a plant cell, plant or part thereof, especially with non-targeted localization, whereby the respective line disclose in column 7 the fine chemical coenzyme Q9. For example, an increase of the coenzyme Q9 of at least 1 percent, particularly in a range of 71 to 209-percent is conferred as compared to a corresponding non-transformed wild type non-human organism.

[77829] Accordingly, in one embodiment, an increase of coenzyme Q10 in a non-human organism, as compared to a corresponding non-transformed wild type non-human organism, is conferred in the process of the invention, if the activity of a polypeptide showing the activity of a zinc transporter, or if the activity of the polypeptide B0752, preferably represented by SEQ ID NO. 36115, or a homolog or fragment thereof, or if the activity of a polypeptide encoded by a nucleic acid molecule comprising the nucleic acid SEQ ID NO. 36114, preferably the coding region thereof, or a homolog or fragment thereof, e.g. derived from Escherichia coli, is increased or generated. For example the activity of a nucleic acid molecule or a polypeptide comprising the nucleic acid, preferably the coding region thereof, or polypeptide or the consensus sequence or the polypeptide motif, as depicted in Table I, II or IV, application No. 16, column 5 or 8 in the respective same line as the nucleic acid molecule SEQ ID NO. 36114 or polypeptide SEQ ID NO. 36115, respectively, or a homolog or a fragment thereof, is increased or generated, or if the activity zinc transporter is increased or generated in a non-human organism, like a microorganism or a plant cell, plant or part thereof, especially with non-targeted localization, whereby the respective line disclose in column 7 the fine chemical coenzyme Q10. For example, an increase of the coenzyme Q10 of at least 1 percent, particularly in a range of 98 to 188-percent is conferred as compared to a corresponding non-transformed wild type non-human organism.

[77830] Accordingly, in one embodiment, an increase of coenzyme Q9 in a non-human organism, as compared to a corresponding non-transformed wild type non-human organism, is conferred in the process of the invention, if the activity of a polypeptide showing the activity of a zinc transporter, or if the activity of the polypeptide B0752, preferably represented by SEQ ID NO. 36115, or a homolog or fragment thereof, or if the activity of a polypeptide encoded by a nucleic acid molecule comprising the nucleic acid SEQ ID NO. 36114, preferably the coding region thereof, or a homolog or fragment thereof, e.g. derived from Escherichia coli, is increased or generated.

[77831] For example the activity of a nucleic acid molecule or a polypeptide comprising the nucleic acid, preferably the coding region thereof, or polypeptide or the consensus sequence or the polypeptide motif, as depicted in Table I, II or IV, application No. 16, column 5 or 8 in the respective same line as the nucleic acid molecule SEQ ID NO. 36114 or polypeptide SEQ ID NO. 36115, respectively, or a homolog or a fragment thereof, is increased or generated, or if the activity zinc transporter is increased or generated in a non-human organism, like a microorganism or a plant cell, plant or part thereof, especially with non-targeted localization, whereby the respective line disclose in column 7 the fine chemical coenzyme Q9. For example, an increase of the coenzyme Q9 of at least 1 percent, particularly in a range of 53 to 96-percent is conferred as compared to a corresponding non-transformed wild type non-human organism.

[77832] Accordingly, in one embodiment, an increase of coenzyme Q10 in a non-human organism, as compared to a corresponding non-transformed wild type non-human organism, is conferred in the process of the invention, if the activity of a polypeptide showing the activity of a methylglyoxal synthase, or if the activity of the polypeptide B0963, preferably represented by SEQ ID NO. 36671, or a homolog or fragment thereof, or if the activity of a polypeptide encoded by a nucleic acid molecule comprising the nucleic acid SEQ ID NO. 36670, preferably the coding region thereof, or a homolog or fragment thereof, e.g. derived from Escherichia coli, is increased or generated. For example the activity of a nucleic acid molecule or a polypeptide comprising the nucleic acid, preferably the coding region thereof, or polypeptide or the consensus sequence or the polypeptide motif, as depicted in Table I, II or IV, application No. 16, column 5 or 8 in the respective same line as the nucleic acid molecule SEQ ID NO. 36670 or polypeptide SEQ ID NO. 36671, respectively, or a homolog or a fragment thereof, is increased or generated, or if the activity methylglyoxal synthase is increased or generated in a non-human organism, like a microorganism or a plant cell, plant or part thereof, especially with non-targeted localization, whereby the respective line disclose in column 7 the fine chemical coenzyme Q10. For example, an increase of the coenzyme Q10 of at least 1 percent, particularly in a range of 54 to 113-percent is conferred as compared to a corresponding non-transformed wild type non-human organism.

[77833] Accordingly, in one embodiment, an increase of coenzyme Q9 in a non-human organism, as compared to a corresponding non-transformed wild type non-human organism, is conferred in the process of the invention, if the activity of a polypeptide showing the activity of a methylglyoxal synthase, or if the activity of the polypeptide B0963, preferably represented by SEQ ID NO. 36671, or a homolog or fragment thereof, or if the activity of a polypeptide encoded by a nucleic acid molecule comprising the nucleic acid SEQ ID NO. 36670, preferably the coding region thereof, or a homolog or fragment thereof, e.g. derived from Escherichia coli, is increased or generated. For example the activity of a nucleic acid molecule or a polypeptide comprising the nucleic acid, preferably the coding region thereof, or polypeptide or the consensus sequence or the polypeptide motif, as depicted in Table I, II or IV, application No. 16, column 5 or 8 in the respective same line as the nucleic acid molecule SEQ ID NO. 36670 or polypeptide SEQ ID NO. 36671, respectively, or a homolog or a fragment thereof, is increased or generated, or if the activity methylglyoxal synthase is increased or generated in a non-human organism, like a microorganism or a plant cell, plant or part thereof, especially with non-targeted localization, whereby the respective line disclose in column 7 the fine chemical coenzyme Q9. For example, an increase of the coenzyme Q9 of at least 1 percent, particularly in a range of 46 to 60-percent is conferred as compared to a corresponding non-transformed wild type non-human organism.

[77834] Accordingly, in one embodiment, an increase of coenzyme Q9 in a non-human organism, as compared to a corresponding non-transformed wild type non-human organism, is conferred in the process of the invention, if the activity of a polypeptide showing the activity of a b1003-protein, or if the activity of the polypeptide B1003, preferably represented by SEQ ID NO. 7942, or a homolog or fragment thereof, or if the activity of a polypeptide encoded by a nucleic acid molecule comprising the nucleic acid SEQ ID NO. 7941, preferably the coding region thereof, or a homolog or fragment thereof, e.g. derived from Escherichia coli, is increased or generated.

[77835] For example the activity of a nucleic acid molecule or a polypeptide comprising the nucleic acid, preferably the coding region thereof, or polypeptide or the consensus sequence or the polypeptide motif, as depicted in Table I, II or IV, application No. 16, column 5 or 8 in the respective same line as the nucleic acid molecule SEQ ID NO. 7941 or polypeptide SEQ ID NO. 7942, respectively, or a homolog or a fragment thereof, is increased or generated, or if the activity b1003-protein is increased or generated in a non-human organism, like a microorganism or a plant cell, plant or part thereof, especially with non-targeted localization, whereby the respective line disclose in column 7 the fine chemical coenzyme Q9. For example, an increase of the coenzyme Q9 of at least 1 percent, particularly in a range of 40 to 287-percent is conferred as compared to a corresponding non-transformed wild type non-human organism.

[77836] Accordingly, in one embodiment, an increase of coenzyme Q9 in a non-human organism, as compared to a corresponding non-transformed wild type non-human organism, is conferred in the process of the invention, if the activity of a polypeptide showing the activity of a b1097-protein, or if the activity of the polypeptide B1097, preferably represented by SEQ ID NO. 138257, or a homolog or fragment thereof, or if the activity of a polypeptide encoded by a nucleic acid molecule comprising the nucleic acid SEQ ID NO. 138256, preferably the coding region thereof, or a homolog or fragment thereof, e.g. derived from Escherichia coli, is increased or generated. For example the activity of a nucleic acid molecule or a polypeptide comprising the nucleic acid, preferably the coding region thereof, or polypeptide or the consensus sequence or the polypeptide motif, as depicted in Table I, II or IV, application No. 16, column 5 or 8 in the respective same line as the nucleic acid molecule SEQ ID NO. 138256 or polypeptide SEQ ID NO. 138257, respectively, or a homolog or a fragment thereof, is increased or generated, or if the activity b1097-protein is increased or generated in a non-human organism, like a microorganism or a plant cell, plant or part thereof, especially with non-targeted localization, whereby the respective line disclose in column 7 the fine chemical coenzyme Q9. For example, an increase of the coenzyme Q9 of at least 1 percent, particularly in a range of 40 to 68-percent is conferred as compared to a corresponding non-transformed wild type non-human organism.

[77837] Accordingly, in one embodiment, an increase of coenzyme Q10 in a non-human organism, as compared to a corresponding non-transformed wild type non-human organism, is conferred in the process of the invention, if the activity of a polypeptide showing the activity of a b1522-protein, or if the activity of the polypeptide B1522, preferably represented by SEQ ID NO. 7948, or a homolog or fragment thereof, or if the activity of a polypeptide encoded by a nucleic acid molecule comprising the nucleic acid SEQ ID NO. 7947, preferably the coding region thereof, or a homolog or fragment thereof, e.g. derived from Escherichia coli, is increased or generated. For example the activity of a nucleic acid molecule or a polypeptide comprising the nucleic acid, preferably the coding region thereof, or polypeptide or the consensus sequence or the polypeptide motif, as depicted in Table I, II or IV, application No. 16, column 5 or 8 in the respective same line as the nucleic acid molecule SEQ ID NO. 7947 or polypeptide SEQ ID NO. 7948, respectively, or a homolog or a fragment thereof, is increased or generated, or if the activity b1522-protein is increased or generated in a non-human organism, like a microorganism or a plant cell, plant or part thereof, especially with non-targeted localization, whereby the respective line disclose in column 7 the fine chemical coenzyme Q10. For example, an increase of the coenzyme Q10 of at least 1 percent, particularly in a range of 56 to 198-percent is conferred as compared to a corresponding non-transformed wild type non-human organism.

[77838] Accordingly, in one embodiment, an increase of coenzyme Q9 in a non-human organism, as compared to a corresponding non-transformed wild type non-human organism, is conferred in the process of the invention, if the activity of a polypeptide showing the activity of a b1522-protein, or if the activity of the polypeptide B1522, preferably represented by SEQ ID NO. 7948, or a homolog or fragment thereof, or if the activity of a polypeptide encoded by a nucleic acid molecule comprising the nucleic acid SEQ ID NO. 7947, preferably the coding region thereof, or a homolog or fragment thereof, e.g. derived from Escherichia coli, is increased or generated. For example the activity of a nucleic acid molecule or a polypeptide comprising the nucleic acid, preferably the coding region thereof, or polypeptide or the consensus sequence or the polypeptide motif, as depicted in Table I, II or IV, application No. 16, column 5 or 8 in the respective same line as the nucleic acid molecule SEQ ID NO. 7947 or polypeptide SEQ ID NO. 7948, respectively, or a homolog or a fragment thereof, is increased or generated, or if the activity b1522-protein is increased or generated in a non-human organism, like a microorganism or a plant cell, plant or part thereof, especially with non-targeted localization, whereby the respective line disclose in column 7 the fine chemical coenzyme Q9. For example, an increase of the coenzyme Q9 of at least 1 percent, particularly in a range of 36 to 144-percent is conferred as compared to a corresponding non-transformed wild type non-human organism.

[77839] Accordingly, in one embodiment, an increase of coenzyme Q10 in a non-human organism, as compared to a corresponding non-transformed wild type non-human organism, is conferred in the process of the invention, if the activity of a polypeptide showing the activity of a acid shock protein, or if the activity of the polypeptide B1597, preferably represented by SEQ ID NO. 38301, or a homolog or fragment thereof, or if the activity of a polypeptide encoded by a nucleic acid molecule comprising the nucleic acid SEQ ID NO. 38300, preferably the coding region thereof, or a homolog or fragment thereof, e.g. derived from Escherichia coli, is increased or generated. For example the activity of a nucleic acid molecule or a polypeptide comprising the nucleic acid, preferably the coding region thereof, or polypeptide or the consensus sequence or the polypeptide motif, as depicted in Table I, II or IV, application No. 16, column 5 or 8 in the respective same line as the nucleic acid molecule SEQ ID NO. 38300 or polypeptide SEQ ID NO. 38301, respectively, or a homolog or a fragment thereof, is increased or generated, or if the activity acid shock protein is increased or generated in a non-human organism, like a microorganism or a plant cell, plant or part thereof, especially with non-targeted localization, whereby the respective line disclose in column 7 the fine chemical coenzyme Q10. For example, an increase of the coenzyme Q10 of at least 1 percent, particularly in a range of 81 to 159-percent is conferred as compared to a corresponding non-transformed wild type non-human organism.

[77840] Accordingly, in one embodiment, an increase of coenzyme Q9 in a non-human organism, as compared to a corresponding non-transformed wild type non-human organism, is conferred in the process of the invention, if the activity of a polypeptide showing the activity of a acid shock protein, or if the activity of the polypeptide B1597, preferably represented by SEQ ID NO. 38301, or a homolog or fragment thereof, or if the activity of a polypeptide encoded by a nucleic acid molecule comprising the nucleic acid SEQ ID NO. 38300, preferably the coding region thereof, or a homolog or fragment thereof, e.g. derived from Escherichia coli, is increased or generated. For example the activity of a nucleic acid molecule or a polypeptide comprising the nucleic acid, preferably the coding region thereof, or polypeptide or the consensus sequence or the polypeptide motif, as depicted in Table I, II or IV, application No. 16, column 5 or 8 in the respective same line as the nucleic acid molecule SEQ ID NO. 38300 or polypeptide SEQ ID NO. 38301, respectively, or a homolog or a fragment thereof, is increased or generated, or if the activity acid shock protein is increased or generated in a non-human organism, like a microorganism or a plant cell, plant or part thereof, especially with non-targeted localization, whereby the respective line disclose in column 7 the fine chemical coenzyme Q9. For example, an increase of the coenzyme Q9 of at least 1 percent, particularly in a range of 46 to 168-percent is conferred as compared to a corresponding non-transformed wild type non-human organism.

[77841] Accordingly, in one embodiment, an increase of coenzyme Q9 in a non-human organism, as compared to a corresponding non-transformed wild type non-human organism, is conferred in the process of the invention, if the activity of a polypeptide showing the activity of a serine/threonine-protein phosphatase, or if the activity of the polypeptide B1838, preferably represented by SEQ ID NO. 8317, or a homolog or fragment thereof, or if the activity of a polypeptide encoded by a nucleic acid molecule comprising the nucleic acid SEQ ID NO. 8316, preferably the coding region thereof, or a homolog or fragment thereof, e.g. derived from Escherichia coli, is increased or generated. For example the activity of a nucleic acid molecule or a polypeptide comprising the nucleic acid, preferably the coding region thereof, or polypeptide or the consensus sequence or the polypeptide motif, as depicted in Table I, II or IV, application No. 16, column 5 or 8 in the respective same line as the nucleic acid molecule SEQ ID NO. 8316 or polypeptide SEQ ID NO. 8317, respectively, or a homolog or a fragment thereof, is increased or generated, or if the activity serine/threonine-protein phosphatase is increased or generated in a non-human organism, like a microorganism or a plant cell, plant or part thereof, especially with non-targeted localization, whereby the respective line disclose in column 7 the fine chemical coenzyme Q9. For example, an increase of the coenzyme Q9 of at least 1 percent, particularly in a range of 36 to 94-percent is conferred as compared to a corresponding non-transformed wild type non-human organism.

[77842] Accordingly, in one embodiment, an increase of coenzyme Q9 in a non-human organism, as compared to a corresponding non-transformed wild type non-human organism, is conferred in the process of the invention, if the activity of a polypeptide showing the activity of a b2032-protein, or if the activity of the polypeptide B2032, preferably represented by SEQ ID NO. 8921, or a homolog or fragment thereof, or if the activity of a polypeptide encoded by a nucleic acid molecule comprising the nucleic acid SEQ ID NO. 8920, preferably the coding region thereof, or a homolog or fragment thereof, e.g. derived from Escherichia coli, is increased or generated. For example the activity of a nucleic acid molecule or a polypeptide comprising the nucleic acid, preferably the coding region thereof, or polypeptide or the consensus sequence or the polypeptide motif, as depicted in Table I, II or IV, application No. 16, column 5 or 8 in the respective same line as the nucleic acid molecule SEQ ID NO. 8920 or polypeptide SEQ ID NO. 8921, respectively, or a homolog or a fragment thereof, is increased or generated, or if the activity b2032-protein is increased or generated in a non-human organism, like a microorganism or a plant cell, plant or part thereof, especially with non-targeted localization, whereby the respective line disclose in column 7 the fine chemical coenzyme Q9. For example, an increase of the coenzyme Q9 of at least 1 percent, particularly in a range of 36 to 118-percent is conferred as compared to a corresponding non-transformed wild type non-human organism.

[77843] Accordingly, in one embodiment, an increase of coenzyme Q10 in a non-human organism, as compared to a corresponding non-transformed wild type non-human organism, is conferred in the process of the invention, if the activity of a polypeptide showing the activity of a colanic acid biosynthesis protein, or if the activity of the polypeptide B2043, preferably represented by SEQ ID NO. 112194, or a homolog or fragment thereof, or if the activity of a polypeptide encoded by a nucleic acid molecule comprising the nucleic acid SEQ ID NO. 112193, preferably the coding region thereof, or a homolog or fragment thereof, e.g. derived from Escherichia coli, is increased or generated. For example the activity of a nucleic acid molecule or a polypeptide comprising the nucleic acid, preferably the coding region thereof, or polypeptide or the consensus sequence or the polypeptide motif, as depicted in Table I, II or IV, application No. 16, column 5 or 8 in the respective same line as the nucleic acid molecule SEQ ID NO. 112193 or polypeptide SEQ ID NO. 112194, respectively, or a homolog or a fragment thereof, is increased or generated, or if the activity colanic acid biosynthesis protein is increased or generated in a non-human organism, like a microorganism or a plant cell, plant or part thereof, especially with non-targeted localization, whereby the respective line disclose in column 7 the fine chemical coenzyme Q10. For example, an increase of the coenzyme Q10 of at least 1 percent, particularly in a range of 128 to 257-percent is conferred as compared to a corresponding non-transformed wild type non-human organism.

[77844] Accordingly, in one embodiment, an increase of coenzyme Q9 in a non-human organism, as compared to a corresponding non-transformed wild type non-human organism, is conferred in the process of the invention, if the activity of a polypeptide showing the activity of a NADH dehydrogenase I chain I, or if the activity of the polypeptide B2281, preferably represented by SEQ ID NO. 39121, or a homolog or fragment thereof, or if the activity of a polypeptide encoded by a nucleic acid molecule comprising the nucleic acid SEQ ID NO. 39120, preferably the coding region thereof, or a homolog or fragment thereof, e.g. derived from Escherichia coli, is increased or generated. For example the activity of a nucleic acid molecule or a polypeptide comprising the nucleic acid, preferably the coding region thereof, or polypeptide or the consensus sequence or the polypeptide motif, as depicted in Table I, II or IV, application No. 16, column 5 or 8 in the respective same line as the nucleic acid molecule SEQ ID NO. 39120 or polypeptide SEQ ID NO. 39121, respectively, or a homolog or a fragment thereof, is increased or generated, or if the activity NADH dehydrogenase I chain I is increased or generated in a non-human organism, like a microorganism or a plant cell, plant or part thereof, especially with non-targeted localization, whereby the respective line disclose in column 7 the fine chemical coenzyme Q9. For example, an increase of the coenzyme Q9 of at least 1 percent, particularly in a range of 19 to 33-percent is conferred as compared to a corresponding non-transformed wild type non-human organism.

[77845] Accordingly, in one embodiment, an increase of nicotinic acid in a non-human organism, as compared to a corresponding non-transformed wild type non-human organism, is conferred in the process of the invention, if the activity of a polypeptide showing the activity of a ATP synthase subunit E, or if the activity of the polypeptide B2285, preferably represented by SEQ ID NO. 99621, or a homolog or fragment thereof, or if the activity of a polypeptide encoded by a nucleic acid molecule comprising the nucleic acid SEQ ID NO. 99620, preferably the coding region thereof, or a homolog or fragment thereof, e.g. derived from Escherichia coli, is increased or generated. For example the activity of a nucleic acid molecule or a polypeptide comprising the nucleic acid, preferably the coding region thereof, or polypeptide or the consensus sequence or the polypeptide motif, as depicted in Table I, II or IV, application No. 16, column 5 or 8 in the respective same line as the nucleic acid molecule SEQ ID NO. 99620 or polypeptide SEQ ID NO. 99621, respectively, or a homolog or a fragment thereof, is increased or generated, or if the activity ATP synthase subunit E is increased or generated in a non-human organism, like a microorganism or a plant cell, plant or part thereof, especially with non-targeted localization, whereby the respective line disclose in column 7 the fine chemical nicotinic acid. For example, an increase of the nicotinic acid of at least 1 percent, particularly in a range of 26 to 42-percent is conferred as compared to a corresponding non-transformed wild type non-human organism.

[77846] Accordingly, in one embodiment, an increase of nicotinic acid in a non-human organism, as compared to a corresponding non-transformed wild type non-human organism, is conferred in the process of the invention, if the activity of a polypeptide showing the activity of a L-aspartate oxidase, or if the activity of the polypeptide B2574, preferably represented by SEQ ID NO. 138378, or a homolog or fragment thereof, or if the activity of a polypeptide encoded by a nucleic acid molecule comprising the nucleic acid SEQ ID NO. 138377, preferably the coding region thereof, or a homolog or fragment thereof, e.g. derived from Escherichia coli, is increased or generated. For example the activity of a nucleic acid molecule or a polypeptide comprising the nucleic acid, preferably the coding region thereof, or polypeptide or the consensus sequence or the polypeptide motif, as depicted in Table I, II or IV, application No. 16, column 5 or 8 in the respective same line as the nucleic acid molecule SEQ ID NO. 138377 or polypeptide SEQ ID NO. 138378, respectively, or a homolog or a fragment thereof, is increased or generated, or if the activity L-aspartate oxidase is increased or generated in a non-human organism, like a microorganism or a plant cell, plant or part thereof, especially with plastidic localization, whereby the respective line disclose in column 7 the fine chemical nicotinic acid. For example, an increase of the nicotinic acid of at least 1 percent, particularly in a range of 24 to 430-percent is conferred as compared to a corresponding non-transformed wild type non-human organism.

[77847] Accordingly, in one embodiment, an increase of coenzyme Q9 in a non-human organism, as compared to a corresponding non-transformed wild type non-human organism, is conferred in the process of the invention, if the activity of a polypeptide showing the activity of a b2739-protein, or if the activity of the polypeptide B2739, preferably represented by SEQ ID NO. 80907, or a homolog or fragment thereof, or if the activity of a polypeptide encoded by a nucleic acid molecule comprising the nucleic acid SEQ ID NO. 80906, preferably the coding region thereof, or a homolog or fragment thereof, e.g. derived from Escherichia coli, is increased or generated. For example the activity of a nucleic acid molecule or a polypeptide comprising the nucleic acid, preferably the coding region thereof, or polypeptide or the consensus sequence or the polypeptide motif, as depicted in Table I, II or IV, application No. 16, column 5 or 8 in the respective same line as the nucleic acid molecule SEQ ID NO. 80906 or polypeptide SEQ ID NO. 80907, respectively, or a homolog or a fragment thereof, is increased or generated, or if the activity b2739-protein is increased or generated in a non-human organism, like a microorganism or a plant cell, plant or part thereof, especially with non-targeted localization, whereby the respective line disclose in column 7 the fine chemical coenzyme Q9. For example, an increase of the coenzyme Q9 of at least 1 percent, particularly in a range of 37 to 114-percent is conferred as compared to a corresponding non-transformed wild type non-human organism.

[77848] Accordingly, in one embodiment, an increase of coenzyme Q9 in a non-human organism, as compared to a corresponding non-transformed wild type non-human organism, is conferred in the process of the invention, if the activity of a polypeptide showing the activity of a 2-C-methyl-D-erythritol 4-phosphate cytidylyltransferase, or if the activity of the polypeptide B2747, preferably represented by SEQ ID NO. 81076, or a homolog or fragment thereof, or if the activity of a polypeptide encoded by a nucleic acid molecule comprising the nucleic acid SEQ ID NO. 81075, preferably the coding region thereof, or a homolog or fragment thereof, e.g. derived from Escherichia coli, is increased or generated. For example the activity of a nucleic acid molecule or a polypeptide comprising the nucleic acid, preferably the coding region thereof, or polypeptide or the consensus sequence or the polypeptide motif, as depicted in Table I, II or IV, application No. 16, column 5 or 8 in the respective same line as the nucleic acid molecule SEQ ID NO. 81075 or polypeptide SEQ ID NO. 81076, respectively, or a homolog or a fragment thereof, is increased or generated, or if the activity 2-C-methyl-D-erythritol 4-phosphate cytidylyltransferase is increased or generated in a non-human organism, like a microorganism or a plant cell, plant or part thereof, especially with non-targeted localization, whereby the respective line disclose in column 7 the fine chemical coenzyme Q9. For example, an increase of the coenzyme Q9 of at least 1 percent, particularly in a range of 70 to 125-percent is conferred as compared to a corresponding non-transformed wild type non-human organism.

[77849] Accordingly, in one embodiment, an increase of lipoic acid in a non-human organism, as compared to a corresponding non-transformed wild type non-human organism, is conferred in the process of the invention, if the activity of a polypeptide showing the activity of a phosphoadenosine phosphosulfate reductase, or if the activity of the polypeptide B2762, preferably represented by SEQ ID NO. 81452, or a homolog or fragment thereof, or if the activity of a polypeptide encoded by a nucleic acid molecule comprising the nucleic acid SEQ ID NO. 81451, preferably the coding region thereof, or a homolog or fragment thereof, e.g. derived from Escherichia coli, is increased or generated. For example the activity of a nucleic acid molecule or a polypeptide comprising the nucleic acid, preferably the coding region thereof, or polypeptide or the consensus sequence or the polypeptide motif, as depicted in Table I, II or IV, application No. 16, column 5 or 8 in the respective same line as the nucleic acid molecule SEQ ID NO. 81451 or polypeptide SEQ ID NO. 81452, respectively, or a homolog or a fragment thereof, is increased or generated, or if the activity phosphoadenosine phosphosulfate reductase is increased or generated in a non-human organism, like a microorganism or a plant cell, plant or part thereof, especially with non-targeted localization, whereby the respective line disclose in column 7 the fine chemical lipoic acid. For example, an increase of the lipoic acid of at least 1 percent, particularly in a range of 472 to 18201-percent is conferred as compared to a corresponding non-transformed wild type non-human organism.

[77850] Accordingly, in one embodiment, an increase of coenzyme Q9 in a non-human organism, as compared to a corresponding non-transformed wild type non-human organism, is conferred in the process of the invention, if the activity of a polypeptide showing the activity of a b2849-protein, or if the activity of the polypeptide B2849, preferably represented by SEQ ID NO. 81981, or a homolog or fragment thereof, or if the activity of a polypeptide encoded by a nucleic acid molecule comprising the nucleic acid SEQ ID NO. 81980, preferably the coding region thereof, or a homolog or fragment thereof, e.g. derived from Escherichia coli, is increased or generated. For example the activity of a nucleic acid molecule or a polypeptide comprising the nucleic acid, preferably the coding region thereof, or polypeptide or the consensus sequence or the polypeptide motif, as depicted in Table I, II or IV, application No. 16, column 5 or 8 in the respective same line as the nucleic acid molecule SEQ ID NO. 81980 or polypeptide SEQ ID NO. 81981, respectively, or a homolog or a fragment thereof, is increased or generated, or if the activity b2849-protein is increased or generated in a non-human organism, like a microorganism or a plant cell, plant or part thereof, especially with non-targeted localization, whereby the respective line disclose in column 7 the fine chemical coenzyme Q9. For example, an increase of the coenzyme Q9 of at least 1 percent, particularly in a range of 38 to 73-percent is conferred as compared to a corresponding non-transformed wild type non-human organism.

[77851] Accordingly, in one embodiment, an increase of coenzyme Q9 in a non-human organism, as compared to a corresponding non-transformed wild type non-human organism, is conferred in the process of the invention, if the activity of a polypeptide showing the activity of a methyltransferase, or if the activity of the polypeptide B3262, preferably represented by SEQ ID NO. 42503, or a homolog or fragment thereof, or if the activity of a polypeptide encoded by a nucleic acid molecule comprising the nucleic acid SEQ ID NO. 42502, preferably the coding region thereof, or a homolog or fragment thereof, e.g. derived from Escherichia coli, is increased or generated. For example the activity of a nucleic acid molecule or a polypeptide comprising the nucleic acid, preferably the coding region thereof, or polypeptide or the consensus sequence or the polypeptide motif, as depicted in Table I, II or IV, application No. 16, column 5 or 8 in the respective same line as the nucleic acid molecule SEQ ID NO. 42502 or polypeptide SEQ ID NO. 42503, respectively, or a homolog or a fragment thereof, is increased or generated, or if the activity methyltransferase is increased or generated in a non-human organism, like a microorganism or a plant cell, plant or part thereof, especially with non-targeted localization, whereby the respective line disclose in column 7 the fine chemical coenzyme Q9. For example, an increase of the coenzyme Q9 of at least 1 percent, particularly in a range of 49 to 107-percent is conferred as compared to a corresponding non-transformed wild type non-human organism.

[77852] Accordingly, in one embodiment, an increase of coenzyme Q10 in a non-human organism, as compared to a corresponding non-transformed wild type non-human organism, is conferred in the process of the invention, if the activity of a polypeptide showing the activity of a Ribose import ATP-binding protein, or if the activity of the polypeptide B3749, preferably represented by SEQ ID NO. 138771, or a homolog or fragment thereof, or if the activity of a polypeptide encoded by a nucleic acid molecule comprising the nucleic acid SEQ ID NO. 138770, preferably the coding region thereof, or a homolog or fragment thereof, e.g. derived from Escherichia coli, is increased or generated. For example the activity of a nucleic acid molecule or a polypeptide comprising the nucleic acid, preferably the coding region thereof, or polypeptide or the consensus sequence or the polypeptide motif, as depicted in Table I, II or IV, application No. 16, column 5 or 8 in the respective same line as the nucleic acid molecule SEQ ID NO. 138770 or polypeptide SEQ ID NO. 138771, respectively, or a homolog or a fragment thereof, is increased or generated, or if the activity Ribose import ATP-binding protein is increased or generated in a non-human organism, like a microorganism or a plant cell, plant or part thereof, especially with non-targeted localization, whereby the respective line disclose in column 7 the fine chemical coenzyme Q10. For example, an increase of the coenzyme Q10 of at least 1 percent, particularly in a range of 74 to 169-percent is conferred as compared to a corresponding non-transformed wild type non-human organism.

[77853] Accordingly, in one embodiment, an increase of coenzyme Q9 in a non-human organism, as compared to a corresponding non-transformed wild type non-human organism, is conferred in the process of the invention, if the activity of a polypeptide showing the activity of a b3817-protein, or if the activity of the polypeptide B3817, preferably represented by SEQ ID NO. 10709, or a homolog or fragment thereof, or if the activity of a polypeptide encoded by a nucleic acid molecule comprising the nucleic acid SEQ ID NO. 10708, preferably the coding region thereof, or a homolog or fragment thereof, e.g. derived from Escherichia coli, is increased or generated. For example the activity of a nucleic acid molecule or a polypeptide comprising the nucleic acid, preferably the coding region thereof, or polypeptide or the consensus sequence or the polypeptide motif, as depicted in Table I, II or IV, application No. 16, column 5 or 8 in the respective same line as the nucleic acid molecule SEQ ID NO. 10708 or polypeptide SEQ ID NO. 10709, respectively, or a homolog or a fragment thereof, is increased or generated, or if the activity b3817-protein is increased or generated in a non-human organism, like a microorganism or a plant cell, plant or part thereof, especially with non-targeted localization, whereby the respective line disclose in column 7 the fine chemical coenzyme Q9. For example, an increase of the coenzyme Q9 of at least 1 percent, particularly in a range of 84 to 98-percent is conferred as compared to a corresponding non-transformed wild type non-human organism.

[77854] Accordingly, in one embodiment, an increase of coenzyme Q9 in a non-human organism, as compared to a corresponding non-transformed wild type non-human organism, is conferred in the process of the invention, if the activity of a polypeptide showing the activity of a glycerol dehydrogenase, or if the activity of the polypeptide B3945, preferably represented by SEQ ID NO. 44224, or a homolog or fragment thereof, or if the activity of a polypeptide encoded by a nucleic acid molecule comprising the nucleic acid SEQ ID NO. 44223, preferably the coding region thereof, or a homolog or fragment thereof, e.g. derived from Escherichia coli, is increased or generated. For example the activity of a nucleic acid molecule or a polypeptide comprising the nucleic acid, preferably the coding region thereof, or polypeptide or the consensus sequence or the polypeptide motif, as depicted in Table I, II or IV, application No. 16, column 5 or 8 in the respective same line as the nucleic acid molecule SEQ ID NO. 44223 or polypeptide SEQ ID NO. 44224, respectively, or a homolog or a fragment thereof, is increased or generated, or if the activity glycerol dehydrogenase is increased or generated in a non-human organism, like a microorganism or a plant cell, plant or part thereof, especially with non-targeted localization, whereby the respective line disclose in column 7 the fine chemical coenzyme Q9. For example, an increase of the coenzyme Q9 of at least 1 percent, particularly in a range of 22 to 37-percent is conferred as compared to a corresponding non-transformed wild type non-human organism.

[77855] Accordingly, in one embodiment, an increase of coenzyme Q10 in a non-human organism, as compared to a corresponding non-transformed wild type non-human organism, is conferred in the process of the invention, if the activity of a polypeptide showing the activity of a N-acetyl-gamma-glutamylphosphate reductase, or if the activity of the polypeptide B3958, preferably represented by SEQ ID NO. 138858, or a homolog or fragment thereof, or if the activity of a polypeptide encoded by a nucleic acid molecule comprising the nucleic acid SEQ ID NO. 138857, preferably the coding region thereof, or a homolog or fragment thereof, e.g. derived from Escherichia coli, is increased or generated. For example the activity of a nucleic acid molecule or a polypeptide comprising the nucleic acid, preferably the coding region thereof, or polypeptide or the consensus sequence or the polypeptide motif, as depicted in Table I, II or IV, application No. 16, column 5 or 8 in the respective same line as the nucleic acid molecule SEQ ID NO. 138857 or polypeptide SEQ ID NO. 138858, respectively, or a homolog or a fragment thereof, is increased or generated, or if the activity N-acetyl-gamma-glutamylphosphate reductase is increased or generated in a non-human organism, like a microorganism or a plant cell, plant or part thereof, especially with plastidic localization, whereby the respective line disclose in column 7 the fine chemical coenzyme Q10. For example, an increase of the coenzyme Q10 of at least 1 percent, particularly in a range of 24 to 32-percent is conferred as compared to a corresponding non-transformed wild type non-human organism.

[77856] Accordingly, in one embodiment, an increase of coenzyme Q9 in a non-human organism, as compared to a corresponding non-transformed wild type non-human organism, is conferred in the process of the invention, if the activity of a polypeptide showing the activity of a b4029-protein, or if the activity of the polypeptide B4029, preferably represented by SEQ ID NO. 10741, or a homolog or fragment thereof, or if the activity of a polypeptide encoded by a nucleic acid molecule comprising the nucleic acid SEQ ID NO. 10740, preferably the coding region thereof, or a homolog or fragment thereof, e.g. derived from Escherichia coli, is increased or generated. For example the activity of a nucleic acid molecule or a polypeptide comprising the nucleic acid, preferably the coding region thereof, or polypeptide or the consensus sequence or the polypeptide motif, as depicted in Table I, II or IV, application No. 16, column 5 or 8 in the respective same line as the nucleic acid molecule SEQ ID NO. 10740 or polypeptide SEQ ID NO. 10741, respectively, or a homolog or a fragment thereof, is increased or generated, or if the activity b4029-protein is increased or generated in a non-human organism, like a microorganism or a plant cell, plant or part thereof, especially with non-targeted localization, whereby the respective line disclose in column 7 the fine chemical coenzyme Q9. For example, an increase of the coenzyme Q9 of at least 1 percent, particularly in a range of 41 to 171-percent is conferred as compared to a corresponding non-transformed wild type non-human organism.

[77857] Accordingly, in one embodiment, an increase of coenzyme Q9 in a non-human organism, as compared to a corresponding non-transformed wild type non-human organism, is conferred in the process of the invention, if the activity of a polypeptide showing the activity of a acetyltransferase, or if the activity of the polypeptide B4256, preferably represented by SEQ ID NO. 45322, or a homolog or fragment thereof, or if the activity of a polypeptide encoded by a nucleic acid molecule comprising the nucleic acid SEQ ID NO. 45321, preferably the coding region thereof, or a homolog or fragment thereof, e.g. derived from Escherichia coli, is increased or generated. For example the activity of a nucleic acid molecule or a polypeptide comprising the nucleic acid, preferably the coding region thereof, or polypeptide or the consensus sequence or the polypeptide motif, as depicted in Table I, II or IV, application No. 16, column 5 or 8 in the respective same line as the nucleic acid molecule SEQ ID NO. 45321 or polypeptide SEQ ID NO. 45322, respectively, or a homolog or a fragment thereof, is increased or generated, or if the activity acetyltransferase is increased or generated in a non-human organism, like a microorganism or a plant cell, plant or part thereof, especially with non-targeted localization, whereby the respective line disclose in column 7 the fine chemical coenzyme Q9. For example, an increase of the coenzyme Q9 of at least 1 percent, particularly in a range of 43 to 135-percent is conferred as compared to a corresponding non-transformed wild type non-human organism.

[77858] Accordingly, in one embodiment, an increase of coenzyme Q9 in a non-human organism, as compared to a corresponding non-transformed wild type non-human organism, is conferred in the process of the invention, if the activity of a polypeptide showing the activity of a gluconate transport system permease 3, or if the activity of the polypeptide B4321, preferably represented by SEQ ID NO. 45395, or a homolog or fragment thereof, or if the activity of a polypeptide encoded by a nucleic acid molecule comprising the nucleic acid SEQ ID NO. 45394, preferably the coding region thereof, or a homolog or fragment thereof, e.g. derived from Escherichia coli, is increased or generated. For example the activity of a nucleic acid molecule or a polypeptide comprising the nucleic acid, preferably the coding region thereof, or polypeptide or the consensus sequence or the polypeptide motif, as depicted in Table I, II or IV, application No. 16, column 5 or 8 in the respective same line as the nucleic acid molecule SEQ ID NO. 45394 or polypeptide SEQ ID NO. 45395, respectively, or a homolog or a fragment thereof, is increased or generated, or if the activity gluconate transport system permease 3 is increased or generated in a non-human organism, like a microorganism or a plant cell, plant or part thereof, especially with non-targeted localization, whereby the respective line disclose in column 7 the fine chemical coenzyme Q9. For example, an increase of the coenzyme Q9 of at least 1 percent, particularly in a range of 47 to 110-percent is conferred as compared to a corresponding non-transformed wild type non-human organism.

[77859] Accordingly, in one embodiment, an increase of coenzyme Q10 in a non-human organism, as compared to a corresponding non-transformed wild type non-human organism, is conferred in the process of the invention, if the activity of a polypeptide showing the activity of a transcription factor, or if the activity of the polypeptide GM02LC19289, preferably represented by SEQ ID NO. 46752, or a homolog or fragment thereof, or if the activity of a polypeptide encoded by a nucleic acid molecule comprising the nucleic acid SEQ ID NO. 46751, preferably the coding region thereof, or a homolog or fragment thereof, e.g. derived from Glycine max, is increased or generated. For example the activity of a nucleic acid molecule or a polypeptide comprising the nucleic acid, preferably the coding region thereof, or polypeptide or the consensus sequence or the polypeptide motif, as depicted in Table I, II or IV, application No. 16, column 5 or 8 in the respective same line as the nucleic acid molecule SEQ ID NO. 46751 or polypeptide SEQ ID NO. 46752, respectively, or a homolog or a fragment thereof, is increased or generated, or if the activity transcription factor is increased or generated in a non-human organism, like a microorganism or a plant cell, plant or part thereof, especially with non-targeted localization, whereby the respective line disclose in column 7 the fine chemical coenzyme Q10. For example, an increase of the coenzyme Q10 of at least 1 percent, particularly in a range of 61 to 107-percent is conferred as compared to a corresponding non-transformed wild type non-human organism.

[77860] Accordingly, in one embodiment, an increase of coenzyme Q9 in a non-human organism, as compared to a corresponding non-transformed wild type non-human organism, is conferred in the process of the invention, if the activity of a polypeptide showing the activity of a transcription factor, or if the activity of the polypeptide GM02LC19289, preferably represented by SEQ ID NO. 46752, or a homolog or fragment thereof, or if the activity of a polypeptide encoded by a nucleic acid molecule comprising the nucleic acid SEQ ID NO. 46751, preferably the coding region thereof, or a homolog or fragment thereof, e.g. derived from Glycine max, is increased or generated. For example the activity of a nucleic acid molecule or a polypeptide comprising the nucleic acid, preferably the coding region thereof, or polypeptide or the consensus sequence or the polypeptide motif, as depicted in Table I, II or IV, application No. 16, column 5 or 8 in the respective same line as the nucleic acid molecule SEQ ID NO. 46751 or polypeptide SEQ ID NO. 46752, respectively, or a homolog or a fragment thereof, is increased or generated, or if the activity transcription factor is increased or generated in a non-human organism, like a microorganism or a plant cell, plant or part thereof, especially with non-targeted localization, whereby the respective line disclose in column 7 the fine chemical coenzyme Q9. For example, an increase of the coenzyme Q9 of at least 1 percent, particularly in a range of 53 to 82-percent is conferred as compared to a corresponding non-transformed wild type non-human organism.

[77861] Accordingly, in one embodiment, an increase of coenzyme Q10 in a non-human organism, as compared to a corresponding non-transformed wild type non-human organism, is conferred in the process of the invention, if the activity of a polypeptide showing the activity of a transcription factor, or if the activity of the polypeptide GM02LC21368, preferably represented by SEQ ID NO. 84199, or a homolog or fragment thereof, or if the activity of a polypeptide encoded by a nucleic acid molecule comprising the nucleic acid SEQ ID NO. 84198, preferably the coding region thereof, or a homolog or fragment thereof, e.g. derived from Glycine max, is increased or generated. For example the activity of a nucleic acid molecule or a polypeptide comprising the nucleic acid, preferably the coding region thereof, or polypeptide or the consensus sequence or the polypeptide motif, as depicted in Table I, II or IV, application No. 16, column 5 or 8 in the respective same line as the nucleic acid molecule SEQ ID NO. 84198 or polypeptide SEQ ID NO. 84199, respectively, or a homolog or a fragment thereof, is increased or generated, or if the activity transcription factor is increased or generated in a non-human organism, like a microorganism or a plant cell, plant or part thereof, especially with non-targeted localization, whereby the respective line disclose in column 7 the fine chemical coenzyme Q10. For example, an increase of the coenzyme Q10 of at least 1 percent, particularly in a range of 56 to 519-percent is conferred as compared to a corresponding non-transformed wild type non-human organism.

[77862] Accordingly, in one embodiment, an increase of coenzyme Q10 in a non-human organism, as compared to a corresponding non-transformed wild type non-human organism, is conferred in the process of the invention, if the activity of a polypeptide showing the activity of a flavodoxin, or if the activity of the polypeptide Sll0248, preferably represented by SEQ ID NO. 49144, or a homolog or fragment thereof, or if the activity of a polypeptide encoded by a nucleic acid molecule comprising the nucleic acid SEQ ID NO. 49143, preferably the coding region thereof, or a homolog or fragment thereof, e.g. derived from Synechocystis sp., is increased or generated. For example the activity of a nucleic acid molecule or a polypeptide comprising the nucleic acid, preferably the coding region thereof, or polypeptide or the consensus sequence or the polypeptide motif, as depicted in Table I, II or IV, application No. 16, column 5 or 8 in the respective same line as the nucleic acid molecule SEQ ID NO. 49143 or polypeptide SEQ ID NO. 49144, respectively, or a homolog or a fragment thereof, is increased or generated, or if the activity flavodoxin is increased or generated in a non-human organism, like a microorganism or a plant cell, plant or part thereof, especially with plastidic localization, whereby the respective line disclose in column 7 the fine chemical coenzyme Q10. For example, an increase of the coenzyme Q10 of at least 1 percent, particularly in a range of 95 to 573-percent is conferred as compared to a corresponding non-transformed wild type non-human organism.

[77863] Accordingly, in one embodiment, an increase of coenzyme Q10 in a non-human organism, as compared to a corresponding non-transformed wild type non-human organism, is conferred in the process of the invention, if the activity of a polypeptide showing the activity of a uroporphyrin-III C-methyltransferase, or if the activity of the polypeptide Sll0378, preferably represented by SEQ ID NO. 84870, or a homolog or fragment thereof, or if the activity of a polypeptide encoded by a nucleic acid molecule comprising the nucleic acid SEQ ID NO. 84869, preferably the coding region thereof, or a homolog or fragment thereof, e.g. derived from Synechocystis sp., is increased or generated. For example the activity of a nucleic acid molecule or a polypeptide comprising the nucleic acid, preferably the coding region thereof, or polypeptide or the consensus sequence or the polypeptide motif, as depicted in Table I, II or IV, application No. 16, column 5 or 8 in the respective same line as the nucleic acid molecule SEQ ID NO. 84869 or polypeptide SEQ ID NO. 84870, respectively, or a homolog or a fragment thereof, is increased or generated, or if the activity uroporphyrin-III C-methyltransferase is increased or generated in a non-human organism, like a microorganism or a plant cell, plant or part thereof, especially with plastidic localization, whereby the respective line disclose in column 7 the fine chemical coenzyme Q10. For example, an increase of the coenzyme Q10 of at least 1 percent, particularly in a range of 58 to 77-percent is conferred as compared to a corresponding non-transformed wild type non-human organism.

[77864] Accordingly, in one embodiment, an increase of coenzyme Q10 in a non-human organism, as compared to a corresponding non-transformed wild type non-human organism, is conferred in the process of the invention, if the activity of a polypeptide showing the activity of a sll1761-protein, or if the activity of the polypeptide Sll1761, preferably represented by SEQ ID NO. 55380, or a homolog or fragment thereof, or if the activity of a polypeptide encoded by a nucleic acid molecule comprising the nucleic acid SEQ ID NO. 55379, preferably the coding region thereof, or a homolog or fragment thereof, e.g. derived from Synechocystis sp., is increased or generated. For example the activity of a nucleic acid molecule or a polypeptide comprising the nucleic acid, preferably the coding region thereof, or polypeptide or the consensus sequence or the polypeptide motif, as depicted in Table I, II or IV, application No. 16, column 5 or 8 in the respective same line as the nucleic acid molecule SEQ ID NO. 55379 or polypeptide SEQ ID NO. 55380, respectively, or a homolog or a fragment thereof, is increased or generated, or if the activity sll1761-protein is increased or generated in a non-human organism, like a microorganism or a plant cell, plant or part thereof, especially with non-targeted localization, whereby the respective line disclose in column 7 the fine chemical coenzyme Q10. For example, an increase of the coenzyme Q10 of at least 1 percent, particularly in a range of 81 to 152-percent is conferred as compared to a corresponding non-transformed wild type non-human organism.

[77865] Accordingly, in one embodiment, an increase of coenzyme Q9 in a non-human organism, as compared to a corresponding non-transformed wild type non-human organism, is conferred in the process of the invention, if the activity of a polypeptide showing the activity of a sll1761-protein, or if the activity of the polypeptide Sll1761, preferably represented by SEQ ID NO. 55380, or a homolog or fragment thereof, or if the activity of a polypeptide encoded by a nucleic acid molecule comprising the nucleic acid SEQ ID NO. 55379, preferably the coding region thereof, or a homolog or fragment thereof, e.g. derived from Synechocystis sp., is increased or generated. For example the activity of a nucleic acid molecule or a polypeptide comprising the nucleic acid, preferably the coding region thereof, or polypeptide or the consensus sequence or the polypeptide motif, as depicted in Table I, II or IV, application No. 16, column 5 or 8 in the respective same line as the nucleic acid molecule SEQ ID NO. 55379 or polypeptide SEQ ID NO. 55380, respectively, or a homolog or a fragment thereof, is increased or generated, or if the activity sll1761-protein is increased or generated in a non-human organism, like a microorganism or a plant cell, plant or part thereof, especially with non-targeted localization, whereby the respective line disclose in column 7 the fine chemical coenzyme Q9. For example, an increase of the coenzyme Q9 of at least 1 percent, particularly in a range of 48 to 91-percent is conferred as compared to a corresponding non-transformed wild type non-human organism.

[77866] Accordingly, in one embodiment, an increase of coenzyme Q9 in a non-human organism, as compared to a corresponding non-transformed wild type non-human organism, is conferred in the process of the invention, if the activity of a polypeptide showing the activity of a cation-transporting ATPase, or if the activity of the polypeptide Sll1920, preferably represented by SEQ ID NO. 55386, or a homolog or fragment thereof, or if the activity of a polypeptide encoded by a nucleic acid molecule comprising the nucleic acid SEQ ID NO. 55385, preferably the coding region thereof, or a homolog or fragment thereof, e.g. derived from Synechocystis sp., is increased or generated. For example the activity of a nucleic acid molecule or a polypeptide comprising the nucleic acid, preferably the coding region thereof, or polypeptide or the consensus sequence or the polypeptide motif, as depicted in Table I, II or IV, application No. 16, column 5 or 8 in the respective same line as the nucleic acid molecule SEQ ID NO. 55385 or polypeptide SEQ ID NO. 55386, respectively, or a homolog or a fragment thereof, is increased or generated, or if the activity cation-transporting ATPase is increased or generated in a non-human organism, like a microorganism or a plant cell, plant or part thereof, especially with mitochondrial localization, whereby the respective line disclose in column 7 the fine chemical coenzyme Q9. For example, an increase of the coenzyme Q9 of at least 1 percent, particularly in a range of 37 to 55-percent is conferred as compared to a corresponding non-transformed wild type non-human organism.

[77867] Accordingly, in one embodiment, an increase of coenzyme Q9 in a non-human organism, as compared to a corresponding non-transformed wild type non-human organism, is conferred in the process of the invention, if the activity of a polypeptide showing the activity of a oxidoreductase, or if the activity of the polypeptide 51r0338, preferably represented by SEQ ID NO. 11991, or a homolog or fragment thereof, or if the activity of a polypeptide encoded by a nucleic acid molecule comprising the nucleic acid SEQ ID NO. 11990, preferably the coding region thereof, or a homolog or fragment thereof, e.g. derived from Synechocystis sp., is increased or generated. For example the activity of a nucleic acid molecule or a polypeptide comprising the nucleic acid, preferably the coding region thereof, or polypeptide or the consensus sequence or the polypeptide motif, as depicted in Table I, II or IV, application No. 16, column 5 or 8 in the respective same line as the nucleic acid molecule SEQ ID NO. 11990 or polypeptide SEQ ID NO. 11991, respectively, or a homolog or a fragment thereof, is increased or generated, or if the activity oxidoreductase is increased or generated in a non-human organism, like a microorganism or a plant cell, plant or part thereof, especially with non-targeted localization, whereby the respective line disclose in column 7 the fine chemical coenzyme Q9. For example, an increase of the coenzyme Q9 of at least 1 percent, particularly in a range of 47 to 62-percent is conferred as compared to a corresponding non-transformed wild type non-human organism.

[77868] Accordingly, in one embodiment, an increase of coenzyme Q10 in a non-human organism, as compared to a corresponding non-transformed wild type non-human organism, is conferred in the process of the invention, if the activity of a polypeptide showing the activity of a malate dehydrogenase, or if the activity of the polypeptide 51r0721, preferably represented by SEQ ID NO. 87398, or a homolog or fragment thereof, or if the activity of a polypeptide encoded by a nucleic acid molecule comprising the nucleic acid SEQ ID NO. 87397, preferably the coding region thereof, or a homolog or fragment thereof, e.g. derived from Synechocystis sp., is increased or generated. For example the activity of a nucleic acid molecule or a polypeptide comprising the nucleic acid, preferably the coding region thereof, or polypeptide or the consensus sequence or the polypeptide motif, as depicted in Table I, II or IV, application No. 16, column 5 or 8 in the respective same line as the nucleic acid molecule SEQ ID NO. 87397 or polypeptide SEQ ID NO. 87398, respectively, or a homolog or a fragment thereof, is increased or generated, or if the activity malate dehydrogenase is increased or generated in a non-human organism, like a microorganism or a plant cell, plant or part thereof, especially with plastidic localization, whereby the respective line disclose in column 7 the fine chemical coenzyme Q10. For example, an increase of the coenzyme Q10 of at least 1 percent, particularly in a range of 61 to 135-percent is conferred as compared to a corresponding non-transformed wild type non-human organism.

[77869] Accordingly, in one embodiment, an increase of coenzyme Q9 in a non-human organism, as compared to a corresponding non-transformed wild type non-human organism, is conferred in the process of the invention, if the activity of a polypeptide showing the activity of a malate dehydrogenase, or if the activity of the polypeptide 51r0721, preferably represented by SEQ ID NO. 87398, or a homolog or fragment thereof, or if the activity of a polypeptide encoded by a nucleic acid molecule comprising the nucleic acid SEQ ID NO. 87397, preferably the coding region thereof, or a homolog or fragment thereof, e.g. derived from Synechocystis sp., is increased or generated. For example the activity of a nucleic acid molecule or a polypeptide comprising the nucleic acid, preferably the coding region thereof, or polypeptide or the consensus sequence or the polypeptide motif, as depicted in Table I, II or IV, application No. 16, column 5 or 8 in the respective same line as the nucleic acid molecule SEQ ID NO. 87397 or polypeptide SEQ ID NO. 87398, respectively, or a homolog or a fragment thereof, is increased or generated, or if the activity malate dehydrogenase is increased or generated in a non-human organism, like a microorganism or a plant cell, plant or part thereof, especially with plastidic localization, whereby the respective line disclose in column 7 the fine chemical coenzyme Q9. For example, an increase of the coenzyme Q9 of at least 1 percent, particularly in a range of 56 to 88-percent is conferred as compared to a corresponding non-transformed wild type non-human organism.

[77870] Accordingly, in one embodiment, an increase of coenzyme Q9 in a non-human organism, as compared to a corresponding non-transformed wild type non-human organism, is conferred in the process of the invention, if the activity of a polypeptide showing the activity of a permease protein of ABC transporter, or if the activity of the polypeptide Slr0949, preferably represented by SEQ ID NO. 119223, or a homolog or fragment thereof, or if the activity of a polypeptide encoded by a nucleic acid molecule comprising the nucleic acid SEQ ID NO. 119222, preferably the coding region thereof, or a homolog or fragment thereof, e.g. derived from Synechocystis sp., is increased or generated. For example the activity of a nucleic acid molecule or a polypeptide comprising the nucleic acid, preferably the coding region thereof, or polypeptide or the consensus sequence or the polypeptide motif, as depicted in Table I, II or IV, application No. 16, column 5 or 8 in the respective same line as the nucleic acid molecule SEQ ID NO. 119222 or polypeptide SEQ ID NO. 119223, respectively, or a homolog or a fragment thereof, is increased or generated, or if the activity permease protein of ABC transporter is increased or generated in a non-human organism, like a microorganism or a plant cell, plant or part thereof, especially with mitochondrial localization, whereby the respective line disclose in column 7 the fine chemical coenzyme Q9. For example, an increase of the coenzyme Q9 of at least 1 percent, particularly in a range of 46 to 50-percent is conferred as compared to a corresponding non-transformed wild type non-human organism.

[77871] Accordingly, in one embodiment, an increase of coenzyme Q9 in a non-human organism, as compared to a corresponding non-transformed wild type non-human organism, is conferred in the process of the invention, if the activity of a polypeptide showing the activity of a slr1107-protein, or if the activity of the polypeptide Slr1107, preferably represented by SEQ ID NO. 101777, or a homolog or fragment thereof, or if the activity of a polypeptide encoded by a nucleic acid molecule comprising the nucleic acid SEQ ID NO. 101776, preferably the coding region thereof, or a homolog or fragment thereof, e.g. derived from Synechocystis sp., is increased or generated. For example the activity of a nucleic acid molecule or a polypeptide comprising the nucleic acid, preferably the coding region thereof, or polypeptide or the consensus sequence or the polypeptide motif, as depicted in Table I, II or IV, application No. 16, column 5 or 8 in the respective same line as the nucleic acid molecule SEQ ID NO. 101776 or polypeptide SEQ ID NO. 101777, respectively, or a homolog or a fragment thereof, is increased or generated, or if the activity slr1107-protein is increased or generated in a non-human organism, like a microorganism or a plant cell, plant or part thereof, especially with plastidic localization, whereby the respective line disclose in column 7 the fine chemical coenzyme Q9. For example, an increase of the coenzyme Q9 of at least 1 percent, particularly in a range of 39 to 135-percent is conferred as compared to a corresponding non-transformed wild type non-human organism.

[77872] Accordingly, in one embodiment, an increase of coenzyme Q9 in a non-human organism, as compared to a corresponding non-transformed wild type non-human organism, is conferred in the process of the invention, if the activity of a polypeptide showing the activity of a fatty acid desaturase, or if the activity of the polypeptide Slr1350, preferably represented by SEQ ID NO. 116714, or a homolog or fragment thereof, or if the activity of a polypeptide encoded by a nucleic acid molecule comprising the nucleic acid SEQ ID NO. 116713, preferably the coding region thereof, or a homolog or fragment thereof, e.g. derived from Synechocystis sp., is increased or generated. For example the activity of a nucleic acid molecule or a polypeptide comprising the nucleic acid, preferably the coding region thereof, or polypeptide or the consensus sequence or the polypeptide motif, as depicted in Table I, II or IV, application No. 16, column 5 or 8 in the respective same line as the nucleic acid molecule SEQ ID NO. 116713 or polypeptide SEQ ID NO. 116714, respectively, or a homolog or a fragment thereof, is increased or generated, or if the activity fatty acid desaturase is increased or generated in a non-human organism, like a microorganism or a plant cell, plant or part thereof, especially with non-targeted localization, whereby the respective line disclose in column 7 the fine chemical coenzyme Q9. For example, an increase of the coenzyme Q9 of at least 1 percent, particularly in a range of 43 to 67-percent is conferred as compared to a corresponding non-transformed wild type non-human organism.

[77873] Accordingly, in one embodiment, an increase of coenzyme Q9 in a non-human organism, as compared to a corresponding non-transformed wild type non-human organism, is conferred in the process of the invention, if the activity of a polypeptide showing the activity of a photosystem II protein, or if the activity of the polypeptide Slr1739, preferably represented by SEQ ID NO. 58732, or a homolog or fragment thereof, or if the activity of a polypeptide encoded by a nucleic acid molecule comprising the nucleic acid SEQ ID NO. 58731, preferably the coding region thereof, or a homolog or fragment thereof, e.g. derived from Synechocystis sp., is increased or generated. For example the activity of a nucleic acid molecule or a polypeptide comprising the nucleic acid, preferably the coding region thereof, or polypeptide or the consensus sequence or the polypeptide motif, as depicted in Table I, II or IV, application No. 16, column 5 or 8 in the respective same line as the nucleic acid molecule SEQ ID NO. 58731 or polypeptide SEQ ID NO. 58732, respectively, or a homolog or a fragment thereof, is increased or generated, or if the activity photosystem II protein is increased or generated in a non-human organism, like a microorganism or a plant cell, plant or part thereof, especially with plastidic localization, whereby the respective line disclose in column 7 the fine chemical coenzyme Q9. For example, an increase of the coenzyme Q9 of at least 1 percent, particularly in a range of 58 to 64-percent is conferred as compared to a corresponding non-transformed wild type non-human organism.

[77874] Accordingly, in one embodiment, an increase of coenzyme Q10 in a non-human organism, as compared to a corresponding non-transformed wild type non-human organism, is conferred in the process of the invention, if the activity of a polypeptide showing the activity of a glutamine amidotransferase, or if the activity of the polypeptide Slr1742, preferably represented by SEQ ID NO. 58752, or a homolog or fragment thereof, or if the activity of a polypeptide encoded by a nucleic acid molecule comprising the nucleic acid SEQ ID NO. 58751, preferably the coding region thereof, or a homolog or fragment thereof, e.g. derived from Synechocystis sp., is increased or generated. For example the activity of a nucleic acid molecule or a polypeptide comprising the nucleic acid, preferably the coding region thereof, or polypeptide or the consensus sequence or the polypeptide motif, as depicted in Table I, II or IV, application No. 16, column 5 or 8 in the respective same line as the nucleic acid molecule SEQ ID NO. 58751 or polypeptide SEQ ID NO. 58752, respectively, or a homolog or a fragment thereof, is increased or generated, or if the activity glutamine amidotransferase is increased or generated in a non-human organism, like a microorganism or a plant cell, plant or part thereof, especially with mitochondrial localization, whereby the respective line disclose in column 7 the fine chemical coenzyme Q10. For example, an increase of the coenzyme Q10 of at least 1 percent, particularly in a range of 58 to 125-percent is conferred as compared to a corresponding non-transformed wild type non-human organism.

[77875] Accordingly, in one embodiment, an increase of coenzyme Q10 in a non-human organism, as compared to a corresponding non-transformed wild type non-human organism, is conferred in the process of the invention, if the activity of a polypeptide showing the activity of a glycerol-3-phosphate dehydrogenase, or if the activity of the polypeptide Slr1755, preferably represented by SEQ ID NO. 58824, or a homolog or fragment thereof, or if the activity of a polypeptide encoded by a nucleic acid molecule comprising the nucleic acid SEQ ID NO. 58823, preferably the coding region thereof, or a homolog or fragment thereof, e.g. derived from Synechocystis sp., is increased or generated. For example the activity of a nucleic acid molecule or a polypeptide comprising the nucleic acid, preferably the coding region thereof, or polypeptide or the consensus sequence or the polypeptide motif, as depicted in Table I, II or IV, application No. 16, column 5 or 8 in the respective same line as the nucleic acid molecule SEQ ID NO. 58823 or polypeptide SEQ ID NO. 58824, respectively, or a homolog or a fragment thereof, is increased or generated, or if the activity glycerol-3-phosphate dehydrogenase is increased or generated in a non-human organism, like a microorganism or a plant cell, plant or part thereof, especially with plastidic localization, whereby the respective line disclose in column 7 the fine chemical coenzyme Q10. For example, an increase of the coenzyme Q10 of at least 1 percent, particularly in a range of 53 to 133-percent is conferred as compared to a corresponding non-transformed wild type non-human organism.

[77876] Accordingly, in one embodiment, an increase of coenzyme Q9 in a non-human organism, as compared to a corresponding non-transformed wild type non-human organism, is conferred in the process of the invention, if the activity of a polypeptide showing the activity of a glycerol-3-phosphate dehydrogenase, or if the activity of the polypeptide Slr1755, preferably represented by SEQ ID NO. 58824, or a homolog or fragment thereof, or if the activity of a polypeptide encoded by a nucleic acid molecule comprising the nucleic acid SEQ ID NO. 58823, preferably the coding region thereof, or a homolog or fragment thereof, e.g. derived from Synechocystis sp., is increased or generated. For example the activity of a nucleic acid molecule or a polypeptide comprising the nucleic acid, preferably the coding region thereof, or polypeptide or the consensus sequence or the polypeptide motif, as depicted in Table I, II or IV, application No. 16, column 5 or 8 in the respective same line as the nucleic acid molecule SEQ ID NO. 58823 or polypeptide SEQ ID NO. 58824, respectively, or a homolog or a fragment thereof, is increased or generated, or if the activity glycerol-3-phosphate dehydrogenase is increased or generated in a non-human organism, like a microorganism or a plant cell, plant or part thereof, especially with plastidic localization, whereby the respective line disclose in column 7 the fine chemical coenzyme Q9. For example, an increase of the coenzyme Q9 of at least 1 percent, particularly in a range of 49 to 132-percent is conferred as compared to a corresponding non-transformed wild type non-human organism.

[77877] Accordingly, in one embodiment, an increase of coenzyme Q9 in a non-human organism, as compared to a corresponding non-transformed wild type non-human organism, is conferred in the process of the invention, if the activity of a polypeptide showing the activity of a Sec-independent protein translocase subunit, or if the activity of the polypeptide TTC0019, preferably represented by SEQ ID NO. 12699, or a homolog or fragment thereof, or if the activity of a polypeptide encoded by a nucleic acid molecule comprising the nucleic acid SEQ ID NO. 12698, preferably the coding region thereof, or a homolog or fragment thereof, e.g. derived from Thermus thermophilus, is increased or generated. For example the activity of a nucleic acid molecule or a polypeptide comprising the nucleic acid, preferably the coding region thereof, or polypeptide or the consensus sequence or the polypeptide motif, as depicted in Table I, II or IV, application No. 16, column 5 or 8 in the respective same line as the nucleic acid molecule SEQ ID NO. 12698 or polypeptide SEQ ID NO. 12699, respectively, or a homolog or a fragment thereof, is increased or generated, or if the activity Sec-independent protein translocase subunit is increased or generated in a non-human organism, like a microorganism or a plant cell, plant or part thereof, especially with non-targeted localization, whereby the respective line disclose in column 7 the fine chemical coenzyme Q9. For example, an increase of the coenzyme Q9 of at least 1 percent, particularly in a range of 36 to 141-percent is conferred as compared to a corresponding non-transformed wild type non-human organism.

[77878] Accordingly, in one embodiment, an increase of coenzyme Q10 in a non-human organism, as compared to a corresponding non-transformed wild type non-human organism, is conferred in the process of the invention, if the activity of a polypeptide showing the activity of a amino acid ABC transporter permease protein, or if the activity of the polypeptide TTCO337, preferably represented by SEQ ID NO. 61071, or a homolog or fragment thereof, or if the activity of a polypeptide encoded by a nucleic acid molecule comprising the nucleic acid SEQ ID NO. 61070, preferably the coding region thereof, or a homolog or fragment thereof, e.g. derived from Thermus thermophilus, is increased or generated. For example the activity of a nucleic acid molecule or a polypeptide comprising the nucleic acid, preferably the coding region thereof, or polypeptide or the consensus sequence or the polypeptide motif, as depicted in Table I, II or IV, application No. 16, column 5 or 8 in the respective same line as the nucleic acid molecule SEQ ID NO. 61070 or polypeptide SEQ ID NO. 61071, respectively, or a homolog or a fragment thereof, is increased or generated, or if the activity amino acid ABC transporter permease protein is increased or generated in a non-human organism, like a microorganism or a plant cell, plant or part thereof, especially with non-targeted localization, whereby the respective line disclose in column 7 the fine chemical coenzyme Q10. For example, an increase of the coenzyme Q10 of at least 1 percent, particularly in a range of 64 to 181-percent is conferred as compared to a corresponding non-transformed wild type non-human organism.

[77879] Accordingly, in one embodiment, an increase of coenzyme Q9 in a non-human organism, as compared to a corresponding non-transformed wild type non-human organism, is conferred in the process of the invention, if the activity of a polypeptide showing the activity of a multiple antibiotic resistance protein, or if the activity of the polypeptide TTC1193, preferably represented by SEQ ID NO. 61724, or a homolog or fragment thereof, or if the activity of a polypeptide encoded by a nucleic acid molecule comprising the nucleic acid SEQ ID NO. 61723, preferably the coding region thereof, or a homolog or fragment thereof, e.g. derived from Thermus thermophilus, is increased or generated. For example the activity of a nucleic acid molecule or a polypeptide comprising the nucleic acid, preferably the coding region thereof, or polypeptide or the consensus sequence or the polypeptide motif, as depicted in Table I, II or IV, application No. 16, column 5 or 8 in the respective same line as the nucleic acid molecule SEQ ID NO. 61723 or polypeptide SEQ ID NO. 61724, respectively, or a homolog or a fragment thereof, is increased or generated, or if the activity multiple antibiotic resistance protein is increased or generated in a non-human organism, like a microorganism or a plant cell, plant or part thereof, especially with non-targeted localization, whereby the respective line disclose in column 7 the fine chemical coenzyme Q9. For example, an increase of the coenzyme Q9 of at least 1 percent, particularly in a range of 45 to 91-percent is conferred as compared to a corresponding non-transformed wild type non-human organism.

[77880] Accordingly, in one embodiment, an increase of coenzyme Q9 in a non-human organism, as compared to a corresponding non-transformed wild type non-human organism, is conferred in the process of the invention, if the activity of a polypeptide showing the activity of a TTC1386-protein, or if the activity of the polypeptide TTC1386, preferably represented by SEQ ID NO. 62080, or a homolog or fragment thereof, or if the activity of a polypeptide encoded by a nucleic acid molecule comprising the nucleic acid SEQ ID NO. 62079, preferably the coding region thereof, or a homolog or fragment thereof, e.g. derived from Thermus thermophilus, is increased or generated. For example the activity of a nucleic acid molecule or a polypeptide comprising the nucleic acid, preferably the coding region thereof, or polypeptide or the consensus sequence or the polypeptide motif, as depicted in Table I, II or IV, application No. 16, column 5 or 8 in the respective same line as the nucleic acid molecule SEQ ID NO. 62079 or polypeptide SEQ ID NO. 62080, respectively, or a homolog or a fragment thereof, is increased or generated, or if the activity TTC1386-protein is increased or generated in a non-human organism, like a microorganism or a plant cell, plant or part thereof, especially with non-targeted localization, whereby the respective line disclose in column 7 the fine chemical coenzyme Q9. For example, an increase of the coenzyme Q9 of at least 1 percent, particularly in a range of 37 to 147-percent is conferred as compared to a corresponding non-transformed wild type non-human organism.

[77881] Accordingly, in one embodiment, an increase of coenzyme Q9 in a non-human organism, as compared to a corresponding non-transformed wild type non-human organism, is conferred in the process of the invention, if the activity of a polypeptide showing the activity of a cell division control protein, or if the activity of the polypeptide Ybr160w, preferably represented by SEQ ID NO. 62718, or a homolog or fragment thereof, or if the activity of a polypeptide encoded by a nucleic acid molecule comprising the nucleic acid SEQ ID NO. 62717, preferably the coding region thereof, or a homolog or fragment thereof, e.g. derived from Saccharomyces cerevisiae, is increased or generated. For example the activity of a nucleic acid molecule or a polypeptide comprising the nucleic acid, preferably the coding region thereof, or polypeptide or the consensus sequence or the polypeptide motif, as depicted in Table I, II or IV, application No. 16, column 5 or 8 in the respective same line as the nucleic acid molecule SEQ ID NO. 62717 or polypeptide SEQ ID NO. 62718, respectively, or a homolog or a fragment thereof, is increased or generated, or if the activity cell division control protein is increased or generated in a non-human organism, like a microorganism or a plant cell, plant or part thereof, especially with non-targeted localization, whereby the respective line disclose in column 7 the fine chemical coenzyme Q9. For example, an increase of the coenzyme Q9 of at least 1 percent, particularly in a range of 70 to 78-percent is conferred as compared to a corresponding non-transformed wild type non-human organism.

[77882] Accordingly, in one embodiment, an increase of coenzyme Q10 in a non-human organism, as compared to a corresponding non-transformed wild type non-human organism, is conferred in the process of the invention, if the activity of a polypeptide showing the activity of a ycl027w-protein, or if the activity of the polypeptide Ycl027w, preferably represented by SEQ ID NO. 96981, or a homolog or fragment thereof, or if the activity of a polypeptide encoded by a nucleic acid molecule comprising the nucleic acid SEQ ID NO. 96980, preferably the coding region thereof, or a homolog or fragment thereof, e.g. derived from Saccharomyces cerevisiae, is increased or generated. For example the activity of a nucleic acid molecule or a polypeptide comprising the nucleic acid, preferably the coding region thereof, or polypeptide or the consensus sequence or the polypeptide motif, as depicted in Table I, II or IV, application No. 16, column 5 or 8 in the respective same line as the nucleic acid molecule SEQ ID NO. 96980 or polypeptide SEQ ID NO. 96981, respectively, or a homolog or a fragment thereof, is increased or generated, or if the activity ycl027w-protein is increased or generated in a non-human organism, like a microorganism or a plant cell, plant or part thereof, especially with plastidic localization, whereby the respective line disclose in column 7 the fine chemical coenzyme Q10. For example, an increase of the coenzyme Q10 of at least 1 percent, particularly in a range of 96 to 120-percent is conferred as compared to a corresponding non-transformed wild type non-human organism.

[77883] Accordingly, in one embodiment, an increase of coenzyme Q9 in a non-human organism, as compared to a corresponding non-transformed wild type non-human organism, is conferred in the process of the invention, if the activity of a polypeptide showing the activity of a protein kinase, or if the activity of the polypeptide Ydl159w, preferably represented by SEQ ID NO. 14276, or a homolog or fragment thereof, or if the activity of a polypeptide encoded by a nucleic acid molecule comprising the nucleic acid SEQ ID NO. 14275, preferably the coding region thereof, or a homolog or fragment thereof, e.g. derived from Saccharomyces cerevisiae, is increased or generated. For example the activity of a nucleic acid molecule or a polypeptide comprising the nucleic acid, preferably the coding region thereof, or polypeptide or the consensus sequence or the polypeptide motif, as depicted in Table I, II or IV, application No. 16, column 5 or 8 in the respective same line as the nucleic acid molecule SEQ ID NO. 14275 or polypeptide SEQ ID NO. 14276, respectively, or a homolog or a fragment thereof, is increased or generated, or if the activity protein kinase is increased or generated in a non-human organism, like a microorganism or a plant cell, plant or part thereof, especially with plastidic localization, whereby the respective line disclose in column 7 the fine chemical coenzyme Q9. For example, an increase of the coenzyme Q9 of at least 1 percent, particularly in a range of 41 to 74-percent is conferred as compared to a corresponding non-transformed wild type non-human organism.

[77884] Accordingly, in one embodiment, an increase of coenzyme Q9 in a non-human organism, as compared to a corresponding non-transformed wild type non-human organism, is conferred in the process of the invention, if the activity of a polypeptide showing the activity of a halotolerance protein, or if the activity of the polypeptide Ykr072c, preferably represented by SEQ ID NO. 130904, or a homolog or fragment thereof, or if the activity of a polypeptide encoded by a nucleic acid molecule comprising the nucleic acid SEQ ID NO. 130903, preferably the coding region thereof, or a homolog or fragment thereof, e.g. derived from Saccharomyces cerevisiae, is increased or generated. For example the activity of a nucleic acid molecule or a polypeptide comprising the nucleic acid, preferably the coding region thereof, or polypeptide or the consensus sequence or the polypeptide motif, as depicted in Table I, II or IV, application No. 16, column 5 or 8 in the respective same line as the nucleic acid molecule SEQ ID NO. 130903 or polypeptide SEQ ID NO. 130904, respectively, or a homolog or a fragment thereof, is increased or generated, or if the activity halotolerance protein is increased or generated in a non-human organism, like a microorganism or a plant cell, plant or part thereof, especially with non-targeted localization, whereby the respective line disclose in column 7 the fine chemical coenzyme Q9. For example, an increase of the coenzyme Q9 of at least 1 percent, particularly in a range of 38 to 91-percent is conferred as compared to a corresponding non-transformed wild type non-human organism.

[77885] Accordingly, in one embodiment, an increase of nicotinic acid in a non-human organism, as compared to a corresponding non-transformed wild type non-human organism, is conferred in the process of the invention, if the activity of a polypeptide showing the activity of a lipase, or if the activity of the polypeptide Ykr089c, preferably represented by SEQ ID NO. 102062, or a homolog or fragment thereof, or if the activity of a polypeptide encoded by a nucleic acid molecule comprising the nucleic acid SEQ ID NO. 102061, preferably the coding region thereof, or a homolog or fragment thereof, e.g. derived from Saccharomyces cerevisiae, is increased or generated. For example the activity of a nucleic acid molecule or a polypeptide comprising the nucleic acid, preferably the coding region thereof, or polypeptide or the consensus sequence or the polypeptide motif, as depicted in Table I, II or IV, application No. 16, column 5 or 8 in the respective same line as the nucleic acid molecule SEQ ID NO. 102061 or polypeptide SEQ ID NO. 102062, respectively, or a homolog or a fragment thereof, is increased or generated, or if the activity lipase is increased or generated in a non-human organism, like a microorganism or a plant cell, plant or part thereof, especially with non-targeted localization, whereby the respective line disclose in column 7 the fine chemical nicotinic acid. For example, an increase of the nicotinic acid of at least 1 percent, particularly in a range of 45 to 52-percent is conferred as compared to a corresponding non-transformed wild type non-human organism.

[77886] Accordingly, in one embodiment, an increase of coenzyme Q10 in a non-human organism, as compared to a corresponding non-transformed wild type non-human organism, is conferred in the process of the invention, if the activity of a polypeptide showing the activity of a heat shock protein Hsp40, or if the activity of the polypeptide Ynl007c, preferably represented by SEQ ID NO. 139174, or a homolog or fragment thereof, or if the activity of a polypeptide encoded by a nucleic acid molecule comprising the nucleic acid SEQ ID NO. 139173, preferably the coding region thereof, or a homolog or fragment thereof, e.g. derived from Saccharomyces cerevisiae, is increased or generated. For example the activity of a nucleic acid molecule or a polypeptide comprising the nucleic acid, preferably the coding region thereof, or polypeptide or the consensus sequence or the polypeptide motif, as depicted in Table I, II or IV, application No. 16, column 5 or 8 in the respective same line as the nucleic acid molecule SEQ ID NO. 139173 or polypeptide SEQ ID NO. 139174, respectively, or a homolog or a fragment thereof, is increased or generated, or if the activity heat shock protein Hsp40 is increased or generated in a non-human organism, like a microorganism or a plant cell, plant or part thereof, especially with non-targeted localization, whereby the respective line disclose in column 7 the fine chemical coenzyme Q10. For example, an increase of the coenzyme Q10 of at least 1 percent, particularly in a range of 51 to 78-percent is conferred as compared to a corresponding non-transformed wild type non-human organism.

[77887] Accordingly, in one embodiment, an increase of coenzyme Q9 in a non-human organism, as compared to a corresponding non-transformed wild type non-human organism, is conferred in the process of the invention, if the activity of a polypeptide showing the activity of a heat shock protein Hsp40, or if the activity of the polypeptide Ynl007c, preferably represented by SEQ ID NO. 139174, or a homolog or fragment thereof, or if the activity of a polypeptide encoded by a nucleic acid molecule comprising the nucleic acid SEQ ID NO. 139173, preferably the coding region thereof, or a homolog or fragment thereof, e.g. derived from Saccharomyces cerevisiae, is increased or generated. For example the activity of a nucleic acid molecule or a polypeptide comprising the nucleic acid, preferably the coding region thereof, or polypeptide or the consensus sequence or the polypeptide motif, as depicted in Table I, II or IV, application No. 16, column 5 or 8 in the respective same line as the nucleic acid molecule SEQ ID NO. 139173 or polypeptide SEQ ID NO. 139174, respectively, or a homolog or a fragment thereof, is increased or generated, or if the activity heat shock protein Hsp40 is increased or generated in a non-human organism, like a microorganism or a plant cell, plant or part thereof, especially with non-targeted localization, whereby the respective line disclose in column 7 the fine chemical coenzyme Q9. For example, an increase of the coenzyme Q9 of at least 1 percent, particularly in a range of 51 to 98-percent is conferred as compared to a corresponding non-transformed wild type non-human organism.

[77888] Accordingly, in one embodiment, an increase of coenzyme Q9 in a non-human organism, as compared to a corresponding non-transformed wild type non-human organism, is conferred in the process of the invention, if the activity of a polypeptide showing the activity of a histone acetyltransferase, or if the activity of the polypeptide Yor244w, preferably represented by SEQ ID NO. 92541, or a homolog or fragment thereof, or if the activity of a polypeptide encoded by a nucleic acid molecule comprising the nucleic acid SEQ ID NO. 92540, preferably the coding region thereof, or a homolog or fragment thereof, e.g. derived from Saccharomyces cerevisiae, is increased or generated. For example the activity of a nucleic acid molecule or a polypeptide comprising the nucleic acid, preferably the coding region thereof, or polypeptide or the consensus sequence or the polypeptide motif, as depicted in Table I, II or IV, application No. 16, column 5 or 8 in the respective same line as the nucleic acid molecule SEQ ID NO. 92540 or polypeptide SEQ ID NO. 92541, respectively, or a homolog or a fragment thereof, is increased or generated, or if the activity histone acetyltransferase is increased or generated in a non-human organism, like a microorganism or a plant cell, plant or part thereof, especially with plastidic localization, whereby the respective line disclose in column 7 the fine chemical coenzyme Q9. For example, an increase of the coenzyme Q9 of at least 1 percent, particularly in a range of 47 to 49-percent is conferred as compared to a corresponding non-transformed wild type non-human organism.

[77889] Accordingly, in one embodiment, an increase of coenzyme Q10 in a non-human organism, as compared to a corresponding non-transformed wild type non-human organism, is conferred in the process of the invention, if the activity of a polypeptide showing the activity of a mitogenactivated protein kinase, or if the activity of the polypeptide Ypr054w, preferably represented by SEQ ID NO. 140111, or a homolog or fragment thereof, or if the activity of a polypeptide encoded by a nucleic acid molecule comprising the nucleic acid SEQ ID NO. 140110, preferably the coding region thereof, or a homolog or fragment thereof, e.g. derived from Saccharomyces cerevisiae, is increased or generated. For example the activity of a nucleic acid molecule or a polypeptide comprising the nucleic acid, preferably the coding region thereof, or polypeptide or the consensus sequence or the polypeptide motif, as depicted in Table I, II or IV, application No. 16, column 5 or 8 in the respective same line as the nucleic acid molecule SEQ ID NO. 140110 or polypeptide SEQ ID NO. 140111, respectively, or a homolog or a fragment thereof, is increased or generated, or if the activity mitogen-activated protein kinase is increased or generated in a non-human organism, like a microorganism or a plant cell, plant or part thereof, especially with non-targeted localization, whereby the respective line disclose in column 7 the fine chemical coenzyme Q10. For example, an increase of the coenzyme Q10 of at least 1 percent, particularly in a range of 53 to 250-percent is conferred as compared to a corresponding non-transformed wild type non-human organism.

[77890] Accordingly, in one embodiment, an increase of coenzyme Q10 in a non-human organism, as compared to a corresponding non-transformed wild type non-human organism, is conferred in the process of the invention, if the activity of a polypeptide showing the activity of a phosphopantothenoylcysteine decarboxylase, or if the activity of the polypeptide ZM06LC1143, preferably represented by SEQ ID NO. 68133, or a homolog or fragment thereof, or if the activity of a polypeptide encoded by a nucleic acid molecule comprising the nucleic acid SEQ ID NO. 68132, preferably the coding region thereof, or a homolog or fragment thereof, e.g. derived from Zea mays, is increased or generated. For example the activity of a nucleic acid molecule or a polypeptide comprising the nucleic acid, preferably the coding region thereof, or polypeptide or the consensus sequence or the polypeptide motif, as depicted in Table I, II or IV, application No. 16, column 5 or 8 in the respective same line as the nucleic acid molecule SEQ ID NO. 68132 or polypeptide SEQ ID NO. 68133, respectively, or a homolog or a fragment thereof, is increased or generated, or if the activity phosphopantothenoylcysteine decarboxylase is increased or generated in a non-human organism, like a microorganism or a plant cell, plant or part thereof, especially with non-targeted localization, whereby the respective line disclose in column 7 the fine chemical coenzyme Q10. For example, an increase of the coenzyme Q10 of at least 1 percent, particularly in a range of 81 to 678-percent is conferred as compared to a corresponding non-transformed wild type non-human organism.

[77891] [0096.1.7.16] to [0103.1.7.16] for the disclosure of these paragraphs see [0096.1.7.7] to [0103.1.7.7] above

[77892] In this paragraph “A” means “Goffeau et al., Science 274 (5287), 546 (1996)”, “B” means “Blattner et al., Science 277 (5331), 1453 (1997)”, “C” means “Nakamura et al., Nucleic Acids Res. 28(1), 72 (2000)”, “D” means “deposition of the sequences to the EMBL/GenBank/DDBJ databases under “Sequencing of the draft genome assembly of Azotobacter vinelandii AvOP”. in June 2005 by Copeland et al.”, “E” means “Henne et al., Nat. Biotechnol. 22 (5), 547 (2004)”, “F” means “Kaul et al., Nature 408 (6814), 796 (2000)”, and “G” means “Matsumoto et al., Nature 436 (7052), 793 (2005)”.

[77893] The nucleic acid sequence of AAC43185 from Arabidopsis thaliana, e.g. as shown in the respective line in column 5 of Table I, application no. 16, has been published in F. And the activity of the gene product thereof is the activity of amino acid acetyltransferase.

[77894] Accordingly, in one embodiment, the process of the present invention for producing coenzyme Q10 in a non-human organism, like a microorganism or a plant or a part thereof, comprises increasing or generating the activity of a gene product with the activity of a gene product conferring the activity of “amino acid acetyltransferase”, especially from Arabidopsis thaliana or its functional equivalent or its homolog, e.g. the increase of
[77895] (a) a gene product of a gene comprising the nucleic acid molecule as shown in the respective line in column 5 of Table I (whereby the respective line disclose in column 7 the fine chemical coenzyme Q10), application no. 16, preferably the coding region thereof, or a homolog or a fragment thereof, and being depicted in the same respective line as said AAC43185, or a functional equivalent or a homolog thereof as shown in column 8 of Table I, application no. 16, preferably the coding region thereof, particularly a homolog or functional equivalent as shown in column 8 of Table I B, application no. 16, and being depicted in the same respective line as said AAC43185, and preferably the activity is increased plastidic, or
[77896] (b) a polypeptide comprising a polypeptide, a consensus sequence or at least a polypeptide motif as shown in the respective line in column 5 of Table II or in column 8 of Table IV, application no. 16, respectively, and being depicted in the same respective line as said AAC43185, or a functional equivalent or a homolog thereof as depicted in column 8 of Table II, application no. 16, preferably a homolog or functional equivalent as depicted in column 8 of Table II B, application no. 16, and being depicted in the same respective line as said AAC43185, and preferably the activity is increased plastidic, whereby the respective line disclose in column 7 the fine chemical coenzyme Q10.

[77897] Accordingly, in one embodiment, the molecule which activity is to be increased in the process of the invention is the gene product with an activity as a “amino acid acetyltransferase”, preferably it is the molecule of section (a) or (b) of this paragraph.

[77898] In particular, it was observed that in plants, especially in Arabidopsis thaliana, increasing or generating the activity of a gene product plastidic with the activity of a “amino acid acetyltransferase”, preferably being encoded by a gene comprising the nucleic acid sequence SEQ ID NO. 17356, preferably the coding region thereof, conferred the production of or the increase in coenzyme Q10 compared with the wild type control.

[77899] The nucleic acid sequence of At1g43850 from Arabidopsis thaliana, e.g. as shown in the respective line in column 5 of Table I, application no. 16, has been published in F. And the activity of the gene product thereof is the activity of transcriptional regulator.

[77900] Accordingly, in one embodiment, the process of the present invention for producing coenzyme Q9 in a non-human organism, like a microorganism or a plant or a part thereof, comprises increasing or generating the activity of a gene product with the activity of a gene product conferring the activity of “transcriptional regulator”, especially from Arabidopsis thaliana or its functional equivalent or its homolog, e.g. the increase of
[77901] (a) a gene product of a gene comprising the nucleic acid molecule as shown in the respective line in column 5 of Table I (whereby the respective line disclose in column 7 the fine chemical coenzyme Q9), application no. 16, preferably the coding region thereof, or a homolog or a fragment thereof, and being depicted in the same respective line as said At1g43850, or a functional equivalent or a homolog thereof as shown in column 8 of Table I, application no. 16, preferably the coding region thereof, particularly a homolog or functional equivalent as shown in column 8 of Table I B, application no. 16, and being depicted in the same respective line as said At1g43850, and preferably the activity is increased non-targeted, or
[77902] (b) a polypeptide comprising a polypeptide, a consensus sequence or at least a polypeptide motif as shown in the respective line in column 5 of Table II or in column 8 of Table IV, application no. 16, respectively, and being depicted in the same respective line as said At1g43850, or a functional equivalent or a homolog thereof as depicted in column 8 of Table II, application no. 16, preferably a homolog or functional equivalent as depicted in column 8 of Table II B, application no. 16, and being depicted in the same respective line as said At1g43850, and preferably the activity is increased non-targeted, whereby the respective line disclose in column 7 the fine chemical coenzyme Q9.

[77903] Accordingly, in one embodiment, the molecule which activity is to be increased in the process of the invention is the gene product with an activity as a “transcriptional regulator”, preferably it is the molecule of section (a) or (b) of this paragraph.

[77904] In particular, it was observed that in plants, especially in Arabidopsis thaliana, increasing or generating the activity of a gene product non-targeted with the activity of a “transcriptional regulator”, preferably being encoded by a gene comprising the nucleic acid sequence SEQ ID NO. 18070, preferably the coding region thereof, conferred the production of or the increase in coenzyme Q9 compared with the wild type control.

[77905] The nucleic acid sequence of At1g47380 from Arabidopsis thaliana, e.g. as shown in the respective line in column 5 of Table I, application no. 16, has been published in F. And the activity of the gene product thereof is the activity of At1g47380-protein.

[77906] Accordingly, in one embodiment, the process of the present invention for producing coenzyme Q9 in a non-human organism, like a microorganism or a plant or a part thereof, comprises increasing or generating the activity of a gene product with the activity of a gene product conferring the activity of “At1g47380-protein”, especially from Arabidopsis thaliana or its functional equivalent or its homolog, e.g. the increase of
[77907] (a) a gene product of a gene comprising the nucleic acid molecule as shown in the respective line in column 5 of Table I (whereby the respective line disclose in column 7 the fine chemical coenzyme Q9), application no. 16, preferably the coding region thereof, or a homolog or a fragment thereof, and being depicted in the same respective line as said At1g47380, or a functional equivalent or a homolog thereof as shown in column 8 of Table I, application no. 16, preferably the coding region thereof, particularly a homolog or functional equivalent as shown in column 8 of Table I B, application no. 16, and being depicted in the same respective line as said At1g47380, and preferably the activity is increased non-targeted, or
[77908] (b) a polypeptide comprising a polypeptide, a consensus sequence or at least a polypeptide motif as shown in the respective line in column 5 of Table II or in column 8 of Table IV, application no. 16, respectively, and being depicted in the same respective line as said At1g47380, or a functional equivalent or a homolog thereof as depicted in column 8 of Table II, application no. 16, preferably a homolog or functional equivalent as depicted in column 8 of Table II B, application no. 16, and being depicted in the same respective line as said At1g47380, and preferably the activity is increased non-targeted, whereby the respective line disclose in column 7 the fine chemical coenzyme Q9.

[77909] Accordingly, in one embodiment, the molecule which activity is to be increased in the process of the invention is the gene product with an activity as a “At1g47380-protein”, preferably it is the molecule of section (a) or (b) of this paragraph.

[77910] In particular, it was observed that in plants, especially in Arabidopsis thaliana, increasing or generating the activity of a gene product non-targeted with the activity of a “At1g47380-protein”, preferably being encoded by a gene comprising the nucleic acid sequence SEQ ID NO. 18122, preferably the coding region thereof, conferred the production of or the increase in coenzyme Q9 compared with the wild type control.

[77911] The nucleic acid sequence of At1g72770 from Arabidopsis thaliana, e.g. as shown in the respective line in column 5 of Table I, application no. 16, has been published in F. And the activity of the gene product thereof is the activity of protein phosphatase.

[77912] Accordingly, in one embodiment, the process of the present invention for producing coenzyme Q9 in a non-human organism, like a microorganism or a plant or a part thereof, comprises increasing or generating the activity of a gene product with the activity of a gene product conferring the activity of “protein phosphatase”, especially from Arabidopsis thaliana or its functional equivalent or its homolog, e.g. the increase of
[77913] (a) a gene product of a gene comprising the nucleic acid molecule as shown in the respective line in column 5 of Table I (whereby the respective line disclose in column 7 the fine chemical coenzyme Q9), application no. 16, preferably the coding region thereof, or a homolog or a fragment thereof, and being depicted in the same respective line as said At1g72770, or a functional equivalent or a homolog thereof as shown in column 8 of Table I, application no. 16, preferably the coding region thereof, particularly a homolog or functional equivalent as shown in column 8 of Table I B, application no. 16, and being depicted in the same respective line as said At1g72770, and preferably the activity is increased non-targeted, or
[77914] (b) a polypeptide comprising a polypeptide, a consensus sequence or at least a polypeptide motif as shown in the respective line in column 5 of Table II or in column 8 of Table IV, application no. 16, respectively, and being depicted in the same respective line as said At1g72770, or a functional equivalent or a homolog thereof as depicted in column 8 of Table II, application no. 16, preferably a homolog or functional equivalent as depicted in column 8 of Table II B, application no. 16, and being depicted in the same respective line as said At1g72770, and preferably the activity is increased non-targeted, whereby the respective line disclose in column 7 the fine chemical coenzyme Q9.

[77915] Accordingly, in one embodiment, the molecule which activity is to be increased in the process of the invention is the gene product with an activity as a “protein phosphatase”, preferably it is the molecule of section (a) or (b) of this paragraph.

[77916] In particular, it was observed that in plants, especially in Arabidopsis thaliana, increasing or generating the activity of a gene product non-targeted with the activity of a “protein phosphatase”, preferably being encoded by a gene comprising the nucleic acid sequence SEQ ID NO. 19419, preferably the coding region thereof, conferred the production of or the increase in coenzyme Q9 compared with the wild type control.

[77917] The nucleic acid sequence of At2g37040 from Arabidopsis thaliana, e.g. as shown in the respective line in column 5 of Table I, application no. 16, has been published in F. And the activity of the gene product thereof is the activity of phenylalanine ammonia-lyase.

[77918] Accordingly, in one embodiment, the process of the present invention for producing coenzyme Q9 in a non-human organism, like a microorganism or a plant or a part thereof, comprises increasing or generating the activity of a gene product with the activity of a gene product conferring the activity of “phenylalanine ammonia-lyase”, especially from Arabidopsis thaliana or its functional equivalent or its homolog, e.g. the increase of
[77919] (a) a gene product of a gene comprising the nucleic acid molecule as shown in the respective line in column 5 of Table I (whereby the respective line disclose in column 7 the fine chemical coenzyme Q9), application no. 16, preferably the coding region thereof, or a homolog or a fragment thereof, and being depicted in the same respective line as said At2g37040, or a functional equivalent or a homolog thereof as shown in column 8 of Table I, application no. 16, preferably the coding region thereof, particularly a homolog or functional equivalent as shown in column 8 of Table I B, application no. 16, and being depicted in the same respective line as said At2g37040, and preferably the activity is increased non-targeted, or
[77920] (b) a polypeptide comprising a polypeptide, a consensus sequence or at least a polypeptide motif as shown in the respective line in column 5 of Table II or in column 8 of Table IV, application no. 16, respectively, and being depicted in the same respective line as said At2g37040, or a functional equivalent or a homolog thereof as depicted in column 8 of Table II, application no. 16, preferably a homolog or functional equivalent as depicted in column 8 of Table II B, application no. 16, and being depicted in the same respective line as said At2g37040, and preferably the activity is increased non-targeted, whereby the respective line disclose in column 7 the fine chemical coenzyme Q9.

[77921] Accordingly, in one embodiment, the molecule which activity is to be increased in the process of the invention is the gene product with an activity as a “phenylalanine ammonia-lyase”, preferably it is the molecule of section (a) or (b) of this paragraph.

[77922] In particular, it was observed that in plants, especially in Arabidopsis thaliana, increasing or generating the activity of a gene product non-targeted with the activity of a “phenylalanine ammonia-lyase”, preferably being encoded by a gene comprising the nucleic acid sequence SEQ ID NO. 133042, preferably the coding region thereof, conferred the production of or the increase in coenzyme Q9 compared with the wild type control.

[77923] The nucleic acid sequence of At2g42830 from Arabidopsis thaliana, e.g. as shown in the respective line in column 5 of Table I, application no. 16, has been published in F. And the activity of the gene product thereof is the activity of MADS box protein transcription factor.

[77924] Accordingly, in one embodiment, the process of the present invention for producing coenzyme Q9 in a non-human organism, like a microorganism or a plant or a part thereof, comprises increasing or generating the activity of a gene product with the activity of a gene product conferring the activity of “MADS box protein transcription factor”, especially from Arabidopsis thaliana or its functional equivalent or its homolog, e.g. the increase of
[77925] (a) a gene product of a gene comprising the nucleic acid molecule as shown in the respective line in column 5 of Table I (whereby the respective line disclose in column 7 the fine chemical coenzyme Q9), application no. 16, preferably the coding region thereof, or a homolog or a fragment thereof, and being depicted in the same respective line as said At2g42830, or a functional equivalent or a homolog thereof as shown in column 8 of Table I, application no. 16, preferably the coding region thereof, particularly a homolog or functional equivalent as shown in column 8 of Table I B, application no. 16, and being depicted in the same respective line as said At2g42830, and preferably the activity is increased non-targeted, or
[77926] (b) a polypeptide comprising a polypeptide, a consensus sequence or at least a polypeptide motif as shown in the respective line in column 5 of Table II or in column 8 of Table IV, application no. 16, respectively, and being depicted in the same respective line as said At2g42830, or a functional equivalent or a homolog thereof as depicted in column 8 of Table II, application no. 16, preferably a homolog or functional equivalent as depicted in column 8 of Table II B, application no. 16, and being depicted in the same respective line as said At2g42830, and preferably the activity is increased non-targeted, whereby the respective line disclose in column 7 the fine chemical coenzyme Q9.

[77927] Accordingly, in one embodiment, the molecule which activity is to be increased in the process of the invention is the gene product with an activity as a “MADS box protein transcription factor”, preferably it is the molecule of section (a) or (b) of this paragraph.

[77928] In particular, it was observed that in plants, especially in Arabidopsis thaliana, increasing or generating the activity of a gene product non-targeted with the activity of a “MADS box protein transcription factor”, preferably being encoded by a gene comprising the nucleic acid sequence SEQ ID NO. 108727, preferably the coding region thereof, conferred the production of or the increase in coenzyme Q9 compared with the wild type control.

[77929] The nucleic acid sequence of At2g47880 from Arabidopsis thaliana, e.g. as shown in the respective line in column 5 of Table I, application no. 16, has been published in F. And the activity of the gene product thereof is the activity of glutaredoxin.

[77930] Accordingly, in one embodiment, the process of the present invention for producing coenzyme Q10 in a non-human organism, like a microorganism or a plant or a part thereof, comprises increasing or generating the activity of a gene product with the activity of a gene product conferring the activity of “glutaredoxin”, especially from Arabidopsis thaliana or its functional equivalent or its homolog, e.g. the increase of
[77931] (a) a gene product of a gene comprising the nucleic acid molecule as shown in the respective line in column 5 of Table I (whereby the respective line disclose in column 7 the fine chemical coenzyme Q10), application no. 16, preferably the coding region thereof, or a homolog or a fragment thereof, and being depicted in the same respective line as said At2g47880, or a functional equivalent or a homolog thereof as shown in column 8 of Table I, application no. 16, preferably the coding region thereof, particularly a homolog or functional equivalent as shown in column 8 of Table I B, application no. 16, and being depicted in the same respective line as said At2g47880, and preferably the activity is increased non-targeted, or
[77932] (b) a polypeptide comprising a polypeptide, a consensus sequence or at least a polypeptide motif as shown in the respective line in column 5 of Table II or in column 8 of Table IV, application no. 16, respectively, and being depicted in the same respective line as said At2g47880, or a functional equivalent or a homolog thereof as depicted in column 8 of Table II, application no. 16, preferably a homolog or functional equivalent as depicted in column 8 of Table II B, application no. 16, and being depicted in the same respective line as said At2g47880, and preferably the activity is increased non-targeted, whereby the respective line disclose in column 7 the fine chemical coenzyme Q10.

[77933] Accordingly, in one embodiment, the molecule which activity is to be increased in the process of the invention is the gene product with an activity as a “glutaredoxin”, preferably it is the molecule of section (a) or (b) of this paragraph.

[77934] In particular, it was observed that in plants, especially in Arabidopsis thaliana, increasing or generating the activity of a gene product non-targeted with the activity of a “glutaredoxin”, preferably being encoded by a gene comprising the nucleic acid sequence SEQ ID NO. 21159, preferably the coding region thereof, conferred the production of or the increase in coenzyme Q10 compared with the wild type control.

[77935] The nucleic acid sequence of At3g02990 from Arabidopsis thaliana, e.g. as shown in the respective line in column 5 of Table I, application no. 16, has been published in F. And the activity of the gene product thereof is the activity of heat shock transcription factor.

[77936] Accordingly, in one embodiment, the process of the present invention for producing coenzyme Q9 in a non-human organism, like a microorganism or a plant or a part thereof, comprises increasing or generating the activity of a gene product with the activity of a gene product conferring the activity of “heat shock transcription factor”, especially from Arabidopsis thaliana or its functional equivalent or its homolog, e.g. the increase of
[77937] (a) a gene product of a gene comprising the nucleic acid molecule as shown in the respective line in column 5 of Table I (whereby the respective line disclose in column 7 the fine chemical coenzyme Q9), application no. 16, preferably the coding region thereof, or a homolog or a fragment thereof, and being depicted in the same respective line as said At3g02990, or a functional equivalent or a homolog thereof as shown in column 8 of Table I, application no. 16, preferably the coding region thereof, particularly a homolog or functional equivalent as shown in column 8 of Table I B, application no. 16, and being depicted in the same respective line as said At3g02990, and preferably the activity is increased non-targeted, or
[77938] (b) a polypeptide comprising a polypeptide, a consensus sequence or at least a polypeptide motif as shown in the respective line in column 5 of Table II or in column 8 of Table IV, application no. 16, respectively, and being depicted in the same respective line as said At3g02990, or a functional equivalent or a homolog thereof as depicted in column 8 of Table II, application no. 16, preferably a homolog or functional equivalent as depicted in column 8 of Table II B, application no. 16, and being depicted in the same respective line as said At3g02990, and preferably the activity is increased non-targeted, whereby the respective line disclose in column 7 the fine chemical coenzyme Q9.

[77939] Accordingly, in one embodiment, the molecule which activity is to be increased in the process of the invention is the gene product with an activity as a “heat shock transcription factor”, preferably it is the molecule of section (a) or (b) of this paragraph.

[77940] In particular, it was observed that in plants, especially in Arabidopsis thaliana, increasing or generating the activity of a gene product non-targeted with the activity of a “heat shock transcription factor”, preferably being encoded by a gene comprising the nucleic acid sequence SEQ ID NO. 68657, preferably the coding region thereof, conferred the production of or the increase in coenzyme Q9 compared with the wild type control.

[77941] The nucleic acid sequence of At3g04050 from Arabidopsis thaliana, e.g. as shown in the respective line in column 5 of Table I, application no. 16, has been published in F. And the activity of the gene product thereof is the activity of pyruvate kinase.

[77942] Accordingly, in one embodiment, the process of the present invention for producing coenzyme Q10 in a non-human organism, like a microorganism or a plant or a part thereof, comprises increasing or generating the activity of a gene product with the activity of a gene product conferring the activity of “pyruvate kinase”, especially from Arabidopsis thaliana or its functional equivalent or its homolog, e.g. the increase of
[77943] (a) a gene product of a gene comprising the nucleic acid molecule as shown in the respective line in column 5 of Table I (whereby the respective line disclose in column 7 the fine chemical coenzyme Q10), application no. 16, preferably the coding region thereof, or a homolog or a fragment thereof, and being depicted in the same respective line as said At3g04050, or a functional equivalent or a homolog thereof as shown in column 8 of Table I, application no. 16, preferably the coding region thereof, particularly a homolog or functional equivalent as shown in column 8 of Table I B, application no. 16, and being depicted in the same respective line as said At3g04050, and preferably the activity is increased plastidic, or
[77944] (b) a polypeptide comprising a polypeptide, a consensus sequence or at least a polypeptide motif as shown in the respective line in column 5 of Table II or in column 8 of Table IV, application no. 16, respectively, and being depicted in the same respective line as said At3g04050, or a functional equivalent or a homolog thereof as depicted in column 8 of Table II, application no. 16, preferably a homolog or functional equivalent as depicted in column 8 of Table II B, application no. 16, and being depicted in the same respective line as said At3g04050, and preferably the activity is increased plastidic, whereby the respective line disclose in column 7 the fine chemical coenzyme Q10.

[77945] Accordingly, in one embodiment, the molecule which activity is to be increased in the process of the invention is the gene product with an activity as a “pyruvate kinase”, preferably it is the molecule of section (a) or (b) of this paragraph.

[77946] In particular, it was observed that in plants, especially in Arabidopsis thaliana, increasing or generating the activity of a gene product plastidic with the activity of a “pyruvate kinase”, preferably being encoded by a gene comprising the nucleic acid sequence SEQ ID NO. 21497, preferably the coding region thereof, conferred the production of or the increase in coenzyme Q10 compared with the wild type control.

[77947] The nucleic acid sequence of At3g16820 from Arabidopsis thaliana, e.g. as shown in the respective line in column 5 of Table I, application no. 16, has been published in F. And the activity of the gene product thereof is the activity of F-box protein.

[77948] Accordingly, in one embodiment, the process of the present invention for producing coenzyme Q9 in a non-human organism, like a microorganism or a plant or a part thereof, comprises increasing or generating the activity of a gene product with the activity of a gene product conferring the activity of “F-box protein”, especially from Arabidopsis thaliana or its functional equivalent or its homolog, e.g. the increase of
[77949] (a) a gene product of a gene comprising the nucleic acid molecule as shown in the respective line in column 5 of Table I (whereby the respective line disclose in column 7 the fine chemical coenzyme Q9), application no. 16, preferably the coding region thereof, or a homolog or a fragment thereof, and being depicted in the same respective line as said At3g16820, or a functional equivalent or a homolog thereof as shown in column 8 of Table I, application no. 16, preferably the coding region thereof, particularly a homolog or functional equivalent as shown in column 8 of Table I B, application no. 16, and being depicted in the same respective line as said At3g16820, and preferably the activity is increased non-targeted, or
[77950] (b) a polypeptide comprising a polypeptide, a consensus sequence or at least a polypeptide motif as shown in the respective line in column 5 of Table II or in column 8 of Table IV, application no. 16, respectively, and being depicted in the same respective line as said At3g16820, or a functional equivalent or a homolog thereof as depicted in column 8 of Table II, application no. 16, preferably a homolog or functional equivalent as depicted in column 8 of Table II B, application no. 16, and being depicted in the same respective line as said At3g16820, and preferably the activity is increased non-targeted, whereby the respective line disclose in column 7 the fine chemical coenzyme Q9.

[77951] Accordingly, in one embodiment, the molecule which activity is to be increased in the process of the invention is the gene product with an activity as a “F-box protein”, preferably it is the molecule of section (a) or (b) of this paragraph.

[77952] In particular, it was observed that in plants, especially in Arabidopsis thaliana, increasing or generating the activity of a gene product non-targeted with the activity of a “F-box protein”, preferably being encoded by a gene comprising the nucleic acid sequence SEQ ID NO. 120952, preferably the coding region thereof, conferred the production of or the increase in coenzyme Q9 compared with the wild type control.

[77953] The nucleic acid sequence of At3g20910 from Arabidopsis thaliana, e.g. as shown in the respective line in column 5 of Table I, application no. 16, has been published in F. And the activity of the gene product thereof is the activity of CCAAT-binding transcription factor.

[77954] Accordingly, in one embodiment, the process of the present invention for producing coenzyme Q10 in a non-human organism, like a microorganism or a plant or a part thereof, comprises increasing or generating the activity of a gene product with the activity of a gene product conferring the activity of “CCAAT-binding transcription factor”, especially from Arabidopsis thaliana or its functional equivalent or its homolog, e.g. the increase of
[77955] (a) a gene product of a gene comprising the nucleic acid molecule as shown in the respective line in column 5 of Table I (whereby the respective line disclose in column 7 the fine chemical coenzyme Q10), application no. 16, preferably the coding region thereof, or a homolog or a fragment thereof, and being depicted in the same respective line as said At3g20910, or a functional equivalent or a homolog thereof as shown in column 8 of Table I, application no. 16, preferably the coding region thereof, particularly a homolog or functional equivalent as shown in column 8 of Table I B, application no. 16, and being depicted in the same respective line as said At3g20910, and preferably the activity is increased non-targeted, or
[77956] (b) a polypeptide comprising a polypeptide, a consensus sequence or at least a polypeptide motif as shown in the respective line in column 5 of Table II or in column 8 of Table IV, application no. 16, respectively, and being depicted in the same respective line as said At3g20910, or a functional equivalent or a homolog thereof as depicted in column 8 of Table II, application no. 16, preferably a homolog or functional equivalent as depicted in column 8 of Table II B, application no. 16, and being depicted in the same respective line as said At3g20910, and preferably the activity is increased non-targeted, whereby the respective line disclose in column 7 the fine chemical coenzyme Q10.

[77957] Accordingly, in one embodiment, the molecule which activity is to be increased in the process of the invention is the gene product with an activity as a “CCAAT-binding transcription factor”, preferably it is the molecule of section (a) or (b) of this paragraph.

[77958] In particular, it was observed that in plants, especially in Arabidopsis thaliana, increasing or generating the activity of a gene product non-targeted with the activity of a “CCAAT-binding transcription factor”, preferably being encoded by a gene comprising the nucleic acid sequence SEQ ID NO. 22921, preferably the coding region thereof, conferred the production of or the increase in coenzyme Q10 compared with the wild type control.

[77959] The nucleic acid sequence of At3g20910 from Arabidopsis thaliana, e.g. as shown in the respective line in column 5 of Table I, application no. 16, has been published in F. And the activity of the gene product thereof is the activity of CCAAT-binding transcription factor.

[77960] Accordingly, in one embodiment, the process of the present invention for producing coenzyme Q9 in a non-human organism, like a microorganism or a plant or a part thereof, comprises increasing or generating the activity of a gene product with the activity of a gene product conferring the activity of “CCAAT-binding transcription factor”, especially from Arabidopsis thaliana or its functional equivalent or its homolog, e.g. the increase of
[77961] (a) a gene product of a gene comprising the nucleic acid molecule as shown in the respective line in column 5 of Table I (whereby the respective line disclose in column 7 the fine chemical coenzyme Q9), application no. 16, preferably the coding region thereof, or a homolog or a fragment thereof, and being depicted in the same respective line as said At3g20910, or a functional equivalent or a homolog thereof as shown in column 8 of Table I, application no. 16, preferably the coding region thereof, particularly a homolog or functional equivalent as shown in column 8 of Table I B, application no. 16, and being depicted in the same respective line as said At3g20910, and preferably the activity is increased non-targeted, or
[77962] (b) a polypeptide comprising a polypeptide, a consensus sequence or at least a polypeptide motif as shown in the respective line in column 5 of Table II or in column 8 of Table IV, application no. 16, respectively, and being depicted in the same respective line as said At3g20910, or a functional equivalent or a homolog thereof as depicted in column 8 of Table II, application no. 16, preferably a homolog or functional equivalent as depicted in column 8 of Table II B, application no. 16, and being depicted in the same respective line as said At3g20910, and preferably the activity is increased non-targeted, whereby the respective line disclose in column 7 the fine chemical coenzyme Q9.

[77963] Accordingly, in one embodiment, the molecule which activity is to be increased in the process of the invention is the gene product with an activity as a “CCAAT-binding transcription factor”, preferably it is the molecule of section (a) or (b) of this paragraph.

[77964] In particular, it was observed that in plants, especially in Arabidopsis thaliana, increasing or generating the activity of a gene product non-targeted with the activity of a “CCAAT-binding transcription factor”, preferably being encoded by a gene comprising the nucleic acid sequence SEQ ID NO. 22921, preferably the coding region thereof, conferred the production of or the increase in coenzyme Q9 compared with the wild type control.

[77965] The nucleic acid sequence of At3g27540 from Arabidopsis thaliana, e.g. as shown in the respective line in column 5 of Table I, application no. 16, has been published in F. And the activity of the gene product thereof is the activity of glycosyl transferase.

[77966] Accordingly, in one embodiment, the process of the present invention for producing coenzyme Q9 in a non-human organism, like a microorganism or a plant or a part thereof, comprises increasing or generating the activity of a gene product with the activity of a gene product conferring the activity of “glycosyl transferase”, especially from Arabidopsis thaliana or its functional equivalent or its homolog, e.g. the increase of
[77967] (a) a gene product of a gene comprising the nucleic acid molecule as shown in the respective line in column 5 of Table I (whereby the respective line disclose in column 7 the fine chemical coenzyme Q9), application no. 16, preferably the coding region thereof, or a homolog or a fragment thereof, and being depicted in the same respective line as said At3g27540, or a functional equivalent or a homolog thereof as shown in column 8 of Table I, application no. 16, preferably the coding region thereof, particularly a homolog or functional equivalent as shown in column 8 of Table I B, application no. 16, and being depicted in the same respective line as said At3g27540, and preferably the activity is increased non-targeted, or
[77968] (b) a polypeptide comprising a polypeptide, a consensus sequence or at least a polypeptide motif as shown in the respective line in column 5 of Table II or in column 8 of Table IV, application no. 16, respectively, and being depicted in the same respective line as said At3g27540, or a functional equivalent or a homolog thereof as depicted in column 8 of Table II, application no. 16, preferably a homolog or functional equivalent as depicted in column 8 of Table II B, application no. 16, and being depicted in the same respective line as said At3g27540, and preferably the activity is increased non-targeted, whereby the respective line disclose in column 7 the fine chemical coenzyme Q9.

[77969] Accordingly, in one embodiment, the molecule which activity is to be increased in the process of the invention is the gene product with an activity as a “glycosyl transferase”, preferably it is the molecule of section (a) or (b) of this paragraph.

[77970] In particular, it was observed that in plants, especially in Arabidopsis thaliana, increasing or generating the activity of a gene product non-targeted with the activity of a “glycosyl transferase”, preferably being encoded by a gene comprising the nucleic acid sequence SEQ ID NO. 68777, preferably the coding region thereof, conferred the production of or the increase in coenzyme Q9 compared with the wild type control.

[77971] The nucleic acid sequence of At3g61830 from Arabidopsis thaliana, e.g. as shown in the respective line in column 5 of Table I, application no. 16, has been published in F. And the activity of the gene product thereof is the activity of auxin response factor.

[77972] Accordingly, in one embodiment, the process of the present invention for producing coenzyme Q9 in a non-human organism, like a microorganism or a plant or a part thereof, comprises increasing or generating the activity of a gene product with the activity of a gene product conferring the activity of “auxin response factor”, especially from Arabidopsis thaliana or its functional equivalent or its homolog, e.g. the increase of
[77973] (a) a gene product of a gene comprising the nucleic acid molecule as shown in the respective line in column 5 of Table I (whereby the respective line disclose in column 7 the fine chemical coenzyme Q9), application no. 16, preferably the coding region thereof, or a homolog or a fragment thereof, and being depicted in the same respective line as said At3g61830, or a functional equivalent or a homolog thereof as shown in column 8 of Table I, application no. 16, preferably the coding region thereof, particularly a homolog or functional equivalent as shown in column 8 of Table I B, application no. 16, and being depicted in the same respective line as said At3g61830, and preferably the activity is increased non-targeted, or
[77974] (b) a polypeptide comprising a polypeptide, a consensus sequence or at least a polypeptide motif as shown in the respective line in column 5 of Table II or in column 8 of Table IV, application no. 16, respectively, and being depicted in the same respective line as said At3g61830, or a functional equivalent or a homolog thereof as depicted in column 8 of Table II, application no. 16, preferably a homolog or functional equivalent as depicted in column 8 of Table II B, application no. 16, and being depicted in the same respective line as said At3g61830, and preferably the activity is increased non-targeted, whereby the respective line disclose in column 7 the fine chemical coenzyme Q9.

[77975] Accordingly, in one embodiment, the molecule which activity is to be increased in the process of the invention is the gene product with an activity as a “auxin response factor”, preferably it is the molecule of section (a) or (b) of this paragraph.

[77976] In particular, it was observed that in plants, especially in Arabidopsis thaliana, increasing or generating the activity of a gene product non-targeted with the activity of a “auxin response factor”, preferably being encoded by a gene comprising the nucleic acid sequence SEQ ID NO. 2367, preferably the coding region thereof, conferred the production of or the increase in coenzyme Q9 compared with the wild type control.

[77977] The nucleic acid sequence of At3g62950 from Arabidopsis thaliana, e.g. as shown in the respective line in column 5 of Table I, application no. 16, has been published in F. And the activity of the gene product thereof is the activity of glutaredoxin.

[77978] Accordingly, in one embodiment, the process of the present invention for producing coenzyme Q10 in a non-human organism, like a microorganism or a plant or a part thereof, comprises increasing or generating the activity of a gene product with the activity of a gene product conferring the activity of “glutaredoxin”, especially from Arabidopsis thaliana or its functional equivalent or its homolog, e.g. the increase of
[77979] (a) a gene product of a gene comprising the nucleic acid molecule as shown in the respective line in column 5 of Table I (whereby the respective line disclose in column 7 the fine chemical coenzyme Q10), application no. 16, preferably the coding region thereof, or a homolog or a fragment thereof, and being depicted in the same respective line as said At3g62950, or a functional equivalent or a homolog thereof as shown in column 8 of Table I, application no. 16, preferably the coding region thereof, particularly a homolog or functional equivalent as shown in column 8 of Table I B, application no. 16, and being depicted in the same respective line as said At3g62950, and preferably the activity is increased non-targeted, or
[77980] (b) a polypeptide comprising a polypeptide, a consensus sequence or at least a polypeptide motif as shown in the respective line in column 5 of Table II or in column 8 of Table IV, application no. 16, respectively, and being depicted in the same respective line as said At3g62950, or a functional equivalent or a homolog thereof as depicted in column 8 of Table II, application no. 16, preferably a homolog or functional equivalent as depicted in column 8 of Table II B, application no. 16, and being depicted in the same respective line as said At3g62950, and preferably the activity is increased non-targeted, whereby the respective line disclose in column 7 the fine chemical coenzyme Q10.

[77981] Accordingly, in one embodiment, the molecule which activity is to be increased in the process of the invention is the gene product with an activity as a “glutaredoxin”, preferably it is the molecule of section (a) or (b) of this paragraph.

[77982] In particular, it was observed that in plants, especially in Arabidopsis thaliana, increasing or generating the activity of a gene product non-targeted with the activity of a “glutaredoxin”, preferably being encoded by a gene comprising the nucleic acid sequence SEQ ID NO. 2935, preferably the coding region thereof, conferred the production of or the increase in coenzyme Q10 compared with the wild type control.

[77983] The nucleic acid sequence of At3g62950 from Arabidopsis thaliana, e.g. as shown in the respective line in column 5 of Table I, application no. 16, has been published in F. And the activity of the gene product thereof is the activity of glutaredoxin.

[77984] Accordingly, in one embodiment, the process of the present invention for producing coenzyme Q9 in a non-human organism, like a microorganism or a plant or a part thereof, comprises increasing or generating the activity of a gene product with the activity of a gene product conferring the activity of “glutaredoxin”, especially from Arabidopsis thaliana or its functional equivalent or its homolog, e.g. the increase of
[77985] (a) a gene product of a gene comprising the nucleic acid molecule as shown in the respective line in column 5 of Table I (whereby the respective line disclose in column 7 the fine chemical coenzyme Q9), application no. 16, preferably the coding region thereof, or a homolog or a fragment thereof, and being depicted in the same respective line as said At3g62950, or a functional equivalent or a homolog thereof as shown in column 8 of Table I, application no. 16, preferably the coding region thereof, particularly a homolog or functional equivalent as shown in column 8 of Table I B, application no. 16, and being depicted in the same respective line as said At3g62950, and preferably the activity is increased non-targeted, or
[77986] (b) a polypeptide comprising a polypeptide, a consensus sequence or at least a polypeptide motif as shown in the respective line in column 5 of Table II or in column 8 of Table IV, application no. 16, respectively, and being depicted in the same respective line as said At3g62950, or a functional equivalent or a homolog thereof as depicted in column 8 of Table II, application no. 16, preferably a homolog or functional equivalent as depicted in column 8 of Table II B, application no. 16, and being depicted in the same respective line as said At3g62950, and preferably the activity is increased non-targeted, whereby the respective line disclose in column 7 the fine chemical coenzyme Q9.

[77987] Accordingly, in one embodiment, the molecule which activity is to be increased in the process of the invention is the gene product with an activity as a “glutaredoxin”, preferably it is the molecule of section (a) or (b) of this paragraph.

[77988] In particular, it was observed that in plants, especially in Arabidopsis thaliana, increasing or generating the activity of a gene product non-targeted with the activity of a “glutaredoxin”, preferably being encoded by a gene comprising the nucleic acid sequence SEQ ID NO. 2935, preferably the coding region thereof, conferred the production of or the increase in coenzyme Q9 compared with the wild type control.

[77989] The nucleic acid sequence of At4g12110 from Arabidopsis thaliana, e.g. as shown in the respective line in column 5 of Table I, application no. 16, has been published in F. And the activity of the gene product thereof is the activity of sterol desaturase.

[77990] Accordingly, in one embodiment, the process of the present invention for producing coenzyme Q10 in a non-human organism, like a microorganism or a plant or a part thereof, comprises increasing or generating the activity of a gene product with the activity of a gene product conferring the activity of “sterol desaturase”, especially from Arabidopsis thaliana or its functional equivalent or its homolog, e.g. the increase of
[77991] (a) a gene product of a gene comprising the nucleic acid molecule as shown in the respective line in column 5 of Table I (whereby the respective line disclose in column 7 the fine chemical coenzyme Q10), application no. 16, preferably the coding region thereof, or a homolog or a fragment thereof, and being depicted in the same respective line as said At4g12110, or a functional equivalent or a homolog thereof as shown in column 8 of Table I, application no. 16, preferably the coding region thereof, particularly a homolog or functional equivalent as shown in column 8 of Table I B, application no. 16, and being depicted in the same respective line as said At4g12110, and preferably the activity is increased non-targeted, or
[77992] (b) a polypeptide comprising a polypeptide, a consensus sequence or at least a polypeptide motif as shown in the respective line in column 5 of Table II or in column 8 of Table IV, application no. 16, respectively, and being depicted in the same respective line as said At4g12110, or a functional equivalent or a homolog thereof as depicted in column 8 of Table II, application no. 16, preferably a homolog or functional equivalent as depicted in column 8 of Table II B, application no. 16, and being depicted in the same respective line as said At4g12110, and preferably the activity is increased non-targeted, whereby the respective line disclose in column 7 the fine chemical coenzyme Q10.

[77993] Accordingly, in one embodiment, the molecule which activity is to be increased in the process of the invention is the gene product with an activity as a “sterol desaturase”, preferably it is the molecule of section (a) or (b) of this paragraph.

[77994] In particular, it was observed that in plants, especially in Arabidopsis thaliana, increasing or generating the activity of a gene product non-targeted with the activity of a “sterol desaturase”, preferably being encoded by a gene comprising the nucleic acid sequence SEQ ID NO. 131208, preferably the coding region thereof, conferred the production of or the increase in coenzyme Q10 compared with the wild type control.

[77995] The nucleic acid sequence of At4g15660 from Arabidopsis thaliana, e.g. as shown in the respective line in column 5 of Table I, application no. 16, has been published in F. And the activity of the gene product thereof is the activity of monothiol glutaredoxin.

[77996] Accordingly, in one embodiment, the process of the present invention for producing coenzyme Q10 in a non-human organism, like a microorganism or a plant or a part thereof, comprises increasing or generating the activity of a gene product with the activity of a gene product conferring the activity of “monothiol glutaredoxin”, especially from Arabidopsis thaliana or its functional equivalent or its homolog, e.g. the increase of
[77997] (a) a gene product of a gene comprising the nucleic acid molecule as shown in the respective line in column 5 of Table I (whereby the respective line disclose in column 7 the fine chemical coenzyme Q10), application no. 16, preferably the coding region thereof, or a homolog or a fragment thereof, and being depicted in the same respective line as said At4g15660, or a functional equivalent or a homolog thereof as shown in column 8 of Table I, application no. 16, preferably the coding region thereof, particularly a homolog or functional equivalent as shown in column 8 of Table I B, application no. 16, and being depicted in the same respective line as said At4g15660, and preferably the activity is increased non-targeted, or
[77998] (b) a polypeptide comprising a polypeptide, a consensus sequence or at least a polypeptide motif as shown in the respective line in column 5 of Table II or in column 8 of Table IV, application no. 16, respectively, and being depicted in the same respective line as said At4g15660, or a functional equivalent or a homolog thereof as depicted in column 8 of Table II, application no. 16, preferably a homolog or functional equivalent as depicted in column 8 of Table II B, application no. 16, and being depicted in the same respective line as said At4g15660, and preferably the activity is increased non-targeted, whereby the respective line disclose in column 7 the fine chemical coenzyme Q10.

[77999] Accordingly, in one embodiment, the molecule which activity is to be increased in the process of the invention is the gene product with an activity as a “monothiol glutaredoxin”, preferably it is the molecule of section (a) or (b) of this paragraph.

[78000] In particular, it was observed that in plants, especially in Arabidopsis thaliana, increasing or generating the activity of a gene product non-targeted with the activity of a “monothiol glutaredoxin”, preferably being encoded by a gene comprising the nucleic acid sequence SEQ ID NO. 23482, preferably the coding region thereof, conferred the production of or the increase in coenzyme Q10 compared with the wild type control.

[78001] The nucleic acid sequence of At4g15660 from Arabidopsis thaliana, e.g. as shown in the respective line in column 5 of Table I, application no. 16, has been published in F. And the activity of the gene product thereof is the activity of monothiol glutaredoxin.

[78002] Accordingly, in one embodiment, the process of the present invention for producing coenzyme Q9 in a non-human organism, like a microorganism or a plant or a part thereof, comprises increasing or generating the activity of a gene product with the activity of a gene product conferring the activity of “monothiol glutaredoxin”, especially from Arabidopsis thaliana or its functional equivalent or its homolog, e.g. the increase of
[78003] (a) a gene product of a gene comprising the nucleic acid molecule as shown in the respective line in column 5 of Table I (whereby the respective line disclose in column 7 the fine chemical coenzyme Q9), application no. 16, preferably the coding region thereof, or a homolog or a fragment thereof, and being depicted in the same respective line as said At4g15660, or a functional equivalent or a homolog thereof as shown in column 8 of Table I, application no. 16, preferably the coding region thereof, particularly a homolog or functional equivalent as shown in column 8 of Table I B, application no. 16, and being depicted in the same respective line as said At4g15660, and preferably the activity is increased non-targeted, or
[78004] (b) a polypeptide comprising a polypeptide, a consensus sequence or at least a polypeptide motif as shown in the respective line in column 5 of Table II or in column 8 of Table IV, application no. 16, respectively, and being depicted in the same respective line as said At4g15660, or a functional equivalent or a homolog thereof as depicted in column 8 of Table II, application no. 16, preferably a homolog or functional equivalent as depicted in column 8 of Table II B, application no. 16, and being depicted in the same respective line as said At4g15660, and preferably the activity is increased non-targeted, whereby the respective line disclose in column 7 the fine chemical coenzyme Q9.

[78005] Accordingly, in one embodiment, the molecule which activity is to be increased in the process of the invention is the gene product with an activity as a “monothiol glutaredoxin”, preferably it is the molecule of section (a) or (b) of this paragraph.

[78006] In particular, it was observed that in plants, especially in Arabidopsis thaliana, increasing or generating the activity of a gene product non-targeted with the activity of a “monothiol glutaredoxin”, preferably being encoded by a gene comprising the nucleic acid sequence SEQ ID NO. 23482, preferably the coding region thereof, conferred the production of or the increase in coenzyme Q9 compared with the wild type control.

[78007] The nucleic acid sequence of At4g34160 from Arabidopsis thaliana, e.g. as shown in the respective line in column 5 of Table I, application no. 16, has been published in F. And the activity of the gene product thereof is the activity of cyclin D.

[78008] Accordingly, in one embodiment, the process of the present invention for producing coenzyme Q10 in a non-human organism, like a microorganism or a plant or a part thereof, comprises increasing or generating the activity of a gene product with the activity of a gene product conferring the activity of “cyclin D”, especially from Arabidopsis thaliana or its functional equivalent or its homolog, e.g. the increase of
[78009] (a) a gene product of a gene comprising the nucleic acid molecule as shown in the respective line in column 5 of Table I (whereby the respective line disclose in column 7 the fine chemical coenzyme Q10), application no. 16, preferably the coding region thereof, or a homolog or a fragment thereof, and being depicted in the same respective line as said At4g34160, or a functional equivalent or a homolog thereof as shown in column 8 of Table I, application no. 16, preferably the coding region thereof, particularly a homolog or functional equivalent as shown in column 8 of Table I B, application no. 16, and being depicted in the same respective line as said At4g34160, and preferably the activity is increased non-targeted, or
[78010] (b) a polypeptide comprising a polypeptide, a consensus sequence or at least a polypeptide motif as shown in the respective line in column 5 of Table II or in column 8 of Table IV, application no. 16, respectively, and being depicted in the same respective line as said At4g34160, or a functional equivalent or a homolog thereof as depicted in column 8 of Table II, application no. 16, preferably a homolog or functional equivalent as depicted in column 8 of Table II B, application no. 16, and being depicted in the same respective line as said At4g34160, and preferably the activity is increased non-targeted, whereby the respective line disclose in column 7 the fine chemical coenzyme Q10.

[78011] Accordingly, in one embodiment, the molecule which activity is to be increased in the process of the invention is the gene product with an activity as a “cyclin D”, preferably it is the molecule of section (a) or (b) of this paragraph.

[78012] In particular, it was observed that in plants, especially in Arabidopsis thaliana, increasing or generating the activity of a gene product non-targeted with the activity of a “cyclin D”, preferably being encoded by a gene comprising the nucleic acid sequence SEQ ID NO. 24311, preferably the coding region thereof, conferred the production of or the increase in coenzyme Q10 compared with the wild type control.

[78013] The nucleic acid sequence of At4g34160 from Arabidopsis thaliana, e.g. as shown in the respective line in column 5 of Table I, application no. 16, has been published in F. And the activity of the gene product thereof is the activity of cyclin D .

[78014] Accordingly, in one embodiment, the process of the present invention for producing coenzyme Q9 in a non-human organism, like a microorganism or a plant or a part thereof, comprises increasing or generating the activity of a gene product with the activity of a gene product conferring the activity of “cyclin D”, especially from Arabidopsis thaliana or its functional equivalent or its homolog, e.g. the increase of
[78015] (a) a gene product of a gene comprising the nucleic acid molecule as shown in the respective line in column 5 of Table I (whereby the respective line disclose in column 7 the fine chemical coenzyme Q9), application no. 16, preferably the coding region thereof, or a homolog or a fragment thereof, and being depicted in the same respective line as said At4g34160, or a functional equivalent or a homolog thereof as shown in column 8 of Table I, application no. 16, preferably the coding region thereof, particularly a homolog or functional equivalent as shown in column 8 of Table I B, application no. 16, and being depicted in the same respective line as said At4g34160, and preferably the activity is increased non-targeted, or
[78016] (b) a polypeptide comprising a polypeptide, a consensus sequence or at least a polypeptide motif as shown in the respective line in column 5 of Table II or in column 8 of Table IV, application no. 16, respectively, and being depicted in the same respective line as said At4g34160, or a functional equivalent or a homolog thereof as depicted in column 8 of Table II, application no. 16, preferably a homolog or functional equivalent as depicted in column 8 of Table II B, application no. 16, and being depicted in the same respective line as said At4g34160, and preferably the activity is increased non-targeted, whereby the respective line disclose in column 7 the fine chemical coenzyme Q9.

[78017] Accordingly, in one embodiment, the molecule which activity is to be increased in the process of the invention is the gene product with an activity as a “cyclin D”, preferably it is the molecule of section (a) or (b) of this paragraph.

[78018] In particular, it was observed that in plants, especially in Arabidopsis thaliana, increasing or generating the activity of a gene product non-targeted with the activity of a “cyclin D”, preferably being encoded by a gene comprising the nucleic acid sequence SEQ ID NO. 24311, preferably the coding region thereof, conferred the production of or the increase in coenzyme Q9 compared with the wild type control.

[78019] The nucleic acid sequence of At4g35310 from Arabidopsis thaliana, e.g. as shown in the respective line in column 5 of Table I, application no. 16, has been published in F. And the activity of the gene product thereof is the activity of calcium-dependent protein kinase.

[78020] Accordingly, in one embodiment, the process of the present invention for producing coenzyme Q10 in a non-human organism, like a microorganism or a plant or a part thereof, comprises increasing or generating the activity of a gene product with the activity of a gene product conferring the activity of “calcium-dependent protein kinase”, especially from Arabidopsis thaliana or its functional equivalent or its homolog, e.g. the increase of
[78021] (a) a gene product of a gene comprising the nucleic acid molecule as shown in the respective line in column 5 of Table I (whereby the respective line disclose in column 7 the fine chemical coenzyme Q10), application no. 16, preferably the coding region thereof, or a homolog or a fragment thereof, and being depicted in the same respective line as said At4g35310, or a functional equivalent or a homolog thereof as shown in column 8 of Table I, application no. 16, preferably the coding region thereof, particularly a homolog or functional equivalent as shown in column 8 of Table I B, application no. 16, and being depicted in the same respective line as said At4g35310, and preferably the activity is increased non-targeted, or
[78022] (b) a polypeptide comprising a polypeptide, a consensus sequence or at least a polypeptide motif as shown in the respective line in column 5 of Table II or in column 8 of Table IV, application no. 16, respectively, and being depicted in the same respective line as said At4g35310, or a functional equivalent or a homolog thereof as depicted in column 8 of Table II, application no. 16, preferably a homolog or functional equivalent as depicted in column 8 of Table II B, application no. 16, and being depicted in the same respective line as said At4g35310, and preferably the activity is increased non-targeted, whereby the respective line disclose in column 7 the fine chemical coenzyme Q10.

[78023] Accordingly, in one embodiment, the molecule which activity is to be increased in the process of the invention is the gene product with an activity as a “calcium-dependent protein kinase”, preferably it is the molecule of section (a) or (b) of this paragraph.

[78024] In particular, it was observed that in plants, especially in Arabidopsis thaliana, increasing or generating the activity of a gene product non-targeted with the activity of a “calcium-dependent protein kinase”, preferably being encoded by a gene comprising the nucleic acid sequence SEQ ID NO. 4348, preferably the coding region thereof, conferred the production of or the increase in coenzyme Q10 compared with the wild type control.

[78025] The nucleic acid sequence of At4g35310 from Arabidopsis thaliana, e.g. as shown in the respective line in column 5 of Table I, application no. 16, has been published in F. And the activity of the gene product thereof is the activity of calcium-dependent protein kinase.

[78026] Accordingly, in one embodiment, the process of the present invention for producing coenzyme Q9 in a non-human organism, like a microorganism or a plant or a part thereof, comprises increasing or generating the activity of a gene product with the activity of a gene product conferring the activity of “calcium-dependent protein kinase”, especially from Arabidopsis thaliana or its functional equivalent or its homolog, e.g. the increase of
[78027] (a) a gene product of a gene comprising the nucleic acid molecule as shown in the respective line in column 5 of Table I (whereby the respective line disclose in column 7 the fine chemical coenzyme Q9), application no. 16, preferably the coding region thereof, or a homolog or a fragment thereof, and being depicted in the same respective line as said At4g35310, or a functional equivalent or a homolog thereof as shown in column 8 of Table I, application no. 16, preferably the coding region thereof, particularly a homolog or functional equivalent as shown in column 8 of Table I B, application no. 16, and being depicted in the same respective line as said At4g35310, and preferably the activity is increased non-targeted, or
[78028] (b) a polypeptide comprising a polypeptide, a consensus sequence or at least a polypeptide motif as shown in the respective line in column 5 of Table II or in column 8 of Table IV, application no. 16, respectively, and being depicted in the same respective line as said At4g35310, or a functional equivalent or a homolog thereof as depicted in column 8 of Table II, application no. 16, preferably a homolog or functional equivalent as depicted in column 8 of Table II B, application no. 16, and being depicted in the same respective line as said At4g35310, and preferably the activity is increased non-targeted, whereby the respective line disclose in column 7 the fine chemical coenzyme Q9.

[78029] Accordingly, in one embodiment, the molecule which activity is to be increased in the process of the invention is the gene product with an activity as a “calcium-dependent protein kinase”, preferably it is the molecule of section (a) or (b) of this paragraph.

[78030] In particular, it was observed that in plants, especially in Arabidopsis thaliana, increasing or generating the activity of a gene product non-targeted with the activity of a “calcium-dependent protein kinase”, preferably being encoded by a gene comprising the nucleic acid sequence SEQ ID NO. 4348, preferably the coding region thereof, conferred the production of or the increase in coenzyme Q9 compared with the wild type control.

[78031] The nucleic acid sequence of At5g03720 from Arabidopsis thaliana, e.g. as shown in the respective line in column 5 of Table I, application no. 16, has been published in F. And the activity of the gene product thereof is the activity of heat shock transcription factor.

[78032] Accordingly, in one embodiment, the process of the present invention for producing coenzyme Q9 in a non-human organism, like a microorganism or a plant or a part thereof, comprises increasing or generating the activity of a gene product with the activity of a gene product conferring the activity of “heat shock transcription factor”, especially from Arabidopsis thaliana or its functional equivalent or its homolog, e.g. the increase of
[78033] (a) a gene product of a gene comprising the nucleic acid molecule as shown in the respective line in column 5 of Table I (whereby the respective line disclose in column 7 the fine chemical coenzyme Q9), application no. 16, preferably the coding region thereof, or a homolog or a fragment thereof, and being depicted in the same respective line as said At5g03720, or a functional equivalent or a homolog thereof as shown in column 8 of Table I, application no. 16, preferably the coding region thereof, particularly a homolog or functional equivalent as shown in column 8 of Table I B, application no. 16, and being depicted in the same respective line as said At5g03720, and preferably the activity is increased non-targeted, or
[78034] (b) a polypeptide comprising a polypeptide, a consensus sequence or at least a polypeptide motif as shown in the respective line in column 5 of Table II or in column 8 of Table IV, application no. 16, respectively, and being depicted in the same respective line as said At5g03720, or a functional equivalent or a homolog thereof as depicted in column 8 of Table II, application no. 16, preferably a homolog or functional equivalent as depicted in column 8 of Table II B, application no. 16, and being depicted in the same respective line as said At5g03720, and preferably the activity is increased non-targeted, whereby the respective line disclose in column 7 the fine chemical coenzyme Q9.

[78035] Accordingly, in one embodiment, the molecule which activity is to be increased in the process of the invention is the gene product with an activity as a “heat shock transcription factor”, preferably it is the molecule of section (a) or (b) of this paragraph.

[78036] In particular, it was observed that in plants, especially in Arabidopsis thaliana, increasing or generating the activity of a gene product non-targeted with the activity of a “heat shock transcription factor”, preferably being encoded by a gene comprising the nucleic acid sequence SEQ ID NO. 24438, preferably the coding region thereof, conferred the production of or the increase in coenzyme Q9 compared with the wild type control.

[78037] The nucleic acid sequence of At5g18600 from Arabidopsis thaliana, e.g. as shown in the respective line in column 5 of Table I, application no. 16, has been published in F. And the activity of the gene product thereof is the activity of monothiol glutaredoxin.

[78038] Accordingly, in one embodiment, the process of the present invention for producing coenzyme Q10 in a non-human organism, like a microorganism or a plant or a part thereof, comprises increasing or generating the activity of a gene product with the activity of a gene product conferring the activity of “monothiol glutaredoxin”, especially from Arabidopsis thaliana or its functional equivalent or its homolog, e.g. the increase of
[78039] (a) a gene product of a gene comprising the nucleic acid molecule as shown in the respective line in column 5 of Table I (whereby the respective line disclose in column 7 the fine chemical coenzyme Q10), application no. 16, preferably the coding region thereof, or a homolog or a fragment thereof, and being depicted in the same respective line as said At5g18600, or a functional equivalent or a homolog thereof as shown in column 8 of Table I, application no. 16, preferably the coding region thereof, particularly a homolog or functional equivalent as shown in column 8 of Table I B, application no. 16, and being depicted in the same respective line as said At5g18600, and preferably the activity is increased non-targeted, or
[78040] (b) a polypeptide comprising a polypeptide, a consensus sequence or at least a polypeptide motif as shown in the respective line in column 5 of Table II or in column 8 of Table IV, application no. 16, respectively, and being depicted in the same respective line as said At5g18600, or a functional equivalent or a homolog thereof as depicted in column 8 of Table II, application no. 16, preferably a homolog or functional equivalent as depicted in column 8 of Table II B, application no. 16, and being depicted in the same respective line as said At5g18600, and preferably the activity is increased non-targeted, whereby the respective line disclose in column 7 the fine chemical coenzyme Q10.

[78041] Accordingly, in one embodiment, the molecule which activity is to be increased in the process of the invention is the gene product with an activity as a “monothiol glutaredoxin”, preferably it is the molecule of section (a) or (b) of this paragraph.

[78042] In particular, it was observed that in plants, especially in Arabidopsis thaliana, increasing or generating the activity of a gene product non-targeted with the activity of a “monothiol glutaredoxin”, preferably being encoded by a gene comprising the nucleic acid sequence SEQ ID NO. 4904, preferably the coding region thereof, conferred the production of or the increase in coenzyme Q10 compared with the wild type control.

[78043] The nucleic acid sequence of At5g45060 from Arabidopsis thaliana, e.g. as shown in the respective line in column 5 of Table I, application no. 16, has been published in F. And the activity of the gene product thereof is the activity of disease resistance protein.

[78044] Accordingly, in one embodiment, the process of the present invention for producing coenzyme Q9 in a non-human organism, like a microorganism or a plant or a part thereof, comprises increasing or generating the activity of a gene product with the activity of a gene product conferring the activity of “disease resistance protein”, especially from Arabidopsis thaliana or its functional equivalent or its homolog, e.g. the increase of
[78045] (a) a gene product of a gene comprising the nucleic acid molecule as shown in the respective line in column 5 of Table I (whereby the respective line disclose in column 7 the fine chemical coenzyme Q9), application no. 16, preferably the coding region thereof, or a homolog or a fragment thereof, and being depicted in the same respective line as said At5g45060, or a functional equivalent or a homolog thereof as shown in column 8 of Table I, application no. 16, preferably the coding region thereof, particularly a homolog or functional equivalent as shown in column 8 of Table I B, application no. 16, and being depicted in the same respective line as said At5g45060, and preferably the activity is increased non-targeted, or
[78046] (b) a polypeptide comprising a polypeptide, a consensus sequence or at least a polypeptide motif as shown in the respective line in column 5 of Table II or in column 8 of Table IV, application no. 16, respectively, and being depicted in the same respective line as said At5g45060, or a functional equivalent or a homolog thereof as depicted in column 8 of Table II, application no. 16, preferably a homolog or functional equivalent as depicted in column 8 of Table II B, application no. 16, and being depicted in the same respective line as said At5g45060, and preferably the activity is increased non-targeted, whereby the respective line disclose in column 7 the fine chemical coenzyme Q9.

[78047] Accordingly, in one embodiment, the molecule which activity is to be increased in the process of the invention is the gene product with an activity as a “disease resistance protein”, preferably it is the molecule of section (a) or (b) of this paragraph.

[78048] In particular, it was observed that in plants, especially in Arabidopsis thaliana, increasing or generating the activity of a gene product non-targeted with the activity of a “disease resistance protein”, preferably being encoded by a gene comprising the nucleic acid sequence SEQ ID NO. 102223, preferably the coding region thereof, conferred the production of or the increase in coenzyme Q9 compared with the wild type control.

[78049] The nucleic acid sequence of At5g59220 from Arabidopsis thaliana, e.g. as shown in the respective line in column 5 of Table I, application no. 16, has been published in F. And the activity of the gene product thereof is the activity of protein phosphatase.

[78050] Accordingly, in one embodiment, the process of the present invention for producing coenzyme Q9 in a non-human organism, like a microorganism or a plant or a part thereof, comprises increasing or generating the activity of a gene product with the activity of a gene product conferring the activity of “protein phosphatase”, especially from Arabidopsis thaliana or its functional equivalent or its homolog, e.g. the increase of
[78051] (a) a gene product of a gene comprising the nucleic acid molecule as shown in the respective line in column 5 of Table I (whereby the respective line disclose in column 7 the fine chemical coenzyme Q9), application no. 16, preferably the coding region thereof, or a homolog or a fragment thereof, and being depicted in the same respective line as said At5g59220, or a functional equivalent or a homolog thereof as shown in column 8 of Table I, application no. 16, preferably the coding region thereof, particularly a homolog or functional equivalent as shown in column 8 of Table I B, application no. 16, and being depicted in the same respective line as said At5g59220, and preferably the activity is increased non-targeted, or
[78052] (b) a polypeptide comprising a polypeptide, a consensus sequence or at least a polypeptide motif as shown in the respective line in column 5 of Table II or in column 8 of Table IV, application no. 16, respectively, and being depicted in the same respective line as said At5g59220, or a functional equivalent or a homolog thereof as depicted in column 8 of Table II, application no. 16, preferably a homolog or functional equivalent as depicted in column 8 of Table II B, application no. 16, and being depicted in the same respective line as said At5g59220, and preferably the activity is increased non-targeted, whereby the respective line disclose in column 7 the fine chemical coenzyme Q9.

[78053] Accordingly, in one embodiment, the molecule which activity is to be increased in the process of the invention is the gene product with an activity as a “protein phosphatase”, preferably it is the molecule of section (a) or (b) of this paragraph.

[78054] In particular, it was observed that in plants, especially in Arabidopsis thaliana, increasing or generating the activity of a gene product non-targeted with the activity of a “protein phosphatase”, preferably being encoded by a gene comprising the nucleic acid sequence SEQ ID NO. 25498, preferably the coding region thereof, conferred the production of or the increase in coenzyme Q9 compared with the wild type control.

[78055] The nucleic acid sequence of At5g64920 from Arabidopsis thaliana, e.g. as shown in the respective line in column 5 of Table I, application no. 16, has been published in F. And the activity of the gene product thereof is the activity of zinc finger protein.

[78056] Accordingly, in one embodiment, the process of the present invention for producing coenzyme Q9 in a non-human organism, like a microorganism or a plant or a part thereof, comprises increasing or generating the activity of a gene product with the activity of a gene product conferring the activity of “zinc finger protein”, especially from Arabidopsis thaliana or its functional equivalent or its homolog, e.g. the increase of
[78057] (a) a gene product of a gene comprising the nucleic acid molecule as shown in the respective line in column 5 of Table I (whereby the respective line disclose in column 7 the fine chemical coenzyme Q9), application no. 16, preferably the coding region thereof, or a homolog or a fragment thereof, and being depicted in the same respective line as said At5g64920, or a functional equivalent or a homolog thereof as shown in column 8 of Table I, application no. 16, preferably the coding region thereof, particularly a homolog or functional equivalent as shown in column 8 of Table I B, application no. 16, and being depicted in the same respective line as said At5g64920, and preferably the activity is increased non-targeted, or
[78058] (b) a polypeptide comprising a polypeptide, a consensus sequence or at least a polypeptide motif as shown in the respective line in column 5 of Table II or in column 8 of Table IV, application no. 16, respectively, and being depicted in the same respective line as said At5g64920, or a functional equivalent or a homolog thereof as depicted in column 8 of Table II, application no. 16, preferably a homolog or functional equivalent as depicted in column 8 of Table II B, application no. 16, and being depicted in the same respective line as said At5g64920, and preferably the activity is increased non-targeted, whereby the respective line disclose in column 7 the fine chemical coenzyme Q9.

[78059] Accordingly, in one embodiment, the molecule which activity is to be increased in the process of the invention is the gene product with an activity as a “zinc finger protein”, preferably it is the molecule of section (a) or (b) of this paragraph.

[78060] In particular, it was observed that in plants, especially in Arabidopsis thaliana, increasing or generating the activity of a gene product non-targeted with the activity of a “zinc finger protein”, preferably being encoded by a gene comprising the nucleic acid sequence SEQ ID NO. 5493, preferably the coding region thereof, conferred the production of or the increase in coenzyme Q9 compared with the wild type control.

[78061] The nucleic acid sequence of AvinDRAFT_{—}3209 from Azotobacter vinelandii, e.g. as shown in the respective line in column 5 of Table I, application no. 16, has been published in D. And the activity of the gene product thereof is the activity of transcriptional regulator.

[78062] Accordingly, in one embodiment, the process of the present invention for producing coenzyme Q9 in a non-human organism, like a microorganism or a plant or a part thereof, comprises increasing or generating the activity of a gene product with the activity of a gene product conferring the activity of “transcriptional regulator”, especially from Azotobacter vinelandii or its functional equivalent or its homolog, e.g. the increase of
[78063] (a) a gene product of a gene comprising the nucleic acid molecule as shown in the respective line in column 5 of Table I (whereby the respective line disclose in column 7 the fine chemical coenzyme Q9), application no. 16, preferably the coding region thereof, or a homolog or a fragment thereof, and being depicted in the same respective line as said AvinDRAFT_{—}3209, or a functional equivalent or a homolog thereof as shown in column 8 of Table I, application no. 16, preferably the coding region thereof, particularly a homolog or functional equivalent as shown in column 8 of Table I B, application no. 16, and being depicted in the same respective line as said AvinDRAFT_{—}3209, and preferably the activity is increased non-targeted, or
[78064] (b) a polypeptide comprising a polypeptide, a consensus sequence or at least a polypeptide motif as shown in the respective line in column 5 of Table II or in column 8 of Table IV, application no. 16, respectively, and being depicted in the same respective line as said AvinDRAFT_{—}3209, or a functional equivalent or a homolog thereof as depicted in column 8 of Table II, application no. 16, preferably a homolog or functional equivalent as depicted in column 8 of Table II B, application no. 16, and being depicted in the same respective line as said AvinDRAFT_{—}3209, and preferably the activity is increased non-targeted, whereby the respective line disclose in column 7 the fine chemical coenzyme Q9.

[78065] Accordingly, in one embodiment, the molecule which activity is to be increased in the process of the invention is the gene product with an activity as a “transcriptional regulator”, preferably it is the molecule of section (a) or (b) of this paragraph.

[78066] In particular, it was observed that in plants, especially in Arabidopsis thaliana, increasing or generating the activity of a gene product non-targeted with the activity of a “transcriptional regulator”, preferably being encoded by a gene comprising the nucleic acid sequence SEQ ID NO. 29286, preferably the coding region thereof, conferred the production of or the increase in coenzyme Q9 compared with the wild type control.

[78067] The nucleic acid sequence of AvinDRAFT_{—}3605 from Azotobacter vinelandii, e.g. as shown in the respective line in column 5 of Table I, application no. 16, has been published in D. And the activity of the gene product thereof is the activity of CTP synthase.

[78068] Accordingly, in one embodiment, the process of the present invention for producing coenzyme Q9 in a non-human organism, like a microorganism or a plant or a part thereof, comprises increasing or generating the activity of a gene product with the activity of a gene product conferring the activity of “CTP synthase”, especially from Azotobacter vinelandii or its functional equivalent or its homolog, e.g. the increase of
[78069] (a) a gene product of a gene comprising the nucleic acid molecule as shown in the respective line in column 5 of Table I (whereby the respective line disclose in column 7 the fine chemical coenzyme Q9), application no. 16, preferably the coding region thereof, or a homolog or a fragment thereof, and being depicted in the same respective line as said AvinDRAFT_{—}3605, or a functional equivalent or a homolog thereof as shown in column 8 of Table I, application no. 16, preferably the coding region thereof, particularly a homolog or functional equivalent as shown in column 8 of Table I B, application no. 16, and being depicted in the same respective line as said AvinDRAFT_{—}3605, and preferably the activity is increased non-targeted, or
[78070] (b) a polypeptide comprising a polypeptide, a consensus sequence or at least a polypeptide motif as shown in the respective line in column 5 of Table II or in column 8 of Table IV, application no. 16, respectively, and being depicted in the same respective line as said AvinDRAFT_{—}3605, or a functional equivalent or a homolog thereof as depicted in column 8 of Table II, application no. 16, preferably a homolog or functional equivalent as depicted in column 8 of Table II B, application no. 16, and being depicted in the same respective line as said AvinDRAFT_{—}3605, and preferably the activity is increased non-targeted, whereby the respective line disclose in column 7 the fine chemical coenzyme Q9.

[78071] Accordingly, in one embodiment, the molecule which activity is to be increased in the process of the invention is the gene product with an activity as a “CTP synthase”, preferably it is the molecule of section (a) or (b) of this paragraph.

[78072] In particular, it was observed that in plants, especially in Arabidopsis thaliana, increasing or generating the activity of a gene product non-targeted with the activity of a “CTP synthase”, preferably being encoded by a gene comprising the nucleic acid sequence SEQ ID NO. 31026, preferably the coding region thereof, conferred the production of or the increase in coenzyme Q9 compared with the wild type control.

[78073] The nucleic acid sequence of AvinDRAFT_{—}3629 from Azotobacter vinelandii, e.g. as shown in the respective line in column 5 of Table I, application no. 16, has been published in D. And the activity of the gene product thereof is the activity of recombinase A.

[78074] Accordingly, in one embodiment, the process of the present invention for producing coenzyme Q9 in a non-human organism, like a microorganism or a plant or a part thereof, comprises increasing or generating the activity of a gene product with the activity of a gene product conferring the activity of “recombinase A”, especially from Azotobacter vinelandii or its functional equivalent or its homolog, e.g. the increase of
[78075] (a) a gene product of a gene comprising the nucleic acid molecule as shown in the respective line in column 5 of Table I (whereby the respective line disclose in column 7 the fine chemical coenzyme Q9), application no. 16, preferably the coding region thereof, or a homolog or a fragment thereof, and being depicted in the same respective line as said AvinDRAFT_{—}3629, or a functional equivalent or a homolog thereof as shown in column 8 of Table I, application no. 16, preferably the coding region thereof, particularly a homolog or functional equivalent as shown in column 8 of Table I B, application no. 16, and being depicted in the same respective line as said AvinDRAFT_{—}3629, and preferably the activity is increased non-targeted, or
[78076] (b) a polypeptide comprising a polypeptide, a consensus sequence or at least a polypeptide motif as shown in the respective line in column 5 of Table II or in column 8 of Table IV, application no. 16, respectively, and being depicted in the same respective line as said AvinDRAFT_{—}3629, or a functional equivalent or a homolog thereof as depicted in column 8 of Table II, application no. 16, preferably a homolog or functional equivalent as depicted in column 8 of Table II B, application no. 16, and being depicted in the same respective line as said AvinDRAFT_{—}3629, and preferably the activity is increased non-targeted, whereby the respective line disclose in column 7 the fine chemical coenzyme Q9.

[78077] Accordingly, in one embodiment, the molecule which activity is to be increased in the process of the invention is the gene product with an activity as a “recombinase A”, preferably it is the molecule of section (a) or (b) of this paragraph.

[78078] In particular, it was observed that in plants, especially in Arabidopsis thaliana, increasing or generating the activity of a gene product non-targeted with the activity of a “recombinase A”, preferably being encoded by a gene comprising the nucleic acid sequence SEQ ID NO. 114231, preferably the coding region thereof, conferred the production of or the increase in coenzyme Q9 compared with the wild type control.

[78079] The nucleic acid sequence of AvinDRAFT_{—}4420 from Azotobacter vinelandii, e.g. as shown in the respective line in column 5 of Table I, application no. 16, has been published in D. And the activity of the gene product thereof is the activity of enoyl-CoA hydratase.

[78080] Accordingly, in one embodiment, the process of the present invention for producing coenzyme Q10 in a non-human organism, like a microorganism or a plant or a part thereof, comprises increasing or generating the activity of a gene product with the activity of a gene product conferring the activity of “enoyl-CoA hydratase”, especially from Azotobacter vinelandii or its functional equivalent or its homolog, e.g. the increase of
[78081] (a) a gene product of a gene comprising the nucleic acid molecule as shown in the respective line in column 5 of Table I (whereby the respective line disclose in column 7 the fine chemical coenzyme Q10), application no. 16, preferably the coding region thereof, or a homolog or a fragment thereof, and being depicted in the same respective line as said AvinDRAFT_{—}4420, or a functional equivalent or a homolog thereof as shown in column 8 of Table I, application no. 16, preferably the coding region thereof, particularly a homolog or functional equivalent as shown in column 8 of Table I B, application no. 16, and being depicted in the same respective line as said AvinDRAFT_{—}4420, and preferably the activity is increased non-targeted, or
[78082] (b) a polypeptide comprising a polypeptide, a consensus sequence or at least a polypeptide motif as shown in the respective line in column 5 of Table II or in column 8 of Table IV, application no. 16, respectively, and being depicted in the same respective line as said AvinDRAFT_{—}4420, or a functional equivalent or a homolog thereof as depicted in column 8 of Table II, application no. 16, preferably a homolog or functional equivalent as depicted in column 8 of Table II B, application no. 16, and being depicted in the same respective line as said AvinDRAFT_{—}4420, and preferably the activity is increased non-targeted, whereby the respective line disclose in column 7 the fine chemical coenzyme Q10.

[78083] Accordingly, in one embodiment, the molecule which activity is to be increased in the process of the invention is the gene product with an activity as a “enoyl-CoA hydratase”, preferably it is the molecule of section (a) or (b) of this paragraph.

[78084] In particular, it was observed that in plants, especially in Arabidopsis thaliana, increasing or generating the activity of a gene product non-targeted with the activity of a “enoyl-CoA hydratase”, preferably being encoded by a gene comprising the nucleic acid sequence SEQ ID NO. 73038, preferably the coding region thereof, conferred the production of or the increase in coenzyme Q10 compared with the wild type control.

[78085] The nucleic acid sequence of AvinDRAFT_{—}4420 from Azotobacter vinelandii, e.g. as shown in the respective line in column 5 of Table I, application no. 16, has been published in D. And the activity of the gene product thereof is the activity of enoyl-CoA hydratase.

[78086] Accordingly, in one embodiment, the process of the present invention for producing coenzyme Q9 in a non-human organism, like a microorganism or a plant or a part thereof, comprises increasing or generating the activity of a gene product with the activity of a gene product conferring the activity of “enoyl-CoA hydratase”, especially from Azotobacter vinelandii or its functional equivalent or its homolog, e.g. the increase of
[78087] (a) a gene product of a gene comprising the nucleic acid molecule as shown in the respective line in column 5 of Table I (whereby the respective line disclose in column 7 the fine chemical coenzyme Q9), application no. 16, preferably the coding region thereof, or a homolog or a fragment thereof, and being depicted in the same respective line as said AvinDRAFT_{—}4420, or a functional equivalent or a homolog thereof as shown in column 8 of Table I, application no. 16, preferably the coding region thereof, particularly a homolog or functional equivalent as shown in column 8 of Table I B, application no. 16, and being depicted in the same respective line as said AvinDRAFT_{—}4420, and preferably the activity is increased non-targeted, or
[78088] (b) a polypeptide comprising a polypeptide, a consensus sequence or at least a polypeptide motif as shown in the respective line in column 5 of Table II or in column 8 of Table IV, application no. 16, respectively, and being depicted in the same respective line as said AvinDRAFT_{—}4420, or a functional equivalent or a homolog thereof as depicted in column 8 of Table II, application no. 16, preferably a homolog or functional equivalent as depicted in column 8 of Table II B, application no. 16, and being depicted in the same respective line as said AvinDRAFT_{—}4420, and preferably the activity is increased non-targeted, whereby the respective line disclose in column 7 the fine chemical coenzyme Q9.

[78089] Accordingly, in one embodiment, the molecule which activity is to be increased in the process of the invention is the gene product with an activity as a “enoyl-CoA hydratase”, preferably it is the molecule of section (a) or (b) of this paragraph.

[78090] In particular, it was observed that in plants, especially in Arabidopsis thaliana, increasing or generating the activity of a gene product non-targeted with the activity of a “enoyl-CoA hydratase”, preferably being encoded by a gene comprising the nucleic acid sequence SEQ ID NO. 73038, preferably the coding region thereof, conferred the production of or the increase in coenzyme Q9 compared with the wild type control.

[78091] The nucleic acid sequence of AvinDRAFT_{—}4847 from Azotobacter vinelandii, e.g. as shown in the respective line in column 5 of Table I, application no. 16, has been published in D. And the activity of the gene product thereof is the activity of isopropylmalate isomerase large subunit.

[78092] Accordingly, in one embodiment, the process of the present invention for producing coenzyme Q9 in a non-human organism, like a microorganism or a plant or a part thereof, comprises increasing or generating the activity of a gene product with the activity of a gene product conferring the activity of “isopropylmalate isomerase large subunit”, especially from Azotobacter vinelandii or its functional equivalent or its homolog, e.g. the increase of
[78093] (a) a gene product of a gene comprising the nucleic acid molecule as shown in the respective line in column 5 of Table I (whereby the respective line disclose in column 7 the fine chemical coenzyme Q9), application no. 16, preferably the coding region thereof, or a homolog or a fragment thereof, and being depicted in the same respective line as said AvinDRAFT_{—}4847, or a functional equivalent or a homolog thereof as shown in column 8 of Table I, application no. 16, preferably the coding region thereof, particularly a homolog or functional equivalent as shown in column 8 of Table I B, application no. 16, and being depicted in the same respective line as said AvinDRAFT_{—}4847, and preferably the activity is increased non-targeted, or
[78094] (b) a polypeptide comprising a polypeptide, a consensus sequence or at least a polypeptide motif as shown in the respective line in column 5 of Table II or in column 8 of Table IV, application no. 16, respectively, and being depicted in the same respective line as said AvinDRAFT_{—}4847, or a functional equivalent or a homolog thereof as depicted in column 8 of Table II, application no. 16, preferably a homolog or functional equivalent as depicted in column 8 of Table II B, application no. 16, and being depicted in the same respective line as said AvinDRAFT_{—}4847, and preferably the activity is increased non-targeted, whereby the respective line disclose in column 7 the fine chemical coenzyme Q9.

[78095] Accordingly, in one embodiment, the molecule which activity is to be increased in the process of the invention is the gene product with an activity as a “isopropylmalate isomerase large subunit”, preferably it is the molecule of section (a) or (b) of this paragraph.

[78096] In particular, it was observed that in plants, especially in Arabidopsis thaliana, increasing or generating the activity of a gene product non-targeted with the activity of a “isopropylmalate isomerase large subunit”, preferably being encoded by a gene comprising the nucleic acid sequence SEQ ID NO. 102941, preferably the coding region thereof, conferred the production of or the increase in coenzyme Q9 compared with the wild type control.

[78097] The nucleic acid sequence of AvinDRAFT_{—}5103 from Azotobacter vinelandii, e.g. as shown in the respective line in column 5 of Table I, application no. 16, has been published in D. And the activity of the gene product thereof is the activity of hydrolase.

[78098] Accordingly, in one embodiment, the process of the present invention for producing coenzyme Q9 in a non-human organism, like a microorganism or a plant or a part thereof, comprises increasing or generating the activity of a gene product with the activity of a gene product conferring the activity of “hydrolase”, especially from Azotobacter vinelandii or its functional equivalent or its homolog, e.g. the increase of
[78099] (a) a gene product of a gene comprising the nucleic acid molecule as shown in the respective line in column 5 of Table I (whereby the respective line disclose in column 7 the fine chemical coenzyme Q9), application no. 16, preferably the coding region thereof, or a homolog or a fragment thereof, and being depicted in the same respective line as said AvinDRAFT_{—}5103, or a functional equivalent or a homolog thereof as shown in column 8 of Table I, application no. 16, preferably the coding region thereof, particularly a homolog or functional equivalent as shown in column 8 of Table I B, application no. 16, and being depicted in the same respective line as said AvinDRAFT_{—}5103, and preferably the activity is increased non-targeted, or
[78100] (b) a polypeptide comprising a polypeptide, a consensus sequence or at least a polypeptide motif as shown in the respective line in column 5 of Table II or in column 8 of Table IV, application no. 16, respectively, and being depicted in the same respective line as said AvinDRAFT_{—}5103, or a functional equivalent or a homolog thereof as depicted in column 8 of Table II, application no. 16, preferably a homolog or functional equivalent as depicted in column 8 of Table II B, application no. 16, and being depicted in the same respective line as said AvinDRAFT_{—}5103, and preferably the activity is increased non-targeted, whereby the respective line disclose in column 7 the fine chemical coenzyme Q9.

[78101] Accordingly, in one embodiment, the molecule which activity is to be increased in the process of the invention is the gene product with an activity as a “hydrolase”, preferably it is the molecule of section (a) or (b) of this paragraph.

[78102] In particular, it was observed that in plants, especially in Arabidopsis thaliana, increasing or generating the activity of a gene product non-targeted with the activity of a “hydrolase”, preferably being encoded by a gene comprising the nucleic acid sequence SEQ ID NO. 6510, preferably the coding region thereof, conferred the production of or the increase in coenzyme Q9 compared with the wild type control.

[78103] The nucleic acid sequence of AX653549 from Oryza sativa, e.g. as shown in the respective line in column 5 of Table I, application no. 16, has been published in G. And the activity of the gene product thereof is the activity of AX653549-protein.

[78104] Accordingly, in one embodiment, the process of the present invention for producing coenzyme Q9 in a non-human organism, like a microorganism or a plant or a part thereof, comprises increasing or generating the activity of a gene product with the activity of a gene product conferring the activity of “AX653549-protein”, especially from Oryza sativa or its functional equivalent or its homolog, e.g. the increase of
[78105] (a) a gene product of a gene comprising the nucleic acid molecule as shown in the respective line in column 5 of Table I (whereby the respective line disclose in column 7 the fine chemical coenzyme Q9), application no. 16, preferably the coding region thereof, or a homolog or a fragment thereof, and being depicted in the same respective line as said AX653549, or a functional equivalent or a homolog thereof as shown in column 8 of Table I, application no. 16, preferably the coding region thereof, particularly a homolog or functional equivalent as shown in column 8 of Table I B, application no. 16, and being depicted in the same respective line as said AX653549, and preferably the activity is increased non-targeted, or
[78106] (b) a polypeptide comprising a polypeptide, a consensus sequence or at least a polypeptide motif as shown in the respective line in column 5 of Table II or in column 8 of Table IV, application no. 16, respectively, and being depicted in the same respective line as said AX653549, or a functional equivalent or a homolog thereof as depicted in column 8 of Table II, application no. 16, preferably a homolog or functional equivalent as depicted in column 8 of Table II B, application no. 16, and being depicted in the same respective line as said AX653549, and preferably the activity is increased non-targeted, whereby the respective line disclose in column 7 the fine chemical coenzyme Q9.

[78107] Accordingly, in one embodiment, the molecule which activity is to be increased in the process of the invention is the gene product with an activity as a “AX653549-protein”, preferably it is the molecule of section (a) or (b) of this paragraph.

[78108] In particular, it was observed that in plants, especially in Arabidopsis thaliana, increasing or generating the activity of a gene product non-targeted with the activity of a “AX653549-protein”, preferably being encoded by a gene comprising the nucleic acid sequence SEQ ID NO. 34301, preferably the coding region thereof, conferred the production of or the increase in coenzyme Q9 compared with the wild type control.

[78109] The nucleic acid sequence of AY087308 from Arabidopsis thaliana, e.g. as shown in the respective line in column 5 of Table I, application no. 16, has been published in F. And the activity of the gene product thereof is the activity of AY087308-protein.

[78110] Accordingly, in one embodiment, the process of the present invention for producing coenzyme Q10 in a non-human organism, like a microorganism or a plant or a part thereof, comprises increasing or generating the activity of a gene product with the activity of a gene product conferring the activity of “AY087308-protein”, especially from Arabidopsis thaliana or its functional equivalent or its homolog, e.g. the increase of
[78111] (a) a gene product of a gene comprising the nucleic acid molecule as shown in the respective line in column 5 of Table I (whereby the respective line disclose in column 7 the fine chemical coenzyme Q10), application no. 16, preferably the coding region thereof, or a homolog or a fragment thereof, and being depicted in the same respective line as said AY087308, or a functional equivalent or a homolog thereof as shown in column 8 of Table I, application no. 16, preferably the coding region thereof, particularly a homolog or functional equivalent as shown in column 8 of Table I B, application no. 16, and being depicted in the same respective line as said AY087308, and preferably the activity is increased non-targeted, or
[78112] (b) a polypeptide comprising a polypeptide, a consensus sequence or at least a polypeptide motif as shown in the respective line in column 5 of Table II or in column 8 of Table IV, application no. 16, respectively, and being depicted in the same respective line as said AY087308, or a functional equivalent or a homolog thereof as depicted in column 8 of Table II, application no. 16, preferably a homolog or functional equivalent as depicted in column 8 of Table II B, application no. 16, and being depicted in the same respective line as said AY087308, and preferably the activity is increased non-targeted, whereby the respective line disclose in column 7 the fine chemical coenzyme Q10.

[78113] Accordingly, in one embodiment, the molecule which activity is to be increased in the process of the invention is the gene product with an activity as a “AY087308-protein”, preferably it is the molecule of section (a) or (b) of this paragraph.

[78114] In particular, it was observed that in plants, especially in Arabidopsis thaliana, increasing or generating the activity of a gene product non-targeted with the activity of a “AY087308-protein”, preferably being encoded by a gene comprising the nucleic acid sequence SEQ ID NO. 34602, preferably the coding region thereof, conferred the production of or the increase in coenzyme Q10 compared with the wild type control.

[78115] The nucleic acid sequence of B0004 from Escherichia coli, e.g. as shown in the respective line in column 5 of Table I, application no. 16, has been published in B. And the activity of the gene product thereof is the activity of threonine synthase.

[78116] Accordingly, in one embodiment, the process of the present invention for producing coenzyme Q10 in a non-human organism, like a microorganism or a plant or a part thereof, comprises increasing or generating the activity of a gene product with the activity of a gene product conferring the activity of “threonine synthase”, especially from Escherichia coli or its functional equivalent or its homolog, e.g. the increase of
[78117] (a) a gene product of a gene comprising the nucleic acid molecule as shown in the respective line in column 5 of Table I (whereby the respective line disclose in column 7 the fine chemical coenzyme Q10), application no. 16, preferably the coding region thereof, or a homolog or a fragment thereof, and being depicted in the same respective line as said B0004, or a functional equivalent or a homolog thereof as shown in column 8 of Table I, application no. 16, preferably the coding region thereof, particularly a homolog or functional equivalent as shown in column 8 of Table I B, application no. 16, and being depicted in the same respective line as said B0004, and preferably the activity is increased plastidic, or
[78118] (b) a polypeptide comprising a polypeptide, a consensus sequence or at least a polypeptide motif as shown in the respective line in column 5 of Table II or in column 8 of Table IV, application no. 16, respectively, and being depicted in the same respective line as said B0004, or a functional equivalent or a homolog thereof as depicted in column 8 of Table II, application no. 16, preferably a homolog or functional equivalent as depicted in column 8 of Table II B, application no. 16, and being depicted in the same respective line as said B0004, and preferably the activity is increased plastidic, whereby the respective line disclose in column 7 the fine chemical coenzyme Q10.

[78119] Accordingly, in one embodiment, the molecule which activity is to be increased in the process of the invention is the gene product with an activity as a “threonine synthase”, preferably it is the molecule of section (a) or (b) of this paragraph.

[78120] In particular, it was observed that in plants, especially in Arabidopsis thaliana, increasing or generating the activity of a gene product plastidic with the activity of a “threonine synthase”, preferably being encoded by a gene comprising the nucleic acid sequence SEQ ID NO. 34889, preferably the coding region thereof, conferred the production of or the increase in coenzyme Q10 compared with the wild type control.

[78121] The nucleic acid sequence of B0077 from Escherichia coli, e.g. as shown in the respective line in column 5 of Table I, application no. 16, has been published in B. And the activity of the gene product thereof is the activity of acetolactate synthase III large subunit.

[78122] Accordingly, in one embodiment, the process of the present invention for producing coenzyme Q10 in a non-human organism, like a microorganism or a plant or a part thereof, comprises increasing or generating the activity of a gene product with the activity of a gene product conferring the activity of “acetolactate synthase III large subunit”, especially from Escherichia coli or its functional equivalent or its homolog, e.g. the increase of
[78123] (a) a gene product of a gene comprising the nucleic acid molecule as shown in the respective line in column 5 of Table I (whereby the respective line disclose in column 7 the fine chemical coenzyme Q10), application no. 16, preferably the coding region thereof, or a homolog or a fragment thereof, and being depicted in the same respective line as said B0077, or a functional equivalent or a homolog thereof as shown in column 8 of Table I, application no. 16, preferably the coding region thereof, particularly a homolog or functional equivalent as shown in column 8 of Table I B, application no. 16, and being depicted in the same respective line as said B0077, and preferably the activity is increased plastidic, or
[78124] (b) a polypeptide comprising a polypeptide, a consensus sequence or at least a polypeptide motif as shown in the respective line in column 5 of Table II or in column 8 of Table IV, application no. 16, respectively, and being depicted in the same respective line as said B0077, or a functional equivalent or a homolog thereof as depicted in column 8 of Table II, application no. 16, preferably a homolog or functional equivalent as depicted in column 8 of Table II B, application no. 16, and being depicted in the same respective line as said B0077, and preferably the activity is increased plastidic, whereby the respective line disclose in column 7 the fine chemical coenzyme Q10.

[78125] Accordingly, in one embodiment, the molecule which activity is to be increased in the process of the invention is the gene product with an activity as a “acetolactate synthase III large subunit”, preferably it is the molecule of section (a) or (b) of this paragraph.

[78126] In particular, it was observed that in plants, especially in Arabidopsis thaliana, increasing or generating the activity of a gene product plastidic with the activity of a “acetolactate synthase III large subunit”, preferably being encoded by a gene comprising the nucleic acid sequence SEQ ID NO. 137834, preferably the coding region thereof, conferred the production of or the increase in coenzyme Q10 compared with the wild type control.

[78127] The nucleic acid sequence of B0161 from Escherichia coli, e.g. as shown in the respective line in column 5 of Table I, application no. 16, has been published in B. And the activity of the gene product thereof is the activity of serine protease.

[78128] Accordingly, in one embodiment, the process of the present invention for producing coenzyme Q9 in a non-human organism, like a microorganism or a plant or a part thereof, comprises increasing or generating the activity of a gene product with the activity of a gene product conferring the activity of “serine protease”, especially from Escherichia coli or its functional equivalent or its homolog, e.g. the increase of
[78129] (a) a gene product of a gene comprising the nucleic acid molecule as shown in the respective line in column 5 of Table I (whereby the respective line disclose in column 7 the fine chemical coenzyme Q9), application no. 16, preferably the coding region thereof, or a homolog or a fragment thereof, and being depicted in the same respective line as said B0161, or a functional equivalent or a homolog thereof as shown in column 8 of Table I, application no. 16, preferably the coding region thereof, particularly a homolog or functional equivalent as shown in column 8 of Table I B, application no. 16, and being depicted in the same respective line as said B0161, and preferably the activity is increased non-targeted, or
[78130] (b) a polypeptide comprising a polypeptide, a consensus sequence or at least a polypeptide motif as shown in the respective line in column 5 of Table II or in column 8 of Table IV, application no. 16, respectively, and being depicted in the same respective line as said B0161, or a functional equivalent or a homolog thereof as depicted in column 8 of Table II, application no. 16, preferably a homolog or functional equivalent as depicted in column 8 of Table II B, application no. 16, and being depicted in the same respective line as said B0161, and preferably the activity is increased non-targeted, whereby the respective line disclose in column 7 the fine chemical coenzyme Q9.

[78131] Accordingly, in one embodiment, the molecule which activity is to be increased in the process of the invention is the gene product with an activity as a “serine protease”, preferably it is the molecule of section (a) or (b) of this paragraph.

[78132] In particular, it was observed that in plants, especially in Arabidopsis thaliana, increasing or generating the activity of a gene product non-targeted with the activity of a “serine protease”, preferably being encoded by a gene comprising the nucleic acid sequence SEQ ID NO. 7081, preferably the coding region thereof, conferred the production of or the increase in coenzyme Q9 compared with the wild type control.

[78133] The nucleic acid sequence of B0344 from Escherichia coli, e.g. as shown in the respective line in column 5 of Table I, application no. 16, has been published in B. And the activity of the gene product thereof is the activity of beta-galactosidase.

[78134] Accordingly, in one embodiment, the process of the present invention for producing coenzyme Q9 in a non-human organism, like a microorganism or a plant or a part thereof, comprises increasing or generating the activity of a gene product with the activity of a gene product conferring the activity of “beta-galactosidase”, especially from Escherichia coli or its functional equivalent or its homolog, e.g. the increase of
[78135] (a) a gene product of a gene comprising the nucleic acid molecule as shown in the respective line in column 5 of Table I (whereby the respective line disclose in column 7 the fine chemical coenzyme Q9), application no. 16, preferably the coding region thereof, or a homolog or a fragment thereof, and being depicted in the same respective line as said B0344, or a functional equivalent or a homolog thereof as shown in column 8 of Table I, application no. 16, preferably the coding region thereof, particularly a homolog or functional equivalent as shown in column 8 of Table I B, application no. 16, and being depicted in the same respective line as said B0344, and preferably the activity is increased plastidic, or
[78136] (b) a polypeptide comprising a polypeptide, a consensus sequence or at least a polypeptide motif as shown in the respective line in column 5 of Table II or in column 8 of Table IV, application no. 16, respectively, and being depicted in the same respective line as said B0344, or a functional equivalent or a homolog thereof as depicted in column 8 of Table II, application no. 16, preferably a homolog or functional equivalent as depicted in column 8 of Table II B, application no. 16, and being depicted in the same respective line as said B0344, and preferably the activity is increased plastidic, whereby the respective line disclose in column 7 the fine chemical coenzyme Q9.

[78137] Accordingly, in one embodiment, the molecule which activity is to be increased in the process of the invention is the gene product with an activity as a “beta-galactosidase”, preferably it is the molecule of section (a) or (b) of this paragraph.

[78138] In particular, it was observed that in plants, especially in Arabidopsis thaliana, increasing or generating the activity of a gene product plastidic with the activity of a “beta-galactosidase”, preferably being encoded by a gene comprising the nucleic acid sequence SEQ ID NO. 35733, preferably the coding region thereof, conferred the production of or the increase in coenzyme Q9 compared with the wild type control.

[78139] The nucleic acid sequence of B0449 from Escherichia coli, e.g. as shown in the respective line in column 5 of Table I, application no. 16, has been published in B. And the activity of the gene product thereof is the activity of ATP-binding component of a transport system.

[78140] Accordingly, in one embodiment, the process of the present invention for producing coenzyme Q10 in a non-human organism, like a microorganism or a plant or a part thereof, comprises increasing or generating the activity of a gene product with the activity of a gene product conferring the activity of “ATP-binding component of a transport system”, especially from Escherichia coli or its functional equivalent or its homolog, e.g. the increase of
[78141] (a) a gene product of a gene comprising the nucleic acid molecule as shown in the respective line in column 5 of Table I (whereby the respective line disclose in column 7 the fine chemical coenzyme Q10), application no. 16, preferably the coding region thereof, or a homolog or a fragment thereof, and being depicted in the same respective line as said B0449, or a functional equivalent or a homolog thereof as shown in column 8 of Table I, application no. 16, preferably the coding region thereof, particularly a homolog or functional equivalent as shown in column 8 of Table I B, application no. 16, and being depicted in the same respective line as said B0449, and preferably the activity is increased non-targeted, or
[78142] (b) a polypeptide comprising a polypeptide, a consensus sequence or at least a polypeptide motif as shown in the respective line in column 5 of Table II or in column 8 of Table IV, application no. 16, respectively, and being depicted in the same respective line as said B0449, or a functional equivalent or a homolog thereof as depicted in column 8 of Table II, application no. 16, preferably a homolog or functional equivalent as depicted in column 8 of Table II B, application no. 16, and being depicted in the same respective line as said B0449, and preferably the activity is increased non-targeted, whereby the respective line disclose in column 7 the fine chemical coenzyme Q10.

[78143] Accordingly, in one embodiment, the molecule which activity is to be increased in the process of the invention is the gene product with an activity as a “ATP-binding component of a transport system”, preferably it is the molecule of section (a) or (b) of this paragraph.

[78144] In particular, it was observed that in plants, especially in Arabidopsis thaliana, increasing or generating the activity of a gene product non-targeted with the activity of a “ATP-binding component of a transport system”, preferably being encoded by a gene comprising the nucleic acid sequence SEQ ID NO. 7333, preferably the coding region thereof, conferred the production of or the increase in coenzyme Q10 compared with the wild type control.

[78145] The nucleic acid sequence of B0449 from Escherichia coli, e.g. as shown in the respective line in column 5 of Table I, application no. 16, has been published in B. And the activity of the gene product thereof is the activity of ATP-binding component of a transport system.

[78146] Accordingly, in one embodiment, the process of the present invention for producing coenzyme Q9 in a non-human organism, like a microorganism or a plant or a part thereof, comprises increasing or generating the activity of a gene product with the activity of a gene product conferring the activity of “ATP-binding component of a transport system”, especially from Escherichia coli or its functional equivalent or its homolog, e.g. the increase of
[78147] (a) a gene product of a gene comprising the nucleic acid molecule as shown in the respective line in column 5 of Table I (whereby the respective line disclose in column 7 the fine chemical coenzyme Q9), application no. 16, preferably the coding region thereof, or a homolog or a fragment thereof, and being depicted in the same respective line as said B0449, or a functional equivalent or a homolog thereof as shown in column 8 of Table I, application no. 16, preferably the coding region thereof, particularly a homolog or functional equivalent as shown in column 8 of Table I B, application no. 16, and being depicted in the same respective line as said B0449, and preferably the activity is increased non-targeted, or
[78148] (b) a polypeptide comprising a polypeptide, a consensus sequence or at least a polypeptide motif as shown in the respective line in column 5 of Table II or in column 8 of Table IV, application no. 16, respectively, and being depicted in the same respective line as said B0449, or a functional equivalent or a homolog thereof as depicted in column 8 of Table II, application no. 16, preferably a homolog or functional equivalent as depicted in column 8 of Table II B, application no. 16, and being depicted in the same respective line as said B0449, and preferably the activity is increased non-targeted, whereby the respective line disclose in column 7 the fine chemical coenzyme Q9.

[78149] Accordingly, in one embodiment, the molecule which activity is to be increased in the process of the invention is the gene product with an activity as a “ATP-binding component of a transport system”, preferably it is the molecule of section (a) or (b) of this paragraph.

[78150] In particular, it was observed that in plants, especially in Arabidopsis thaliana, increasing or generating the activity of a gene product non-targeted with the activity of a “ATP-binding component of a transport system”, preferably being encoded by a gene comprising the nucleic acid sequence SEQ ID NO. 7333, preferably the coding region thereof, conferred the production of or the increase in coenzyme Q9 compared with the wild type control.

[78151] The nucleic acid sequence of B0752 from Escherichia coli, e.g. as shown in the respective line in column 5 of Table I, application no. 16, has been published in B. And the activity of the gene product thereof is the activity of zinc transporter.

[78152] Accordingly, in one embodiment, the process of the present invention for producing coenzyme Q10 in a non-human organism, like a microorganism or a plant or a part thereof, comprises increasing or generating the activity of a gene product with the activity of a gene product conferring the activity of “zinc transporter”, especially from Escherichia coli or its functional equivalent or its homolog, e.g. the increase of
[78153] (a) a gene product of a gene comprising the nucleic acid molecule as shown in the respective line in column 5 of Table I (whereby the respective line disclose in column 7 the fine chemical coenzyme Q10), application no. 16, preferably the coding region thereof, or a homolog or a fragment thereof, and being depicted in the same respective line as said B0752, or a functional equivalent or a homolog thereof as shown in column 8 of Table I, application no. 16, preferably the coding region thereof, particularly a homolog or functional equivalent as shown in column 8 of Table I B, application no. 16, and being depicted in the same respective line as said B0752, and preferably the activity is increased non-targeted, or
[78154] (b) a polypeptide comprising a polypeptide, a consensus sequence or at least a polypeptide motif as shown in the respective line in column 5 of Table II or in column 8 of Table IV, application no. 16, respectively, and being depicted in the same respective line as said B0752, or a functional equivalent or a homolog thereof as depicted in column 8 of Table II, application no. 16, preferably a homolog or functional equivalent as depicted in column 8 of Table II B, application no. 16, and being depicted in the same respective line as said B0752, and preferably the activity is increased non-targeted, whereby the respective line disclose in column 7 the fine chemical coenzyme Q10.

[78155] Accordingly, in one embodiment, the molecule which activity is to be increased in the process of the invention is the gene product with an activity as a “zinc transporter”, preferably it is the molecule of section (a) or (b) of this paragraph.

[78156] In particular, it was observed that in plants, especially in Arabidopsis thaliana, increasing or generating the activity of a gene product non-targeted with the activity of a “zinc transporter”, preferably being encoded by a gene comprising the nucleic acid sequence SEQ ID NO. 36114, preferably the coding region thereof, conferred the production of or the increase in coenzyme Q10 compared with the wild type control.

[78157] The nucleic acid sequence of B0752 from Escherichia coli, e.g. as shown in the respective line in column 5 of Table I, application no. 16, has been published in B. And the activity of the gene product thereof is the activity of zinc transporter.

[78158] Accordingly, in one embodiment, the process of the present invention for producing coenzyme Q9 in a non-human organism, like a microorganism or a plant or a part thereof, comprises increasing or generating the activity of a gene product with the activity of a gene product conferring the activity of “zinc transporter”, especially from Escherichia coli or its functional equivalent or its homolog, e.g. the increase of
[78159] (a) a gene product of a gene comprising the nucleic acid molecule as shown in the respective line in column 5 of Table I (whereby the respective line disclose in column 7 the fine chemical coenzyme Q9), application no. 16, preferably the coding region thereof, or a homolog or a fragment thereof, and being depicted in the same respective line as said B0752, or a functional equivalent or a homolog thereof as shown in column 8 of Table I, application no. 16, preferably the coding region thereof, particularly a homolog or functional equivalent as shown in column 8 of Table I B, application no. 16, and being depicted in the same respective line as said B0752, and preferably the activity is increased non-targeted, or
[78160] (b) a polypeptide comprising a polypeptide, a consensus sequence or at least a polypeptide motif as shown in the respective line in column 5 of Table II or in column 8 of Table IV, application no. 16, respectively, and being depicted in the same respective line as said B0752, or a functional equivalent or a homolog thereof as depicted in column 8 of Table II, application no. 16, preferably a homolog or functional equivalent as depicted in column 8 of Table II B, application no. 16, and being depicted in the same respective line as said B0752, and preferably the activity is increased non-targeted, whereby the respective line disclose in column 7 the fine chemical coenzyme Q9.

[78161] Accordingly, in one embodiment, the molecule which activity is to be increased in the process of the invention is the gene product with an activity as a “zinc transporter”, preferably it is the molecule of section (a) or (b) of this paragraph.

[78162] In particular, it was observed that in plants, especially in Arabidopsis thaliana, increasing or generating the activity of a gene product non-targeted with the activity of a “zinc transporter”, preferably being encoded by a gene comprising the nucleic acid sequence SEQ ID NO. 36114, preferably the coding region thereof, conferred the production of or the increase in coenzyme Q9 compared with the wild type control.

[78163] The nucleic acid sequence of B0963 from Escherichia coli, e.g. as shown in the respective line in column 5 of Table I, application no. 16, has been published in B. And the activity of the gene product thereof is the activity of methylglyoxal synthase.

[78164] Accordingly, in one embodiment, the process of the present invention for producing coenzyme Q10 in a non-human organism, like a microorganism or a plant or a part thereof, comprises increasing or generating the activity of a gene product with the activity of a gene product conferring the activity of “methylglyoxal synthase”, especially from Escherichia coli or its functional equivalent or its homolog, e.g. the increase of
[78165] (a) a gene product of a gene comprising the nucleic acid molecule as shown in the respective line in column 5 of Table I (whereby the respective line disclose in column 7 the fine chemical coenzyme Q10), application no. 16, preferably the coding region thereof, or a homolog or a fragment thereof, and being depicted in the same respective line as said B0963, or a functional equivalent or a homolog thereof as shown in column 8 of Table I, application no. 16, preferably the coding region thereof, particularly a homolog or functional equivalent as shown in column 8 of Table I B, application no. 16, and being depicted in the same respective line as said B0963, and preferably the activity is increased non-targeted, or
[78166] (b) a polypeptide comprising a polypeptide, a consensus sequence or at least a polypeptide motif as shown in the respective line in column 5 of Table II or in column 8 of Table IV, application no. 16, respectively, and being depicted in the same respective line as said B0963, or a functional equivalent or a homolog thereof as depicted in column 8 of Table II, application no. 16, preferably a homolog or functional equivalent as depicted in column 8 of Table II B, application no. 16, and being depicted in the same respective line as said B0963, and preferably the activity is increased non-targeted, whereby the respective line disclose in column 7 the fine chemical coenzyme Q10.

[78167] Accordingly, in one embodiment, the molecule which activity is to be increased in the process of the invention is the gene product with an activity as a “methylglyoxal synthase”, preferably it is the molecule of section (a) or (b) of this paragraph.

[78168] In particular, it was observed that in plants, especially in Arabidopsis thaliana, increasing or generating the activity of a gene product non-targeted with the activity of a “methylglyoxal synthase”, preferably being encoded by a gene comprising the nucleic acid sequence SEQ ID NO. 36670, preferably the coding region thereof, conferred the production of or the increase in coenzyme Q10 compared with the wild type control.

[78169] The nucleic acid sequence of B0963 from Escherichia coli, e.g. as shown in the respective line in column 5 of Table I, application no. 16, has been published in B. And the activity of the gene product thereof is the activity of methylglyoxal synthase.

[78170] Accordingly, in one embodiment, the process of the present invention for producing coenzyme Q9 in a non-human organism, like a microorganism or a plant or a part thereof, comprises increasing or generating the activity of a gene product with the activity of a gene product conferring the activity of “methylglyoxal synthase”, especially from Escherichia coli or its functional equivalent or its homolog, e.g. the increase of
[78171] (a) a gene product of a gene comprising the nucleic acid molecule as shown in the respective line in column 5 of Table I (whereby the respective line disclose in column 7 the fine chemical coenzyme Q9), application no. 16, preferably the coding region thereof, or a homolog or a fragment thereof, and being depicted in the same respective line as said B0963, or a functional equivalent or a homolog thereof as shown in column 8 of Table I, application no. 16, preferably the coding region thereof, particularly a homolog or functional equivalent as shown in column 8 of Table I B, application no. 16, and being depicted in the same respective line as said B0963, and preferably the activity is increased non-targeted, or
[78172] (b) a polypeptide comprising a polypeptide, a consensus sequence or at least a polypeptide motif as shown in the respective line in column 5 of Table II or in column 8 of Table IV, application no. 16, respectively, and being depicted in the same respective line as said B0963, or a functional equivalent or a homolog thereof as depicted in column 8 of Table II, application no. 16, preferably a homolog or functional equivalent as depicted in column 8 of Table II B, application no. 16, and being depicted in the same respective line as said B0963, and preferably the activity is increased non-targeted, whereby the respective line disclose in column 7 the fine chemical coenzyme Q9.

[78173] Accordingly, in one embodiment, the molecule which activity is to be increased in the process of the invention is the gene product with an activity as a “methylglyoxal synthase”, preferably it is the molecule of section (a) or (b) of this paragraph.

[78174] In particular, it was observed that in plants, especially in Arabidopsis thaliana, increasing or generating the activity of a gene product non-targeted with the activity of a “methylglyoxal synthase”, preferably being encoded by a gene comprising the nucleic acid sequence SEQ ID NO. 36670, preferably the coding region thereof, conferred the production of or the increase in coenzyme Q9 compared with the wild type control.

[78175] The nucleic acid sequence of B1003 from Escherichia coli, e.g. as shown in the respective line in column 5 of Table I, application no. 16, has been published in B. And the activity of the gene product thereof is the activity of b1003-protein.

[78176] Accordingly, in one embodiment, the process of the present invention for producing coenzyme Q9 in a non-human organism, like a microorganism or a plant or a part thereof, comprises increasing or generating the activity of a gene product with the activity of a gene product conferring the activity of “b1003-protein”, especially from Escherichia coli or its functional equivalent or its homolog, e.g. the increase of
[78177] (a) a gene product of a gene comprising the nucleic acid molecule as shown in the respective line in column 5 of Table I (whereby the respective line disclose in column 7 the fine chemical coenzyme Q9), application no. 16, preferably the coding region thereof, or a homolog or a fragment thereof, and being depicted in the same respective line as said B1003, or a functional equivalent or a homolog thereof as shown in column 8 of Table I, application no. 16, preferably the coding region thereof, particularly a homolog or functional equivalent as shown in column 8 of Table I B, application no. 16, and being depicted in the same respective line as said B1003, and preferably the activity is increased non-targeted, or
[78178] (b) a polypeptide comprising a polypeptide, a consensus sequence or at least a polypeptide motif as shown in the respective line in column 5 of Table II or in column 8 of Table IV, application no. 16, respectively, and being depicted in the same respective line as said B1003, or a functional equivalent or a homolog thereof as depicted in column 8 of Table II, application no. 16, preferably a homolog or functional equivalent as depicted in column 8 of Table II B, application no. 16, and being depicted in the same respective line as said B1003, and preferably the activity is increased non-targeted, whereby the respective line disclose in column 7 the fine chemical coenzyme Q9.

[78179] Accordingly, in one embodiment, the molecule which activity is to be increased in the process of the invention is the gene product with an activity as a “b1003-protein”, preferably it is the molecule of section (a) or (b) of this paragraph.

[78180] In particular, it was observed that in plants, especially in Arabidopsis thaliana, increasing or generating the activity of a gene product non-targeted with the activity of a “b1003-protein”, preferably being encoded by a gene comprising the nucleic acid sequence SEQ ID NO. 7941, preferably the coding region thereof, conferred the production of or the increase in coenzyme Q9 compared with the wild type control.

[78181] The nucleic acid sequence of B1097 from Escherichia coli, e.g. as shown in the respective line in column 5 of Table I, application no. 16, has been published in B. And the activity of the gene product thereof is the activity of b1097-protein.

[78182] Accordingly, in one embodiment, the process of the present invention for producing coenzyme Q9 in a non-human organism, like a microorganism or a plant or a part thereof, comprises increasing or generating the activity of a gene product with the activity of a gene product conferring the activity of “b1097-protein”, especially from Escherichia coli or its functional equivalent or its homolog, e.g. the increase of
[78183] (a) a gene product of a gene comprising the nucleic acid molecule as shown in the respective line in column 5 of Table I (whereby the respective line disclose in column 7 the fine chemical coenzyme Q9), application no. 16, preferably the coding region thereof, or a homolog or a fragment thereof, and being depicted in the same respective line as said B1097, or a functional equivalent or a homolog thereof as shown in column 8 of Table I, application no. 16, preferably the coding region thereof, particularly a homolog or functional equivalent as shown in column 8 of Table I B, application no. 16, and being depicted in the same respective line as said B1097, and preferably the activity is increased non-targeted, or
[78184] (b) a polypeptide comprising a polypeptide, a consensus sequence or at least a polypeptide motif as shown in the respective line in column 5 of Table II or in column 8 of Table IV, application no. 16, respectively, and being depicted in the same respective line as said B1097, or a functional equivalent or a homolog thereof as depicted in column 8 of Table II, application no. 16, preferably a homolog or functional equivalent as depicted in column 8 of Table II B, application no. 16, and being depicted in the same respective line as said B1097, and preferably the activity is increased non-targeted, whereby the respective line disclose in column 7 the fine chemical coenzyme Q9.

[78185] Accordingly, in one embodiment, the molecule which activity is to be increased in the process of the invention is the gene product with an activity as a “b1097-protein”, preferably it is the molecule of section (a) or (b) of this paragraph.

[78186] In particular, it was observed that in plants, especially in Arabidopsis thaliana, increasing or generating the activity of a gene product non-targeted with the activity of a “b1097-protein”, preferably being encoded by a gene comprising the nucleic acid sequence SEQ ID NO. 138256, preferably the coding region thereof, conferred the production of or the increase in coenzyme Q9 compared with the wild type control.

[78187] The nucleic acid sequence of B1522 from Escherichia coli, e.g. as shown in the respective line in column 5 of Table I, application no. 16, has been published in B. And the activity of the gene product thereof is the activity of b1522-protein.

[78188] Accordingly, in one embodiment, the process of the present invention for producing coenzyme Q10 in a non-human organism, like a microorganism or a plant or a part thereof, comprises increasing or generating the activity of a gene product with the activity of a gene product conferring the activity of “b1522-protein”, especially from Escherichia coli or its functional equivalent or its homolog, e.g. the increase of
[78189] (a) a gene product of a gene comprising the nucleic acid molecule as shown in the respective line in column 5 of Table I (whereby the respective line disclose in column 7 the fine chemical coenzyme Q10), application no. 16, preferably the coding region thereof, or a homolog or a fragment thereof, and being depicted in the same respective line as said B1522, or a functional equivalent or a homolog thereof as shown in column 8 of Table I, application no. 16, preferably the coding region thereof, particularly a homolog or functional equivalent as shown in column 8 of Table I B, application no. 16, and being depicted in the same respective line as said B1522, and preferably the activity is increased non-targeted, or
[78190] (b) a polypeptide comprising a polypeptide, a consensus sequence or at least a polypeptide motif as shown in the respective line in column 5 of Table II or in column 8 of Table IV, application no. 16, respectively, and being depicted in the same respective line as said B1522, or a functional equivalent or a homolog thereof as depicted in column 8 of Table II, application no. 16, preferably a homolog or functional equivalent as depicted in column 8 of Table II B, application no. 16, and being depicted in the same respective line as said B1522, and preferably the activity is increased non-targeted, whereby the respective line disclose in column 7 the fine chemical coenzyme Q10.

[78191] Accordingly, in one embodiment, the molecule which activity is to be increased in the process of the invention is the gene product with an activity as a “b1522-protein”, preferably it is the molecule of section (a) or (b) of this paragraph.

[78192] In particular, it was observed that in plants, especially in Arabidopsis thaliana, increasing or generating the activity of a gene product non-targeted with the activity of a “b1522-protein”, preferably being encoded by a gene comprising the nucleic acid sequence SEQ ID NO. 7947, preferably the coding region thereof, conferred the production of or the increase in coenzyme Q10 compared with the wild type control.

[78193] The nucleic acid sequence of B1522 from Escherichia coli, e.g. as shown in the respective line in column 5 of Table I, application no. 16, has been published in B. And the activity of the gene product thereof is the activity of b1522-protein.

[78194] Accordingly, in one embodiment, the process of the present invention for producing coenzyme Q9 in a non-human organism, like a microorganism or a plant or a part thereof, comprises increasing or generating the activity of a gene product with the activity of a gene product conferring the activity of “b1522-protein”, especially from Escherichia coli or its functional equivalent or its homolog, e.g. the increase of
[78195] (a) a gene product of a gene comprising the nucleic acid molecule as shown in the respective line in column 5 of Table I (whereby the respective line disclose in column 7 the fine chemical coenzyme Q9), application no. 16, preferably the coding region thereof, or a homolog or a fragment thereof, and being depicted in the same respective line as said B1522, or a functional equivalent or a homolog thereof as shown in column 8 of Table I, application no. 16, preferably the coding region thereof, particularly a homolog or functional equivalent as shown in column 8 of Table I B, application no. 16, and being depicted in the same respective line as said B1522, and preferably the activity is increased non-targeted, or
[78196] (b) a polypeptide comprising a polypeptide, a consensus sequence or at least a polypeptide motif as shown in the respective line in column 5 of Table II or in column 8 of Table IV, application no. 16, respectively, and being depicted in the same respective line as said B1522, or a functional equivalent or a homolog thereof as depicted in column 8 of Table II, application no. 16, preferably a homolog or functional equivalent as depicted in column 8 of Table II B, application no. 16, and being depicted in the same respective line as said B1522, and preferably the activity is increased non-targeted, whereby the respective line disclose in column 7 the fine chemical coenzyme Q9.

[78197] Accordingly, in one embodiment, the molecule which activity is to be increased in the process of the invention is the gene product with an activity as a “b1522-protein”, preferably it is the molecule of section (a) or (b) of this paragraph.

[78198] In particular, it was observed that in plants, especially in Arabidopsis thaliana, increasing or generating the activity of a gene product non-targeted with the activity of a “b1522-protein”, preferably being encoded by a gene comprising the nucleic acid sequence SEQ ID NO. 7947, preferably the coding region thereof, conferred the production of or the increase in coenzyme Q9 compared with the wild type control.

[78199] The nucleic acid sequence of B1597 from Escherichia coli, e.g. as shown in the respective line in column 5 of Table I, application no. 16, has been published in B. And the activity of the gene product thereof is the activity of acid shock protein.

[78200] Accordingly, in one embodiment, the process of the present invention for producing coenzyme Q10 in a non-human organism, like a microorganism or a plant or a part thereof, comprises increasing or generating the activity of a gene product with the activity of a gene product conferring the activity of “acid shock protein”, especially from Escherichia coli or its functional equivalent or its homolog, e.g. the increase of
[78201] (a) a gene product of a gene comprising the nucleic acid molecule as shown in the respective line in column 5 of Table I (whereby the respective line disclose in column 7 the fine chemical coenzyme Q10), application no. 16, preferably the coding region thereof, or a homolog or a fragment thereof, and being depicted in the same respective line as said B1597, or a functional equivalent or a homolog thereof as shown in column 8 of Table I, application no. 16, preferably the coding region thereof, particularly a homolog or functional equivalent as shown in column 8 of Table I B, application no. 16, and being depicted in the same respective line as said B1597, and preferably the activity is increased non-targeted, or
[78202] (b) a polypeptide comprising a polypeptide, a consensus sequence or at least a polypeptide motif as shown in the respective line in column 5 of Table II or in column 8 of Table IV, application no. 16, respectively, and being depicted in the same respective line as said B1597, or a functional equivalent or a homolog thereof as depicted in column 8 of Table II, application no. 16, preferably a homolog or functional equivalent as depicted in column 8 of Table II B, application no. 16, and being depicted in the same respective line as said B1597, and preferably the activity is increased non-targeted, whereby the respective line disclose in column 7 the fine chemical coenzyme Q10.

[78203] Accordingly, in one embodiment, the molecule which activity is to be increased in the process of the invention is the gene product with an activity as a “acid shock protein”, preferably it is the molecule of section (a) or (b) of this paragraph.

[78204] In particular, it was observed that in plants, especially in Arabidopsis thaliana, increasing or generating the activity of a gene product non-targeted with the activity of a “acid shock protein”, preferably being encoded by a gene comprising the nucleic acid sequence SEQ ID NO. 38300, preferably the coding region thereof, conferred the production of or the increase in coenzyme Q10 compared with the wild type control.

[78205] The nucleic acid sequence of B1597 from Escherichia coli, e.g. as shown in the respective line in column 5 of Table I, application no. 16, has been published in B. And the activity of the gene product thereof is the activity of acid shock protein.

[78206] Accordingly, in one embodiment, the process of the present invention for producing coenzyme Q9 in a non-human organism, like a microorganism or a plant or a part thereof, comprises increasing or generating the activity of a gene product with the activity of a gene product conferring the activity of “acid shock protein”, especially from Escherichia coli or its functional equivalent or its homolog, e.g. the increase of
[78207] (a) a gene product of a gene comprising the nucleic acid molecule as shown in the respective line in column 5 of Table I (whereby the respective line disclose in column 7 the fine chemical coenzyme Q9), application no. 16, preferably the coding region thereof, or a homolog or a fragment thereof, and being depicted in the same respective line as said B1597, or a functional equivalent or a homolog thereof as shown in column 8 of Table I, application no. 16, preferably the coding region thereof, particularly a homolog or functional equivalent as shown in column 8 of Table I B, application no. 16, and being depicted in the same respective line as said B1597, and preferably the activity is increased non-targeted, or
[78208] (b) a polypeptide comprising a polypeptide, a consensus sequence or at least a polypeptide motif as shown in the respective line in column 5 of Table II or in column 8 of Table IV, application no. 16, respectively, and being depicted in the same respective line as said B1597, or a functional equivalent or a homolog thereof as depicted in column 8 of Table II, application no. 16, preferably a homolog or functional equivalent as depicted in column 8 of Table II B, application no. 16, and being depicted in the same respective line as said B1597, and preferably the activity is increased non-targeted, whereby the respective line disclose in column 7 the fine chemical coenzyme Q9.

[78209] Accordingly, in one embodiment, the molecule which activity is to be increased in the process of the invention is the gene product with an activity as a “acid shock protein”, preferably it is the molecule of section (a) or (b) of this paragraph.

[78210] In particular, it was observed that in plants, especially in Arabidopsis thaliana, increasing or generating the activity of a gene product non-targeted with the activity of a “acid shock protein”, preferably being encoded by a gene comprising the nucleic acid sequence SEQ ID NO. 38300, preferably the coding region thereof, conferred the production of or the increase in coenzyme Q9 compared with the wild type control.

[78211] The nucleic acid sequence of B1838 from Escherichia coli, e.g. as shown in the respective line in column 5 of Table I, application no. 16, has been published in B. And the activity of the gene product thereof is the activity of serine/threonine-protein phosphatase.

[78212] Accordingly, in one embodiment, the process of the present invention for producing coenzyme Q9 in a non-human organism, like a microorganism or a plant or a part thereof, comprises increasing or generating the activity of a gene product with the activity of a gene product conferring the activity of “serine/threonine-protein phosphatase”, especially from Escherichia coli or its functional equivalent or its homolog, e.g. the increase of
[78213] (a) a gene product of a gene comprising the nucleic acid molecule as shown in the respective line in column 5 of Table I (whereby the respective line disclose in column 7 the fine chemical coenzyme Q9), application no. 16, preferably the coding region thereof, or a homolog or a fragment thereof, and being depicted in the same respective line as said B1838, or a functional equivalent or a homolog thereof as shown in column 8 of Table I, application no. 16, preferably the coding region thereof, particularly a homolog or functional equivalent as shown in column 8 of Table I B, application no. 16, and being depicted in the same respective line as said B1838, and preferably the activity is increased non-targeted, or
[78214] (b) a polypeptide comprising a polypeptide, a consensus sequence or at least a polypeptide motif as shown in the respective line in column 5 of Table II or in column 8 of Table IV, application no. 16, respectively, and being depicted in the same respective line as said B1838, or a functional equivalent or a homolog thereof as depicted in column 8 of Table II, application no. 16, preferably a homolog or functional equivalent as depicted in column 8 of Table II B, application no. 16, and being depicted in the same respective line as said B1838, and preferably the activity is increased non-targeted, whereby the respective line disclose in column 7 the fine chemical coenzyme Q9.

[78215] Accordingly, in one embodiment, the molecule which activity is to be increased in the process of the invention is the gene product with an activity as a “serine/threonine-protein phosphatase”, preferably it is the molecule of section (a) or (b) of this paragraph.

[78216] In particular, it was observed that in plants, especially in Arabidopsis thaliana, increasing or generating the activity of a gene product non-targeted with the activity of a “serine/threonine-protein phosphatase”, preferably being encoded by a gene comprising the nucleic acid sequence SEQ ID NO. 8316, preferably the coding region thereof, conferred the production of or the increase in coenzyme Q9 compared with the wild type control.

[78217] The nucleic acid sequence of B2032 from Escherichia coli, e.g. as shown in the respective line in column 5 of Table I, application no. 16, has been published in B. And the activity of the gene product thereof is the activity of b2032-protein.

[78218] Accordingly, in one embodiment, the process of the present invention for producing coenzyme Q9 in a non-human organism, like a microorganism or a plant or a part thereof, comprises increasing or generating the activity of a gene product with the activity of a gene product conferring the activity of “b2032-protein”, especially from Escherichia coli or its functional equivalent or its homolog, e.g. the increase of
[78219] (a) a gene product of a gene comprising the nucleic acid molecule as shown in the respective line in column 5 of Table I (whereby the respective line disclose in column 7 the fine chemical coenzyme Q9), application no. 16, preferably the coding region thereof, or a homolog or a fragment thereof, and being depicted in the same respective line as said B2032, or a functional equivalent or a homolog thereof as shown in column 8 of Table I, application no. 16, preferably the coding region thereof, particularly a homolog or functional equivalent as shown in column 8 of Table I B, application no. 16, and being depicted in the same respective line as said B2032, and preferably the activity is increased non-targeted, or
[78220] (b) a polypeptide comprising a polypeptide, a consensus sequence or at least a polypeptide motif as shown in the respective line in column 5 of Table II or in column 8 of Table IV, application no. 16, respectively, and being depicted in the same respective line as said B2032, or a functional equivalent or a homolog thereof as depicted in column 8 of Table II, application no. 16, preferably a homolog or functional equivalent as depicted in column 8 of Table II B, application no. 16, and being depicted in the same respective line as said B2032, and preferably the activity is increased non-targeted, whereby the respective line disclose in column 7 the fine chemical coenzyme Q9.

[78221] Accordingly, in one embodiment, the molecule which activity is to be increased in the process of the invention is the gene product with an activity as a “b2032-protein”, preferably it is the molecule of section (a) or (b) of this paragraph.

[78222] In particular, it was observed that in plants, especially in Arabidopsis thaliana, increasing or generating the activity of a gene product non-targeted with the activity of a “b2032-protein”, preferably being encoded by a gene comprising the nucleic acid sequence SEQ ID NO. 8920, preferably the coding region thereof, conferred the production of or the increase in coenzyme Q9 compared with the wild type control.

[78223] The nucleic acid sequence of B2043 from Escherichia coli, e.g. as shown in the respective line in column 5 of Table I, application no. 16, has been published in B. And the activity of the gene product thereof is the activity of colanic acid biosynthesis protein.

[78224] Accordingly, in one embodiment, the process of the present invention for producing coenzyme Q10 in a non-human organism, like a microorganism or a plant or a part thereof, comprises increasing or generating the activity of a gene product with the activity of a gene product conferring the activity of “colanic acid biosynthesis protein”, especially from Escherichia coli or its functional equivalent or its homolog, e.g. the increase of
[78225] (a) a gene product of a gene comprising the nucleic acid molecule as shown in the respective line in column 5 of Table I (whereby the respective line disclose in column 7 the fine chemical coenzyme Q10), application no. 16, preferably the coding region thereof, or a homolog or a fragment thereof, and being depicted in the same respective line as said B2043, or a functional equivalent or a homolog thereof as shown in column 8 of Table I, application no. 16, preferably the coding region thereof, particularly a homolog or functional equivalent as shown in column 8 of Table I B, application no. 16, and being depicted in the same respective line as said B2043, and preferably the activity is increased non-targeted, or
[78226] (b) a polypeptide comprising a polypeptide, a consensus sequence or at least a polypeptide motif as shown in the respective line in column 5 of Table II or in column 8 of Table IV, application no. 16, respectively, and being depicted in the same respective line as said B2043, or a functional equivalent or a homolog thereof as depicted in column 8 of Table II, application no. 16, preferably a homolog or functional equivalent as depicted in column 8 of Table II B, application no. 16, and being depicted in the same respective line as said B2043, and preferably the activity is increased non-targeted, whereby the respective line disclose in column 7 the fine chemical coenzyme Q10.

[78227] Accordingly, in one embodiment, the molecule which activity is to be increased in the process of the invention is the gene product with an activity as a “colanic acid biosynthesis protein”, preferably it is the molecule of section (a) or (b) of this paragraph.

[78228] In particular, it was observed that in plants, especially in Arabidopsis thaliana, increasing or generating the activity of a gene product non-targeted with the activity of a “colanic acid biosynthesis protein”, preferably being encoded by a gene comprising the nucleic acid sequence SEQ ID NO. 112193, preferably the coding region thereof, conferred the production of or the increase in coenzyme Q10 compared with the wild type control.

[78229] The nucleic acid sequence of B2281 from Escherichia coli, e.g. as shown in the respective line in column 5 of Table I, application no. 16, has been published in B. And the activity of the gene product thereof is the activity of NADH dehydrogenase I chain I.

[78230] Accordingly, in one embodiment, the process of the present invention for producing coenzyme Q9 in a non-human organism, like a microorganism or a plant or a part thereof, comprises increasing or generating the activity of a gene product with the activity of a gene product conferring the activity of “NADH dehydrogenase I chain I”, especially from Escherichia coli or its functional equivalent or its homolog, e.g. the increase of
[78231] (a) a gene product of a gene comprising the nucleic acid molecule as shown in the respective line in column 5 of Table I (whereby the respective line disclose in column 7 the fine chemical coenzyme Q9), application no. 16, preferably the coding region thereof, or a homolog or a fragment thereof, and being depicted in the same respective line as said B2281, or a functional equivalent or a homolog thereof as shown in column 8 of Table I, application no. 16, preferably the coding region thereof, particularly a homolog or functional equivalent as shown in column 8 of Table I B, application no. 16, and being depicted in the same respective line as said B2281, and preferably the activity is increased non-targeted, or
[78232] (b) a polypeptide comprising a polypeptide, a consensus sequence or at least a polypeptide motif as shown in the respective line in column 5 of Table II or in column 8 of Table IV, application no. 16, respectively, and being depicted in the same respective line as said B2281, or a functional equivalent or a homolog thereof as depicted in column 8 of Table II, application no. 16, preferably a homolog or functional equivalent as depicted in column 8 of Table II B, application no. 16, and being depicted in the same respective line as said B2281, and preferably the activity is increased non-targeted, whereby the respective line disclose in column 7 the fine chemical coenzyme Q9.

[78233] Accordingly, in one embodiment, the molecule which activity is to be increased in the process of the invention is the gene product with an activity as a “NADH dehydrogenase I chain I”, preferably it is the molecule of section (a) or (b) of this paragraph.

[78234] In particular, it was observed that in plants, especially in Arabidopsis thaliana, increasing or generating the activity of a gene product non-targeted with the activity of a “NADH dehydrogenase I chain I”, preferably being encoded by a gene comprising the nucleic acid sequence SEQ ID NO. 39120, preferably the coding region thereof, conferred the production of or the increase in coenzyme Q9 compared with the wild type control.

[78235] The nucleic acid sequence of B2285 from Escherichia coli, e.g. as shown in the respective line in column 5 of Table I, application no. 16, has been published in B. And the activity of the gene product thereof is the activity of ATP synthase subunit E.

[78236] Accordingly, in one embodiment, the process of the present invention for producing nicotinic acid in a non-human organism, like a microorganism or a plant or a part thereof, comprises increasing or generating the activity of a gene product with the activity of a gene product conferring the activity of “ATP synthase subunit E”, especially from Escherichia coli or its functional equivalent or its homolog, e.g. the increase of
[78237] (a) a gene product of a gene comprising the nucleic acid molecule as shown in the respective line in column 5 of Table I (whereby the respective line disclose in column 7 the fine chemical nicotinic acid), application no. 16, preferably the coding region thereof, or a homolog or a fragment thereof, and being depicted in the same respective line as said B2285, or a functional equivalent or a homolog thereof as shown in column 8 of Table I, application no. 16, preferably the coding region thereof, particularly a homolog or functional equivalent as shown in column 8 of Table I B, application no. 16, and being depicted in the same respective line as said B2285, and preferably the activity is increased non-targeted, or
[78238] (b) a polypeptide comprising a polypeptide, a consensus sequence or at least a polypeptide motif as shown in the respective line in column 5 of Table II or in column 8 of Table IV, application no. 16, respectively, and being depicted in the same respective line as said B2285, or a functional equivalent or a homolog thereof as depicted in column 8 of Table II, application no. 16, preferably a homolog or functional equivalent as depicted in column 8 of Table II B, application no. 16, and being depicted in the same respective line as said B2285, and preferably the activity is increased non-targeted, whereby the respective line disclose in column 7 the fine chemical nicotinic acid.

[78239] Accordingly, in one embodiment, the molecule which activity is to be increased in the process of the invention is the gene product with an activity as a “ATP synthase subunit E”, preferably it is the molecule of section (a) or (b) of this paragraph.

[78240] In particular, it was observed that in plants, especially in Arabidopsis thaliana, increasing or generating the activity of a gene product non-targeted with the activity of a “ATP synthase subunit E”, preferably being encoded by a gene comprising the nucleic acid sequence SEQ ID NO. 99620, preferably the coding region thereof, conferred the production of or the increase in nicotinic acid compared with the wild type control.

[78241] The nucleic acid sequence of B2574 from Escherichia coli, e.g. as shown in the respective line in column 5 of Table I, application no. 16, has been published in B. And the activity of the gene product thereof is the activity of L-aspartate oxidase.

[78242] Accordingly, in one embodiment, the process of the present invention for producing nicotinic acid in a non-human organism, like a microorganism or a plant or a part thereof, comprises increasing or generating the activity of a gene product with the activity of a gene product conferring the activity of “L-aspartate oxidase”, especially from Escherichia coli or its functional equivalent or its homolog, e.g. the increase of
[78243] (a) a gene product of a gene comprising the nucleic acid molecule as shown in the respective line in column 5 of Table I (whereby the respective line disclose in column 7 the fine chemical nicotinic acid), application no. 16, preferably the coding region thereof, or a homolog or a fragment thereof, and being depicted in the same respective line as said B2574, or a functional equivalent or a homolog thereof as shown in column 8 of Table I, application no. 16, preferably the coding region thereof, particularly a homolog or functional equivalent as shown in column 8 of Table I B, application no. 16, and being depicted in the same respective line as said B2574, and preferably the activity is increased plastidic, or
[78244] (b) a polypeptide comprising a polypeptide, a consensus sequence or at least a polypeptide motif as shown in the respective line in column 5 of Table II or in column 8 of Table IV, application no. 16, respectively, and being depicted in the same respective line as said B2574, or a functional equivalent or a homolog thereof as depicted in column 8 of Table II, application no. 16, preferably a homolog or functional equivalent as depicted in column 8 of Table II B, application no. 16, and being depicted in the same respective line as said B2574, and preferably the activity is increased plastidic, whereby the respective line disclose in column 7 the fine chemical nicotinic acid.

[78245] Accordingly, in one embodiment, the molecule which activity is to be increased in the process of the invention is the gene product with an activity as a “L-aspartate oxidase”, preferably it is the molecule of section (a) or (b) of this paragraph.

[78246] In particular, it was observed that in plants, especially in Arabidopsis thaliana, increasing or generating the activity of a gene product plastidic with the activity of a “L-aspartate oxidase”, preferably being encoded by a gene comprising the nucleic acid sequence SEQ ID NO. 138377, preferably the coding region thereof, conferred the production of or the increase in nicotinic acid compared with the wild type control.

[78247] The nucleic acid sequence of B2739 from Escherichia coli, e.g. as shown in the respective line in column 5 of Table I, application no. 16, has been published in B. And the activity of the gene product thereof is the activity of b2739-protein.

[78248] Accordingly, in one embodiment, the process of the present invention for producing coenzyme Q9 in a non-human organism, like a microorganism or a plant or a part thereof, comprises increasing or generating the activity of a gene product with the activity of a gene product conferring the activity of “b2739-protein”, especially from Escherichia coli or its functional equivalent or its homolog, e.g. the increase of
[78249] (a) a gene product of a gene comprising the nucleic acid molecule as shown in the respective line in column 5 of Table I (whereby the respective line disclose in column 7 the fine chemical coenzyme Q9), application no. 16, preferably the coding region thereof, or a homolog or a fragment thereof, and being depicted in the same respective line as said B2739, or a functional equivalent or a homolog thereof as shown in column 8 of Table I, application no. 16, preferably the coding region thereof, particularly a homolog or functional equivalent as shown in column 8 of Table I B, application no. 16, and being depicted in the same respective line as said B2739, and preferably the activity is increased non-targeted, or
[78250] (b) a polypeptide comprising a polypeptide, a consensus sequence or at least a polypeptide motif as shown in the respective line in column 5 of Table II or in column 8 of Table IV, application no. 16, respectively, and being depicted in the same respective line as said B2739, or a functional equivalent or a homolog thereof as depicted in column 8 of Table II, application no. 16, preferably a homolog or functional equivalent as depicted in column 8 of Table II B, application no. 16, and being depicted in the same respective line as said B2739, and preferably the activity is increased non-targeted, whereby the respective line disclose in column 7 the fine chemical coenzyme Q9.

[78251] Accordingly, in one embodiment, the molecule which activity is to be increased in the process of the invention is the gene product with an activity as a “b2739-protein”, preferably it is the molecule of section (a) or (b) of this paragraph.

[78252] In particular, it was observed that in plants, especially in Arabidopsis thaliana, increasing or generating the activity of a gene product non-targeted with the activity of a “b2739-protein”, preferably being encoded by a gene comprising the nucleic acid sequence SEQ ID NO. 80906, preferably the coding region thereof, conferred the production of or the increase in coenzyme Q9 compared with the wild type control.

[78253] The nucleic acid sequence of B2747 from Escherichia coli, e.g. as shown in the respective line in column 5 of Table I, application no. 16, has been published in B. And the activity of the gene product thereof is the activity of 2-C-methyl-D-erythritol 4-phosphate cytidylyltransferase.

[78254] Accordingly, in one embodiment, the process of the present invention for producing coenzyme Q9 in a non-human organism, like a microorganism or a plant or a part thereof, comprises increasing or generating the activity of a gene product with the activity of a gene product conferring the activity of “2-C-methyl-D-erythritol 4-phosphate cytidylyltransferase”, especially from Escherichia coli or its functional equivalent or its homolog, e.g. the increase of
[78255] (a) a gene product of a gene comprising the nucleic acid molecule as shown in the respective line in column 5 of Table I (whereby the respective line disclose in column 7 the fine chemical coenzyme Q9), application no. 16, preferably the coding region thereof, or a homolog or a fragment thereof, and being depicted in the same respective line as said B2747, or a functional equivalent or a homolog thereof as shown in column 8 of Table I, application no. 16, preferably the coding region thereof, particularly a homolog or functional equivalent as shown in column 8 of Table I B, application no. 16, and being depicted in the same respective line as said B2747, and preferably the activity is increased non-targeted, or
[78256] (b) a polypeptide comprising a polypeptide, a consensus sequence or at least a polypeptide motif as shown in the respective line in column 5 of Table II or in column 8 of Table IV, application no. 16, respectively, and being depicted in the same respective line as said B2747, or a functional equivalent or a homolog thereof as depicted in column 8 of Table II, application no. 16, preferably a homolog or functional equivalent as depicted in column 8 of Table II B, application no. 16, and being depicted in the same respective line as said B2747, and preferably the activity is increased non-targeted, whereby the respective line disclose in column 7 the fine chemical coenzyme Q9.

[78257] Accordingly, in one embodiment, the molecule which activity is to be increased in the process of the invention is the gene product with an activity as a “2-C-methyl-D-erythritol 4-phosphate cytidylyltransferase”, preferably it is the molecule of section (a) or (b) of this paragraph.

[78258] In particular, it was observed that in plants, especially in Arabidopsis thaliana, increasing or generating the activity of a gene product non-targeted with the activity of a “2-C-methyl-D-erythritol 4-phosphate cytidylyltransferase”, preferably being encoded by a gene comprising the nucleic acid sequence SEQ ID NO. 81075, preferably the coding region thereof, conferred the production of or the increase in coenzyme Q9 compared with the wild type control.

[78259] The nucleic acid sequence of B2762 from Escherichia coli, e.g. as shown in the respective line in column 5 of Table I, application no. 16, has been published in B. And the activity of the gene product thereof is the activity of phosphoadenosine phosphosulfate reductase.

[78260] Accordingly, in one embodiment, the process of the present invention for producing lipoic acid in a non-human organism, like a microorganism or a plant or a part thereof, comprises increasing or generating the activity of a gene product with the activity of a gene product conferring the activity of “phosphoadenosine phosphosulfate reductase”, especially from Escherichia coli or its functional equivalent or its homolog, e.g. the increase of
[78261] (a) a gene product of a gene comprising the nucleic acid molecule as shown in the respective line in column 5 of Table I (whereby the respective line disclose in column 7 the fine chemical lipoic acid), application no. 16, preferably the coding region thereof, or a homolog or a fragment thereof, and being depicted in the same respective line as said B2762, or a functional equivalent or a homolog thereof as shown in column 8 of Table I, application no. 16, preferably the coding region thereof, particularly a homolog or functional equivalent as shown in column 8 of Table I B, application no. 16, and being depicted in the same respective line as said B2762, and preferably the activity is increased non-targeted, or
[78262] (b) a polypeptide comprising a polypeptide, a consensus sequence or at least a polypeptide motif as shown in the respective line in column 5 of Table II or in column 8 of Table IV, application no. 16, respectively, and being depicted in the same respective line as said B2762, or a functional equivalent or a homolog thereof as depicted in column 8 of Table II, application no. 16, preferably a homolog or functional equivalent as depicted in column 8 of Table II B, application no. 16, and being depicted in the same respective line as said B2762, and preferably the activity is increased non-targeted, whereby the respective line disclose in column 7 the fine chemical lipoic acid.

[78263] Accordingly, in one embodiment, the molecule which activity is to be increased in the process of the invention is the gene product with an activity as a “phosphoadenosine phosphosulfate reductase”, preferably it is the molecule of section (a) or (b) of this paragraph.

[78264] In particular, it was observed that in plants, especially in Arabidopsis thaliana, increasing or generating the activity of a gene product non-targeted with the activity of a “phosphoadenosine phosphosulfate reductase”, preferably being encoded by a gene comprising the nucleic acid sequence SEQ ID NO. 81451, preferably the coding region thereof, conferred the production of or the increase in lipoic acid compared with the wild type control.

[78265] The nucleic acid sequence of B2849 from Escherichia coli, e.g. as shown in the respective line in column 5 of Table I, application no. 16, has been published in B. And the activity of the gene product thereof is the activity of b2849-protein.

[78266] Accordingly, in one embodiment, the process of the present invention for producing coenzyme Q9 in a non-human organism, like a microorganism or a plant or a part thereof, comprises increasing or generating the activity of a gene product with the activity of a gene product conferring the activity of “b2849-protein”, especially from Escherichia coli or its functional equivalent or its homolog, e.g. the increase of
[78267] (a) a gene product of a gene comprising the nucleic acid molecule as shown in the respective line in column 5 of Table I (whereby the respective line disclose in column 7 the fine chemical coenzyme Q9), application no. 16, preferably the coding region thereof, or a homolog or a fragment thereof, and being depicted in the same respective line as said B2849, or a functional equivalent or a homolog thereof as shown in column 8 of Table I, application no. 16, preferably the coding region thereof, particularly a homolog or functional equivalent as shown in column 8 of Table I B, application no. 16, and being depicted in the same respective line as said B2849, and preferably the activity is increased non-targeted, or
[78268] (b) a polypeptide comprising a polypeptide, a consensus sequence or at least a polypeptide motif as shown in the respective line in column 5 of Table II or in column 8 of Table IV, application no. 16, respectively, and being depicted in the same respective line as said B2849, or a functional equivalent or a homolog thereof as depicted in column 8 of Table II, application no. 16, preferably a homolog or functional equivalent as depicted in column 8 of Table II B, application no. 16, and being depicted in the same respective line as said B2849, and preferably the activity is increased non-targeted, whereby the respective line disclose in column 7 the fine chemical coenzyme Q9.

[78269] Accordingly, in one embodiment, the molecule which activity is to be increased in the process of the invention is the gene product with an activity as a “b2849-protein”, preferably it is the molecule of section (a) or (b) of this paragraph.

[78270] In particular, it was observed that in plants, especially in Arabidopsis thaliana, increasing or generating the activity of a gene product non-targeted with the activity of a “b2849-protein”, preferably being encoded by a gene comprising the nucleic acid sequence SEQ ID NO. 81980, preferably the coding region thereof, conferred the production of or the increase in coenzyme Q9 compared with the wild type control.

[78271] The nucleic acid sequence of B3262 from Escherichia coli, e.g. as shown in the respective line in column 5 of Table I, application no. 16, has been published in B. And the activity of the gene product thereof is the activity of methyltransferase.

[78272] Accordingly, in one embodiment, the process of the present invention for producing coenzyme Q9 in a non-human organism, like a microorganism or a plant or a part thereof, comprises increasing or generating the activity of a gene product with the activity of a gene product conferring the activity of “methyltransferase”, especially from Escherichia coli or its functional equivalent or its homolog, e.g. the increase of
[78273] (a) a gene product of a gene comprising the nucleic acid molecule as shown in the respective line in column 5 of Table I (whereby the respective line disclose in column 7 the fine chemical coenzyme Q9), application no. 16, preferably the coding region thereof, or a homolog or a fragment thereof, and being depicted in the same respective line as said B3262, or a functional equivalent or a homolog thereof as shown in column 8 of Table I, application no. 16, preferably the coding region thereof, particularly a homolog or functional equivalent as shown in column 8 of Table I B, application no. 16, and being depicted in the same respective line as said B3262, and preferably the activity is increased non-targeted, or
[78274] (b) a polypeptide comprising a polypeptide, a consensus sequence or at least a polypeptide motif as shown in the respective line in column 5 of Table II or in column 8 of Table IV, application no. 16, respectively, and being depicted in the same respective line as said B3262, or a functional equivalent or a homolog thereof as depicted in column 8 of Table II, application no. 16, preferably a homolog or functional equivalent as depicted in column 8 of Table II B, application no. 16, and being depicted in the same respective line as said B3262, and preferably the activity is increased non-targeted, whereby the respective line disclose in column 7 the fine chemical coenzyme Q9.

[78275] Accordingly, in one embodiment, the molecule which activity is to be increased in the process of the invention is the gene product with an activity as a “methyltransferase”, preferably it is the molecule of section (a) or (b) of this paragraph.

[78276] In particular, it was observed that in plants, especially in Arabidopsis thaliana, increasing or generating the activity of a gene product non-targeted with the activity of a “methyltransferase”, preferably being encoded by a gene comprising the nucleic acid sequence SEQ ID NO. 42502, preferably the coding region thereof, conferred the production of or the increase in coenzyme Q9 compared with the wild type control.

[78277] The nucleic acid sequence of B3749 from Escherichia coli, e.g. as shown in the respective line in column 5 of Table I, application no. 16, has been published in B. And the activity of the gene product thereof is the activity of Ribose import ATP-binding protein.

[78278] Accordingly, in one embodiment, the process of the present invention for producing coenzyme Q10 in a non-human organism, like a microorganism or a plant or a part thereof, comprises increasing or generating the activity of a gene product with the activity of a gene product conferring the activity of “Ribose import ATP-binding protein”, especially from Escherichia coli or its functional equivalent or its homolog, e.g. the increase of
[78279] (a) a gene product of a gene comprising the nucleic acid molecule as shown in the respective line in column 5 of Table I (whereby the respective line disclose in column 7 the fine chemical coenzyme Q10), application no. 16, preferably the coding region thereof, or a homolog or a fragment thereof, and being depicted in the same respective line as said B3749, or a functional equivalent or a homolog thereof as shown in column 8 of Table I, application no. 16, preferably the coding region thereof, particularly a homolog or functional equivalent as shown in column 8 of Table I B, application no. 16, and being depicted in the same respective line as said B3749, and preferably the activity is increased non-targeted, or
[78280] (b) a polypeptide comprising a polypeptide, a consensus sequence or at least a polypeptide motif as shown in the respective line in column 5 of Table II or in column 8 of Table IV, application no. 16, respectively, and being depicted in the same respective line as said B3749, or a functional equivalent or a homolog thereof as depicted in column 8 of Table II, application no. 16, preferably a homolog or functional equivalent as depicted in column 8 of Table II B, application no. 16, and being depicted in the same respective line as said B3749, and preferably the activity is increased non-targeted, whereby the respective line disclose in column 7 the fine chemical coenzyme Q10.

[78281] Accordingly, in one embodiment, the molecule which activity is to be increased in the process of the invention is the gene product with an activity as a “Ribose import ATP-binding protein”, preferably it is the molecule of section (a) or (b) of this paragraph.

[78282] In particular, it was observed that in plants, especially in Arabidopsis thaliana, increasing or generating the activity of a gene product non-targeted with the activity of a “Ribose import ATP-binding protein”, preferably being encoded by a gene comprising the nucleic acid sequence SEQ ID NO. 138770, preferably the coding region thereof, conferred the production of or the increase in coenzyme Q10 compared with the wild type control.

[78283] The nucleic acid sequence of B3817 from Escherichia coli, e.g. as shown in the respective line in column 5 of Table I, application no. 16, has been published in B. And the activity of the gene product thereof is the activity of b3817-protein.

[78284] Accordingly, in one embodiment, the process of the present invention for producing coenzyme Q9 in a non-human organism, like a microorganism or a plant or a part thereof, comprises increasing or generating the activity of a gene product with the activity of a gene product conferring the activity of “b3817-protein”, especially from Escherichia coli or its functional equivalent or its homolog, e.g. the increase of
[78285] (a) a gene product of a gene comprising the nucleic acid molecule as shown in the respective line in column 5 of Table I (whereby the respective line disclose in column 7 the fine chemical coenzyme Q9), application no. 16, preferably the coding region thereof, or a homolog or a fragment thereof, and being depicted in the same respective line as said B3817, or a functional equivalent or a homolog thereof as shown in column 8 of Table I, application no. 16, preferably the coding region thereof, particularly a homolog or functional equivalent as shown in column 8 of Table I B, application no. 16, and being depicted in the same respective line as said B3817, and preferably the activity is increased non-targeted, or
[78286] (b) a polypeptide comprising a polypeptide, a consensus sequence or at least a polypeptide motif as shown in the respective line in column 5 of Table II or in column 8 of Table IV, application no. 16, respectively, and being depicted in the same respective line as said B3817, or a functional equivalent or a homolog thereof as depicted in column 8 of Table II, application no. 16, preferably a homolog or functional equivalent as depicted in column 8 of Table II B, application no. 16, and being depicted in the same respective line as said B3817, and preferably the activity is increased non-targeted, whereby the respective line disclose in column 7 the fine chemical coenzyme Q9.

[78287] Accordingly, in one embodiment, the molecule which activity is to be increased in the process of the invention is the gene product with an activity as a “b3817-protein”, preferably it is the molecule of section (a) or (b) of this paragraph.

[78288] In particular, it was observed that in plants, especially in Arabidopsis thaliana, increasing or generating the activity of a gene product non-targeted with the activity of a “b3817-protein”, preferably being encoded by a gene comprising the nucleic acid sequence SEQ ID NO. 10708, preferably the coding region thereof, conferred the production of or the increase in coenzyme Q9 compared with the wild type control.

[78289] The nucleic acid sequence of B3945 from Escherichia coli, e.g. as shown in the respective line in column 5 of Table I, application no. 16, has been published in B. And the activity of the gene product thereof is the activity of glycerol dehydrogenase.

[78290] Accordingly, in one embodiment, the process of the present invention for producing coenzyme Q9 in a non-human organism, like a microorganism or a plant or a part thereof, comprises increasing or generating the activity of a gene product with the activity of a gene product conferring the activity of “glycerol dehydrogenase”, especially from Escherichia coli or its functional equivalent or its homolog, e.g. the increase of
[78291] (a) a gene product of a gene comprising the nucleic acid molecule as shown in the respective line in column 5 of Table I (whereby the respective line disclose in column 7 the fine chemical coenzyme Q9), application no. 16, preferably the coding region thereof, or a homolog or a fragment thereof, and being depicted in the same respective line as said B3945, or a functional equivalent or a homolog thereof as shown in column 8 of Table I, application no. 16, preferably the coding region thereof, particularly a homolog or functional equivalent as shown in column 8 of Table I B, application no. 16, and being depicted in the same respective line as said B3945, and preferably the activity is increased non-targeted, or
[78292] (b) a polypeptide comprising a polypeptide, a consensus sequence or at least a polypeptide motif as shown in the respective line in column 5 of Table II or in column 8 of Table IV, application no. 16, respectively, and being depicted in the same respective line as said B3945, or a functional equivalent or a homolog thereof as depicted in column 8 of Table II, application no. 16, preferably a homolog or functional equivalent as depicted in column 8 of Table II B, application no. 16, and being depicted in the same respective line as said B3945, and preferably the activity is increased non-targeted, whereby the respective line disclose in column 7 the fine chemical coenzyme Q9.

[78293] Accordingly, in one embodiment, the molecule which activity is to be increased in the process of the invention is the gene product with an activity as a “glycerol dehydrogenase”, preferably it is the molecule of section (a) or (b) of this paragraph.

[78294] In particular, it was observed that in plants, especially in Arabidopsis thaliana, increasing or generating the activity of a gene product non-targeted with the activity of a “glycerol dehydrogenase”, preferably being encoded by a gene comprising the nucleic acid sequence SEQ ID NO. 44223, preferably the coding region thereof, conferred the production of or the increase in coenzyme Q9 compared with the wild type control.

[78295] The nucleic acid sequence of B3958 from Escherichia coli, e.g. as shown in the respective line in column 5 of Table I, application no. 16, has been published in B. And the activity of the gene product thereof is the activity of N-acetyl-gamma-glutamylphosphate reductase.

[78296] Accordingly, in one embodiment, the process of the present invention for producing coenzyme Q10 in a non-human organism, like a microorganism or a plant or a part thereof, comprises increasing or generating the activity of a gene product with the activity of a gene product conferring the activity of “N-acetyl-gamma-glutamylphosphate reductase”, especially from Escherichia coli or its functional equivalent or its homolog, e.g. the increase of
[78297] (a) a gene product of a gene comprising the nucleic acid molecule as shown in the respective line in column 5 of Table I (whereby the respective line disclose in column 7 the fine chemical coenzyme Q10), application no. 16, preferably the coding region thereof, or a homolog or a fragment thereof, and being depicted in the same respective line as said B3958, or a functional equivalent or a homolog thereof as shown in column 8 of Table I, application no. 16, preferably the coding region thereof, particularly a homolog or functional equivalent as shown in column 8 of Table I B, application no. 16, and being depicted in the same respective line as said B3958, and preferably the activity is increased plastidic, or
[78298] (b) a polypeptide comprising a polypeptide, a consensus sequence or at least a polypeptide motif as shown in the respective line in column 5 of Table II or in column 8 of Table IV, application no. 16, respectively, and being depicted in the same respective line as said B3958, or a functional equivalent or a homolog thereof as depicted in column 8 of Table II, application no. 16, preferably a homolog or functional equivalent as depicted in column 8 of Table II B, application no. 16, and being depicted in the same respective line as said B3958, and preferably the activity is increased plastidic, whereby the respective line disclose in column 7 the fine chemical coenzyme Q10.

[78299] Accordingly, in one embodiment, the molecule which activity is to be increased in the process of the invention is the gene product with an activity as a “N-acetyl-gamma-glutamylphosphate reductase”, preferably it is the molecule of section (a) or (b) of this paragraph.

[78300] In particular, it was observed that in plants, especially in Arabidopsis thaliana, increasing or generating the activity of a gene product plastidic with the activity of a “N-acetyl-gammaglutamylphosphate reductase”, preferably being encoded by a gene comprising the nucleic acid sequence SEQ ID NO. 138857, preferably the coding region thereof, conferred the production of or the increase in coenzyme Q10 compared with the wild type control.

[78301] The nucleic acid sequence of B4029 from Escherichia coli, e.g. as shown in the respective line in column 5 of Table I, application no. 16, has been published in B. And the activity of the gene product thereof is the activity of b4029-protein.

[78302] Accordingly, in one embodiment, the process of the present invention for producing coenzyme Q9 in a non-human organism, like a microorganism or a plant or a part thereof, comprises increasing or generating the activity of a gene product with the activity of a gene product conferring the activity of “b4029-protein”, especially from Escherichia coli or its functional equivalent or its homolog, e.g. the increase of
[78303] (a) a gene product of a gene comprising the nucleic acid molecule as shown in the respective line in column 5 of Table I (whereby the respective line disclose in column 7 the fine chemical coenzyme Q9), application no. 16, preferably the coding region thereof, or a homolog or a fragment thereof, and being depicted in the same respective line as said B4029, or a functional equivalent or a homolog thereof as shown in column 8 of Table I, application no. 16, preferably the coding region thereof, particularly a homolog or functional equivalent as shown in column 8 of Table I B, application no. 16, and being depicted in the same respective line as said B4029, and preferably the activity is increased non-targeted, or
[78304] (b) a polypeptide comprising a polypeptide, a consensus sequence or at least a polypeptide motif as shown in the respective line in column 5 of Table II or in column 8 of Table IV, application no. 16, respectively, and being depicted in the same respective line as said B4029, or a functional equivalent or a homolog thereof as depicted in column 8 of Table II, application no. 16, preferably a homolog or functional equivalent as depicted in column 8 of Table II B, application no. 16, and being depicted in the same respective line as said B4029, and preferably the activity is increased non-targeted, whereby the respective line disclose in column 7 the fine chemical coenzyme Q9.

[78305] Accordingly, in one embodiment, the molecule which activity is to be increased in the process of the invention is the gene product with an activity as a “b4029-protein”, preferably it is the molecule of section (a) or (b) of this paragraph.

[78306] In particular, it was observed that in plants, especially in Arabidopsis thaliana, increasing or generating the activity of a gene product non-targeted with the activity of a “b4029-protein”, preferably being encoded by a gene comprising the nucleic acid sequence SEQ ID NO. 10740, preferably the coding region thereof, conferred the production of or the increase in coenzyme Q9 compared with the wild type control.

[78307] The nucleic acid sequence of B4256 from Escherichia coli, e.g. as shown in the respective line in column 5 of Table I, application no. 16, has been published in B. And the activity of the gene product thereof is the activity of acetyltransferase.

[78308] Accordingly, in one embodiment, the process of the present invention for producing coenzyme Q9 in a non-human organism, like a microorganism or a plant or a part thereof, comprises increasing or generating the activity of a gene product with the activity of a gene product conferring the activity of “acetyltransferase”, especially from Escherichia coli or its functional equivalent or its homolog, e.g. the increase of
[78309] (a) a gene product of a gene comprising the nucleic acid molecule as shown in the respective line in column 5 of Table I (whereby the respective line disclose in column 7 the fine chemical coenzyme Q9), application no. 16, preferably the coding region thereof, or a homolog or a fragment thereof, and being depicted in the same respective line as said B4256, or a functional equivalent or a homolog thereof as shown in column 8 of Table I, application no. 16, preferably the coding region thereof, particularly a homolog or functional equivalent as shown in column 8 of Table I B, application no. 16, and being depicted in the same respective line as said B4256, and preferably the activity is increased non-targeted, or
[78310] (b) a polypeptide comprising a polypeptide, a consensus sequence or at least a polypeptide motif as shown in the respective line in column 5 of Table II or in column 8 of Table IV, application no. 16, respectively, and being depicted in the same respective line as said B4256, or a functional equivalent or a homolog thereof as depicted in column 8 of Table II, application no. 16, preferably a homolog or functional equivalent as depicted in column 8 of Table II B, application no. 16, and being depicted in the same respective line as said B4256, and preferably the activity is increased non-targeted, whereby the respective line disclose in column 7 the fine chemical coenzyme Q9.

[78311] Accordingly, in one embodiment, the molecule which activity is to be increased in the process of the invention is the gene product with an activity as a “acetyltransferase”, preferably it is the molecule of section (a) or (b) of this paragraph.

[78312] In particular, it was observed that in plants, especially in Arabidopsis thaliana, increasing or generating the activity of a gene product non-targeted with the activity of a “acetyltransferase”, preferably being encoded by a gene comprising the nucleic acid sequence SEQ ID NO. 45321, preferably the coding region thereof, conferred the production of or the increase in coenzyme Q9 compared with the wild type control.

[78313] The nucleic acid sequence of B4321 from Escherichia coli, e.g. as shown in the respective line in column 5 of Table I, application no. 16, has been published in B. And the activity of the gene product thereof is the activity of gluconate transport system permease 3.

[78314] Accordingly, in one embodiment, the process of the present invention for producing coenzyme Q9 in a non-human organism, like a microorganism or a plant or a part thereof, comprises increasing or generating the activity of a gene product with the activity of a gene product conferring the activity of “gluconate transport system permease 3”, especially from Escherichia coli or its functional equivalent or its homolog, e.g. the increase of
[78315] (a) a gene product of a gene comprising the nucleic acid molecule as shown in the respective line in column 5 of Table I (whereby the respective line disclose in column 7 the fine chemical coenzyme Q9), application no. 16, preferably the coding region thereof, or a homolog or a fragment thereof, and being depicted in the same respective line as said B4321, or a functional equivalent or a homolog thereof as shown in column 8 of Table I, application no. 16, preferably the coding region thereof, particularly a homolog or functional equivalent as shown in column 8 of Table I B, application no. 16, and being depicted in the same respective line as said B4321, and preferably the activity is increased non-targeted, or
[78316] (b) a polypeptide comprising a polypeptide, a consensus sequence or at least a polypeptide motif as shown in the respective line in column 5 of Table II or in column 8 of Table IV, application no. 16, respectively, and being depicted in the same respective line as said B4321, or a functional equivalent or a homolog thereof as depicted in column 8 of Table II, application no. 16, preferably a homolog or functional equivalent as depicted in column 8 of Table II B, application no. 16, and being depicted in the same respective line as said B4321, and preferably the activity is increased non-targeted, whereby the respective line disclose in column 7 the fine chemical coenzyme Q9.

[78317] Accordingly, in one embodiment, the molecule which activity is to be increased in the process of the invention is the gene product with an activity as a “gluconate transport system permease 3”, preferably it is the molecule of section (a) or (b) of this paragraph.

[78318] In particular, it was observed that in plants, especially in Arabidopsis thaliana, increasing or generating the activity of a gene product non-targeted with the activity of a “gluconate transport system permease 3”, preferably being encoded by a gene comprising the nucleic acid sequence SEQ ID NO. 45394, preferably the coding region thereof, conferred the production of or the increase in coenzyme Q9 compared with the wild type control.

[78319] The nucleic acid sequence of GM02LC19289 from Glycine max, e.g. as shown in the respective line in column 5 of Table I, application no. 16, is unpublished. And the activity of the gene product thereof is the activity of transcription factor.

[78320] Accordingly, in one embodiment, the process of the present invention for producing coenzyme Q10 in a non-human organism, like a microorganism or a plant or a part thereof, comprises increasing or generating the activity of a gene product with the activity of a gene product conferring the activity of “transcription factor”, especially from Glycine max or its functional equivalent or its homolog, e.g. the increase of
[78321] (a) a gene product of a gene comprising the nucleic acid molecule as shown in the respective line in column 5 of Table I (whereby the respective line disclose in column 7 the fine chemical coenzyme Q10), application no. 16, preferably the coding region thereof, or a homolog or a fragment thereof, and being depicted in the same respective line as said GM02LC19289, or a functional equivalent or a homolog thereof as shown in column 8 of Table I, application no. 16, preferably the coding region thereof, particularly a homolog or functional equivalent as shown in column 8 of Table I B, application no. 16, and being depicted in the same respective line as said GM02LC19289, and preferably the activity is increased non-targeted, or
[78322] (b) a polypeptide comprising a polypeptide, a consensus sequence or at least a polypeptide motif as shown in the respective line in column 5 of Table II or in column 8 of Table IV, application no. 16, respectively, and being depicted in the same respective line as said GM02LC19289, or a functional equivalent or a homolog thereof as depicted in column 8 of Table II, application no. 16, preferably a homolog or functional equivalent as depicted in column 8 of Table II B, application no. 16, and being depicted in the same respective line as said GM02LC19289, and preferably the activity is increased non-targeted, whereby the respective line disclose in column 7 the fine chemical coenzyme Q10.

[78323] Accordingly, in one embodiment, the molecule which activity is to be increased in the process of the invention is the gene product with an activity as a “transcription factor”, preferably it is the molecule of section (a) or (b) of this paragraph.

[78324] In particular, it was observed that in plants, especially in Arabidopsis thaliana, increasing or generating the activity of a gene product non-targeted with the activity of a “transcription factor”, preferably being encoded by a gene comprising the nucleic acid sequence SEQ ID NO. 46751, preferably the coding region thereof, conferred the production of or the increase in coenzyme Q10 compared with the wild type control.

[78325] The nucleic acid sequence of GM02LC19289 from Glycine max, e.g. as shown in the respective line in column 5 of Table I, application no. 16, is unpublished. And the activity of the gene product thereof is the activity of transcription factor.

[78326] Accordingly, in one embodiment, the process of the present invention for producing coenzyme Q9 in a non-human organism, like a microorganism or a plant or a part thereof, comprises increasing or generating the activity of a gene product with the activity of a gene product conferring the activity of “transcription factor”, especially from Glycine max or its functional equivalent or its homolog, e.g. the increase of
[78327] (a) a gene product of a gene comprising the nucleic acid molecule as shown in the respective line in column 5 of Table I (whereby the respective line disclose in column 7 the fine chemical coenzyme Q9), application no. 16, preferably the coding region thereof, or a homolog or a fragment thereof, and being depicted in the same respective line as said

[78328] GM02LC19289, or a functional equivalent or a homolog thereof as shown in column 8 of Table I, application no. 16, preferably the coding region thereof, particularly a homolog or functional equivalent as shown in column 8 of Table I B, application no. 16, and being depicted in the same respective line as said GM02LC19289, and preferably the activity is increased non-targeted, or
[78329] (b) a polypeptide comprising a polypeptide, a consensus sequence or at least a polypeptide motif as shown in the respective line in column 5 of Table II or in column 8 of Table IV, application no. 16, respectively, and being depicted in the same respective line as said GM02LC19289, or a functional equivalent or a homolog thereof as depicted in column 8 of Table II, application no. 16, preferably a homolog or functional equivalent as depicted in column 8 of Table II B, application no. 16, and being depicted in the same respective line as said GM02LC19289, and preferably the activity is increased non-targeted, whereby the respective line disclose in column 7 the fine chemical coenzyme Q9.

[78330] Accordingly, in one embodiment, the molecule which activity is to be increased in the process of the invention is the gene product with an activity as a “transcription factor”, preferably it is the molecule of section (a) or (b) of this paragraph.

[78331] In particular, it was observed that in plants, especially in Arabidopsis thaliana, increasing or generating the activity of a gene product non-targeted with the activity of a “transcription factor”, preferably being encoded by a gene comprising the nucleic acid sequence SEQ ID NO. 46751, preferably the coding region thereof, conferred the production of or the increase in coenzyme Q9 compared with the wild type control.

[78332] The nucleic acid sequence of GM02LC21368 from Glycine max, e.g. as shown in the respective line in column 5 of Table I, application no. 16, is unpublished. And the activity of the gene product thereof is the activity of transcription factor.

[78333] Accordingly, in one embodiment, the process of the present invention for producing coenzyme Q10 in a non-human organism, like a microorganism or a plant or a part thereof, comprises increasing or generating the activity of a gene product with the activity of a gene product conferring the activity of “transcription factor”, especially from Glycine max or its functional equivalent or its homolog, e.g. the increase of
[78334] (a) a gene product of a gene comprising the nucleic acid molecule as shown in the respective line in column 5 of Table I (whereby the respective line disclose in column 7 the fine chemical coenzyme Q10), application no. 16, preferably the coding region thereof, or a homolog or a fragment thereof, and being depicted in the same respective line as said GM02LC21368, or a functional equivalent or a homolog thereof as shown in column 8 of Table I, application no. 16, preferably the coding region thereof, particularly a homolog or functional equivalent as shown in column 8 of Table I B, application no. 16, and being depicted in the same respective line as said GM02LC21368, and preferably the activity is increased non-targeted, or
[78335] (b) a polypeptide comprising a polypeptide, a consensus sequence or at least a polypeptide motif as shown in the respective line in column 5 of Table II or in column 8 of Table IV, application no. 16, respectively, and being depicted in the same respective line as said GM02LC21368, or a functional equivalent or a homolog thereof as depicted in column 8 of Table II, application no. 16, preferably a homolog or functional equivalent as depicted in column 8 of Table II B, application no. 16, and being depicted in the same respective line as said GM02LC21368, and preferably the activity is increased non-targeted, whereby the respective line disclose in column 7 the fine chemical coenzyme Q10.

[78336] Accordingly, in one embodiment, the molecule which activity is to be increased in the process of the invention is the gene product with an activity as a “transcription factor”, preferably it is the molecule of section (a) or (b) of this paragraph.

[78337] In particular, it was observed that in plants, especially in Arabidopsis thaliana, increasing or generating the activity of a gene product non-targeted with the activity of a “transcription factor”, preferably being encoded by a gene comprising the nucleic acid sequence SEQ ID NO. 84198, preferably the coding region thereof, conferred the production of or the increase in coenzyme Q10 compared with the wild type control.

[78338] The nucleic acid sequence of Sll0248 from Synechocystis sp., e.g. as shown in the respective line in column 5 of Table I, application no. 16, has been published in C. And the activity of the gene product thereof is the activity of flavodoxin.

[78339] Accordingly, in one embodiment, the process of the present invention for producing coenzyme Q10 in a non-human organism, like a microorganism or a plant or a part thereof, comprises increasing or generating the activity of a gene product with the activity of a gene product conferring the activity of “flavodoxin”, especially from Synechocystis sp. or its functional equivalent or its homolog, e.g. the increase of
[78340] (a) a gene product of a gene comprising the nucleic acid molecule as shown in the respective line in column 5 of Table I (whereby the respective line disclose in column 7 the fine chemical coenzyme Q10), application no. 16, preferably the coding region thereof, or a homolog or a fragment thereof, and being depicted in the same respective line as said Sll0248, or a functional equivalent or a homolog thereof as shown in column 8 of Table I, application no. 16, preferably the coding region thereof, particularly a homolog or functional equivalent as shown in column 8 of Table I B, application no. 16, and being depicted in the same respective line as said Sll0248, and preferably the activity is increased plastidic, or
[78341] (b) a polypeptide comprising a polypeptide, a consensus sequence or at least a polypeptide motif as shown in the respective line in column 5 of Table II or in column 8 of Table IV, application no. 16, respectively, and being depicted in the same respective line as said Sll0248, or a functional equivalent or a homolog thereof as depicted in column 8 of Table II, application no. 16, preferably a homolog or functional equivalent as depicted in column 8 of Table II B, application no. 16, and being depicted in the same respective line as said Sll0248, and preferably the activity is increased plastidic, whereby the respective line disclose in column 7 the fine chemical coenzyme Q10.

[78342] Accordingly, in one embodiment, the molecule which activity is to be increased in the process of the invention is the gene product with an activity as a “flavodoxin”, preferably it is the molecule of section (a) or (b) of this paragraph.

[78343] In particular, it was observed that in plants, especially in Arabidopsis thaliana, increasing or generating the activity of a gene product plastidic with the activity of a “flavodoxin”, preferably being encoded by a gene comprising the nucleic acid sequence SEQ ID NO. 49143, preferably the coding region thereof, conferred the production of or the increase in coenzyme Q10 compared with the wild type control.

[78344] The nucleic acid sequence of Sll0378 from Synechocystis sp., e.g. as shown in the respective line in column 5 of Table I, application no. 16, has been published in C. And the activity of the gene product thereof is the activity of uroporphyrin-III C-methyltransferase.

[78345] Accordingly, in one embodiment, the process of the present invention for producing coenzyme Q10 in a non-human organism, like a microorganism or a plant or a part thereof, comprises increasing or generating the activity of a gene product with the activity of a gene product conferring the activity of “uroporphyrin-III C-methyltransferase”, especially from Synechocystis sp. or its functional equivalent or its homolog, e.g. the increase of
[78346] (a) a gene product of a gene comprising the nucleic acid molecule as shown in the respective line in column 5 of Table I (whereby the respective line disclose in column 7 the fine chemical coenzyme Q10), application no. 16, preferably the coding region thereof, or a homolog or a fragment thereof, and being depicted in the same respective line as said Sll0378, or a functional equivalent or a homolog thereof as shown in column 8 of Table I, application no. 16, preferably the coding region thereof, particularly a homolog or functional equivalent as shown in column 8 of Table I B, application no. 16, and being depicted in the same respective line as said Sll0378, and preferably the activity is increased plastidic, or
[78347] (b) a polypeptide comprising a polypeptide, a consensus sequence or at least a polypeptide motif as shown in the respective line in column 5 of Table II or in column 8 of Table IV, application no. 16, respectively, and being depicted in the same respective line as said Sll0378, or a functional equivalent or a homolog thereof as depicted in column 8 of Table II, application no. 16, preferably a homolog or functional equivalent as depicted in column 8 of Table II B, application no. 16, and being depicted in the same respective line as said Sll0378, and preferably the activity is increased plastidic, whereby the respective line disclose in column 7 the fine chemical coenzyme Q10.

[78348] Accordingly, in one embodiment, the molecule which activity is to be increased in the process of the invention is the gene product with an activity as a “uroporphyrin-III C-methyltransferase”, preferably it is the molecule of section (a) or (b) of this paragraph.

[78349] In particular, it was observed that in plants, especially in Arabidopsis thaliana, increasing or generating the activity of a gene product plastidic with the activity of a “uroporphyrin-III C-methyltransferase”, preferably being encoded by a gene comprising the nucleic acid sequence SEQ ID NO. 84869, preferably the coding region thereof, conferred the production of or the increase in coenzyme Q10 compared with the wild type control.

[78350] The nucleic acid sequence of Sll1761 from Synechocystis sp., e.g. as shown in the respective line in column 5 of Table I, application no. 16, has been published in C. And the activity of the gene product thereof is the activity of sll1761-protein.

[78351] Accordingly, in one embodiment, the process of the present invention for producing coenzyme Q10 in a non-human organism, like a microorganism or a plant or a part thereof, comprises increasing or generating the activity of a gene product with the activity of a gene product conferring the activity of “sll1761-protein”, especially from Synechocystis sp. or its functional equivalent or its homolog, e.g. the increase of
[78352] (a) a gene product of a gene comprising the nucleic acid molecule as shown in the respective line in column 5 of Table I (whereby the respective line disclose in column 7 the fine chemical coenzyme Q10), application no. 16, preferably the coding region thereof, or a homolog or a fragment thereof, and being depicted in the same respective line as said Sll1761, or a functional equivalent or a homolog thereof as shown in column 8 of Table I, application no. 16, preferably the coding region thereof, particularly a homolog or functional equivalent as shown in column 8 of Table I B, application no. 16, and being depicted in the same respective line as said Sll1761, and preferably the activity is increased non-targeted, or
[78353] (b) a polypeptide comprising a polypeptide, a consensus sequence or at least a polypeptide motif as shown in the respective line in column 5 of Table II or in column 8 of Table IV, application no. 16, respectively, and being depicted in the same respective line as said Sll1761, or a functional equivalent or a homolog thereof as depicted in column 8 of Table II, application no. 16, preferably a homolog or functional equivalent as depicted in column 8 of Table II B, application no. 16, and being depicted in the same respective line as said Sll1761, and preferably the activity is increased non-targeted, whereby the respective line disclose in column 7 the fine chemical coenzyme Q10.

[78354] Accordingly, in one embodiment, the molecule which activity is to be increased in the process of the invention is the gene product with an activity as a “sll1761-protein”, preferably it is the molecule of section (a) or (b) of this paragraph.

[78355] In particular, it was observed that in plants, especially in Arabidopsis thaliana, increasing or generating the activity of a gene product non-targeted with the activity of a “sll1761-protein”, preferably being encoded by a gene comprising the nucleic acid sequence SEQ ID NO. 55379, preferably the coding region thereof, conferred the production of or the increase in coenzyme Q10 compared with the wild type control.

[78356] The nucleic acid sequence of Sll1761 from Synechocystis sp., e.g. as shown in the respective line in column 5 of Table I, application no. 16, has been published in C. And the activity of the gene product thereof is the activity of sll1761-protein.

[78357] Accordingly, in one embodiment, the process of the present invention for producing coenzyme Q9 in a non-human organism, like a microorganism or a plant or a part thereof, comprises increasing or generating the activity of a gene product with the activity of a gene product conferring the activity of “sll1761-protein”, especially from Synechocystis sp. or its functional equivalent or its homolog, e.g. the increase of
[78358] (a) a gene product of a gene comprising the nucleic acid molecule as shown in the respective line in column 5 of Table I (whereby the respective line disclose in column 7 the fine chemical coenzyme Q9), application no. 16, preferably the coding region thereof, or a homolog or a fragment thereof, and being depicted in the same respective line as said Sll1761, or a functional equivalent or a homolog thereof as shown in column 8 of Table I, application no. 16, preferably the coding region thereof, particularly a homolog or functional equivalent as shown in column 8 of Table I B, application no. 16, and being depicted in the same respective line as said Sll1761, and preferably the activity is increased non-targeted, or
[78359] (b) a polypeptide comprising a polypeptide, a consensus sequence or at least a polypeptide motif as shown in the respective line in column 5 of Table II or in column 8 of Table IV, application no. 16, respectively, and being depicted in the same respective line as said Sll1761, or a functional equivalent or a homolog thereof as depicted in column 8 of Table II, application no. 16, preferably a homolog or functional equivalent as depicted in column 8 of Table II B, application no. 16, and being depicted in the same respective line as said Sll1761, and preferably the activity is increased non-targeted, whereby the respective line disclose in column 7 the fine chemical coenzyme Q9.

[78360] Accordingly, in one embodiment, the molecule which activity is to be increased in the process of the invention is the gene product with an activity as a “sll1761-protein”, preferably it is the molecule of section (a) or (b) of this paragraph.

[78361] In particular, it was observed that in plants, especially in Arabidopsis thaliana, increasing or generating the activity of a gene product non-targeted with the activity of a “sll1761-protein”, preferably being encoded by a gene comprising the nucleic acid sequence SEQ ID NO. 55379, preferably the coding region thereof, conferred the production of or the increase in coenzyme Q9 compared with the wild type control.

[78362] The nucleic acid sequence of Sll1920 from Synechocystis sp., e.g. as shown in the respective line in column 5 of Table I, application no. 16, has been published in C. And the activity of the gene product thereof is the activity of cation-transporting ATPase.

[78363] Accordingly, in one embodiment, the process of the present invention for producing coenzyme Q9 in a non-human organism, like a microorganism or a plant or a part thereof, comprises increasing or generating the activity of a gene product with the activity of a gene product conferring the activity of “cation-transporting ATPase”, especially from Synechocystis sp. or its functional equivalent or its homolog, e.g. the increase of
[78364] (a) a gene product of a gene comprising the nucleic acid molecule as shown in the respective line in column 5 of Table I (whereby the respective line disclose in column 7 the fine chemical coenzyme Q9), application no. 16, preferably the coding region thereof, or a homolog or a fragment thereof, and being depicted in the same respective line as said Sll1920, or a functional equivalent or a homolog thereof as shown in column 8 of Table I, application no. 16, preferably the coding region thereof, particularly a homolog or functional equivalent as shown in column 8 of Table I B, application no. 16, and being depicted in the same respective line as said Sll1920, and preferably the activity is increased mitochondrial, or
[78365] (b) a polypeptide comprising a polypeptide, a consensus sequence or at least a polypeptide motif as shown in the respective line in column 5 of Table II or in column 8 of Table IV, application no. 16, respectively, and being depicted in the same respective line as said Sll1920, or a functional equivalent or a homolog thereof as depicted in column 8 of Table II, application no. 16, preferably a homolog or functional equivalent as depicted in column 8 of Table II B, application no. 16, and being depicted in the same respective line as said SI11920, and preferably the activity is increased mitochondrial, whereby the respective line disclose in column 7 the fine chemical coenzyme Q9.

[78366] Accordingly, in one embodiment, the molecule which activity is to be increased in the process of the invention is the gene product with an activity as a “cation-transporting ATPase”, preferably it is the molecule of section (a) or (b) of this paragraph.

[78367] In particular, it was observed that in plants, especially in Arabidopsis thaliana, increasing or generating the activity of a gene product mitochondrial with the activity of a “cation-transporting ATPase”, preferably being encoded by a gene comprising the nucleic acid sequence SEQ ID NO. 55385, preferably the coding region thereof, conferred the production of or the increase in coenzyme Q9 compared with the wild type control.

[78368] The nucleic acid sequence of Slr0338 from Synechocystis sp., e.g. as shown in the respective line in column 5 of Table I, application no. 16, has been published in C. And the activity of the gene product thereof is the activity of oxidoreductase.

[78369] Accordingly, in one embodiment, the process of the present invention for producing coenzyme Q9 in a non-human organism, like a microorganism or a plant or a part thereof, comprises increasing or generating the activity of a gene product with the activity of a gene product conferring the activity of “oxidoreductase”, especially from Synechocystis sp. or its functional equivalent or its homolog, e.g. the increase of
[78370] (a) a gene product of a gene comprising the nucleic acid molecule as shown in the respective line in column 5 of Table I (whereby the respective line disclose in column 7 the fine chemical coenzyme Q9), application no. 16, preferably the coding region thereof, or a homolog or a fragment thereof, and being depicted in the same respective line as said Slr0338, or a functional equivalent or a homolog thereof as shown in column 8 of Table I, application no. 16, preferably the coding region thereof, particularly a homolog or functional equivalent as shown in column 8 of Table I B, application no. 16, and being depicted in the same respective line as said Slr0338, and preferably the activity is increased non-targeted, or
[78371] (b) a polypeptide comprising a polypeptide, a consensus sequence or at least a polypeptide motif as shown in the respective line in column 5 of Table II or in column 8 of Table IV, application no. 16, respectively, and being depicted in the same respective line as said Slr0338, or a functional equivalent or a homolog thereof as depicted in column 8 of Table II, application no. 16, preferably a homolog or functional equivalent as depicted in column 8 of Table II B, application no. 16, and being depicted in the same respective line as said Slr0338, and preferably the activity is increased non-targeted, whereby the respective line disclose in column 7 the fine chemical coenzyme Q9.

[78372] Accordingly, in one embodiment, the molecule which activity is to be increased in the process of the invention is the gene product with an activity as a “oxidoreductase”, preferably it is the molecule of section (a) or (b) of this paragraph.

[78373] In particular, it was observed that in plants, especially in Arabidopsis thaliana, increasing or generating the activity of a gene product non-targeted with the activity of a “oxidoreductase”, preferably being encoded by a gene comprising the nucleic acid sequence SEQ ID NO. 11990, preferably the coding region thereof, conferred the production of or the increase in coenzyme Q9 compared with the wild type control.

[78374] The nucleic acid sequence of Slr0721 from Synechocystis sp., e.g. as shown in the respective line in column 5 of Table I, application no. 16, has been published in C. And the activity of the gene product thereof is the activity of malate dehydrogenase.

[78375] Accordingly, in one embodiment, the process of the present invention for producing coenzyme Q10 in a non-human organism, like a microorganism or a plant or a part thereof, comprises increasing or generating the activity of a gene product with the activity of a gene product conferring the activity of “malate dehydrogenase”, especially from Synechocystis sp. or its functional equivalent or its homolog, e.g. the increase of
[78376] (a) a gene product of a gene comprising the nucleic acid molecule as shown in the respective line in column 5 of Table I (whereby the respective line disclose in column 7 the fine chemical coenzyme Q10), application no. 16, preferably the coding region thereof, or a homolog or a fragment thereof, and being depicted in the same respective line as said Slr0721, or a functional equivalent or a homolog thereof as shown in column 8 of Table I, application no. 16, preferably the coding region thereof, particularly a homolog or functional equivalent as shown in column 8 of Table I B, application no. 16, and being depicted in the same respective line as said Slr0721, and preferably the activity is increased plastidic, or
[78377] (b) a polypeptide comprising a polypeptide, a consensus sequence or at least a polypeptide motif as shown in the respective line in column 5 of Table II or in column 8 of Table IV, application no. 16, respectively, and being depicted in the same respective line as said Slr0721, or a functional equivalent or a homolog thereof as depicted in column 8 of Table II, application no. 16, preferably a homolog or functional equivalent as depicted in column 8 of Table II B, application no. 16, and being depicted in the same respective line as said Slr0721, and preferably the activity is increased plastidic, whereby the respective line disclose in column 7 the fine chemical coenzyme Q10.

[78378] Accordingly, in one embodiment, the molecule which activity is to be increased in the process of the invention is the gene product with an activity as a “malate dehydrogenase”, preferably it is the molecule of section (a) or (b) of this paragraph.

[78379] In particular, it was observed that in plants, especially in Arabidopsis thaliana, increasing or generating the activity of a gene product plastidic with the activity of a “malate dehydrogenase”, preferably being encoded by a gene comprising the nucleic acid sequence SEQ ID NO. 87397, preferably the coding region thereof, conferred the production of or the increase in coenzyme Q10 compared with the wild type control.

[78380] The nucleic acid sequence of Slr0721 from Synechocystis sp., e.g. as shown in the respective line in column 5 of Table I, application no. 16, has been published in C. And the activity of the gene product thereof is the activity of malate dehydrogenase.

[78381] Accordingly, in one embodiment, the process of the present invention for producing coenzyme Q9 in a non-human organism, like a microorganism or a plant or a part thereof, comprises increasing or generating the activity of a gene product with the activity of a gene product conferring the activity of “malate dehydrogenase”, especially from Synechocystis sp. or its functional equivalent or its homolog, e.g. the increase of
[78382] (a) a gene product of a gene comprising the nucleic acid molecule as shown in the respective line in column 5 of Table I (whereby the respective line disclose in column 7 the fine chemical coenzyme Q9), application no. 16, preferably the coding region thereof, or a homolog or a fragment thereof, and being depicted in the same respective line as said Slr0721, or a functional equivalent or a homolog thereof as shown in column 8 of Table I, application no. 16, preferably the coding region thereof, particularly a homolog or functional equivalent as shown in column 8 of Table I B, application no. 16, and being depicted in the same respective line as said Slr0721, and preferably the activity is increased plastidic, or
[78383] (b) a polypeptide comprising a polypeptide, a consensus sequence or at least a polypeptide motif as shown in the respective line in column 5 of Table II or in column 8 of Table IV, application no. 16, respectively, and being depicted in the same respective line as said Slr0721, or a functional equivalent or a homolog thereof as depicted in column 8 of Table II, application no. 16, preferably a homolog or functional equivalent as depicted in column 8 of Table II B, application no. 16, and being depicted in the same respective line as said Slr0721, and preferably the activity is increased plastidic, whereby the respective line disclose in column 7 the fine chemical coenzyme Q9.

[78384] Accordingly, in one embodiment, the molecule which activity is to be increased in the process of the invention is the gene product with an activity as a “malate dehydrogenase”, preferably it is the molecule of section (a) or (b) of this paragraph.

[78385] In particular, it was observed that in plants, especially in Arabidopsis thaliana, increasing or generating the activity of a gene product plastidic with the activity of a “malate dehydrogenase”, preferably being encoded by a gene comprising the nucleic acid sequence SEQ ID NO. 87397, preferably the coding region thereof, conferred the production of or the increase in coenzyme Q9 compared with the wild type control.

[78386] The nucleic acid sequence of Slr0949 from Synechocystis sp., e.g. as shown in the respective line in column 5 of Table I, application no. 16, has been published in C. And the activity of the gene product thereof is the activity of permease protein of ABC transporter.

[78387] Accordingly, in one embodiment, the process of the present invention for producing coenzyme Q9 in a non-human organism, like a microorganism or a plant or a part thereof, comprises increasing or generating the activity of a gene product with the activity of a gene product conferring the activity of “permease protein of ABC transporter”, especially from Synechocystis sp. or its functional equivalent or its homolog, e.g. the increase of
[78388] (a) a gene product of a gene comprising the nucleic acid molecule as shown in the respective line in column 5 of Table I (whereby the respective line disclose in column 7 the fine chemical coenzyme Q9), application no. 16, preferably the coding region thereof, or a homolog or a fragment thereof, and being depicted in the same respective line as said Slr0949, or a functional equivalent or a homolog thereof as shown in column 8 of Table I, application no. 16, preferably the coding region thereof, particularly a homolog or functional equivalent as shown in column 8 of Table I B, application no. 16, and being depicted in the same respective line as said Slr0949, and preferably the activity is increased mitochondrial, or
[78389] (b) a polypeptide comprising a polypeptide, a consensus sequence or at least a polypeptide motif as shown in the respective line in column 5 of Table II or in column 8 of Table IV, application no. 16, respectively, and being depicted in the same respective line as said Slr0949, or a functional equivalent or a homolog thereof as depicted in column 8 of Table II, application no. 16, preferably a homolog or functional equivalent as depicted in column 8 of Table II B, application no. 16, and being depicted in the same respective line as said Slr0949, and preferably the activity is increased mitochondrial, whereby the respective line disclose in column 7 the fine chemical coenzyme Q9.

[78390] Accordingly, in one embodiment, the molecule which activity is to be increased in the process of the invention is the gene product with an activity as a “permease protein of ABC transporter”, preferably it is the molecule of section (a) or (b) of this paragraph.

[78391] In particular, it was observed that in plants, especially in Arabidopsis thaliana, increasing or generating the activity of a gene product mitochondrial with the activity of a “permease protein of ABC transporter”, preferably being encoded by a gene comprising the nucleic acid sequence SEQ ID NO. 119222, preferably the coding region thereof, conferred the production of or the increase in coenzyme Q9 compared with the wild type control.

[78392] The nucleic acid sequence of Slr1107 from Synechocystis sp., e.g. as shown in the respective line in column 5 of Table I, application no. 16, has been published in C. And the activity of the gene product thereof is the activity of slr1107-protein.

[78393] Accordingly, in one embodiment, the process of the present invention for producing coenzyme Q9 in a non-human organism, like a microorganism or a plant or a part thereof, comprises increasing or generating the activity of a gene product with the activity of a gene product conferring the activity of “slr1107-protein”, especially from Synechocystis sp. or its functional equivalent or its homolog, e.g. the increase of
[78394] (a) a gene product of a gene comprising the nucleic acid molecule as shown in the respective line in column 5 of Table I (whereby the respective line disclose in column 7 the fine chemical coenzyme Q9), application no. 16, preferably the coding region thereof, or a homolog or a fragment thereof, and being depicted in the same respective line as said Slr1107, or a functional equivalent or a homolog thereof as shown in column 8 of Table I, application no. 16, preferably the coding region thereof, particularly a homolog or functional equivalent as shown in column 8 of Table I B, application no. 16, and being depicted in the same respective line as said Slr1107, and preferably the activity is increased plastidic, or
[78395] (b) a polypeptide comprising a polypeptide, a consensus sequence or at least a polypeptide motif as shown in the respective line in column 5 of Table II or in column 8 of Table IV, application no. 16, respectively, and being depicted in the same respective line as said Slr1107, or a functional equivalent or a homolog thereof as depicted in column 8 of Table II, application no. 16, preferably a homolog or functional equivalent as depicted in column 8 of Table II B, application no. 16, and being depicted in the same respective line as said Slr1107, and preferably the activity is increased plastidic, whereby the respective line disclose in column 7 the fine chemical coenzyme Q9.

[78396] Accordingly, in one embodiment, the molecule which activity is to be increased in the process of the invention is the gene product with an activity as a “slr1107-protein”, preferably it is the molecule of section (a) or (b) of this paragraph.

[78397] In particular, it was observed that in plants, especially in Arabidopsis thaliana, increasing or generating the activity of a gene product plastidic with the activity of a “slr1107-protein”, preferably being encoded by a gene comprising the nucleic acid sequence SEQ ID NO. 101776, preferably the coding region thereof, conferred the production of or the increase in coenzyme Q9 compared with the wild type control.

[78398] The nucleic acid sequence of Slr1350 from Synechocystis sp., e.g. as shown in the respective line in column 5 of Table I, application no. 16, has been published in C. And the activity of the gene product thereof is the activity of fatty acid desaturase.

[78399] Accordingly, in one embodiment, the process of the present invention for producing coenzyme Q9 in a non-human organism, like a microorganism or a plant or a part thereof, comprises increasing or generating the activity of a gene product with the activity of a gene product conferring the activity of “fatty acid desaturase”, especially from Synechocystis sp. or its functional equivalent or its homolog, e.g. the increase of
[78400] (a) a gene product of a gene comprising the nucleic acid molecule as shown in the respective line in column 5 of Table I (whereby the respective line disclose in column 7 the fine chemical coenzyme Q9), application no. 16, preferably the coding region thereof, or a homolog or a fragment thereof, and being depicted in the same respective line as said Slr1350, or a functional equivalent or a homolog thereof as shown in column 8 of Table I, application no. 16, preferably the coding region thereof, particularly a homolog or functional equivalent as shown in column 8 of Table I B, application no. 16, and being depicted in the same respective line as said Slr1350, and preferably the activity is increased non-targeted, or
[78401] (b) a polypeptide comprising a polypeptide, a consensus sequence or at least a polypeptide motif as shown in the respective line in column 5 of Table II or in column 8 of Table IV, application no. 16, respectively, and being depicted in the same respective line as said Slr1350, or a functional equivalent or a homolog thereof as depicted in column 8 of Table II, application no. 16, preferably a homolog or functional equivalent as depicted in column 8 of Table II B, application no. 16, and being depicted in the same respective line as said Slr1350, and preferably the activity is increased non-targeted, whereby the respective line disclose in column 7 the fine chemical coenzyme Q9.

[78402] Accordingly, in one embodiment, the molecule which activity is to be increased in the process of the invention is the gene product with an activity as a “fatty acid desaturase”, preferably it is the molecule of section (a) or (b) of this paragraph.

[78403] In particular, it was observed that in plants, especially in Arabidopsis thaliana, increasing or generating the activity of a gene product non-targeted with the activity of a “fatty acid desaturase”, preferably being encoded by a gene comprising the nucleic acid sequence SEQ ID NO. 116713, preferably the coding region thereof, conferred the production of or the increase in coenzyme Q9 compared with the wild type control.

[78404] The nucleic acid sequence of Slr1739 from Synechocystis sp., e.g. as shown in the respective line in column 5 of Table I, application no. 16, has been published in C. And the activity of the gene product thereof is the activity of photosystem II protein.

[78405] Accordingly, in one embodiment, the process of the present invention for producing coenzyme Q9 in a non-human organism, like a microorganism or a plant or a part thereof, comprises increasing or generating the activity of a gene product with the activity of a gene product conferring the activity of “photosystem II protein”, especially from Synechocystis sp. or its functional equivalent or its homolog, e.g. the increase of
[78406] (a) a gene product of a gene comprising the nucleic acid molecule as shown in the respective line in column 5 of Table I (whereby the respective line disclose in column 7 the fine chemical coenzyme Q9), application no. 16, preferably the coding region thereof, or a homolog or a fragment thereof, and being depicted in the same respective line as said Slr1739, or a functional equivalent or a homolog thereof as shown in column 8 of Table I, application no. 16, preferably the coding region thereof, particularly a homolog or functional equivalent as shown in column 8 of Table I B, application no. 16, and being depicted in the same respective line as said Slr1739, and preferably the activity is increased plastidic, or
[78407] (b) a polypeptide comprising a polypeptide, a consensus sequence or at least a polypeptide motif as shown in the respective line in column 5 of Table II or in column 8 of Table IV, application no. 16, respectively, and being depicted in the same respective line as said Slr1739, or a functional equivalent or a homolog thereof as depicted in column 8 of Table II, application no. 16, preferably a homolog or functional equivalent as depicted in column 8 of Table II B, application no. 16, and being depicted in the same respective line as said Slr1739, and preferably the activity is increased plastidic, whereby the respective line disclose in column 7 the fine chemical coenzyme Q9.

[78408] Accordingly, in one embodiment, the molecule which activity is to be increased in the process of the invention is the gene product with an activity as a “photosystem II protein”, preferably it is the molecule of section (a) or (b) of this paragraph.

[78409] In particular, it was observed that in plants, especially in Arabidopsis thaliana, increasing or generating the activity of a gene product plastidic with the activity of a “photosystem II protein”, preferably being encoded by a gene comprising the nucleic acid sequence SEQ ID NO. 58731, preferably the coding region thereof, conferred the production of or the increase in coenzyme Q9 compared with the wild type control.

[78410] The nucleic acid sequence of Slr1742 from Synechocystis sp., e.g. as shown in the respective line in column 5 of Table I, application no. 16, has been published in C. And the activity of the gene product thereof is the activity of glutamine amidotransferase.

[78411] Accordingly, in one embodiment, the process of the present invention for producing coenzyme Q10 in a non-human organism, like a microorganism or a plant or a part thereof, comprises increasing or generating the activity of a gene product with the activity of a gene product conferring the activity of “glutamine amidotransferase”, especially from Synechocystis sp. or its functional equivalent or its homolog, e.g. the increase of
[78412] (a) a gene product of a gene comprising the nucleic acid molecule as shown in the respective line in column 5 of Table I (whereby the respective line disclose in column 7 the fine chemical coenzyme Q10), application no. 16, preferably the coding region thereof, or a homolog or a fragment thereof, and being depicted in the same respective line as said Slr1742, or a functional equivalent or a homolog thereof as shown in column 8 of Table I, application no. 16, preferably the coding region thereof, particularly a homolog or functional equivalent as shown in column 8 of Table I B, application no. 16, and being depicted in the same respective line as said Slr1742, and preferably the activity is increased mitochondrial, or
[78413] (b) a polypeptide comprising a polypeptide, a consensus sequence or at least a polypeptide motif as shown in the respective line in column 5 of Table II or in column 8 of Table IV, application no. 16, respectively, and being depicted in the same respective line as said Slr1742, or a functional equivalent or a homolog thereof as depicted in column 8 of Table II, application no. 16, preferably a homolog or functional equivalent as depicted in column 8 of Table II B, application no. 16, and being depicted in the same respective line as said Slr1742, and preferably the activity is increased mitochondrial, whereby the respective line disclose in column 7 the fine chemical coenzyme Q10.

[78414] Accordingly, in one embodiment, the molecule which activity is to be increased in the process of the invention is the gene product with an activity as a “glutamine amidotransferase”, preferably it is the molecule of section (a) or (b) of this paragraph.

[78415] In particular, it was observed that in plants, especially in Arabidopsis thaliana, increasing or generating the activity of a gene product mitochondrial with the activity of a “glutamine amidotransferase”, preferably being encoded by a gene comprising the nucleic acid sequence SEQ ID NO. 58751, preferably the coding region thereof, conferred the production of or the increase in coenzyme Q10 compared with the wild type control.

[78416] The nucleic acid sequence of Slr1755 from Synechocystis sp., e.g. as shown in the respective line in column 5 of Table I, application no. 16, has been published in C. And the activity of the gene product thereof is the activity of glycerol-3-phosphate dehydrogenase.

[78417] Accordingly, in one embodiment, the process of the present invention for producing coenzyme Q10 in a non-human organism, like a microorganism or a plant or a part thereof, comprises increasing or generating the activity of a gene product with the activity of a gene product conferring the activity of “glycerol-3-phosphate dehydrogenase”, especially from Synechocystis sp. or its functional equivalent or its homolog, e.g. the increase of
[78418] (a) a gene product of a gene comprising the nucleic acid molecule as shown in the respective line in column 5 of Table I (whereby the respective line disclose in column 7 the fine chemical coenzyme Q10), application no. 16, preferably the coding region thereof, or a homolog or a fragment thereof, and being depicted in the same respective line as said Slr1755, or a functional equivalent or a homolog thereof as shown in column 8 of Table I, application no. 16, preferably the coding region thereof, particularly a homolog or functional equivalent as shown in column 8 of Table I B, application no. 16, and being depicted in the same respective line as said Slr1755, and preferably the activity is increased plastidic, or
[78419] (b) a polypeptide comprising a polypeptide, a consensus sequence or at least a polypeptide motif as shown in the respective line in column 5 of Table II or in column 8 of Table IV, application no. 16, respectively, and being depicted in the same respective line as said Slr1755, or a functional equivalent or a homolog thereof as depicted in column 8 of Table II, application no. 16, preferably a homolog or functional equivalent as depicted in column 8 of Table II B, application no. 16, and being depicted in the same respective line as said Slr1755, and preferably the activity is increased plastidic, whereby the respective line disclose in column 7 the fine chemical coenzyme Q10.

[78420] Accordingly, in one embodiment, the molecule which activity is to be increased in the process of the invention is the gene product with an activity as a “glycerol-3-phosphate dehydrogenase”, preferably it is the molecule of section (a) or (b) of this paragraph.

[78421] In particular, it was observed that in plants, especially in Arabidopsis thaliana, increasing or generating the activity of a gene product plastidic with the activity of a “glycerol-3-phosphate dehydrogenase”, preferably being encoded by a gene comprising the nucleic acid sequence SEQ ID NO. 58823, preferably the coding region thereof, conferred the production of or the increase in coenzyme Q10 compared with the wild type control.

[78422] The nucleic acid sequence of Slr1755 from Synechocystis sp., e.g. as shown in the respective line in column 5 of Table I, application no. 16, has been published in C. And the activity of the gene product thereof is the activity of glycerol-3-phosphate dehydrogenase.

[78423] Accordingly, in one embodiment, the process of the present invention for producing coenzyme Q9 in a non-human organism, like a microorganism or a plant or a part thereof, comprises increasing or generating the activity of a gene product with the activity of a gene product conferring the activity of “glycerol-3-phosphate dehydrogenase”, especially from Synechocystis sp. or its functional equivalent or its homolog, e.g. the increase of
[78424] (a) a gene product of a gene comprising the nucleic acid molecule as shown in the respective line in column 5 of Table I (whereby the respective line disclose in column 7 the fine chemical coenzyme Q9), application no. 16, preferably the coding region thereof, or a homolog or a fragment thereof, and being depicted in the same respective line as said Slr1755, or a functional equivalent or a homolog thereof as shown in column 8 of Table I, application no. 16, preferably the coding region thereof, particularly a homolog or functional equivalent as shown in column 8 of Table I B, application no. 16, and being depicted in the same respective line as said Slr1755, and preferably the activity is increased plastidic, or
[78425] (b) a polypeptide comprising a polypeptide, a consensus sequence or at least a polypeptide motif as shown in the respective line in column 5 of Table II or in column 8 of Table IV, application no. 16, respectively, and being depicted in the same respective line as said Slr1755, or a functional equivalent or a homolog thereof as depicted in column 8 of Table II, application no. 16, preferably a homolog or functional equivalent as depicted in column 8 of Table II B, application no. 16, and being depicted in the same respective line as said Slr1755, and preferably the activity is increased plastidic, whereby the respective line disclose in column 7 the fine chemical coenzyme Q9.

[78426] Accordingly, in one embodiment, the molecule which activity is to be increased in the process of the invention is the gene product with an activity as a “glycerol-3-phosphate dehydrogenase”, preferably it is the molecule of section (a) or (b) of this paragraph.

[78427] In particular, it was observed that in plants, especially in Arabidopsis thaliana, increasing or generating the activity of a gene product plastidic with the activity of a “glycerol-3-phosphate dehydrogenase”, preferably being encoded by a gene comprising the nucleic acid sequence SEQ ID NO. 58823, preferably the coding region thereof, conferred the production of or the increase in coenzyme Q9 compared with the wild type control.

[78428] The nucleic acid sequence of TTC0019 from Thermus thermophilus, e.g. as shown in the respective line in column 5 of Table I, application no. 16, has been published in E. And the activity of the gene product thereof is the activity of Sec-independent protein translocase subunit.

[78429] Accordingly, in one embodiment, the process of the present invention for producing coenzyme Q9 in a non-human organism, like a microorganism or a plant or a part thereof, comprises increasing or generating the activity of a gene product with the activity of a gene product conferring the activity of “Sec-independent protein translocase subunit”, especially from Thermus thermophilus or its functional equivalent or its homolog, e.g. the increase of
[78430] (a) a gene product of a gene comprising the nucleic acid molecule as shown in the respective line in column 5 of Table I (whereby the respective line disclose in column 7 the fine chemical coenzyme Q9), application no. 16, preferably the coding region thereof, or a homolog or a fragment thereof, and being depicted in the same respective line as said TTC0019, or a functional equivalent or a homolog thereof as shown in column 8 of Table I, application no. 16, preferably the coding region thereof, particularly a homolog or functional equivalent as shown in column 8 of Table I B, application no. 16, and being depicted in the same respective line as said TTC0019, and preferably the activity is increased non-targeted, or
[78431] (b) a polypeptide comprising a polypeptide, a consensus sequence or at least a polypeptide motif as shown in the respective line in column 5 of Table II or in column 8 of Table IV, application no. 16, respectively, and being depicted in the same respective line as said TTC0019, or a functional equivalent or a homolog thereof as depicted in column 8 of Table II, application no. 16, preferably a homolog or functional equivalent as depicted in column 8 of Table II B, application no. 16, and being depicted in the same respective line as said TTC0019, and preferably the activity is increased non-targeted, whereby the respective line disclose in column 7 the fine chemical coenzyme Q9.

[78432] Accordingly, in one embodiment, the molecule which activity is to be increased in the process of the invention is the gene product with an activity as a “Sec-independent protein translocase subunit”, preferably it is the molecule of section (a) or (b) of this paragraph.

[78433] In particular, it was observed that in plants, especially in Arabidopsis thaliana, increasing or generating the activity of a gene product non-targeted with the activity of a “Sec-independent protein translocase subunit”, preferably being encoded by a gene comprising the nucleic acid sequence SEQ ID NO. 12698, preferably the coding region thereof, conferred the production of or the increase in coenzyme Q9 compared with the wild type control.

[78434] The nucleic acid sequence of TTC0337 from Thermus thermophilus, e.g. as shown in the respective line in column 5 of Table I, application no. 16, has been published in E. And the activity of the gene product thereof is the activity of amino acid ABC transporter permease protein.

[78435] Accordingly, in one embodiment, the process of the present invention for producing coenzyme Q10 in a non-human organism, like a microorganism or a plant or a part thereof, comprises increasing or generating the activity of a gene product with the activity of a gene product conferring the activity of “amino acid ABC transporter permease protein”, especially from Thermus thermophilus or its functional equivalent or its homolog, e.g. the increase of
[78436] (a) a gene product of a gene comprising the nucleic acid molecule as shown in the respective line in column 5 of Table I (whereby the respective line disclose in column 7 the fine chemical coenzyme Q10), application no. 16, preferably the coding region thereof, or a homolog or a fragment thereof, and being depicted in the same respective line as said TTC0337, or a functional equivalent or a homolog thereof as shown in column 8 of Table I, application no. 16, preferably the coding region thereof, particularly a homolog or functional equivalent as shown in column 8 of Table I B, application no. 16, and being depicted in the same respective line as said TTC0337, and preferably the activity is increased non-targeted, or
[78437] (b) a polypeptide comprising a polypeptide, a consensus sequence or at least a polypeptide motif as shown in the respective line in column 5 of Table II or in column 8 of Table IV, application no. 16, respectively, and being depicted in the same respective line as said TTC0337, or a functional equivalent or a homolog thereof as depicted in column 8 of Table II, application no. 16, preferably a homolog or functional equivalent as depicted in column 8 of Table II B, application no. 16, and being depicted in the same respective line as said TTC0337, and preferably the activity is increased non-targeted, whereby the respective line disclose in column 7 the fine chemical coenzyme Q10.

[78438] Accordingly, in one embodiment, the molecule which activity is to be increased in the process of the invention is the gene product with an activity as a “amino acid ABC transporter permease protein”, preferably it is the molecule of section (a) or (b) of this paragraph.

[78439] In particular, it was observed that in plants, especially in Arabidopsis thaliana, increasing or generating the activity of a gene product non-targeted with the activity of a “amino acid ABC transporter permease protein”, preferably being encoded by a gene comprising the nucleic acid sequence SEQ ID NO. 61070, preferably the coding region thereof, conferred the production of or the increase in coenzyme Q10 compared with the wild type control.

[78440] The nucleic acid sequence of TTC1193 from Thermus thermophilus, e.g. as shown in the respective line in column 5 of Table I, application no. 16, has been published in E. And the activity of the gene product thereof is the activity of multiple antibiotic resistance protein.

[78441] Accordingly, in one embodiment, the process of the present invention for producing coenzyme Q9 in a non-human organism, like a microorganism or a plant or a part thereof, comprises increasing or generating the activity of a gene product with the activity of a gene product conferring the activity of “multiple antibiotic resistance protein”, especially from Thermus thermophilus or its functional equivalent or its homolog, e.g. the increase of
[78442] (a) a gene product of a gene comprising the nucleic acid molecule as shown in the respective line in column 5 of Table I (whereby the respective line disclose in column 7 the fine chemical coenzyme Q9), application no. 16, preferably the coding region thereof, or a homolog or a fragment thereof, and being depicted in the same respective line as said TTC1193, or a functional equivalent or a homolog thereof as shown in column 8 of Table I, application no. 16, preferably the coding region thereof, particularly a homolog or functional equivalent as shown in column 8 of Table I B, application no. 16, and being depicted in the same respective line as said TTC1193, and preferably the activity is increased non-targeted, or
[78443] (b) a polypeptide comprising a polypeptide, a consensus sequence or at least a polypeptide motif as shown in the respective line in column 5 of Table II or in column 8 of Table IV, application no. 16, respectively, and being depicted in the same respective line as said TTC1193, or a functional equivalent or a homolog thereof as depicted in column 8 of Table II, application no. 16, preferably a homolog or functional equivalent as depicted in column 8 of Table II B, application no. 16, and being depicted in the same respective line as said TTC1193, and preferably the activity is increased non-targeted, whereby the respective line disclose in column 7 the fine chemical coenzyme Q9.

[78444] Accordingly, in one embodiment, the molecule which activity is to be increased in the process of the invention is the gene product with an activity as a “multiple antibiotic resistance protein”, preferably it is the molecule of section (a) or (b) of this paragraph.

[78445] In particular, it was observed that in plants, especially in Arabidopsis thaliana, increasing or generating the activity of a gene product non-targeted with the activity of a “multiple antibiotic resistance protein”, preferably being encoded by a gene comprising the nucleic acid sequence SEQ ID NO. 61723, preferably the coding region thereof, conferred the production of or the increase in coenzyme Q9 compared with the wild type control.

[78446] The nucleic acid sequence of TTC1386 from Thermus thermophilus, e.g. as shown in the respective line in column 5 of Table I, application no. 16, has been published in E. And the activity of the gene product thereof is the activity of TTC1386-protein.

[78447] Accordingly, in one embodiment, the process of the present invention for producing coenzyme Q9 in a non-human organism, like a microorganism or a plant or a part thereof, comprises increasing or generating the activity of a gene product with the activity of a gene product conferring the activity of “TTC1386-protein”, especially from Thermus thermophilus or its functional equivalent or its homolog, e.g. the increase of
[78448] (a) a gene product of a gene comprising the nucleic acid molecule as shown in the respective line in column 5 of Table I (whereby the respective line disclose in column 7 the fine chemical coenzyme Q9), application no. 16, preferably the coding region thereof, or a homolog or a fragment thereof, and being depicted in the same respective line as said TTC1386, or a functional equivalent or a homolog thereof as shown in column 8 of Table I, application no. 16, preferably the coding region thereof, particularly a homolog or functional equivalent as shown in column 8 of Table I B, application no. 16, and being depicted in the same respective line as said TTC1386, and preferably the activity is increased non-targeted, or
[78449] (b) a polypeptide comprising a polypeptide, a consensus sequence or at least a polypeptide motif as shown in the respective line in column 5 of Table II or in column 8 of Table IV, application no. 16, respectively, and being depicted in the same respective line as said TTC1386, or a functional equivalent or a homolog thereof as depicted in column 8 of Table II, application no. 16, preferably a homolog or functional equivalent as depicted in column 8 of Table II B, application no. 16, and being depicted in the same respective line as said TTC1386, and preferably the activity is increased non-targeted, whereby the respective line disclose in column 7 the fine chemical coenzyme Q9.

[78450] Accordingly, in one embodiment, the molecule which activity is to be increased in the process of the invention is the gene product with an activity as a “TTC1386-protein”, preferably it is the molecule of section (a) or (b) of this paragraph.

[78451] In particular, it was observed that in plants, especially in Arabidopsis thaliana, increasing or generating the activity of a gene product non-targeted with the activity of a “TTC1386-protein”, preferably being encoded by a gene comprising the nucleic acid sequence SEQ ID NO. 62079, preferably the coding region thereof, conferred the production of or the increase in coenzyme Q9 compared with the wild type control.

[78452] The nucleic acid sequence of Ybr160w from Saccharomyces cerevisiae, e.g. as shown in the respective line in column 5 of Table I, application no. 16, has been published in A. And the activity of the gene product thereof is the activity of cell division control protein.

[78453] Accordingly, in one embodiment, the process of the present invention for producing coenzyme Q9 in a non-human organism, like a microorganism or a plant or a part thereof, comprises increasing or generating the activity of a gene product with the activity of a gene product conferring the activity of “cell division control protein”, especially from Saccharomyces cerevisiae or its functional equivalent or its homolog, e.g. the increase of
[78454] (a) a gene product of a gene comprising the nucleic acid molecule as shown in the respective line in column 5 of Table I (whereby the respective line disclose in column 7 the fine chemical coenzyme Q9), application no. 16, preferably the coding region thereof, or a homolog or a fragment thereof, and being depicted in the same respective line as said Ybr160w, or a functional equivalent or a homolog thereof as shown in column 8 of Table I, application no. 16, preferably the coding region thereof, particularly a homolog or functional equivalent as shown in column 8 of Table I B, application no. 16, and being depicted in the same respective line as said Ybrl 60w, and preferably the activity is increased non-targeted, or
[78455] (b) a polypeptide comprising a polypeptide, a consensus sequence or at least a polypeptide motif as shown in the respective line in column 5 of Table II or in column 8 of Table IV, application no. 16, respectively, and being depicted in the same respective line as said Ybr160w, or a functional equivalent or a homolog thereof as depicted in column 8 of Table II, application no. 16, preferably a homolog or functional equivalent as depicted in column 8 of Table II B, application no. 16, and being depicted in the same respective line as said Ybr160w, and preferably the activity is increased non-targeted, whereby the respective line disclose in column 7 the fine chemical coenzyme Q9.

[78456] Accordingly, in one embodiment, the molecule which activity is to be increased in the process of the invention is the gene product with an activity as a “cell division control protein”, preferably it is the molecule of section (a) or (b) of this paragraph.

[78457] In particular, it was observed that in plants, especially in Arabidopsis thaliana, increasing or generating the activity of a gene product non-targeted with the activity of a “cell division control protein”, preferably being encoded by a gene comprising the nucleic acid sequence SEQ ID NO. 62717, preferably the coding region thereof, conferred the production of or the increase in coenzyme Q9 compared with the wild type control.

[78458] The nucleic acid sequence of Ycl027w from Saccharomyces cerevisiae, e.g. as shown in the respective line in column 5 of Table I, application no. 16, has been published in A. And the activity of the gene product thereof is the activity of ycl027w-protein.

[78459] Accordingly, in one embodiment, the process of the present invention for producing coenzyme Q10 in a non-human organism, like a microorganism or a plant or a part thereof, comprises increasing or generating the activity of a gene product with the activity of a gene product conferring the activity of “ycl027w-protein”, especially from Saccharomyces cerevisiae or its functional equivalent or its homolog, e.g. the increase of
[78460] (a) a gene product of a gene comprising the nucleic acid molecule as shown in the respective line in column 5 of Table I (whereby the respective line disclose in column 7 the fine chemical coenzyme Q10), application no. 16, preferably the coding region thereof, or a homolog or a fragment thereof, and being depicted in the same respective line as said Ycl027w, or a functional equivalent or a homolog thereof as shown in column 8 of Table I, application no. 16, preferably the coding region thereof, particularly a homolog or functional equivalent as shown in column 8 of Table I B, application no. 16, and being depicted in the same respective line as said Ycl027w, and preferably the activity is increased plastidic, or
[78461] (b) a polypeptide comprising a polypeptide, a consensus sequence or at least a polypeptide motif as shown in the respective line in column 5 of Table II or in column 8 of Table IV, application no. 16, respectively, and being depicted in the same respective line as said Ycl027w, or a functional equivalent or a homolog thereof as depicted in column 8 of Table II, application no. 16, preferably a homolog or functional equivalent as depicted in column 8 of Table II B, application no. 16, and being depicted in the same respective line as said Ycl027w, and preferably the activity is increased plastidic, whereby the respective line disclose in column 7 the fine chemical coenzyme Q10.

[78462] Accordingly, in one embodiment, the molecule which activity is to be increased in the process of the invention is the gene product with an activity as a “ycl027w-protein”, preferably it is the molecule of section (a) or (b) of this paragraph.

[78463] In particular, it was observed that in plants, especially in Arabidopsis thaliana, increasing or generating the activity of a gene product plastidic with the activity of a “ycl027w-protein”, preferably being encoded by a gene comprising the nucleic acid sequence SEQ ID NO. 96980, preferably the coding region thereof, conferred the production of or the increase in coenzyme Q10 compared with the wild type control.

[78464] The nucleic acid sequence of Ydl159w from Saccharomyces cerevisiae, e.g. as shown in the respective line in column 5 of Table I, application no. 16, has been published in A. And the activity of the gene product thereof is the activity of protein kinase.

[78465] Accordingly, in one embodiment, the process of the present invention for producing coenzyme Q9 in a non-human organism, like a microorganism or a plant or a part thereof, comprises increasing or generating the activity of a gene product with the activity of a gene product conferring the activity of “protein kinase”, especially from Saccharomyces cerevisiae or its functional equivalent or its homolog, e.g. the increase of
[78466] (a) a gene product of a gene comprising the nucleic acid molecule as shown in the respective line in column 5 of Table I (whereby the respective line disclose in column 7 the fine chemical coenzyme Q9), application no. 16, preferably the coding region thereof, or a homolog or a fragment thereof, and being depicted in the same respective line as said Ydl159w, or a functional equivalent or a homolog thereof as shown in column 8 of Table I, application no. 16, preferably the coding region thereof, particularly a homolog or functional equivalent as shown in column 8 of Table I B, application no. 16, and being depicted in the same respective line as said Ydl159w, and preferably the activity is increased plastidic, or
[78467] (b) a polypeptide comprising a polypeptide, a consensus sequence or at least a polypeptide motif as shown in the respective line in column 5 of Table II or in column 8 of Table IV, application no. 16, respectively, and being depicted in the same respective line as said Ydl159w, or a functional equivalent or a homolog thereof as depicted in column 8 of Table II, application no. 16, preferably a homolog or functional equivalent as depicted in column 8 of Table II B, application no. 16, and being depicted in the same respective line as said Ydl159w, and preferably the activity is increased plastidic, whereby the respective line disclose in column 7 the fine chemical coenzyme Q9.

[78468] Accordingly, in one embodiment, the molecule which activity is to be increased in the process of the invention is the gene product with an activity as a “protein kinase”, preferably it is the molecule of section (a) or (b) of this paragraph.

[78469] In particular, it was observed that in plants, especially in Arabidopsis thaliana, increasing or generating the activity of a gene product plastidic with the activity of a “protein kinase”, preferably being encoded by a gene comprising the nucleic acid sequence SEQ ID NO. 14275, preferably the coding region thereof, conferred the production of or the increase in coenzyme Q9 compared with the wild type control.

[78470] The nucleic acid sequence of Ykr072c from Saccharomyces cerevisiae, e.g. as shown in the respective line in column 5 of Table I, application no. 16, has been published in A. And the activity of the gene product thereof is the activity of halotolerance protein.

[78471] Accordingly, in one embodiment, the process of the present invention for producing coenzyme Q9 in a non-human organism, like a microorganism or a plant or a part thereof, comprises increasing or generating the activity of a gene product with the activity of a gene product conferring the activity of “halotolerance protein”, especially from Saccharomyces cerevisiae or its functional equivalent or its homolog, e.g. the increase of
[78472] (a) a gene product of a gene comprising the nucleic acid molecule as shown in the respective line in column 5 of Table I (whereby the respective line disclose in column 7 the fine chemical coenzyme Q9), application no. 16, preferably the coding region thereof, or a homolog or a fragment thereof, and being depicted in the same respective line as said Ykr072c, or a functional equivalent or a homolog thereof as shown in column 8 of Table I, application no. 16, preferably the coding region thereof, particularly a homolog or functional equivalent as shown in column 8 of Table I B, application no. 16, and being depicted in the same respective line as said Ykr072c, and preferably the activity is increased non-targeted, or
[78473] (b) a polypeptide comprising a polypeptide, a consensus sequence or at least a polypeptide motif as shown in the respective line in column 5 of Table II or in column 8 of Table IV, application no. 16, respectively, and being depicted in the same respective line as said Ykr072c, or a functional equivalent or a homolog thereof as depicted in column 8 of Table II, application no. 16, preferably a homolog or functional equivalent as depicted in column 8 of Table II B, application no. 16, and being depicted in the same respective line as said Ykr072c, and preferably the activity is increased non-targeted, whereby the respective line disclose in column 7 the fine chemical coenzyme Q9.

[78474] Accordingly, in one embodiment, the molecule which activity is to be increased in the process of the invention is the gene product with an activity as a “halotolerance protein”, preferably it is the molecule of section (a) or (b) of this paragraph.

[78475] In particular, it was observed that in plants, especially in Arabidopsis thaliana, increasing or generating the activity of a gene product non-targeted with the activity of a “halotolerance protein”, preferably being encoded by a gene comprising the nucleic acid sequence SEQ ID NO. 130903, preferably the coding region thereof, conferred the production of or the increase in coenzyme Q9 compared with the wild type control.

[78476] The nucleic acid sequence of Ykr089c from Saccharomyces cerevisiae, e.g. as shown in the respective line in column 5 of Table I, application no. 16, has been published in A. And the activity of the gene product thereof is the activity of lipase.

[78477] Accordingly, in one embodiment, the process of the present invention for producing nicotinic acid in a non-human organism, like a microorganism or a plant or a part thereof, comprises increasing or generating the activity of a gene product with the activity of a gene product conferring the activity of “lipase”, especially from Saccharomyces cerevisiae or its functional equivalent or its homolog, e.g. the increase of
[78478] (a) a gene product of a gene comprising the nucleic acid molecule as shown in the respective line in column 5 of Table I (whereby the respective line disclose in column 7 the fine chemical nicotinic acid), application no. 16, preferably the coding region thereof, or a homolog or a fragment thereof, and being depicted in the same respective line as said Ykr089c, or a functional equivalent or a homolog thereof as shown in column 8 of Table I, application no. 16, preferably the coding region thereof, particularly a homolog or functional equivalent as shown in column 8 of Table I B, application no. 16, and being depicted in the same respective line as said Ykr089c, and preferably the activity is increased non-targeted, or
[78479] (b) a polypeptide comprising a polypeptide, a consensus sequence or at least a polypeptide motif as shown in the respective line in column 5 of Table II or in column 8 of Table IV, application no. 16, respectively, and being depicted in the same respective line as said Ykr089c, or a functional equivalent or a homolog thereof as depicted in column 8 of Table II, application no. 16, preferably a homolog or functional equivalent as depicted in column 8 of Table II B, application no. 16, and being depicted in the same respective line as said Ykr089c, and preferably the activity is increased non-targeted, whereby the respective line disclose in column 7 the fine chemical nicotinic acid.

[78480] Accordingly, in one embodiment, the molecule which activity is to be increased in the process of the invention is the gene product with an activity as a “lipase”, preferably it is the molecule of section (a) or (b) of this paragraph.

[78481] In particular, it was observed that in plants, especially in Arabidopsis thaliana, increasing or generating the activity of a gene product non-targeted with the activity of a “lipase”, preferably being encoded by a gene comprising the nucleic acid sequence SEQ ID NO. 102061, preferably the coding region thereof, conferred the production of or the increase in nicotinic acid compared with the wild type control.

[78482] The nucleic acid sequence of Ynl007c from Saccharomyces cerevisiae, e.g. as shown in the respective line in column 5 of Table I, application no. 16, has been published in A. And the activity of the gene product thereof is the activity of heat shock protein Hsp40.

[78483] Accordingly, in one embodiment, the process of the present invention for producing coenzyme Q10 in a non-human organism, like a microorganism or a plant or a part thereof, comprises increasing or generating the activity of a gene product with the activity of a gene product conferring the activity of “heat shock protein Hsp40”, especially from Saccharomyces cerevisiae or its functional equivalent or its homolog, e.g. the increase of
[78484] (a) a gene product of a gene comprising the nucleic acid molecule as shown in the respective line in column 5 of Table I (whereby the respective line disclose in column 7 the fine chemical coenzyme Q10), application no. 16, preferably the coding region thereof, or a homolog or a fragment thereof, and being depicted in the same respective line as said Ynl007c, or a functional equivalent or a homolog thereof as shown in column 8 of Table I, application no. 16, preferably the coding region thereof, particularly a homolog or functional equivalent as shown in column 8 of Table I B, application no. 16, and being depicted in the same respective line as said Ynl007c, and preferably the activity is increased non-targeted, or
[78485] (b) a polypeptide comprising a polypeptide, a consensus sequence or at least a polypeptide motif as shown in the respective line in column 5 of Table II or in column 8 of Table IV, application no. 16, respectively, and being depicted in the same respective line as said Ynl007c, or a functional equivalent or a homolog thereof as depicted in column 8 of Table II, application no. 16, preferably a homolog or functional equivalent as depicted in column 8 of Table II B, application no. 16, and being depicted in the same respective line as said Ynl007c, and preferably the activity is increased non-targeted, whereby the respective line disclose in column 7 the fine chemical coenzyme Q10.

[78486] Accordingly, in one embodiment, the molecule which activity is to be increased in the process of the invention is the gene product with an activity as a “heat shock protein Hsp40”, preferably it is the molecule of section (a) or (b) of this paragraph.

[78487] In particular, it was observed that in plants, especially in Arabidopsis thaliana, increasing or generating the activity of a gene product non-targeted with the activity of a “heat shock protein Hsp40”, preferably being encoded by a gene comprising the nucleic acid sequence SEQ ID NO. 139173, preferably the coding region thereof, conferred the production of or the increase in coenzyme Q10 compared with the wild type control.

[78488] The nucleic acid sequence of Ynl007c from Saccharomyces cerevisiae, e.g. as shown in the respective line in column 5 of Table I, application no. 16, has been published in A. And the activity of the gene product thereof is the activity of heat shock protein Hsp40.

[78489] Accordingly, in one embodiment, the process of the present invention for producing coenzyme Q9 in a non-human organism, like a microorganism or a plant or a part thereof, comprises increasing or generating the activity of a gene product with the activity of a gene product conferring the activity of “heat shock protein Hsp40”, especially from Saccharomyces cerevisiae or its functional equivalent or its homolog, e.g. the increase of
[78490] (a) a gene product of a gene comprising the nucleic acid molecule as shown in the respective line in column 5 of Table I (whereby the respective line disclose in column 7 the fine chemical coenzyme Q9), application no. 16, preferably the coding region thereof, or a homolog or a fragment thereof, and being depicted in the same respective line as said Ynl007c, or a functional equivalent or a homolog thereof as shown in column 8 of Table I, application no. 16, preferably the coding region thereof, particularly a homolog or functional equivalent as shown in column 8 of Table I B, application no. 16, and being depicted in the same respective line as said Ynl007c, and preferably the activity is increased non-targeted, or
[78491] (b) a polypeptide comprising a polypeptide, a consensus sequence or at least a polypeptide motif as shown in the respective line in column 5 of Table II or in column 8 of Table IV, application no. 16, respectively, and being depicted in the same respective line as said Ynl007c, or a functional equivalent or a homolog thereof as depicted in column 8 of Table II, application no. 16, preferably a homolog or functional equivalent as depicted in column 8 of Table II B, application no. 16, and being depicted in the same respective line as said Ynl007c, and preferably the activity is increased non-targeted, whereby the respective line disclose in column 7 the fine chemical coenzyme Q9.

[78492] Accordingly, in one embodiment, the molecule which activity is to be increased in the process of the invention is the gene product with an activity as a “heat shock protein Hsp40”, preferably it is the molecule of section (a) or (b) of this paragraph.

[78493] In particular, it was observed that in plants, especially in Arabidopsis thaliana, increasing or generating the activity of a gene product non-targeted with the activity of a “heat shock protein Hsp40”, preferably being encoded by a gene comprising the nucleic acid sequence SEQ ID NO. 139173, preferably the coding region thereof, conferred the production of or the increase in coenzyme Q9 compared with the wild type control.

[78494] The nucleic acid sequence of Yor244w from Saccharomyces cerevisiae, e.g. as shown in the respective line in column 5 of Table I, application no. 16, has been published in A. And the activity of the gene product thereof is the activity of histone acetyltransferase.

[78495] Accordingly, in one embodiment, the process of the present invention for producing coenzyme Q9 in a non-human organism, like a microorganism or a plant or a part thereof, comprises increasing or generating the activity of a gene product with the activity of a gene product conferring the activity of “histone acetyltransferase”, especially from Saccharomyces cerevisiae or its functional equivalent or its homolog, e.g. the increase of
[78496] (a) a gene product of a gene comprising the nucleic acid molecule as shown in the respective line in column 5 of Table I (whereby the respective line disclose in column 7 the fine chemical coenzyme Q9), application no. 16, preferably the coding region thereof, or a homolog or a fragment thereof, and being depicted in the same respective line as said Yor244w, or a functional equivalent or a homolog thereof as shown in column 8 of Table I, application no. 16, preferably the coding region thereof, particularly a homolog or functional equivalent as shown in column 8 of Table I B, application no. 16, and being depicted in the same respective line as said Yor244w, and preferably the activity is increased plastidic, or
[78497] (b) a polypeptide comprising a polypeptide, a consensus sequence or at least a polypeptide motif as shown in the respective line in column 5 of Table II or in column 8 of Table IV, application no. 16, respectively, and being depicted in the same respective line as said Yor244w, or a functional equivalent or a homolog thereof as depicted in column 8 of Table II, application no. 16, preferably a homolog or functional equivalent as depicted in column 8 of Table II B, application no. 16, and being depicted in the same respective line as said Yor244w, and preferably the activity is increased plastidic, whereby the respective line disclose in column 7 the fine chemical coenzyme Q9.

[78498] Accordingly, in one embodiment, the molecule which activity is to be increased in the process of the invention is the gene product with an activity as a “histone acetyltransferase”, preferably it is the molecule of section (a) or (b) of this paragraph.

[78499] In particular, it was observed that in plants, especially in Arabidopsis thaliana, increasing or generating the activity of a gene product plastidic with the activity of a “histone acetyltransferase”, preferably being encoded by a gene comprising the nucleic acid sequence SEQ ID NO. 92540, preferably the coding region thereof, conferred the production of or the increase in coenzyme Q9 compared with the wild type control.

[78500] The nucleic acid sequence of Ypr054w from Saccharomyces cerevisiae, e.g. as shown in the respective line in column 5 of Table I, application no. 16, has been published in A. And the activity of the gene product thereof is the activity of mitogen-activated protein kinase.

[78501] Accordingly, in one embodiment, the process of the present invention for producing coenzyme Q10 in a non-human organism, like a microorganism or a plant or a part thereof, comprises increasing or generating the activity of a gene product with the activity of a gene product conferring the activity of “mitogen-activated protein kinase”, especially from Saccharomyces cerevisiae or its functional equivalent or its homolog, e.g. the increase of
[78502] (a) a gene product of a gene comprising the nucleic acid molecule as shown in the respective line in column 5 of Table I (whereby the respective line disclose in column 7 the fine chemical coenzyme Q10), application no. 16, preferably the coding region thereof, or a homolog or a fragment thereof, and being depicted in the same respective line as said Ypr054w, or a functional equivalent or a homolog thereof as shown in column 8 of Table I, application no. 16, preferably the coding region thereof, particularly a homolog or functional equivalent as shown in column 8 of Table I B, application no. 16, and being depicted in the same respective line as said Ypr054w, and preferably the activity is increased non-targeted, or
[78503] (b) a polypeptide comprising a polypeptide, a consensus sequence or at least a polypeptide motif as shown in the respective line in column 5 of Table II or in column 8 of Table IV, application no. 16, respectively, and being depicted in the same respective line as said Ypr054w, or a functional equivalent or a homolog thereof as depicted in column 8 of Table II, application no. 16, preferably a homolog or functional equivalent as depicted in column 8 of Table II B, application no. 16, and being depicted in the same respective line as said Ypr054w, and preferably the activity is increased non-targeted, whereby the respective line disclose in column 7 the fine chemical coenzyme Q10.

[78504] Accordingly, in one embodiment, the molecule which activity is to be increased in the process of the invention is the gene product with an activity as a “mitogen-activated protein kinase”, preferably it is the molecule of section (a) or (b) of this paragraph.

[78505] In particular, it was observed that in plants, especially in Arabidopsis thaliana, increasing or generating the activity of a gene product non-targeted with the activity of a “mitogen-activated protein kinase”, preferably being encoded by a gene comprising the nucleic acid sequence SEQ ID NO. 140110, preferably the coding region thereof, conferred the production of or the increase in coenzyme Q10 compared with the wild type control.

[78506] The nucleic acid sequence of ZM06LC1143 from Zea mays, e.g. as shown in the respective line in column 5 of Table I, application no. 16, is unpublished. And the activity of the gene product thereof is the activity of phosphopantothenoylcysteine decarboxylase.

[78507] Accordingly, in one embodiment, the process of the present invention for producing coenzyme Q10 in a non-human organism, like a microorganism or a plant or a part thereof, comprises increasing or generating the activity of a gene product with the activity of a gene product conferring the activity of “phosphopantothenoylcysteine decarboxylase”, especially from Zea mays or its functional equivalent or its homolog, e.g. the increase of
[78508] (a) a gene product of a gene comprising the nucleic acid molecule as shown in the respective line in column 5 of Table I (whereby the respective line disclose in column 7 the fine chemical coenzyme Q10), application no. 16, preferably the coding region thereof, or a homolog or a fragment thereof, and being depicted in the same respective line as said ZM06LC1143, or a functional equivalent or a homolog thereof as shown in column 8 of Table I, application no. 16, preferably the coding region thereof, particularly a homolog or functional equivalent as shown in column 8 of Table I B, application no. 16, and being depicted in the same respective line as said ZM06LC1143, and preferably the activity is increased non-targeted, or
[78509] (b) a polypeptide comprising a polypeptide, a consensus sequence or at least a polypeptide motif as shown in the respective line in column 5 of Table II or in column 8 of Table IV, application no. 16, respectively, and being depicted in the same respective line as said ZM06LC1143, or a functional equivalent or a homolog thereof as depicted in column 8 of Table II, application no. 16, preferably a homolog or functional equivalent as depicted in column 8 of Table II B, application no. 16, and being depicted in the same respective line as said ZM06LC1143, and preferably the activity is increased non-targeted, whereby the respective line disclose in column 7 the fine chemical coenzyme Q10.

[78510] Accordingly, in one embodiment, the molecule which activity is to be increased in the process of the invention is the gene product with an activity as a “phosphopantothenoylcysteine decarboxylase”, preferably it is the molecule of section (a) or (b) of this paragraph.

[78511] In particular, it was observed that in plants, especially in Arabidopsis thaliana, increasing or generating the activity of a gene product non-targeted with the activity of a “phosphopantothenoylcysteine decarboxylase”, preferably being encoded by a gene comprising the nucleic acid sequence SEQ ID NO. 68132, preferably the coding region thereof, conferred the production of or the increase in coenzyme Q10 compared with the wild type control.

[78512] [0105.1.7.16] to [0107.1.7.16] for the disclosure of these paragraphs see [0105.1.7.7] to [0107.1.7.7] above

[78513] A protein having an activity conferring an increase in the amount or level of the fine chemical coenzyme Q10, coenzyme Q9, lipoic acid, or nicotinic acid, upon targeting to the plastids or mitochondria or upon non-targeting, preferably has the structure of the respective polypeptide described herein, in particular of the polypeptides comprising the consensus sequence or at least one polypeptide motifs as shown in the respective line in Table IV, application no. 16, column 8 or of the polypeptide comprising an amino acid sequence as disclosed in the respective line in Table II, application no. 16, columns 5 or 8, or homologs or fragments thereof as described herein, or is encoded by the nucleic acid molecule characterized herein or the nucleic acid molecule according to the invention, for example by the nucleic acid molecule as shown in the respective line in Table I, application no. 16, columns 5 or 8, preferably the coding region thereof, or homologs or fragments thereof and has the herein mentioned activity.

[78514] for the disclosure of this paragraph see [0109.1.7.7] above

[78515] for the disclosure of this paragraph see [0110.1.7.7] above

[78516] In one embodiment, the process of the present invention comprises one or more of the following steps
[78517] (a) stabilizing a protein conferring the generation or increased expression of a protein encoded by the nucleic acid molecule of the invention or of the polypeptide of the invention, e.g. of a polypeptide having the activity selected from the group consisting of 2-C-methyl-D-erythritol 4-phosphate cytidylyltransferase, acetolactate synthase III large subunit, acetyltransferase, acid shock protein, amino acid ABC transporter permease protein, amino acid acetyltransferase, At1g47380-protein, ATP synthase subunit E, ATP-binding component of a transport system, auxin response factor, AX653549-protein, AY087308-protein, b1003-protein, b1097-protein, b1522-protein, b2032-protein, b2739-protein, b2849-protein, b3817-protein, b4029-protein, beta-galactosidase, calcium-dependent protein kinase, cation-transporting ATPase, CCAAT-binding transcription factor, cell division control protein, colanic acid biosynthesis protein, CTP synthase, cyclin D , disease resistance protein, enoyl-CoA hydratase, fatty acid desaturase, F-box protein, flavodoxin, gluconate transport system permease 3, glutamine amidotransferase, glutaredoxin, glycerol dehydrogenase, glycerol-3-phosphate dehydrogenase, glycosyl transferase, halotolerance protein, heat shock protein Hsp40, heat shock transcription factor, histone acetyltransferase, hydrolase, isopropylmalate isomerase large subunit, L-aspartate oxidase, lipase, MADS box protein transcription factor, malate dehydrogenase, methylglyoxal synthase, methyltransferase, mitogen-activated protein kinase, monothiol glutaredoxin, multiple antibiotic resistance protein, N-acetyl-gamma-glutamylphosphate reductase, NADH dehydrogenase I chain I, oxidoreductase, permease protein of ABC transporter, phenylalanine ammonia-lyase, phosphoadenosine phosphosulfate reductase, phosphopantothenoylcysteine decarboxylase, photosystem II protein, protein kinase, protein phosphatase, pyruvate kinase, recombinase A, Ribose import ATP-binding protein, Sec-independent protein translocase subunit, serine protease, serine/threonine-protein phosphatase, sll1761-protein, slr1107-protein, sterol desaturase, threonine synthase, transcription factor, transcriptional regulator, TTC1386-protein, uroporphyrin-III C-methyltransferase, ycl027w-protein, zinc finger protein, and zinc transporter, or of a polypeptide as indicated in the respective line in Table II, application no. 16, columns 5 or 8, or its homologs or fragments, and conferring the production of or an increase in coenzyme Q10, coenzyme Q9, lipoic acid, or nicotinic acid, respectively; and/or
[78518] (b) stabilizing a mRNA conferring the generation or increased expression of a FCRP, e.g. protein encoded by the nucleic acid molecule of the invention or its homologs or fragments, or of a mRNA encoding the polypeptide of the present invention having the hereinmentioned activity selected from the group consisting of said activities mentioned in (a) and conferring the production of or an increase in coenzyme Q10, coenzyme Q9, lipoic acid, or nicotinic acid, respectively; and/or
[78519] (c) increasing the specific activity of a protein conferring the increased expression of a FCRP, e.g. a protein encoded by the nucleic acid molecule of the invention or of the polypeptide of the present invention having herein-mentioned coenzyme Q10, coenzyme Q9, lipoic acid, or nicotinic acid generating or increasing activity, respectively, e.g. of a polypeptide having the activity of a protein as indicated in the respective line in Table II, application no. 16, columns 5 or 8, or its homologs or fragments, or decreasing the inhibitory regulation of the polypeptide of the invention; and/or
[78520] (d) generating or increasing the expression of an endogenous or artificial transcription factor mediating the expression of a protein conferring the generation or increased expression of a FCRP, e.g. a protein encoded by the nucleic acid molecule of the invention or of the polypeptide of the invention having herein-mentioned activity selected from the group consisting of said activities mentioned in (a) and conferring a coenzyme Q10, coenzyme Q9, lipoic acid, or nicotinic acid increasing activity, respectively, e.g. of a polypeptide having the activity of a protein as indicated in the respective line in Table II, application no. 16, columns 5 or 8 or its homologs; and/or
[78521] (e) stimulating activity of a protein conferring the increased expression of a FCRP, e.g. a protein encoded by the nucleic acid molecule of the present invention or a polypeptide of the present invention having herein-mentioned activity selected from the group consisting of said activities mentioned in (a) and conferring a coenzyme Q10, coenzyme Q9, lipoic acid, or nicotinic acid increasing activity, respectively, e.g. of a polypeptide having the activity of a protein as indicated in the respective line in Table II, application no. 16, columns 5 or 8, or its homologs or fragments, by adding one or more exogenous inducing factors to the non-human organism or parts thereof; and/or
[78522] (f) expressing a transgenic gene encoding a protein conferring the increased expression of a FCRP, e.g. a polypeptide encoded by the nucleic acid molecule of the present invention or a polypeptide of the present invention, having herein-mentioned activity selected from the group consisting of said activities mentioned in (a) and conferring a coenzyme Q10, coenzyme Q9, lipoic acid, or nicotinic acid increasing activity, respectively, e.g. of a polypeptide having the activity of a protein as indicated in the respective line in Table II, application no. 16, columns 5 or 8, or its homologs or fragments, and/or
[78523] (g) increasing the copy number of a gene conferring the increased expression of a nucleic acid molecule encoding a FCRP, e.g. a polypeptide encoded by the nucleic acid molecule of the invention or the polypeptide of the invention having herein-mentioned activity selected from the group consisting of said activities mentioned in (a) and conferring a coenzyme Q10, coenzyme Q9, lipoic acid, or nicotinic acid increasing activity, respectively, e.g. of a polypeptide having the activity of a protein as indicated in the respective line in Table II, application no. 16, columns 5 or 8, or its homologs or fragments; and/or
[78524] (h) increasing the expression of the endogenous gene encoding the FCRP, polypeptide of the invention, e.g. a polypeptide encoded by the nucleic acid molecule of the invention or the polypeptide of the invention having herein-mentioned activity selected from the group consisting of said activities mentioned in (a) and conferring a coenzyme Q10, coenzyme Q9, lipoic acid, or nicotinic acid; increasing activity, respectively, e.g. of a polypeptide having the activity of a protein as indicated in the respective line in Table II, application no. 16, columns 5 or 8, or its homologs or fragments, by adding positive expression or removing negative expression elements, e.g. homologous recombination can be used to either introduce positive regulatory elements like for plants the 35S enhancer into the promoter or to remove repressor elements form regulatory regions. Further gene conversion methods can be used to disrupt repressor elements or to enhance to activity of positive elements. Positive elements can be randomly introduced in plants by T-DNA or transposon mutagenesis and lines can be identified in which the positive elements have be integrated near to a gene of the invention, the expression of which is thereby enhanced; and/or
[78525] (i) modulating growth conditions of the non-human organism in such a manner, that the expression or activity of the gene encoding the FCRP, e.g. a protein of the invention or the protein itself is enhanced, for example microorganisms or plants can be grown for example under a higher temperature regime leading to an enhanced expression of heat shock proteins, which can lead to an enhanced coenzyme Q10, coenzyme Q9, lipoic acid, or nicotinic acid production, respectively; and/or
[78526] (j) selecting of non-human organisms with especially high activity of the proteins of the invention from natural or from mutagenized resources and breeding them into the target organisms, e.g. the elite crops; and/or
[78527] (k) directing a protein encoded by the nucleic acid molecule of the invention or of the polypeptide of the present invention having herein-mentioned activity selected from the group consisting of said activities mentioned in (a) and conferring a coenzyme Q10, coenzyme Q9, lipoic acid, or nicotinic acid increasing activity, respectively, e.g. of a polypeptide having the activity of a protein as indicated in the respective line in Table II, application no. 16, columns 5 or 8, or its homologs or fragments, if for the corresponding nucleic acid molecule in the respective line in column 6 of Table I the term “plastidic” is indicated, to the plastids by the addition of a plastidial targeting sequence or if for the corresponding nucleic acid molecule in the respective line in column 6 of Table I the term “mitochondric” is indicated, to the mitochondria by the addition of a mitochondrial targeting sequence; and/or
[78528] (l) generating the expression of a protein encoded by the nucleic acid molecule of the invention or of the polypeptide of the present invention having herein-mentioned activity selected from the group consisting of said activities mentioned in (a) and conferring a coenzyme Q10, coenzyme Q9, lipoic acid, or nicotinic acid increasing activity, respectively, e.g. of a polypeptide having the activity of a protein as indicated in the respective line in Table II, application no. 16, columns 5 or 8, or its homologs or fragments, if for the corresponding nucleic acid molecule in the respective line in column 6 of Table I the term “plastidic” or “mitochondric” is indicated, in these organelles by the stable or transient transformation, advantageously stable transformation, of organelles, preferably plastids or mitochondria, with an inventive nucleic acid sequence preferably in form of an expression cassette containing said sequence leading to the expression of the nucleic acids or polypeptides of the invention in the respective organelle; and/or
[78529] (m) generating the expression of a protein encoded by the nucleic acid molecule of the invention or of the polypeptide of the present invention having herein-mentioned activity selected from the group consisting of said activities mentioned in (a) and conferring a coenzyme Q10, coenzyme Q9, lipoic acid, and/or nicotinic acid increasing activity, respectively, e.g. of a polypeptide having the activity of a protein as indicated in the respective line in Table II, application no. 16, columns 5 or 8, or its homologs or fragments, if for the corresponding nucleic acid molecule in the respective line in column 6 of Table I the term “plastidic” or “mitochondric” is indicated, in these organelles by integration of a nucleic acid of the invention into the genome of the respective organelle under control of preferable a promoter selective for the respective organelle.

[78530] Preferably, said mRNA is the coding region of the nucleic acid molecule of the present invention and/or the protein conferring the increased expression of a protein encoded by the coding region of the nucleic acid molecule of the present invention alone or linked to a transit nucleic acid sequence or transit peptide encoding nucleic acid sequence or the polypeptide having the herein mentioned activity, e.g. conferring the generation of or increase of coenzyme Q10, coenzyme Q9, lipoic acid, or nicotinic acid, respectively, after increasing the expression or activity of the encoded polypeptide, non-targeted or in organelles such as plastids and/or mitochondria, preferably plastids, or having the activity of a polypeptide having an activity as the protein as shown in the respective line in Table II, application no. 16, column 3, or its homologs. Preferably the increase of coenzyme 010, coenzyme Q9, lipoic acid, or nicotinic acid, respectively, takes place non-targeted or in plastids and/or mitochondria, preferably non-targeted or in plastids.

[78531] [0113.1.7.16] to [0122.1.7.16] for the disclosure of these paragraphs see [0113.1.7.7] to [0122.1.7.7] above

[78532] The activation of an endogenous polypeptide having above-mentioned activity, e.g. having the activity of a protein as shown in the respective line in Table II, application no. 16, column 3 or of the polypeptide of the invention, e.g. conferring the increase of the fine chemical coenzyme Q10, coenzyme Q9, lipoic acid, or nicotinic acid, respectively, by increase of expression or activity in the cytoplasm, and/or in the cytosol, and/or in an organelle, such as plastids or mitochondria, can also be increased by introducing a synthetic transcription factor, which binds close to the coding region of the gene encoding the protein as shown in the respective line in Table II, application no. 16, column 5 or 8, or homologs or fragments thereof, and activates its transcription. A chimeric zinc finger protein can be constructed, which comprises a specific DNA-binding domain and an activation domain as e.g. the VP16 domain of Herpes Simplex virus. The specific binding domain can bind to the regulatory region of the gene encoding the protein as shown in the respective line in Table II, application no. 16, column 5 or 8, or homologs or fragments thereof. The expression of the chimeric transcription factor in a non-human organism, in particular in a plant, leads to a specific expression of the protein as shown in the respective line in Table II, application no. 16, column 5 or 8, or homologs or fragments thereof, see e.g. in WO01/52620, Oriz, Proc. Natl. Acad. Sci. USA 99, 13290 (2002), or Guan, Proc. Natl. Acad. Sci. USA 99, 13296 (2002).

[78533] [0124.1.7.16] to [0127.1.7.16] for the disclosure of these paragraphs see [0124.1.7.7] to [0127.1.7.7] above

[78534] Owing to the introduction of a gene or a plurality of genes conferring the expression of the nucleic acid molecule of the invention or the polypeptide of the invention, for example the nucleic acid construct mentioned below, or encoding the protein as shown in the respective line in Table II, application no. 16, column 5 or 8, or homologs or fragments thereof, into a non-human organism alone or in combination with other genes, it is possible not only to increase the biosynthetic flux towards the end product, but also to increase, modify or create de novo an advantageous, preferably novel metabolites composition in the non-human organism, e.g. an advantageous composition comprising a higher content of (from a viewpoint of nutritional physiology limited) coenzyme Q10, coenzyme Q9, lipoic acid, or nicotinic acid and if desired other cofactors, and/or other metabolites, in free or bound form.

[78535] for the disclosure of this paragraph see [0129.1.7.7] above

[78536] Accordingly, in one embodiment, the process according to the invention relates to a process, which comprises:
[78537] (a) providing a non-human organism, preferably a microorganism, a plant cell, a plant tissue, a plant or a part thereof, more preferably a microorganism, a plant tissue, a plant or a part thereof;
[78538] (b) increasing the activity of a protein as shown in the respective line in Table II, application no. 16, column 3 or of a polypeptide being encoded by the respective nucleic acid molecule of the present invention and described below, e.g. conferring an increase of the fine chemical coenzyme Q10, coenzyme Q9, lipoic acid, or nicotinic acid, respectively, in the non-human organism, preferably in the microorganism, the plant cell, the plant tissue, the plant or a part thereof, more preferably a microorganism, a plant tissue, a plant or a part thereof, especially cytoplasmic or in an organelle, like plastids or mitochondria,
[78539] (c) growing the non-human organism, preferably the microorganism, the plant cell, the plant tissue, the plant or a part thereof, under conditions which permit the production of said chemical in the non-human organism, preferably the microorganism, the plant cell, the plant tissue, the plant or a part thereof; and
[78540] (d) if desired, recovering, optionally isolating, said fine chemical, in free and/or bound form, and, optionally further free and/or bound cofactors, and/or other metabolites synthesized by the non-human organism, the microorganism, the plant cell, the plant tissue, the plant or a part thereof.

[78541] [0131.1.7.16] to [0133.1.7.16] for the disclosure of these paragraphs see [0131.1.7.7] to [0133.1.7.7] above

[78542] The non-human organism, in particular the microorganism, plant or part thereof, is advantageously grown in such a way that it is not only possible to recover, if desired to isolate the free or bound fine chemical or the free and bound fine chemical but as option it is also possible to produce, recover and, if desired to isolate, other free or/and bound vitamins and/or other metabolites.

[78543] The organisms are harvested in a manner known per se and appropriate for the particular organism. Microorganisms such as bacteria, mosses, yeasts and fungi or plant cells which are cultured in liquid media by fermentation may be removed, for example, by centrifugation, decanting or filtration. Plants are grown on solid media in a manner known per se and harvested accordingly.

[78544] The organisms, its cells or a part thereof or the recovered, and if desired isolated, cofactors, in particular coenzyme Q10, coenzyme Q9, lipoic acid, and/or nicotinic acid, and/or protein(s) such as enzyme(s), containing coenzyme 010, coenzyme Q9, lipoic acid, and/or nicotinic acid can then be processed further directly into foodstuffs or animal feeds or for other applications, for example according to the disclosures made in WO/2005/083093 or WO2005/012316, which are expressly incorporated herein by reference.

[78545] The essentially chemically pure cofactors comprising compositions, in particular the essentially pure coenzyme Q10, coenzyme Q9, lipoic acid, and/or nicotinic acid and/or protein(s) such as enzyme(s) containing coenzyme Q10, coenzyme Q9, lipoic acid, and/or nicotinic acid and/or coenzyme Q10, coenzyme Q9, lipoic acid, and/or nicotinic acid comprising compositions, are advantageous for applications in the field of the food industry, the cosmetics industry or the pharmaceutical industry. Said compositions can be combined with other fine chemicals, e.g. nutrients or food or feed additives, such as fatty acids, vitamins, provitamins, antioxidants, carotenoids, amino acids, trace elements etc.

[78546] The organism, in particular the microorganism, non-human animal, the plant or animal cell, the plant or animal tissue or the plant is advantageously grown in such a way that it is not only possible to recover, if desired isolate the free or bound the fine chemical or the free and bound the fine chemical but as option it is also possible to produce, recover and, if desired isolate, other free or/and bound cofactors such as Coenzyme Q0 to Q8, and/or trigonelleine resp. or mixtures thereof.

[78547] The organism such as microorganisms or plants or the recovered, and if desired isolated, fine chemical can then be processed further directly into foodstuffs or animal feeds or for other applications, for example according to the disclosures made in the following US patent publications:

[78548] U.S. Pat. No. 6,232,346: Composition for improvement of cellular nutrition and mitochondrial energetics, U.S. Pat. No. 6,228,347: Antioxidant gel for gingival conditions, U.S. Pat. No. 6,203,818: Nutritional supplement for cardiovascular health, U.S. Pat. No. 6,200,550: Oral care compositions comprising coenzyme Q10, US 6,191,172: Water-soluble compositions of bioactive lipophilic compounds , U.S. Pat. No. 6,184,255: Pharmaceutical composition comprising coenzyme Q10, U.S. Pat. No. 6,080,788: Composition for improvement of cellular nutrition and mitochondrial energetics, U.S. Pat. No. 6,069,167: Use of antioxidant agents to treat cholestatic liver disease, U.S. Pat. No. 6,063,820: Medical food for diabetics, U.S. Pat. No. 6,054,261: Coenzyme Q.sub.10 compositions for organ protection during perfusion, U.S. Pat. No. 6,051,250: Process for the stabilization of vesicles of amphiphilic lipid(s) and composition for topical application containing the said stabilized vesicles.

[78549] [0135.1.7.16] to [0139.1.7.16] for the disclosure of these paragraphs see [0135.1.7.7] to [0139.1.7.7] above

[78550] In another embodiment, the invention relates to a (isolated) nucleic acid molecule, which comprises a nucleic acid molecule selected from the group consisting of:
[78551] (a) a nucleic acid molecule encoding a polypeptide shown in Table II, application no. 16, column 5 or 8, preferably shown in Table II B, application no. 16, column 8, or a homolog or a fragment thereof;
[78552] (b) a nucleic acid molecule shown in Table I, application no. 16, column 5 or 8, preferably shown in Table I B, application no. 16, column 8, preferably the coding region thereof, or a homolog or a fragment thereof;
[78553] (c) a nucleic acid molecule, which, as a result of the degeneracy of the genetic code, can be derived from a polypeptide sequence depicted in column 5 or 8 of Table II, application no. 16, preferably in column 8 of Table II B, application no. 16;
[78554] (d) a nucleic acid molecule having at least 30% identity, preferably at least 40%, 50%, 60%, 70%, 75%, 80%, 85%, 90%, 95%, 96%, 97%, 98%, 99%, 99.5%, with the nucleic acid molecule sequence of a polynucleotide comprising the nucleic acid molecule shown in column 5 or 8 of Table I, application no. 16, preferably shown in column 8 of Table I B, application no. 16, preferably the coding region thereof;
[78555] (e) a nucleic acid molecule encoding a polypeptide having at least 30% identity, preferably at least 40%, 50% 60%, 70%, 75%, 80%, 85%, 90%, 95%, 96%, 97%, 98%, 99%, 99.5%, identity with the amino acid sequence of the polypeptide encoded by the nucleic acid molecule of (a), (b), (c) or (d);
[78556] (f) a nucleic acid molecule which hybridizes with a nucleic acid molecule of (a), (b), (c), (d) or (e) under stringent hybridization conditions;
[78557] (g) a nucleic acid molecule encoding a polypeptide which can be isolated with the aid of monoclonal or polyclonal antibodies made against a polypeptide encoded by one of the nucleic acid molecules of (a), (b), (c), (d), (e) or (f);
[78558] (h) a nucleic acid molecule encoding a polypeptide comprising the consensus sequence or one or more polypeptide motifs as shown in column 8 of Table IV, application no. 16;
[78559] (i) a nucleic acid molecule encoding a polypeptide having the activity represented by a respective protein as depicted in column 5 of Table II, application no. 16;
[78560] (j) a nucleic acid molecule comprising a polynucleotide which is obtained by amplifying a cDNA library or a genomic library using the primers in Table III, application no. 16, column 8;
[78561] and
[78562] (k) nucleic acid molecule which is obtainable by screening a suitable nucleic acid library, especially a cDNA library and/or a genomic library, under stringent hybridization conditions with a probe comprising one of the sequences of the nucleic acid molecule of (a), (b), (c), (d), (e), (f), (g), (h), (i) or (j) or with a fragment of at least 15 nt, preferably 20 nt, 30 nt, 50 nt, 100 nt, 200 nt,500 nt, 1000 nt, 1500 nt, 2000 nt or 3000 nt of the nucleic acid molecule characterized in (a), (b), (c), (d), (e), (f), (g), (h), (i) or (j);
[78563] or a nucleic acid molecule comprising a sequence which is complementary thereto.
   (All the references to Tables I to IV are references to the corresponding lines of Tables I to IV.)

[78564] In a preferred embodiment thereof said nucleic acid molecule according to (a), (b), (c), (d), (e), (f), (g), (h), (i), (j) or (k) encodes a polypeptide which has the activity of the respective polypeptide represented by a protein comprising a polypeptide as depicted in the respective line in column 5 of Table II, application no. 16.

[78565] In another preferred embodiment thereof said nucleic acid molecule according to (a), (b), (c), (d), (e), (f), (g), (h), (i), (j) or (k) confers a generation or an increase of the respective fine chemical in a non-human organism or a part thereof as compared to a corresponding wild-type non-human organism or part thereof.

[78566] In another preferred embodiment thereof said nucleic acid molecule according to (a), (b), (c), (d), (e), (f), (g), (h), (i), (j) or (k) encodes a polypeptide which has the activity of the respective polypeptide represented by a protein as depicted in the respective line in column 5 of Table II application no. 16 and confers a generation or an increase of the respective fine chemical in a non-human organism or a part thereof as compared to a corresponding wild-type non-human organism or part thereof.

[78567] In another embodiment, the invention relates to a (isolated) nucleic acid molecule, which comprises a nucleic acid molecule selected from the group consisting of:
[78568] (a) a nucleic acid molecule encoding a polypeptide shown in Table II, column 5 or 8, application no. 16, preferably shown in Table II A, application no. 16, in column 5 or in Table II A, application no. 16, column 8 or in Table II B, application no. 16, column 8, or a homolog or a fragment thereof;
[78569] (b) a nucleic acid molecule shown in Table I, application no. 16, column 5 or 8, preferably shown in Table I A, application no. 16, in column 5 or in Table I A, application no. 16, column 8 or in Table I B, application no. 16, column 8, preferably the coding region thereof, or a homolog or a fragment thereof;
[78570] (c) a nucleic acid molecule, which, as a result of the degeneracy of the genetic code, can be derived from a polypeptide sequence depicted in column 5 or 8 of Table II, application no. 16, preferably shown in Table II A, application no. 16, in column 5 or in Table II A, application no. 16, column 8 or in Table II B, application no. 16, column 8;
[78571] (d) a nucleic acid molecule having at least 30% identity, preferably at least 40%, 50%, 60%, 70%, 75%, 80%, 85%, 90%, 95%, 96%, 97%, 98%, 99%, 99.5%, with the nucleic acid molecule sequence of a polynucleotide comprising the nucleic acid molecule shown in column 5 or 8 of Table I, application no. 16, preferably shown in Table I A, application no. 16, in column 5 or in Table I A, application no. 16, column 8 or in Table I B column 8, preferably the coding region thereof;
[78572] (e) a nucleic acid molecule encoding a polypeptide having at least 30% identity, preferably at least 40%, 50% 60%, 70%, 75%, 80%, 85%, 90%, 95%, 96%, 97%, 98%, 99%, 99.5%, identity with the amino acid sequence of the polypeptide encoded by the nucleic acid molecule of (a), (b), (c) or (d);
[78573] (f) a nucleic acid molecule which hybridizes with a nucleic acid molecule of (a), (b), (c), (d) or (e) under stringent hybridization conditions;
[78574] (g) a nucleic acid molecule encoding a polypeptide which can be isolated with the aid of monoclonal or polyclonal antibodies made against a polypeptide encoded by one of the nucleic acid molecules of (a), (b), (c), (d), (e) or (f);
[78575] (h) a nucleic acid molecule encoding a polypeptide comprising the consensus sequence or one or more polypeptide motifs as shown in column 8 of Table IV, application no. 16;
[78576] (i) a nucleic acid molecule encoding a polypeptide having the activity represented by a respective protein as depicted in column 5 of Table II, application no. 16;
[78577] (j) a nucleic acid molecule comprising a polynucleotide which is obtained by amplifying a cDNA library or a genomic library using the primers in Table III, application no. 16, column 8;
[78578] and
[78579] (k) nucleic acid molecule which is obtainable by screening a suitable nucleic acid library, especially a cDNA library and/or a genomic library, under stringent hybridization conditions with a probe comprising one of the sequences of the nucleic acid molecule of (a), (b), (c), (d), (e), (f), (g), (h), (i) or (j) or with a fragment thereof having at least 15 nt, preferably 20 nt, 30 nt, 50 nt, 100 nt, 200 nt,500 nt, 1000 nt, 1500 nt, 2000 nt or 3000 nt of the nucleic acid molecule complementary to a nucleic acid sequence characterized in (a), (b), (c), (d), (e), (f), (g), (h), (i) or (j);
[78580] or a nucleic acid molecule comprising a sequence which is complementary thereto;
   whereby, preferably, the nucleic acid molecule according to (a), (b), (c), (d), (e), (f), (g), (h), (i), (j) or (k) distinguishes over the sequence depicted in Table I A and/or I B, application no. 16, column 5 or 8, or the coding regions thereof, by one or more nucleotides (especially but not exceeding 5%, preferably 4%, 3%, 2%, 1%, 0.5%, 0.2% or 0.1%). In an embodiment, the nucleic acid molecule of the invention does not consist of the sequence shown in Table I A and/or I B, application no. 16, column 5 or 8, or the coding region thereof. In another embodiment, the nucleic acid molecule of the present invention, preferably the coding region thereof, is at least 30%, 40%, 50%, 60%, 70%, 80%, 90%, 95% identical but less than 100%, 99.999%, 99.99%, 99.9%, 99%, 98%, 97%, 96% or 95% identical to the sequence shown in Table I A and/or I B, application no. 16, column 5 or 8, or the coding region thereof, respectively. In a further embodiment the nucleic acid molecule does not encode the polypeptide sequence shown in Table II A and/or II B, application no. 16, column 5 or 8 but homologs thereof. Accordingly, in one embodiment, the nucleic acid molecule of the present invention encodes in one embodiment a polypeptide which differs at least in one or more amino acids (especially but not exceeding 5%, preferably 4%, 3%, 2%, 1%, 0.5%, 0.2% or 0.1%) from the polypeptide shown in Table II, application no. 16, column 5 or 8 and does not encode a protein of the sequence shown in Table II A and/or II B, application no. 16, column 5 or 8. Accordingly, in one embodiment, the protein encoded by a sequence of a nucleic acid according to (a), (b), (c), (d), (e), (f), (g), (h), (i), (j) or (k) does not consist of the sequence shown in Table I A and/or I B, application no. 16, column 5 or 8, or the coding region thereof. In a further embodiment, the protein of the present invention is at least 30%, 40%, 50%, 60%, 70%, 80%, 90%, 95% identical to protein sequence depicted in Table II A and/or II B, application no. 16, column 5 or 8 but less than 100%, preferably less than 99.999%, 99.99%, 99.9%, 99%, 98%, 97%, 96% or 95% identical to the sequence shown in Table II A and/or II B, application no. 16, column 5 or 8.
   (All the references to Tables I to IV are references to the corresponding lines of Tables I to IV.)

[78581] In a preferred embodiment thereof said nucleic acid molecule according to (a), (b), (c), (d), (e), (f), (g), (h), (i), (j) or (k) encodes a polypeptide which has the activity of the respective polypeptide represented by a protein comprising a polypeptide as depicted in the respective line in column 5 of Table II, application no. 16.

[78582] In another preferred embodiment thereof said nucleic acid molecule according to (a), (b), (c), (d), (e), (f), (g), (h), (i), (j) or (k) confers a generation or an increase of the respective fine chemical in a non-human organism or a part thereof as compared to a corresponding wild-type non-human organism or part thereof.

[78583] In another preferred embodiment thereof said nucleic acid molecule according to (a), (b), (c), (d), (e), (f), (g), (h), (i), (j) or (k) encodes a polypeptide which has the activity of the respective polypeptide represented by a protein as depicted in the respective line in column 5 of Table II, application no. 16, and confers a generation or an increase of the respective fine chemical in a non-human organism or a part thereof as compared to a corresponding wild-type non-human organism or part thereof.

[78584] [0144.1.7.16] to [0155.1.7.16] for the disclosure of these paragraphs see [0144.1.7.7] to [0155.1.7.7] above

[78585] In a preferred embodiment a nucleic acid construct, for example an expression cassette, comprises upstream, i.e. at the 5′ end of the encoding sequence, a promoter and downstream, i.e. at the 3′ end, a polyadenylation signal and optionally other regulatory elements which are operably linked to the intervening encoding sequence with one of the nucleic acids as depicted in the respective line in Table I, application no. 16, column 5 or 8, preferably the coding region thereof, or a homolog or a fragment thereof. By an operable linkage is meant the sequential arrangement of promoter, encoding sequence, terminator, optionally other regulatory elements and optionally targeting sequences in such a way that each of the regulatory elements/targeting sequence can fulfill its function in the expression of the encoding sequence in due manner. In one embodiment the sequences preferred for operable linkage are targeting sequences for ensuring subcellular localization in organelles, like plastids or mitochondria.

[78586] However, targeting sequences for ensuring subcellular localization in the endoplasmic reticulum (=ER), in the nucleus, in oil corpuscles or other compartments may also be employed as well as translation promoters such as the 5′ lead sequence in tobacco mosaic virus (Gallie et al., Nucl. Acids Res. 15, 8693 (1987)).

[78587] for the disclosure of this paragraph see [0157.1.7.7] above

[78588] In an embodiment, the invention relates to an expression cassette, comprising
[78589] 1) a promoter, preferably a promoter selected from the group consisting of Big35S, PCUbi, Super and USP;
[78590] 2) a nucleic acid molecule selected from the group consisting of
   [78591] (a) a nucleic acid molecule encoding a polypeptide shown in Table II, application no. 16, column 5 or 8, preferably shown in Table II A, application no. 16, column 5, or in Table II A, application no. 16, column 8, or in Table II B, application no. 16, column 8, or a homolog or a fragment thereof;
   [78592] (b) a nucleic acid molecule shown in Table I, application no. 16, column 5 or 8, preferably shown in Table I A, application no. 16, column 5, or in Table I A, application no. 16, column 8, or in Table I B, application no. 16, column 8, preferably the coding region thereof, or a homolog or a fragment thereof;
   [78593] (c) a nucleic acid molecule, which, as a result of the degeneracy of the genetic code, can be derived from a polypeptide sequence depicted in column 5 or 8 of Table II, application no. 16, preferably shown in Table II A, application no. 16, column 5, or in Table II A, application no. 16, column 8, or in Table II B, application no. 16, column 8;
   [78594] (d) a nucleic acid molecule having at least 30% identity, preferably at least 40%, 50%, 60%, 70%, 75%, 80%, 85%, 90%, 95%, 96%, 97%, 98%, 99%, 99.5%, with the nucleic acid molecule sequence of a polynucleotide comprising the nucleic acid molecule shown in column 5 or 8 of Table I, application no. 16, preferably shown in Table I A, application no. 16, column 5, or in Table I A, application no. 16, column 8, or in Table I B, application no. 16, column 8, preferably the coding region thereof;
   [78595] (e) a nucleic acid molecule encoding a polypeptide having at least 30% identity, preferably at least 40%, 50% 60%, 70%, 75%, 80%, 85%, 90%, 95%, 96%, 97%, 98%, 99%, 99.5%, identity with the amino acid sequence of the polypeptide encoded by the nucleic acid molecule of (a), (b), (c) or (d);
   [78596] (f) a nucleic acid molecule which hybridizes with a nucleic acid molecule of (a), (b), (c), (d) or (e) under stringent hybridization conditions;
   [78597] (g) a nucleic acid molecule encoding a polypeptide which can be isolated with the aid of monoclonal or polyclonal antibodies made against a polypeptide encoded by one of the nucleic acid molecules of (a), (b), (c), (d), (e) or (f);
   [78598] (h) a nucleic acid molecule encoding a polypeptide comprising the consensus sequence or one or more polypeptide motifs as shown in column 8 of Table IV, application no. 16;
   [78599] (i) a nucleic acid molecule encoding a polypeptide having the activity represented by a respective protein as depicted in column 5 of Table II, application no. 16;
   [78600] (j) a nucleic acid molecule comprising a polynucleotide which is obtained by amplifying a cDNA library or a genomic library using the primers in Table III, application no. 16, column 8;
   [78601] and
   [78602] (k) nucleic acid molecule which is obtainable by screening a suitable nucleic acid library, especially a cDNA library and/or a genomic library, under stringent hybridization conditions with a probe comprising one of the sequences of the nucleic acid molecule of (a), (b), (c), (d), (e), (f), (g), (h), (i) or (j) or with a fragment of at least 15 nt, preferably 20 nt, 30 nt, 50 nt, 100 nt, 200 nt,500 nt, 1000 nt, 1500 nt, 2000 nt or 3000 nt of the nucleic acid molecule characterized in (a), (b), (c), (d), (e), (f), (g), (h), (i) or (j);
   [78603] or a nucleic acid molecule comprising a sequence which is complementary thereto. and, optionally
[78604] 3) nucleic acid molecule encoding a transit peptide, preferably encoding a plastidal transit peptide or a mitochondrial transit peptide; which are operable linked.
   (All the references to Tables I to IV are references to the corresponding lines of Tables I to IV.)

[78605] In a preferred embodiment thereof said nucleic acid molecule according to 2 (a), (b), (c), (d), (e), (f), (g), (h), (i), (j) or (k) encodes a polypeptide which has the activity of the respective polypeptide represented by a protein comprising a polypeptide as depicted in the respective line in column 5 of Table II, application no. 16.

[78606] In another preferred embodiment thereof said nucleic acid molecule according to 2 (a), (b), (c), (d), (e), (f), (g), (h), (i), (j) or (k) confers a generation or an increase of the respective fine chemical in a non-human organism or a part thereof as compared to a corresponding wild-type non-human organism or part thereof.

[78607] In another preferred embodiment thereof said nucleic acid molecule according to 2 (a), (b), (c), (d), (e), (f), (g), (h), (i), (j) or (k) encodes a polypeptide which has the activity of the respective polypeptide represented by a protein as depicted in the respective line in column 5 of Table II application no. 16 and confers a generation or an increase of the respective fine chemical in a non-human organism or a part thereof as compared to a corresponding wild-type non-human organism or part thereof.

[78608] In another embodiment thereof the expression cassette comprises 3) a nucleic acid molecule encoding a transit peptide, preferably encoding a plastidal transit peptide, especially in case in column 6 of Table I, application no. 16, in the same line as of the respective nucleic acid molecule according to 2) “plastidic” is depicted, or encoding a mitochondrial transit peptide, especially in case in column 6 of Table I, application no. 16, in the same line as of the respective nucleic acid molecule according to 2) “mitochondric” is depicted.

[78609] In another embodiment thereof the expression cassette does not comprise 3) a nucleic acid molecule encoding a transit peptide, especially in case in column 6 of Table I, application no. 16, in the same line as of the respective nucleic acid molecule according to 2) “non-targeted” is depicted.

[78610] In a further embodiment, the invention relates to an expression cassette, comprising
[78611] 1) a promoter, preferably a promoter selected from the group consisting of Big35S, PCUbi, Super and USP;
[78612] 2) a nucleic acid molecule selected from the group consisting of
   [78613] (a) a nucleic acid molecule encoding a polypeptide shown in Table II, application no. 16, column 5 or 8, preferably shown in Table II A, application no. 16, column 5, or in Table II A, application no. 16, column 8, or in Table II B, application no. 16, column 8, or a homolog or a fragment thereof;
   [78614] (b) a nucleic acid molecule shown in Table I, application no. 16, column 5 or 8, preferably shown in Table I A, application no. 16, column 5, or in Table I A, application no. 16, column 8, or in Table I B, application no. 16, column 8, preferably the coding region thereof, or a homolog or a fragment thereof;
   [78615] (c) a nucleic acid molecule, which, as a result of the degeneracy of the genetic code, can be derived from a polypeptide sequence depicted in column 5 or 8 of Table II, application no. 16, preferably shown in Table II A, application no. 16, column 5, or in Table II A, application no. 16, column 8, or in Table II B, application no. 16, column 8;
   [78616] (d) a nucleic acid molecule having at least 30% identity, preferably at least 40%, 50%, 60%, 70%, 75%, 80%, 85%, 90%, 95%, 96%, 97%, 98%, 99%, 99.5%, with the nucleic acid molecule sequence of a polynucleotide comprising the nucleic acid molecule shown in column 5 or 8 of Table I, application no. 16, preferably shown in Table I A, application no. 16, column 5, or in Table I A, application no. 16, column 8, or in Table I B, application no. 16, column 8, preferably the coding region thereof;
   [78617] (e) a nucleic acid molecule encoding a polypeptide having at least 30% identity, preferably at least 40%, 50% 60%, 70%, 75%, 80%, 85%, 90%, 95%, 96%, 97%, 98%, 99%, 99.5%, identity with the amino acid sequence of the polypeptide encoded by the nucleic acid molecule of (a), (b), (c) or (d);
   [78618] (f) a nucleic acid molecule which hybridizes with a nucleic acid molecule of (a), (b), (c), (d) or (e) under stringent hybridization conditions;
   [78619] (g) a nucleic acid molecule encoding a polypeptide which can be isolated with the aid of monoclonal or polyclonal antibodies made against a polypeptide encoded by one of the nucleic acid molecules of (a), (b), (c), (d), (e) or (f);
   [78620] (h) a nucleic acid molecule encoding a polypeptide comprising the consensus sequence or one or more polypeptide motifs as shown in column 8 of Table IV, application no. 16;
   [78621] (i) a nucleic acid molecule encoding a polypeptide having the activity represented by a respective protein as depicted in column 5 of Table II, application no. 16;
   [78622] (j) a nucleic acid molecule comprising a polynucleotide which is obtained by amplifying a cDNA library or a genomic library using the primers in Table III, application no. 16, column 8;
   [78623] and
   [78624] (k) nucleic acid molecule which is obtainable by screening a suitable nucleic acid library, especially a cDNA library and/or a genomic library, under stringent hybridization conditions with a probe comprising one of the sequences of the nucleic acid molecule of (a), (b), (c), (d), (e), (f), (g), (h), (i) or (j) or with a fragment of at least 15 nt, preferably 20 nt, 30 nt, 50 nt, 100 nt, 200 nt,500 nt, 1000 nt, 1500 nt, 2000 nt or 3000 nt of the nucleic acid molecule characterized in (a), (b), (c), (d), (e), (f), (g), (h), (i) or (j);
   [78625] or a nucleic acid molecule comprising a sequence which is complementary thereto; and, optionally
[78626] 3) nucleic acid molecule encoding a transit peptide, preferably encoding a plastidal transit peptide or a mitochondrial transit peptide;
   which are operable linked and
   whereby, preferably, the nucleic acid molecule according to 2 (a), (b), (c), (d), (e), (f), (g), (h), (i), (j) or (k) distinguishes over the sequence depicted in Table I A and/or I B, application no. 16, column 5 or 8, or the coding region thereof, by one or more nucleotides (especially but not exceeding 5%, preferably 4%, 3%, 2%, 1%, 0.5%, 0.2% or 0.1%). In an embodiment, the nucleic acid molecule of the invention according to 2) does not consist of the sequence shown in Table I A and/or I B, application no. 16, column 5 or 8, or the coding region thereof. In another embodiment, the nucleic acid molecule of the present invention, preferably the coding region thereof, is at least 30%, 40%, 50%, 60%, 70%, 80%, 90%, 95% identical but less than 100%, 99.999%, 99.99%, 99.9%, 99%, 98%, 97%, 96% or 95% identical to the sequence shown in Table I A and/or I B, application no. 16, column 5 or 8, or the coding region thereof, respectively. In a further embodiment the nucleic acid molecule does not encode the polypeptide sequence shown in Table II A and/or II B, application no. 16, column 5 or 8 but homologs thereof.

[78627] Accordingly, in one embodiment, the nucleic acid molecule of the present invention encodes in one embodiment a polypeptide which differs at least in one or more amino acids (especially but not exceeding 5%, preferably 4%, 3%, 2%, 1%, 0.5%, 0.2% or 0.1%) from the polypeptide shown in Table II, application no. 16, column 5 or 8 and does not encode a protein of the sequence shown in Table II A and/or II B, application no. 16, column 5 or 8. Accordingly, in one embodiment, the protein encoded by a sequence of a nucleic acid according to 2(a), (b), (c), (d), (e), (f), (g), (h), (i), (j) or (k) does not consist of the sequence shown in Table I A and/or I B, application no. 16, column 5 or 8, or the coding region thereof. In a further embodiment, the protein of the present invention is at least 30%, 40%, 50%, 60%, 70%, 80%, 90%, 95% identical to protein sequence depicted in Table II A and/or II B, application no. 16, column 5 or 8 but less than 100%, 99.999%, 99.99%, 99.9%, 99%, 98%, 97%, 96% or 95% identical to the sequence shown in Table II A and/or II B, application no. 16, column 5 or 8.

(All the references to Tables I to IV are references to the corresponding lines of Tables I to IV.)

[78628] In a preferred embodiment thereof said nucleic acid molecule according to 2 (a), (b), (c), (d), (e), (f), (g), (h), (i), (j) or (k) encodes a polypeptide which has the activity of the respective polypeptide represented by a protein comprising a polypeptide as depicted in the respective line in column 5 of Table II, application no. 16.

[78629] In another preferred embodiment thereof said nucleic acid molecule according to 2 (a), (b), (c), (d), (e), (f), (g), (h), (i), (j) or (k) confers a generation or an increase of the respective fine chemical in a non-human organism or a part thereof as compared to a corresponding wild-type non-human organism or part thereof.

[78630] In another preferred embodiment thereof said nucleic acid molecule according to 2 (a), (b), (c), (d), (e), (f), (g), (h), (i), (j) or (k) encodes a polypeptide which has the activity of the respective polypeptide represented by a protein as depicted in the respective line in column 5 of Table II application no. 16 and confers a generation or an increase of the respective fine chemical in a non-human organism or a part thereof as compared to a corresponding wild-type non-human organism or part thereof.

[78631] In another embodiment thereof the expression cassette comprises 3) a nucleic acid molecule encoding a transit peptide, preferably encoding a plastidal transit peptide, especially in case in column 6 of Table I, application no. 16, in the same line as of the respective nucleic acid molecule according to 2) “plastidic” is depicted, or encoding a mitochondrial transit peptide, especially in case in column 6 of Table I, application no. 16, in the same line as of the respective nucleic acid molecule according to 2) “mitochondric” is depicted.

[78632] In another embodiment thereof the expression cassette does not comprise 3) a nucleic acid molecule encoding a transit peptide, especially in case in column 6 of Table I, application no. 16, in the same line as of the respective nucleic acid molecule according to 2) “non-targeted” is depicted.

[78633] In an embodiment the present invention relates to an expresssion cassette comprising a) a promoter, preferably a promoter selected from the group consisting of Big35S, PCUbi, Super and USP, in particular p-PcUBI; and b) the nucleic acid SEQ ID NO. 17356, or a homolog or fragment thereof, or a homolog thereof being depicted in Table I, application no. 16, column 8, in the same line as SEQ ID NO. 17356, preferably the coding region thereof, a homolog or a fragment thereof; which are operable linked.

[78634] In an embodiment thereof the expression cassette comprises in addition c) a nucleic acid molecule encoding a transit peptide, especially a plastidal transit petide in case in Table I, application no. 16, in column 6 in the same line as SEQ ID NO. 17356 is depicted, plastidic is mentioned, or a mitochondrial transit peptide in case in Table I, application no. 16, in column 6 in the same line as SEQ ID NO. 17356 is depicted, mitochondric is mentioned; which is operable linked, too.

[78635] In another embodiment thereof the expression cassette does not comprise an additional transit peptide in case in Table I, application no. 16, in column 6 in the same line as SEQ ID NO. 17356 is depicted, non-targeted is mentioned.

[78636] In an embodiment the present invention relates to an expresssion cassette comprising a) a promoter, preferably a promoter selected from the group consisting of Big35S, PCUbi, Super and USP, in particular p-PcUBI; and b) the nucleic acid SEQ ID NO. 18070, or a homolog or fragment thereof, or a homolog thereof being depicted in Table I, application no. 16, column 8, in the same line as SEQ ID NO. 18070, preferably the coding region thereof, a homolog or a fragment thereof; which are operable linked.

[78637] In an embodiment thereof the expression cassette comprises in addition c) a nucleic acid molecule encoding a transit peptide, especially a plastidal transit petide in case in Table I, application no. 16, in column 6 in the same line as SEQ ID NO. 18070 is depicted, plastidic is mentioned, or a mitochondrial transit peptide in case in Table I, application no. 16, in column 6 in the same line as SEQ ID NO. 18070 is depicted, mitochondric is mentioned; which is operable linked, too.

[78638] In another embodiment thereof the expression cassette does not comprise an additional transit peptide in case in Table I, application no. 16, in column 6 in the same line as SEQ ID NO. 18070 is depicted, non-targeted is mentioned.

[78639] In an embodiment the present invention relates to an expresssion cassette comprising a) a promoter, preferably a promoter selected from the group consisting of Big35S, PCUbi, Super and USP, in particular p-PcUBI; and b) the nucleic acid SEQ ID NO. 18122, or a homolog or fragment thereof, or a homolog thereof being depicted in Table I, application no. 16, column 8, in the same line as SEQ ID NO. 18122, preferably the coding region thereof, a homolog or a fragment thereof; which are operable linked.

[78640] In an embodiment thereof the expression cassette comprises in addition c) a nucleic acid molecule encoding a transit peptide, especially a plastidal transit petide in case in Table I, application no. 16, in column 6 in the same line as SEQ ID NO. 18122 is depicted, plastidic is mentioned, or a mitochondrial transit peptide in case in Table I, application no. 16, in column 6 in the same line as SEQ ID NO. 18122 is depicted, mitochondric is mentioned; which is operable linked, too.

[78641] In another embodiment thereof the expression cassette does not comprise an additional transit peptide in case in Table I, application no. 16, in column 6 in the same line as SEQ ID NO. 18122 is depicted, non-targeted is mentioned.

[78642] In an embodiment the present invention relates to an expresssion cassette comprising a) a promoter, preferably a promoter selected from the group consisting of Big35S, PCUbi, Super and USP, in particular p-PcUBI; and b) the nucleic acid SEQ ID NO. 19419, or a homolog or fragment thereof, or a homolog thereof being depicted in Table I, application no. 16, column 8, in the same line as SEQ ID NO. 19419, preferably the coding region thereof, a homolog or a fragment thereof; which are operable linked.

[78643] In an embodiment thereof the expression cassette comprises in addition c) a nucleic acid molecule encoding a transit peptide, especially a plastidal transit petide in case in Table I, application no. 16, in column 6 in the same line as SEQ ID NO. 19419 is depicted, plastidic is mentioned, or a mitochondrial transit peptide in case in Table I, application no. 16, in column 6 in the same line as SEQ ID NO. 19419 is depicted, mitochondric is mentioned; which is operable linked, too.

[78644] In another embodiment thereof the expression cassette does not comprise an additional transit peptide in case in Table I, application no. 16, in column 6 in the same line as SEQ ID NO. 19419 is depicted, non-targeted is mentioned.

[78645] In an embodiment the present invention relates to an expresssion cassette comprising a) a promoter, preferably a promoter selected from the group consisting of Big35S, PCUbi, Super and USP, in particular p-PcUBI; and b) the nucleic acid SEQ ID NO. 133042, or a homolog or fragment thereof, or a homolog thereof being depicted in Table I, application no. 16, column 8, in the same line as SEQ ID NO. 133042, preferably the coding region thereof, a homolog or a fragment thereof; which are operable linked.

[78646] In an embodiment thereof the expression cassette comprises in addition c) a nucleic acid molecule encoding a transit peptide, especially a plastidal transit petide in case in Table I, application no. 16, in column 6 in the same line as SEQ ID NO. 133042 is depicted, plastidic is mentioned, or a mitochondrial transit peptide in case in Table I, application no. 16, in column 6 in the same line as SEQ ID NO. 133042 is depicted, mitochondric is mentioned; which is operable linked, too.

[78647] In another embodiment thereof the expression cassette does not comprise an additional transit peptide in case in Table I, application no. 16, in column 6 in the same line as SEQ ID NO. 133042 is depicted, non-targeted is mentioned.

[78648] In an embodiment the present invention relates to an expresssion cassette comprising a) a promoter, preferably a promoter selected from the group consisting of Big35S, PCUbi, Super and USP, in particular p-PcUBI; and b) the nucleic acid SEQ ID NO. 108727, or a homolog or fragment thereof, or a homolog thereof being depicted in Table I, application no. 16, column 8, in the same line as SEQ ID NO. 108727, preferably the coding region thereof, a homolog or a fragment thereof; which are operable linked.

[78649] In an embodiment thereof the expression cassette comprises in addition c) a nucleic acid molecule encoding a transit peptide, especially a plastidal transit petide in case in Table I, application no. 16, in column 6 in the same line as SEQ ID NO. 108727 is depicted, plastidic is mentioned, or a mitochondrial transit peptide in case in Table I, application no. 16, in column 6 in the same line as SEQ ID NO. 108727 is depicted, mitochondric is mentioned; which is operable linked, too.

[78650] In another embodiment thereof the expression cassette does not comprise an additional transit peptide in case in Table I, application no. 16, in column 6 in the same line as SEQ ID NO. 108727 is depicted, non-targeted is mentioned.

[78651] In an embodiment the present invention relates to an expresssion cassette comprising a) a promoter, preferably a promoter selected from the group consisting of Big35S, PCUbi, Super and USP, in particular p-PcUBI; and b) the nucleic acid SEQ ID NO. 21159, or a homolog or fragment thereof, or a homolog thereof being depicted in Table I, application no. 16, column 8, in the same line as SEQ ID NO. 21159, preferably the coding region thereof, a homolog or a fragment thereof; which are operable linked.

[78652] In an embodiment thereof the expression cassette comprises in addition c) a nucleic acid molecule encoding a transit peptide, especially a plastidal transit petide in case in Table I, application no. 16, in column 6 in the same line as SEQ ID NO. 21159 is depicted, plastidic is mentioned, or a mitochondrial transit peptide in case in Table I, application no. 16, in column 6 in the same line as SEQ ID NO. 21159 is depicted, mitochondric is mentioned; which is operable linked, too.

[78653] In another embodiment thereof the expression cassette does not comprise an additional transit peptide in case in Table I, application no. 16, in column 6 in the same line as SEQ ID NO. 21159 is depicted, non-targeted is mentioned.

[78654] In an embodiment the present invention relates to an expresssion cassette comprising a) a promoter, preferably a promoter selected from the group consisting of Big35S, PCUbi, Super and USP, in particular p-PcUBI; and b) the nucleic acid SEQ ID NO. 68657, or a homolog or fragment thereof, or a homolog thereof being depicted in Table I, application no. 16, column 8, in the same line as SEQ ID NO. 68657, preferably the coding region thereof, a homolog or a fragment thereof; which are operable linked.

[78655] In an embodiment thereof the expression cassette comprises in addition c) a nucleic acid molecule encoding a transit peptide, especially a plastidal transit petide in case in Table I, application no. 16, in column 6 in the same line as SEQ ID NO. 68657 is depicted, plastidic is mentioned, or a mitochondrial transit peptide in case in Table I, application no. 16, in column 6 in the same line as SEQ ID NO. 68657 is depicted, mitochondric is mentioned; which is operable linked, too.

[78656] In another embodiment thereof the expression cassette does not comprise an additional transit peptide in case in Table I, application no. 16, in column 6 in the same line as SEQ ID NO. 68657 is depicted, non-targeted is mentioned.

[78657] In an embodiment the present invention relates to an expresssion cassette comprising a) a promoter, preferably a promoter selected from the group consisting of Big35S, PCUbi, Super and USP, in particular p-PcUBI; and b) the nucleic acid SEQ ID NO. 21497, or a homolog or fragment thereof, or a homolog thereof being depicted in Table I, application no. 16, column 8, in the same line as SEQ ID NO. 21497, preferably the coding region thereof, a homolog or a fragment thereof; which are operable linked.

[78658] In an embodiment thereof the expression cassette comprises in addition c) a nucleic acid molecule encoding a transit peptide, especially a plastidal transit petide in case in Table I, application no. 16, in column 6 in the same line as SEQ ID NO. 21497 is depicted, plastidic is mentioned, or a mitochondrial transit peptide in case in Table I, application no. 16, in column 6 in the same line as SEQ ID NO. 21497 is depicted, mitochondric is mentioned; which is operable linked, too.

[78659] In another embodiment thereof the expression cassette does not comprise an additional transit peptide in case in Table I, application no. 16, in column 6 in the same line as SEQ ID NO. 21497 is depicted, non-targeted is mentioned.

[78660] In an embodiment the present invention relates to an expresssion cassette comprising a) a promoter, preferably a promoter selected from the group consisting of Big35S, PCUbi, Super and USP, in particular p-PcUBI; and b) the nucleic acid SEQ ID NO. 120952, or a homolog or fragment thereof, or a homolog thereof being depicted in Table I, application no. 16, column 8, in the same line as SEQ ID NO. 120952, preferably the coding region thereof, a homolog or a fragment thereof; which are operable linked.

[78661] In an embodiment thereof the expression cassette comprises in addition c) a nucleic acid molecule encoding a transit peptide, especially a plastidal transit petide in case in Table I, application no. 16, in column 6 in the same line as SEQ ID NO. 120952 is depicted, plastidic is mentioned, or a mitochondrial transit peptide in case in Table I, application no. 16, in column 6 in the same line as SEQ ID NO. 120952 is depicted, mitochondric is mentioned; which is operable linked, too.

[78662] In another embodiment thereof the expression cassette does not comprise an additional transit peptide in case in Table I, application no. 16, in column 6 in the same line as SEQ ID NO. 120952 is depicted, non-targeted is mentioned.

[78663] In an embodiment the present invention relates to an expresssion cassette comprising a) a promoter, preferably a promoter selected from the group consisting of Big35S, PCUbi, Super and USP, in particular p-PcUBI; and b) the nucleic acid SEQ ID NO. 22921, or a homolog or fragment thereof, or a homolog thereof being depicted in Table I, application no. 16, column 8, in the same line as SEQ ID NO. 22921, preferably the coding region thereof, a homolog or a fragment thereof; which are operable linked.

[78664] In an embodiment thereof the expression cassette comprises in addition c) a nucleic acid molecule encoding a transit peptide, especially a plastidal transit petide in case in Table I, application no. 16, in column 6 in the same line as SEQ ID NO. 22921 is depicted, plastidic is mentioned, or a mitochondrial transit peptide in case in Table I, application no. 16, in column 6 in the same line as SEQ ID NO. 22921 is depicted, mitochondric is mentioned; which is operable linked, too.

[78665] In another embodiment thereof the expression cassette does not comprise an additional transit peptide in case in Table I, application no. 16, in column 6 in the same line as SEQ ID NO. 22921 is depicted, non-targeted is mentioned.

[78666] In an embodiment the present invention relates to an expresssion cassette comprising a) a promoter, preferably a promoter selected from the group consisting of Big35S, PCUbi, Super and USP, in particular p-PcUBI; and b) the nucleic acid SEQ ID NO. 68777, or a homolog or fragment thereof, or a homolog thereof being depicted in Table I, application no. 16, column 8, in the same line as SEQ ID NO. 68777, preferably the coding region thereof, a homolog or a fragment thereof; which are operable linked.

[78667] In an embodiment thereof the expression cassette comprises in addition c) a nucleic acid molecule encoding a transit peptide, especially a plastidal transit petide in case in Table I, application no. 16, in column 6 in the same line as SEQ ID NO. 68777 is depicted, plastidic is mentioned, or a mitochondrial transit peptide in case in Table I, application no. 16, in column 6 in the same line as SEQ ID NO. 68777 is depicted, mitochondric is mentioned; which is operable linked, too.

[78668] In another embodiment thereof the expression cassette does not comprise an additional transit peptide in case in Table I, application no. 16, in column 6 in the same line as SEQ ID NO. 68777 is depicted, non-targeted is mentioned.

[78669] In an embodiment the present invention relates to an expresssion cassette comprising a) a promoter, preferably a promoter selected from the group consisting of Big35S, PCUbi, Super and USP, in particular p-PcUBI; and b) the nucleic acid SEQ ID NO. 2367, or a homolog or fragment thereof, or a homolog thereof being depicted in Table I, application no. 16, column 8, in the same line as SEQ ID NO. 2367, preferably the coding region thereof, a homolog or a fragment thereof; which are operable linked.

[78670] In an embodiment thereof the expression cassette comprises in addition c) a nucleic acid molecule encoding a transit peptide, especially a plastidal transit petide in case in Table I, application no. 16, in column 6 in the same line as SEQ ID NO. 2367 is depicted, plastidic is mentioned, or a mitochondrial transit peptide in case in Table I, application no. 16, in column 6 in the same line as SEQ ID NO. 2367 is depicted, mitochondric is mentioned; which is operable linked, too.

[78671] In another embodiment thereof the expression cassette does not comprise an additional transit peptide in case in Table I, application no. 16, in column 6 in the same line as SEQ ID NO. 2367 is depicted, non-targeted is mentioned.

[78672] In an embodiment the present invention relates to an expresssion cassette comprising a) a promoter, preferably a promoter selected from the group consisting of Big35S, PCUbi, Super and USP, in particular p-PcUBI; and b) the nucleic acid SEQ ID NO. 2935, or a homolog or fragment thereof, or a homolog thereof being depicted in Table I, application no. 16, column 8, in the same line as SEQ ID NO. 2935, preferably the coding region thereof, a homolog or a fragment thereof; which are operable linked.

[78673] In an embodiment thereof the expression cassette comprises in addition c) a nucleic acid molecule encoding a transit peptide, especially a plastidal transit petide in case in Table I, application no. 16, in column 6 in the same line as SEQ ID NO. 2935 is depicted, plastidic is mentioned, or a mitochondrial transit peptide in case in Table I, application no. 16, in column 6 in the same line as SEQ ID NO. 2935 is depicted, mitochondric is mentioned; which is operable linked, too.

[78674] In another embodiment thereof the expression cassette does not comprise an additional transit peptide in case in Table I, application no. 16, in column 6 in the same line as SEQ ID NO. 2935 is depicted, non-targeted is mentioned.

[78675] In an embodiment the present invention relates to an expresssion cassette comprising a) a promoter, preferably a promoter selected from the group consisting of Big35S, PCUbi, Super and USP, in particular p-PcUBI; and b) the nucleic acid SEQ ID NO. 131208, or a homolog or fragment thereof, or a homolog thereof being depicted in Table I, application no. 16, column 8, in the same line as SEQ ID NO. 131208, preferably the coding region thereof, a homolog or a fragment thereof; which are operable linked.

[78676] In an embodiment thereof the expression cassette comprises in addition c) a nucleic acid molecule encoding a transit peptide, especially a plastidal transit petide in case in Table I, application no. 16, in column 6 in the same line as SEQ ID NO. 131208 is depicted, plastidic is mentioned, or a mitochondrial transit peptide in case in Table I, application no. 16, in column 6 in the same line as SEQ ID NO. 131208 is depicted, mitochondric is mentioned; which is operable linked, too.

[78677] In another embodiment thereof the expression cassette does not comprise an additional transit peptide in case in Table I, application no. 16, in column 6 in the same line as SEQ ID NO. 131208 is depicted, non-targeted is mentioned.

[78678] In an embodiment the present invention relates to an expresssion cassette comprising a) a promoter, preferably a promoter selected from the group consisting of Big35S, PCUbi, Super and USP, in particular p-PcUBI; and b) the nucleic acid SEQ ID NO. 23482, or a homolog or fragment thereof, or a homolog thereof being depicted in Table I, application no. 16, column 8, in the same line as SEQ ID NO. 23482, preferably the coding region thereof, a homolog or a fragment thereof; which are operable linked.

[78679] In an embodiment thereof the expression cassette comprises in addition c) a nucleic acid molecule encoding a transit peptide, especially a plastidal transit petide in case in Table I, application no. 16, in column 6 in the same line as SEQ ID NO. 23482 is depicted, plastidic is mentioned, or a mitochondrial transit peptide in case in Table I, application no. 16, in column 6 in the same line as SEQ ID NO. 23482 is depicted, mitochondric is mentioned; which is operable linked, too.

[78680] In another embodiment thereof the expression cassette does not comprise an additional transit peptide in case in Table I, application no. 16, in column 6 in the same line as SEQ ID NO. 23482 is depicted, non-targeted is mentioned.

[78681] In an embodiment the present invention relates to an expresssion cassette comprising a) a promoter, preferably a promoter selected from the group consisting of Big35S, PCUbi, Super and USP, in particular p-PcUBI; and b) the nucleic acid SEQ ID NO. 24311, or a homolog or fragment thereof, or a homolog thereof being depicted in Table I, application no. 16, column 8, in the same line as SEQ ID NO. 24311, preferably the coding region thereof, a homolog or a fragment thereof; which are operable linked.

[78682] In an embodiment thereof the expression cassette comprises in addition c) a nucleic acid molecule encoding a transit peptide, especially a plastidal transit petide in case in Table I, application no. 16, in column 6 in the same line as SEQ ID NO. 24311 is depicted, plastidic is mentioned, or a mitochondrial transit peptide in case in Table I, application no. 16, in column 6 in the same line as SEQ ID NO. 24311 is depicted, mitochondric is mentioned; which is operable linked, too.

[78683] In another embodiment thereof the expression cassette does not comprise an additional transit peptide in case in Table I, application no. 16, in column 6 in the same line as SEQ ID NO. 24311 is depicted, non-targeted is mentioned.

[78684] In an embodiment the present invention relates to an expresssion cassette comprising a) a promoter, preferably a promoter selected from the group consisting of Big35S, PCUbi, Super and USP, in particular p-PcUBI; and b) the nucleic acid SEQ ID NO. 4348, or a homolog or fragment thereof, or a homolog thereof being depicted in Table I, application no. 16, column 8, in the same line as SEQ ID NO. 4348, preferably the coding region thereof, a homolog or a fragment thereof; which are operable linked.

[78685] In an embodiment thereof the expression cassette comprises in addition c) a nucleic acid molecule encoding a transit peptide, especially a plastidal transit petide in case in Table I, application no. 16, in column 6 in the same line as SEQ ID NO. 4348 is depicted, plastidic is mentioned, or a mitochondrial transit peptide in case in Table I, application no. 16, in column 6 in the same line as SEQ ID NO. 4348 is depicted, mitochondric is mentioned; which is operable linked, too.

[78686] In another embodiment thereof the expression cassette does not comprise an additional transit peptide in case in Table I, application no. 16, in column 6 in the same line as SEQ ID NO. 4348 is depicted, non-targeted is mentioned.

[78687] In an embodiment the present invention relates to an expresssion cassette comprising a) a promoter, preferably a promoter selected from the group consisting of Big35S, PCUbi, Super and USP, in particular p-PcUBI; and b) the nucleic acid SEQ ID NO. 24438, or a homolog or fragment thereof, or a homolog thereof being depicted in Table I, application no. 16, column 8, in the same line as SEQ ID NO. 24438, preferably the coding region thereof, a homolog or a fragment thereof; which are operable linked.

[78688] In an embodiment thereof the expression cassette comprises in addition c) a nucleic acid molecule encoding a transit peptide, especially a plastidal transit petide in case in Table I, application no. 16, in column 6 in the same line as SEQ ID NO. 24438 is depicted, plastidic is mentioned, or a mitochondrial transit peptide in case in Table I, application no. 16, in column 6 in the same line as SEQ ID NO. 24438 is depicted, mitochondric is mentioned; which is operable linked, too.

[78689] In another embodiment thereof the expression cassette does not comprise an additional transit peptide in case in Table I, application no. 16, in column 6 in the same line as SEQ ID NO. 24438 is depicted, non-targeted is mentioned.

[78690] In an embodiment the present invention relates to an expresssion cassette comprising a) a promoter, preferably a promoter selected from the group consisting of Big35S, PCUbi, Super and USP, in particular p-PcUBI; and b) the nucleic acid SEQ ID NO. 4904, or a homolog or fragment thereof, or a homolog thereof being depicted in Table I, application no. 16, column 8, in the same line as SEQ ID NO. 4904, preferably the coding region thereof, a homolog or a fragment thereof; which are operable linked.

[78691] In an embodiment thereof the expression cassette comprises in addition c) a nucleic acid molecule encoding a transit peptide, especially a plastidal transit petide in case in Table I, application no. 16, in column 6 in the same line as SEQ ID NO. 4904 is depicted, plastidic is mentioned, or a mitochondrial transit peptide in case in Table I, application no. 16, in column 6 in the same line as SEQ ID NO. 4904 is depicted, mitochondric is mentioned; which is operable linked, too.

[78692] In another embodiment thereof the expression cassette does not comprise an additional transit peptide in case in Table I, application no. 16, in column 6 in the same line as SEQ ID NO. 4904 is depicted, non-targeted is mentioned.

[78693] In an embodiment the present invention relates to an expresssion cassette comprising a) a promoter, preferably a promoter selected from the group consisting of Big35S, PCUbi, Super and USP, in particular p-PcUBI; and b) the nucleic acid SEQ ID NO. 102223, or a homolog or fragment thereof, or a homolog thereof being depicted in Table I, application no. 16, column 8, in the same line as SEQ ID NO. 102223, preferably the coding region thereof, a homolog or a fragment thereof; which are operable linked.

[78694] In an embodiment thereof the expression cassette comprises in addition c) a nucleic acid molecule encoding a transit peptide, especially a plastidal transit petide in case in Table I, application no. 16, in column 6 in the same line as SEQ ID NO. 102223 is depicted, plastidic is mentioned, or a mitochondrial transit peptide in case in Table I, application no. 16, in column 6 in the same line as SEQ ID NO. 102223 is depicted, mitochondric is mentioned; which is operable linked, too.

[78695] In another embodiment thereof the expression cassette does not comprise an additional transit peptide in case in Table I, application no. 16, in column 6 in the same line as SEQ ID NO. 102223 is depicted, non-targeted is mentioned.

[78696] In an embodiment the present invention relates to an expresssion cassette comprising a) a promoter, preferably a promoter selected from the group consisting of Big35S, PCUbi, Super and USP, in particular p-PcUBI; and b) the nucleic acid SEQ ID NO. 25498, or a homolog or fragment thereof, or a homolog thereof being depicted in Table I, application no. 16, column 8, in the same line as SEQ ID NO. 25498, preferably the coding region thereof, a homolog or a fragment thereof; which are operable linked.

[78697] In an embodiment thereof the expression cassette comprises in addition c) a nucleic acid molecule encoding a transit peptide, especially a plastidal transit petide in case in Table I, application no. 16, in column 6 in the same line as SEQ ID NO. 25498 is depicted, plastidic is mentioned, or a mitochondrial transit peptide in case in Table I, application no. 16, in column 6 in the same line as SEQ ID NO. 25498 is depicted, mitochondric is mentioned; which is operable linked, too.

[78698] In another embodiment thereof the expression cassette does not comprise an additional transit peptide in case in Table I, application no. 16, in column 6 in the same line as SEQ ID NO. 25498 is depicted, non-targeted is mentioned.

[78699] In an embodiment the present invention relates to an expresssion cassette comprising a) a promoter, preferably a promoter selected from the group consisting of Big35S, PCUbi, Super and USP, in particular p-PcUBI; and b) the nucleic acid SEQ ID NO. 5493, or a homolog or fragment thereof, or a homolog thereof being depicted in Table I, application no. 16, column 8, in the same line as SEQ ID NO. 5493, preferably the coding region thereof, a homolog or a fragment thereof; which are operable linked.

[78700] In an embodiment thereof the expression cassette comprises in addition c) a nucleic acid molecule encoding a transit peptide, especially a plastidal transit petide in case in Table I, application no. 16, in column 6 in the same line as SEQ ID NO. 5493 is depicted, plastidic is mentioned, or a mitochondrial transit peptide in case in Table I, application no. 16, in column 6 in the same line as SEQ ID NO. 5493 is depicted, mitochondric is mentioned; which is operable linked, too.

[78701] In another embodiment thereof the expression cassette does not comprise an additional transit peptide in case in Table I, application no. 16, in column 6 in the same line as SEQ ID NO. 5493 is depicted, non-targeted is mentioned.

[78702] In an embodiment the present invention relates to an expresssion cassette comprising a) a promoter, preferably a promoter selected from the group consisting of Big35S, PCUbi, Super and USP, in particular p-PcUBI; and b) the nucleic acid SEQ ID NO. 29286, or a homolog or fragment thereof, or a homolog thereof being depicted in Table I, application no. 16, column 8, in the same line as SEQ ID NO. 29286, preferably the coding region thereof, a homolog or a fragment thereof; which are operable linked.

[78703] In an embodiment thereof the expression cassette comprises in addition c) a nucleic acid molecule encoding a transit peptide, especially a plastidal transit petide in case in Table I, application no. 16, in column 6 in the same line as SEQ ID NO. 29286 is depicted, plastidic is mentioned, or a mitochondrial transit peptide in case in Table I, application no. 16, in column 6 in the same line as SEQ ID NO. 29286 is depicted, mitochondric is mentioned; which is operable linked, too.

[78704] In another embodiment thereof the expression cassette does not comprise an additional transit peptide in case in Table I, application no. 16, in column 6 in the same line as SEQ ID NO. 29286 is depicted, non-targeted is mentioned.

[78705] In an embodiment the present invention relates to an expresssion cassette comprising a) a promoter, preferably a promoter selected from the group consisting of Big35S, PCUbi, Super and USP, in particular p-PcUBI; and b) the nucleic acid SEQ ID NO. 31026, or a homolog or fragment thereof, or a homolog thereof being depicted in Table I, application no. 16, column 8, in the same line as SEQ ID NO. 31026, preferably the coding region thereof, a homolog or a fragment thereof; which are operable linked.

[78706] In an embodiment thereof the expression cassette comprises in addition c) a nucleic acid molecule encoding a transit peptide, especially a plastidal transit petide in case in Table I, application no. 16, in column 6 in the same line as SEQ ID NO. 31026 is depicted, plastidic is mentioned, or a mitochondrial transit peptide in case in Table I, application no. 16, in column 6 in the same line as SEQ ID NO. 31026 is depicted, mitochondric is mentioned; which is operable linked, too.

[78707] In another embodiment thereof the expression cassette does not comprise an additional transit peptide in case in Table I, application no. 16, in column 6 in the same line as SEQ ID NO. 31026 is depicted, non-targeted is mentioned.

[78708] In an embodiment the present invention relates to an expresssion cassette comprising a) a promoter, preferably a promoter selected from the group consisting of Big35S, PCUbi, Super and USP, in particular p-PcUBI; and b) the nucleic acid SEQ ID NO. 114231, or a homolog or fragment thereof, or a homolog thereof being depicted in Table I, application no. 16, column 8, in the same line as SEQ ID NO. 114231, preferably the coding region thereof, a homolog or a fragment thereof; which are operable linked.

[78709] In an embodiment thereof the expression cassette comprises in addition c) a nucleic acid molecule encoding a transit peptide, especially a plastidal transit petide in case in Table I, application no. 16, in column 6 in the same line as SEQ ID NO. 114231 is depicted, plastidic is mentioned, or a mitochondrial transit peptide in case in Table I, application no. 16, in column 6 in the same line as SEQ ID NO. 114231 is depicted, mitochondric is mentioned; which is operable linked, too.

[78710] In another embodiment thereof the expression cassette does not comprise an additional transit peptide in case in Table I, application no. 16, in column 6 in the same line as SEQ ID NO. 114231 is depicted, non-targeted is mentioned.

[78711] In an embodiment the present invention relates to an expresssion cassette comprising a) a promoter, preferably a promoter selected from the group consisting of Big35S, PCUbi, Super and USP, in particular p-PcUBI; and b) the nucleic acid SEQ ID NO. 73038, or a homolog or fragment thereof, or a homolog thereof being depicted in Table I, application no. 16, column 8, in the same line as SEQ ID NO. 73038, preferably the coding region thereof, a homolog or a fragment thereof; which are operable linked.

[78712] In an embodiment thereof the expression cassette comprises in addition c) a nucleic acid molecule encoding a transit peptide, especially a plastidal transit petide in case in Table I, application no. 16, in column 6 in the same line as SEQ ID NO. 73038 is depicted, plastidic is mentioned, or a mitochondrial transit peptide in case in Table I, application no. 16, in column 6 in the same line as SEQ ID NO. 73038 is depicted, mitochondric is mentioned; which is operable linked, too.

[78713] In another embodiment thereof the expression cassette does not comprise an additional transit peptide in case in Table I, application no. 16, in column 6 in the same line as SEQ ID NO. 73038 is depicted, non-targeted is mentioned.

[78714] In an embodiment the present invention relates to an expresssion cassette comprising a) a promoter, preferably a promoter selected from the group consisting of Big35S, PCUbi, Super and USP, in particular p-PcUBI; and b) the nucleic acid SEQ ID NO. 102941, or a homolog or fragment thereof, or a homolog thereof being depicted in Table I, application no. 16, column 8, in the same line as SEQ ID NO. 102941, preferably the coding region thereof, a homolog or a fragment thereof; which are operable linked.

[78715] In an embodiment thereof the expression cassette comprises in addition c) a nucleic acid molecule encoding a transit peptide, especially a plastidal transit petide in case in Table I, application no. 16, in column 6 in the same line as SEQ ID NO. 102941 is depicted, plastidic is mentioned, or a mitochondrial transit peptide in case in Table I, application no. 16, in column 6 in the same line as SEQ ID NO. 102941 is depicted, mitochondric is mentioned; which is operable linked, too.

[78716] In another embodiment thereof the expression cassette does not comprise an additional transit peptide in case in Table I, application no. 16, in column 6 in the same line as SEQ ID NO. 102941 is depicted, non-targeted is mentioned.

[78717] In an embodiment the present invention relates to an expresssion cassette comprising a) a promoter, preferably a promoter selected from the group consisting of Big35S, PCUbi, Super and USP, in particular p-PcUBI; and b) the nucleic acid SEQ ID NO. 6510, or a homolog or fragment thereof, or a homolog thereof being depicted in Table I, application no. 16, column 8, in the same line as SEQ ID NO. 6510, preferably the coding region thereof, a homolog or a fragment thereof; which are operable linked.

[78718] In an embodiment thereof the expression cassette comprises in addition c) a nucleic acid molecule encoding a transit peptide, especially a plastidal transit petide in case in Table I, application no. 16, in column 6 in the same line as SEQ ID NO. 6510 is depicted, plastidic is mentioned, or a mitochondrial transit peptide in case in Table I, application no. 16, in column 6 in the same line as SEQ ID NO. 6510 is depicted, mitochondric is mentioned; which is operable linked, too.

[78719] In another embodiment thereof the expression cassette does not comprise an additional transit peptide in case in Table I, application no. 16, in column 6 in the same line as SEQ ID NO. 6510 is depicted, non-targeted is mentioned.

[78720] In an embodiment the present invention relates to an expresssion cassette comprising a) a promoter, preferably a promoter selected from the group consisting of Big35S, PCUbi, Super and USP, in particular p-PcUBI; and b) the nucleic acid SEQ ID NO. 34301, or a homolog or fragment thereof, or a homolog thereof being depicted in Table I, application no. 16, column 8, in the same line as SEQ ID NO. 34301, preferably the coding region thereof, a homolog or a fragment thereof; which are operable linked.

[78721] In an embodiment thereof the expression cassette comprises in addition c) a nucleic acid molecule encoding a transit peptide, especially a plastidal transit petide in case in Table I, application no. 16, in column 6 in the same line as SEQ ID NO. 34301 is depicted, plastidic is mentioned, or a mitochondrial transit peptide in case in Table I, application no. 16, in column 6 in the same line as SEQ ID NO. 34301 is depicted, mitochondric is mentioned; which is operable linked, too.

[78722] In another embodiment thereof the expression cassette does not comprise an additional transit peptide in case in Table I, application no. 16, in column 6 in the same line as SEQ ID NO. 34301 is depicted, non-targeted is mentioned.

[78723] In an embodiment the present invention relates to an expresssion cassette comprising a) a promoter, preferably a promoter selected from the group consisting of Big35S, PCUbi, Super and USP, in particular p-PcUBI; and b) the nucleic acid SEQ ID NO. 34602, or a homolog or fragment thereof, or a homolog thereof being depicted in Table I, application no. 16, column 8, in the same line as SEQ ID NO. 34602, preferably the coding region thereof, a homolog or a fragment thereof; which are operable linked.

[78724] In an embodiment thereof the expression cassette comprises in addition c) a nucleic acid molecule encoding a transit peptide, especially a plastidal transit petide in case in Table I, application no. 16, in column 6 in the same line as SEQ ID NO. 34602 is depicted, plastidic is mentioned, or a mitochondrial transit peptide in case in Table I, application no. 16, in column 6 in the same line as SEQ ID NO. 34602 is depicted, mitochondric is mentioned; which is operable linked, too.

[78725] In another embodiment thereof the expression cassette does not comprise an additional transit peptide in case in Table I, application no. 16, in column 6 in the same line as SEQ ID NO. 34602 is depicted, non-targeted is mentioned.

[78726] In an embodiment the present invention relates to an expresssion cassette comprising a) a promoter, preferably a promoter selected from the group consisting of Big35S, PCUbi, Super and USP, in particular p-Super; and b) the nucleic acid SEQ ID NO. 34889, or a homolog or fragment thereof, or a homolog thereof being depicted in Table I, application no. 16, column 8, in the same line as SEQ ID NO. 34889, preferably the coding region thereof, a homolog or a fragment thereof; which are operable linked.

[78727] In an embodiment thereof the expression cassette comprises in addition c) a nucleic acid molecule encoding a transit peptide, especially a plastidal transit petide in case in Table I, application no. 16, in column 6 in the same line as SEQ ID NO. 34889 is depicted, plastidic is mentioned, or a mitochondrial transit peptide in case in Table I, application no. 16, in column 6 in the same line as SEQ ID NO. 34889 is depicted, mitochondric is mentioned; which is operable linked, too.

[78728] In another embodiment thereof the expression cassette does not comprise an additional transit peptide in case in Table I, application no. 16, in column 6 in the same line as SEQ ID NO. 34889 is depicted, non-targeted is mentioned.

[78729] In an embodiment the present invention relates to an expresssion cassette comprising a) a promoter, preferably a promoter selected from the group consisting of Big35S, PCUbi, Super and USP, in particular p-USP; and b) the nucleic acid SEQ ID NO. 137834, or a homolog or fragment thereof, or a homolog thereof being depicted in Table I, application no. 16, column 8, in the same line as SEQ ID NO. 137834, preferably the coding region thereof, a homolog or a fragment thereof; which are operable linked.

[78730] In an embodiment thereof the expression cassette comprises in addition c) a nucleic acid molecule encoding a transit peptide, especially a plastidal transit petide in case in Table I, application no. 16, in column 6 in the same line as SEQ ID NO. 137834 is depicted, plastidic is mentioned, or a mitochondrial transit peptide in case in Table I, application no. 16, in column 6 in the same line as SEQ ID NO. 137834 is depicted, mitochondric is mentioned; which is operable linked, too.

[78731] In another embodiment thereof the expression cassette does not comprise an additional transit peptide in case in Table I, application no. 16, in column 6 in the same line as SEQ ID NO. 137834 is depicted, non-targeted is mentioned.

[78732] In an embodiment the present invention relates to an expresssion cassette comprising a) a promoter, preferably a promoter selected from the group consisting of Big35S, PCUbi, Super and USP, in particular p-Super; and b) the nucleic acid SEQ ID NO. 7081, or a homolog or fragment thereof, or a homolog thereof being depicted in Table I, application no. 16, column 8, in the same line as SEQ ID NO. 7081, preferably the coding region thereof, a homolog or a fragment thereof; which are operable linked.

[78733] In an embodiment thereof the expression cassette comprises in addition c) a nucleic acid molecule encoding a transit peptide, especially a plastidal transit petide in case in Table I, application no. 16, in column 6 in the same line as SEQ ID NO. 7081 is depicted, plastidic is mentioned, or a mitochondrial transit peptide in case in Table I, application no. 16, in column 6 in the same line as SEQ ID NO. 7081 is depicted, mitochondric is mentioned; which is operable linked, too.

[78734] In another embodiment thereof the expression cassette does not comprise an additional transit peptide in case in Table I, application no. 16, in column 6 in the same line as SEQ ID NO. 7081 is depicted, non-targeted is mentioned.

[78735] In an embodiment the present invention relates to an expresssion cassette comprising a) a promoter, preferably a promoter selected from the group consisting of Big35S, PCUbi, Super and USP, in particular p-USP; and b) the nucleic acid SEQ ID NO. 35733, or a homolog or fragment thereof, or a homolog thereof being depicted in Table I, application no. 16, column 8, in the same line as SEQ ID NO. 35733, preferably the coding region thereof, a homolog or a fragment thereof; which are operable linked.

[78736] In an embodiment thereof the expression cassette comprises in addition c) a nucleic acid molecule encoding a transit peptide, especially a plastidal transit petide in case in Table I, application no. 16, in column 6 in the same line as SEQ ID NO. 35733 is depicted, plastidic is mentioned, or a mitochondrial transit peptide in case in Table I, application no. 16, in column 6 in the same line as SEQ ID NO. 35733 is depicted, mitochondric is mentioned; which is operable linked, too.

[78737] In another embodiment thereof the expression cassette does not comprise an additional transit peptide in case in Table I, application no. 16, in column 6 in the same line as SEQ ID NO. 35733 is depicted, non-targeted is mentioned.

[78738] In an embodiment the present invention relates to an expresssion cassette comprising a) a promoter, preferably a promoter selected from the group consisting of Big35S, PCUbi, Super and USP, in particular p-Super; and b) the nucleic acid SEQ ID NO. 7333, or a homolog or fragment thereof, or a homolog thereof being depicted in Table I, application no. 16, column 8, in the same line as SEQ ID NO. 7333, preferably the coding region thereof, a homolog or a fragment thereof; which are operable linked.

[78739] In an embodiment thereof the expression cassette comprises in addition c) a nucleic acid molecule encoding a transit peptide, especially a plastidal transit petide in case in Table I, application no. 16, in column 6 in the same line as SEQ ID NO. 7333 is depicted, plastidic is mentioned, or a mitochondrial transit peptide in case in Table I, application no. 16, in column 6 in the same line as SEQ ID NO. 7333 is depicted, mitochondric is mentioned; which is operable linked, too.

[78740] In another embodiment thereof the expression cassette does not comprise an additional transit peptide in case in Table I, application no. 16, in column 6 in the same line as SEQ ID NO. 7333 is depicted, non-targeted is mentioned.

[78741] In an embodiment the present invention relates to an expresssion cassette comprising a) a promoter, preferably a promoter selected from the group consisting of Big35S, PCUbi, Super and USP, in particular p-Super; and b) the nucleic acid SEQ ID NO. 36114, or a homolog or fragment thereof, or a homolog thereof being depicted in Table I, application no. 16, column 8, in the same line as SEQ ID NO. 36114, preferably the coding region thereof, a homolog or a fragment thereof; which are operable linked.

[78742] In an embodiment thereof the expression cassette comprises in addition c) a nucleic acid molecule encoding a transit peptide, especially a plastidal transit petide in case in Table I, application no. 16, in column 6 in the same line as SEQ ID NO. 36114 is depicted, plastidic is mentioned, or a mitochondrial transit peptide in case in Table I, application no. 16, in column 6 in the same line as SEQ ID NO. 36114 is depicted, mitochondric is mentioned; which is operable linked, too.

[78743] In another embodiment thereof the expression cassette does not comprise an additional transit peptide in case in Table I, application no. 16, in column 6 in the same line as SEQ ID NO. 36114 is depicted, non-targeted is mentioned.

[78744] In an embodiment the present invention relates to an expresssion cassette comprising a) a promoter, preferably a promoter selected from the group consisting of Big35S, PCUbi, Super and USP, in particular p-Super; and b) the nucleic acid SEQ ID NO. 36670, or a homolog or fragment thereof, or a homolog thereof being depicted in Table I, application no. 16, column 8, in the same line as SEQ ID NO. 36670, preferably the coding region thereof, a homolog or a fragment thereof; which are operable linked.

[78745] In an embodiment thereof the expression cassette comprises in addition c) a nucleic acid molecule encoding a transit peptide, especially a plastidal transit petide in case in Table I, application no. 16, in column 6 in the same line as SEQ ID NO. 36670 is depicted, plastidic is mentioned, or a mitochondrial transit peptide in case in Table I, application no. 16, in column 6 in the same line as SEQ ID NO. 36670 is depicted, mitochondric is mentioned; which is operable linked, too.

[78746] In another embodiment thereof the expression cassette does not comprise an additional transit peptide in case in Table I, application no. 16, in column 6 in the same line as SEQ ID NO. 36670 is depicted, non-targeted is mentioned.

[78747] In an embodiment the present invention relates to an expresssion cassette comprising a) a promoter, preferably a promoter selected from the group consisting of Big35S, PCUbi, Super and USP, in particular p-Super; and b) the nucleic acid SEQ ID NO. 7941, or a homolog or fragment thereof, or a homolog thereof being depicted in Table I, application no. 16, column 8, in the same line as SEQ ID NO. 7941, preferably the coding region thereof, a homolog or a fragment thereof; which are operable linked.

[78748] In an embodiment thereof the expression cassette comprises in addition c) a nucleic acid molecule encoding a transit peptide, especially a plastidal transit petide in case in Table I, application no. 16, in column 6 in the same line as SEQ ID NO. 7941 is depicted, plastidic is mentioned, or a mitochondrial transit peptide in case in Table I, application no. 16, in column 6 in the same line as SEQ ID NO. 7941 is depicted, mitochondric is mentioned; which is operable linked, too.

[78749] In another embodiment thereof the expression cassette does not comprise an additional transit peptide in case in Table I, application no. 16, in column 6 in the same line as SEQ ID NO. 7941 is depicted, non-targeted is mentioned.

[78750] In an embodiment the present invention relates to an expresssion cassette comprising a) a promoter, preferably a promoter selected from the group consisting of Big35S, PCUbi, Super and USP, in particular p-Super; and b) the nucleic acid SEQ ID NO. 138256, or a homolog or fragment thereof, or a homolog thereof being depicted in Table I, application no. 16, column 8, in the same line as SEQ ID NO. 138256, preferably the coding region thereof, a homolog or a fragment thereof; which are operable linked.

[78751] In an embodiment thereof the expression cassette comprises in addition c) a nucleic acid molecule encoding a transit peptide, especially a plastidal transit petide in case in Table I, application no. 16, in column 6 in the same line as SEQ ID NO. 138256 is depicted, plastidic is mentioned, or a mitochondrial transit peptide in case in Table I, application no. 16, in column 6 in the same line as SEQ ID NO. 138256 is depicted, mitochondric is mentioned; which is operable linked, too.

[78752] In another embodiment thereof the expression cassette does not comprise an additional transit peptide in case in Table I, application no. 16, in column 6 in the same line as SEQ ID NO. 138256 is depicted, non-targeted is mentioned.

[78753] In an embodiment the present invention relates to an expresssion cassette comprising a) a promoter, preferably a promoter selected from the group consisting of Big35S, PCUbi, Super and USP, in particular p-Super; and b) the nucleic acid SEQ ID NO. 7947, or a homolog or fragment thereof, or a homolog thereof being depicted in Table I, application no. 16, column 8, in the same line as SEQ ID NO. 7947, preferably the coding region thereof, a homolog or a fragment thereof; which are operable linked.

[78754] In an embodiment thereof the expression cassette comprises in addition c) a nucleic acid molecule encoding a transit peptide, especially a plastidal transit petide in case in Table I, application no. 16, in column 6 in the same line as SEQ ID NO. 7947 is depicted, plastidic is mentioned, or a mitochondrial transit peptide in case in Table I, application no. 16, in column 6 in the same line as SEQ ID NO. 7947 is depicted, mitochondric is mentioned; which is operable linked, too.

[78755] In another embodiment thereof the expression cassette does not comprise an additional transit peptide in case in Table I, application no. 16, in column 6 in the same line as SEQ ID NO. 7947 is depicted, non-targeted is mentioned.

[78756] In an embodiment the present invention relates to an expresssion cassette comprising a) a promoter, preferably a promoter selected from the group consisting of Big35S, PCUbi, Super and USP, in particular p-Super; and b) the nucleic acid SEQ ID NO. 38300, or a homolog or fragment thereof, or a homolog thereof being depicted in Table I, application no. 16, column 8, in the same line as SEQ ID NO. 38300, preferably the coding region thereof, a homolog or a fragment thereof; which are operable linked.

[78757] In an embodiment thereof the expression cassette comprises in addition c) a nucleic acid molecule encoding a transit peptide, especially a plastidal transit petide in case in Table I, application no. 16, in column 6 in the same line as SEQ ID NO. 38300 is depicted, plastidic is mentioned, or a mitochondrial transit peptide in case in Table I, application no. 16, in column 6 in the same line as SEQ ID NO. 38300 is depicted, mitochondric is mentioned; which is operable linked, too.

[78758] In another embodiment thereof the expression cassette does not comprise an additional transit peptide in case in Table I, application no. 16, in column 6 in the same line as SEQ ID NO. 38300 is depicted, non-targeted is mentioned.

[78759] In an embodiment the present invention relates to an expresssion cassette comprising a) a promoter, preferably a promoter selected from the group consisting of Big35S, PCUbi, Super and USP, in particular p-Super; and b) the nucleic acid SEQ ID NO. 8316, or a homolog or fragment thereof, or a homolog thereof being depicted in Table I, application no. 16, column 8, in the same line as SEQ ID NO. 8316, preferably the coding region thereof, a homolog or a fragment thereof; which are operable linked.

[78760] In an embodiment thereof the expression cassette comprises in addition c) a nucleic acid molecule encoding a transit peptide, especially a plastidal transit petide in case in Table I, application no. 16, in column 6 in the same line as SEQ ID NO. 8316 is depicted, plastidic is mentioned, or a mitochondrial transit peptide in case in Table I, application no. 16, in column 6 in the same line as SEQ ID NO. 8316 is depicted, mitochondric is mentioned; which is operable linked, too.

[78761] In another embodiment thereof the expression cassette does not comprise an additional transit peptide in case in Table I, application no. 16, in column 6 in the same line as SEQ ID NO. 8316 is depicted, non-targeted is mentioned.

[78762] In an embodiment the present invention relates to an expresssion cassette comprising a) a promoter, preferably a promoter selected from the group consisting of Big35S, PCUbi, Super and USP, in particular p-Super; and b) the nucleic acid SEQ ID NO. 8920, or a homolog or fragment thereof, or a homolog thereof being depicted in Table I, application no. 16, column 8, in the same line as SEQ ID NO. 8920, preferably the coding region thereof, a homolog or a fragment thereof; which are operable linked.

[78763] In an embodiment thereof the expression cassette comprises in addition c) a nucleic acid molecule encoding a transit peptide, especially a plastidal transit petide in case in Table I, application no. 16, in column 6 in the same line as SEQ ID NO. 8920 is depicted, plastidic is mentioned, or a mitochondrial transit peptide in case in Table I, application no. 16, in column 6 in the same line as SEQ ID NO. 8920 is depicted, mitochondric is mentioned; which is operable linked, too.

[78764] In another embodiment thereof the expression cassette does not comprise an additional transit peptide in case in Table I, application no. 16, in column 6 in the same line as SEQ ID NO. 8920 is depicted, non-targeted is mentioned.

[78765] In an embodiment the present invention relates to an expresssion cassette comprising a) a promoter, preferably a promoter selected from the group consisting of Big35S, PCUbi, Super and USP, in particular p-Super; and b) the nucleic acid SEQ ID NO. 112193, or a homolog or fragment thereof, or a homolog thereof being depicted in Table I, application no. 16, column 8, in the same line as SEQ ID NO. 112193, preferably the coding region thereof, a homolog or a fragment thereof; which are operable linked.

[78766] In an embodiment thereof the expression cassette comprises in addition c) a nucleic acid molecule encoding a transit peptide, especially a plastidal transit petide in case in Table I, application no. 16, in column 6 in the same line as SEQ ID NO. 112193 is depicted, plastidic is mentioned, or a mitochondrial transit peptide in case in Table I, application no. 16, in column 6 in the same line as SEQ ID NO. 112193 is depicted, mitochondric is mentioned; which is operable linked, too.

[78767] In another embodiment thereof the expression cassette does not comprise an additional transit peptide in case in Table I, application no. 16, in column 6 in the same line as SEQ ID NO. 112193 is depicted, non-targeted is mentioned.

[78768] In an embodiment the present invention relates to an expresssion cassette comprising a) a promoter, preferably a promoter selected from the group consisting of Big35S, PCUbi, Super and USP, in particular p-USP; and b) the nucleic acid SEQ ID NO. 39120, or a homolog or fragment thereof, or a homolog thereof being depicted in Table I, application no. 16, column 8, in the same line as SEQ ID NO. 39120, preferably the coding region thereof, a homolog or a fragment thereof; which are operable linked.

[78769] In an embodiment thereof the expression cassette comprises in addition c) a nucleic acid molecule encoding a transit peptide, especially a plastidal transit petide in case in Table I, application no. 16, in column 6 in the same line as SEQ ID NO. 39120 is depicted, plastidic is mentioned, or a mitochondrial transit peptide in case in Table I, application no. 16, in column 6 in the same line as SEQ ID NO. 39120 is depicted, mitochondric is mentioned; which is operable linked, too.

[78770] In another embodiment thereof the expression cassette does not comprise an additional transit peptide in case in Table I, application no. 16, in column 6 in the same line as SEQ ID NO. 39120 is depicted, non-targeted is mentioned.

[78771] In an embodiment the present invention relates to an expresssion cassette comprising a) a promoter, preferably a promoter selected from the group consisting of Big35S, PCUbi, Super and USP, in particular p-USP; and b) the nucleic acid SEQ ID NO. 99620, or a homolog or fragment thereof, or a homolog thereof being depicted in Table I, application no. 16, column 8, in the same line as SEQ ID NO. 99620, preferably the coding region thereof, a homolog or a fragment thereof; which are operable linked.

[78772] In an embodiment thereof the expression cassette comprises in addition c) a nucleic acid molecule encoding a transit peptide, especially a plastidal transit petide in case in Table I, application no. 16, in column 6 in the same line as SEQ ID NO. 99620 is depicted, plastidic is mentioned, or a mitochondrial transit peptide in case in Table I, application no. 16, in column 6 in the same line as SEQ ID NO. 99620 is depicted, mitochondric is mentioned; which is operable linked, too.

[78773] In another embodiment thereof the expression cassette does not comprise an additional transit peptide in case in Table I, application no. 16, in column 6 in the same line as SEQ ID NO. 99620 is depicted, non-targeted is mentioned.

[78774] In an embodiment the present invention relates to an expresssion cassette comprising a) a promoter, preferably a promoter selected from the group consisting of Big35S, PCUbi, Super and USP, in particular p-USP; and b) the nucleic acid SEQ ID NO. 138377, or a homolog or fragment thereof, or a homolog thereof being depicted in Table I, application no. 16, column 8, in the same line as SEQ ID NO. 138377, preferably the coding region thereof, a homolog or a fragment thereof; which are operable linked.

[78775] In an embodiment thereof the expression cassette comprises in addition c) a nucleic acid molecule encoding a transit peptide, especially a plastidal transit petide in case in Table I, application no. 16, in column 6 in the same line as SEQ ID NO. 138377 is depicted, plastidic is mentioned, or a mitochondrial transit peptide in case in Table I, application no. 16, in column 6 in the same line as SEQ ID NO. 138377 is depicted, mitochondric is mentioned; which is operable linked, too.

[78776] In another embodiment thereof the expression cassette does not comprise an additional transit peptide in case in Table I, application no. 16, in column 6 in the same line as SEQ ID NO. 138377 is depicted, non-targeted is mentioned.

[78777] In an embodiment the present invention relates to an expresssion cassette comprising a) a promoter, preferably a promoter selected from the group consisting of Big35S, PCUbi, Super and USP, in particular p-Super; and b) the nucleic acid SEQ ID NO. 80906, or a homolog or fragment thereof, or a homolog thereof being depicted in Table I, application no. 16, column 8, in the same line as SEQ ID NO. 80906, preferably the coding region thereof, a homolog or a fragment thereof; which are operable linked.

[78778] In an embodiment thereof the expression cassette comprises in addition c) a nucleic acid molecule encoding a transit peptide, especially a plastidal transit petide in case in Table I, application no. 16, in column 6 in the same line as SEQ ID NO. 80906 is depicted, plastidic is mentioned, or a mitochondrial transit peptide in case in Table I, application no. 16, in column 6 in the same line as SEQ ID NO. 80906 is depicted, mitochondric is mentioned; which is operable linked, too.

[78779] In another embodiment thereof the expression cassette does not comprise an additional transit peptide in case in Table I, application no. 16, in column 6 in the same line as SEQ ID NO. 80906 is depicted, non-targeted is mentioned.

[78780] In an embodiment the present invention relates to an expresssion cassette comprising a) a promoter, preferably a promoter selected from the group consisting of Big35S, PCUbi, Super and USP, in particular p-Super; and b) the nucleic acid SEQ ID NO. 81075, or a homolog or fragment thereof, or a homolog thereof being depicted in Table I, application no. 16, column 8, in the same line as SEQ ID NO. 81075, preferably the coding region thereof, a homolog or a fragment thereof; which are operable linked.

[78781] In an embodiment thereof the expression cassette comprises in addition c) a nucleic acid molecule encoding a transit peptide, especially a plastidal transit petide in case in Table I, application no. 16, in column 6 in the same line as SEQ ID NO. 81075 is depicted, plastidic is mentioned, or a mitochondrial transit peptide in case in Table I, application no. 16, in column 6 in the same line as SEQ ID NO. 81075 is depicted, mitochondric is mentioned; which is operable linked, too.

[78782] In another embodiment thereof the expression cassette does not comprise an additional transit peptide in case in Table I, application no. 16, in column 6 in the same line as SEQ ID NO. 81075 is depicted, non-targeted is mentioned.

[78783] In an embodiment the present invention relates to an expresssion cassette comprising a) a promoter, preferably a promoter selected from the group consisting of Big35S, PCUbi, Super and USP, in particular p-Super; and b) the nucleic acid SEQ ID NO. 81451, or a homolog or fragment thereof, or a homolog thereof being depicted in Table I, application no. 16, column 8, in the same line as SEQ ID NO. 81451, preferably the coding region thereof, a homolog or a fragment thereof; which are operable linked.

[78784] In an embodiment thereof the expression cassette comprises in addition c) a nucleic acid molecule encoding a transit peptide, especially a plastidal transit petide in case in Table I, application no. 16, in column 6 in the same line as SEQ ID NO. 81451 is depicted, plastidic is mentioned, or a mitochondrial transit peptide in case in Table I, application no. 16, in column 6 in the same line as SEQ ID NO. 81451 is depicted, mitochondric is mentioned; which is operable linked, too.

[78785] In another embodiment thereof the expression cassette does not comprise an additional transit peptide in case in Table I, application no. 16, in column 6 in the same line as SEQ ID NO. 81451 is depicted, non-targeted is mentioned.

[78786] In an embodiment the present invention relates to an expresssion cassette comprising a) a promoter, preferably a promoter selected from the group consisting of Big35S, PCUbi, Super and USP, in particular p-Super; and b) the nucleic acid SEQ ID NO. 81980, or a homolog or fragment thereof, or a homolog thereof being depicted in Table I, application no. 16, column 8, in the same line as SEQ ID NO. 81980, preferably the coding region thereof, a homolog or a fragment thereof; which are operable linked.

[78787] In an embodiment thereof the expression cassette comprises in addition c) a nucleic acid molecule encoding a transit peptide, especially a plastidal transit petide in case in Table I, application no. 16, in column 6 in the same line as SEQ ID NO. 81980 is depicted, plastidic is mentioned, or a mitochondrial transit peptide in case in Table I, application no. 16, in column 6 in the same line as SEQ ID NO. 81980 is depicted, mitochondric is mentioned; which is operable linked, too.

[78788] In another embodiment thereof the expression cassette does not comprise an additional transit peptide in case in Table I, application no. 16, in column 6 in the same line as SEQ ID NO. 81980 is depicted, non-targeted is mentioned.

[78789] In an embodiment the present invention relates to an expresssion cassette comprising a) a promoter, preferably a promoter selected from the group consisting of Big35S, PCUbi, Super and USP, in particular p-Super; and b) the nucleic acid SEQ ID NO. 42502, or a homolog or fragment thereof, or a homolog thereof being depicted in Table I, application no. 16, column 8, in the same line as SEQ ID NO. 42502, preferably the coding region thereof, a homolog or a fragment thereof; which are operable linked.

[78790] In an embodiment thereof the expression cassette comprises in addition c) a nucleic acid molecule encoding a transit peptide, especially a plastidal transit petide in case in Table I, application no. 16, in column 6 in the same line as SEQ ID NO. 42502 is depicted, plastidic is mentioned, or a mitochondrial transit peptide in case in Table I, application no. 16, in column 6 in the same line as SEQ ID NO. 42502 is depicted, mitochondric is mentioned; which is operable linked, too.

[78791] In another embodiment thereof the expression cassette does not comprise an additional transit peptide in case in Table I, application no. 16, in column 6 in the same line as SEQ ID NO. 42502 is depicted, non-targeted is mentioned.

[78792] In an embodiment the present invention relates to an expresssion cassette comprising a) a promoter, preferably a promoter selected from the group consisting of Big35S, PCUbi, Super and USP, in particular p-Super; and b) the nucleic acid SEQ ID NO. 138770, or a homolog or fragment thereof, or a homolog thereof being depicted in Table I, application no. 16, column 8, in the same line as SEQ ID NO. 138770, preferably the coding region thereof, a homolog or a fragment thereof; which are operable linked.

[78793] In an embodiment thereof the expression cassette comprises in addition c) a nucleic acid molecule encoding a transit peptide, especially a plastidal transit petide in case in Table I, application no. 16, in column 6 in the same line as SEQ ID NO. 138770 is depicted, plastidic is mentioned, or a mitochondrial transit peptide in case in Table I, application no. 16, in column 6 in the same line as SEQ ID NO. 138770 is depicted, mitochondric is mentioned; which is operable linked, too.

[78794] In another embodiment thereof the expression cassette does not comprise an additional transit peptide in case in Table I, application no. 16, in column 6 in the same line as SEQ ID NO. 138770 is depicted, non-targeted is mentioned.

[78795] In an embodiment the present invention relates to an expresssion cassette comprising a) a promoter, preferably a promoter selected from the group consisting of Big35S, PCUbi, Super and USP, in particular p-Super; and b) the nucleic acid SEQ ID NO. 10708, or a homolog or fragment thereof, or a homolog thereof being depicted in Table I, application no. 16, column 8, in the same line as SEQ ID NO. 10708, preferably the coding region thereof, a homolog or a fragment thereof; which are operable linked.

[78796] In an embodiment thereof the expression cassette comprises in addition c) a nucleic acid molecule encoding a transit peptide, especially a plastidal transit petide in case in Table I, application no. 16, in column 6 in the same line as SEQ ID NO. 10708 is depicted, plastidic is mentioned, or a mitochondrial transit peptide in case in Table I, application no. 16, in column 6 in the same line as SEQ ID NO. 10708 is depicted, mitochondric is mentioned; which is operable linked, too.

[78797] In another embodiment thereof the expression cassette does not comprise an additional transit peptide in case in Table I, application no. 16, in column 6 in the same line as SEQ ID NO. 10708 is depicted, non-targeted is mentioned.

[78798] In an embodiment the present invention relates to an expresssion cassette comprising a) a promoter, preferably a promoter selected from the group consisting of Big35S, PCUbi, Super and USP, in particular p-USP; and b) the nucleic acid SEQ ID NO. 44223, or a homolog or fragment thereof, or a homolog thereof being depicted in Table I, application no. 16, column 8, in the same line as SEQ ID NO. 44223, preferably the coding region thereof, a homolog or a fragment thereof; which are operable linked.

[78799] In an embodiment thereof the expression cassette comprises in addition c) a nucleic acid molecule encoding a transit peptide, especially a plastidal transit petide in case in Table I, application no. 16, in column 6 in the same line as SEQ ID NO. 44223 is depicted, plastidic is mentioned, or a mitochondrial transit peptide in case in Table I, application no. 16, in column 6 in the same line as SEQ ID NO. 44223 is depicted, mitochondric is mentioned; which is operable linked, too.

[78800] In another embodiment thereof the expression cassette does not comprise an additional transit peptide in case in Table I, application no. 16, in column 6 in the same line as SEQ ID NO. 44223 is depicted, non-targeted is mentioned.

[78801] In an embodiment the present invention relates to an expresssion cassette comprising a) a promoter, preferably a promoter selected from the group consisting of Big35S, PCUbi, Super and USP, in particular p-USP; and b) the nucleic acid SEQ ID NO. 138857, or a homolog or fragment thereof, or a homolog thereof being depicted in Table I, application no. 16, column 8, in the same line as SEQ ID NO. 138857, preferably the coding region thereof, a homolog or a fragment thereof; which are operable linked.

[78802] In an embodiment thereof the expression cassette comprises in addition c) a nucleic acid molecule encoding a transit peptide, especially a plastidal transit petide in case in Table I, application no. 16, in column 6 in the same line as SEQ ID NO. 138857 is depicted, plastidic is mentioned, or a mitochondrial transit peptide in case in Table I, application no. 16, in column 6 in the same line as SEQ ID NO. 138857 is depicted, mitochondric is mentioned; which is operable linked, too.

[78803] In another embodiment thereof the expression cassette does not comprise an additional transit peptide in case in Table I, application no. 16, in column 6 in the same line as SEQ ID NO. 138857 is depicted, non-targeted is mentioned.

[78804] In an embodiment the present invention relates to an expresssion cassette comprising a) a promoter, preferably a promoter selected from the group consisting of Big35S, PCUbi, Super and USP, in particular p-Super; and b) the nucleic acid SEQ ID NO. 10740, or a homolog or fragment thereof, or a homolog thereof being depicted in Table I, application no. 16, column 8, in the same line as SEQ ID NO. 10740, preferably the coding region thereof, a homolog or a fragment thereof; which are operable linked.

[78805] In an embodiment thereof the expression cassette comprises in addition c) a nucleic acid molecule encoding a transit peptide, especially a plastidal transit petide in case in Table I, application no. 16, in column 6 in the same line as SEQ ID NO. 10740 is depicted, plastidic is mentioned, or a mitochondrial transit peptide in case in Table I, application no. 16, in column 6 in the same line as SEQ ID NO. 10740 is depicted, mitochondric is mentioned; which is operable linked, too.

[78806] In another embodiment thereof the expression cassette does not comprise an additional transit peptide in case in Table I, application no. 16, in column 6 in the same line as SEQ ID NO. 10740 is depicted, non-targeted is mentioned.

[78807] In an embodiment the present invention relates to an expresssion cassette comprising a) a promoter, preferably a promoter selected from the group consisting of Big35S, PCUbi, Super and USP, in particular p-Super; and b) the nucleic acid SEQ ID NO. 45321, or a homolog or fragment thereof, or a homolog thereof being depicted in Table I, application no. 16, column 8, in the same line as SEQ ID NO. 45321, preferably the coding region thereof, a homolog or a fragment thereof; which are operable linked.

[78808] In an embodiment thereof the expression cassette comprises in addition c) a nucleic acid molecule encoding a transit peptide, especially a plastidal transit petide in case in Table I, application no. 16, in column 6 in the same line as SEQ ID NO. 45321 is depicted, plastidic is mentioned, or a mitochondrial transit peptide in case in Table I, application no. 16, in column 6 in the same line as SEQ ID NO. 45321 is depicted, mitochondric is mentioned; which is operable linked, too.

[78809] In another embodiment thereof the expression cassette does not comprise an additional transit peptide in case in Table I, application no. 16, in column 6 in the same line as SEQ ID NO. 45321 is depicted, non-targeted is mentioned.

[78810] In an embodiment the present invention relates to an expresssion cassette comprising a) a promoter, preferably a promoter selected from the group consisting of Big35S, PCUbi, Super and USP, in particular p-Super; and b) the nucleic acid SEQ ID NO. 45394, or a homolog or fragment thereof, or a homolog thereof being depicted in Table I, application no. 16, column 8, in the same line as SEQ ID NO. 45394, preferably the coding region thereof, a homolog or a fragment thereof; which are operable linked.

[78811] In an embodiment thereof the expression cassette comprises in addition c) a nucleic acid molecule encoding a transit peptide, especially a plastidal transit petide in case in Table I, application no. 16, in column 6 in the same line as SEQ ID NO. 45394 is depicted, plastidic is mentioned, or a mitochondrial transit peptide in case in Table I, application no. 16, in column 6 in the same line as SEQ ID NO. 45394 is depicted, mitochondric is mentioned; which is operable linked, too.

[78812] In another embodiment thereof the expression cassette does not comprise an additional transit peptide in case in Table I, application no. 16, in column 6 in the same line as SEQ ID NO. 45394 is depicted, non-targeted is mentioned.

[78813] In an embodiment the present invention relates to an expresssion cassette comprising a) a promoter, preferably a promoter selected from the group consisting of Big35S, PCUbi, Super and USP, in particular p-PcUBI; and b) the nucleic acid SEQ ID NO. 46751, or a homolog or fragment thereof, or a homolog thereof being depicted in Table I, application no. 16, column 8, in the same line as SEQ ID NO. 46751, preferably the coding region thereof, a homolog or a fragment thereof; which are operable linked.

[78814] In an embodiment thereof the expression cassette comprises in addition c) a nucleic acid molecule encoding a transit peptide, especially a plastidal transit petide in case in Table I, application no. 16, in column 6 in the same line as SEQ ID NO. 46751 is depicted, plastidic is mentioned, or a mitochondrial transit peptide in case in Table I, application no. 16, in column 6 in the same line as SEQ ID NO. 46751 is depicted, mitochondric is mentioned; which is operable linked, too.

[78815] In another embodiment thereof the expression cassette does not comprise an additional transit peptide in case in Table I, application no. 16, in column 6 in the same line as SEQ ID NO. 46751 is depicted, non-targeted is mentioned.

[78816] In an embodiment the present invention relates to an expresssion cassette comprising a) a promoter, preferably a promoter selected from the group consisting of Big35S, PCUbi, Super and USP, in particular p-PcUBI; and b) the nucleic acid SEQ ID NO. 84198, or a homolog or fragment thereof, or a homolog thereof being depicted in Table I, application no. 16, column 8, in the same line as SEQ ID NO. 84198, preferably the coding region thereof, a homolog or a fragment thereof; which are operable linked.

[78817] In an embodiment thereof the expression cassette comprises in addition c) a nucleic acid molecule encoding a transit peptide, especially a plastidal transit petide in case in Table I, application no. 16, in column 6 in the same line as SEQ ID NO. 84198 is depicted, plastidic is mentioned, or a mitochondrial transit peptide in case in Table I, application no. 16, in column 6 in the same line as SEQ ID NO. 84198 is depicted, mitochondric is mentioned; which is operable linked, too.

[78818] In another embodiment thereof the expression cassette does not comprise an additional transit peptide in case in Table I, application no. 16, in column 6 in the same line as SEQ ID NO. 84198 is depicted, non-targeted is mentioned.

[78819] In an embodiment the present invention relates to an expresssion cassette comprising a) a promoter, preferably a promoter selected from the group consisting of Big35S, PCUbi, Super and USP, in particular p-PcUBI; and b) the nucleic acid SEQ ID NO. 49143, or a homolog or fragment thereof, or a homolog thereof being depicted in Table I, application no. 16, column 8, in the same line as SEQ ID NO. 49143, preferably the coding region thereof, a homolog or a fragment thereof; which are operable linked.

[78820] In an embodiment thereof the expression cassette comprises in addition c) a nucleic acid molecule encoding a transit peptide, especially a plastidal transit petide in case in Table I, application no. 16, in column 6 in the same line as SEQ ID NO. 49143 is depicted, plastidic is mentioned, or a mitochondrial transit peptide in case in Table I, application no. 16, in column 6 in the same line as SEQ ID NO. 49143 is depicted, mitochondric is mentioned; which is operable linked, too.

[78821] In another embodiment thereof the expression cassette does not comprise an additional transit peptide in case in Table I, application no. 16, in column 6 in the same line as SEQ ID NO. 49143 is depicted, non-targeted is mentioned.

[78822] In an embodiment the present invention relates to an expresssion cassette comprising a) a promoter, preferably a promoter selected from the group consisting of Big35S, PCUbi, Super and USP, in particular p-PcUBI; and b) the nucleic acid SEQ ID NO. 84869, or a homolog or fragment thereof, or a homolog thereof being depicted in Table I, application no. 16, column 8, in the same line as SEQ ID NO. 84869, preferably the coding region thereof, a homolog or a fragment thereof; which are operable linked.

[78823] In an embodiment thereof the expression cassette comprises in addition c) a nucleic acid molecule encoding a transit peptide, especially a plastidal transit petide in case in Table I, application no. 16, in column 6 in the same line as SEQ ID NO. 84869 is depicted, plastidic is mentioned, or a mitochondrial transit peptide in case in Table I, application no. 16, in column 6 in the same line as SEQ ID NO. 84869 is depicted, mitochondric is mentioned; which is operable linked, too.

[78824] In another embodiment thereof the expression cassette does not comprise an additional transit peptide in case in Table I, application no. 16, in column 6 in the same line as SEQ ID NO. 84869 is depicted, non-targeted is mentioned.

[78825] In an embodiment the present invention relates to an expresssion cassette comprising a) a promoter, preferably a promoter selected from the group consisting of Big35S, PCUbi, Super and USP, in particular p-PcUBI; and b) the nucleic acid SEQ ID NO. 55379, or a homolog or fragment thereof, or a homolog thereof being depicted in Table I, application no. 16, column 8, in the same line as SEQ ID NO. 55379, preferably the coding region thereof, a homolog or a fragment thereof; which are operable linked.

[78826] In an embodiment thereof the expression cassette comprises in addition c) a nucleic acid molecule encoding a transit peptide, especially a plastidal transit petide in case in Table I, application no. 16, in column 6 in the same line as SEQ ID NO. 55379 is depicted, plastidic is mentioned, or a mitochondrial transit peptide in case in Table I, application no. 16, in column 6 in the same line as SEQ ID NO. 55379 is depicted, mitochondric is mentioned; which is operable linked, too.

[78827] In another embodiment thereof the expression cassette does not comprise an additional transit peptide in case in Table I, application no. 16, in column 6 in the same line as SEQ ID NO. 55379 is depicted, non-targeted is mentioned.

[78828] In an embodiment the present invention relates to an expresssion cassette comprising a) a promoter, preferably a promoter selected from the group consisting of Big35S, PCUbi, Super and USP, in particular p-PcUBI; and b) the nucleic acid SEQ ID NO. 55385, or a homolog or fragment thereof, or a homolog thereof being depicted in Table I, application no. 16, column 8, in the same line as SEQ ID NO. 55385, preferably the coding region thereof, a homolog or a fragment thereof; which are operable linked.

[78829] In an embodiment thereof the expression cassette comprises in addition c) a nucleic acid molecule encoding a transit peptide, especially a plastidal transit petide in case in Table I, application no. 16, in column 6 in the same line as SEQ ID NO. 55385 is depicted, plastidic is mentioned, or a mitochondrial transit peptide in case in Table I, application no. 16, in column 6 in the same line as SEQ ID NO. 55385 is depicted, mitochondric is mentioned; which is operable linked, too.

[78830] In another embodiment thereof the expression cassette does not comprise an additional transit peptide in case in Table I, application no. 16, in column 6 in the same line as SEQ ID NO. 55385 is depicted, non-targeted is mentioned.

[78831] In an embodiment the present invention relates to an expresssion cassette comprising a) a promoter, preferably a promoter selected from the group consisting of Big35S, PCUbi, Super and USP, in particular p-PcUBI; and b) the nucleic acid SEQ ID NO. 11990, or a homolog or fragment thereof, or a homolog thereof being depicted in Table I, application no. 16, column 8, in the same line as SEQ ID NO. 11990, preferably the coding region thereof, a homolog or a fragment thereof; which are operable linked.

[78832] In an embodiment thereof the expression cassette comprises in addition c) a nucleic acid molecule encoding a transit peptide, especially a plastidal transit petide in case in Table I, application no. 16, in column 6 in the same line as SEQ ID NO. 11990 is depicted, plastidic is mentioned, or a mitochondrial transit peptide in case in Table I, application no. 16, in column 6 in the same line as SEQ ID NO. 11990 is depicted, mitochondric is mentioned; which is operable linked, too.

[78833] In another embodiment thereof the expression cassette does not comprise an additional transit peptide in case in Table I, application no. 16, in column 6 in the same line as SEQ ID NO. 11990 is depicted, non-targeted is mentioned.

[78834] In an embodiment the present invention relates to an expresssion cassette comprising a) a promoter, preferably a promoter selected from the group consisting of Big35S, PCUbi, Super and USP, in particular p-PcUBI; and b) the nucleic acid SEQ ID NO. 87397, or a homolog or fragment thereof, or a homolog thereof being depicted in Table I, application no. 16, column 8, in the same line as SEQ ID NO. 87397, preferably the coding region thereof, a homolog or a fragment thereof; which are operable linked.

[78835] In an embodiment thereof the expression cassette comprises in addition c) a nucleic acid molecule encoding a transit peptide, especially a plastidal transit petide in case in Table I, application no. 16, in column 6 in the same line as SEQ ID NO. 87397 is depicted, plastidic is mentioned, or a mitochondrial transit peptide in case in Table I, application no. 16, in column 6 in the same line as SEQ ID NO. 87397 is depicted, mitochondric is mentioned; which is operable linked, too.

[78836] In another embodiment thereof the expression cassette does not comprise an additional transit peptide in case in Table I, application no. 16, in column 6 in the same line as SEQ ID NO. 87397 is depicted, non-targeted is mentioned.

[78837] In an embodiment the present invention relates to an expresssion cassette comprising a) a promoter, preferably a promoter selected from the group consisting of Big35S, PCUbi, Super and USP, in particular p-PcUBI; and b) the nucleic acid SEQ ID NO. 119222, or a homolog or fragment thereof, or a homolog thereof being depicted in Table I, application no. 16, column 8, in the same line as SEQ ID NO. 119222, preferably the coding region thereof, a homolog or a fragment thereof; which are operable linked.

[78838] In an embodiment thereof the expression cassette comprises in addition c) a nucleic acid molecule encoding a transit peptide, especially a plastidal transit petide in case in Table I, application no. 16, in column 6 in the same line as SEQ ID NO. 119222 is depicted, plastidic is mentioned, or a mitochondrial transit peptide in case in Table I, application no. 16, in column 6 in the same line as SEQ ID NO. 119222 is depicted, mitochondric is mentioned; which is operable linked, too.

[78839] In another embodiment thereof the expression cassette does not comprise an additional transit peptide in case in Table I, application no. 16, in column 6 in the same line as SEQ ID NO. 119222 is depicted, non-targeted is mentioned.

[78840] In an embodiment the present invention relates to an expresssion cassette comprising a) a promoter, preferably a promoter selected from the group consisting of Big35S, PCUbi, Super and USP, in particular p-PcUBI; and b) the nucleic acid SEQ ID NO. 101776, or a homolog or fragment thereof, or a homolog thereof being depicted in Table I, application no. 16, column 8, in the same line as SEQ ID NO. 101776, preferably the coding region thereof, a homolog or a fragment thereof; which are operable linked.

[78841] In an embodiment thereof the expression cassette comprises in addition c) a nucleic acid molecule encoding a transit peptide, especially a plastidal transit petide in case in Table I, application no. 16, in column 6 in the same line as SEQ ID NO. 101776 is depicted, plastidic is mentioned, or a mitochondrial transit peptide in case in Table I, application no. 16, in column 6 in the same line as SEQ ID NO. 101776 is depicted, mitochondric is mentioned; which is operable linked, too.

[78842] In another embodiment thereof the expression cassette does not comprise an additional transit peptide in case in Table I, application no. 16, in column 6 in the same line as SEQ ID NO. 101776 is depicted, non-targeted is mentioned.

[78843] In an embodiment the present invention relates to an expresssion cassette comprising a) a promoter, preferably a promoter selected from the group consisting of Big35S, PCUbi, Super and USP, in particular p-PcUBI; and b) the nucleic acid SEQ ID NO. 116713, or a homolog or fragment thereof, or a homolog thereof being depicted in Table I, application no. 16, column 8, in the same line as SEQ ID NO. 116713, preferably the coding region thereof, a homolog or a fragment thereof; which are operable linked.

[78844] In an embodiment thereof the expression cassette comprises in addition c) a nucleic acid molecule encoding a transit peptide, especially a plastidal transit petide in case in Table I, application no. 16, in column 6 in the same line as SEQ ID NO. 116713 is depicted, plastidic is mentioned, or a mitochondrial transit peptide in case in Table I, application no. 16, in column 6 in the same line as SEQ ID NO. 116713 is depicted, mitochondric is mentioned; which is operable linked, too.

[78845] In another embodiment thereof the expression cassette does not comprise an additional transit peptide in case in Table I, application no. 16, in column 6 in the same line as SEQ ID NO. 116713 is depicted, non-targeted is mentioned.

[78846] In an embodiment the present invention relates to an expresssion cassette comprising a) a promoter, preferably a promoter selected from the group consisting of Big35S, PCUbi, Super and USP, in particular p-PcUBI; and b) the nucleic acid SEQ ID NO. 58731, or a homolog or fragment thereof, or a homolog thereof being depicted in Table I, application no. 16, column 8, in the same line as SEQ ID NO. 58731, preferably the coding region thereof, a homolog or a fragment thereof; which are operable linked.

[78847] In an embodiment thereof the expression cassette comprises in addition c) a nucleic acid molecule encoding a transit peptide, especially a plastidal transit petide in case in Table I, application no. 16, in column 6 in the same line as SEQ ID NO. 58731 is depicted, plastidic is mentioned, or a mitochondrial transit peptide in case in Table I, application no. 16, in column 6 in the same line as SEQ ID NO. 58731 is depicted, mitochondric is mentioned; which is operable linked, too.

[78848] In another embodiment thereof the expression cassette does not comprise an additional transit peptide in case in Table I, application no. 16, in column 6 in the same line as SEQ ID NO. 58731 is depicted, non-targeted is mentioned.

[78849] In an embodiment the present invention relates to an expresssion cassette comprising a) a promoter, preferably a promoter selected from the group consisting of Big35S, PCUbi, Super and USP, in particular p-PcUBI; and b) the nucleic acid SEQ ID NO. 58751, or a homolog or fragment thereof, or a homolog thereof being depicted in Table I, application no. 16, column 8, in the same line as SEQ ID NO. 58751, preferably the coding region thereof, a homolog or a fragment thereof; which are operable linked.

[78850] In an embodiment thereof the expression cassette comprises in addition c) a nucleic acid molecule encoding a transit peptide, especially a plastidal transit petide in case in Table I, application no. 16, in column 6 in the same line as SEQ ID NO. 58751 is depicted, plastidic is mentioned, or a mitochondrial transit peptide in case in Table I, application no. 16, in column 6 in the same line as SEQ ID NO. 58751 is depicted, mitochondric is mentioned; which is operable linked, too.

[78851] In another embodiment thereof the expression cassette does not comprise an additional transit peptide in case in Table I, application no. 16, in column 6 in the same line as SEQ ID NO. 58751 is depicted, non-targeted is mentioned.

[78852] In an embodiment the present invention relates to an expresssion cassette comprising a) a promoter, preferably a promoter selected from the group consisting of Big35S, PCUbi, Super and USP, in particular p-PcUBI; and b) the nucleic acid SEQ ID NO. 58823, or a homolog or fragment thereof, or a homolog thereof being depicted in Table I, application no. 16, column 8, in the same line as SEQ ID NO. 58823, preferably the coding region thereof, a homolog or a fragment thereof; which are operable linked.

[78853] In an embodiment thereof the expression cassette comprises in addition c) a nucleic acid molecule encoding a transit peptide, especially a plastidal transit petide in case in Table I, application no. 16, in column 6 in the same line as SEQ ID NO. 58823 is depicted, plastidic is mentioned, or a mitochondrial transit peptide in case in Table I, application no. 16, in column 6 in the same line as SEQ ID NO. 58823 is depicted, mitochondric is mentioned; which is operable linked, too.

[78854] In another embodiment thereof the expression cassette does not comprise an additional transit peptide in case in Table I, application no. 16, in column 6 in the same line as SEQ ID NO. 58823 is depicted, non-targeted is mentioned.

[78855] In an embodiment the present invention relates to an expresssion cassette comprising a) a promoter, preferably a promoter selected from the group consisting of Big35S, PCUbi, Super and USP, in particular p-PcUBI; and b) the nucleic acid SEQ ID NO. 12698, or a homolog or fragment thereof, or a homolog thereof being depicted in Table I, application no. 16, column 8, in the same line as SEQ ID NO. 12698, preferably the coding region thereof, a homolog or a fragment thereof; which are operable linked.

[78856] In an embodiment thereof the expression cassette comprises in addition c) a nucleic acid molecule encoding a transit peptide, especially a plastidal transit petide in case in Table I, application no. 16, in column 6 in the same line as SEQ ID NO. 12698 is depicted, plastidic is mentioned, or a mitochondrial transit peptide in case in Table I, application no. 16, in column 6 in the same line as SEQ ID NO. 12698 is depicted, mitochondric is mentioned; which is operable linked, too.

[78857] In another embodiment thereof the expression cassette does not comprise an additional transit peptide in case in Table I, application no. 16, in column 6 in the same line as SEQ ID NO. 12698 is depicted, non-targeted is mentioned.

[78858] In an embodiment the present invention relates to an expresssion cassette comprising a) a promoter, preferably a promoter selected from the group consisting of Big35S, PCUbi, Super and USP, in particular p-PcUBI; and b) the nucleic acid SEQ ID NO. 61070, or a homolog or fragment thereof, or a homolog thereof being depicted in Table I, application no. 16, column 8, in the same line as SEQ ID NO. 61070, preferably the coding region thereof, a homolog or a fragment thereof; which are operable linked.

[78859] In an embodiment thereof the expression cassette comprises in addition c) a nucleic acid molecule encoding a transit peptide, especially a plastidal transit petide in case in Table I, application no. 16, in column 6 in the same line as SEQ ID NO. 61070 is depicted, plastidic is mentioned, or a mitochondrial transit peptide in case in Table I, application no. 16, in column 6 in the same line as SEQ ID NO. 61070 is depicted, mitochondric is mentioned; which is operable linked, too.

[78860] In another embodiment thereof the expression cassette does not comprise an additional transit peptide in case in Table I, application no. 16, in column 6 in the same line as SEQ ID NO. 61070 is depicted, non-targeted is mentioned.

[78861] In an embodiment the present invention relates to an expresssion cassette comprising a) a promoter, preferably a promoter selected from the group consisting of Big35S, PCUbi, Super and USP, in particular p-PcUBI; and b) the nucleic acid SEQ ID NO. 61723, or a homolog or fragment thereof, or a homolog thereof being depicted in Table I, application no. 16, column 8, in the same line as SEQ ID NO. 61723, preferably the coding region thereof, a homolog or a fragment thereof; which are operable linked.

[78862] In an embodiment thereof the expression cassette comprises in addition c) a nucleic acid molecule encoding a transit peptide, especially a plastidal transit petide in case in Table I, application no. 16, in column 6 in the same line as SEQ ID NO. 61723 is depicted, plastidic is mentioned, or a mitochondrial transit peptide in case in Table I, application no. 16, in column 6 in the same line as SEQ ID NO. 61723 is depicted, mitochondric is mentioned; which is operable linked, too.

[78863] In another embodiment thereof the expression cassette does not comprise an additional transit peptide in case in Table I, application no. 16, in column 6 in the same line as SEQ ID NO. 61723 is depicted, non-targeted is mentioned.

[78864] In an embodiment the present invention relates to an expresssion cassette comprising a) a promoter, preferably a promoter selected from the group consisting of Big35S, PCUbi, Super and USP, in particular p-PcUBI; and b) the nucleic acid SEQ ID NO. 62079, or a homolog or fragment thereof, or a homolog thereof being depicted in Table I, application no. 16, column 8, in the same line as SEQ ID NO. 62079, preferably the coding region thereof, a homolog or a fragment thereof; which are operable linked.

[78865] In an embodiment thereof the expression cassette comprises in addition c) a nucleic acid molecule encoding a transit peptide, especially a plastidal transit petide in case in Table I, application no. 16, in column 6 in the same line as SEQ ID NO. 62079 is depicted, plastidic is mentioned, or a mitochondrial transit peptide in case in Table I, application no. 16, in column 6 in the same line as SEQ ID NO. 62079 is depicted, mitochondric is mentioned; which is operable linked, too.

[78866] In another embodiment thereof the expression cassette does not comprise an additional transit peptide in case in Table I, application no. 16, in column 6 in the same line as SEQ ID NO. 62079 is depicted, non-targeted is mentioned.

[78867] In an embodiment the present invention relates to an expresssion cassette comprising a) a promoter, preferably a promoter selected from the group consisting of Big35S, PCUbi, Super and USP, in particular Big35S; and b) the nucleic acid SEQ ID NO. 62717, or a homolog or fragment thereof, or a homolog thereof being depicted in Table I, application no. 16, column 8, in the same line as SEQ ID NO. 62717, preferably the coding region thereof, a homolog or a fragment thereof; which are operable linked.

[78868] In an embodiment thereof the expression cassette comprises in addition c) a nucleic acid molecule encoding a transit peptide, especially a plastidal transit petide in case in Table I, application no. 16, in column 6 in the same line as SEQ ID NO. 62717 is depicted, plastidic is mentioned, or a mitochondrial transit peptide in case in Table I, application no. 16, in column 6 in the same line as SEQ ID NO. 62717 is depicted, mitochondric is mentioned; which is operable linked, too.

[78869] In another embodiment thereof the expression cassette does not comprise an additional transit peptide in case in Table I, application no. 16, in column 6 in the same line as SEQ ID NO. 62717 is depicted, non-targeted is mentioned.

[78870] In an embodiment the present invention relates to an expresssion cassette comprising a) a promoter, preferably a promoter selected from the group consisting of Big35S, PCUbi, Super and USP, in particular p-Super; and b) the nucleic acid SEQ ID NO. 96980, or a homolog or fragment thereof, or a homolog thereof being depicted in Table I, application no. 16, column 8, in the same line as SEQ ID NO. 96980, preferably the coding region thereof, a homolog or a fragment thereof; which are operable linked.

[78871] In an embodiment thereof the expression cassette comprises in addition c) a nucleic acid molecule encoding a transit peptide, especially a plastidal transit petide in case in Table I, application no. 16, in column 6 in the same line as SEQ ID NO. 96980 is depicted, plastidic is mentioned, or a mitochondrial transit peptide in case in Table I, application no. 16, in column 6 in the same line as SEQ ID NO. 96980 is depicted, mitochondric is mentioned; which is operable linked, too.

[78872] In another embodiment thereof the expression cassette does not comprise an additional transit peptide in case in Table I, application no. 16, in column 6 in the same line as SEQ ID NO. 96980 is depicted, non-targeted is mentioned.

[78873] In an embodiment the present invention relates to an expresssion cassette comprising a) a promoter, preferably a promoter selected from the group consisting of Big35S, PCUbi, Super and USP, in particular p-Super; and b) the nucleic acid SEQ ID NO. 14275, or a homolog or fragment thereof, or a homolog thereof being depicted in Table I, application no. 16, column 8, in the same line as SEQ ID NO. 14275, preferably the coding region thereof, a homolog or a fragment thereof; which are operable linked.

[78874] In an embodiment thereof the expression cassette comprises in addition c) a nucleic acid molecule encoding a transit peptide, especially a plastidal transit petide in case in Table I, application no. 16, in column 6 in the same line as SEQ ID NO. 14275 is depicted, plastidic is mentioned, or a mitochondrial transit peptide in case in Table I, application no. 16, in column 6 in the same line as SEQ ID NO. 14275 is depicted, mitochondric is mentioned; which is operable linked, too.

[78875] In another embodiment thereof the expression cassette does not comprise an additional transit peptide in case in Table I, application no. 16, in column 6 in the same line as SEQ ID NO. 14275 is depicted, non-targeted is mentioned.

[78876] In an embodiment the present invention relates to an expresssion cassette comprising a) a promoter, preferably a promoter selected from the group consisting of Big35S, PCUbi, Super and USP, in particular Big35S; and b) the nucleic acid SEQ ID NO. 130903, or a homolog or fragment thereof, or a homolog thereof being depicted in Table I, application no. 16, column 8, in the same line as SEQ ID NO. 130903, preferably the coding region thereof, a homolog or a fragment thereof; which are operable linked.

[78877] In an embodiment thereof the expression cassette comprises in addition c) a nucleic acid molecule encoding a transit peptide, especially a plastidal transit petide in case in Table I, application no. 16, in column 6 in the same line as SEQ ID NO. 130903 is depicted, plastidic is mentioned, or a mitochondrial transit peptide in case in Table I, application no. 16, in column 6 in the same line as SEQ ID NO. 130903 is depicted, mitochondric is mentioned; which is operable linked, too.

[78878] In another embodiment thereof the expression cassette does not comprise an additional transit peptide in case in Table I, application no. 16, in column 6 in the same line as SEQ ID NO. 130903 is depicted, non-targeted is mentioned.

[78879] In an embodiment the present invention relates to an expresssion cassette comprising a) a promoter, preferably a promoter selected from the group consisting of Big35S, PCUbi, Super and USP, in particular p-PcUBI; and b) the nucleic acid SEQ ID NO. 102061, or a homolog or fragment thereof, or a homolog thereof being depicted in Table I, application no. 16, column 8, in the same line as SEQ ID NO. 102061, preferably the coding region thereof, a homolog or a fragment thereof; which are operable linked.

[78880] In an embodiment thereof the expression cassette comprises in addition c) a nucleic acid molecule encoding a transit peptide, especially a plastidal transit petide in case in Table I, application no. 16, in column 6 in the same line as SEQ ID NO. 102061 is depicted, plastidic is mentioned, or a mitochondrial transit peptide in case in Table I, application no. 16, in column 6 in the same line as SEQ ID NO. 102061 is depicted, mitochondric is mentioned; which is operable linked, too.

[78881] In another embodiment thereof the expression cassette does not comprise an additional transit peptide in case in Table I, application no. 16, in column 6 in the same line as SEQ ID NO. 102061 is depicted, non-targeted is mentioned.

[78882] In an embodiment the present invention relates to an expresssion cassette comprising a) a promoter, preferably a promoter selected from the group consisting of Big35S, PCUbi, Super and USP, in particular Big35S; and b) the nucleic acid SEQ ID NO. 139173, or a homolog or fragment thereof, or a homolog thereof being depicted in Table I, application no. 16, column 8, in the same line as SEQ ID NO. 139173, preferably the coding region thereof, a homolog or a fragment thereof; which are operable linked.

[78883] In an embodiment thereof the expression cassette comprises in addition c) a nucleic acid molecule encoding a transit peptide, especially a plastidal transit petide in case in Table I, application no. 16, in column 6 in the same line as SEQ ID NO. 139173 is depicted, plastidic is mentioned, or a mitochondrial transit peptide in case in Table I, application no. 16, in column 6 in the same line as SEQ ID NO. 139173 is depicted, mitochondric is mentioned; which is operable linked, too.

[78884] In another embodiment thereof the expression cassette does not comprise an additional transit peptide in case in Table I, application no. 16, in column 6 in the same line as SEQ ID NO. 139173 is depicted, non-targeted is mentioned.

[78885] In an embodiment the present invention relates to an expresssion cassette comprising a) a promoter, preferably a promoter selected from the group consisting of Big35S, PCUbi, Super and USP, in particular p-Super; and b) the nucleic acid SEQ ID NO. 92540, or a homolog or fragment thereof, or a homolog thereof being depicted in Table I, application no. 16, column 8, in the same line as SEQ ID NO. 92540, preferably the coding region thereof, a homolog or a fragment thereof; which are operable linked.

[78886] In an embodiment thereof the expression cassette comprises in addition c) a nucleic acid molecule encoding a transit peptide, especially a plastidal transit petide in case in Table I, application no. 16, in column 6 in the same line as SEQ ID NO. 92540 is depicted, plastidic is mentioned, or a mitochondrial transit peptide in case in Table I, application no. 16, in column 6 in the same line as SEQ ID NO. 92540 is depicted, mitochondric is mentioned; which is operable linked, too.

[78887] In another embodiment thereof the expression cassette does not comprise an additional transit peptide in case in Table I, application no. 16, in column 6 in the same line as SEQ ID NO. 92540 is depicted, non-targeted is mentioned.

[78888] In an embodiment the present invention relates to an expresssion cassette comprising a) a promoter, preferably a promoter selected from the group consisting of Big35S, PCUbi, Super and USP, in particular Big35S; and b) the nucleic acid SEQ ID NO. 140110, or a homolog or fragment thereof, or a homolog thereof being depicted in Table I, application no. 16, column 8, in the same line as SEQ ID NO. 140110, preferably the coding region thereof, a homolog or a fragment thereof; which are operable linked.

[78889] In an embodiment thereof the expression cassette comprises in addition c) a nucleic acid molecule encoding a transit peptide, especially a plastidal transit petide in case in Table I, application no. 16, in column 6 in the same line as SEQ ID NO. 140110 is depicted, plastidic is mentioned, or a mitochondrial transit peptide in case in Table I, application no. 16, in column 6 in the same line as SEQ ID NO. 140110 is depicted, mitochondric is mentioned; which is operable linked, too.

[78890] In another embodiment thereof the expression cassette does not comprise an additional transit peptide in case in Table I, application no. 16, in column 6 in the same line as SEQ ID NO. 140110 is depicted, non-targeted is mentioned.

[78891] In an embodiment the present invention relates to an expresssion cassette comprising a) a promoter, preferably a promoter selected from the group consisting of Big35S, PCUbi, Super and USP, in particular p-PcUBI; and b) the nucleic acid SEQ ID NO. 68132, or a homolog or fragment thereof, or a homolog thereof being depicted in Table I, application no. 16, column 8, in the same line as SEQ ID NO. 68132, preferably the coding region thereof, a homolog or a fragment thereof; which are operable linked.

[78892] In an embodiment thereof the expression cassette comprises in addition c) a nucleic acid molecule encoding a transit peptide, especially a plastidal transit petide in case in Table I, application no. 16, in column 6 in the same line as SEQ ID NO. 68132 is depicted, plastidic is mentioned, or a mitochondrial transit peptide in case in Table I, application no. 16, in column 6 in the same line as SEQ ID NO. 68132 is depicted, mitochondric is mentioned; which is operable linked, too.

[78893] In another embodiment thereof the expression cassette does not comprise an additional transit peptide in case in Table I, application no. 16, in column 6 in the same line as SEQ ID NO. 68132 is depicted, non-targeted is mentioned.

[78894] [0165.1.7.16] to [0170.1.7.16] for the disclosure of theses paragraphs see [0165.1.7.7] to [0170.1.7.7] above

[78895] The invention further provides a vector, comprising a nucleic acid molecule comprising 1) a nucleic acid molecule selected from the group consisting of:
[78896] (a) a nucleic acid molecule encoding a polypeptide shown in Table II, column 5 or 8, application no. 16, preferably shown in Table II A, application no. 16, in column 5, or in Table II A, application no. 16, column 8, or in Table II B, application no. 16, column 8, or a homolog or a fragment thereof;
[78897] (b) a nucleic acid molecule shown in Table I, application no. 16, column 5 or 8, preferably shown in Table I A, application no. 16, in column 5, or in Table I A, application no. 16, column 8, or in Table I B, application no. 16, column 8, preferably the coding region thereof, or a homolog or a fragment thereof;
[78898] (c) a nucleic acid molecule, which, as a result of the degeneracy of the genetic code, can be derived from a polypeptide sequence depicted in column 5 or 8 of Table II, application no. 16, preferably shown in Table II A, application no. 16, in column 5, or in Table II A, application no. 16, column 8, or in Table II B, application no. 16, column 8;
[78899] (d) a nucleic acid molecule having at least 30% identity, preferably at least 40%, 50%, 60%, 70%, 75%, 80%, 85%, 90%, 95%, 96%, 97%, 98%, 99%, 99.5%, with the nucleic acid molecule sequence of a polynucleotide comprising the nucleic acid molecule shown in column 5 or 8 of Table I, application no. 16, preferably shown in Table I A, application no. 16, in column 5, or in Table I A, application no. 16, column 8, or in Table I B, application no. 16, column 8, preferably the coding region thereof;
[78900] (e) a nucleic acid molecule encoding a polypeptide having at least 30% identity, preferably at least 40%, 50% 60%, 70%, 75%, 80%, 85%, 90%, 95%, 96%, 97%, 98%, 99%, 99.5%, identity with the amino acid sequence of the polypeptide encoded by the nucleic acid molecule of (a), (b), (c), or (d);
[78901] (f) a nucleic acid molecule which hybridizes with a nucleic acid molecule of (a), (b), (c), (d), or (e) under stringent hybridization conditions;
[78902] (g) a nucleic acid molecule encoding a polypeptide which can be isolated with the aid of monoclonal or polyclonal antibodies made against a polypeptide encoded by one of the nucleic acid molecules of (a), (b), (c), (d), (e) or (f);
[78903] (h) a nucleic acid molecule encoding a polypeptide comprising the consensus sequence or one or more polypeptide motifs as shown in column 8 of Table IV, application no. 16;
[78904] (i) a nucleic acid molecule encoding a polypeptide having the activity represented by a protein as depicted in column 5 of Table II, application no. 16;
[78905] (j) a nucleic acid molecule comprising a polynucleotide which is obtained by amplifying a cDNA library or a genomic library using the primers in Table III, application no. 16, column 8;
[78906] and
[78907] (k) nucleic acid molecule which is obtainable by screening a suitable nucleic acid library, especially a cDNA library and/or a genomic library, under stringent hybridization conditions with a probe comprising one of the sequences of the nucleic acid molecule of (a), (b), (c), (d), (e), (f), (g), (h), (i) or (j) or with a fragment thereof having at least 15 nt, preferably 20 nt, 30 nt, 50 nt, 100 nt, 200 nt, 500 nt, 1000 nt, 1500 nt, 2000 nt or 3000 nt of the nucleic acid molecule complementary to a nucleic acid sequence characterized in (a), (b), (c), (d), (e), (f), (g), (h), (i) or (j);
[78908] or a nucleic acid molecule comprising a sequence which is complementary thereto.
   (All the references to Tables I to IV are references to the corresponding lines of Tables I to IV.)

[78909] In a preferred embodiment of said vector said nucleic acid molecule according to 1 (a), (b), (c), (d), (e), (f), (g), (h), (i), (j) or (k) encodes a polypeptide which has the activity of the respective polypeptide represented by a protein comprising a polypeptide as depicted in the respective line in column 5 of Table II, application no. 16.

[78910] In another preferred embodiment of said vector said nucleic acid molecule according to 1 (a), (b), (c), (d), (e), (f), (g), (h), (i), (j) or (k) confers a generation or an increase of the respective fine chemical in a non-human organism or a part thereof as compared to a corresponding wildtype non-human organism or part thereof.

[78911] In another preferred embodiment of said vector said nucleic acid molecule according to 1 (a), (b), (c), (d), (e), (f), (g), (h), (i), (j) or (k) encodes a polypeptide which has the activity of the respective polypeptide represented by a protein as depicted in the respective line in column 5 of Table II, application no. 16, and confers a generation or an increase of the respective fine chemical in a non-human organism or a part thereof as compared to a corresponding wild-type non-human organism or part thereof.

[78912] In another embodiment thereof said vector comprises beneath said nucleic acid molecule according to 1 (a), (b), (c), (d), (e), (f), (g), (h), (i), (j) or (k), a promoter, preferably a promoter selected from the group consisting of Big35S, PCUbi, Super and USP, which are operable linked.

[78913] In a preferred embodiment thereof said vector comprises beneath said nucleic acid molecule according to 1 (a), (b), (c), (d), (e), (f), (g), (h), (i), (j) or (k), a promoter, preferably a promoter selected from the group consisting of Big35S, PCUbi, Super and USP, which are operable linked; and said nucleic acid molecule according to 1 (a), (b), (c), (d), (e), (f), (g), (h), (i), (j) or (k) encodes a polypeptide which has the activity of the respective polypeptide represented by a protein comprising a polypeptide as depicted in the respective line in column 5 of Table II, application no. 16.

[78914] In another preferred embodiment thereof said vector comprises beneath said nucleic acid molecule according to 1 (a), (b), (c), (d), (e), (f), (g), (h), (i), (j) or (k), a promoter, preferably a promoter selected from the group consisting of Big35S, PCUbi, Super and USP, which are operable linked; and said nucleic acid molecule according to 1 (a), (b), (c), (d), (e), (f), (g), (h), (i), (j) or (k) confers a generation or an increase of the respective fine chemical in a non-human organism or a part thereof as compared to a corresponding wild-type non-human organism or part thereof.

[78915] In another preferred embodiment thereof said vector comprises beneath said nucleic acid molecule according to 1 (a), (b), (c), (d), (e), (f), (g), (h), (i), (j) or (k), a promoter, preferably a promoter selected from the group consisting of Big35S, PCUbi, Super and USP, which are operable linked; and said nucleic acid molecule according to 1 (a), (b), (c), (d), (e), (f), (g), (h), (i), (j) or (k) encodes a polypeptide which has the activity of the respective polypeptide represented by a protein as depicted in the respective line in column 5 of Table II, application no. 16, and confers a generation or an increase of the respective fine chemical in a non-human organism or a part thereof as compared to a corresponding wild-type non-human organism or part thereof.

[78916] In another embodiment thereof said vector comprises beneath said nucleic acid molecule according to 1 (a), (b), (c), (d), (e), (f), (g), (h), (i), (j) or (k), a nucleic acid molecule encoding a transit peptide, preferably encoding a plastidal transit peptide, especially in case in column 6 of Table I, application no. 16, in the same line as of the respective nucleic acid molecule according to 1) “plastidic” is depicted, or encoding a mitochondrial transit peptide, especially in case in column 6 of Table I, application no. 16, in the same line as of the respective nucleic acid molecule according to 1) “mitochondric” is depicted, which are operable linked.

[78917] In another embodiment thereof said vector does not comprise beneath said nucleic acid molecule according to 1 (a), (b), (c), (d), (e), (f), (g), (h), (i), (j) or (k), a nucleic acid molecule encoding a transit peptide in case in column 6 of Table I, application no. 16, in the same line as of the respective nucleic acid molecule according to 1) “non-targeted” is depicted.

[78918] In another embodiment thereof said vector comprises beneath said nucleic acid molecule according to 1 (a), (b), (c), (d), (e), (f), (g), (h), (i), (j) or (k), and a promoter, preferably a promoter selected from the group consisting of Big35S, PCUbi, Super and USP; a nucleic acid molecule encoding a transit peptide, preferably encoding a plastidal transit peptide, especially in case in column 6 of Table I, application no. 16, in the same line as of the respective nucleic acid molecule according to 1) “plastidic” is depicted, or encoding a mitochondrial transit peptide, especially in case in column 6 of Table I, application no. 16, in the same line as of the respective nucleic acid molecule according to 1) “mitochondric” is depicted, which are operable linked.

[78919] In another embodiment thereof said vector does not comprise beneath said nucleic acid molecule according to 1 (a), (b), (c), (d), (e), (f), (g), (h), (i), (j) or (k), and a promoter, preferably a promoter selected from the group consisting of Big35S, PCUbi, Super and USP, which are operable linked; a nucleic acid molecule encoding a transit peptide, especially in case in column 6 of Table I, application no. 16, in the same line as of the respective nucleic acid molecule according to 1) “non-targeted” is depicted.

[78920] In another embodiment thereof said vector comprises beneath said nucleic acid molecule according to 1 (a), (b), (c), (d), (e), (f), (g), (h), (i), (j) or (k), and a promoter, preferably a promoter selected from the group consisting of Big35S, PCUbi, Super and USP; a nucleic acid molecule encoding a transit peptide, preferably encoding a plastidal transit peptide, especially in case in column 6 of Table I, application no. 16, in the same line as of the respective nucleic acid molecule according to 1) “plastidic” is depicted, or encoding a mitochondrial transit peptide, especially in case in column 6 of Table I, application no. 16, in the same line as of the respective nucleic acid molecule according to 1) “mitochondric” is depicted, which are operable linked; and wherein said nucleic acid molecule according to 1 (a), (b), (c), (d), (e), (f), (g), (h), (i), (j) or (k) encodes a polypeptide which has the activity of the respective polypeptide represented by a protein comprising a polypeptide as depicted in column 5 of Table II, application no. 16 (in the same line).

[78921] In another embodiment thereof said vector does not comprise beneath said nucleic acid molecule according to 1 (a), (b), (c), (d), (e), (f), (g), (h), (i), (j) or (k), and a promoter, preferably a promoter selected from the group consisting of Big35S, PCUbi, Super and USP, which are operatively linked; a nucleic acid molecule encoding a transit peptide, especially in case in column 6 of Table I, application no. 16, in the same line as of the respective nucleic acid molecule according to 1) “non-targeted” is depicted; and wherein said nucleic acid molecule according to 1 (a), (b), (c), (d), (e), (f), (g), (h), (i), (j) or (k) encodes a polypeptide which has the activity of the respective polypeptide represented by a protein comprising a polypeptide as depicted in column 5 of Table II, application no. 16.

[78922] In another embodiment thereof said vector comprises beneath said nucleic acid molecule according to 1 (a), (b), (c), (d), (e), (f), (g), (h), (i), (j) or (k), and a promoter, preferably a promoter selected from the group consisting of Big35S, PCUbi, Super and USP; a nucleic acid molecule encoding a transit peptide, preferably encoding a plastidal transit peptide, especially in case in column 6 of Table I, application no. 16, in the same line as of the respective nucleic acid molecule according to 1) “plastidic” is depicted, or encoding a mitochondrial transit peptide, especially in case in column 6 of Table I, application no. 16, in the same line as of the respective nucleic acid molecule according to 1) “mitochondric” is depicted, which are operable linked; and wherein said nucleic acid molecule according to 1 (a), (b), (c), (d), (e), (f), (g), (h), (i), (j) or (k) confers a generation or an increase of the respective fine chemical in a non-human organism or a part thereof as compared to a corresponding wild-type non-human organism or part thereof.

[78923] In another embodiment thereof said vector does not comprise beneath said nucleic acid molecule according to 1 (a), (b), (c), (d), (e), (f), (g), (h), (i), (j) or (k), and a promoter, preferably a promoter selected from the group consisting of Big35S, PCUbi, Super and USP, which are operatively linked; a nucleic acid molecule encoding a transit peptide, especially in case in column 6 of Table I, application no. 16, in the same line as of the respective nucleic acid molecule according to 1) “non-targeted” is depicted; and wherein said nucleic acid molecule according to 1 (a), (b), (c), (d), (e), (f), (g), (h), (i), (j) or (k) confers a generation or an increase of the respective fine chemical in a non-human organism or a part thereof as compared to a corresponding wild-type non-human organism or part thereof.

[78924] In another embodiment thereof said vector comprises beneath said nucleic acid molecule according to 1 (a), (b), (c), (d), (e), (f), (g), (h), (i), (j) or (k), and a promoter, preferably a promoter selected from the group consisting of Big35S, PCUbi, Super and USP; a nucleic acid molecule encoding a transit peptide, preferably encoding a plastidal transit peptide, especially in case in column 6 of Table I, application no. 16, in the same line as of the respective nucleic acid molecule according to 1) “plastidic” is depicted, or encoding a mitochondrial transit peptide, especially in case in column 6 of Table I, application no. 16, in the same line as of the respective nucleic acid molecule according to 1) “mitochondric” is depicted, which are operable linked; and wherein said nucleic acid molecule according to 1 (a), (b), (c), (d), (e), (f), (g), (h), (i), (j) or (k) encodes a polypeptide which has the activity of the respective polypeptide represented by a protein as depicted in column 5 of Table II application no. 16 and confers a generation or an increase of the respective fine chemical in a non-human organism or a part thereof as compared to a corresponding wild-type non-human organism or part thereof.

[78925] In another embodiment thereof said vector does not comprise beneath said nucleic acid molecule according to 1 (a), (b), (c), (d), (e), (f), (g), (h), (i), (j) or (k), and a promoter, preferably a promoter selected from the group consisting of Big35S, PCUbi, Super and USP, which are operatively linked; a nucleic acid molecule encoding a transit peptide, especially in case in column 6 of Table I, application no. 16, in the same line as of the respective nucleic acid molecule according to 1) “non-targeted” is depicted; and wherein said nucleic acid molecule according to 1 (a), (b), (c), (d), (e), (f), (g), (h), (i), (j) or (k) encodes a polypeptide which has the activity of the respective polypeptide represented by a protein as depicted in column 5 of Table II application no. 16 (in the same line) and confers a generation or an increase of the respective fine chemical in a non-human organism or a part thereof as compared to a corresponding wild-type non-human organism or part thereof.

[78926] In a preferred embodiment of said vector said nucleic acid molecule according to 1 (a), (b), (c), (d), (e), (f), (g), (h), (i), (j) or (k), said promoter and optionally said nucleic acid molecule encoding a transit peptide are encompassed in an expression cassette. Accordingly in an embodiment the invention provides a vector comprising an expression cassette comprising said nucleic acid molecule according to 1 (a), (b), (c), (d), (e), (f), (g), (h), (i), (j) or (k), said promoter and optionally said a nucleic acid molecule encoding a transit peptide, operable linked. Said expression cassette may encompass a terminator, too.

[78927] The invention further provides a vector comprising a nucleic acid molecule comprising 1) a nucleic acid molecule selected from the group consisting of:
[78928] (a) a nucleic acid molecule encoding a polypeptide shown in Table II, column 5 or 8, application no. 16, preferably shown in Table II A, application no. 16, in column 5, or in Table II A, application no. 16, column 8, or in Table II B, application no. 16, column 8, or a homolog or a fragment thereof;
[78929] (b) a nucleic acid molecule shown in Table I, application no. 16, column 5 or 8, preferably shown in Table I A, application no. 16, in column 5, or in Table I A, application no. 16, column 8, or in Table I B, application no. 16, column 8, preferably the coding region thereof, or a homolog or a fragment thereof;
[78930] (c) a nucleic acid molecule, which, as a result of the degeneracy of the genetic code, can be derived from a polypeptide sequence depicted in column 5 or 8 of Table II, application no. 16, preferably shown in Table II A, application no. 16, in column 5, or in Table II A, application no. 16, column 8, or in Table II B, application no. 16, column 8;
[78931] (d) a nucleic acid molecule having at least 30% identity, preferably at least 40%, 50%, 60%, 70%, 75%, 80%, 85%, 90%, 95%, 96%, 97%, 98%, 99%, 99.5%, with the nucleic acid molecule sequence of a polynucleotide comprising the nucleic acid molecule shown in column 5 or 8 of Table I, application no. 16, preferably shown in Table I A, application no. 16, in column 5, or in Table I A, application no. 16, column 8, or in Table I B, application no. 16, column 8, preferably the coding region thereof;
[78932] (e) a nucleic acid molecule encoding a polypeptide having at least 30% identity, preferably at least 40%, 50% 60%, 70%, 75%, 80%, 85%, 90%, 95%, 96%, 97%, 98%, 99%, 99.5%, identity with the amino acid sequence of the polypeptide encoded by the nucleic acid molecule of (a), (b), (c), or (d);
[78933] (f) a nucleic acid molecule which hybridizes with a nucleic acid molecule of (a), (b), (c), (d), or (e) under stringent hybridization conditions;
[78934] (g) a nucleic acid molecule encoding a polypeptide which can be isolated with the aid of monoclonal or polyclonal antibodies made against a polypeptide encoded by one of the nucleic acid molecules of (a), (b), (c), (d), (e) or (f);
[78935] (h) a nucleic acid molecule encoding a polypeptide comprising the consensus sequence or one or more polypeptide motifs as shown in column 8 of Table IV, application no. 16;
[78936] (i) a nucleic acid molecule encoding a polypeptide having the activity represented by a protein as depicted in column 5 of Table II, application no. 16;
[78937] (j) a nucleic acid molecule comprising a polynucleotide which is obtained by amplifying a cDNA library or a genomic library using the primers in Table III, application no. 16, column 8;
[78938] and
[78939] (k) nucleic acid molecule which is obtainable by screening a suitable nucleic acid library, especially a cDNA library and/or a genomic library, under stringent hybridization conditions with a probe comprising one of the sequences of the nucleic acid molecule of (a), (b), (c), (d), (e), (f), (g), (h), (i) or (j) or with a fragment thereof having at least 15 nt, preferably 20 nt, 30 nt, 50 nt, 100 nt, 200 nt, 500 nt, 1000 nt, 1500 nt, 2000 nt or 3000 nt of the nucleic acid molecule complementary to a nucleic acid sequence characterized in (a), (b), (c), (d), (e), (f), (g), (h), (i) or (j);
[78940] or a nucleic acid molecule comprising a sequence which is complementary thereto;
   whereby, preferably, the nucleic acid molecule according to 1 (a), (b), (c), (d), (e), (f), (g), (h), (i), (j) or (k) distinguishes over the sequence depicted in Table I A and/or I B, application no. 16, column 5 or 8, or the coding region thereof, by one or more nucleotides (especially but not exceeding 5%, preferably 4%, 3%, 2%, 1%, 0.5%, 0.2% or 0.1%). In an embodiment, the nucleic acid molecule of the invention does not consist of the sequence shown in Table I A and/or I B, application no. 16, column 5 or 8, or the coding region thereof, respectively. In another embodiment, the nucleic acid molecule of the present invention, preferably the coding region thereof, is 30%, 40%, 50%, 60%, 70%, 80%, 90%, 95% identical but less than 100%, 99.999%, 99.99%, 99.9%, 99%, 98%, 97%, 96% or 95% identical to the sequence shown in Table I A and/or I B, application no. 16, column 5 or 8, or the coding region thereof, respectively. In a further embodiment the nucleic acid molecule does not encode the polypeptide sequence shown in Table II A and/or II B, application no. 16, column 5 or 8 but homologs thereof. Accordingly, in one embodiment, the nucleic acid molecule of the present invention encodes in one embodiment a polypeptide which differs at least in one or more amino acids (especially but not exceeding 5%, preferably 4%, 3%, 2%, 1%, 0.5%, 0.2% or 0.1%) from the polypeptide shown in Table II, application no. 16, column 5 or 8 and does not encode a protein of the sequence shown in Table II A and/or II B, application no. 16, column 5 or 8. Accordingly, in one embodiment, the protein encoded by a sequence of a nucleic acid according to (a), (b), (c), (d), (e), (f), (g), (h), (i), (j) or (k) does not consist of the sequence shown in Table I A and/or I B, application no. 16, column 5 and 8, or the coding region thereof. In a further embodiment, the protein of the present invention is at least 30%,40%, 50%, 60%, 70%, 80%, 90%, 95% identical to protein sequence depicted in Table II A and/or II B, application no. 16, column 5 or 8 but less than 100%, preferably less than 99.999%, 99.99% or 99.9%, more preferably less than 99%, 985, 97%, 96% or 95% identical to the sequence shown in Table II A and/or II B, application no. 16, column 5 or 8.
   (All the references to Tables I to IV are references to the corresponding lines of Tables I to IV.)

[78941] In a preferred embodiment of said vector said nucleic acid molecule according to 1 (a), (b), (c), (d), (e), (f), (g), (h), (i), (j) or (k) encodes a polypeptide which has the activity of the respective polypeptide represented by a protein comprising a polypeptide as depicted in the respective line in column 5 of Table II, application no. 16.

[78942] In another preferred embodiment of said vector said nucleic acid molecule according to 1 (a), (b), (c), (d), (e), (f), (g), (h), (i), (j) or (k) confers a generation or an increase of the respective fine chemical in a non-human organism or a part thereof as compared to a corresponding wildtype non-human organism or part thereof.

[78943] In another preferred embodiment of said vector said nucleic acid molecule according to 1 (a), (b), (c), (d), (e), (f), (g), (h), (i), (j) or (k) encodes a polypeptide which has the activity of the respective polypeptide represented by a protein as depicted in the respective line in column 5 of Table II, application no. 16, and confers a generation or an increase of the respective fine chemical in a non-human organism or a part thereof as compared to a corresponding wild-type non-human organism or part thereof.

[78944] In another embodiment thereof said vector comprises beneath said nucleic acid molecule according to 1 (a), (b), (c), (d), (e), (f), (g), (h), (i), (j) or (k), a promoter, preferably a promoter selected from the group consisting of Big35S, PCUbi, Super and USP, which are operable linked.

[78945] In a preferred embodiment thereof said vector comprises beneath said nucleic acid molecule according to 1 (a), (b), (c), (d), (e), (f), (g), (h), (i), (j) or (k), a promoter, preferably a promoter selected from the group consisting of Big35S, PCUbi, Super and USP, which are operable linked; and said nucleic acid molecule according to 1 (a), (b), (c), (d), (e), (f), (g), (h), (i), (j) or (k) encodes a polypeptide which has the activity of the respective polypeptide represented by a protein comprising a polypeptide as depicted in the respective line in column 5 of Table II, application no. 16.

[78946] In another preferred embodiment thereof said vector comprises beneath said nucleic acid molecule according to 1 (a), (b), (c), (d), (e), (f), (g), (h), (i), (j) or (k), a promoter, preferably a promoter selected from the group consisting of Big35S, PCUbi, Super and USP, which are operable linked; and said nucleic acid molecule according to 1 (a), (b), (c), (d), (e), (f), (g), (h), (i), (j) or (k) confers a generation or an increase of the respective fine chemical in a non-human organism or a part thereof as compared to a corresponding wild-type non-human organism or part thereof.

[78947] In another preferred embodiment thereof said vector comprises beneath said nucleic acid molecule according to 1 (a), (b), (c), (d), (e), (f), (g), (h), (i), (j) or (k), a promoter, preferably a promoter selected from the group consisting of Big35S, PCUbi, Super and USP, which are operable linked; and said nucleic acid molecule according to 1 (a), (b), (c), (d), (e), (f), (g), (h), (i), (j) or (k) encodes a polypeptide which has the activity of the respective polypeptide represented by a protein as depicted in the respective line in column 5 of Table II, application no. 16, and confers a generation or an increase of the respective fine chemical in a non-human organism or a part thereof as compared to a corresponding wild-type non-human organism or part thereof.

[78948] In another embodiment thereof said vector comprises beneath said nucleic acid molecule according to 1 (a), (b), (c), (d), (e), (f), (g), (h), (i), (j) or (k), a nucleic acid molecule encoding a transit peptide, preferably encoding a plastidal transit peptide, especially in case in column 6 of Table I, application no. 16, in the same line as of the respective nucleic acid molecule according to 1) “plastidic” is depicted, or encoding a mitochondrial transit peptide, especially in case in column 6 of Table I, application no. 16, in the same line as of the respective nucleic acid molecule according to 1) “mitochondric” is depicted, which are operable linked.

[78949] In another embodiment thereof said vector does not comprise beneath said nucleic acid molecule according to 1 (a), (b), (c), (d), (e), (f), (g), (h), (i), (j) or (k), a nucleic acid molecule encoding a transit peptide in case in column 6 of Table I, application no. 16, in the same line as of the respective nucleic acid molecule according to 1) “non-targeted” is depicted.

[78950] In another embodiment thereof said vector comprises beneath said nucleic acid molecule according to 1 (a), (b), (c), (d), (e), (f), (g), (h), (i), (j) or (k), and a promoter, preferably a promoter selected from the group consisting of Big35S, PCUbi, Super and USP; a nucleic acid molecule encoding a transit peptide, preferably encoding a plastidal transit peptide, especially in case in column 6 of Table I, application no. 16, in the same line as of the respective nucleic acid molecule according to 1) “plastidic” is depicted, or encoding a mitochondrial transit peptide, especially in case in column 6 of Table I, application no. 16, in the same line as of the respective nucleic acid molecule according to 1) “mitochondric” is depicted, which are operable linked.

[78951] In another embodiment thereof said vector does not comprise beneath said nucleic acid molecule according to 1 (a), (b), (c), (d), (e), (f), (g), (h), (i), (j) or (k), and a promoter, preferably a promoter selected from the group consisting of Big35S, PCUbi, Super and USP, which are operatively linked; a nucleic acid molecule encoding a transit peptide, especially in case in column 6 of Table I, application no. 16, in the same line as of the respective nucleic acid molecule according to 1) “non-targeted” is depicted.

[78952] In another embodiment thereof said vector comprises beneath said nucleic acid molecule according to 1 (a), (b), (c), (d), (e), (f), (g), (h), (i), (j) or (k), and a promoter, preferably a promoter selected from the group consisting of Big35S, PCUbi, Super and USP; a nucleic acid molecule encoding a transit peptide, preferably encoding a plastidal transit peptide, especially in case in column 6 of Table I, application no. 16, in the same line as of the respective nucleic acid molecule according to 1) “plastidic” is depicted, or encoding a mitochondrial transit peptide, especially in case in column 6 of Table I, application no. 16, in the same line as of the respective nucleic acid molecule according to 1) “mitochondric” is depicted, which are operable linked; and wherein said nucleic acid molecule according to 1 (a), (b), (c), (d), (e), (f), (g), (h), (i), (j) or (k) encodes a polypeptide which has the activity of the respective polypeptide represented by a protein comprising a polypeptide as depicted in column 5 of Table II, application no. 16.

[78953] In another embodiment thereof said vector does not comprise beneath said nucleic acid molecule according to 1 (a), (b), (c), (d), (e), (f), (g), (h), (i), (j) or (k), and a promoter, preferably a promoter selected from the group consisting of Big35S, PCUbi, Super and USP, which are operatively linked; a nucleic acid molecule encoding a transit peptide, especially in case in column 6 of Table I, application no. 16, in the same line as of the respective nucleic acid molecule according to 1) “non-targeted” is depicted; and wherein said nucleic acid molecule according to 1 (a), (b), (c), (d), (e), (f), (g), (h), (i), (j) or (k) encodes a polypeptide which has the activity of the respective polypeptide represented by a protein comprising a polypeptide as depicted in column 5 of Table II, application no. 16.

[78954] In another embodiment thereof said vector comprises beneath said nucleic acid molecule according to 1 (a), (b), (c), (d), (e), (f), (g), (h), (i), (j) or (k), and a promoter, preferably a promoter selected from the group consisting of Big35S, PCUbi, Super and USP; a nucleic acid molecule encoding a transit peptide, preferably encoding a plastidal transit peptide, especially in case in column 6 of Table I, application no. 16, in the same line as of the respective nucleic acid molecule according to 1) “plastidic” is depicted, or encoding a mitochondrial transit peptide, especially in case in column 6 of Table I, application no. 16, in the same line as of the respective nucleic acid molecule according to 1) “mitochondric” is depicted, which are operable linked; and wherein said nucleic acid molecule according to 1 (a), (b), (c), (d), (e), (f), (g), (h), (i), (j) or (k) confers a generation or an increase of the respective fine chemical in a non-human organism or a part thereof as compared to a corresponding wild-type non-human organism or part thereof.

[78955] In another embodiment thereof said vector does not comprise beneath said nucleic acid molecule according to 1 (a), (b), (c), (d), (e), (f), (g), (h), (i), (j) or (k), and a promoter, preferably a promoter selected from the group consisting of Big35S, PCUbi, Super and USP, which are operatively linked; a nucleic acid molecule encoding a transit peptide, especially in case in column 6 of Table I, application no. 16, in the same line as of the respective nucleic acid molecule according to 1) “non-targeted” is depicted; and wherein said nucleic acid molecule according to 1 (a), (b), (c), (d), (e), (f), (g), (h), (i), (j) or (k) confers a generation or an increase of the respective fine chemical in a non-human organism or a part thereof as compared to a corresponding wild-type non-human organism or part thereof.

[78956] In another embodiment thereof said vector comprises beneath said nucleic acid molecule according to 1 (a), (b), (c), (d), (e), (f), (g), (h), (i), (j) or (k), and a promoter, preferably a promoter selected from the group consisting of Big35S, PCUbi, Super and USP; a nucleic acid molecule encoding a transit peptide, preferably encoding a plastidal transit peptide, especially in case in column 6 of Table I, application no. 16, in the same line as of the respective nucleic acid molecule according to 1) “plastidic” is depicted, or encoding a mitochondrial transit peptide, especially in case in column 6 of Table I, application no. 16, in the same line as of the respective nucleic acid molecule according to 1) “mitochondric” is depicted, which are operable linked; and wherein said nucleic acid molecule according to 1 (a), (b), (c), (d), (e), (f), (g), (h), (i), (j) or (k) encodes a polypeptide which has the activity of the respective polypeptide represented by a protein as depicted in column 5 of Table II application no. 16 and confers a generation or an increase of the respective fine chemical in a non-human organism or a part thereof as compared to a corresponding wild-type non-human organism or part thereof.

[78957] In another embodiment thereof said vector does not comprise beneath said nucleic acid molecule according to 1 (a), (b), (c), (d), (e), (f), (g), (h), (i), (j) or (k), and a promoter, preferably a promoter selected from the group consisting of Big35S, PCUbi, Super and USP, which are operatively linked; a nucleic acid molecule encoding a transit peptide, especially in case in column 6 of Table I, application no. 16, in the same line as of the respective nucleic acid molecule according to 1) “non-targeted” is depicted; and wherein said nucleic acid molecule according to 1 (a), (b), (c), (d), (e), (f), (g), (h), (i), (j) or (k) encodes a polypeptide which has the activity of the respective polypeptide represented by a protein as depicted in column 5 of Table II application no. 16 and confers a generation or an increase of the respective fine chemical in a non-human organism or a part thereof as compared to a corresponding wild-type non-human organism or part thereof.

[78958] [0181.1.7.16] to [0209.1.7.16] for the disclosure of these paragraphs see [0181.1.7.7] to [0209.1.7.7] above

[78959] The genes of the invention, coding in one embodiment for an activity selected from the group consisting of 2-C-methyl-D-erythritol 4-phosphate cytidylyltransferase, acetolactate synthase III large subunit, acetyltransferase, acid shock protein, amino acid ABC transporter permease protein, amino acid acetyltransferase, At1g47380-protein, ATP synthase subunit E, ATP-binding component of a transport system, auxin response factor, AX653549-protein, AY087308-protein, b1003-protein, b1097-protein, b1522-protein, b2032-protein, b2739-protein, b2849-protein, b3817-protein, b4029-protein, beta-galactosidase, calcium-dependent protein kinase, cation-transporting ATPase, CCAAT-binding transcription factor, cell division control protein, colanic acid biosynthesis protein, CTP synthase, cyclin D , disease resistance protein, enoyl-CoA hydratase, fatty acid desaturase, F-box protein, flavodoxin, gluconate transport system permease 3, glutamine amidotransferase, glutaredoxin, glycerol dehydrogenase, glycerol-3-phosphate dehydrogenase, glycosyl transferase, halotolerance protein, heat shock protein Hsp40, heat shock transcription factor, histone acetyltransferase, hydrolase, isopropylmalate isomerase large subunit, L-aspartate oxidase, lipase, MADS box protein transcription factor, malate dehydrogenase, methylglyoxal synthase, methyltransferase, mitogen-activated protein kinase, monothiol glutaredoxin, multiple antibiotic resistance protein, N-acetyl-gamma-glutamylphosphate reductase, NADH dehydrogenase I chain I, oxidoreductase, permease protein of ABC transporter, phenylalanine ammonia-lyase, phosphoadenosine phosphosulfate reductase, phosphopantothenoylcysteine decarboxylase, photosystem II protein, protein kinase, protein phosphatase, pyruvate kinase, recombinase A, Ribose import ATP-binding protein, Sec-independent protein translocase subunit, serine protease, serine/threonine-protein phosphatase, sll1761-protein, slr1107-protein, sterol desaturase, threonine synthase, transcription factor, transcriptional regulator, TTC1386-protein, uroporphyrin-III C-methyltransferase, ycl027w-protein, zinc finger protein, and zinc transporter are also called “FCRP genes”.

[78960] [0211.1.7.16] to [0225.1.7.16] for the disclosure of these paragraphs see [0211.1.7.7] to [0225.1.7.7] above

[78961] In addition to the sequence mentioned in Table I, application no. 16, column 5 or 8, preferably the coding region thereof, or its homologs or fragments, it may be advantageous additionally to express and/or mutate further genes in the non-human organisms. Especially advantageously, additionally at least one further gene of the biosynthetic pathway of the fine chemical is expressed in the non-human organisms such as plants or microorganisms. It is also possible that the regulation of the natural genes has been modified advantageously so that the gene and/or its gene product is no longer subject to the regulatory mechanisms which exist in the non-human organisms. This leads to an increased synthesis of the respective cofactor since, for example, feedback regulations no longer exist to the same extent or not at all. In addition it might be advantageously to combine the nucleic acids sequences of the invention containing the sequences shown in the respective line in Table I, application no. 16, column 5 or 8, preferably the coding region thereof, or homologs or fragments thereof, with genes which generally support or enhance the growth or yield of the target non-human organisms, for example genes which lead to faster growth rate of non human organism like microorganisms or plants or genes which produce stress-, pathogen-, or herbicide-resistant plants.

[78962] In a further embodiment of the process of the invention, non-human organisms are grown, in which there is in addition to the expression of the nucleic acid molecule according to the invention simultaneous expression of at least one nucleic acid molecule or one of the genes which code for proteins involved in the isoprenoid and/or quinone metabolism, in particular in Coenzyme Q9 or Coenzyme Q10 synthesis. Especially advantageously, additionally at least one further gene of the isoprenoid biosynthetic pathway such as for acetyl CoA, HMG-CoA, Mevalonate, Isopentyl pyrophosphate, Geranyl pyrophosphate, Farnesyl pyrophosphate e.g. HMG-CoA Reductase, Mevalonate, Kinase, etc., is expressed in the organisms such as plants or microorganisms. It is also possible that the regulation of the natural genes has been modified advantageously so that the gene and/or its gene product is no longer subject to the regulatory mechanisms which exist in the organisms.

[78963] This leads to an increased synthesis of the isoprenoids, coenzyme precursor or coenzymes, preferably Q9 and/or Q10, as desired since, for example, feedback regulations no longer exist to the same extent or not at all.

[78964] In a further embodiment of the process of the invention, non-human organisms are grown, in which there is in addition to the expression of the nucleic acid molecule according to the invention simultaneous expression of at least one nucleic acid molecule or one of the genes which code for proteins involved in the tryptophan metabolism and/or involved in the pyridine nucleotide cycling: nicotinate phosphoribosyltransferase (EC 2.4.2.11) and/or nicotinamidas (EC 3.5.1.19).

[78965] In a further embodiment of the process of the invention, non-human organisms are grown, in which there is in addition to the expression of the nucleic acid molecule according to the invention simultaneous expression of at least one nucleic acid molecule or one of the genes which code for proteins involved in the octanoic acid metabolism, for example LipA (EC 2.8.1.8) and/or LipB (EC 2.3.1.181) and/or genes which code for proteins having activity in conversion of octanyolated protein domains to lipoylated protein domains using S-adenosyl-methionine as sulfur donor have been identified, e.g.: lipoic acid.

[78966] [0228.1.7.16] to [0239.1.7.16] for the disclosure of these paragraphs see [0228.1.7.7] to [0239.1.7.7] above

[78967] In an embodiment of the present invention the nucleic acid construct of the present invention comprises a nucleic acid molecule as depicted in the respective line in Table I, application no. 16, column 5 or 8, preferably the coding region thereof, a fragment or a homolog thereof, and a plant promoter, such as the Big 35S promoter, the DC3 promoter, the PC Ubi promoter, the LegB4-promoter, the Super promoter, the USP promoter or the like. In another embodiment the nucleic acid construct of the present invention comprises a nucleic acid molecule as depicted in the respective line in Table I, application no. 16, column 5 or 8, preferably the coding region thereof, a fragment or a homolog thereof, and a plant promoter such as, for example, the USP, the LegB4-, the DC3 promoter or the ubiquitin promoter from parsley or other herein mentioned promoters. In a further embodiment the nucleic acid construct of the present invention comprises a nucleic acid molecule as depicted in the respective line in Table I, application no. 16, column 5 or 8, preferably the coding region thereof, a fragment or a homolog thereof, and a plant promoter, such as the Big 35S promoter, the PC Ubi promoter, the Super promoter, the USP promoter or the like. In addition different terminators may advantageously be used in these nucleic acid constructs; examples for transcriptional termination are polyadenylation signals.

[78968] [0241.1.7.16] to [0245.1.7.16] for the disclosure of these paragraphs see [0241.1.7.7] to [0245.1.7.7] above

[78969] Other preferred sequences for use in operable linkage in gene expression constructs are targeting sequences, which are required for targeting the gene product into specific cell compartments (for a review, see Kermode, Crit. Rev. Plant Sci. 15 (4), 285 (1996) and references cited therein), for example into the vacuole, the nucleus, all types of plastids, such as amyloplasts, chloroplasts, chromoplasts, the extracellular space, the mitochondria, the endoplasmic reticulum, elaioplasts, peroxisomes, glycosomes, and other compartments of cells or extracellular; preferred are sequences, which are involved in targeting to plastids as mentioned above. Sequences, which must be mentioned in this context are, in particular, the signal-peptide- or transit-peptide-encoding sequences which are known per se. For example, plastid-transit-peptide-encoding sequences enable the targeting of the expression product into the plastids of a plant cell. Targeting sequences are also known for eukaryotic and to a lower extent for prokaryotic organisms and can advantageously be operable linked with the nucleic acid molecule of the present invention as shown in Table I, application no. 16, columns 5 and 8, preferably the coding region thereof, or homologs or fragments thereof, and described herein to achieve an expression in one of said compartments or extracellular.

[78970] [0247.1.7.16] to [0249.1.7.16] for the disclosure of theses paragraphs see [0247.1.7.7] to [0249.1.7.7] above

[78971] Preferred promoters are in particular those which bring about gene expression in tissues and organs, such as leaves, roots, seeds, pollen or xylem. Examples of tissue preferred or organ preferred promoters include, but are not limited to fruit-preferred, ovule-preferred, male tissue-preferred, seed-preferred, pollen-preferred integument-preferred, tuber-preferred, stalk-preferred, pericarp-preferred, leaf-preferred, stigma-preferred, pollen-preferred, anther-preferred, petal-preferred, sepal-preferred, pedicel-preferred, silique-preferred, stem-preferred, root-preferred promoters, and the like. Especially those promoters are preferred which bring about gene expression in tissues and organs in which the biosynthesis of cofactors, especially coenzyme Q10, coenzyme Q9, lipoic acid, and/or nicotinic acid takes place, like in seed cells, such as endosperm cells and cells of the developing embryo. Seed promoters are preferentially expressed during seed development and/or germination. For example, seed preferred promoters can be embryo-preferred, endosperm preferred and seed coat-preferred (see Thompson et al., BioEssays 10, 108 (1989)). Examples of seed preferred promoters include, but are not limited to, cellulose synthase (celA), Cim1, gamma-zein, globulin-1, maize 19 kD zein (cZ19B1), and the like. Other suitable promoters are the oilseed rape napin gene promoter (U.S. Pat. No. 5,608,152), the Vicia faba USP promoter (Baeumlein et al., Mol Gen Genet, 225 (3), 459 (1991)), the Arabidopsis oleosin promoter (WO 98/45461), the Phaseolus vulgaris phaseolin promoter (U.S. Pat. No. 5,504,200), the Brassica Bce4 promoter (WO 91/13980), the bean arcs promoter, the carrot DcG3 promoter, or the Legumin B4 promoter (LeB4) (Baeumlein et al., Plant Journal, 2 (2), 233 (1992)), and promoters which bring about the seed-specific expression in monocotyledonous plants such as maize, barley, wheat, rye, rice and the like. Advantageous seedspecific promoters are the sucrose binding protein promoter (WO 00/26388), the phaseolin promoter and the napin promoter. Suitable promoters which must be considered are the barley Ipt2 or Ipt1 gene promoter (WO 95/15389 and WO 95/23230), and the promoters described in WO 99/16890 (promoters from the barley hordein gene, the rice glutelin gene, the rice oryzin gene, the rice prolamin gene, the wheat gliadin gene, the wheat glutelin gene, the maize zein gene, the oat glutelin gene, the sorghum kasirin gene and the rye secalin gene). Further suitable promoters are Amy32b, Amy 6-6 and Aleurain (U.S. Pat. No. 5,677,474), Bce4 (oilseed rape) (U.S. Pat. No. 5,530,149), glycinin (soya) (EP 571 741], -phosphoenolpyruvate carboxylase (soya) (JP 06/62870), ADR12-2 (soya) (WO 98/08962), isocitrate lyase (oilseed rape) (U.S. Pat. No. 5,689,040]) or α-amylase (barley) (EP 781 8499. Other promoters which are available for the expression of genes in plants are leaf-specific promoters such as those described in DE-A 19 644 478 or lightregulated promoters such as, for example, the pea petE promoter.

[78972] [0251.1.7.16] to [0266.1.7.16] for the disclosure of these paragraphs see [0251.1.7.7] to [0266.1.7.7] above

[78973] An embodiment of the invention relates to a vector where the nucleic acid molecule according to the invention is linked operably to regulatory sequences which permit the expression in a prokaryotic or eukaryotic host. A further embodiment of the invention relates to a vector in which a nucleic acid sequence encoding one of the polypeptides shown in the respective line in Table II, application no. 16, columns 5 or 8, or homologs or fragments thereof, is functionally linked to a targeting sequence such as a plastidial or mitochondrial targeting sequence.

[78974] A further embodiment of the invention relates to a vector in which a nucleic acid sequence encoding one of the polypeptides shown in the respective line in Table II, application no. 16, columns 5 or 8, or homologs or fragments thereof, is functionally linked to (a) regulatory sequence which permit the expression in an organelle, such as plastids or mitochondria, preferably plastids.

[78975] A further embodiment of the invention relates to a vector which comprises a nucleic acid sequence encoding one of the polypeptides shown in the respective line in Table II, application no. 16, columns 5 or 8, or homologs or fragments thereof, but no additional targeting sequence.

[78976] [0268.1.7.16] to [0273.1.7.16] for the disclosure of these paragraphs see [0268.1.7.7] to [0273.1.7.7] above

[78977] A further object of the invention relates to the use of a nucleic acid construct, e.g. an expression cassette, comprising one or more nucleic acid molecules encoding one or more polypeptides as depicted in the respective line(s) in Table II, application no. 16, columns 5 or 8, or homologs or fragments thereof, or comprising one or more nucleic acid molecules as depicted in the respective line(s) in Table I, application no. 16, columns 5 or 8, preferably the coding region thereof, or homologs or fragments thereof, or comprising a nucleic acid molecule hybridizing therewith for the transformation of a microorganism or a plant cell, plant tissues or a part of a plant

[78978] In doing so, depending on the choice of promoter, the nucleic acid molecules shown in the respective line in Table I, application no. 16, column 5 or 8, preferably the coding region thereof, or homologs or fragments thereof, or the nucleic acid molecules encoding a polypeptide as depicted in the respective line in Table II, application no. 16, column 5 or 8, or homologs or fragments thereof, can be expressed in the whole plant or specifically e.g. in the leaves, in the seeds, the nodules, in roots, in the stem or other parts of the plant. Those transgenic plants overproducing sequences, e.g. as depicted in the respective line in Table I, application no. 16, column 5 or 8, preferably the coding region thereof, or homologs or fragments thereof, the plant cell, plant tissues, plants, the reproductive material thereof, or parts thereof are a further object of the present invention.

[78979] Within the framework of the present invention, the production of the coenzyme Q10, coenzyme Q9, lipoic acid, or nicotinic acid is due to the generation or over-expression of one or more polypeptides as depicted in the respective line(s) in Table II, application no. 16, column 5 or 8, or homologs or fragments thereof, or encoded by the corresponding nucleic acid molecules as depicted in the respective line(s) in Table I, application no. 16, column 5 or 8, preferably the coding region thereof, or homologs or fragments thereof, in the non-human organism according to the invention, advantageously in the transgenic microorganism or plant according to the invention, at least for the duration of at least one plant generation.

[78980] A constitutive expression of the polypeptide as depicted in the respective line in Table II, application no. 16, column 5 or 8, or homologs or fragments thereof, or encoded by the respective nucleic acid molecule as depicted in the respective line in Table I, application no. 16, column 5 or 8, preferably the coding region thereof, or homologs or fragments thereof, may be advantageous. On the other hand, an inducible expression may also appear desirable. Expression of the polypeptide sequences of the invention can be either directed to the cytosol or to the organelles, such as plastids or mitochondria, preferably the plastids of the host cells, preferably the plant cells, or non-targeted.

[78981] for the disclosure of this paragraph see [0278.1.7.7] above

[78982] In a further embodiment the invention relates to a transgenic non-human organisms such as transgenic microorganism or transgenic plant comprising a nucleic acid molecule comprising
[78983] [1) a nucleic acid molecule selected from the group consisting of
   [78984] (a) a nucleic acid molecule encoding a polypeptide shown in Table II, application no. 16, column 5 or 8, preferably shown in Table II A, application no. 16, column 5, or in Table II A, application no. 16, column 8, or in Table II B, application no. 16, column 8, or a homolog or a fragment thereof;
   [78985] (b) a nucleic acid molecule shown in Table I, application no. 16, column 5 or 8, preferably shown in Table I A, application no. 16, column 5, or in Table I A, application no. 16, column 8, or in Table I B, application no. 16, column 8, preferably the coding region thereof, or a homolog or a fragment thereof;
   [78986] (c) a nucleic acid molecule, which, as a result of the degeneracy of the genetic code, can be derived from a polypeptide sequence depicted in column 5 or 8 of Table II, application no. 16, preferably shown in Table II A, application no. 16, column 5, or in Table II A, application no. 16, column 8, or in Table II B, application no. 16, column 8;
   [78987] (d) a nucleic acid molecule having at least 30% identity, preferably at least 40%, 50%, 60%, 70%, 75%, 80%, 85%, 90%, 95%, 96%, 97%, 98%, 99%, 99.5%, with the nucleic acid molecule sequence of a polynucleotide comprising the nucleic acid molecule shown in column 5 or 8 of Table I, application no. 16, preferably shown in Table I A, application no. 16, column 5, or in Table I A, application no. 16, column 8, or in Table I B, application no. 16, column 8, preferably the coding region thereof;
   [78988] (e) a nucleic acid molecule encoding a polypeptide having at least 30% identity, preferably at least 40%, 50% 60%, 70%, 75%, 80%, 85%, 90%, 95%, 96%, 97%, 98%, 99%, 99.5%, identity with the amino acid sequence of the polypeptide encoded by the nucleic acid molecule of (a), (b), (c) or (d);
   [78989] (f) a nucleic acid molecule which hybridizes with a nucleic acid molecule of (a), (b), (c), (d) or (e) under stringent hybridization conditions;
   [78990] (g) a nucleic acid molecule encoding a polypeptide which can be isolated with the aid of monoclonal or polyclonal antibodies made against a polypeptide encoded by one of the nucleic acid molecules of (a), (b), (c), (d), (e) or (f);
   [78991] (h) a nucleic acid molecule encoding a polypeptide comprising the consensus sequence or one or more polypeptide motifs as shown in column 8 of Table IV, application no. 16;
   [78992] (i) a nucleic acid molecule encoding a polypeptide having the activity represented by a respective protein as depicted in column 5 of Table II, application no. 16;
   [78993] (j) a nucleic acid molecule comprising a polynucleotide which is obtained by amplifying a cDNA library or a genomic library using the primers in Table III, application no. 16, column 8;
   [78994] and
   [78995] (k) nucleic acid molecule which is obtainable by screening a suitable nucleic acid library, especially a cDNA library and/or a genomic library, under stringent hybridization conditions with a probe comprising one of the sequences of the nucleic acid molecule of (a), (b), (c), (d), (e), (f), (g), (h), (i) or (j) or with a fragment of at least 15 nt, preferably 20 nt, 30 nt, 50 nt, 100 nt, 200 nt,500 nt, 1000 nt, 1500 nt, 2000 nt or 3000 nt of the nucleic acid molecule characterized in (a), (b), (c), (d), (e), (f), (g), (h), (i) or (j);
   [78996] or a nucleic acid molecule comprising a sequence which is complementary thereto;
      and, if desired
[78997] 2) nucleic acid molecule encoding a transit peptide, preferably encoding a plastidal transit peptide or a mitochondrial transit peptide;
   which are operable linked;]
   or comprising an expression cassette comprising
[78998] [0) a promoter, preferably a promoter selected from the group consisting of Big35S, PCUbi, Super and USP; and
[78999] 1) a nucleic acid molecule selected from the group consisting of
   [79000] (a) a nucleic acid molecule encoding a polypeptide shown in Table II, application no. 16, column 5 or 8, preferably shown in Table II A, application no. 16, column 5, or in Table II A, application no. 16, column 8, or in Table II B, application no. 16, column 8, or a homolog or a fragment thereof;
   [79001] (b) a nucleic acid molecule shown in Table I, application no. 16, column 5 or 8, preferably shown in Table I A, application no. 16, column 5, or in Table I A, application no. 16, column 8, or in Table I B, application no. 16, column 8, preferably the coding region thereof, or a homolog or a fragment thereof;
   [79002] (c) a nucleic acid molecule, which, as a result of the degeneracy of the genetic code, can be derived from a polypeptide sequence depicted in column 5 or 8 of Table II, application no. 16, preferably shown in Table II A, application no. 16, column 5, or in Table II A, application no. 16, column 8, or in Table II B, application no. 16, column 8;
   [79003] (d) a nucleic acid molecule having at least 30% identity, preferably at least 40%, 50%, 60%, 70%, 75%, 80%, 85%, 90%, 95%, 96%, 97%, 98%, 99%, 99.5%, with the nucleic acid molecule sequence of a polynucleotide comprising the nucleic acid molecule shown in column 5 or 8 of Table I, application no. 16, preferably shown in Table I A, application no. 16, column 5, or in Table I A, application no. 16, column 8, or in Table I B, application no. 16, column 8, preferably the coding region thereof;
   [79004] (e) a nucleic acid molecule encoding a polypeptide having at least 30% identity, preferably at least 40%, 50% 60%, 70%, 75%, 80%, 85%, 90%, 95%, 96%, 97%, 98%, 99%, 99.5%, identity with the amino acid sequence of the polypeptide encoded by the nucleic acid molecule of (a), (b), (c) or (d);
   [79005] (f) a nucleic acid molecule which hybridizes with a nucleic acid molecule of (a), (b), (c), (d) or (e) under stringent hybridization conditions;
   [79006] (g) a nucleic acid molecule encoding a polypeptide which can be isolated with the aid of monoclonal or polyclonal antibodies made against a polypeptide encoded by one of the nucleic acid molecules of (a), (b), (c), (d), (e) or (f);
   [79007] (h) a nucleic acid molecule encoding a polypeptide comprising the consensus sequence or one or more polypeptide motifs as shown in column 8 of Table IV, application no. 16;
   [79008] (i) a nucleic acid molecule encoding a polypeptide having the activity represented by a respective protein as depicted in column 5 of Table II, application no. 16;
   [79009] (j) a nucleic acid molecule comprising a polynucleotide which is obtained by amplifying a cDNA library or a genomic library using the primers in Table III, application no. 16, column 8;
   [79010] and
   [79011] (k) nucleic acid molecule which is obtainable by screening a suitable nucleic acid library, especially a cDNA library and/or a genomic library, under stringent hybridization conditions with a probe comprising one of the sequences of the nucleic acid molecule of (a), (b), (c), (d), (e), (f), (g), (h), (i) or (j) or with a fragment of at least 15 nt, preferably 20 nt, 30 nt, 50 nt, 100 nt, 200 nt,500 nt, 1000 nt, 1500 nt, 2000 nt or 3000 nt of the nucleic acid molecule characterized in (a), (b), (c), (d), (e), (f), (g), (h), (i) or (j);
   [79012] or a nucleic acid molecule comprising a sequence which is complementary thereto;
      and, if desired
[79013] 2) nucleic acid molecule encoding a transit peptide, preferably encoding a plastidal transit peptide or a mitochondrial transit peptide; which are operable linked;]
   or comprising or being transformed by a vector comprising
[79014] [1) a nucleic acid molecule selected from the group consisting of
   [79015] (a) a nucleic acid molecule encoding a polypeptide shown in Table II, application no. 16, column 5 or 8, preferably shown in Table II A, application no. 16, column 5, or in Table II A, application no. 16, column 8, or in Table II B, application no. 16, column 8, or a homolog or a fragment thereof;
   [79016] (b) a nucleic acid molecule shown in Table I, application no. 16, column 5 or 8, preferably shown in Table I A, application no. 16, column 5, or in Table I A, application no. 16, column 8, or in Table I B, application no. 16, column 8, preferably the coding region thereof, or a homolog or a fragment thereof;
   [79017] (c) a nucleic acid molecule, which, as a result of the degeneracy of the genetic code, can be derived from a polypeptide sequence depicted in column 5 or 8 of Table II, application no. 16, preferably shown in Table II A, application no. 16, column 5, or in Table II A, application no. 16, column 8, or in Table II B, application no. 16, column 8;
   [79018] (d) a nucleic acid molecule having at least 30% identity, preferably at least 40%, 50%, 60%, 70%, 75%, 80%, 85%, 90%, 95%, 96%, 97%, 98%, 99%, 99.5%, with the nucleic acid molecule sequence of a polynucleotide comprising the nucleic acid molecule shown in column 5 or 8 of Table I, application no. 16, preferably shown in Table I A, application no. 16, column 5, or in Table I A, application no. 16, column 8, or in Table I B, application no. 16, column 8, preferably the coding region thereof;
   [79019] (e) a nucleic acid molecule encoding a polypeptide having at least 30% identity, preferably at least 40%, 50% 60%, 70%, 75%, 80%, 85%, 90%, 95%, 96%, 97%, 98%, 99%, 99.5%, identity with the amino acid sequence of the polypeptide encoded by the nucleic acid molecule of (a), (b), (c) or (d);
   [79020] (f) a nucleic acid molecule which hybridizes with a nucleic acid molecule of (a), (b), (c), (d) or (e) under stringent hybridization conditions;
   [79021] (g) a nucleic acid molecule encoding a polypeptide which can be isolated with the aid of monoclonal or polyclonal antibodies made against a polypeptide encoded by one of the nucleic acid molecules of (a), (b), (c), (d), (e) or (f);
   [79022] (h) a nucleic acid molecule encoding a polypeptide comprising the consensus sequence or one or more polypeptide motifs as shown in column 8 of Table IV, application no. 16;
   [79023] (i) a nucleic acid molecule encoding a polypeptide having the activity represented by a respective protein as depicted in column 5 of Table II, application no. 16;
   [79024] (j) a nucleic acid molecule comprising a polynucleotide which is obtained by amplifying a cDNA library or a genomic library using the primers in Table III, application no. 16, column 8;
   [79025] and
   [79026] (k) nucleic acid molecule which is obtainable by screening a suitable nucleic acid library, especially a cDNA library and/or a genomic library, under stringent hybridization conditions with a probe comprising one of the sequences of the nucleic acid molecule of (a), (b), (c), (d), (e), (f), (g), (h), (i) or (j) or with a fragment of at least 15 nt, preferably 20 nt, 30 nt, 50 nt, 100 nt, 200 nt,500 nt, 1000 nt, 1500 nt, 2000 nt or 3000 nt of the nucleic acid molecule characterized in (a), (b), (c), (d), (e), (f), (g), (h), (i) or (j);
   [79027] or a nucleic acid molecule comprising a sequence which is complementary thereto;]
      as well as respective transgenic cells, tissue, parts of such non-human organism, e.g. plant cells, plant tissue, part of plants, like leaves, roots, stems, blossoms, seeds, fruits, pollen and the like.
      (All the references to Tables I to IV are references to the corresponding lines of Tables I to IV.)

[79028] In a preferred embodiment of said transgenic non-human organism said nucleic acid molecule according to 1 (a), (b), (c), (d), (e), (f), (g), (h), (i), (j) or (k) encodes a polypeptide which has the activity of the respective polypeptide represented by a protein comprising a polypeptide as depicted in the respective line in column 5 of Table II, application no. 16.

[79029] In another preferred embodiment of said transgenic non-human organism said nucleic acid molecule according to 1 (a), (b), (c), (d), (e), (f), (g), (h), (i), (j) or (k) confers a generation or an increase of the respective fine chemical in a non-human organism or a part thereof as compared to a corresponding wild-type non-human organism or part thereof.

[79030] In another preferred embodiment of said transgenic non-human organism said nucleic acid molecule according to 1 (a), (b), (c), (d), (e), (f), (g), (h), (i), (j) or (k) encodes a polypeptide which has the activity of the respective polypeptide represented by a protein as depicted in the respective line in column 5 of Table II application no. 16 and confers a generation or an increase of the respective fine chemical in a non-human organism or a part thereof as compared to a corresponding wild-type non-human organism or part thereof.

[79031] In another embodiment of said transgenic non-human organism the expression cassette comprises 2) a nucleic acid molecule encoding a transit peptide, preferably encoding a plastidal transit peptide, especially in case in column 6 of Table I, application no. 16, in the same line as of the respective nucleic acid molecule according to 1) “plastidic” is depicted, or encoding a mitochondrial transit peptide, especially in case in column 6 of Table I, application no. 16, in the same line as of the respective nucleic acid molecule according to 1) “mitochondric” is depicted.

[79032] In another embodiment of said transgenic non-human organism the expression cassette does not comprise 2) a nucleic acid molecule encoding a transit peptide, especially in case in column 6 of Table I, application no. 16, in the same line as of the respective nucleic acid molecule according to 1) “non-targeted” is depicted.

[79033] In another embodiment of said transgenic non-human organism said vector comprises beneath said nucleic acid molecule according to 1 (a), (b), (c), (d), (e), (f), (g), (h), (i), (j) or (k), a promoter, preferably a promoter selected from the group consisting of Big35S, PCUbi, Super and USP, which are operable linked.

[79034] In a preferred embodiment of said transgenic non-human organism said vector comprises beneath said nucleic acid molecule according to 1 (a), (b), (c), (d), (e), (f), (g), (h), (i), (j) or (k), a promoter, preferably a promoter selected from the group consisting of Big35S, PCUbi, Super and USP, which are operable linked; and said nucleic acid molecule according to 1 (a), (b), (c), (d), (e), (f), (g), (h), (i), (j) or (k) encodes a polypeptide which has the activity of the respective polypeptide represented by a protein comprising a polypeptide as depicted in the respective line in column 5 of Table II, application no. 16.

[79035] In another preferred embodiment of said transgenic non-human organism said vector comprises beneath said nucleic acid molecule according to 1 (a), (b), (c), (d), (e), (f), (g), (h), (i), (j) or (k), a promoter, preferably a promoter selected from the group consisting of Big35S, PCUbi, Super and USP, which are operable linked; and said nucleic acid molecule according to 1 (a), (b), (c), (d), (e), (f), (g), (h), (i), (j) or (k) confers a generation or an increase of the respective fine chemical in a non-human organism or a part thereof as compared to a corresponding wild-type non-human organism or part thereof.

[79036] In another preferred embodiment of said transgenic non-human organism said vector comprises beneath said nucleic acid molecule according to 1 (a), (b), (c), (d), (e), (f), (g), (h), (i), (j) or (k), a promoter, preferably a promoter selected from the group consisting of Big35S, PCUbi, Super and USP, which are operable linked; and said nucleic acid molecule according to 1 (a), (b), (c), (d), (e), (f), (g), (h), (i), (j) or (k) encodes a polypeptide which has the activity of the respective polypeptide represented by a protein as depicted in the respective line in column 5 of Table II, application no. 16, and confers a generation or an increase of the respective fine chemical in a non-human organism or a part thereof as compared to a corresponding wild-type non-human organism or part thereof.

[79037] In another embodiment of said transgenic non-human organism said vector comprises beneath said nucleic acid molecule according to 1 (a), (b), (c), (d), (e), (f), (g), (h), (i), (j) or (k), a nucleic acid molecule encoding a transit peptide, preferably encoding a plastidal transit peptide, especially in case in column 6 of Table I, application no. 16, in the same line as of the respective nucleic acid molecule according to 1) “plastidic” is depicted, or encoding a mitochondrial transit peptide, especially in case in column 6 of Table I, application no. 16, in the same line as of the respective nucleic acid molecule according to 1) “mitochondric” is depicted, which are operable linked.

[79038] In another embodiment of said transgenic non-human organism said vector does not comprise beneath said nucleic acid molecule according to 1 (a), (b), (c), (d), (e), (f), (g), (h), (i), (j) or (k), a nucleic acid molecule encoding a transit peptide in case in column 6 of Table I, application no. 16, in the same line as of the respective nucleic acid molecule according to 1) “non-targeted” is depicted, which are operable linked.

[79039] In another embodiment of said transgenic non-human organism said vector comprises beneath said nucleic acid molecule according to 1 (a), (b), (c), (d), (e), (f), (g), (h), (i), (j) or (k), and a promoter, preferably a promoter selected from the group consisting of Big35S, PCUbi, Super and USP; a nucleic acid molecule encoding a transit peptide, preferably encoding a plastidal transit peptide, especially in case in column 6 of Table I, application no. 16, in the same line as of the respective nucleic acid molecule according to 1) “plastidic” is depicted, or encoding a mitochondrial transit peptide, especially in case in column 6 of Table I, application no. 16, in the same line as of the respective nucleic acid molecule according to 1) “mitochondric” is depicted, which are operable linked.

[79040] In another embodiment of said transgenic non-human organism said vector does not comprise beneath said nucleic acid molecule according to 1 (a), (b), (c), (d), (e), (f), (g), (h), (i), (j) or (k), and a promoter, preferably a promoter selected from the group consisting of Big35S, PCUbi, Super and USP; a nucleic acid molecule encoding a transit peptide, especially in case in column 6 of Table I, application no. 16, in the same line as of the respective nucleic acid molecule according to 1) “non-targeted” is depicted, which are operable linked.

[79041] In another embodiment of said transgenic non-human organism said vector comprises beneath said nucleic acid molecule according to 1 (a), (b), (c), (d), (e), (f), (g), (h), (i), (j) or (k), and a promoter, preferably a promoter selected from the group consisting of Big35S, PCUbi, Super and USP; a nucleic acid molecule encoding a transit peptide, preferably encoding a plastidal transit peptide, especially in case in column 6 of Table I, application no. 16, in the same line as of the respective nucleic acid molecule according to 1) “plastidic” is depicted, or encoding a mitochondrial transit peptide, especially in case in column 6 of Table I, application no. 16, in the same line as of the respective nucleic acid molecule according to 1) “mitochondric” is depicted, which are operable linked; and wherein said nucleic acid molecule according to 1 (a), (b), (c), (d), (e), (f), (g), (h), (i), (j) or (k) encodes a polypeptide which has the activity of the respective polypeptide represented by a protein comprising a polypeptide as depicted in the respective line in column 5 of Table II, application no. 16.

[79042] In another embodiment of said transgenic non-human organism said vector does not comprise beneath said nucleic acid molecule according to 1 (a), (b), (c), (d), (e), (f), (g), (h), (i), (j) or (k), and a promoter, preferably a promoter selected from the group consisting of Big35S, PCUbi, Super and USP; a nucleic acid molecule encoding a transit peptide, especially in case in column 6 of Table I, application no. 16, in the same line as of the respective nucleic acid molecule according to 1) “non-targeted” is depicted, which are operable linked; and wherein said nucleic acid molecule according to 1 (a), (b), (c), (d), (e), (f), (g), (h), (i), (j) or (k) encodes a polypeptide which has the activity of the respective polypeptide represented by a protein comprising a polypeptide as depicted in the respective line in column 5 of Table II, application no. 16.

[79043] In another embodiment of said transgenic non-human organism said vector comprises beneath said nucleic acid molecule according to 1 (a), (b), (c), (d), (e), (f), (g), (h), (i), (j) or (k), and a promoter, preferably a promoter selected from the group consisting of Big35S, PCUbi, Super and USP; a nucleic acid molecule encoding a transit peptide, preferably encoding a plastidal transit peptide, especially in case in column 6 of Table I, application no. 16, in the same line as of the respective nucleic acid molecule according to 1) “plastidic” is depicted, or encoding a mitochondrial transit peptide, especially in case in column 6 of Table I, application no. 16, in the same line as of the respective nucleic acid molecule according to 1) “mitochondric” is depicted, which are operable linked; and wherein said nucleic acid molecule according to 1 (a), (b), (c), (d), (e), (f), (g), (h), (i), (j) or (k) confers a generation or an increase of the respective fine chemical in a non-human organism or a part thereof as compared to a corresponding wild-type non-human organism or part thereof.

[79044] In another embodiment of said transgenic non-human organism said vector does not comprise beneath said nucleic acid molecule according to 1 (a), (b), (c), (d), (e), (f), (g), (h), (i), (j) or (k), and a promoter, preferably a promoter selected from the group consisting of Big35S, PCUbi, Super and USP; a nucleic acid molecule encoding a transit peptide, especially in case in column 6 of Table I, application no. 16, in the same line as of the respective nucleic acid molecule according to 1) “non-targeted” is depicted, which are operable linked; and wherein said nucleic acid molecule according to 1 (a), (b), (c), (d), (e), (f), (g), (h), (i), (j) or (k) confers a generation or an increase of the respective fine chemical in a non-human organism or a part thereof as compared to a corresponding wild-type non-human organism or part thereof.

[79045] In another embodiment of said transgenic non-human organism said vector comprises beneath said nucleic acid molecule according to 1 (a), (b), (c), (d), (e), (f), (g), (h), (i), (j) or (k), and a promoter, preferably a promoter selected from the group consisting of Big35S, PCUbi, Super and USP; a nucleic acid molecule encoding a transit peptide, preferably encoding a plastidal transit peptide, especially in case in column 6 of Table I, application no. 16, in the same line as of the respective nucleic acid molecule according to 1) “plastidic” is depicted, or encoding a mitochondrial transit peptide, especially in case in column 6 of Table I, application no. 16, in the same line as of the respective nucleic acid molecule according to 1) “mitochondric” is depicted, which are operable linked; and wherein said nucleic acid molecule according to 1 (a), (b), (c), (d), (e), (f), (g), (h), (i), (j) or (k) encodes a polypeptide which has the activity of the respective polypeptide represented by a protein as depicted in the respective line in column 5 of Table II application no. 16 and confers a generation or an increase of the respective fine chemical in a non-human organism or a part thereof as compared to a corresponding wild-type non-human organism or part thereof.

[79046] In another embodiment of said transgenic non-human organism said vector does not comprise beneath said nucleic acid molecule according to 1 (a), (b), (c), (d), (e), (f), (g), (h), (i), (j) or (k), and a promoter, preferably a promoter selected from the group consisting of Big35S, PCUbi, Super and USP; a nucleic acid molecule encoding a transit peptide, especially in case in column 6 of Table I, application no. 16, in the same line as of the respective nucleic acid molecule according to 1) “non-targeted” is depicted, which are operable linked; and wherein said nucleic acid molecule according to 1 (a), (b), (c), (d), (e), (f), (g), (h), (i), (j) or (k) encodes a polypeptide which has the activity of the respective polypeptide represented by a protein as depicted in the respective line in column 5 of Table II application no. 16 (in the same line) and confers a generation or an increase of the respective fine chemical in a non-human organism or a part thereof as compared to a corresponding wild-type non-human organism or part thereof.

[79047] In a preferred embodiment of said transgenic non-human organism said nucleic acid molecule according to 1 (a), (b), (c), (d), (e), (f), (g), (h), (i), (j) or (k), said promoter and optionally said nucleic acid molecule encoding a transit peptide are encompassed in an expression cassette in said vector. Accordingly an embodiment the invention provides a non-human organism comprising or being transformed by a vector comprising an expression cassette comprising said nucleic acid molecule according to 1 (a), (b), (c), (d), (e), (f), (g), (h), (i), (j) or (k), said promoter and optionally said a nucleic acid molecule encoding a transit peptide, operable linked. Said expression cassette may encompass a terminator, too.

[79048] In a further embodiment the invention relates to a transgenic non-human organisms such as transgenic microorganism or transgenic plant comprising a nucleic acid molecule comprising
[79049] [1) a nucleic acid molecule selected from the group consisting of
   [79050] (a) a nucleic acid molecule encoding a polypeptide shown in Table II, application no. 16, column 5 or 8, preferably shown in Table II A, application no. 16, column 5, or in Table II A, application no. 16, column 8, or in Table II B, application no. 16, column 8, or a homolog or a fragment thereof;
   [79051] (b) a nucleic acid molecule shown in Table I, application no. 16, column 5 or 8, preferably shown in Table I A, application no. 16, column 5, or in Table I A, application no. 16, column 8, or in Table I B, application no. 16, column 8, preferably the coding region thereof, or a homolog or a fragment thereof;
   [79052] (c) a nucleic acid molecule, which, as a result of the degeneracy of the genetic code, can be derived from a polypeptide sequence depicted in column 5 or 8 of Table II, application no. 16, preferably shown in Table II A, application no. 16, column 5, or in Table II A, application no. 16, column 8, or in Table II B, application no. 16, column 8;
   [79053] (d) a nucleic acid molecule having at least 30% identity, preferably at least 40%, 50%, 60%, 70%, 75%, 80%, 85%, 90%, 95%, 96%, 97%, 98%, 99%, 99.5%, with the nucleic acid molecule sequence of a polynucleotide comprising the nucleic acid molecule shown in column 5 or 8 of Table I, application no. 16, preferably shown in Table I A, application no. 16, column 5, or in Table I A, application no. 16, column 8, or in Table I B, application no. 16, column 8, preferably the coding region thereof;
   [79054] (e) a nucleic acid molecule encoding a polypeptide having at least 30% identity, preferably at least 40%, 50% 60%, 70%, 75%, 80%, 85%, 90%, 95%, 96%, 97%, 98%, 99%, 99.5%, identity with the amino acid sequence of the polypeptide encoded by the nucleic acid molecule of (a), (b), (c) or (d);
   [79055] (f) a nucleic acid molecule which hybridizes with a nucleic acid molecule of (a), (b), (c), (d) or (e) under stringent hybridization conditions;
   [79056] (g) a nucleic acid molecule encoding a polypeptide which can be isolated with the aid of monoclonal or polyclonal antibodies made against a polypeptide encoded by one of the nucleic acid molecules of (a), (b), (c), (d), (e) or (f);
   [79057] (h) a nucleic acid molecule encoding a polypeptide comprising the consensus sequence or one or more polypeptide motifs as shown in column 8 of Table IV, application no. 16;
   [79058] (i) a nucleic acid molecule encoding a polypeptide having the activity represented by a respective protein as depicted in column 5 of Table II, application no. 16;
   [79059] (j) a nucleic acid molecule comprising a polynucleotide which is obtained by amplifying a cDNA library or a genomic library using the primers in Table III, application no. 16, column 8;
   [79060] and
   [79061] (k) nucleic acid molecule which is obtainable by screening a suitable nucleic acid library, especially a cDNA library and/or a genomic library, under stringent hybridization conditions with a probe comprising one of the sequences of the nucleic acid molecule of (a), (b), (c), (d), (e), (f), (g), (h), (i) or (j) or with a fragment of at least 15 nt, preferably 20 nt, 30 nt, 50 nt, 100 nt, 200 nt,500 nt, 1000 nt, 1500 nt, 2000 nt or 3000 nt of the nucleic acid molecule characterized in (a), (b), (c), (d), (e), (f), (g), (h), (i) or (j);
   [79062] or a nucleic acid molecule comprising a sequence which is complementary thereto;
      and, if desired
[79063] 2) nucleic acid molecule encoding a transit peptide, preferably encoding a plastidal transit peptide or a mitochondrial transit peptide;
   which are operable linked;]
   or comprising an expression cassette comprising
[79064] [0) a promoter, preferably a promoter selected from the group consisting of Big35S, PCUbi, Super and USP; and
[79065] 1) a nucleic acid molecule selected from the group consisting of
   [79066] (a) a nucleic acid molecule encoding a polypeptide shown in Table II, application no. 16, column 5 or 8, preferably shown in Table II A, application no. 16, column 5, or in Table II A, application no. 16, column 8, or in Table II B, application no. 16, column 8, or a homolog or a fragment thereof;
   [79067] (b) a nucleic acid molecule shown in Table I, application no. 16, column 5 or 8, preferably shown in Table I A, application no. 16, column 5, or in Table I A, application no. 16, column 8, or in Table I B, application no. 16, column 8, preferably the coding region thereof, or a homolog or a fragment thereof;
   [79068] (c) a nucleic acid molecule, which, as a result of the degeneracy of the genetic code, can be derived from a polypeptide sequence depicted in column 5 or 8 of Table II, application no. 16, preferably shown in Table II A, application no. 16, column 5, or in Table II A, application no. 16, column 8, or in Table II B, application no. 16, column 8;
   [79069] (d) a nucleic acid molecule having at least 30% identity, preferably at least 40%, 50%, 60%, 70%, 75%, 80%, 85%, 90%, 95%, 96%, 97%, 98%, 99%, 99.5%, with the nucleic acid molecule sequence of a polynucleotide comprising the nucleic acid molecule shown in column 5 or 8 of Table I, application no. 16, preferably shown in Table I A, application no. 16, column 5, or in Table I A, application no. 16, column 8, or in Table I B, application no. 16, column 8, preferably the coding region thereof;
   [79070] (e) a nucleic acid molecule encoding a polypeptide having at least 30% identity, preferably at least 40%, 50% 60%, 70%, 75%, 80%, 85%, 90%, 95%, 96%, 97%, 98%, 99%, 99.5%, identity with the amino acid sequence of the polypeptide encoded by the nucleic acid molecule of (a), (b), (c) or (d);
   [79071] (f) a nucleic acid molecule which hybridizes with a nucleic acid molecule of (a), (b), (c), (d) or (e) under stringent hybridization conditions;
   [79072] (g) a nucleic acid molecule encoding a polypeptide which can be isolated with the aid of monoclonal or polyclonal antibodies made against a polypeptide encoded by one of the nucleic acid molecules of (a), (b), (c), (d), (e) or (f);
   [79073] (h) a nucleic acid molecule encoding a polypeptide comprising the consensus sequence or one or more polypeptide motifs as shown in column 8 of Table IV, application no. 16;
   [79074] (i) a nucleic acid molecule encoding a polypeptide having the activity represented by a respective protein as depicted in column 5 of Table II, application no. 16;
   [79075] (j) a nucleic acid molecule comprising a polynucleotide which is obtained by amplifying a cDNA library or a genomic library using the primers in Table III, application no. 16, column 8;
   [79076] and
   [79077] (k) nucleic acid molecule which is obtainable by screening a suitable nucleic acid library, especially a cDNA library and/or a genomic library, under stringent hybridization conditions with a probe comprising one of the sequences of the nucleic acid molecule of (a), (b), (c), (d), (e), (f), (g), (h), (i) or (j) or with a fragment of at least 15 nt, preferably 20 nt, 30 nt, 50 nt, 100 nt, 200 nt,500 nt, 1000 nt, 1500 nt, 2000 nt or 3000 nt of the nucleic acid molecule characterized in (a), (b), (c), (d), (e), (f), (g), (h), (i) or (j);
   [79078] or a nucleic acid molecule comprising a sequence which is complementary thereto;]
      and, if desired
[79079] 2) nucleic acid molecule encoding a transit peptide, preferably encoding a plastidal transit peptide or a mitochondrial transit peptide;
   which are operable linked;]
   or comprising or being transformed by a vector comprising
[79080] [1) a nucleic acid molecule selected from the group consisting of
   [79081] (a) a nucleic acid molecule encoding a polypeptide shown in Table II, application no. 16, column 5 or 8, preferably shown in Table II A, application no. 16, column 5, or in Table II A, application no. 16, column 8, or in Table II B, application no. 16, column 8, or a homolog or a fragment thereof;
   [79082] (b) a nucleic acid molecule shown in Table I, application no. 16, column 5 or 8, preferably shown in Table I A, application no. 16, column 5, or in Table I A, application no. 16, column 8, or in Table I B, application no. 16, column 8, preferably the coding region thereof, or a homolog or a fragment thereof;
   [79083] (c) a nucleic acid molecule, which, as a result of the degeneracy of the genetic code, can be derived from a polypeptide sequence depicted in column 5 or 8 of Table II, application no. 16, preferably shown in Table II A, application no. 16, column 5, or in Table II A, application no. 16, column 8, or in Table II B, application no. 16, column 8;
   [79084] (d) a nucleic acid molecule having at least 30% identity, preferably at least 40%, 50%, 60%, 70%, 75%, 80%, 85%, 90%, 95%, 96%, 97%, 98%, 99%, 99.5%, with the nucleic acid molecule sequence of a polynucleotide comprising the nucleic acid molecule shown in column 5 or 8 of Table I, application no. 16, preferably shown in Table I A, application no. 16, column 5, or in Table I A, application no. 16, column 8, or in Table I B, application no. 16, column 8, preferably the coding region thereof;
   [79085] (e) a nucleic acid molecule encoding a polypeptide having at least 30% identity, preferably at least 40%, 50% 60%, 70%, 75%, 80%, 85%, 90%, 95%, 96%, 97%, 98%, 99%, 99.5%, identity with the amino acid sequence of the polypeptide encoded by the nucleic acid molecule of (a), (b), (c) or (d);
   [79086] (f) a nucleic acid molecule which hybridizes with a nucleic acid molecule of (a), (b), (c), (d) or (e) under stringent hybridization conditions;
   [79087] (g) a nucleic acid molecule encoding a polypeptide which can be isolated with the aid of monoclonal or polyclonal antibodies made against a polypeptide encoded by one of the nucleic acid molecules of (a), (b), (c), (d), (e) or (f);
   [79088] (h) a nucleic acid molecule encoding a polypeptide comprising the consensus sequence or one or more polypeptide motifs as shown in column 8 of Table IV, application no. 16;
   [79089] (i) a nucleic acid molecule encoding a polypeptide having the activity represented by a respective protein as depicted in column 5 of Table II, application no. 16;
   [79090] (j) a nucleic acid molecule comprising a polynucleotide which is obtained by amplifying a cDNA library or a genomic library using the primers in Table III, application no. 16, column 8;
   [79091] and
   [79092] (k) nucleic acid molecule which is obtainable by screening a suitable nucleic acid library, especially a cDNA library and/or a genomic library, under stringent hybridization conditions with a probe comprising one of the sequences of the nucleic acid molecule of (a), (b), (c), (d), (e), (f), (g), (h), (i) or (j) or with a fragment of at least 15 nt, preferably 20 nt, 30 nt, 50 nt, 100 nt, 200 nt,500 nt, 1000 nt, 1500 nt, 2000 nt or 3000 nt of the nucleic acid molecule characterized in (a), (b), (c), (d), (e), (f), (g), (h), (i) or (j);
   [79093] or a nucleic acid molecule comprising a sequence which is complementary thereto;]
      whereby, preferably, the nucleic acid molecule according to 1 (a), (b), (c), (d), (e), (f), (g), (h), (i), (j) or (k) distinguishes over the sequence depicted in Table I A and/or I B, application no. 16, column 5 or 8, or the coding regions thereof, by one or more nucleotides (especially but not exceeding 5%, preferably 4%, 3%, 2%, 1%, 0.5%, 0.2% or 0.1%). In an embodiment, the nucleic acid molecule of the invention does not consist of the sequence shown in Table I A and/or I B, application no. 16, column 5 or 8, or the coding region thereof. In another embodiment, the nucleic acid molecule of the present invention, preferably the coding region thereof, is at least 30%, 40%, 50%, 60%, 70%, 80%, 90%, 95% identical but less than 100%, 99.999%, 99.99%, 99.9%, 99%, 98%, 97%, 96% or 95% identical to the sequence shown in Table I A and/or I B, application no. 16, column 5 or 8, or the coding region thereof, respectively. In a further embodiment the nucleic acid molecule does not encode the polypeptide sequence shown in Table II A and/or II B, application no. 16, column 5 or 8 but homologs thereof. Accordingly, in one embodiment, the nucleic acid molecule of the present invention encodes in one embodiment a polypeptide which differs at least in one or more amino acids (especially but not exceeding 5%, preferably 4%, 3%, 2%, 1%, 0.5%, 0.2% or 0.1%) from the polypeptide shown in Table II, application no. 16, column 5 or 8 and does not encode a protein of the sequence shown in Table II A and/or II B, application no. 16, column 5 or 8. Accordingly, in one embodiment, the protein encoded by a sequence of a nucleic acid according to 1 (a), (b), (c), (d), (e), (f), (g), (h), (i), (j) or (k) does not consist of the sequence shown in Table I A and/or I B, application no. 16, column 5 or 8, or the coding region thereof. In a further embodiment, the protein of the present invention is at least 30%, 40%, 50%, 60%, 70%, 80%, 90%, 95% identical to protein sequence depicted in Table II A and/or II B, application no. 16, column 5 or 8 but less than 100%, preferably less than 99.999%, 99.99%, 99.9%, 99%, 98%, 97%, 96% or 95% identical to the sequence shown in Table II A and/or II B, application no. 16, column 5 or 8;
      as well as respective transgenic cells, tissue, parts of such non-human organism, e.g. plant cells, plant tissue, part of plants, like leaves, roots, stems, blossoms, seeds, fruits, pollen and the like.
      (All the references to Tables I to IV are references to the corresponding lines of Tables I to IV.)

[79094] In a preferred embodiment of said transgenic non-human organism said nucleic acid molecule according to 1 (a), (b), (c), (d), (e), (f), (g), (h), (i), (j) or (k) encodes a polypeptide which has the activity of the respective polypeptide represented by a protein comprising a polypeptide as depicted in the respective line in column 5 of Table II, application no. 16.

[79095] In another preferred embodiment of said transgenic non-human organism said nucleic acid molecule according to 1 (a), (b), (c), (d), (e), (f), (g), (h), (i), (j) or (k) confers a generation or an increase of the respective fine chemical in a non-human organism or a part thereof as compared to a corresponding wild-type non-human organism or part thereof.

[79096] In another preferred embodiment of said transgenic non-human organism said nucleic acid molecule according to 1 (a), (b), (c), (d), (e), (f), (g), (h), (i), (j) or (k) encodes a polypeptide which has the activity of the respective polypeptide represented by a protein as depicted in the respective line in column 5 of Table II application no. 16 and confers a generation or an increase of the respective fine chemical in a non-human organism or a part thereof as compared to a corresponding wild-type non-human organism or part thereof.

[79097] In another embodiment of said transgenic non-human organism the expression cassette comprises 2) a nucleic acid molecule encoding a transit peptide, preferably encoding a plastidal transit peptide, especially in case in column 6 of Table I, application no. 16, in the same line as of the respective nucleic acid molecule according to 1) “plastidic” is depicted, or encoding a mitochondrial transit peptide, especially in case in column 6 of Table I, application no. 16, in the same line as of the respective nucleic acid molecule according to 1) “mitochondric” is depicted.

[79098] In another embodiment thereof the expression cassette does not comprise 2) a nucleic acid molecule encoding a transit peptide, especially in case in column 6 of Table I, application no. 16, in the same line as of the respective nucleic acid molecule according to 1) “non-targeted” is depicted.

[79099] In another embodiment of said transgenic non-human organism said vector comprises beneath said nucleic acid molecule according to 1 (a), (b), (c), (d), (e), (f), (g), (h), (i), (j) or (k), a promoter, preferably a promoter selected from the group consisting of Big35S, PCUbi, Super and USP, which are operable linked.

[79100] In a preferred embodiment of said transgenic non-human organism said vector comprises beneath said nucleic acid molecule according to 1 (a), (b), (c), (d), (e), (f), (g), (h), (i), (j) or (k), a promoter, preferably a promoter selected from the group consisting of Big35S, PCUbi, Super and USP, which are operable linked; and said nucleic acid molecule according to 1 (a), (b), (c), (d), (e), (f), (g), (h), (i), (j) or (k) encodes a polypeptide which has the activity of the respective polypeptide represented by a protein comprising a polypeptide as depicted in the respective line in column 5 of Table II, application no. 16.

[79101] In another preferred embodiment of said transgenic non-human organism said vector comprises beneath said nucleic acid molecule according to 1 (a), (b), (c), (d), (e), (f), (g), (h), (i), (j) or (k), a promoter, preferably a promoter selected from the group consisting of Big35S, PCUbi, Super and USP, which are operable linked; and said nucleic acid molecule according to 1 (a), (b), (c), (d), (e), (f), (g), (h), (i), (j) or (k) confers a generation or an increase of the respective fine chemical in a non-human organism or a part thereof as compared to a corresponding wild-type non-human organism or part thereof.

[79102] In another preferred embodiment of said transgenic non-human organism said vector comprises beneath said nucleic acid molecule according to 1 (a), (b), (c), (d), (e), (f), (g), (h), (i), (j) or (k), a promoter, preferably a promoter selected from the group consisting of Big35S, PCUbi, Super and USP, which are operable linked; and said nucleic acid molecule according to 1 (a), (b), (c), (d), (e), (f), (g), (h), (i), (j) or (k) encodes a polypeptide which has the activity of the respective polypeptide represented by a protein as depicted in the same line in column 5 of Table II, application no. 16, and confers a generation or an increase of the respective fine chemical in a non-human organism or a part thereof as compared to a corresponding wild-type non-human organism or part thereof.

[79103] In another embodiment of said transgenic non-human organism said vector comprises beneath said nucleic acid molecule according to 1 (a), (b), (c), (d), (e), (f), (g), (h), (i), (j) or (k), a nucleic acid molecule encoding a transit peptide, preferably encoding a plastidal transit peptide, especially in case in column 6 of Table I, application no. 16, in the same line as of the respective nucleic acid molecule according to 1) “plastidic” is depicted, or encoding a mitochondrial transit peptide, especially in case in column 6 of Table I, application no. 16, in the same line as of the respective nucleic acid molecule according to 1) “mitochondric” is depicted, which are operable linked.

[79104] In another embodiment of said transgenic non-human organism said vector does not comprise beneath said nucleic acid molecule according to 1 (a), (b), (c), (d), (e), (f), (g), (h), (i), (j) or (k), a nucleic acid molecule encoding a transit peptide in case in column 6 of Table I, application no. 16, in the same line as of the respective nucleic acid molecule according to 1) “non-targeted” is depicted, which are operable linked.

[79105] In another embodiment of said transgenic non-human organism said vector comprises beneath said nucleic acid molecule according to 1 (a), (b), (c), (d), (e), (f), (g), (h), (i), (j) or (k), and a promoter, preferably a promoter selected from the group consisting of Big35S, PCUbi, Super and USP; a nucleic acid molecule encoding a transit peptide, preferably encoding a plastidal transit peptide, especially in case in column 6 of Table I, application no. 16, in the same line as of the respective nucleic acid molecule according to 1) “plastidic” is depicted, or encoding a mitochondrial transit peptide, especially in case in column 6 of Table I, application no. 16, in the same line as of the respective nucleic acid molecule according to 1) “mitochondric” is depicted, which are operable linked.

[79106] In another embodiment of said transgenic non-human organism said vector does not comprise beneath said nucleic acid molecule according to 1 (a), (b), (c), (d), (e), (f), (g), (h), (i), (j) or (k), and a promoter, preferably a promoter selected from the group consisting of Big35S, PCUbi, Super and USP; a nucleic acid molecule encoding a transit peptide, especially in case in column 6 of Table I, application no. 16, in the same line as of the respective nucleic acid molecule according to 1) “non-targeted” is depicted, which are operable linked.

[79107] In another embodiment of said transgenic non-human organism said vector comprises beneath said nucleic acid molecule according to 1 (a), (b), (c), (d), (e), (f), (g), (h), (i), (j) or (k), and a promoter, preferably a promoter selected from the group consisting of Big35S, PCUbi, Super and USP; a nucleic acid molecule encoding a transit peptide, preferably encoding a plastidal transit peptide, especially in case in column 6 of Table I, application no. 16, in the same line as of the respective nucleic acid molecule according to 1) “plastidic” is depicted, or encoding a mitochondrial transit peptide, especially in case in column 6 of Table I, application no. 16, in the same line as of the respective nucleic acid molecule according to 1) “mitochondric” is depicted, which are operable linked; and wherein said nucleic acid molecule according to 1 (a), (b), (c), (d), (e), (f), (g), (h), (i), (j) or (k) encodes a polypeptide which has the activity of the respective polypeptide represented by a protein comprising a polypeptide as depicted in the respective line in column 5 of Table II, application no. 16.

[79108] In another embodiment of said transgenic non-human organism said vector does not comprise beneath said nucleic acid molecule according to 1 (a), (b), (c), (d), (e), (f), (g), (h), (i), (j) or (k), and a promoter, preferably a promoter selected from the group consisting of Big35S, PCUbi, Super and USP; a nucleic acid molecule encoding a transit peptide, especially in case in column 6 of Table I, application no. 16, in the same line as of the respective nucleic acid molecule according to 1) “non-targeted” is depicted, which are operable linked; and wherein said nucleic acid molecule according to 1 (a), (b), (c), (d), (e), (f), (g), (h), (i), (j) or (k) encodes a polypeptide which has the activity of the respective polypeptide represented by a protein comprising a polypeptide as depicted in the respective line in column 5 of Table II, application no. 16.

[79109] In another embodiment of said transgenic non-human organism said vector comprises beneath said nucleic acid molecule according to 1 (a), (b), (c), (d), (e), (f), (g), (h), (i), (j) or (k), and a promoter, preferably a promoter selected from the group consisting of Big35S, PCUbi, Super and USP; a nucleic acid molecule encoding a transit peptide, preferably encoding a plastidal transit peptide, especially in case in column 6 of Table I, application no. 16, in the same line as of the respective nucleic acid molecule according to 1) “plastidic” is depicted, or encoding a mitochondrial transit peptide, especially in case in column 6 of Table I, application no. 16, in the same line as of the respective nucleic acid molecule according to 1) “mitochondric” is depicted, which are operable linked; and wherein said nucleic acid molecule according to 1 (a), (b), (c), (d), (e), (f), (g), (h), (i), (j) or (k) confers a generation or an increase of the respective fine chemical in a non-human organism or a part thereof as compared to a corresponding wild-type non-human organism or part thereof.

[79110] In another embodiment of said transgenic non-human organism said vector does not comprise beneath said nucleic acid molecule according to 1 (a), (b), (c), (d), (e), (f), (g), (h), (i), (j) or (k), and a promoter, preferably a promoter selected from the group consisting of Big35S, PCUbi, Super and USP; a nucleic acid molecule encoding a transit peptide, especially in case in column 6 of Table I, application no. 16, in the same line as of the respective nucleic acid molecule according to 1) “non-targeted” is depicted, which are operable linked; and wherein said nucleic acid molecule according to 1 (a), (b), (c), (d), (e), (f), (g), (h), (i), (j) or (k) confers a generation or an increase of the respective fine chemical in a non-human organism or a part thereof as compared to a corresponding wild-type non-human organism or part thereof.

[79111] In another embodiment of said transgenic non-human organism said vector comprises beneath said nucleic acid molecule according to 1 (a), (b), (c), (d), (e), (f), (g), (h), (i), (j) or (k), and a promoter, preferably a promoter selected from the group consisting of Big35S, PCUbi, Super and USP; a nucleic acid molecule encoding a transit peptide, preferably encoding a plastidal transit peptide, especially in case in column 6 of Table I, application no. 16, in the same line as of the respective nucleic acid molecule according to 1) “plastidic” is depicted, or encoding a mitochondrial transit peptide, especially in case in column 6 of Table I, application no. 16, in the same line as of the respective nucleic acid molecule according to 1) “mitochondric” is depicted, which are operable linked; and wherein said nucleic acid molecule according to 1 (a), (b), (c), (d), (e), (f), (g), (h), (i), (j) or (k) encodes a polypeptide which has the activity of the respective polypeptide represented by a protein as depicted in the respective line in column 5 of Table II application no. 16 and confers a generation or an increase of the respective fine chemical in a non-human organism or a part thereof as compared to a corresponding wild-type non-human organism or part thereof.

[79112] In another embodiment of said transgenic non-human organism said vector does not comprise beneath said nucleic acid molecule according to 1 (a), (b), (c), (d), (e), (f), (g), (h), (i), (j) or (k), and a promoter, preferably a promoter selected from the group consisting of Big35S, PCUbi, Super and USP; a nucleic acid molecule encoding a transit peptide, especially in case in column 6 of Table I, application no. 16, in the same line as of the respective nucleic acid molecule according to 1) “non-targeted” is depicted, which are operable linked; and wherein said nucleic acid molecule according to 1 (a), (b), (c), (d), (e), (f), (g), (h), (i), (j) or (k) encodes a polypeptide which has the activity of the respective polypeptide represented by a protein as depicted in the respective line in column 5 of Table II application no. 16 and confers a generation or an increase of the respective fine chemical in a non-human organism or a part thereof as compared to a corresponding wild-type non-human organism or part thereof.

[79113] In a preferred embodiment of said transgenic non-human organism said nucleic acid molecule according to 1 (a), (b), (c), (d), (e), (f), (g), (h), (i), (j) or (k), said promoter and optionally said nucleic acid molecule encoding a transit peptide are encompassed in an expression cassette in said vector. Accordingly an embodiment the invention provides a non-human organism comprising or being transformed by a vector comprising an expression cassette comprising said nucleic acid molecule according to 1 (a), (b), (c), (d), (e), (f), (g), (h), (i), (j) or (k), said promoter and optionally said a nucleic acid molecule encoding a transit peptide, operable linked. Said expression cassette may encompass a terminator, too.

[79114] [0291.1.7.16] to [0299.1.7.16] for the disclosure of these paragraphs see [0291.1.7.7] to [0299.1.7.7] above

[79115] The term “biological active portion” or “biological activity” means a polypeptide as depicted in the respective line in Table II, application no. 16, column 3 or a portion of said polypeptide which still has at least 10% or 20%, preferably 30%, 40%, 50% or 60%, especially preferably 70%, 75%, 80%, 90% or 95% of the enzymatic or biological activity of the natural or starting enzyme or protein.

[79116] [0301.1.7.16] to [0304.1.7.16] for the disclosure of these paragraphs see [0301.1.7.7] to [0304.1.7.7] above

[79117] Synthetic oligonucleotide primers for the amplification, e.g. as shown in the respective line in Table III, application no. 16, column 8, by means of polymerase chain reaction can be generated on the basis of a sequence shown herein, for example the sequence shown in the respective line in Table I, application no. 16, columns 5 or 8, or the sequences derived from Table II, application no. 16, columns 5 or 8, respectively.

[79118] Moreover, it is possible to identify a conserved region of a protein from various organism by carrying out protein sequence alignments with the polypeptide encoded by the nucleic acid molecules of the present invention, in particular with the sequences encoded by the nucleic acid molecule shown in the respective line in column 5 or 8 of Table I, application no. 16, from which conserved regions, and in turn, degenerate primers can be derived. Conserved regions are those, which show a very little variation in the amino acid in one particular position of several homologs from different origin. The consensus sequence and polypeptide motifs shown in the respective line in column 8 of Table IV, application no. 16, are derived from such alignments of homologous proteins.

[79119] In an embodiment of the present invention, in the method of the present invention the activity of a polypeptide comprising or consisting of a consensus sequence or at least one polypeptide motif shown in the respective line in Table IV, application no. 16, column 8, is increased. In another embodiment thereof, the method of the present invention relates to a polypeptide comprising or consisting of a consensus sequence shown in the respective line in Table IV, application no. 16, column 8 or comprising at least one polypeptide motif shown in the respective line in Table IV, application no. 16, column 8, whereby not more than 20, 15, 10, 9, 8, 7, 6, 5 4, 3, 2 or 1, or 0 of the amino acid positions indicated can be replaced by any amino acid. In another embodiment thereof, the method of the present invention relates to a polypeptide comprising or consisting of a consensus sequence shown in the respective line in Table IV, application no. 16, column 8 or comprising at least one polypeptide motif shown in the respective line in Table IV, application no. 16, column 8, whereby not more than 15%, 10%, 5%, 4%, 3%, 2% or 1%, or 0% of the amino acid positions defined as distinct specific amino acids are/is replaced by another amino acid. In another embodiment thereof, the method of the present invention relates to a polypeptide comprising or consisting of a consensus sequence shown in the respective line in Table IV, application no. 16, column 8 or comprising at least one polypeptide motif shown in the respective line in Table IV, application no. 16, column 8, whereby not more than 20, 15, 10, 9, 8, 7, 6, 5, 4, 3, 2 or 1, or 0 amino acids are inserted into a consensus sequence or polypeptide motif.

[79120] In an embodiment of the present invention, in the method of the present invention the activity of a polypeptide comprising or consisting of a consensus sequence or at least one polypeptide motif shown in the respective line in Table IV, application no. 16, column 8, is increased, whereby said polypeptide distinguishes over the sequence depicted in Table II, application no. 16, columns 5 or 8 by one or more amino acids.

[79121] In one embodiment, said polypeptide of the invention distinguishes over the sequence shown in the respective line in Table II, application no. 16, columns 5 and 8 by more than 5, 6, 7, 8 or 9 amino acids, preferably by more than 10, 15, 20, 25 or 30 amino acids, even more preferred are more than 40, 50, or 60 amino acids and, preferably, the sequence of the polypeptide of the invention distinguishes from the sequence shown in the respective line in Table II B, application no. 16, columns 5 and 8 by not more than 80%, 70%, 60%, 50%, 40%, 30%, 20%, 10%, 5%, 4%, 3%, 2%, 1% or 0.5%. In another embodiment, said polypeptide of the invention does not consist of the sequence shown in Table II, application no. 16, columns 5 or 8.

[79122] [0309.1.7.16] to [0321.1.7.16] for the disclosure of these paragraphs see [0309.1.7.7] to [0321.1.7.7] above

[79123] Polypeptides having above-mentioned activity, i.e. conferring the production or the increased production of the fine chemical coenzyme Q10, coenzyme Q9, lipoic acid, or nicotinic acid as compared to a corresponding, e.g. non-transformed, wild type non-human organism, like a microorganism or a plant cell, plant or part thereof, can be encoded by other DNA sequences which hybridize to the sequences shown in the respective line in Table I, application no. 16, columns 5 and 8, preferably the coding region thereof, at least under relaxed hybridization conditions and which encode the expression of polypeptides conferring the production or the increased production of the respective fine chemical coenzyme Q10, coenzyme Q9, lipoic acid, or nicotinic acid as compared to a corresponding, e.g. non-transformed, wild type non-human organism, like a microorganism or a plant cell, plant or part thereof.

[79124] [0323.1.7.16] to [0329.1.7.16] for the disclosure of these paragraphs see [0323.1.7.7] to [0329.1.7.7] above

[79125] Further, the nucleic acid molecule of the invention comprises a nucleic acid molecule, which is a complement of one of the nucleotide sequences of above-mentioned nucleic acid molecules or a portion thereof. A nucleic acid molecule or its sequence which is complementary to one of the nucleotide molecules or sequences shown in the respective line in Table I, application no. 16, columns 5 or 8, preferably the coding region thereof, homologs or fragments thereof, is one which is sufficiently complementary to one of the nucleotide molecules or sequences shown in the respective line in Table I, application no. 16, columns 5 or 8, preferably the coding region thereof, homologs or fragments thereof, such that it can hybridize to one of the nucleotide sequences shown in Table I, application no. 16, columns 5 or 8, preferably the coding region thereof, homologs or fragments thereof, thereby forming a stable duplex. Preferably, the hybridization is performed under stringent hybridization conditions. However, a complement of one of the herein disclosed sequences is preferably a sequence complement thereto according to the base pairing of nucleic acid molecules well known to the skilled person. For example, the bases A and G undergo base pairing with the bases T and U or C, resp. and visa versa. Modifications of the bases can influence the base-pairing partner.

[79126] The nucleic acid molecule of the invention comprises a nucleotide sequence which is at least about 30%, 35%, 40%, 45%, 50%, 55%, 60%, 65%, 70%, 75%, 80%, 90%, 95%, 96%, 97%, 98%, 99%, 99.5% or more homologous to a nucleotide sequence shown in Table I, application no. 16, columns 5 or 8, preferably the coding region thereof, homologs or fragments thereof, and preferably has above-mentioned activity, in particular conferring the production or the increased production of the fine chemical coenzyme Q10, coenzyme Q9, lipoic acid, or nicotinic acid, respectively, after increasing the activity or an activity of a gene as shown in the respective line in Table I or of a gene product, e.g. as shown in the respective line in Table II, application no. 16, column 5 or 8, by for example in one embodiment expression either in the cytosol or in an organelle such as a plastid or mitochondria or both, preferably in a plastid, or in another embodiment non-targeted or targeted.

[79127] The nucleic acid molecule of the invention comprises a nucleotide sequence or molecule which hybridizes, preferably hybridizes under stringent conditions as defined herein, to one of the nucleic acid molecule shown in the respective line in Table I, preferably Table IB, application no. 16, columns 5 or 8, preferably the coding region thereof, fragments or homologs thereof, and encodes a protein having above-mentioned activity, e.g. conferring the production or the increased production of the respective fine chemical coenzyme Q10, coenzyme Q9, lipoic acid, or nicotinic acid as compared to a corresponding, e.g. non-transformed, wild type non-human organism, like a microorganism or a plant cell, plant or part thereof, by for example in one embodiment expression either in the cytosol or in an organelle such as a plastid or mitochondria or both, preferably in a plastid, or in another embodiment non-targeted or targeted, and optionally, the activity thereof is selected from the group consisting of 2-C-methyl-D-erythritol 4-phosphate cytidylyltransferase, acetolactate synthase III large subunit, acetyltransferase, acid shock protein, amino acid ABC transporter permease protein, amino acid acetyltransferase, At1g47380-protein, ATP synthase subunit E, ATP-binding component of a transport system, auxin response factor, AX653549-protein, AY087308-protein, b1003-protein, b1097-protein, b1522-protein, b2032-protein, b2739-protein, b2849-protein, b3817-protein, b4029-protein, beta-galactosidase, calcium-dependent protein kinase, cation-transporting ATPase, CCAAT-binding transcription factor, cell division control protein, colanic acid biosynthesis protein, CTP synthase, cyclin D , disease resistance protein, enoyl-CoA hydratase, fatty acid desaturase, F-box protein, flavodoxin, gluconate transport system permease 3, glutamine amidotransferase, glutaredoxin, glycerol dehydrogenase, glycerol-3-phosphate dehydrogenase, glycosyl transferase, halotolerance protein, heat shock protein Hsp40, heat shock transcription factor, histone acetyltransferase, hydrolase, isopropylmalate isomerase large subunit, L-aspartate oxidase, lipase, MADS box protein transcription factor, malate dehydrogenase, methylglyoxal synthase, methyltransferase, mitogen-activated protein kinase, monothiol glutaredoxin, multiple antibiotic resistance protein, N-acetyl-gamma-glutamylphosphate reductase, NADH dehydrogenase I chain I, oxidoreductase, permease protein of ABC transporter, phenylalanine ammonia-lyase, phosphoadenosine phosphosulfate reductase, phosphopantothenoylcysteine decarboxylase, photosystem II protein, protein kinase, protein phosphatase, pyruvate kinase, recombinase A, Ribose import ATP-binding protein, Sec-independent protein translocase subunit, serine protease, serine/threonine-protein phosphatase, sll1761-protein, slr1107-protein, sterol desaturase, threonine synthase, transcription factor, transcriptional regulator, TTC1386-protein, uroporphyrin-III C-methyltransferase, ycl027w-protein, zinc finger protein, and zinc transporter, respectively.

[79128] Moreover, the nucleic acid molecule of the invention can comprise only a portion of the coding region of one of the nucleic acid molecules depicted in Table I, application no. 16, columns 5 or 8, for example a fragment which can be used as a probe or primer or a fragment encoding a biologically active portion of the polypeptide of the present invention or of a polypeptide used in the process of the present invention, i.e. having above-mentioned activity, e.g. conferring the production or the increased production of the respective fine chemical coenzyme Q10, coenzyme Q9, lipoic acid, or nicotinic acid as compared to a corresponding, e.g. non-transformed, wild type non-human organism, like a microorganism or a plant cell, plant or part thereof, by for example in one embodiment expression either in the cytosol or in an organelle such as a plastid or mitochondria or both, preferably in a plastid, or in another embodiment non-targeted or targeted. The nucleotide sequences determined from the cloning of the present protein-according-to-the-invention-encoding gene allows for the generation of probes and primers designed for use in identifying and/or cloning its homologues from other cell types and organisms. The probe/primer typically comprises a substantially purified oligonucleotide. The oligonucleotide typically comprises a region of nucleotide sequence that hybridizes under stringent conditions to at least about 12, 15 preferably about 20 or 25, more preferably about 40, 50 or 75 consecutive nucleotides of a sense strand of one of the sequences set forth, e.g., in the respective line in Table I, application no. 16, column 5 or 8, preferably the coding region thereof, or a homolog or a fragment thereof, an anti-sense sequence of one of the sequences, e.g., set forth in the respective line in Table I, application no. 16, columns 5 or 8, preferably the coding region thereof, or a homolog or a fragment thereof or naturally occurring mutants thereof. Primers based on a nucleic acid molecule of invention can be used in PCR reactions to clone homologs of the polypeptide of the invention or of the polypeptide used in the process of the invention, e.g. as the primers described in the examples of the present invention, e.g. as shown in the examples. A PCR with the primers shown in the respective line in Table III, column 8 will result in a fragment of the gene product as shown in Table II, application no. 16, column 5.

[79129] Primer sets are interchangeable. The person skilled in the art knows how to design and combine said primers to result in the desired product, e.g. in a full length clone or a partial sequence. Probes based on the sequences of the nucleic acid molecule of the invention or used in the process of the present invention can be used to detect transcripts or genomic sequences encoding the same or homologous proteins. The probe can further comprise a label group attached thereto, e.g. the label group can be a radioisotope, a fluorescent compound, an enzyme, or an enzyme co-factor. Such probes can be used as a part of a genomic marker test kit for identifying cells which express a polypeptide of the invention or used in the process of the present invention, such as by measuring a level of an encoding nucleic acid molecule in a sample of cells, e.g. detecting mRNA levels or determining, whether a genomic gene comprising the sequence of the polynucleotide of the invention or used in the processes of the present invention has been mutated or deleted.

[79130] As the expression of a respective nucleic acids of the invention is related to the synthesis of the respective fine chemical coenzyme Q10, coenzyme Q9, lipoic acid, or nicotinic acid its function as a probe extends to the detection of microorganisms, plant tissues, plants, plant variets, plant ecotypes or plant genera with varying capability or potential for synthesis of the respective fine chemical coenzyme Q10, coenzyme Q9, lipoic acid, or nicotinic acid. Therefore in one embodiment the present invention relates to a method for analyzing the capability or potential of a plant tissue, a plant, a plant variety or plant ecotype to produce the fine chemical coenzyme Q10, coenzyme Q9, lipoic acid, or nicotinic acid by using the nucleic acid of the invention or parts thereof as a probe to detect the amount of the nucleic acid of the invention in the non-human organism or a part thereof in comparison to another non-human organism.

[79131] The nucleic acid molecule of the invention encodes a polypeptide or portion thereof which includes an amino acid sequence which is sufficiently homologous to the amino acid sequence shown in respective line in Table II, application no. 16, columns 5 or 8 such that the protein or portion thereof maintains the ability to confer the production or the increased production of the respective fine chemical coenzyme Q10, coenzyme Q9, lipoic acid, or nicotinic acid as compared to a corresponding, e.g. non-transformed, wild type non-human organism, like a microorganism or a plant cell, plant or part thereof, in particular increasing the activity as mentioned above or as described in the examples in microorganisms or plants.

[79132] As used herein, the language “sufficiently homologous” refers to proteins or portions thereof which have amino acid sequences which include a minimum number of identical or equivalent amino acids (e.g. an amino acid which has a similar side chain as an amino acid in one of the sequences of the polypeptide of the present invention) to an amino acid sequence shown in the respective line in Table II, application no. 16, columns 5 or 8 such that the protein or portion thereof is able to confer the production or the increased production of the respective fine chemical coenzyme Q10, coenzyme Q9, lipoic acid, or nicotinic acid as compared to a corresponding, e.g. non-transformed, wild type non-human organism, like a microorganism or a plant cell, plant or part thereof. For example having the activity of a protein as shown in the respective line in Table II, application no. 16, column 3 and as described herein.

[79133] In an embodiment of the present invention, the nucleic acid molecule of the present invention comprises a nucleic acid molecule that encodes a portion of the protein of the present invention. The protein is at least about 30%, 35%, 40%, 45% 50%, 55%, 60%, 65%, 70%, 75%, 80%, 85%, 90%, 91%, 92%, 93%, 94%, 95%, 96%, 97%, 98%, 99%, 99.5% or more homologous to an entire amino acid sequence shown in the respective line of Table II, application no. 16, column 5 or 8 and has the above-mentioned activity, e.g. conferring the production or the increased production of the respective fine chemical coenzyme Q10, coenzyme Q9, lipoic acid, or nicotinic acid as compared to a corresponding, e.g. non-transformed, wild type non-human organism, like a microorganism or a plant cell, plant or part thereof by, for example in a embodiment expression either in the cytosol or in an organelle such as a plastid or mitochondria or both, preferably in a plastid, or in another embodiment by targeted or non-targeted expression

[79134] for the disclosure of this paragraph see [0338.1.7.7] above

[79135] for the disclosure of this paragraph see [0339.1.7.7] above

[79136] The invention further relates to nucleic acid molecules or methods using said nucleic acid molecules that differ from one of the nucleotide sequences shown in the respective line in Table I, application no. 16, columns 5 or 8, preferably the coding region thereof, or fragments or homologs thereof, due to degeneracy of the genetic code but encode a polypeptide of the present invention, in particular a polypeptide having the above-mentioned activity, e.g. as those polypeptides depicted in the respective line in Table II, application no. 16, columns 5 or 8, fragments or homologs thereof. Advantageously, the nucleic acid molecule of the invention comprises, or in an other embodiment has, a nucleotide sequence encoding a protein comprising, or in an other embodiment having, an amino acid sequence shown in the respective line in Table II, application no. 16, columns 5 or 8, fragments or homologs thereof. In a further embodiment, the nucleic acid molecule of the invention encodes a full length protein which is substantially homologous to an amino acid sequence shown in the respective line in Table II, application no. 16, columns 5 or 8, or homologs thereof. However, in an embodiment, the nucleic acid molecule of the present invention does not consist of the sequence shown in the respective line in Table I, preferably Table IA, application no. 16, columns 5 or 8, preferably the coding region thereof, but the functional homologs thereof.

[79137] [0341.1.7.16] to [0343.1.7.16] for the disclosure of these paragraphs see [0341.1.7.7] to [0343.1.7.7] above

[79138] Accordingly, in another embodiment, a nucleic acid molecule of the invention is at least 15, 20, 25 or 30 nucleotides in length. Preferably, it hybridizes under stringent conditions to a nucleic acid molecule comprising a nucleotide sequence of the nucleic acid molecule of the present invention or used in the process of the present invention, e.g. comprising the sequence shown in the respective line in Table I, application no. 16, columns 5 or 8, preferably the coding region thereof. In another embodiment the nucleic acid molecule is preferably at least 20, 30, 50, 100, 250 or more nucleotides in length.

[79139] for the disclosure of this paragraph see [0345.1.7.7] above

[79140] Preferably, a nucleic acid molecule of the invention that hybridizes under stringent conditions to a sequence shown in the respective line in Table I, application no. 16, columns 5 or 8, preferably the coding region thereof, corresponds to a naturally-occurring nucleic acid molecule of the invention. As used herein, a “naturally-occurring” nucleic acid molecule refers to a RNA or DNA molecule having a nucleotide sequence that occurs in nature (e.g.

[79141] encodes a natural protein). Preferably, the nucleic acid molecule encodes a natural protein having above-mentioned activity, e.g. conferring the production or the increased production of the respective fine chemical coenzyme Q10, coenzyme Q9, lipoic acid, or nicotinic acid as compared to a corresponding, e.g. non-transformed, wild type non-human organism, like a microorganism or a plant cell, plant or part thereof after increasing the expression or activity thereof or the activity of a protein of the invention or used in the process of the invention, in an embodiment for example expression either in the cytosol or in an organelle such as a plastid or mitochondria, preferably in plastids, or, in another embodiment by targeted or non-targeted expression.

[79142] for the disclosure of this paragraph see [0347.1.7.7] above

[79143] For example, nucleotide substitutions leading to amino acid substitutions at “non-essential” amino acid residues can be made in a sequence of the nucleic acid molecule of the invention or used in the process of the invention, e.g. shown in the respective line in Table I, application no. 16, columns 5 or 8, preferably the coding region thereof, or fragments or homologs thereof.

[79144] for the disclosure of this paragraph see [0349.1.7.7] above

[79145] for the disclosure of this paragraph see [0350.1.7.7] above

[79146] Accordingly, the invention relates to nucleic acid molecules encoding a polypeptide having above-mentioned activity, in a non-human organisms or parts thereof by for example expression either in the cytosol or in an organelle such as a plastid or mitochondria or both, preferably in plastids, that contain changes in amino acid residues that are not essential for said activity. Such polypeptides differ in amino acid sequence from a sequence depicted in the respective line in Table II, especially Table IIA, application no. 16, columns 5 or 8, but retain said activity described herein. The nucleic acid molecule can comprise a nucleotide sequence encoding a polypeptide, wherein the polypeptide comprises an amino acid sequence at least about 50% identical to an amino acid sequence shown in the respective line in Table II, application no. 16, columns 5 or 8, and is capable of conferring the production or the increased production of the respective fine chemical coenzyme Q10, coenzyme Q9, lipoic acid, or nicotinic acid as compared to a corresponding, e.g. non-transformed, wild type non-human organism, like a microorganism or a plant cell, plant or part thereof, after increasing its activity for example in an embodiment by expression either in the cytosol or in an organelle such as a plastid or mitochondria or both, preferably in plastids, or, in another embodiment by targeted or non-targeted expression. Preferably, the protein encoded by the nucleic acid molecule is at least about 60%, 70%, 80%, 90%, 95%, 96%, 97%, 98%, 99% or 99.5% identical to the sequence shown in the respective line in Table II, application no. 16, columns 5 or 8.

[79147] [0352.1.7.16] to [0357.1.7.16] for the disclosure of these paragraphs see [0352.1.7.7] to [0357.1.7.7] above

[79148] Functional equivalents of the nucleic acid molecules according to the present invention and/or used in the process according to the present invention represent an embodiment of homologs. Functional equivalents derived from the nucleic acid molecules as shown in the respective line in Table I, application no. 16, columns 5 or 8, preferably the coding region thereof, according to the invention by substitution, insertion or deletion have at least 30%, 35%, 40%, 45%, 50%, 55%, 60%, 65%, 70%, 75%, 80%, 85%, 90%, 91%, 92%, 93%, 94%, 95%, 96%, 97%, 98%, 99% or 99.5% homology with one of the nucleic acid molecules as shown in the respective line in Table I, application no. 16, columns 5 or 8, preferably the coding region thereof, according to the invention and encode polypeptides having essentially the same properties as the polypeptide as shown in the respective line in Table II, application no. 16, columns 5 or 8.

[79149] Functional equivalents derived from one of the polypeptides as shown in the respective line in Table II, application no. 16, columns 5 or 8 according to the invention by substitution, insertion or deletion have at least 30%, 35%, 40%, 45%, 50%, 55%, 60%, 65%, 70%, 75%, 80%, 85%, 90%, 91%, 92%, 93%, 94%, 95%, 96%, 97%, 98%, 99% or 99.5% homology with one of the polypeptides as shown in the respective line in Table II, application no. 16, columns 5 or 8 according to the invention and having essentially the same properties as the polypeptide as shown in the respective line in Table II, application no. 16, columns 5 or 8.

[79150] for the disclosure of this paragraph see [0359.1.7.7] above

[79151] A nucleic acid molecule encoding a homolog to a polypeptide depicted in the respective line in Table II, application no. 16, columns 5 or 8 can be created by introducing one or more nucleotide substitutions, additions or deletions into the nucleic acid molecule of the present invention, in particular of Table I, application no. 16, columns 5 or 8, in the respective line, such that one or more amino acid substitutions, additions or deletions are introduced into the encoded protein. Mutations can be introduced into the nucleic acid molecules as depicted in the respective line in Table I, application no. 16, columns 5 or 8, preferably the coding region thereof, by standard techniques, such as site-directed mutagenesis, PCR-mediated mutagenesis or other methods known to the person skilled in the art.

[79152] [0361.1.7.16] to [0363.1.7.16] for the disclosure of these paragraph see [0363.1.7.7] above

[79153] for the disclosure of this paragraph see [0361.1.7.7] above

[79154] Homologues of the nucleic acid sequences used, with the sequences shown in the respective line in Table I, application no. 16, columns 5 or 8, preferably the coding region thereof, comprise also allelic variants with at least approximately 30%, 35%, 40%, 45%, 50%, 55%, 60%, 65%, 70%, 75%, 80%, 85%, 90%, 91%, 92%, 93%, 94% 95%. 96%, 97%, 98%, 99%, 99.5% or more % homology with one of the nucleotide sequences shown or the above-mentioned derived nucleic acid sequences or their homologues or derivatives or parts of these. Allelic variants encompass in particular functional variants which can be obtained by deletion, insertion or substitution of nucleotides from the sequences shown in the respective line, preferably in Table I, columns 5 or 8, preferably the coding region thereof, or from the derived nucleic acid sequences, the intention being, however, that the enzymatic activity or the biological activity of the resulting proteins synthesized is advantageously retained or increased.

[79155] In one embodiment of the present invention, the nucleic acid molecule of the invention or used in the process of the invention comprises the sequences shown in the respective line in any of the Table I, application no. 16, columns 5 or 8, preferably the coding region thereof, fragments or homologs thereof. It is preferred that the nucleic acid molecule comprises as little as possible other nucleotides not shown in the respective line in any one of Table I, application no. 16, columns 5 or 8, preferably the coding region thereof, fragments or homologs thereof. In one embodiment, the nucleic acid molecule comprises less than 500, 400, 300, 200, 100, 90, 80, 70, 60, 50 or 40 further nucleotides. In a further embodiment, the nucleic acid molecule comprises less than 30, 20 or 10 further nucleotides. In one embodiment, the nucleic acid molecule used in the process of the invention is identical to the sequences shown in the respective line in Table I, application no. 16, columns 5 or 8, preferably the coding region thereof.

[79156] Also preferred is that the nucleic acid molecule used in the process of the invention encodes a polypeptide comprising the sequence shown in the respective line in Table II, application no. 16, columns 5 or 8, fragments or homologs thereof. In one embodiment, the nucleic acid molecule encodes less than 150, 130, 100, 80, 60, 50, 40 or 30 further amino acids. In a further embodiment, the encoded polypeptide comprises less than 20, 15, 10, 9, 8, 7, 6 or 5 further amino acids. In one embodiment used in the inventive process, the encoded polypeptide is identical to the sequences shown in the respective line in Table II, application no. 16, columns 5 or 8.

[79157] In one embodiment, the nucleic acid molecule of the invention or used in the process encodes a polypeptide comprising the sequence shown in the respective line in Table II, application no. 16, columns 5 or 8, or fragments or homologs thereof, and comprises less than 100 further nucleotides. In a further embodiment, said nucleic acid molecule comprises less than 30 further nucleotides. In one embodiment, the nucleic acid molecule used in the process is identical to a coding sequence of the sequences shown in the respective line in Table I, application no. 16, columns 5 or 8.

[79158] Polypeptides (=proteins), which still have the essential biological or enzymatic activity of the polypeptide of the present invention conferring the production or the increased production of the respective fine chemical coenzyme Q10, coenzyme Q9, lipoic acid, or nicotinic acid as compared to a corresponding, e.g. non-transformed, wild type non-human organism, like a microorganism or a plant cell, plant or part thereof, i.e. whose activity is essentially not reduced, are polypeptides with at least 10%, 20%, 30%, 40%, 50%, 60%, 70%, 80%, 90%, 95% or more of the wild type biological activity or enzymatic activity, advantageously, the activity is essentially not reduced in comparison with the activity of a polypeptide shown in the respective line in Table II, application no. 16, columns 5 or 8 expressed under identical conditions.

[79159] Homologues of nucleic acid molecules shown in the respective line in Table I, application no. 16, columns 5 or 8, preferably the coding region thereof, or fragments thereof, or of the derived sequences shown in the respective line in Table II, application no. 16, columns 5 or 8, or fragments thereof, also mean truncated sequences, cDNA, single-stranded DNA or RNA of the coding and noncoding DNA sequence. Homologues of said sequences are also understood as meaning derivatives, which comprise noncoding regions such as, for example, UTRs, introns, terminators, enhancers or promoter variants. The promoters upstream of the nucleotide sequences stated can be modified by one or more nucleotide substitution(s), insertion(s) and/or deletion(s) without, however, interfering with the functionality or activity either of the promoters, the open reading frame (=ORF) or with the 3′-regulatory region such as terminators or other 3′-regulatory regions, which are far away from the ORF. It is furthermore possible that the activity of the promoters is increased by modification of their sequence, or that they are replaced completely by more active promoters, even promoters from heterologous organisms.

[79160] Appropriate promoters are known to the person skilled in the art and are mentioned herein below.

[79161] [0370.1.7.16] to [0379.1.7.16] for the disclosure of these paragraphs see [0370.1.7.7] to [0379.1.7.7] above

[79162] Moreover, a native polypeptide conferring the increase of the respective fine chemical coenzyme Q10, coenzyme Q9, lipoic acid, or nicotinic acid in a non-human organism or a part thereof can be isolated from cells (e.g., endothelial cells), for example using the antibody of the present invention as described below, in particular, an antibody against proteins having 2-C-methyl-D-erythritol 4-phosphate cytidylyltransferase, acetolactate synthase III large subunit, acetyltransferase, acid shock protein, amino acid ABC transporter permease protein, amino acid acetyltransferase, At1g47380-protein, ATP synthase subunit E, ATP-binding component of a transport system, auxin response factor, AX653549-protein, AY087308-protein, b1003-protein, b1097-protein, b1522-protein, b2032-protein, b2739-protein, b2849-protein, b3817-protein, b4029-protein, beta-galactosidase, calcium-dependent protein kinase, cation-transporting ATPase, CCAAT-binding transcription factor, cell division control protein, colanic acid biosynthesis protein, CTP synthase, cyclin D , disease resistance protein, enoyl-CoA hydratase, fatty acid desaturase, F-box protein, flavodoxin, gluconate transport system permease 3, glutamine amidotransferase, glutaredoxin, glycerol dehydrogenase, glycerol-3-phosphate dehydrogenase, glycosyl transferase, halotolerance protein, heat shock protein Hsp40, heat shock transcription factor, histone acetyltransferase, hydrolase, isopropylmalate isomerase large subunit, L-aspartate oxidase, lipase, MADS box protein transcription factor, malate dehydrogenase, methylglyoxal synthase, methyltransferase, mitogen-activated protein kinase, monothiol glutaredoxin, multiple antibiotic resistance protein, N-acetyl-gamma-glutamylphosphate reductase, NADH dehydrogenase I chain I, oxidoreductase, permease protein of ABC transporter, phenylalanine ammonia-lyase, phosphoadenosine phosphosulfate reductase, phosphopantothenoylcysteine decarboxylase, photosystem II protein, protein kinase, protein phosphatase, pyruvate kinase, recombinase A, Ribose import ATP-binding protein, Sec-independent protein translocase subunit, serine protease, serine/threonine-protein phosphatase, sll1761-protein, slr1107-protein, sterol desaturase, threonine synthase, transcription factor, transcriptional regulator, TTC1386-protein, uroporphyrin-III C-methyltransferase, ycl027w-protein, zinc finger protein, or zinc transporter activity, respectively, or an antibody against polypeptides as shown in the respective line in Table II, application no. 16, columns 5 or 8, or fragments or homologs thereof which can be produced by standard techniques utilizing the polypeptid of the present invention or fragment thereof, i.e., the polypeptide of this invention (FCRP). Preferred are monoclonal antibodies.

[79163] for the disclosure of this paragraph see [0381.1.7.7] above

[79164] In one embodiment, the present invention relates to a polypeptide as depicted in the respective line in Table II, especially in Table IIA or especially in Table IIB, application no. 16, columns 5 or 8, or fragment or homolog thereof or as coded by the nucleic acid molecule shown in the respective line in Table I, especially Table IA or especially Table IB, application no. 16, columns 5 or 8, preferably the coding region thereof, or fragment or homolog thereof.

[79165] In an embodiment, the present invention relates to a polypeptide comprising or consisting of a consensus sequence shown in the respective line in Table IV, application no. 16, column 8 or at least one polypeptide motif shown in the respective line in Table IV, application no. 16, column 8.

[79166] In an embodiment thereof, the present invention relates to a polypeptide comprising or consisting of a consensus sequence shown in the respective line in Table IV, application no. 16, column 8 or comprising at least one polypeptide motif shown in the respective line in Table IV, application no. 16, column 8, whereby not more than 20, 15, 10, 9, 8, 7, 6, 5, 4, 3, 2, or 1, or 0 of the amino acids can be replaced by any amino acid.

[79167] In another embodiment thereof, the present invention relates to a polypeptide comprising or consisting of a consensus sequence shown in the respective line in Table IV, application no. 16, column 8 or comprising at least one polypeptide motif shown in the respective line in Table IV, application no. 16, column 8, whereby not more than 15%, 10%, 5%, 4%, 3%, 2% or1% or 0% of the amino acids defined as distinct specific amino acids are/is replaced by another amino acid.

[79168] In another embodiment thereof, the present invention relates to a polypeptide comprising or consisting of a consensus sequence shown in the respective line in Table IV, application no. 16, column 8 or comprising at least one polypeptide motif shown in the respective line in Table IV, application no. 16, column 8, whereby not more than 20, 15, 10, 9, 8, 7, 6, 5, 4, 3, 2, or 1, or 0 amino acids are inserted into the consensus sequence or polypeptide motif.

[79169] In an embodiment of the present invention, the polypeptide of the present invention comprises or consists of a consensus sequence or at least one polypeptide motif shown in the respective line in Table IV, application no. 16, column 8, whereby said polypeptide distinguishes over the sequence depicted in the respective line in Table II, application no. 16, columns 5 or 8 by one or more amino acids. In one embodiment, said polypeptide of the invention distinguishes over the sequence shown in the respective line in Table II, application no. 16, columns 5 and 8 by more than 5, 6, 7, 8 or 9 amino acids, preferably by more than 10, 15, 20, 25 or 30 amino acids, even more preferred are more than 40, 50, or 60 amino acids and, preferably, the sequence of the polypeptide of the invention distinguishes from the sequence shown in the respective line in Table II, application no. 16, columns 5 and 8 by not more than 80%, 70%, 60%, 50%, 40%, 30%, 20%, 10%, 5%, 4%, 3%, 2%, 1% or 0.5%. In another embodiment, said polypeptide of the invention does not consist of the sequence shown in the respective line in Table II, application no. 16, columns 5 and 8.

[79170] In an embodiment, the invention relates to a polypeptide conferring an increase in the respective fine chemical coenzyme Q10, coenzyme Q9, lipoic acid, or nicotinic acid in a non-human organism, especially a microorganism or a plant, or a part thereof, being encoded by the nucleic acid molecule of the invention or used in the process of the invention and having a sequence which distinguishes over the sequence as shown in the respective line in Table II, application no. 16, columns 5 or 8 by one or more amino acids (but not exceeding 5%, preferably 4%, 3%, 2%, 1%, 0.5%, 0.2% or 0.1%). In an embodiment, said polypeptide of the invention does not comprise or consist of the sequence shown in the respective line in Table II, application no. 16, columns 5 or 8. In an embodiment, said polypeptide of the present invention is less than 100%, 99.999%, 99.99%, 99.9% or 99% identical. In one embodiment, said polypeptide which differs at least in one or more amino acids (but not exceeding 5%, preferably 4%, 3%, 2%, 1%, 0.5%, 0.2% or 0.1%) from the polypeptide shown in the respective line in Table II, application no. 16, columns 5 and 8 does not comprise a protein of the sequence shown in the respective line in Table II A and/or II B, application no. 16, columns 5 or 8.

[79171] In an embodiment, the present invention relates to a polypeptide having the activity of the protein as shown in the respective line in Table II, application no. 16, column 3, which distinguishes over the sequence depicted in the respective line in Table II, application no. 16, columns 5 or 8 by one or more amino acids, preferably by more than 5, 6, 7, 8 or 9 amino acids, preferably by more than 10, 15, 20, 25 or 30 amino acids, even more preferred are more than 40, 50, or 60 amino acids and, preferably, the sequence of the polypeptide of the invention distinguishes from the sequence shown in the respective line in Table II, application no. 16, columns 5 and 8 by not more than 80%, 70%, 60%, 50%, 40%, 30%, 20%, 10%, 5%, 4%, 3%, 2%, 1% or 0.5%.

[79172] In another embodiment the polypeptide of the invention takes the form of a preprotein consisting of a plastidial or mitochondrial transit peptide joint to a polypeptide having the activity of the protein as shown in Table II, column 3, from which the transit peptide is preferably cleaved off upon transport of the preprotein into the organelle for example into the plastid or mitochondrion.

[79173] In another embodiment the polypeptide of the invention takes not the form of a preprotein.

[79174] for the disclosure of this paragraph see [0390.1.7.7] above

[79175] for the disclosure of this paragraph see [0391.1.7.7] above

[79176] A polypeptide of the invention can participate in the process of the present invention. The polypeptide or a portion thereof comprises preferably an amino acid sequence, which is sufficiently homologous to an amino acid sequence shown in the respective line in Table II A and/or II B, application no. 16, columns 5 or 8.

[79177] Further, the polypeptide can have an amino acid sequence which is encoded by a nucleotide sequence which hybridizes, preferably hybridizes under stringent conditions as described above, to a nucleotide sequence of the nucleic acid molecule of the present invention. Accordingly, the polypeptide has an amino acid sequence which is encoded by a nucleotide sequence that is at least about 35%, 40%, 45%, 50%, 55%, 60%, 65%, 70%, 75%, 80%, 85%, 90%, 91%, 92%, 93%, 94%, 95%, 96%, 97%, 98%, 99%, 99.5% or more homologous to one of the amino acid sequences as shown in the respective line in Table II A and/or II B, application no. 16, columns 5 or 8, or fragments thereof. The preferred polypeptide of the present invention preferably possesses at least one of the activities according to the invention and described herein. A preferred polypeptide of the present invention includes an amino acid sequence encoded by a nucleotide sequence which hybridizes, preferably hybridizes under stringent conditions, to a nucleotide sequence shown in the respective line in Table I A and/or I B, application no. 16, columns 5 or 8, preferably the coding region thereof, or fragments thereto or which is homologous thereto, as defined above

[79178] The polypeptide of the present invention can vary from the sequences shown in the respective line in Table II A and/or II B, application no. 16, columns 5 or 8 in amino acid sequence due to natural variation or mutagenesis, as described in detail herein. Accordingly, the polypeptide comprise an amino acid sequence which is at least about 35%, 40%, 45%, 50%, 55%, 60%, 65%, 70%, 75%, 80%, 85% or 90, 91%, 92%, 93%, 94%, 95%, 96%, 97%, 98%, 99%, 99.5% or more homologous to an entire amino acid sequence shown in the respective line in Table II A and/or II B, application no. 16, columns 5 or 8.

[79179] Biologically active portions of a polypeptide of the present invention include peptides comprising amino acid sequences derived from the amino acid sequence of the polypeptide of the present invention or used in the process of the present invention, e.g., the amino acid sequence shown in the respective line in Table II, application no. 16, columns 5 or 8 or the amino acid sequence of a protein homologous thereto, which include fewer amino acids than a full length polypeptide of the present invention or used in the process of the present invention or the full length protein which is homologous to a polypeptide of the present invention or used in the process of the present invention depicted herein, and exhibit at least one activity of a polypeptide of the present invention or used in the process of the present invention.

[79180] for the disclosure of this paragraph see [0396.1.7.7] above

[79181] Manipulation of the nucleic acid molecule of the invention may result in the production of a protein having differences from the protein as shown in the respective line in Table II, application no. 16, column 5 or 8. Differences shall mean at least one amino acid different from the sequences as shown in the respective line in Table II, application no. 16, column 5 or 8, preferably at least 2, 3, 4, 5, 6, 7, 8, 9 or 10 amino acids (especially but not exceeding 0.1%, preferably 0.2%, 0.5%, 1%, 2%, 3% 4% or 5%), more preferably at least 15, 20, 25, 30, 35, 40, 45 or 50 amino acids (especially but not exceeding 0.5%, preferably 1%, 2%, 3% 4%, 5%, 10% or 25%) different from the sequences as shown in the respective line in Table II, application no. 16, column 5 or 8. These proteins may be improved in efficiency or activity, or may be more stable and therefore present in greater numbers in the cell as compared to the wild-type cell.

[79182] Any mutagenesis strategies for the polypeptide of the present invention or the polypeptide used in the process of the present invention to result in increasing said activity are not meant to be limiting; variations on these strategies will be readily apparent to one skilled in the art. Using such strategies, and incorporating the mechanisms disclosed herein, the nucleic acid molecule and polypeptide of the invention may be utilized to generate algae, ciliates, fungi, other microorganisms like C. glutamicum or plants or parts thereof, expressing proteins as shown in the respective line in Table II, application no. 16, column 5 or 8, or mutated proteins thereof. The nucleic acid molecules and polypeptide molecules of the invention are expressed such that the yield, production, and/or efficiency of production of a desired compound is improved.

[79183] [0399.1.7.16] to [0401.1.7.16] for the disclosure of these paragraphs see [0399.1.7.7] to [0401.1.7.7] above

[79184] In one embodiment, a protein (=polypeptide) as shown in the respective line in Table II, application no. 16, column 5 or 8 refers to a polypeptide having an amino acid sequence corresponding to the polypeptide of the invention, especially to a polypeptide as shown in Table II, application no. 16, columns 5 or 8 or homologs thereof, or used in the process of the invention, whereas a “non- inventive protein or polypeptide” or “other polypeptide” refers to a polypeptide having an amino acid sequence corresponding to a protein which is not substantially homologous to a polypeptide of the invention, preferably which is not substantially homologous to a polypeptide or protein as shown in the respective line in Table II, application no. 16, column 5 or 8 or homologs thereof, e.g., a protein which does not confer the activity described herein and which is derived from the same or a different organism.

[79185] [0403.1.7.16] to [0409.1.7.16] for the disclosure of theses paragraphs see [0403.1.7.7] to [0409.1.7.7] above

[79186] As the nucleic acid molecules of the invention and/or the expression thereof is related to the synthesis of the respective fine chemical coenzyme Q10, coenzyme Q9, lipoic acid, or nicotinic acid its function as a probe extends to the detection of microorganisms, plant tissues, plants, plant variets, plant ecotypes or plant genera with varying, advantageously increased, capability or potential for synthesis of the respective fine chemical coenzyme Q10, coenzyme Q9, lipoic acid, or nicotinic acid. Therefore in one embodiment the present invention relates to a method for analyzing the capability or potential of a plant tissue, a plant, a plant variety or ecotype to produce the respective fine chemical coenzyme Q10, coenzyme Q9, lipoic acid, or nicotinic acid by using the respective antibody of the invention as a probe to detect the amount of the polypeptide encoded by said nucleic acid molecule of the invention in a non-human organism in comparison to another organism.

[79187] Therefore in one embodiment the invention relates to a method to probe a non-human organism for its capability for the production of the respective fine chemical comprising the steps of
[79188] a) analyzing the sequence and/or the expression of the respective nucleic acid molecule of the invention in least two non-human organisms which differ in the capability to produce the respective fine chemical;
[79189] b) associate the different sequence and/or expression level of the nucleic acid molecules of the invention with their different capability to produce the respective fine chemical;
[79190] c) analyze the sequence and/or the expression of the nucleic acid molecule of the invention in at least a third non-human organism;
[79191] d) predict the capability of the at least third organism to produce the respective fine chemical based by comparing the sequence and/or expression of the nucleic acid of the invention to the sequences and/or expression levels of the nucleic acid molecule of the invention of the at least two organisms analyzed in step a.

[79192] [0411.1.7.16] to [0430.1.7.16] for the disclosure of these paragraphs see [0411.1.7.7] to [0430.1.7.7] above

[79193] Accordingly the present invention relates to any cell transgenic for any nucleic acid characterized as part of the invention, e.g. conferring the increase of the respective fine chemical coenzyme Q10, coenzyme Q9, lipoic acid, or nicotinic acid in a cell or a non-human organism or a part thereof, e.g. the nucleic acid molecule of the invention, the nucleic acid construct of the invention, the vector of the invention, the expression cassette according to the invention, or a nucleic acid molecule encoding the polypeptide of the invention, e.g. encoding a polypeptide having an activity as the protein as shown in the respective line in Table II, application no. 16, column 3. Due to the above-mentioned activity the respective fine chemical coenzyme Q10, coenzyme Q9, lipoic acid, or nicotinic acid content in a cell or a non-human organism is increased. For example, due to modulation or manipulation, the cellular activity is increased, in a preferred embodiment in organelles such as plastids or mitochondria, e.g. due to an increased expression or specific activity or specific targeting of the subject matters of the invention in a cell or a non-human organism or a part thereof especially in organelles such as plastids or mitochondria, or in another embodiment in the cytosol. Transgenic for a polypeptide having a protein or a protein activity means herein that due to modulation or manipulation of the genome, the activity of protein as shown in the respective line in Table II, application no. 16, column 3 or a protein as shown in the respective line in Table II, application no. 16, column 3-like activity is increased in the cell or non-human organism or part thereof, especially in organelles such as plastids or mitochondria, or especially in the cytosol. Examples are described above in context with the process of the invention.

[79194] for the disclosure of this paragraph see [0432.1.7.7] above

[79195] A naturally occurring expression cassette—for example the naturally occurring combination of the promoter of the gene encoding a protein as shown in the respective line in Table II, application no. 16, column 5 or 8, preferably the coding region thereof, or fragments or homologs thereof with the corresponding encoding gene—becomes a transgenic expression cassette when it is modified by non-natural, synthetic “artificial” methods such as, for example, mutagenesis. Such methods have been described (U.S. Pat. No. 5,565,350; WO 00/15815; also see above).

[79196] for the disclosure of this paragraph see [0434.1.7.7] above

[79197] for the disclosure of this paragraph see [0435.1.7.7] above

[79198] Transgenic plants comprising the respective fine chemical(s) synthesized in the process according to the invention can be marketed directly without isolation of the fine chemical synthesized. In the process according to the invention, plants are understood as meaning all plant parts, plant organs such as leaf, stalk, root, tubers or seeds or propagation material or harvested material or the intact plant. In this context, the seed encompasses all parts of the seed such as the seed coats, epidermal cells, seed cells, endosperm or embryonic tissue. The fine chemical produced in the process according to the invention may, however, also be isolated from the plant. In case of coenzyme Q10, coenzyme Q9, lipoic acid, or nicotinic acid this can be in free form or bound to proteins. Fine chemical(s) produced by this process can be harvested by harvesting the non-human organisms either from the culture in which they grow or from the field. For example, this can be done via squeezing, grinding and/or extraction, salt precipitation and/or ion-exchange chromatography of the plant parts, preferably the plant seeds, plant fruits, plant tubers and the like.

[79199] [0437.1.7.16] to [0448.1.16.16] for the disclosure of these paragraphs see [0437.1.7.7] to [0448.1.16.7] above

[79200] The fine chemical obtained in the process are suitable as starting material for the synthesis of further products of value.

[79201] For example, in case of vitamins they can be used in combination with each other or alone for the production of pharmaceuticals, foodstuffs, animal feeds or cosmetics.

[79202] The respective fine chemical can then be processed further directly into foodstuffs or animal feeds or for other applications.

[79203] Coenzyme Q10 is cardioprotective, cytoprotective, and neuroprotective. It is an anti-oxidant and an important metabolic cofactor for the production of energy. Coenzyme Q10 is an effective adjunct treatment for various conditions of the cardiovascular system. Its most well recognized and studied uses lie within the conditions of congestive heart failure, hypertension, and angina.

[79204] For individuals with congestive heart failure, Coenzyme Q10 has been shown to increase the quality of life.

[79205] Coenzyme Q10 may improves symptoms in patients with high blood pressure, mitral valve prolapse, and angina. It is also protective against the development of atherosclerosis, by inhibiting the oxidation of LDL and by increasing HDL levels.

[79206] Coenzyme Q10 may be an effective addition to any cancer treatment protocol. Numerous studies have highlighted its ability to decrease the cardiac toxicity of a popular anti-cancer drug, doxorubicin; also known as Adriamycin.

[79207] Coenzyme Q10 may be a useful adjunctive treatment for individuals with breast cancer.

[79208] Coenzyme Q10 can reduce oxidative stress via its anti-oxidant action. It is theorized that by reducing oxidative stress, CoQ10 can protect against cardiovascular and neurological disease; among the many other conditions that may be related to free radical damage and oxidative stress.

[79209] It further can be helpful for individuals with early onset Parkinson's disease. It may slow the progression of disease and deterioration of cognitive function. [9] In one particular controlled study, individuals taking Coenzyme Q10 had less disability over time than those not taking Coenzyme Q10. Supplemental CoQ10 was well tolerated with few side effects in very high doses. Topical Coenzyme Q10 can be an effective treatment alone, or in combination with non-surgical therapy for peridontitis. It has been shown to improve symptoms of the disease and reduce the progression. Topical CoQ10 creams are also becoming popular in many cosmetic formulations.

[79210] In pharmacological doses, niacin has been proven to reverse atherosclerosis by reducing total cholesterol, triglycerides, very-low-density lipoprotein (VLDL), and low-density lipoprotein (LDL), and increasing high-density lipoprotein (HDL). Niacin may have the ability to lower lipoprotein (a), which is beneficial at reducing thrombotic tendency. It can be used in reducing carotid intima-media thickness, a marker of atherosclerosis.

[79211] Lipoic acid can improve glucose utilization in individuals with type 2 Diabetis Mellitus and can improve endothelium-dependent vasodilation. Intravenous and oral lipoic acid are approved for the treatment of diabetic neuropathy in Germany.

[79212] Feeding high doses of lipoic acid to mice with experimental autoimmune encephalomyelitis (EAE), a model of multiple sclerosis (MS), has been found to slow disease progression. Lipoic acid alone or in combination with other antioxidants or L-carnitine has been found to improve measures of memory in animal models of age-associated cognitive decline, including rats, mice and dogs.

[79213] [0450.1.7.16] to [0452.1.7.16] for the disclosure of theses paragraphs see [0450.1.7.7] to [0452.1.7.7] above

[79214] Further in another embodiment, the present invention relates to the use of the nucleic acid molecule of the invention or used in the method of the invention alone or in combination with other genes of the respective fine chemical synthesis for example of the cofactor biosynthesis, the polypeptide of the invention or used in the method of the invention, the nucleic acid construct of the invention, the expression cassette of the invention, the vector of the invention, the plant or plant tissue or the host cell of the invention, for the production of plant resistant to a herbicide inhibiting eventually the production of the fine chemical.

[79215] for the disclosure of this paragraph see [0454.1.7.7] above

[79216] In one embodiment, the present invention relates to a method for the identification of a gene product conferring the production of or an increase in the fine chemical production in a non-human cell, comprising the following steps:
[79217] (a) contacting, e.g. hybridizing, a, some or all nucleic acid molecules of a sample, e.g. cells, tissues, plants or microorganisms or a nucleic acid library, which can contain a candidate gene encoding a gene product conferring the production of or an increase in the fine chemical after expression, with the nucleic acid molecule of the present invention as shown in the respective line in column 5 or 8 of Table I A or B of application no. 16, preferably the coding region thereof, or a fragment or homolog thereof;
[79218] (b) identifying the nucleic acid molecules, which hybridize under relaxed stringent conditions with the nucleic acid molecule of the present invention in particular to the nucleic acid molecule sequence shown in the respective line in Table I, application no. 16, columns 5 or 8, preferably the coding region thereof, of a fragment or a homolog thereof, preferably in Table I B, application no. 16, columns 5 or 8, preferably the coding region thereof, of a fragment or a homolog thereof, and, optionally, isolating the full length cDNA clone or complete genomic clone;
[79219] (c) introducing the candidate nucleic acid molecules or a fragment thereof in host cells, preferably in a plant cell or a microorganism, appropriate for producing the fine chemical;
[79220] (d) expressing the identified nucleic acid molecules in the host cells for which the production of or the increased production of the fine chemical is desired;
[79221] (e) assaying the fine chemical level in the non-human host cells; and
[79222] (f) identifying the nucleic acid molecule and/or its gene product which expression confers the production of or an increase in the fine chemical level in the non-human host cell after expression compared to the wild type.

[79223] [0456.1.7.16] for the disclosure of this paragraph see [0456.1.7.7] above [0457.1.16.16] In another embodiment, the present invention relates to a method for the identification of a gene product conferring the production of or an increase in the fine chemical production in a cell, comprising the following steps:
[79224] (a) identifying a nucleic acid molecule of a non-human organism, which is at least 20%, 25%, 30%, 35%, 40%, 50%, 60%, 70%, 80%, 90%, 95%, 96%, 97%, 98%, 99%, 99.5% or more homolog to the nucleic acid molecule encoding a polypeptide comprising the polypeptide molecule as shown in the respective line in column 5 or 8 of Table II, application no. 16, or comprising a consensus sequence or a polypeptide motif as shown in the respective line in column 8 of Table IV, application no. 16, or being encoded by a nucleic acid molecule comprising a polynucleotide as shown in the respective line in column 5 or 8 of Table I, application no. 16, preferably the coding region thereof, or a homologue thereof as described herein, for example via homology search in a data bank;
[79225] (b) introducing the candidate nucleic acid molecule in non-human host cells, preferably in a plant cell or a microorganism, appropriate for producing the fine chemical;
[79226] (c) expressing the identified nucleic acid molecule in the non-human host cells;
[79227] (d) assaying the fine chemical level in the non-human host cells; and
[79228] (e) identifying the nucleic acid molecule and its gene product which expression confers the production of or an increase in the fine chemical level in the non-human host cell after expression compared to the wild type.

[79229] for the disclosure of this paragraph see [0458.1.7.7] above

[79230] Further, the nucleic acid molecules disclosed herein, in particular the nucleic acid molecules shown in the respective line in column 5 or 8 of Table I A or B of application no. 16, may be sufficiently homologous to the sequences of related species such that these nucleic acid molecules may serve as markers for the construction of a genomic map in related organism or for association mapping. Furthermore natural variation in the genomic regions corresponding to nucleic acids disclosed herein, in particular the nucleic acid molecule shown in the respective line in column 5 or 8 of Table I A or B, of application no. 16 or homologous thereof, may lead to variation in the activity of the proteins disclosed herein, in particular the proteins comprising polypeptides as shown in the respective lines in column 5 or 8 of Table II A or B, of application no. 16 or their homologous, or comprising the consensus sequence or the polypeptide motif as shown in the respective line in column 8 of Table IV, and in consequence in a natural variation of an increased fine chemical production.

[79231] In consequence natural variation eventually also exists in form of more active allelic variants leading already to a relative increase in the fine chemical. Different variants of the nucleic acid molecules disclosed herein, in particular the nucleic acid molecules comprising the nucleic acid molecules as shown in the respective line in column 5 or 8 of Table I A or B of application no. 16, preferably the coding region thereof, which corresponds to different levels of increase in fine chemical, e.g. different levels of increase in fine chemical, can be indentified and used for marker assisted breeding for an enhanced production of the fine chemical.

[79232] Natural variation may also exist in the regulatory regions, e.g. the promoters of the natural genes comprising the nucleic acid molecules as shown in the respective line column 5 or 8 of Table I A or B of application no. 16, preferably the coding region thereof, which can similarly correspond to different levels of increase in the fine chemical, e.g. different levels of increase in the fine chemical can be identified and used for marker assisted breeding for an enhanced production of the fine chemical.

[79233] Accordingly, the present invention relates to a method for breeding plants for the production of the fine chemical, comprising
[79234] (a) selecting a first plant variety with an increased production of the fine chemical, e.g. based on an increased expression of a nucleic acid molecule of the invention as disclosed herein, in particular of a nucleic acid molecule comprising a nucleic acid molecule as shown in the respective line in column 5 or 8 of Table I A or B of application no. 16, preferably the coding region thereof, or fragments or homologs thereof, or a polypeptide comprising a polypeptide as shown in the respective line in column 5 or 8 of Table II A or B of application no. 16, or fragments or homologs thereof, or comprising a consensus sequence or a polypeptide motif as shown in the respective line in column 8 of Table IV, or a homolog thereof, as described herein;
[79235] (b) associating the level of increased production of the fine chemical, with the expression level or the genomic structure of a gene encoding said polypeptide or said nucleic acid molecule;
[79236] (c) crossing the first plant variety with a second plant variety, which significantly differs in its level of fine chemical; and
[79237] (d) identifying, which of the offspring varieties has got increased production of the fine chemical by the expression level of said polypeptide or nucleic acid molecule or the genomic structure of the gene(s) encoding said polypeptide or nucleic acid molecule of the invention.

[79238] [0462.1.7.16] to [0479.1.7.16] for the disclosure of these paragraphs see [0462.1.7.7] to [0479.1.7.7] above

[79239] In a further embodiment the nucleic acid molecule of the invention, the polypeptide of the invention, the nucleic acid construct of the invention, the expression cassette of the invention, the non-human organisms, the non-human host cell, the microorganisms, the plant, plant cell, or the part thereof, of the invention, the vector of the invention, the agonist identified with the method of the invention, the nucleic acid molecule identified with the method of the present invention, can be used for the production of the fine chemical or of the fine chemical and one or more other cofactors.

[79240] Accordingly, the nucleic acid molecule of the invention, or the nucleic acid molecule identified with the method of the present invention or the complement sequences thereof, the polypeptide of the invention, the nucleic acid construct of the invention, the expression cassette of the invention, the non-human organism, the non-human host cell, the microorganism, the plant, plant cell, or the part thereof of the invention, the vector of the invention, the agonist identified with the method of the invention, the antibody of the present invention, can be used for the production of or the increase in the fine chemical in a non-human organism or part thereof, e.g. in a cell.

[79241] for the disclosure of this paragraph see [0481.1.7.7] above

[79242] for the disclosure of this paragraph see [0482.1.7.7] above

[79243] A special embodiment of this invention is related to genes which increase or generate the production of the fine chemical coenzyme Q10 and/or coenzyme Q9 in plant cells, plants or part thereof. Phenotypes thereto are associated with yield of plants (=yield related phenotypes). In accordance with the invention, therefore, the respective genes identified in Table I, wherein in column 7 coenzyme Q10 and/or coenzyme Q9 are mentioned, especially the coding region thereof, or homologs or fragments thereof,may be employed to enhance any yield-related phenotype. Increased yield may be determined in field trials of transgenic plants and suitable control plants. Alternatively, a transgene's ability to increase yield may be determined in a model plant. An increased yield phenotype may be determined in the field test or in a model plant by measuring any one or any combination of the following phenotypes, in comparison to a control plant: yield of dry harvestable parts of the plant, yield of dry aerial harvestable parts of the plant, yield of underground dry harvestable parts of the plant, yield of fresh weight harvestable parts of the plant, yield of aerial fresh weight harvestable parts of the plant yield of underground fresh weight harvestable parts of the plant, yield of the plant's fruit (both fresh and dried), grain dry weight, yield of seeds (both fresh and dry), and the like.

[79244] The most basic yield-related phenotype is increased yield associated with the presence of the gene or a homolog or a fragment thereof as a transgene in the plant, i.e., the intrinsic yield of the plant. Intrinsic yield capacity of a plant can be, for example, manifested in a field test or in a model system by demonstrating an improvement of seed yield (e.g. in terms of increased seed/grain size, increased ear number, increased seed number per ear, improvement of seed filling, improvement of seed composition, embryo and/or endosperm improvements, and the like); modification and improvement of inherent growth and development mechanisms of a plant (such as plant height, plant growth rate, pod number, pod position on the plant, number of internodes, incidence of pod shatter, efficiency of nodulation and nitrogen fixation, efficiency of carbon assimilation, improvement of seedling vigour/early vigour, enhanced efficiency of germination (under non-stressed conditions), improvement in plant architecture.

[79245] Increased yield-related phenotypes may also be measured to determine tolerance to abiotic environmental stress. Abiotic stresses include drought, low temperature, salinity, osmotic stress, shade, high plant density, mechanical stresses, and oxidative stress, and yield-related phenotypes are encompassed by tolerance to such abiotic stresses. Additional phenotypes that can be monitored to determine enhanced tolerance to abiotic environmental stress include, without limitation, wilting; leaf browning; loss of turgor, which results in drooping of leaves or needles stems, and flowers; drooping and/or shedding of leaves or needles; the leaves are green but leaf angled slightly toward the ground compared with controls; leaf blades begun to fold (curl) inward; premature senescence of leaves or needles; loss of chlorophyll in leaves or needles and/or yellowing. Any of the yield-related phenotypes described above may be monitored in field tests or in model plants to demonstrate that a transgenic plant has increased tolerance to abiotic environmental stress. In accordance with the invention, the respective genes identified in Table 1, in case in column 7 coenzyme Q10 and/or coenzyme Q9 is indicated, especially the coding region thereof, or homologs or fragments thereof, may be employed to enhance tolerance to abiotic environmental stress in a plant means that the plant, when confronted with abiotic environmental stress.

[79246] A polypeptide conferring an yield-increasing activity can be encoded by a respective nucleic acid sequence as shown in Table I, column 5 or 8, and/or comprises or consists of a respective polypeptide as depicted in Table II, column 5 and 8, and/or can be amplified with the respective primer set shown in Table III, column 8, in case in column 7 coenzyme Q10 and/or coenzyme Q9 is indicated.

[79247] “Improved adaptation” to environmental stress like e.g. freezing and/or chilling temperatures refers to an improved plant performance under environmental stress conditions.

[79248] A modification, i.e. an increase, can be caused by endogenous or exogenous factors. For example, an increase in activity in an organism or a part thereof can be caused by adding a gene product or a precursor or an activator or an agonist to the media or nutrition or can be caused by introducing said subjects into an organism, transient or stable. Furthermore such an increase can be reached by the introduction of the respective inventive nucleic acid sequence or the encoded protein in the correct cell compartment for example into the nucleus or cytoplasmic respectively or into plastids either by transformation and/or targeting.

[79249] The term “yield” as used herein generally refers to a measurable produce from a plant, particularly a crop. Yield and yield increase (in comparison to a non-transformed starting or wild-type plant) can be measured in a number of ways, and it is understood that a skilled person will be able to apply the correct meaning in view of the particular embodiments, the particular crop concerned and the specific purpose or application concerned. The terms “improved yield” or “increased yield” can be used interchangeable.

[79250] As used herein, the term “improved yield” or the term “increased yield” means any improvement in the yield of any measured plant product, such as grain, fruit or fiber. In accordance with the invention, changes in different phenotypic traits may improve yield. For example, and without limitation, parameters such as floral organ development, root initiation, root biomass, seed number, seed weight, harvest index, tolerance to abiotic environmental stress, leaf formation, phototropism, apical dominance, and fruit development, are suitable measurements of improved yield. Any increase in yield is an improved yield in accordance with the invention. For example, the improvement in yield can comprise a 0.1%, 0.5%, 1%, 3%, 5%, 10%, 15%, 20%, 30%, 40%, 50%, 60%, 70%, 80%, 90% or greater increase in any measured parameter. For example, an increase in the bushel/acre yield of soybeans or corn derived from a crop comprising plants which are transgenic for the nucleotides and polypeptides of Table I, in case in column 7 coenzyme Q10 and/or coenzyme Q9 is mentioned, as compared with the bushel/acre yield from untreated soybeans or corn cultivated under the same conditions, is an improved yield in accordance with the invention. The increased or improved yield can be achieved in the absence or presence of stress conditions.

[79251] For example, enhanced or increased “yield” refers to one or more yield parameters selected from the group consisting of biomass yield, dry biomass yield, aerial dry biomass yield, underground dry biomass yield, fresh-weight biomass yield, aerial fresh-weight biomass yield, underground fresh-weight biomass yield; enhanced yield of harvestable parts, either dry or fresh-weight or both, either aerial or underground or both; enhanced yield of crop fruit, either dry or fresh-weight or both, either aerial or underground or both; and preferably enhanced yield of seeds, either dry or fresh-weight or both, either aerial or underground or both.

[79252] Crop yield is defined herein as the number of bushels of relevant agricultural product (such as grain, forage, or seed) harvested per acre. Crop yield is impacted by abiotic stresses, such as drought, heat, salinity, and cold stress, and by the size (biomass) of the plant. Traditional plant breeding strategies are relatively slow and have in general not been successful in conferring increased tolerance to abiotic stresses. Grain yield improvements by conventional breeding have nearly reached a plateau in maize.

[79253] Accordingly, the yield of a plant can depend on the specific plant/crop of interest as well as its intended application (such as food production, feed production, processed food production, biofuel, biogas or alcohol production, or the like) of interest in each particular case. Thus, in one embodiment, yield is calculated as harvest index (expressed as a ratio of the weight of the respective harvestable parts divided by the total biomass), harvestable parts weight per area (acre, square meter, or the like); and the like. The harvest index, i.e., the ratio of yield biomass to the total cumulative biomass at harvest, in maize has remained essentially unchanged during selective breeding for grain yield over the last hundred years. Accordingly, recent yield improvements that have occurred in maize are the result of the increased total biomass production per unit land area. This increased total biomass has been achieved by increasing planting density, which has led to adaptive phenotypic alterations, such as a reduction in leaf angle, which may reduce shading of lower leaves, and tassel size, which may increase harvest index. Harvest index is relatively stable under many environmental conditions, and so a robust correlation between plant size and grain yield is possible. Plant size and grain yield are intrinsically linked, because the majority of grain biomass is dependent on current or stored photosynthetic productivity by the leaves and stem of the plant. As with abiotic stress tolerance, measurements of plant size in early development, under standardized conditions in a growth chamber or greenhouse, are standard practices to measure potential yield advantages conferred by the presence of a transgene.

[79254] Acccordingly, the yield of a plant can be increased by improving one or more of the yield-related phenotypes.

[79255] Such yield-related phenotypes or traits of a plant the improvement of which results in increased yield comprise, without limitation, the increase of the intrinsic yield capacity of a plant, improved nutrient use efficiency, and/or increased stress tolerance.

[79256] For example, yield refers to biomass yield, e.g. to dry weight biomass yield and/or fresh-weight biomass yield. Biomass yield refers to the aerial or underground parts of a plant, depending on the specific circumstances (test conditions, specific crop of interest, application of interest, and the like). In one embodiment, biomass yield refers to the aerial and underground parts. Biomass yield may be calculated as fresh-weight, dry weight or a moisture adjusted basis. Biomass yield may be calculated on a per plant basis or in relation to a specific area (e.g. biomass yield per acre/square meter/ or the like).

[79257] In other embodiment, “yield” refers to seed yield which can be measured by one or more of the following parameters: number of seeds or number of filled seeds (per plant or per area (acre/square meter/ or the like)); seed filling rate (ratio between number of filled seeds and total number of seeds); number of flowers per plant; seed biomass or total seeds weight (per plant or per area (acre/square meter/ or the like); thousand kernel weight (TKW; extrapolated from the number of filled seeds counted and their total weight; an increase in TKW may be caused by an increased seed size, an increased seed weight, an increased embryo size, and/or an increased endosperm). Other parameters allowing to measure seed yield are also known in the art. Seed yield may be determined on a dry weight or on a fresh weight basis, or typically on a moisture adjusted basis, e.g. at 15.5 percent moisture.

[79258] For example, the term “increased yield” means that the plant, exhibits an increased growth rate, under conditions of abiotic environmental stress, compared to the corresponding wild-type plant. An increased growth rate may be reflected inter alia by or confers an increased biomass production of the whole plant, or an increased biomass production of the aerial parts of a plant, or by an increased biomass production of the underground parts of a plant, or by an increased biomass production of parts of a plant, like stems, leaves, blossoms, fruits, and/or seeds.

[79259] Increased yield includes higher fruit yields, higher seed yields, higher fresh matter production, and/or higher dry matter production.

[79260] The term “increased yield” means that the plant, exhibits a prolonged growth under conditions of abiotic environmental stress, as compared to the corresponding, e.g. non-transformed, wild type organism. A prolonged growth comprises survival and/or continued growth of the plant, at the moment when the non-transformed wild type organism shows visual symptoms of deficiency and/or death.

[79261] When the plant of the invention is a corn plant increased yield for corn plants means, for example, increased seed yield, in particular for corn varieties used for feed or food. Increased seed yield of corn refers to an increased kernel size or weight, an increased kernel per ear, or increased ears per plant. Alternatively or in addition the cob yield may be increased, or the length or size of the cob is increased, or the kernel per cob ratio is improved.

[79262] When the plant of the invention is a soy plant, increased yield for soy plants means increased seed yield, in particular for soy varieties used for feed or food. Increased seed yield of soy refers for example to an increased kernel size or weight, an increased kernel per pod, or increased pods per plant.

[79263] When the plant of the invention is an oil seed rape (OSR) plant, increased yield for OSR plants means increased seed yield, in particular for OSR varieties used for feed or food. Increased seed yield of OSR refers to an increased seed size or weight, an increased seed number per silique, or increased siliques per plant.

[79264] When the plant of the invention is a cotton plant,increased yield for cotton plants means increased lint yield. Increased lint yield of cotton refers in one embodiment to an increased length of lint.

[79265] When the plant of the invention is a wheat plant increased yield for wheat plants means, for example, increased seed yield, in particular for wheat varieties used for feed or food. Increased seed yield of wheat refers to an increased kernel size or weight, an increased kernel per ear, or increased ears per plant. Increased seed yield of wheat refers also to an increased grain size or weight, an increased number of grains per spike, or increased number of spikes per plant. Alternatively or in addition increased seed yield of wheat refers also to an increased grain yield, increased length of spikes, increased number of spikelets per spike , increased 1000 grain weight or increased flag leaf area (flag leaf is the leaf directely below the spike).

[79266] Said increased yield can typically be achieved by enhancing or improving, one or more yield-related traits of the plant. Such yield-related traits of a plant comprise, without limitation, the increase of the intrinsic yield capacity of a plant, improved nutrient use efficiency, and/or increased stress tolerance, in particular increased abiotic stress tolerance.

[79267] Intrinsic yield capacity of a plant can be, for example, manifested by improving the specific (intrinsic) seed yield (e.g. in terms of increased seed/ grain size, increased ear number, increased seed number per ear, improvement of seed filling, improvement of seed composition, embryo and/or endosperm improvements, or the like); modification and improvement of inherent growth and development mechanisms of a plant (such as plant height, plant growth rate, pod number, pod position on the plant, number of internodes, incidence of pod shatter, efficiency of nodulation and nitrogen fixation, efficiency of carbon assimilation, improvement of seedling vigour/early vigour, enhanced efficiency of germination (under stressed or non-stressed conditions), improvement in plant architecture, cell cycle modifications, photosynthesis modifications, various signaling pathway modifications, modification of transcriptional regulation, modification of translational regulation, modification of enzyme activities, and the like); and/or the like.

[79268] The improvement or increase of stress tolerance of a plant can for example be manifested by improving or increasing a plant's tolerance against stress, particularly abiotic stress. In the present application, abiotic stress refers generally to abiotic environmental conditions a plant is typically confronted with, including, but not limited to, drought (tolerance to drought may be achieved as a result of improved water use efficiency), heat, low temperatures and cold conditions (such as freezing and chilling conditions), salinity, osmotic stress , shade, high plant density, mechanical stress, oxidative stress, and the like.

[79269] The increased plant yield can also be mediated by increasing the “nutrient use efficiency of a plant”, e.g. by improving the use efficiency of nutrients including, but not limited to, phosphorus, potassium, and nitrogen. Further, higher yields may be obtained with current or standard levels of nitrogen use.

[79270] Generally, the term “increased tolerance to stress” can be defined as survival of plants, and/or higher yield production, under stress conditions as compared to a non-transformed wild type or starting plant: For example, the plant of the invention or produced according to the method of the invention is better adapted to the stress conditions. “Improved adaptation” to environmental stress like e.g. drought, heat, nutrient depletion, freezing and/or chilling temperatures refers herein to an improved plant performance resulting in an increased yield, particularly with regard to one or more of the yield related traits as defined in more detail above. During its life-cycle, a plant is generally confronted with a diversity of environmental conditions. Any such conditions, which may, under certain circumstances, have an impact on plant yield, are herein referred to as “stress” condition. Environmental stresses may generally be divided into biotic and abiotic (environmental) stresses. Unfavorable nutrient conditions are sometimes also referred to as “environmental stress”. The present invention does also contemplate solutions for this kind of environmental stress, e.g. referring to increased nutrient use efficiency. For the purposes of the description of the present invention, the terms “enhanced tolerance to abiotic stress”, “enhanced resistance to abiotic environmental stress”, “enhanced tolerance to environmental stress”, “improved adaptation to environmental stress” and other variations and expressions similar in its meaning are used interchangeably and refer, without limitation, to an improvement in tolerance to one or more abiotic environmental stress(es) as described herein and as compared to a corresponding origin or wild type plant or a part thereof.

[79271] The term abiotic stress tolerance(s) refers for example low temperature tolerance, drought tolerance or improved water use efficiency (WUE), heat tolerance, salt stress tolerance and others. Studies of a plant's response to desiccation, osmotic shock, and temperature extremes are also employed to determine the plant's tolerance or resistance to abiotic stresses. Water use efficiency (WUE) is a parameter often correlated with drought tolerance. In selecting traits for improving crops, a decrease in water use, without a change in growth would have particular merit in an irrigated agricultural system where the water input costs were high. An increase in growth without a corresponding jump in water use would have applicability to all agricultural systems. In many agricultural systems where water supply is not limiting, an increase in growth, even if it came at the expense of an increase in water use also increases yield.

[79272] Drought stress means any environmental stress which leads to a lack of water in plants or reduction of water supply to plants, including a secondary stress by low temperature and/or salt, and/or a primary stress during drought or heat, e.g. desiccation etc.

### Specific Embodiments

[79273] Accordingly, this invention provides respective measures and methods to produce plants with increased yield, e.g. genes conferring an increased yield-related trait, for example enhanced tolerance to abiotic environmental stress, for example an increased drought tolerance and/or low temperature tolerance and/or an increased nutrient use efficiency, intrinsic yield and/or another increased yield-related trait, upon expression or over-expression. Accordingly, the present invention provides such genes in case in column 7 of the respective Table or coenzyme Q10 and/or coenzyme Q9 is indicated. In particular, such genes are described in column 5 as well as in column 8 of Tables I, especially the coding region thereof, or homologs or fragments thereof, in case coenzyme Q10 and/or coenzyme Q9 are indicated in column 7 or the respective polypeptides are described in column 5 as well as in column 8 of Table II, or homologs or fragments thereof, in case coenzyme Q10 and/or coenzyme Q9 are indicated in column 7.

[79274] Accordingly, the present invention provides respective transgenic plants showing one or more improved yield-related traits as compared to the corresponding origin or the wild type plant and methods for producing such transgenic plants with increased yield in case in column 7 of the respective Table “coenzyme Q10” or “coenzyme Q9” is indicated.

[79275] In one embodiment, one or more of said yield-increasing activities are increased by increasing the amount and/or the specific activity of one or more proteins listed in Table II, column 5 or 8 in a compartment of a cell indicated in Table II, column 6, in case in column 7 of the respective Table “coenzyme Q10” or “coenzyme Q9” is indicated. Accordingly to present invention, the yield of the plant of the invention is increased by improving one or more of the yield-related traits as defined herein. Said increased yield in accordance with the present invention can typically be achieved by enhancing or improving, in comparison to an origin or wild-type plant, one or more yield-related traits of said plant. Such yield-related traits of a plant the improvement of which results in increased yield comprise, without limitation, the increase of the intrinsic yield capacity of a plant, improved nutrient use efficiency, like nitrogen use efficiency, and/or increased stress tolerance.

[79276] In one embodiment, the present invention provides respective transgenic plants showing one or more improved yield-related traits, preferably increased drought tolerance as compared to the corresponding origin or the wild type plant and methods for producing such transgenic plants with increased yield in case in column 7 of the respective Table “coenzyme Q10” or “coenzyme Q9” is indicated.

[79277] In a further embodiment the present invention is characterized by the features as disclosed in the following items:

[79278] Item 1. A process for the production of a fine chemical selected from the group consisting of: coenzyme Q10, coenzyme Q9, lipoic acid and/or nicotinic acid
[79279] (a) increasing or generating one or more activities selected from the group consisting of 2-C-methyl-D-erythritol 4-phosphate cytidylyltransferase, acetolactate synthase III large subunit, acetyltransferase, acid shock protein, amino acid ABC transporter permease protein, amino acid acetyltransferase, At1g47380-protein, ATP synthase subunit E, ATP-binding component of a transport system, auxin response factor, AX653549-protein, AY087308-protein, b1003-protein, b1097-protein, b1522-protein, b2032-protein, b2739-protein, b2849-protein, b3817-protein, b4029-protein, beta-galactosidase, calcium-dependent protein kinase, cation-transporting ATPase, CCAAT-binding transcription factor, cell division control protein, colanic acid biosynthesis protein, CTP synthase, cyclin D , disease resistance protein, enoyl-CoA hydratase, fatty acid desaturase, F-box protein, flavodoxin, gluconate transport system permease 3, glutamine amidotransferase, glutaredoxin, glycerol dehydrogenase, glycerol-3-phosphate dehydrogenase, glycosyl transferase, halotolerance protein, heat shock protein Hsp40, heat shock transcription factor, histone acetyltransferase, hydrolase, isopropylmalate isomerase large subunit, L-aspartate oxidase, lipase, MADS box protein transcription factor, malate dehydrogenase, methylglyoxal synthase, methyltransferase, mitogen-activated protein kinase, monothiol glutaredoxin, multiple antibiotic resistance protein, N-acetyl-gamma-glutamylphosphate reductase, NADH dehydrogenase I chain I, oxidoreductase, permease protein of ABC transporter, phenylalanine ammonia-lyase, phosphoadenosine phosphosulfate reductase, phosphopantothenoylcysteine decarboxylase, photosystem II protein, protein kinase, protein phosphatase, pyruvate kinase, recombinase A, Ribose import ATP-binding protein, Sec-independent protein translocase subunit, serine protease, serine/threonine-protein phosphatase, sll1761-protein, slr1107-protein, sterol desaturase, threonine synthase, transcription factor, transcriptional regulator, TTC1386-protein, uroporphyrin-III C-methyltransferase, ycl027w-protein, zinc finger protein and zinc transporter, in a non-human organism or a part thereof, preferably a microorganism, a plant cell, a plant or a part thereof, as compared to a corresponding non-transformed wild type non-human organism or a part thereof; and
[79280] (b) growing the non-human organism or a part thereof under conditions which permit the production of coenzyme Q10, coenzyme Q9, lipoic acid and/or nicotinic acid or a composition comprising coenzyme Q10, coenzyme Q9, lipoic acid and/or nicotinic acid in said non-human organism or in the culture medium surrounding said non-human organism.

[79281] Item 2. A process for the production of a a fine chemical selected from the group consisting of: coenzyme Q10, coenzyme Q9, lipoic acid and/or nicotinic acid, which comprises
[79282] (A)
   [79283] (i) increasing or generating of the expression of; and/or
   [79284] (ii) increasing or generating the expression of an expression product of; and/or
   [79285] (iii) increasing or generating one or more activities of an expression product encoded by;
   [79286] at least one respective nucleic acid molecule comprising a nucleic acid molecule selected from the group consisting of:
   [79287] (a) a nucleic acid molecule encoding the polypeptide shown in column 5 or 8 of Table II, preferably Table II B, application no.16, or a homolog or a fragment thereof;
   [79288] (b) a nucleic acid molecule shown in column 5 or 8 of Table I, preferably Table I B, application no.16, or a homolog or a fragment thereof (preferably the coding region thereof);
   [79289] (c) a nucleic acid molecule, which, as a result of the degeneracy of the genetic code, can be derived from a polypeptide sequence depicted in column 5 or 8 of Table II, preferably Table II B, application no.16;
   [79290] (d) a nucleic acid molecule having at least 30%, in particular at least 50%, 60%, 70%, 80%, 85%, 90%, 95%, 97%, 98%, 99% or 99.5% identity with the nucleic acid molecule sequence of a polynucleotide comprising the nucleic acid molecule shown in column 5 or 8 of Table I, preferably Table I B, application no. 16, or the coding region thereof;
   [79291] (e) a nucleic acid molecule encoding a polypeptide having at least 30%, in particular 50%, 60%, 70%, 80%, 85%, 90%, 95%, 97%, 98%, 99% or 99.5% identity with the amino acid sequence of the polypeptide encoded by the nucleic acid molecule of (a), (b), (c) or (d);
   [79292] (f) a nucleic acid molecule which hybridizes with a nucleic acid molecule of (a), (b), (c), (d) or (e) under stringent hybridization conditions;
   [79293] (g) a nucleic acid molecule encoding a polypeptide which can be isolated with the aid of monoclonal or polyclonal antibodies made against a polypeptide encoded by one of the nucleic acid molecules of (a), (b), (c), (d), (e) or (f);
   [79294] (h) a nucleic acid molecule encoding a polypeptide comprising the consensus sequence or one or more polypeptide motifs as shown in column 8 of Table IV, application no.16;
   [79295] (i) a nucleic acid molecule encoding a polypeptide having the activity represented by a respective protein as depicted in column 5 of Table II, application no. 16;
   [79296] (j) a nucleic acid molecule which comprises a polynucleotide, which is obtained by amplifying a cDNA library or a genomic library using the primers as depicted in column 8 of Table III, application no. 16; and
   [79297] (k) a nucleic acid molecule which is obtainable by screening a suitable nucleic acid library, especially a cDNA library and/or a genomic library, under stringent hybridization conditions with a probe comprising a complementary sequence of a nucleic acid molecule of (a), (b), (c), (d), (e), (f), (g), (h), (i) or (j) or with a fragment thereof, having at least 15 nt, preferably 20 nt, 30 nt, 50 nt, 100 nt, 200 nt, 500 nt, 1000 nt, 1500 nt, 2000 nt or 3000 nt of a nucleic acid molecule complementary to a nucleic acid molecule sequence characterized in (a), (b), (c), (d), (e), (f), (g), (h), (i) or (j);
   [79298] or a nucleic acid molecule comprising a sequence which is complementary thereto; in a non-human organism or a part thereof, preferably a microorganism, a plant cell, a plant or a part thereof, as compared to a corresponding non-transformed wild type non-human organism or a part thereof; and
[79299] (B) growing the non-human organism or a part thereof under conditions which permit the production of coenzyme Q10, coenzyme Q9, lipoic acid and/or nicotinic acid or a composition comprising coenzyme Q10, coenzyme Q9, lipoic acid and/or nicotinic acid in said non-human organism or in the culture medium surrounding said non-human organism.

[79300] Item 3. A process of items 1 or 2, comprising of recovering coenzyme Q10, coenzyme Q9, lipoic acid and/or nicotinic acid in its free or bound form.

[79301] Item 4. The process of any one of items 1 to 3, comprising the following steps:
[79302] (a) selecting a non-human organism or a part thereof expressing a polypeptide encoded by the nucleic acid molecule characterized in item 2;
[79303] (b) mutagenizing the selected non-human organism or the part thereof;
[79304] (c) comparing the activity or the expression level of said polypeptide in the mutagenized non-human organism or the part thereof with the activity or the expression of said polypeptide of the selected non-human organisms or the part thereof;
[79305] (d) selecting the mutated non-human organisms or parts thereof, which comprise an increased activity or expression level of said polypeptide compared to the selected non-human organism or the part thereof;
[79306] (e) optionally, growing and cultivating the non-human organisms or the parts thereof; and
[79307] (f) recovering, and optionally isolating, the free or bound coenzyme Q10, coenzyme Q9, lipoic acid and/or nicotinic acid produced by the selected mutated non-human organisms or parts thereof.

[79308] Item 5. The process of any one of items 1 to 4 wherein the activity of said protein or the expression of said nucleic acid molecule is increased or generated transiently or stably.

[79309] Item 6. An isolated nucleic acid molecule comprising a nucleic acid molecule selected from the group consisting of:
[79310] (a) a nucleic acid molecule encoding a polypeptide shown in Table II, application no. 16, column 5 or 8, preferably shown in Table II B, application no. 16, column 8, or a homolog or a fragment thereof;
[79311] (b) a nucleic acid molecule shown in Table I, application no. 16, column 5 or 8, preferably shown in Table I B, application no. 16, column 8, preferably the coding region thereof, or a homolog or a fragment thereof;
[79312] (c) a nucleic acid molecule, which, as a result of the degeneracy of the genetic code, can be derived from a polypeptide sequence depicted in column 5 or 8 of Table II, application no. 16, preferably in column 8 of Table II B, application no. 16;
[79313] (d) a nucleic acid molecule having at least 30% identity, preferably at least 40%, 50%, 60%, 70%, 75%, 80%, 85%, 90%, 95%, 96%, 97%, 98%, 99%, 99.5%, with the nucleic acid molecule sequence of a polynucleotide comprising the nucleic acid molecule shown in column 5 or 8 of Table I, application no. 16, preferably shown in column 8 of Table I B, application no. 16, preferably the coding region thereof;
[79314] (e) a nucleic acid molecule encoding a polypeptide having at least 30% identity, preferably at least 40%, 50% 60%, 70%, 75%, 80%, 85%, 90%, 95%, 96%, 97%, 98%, 99%, 99.5%, identity with the amino acid sequence of the polypeptide encoded by the nucleic acid molecule of (a), (b), (c) or (d);
[79315] (f) a nucleic acid molecule which hybridizes with a nucleic acid molecule of (a), (b), (c), (d) or (e) under stringent hybridisation conditions;
[79316] (g) a nucleic acid molecule encoding a polypeptide which can be isolated with the aid of monoclonal or polyclonal antibodies made against a polypeptide encoded by one of the nucleic acid molecules of (a), (b), (c), (d), (e) or (f);
[79317] (h) a nucleic acid molecule encoding a polypeptide comprising the consensus sequence or one or more polypeptide motifs as shown in column 8 of Table IV, application no. 16;
[79318] (i) a nucleic acid molecule encoding a polypeptide having the activity represented by a respective protein as depicted in column 5 of Table II, application no. 16;
[79319] (j) a nucleic acid molecule comprising a polynucleotide which is obtained by amplifying a cDNA library or a genomic library using the primers in Table III, application no. 16, column 8;
[79320] and
[79321] (k) nucleic acid molecule which is obtainable by screening a suitable nucleic acid library, especially a cDNA library and/or a genomic library, under stringent hybridization conditions with a probe comprising one of the sequences of the nucleic acid molecule of (a), (b), (c), (d), (e), (f), (g), (h), (i) or (j) or with a fragment of at least 15 nt, preferably 20 nt, 30 nt, 50 nt, 100 nt, 200 nt,500 nt, 1000 nt, 1500 nt, 2000 nt or 3000 nt of the nucleic acid molecule characterized in (a), (b), (c), (d), (e), (f), (g), (h), (i) or (i);
[79322] or a nucleic acid molecule comprising a sequence which is complementary thereto.

[79323] Item 7. A nucleic acid construct which confers the expression of the nucleic acid molecule as defined in item 6, comprising one or more regulatory elements.

[79324] Item 8. An expression cassette comprising
[79325] (a) a promoter, preferably selected from the group consisting of Big35S, PCUbi, Super and USP;
[79326] (b) a nucleic acid molecule as defined in item 6.

[79327] Item 9. A vector comprising the nucleic acid molecule as defined in item 6 or the nucleic acid construct as claimed in item 7 or the expression cassette as claimed in item 8.

[79328] Item 10. A host cell or a plant organelle, which has been transformed with the vector as claimed in item 9 or the nucleic acid molecule as defined in item 6 or the nucleic acid construct as claimed in item 7 or the expression cassette as claimed in item 8.

[79329] Item 11. The host cell of item 10, which is a plant cell or a microorganism.

[79330] Item 12. A process for producing a polypeptide, wherein the polypeptide is expressed in a host cell as claimed in item 10 or 11.

[79331] Item 13. A polypeptide produced by the process as claimed in item 12 or encoded by the nucleic acid molecule as defined in item 6.

[79332] Item 14. An antibody, which binds specifically to the polypeptide as claimed in item 13.

[79333] Item 15. A plant tissue, propagation material, harvested material or a plant comprising the host cell as claimed in item 10 or 11.

[79334] Item 16. A process for the identification of a compound conferring an increase in coenzyme Q10, coenzyme Q9, lipoic acid and/or nicotinic acid production in a non-human organism, comprising the steps:
[79335] (a) culturing a plant cell or tissue or microorganism or maintaining a plant expressing the polypeptide encoded by the nucleic acid molecule as defined in item 6 conferring an increase in the amount of coenzyme Q10, coenzyme Q9, lipoic acid and/or nicotinic acid in a non-human organism or a part thereof and a readout system capable of interacting with the polypeptide under suitable conditions which permit the interaction of the polypeptide with said readout system in the presence of a compound or a sample comprising a plurality of compounds and capable of providing a detectable signal in response to the binding of a compound to said polypeptide under conditions which permit the expression of said readout system and of the polypeptide encoded by the nucleic acid molecule of item 6 conferring an increase in the amount of coenzyme Q10, coenzyme Q9, lipoic acid and/or nicotinic acidin a non-human organism or a part thereof;
[79336] (b) identifying if the compound is an effective agonist by detecting the presence or absence or increase of a signal produced by said readout system.

[79337] Item 17. A method for the production of an agricultural composition comprising the steps of the method of item 16 and formulating the compound identified in item 16 in a form acceptable for an application in agriculture.

[79338] Item 18. A composition comprising the nucleic acid molecule as defined in item 6, the polypeptide as claimed in item 13, the nucleic acid construct as claimed in item 7, the expression cassette as claimed in item 8, the vector as claimed in item 9, the compound as claimed in item 16, the antibody as claimed in item 14, and optionally an agricultural acceptable carrier.

[79339] Item 19. Use of the nucleic acid molecule as defined in item 6 for the identification of a nucleic acid molecule conferring an increase in coenzyme Q10, coenzyme Q9, lipoic acid and/or nicotinic acid after expression.

[79340] Item 20. Cosmetic, pharmaceutical, food or feed composition comprising the nucleic acid moleculeas defined in item 6, the polypeptide as claimed in item 13, the nucleic acid construct as claimed in item 7, the expression cassette as claimed in item 8, the vector as claimed in item 9, the antibody as claimed in item 14 , the plant or plant tissue as claimed in item 15, the harvested material as claimed in item 15 or the host cell of item as claimed in item s 10 or 11.

[79341] Item 21. Use of the nuclei acid molecule as defined in item 6, the polypeptide as claimed in item 13, the nucleic acid construct as claimed in item 7, the expression cassette as claimed in item 8, the vector as claimed in item 9, the plant or plant tissue as claimed in item 15, or the host cell of item 10 to 11 for the production of plant resistant to a herbicide inhibiting the production of coenzyme Q10, coenzyme Q9, lipoic acid and/or nicotinic acid.

[79342] Item 22. A method for producing a plant with increased yield as compared to a corresponding non-transformed wild type plant, whereby the method comprises
[79343] (i) increasing or generating of the expression of; and/or
[79344] (ii) increasing or generating the expression of an expression product of; and/or
[79345] (iii) increasing or generating one or more activities of an expression product encoded by; at least one respective nucleic acid molecule comprising a nucleic acid molecule selected from the group consisting of:
[79346] (a) a nucleic acid molecule encoding the polypeptide shown in column 5 or 8 of Table II, preferably Table II B, application no. 16, or a homolog or a fragment thereof, in case in column 7 coenzyme Q10 and/or coenzyme Q9 is indicated;
[79347] (b) a nucleic acid molecule shown in column 5 or 8 of Table I, preferably Table I B, application no. 16, or a homolog or a fragment thereof (preferably the coding region thereof) , in case in column 7 coenzyme Q10 and/or coenzyme Q9 is indicated;
[79348] (c) a nucleic acid molecule, which, as a result of the degeneracy of the genetic code, can be derived from a polypeptide sequence depicted in column 5 or 8 of Table II, preferably Table II B, application no. 16, in case in column 7 coenzyme Q10 and/or coenzyme Q9 is indicated;
[79349] (d) a nucleic acid molecule having at least 30%, in particular at least 50%, 60%, 70%, 80%, 85%, 90%, 95%, 97%, 98%, 99% or 99.5% identity with the nucleic acid molecule sequence of a polynucleotide comprising the nucleic acid molecule shown in column 5 or 8 of Table I, preferably Table I B, application no. 16, or the coding region thereof, in case in column 7 coenzyme Q10 and/or coenzyme Q9 is indicated;
[79350] (e) a nucleic acid molecule encoding a polypeptide having at least 30%, in particular 50%, 60%, 70%, 80%, 85%, 90%, 95%, 97%, 98%, 99% or 99.5% identity with the amino acid sequence of the polypeptide encoded by the nucleic acid molecule of (a), (b), (c) or (d);
[79351] (f) a nucleic acid molecule which hybridizes with a nucleic acid molecule of (a), (b), (c), (d) or (e) under stringent hybridization conditions;
[79352] (g) a nucleic acid molecule encoding a polypeptide which can be isolated with the aid of monoclonal or polyclonal antibodies made against a polypeptide encoded by one of the nucleic acid molecules of (a), (b), (c), (d), (e) or (f);
[79353] (h) a nucleic acid molecule encoding a polypeptide comprising the consensus sequence or one or more polypeptide motifs as shown in column 8 of Table IV, application no. 16, in case in column 7 coenzyme Q10 and/or coenzyme Q9 is indicated;
[79354] (i) a nucleic acid molecule encoding a polypeptide having the activity represented by a respective protein as depicted in column 5 of Table II, application no. 16, in case in column 7 coenzyme Q10 and/or coenzyme Q9 is indicated;
[79355] (j) a nucleic acid molecule which comprises a polynucleotide, which is obtained by amplifying a cDNA library or a genomic library using the primers as depicted in column 8 of Table III, application no. 16, in case in column 7 coenzyme Q10 and/or coenzyme Q9 is indicated; and
[79356] (k) a nucleic acid molecule which is obtainable by screening a suitable nucleic acid library, especially a cDNA library and/or a genomic library, under stringent hybridization conditions with a probe comprising a complementary sequence of a nucleic acid molecule of (a), (b), (c), (d), (e), (f), (g), (h), (i) or (j) or with a fragment thereof, having at least 15 nt, preferably 20 nt, 30 nt, 50 nt, 100 nt, 200 nt, 500 nt, 1000 nt, 1500 nt, 2000 nt or 3000 nt of a nucleic acid molecule complementary to a nucleic acid molecule sequence characterized in (a), (b), (c), (d), (e), (f), (g), (h), (i) or (j);
[79357] or a nucleic acid molecule comprising a sequence which is complementary thereto; in a plant cell, plant or a part thereof.

[79358] Item 23. A method for producing a plant with increased yield according to item 22, which comprises in addition the regeneration of a plant from such transformed plant cell, plant cell compartment, plant cell nucleus, plant cell or plant tissue with increased yield.

[79359] [0483.1.7.16] to [0492.1.7.16] for the disclosure of these paragraphs see [0483.1.7.7] to [0492.1.7.7] above

### Example 10

### Purification of a Fine Chemical e.g. Coenzyme Q10, Coenzyme Q9, Lipoic Acid and/or Nicotinic Acid

[79360] Cofactors can be recovered from cells or from the supernatant of the above-described culture by a variety of methods known in the art. For example, the culture supernatant is recovered first. To this end, the cells are harvested from the culture by slow centrifugation.

[79361] The cell debris is removed by centrifugation and the supernatant fraction, if appropriate together with the culture supernatant, is used for the further purification of the cofactors. However, it is also possible to process the supernatant alone if the cofactors are present in the supernatant in sufficiently high a concentration. In this case, the cofactors, or the cofactors mixture, can be purified further for example via extraction and/or salt precipitation or via ion-exchange chromatography or as described above.

[79362] Identity and purity of the isolated cofactors such as coenzyme Q10, coenzyme Q9, lipoic acid and/or nicotinic acid can be determined by standard techniques of the art. They encompass old techniques such as photometric methods and new techniques such as high-performance liquid chromatography (HPLC), Reversed phase chromatographie and TLC.

[79363] for the disclosure of this paragraph see [0494.1.7.7] above

### Example 11a

### PCR Amplification of the Sequences

[79364] Unless otherwise specified, standard methods as described in Sambrook et al., Molecular Cloning:

[79365] A laboratory manual, Cold Spring Harbor 1989, Cold Spring Harbor Laboratory Press are used.

[79366] The inventive sequences as shown in the respective line in Table I, column 5, preferably the coding region thereof, were amplified by PCR as described in the protocol of the Pfu Ultra, Pfu Turbo or Herculase DNA polymerase (Stratagene). The composition for the protocol of the Pfu Ultra, Pfu Turbo or Herculase DNA polymerase was as follows: 1×PCR buffer (Stratagene), 0.2 mM of each dNTP, 100 ng genomic DNA of Saccharomyces cerevisiae (strain S288C; Research Genetics, Inc., now Invitrogen), Escherichia coli (strain MG1655; E. coli Genetic Stock Center), Synechocystis sp. (strain PCC6803), Azotobacter vinelandii (strain N.R. Smith,16), Thermus thermophilus (HB8) or 50 ng cDNA from various tissues and development stages of Arabidopsis thaliana (ecotype Columbia), Physcomitrella patens, Glycine max (variety Resnick), Brassica napus, Oryza sativa or Zea mays (variety B73, Mo17, A188), 50 pmol forward primer, 50 pmol reverse primer, with or without 1 M Betaine, 2.5 u Pfu Ultra, Pfu Turbo or Herculase DNA polymerase.

[79367] The amplification cycles were as follows:

[79368] 1 cycle of 2-3 minutes at 94-95° C., then 25-36 cycles with 30-60 seconds at 94-95° C., 30-45 seconds at 50-60° C. and 210-480 seconds at 72° C., followed by 1 cycle of 5-10 minutes at 72° C., then 4-16° C.—preferably for Saccharomyces cerevisiae, Escherichia coli, Synechocystis sp., Azotobacter vinelandii, Thermus thermophilus.

[79369] In case of Arabidopsis thaliana, Brassica napus, Glycine max, Oryza sativa, Physcomitrella patens, Zea mays the amplification cycles were as follows: 1 cycle with 30 seconds at 94° C., 30 seconds at 61° C., 15 minutes at 72° C., then 2 cycles with 30 seconds at 94° C., 30 seconds at 60° C., 15 minutes at 72° C., then 3 cycles with 30 seconds at 94° C., 30 seconds at 59° C., 15 minutes at 72° C., then 4 cycles with 30 seconds at 94° C., 30 seconds at 58° C., 15 minutes at 72° C., then 25 cycles with 30 seconds at 94° C., 30 seconds at 57° C., 15 minutes at 72° C., then 1 cycle with 10 minutes at 72° C., then finally 4-16° C.

[79370] RNAs were generated with the RNeasy Plant Kit according to the standard protocol (Qiagen) and Superscript II Reverse Transkriptase was used to produce double stranded cDNA according to the standard protocol (Invitrogen).

[79371] ORF specific primer pairs for the genes to be expressed are shown in the respective line in Table III, column 8. The following adapter sequences were added to Saccharomyces cerevisiae

[79372] ORF specific primers (see Table III) for cloning purposes:

SEQ ID NO: 20

| | | |
|---|---|---|
| i) | foward primer: | 5′-GGAATTCCAGCTGACCACC-3′ |

SEQ ID NO: 21

| | | |
|---|---|---|
| ii) | reverse primer: | 5′-GATCCCCGGGAATTGCCATG-3′ |

[79373] These adaptor sequences allow cloning of the ORF into the various vectors containing the Resgen adaptors, see table column E of Table c.

[79374] The following adapter sequences were added to Saccharomyces cerevisiae, Escherichia coli, Synechocystis sp., Azotobacter vinelandii, Thermus thermophilus, Arabidopsis thaliana, Brassica napus, Glycine max, Oryza sativa , Physcomitrella patens, or Zea mays ORF specific primers for cloning purposes:

| SEQ ID NO: 22 | | |
|---|---|---|
| iii) | forward primer: | 5′-TTGCTCTTCC-3′ |
| SEQ ID NO: 23 | | |
| iiii) | reverse primer: | 5′-TTGCTCTTCG-3′ |

[79375] The adaptor sequences allow cloning of the ORF into the various vectors containing the Colic adaptors, see table column E of Table c.

[79376] Therefore for amplification and cloning of Saccharomyces cerevisiae SEQ ID NO: 62717, a primer consisting of the adaptor sequence i) and the ORF specific sequence SEQ ID NO: 63159 and a second primer consisting of the adaptor sequence ii) and the ORF specific sequence SEQ ID NO: 63160 were used.

[79377] For amplification and cloning of Escherichia coli SEQ ID NO: 7081, a primer consisting of the adaptor sequence iii) and the ORF specific sequence SEQ ID NO: 7261 and a second primer consisting of the adaptor sequence iiii) and the ORF specific sequence SEQ ID NO: 7262 were used.

[79378] For amplification and cloning of Synechocystis sp. SEQ ID NO: 11990, a primer consisting of the adaptor sequence iii) and the ORF specific sequence SEQ ID NO: 12064 and a second primer consisting of the adaptor sequence iiii) and the ORF specific sequence SEQ ID NO: 12065 were used.

[79379] For amplification and cloning of Arabidopsis thaliana SEQ ID NO: 2367, a primer consisting of the adaptor sequence iii) and the ORF specific sequence SEQ ID NO: 2561 and a second primer consisting of the adaptor sequence iiii) and the ORF specific sequence SEQ ID NO: 2562 were used.

[79380] For amplification and cloning of Azotobacter vinelandii SEQ ID NO: 6510, a primer consisting of the adaptor sequence iii) and the ORF specific sequence SEQ ID NO: 6670 and a second primer consisting of the adaptor sequence iiii) and the ORF specific sequence SEQ ID NO: 6671 were used.

[79381] For amplification and cloning of Glycine max SEQ ID NO: 46751, a primer consisting of the adaptor sequence iii) and the ORF specific sequence SEQ ID NO: 46841 and a second primer consisting of the adaptor sequence iiii) and the ORF specific sequence SEQ ID NO: 46842 were used.

[79382] For amplification and cloning of Oryza sativa SEQ ID NO: 34301, a primer consisting of the adaptor sequence iii) and the ORF specific sequence SEQ ID NO: 34595 and a second primer consisting of the adaptor sequence iiii) and the ORF specific sequence SEQ ID NO: 34596 were used.

[79383] For amplification and cloning of Thermus thermophilus SEQ ID NO: 12698, a primer consisting of the adaptor sequence iii) and the ORF specific sequence SEQ ID NO: 12970 and a second primer consisting of the adaptor sequence iiii) and the ORF specific sequence SEQ ID NO: 12971 were used.

[79384] For amplification and cloning of Zea mays SEQ ID NO: 68132, a primer consisting of the adaptor sequence iii) and the ORF specific sequence SEQ ID NO: 68358 and a second primer consisting of the adaptor sequence iiii) and the ORF specific sequence SEQ ID NO: 68359 were used.

[79385] Following these examples every sequence disclosed in Table I, preferably column 5, especially the coding region thereof can be cloned by fusing the adaptor sequences to the respective specific primers sequences as disclosed in Table III, column 8 using the respective vectors shown in Table c.

[79386] [0496.1.7.16] to [0499.1.7.16] for the disclosure of theses paragraphs see [0496.1.7.7] to [0499.1.7.7] above

### Example 11e

### Cloning of Inventive Sequences as Shown in Table I, Column 5 in the Different Expression Vectors

[79387] For cloning of for example SEQ ID NO: 7081from Escherichia coli or any other ORF from Escherichia coli, Synechocystis sp., Azotobacter vinelandii, Thermus thermophilus, Arabidopsis thaliana, Glycine max, Oryza sativa , or Zea mays the vector DNA was treated with the restriction enzymes Pacl and Ncol following the standard protocol (MBI Fermentas).

[79388] For cloning for example the ORFs of SEQ ID NO: 62717 from Saccharomyces cerevisiae or any other ORF from Saccharomyces cerevisiae into vectors containing the Resgen adaptor sequence the respective vector DNA was treated with the restriction enzyme Ncol.

[79389] For cloning of for example ORFs SEQ ID NO: 102061 from Saccharomyces cerevisiae or any other ORF from Saccharomyces cerevisiae into vectors containing the Colic adaptor sequence, the respective vector DNA was treated with the restriction enzymes Pacl and Ncol following the standard protocol (MBI Fermentas).

[79390] In all cases the reaction was stopped by inactivation at 70° C. for 20 minutes and purified over QlAquick or NucleoSpin Extract II columns following the standard protocol (Qiagen or Macherey-Nagel).

[79391] Then the PCR-product representing the amplified ORF with the respective adapter sequences and the vector DNA were treated with T4 DNA polymerase according to the standard protocol (MBI Fermentas) to produce single stranded overhangs with the parameters 1 unit T4 DNA polymerase at 37° C. for 2-10 minutes for the vector and 1-2 u T4 DNA polymerase at 15-17° C. for 10-60 minutes for the PCR product representing SEQ ID NO: 7081.

[79392] The reaction was stopped by addition of high-salt buffer and purified over QlAquick or NucleoSpin Extract II columns following the standard protocol (Qiagen or Macherey-Nagel).

[79393] According to this example the skilled person is able to clone all sequences disclosed in Table I, preferably column 5 or column 8, especially the coding region thereof.

[79394] Approximately 30-60 ng of prepared vector and a defined amount of prepared amplificate were mixed and hybridized at 65° C. for 15 minutes followed by 37° C. 0.1° C/1 seconds, followed by 37° C. 10 minutes, followed by 0.1° C/1 seconds, then 4-10 ° C. The ligated constructs were transformed in the same reaction vessel by addition of competent E. coli cells (strain DH5-alpha) and incubation for 20 minutes at 1 ° C. followed by a heat shock for 90 seconds at 42° C. and cooling to 1-4° C. Then, complete medium (SOC) was added and the mixture was incubated for 45 minutes at 37° C. The entire mixture was subsequently plated onto an agar plate with 0.05 mg/ml kanamycin and incubated overnight at 37° C.

[79395] The outcome of the cloning step was verified by amplification with the aid of primers which bind upstream and downstream of the integration site, thus allowing the amplification of the insertion.

[79396] The amplifications were carried out as described in the protocol of Taq DNA polymerase (Gibco-BRL).

[79397] The amplification cycles were as follows:

[79398] 1 cycle of 1-5 minutes at 94° C., followed by 35 cycles of in each case 15-60 seconds at 94° C., 15-60 seconds at 50-66° C. and 5-15 minutes at 72° C., followed by 1 cycle of 10 minutes at 72° C., then 4-16° C.

[79399] Several colonies were checked, but only one colony for which a PCR product of the expected size was detected was used in the following steps.

[79400] A portion of this positive colony was transferred into a reaction vessel filled with complete medium (LB) supplemented with kanamycin and incubated overnight at 37° C.

[79401] The plasmid preparation was carried out as specified in the Qiaprep or NucleoSpin Multi-96 Plus standard protocol (Qiagen or Macherey-Nagel).

[79402] [0501.1.7.16] to [0503.1.7.16] for the disclosure of these paragraphs see [0501.1.7.7] to [0503.1.7.7] above for the disclosure of this paragraph see above

[79403] for the disclosure of this paragraph see [0502.1.7.7] above

[79404] Table d showing results of plant analyses

TABLE d

| SeqID | Target | Locus | Metabolite | Source | Promotor | Method | Min | Max |
|---|---|---|---|---|---|---|---|---|
| 17356 | plastidic | AAC43185 | Co Q10 | ARA_LEAF | p-PcUBI | LC | 67 | 296 |
| 18070 | non-targ | At1g43850 | Co Q9 | ARA_LEAF | p-PcUBI | LC | 37 | 123 |
| 18122 | non-targ | At1g47380 | Co Q9 | ARA_LEAF | p-PcUBI | LC | 36 | 98 |
| 19419 | non-targ | At1g72770 | Co Q9 | ARA_LEAF | p-PcUBI | LC | 52 | 65 |
| 133042 | non-targ | At2g37040 | Co Q9 | ARA_LEAF | p-PcUBI | LC | 39 | 85 |
| 108727 | non-targ | At2g42830 | Co Q9 | ARA_LEAF | p-PcUBI | LC | 37 | 91 |
| 21159 | non-targ | At2g47880 | Co Q10 | ARA_LEAF | p-PcUBI | LC | 79 | 87 |
| 68657 | non-targ | At3g02990 | Co Q9 | ARA_LEAF | p-PcUBI | LC | 40 | 148 |
| 21497 | plastidic | At3g04050 | Co Q10 | ARA_LEAF | p-PcUBI | LC | 85 | 142 |
| 120952 | non-targ | At3g16820 | Co Q9 | ARA_LEAF | p-PcUBI | LC | 45 | 114 |
| 22921 | non-targ | At3g20910 | Co Q10 | ARA_LEAF | p-PcUBI | LC | 67 | 438 |
| 22921 | non-targ | At3g20910 | Co Q9 | ARA_LEAF | p-PcUBI | LC | 37 | 70 |
| 68777 | non-targ | At3g27540 | Co Q9 | ARA_LEAF | p-PcUBI | LC | 36 | 86 |
| 2367 | non-targ | At3g61830 | Co Q9 | ARA_LEAF | p-PcUBI | LC | 36 | 177 |
| 2935 | non-targ | At3g62950 | Co Q10 | ARA_LEAF | p-PcUBI | LC | 52 | 102 |
| 2935 | non-targ | At3g62950 | Co Q9 | ARA_LEAF | p-PcUBI | LC | 52 | 91 |
| 131208 | non-targ | At4g12110 | Co Q10 | ARA_LEAF | p-PcUBI | LC | 72 | 96 |
| 23482 | non-targ | At4g15660 | Co Q10 | ARA_LEAF | p-PcUBI | LC | 89 | 174 |
| 23482 | non-targ | At4g15660 | Co Q9 | ARA_LEAF | p-PcUBI | LC | 53 | 105 |
| 24311 | non-targ | At4g34160 | Co Q10 | ARA_LEAF | p-PcUBI | LC | 78 | 175 |
| 24311 | non-targ | At4g34160 | Co Q9 | ARA_LEAF | p-PcUBI | LC | 38 | 131 |
| 4348 | non-targ | At4g35310 | Co Q10 | ARA_LEAF | p-PcUBI | LC | 72 | 393 |
| 4348 | non-targ | At4g35310 | Co Q9 | ARA_LEAF | p-PcUBI | LC | 36 | 244 |
| 24438 | non-targ | At5g03720 | Co Q9 | ARA_LEAF | p-PcUBI | LC | 46 | 53 |
| 4904 | non-targ | At5g18600 | Co Q10 | ARA_LEAF | p-PcUBI | LC | 57 | 63 |
| 102223 | non-targ | At5g45060 | Co Q9 | ARA_LEAF | p-PcUBI | LC | 41 | 53 |
| 25498 | non-targ | At5g59220 | Co Q9 | ARA_LEAF | p-PcUBI | LC | 36 | 97 |
| 5493 | non-targ | At5g64920 | Co Q9 | ARA_LEAF | p-PcUBI | LC | 36 | 114 |
| 29286 | non-targ | Avin- | Co Q9 | ARA_LEAF | p-PcUBI | LC | 52 | 101 |
| | | DRAFT_3209 | | | | | | |
| 31026 | non-targ | Avin- | Co Q9 | ARA_LEAF | p-PcUBI | LC | 46 | 176 |
| | | DRAFT_3605 | | | | | | |
| 114231 | non-targ | Avin- | Co Q9 | ARA_LEAF | p-PcUBI | LC | 42 | 171 |
| | | DRAFT_3629 | | | | | | |
| 73038 | non-targ | Avin- | Co Q10 | ARA_LEAF | p-PcUBI | LC | 109 | 257 |
| | | DRAFT_4420 | | | | | | |
| 73038 | non-targ | Avin- | Co Q9 | ARA_LEAF | p-PcUBI | LC | 98 | 220 |
| | | DRAFT_4420 | | | | | | |
| 102941 | non-targ | Avin- | Co Q9 | ARA_LEAF | p-PcUBI | LC | 36 | 79 |
| | | DRAFT_4847 | | | | | | |
| 6510 | non-targ | Avin- | Co Q9 | ARA_LEAF | p-PcUBI | LC | 195 | 240 |
| | | DRAFT_5103 | | | | | | |
| 34301 | non-targ | AX653549 | Co Q9 | ARA_LEAF | p-PcUBI | LC | 44 | 55 |
| 34602 | non-targ | AY087308 | Co Q10 | ARA_LEAF | p-PcUBI | LC | 60 | 92 |
| 34889 | plastidic | B0004 | Co Q10 | ARA_LEAF | p-Super | LC | 70 | 558 |
| 137834 | plastidic | B0077 | Co Q10 | ARA_SEED_2 | p-USP | LC | 21 | 34 |
| 7081 | non-targ | B0161 | Co Q9 | ARA_LEAF | p-Super | LC | 38 | 146 |
| 35733 | plastidic | B0344 | Co Q9 | ARA_SEED_2 | p-USP | LC | 17 | 59 |
| 7333 | non-targ | B0449 | Co Q10 | ARA_LEAF | p-Super | LC | 69 | 266 |
| 7333 | non-targ | B0449 | Co Q9 | ARA_LEAF | p-Super | LC | 71 | 209 |
| 36114 | non-targ | B0752 | Co Q10 | ARA_LEAF | p-Super | LC | 98 | 188 |
| 36114 | non-targ | B0752 | Co Q9 | ARA_LEAF | p-Super | LC | 53 | 96 |
| 36670 | non-targ | B0963 | Co Q10 | ARA_LEAF | p-Super | LC | 54 | 113 |
| 36670 | non-targ | B0963 | Co Q9 | ARA_LEAF | p-Super | LC | 46 | 60 |
| 7941 | non-targ | B1003 | Co Q9 | ARA_LEAF | p-Super | LC | 40 | 287 |
| 138256 | non-targ | B1097 | Co Q9 | ARA_LEAF | p-Super | LC | 40 | 68 |
| 7947 | non-targ | B1522 | Co Q10 | ARA_LEAF | p-Super | LC | 56 | 198 |
| 7947 | non-targ | B1522 | Co Q9 | ARA_LEAF | p-Super | LC | 36 | 144 |
| 38300 | non-targ | B1597 | Co Q10 | ARA_LEAF | p-Super | LC | 81 | 159 |
| 38300 | non-targ | B1597 | Co Q9 | ARA_LEAF | p-Super | LC | 46 | 168 |
| 8316 | non-targ | B1838 | Co Q9 | ARA_LEAF | p-Super | LC | 36 | 94 |
| 8920 | non-targ | B2032 | Co Q9 | ARA_LEAF | p-Super | LC | 36 | 118 |
| 112193 | non-targ | B2043 | Co Q10 | ARA_LEAF | p-Super | LC | 128 | 257 |
| 39120 | non-targ | B2281 | Co Q9 | ARA_SEED_2 | p-USP | LC | 19 | 33 |
| 99620 | non-targ | B2285 | nicotinic acid | ARA_SEED_2 | p-USP | GC | 26 | 42 |
| 138377 | plastidic | B2574 | nicotinic acid | ARA_SEED_2 | p-USP | GC | 24 | 430 |
| 80906 | non-targ | B2739 | Co Q9 | ARA_LEAF | p-Super | LC | 37 | 114 |
| 81075 | non-targ | B2747 | Co Q9 | ARA_LEAF | p-Super | LC | 70 | 125 |
| 81451 | non-targ | B2762 | lipoic acid | ARA_LEAF | p-Super | LC | 472 | 18201 |
| 81980 | non-targ | B2849 | Co Q9 | ARA_LEAF | p-Super | LC | 38 | 73 |
| 42502 | non-targ | B3262 | Co Q9 | ARA_LEAF | p-Super | LC | 49 | 107 |
| 138770 | non-targ | B3749 | Co Q10 | ARA_LEAF | p-Super | LC | 74 | 169 |
| 10708 | non-targ | B3817 | Co Q9 | ARA_LEAF | p-Super | LC | 84 | 98 |
| 44223 | non-targ | B3945 | Co Q9 | ARA_SEED_2 | p-USP | LC | 22 | 37 |
| 138857 | plastidic | B3958 | Co Q10 | ARA_SEED_2 | p-USP | LC | 24 | 32 |
| 10740 | non-targ | B4029 | Co Q9 | ARA_LEAF | p-Super | LC | 41 | 171 |
| 45321 | non-targ | B4256 | Co Q9 | ARA_LEAF | p-Super | LC | 43 | 135 |
| 45394 | non-targ | B4321 | Co Q9 | ARA_LEAF | p-Super | LC | 47 | 110 |
| 46751 | non-targ | GM02LC19289 | Co Q10 | ARA_LEAF | p-PcUBI | LC | 61 | 107 |
| 46751 | non-targ | GM02LC19289 | Co Q9 | ARA_LEAF | p-PcUBI | LC | 53 | 82 |
| 84198 | non-targ | GM02LC21368 | Co Q10 | ARA_LEAF | p-PcUBI | LC | 56 | 519 |
| 49143 | plastidic | Sll0248 | Co Q10 | ARA_LEAF | p-PcUBI | LC | 95 | 573 |
| 84869 | plastidic | Sll0378 | Co Q10 | ARA_LEAF | p-PcUBI | LC | 58 | 77 |
| 55379 | non-targ | Sll1761 | Co Q10 | ARA_LEAF | p-PcUBI | LC | 81 | 152 |
| 55379 | non-targ | Sll1761 | Co Q9 | ARA_LEAF | p-PcUBI | LC | 48 | 91 |
| 55385 | mitoch | Sll1920 | Co Q9 | ARA_LEAF | p-PcUBI | LC | 37 | 55 |
| 11990 | non-targ | Slr0338 | Co Q9 | ARA_LEAF | p-PcUBI | LC | 47 | 62 |
| 87397 | plastidic | Slr0721 | Co Q10 | ARA_LEAF | p-PcUBI | LC | 61 | 135 |
| 87397 | plastidic | Slr0721 | Co Q9 | ARA_LEAF | p-PcUBI | LC | 56 | 88 |
| 119222 | mitoch | Slr0949 | Co Q9 | ARA_LEAF | p-PcUBI | LC | 46 | 50 |
| 101776 | plastidic | Slr1107 | Co Q9 | ARA_LEAF | p-PcUBI | LC | 39 | 135 |
| 116713 | non-targ | Slr1350 | Co Q9 | ARA_LEAF | p-PcUBI | LC | 43 | 67 |
| 58731 | plastidic | Slr1739 | Co Q9 | ARA_LEAF | p-PcUBI | LC | 58 | 64 |
| 58751 | mitoch | Slr1742 | Co Q10 | ARA_LEAF | p-PcUBI | LC | 58 | 125 |
| 58823 | plastidic | Slr1755 | Co Q10 | ARA_LEAF | p-PcUBI | LC | 53 | 133 |
| 58823 | plastidic | Slr1755 | Co Q9 | ARA_LEAF | p-PcUBI | LC | 49 | 132 |
| 12698 | non-targ | TTC0019 | Co Q9 | ARA_LEAF | p-PcUBI | LC | 36 | 141 |
| 61070 | non-targ | TTC0337 | Co Q10 | ARA_LEAF | p-PcUBI | LC | 64 | 181 |
| 61723 | non-targ | TTC1193 | Co Q9 | ARA_LEAF | p-PcUBI | LC | 45 | 91 |
| 62079 | non-targ | TTC1386 | Co Q9 | ARA_LEAF | p-PcUBI | LC | 37 | 147 |
| 62717 | non-targ | Ybr160w | Co Q9 | ARA_LEAF | Big35S | LC | 70 | 78 |
| 96980 | plastidic | Ycl027w | Co Q10 | ARA_LEAF | p-Super | LC | 96 | 120 |
| 14275 | plastidic | Ydl159w | Co Q9 | ARA_LEAF | p-Super | LC | 41 | 74 |
| 130903 | non-targ | Ykr072c | Co Q9 | ARA_LEAF | Big35S | LC | 38 | 91 |
| 102061 | non-targ | Ykr089c | nicotinic acid | ARA_SEED_2 | p-PcUBI | GC | 45 | 52 |
| 139173 | non-targ | Ynl007c | Co Q10 | ARA_LEAF | Big35S | LC | 51 | 78 |
| 139173 | non-targ | Ynl007c | Co Q9 | ARA_LEAF | Big35S | LC | 51 | 98 |
| 92540 | plastidic | Yor244w | Co Q9 | ARA_LEAF | p-Super | LC | 47 | 49 |
| 140110 | non-targ | Ypr054w | Co Q10 | ARA_LEAF | Big35S | LC | 53 | 250 |
| 68132 | non-targ | ZM06LC1143 | Co Q10 | ARA_LEAF | p-PcUBI | LC | 81 | 678 |

[79405] Column 1 shows the SEQ ID NO, Column 2 shows the expression type (targeted or non-targeted), Column 3 shows the “gene name” (locus), Column 4 shows the metabolite analyzed, Column 5 indicates the A. thaliana source tissue analyzed, Column 6 indicates the used promoter for expression, Column 7 indicates the analytical method. Columns 8 and 9 show the minimum and the maximum increase of the analyzed metabolite (in percent) in comparison to the wild type (ratio_by _WT, given as percent increase).

[79406] The term “non-targ” in Table d, Column 2 which shows the expression type means “non-targeted”.

[79407] The term “mitoch” in Table d, Column 2 which shows the expression type means “mitochondrial”.

[79408] The term “Co Q9 ” in Table d, Column 4 which shows the metabolite means “coenzyme Q9”.

[79409] The term “Co Q10 ” in Table d, Column 4 which shows the metabolite means “coenzyme Q10”.

[79410] When the analyses were repeated independently, all results proved to be significant.

[79411] [0505.1.7.16] to [0515.1.7.16] for the disclosure of these paragraphs see [0505.1.7.7] to [0515.1.7.7] above

[79412] In a further embodiment, the present invention relates in paragraphs [0000.1.7.17.] to [0514.1.7.17.] to a further process for the production of the fine chemical 3,4,5-trihydroxypentanoic acid, erythrol, fructose, fucose, galactinol, galactitol, glucose, glucose-1-phosphate, mannitol, melibiose, myo-inositol, raffinose, saccharic acid, sedoheptulose-7-phosphate, sorbitol, sucrose, trehalose, and/or verbascose as defined below and corresponding embodiments as described herein as follows.

[79413] for the disclosure of this paragraph see [0001.1.7.7] above

[79414] Carbohydrates are aldehyde or ketone compounds with multiple hydroxyl groups. Many carbohydrates have the empirical formula (CH2O)n; some also contain nitrogen, phosphorus, or sulfur.

[79415] Carbohydrates are classsfied in monosaccharides, oligosaccharides, and polysaccharides.

[79416] Monosaccharides, or simple sugars, consist of a single polyhydroxy aldehyde or ketone unit.

[79417] Monosaccharides of more than four carbons tend to have cyclic structures.

[79418] Oligosaccharides consist of short chains of monosaccharide units, or residues, usually 2 to 19 units, joined by glycosidic bonds.

[79419] The polysaccharides are sugar polymers containing more than 20 or so monosaccharide units, and some have hundreds or thousands of units. Some polysaccharides are linear chains; others are branched.

[79420] Carbohydrates are called saccharides or, if they are relatively small, sugars.

[79421] The most carbohydrates found in nature occur as polysaccharides which are polymers of medium to high molecular weight. Polysaccharides, also called glycans, differ from each other in the identity of their recurring monosaccharide units, in the length of their chains, in the types of bonds linking the units, and in the degree of branching.

[79422] In the present invention, saccharides means all of the aforementioned carbohydrate, e.g. monosaccharides, preferably fructose and/or glucose, or other pentoses or hexoses; in free or bound form, preferably glucose-1-phosphate and/or sedoheptulose-7-phosphate; and/or derivates of monosaccharides, preferably (sugar) acids, e.g. saccharic acid, 3,4,5-trihydroxypentanoic acid; and/or sugar alcohols e.g. erythrol, galactitol, sorbitol, mannitol and/or myo-inositol; and/or deoxy-derivates, e.g. fucose; and/or disaccharides, preferably sucrose, melibiose, galactinol and/or trehalose, and/or oligosaccharides, preferably the RFOs (raffinose family of oligosaccharides: preferably the trisaccharide raffinose and/or the pentasaccharide verbascose), and/or polysaccharides, preferably starch and/or cellulose.

[79423] Carbohydrates are the most abundant class of organic compounds found in living organisms.

[79424] They are a major source of metabolic energy, both for plants and for animals. Aside from the sugars and starches that meet this vital nutritional role, carbohydrates function in energy storage (for example starch or glycogen), in signaling (by glycoproteins and glycolipids, e.g. blood group determinants), fuel the nervous system, muscle and virtually all cells, are parts of nucleic acids (in genes, mRNA, tRNA, ribosomes), and as cell surface markers as recognition sites on cell surfaces and signaling in glycolipids and glycoproteins and also serve as a structural material for example as cell wall components (cellulose).

[79425] Fructose commonly known as fruit sugar, is a simple keto-hexose widely distributed in organism, plants, and animals and tasted sweeter than any other carbohydrate. Fructose is used a sweetener by diabetics because it does not rise the blood sugar level and therefore often recommended for, and consumed by, people with diabetes mellitus or hypoglycemia. The most important metabolic derivates are fructose 1,6-biphosphate and 1-phosphate.

[79426] Fructose is quicker to absorb moisture and slower to release it to the environment than sucrose, dextrose, or other nutritive sweeteners. Fructose is an excellent humectant and retains moisture for a long period of time even at low relative humidity (RH). Therefore, fructose can contribute to improved quality, better texture, and longer shelf life to the food products in which it is used.

[79427] Fructose has a greater effect on freezing point depression than disaccharides or oligosaccharides, which may protect the integrity of cell walls of fruit by reducing ice crystal formation. Fructose is usually produced from starch by enzymatically transforming it into glucose syrup and subsequently treating with an isomerase, leading to a conversion of glucose to fructose.

[79428] Glucose, a hexose, also called dextrose, is the most widely distributed sugar in the plant and animal kingdoms and it is the sugar present in blood as “blood sugar”. It occupies a central position in the metabolism of plants, animals, and many microorganisms. Glucose is rich in potential energy, and thus a good fuel; in the body it is catabolised to produce ATP. It is stored as a high molecular weight polymer such as starch or glycogen or is converted to fatty acids.

[79429] Use of glucose as an energy source in cells is via aerobic or anaerobic respiration. Both of these start with the early steps of the glycolysis metabolic pathway.lt is also a remarkably versatile precursor, capable of supplying a huge array of metabolic intermediates for biosynthetic reactions. Specially the phosphoric acid esters of glucose are extremely metabolic intermediastes. Based on its manifold features, glucose is used in nutrition and medicine.

[79430] Fructose and glucose are the main carbohydrate constituents of honey. Those hexoses are further the main components of many oligo- and polysaccharides, like sucrose, raffinose, stachyose, trehalose, starch, cellulose or dextran.

[79431] Glucose 1-phosphate (also called cori ester) is a glucose molecule with a phosphate group on the 1′-carbon. In glycogenolysis, it is the direct product of the reaction in which glycogen phosphorylase cleaves off a molecule of glucose from a greater glycogen structure. In cellular catabolism it must first be converted to glucose 6-phosphate by the enzyme phosphoglucomutase. In glycogenesis, free glucose 1-phosphate can also react with UTP to form UDP-glucose, by using the enzyme UDP-glucose pyrophosphorylase. Uridine diphosphate glucose (UDP-glucose) is further of widespread general importance in carbohydrate metabolism, especially in glycogen and murein synthesis.

[79432] Sedoheptulose-7-phosphate ([(2R,4R,5S)-2,3,4,5,7-pentahydroxy-6-oxoheptyl] phosphate, sedoheptulose-7-P, CAS No: 2646-35-7) is an intermediate of the pentose phosphate pathway and in plants an intermediate of the non oxidative pentose phosphate pathway and the calvin cycle. Likewise, Seduheptulose-7-phosphate is synthesised via the nonoxidativ pentose phosphate pathway in bacteria.

[79433] It is formed by transketolase and acted upon by transaldolase.

[79434] Sedoheptulose-7-phosphate is a precursor in the synthesis of lipopolysaccharides in bacteria. Heptose-deficient bacterial mutants are more sensitive to antibiotics and bile.

[79435] Saccharic acid (Glucaric acid, glucarate, DL-Glucaric acid, Glucosaccharic acid,Tetrahydroxyadipic acid, CAS No.: 87-73-0) is a natural, apparently non-toxic compound produced in small amounts by mammals, including humans and by some plants.

[79436] Glucaric acid or its derivatives have been found in the latex of a succulent plant, mung bean seedlings, seedlings and needles of gymnosperms, latex, leaves, or stems of different succulent plants and tomato leaves. Glucaric acid has been detected in sweet cherry fruits and citrus fruits.

[79437] For industrial application saccharic acid is derived by oxidizing a sugar such as glucose with nitric acid. The synthesis of saccharic acid via the oxidation of glucose with nitric acid is very cost intensive and limits its use. Hence, an alternative process for the synthesis of saccharic acid with high yielding concentration of saccharic acid at low costs would support the use of this acid. Saccharic acid can be used for example as detergent to substitute for phosphates, as corrosion inhibitor and as a building block in the synthesis of polymers, such as nylon. Furthermore, glucaric acid is being explored as cancer preventive agent (Walaszek Z; Cancer Lett. 1990 Oct. 8; 54 (1-2):1-8).

[79438] 3,4,5-Trihydroxypentanoic acid is sugar acid derived from xylonic acid as 2-deoxy-xylonic acid. The 3,4,5-trihydroxypentanoic acid gamma-lactone (3,4,5-TP) decrease food intake and depresse the size of the first meal after infusion and therefore seems to be involved in feeding modulation by conveying intrinsically reciprocal signals to neurons involved in feeding and satiety (Toshiie Sakata, Brain Res., vol. 473, p. 43, 1988).

[79439] In the majority of plants, the main carbohydrate transported is saccharose. However in a large number of plants, other compounds, such as polyols, are also transported. Polyols (or sugar alcohols) are, like saccharose, primary products of photosynthesis and include mannitol, sorbitol, dulcitol, galactitol, inositol, myo-inositol, ribitol, xylitol and more. Moreover, polyols are although discussed as plant osmoprotectants. They have also been postulated as scavengers of activated oxygen species preventing peroxidation of lipids and resulting cell damage.

[79440] Erythrol (Phycitol, Erythritol, Erythrite, Phycite, meso-1,2,3,4-Tetrahydroxybutan, ((2R,3S)butane-1,2,3,4-tetraol), E 968, CAS NO 149-32-6) belongs, together with the more abundantly encountered sorbitol and mannitol, to the group of sugar alcohols or polyols. At least in some plant species, polyols are the preffered long distance transport form of photoassimilates, but they are although discussed as plant osmoprotectants. They have also been postulated as scavengers of activated oxygen species preventing peroxidation of lipids and resulting cell damage. Erythrol occurs naturally in fruits such as pears, melons and grapes, as well as foods such as mushrooms and fermentation-derived foods such as wine, soy sauce and cheese.

[79441] Since 1990, erythritol has been commercially produced and added to foods and beverages to provide sweetness, as well as enhance their taste and texture.

[79442] Erythritol has a strong cooling effect when it dissolves in water, often combined with the cooling effect of mint flavors, but proves distracting with more subtle flavors and textures. The cooling effect of erythritol is very similar to that of xylitol and among the strongest cooling effects of all sugar alcohols. Erythritol is commonly used as a medium in which to deliver high intensity sweeteners, especially stevia derivatives, serving the dual function of providing both bulk and additional flavor. Diet beverages made with this blend thus also contain erythritol in addition to the main sweetener. Erythritol has been certified as tooth-friendly. The sugar alcohol cannot be metabolized by oral bacteria, and so does not contribute to tooth decay.

[79443] Erythritol is produced by microbial methods using mostly osmophilic yeasts and has been produced commercially using mutant strains of Aureobasidium sp. and Pseudozyma tsukubaensis.

[79444] Due to the high yield and productivity in the industrial scale of production, erythritol serves as an inexpensive starting material for the production of other sugars (Moon et al., Appl. Micob.y and Biotech., Vol 86(4), 1017-1025).

[79445] Galactitol (Dulcitol, (2R,3S,4R,5S)-hexane-1,2,3,4,5,6-hexol) is a sugar alcohol (a polyol), the reduction product of galactose. Three of the sugar alcohols are widely distributed in Angiosperms: galactitol, mannitol and sorbitol.

[79446] Sorbitol ((2S,3R,4R,5R)-Hexane-1,2,3,4,5,6-hexol, E 420, D-glucitol, CAS-No 50-70-4) is a sugar alcohol that the human body metabolises slowly. It can be obtained by reduction of glucose, changing the aldehyde group to a hydroxyl group.

[79447] In the majority of plants, the main glucide transported is saccharose. However in a large number of plants, other compounds, such as polyols, are also transported.

[79448] In plants of the Rosaceae family, sorbitol is the primary product of photosynthesis and the major translocation form of photosynthate.

[79449] Sorbitol is an intermediate product in industial scale synthesis of ascorbic acid (ReichsteinSythese). Sorbitol is a sugar substitute. It may be listed under the inactive ingredients listed for some foods and products. Sorbitol is hygroscopic and therefore used as a humectant in cosmetic or food preparations. Sorbitol often is used in mouthwash and toothpaste. Some transparent gels can be made only with sorbitol, as it has a refractive index sufficiently high for transparent formulations.

[79450] Mannitol ((2R,3R,4R,5R)-Hexane-1,2,3,4,5,6-hexol, E 421, CAS No 69-65-8 (D-isomer), mannite, manna sugar) is the most widely distributed sugar alcohol in nature and has been reported in more than 100 species of vascular plants. In plants, mannitol comprises a significant portion of the soluble carbohydrates in many species. Mannitol-producing plants exhibit a high degree of salt tolerance.

[79451] Production of mannitol by extraction of plant raw material (e.g. manna, seaweed, or algae) is no longer economically relevant. Today, mannitol is produced commercially by catalytic hydrogenation of fructose-containing syrups. The existing chemical production methods are, however, characterized by several drawbacks. The uppermost being that when fructose is catalytically hydrogenated only about 50% of it is converted into mannitol, whereas the rest is converted into another sugar alcohol, sorbitol. In addition, ultra-pure (expensive) raw materials (fructose and hydrogen gas) are required for efficient conversion. When more cost-effective raw materials, such as glucose-fructose syrups are used as starting material for catalytic hydrogenation, the main product is sorbitol and mannitol is formed as a by-product. (von Weymarn, N., dissertation, Helskini, 2002).

[79452] Mannitol is used clinically to reduce acutely raised intracranial pressure until more definitive treatment can be applied, e.g., after head trauma. It is also used to treat patients with oliguric renal failure. Mannitol can also be used to open the blood-brain barrier by temporarily shrinking the tightly coupled endothelial cells that make up the barrier. This makes mannitol indispensable for delivering various drugs directly to the brain (e.g., in the treatment of Alzheimer's disease).

[79453] Mannitol is also the first drug of choice for the treatment of acute glaucoma in veterinary medicine. Mannitol is also used as a sweetener for people with diabetes, and in chewing gums.

[79454] An important key intermediates in the formation of RFOs is myo-inositol (cyclohexan1,2,3,4,5,6-hexaole), the most common cyclitol. Myo-inositol is fundamental to many different aspects of plant growth and development. In addition to its role as the precursor for phytic acid biosynthesis, myo-inositol is also used for uronide and pentose biosynthesis, it is also present in phosphoinositides of plant cell membranes, as well as other complex plant lipids including glycophosphoceramides. Furthermore, it is also a precursor of other naturally occurring inositol isomers, and many of these as well as myo-inositol are distributed as methyl ethers in a species specific pattern throughout the plant kingdom. Myo-inositol is an important growth factor.

[79455] Myo-inositol exists in nature either in its free form (found, for example, in sugarcane, beet molasses, and almond hulls) or as a hexaphosphate called phytin (found, for example, in corn steep liquor). Industrial purification of phytin from corn steep liquor involves precipitation with calcium, followed by hydrolysis with a strong acid. Separation of free form inositols from plant extracts involves treatment with acid and separation of myo-inositol by column (U.S. Pat. No. 5,482,631) or the use of ion-exchange (U.S. Pat. No. 4,482,761).

[79456] Myo-inositol, the major nutritionally active form of inositol, is vital to many biological processes of the body, participating in a diverse range of activities. Myo-inositol is one of nine distinct isomers of inositol. It is for example essential for the growth of rodents, but not for most other animals, including humans. Humans can make myo-inositol endogenously, which they do from glucose. Nevertheless myo-inositol influences certain biological activities inside the body. It may affect behavior and may have anti-depressant and anti-anxiety activities. It is synthesized in general from phytin.

[79457] Myo-inositol is metabolized to phosphatidylinositol a small but important component of cell membranes. Phosphatidylinositol can be further converted to phosphatidylinositol-4,5bisphosphate, which is a key intermediate in biological signaling. The various forms of inositol (e.g. phosphatidylinositol or inositides such as 1,4,5-inositoltriphosphate=IP3) are active in cell-to-cell communication, including the transmission of nerve impulses. Tissues that are affected include the brain, liver and muscles. Inositol is an indirect source of glucose and glucoronic acid, which is essential to detoxification by the liver.

[79458] Fucose ((35,4R,55,65)-6-Methyltetrahydro-2H-pyran-2,3,4,5-tetraol, 6-Deoxy-L-galactose, CAS number 2438-80-4Y) hexose deoxy sugar is found on N-linked glycans on the mammalian, insect and plant cell surface, and is the fundamental sub-unit of the fucoidan polysaccharide.

[79459] In the fucose-containing glycan structures, fucosylated glycans, fucose can exist as a terminal modification or serve as an attachment point for adding other sugars. In human N-linked glycans, fucose is most commonly linked α-1,6 to the reducing terminal beta-N-acetlyglucosamine.

[79460] The most frequent disaccharide is sucrose (saccharose, beta-D-fructofuranosyl-alpha-D-glucopyranosid, cane sugar, beet sugar, sugar in a narrow sense of a name for commercially available sucrose meaning sucrose is the sugar that is commonly called “sugar”) which consists of the six-carbon sugars D-glucose and D-fructose. It is formed by plants but not by animals. Sucrose is a major intermediate product of photosynthesis; in many plants it is the principal form in which sugar is transported from the leaves to other parts of the plant body. In mammalians sucrose is an obligatory component of blood and its content in blood is kept at the stable level. It is strongly necessary for brain cells as well as for normal functioning of the central nervous system. Sugar is widely-known as a source of glycogen—a substance, feeding liver, heart and muscles. It is one of the most widely-used food products and is the major disaccharide in most diets. It is present in honey, maple sugar, fruits, berries, and vegetables. It may be added to food products as liquid or crystalline sucrose or as invert sugar. It is commercially prepared from sugar cane or sugar beets. Sucrose can provide a number of desirable functional qualities to food products including sweetness, mouth-feel, and the ability to transform between amorphous and crystalline states. High-concentrated sucrose is a natural preserving agent, it determines gel-formation processes, gives necessary viscosity to the products. Sucrose is a raw material for caramel, colour etc.

[79461] Sucrose is further an excellent fermentation feedstock, which is of specific interest for fermentation industry (including a number of non-food industries -pharmaceutical industries). The presence of eight hydroxyl groups in the sucrose molecule provides a theoretical possibility of a very large number of sucrose derivatives. Sucrose derivatives are used by industries in production of detergents, emulsifiers (sucrose +fatty acids) and adhesives (sucrose octa acetate).

[79462] Sucrose—commonly referred to as table sugar—is a disaccharide comprising glucose and fructose. Succrose is obtained comercially from the expressed juice of sugar cane or of sugar beet. The refining process removes impurities from the sugar plant, producing white sugar crystals. Melibiose (6-0-(alpha-D-Galactopyranosyl)-D-glucopyranose, 6-(α-D-galactosido)-D-glucose, CAS NO 585-99-9) is a disaccharide formed by an alpha linkage between galactose and glucose (D-Gal-α(1→6)-D-Glc). It can be formed by invertase mediated hydrolysis of raffinose, which produces melibiose and fructose.

[79463] In literature, melibiose is primarily discussed as side product in fermentation of raffinose, but metabolic profiling in Arabidopsis has shown that melibiose is actually found in plants (Fiehn et al., Nat Biotechnol. 2000 Nov; 18(11):1157-61).

[79464] Melibiose is yielded by fermentation of raffinose with top yeast (Hudson and Harding, J. Am. Chem. Soc., 1915, 37 (12), pp 2734-2736). Galactinol (1-O-alpha-D-Galactopyranosyl-L-myo-inositol, CAS NO 16908-86-4 (galactinol dihydrate) is involved together with raffinose in tolerance to drought, high salinity and cold stress and may function as osmoprotectants in drought-stress tolerance. Stress inducible enzyme play a key role in the accumulation of galactinol and raffinose under abiotic stress conditions (BRENDA-Enzyme Information System).

[79465] Galactinol is an essential intermediate in the biosyntheis of raffinose saccharides in plant tissues (Kuo, JAOCS (1992), 69(6) 569-574). Galactinol was found in cold-stored potato tubers, but was reported to be absent in freshly harvested tubers (Pressey and Shaw, Potato research (1969), 12(2), 64-66). Trehalose (tremalose, 1-α-Glucopyranosyl-1-α-Glucopyranosid, CAS Reg. No. 99-20-7 (anhydrous trehalose), CAS Reg. No. 6138-23-4 (trehalose dihydrate) is a disaccharide formed by a 1,1-glucoside bond between two α-glucose units. Because trehalose is formed by the bonding of the reducing groups of glucose, trehalose has no reducing power.

[79466] Trehalose can be found in many organisms, including bacteria, fungi, insects, plants, and invertebrates. Trehalose protects organisms against various stresses, such as dryness, freezing, and osmopressure. Anhydrobitic organisms are able to tolerate the lack of water owing to their ability to synthesize large quantities of trehalose, and the trehalose plays a key role in stabilizing membranes and other macromolecular assemblies under extreme environmental conditions. (Pure Appl. Chem. (2001), Vol. 74, No. 7, pp. 1263-1269).

[79467] Transgenic crop plants with increased trehalose content (aimed at top provide enhanced stress tolerance) have been described (e.g. Penna, Trends in Plant Science (2003), 8(8), 355-357).

[79468] The conventional method for production of Trehalose was extraction from yeast, but suffered from low yields and high costs.

[79469] Mushrooms contain up to 10-25% trehalose by dry weight (Pure Appl. Chem., Vol. 74, No. 7, pp. 1263-1269, 2002.).

[79470] Trehalose has been accepted as a novel food ingredient under the GRAS terms in the U.S. and the EU. Because of its unique characteristics (e.g. beeing a non-reducing sugar and therefore inert to reactions with proteins or free amino acids, beeing stable at low pH and elevated temperatures etc., low hygroscopicity), trehalose is appraised as highly usefull food indegrent.

[79471] Sucrose is a precursor to a group of carbohydrates in plants known as the raffinose family of oligosaccharides (RFO) found in many plant seeds especially legumes, for example in beans, cabbage, brussels sprouts, broccoli, asparagus, other vegetables, and whole grains (Shallenberger et al., J.Agric. Food Chem., 9, 1372; 1961). The Raffinose Family of Oligosaccharides (RFO) are alpha-galactosyl derivatives of sucrose. RFOs are synthesized by a set of galactosyltransferases, which sequentially add galactose units from galactinol to sucrose. The most common RFOs are the trisaccharide raffinose, the tetrasaccharide stachyose, and the pentasaccharide verbascose. The RFO's are almost ubiquitous in the plant kingdom, being found in a large variety of seeds from many different families, and they rank second only to sucrose in abundance as soluble carbohydrates. Raffinose family oligosaccharides (RFOs) fulfil multiple functions in plants. In seeds, they possibly protect cellular structures during desiccation and constitute carbon reserves for early germination.

[79472] Raffinose (beta-D-fructofuranosyl-6-O-alpha-D-galactopyranosyl-alpha-D-glucopyranosid, melitriose, gossypose, melitose), which consists of sucrose with a-galactose attached through its C-4 atom to the 1 position on the fructose residue or in other words raffinose is a complex carbohydrate, a trisaccharide composed of galactose, fructose, and glucose. It is thought to be second only to sucrose among the nonstructural carbohydrates with respect to abundance in the plant kingdom. It may be ubiquitous, at least among higher plants. Raffinose accumulate in significant quantities in the edible portion of many economically significant crop species. Examples include soybean, sugar beet, cotton, canola and all of the major edible leguminous crops including beans, peas, lentil and lupine.

[79473] Verbascose, the pentasaccharide of the raffinose family of oligosaccharides (RFO), occurs in the phloem and in storage organs of many plant species, particularly in seeds of legumes. The physiological functions of verbascose in seeds have been little studied. As its lower homologues raffinose and stachyose, verbascose may act as a protective agent during maturation drying or as carbon reserve for germination. Considerable variation exists in the content of verbascose in seeds.

[79474] Thus, saccharides of the invention, e.g. monosaccharides, preferably fructose and/or glucose, or other pentoses or hexoses; in free or bound form, preferably glucose-1-phosphate and/or sedoheptulose-7-phosphate; and/or derivates of monosaccharides, preferably (sugar) acids, e.g. saccharic acid, 3,4,5-trihydroxypentanoic acid; and/or sugar alcohols e.g. erythrol, galactitol, sorbitol, mannitol and/or myo-inositol; and/or deoxy-derivates, e.g. fucose; and/or disaccharides, preferably sucrose, melibiose, galactinol and/or trehalose, and/or oligosaccharides, preferably the RFOs (raffinose family of oligosaccharides: preferably the trisaccharide raffinose and/or the pentasaccharide verbascose), and/or polysaccharides, preferably starch and/or cellulose can be used in a lot of different applications, for example in cosmetics, pharmaceuticals and in feed and food.

[79475] Therefore improving the productivity of said saccharides and improving the quality of cosmetics, pharmaceuticals, foodstuffs and animal feeds, in particular of nutrition supplements, is an important task of the different industries.

[79476] The content of some of the saccharides in a cell was also increased by increasing or decreasing certain activities as disclosed in WO2006/069610, WO2007/087815 or WO2008/034648.

[79477] Futher economical and less expensive methods for producing saccharides of the invention, e.g. monosaccharides, preferably fructose and/or glucose, or other pentoses or hexoses; in free or bound form, preferably glucose-1-phosphate and/or sedoheptulose-7-phosphate; and/or derivates of monosaccharides, preferably (sugar) acids, e.g. saccharic acid, 3,4,5-trihydroxypentanoic acid; and/or sugar alcohols e.g. erythrol, galactitol, sorbitol, mannitol and/or myo-inositol; and/or deoxy-derivates, e.g. fucose; and/or disaccharides, preferably sucrose, melibiose, galactinol and/or trehalose, and/or oligosaccharides, preferably the RFOs (raffinose family of oligosaccharides: preferably the trisaccharide raffinose and/or the pentasaccharide verbascose), and/or polysaccharides, preferably starch and/or celluloseand food- and feedstuffs with defined, balanced and if necessarily increased saccharid content are therefore very important.

[79478] Particularly economical methods are biotechnological methods utilizing ssaccharides-producing organisms which are either natural or optimized by genetic modification.

[79479] There is a constant need for providing novel enzyme activities or direct or indirect regulators and thus alternative methods with advantageous properties for producing saccharides in organisms, e.g. in transgenic organisms.

[79480] Improving the quality of foodstuffs and animal feeds is an important task of the food-and-feed industry. Especially advantageous for the quality of foodstuffs and animal feeds is as balanced as possible and well defined saccharide profile since a great excess of some saccharides above a specific concentration in the food has no further positive.

[79481] To ensure a high productivity of said saccharides, in particular monosaccharides, preferably fructose and/or glucose, or other pentoses or hexoses; in free or bound form, preferably glucose-1-phosphate and/or sedoheptulose-7-phosphate; and/or derivates of monosaccharides, preferably (sugar) acids, e.g. saccharic acid, 3,4,5-trihydroxypentanoic acid; and/or sugar alcohols e.g. erythrol, galactitol, sorbitol, mannitol and/or myo-inositol; and/or deoxy-derivates, e.g. fucose; and/or disaccharides, preferably sucrose, melibiose, galactinol and/or trehalose, and/or oligosaccharides, preferably the RFOs (raffinose family of oligosaccharides: preferably the trisaccharide raffinose and/or the pentasaccharide verbascose), and/or polysaccharides, preferably starch and/or cellulose in plants or microorganism, it is necessary to manipulate the natural biosynthesis of said cofactors in said organisms.

[79482] Accordingly, there is still a great demand for new and more suitable genes which encode enzymes or other regulators which participate in the biosynthesis of said saccharides, in particular monosaccharides, preferably fructose and/or glucose, or other pentoses or hexoses; in free or bound form, preferably glucose-1-phosphate and/or sedoheptulose-7-phosphate; and/or derivates of monosaccharides, preferably (sugar) acids, e.g. saccharic acid, 3,4,5-trihydroxypentanoic acid; and/or sugar alcohols e.g. erythrol, galactitol, sorbitol, mannitol and/or myo-inositol; and/or deoxy-derivates, e.g. fucose; and/or disaccharides, preferably sucrose, melibiose, galactinol and/or trehalose, and/or oligosaccharides, preferably the RFOs (raffinose family of oligosaccharides: preferably the trisaccharide raffinose and/or the pentasaccharide verbascose), and/or polysaccharides, preferably starch and/or cellulose and make it possible to produce certain said saccharides specifically on an industrial scale without unwanted by products forming. In the selection of genes for biosynthesis two characteristics above all are particularly important. On the one hand, there is as ever a need for improved processes for obtaining the highest possible contents of said cofactors on the other hand as less as possible by products should be produced in the production process.

[79483] It is an object of the present invention to develop an inexpensive process for the synthesis of 3,4,5-trihydroxypentanoic acid, erythrol, fructose, fucose, galactinol, galactitol, glucose, glucose-1-phosphate, mannitol, melibiose, myo-inositol, raffinose, saccharic acid, sedoheptulose-7-phosphate, sorbitol, sucrose, trehalose, and/or verbascose.

[79484] It is a further object of the present invention to develop an inexpensive process for the synthesis of saccharides, in particular monosaccharides, preferably fructose and/or glucose, or other pentoses or hexoses; in free or bound form, preferably glucose-1-phosphate and/or sedoheptulose-7-phosphate; and/or derivates of monosaccharides, preferably (sugar) acids, e.g. saccharic acid, 3,4,5-trihydroxypentanoic acid; and/or sugar alcohols e.g. erythrol, galactitol, sorbitol, mannitol and/or myo-inositol; and/or deoxy-derivates, e.g. fucose; and/or disaccharides, preferably sucrose, melibiose, galactinol and/or trehalose, and/or oligosaccharides, preferably the RFOs (raffinose family of oligosaccharides: preferably the trisaccharide raffinose and/or the pentasaccharide verbascose), and/or polysaccharides, preferably starch and/or cellulose and to assure that said saccharides are more accessible and facilely to isolate and recover in an industrial scale from the producing organism, preferably from a plant.

[79485] for the disclosure of this paragraph see [0013.1.7.7] above

[79486] Accordingly, in a first embodiment, the invention relates to a process for the production of at least one fine chemical selected from the group consisting of: 3,4,5-trihydroxypentanoic acid, erythrol, fructose, fucose, galactinol, galactitol, glucose, glucose-1-phosphate, mannitol, melibiose, myo-inositol, raffinose, saccharic acid, sedoheptulose-7-phosphate, sorbitol, sucrose, trehalose, and verbascose, or, in other words, of the “fine chemical” or “fine chemical of the invention”.

[79487] The terms “fine chemical of the invention”, “fine chemical” or “the fine chemical” are used herein equally and relate in context of the paragraphs or sections [0014.1.17.17] to [0514.1.7.17] essentially to the metabolite or the metabolites indicated in column 7, application no. 17 of Tables I, II and IV in the respective line.

[79488] Further, the term “in context of any of the paragraphs [0014.1.17.17] to [0514.1.7.17]” as used herein means that for any of said paragraphs [0014.1.17.17] to [0514.1.7.17] the term “the fine chemical” is understood to follow the definition of paragraphs or sections [0014.1.17.17] and [0015.1.17.17], independently whether it refers to any other paragraph or not and whether the reference recites the term “fine chemical” in an other context.

[79489] Thus, in cases where one or more paragraphs or sections are incorporated by reference into any of the present paragraphs [0014.1.17.17] to [0514.1.7.17], e.g. by usage of the term “see paragraph” or the term “for the disclosure of this paragraph see the disclosure of paragraph” or the term “incorporated by reference” or a corresponding term, the incorporated paragraph, section or term “the fine chemical” is also understood to have the meaning according to the definition of paragraph [0014.1.17.17] and [0015.1.17.17].

[79490] Accordingly, in one embodiment, the term “fine chemical of the invention”, “fine chemical” or “the fine chemical” as used herein (alone or in combination, like in FCRP) means “3,4,5-trihydroxypentanoic acid” in context of the nucleic acid or polypeptide sequences listed in the respective same line of any one of Tables Ito IV of application no. 17 and indicating in column 7 the metabolite “3,4,5-trihydroxypentanoic acid”.

[79491] In one embodiment, the term 3,4,5-trihydroxypentanoic acid or the term “fine chemical” mean in context of the paragraphs or sections [0014.1.17.17] to [0514.1.7.17] at least one chemical compound with an activity of the above mentioned 3,4,5-trihydroxypentanoic acid, respectively.

[79492] Accordingly, in one embodiment, the term “fine chemical of the invention”, “fine chemical” or “the fine chemical” as used herein (alone or in combination, like in FCRP) means “erythrol” in context of the nucleic acid or polypeptide sequences listed in the respective same line of any one of Tables I to IV of application no. 17 and indicating in column 7 the metabolite “erythrol”.

[79493] In one embodiment, the term erythrol or the term “fine chemical” mean in context of the paragraphs or sections [0014.1.17.17] to [0514.1.7.17] at least one chemical compound with an activity of the above mentioned erythrol, respectively.

[79494] Accordingly, in one embodiment, the term “fine chemical of the invention”, “fine chemical” or “the fine chemical” as used herein (alone or in combination, like in FCRP) means “fructose” in context of the nucleic acid or polypeptide sequences listed in the respective same line of any one of Tables I to IV of application no. 17 and indicating in column 7 the metabolite “fructose”.

[79495] In one embodiment, the term fructose or the term “fine chemical” mean in context of the paragraphs or sections [0014.1.17.17] to [0514.1.7.17] at least one chemical compound with an activity of the above mentioned fructose, respectively.

[79496] Accordingly, in one embodiment, the term “fine chemical of the invention”, “fine chemical” or “the fine chemical” as used herein (alone or in combination, like in FCRP) means “fucose” in context of the nucleic acid or polypeptide sequences listed in the respective same line of any one of Tables I to IV of application no. 17 and indicating in column 7 the metabolite “fucose”.

[79497] In one embodiment, the term fucose or the term “fine chemical” mean in context of the paragraphs or sections [0014.1.17.17] to [0514.1.7.17] at least one chemical compound with an activity of the above mentioned fucose, respectively.

[79498] Accordingly, in one embodiment, the term “fine chemical of the invention”, “fine chemical” or “the fine chemical” as used herein (alone or in combination, like in FCRP) means “galactinol” in context of the nucleic acid or polypeptide sequences listed in the respective same line of any one of Tables I to IV of application no. 17 and indicating in column 7 the metabolite “galactinol”.

[79499] In one embodiment, the term galactinol or the term “fine chemical” mean in context of the paragraphs or sections [0014.1.17.17] to [0514.1.7.17] at least one chemical compound with an activity of the above mentioned galactinol, respectively.

[79500] Accordingly, in one embodiment, the term “fine chemical of the invention”, “fine chemical” or “the fine chemical” as used herein (alone or in combination, like in FCRP) means “galactitol” in context of the nucleic acid or polypeptide sequences listed in the respective same line of any one of Tables I to IV of application no. 17 and indicating in column 7 the metabolite “galactitol”.

[79501] In one embodiment, the term galactitol or the term “fine chemical” mean in context of the paragraphs or sections [0014.1.17.17] to [0514.1.7.17] at least one chemical compound with an activity of the above mentioned galactitol, respectively.

[79502] Accordingly, in one embodiment, the term “fine chemical of the invention”, “fine chemical” or “the fine chemical” as used herein (alone or in combination, like in FCRP) means “glucose” in context of the nucleic acid or polypeptide sequences listed in the respective same line of any one of Tables I to IV of application no. 17 and indicating in column 7 the metabolite “glucose”.

[79503] In one embodiment, the term glucose or the term “fine chemical” mean in context of the paragraphs or sections [0014.1.17.17] to [0514.1.7.17] at least one chemical compound with an activity of the above mentioned glucose, respectively.

[79504] Accordingly, in one embodiment, the term “fine chemical of the invention”, “fine chemical” or “the fine chemical” as used herein (alone or in combination, like in FCRP) means “glucose-1-phosphate” in context of the nucleic acid or polypeptide sequences listed in the respective same line of any one of Tables Ito IV of application no. 17 and indicating in column 7 the metabolite “glucose-1-phosphate”.

[79505] In one embodiment, the term glucose-1-phosphate or the term “fine chemical” mean in context of the paragraphs or sections [0014.1.17.17] to [0514.1.7.17] at least one chemical compound with an activity of the above mentioned glucose-1-phosphate, respectively.

[79506] Accordingly, in one embodiment, the term “fine chemical of the invention”, “fine chemical” or “the fine chemical” as used herein (alone or in combination, like in FCRP) means “mannitol” in context of the nucleic acid or polypeptide sequences listed in the respective same line of any one of Tables I to IV of application no. 17 and indicating in column 7 the metabolite “mannitol”.

[79507] In one embodiment, the term mannitol or the term “fine chemical” mean in context of the paragraphs or sections [0014.1.17.17] to [0514.1.7.17] at least one chemical compound with an activity of the above mentioned mannitol, respectively.

[79508] Accordingly, in one embodiment, the term “fine chemical of the invention”, “fine chemical” or “the fine chemical” as used herein (alone or in combination, like in FCRP) means “melibiose” in context of the nucleic acid or polypeptide sequences listed in the respective same line of any one of Tables I to IV of application no. 17 and indicating in column 7 the metabolite “melibiose”.

[79509] In one embodiment, the term melibiose or the term “fine chemical” mean in context of the paragraphs or sections [0014.1.17.17] to [0514.1.7.17] at least one chemical compound with an activity of the above mentioned melibiose, respectively.

[79510] Accordingly, in one embodiment, the term “fine chemical of the invention”, “fine chemical” or “the fine chemical” as used herein (alone or in combination, like in FCRP) means “myo-inositol” in context of the nucleic acid or polypeptide sequences listed in the respective same line of any one of Tables I to IV of application no. 17 and indicating in column 7 the metabolite “myo-inositol”.

[79511] In one embodiment, the term myo-inositol or the term “fine chemical” mean in context of the paragraphs or sections [0014.1.17.17] to [0514.1.7.17] at least one chemical compound with an activity of the above mentioned myo-inositol, respectively.

[79512] Accordingly, in one embodiment, the term “fine chemical of the invention”, “fine chemical” or “the fine chemical” as used herein (alone or in combination, like in FCRP) means “raffinose” in context of the nucleic acid or polypeptide sequences listed in the respective same line of any one of Tables I to IV of application no. 17 and indicating in column 7 the metabolite “raffinose”.

[79513] In one embodiment, the term raffinose or the term “fine chemical” mean in context of the paragraphs or sections [0014.1.17.17] to [0514.1.7.17] at least one chemical compound with an activity of the above mentioned raffinose, respectively.

[79514] Accordingly, in one embodiment, the term “fine chemical of the invention”, “fine chemical” or “the fine chemical” as used herein (alone or in combination, like in FCRP) means “saccharic acid” in context of the nucleic acid or polypeptide sequences listed in the respective same line of any one of Tables Ito IV of application no. 17 and indicating in column 7 the metabolite “saccharic acid”.

[79515] In one embodiment, the term saccharic acid or the term “fine chemical” mean in context of the paragraphs or sections [0014.1.17.17] to [0514.1.7.17] at least one chemical compound with an activity of the above mentioned saccharic acid, respectively.

[79516] Accordingly, in one embodiment, the term “fine chemical of the invention”, “fine chemical” or “the fine chemical” as used herein (alone or in combination, like in FCRP) means “sedoheptulose-7-phosphate” in context of the nucleic acid or polypeptide sequences listed in the respective same line of any one of Tables Ito IV of application no. 17 and indicating in column 7 the metabolite “sedoheptulose-7-phosphate”.

[79517] In one embodiment, the term sedoheptulose-7-phosphate or the term “fine chemical” mean in context of the paragraphs or sections [0014.1.17.17] to [0514.1.7.17] at least one chemical compound with an activity of the above mentioned sedoheptulose-7-phosphate, respectively.

[79518] Accordingly, in one embodiment, the term “fine chemical of the invention”, “fine chemical” or “the fine chemical” as used herein (alone or in combination, like in FCRP) means “sorbitol” in context of the nucleic acid or polypeptide sequences listed in the respective same line of any one of Tables I to IV of application no. 17 and indicating in column 7 the metabolite “sorbitol”.

[79519] In one embodiment, the term sorbitol or the term “fine chemical” mean in context of the paragraphs or sections [0014.1.17.17] to [0514.1.7.17] at least one chemical compound with an activity of the above mentioned sorbitol, respectively.

[79520] Accordingly, in one embodiment, the term “fine chemical of the invention”, “fine chemical” or “the fine chemical” as used herein (alone or in combination, like in FCRP) means “sucrose” in context of the nucleic acid or polypeptide sequences listed in the respective same line of any one of Tables I to IV of application no. 17 and indicating in column 7 the metabolite “sucrose”.

[79521] In one embodiment, the term sucrose or the term “fine chemical” mean in context of the paragraphs or sections [0014.1.17.17] to [0514.1.7.17] at least one chemical compound with an activity of the above mentioned sucrose, respectively.

[79522] Accordingly, in one embodiment, the term “fine chemical of the invention”, “fine chemical” or “the fine chemical” as used herein (alone or in combination, like in FCRP) means “trehalose” in context of the nucleic acid or polypeptide sequences listed in the respective same line of any one of Tables I to IV of application no. 17 and indicating in column 7 the metabolite “trehalose”.

[79523] In one embodiment, the term trehalose or the term “fine chemical” mean in context of the paragraphs or sections [0014.1.17.17] to [0514.1.7.17] at least one chemical compound with an activity of the above mentioned trehalose, respectively.

[79524] Accordingly, in one embodiment, the term “fine chemical of the invention”, “fine chemical” or “the fine chemical” as used herein (alone or in combination, like in FCRP) means “verbascose” in context of the nucleic acid or polypeptide sequences listed in the respective same line of any one of Tables I to IV of application no. 17 and indicating in column 7 the metabolite “verbascose”.

[79525] In one embodiment, the term verbascose or the term “fine chemical” mean in context of the paragraphs or sections [0014.1.17.17] to [0514.1.7.17] at least one chemical compound with an activity of the above mentioned verbascose, respectively.

[79526] Accordingly, in one embodiment, the terms “fine chemical of the invention”, “fine chemical” or “the fine chemical” mean in context of any of the paragraphs [0014.1.17.17] to [0514.1.7.17] 3,4,5-trihydroxypentanoic acid, its lacton, salts, ester or ether in free form or bound form. In a preferred embodiment, the term “the fine chemical” means 3,4,5-trihydroxypentanoic acid or its salts, ester or ether, in free form or bound form.

[79527] In a preferred embodiment “3,4,5-trihydroxypentanoic acid ” means 3,4,5-trihydroxypentanoic acid in free form.

[79528] Accordingly, in one embodiment, the terms “fine chemical of the invention”, “fine chemical” or “the fine chemical” mean in context of any of the paragraphs [0014.1.17.17] to [0514.1.7.17] erythrol, its salts, ester or ether in free form or bound form. In a preferred embodiment, the term “the fine chemical” means erythrol or its salts, ester or ether, in free form or bound form.

[79529] In a preferred embodiment “erythrol” means erythrol in free form.

[79530] Accordingly, in one embodiment, the terms “fine chemical of the invention”, “fine chemical” or “the fine chemical” mean in context of any of the paragraphs [0014.1.17.17] to [0514.1.7.17] fructose, its salts, ester or ether in free form or bound form. In a preferred embodiment, the term “the fine chemical” means fructose or its salts, ester or ether, in free form or bound form.

[79531] Further, the term “the fine chemicals” as used herein also relates in one embodiment to fine chemicals comprising fructose, preferably fructan, amins, ethers, esters, preferably ester of phosphoric acid, e.g. phosphorylated fructose, glycosides, preferably glycolipids and glycoproteins containing fructose.ln a preferred embodiment “fructose” means fructose in free form.

[79532] Accordingly, in one embodiment, the terms “fine chemical of the invention”, “fine chemical” or “the fine chemical” mean in context of any of the paragraphs [0014.1.17.17] to [0514.1.7.17] fucose, its salts, ester or ether in free form or bound form. In a preferred embodiment, the term “the fine chemical” means fucose or its salts, ester or ether or fucose-containing glycan structures, in free form or bound form.

[79533] In a preferred embodiment “fucose” means fucose in free form.

[79534] Accordingly, in one embodiment, the terms “fine chemical of the invention”, “fine chemical” or “the fine chemical” mean in context of any of the paragraphs [0014.1.17.17] to [0514.1.7.17] galactinol, its salts, ester or ether in free form or bound form. In a preferred embodiment, the term “the fine chemical” means galactinol or its salts, ester or ether, in free form or bound form.

[79535] In a preferred embodiment “galactinol” means galactinol in free form.

[79536] Accordingly, in one embodiment, the terms “fine chemical of the invention”, “fine chemical” or “the fine chemical” mean in context of any of the paragraphs [0014.1.17.17] to [0514.1.7.17] galactitol, its salts, ester or ether in free form or bound form. In a preferred embodiment, the term “the fine chemical” means galactitol or its salts, ester or ether, in free form or bound form.

[79537] In a preferred embodiment “galactitol” means galactitol in free form.

[79538] Accordingly, in one embodiment, the terms “fine chemical of the invention”, “fine chemical” or “the fine chemical” mean in context of any of the paragraphs [0014.1.17.17] to [0514.1.7.17] glucose, its salts, ester or ether in free form or bound form. In a preferred embodiment, the term “the fine chemical” means glucose or its salts, ester or ether, in free form or bound form.

[79539] In a preferred embodiment “glucose” means glucose in free form.

[79540] Further, the term “the fine chemicals” as used herein also relates in one embodiment to fine chemicals comprising glucose, preferably ester of phosphoric acid, e.g. phosphorylated glucose like glucose-1-phosphate or glucose-6-phosphate, glycosides, preferably glycolipids and glycoproteins containing glucose.

[79541] Accordingly, in one embodiment, the terms “fine chemical of the invention”, “fine chemical” or “the fine chemical” mean in context of any of the paragraphs [0014.1.17.17] to [0514.1.7.17] glucose-1-phosphate, its salts, ester or ether in free form or bound form. In a preferred embodiment, the term “the fine chemical” means glucose-1-phosphate or its salts, ester or ether, in free form or bound form.

[79542] In a preferred embodiment “glucose-1-phosphate” means glucose-1-phosphate in free form.

[79543] Accordingly, in one embodiment, the terms “fine chemical of the invention”, “fine chemical” or “the fine chemical” mean in context of any of the paragraphs [0014.1.17.17] to [0514.1.7.17] mannitol, its salts, ester or ether in free form or bound form. In a preferred embodiment, the term “the fine chemical” means mannitol or its salts, ester or ether, in free form or bound form.

[79544] In a preferred embodiment “mannitol” means mannitol in free form.

[79545] Accordingly, in one embodiment, the terms “fine chemical of the invention”, “fine chemical” or “the fine chemical” mean in context of any of the paragraphs [0014.1.17.17] to [0514.1.7.17] melibiose, its salts, ester or ether in free form or bound form. In a preferred embodiment, the term “the fine chemical” means melibiose or its salts, ester or ether, in free form or bound form.

[79546] In a preferred embodiment “melibiose” means melibiose in free form.

[79547] Accordingly, in one embodiment, the terms “fine chemical of the invention”, “fine chemical” or “the fine chemical” mean in context of any of the paragraphs [0014.1.17.17] to [0514.1.7.17] myo-inositol, its salts, ester or ether in free form or bound form. In a preferred embodiment, the term “the fine chemical” means myo-inositol or its salts, ester or ether, in free form or bound form. Further, the term “the fine chemicals” as used herein also relates in one embodiment to fine chemicals comprising myo-inositol, preferably ester of phosphoric acid, e.g. phosphorylated myo-inositol like 1-phosphatidyl-inosit or my-inositol-1,2,3,4,5,6-hexakisphosphate (phytate), glycosides, preferably glycolipids like phospholipids and glycoproteinslikephosphoproteins containing my-inositol.

[79548] In a preferred embodiment “myo-inositol” means myo-inositol in free form.

[79549] Accordingly, in one embodiment, the terms “fine chemical of the invention”, “fine chemical” or “the fine chemical” mean in context of any of the paragraphs [0014.1.17.17] to [0514.1.7.17] raffinose, its salts, ester or ether in free form or bound form. In a preferred embodiment, the term “the fine chemical” means raffinose or its salts, ester or ether, in free form or bound form.

[79550] In a preferred embodiment “raffinose” means raffinose in free form.

[79551] Accordingly, in one embodiment, the terms “fine chemical of the invention”, “fine chemical” or “the fine chemical” mean in context of any of the paragraphs [0014.1.17.17] to [0514.1.7.17] saccharic acid, its salts, ester or ether in free form or bound form. In a preferred embodiment, the term “the fine chemical” means saccharic acid or its salts, ester or ether, in free form or bound form.

[79552] In a preferred embodiment “saccharic acid ” means saccharic acid in free form.

[79553] Accordingly, in one embodiment, the terms “fine chemical of the invention”, “fine chemical” or “the fine chemical” mean in context of any of the paragraphs [0014.1.17.17] to [0514.1.7.17] sedoheptulose-7-phosphate, its salts, ester or ether in free form or bound form. In a preferred embodiment, the term “the fine chemical” means sedoheptulose-7-phosphate or its salts, ester or ether, in free form or bound form.

[79554] In a preferred embodiment “sedoheptulose-7-phosphate” means sedoheptulose-7-phosphate in free form.

[79555] Accordingly, in one embodiment, the terms “fine chemical of the invention”, “fine chemical” or “the fine chemical” mean in context of any of the paragraphs [0014.1.17.17] to [0514.1.7.17] sorbitol, its salts, ester or ether in free form or bound form. In a preferred embodiment, the term “the fine chemical” means sorbitol or its salts, ester or ether, in free form or bound form.

[79556] In a preferred embodiment “sorbitol” means sorbitol in free form.

[79557] Accordingly, in one embodiment, the terms “fine chemical of the invention”, “fine chemical” or “the fine chemical” mean in context of any of the paragraphs [0014.1.17.17] to [0514.1.7.17] sucrose, its salts, ester or ether in free form or bound form. In a preferred embodiment, the term “the fine chemical” means sucrose or its salts, ester or ether, in free form or bound form.

[79558] In a preferred embodiment “sucrose” means sucrose in free form.

[79559] Accordingly, in one embodiment, the terms “fine chemical of the invention”, “fine chemical” or “the fine chemical” mean in context of any of the paragraphs [0014.1.17.17] to [0514.1.7.17] trehalose, its salts, ester or ether in free form or bound form. In a preferred embodiment, the term “the fine chemical” means trehalose or its salts, ester or ether, in free form or bound form.

[79560] In a preferred embodiment “trehalose” means trehalose in free form.

[79561] Accordingly, in one embodiment, the terms “fine chemical of the invention”, “fine chemical” or “the fine chemical” mean in context of any of the paragraphs [0014.1.17.17] to [0514.1.7.17] verbascose, its salts, ester or ether in free form or bound form. In a preferred embodiment, the term “the fine chemical” means verbascose or its salts, ester or ether, in free form or bound form.

[79562] In a preferred embodiment “verbascose” means verbascose in free form. Accordingly, in the present invention, the term “the fine chemical” as used herein relates in one embodiment to “saccharides, meaning carbohydrates, e.g. monosaccharides, preferably fructose and/or glucose, or other pentoses or hexoses; in free or bound form, preferably glucose-1-phosphate and/or sedoheptulose-7-phosphate; and/or derivates of monosaccharides, preferably (sugar) acids, e.g. saccharic acid, 3,4,5-trihydroxypentanoic acid; and/or sugar alcohols e.g. erythrol, galactitol, sorbitol, mannitol and/or myo-inositol; and/or deoxy-derivates, e.g. fucose; and/or disaccharides, preferably sucrose, melibiose, galactinol and/or trehalose, and/or oligosaccharides, preferably the RFOs (raffinose family of oligosaccharides: preferably the trisaccharide raffinose and/or the pentasaccharide verbascose), and/or polysaccharides, preferably starch and/or cellulose”. Further, the term “the fine chemicals” as used herein also relates in one embodiment to fine chemicals comprising saccharides, meaning carbohydrates, e.g. monosaccharides, preferably fructose and/or glucose, or other pentoses or hexoses; in free or bound form, preferably glucose-1-phosphate and/or sedoheptulose-7-phosphate; and/or derivates of monosaccharides, preferably (sugar) acids, e.g. saccharic acid, 3,4,5-trihydroxypentanoic acid; and/or sugar alcohols e.g. erythrol, galactitol, sorbitol, mannitol and/or myo-inositol; and/or deoxy-derivates, e.g. fucose; and/or disaccharides, preferably sucrose, melibiose, galactinol and/or trehalose, and/or oligosaccharides, preferably the RFOs (raffinose family of oligosaccharides: preferably the trisaccharide raffinose and/or the pentasaccharide verbascose), and/or polysaccharides, preferably starch and/or cellulose, preferably amins, ethers, esters, preferably ester of phosphoric acid, e.g. phosphorylated saccharides, glycosides, preferably glycolipids and glycoproteins containing said saccharides.

[79563] Further, the term “in context of any of the paragraphs [0014.1.17.17] to [0514.1.7.17]” as used herein means that for any of said paragraphs [0014.1.17.17] to [0514.1.7.17] the term “the fine chemical” is understood to follow the definition of section [0014.1.17.17] or section [0015.1.17.17], independently whether it refers to any other paragraph or not and whether the reference recites the term “fine chemical” in an other context.

[79564] Thus, in cases where one or more paragraphs or sections are incorporated by reference into any of the present paragraphs [0014.1.17.17] to [0514.1.7.17], e.g. by usage of the term “see paragraph” or the term “for the disclosure of this paragraph see the disclosure of paragraph” or the term “incorporated by reference” or a corresponding term, the incorporated paragraph, section or term “the fine chemical” is also understood to have the meaning according to this definition of this paragraph [0015.1.17.17].

[79565] Further, the term “fine chemicals” as used herein relates to compositions comprising said fine chemical(s), i.e. comprising 3,4,5-trihydroxypentanoic acid, erythrol, fructose, fucose, galactinol, galactitol, glucose, glucose-1-phosphate, mannitol, melibiose, myo-inositol, raffinose, saccharic acid, sedoheptulose-7-phosphate, sorbitol, sucrose, trehalose, and/or verbascose, respectively.

[79566] Accordingly, the present invention relates to a process for the production of raffinose, which comprises
[79567] (a) increasing or generating one or more activities selected from the group consisting of galactinol synthase in a non-human organism or a part thereof, preferably a microorganism, a plant cell, a plant or a part thereof, as compared to a corresponding non-transformed wild type non-human organism or a part thereof; and
[79568] (b) growing the non-human organism or a part thereof under conditions which permit the production of raffinose or a composition comprising raffinose in said non-human organism or in the culture medium surrounding said non-human organism.

[79569] Accordingly, the present invention relates to a process for the production of glucose-1-phosphate, which comprises
[79570] (a) increasing or generating one or more activities selected from the group consisting of protein phosphatase in a non-human organism or a part thereof, preferably a microorganism, a plant cell, a plant or a part thereof, as compared to a corresponding non-transformed wild type non-human organism or a part thereof; and
[79571] (b) growing the non-human organism or a part thereof under conditions which permit the production of glucose-1-phosphate or a composition comprising glucose-1-phosphate in said non-human organism or in the culture medium surrounding said non-human organism.

[79572] Accordingly, the present invention relates to a process for the production of myo-inositol, which comprises
[79573] (a) increasing or generating one or more activities selected from the group consisting of protein phosphatase in a non-human organism or a part thereof, preferably a microorganism, a plant cell, a plant or a part thereof, as compared to a corresponding non-transformed wild type non-human organism or a part thereof; and
[79574] (b) growing the non-human organism or a part thereof under conditions which permit the production of myo-inositol or a composition comprising myo-inositol in said non-human organism or in the culture medium surrounding said non-human organism.

[79575] Accordingly, the present invention relates to a process for the production of glucose-1-phosphate, which comprises
[79576] (a) increasing or generating one or more activities selected from the group consisting of At1g19350-protein in a non-human organism or a part thereof, preferably a microorganism, a plant cell, a plant or a part thereof, as compared to a corresponding non-transformed wild type non-human organism or a part thereof; and
[79577] (b) growing the non-human organism or a part thereof under conditions which permit the production of glucose-1-phosphate or a composition comprising glucose-1-phosphate in said non-human organism or in the culture medium surrounding said non-human organism.

[79578] Accordingly, the present invention relates to a process for the production of 3,4,5-trihydroxypentanoic acid, which comprises
[79579] (a) increasing or generating one or more activities selected from the group consisting of At1g19350-protein in a non-human organism or a part thereof, preferably a microorganism, a plant cell, a plant or a part thereof, as compared to a corresponding non-transformed wild type non-human organism or a part thereof; and
[79580] (b) growing the non-human organism or a part thereof under conditions which permit the production of 3,4,5-trihydroxypentanoic acid or a composition comprising 3,4,5-trihydroxypentanoic acid in said non-human organism or in the culture medium surrounding said non-human organism.

[79581] Accordingly, the present invention relates to a process for the production of myo-inositol, which comprises
[79582] (a) increasing or generating one or more activities selected from the group consisting of chlorophyllase in a non-human organism or a part thereof, preferably a microorganism, a plant cell, a plant or a part thereof, as compared to a corresponding non-transformed wild type non-human organism or a part thereof; and
[79583] (b) growing the non-human organism or a part thereof under conditions which permit the production of myo-inositol or a composition comprising myo-inositol in said non-human organism or in the culture medium surrounding said non-human organism.

[79584] Accordingly, the present invention relates to a process for the production of fructose, which comprises
[79585] (a) increasing or generating one or more activities selected from the group consisting of cullin in a non-human organism or a part thereof, preferably a microorganism, a plant cell, a plant or a part thereof, as compared to a corresponding non-transformed wild type non-human organism or a part thereof; and
[79586] (b) growing the non-human organism or a part thereof under conditions which permit the production of fructose or a composition comprising fructose in said non-human organism or in the culture medium surrounding said non-human organism.

[79587] Accordingly, the present invention relates to a process for the production of fructose, which comprises
[79588] (a) increasing or generating one or more activities selected from the group consisting of eukaryotic translation initiation factor 5 in a non-human organism or a part thereof, preferably a microorganism, a plant cell, a plant or a part thereof, as compared to a corresponding non-transformed wild type non-human organism or a part thereof; and
[79589] (b) growing the non-human organism or a part thereof under conditions which permit the production of fructose or a composition comprising fructose in said non-human organism or in the culture medium surrounding said non-human organism.

[79590] Accordingly, the present invention relates to a process for the production of glucose, which comprises
[79591] (a) increasing or generating one or more activities selected from the group consisting of eukaryotic translation initiation factor 5 in a non-human organism or a part thereof, preferably a microorganism, a plant cell, a plant or a part thereof, as compared to a corresponding non-transformed wild type non-human organism or a part thereof; and
[79592] (b) growing the non-human organism or a part thereof under conditions which permit the production of glucose or a composition comprising glucose in said non-human organism or in the culture medium surrounding said non-human organism.

[79593] Accordingly, the present invention relates to a process for the production of raffinose, which comprises
[79594] (a) increasing or generating one or more activities selected from the group consisting of eukaryotic translation initiation factor 5 in a non-human organism or a part thereof, preferably a microorganism, a plant cell, a plant or a part thereof, as compared to a corresponding non-transformed wild type non-human organism or a part thereof; and
[79595] (b) growing the non-human organism or a part thereof under conditions which permit the production of raffinose or a composition comprising raffinose in said non-human organism or in the culture medium surrounding said non-human organism.

[79596] Accordingly, the present invention relates to a process for the production of sucrose, which comprises
[79597] (a) increasing or generating one or more activities selected from the group consisting of transcriptional regulator in a non-human organism or a part thereof, preferably a microorganism, a plant cell, a plant or a part thereof, as compared to a corresponding non-transformed wild type non-human organism or a part thereof; and
[79598] (b) growing the non-human organism or a part thereof under conditions which permit the production of sucrose or a composition comprising sucrose in said non-human organism or in the culture medium surrounding said non-human organism.

[79599] Accordingly, the present invention relates to a process for the production of raffinose, which comprises
[79600] (a) increasing or generating one or more activities selected from the group consisting of galactinol synthase in a non-human organism or a part thereof, preferably a microorganism, a plant cell, a plant or a part thereof, as compared to a corresponding non-transformed wild type non-human organism or a part thereof; and
[79601] (b) growing the non-human organism or a part thereof under conditions which permit the production of raffinose or a composition comprising raffinose in said non-human organism or in the culture medium surrounding said non-human organism.

[79602] Accordingly, the present invention relates to a process for the production of glucose, which comprises
[79603] (a) increasing or generating one or more activities selected from the group consisting of protein phosphatase in a non-human organism or a part thereof, preferably a microorganism, a plant cell, a plant or a part thereof, as compared to a corresponding non-transformed wild type non-human organism or a part thereof; and
[79604] (b) growing the non-human organism or a part thereof under conditions which permit the production of glucose or a composition comprising glucose in said non-human organism or in the culture medium surrounding said non-human organism.

[79605] Accordingly, the present invention relates to a process for the production of glucose-1-phosphate, which comprises
[79606] (a) increasing or generating one or more activities selected from the group consisting of protein phosphatase in a non-human organism or a part thereof, preferably a microorganism, a plant cell, a plant or a part thereof, as compared to a corresponding non-transformed wild type non-human organism or a part thereof; and
[79607] (b) growing the non-human organism or a part thereof under conditions which permit the production of glucose-1-phosphate or a composition comprising glucose-1-phosphate in said non-human organism or in the culture medium surrounding said non-human organism.

[79608] Accordingly, the present invention relates to a process for the production of myo-inositol, which comprises
[79609] (a) increasing or generating one or more activities selected from the group consisting of protein phosphatase in a non-human organism or a part thereof, preferably a microorganism, a plant cell, a plant or a part thereof, as compared to a corresponding non-transformed wild type non-human organism or a part thereof; and
[79610] (b) growing the non-human organism or a part thereof under conditions which permit the production of myo-inositol or a composition comprising myo-inositol in said non-human organism or in the culture medium surrounding said non-human organism.

[79611] Accordingly, the present invention relates to a process for the production of raffinose, which comprises
[79612] (a) increasing or generating one or more activities selected from the group consisting of protein phosphatase in a non-human organism or a part thereof, preferably a microorganism, a plant cell, a plant or a part thereof, as compared to a corresponding non-transformed wild type non-human organism or a part thereof; and
[79613] (b) growing the non-human organism or a part thereof under conditions which permit the production of raffinose or a composition comprising raffinose in said non-human organism or in the culture medium surrounding said non-human organism.

[79614] Accordingly, the present invention relates to a process for the production of sucrose, which comprises
[79615] (a) increasing or generating one or more activities selected from the group consisting of protein phosphatase in a non-human organism or a part thereof, preferably a microorganism, a plant cell, a plant or a part thereof, as compared to a corresponding non-transformed wild type non-human organism or a part thereof; and
[79616] (b) growing the non-human organism or a part thereof under conditions which permit the production of sucrose or a composition comprising sucrose in said non-human organism or in the culture medium surrounding said non-human organism.

[79617] Accordingly, the present invention relates to a process for the production of saccharic acid, which comprises
[79618] (a) increasing or generating one or more activities selected from the group consisting of protein phosphatase in a non-human organism or a part thereof, preferably a microorganism, a plant cell, a plant or a part thereof, as compared to a corresponding non-transformed wild type non-human organism or a part thereof; and
[79619] (b) growing the non-human organism or a part thereof under conditions which permit the production of saccharic acid or a composition comprising saccharic acid in said non-human organism or in the culture medium surrounding said non-human organism.

[79620] Accordingly, the present invention relates to a process for the production of fructose, which comprises
[79621] (a) increasing or generating one or more activities selected from the group consisting of transcription factor in a non-human organism or a part thereof, preferably a microorganism, a plant cell, a plant or a part thereof, as compared to a corresponding non-transformed wild type non-human organism or a part thereof; and
[79622] (b) growing the non-human organism or a part thereof under conditions which permit the production of fructose or a composition comprising fructose in said non-human organism or in the culture medium surrounding said non-human organism.

[79623] Accordingly, the present invention relates to a process for the production of glucose, which comprises
[79624] (a) increasing or generating one or more activities selected from the group consisting of transcription factor in a non-human organism or a part thereof, preferably a microorganism, a plant cell, a plant or a part thereof, as compared to a corresponding non-transformed wild type non-human organism or a part thereof; and
[79625] (b) growing the non-human organism or a part thereof under conditions which permit the production of glucose or a composition comprising glucose in said non-human organism or in the culture medium surrounding said non-human organism.

[79626] Accordingly, the present invention relates to a process for the production of glucose-1-phosphate, which comprises
[79627] (a) increasing or generating one or more activities selected from the group consisting of transcription factor in a non-human organism or a part thereof, preferably a microorganism, a plant cell, a plant or a part thereof, as compared to a corresponding non-transformed wild type non-human organism or a part thereof; and
[79628] (b) growing the non-human organism or a part thereof under conditions which permit the production of glucose-1-phosphate or a composition comprising glucose-1-phosphate in said non-human organism or in the culture medium surrounding said non-human organism.

[79629] Accordingly, the present invention relates to a process for the production of glucose-1-phosphate, which comprises
[79630] (a) increasing or generating one or more activities selected from the group consisting of protein phosphatase in a non-human organism or a part thereof, preferably a microorganism, a plant cell, a plant or a part thereof, as compared to a corresponding non-transformed wild type non-human organism or a part thereof; and
[79631] (b) growing the non-human organism or a part thereof under conditions which permit the production of glucose-1-phosphate or a composition comprising glucose-1-phosphate in said non-human organism or in the culture medium surrounding said non-human organism.

[79632] Accordingly, the present invention relates to a process for the production of saccharic acid, which comprises
[79633] (a) increasing or generating one or more activities selected from the group consisting of glutaredoxin in a non-human organism or a part thereof, preferably a microorganism, a plant cell, a plant or a part thereof, as compared to a corresponding non-transformed wild type non-human organism or a part thereof; and
[79634] (b) growing the non-human organism or a part thereof under conditions which permit the production of saccharic acid or a composition comprising saccharic acid in said non-human organism or in the culture medium surrounding said non-human organism.

[79635] Accordingly, the present invention relates to a process for the production of fructose, which comprises
[79636] (a) increasing or generating one or more activities selected from the group consisting of CBL-interacting protein kinase in a non-human organism or a part thereof, preferably a microorganism, a plant cell, a plant or a part thereof, as compared to a corresponding non-transformed wild type non-human organism or a part thereof; and
[79637] (b) growing the non-human organism or a part thereof under conditions which permit the production of fructose or a composition comprising fructose in said non-human organism or in the culture medium surrounding said non-human organism.

[79638] Accordingly, the present invention relates to a process for the production of glucose, which comprises
[79639] (a) increasing or generating one or more activities selected from the group consisting of CBL-interacting protein kinase in a non-human organism or a part thereof, preferably a microorganism, a plant cell, a plant or a part thereof, as compared to a corresponding non-transformed wild type non-human organism or a part thereof; and
[79640] (b) growing the non-human organism or a part thereof under conditions which permit the production of glucose or a composition comprising glucose in said non-human organism or in the culture medium surrounding said non-human organism.

[79641] Accordingly, the present invention relates to a process for the production of sedoheptulose-7-phosphate, which comprises
[79642] (a) increasing or generating one or more activities selected from the group consisting of CBL-interacting protein kinase in a non-human organism or a part thereof, preferably a microorganism, a plant cell, a plant or a part thereof, as compared to a corresponding non-transformed wild type non-human organism or a part thereof; and
[79643] (b) growing the non-human organism or a part thereof under conditions which permit the production of sedoheptulose-7-phosphate or a composition comprising sedoheptulose-7-phosphate in said non-human organism or in the culture medium surrounding said non-human organism.

[79644] Accordingly, the present invention relates to a process for the production of glucose-1-phosphate, which comprises
[79645] (a) increasing or generating one or more activities selected from the group consisting of phenylalanine ammonia-lyase in a non-human organism or a part thereof, preferably a microorganism, a plant cell, a plant or a part thereof, as compared to a corresponding non-transformed wild type non-human organism or a part thereof; and
[79646] (b) growing the non-human organism or a part thereof under conditions which permit the production of glucose-1-phosphate or a composition comprising glucose-1-phosphate in said non-human organism or in the culture medium surrounding said non-human organism.

[79647] Accordingly, the present invention relates to a process for the production of glucose-1-phosphate, which comprises
[79648] (a) increasing or generating one or more activities selected from the group consisting of MADS box protein transcription factor in a non-human organism or a part thereof, preferably a microorganism, a plant cell, a plant or a part thereof, as compared to a corresponding non-transformed wild type non-human organism or a part thereof; and
[79649] (b) growing the non-human organism or a part thereof under conditions which permit the production of glucose-1-phosphate or a composition comprising glucose-1-phosphate in said non-human organism or in the culture medium surrounding said non-human organism.

[79650] Accordingly, the present invention relates to a process for the production of myo-inositol, which comprises
[79651] (a) increasing or generating one or more activities selected from the group consisting of At2g45420-protein in a non-human organism or a part thereof, preferably a microorganism, a plant cell, a plant or a part thereof, as compared to a corresponding non-transformed wild type non-human organism or a part thereof; and
[79652] (b) growing the non-human organism or a part thereof under conditions which permit the production of myo-inositol or a composition comprising myo-inositol in said non-human organism or in the culture medium surrounding said non-human organism.

[79653] Accordingly, the present invention relates to a process for the production of glucose-1-phosphate, which comprises
[79654] (a) increasing or generating one or more activities selected from the group consisting of phosphatidylinositol 3- and 4-kinase family protein in a non-human organism or a part thereof, preferably a microorganism, a plant cell, a plant or a part thereof, as compared to a corresponding non-transformed wild type non-human organism or a part thereof; and
[79655] (b) growing the non-human organism or a part thereof under conditions which permit the production of glucose-1-phosphate or a composition comprising glucose-1-phosphate in said non-human organism or in the culture medium surrounding said non-human organism.

[79656] Accordingly, the present invention relates to a process for the production of raffinose, which comprises
[79657] (a) increasing or generating one or more activities selected from the group consisting of galactinol synthase in a non-human organism or a part thereof, preferably a microorganism, a plant cell, a plant or a part thereof, as compared to a corresponding non-transformed wild type non-human organism or a part thereof; and
[79658] (b) growing the non-human organism or a part thereof under conditions which permit the production of raffinose or a composition comprising raffinose in said non-human organism or in the culture medium surrounding said non-human organism.

[79659] Accordingly, the present invention relates to a process for the production of raffinose, which comprises
[79660] (a) increasing or generating one or more activities selected from the group consisting of galactinol synthase in a non-human organism or a part thereof, preferably a microorganism, a plant cell, a plant or a part thereof, as compared to a corresponding non-transformed wild type non-human organism or a part thereof; and
[79661] (b) growing the non-human organism or a part thereof under conditions which permit the production of raffinose or a composition comprising raffinose in said non-human organism or in the culture medium surrounding said non-human organism.

[79662] Accordingly, the present invention relates to a process for the production of fructose, which comprises
[79663] (a) increasing or generating one or more activities selected from the group consisting of heat shock transcription factor in a non-human organism or a part thereof, preferably a microorganism, a plant cell, a plant or a part thereof, as compared to a corresponding non-transformed wild type non-human organism or a part thereof; and
[79664] (b) growing the non-human organism or a part thereof under conditions which permit the production of fructose or a composition comprising fructose in said non-human organism or in the culture medium surrounding said non-human organism.

[79665] Accordingly, the present invention relates to a process for the production of glucose, which comprises
[79666] (a) increasing or generating one or more activities selected from the group consisting of heat shock transcription factor in a non-human organism or a part thereof, preferably a microorganism, a plant cell, a plant or a part thereof, as compared to a corresponding non-transformed wild type non-human organism or a part thereof; and
[79667] (b) growing the non-human organism or a part thereof under conditions which permit the production of glucose or a composition comprising glucose in said non-human organism or in the culture medium surrounding said non-human organism.

[79668] Accordingly, the present invention relates to a process for the production of myo-inositol, which comprises
[79669] (a) increasing or generating one or more activities selected from the group consisting of heat shock transcription factor in a non-human organism or a part thereof, preferably a microorganism, a plant cell, a plant or a part thereof, as compared to a corresponding non-transformed wild type non-human organism or a part thereof; and
[79670] (b) growing the non-human organism or a part thereof under conditions which permit the production of myo-inositol or a composition comprising myo-inositol in said non-human organism or in the culture medium surrounding said non-human organism.

[79671] Accordingly, the present invention relates to a process for the production of raffinose, which comprises
[79672] (a) increasing or generating one or more activities selected from the group consisting of heat shock transcription factor in a non-human organism or a part thereof, preferably a microorganism, a plant cell, a plant or a part thereof, as compared to a corresponding non-transformed wild type non-human organism or a part thereof; and
[79673] (b) growing the non-human organism or a part thereof under conditions which permit the production of raffinose or a composition comprising raffinose in said non-human organism or in the culture medium surrounding said non-human organism.

[79674] Accordingly, the present invention relates to a process for the production of fructose, which comprises
[79675] (a) increasing or generating one or more activities selected from the group consisting of pyruvate kinase in a non-human organism or a part thereof, preferably a microorganism, a plant cell, a plant or a part thereof, as compared to a corresponding non-transformed wild type non-human organism or a part thereof; and
[79676] (b) growing the non-human organism or a part thereof under conditions which permit the production of fructose or a composition comprising fructose in said non-human organism or in the culture medium surrounding said non-human organism.

[79677] Accordingly, the present invention relates to a process for the production of glucose, which comprises
[79678] (a) increasing or generating one or more activities selected from the group consisting of protein phosphatase in a non-human organism or a part thereof, preferably a microorganism, a plant cell, a plant or a part thereof, as compared to a corresponding non-transformed wild type non-human organism or a part thereof; and
[79679] (b) growing the non-human organism or a part thereof under conditions which permit the production of glucose or a composition comprising glucose in said non-human organism or in the culture medium surrounding said non-human organism.

[79680] Accordingly, the present invention relates to a process for the production of myo-inositol, which comprises
[79681] (a) increasing or generating one or more activities selected from the group consisting of protein phosphatase in a non-human organism or a part thereof, preferably a microorganism, a plant cell, a plant or a part thereof, as compared to a corresponding non-transformed wild type non-human organism or a part thereof; and
[79682] (b) growing the non-human organism or a part thereof under conditions which permit the production of myo-inositol or a composition comprising myo-inositol in said non-human organism or in the culture medium surrounding said non-human organism.

[79683] Accordingly, the present invention relates to a process for the production of fructose, which comprises
[79684] (a) increasing or generating one or more activities selected from the group consisting of thioredoxin family protein in a non-human organism or a part thereof, preferably a microorganism, a plant cell, a plant or a part thereof, as compared to a corresponding non-transformed wild type non-human organism or a part thereof; and
[79685] (b) growing the non-human organism or a part thereof under conditions which permit the production of fructose or a composition comprising fructose in said non-human organism or in the culture medium surrounding said non-human organism.

[79686] Accordingly, the present invention relates to a process for the production of glucose, which comprises
[79687] (a) increasing or generating one or more activities selected from the group consisting of thioredoxin family protein in a non-human organism or a part thereof, preferably a microorganism, a plant cell, a plant or a part thereof, as compared to a corresponding non-transformed wild type non-human organism or a part thereof; and
[79688] (b) growing the non-human organism or a part thereof under conditions which permit the production of glucose or a composition comprising glucose in said non-human organism or in the culture medium surrounding said non-human organism.

[79689] Accordingly, the present invention relates to a process for the production of myo-inositol, which comprises
[79690] (a) increasing or generating one or more activities selected from the group consisting of thioredoxin family protein in a non-human organism or a part thereof, preferably a microorganism, a plant cell, a plant or a part thereof, as compared to a corresponding non-transformed wild type non-human organism or a part thereof; and
[79691] (b) growing the non-human organism or a part thereof under conditions which permit the production of myo-inositol or a composition comprising myo-inositol in said non-human organism or in the culture medium surrounding said non-human organism.

[79692] Accordingly, the present invention relates to a process for the production of saccharic acid, which comprises
[79693] (a) increasing or generating one or more activities selected from the group consisting of DNA binding protein in a non-human organism or a part thereof, preferably a microorganism, a plant cell, a plant or a part thereof, as compared to a corresponding non-transformed wild type non-human organism or a part thereof; and
[79694] (b) growing the non-human organism or a part thereof under conditions which permit the production of saccharic acid or a composition comprising saccharic acid in said non-human organism or in the culture medium surrounding said non-human organism.

[79695] Accordingly, the present invention relates to a process for the production of glucose-1-phosphate, which comprises
[79696] (a) increasing or generating one or more activities selected from the group consisting of CCAAT-binding transcription factor in a non-human organism or a part thereof, preferably a microorganism, a plant cell, a plant or a part thereof, as compared to a corresponding non-transformed wild type non-human organism or a part thereof; and
[79697] (b) growing the non-human organism or a part thereof under conditions which permit the production of glucose-1-phosphate or a composition comprising glucose-1-phosphate in said non-human organism or in the culture medium surrounding said non-human organism.

[79698] Accordingly, the present invention relates to a process for the production of raffinose, which comprises
[79699] (a) increasing or generating one or more activities selected from the group consisting of CCAAT-binding transcription factor in a non-human organism or a part thereof, preferably a microorganism, a plant cell, a plant or a part thereof, as compared to a corresponding non-transformed wild type non-human organism or a part thereof; and
[79700] (b) growing the non-human organism or a part thereof under conditions which permit the production of raffinose or a composition comprising raffinose in said non-human organism or in the culture medium surrounding said non-human organism.

[79701] Accordingly, the present invention relates to a process for the production of fructose, which comprises
[79702] (a) increasing or generating one or more activities selected from the group consisting of protein kinase in a non-human organism or a part thereof, preferably a microorganism, a plant cell, a plant or a part thereof, as compared to a corresponding non-transformed wild type non-human organism or a part thereof; and
[79703] (b) growing the non-human organism or a part thereof under conditions which permit the production of fructose or a composition comprising fructose in said non-human organism or in the culture medium surrounding said non-human organism.

[79704] Accordingly, the present invention relates to a process for the production of glucose, which comprises
[79705] (a) increasing or generating one or more activities selected from the group consisting of protein kinase in a non-human organism or a part thereof, preferably a microorganism, a plant cell, a plant or a part thereof, as compared to a corresponding non-transformed wild type non-human organism or a part thereof; and
[79706] (b) growing the non-human organism or a part thereof under conditions which permit the production of glucose or a composition comprising glucose in said non-human organism or in the culture medium surrounding said non-human organism.

[79707] Accordingly, the present invention relates to a process for the production of sedoheptulose-7-phosphate, which comprises
[79708] (a) increasing or generating one or more activities selected from the group consisting of protein kinase in a non-human organism or a part thereof, preferably a microorganism, a plant cell, a plant or a part thereof, as compared to a corresponding non-transformed wild type non-human organism or a part thereof; and
[79709] (b) growing the non-human organism or a part thereof under conditions which permit the production of sedoheptulose-7-phosphate or a composition comprising sedoheptulose-7-phosphate in said non-human organism or in the culture medium surrounding said non-human organism.

[79710] Accordingly, the present invention relates to a process for the production of fructose, which comprises
[79711] (a) increasing or generating one or more activities selected from the group consisting of eukaryotic translation initiation factor in a non-human organism or a part thereof, preferably a microorganism, a plant cell, a plant or a part thereof, as compared to a corresponding non-transformed wild type non-human organism or a part thereof; and
[79712] (b) growing the non-human organism or a part thereof under conditions which permit the production of fructose or a composition comprising fructose in said non-human organism or in the culture medium surrounding said non-human organism.

[79713] Accordingly, the present invention relates to a process for the production of glucose, which comprises
[79714] (a) increasing or generating one or more activities selected from the group consisting of eukaryotic translation initiation factor in a non-human organism or a part thereof, preferably a microorganism, a plant cell, a plant or a part thereof, as compared to a corresponding non-transformed wild type non-human organism or a part thereof; and
[79715] (b) growing the non-human organism or a part thereof under conditions which permit the production of glucose or a composition comprising glucose in said non-human organism or in the culture medium surrounding said non-human organism.

[79716] Accordingly, the present invention relates to a process for the production of raffinose, which comprises
[79717] (a) increasing or generating one or more activities selected from the group consisting of eukaryotic translation initiation factor in a non-human organism or a part thereof, preferably a microorganism, a plant cell, a plant or a part thereof, as compared to a corresponding non-transformed wild type non-human organism or a part thereof; and
[79718] (b) growing the non-human organism or a part thereof under conditions which permit the production of raffinose or a composition comprising raffinose in said non-human organism or in the culture medium surrounding said non-human organism.

[79719] Accordingly, the present invention relates to a process for the production of myo-inositol, which comprises
[79720] (a) increasing or generating one or more activities selected from the group consisting of mitogen-activated protein kinase in a non-human organism or a part thereof, preferably a microorganism, a plant cell, a plant or a part thereof, as compared to a corresponding non-transformed wild type non-human organism or a part thereof; and
[79721] (b) growing the non-human organism or a part thereof under conditions which permit the production of myo-inositol or a composition comprising myo-inositol in said non-human organism or in the culture medium surrounding said non-human organism.

[79722] Accordingly, the present invention relates to a process for the production of sedoheptulose-7-phosphate, which comprises
[79723] (a) increasing or generating one or more activities selected from the group consisting of auxin response factor in a non-human organism or a part thereof, preferably a microorganism, a plant cell, a plant or a part thereof, as compared to a corresponding non-transformed wild type non-human organism or a part thereof; and
[79724] (b) growing the non-human organism or a part thereof under conditions which permit the production of sedoheptulose-7-phosphate or a composition comprising sedoheptulose-7-phosphate in said non-human organism or in the culture medium surrounding said non-human organism.

[79725] Accordingly, the present invention relates to a process for the production of fructose, which comprises
[79726] (a) increasing or generating one or more activities selected from the group consisting of monthiol glutaredoxin in a non-human organism or a part thereof, preferably a microorganism, a plant cell, a plant or a part thereof, as compared to a corresponding non-transformed wild type non-human organism or a part thereof; and
[79727] (b) growing the non-human organism or a part thereof under conditions which permit the production of fructose or a composition comprising fructose in said non-human organism or in the culture medium surrounding said non-human organism.

[79728] Accordingly, the present invention relates to a process for the production of glucose, which comprises
[79729] (a) increasing or generating one or more activities selected from the group consisting of monthiol glutaredoxin in a non-human organism or a part thereof, preferably a microorganism, a plant cell, a plant or a part thereof, as compared to a corresponding non-transformed wild type non-human organism or a part thereof; and
[79730] (b) growing the non-human organism or a part thereof under conditions which permit the production of glucose or a composition comprising glucose in said non-human organism or in the culture medium surrounding said non-human organism.

[79731] Accordingly, the present invention relates to a process for the production of glucose-1-phosphate, which comprises
[79732] (a) increasing or generating one or more activities selected from the group consisting of monthiol glutaredoxin in a non-human organism or a part thereof, preferably a microorganism, a plant cell, a plant or a part thereof, as compared to a corresponding non-transformed wild type non-human organism or a part thereof; and
[79733] (b) growing the non-human organism or a part thereof under conditions which permit the production of glucose-1-phosphate or a composition comprising glucose-1-phosphate in said non-human organism or in the culture medium surrounding said non-human organism.

[79734] Accordingly, the present invention relates to a process for the production of myo-inositol, which comprises
[79735] (a) increasing or generating one or more activities selected from the group consisting of monthiol glutaredoxin in a non-human organism or a part thereof, preferably a microorganism, a plant cell, a plant or a part thereof, as compared to a corresponding non-transformed wild type non-human organism or a part thereof; and
[79736] (b) growing the non-human organism or a part thereof under conditions which permit the production of myo-inositol or a composition comprising myo-inositol in said non-human organism or in the culture medium surrounding said non-human organism.

[79737] Accordingly, the present invention relates to a process for the production of sedoheptulose-7-phosphate, which comprises
[79738] (a) increasing or generating one or more activities selected from the group consisting of monthiol glutaredoxin in a non-human organism or a part thereof, preferably a microorganism, a plant cell, a plant or a part thereof, as compared to a corresponding non-transformed wild type non-human organism or a part thereof; and
[79739] (b) growing the non-human organism or a part thereof under conditions which permit the production of sedoheptulose-7-phosphate or a composition comprising sedoheptulose-7-phosphate in said non-human organism or in the culture medium surrounding said non-human organism.

[79740] Accordingly, the present invention relates to a process for the production of sucrose, which comprises
[79741] (a) increasing or generating one or more activities selected from the group consisting of monthiol glutaredoxin in a non-human organism or a part thereof, preferably a microorganism, a plant cell, a plant or a part thereof, as compared to a corresponding non-transformed wild type non-human organism or a part thereof; and
[79742] (b) growing the non-human organism or a part thereof under conditions which permit the production of sucrose or a composition comprising sucrose in said non-human organism or in the culture medium surrounding said non-human organism.

[79743] Accordingly, the present invention relates to a process for the production of fructose, which comprises
[79744] (a) increasing or generating one or more activities selected from the group consisting of glutaredoxin in a non-human organism or a part thereof, preferably a microorganism, a plant cell, a plant or a part thereof, as compared to a corresponding non-transformed wild type non-human organism or a part thereof; and
[79745] (b) growing the non-human organism or a part thereof under conditions which permit the production of fructose or a composition comprising fructose in said non-human organism or in the culture medium surrounding said non-human organism.

[79746] Accordingly, the present invention relates to a process for the production of glucose, which comprises
[79747] (a) increasing or generating one or more activities selected from the group consisting of glutaredoxin in a non-human organism or a part thereof, preferably a microorganism, a plant cell, a plant or a part thereof, as compared to a corresponding non-transformed wild type non-human organism or a part thereof; and
[79748] (b) growing the non-human organism or a part thereof under conditions which permit the production of glucose or a composition comprising glucose in said non-human organism or in the culture medium surrounding said non-human organism.

[79749] Accordingly, the present invention relates to a process for the production of glucose-1-phosphate, which comprises
[79750] (a) increasing or generating one or more activities selected from the group consisting of glutaredoxin in a non-human organism or a part thereof, preferably a microorganism, a plant cell, a plant or a part thereof, as compared to a corresponding non-transformed wild type non-human organism or a part thereof; and
[79751] (b) growing the non-human organism or a part thereof under conditions which permit the production of glucose-1-phosphate or a composition comprising glucose-1-phosphate in said non-human organism or in the culture medium surrounding said non-human organism.

[79752] Accordingly, the present invention relates to a process for the production of myo-inositol, which comprises
[79753] (a) increasing or generating one or more activities selected from the group consisting of glutaredoxin in a non-human organism or a part thereof, preferably a microorganism, a plant cell, a plant or a part thereof, as compared to a corresponding non-transformed wild type non-human organism or a part thereof; and
[79754] (b) growing the non-human organism or a part thereof under conditions which permit the production of myo-inositol or a composition comprising myo-inositol in said non-human organism or in the culture medium surrounding said non-human organism.

[79755] Accordingly, the present invention relates to a process for the production of sedoheptulose-7-phosphate, which comprises
[79756] (a) increasing or generating one or more activities selected from the group consisting of glutaredoxin in a non-human organism or a part thereof, preferably a microorganism, a plant cell, a plant or a part thereof, as compared to a corresponding non-transformed wild type non-human organism or a part thereof; and
[79757] (b) growing the non-human organism or a part thereof under conditions which permit the production of sedoheptulose-7-phosphate or a composition comprising sedoheptulose-7-phosphate in said non-human organism or in the culture medium surrounding said non-human organism.

[79758] Accordingly, the present invention relates to a process for the production of sucrose, which comprises
[79759] (a) increasing or generating one or more activities selected from the group consisting of glutaredoxin in a non-human organism or a part thereof, preferably a microorganism, a plant cell, a plant or a part thereof, as compared to a corresponding non-transformed wild type non-human organism or a part thereof; and
[79760] (b) growing the non-human organism or a part thereof under conditions which permit the production of sucrose or a composition comprising sucrose in said non-human organism or in the culture medium surrounding said non-human organism.

[79761] Accordingly, the present invention relates to a process for the production of glucose-1-phosphate, which comprises
[79762] (a) increasing or generating one or more activities selected from the group consisting of transcription factor in a non-human organism or a part thereof, preferably a microorganism, a plant cell, a plant or a part thereof, as compared to a corresponding non-transformed wild type non-human organism or a part thereof; and
[79763] (b) growing the non-human organism or a part thereof under conditions which permit the production of glucose-1-phosphate or a composition comprising glucose-1-phosphate in said non-human organism or in the culture medium surrounding said non-human organism.

[79764] Accordingly, the present invention relates to a process for the production of fructose, which comprises
[79765] (a) increasing or generating one or more activities selected from the group consisting of monothiol glutaredoxin in a non-human organism or a part thereof, preferably a microorganism, a plant cell, a plant or a part thereof, as compared to a corresponding non-transformed wild type non-human organism or a part thereof; and
[79766] (b) growing the non-human organism or a part thereof under conditions which permit the production of fructose or a composition comprising fructose in said non-human organism or in the culture medium surrounding said non-human organism.

[79767] Accordingly, the present invention relates to a process for the production of glucose, which comprises
[79768] (a) increasing or generating one or more activities selected from the group consisting of monothiol glutaredoxin in a non-human organism or a part thereof, preferably a microorganism, a plant cell, a plant or a part thereof, as compared to a corresponding non-transformed wild type non-human organism or a part thereof; and
[79769] (b) growing the non-human organism or a part thereof under conditions which permit the production of glucose or a composition comprising glucose in said non-human organism or in the culture medium surrounding said non-human organism.

[79770] Accordingly, the present invention relates to a process for the production of glucose-1-phosphate, which comprises
[79771] (a) increasing or generating one or more activities selected from the group consisting of monothiol glutaredoxin in a non-human organism or a part thereof, preferably a microorganism, a plant cell, a plant or a part thereof, as compared to a corresponding non-transformed wild type non-human organism or a part thereof; and
[79772] (b) growing the non-human organism or a part thereof under conditions which permit the production of glucose-1-phosphate or a composition comprising glucose-1-phosphate in said non-human organism or in the culture medium surrounding said non-human organism.

[79773] Accordingly, the present invention relates to a process for the production of myo-inositol, which comprises
[79774] (a) increasing or generating one or more activities selected from the group consisting of monothiol glutaredoxin in a non-human organism or a part thereof, preferably a microorganism, a plant cell, a plant or a part thereof, as compared to a corresponding non-transformed wild type non-human organism or a part thereof; and
[79775] (b) growing the non-human organism or a part thereof under conditions which permit the production of myo-inositol or a composition comprising myo-inositol in said non-human organism or in the culture medium surrounding said non-human organism.

[79776] Accordingly, the present invention relates to a process for the production of sedoheptulose-7-phosphate, which comprises
[79777] (a) increasing or generating one or more activities selected from the group consisting of monothiol glutaredoxin in a non-human organism or a part thereof, preferably a microorganism, a plant cell, a plant or a part thereof, as compared to a corresponding non-transformed wild type non-human organism or a part thereof; and
[79778] (b) growing the non-human organism or a part thereof under conditions which permit the production of sedoheptulose-7-phosphate or a composition comprising sedoheptulose-7-phosphate in said non-human organism or in the culture medium surrounding said non-human organism.

[79779] Accordingly, the present invention relates to a process for the production of sucrose, which comprises
[79780] (a) increasing or generating one or more activities selected from the group consisting of monothiol glutaredoxin in a non-human organism or a part thereof, preferably a microorganism, a plant cell, a plant or a part thereof, as compared to a corresponding non-transformed wild type non-human organism or a part thereof; and
[79781] (b) growing the non-human organism or a part thereof under conditions which permit the production of sucrose or a composition comprising sucrose in said non-human organism or in the culture medium surrounding said non-human organism.

[79782] Accordingly, the present invention relates to a process for the production of fructose, which comprises
[79783] (a) increasing or generating one or more activities selected from the group consisting of monothiol glutaredoxin in a non-human organism or a part thereof, preferably a microorganism, a plant cell, a plant or a part thereof, as compared to a corresponding non-transformed wild type non-human organism or a part thereof; and
[79784] (b) growing the non-human organism or a part thereof under conditions which permit the production of fructose or a composition comprising fructose in said non-human organism or in the culture medium surrounding said non-human organism.

[79785] Accordingly, the present invention relates to a process for the production of glucose, which comprises
[79786] (a) increasing or generating one or more activities selected from the group consisting of monothiol glutaredoxin in a non-human organism or a part thereof, preferably a microorganism, a plant cell, a plant or a part thereof, as compared to a corresponding non-transformed wild type non-human organism or a part thereof; and
[79787] (b) growing the non-human organism or a part thereof under conditions which permit the production of glucose or a composition comprising glucose in said non-human organism or in the culture medium surrounding said non-human organism.

[79788] Accordingly, the present invention relates to a process for the production of glucose-1-phosphate, which comprises
[79789] (a) increasing or generating one or more activities selected from the group consisting of monothiol glutaredoxin in a non-human organism or a part thereof, preferably a microorganism, a plant cell, a plant or a part thereof, as compared to a corresponding non-transformed wild type non-human organism or a part thereof; and
[79790] (b) growing the non-human organism or a part thereof under conditions which permit the production of glucose-1-phosphate or a composition comprising glucose-1-phosphate in said non-human organism or in the culture medium surrounding said non-human organism.

[79791] Accordingly, the present invention relates to a process for the production of myo-inositol, which comprises
[79792] (a) increasing or generating one or more activities selected from the group consisting of monothiol glutaredoxin in a non-human organism or a part thereof, preferably a microorganism, a plant cell, a plant or a part thereof, as compared to a corresponding non-transformed wild type non-human organism or a part thereof; and
[79793] (b) growing the non-human organism or a part thereof under conditions which permit the production of myo-inositol or a composition comprising myo-inositol in said non-human organism or in the culture medium surrounding said non-human organism.

[79794] Accordingly, the present invention relates to a process for the production of sedoheptulose-7-phosphate, which comprises
[79795] (a) increasing or generating one or more activities selected from the group consisting of monothiol glutaredoxin in a non-human organism or a part thereof, preferably a microorganism, a plant cell, a plant or a part thereof, as compared to a corresponding non-transformed wild type non-human organism or a part thereof; and
[79796] (b) growing the non-human organism or a part thereof under conditions which permit the production of sedoheptulose-7-phosphate or a composition comprising sedoheptulose-7-phosphate in said non-human organism or in the culture medium surrounding said non-human organism.

[79797] Accordingly, the present invention relates to a process for the production of sucrose, which comprises
[79798] (a) increasing or generating one or more activities selected from the group consisting of monothiol glutaredoxin in a non-human organism or a part thereof, preferably a microorganism, a plant cell, a plant or a part thereof, as compared to a corresponding non-transformed wild type non-human organism or a part thereof; and
[79799] (b) growing the non-human organism or a part thereof under conditions which permit the production of sucrose or a composition comprising sucrose in said non-human organism or in the culture medium surrounding said non-human organism.

[79800] Accordingly, the present invention relates to a process for the production of fructose, which comprises
[79801] (a) increasing or generating one or more activities selected from the group consisting of monothiol glutaredoxin in a non-human organism or a part thereof, preferably a microorganism, a plant cell, a plant or a part thereof, as compared to a corresponding non-transformed wild type non-human organism or a part thereof; and
[79802] (b) growing the non-human organism or a part thereof under conditions which permit the production of fructose or a composition comprising fructose in said non-human organism or in the culture medium surrounding said non-human organism.

[79803] Accordingly, the present invention relates to a process for the production of glucose, which comprises
[79804] (a) increasing or generating one or more activities selected from the group consisting of monothiol glutaredoxin in a non-human organism or a part thereof, preferably a microorganism, a plant cell, a plant or a part thereof, as compared to a corresponding non-transformed wild type non-human organism or a part thereof; and
[79805] (b) growing the non-human organism or a part thereof under conditions which permit the production of glucose or a composition comprising glucose in said non-human organism or in the culture medium surrounding said non-human organism.

[79806] Accordingly, the present invention relates to a process for the production of glucose-1-phosphate, which comprises
[79807] (a) increasing or generating one or more activities selected from the group consisting of monothiol glutaredoxin in a non-human organism or a part thereof, preferably a microorganism, a plant cell, a plant or a part thereof, as compared to a corresponding non-transformed wild type non-human organism or a part thereof; and
[79808] (b) growing the non-human organism or a part thereof under conditions which permit the production of glucose-1-phosphate or a composition comprising glucose-1-phosphate in said non-human organism or in the culture medium surrounding said non-human organism.

[79809] Accordingly, the present invention relates to a process for the production of myo-inositol, which comprises
[79810] (a) increasing or generating one or more activities selected from the group consisting of monothiol glutaredoxin in a non-human organism or a part thereof, preferably a microorganism, a plant cell, a plant or a part thereof, as compared to a corresponding non-transformed wild type non-human organism or a part thereof; and
[79811] (b) growing the non-human organism or a part thereof under conditions which permit the production of myo-inositol or a composition comprising myo-inositol in said non-human organism or in the culture medium surrounding said non-human organism.

[79812] Accordingly, the present invention relates to a process for the production of sucrose, which comprises
[79813] (a) increasing or generating one or more activities selected from the group consisting of monothiol glutaredoxin in a non-human organism or a part thereof, preferably a microorganism, a plant cell, a plant or a part thereof, as compared to a corresponding non-transformed wild type non-human organism or a part thereof; and
[79814] (b) growing the non-human organism or a part thereof under conditions which permit the production of sucrose or a composition comprising sucrose in said non-human organism or in the culture medium surrounding said non-human organism.

[79815] Accordingly, the present invention relates to a process for the production of fructose, which comprises
[79816] (a) increasing or generating one or more activities selected from the group consisting of monothiol glutaredoxin in a non-human organism or a part thereof, preferably a microorganism, a plant cell, a plant or a part thereof, as compared to a corresponding non-transformed wild type non-human organism or a part thereof; and
[79817] (b) growing the non-human organism or a part thereof under conditions which permit the production of fructose or a composition comprising fructose in said non-human organism or in the culture medium surrounding said non-human organism.

[79818] Accordingly, the present invention relates to a process for the production of glucose, which comprises
[79819] (a) increasing or generating one or more activities selected from the group consisting of monothiol glutaredoxin in a non-human organism or a part thereof, preferably a microorganism, a plant cell, a plant or a part thereof, as compared to a corresponding non-transformed wild type non-human organism or a part thereof; and
[79820] (b) growing the non-human organism or a part thereof under conditions which permit the production of glucose or a composition comprising glucose in said non-human organism or in the culture medium surrounding said non-human organism.

[79821] Accordingly, the present invention relates to a process for the production of sedoheptulose-7-phosphate, which comprises
[79822] (a) increasing or generating one or more activities selected from the group consisting of monothiol glutaredoxin in a non-human organism or a part thereof, preferably a microorganism, a plant cell, a plant or a part thereof, as compared to a corresponding non-transformed wild type non-human organism or a part thereof; and
[79823] (b) growing the non-human organism or a part thereof under conditions which permit the production of sedoheptulose-7-phosphate or a composition comprising sedoheptulose-7-phosphate in said non-human organism or in the culture medium surrounding said non-human organism.

[79824] Accordingly, the present invention relates to a process for the production of sucrose, which comprises
[79825] (a) increasing or generating one or more activities selected from the group consisting of monothiol glutaredoxin in a non-human organism or a part thereof, preferably a microorganism, a plant cell, a plant or a part thereof, as compared to a corresponding non-transformed wild type non-human organism or a part thereof; and
[79826] (b) growing the non-human organism or a part thereof under conditions which permit the production of sucrose or a composition comprising sucrose in said non-human organism or in the culture medium surrounding said non-human organism.

[79827] Accordingly, the present invention relates to a process for the production of myo-inositol, which comprises
[79828] (a) increasing or generating one or more activities selected from the group consisting of protein phosphatase in a non-human organism or a part thereof, preferably a microorganism, a plant cell, a plant or a part thereof, as compared to a corresponding non-transformed wild type non-human organism or a part thereof; and
[79829] (b) growing the non-human organism or a part thereof under conditions which permit the production of myo-inositol or a composition comprising myo-inositol in said non-human organism or in the culture medium surrounding said non-human organism.

[79830] Accordingly, the present invention relates to a process for the production of fructose, which comprises
[79831] (a) increasing or generating one or more activities selected from the group consisting of glutaredoxin in a non-human organism or a part thereof, preferably a microorganism, a plant cell, a plant or a part thereof, as compared to a corresponding non-transformed wild type non-human organism or a part thereof; and
[79832] (b) growing the non-human organism or a part thereof under conditions which permit the production of fructose or a composition comprising fructose in said non-human organism or in the culture medium surrounding said non-human organism.

[79833] Accordingly, the present invention relates to a process for the production of glucose, which comprises
[79834] (a) increasing or generating one or more activities selected from the group consisting of glutaredoxin in a non-human organism or a part thereof, preferably a microorganism, a plant cell, a plant or a part thereof, as compared to a corresponding non-transformed wild type non-human organism or a part thereof; and
[79835] (b) growing the non-human organism or a part thereof under conditions which permit the production of glucose or a composition comprising glucose in said non-human organism or in the culture medium surrounding said non-human organism.

[79836] Accordingly, the present invention relates to a process for the production of glucose-1-phosphate, which comprises
[79837] (a) increasing or generating one or more activities selected from the group consisting of glutaredoxin in a non-human organism or a part thereof, preferably a microorganism, a plant cell, a plant or a part thereof, as compared to a corresponding non-transformed wild type non-human organism or a part thereof; and
[79838] (b) growing the non-human organism or a part thereof under conditions which permit the production of glucose-1-phosphate or a composition comprising glucose-1-phosphate in said non-human organism or in the culture medium surrounding said non-human organism.

[79839] Accordingly, the present invention relates to a process for the production of myo-inositol, which comprises
[79840] (a) increasing or generating one or more activities selected from the group consisting of glutaredoxin in a non-human organism or a part thereof, preferably a microorganism, a plant cell, a plant or a part thereof, as compared to a corresponding non-transformed wild type non-human organism or a part thereof; and
[79841] (b) growing the non-human organism or a part thereof under conditions which permit the production of myo-inositol or a composition comprising myo-inositol in said non-human organism or in the culture medium surrounding said non-human organism.

[79842] Accordingly, the present invention relates to a process for the production of sedoheptulose-7-phosphate, which comprises
[79843] (a) increasing or generating one or more activities selected from the group consisting of glutaredoxin in a non-human organism or a part thereof, preferably a microorganism, a plant cell, a plant or a part thereof, as compared to a corresponding non-transformed wild type non-human organism or a part thereof; and
[79844] (b) growing the non-human organism or a part thereof under conditions which permit the production of sedoheptulose-7-phosphate or a composition comprising sedoheptulose-7-phosphate in said non-human organism or in the culture medium surrounding said non-human organism.

[79845] Accordingly, the present invention relates to a process for the production of sucrose, which comprises
[79846] (a) increasing or generating one or more activities selected from the group consisting of glutaredoxin in a non-human organism or a part thereof, preferably a microorganism, a plant cell, a plant or a part thereof, as compared to a corresponding non-transformed wild type non-human organism or a part thereof; and
[79847] (b) growing the non-human organism or a part thereof under conditions which permit the production of sucrose or a composition comprising sucrose in said non-human organism or in the culture medium surrounding said non-human organism.

[79848] Accordingly, the present invention relates to a process for the production of glucose-1-phosphate, which comprises
[79849] (a) increasing or generating one or more activities selected from the group consisting of cyclin D in a non-human organism or a part thereof, preferably a microorganism, a plant cell, a plant or a part thereof, as compared to a corresponding non-transformed wild type non-human organism or a part thereof; and
[79850] (b) growing the non-human organism or a part thereof under conditions which permit the production of glucose-1-phosphate or a composition comprising glucose-1-phosphate in said non-human organism or in the culture medium surrounding said non-human organism.

[79851] Accordingly, the present invention relates to a process for the production of raffinose, which comprises
[79852] (a) increasing or generating one or more activities selected from the group consisting of cyclin D in a non-human organism or a part thereof, preferably a microorganism, a plant cell, a plant or a part thereof, as compared to a corresponding non-transformed wild type non-human organism or a part thereof; and
[79853] (b) growing the non-human organism or a part thereof under conditions which permit the production of raffinose or a composition comprising raffinose in said non-human organism or in the culture medium surrounding said non-human organism.

[79854] Accordingly, the present invention relates to a process for the production of sucrose, which comprises
[79855] (a) increasing or generating one or more activities selected from the group consisting of cyclin D in a non-human organism or a part thereof, preferably a microorganism, a plant cell, a plant or a part thereof, as compared to a corresponding non-transformed wild type non-human organism or a part thereof; and
[79856] (b) growing the non-human organism or a part thereof under conditions which permit the production of sucrose or a composition comprising sucrose in said non-human organism or in the culture medium surrounding said non-human organism.

[79857] Accordingly, the present invention relates to a process for the production of fructose, which comprises
[79858] (a) increasing or generating one or more activities selected from the group consisting of calcium-dependent protein kinase in a non-human organism or a part thereof, preferably a microorganism, a plant cell, a plant or a part thereof, as compared to a corresponding non-transformed wild type non-human organism or a part thereof; and
[79859] (b) growing the non-human organism or a part thereof under conditions which permit the production of fructose or a composition comprising fructose in said non-human organism or in the culture medium surrounding said non-human organism.

[79860] Accordingly, the present invention relates to a process for the production of glucose-1-phosphate, which comprises
[79861] (a) increasing or generating one or more activities selected from the group consisting of calcium-dependent protein kinase in a non-human organism or a part thereof, preferably a microorganism, a plant cell, a plant or a part thereof, as compared to a corresponding non-transformed wild type non-human organism or a part thereof; and
[79862] (b) growing the non-human organism or a part thereof under conditions which permit the production of glucose-1-phosphate or a composition comprising glucose-1-phosphate in said non-human organism or in the culture medium surrounding said non-human organism.

[79863] Accordingly, the present invention relates to a process for the production of raffinose, which comprises
[79864] (a) increasing or generating one or more activities selected from the group consisting of calcium-dependent protein kinase in a non-human organism or a part thereof, preferably a microorganism, a plant cell, a plant or a part thereof, as compared to a corresponding non-transformed wild type non-human organism or a part thereof; and
[79865] (b) growing the non-human organism or a part thereof under conditions which permit the production of raffinose or a composition comprising raffinose in said non-human organism or in the culture medium surrounding said non-human organism.

[79866] Accordingly, the present invention relates to a process for the production of myo-inositol, which comprises
[79867] (a) increasing or generating one or more activities selected from the group consisting of protein phosphatase in a non-human organism or a part thereof, preferably a microorganism, a plant cell, a plant or a part thereof, as compared to a corresponding non-transformed wild type non-human organism or a part thereof; and
[79868] (b) growing the non-human organism or a part thereof under conditions which permit the production of myo-inositol or a composition comprising myo-inositol in said non-human organism or in the culture medium surrounding said non-human organism.

[79869] Accordingly, the present invention relates to a process for the production of fructose, which comprises
[79870] (a) increasing or generating one or more activities selected from the group consisting of heat shock transcription factor in a non-human organism or a part thereof, preferably a microorganism, a plant cell, a plant or a part thereof, as compared to a corresponding non-transformed wild type non-human organism or a part thereof; and
[79871] (b) growing the non-human organism or a part thereof under conditions which permit the production of fructose or a composition comprising fructose in said non-human organism or in the culture medium surrounding said non-human organism.

[79872] Accordingly, the present invention relates to a process for the production of glucose, which comprises
[79873] (a) increasing or generating one or more activities selected from the group consisting of heat shock transcription factor in a non-human organism or a part thereof, preferably a microorganism, a plant cell, a plant or a part thereof, as compared to a corresponding non-transformed wild type non-human organism or a part thereof; and
[79874] (b) growing the non-human organism or a part thereof under conditions which permit the production of glucose or a composition comprising glucose in said non-human organism or in the culture medium surrounding said non-human organism.

[79875] Accordingly, the present invention relates to a process for the production of glucose-1-phosphate, which comprises
[79876] (a) increasing or generating one or more activities selected from the group consisting of heat shock transcription factor in a non-human organism or a part thereof, preferably a microorganism, a plant cell, a plant or a part thereof, as compared to a corresponding non-transformed wild type non-human organism or a part thereof; and
[79877] (b) growing the non-human organism or a part thereof under conditions which permit the production of glucose-1-phosphate or a composition comprising glucose-1-phosphate in said non-human organism or in the culture medium surrounding said non-human organism.

[79878] Accordingly, the present invention relates to a process for the production of myo-inositol, which comprises
[79879] (a) increasing or generating one or more activities selected from the group consisting of heat shock transcription factor in a non-human organism or a part thereof, preferably a microorganism, a plant cell, a plant or a part thereof, as compared to a corresponding non-transformed wild type non-human organism or a part thereof; and
[79880] (b) growing the non-human organism or a part thereof under conditions which permit the production of myo-inositol or a composition comprising myo-inositol in said non-human organism or in the culture medium surrounding said non-human organism.

[79881] Accordingly, the present invention relates to a process for the production of raffinose, which comprises
[79882] (a) increasing or generating one or more activities selected from the group consisting of heat shock transcription factor in a non-human organism or a part thereof, preferably a microorganism, a plant cell, a plant or a part thereof, as compared to a corresponding non-transformed wild type non-human organism or a part thereof; and
[79883] (b) growing the non-human organism or a part thereof under conditions which permit the production of raffinose or a composition comprising raffinose in said non-human organism or in the culture medium surrounding said non-human organism.

[79884] Accordingly, the present invention relates to a process for the production of sucrose, which comprises
[79885] (a) increasing or generating one or more activities selected from the group consisting of heat shock transcription factor in a non-human organism or a part thereof, preferably a microorganism, a plant cell, a plant or a part thereof, as compared to a corresponding non-transformed wild type non-human organism or a part thereof; and
[79886] (b) growing the non-human organism or a part thereof under conditions which permit the production of sucrose or a composition comprising sucrose in said non-human organism or in the culture medium surrounding said non-human organism.

[79887] Accordingly, the present invention relates to a process for the production of myo-inositol, which comprises
[79888] (a) increasing or generating one or more activities selected from the group consisting of gibberellin 20-oxidase in a non-human organism or a part thereof, preferably a microorganism, a plant cell, a plant or a part thereof, as compared to a corresponding non-transformed wild type non-human organism or a part thereof; and
[79889] (b) growing the non-human organism or a part thereof under conditions which permit the production of myo-inositol or a composition comprising myo-inositol in said non-human organism or in the culture medium surrounding said non-human organism.

[79890] Accordingly, the present invention relates to a process for the production of myo-inositol, which comprises
[79891] (a) increasing or generating one or more activities selected from the group consisting of inositol-3-phosphate synthase in a non-human organism or a part thereof, preferably a microorganism, a plant cell, a plant or a part thereof, as compared to a corresponding non-transformed wild type non-human organism or a part thereof; and
[79892] (b) growing the non-human organism or a part thereof under conditions which permit the production of myo-inositol or a composition comprising myo-inositol in said non-human organism or in the culture medium surrounding said non-human organism.

[79893] Accordingly, the present invention relates to a process for the production of raffinose, which comprises
[79894] (a) increasing or generating one or more activities selected from the group consisting of inositol-3-phosphate synthase in a non-human organism or a part thereof, preferably a microorganism, a plant cell, a plant or a part thereof, as compared to a corresponding non-transformed wild type non-human organism or a part thereof; and
[79895] (b) growing the non-human organism or a part thereof under conditions which permit the production of raffinose or a composition comprising raffinose in said non-human organism or in the culture medium surrounding said non-human organism.

[79896] Accordingly, the present invention relates to a process for the production of glucose, which comprises
[79897] (a) increasing or generating one or more activities selected from the group consisting of glutaredoxin in a non-human organism or a part thereof, preferably a microorganism, a plant cell, a plant or a part thereof, as compared to a corresponding non-transformed wild type non-human organism or a part thereof; and
[79898] (b) growing the non-human organism or a part thereof under conditions which permit the production of glucose or a composition comprising glucose in said non-human organism or in the culture medium surrounding said non-human organism.

[79899] Accordingly, the present invention relates to a process for the production of fructose, which comprises
[79900] (a) increasing or generating one or more activities selected from the group consisting of At5g16650-protein in a non-human organism or a part thereof, preferably a microorganism, a plant cell, a plant or a part thereof, as compared to a corresponding non-transformed wild type non-human organism or a part thereof; and
[79901] (b) growing the non-human organism or a part thereof under conditions which permit the production of fructose or a composition comprising fructose in said non-human organism or in the culture medium surrounding said non-human organism.

[79902] Accordingly, the present invention relates to a process for the production of fructose, which comprises
[79903] (a) increasing or generating one or more activities selected from the group consisting of monothiol glutaredoxin in a non-human organism or a part thereof, preferably a microorganism, a plant cell, a plant or a part thereof, as compared to a corresponding non-transformed wild type non-human organism or a part thereof; and
[79904] (b) growing the non-human organism or a part thereof under conditions which permit the production of fructose or a composition comprising fructose in said non-human organism or in the culture medium surrounding said non-human organism.

[79905] Accordingly, the present invention relates to a process for the production of glucose, which comprises
[79906] (a) increasing or generating one or more activities selected from the group consisting of monothiol glutaredoxin in a non-human organism or a part thereof, preferably a microorganism, a plant cell, a plant or a part thereof, as compared to a corresponding non-transformed wild type non-human organism or a part thereof; and
[79907] (b) growing the non-human organism or a part thereof under conditions which permit the production of glucose or a composition comprising glucose in said non-human organism or in the culture medium surrounding said non-human organism.

[79908] Accordingly, the present invention relates to a process for the production of myo-inositol, which comprises
[79909] (a) increasing or generating one or more activities selected from the group consisting of monothiol glutaredoxin in a non-human organism or a part thereof, preferably a microorganism, a plant cell, a plant or a part thereof, as compared to a corresponding non-transformed wild type non-human organism or a part thereof; and
[79910] (b) growing the non-human organism or a part thereof under conditions which permit the production of myo-inositol or a composition comprising myo-inositol in said non-human organism or in the culture medium surrounding said non-human organism.

[79911] Accordingly, the present invention relates to a process for the production of sedoheptulose-7-phosphate, which comprises
[79912] (a) increasing or generating one or more activities selected from the group consisting of monothiol glutaredoxin in a non-human organism or a part thereof, preferably a microorganism, a plant cell, a plant or a part thereof, as compared to a corresponding non-transformed wild type non-human organism or a part thereof; and
[79913] (b) growing the non-human organism or a part thereof under conditions which permit the production of sedoheptulose-7-phosphate or a composition comprising sedoheptulose-7-phosphate in said non-human organism or in the culture medium surrounding said non-human organism.

[79914] Accordingly, the present invention relates to a process for the production of sucrose, which comprises
[79915] (a) increasing or generating one or more activities selected from the group consisting of monothiol glutaredoxin in a non-human organism or a part thereof, preferably a microorganism, a plant cell, a plant or a part thereof, as compared to a corresponding non-transformed wild type non-human organism or a part thereof; and
[79916] (b) growing the non-human organism or a part thereof under conditions which permit the production of sucrose or a composition comprising sucrose in said non-human organism or in the culture medium surrounding said non-human organism.

[79917] Accordingly, the present invention relates to a process for the production of fructose, which comprises
[79918] (a) increasing or generating one or more activities selected from the group consisting of transcription factor in a non-human organism or a part thereof, preferably a microorganism, a plant cell, a plant or a part thereof, as compared to a corresponding non-transformed wild type non-human organism or a part thereof; and
[79919] (b) growing the non-human organism or a part thereof under conditions which permit the production of fructose or a composition comprising fructose in said non-human organism or in the culture medium surrounding said non-human organism.

[79920] Accordingly, the present invention relates to a process for the production of glucose-1-phosphate, which comprises
[79921] (a) increasing or generating one or more activities selected from the group consisting of At5g43630-protein in a non-human organism or a part thereof, preferably a microorganism, a plant cell, a plant or a part thereof, as compared to a corresponding non-transformed wild type non-human organism or a part thereof; and
[79922] (b) growing the non-human organism or a part thereof under conditions which permit the production of glucose-1-phosphate or a composition comprising glucose-1-phosphate in said non-human organism or in the culture medium surrounding said non-human organism.

[79923] Accordingly, the present invention relates to a process for the production of myo-inositol, which comprises
[79924] (a) increasing or generating one or more activities selected from the group consisting of heat shock transcription factor in a non-human organism or a part thereof, preferably a microorganism, a plant cell, a plant or a part thereof, as compared to a corresponding non-transformed wild type non-human organism or a part thereof; and
[79925] (b) growing the non-human organism or a part thereof under conditions which permit the production of myo-inositol or a composition comprising myo-inositol in said non-human organism or in the culture medium surrounding said non-human organism.

[79926] Accordingly, the present invention relates to a process for the production of raffinose, which comprises
[79927] (a) increasing or generating one or more activities selected from the group consisting of heat shock transcription factor in a non-human organism or a part thereof, preferably a microorganism, a plant cell, a plant or a part thereof, as compared to a corresponding non-transformed wild type non-human organism or a part thereof; and
[79928] (b) growing the non-human organism or a part thereof under conditions which permit the production of raffinose or a composition comprising raffinose in said non-human organism or in the culture medium surrounding said non-human organism.

[79929] Accordingly, the present invention relates to a process for the production of glucose-1-phosphate, which comprises
[79930] (a) increasing or generating one or more activities selected from the group consisting of protein phosphatase in a non-human organism or a part thereof, preferably a microorganism, a plant cell, a plant or a part thereof, as compared to a corresponding non-transformed wild type non-human organism or a part thereof; and
[79931] (b) growing the non-human organism or a part thereof under conditions which permit the production of glucose-1-phosphate or a composition comprising glucose-1-phosphate in said non-human organism or in the culture medium surrounding said non-human organism.

[79932] Accordingly, the present invention relates to a process for the production of myo-inositol, which comprises
[79933] (a) increasing or generating one or more activities selected from the group consisting of protein phosphatase in a non-human organism or a part thereof, preferably a microorganism, a plant cell, a plant or a part thereof, as compared to a corresponding non-transformed wild type non-human organism or a part thereof; and
[79934] (b) growing the non-human organism or a part thereof under conditions which permit the production of myo-inositol or a composition comprising myo-inositol in said non-human organism or in the culture medium surrounding said non-human organism.

[79935] Accordingly, the present invention relates to a process for the production of fructose, which comprises
[79936] (a) increasing or generating one or more activities selected from the group consisting of RNA-binding protein in a non-human organism or a part thereof, preferably a microorganism, a plant cell, a plant or a part thereof, as compared to a corresponding non-transformed wild type non-human organism or a part thereof; and
[79937] (b) growing the non-human organism or a part thereof under conditions which permit the production of fructose or a composition comprising fructose in said non-human organism or in the culture medium surrounding said non-human organism.

[79938] Accordingly, the present invention relates to a process for the production of glucose, which comprises
[79939] (a) increasing or generating one or more activities selected from the group consisting of RNA-binding protein in a non-human organism or a part thereof, preferably a microorganism, a plant cell, a plant or a part thereof, as compared to a corresponding non-transformed wild type non-human organism or a part thereof; and
[79940] (b) growing the non-human organism or a part thereof under conditions which permit the production of glucose or a composition comprising glucose in said non-human organism or in the culture medium surrounding said non-human organism.

[79941] Accordingly, the present invention relates to a process for the production of fructose, which comprises
[79942] (a) increasing or generating one or more activities selected from the group consisting of MADS-box transcription factor in a non-human organism or a part thereof, preferably a microorganism, a plant cell, a plant or a part thereof, as compared to a corresponding non-transformed wild type non-human organism or a part thereof; and
[79943] (b) growing the non-human organism or a part thereof under conditions which permit the production of fructose or a composition comprising fructose in said non-human organism or in the culture medium surrounding said non-human organism.

[79944] Accordingly, the present invention relates to a process for the production of raffinose, which comprises
[79945] (a) increasing or generating one or more activities selected from the group consisting of MADS-box transcription factor in a non-human organism or a part thereof, preferably a microorganism, a plant cell, a plant or a part thereof, as compared to a corresponding non-transformed wild type non-human organism or a part thereof; and
[79946] (b) growing the non-human organism or a part thereof under conditions which permit the production of raffinose or a composition comprising raffinose in said non-human organism or in the culture medium surrounding said non-human organism.

[79947] Accordingly, the present invention relates to a process for the production of saccharic acid, which comprises
[79948] (a) increasing or generating one or more activities selected from the group consisting of MADS-box transcription factor in a non-human organism or a part thereof, preferably a microorganism, a plant cell, a plant or a part thereof, as compared to a corresponding non-transformed wild type non-human organism or a part thereof; and
[79949] (b) growing the non-human organism or a part thereof under conditions which permit the production of saccharic acid or a composition comprising saccharic acid in said non-human organism or in the culture medium surrounding said non-human organism.

[79950] Accordingly, the present invention relates to a process for the production of glucose-1-phosphate, which comprises
[79951] (a) increasing or generating one or more activities selected from the group consisting of protein kinase in a non-human organism or a part thereof, preferably a microorganism, a plant cell, a plant or a part thereof, as compared to a corresponding non-transformed wild type non-human organism or a part thereof; and
[79952] (b) growing the non-human organism or a part thereof under conditions which permit the production of glucose-1-phosphate or a composition comprising glucose-1-phosphate in said non-human organism or in the culture medium surrounding said non-human organism.

[79953] Accordingly, the present invention relates to a process for the production of raffinose, which comprises
[79954] (a) increasing or generating one or more activities selected from the group consisting of glycosyl transferase in a non-human organism or a part thereof, preferably a microorganism, a plant cell, a plant or a part thereof, as compared to a corresponding non-transformed wild type non-human organism or a part thereof; and
[79955] (b) growing the non-human organism or a part thereof under conditions which permit the production of raffinose or a composition comprising raffinose in said non-human organism or in the culture medium surrounding said non-human organism.

[79956] Accordingly, the present invention relates to a process for the production of sucrose, which comprises
[79957] (a) increasing or generating one or more activities selected from the group consisting of sec-independent protein translocase in a non-human organism or a part thereof, preferably a microorganism, a plant cell, a plant or a part thereof, as compared to a corresponding non-transformed wild type non-human organism or a part thereof; and
[79958] (b) growing the non-human organism or a part thereof under conditions which permit the production of sucrose or a composition comprising sucrose in said non-human organism or in the culture medium surrounding said non-human organism.

[79959] Accordingly, the present invention relates to a process for the production of 3,4,5-trihydroxypentanoic acid, which comprises
[79960] (a) increasing or generating one or more activities selected from the group consisting of beta-hydroxylase in a non-human organism or a part thereof, preferably a microorganism, a plant cell, a plant or a part thereof, as compared to a corresponding non-transformed wild type non-human organism or a part thereof; and
[79961] (b) growing the non-human organism or a part thereof under conditions which permit the production of 3,4,5-trihydroxypentanoic acid or a composition comprising 3,4,5-trihydroxypentanoic acid in said non-human organism or in the culture medium surrounding said non-human organism.

[79962] Accordingly, the present invention relates to a process for the production of fructose, which comprises
[79963] (a) increasing or generating one or more activities selected from the group consisting of elongation factor Tu in a non-human organism or a part thereof, preferably a microorganism, a plant cell, a plant or a part thereof, as compared to a corresponding non-transformed wild type non-human organism or a part thereof; and
[79964] (b) growing the non-human organism or a part thereof under conditions which permit the production of fructose or a composition comprising fructose in said non-human organism or in the culture medium surrounding said non-human organism.

[79965] Accordingly, the present invention relates to a process for the production of glucose, which comprises
[79966] (a) increasing or generating one or more activities selected from the group consisting of elongation factor Tu in a non-human organism or a part thereof, preferably a microorganism, a plant cell, a plant or a part thereof, as compared to a corresponding non-transformed wild type non-human organism or a part thereof; and
[79967] (b) growing the non-human organism or a part thereof under conditions which permit the production of glucose or a composition comprising glucose in said non-human organism or in the culture medium surrounding said non-human organism.

[79968] Accordingly, the present invention relates to a process for the production of fructose, which comprises
[79969] (a) increasing or generating one or more activities selected from the group consisting of ABC transporter permease protein in a non-human organism or a part thereof, preferably a microorganism, a plant cell, a plant or a part thereof, as compared to a corresponding non-transformed wild type non-human organism or a part thereof; and
[79970] (b) growing the non-human organism or a part thereof under conditions which permit the production of fructose or a composition comprising fructose in said non-human organism or in the culture medium surrounding said non-human organism.

[79971] Accordingly, the present invention relates to a process for the production of sucrose, which comprises
[79972] (a) increasing or generating one or more activities selected from the group consisting of ABC transporter permease protein in a non-human organism or a part thereof, preferably a microorganism, a plant cell, a plant or a part thereof, as compared to a corresponding non-transformed wild type non-human organism or a part thereof; and
[79973] (b) growing the non-human organism or a part thereof under conditions which permit the production of sucrose or a composition comprising sucrose in said non-human organism or in the culture medium surrounding said non-human organism.

[79974] Accordingly, the present invention relates to a process for the production of glucose-1-phosphate, which comprises
[79975] (a) increasing or generating one or more activities selected from the group consisting of acyl-CoA synthase in a non-human organism or a part thereof, preferably a microorganism, a plant cell, a plant or a part thereof, as compared to a corresponding non-transformed wild type non-human organism or a part thereof; and
[79976] (b) growing the non-human organism or a part thereof under conditions which permit the production of glucose-1-phosphate or a composition comprising glucose-1-phosphate in said non-human organism or in the culture medium surrounding said non-human organism.

[79977] Accordingly, the present invention relates to a process for the production of glucose, which comprises
[79978] (a) increasing or generating one or more activities selected from the group consisting of 2-oxoglutarate dehydrogenase E1 subunit in a non-human organism or a part thereof, preferably a microorganism, a plant cell, a plant or a part thereof, as compared to a corresponding non-transformed wild type non-human organism or a part thereof; and
[79979] (b) growing the non-human organism or a part thereof under conditions which permit the production of glucose or a composition comprising glucose in said non-human organism or in the culture medium surrounding said non-human organism.

[79980] Accordingly, the present invention relates to a process for the production of glucose-1-phosphate, which comprises
[79981] (a) increasing or generating one or more activities selected from the group consisting of 2-oxoglutarate dehydrogenase E1 subunit in a non-human organism or a part thereof, preferably a microorganism, a plant cell, a plant or a part thereof, as compared to a corresponding non-transformed wild type non-human organism or a part thereof; and
[79982] (b) growing the non-human organism or a part thereof under conditions which permit the production of glucose-1-phosphate or a composition comprising glucose-1-phosphate in said non-human organism or in the culture medium surrounding said non-human organism.

[79983] Accordingly, the present invention relates to a process for the production of myo-inositol, which comprises
[79984] (a) increasing or generating one or more activities selected from the group consisting of 2-oxoglutarate dehydrogenase E1 subunit in a non-human organism or a part thereof, preferably a microorganism, a plant cell, a plant or a part thereof, as compared to a corresponding non-transformed wild type non-human organism or a part thereof; and
[79985] (b) growing the non-human organism or a part thereof under conditions which permit the production of myo-inositol or a composition comprising myo-inositol in said non-human organism or in the culture medium surrounding said non-human organism.

[79986] Accordingly, the present invention relates to a process for the production of raffinose, which comprises
[79987] (a) increasing or generating one or more activities selected from the group consisting of 2-oxoglutarate dehydrogenase E1 subunit in a non-human organism or a part thereof, preferably a microorganism, a plant cell, a plant or a part thereof, as compared to a corresponding non-transformed wild type non-human organism or a part thereof; and
[79988] (b) growing the non-human organism or a part thereof under conditions which permit the production of raffinose or a composition comprising raffinose in said non-human organism or in the culture medium surrounding said non-human organism.

[79989] Accordingly, the present invention relates to a process for the production of sedoheptulose-7-phosphate, which comprises
[79990] (a) increasing or generating one or more activities selected from the group consisting of 2-oxoglutarate dehydrogenase E1 subunit in a non-human organism or a part thereof, preferably a microorganism, a plant cell, a plant or a part thereof, as compared to a corresponding non-transformed wild type non-human organism or a part thereof; and
[79991] (b) growing the non-human organism or a part thereof under conditions which permit the production of sedoheptulose-7-phosphate or a composition comprising sedoheptulose-7-phosphate in said non-human organism or in the culture medium surrounding said non-human organism.

[79992] Accordingly, the present invention relates to a process for the production of raffinose, which comprises
[79993] (a) increasing or generating one or more activities selected from the group consisting of GDP-mannose dehydrogenase in a non-human organism or a part thereof, preferably a microorganism, a plant cell, a plant or a part thereof, as compared to a corresponding non-transformed wild type non-human organism or a part thereof; and
[79994] (b) growing the non-human organism or a part thereof under conditions which permit the production of raffinose or a composition comprising raffinose in said non-human organism or in the culture medium surrounding said non-human organism.

[79995] Accordingly, the present invention relates to a process for the production of fructose, which comprises
[79996] (a) increasing or generating one or more activities selected from the group consisting of transcriptional regulator in a non-human organism or a part thereof, preferably a microorganism, a plant cell, a plant or a part thereof, as compared to a corresponding non-transformed wild type non-human organism or a part thereof; and
[79997] (b) growing the non-human organism or a part thereof under conditions which permit the production of fructose or a composition comprising fructose in said non-human organism or in the culture medium surrounding said non-human organism.

[79998] Accordingly, the present invention relates to a process for the production of glucose, which comprises
[79999] (a) increasing or generating one or more activities selected from the group consisting of transcriptional regulator in a non-human organism or a part thereof, preferably a microorganism, a plant cell, a plant or a part thereof, as compared to a corresponding non-transformed wild type non-human organism or a part thereof; and
[80000] (b) growing the non-human organism or a part thereof under conditions which permit the production of glucose or a composition comprising glucose in said non-human organism or in the culture medium surrounding said non-human organism.

[80001] Accordingly, the present invention relates to a process for the production of glucose-1-phosphate, which comprises
[80002] (a) increasing or generating one or more activities selected from the group consisting of transcriptional regulator in a non-human organism or a part thereof, preferably a microorganism, a plant cell, a plant or a part thereof, as compared to a corresponding non-transformed wild type non-human organism or a part thereof; and
[80003] (b) growing the non-human organism or a part thereof under conditions which permit the production of glucose-1-phosphate or a composition comprising glucose-1-phosphate in said non-human organism or in the culture medium surrounding said non-human organism.

[80004] Accordingly, the present invention relates to a process for the production of glucose-1-phosphate, which comprises
[80005] (a) increasing or generating one or more activities selected from the group consisting of oxidoreductase in a non-human organism or a part thereof, preferably a microorganism, a plant cell, a plant or a part thereof, as compared to a corresponding non-transformed wild type non-human organism or a part thereof; and
[80006] (b) growing the non-human organism or a part thereof under conditions which permit the production of glucose-1-phosphate or a composition comprising glucose-1-phosphate in said non-human organism or in the culture medium surrounding said non-human organism.

[80007] Accordingly, the present invention relates to a process for the production of myo-inositol, which comprises
[80008] (a) increasing or generating one or more activities selected from the group consisting of ThiF family protein in a non-human organism or a part thereof, preferably a microorganism, a plant cell, a plant or a part thereof, as compared to a corresponding non-transformed wild type non-human organism or a part thereof; and
[80009] (b) growing the non-human organism or a part thereof under conditions which permit the production of myo-inositol or a composition comprising myo-inositol in said non-human organism or in the culture medium surrounding said non-human organism.

[80010] Accordingly, the present invention relates to a process for the production of fructose, which comprises
[80011] (a) increasing or generating one or more activities selected from the group consisting of CTP synthase in a non-human organism or a part thereof, preferably a microorganism, a plant cell, a plant or a part thereof, as compared to a corresponding non-transformed wild type non-human organism or a part thereof; and
[80012] (b) growing the non-human organism or a part thereof under conditions which permit the production of fructose or a composition comprising fructose in said non-human organism or in the culture medium surrounding said non-human organism.

[80013] Accordingly, the present invention relates to a process for the production of glucose, which comprises
[80014] (a) increasing or generating one or more activities selected from the group consisting of CTP synthase in a non-human organism or a part thereof, preferably a microorganism, a plant cell, a plant or a part thereof, as compared to a corresponding non-transformed wild type non-human organism or a part thereof; and
[80015] (b) growing the non-human organism or a part thereof under conditions which permit the production of glucose or a composition comprising glucose in said non-human organism or in the culture medium surrounding said non-human organism.

[80016] Accordingly, the present invention relates to a process for the production of sucrose, which comprises
[80017] (a) increasing or generating one or more activities selected from the group consisting of CTP synthase in a non-human organism or a part thereof, preferably a microorganism, a plant cell, a plant or a part thereof, as compared to a corresponding non-transformed wild type non-human organism or a part thereof; and
[80018] (b) growing the non-human organism or a part thereof under conditions which permit the production of sucrose or a composition comprising sucrose in said non-human organism or in the culture medium surrounding said non-human organism.

[80019] Accordingly, the present invention relates to a process for the production of raffinose, which comprises
[80020] (a) increasing or generating one or more activities selected from the group consisting of protein-L-isoaspartate O-methyltransferase in a non-human organism or a part thereof, preferably a microorganism, a plant cell, a plant or a part thereof, as compared to a corresponding non-transformed wild type non-human organism or a part thereof; and
[80021] (b) growing the non-human organism or a part thereof under conditions which permit the production of raffinose or a composition comprising raffinose in said non-human organism or in the culture medium surrounding said non-human organism.

[80022] Accordingly, the present invention relates to a process for the production of myo-inositol, which comprises
[80023] (a) increasing or generating one or more activities selected from the group consisting of recombinase A in a non-human organism or a part thereof, preferably a microorganism, a plant cell, a plant or a part thereof, as compared to a corresponding non-transformed wild type non-human organism or a part thereof; and
[80024] (b) growing the non-human organism or a part thereof under conditions which permit the production of myo-inositol or a composition comprising myo-inositol in said non-human organism or in the culture medium surrounding said non-human organism.

[80025] Accordingly, the present invention relates to a process for the production of raffinose, which comprises
[80026] (a) increasing or generating one or more activities selected from the group consisting of recombinase A in a non-human organism or a part thereof, preferably a microorganism, a plant cell, a plant or a part thereof, as compared to a corresponding non-transformed wild type non-human organism or a part thereof; and
[80027] (b) growing the non-human organism or a part thereof under conditions which permit the production of raffinose or a composition comprising raffinose in said non-human organism or in the culture medium surrounding said non-human organism.

[80028] Accordingly, the present invention relates to a process for the production of myo-inositol, which comprises
[80029] (a) increasing or generating one or more activities selected from the group consisting of acetyltransferase in a non-human organism or a part thereof, preferably a microorganism, a plant cell, a plant or a part thereof, as compared to a corresponding non-transformed wild type non-human organism or a part thereof; and
[80030] (b) growing the non-human organism or a part thereof under conditions which permit the production of myo-inositol or a composition comprising myo-inositol in said non-human organism or in the culture medium surrounding said non-human organism.

[80031] Accordingly, the present invention relates to a process for the production of raffinose, which comprises
[80032] (a) increasing or generating one or more activities selected from the group consisting of acetyltransferase in a non-human organism or a part thereof, preferably a microorganism, a plant cell, a plant or a part thereof, as compared to a corresponding non-transformed wild type non-human organism or a part thereof; and
[80033] (b) growing the non-human organism or a part thereof under conditions which permit the production of raffinose or a composition comprising raffinose in said non-human organism or in the culture medium surrounding said non-human organism.

[80034] Accordingly, the present invention relates to a process for the production of raffinose, which comprises
[80035] (a) increasing or generating one or more activities selected from the group consisting of enoyl-CoA hydratase in a non-human organism or a part thereof, preferably a microorganism, a plant cell, a plant or a part thereof, as compared to a corresponding non-transformed wild type non-human organism or a part thereof; and
[80036] (b) growing the non-human organism or a part thereof under conditions which permit the production of raffinose or a composition comprising raffinose in said non-human organism or in the culture medium surrounding said non-human organism.

[80037] Accordingly, the present invention relates to a process for the production of fructose, which comprises
[80038] (a) increasing or generating one or more activities selected from the group consisting of NADH-quinone oxidoreductase subunit in a non-human organism or a part thereof, preferably a microorganism, a plant cell, a plant or a part thereof, as compared to a corresponding non-transformed wild type non-human organism or a part thereof; and
[80039] (b) growing the non-human organism or a part thereof under conditions which permit the production of fructose or a composition comprising fructose in said non-human organism or in the culture medium surrounding said non-human organism.

[80040] Accordingly, the present invention relates to a process for the production of glucose-1-phosphate, which comprises
[80041] (a) increasing or generating one or more activities selected from the group consisting of NADH-quinone oxidoreductase subunit in a non-human organism or a part thereof, preferably a microorganism, a plant cell, a plant or a part thereof, as compared to a corresponding non-transformed wild type non-human organism or a part thereof; and
[80042] (b) growing the non-human organism or a part thereof under conditions which permit the production of glucose-1-phosphate or a composition comprising glucose-1-phosphate in said non-human organism or in the culture medium surrounding said non-human organism.

[80043] Accordingly, the present invention relates to a process for the production of sucrose, which comprises
[80044] (a) increasing or generating one or more activities selected from the group consisting of NADH-quinone oxidoreductase subunit in a non-human organism or a part thereof, preferably a microorganism, a plant cell, a plant or a part thereof, as compared to a corresponding non-transformed wild type non-human organism or a part thereof; and
[80045] (b) growing the non-human organism or a part thereof under conditions which permit the production of sucrose or a composition comprising sucrose in said non-human organism or in the culture medium surrounding said non-human organism.

[80046] Accordingly, the present invention relates to a process for the production of 3,4,5-trihydroxypentanoic acid, which comprises
[80047] (a) increasing or generating one or more activities selected from the group consisting of isopropylmalate isomerase large subunit in a non-human organism or a part thereof, preferably a microorganism, a plant cell, a plant or a part thereof, as compared to a corresponding non-transformed wild type non-human organism or a part thereof; and
[80048] (b) growing the non-human organism or a part thereof under conditions which permit the production of 3,4,5-trihydroxypentanoic acid or a composition comprising 3,4,5-trihydroxypentanoic acid in said non-human organism or in the culture medium surrounding said non-human organism.

[80049] Accordingly, the present invention relates to a process for the production of fructose, which comprises
[80050] (a) increasing or generating one or more activities selected from the group consisting of hydrolase in a non-human organism or a part thereof, preferably a microorganism, a plant cell, a plant or a part thereof, as compared to a corresponding non-transformed wild type non-human organism or a part thereof; and
[80051] (b) growing the non-human organism or a part thereof under conditions which permit the production of fructose or a composition comprising fructose in said non-human organism or in the culture medium surrounding said non-human organism.

[80052] Accordingly, the present invention relates to a process for the production of glucose, which comprises
[80053] (a) increasing or generating one or more activities selected from the group consisting of hydrolase in a non-human organism or a part thereof, preferably a microorganism, a plant cell, a plant or a part thereof, as compared to a corresponding non-transformed wild type non-human organism or a part thereof; and
[80054] (b) growing the non-human organism or a part thereof under conditions which permit the production of glucose or a composition comprising glucose in said non-human organism or in the culture medium surrounding said non-human organism.

[80055] Accordingly, the present invention relates to a process for the production of sucrose, which comprises
[80056] (a) increasing or generating one or more activities selected from the group consisting of hydrolase in a non-human organism or a part thereof, preferably a microorganism, a plant cell, a plant or a part thereof, as compared to a corresponding non-transformed wild type non-human organism or a part thereof; and
[80057] (b) growing the non-human organism or a part thereof under conditions which permit the production of sucrose or a composition comprising sucrose in said non-human organism or in the culture medium surrounding said non-human organism.

[80058] Accordingly, the present invention relates to a process for the production of fructose, which comprises
[80059] (a) increasing or generating one or more activities selected from the group consisting of glutamate-ammonia-ligase in a non-human organism or a part thereof, preferably a microorganism, a plant cell, a plant or a part thereof, as compared to a corresponding non-transformed wild type non-human organism or a part thereof; and
[80060] (b) growing the non-human organism or a part thereof under conditions which permit the production of fructose or a composition comprising fructose in said non-human organism or in the culture medium surrounding said non-human organism.

[80061] Accordingly, the present invention relates to a process for the production of glucose, which comprises
[80062] (a) increasing or generating one or more activities selected from the group consisting of glutamate-ammonia-ligase in a non-human organism or a part thereof, preferably a microorganism, a plant cell, a plant or a part thereof, as compared to a corresponding non-transformed wild type non-human organism or a part thereof; and
[80063] (b) growing the non-human organism or a part thereof under conditions which permit the production of glucose or a composition comprising glucose in said non-human organism or in the culture medium surrounding said non-human organism.

[80064] Accordingly, the present invention relates to a process for the production of sucrose, which comprises
[80065] (a) increasing or generating one or more activities selected from the group consisting of glutamate-ammonia-ligase in a non-human organism or a part thereof, preferably a microorganism, a plant cell, a plant or a part thereof, as compared to a corresponding non-transformed wild type non-human organism or a part thereof; and
[80066] (b) growing the non-human organism or a part thereof under conditions which permit the production of sucrose or a composition comprising sucrose in said non-human organism or in the culture medium surrounding said non-human organism.

[80067] Accordingly, the present invention relates to a process for the production of fructose, which comprises
[80068] (a) increasing or generating one or more activities selected from the group consisting of fumarylacetoacetate hydrolase in a non-human organism or a part thereof, preferably a microorganism, a plant cell, a plant or a part thereof, as compared to a corresponding non-transformed wild type non-human organism or a part thereof; and
[80069] (b) growing the non-human organism or a part thereof under conditions which permit the production of fructose or a composition comprising fructose in said non-human organism or in the culture medium surrounding said non-human organism.

[80070] Accordingly, the present invention relates to a process for the production of raffinose, which comprises
[80071] (a) increasing or generating one or more activities selected from the group consisting of glycosyltransferase in a non-human organism or a part thereof, preferably a microorganism, a plant cell, a plant or a part thereof, as compared to a corresponding non-transformed wild type non-human organism or a part thereof; and
[80072] (b) growing the non-human organism or a part thereof under conditions which permit the production of raffinose or a composition comprising raffinose in said non-human organism or in the culture medium surrounding said non-human organism.

[80073] Accordingly, the present invention relates to a process for the production of myo-inositol, which comprises
[80074] (a) increasing or generating one or more activities selected from the group consisting of peptidyl-prolyl cis-trans isomerase in a non-human organism or a part thereof, preferably a microorganism, a plant cell, a plant or a part thereof, as compared to a corresponding non-transformed wild type non-human organism or a part thereof; and
[80075] (b) growing the non-human organism or a part thereof under conditions which permit the production of myo-inositol or a composition comprising myo-inositol in said non-human organism or in the culture medium surrounding said non-human organism.

[80076] Accordingly, the present invention relates to a process for the production of 3,4,5-trihydroxypentanoic acid, which comprises
[80077] (a) increasing or generating one or more activities selected from the group consisting of NAD(P)H dehydrogenase (quinone) in a non-human organism or a part thereof, preferably a microorganism, a plant cell, a plant or a part thereof, as compared to a corresponding non-transformed wild type non-human organism or a part thereof; and
[80078] (b) growing the non-human organism or a part thereof under conditions which permit the production of 3,4,5-trihydroxypentanoic acid or a composition comprising 3,4,5-trihydroxypentanoic acid in said non-human organism or in the culture medium surrounding said non-human organism.

[80079] Accordingly, the present invention relates to a process for the production of fructose, which comprises
[80080] (a) increasing or generating one or more activities selected from the group consisting of electron transfer flavoprotein subunit beta in a non-human organism or a part thereof, preferably a microorganism, a plant cell, a plant or a part thereof, as compared to a corresponding non-transformed wild type non-human organism or a part thereof; and
[80081] (b) growing the non-human organism or a part thereof under conditions which permit the production of fructose or a composition comprising fructose in said non-human organism or in the culture medium surrounding said non-human organism.

[80082] Accordingly, the present invention relates to a process for the production of glucose, which comprises
[80083] (a) increasing or generating one or more activities selected from the group consisting of electron transfer flavoprotein subunit beta in a non-human organism or a part thereof, preferably a microorganism, a plant cell, a plant or a part thereof, as compared to a corresponding non-transformed wild type non-human organism or a part thereof; and
[80084] (b) growing the non-human organism or a part thereof under conditions which permit the production of glucose or a composition comprising glucose in said non-human organism or in the culture medium surrounding said non-human organism.

[80085] Accordingly, the present invention relates to a process for the production of glucose-1-phosphate, which comprises
[80086] (a) increasing or generating one or more activities selected from the group consisting of purine nucleoside phosphorylase in a non-human organism or a part thereof, preferably a microorganism, a plant cell, a plant or a part thereof, as compared to a corresponding non-transformed wild type non-human organism or a part thereof; and
[80087] (b) growing the non-human organism or a part thereof under conditions which permit the production of glucose-1-phosphate or a composition comprising glucose-1-phosphate in said non-human organism or in the culture medium surrounding said non-human organism.

[80088] Accordingly, the present invention relates to a process for the production of 3,4,5-trihydroxypentanoic acid, which comprises
[80089] (a) increasing or generating one or more activities selected from the group consisting of purine nucleoside phosphorylase in a non-human organism or a part thereof, preferably a microorganism, a plant cell, a plant or a part thereof, as compared to a corresponding non-transformed wild type non-human organism or a part thereof; and
[80090] (b) growing the non-human organism or a part thereof under conditions which permit the production of 3,4,5-trihydroxypentanoic acid or a composition comprising 3,4,5-trihydroxypentanoic acid in said non-human organism or in the culture medium surrounding said non-human organism.

[80091] Accordingly, the present invention relates to a process for the production of raffinose, which comprises
[80092] (a) increasing or generating one or more activities selected from the group consisting of transcriptional regulator protein in a non-human organism or a part thereof, preferably a microorganism, a plant cell, a plant or a part thereof, as compared to a corresponding non-transformed wild type non-human organism or a part thereof; and
[80093] (b) growing the non-human organism or a part thereof under conditions which permit the production of raffinose or a composition comprising raffinose in said non-human organism or in the culture medium surrounding said non-human organism.

[80094] Accordingly, the present invention relates to a process for the production of glucose-1-phosphate, which comprises
[80095] (a) increasing or generating one or more activities selected from the group consisting of AX653549-protein in a non-human organism or a part thereof, preferably a microorganism, a plant cell, a plant or a part thereof, as compared to a corresponding non-transformed wild type non-human organism or a part thereof; and
[80096] (b) growing the non-human organism or a part thereof under conditions which permit the production of glucose-1-phosphate or a composition comprising glucose-1-phosphate in said non-human organism or in the culture medium surrounding said non-human organism.

[80097] Accordingly, the present invention relates to a process for the production of glucose-1-phosphate, which comprises
[80098] (a) increasing or generating one or more activities selected from the group consisting of AY087308-protein in a non-human organism or a part thereof, preferably a microorganism, a plant cell, a plant or a part thereof, as compared to a corresponding non-transformed wild type non-human organism or a part thereof; and
[80099] (b) growing the non-human organism or a part thereof under conditions which permit the production of glucose-1-phosphate or a composition comprising glucose-1-phosphate in said non-human organism or in the culture medium surrounding said non-human organism.

[80100] Accordingly, the present invention relates to a process for the production of myo-inositol, which comprises
[80101] (a) increasing or generating one or more activities selected from the group consisting of AY087308-protein in a non-human organism or a part thereof, preferably a microorganism, a plant cell, a plant or a part thereof, as compared to a corresponding non-transformed wild type non-human organism or a part thereof; and
[80102] (b) growing the non-human organism or a part thereof under conditions which permit the production of myo-inositol or a composition comprising myo-inositol in said non-human organism or in the culture medium surrounding said non-human organism.

[80103] Accordingly, the present invention relates to a process for the production of glucose-1-phosphate, which comprises
[80104] (a) increasing or generating one or more activities selected from the group consisting of pyruvate kinase in a non-human organism or a part thereof, preferably a microorganism, a plant cell, a plant or a part thereof, as compared to a corresponding non-transformed wild type non-human organism or a part thereof; and
[80105] (b) growing the non-human organism or a part thereof under conditions which permit the production of glucose-1-phosphate or a composition comprising glucose-1-phosphate in said non-human organism or in the culture medium surrounding said non-human organism.

[80106] Accordingly, the present invention relates to a process for the production of 3,4,5-trihydroxypentanoic acid, which comprises
[80107] (a) increasing or generating one or more activities selected from the group consisting of pyruvate kinase in a non-human organism or a part thereof, preferably a microorganism, a plant cell, a plant or a part thereof, as compared to a corresponding non-transformed wild type non-human organism or a part thereof; and
[80108] (b) growing the non-human organism or a part thereof under conditions which permit the production of 3,4,5-trihydroxypentanoic acid or a composition comprising 3,4,5-trihydroxypentanoic acid in said non-human organism or in the culture medium surrounding said non-human organism.

[80109] Accordingly, the present invention relates to a process for the production of glucose, which comprises
[80110] (a) increasing or generating one or more activities selected from the group consisting of threonine synthase in a non-human organism or a part thereof, preferably a microorganism, a plant cell, a plant or a part thereof, as compared to a corresponding non-transformed wild type non-human organism or a part thereof; and
[80111] (b) growing the non-human organism or a part thereof under conditions which permit the production of glucose or a composition comprising glucose in said non-human organism or in the culture medium surrounding said non-human organism.

[80112] Accordingly, the present invention relates to a process for the production of sucrose, which comprises
[80113] (a) increasing or generating one or more activities selected from the group consisting of threonine synthase in a non-human organism or a part thereof, preferably a microorganism, a plant cell, a plant or a part thereof, as compared to a corresponding non-transformed wild type non-human organism or a part thereof; and
[80114] (b) growing the non-human organism or a part thereof under conditions which permit the production of sucrose or a composition comprising sucrose in said non-human organism or in the culture medium surrounding said non-human organism.

[80115] Accordingly, the present invention relates to a process for the production of 3,4,5-trihydroxypentanoic acid, which comprises
[80116] (a) increasing or generating one or more activities selected from the group consisting of b0050-protein in a non-human organism or a part thereof, preferably a microorganism, a plant cell, a plant or a part thereof, as compared to a corresponding non-transformed wild type non-human organism or a part thereof; and
[80117] (b) growing the non-human organism or a part thereof under conditions which permit the production of 3,4,5-trihydroxypentanoic acid or a composition comprising 3,4,5-trihydroxypentanoic acid in said non-human organism or in the culture medium surrounding said non-human organism.

[80118] Accordingly, the present invention relates to a process for the production of raffinose, which comprises
[80119] (a) increasing or generating one or more activities selected from the group consisting of L-ribulose-5-phosphate 4-epimerase in a non-human organism or a part thereof, preferably a microorganism, a plant cell, a plant or a part thereof, as compared to a corresponding non-transformed wild type non-human organism or a part thereof; and
[80120] (b) growing the non-human organism or a part thereof under conditions which permit the production of raffinose or a composition comprising raffinose in said non-human organism or in the culture medium surrounding said non-human organism.

[80121] Accordingly, the present invention relates to a process for the production of sucrose, which comprises
[80122] (a) increasing or generating one or more activities selected from the group consisting of glucose dehydrogenase in a non-human organism or a part thereof, preferably a microorganism, a plant cell, a plant or a part thereof, as compared to a corresponding non-transformed wild type non-human organism or a part thereof; and
[80123] (b) growing the non-human organism or a part thereof under conditions which permit the production of sucrose or a composition comprising sucrose in said non-human organism or in the culture medium surrounding said non-human organism.

[80124] Accordingly, the present invention relates to a process for the production of glucose-1-phosphate, which comprises
[80125] (a) increasing or generating one or more activities selected from the group consisting of serine protease in a non-human organism or a part thereof, preferably a microorganism, a plant cell, a plant or a part thereof, as compared to a corresponding non-transformed wild type non-human organism or a part thereof; and
[80126] (b) growing the non-human organism or a part thereof under conditions which permit the production of glucose-1-phosphate or a composition comprising glucose-1-phosphate in said non-human organism or in the culture medium surrounding said non-human organism.

[80127] Accordingly, the present invention relates to a process for the production of myo-inositol, which comprises
[80128] (a) increasing or generating one or more activities selected from the group consisting of serine protease in a non-human organism or a part thereof, preferably a microorganism, a plant cell, a plant or a part thereof, as compared to a corresponding non-transformed wild type non-human organism or a part thereof; and
[80129] (b) growing the non-human organism or a part thereof under conditions which permit the production of myo-inositol or a composition comprising myo-inositol in said non-human organism or in the culture medium surrounding said non-human organism.

[80130] Accordingly, the present invention relates to a process for the production of sucrose, which comprises
[80131] (a) increasing or generating one or more activities selected from the group consisting of acyl-CoA dehydrogenase in a non-human organism or a part thereof, preferably a microorganism, a plant cell, a plant or a part thereof, as compared to a corresponding non-transformed wild type non-human organism or a part thereof; and
[80132] (b) growing the non-human organism or a part thereof under conditions which permit the production of sucrose or a composition comprising sucrose in said non-human organism or in the culture medium surrounding said non-human organism.

[80133] Accordingly, the present invention relates to a process for the production of glucose-1-phosphate, which comprises
[80134] (a) increasing or generating one or more activities selected from the group consisting of b0251-protein in a non-human organism or a part thereof, preferably a microorganism, a plant cell, a plant or a part thereof, as compared to a corresponding non-transformed wild type non-human organism or a part thereof; and
[80135] (b) growing the non-human organism or a part thereof under conditions which permit the production of glucose-1-phosphate or a composition comprising glucose-1-phosphate in said non-human organism or in the culture medium surrounding said non-human organism.

[80136] Accordingly, the present invention relates to a process for the production of fructose, which comprises
[80137] (a) increasing or generating one or more activities selected from the group consisting of betaine aldehyde dehydrogenase in a non-human organism or a part thereof, preferably a microorganism, a plant cell, a plant or a part thereof, as compared to a corresponding non-transformed wild type non-human organism or a part thereof; and
[80138] (b) growing the non-human organism or a part thereof under conditions which permit the production of fructose or a composition comprising fructose in said non-human organism or in the culture medium surrounding said non-human organism.

[80139] Accordingly, the present invention relates to a process for the production of melibiose, which comprises
[80140] (a) increasing or generating one or more activities selected from the group consisting of beta-galactosidase in a non-human organism or a part thereof, preferably a microorganism, a plant cell, a plant or a part thereof, as compared to a corresponding non-transformed wild type non-human organism or a part thereof; and
[80141] (b) growing the non-human organism or a part thereof under conditions which permit the production of melibiose or a composition comprising melibiose in said non-human organism or in the culture medium surrounding said non-human organism.

[80142] Accordingly, the present invention relates to a process for the production of glucose-1-phosphate, which comprises
[80143] (a) increasing or generating one or more activities selected from the group consisting of b0362-protein in a non-human organism or a part thereof, preferably a microorganism, a plant cell, a plant or a part thereof, as compared to a corresponding non-transformed wild type non-human organism or a part thereof; and
[80144] (b) growing the non-human organism or a part thereof under conditions which permit the production of glucose-1-phosphate or a composition comprising glucose-1-phosphate in said non-human organism or in the culture medium surrounding said non-human organism.

[80145] Accordingly, the present invention relates to a process for the production of glucose-1-phosphate, which comprises
[80146] (a) increasing or generating one or more activities selected from the group consisting of penicillin-binding protein in a non-human organism or a part thereof, preferably a microorganism, a plant cell, a plant or a part thereof, as compared to a corresponding non-transformed wild type non-human organism or a part thereof; and
[80147] (b) growing the non-human organism or a part thereof under conditions which permit the production of glucose-1-phosphate or a composition comprising glucose-1-phosphate in said non-human organism or in the culture medium surrounding said non-human organism.

[80148] Accordingly, the present invention relates to a process for the production of fructose, which comprises
[80149] (a) increasing or generating one or more activities selected from the group consisting of ATP-binding component of a transport system in a non-human organism or a part thereof, preferably a microorganism, a plant cell, a plant or a part thereof, as compared to a corresponding non-transformed wild type non-human organism or a part thereof; and
[80150] (b) growing the non-human organism or a part thereof under conditions which permit the production of fructose or a composition comprising fructose in said non-human organism or in the culture medium surrounding said non-human organism.

[80151] Accordingly, the present invention relates to a process for the production of glucose, which comprises
[80152] (a) increasing or generating one or more activities selected from the group consisting of ATP-binding component of a transport system in a non-human organism or a part thereof, preferably a microorganism, a plant cell, a plant or a part thereof, as compared to a corresponding non-transformed wild type non-human organism or a part thereof; and
[80153] (b) growing the non-human organism or a part thereof under conditions which permit the production of glucose or a composition comprising glucose in said non-human organism or in the culture medium surrounding said non-human organism.

[80154] Accordingly, the present invention relates to a process for the production of glucose, which comprises
[80155] (a) increasing or generating one or more activities selected from the group consisting of membrane transport protein in a non-human organism or a part thereof, preferably a microorganism, a plant cell, a plant or a part thereof, as compared to a corresponding non-transformed wild type non-human organism or a part thereof; and
[80156] (b) growing the non-human organism or a part thereof under conditions which permit the production of glucose or a composition comprising glucose in said non-human organism or in the culture medium surrounding said non-human organism.

[80157] Accordingly, the present invention relates to a process for the production of saccharic acid, which comprises
[80158] (a) increasing or generating one or more activities selected from the group consisting of b0488-protein in a non-human organism or a part thereof, preferably a microorganism, a plant cell, a plant or a part thereof, as compared to a corresponding non-transformed wild type non-human organism or a part thereof; and
[80159] (b) growing the non-human organism or a part thereof under conditions which permit the production of saccharic acid or a composition comprising saccharic acid in said non-human organism or in the culture medium surrounding said non-human organism.

[80160] Accordingly, the present invention relates to a process for the production of galactinol, which comprises
[80161] (a) increasing or generating one or more activities selected from the group consisting of glycerate kinase in a non-human organism or a part thereof, preferably a microorganism, a plant cell, a plant or a part thereof, as compared to a corresponding non-transformed wild type non-human organism or a part thereof; and
[80162] (b) growing the non-human organism or a part thereof under conditions which permit the production of galactinol or a composition comprising galactinol in said non-human organism or in the culture medium surrounding said non-human organism.

[80163] Accordingly, the present invention relates to a process for the production of fructose, which comprises
[80164] (a) increasing or generating one or more activities selected from the group consisting of isochorismate synthase in a non-human organism or a part thereof, preferably a microorganism, a plant cell, a plant or a part thereof, as compared to a corresponding non-transformed wild type non-human organism or a part thereof; and
[80165] (b) growing the non-human organism or a part thereof under conditions which permit the production of fructose or a composition comprising fructose in said non-human organism or in the culture medium surrounding said non-human organism.

[80166] Accordingly, the present invention relates to a process for the production of glucose, which comprises
[80167] (a) increasing or generating one or more activities selected from the group consisting of isochorismate synthase in a non-human organism or a part thereof, preferably a microorganism, a plant cell, a plant or a part thereof, as compared to a corresponding non-transformed wild type non-human organism or a part thereof; and
[80168] (b) growing the non-human organism or a part thereof under conditions which permit the production of glucose or a composition comprising glucose in said non-human organism or in the culture medium surrounding said non-human organism.

[80169] Accordingly, the present invention relates to a process for the production of raffinose, which comprises
[80170] (a) increasing or generating one or more activities selected from the group consisting of isochorismate synthase in a non-human organism or a part thereof, preferably a microorganism, a plant cell, a plant or a part thereof, as compared to a corresponding non-transformed wild type non-human organism or a part thereof; and
[80171] (b) growing the non-human organism or a part thereof under conditions which permit the production of raffinose or a composition comprising raffinose in said non-human organism or in the culture medium surrounding said non-human organism.

[80172] Accordingly, the present invention relates to a process for the production of sucrose, which comprises
[80173] (a) increasing or generating one or more activities selected from the group consisting of isochorismate synthase in a non-human organism or a part thereof, preferably a microorganism, a plant cell, a plant or a part thereof, as compared to a corresponding non-transformed wild type non-human organism or a part thereof; and
[80174] (b) growing the non-human organism or a part thereof under conditions which permit the production of sucrose or a composition comprising sucrose in said non-human organism or in the culture medium surrounding said non-human organism.

[80175] Accordingly, the present invention relates to a process for the production of 3,4,5-trihydroxypentanoic acid, which comprises
[80176] (a) increasing or generating one or more activities selected from the group consisting of B0644-protein in a non-human organism or a part thereof, preferably a microorganism, a plant cell, a plant or a part thereof, as compared to a corresponding non-transformed wild type non-human organism or a part thereof; and
[80177] (b) growing the non-human organism or a part thereof under conditions which permit the production of 3,4,5-trihydroxypentanoic acid or a composition comprising 3,4,5-trihydroxypentanoic acid in said non-human organism or in the culture medium surrounding said non-human organism.

[80178] Accordingly, the present invention relates to a process for the production of saccharic acid, which comprises
[80179] (a) increasing or generating one or more activities selected from the group consisting of pyrimidine-specific ribonucleoside hydrolase in a non-human organism or a part thereof, preferably a microorganism, a plant cell, a plant or a part thereof, as compared to a corresponding non-transformed wild type non-human organism or a part thereof; and
[80180] (b) growing the non-human organism or a part thereof under conditions which permit the production of saccharic acid or a composition comprising saccharic acid in said non-human organism or in the culture medium surrounding said non-human organism.

[80181] Accordingly, the present invention relates to a process for the production of erythrol, which comprises
[80182] (a) increasing or generating one or more activities selected from the group consisting of asparagine synthetase B in a non-human organism or a part thereof, preferably a microorganism, a plant cell, a plant or a part thereof, as compared to a corresponding non-transformed wild type non-human organism or a part thereof; and
[80183] (b) growing the non-human organism or a part thereof under conditions which permit the production of erythrol or a composition comprising erythrol in said non-human organism or in the culture medium surrounding said non-human organism.

[80184] Accordingly, the present invention relates to a process for the production of myo-inositol, which comprises
[80185] (a) increasing or generating one or more activities selected from the group consisting of sensor histidine kinase in a non-human organism or a part thereof, preferably a microorganism, a plant cell, a plant or a part thereof, as compared to a corresponding non-transformed wild type non-human organism or a part thereof; and
[80186] (b) growing the non-human organism or a part thereof under conditions which permit the production of myo-inositol or a composition comprising myo-inositol in said non-human organism or in the culture medium surrounding said non-human organism.

[80187] Accordingly, the present invention relates to a process for the production of myo-inositol, which comprises
[80188] (a) increasing or generating one or more activities selected from the group consisting of succinyl-CoA synthetase beta chain in a non-human organism or a part thereof, preferably a microorganism, a plant cell, a plant or a part thereof, as compared to a corresponding non-transformed wild type non-human organism or a part thereof; and
[80189] (b) growing the non-human organism or a part thereof under conditions which permit the production of myo-inositol or a composition comprising myo-inositol in said non-human organism or in the culture medium surrounding said non-human organism.

[80190] Accordingly, the present invention relates to a process for the production of fructose, which comprises
[80191] (a) increasing or generating one or more activities selected from the group consisting of zinc transporter in a non-human organism or a part thereof, preferably a microorganism, a plant cell, a plant or a part thereof, as compared to a corresponding non-transformed wild type non-human organism or a part thereof; and
[80192] (b) growing the non-human organism or a part thereof under conditions which permit the production of fructose or a composition comprising fructose in said non-human organism or in the culture medium surrounding said non-human organism.

[80193] Accordingly, the present invention relates to a process for the production of glucose, which comprises
[80194] (a) increasing or generating one or more activities selected from the group consisting of zinc transporter in a non-human organism or a part thereof, preferably a microorganism, a plant cell, a plant or a part thereof, as compared to a corresponding non-transformed wild type non-human organism or a part thereof; and
[80195] (b) growing the non-human organism or a part thereof under conditions which permit the production of glucose or a composition comprising glucose in said non-human organism or in the culture medium surrounding said non-human organism.

[80196] Accordingly, the present invention relates to a process for the production of glucose-1-phosphate, which comprises
[80197] (a) increasing or generating one or more activities selected from the group consisting of zinc transporter in a non-human organism or a part thereof, preferably a microorganism, a plant cell, a plant or a part thereof, as compared to a corresponding non-transformed wild type non-human organism or a part thereof; and
[80198] (b) growing the non-human organism or a part thereof under conditions which permit the production of glucose-1-phosphate or a composition comprising glucose-1-phosphate in said non-human organism or in the culture medium surrounding said non-human organism.

[80199] Accordingly, the present invention relates to a process for the production of raffinose, which comprises
[80200] (a) increasing or generating one or more activities selected from the group consisting of zinc transporter in a non-human organism or a part thereof, preferably a microorganism, a plant cell, a plant or a part thereof, as compared to a corresponding non-transformed wild type non-human organism or a part thereof; and
[80201] (b) growing the non-human organism or a part thereof under conditions which permit the production of raffinose or a composition comprising raffinose in said non-human organism or in the culture medium surrounding said non-human organism.

[80202] Accordingly, the present invention relates to a process for the production of glucose, which comprises
[80203] (a) increasing or generating one or more activities selected from the group consisting of b0801-protein in a non-human organism or a part thereof, preferably a microorganism, a plant cell, a plant or a part thereof, as compared to a corresponding non-transformed wild type non-human organism or a part thereof; and
[80204] (b) growing the non-human organism or a part thereof under conditions which permit the production of glucose or a composition comprising glucose in said non-human organism or in the culture medium surrounding said non-human organism.

[80205] Accordingly, the present invention relates to a process for the production of sedoheptulose-7-phosphate, which comprises
[80206] (a) increasing or generating one or more activities selected from the group consisting of putrescine transport system permease protein in a non-human organism or a part thereof, preferably a microorganism, a plant cell, a plant or a part thereof, as compared to a corresponding non-transformed wild type non-human organism or a part thereof; and
[80207] (b) growing the non-human organism or a part thereof under conditions which permit the production of sedoheptulose-7-phosphate or a composition comprising sedoheptulose-7-phosphate in said non-human organism or in the culture medium surrounding said non-human organism.

[80208] Accordingly, the present invention relates to a process for the production of raffinose, which comprises
[80209] (a) increasing or generating one or more activities selected from the group consisting of leucyl/phenylalanyl-tRNA-protein transferase in a non-human organism or a part thereof, preferably a microorganism, a plant cell, a plant or a part thereof, as compared to a corresponding non-transformed wild type non-human organism or a part thereof; and
[80210] (b) growing the non-human organism or a part thereof under conditions which permit the production of raffinose or a composition comprising raffinose in said non-human organism or in the culture medium surrounding said non-human organism.

[80211] Accordingly, the present invention relates to a process for the production of glucose-1-phosphate, which comprises
[80212] (a) increasing or generating one or more activities selected from the group consisting of b0970-protein in a non-human organism or a part thereof, preferably a microorganism, a plant cell, a plant or a part thereof, as compared to a corresponding non-transformed wild type non-human organism or a part thereof; and
[80213] (b) growing the non-human organism or a part thereof under conditions which permit the production of glucose-1-phosphate or a composition comprising glucose-1-phosphate in said non-human organism or in the culture medium surrounding said non-human organism.

[80214] Accordingly, the present invention relates to a process for the production of myo-inositol, which comprises
[80215] (a) increasing or generating one or more activities selected from the group consisting of phosphoanhydride phosphorylase in a non-human organism or a part thereof, preferably a microorganism, a plant cell, a plant or a part thereof, as compared to a corresponding non-transformed wild type non-human organism or a part thereof; and
[80216] (b) growing the non-human organism or a part thereof under conditions which permit the production of myo-inositol or a composition comprising myo-inositol in said non-human organism or in the culture medium surrounding said non-human organism.

[80217] Accordingly, the present invention relates to a process for the production of fructose, which comprises
[80218] (a) increasing or generating one or more activities selected from the group consisting of b1003-protein in a non-human organism or a part thereof, preferably a microorganism, a plant cell, a plant or a part thereof, as compared to a corresponding non-transformed wild type non-human organism or a part thereof; and
[80219] (b) growing the non-human organism or a part thereof under conditions which permit the production of fructose or a composition comprising fructose in said non-human organism or in the culture medium surrounding said non-human organism.

[80220] Accordingly, the present invention relates to a process for the production of glucose, which comprises
[80221] (a) increasing or generating one or more activities selected from the group consisting of b1003-protein in a non-human organism or a part thereof, preferably a microorganism, a plant cell, a plant or a part thereof, as compared to a corresponding non-transformed wild type non-human organism or a part thereof; and
[80222] (b) growing the non-human organism or a part thereof under conditions which permit the production of glucose or a composition comprising glucose in said non-human organism or in the culture medium surrounding said non-human organism.

[80223] Accordingly, the present invention relates to a process for the production of glucose-1-phosphate, which comprises
[80224] (a) increasing or generating one or more activities selected from the group consisting of b1003-protein in a non-human organism or a part thereof, preferably a microorganism, a plant cell, a plant or a part thereof, as compared to a corresponding non-transformed wild type non-human organism or a part thereof; and
[80225] (b) growing the non-human organism or a part thereof under conditions which permit the production of glucose-1-phosphate or a composition comprising glucose-1-phosphate in said non-human organism or in the culture medium surrounding said non-human organism.

[80226] Accordingly, the present invention relates to a process for the production of sedoheptulose-7-phosphate, which comprises
[80227] (a) increasing or generating one or more activities selected from the group consisting of b1003-protein in a non-human organism or a part thereof, preferably a microorganism, a plant cell, a plant or a part thereof, as compared to a corresponding non-transformed wild type non-human organism or a part thereof; and
[80228] (b) growing the non-human organism or a part thereof under conditions which permit the production of sedoheptulose-7-phosphate or a composition comprising sedoheptulose-7-phosphate in said non-human organism or in the culture medium surrounding said non-human organism.

[80229] Accordingly, the present invention relates to a process for the production of sucrose, which comprises
[80230] (a) increasing or generating one or more activities selected from the group consisting of b1003-protein in a non-human organism or a part thereof, preferably a microorganism, a plant cell, a plant or a part thereof, as compared to a corresponding non-transformed wild type non-human organism or a part thereof; and
[80231] (b) growing the non-human organism or a part thereof under conditions which permit the production of sucrose or a composition comprising sucrose in said non-human organism or in the culture medium surrounding said non-human organism.

[80232] Accordingly, the present invention relates to a process for the production of 3,4,5-trihydroxypentanoic acid, which comprises
[80233] (a) increasing or generating one or more activities selected from the group consisting of b1046-protein in a non-human organism or a part thereof, preferably a microorganism, a plant cell, a plant or a part thereof, as compared to a corresponding non-transformed wild type non-human organism or a part thereof; and
[80234] (b) growing the non-human organism or a part thereof under conditions which permit the production of 3,4,5-trihydroxypentanoic acid or a composition comprising 3,4,5-trihydroxypentanoic acid in said non-human organism or in the culture medium surrounding said non-human organism.

[80235] Accordingly, the present invention relates to a process for the production of glucose-1-phosphate, which comprises
[80236] (a) increasing or generating one or more activities selected from the group consisting of multidrug resistance protein in a non-human organism or a part thereof, preferably a microorganism, a plant cell, a plant or a part thereof, as compared to a corresponding non-transformed wild type non-human organism or a part thereof; and
[80237] (b) growing the non-human organism or a part thereof under conditions which permit the production of glucose-1-phosphate or a composition comprising glucose-1-phosphate in said non-human organism or in the culture medium surrounding said non-human organism.

[80238] Accordingly, the present invention relates to a process for the production of sucrose, which comprises
[80239] (a) increasing or generating one or more activities selected from the group consisting of multidrug resistance protein in a non-human organism or a part thereof, preferably a microorganism, a plant cell, a plant or a part thereof, as compared to a corresponding non-transformed wild type non-human organism or a part thereof; and
[80240] (b) growing the non-human organism or a part thereof under conditions which permit the production of sucrose or a composition comprising sucrose in said non-human organism or in the culture medium surrounding said non-human organism.

[80241] Accordingly, the present invention relates to a process for the production of fructose, which comprises
[80242] (a) increasing or generating one or more activities selected from the group consisting of outer membrane receptor protein precursor in a non-human organism or a part thereof, preferably a microorganism, a plant cell, a plant or a part thereof, as compared to a corresponding non-transformed wild type non-human organism or a part thereof; and
[80243] (b) growing the non-human organism or a part thereof under conditions which permit the production of fructose or a composition comprising fructose in said non-human organism or in the culture medium surrounding said non-human organism.

[80244] Accordingly, the present invention relates to a process for the production of glucose-1-phosphate, which comprises
[80245] (a) increasing or generating one or more activities selected from the group consisting of adenylosuccinate lyase in a non-human organism or a part thereof, preferably a microorganism, a plant cell, a plant or a part thereof, as compared to a corresponding non-transformed wild type non-human organism or a part thereof; and
[80246] (b) growing the non-human organism or a part thereof under conditions which permit the production of glucose-1-phosphate or a composition comprising glucose-1-phosphate in said non-human organism or in the culture medium surrounding said non-human organism.

[80247] Accordingly, the present invention relates to a process for the production of glucose, which comprises
[80248] (a) increasing or generating one or more activities selected from the group consisting of isocitrate dehydrogenase in a non-human organism or a part thereof, preferably a microorganism, a plant cell, a plant or a part thereof, as compared to a corresponding non-transformed wild type non-human organism or a part thereof; and
[80249] (b) growing the non-human organism or a part thereof under conditions which permit the production of glucose or a composition comprising glucose in said non-human organism or in the culture medium surrounding said non-human organism.

[80250] Accordingly, the present invention relates to a process for the production of glucose-1-phosphate, which comprises
[80251] (a) increasing or generating one or more activities selected from the group consisting of b1137-protein in a non-human organism or a part thereof, preferably a microorganism, a plant cell, a plant or a part thereof, as compared to a corresponding non-transformed wild type non-human organism or a part thereof; and
[80252] (b) growing the non-human organism or a part thereof under conditions which permit the production of glucose-1-phosphate or a composition comprising glucose-1-phosphate in said non-human organism or in the culture medium surrounding said non-human organism.

[80253] Accordingly, the present invention relates to a process for the production of glucose-1-phosphate, which comprises
[80254] (a) increasing or generating one or more activities selected from the group consisting of sodium/proton antiporter in a non-human organism or a part thereof, preferably a microorganism, a plant cell, a plant or a part thereof, as compared to a corresponding non-transformed wild type non-human organism or a part thereof; and
[80255] (b) growing the non-human organism or a part thereof under conditions which permit the production of glucose-1-phosphate or a composition comprising glucose-1-phosphate in said non-human organism or in the culture medium surrounding said non-human organism.

[80256] Accordingly, the present invention relates to a process for the production of glucose-1-phosphate, which comprises
[80257] (a) increasing or generating one or more activities selected from the group consisting of b1214-protein in a non-human organism or a part thereof, preferably a microorganism, a plant cell, a plant or a part thereof, as compared to a corresponding non-transformed wild type non-human organism or a part thereof; and
[80258] (b) growing the non-human organism or a part thereof under conditions which permit the production of glucose-1-phosphate or a composition comprising glucose-1-phosphate in said non-human organism or in the culture medium surrounding said non-human organism.

[80259] Accordingly, the present invention relates to a process for the production of 3,4,5-trihydroxypentanoic acid, which comprises
[80260] (a) increasing or generating one or more activities selected from the group consisting of b1214-protein in a non-human organism or a part thereof, preferably a microorganism, a plant cell, a plant or a part thereof, as compared to a corresponding non-transformed wild type non-human organism or a part thereof; and
[80261] (b) growing the non-human organism or a part thereof under conditions which permit the production of 3,4,5-trihydroxypentanoic acid or a composition comprising 3,4,5-trihydroxypentanoic acid in said non-human organism or in the culture medium surrounding said non-human organism.

[80262] Accordingly, the present invention relates to a process for the production of glucose-1-phosphate, which comprises
[80263] (a) increasing or generating one or more activities selected from the group consisting of b1219-protein in a non-human organism or a part thereof, preferably a microorganism, a plant cell, a plant or a part thereof, as compared to a corresponding non-transformed wild type non-human organism or a part thereof; and
[80264] (b) growing the non-human organism or a part thereof under conditions which permit the production of glucose-1-phosphate or a composition comprising glucose-1-phosphate in said non-human organism or in the culture medium surrounding said non-human organism.

[80265] Accordingly, the present invention relates to a process for the production of myo-inositol, which comprises
[80266] (a) increasing or generating one or more activities selected from the group consisting of b1219-protein in a non-human organism or a part thereof, preferably a microorganism, a plant cell, a plant or a part thereof, as compared to a corresponding non-transformed wild type non-human organism or a part thereof; and
[80267] (b) growing the non-human organism or a part thereof under conditions which permit the production of myo-inositol or a composition comprising myo-inositol in said non-human organism or in the culture medium surrounding said non-human organism.

[80268] Accordingly, the present invention relates to a process for the production of 3,4,5-trihydroxypentanoic acid, which comprises
[80269] (a) increasing or generating one or more activities selected from the group consisting of b1219-protein in a non-human organism or a part thereof, preferably a microorganism, a plant cell, a plant or a part thereof, as compared to a corresponding non-transformed wild type non-human organism or a part thereof; and
[80270] (b) growing the non-human organism or a part thereof under conditions which permit the production of 3,4,5-trihydroxypentanoic acid or a composition comprising 3,4,5-trihydroxypentanoic acid in said non-human organism or in the culture medium surrounding said non-human organism.

[80271] Accordingly, the present invention relates to a process for the production of myo-inositol, which comprises
[80272] (a) increasing or generating one or more activities selected from the group consisting of b1234-protein in a non-human organism or a part thereof, preferably a microorganism, a plant cell, a plant or a part thereof, as compared to a corresponding non-transformed wild type non-human organism or a part thereof; and
[80273] (b) growing the non-human organism or a part thereof under conditions which permit the production of myo-inositol or a composition comprising myo-inositol in said non-human organism or in the culture medium surrounding said non-human organism.

[80274] Accordingly, the present invention relates to a process for the production of galactinol, which comprises
[80275] (a) increasing or generating one or more activities selected from the group consisting of cardiolipin synthase in a non-human organism or a part thereof, preferably a microorganism, a plant cell, a plant or a part thereof, as compared to a corresponding non-transformed wild type non-human organism or a part thereof; and
[80276] (b) growing the non-human organism or a part thereof under conditions which permit the production of galactinol or a composition comprising galactinol in said non-human organism or in the culture medium surrounding said non-human organism.

[80277] Accordingly, the present invention relates to a process for the production of galactitol, which comprises
[80278] (a) increasing or generating one or more activities selected from the group consisting of cardiolipin synthase in a non-human organism or a part thereof, preferably a microorganism, a plant cell, a plant or a part thereof, as compared to a corresponding non-transformed wild type non-human organism or a part thereof; and
[80279] (b) growing the non-human organism or a part thereof under conditions which permit the production of galactitol or a composition comprising galactitol in said non-human organism or in the culture medium surrounding said non-human organism.

[80280] Accordingly, the present invention relates to a process for the production of sorbitol, which comprises
[80281] (a) increasing or generating one or more activities selected from the group consisting of cardiolipin synthase in a non-human organism or a part thereof, preferably a microorganism, a plant cell, a plant or a part thereof, as compared to a corresponding non-transformed wild type non-human organism or a part thereof; and
[80282] (b) growing the non-human organism or a part thereof under conditions which permit the production of sorbitol or a composition comprising sorbitol in said non-human organism or in the culture medium surrounding said non-human organism.

[80283] Accordingly, the present invention relates to a process for the production of 3,4,5-trihydroxypentanoic acid, which comprises
[80284] (a) increasing or generating one or more activities selected from the group consisting of intracellular septation protein in a non-human organism or a part thereof, preferably a microorganism, a plant cell, a plant or a part thereof, as compared to a corresponding non-transformed wild type non-human organism or a part thereof; and
[80285] (b) growing the non-human organism or a part thereof under conditions which permit the production of 3,4,5-trihydroxypentanoic acid or a composition comprising 3,4,5-trihydroxypentanoic acid in said non-human organism or in the culture medium surrounding said non-human organism.

[80286] Accordingly, the present invention relates to a process for the production of fructose, which comprises
[80287] (a) increasing or generating one or more activities selected from the group consisting of membrane protein in a non-human organism or a part thereof, preferably a microorganism, a plant cell, a plant or a part thereof, as compared to a corresponding non-transformed wild type non-human organism or a part thereof; and
[80288] (b) growing the non-human organism or a part thereof under conditions which permit the production of fructose or a composition comprising fructose in said non-human organism or in the culture medium surrounding said non-human organism.

[80289] Accordingly, the present invention relates to a process for the production of glucose, which comprises
[80290] (a) increasing or generating one or more activities selected from the group consisting of membrane protein in a non-human organism or a part thereof, preferably a microorganism, a plant cell, a plant or a part thereof, as compared to a corresponding non-transformed wild type non-human organism or a part thereof; and
[80291] (b) growing the non-human organism or a part thereof under conditions which permit the production of glucose or a composition comprising glucose in said non-human organism or in the culture medium surrounding said non-human organism.

[80292] Accordingly, the present invention relates to a process for the production of raffinose, which comprises
[80293] (a) increasing or generating one or more activities selected from the group consisting of membrane protein in a non-human organism or a part thereof, preferably a microorganism, a plant cell, a plant or a part thereof, as compared to a corresponding non-transformed wild type non-human organism or a part thereof; and
[80294] (b) growing the non-human organism or a part thereof under conditions which permit the production of raffinose or a composition comprising raffinose in said non-human organism or in the culture medium surrounding said non-human organism.

[80295] Accordingly, the present invention relates to a process for the production of sucrose, which comprises
[80296] (a) increasing or generating one or more activities selected from the group consisting of membrane protein in a non-human organism or a part thereof, preferably a microorganism, a plant cell, a plant or a part thereof, as compared to a corresponding non-transformed wild type non-human organism or a part thereof; and
[80297] (b) growing the non-human organism or a part thereof under conditions which permit the production of sucrose or a composition comprising sucrose in said non-human organism or in the culture medium surrounding said non-human organism.

[80298] Accordingly, the present invention relates to a process for the production of myo-inositol, which comprises
[80299] (a) increasing or generating one or more activities selected from the group consisting of tryptophan biosynthesis protein in a non-human organism or a part thereof, preferably a microorganism, a plant cell, a plant or a part thereof, as compared to a corresponding non-transformed wild type non-human organism or a part thereof; and
[80300] (b) growing the non-human organism or a part thereof under conditions which permit the production of myo-inositol or a composition comprising myo-inositol in said non-human organism or in the culture medium surrounding said non-human organism.

[80301] Accordingly, the present invention relates to a process for the production of fructose, which comprises
[80302] (a) increasing or generating one or more activities selected from the group consisting of b1285-protein in a non-human organism or a part thereof, preferably a microorganism, a plant cell, a plant or a part thereof, as compared to a corresponding non-transformed wild type non-human organism or a part thereof; and
[80303] (b) growing the non-human organism or a part thereof under conditions which permit the production of fructose or a composition comprising fructose in said non-human organism or in the culture medium surrounding said non-human organism.

[80304] Accordingly, the present invention relates to a process for the production of glucose-1-phosphate, which comprises
[80305] (a) increasing or generating one or more activities selected from the group consisting of phage-related repressor protein in a non-human organism or a part thereof, preferably a microorganism, a plant cell, a plant or a part thereof, as compared to a corresponding non-transformed wild type non-human organism or a part thereof; and
[80306] (b) growing the non-human organism or a part thereof under conditions which permit the production of glucose-1-phosphate or a composition comprising glucose-1-phosphate in said non-human organism or in the culture medium surrounding said non-human organism.

[80307] Accordingly, the present invention relates to a process for the production of glucose-1-phosphate, which comprises
[80308] (a) increasing or generating one or more activities selected from the group consisting of b1357-protein in a non-human organism or a part thereof, preferably a microorganism, a plant cell, a plant or a part thereof, as compared to a corresponding non-transformed wild type non-human organism or a part thereof; and
[80309] (b) growing the non-human organism or a part thereof under conditions which permit the production of glucose-1-phosphate or a composition comprising glucose-1-phosphate in said non-human organism or in the culture medium surrounding said non-human organism.

[80310] Accordingly, the present invention relates to a process for the production of glucose, which comprises
[80311] (a) increasing or generating one or more activities selected from the group consisting of phenylacetic acid degradation protein in a non-human organism or a part thereof, preferably a microorganism, a plant cell, a plant or a part thereof, as compared to a corresponding non-transformed wild type non-human organism or a part thereof; and
[80312] (b) growing the non-human organism or a part thereof under conditions which permit the production of glucose or a composition comprising glucose in said non-human organism or in the culture medium surrounding said non-human organism.

[80313] Accordingly, the present invention relates to a process for the production of 3,4,5-trihydroxypentanoic acid, which comprises
[80314] (a) increasing or generating one or more activities selected from the group consisting of phenylacetic acid degradation protein in a non-human organism or a part thereof, preferably a microorganism, a plant cell, a plant or a part thereof, as compared to a corresponding non-transformed wild type non-human organism or a part thereof; and
[80315] (b) growing the non-human organism or a part thereof under conditions which permit the production of 3,4,5-trihydroxypentanoic acid or a composition comprising 3,4,5-trihydroxypentanoic acid in said non-human organism or in the culture medium surrounding said non-human organism.

[80316] Accordingly, the present invention relates to a process for the production of sedoheptulose-7-phosphate, which comprises
[80317] (a) increasing or generating one or more activities selected from the group consisting of b1410-protein in a non-human organism or a part thereof, preferably a microorganism, a plant cell, a plant or a part thereof, as compared to a corresponding non-transformed wild type non-human organism or a part thereof; and
[80318] (b) growing the non-human organism or a part thereof under conditions which permit the production of sedoheptulose-7-phosphate or a composition comprising sedoheptulose-7-phosphate in said non-human organism or in the culture medium surrounding said non-human organism.

[80319] Accordingly, the present invention relates to a process for the production of myo-inositol, which comprises
[80320] (a) increasing or generating one or more activities selected from the group consisting of b1425-protein in a non-human organism or a part thereof, preferably a microorganism, a plant cell, a plant or a part thereof, as compared to a corresponding non-transformed wild type non-human organism or a part thereof; and
[80321] (b) growing the non-human organism or a part thereof under conditions which permit the production of myo-inositol or a composition comprising myo-inositol in said non-human organism or in the culture medium surrounding said non-human organism.

[80322] Accordingly, the present invention relates to a process for the production of glucose-1-phosphate, which comprises
[80323] (a) increasing or generating one or more activities selected from the group consisting of lipoprotein precursor in a non-human organism or a part thereof, preferably a microorganism, a plant cell, a plant or a part thereof, as compared to a corresponding non-transformed wild type non-human organism or a part thereof; and
[80324] (b) growing the non-human organism or a part thereof under conditions which permit the production of glucose-1-phosphate or a composition comprising glucose-1-phosphate in said non-human organism or in the culture medium surrounding said non-human organism.

[80325] Accordingly, the present invention relates to a process for the production of sedoheptulose-7-phosphate, which comprises
[80326] (a) increasing or generating one or more activities selected from the group consisting of lipoprotein precursor in a non-human organism or a part thereof, preferably a microorganism, a plant cell, a plant or a part thereof, as compared to a corresponding non-transformed wild type non-human organism or a part thereof; and
[80327] (b) growing the non-human organism or a part thereof under conditions which permit the production of sedoheptulose-7-phosphate or a composition comprising sedoheptulose-7-phosphate in said non-human organism or in the culture medium surrounding said non-human organism.

[80328] Accordingly, the present invention relates to a process for the production of 3,4,5-trihydroxypentanoic acid, which comprises
[80329] (a) increasing or generating one or more activities selected from the group consisting of lipoprotein precursor in a non-human organism or a part thereof, preferably a microorganism, a plant cell, a plant or a part thereof, as compared to a corresponding non-transformed wild type non-human organism or a part thereof; and
[80330] (b) growing the non-human organism or a part thereof under conditions which permit the production of 3,4,5-trihydroxypentanoic acid or a composition comprising 3,4,5-trihydroxypentanoic acid in said non-human organism or in the culture medium surrounding said non-human organism.

[80331] Accordingly, the present invention relates to a process for the production of 3,4,5-trihydroxypentanoic acid, which comprises
[80332] (a) increasing or generating one or more activities selected from the group consisting of b1445-protein in a non-human organism or a part thereof, preferably a microorganism, a plant cell, a plant or a part thereof, as compared to a corresponding non-transformed wild type non-human organism or a part thereof; and
[80333] (b) growing the non-human organism or a part thereof under conditions which permit the production of 3,4,5-trihydroxypentanoic acid or a composition comprising 3,4,5-trihydroxypentanoic acid in said non-human organism or in the culture medium surrounding said non-human organism.

[80334] Accordingly, the present invention relates to a process for the production of glucose-1-phosphate, which comprises
[80335] (a) increasing or generating one or more activities selected from the group consisting of b1470-protein in a non-human organism or a part thereof, preferably a microorganism, a plant cell, a plant or a part thereof, as compared to a corresponding non-transformed wild type non-human organism or a part thereof; and
[80336] (b) growing the non-human organism or a part thereof under conditions which permit the production of glucose-1-phosphate or a composition comprising glucose-1-phosphate in said non-human organism or in the culture medium surrounding said non-human organism.

[80337] Accordingly, the present invention relates to a process for the production of fructose, which comprises
[80338] (a) increasing or generating one or more activities selected from the group consisting of b1522-protein in a non-human organism or a part thereof, preferably a microorganism, a plant cell, a plant or a part thereof, as compared to a corresponding non-transformed wild type non-human organism or a part thereof; and
[80339] (b) growing the non-human organism or a part thereof under conditions which permit the production of fructose or a composition comprising fructose in said non-human organism or in the culture medium surrounding said non-human organism.

[80340] Accordingly, the present invention relates to a process for the production of glucose-1-phosphate, which comprises
[80341] (a) increasing or generating one or more activities selected from the group consisting of b1522-protein in a non-human organism or a part thereof, preferably a microorganism, a plant cell, a plant or a part thereof, as compared to a corresponding non-transformed wild type non-human organism or a part thereof; and
[80342] (b) growing the non-human organism or a part thereof under conditions which permit the production of glucose-1-phosphate or a composition comprising glucose-1-phosphate in said non-human organism or in the culture medium surrounding said non-human organism.

[80343] Accordingly, the present invention relates to a process for the production of glucose-1-phosphate, which comprises
[80344] (a) increasing or generating one or more activities selected from the group consisting of b1556-protein in a non-human organism or a part thereof, preferably a microorganism, a plant cell, a plant or a part thereof, as compared to a corresponding non-transformed wild type non-human organism or a part thereof; and
[80345] (b) growing the non-human organism or a part thereof under conditions which permit the production of glucose-1-phosphate or a composition comprising glucose-1-phosphate in said non-human organism or in the culture medium surrounding said non-human organism.

[80346] Accordingly, the present invention relates to a process for the production of sedoheptulose-7-phosphate, which comprises
[80347] (a) increasing or generating one or more activities selected from the group consisting of b1556-protein in a non-human organism or a part thereof, preferably a microorganism, a plant cell, a plant or a part thereof, as compared to a corresponding non-transformed wild type non-human organism or a part thereof; and
[80348] (b) growing the non-human organism or a part thereof under conditions which permit the production of sedoheptulose-7-phosphate or a composition comprising sedoheptulose-7-phosphate in said non-human organism or in the culture medium surrounding said non-human organism.

[80349] Accordingly, the present invention relates to a process for the production of glucose-1-phosphate, which comprises
[80350] (a) increasing or generating one or more activities selected from the group consisting of b1583-protein in a non-human organism or a part thereof, preferably a microorganism, a plant cell, a plant or a part thereof, as compared to a corresponding non-transformed wild type non-human organism or a part thereof; and
[80351] (b) growing the non-human organism or a part thereof under conditions which permit the production of glucose-1-phosphate or a composition comprising glucose-1-phosphate in said non-human organism or in the culture medium surrounding said non-human organism.

[80352] Accordingly, the present invention relates to a process for the production of glucose-1-phosphate, which comprises
[80353] (a) increasing or generating one or more activities selected from the group consisting of Fe—S subunit of oxidoreductase in a non-human organism or a part thereof, preferably a microorganism, a plant cell, a plant or a part thereof, as compared to a corresponding non-transformed wild type non-human organism or a part thereof; and
[80354] (b) growing the non-human organism or a part thereof under conditions which permit the production of glucose-1-phosphate or a composition comprising glucose-1-phosphate in said non-human organism or in the culture medium surrounding said non-human organism.

[80355] Accordingly, the present invention relates to a process for the production of 3,4,5-trihydroxypentanoic acid, which comprises
[80356] (a) increasing or generating one or more activities selected from the group consisting of Fe—S subunit of oxidoreductase in a non-human organism or a part thereof, preferably a microorganism, a plant cell, a plant or a part thereof, as compared to a corresponding non-transformed wild type non-human organism or a part thereof; and
[80357] (b) growing the non-human organism or a part thereof under conditions which permit the production of 3,4,5-trihydroxypentanoic acid or a composition comprising 3,4,5-trihydroxypentanoic acid in said non-human organism or in the culture medium surrounding said non-human organism.

[80358] Accordingly, the present invention relates to a process for the production of fructose, which comprises
[80359] (a) increasing or generating one or more activities selected from the group consisting of acid shock protein in a non-human organism or a part thereof, preferably a microorganism, a plant cell, a plant or a part thereof, as compared to a corresponding non-transformed wild type non-human organism or a part thereof; and
[80360] (b) growing the non-human organism or a part thereof under conditions which permit the production of fructose or a composition comprising fructose in said non-human organism or in the culture medium surrounding said non-human organism.

[80361] Accordingly, the present invention relates to a process for the production of glucose, which comprises
[80362] (a) increasing or generating one or more activities selected from the group consisting of acid shock protein in a non-human organism or a part thereof, preferably a microorganism, a plant cell, a plant or a part thereof, as compared to a corresponding non-transformed wild type non-human organism or a part thereof; and
[80363] (b) growing the non-human organism or a part thereof under conditions which permit the production of glucose or a composition comprising glucose in said non-human organism or in the culture medium surrounding said non-human organism.

[80364] Accordingly, the present invention relates to a process for the production of glucose-1-phosphate, which comprises
[80365] (a) increasing or generating one or more activities selected from the group consisting of acid shock protein in a non-human organism or a part thereof, preferably a microorganism, a plant cell, a plant or a part thereof, as compared to a corresponding non-transformed wild type non-human organism or a part thereof; and
[80366] (b) growing the non-human organism or a part thereof under conditions which permit the production of glucose-1-phosphate or a composition comprising glucose-1-phosphate in said non-human organism or in the culture medium surrounding said non-human organism.

[80367] Accordingly, the present invention relates to a process for the production of myo-inositol, which comprises
[80368] (a) increasing or generating one or more activities selected from the group consisting of acid shock protein in a non-human organism or a part thereof, preferably a microorganism, a plant cell, a plant or a part thereof, as compared to a corresponding non-transformed wild type non-human organism or a part thereof; and
[80369] (b) growing the non-human organism or a part thereof under conditions which permit the production of myo-inositol or a composition comprising myo-inositol in said non-human organism or in the culture medium surrounding said non-human organism.

[80370] Accordingly, the present invention relates to a process for the production of raffinose, which comprises
[80371] (a) increasing or generating one or more activities selected from the group consisting of acid shock protein in a non-human organism or a part thereof, preferably a microorganism, a plant cell, a plant or a part thereof, as compared to a corresponding non-transformed wild type non-human organism or a part thereof; and
[80372] (b) growing the non-human organism or a part thereof under conditions which permit the production of raffinose or a composition comprising raffinose in said non-human organism or in the culture medium surrounding said non-human organism.

[80373] Accordingly, the present invention relates to a process for the production of fructose, which comprises
[80374] (a) increasing or generating one or more activities selected from the group consisting of phosphotransferase system component in a non-human organism or a part thereof, preferably a microorganism, a plant cell, a plant or a part thereof, as compared to a corresponding non-transformed wild type non-human organism or a part thereof; and
[80375] (b) growing the non-human organism or a part thereof under conditions which permit the production of fructose or a composition comprising fructose in said non-human organism or in the culture medium surrounding said non-human organism.

[80376] Accordingly, the present invention relates to a process for the production of glucose, which comprises
[80377] (a) increasing or generating one or more activities selected from the group consisting of phosphotransferase system component in a non-human organism or a part thereof, preferably a microorganism, a plant cell, a plant or a part thereof, as compared to a corresponding non-transformed wild type non-human organism or a part thereof; and
[80378] (b) growing the non-human organism or a part thereof under conditions which permit the production of glucose or a composition comprising glucose in said non-human organism or in the culture medium surrounding said non-human organism.

[80379] Accordingly, the present invention relates to a process for the production of glucose, which comprises
[80380] (a) increasing or generating one or more activities selected from the group consisting of electron transport complex protein in a non-human organism or a part thereof, preferably a microorganism, a plant cell, a plant or a part thereof, as compared to a corresponding non-transformed wild type non-human organism or a part thereof; and
[80381] (b) growing the non-human organism or a part thereof under conditions which permit the production of glucose or a composition comprising glucose in said non-human organism or in the culture medium surrounding said non-human organism.

[80382] Accordingly, the present invention relates to a process for the production of glucose-1-phosphate, which comprises
[80383] (a) increasing or generating one or more activities selected from the group consisting of electron transport complex protein in a non-human organism or a part thereof, preferably a microorganism, a plant cell, a plant or a part thereof, as compared to a corresponding non-transformed wild type non-human organism or a part thereof; and
[80384] (b) growing the non-human organism or a part thereof under conditions which permit the production of glucose-1-phosphate or a composition comprising glucose-1-phosphate in said non-human organism or in the culture medium surrounding said non-human organism.

[80385] Accordingly, the present invention relates to a process for the production of 3,4,5-trihydroxypentanoic acid, which comprises
[80386] (a) increasing or generating one or more activities selected from the group consisting of electron transport complex protein in a non-human organism or a part thereof, preferably a microorganism, a plant cell, a plant or a part thereof, as compared to a corresponding non-transformed wild type non-human organism or a part thereof; and
[80387] (b) growing the non-human organism or a part thereof under conditions which permit the production of 3,4,5-trihydroxypentanoic acid or a composition comprising 3,4,5-trihydroxypentanoic acid in said non-human organism or in the culture medium surrounding said non-human organism.

[80388] Accordingly, the present invention relates to a process for the production of myo-inositol, which comprises
[80389] (a) increasing or generating one or more activities selected from the group consisting of methylglyoxalase in a non-human organism or a part thereof, preferably a microorganism, a plant cell, a plant or a part thereof, as compared to a corresponding non-transformed wild type non-human organism or a part thereof; and
[80390] (b) growing the non-human organism or a part thereof under conditions which permit the production of myo-inositol or a composition comprising myo-inositol in said non-human organism or in the culture medium surrounding said non-human organism.

[80391] Accordingly, the present invention relates to a process for the production of myo-inositol, which comprises
[80392] (a) increasing or generating one or more activities selected from the group consisting of b1670-protein in a non-human organism or a part thereof, preferably a microorganism, a plant cell, a plant or a part thereof, as compared to a corresponding non-transformed wild type non-human organism or a part thereof; and
[80393] (b) growing the non-human organism or a part thereof under conditions which permit the production of myo-inositol or a composition comprising myo-inositol in said non-human organism or in the culture medium surrounding said non-human organism.

[80394] Accordingly, the present invention relates to a process for the production of fructose, which comprises
[80395] (a) increasing or generating one or more activities selected from the group consisting of ABC transporter permease protein in a non-human organism or a part thereof, preferably a microorganism, a plant cell, a plant or a part thereof, as compared to a corresponding non-transformed wild type non-human organism or a part thereof; and
[80396] (b) growing the non-human organism or a part thereof under conditions which permit the production of fructose or a composition comprising fructose in said non-human organism or in the culture medium surrounding said non-human organism.

[80397] Accordingly, the present invention relates to a process for the production of myo-inositol, which comprises
[80398] (a) increasing or generating one or more activities selected from the group consisting of transport protein in a non-human organism or a part thereof, preferably a microorganism, a plant cell, a plant or a part thereof, as compared to a corresponding non-transformed wild type non-human organism or a part thereof; and
[80399] (b) growing the non-human organism or a part thereof under conditions which permit the production of myo-inositol or a composition comprising myo-inositol in said non-human organism or in the culture medium surrounding said non-human organism.

[80400] Accordingly, the present invention relates to a process for the production of fructose, which comprises
[80401] (a) increasing or generating one or more activities selected from the group consisting of b1796-protein in a non-human organism or a part thereof, preferably a microorganism, a plant cell, a plant or a part thereof, as compared to a corresponding non-transformed wild type non-human organism or a part thereof; and
[80402] (b) growing the non-human organism or a part thereof under conditions which permit the production of fructose or a composition comprising fructose in said non-human organism or in the culture medium surrounding said non-human organism.

[80403] Accordingly, the present invention relates to a process for the production of myo-inositol, which comprises
[80404] (a) increasing or generating one or more activities selected from the group consisting of para-aminobenzoate synthase component I in a non-human organism or a part thereof, preferably a microorganism, a plant cell, a plant or a part thereof, as compared to a corresponding non-transformed wild type non-human organism or a part thereof; and
[80405] (b) growing the non-human organism or a part thereof under conditions which permit the production of myo-inositol or a composition comprising myo-inositol in said non-human organism or in the culture medium surrounding said non-human organism.

[80406] Accordingly, the present invention relates to a process for the production of galactitol, which comprises
[80407] (a) increasing or generating one or more activities selected from the group consisting of L-serine dehydratase in a non-human organism or a part thereof, preferably a microorganism, a plant cell, a plant or a part thereof, as compared to a corresponding non-transformed wild type non-human organism or a part thereof; and
[80408] (b) growing the non-human organism or a part thereof under conditions which permit the production of galactitol or a composition comprising galactitol in said non-human organism or in the culture medium surrounding said non-human organism.

[80409] Accordingly, the present invention relates to a process for the production of sorbitol, which comprises
[80410] (a) increasing or generating one or more activities selected from the group consisting of L-serine dehydratase in a non-human organism or a part thereof, preferably a microorganism, a plant cell, a plant or a part thereof, as compared to a corresponding non-transformed wild type non-human organism or a part thereof; and
[80411] (b) growing the non-human organism or a part thereof under conditions which permit the production of sorbitol or a composition comprising sorbitol in said non-human organism or in the culture medium surrounding said non-human organism.

[80412] Accordingly, the present invention relates to a process for the production of myo-inositol, which comprises
[80413] (a) increasing or generating one or more activities selected from the group consisting of protease in a non-human organism or a part thereof, preferably a microorganism, a plant cell, a plant or a part thereof, as compared to a corresponding non-transformed wild type non-human organism or a part thereof; and
[80414] (b) growing the non-human organism or a part thereof under conditions which permit the production of myo-inositol or a composition comprising myo-inositol in said non-human organism or in the culture medium surrounding said non-human organism.

[80415] Accordingly, the present invention relates to a process for the production of erythrol, which comprises
[80416] (a) increasing or generating one or more activities selected from the group consisting of pyruvate kinase in a non-human organism or a part thereof, preferably a microorganism, a plant cell, a plant or a part thereof, as compared to a corresponding non-transformed wild type non-human organism or a part thereof; and
[80417] (b) growing the non-human organism or a part thereof under conditions which permit the production of erythrol or a composition comprising erythrol in said non-human organism or in the culture medium surrounding said non-human organism.

[80418] Accordingly, the present invention relates to a process for the production of myo-inositol, which comprises
[80419] (a) increasing or generating one or more activities selected from the group consisting of pyruvate kinase in a non-human organism or a part thereof, preferably a microorganism, a plant cell, a plant or a part thereof, as compared to a corresponding non-transformed wild type non-human organism or a part thereof; and
[80420] (b) growing the non-human organism or a part thereof under conditions which permit the production of myo-inositol or a composition comprising myo-inositol in said non-human organism or in the culture medium surrounding said non-human organism.

[80421] Accordingly, the present invention relates to a process for the production of sorbitol, which comprises
[80422] (a) increasing or generating one or more activities selected from the group consisting of pyruvate kinase in a non-human organism or a part thereof, preferably a microorganism, a plant cell, a plant or a part thereof, as compared to a corresponding non-transformed wild type non-human organism or a part thereof; and
[80423] (b) growing the non-human organism or a part thereof under conditions which permit the production of sorbitol or a composition comprising sorbitol in said non-human organism or in the culture medium surrounding said non-human organism.

[80424] Accordingly, the present invention relates to a process for the production of fructose, which comprises
[80425] (a) increasing or generating one or more activities selected from the group consisting of dATP pyrophosphohydrolase in a non-human organism or a part thereof, preferably a microorganism, a plant cell, a plant or a part thereof, as compared to a corresponding non-transformed wild type non-human organism or a part thereof; and
[80426] (b) growing the non-human organism or a part thereof under conditions which permit the production of fructose or a composition comprising fructose in said non-human organism or in the culture medium surrounding said non-human organism.

[80427] Accordingly, the present invention relates to a process for the production of glucose-1-phosphate, which comprises
[80428] (a) increasing or generating one or more activities selected from the group consisting of trehalose-6-phosphate synthase in a non-human organism or a part thereof, preferably a microorganism, a plant cell, a plant or a part thereof, as compared to a corresponding non-transformed wild type non-human organism or a part thereof; and
[80429] (b) growing the non-human organism or a part thereof under conditions which permit the production of glucose-1-phosphate or a composition comprising glucose-1-phosphate in said non-human organism or in the culture medium surrounding said non-human organism.

[80430] Accordingly, the present invention relates to a process for the production of trehalose, which comprises
[80431] (a) increasing or generating one or more activities selected from the group consisting of trehalose-6-phosphate synthase in a non-human organism or a part thereof, preferably a microorganism, a plant cell, a plant or a part thereof, as compared to a corresponding non-transformed wild type non-human organism or a part thereof; and
[80432] (b) growing the non-human organism or a part thereof under conditions which permit the production of trehalose or a composition comprising trehalose in said non-human organism or in the culture medium surrounding said non-human organism.

[80433] Accordingly, the present invention relates to a process for the production of erythrol, which comprises
[80434] (a) increasing or generating one or more activities selected from the group consisting of trehalose-phosphatase in a non-human organism or a part thereof, preferably a microorganism, a plant cell, a plant or a part thereof, as compared to a corresponding non-transformed wild type non-human organism or a part thereof; and
[80435] (b) growing the non-human organism or a part thereof under conditions which permit the production of erythrol or a composition comprising erythrol in said non-human organism or in the culture medium surrounding said non-human organism.

[80436] Accordingly, the present invention relates to a process for the production of fructose, which comprises
[80437] (a) increasing or generating one or more activities selected from the group consisting of trehalose-phosphatase in a non-human organism or a part thereof, preferably a microorganism, a plant cell, a plant or a part thereof, as compared to a corresponding non-transformed wild type non-human organism or a part thereof; and
[80438] (b) growing the non-human organism or a part thereof under conditions which permit the production of fructose or a composition comprising fructose in said non-human organism or in the culture medium surrounding said non-human organism.

[80439] Accordingly, the present invention relates to a process for the production of glucose, which comprises
[80440] (a) increasing or generating one or more activities selected from the group consisting of trehalose-phosphatase in a non-human organism or a part thereof, preferably a microorganism, a plant cell, a plant or a part thereof, as compared to a corresponding non-transformed wild type non-human organism or a part thereof; and
[80441] (b) growing the non-human organism or a part thereof under conditions which permit the production of glucose or a composition comprising glucose in said non-human organism or in the culture medium surrounding said non-human organism.

[80442] Accordingly, the present invention relates to a process for the production of sucrose, which comprises
[80443] (a) increasing or generating one or more activities selected from the group consisting of trehalose-phosphatase in a non-human organism or a part thereof, preferably a microorganism, a plant cell, a plant or a part thereof, as compared to a corresponding non-transformed wild type non-human organism or a part thereof; and
[80444] (b) growing the non-human organism or a part thereof under conditions which permit the production of sucrose or a composition comprising sucrose in said non-human organism or in the culture medium surrounding said non-human organism.

[80445] Accordingly, the present invention relates to a process for the production of raffinose, which comprises
[80446] (a) increasing or generating one or more activities selected from the group consisting of b1898-protein in a non-human organism or a part thereof, preferably a microorganism, a plant cell, a plant or a part thereof, as compared to a corresponding non-transformed wild type non-human organism or a part thereof; and
[80447] (b) growing the non-human organism or a part thereof under conditions which permit the production of raffinose or a composition comprising raffinose in said non-human organism or in the culture medium surrounding said non-human organism.

[80448] Accordingly, the present invention relates to a process for the production of glucose-1-phosphate, which comprises
[80449] (a) increasing or generating one or more activities selected from the group consisting of acetyltransferase in a non-human organism or a part thereof, preferably a microorganism, a plant cell, a plant or a part thereof, as compared to a corresponding non-transformed wild type non-human organism or a part thereof; and
[80450] (b) growing the non-human organism or a part thereof under conditions which permit the production of glucose-1-phosphate or a composition comprising glucose-1-phosphate in said non-human organism or in the culture medium surrounding said non-human organism.

[80451] Accordingly, the present invention relates to a process for the production of 3,4,5-trihydroxypentanoic acid, which comprises
[80452] (a) increasing or generating one or more activities selected from the group consisting of acetyltransferase in a non-human organism or a part thereof, preferably a microorganism, a plant cell, a plant or a part thereof, as compared to a corresponding non-transformed wild type non-human organism or a part thereof; and
[80453] (b) growing the non-human organism or a part thereof under conditions which permit the production of 3,4,5-trihydroxypentanoic acid or a composition comprising 3,4,5-trihydroxypentanoic acid in said non-human organism or in the culture medium surrounding said non-human organism.

[80454] Accordingly, the present invention relates to a process for the production of glucose, which comprises
[80455] (a) increasing or generating one or more activities selected from the group consisting of flagellar M-ring protein in a non-human organism or a part thereof, preferably a microorganism, a plant cell, a plant or a part thereof, as compared to a corresponding non-transformed wild type non-human organism or a part thereof; and
[80456] (b) growing the non-human organism or a part thereof under conditions which permit the production of glucose or a composition comprising glucose in said non-human organism or in the culture medium surrounding said non-human organism.

[80457] Accordingly, the present invention relates to a process for the production of myo-inositol, which comprises
[80458] (a) increasing or generating one or more activities selected from the group consisting of flagellar M-ring protein in a non-human organism or a part thereof, preferably a microorganism, a plant cell, a plant or a part thereof, as compared to a corresponding non-transformed wild type non-human organism or a part thereof; and
[80459] (b) growing the non-human organism or a part thereof under conditions which permit the production of myo-inositol or a composition comprising myo-inositol in said non-human organism or in the culture medium surrounding said non-human organism.

[80460] Accordingly, the present invention relates to a process for the production of fructose, which comprises
[80461] (a) increasing or generating one or more activities selected from the group consisting of O-antigen chain length determinant in a non-human organism or a part thereof, preferably a microorganism, a plant cell, a plant or a part thereof, as compared to a corresponding non-transformed wild type non-human organism or a part thereof; and
[80462] (b) growing the non-human organism or a part thereof under conditions which permit the production of fructose or a composition comprising fructose in said non-human organism or in the culture medium surrounding said non-human organism.

[80463] Accordingly, the present invention relates to a process for the production of glucose, which comprises
[80464] (a) increasing or generating one or more activities selected from the group consisting of b2032-protein in a non-human organism or a part thereof, preferably a microorganism, a plant cell, a plant or a part thereof, as compared to a corresponding non-transformed wild type non-human organism or a part thereof; and
[80465] (b) growing the non-human organism or a part thereof under conditions which permit the production of glucose or a composition comprising glucose in said non-human organism or in the culture medium surrounding said non-human organism.

[80466] Accordingly, the present invention relates to a process for the production of myo-inositol, which comprises
[80467] (a) increasing or generating one or more activities selected from the group consisting of b2032-protein in a non-human organism or a part thereof, preferably a microorganism, a plant cell, a plant or a part thereof, as compared to a corresponding non-transformed wild type non-human organism or a part thereof; and
[80468] (b) growing the non-human organism or a part thereof under conditions which permit the production of myo-inositol or a composition comprising myo-inositol in said non-human organism or in the culture medium surrounding said non-human organism.

[80469] Accordingly, the present invention relates to a process for the production of glucose-1-phosphate, which comprises
[80470] (a) increasing or generating one or more activities selected from the group consisting of colanic acid biosynthesis protein in a non-human organism or a part thereof, preferably a microorganism, a plant cell, a plant or a part thereof, as compared to a corresponding non-transformed wild type non-human organism or a part thereof; and
[80471] (b) growing the non-human organism or a part thereof under conditions which permit the production of glucose-1-phosphate or a composition comprising glucose-1-phosphate in said non-human organism or in the culture medium surrounding said non-human organism.

[80472] Accordingly, the present invention relates to a process for the production of fucose, which comprises
[80473] (a) increasing or generating one or more activities selected from the group consisting of GDP-mannose 4,6-dehydratase in a non-human organism or a part thereof, preferably a microorganism, a plant cell, a plant or a part thereof, as compared to a corresponding non-transformed wild type non-human organism or a part thereof; and
[80474] (b) growing the non-human organism or a part thereof under conditions which permit the production of fucose or a composition comprising fucose in said non-human organism or in the culture medium surrounding said non-human organism.

[80475] Accordingly, the present invention relates to a process for the production of fructose, which comprises
[80476] (a) increasing or generating one or more activities selected from the group consisting of transport protein in a non-human organism or a part thereof, preferably a microorganism, a plant cell, a plant or a part thereof, as compared to a corresponding non-transformed wild type non-human organism or a part thereof; and
[80477] (b) growing the non-human organism or a part thereof under conditions which permit the production of fructose or a composition comprising fructose in said non-human organism or in the culture medium surrounding said non-human organism.

[80478] Accordingly, the present invention relates to a process for the production of glucose-1-phosphate, which comprises
[80479] (a) increasing or generating one or more activities selected from the group consisting of transport protein in a non-human organism or a part thereof, preferably a microorganism, a plant cell, a plant or a part thereof, as compared to a corresponding non-transformed wild type non-human organism or a part thereof; and
[80480] (b) growing the non-human organism or a part thereof under conditions which permit the production of glucose-1-phosphate or a composition comprising glucose-1-phosphate in said non-human organism or in the culture medium surrounding said non-human organism.

[80481] Accordingly, the present invention relates to a process for the production of raffinose, which comprises
[80482] (a) increasing or generating one or more activities selected from the group consisting of transport protein in a non-human organism or a part thereof, preferably a microorganism, a plant cell, a plant or a part thereof, as compared to a corresponding non-transformed wild type non-human organism or a part thereof; and
[80483] (b) growing the non-human organism or a part thereof under conditions which permit the production of raffinose or a composition comprising raffinose in said non-human organism or in the culture medium surrounding said non-human organism.

[80484] Accordingly, the present invention relates to a process for the production of sucrose, which comprises
[80485] (a) increasing or generating one or more activities selected from the group consisting of transport protein in a non-human organism or a part thereof, preferably a microorganism, a plant cell, a plant or a part thereof, as compared to a corresponding non-transformed wild type non-human organism or a part thereof; and
[80486] (b) growing the non-human organism or a part thereof under conditions which permit the production of sucrose or a composition comprising sucrose in said non-human organism or in the culture medium surrounding said non-human organism.

[80487] Accordingly, the present invention relates to a process for the production of 3,4,5-trihydroxypentanoic acid, which comprises
[80488] (a) increasing or generating one or more activities selected from the group consisting of transport protein in a non-human organism or a part thereof, preferably a microorganism, a plant cell, a plant or a part thereof, as compared to a corresponding non-transformed wild type non-human organism or a part thereof; and
[80489] (b) growing the non-human organism or a part thereof under conditions which permit the production of 3,4,5-trihydroxypentanoic acid or a composition comprising 3,4,5-trihydroxypentanoic acid in said non-human organism or in the culture medium surrounding said non-human organism.

[80490] Accordingly, the present invention relates to a process for the production of glucose-1-phosphate, which comprises
[80491] (a) increasing or generating one or more activities selected from the group consisting of b2107-protein in a non-human organism or a part thereof, preferably a microorganism, a plant cell, a plant or a part thereof, as compared to a corresponding non-transformed wild type non-human organism or a part thereof; and
[80492] (b) growing the non-human organism or a part thereof under conditions which permit the production of glucose-1-phosphate or a composition comprising glucose-1-phosphate in said non-human organism or in the culture medium surrounding said non-human organism.

[80493] Accordingly, the present invention relates to a process for the production of 3,4,5-trihydroxypentanoic acid, which comprises
[80494] (a) increasing or generating one or more activities selected from the group consisting of b2107-protein in a non-human organism or a part thereof, preferably a microorganism, a plant cell, a plant or a part thereof, as compared to a corresponding non-transformed wild type non-human organism or a part thereof; and
[80495] (b) growing the non-human organism or a part thereof under conditions which permit the production of 3,4,5-trihydroxypentanoic acid or a composition comprising 3,4,5-trihydroxypentanoic acid in said non-human organism or in the culture medium surrounding said non-human organism.

[80496] Accordingly, the present invention relates to a process for the production of glucose-1-phosphate, which comprises
[80497] (a) increasing or generating one or more activities selected from the group consisting of b2139-protein in a non-human organism or a part thereof, preferably a microorganism, a plant cell, a plant or a part thereof, as compared to a corresponding non-transformed wild type non-human organism or a part thereof; and
[80498] (b) growing the non-human organism or a part thereof under conditions which permit the production of glucose-1-phosphate or a composition comprising glucose-1-phosphate in said non-human organism or in the culture medium surrounding said non-human organism.

[80499] Accordingly, the present invention relates to a process for the production of erythrol, which comprises
[80500] (a) increasing or generating one or more activities selected from the group consisting of sn-glycerol-3-phosphate dehydrogenase in a non-human organism or a part thereof, preferably a microorganism, a plant cell, a plant or a part thereof, as compared to a corresponding non-transformed wild type non-human organism or a part thereof; and
[80501] (b) growing the non-human organism or a part thereof under conditions which permit the production of erythrol or a composition comprising erythrol in said non-human organism or in the culture medium surrounding said non-human organism.

[80502] Accordingly, the present invention relates to a process for the production of fructose, which comprises
[80503] (a) increasing or generating one or more activities selected from the group consisting of ATP synthase subunit E in a non-human organism or a part thereof, preferably a microorganism, a plant cell, a plant or a part thereof, as compared to a corresponding non-transformed wild type non-human organism or a part thereof; and
[80504] (b) growing the non-human organism or a part thereof under conditions which permit the production of fructose or a composition comprising fructose in said non-human organism or in the culture medium surrounding said non-human organism.

[80505] Accordingly, the present invention relates to a process for the production of galactinol, which comprises
[80506] (a) increasing or generating one or more activities selected from the group consisting of aminotransferase in a non-human organism or a part thereof, preferably a microorganism, a plant cell, a plant or a part thereof, as compared to a corresponding non-transformed wild type non-human organism or a part thereof; and
[80507] (b) growing the non-human organism or a part thereof under conditions which permit the production of galactinol or a composition comprising galactinol in said non-human organism or in the culture medium surrounding said non-human organism.

[80508] Accordingly, the present invention relates to a process for the production of myo-inositol, which comprises
[80509] (a) increasing or generating one or more activities selected from the group consisting of b2345-protein in a non-human organism or a part thereof, preferably a microorganism, a plant cell, a plant or a part thereof, as compared to a corresponding non-transformed wild type non-human organism or a part thereof; and
[80510] (b) growing the non-human organism or a part thereof under conditions which permit the production of myo-inositol or a composition comprising myo-inositol in said non-human organism or in the culture medium surrounding said non-human organism.

[80511] Accordingly, the present invention relates to a process for the production of 3,4,5-trihydroxypentanoic acid, which comprises
[80512] (a) increasing or generating one or more activities selected from the group consisting of b2345-protein in a non-human organism or a part thereof, preferably a microorganism, a plant cell, a plant or a part thereof, as compared to a corresponding non-transformed wild type non-human organism or a part thereof; and
[80513] (b) growing the non-human organism or a part thereof under conditions which permit the production of 3,4,5-trihydroxypentanoic acid or a composition comprising 3,4,5-trihydroxypentanoic acid in said non-human organism or in the culture medium surrounding said non-human organism.

[80514] Accordingly, the present invention relates to a process for the production of verbascose, which comprises
[80515] (a) increasing or generating one or more activities selected from the group consisting of b2360-protein in a non-human organism or a part thereof, preferably a microorganism, a plant cell, a plant or a part thereof, as compared to a corresponding non-transformed wild type non-human organism or a part thereof; and
[80516] (b) growing the non-human organism or a part thereof under conditions which permit the production of verbascose or a composition comprising verbascose in said non-human organism or in the culture medium surrounding said non-human organism.

[80517] Accordingly, the present invention relates to a process for the production of 3,4,5-trihydroxypentanoic acid, which comprises
[80518] (a) increasing or generating one or more activities selected from the group consisting of b2360-protein in a non-human organism or a part thereof, preferably a microorganism, a plant cell, a plant or a part thereof, as compared to a corresponding non-transformed wild type non-human organism or a part thereof; and
[80519] (b) growing the non-human organism or a part thereof under conditions which permit the production of 3,4,5-trihydroxypentanoic acid or a composition comprising 3,4,5-trihydroxypentanoic acid in said non-human organism or in the culture medium surrounding said non-human organism.

[80520] Accordingly, the present invention relates to a process for the production of glucose-1-phosphate, which comprises
[80521] (a) increasing or generating one or more activities selected from the group consisting of b2361-protein in a non-human organism or a part thereof, preferably a microorganism, a plant cell, a plant or a part thereof, as compared to a corresponding non-transformed wild type non-human organism or a part thereof; and
[80522] (b) growing the non-human organism or a part thereof under conditions which permit the production of glucose-1-phosphate or a composition comprising glucose-1-phosphate in said non-human organism or in the culture medium surrounding said non-human organism.

[80523] Accordingly, the present invention relates to a process for the production of 3,4,5-trihydroxypentanoic acid, which comprises
[80524] (a) increasing or generating one or more activities selected from the group consisting of b2361-protein in a non-human organism or a part thereof, preferably a microorganism, a plant cell, a plant or a part thereof, as compared to a corresponding non-transformed wild type non-human organism or a part thereof; and
[80525] (b) growing the non-human organism or a part thereof under conditions which permit the production of 3,4,5-trihydroxypentanoic acid or a composition comprising 3,4,5-trihydroxypentanoic acid in said non-human organism or in the culture medium surrounding said non-human organism.

[80526] Accordingly, the present invention relates to a process for the production of sucrose, which comprises
[80527] (a) increasing or generating one or more activities selected from the group consisting of ion-transport protein in a non-human organism or a part thereof, preferably a microorganism, a plant cell, a plant or a part thereof, as compared to a corresponding non-transformed wild type non-human organism or a part thereof; and
[80528] (b) growing the non-human organism or a part thereof under conditions which permit the production of sucrose or a composition comprising sucrose in said non-human organism or in the culture medium surrounding said non-human organism.

[80529] Accordingly, the present invention relates to a process for the production of fructose, which comprises
[80530] (a) increasing or generating one or more activities selected from the group consisting of b2399-protein in a non-human organism or a part thereof, preferably a microorganism, a plant cell, a plant or a part thereof, as compared to a corresponding non-transformed wild type non-human organism or a part thereof; and
[80531] (b) growing the non-human organism or a part thereof under conditions which permit the production of fructose or a composition comprising fructose in said non-human organism or in the culture medium surrounding said non-human organism.

[80532] Accordingly, the present invention relates to a process for the production of glucose, which comprises
[80533] (a) increasing or generating one or more activities selected from the group consisting of b2399-protein in a non-human organism or a part thereof, preferably a microorganism, a plant cell, a plant or a part thereof, as compared to a corresponding non-transformed wild type non-human organism or a part thereof; and
[80534] (b) growing the non-human organism or a part thereof under conditions which permit the production of glucose or a composition comprising glucose in said non-human organism or in the culture medium surrounding said non-human organism.

[80535] Accordingly, the present invention relates to a process for the production of glucose-1-phosphate, which comprises
[80536] (a) increasing or generating one or more activities selected from the group consisting of b2399-protein in a non-human organism or a part thereof, preferably a microorganism, a plant cell, a plant or a part thereof, as compared to a corresponding non-transformed wild type non-human organism or a part thereof; and
[80537] (b) growing the non-human organism or a part thereof under conditions which permit the production of glucose-1-phosphate or a composition comprising glucose-1-phosphate in said non-human organism or in the culture medium surrounding said non-human organism.

[80538] Accordingly, the present invention relates to a process for the production of myo-inositol, which comprises
[80539] (a) increasing or generating one or more activities selected from the group consisting of b2399-protein in a non-human organism or a part thereof, preferably a microorganism, a plant cell, a plant or a part thereof, as compared to a corresponding non-transformed wild type non-human organism or a part thereof; and
[80540] (b) growing the non-human organism or a part thereof under conditions which permit the production of myo-inositol or a composition comprising myo-inositol in said non-human organism or in the culture medium surrounding said non-human organism.

[80541] Accordingly, the present invention relates to a process for the production of raffinose, which comprises
[80542] (a) increasing or generating one or more activities selected from the group consisting of b2399-protein in a non-human organism or a part thereof, preferably a microorganism, a plant cell, a plant or a part thereof, as compared to a corresponding non-transformed wild type non-human organism or a part thereof; and
[80543] (b) growing the non-human organism or a part thereof under conditions which permit the production of raffinose or a composition comprising raffinose in said non-human organism or in the culture medium surrounding said non-human organism.

[80544] Accordingly, the present invention relates to a process for the production of sedoheptulose-7-phosphate, which comprises
[80545] (a) increasing or generating one or more activities selected from the group consisting of b2399-protein in a non-human organism or a part thereof, preferably a microorganism, a plant cell, a plant or a part thereof, as compared to a corresponding non-transformed wild type non-human organism or a part thereof; and
[80546] (b) growing the non-human organism or a part thereof under conditions which permit the production of sedoheptulose-7-phosphate or a composition comprising sedoheptulose-7-phosphate in said non-human organism or in the culture medium surrounding said non-human organism.

[80547] Accordingly, the present invention relates to a process for the production of sucrose, which comprises
[80548] (a) increasing or generating one or more activities selected from the group consisting of b2399-protein in a non-human organism or a part thereof, preferably a microorganism, a plant cell, a plant or a part thereof, as compared to a corresponding non-transformed wild type non-human organism or a part thereof; and
[80549] (b) growing the non-human organism or a part thereof under conditions which permit the production of sucrose or a composition comprising sucrose in said non-human organism or in the culture medium surrounding said non-human organism.

[80550] Accordingly, the present invention relates to a process for the production of fructose, which comprises
[80551] (a) increasing or generating one or more activities selected from the group consisting of transcriptional regulator in a non-human organism or a part thereof, preferably a microorganism, a plant cell, a plant or a part thereof, as compared to a corresponding non-transformed wild type non-human organism or a part thereof; and
[80552] (b) growing the non-human organism or a part thereof under conditions which permit the production of fructose or a composition comprising fructose in said non-human organism or in the culture medium surrounding said non-human organism.

[80553] Accordingly, the present invention relates to a process for the production of raffinose, which comprises
[80554] (a) increasing or generating one or more activities selected from the group consisting of transcriptional regulator in a non-human organism or a part thereof, preferably a microorganism, a plant cell, a plant or a part thereof, as compared to a corresponding non-transformed wild type non-human organism or a part thereof; and
[80555] (b) growing the non-human organism or a part thereof under conditions which permit the production of raffinose or a composition comprising raffinose in said non-human organism or in the culture medium surrounding said non-human organism.

[80556] Accordingly, the present invention relates to a process for the production of myo-inositol, which comprises
[80557] (a) increasing or generating one or more activities selected from the group consisting of cysteine synthase A in a non-human organism or a part thereof, preferably a microorganism, a plant cell, a plant or a part thereof, as compared to a corresponding non-transformed wild type non-human organism or a part thereof; and
[80558] (b) growing the non-human organism or a part thereof under conditions which permit the production of myo-inositol or a composition comprising myo-inositol in said non-human organism or in the culture medium surrounding said non-human organism.

[80559] Accordingly, the present invention relates to a process for the production of verbascose, which comprises
[80560] (a) increasing or generating one or more activities selected from the group consisting of cysteine synthase A in a non-human organism or a part thereof, preferably a microorganism, a plant cell, a plant or a part thereof, as compared to a corresponding non-transformed wild type non-human organism or a part thereof; and
[80561] (b) growing the non-human organism or a part thereof under conditions which permit the production of verbascose or a composition comprising verbascose in said non-human organism or in the culture medium surrounding said non-human organism.

[80562] Accordingly, the present invention relates to a process for the production of glucose-1-phosphate, which comprises
[80563] (a) increasing or generating one or more activities selected from the group consisting of b2466-protein in a non-human organism or a part thereof, preferably a microorganism, a plant cell, a plant or a part thereof, as compared to a corresponding non-transformed wild type non-human organism or a part thereof; and
[80564] (b) growing the non-human organism or a part thereof under conditions which permit the production of glucose-1-phosphate or a composition comprising glucose-1-phosphate in said non-human organism or in the culture medium surrounding said non-human organism.

[80565] Accordingly, the present invention relates to a process for the production of myo-inositol, which comprises
[80566] (a) increasing or generating one or more activities selected from the group consisting of b2466-protein in a non-human organism or a part thereof, preferably a microorganism, a plant cell, a plant or a part thereof, as compared to a corresponding non-transformed wild type non-human organism or a part thereof; and
[80567] (b) growing the non-human organism or a part thereof under conditions which permit the production of myo-inositol or a composition comprising myo-inositol in said non-human organism or in the culture medium surrounding said non-human organism.

[80568] Accordingly, the present invention relates to a process for the production of 3,4,5-trihydroxypentanoic acid, which comprises
[80569] (a) increasing or generating one or more activities selected from the group consisting of b2466-protein in a non-human organism or a part thereof, preferably a microorganism, a plant cell, a plant or a part thereof, as compared to a corresponding non-transformed wild type non-human organism or a part thereof; and
[80570] (b) growing the non-human organism or a part thereof under conditions which permit the production of 3,4,5-trihydroxypentanoic acid or a composition comprising 3,4,5-trihydroxypentanoic acid in said non-human organism or in the culture medium surrounding said non-human organism.

[80571] Accordingly, the present invention relates to a process for the production of glucose-1-phosphate, which comprises
[80572] (a) increasing or generating one or more activities selected from the group consisting of b2474-protein in a non-human organism or a part thereof, preferably a microorganism, a plant cell, a plant or a part thereof, as compared to a corresponding non-transformed wild type non-human organism or a part thereof; and
[80573] (b) growing the non-human organism or a part thereof under conditions which permit the production of glucose-1-phosphate or a composition comprising glucose-1-phosphate in said non-human organism or in the culture medium surrounding said non-human organism.

[80574] Accordingly, the present invention relates to a process for the production of raffinose, which comprises
[80575] (a) increasing or generating one or more activities selected from the group consisting of 2,3-dihydroxy-2,3-dihydrophenylpropionatedehydrogenase in a non-human organism or a part thereof, preferably a microorganism, a plant cell, a plant or a part thereof, as compared to a corresponding non-transformed wild type non-human organism or a part thereof; and
[80576] (b) growing the non-human organism or a part thereof under conditions which permit the production of raffinose or a composition comprising raffinose in said non-human organism or in the culture medium surrounding said non-human organism.

[80577] Accordingly, the present invention relates to a process for the production of sucrose, which comprises
[80578] (a) increasing or generating one or more activities selected from the group consisting of putative transport system permease protein in a non-human organism or a part thereof, preferably a microorganism, a plant cell, a plant or a part thereof, as compared to a corresponding non-transformed wild type non-human organism or a part thereof; and
[80579] (b) growing the non-human organism or a part thereof under conditions which permit the production of sucrose or a composition comprising sucrose in said non-human organism or in the culture medium surrounding said non-human organism.

[80580] Accordingly, the present invention relates to a process for the production of glucose-1-phosphate, which comprises
[80581] (a) increasing or generating one or more activities selected from the group consisting of b2613-protein in a non-human organism or a part thereof, preferably a microorganism, a plant cell, a plant or a part thereof, as compared to a corresponding non-transformed wild type non-human organism or a part thereof; and
[80582] (b) growing the non-human organism or a part thereof under conditions which permit the production of glucose-1-phosphate or a composition comprising glucose-1-phosphate in said non-human organism or in the culture medium surrounding said non-human organism.

[80583] Accordingly, the present invention relates to a process for the production of myo-inositol, which comprises
[80584] (a) increasing or generating one or more activities selected from the group consisting of b2613-protein in a non-human organism or a part thereof, preferably a microorganism, a plant cell, a plant or a part thereof, as compared to a corresponding non-transformed wild type non-human organism or a part thereof; and
[80585] (b) growing the non-human organism or a part thereof under conditions which permit the production of myo-inositol or a composition comprising myo-inositol in said non-human organism or in the culture medium surrounding said non-human organism.

[80586] Accordingly, the present invention relates to a process for the production of fructose, which comprises
[80587] (a) increasing or generating one or more activities selected from the group consisting of transcriptional regulator in a non-human organism or a part thereof, preferably a microorganism, a plant cell, a plant or a part thereof, as compared to a corresponding non-transformed wild type non-human organism or a part thereof; and
[80588] (b) growing the non-human organism or a part thereof under conditions which permit the production of fructose or a composition comprising fructose in said non-human organism or in the culture medium surrounding said non-human organism.

[80589] Accordingly, the present invention relates to a process for the production of myo-inositol, which comprises
[80590] (a) increasing or generating one or more activities selected from the group consisting of transcriptional regulator in a non-human organism or a part thereof, preferably a microorganism, a plant cell, a plant or a part thereof, as compared to a corresponding non-transformed wild type non-human organism or a part thereof; and
[80591] (b) growing the non-human organism or a part thereof under conditions which permit the production of myo-inositol or a composition comprising myo-inositol in said non-human organism or in the culture medium surrounding said non-human organism.

[80592] Accordingly, the present invention relates to a process for the production of sucrose, which comprises
[80593] (a) increasing or generating one or more activities selected from the group consisting of transcriptional regulator in a non-human organism or a part thereof, preferably a microorganism, a plant cell, a plant or a part thereof, as compared to a corresponding non-transformed wild type non-human organism or a part thereof; and
[80594] (b) growing the non-human organism or a part thereof under conditions which permit the production of sucrose or a composition comprising sucrose in said non-human organism or in the culture medium surrounding said non-human organism.

[80595] Accordingly, the present invention relates to a process for the production of glucose-1-phosphate, which comprises
[80596] (a) increasing or generating one or more activities selected from the group consisting of b2653-protein in a non-human organism or a part thereof, preferably a microorganism, a plant cell, a plant or a part thereof, as compared to a corresponding non-transformed wild type non-human organism or a part thereof; and
[80597] (b) growing the non-human organism or a part thereof under conditions which permit the production of glucose-1-phosphate or a composition comprising glucose-1-phosphate in said non-human organism or in the culture medium surrounding said non-human organism.

[80598] Accordingly, the present invention relates to a process for the production of sedoheptulose-7-phosphate, which comprises
[80599] (a) increasing or generating one or more activities selected from the group consisting of b2653-protein in a non-human organism or a part thereof, preferably a microorganism, a plant cell, a plant or a part thereof, as compared to a corresponding non-transformed wild type non-human organism or a part thereof; and
[80600] (b) growing the non-human organism or a part thereof under conditions which permit the production of sedoheptulose-7-phosphate or a composition comprising sedoheptulose-7-phosphate in said non-human organism or in the culture medium surrounding said non-human organism.

[80601] Accordingly, the present invention relates to a process for the production of 3,4,5-trihydroxypentanoic acid, which comprises
[80602] (a) increasing or generating one or more activities selected from the group consisting of b2653-protein in a non-human organism or a part thereof, preferably a microorganism, a plant cell, a plant or a part thereof, as compared to a corresponding non-transformed wild type non-human organism or a part thereof; and
[80603] (b) growing the non-human organism or a part thereof under conditions which permit the production of 3,4,5-trihydroxypentanoic acid or a composition comprising 3,4,5-trihydroxypentanoic acid in said non-human organism or in the culture medium surrounding said non-human organism.

[80604] Accordingly, the present invention relates to a process for the production of glucose-1-phosphate, which comprises
[80605] (a) increasing or generating one or more activities selected from the group consisting of b2654-protein in a non-human organism or a part thereof, preferably a microorganism, a plant cell, a plant or a part thereof, as compared to a corresponding non-transformed wild type non-human organism or a part thereof; and
[80606] (b) growing the non-human organism or a part thereof under conditions which permit the production of glucose-1-phosphate or a composition comprising glucose-1-phosphate in said non-human organism or in the culture medium surrounding said non-human organism.

[80607] Accordingly, the present invention relates to a process for the production of 3,4,5-trihydroxypentanoic acid, which comprises
[80608] (a) increasing or generating one or more activities selected from the group consisting of b2654-protein in a non-human organism or a part thereof, preferably a microorganism, a plant cell, a plant or a part thereof, as compared to a corresponding non-transformed wild type non-human organism or a part thereof; and
[80609] (b) growing the non-human organism or a part thereof under conditions which permit the production of 3,4,5-trihydroxypentanoic acid or a composition comprising 3,4,5-trihydroxypentanoic acid in said non-human organism or in the culture medium surrounding said non-human organism.

[80610] Accordingly, the present invention relates to a process for the production of glucose-1-phosphate, which comprises
[80611] (a) increasing or generating one or more activities selected from the group consisting of b2670-protein in a non-human organism or a part thereof, preferably a microorganism, a plant cell, a plant or a part thereof, as compared to a corresponding non-transformed wild type non-human organism or a part thereof; and
[80612] (b) growing the non-human organism or a part thereof under conditions which permit the production of glucose-1-phosphate or a composition comprising glucose-1-phosphate in said non-human organism or in the culture medium surrounding said non-human organism.

[80613] Accordingly, the present invention relates to a process for the production of glucose-1-phosphate, which comprises
[80614] (a) increasing or generating one or more activities selected from the group consisting of b2673-protein in a non-human organism or a part thereof, preferably a microorganism, a plant cell, a plant or a part thereof, as compared to a corresponding non-transformed wild type non-human organism or a part thereof; and
[80615] (b) growing the non-human organism or a part thereof under conditions which permit the production of glucose-1-phosphate or a composition comprising glucose-1-phosphate in said non-human organism or in the culture medium surrounding said non-human organism.

[80616] Accordingly, the present invention relates to a process for the production of 3,4,5-trihydroxypentanoic acid, which comprises
[80617] (a) increasing or generating one or more activities selected from the group consisting of b2673-protein in a non-human organism or a part thereof, preferably a microorganism, a plant cell, a plant or a part thereof, as compared to a corresponding non-transformed wild type non-human organism or a part thereof; and
[80618] (b) growing the non-human organism or a part thereof under conditions which permit the production of 3,4,5-trihydroxypentanoic acid or a composition comprising 3,4,5-trihydroxypentanoic acid in said non-human organism or in the culture medium surrounding said non-human organism.

[80619] Accordingly, the present invention relates to a process for the production of myo-inositol, which comprises
[80620] (a) increasing or generating one or more activities selected from the group consisting of b2682-protein in a non-human organism or a part thereof, preferably a microorganism, a plant cell, a plant or a part thereof, as compared to a corresponding non-transformed wild type non-human organism or a part thereof; and
[80621] (b) growing the non-human organism or a part thereof under conditions which permit the production of myo-inositol or a composition comprising myo-inositol in said non-human organism or in the culture medium surrounding said non-human organism.

[80622] Accordingly, the present invention relates to a process for the production of glucose-1-phosphate, which comprises
[80623] (a) increasing or generating one or more activities selected from the group consisting of recombinase A in a non-human organism or a part thereof, preferably a microorganism, a plant cell, a plant or a part thereof, as compared to a corresponding non-transformed wild type non-human organism or a part thereof; and
[80624] (b) growing the non-human organism or a part thereof under conditions which permit the production of glucose-1-phosphate or a composition comprising glucose-1-phosphate in said non-human organism or in the culture medium surrounding said non-human organism.

[80625] Accordingly, the present invention relates to a process for the production of glucose-1-phosphate, which comprises
[80626] (a) increasing or generating one or more activities selected from the group consisting of murein transglycosylase in a non-human organism or a part thereof, preferably a microorganism, a plant cell, a plant or a part thereof, as compared to a corresponding non-transformed wild type non-human organism or a part thereof; and
[80627] (b) growing the non-human organism or a part thereof under conditions which permit the production of glucose-1-phosphate or a composition comprising glucose-1-phosphate in said non-human organism or in the culture medium surrounding said non-human organism.

[80628] Accordingly, the present invention relates to a process for the production of myo-inositol, which comprises
[80629] (a) increasing or generating one or more activities selected from the group consisting of transcriptional regulator in a non-human organism or a part thereof, preferably a microorganism, a plant cell, a plant or a part thereof, as compared to a corresponding non-transformed wild type non-human organism or a part thereof; and
[80630] (b) growing the non-human organism or a part thereof under conditions which permit the production of myo-inositol or a composition comprising myo-inositol in said non-human organism or in the culture medium surrounding said non-human organism.

[80631] Accordingly, the present invention relates to a process for the production of fructose, which comprises
[80632] (a) increasing or generating one or more activities selected from the group consisting of b2739-protein in a non-human organism or a part thereof, preferably a microorganism, a plant cell, a plant or a part thereof, as compared to a corresponding non-transformed wild type non-human organism or a part thereof; and
[80633] (b) growing the non-human organism or a part thereof under conditions which permit the production of fructose or a composition comprising fructose in said non-human organism or in the culture medium surrounding said non-human organism.

[80634] Accordingly, the present invention relates to a process for the production of glucose, which comprises
[80635] (a) increasing or generating one or more activities selected from the group consisting of b2739-protein in a non-human organism or a part thereof, preferably a microorganism, a plant cell, a plant or a part thereof, as compared to a corresponding non-transformed wild type non-human organism or a part thereof; and
[80636] (b) growing the non-human organism or a part thereof under conditions which permit the production of glucose or a composition comprising glucose in said non-human organism or in the culture medium surrounding said non-human organism.

[80637] Accordingly, the present invention relates to a process for the production of glucose, which comprises
[80638] (a) increasing or generating one or more activities selected from the group consisting of 2-C-methyl-D-erythritol 4-phosphate cytidylyltransferase in a non-human organism or a part thereof, preferably a microorganism, a plant cell, a plant or a part thereof, as compared to a corresponding non-transformed wild type non-human organism or a part thereof; and
[80639] (b) growing the non-human organism or a part thereof under conditions which permit the production of glucose or a composition comprising glucose in said non-human organism or in the culture medium surrounding said non-human organism.

[80640] Accordingly, the present invention relates to a process for the production of myo-inositol, which comprises
[80641] (a) increasing or generating one or more activities selected from the group consisting of 2-C-methyl-D-erythritol 4-phosphate cytidylyltransferase in a non-human organism or a part thereof, preferably a microorganism, a plant cell, a plant or a part thereof, as compared to a corresponding non-transformed wild type non-human organism or a part thereof; and
[80642] (b) growing the non-human organism or a part thereof under conditions which permit the production of myo-inositol or a composition comprising myo-inositol in said non-human organism or in the culture medium surrounding said non-human organism.

[80643] Accordingly, the present invention relates to a process for the production of raffinose, which comprises
[80644] (a) increasing or generating one or more activities selected from the group consisting of 2-C-methyl-D-erythritol 4-phosphate cytidylyltransferase in a non-human organism or a part thereof, preferably a microorganism, a plant cell, a plant or a part thereof, as compared to a corresponding non-transformed wild type non-human organism or a part thereof; and
[80645] (b) growing the non-human organism or a part thereof under conditions which permit the production of raffinose or a composition comprising raffinose in said non-human organism or in the culture medium surrounding said non-human organism.

[80646] Accordingly, the present invention relates to a process for the production of glucose-1-phosphate, which comprises
[80647] (a) increasing or generating one or more activities selected from the group consisting of phosphoadenosine phosphosulfate reductase in a non-human organism or a part thereof, preferably a microorganism, a plant cell, a plant or a part thereof, as compared to a corresponding non-transformed wild type non-human organism or a part thereof; and
[80648] (b) growing the non-human organism or a part thereof under conditions which permit the production of glucose-1-phosphate or a composition comprising glucose-1-phosphate in said non-human organism or in the culture medium surrounding said non-human organism.

[80649] Accordingly, the present invention relates to a process for the production of 3,4,5-trihydroxypentanoic acid, which comprises
[80650] (a) increasing or generating one or more activities selected from the group consisting of phosphoadenosine phosphosulfate reductase in a non-human organism or a part thereof, preferably a microorganism, a plant cell, a plant or a part thereof, as compared to a corresponding non-transformed wild type non-human organism or a part thereof; and
[80651] (b) growing the non-human organism or a part thereof under conditions which permit the production of 3,4,5-trihydroxypentanoic acid or a composition comprising 3,4,5-trihydroxypentanoic acid in said non-human organism or in the culture medium surrounding said non-human organism.

[80652] Accordingly, the present invention relates to a process for the production of fructose, which comprises
[80653] (a) increasing or generating one or more activities selected from the group consisting of flavodoxin in a non-human organism or a part thereof, preferably a microorganism, a plant cell, a plant or a part thereof, as compared to a corresponding non-transformed wild type non-human organism or a part thereof; and
[80654] (b) growing the non-human organism or a part thereof under conditions which permit the production of fructose or a composition comprising fructose in said non-human organism or in the culture medium surrounding said non-human organism.

[80655] Accordingly, the present invention relates to a process for the production of glucose, which comprises
[80656] (a) increasing or generating one or more activities selected from the group consisting of flavodoxin in a non-human organism or a part thereof, preferably a microorganism, a plant cell, a plant or a part thereof, as compared to a corresponding non-transformed wild type non-human organism or a part thereof; and
[80657] (b) growing the non-human organism or a part thereof under conditions which permit the production of glucose or a composition comprising glucose in said non-human organism or in the culture medium surrounding said non-human organism.

[80658] Accordingly, the present invention relates to a process for the production of glucose-1-phosphate, which comprises
[80659] (a) increasing or generating one or more activities selected from the group consisting of flavodoxin in a non-human organism or a part thereof, preferably a microorganism, a plant cell, a plant or a part thereof, as compared to a corresponding non-transformed wild type non-human organism or a part thereof; and
[80660] (b) growing the non-human organism or a part thereof under conditions which permit the production of glucose-1-phosphate or a composition comprising glucose-1-phosphate in said non-human organism or in the culture medium surrounding said non-human organism.

[80661] Accordingly, the present invention relates to a process for the production of myo-inositol, which comprises
[80662] (a) increasing or generating one or more activities selected from the group consisting of flavodoxin in a non-human organism or a part thereof, preferably a microorganism, a plant cell, a plant or a part thereof, as compared to a corresponding non-transformed wild type non-human organism or a part thereof; and
[80663] (b) growing the non-human organism or a part thereof under conditions which permit the production of myo-inositol or a composition comprising myo-inositol in said non-human organism or in the culture medium surrounding said non-human organism.

[80664] Accordingly, the present invention relates to a process for the production of 3,4,5-trihydroxypentanoic acid, which comprises
[80665] (a) increasing or generating one or more activities selected from the group consisting of flavodoxin in a non-human organism or a part thereof, preferably a microorganism, a plant cell, a plant or a part thereof, as compared to a corresponding non-transformed wild type non-human organism or a part thereof; and
[80666] (b) growing the non-human organism or a part thereof under conditions which permit the production of 3,4,5-trihydroxypentanoic acid or a composition comprising 3,4,5-trihydroxypentanoic acid in said non-human organism or in the culture medium surrounding said non-human organism.

[80667] Accordingly, the present invention relates to a process for the production of fructose, which comprises
[80668] (a) increasing or generating one or more activities selected from the group consisting of amino-acid acetyltransferase in a non-human organism or a part thereof, preferably a microorganism, a plant cell, a plant or a part thereof, as compared to a corresponding non-transformed wild type non-human organism or a part thereof; and
[80669] (b) growing the non-human organism or a part thereof under conditions which permit the production of fructose or a composition comprising fructose in said non-human organism or in the culture medium surrounding said non-human organism.

[80670] Accordingly, the present invention relates to a process for the production of glucose-1-phosphate, which comprises
[80671] (a) increasing or generating one or more activities selected from the group consisting of amino-acid acetyltransferase in a non-human organism or a part thereof, preferably a microorganism, a plant cell, a plant or a part thereof, as compared to a corresponding non-transformed wild type non-human organism or a part thereof; and
[80672] (b) growing the non-human organism or a part thereof under conditions which permit the production of glucose-1-phosphate or a composition comprising glucose-1-phosphate in said non-human organism or in the culture medium surrounding said non-human organism.

[80673] Accordingly, the present invention relates to a process for the production of myo-inositol, which comprises
[80674] (a) increasing or generating one or more activities selected from the group consisting of amino-acid acetyltransferase in a non-human organism or a part thereof, preferably a microorganism, a plant cell, a plant or a part thereof, as compared to a corresponding non-transformed wild type non-human organism or a part thereof; and
[80675] (b) growing the non-human organism or a part thereof under conditions which permit the production of myo-inositol or a composition comprising myo-inositol in said non-human organism or in the culture medium surrounding said non-human organism.

[80676] Accordingly, the present invention relates to a process for the production of raffinose, which comprises
[80677] (a) increasing or generating one or more activities selected from the group consisting of transcriptional regulator in a non-human organism or a part thereof, preferably a microorganism, a plant cell, a plant or a part thereof, as compared to a corresponding non-transformed wild type non-human organism or a part thereof; and
[80678] (b) growing the non-human organism or a part thereof under conditions which permit the production of raffinose or a composition comprising raffinose in said non-human organism or in the culture medium surrounding said non-human organism.

[80679] Accordingly, the present invention relates to a process for the production of glucose, which comprises
[80680] (a) increasing or generating one or more activities selected from the group consisting of arginine exporter protein in a non-human organism or a part thereof, preferably a microorganism, a plant cell, a plant or a part thereof, as compared to a corresponding non-transformed wild type non-human organism or a part thereof; and
[80681] (b) growing the non-human organism or a part thereof under conditions which permit the production of glucose or a composition comprising glucose in said non-human organism or in the culture medium surrounding said non-human organism.

[80682] Accordingly, the present invention relates to a process for the production of myo-inositol, which comprises
[80683] (a) increasing or generating one or more activities selected from the group consisting of arginine exporter protein in a non-human organism or a part thereof, preferably a microorganism, a plant cell, a plant or a part thereof, as compared to a corresponding non-transformed wild type non-human organism or a part thereof; and
[80684] (b) growing the non-human organism or a part thereof under conditions which permit the production of myo-inositol or a composition comprising myo-inositol in said non-human organism or in the culture medium surrounding said non-human organism.

[80685] Accordingly, the present invention relates to a process for the production of myo-inositol, which comprises
[80686] (a) increasing or generating one or more activities selected from the group consisting of b2932-protein in a non-human organism or a part thereof, preferably a microorganism, a plant cell, a plant or a part thereof, as compared to a corresponding non-transformed wild type non-human organism or a part thereof; and
[80687] (b) growing the non-human organism or a part thereof under conditions which permit the production of myo-inositol or a composition comprising myo-inositol in said non-human organism or in the culture medium surrounding said non-human organism.

[80688] Accordingly, the present invention relates to a process for the production of erythrol, which comprises
[80689] (a) increasing or generating one or more activities selected from the group consisting of L-serine dehydratase in a non-human organism or a part thereof, preferably a microorganism, a plant cell, a plant or a part thereof, as compared to a corresponding non-transformed wild type non-human organism or a part thereof; and
[80690] (b) growing the non-human organism or a part thereof under conditions which permit the production of erythrol or a composition comprising erythrol in said non-human organism or in the culture medium surrounding said non-human organism.

[80691] Accordingly, the present invention relates to a process for the production of myo-inositol, which comprises
[80692] (a) increasing or generating one or more activities selected from the group consisting of b3151-protein in a non-human organism or a part thereof, preferably a microorganism, a plant cell, a plant or a part thereof, as compared to a corresponding non-transformed wild type non-human organism or a part thereof; and
[80693] (b) growing the non-human organism or a part thereof under conditions which permit the production of myo-inositol or a composition comprising myo-inositol in said non-human organism or in the culture medium surrounding said non-human organism.

[80694] Accordingly, the present invention relates to a process for the production of raffinose, which comprises
[80695] (a) increasing or generating one or more activities selected from the group consisting of b3151-protein in a non-human organism or a part thereof, preferably a microorganism, a plant cell, a plant or a part thereof, as compared to a corresponding non-transformed wild type non-human organism or a part thereof; and
[80696] (b) growing the non-human organism or a part thereof under conditions which permit the production of raffinose or a composition comprising raffinose in said non-human organism or in the culture medium surrounding said non-human organism.

[80697] Accordingly, the present invention relates to a process for the production of sucrose, which comprises
[80698] (a) increasing or generating one or more activities selected from the group consisting of b3151-protein in a non-human organism or a part thereof, preferably a microorganism, a plant cell, a plant or a part thereof, as compared to a corresponding non-transformed wild type non-human organism or a part thereof; and
[80699] (b) growing the non-human organism or a part thereof under conditions which permit the production of sucrose or a composition comprising sucrose in said non-human organism or in the culture medium surrounding said non-human organism.

[80700] Accordingly, the present invention relates to a process for the production of fructose, which comprises
[80701] (a) increasing or generating one or more activities selected from the group consisting of b3221-protein in a non-human organism or a part thereof, preferably a microorganism, a plant cell, a plant or a part thereof, as compared to a corresponding non-transformed wild type non-human organism or a part thereof; and
[80702] (b) growing the non-human organism or a part thereof under conditions which permit the production of fructose or a composition comprising fructose in said non-human organism or in the culture medium surrounding said non-human organism.

[80703] Accordingly, the present invention relates to a process for the production of glucose, which comprises
[80704] (a) increasing or generating one or more activities selected from the group consisting of b3221-protein in a non-human organism or a part thereof, preferably a microorganism, a plant cell, a plant or a part thereof, as compared to a corresponding non-transformed wild type non-human organism or a part thereof; and
[80705] (b) growing the non-human organism or a part thereof under conditions which permit the production of glucose or a composition comprising glucose in said non-human organism or in the culture medium surrounding said non-human organism.

[80706] Accordingly, the present invention relates to a process for the production of 3,4,5-trihydroxypentanoic acid, which comprises
[80707] (a) increasing or generating one or more activities selected from the group consisting of b3221-protein in a non-human organism or a part thereof, preferably a microorganism, a plant cell, a plant or a part thereof, as compared to a corresponding non-transformed wild type non-human organism or a part thereof; and
[80708] (b) growing the non-human organism or a part thereof under conditions which permit the production of 3,4,5-trihydroxypentanoic acid or a composition comprising 3,4,5-trihydroxypentanoic acid in said non-human organism or in the culture medium surrounding said non-human organism.

[80709] Accordingly, the present invention relates to a process for the production of myo-inositol, which comprises
[80710] (a) increasing or generating one or more activities selected from the group consisting of b3246-protein in a non-human organism or a part thereof, preferably a microorganism, a plant cell, a plant or a part thereof, as compared to a corresponding non-transformed wild type non-human organism or a part thereof; and
[80711] (b) growing the non-human organism or a part thereof under conditions which permit the production of myo-inositol or a composition comprising myo-inositol in said non-human organism or in the culture medium surrounding said non-human organism.

[80712] Accordingly, the present invention relates to a process for the production of myo-inositol, which comprises
[80713] (a) increasing or generating one or more activities selected from the group consisting of acetyl CoA carboxylase in a non-human organism or a part thereof, preferably a microorganism, a plant cell, a plant or a part thereof, as compared to a corresponding non-transformed wild type non-human organism or a part thereof; and
[80714] (b) growing the non-human organism or a part thereof under conditions which permit the production of myo-inositol or a composition comprising myo-inositol in said non-human organism or in the culture medium surrounding said non-human organism.

[80715] Accordingly, the present invention relates to a process for the production of fructose, which comprises
[80716] (a) increasing or generating one or more activities selected from the group consisting of methyltransferase in a non-human organism or a part thereof, preferably a microorganism, a plant cell, a plant or a part thereof, as compared to a corresponding non-transformed wild type non-human organism or a part thereof; and
[80717] (b) growing the non-human organism or a part thereof under conditions which permit the production of fructose or a composition comprising fructose in said non-human organism or in the culture medium surrounding said non-human organism.

[80718] Accordingly, the present invention relates to a process for the production of glucose, which comprises
[80719] (a) increasing or generating one or more activities selected from the group consisting of methyltransferase in a non-human organism or a part thereof, preferably a microorganism, a plant cell, a plant or a part thereof, as compared to a corresponding non-transformed wild type non-human organism or a part thereof; and
[80720] (b) growing the non-human organism or a part thereof under conditions which permit the production of glucose or a composition comprising glucose in said non-human organism or in the culture medium surrounding said non-human organism.

[80721] Accordingly, the present invention relates to a process for the production of glucose-1-phosphate, which comprises
[80722] (a) increasing or generating one or more activities selected from the group consisting of methyltransferase in a non-human organism or a part thereof, preferably a microorganism, a plant cell, a plant or a part thereof, as compared to a corresponding non-transformed wild type non-human organism or a part thereof; and
[80723] (b) growing the non-human organism or a part thereof under conditions which permit the production of glucose-1-phosphate or a composition comprising glucose-1-phosphate in said non-human organism or in the culture medium surrounding said non-human organism.

[80724] Accordingly, the present invention relates to a process for the production of raffinose, which comprises
[80725] (a) increasing or generating one or more activities selected from the group consisting of methyltransferase in a non-human organism or a part thereof, preferably a microorganism, a plant cell, a plant or a part thereof, as compared to a corresponding non-transformed wild type non-human organism or a part thereof; and
[80726] (b) growing the non-human organism or a part thereof under conditions which permit the production of raffinose or a composition comprising raffinose in said non-human organism or in the culture medium surrounding said non-human organism.

[80727] Accordingly, the present invention relates to a process for the production of sucrose, which comprises
[80728] (a) increasing or generating one or more activities selected from the group consisting of methyltransferase in a non-human organism or a part thereof, preferably a microorganism, a plant cell, a plant or a part thereof, as compared to a corresponding non-transformed wild type non-human organism or a part thereof; and
[80729] (b) growing the non-human organism or a part thereof under conditions which permit the production of sucrose or a composition comprising sucrose in said non-human organism or in the culture medium surrounding said non-human organism.

[80730] Accordingly, the present invention relates to a process for the production of glucose, which comprises
[80731] (a) increasing or generating one or more activities selected from the group consisting of ferredoxin in a non-human organism or a part thereof, preferably a microorganism, a plant cell, a plant or a part thereof, as compared to a corresponding non-transformed wild type non-human organism or a part thereof; and
[80732] (b) growing the non-human organism or a part thereof under conditions which permit the production of glucose or a composition comprising glucose in said non-human organism or in the culture medium surrounding said non-human organism.

[80733] Accordingly, the present invention relates to a process for the production of myo-inositol, which comprises
[80734] (a) increasing or generating one or more activities selected from the group consisting of b3346-protein in a non-human organism or a part thereof, preferably a microorganism, a plant cell, a plant or a part thereof, as compared to a corresponding non-transformed wild type non-human organism or a part thereof; and
[80735] (b) growing the non-human organism or a part thereof under conditions which permit the production of myo-inositol or a composition comprising myo-inositol in said non-human organism or in the culture medium surrounding said non-human organism.

[80736] Accordingly, the present invention relates to a process for the production of raffinose, which comprises
[80737] (a) increasing or generating one or more activities selected from the group consisting of b3346-protein in a non-human organism or a part thereof, preferably a microorganism, a plant cell, a plant or a part thereof, as compared to a corresponding non-transformed wild type non-human organism or a part thereof; and
[80738] (b) growing the non-human organism or a part thereof under conditions which permit the production of raffinose or a composition comprising raffinose in said non-human organism or in the culture medium surrounding said non-human organism.

[80739] Accordingly, the present invention relates to a process for the production of 3,4,5-trihydroxypentanoicacid, which comprises
[80740] (a) increasing or generating one or more activities selected from the group consisting of b3346-protein in a non-human organism or a part thereof, preferably a microorganism, a plant cell, a plant or a part thereof, as compared to a corresponding non-transformed wild type non-human organism or a part thereof; and
[80741] (b) growing the non-human organism or a part thereof under conditions which permit the production of 3,4,5-trihydroxypentanoic acid or a composition comprising 3,4,5-trihydroxypentanoic acid in said non-human organism or in the culture medium surrounding said non-human organism.

[80742] Accordingly, the present invention relates to a process for the production of fructose, which comprises
[80743] (a) increasing or generating one or more activities selected from the group consisting of phosphoenolpyruvate carboxykinase in a non-human organism or a part thereof, preferably a microorganism, a plant cell, a plant or a part thereof, as compared to a corresponding non-transformed wild type non-human organism or a part thereof; and
[80744] (b) growing the non-human organism or a part thereof under conditions which permit the production of fructose or a composition comprising fructose in said non-human organism or in the culture medium surrounding said non-human organism.

[80745] Accordingly, the present invention relates to a process for the production of glucose, which comprises
[80746] (a) increasing or generating one or more activities selected from the group consisting of phosphoenolpyruvate carboxykinase in a non-human organism or a part thereof, preferably a microorganism, a plant cell, a plant or a part thereof, as compared to a corresponding non-transformed wild type non-human organism or a part thereof; and
[80747] (b) growing the non-human organism or a part thereof under conditions which permit the production of glucose or a composition comprising glucose in said non-human organism or in the culture medium surrounding said non-human organism.

[80748] Accordingly, the present invention relates to a process for the production of 3,4,5-trihydroxypentanoic acid, which comprises
[80749] (a) increasing or generating one or more activities selected from the group consisting of B3427-protein in a non-human organism or a part thereof, preferably a microorganism, a plant cell, a plant or a part thereof, as compared to a corresponding non-transformed wild type non-human organism or a part thereof; and
[80750] (b) growing the non-human organism or a part thereof under conditions which permit the production of 3,4,5-trihydroxypentanoic acid or a composition comprising 3,4,5-trihydroxypentanoic acid in said non-human organism or in the culture medium surrounding said non-human organism.

[80751] Accordingly, the present invention relates to a process for the production of fructose, which comprises
[80752] (a) increasing or generating one or more activities selected from the group consisting of glycogen synthase in a non-human organism or a part thereof, preferably a microorganism, a plant cell, a plant or a part thereof, as compared to a corresponding non-transformed wild type non-human organism or a part thereof; and
[80753] (b) growing the non-human organism or a part thereof under conditions which permit the production of fructose or a composition comprising fructose in said non-human organism or in the culture medium surrounding said non-human organism.

[80754] Accordingly, the present invention relates to a process for the production of glucose, which comprises
[80755] (a) increasing or generating one or more activities selected from the group consisting of glycogen synthase in a non-human organism or a part thereof, preferably a microorganism, a plant cell, a plant or a part thereof, as compared to a corresponding non-transformed wild type non-human organism or a part thereof; and
[80756] (b) growing the non-human organism or a part thereof under conditions which permit the production of glucose or a composition comprising glucose in said non-human organism or in the culture medium surrounding said non-human organism.

[80757] Accordingly, the present invention relates to a process for the production of myo-inositol, which comprises
[80758] (a) increasing or generating one or more activities selected from the group consisting of b3442-protein in a non-human organism or a part thereof, preferably a microorganism, a plant cell, a plant or a part thereof, as compared to a corresponding non-transformed wild type non-human organism or a part thereof; and
[80759] (b) growing the non-human organism or a part thereof under conditions which permit the production of myo-inositol or a composition comprising myo-inositol in said non-human organism or in the culture medium surrounding said non-human organism.

[80760] Accordingly, the present invention relates to a process for the production of 3,4,5-trihydroxypentanoic acid, which comprises
[80761] (a) increasing or generating one or more activities selected from the group consisting of B3443-protein in a non-human organism or a part thereof, preferably a microorganism, a plant cell, a plant or a part thereof, as compared to a corresponding non-transformed wild type non-human organism or a part thereof; and
[80762] (b) growing the non-human organism or a part thereof under conditions which permit the production of 3,4,5-trihydroxypentanoic acid or a composition comprising 3,4,5-trihydroxypentanoic acid in said non-human organism or in the culture medium surrounding said non-human organism.

[80763] Accordingly, the present invention relates to a process for the production of saccharic acid, which comprises
[80764] (a) increasing or generating one or more activities selected from the group consisting of sn-glycerol-3-phosphate transport system permease protein in a non-human organism or a part thereof, preferably a microorganism, a plant cell, a plant or a part thereof, as compared to a corresponding non-transformed wild type non-human organism or a part thereof; and
[80765] (b) growing the non-human organism or a part thereof under conditions which permit the production of saccharic acid or a composition comprising saccharic acid in said non-human organism or in the culture medium surrounding said non-human organism.

[80766] Accordingly, the present invention relates to a process for the production of glucose-1-phosphate, which comprises
[80767] (a) increasing or generating one or more activities selected from the group consisting of highaffinity branched-chain amino acid transport protein in a non-human organism or a part thereof, preferably a microorganism, a plant cell, a plant or a part thereof, as compared to a corresponding non-transformed wild type non-human organism or a part thereof; and
[80768] (b) growing the non-human organism or a part thereof under conditions which permit the production of glucose-1-phosphate or a composition comprising glucose-1-phosphate in said non-human organism or in the culture medium surrounding said non-human organism.

[80769] Accordingly, the present invention relates to a process for the production of myo-inositol, which comprises
[80770] (a) increasing or generating one or more activities selected from the group consisting of highaffinity branched-chain amino acid transport protein in a non-human organism or a part thereof, preferably a microorganism, a plant cell, a plant or a part thereof, as compared to a corresponding non-transformed wild type non-human organism or a part thereof; and
[80771] (b) growing the non-human organism or a part thereof under conditions which permit the production of myo-inositol or a composition comprising myo-inositol in said non-human organism or in the culture medium surrounding said non-human organism.

[80772] Accordingly, the present invention relates to a process for the production of fructose, which comprises
[80773] (a) increasing or generating one or more activities selected from the group consisting of trehalase in a non-human organism or a part thereof, preferably a microorganism, a plant cell, a plant or a part thereof, as compared to a corresponding non-transformed wild type non-human organism or a part thereof; and
[80774] (b) growing the non-human organism or a part thereof under conditions which permit the production of fructose or a composition comprising fructose in said non-human organism or in the culture medium surrounding said non-human organism.

[80775] Accordingly, the present invention relates to a process for the production of galactinol, which comprises
[80776] (a) increasing or generating one or more activities selected from the group consisting of trehalase in a non-human organism or a part thereof, preferably a microorganism, a plant cell, a plant or a part thereof, as compared to a corresponding non-transformed wild type non-human organism or a part thereof; and
[80777] (b) growing the non-human organism or a part thereof under conditions which permit the production of galactinol or a composition comprising galactinol in said non-human organism or in the culture medium surrounding said non-human organism.

[80778] Accordingly, the present invention relates to a process for the production of fructose, which comprises
[80779] (a) increasing or generating one or more activities selected from the group consisting of mannitol-1-phosphate dehydrogenase in a non-human organism or a part thereof, preferably a microorganism, a plant cell, a plant or a part thereof, as compared to a corresponding non-transformed wild type non-human organism or a part thereof; and
[80780] (b) growing the non-human organism or a part thereof under conditions which permit the production of fructose or a composition comprising fructose in said non-human organism or in the culture medium surrounding said non-human organism.

[80781] Accordingly, the present invention relates to a process for the production of mannitol, which comprises
[80782] (a) increasing or generating one or more activities selected from the group consisting of mannitol-1-phosphate dehydrogenase in a non-human organism or a part thereof, preferably a microorganism, a plant cell, a plant or a part thereof, as compared to a corresponding non-transformed wild type non-human organism or a part thereof; and
[80783] (b) growing the non-human organism or a part thereof under conditions which permit the production of mannitol or a composition comprising mannitol in said non-human organism or in the culture medium surrounding said non-human organism.

[80784] Accordingly, the present invention relates to a process for the production of sorbitol, which comprises
[80785] (a) increasing or generating one or more activities selected from the group consisting of mannitol-1-phosphate dehydrogenase in a non-human organism or a part thereof, preferably a microorganism, a plant cell, a plant or a part thereof, as compared to a corresponding non-transformed wild type non-human organism or a part thereof; and
[80786] (b) growing the non-human organism or a part thereof under conditions which permit the production of sorbitol or a composition comprising sorbitol in said non-human organism or in the culture medium surrounding said non-human organism.

[80787] Accordingly, the present invention relates to a process for the production of galactinol, which comprises
[80788] (a) increasing or generating one or more activities selected from the group consisting of ketol-acid reductoisomerase in a non-human organism or a part thereof, preferably a microorganism, a plant cell, a plant or a part thereof, as compared to a corresponding non-transformed wild type non-human organism or a part thereof; and
[80789] (b) growing the non-human organism or a part thereof under conditions which permit the production of galactinol or a composition comprising galactinol in said non-human organism or in the culture medium surrounding said non-human organism.

[80790] Accordingly, the present invention relates to a process for the production of myo-inositol, which comprises
[80791] (a) increasing or generating one or more activities selected from the group consisting of b3777-protein in a non-human organism or a part thereof, preferably a microorganism, a plant cell, a plant or a part thereof, as compared to a corresponding non-transformed wild type non-human organism or a part thereof; and
[80792] (b) growing the non-human organism or a part thereof under conditions which permit the production of myo-inositol or a composition comprising myo-inositol in said non-human organism or in the culture medium surrounding said non-human organism.

[80793] Accordingly, the present invention relates to a process for the production of myo-inositol, which comprises
[80794] (a) increasing or generating one or more activities selected from the group consisting of b3817-protein in a non-human organism or a part thereof, preferably a microorganism, a plant cell, a plant or a part thereof, as compared to a corresponding non-transformed wild type non-human organism or a part thereof; and
[80795] (b) growing the non-human organism or a part thereof under conditions which permit the production of myo-inositol or a composition comprising myo-inositol in said non-human organism or in the culture medium surrounding said non-human organism.

[80796] Accordingly, the present invention relates to a process for the production of raffinose, which comprises
[80797] (a) increasing or generating one or more activities selected from the group consisting of b3817-protein in a non-human organism or a part thereof, preferably a microorganism, a plant cell, a plant or a part thereof, as compared to a corresponding non-transformed wild type non-human organism or a part thereof; and
[80798] (b) growing the non-human organism or a part thereof under conditions which permit the production of raffinose or a composition comprising raffinose in said non-human organism or in the culture medium surrounding said non-human organism.

[80799] Accordingly, the present invention relates to a process for the production of myo-inositol, which comprises
[80800] (a) increasing or generating one or more activities selected from the group consisting of b3818-protein in a non-human organism or a part thereof, preferably a microorganism, a plant cell, a plant or a part thereof, as compared to a corresponding non-transformed wild type non-human organism or a part thereof; and
[80801] (b) growing the non-human organism or a part thereof under conditions which permit the production of myo-inositol or a composition comprising myo-inositol in said non-human organism or in the culture medium surrounding said non-human organism.

[80802] Accordingly, the present invention relates to a process for the production of myo-inositol, which comprises
[80803] (a) increasing or generating one or more activities selected from the group consisting of threonine efflux protein in a non-human organism or a part thereof, preferably a microorganism, a plant cell, a plant or a part thereof, as compared to a corresponding non-transformed wild type non-human organism or a part thereof; and
[80804] (b) growing the non-human organism or a part thereof under conditions which permit the production of myo-inositol or a composition comprising myo-inositol in said non-human organism or in the culture medium surrounding said non-human organism.

[80805] Accordingly, the present invention relates to a process for the production of myo-inositol, which comprises
[80806] (a) increasing or generating one or more activities selected from the group consisting of glutamine synthetase in a non-human organism or a part thereof, preferably a microorganism, a plant cell, a plant or a part thereof, as compared to a corresponding non-transformed wild type non-human organism or a part thereof; and
[80807] (b) growing the non-human organism or a part thereof under conditions which permit the production of myo-inositol or a composition comprising myo-inositol in said non-human organism or in the culture medium surrounding said non-human organism.

[80808] Accordingly, the present invention relates to a process for the production of verbascose, which comprises
[80809] (a) increasing or generating one or more activities selected from the group consisting of glutamine synthetase in a non-human organism or a part thereof, preferably a microorganism, a plant cell, a plant or a part thereof, as compared to a corresponding non-transformed wild type non-human organism or a part thereof; and
[80810] (b) growing the non-human organism or a part thereof under conditions which permit the production of verbascose or a composition comprising verbascose in said non-human organism or in the culture medium surrounding said non-human organism.

[80811] Accordingly, the present invention relates to a process for the production of glucose-1-phosphate, which comprises
[80812] (a) increasing or generating one or more activities selected from the group consisting of transcriptional regulator in a non-human organism or a part thereof, preferably a microorganism, a plant cell, a plant or a part thereof, as compared to a corresponding non-transformed wild type non-human organism or a part thereof; and
[80813] (b) growing the non-human organism or a part thereof under conditions which permit the production of glucose-1-phosphate or a composition comprising glucose-1-phosphate in said non-human organism or in the culture medium surrounding said non-human organism.

[80814] Accordingly, the present invention relates to a process for the production of fructose, which comprises
[80815] (a) increasing or generating one or more activities selected from the group consisting of b3989-protein in a non-human organism or a part thereof, preferably a microorganism, a plant cell, a plant or a part thereof, as compared to a corresponding non-transformed wild type non-human organism or a part thereof; and
[80816] (b) growing the non-human organism or a part thereof under conditions which permit the production of fructose or a composition comprising fructose in said non-human organism or in the culture medium surrounding said non-human organism.

[80817] Accordingly, the present invention relates to a process for the production of glucose, which comprises
[80818] (a) increasing or generating one or more activities selected from the group consisting of b3989-protein in a non-human organism or a part thereof, preferably a microorganism, a plant cell, a plant or a part thereof, as compared to a corresponding non-transformed wild type non-human organism or a part thereof; and
[80819] (b) growing the non-human organism or a part thereof under conditions which permit the production of glucose or a composition comprising glucose in said non-human organism or in the culture medium surrounding said non-human organism.

[80820] Accordingly, the present invention relates to a process for the production of glucose-1-phosphate, which comprises
[80821] (a) increasing or generating one or more activities selected from the group consisting of b3989-protein in a non-human organism or a part thereof, preferably a microorganism, a plant cell, a plant or a part thereof, as compared to a corresponding non-transformed wild type non-human organism or a part thereof; and
[80822] (b) growing the non-human organism or a part thereof under conditions which permit the production of glucose-1-phosphate or a composition comprising glucose-1-phosphate in said non-human organism or in the culture medium surrounding said non-human organism.

[80823] Accordingly, the present invention relates to a process for the production of raffinose, which comprises
[80824] (a) increasing or generating one or more activities selected from the group consisting of b3989-protein in a non-human organism or a part thereof, preferably a microorganism, a plant cell, a plant or a part thereof, as compared to a corresponding non-transformed wild type non-human organism or a part thereof; and
[80825] (b) growing the non-human organism or a part thereof under conditions which permit the production of raffinose or a composition comprising raffinose in said non-human organism or in the culture medium surrounding said non-human organism.

[80826] Accordingly, the present invention relates to a process for the production of sucrose, which comprises
[80827] (a) increasing or generating one or more activities selected from the group consisting of b3989-protein in a non-human organism or a part thereof, preferably a microorganism, a plant cell, a plant or a part thereof, as compared to a corresponding non-transformed wild type non-human organism or a part thereof; and
[80828] (b) growing the non-human organism or a part thereof under conditions which permit the production of sucrose or a composition comprising sucrose in said non-human organism or in the culture medium surrounding said non-human organism.

[80829] Accordingly, the present invention relates to a process for the production of galactinol, which comprises
[80830] (a) increasing or generating one or more activities selected from the group consisting of acetyltransferase in a non-human organism or a part thereof, preferably a microorganism, a plant cell, a plant or a part thereof, as compared to a corresponding non-transformed wild type non-human organism or a part thereof; and
[80831] (b) growing the non-human organism or a part thereof under conditions which permit the production of galactinol or a composition comprising galactinol in said non-human organism or in the culture medium surrounding said non-human organism.

[80832] Accordingly, the present invention relates to a process for the production of fructose, which comprises
[80833] (a) increasing or generating one or more activities selected from the group consisting of b4029-protein in a non-human organism or a part thereof, preferably a microorganism, a plant cell, a plant or a part thereof, as compared to a corresponding non-transformed wild type non-human organism or a part thereof; and
[80834] (b) growing the non-human organism or a part thereof under conditions which permit the production of fructose or a composition comprising fructose in said non-human organism or in the culture medium surrounding said non-human organism.

[80835] Accordingly, the present invention relates to a process for the production of glucose, which comprises
[80836] (a) increasing or generating one or more activities selected from the group consisting of b4029-protein in a non-human organism or a part thereof, preferably a microorganism, a plant cell, a plant or a part thereof, as compared to a corresponding non-transformed wild type non-human organism or a part thereof; and
[80837] (b) growing the non-human organism or a part thereof under conditions which permit the production of glucose or a composition comprising glucose in said non-human organism or in the culture medium surrounding said non-human organism.

[80838] Accordingly, the present invention relates to a process for the production of sedoheptulose-7-phosphate, which comprises
[80839] (a) increasing or generating one or more activities selected from the group consisting of b4029-protein in a non-human organism or a part thereof, preferably a microorganism, a plant cell, a plant or a part thereof, as compared to a corresponding non-transformed wild type non-human organism or a part thereof; and
[80840] (b) growing the non-human organism or a part thereof under conditions which permit the production of sedoheptulose-7-phosphate or a composition comprising sedoheptulose-7-phosphate in said non-human organism or in the culture medium surrounding said non-human organism.

[80841] Accordingly, the present invention relates to a process for the production of glucose-1-phosphate, which comprises
[80842] (a) increasing or generating one or more activities selected from the group consisting of chorismate lyase in a non-human organism or a part thereof, preferably a microorganism, a plant cell, a plant or a part thereof, as compared to a corresponding non-transformed wild type non-human organism or a part thereof; and
[80843] (b) growing the non-human organism or a part thereof under conditions which permit the production of glucose-1-phosphate or a composition comprising glucose-1-phosphate in said non-human organism or in the culture medium surrounding said non-human organism.

[80844] Accordingly, the present invention relates to a process for the production of 3,4,5-trihydroxypentanoic acid, which comprises
[80845] (a) increasing or generating one or more activities selected from the group consisting of chorismate lyase in a non-human organism or a part thereof, preferably a microorganism, a plant cell, a plant or a part thereof, as compared to a corresponding non-transformed wild type non-human organism or a part thereof; and
[80846] (b) growing the non-human organism or a part thereof under conditions which permit the production of 3,4,5-trihydroxypentanoic acid or a composition comprising 3,4,5-trihydroxypentanoic acid in said non-human organism or in the culture medium surrounding said non-human organism.

[80847] Accordingly, the present invention relates to a process for the production of fructose, which comprises
[80848] (a) increasing or generating one or more activities selected from the group consisting of b4050-protein in a non-human organism or a part thereof, preferably a microorganism, a plant cell, a plant or a part thereof, as compared to a corresponding non-transformed wild type non-human organism or a part thereof; and
[80849] (b) growing the non-human organism or a part thereof under conditions which permit the production of fructose or a composition comprising fructose in said non-human organism or in the culture medium surrounding said non-human organism.

[80850] Accordingly, the present invention relates to a process for the production of glucose, which comprises
[80851] (a) increasing or generating one or more activities selected from the group consisting of b4050-protein in a non-human organism or a part thereof, preferably a microorganism, a plant cell, a plant or a part thereof, as compared to a corresponding non-transformed wild type non-human organism or a part thereof; and
[80852] (b) growing the non-human organism or a part thereof under conditions which permit the production of glucose or a composition comprising glucose in said non-human organism or in the culture medium surrounding said non-human organism.

[80853] Accordingly, the present invention relates to a process for the production of myo-inositol, which comprises
[80854] (a) increasing or generating one or more activities selected from the group consisting of b4050-protein in a non-human organism or a part thereof, preferably a microorganism, a plant cell, a plant or a part thereof, as compared to a corresponding non-transformed wild type non-human organism or a part thereof; and
[80855] (b) growing the non-human organism or a part thereof under conditions which permit the production of myo-inositol or a composition comprising myo-inositol in said non-human organism or in the culture medium surrounding said non-human organism.

[80856] Accordingly, the present invention relates to a process for the production of fructose, which comprises
[80857] (a) increasing or generating one or more activities selected from the group consisting of b4056-protein in a non-human organism or a part thereof, preferably a microorganism, a plant cell, a plant or a part thereof, as compared to a corresponding non-transformed wild type non-human organism or a part thereof; and
[80858] (b) growing the non-human organism or a part thereof under conditions which permit the production of fructose or a composition comprising fructose in said non-human organism or in the culture medium surrounding said non-human organism.

[80859] Accordingly, the present invention relates to a process for the production of galactinol, which comprises
[80860] (a) increasing or generating one or more activities selected from the group consisting of acetyl-coenzyme A synthetase in a non-human organism or a part thereof, preferably a microorganism, a plant cell, a plant or a part thereof, as compared to a corresponding non-transformed wild type non-human organism or a part thereof; and
[80861] (b) growing the non-human organism or a part thereof under conditions which permit the production of galactinol or a composition comprising galactinol in said non-human organism or in the culture medium surrounding said non-human organism.

[80862] Accordingly, the present invention relates to a process for the production of glucose-1-phosphate, which comprises
[80863] (a) increasing or generating one or more activities selected from the group consisting of lipoprotein precursor in a non-human organism or a part thereof, preferably a microorganism, a plant cell, a plant or a part thereof, as compared to a corresponding non-transformed wild type non-human organism or a part thereof; and
[80864] (b) growing the non-human organism or a part thereof under conditions which permit the production of glucose-1-phosphate or a composition comprising glucose-1-phosphate in said non-human organism or in the culture medium surrounding said non-human organism.

[80865] Accordingly, the present invention relates to a process for the production of 3,4,5-trihydroxypentanoic acid, which comprises
[80866] (a) increasing or generating one or more activities selected from the group consisting of lipoprotein precursor in a non-human organism or a part thereof, preferably a microorganism, a plant cell, a plant or a part thereof, as compared to a corresponding non-transformed wild type non-human organism or a part thereof; and
[80867] (b) growing the non-human organism or a part thereof under conditions which permit the production of 3,4,5-trihydroxypentanoic acid or a composition comprising 3,4,5-trihydroxypentanoic acid in said non-human organism or in the culture medium surrounding said non-human organism.

[80868] Accordingly, the present invention relates to a process for the production of myo-inositol, which comprises
[80869] (a) increasing or generating one or more activities selected from the group consisting of b4250-protein in a non-human organism or a part thereof, preferably a microorganism, a plant cell, a plant or a part thereof, as compared to a corresponding non-transformed wild type non-human organism or a part thereof; and
[80870] (b) growing the non-human organism or a part thereof under conditions which permit the production of myo-inositol or a composition comprising myo-inositol in said non-human organism or in the culture medium surrounding said non-human organism.

[80871] Accordingly, the present invention relates to a process for the production of raffinose, which comprises
[80872] (a) increasing or generating one or more activities selected from the group consisting of b4250-protein in a non-human organism or a part thereof, preferably a microorganism, a plant cell, a plant or a part thereof, as compared to a corresponding non-transformed wild type non-human organism or a part thereof; and
[80873] (b) growing the non-human organism or a part thereof under conditions which permit the production of raffinose or a composition comprising raffinose in said non-human organism or in the culture medium surrounding said non-human organism.

[80874] Accordingly, the present invention relates to a process for the production of fructose, which comprises
[80875] (a) increasing or generating one or more activities selected from the group consisting of acetyltransferase in a non-human organism or a part thereof, preferably a microorganism, a plant cell, a plant or a part thereof, as compared to a corresponding non-transformed wild type non-human organism or a part thereof; and
[80876] (b) growing the non-human organism or a part thereof under conditions which permit the production of fructose or a composition comprising fructose in said non-human organism or in the culture medium surrounding said non-human organism.

[80877] Accordingly, the present invention relates to a process for the production of glucose, which comprises
[80878] (a) increasing or generating one or more activities selected from the group consisting of acetyltransferase in a non-human organism or a part thereof, preferably a microorganism, a plant cell, a plant or a part thereof, as compared to a corresponding non-transformed wild type non-human organism or a part thereof; and
[80879] (b) growing the non-human organism or a part thereof under conditions which permit the production of glucose or a composition comprising glucose in said non-human organism or in the culture medium surrounding said non-human organism.

[80880] Accordingly, the present invention relates to a process for the production of fructose, which comprises
[80881] (a) increasing or generating one or more activities selected from the group consisting of gluconate transport system permease 3 in a non-human organism or a part thereof, preferably a microorganism, a plant cell, a plant or a part thereof, as compared to a corresponding non-transformed wild type non-human organism or a part thereof; and
[80882] (b) growing the non-human organism or a part thereof under conditions which permit the production of fructose or a composition comprising fructose in said non-human organism or in the culture medium surrounding said non-human organism.

[80883] Accordingly, the present invention relates to a process for the production of galactinol, which comprises
[80884] (a) increasing or generating one or more activities selected from the group consisting of purine-nucleoside phosphorylase in a non-human organism or a part thereof, preferably a microorganism, a plant cell, a plant or a part thereof, as compared to a corresponding non-transformed wild type non-human organism or a part thereof; and
[80885] (b) growing the non-human organism or a part thereof under conditions which permit the production of galactinol or a composition comprising galactinol in said non-human organism or in the culture medium surrounding said non-human organism.

[80886] Accordingly, the present invention relates to a process for the production of myo-inositol, which comprises
[80887] (a) increasing or generating one or more activities selected from the group consisting of lysine decarboxylase in a non-human organism or a part thereof, preferably a microorganism, a plant cell, a plant or a part thereof, as compared to a corresponding non-transformed wild type non-human organism or a part thereof; and
[80888] (b) growing the non-human organism or a part thereof under conditions which permit the production of myo-inositol or a composition comprising myo-inositol in said non-human organism or in the culture medium surrounding said non-human organism.

[80889] Accordingly, the present invention relates to a process for the production of fructose, which comprises
[80890] (a) increasing or generating one or more activities selected from the group consisting of glutaredoxin in a non-human organism or a part thereof, preferably a microorganism, a plant cell, a plant or a part thereof, as compared to a corresponding non-transformed wild type non-human organism or a part thereof; and
[80891] (b) growing the non-human organism or a part thereof under conditions which permit the production of fructose or a composition comprising fructose in said non-human organism or in the culture medium surrounding said non-human organism.

[80892] Accordingly, the present invention relates to a process for the production of glucose, which comprises
[80893] (a) increasing or generating one or more activities selected from the group consisting of glutaredoxin in a non-human organism or a part thereof, preferably a microorganism, a plant cell, a plant or a part thereof, as compared to a corresponding non-transformed wild type non-human organism or a part thereof; and
[80894] (b) growing the non-human organism or a part thereof under conditions which permit the production of glucose or a composition comprising glucose in said non-human organism or in the culture medium surrounding said non-human organism.

[80895] Accordingly, the present invention relates to a process for the production of glucose-1-phosphate, which comprises
[80896] (a) increasing or generating one or more activities selected from the group consisting of glutaredoxin in a non-human organism or a part thereof, preferably a microorganism, a plant cell, a plant or a part thereof, as compared to a corresponding non-transformed wild type non-human organism or a part thereof; and
[80897] (b) growing the non-human organism or a part thereof under conditions which permit the production of glucose-1-phosphate or a composition comprising glucose-1-phosphate in said non-human organism or in the culture medium surrounding said non-human organism.

[80898] Accordingly, the present invention relates to a process for the production of myo-inositol, which comprises
[80899] (a) increasing or generating one or more activities selected from the group consisting of glutaredoxin in a non-human organism or a part thereof, preferably a microorganism, a plant cell, a plant or a part thereof, as compared to a corresponding non-transformed wild type non-human organism or a part thereof; and
[80900] (b) growing the non-human organism or a part thereof under conditions which permit the production of myo-inositol or a composition comprising myo-inositol in said non-human organism or in the culture medium surrounding said non-human organism.

[80901] Accordingly, the present invention relates to a process for the production of sucrose, which comprises
[80902] (a) increasing or generating one or more activities selected from the group consisting of glutaredoxin in a non-human organism or a part thereof, preferably a microorganism, a plant cell, a plant or a part thereof, as compared to a corresponding non-transformed wild type non-human organism or a part thereof; and
[80903] (b) growing the non-human organism or a part thereof under conditions which permit the production of sucrose or a composition comprising sucrose in said non-human organism or in the culture medium surrounding said non-human organism.

[80904] Accordingly, the present invention relates to a process for the production of glucose-1-phosphate, which comprises
[80905] (a) increasing or generating one or more activities selected from the group consisting of transcription factor in a non-human organism or a part thereof, preferably a microorganism, a plant cell, a plant or a part thereof, as compared to a corresponding non-transformed wild type non-human organism or a part thereof; and
[80906] (b) growing the non-human organism or a part thereof under conditions which permit the production of glucose-1-phosphate or a composition comprising glucose-1-phosphate in said non-human organism or in the culture medium surrounding said non-human organism.

[80907] Accordingly, the present invention relates to a process for the production of 3,4,5-trihydroxypentanoic acid, which comprises
[80908] (a) increasing or generating one or more activities selected from the group consisting of transcription factor in a non-human organism or a part thereof, preferably a microorganism, a plant cell, a plant or a part thereof, as compared to a corresponding non-transformed wild type non-human organism or a part thereof; and
[80909] (b) growing the non-human organism or a part thereof under conditions which permit the production of 3,4,5-trihydroxypentanoic acid or a composition comprising 3,4,5-trihydroxypentanoic acid in said non-human organism or in the culture medium surrounding said non-human organism.

[80910] Accordingly, the present invention relates to a process for the production of fructose, which comprises
[80911] (a) increasing or generating one or more activities selected from the group consisting of transcription factor in a non-human organism or a part thereof, preferably a microorganism, a plant cell, a plant or a part thereof, as compared to a corresponding non-transformed wild type non-human organism or a part thereof; and
[80912] (b) growing the non-human organism or a part thereof under conditions which permit the production of fructose or a composition comprising fructose in said non-human organism or in the culture medium surrounding said non-human organism.

[80913] Accordingly, the present invention relates to a process for the production of glucose-1-phosphate, which comprises
[80914] (a) increasing or generating one or more activities selected from the group consisting of

[80915] GM02LC38418-protein in a non-human organism or a part thereof, preferably a microorganism, a plant cell, a plant or a part thereof, as compared to a corresponding non-transformed wild type non-human organism or a part thereof; and
[80916] (b) growing the non-human organism or a part thereof under conditions which permit the production of glucose-1-phosphate or a composition comprising glucose-1-phosphate in said non-human organism or in the culture medium surrounding said non-human organism.

[80917] Accordingly, the present invention relates to a process for the production of glucose-1-phosphate, which comprises
[80918] (a) increasing or generating one or more activities selected from the group consisting of cyclin D in a non-human organism or a part thereof, preferably a microorganism, a plant cell, a plant or a part thereof, as compared to a corresponding non-transformed wild type non-human organism or a part thereof; and
[80919] (b) growing the non-human organism or a part thereof under conditions which permit the production of glucose-1-phosphate or a composition comprising glucose-1-phosphate in said non-human organism or in the culture medium surrounding said non-human organism.

[80920] Accordingly, the present invention relates to a process for the production of raffinose, which comprises
[80921] (a) increasing or generating one or more activities selected from the group consisting of cyclin D in a non-human organism or a part thereof, preferably a microorganism, a plant cell, a plant or a part thereof, as compared to a corresponding non-transformed wild type non-human organism or a part thereof; and
[80922] (b) growing the non-human organism or a part thereof under conditions which permit the production of raffinose or a composition comprising raffinose in said non-human organism or in the culture medium surrounding said non-human organism.

[80923] Accordingly, the present invention relates to a process for the production of sucrose, which comprises
[80924] (a) increasing or generating one or more activities selected from the group consisting of cyclin D in a non-human organism or a part thereof, preferably a microorganism, a plant cell, a plant or a part thereof, as compared to a corresponding non-transformed wild type non-human organism or a part thereof; and
[80925] (b) growing the non-human organism or a part thereof under conditions which permit the production of sucrose or a composition comprising sucrose in said non-human organism or in the culture medium surrounding said non-human organism.

[80926] Accordingly, the present invention relates to a process for the production of 3,4,5-trihydroxypentanoic acid, which comprises
[80927] (a) increasing or generating one or more activities selected from the group consisting of GM02LC46-protein in a non-human organism or a part thereof, preferably a microorganism, a plant cell, a plant or a part thereof, as compared to a corresponding non-transformed wild type non-human organism or a part thereof; and
[80928] (b) growing the non-human organism or a part thereof under conditions which permit the production of 3,4,5-trihydroxypentanoic acid or a composition comprising 3,4,5-trihydroxypentanoic acid in said non-human organism or in the culture medium surrounding said non-human organism.

[80929] Accordingly, the present invention relates to a process for the production of 3,4,5-trihydroxypentanoic acid, which comprises
[80930] (a) increasing or generating one or more activities selected from the group consisting of transcription factor in a non-human organism or a part thereof, preferably a microorganism, a plant cell, a plant or a part thereof, as compared to a corresponding non-transformed wild type non-human organism or a part thereof; and
[80931] (b) growing the non-human organism or a part thereof under conditions which permit the production of 3,4,5-trihydroxypentanoic acid or a composition comprising 3,4,5-trihydroxypentanoic acid in said non-human organism or in the culture medium surrounding said non-human organism.

[80932] Accordingly, the present invention relates to a process for the production of myo-inositol, which comprises
[80933] (a) increasing or generating one or more activities selected from the group consisting of alkaline phosphatase in a non-human organism or a part thereof, preferably a microorganism, a plant cell, a plant or a part thereof, as compared to a corresponding non-transformed wild type non-human organism or a part thereof; and
[80934] (b) growing the non-human organism or a part thereof under conditions which permit the production of myo-inositol or a composition comprising myo-inositol in said non-human organism or in the culture medium surrounding said non-human organism.

[80935] Accordingly, the present invention relates to a process for the production of verbascose, which comprises
[80936] (a) increasing or generating one or more activities selected from the group consisting of flavodoxin in a non-human organism or a part thereof, preferably a microorganism, a plant cell, a plant or a part thereof, as compared to a corresponding non-transformed wild type non-human organism or a part thereof; and
[80937] (b) growing the non-human organism or a part thereof under conditions which permit the production of verbascose or a composition comprising verbascose in said non-human organism or in the culture medium surrounding said non-human organism.

[80938] Accordingly, the present invention relates to a process for the production of sucrose, which comprises
[80939] (a) increasing or generating one or more activities selected from the group consisting of sll0254-protein in a non-human organism or a part thereof, preferably a microorganism, a plant cell, a plant or a part thereof, as compared to a corresponding non-transformed wild type non-human organism or a part thereof; and
[80940] (b) growing the non-human organism or a part thereof under conditions which permit the production of sucrose or a composition comprising sucrose in said non-human organism or in the culture medium surrounding said non-human organism.

[80941] Accordingly, the present invention relates to a process for the production of verbascose, which comprises
[80942] (a) increasing or generating one or more activities selected from the group consisting of sll0281-protein in a non-human organism or a part thereof, preferably a microorganism, a plant cell, a plant or a part thereof, as compared to a corresponding non-transformed wild type non-human organism or a part thereof; and
[80943] (b) growing the non-human organism or a part thereof under conditions which permit the production of verbascose or a composition comprising verbascose in said non-human organism or in the culture medium surrounding said non-human organism.

[80944] Accordingly, the present invention relates to a process for the production of myo-inositol, which comprises
[80945] (a) increasing or generating one or more activities selected from the group consisting of sll0354-protein in a non-human organism or a part thereof, preferably a microorganism, a plant cell, a plant or a part thereof, as compared to a corresponding non-transformed wild type non-human organism or a part thereof; and
[80946] (b) growing the non-human organism or a part thereof under conditions which permit the production of myo-inositol or a composition comprising myo-inositol in said non-human organism or in the culture medium surrounding said non-human organism.

[80947] Accordingly, the present invention relates to a process for the production of myo-inositol, which comprises
[80948] (a) increasing or generating one or more activities selected from the group consisting of bifunctional protein (phosphoribosyltransferase and regulatory protein) in a non-human organism or a part thereof, preferably a microorganism, a plant cell, a plant or a part thereof, as compared to a corresponding non-transformed wild type non-human organism or a part thereof; and
[80949] (b) growing the non-human organism or a part thereof under conditions which permit the production of myo-inositol or a composition comprising myo-inositol in said non-human organism or in the culture medium surrounding said non-human organism.

[80950] Accordingly, the present invention relates to a process for the production of glucose-1-phosphate, which comprises
[80951] (a) increasing or generating one or more activities selected from the group consisting of sll0418-protein in a non-human organism or a part thereof, preferably a microorganism, a plant cell, a plant or a part thereof, as compared to a corresponding non-transformed wild type non-human organism or a part thereof; and
[80952] (b) growing the non-human organism or a part thereof under conditions which permit the production of glucose-1-phosphate or a composition comprising glucose-1-phosphate in said non-human organism or in the culture medium surrounding said non-human organism.

[80953] Accordingly, the present invention relates to a process for the production of myo-inositol, which comprises
[80954] (a) increasing or generating one or more activities selected from the group consisting of sll0418-protein in a non-human organism or a part thereof, preferably a microorganism, a plant cell, a plant or a part thereof, as compared to a corresponding non-transformed wild type non-human organism or a part thereof; and
[80955] (b) growing the non-human organism or a part thereof under conditions which permit the production of myo-inositol or a composition comprising myo-inositol in said non-human organism or in the culture medium surrounding said non-human organism.

[80956] Accordingly, the present invention relates to a process for the production of myo-inositol, which comprises
[80957] (a) increasing or generating one or more activities selected from the group consisting of sll0418-protein in a non-human organism or a part thereof, preferably a microorganism, a plant cell, a plant or a part thereof, as compared to a corresponding non-transformed wild type non-human organism or a part thereof; and
[80958] (b) growing the non-human organism or a part thereof under conditions which permit the production of myo-inositol or a composition comprising myo-inositol in said non-human organism or in the culture medium surrounding said non-human organism.

[80959] Accordingly, the present invention relates to a process for the production of saccharic acid, which comprises
[80960] (a) increasing or generating one or more activities selected from the group consisting of sll0418-protein in a non-human organism or a part thereof, preferably a microorganism, a plant cell, a plant or a part thereof, as compared to a corresponding non-transformed wild type non-human organism or a part thereof; and
[80961] (b) growing the non-human organism or a part thereof under conditions which permit the production of saccharic acid or a composition comprising saccharic acid in said non-human organism or in the culture medium surrounding said non-human organism.

[80962] Accordingly, the present invention relates to a process for the production of 3,4,5-trihydroxypentanoic acid, which comprises
[80963] (a) increasing or generating one or more activities selected from the group consisting of sll0418-protein in a non-human organism or a part thereof, preferably a microorganism, a plant cell, a plant or a part thereof, as compared to a corresponding non-transformed wild type non-human organism or a part thereof; and
[80964] (b) growing the non-human organism or a part thereof under conditions which permit the production of 3,4,5-trihydroxypentanoic acid or a composition comprising 3,4,5-trihydroxypentanoic acid in said non-human organism or in the culture medium surrounding said non-human organism.

[80965] Accordingly, the present invention relates to a process for the production of glucose-1-phosphate, which comprises
[80966] (a) increasing or generating one or more activities selected from the group consisting of urease subunit in a non-human organism or a part thereof, preferably a microorganism, a plant cell, a plant or a part thereof, as compared to a corresponding non-transformed wild type non-human organism or a part thereof; and
[80967] (b) growing the non-human organism or a part thereof under conditions which permit the production of glucose-1-phosphate or a composition comprising glucose-1-phosphate in said non-human organism or in the culture medium surrounding said non-human organism.

[80968] Accordingly, the present invention relates to a process for the production of glucose-1-phosphate, which comprises
[80969] (a) increasing or generating one or more activities selected from the group consisting of glucokinase in a non-human organism or a part thereof, preferably a microorganism, a plant cell, a plant or a part thereof, as compared to a corresponding non-transformed wild type non-human organism or a part thereof; and
[80970] (b) growing the non-human organism or a part thereof under conditions which permit the production of glucose-1-phosphate or a composition comprising glucose-1-phosphate in said non-human organism or in the culture medium surrounding said non-human organism.

[80971] Accordingly, the present invention relates to a process for the production of saccharic acid, which comprises
[80972] (a) increasing or generating one or more activities selected from the group consisting of urease accessory protein in a non-human organism or a part thereof, preferably a microorganism, a plant cell, a plant or a part thereof, as compared to a corresponding non-transformed wild type non-human organism or a part thereof; and
[80973] (b) growing the non-human organism or a part thereof under conditions which permit the production of saccharic acid or a composition comprising saccharic acid in said non-human organism or in the culture medium surrounding said non-human organism.

[80974] Accordingly, the present invention relates to a process for the production of glucose-1-phosphate, which comprises
[80975] (a) increasing or generating one or more activities selected from the group consisting of binding-protein-dependent transport systems inner membrane component in a non-human organism or a part thereof, preferably a microorganism, a plant cell, a plant or a part thereof, as compared to a corresponding non-transformed wild type non-human organism or a part thereof; and
[80976] (b) growing the non-human organism or a part thereof under conditions which permit the production of glucose-1-phosphate or a composition comprising glucose-1-phosphate in said non-human organism or in the culture medium surrounding said non-human organism.

[80977] Accordingly, the present invention relates to a process for the production of 3,4,5-trihydroxypentanoic acid, which comprises
[80978] (a) increasing or generating one or more activities selected from the group consisting of binding-protein-dependent transport systems inner membrane component in a non-human organism or a part thereof, preferably a microorganism, a plant cell, a plant or a part thereof, as compared to a corresponding non-transformed wild type non-human organism or a part thereof; and
[80979] (b) growing the non-human organism or a part thereof under conditions which permit the production of 3,4,5-trihydroxypentanoic acid or a composition comprising 3,4,5-trihydroxypentanoic acid in said non-human organism or in the culture medium surrounding said non-human organism.

[80980] Accordingly, the present invention relates to a process for the production of glucose-1-phosphate, which comprises
[80981] (a) increasing or generating one or more activities selected from the group consisting of 3-deoxy-7-phosphoheptulonate synthase in a non-human organism or a part thereof, preferably a microorganism, a plant cell, a plant or a part thereof, as compared to a corresponding non-transformed wild type non-human organism or a part thereof; and
[80982] (b) growing the non-human organism or a part thereof under conditions which permit the production of glucose-1-phosphate or a composition comprising glucose-1-phosphate in said non-human organism or in the culture medium surrounding said non-human organism.

[80983] Accordingly, the present invention relates to a process for the production of fructose, which comprises
[80984] (a) increasing or generating one or more activities selected from the group consisting of glycogen synthase in a non-human organism or a part thereof, preferably a microorganism, a plant cell, a plant or a part thereof, as compared to a corresponding non-transformed wild type non-human organism or a part thereof; and
[80985] (b) growing the non-human organism or a part thereof under conditions which permit the production of fructose or a composition comprising fructose in said non-human organism or in the culture medium surrounding said non-human organism.

[80986] Accordingly, the present invention relates to a process for the production of sucrose, which comprises
[80987] (a) increasing or generating one or more activities selected from the group consisting of glycogen synthase in a non-human organism or a part thereof, preferably a microorganism, a plant cell, a plant or a part thereof, as compared to a corresponding non-transformed wild type non-human organism or a part thereof; and
[80988] (b) growing the non-human organism or a part thereof under conditions which permit the production of sucrose or a composition comprising sucrose in said non-human organism or in the culture medium surrounding said non-human organism.

[80989] Accordingly, the present invention relates to a process for the production of glucose-1-phosphate, which comprises
[80990] (a) increasing or generating one or more activities selected from the group consisting of coproporphyrinogen oxidase in a non-human organism or a part thereof, preferably a microorganism, a plant cell, a plant or a part thereof, as compared to a corresponding non-transformed wild type non-human organism or a part thereof; and
[80991] (b) growing the non-human organism or a part thereof under conditions which permit the production of glucose-1-phosphate or a composition comprising glucose-1-phosphate in said non-human organism or in the culture medium surrounding said non-human organism.

[80992] Accordingly, the present invention relates to a process for the production of 3,4,5-trihydroxypentanoic acid, which comprises
[80993] (a) increasing or generating one or more activities selected from the group consisting of short chain dehydrogenase in a non-human organism or a part thereof, preferably a microorganism, a plant cell, a plant or a part thereof, as compared to a corresponding non-transformed wild type non-human organism or a part thereof; and
[80994] (b) growing the non-human organism or a part thereof under conditions which permit the production of 3,4,5-trihydroxypentanoic acid or a composition comprising 3,4,5-trihydroxypentanoic acid in said non-human organism or in the culture medium surrounding said non-human organism.

[80995] Accordingly, the present invention relates to a process for the production of raffinose, which comprises
[80996] (a) increasing or generating one or more activities selected from the group consisting of glycogen (starch) synthase in a non-human organism or a part thereof, preferably a microorganism, a plant cell, a plant or a part thereof, as compared to a corresponding non-transformed wild type non-human organism or a part thereof; and
[80997] (b) growing the non-human organism or a part thereof under conditions which permit the production of raffinose or a composition comprising raffinose in said non-human organism or in the culture medium surrounding said non-human organism.

[80998] Accordingly, the present invention relates to a process for the production of myo-inositol, which comprises
[80999] (a) increasing or generating one or more activities selected from the group consisting of carbamoyl-phosphate synthase subunit in a non-human organism or a part thereof, preferably a microorganism, a plant cell, a plant or a part thereof, as compared to a corresponding non-transformed wild type non-human organism or a part thereof; and
[81000] (b) growing the non-human organism or a part thereof under conditions which permit the production of myo-inositol or a composition comprising myo-inositol in said non-human organism or in the culture medium surrounding said non-human organism.

[81001] Accordingly, the present invention relates to a process for the production of 3,4,5-trihydroxypentanoic acid, which comprises
[81002] (a) increasing or generating one or more activities selected from the group consisting of carbamoyl-phosphate synthase subunit in a non-human organism or a part thereof, preferably a microorganism, a plant cell, a plant or a part thereof, as compared to a corresponding non-transformed wild type non-human organism or a part thereof; and
[81003] (b) growing the non-human organism or a part thereof under conditions which permit the production of 3,4,5-trihydroxypentanoic acid or a composition comprising 3,4,5-trihydroxypentanoic acid in said non-human organism or in the culture medium surrounding said non-human organism.

[81004] Accordingly, the present invention relates to a process for the production of myo-inositol, which comprises
[81005] (a) increasing or generating one or more activities selected from the group consisting of 4-alpha-glucanotransferase in a non-human organism or a part thereof, preferably a microorganism, a plant cell, a plant or a part thereof, as compared to a corresponding non-transformed wild type non-human organism or a part thereof; and
[81006] (b) growing the non-human organism or a part thereof under conditions which permit the production of myo-inositol or a composition comprising myo-inositol in said non-human organism or in the culture medium surrounding said non-human organism.

[81007] Accordingly, the present invention relates to a process for the production of 3,4,5-trihydroxypentanoic acid, which comprises
[81008] (a) increasing or generating one or more activities selected from the group consisting of alanine dehydrogenase in a non-human organism or a part thereof, preferably a microorganism, a plant cell, a plant or a part thereof, as compared to a corresponding non-transformed wild type non-human organism or a part thereof; and
[81009] (b) growing the non-human organism or a part thereof under conditions which permit the production of 3,4,5-trihydroxypentanoic acid or a composition comprising 3,4,5-trihydroxypentanoic acid in said non-human organism or in the culture medium surrounding said non-human organism.

[81010] Accordingly, the present invention relates to a process for the production of glucose, which comprises
[81011] (a) increasing or generating one or more activities selected from the group consisting of sll1761-protein in a non-human organism or a part thereof, preferably a microorganism, a plant cell, a plant or a part thereof, as compared to a corresponding non-transformed wild type non-human organism or a part thereof; and
[81012] (b) growing the non-human organism or a part thereof under conditions which permit the production of glucose or a composition comprising glucose in said non-human organism or in the culture medium surrounding said non-human organism.

[81013] Accordingly, the present invention relates to a process for the production of glucose, which comprises
[81014] (a) increasing or generating one or more activities selected from the group consisting of acyl transferase in a non-human organism or a part thereof, preferably a microorganism, a plant cell, a plant or a part thereof, as compared to a corresponding non-transformed wild type non-human organism or a part thereof; and
[81015] (b) growing the non-human organism or a part thereof under conditions which permit the production of glucose or a composition comprising glucose in said non-human organism or in the culture medium surrounding said non-human organism.

[81016] Accordingly, the present invention relates to a process for the production of glucose-1-phosphate, which comprises
[81017] (a) increasing or generating one or more activities selected from the group consisting of cation-transporting ATPase in a non-human organism or a part thereof, preferably a microorganism, a plant cell, a plant or a part thereof, as compared to a corresponding non-transformed wild type non-human organism or a part thereof; and
[81018] (b) growing the non-human organism or a part thereof under conditions which permit the production of glucose-1-phosphate or a composition comprising glucose-1-phosphate in said non-human organism or in the culture medium surrounding said non-human organism.

[81019] Accordingly, the present invention relates to a process for the production of glucose-1-phosphate, which comprises
[81020] (a) increasing or generating one or more activities selected from the group consisting of cation-transporting ATPase in a non-human organism or a part thereof, preferably a microorganism, a plant cell, a plant or a part thereof, as compared to a corresponding non-transformed wild type non-human organism or a part thereof; and
[81021] (b) growing the non-human organism or a part thereof under conditions which permit the production of glucose-1-phosphate or a composition comprising glucose-1-phosphate in said non-human organism or in the culture medium surrounding said non-human organism.

[81022] Accordingly, the present invention relates to a process for the production of myo-inositol, which comprises
[81023] (a) increasing or generating one or more activities selected from the group consisting of cation-transporting ATPase in a non-human organism or a part thereof, preferably a microorganism, a plant cell, a plant or a part thereof, as compared to a corresponding non-transformed wild type non-human organism or a part thereof; and
[81024] (b) growing the non-human organism or a part thereof under conditions which permit the production of myo-inositol or a composition comprising myo-inositol in said non-human organism or in the culture medium surrounding said non-human organism.

[81025] Accordingly, the present invention relates to a process for the production of raffinose, which comprises
[81026] (a) increasing or generating one or more activities selected from the group consisting of cation-transporting ATPase in a non-human organism or a part thereof, preferably a microorganism, a plant cell, a plant or a part thereof, as compared to a corresponding non-transformed wild type non-human organism or a part thereof; and
[81027] (b) growing the non-human organism or a part thereof under conditions which permit the production of raffinose or a composition comprising raffinose in said non-human organism or in the culture medium surrounding said non-human organism.

[81028] Accordingly, the present invention relates to a process for the production of glucose-1-phosphate, which comprises
[81029] (a) increasing or generating one or more activities selected from the group consisting of glycosidase in a non-human organism or a part thereof, preferably a microorganism, a plant cell, a plant or a part thereof, as compared to a corresponding non-transformed wild type non-human organism or a part thereof; and
[81030] (b) growing the non-human organism or a part thereof under conditions which permit the production of glucose-1-phosphate or a composition comprising glucose-1-phosphate in said non-human organism or in the culture medium surrounding said non-human organism.

[81031] Accordingly, the present invention relates to a process for the production of fructose, which comprises
[81032] (a) increasing or generating one or more activities selected from the group consisting of precorrin methylase in a non-human organism or a part thereof, preferably a microorganism, a plant cell, a plant or a part thereof, as compared to a corresponding non-transformed wild type non-human organism or a part thereof; and
[81033] (b) growing the non-human organism or a part thereof under conditions which permit the production of fructose or a composition comprising fructose in said non-human organism or in the culture medium surrounding said non-human organism.

[81034] Accordingly, the present invention relates to a process for the production of glucose, which comprises
[81035] (a) increasing or generating one or more activities selected from the group consisting of precorrin methylase in a non-human organism or a part thereof, preferably a microorganism, a plant cell, a plant or a part thereof, as compared to a corresponding non-transformed wild type non-human organism or a part thereof; and
[81036] (b) growing the non-human organism or a part thereof under conditions which permit the production of glucose or a composition comprising glucose in said non-human organism or in the culture medium surrounding said non-human organism.

[81037] Accordingly, the present invention relates to a process for the production of glucose-1-phosphate, which comprises
[81038] (a) increasing or generating one or more activities selected from the group consisting of oxidoreductase in a non-human organism or a part thereof, preferably a microorganism, a plant cell, a plant or a part thereof, as compared to a corresponding non-transformed wild type non-human organism or a part thereof; and
[81039] (b) growing the non-human organism or a part thereof under conditions which permit the production of glucose-1-phosphate or a composition comprising glucose-1-phosphate in said non-human organism or in the culture medium surrounding said non-human organism.

[81040] Accordingly, the present invention relates to a process for the production of 3,4,5-trihydroxypentanoic acid, which comprises
[81041] (a) increasing or generating one or more activities selected from the group consisting of oxidoreductase in a non-human organism or a part thereof, preferably a microorganism, a plant cell, a plant or a part thereof, as compared to a corresponding non-transformed wild type non-human organism or a part thereof; and
[81042] (b) growing the non-human organism or a part thereof under conditions which permit the production of 3,4,5-trihydroxypentanoic acid or a composition comprising 3,4,5-trihydroxypentanoic acid in said non-human organism or in the culture medium surrounding said non-human organism.

[81043] Accordingly, the present invention relates to a process for the production of glucose-1-phosphate, which comprises
[81044] (a) increasing or generating one or more activities selected from the group consisting of slr0600-protein in a non-human organism or a part thereof, preferably a microorganism, a plant cell, a plant or a part thereof, as compared to a corresponding non-transformed wild type non-human organism or a part thereof; and
[81045] (b) growing the non-human organism or a part thereof under conditions which permit the production of glucose-1-phosphate or a composition comprising glucose-1-phosphate in said non-human organism or in the culture medium surrounding said non-human organism.

[81046] Accordingly, the present invention relates to a process for the production of glucose-1-phosphate, which comprises
[81047] (a) increasing or generating one or more activities selected from the group consisting of Glu/Leu/Phe/Val dehydrogenase in a non-human organism or a part thereof, preferably a microorganism, a plant cell, a plant or a part thereof, as compared to a corresponding non-transformed wild type non-human organism or a part thereof; and
[81048] (b) growing the non-human organism or a part thereof under conditions which permit the production of glucose-1-phosphate or a composition comprising glucose-1-phosphate in said non-human organism or in the culture medium surrounding said non-human organism.

[81049] Accordingly, the present invention relates to a process for the production of glucose-1-phosphate, which comprises
[81050] (a) increasing or generating one or more activities selected from the group consisting of malate dehydrogenase in a non-human organism or a part thereof, preferably a microorganism, a plant cell, a plant or a part thereof, as compared to a corresponding non-transformed wild type non-human organism or a part thereof; and
[81051] (b) growing the non-human organism or a part thereof under conditions which permit the production of glucose-1-phosphate or a composition comprising glucose-1-phosphate in said non-human organism or in the culture medium surrounding said non-human organism.

[81052] Accordingly, the present invention relates to a process for the production of sucrose, which comprises
[81053] (a) increasing or generating one or more activities selected from the group consisting of geranylgeranyl pyrophosphate synthase in a non-human organism or a part thereof, preferably a microorganism, a plant cell, a plant or a part thereof, as compared to a corresponding non-transformed wild type non-human organism or a part thereof; and
[81054] (b) growing the non-human organism or a part thereof under conditions which permit the production of sucrose or a composition comprising sucrose in said non-human organism or in the culture medium surrounding said non-human organism.

[81055] Accordingly, the present invention relates to a process for the production of fructose, which comprises
[81056] (a) increasing or generating one or more activities selected from the group consisting of circadian clock protein in a non-human organism or a part thereof, preferably a microorganism, a plant cell, a plant or a part thereof, as compared to a corresponding non-transformed wild type non-human organism or a part thereof; and
[81057] (b) growing the non-human organism or a part thereof under conditions which permit the production of fructose or a composition comprising fructose in said non-human organism or in the culture medium surrounding said non-human organism.

[81058] Accordingly, the present invention relates to a process for the production of glucose, which comprises
[81059] (a) increasing or generating one or more activities selected from the group consisting of circadian clock protein in a non-human organism or a part thereof, preferably a microorganism, a plant cell, a plant or a part thereof, as compared to a corresponding non-transformed wild type non-human organism or a part thereof; and
[81060] (b) growing the non-human organism or a part thereof under conditions which permit the production of glucose or a composition comprising glucose in said non-human organism or in the culture medium surrounding said non-human organism.

[81061] Accordingly, the present invention relates to a process for the production of glucose-1-phosphate, which comprises
[81062] (a) increasing or generating one or more activities selected from the group consisting of circadian clock protein in a non-human organism or a part thereof, preferably a microorganism, a plant cell, a plant or a part thereof, as compared to a corresponding non-transformed wild type non-human organism or a part thereof; and
[81063] (b) growing the non-human organism or a part thereof under conditions which permit the production of glucose-1-phosphate or a composition comprising glucose-1-phosphate in said non-human organism or in the culture medium surrounding said non-human organism.

[81064] Accordingly, the present invention relates to a process for the production of glucose-1-phosphate, which comprises
[81065] (a) increasing or generating one or more activities selected from the group consisting of amine oxidase in a non-human organism or a part thereof, preferably a microorganism, a plant cell, a plant or a part thereof, as compared to a corresponding non-transformed wild type non-human organism or a part thereof; and
[81066] (b) growing the non-human organism or a part thereof under conditions which permit the production of glucose-1-phosphate or a composition comprising glucose-1-phosphate in said non-human organism or in the culture medium surrounding said non-human organism.

[81067] Accordingly, the present invention relates to a process for the production of fructose, which comprises
[81068] (a) increasing or generating one or more activities selected from the group consisting of kinase in a non-human organism or a part thereof, preferably a microorganism, a plant cell, a plant or a part thereof, as compared to a corresponding non-transformed wild type non-human organism or a part thereof; and
[81069] (b) growing the non-human organism or a part thereof under conditions which permit the production of fructose or a composition comprising fructose in said non-human organism or in the culture medium surrounding said non-human organism.

[81070] Accordingly, the present invention relates to a process for the production of glucose, which comprises
[81071] (a) increasing or generating one or more activities selected from the group consisting of kinase in a non-human organism or a part thereof, preferably a microorganism, a plant cell, a plant or a part thereof, as compared to a corresponding non-transformed wild type non-human organism or a part thereof; and
[81072] (b) growing the non-human organism or a part thereof under conditions which permit the production of glucose or a composition comprising glucose in said non-human organism or in the culture medium surrounding said non-human organism.

[81073] Accordingly, the present invention relates to a process for the production of glucose-1-phosphate, which comprises
[81074] (a) increasing or generating one or more activities selected from the group consisting of Mg-protoporphyrin IX monomethyl ester oxidative cyclase 66 kD subunit in a non-human organism or a part thereof, preferably a microorganism, a plant cell, a plant or a part thereof, as compared to a corresponding non-transformed wild type non-human organism or a part thereof; and
[81075] (b) growing the non-human organism or a part thereof under conditions which permit the production of glucose-1-phosphate or a composition comprising glucose-1-phosphate in said non-human organism or in the culture medium surrounding said non-human organism.

[81076] Accordingly, the present invention relates to a process for the production of myo-inositol, which comprises
[81077] (a) increasing or generating one or more activities selected from the group consisting of permease protein of ABC transporter in a non-human organism or a part thereof, preferably a microorganism, a plant cell, a plant or a part thereof, as compared to a corresponding non-transformed wild type non-human organism or a part thereof; and
[81078] (b) growing the non-human organism or a part thereof under conditions which permit the production of myo-inositol or a composition comprising myo-inositol in said non-human organism or in the culture medium surrounding said non-human organism.

[81079] Accordingly, the present invention relates to a process for the production of glucose-1-phosphate, which comprises
[81080] (a) increasing or generating one or more activities selected from the group consisting of dihydrolipoamide dehydrogenase in a non-human organism or a part thereof, preferably a microorganism, a plant cell, a plant or a part thereof, as compared to a corresponding non-transformed wild type non-human organism or a part thereof; and
[81081] (b) growing the non-human organism or a part thereof under conditions which permit the production of glucose-1-phosphate or a composition comprising glucose-1-phosphate in said non-human organism or in the culture medium surrounding said non-human organism.

[81082] Accordingly, the present invention relates to a process for the production of raffinose, which comprises
[81083] (a) increasing or generating one or more activities selected from the group consisting of dihydrolipoamide dehydrogenase in a non-human organism or a part thereof, preferably a microorganism, a plant cell, a plant or a part thereof, as compared to a corresponding non-transformed wild type non-human organism or a part thereof; and
[81084] (b) growing the non-human organism or a part thereof under conditions which permit the production of raffinose or a composition comprising raffinose in said non-human organism or in the culture medium surrounding said non-human organism.

[81085] Accordingly, the present invention relates to a process for the production of myo-inositol, which comprises
[81086] (a) increasing or generating one or more activities selected from the group consisting of slr1107-protein in a non-human organism or a part thereof, preferably a microorganism, a plant cell, a plant or a part thereof, as compared to a corresponding non-transformed wild type non-human organism or a part thereof; and
[81087] (b) growing the non-human organism or a part thereof under conditions which permit the production of myo-inositol or a composition comprising myo-inositol in said non-human organism or in the culture medium surrounding said non-human organism.

[81088] Accordingly, the present invention relates to a process for the production of glucose-1-phosphate, which comprises
[81089] (a) increasing or generating one or more activities selected from the group consisting of fatty acid desaturase in a non-human organism or a part thereof, preferably a microorganism, a plant cell, a plant or a part thereof, as compared to a corresponding non-transformed wild type non-human organism or a part thereof; and
[81090] (b) growing the non-human organism or a part thereof under conditions which permit the production of glucose-1-phosphate or a composition comprising glucose-1-phosphate in said non-human organism or in the culture medium surrounding said non-human organism.

[81091] Accordingly, the present invention relates to a process for the production of glucose-1-phosphate, which comprises
[81092] (a) increasing or generating one or more activities selected from the group consisting of CDP-diglyceride synthetase in a non-human organism or a part thereof, preferably a microorganism, a plant cell, a plant or a part thereof, as compared to a corresponding non-transformed wild type non-human organism or a part thereof; and
[81093] (b) growing the non-human organism or a part thereof under conditions which permit the production of glucose-1-phosphate or a composition comprising glucose-1-phosphate in said non-human organism or in the culture medium surrounding said non-human organism.

[81094] Accordingly, the present invention relates to a process for the production of myo-inositol, which comprises
[81095] (a) increasing or generating one or more activities selected from the group consisting of CDP-diglyceride synthetase in a non-human organism or a part thereof, preferably a microorganism, a plant cell, a plant or a part thereof, as compared to a corresponding non-transformed wild type non-human organism or a part thereof; and
[81096] (b) growing the non-human organism or a part thereof under conditions which permit the production of myo-inositol or a composition comprising myo-inositol in said non-human organism or in the culture medium surrounding said non-human organism.

[81097] Accordingly, the present invention relates to a process for the production of fructose, which comprises
[81098] (a) increasing or generating one or more activities selected from the group consisting of iron(III) dicitrate-binding protein in a non-human organism or a part thereof, preferably a microorganism, a plant cell, a plant or a part thereof, as compared to a corresponding non-transformed wild type non-human organism or a part thereof; and
[81099] (b) growing the non-human organism or a part thereof under conditions which permit the production of fructose or a composition comprising fructose in said non-human organism or in the culture medium surrounding said non-human organism.

[81100] Accordingly, the present invention relates to a process for the production of sucrose, which comprises
[81101] (a) increasing or generating one or more activities selected from the group consisting of photosystem I reaction center subunit XI in a non-human organism or a part thereof, preferably a microorganism, a plant cell, a plant or a part thereof, as compared to a corresponding non-transformed wild type non-human organism or a part thereof; and
[81102] (b) growing the non-human organism or a part thereof under conditions which permit the production of sucrose or a composition comprising sucrose in said non-human organism or in the culture medium surrounding said non-human organism.

[81103] Accordingly, the present invention relates to a process for the production of fructose, which comprises
[81104] (a) increasing or generating one or more activities selected from the group consisting of photosystem II protein in a non-human organism or a part thereof, preferably a microorganism, a plant cell, a plant or a part thereof, as compared to a corresponding non-transformed wild type non-human organism or a part thereof; and
[81105] (b) growing the non-human organism or a part thereof under conditions which permit the production of fructose or a composition comprising fructose in said non-human organism or in the culture medium surrounding said non-human organism.

[81106] Accordingly, the present invention relates to a process for the production of fructose, which comprises
[81107] (a) increasing or generating one or more activities selected from the group consisting of glutamine amidotransferase in a non-human organism or a part thereof, preferably a microorganism, a plant cell, a plant or a part thereof, as compared to a corresponding non-transformed wild type non-human organism or a part thereof; and
[81108] (b) growing the non-human organism or a part thereof under conditions which permit the production of fructose or a composition comprising fructose in said non-human organism or in the culture medium surrounding said non-human organism.

[81109] Accordingly, the present invention relates to a process for the production of myo-inositol, which comprises
[81110] (a) increasing or generating one or more activities selected from the group consisting of glutamine amidotransferase in a non-human organism or a part thereof, preferably a microorganism, a plant cell, a plant or a part thereof, as compared to a corresponding non-transformed wild type non-human organism or a part thereof; and
[81111] (b) growing the non-human organism or a part thereof under conditions which permit the production of myo-inositol or a composition comprising myo-inositol in said non-human organism or in the culture medium surrounding said non-human organism.

[81112] Accordingly, the present invention relates to a process for the production of glucose-1-phosphate, which comprises
[81113] (a) increasing or generating one or more activities selected from the group consisting of NADH dehydrogenase in a non-human organism or a part thereof, preferably a microorganism, a plant cell, a plant or a part thereof, as compared to a corresponding non-transformed wild type non-human organism or a part thereof; and
[81114] (b) growing the non-human organism or a part thereof under conditions which permit the production of glucose-1-phosphate or a composition comprising glucose-1-phosphate in said non-human organism or in the culture medium surrounding said non-human organism.

[81115] Accordingly, the present invention relates to a process for the production of raffinose, which comprises
[81116] (a) increasing or generating one or more activities selected from the group consisting of pyridoxal phosphate biosynthetic protein in a non-human organism or a part thereof, preferably a microorganism, a plant cell, a plant or a part thereof, as compared to a corresponding non-transformed wild type non-human organism or a part thereof; and
[81117] (b) growing the non-human organism or a part thereof under conditions which permit the production of raffinose or a composition comprising raffinose in said non-human organism or in the culture medium surrounding said non-human organism.

[81118] Accordingly, the present invention relates to a process for the production of glucose-1-phosphate, which comprises
[81119] (a) increasing or generating one or more activities selected from the group consisting of phosphoadenosine phosphosulfate reductase in a non-human organism or a part thereof, preferably a microorganism, a plant cell, a plant or a part thereof, as compared to a corresponding non-transformed wild type non-human organism or a part thereof; and
[81120] (b) growing the non-human organism or a part thereof under conditions which permit the production of glucose-1-phosphate or a composition comprising glucose-1-phosphate in said non-human organism or in the culture medium surrounding said non-human organism.

[81121] Accordingly, the present invention relates to a process for the production of glucose-1-phosphate, which comprises
[81122] (a) increasing or generating one or more activities selected from the group consisting of threonine dehydratase in a non-human organism or a part thereof, preferably a microorganism, a plant cell, a plant or a part thereof, as compared to a corresponding non-transformed wild type non-human organism or a part thereof; and
[81123] (b) growing the non-human organism or a part thereof under conditions which permit the production of glucose-1-phosphate or a composition comprising glucose-1-phosphate in said non-human organism or in the culture medium surrounding said non-human organism.

[81124] Accordingly, the present invention relates to a process for the production of 3,4,5-trihydroxypentanoic acid, which comprises
[81125] (a) increasing or generating one or more activities selected from the group consisting of threonine dehydratase in a non-human organism or a part thereof, preferably a microorganism, a plant cell, a plant or a part thereof, as compared to a corresponding non-transformed wild type non-human organism or a part thereof; and
[81126] (b) growing the non-human organism or a part thereof under conditions which permit the production of 3,4,5-trihydroxypentanoic acid or a composition comprising 3,4,5-trihydroxypentanoic acid in said non-human organism or in the culture medium surrounding said non-human organism.

[81127] Accordingly, the present invention relates to a process for the production of fructose, which comprises
[81128] (a) increasing or generating one or more activities selected from the group consisting of short-chain alcohol dehydrogenase family in a non-human organism or a part thereof, preferably a microorganism, a plant cell, a plant or a part thereof, as compared to a corresponding non-transformed wild type non-human organism or a part thereof; and
[81129] (b) growing the non-human organism or a part thereof under conditions which permit the production of fructose or a composition comprising fructose in said non-human organism or in the culture medium surrounding said non-human organism.

[81130] Accordingly, the present invention relates to a process for the production of glucose, which comprises
[81131] (a) increasing or generating one or more activities selected from the group consisting of short-chain alcohol dehydrogenase family in a non-human organism or a part thereof, preferably a microorganism, a plant cell, a plant or a part thereof, as compared to a corresponding non-transformed wild type non-human organism or a part thereof; and
[81132] (b) growing the non-human organism or a part thereof under conditions which permit the production of glucose or a composition comprising glucose in said non-human organism or in the culture medium surrounding said non-human organism.

[81133] Accordingly, the present invention relates to a process for the production of glucose-1-phosphate, which comprises
[81134] (a) increasing or generating one or more activities selected from the group consisting of short-chain alcohol dehydrogenase family in a non-human organism or a part thereof, preferably a microorganism, a plant cell, a plant or a part thereof, as compared to a corresponding non-transformed wild type non-human organism or a part thereof; and
[81135] (b) growing the non-human organism or a part thereof under conditions which permit the production of glucose-1-phosphate or a composition comprising glucose-1-phosphate in said non-human organism or in the culture medium surrounding said non-human organism.

[81136] Accordingly, the present invention relates to a process for the production of myo-inositol, which comprises
[81137] (a) increasing or generating one or more activities selected from the group consisting of short-chain alcohol dehydrogenase family in a non-human organism or a part thereof, preferably a microorganism, a plant cell, a plant or a part thereof, as compared to a corresponding non-transformed wild type non-human organism or a part thereof; and
[81138] (b) growing the non-human organism or a part thereof under conditions which permit the production of myo-inositol or a composition comprising myo-inositol in said non-human organism or in the culture medium surrounding said non-human organism.

[81139] Accordingly, the present invention relates to a process for the production of sucrose, which comprises
[81140] (a) increasing or generating one or more activities selected from the group consisting of short-chain alcohol dehydrogenase family in a non-human organism or a part thereof, preferably a microorganism, a plant cell, a plant or a part thereof, as compared to a corresponding non-transformed wild type non-human organism or a part thereof; and
[81141] (b) growing the non-human organism or a part thereof under conditions which permit the production of sucrose or a composition comprising sucrose in said non-human organism or in the culture medium surrounding said non-human organism.

[81142] Accordingly, the present invention relates to a process for the production of raffinose, which comprises
[81143] (a) increasing or generating one or more activities selected from the group consisting of phosphate acetyltransferase in a non-human organism or a part thereof, preferably a microorganism, a plant cell, a plant or a part thereof, as compared to a corresponding non-transformed wild type non-human organism or a part thereof; and
[81144] (b) growing the non-human organism or a part thereof under conditions which permit the production of raffinose or a composition comprising raffinose in said non-human organism or in the culture medium surrounding said non-human organism.

[81145] Accordingly, the present invention relates to a process for the production of glucose-1-phosphate, which comprises
[81146] (a) increasing or generating one or more activities selected from the group consisting of photosystem I reaction centre subunit in a non-human organism or a part thereof, preferably a microorganism, a plant cell, a plant or a part thereof, as compared to a corresponding non-transformed wild type non-human organism or a part thereof; and
[81147] (b) growing the non-human organism or a part thereof under conditions which permit the production of glucose-1-phosphate or a composition comprising glucose-1-phosphate in said non-human organism or in the culture medium surrounding said non-human organism.

[81148] Accordingly, the present invention relates to a process for the production of raffinose, which comprises
[81149] (a) increasing or generating one or more activities selected from the group consisting of photosystem I reaction centre subunit in a non-human organism or a part thereof, preferably a microorganism, a plant cell, a plant or a part thereof, as compared to a corresponding non-transformed wild type non-human organism or a part thereof; and
[81150] (b) growing the non-human organism or a part thereof under conditions which permit the production of raffinose or a composition comprising raffinose in said non-human organism or in the culture medium surrounding said non-human organism.

[81151] Accordingly, the present invention relates to a process for the production of 3,4,5-trihydroxypentanoic acid, which comprises
[81152] (a) increasing or generating one or more activities selected from the group consisting of photosystem I reaction centre subunit in a non-human organism or a part thereof, preferably a microorganism, a plant cell, a plant or a part thereof, as compared to a corresponding non-transformed wild type non-human organism or a part thereof; and
[81153] (b) growing the non-human organism or a part thereof under conditions which permit the production of 3,4,5-trihydroxypentanoic acid or a composition comprising 3,4,5-trihydroxypentanoic acid in said non-human organism or in the culture medium surrounding said non-human organism.

[81154] Accordingly, the present invention relates to a process for the production of fructose, which comprises
[81155] (a) increasing or generating one or more activities selected from the group consisting of Sec-independent protein translocase subunit in a non-human organism or a part thereof, preferably a microorganism, a plant cell, a plant or a part thereof, as compared to a corresponding non-transformed wild type non-human organism or a part thereof; and
[81156] (b) growing the non-human organism or a part thereof under conditions which permit the production of fructose or a composition comprising fructose in said non-human organism or in the culture medium surrounding said non-human organism.

[81157] Accordingly, the present invention relates to a process for the production of glucose, which comprises
[81158] (a) increasing or generating one or more activities selected from the group consisting of Sec-independent protein translocase subunit in a non-human organism or a part thereof, preferably a microorganism, a plant cell, a plant or a part thereof, as compared to a corresponding non-transformed wild type non-human organism or a part thereof; and
[81159] (b) growing the non-human organism or a part thereof under conditions which permit the production of glucose or a composition comprising glucose in said non-human organism or in the culture medium surrounding said non-human organism.

[81160] Accordingly, the present invention relates to a process for the production of sedoheptulose-7-phosphate, which comprises
[81161] (a) increasing or generating one or more activities selected from the group consisting of Sec-independent protein translocase subunit in a non-human organism or a part thereof, preferably a microorganism, a plant cell, a plant or a part thereof, as compared to a corresponding non-transformed wild type non-human organism or a part thereof; and
[81162] (b) growing the non-human organism or a part thereof under conditions which permit the production of sedoheptulose-7-phosphate or a composition comprising sedoheptulose-7-phosphate in said non-human organism or in the culture medium surrounding said non-human organism.

[81163] Accordingly, the present invention relates to a process for the production of fructose, which comprises
[81164] (a) increasing or generating one or more activities selected from the group consisting of cell division protein in a non-human organism or a part thereof, preferably a microorganism, a plant cell, a plant or a part thereof, as compared to a corresponding non-transformed wild type non-human organism or a part thereof; and
[81165] (b) growing the non-human organism or a part thereof under conditions which permit the production of fructose or a composition comprising fructose in said non-human organism or in the culture medium surrounding said non-human organism.

[81166] Accordingly, the present invention relates to a process for the production of glucose, which comprises
[81167] (a) increasing or generating one or more activities selected from the group consisting of cell division protein in a non-human organism or a part thereof, preferably a microorganism, a plant cell, a plant or a part thereof, as compared to a corresponding non-transformed wild type non-human organism or a part thereof; and
[81168] (b) growing the non-human organism or a part thereof under conditions which permit the production of glucose or a composition comprising glucose in said non-human organism or in the culture medium surrounding said non-human organism.

[81169] Accordingly, the present invention relates to a process for the production of sucrose, which comprises
[81170] (a) increasing or generating one or more activities selected from the group consisting of cell division protein in a non-human organism or a part thereof, preferably a microorganism, a plant cell, a plant or a part thereof, as compared to a corresponding non-transformed wild type non-human organism or a part thereof; and
[81171] (b) growing the non-human organism or a part thereof under conditions which permit the production of sucrose or a composition comprising sucrose in said non-human organism or in the culture medium surrounding said non-human organism.

[81172] Accordingly, the present invention relates to a process for the production of glucose-1-phosphate, which comprises
[81173] (a) increasing or generating one or more activities selected from the group consisting of branched-chain amino acid ABC transporter permease protein in a non-human organism or a part thereof, preferably a microorganism, a plant cell, a plant or a part thereof, as compared to a corresponding non-transformed wild type non-human organism or a part thereof; and
[81174] (b) growing the non-human organism or a part thereof under conditions which permit the production of glucose-1-phosphate or a composition comprising glucose-1-phosphate in said non-human organism or in the culture medium surrounding said non-human organism.

[81175] Accordingly, the present invention relates to a process for the production of 3,4,5-trihydroxypentanoic acid, which comprises
[81176] (a) increasing or generating one or more activities selected from the group consisting of branched-chain amino acid ABC transporter permease protein in a non-human organism or a part thereof, preferably a microorganism, a plant cell, a plant or a part thereof, as compared to a corresponding non-transformed wild type non-human organism or a part thereof; and
[81177] (b) growing the non-human organism or a part thereof under conditions which permit the production of 3,4,5-trihydroxypentanoic acid or a composition comprising 3,4,5-trihydroxypentanoic acid in said non-human organism or in the culture medium surrounding said non-human organism.

[81178] Accordingly, the present invention relates to a process for the production of myo-inositol, which comprises
[81179] (a) increasing or generating one or more activities selected from the group consisting of 3-isopropylmalate dehydratase large subunit in a non-human organism or a part thereof, preferably a microorganism, a plant cell, a plant or a part thereof, as compared to a corresponding non-transformed wild type non-human organism or a part thereof; and
[81180] (b) growing the non-human organism or a part thereof under conditions which permit the production of myo-inositol or a composition comprising myo-inositol in said non-human organism or in the culture medium surrounding said non-human organism.

[81181] Accordingly, the present invention relates to a process for the production of fructose, which comprises
[81182] (a) increasing or generating one or more activities selected from the group consisting of multiple antibiotic resistance protein in a non-human organism or a part thereof, preferably a microorganism, a plant cell, a plant or a part thereof, as compared to a corresponding non-transformed wild type non-human organism or a part thereof; and
[81183] (b) growing the non-human organism or a part thereof under conditions which permit the production of fructose or a composition comprising fructose in said non-human organism or in the culture medium surrounding said non-human organism.

[81184] Accordingly, the present invention relates to a process for the production of glucose, which comprises
[81185] (a) increasing or generating one or more activities selected from the group consisting of multiple antibiotic resistance protein in a non-human organism or a part thereof, preferably a microorganism, a plant cell, a plant or a part thereof, as compared to a corresponding non-transformed wild type non-human organism or a part thereof; and
[81186] (b) growing the non-human organism or a part thereof under conditions which permit the production of glucose or a composition comprising glucose in said non-human organism or in the culture medium surrounding said non-human organism.

[81187] Accordingly, the present invention relates to a process for the production of glucose-1-phosphate, which comprises
[81188] (a) increasing or generating one or more activities selected from the group consisting of multiple antibiotic resistance protein in a non-human organism or a part thereof, preferably a microorganism, a plant cell, a plant or a part thereof, as compared to a corresponding non-transformed wild type non-human organism or a part thereof; and
[81189] (b) growing the non-human organism or a part thereof under conditions which permit the production of glucose-1-phosphate or a composition comprising glucose-1-phosphate in said non-human organism or in the culture medium surrounding said non-human organism.

[81190] Accordingly, the present invention relates to a process for the production of fructose, which comprises
[81191] (a) increasing or generating one or more activities selected from the group consisting of TTC1386-protein in a non-human organism or a part thereof, preferably a microorganism, a plant cell, a plant or a part thereof, as compared to a corresponding non-transformed wild type non-human organism or a part thereof; and
[81192] (b) growing the non-human organism or a part thereof under conditions which permit the production of fructose or a composition comprising fructose in said non-human organism or in the culture medium surrounding said non-human organism.

[81193] Accordingly, the present invention relates to a process for the production of glucose, which comprises
[81194] (a) increasing or generating one or more activities selected from the group consisting of TTC1386-protein in a non-human organism or a part thereof, preferably a microorganism, a plant cell, a plant or a part thereof, as compared to a corresponding non-transformed wild type non-human organism or a part thereof; and
[81195] (b) growing the non-human organism or a part thereof under conditions which permit the production of glucose or a composition comprising glucose in said non-human organism or in the culture medium surrounding said non-human organism.

[81196] Accordingly, the present invention relates to a process for the production of fructose, which comprises
[81197] (a) increasing or generating one or more activities selected from the group consisting of homocitrate synthase in a non-human organism or a part thereof, preferably a microorganism, a plant cell, a plant or a part thereof, as compared to a corresponding non-transformed wild type non-human organism or a part thereof; and
[81198] (b) growing the non-human organism or a part thereof under conditions which permit the production of fructose or a composition comprising fructose in said non-human organism or in the culture medium surrounding said non-human organism.

[81199] Accordingly, the present invention relates to a process for the production of glucose-1-phosphate, which comprises
[81200] (a) increasing or generating one or more activities selected from the group consisting of homocitrate synthase in a non-human organism or a part thereof, preferably a microorganism, a plant cell, a plant or a part thereof, as compared to a corresponding non-transformed wild type non-human organism or a part thereof; and
[81201] (b) growing the non-human organism or a part thereof under conditions which permit the production of glucose-1-phosphate or a composition comprising glucose-1-phosphate in said non-human organism or in the culture medium surrounding said non-human organism.

[81202] Accordingly, the present invention relates to a process for the production of sucrose, which comprises
[81203] (a) increasing or generating one or more activities selected from the group consisting of homocitrate synthase in a non-human organism or a part thereof, preferably a microorganism, a plant cell, a plant or a part thereof, as compared to a corresponding non-transformed wild type non-human organism or a part thereof; and
[81204] (b) growing the non-human organism or a part thereof under conditions which permit the production of sucrose or a composition comprising sucrose in said non-human organism or in the culture medium surrounding said non-human organism.

[81205] Accordingly, the present invention relates to a process for the production of raffinose, which comprises
[81206] (a) increasing or generating one or more activities selected from the group consisting of permease in a non-human organism or a part thereof, preferably a microorganism, a plant cell, a plant or a part thereof, as compared to a corresponding non-transformed wild type non-human organism or a part thereof; and
[81207] (b) growing the non-human organism or a part thereof under conditions which permit the production of raffinose or a composition comprising raffinose in said non-human organism or in the culture medium surrounding said non-human organism.

[81208] Accordingly, the present invention relates to a process for the production of 3,4,5-trihydroxypentanoic acid, which comprises
[81209] (a) increasing or generating one or more activities selected from the group consisting of permease in a non-human organism or a part thereof, preferably a microorganism, a plant cell, a plant or a part thereof, as compared to a corresponding non-transformed wild type non-human organism or a part thereof; and
[81210] (b) growing the non-human organism or a part thereof under conditions which permit the production of 3,4,5-trihydroxypentanoic acid or a composition comprising 3,4,5-trihydroxypentanoic acid in said non-human organism or in the culture medium surrounding said non-human organism.

[81211] Accordingly, the present invention relates to a process for the production of glucose-1-phosphate, which comprises
[81212] (a) increasing or generating one or more activities selected from the group consisting of oxidoreductase subunit in a non-human organism or a part thereof, preferably a microorganism, a plant cell, a plant or a part thereof, as compared to a corresponding non-transformed wild type non-human organism or a part thereof; and
[81213] (b) growing the non-human organism or a part thereof under conditions which permit the production of glucose-1-phosphate or a composition comprising glucose-1-phosphate in said non-human organism or in the culture medium surrounding said non-human organism.

[81214] Accordingly, the present invention relates to a process for the production of glucose-1-phosphate, which comprises
[81215] (a) increasing or generating one or more activities selected from the group consisting of XM_{—}473199-protein in a non-human organism or a part thereof, preferably a microorganism, a plant cell, a plant or a part thereof, as compared to a corresponding non-transformed wild type non-human organism or a part thereof; and
[81216] (b) growing the non-human organism or a part thereof under conditions which permit the production of glucose-1-phosphate or a composition comprising glucose-1-phosphate in said non-human organism or in the culture medium surrounding said non-human organism.

[81217] Accordingly, the present invention relates to a process for the production of myo-inositol, which comprises
[81218] (a) increasing or generating one or more activities selected from the group consisting of transcription factor in a non-human organism or a part thereof, preferably a microorganism, a plant cell, a plant or a part thereof, as compared to a corresponding non-transformed wild type non-human organism or a part thereof; and
[81219] (b) growing the non-human organism or a part thereof under conditions which permit the production of myo-inositol or a composition comprising myo-inositol in said non-human organism or in the culture medium surrounding said non-human organism.

[81220] Accordingly, the present invention relates to a process for the production of sucrose, which comprises
[81221] (a) increasing or generating one or more activities selected from the group consisting of transcription factor in a non-human organism or a part thereof, preferably a microorganism, a plant cell, a plant or a part thereof, as compared to a corresponding non-transformed wild type non-human organism or a part thereof; and
[81222] (b) growing the non-human organism or a part thereof under conditions which permit the production of sucrose or a composition comprising sucrose in said non-human organism or in the culture medium surrounding said non-human organism.

[81223] Accordingly, the present invention relates to a process for the production of glucose-1-phosphate, which comprises
[81224] (a) increasing or generating one or more activities selected from the group consisting of 3-deoxy-7-phosphoheptulonate synthase in a non-human organism or a part thereof, preferably a microorganism, a plant cell, a plant or a part thereof, as compared to a corresponding non-transformed wild type non-human organism or a part thereof; and
[81225] (b) growing the non-human organism or a part thereof under conditions which permit the production of glucose-1-phosphate or a composition comprising glucose-1-phosphate in said non-human organism or in the culture medium surrounding said non-human organism.

[81226] Accordingly, the present invention relates to a process for the production of glucose-1-phosphate, which comprises
[81227] (a) increasing or generating one or more activities selected from the group consisting of phosphate permease in a non-human organism or a part thereof, preferably a microorganism, a plant cell, a plant or a part thereof, as compared to a corresponding non-transformed wild type non-human organism or a part thereof; and
[81228] (b) growing the non-human organism or a part thereof under conditions which permit the production of glucose-1-phosphate or a composition comprising glucose-1-phosphate in said non-human organism or in the culture medium surrounding said non-human organism.

[81229] Accordingly, the present invention relates to a process for the production of 3,4,5-trihydroxypentanoic acid, which comprises
[81230] (a) increasing or generating one or more activities selected from the group consisting of phosphate permease in a non-human organism or a part thereof, preferably a microorganism, a plant cell, a plant or a part thereof, as compared to a corresponding non-transformed wild type non-human organism or a part thereof; and
[81231] (b) growing the non-human organism or a part thereof under conditions which permit the production of 3,4,5-trihydroxypentanoic acid or a composition comprising 3,4,5-trihydroxypentanoic acid in said non-human organism or in the culture medium surrounding said non-human organism.

[81232] Accordingly, the present invention relates to a process for the production of fructose, which comprises
[81233] (a) increasing or generating one or more activities selected from the group consisting of ycl027w-protein in a non-human organism or a part thereof, preferably a microorganism, a plant cell, a plant or a part thereof, as compared to a corresponding non-transformed wild type non-human organism or a part thereof; and
[81234] (b) growing the non-human organism or a part thereof under conditions which permit the production of fructose or a composition comprising fructose in said non-human organism or in the culture medium surrounding said non-human organism.

[81235] Accordingly, the present invention relates to a process for the production of glucose-1-phosphate, which comprises
[81236] (a) increasing or generating one or more activities selected from the group consisting of ycl027w-protein in a non-human organism or a part thereof, preferably a microorganism, a plant cell, a plant or a part thereof, as compared to a corresponding non-transformed wild type non-human organism or a part thereof; and
[81237] (b) growing the non-human organism or a part thereof under conditions which permit the production of glucose-1-phosphate or a composition comprising glucose-1-phosphate in said non-human organism or in the culture medium surrounding said non-human organism.

[81238] Accordingly, the present invention relates to a process for the production of myo-inositol, which comprises
[81239] (a) increasing or generating one or more activities selected from the group consisting of serine/threonine dehydratase in a non-human organism or a part thereof, preferably a microorganism, a plant cell, a plant or a part thereof, as compared to a corresponding non-transformed wild type non-human organism or a part thereof; and
[81240] (b) growing the non-human organism or a part thereof under conditions which permit the production of myo-inositol or a composition comprising myo-inositol in said non-human organism or in the culture medium surrounding said non-human organism.

[81241] Accordingly, the present invention relates to a process for the production of sucrose, which comprises
[81242] (a) increasing or generating one or more activities selected from the group consisting of serine/threonine dehydratase in a non-human organism or a part thereof, preferably a microorganism, a plant cell, a plant or a part thereof, as compared to a corresponding non-transformed wild type non-human organism or a part thereof; and
[81243] (b) growing the non-human organism or a part thereof under conditions which permit the production of sucrose or a composition comprising sucrose in said non-human organism or in the culture medium surrounding said non-human organism.

[81244] Accordingly, the present invention relates to a process for the production of fructose, which comprises
[81245] (a) increasing or generating one or more activities selected from the group consisting of phosphoglycerate kinase in a non-human organism or a part thereof, preferably a microorganism, a plant cell, a plant or a part thereof, as compared to a corresponding non-transformed wild type non-human organism or a part thereof; and
[81246] (b) growing the non-human organism or a part thereof under conditions which permit the production of fructose or a composition comprising fructose in said non-human organism or in the culture medium surrounding said non-human organism.

[81247] Accordingly, the present invention relates to a process for the production of glucose, which comprises
[81248] (a) increasing or generating one or more activities selected from the group consisting of phosphoglycerate kinase in a non-human organism or a part thereof, preferably a microorganism, a plant cell, a plant or a part thereof, as compared to a corresponding non-transformed wild type non-human organism or a part thereof; and
[81249] (b) growing the non-human organism or a part thereof under conditions which permit the production of glucose or a composition comprising glucose in said non-human organism or in the culture medium surrounding said non-human organism.

[81250] Accordingly, the present invention relates to a process for the production of raffinose, which comprises
[81251] (a) increasing or generating one or more activities selected from the group consisting of YCR047W-A-protein in a non-human organism or a part thereof, preferably a microorganism, a plant cell, a plant or a part thereof, as compared to a corresponding non-transformed wild type non-human organism or a part thereof; and
[81252] (b) growing the non-human organism or a part thereof under conditions which permit the production of raffinose or a composition comprising raffinose in said non-human organism or in the culture medium surrounding said non-human organism.

[81253] Accordingly, the present invention relates to a process for the production of 3,4,5-trihydroxypentanoic acid, which comprises
[81254] (a) increasing or generating one or more activities selected from the group consisting of ycr102c-protein in a non-human organism or a part thereof, preferably a microorganism, a plant cell, a plant or a part thereof, as compared to a corresponding non-transformed wild type non-human organism or a part thereof; and
[81255] (b) growing the non-human organism or a part thereof under conditions which permit the production of 3,4,5-trihydroxypentanoic acid or a composition comprising 3,4,5-trihydroxypentanoic acid in said non-human organism or in the culture medium surrounding said non-human organism.

[81256] Accordingly, the present invention relates to a process for the production of galactinol, which comprises
[81257] (a) increasing or generating one or more activities selected from the group consisting of isocitrate dehydrogenase in a non-human organism or a part thereof, preferably a microorganism, a plant cell, a plant or a part thereof, as compared to a corresponding non-transformed wild type non-human organism or a part thereof; and
[81258] (b) growing the non-human organism or a part thereof under conditions which permit the production of galactinol or a composition comprising galactinol in said non-human organism or in the culture medium surrounding said non-human organism.

[81259] Accordingly, the present invention relates to a process for the production of myo-inositol, which comprises
[81260] (a) increasing or generating one or more activities selected from the group consisting of cell division control protein in a non-human organism or a part thereof, preferably a microorganism, a plant cell, a plant or a part thereof, as compared to a corresponding non-transformed wild type non-human organism or a part thereof; and
[81261] (b) growing the non-human organism or a part thereof under conditions which permit the production of myo-inositol or a composition comprising myo-inositol in said non-human organism or in the culture medium surrounding said non-human organism.

[81262] Accordingly, the present invention relates to a process for the production of myo-inositol, which comprises
[81263] (a) increasing or generating one or more activities selected from the group consisting of cyclin in a non-human organism or a part thereof, preferably a microorganism, a plant cell, a plant or a part thereof, as compared to a corresponding non-transformed wild type non-human organism or a part thereof; and
[81264] (b) growing the non-human organism or a part thereof under conditions which permit the production of myo-inositol or a composition comprising myo-inositol in said non-human organism or in the culture medium surrounding said non-human organism.

[81265] Accordingly, the present invention relates to a process for the production of raffinose, which comprises
[81266] (a) increasing or generating one or more activities selected from the group consisting of YDL159W-A-protein in a non-human organism or a part thereof, preferably a microorganism, a plant cell, a plant or a part thereof, as compared to a corresponding non-transformed wild type non-human organism or a part thereof; and
[81267] (b) growing the non-human organism or a part thereof under conditions which permit the production of raffinose or a composition comprising raffinose in said non-human organism or in the culture medium surrounding said non-human organism.

[81268] Accordingly, the present invention relates to a process for the production of glucose-1-phosphate, which comprises
[81269] (a) increasing or generating one or more activities selected from the group consisting of protein kinase in a non-human organism or a part thereof, preferably a microorganism, a plant cell, a plant or a part thereof, as compared to a corresponding non-transformed wild type non-human organism or a part thereof; and
[81270] (b) growing the non-human organism or a part thereof under conditions which permit the production of glucose-1-phosphate or a composition comprising glucose-1-phosphate in said non-human organism or in the culture medium surrounding said non-human organism.

[81271] Accordingly, the present invention relates to a process for the production of glucose-1-phosphate, which comprises
[81272] (a) increasing or generating one or more activities selected from the group consisting of serine/threonine-protein phosphatase in a non-human organism or a part thereof, preferably a microorganism, a plant cell, a plant or a part thereof, as compared to a corresponding non-transformed wild type non-human organism or a part thereof; and
[81273] (b) growing the non-human organism or a part thereof under conditions which permit the production of glucose-1-phosphate or a composition comprising glucose-1-phosphate in said non-human organism or in the culture medium surrounding said non-human organism.

[81274] Accordingly, the present invention relates to a process for the production of 3,4,5-trihydroxypentanoic acid, which comprises
[81275] (a) increasing or generating one or more activities selected from the group consisting of integral membrane protein in a non-human organism or a part thereof, preferably a microorganism, a plant cell, a plant or a part thereof, as compared to a corresponding non-transformed wild type non-human organism or a part thereof; and
[81276] (b) growing the non-human organism or a part thereof under conditions which permit the production of 3,4,5-trihydroxypentanoic acid or a composition comprising 3,4,5-trihydroxypentanoic acid in said non-human organism or in the culture medium surrounding said non-human organism.

[81277] Accordingly, the present invention relates to a process for the production of glucose-1-phosphate, which comprises
[81278] (a) increasing or generating one or more activities selected from the group consisting of yd1235c-protein in a non-human organism or a part thereof, preferably a microorganism, a plant cell, a plant or a part thereof, as compared to a corresponding non-transformed wild type non-human organism or a part thereof; and
[81279] (b) growing the non-human organism or a part thereof under conditions which permit the production of glucose-1-phosphate or a composition comprising glucose-1-phosphate in said non-human organism or in the culture medium surrounding said non-human organism.

[81280] Accordingly, the present invention relates to a process for the production of myo-inositol, which comprises
[81281] (a) increasing or generating one or more activities selected from the group consisting of yd1235c-protein in a non-human organism or a part thereof, preferably a microorganism, a plant cell, a plant or a part thereof, as compared to a corresponding non-transformed wild type non-human organism or a part thereof; and
[81282] (b) growing the non-human organism or a part thereof under conditions which permit the production of myo-inositol or a composition comprising myo-inositol in said non-human organism or in the culture medium surrounding said non-human organism.

[81283] Accordingly, the present invention relates to a process for the production of 3,4,5-trihydroxypentanoic acid, which comprises
[81284] (a) increasing or generating one or more activities selected from the group consisting of yd1235c-protein in a non-human organism or a part thereof, preferably a microorganism, a plant cell, a plant or a part thereof, as compared to a corresponding non-transformed wild type non-human organism or a part thereof; and
[81285] (b) growing the non-human organism or a part thereof under conditions which permit the production of 3,4,5-trihydroxypentanoic acid or a composition comprising 3,4,5-trihydroxypentanoic acid in said non-human organism or in the culture medium surrounding said non-human organism.

[81286] Accordingly, the present invention relates to a process for the production of sucrose, which comprises
[81287] (a) increasing or generating one or more activities selected from the group consisting of coproporphyrinogen III oxidase in a non-human organism or a part thereof, preferably a microorganism, a plant cell, a plant or a part thereof, as compared to a corresponding non-transformed wild type non-human organism or a part thereof; and
[81288] (b) growing the non-human organism or a part thereof under conditions which permit the production of sucrose or a composition comprising sucrose in said non-human organism or in the culture medium surrounding said non-human organism.

[81289] Accordingly, the present invention relates to a process for the production of glucose, which comprises
[81290] (a) increasing or generating one or more activities selected from the group consisting of branched-chain amino acid permease in a non-human organism or a part thereof, preferably a microorganism, a plant cell, a plant or a part thereof, as compared to a corresponding non-transformed wild type non-human organism or a part thereof; and
[81291] (b) growing the non-human organism or a part thereof under conditions which permit the production of glucose or a composition comprising glucose in said non-human organism or in the culture medium surrounding said non-human organism.

[81292] Accordingly, the present invention relates to a process for the production of fructose, which comprises
[81293] (a) increasing or generating one or more activities selected from the group consisting of ydr183w-protein in a non-human organism or a part thereof, preferably a microorganism, a plant cell, a plant or a part thereof, as compared to a corresponding non-transformed wild type non-human organism or a part thereof; and
[81294] (b) growing the non-human organism or a part thereof under conditions which permit the production of fructose or a composition comprising fructose in said non-human organism or in the culture medium surrounding said non-human organism.

[81295] Accordingly, the present invention relates to a process for the production of glucose, which comprises
[81296] (a) increasing or generating one or more activities selected from the group consisting of ydr183w-protein in a non-human organism or a part thereof, preferably a microorganism, a plant cell, a plant or a part thereof, as compared to a corresponding non-transformed wild type non-human organism or a part thereof; and
[81297] (b) growing the non-human organism or a part thereof under conditions which permit the production of glucose or a composition comprising glucose in said non-human organism or in the culture medium surrounding said non-human organism.

[81298] Accordingly, the present invention relates to a process for the production of glucose-1-phosphate, which comprises
[81299] (a) increasing or generating one or more activities selected from the group consisting of ydr507c-protein in a non-human organism or a part thereof, preferably a microorganism, a plant cell, a plant or a part thereof, as compared to a corresponding non-transformed wild type non-human organism or a part thereof; and
[81300] (b) growing the non-human organism or a part thereof under conditions which permit the production of glucose-1-phosphate or a composition comprising glucose-1-phosphate in said non-human organism or in the culture medium surrounding said non-human organism.

[81301] Accordingly, the present invention relates to a process for the production of fructose, which comprises
[81302] (a) increasing or generating one or more activities selected from the group consisting of 1,4-alpha-glucan branching enzyme in a non-human organism or a part thereof, preferably a microorganism, a plant cell, a plant or a part thereof, as compared to a corresponding non-transformed wild type non-human organism or a part thereof; and
[81303] (b) growing the non-human organism or a part thereof under conditions which permit the production of fructose or a composition comprising fructose in said non-human organism or in the culture medium surrounding said non-human organism.

[81304] Accordingly, the present invention relates to a process for the production of glucose, which comprises
[81305] (a) increasing or generating one or more activities selected from the group consisting of 1,4-alpha-glucan branching enzyme in a non-human organism or a part thereof, preferably a microorganism, a plant cell, a plant or a part thereof, as compared to a corresponding non-transformed wild type non-human organism or a part thereof; and
[81306] (b) growing the non-human organism or a part thereof under conditions which permit the production of glucose or a composition comprising glucose in said non-human organism or in the culture medium surrounding said non-human organism.

[81307] Accordingly, the present invention relates to a process for the production of 3,4,5-trihydroxypentanoic acid, which comprises
[81308] (a) increasing or generating one or more activities selected from the group consisting of YEL030C-A-protein in a non-human organism or a part thereof, preferably a microorganism, a plant cell, a plant or a part thereof, as compared to a corresponding non-transformed wild type non-human organism or a part thereof; and
[81309] (b) growing the non-human organism or a part thereof under conditions which permit the production of 3,4,5-trihydroxypentanoic acid or a composition comprising 3,4,5trihydroxypentanoic acid in said non-human organism or in the culture medium surrounding said non-human organism.

[81310] Accordingly, the present invention relates to a process for the production of glucose-1-phosphate, which comprises
[81311] (a) increasing or generating one or more activities selected from the group consisting of aldolase in a non-human organism or a part thereof, preferably a microorganism, a plant cell, a plant or a part thereof, as compared to a corresponding non-transformed wild type non-human organism or a part thereof; and
[81312] (b) growing the non-human organism or a part thereof under conditions which permit the production of glucose-1-phosphate or a composition comprising glucose-1-phosphate in said non-human organism or in the culture medium surrounding said non-human organism.

[81313] Accordingly, the present invention relates to a process for the production of glucose, which comprises
[81314] (a) increasing or generating one or more activities selected from the group consisting of O-acetyltransferase in a non-human organism or a part thereof, preferably a microorganism, a plant cell, a plant or a part thereof, as compared to a corresponding non-transformed wild type non-human organism or a part thereof; and
[81315] (b) growing the non-human organism or a part thereof under conditions which permit the production of glucose or a composition comprising glucose in said non-human organism or in the culture medium surrounding said non-human organism.

[81316] Accordingly, the present invention relates to a process for the production of raffinose, which comprises
[81317] (a) increasing or generating one or more activities selected from the group consisting of yer177w-protein in a non-human organism or a part thereof, preferably a microorganism, a plant cell, a plant or a part thereof, as compared to a corresponding non-transformed wild type non-human organism or a part thereof; and
[81318] (b) growing the non-human organism or a part thereof under conditions which permit the production of raffinose or a composition comprising raffinose in said non-human organism or in the culture medium surrounding said non-human organism.

[81319] Accordingly, the present invention relates to a process for the production of myo-inositol, which comprises
[81320] (a) increasing or generating one or more activities selected from the group consisting of YFL019C-protein in a non-human organism or a part thereof, preferably a microorganism, a plant cell, a plant or a part thereof, as compared to a corresponding non-transformed wild type non-human organism or a part thereof; and
[81321] (b) growing the non-human organism or a part thereof under conditions which permit the production of myo-inositol or a composition comprising myo-inositol in said non-human organism or in the culture medium surrounding said non-human organism.

[81322] Accordingly, the present invention relates to a process for the production of sucrose, which comprises
[81323] (a) increasing or generating one or more activities selected from the group consisting of YFL019C-protein in a non-human organism or a part thereof, preferably a microorganism, a plant cell, a plant or a part thereof, as compared to a corresponding non-transformed wild type non-human organism or a part thereof; and
[81324] (b) growing the non-human organism or a part thereof under conditions which permit the production of sucrose or a composition comprising sucrose in said non-human organism or in the culture medium surrounding said non-human organism.

[81325] Accordingly, the present invention relates to a process for the production of sucrose, which comprises
[81326] (a) increasing or generating one or more activities selected from the group consisting of hexokinase in a non-human organism or a part thereof, preferably a microorganism, a plant cell, a plant or a part thereof, as compared to a corresponding non-transformed wild type non-human organism or a part thereof; and
[81327] (b) growing the non-human organism or a part thereof under conditions which permit the production of sucrose or a composition comprising sucrose in said non-human organism or in the culture medium surrounding said non-human organism.

[81328] Accordingly, the present invention relates to a process for the production of glucose-1-phosphate, which comprises
[81329] (a) increasing or generating one or more activities selected from the group consisting of oxidoreductase in a non-human organism or a part thereof, preferably a microorganism, a plant cell, a plant or a part thereof, as compared to a corresponding non-transformed wild type non-human organism or a part thereof; and
[81330] (b) growing the non-human organism or a part thereof under conditions which permit the production of glucose-1-phosphate or a composition comprising glucose-1-phosphate in said non-human organism or in the culture medium surrounding said non-human organism.

[81331] Accordingly, the present invention relates to a process for the production of 3,4,5-trihydroxypentanoic acid, which comprises
[81332] (a) increasing or generating one or more activities selected from the group consisting of oxidoreductase in a non-human organism or a part thereof, preferably a microorganism, a plant cell, a plant or a part thereof, as compared to a corresponding non-transformed wild type non-human organism or a part thereof; and
[81333] (b) growing the non-human organism or a part thereof under conditions which permit the production of 3,4,5-trihydroxypentanoic acid or a composition comprising 3,4,5-trihydroxypentanoic acid in said non-human organism or in the culture medium surrounding said non-human organism.

[81334] Accordingly, the present invention relates to a process for the production of glucose-1-phosphate, which comprises
[81335] (a) increasing or generating one or more activities selected from the group consisting of ygl096w-protein in a non-human organism or a part thereof, preferably a microorganism, a plant cell, a plant or a part thereof, as compared to a corresponding non-transformed wild type non-human organism or a part thereof; and
[81336] (b) growing the non-human organism or a part thereof under conditions which permit the production of glucose-1-phosphate or a composition comprising glucose-1-phosphate in said non-human organism or in the culture medium surrounding said non-human organism.

[81337] Accordingly, the present invention relates to a process for the production of 3,4,5-trihydroxypentanoic acid, which comprises
[81338] (a) increasing or generating one or more activities selected from the group consisting of ygl096w-protein in a non-human organism or a part thereof, preferably a microorganism, a plant cell, a plant or a part thereof, as compared to a corresponding non-transformed wild type non-human organism or a part thereof; and
[81339] (b) growing the non-human organism or a part thereof under conditions which permit the production of 3,4,5-trihydroxypentanoic acid or a composition comprising 3,4,5-trihydroxypentanoic acid in said non-human organism or in the culture medium surrounding said non-human organism.

[81340] Accordingly, the present invention relates to a process for the production of raffinose, which comprises
[81341] (a) increasing or generating one or more activities selected from the group consisting of ygl237c-protein in a non-human organism or a part thereof, preferably a microorganism, a plant cell, a plant or a part thereof, as compared to a corresponding non-transformed wild type non-human organism or a part thereof; and
[81342] (b) growing the non-human organism or a part thereof under conditions which permit the production of raffinose or a composition comprising raffinose in said non-human organism or in the culture medium surrounding said non-human organism.

[81343] Accordingly, the present invention relates to a process for the production of glucose-1-phosphate, which comprises
[81344] (a) increasing or generating one or more activities selected from the group consisting of alcohol dehydrogenase in a non-human organism or a part thereof, preferably a microorganism, a plant cell, a plant or a part thereof, as compared to a corresponding non-transformed wild type non-human organism or a part thereof; and
[81345] (b) growing the non-human organism or a part thereof under conditions which permit the production of glucose-1-phosphate or a composition comprising glucose-1-phosphate in said non-human organism or in the culture medium surrounding said non-human organism.

[81346] Accordingly, the present invention relates to a process for the production of 3,4,5-trihydroxypentanoic acid, which comprises
[81347] (a) increasing or generating one or more activities selected from the group consisting of alcohol dehydrogenase in a non-human organism or a part thereof, preferably a microorganism, a plant cell, a plant or a part thereof, as compared to a corresponding non-transformed wild type non-human organism or a part thereof; and
[81348] (b) growing the non-human organism or a part thereof under conditions which permit the production of 3,4,5-trihydroxypentanoic acid or a composition comprising 3,4,5-trihydroxypentanoic acid in said non-human organism or in the culture medium surrounding said non-human organism.

[81349] Accordingly, the present invention relates to a process for the production of glucose, which comprises
[81350] (a) increasing or generating one or more activities selected from the group consisting of yhl013c-protein in a non-human organism or a part thereof, preferably a microorganism, a plant cell, a plant or a part thereof, as compared to a corresponding non-transformed wild type non-human organism or a part thereof; and
[81351] (b) growing the non-human organism or a part thereof under conditions which permit the production of glucose or a composition comprising glucose in said non-human organism or in the culture medium surrounding said non-human organism.

[81352] Accordingly, the present invention relates to a process for the production of glucose-1-phosphate, which comprises
[81353] (a) increasing or generating one or more activities selected from the group consisting of yhl013c-protein in a non-human organism or a part thereof, preferably a microorganism, a plant cell, a plant or a part thereof, as compared to a corresponding non-transformed wild type non-human organism or a part thereof; and
[81354] (b) growing the non-human organism or a part thereof under conditions which permit the production of glucose-1-phosphate or a composition comprising glucose-1-phosphate in said non-human organism or in the culture medium surrounding said non-human organism.

[81355] Accordingly, the present invention relates to a process for the production of glucose-1-phosphate, which comprises
[81356] (a) increasing or generating one or more activities selected from the group consisting of 3-phosphoglycerate dehydrogenase in a non-human organism or a part thereof, preferably a microorganism, a plant cell, a plant or a part thereof, as compared to a corresponding non-transformed wild type non-human organism or a part thereof; and
[81357] (b) growing the non-human organism or a part thereof under conditions which permit the production of glucose-1-phosphate or a composition comprising glucose-1-phosphate in said non-human organism or in the culture medium surrounding said non-human organism.

[81358] Accordingly, the present invention relates to a process for the production of fructose, which comprises
[81359] (a) increasing or generating one or more activities selected from the group consisting of YIL083C-protein in a non-human organism or a part thereof, preferably a microorganism, a plant cell, a plant or a part thereof, as compared to a corresponding non-transformed wild type non-human organism or a part thereof; and
[81360] (b) growing the non-human organism or a part thereof under conditions which permit the production of fructose or a composition comprising fructose in said non-human organism or in the culture medium surrounding said non-human organism.

[81361] Accordingly, the present invention relates to a process for the production of myo-inositol, which comprises
[81362] (a) increasing or generating one or more activities selected from the group consisting of DnaJ-like chaperone in a non-human organism or a part thereof, preferably a microorganism, a plant cell, a plant or a part thereof, as compared to a corresponding non-transformed wild type non-human organism or a part thereof; and
[81363] (b) growing the non-human organism or a part thereof under conditions which permit the production of myo-inositol or a composition comprising myo-inositol in said non-human organism or in the culture medium surrounding said non-human organism.

[81364] Accordingly, the present invention relates to a process for the production of 3,4,5-trihydroxypentanoic acid, which comprises
[81365] (a) increasing or generating one or more activities selected from the group consisting of YJL127W-A-protein in a non-human organism or a part thereof, preferably a microorganism, a plant cell, a plant or a part thereof, as compared to a corresponding non-transformed wild type non-human organism or a part thereof; and
[81366] (b) growing the non-human organism or a part thereof under conditions which permit the production of 3,4,5-trihydroxypentanoic acid or a composition comprising 3,4,5-trihydroxypentanoic acid in said non-human organism or in the culture medium surrounding said non-human organism.

[81367] Accordingly, the present invention relates to a process for the production of fructose, which comprises
[81368] (a) increasing or generating one or more activities selected from the group consisting of inositol-3-phosphate synthase in a non-human organism or a part thereof, preferably a microorganism, a plant cell, a plant or a part thereof, as compared to a corresponding non-transformed wild type non-human organism or a part thereof; and
[81369] (b) growing the non-human organism or a part thereof under conditions which permit the production of fructose or a composition comprising fructose in said non-human organism or in the culture medium surrounding said non-human organism.

[81370] Accordingly, the present invention relates to a process for the production of galactitol, which comprises
[81371] (a) increasing or generating one or more activities selected from the group consisting of inositol-3-phosphate synthase in a non-human organism or a part thereof, preferably a microorganism, a plant cell, a plant or a part thereof, as compared to a corresponding non-transformed wild type non-human organism or a part thereof; and
[81372] (b) growing the non-human organism or a part thereof under conditions which permit the production of galactitol or a composition comprising galactitol in said non-human organism or in the culture medium surrounding said non-human organism.

[81373] Accordingly, the present invention relates to a process for the production of myo-inositol, which comprises
[81374] (a) increasing or generating one or more activities selected from the group consisting of inositol-3-phosphate synthase in a non-human organism or a part thereof, preferably a microorganism, a plant cell, a plant or a part thereof, as compared to a corresponding non-transformed wild type non-human organism or a part thereof; and
[81375] (b) growing the non-human organism or a part thereof under conditions which permit the production of myo-inositol or a composition comprising myo-inositol in said non-human organism or in the culture medium surrounding said non-human organism.

[81376] Accordingly, the present invention relates to a process for the production of sorbitol, which comprises
[81377] (a) increasing or generating one or more activities selected from the group consisting of hexose transporter in a non-human organism or a part thereof, preferably a microorganism, a plant cell, a plant or a part thereof, as compared to a corresponding non-transformed wild type non-human organism or a part thereof; and
[81378] (b) growing the non-human organism or a part thereof under conditions which permit the production of sorbitol or a composition comprising sorbitol in said non-human organism or in the culture medium surrounding said non-human organism.

[81379] Accordingly, the present invention relates to a process for the production of myo-inositol, which comprises
[81380] (a) increasing or generating one or more activities selected from the group consisting of protein kinase in a non-human organism or a part thereof, preferably a microorganism, a plant cell, a plant or a part thereof, as compared to a corresponding non-transformed wild type non-human organism or a part thereof; and
[81381] (b) growing the non-human organism or a part thereof under conditions which permit the production of myo-inositol or a composition comprising myo-inositol in said non-human organism or in the culture medium surrounding said non-human organism.

[81382] Accordingly, the present invention relates to a process for the production of glucose, which comprises
[81383] (a) increasing or generating one or more activities selected from the group consisting of cystathionine gamma-synthase in a non-human organism or a part thereof, preferably a microorganism, a plant cell, a plant or a part thereof, as compared to a corresponding non-transformed wild type non-human organism or a part thereof; and
[81384] (b) growing the non-human organism or a part thereof under conditions which permit the production of glucose or a composition comprising glucose in said non-human organism or in the culture medium surrounding said non-human organism.

[81385] Accordingly, the present invention relates to a process for the production of fructose, which comprises
[81386] (a) increasing or generating one or more activities selected from the group consisting of fructose biphosphate aldolase in a non-human organism or a part thereof, preferably a microorganism, a plant cell, a plant or a part thereof, as compared to a corresponding non-transformed wild type non-human organism or a part thereof; and
[81387] (b) growing the non-human organism or a part thereof under conditions which permit the production of fructose or a composition comprising fructose in said non-human organism or in the culture medium surrounding said non-human organism.

[81388] Accordingly, the present invention relates to a process for the production of sedoheptulose-7-phosphate, which comprises
[81389] (a) increasing or generating one or more activities selected from the group consisting of fructose biphosphate aldolase in a non-human organism or a part thereof, preferably a microorganism, a plant cell, a plant or a part thereof, as compared to a corresponding non-transformed wild type non-human organism or a part thereof; and
[81390] (b) growing the non-human organism or a part thereof under conditions which permit the production of sedoheptulose-7-phosphate or a composition comprising sedoheptulose-7-phosphate in said non-human organism or in the culture medium surrounding said non-human organism.

[81391] Accordingly, the present invention relates to a process for the production of glucose-1-phosphate, which comprises
[81392] (a) increasing or generating one or more activities selected from the group consisting of acyl carrier protein in a non-human organism or a part thereof, preferably a microorganism, a plant cell, a plant or a part thereof, as compared to a corresponding non-transformed wild type non-human organism or a part thereof; and
[81393] (b) growing the non-human organism or a part thereof under conditions which permit the production of glucose-1-phosphate or a composition comprising glucose-1-phosphate in said non-human organism or in the culture medium surrounding said non-human organism.

[81394] Accordingly, the present invention relates to a process for the production of sucrose, which comprises
[81395] (a) increasing or generating one or more activities selected from the group consisting of halotolerance protein in a non-human organism or a part thereof, preferably a microorganism, a plant cell, a plant or a part thereof, as compared to a corresponding non-transformed wild type non-human organism or a part thereof; and
[81396] (b) growing the non-human organism or a part thereof under conditions which permit the production of sucrose or a composition comprising sucrose in said non-human organism or in the culture medium surrounding said non-human organism.

[81397] Accordingly, the present invention relates to a process for the production of glucose, which comprises
[81398] (a) increasing or generating one or more activities selected from the group consisting of phosphoenolpyruvate carboxykinase in a non-human organism or a part thereof, preferably a microorganism, a plant cell, a plant or a part thereof, as compared to a corresponding non-transformed wild type non-human organism or a part thereof; and
[81399] (b) growing the non-human organism or a part thereof under conditions which permit the production of glucose or a composition comprising glucose in said non-human organism or in the culture medium surrounding said non-human organism.

[81400] Accordingly, the present invention relates to a process for the production of glucose, which comprises
[81401] (a) increasing or generating one or more activities selected from the group consisting of phosphoenolpyruvate carboxykinase in a non-human organism or a part thereof, preferably a microorganism, a plant cell, a plant or a part thereof, as compared to a corresponding non-transformed wild type non-human organism or a part thereof; and
[81402] (b) growing the non-human organism or a part thereof under conditions which permit the production of glucose or a composition comprising glucose in said non-human organism or in the culture medium surrounding said non-human organism.

[81403] Accordingly, the present invention relates to a process for the production of sucrose, which comprises
[81404] (a) increasing or generating one or more activities selected from the group consisting of vacuolar sorting protein in a non-human organism or a part thereof, preferably a microorganism, a plant cell, a plant or a part thereof, as compared to a corresponding non-transformed wild type non-human organism or a part thereof; and
[81405] (b) growing the non-human organism or a part thereof under conditions which permit the production of sucrose or a composition comprising sucrose in said non-human organism or in the culture medium surrounding said non-human organism.

[81406] Accordingly, the present invention relates to a process for the production of glucose-1-phosphate, which comprises
[81407] (a) increasing or generating one or more activities selected from the group consisting of thioredoxin in a non-human organism or a part thereof, preferably a microorganism, a plant cell, a plant or a part thereof, as compared to a corresponding non-transformed wild type non-human organism or a part thereof; and
[81408] (b) growing the non-human organism or a part thereof under conditions which permit the production of glucose-1-phosphate or a composition comprising glucose-1-phosphate in said non-human organism or in the culture medium surrounding said non-human organism.

[81409] Accordingly, the present invention relates to a process for the production of fructose, which comprises
[81410] (a) increasing or generating one or more activities selected from the group consisting of hexose transporter in a non-human organism or a part thereof, preferably a microorganism, a plant cell, a plant or a part thereof, as compared to a corresponding non-transformed wild type non-human organism or a part thereof; and
[81411] (b) growing the non-human organism or a part thereof under conditions which permit the production of fructose or a composition comprising fructose in said non-human organism or in the culture medium surrounding said non-human organism.

[81412] Accordingly, the present invention relates to a process for the production of verbascose, which comprises
[81413] (a) increasing or generating one or more activities selected from the group consisting of purine biosynthesis protein in a non-human organism or a part thereof, preferably a microorganism, a plant cell, a plant or a part thereof, as compared to a corresponding non-transformed wild type non-human organism or a part thereof; and
[81414] (b) growing the non-human organism or a part thereof under conditions which permit the production of verbascose or a composition comprising verbascose in said non-human organism or in the culture medium surrounding said non-human organism.

[81415] Accordingly, the present invention relates to a process for the production of glucose-1-phosphate, which comprises
[81416] (a) increasing or generating one or more activities selected from the group consisting of ymr324c-protein in a non-human organism or a part thereof, preferably a microorganism, a plant cell, a plant or a part thereof, as compared to a corresponding non-transformed wild type non-human organism or a part thereof; and
[81417] (b) growing the non-human organism or a part thereof under conditions which permit the production of glucose-1-phosphate or a composition comprising glucose-1-phosphate in said non-human organism or in the culture medium surrounding said non-human organism.

[81418] Accordingly, the present invention relates to a process for the production of myo-inositol, which comprises
[81419] (a) increasing or generating one or more activities selected from the group consisting of molecular chaperone in a non-human organism or a part thereof, preferably a microorganism, a plant cell, a plant or a part thereof, as compared to a corresponding non-transformed wild type non-human organism or a part thereof; and
[81420] (b) growing the non-human organism or a part thereof under conditions which permit the production of myo-inositol or a composition comprising myo-inositol in said non-human organism or in the culture medium surrounding said non-human organism.

[81421] Accordingly, the present invention relates to a process for the production of sucrose, which comprises
[81422] (a) increasing or generating one or more activities selected from the group consisting of molecular chaperone in a non-human organism or a part thereof, preferably a microorganism, a plant cell, a plant or a part thereof, as compared to a corresponding non-transformed wild type non-human organism or a part thereof; and
[81423] (b) growing the non-human organism or a part thereof under conditions which permit the production of sucrose or a composition comprising sucrose in said non-human organism or in the culture medium surrounding said non-human organism.

[81424] Accordingly, the present invention relates to a process for the production of raffinose, which comprises
[81425] (a) increasing or generating one or more activities selected from the group consisting of sterol O-acyltransferase in a non-human organism or a part thereof, preferably a microorganism, a plant cell, a plant or a part thereof, as compared to a corresponding non-transformed wild type non-human organism or a part thereof; and
[81426] (b) growing the non-human organism or a part thereof under conditions which permit the production of raffinose or a composition comprising raffinose in said non-human organism or in the culture medium surrounding said non-human organism.

[81427] Accordingly, the present invention relates to a process for the production of myo-inositol, which comprises
[81428] (a) increasing or generating one or more activities selected from the group consisting of yol160w-protein in a non-human organism or a part thereof, preferably a microorganism, a plant cell, a plant or a part thereof, as compared to a corresponding non-transformed wild type non-human organism or a part thereof; and
[81429] (b) growing the non-human organism or a part thereof under conditions which permit the production of myo-inositol or a composition comprising myo-inositol in said non-human organism or in the culture medium surrounding said non-human organism.

[81430] Accordingly, the present invention relates to a process for the production of glucose, which comprises
[81431] (a) increasing or generating one or more activities selected from the group consisting of phosphohydrolase in a non-human organism or a part thereof, preferably a microorganism, a plant cell, a plant or a part thereof, as compared to a corresponding non-transformed wild type non-human organism or a part thereof; and
[81432] (b) growing the non-human organism or a part thereof under conditions which permit the production of glucose or a composition comprising glucose in said non-human organism or in the culture medium surrounding said non-human organism.

[81433] Accordingly, the present invention relates to a process for the production of glucose-1-phosphate, which comprises
[81434] (a) increasing or generating one or more activities selected from the group consisting of histone acetyltransferase in a non-human organism or a part thereof, preferably a microorganism, a plant cell, a plant or a part thereof, as compared to a corresponding non-transformed wild type non-human organism or a part thereof; and
[81435] (b) growing the non-human organism or a part thereof under conditions which permit the production of glucose-1-phosphate or a composition comprising glucose-1-phosphate in said non-human organism or in the culture medium surrounding said non-human organism.

[81436] Accordingly, the present invention relates to a process for the production of 3,4,5-trihydroxypentanoic acid, which comprises
[81437] (a) increasing or generating one or more activities selected from the group consisting of subunit of COMPASS-protein complex in a non-human organism or a part thereof, preferably a microorganism, a plant cell, a plant or a part thereof, as compared to a corresponding non-transformed wild type non-human organism or a part thereof; and
[81438] (b) growing the non-human organism or a part thereof under conditions which permit the production of 3,4,5-trihydroxypentanoic acid or a composition comprising 3,4,5-trihydroxypentanoic acid in said non-human organism or in the culture medium surrounding said non-human organism.

[81439] Accordingly, the present invention relates to a process for the production of glucose-1-phosphate, which comprises
[81440] (a) increasing or generating one or more activities selected from the group consisting of ypl144w-protein in a non-human organism or a part thereof, preferably a microorganism, a plant cell, a plant or a part thereof, as compared to a corresponding non-transformed wild type non-human organism or a part thereof; and
[81441] (b) growing the non-human organism or a part thereof under conditions which permit the production of glucose-1-phosphate or a composition comprising glucose-1-phosphate in said non-human organism or in the culture medium surrounding said non-human organism.

[81442] Accordingly, the present invention relates to a process for the production of 3,4,5-trihydroxypentanoic acid, which comprises
[81443] (a) increasing or generating one or more activities selected from the group consisting of ypl144w-protein in a non-human organism or a part thereof, preferably a microorganism, a plant cell, a plant or a part thereof, as compared to a corresponding non-transformed wild type non-human organism or a part thereof; and
[81444] (b) growing the non-human organism or a part thereof under conditions which permit the production of 3,4,5-trihydroxypentanoic acid or a composition comprising 3,4,5-trihydroxypentanoic acid in said non-human organism or in the culture medium surrounding said non-human organism.

[81445] Accordingly, the present invention relates to a process for the production of glucose-1-phosphate, which comprises
[81446] (a) increasing or generating one or more activities selected from the group consisting of ypr098c-protein in a non-human organism or a part thereof, preferably a microorganism, a plant cell, a plant or a part thereof, as compared to a corresponding non-transformed wild type non-human organism or a part thereof; and
[81447] (b) growing the non-human organism or a part thereof under conditions which permit the production of glucose-1-phosphate or a composition comprising glucose-1-phosphate in said non-human organism or in the culture medium surrounding said non-human organism.

[81448] Accordingly, the present invention relates to a process for the production of 3,4,5-trihydroxypentanoic acid, which comprises
[81449] (a) increasing or generating one or more activities selected from the group consisting of ypr098c-protein in a non-human organism or a part thereof, preferably a microorganism, a plant cell, a plant or a part thereof, as compared to a corresponding non-transformed wild type non-human organism or a part thereof; and
[81450] (b) growing the non-human organism or a part thereof under conditions which permit the production of 3,4,5-trihydroxypentanoic acid or a composition comprising 3,4,5-trihydroxypentanoic acid in said non-human organism or in the culture medium surrounding said non-human organism.

[81451] Accordingly, the present invention relates to a process for the production of glucose-1-phosphate, which comprises
[81452] (a) increasing or generating one or more activities selected from the group consisting of polyamine transporter in a non-human organism or a part thereof, preferably a microorganism, a plant cell, a plant or a part thereof, as compared to a corresponding non-transformed wild type non-human organism or a part thereof; and
[81453] (b) growing the non-human organism or a part thereof under conditions which permit the production of glucose-1-phosphate or a composition comprising glucose-1-phosphate in said non-human organism or in the culture medium surrounding said non-human organism.

[81454] Accordingly, the present invention relates to a process for the production of myo-inositol, which comprises
[81455] (a) increasing or generating one or more activities selected from the group consisting of polyamine transporter in a non-human organism or a part thereof, preferably a microorganism, a plant cell, a plant or a part thereof, as compared to a corresponding non-transformed wild type non-human organism or a part thereof; and
[81456] (b) growing the non-human organism or a part thereof under conditions which permit the production of myo-inositol or a composition comprising myo-inositol in said non-human organism or in the culture medium surrounding said non-human organism.

[81457] Accordingly, the present invention relates to a process for the production of fructose, which comprises
[81458] (a) increasing or generating one or more activities selected from the group consisting of Zm_{—}4842_BE510522-protein in a non-human organism or a part thereof, preferably a microorganism, a plant cell, a plant or a part thereof, as compared to a corresponding non-transformed wild type non-human organism or a part thereof; and
[81459] (b) growing the non-human organism or a part thereof under conditions which permit the production of fructose or a composition comprising fructose in said non-human organism or in the culture medium surrounding said non-human organism.

[81460] Accordingly, the present invention relates to a process for the production of glucose, which comprises
[81461] (a) increasing or generating one or more activities selected from the group consisting of Zm_{—}4842_BE510522-protein in a non-human organism or a part thereof, preferably a microorganism, a plant cell, a plant or a part thereof, as compared to a corresponding non-transformed wild type non-human organism or a part thereof; and
[81462] (b) growing the non-human organism or a part thereof under conditions which permit the production of glucose or a composition comprising glucose in said non-human organism or in the culture medium surrounding said non-human organism.

[81463] Accordingly, the present invention relates to a process for the production of myo-inositol, which comprises
[81464] (a) increasing or generating one or more activities selected from the group consisting of acetyltransferase in a non-human organism or a part thereof, preferably a microorganism, a plant cell, a plant or a part thereof, as compared to a corresponding non-transformed wild type non-human organism or a part thereof; and
[81465] (b) growing the non-human organism or a part thereof under conditions which permit the production of myo-inositol or a composition comprising myo-inositol in said non-human organism or in the culture medium surrounding said non-human organism.

[81466] Accordingly, the present invention relates to a process for the production of fructose, which comprises
[81467] (a) increasing or generating one or more activities selected from the group consisting of 47266012-protein in a non-human organism or a part thereof, preferably a microorganism, a plant cell, a plant or a part thereof, as compared to a corresponding non-transformed wild type non-human organism or a part thereof; and
[81468] (b) growing the non-human organism or a part thereof under conditions which permit the production of fructose or a composition comprising fructose in said non-human organism or in the culture medium surrounding said non-human organism.

[81469] Accordingly, the present invention relates to a process for the production of glucose, which comprises
[81470] (a) increasing or generating one or more activities selected from the group consisting of 47266012-protein in a non-human organism or a part thereof, preferably a microorganism, a plant cell, a plant or a part thereof, as compared to a corresponding non-transformed wild type non-human organism or a part thereof; and
[81471] (b) growing the non-human organism or a part thereof under conditions which permit the production of glucose or a composition comprising glucose in said non-human organism or in the culture medium surrounding said non-human organism.

[81472] Accordingly, the present invention relates to a process for the production of glucose-1-phosphate, which comprises
[81473] (a) increasing or generating one or more activities selected from the group consisting of 47266012-protein in a non-human organism or a part thereof, preferably a microorganism, a plant cell, a plant or a part thereof, as compared to a corresponding non-transformed wild type non-human organism or a part thereof; and
[81474] (b) growing the non-human organism or a part thereof under conditions which permit the production of glucose-1-phosphate or a composition comprising glucose-1-phosphate in said non-human organism or in the culture medium surrounding said non-human organism.

[81475] Accordingly, the present invention relates to a process for the production of myo-inositol, which comprises
[81476] (a) increasing or generating one or more activities selected from the group consisting of 47266012-protein in a non-human organism or a part thereof, preferably a microorganism, a plant cell, a plant or a part thereof, as compared to a corresponding non-transformed wild type non-human organism or a part thereof; and
[81477] (b) growing the non-human organism or a part thereof under conditions which permit the production of myo-inositol or a composition comprising myo-inositol in said non-human organism or in the culture medium surrounding said non-human organism.

[81478] Accordingly, the present invention relates to a process for the production of sedoheptulose-7-phosphate, which comprises
[81479] (a) increasing or generating one or more activities selected from the group consisting of 47266012-protein in a non-human organism or a part thereof, preferably a microorganism, a plant cell, a plant or a part thereof, as compared to a corresponding non-transformed wild type non-human organism or a part thereof; and
[81480] (b) growing the non-human organism or a part thereof under conditions which permit the production of sedoheptulose-7-phosphate or a composition comprising sedoheptulose-7-phosphate in said non-human organism or in the culture medium surrounding said non-human organism.

[81481] Accordingly, the present invention relates to a process for the production of glucose, which comprises
[81482] (a) increasing or generating one or more activities selected from the group consisting of 49747384_SOYBEAN-protein in a non-human organism or a part thereof, preferably a microorganism, a plant cell, a plant or a part thereof, as compared to a corresponding non-transformed wild type non-human organism or a part thereof; and
[81483] (b) growing the non-human organism or a part thereof under conditions which permit the production of glucose or a composition comprising glucose in said non-human organism or in the culture medium surrounding said non-human organism.

[81484] Accordingly, the present invention relates to a process for the production of glucose-1-phosphate, which comprises
[81485] (a) increasing or generating one or more activities selected from the group consisting of 49747384_SOYBEAN-protein in a non-human organism or a part thereof, preferably a microorganism, a plant cell, a plant or a part thereof, as compared to a corresponding non-transformed wild type non-human organism or a part thereof; and
[81486] (b) growing the non-human organism or a part thereof under conditions which permit the production of glucose-1-phosphate or a composition comprising glucose-1-phosphate in said non-human organism or in the culture medium surrounding said non-human organism.

[81487] Accordingly, the present invention relates to a process for the production of myo-inositol, which comprises
[81488] (a) increasing or generating one or more activities selected from the group consisting of 49747384_SOYBEAN-protein in a non-human organism or a part thereof, preferably a microorganism, a plant cell, a plant or a part thereof, as compared to a corresponding non-transformed wild type non-human organism or a part thereof; and
[81489] (b) growing the non-human organism or a part thereof under conditions which permit the production of myo-inositol or a composition comprising myo-inositol in said non-human organism or in the culture medium surrounding said non-human organism.

[81490] Accordingly, the present invention relates to a process for the production of raffinose, which comprises
[81491] (a) increasing or generating one or more activities selected from the group consisting of 49747384_SOYBEAN-protein in a non-human organism or a part thereof, preferably a microorganism, a plant cell, a plant or a part thereof, as compared to a corresponding non-transformed wild type non-human organism or a part thereof; and
[81492] (b) growing the non-human organism or a part thereof under conditions which permit the production of raffinose or a composition comprising raffinose in said non-human organism or in the culture medium surrounding said non-human organism.

[81493] Accordingly, the present invention relates to a process for the production of sedoheptulose-7-phosphate, which comprises
[81494] (a) increasing or generating one or more activities selected from the group consisting of 49747384_SOYBEAN-protein in a non-human organism or a part thereof, preferably a microorganism, a plant cell, a plant or a part thereof, as compared to a corresponding non-transformed wild type non-human organism or a part thereof; and
[81495] (b) growing the non-human organism or a part thereof under conditions which permit the production of sedoheptulose-7-phosphate or a composition comprising sedoheptulose-7-phosphate in said non-human organism or in the culture medium surrounding said non-human organism.

[81496] Accordingly, the present invention relates to a process for the production of fructose, which comprises
[81497] (a) increasing or generating one or more activities selected from the group consisting of glucose-6-phosphate 1-dehydrogenase in a non-human organism or a part thereof, preferably a microorganism, a plant cell, a plant or a part thereof, as compared to a corresponding non-transformed wild type non-human organism or a part thereof; and
[81498] (b) growing the non-human organism or a part thereof under conditions which permit the production of fructose or a composition comprising fructose in said non-human organism or in the culture medium surrounding said non-human organism.

[81499] Accordingly, the present invention relates to a process for the production of glucose, which comprises
[81500] (a) increasing or generating one or more activities selected from the group consisting of glucose-6-phosphate 1-dehydrogenase in a non-human organism or a part thereof, preferably a microorganism, a plant cell, a plant or a part thereof, as compared to a corresponding non-transformed wild type non-human organism or a part thereof; and
[81501] (b) growing the non-human organism or a part thereof under conditions which permit the production of glucose or a composition comprising glucose in said non-human organism or in the culture medium surrounding said non-human organism.

[81502] Accordingly, the present invention relates to a process for the production of glucose-1-phosphate, which comprises
[81503] (a) increasing or generating one or more activities selected from the group consisting of glucose-6-phosphate 1-dehydrogenase in a non-human organism or a part thereof, preferably a microorganism, a plant cell, a plant or a part thereof, as compared to a corresponding non-transformed wild type non-human organism or a part thereof; and
[81504] (b) growing the non-human organism or a part thereof under conditions which permit the production of glucose-1-phosphate or a composition comprising glucose-1-phosphate in said non-human organism or in the culture medium surrounding said non-human organism.

[81505] Accordingly, the present invention relates to a process for the production of sedoheptulose-7-phosphate, which comprises
[81506] (a) increasing or generating one or more activities selected from the group consisting of glucose-6-phosphate 1-dehydrogenase in a non-human organism or a part thereof, preferably a microorganism, a plant cell, a plant or a part thereof, as compared to a corresponding non-transformed wild type non-human organism or a part thereof; and
[81507] (b) growing the non-human organism or a part thereof under conditions which permit the production of sedoheptulose-7-phosphate or a composition comprising sedoheptulose-7-phosphate in said non-human organism or in the culture medium surrounding said non-human organism.

[81508] Accordingly, the present invention relates to a process for the production of sucrose, which comprises
[81509] (a) increasing or generating one or more activities selected from the group consisting of glucose-6-phosphate 1-dehydrogenase in a non-human organism or a part thereof, preferably a microorganism, a plant cell, a plant or a part thereof, as compared to a corresponding non-transformed wild type non-human organism or a part thereof; and
[81510] (b) growing the non-human organism or a part thereof under conditions which permit the production of sucrose or a composition comprising sucrose in said non-human organism or in the culture medium surrounding said non-human organism.

[81511] Accordingly, the present invention relates to a process for the production of 3,4,5-trihydroxypentanoic acid, which comprises
[81512] (a) increasing or generating one or more activities selected from the group consisting of glucose-6-phosphate 1-dehydrogenase in a non-human organism or a part thereof, preferably a microorganism, a plant cell, a plant or a part thereof, as compared to a corresponding non-transformed wild type non-human organism or a part thereof; and
[81513] (b) growing the non-human organism or a part thereof under conditions which permit the production of 3,4,5-trihydroxypentanoic acid or a composition comprising 3,4,5-trihydroxypentanoic acid in said non-human organism or in the culture medium surrounding said non-human organism.

[81514] Accordingly, the present invention relates to a process for the production of fructose, which comprises
[81515] (a) increasing or generating one or more activities selected from the group consisting of DNA replication complex GINS protein in a non-human organism or a part thereof, preferably a microorganism, a plant cell, a plant or a part thereof, as compared to a corresponding non-transformed wild type non-human organism or a part thereof; and
[81516] (b) growing the non-human organism or a part thereof under conditions which permit the production of fructose or a composition comprising fructose in said non-human organism or in the culture medium surrounding said non-human organism.

[81517] Accordingly, the present invention relates to a process for the production of glucose, which comprises
[81518] (a) increasing or generating one or more activities selected from the group consisting of acetyl CoA synthetase in a non-human organism or a part thereof, preferably a microorganism, a plant cell, a plant or a part thereof, as compared to a corresponding non-transformed wild type non-human organism or a part thereof; and
[81519] (b) growing the non-human organism or a part thereof under conditions which permit the production of glucose or a composition comprising glucose in said non-human organism or in the culture medium surrounding said non-human organism.

[81520] An embodiment of the present invention relates to a process for the production of 3,4,5-trihydroxypentanoic acid, which comprises
[81521] (a1) increasing or generating the activity of a polypeptide comprising a polypeptide as depicted in a respective line in column 5 or 8 of Table II, application no. 17, or a homolog or a fragment thereof, a consensus sequence or at least one polypeptide motif as depicted in the respective line in column 8 of Table IV, application no. 17, whereby the respective line disclose in column 7 the fine chemical 3,4,5-trihydroxypentanoic acid; or
[81522] (a2) increasing or generating the activity of an expression product of one or more nucleic acid molecule(s) comprising a polynucleotide as depicted in the respective line in column 5 or 8 of Table I, application no. 17, preferably the coding region thereof, or a homolog or a fragment thereof, whereby the respective line disclose in column 7 the fine chemical 3,4,5-trihydroxypentanoic acid; or
[81523] (a3) increasing or generating the activity of a functional equivalent of (a1) or (a2);
[81524] in a non-human organism or a part thereof; preferably a microorganism, a plant cell, a plant or a part thereof, as compared to a corresponding non-transformed wild type non-human organism or a part thereof; and
[81525] (b) growing the non-human organism under conditions which permit the production of 3,4,5-trihydroxypentanoic acid or a composition comprising 3,4,5-trihydroxypentanoic acid in said non-human organism or in the culture medium surrounding said non-human organism.

[81526] An embodiment of the present invention relates to a process for the production of erythrol, which comprises
[81527] (a1) increasing or generating the activity of a polypeptide comprising a polypeptide as depicted in a respective line in column 5 or 8 of Table II, application no. 17, or a homolog or a fragment thereof, a consensus sequence or at least one polypeptide motif as depicted in the respective line in column 8 of Table IV, application no. 17, whereby the respective line disclose in column 7 the fine chemical erythrol; or
[81528] (a2) increasing or generating the activity of an expression product of one or more nucleic acid molecule(s) comprising a polynucleotide as depicted in the respective line in column 5 or 8 of Table I, application no. 17, preferably the coding region thereof, or a homolog or a fragment thereof, whereby the respective line disclose in column 7 the fine chemical erythrol; or
[81529] (a3) increasing or generating the activity of a functional equivalent of (a1) or (a2);
[81530] in a non-human organism or a part thereof; preferably a microorganism, a plant cell, a plant or a part thereof, as compared to a corresponding non-transformed wild type non-human organism or a part thereof; and
[81531] (b) growing the non-human organism under conditions which permit the production of erythrol or a composition comprising erythrol in said non-human organism or in the culture medium surrounding said non-human organism.

[81532] An embodiment of the present invention relates to a process for the production of fructose, which comprises
[81533] (a1) increasing or generating the activity of a polypeptide comprising a polypeptide as depicted in a respective line in column 5 or 8 of Table II, application no. 17, or a homolog or a fragment thereof, a consensus sequence or at least one polypeptide motif as depicted in the respective line in column 8 of Table IV, application no. 17, whereby the respective line disclose in column 7 the fine chemical fructose; or
[81534] (a2) increasing or generating the activity of an expression product of one or more nucleic acid molecule(s) comprising a polynucleotide as depicted in the respective line in column 5 or 8 of Table I, application no. 17, preferably the coding region thereof, or a homolog or a fragment thereof, whereby the respective line disclose in column 7 the fine chemical fructose; or
[81535] (a3) increasing or generating the activity of a functional equivalent of (a1) or (a2);
[81536] in a non-human organism or a part thereof; preferably a microorganism, a plant cell, a plant or a part thereof, as compared to a corresponding non-transformed wild type non-human organism or a part thereof; and
[81537] (b) growing the non-human organism under conditions which permit the production of fructose or a composition comprising fructose in said non-human organism or in the culture medium surrounding said non-human organism.

[81538] An embodiment of the present invention relates to a process for the production of fucose, which comprises
[81539] (a1) increasing or generating the activity of a polypeptide comprising a polypeptide as depicted in a respective line in column 5 or 8 of Table II, application no. 17, or a homolog or a fragment thereof, a consensus sequence or at least one polypeptide motif as depicted in the respective line in column 8 of Table IV, application no. 17, whereby the respective line disclose in column 7 the fine chemical fucose; or
[81540] (a2) increasing or generating the activity of an expression product of one or more nucleic acid molecule(s) comprising a polynucleotide as depicted in the respective line in column 5 or 8 of Table I, application no. 17, preferably the coding region thereof, or a homolog or a fragment thereof, whereby the respective line disclose in column 7 the fine chemical fucose; or
[81541] (a3) increasing or generating the activity of a functional equivalent of (a1) or (a2);
[81542] in a non-human organism or a part thereof; preferably a microorganism, a plant cell, a plant or a part thereof, as compared to a corresponding non-transformed wild type non-human organism or a part thereof; and
[81543] (b) growing the non-human organism under conditions which permit the production of fucose or a composition comprising fucose in said non-human organism or in the culture medium surrounding said non-human organism.

[81544] An embodiment of the present invention relates to a process for the production of galactinol, which comprises
[81545] (a1) increasing or generating the activity of a polypeptide comprising a polypeptide as depicted in a respective line in column 5 or 8 of Table II, application no. 17, or a homolog or a fragment thereof, a consensus sequence or at least one polypeptide motif as depicted in the respective line in column 8 of Table IV, application no. 17, whereby the respective line disclose in column 7 the fine chemical galactinol; or
[81546] (a2) increasing or generating the activity of an expression product of one or more nucleic acid molecule(s) comprising a polynucleotide as depicted in the respective line in column 5 or 8 of Table I, application no. 17, preferably the coding region thereof, or a homolog or a fragment thereof, whereby the respective line disclose in column 7 the fine chemical galactinol; or
[81547] (a3) increasing or generating the activity of a functional equivalent of (a1) or (a2); in a non-human organism or a part thereof; preferably a microorganism, a plant cell, a plant or a part thereof, as compared to a corresponding non-transformed wild type non-human organism or a part thereof; and
[81548] (b) growing the non-human organism under conditions which permit the production of galactinol or a composition comprising galactinol in said non-human organism or in the culture medium surrounding said non-human organism.

[81549] An embodiment of the present invention relates to a process for the production of galactitol, which comprises
[81550] (a1) increasing or generating the activity of a polypeptide comprising a polypeptide as depicted in a respective line in column 5 or 8 of Table II, application no. 17, or a homolog or a fragment thereof, a consensus sequence or at least one polypeptide motif as depicted in the respective line in column 8 of Table IV, application no. 17, whereby the respective line disclose in column 7 the fine chemical galactitol; or
[81551] (a2) increasing or generating the activity of an expression product of one or more nucleic acid molecule(s) comprising a polynucleotide as depicted in the respective line in column 5 or 8 of Table I, application no. 17, preferably the coding region thereof, or a homolog or a fragment thereof, whereby the respective line disclose in column 7 the fine chemical galactitol; or
[81552] (a3) increasing or generating the activity of a functional equivalent of (a1) or (a2);
[81553] in a non-human organism or a part thereof; preferably a microorganism, a plant cell, a plant or a part thereof, as compared to a corresponding non-transformed wild type non-human organism or a part thereof; and
[81554] (b) growing the non-human organism under conditions which permit the production of galactitol or a composition comprising galactitol in said non-human organism or in the culture medium surrounding said non-human organism.

[81555] An embodiment of the present invention relates to a process for the production of glucose, which comprises
[81556] (a1) increasing or generating the activity of a polypeptide comprising a polypeptide as depicted in a respective line in column 5 or 8 of Table II, application no. 17, or a homolog or a fragment thereof, a consensus sequence or at least one polypeptide motif as depicted in the respective line in column 8 of Table IV, application no. 17, whereby the respective line disclose in column 7 the fine chemical glucose; or
[81557] (a2) increasing or generating the activity of an expression product of one or more nucleic acid molecule(s) comprising a polynucleotide as depicted in the respective line in column 5 or 8 of Table I, application no. 17, preferably the coding region thereof, or a homolog or a fragment thereof, whereby the respective line disclose in column 7 the fine chemical glucose; or
[81558] (a3) increasing or generating the activity of a functional equivalent of (a1) or (a2);
[81559] in a non-human organism or a part thereof; preferably a microorganism, a plant cell, a plant or a part thereof, as compared to a corresponding non-transformed wild type non-human organism or a part thereof; and
[81560] (b) growing the non-human organism under conditions which permit the production of glucose or a composition comprising glucose in said non-human organism or in the culture medium surrounding said non-human organism.

[81561] An embodiment of the present invention relates to a process for the production of glucose-1-phosphate, which comprises
[81562] (a1) increasing or generating the activity of a polypeptide comprising a polypeptide as depicted in a respective line in column 5 or 8 of Table II, application no. 17, or a homolog or a fragment thereof, a consensus sequence or at least one polypeptide motif as depicted in the respective line in column 8 of Table IV, application no. 17, whereby the respective line disclose in column 7 the fine chemical glucose-1-phosphate; or
[81563] (a2) increasing or generating the activity of an expression product of one or more nucleic acid molecule(s) comprising a polynucleotide as depicted in the respective line in column 5 or 8 of Table I, application no. 17, preferably the coding region thereof, or a homolog or a fragment thereof, whereby the respective line disclose in column 7 the fine chemical glucose-1-phosphate; or
[81564] (a3) increasing or generating the activity of a functional equivalent of (a1) or (a2);
[81565] in a non-human organism or a part thereof; preferably a microorganism, a plant cell, a plant or a part thereof, as compared to a corresponding non-transformed wild type non-human organism or a part thereof; and
[81566] (b) growing the non-human organism under conditions which permit the production of glucose-1-phosphate or a composition comprising glucose-1-phosphate in said non-human organism or in the culture medium surrounding said non-human organism.

[81567] An embodiment of the present invention relates to a process for the production of mannitol, which comprises
[81568] (a1) increasing or generating the activity of a polypeptide comprising a polypeptide as depicted in a respective line in column 5 or 8 of Table II, application no. 17, or a homolog or a fragment thereof, a consensus sequence or at least one polypeptide motif as depicted in the respective line in column 8 of Table IV, application no. 17, whereby the respective line disclose in column 7 the fine chemical mannitol; or
[81569] (a2) increasing or generating the activity of an expression product of one or more nucleic acid molecule(s) comprising a polynucleotide as depicted in the respective line in column 5 or 8 of Table I, application no. 17, preferably the coding region thereof, or a homolog or a fragment thereof, whereby the respective line disclose in column 7 the fine chemical mannitol; or
[81570] (a3) increasing or generating the activity of a functional equivalent of (a1) or (a2); in a non-human organism or a part thereof; preferably a microorganism, a plant cell, a plant or a part thereof, as compared to a corresponding non-transformed wild type non-human organism or a part thereof; and
[81571] (b) growing the non-human organism under conditions which permit the production of mannitol or a composition comprising mannitol in said non-human organism or in the culture medium surrounding said non-human organism.

[81572] An embodiment of the present invention relates to a process for the production of melibiose, which comprises
[81573] (a1) increasing or generating the activity of a polypeptide comprising a polypeptide as depicted in a respective line in column 5 or 8 of Table II, application no. 17, or a homolog or a fragment thereof, a consensus sequence or at least one polypeptide motif as depicted in the respective line in column 8 of Table IV, application no. 17, whereby the respective line disclose in column 7 the fine chemical melibiose; or
[81574] (a2) increasing or generating the activity of an expression product of one or more nucleic acid molecule(s) comprising a polynucleotide as depicted in the respective line in column 5 or 8 of Table I, application no. 17, preferably the coding region thereof, or a homolog or a fragment thereof, whereby the respective line disclose in column 7 the fine chemical melibiose; or
[81575] (a3) increasing or generating the activity of a functional equivalent of (a1) or (a2);
[81576] in a non-human organism or a part thereof; preferably a microorganism, a plant cell, a plant or a part thereof, as compared to a corresponding non-transformed wild type non-human organism or a part thereof; and
[81577] (b) growing the non-human organism under conditions which permit the production of melibiose or a composition comprising melibiose in said non-human organism or in the culture medium surrounding said non-human organism.

[81578] An embodiment of the present invention relates to a process for the production of myo-inositol, which comprises
[81579] (a1) increasing or generating the activity of a polypeptide comprising a polypeptide as depicted in a respective line in column 5 or 8 of Table II, application no. 17, or a homolog or a fragment thereof, a consensus sequence or at least one polypeptide motif as depicted in the respective line in column 8 of Table IV, application no. 17, whereby the respective line disclose in column 7 the fine chemical myo-inositol; or
[81580] (a2) increasing or generating the activity of an expression product of one or more nucleic acid molecule(s) comprising a polynucleotide as depicted in the respective line in column 5 or 8 of Table I, application no. 17, preferably the coding region thereof, or a homolog or a fragment thereof, whereby the respective line disclose in column 7 the fine chemical myo-inositol; or
[81581] (a3) increasing or generating the activity of a functional equivalent of (a1) or (a2);
[81582] in a non-human organism or a part thereof; preferably a microorganism, a plant cell, a plant or a part thereof, as compared to a corresponding non-transformed wild type non-human organism or a part thereof; and
[81583] (b) growing the non-human organism under conditions which permit the production of myo-inositol or a composition comprising myo-inositol in said non-human organism or in the culture medium surrounding said non-human organism.

[81584] An embodiment of the present invention relates to a process for the production of raffinose, which comprises
[81585] (a1) increasing or generating the activity of a polypeptide comprising a polypeptide as depicted in a respective line in column 5 or 8 of Table II, application no. 17, or a homolog or a fragment thereof, a consensus sequence or at least one polypeptide motif as depicted in the respective line in column 8 of Table IV, application no. 17, whereby the respective line disclose in column 7 the fine chemical raffinose; or
[81586] (a2) increasing or generating the activity of an expression product of one or more nucleic acid molecule(s) comprising a polynucleotide as depicted in the respective line in column 5 or 8 of Table I, application no. 17, preferably the coding region thereof, or a homolog or a fragment thereof, whereby the respective line disclose in column 7 the fine chemical raffinose; or
[81587] (a3) increasing or generating the activity of a functional equivalent of (a1) or (a2);
[81588] in a non-human organism or a part thereof; preferably a microorganism, a plant cell, a plant or a part thereof, as compared to a corresponding non-transformed wild type non-human organism or a part thereof; and
[81589] (b) growing the non-human organism under conditions which permit the production of raffinose or a composition comprising raffinose in said non-human organism or in the culture medium surrounding said non-human organism.

[81590] An embodiment of the present invention relates to a process for the production of saccharic acid, which comprises
[81591] (a1) increasing or generating the activity of a polypeptide comprising a polypeptide as depicted in a respective line in column 5 or 8 of Table II, application no. 17, or a homolog or a fragment thereof, a consensus sequence or at least one polypeptide motif as depicted in the respective line in column 8 of Table IV, application no. 17, whereby the respective line disclose in column 7 the fine chemical saccharic acid; or
[81592] (a2) increasing or generating the activity of an expression product of one or more nucleic acid molecule(s) comprising a polynucleotide as depicted in the respective line in column 5 or 8 of Table I, application no. 17, preferably the coding region thereof, or a homolog or a fragment thereof, whereby the respective line disclose in column 7 the fine chemical saccharic acid; or
[81593] (a3) increasing or generating the activity of a functional equivalent of (a1) or (a2);
[81594] in a non-human organism or a part thereof; preferably a microorganism, a plant cell, a plant or a part thereof, as compared to a corresponding non-transformed wild type non-human organism or a part thereof; and
[81595] (b) growing the non-human organism under conditions which permit the production of saccharic acid or a composition comprising saccharic acid in said non-human organism or in the culture medium surrounding said non-human organism.

[81596] An embodiment of the present invention relates to a process for the production of sedoheptulose-7-phosphate, which comprises
[81597] (a1) increasing or generating the activity of a polypeptide comprising a polypeptide as depicted in a respective line in column 5 or 8 of Table II, application no. 17, or a homolog or a fragment thereof, a consensus sequence or at least one polypeptide motif as depicted in the respective line in column 8 of Table IV, application no. 17, whereby the respective line disclose in column 7 the fine chemical sedoheptulose-7-phosphate; or
[81598] (a2) increasing or generating the activity of an expression product of one or more nucleic acid molecule(s) comprising a polynucleotide as depicted in the respective line in column 5 or 8 of Table I, application no. 17, preferably the coding region thereof, or a homolog or a fragment thereof, whereby the respective line disclose in column 7 the fine chemical sedoheptulose-7-phosphate; or
[81599] (a3) increasing or generating the activity of a functional equivalent of (a1) or (a2);
[81600] in a non-human organism or a part thereof; preferably a microorganism, a plant cell, a plant or a part thereof, as compared to a corresponding non-transformed wild type non-human organism or a part thereof; and
[81601] (b) growing the non-human organism under conditions which permit the production of sedoheptulose-7-phosphate or a composition comprising sedoheptulose-7-phosphate in said non-human organism or in the culture medium surrounding said non-human organism.

[81602] An embodiment of the present invention relates to a process for the production of sorbitol, which comprises
[81603] (a1) increasing or generating the activity of a polypeptide comprising a polypeptide as depicted in a respective line in column 5 or 8 of Table II, application no. 17, or a homolog or a fragment thereof, a consensus sequence or at least one polypeptide motif as depicted in the respective line in column 8 of Table IV, application no. 17, whereby the respective line disclose in column 7 the fine chemical sorbitol; or
[81604] (a2) increasing or generating the activity of an expression product of one or more nucleic acid molecule(s) comprising a polynucleotide as depicted in the respective line in column 5 or 8 of Table I, application no. 17, preferably the coding region thereof, or a homolog or a fragment thereof, whereby the respective line disclose in column 7 the fine chemical sorbitol; or
[81605] (a3) increasing or generating the activity of a functional equivalent of (a1) or (a2);
[81606] in a non-human organism or a part thereof; preferably a microorganism, a plant cell, a plant or a part thereof, as compared to a corresponding non-transformed wild type non-human organism or a part thereof; and
[81607] (b) growing the non-human organism under conditions which permit the production of sorbitol or a composition comprising sorbitol in said non-human organism or in the culture medium surrounding said non-human organism.

[81608] An embodiment of the present invention relates to a process for the production of sucrose, which comprises
[81609] (a1) increasing or generating the activity of a polypeptide comprising a polypeptide as depicted in a respective line in column 5 or 8 of Table II, application no. 17, or a homolog or a fragment thereof, a consensus sequence or at least one polypeptide motif as depicted in the respective line in column 8 of Table IV, application no. 17, whereby the respective line disclose in column 7 the fine chemical sucrose; or
[81610] (a2) increasing or generating the activity of an expression product of one or more nucleic acid molecule(s) comprising a polynucleotide as depicted in the respective line in column 5 or 8 of Table I, application no. 17, preferably the coding region thereof, or a homolog or a fragment thereof, whereby the respective line disclose in column 7 the fine chemical sucrose; or
[81611] (a3) increasing or generating the activity of a functional equivalent of (a1) or (a2);
[81612] in a non-human organism or a part thereof; preferably a microorganism, a plant cell, a plant or a part thereof, as compared to a corresponding non-transformed wild type non-human organism or a part thereof; and
[81613] (b) growing the non-human organism under conditions which permit the production of sucrose or a composition comprising sucrose in said non-human organism or in the culture medium surrounding said non-human organism.

[81614] An embodiment of the present invention relates to a process for the production of trehalose, which comprises
[81615] (a1) increasing or generating the activity of a polypeptide comprising a polypeptide as depicted in a respective line in column 5 or 8 of Table II, application no. 17, or a homolog or a fragment thereof, a consensus sequence or at least one polypeptide motif as depicted in the respective line in column 8 of Table IV, application no. 17, whereby the respective line disclose in column 7 the fine chemical trehalose; or
[81616] (a2) increasing or generating the activity of an expression product of one or more nucleic acid molecule(s) comprising a polynucleotide as depicted in the respective line in column 5 or 8 of Table I, application no. 17, preferably the coding region thereof, or a homolog or a fragment thereof, whereby the respective line disclose in column 7 the fine chemical trehalose; or
[81617] (a3) increasing or generating the activity of a functional equivalent of (a1) or (a2);
[81618] in a non-human organism or a part thereof; preferably a microorganism, a plant cell, a plant or a part thereof, as compared to a corresponding non-transformed wild type non-human organism or a part thereof; and
[81619] (b) growing the non-human organism under conditions which permit the production of trehalose or a composition comprising trehalose in said non-human organism or in the culture medium surrounding said non-human organism.

[81620] An embodiment of the present invention relates to a process for the production of verbascose, which comprises
[81621] (a1) increasing or generating the activity of a polypeptide comprising a polypeptide as depicted in a respective line in column 5 or 8 of Table II, application no. 17, or a homolog or a fragment thereof, a consensus sequence or at least one polypeptide motif as depicted in the respective line in column 8 of Table IV, application no. 17, whereby the respective line disclose in column 7 the fine chemical verbascose; or
[81622] (a2) increasing or generating the activity of an expression product of one or more nucleic acid molecule(s) comprising a polynucleotide as depicted in the respective line in column 5 or 8 of Table I, application no. 17, preferably the coding region thereof, or a homolog or a fragment thereof, whereby the respective line disclose in column 7 the fine chemical verbascose; or
[81623] (a3) increasing or generating the activity of a functional equivalent of (a1) or (a2);
[81624] in a non-human organism or a part thereof; preferably a microorganism, a plant cell, a plant or a part thereof, as compared to a corresponding non-transformed wild type non-human organism or a part thereof; and
[81625] (b) growing the non-human organism under conditions which permit the production of verbascose or a composition comprising verbascose in said non-human organism or in the culture medium surrounding said non-human organism.

[81626] Accordingly, the increase or generation of one or more said activities is for example conferred by one or more expression products of said nucleic acid molecule, e.g. proteins. Accordingly, in the present invention described above, the increase or generation of one or more said activities is for example conferred by one or more protein(s) each comprising a polypeptide selected from the group as depicted in Table II, application no. 17, column 5 and 8, or a homolog or a fragment thereof.

[81627] The process of the invention comprises in one embodiment the following steps:
[81628] (i) increasing or generating of the expression of; and/or
[81629] (ii) increasing or generating the expression of an expression product of; and/or
[81630] (iii) increasing or generating one or more activities of an expression product encoded by;
[81631] at least one nucleic acid molecule (in the following “Fine Chemical Related Protein (FCRP)”-encoding gene or “FCRP”-gene) comprising a nucleic acid molecule selected from the group consisting of:
[81632] (a) a nucleic acid molecule encoding the polypeptide shown in column 5 or 8 of Table II, preferably Table II B, application no. 17, or a homolog or a fragment thereof;
[81633] (b) a nucleic acid molecule shown in column 5 or 8 of Table I, preferably Table I B, application no. 17, or a homolog or a fragment thereof (preferably the coding region thereof);
[81634] (c) a nucleic acid molecule, which, as a result of the degeneracy of the genetic code, can be derived from a polypeptide sequence depicted in column 5 or 8 of Table II, preferably Table II B, application no. 17;
[81635] (d) a nucleic acid molecule having at least 30%, in particular at least 50%, 60%, 70%, 80%, 85%, 90%, 95%, 97%, 98%, 99% or 99.5% identity with the nucleic acid molecule sequence of a polynucleotide comprising the nucleic acid molecule shown in column 5 or 8 of Table I, preferably Table I B, application no. 17, or the coding region thereof;
[81636] (e) a nucleic acid molecule encoding a polypeptide having at least 30%, in particular 50%, 60%, 70%, 80%, 85%, 90%, 95%, 97%, 98%, 99% or 99.5% identity with the amino acid sequence of the polypeptide encoded by the nucleic acid molecule of (a), (b), (c) or (d),
[81637] (f) a nucleic acid molecule which hybridizes with a nucleic acid molecule of (a), (b), (c), (d) or (e) under stringent hybridization conditions;
[81638] (g) a nucleic acid molecule encoding a polypeptide which can be isolated with the aid of monoclonal or polyclonal antibodies made against a polypeptide encoded by one of the nucleic acid molecules of (a), (b), (c), (d), (e) or (f);
[81639] (h) a nucleic acid molecule encoding a polypeptide comprising the consensus sequence or one or more polypeptide motifs as shown in column 8 of Table IV, application no. 17;
[81640] (i) a nucleic acid molecule encoding a polypeptide having the activity represented by a respective protein as depicted in column 5 of Table II, application no. 17;
[81641] (j) a nucleic acid molecule which comprises a polynucleotide, which is obtained by amplifying a cDNA library or a genomic library using the primers as depicted in column 8 of Table III, application no. 17; and
[81642] (k) a nucleic acid molecule which is obtainable by screening a suitable nucleic acid library, especially a cDNA library and/or a genomic library, under stringent hybridization conditions with a probe comprising a complementary sequence of a nucleic acid molecule of (a), (b), (c), (d), (e), (f), (g), (h), (i) or (j) or with a fragment thereof, having at least 15 nt, preferably 20 nt, 30 nt, 50 nt, 100 nt, 200 nt, 500 nt, 1000 nt, 1500 nt, 2000 nt or 3000 nt of a nucleic acid molecule complementary to a nucleic acid molecule sequence characterized in (a), (b), (c), (d), (e), (f), (g), (h), (i) or (j);
[81643] or a nucleic acid molecule comprising a sequence which is complementary thereto.
   (All the references to Tables I to IV are references to the corresponding lines of Tables I to IV.)

[81644] In a preferred embodiment thereof said nucleic acid molecule encodes a polypeptide which has the activity of the polypeptide represented by a protein comprising a polypeptide as depicted in the corresponding hit in column 5 of Table II, application no. 17.

[81645] In another preferred embodiment thereof said nucleic acid molecule confers a generation or an increase of the respective fine chemical in a non-human organism or a part thereof as compared to a corresponding wild-type non-human organism or part thereof.

[81646] In another preferred embodiment thereof said nucleic acid molecule encodes a polypeptide which has the activity of the polypeptide represented by a protein as depicted in the corresponding hit in column 5 of Table II, application no. 17, and confers a generation or an increase of the respective fine chemical in a non-human organism or a part thereof as compared to a corresponding wild-type non-human organism or part thereof.

[81647] Accordingly, the genes of the present invention or used in accordance with the present invention, which respectively encode a protein having an activity of 1,4-alpha-glucan branching enzyme, 2,3-dihydroxy-2,3-dihydrophenylpropionatedehydrogenase, 2-C-methyl-D-erythritol 4-phosphate cytidylyltransferase, 2-oxoglutarate dehydrogenase E1 subunit, 3-deoxy-7-phosphoheptulonate synthase, 3-isopropylmalate dehydratase large subunit, 3-phosphoglycerate dehydrogenase, 47266012-protein, 49747384_SOYBEAN-protein, 4-alpha-glucanotransferase, ABC transporter permease protein, acetyl CoA carboxylase, acetyl CoA synthetase, acetyl-coenzyme A synthetase, acetyltransferase, acid shock protein, acyl carrier protein, acyl transferase, acyl-CoA dehydrogenase, acyl-CoA synthase, adenylosuccinate lyase, alanine dehydrogenase, alcohol dehydrogenase, aldolase, alkaline phosphatase, amine oxidase, amino-acid acetyltransferase, aminotransferase, arginine exporter protein, asparagine synthetase B, At1g19350-protein, At2g45420-protein, At5g16650-protein, At5g43630-protein, ATP synthase subunit E, ATP-binding component of a transport system, auxin response factor, AX653549-protein, AY087308-protein, b0050-protein, b0251-protein, b0362-protein, b0488-protein, B0644-protein, b0801-protein, b0970-protein, b1003-protein, b1046-protein, b1137-protein, b1214-protein, b1219-protein, b1234-protein, b1285-protein, b1357-protein, b1410-protein, b1425-protein, b1445-protein, b1470-protein, b1522-protein, b1556-protein, b1583-protein, b1670-protein, b1796-protein, b1898-protein, b2032-protein, b2107-protein, b2139-protein, b2345-protein, b2360-protein, b2361-protein, b2399-protein, b2466-protein, b2474-protein, b2613-protein, b2653-protein, b2654-protein, b2670-protein, b2673-protein, b2682-protein, b2739-protein, b2932-protein, b3151-protein, b3221-protein, b3246-protein, b3346-protein, B3427-protein, b3442-protein, B3443-protein, b3777-protein, b3817-protein, b3818-protein, b3989-protein, b4029-protein, b4050-protein, b4056-protein, b4250-protein, beta-galactosidase, beta-hydroxylase, betaine aldehyde dehydrogenase, bifunctional protein (phosphoribosyltransferase and regulatory protein), binding-protein-dependent transport systems inner membrane component, branched-chain amino acid ABC transporter permease protein, branched-chain amino acid permease, calcium-dependent protein kinase, carbamoyl-phosphate synthase subunit, cardiolipin synthase, cation-transporting ATPase, CBL-interacting protein kinase, CCAAT-binding transcription factor, CDP-diglyceride synthetase, cell division control protein, cell division protein, chlorophyllase, chorismate lyase, circadian clock protein, colanic acid biosynthesis protein, coproporphyrinogen III oxidase, coproporphyrinogen oxidase, CTP synthase, cullin, cyclin, cyclin D, cystathionine gamma-synthase, cysteine synthase A, dATP pyrophosphohydrolase, dihydrolipoamide dehydrogenase, DNA binding protein, DNA replication complex GINS protein, DnaJ-like chaperone, electron transfer flavoprotein subunit beta, electron transport complex protein, elongation factor Tu, enoyl-CoA hydratase, eukaryotic translation initiation factor, eukaryotic translation initiation factor 5, fatty acid desaturase, ferredoxin, Fe—S subunit of oxidoreductase, flagellar M-ring protein, flavodoxin, fructose biphosphate aldolase, fumarylacetoacetate hydrolase, galactinol synthase, GDP-mannose 4,6-dehydratase, GDP-mannose dehydrogenase, geranylgeranyl pyrophosphate synthase, gibberellin 20-oxidase, Glu/Leu/Phe/Val dehydrogenase , glucokinase, gluconate transport system permease 3, glucose dehydrogenase, glucose-6-phosphate 1-dehydrogenase, glutamate-ammonia-ligase, glutamine amidotransferase, glutamine synthetase, glutaredoxin, glycerate kinase, glycogen (starch) synthase, glycogen synthase, glycosidase, glycosyl transferase, glycosyltransferase, GM02LC38418-protein, GM02LC46-protein, halotolerance protein, heat shock transcription factor, hexokinase, hexose transporter, high-affinity branched-chain amino acid transport protein, histone acetyltransferase, homocitrate synthase, hydrolase, inositol-3-phosphate synthase, integral membrane protein, intracellular septation protein, ion-transport protein, iron(III) dicitratebinding protein, isochorismate synthase, isocitrate dehydrogenase, isopropylmalate isomerase large subunit, ketol-acid reductoisomerase, kinase, leucyl/phenylalanyl-tRNA-protein transferase, lipoprotein precursor, L-ribulose-5-phosphate 4-epimerase, L-serine dehydratase, lysine decarboxylase, MADS box protein transcription factor, MADS-box transcription factor, malate dehydrogenase, mannitol-1-phosphate dehydrogenase, membrane protein, membrane transport protein, methylglyoxalase, methyltransferase, Mg-protoporphyrin IX monomethyl ester oxidative cyclase 66 kD subunit, mitogen-activated protein kinase, molecular chaperone, monothiol glutaredoxin, monthiol glutaredoxin, multidrug resistance protein, multiple antibiotic resistance protein, murein transglycosylase, NAD(P)H dehydrogenase (quinone), NADH dehydrogenase, NADH-quinone oxidoreductase subunit, O-acetyltransferase, O-antigen chain length determinant, outer membrane receptor protein precursor, oxidoreductase, oxidoreductase subunit, para-aminobenzoate synthase component I, penicillin-binding protein, peptidyl-prolyl cis-trans isomerase, permease, permease protein of ABC transporter, phage-related repressor protein, phenylacetic acid degradation protein, phenylalanine ammonia-lyase, phosphate acetyltransferase, phosphate permease, phosphatidylinositol 3- and 4-kinase family protein, phosphoadenosine phosphosulfate reductase, phosphoanhydride phosphorylase, phosphoenolpyruvate carboxykinase, phosphoglycerate kinase, phosphohydrolase, phosphotransferase system component, photosystem I reaction center subunit XI, photosystem I reaction centre subunit, photosystem II protein, polyamine transporter, precorrin methylase, protease, protein kinase, protein phosphatase, protein-L-isoaspartate O-methyltransferase, purine biosynthesis protein, purine nucleoside phosphorylase, purine-nucleoside phosphorylase, putative transport system permease protein, putrescine transport system permease protein, pyridoxal phosphate biosynthetic protein, pyrimidine-specific ribonucleoside hydrolase, pyruvate kinase, recombinase A, RNA-binding protein, sec-independent protein translocase, Sec-independent protein translocase subunit, sensor histidine kinase, serine protease, serine/threonine dehydratase, serine/threonine-protein phosphatase, short chain dehydrogenase, short-chain alcohol dehydrogenase family, sll0254-protein, sll0281-protein, sll0354-protein, sll0418-protein, sll1761-protein, slr0600-protein, slr1107-protein, sn-glycerol-3-phosphate dehydrogenase, sn-glycerol-3-phosphate transport system permease protein, sodium/proton antiporter, sterol O-acyltransferase, subunit of COMPASS-protein complex, succinyl-CoA synthetase beta chain, ThiF family protein, thioredoxin, thioredoxin family protein, threonine dehydratase, threonine efflux protein, threonine synthase, transcription factor, transcriptional regulator, transcriptional regulator protein, transport protein, trehalase, trehalose-6-phosphate synthase, trehalosephosphatase, tryptophan biosynthesis protein, TTC1386-protein, urease accessory protein, urease subunit, vacuolar sorting protein, XM_{—}473199-protein, ycl027w-protein, YCR047W-A-protein, ycr102c-protein, YDL159W-A-protein, ydl235c-protein, ydr183w-protein, ydr507c-protein, YEL030C-A-protein, yer177w-protein, YFL019C-protein, ygl096w-protein, ygl1237c-protein, yhl013c-protein, YIL083C-protein, YJL127W-A-protein, ymr324c-protein, yol160w-protein, ypl144w-protein, ypr098c-protein, zinc transporter, or Zm_{—}4842_BE510522-protein, which respectively encode a protein comprising a polypeptide encoded by a nucleic acid sequence as shown in Table I, application no. 17, column 5 or 8, (preferably the coding region thereof), or a homolog or a fragment thereof, which respectively encode a protein comprising a polypeptide as depicted in Table II, application no. 17, column 5 or 8, or a homolg or a fragment thereof, and/or which respectively can be amplified with the primer set shown in Table III, application no. 17, column 8, are also referred to as “FCRP genes”.

[81648] Proteins or polypeptides encoded by “FCRP-genes” are referred to as “Fine Chemical Related Proteins” or “FCRP”. For the purposes of the description of the present invention, the respective protein having an activity of 1,4-alpha-glucan branching enzyme, 2,3-dihydroxy-2,3-dihydrophenylpropionatedehydrogenase, 2-C-methyl-D-erythritol 4-phosphate cytidylyltransferase, 2-oxoglutarate dehydrogenase E1 subunit, 3-deoxy-7-phosphoheptulonate synthase, 3-isopropylmalate dehydratase large subunit, 3-phosphoglycerate dehydrogenase, 47266012-protein, 49747384_SOYBEAN-protein, 4-alpha-glucanotransferase, ABC transporter permease protein, acetyl CoA carboxylase, acetyl CoA synthetase, acetyl-coenzyme A synthetase, acetyltransferase, acid shock protein, acyl carrier protein, acyl transferase, acyl-CoA dehydrogenase, acyl-CoA synthase, adenylosuccinate lyase, alanine dehydrogenase, alcohol dehydrogenase, aldolase, alkaline phosphatase, amine oxidase, amino-acid acetyltransferase, aminotransferase, arginine exporter protein, asparagine synthetase B, At1g19350-protein, At2g45420-protein, At5g16650-protein, At5g43630-protein, ATP synthase subunit E, ATP-binding component of a transport system, auxin response factor, AX653549-protein, AY087308-protein, b0050-protein, b0251-protein, b0362-protein, b0488-protein, B0644-protein, b0801-protein, b0970-protein, b1003-protein, b1046-protein, b1137-protein, b1214-protein, b1219-protein, b1234-protein, b1285-protein, b1357-protein, b1410-protein, b1425-protein, b1445-protein, b1470-protein, b1522-protein, b1556-protein, b1583-protein, b1670-protein, b1796-protein, b1898-protein, b2032-protein, b2107-protein, b2139-protein, b2345-protein, b2360-protein, b2361-protein, b2399-protein, b2466-protein, b2474-protein, b2613-protein, b2653-protein, b2654-protein, b2670-protein, b2673-protein, b2682-protein, b2739-protein, b2932-protein, b3151-protein, b3221-protein, b3246-protein, b3346-protein, B3427-protein, b3442-protein, B3443-protein, b3777-protein, b3817-protein, b3818-protein, b3989-protein, b4029-protein, b4050-protein, b4056-protein, b4250-protein, beta-galactosidase, beta-hydroxylase, betaine aldehyde dehydrogenase, bifunctional protein (phosphoribosyltransferase and regulatory protein), binding-protein-dependent transport systems inner membrane component, branched-chain amino acid ABC transporter permease protein, branched-chain amino acid permease, calcium-dependent protein kinase, carbamoyl-phosphate synthase subunit, cardiolipin synthase, cation-transporting ATPase, CBL-interacting protein kinase, CCAAT-binding transcription factor, CDP-diglyceride synthetase, cell division control protein, cell division protein, chlorophyllase, chorismate lyase, circadian clock protein, colanic acid biosynthesis protein, coproporphyrinogen III oxidase, coproporphyrinogen oxidase, CTP synthase, cullin, cyclin, cyclin D, cystathionine gamma-synthase, cysteine synthase A, dATP pyrophosphohydrolase, dihydrolipoamide dehydrogenase, DNA binding protein, DNA replication complex GINS protein, DnaJ-like chaperone, electron transfer flavoprotein subunit beta, electron transport complex protein, elongation factor Tu, enoyl-CoA hydratase, eukaryotic translation initiation factor, eukaryotic translation initiation factor 5, fatty acid desaturase, ferredoxin, Fe—S subunit of oxidoreductase, flagellar M-ring protein, flavodoxin, fructose biphosphate aldolase, fumarylacetoacetate hydrolase, galactinol synthase, GDP-mannose 4,6-dehydratase, GDP-mannose dehydrogenase, geranylgeranyl pyrophosphate synthase, gibberellin 20-oxidase, Glu/Leu/PheNal dehydrogenase, glucokinase, gluconate transport system permease 3, glucose dehydrogenase, glucose-6-phosphate 1-dehydrogenase, glutamate-ammonia-ligase, glutamine amidotransferase, glutamine synthetase, glutaredoxin, glycerate kinase, glycogen (starch) synthase, glycogen synthase, glycosidase, glycosyl transferase, glycosyltransferase, GM02LC38418-protein, GM02LC46-protein, halotolerance protein, heat shock transcription factor, hexokinase, hexose transporter, high-affinity branched-chain amino acid transport protein, histone acetyltransferase, homocitrate synthase, hydrolase, inositol-3-phosphate synthase, integral membrane protein, intracellular septation protein, ion-transport protein, iron(III) dicitrate-binding protein, isochorismate synthase, isocitrate dehydrogenase, isopropylmalate isomerase large subunit, ketol-acid reductoisomerase, kinase, leucyl/phenylalanyl-tRNA-protein transferase, lipoprotein precursor, L-ribulose-5-phosphate 4-epimerase, L-serine dehydratase, lysine decarboxylase, MADS box protein transcription factor, MADS-box transcription factor, malate dehydrogenase, mannitol-1-phosphate dehydrogenase, membrane protein, membrane transport protein, methylglyoxalase, methyltransferase, Mg-protoporphyrin IX monomethyl ester oxidative cyclase 66 kD subunit, mitogen-activated protein kinase, molecular chaperone, monothiol glutaredoxin, monthiol glutaredoxin, multidrug resistance protein, multiple antibiotic resistance protein, murein transglycosylase, NAD(P)H dehydrogenase (quinone), NADH dehydrogenase, NADH-quinone oxidoreductase subunit, O-acetyltransferase, O-antigen chain length determinant, outer membrane receptor protein precursor, oxidoreductase, oxidoreductase subunit, para-aminobenzoate synthase component I, penicillin-binding protein, peptidyl-prolyl cis-trans isomerase, permease, permease protein of ABC transporter, phage-related repressor protein, phenylacetic acid degradation protein, phenylalanine ammonia-lyase, phosphate acetyltransferase, phosphate permease, phosphatidylinositol 3- and 4-kinase family protein, phosphoadenosine phosphosulfate reductase, phosphoanhydride phosphorylase, phosphoenolpyruvate carboxykinase, phosphoglycerate kinase, phosphohydrolase, phosphotransferase system component, photosystem I reaction center subunit XI, photosystem I reaction centre subunit, photosystem II protein, polyamine transporter, precorrin methylase, protease, protein kinase, protein phosphatase, protein-L-isoaspartate O-methyltransferase, purine biosynthesis protein, purine nucleoside phosphorylase, purine-nucleoside phosphorylase, putative transport system permease protein, putrescine transport system permease protein, pyridoxal phosphate biosynthetic protein, pyrimidine-specific ribonucleoside hydrolase, pyruvate kinase, recombinase A, RNA-binding protein, sec-independent protein translocase, Sec-independent protein translocase subunit, sensor histidine kinase, serine protease, serine/threonine dehydratase, serine/threonine-protein phosphatase, short chain dehydrogenase, short-chain alcohol dehydrogenase family, sll0254-protein, sll0281-protein, sll0354-protein, sll0418-protein, sll1761-protein, slr0600-protein, slr1107-protein, sn-glycerol-3-phosphate dehydrogenase, sn-glycerol-3-phosphate transport system permease protein, sodium/proton antiporter, sterol O-acyltransferase, subunit of COMPASS-protein complex, succinyl-CoA synthetase beta chain, ThiF family protein, thioredoxin, thioredoxin family protein, threonine dehydratase, threonine efflux protein, threonine synthase, transcription factor, transcriptional regulator, transcriptional regulator protein, transport protein, trehalase, trehalose-6-phosphate synthase, trehalose-phosphatase, tryptophan biosynthesis protein, TTC1386-protein, urease accessory protein, urease subunit, vacuolar sorting protein, XM_{—}473199-protein, ycl027w-protein, YCR047W-A-protein, ycr102c-protein, YDL159W-A-protein, ydl235c-protein, ydr183w-protein, ydr507c-protein, YEL030C-A-protein, yer177w-protein, YFL019C-protein, ygl096w-protein, ygl237c-protein, yh1013c-protein, YIL083C-protein, YJL127W-A-protein, ymr324c-protein, yol160w-protein, ypl144w-protein, ypr098c-protein, zinc transporter, or Zm_{—}4842_BE510522-protein, the respective protein comprising a polypeptide encoded by one or more respective nucleic acid sequences as shown in Table I, application no. 17, column 5 or 8, (preferably the coding region thereof), or a homolog or fragment thereof, the respective protein comprising a respective polypeptide as depicted in Table II, application no. 17, column 5 or 8, or a homolog or fragment thereof, the respective protein comprising a sequence corresponding to the consensus sequence as shown in Table IV, application no. 17, column 8, and/or the respective protein comprising at least one polypeptide motif as shown in Table IV, application no. 17, column 8 is also referred to as Fine Chemical Related Protein” or “FCRP”.

[81649] Thus, in one embodiment, the present invention provides a process of the production of 3,4,5-trihydroxypentanoic acid, erythrol, fructose, fucose, galactinol, galactitol, glucose, glucose-1-phosphate, mannitol, melibiose, myo-inositol, raffinose, saccharic acid, sedoheptulose-7-phosphate, sorbitol, sucrose, trehalose, and/or verbascose, by increasing or generating one or more activities, especially selected from the group consisting of 1,4-alpha-glucan branching enzyme, 2,3-dihydroxy-2,3-dihydrophenylpropionatedehydrogenase, 2-C-methyl-D-erythritol 4-phosphate cytidylyltransferase, 2-oxoglutarate dehydrogenase E1 subunit, 3-deoxy-7-phosphoheptulonate synthase, 3-isopropylmalate dehydratase large subunit, 3-phosphoglycerate dehydrogenase, 47266012-protein, 49747384_SOYBEAN-protein, 4-alpha-glucanotransferase, ABC transporter permease protein, acetyl CoA carboxylase, acetyl CoA synthetase, acetyl-coenzyme A synthetase, acetyltransferase, acid shock protein, acyl carrier protein, acyl transferase, acyl-CoA dehydrogenase, acyl-CoA synthase, adenylosuccinate lyase, alanine dehydrogenase, alcohol dehydrogenase, aldolase, alkaline phosphatase, amine oxidase, amino-acid acetyltransferase, aminotransferase, arginine exporter protein, asparagine synthetase B, AO g19350-protein, At2g45420-protein, At5g16650-protein, At5g43630-protein, ATP synthase subunit E, ATP-binding component of a transport system, auxin response factor, AX653549-protein, AY087308-protein, b0050-protein, b0251-protein, b0362-protein, b0488-protein, B0644-protein, b0801-protein, b0970-protein, b1003-protein, b1046-protein, b1137-protein, b1214-protein, b1219-protein, b1234-protein, b1285-protein, b1357-protein, b1410-protein, b1425-protein, b1445-protein, b1470-protein, b1522-protein, b1556-protein, b1583-protein, b1670-protein, b1796-protein, b1898-protein, b2032-protein, b2107-protein, b2139-protein, b2345-protein, b2360-protein, b2361-protein, b2399-protein, b2466-protein, b2474-protein, b2613-protein, b2653-protein, b2654-protein, b2670-protein, b2673-protein, b2682-protein, b2739-protein, b2932-protein, b3151-protein, b3221-protein, b3246-protein, b3346-protein, B3427-protein, b3442-protein, B3443-protein, b3777-protein, b3817-protein, b3818-protein, b3989-protein, b4029-protein, b4050-protein, b4056-protein, b4250-protein, beta-galactosidase, beta-hydroxylase, betaine aldehyde dehydrogenase, bifunctional protein (phosphoribosyltransferase and regulatory protein), binding-protein-dependent transport systems inner membrane component, branched-chain amino acid ABC transporter permease protein, branched-chain amino acid permease, calcium-dependent protein kinase, carbamoyl-phosphate synthase subunit, cardiolipin synthase, cation-transporting ATPase, CBL-interacting protein kinase, CCAAT-binding transcription factor, CDP-diglyceride synthetase, cell division control protein, cell division protein, chlorophyllase, chorismate lyase, circadian clock protein, colanic acid biosynthesis protein, coproporphyrinogen III oxidase, coproporphyrinogen oxidase, CTP synthase, cullin, cyclin, cyclin D, cystathionine gamma-synthase, cysteine synthase A, dATP pyrophosphohydrolase, dihydrolipoamide dehydrogenase, DNA binding protein, DNA replication complex GINS protein, DnaJ-like chaperone, electron transfer flavoprotein subunit beta, electron transport complex protein, elongation factor Tu, enoyl-CoA hydratase, eukaryotic translation initiation factor, eukaryotic translation initiation factor 5, fatty acid desaturase, ferredoxin, Fe—S subunit of oxidoreductase, flagellar M-ring protein, flavodoxin, fructose biphosphate aldolase, fumarylacetoacetate hydrolase, galactinol synthase, GDP-mannose 4,6-dehydratase, GDP-mannose dehydrogenase, geranylgeranyl pyrophosphate synthase, gibberellin 20-oxidase, Glu/Leu/PheNal dehydrogenase , glucokinase, gluconate transport system permease 3, glucose dehydrogenase, glucose-6-phosphate 1-dehydrogenase, glutamate-ammonia-ligase, glutamine amidotransferase, glutamine synthetase, glutaredoxin, glycerate kinase, glycogen (starch) synthase, glycogen synthase, glycosidase, glycosyl transferase, glycosyltransferase, GM02LC38418-protein, GM02LC46-protein, halotolerance protein, heat shock transcription factor, hexokinase, hexose transporter, high-affinity branched-chain amino acid transport protein, histone acetyltransferase, homocitrate synthase, hydrolase, inositol-3-phosphate synthase, integral membrane protein, intracellular septation protein, ion-transport protein, iron(III) dicitratebinding protein, isochorismate synthase, isocitrate dehydrogenase, isopropylmalate isomerase large subunit, ketol-acid reductoisomerase, kinase, leucyl/phenylalanyl-tRNA-protein transferase, lipoprotein precursor, L-ribulose-5-phosphate 4-epimerase, L-serine dehydratase, lysine decarboxylase, MADS box protein transcription factor, MADS-box transcription factor, malate dehydrogenase, mannitol-1-phosphate dehydrogenase, membrane protein, membrane transport protein, methylglyoxalase, methyltransferase, Mg-protoporphyrin IX monomethyl ester oxidative cyclase 66 kD subunit, mitogen-activated protein kinase, molecular chaperone, monothiol glutaredoxin, monthiol glutaredoxin, multidrug resistance protein, multiple antibiotic resistance protein, murein transglycosylase, NAD(P)H dehydrogenase (quinone), NADH dehydrogenase, NADH-quinone oxidoreductase subunit, O-acetyltransferase, O-antigen chain length determinant, outer membrane receptor protein precursor, oxidoreductase, oxidoreductase subunit, para-aminobenzoate synthase component I, penicillin-binding protein, peptidyl-prolyl cis-trans isomerase, permease, permease protein of ABC transporter, phage-related repressor protein, phenylacetic acid degradation protein, phenylalanine ammonia-lyase, phosphate acetyltransferase, phosphate permease, phosphatidylinositol 3- and 4-kinase family protein, phosphoadenosine phosphosulfate reductase, phosphoanhydride phosphorylase, phosphoenolpyruvate carboxykinase, phosphoglycerate kinase, phosphohydrolase, phosphotransferase system component, photosystem I reaction center subunit XI, photosystem I reaction centre subunit, photosystem II protein, polyamine transporter, precorrin methylase, protease, protein kinase, protein phosphatase, protein-L-isoaspartate 0-methyltransferase, purine biosynthesis protein, purine nucleoside phosphorylase, purine-nucleoside phosphorylase, putative transport system permease protein, putrescine transport system permease protein, pyridoxal phosphate biosynthetic protein, pyrimidine-specific ribonucleoside hydrolase, pyruvate kinase, recombinase A, RNA-binding protein, sec-independent protein translocase, Sec-independent protein translocase subunit, sensor histidine kinase, serine protease, serine/threonine dehydratase, serine/threonine-protein phosphatase, short chain dehydrogenase, short-chain alcohol dehydrogenase family, sll0254-protein, sll0281-protein, sll0354-protein, sll0418-protein, sll1761-protein, slr0600-protein, slr1107-protein, sn-glycerol-3-phosphate dehydrogenase, sn-glycerol-3-phosphate transport system permease protein, sodium/proton antiporter, sterol O-acyltransferase, subunit of COMPASS-protein complex, succinyl-CoA synthetase beta chain,

[81650] ThiF family protein, thioredoxin, thioredoxin family protein, threonine dehydratase, threonine efflux protein, threonine synthase, transcription factor, transcriptional regulator, transcriptional regulator protein, transport protein, trehalase, trehalose-6-phosphate synthase, trehalosephosphatase, tryptophan biosynthesis protein, TTC1386-protein, urease accessory protein, urease subunit, vacuolar sorting protein, XM_{—}473199-protein, ycl027w-protein, YCR047W-A-protein, ycr102c-protein, YDL159W-A-protein, ydl235c-protein, ydr183w-protein, ydr507c-protein, YEL030C-A-protein, yer177w-protein, YFL019C-protein, ygl096w-protein, ygl237c-protein, yh1013c-protein, YIL083C-protein, YJL127W-A-protein, ymr324c-protein, yol160w-protein, ypl144w-protein, ypr098c-protein, zinc transporter, and Zm_{—}4842_BE510522-protein, which is conferred by one or more FCRPs or the gene product of one or more FCRP-genes, for example by the gene product of a nucleic acid sequences comprising a polynucleotide selected from the group as shown in Table I, application no. 17, column 5 or 8, (preferably by the coding region thereof), or a homolog or a fragment thereof, e.g. or by one or more proteins each comprising a polypeptide encoded by one or more nucleic acid sequences selected from the group as shown in Table I, application no. 17, column 5 or 8, (preferably by the coding region thereof), or a homolog or a fragment thereof, or by one or more protein(s) each comprising a polypeptide selected from the group as depicted in Table II, application no. 17, column 5 and 8, or a homolog thereof, or a protein comprising a sequence corresponding to the consensus sequence or comprising at least one polypeptide motif as shown in Table IV, application no. 17, column 8.

[81651] for the disclosure of this paragraph see [0025.1.7.7] above

[81652] In an embodiment, the process comprises increasing or generating the activity of one or more polypeptides having said activity, e.g. by generating or increasing the amount and/or specific activity in the cell or a compartment of a cell of one of more FCRP, especially selected from the group consisting of 1,4-alpha-glucan branching enzyme, 2,3-dihydroxy-2,3-dihydrophenylpropionatedehydrogenase, 2-C-methyl-D-erythritol 4-phosphate cytidylyltransferase, 2-oxoglutarate dehydrogenase E1 subunit, 3-deoxy-7-phosphoheptulonate synthase, 3-isopropylmalate dehydratase large subunit, 3-phosphoglycerate dehydrogenase, 47266012-protein, 49747384_SOYBEAN-protein, 4-alpha-glucanotransferase, ABC transporter permease protein, acetyl CoA carboxylase, acetyl CoA synthetase, acetyl-coenzyme A synthetase, acetyltransferase, acid shock protein, acyl carrier protein, acyl transferase, acyl-CoA dehydrogenase, acyl-CoA synthase, adenylosuccinate lyase, alanine dehydrogenase, alcohol dehydrogenase, aldolase, alkaline phosphatase, amine oxidase, amino-acid acetyltransferase, aminotransferase, arginine exporter protein, asparagine synthetase B, At1g19350-protein, At2g45420-protein, At5g16650-protein, At5g43630-protein, ATP synthase subunit E, ATP-binding component of a transport system, auxin response factor, AX653549-protein, AY087308-protein, b0050-protein, b0251-protein, b0362-protein, b0488-protein, B0644-protein, b0801-protein, b0970-protein, b1003-protein, b1046-protein, b1137-protein, b1214-protein, b1219-protein, b1234-protein, b1285-protein, b1357-protein, b1410-protein, b1425-protein, b1445-protein, b1470-protein, b1522-protein, b1556-protein, b1583-protein, b1670-protein, b1796-protein, b1898-protein, b2032-protein, b2107-protein, b2139-protein, b2345-protein, b2360-protein, b2361-protein, b2399-protein, b2466-protein, b2474-protein, b2613-protein, b2653-protein, b2654-protein, b2670-protein, b2673-protein, b2682-protein, b2739-protein, b2932-protein, b3151-protein, b3221-protein, b3246-protein, b3346-protein, B3427-protein, b3442-protein, B3443-protein, b3777-protein, b3817-protein, b3818-protein, b3989-protein, b4029-protein, b4050-protein, b4056-protein, b4250-protein, beta-galactosidase, beta-hydroxylase, betaine aldehyde dehydrogenase, bifunctional protein (phosphoribosyltransferase and regulatory protein), binding-protein-dependent transport systems inner membrane component, branched-chain amino acid ABC transporter permease protein, branched-chain amino acid permease, calcium-dependent protein kinase, carbamoyl-phosphate synthase subunit, cardiolipin synthase, cation-transporting ATPase, CBL-interacting protein kinase, CCAAT-binding transcription factor, CDP-diglyceride synthetase, cell division control protein, cell division protein, chlorophyllase, chorismate lyase, circadian clock protein, colanic acid biosynthesis protein, coproporphyrinogen III oxidase, coproporphyrinogen oxidase, CTP synthase, cullin, cyclin, cyclin D, cystathionine gamma-synthase, cysteine synthase A, dATP pyrophosphohydrolase, dihydrolipoamide dehydrogenase, DNA binding protein, DNA replication complex GINS protein, DnaJ-like chaperone, electron transfer flavoprotein subunit beta, electron transport complex protein, elongation factor Tu, enoyl-CoA hydratase, eukaryotic translation initiation factor, eukaryotic translation initiation factor 5, fatty acid desaturase, ferredoxin, Fe—S subunit of oxidoreductase, flagellar M-ring protein, flavodoxin, fructose biphosphate aldolase, fumarylacetoacetate hydrolase, galactinol synthase, GDP-mannose 4,6-dehydratase, GDP-mannose dehydrogenase, geranylgeranyl pyrophosphate synthase, gibberellin 20-oxidase, Glu/Leu/Phe/Val dehydrogenase , glucokinase, gluconate transport system permease 3, glucose dehydrogenase, glucose-6-phosphate 1-dehydrogenase, glutamate-ammonia-ligase, glutamine amidotransferase, glutamine synthetase, glutaredoxin, glycerate kinase, glycogen (starch) synthase, glycogen synthase, glycosidase, glycosyl transferase, glycosyltransferase, GM02LC38418-protein, GM02LC46-protein, halotolerance protein, heat shock transcription factor, hexokinase, hexose transporter, high-affinity branched-chain amino acid transport protein, histone acetyltransferase, homocitrate synthase, hydrolase, inositol-3-phosphate synthase, integral membrane protein, intracellular septation protein, ion-transport protein, iron(III) dicitratebinding protein, isochorismate synthase, isocitrate dehydrogenase, isopropylmalate isomerase large subunit, ketol-acid reductoisomerase, kinase, leucyl/phenylalanyl-tRNA-protein transferase, lipoprotein precursor, L-ribulose-5-phosphate 4-epimerase, L-serine dehydratase, lysine decarboxylase, MADS box protein transcription factor, MADS-box transcription factor, malate dehydrogenase, mannitol-1-phosphate dehydrogenase, membrane protein, membrane transport protein, methylglyoxalase, methyltransferase, Mg-protoporphyrin IX monomethyl ester oxidative cyclase 66 kD subunit, mitogen-activated protein kinase, molecular chaperone, monothiol glutaredoxin, monthiol glutaredoxin, multidrug resistance protein, multiple antibiotic resistance protein, murein transglycosylase, NAD(P)H dehydrogenase (quinone), NADH dehydrogenase, NADH-quinone oxidoreductase subunit, O-acetyltransferase, O-antigen chain length determinant, outer membrane receptor protein precursor, oxidoreductase, oxidoreductase subunit, para-aminobenzoate synthase component I, penicillin-binding protein, peptidyl-prolyl cis-trans isomerase, permease, permease protein of ABC transporter, phage-related repressor protein, phenylacetic acid degradation protein, phenylalanine ammonia-lyase, phosphate acetyltransferase, phosphate permease, phosphatidylinositol 3- and 4-kinase family protein, phosphoadenosine phosphosulfate reductase, phosphoanhydride phosphorylase, phosphoenolpyruvate carboxykinase, phosphoglycerate kinase, phosphohydrolase, phosphotransferase system component, photosystem I reaction center subunit XI, photosystem I reaction centre subunit, photosystem II protein, polyamine transporter, precorrin methylase, protease, protein kinase, protein phosphatase, protein-L-isoaspartate 0-methyltransferase, purine biosynthesis protein, purine nucleoside phosphorylase, purine-nucleoside phosphorylase, putative transport system permease protein, putrescine transport system permease protein, pyridoxal phosphate biosynthetic protein, pyrimidine-specific ribonucleoside hydrolase, pyruvate kinase, recombinase A, RNA-binding protein, sec-independent protein translocase, Sec-independent protein translocase subunit, sensor histidine kinase, serine protease, serine/threonine dehydratase, serine/threonine-protein phosphatase, short chain dehydrogenase, short-chain alcohol dehydrogenase family, sll0254-protein, sll0281-protein, sll0354-protein, sll0418-protein, sll1761-protein, slr0600-protein, slr1107-protein, sn-glycerol-3-phosphate dehydrogenase, sn-glycerol-3-phosphate transport system permease protein, sodium/proton antiporter, sterol Oacyltransferase, subunit of COMPASS-protein complex, succinyl-CoA synthetase beta chain,

[81653] ThiF family protein, thioredoxin, thioredoxin family protein, threonine dehydratase, threonine efflux protein, threonine synthase, transcription factor, transcriptional regulator, transcriptional regulator protein, transport protein, trehalase, trehalose-6-phosphate synthase, trehalosephosphatase, tryptophan biosynthesis protein, TTC1386-protein, urease accessory protein, urease subunit, vacuolar sorting protein, XM_{—}473199-protein, ycl027w-protein, YCR047W-A-protein, ycr102c-protein, YDL159W-A-protein, ydl235c-protein, ydr183w-protein, ydr507c-protein, YEL030C-A-protein, yer177w-protein, YFL019C-protein, ygl096w-protein, ygl237c-protein, yh1013c-protein, YIL083C-protein, YJL127W-A-protein, ymr324c-protein, yol160w-protein, ypl144w-protein, ypr098c-protein, zinc transporter, and Zm_{—}4842_BE510522-protein, for example of the respective polypeptide as depicted in Table II, application no. 17, column 5 and 8, or a homolog or a fragment thereof, or the respective polypeptide comprising a sequence corresponding to the consensus sequences as shown in Table IV, application no. 17, column 8, or the respective polypeptide comprising at least one polypeptide motif as depicted in Table IV, application no. 17, column 8.

[81654] A further embodiment of the present invention relates to a process for the production of raffinose, which comprises
[81655] (a) increasing or generating the activity of a galactinol synthase non-targeted in a non-human organism or a part thereof, preferably a microorganism, a plant cell, a plant or a part thereof, as compared to a corresponding non-transformed wild type non-human organism or a part thereof; and
[81656] (b) growing the non-human organism or a part thereof under conditions which permit the production of raffinose or a composition comprising raffinose in said non-human organism or in the culture medium surrounding said non-human organism.

[81657] A further embodiment of the present invention relates to a process for the production of glucose-1-phosphate, which comprises
[81658] (a) increasing or generating the activity of a protein phosphatase non-targeted in a non-human organism or a part thereof, preferably a microorganism, a plant cell, a plant or a part thereof, as compared to a corresponding non-transformed wild type non-human organism or a part thereof; and
[81659] (b) growing the non-human organism or a part thereof under conditions which permit the production of glucose-1-phosphate or a composition comprising glucose-1-phosphate in said non-human organism or in the culture medium surrounding said non-human organism.

[81660] A further embodiment of the present invention relates to a process for the production of myo-inositol, which comprises
[81661] (a) increasing or generating the activity of a protein phosphatase non-targeted in a non-human organism or a part thereof, preferably a microorganism, a plant cell, a plant or a part thereof, as compared to a corresponding non-transformed wild type non-human organism or a part thereof; and
[81662] (b) growing the non-human organism or a part thereof under conditions which permit the production of myo-inositol or a composition comprising myo-inositol in said non-human organism or in the culture medium surrounding said non-human organism.

[81663] A further embodiment of the present invention relates to a process for the production of glucose-1-phosphate, which comprises
[81664] (a) increasing or generating the activity of a At1g19350-protein non-targeted in a non-human organism or a part thereof, preferably a microorganism, a plant cell, a plant or a part thereof, as compared to a corresponding non-transformed wild type non-human organism or a part thereof; and
[81665] (b) growing the non-human organism or a part thereof under conditions which permit the production of glucose-1-phosphate or a composition comprising glucose-1-phosphate in said non-human organism or in the culture medium surrounding said non-human organism.

[81666] A further embodiment of the present invention relates to a process for the production of 3,4,5-trihydroxypentanoic acid, which comprises
[81667] (a) increasing or generating the activity of a At1g19350-protein non-targeted in a non-human organism or a part thereof, preferably a microorganism, a plant cell, a plant or a part thereof, as compared to a corresponding non-transformed wild type non-human organism or a part thereof; and
[81668] (b) growing the non-human organism or a part thereof under conditions which permit the production of 3,4,5-trihydroxypentanoic acid or a composition comprising 3,4,5-trihydroxypentanoic acid in said non-human organism or in the culture medium surrounding said non-human organism.

[81669] A further embodiment of the present invention relates to a process for the production of myo-inositol, which comprises
[81670] (a) increasing or generating the activity of a chlorophyllase non-targeted in a non-human organism or a part thereof, preferably a microorganism, a plant cell, a plant or a part thereof, as compared to a corresponding non-transformed wild type non-human organism or a part thereof; and
[81671] (b) growing the non-human organism or a part thereof under conditions which permit the production of myo-inositol or a composition comprising myo-inositol in said non-human organism or in the culture medium surrounding said non-human organism.

[81672] A further embodiment of the present invention relates to a process for the production of fructose, which comprises
[81673] (a) increasing or generating the activity of a cullin non-targeted in a non-human organism or a part thereof, preferably a microorganism, a plant cell, a plant or a part thereof, as compared to a corresponding non-transformed wild type non-human organism or a part thereof; and
[81674] (b) growing the non-human organism or a part thereof under conditions which permit the production of fructose or a composition comprising fructose in said non-human organism or in the culture medium surrounding said non-human organism.

[81675] A further embodiment of the present invention relates to a process for the production of fructose, which comprises
[81676] (a) increasing or generating the activity of a eukaryotic translation initiation factor 5 non-targeted in a non-human organism or a part thereof, preferably a microorganism, a plant cell, a plant or a part thereof, as compared to a corresponding non-transformed wild type non-human organism or a part thereof; and
[81677] (b) growing the non-human organism or a part thereof under conditions which permit the production of fructose or a composition comprising fructose in said non-human organism or in the culture medium surrounding said non-human organism.

[81678] A further embodiment of the present invention relates to a process for the production of glucose, which comprises
[81679] (a) increasing or generating the activity of a eukaryotic translation initiation factor 5 non-targeted in a non-human organism or a part thereof, preferably a microorganism, a plant cell, a plant or a part thereof, as compared to a corresponding non-transformed wild type non-human organism or a part thereof; and
[81680] (b) growing the non-human organism or a part thereof under conditions which permit the production of glucose or a composition comprising glucose in said non-human organism or in the culture medium surrounding said non-human organism.

[81681] A further embodiment of the present invention relates to a process for the production of raffinose, which comprises
[81682] (a) increasing or generating the activity of a eukaryotic translation initiation factor 5 non-targeted in a non-human organism or a part thereof, preferably a microorganism, a plant cell, a plant or a part thereof, as compared to a corresponding non-transformed wild type non-human organism or a part thereof; and
[81683] (b) growing the non-human organism or a part thereof under conditions which permit the production of raffinose or a composition comprising raffinose in said non-human organism or in the culture medium surrounding said non-human organism.

[81684] A further embodiment of the present invention relates to a process for the production of sucrose, which comprises
[81685] (a) increasing or generating the activity of a transcriptional regulator non-targeted in a non-human organism or a part thereof, preferably a microorganism, a plant cell, a plant or a part thereof, as compared to a corresponding non-transformed wild type non-human organism or a part thereof; and
[81686] (b) growing the non-human organism or a part thereof under conditions which permit the production of sucrose or a composition comprising sucrose in said non-human organism or in the culture medium surrounding said non-human organism.

[81687] A further embodiment of the present invention relates to a process for the production of raffinose, which comprises
[81688] (a) increasing or generating the activity of a galactinol synthase non-targeted in a non-human organism or a part thereof, preferably a microorganism, a plant cell, a plant or a part thereof, as compared to a corresponding non-transformed wild type non-human organism or a part thereof; and
[81689] (b) growing the non-human organism or a part thereof under conditions which permit the production of raffinose or a composition comprising raffinose in said non-human organism or in the culture medium surrounding said non-human organism.

[81690] A further embodiment of the present invention relates to a process for the production of glucose, which comprises
[81691] (a) increasing or generating the activity of a protein phosphatase non-targeted in a non-human organism or a part thereof, preferably a microorganism, a plant cell, a plant or a part thereof, as compared to a corresponding non-transformed wild type non-human organism or a part thereof; and
[81692] (b) growing the non-human organism or a part thereof under conditions which permit the production of glucose or a composition comprising glucose in said non-human organism or in the culture medium surrounding said non-human organism.

[81693] A further embodiment of the present invention relates to a process for the production of glucose-1-phosphate, which comprises
[81694] (a) increasing or generating the activity of a protein phosphatase non-targeted in a non-human organism or a part thereof, preferably a microorganism, a plant cell, a plant or a part thereof, as compared to a corresponding non-transformed wild type non-human organism or a part thereof; and
[81695] (b) growing the non-human organism or a part thereof under conditions which permit the production of glucose-1-phosphate or a composition comprising glucose-1-phosphate in said non-human organism or in the culture medium surrounding said non-human organism.

[81696] A further embodiment of the present invention relates to a process for the production of myo-inositol, which comprises
[81697] (a) increasing or generating the activity of a protein phosphatase non-targeted in a non-human organism or a part thereof, preferably a microorganism, a plant cell, a plant or a part thereof, as compared to a corresponding non-transformed wild type non-human organism or a part thereof; and
[81698] (b) growing the non-human organism or a part thereof under conditions which permit the production of myo-inositol or a composition comprising myo-inositol in said non-human organism or in the culture medium surrounding said non-human organism.

[81699] A further embodiment of the present invention relates to a process for the production of raffinose, which comprises
[81700] (a) increasing or generating the activity of a protein phosphatase non-targeted in a non-human organism or a part thereof, preferably a microorganism, a plant cell, a plant or a part thereof, as compared to a corresponding non-transformed wild type non-human organism or a part thereof; and
[81701] (b) growing the non-human organism or a part thereof under conditions which permit the production of raffinose or a composition comprising raffinose in said non-human organism or in the culture medium surrounding said non-human organism.

[81702] A further embodiment of the present invention relates to a process for the production of sucrose, which comprises
[81703] (a) increasing or generating the activity of a protein phosphatase non-targeted in a non-human organism or a part thereof, preferably a microorganism, a plant cell, a plant or a part thereof, as compared to a corresponding non-transformed wild type non-human organism or a part thereof; and
[81704] (b) growing the non-human organism or a part thereof under conditions which permit the production of sucrose or a composition comprising sucrose in said non-human organism or in the culture medium surrounding said non-human organism.

[81705] A further embodiment of the present invention relates to a process for the production of saccharic acid, which comprises
[81706] (a) increasing or generating the activity of a protein phosphatase non-targeted in a non-human organism or a part thereof, preferably a microorganism, a plant cell, a plant or a part thereof, as compared to a corresponding non-transformed wild type non-human organism or a part thereof; and
[81707] (b) growing the non-human organism or a part thereof under conditions which permit the production of saccharic acid or a composition comprising saccharic acid in said non-human organism or in the culture medium surrounding said non-human organism.

[81708] A further embodiment of the present invention relates to a process for the production of fructose, which comprises
[81709] (a) increasing or generating the activity of a transcription factor non-targeted in a non-human organism or a part thereof, preferably a microorganism, a plant cell, a plant or a part thereof, as compared to a corresponding non-transformed wild type non-human organism or a part thereof; and
[81710] (b) growing the non-human organism or a part thereof under conditions which permit the production of fructose or a composition comprising fructose in said non-human organism or in the culture medium surrounding said non-human organism.

[81711] A further embodiment of the present invention relates to a process for the production of glucose, which comprises
[81712] (a) increasing or generating the activity of a transcription factor non-targeted in a non-human organism or a part thereof, preferably a microorganism, a plant cell, a plant or a part thereof, as compared to a corresponding non-transformed wild type non-human organism or a part thereof; and
[81713] (b) growing the non-human organism or a part thereof under conditions which permit the production of glucose or a composition comprising glucose in said non-human organism or in the culture medium surrounding said non-human organism.

[81714] A further embodiment of the present invention relates to a process for the production of glucose-1-phosphate, which comprises
[81715] (a) increasing or generating the activity of a transcription factor non-targeted in a non-human organism or a part thereof, preferably a microorganism, a plant cell, a plant or a part thereof, as compared to a corresponding non-transformed wild type non-human organism or a part thereof; and
[81716] (b) growing the non-human organism or a part thereof under conditions which permit the production of glucose-1-phosphate or a composition comprising glucose-1-phosphate in said non-human organism or in the culture medium surrounding said non-human organism.

[81717] A further embodiment of the present invention relates to a process for the production of glucose-1-phosphate, which comprises
[81718] (a) increasing or generating the activity of a protein phosphatase non-targeted in a non-human organism or a part thereof, preferably a microorganism, a plant cell, a plant or a part thereof, as compared to a corresponding non-transformed wild type non-human organism or a part thereof; and
[81719] (b) growing the non-human organism or a part thereof under conditions which permit the production of glucose-1-phosphate or a composition comprising glucose-1-phosphate in said non-human organism or in the culture medium surrounding said non-human organism.

[81720] A further embodiment of the present invention relates to a process for the production of saccharic acid, which comprises
[81721] (a) increasing or generating the activity of a glutaredoxin non-targeted in a non-human organism or a part thereof, preferably a microorganism, a plant cell, a plant or a part thereof, as compared to a corresponding non-transformed wild type non-human organism or a part thereof; and
[81722] (b) growing the non-human organism or a part thereof under conditions which permit the production of saccharic acid or a composition comprising saccharic acid in said non-human organism or in the culture medium surrounding said non-human organism.

[81723] A further embodiment of the present invention relates to a process for the production of fructose, which comprises
[81724] (a) increasing or generating the activity of a CBL-interacting protein kinase non-targeted in a non-human organism or a part thereof, preferably a microorganism, a plant cell, a plant or a part thereof, as compared to a corresponding non-transformed wild type non-human organism or a part thereof; and
[81725] (b) growing the non-human organism or a part thereof under conditions which permit the production of fructose or a composition comprising fructose in said non-human organism or in the culture medium surrounding said non-human organism.

[81726] A further embodiment of the present invention relates to a process for the production of glucose, which comprises
[81727] (a) increasing or generating the activity of a CBL-interacting protein kinase non-targeted in a non-human organism or a part thereof, preferably a microorganism, a plant cell, a plant or a part thereof, as compared to a corresponding non-transformed wild type non-human organism or a part thereof; and
[81728] (b) growing the non-human organism or a part thereof under conditions which permit the production of glucose or a composition comprising glucose in said non-human organism or in the culture medium surrounding said non-human organism.

[81729] A further embodiment of the present invention relates to a process for the production of sedoheptulose-7-phosphate, which comprises
[81730] (a) increasing or generating the activity of a CBL-interacting protein kinase non-targeted in a non-human organism or a part thereof, preferably a microorganism, a plant cell, a plant or a part thereof, as compared to a corresponding non-transformed wild type non-human organism or a part thereof; and
[81731] (b) growing the non-human organism or a part thereof under conditions which permit the production of sedoheptulose-7-phosphate or a composition comprising sedoheptulose-7-phosphate in said non-human organism or in the culture medium surrounding said non-human organism.

[81732] A further embodiment of the present invention relates to a process for the production of glucose-1-phosphate, which comprises
[81733] (a) increasing or generating the activity of a phenylalanine ammonia-lyase non-targeted in a non-human organism or a part thereof, preferably a microorganism, a plant cell, a plant or a part thereof, as compared to a corresponding non-transformed wild type non-human organism or a part thereof; and
[81734] (b) growing the non-human organism or a part thereof under conditions which permit the production of glucose-1-phosphate or a composition comprising glucose-1-phosphate in said non-human organism or in the culture medium surrounding said non-human organism.

[81735] A further embodiment of the present invention relates to a process for the production of glucose-1-phosphate, which comprises
[81736] (a) increasing or generating the activity of a MADS box protein transcription factor non-targeted in a non-human organism or a part thereof, preferably a microorganism, a plant cell, a plant or a part thereof, as compared to a corresponding non-transformed wild type non-human organism or a part thereof; and
[81737] (b) growing the non-human organism or a part thereof under conditions which permit the production of glucose-1-phosphate or a composition comprising glucose-1-phosphate in said non-human organism or in the culture medium surrounding said non-human organism.

[81738] A further embodiment of the present invention relates to a process for the production of myo-inositol, which comprises
[81739] (a) increasing or generating the activity of a At2g45420-protein non-targeted in a non-human organism or a part thereof, preferably a microorganism, a plant cell, a plant or a part thereof, as compared to a corresponding non-transformed wild type non-human organism or a part thereof; and
[81740] (b) growing the non-human organism or a part thereof under conditions which permit the production of myo-inositol or a composition comprising myo-inositol in said non-human organism or in the culture medium surrounding said non-human organism.

[81741] A further embodiment of the present invention relates to a process for the production of glucose-1-phosphate, which comprises
[81742] (a) increasing or generating the activity of a phosphatidylinositol 3- and 4-kinase family protein non-targeted in a non-human organism or a part thereof, preferably a microorganism, a plant cell, a plant or a part thereof, as compared to a corresponding non-transformed wild type non-human organism or a part thereof; and
[81743] (b) growing the non-human organism or a part thereof under conditions which permit the production of glucose-1-phosphate or a composition comprising glucose-1-phosphate in said non-human organism or in the culture medium surrounding said non-human organism.

[81744] A further embodiment of the present invention relates to a process for the production of raffinose, which comprises
[81745] (a) increasing or generating the activity of a galactinol synthase non-targeted in a non-human organism or a part thereof, preferably a microorganism, a plant cell, a plant or a part thereof, as compared to a corresponding non-transformed wild type non-human organism or a part thereof; and
[81746] (b) growing the non-human organism or a part thereof under conditions which permit the production of raffinose or a composition comprising raffinose in said non-human organism or in the culture medium surrounding said non-human organism.

[81747] A further embodiment of the present invention relates to a process for the production of raffinose, which comprises
[81748] (a) increasing or generating the activity of a galactinol synthase non-targeted in a non-human organism or a part thereof, preferably a microorganism, a plant cell, a plant or a part thereof, as compared to a corresponding non-transformed wild type non-human organism or a part thereof; and
[81749] (b) growing the non-human organism or a part thereof under conditions which permit the production of raffinose or a composition comprising raffinose in said non-human organism or in the culture medium surrounding said non-human organism.

[81750] A further embodiment of the present invention relates to a process for the production of fructose, which comprises
[81751] (a) increasing or generating the activity of a heat shock transcription factor non-targeted in a non-human organism or a part thereof, preferably a microorganism, a plant cell, a plant or a part thereof, as compared to a corresponding non-transformed wild type non-human organism or a part thereof; and
[81752] (b) growing the non-human organism or a part thereof under conditions which permit the production of fructose or a composition comprising fructose in said non-human organism or in the culture medium surrounding said non-human organism.

[81753] A further embodiment of the present invention relates to a process for the production of glucose, which comprises
[81754] (a) increasing or generating the activity of a heat shock transcription factor non-targeted in a non-human organism or a part thereof, preferably a microorganism, a plant cell, a plant or a part thereof, as compared to a corresponding non-transformed wild type non-human organism or a part thereof; and
[81755] (b) growing the non-human organism or a part thereof under conditions which permit the production of glucose or a composition comprising glucose in said non-human organism or in the culture medium surrounding said non-human organism.

[81756] A further embodiment of the present invention relates to a process for the production of myo-inositol, which comprises
[81757] (a) increasing or generating the activity of a heat shock transcription factor non-targeted in a non-human organism or a part thereof, preferably a microorganism, a plant cell, a plant or a part thereof, as compared to a corresponding non-transformed wild type non-human organism or a part thereof; and
[81758] (b) growing the non-human organism or a part thereof under conditions which permit the production of myo-inositol or a composition comprising myo-inositol in said non-human organism or in the culture medium surrounding said non-human organism.

[81759] A further embodiment of the present invention relates to a process for the production of raffinose, which comprises
[81760] (a) increasing or generating the activity of a heat shock transcription factor non-targeted in a non-human organism or a part thereof, preferably a microorganism, a plant cell, a plant or a part thereof, as compared to a corresponding non-transformed wild type non-human organism or a part thereof; and
[81761] (b) growing the non-human organism or a part thereof under conditions which permit the production of raffinose or a composition comprising raffinose in said non-human organism or in the culture medium surrounding said non-human organism.

[81762] A further embodiment of the present invention relates to a process for the production of fructose, which comprises
[81763] (a) increasing or generating the activity of a pyruvate kinase non-targeted in a non-human organism or a part thereof, preferably a microorganism, a plant cell, a plant or a part thereof, as compared to a corresponding non-transformed wild type non-human organism or a part thereof; and
[81764] (b) growing the non-human organism or a part thereof under conditions which permit the production of fructose or a composition comprising fructose in said non-human organism or in the culture medium surrounding said non-human organism.

[81765] A further embodiment of the present invention relates to a process for the production of glucose, which comprises
[81766] (a) increasing or generating the activity of a protein phosphatase non-targeted in a non-human organism or a part thereof, preferably a microorganism, a plant cell, a plant or a part thereof, as compared to a corresponding non-transformed wild type non-human organism or a part thereof; and
[81767] (b) growing the non-human organism or a part thereof under conditions which permit the production of glucose or a composition comprising glucose in said non-human organism or in the culture medium surrounding said non-human organism.

[81768] A further embodiment of the present invention relates to a process for the production of myo-inositol, which comprises
[81769] (a) increasing or generating the activity of a protein phosphatase non-targeted in a non-human organism or a part thereof, preferably a microorganism, a plant cell, a plant or a part thereof, as compared to a corresponding non-transformed wild type non-human organism or a part thereof; and
[81770] (b) growing the non-human organism or a part thereof under conditions which permit the production of myo-inositol or a composition comprising myo-inositol in said non-human organism or in the culture medium surrounding said non-human organism.

[81771] A further embodiment of the present invention relates to a process for the production of fructose, which comprises
[81772] (a) increasing or generating the activity of a thioredoxin family protein non-targeted in a non-human organism or a part thereof, preferably a microorganism, a plant cell, a plant or a part thereof, as compared to a corresponding non-transformed wild type non-human organism or a part thereof; and
[81773] (b) growing the non-human organism or a part thereof under conditions which permit the production of fructose or a composition comprising fructose in said non-human organism or in the culture medium surrounding said non-human organism.

[81774] A further embodiment of the present invention relates to a process for the production of glucose, which comprises
[81775] (a) increasing or generating the activity of a thioredoxin family protein non-targeted in a non-human organism or a part thereof, preferably a microorganism, a plant cell, a plant or a part thereof, as compared to a corresponding non-transformed wild type non-human organism or a part thereof; and
[81776] (b) growing the non-human organism or a part thereof under conditions which permit the production of glucose or a composition comprising glucose in said non-human organism or in the culture medium surrounding said non-human organism.

[81777] A further embodiment of the present invention relates to a process for the production of myo-inositol, which comprises
[81778] (a) increasing or generating the activity of a thioredoxin family protein non-targeted in a non-human organism or a part thereof, preferably a microorganism, a plant cell, a plant or a part thereof, as compared to a corresponding non-transformed wild type non-human organism or a part thereof; and
[81779] (b) growing the non-human organism or a part thereof under conditions which permit the production of myo-inositol or a composition comprising myo-inositol in said non-human organism or in the culture medium surrounding said non-human organism.

[81780] A further embodiment of the present invention relates to a process for the production of saccharic acid, which comprises
[81781] (a) increasing or generating the activity of a DNA binding protein non-targeted in a non-human organism or a part thereof, preferably a microorganism, a plant cell, a plant or a part thereof, as compared to a corresponding non-transformed wild type non-human organism or a part thereof; and
[81782] (b) growing the non-human organism or a part thereof under conditions which permit the production of saccharic acid or a composition comprising saccharic acid in said non-human organism or in the culture medium surrounding said non-human organism.

[81783] A further embodiment of the present invention relates to a process for the production of glucose-1-phosphate, which comprises
[81784] (a) increasing or generating the activity of a CCAAT-binding transcription factor non-targeted in a non-human organism or a part thereof, preferably a microorganism, a plant cell, a plant or a part thereof, as compared to a corresponding non-transformed wild type non-human organism or a part thereof; and
[81785] (b) growing the non-human organism or a part thereof under conditions which permit the production of glucose-1-phosphate or a composition comprising glucose-1-phosphate in said non-human organism or in the culture medium surrounding said non-human organism.

[81786] A further embodiment of the present invention relates to a process for the production of raffinose, which comprises
[81787] (a) increasing or generating the activity of a CCAAT-binding transcription factor non-targeted in a non-human organism or a part thereof, preferably a microorganism, a plant cell, a plant or a part thereof, as compared to a corresponding non-transformed wild type non-human organism or a part thereof; and
[81788] (b) growing the non-human organism or a part thereof under conditions which permit the production of raffinose or a composition comprising raffinose in said non-human organism or in the culture medium surrounding said non-human organism.

[81789] A further embodiment of the present invention relates to a process for the production of fructose, which comprises
[81790] (a) increasing or generating the activity of a protein kinase non-targeted in a non-human organism or a part thereof, preferably a microorganism, a plant cell, a plant or a part thereof, as compared to a corresponding non-transformed wild type non-human organism or a part thereof; and
[81791] (b) growing the non-human organism or a part thereof under conditions which permit the production of fructose or a composition comprising fructose in said non-human organism or in the culture medium surrounding said non-human organism.

[81792] A further embodiment of the present invention relates to a process for the production of glucose, which comprises
[81793] (a) increasing or generating the activity of a protein kinase non-targeted in a non-human organism or a part thereof, preferably a microorganism, a plant cell, a plant or a part thereof, as compared to a corresponding non-transformed wild type non-human organism or a part thereof; and
[81794] (b) growing the non-human organism or a part thereof under conditions which permit the production of glucose or a composition comprising glucose in said non-human organism or in the culture medium surrounding said non-human organism.

[81795] A further embodiment of the present invention relates to a process for the production of sedoheptulose-7-phosphate, which comprises
[81796] (a) increasing or generating the activity of a protein kinase non-targeted in a non-human organism or a part thereof, preferably a microorganism, a plant cell, a plant or a part thereof, as compared to a corresponding non-transformed wild type non-human organism or a part thereof; and
[81797] (b) growing the non-human organism or a part thereof under conditions which permit the production of sedoheptulose-7-phosphate or a composition comprising sedoheptulose-7-phosphate in said non-human organism or in the culture medium surrounding said non-human organism.

[81798] A further embodiment of the present invention relates to a process for the production of fructose, which comprises
[81799] (a) increasing or generating the activity of a eukaryotic translation initiation factor non-targeted in a non-human organism or a part thereof, preferably a microorganism, a plant cell, a plant or a part thereof, as compared to a corresponding non-transformed wild type non-human organism or a part thereof; and
[81800] (b) growing the non-human organism or a part thereof under conditions which permit the production of fructose or a composition comprising fructose in said non-human organism or in the culture medium surrounding said non-human organism.

[81801] A further embodiment of the present invention relates to a process for the production of glucose, which comprises
[81802] (a) increasing or generating the activity of a eukaryotic translation initiation factor non-targeted in a non-human organism or a part thereof, preferably a microorganism, a plant cell, a plant or a part thereof, as compared to a corresponding non-transformed wild type non-human organism or a part thereof; and
[81803] (b) growing the non-human organism or a part thereof under conditions which permit the production of glucose or a composition comprising glucose in said non-human organism or in the culture medium surrounding said non-human organism.

[81804] A further embodiment of the present invention relates to a process for the production of raffinose, which comprises
[81805] (a) increasing or generating the activity of a eukaryotic translation initiation factor non-targeted in a non-human organism or a part thereof, preferably a microorganism, a plant cell, a plant or a part thereof, as compared to a corresponding non-transformed wild type non-human organism or a part thereof; and
[81806] (b) growing the non-human organism or a part thereof under conditions which permit the production of raffinose or a composition comprising raffinose in said non-human organism or in the culture medium surrounding said non-human organism.

[81807] A further embodiment of the present invention relates to a process for the production of myo-inositol, which comprises
[81808] (a) increasing or generating the activity of a mitogen-activated protein kinase non-targeted in a non-human organism or a part thereof, preferably a microorganism, a plant cell, a plant or a part thereof, as compared to a corresponding non-transformed wild type non-human organism or a part thereof; and
[81809] (b) growing the non-human organism or a part thereof under conditions which permit the production of myo-inositol or a composition comprising myo-inositol in said non-human organism or in the culture medium surrounding said non-human organism.

[81810] A further embodiment of the present invention relates to a process for the production of sedoheptulose-7-phosphate, which comprises
[81811] (a) increasing or generating the activity of a auxin response factor non-targeted in a non-human organism or a part thereof, preferably a microorganism, a plant cell, a plant or a part thereof, as compared to a corresponding non-transformed wild type non-human organism or a part thereof; and
[81812] (b) growing the non-human organism or a part thereof under conditions which permit the production of sedoheptulose-7-phosphate or a composition comprising sedoheptulose-7-phosphate in said non-human organism or in the culture medium surrounding said non-human organism.

[81813] A further embodiment of the present invention relates to a process for the production of fructose, which comprises
[81814] (a) increasing or generating the activity of a monthiol glutaredoxin non-targeted in a non-human organism or a part thereof, preferably a microorganism, a plant cell, a plant or a part thereof, as compared to a corresponding non-transformed wild type non-human organism or a part thereof; and
[81815] (b) growing the non-human organism or a part thereof under conditions which permit the production of fructose or a composition comprising fructose in said non-human organism or in the culture medium surrounding said non-human organism.

[81816] A further embodiment of the present invention relates to a process for the production of glucose, which comprises
[81817] (a) increasing or generating the activity of a monthiol glutaredoxin non-targeted in a non-human organism or a part thereof, preferably a microorganism, a plant cell, a plant or a part thereof, as compared to a corresponding non-transformed wild type non-human organism or a part thereof; and
[81818] (b) growing the non-human organism or a part thereof under conditions which permit the production of glucose or a composition comprising glucose in said non-human organism or in the culture medium surrounding said non-human organism.

[81819] A further embodiment of the present invention relates to a process for the production of glucose-1-phosphate, which comprises
[81820] (a) increasing or generating the activity of a monthiol glutaredoxin non-targeted in a non-human organism or a part thereof, preferably a microorganism, a plant cell, a plant or a part thereof, as compared to a corresponding non-transformed wild type non-human organism or a part thereof; and
[81821] (b) growing the non-human organism or a part thereof under conditions which permit the production of glucose-1-phosphate or a composition comprising glucose-1-phosphate in said non-human organism or in the culture medium surrounding said non-human organism.

[81822] A further embodiment of the present invention relates to a process for the production of myo-inositol, which comprises
[81823] (a) increasing or generating the activity of a monthiol glutaredoxin non-targeted in a non-human organism or a part thereof, preferably a microorganism, a plant cell, a plant or a part thereof, as compared to a corresponding non-transformed wild type non-human organism or a part thereof; and
[81824] (b) growing the non-human organism or a part thereof under conditions which permit the production of myo-inositol or a composition comprising myo-inositol in said non-human organism or in the culture medium surrounding said non-human organism.

[81825] A further embodiment of the present invention relates to a process for the production of sedoheptulose-7-phosphate, which comprises
[81826] (a) increasing or generating the activity of a monthiol glutaredoxin non-targeted in a non-human organism or a part thereof, preferably a microorganism, a plant cell, a plant or a part thereof, as compared to a corresponding non-transformed wild type non-human organism or a part thereof; and
[81827] (b) growing the non-human organism or a part thereof under conditions which permit the production of sedoheptulose-7-phosphate or a composition comprising sedoheptulose-7-phosphate in said non-human organism or in the culture medium surrounding said non-human organism.

[81828] A further embodiment of the present invention relates to a process for the production of sucrose, which comprises
[81829] (a) increasing or generating the activity of a monthiol glutaredoxin non-targeted in a non-human organism or a part thereof, preferably a microorganism, a plant cell, a plant or a part thereof, as compared to a corresponding non-transformed wild type non-human organism or a part thereof; and
[81830] (b) growing the non-human organism or a part thereof under conditions which permit the production of sucrose or a composition comprising sucrose in said non-human organism or in the culture medium surrounding said non-human organism.

[81831] A further embodiment of the present invention relates to a process for the production of fructose, which comprises
[81832] (a) increasing or generating the activity of a glutaredoxin non-targeted in a non-human organism or a part thereof, preferably a microorganism, a plant cell, a plant or a part thereof, as compared to a corresponding non-transformed wild type non-human organism or a part thereof; and
[81833] (b) growing the non-human organism or a part thereof under conditions which permit the production of fructose or a composition comprising fructose in said non-human organism or in the culture medium surrounding said non-human organism.

[81834] A further embodiment of the present invention relates to a process for the production of glucose, which comprises
[81835] (a) increasing or generating the activity of a glutaredoxin non-targeted in a non-human organism or a part thereof, preferably a microorganism, a plant cell, a plant or a part thereof, as compared to a corresponding non-transformed wild type non-human organism or a part thereof; and
[81836] (b) growing the non-human organism or a part thereof under conditions which permit the production of glucose or a composition comprising glucose in said non-human organism or in the culture medium surrounding said non-human organism.

[81837] A further embodiment of the present invention relates to a process for the production of glucose-1-phosphate, which comprises
[81838] (a) increasing or generating the activity of a glutaredoxin non-targeted in a non-human organism or a part thereof, preferably a microorganism, a plant cell, a plant or a part thereof, as compared to a corresponding non-transformed wild type non-human organism or a part thereof; and
[81839] (b) growing the non-human organism or a part thereof under conditions which permit the production of glucose-1-phosphate or a composition comprising glucose-1-phosphate in said non-human organism or in the culture medium surrounding said non-human organism.

[81840] A further embodiment of the present invention relates to a process for the production of myo-inositol, which comprises
[81841] (a) increasing or generating the activity of a glutaredoxin non-targeted in a non-human organism or a part thereof, preferably a microorganism, a plant cell, a plant or a part thereof, as compared to a corresponding non-transformed wild type non-human organism or a part thereof; and
[81842] (b) growing the non-human organism or a part thereof under conditions which permit the production of myo-inositol or a composition comprising myo-inositol in said non-human organism or in the culture medium surrounding said non-human organism.

[81843] A further embodiment of the present invention relates to a process for the production of sedoheptulose-7-phosphate, which comprises
[81844] (a) increasing or generating the activity of a glutaredoxin non-targeted in a non-human organism or a part thereof, preferably a microorganism, a plant cell, a plant or a part thereof, as compared to a corresponding non-transformed wild type non-human organism or a part thereof; and
[81845] (b) growing the non-human organism or a part thereof under conditions which permit the production of sedoheptulose-7-phosphate or a composition comprising sedoheptulose-7-phosphate in said non-human organism or in the culture medium surrounding said non-human organism.

[81846] A further embodiment of the present invention relates to a process for the production of sucrose, which comprises
[81847] (a) increasing or generating the activity of a glutaredoxin non-targeted in a non-human organism or a part thereof, preferably a microorganism, a plant cell, a plant or a part thereof, as compared to a corresponding non-transformed wild type non-human organism or a part thereof; and
[81848] (b) growing the non-human organism or a part thereof under conditions which permit the production of sucrose or a composition comprising sucrose in said non-human organism or in the culture medium surrounding said non-human organism.

[81849] A further embodiment of the present invention relates to a process for the production of glucose-1-phosphate, which comprises
[81850] (a) increasing or generating the activity of a transcription factor non-targeted in a non-human organism or a part thereof, preferably a microorganism, a plant cell, a plant or a part thereof, as compared to a corresponding non-transformed wild type non-human organism or a part thereof; and
[81851] (b) growing the non-human organism or a part thereof under conditions which permit the production of glucose-1-phosphate or a composition comprising glucose-1-phosphate in said non-human organism or in the culture medium surrounding said non-human organism.

[81852] A further embodiment of the present invention relates to a process for the production of fructose, which comprises
[81853] (a) increasing or generating the activity of a monothiol glutaredoxin non-targeted in a non-human organism or a part thereof, preferably a microorganism, a plant cell, a plant or a part thereof, as compared to a corresponding non-transformed wild type non-human organism or a part thereof; and
[81854] (b) growing the non-human organism or a part thereof under conditions which permit the production of fructose or a composition comprising fructose in said non-human organism or in the culture medium surrounding said non-human organism.

[81855] A further embodiment of the present invention relates to a process for the production of glucose, which comprises
[81856] (a) increasing or generating the activity of a monothiol glutaredoxin non-targeted in a non-human organism or a part thereof, preferably a microorganism, a plant cell, a plant or a part thereof, as compared to a corresponding non-transformed wild type non-human organism or a part thereof; and
[81857] (b) growing the non-human organism or a part thereof under conditions which permit the production of glucose or a composition comprising glucose in said non-human organism or in the culture medium surrounding said non-human organism.

[81858] A further embodiment of the present invention relates to a process for the production of glucose-1-phosphate, which comprises
[81859] (a) increasing or generating the activity of a monothiol glutaredoxin non-targeted in a non-human organism or a part thereof, preferably a microorganism, a plant cell, a plant or a part thereof, as compared to a corresponding non-transformed wild type non-human organism or a part thereof; and
[81860] (b) growing the non-human organism or a part thereof under conditions which permit the production of glucose-1-phosphate or a composition comprising glucose-1-phosphate in said non-human organism or in the culture medium surrounding said non-human organism.

[81861] A further embodiment of the present invention relates to a process for the production of myo-inositol, which comprises
[81862] (a) increasing or generating the activity of a monothiol glutaredoxin non-targeted in a non-human organism or a part thereof, preferably a microorganism, a plant cell, a plant or a part thereof, as compared to a corresponding non-transformed wild type non-human organism or a part thereof; and
[81863] (b) growing the non-human organism or a part thereof under conditions which permit the production of myo-inositol or a composition comprising myo-inositol in said non-human organism or in the culture medium surrounding said non-human organism.

[81864] A further embodiment of the present invention relates to a process for the production of sedoheptulose-7-phosphate, which comprises
[81865] (a) increasing or generating the activity of a monothiol glutaredoxin non-targeted in a non-human organism or a part thereof, preferably a microorganism, a plant cell, a plant or a part thereof, as compared to a corresponding non-transformed wild type non-human organism or a part thereof; and
[81866] (b) growing the non-human organism or a part thereof under conditions which permit the production of sedoheptulose-7-phosphate or a composition comprising sedoheptulose-7-phosphate in said non-human organism or in the culture medium surrounding said non-human organism.

[81867] A further embodiment of the present invention relates to a process for the production of sucrose, which comprises
[81868] (a) increasing or generating the activity of a monothiol glutaredoxin non-targeted in a non-human organism or a part thereof, preferably a microorganism, a plant cell, a plant or a part thereof, as compared to a corresponding non-transformed wild type non-human organism or a part thereof; and
[81869] (b) growing the non-human organism or a part thereof under conditions which permit the production of sucrose or a composition comprising sucrose in said non-human organism or in the culture medium surrounding said non-human organism.

[81870] A further embodiment of the present invention relates to a process for the production of fructose, which comprises
[81871] (a) increasing or generating the activity of a monothiol glutaredoxin non-targeted in a non-human organism or a part thereof, preferably a microorganism, a plant cell, a plant or a part thereof, as compared to a corresponding non-transformed wild type non-human organism or a part thereof; and
[81872] (b) growing the non-human organism or a part thereof under conditions which permit the production of fructose or a composition comprising fructose in said non-human organism or in the culture medium surrounding said non-human organism.

[81873] A further embodiment of the present invention relates to a process for the production of glucose, which comprises
[81874] (a) increasing or generating the activity of a monothiol glutaredoxin non-targeted in a non-human organism or a part thereof, preferably a microorganism, a plant cell, a plant or a part thereof, as compared to a corresponding non-transformed wild type non-human organism or a part thereof; and
[81875] (b) growing the non-human organism or a part thereof under conditions which permit the production of glucose or a composition comprising glucose in said non-human organism or in the culture medium surrounding said non-human organism.

[81876] A further embodiment of the present invention relates to a process for the production of glucose-1-phosphate, which comprises
[81877] (a) increasing or generating the activity of a monothiol glutaredoxin non-targeted in a non-human organism or a part thereof, preferably a microorganism, a plant cell, a plant or a part thereof, as compared to a corresponding non-transformed wild type non-human organism or a part thereof; and
[81878] (b) growing the non-human organism or a part thereof under conditions which permit the production of glucose-1-phosphate or a composition comprising glucose-1-phosphate in said non-human organism or in the culture medium surrounding said non-human organism.

[81879] A further embodiment of the present invention relates to a process for the production of myo-inositol, which comprises
[81880] (a) increasing or generating the activity of a monothiol glutaredoxin non-targeted in a non-human organism or a part thereof, preferably a microorganism, a plant cell, a plant or a part thereof, as compared to a corresponding non-transformed wild type non-human organism or a part thereof; and
[81881] (b) growing the non-human organism or a part thereof under conditions which permit the production of myo-inositol or a composition comprising myo-inositol in said non-human organism or in the culture medium surrounding said non-human organism.

[81882] A further embodiment of the present invention relates to a process for the production of sedoheptulose-7-phosphate, which comprises
[81883] (a) increasing or generating the activity of a monothiol glutaredoxin non-targeted in a non-human organism or a part thereof, preferably a microorganism, a plant cell, a plant or a part thereof, as compared to a corresponding non-transformed wild type non-human organism or a part thereof; and
[81884] (b) growing the non-human organism or a part thereof under conditions which permit the production of sedoheptulose-7-phosphate or a composition comprising sedoheptulose-7-phosphate in said non-human organism or in the culture medium surrounding said non-human organism.

[81885] A further embodiment of the present invention relates to a process for the production of sucrose, which comprises
[81886] (a) increasing or generating the activity of a monothiol glutaredoxin non-targeted in a non-human organism or a part thereof, preferably a microorganism, a plant cell, a plant or a part thereof, as compared to a corresponding non-transformed wild type non-human organism or a part thereof; and
[81887] (b) growing the non-human organism or a part thereof under conditions which permit the production of sucrose or a composition comprising sucrose in said non-human organism or in the culture medium surrounding said non-human organism.

[81888] A further embodiment of the present invention relates to a process for the production of fructose, which comprises
[81889] (a) increasing or generating the activity of a monothiol glutaredoxin non-targeted in a non-human organism or a part thereof, preferably a microorganism, a plant cell, a plant or a part thereof, as compared to a corresponding non-transformed wild type non-human organism or a part thereof; and
[81890] (b) growing the non-human organism or a part thereof under conditions which permit the production of fructose or a composition comprising fructose in said non-human organism or in the culture medium surrounding said non-human organism.

[81891] A further embodiment of the present invention relates to a process for the production of glucose, which comprises
[81892] (a) increasing or generating the activity of a monothiol glutaredoxin non-targeted in a non-human organism or a part thereof, preferably a microorganism, a plant cell, a plant or a part thereof, as compared to a corresponding non-transformed wild type non-human organism or a part thereof; and
[81893] (b) growing the non-human organism or a part thereof under conditions which permit the production of glucose or a composition comprising glucose in said non-human organism or in the culture medium surrounding said non-human organism.

[81894] A further embodiment of the present invention relates to a process for the production of glucose-1-phosphate, which comprises
[81895] (a) increasing or generating the activity of a monothiol glutaredoxin non-targeted in a non-human organism or a part thereof, preferably a microorganism, a plant cell, a plant or a part thereof, as compared to a corresponding non-transformed wild type non-human organism or a part thereof; and
[81896] (b) growing the non-human organism or a part thereof under conditions which permit the production of glucose-1-phosphate or a composition comprising glucose-1-phosphate in said non-human organism or in the culture medium surrounding said non-human organism.

[81897] A further embodiment of the present invention relates to a process for the production of myo-inositol, which comprises
[81898] (a) increasing or generating the activity of a monothiol glutaredoxin non-targeted in a non-human organism or a part thereof, preferably a microorganism, a plant cell, a plant or a part thereof, as compared to a corresponding non-transformed wild type non-human organism or a part thereof; and
[81899] (b) growing the non-human organism or a part thereof under conditions which permit the production of myo-inositol or a composition comprising myo-inositol in said non-human organism or in the culture medium surrounding said non-human organism.

[81900] A further embodiment of the present invention relates to a process for the production of sucrose, which comprises
[81901] (a) increasing or generating the activity of a monothiol glutaredoxin non-targeted in a non-human organism or a part thereof, preferably a microorganism, a plant cell, a plant or a part thereof, as compared to a corresponding non-transformed wild type non-human organism or a part thereof; and
[81902] (b) growing the non-human organism or a part thereof under conditions which permit the production of sucrose or a composition comprising sucrose in said non-human organism or in the culture medium surrounding said non-human organism.

[81903] A further embodiment of the present invention relates to a process for the production of fructose, which comprises
[81904] (a) increasing or generating the activity of a monothiol glutaredoxin non-targeted in a non-human organism or a part thereof, preferably a microorganism, a plant cell, a plant or a part thereof, as compared to a corresponding non-transformed wild type non-human organism or a part thereof; and
[81905] (b) growing the non-human organism or a part thereof under conditions which permit the production of fructose or a composition comprising fructose in said non-human organism or in the culture medium surrounding said non-human organism.

[81906] A further embodiment of the present invention relates to a process for the production of glucose, which comprises
[81907] (a) increasing or generating the activity of a monothiol glutaredoxin non-targeted in a non-human organism or a part thereof, preferably a microorganism, a plant cell, a plant or a part thereof, as compared to a corresponding non-transformed wild type non-human organism or a part thereof; and
[81908] (b) growing the non-human organism or a part thereof under conditions which permit the production of glucose or a composition comprising glucose in said non-human organism or in the culture medium surrounding said non-human organism.

[81909] A further embodiment of the present invention relates to a process for the production of sedoheptulose-7-phosphate, which comprises
[81910] (a) increasing or generating the activity of a monothiol glutaredoxin non-targeted in a non-human organism or a part thereof, preferably a microorganism, a plant cell, a plant or a part thereof, as compared to a corresponding non-transformed wild type non-human organism or a part thereof; and
[81911] (b) growing the non-human organism or a part thereof under conditions which permit the production of sedoheptulose-7-phosphate or a composition comprising sedoheptulose-7-phosphate in said non-human organism or in the culture medium surrounding said non-human organism.

[81912] A further embodiment of the present invention relates to a process for the production of sucrose, which comprises
[81913] (a) increasing or generating the activity of a monothiol glutaredoxin non-targeted in a non-human organism or a part thereof, preferably a microorganism, a plant cell, a plant or a part thereof, as compared to a corresponding non-transformed wild type non-human organism or a part thereof; and
[81914] (b) growing the non-human organism or a part thereof under conditions which permit the production of sucrose or a composition comprising sucrose in said non-human organism or in the culture medium surrounding said non-human organism.

[81915] A further embodiment of the present invention relates to a process for the production of myo-inositol, which comprises
[81916] (a) increasing or generating the activity of a protein phosphatase non-targeted in a non-human organism or a part thereof, preferably a microorganism, a plant cell, a plant or a part thereof, as compared to a corresponding non-transformed wild type non-human organism or a part thereof; and
[81917] (b) growing the non-human organism or a part thereof under conditions which permit the production of myo-inositol or a composition comprising myo-inositol in said non-human organism or in the culture medium surrounding said non-human organism.

[81918] A further embodiment of the present invention relates to a process for the production of fructose, which comprises
[81919] (a) increasing or generating the activity of a glutaredoxin non-targeted in a non-human organism or a part thereof, preferably a microorganism, a plant cell, a plant or a part thereof, as compared to a corresponding non-transformed wild type non-human organism or a part thereof; and
[81920] (b) growing the non-human organism or a part thereof under conditions which permit the production of fructose or a composition comprising fructose in said non-human organism or in the culture medium surrounding said non-human organism.

[81921] A further embodiment of the present invention relates to a process for the production of glucose, which comprises
[81922] (a) increasing or generating the activity of a glutaredoxin non-targeted in a non-human organism or a part thereof, preferably a microorganism, a plant cell, a plant or a part thereof, as compared to a corresponding non-transformed wild type non-human organism or a part thereof; and
[81923] (b) growing the non-human organism or a part thereof under conditions which permit the production of glucose or a composition comprising glucose in said non-human organism or in the culture medium surrounding said non-human organism.

[81924] A further embodiment of the present invention relates to a process for the production of glucose-1-phosphate, which comprises
[81925] (a) increasing or generating the activity of a glutaredoxin non-targeted in a non-human organism or a part thereof, preferably a microorganism, a plant cell, a plant or a part thereof, as compared to a corresponding non-transformed wild type non-human organism or a part thereof; and
[81926] (b) growing the non-human organism or a part thereof under conditions which permit the production of glucose-1-phosphate or a composition comprising glucose-1-phosphate in said non-human organism or in the culture medium surrounding said non-human organism.

[81927] A further embodiment of the present invention relates to a process for the production of myo-inositol, which comprises
[81928] (a) increasing or generating the activity of a glutaredoxin non-targeted in a non-human organism or a part thereof, preferably a microorganism, a plant cell, a plant or a part thereof, as compared to a corresponding non-transformed wild type non-human organism or a part thereof; and
[81929] (b) growing the non-human organism or a part thereof under conditions which permit the production of myo-inositol or a composition comprising myo-inositol in said non-human organism or in the culture medium surrounding said non-human organism.

[81930] A further embodiment of the present invention relates to a process for the production of sedoheptulose-7-phosphate, which comprises
[81931] (a) increasing or generating the activity of a glutaredoxin non-targeted in a non-human organism or a part thereof, preferably a microorganism, a plant cell, a plant or a part thereof, as compared to a corresponding non-transformed wild type non-human organism or a part thereof; and
[81932] (b) growing the non-human organism or a part thereof under conditions which permit the production of sedoheptulose-7-phosphate or a composition comprising sedoheptulose-7-phosphate in said non-human organism or in the culture medium surrounding said non-human organism.

[81933] A further embodiment of the present invention relates to a process for the production of sucrose, which comprises
[81934] (a) increasing or generating the activity of a glutaredoxin non-targeted in a non-human organism or a part thereof, preferably a microorganism, a plant cell, a plant or a part thereof, as compared to a corresponding non-transformed wild type non-human organism or a part thereof; and
[81935] (b) growing the non-human organism or a part thereof under conditions which permit the production of sucrose or a composition comprising sucrose in said non-human organism or in the culture medium surrounding said non-human organism.

[81936] A further embodiment of the present invention relates to a process for the production of glucose-1-phosphate, which comprises
[81937] (a) increasing or generating the activity of a cyclin D non-targeted in a non-human organism or a part thereof, preferably a microorganism, a plant cell, a plant or a part thereof, as compared to a corresponding non-transformed wild type non-human organism or a part thereof; and
[81938] (b) growing the non-human organism or a part thereof under conditions which permit the production of glucose-1-phosphate or a composition comprising glucose-1-phosphate in said non-human organism or in the culture medium surrounding said non-human organism.

[81939] A further embodiment of the present invention relates to a process for the production of raffinose, which comprises
[81940] (a) increasing or generating the activity of a cyclin D non-targeted in a non-human organism or a part thereof, preferably a microorganism, a plant cell, a plant or a part thereof, as compared to a corresponding non-transformed wild type non-human organism or a part thereof; and
[81941] (b) growing the non-human organism or a part thereof under conditions which permit the production of raffinose or a composition comprising raffinose in said non-human organism or in the culture medium surrounding said non-human organism.

[81942] A further embodiment of the present invention relates to a process for the production of sucrose, which comprises
[81943] (a) increasing or generating the activity of a cyclin D non-targeted in a non-human organism or a part thereof, preferably a microorganism, a plant cell, a plant or a part thereof, as compared to a corresponding non-transformed wild type non-human organism or a part thereof; and
[81944] (b) growing the non-human organism or a part thereof under conditions which permit the production of sucrose or a composition comprising sucrose in said non-human organism or in the culture medium surrounding said non-human organism.

[81945] A further embodiment of the present invention relates to a process for the production of fructose, which comprises
[81946] (a) increasing or generating the activity of a calcium-dependent protein kinase non-targeted in a non-human organism or a part thereof, preferably a microorganism, a plant cell, a plant or a part thereof, as compared to a corresponding non-transformed wild type non-human organism or a part thereof; and
[81947] (b) growing the non-human organism or a part thereof under conditions which permit the production of fructose or a composition comprising fructose in said non-human organism or in the culture medium surrounding said non-human organism.

[81948] A further embodiment of the present invention relates to a process for the production of glucose-1-phosphate, which comprises
[81949] (a) increasing or generating the activity of a calcium-dependent protein kinase non-targeted in a non-human organism or a part thereof, preferably a microorganism, a plant cell, a plant or a part thereof, as compared to a corresponding non-transformed wild type non-human organism or a part thereof; and
[81950] (b) growing the non-human organism or a part thereof under conditions which permit the production of glucose-1-phosphate or a composition comprising glucose-1-phosphate in said non-human organism or in the culture medium surrounding said non-human organism.

[81951] A further embodiment of the present invention relates to a process for the production of raffinose, which comprises
[81952] (a) increasing or generating the activity of a calcium-dependent protein kinase non-targeted in a non-human organism or a part thereof, preferably a microorganism, a plant cell, a plant or a part thereof, as compared to a corresponding non-transformed wild type non-human organism or a part thereof; and
[81953] (b) growing the non-human organism or a part thereof under conditions which permit the production of raffinose or a composition comprising raffinose in said non-human organism or in the culture medium surrounding said non-human organism.

[81954] A further embodiment of the present invention relates to a process for the production of myo-inositol, which comprises
[81955] (a) increasing or generating the activity of a protein phosphatase non-targeted in a non-human organism or a part thereof, preferably a microorganism, a plant cell, a plant or a part thereof, as compared to a corresponding non-transformed wild type non-human organism or a part thereof; and
[81956] (b) growing the non-human organism or a part thereof under conditions which permit the production of myo-inositol or a composition comprising myo-inositol in said non-human organism or in the culture medium surrounding said non-human organism.

[81957] A further embodiment of the present invention relates to a process for the production of fructose, which comprises
[81958] (a) increasing or generating the activity of a heat shock transcription factor non-targeted in a non-human organism or a part thereof, preferably a microorganism, a plant cell, a plant or a part thereof, as compared to a corresponding non-transformed wild type non-human organism or a part thereof; and
[81959] (b) growing the non-human organism or a part thereof under conditions which permit the production of fructose or a composition comprising fructose in said non-human organism or in the culture medium surrounding said non-human organism.

[81960] A further embodiment of the present invention relates to a process for the production of glucose, which comprises
[81961] (a) increasing or generating the activity of a heat shock transcription factor non-targeted in a non-human organism or a part thereof, preferably a microorganism, a plant cell, a plant or a part thereof, as compared to a corresponding non-transformed wild type non-human organism or a part thereof; and
[81962] (b) growing the non-human organism or a part thereof under conditions which permit the production of glucose or a composition comprising glucose in said non-human organism or in the culture medium surrounding said non-human organism.

[81963] A further embodiment of the present invention relates to a process for the production of glucose-1-phosphate, which comprises
[81964] (a) increasing or generating the activity of a heat shock transcription factor non-targeted in a non-human organism or a part thereof, preferably a microorganism, a plant cell, a plant or a part thereof, as compared to a corresponding non-transformed wild type non-human organism or a part thereof; and
[81965] (b) growing the non-human organism or a part thereof under conditions which permit the production of glucose-1-phosphate or a composition comprising glucose-1-phosphate in said non-human organism or in the culture medium surrounding said non-human organism.

[81966] A further embodiment of the present invention relates to a process for the production of myo-inositol, which comprises
[81967] (a) increasing or generating the activity of a heat shock transcription factor non-targeted in a non-human organism or a part thereof, preferably a microorganism, a plant cell, a plant or a part thereof, as compared to a corresponding non-transformed wild type non-human organism or a part thereof; and
[81968] (b) growing the non-human organism or a part thereof under conditions which permit the production of myo-inositol or a composition comprising myo-inositol in said non-human organism or in the culture medium surrounding said non-human organism.

[81969] A further embodiment of the present invention relates to a process for the production of raffinose, which comprises
[81970] (a) increasing or generating the activity of a heat shock transcription factor non-targeted in a non-human organism or a part thereof, preferably a microorganism, a plant cell, a plant or a part thereof, as compared to a corresponding non-transformed wild type non-human organism or a part thereof; and
[81971] (b) growing the non-human organism or a part thereof under conditions which permit the production of raffinose or a composition comprising raffinose in said non-human organism or in the culture medium surrounding said non-human organism.

[81972] A further embodiment of the present invention relates to a process for the production of sucrose, which comprises
[81973] (a) increasing or generating the activity of a heat shock transcription factor non-targeted in a non-human organism or a part thereof, preferably a microorganism, a plant cell, a plant or a part thereof, as compared to a corresponding non-transformed wild type non-human organism or a part thereof; and
[81974] (b) growing the non-human organism or a part thereof under conditions which permit the production of sucrose or a composition comprising sucrose in said non-human organism or in the culture medium surrounding said non-human organism.

[81975] A further embodiment of the present invention relates to a process for the production of myo-inositol, which comprises
[81976] (a) increasing or generating the activity of a gibberellin 20-oxidase non-targeted in a non-human organism or a part thereof, preferably a microorganism, a plant cell, a plant or a part thereof, as compared to a corresponding non-transformed wild type non-human organism or a part thereof; and
[81977] (b) growing the non-human organism or a part thereof under conditions which permit the production of myo-inositol or a composition comprising myo-inositol in said non-human organism or in the culture medium surrounding said non-human organism.

[81978] A further embodiment of the present invention relates to a process for the production of myo-inositol, which comprises
[81979] (a) increasing or generating the activity of a inositol-3-phosphate synthase non-targeted in a non-human organism or a part thereof, preferably a microorganism, a plant cell, a plant or a part thereof, as compared to a corresponding non-transformed wild type non-human organism or a part thereof; and
[81980] (b) growing the non-human organism or a part thereof under conditions which permit the production of myo-inositol or a composition comprising myo-inositol in said non-human organism or in the culture medium surrounding said non-human organism.

[81981] A further embodiment of the present invention relates to a process for the production of raffinose, which comprises
[81982] (a) increasing or generating the activity of a inositol-3-phosphate synthase non-targeted in a non-human organism or a part thereof, preferably a microorganism, a plant cell, a plant or a part thereof, as compared to a corresponding non-transformed wild type non-human organism or a part thereof; and
[81983] (b) growing the non-human organism or a part thereof under conditions which permit the production of raffinose or a composition comprising raffinose in said non-human organism or in the culture medium surrounding said non-human organism.

[81984] A further embodiment of the present invention relates to a process for the production of glucose, which comprises
[81985] (a) increasing or generating the activity of a glutaredoxin non-targeted in a non-human organism or a part thereof, preferably a microorganism, a plant cell, a plant or a part thereof, as compared to a corresponding non-transformed wild type non-human organism or a part thereof; and
[81986] (b) growing the non-human organism or a part thereof under conditions which permit the production of glucose or a composition comprising glucose in said non-human organism or in the culture medium surrounding said non-human organism.

[81987] A further embodiment of the present invention relates to a process for the production of fructose, which comprises
[81988] (a) increasing or generating the activity of a At5g16650-protein non-targeted in a non-human organism or a part thereof, preferably a microorganism, a plant cell, a plant or a part thereof, as compared to a corresponding non-transformed wild type non-human organism or a part thereof; and
[81989] (b) growing the non-human organism or a part thereof under conditions which permit the production of fructose or a composition comprising fructose in said non-human organism or in the culture medium surrounding said non-human organism.

[81990] A further embodiment of the present invention relates to a process for the production of fructose, which comprises
[81991] (a) increasing or generating the activity of a monothiol glutaredoxin non-targeted in a non-human organism or a part thereof, preferably a microorganism, a plant cell, a plant or a part thereof, as compared to a corresponding non-transformed wild type non-human organism or a part thereof; and
[81992] (b) growing the non-human organism or a part thereof under conditions which permit the production of fructose or a composition comprising fructose in said non-human organism or in the culture medium surrounding said non-human organism.

[81993] A further embodiment of the present invention relates to a process for the production of glucose, which comprises
[81994] (a) increasing or generating the activity of a monothiol glutaredoxin non-targeted in a non-human organism or a part thereof, preferably a microorganism, a plant cell, a plant or a part thereof, as compared to a corresponding non-transformed wild type non-human organism or a part thereof; and
[81995] (b) growing the non-human organism or a part thereof under conditions which permit the production of glucose or a composition comprising glucose in said non-human organism or in the culture medium surrounding said non-human organism.

[81996] A further embodiment of the present invention relates to a process for the production of myo-inositol, which comprises
[81997] (a) increasing or generating the activity of a monothiol glutaredoxin non-targeted in a non-human organism or a part thereof, preferably a microorganism, a plant cell, a plant or a part thereof, as compared to a corresponding non-transformed wild type non-human organism or a part thereof; and
[81998] (b) growing the non-human organism or a part thereof under conditions which permit the production of myo-inositol or a composition comprising myo-inositol in said non-human organism or in the culture medium surrounding said non-human organism.

[81999] A further embodiment of the present invention relates to a process for the production of sedoheptulose-7-phosphate, which comprises
[82000] (a) increasing or generating the activity of a monothiol glutaredoxin non-targeted in a non-human organism or a part thereof, preferably a microorganism, a plant cell, a plant or a part thereof, as compared to a corresponding non-transformed wild type non-human organism or a part thereof; and
[82001] (b) growing the non-human organism or a part thereof under conditions which permit the production of sedoheptulose-7-phosphate or a composition comprising sedoheptulose-7-phosphate in said non-human organism or in the culture medium surrounding said non-human organism.

[82002] A further embodiment of the present invention relates to a process for the production of sucrose, which comprises
[82003] (a) increasing or generating the activity of a monothiol glutaredoxin non-targeted in a non-human organism or a part thereof, preferably a microorganism, a plant cell, a plant or a part thereof, as compared to a corresponding non-transformed wild type non-human organism or a part thereof; and
[82004] (b) growing the non-human organism or a part thereof under conditions which permit the production of sucrose or a composition comprising sucrose in said non-human organism or in the culture medium surrounding said non-human organism.

[82005] A further embodiment of the present invention relates to a process for the production of fructose, which comprises
[82006] (a) increasing or generating the activity of a transcription factor non-targeted in a non-human organism or a part thereof, preferably a microorganism, a plant cell, a plant or a part thereof, as compared to a corresponding non-transformed wild type non-human organism or a part thereof; and
[82007] (b) growing the non-human organism or a part thereof under conditions which permit the production of fructose or a composition comprising fructose in said non-human organism or in the culture medium surrounding said non-human organism.

[82008] A further embodiment of the present invention relates to a process for the production of glucose-1-phosphate, which comprises
[82009] (a) increasing or generating the activity of a At5g43630-protein non-targeted in a non-human organism or a part thereof, preferably a microorganism, a plant cell, a plant or a part thereof, as compared to a corresponding non-transformed wild type non-human organism or a part thereof; and
[82010] (b) growing the non-human organism or a part thereof under conditions which permit the production of glucose-1-phosphate or a composition comprising glucose-1-phosphate in said non-human organism or in the culture medium surrounding said non-human organism.

[82011] A further embodiment of the present invention relates to a process for the production of myo-inositol, which comprises
[82012] (a) increasing or generating the activity of a heat shock transcription factor non-targeted in a non-human organism or a part thereof, preferably a microorganism, a plant cell, a plant or a part thereof, as compared to a corresponding non-transformed wild type non-human organism or a part thereof; and
[82013] (b) growing the non-human organism or a part thereof under conditions which permit the production of myo-inositol or a composition comprising myo-inositol in said non-human organism or in the culture medium surrounding said non-human organism.

[82014] A further embodiment of the present invention relates to a process for the production of raffinose, which comprises
[82015] (a) increasing or generating the activity of a heat shock transcription factor non-targeted in a non-human organism or a part thereof, preferably a microorganism, a plant cell, a plant or a part thereof, as compared to a corresponding non-transformed wild type non-human organism or a part thereof; and
[82016] (b) growing the non-human organism or a part thereof under conditions which permit the production of raffinose or a composition comprising raffinose in said non-human organism or in the culture medium surrounding said non-human organism.

[82017] A further embodiment of the present invention relates to a process for the production of glucose-1-phosphate, which comprises
[82018] (a) increasing or generating the activity of a protein phosphatase non-targeted in a non-human organism or a part thereof, preferably a microorganism, a plant cell, a plant or a part thereof, as compared to a corresponding non-transformed wild type non-human organism or a part thereof; and
[82019] (b) growing the non-human organism or a part thereof under conditions which permit the production of glucose-1-phosphate or a composition comprising glucose-1-phosphate in said non-human organism or in the culture medium surrounding said non-human organism.

[82020] A further embodiment of the present invention relates to a process for the production of myo-inositol, which comprises
[82021] (a) increasing or generating the activity of a protein phosphatase non-targeted in a non-human organism or a part thereof, preferably a microorganism, a plant cell, a plant or a part thereof, as compared to a corresponding non-transformed wild type non-human organism or a part thereof; and
[82022] (b) growing the non-human organism or a part thereof under conditions which permit the production of myo-inositol or a composition comprising myo-inositol in said non-human organism or in the culture medium surrounding said non-human organism.

[82023] A further embodiment of the present invention relates to a process for the production of fructose, which comprises
[82024] (a) increasing or generating the activity of a RNA-binding protein non-targeted in a non-human organism or a part thereof, preferably a microorganism, a plant cell, a plant or a part thereof, as compared to a corresponding non-transformed wild type non-human organism or a part thereof; and
[82025] (b) growing the non-human organism or a part thereof under conditions which permit the production of fructose or a composition comprising fructose in said non-human organism or in the culture medium surrounding said non-human organism.

[82026] A further embodiment of the present invention relates to a process for the production of glucose, which comprises
[82027] (a) increasing or generating the activity of a RNA-binding protein non-targeted in a non-human organism or a part thereof, preferably a microorganism, a plant cell, a plant or a part thereof, as compared to a corresponding non-transformed wild type non-human organism or a part thereof; and
[82028] (b) growing the non-human organism or a part thereof under conditions which permit the production of glucose or a composition comprising glucose in said non-human organism or in the culture medium surrounding said non-human organism.

[82029] A further embodiment of the present invention relates to a process for the production of fructose, which comprises
[82030] (a) increasing or generating the activity of a MADS-box transcription factor non-targeted in a non-human organism or a part thereof, preferably a microorganism, a plant cell, a plant or a part thereof, as compared to a corresponding non-transformed wild type non-human organism or a part thereof; and
[82031] (b) growing the non-human organism or a part thereof under conditions which permit the production of fructose or a composition comprising fructose in said non-human organism or in the culture medium surrounding said non-human organism.

[82032] A further embodiment of the present invention relates to a process for the production of raffinose, which comprises
[82033] (a) increasing or generating the activity of a MADS-box transcription factor non-targeted in a non-human organism or a part thereof, preferably a microorganism, a plant cell, a plant or a part thereof, as compared to a corresponding non-transformed wild type non-human organism or a part thereof; and
[82034] (b) growing the non-human organism or a part thereof under conditions which permit the production of raffinose or a composition comprising raffinose in said non-human organism or in the culture medium surrounding said non-human organism.

[82035] A further embodiment of the present invention relates to a process for the production of saccharic acid, which comprises
[82036] (a) increasing or generating the activity of a MADS-box transcription factor non-targeted in a non-human organism or a part thereof, preferably a microorganism, a plant cell, a plant or a part thereof, as compared to a corresponding non-transformed wild type non-human organism or a part thereof; and
[82037] (b) growing the non-human organism or a part thereof under conditions which permit the production of saccharic acid or a composition comprising saccharic acid in said non-human organism or in the culture medium surrounding said non-human organism.

[82038] A further embodiment of the present invention relates to a process for the production of glucose-1-phosphate, which comprises
[82039] (a) increasing or generating the activity of a protein kinase non-targeted in a non-human organism or a part thereof, preferably a microorganism, a plant cell, a plant or a part thereof, as compared to a corresponding non-transformed wild type non-human organism or a part thereof; and
[82040] (b) growing the non-human organism or a part thereof under conditions which permit the production of glucose-1-phosphate or a composition comprising glucose-1-phosphate in said non-human organism or in the culture medium surrounding said non-human organism.

[82041] A further embodiment of the present invention relates to a process for the production of raffinose, which comprises
[82042] (a) increasing or generating the activity of a glycosyl transferase non-targeted in a non-human organism or a part thereof, preferably a microorganism, a plant cell, a plant or a part thereof, as compared to a corresponding non-transformed wild type non-human organism or a part thereof; and
[82043] (b) growing the non-human organism or a part thereof under conditions which permit the production of raffinose or a composition comprising raffinose in said non-human organism or in the culture medium surrounding said non-human organism.

[82044] A further embodiment of the present invention relates to a process for the production of sucrose, which comprises
[82045] (a) increasing or generating the activity of a sec-independent protein translocase non-targeted in a non-human organism or a part thereof, preferably a microorganism, a plant cell, a plant or a part thereof, as compared to a corresponding non-transformed wild type non-human organism or a part thereof; and
[82046] (b) growing the non-human organism or a part thereof under conditions which permit the production of sucrose or a composition comprising sucrose in said non-human organism or in the culture medium surrounding said non-human organism.

[82047] A further embodiment of the present invention relates to a process for the production of 3,4,5-trihydroxypentanoic acid, which comprises
[82048] (a) increasing or generating the activity of a beta-hydroxylase non-targeted in a non-human organism or a part thereof, preferably a microorganism, a plant cell, a plant or a part thereof, as compared to a corresponding non-transformed wild type non-human organism or a part thereof; and
[82049] (b) growing the non-human organism or a part thereof under conditions which permit the production of 3,4,5-trihydroxypentanoic acid or a composition comprising 3,4,5-trihydroxypentanoic acid in said non-human organism or in the culture medium surrounding said non-human organism.

[82050] A further embodiment of the present invention relates to a process for the production of fructose, which comprises
[82051] (a) increasing or generating the activity of a elongation factor Tu non-targeted in a non-human organism or a part thereof, preferably a microorganism, a plant cell, a plant or a part thereof, as compared to a corresponding non-transformed wild type non-human organism or a part thereof; and
[82052] (b) growing the non-human organism or a part thereof under conditions which permit the production of fructose or a composition comprising fructose in said non-human organism or in the culture medium surrounding said non-human organism.

[82053] A further embodiment of the present invention relates to a process for the production of glucose, which comprises
[82054] (a) increasing or generating the activity of a elongation factor Tu non-targeted in a non-human organism or a part thereof, preferably a microorganism, a plant cell, a plant or a part thereof, as compared to a corresponding non-transformed wild type non-human organism or a part thereof; and
[82055] (b) growing the non-human organism or a part thereof under conditions which permit the production of glucose or a composition comprising glucose in said non-human organism or in the culture medium surrounding said non-human organism.

[82056] A further embodiment of the present invention relates to a process for the production of fructose, which comprises
[82057] (a) increasing or generating the activity of a ABC transporter permease protein non-targeted in a non-human organism or a part thereof, preferably a microorganism, a plant cell, a plant or a part thereof, as compared to a corresponding non-transformed wild type non-human organism or a part thereof; and
[82058] (b) growing the non-human organism or a part thereof under conditions which permit the production of fructose or a composition comprising fructose in said non-human organism or in the culture medium surrounding said non-human organism.

[82059] A further embodiment of the present invention relates to a process for the production of sucrose, which comprises
[82060] (a) increasing or generating the activity of a ABC transporter permease protein non-targeted in a non-human organism or a part thereof, preferably a microorganism, a plant cell, a plant or a part thereof, as compared to a corresponding non-transformed wild type non-human organism or a part thereof; and
[82061] (b) growing the non-human organism or a part thereof under conditions which permit the production of sucrose or a composition comprising sucrose in said non-human organism or in the culture medium surrounding said non-human organism.

[82062] A further embodiment of the present invention relates to a process for the production of glucose-1-phosphate, which comprises
[82063] (a) increasing or generating the activity of a acyl-CoA synthase non-targeted in a non-human organism or a part thereof, preferably a microorganism, a plant cell, a plant or a part thereof, as compared to a corresponding non-transformed wild type non-human organism or a part thereof; and
[82064] (b) growing the non-human organism or a part thereof under conditions which permit the production of glucose-1-phosphate or a composition comprising glucose-1-phosphate in said non-human organism or in the culture medium surrounding said non-human organism.

[82065] A further embodiment of the present invention relates to a process for the production of glucose, which comprises
[82066] (a) increasing or generating the activity of a 2-oxoglutarate dehydrogenase E1 subunit non-targeted in a non-human organism or a part thereof, preferably a microorganism, a plant cell, a plant or a part thereof, as compared to a corresponding non-transformed wild type non-human organism or a part thereof; and
[82067] (b) growing the non-human organism or a part thereof under conditions which permit the production of glucose or a composition comprising glucose in said non-human organism or in the culture medium surrounding said non-human organism.

[82068] A further embodiment of the present invention relates to a process for the production of glucose-1-phosphate, which comprises
[82069] (a) increasing or generating the activity of a 2-oxoglutarate dehydrogenase E1 subunit non-targeted in a non-human organism or a part thereof, preferably a microorganism, a plant cell, a plant or a part thereof, as compared to a corresponding non-transformed wild type non-human organism or a part thereof; and
[82070] (b) growing the non-human organism or a part thereof under conditions which permit the production of glucose-1-phosphate or a composition comprising glucose-1-phosphate in said non-human organism or in the culture medium surrounding said non-human organism.

[82071] A further embodiment of the present invention relates to a process for the production of myo-inositol, which comprises
[82072] (a) increasing or generating the activity of a 2-oxoglutarate dehydrogenase E1 subunit non-targeted in a non-human organism or a part thereof, preferably a microorganism, a plant cell, a plant or a part thereof, as compared to a corresponding non-transformed wild type non-human organism or a part thereof; and
[82073] (b) growing the non-human organism or a part thereof under conditions which permit the production of myo-inositol or a composition comprising myo-inositol in said non-human organism or in the culture medium surrounding said non-human organism.

[82074] A further embodiment of the present invention relates to a process for the production of raffinose, which comprises
[82075] (a) increasing or generating the activity of a 2-oxoglutarate dehydrogenase E1 subunit non-targeted in a non-human organism or a part thereof, preferably a microorganism, a plant cell, a plant or a part thereof, as compared to a corresponding non-transformed wild type non-human organism or a part thereof; and
[82076] (b) growing the non-human organism or a part thereof under conditions which permit the production of raffinose or a composition comprising raffinose in said non-human organism or in the culture medium surrounding said non-human organism.

[82077] A further embodiment of the present invention relates to a process for the production of sedoheptulose-7-phosphate, which comprises
[82078] (a) increasing or generating the activity of a 2-oxoglutarate dehydrogenase E1 subunit non-targeted in a non-human organism or a part thereof, preferably a microorganism, a plant cell, a plant or a part thereof, as compared to a corresponding non-transformed wild type non-human organism or a part thereof; and
[82079] (b) growing the non-human organism or a part thereof under conditions which permit the production of sedoheptulose-7-phosphate or a composition comprising sedoheptulose-7-phosphate in said non-human organism or in the culture medium surrounding said non-human organism.

[82080] A further embodiment of the present invention relates to a process for the production of raffinose, which comprises
[82081] (a) increasing or generating the activity of a GDP-mannose dehydrogenase non-targeted in a non-human organism or a part thereof, preferably a microorganism, a plant cell, a plant or a part thereof, as compared to a corresponding non-transformed wild type non-human organism or a part thereof; and
[82082] (b) growing the non-human organism or a part thereof under conditions which permit the production of raffinose or a composition comprising raffinose in said non-human organism or in the culture medium surrounding said non-human organism.

[82083] A further embodiment of the present invention relates to a process for the production of fructose, which comprises
[82084] (a) increasing or generating the activity of a transcriptional regulator non-targeted in a non-human organism or a part thereof, preferably a microorganism, a plant cell, a plant or a part thereof, as compared to a corresponding non-transformed wild type non-human organism or a part thereof; and
[82085] (b) growing the non-human organism or a part thereof under conditions which permit the production of fructose or a composition comprising fructose in said non-human organism or in the culture medium surrounding said non-human organism.

[82086] A further embodiment of the present invention relates to a process for the production of glucose, which comprises
[82087] (a) increasing or generating the activity of a transcriptional regulator non-targeted in a non-human organism or a part thereof, preferably a microorganism, a plant cell, a plant or a part thereof, as compared to a corresponding non-transformed wild type non-human organism or a part thereof; and
[82088] (b) growing the non-human organism or a part thereof under conditions which permit the production of glucose or a composition comprising glucose in said non-human organism or in the culture medium surrounding said non-human organism.

[82089] A further embodiment of the present invention relates to a process for the production of glucose-1-phosphate, which comprises
[82090] (a) increasing or generating the activity of a transcriptional regulator non-targeted in a non-human organism or a part thereof, preferably a microorganism, a plant cell, a plant or a part thereof, as compared to a corresponding non-transformed wild type non-human organism or a part thereof; and
[82091] (b) growing the non-human organism or a part thereof under conditions which permit the production of glucose-1-phosphate or a composition comprising glucose-1-phosphate in said non-human organism or in the culture medium surrounding said non-human organism.

[82092] A further embodiment of the present invention relates to a process for the production of glucose-1-phosphate, which comprises
[82093] (a) increasing or generating the activity of a oxidoreductase non-targeted in a non-human organism or a part thereof, preferably a microorganism, a plant cell, a plant or a part thereof, as compared to a corresponding non-transformed wild type non-human organism or a part thereof; and
[82094] (b) growing the non-human organism or a part thereof under conditions which permit the production of glucose-1-phosphate or a composition comprising glucose-1-phosphate in said non-human organism or in the culture medium surrounding said non-human organism.

[82095] A further embodiment of the present invention relates to a process for the production of myo-inositol, which comprises
[82096] (a) increasing or generating the activity of a ThiF family protein non-targeted in a non-human organism or a part thereof, preferably a microorganism, a plant cell, a plant or a part thereof, as compared to a corresponding non-transformed wild type non-human organism or a part thereof; and
[82097] (b) growing the non-human organism or a part thereof under conditions which permit the production of myo-inositol or a composition comprising myo-inositol in said non-human organism or in the culture medium surrounding said non-human organism.

[82098] A further embodiment of the present invention relates to a process for the production of fructose, which comprises
[82099] (a) increasing or generating the activity of a CTP synthase non-targeted in a non-human organism or a part thereof, preferably a microorganism, a plant cell, a plant or a part thereof, as compared to a corresponding non-transformed wild type non-human organism or a part thereof; and
[82100] (b) growing the non-human organism or a part thereof under conditions which permit the production of fructose or a composition comprising fructose in said non-human organism or in the culture medium surrounding said non-human organism.

[82101] A further embodiment of the present invention relates to a process for the production of glucose, which comprises
[82102] (a) increasing or generating the activity of a CTP synthase non-targeted in a non-human organism or a part thereof, preferably a microorganism, a plant cell, a plant or a part thereof, as compared to a corresponding non-transformed wild type non-human organism or a part thereof; and
[82103] (b) growing the non-human organism or a part thereof under conditions which permit the production of glucose or a composition comprising glucose in said non-human organism or in the culture medium surrounding said non-human organism.

[82104] A further embodiment of the present invention relates to a process for the production of sucrose, which comprises
[82105] (a) increasing or generating the activity of a CTP synthase non-targeted in a non-human organism or a part thereof, preferably a microorganism, a plant cell, a plant or a part thereof, as compared to a corresponding non-transformed wild type non-human organism or a part thereof; and
[82106] (b) growing the non-human organism or a part thereof under conditions which permit the production of sucrose or a composition comprising sucrose in said non-human organism or in the culture medium surrounding said non-human organism.

[82107] A further embodiment of the present invention relates to a process for the production of raffinose, which comprises
[82108] (a) increasing or generating the activity of a protein-L-isoaspartate O-methyltransferase non-targeted in a non-human organism or a part thereof, preferably a microorganism, a plant cell, a plant or a part thereof, as compared to a corresponding non-transformed wild type non-human organism or a part thereof; and
[82109] (b) growing the non-human organism or a part thereof under conditions which permit the production of raffinose or a composition comprising raffinose in said non-human organism or in the culture medium surrounding said non-human organism.

[82110] A further embodiment of the present invention relates to a process for the production of myo-inositol, which comprises
[82111] (a) increasing or generating the activity of a recombinase A non-targeted in a non-human organism or a part thereof, preferably a microorganism, a plant cell, a plant or a part thereof, as compared to a corresponding non-transformed wild type non-human organism or a part thereof; and
[82112] (b) growing the non-human organism or a part thereof under conditions which permit the production of myo-inositol or a composition comprising myo-inositol in said non-human organism or in the culture medium surrounding said non-human organism.

[82113] A further embodiment of the present invention relates to a process for the production of raffinose, which comprises
[82114] (a) increasing or generating the activity of a recombinase A non-targeted in a non-human organism or a part thereof, preferably a microorganism, a plant cell, a plant or a part thereof, as compared to a corresponding non-transformed wild type non-human organism or a part thereof; and
[82115] (b) growing the non-human organism or a part thereof under conditions which permit the production of raffinose or a composition comprising raffinose in said non-human organism or in the culture medium surrounding said non-human organism.

[82116] A further embodiment of the present invention relates to a process for the production of myo-inositol, which comprises
[82117] (a) increasing or generating the activity of a acetyltransferase non-targeted in a non-human organism or a part thereof, preferably a microorganism, a plant cell, a plant or a part thereof, as compared to a corresponding non-transformed wild type non-human organism or a part thereof; and
[82118] (b) growing the non-human organism or a part thereof under conditions which permit the production of myo-inositol or a composition comprising myo-inositol in said non-human organism or in the culture medium surrounding said non-human organism.

[82119] A further embodiment of the present invention relates to a process for the production of raffinose, which comprises
[82120] (a) increasing or generating the activity of a acetyltransferase non-targeted in a non-human organism or a part thereof, preferably a microorganism, a plant cell, a plant or a part thereof, as compared to a corresponding non-transformed wild type non-human organism or a part thereof; and
[82121] (b) growing the non-human organism or a part thereof under conditions which permit the production of raffinose or a composition comprising raffinose in said non-human organism or in the culture medium surrounding said non-human organism.

[82122] A further embodiment of the present invention relates to a process for the production of raffinose, which comprises
[82123] (a) increasing or generating the activity of a enoyl-CoA hydratase non-targeted in a non-human organism or a part thereof, preferably a microorganism, a plant cell, a plant or a part thereof, as compared to a corresponding non-transformed wild type non-human organism or a part thereof; and
[82124] (b) growing the non-human organism or a part thereof under conditions which permit the production of raffinose or a composition comprising raffinose in said non-human organism or in the culture medium surrounding said non-human organism.

[82125] A further embodiment of the present invention relates to a process for the production of fructose, which comprises
[82126] (a) increasing or generating the activity of a NADH-quinone oxidoreductase subunit non-targeted in a non-human organism or a part thereof, preferably a microorganism, a plant cell, a plant or a part thereof, as compared to a corresponding non-transformed wild type non-human organism or a part thereof; and
[82127] (b) growing the non-human organism or a part thereof under conditions which permit the production of fructose or a composition comprising fructose in said non-human organism or in the culture medium surrounding said non-human organism.

[82128] A further embodiment of the present invention relates to a process for the production of glucose-1-phosphate, which comprises
[82129] (a) increasing or generating the activity of a NADH-quinone oxidoreductase subunit non-targeted in a non-human organism or a part thereof, preferably a microorganism, a plant cell, a plant or a part thereof, as compared to a corresponding non-transformed wild type non-human organism or a part thereof; and
[82130] (b) growing the non-human organism or a part thereof under conditions which permit the production of glucose-1-phosphate or a composition comprising glucose-1-phosphate in said non-human organism or in the culture medium surrounding said non-human organism.

[82131] A further embodiment of the present invention relates to a process for the production of sucrose, which comprises
[82132] (a) increasing or generating the activity of a NADH-quinone oxidoreductase subunit non-targeted in a non-human organism or a part thereof, preferably a microorganism, a plant cell, a plant or a part thereof, as compared to a corresponding non-transformed wild type non-human organism or a part thereof; and
[82133] (b) growing the non-human organism or a part thereof under conditions which permit the production of sucrose or a composition comprising sucrose in said non-human organism or in the culture medium surrounding said non-human organism.

[82134] A further embodiment of the present invention relates to a process for the production of 3,4,5-trihydroxypentanoic acid, which comprises
[82135] (a) increasing or generating the activity of a isopropylmalate isomerase large subunit non-targeted in a non-human organism or a part thereof, preferably a microorganism, a plant cell, a plant or a part thereof, as compared to a corresponding non-transformed wild type non-human organism or a part thereof; and
[82136] (b) growing the non-human organism or a part thereof under conditions which permit the production of 3,4,5-trihydroxypentanoic acid or a composition comprising 3,4,5-trihydroxypentanoic acid in said non-human organism or in the culture medium surrounding said non-human organism.

[82137] A further embodiment of the present invention relates to a process for the production of fructose, which comprises
[82138] (a) increasing or generating the activity of a hydrolase non-targeted in a non-human organism or a part thereof, preferably a microorganism, a plant cell, a plant or a part thereof, as compared to a corresponding non-transformed wild type non-human organism or a part thereof; and
[82139] (b) growing the non-human organism or a part thereof under conditions which permit the production of fructose or a composition comprising fructose in said non-human organism or in the culture medium surrounding said non-human organism.

[82140] A further embodiment of the present invention relates to a process for the production of glucose, which comprises
[82141] (a) increasing or generating the activity of a hydrolase non-targeted in a non-human organism or a part thereof, preferably a microorganism, a plant cell, a plant or a part thereof, as compared to a corresponding non-transformed wild type non-human organism or a part thereof; and
[82142] (b) growing the non-human organism or a part thereof under conditions which permit the production of glucose or a composition comprising glucose in said non-human organism or in the culture medium surrounding said non-human organism.

[82143] A further embodiment of the present invention relates to a process for the production of sucrose, which comprises
[82144] (a) increasing or generating the activity of a hydrolase non-targeted in a non-human organism or a part thereof, preferably a microorganism, a plant cell, a plant or a part thereof, as compared to a corresponding non-transformed wild type non-human organism or a part thereof; and
[82145] (b) growing the non-human organism or a part thereof under conditions which permit the production of sucrose or a composition comprising sucrose in said non-human organism or in the culture medium surrounding said non-human organism.

[82146] A further embodiment of the present invention relates to a process for the production of fructose, which comprises
[82147] (a) increasing or generating the activity of a glutamate-ammonia-ligase non-targeted in a non-human organism or a part thereof, preferably a microorganism, a plant cell, a plant or a part thereof, as compared to a corresponding non-transformed wild type non-human organism or a part thereof; and
[82148] (b) growing the non-human organism or a part thereof under conditions which permit the production of fructose or a composition comprising fructose in said non-human organism or in the culture medium surrounding said non-human organism.

[82149] A further embodiment of the present invention relates to a process for the production of glucose, which comprises
[82150] (a) increasing or generating the activity of a glutamate-ammonia-ligase non-targeted in a non-human organism or a part thereof, preferably a microorganism, a plant cell, a plant or a part thereof, as compared to a corresponding non-transformed wild type non-human organism or a part thereof; and
[82151] (b) growing the non-human organism or a part thereof under conditions which permit the production of glucose or a composition comprising glucose in said non-human organism or in the culture medium surrounding said non-human organism.

[82152] A further embodiment of the present invention relates to a process for the production of sucrose, which comprises
[82153] (a) increasing or generating the activity of a glutamate-ammonia-ligase non-targeted in a non-human organism or a part thereof, preferably a microorganism, a plant cell, a plant or a part thereof, as compared to a corresponding non-transformed wild type non-human organism or a part thereof; and
[82154] (b) growing the non-human organism or a part thereof under conditions which permit the production of sucrose or a composition comprising sucrose in said non-human organism or in the culture medium surrounding said non-human organism.

[82155] A further embodiment of the present invention relates to a process for the production of fructose, which comprises
[82156] (a) increasing or generating the activity of a fumarylacetoacetate hydrolase non-targeted in a non-human organism or a part thereof, preferably a microorganism, a plant cell, a plant or a part thereof, as compared to a corresponding non-transformed wild type non-human organism or a part thereof; and
[82157] (b) growing the non-human organism or a part thereof under conditions which permit the production of fructose or a composition comprising fructose in said non-human organism or in the culture medium surrounding said non-human organism.

[82158] A further embodiment of the present invention relates to a process for the production of raffinose, which comprises
[82159] (a) increasing or generating the activity of a glycosyltransferase non-targeted in a non-human organism or a part thereof, preferably a microorganism, a plant cell, a plant or a part thereof, as compared to a corresponding non-transformed wild type non-human organism or a part thereof; and
[82160] (b) growing the non-human organism or a part thereof under conditions which permit the production of raffinose or a composition comprising raffinose in said non-human organism or in the culture medium surrounding said non-human organism.

[82161] A further embodiment of the present invention relates to a process for the production of myo-inositol, which comprises
[82162] (a) increasing or generating the activity of a peptidyl-prolyl cis-trans isomerase non-targeted in a non-human organism or a part thereof, preferably a microorganism, a plant cell, a plant or a part thereof, as compared to a corresponding non-transformed wild type non-human organism or a part thereof; and
[82163] (b) growing the non-human organism or a part thereof under conditions which permit the production of myo-inositol or a composition comprising myo-inositol in said non-human organism or in the culture medium surrounding said non-human organism.

[82164] A further embodiment of the present invention relates to a process for the production of 3,4,5-trihydroxypentanoic acid, which comprises
[82165] (a) increasing or generating the activity of a NAD(P)H dehydrogenase (quinone) non-targeted in a non-human organism or a part thereof, preferably a microorganism, a plant cell, a plant or a part thereof, as compared to a corresponding non-transformed wild type non-human organism or a part thereof; and
[82166] (b) growing the non-human organism or a part thereof under conditions which permit the production of 3,4,5-trihydroxypentanoic acid or a composition comprising 3,4,5-trihydroxypentanoic acid in said non-human organism or in the culture medium surrounding said non-human organism.

[82167] A further embodiment of the present invention relates to a process for the production of fructose, which comprises
[82168] (a) increasing or generating the activity of a electron transfer flavoprotein subunit beta non-targeted in a non-human organism or a part thereof, preferably a microorganism, a plant cell, a plant or a part thereof, as compared to a corresponding non-transformed wild type non-human organism or a part thereof; and
[82169] (b) growing the non-human organism or a part thereof under conditions which permit the production of fructose or a composition comprising fructose in said non-human organism or in the culture medium surrounding said non-human organism.

[82170] A further embodiment of the present invention relates to a process for the production of glucose, which comprises
[82171] (a) increasing or generating the activity of a electron transfer flavoprotein subunit beta non-targeted in a non-human organism or a part thereof, preferably a microorganism, a plant cell, a plant or a part thereof, as compared to a corresponding non-transformed wild type non-human organism or a part thereof; and
[82172] (b) growing the non-human organism or a part thereof under conditions which permit the production of glucose or a composition comprising glucose in said non-human organism or in the culture medium surrounding said non-human organism.

[82173] A further embodiment of the present invention relates to a process for the production of glucose-1-phosphate, which comprises
[82174] (a) increasing or generating the activity of a purine nucleoside phosphorylase non-targeted in a non-human organism or a part thereof, preferably a microorganism, a plant cell, a plant or a part thereof, as compared to a corresponding non-transformed wild type non-human organism or a part thereof; and
[82175] (b) growing the non-human organism or a part thereof under conditions which permit the production of glucose-1-phosphate or a composition comprising glucose-1-phosphate in said non-human organism or in the culture medium surrounding said non-human organism.

[82176] A further embodiment of the present invention relates to a process for the production of 3,4,5-trihydroxypentanoic acid, which comprises
[82177] (a) increasing or generating the activity of a purine nucleoside phosphorylase non-targeted in a non-human organism or a part thereof, preferably a microorganism, a plant cell, a plant or a part thereof, as compared to a corresponding non-transformed wild type non-human organism or a part thereof; and
[82178] (b) growing the non-human organism or a part thereof under conditions which permit the production of 3,4,5-trihydroxypentanoic acid or a composition comprising 3,4,5-trihydroxypentanoic acid in said non-human organism or in the culture medium surrounding said non-human organism.

[82179] A further embodiment of the present invention relates to a process for the production of raffinose, which comprises
[82180] (a) increasing or generating the activity of a transcriptional regulator protein non-targeted in a non-human organism or a part thereof, preferably a microorganism, a plant cell, a plant or a part thereof, as compared to a corresponding non-transformed wild type non-human organism or a part thereof; and
[82181] (b) growing the non-human organism or a part thereof under conditions which permit the production of raffinose or a composition comprising raffinose in said non-human organism or in the culture medium surrounding said non-human organism.

[82182] A further embodiment of the present invention relates to a process for the production of glucose-1-phosphate, which comprises
[82183] (a) increasing or generating the activity of a AX653549-protein non-targeted in a non-human organism or a part thereof, preferably a microorganism, a plant cell, a plant or a part thereof, as compared to a corresponding non-transformed wild type non-human organism or a part thereof; and
[82184] (b) growing the non-human organism or a part thereof under conditions which permit the production of glucose-1-phosphate or a composition comprising glucose-1-phosphate in said non-human organism or in the culture medium surrounding said non-human organism.

[82185] A further embodiment of the present invention relates to a process for the production of glucose-1-phosphate, which comprises
[82186] (a) increasing or generating the activity of a AY087308-protein non-targeted in a non-human organism or a part thereof, preferably a microorganism, a plant cell, a plant or a part thereof, as compared to a corresponding non-transformed wild type non-human organism or a part thereof; and
[82187] (b) growing the non-human organism or a part thereof under conditions which permit the production of glucose-1-phosphate or a composition comprising glucose-1-phosphate in said non-human organism or in the culture medium surrounding said non-human organism.

[82188] A further embodiment of the present invention relates to a process for the production of myo-inositol, which comprises
[82189] (a) increasing or generating the activity of a AY087308-protein non-targeted in a non-human organism or a part thereof, preferably a microorganism, a plant cell, a plant or a part thereof, as compared to a corresponding non-transformed wild type non-human organism or a part thereof; and
[82190] (b) growing the non-human organism or a part thereof under conditions which permit the production of myo-inositol or a composition comprising myo-inositol in said non-human organism or in the culture medium surrounding said non-human organism.

[82191] A further embodiment of the present invention relates to a process for the production of glucose-1-phosphate, which comprises
[82192] (a) increasing or generating the activity of a pyruvate kinase non-targeted in a non-human organism or a part thereof, preferably a microorganism, a plant cell, a plant or a part thereof, as compared to a corresponding non-transformed wild type non-human organism or a part thereof; and
[82193] (b) growing the non-human organism or a part thereof under conditions which permit the production of glucose-1-phosphate or a composition comprising glucose-1-phosphate in said non-human organism or in the culture medium surrounding said non-human organism.

[82194] A further embodiment of the present invention relates to a process for the production of 3,4,5-trihydroxypentanoic acid, which comprises
[82195] (a) increasing or generating the activity of a pyruvate kinase non-targeted in a non-human organism or a part thereof, preferably a microorganism, a plant cell, a plant or a part thereof, as compared to a corresponding non-transformed wild type non-human organism or a part thereof; and
[82196] (b) growing the non-human organism or a part thereof under conditions which permit the production of 3,4,5-trihydroxypentanoic acid or a composition comprising 3,4,5-trihydroxypentanoic acid in said non-human organism or in the culture medium surrounding said non-human organism.

[82197] A further embodiment of the present invention relates to a process for the production of glucose, which comprises
[82198] (a) increasing or generating the activity of a threonine synthase non-targeted in a non-human organism or a part thereof, preferably a microorganism, a plant cell, a plant or a part thereof, as compared to a corresponding non-transformed wild type non-human organism or a part thereof; and
[82199] (b) growing the non-human organism or a part thereof under conditions which permit the production of glucose or a composition comprising glucose in said non-human organism or in the culture medium surrounding said non-human organism.

[82200] A further embodiment of the present invention relates to a process for the production of sucrose, which comprises
[82201] (a) increasing or generating the activity of a threonine synthase non-targeted in a non-human organism or a part thereof, preferably a microorganism, a plant cell, a plant or a part thereof, as compared to a corresponding non-transformed wild type non-human organism or a part thereof; and
[82202] (b) growing the non-human organism or a part thereof under conditions which permit the production of sucrose or a composition comprising sucrose in said non-human organism or in the culture medium surrounding said non-human organism.

[82203] A further embodiment of the present invention relates to a process for the production of 3,4,5-trihydroxypentanoic acid, which comprises
[82204] (a) increasing or generating the activity of a b0050-protein non-targeted in a non-human organism or a part thereof, preferably a microorganism, a plant cell, a plant or a part thereof, as compared to a corresponding non-transformed wild type non-human organism or a part thereof; and
[82205] (b) growing the non-human organism or a part thereof under conditions which permit the production of 3,4,5-trihydroxypentanoic acid or a composition comprising 3,4,5-trihydroxypentanoic acid in said non-human organism or in the culture medium surrounding said non-human organism.

[82206] A further embodiment of the present invention relates to a process for the production of raffinose, which comprises
[82207] (a) increasing or generating the activity of a L-ribulose-5-phosphate 4-epimerase non-targeted in a non-human organism or a part thereof, preferably a microorganism, a plant cell, a plant or a part thereof, as compared to a corresponding non-transformed wild type non-human organism or a part thereof; and
[82208] (b) growing the non-human organism or a part thereof under conditions which permit the production of raffinose or a composition comprising raffinose in said non-human organism or in the culture medium surrounding said non-human organism.

[82209] A further embodiment of the present invention relates to a process for the production of sucrose, which comprises
[82210] (a) increasing or generating the activity of a glucose dehydrogenase non-targeted in a non-human organism or a part thereof, preferably a microorganism, a plant cell, a plant or a part thereof, as compared to a corresponding non-transformed wild type non-human organism or a part thereof; and
[82211] (b) growing the non-human organism or a part thereof under conditions which permit the production of sucrose or a composition comprising sucrose in said non-human organism or in the culture medium surrounding said non-human organism.

[82212] A further embodiment of the present invention relates to a process for the production of glucose-1-phosphate, which comprises
[82213] (a) increasing or generating the activity of a serine protease non-targeted in a non-human organism or a part thereof, preferably a microorganism, a plant cell, a plant or a part thereof, as compared to a corresponding non-transformed wild type non-human organism or a part thereof; and
[82214] (b) growing the non-human organism or a part thereof under conditions which permit the production of glucose-1-phosphate or a composition comprising glucose-1-phosphate in said non-human organism or in the culture medium surrounding said non-human organism.

[82215] A further embodiment of the present invention relates to a process for the production of myo-inositol, which comprises
[82216] (a) increasing or generating the activity of a serine protease non-targeted in a non-human organism or a part thereof, preferably a microorganism, a plant cell, a plant or a part thereof, as compared to a corresponding non-transformed wild type non-human organism or a part thereof; and
[82217] (b) growing the non-human organism or a part thereof under conditions which permit the production of myo-inositol or a composition comprising myo-inositol in said non-human organism or in the culture medium surrounding said non-human organism.

[82218] A further embodiment of the present invention relates to a process for the production of sucrose, which comprises
[82219] (a) increasing or generating the activity of a acyl-CoA dehydrogenase non-targeted in a non-human organism or a part thereof, preferably a microorganism, a plant cell, a plant or a part thereof, as compared to a corresponding non-transformed wild type non-human organism or a part thereof; and
[82220] (b) growing the non-human organism or a part thereof under conditions which permit the production of sucrose or a composition comprising sucrose in said non-human organism or in the culture medium surrounding said non-human organism.

[82221] A further embodiment of the present invention relates to a process for the production of glucose-1-phosphate, which comprises
[82222] (a) increasing or generating the activity of a b0251-protein non-targeted in a non-human organism or a part thereof, preferably a microorganism, a plant cell, a plant or a part thereof, as compared to a corresponding non-transformed wild type non-human organism or a part thereof; and
[82223] (b) growing the non-human organism or a part thereof under conditions which permit the production of glucose-1-phosphate or a composition comprising glucose-1-phosphate in said non-human organism or in the culture medium surrounding said non-human organism.

[82224] A further embodiment of the present invention relates to a process for the production of fructose, which comprises
[82225] (a) increasing or generating the activity of a betaine aldehyde dehydrogenase non-targeted in a non-human organism or a part thereof, preferably a microorganism, a plant cell, a plant or a part thereof, as compared to a corresponding non-transformed wild type non-human organism or a part thereof; and
[82226] (b) growing the non-human organism or a part thereof under conditions which permit the production of fructose or a composition comprising fructose in said non-human organism or in the culture medium surrounding said non-human organism.

[82227] A further embodiment of the present invention relates to a process for the production of melibiose, which comprises
[82228] (a) increasing or generating the activity of a beta-galactosidase non-targeted in a non-human organism or a part thereof, preferably a microorganism, a plant cell, a plant or a part thereof, as compared to a corresponding non-transformed wild type non-human organism or a part thereof; and
[82229] (b) growing the non-human organism or a part thereof under conditions which permit the production of melibiose or a composition comprising melibiose in said non-human organism or in the culture medium surrounding said non-human organism.

[82230] A further embodiment of the present invention relates to a process for the production of glucose-1-phosphate, which comprises
[82231] (a) increasing or generating the activity of a b0362-protein non-targeted in a non-human organism or a part thereof, preferably a microorganism, a plant cell, a plant or a part thereof, as compared to a corresponding non-transformed wild type non-human organism or a part thereof; and
[82232] (b) growing the non-human organism or a part thereof under conditions which permit the production of glucose-1-phosphate or a composition comprising glucose-1-phosphate in said non-human organism or in the culture medium surrounding said non-human organism.

[82233] A further embodiment of the present invention relates to a process for the production of glucose-1-phosphate, which comprises
[82234] (a) increasing or generating the activity of a penicillin-binding protein non-targeted in a non-human organism or a part thereof, preferably a microorganism, a plant cell, a plant or a part thereof, as compared to a corresponding non-transformed wild type non-human organism or a part thereof; and
[82235] (b) growing the non-human organism or a part thereof under conditions which permit the production of glucose-1-phosphate or a composition comprising glucose-1-phosphate in said non-human organism or in the culture medium surrounding said non-human organism.

[82236] A further embodiment of the present invention relates to a process for the production of fructose, which comprises
[82237] (a) increasing or generating the activity of a ATP-binding component of a transport system non-targeted in a non-human organism or a part thereof, preferably a microorganism, a plant cell, a plant or a part thereof, as compared to a corresponding non-transformed wild type non-human organism or a part thereof; and
[82238] (b) growing the non-human organism or a part thereof under conditions which permit the production of fructose or a composition comprising fructose in said non-human organism or in the culture medium surrounding said non-human organism.

[82239] A further embodiment of the present invention relates to a process for the production of glucose, which comprises
[82240] (a) increasing or generating the activity of a ATP-binding component of a transport system non-targeted in a non-human organism or a part thereof, preferably a microorganism, a plant cell, a plant or a part thereof, as compared to a corresponding non-transformed wild type non-human organism or a part thereof; and
[82241] (b) growing the non-human organism or a part thereof under conditions which permit the production of glucose or a composition comprising glucose in said non-human organism or in the culture medium surrounding said non-human organism.

[82242] A further embodiment of the present invention relates to a process for the production of glucose, which comprises
[82243] (a) increasing or generating the activity of a membrane transport protein non-targeted in a non-human organism or a part thereof, preferably a microorganism, a plant cell, a plant or a part thereof, as compared to a corresponding non-transformed wild type non-human organism or a part thereof; and
[82244] (b) growing the non-human organism or a part thereof under conditions which permit the production of glucose or a composition comprising glucose in said non-human organism or in the culture medium surrounding said non-human organism.

[82245] A further embodiment of the present invention relates to a process for the production of saccharic acid, which comprises
[82246] (a) increasing or generating the activity of a b0488-protein non-targeted in a non-human organism or a part thereof, preferably a microorganism, a plant cell, a plant or a part thereof, as compared to a corresponding non-transformed wild type non-human organism or a part thereof; and
[82247] (b) growing the non-human organism or a part thereof under conditions which permit the production of saccharic acid or a composition comprising saccharic acid in said non-human organism or in the culture medium surrounding said non-human organism.

[82248] A further embodiment of the present invention relates to a process for the production of galactinol, which comprises
[82249] (a) increasing or generating the activity of a glycerate kinase non-targeted in a non-human organism or a part thereof, preferably a microorganism, a plant cell, a plant or a part thereof, as compared to a corresponding non-transformed wild type non-human organism or a part thereof; and
[82250] (b) growing the non-human organism or a part thereof under conditions which permit the production of galactinol or a composition comprising galactinol in said non-human organism or in the culture medium surrounding said non-human organism.

[82251] A further embodiment of the present invention relates to a process for the production of fructose, which comprises
[82252] (a) increasing or generating the activity of a isochorismate synthase non-targeted in a non-human organism or a part thereof, preferably a microorganism, a plant cell, a plant or a part thereof, as compared to a corresponding non-transformed wild type non-human organism or a part thereof; and
[82253] (b) growing the non-human organism or a part thereof under conditions which permit the production of fructose or a composition comprising fructose in said non-human organism or in the culture medium surrounding said non-human organism.

[82254] A further embodiment of the present invention relates to a process for the production of glucose, which comprises
[82255] (a) increasing or generating the activity of a isochorismate synthase non-targeted in a non-human organism or a part thereof, preferably a microorganism, a plant cell, a plant or a part thereof, as compared to a corresponding non-transformed wild type non-human organism or a part thereof; and
[82256] (b) growing the non-human organism or a part thereof under conditions which permit the production of glucose or a composition comprising glucose in said non-human organism or in the culture medium surrounding said non-human organism.

[82257] A further embodiment of the present invention relates to a process for the production of raffinose, which comprises
[82258] (a) increasing or generating the activity of a isochorismate synthase non-targeted in a non-human organism or a part thereof, preferably a microorganism, a plant cell, a plant or a part thereof, as compared to a corresponding non-transformed wild type non-human organism or a part thereof; and
[82259] (b) growing the non-human organism or a part thereof under conditions which permit the production of raffinose or a composition comprising raffinose in said non-human organism or in the culture medium surrounding said non-human organism.

[82260] A further embodiment of the present invention relates to a process for the production of sucrose, which comprises
[82261] (a) increasing or generating the activity of a isochorismate synthase non-targeted in a non-human organism or a part thereof, preferably a microorganism, a plant cell, a plant or a part thereof, as compared to a corresponding non-transformed wild type non-human organism or a part thereof; and
[82262] (b) growing the non-human organism or a part thereof under conditions which permit the production of sucrose or a composition comprising sucrose in said non-human organism or in the culture medium surrounding said non-human organism.

[82263] A further embodiment of the present invention relates to a process for the production of 3,4,5-trihydroxypentanoic acid, which comprises
[82264] (a) increasing or generating the activity of a B0644-protein non-targeted in a non-human organism or a part thereof, preferably a microorganism, a plant cell, a plant or a part thereof, as compared to a corresponding non-transformed wild type non-human organism or a part thereof; and
[82265] (b) growing the non-human organism or a part thereof under conditions which permit the production of 3,4,5-trihydroxypentanoic acid or a composition comprising 3,4,5-trihydroxypentanoic acid in said non-human organism or in the culture medium surrounding said non-human organism.

[82266] A further embodiment of the present invention relates to a process for the production of saccharic acid, which comprises
[82267] (a) increasing or generating the activity of a pyrimidine-specific ribonucleoside hydrolase non-targeted in a non-human organism or a part thereof, preferably a microorganism, a plant cell, a plant or a part thereof, as compared to a corresponding non-transformed wild type non-human organism or a part thereof; and
[82268] (b) growing the non-human organism or a part thereof under conditions which permit the production of saccharic acid or a composition comprising saccharic acid in said non-human organism or in the culture medium surrounding said non-human organism.

[82269] A further embodiment of the present invention relates to a process for the production of erythrol, which comprises
[82270] (a) increasing or generating the activity of a asparagine synthetase B non-targeted in a non-human organism or a part thereof, preferably a microorganism, a plant cell, a plant or a part thereof, as compared to a corresponding non-transformed wild type non-human organism or a part thereof; and
[82271] (b) growing the non-human organism or a part thereof under conditions which permit the production of erythrol or a composition comprising erythrol in said non-human organism or in the culture medium surrounding said non-human organism.

[82272] A further embodiment of the present invention relates to a process for the production of myo-inositol, which comprises
[82273] (a) increasing or generating the activity of a sensor histidine kinase non-targeted in a non-human organism or a part thereof, preferably a microorganism, a plant cell, a plant or a part thereof, as compared to a corresponding non-transformed wild type non-human organism or a part thereof; and
[82274] (b) growing the non-human organism or a part thereof under conditions which permit the production of myo-inositol or a composition comprising myo-inositol in said non-human organism or in the culture medium surrounding said non-human organism.

[82275] A further embodiment of the present invention relates to a process for the production of myo-inositol, which comprises
[82276] (a) increasing or generating the activity of a succinyl-CoA synthetase beta chain non-targeted in a non-human organism or a part thereof, preferably a microorganism, a plant cell, a plant or a part thereof, as compared to a corresponding non-transformed wild type non-human organism or a part thereof; and
[82277] (b) growing the non-human organism or a part thereof under conditions which permit the production of myo-inositol or a composition comprising myo-inositol in said non-human organism or in the culture medium surrounding said non-human organism.

[82278] A further embodiment of the present invention relates to a process for the production of fructose, which comprises
[82279] (a) increasing or generating the activity of a zinc transporter non-targeted in a non-human organism or a part thereof, preferably a microorganism, a plant cell, a plant or a part thereof, as compared to a corresponding non-transformed wild type non-human organism or a part thereof; and
[82280] (b) growing the non-human organism or a part thereof under conditions which permit the production of fructose or a composition comprising fructose in said non-human organism or in the culture medium surrounding said non-human organism.

[82281] A further embodiment of the present invention relates to a process for the production of glucose, which comprises
[82282] (a) increasing or generating the activity of a zinc transporter non-targeted in a non-human organism or a part thereof, preferably a microorganism, a plant cell, a plant or a part thereof, as compared to a corresponding non-transformed wild type non-human organism or a part thereof; and
[82283] (b) growing the non-human organism or a part thereof under conditions which permit the production of glucose or a composition comprising glucose in said non-human organism or in the culture medium surrounding said non-human organism.

[82284] A further embodiment of the present invention relates to a process for the production of glucose-1-phosphate, which comprises
[82285] (a) increasing or generating the activity of a zinc transporter non-targeted in a non-human organism or a part thereof, preferably a microorganism, a plant cell, a plant or a part thereof, as compared to a corresponding non-transformed wild type non-human organism or a part thereof; and
[82286] (b) growing the non-human organism or a part thereof under conditions which permit the production of glucose-1-phosphate or a composition comprising glucose-1-phosphate in said non-human organism or in the culture medium surrounding said non-human organism.

[82287] A further embodiment of the present invention relates to a process for the production of raffinose, which comprises
[82288] (a) increasing or generating the activity of a zinc transporter non-targeted in a non-human organism or a part thereof, preferably a microorganism, a plant cell, a plant or a part thereof, as compared to a corresponding non-transformed wild type non-human organism or a part thereof; and
[82289] (b) growing the non-human organism or a part thereof under conditions which permit the production of raffinose or a composition comprising raffinose in said non-human organism or in the culture medium surrounding said non-human organism.

[82290] A further embodiment of the present invention relates to a process for the production of glucose, which comprises
[82291] (a) increasing or generating the activity of a b0801-protein non-targeted in a non-human organism or a part thereof, preferably a microorganism, a plant cell, a plant or a part thereof, as compared to a corresponding non-transformed wild type non-human organism or a part thereof; and
[82292] (b) growing the non-human organism or a part thereof under conditions which permit the production of glucose or a composition comprising glucose in said non-human organism or in the culture medium surrounding said non-human organism.

[82293] A further embodiment of the present invention relates to a process for the production of sedoheptulose-7-phosphate, which comprises
[82294] (a) increasing or generating the activity of a putrescine transport system permease protein non-targeted in a non-human organism or a part thereof, preferably a microorganism, a plant cell, a plant or a part thereof, as compared to a corresponding non-transformed wild type non-human organism or a part thereof; and
[82295] (b) growing the non-human organism or a part thereof under conditions which permit the production of sedoheptulose-7-phosphate or a composition comprising sedoheptulose-7-phosphate in said non-human organism or in the culture medium surrounding said non-human organism.

[82296] A further embodiment of the present invention relates to a process for the production of raffinose, which comprises
[82297] (a) increasing or generating the activity of a leucyl/phenylalanyl-tRNA-protein transferase non-targeted in a non-human organism or a part thereof, preferably a microorganism, a plant cell, a plant or a part thereof, as compared to a corresponding non-transformed wild type non-human organism or a part thereof; and
[82298] (b) growing the non-human organism or a part thereof under conditions which permit the production of raffinose or a composition comprising raffinose in said non-human organism or in the culture medium surrounding said non-human organism.

[82299] A further embodiment of the present invention relates to a process for the production of glucose-1-phosphate, which comprises
[82300] (a) increasing or generating the activity of a b0970-protein non-targeted in a non-human organism or a part thereof, preferably a microorganism, a plant cell, a plant or a part thereof, as compared to a corresponding non-transformed wild type non-human organism or a part thereof; and
[82301] (b) growing the non-human organism or a part thereof under conditions which permit the production of glucose-1-phosphate or a composition comprising glucose-1-phosphate in said non-human organism or in the culture medium surrounding said non-human organism.

[82302] A further embodiment of the present invention relates to a process for the production of myo-inositol, which comprises
[82303] (a) increasing or generating the activity of a phosphoanhydride phosphorylase non-targeted in a non-human organism or a part thereof, preferably a microorganism, a plant cell, a plant or a part thereof, as compared to a corresponding non-transformed wild type non-human organism or a part thereof; and
[82304] (b) growing the non-human organism or a part thereof under conditions which permit the production of myo-inositol or a composition comprising myo-inositol in said non-human organism or in the culture medium surrounding said non-human organism.

[82305] A further embodiment of the present invention relates to a process for the production of fructose, which comprises
[82306] (a) increasing or generating the activity of a b1003-protein non-targeted in a non-human organism or a part thereof, preferably a microorganism, a plant cell, a plant or a part thereof, as compared to a corresponding non-transformed wild type non-human organism or a part thereof; and
[82307] (b) growing the non-human organism or a part thereof under conditions which permit the production of fructose or a composition comprising fructose in said non-human organism or in the culture medium surrounding said non-human organism.

[82308] A further embodiment of the present invention relates to a process for the production of glucose, which comprises
[82309] (a) increasing or generating the activity of a b1003-protein non-targeted in a non-human organism or a part thereof, preferably a microorganism, a plant cell, a plant or a part thereof, as compared to a corresponding non-transformed wild type non-human organism or a part thereof; and
[82310] (b) growing the non-human organism or a part thereof under conditions which permit the production of glucose or a composition comprising glucose in said non-human organism or in the culture medium surrounding said non-human organism.

[82311] A further embodiment of the present invention relates to a process for the production of glucose-1-phosphate, which comprises
[82312] (a) increasing or generating the activity of a b1003-protein non-targeted in a non-human organism or a part thereof, preferably a microorganism, a plant cell, a plant or a part thereof, as compared to a corresponding non-transformed wild type non-human organism or a part thereof; and
[82313] (b) growing the non-human organism or a part thereof under conditions which permit the production of glucose-1-phosphate or a composition comprising glucose-1-phosphate in said non-human organism or in the culture medium surrounding said non-human organism.

[82314] A further embodiment of the present invention relates to a process for the production of sedoheptulose-7-phosphate, which comprises
[82315] (a) increasing or generating the activity of a b1003-protein non-targeted in a non-human organism or a part thereof, preferably a microorganism, a plant cell, a plant or a part thereof, as compared to a corresponding non-transformed wild type non-human organism or a part thereof; and
[82316] (b) growing the non-human organism or a part thereof under conditions which permit the production of sedoheptulose-7-phosphate or a composition comprising sedoheptulose-7-phosphate in said non-human organism or in the culture medium surrounding said non-human organism.

[82317] A further embodiment of the present invention relates to a process for the production of sucrose, which comprises
[82318] (a) increasing or generating the activity of a b1003-protein non-targeted in a non-human organism or a part thereof, preferably a microorganism, a plant cell, a plant or a part thereof, as compared to a corresponding non-transformed wild type non-human organism or a part thereof; and
[82319] (b) growing the non-human organism or a part thereof under conditions which permit the production of sucrose or a composition comprising sucrose in said non-human organism or in the culture medium surrounding said non-human organism.

[82320] A further embodiment of the present invention relates to a process for the production of 3,4,5-trihydroxypentanoic acid, which comprises
[82321] (a) increasing or generating the activity of a b1046-protein non-targeted in a non-human organism or a part thereof, preferably a microorganism, a plant cell, a plant or a part thereof, as compared to a corresponding non-transformed wild type non-human organism or a part thereof; and
[82322] (b) growing the non-human organism or a part thereof under conditions which permit the production of 3,4,5-trihydroxypentanoic acid or a composition comprising 3,4,5-trihydroxypentanoic acid in said non-human organism or in the culture medium surrounding said non-human organism.

[82323] A further embodiment of the present invention relates to a process for the production of glucose-1-phosphate, which comprises
[82324] (a) increasing or generating the activity of a multidrug resistance protein non-targeted in a non-human organism or a part thereof, preferably a microorganism, a plant cell, a plant or a part thereof, as compared to a corresponding non-transformed wild type non-human organism or a part thereof; and
[82325] (b) growing the non-human organism or a part thereof under conditions which permit the production of glucose-1-phosphate or a composition comprising glucose-1-phosphate in said non-human organism or in the culture medium surrounding said non-human organism.

[82326] A further embodiment of the present invention relates to a process for the production of sucrose, which comprises
[82327] (a) increasing or generating the activity of a multidrug resistance protein non-targeted in a non-human organism or a part thereof, preferably a microorganism, a plant cell, a plant or a part thereof, as compared to a corresponding non-transformed wild type non-human organism or a part thereof; and
[82328] (b) growing the non-human organism or a part thereof under conditions which permit the production of sucrose or a composition comprising sucrose in said non-human organism or in the culture medium surrounding said non-human organism.

[82329] A further embodiment of the present invention relates to a process for the production of fructose, which comprises
[82330] (a) increasing or generating the activity of a outer membrane receptor protein precursor non-targeted in a non-human organism or a part thereof, preferably a microorganism, a plant cell, a plant or a part thereof, as compared to a corresponding non-transformed wild type non-human organism or a part thereof; and
[82331] (b) growing the non-human organism or a part thereof under conditions which permit the production of fructose or a composition comprising fructose in said non-human organism or in the culture medium surrounding said non-human organism.

[82332] A further embodiment of the present invention relates to a process for the production of glucose-1-phosphate, which comprises
[82333] (a) increasing or generating the activity of a adenylosuccinate lyase non-targeted in a non-human organism or a part thereof, preferably a microorganism, a plant cell, a plant or a part thereof, as compared to a corresponding non-transformed wild type non-human organism or a part thereof; and
[82334] (b) growing the non-human organism or a part thereof under conditions which permit the production of glucose-1-phosphate or a composition comprising glucose-1-phosphate in said non-human organism or in the culture medium surrounding said non-human organism.

[82335] A further embodiment of the present invention relates to a process for the production of glucose, which comprises
[82336] (a) increasing or generating the activity of a isocitrate dehydrogenase non-targeted in a non-human organism or a part thereof, preferably a microorganism, a plant cell, a plant or a part thereof, as compared to a corresponding non-transformed wild type non-human organism or a part thereof; and
[82337] (b) growing the non-human organism or a part thereof under conditions which permit the production of glucose or a composition comprising glucose in said non-human organism or in the culture medium surrounding said non-human organism.

[82338] A further embodiment of the present invention relates to a process for the production of glucose-1-phosphate, which comprises
[82339] (a) increasing or generating the activity of a b1137-protein non-targeted in a non-human organism or a part thereof, preferably a microorganism, a plant cell, a plant or a part thereof, as compared to a corresponding non-transformed wild type non-human organism or a part thereof; and
[82340] (b) growing the non-human organism or a part thereof under conditions which permit the production of glucose-1-phosphate or a composition comprising glucose-1-phosphate in said non-human organism or in the culture medium surrounding said non-human organism.

[82341] A further embodiment of the present invention relates to a process for the production of glucose-1-phosphate, which comprises
[82342] (a) increasing or generating the activity of a sodium/proton antiporter non-targeted in a non-human organism or a part thereof, preferably a microorganism, a plant cell, a plant or a part thereof, as compared to a corresponding non-transformed wild type non-human organism or a part thereof; and
[82343] (b) growing the non-human organism or a part thereof under conditions which permit the production of glucose-1-phosphate or a composition comprising glucose-1-phosphate in said non-human organism or in the culture medium surrounding said non-human organism.

[82344] A further embodiment of the present invention relates to a process for the production of glucose-1-phosphate, which comprises
[82345] (a) increasing or generating the activity of a b1214-protein non-targeted in a non-human organism or a part thereof, preferably a microorganism, a plant cell, a plant or a part thereof, as compared to a corresponding non-transformed wild type non-human organism or a part thereof; and
[82346] (b) growing the non-human organism or a part thereof under conditions which permit the production of glucose-1-phosphate or a composition comprising glucose-1-phosphate in said non-human organism or in the culture medium surrounding said non-human organism.

[82347] A further embodiment of the present invention relates to a process for the production of 3,4,5-trihydroxypentanoic acid, which comprises
[82348] (a) increasing or generating the activity of a b1214-protein non-targeted in a non-human organism or a part thereof, preferably a microorganism, a plant cell, a plant or a part thereof, as compared to a corresponding non-transformed wild type non-human organism or a part thereof; and
[82349] (b) growing the non-human organism or a part thereof under conditions which permit the production of 3,4,5-trihydroxypentanoic acid or a composition comprising 3,4,5-trihydroxypentanoic acid in said non-human organism or in the culture medium surrounding said non-human organism.

[82350] A further embodiment of the present invention relates to a process for the production of glucose-1-phosphate, which comprises
[82351] (a) increasing or generating the activity of a b1219-protein non-targeted in a non-human organism or a part thereof, preferably a microorganism, a plant cell, a plant or a part thereof, as compared to a corresponding non-transformed wild type non-human organism or a part thereof; and
[82352] (b) growing the non-human organism or a part thereof under conditions which permit the production of glucose-1-phosphate or a composition comprising glucose-1-phosphate in said non-human organism or in the culture medium surrounding said non-human organism.

[82353] A further embodiment of the present invention relates to a process for the production of myo-inositol, which comprises
[82354] (a) increasing or generating the activity of a b1219-protein non-targeted in a non-human organism or a part thereof, preferably a microorganism, a plant cell, a plant or a part thereof, as compared to a corresponding non-transformed wild type non-human organism or a part thereof; and
[82355] (b) growing the non-human organism or a part thereof under conditions which permit the production of myo-inositol or a composition comprising myo-inositol in said non-human organism or in the culture medium surrounding said non-human organism.

[82356] A further embodiment of the present invention relates to a process for the production of 3,4,5-trihydroxypentanoic acid, which comprises
[82357] (a) increasing or generating the activity of a b1219-protein non-targeted in a non-human organism or a part thereof, preferably a microorganism, a plant cell, a plant or a part thereof, as compared to a corresponding non-transformed wild type non-human organism or a part thereof; and
[82358] (b) growing the non-human organism or a part thereof under conditions which permit the production of 3,4,5-trihydroxypentanoic acid or a composition comprising 3,4,5-trihydroxypentanoic acid in said non-human organism or in the culture medium surrounding said non-human organism.

[82359] A further embodiment of the present invention relates to a process for the production of myo-inositol, which comprises
[82360] (a) increasing or generating the activity of a b1234-protein non-targeted in a non-human organism or a part thereof, preferably a microorganism, a plant cell, a plant or a part thereof, as compared to a corresponding non-transformed wild type non-human organism or a part thereof; and
[82361] (b) growing the non-human organism or a part thereof under conditions which permit the production of myo-inositol or a composition comprising myo-inositol in said non-human organism or in the culture medium surrounding said non-human organism.

[82362] A further embodiment of the present invention relates to a process for the production of galactinol, which comprises
[82363] (a) increasing or generating the activity of a cardiolipin synthase non-targeted in a non-human organism or a part thereof, preferably a microorganism, a plant cell, a plant or a part thereof, as compared to a corresponding non-transformed wild type non-human organism or a part thereof; and
[82364] (b) growing the non-human organism or a part thereof under conditions which permit the production of galactinol or a composition comprising galactinol in said non-human organism or in the culture medium surrounding said non-human organism.

[82365] A further embodiment of the present invention relates to a process for the production of galactitol, which comprises
[82366] (a) increasing or generating the activity of a cardiolipin synthase non-targeted in a non-human organism or a part thereof, preferably a microorganism, a plant cell, a plant or a part thereof, as compared to a corresponding non-transformed wild type non-human organism or a part thereof; and
[82367] (b) growing the non-human organism or a part thereof under conditions which permit the production of galactitol or a composition comprising galactitol in said non-human organism or in the culture medium surrounding said non-human organism.

[82368] A further embodiment of the present invention relates to a process for the production of sorbitol, which comprises
[82369] (a) increasing or generating the activity of a cardiolipin synthase non-targeted in a non-human organism or a part thereof, preferably a microorganism, a plant cell, a plant or a part thereof, as compared to a corresponding non-transformed wild type non-human organism or a part thereof; and
[82370] (b) growing the non-human organism or a part thereof under conditions which permit the production of sorbitol or a composition comprising sorbitol in said non-human organism or in the culture medium surrounding said non-human organism.

[82371] A further embodiment of the present invention relates to a process for the production of 3,4,5-trihydroxypentanoic acid, which comprises
[82372] (a) increasing or generating the activity of a intracellular septation protein non-targeted in a non-human organism or a part thereof, preferably a microorganism, a plant cell, a plant or a part thereof, as compared to a corresponding non-transformed wild type non-human organism or a part thereof; and
[82373] (b) growing the non-human organism or a part thereof under conditions which permit the production of 3,4,5-trihydroxypentanoic acid or a composition comprising 3,4,5-trihydroxypentanoic acid in said non-human organism or in the culture medium surrounding said non-human organism.

[82374] A further embodiment of the present invention relates to a process for the production of fructose, which comprises
[82375] (a) increasing or generating the activity of a membrane protein non-targeted in a non-human organism or a part thereof, preferably a microorganism, a plant cell, a plant or a part thereof, as compared to a corresponding non-transformed wild type non-human organism or a part thereof; and
[82376] (b) growing the non-human organism or a part thereof under conditions which permit the production of fructose or a composition comprising fructose in said non-human organism or in the culture medium surrounding said non-human organism.

[82377] A further embodiment of the present invention relates to a process for the production of glucose, which comprises
[82378] (a) increasing or generating the activity of a membrane protein non-targeted in a non-human organism or a part thereof, preferably a microorganism, a plant cell, a plant or a part thereof, as compared to a corresponding non-transformed wild type non-human organism or a part thereof; and
[82379] (b) growing the non-human organism or a part thereof under conditions which permit the production of glucose or a composition comprising glucose in said non-human organism or in the culture medium surrounding said non-human organism.

[82380] A further embodiment of the present invention relates to a process for the production of raffinose, which comprises
[82381] (a) increasing or generating the activity of a membrane protein non-targeted in a non-human organism or a part thereof, preferably a microorganism, a plant cell, a plant or a part thereof, as compared to a corresponding non-transformed wild type non-human organism or a part thereof; and
[82382] (b) growing the non-human organism or a part thereof under conditions which permit the production of raffinose or a composition comprising raffinose in said non-human organism or in the culture medium surrounding said non-human organism.

[82383] A further embodiment of the present invention relates to a process for the production of sucrose, which comprises
[82384] (a) increasing or generating the activity of a membrane protein non-targeted in a non-human organism or a part thereof, preferably a microorganism, a plant cell, a plant or a part thereof, as compared to a corresponding non-transformed wild type non-human organism or a part thereof; and
[82385] (b) growing the non-human organism or a part thereof under conditions which permit the production of sucrose or a composition comprising sucrose in said non-human organism or in the culture medium surrounding said non-human organism.

[82386] A further embodiment of the present invention relates to a process for the production of myo-inositol, which comprises
[82387] (a) increasing or generating the activity of a tryptophan biosynthesis protein non-targeted in a non-human organism or a part thereof, preferably a microorganism, a plant cell, a plant or a part thereof, as compared to a corresponding non-transformed wild type non-human organism or a part thereof; and
[82388] (b) growing the non-human organism or a part thereof under conditions which permit the production of myo-inositol or a composition comprising myo-inositol in said non-human organism or in the culture medium surrounding said non-human organism.

[82389] A further embodiment of the present invention relates to a process for the production of fructose, which comprises
[82390] (a) increasing or generating the activity of a b1285-protein non-targeted in a non-human organism or a part thereof, preferably a microorganism, a plant cell, a plant or a part thereof, as compared to a corresponding non-transformed wild type non-human organism or a part thereof; and
[82391] (b) growing the non-human organism or a part thereof under conditions which permit the production of fructose or a composition comprising fructose in said non-human organism or in the culture medium surrounding said non-human organism.

[82392] A further embodiment of the present invention relates to a process for the production of glucose-1-phosphate, which comprises
[82393] (a) increasing or generating the activity of a phage-related repressor protein non-targeted in a non-human organism or a part thereof, preferably a microorganism, a plant cell, a plant or a part thereof, as compared to a corresponding non-transformed wild type non-human organism or a part thereof; and
[82394] (b) growing the non-human organism or a part thereof under conditions which permit the production of glucose-1-phosphate or a composition comprising glucose-1-phosphate in said non-human organism or in the culture medium surrounding said non-human organism.

[82395] A further embodiment of the present invention relates to a process for the production of glucose-1-phosphate, which comprises
[82396] (a) increasing or generating the activity of a b1357-protein non-targeted in a non-human organism or a part thereof, preferably a microorganism, a plant cell, a plant or a part thereof, as compared to a corresponding non-transformed wild type non-human organism or a part thereof; and
[82397] (b) growing the non-human organism or a part thereof under conditions which permit the production of glucose-1-phosphate or a composition comprising glucose-1-phosphate in said non-human organism or in the culture medium surrounding said non-human organism.

[82398] A further embodiment of the present invention relates to a process for the production of glucose, which comprises
[82399] (a) increasing or generating the activity of a phenylacetic acid degradation protein non-targeted in a non-human organism or a part thereof, preferably a microorganism, a plant cell, a plant or a part thereof, as compared to a corresponding non-transformed wild type non-human organism or a part thereof; and
[82400] (b) growing the non-human organism or a part thereof under conditions which permit the production of glucose or a composition comprising glucose in said non-human organism or in the culture medium surrounding said non-human organism.

[82401] A further embodiment of the present invention relates to a process for the production of 3,4,5-trihydroxypentanoic acid, which comprises
[82402] (a) increasing or generating the activity of a phenylacetic acid degradation protein non-targeted in a non-human organism or a part thereof, preferably a microorganism, a plant cell, a plant or a part thereof, as compared to a corresponding non-transformed wild type non-human organism or a part thereof; and
[82403] (b) growing the non-human organism or a part thereof under conditions which permit the production of 3,4,5-trihydroxypentanoic acid or a composition comprising 3,4,5-trihydroxypentanoic acid in said non-human organism or in the culture medium surrounding said non-human organism.

[82404] A further embodiment of the present invention relates to a process for the production of sedoheptulose-7-phosphate, which comprises
[82405] (a) increasing or generating the activity of a b1410-protein non-targeted in a non-human organism or a part thereof, preferably a microorganism, a plant cell, a plant or a part thereof, as compared to a corresponding non-transformed wild type non-human organism or a part thereof; and
[82406] (b) growing the non-human organism or a part thereof under conditions which permit the production of sedoheptulose-7-phosphate or a composition comprising sedoheptulose-7-phosphate in said non-human organism or in the culture medium surrounding said non-human organism.

[82407] A further embodiment of the present invention relates to a process for the production of myo-inositol, which comprises
[82408] (a) increasing or generating the activity of a b1425-protein non-targeted in a non-human organism or a part thereof, preferably a microorganism, a plant cell, a plant or a part thereof, as compared to a corresponding non-transformed wild type non-human organism or a part thereof; and
[82409] (b) growing the non-human organism or a part thereof under conditions which permit the production of myo-inositol or a composition comprising myo-inositol in said non-human organism or in the culture medium surrounding said non-human organism.

[82410] A further embodiment of the present invention relates to a process for the production of glucose-1-phosphate, which comprises
[82411] (a) increasing or generating the activity of a lipoprotein precursor non-targeted in a non-human organism or a part thereof, preferably a microorganism, a plant cell, a plant or a part thereof, as compared to a corresponding non-transformed wild type non-human organism or a part thereof; and
[82412] (b) growing the non-human organism or a part thereof under conditions which permit the production of glucose-1-phosphate or a composition comprising glucose-1-phosphate in said non-human organism or in the culture medium surrounding said non-human organism.

[82413] A further embodiment of the present invention relates to a process for the production of sedoheptulose-7-phosphate, which comprises
[82414] (a) increasing or generating the activity of a lipoprotein precursor non-targeted in a non-human organism or a part thereof, preferably a microorganism, a plant cell, a plant or a part thereof, as compared to a corresponding non-transformed wild type non-human organism or a part thereof; and
[82415] (b) growing the non-human organism or a part thereof under conditions which permit the production of sedoheptulose-7-phosphate or a composition comprising sedoheptulose-7-phosphate in said non-human organism or in the culture medium surrounding said non-human organism.

[82416] A further embodiment of the present invention relates to a process for the production of 3,4,5-trihydroxypentanoic acid, which comprises
[82417] (a) increasing or generating the activity of a lipoprotein precursor non-targeted in a non-human organism or a part thereof, preferably a microorganism, a plant cell, a plant or a part thereof, as compared to a corresponding non-transformed wild type non-human organism or a part thereof; and
[82418] (b) growing the non-human organism or a part thereof under conditions which permit the production of 3,4,5-trihydroxypentanoic acid or a composition comprising 3,4,5-trihydroxypentanoic acid in said non-human organism or in the culture medium surrounding said non-human organism.

[82419] A further embodiment of the present invention relates to a process for the production of 3,4,5-trihydroxypentanoic acid, which comprises
[82420] (a) increasing or generating the activity of a b1445-protein non-targeted in a non-human organism or a part thereof, preferably a microorganism, a plant cell, a plant or a part thereof, as compared to a corresponding non-transformed wild type non-human organism or a part thereof; and
[82421] (b) growing the non-human organism or a part thereof under conditions which permit the production of 3,4,5-trihydroxypentanoic acid or a composition comprising 3,4,5-trihydroxypentanoic acid in said non-human organism or in the culture medium surrounding said non-human organism.

[82422] A further embodiment of the present invention relates to a process for the production of glucose-1-phosphate, which comprises
[82423] (a) increasing or generating the activity of a b1470-protein non-targeted in a non-human organism or a part thereof, preferably a microorganism, a plant cell, a plant or a part thereof, as compared to a corresponding non-transformed wild type non-human organism or a part thereof; and
[82424] (b) growing the non-human organism or a part thereof under conditions which permit the production of glucose-1-phosphate or a composition comprising glucose-1-phosphate in said non-human organism or in the culture medium surrounding said non-human organism.

[82425] A further embodiment of the present invention relates to a process for the production of fructose, which comprises
[82426] (a) increasing or generating the activity of a b1522-protein non-targeted in a non-human organism or a part thereof, preferably a microorganism, a plant cell, a plant or a part thereof, as compared to a corresponding non-transformed wild type non-human organism or a part thereof; and
[82427] (b) growing the non-human organism or a part thereof under conditions which permit the production of fructose or a composition comprising fructose in said non-human organism or in the culture medium surrounding said non-human organism.

[82428] A further embodiment of the present invention relates to a process for the production of glucose-1-phosphate, which comprises
[82429] (a) increasing or generating the activity of a b1522-protein non-targeted in a non-human organism or a part thereof, preferably a microorganism, a plant cell, a plant or a part thereof, as compared to a corresponding non-transformed wild type non-human organism or a part thereof; and
[82430] (b) growing the non-human organism or a part thereof under conditions which permit the production of glucose-1-phosphate or a composition comprising glucose-1-phosphate in said non-human organism or in the culture medium surrounding said non-human organism.

[82431] A further embodiment of the present invention relates to a process for the production of glucose-1-phosphate, which comprises
[82432] (a) increasing or generating the activity of a b1556-protein non-targeted in a non-human organism or a part thereof, preferably a microorganism, a plant cell, a plant or a part thereof, as compared to a corresponding non-transformed wild type non-human organism or a part thereof; and
[82433] (b) growing the non-human organism or a part thereof under conditions which permit the production of glucose-1-phosphate or a composition comprising glucose-1-phosphate in said non-human organism or in the culture medium surrounding said non-human organism.

[82434] A further embodiment of the present invention relates to a process for the production of sedoheptulose-7-phosphate, which comprises
[82435] (a) increasing or generating the activity of a b1556-protein non-targeted in a non-human organism or a part thereof, preferably a microorganism, a plant cell, a plant or a part thereof, as compared to a corresponding non-transformed wild type non-human organism or a part thereof; and
[82436] (b) growing the non-human organism or a part thereof under conditions which permit the production of sedoheptulose-7-phosphate or a composition comprising sedoheptulose-7-phosphate in said non-human organism or in the culture medium surrounding said non-human organism.

[82437] A further embodiment of the present invention relates to a process for the production of glucose-1-phosphate, which comprises
[82438] (a) increasing or generating the activity of a b1583-protein non-targeted in a non-human organism or a part thereof, preferably a microorganism, a plant cell, a plant or a part thereof, as compared to a corresponding non-transformed wild type non-human organism or a part thereof; and
[82439] (b) growing the non-human organism or a part thereof under conditions which permit the production of glucose-1-phosphate or a composition comprising glucose-1-phosphate in said non-human organism or in the culture medium surrounding said non-human organism.

[82440] A further embodiment of the present invention relates to a process for the production of glucose-1-phosphate, which comprises
[82441] (a) increasing or generating the activity of a Fe—S subunit of oxidoreductase non-targeted in a non-human organism or a part thereof, preferably a microorganism, a plant cell, a plant or a part thereof, as compared to a corresponding non-transformed wild type non-human organism or a part thereof; and
[82442] (b) growing the non-human organism or a part thereof under conditions which permit the production of glucose-1-phosphate or a composition comprising glucose-1-phosphate in said non-human organism or in the culture medium surrounding said non-human organism.

[82443] A further embodiment of the present invention relates to a process for the production of 3,4,5-trihydroxypentanoic acid, which comprises
[82444] (a) increasing or generating the activity of a Fe—S subunit of oxidoreductase non-targeted in a non-human organism or a part thereof, preferably a microorganism, a plant cell, a plant or a part thereof, as compared to a corresponding non-transformed wild type non-human organism or a part thereof; and
[82445] (b) growing the non-human organism or a part thereof under conditions which permit the production of 3,4,5-trihydroxypentanoic acid or a composition comprising 3,4,5-trihydroxypentanoic acid in said non-human organism or in the culture medium surrounding said non-human organism.

[82446] A further embodiment of the present invention relates to a process for the production of fructose, which comprises
[82447] (a) increasing or generating the activity of a acid shock protein non-targeted in a non-human organism or a part thereof, preferably a microorganism, a plant cell, a plant or a part thereof, as compared to a corresponding non-transformed wild type non-human organism or a part thereof; and
[82448] (b) growing the non-human organism or a part thereof under conditions which permit the production of fructose or a composition comprising fructose in said non-human organism or in the culture medium surrounding said non-human organism.

[82449] A further embodiment of the present invention relates to a process for the production of glucose, which comprises
[82450] (a) increasing or generating the activity of a acid shock protein non-targeted in a non-human organism or a part thereof, preferably a microorganism, a plant cell, a plant or a part thereof, as compared to a corresponding non-transformed wild type non-human organism or a part thereof; and
[82451] (b) growing the non-human organism or a part thereof under conditions which permit the production of glucose or a composition comprising glucose in said non-human organism or in the culture medium surrounding said non-human organism.

[82452] A further embodiment of the present invention relates to a process for the production of glucose-1-phosphate, which comprises
[82453] (a) increasing or generating the activity of a acid shock protein non-targeted in a non-human organism or a part thereof, preferably a microorganism, a plant cell, a plant or a part thereof, as compared to a corresponding non-transformed wild type non-human organism or a part thereof; and
[82454] (b) growing the non-human organism or a part thereof under conditions which permit the production of glucose-1-phosphate or a composition comprising glucose-1-phosphate in said non-human organism or in the culture medium surrounding said non-human organism.

[82455] A further embodiment of the present invention relates to a process for the production of myo-inositol, which comprises
[82456] (a) increasing or generating the activity of a acid shock protein non-targeted in a non-human organism or a part thereof, preferably a microorganism, a plant cell, a plant or a part thereof, as compared to a corresponding non-transformed wild type non-human organism or a part thereof; and
[82457] (b) growing the non-human organism or a part thereof under conditions which permit the production of myo-inositol or a composition comprising myo-inositol in said non-human organism or in the culture medium surrounding said non-human organism.

[82458] A further embodiment of the present invention relates to a process for the production of raffinose, which comprises
[82459] (a) increasing or generating the activity of a acid shock protein non-targeted in a non-human organism or a part thereof, preferably a microorganism, a plant cell, a plant or a part thereof, as compared to a corresponding non-transformed wild type non-human organism or a part thereof; and
[82460] (b) growing the non-human organism or a part thereof under conditions which permit the production of raffinose or a composition comprising raffinose in said non-human organism or in the culture medium surrounding said non-human organism.

[82461] A further embodiment of the present invention relates to a process for the production of fructose, which comprises
[82462] (a) increasing or generating the activity of a phosphotransferase system component non-targeted in a non-human organism or a part thereof, preferably a microorganism, a plant cell, a plant or a part thereof, as compared to a corresponding non-transformed wild type non-human organism or a part thereof; and
[82463] (b) growing the non-human organism or a part thereof under conditions which permit the production of fructose or a composition comprising fructose in said non-human organism or in the culture medium surrounding said non-human organism.

[82464] A further embodiment of the present invention relates to a process for the production of glucose, which comprises
[82465] (a) increasing or generating the activity of a phosphotransferase system component non-targeted in a non-human organism or a part thereof, preferably a microorganism, a plant cell, a plant or a part thereof, as compared to a corresponding non-transformed wild type non-human organism or a part thereof; and
[82466] (b) growing the non-human organism or a part thereof under conditions which permit the production of glucose or a composition comprising glucose in said non-human organism or in the culture medium surrounding said non-human organism.

[82467] A further embodiment of the present invention relates to a process for the production of glucose, which comprises
[82468] (a) increasing or generating the activity of a electron transport complex protein non-targeted in a non-human organism or a part thereof, preferably a microorganism, a plant cell, a plant or a part thereof, as compared to a corresponding non-transformed wild type non-human organism or a part thereof; and
[82469] (b) growing the non-human organism or a part thereof under conditions which permit the production of glucose or a composition comprising glucose in said non-human organism or in the culture medium surrounding said non-human organism.

[82470] A further embodiment of the present invention relates to a process for the production of glucose-1-phosphate, which comprises
[82471] (a) increasing or generating the activity of a electron transport complex protein non-targeted in a non-human organism or a part thereof, preferably a microorganism, a plant cell, a plant or a part thereof, as compared to a corresponding non-transformed wild type non-human organism or a part thereof; and
[82472] (b) growing the non-human organism or a part thereof under conditions which permit the production of glucose-1-phosphate or a composition comprising glucose-1-phosphate in said non-human organism or in the culture medium surrounding said non-human organism.

[82473] A further embodiment of the present invention relates to a process for the production of 3,4,5-trihydroxypentanoic acid, which comprises
[82474] (a) increasing or generating the activity of a electron transport complex protein non-targeted in a non-human organism or a part thereof, preferably a microorganism, a plant cell, a plant or a part thereof, as compared to a corresponding non-transformed wild type non-human organism or a part thereof; and
[82475] (b) growing the non-human organism or a part thereof under conditions which permit the production of 3,4,5-trihydroxypentanoic acid or a composition comprising 3,4,5-trihydroxypentanoic acid in said non-human organism or in the culture medium surrounding said non-human organism.

[82476] A further embodiment of the present invention relates to a process for the production of myo-inositol, which comprises
[82477] (a) increasing or generating the activity of a methylglyoxalase non-targeted in a non-human organism or a part thereof, preferably a microorganism, a plant cell, a plant or a part thereof, as compared to a corresponding non-transformed wild type non-human organism or a part thereof; and
[82478] (b) growing the non-human organism or a part thereof under conditions which permit the production of myo-inositol or a composition comprising myo-inositol in said non-human organism or in the culture medium surrounding said non-human organism.

[82479] A further embodiment of the present invention relates to a process for the production of myo-inositol, which comprises
[82480] (a) increasing or generating the activity of a b1670-protein non-targeted in a non-human organism or a part thereof, preferably a microorganism, a plant cell, a plant or a part thereof, as compared to a corresponding non-transformed wild type non-human organism or a part thereof; and
[82481] (b) growing the non-human organism or a part thereof under conditions which permit the production of myo-inositol or a composition comprising myo-inositol in said non-human organism or in the culture medium surrounding said non-human organism.

[82482] A further embodiment of the present invention relates to a process for the production of fructose, which comprises
[82483] (a) increasing or generating the activity of a ABC transporter permease protein non-targeted in a non-human organism or a part thereof, preferably a microorganism, a plant cell, a plant or a part thereof, as compared to a corresponding non-transformed wild type non-human organism or a part thereof; and
[82484] (b) growing the non-human organism or a part thereof under conditions which permit the production of fructose or a composition comprising fructose in said non-human organism or in the culture medium surrounding said non-human organism.

[82485] A further embodiment of the present invention relates to a process for the production of myo-inositol, which comprises
[82486] (a) increasing or generating the activity of a transport protein non-targeted in a non-human organism or a part thereof, preferably a microorganism, a plant cell, a plant or a part thereof, as compared to a corresponding non-transformed wild type non-human organism or a part thereof; and
[82487] (b) growing the non-human organism or a part thereof under conditions which permit the production of myo-inositol or a composition comprising myo-inositol in said non-human organism or in the culture medium surrounding said non-human organism.

[82488] A further embodiment of the present invention relates to a process for the production of fructose, which comprises
[82489] (a) increasing or generating the activity of a b1796-protein non-targeted in a non-human organism or a part thereof, preferably a microorganism, a plant cell, a plant or a part thereof, as compared to a corresponding non-transformed wild type non-human organism or a part thereof; and
[82490] (b) growing the non-human organism or a part thereof under conditions which permit the production of fructose or a composition comprising fructose in said non-human organism or in the culture medium surrounding said non-human organism.

[82491] A further embodiment of the present invention relates to a process for the production of myo-inositol, which comprises
[82492] (a) increasing or generating the activity of a para-aminobenzoate synthase component I non-targeted in a non-human organism or a part thereof, preferably a microorganism, a plant cell, a plant or a part thereof, as compared to a corresponding non-transformed wild type non-human organism or a part thereof; and
[82493] (b) growing the non-human organism or a part thereof under conditions which permit the production of myo-inositol or a composition comprising myo-inositol in said non-human organism or in the culture medium surrounding said non-human organism.

[82494] A further embodiment of the present invention relates to a process for the production of galactitol, which comprises
[82495] (a) increasing or generating the activity of a L-serine dehydratase non-targeted in a non-human organism or a part thereof, preferably a microorganism, a plant cell, a plant or a part thereof, as compared to a corresponding non-transformed wild type non-human organism or a part thereof; and
[82496] (b) growing the non-human organism or a part thereof under conditions which permit the production of galactitol or a composition comprising galactitol in said non-human organism or in the culture medium surrounding said non-human organism.

[82497] A further embodiment of the present invention relates to a process for the production of sorbitol, which comprises
[82498] (a) increasing or generating the activity of a L-serine dehydratase non-targeted in a non-human organism or a part thereof, preferably a microorganism, a plant cell, a plant or a part thereof, as compared to a corresponding non-transformed wild type non-human organism or a part thereof; and
[82499] (b) growing the non-human organism or a part thereof under conditions which permit the production of sorbitol or a composition comprising sorbitol in said non-human organism or in the culture medium surrounding said non-human organism.

[82500] A further embodiment of the present invention relates to a process for the production of myo-inositol, which comprises
[82501] (a) increasing or generating the activity of a protease non-targeted in a non-human organism or a part thereof, preferably a microorganism, a plant cell, a plant or a part thereof, as compared to a corresponding non-transformed wild type non-human organism or a part thereof; and
[82502] (b) growing the non-human organism or a part thereof under conditions which permit the production of myo-inositol or a composition comprising myo-inositol in said non-human organism or in the culture medium surrounding said non-human organism.

[82503] A further embodiment of the present invention relates to a process for the production of erythrol, which comprises
[82504] (a) increasing or generating the activity of a pyruvate kinase non-targeted in a non-human organism or a part thereof, preferably a microorganism, a plant cell, a plant or a part thereof, as compared to a corresponding non-transformed wild type non-human organism or a part thereof; and
[82505] (b) growing the non-human organism or a part thereof under conditions which permit the production of erythrol or a composition comprising erythrol in said non-human organism or in the culture medium surrounding said non-human organism.

[82506] A further embodiment of the present invention relates to a process for the production of myo-inositol, which comprises
[82507] (a) increasing or generating the activity of a pyruvate kinase non-targeted in a non-human organism or a part thereof, preferably a microorganism, a plant cell, a plant or a part thereof, as compared to a corresponding non-transformed wild type non-human organism or a part thereof; and
[82508] (b) growing the non-human organism or a part thereof under conditions which permit the production of myo-inositol or a composition comprising myo-inositol in said non-human organism or in the culture medium surrounding said non-human organism.

[82509] A further embodiment of the present invention relates to a process for the production of sorbitol, which comprises
[82510] (a) increasing or generating the activity of a pyruvate kinase non-targeted in a non-human organism or a part thereof, preferably a microorganism, a plant cell, a plant or a part thereof, as compared to a corresponding non-transformed wild type non-human organism or a part thereof; and
[82511] (b) growing the non-human organism or a part thereof under conditions which permit the production of sorbitol or a composition comprising sorbitol in said non-human organism or in the culture medium surrounding said non-human organism.

[82512] A further embodiment of the present invention relates to a process for the production of fructose, which comprises
[82513] (a) increasing or generating the activity of a dATP pyrophosphohydrolase non-targeted in a non-human organism or a part thereof, preferably a microorganism, a plant cell, a plant or a part thereof, as compared to a corresponding non-transformed wild type non-human organism or a part thereof; and
[82514] (b) growing the non-human organism or a part thereof under conditions which permit the production of fructose or a composition comprising fructose in said non-human organism or in the culture medium surrounding said non-human organism.

[82515] A further embodiment of the present invention relates to a process for the production of glucose-1-phosphate, which comprises
[82516] (a) increasing or generating the activity of a trehalose-6-phosphate synthase non-targeted in a non-human organism or a part thereof, preferably a microorganism, a plant cell, a plant or a part thereof, as compared to a corresponding non-transformed wild type non-human organism or a part thereof; and
[82517] (b) growing the non-human organism or a part thereof under conditions which permit the production of glucose-1-phosphate or a composition comprising glucose-1-phosphate in said non-human organism or in the culture medium surrounding said non-human organism.

[82518] A further embodiment of the present invention relates to a process for the production of trehalose, which comprises
[82519] (a) increasing or generating the activity of a trehalose-6-phosphate synthase non-targeted in a non-human organism or a part thereof, preferably a microorganism, a plant cell, a plant or a part thereof, as compared to a corresponding non-transformed wild type non-human organism or a part thereof; and
[82520] (b) growing the non-human organism or a part thereof under conditions which permit the production of trehalose or a composition comprising trehalose in said non-human organism or in the culture medium surrounding said non-human organism.

[82521] A further embodiment of the present invention relates to a process for the production of erythrol, which comprises
[82522] (a) increasing or generating the activity of a trehalose-phosphatase non-targeted in a non-human organism or a part thereof, preferably a microorganism, a plant cell, a plant or a part thereof, as compared to a corresponding non-transformed wild type non-human organism or a part thereof; and
[82523] (b) growing the non-human organism or a part thereof under conditions which permit the production of erythrol or a composition comprising erythrol in said non-human organism or in the culture medium surrounding said non-human organism.

[82524] A further embodiment of the present invention relates to a process for the production of fructose, which comprises
[82525] (a) increasing or generating the activity of a trehalose-phosphatase non-targeted in a non-human organism or a part thereof, preferably a microorganism, a plant cell, a plant or a part thereof, as compared to a corresponding non-transformed wild type non-human organism or a part thereof; and
[82526] (b) growing the non-human organism or a part thereof under conditions which permit the production of fructose or a composition comprising fructose in said non-human organism or in the culture medium surrounding said non-human organism.

[82527] A further embodiment of the present invention relates to a process for the production of glucose, which comprises
[82528] (a) increasing or generating the activity of a trehalose-phosphatase non-targeted in a non-human organism or a part thereof, preferably a microorganism, a plant cell, a plant or a part thereof, as compared to a corresponding non-transformed wild type non-human organism or a part thereof; and
[82529] (b) growing the non-human organism or a part thereof under conditions which permit the production of glucose or a composition comprising glucose in said non-human organism or in the culture medium surrounding said non-human organism.

[82530] A further embodiment of the present invention relates to a process for the production of sucrose, which comprises
[82531] (a) increasing or generating the activity of a trehalose-phosphatase non-targeted in a non-human organism or a part thereof, preferably a microorganism, a plant cell, a plant or a part thereof, as compared to a corresponding non-transformed wild type non-human organism or a part thereof; and
[82532] (b) growing the non-human organism or a part thereof under conditions which permit the production of sucrose or a composition comprising sucrose in said non-human organism or in the culture medium surrounding said non-human organism.

[82533] A further embodiment of the present invention relates to a process for the production of raffinose, which comprises
[82534] (a) increasing or generating the activity of a b1898-protein non-targeted in a non-human organism or a part thereof, preferably a microorganism, a plant cell, a plant or a part thereof, as compared to a corresponding non-transformed wild type non-human organism or a part thereof; and
[82535] (b) growing the non-human organism or a part thereof under conditions which permit the production of raffinose or a composition comprising raffinose in said non-human organism or in the culture medium surrounding said non-human organism.

[82536] A further embodiment of the present invention relates to a process for the production of glucose-1-phosphate, which comprises
[82537] (a) increasing or generating the activity of a acetyltransferase non-targeted in a non-human organism or a part thereof, preferably a microorganism, a plant cell, a plant or a part thereof, as compared to a corresponding non-transformed wild type non-human organism or a part thereof; and
[82538] (b) growing the non-human organism or a part thereof under conditions which permit the production of glucose-1-phosphate or a composition comprising glucose-1-phosphate in said non-human organism or in the culture medium surrounding said non-human organism.

[82539] A further embodiment of the present invention relates to a process for the production of 3,4,5-trihydroxypentanoic acid, which comprises
[82540] (a) increasing or generating the activity of a acetyltransferase non-targeted in a non-human organism or a part thereof, preferably a microorganism, a plant cell, a plant or a part thereof, as compared to a corresponding non-transformed wild type non-human organism or a part thereof; and
[82541] (b) growing the non-human organism or a part thereof under conditions which permit the production of 3,4,5-trihydroxypentanoic acid or a composition comprising 3,4,5-trihydroxypentanoic acid in said non-human organism or in the culture medium surrounding said non-human organism.

[82542] A further embodiment of the present invention relates to a process for the production of glucose, which comprises
[82543] (a) increasing or generating the activity of a flagellar M-ring protein non-targeted in a non-human organism or a part thereof, preferably a microorganism, a plant cell, a plant or a part thereof, as compared to a corresponding non-transformed wild type non-human organism or a part thereof; and
[82544] (b) growing the non-human organism or a part thereof under conditions which permit the production of glucose or a composition comprising glucose in said non-human organism or in the culture medium surrounding said non-human organism.

[82545] A further embodiment of the present invention relates to a process for the production of myo-inositol, which comprises
[82546] (a) increasing or generating the activity of a flagellar M-ring protein non-targeted in a non-human organism or a part thereof, preferably a microorganism, a plant cell, a plant or a part thereof, as compared to a corresponding non-transformed wild type non-human organism or a part thereof; and
[82547] (b) growing the non-human organism or a part thereof under conditions which permit the production of myo-inositol or a composition comprising myo-inositol in said non-human organism or in the culture medium surrounding said non-human organism.

[82548] A further embodiment of the present invention relates to a process for the production of fructose, which comprises
[82549] (a) increasing or generating the activity of a O-antigen chain length determinant non-targeted in a non-human organism or a part thereof, preferably a microorganism, a plant cell, a plant or a part thereof, as compared to a corresponding non-transformed wild type non-human organism or a part thereof; and
[82550] (b) growing the non-human organism or a part thereof under conditions which permit the production of fructose or a composition comprising fructose in said non-human organism or in the culture medium surrounding said non-human organism.

[82551] A further embodiment of the present invention relates to a process for the production of glucose, which comprises
[82552] (a) increasing or generating the activity of a b2032-protein non-targeted in a non-human organism or a part thereof, preferably a microorganism, a plant cell, a plant or a part thereof, as compared to a corresponding non-transformed wild type non-human organism or a part thereof; and
[82553] (b) growing the non-human organism or a part thereof under conditions which permit the production of glucose or a composition comprising glucose in said non-human organism or in the culture medium surrounding said non-human organism.

[82554] A further embodiment of the present invention relates to a process for the production of myo-inositol, which comprises
[82555] (a) increasing or generating the activity of a b2032-protein non-targeted in a non-human organism or a part thereof, preferably a microorganism, a plant cell, a plant or a part thereof, as compared to a corresponding non-transformed wild type non-human organism or a part thereof; and
[82556] (b) growing the non-human organism or a part thereof under conditions which permit the production of myo-inositol or a composition comprising myo-inositol in said non-human organism or in the culture medium surrounding said non-human organism.

[82557] A further embodiment of the present invention relates to a process for the production of glucose-1-phosphate, which comprises
[82558] (a) increasing or generating the activity of a colanic acid biosynthesis protein non-targeted in a non-human organism or a part thereof, preferably a microorganism, a plant cell, a plant or a part thereof, as compared to a corresponding non-transformed wild type non-human organism or a part thereof; and
[82559] (b) growing the non-human organism or a part thereof under conditions which permit the production of glucose-1-phosphate or a composition comprising glucose-1-phosphate in said non-human organism or in the culture medium surrounding said non-human organism.

[82560] A further embodiment of the present invention relates to a process for the production of fucose, which comprises
[82561] (a) increasing or generating the activity of a GDP-mannose 4,6-dehydratase non-targeted in a non-human organism or a part thereof, preferably a microorganism, a plant cell, a plant or a part thereof, as compared to a corresponding non-transformed wild type non-human organism or a part thereof; and
[82562] (b) growing the non-human organism or a part thereof under conditions which permit the production of fucose or a composition comprising fucose in said non-human organism or in the culture medium surrounding said non-human organism.

[82563] A further embodiment of the present invention relates to a process for the production of fructose, which comprises
[82564] (a) increasing or generating the activity of a transport protein non-targeted in a non-human organism or a part thereof, preferably a microorganism, a plant cell, a plant or a part thereof, as compared to a corresponding non-transformed wild type non-human organism or a part thereof; and
[82565] (b) growing the non-human organism or a part thereof under conditions which permit the production of fructose or a composition comprising fructose in said non-human organism or in the culture medium surrounding said non-human organism.

[82566] A further embodiment of the present invention relates to a process for the production of glucose-1-phosphate, which comprises
[82567] (a) increasing or generating the activity of a transport protein non-targeted in a non-human organism or a part thereof, preferably a microorganism, a plant cell, a plant or a part thereof, as compared to a corresponding non-transformed wild type non-human organism or a part thereof; and
[82568] (b) growing the non-human organism or a part thereof under conditions which permit the production of glucose-1-phosphate or a composition comprising glucose-1-phosphate in said non-human organism or in the culture medium surrounding said non-human organism.

[82569] A further embodiment of the present invention relates to a process for the production of raffinose, which comprises
[82570] (a) increasing or generating the activity of a transport protein non-targeted in a non-human organism or a part thereof, preferably a microorganism, a plant cell, a plant or a part thereof, as compared to a corresponding non-transformed wild type non-human organism or a part thereof; and
[82571] (b) growing the non-human organism or a part thereof under conditions which permit the production of raffinose or a composition comprising raffinose in said non-human organism or in the culture medium surrounding said non-human organism.

[82572] A further embodiment of the present invention relates to a process for the production of sucrose, which comprises
[82573] (a) increasing or generating the activity of a transport protein non-targeted in a non-human organism or a part thereof, preferably a microorganism, a plant cell, a plant or a part thereof, as compared to a corresponding non-transformed wild type non-human organism or a part thereof; and
[82574] (b) growing the non-human organism or a part thereof under conditions which permit the production of sucrose or a composition comprising sucrose in said non-human organism or in the culture medium surrounding said non-human organism.

[82575] A further embodiment of the present invention relates to a process for the production of 3,4,5-trihydroxypentanoic acid, which comprises
[82576] (a) increasing or generating the activity of a transport protein non-targeted in a non-human organism or a part thereof, preferably a microorganism, a plant cell, a plant or a part thereof, as compared to a corresponding non-transformed wild type non-human organism or a part thereof; and
[82577] (b) growing the non-human organism or a part thereof under conditions which permit the production of 3,4,5-trihydroxypentanoic acid or a composition comprising 3,4,5-trihydroxypentanoic acid in said non-human organism or in the culture medium surrounding said non-human organism.

[82578] A further embodiment of the present invention relates to a process for the production of glucose-1-phosphate, which comprises
[82579] (a) increasing or generating the activity of a b2107-protein non-targeted in a non-human organism or a part thereof, preferably a microorganism, a plant cell, a plant or a part thereof, as compared to a corresponding non-transformed wild type non-human organism or a part thereof; and
[82580] (b) growing the non-human organism or a part thereof under conditions which permit the production of glucose-1-phosphate or a composition comprising glucose-1-phosphate in said non-human organism or in the culture medium surrounding said non-human organism.

[82581] A further embodiment of the present invention relates to a process for the production of 3,4,5-trihydroxypentanoic acid, which comprises
[82582] (a) increasing or generating the activity of a b2107-protein non-targeted in a non-human organism or a part thereof, preferably a microorganism, a plant cell, a plant or a part thereof, as compared to a corresponding non-transformed wild type non-human organism or a part thereof; and
[82583] (b) growing the non-human organism or a part thereof under conditions which permit the production of 3,4,5-trihydroxypentanoic acid or a composition comprising 3,4,5-trihydroxypentanoic acid in said non-human organism or in the culture medium surrounding said non-human organism.

[82584] A further embodiment of the present invention relates to a process for the production of glucose-1-phosphate, which comprises
[82585] (a) increasing or generating the activity of a b2139-protein non-targeted in a non-human organism or a part thereof, preferably a microorganism, a plant cell, a plant or a part thereof, as compared to a corresponding non-transformed wild type non-human organism or a part thereof; and
[82586] (b) growing the non-human organism or a part thereof under conditions which permit the production of glucose-1-phosphate or a composition comprising glucose-1-phosphate in said non-human organism or in the culture medium surrounding said non-human organism.

[82587] A further embodiment of the present invention relates to a process for the production of erythrol, which comprises
[82588] (a) increasing or generating the activity of a sn-glycerol-3-phosphate dehydrogenase non-targeted in a non-human organism or a part thereof, preferably a microorganism, a plant cell, a plant or a part thereof, as compared to a corresponding non-transformed wild type non-human organism or a part thereof; and
[82589] (b) growing the non-human organism or a part thereof under conditions which permit the production of erythrol or a composition comprising erythrol in said non-human organism or in the culture medium surrounding said non-human organism.

[82590] A further embodiment of the present invention relates to a process for the production of fructose, which comprises
[82591] (a) increasing or generating the activity of a ATP synthase subunit E non-targeted in a non-human organism or a part thereof, preferably a microorganism, a plant cell, a plant or a part thereof, as compared to a corresponding non-transformed wild type non-human organism or a part thereof; and
[82592] (b) growing the non-human organism or a part thereof under conditions which permit the production of fructose or a composition comprising fructose in said non-human organism or in the culture medium surrounding said non-human organism.

[82593] A further embodiment of the present invention relates to a process for the production of galactinol, which comprises
[82594] (a) increasing or generating the activity of a aminotransferase non-targeted in a non-human organism or a part thereof, preferably a microorganism, a plant cell, a plant or a part thereof, as compared to a corresponding non-transformed wild type non-human organism or a part thereof; and
[82595] (b) growing the non-human organism or a part thereof under conditions which permit the production of galactinol or a composition comprising galactinol in said non-human organism or in the culture medium surrounding said non-human organism.

[82596] A further embodiment of the present invention relates to a process for the production of myo-inositol, which comprises
[82597] (a) increasing or generating the activity of a b2345-protein non-targeted in a non-human organism or a part thereof, preferably a microorganism, a plant cell, a plant or a part thereof, as compared to a corresponding non-transformed wild type non-human organism or a part thereof; and
[82598] (b) growing the non-human organism or a part thereof under conditions which permit the production of myo-inositol or a composition comprising myo-inositol in said non-human organism or in the culture medium surrounding said non-human organism.

[82599] A further embodiment of the present invention relates to a process for the production of 3,4,5-trihydroxypentanoic acid, which comprises
[82600] (a) increasing or generating the activity of a b2345-protein non-targeted in a non-human organism or a part thereof, preferably a microorganism, a plant cell, a plant or a part thereof, as compared to a corresponding non-transformed wild type non-human organism or a part thereof; and
[82601] (b) growing the non-human organism or a part thereof under conditions which permit the production of 3,4,5-trihydroxypentanoic acid or a composition comprising 3,4,5-trihydroxypentanoic acid in said non-human organism or in the culture medium surrounding said non-human organism.

[82602] A further embodiment of the present invention relates to a process for the production of verbascose, which comprises
[82603] (a) increasing or generating the activity of a b2360-protein non-targeted in a non-human organism or a part thereof, preferably a microorganism, a plant cell, a plant or a part thereof, as compared to a corresponding non-transformed wild type non-human organism or a part thereof; and
[82604] (b) growing the non-human organism or a part thereof under conditions which permit the production of verbascose or a composition comprising verbascose in said non-human organism or in the culture medium surrounding said non-human organism.

[82605] A further embodiment of the present invention relates to a process for the production of 3,4,5-trihydroxypentanoic acid, which comprises
[82606] (a) increasing or generating the activity of a b2360-protein non-targeted in a non-human organism or a part thereof, preferably a microorganism, a plant cell, a plant or a part thereof, as compared to a corresponding non-transformed wild type non-human organism or a part thereof; and
[82607] (b) growing the non-human organism or a part thereof under conditions which permit the production of 3,4,5-trihydroxypentanoic acid or a composition comprising 3,4,5-trihydroxypentanoic acid in said non-human organism or in the culture medium surrounding said non-human organism.

[82608] A further embodiment of the present invention relates to a process for the production of glucose-1-phosphate, which comprises
[82609] (a) increasing or generating the activity of a b2361-protein non-targeted in a non-human organism or a part thereof, preferably a microorganism, a plant cell, a plant or a part thereof, as compared to a corresponding non-transformed wild type non-human organism or a part thereof; and
[82610] (b) growing the non-human organism or a part thereof under conditions which permit the production of glucose-1-phosphate or a composition comprising glucose-1-phosphate in said non-human organism or in the culture medium surrounding said non-human organism.

[82611] A further embodiment of the present invention relates to a process for the production of 3,4,5-trihydroxypentanoic acid, which comprises
[82612] (a) increasing or generating the activity of a b2361-protein non-targeted in a non-human organism or a part thereof, preferably a microorganism, a plant cell, a plant or a part thereof, as compared to a corresponding non-transformed wild type non-human organism or a part thereof; and
[82613] (b) growing the non-human organism or a part thereof under conditions which permit the production of 3,4,5-trihydroxypentanoic acid or a composition comprising 3,4,5-trihydroxypentanoic acid in said non-human organism or in the culture medium surrounding said non-human organism.

[82614] A further embodiment of the present invention relates to a process for the production of sucrose, which comprises
[82615] (a) increasing or generating the activity of a ion-transport protein non-targeted in a non-human organism or a part thereof, preferably a microorganism, a plant cell, a plant or a part thereof, as compared to a corresponding non-transformed wild type non-human organism or a part thereof; and
[82616] (b) growing the non-human organism or a part thereof under conditions which permit the production of sucrose or a composition comprising sucrose in said non-human organism or in the culture medium surrounding said non-human organism.

[82617] A further embodiment of the present invention relates to a process for the production of fructose, which comprises
[82618] (a) increasing or generating the activity of a b2399-protein non-targeted in a non-human organism or a part thereof, preferably a microorganism, a plant cell, a plant or a part thereof, as compared to a corresponding non-transformed wild type non-human organism or a part thereof; and
[82619] (b) growing the non-human organism or a part thereof under conditions which permit the production of fructose or a composition comprising fructose in said non-human organism or in the culture medium surrounding said non-human organism.

[82620] A further embodiment of the present invention relates to a process for the production of glucose, which comprises
[82621] (a) increasing or generating the activity of a b2399-protein non-targeted in a non-human organism or a part thereof, preferably a microorganism, a plant cell, a plant or a part thereof, as compared to a corresponding non-transformed wild type non-human organism or a part thereof; and
[82622] (b) growing the non-human organism or a part thereof under conditions which permit the production of glucose or a composition comprising glucose in said non-human organism or in the culture medium surrounding said non-human organism.

[82623] A further embodiment of the present invention relates to a process for the production of glucose-1-phosphate, which comprises
[82624] (a) increasing or generating the activity of a b2399-protein non-targeted in a non-human organism or a part thereof, preferably a microorganism, a plant cell, a plant or a part thereof, as compared to a corresponding non-transformed wild type non-human organism or a part thereof; and
[82625] (b) growing the non-human organism or a part thereof under conditions which permit the production of glucose-1-phosphate or a composition comprising glucose-1-phosphate in said non-human organism or in the culture medium surrounding said non-human organism.

[82626] A further embodiment of the present invention relates to a process for the production of myo-inositol, which comprises
[82627] (a) increasing or generating the activity of a b2399-protein non-targeted in a non-human organism or a part thereof, preferably a microorganism, a plant cell, a plant or a part thereof, as compared to a corresponding non-transformed wild type non-human organism or a part thereof; and
[82628] (b) growing the non-human organism or a part thereof under conditions which permit the production of myo-inositol or a composition comprising myo-inositol in said non-human organism or in the culture medium surrounding said non-human organism.

[82629] A further embodiment of the present invention relates to a process for the production of raffinose, which comprises
[82630] (a) increasing or generating the activity of a b2399-protein non-targeted in a non-human organism or a part thereof, preferably a microorganism, a plant cell, a plant or a part thereof, as compared to a corresponding non-transformed wild type non-human organism or a part thereof; and
[82631] (b) growing the non-human organism or a part thereof under conditions which permit the production of raffinose or a composition comprising raffinose in said non-human organism or in the culture medium surrounding said non-human organism.

[82632] A further embodiment of the present invention relates to a process for the production of sedoheptulose-7-phosphate, which comprises
[82633] (a) increasing or generating the activity of a b2399-protein non-targeted in a non-human organism or a part thereof, preferably a microorganism, a plant cell, a plant or a part thereof, as compared to a corresponding non-transformed wild type non-human organism or a part thereof; and
[82634] (b) growing the non-human organism or a part thereof under conditions which permit the production of sedoheptulose-7-phosphate or a composition comprising sedoheptulose-7-phosphate in said non-human organism or in the culture medium surrounding said non-human organism.

[82635] A further embodiment of the present invention relates to a process for the production of sucrose, which comprises
[82636] (a) increasing or generating the activity of a b2399-protein non-targeted in a non-human organism or a part thereof, preferably a microorganism, a plant cell, a plant or a part thereof, as compared to a corresponding non-transformed wild type non-human organism or a part thereof; and
[82637] (b) growing the non-human organism or a part thereof under conditions which permit the production of sucrose or a composition comprising sucrose in said non-human organism or in the culture medium surrounding said non-human organism.

[82638] A further embodiment of the present invention relates to a process for the production of fructose, which comprises
[82639] (a) increasing or generating the activity of a transcriptional regulator non-targeted in a non-human organism or a part thereof, preferably a microorganism, a plant cell, a plant or a part thereof, as compared to a corresponding non-transformed wild type non-human organism or a part thereof; and
[82640] (b) growing the non-human organism or a part thereof under conditions which permit the production of fructose or a composition comprising fructose in said non-human organism or in the culture medium surrounding said non-human organism.

[82641] A further embodiment of the present invention relates to a process for the production of raffinose, which comprises
[82642] (a) increasing or generating the activity of a transcriptional regulator non-targeted in a non-human organism or a part thereof, preferably a microorganism, a plant cell, a plant or a part thereof, as compared to a corresponding non-transformed wild type non-human organism or a part thereof; and
[82643] (b) growing the non-human organism or a part thereof under conditions which permit the production of raffinose or a composition comprising raffinose in said non-human organism or in the culture medium surrounding said non-human organism.

[82644] A further embodiment of the present invention relates to a process for the production of myo-inositol, which comprises
[82645] (a) increasing or generating the activity of a cysteine synthase A non-targeted in a non-human organism or a part thereof, preferably a microorganism, a plant cell, a plant or a part thereof, as compared to a corresponding non-transformed wild type non-human organism or a part thereof; and
[82646] (b) growing the non-human organism or a part thereof under conditions which permit the production of myo-inositol or a composition comprising myo-inositol in said non-human organism or in the culture medium surrounding said non-human organism.

[82647] A further embodiment of the present invention relates to a process for the production of verbascose, which comprises
[82648] (a) increasing or generating the activity of a cysteine synthase A non-targeted in a non-human organism or a part thereof, preferably a microorganism, a plant cell, a plant or a part thereof, as compared to a corresponding non-transformed wild type non-human organism or a part thereof; and
[82649] (b) growing the non-human organism or a part thereof under conditions which permit the production of verbascose or a composition comprising verbascose in said non-human organism or in the culture medium surrounding said non-human organism.

[82650] A further embodiment of the present invention relates to a process for the production of glucose-1-phosphate, which comprises
[82651] (a) increasing or generating the activity of a b2466-protein non-targeted in a non-human organism or a part thereof, preferably a microorganism, a plant cell, a plant or a part thereof, as compared to a corresponding non-transformed wild type non-human organism or a part thereof; and
[82652] (b) growing the non-human organism or a part thereof under conditions which permit the production of glucose-1-phosphate or a composition comprising glucose-1-phosphate in said non-human organism or in the culture medium surrounding said non-human organism.

[82653] A further embodiment of the present invention relates to a process for the production of myo-inositol, which comprises
[82654] (a) increasing or generating the activity of a b2466-protein non-targeted in a non-human organism or a part thereof, preferably a microorganism, a plant cell, a plant or a part thereof, as compared to a corresponding non-transformed wild type non-human organism or a part thereof; and
[82655] (b) growing the non-human organism or a part thereof under conditions which permit the production of myo-inositol or a composition comprising myo-inositol in said non-human organism or in the culture medium surrounding said non-human organism.

[82656] A further embodiment of the present invention relates to a process for the production of 3,4,5-trihydroxypentanoic acid, which comprises
[82657] (a) increasing or generating the activity of a b2466-protein non-targeted in a non-human organism or a part thereof, preferably a microorganism, a plant cell, a plant or a part thereof, as compared to a corresponding non-transformed wild type non-human organism or a part thereof; and
[82658] (b) growing the non-human organism or a part thereof under conditions which permit the production of 3,4,5-trihydroxypentanoic acid or a composition comprising 3,4,5-trihydroxypentanoic acid in said non-human organism or in the culture medium surrounding said non-human organism.

[82659] A further embodiment of the present invention relates to a process for the production of glucose-1-phosphate, which comprises
[82660] (a) increasing or generating the activity of a b2474-protein non-targeted in a non-human organism or a part thereof, preferably a microorganism, a plant cell, a plant or a part thereof, as compared to a corresponding non-transformed wild type non-human organism or a part thereof; and
[82661] (b) growing the non-human organism or a part thereof under conditions which permit the production of glucose-1-phosphate or a composition comprising glucose-1-phosphate in said non-human organism or in the culture medium surrounding said non-human organism.

[82662] A further embodiment of the present invention relates to a process for the production of raffinose, which comprises
[82663] (a) increasing or generating the activity of a 2,3-dihydroxy-2,3-dihydrophenylpropionatedehydrogenase non-targeted in a non-human organism or a part thereof, preferably a microorganism, a plant cell, a plant or a part thereof, as compared to a corresponding non-transformed wild type non-human organism or a part thereof; and
[82664] (b) growing the non-human organism or a part thereof under conditions which permit the production of raffinose or a composition comprising raffinose in said non-human organism or in the culture medium surrounding said non-human organism.

[82665] A further embodiment of the present invention relates to a process for the production of sucrose, which comprises
[82666] (a) increasing or generating the activity of a putative transport system permease protein non-targeted in a non-human organism or a part thereof, preferably a microorganism, a plant cell, a plant or a part thereof, as compared to a corresponding non-transformed wild type non-human organism or a part thereof; and
[82667] (b) growing the non-human organism or a part thereof under conditions which permit the production of sucrose or a composition comprising sucrose in said non-human organism or in the culture medium surrounding said non-human organism.

[82668] A further embodiment of the present invention relates to a process for the production of glucose-1-phosphate, which comprises
[82669] (a) increasing or generating the activity of a b2613-protein non-targeted in a non-human organism or a part thereof, preferably a microorganism, a plant cell, a plant or a part thereof, as compared to a corresponding non-transformed wild type non-human organism or a part thereof; and
[82670] (b) growing the non-human organism or a part thereof under conditions which permit the production of glucose-1-phosphate or a composition comprising glucose-1-phosphate in said non-human organism or in the culture medium surrounding said non-human organism.

[82671] A further embodiment of the present invention relates to a process for the production of myo-inositol, which comprises
[82672] (a) increasing or generating the activity of a b2613-protein non-targeted in a non-human organism or a part thereof, preferably a microorganism, a plant cell, a plant or a part thereof, as compared to a corresponding non-transformed wild type non-human organism or a part thereof; and
[82673] (b) growing the non-human organism or a part thereof under conditions which permit the production of myo-inositol or a composition comprising myo-inositol in said non-human organism or in the culture medium surrounding said non-human organism.

[82674] A further embodiment of the present invention relates to a process for the production of fructose, which comprises
[82675] (a) increasing or generating the activity of a transcriptional regulator non-targeted in a non-human organism or a part thereof, preferably a microorganism, a plant cell, a plant or a part thereof, as compared to a corresponding non-transformed wild type non-human organism or a part thereof; and
[82676] (b) growing the non-human organism or a part thereof under conditions which permit the production of fructose or a composition comprising fructose in said non-human organism or in the culture medium surrounding said non-human organism.

[82677] A further embodiment of the present invention relates to a process for the production of myo-inositol, which comprises
[82678] (a) increasing or generating the activity of a transcriptional regulator non-targeted in a non-human organism or a part thereof, preferably a microorganism, a plant cell, a plant or a part thereof, as compared to a corresponding non-transformed wild type non-human organism or a part thereof; and
[82679] (b) growing the non-human organism or a part thereof under conditions which permit the production of myo-inositol or a composition comprising myo-inositol in said non-human organism or in the culture medium surrounding said non-human organism.

[82680] A further embodiment of the present invention relates to a process for the production of sucrose, which comprises
[82681] (a) increasing or generating the activity of a transcriptional regulator non-targeted in a non-human organism or a part thereof, preferably a microorganism, a plant cell, a plant or a part thereof, as compared to a corresponding non-transformed wild type non-human organism or a part thereof; and
[82682] (b) growing the non-human organism or a part thereof under conditions which permit the production of sucrose or a composition comprising sucrose in said non-human organism or in the culture medium surrounding said non-human organism.

[82683] A further embodiment of the present invention relates to a process for the production of glucose-1-phosphate, which comprises
[82684] (a) increasing or generating the activity of a b2653-protein non-targeted in a non-human organism or a part thereof, preferably a microorganism, a plant cell, a plant or a part thereof, as compared to a corresponding non-transformed wild type non-human organism or a part thereof; and
[82685] (b) growing the non-human organism or a part thereof under conditions which permit the production of glucose-1-phosphate or a composition comprising glucose-1-phosphate in said non-human organism or in the culture medium surrounding said non-human organism.

[82686] A further embodiment of the present invention relates to a process for the production of sedoheptulose-7-phosphate, which comprises
[82687] (a) increasing or generating the activity of a b2653-protein non-targeted in a non-human organism or a part thereof, preferably a microorganism, a plant cell, a plant or a part thereof, as compared to a corresponding non-transformed wild type non-human organism or a part thereof; and
[82688] (b) growing the non-human organism or a part thereof under conditions which permit the production of sedoheptulose-7-phosphate or a composition comprising sedoheptulose-7-phosphate in said non-human organism or in the culture medium surrounding said non-human organism.

[82689] A further embodiment of the present invention relates to a process for the production of 3,4,5-trihydroxypentanoic acid, which comprises
[82690] (a) increasing or generating the activity of a b2653-protein non-targeted in a non-human organism or a part thereof, preferably a microorganism, a plant cell, a plant or a part thereof, as compared to a corresponding non-transformed wild type non-human organism or a part thereof; and
[82691] (b) growing the non-human organism or a part thereof under conditions which permit the production of 3,4,5-trihydroxypentanoic acid or a composition comprising 3,4,5-trihydroxypentanoic acid in said non-human organism or in the culture medium surrounding said non-human organism.

[82692] A further embodiment of the present invention relates to a process for the production of glucose-1-phosphate, which comprises
[82693] (a) increasing or generating the activity of a b2654-protein non-targeted in a non-human organism or a part thereof, preferably a microorganism, a plant cell, a plant or a part thereof, as compared to a corresponding non-transformed wild type non-human organism or a part thereof; and
[82694] (b) growing the non-human organism or a part thereof under conditions which permit the production of glucose-1-phosphate or a composition comprising glucose-1-phosphate in said non-human organism or in the culture medium surrounding said non-human organism.

[82695] A further embodiment of the present invention relates to a process for the production of 3,4,5-trihydroxypentanoic acid, which comprises
[82696] (a) increasing or generating the activity of a b2654-protein non-targeted in a non-human organism or a part thereof, preferably a microorganism, a plant cell, a plant or a part thereof, as compared to a corresponding non-transformed wild type non-human organism or a part thereof; and
[82697] (b) growing the non-human organism or a part thereof under conditions which permit the production of 3,4,5-trihydroxypentanoic acid or a composition comprising 3,4,5-trihydroxypentanoic acid in said non-human organism or in the culture medium surrounding said non-human organism.

[82698] A further embodiment of the present invention relates to a process for the production of glucose-1-phosphate, which comprises
[82699] (a) increasing or generating the activity of a b2670-protein non-targeted in a non-human organism or a part thereof, preferably a microorganism, a plant cell, a plant or a part thereof, as compared to a corresponding non-transformed wild type non-human organism or a part thereof; and
[82700] (b) growing the non-human organism or a part thereof under conditions which permit the production of glucose-1-phosphate or a composition comprising glucose-1-phosphate in said non-human organism or in the culture medium surrounding said non-human organism.

[82701] A further embodiment of the present invention relates to a process for the production of glucose-1-phosphate, which comprises
[82702] (a) increasing or generating the activity of a b2673-protein non-targeted in a non-human organism or a part thereof, preferably a microorganism, a plant cell, a plant or a part thereof, as compared to a corresponding non-transformed wild type non-human organism or a part thereof; and
[82703] (b) growing the non-human organism or a part thereof under conditions which permit the production of glucose-1-phosphate or a composition comprising glucose-1-phosphate in said non-human organism or in the culture medium surrounding said non-human organism.

[82704] A further embodiment of the present invention relates to a process for the production of 3,4,5-trihydroxypentanoic acid, which comprises
[82705] (a) increasing or generating the activity of a b2673-protein non-targeted in a non-human organism or a part thereof, preferably a microorganism, a plant cell, a plant or a part thereof, as compared to a corresponding non-transformed wild type non-human organism or a part thereof; and
[82706] (b) growing the non-human organism or a part thereof under conditions which permit the production of 3,4,5-trihydroxypentanoic acid or a composition comprising 3,4,5-trihydroxypentanoic acid in said non-human organism or in the culture medium surrounding said non-human organism.

[82707] A further embodiment of the present invention relates to a process for the production of myo-inositol, which comprises
[82708] (a) increasing or generating the activity of a b2682-protein non-targeted in a non-human organism or a part thereof, preferably a microorganism, a plant cell, a plant or a part thereof, as compared to a corresponding non-transformed wild type non-human organism or a part thereof; and
[82709] (b) growing the non-human organism or a part thereof under conditions which permit the production of myo-inositol or a composition comprising myo-inositol in said non-human organism or in the culture medium surrounding said non-human organism.

[82710] A further embodiment of the present invention relates to a process for the production of glucose-1-phosphate, which comprises
[82711] (a) increasing or generating the activity of a recombinase A non-targeted in a non-human organism or a part thereof, preferably a microorganism, a plant cell, a plant or a part thereof, as compared to a corresponding non-transformed wild type non-human organism or a part thereof; and
[82712] (b) growing the non-human organism or a part thereof under conditions which permit the production of glucose-1-phosphate or a composition comprising glucose-1-phosphate in said non-human organism or in the culture medium surrounding said non-human organism.

[82713] A further embodiment of the present invention relates to a process for the production of glucose-1-phosphate, which comprises
[82714] (a) increasing or generating the activity of a murein transglycosylase non-targeted in a non-human organism or a part thereof, preferably a microorganism, a plant cell, a plant or a part thereof, as compared to a corresponding non-transformed wild type non-human organism or a part thereof; and
[82715] (b) growing the non-human organism or a part thereof under conditions which permit the production of glucose-1-phosphate or a composition comprising glucose-1-phosphate in said non-human organism or in the culture medium surrounding said non-human organism.

[82716] A further embodiment of the present invention relates to a process for the production of myo-inositol, which comprises
[82717] (a) increasing or generating the activity of a transcriptional regulator non-targeted in a non-human organism or a part thereof, preferably a microorganism, a plant cell, a plant or a part thereof, as compared to a corresponding non-transformed wild type non-human organism or a part thereof; and
[82718] (b) growing the non-human organism or a part thereof under conditions which permit the production of myo-inositol or a composition comprising myo-inositol in said non-human organism or in the culture medium surrounding said non-human organism.

[82719] A further embodiment of the present invention relates to a process for the production of fructose, which comprises
[82720] (a) increasing or generating the activity of a b2739-protein non-targeted in a non-human organism or a part thereof, preferably a microorganism, a plant cell, a plant or a part thereof, as compared to a corresponding non-transformed wild type non-human organism or a part thereof; and
[82721] (b) growing the non-human organism or a part thereof under conditions which permit the production of fructose or a composition comprising fructose in said non-human organism or in the culture medium surrounding said non-human organism.

[82722] A further embodiment of the present invention relates to a process for the production of glucose, which comprises
[82723] (a) increasing or generating the activity of a b2739-protein non-targeted in a non-human organism or a part thereof, preferably a microorganism, a plant cell, a plant or a part thereof, as compared to a corresponding non-transformed wild type non-human organism or a part thereof; and
[82724] (b) growing the non-human organism or a part thereof under conditions which permit the production of glucose or a composition comprising glucose in said non-human organism or in the culture medium surrounding said non-human organism.

[82725] A further embodiment of the present invention relates to a process for the production of glucose, which comprises
[82726] (a) increasing or generating the activity of a 2-C-methyl-D-erythritol 4-phosphate cytidylyltransferase non-targeted in a non-human organism or a part thereof, preferably a microorganism, a plant cell, a plant or a part thereof, as compared to a corresponding non-transformed wild type non-human organism or a part thereof; and
[82727] (b) growing the non-human organism or a part thereof under conditions which permit the production of glucose or a composition comprising glucose in said non-human organism or in the culture medium surrounding said non-human organism.

[82728] A further embodiment of the present invention relates to a process for the production of myo-inositol, which comprises
[82729] (a) increasing or generating the activity of a 2-C-methyl-D-erythritol 4-phosphate cytidylyltransferase non-targeted in a non-human organism or a part thereof, preferably a microorganism, a plant cell, a plant or a part thereof, as compared to a corresponding non-transformed wild type non-human organism or a part thereof; and
[82730] (b) growing the non-human organism or a part thereof under conditions which permit the production of myo-inositol or a composition comprising myo-inositol in said non-human organism or in the culture medium surrounding said non-human organism.

[82731] A further embodiment of the present invention relates to a process for the production of raffinose, which comprises
[82732] (a) increasing or generating the activity of a 2-C-methyl-D-erythritol 4-phosphate cytidylyltransferase non-targeted in a non-human organism or a part thereof, preferably a microorganism, a plant cell, a plant or a part thereof, as compared to a corresponding non-transformed wild type non-human organism or a part thereof; and
[82733] (b) growing the non-human organism or a part thereof under conditions which permit the production of raffinose or a composition comprising raffinose in said non-human organism or in the culture medium surrounding said non-human organism.

[82734] A further embodiment of the present invention relates to a process for the production of glucose-1-phosphate, which comprises
[82735] (a) increasing or generating the activity of a phosphoadenosine phosphosulfate reductase non-targeted in a non-human organism or a part thereof, preferably a microorganism, a plant cell, a plant or a part thereof, as compared to a corresponding non-transformed wild type non-human organism or a part thereof; and
[82736] (b) growing the non-human organism or a part thereof under conditions which permit the production of glucose-1-phosphate or a composition comprising glucose-1-phosphate in said non-human organism or in the culture medium surrounding said non-human organism.

[82737] A further embodiment of the present invention relates to a process for the production of 3,4,5-trihydroxypentanoic acid, which comprises
[82738] (a) increasing or generating the activity of a phosphoadenosine phosphosulfate reductase non-targeted in a non-human organism or a part thereof, preferably a microorganism, a plant cell, a plant or a part thereof, as compared to a corresponding non-transformed wild type non-human organism or a part thereof; and
[82739] (b) growing the non-human organism or a part thereof under conditions which permit the production of 3,4,5-trihydroxypentanoic acid or a composition comprising 3,4,5-trihydroxypentanoic acid in said non-human organism or in the culture medium surrounding said non-human organism.

[82740] A further embodiment of the present invention relates to a process for the production of fructose, which comprises
[82741] (a) increasing or generating the activity of a flavodoxin non-targeted in a non-human organism or a part thereof, preferably a microorganism, a plant cell, a plant or a part thereof, as compared to a corresponding non-transformed wild type non-human organism or a part thereof; and
[82742] (b) growing the non-human organism or a part thereof under conditions which permit the production of fructose or a composition comprising fructose in said non-human organism or in the culture medium surrounding said non-human organism.

[82743] A further embodiment of the present invention relates to a process for the production of glucose, which comprises
[82744] (a) increasing or generating the activity of a flavodoxin non-targeted in a non-human organism or a part thereof, preferably a microorganism, a plant cell, a plant or a part thereof, as compared to a corresponding non-transformed wild type non-human organism or a part thereof; and
[82745] (b) growing the non-human organism or a part thereof under conditions which permit the production of glucose or a composition comprising glucose in said non-human organism or in the culture medium surrounding said non-human organism.

[82746] A further embodiment of the present invention relates to a process for the production of glucose-1-phosphate, which comprises
[82747] (a) increasing or generating the activity of a flavodoxin non-targeted in a non-human organism or a part thereof, preferably a microorganism, a plant cell, a plant or a part thereof, as compared to a corresponding non-transformed wild type non-human organism or a part thereof; and
[82748] (b) growing the non-human organism or a part thereof under conditions which permit the production of glucose-1-phosphate or a composition comprising glucose-1-phosphate in said non-human organism or in the culture medium surrounding said non-human organism.

[82749] A further embodiment of the present invention relates to a process for the production of myo-inositol, which comprises
[82750] (a) increasing or generating the activity of a flavodoxin non-targeted in a non-human organism or a part thereof, preferably a microorganism, a plant cell, a plant or a part thereof, as compared to a corresponding non-transformed wild type non-human organism or a part thereof; and
[82751] (b) growing the non-human organism or a part thereof under conditions which permit the production of myo-inositol or a composition comprising myo-inositol in said non-human organism or in the culture medium surrounding said non-human organism.

[82752] A further embodiment of the present invention relates to a process for the production of 3,4,5-trihydroxypentanoic acid, which comprises
[82753] (a) increasing or generating the activity of a flavodoxin non-targeted in a non-human organism or a part thereof, preferably a microorganism, a plant cell, a plant or a part thereof, as compared to a corresponding non-transformed wild type non-human organism or a part thereof; and
[82754] (b) growing the non-human organism or a part thereof under conditions which permit the production of 3,4,5-trihydroxypentanoic acid or a composition comprising 3,4,5-trihydroxypentanoic acid in said non-human organism or in the culture medium surrounding said non-human organism.

[82755] A further embodiment of the present invention relates to a process for the production of fructose, which comprises
[82756] (a) increasing or generating the activity of a amino-acid acetyltransferase non-targeted in a non-human organism or a part thereof, preferably a microorganism, a plant cell, a plant or a part thereof, as compared to a corresponding non-transformed wild type non-human organism or a part thereof; and
[82757] (b) growing the non-human organism or a part thereof under conditions which permit the production of fructose or a composition comprising fructose in said non-human organism or in the culture medium surrounding said non-human organism.

[82758] A further embodiment of the present invention relates to a process for the production of glucose-1-phosphate, which comprises
[82759] (a) increasing or generating the activity of a amino-acid acetyltransferase non-targeted in a non-human organism or a part thereof, preferably a microorganism, a plant cell, a plant or a part thereof, as compared to a corresponding non-transformed wild type non-human organism or a part thereof; and
[82760] (b) growing the non-human organism or a part thereof under conditions which permit the production of glucose-1-phosphate or a composition comprising glucose-1-phosphate in said non-human organism or in the culture medium surrounding said non-human organism.

[82761] A further embodiment of the present invention relates to a process for the production of myo-inositol, which comprises
[82762] (a) increasing or generating the activity of a amino-acid acetyltransferase non-targeted in a non-human organism or a part thereof, preferably a microorganism, a plant cell, a plant or a part thereof, as compared to a corresponding non-transformed wild type non-human organism or a part thereof; and
[82763] (b) growing the non-human organism or a part thereof under conditions which permit the production of myo-inositol or a composition comprising myo-inositol in said non-human organism or in the culture medium surrounding said non-human organism.

[82764] A further embodiment of the present invention relates to a process for the production of raffinose, which comprises
[82765] (a) increasing or generating the activity of a transcriptional regulator non-targeted in a non-human organism or a part thereof, preferably a microorganism, a plant cell, a plant or a part thereof, as compared to a corresponding non-transformed wild type non-human organism or a part thereof; and
[82766] (b) growing the non-human organism or a part thereof under conditions which permit the production of raffinose or a composition comprising raffinose in said non-human organism or in the culture medium surrounding said non-human organism.

[82767] A further embodiment of the present invention relates to a process for the production of glucose, which comprises
[82768] (a) increasing or generating the activity of a arginine exporter protein non-targeted in a non-human organism or a part thereof, preferably a microorganism, a plant cell, a plant or a part thereof, as compared to a corresponding non-transformed wild type non-human organism or a part thereof; and
[82769] (b) growing the non-human organism or a part thereof under conditions which permit the production of glucose or a composition comprising glucose in said non-human organism or in the culture medium surrounding said non-human organism.

[82770] A further embodiment of the present invention relates to a process for the production of myo-inositol, which comprises
[82771] (a) increasing or generating the activity of a arginine exporter protein non-targeted in a non-human organism or a part thereof, preferably a microorganism, a plant cell, a plant or a part thereof, as compared to a corresponding non-transformed wild type non-human organism or a part thereof; and
[82772] (b) growing the non-human organism or a part thereof under conditions which permit the production of myo-inositol or a composition comprising myo-inositol in said non-human organism or in the culture medium surrounding said non-human organism.

[82773] A further embodiment of the present invention relates to a process for the production of myo-inositol, which comprises
[82774] (a) increasing or generating the activity of a b2932-protein non-targeted in a non-human organism or a part thereof, preferably a microorganism, a plant cell, a plant or a part thereof, as compared to a corresponding non-transformed wild type non-human organism or a part thereof; and
[82775] (b) growing the non-human organism or a part thereof under conditions which permit the production of myo-inositol or a composition comprising myo-inositol in said non-human organism or in the culture medium surrounding said non-human organism.

[82776] A further embodiment of the present invention relates to a process for the production of erythrol, which comprises
[82777] (a) increasing or generating the activity of a L-serine dehydratase non-targeted in a non-human organism or a part thereof, preferably a microorganism, a plant cell, a plant or a part thereof, as compared to a corresponding non-transformed wild type non-human organism or a part thereof; and
[82778] (b) growing the non-human organism or a part thereof under conditions which permit the production of erythrol or a composition comprising erythrol in said non-human organism or in the culture medium surrounding said non-human organism.

[82779] A further embodiment of the present invention relates to a process for the production of myo-inositol, which comprises
[82780] (a) increasing or generating the activity of a b3151-protein non-targeted in a non-human organism or a part thereof, preferably a microorganism, a plant cell, a plant or a part thereof, as compared to a corresponding non-transformed wild type non-human organism or a part thereof; and
[82781] (b) growing the non-human organism or a part thereof under conditions which permit the production of myo-inositol or a composition comprising myo-inositol in said non-human organism or in the culture medium surrounding said non-human organism.

[82782] A further embodiment of the present invention relates to a process for the production of raffinose, which comprises
[82783] (a) increasing or generating the activity of a b3151-protein non-targeted in a non-human organism or a part thereof, preferably a microorganism, a plant cell, a plant or a part thereof, as compared to a corresponding non-transformed wild type non-human organism or a part thereof; and
[82784] (b) growing the non-human organism or a part thereof under conditions which permit the production of raffinose or a composition comprising raffinose in said non-human organism or in the culture medium surrounding said non-human organism.

[82785] A further embodiment of the present invention relates to a process for the production of sucrose, which comprises
[82786] (a) increasing or generating the activity of a b3151-protein non-targeted in a non-human organism or a part thereof, preferably a microorganism, a plant cell, a plant or a part thereof, as compared to a corresponding non-transformed wild type non-human organism or a part thereof; and
[82787] (b) growing the non-human organism or a part thereof under conditions which permit the production of sucrose or a composition comprising sucrose in said non-human organism or in the culture medium surrounding said non-human organism.

[82788] A further embodiment of the present invention relates to a process for the production of fructose, which comprises
[82789] (a) increasing or generating the activity of a b3221-protein non-targeted in a non-human organism or a part thereof, preferably a microorganism, a plant cell, a plant or a part thereof, as compared to a corresponding non-transformed wild type non-human organism or a part thereof; and
[82790] (b) growing the non-human organism or a part thereof under conditions which permit the production of fructose or a composition comprising fructose in said non-human organism or in the culture medium surrounding said non-human organism.

[82791] A further embodiment of the present invention relates to a process for the production of glucose, which comprises
[82792] (a) increasing or generating the activity of a b3221-protein non-targeted in a non-human organism or a part thereof, preferably a microorganism, a plant cell, a plant or a part thereof, as compared to a corresponding non-transformed wild type non-human organism or a part thereof; and
[82793] (b) growing the non-human organism or a part thereof under conditions which permit the production of glucose or a composition comprising glucose in said non-human organism or in the culture medium surrounding said non-human organism.

[82794] A further embodiment of the present invention relates to a process for the production of 3,4,5-trihydroxypentanoic acid, which comprises
[82795] (a) increasing or generating the activity of a b3221-protein non-targeted in a non-human organism or a part thereof, preferably a microorganism, a plant cell, a plant or a part thereof, as compared to a corresponding non-transformed wild type non-human organism or a part thereof; and
[82796] (b) growing the non-human organism or a part thereof under conditions which permit the production of 3,4,5-trihydroxypentanoic acid or a composition comprising 3,4,5-trihydroxypentanoic acid in said non-human organism or in the culture medium surrounding said non-human organism.

[82797] A further embodiment of the present invention relates to a process for the production of myo-inositol, which comprises
[82798] (a) increasing or generating the activity of a b3246-protein non-targeted in a non-human organism or a part thereof, preferably a microorganism, a plant cell, a plant or a part thereof, as compared to a corresponding non-transformed wild type non-human organism or a part thereof; and
[82799] (b) growing the non-human organism or a part thereof under conditions which permit the production of myo-inositol or a composition comprising myo-inositol in said non-human organism or in the culture medium surrounding said non-human organism.

[82800] A further embodiment of the present invention relates to a process for the production of myo-inositol, which comprises
[82801] (a) increasing or generating the activity of a acetyl CoA carboxylase non-targeted in a non-human organism or a part thereof, preferably a microorganism, a plant cell, a plant or a part thereof, as compared to a corresponding non-transformed wild type non-human organism or a part thereof; and
[82802] (b) growing the non-human organism or a part thereof under conditions which permit the production of myo-inositol or a composition comprising myo-inositol in said non-human organism or in the culture medium surrounding said non-human organism.

[82803] A further embodiment of the present invention relates to a process for the production of fructose, which comprises
[82804] (a) increasing or generating the activity of a methyltransferase non-targeted in a non-human organism or a part thereof, preferably a microorganism, a plant cell, a plant or a part thereof, as compared to a corresponding non-transformed wild type non-human organism or a part thereof; and
[82805] (b) growing the non-human organism or a part thereof under conditions which permit the production of fructose or a composition comprising fructose in said non-human organism or in the culture medium surrounding said non-human organism.

[82806] A further embodiment of the present invention relates to a process for the production of glucose, which comprises
[82807] (a) increasing or generating the activity of a methyltransferase non-targeted in a non-human organism or a part thereof, preferably a microorganism, a plant cell, a plant or a part thereof, as compared to a corresponding non-transformed wild type non-human organism or a part thereof; and
[82808] (b) growing the non-human organism or a part thereof under conditions which permit the production of glucose or a composition comprising glucose in said non-human organism or in the culture medium surrounding said non-human organism.

[82809] A further embodiment of the present invention relates to a process for the production of glucose-1-phosphate, which comprises
[82810] (a) increasing or generating the activity of a methyltransferase non-targeted in a non-human organism or a part thereof, preferably a microorganism, a plant cell, a plant or a part thereof, as compared to a corresponding non-transformed wild type non-human organism or a part thereof; and
[82811] (b) growing the non-human organism or a part thereof under conditions which permit the production of glucose-1-phosphate or a composition comprising glucose-1-phosphate in said non-human organism or in the culture medium surrounding said non-human organism.

[82812] A further embodiment of the present invention relates to a process for the production of raffinose, which comprises
[82813] (a) increasing or generating the activity of a methyltransferase non-targeted in a non-human organism or a part thereof, preferably a microorganism, a plant cell, a plant or a part thereof, as compared to a corresponding non-transformed wild type non-human organism or a part thereof; and
[82814] (b) growing the non-human organism or a part thereof under conditions which permit the production of raffinose or a composition comprising raffinose in said non-human organism or in the culture medium surrounding said non-human organism.

[82815] A further embodiment of the present invention relates to a process for the production of sucrose, which comprises
[82816] (a) increasing or generating the activity of a methyltransferase non-targeted in a non-human organism or a part thereof, preferably a microorganism, a plant cell, a plant or a part thereof, as compared to a corresponding non-transformed wild type non-human organism or a part thereof; and
[82817] (b) growing the non-human organism or a part thereof under conditions which permit the production of sucrose or a composition comprising sucrose in said non-human organism or in the culture medium surrounding said non-human organism.

[82818] A further embodiment of the present invention relates to a process for the production of glucose, which comprises
[82819] (a) increasing or generating the activity of a ferredoxin non-targeted in a non-human organism or a part thereof, preferably a microorganism, a plant cell, a plant or a part thereof, as compared to a corresponding non-transformed wild type non-human organism or a part thereof; and
[82820] (b) growing the non-human organism or a part thereof under conditions which permit the production of glucose or a composition comprising glucose in said non-human organism or in the culture medium surrounding said non-human organism.

[82821] A further embodiment of the present invention relates to a process for the production of myo-inositol, which comprises
[82822] (a) increasing or generating the activity of a b3346-protein non-targeted in a non-human organism or a part thereof, preferably a microorganism, a plant cell, a plant or a part thereof, as compared to a corresponding non-transformed wild type non-human organism or a part thereof; and
[82823] (b) growing the non-human organism or a part thereof under conditions which permit the production of myo-inositol or a composition comprising myo-inositol in said non-human organism or in the culture medium surrounding said non-human organism.

[82824] A further embodiment of the present invention relates to a process for the production of raffinose, which comprises
[82825] (a) increasing or generating the activity of a b3346-protein non-targeted in a non-human organism or a part thereof, preferably a microorganism, a plant cell, a plant or a part thereof, as compared to a corresponding non-transformed wild type non-human organism or a part thereof; and
[82826] (b) growing the non-human organism or a part thereof under conditions which permit the production of raffinose or a composition comprising raffinose in said non-human organism or in the culture medium surrounding said non-human organism.

[82827] A further embodiment of the present invention relates to a process for the production of 3,4,5-trihydroxypentanoic acid, which comprises
[82828] (a) increasing or generating the activity of a b3346-protein non-targeted in a non-human organism or a part thereof, preferably a microorganism, a plant cell, a plant or a part thereof, as compared to a corresponding non-transformed wild type non-human organism or a part thereof; and
[82829] (b) growing the non-human organism or a part thereof under conditions which permit the production of 3,4,5-trihydroxypentanoic acid or a composition comprising 3,4,5-trihydroxypentanoic acid in said non-human organism or in the culture medium surrounding said non-human organism.

[82830] A further embodiment of the present invention relates to a process for the production of fructose, which comprises
[82831] (a) increasing or generating the activity of a phosphoenolpyruvate carboxykinase non-targeted in a non-human organism or a part thereof, preferably a microorganism, a plant cell, a plant or a part thereof, as compared to a corresponding non-transformed wild type non-human organism or a part thereof; and
[82832] (b) growing the non-human organism or a part thereof under conditions which permit the production of fructose or a composition comprising fructose in said non-human organism or in the culture medium surrounding said non-human organism.

[82833] A further embodiment of the present invention relates to a process for the production of glucose, which comprises
[82834] (a) increasing or generating the activity of a phosphoenolpyruvate carboxykinase non-targeted in a non-human organism or a part thereof, preferably a microorganism, a plant cell, a plant or a part thereof, as compared to a corresponding non-transformed wild type non-human organism or a part thereof; and
[82835] (b) growing the non-human organism or a part thereof under conditions which permit the production of glucose or a composition comprising glucose in said non-human organism or in the culture medium surrounding said non-human organism.

[82836] A further embodiment of the present invention relates to a process for the production of 3,4,5-trihydroxypentanoic acid, which comprises
[82837] (a) increasing or generating the activity of a B3427-protein non-targeted in a non-human organism or a part thereof, preferably a microorganism, a plant cell, a plant or a part thereof, as compared to a corresponding non-transformed wild type non-human organism or a part thereof; and
[82838] (b) growing the non-human organism or a part thereof under conditions which permit the production of 3,4,5-trihydroxypentanoic acid or a composition comprising 3,4,5-trihydroxypentanoic acid in said non-human organism or in the culture medium surrounding said non-human organism.

[82839] A further embodiment of the present invention relates to a process for the production of fructose, which comprises
[82840] (a) increasing or generating the activity of a glycogen synthase non-targeted in a non-human organism or a part thereof, preferably a microorganism, a plant cell, a plant or a part thereof, as compared to a corresponding non-transformed wild type non-human organism or a part thereof; and
[82841] (b) growing the non-human organism or a part thereof under conditions which permit the production of fructose or a composition comprising fructose in said non-human organism or in the culture medium surrounding said non-human organism.

[82842] A further embodiment of the present invention relates to a process for the production of glucose, which comprises
[82843] (a) increasing or generating the activity of a glycogen synthase non-targeted in a non-human organism or a part thereof, preferably a microorganism, a plant cell, a plant or a part thereof, as compared to a corresponding non-transformed wild type non-human organism or a part thereof; and
[82844] (b) growing the non-human organism or a part thereof under conditions which permit the production of glucose or a composition comprising glucose in said non-human organism or in the culture medium surrounding said non-human organism.

[82845] A further embodiment of the present invention relates to a process for the production of myo-inositol, which comprises
[82846] (a) increasing or generating the activity of a b3442-protein non-targeted in a non-human organism or a part thereof, preferably a microorganism, a plant cell, a plant or a part thereof, as compared to a corresponding non-transformed wild type non-human organism or a part thereof; and
[82847] (b) growing the non-human organism or a part thereof under conditions which permit the production of myo-inositol or a composition comprising myo-inositol in said non-human organism or in the culture medium surrounding said non-human organism.

[82848] A further embodiment of the present invention relates to a process for the production of 3,4,5-trihydroxypentanoic acid, which comprises
[82849] (a) increasing or generating the activity of a B3443-protein non-targeted in a non-human organism or a part thereof, preferably a microorganism, a plant cell, a plant or a part thereof, as compared to a corresponding non-transformed wild type non-human organism or a part thereof; and
[82850] (b) growing the non-human organism or a part thereof under conditions which permit the production of 3,4,5-trihydroxypentanoic acid or a composition comprising 3,4,5-trihydroxypentanoic acid in said non-human organism or in the culture medium surrounding said non-human organism.

[82851] A further embodiment of the present invention relates to a process for the production of saccharic acid, which comprises
[82852] (a) increasing or generating the activity of a sn-glycerol-3-phosphate transport system permease protein non-targeted in a non-human organism or a part thereof, preferably a microorganism, a plant cell, a plant or a part thereof, as compared to a corresponding non-transformed wild type non-human organism or a part thereof; and
[82853] (b) growing the non-human organism or a part thereof under conditions which permit the production of saccharic acid or a composition comprising saccharic acid in said non-human organism or in the culture medium surrounding said non-human organism.

[82854] A further embodiment of the present invention relates to a process for the production of glucose-1-phosphate, which comprises
[82855] (a) increasing or generating the activity of a high-affinity branched-chain amino acid transport protein non-targeted in a non-human organism or a part thereof, preferably a microorganism, a plant cell, a plant or a part thereof, as compared to a corresponding non-transformed wild type non-human organism or a part thereof; and
[82856] (b) growing the non-human organism or a part thereof under conditions which permit the production of glucose-1-phosphate or a composition comprising glucose-1-phosphate in said non-human organism or in the culture medium surrounding said non-human organism.

[82857] A further embodiment of the present invention relates to a process for the production of myo-inositol, which comprises
[82858] (a) increasing or generating the activity of a high-affinity branched-chain amino acid transport protein non-targeted in a non-human organism or a part thereof, preferably a microorganism, a plant cell, a plant or a part thereof, as compared to a corresponding non-transformed wild type non-human organism or a part thereof; and
[82859] (b) growing the non-human organism or a part thereof under conditions which permit the production of myo-inositol or a composition comprising myo-inositol in said non-human organism or in the culture medium surrounding said non-human organism.

[82860] A further embodiment of the present invention relates to a process for the production of fructose, which comprises
[82861] (a) increasing or generating the activity of a trehalase non-targeted in a non-human organism or a part thereof, preferably a microorganism, a plant cell, a plant or a part thereof, as compared to a corresponding non-transformed wild type non-human organism or a part thereof; and
[82862] (b) growing the non-human organism or a part thereof under conditions which permit the production of fructose or a composition comprising fructose in said non-human organism or in the culture medium surrounding said non-human organism.

[82863] A further embodiment of the present invention relates to a process for the production of galactinol, which comprises
[82864] (a) increasing or generating the activity of a trehalase non-targeted in a non-human organism or a part thereof, preferably a microorganism, a plant cell, a plant or a part thereof, as compared to a corresponding non-transformed wild type non-human organism or a part thereof; and
[82865] (b) growing the non-human organism or a part thereof under conditions which permit the production of galactinol or a composition comprising galactinol in said non-human organism or in the culture medium surrounding said non-human organism.

[82866] A further embodiment of the present invention relates to a process for the production of fructose, which comprises
[82867] (a) increasing or generating the activity of a mannitol-1-phosphate dehydrogenase non-targeted in a non-human organism or a part thereof, preferably a microorganism, a plant cell, a plant or a part thereof, as compared to a corresponding non-transformed wild type non-human organism or a part thereof; and
[82868] (b) growing the non-human organism or a part thereof under conditions which permit the production of fructose or a composition comprising fructose in said non-human organism or in the culture medium surrounding said non-human organism.

[82869] A further embodiment of the present invention relates to a process for the production of mannitol, which comprises
[82870] (a) increasing or generating the activity of a mannitol-1-phosphate dehydrogenase non-targeted in a non-human organism or a part thereof, preferably a microorganism, a plant cell, a plant or a part thereof, as compared to a corresponding non-transformed wild type non-human organism or a part thereof; and
[82871] (b) growing the non-human organism or a part thereof under conditions which permit the production of mannitol or a composition comprising mannitol in said non-human organism or in the culture medium surrounding said non-human organism.

[82872] A further embodiment of the present invention relates to a process for the production of sorbitol, which comprises
[82873] (a) increasing or generating the activity of a mannitol-1-phosphate dehydrogenase non-targeted in a non-human organism or a part thereof, preferably a microorganism, a plant cell, a plant or a part thereof, as compared to a corresponding non-transformed wild type non-human organism or a part thereof; and
[82874] (b) growing the non-human organism or a part thereof under conditions which permit the production of sorbitol or a composition comprising sorbitol in said non-human organism or in the culture medium surrounding said non-human organism.

[82875] A further embodiment of the present invention relates to a process for the production of galactinol, which comprises
[82876] (a) increasing or generating the activity of a ketol-acid reductoisomerase non-targeted in a non-human organism or a part thereof, preferably a microorganism, a plant cell, a plant or a part thereof, as compared to a corresponding non-transformed wild type non-human organism or a part thereof; and
[82877] (b) growing the non-human organism or a part thereof under conditions which permit the production of galactinol or a composition comprising galactinol in said non-human organism or in the culture medium surrounding said non-human organism.

[82878] A further embodiment of the present invention relates to a process for the production of myo-inositol, which comprises
[82879] (a) increasing or generating the activity of a b3777-protein non-targeted in a non-human organism or a part thereof, preferably a microorganism, a plant cell, a plant or a part thereof, as compared to a corresponding non-transformed wild type non-human organism or a part thereof; and
[82880] (b) growing the non-human organism or a part thereof under conditions which permit the production of myo-inositol or a composition comprising myo-inositol in said non-human organism or in the culture medium surrounding said non-human organism.

[82881] A further embodiment of the present invention relates to a process for the production of myo-inositol, which comprises
[82882] (a) increasing or generating the activity of a b3817-protein non-targeted in a non-human organism or a part thereof, preferably a microorganism, a plant cell, a plant or a part thereof, as compared to a corresponding non-transformed wild type non-human organism or a part thereof; and
[82883] (b) growing the non-human organism or a part thereof under conditions which permit the production of myo-inositol or a composition comprising myo-inositol in said non-human organism or in the culture medium surrounding said non-human organism.

[82884] A further embodiment of the present invention relates to a process for the production of raffinose, which comprises
[82885] (a) increasing or generating the activity of a b3817-protein non-targeted in a non-human organism or a part thereof, preferably a microorganism, a plant cell, a plant or a part thereof, as compared to a corresponding non-transformed wild type non-human organism or a part thereof; and
[82886] (b) growing the non-human organism or a part thereof under conditions which permit the production of raffinose or a composition comprising raffinose in said non-human organism or in the culture medium surrounding said non-human organism.

[82887] A further embodiment of the present invention relates to a process for the production of myo-inositol, which comprises
[82888] (a) increasing or generating the activity of a b3818-protein non-targeted in a non-human organism or a part thereof, preferably a microorganism, a plant cell, a plant or a part thereof, as compared to a corresponding non-transformed wild type non-human organism or a part thereof; and
[82889] (b) growing the non-human organism or a part thereof under conditions which permit the production of myo-inositol or a composition comprising myo-inositol in said non-human organism or in the culture medium surrounding said non-human organism.

[82890] A further embodiment of the present invention relates to a process for the production of myo-inositol, which comprises
[82891] (a) increasing or generating the activity of a threonine efflux protein non-targeted in a non-human organism or a part thereof, preferably a microorganism, a plant cell, a plant or a part thereof, as compared to a corresponding non-transformed wild type non-human organism or a part thereof; and
[82892] (b) growing the non-human organism or a part thereof under conditions which permit the production of myo-inositol or a composition comprising myo-inositol in said non-human organism or in the culture medium surrounding said non-human organism.

[82893] A further embodiment of the present invention relates to a process for the production of myo-inositol, which comprises
[82894] (a) increasing or generating the activity of a glutamine synthetase non-targeted in a non-human organism or a part thereof, preferably a microorganism, a plant cell, a plant or a part thereof, as compared to a corresponding non-transformed wild type non-human organism or a part thereof; and
[82895] (b) growing the non-human organism or a part thereof under conditions which permit the production of myo-inositol or a composition comprising myo-inositol in said non-human organism or in the culture medium surrounding said non-human organism.

[82896] A further embodiment of the present invention relates to a process for the production of verbascose, which comprises
[82897] (a) increasing or generating the activity of a glutamine synthetase non-targeted in a non-human organism or a part thereof, preferably a microorganism, a plant cell, a plant or a part thereof, as compared to a corresponding non-transformed wild type non-human organism or a part thereof; and
[82898] (b) growing the non-human organism or a part thereof under conditions which permit the production of verbascose or a composition comprising verbascose in said non-human organism or in the culture medium surrounding said non-human organism.

[82899] A further embodiment of the present invention relates to a process for the production of glucose-1-phosphate, which comprises
[82900] (a) increasing or generating the activity of a transcriptional regulator non-targeted in a non-human organism or a part thereof, preferably a microorganism, a plant cell, a plant or a part thereof, as compared to a corresponding non-transformed wild type non-human organism or a part thereof; and
[82901] (b) growing the non-human organism or a part thereof under conditions which permit the production of glucose-1-phosphate or a composition comprising glucose-1-phosphate in said non-human organism or in the culture medium surrounding said non-human organism.

[82902] A further embodiment of the present invention relates to a process for the production of fructose, which comprises
[82903] (a) increasing or generating the activity of a b3989-protein non-targeted in a non-human organism or a part thereof, preferably a microorganism, a plant cell, a plant or a part thereof, as compared to a corresponding non-transformed wild type non-human organism or a part thereof; and
[82904] (b) growing the non-human organism or a part thereof under conditions which permit the production of fructose or a composition comprising fructose in said non-human organism or in the culture medium surrounding said non-human organism.

[82905] A further embodiment of the present invention relates to a process for the production of glucose, which comprises
[82906] (a) increasing or generating the activity of a b3989-protein non-targeted in a non-human organism or a part thereof, preferably a microorganism, a plant cell, a plant or a part thereof, as compared to a corresponding non-transformed wild type non-human organism or a part thereof; and
[82907] (b) growing the non-human organism or a part thereof under conditions which permit the production of glucose or a composition comprising glucose in said non-human organism or in the culture medium surrounding said non-human organism.

[82908] A further embodiment of the present invention relates to a process for the production of glucose-1-phosphate, which comprises
[82909] (a) increasing or generating the activity of a b3989-protein non-targeted in a non-human organism or a part thereof, preferably a microorganism, a plant cell, a plant or a part thereof, as compared to a corresponding non-transformed wild type non-human organism or a part thereof; and
[82910] (b) growing the non-human organism or a part thereof under conditions which permit the production of glucose-1-phosphate or a composition comprising glucose-1-phosphate in said non-human organism or in the culture medium surrounding said non-human organism.

[82911] A further embodiment of the present invention relates to a process for the production of raffinose, which comprises
[82912] (a) increasing or generating the activity of a b3989-protein non-targeted in a non-human organism or a part thereof, preferably a microorganism, a plant cell, a plant or a part thereof, as compared to a corresponding non-transformed wild type non-human organism or a part thereof; and
[82913] (b) growing the non-human organism or a part thereof under conditions which permit the production of raffinose or a composition comprising raffinose in said non-human organism or in the culture medium surrounding said non-human organism.

[82914] A further embodiment of the present invention relates to a process for the production of sucrose, which comprises
[82915] (a) increasing or generating the activity of a b3989-protein non-targeted in a non-human organism or a part thereof, preferably a microorganism, a plant cell, a plant or a part thereof, as compared to a corresponding non-transformed wild type non-human organism or a part thereof; and
[82916] (b) growing the non-human organism or a part thereof under conditions which permit the production of sucrose or a composition comprising sucrose in said non-human organism or in the culture medium surrounding said non-human organism.

[82917] A further embodiment of the present invention relates to a process for the production of galactinol, which comprises
[82918] (a) increasing or generating the activity of a acetyltransferase non-targeted in a non-human organism or a part thereof, preferably a microorganism, a plant cell, a plant or a part thereof, as compared to a corresponding non-transformed wild type non-human organism or a part thereof; and
[82919] (b) growing the non-human organism or a part thereof under conditions which permit the production of galactinol or a composition comprising galactinol in said non-human organism or in the culture medium surrounding said non-human organism.

[82920] A further embodiment of the present invention relates to a process for the production of fructose, which comprises
[82921] (a) increasing or generating the activity of a b4029-protein non-targeted in a non-human organism or a part thereof, preferably a microorganism, a plant cell, a plant or a part thereof, as compared to a corresponding non-transformed wild type non-human organism or a part thereof; and
[82922] (b) growing the non-human organism or a part thereof under conditions which permit the production of fructose or a composition comprising fructose in said non-human organism or in the culture medium surrounding said non-human organism.

[82923] A further embodiment of the present invention relates to a process for the production of glucose, which comprises
[82924] (a) increasing or generating the activity of a b4029-protein non-targeted in a non-human organism or a part thereof, preferably a microorganism, a plant cell, a plant or a part thereof, as compared to a corresponding non-transformed wild type non-human organism or a part thereof; and
[82925] (b) growing the non-human organism or a part thereof under conditions which permit the production of glucose or a composition comprising glucose in said non-human organism or in the culture medium surrounding said non-human organism.

[82926] A further embodiment of the present invention relates to a process for the production of sedoheptulose-7-phosphate, which comprises
[82927] (a) increasing or generating the activity of a b4029-protein non-targeted in a non-human organism or a part thereof, preferably a microorganism, a plant cell, a plant or a part thereof, as compared to a corresponding non-transformed wild type non-human organism or a part thereof; and
[82928] (b) growing the non-human organism or a part thereof under conditions which permit the production of sedoheptulose-7-phosphate or a composition comprising sedoheptulose-7-phosphate in said non-human organism or in the culture medium surrounding said non-human organism.

[82929] A further embodiment of the present invention relates to a process for the production of glucose-1-phosphate, which comprises
[82930] (a) increasing or generating the activity of a chorismate lyase non-targeted in a non-human organism or a part thereof, preferably a microorganism, a plant cell, a plant or a part thereof, as compared to a corresponding non-transformed wild type non-human organism or a part thereof; and
[82931] (b) growing the non-human organism or a part thereof under conditions which permit the production of glucose-1-phosphate or a composition comprising glucose-1-phosphate in said non-human organism or in the culture medium surrounding said non-human organism.

[82932] A further embodiment of the present invention relates to a process for the production of 3,4,5-trihydroxypentanoic acid, which comprises
[82933] (a) increasing or generating the activity of a chorismate lyase non-targeted in a non-human organism or a part thereof, preferably a microorganism, a plant cell, a plant or a part thereof, as compared to a corresponding non-transformed wild type non-human organism or a part thereof; and
[82934] (b) growing the non-human organism or a part thereof under conditions which permit the production of 3,4,5-trihydroxypentanoic acid or a composition comprising 3,4,5-trihydroxypentanoic acid in said non-human organism or in the culture medium surrounding said non-human organism.

[82935] A further embodiment of the present invention relates to a process for the production of fructose, which comprises
[82936] (a) increasing or generating the activity of a b4050-protein non-targeted in a non-human organism or a part thereof, preferably a microorganism, a plant cell, a plant or a part thereof, as compared to a corresponding non-transformed wild type non-human organism or a part thereof; and
[82937] (b) growing the non-human organism or a part thereof under conditions which permit the production of fructose or a composition comprising fructose in said non-human organism or in the culture medium surrounding said non-human organism.

[82938] A further embodiment of the present invention relates to a process for the production of glucose, which comprises
[82939] (a) increasing or generating the activity of a b4050-protein non-targeted in a non-human organism or a part thereof, preferably a microorganism, a plant cell, a plant or a part thereof, as compared to a corresponding non-transformed wild type non-human organism or a part thereof; and
[82940] (b) growing the non-human organism or a part thereof under conditions which permit the production of glucose or a composition comprising glucose in said non-human organism or in the culture medium surrounding said non-human organism.

[82941] A further embodiment of the present invention relates to a process for the production of myo-inositol, which comprises
[82942] (a) increasing or generating the activity of a b4050-protein non-targeted in a non-human organism or a part thereof, preferably a microorganism, a plant cell, a plant or a part thereof, as compared to a corresponding non-transformed wild type non-human organism or a part thereof; and
[82943] (b) growing the non-human organism or a part thereof under conditions which permit the production of myo-inositol or a composition comprising myo-inositol in said non-human organism or in the culture medium surrounding said non-human organism.

[82944] A further embodiment of the present invention relates to a process for the production of fructose, which comprises
[82945] (a) increasing or generating the activity of a b4056-protein non-targeted in a non-human organism or a part thereof, preferably a microorganism, a plant cell, a plant or a part thereof, as compared to a corresponding non-transformed wild type non-human organism or a part thereof; and
[82946] (b) growing the non-human organism or a part thereof under conditions which permit the production of fructose or a composition comprising fructose in said non-human organism or in the culture medium surrounding said non-human organism.

[82947] A further embodiment of the present invention relates to a process for the production of galactinol, which comprises
[82948] (a) increasing or generating the activity of a acetyl-coenzyme A synthetase non-targeted in a non-human organism or a part thereof, preferably a microorganism, a plant cell, a plant or a part thereof, as compared to a corresponding non-transformed wild type non-human organism or a part thereof; and
[82949] (b) growing the non-human organism or a part thereof under conditions which permit the production of galactinol or a composition comprising galactinol in said non-human organism or in the culture medium surrounding said non-human organism.

[82950] A further embodiment of the present invention relates to a process for the production of glucose-1-phosphate, which comprises
[82951] (a) increasing or generating the activity of a lipoprotein precursor non-targeted in a non-human organism or a part thereof, preferably a microorganism, a plant cell, a plant or a part thereof, as compared to a corresponding non-transformed wild type non-human organism or a part thereof; and
[82952] (b) growing the non-human organism or a part thereof under conditions which permit the production of glucose-1-phosphate or a composition comprising glucose-1-phosphate in said non-human organism or in the culture medium surrounding said non-human organism.

[82953] A further embodiment of the present invention relates to a process for the production of 3,4,5-trihydroxypentanoic acid, which comprises
[82954] (a) increasing or generating the activity of a lipoprotein precursor non-targeted in a non-human organism or a part thereof, preferably a microorganism, a plant cell, a plant or a part thereof, as compared to a corresponding non-transformed wild type non-human organism or a part thereof; and
[82955] (b) growing the non-human organism or a part thereof under conditions which permit the production of 3,4,5-trihydroxypentanoic acid or a composition comprising 3,4,5-trihydroxypentanoic acid in said non-human organism or in the culture medium surrounding said non-human organism.

[82956] A further embodiment of the present invention relates to a process for the production of myo-inositol, which comprises
[82957] (a) increasing or generating the activity of a b4250-protein non-targeted in a non-human organism or a part thereof, preferably a microorganism, a plant cell, a plant or a part thereof, as compared to a corresponding non-transformed wild type non-human organism or a part thereof; and
[82958] (b) growing the non-human organism or a part thereof under conditions which permit the production of myo-inositol or a composition comprising myo-inositol in said non-human organism or in the culture medium surrounding said non-human organism.

[82959] A further embodiment of the present invention relates to a process for the production of raffinose, which comprises
[82960] (a) increasing or generating the activity of a b4250-protein non-targeted in a non-human organism or a part thereof, preferably a microorganism, a plant cell, a plant or a part thereof, as compared to a corresponding non-transformed wild type non-human organism or a part thereof; and
[82961] (b) growing the non-human organism or a part thereof under conditions which permit the production of raffinose or a composition comprising raffinose in said non-human organism or in the culture medium surrounding said non-human organism.

[82962] A further embodiment of the present invention relates to a process for the production of fructose, which comprises
[82963] (a) increasing or generating the activity of a acetyltransferase non-targeted in a non-human organism or a part thereof, preferably a microorganism, a plant cell, a plant or a part thereof, as compared to a corresponding non-transformed wild type non-human organism or a part thereof; and
[82964] (b) growing the non-human organism or a part thereof under conditions which permit the production of fructose or a composition comprising fructose in said non-human organism or in the culture medium surrounding said non-human organism.

[82965] A further embodiment of the present invention relates to a process for the production of glucose, which comprises
[82966] (a) increasing or generating the activity of a acetyltransferase non-targeted in a non-human organism or a part thereof, preferably a microorganism, a plant cell, a plant or a part thereof, as compared to a corresponding non-transformed wild type non-human organism or a part thereof; and
[82967] (b) growing the non-human organism or a part thereof under conditions which permit the production of glucose or a composition comprising glucose in said non-human organism or in the culture medium surrounding said non-human organism.

[82968] A further embodiment of the present invention relates to a process for the production of fructose, which comprises
[82969] (a) increasing or generating the activity of a gluconate transport system permease 3 non-targeted in a non-human organism or a part thereof, preferably a microorganism, a plant cell, a plant or a part thereof, as compared to a corresponding non-transformed wild type non-human organism or a part thereof; and
[82970] (b) growing the non-human organism or a part thereof under conditions which permit the production of fructose or a composition comprising fructose in said non-human organism or in the culture medium surrounding said non-human organism.

[82971] A further embodiment of the present invention relates to a process for the production of galactinol, which comprises
[82972] (a) increasing or generating the activity of a purine-nucleoside phosphorylase non-targeted in a non-human organism or a part thereof, preferably a microorganism, a plant cell, a plant or a part thereof, as compared to a corresponding non-transformed wild type non-human organism or a part thereof; and
[82973] (b) growing the non-human organism or a part thereof under conditions which permit the production of galactinol or a composition comprising galactinol in said non-human organism or in the culture medium surrounding said non-human organism.

[82974] A further embodiment of the present invention relates to a process for the production of myo-inositol, which comprises
[82975] (a) increasing or generating the activity of a lysine decarboxylase non-targeted in a non-human organism or a part thereof, preferably a microorganism, a plant cell, a plant or a part thereof, as compared to a corresponding non-transformed wild type non-human organism or a part thereof; and
[82976] (b) growing the non-human organism or a part thereof under conditions which permit the production of myo-inositol or a composition comprising myo-inositol in said non-human organism or in the culture medium surrounding said non-human organism.

[82977] A further embodiment of the present invention relates to a process for the production of fructose, which comprises
[82978] (a) increasing or generating the activity of a glutaredoxin non-targeted in a non-human organism or a part thereof, preferably a microorganism, a plant cell, a plant or a part thereof, as compared to a corresponding non-transformed wild type non-human organism or a part thereof; and
[82979] (b) growing the non-human organism or a part thereof under conditions which permit the production of fructose or a composition comprising fructose in said non-human organism or in the culture medium surrounding said non-human organism.

[82980] A further embodiment of the present invention relates to a process for the production of glucose, which comprises
[82981] (a) increasing or generating the activity of a glutaredoxin non-targeted in a non-human organism or a part thereof, preferably a microorganism, a plant cell, a plant or a part thereof, as compared to a corresponding non-transformed wild type non-human organism or a part thereof; and
[82982] (b) growing the non-human organism or a part thereof under conditions which permit the production of glucose or a composition comprising glucose in said non-human organism or in the culture medium surrounding said non-human organism.

[82983] A further embodiment of the present invention relates to a process for the production of glucose-1-phosphate, which comprises
[82984] (a) increasing or generating the activity of a glutaredoxin non-targeted in a non-human organism or a part thereof, preferably a microorganism, a plant cell, a plant or a part thereof, as compared to a corresponding non-transformed wild type non-human organism or a part thereof; and
[82985] (b) growing the non-human organism or a part thereof under conditions which permit the production of glucose-1-phosphate or a composition comprising glucose-1-phosphate in said non-human organism or in the culture medium surrounding said non-human organism.

[82986] A further embodiment of the present invention relates to a process for the production of myo-inositol, which comprises
[82987] (a) increasing or generating the activity of a glutaredoxin non-targeted in a non-human organism or a part thereof, preferably a microorganism, a plant cell, a plant or a part thereof, as compared to a corresponding non-transformed wild type non-human organism or a part thereof; and
[82988] (b) growing the non-human organism or a part thereof under conditions which permit the production of myo-inositol or a composition comprising myo-inositol in said non-human organism or in the culture medium surrounding said non-human organism.

[82989] A further embodiment of the present invention relates to a process for the production of sucrose, which comprises
[82990] (a) increasing or generating the activity of a glutaredoxin non-targeted in a non-human organism or a part thereof, preferably a microorganism, a plant cell, a plant or a part thereof, as compared to a corresponding non-transformed wild type non-human organism or a part thereof; and
[82991] (b) growing the non-human organism or a part thereof under conditions which permit the production of sucrose or a composition comprising sucrose in said non-human organism or in the culture medium surrounding said non-human organism.

[82992] A further embodiment of the present invention relates to a process for the production of glucose-1-phosphate, which comprises
[82993] (a) increasing or generating the activity of a transcription factor non-targeted in a non-human organism or a part thereof, preferably a microorganism, a plant cell, a plant or a part thereof, as compared to a corresponding non-transformed wild type non-human organism or a part thereof; and
[82994] (b) growing the non-human organism or a part thereof under conditions which permit the production of glucose-1-phosphate or a composition comprising glucose-1-phosphate in said non-human organism or in the culture medium surrounding said non-human organism.

[82995] A further embodiment of the present invention relates to a process for the production of 3,4,5-trihydroxypentanoic acid, which comprises
[82996] (a) increasing or generating the activity of a transcription factor non-targeted in a non-human organism or a part thereof, preferably a microorganism, a plant cell, a plant or a part thereof, as compared to a corresponding non-transformed wild type non-human organism or a part thereof; and
[82997] (b) growing the non-human organism or a part thereof under conditions which permit the production of 3,4,5-trihydroxypentanoic acid or a composition comprising 3,4,5-trihydroxypentanoic acid in said non-human organism or in the culture medium surrounding said non-human organism.

[82998] A further embodiment of the present invention relates to a process for the production of fructose, which comprises
[82999] (a) increasing or generating the activity of a transcription factor non-targeted in a non-human organism or a part thereof, preferably a microorganism, a plant cell, a plant or a part thereof, as compared to a corresponding non-transformed wild type non-human organism or a part thereof; and
[83000] (b) growing the non-human organism or a part thereof under conditions which permit the production of fructose or a composition comprising fructose in said non-human organism or in the culture medium surrounding said non-human organism.

[83001] A further embodiment of the present invention relates to a process for the production of glucose-1-phosphate, which comprises
[83002] (a) increasing or generating the activity of a GM02LC38418-protein non-targeted in a non-human organism or a part thereof, preferably a microorganism, a plant cell, a plant or a part thereof, as compared to a corresponding non-transformed wild type non-human organism or a part thereof; and
[83003] (b) growing the non-human organism or a part thereof under conditions which permit the production of glucose-1-phosphate or a composition comprising glucose-1-phosphate in said non-human organism or in the culture medium surrounding said non-human organism.

[83004] A further embodiment of the present invention relates to a process for the production of glucose-1-phosphate, which comprises
[83005] (a) increasing or generating the activity of a cyclin D non-targeted in a non-human organism or a part thereof, preferably a microorganism, a plant cell, a plant or a part thereof, as compared to a corresponding non-transformed wild type non-human organism or a part thereof; and
[83006] (b) growing the non-human organism or a part thereof under conditions which permit the production of glucose-1-phosphate or a composition comprising glucose-1-phosphate in said non-human organism or in the culture medium surrounding said non-human organism.

[83007] A further embodiment of the present invention relates to a process for the production of raffinose, which comprises
[83008] (a) increasing or generating the activity of a cyclin D non-targeted in a non-human organism or a part thereof, preferably a microorganism, a plant cell, a plant or a part thereof, as compared to a corresponding non-transformed wild type non-human organism or a part thereof; and
[83009] (b) growing the non-human organism or a part thereof under conditions which permit the production of raffinose or a composition comprising raffinose in said non-human organism or in the culture medium surrounding said non-human organism.

[83010] A further embodiment of the present invention relates to a process for the production of sucrose, which comprises
[83011] (a) increasing or generating the activity of a cyclin D non-targeted in a non-human organism or a part thereof, preferably a microorganism, a plant cell, a plant or a part thereof, as compared to a corresponding non-transformed wild type non-human organism or a part thereof; and
[83012] (b) growing the non-human organism or a part thereof under conditions which permit the production of sucrose or a composition comprising sucrose in said non-human organism or in the culture medium surrounding said non-human organism.

[83013] A further embodiment of the present invention relates to a process for the production of 3,4,5-trihydroxypentanoic acid, which comprises
[83014] (a) increasing or generating the activity of a GM02LC46-protein non-targeted in a non-human organism or a part thereof, preferably a microorganism, a plant cell, a plant or a part thereof, as compared to a corresponding non-transformed wild type non-human organism or a part thereof; and
[83015] (b) growing the non-human organism or a part thereof under conditions which permit the production of 3,4,5-trihydroxypentanoic acid or a composition comprising 3,4,5-trihydroxypentanoic acid in said non-human organism or in the culture medium surrounding said non-human organism.

[83016] A further embodiment of the present invention relates to a process for the production of 3,4,5-trihydroxypentanoic acid, which comprises
[83017] (a) increasing or generating the activity of a transcription factor non-targeted in a non-human organism or a part thereof, preferably a microorganism, a plant cell, a plant or a part thereof, as compared to a corresponding non-transformed wild type non-human organism or a part thereof; and
[83018] (b) growing the non-human organism or a part thereof under conditions which permit the production of 3,4,5-trihydroxypentanoic acid or a composition comprising 3,4,5-trihydroxypentanoic acid in said non-human organism or in the culture medium surrounding said non-human organism.

[83019] A further embodiment of the present invention relates to a process for the production of myo-inositol, which comprises
[83020] (a) increasing or generating the activity of a alkaline phosphatase non-targeted in a non-human organism or a part thereof, preferably a microorganism, a plant cell, a plant or a part thereof, as compared to a corresponding non-transformed wild type non-human organism or a part thereof; and
[83021] (b) growing the non-human organism or a part thereof under conditions which permit the production of myo-inositol or a composition comprising myo-inositol in said non-human organism or in the culture medium surrounding said non-human organism.

[83022] A further embodiment of the present invention relates to a process for the production of verbascose, which comprises
[83023] (a) increasing or generating the activity of a flavodoxin non-targeted in a non-human organism or a part thereof, preferably a microorganism, a plant cell, a plant or a part thereof, as compared to a corresponding non-transformed wild type non-human organism or a part thereof; and
[83024] (b) growing the non-human organism or a part thereof under conditions which permit the production of verbascose or a composition comprising verbascose in said non-human organism or in the culture medium surrounding said non-human organism.

[83025] A further embodiment of the present invention relates to a process for the production of sucrose, which comprises
[83026] (a) increasing or generating the activity of a sll0254-protein non-targeted in a non-human organism or a part thereof, preferably a microorganism, a plant cell, a plant or a part thereof, as compared to a corresponding non-transformed wild type non-human organism or a part thereof; and
[83027] (b) growing the non-human organism or a part thereof under conditions which permit the production of sucrose or a composition comprising sucrose in said non-human organism or in the culture medium surrounding said non-human organism.

[83028] A further embodiment of the present invention relates to a process for the production of verbascose, which comprises
[83029] (a) increasing or generating the activity of a sll0281-protein non-targeted in a non-human organism or a part thereof, preferably a microorganism, a plant cell, a plant or a part thereof, as compared to a corresponding non-transformed wild type non-human organism or a part thereof; and
[83030] (b) growing the non-human organism or a part thereof under conditions which permit the production of verbascose or a composition comprising verbascose in said non-human organism or in the culture medium surrounding said non-human organism.

[83031] A further embodiment of the present invention relates to a process for the production of myo-inositol, which comprises
[83032] (a) increasing or generating the activity of a sll0354-protein non-targeted in a non-human organism or a part thereof, preferably a microorganism, a plant cell, a plant or a part thereof, as compared to a corresponding non-transformed wild type non-human organism or a part thereof; and
[83033] (b) growing the non-human organism or a part thereof under conditions which permit the production of myo-inositol or a composition comprising myo-inositol in said non-human organism or in the culture medium surrounding said non-human organism.

[83034] A further embodiment of the present invention relates to a process for the production of myo-inositol, which comprises
[83035] (a) increasing or generating the activity of a bifunctional protein (phosphoribosyltransferase and regulatory protein) non-targeted in a non-human organism or a part thereof, preferably a microorganism, a plant cell, a plant or a part thereof, as compared to a corresponding non-transformed wild type non-human organism or a part thereof; and
[83036] (b) growing the non-human organism or a part thereof under conditions which permit the production of myo-inositol or a composition comprising myo-inositol in said non-human organism or in the culture medium surrounding said non-human organism.

[83037] A further embodiment of the present invention relates to a process for the production of glucose-1-phosphate, which comprises
[83038] (a) increasing or generating the activity of a sll0418-protein non-targeted in a non-human organism or a part thereof, preferably a microorganism, a plant cell, a plant or a part thereof, as compared to a corresponding non-transformed wild type non-human organism or a part thereof; and
[83039] (b) growing the non-human organism or a part thereof under conditions which permit the production of glucose-1-phosphate or a composition comprising glucose-1-phosphate in said non-human organism or in the culture medium surrounding said non-human organism.

[83040] A further embodiment of the present invention relates to a process for the production of myo-inositol, which comprises
[83041] (a) increasing or generating the activity of a sll0418-protein non-targeted in a non-human organism or a part thereof, preferably a microorganism, a plant cell, a plant or a part thereof, as compared to a corresponding non-transformed wild type non-human organism or a part thereof; and
[83042] (b) growing the non-human organism or a part thereof under conditions which permit the production of myo-inositol or a composition comprising myo-inositol in said non-human organism or in the culture medium surrounding said non-human organism.

[83043] A further embodiment of the present invention relates to a process for the production of myo-inositol, which comprises
[83044] (a) increasing or generating the activity of a sll0418-protein non-targeted in a non-human organism or a part thereof, preferably a microorganism, a plant cell, a plant or a part thereof, as compared to a corresponding non-transformed wild type non-human organism or a part thereof; and
[83045] (b) growing the non-human organism or a part thereof under conditions which permit the production of myo-inositol or a composition comprising myo-inositol in said non-human organism or in the culture medium surrounding said non-human organism.

[83046] A further embodiment of the present invention relates to a process for the production of saccharic acid, which comprises
[83047] (a) increasing or generating the activity of a sll0418-protein non-targeted in a non-human organism or a part thereof, preferably a microorganism, a plant cell, a plant or a part thereof, as compared to a corresponding non-transformed wild type non-human organism or a part thereof; and
[83048] (b) growing the non-human organism or a part thereof under conditions which permit the production of saccharic acid or a composition comprising saccharic acid in said non-human organism or in the culture medium surrounding said non-human organism.

[83049] A further embodiment of the present invention relates to a process for the production of 3,4,5-trihydroxypentanoic acid, which comprises
[83050] (a) increasing or generating the activity of a sll0418-protein non-targeted in a non-human organism or a part thereof, preferably a microorganism, a plant cell, a plant or a part thereof, as compared to a corresponding non-transformed wild type non-human organism or a part thereof; and
[83051] (b) growing the non-human organism or a part thereof under conditions which permit the production of 3,4,5-trihydroxypentanoic acid or a composition comprising 3,4,5-trihydroxypentanoic acid in said non-human organism or in the culture medium surrounding said non-human organism.

[83052] A further embodiment of the present invention relates to a process for the production of glucose-1-phosphate, which comprises
[83053] (a) increasing or generating the activity of a urease subunit non-targeted in a non-human organism or a part thereof, preferably a microorganism, a plant cell, a plant or a part thereof, as compared to a corresponding non-transformed wild type non-human organism or a part thereof; and
[83054] (b) growing the non-human organism or a part thereof under conditions which permit the production of glucose-1-phosphate or a composition comprising glucose-1-phosphate in said non-human organism or in the culture medium surrounding said non-human organism.

[83055] A further embodiment of the present invention relates to a process for the production of glucose-1-phosphate, which comprises
[83056] (a) increasing or generating the activity of a glucokinase non-targeted in a non-human organism or a part thereof, preferably a microorganism, a plant cell, a plant or a part thereof, as compared to a corresponding non-transformed wild type non-human organism or a part thereof; and
[83057] (b) growing the non-human organism or a part thereof under conditions which permit the production of glucose-1-phosphate or a composition comprising glucose-1-phosphate in said non-human organism or in the culture medium surrounding said non-human organism.

[83058] A further embodiment of the present invention relates to a process for the production of saccharic acid, which comprises
[83059] (a) increasing or generating the activity of a urease accessory protein non-targeted in a non-human organism or a part thereof, preferably a microorganism, a plant cell, a plant or a part thereof, as compared to a corresponding non-transformed wild type non-human organism or a part thereof; and
[83060] (b) growing the non-human organism or a part thereof under conditions which permit the production of saccharic acid or a composition comprising saccharic acid in said non-human organism or in the culture medium surrounding said non-human organism.

[83061] A further embodiment of the present invention relates to a process for the production of glucose-1-phosphate, which comprises
[83062] (a) increasing or generating the activity of a binding-protein-dependent transport systems inner membrane component non-targeted in a non-human organism or a part thereof, preferably a microorganism, a plant cell, a plant or a part thereof, as compared to a corresponding non-transformed wild type non-human organism or a part thereof; and
[83063] (b) growing the non-human organism or a part thereof under conditions which permit the production of glucose-1-phosphate or a composition comprising glucose-1-phosphate in said non-human organism or in the culture medium surrounding said non-human organism.

[83064] A further embodiment of the present invention relates to a process for the production of 3,4,5-trihydroxypentanoic acid, which comprises
[83065] (a) increasing or generating the activity of a binding-protein-dependent transport systems inner membrane component non-targeted in a non-human organism or a part thereof, preferably a microorganism, a plant cell, a plant or a part thereof, as compared to a corresponding non-transformed wild type non-human organism or a part thereof; and
[83066] (b) growing the non-human organism or a part thereof under conditions which permit the production of 3,4,5-trihydroxypentanoic acid or a composition comprising 3,4,5-trihydroxypentanoic acid in said non-human organism or in the culture medium surrounding said non-human organism.

[83067] A further embodiment of the present invention relates to a process for the production of glucose-1-phosphate, which comprises
[83068] (a) increasing or generating the activity of a 3-deoxy-7-phosphoheptulonate synthase non-targeted in a non-human organism or a part thereof, preferably a microorganism, a plant cell, a plant or a part thereof, as compared to a corresponding non-transformed wild type non-human organism or a part thereof; and
[83069] (b) growing the non-human organism or a part thereof under conditions which permit the production of glucose-1-phosphate or a composition comprising glucose-1-phosphate in said non-human organism or in the culture medium surrounding said non-human organism.

[83070] A further embodiment of the present invention relates to a process for the production of fructose, which comprises
[83071] (a) increasing or generating the activity of a glycogen synthase non-targeted in a non-human organism or a part thereof, preferably a microorganism, a plant cell, a plant or a part thereof, as compared to a corresponding non-transformed wild type non-human organism or a part thereof; and
[83072] (b) growing the non-human organism or a part thereof under conditions which permit the production of fructose or a composition comprising fructose in said non-human organism or in the culture medium surrounding said non-human organism.

[83073] A further embodiment of the present invention relates to a process for the production of sucrose, which comprises
[83074] (a) increasing or generating the activity of a glycogen synthase non-targeted in a non-human organism or a part thereof, preferably a microorganism, a plant cell, a plant or a part thereof, as compared to a corresponding non-transformed wild type non-human organism or a part thereof; and
[83075] (b) growing the non-human organism or a part thereof under conditions which permit the production of sucrose or a composition comprising sucrose in said non-human organism or in the culture medium surrounding said non-human organism.

[83076] A further embodiment of the present invention relates to a process for the production of glucose-1-phosphate, which comprises
[83077] (a) increasing or generating the activity of a coproporphyrinogen oxidase non-targeted in a non-human organism or a part thereof, preferably a microorganism, a plant cell, a plant or a part thereof, as compared to a corresponding non-transformed wild type non-human organism or a part thereof; and
[83078] (b) growing the non-human organism or a part thereof under conditions which permit the production of glucose-1-phosphate or a composition comprising glucose-1-phosphate in said non-human organism or in the culture medium surrounding said non-human organism.

[83079] A further embodiment of the present invention relates to a process for the production of 3,4,5-trihydroxypentanoic acid, which comprises
[83080] (a) increasing or generating the activity of a short chain dehydrogenase non-targeted in a non-human organism or a part thereof, preferably a microorganism, a plant cell, a plant or a part thereof, as compared to a corresponding non-transformed wild type non-human organism or a part thereof; and
[83081] (b) growing the non-human organism or a part thereof under conditions which permit the production of 3,4,5-trihydroxypentanoic acid or a composition comprising 3,4,5-trihydroxypentanoic acid in said non-human organism or in the culture medium surrounding said non-human organism.

[83082] A further embodiment of the present invention relates to a process for the production of raffinose, which comprises
[83083] (a) increasing or generating the activity of a glycogen (starch) synthase non-targeted in a non-human organism or a part thereof, preferably a microorganism, a plant cell, a plant or a part thereof, as compared to a corresponding non-transformed wild type non-human organism or a part thereof; and
[83084] (b) growing the non-human organism or a part thereof under conditions which permit the production of raffinose or a composition comprising raffinose in said non-human organism or in the culture medium surrounding said non-human organism.

[83085] A further embodiment of the present invention relates to a process for the production of myo-inositol, which comprises
[83086] (a) increasing or generating the activity of a carbamoyl-phosphate synthase subunit non-targeted in a non-human organism or a part thereof, preferably a microorganism, a plant cell, a plant or a part thereof, as compared to a corresponding non-transformed wild type non-human organism or a part thereof; and
[83087] (b) growing the non-human organism or a part thereof under conditions which permit the production of myo-inositol or a composition comprising myo-inositol in said non-human organism or in the culture medium surrounding said non-human organism.

[83088] A further embodiment of the present invention relates to a process for the production of 3,4,5-trihydroxypentanoic acid, which comprises
[83089] (a) increasing or generating the activity of a carbamoyl-phosphate synthase subunit non-targeted in a non-human organism or a part thereof, preferably a microorganism, a plant cell, a plant or a part thereof, as compared to a corresponding non-transformed wild type non-human organism or a part thereof; and
[83090] (b) growing the non-human organism or a part thereof under conditions which permit the production of 3,4,5-trihydroxypentanoic acid or a composition comprising 3,4,5-trihydroxypentanoic acid in said non-human organism or in the culture medium surrounding said non-human organism.

[83091] A further embodiment of the present invention relates to a process for the production of myo-inositol, which comprises
[83092] (a) increasing or generating the activity of a 4-alpha-glucanotransferase non-targeted in a non-human organism or a part thereof, preferably a microorganism, a plant cell, a plant or a part thereof, as compared to a corresponding non-transformed wild type non-human organism or a part thereof; and
[83093] (b) growing the non-human organism or a part thereof under conditions which permit the production of myo-inositol or a composition comprising myo-inositol in said non-human organism or in the culture medium surrounding said non-human organism.

[83094] A further embodiment of the present invention relates to a process for the production of 3,4,5-trihydroxypentanoic acid, which comprises
[83095] (a) increasing or generating the activity of a alanine dehydrogenase non-targeted in a non-human organism or a part thereof, preferably a microorganism, a plant cell, a plant or a part thereof, as compared to a corresponding non-transformed wild type non-human organism or a part thereof; and
[83096] (b) growing the non-human organism or a part thereof under conditions which permit the production of 3,4,5-trihydroxypentanoic acid or a composition comprising 3,4,5-trihydroxypentanoic acid in said non-human organism or in the culture medium surrounding said non-human organism.

[83097] A further embodiment of the present invention relates to a process for the production of glucose, which comprises
[83098] (a) increasing or generating the activity of a sll1761-protein non-targeted in a non-human organism or a part thereof, preferably a microorganism, a plant cell, a plant or a part thereof, as compared to a corresponding non-transformed wild type non-human organism or a part thereof; and
[83099] (b) growing the non-human organism or a part thereof under conditions which permit the production of glucose or a composition comprising glucose in said non-human organism or in the culture medium surrounding said non-human organism.

[83100] A further embodiment of the present invention relates to a process for the production of glucose, which comprises
[83101] (a) increasing or generating the activity of a acyl transferase non-targeted in a non-human organism or a part thereof, preferably a microorganism, a plant cell, a plant or a part thereof, as compared to a corresponding non-transformed wild type non-human organism or a part thereof; and
[83102] (b) growing the non-human organism or a part thereof under conditions which permit the production of glucose or a composition comprising glucose in said non-human organism or in the culture medium surrounding said non-human organism.

[83103] A further embodiment of the present invention relates to a process for the production of glucose-1-phosphate, which comprises
[83104] (a) increasing or generating the activity of a cation-transporting ATPase non-targeted in a non-human organism or a part thereof, preferably a microorganism, a plant cell, a plant or a part thereof, as compared to a corresponding non-transformed wild type non-human organism or a part thereof; and
[83105] (b) growing the non-human organism or a part thereof under conditions which permit the production of glucose-1-phosphate or a composition comprising glucose-1-phosphate in said non-human organism or in the culture medium surrounding said non-human organism.

[83106] A further embodiment of the present invention relates to a process for the production of glucose-1-phosphate, which comprises
[83107] (a) increasing or generating the activity of a cation-transporting ATPase non-targeted in a non-human organism or a part thereof, preferably a microorganism, a plant cell, a plant or a part thereof, as compared to a corresponding non-transformed wild type non-human organism or a part thereof; and
[83108] (b) growing the non-human organism or a part thereof under conditions which permit the production of glucose-1-phosphate or a composition comprising glucose-1-phosphate in said non-human organism or in the culture medium surrounding said non-human organism.

[83109] A further embodiment of the present invention relates to a process for the production of myo-inositol, which comprises
[83110] (a) increasing or generating the activity of a cation-transporting ATPase non-targeted in a non-human organism or a part thereof, preferably a microorganism, a plant cell, a plant or a part thereof, as compared to a corresponding non-transformed wild type non-human organism or a part thereof; and
[83111] (b) growing the non-human organism or a part thereof under conditions which permit the production of myo-inositol or a composition comprising myo-inositol in said non-human organism or in the culture medium surrounding said non-human organism.

[83112] A further embodiment of the present invention relates to a process for the production of raffinose, which comprises
[83113] (a) increasing or generating the activity of a cation-transporting ATPase non-targeted in a non-human organism or a part thereof, preferably a microorganism, a plant cell, a plant or a part thereof, as compared to a corresponding non-transformed wild type non-human organism or a part thereof; and
[83114] (b) growing the non-human organism or a part thereof under conditions which permit the production of raffinose or a composition comprising raffinose in said non-human organism or in the culture medium surrounding said non-human organism.

[83115] A further embodiment of the present invention relates to a process for the production of glucose-1-phosphate, which comprises
[83116] (a) increasing or generating the activity of a glycosidase non-targeted in a non-human organism or a part thereof, preferably a microorganism, a plant cell, a plant or a part thereof, as compared to a corresponding non-transformed wild type non-human organism or a part thereof; and
[83117] (b) growing the non-human organism or a part thereof under conditions which permit the production of glucose-1-phosphate or a composition comprising glucose-1-phosphate in said non-human organism or in the culture medium surrounding said non-human organism.

[83118] A further embodiment of the present invention relates to a process for the production of fructose, which comprises
[83119] (a) increasing or generating the activity of a precorrin methylase non-targeted in a non-human organism or a part thereof, preferably a microorganism, a plant cell, a plant or a part thereof, as compared to a corresponding non-transformed wild type non-human organism or a part thereof; and
[83120] (b) growing the non-human organism or a part thereof under conditions which permit the production of fructose or a composition comprising fructose in said non-human organism or in the culture medium surrounding said non-human organism.

[83121] A further embodiment of the present invention relates to a process for the production of glucose, which comprises
[83122] (a) increasing or generating the activity of a precorrin methylase non-targeted in a non-human organism or a part thereof, preferably a microorganism, a plant cell, a plant or a part thereof, as compared to a corresponding non-transformed wild type non-human organism or a part thereof; and
[83123] (b) growing the non-human organism or a part thereof under conditions which permit the production of glucose or a composition comprising glucose in said non-human organism or in the culture medium surrounding said non-human organism.

[83124] A further embodiment of the present invention relates to a process for the production of glucose-1-phosphate, which comprises
[83125] (a) increasing or generating the activity of a oxidoreductase non-targeted in a non-human organism or a part thereof, preferably a microorganism, a plant cell, a plant or a part thereof, as compared to a corresponding non-transformed wild type non-human organism or a part thereof; and
[83126] (b) growing the non-human organism or a part thereof under conditions which permit the production of glucose-1-phosphate or a composition comprising glucose-1-phosphate in said non-human organism or in the culture medium surrounding said non-human organism.

[83127] A further embodiment of the present invention relates to a process for the production of 3,4,5-trihydroxypentanoic acid, which comprises
[83128] (a) increasing or generating the activity of a oxidoreductase non-targeted in a non-human organism or a part thereof, preferably a microorganism, a plant cell, a plant or a part thereof, as compared to a corresponding non-transformed wild type non-human organism or a part thereof; and
[83129] (b) growing the non-human organism or a part thereof under conditions which permit the production of 3,4,5-trihydroxypentanoic acid or a composition comprising 3,4,5-trihydroxypentanoic acid in said non-human organism or in the culture medium surrounding said non-human organism.

[83130] A further embodiment of the present invention relates to a process for the production of glucose-1-phosphate, which comprises
[83131] (a) increasing or generating the activity of a slr0600-protein non-targeted in a non-human organism or a part thereof, preferably a microorganism, a plant cell, a plant or a part thereof, as compared to a corresponding non-transformed wild type non-human organism or a part thereof; and
[83132] (b) growing the non-human organism or a part thereof under conditions which permit the production of glucose-1-phosphate or a composition comprising glucose-1-phosphate in said non-human organism or in the culture medium surrounding said non-human organism.

[83133] A further embodiment of the present invention relates to a process for the production of glucose-1-phosphate, which comprises
[83134] (a) increasing or generating the activity of a Glu/Leu/PheNal dehydrogenase non-targeted in a non-human organism or a part thereof, preferably a microorganism, a plant cell, a plant or a part thereof, as compared to a corresponding non-transformed wild type non-human organism or a part thereof; and
[83135] (b) growing the non-human organism or a part thereof under conditions which permit the production of glucose-1-phosphate or a composition comprising glucose-1-phosphate in said non-human organism or in the culture medium surrounding said non-human organism.

[83136] A further embodiment of the present invention relates to a process for the production of glucose-1-phosphate, which comprises
[83137] (a) increasing or generating the activity of a malate dehydrogenase non-targeted in a non-human organism or a part thereof, preferably a microorganism, a plant cell, a plant or a part thereof, as compared to a corresponding non-transformed wild type non-human organism or a part thereof; and
[83138] (b) growing the non-human organism or a part thereof under conditions which permit the production of glucose-1-phosphate or a composition comprising glucose-1-phosphate in said non-human organism or in the culture medium surrounding said non-human organism.

[83139] A further embodiment of the present invention relates to a process for the production of sucrose, which comprises
[83140] (a) increasing or generating the activity of a geranylgeranyl pyrophosphate synthase non-targeted in a non-human organism or a part thereof, preferably a microorganism, a plant cell, a plant or a part thereof, as compared to a corresponding non-transformed wild type non-human organism or a part thereof; and
[83141] (b) growing the non-human organism or a part thereof under conditions which permit the production of sucrose or a composition comprising sucrose in said non-human organism or in the culture medium surrounding said non-human organism.

[83142] A further embodiment of the present invention relates to a process for the production of fructose, which comprises
[83143] (a) increasing or generating the activity of a circadian clock protein non-targeted in a non-human organism or a part thereof, preferably a microorganism, a plant cell, a plant or a part thereof, as compared to a corresponding non-transformed wild type non-human organism or a part thereof; and
[83144] (b) growing the non-human organism or a part thereof under conditions which permit the production of fructose or a composition comprising fructose in said non-human organism or in the culture medium surrounding said non-human organism.

[83145] A further embodiment of the present invention relates to a process for the production of glucose, which comprises
[83146] (a) increasing or generating the activity of a circadian clock protein non-targeted in a non-human organism or a part thereof, preferably a microorganism, a plant cell, a plant or a part thereof, as compared to a corresponding non-transformed wild type non-human organism or a part thereof; and
[83147] (b) growing the non-human organism or a part thereof under conditions which permit the production of glucose or a composition comprising glucose in said non-human organism or in the culture medium surrounding said non-human organism.

[83148] A further embodiment of the present invention relates to a process for the production of glucose-1-phosphate, which comprises
[83149] (a) increasing or generating the activity of a circadian clock protein non-targeted in a non-human organism or a part thereof, preferably a microorganism, a plant cell, a plant or a part thereof, as compared to a corresponding non-transformed wild type non-human organism or a part thereof; and
[83150] (b) growing the non-human organism or a part thereof under conditions which permit the production of glucose-1-phosphate or a composition comprising glucose-1-phosphate in said non-human organism or in the culture medium surrounding said non-human organism.

[83151] A further embodiment of the present invention relates to a process for the production of glucose-1-phosphate, which comprises
[83152] (a) increasing or generating the activity of a amine oxidase non-targeted in a non-human organism or a part thereof, preferably a microorganism, a plant cell, a plant or a part thereof, as compared to a corresponding non-transformed wild type non-human organism or a part thereof; and
[83153] (b) growing the non-human organism or a part thereof under conditions which permit the production of glucose-1-phosphate or a composition comprising glucose-1-phosphate in said non-human organism or in the culture medium surrounding said non-human organism.

[83154] A further embodiment of the present invention relates to a process for the production of fructose, which comprises
[83155] (a) increasing or generating the activity of a kinase non-targeted in a non-human organism or a part thereof, preferably a microorganism, a plant cell, a plant or a part thereof, as compared to a corresponding non-transformed wild type non-human organism or a part thereof; and
[83156] (b) growing the non-human organism or a part thereof under conditions which permit the production of fructose or a composition comprising fructose in said non-human organism or in the culture medium surrounding said non-human organism.

[83157] A further embodiment of the present invention relates to a process for the production of glucose, which comprises
[83158] (a) increasing or generating the activity of a kinase non-targeted in a non-human organism or a part thereof, preferably a microorganism, a plant cell, a plant or a part thereof, as compared to a corresponding non-transformed wild type non-human organism or a part thereof; and
[83159] (b) growing the non-human organism or a part thereof under conditions which permit the production of glucose or a composition comprising glucose in said non-human organism or in the culture medium surrounding said non-human organism.

[83160] A further embodiment of the present invention relates to a process for the production of glucose-1-phosphate, which comprises
[83161] (a) increasing or generating the activity of a Mg-protoporphyrin IX monomethyl ester oxidative cyclase 66 kD subunit non-targeted in a non-human organism or a part thereof, preferably a microorganism, a plant cell, a plant or a part thereof, as compared to a corresponding non-transformed wild type non-human organism or a part thereof; and
[83162] (b) growing the non-human organism or a part thereof under conditions which permit the production of glucose-1-phosphate or a composition comprising glucose-1-phosphate in said non-human organism or in the culture medium surrounding said non-human organism.

[83163] A further embodiment of the present invention relates to a process for the production of myo-inositol, which comprises
[83164] (a) increasing or generating the activity of a permease protein of ABC transporter non-targeted in a non-human organism or a part thereof, preferably a microorganism, a plant cell, a plant or a part thereof, as compared to a corresponding non-transformed wild type non-human organism or a part thereof; and
[83165] (b) growing the non-human organism or a part thereof under conditions which permit the production of myo-inositol or a composition comprising myo-inositol in said non-human organism or in the culture medium surrounding said non-human organism.

[83166] A further embodiment of the present invention relates to a process for the production of glucose-1-phosphate, which comprises
[83167] (a) increasing or generating the activity of a dihydrolipoamide dehydrogenase non-targeted in a non-human organism or a part thereof, preferably a microorganism, a plant cell, a plant or a part thereof, as compared to a corresponding non-transformed wild type non-human organism or a part thereof; and
[83168] (b) growing the non-human organism or a part thereof under conditions which permit the production of glucose-1-phosphate or a composition comprising glucose-1-phosphate in said non-human organism or in the culture medium surrounding said non-human organism.

[83169] A further embodiment of the present invention relates to a process for the production of raffinose, which comprises
[83170] (a) increasing or generating the activity of a dihydrolipoamide dehydrogenase non-targeted in a non-human organism or a part thereof, preferably a microorganism, a plant cell, a plant or a part thereof, as compared to a corresponding non-transformed wild type non-human organism or a part thereof; and
[83171] (b) growing the non-human organism or a part thereof under conditions which permit the production of raffinose or a composition comprising raffinose in said non-human organism or in the culture medium surrounding said non-human organism.

[83172] A further embodiment of the present invention relates to a process for the production of myo-inositol, which comprises
[83173] (a) increasing or generating the activity of a slr1107-protein non-targeted in a non-human organism or a part thereof, preferably a microorganism, a plant cell, a plant or a part thereof, as compared to a corresponding non-transformed wild type non-human organism or a part thereof; and
[83174] (b) growing the non-human organism or a part thereof under conditions which permit the production of myo-inositol or a composition comprising myo-inositol in said non-human organism or in the culture medium surrounding said non-human organism.

[83175] A further embodiment of the present invention relates to a process for the production of glucose-1-phosphate, which comprises
[83176] (a) increasing or generating the activity of a fatty acid desaturase non-targeted in a non-human organism or a part thereof, preferably a microorganism, a plant cell, a plant or a part thereof, as compared to a corresponding non-transformed wild type non-human organism or a part thereof; and
[83177] (b) growing the non-human organism or a part thereof under conditions which permit the production of glucose-1-phosphate or a composition comprising glucose-1-phosphate in said non-human organism or in the culture medium surrounding said non-human organism.

[83178] A further embodiment of the present invention relates to a process for the production of glucose-1-phosphate, which comprises
[83179] (a) increasing or generating the activity of a CDP-diglyceride synthetase non-targeted in a non-human organism or a part thereof, preferably a microorganism, a plant cell, a plant or a part thereof, as compared to a corresponding non-transformed wild type non-human organism or a part thereof; and
[83180] (b) growing the non-human organism or a part thereof under conditions which permit the production of glucose-1-phosphate or a composition comprising glucose-1-phosphate in said non-human organism or in the culture medium surrounding said non-human organism.

[83181] A further embodiment of the present invention relates to a process for the production of myo-inositol, which comprises
[83182] (a) increasing or generating the activity of a CDP-diglyceride synthetase non-targeted in a non-human organism or a part thereof, preferably a microorganism, a plant cell, a plant or a part thereof, as compared to a corresponding non-transformed wild type non-human organism or a part thereof; and
[83183] (b) growing the non-human organism or a part thereof under conditions which permit the production of myo-inositol or a composition comprising myo-inositol in said non-human organism or in the culture medium surrounding said non-human organism.

[83184] A further embodiment of the present invention relates to a process for the production of fructose, which comprises
[83185] (a) increasing or generating the activity of a iron(III) dicitrate-binding protein non-targeted in a non-human organism or a part thereof, preferably a microorganism, a plant cell, a plant or a part thereof, as compared to a corresponding non-transformed wild type non-human organism or a part thereof; and
[83186] (b) growing the non-human organism or a part thereof under conditions which permit the production of fructose or a composition comprising fructose in said non-human organism or in the culture medium surrounding said non-human organism.

[83187] A further embodiment of the present invention relates to a process for the production of sucrose, which comprises
[83188] (a) increasing or generating the activity of a photosystem I reaction center subunit XI non-targeted in a non-human organism or a part thereof, preferably a microorganism, a plant cell, a plant or a part thereof, as compared to a corresponding non-transformed wild type non-human organism or a part thereof; and
[83189] (b) growing the non-human organism or a part thereof under conditions which permit the production of sucrose or a composition comprising sucrose in said non-human organism or in the culture medium surrounding said non-human organism.

[83190] A further embodiment of the present invention relates to a process for the production of fructose, which comprises
[83191] (a) increasing or generating the activity of a photosystem II protein non-targeted in a non-human organism or a part thereof, preferably a microorganism, a plant cell, a plant or a part thereof, as compared to a corresponding non-transformed wild type non-human organism or a part thereof; and
[83192] (b) growing the non-human organism or a part thereof under conditions which permit the production of fructose or a composition comprising fructose in said non-human organism or in the culture medium surrounding said non-human organism.

[83193] A further embodiment of the present invention relates to a process for the production of fructose, which comprises
[83194] (a) increasing or generating the activity of a glutamine amidotransferase non-targeted in a non-human organism or a part thereof, preferably a microorganism, a plant cell, a plant or a part thereof, as compared to a corresponding non-transformed wild type non-human organism or a part thereof; and
[83195] (b) growing the non-human organism or a part thereof under conditions which permit the production of fructose or a composition comprising fructose in said non-human organism or in the culture medium surrounding said non-human organism.

[83196] A further embodiment of the present invention relates to a process for the production of myo-inositol, which comprises
[83197] (a) increasing or generating the activity of a glutamine amidotransferase non-targeted in a non-human organism or a part thereof, preferably a microorganism, a plant cell, a plant or a part thereof, as compared to a corresponding non-transformed wild type non-human organism or a part thereof; and
[83198] (b) growing the non-human organism or a part thereof under conditions which permit the production of myo-inositol or a composition comprising myo-inositol in said non-human organism or in the culture medium surrounding said non-human organism.

[83199] A further embodiment of the present invention relates to a process for the production of glu-cose-1-phosphate, which comprises
[83200] (a) increasing or generating the activity of a NADH dehydrogenase non-targeted in a non-human organism or a part thereof, preferably a microorganism, a plant cell, a plant or a part thereof, as compared to a corresponding non-transformed wild type non-human organism or a part thereof; and
[83201] (b) growing the non-human organism or a part thereof under conditions which permit the production of glucose-1-phosphate or a composition comprising glucose-1-phosphate in said non-human organism or in the culture medium surrounding said non-human organism.

[83202] A further embodiment of the present invention relates to a process for the production of raffinose, which comprises
[83203] (a) increasing or generating the activity of a pyridoxal phosphate biosynthetic protein non-targeted in a non-human organism or a part thereof, preferably a microorganism, a plant cell, a plant or a part thereof, as compared to a corresponding non-transformed wild type non-human organism or a part thereof; and
[83204] (b) growing the non-human organism or a part thereof under conditions which permit the production of raffinose or a composition comprising raffinose in said non-human organism or in the culture medium surrounding said non-human organism.

[83205] A further embodiment of the present invention relates to a process for the production of glucose-1-phosphate, which comprises
[83206] (a) increasing or generating the activity of a phosphoadenosine phosphosulfate reductase non-targeted in a non-human organism or a part thereof, preferably a microorganism, a plant cell, a plant or a part thereof, as compared to a corresponding non-transformed wild type non-human organism or a part thereof; and
[83207] (b) growing the non-human organism or a part thereof under conditions which permit the production of glucose-1-phosphate or a composition comprising glucose-1-phosphate in said non-human organism or in the culture medium surrounding said non-human organism.

[83208] A further embodiment of the present invention relates to a process for the production of glucose-1-phosphate, which comprises
[83209] (a) increasing or generating the activity of a threonine dehydratase non-targeted in a non-human organism or a part thereof, preferably a microorganism, a plant cell, a plant or a part thereof, as compared to a corresponding non-transformed wild type non-human organism or a part thereof; and
[83210] (b) growing the non-human organism or a part thereof under conditions which permit the production of glucose-1-phosphate or a composition comprising glucose-1-phosphate in said non-human organism or in the culture medium surrounding said non-human organism.

[83211] A further embodiment of the present invention relates to a process for the production of 3,4,5-trihydroxypentanoic acid, which comprises
[83212] (a) increasing or generating the activity of a threonine dehydratase non-targeted in a non-human organism or a part thereof, preferably a microorganism, a plant cell, a plant or a part thereof, as compared to a corresponding non-transformed wild type non-human organism or a part thereof; and
[83213] (b) growing the non-human organism or a part thereof under conditions which permit the production of 3,4,5-trihydroxypentanoic acid or a composition comprising 3,4,5-trihydroxypentanoic acid in said non-human organism or in the culture medium surrounding said non-human organism.

[83214] A further embodiment of the present invention relates to a process for the production of fructose, which comprises
[83215] (a) increasing or generating the activity of a short-chain alcohol dehydrogenase family non-targeted in a non-human organism or a part thereof, preferably a microorganism, a plant cell, a plant or a part thereof, as compared to a corresponding non-transformed wild type non-human organism or a part thereof; and
[83216] (b) growing the non-human organism or a part thereof under conditions which permit the production of fructose or a composition comprising fructose in said non-human organism or in the culture medium surrounding said non-human organism.

[83217] A further embodiment of the present invention relates to a process for the production of glucose, which comprises
[83218] (a) increasing or generating the activity of a short-chain alcohol dehydrogenase family non-targeted in a non-human organism or a part thereof, preferably a microorganism, a plant cell, a plant or a part thereof, as compared to a corresponding non-transformed wild type non-human organism or a part thereof; and
[83219] (b) growing the non-human organism or a part thereof under conditions which permit the production of glucose or a composition comprising glucose in said non-human organism or in the culture medium surrounding said non-human organism.

[83220] A further embodiment of the present invention relates to a process for the production of glucose-1-phosphate, which comprises
[83221] (a) increasing or generating the activity of a short-chain alcohol dehydrogenase family non-targeted in a non-human organism or a part thereof, preferably a microorganism, a plant cell, a plant or a part thereof, as compared to a corresponding non-transformed wild type non-human organism or a part thereof; and
[83222] (b) growing the non-human organism or a part thereof under conditions which permit the production of glucose-1-phosphate or a composition comprising glucose-1-phosphate in said non-human organism or in the culture medium surrounding said non-human organism.

[83223] A further embodiment of the present invention relates to a process for the production of myo-inositol, which comprises
[83224] (a) increasing or generating the activity of a short-chain alcohol dehydrogenase family non-targeted in a non-human organism or a part thereof, preferably a microorganism, a plant cell, a plant or a part thereof, as compared to a corresponding non-transformed wild type non-human organism or a part thereof; and
[83225] (b) growing the non-human organism or a part thereof under conditions which permit the production of myo-inositol or a composition comprising myo-inositol in said non-human organism or in the culture medium surrounding said non-human organism.

[83226] A further embodiment of the present invention relates to a process for the production of sucrose, which comprises
[83227] (a) increasing or generating the activity of a short-chain alcohol dehydrogenase family non-targeted in a non-human organism or a part thereof, preferably a microorganism, a plant cell, a plant or a part thereof, as compared to a corresponding non-transformed wild type non-human organism or a part thereof; and
[83228] (b) growing the non-human organism or a part thereof under conditions which permit the production of sucrose or a composition comprising sucrose in said non-human organism or in the culture medium surrounding said non-human organism.

[83229] A further embodiment of the present invention relates to a process for the production of raffinose, which comprises
[83230] (a) increasing or generating the activity of a phosphate acetyltransferase non-targeted in a non-human organism or a part thereof, preferably a microorganism, a plant cell, a plant or a part thereof, as compared to a corresponding non-transformed wild type non-human organism or a part thereof; and
[83231] (b) growing the non-human organism or a part thereof under conditions which permit the production of raffinose or a composition comprising raffinose in said non-human organism or in the culture medium surrounding said non-human organism.

[83232] A further embodiment of the present invention relates to a process for the production of glucose-1-phosphate, which comprises
[83233] (a) increasing or generating the activity of a photosystem I reaction centre subunit non-targeted in a non-human organism or a part thereof, preferably a microorganism, a plant cell, a plant or a part thereof, as compared to a corresponding non-transformed wild type non-human organism or a part thereof; and
[83234] (b) growing the non-human organism or a part thereof under conditions which permit the production of glucose-1-phosphate or a composition comprising glucose-1-phosphate in said non-human organism or in the culture medium surrounding said non-human organism.

[83235] A further embodiment of the present invention relates to a process for the production of raffinose, which comprises
[83236] (a) increasing or generating the activity of a photosystem I reaction centre subunit non-targeted in a non-human organism or a part thereof, preferably a microorganism, a plant cell, a plant or a part thereof, as compared to a corresponding non-transformed wild type non-human organism or a part thereof; and
[83237] (b) growing the non-human organism or a part thereof under conditions which permit the production of raffinose or a composition comprising raffinose in said non-human organism or in the culture medium surrounding said non-human organism.

[83238] A further embodiment of the present invention relates to a process for the production of 3,4,5-trihydroxypentanoic acid, which comprises
[83239] (a) increasing or generating the activity of a photosystem I reaction centre subunit non-targeted in a non-human organism or a part thereof, preferably a microorganism, a plant cell, a plant or a part thereof, as compared to a corresponding non-transformed wild type non-human organism or a part thereof; and
[83240] (b) growing the non-human organism or a part thereof under conditions which permit the production of 3,4,5-trihydroxypentanoic acid or a composition comprising 3,4,5-trihydroxypentanoic acid in said non-human organism or in the culture medium surrounding said non-human organism.

[83241] A further embodiment of the present invention relates to a process for the production of fructose, which comprises
[83242] (a) increasing or generating the activity of a Sec-independent protein translocase subunit non-targeted in a non-human organism or a part thereof, preferably a microorganism, a plant cell, a plant or a part thereof, as compared to a corresponding non-transformed wild type non-human organism or a part thereof; and
[83243] (b) growing the non-human organism or a part thereof under conditions which permit the production of fructose or a composition comprising fructose in said non-human organism or in the culture medium surrounding said non-human organism.

[83244] A further embodiment of the present invention relates to a process for the production of glucose, which comprises
[83245] (a) increasing or generating the activity of a Sec-independent protein translocase subunit non-targeted in a non-human organism or a part thereof, preferably a microorganism, a plant cell, a plant or a part thereof, as compared to a corresponding non-transformed wild type non-human organism or a part thereof; and
[83246] (b) growing the non-human organism or a part thereof under conditions which permit the production of glucose or a composition comprising glucose in said non-human organism or in the culture medium surrounding said non-human organism.

[83247] A further embodiment of the present invention relates to a process for the production of sedoheptulose-7-phosphate, which comprises
[83248] (a) increasing or generating the activity of a Sec-independent protein translocase subunit non-targeted in a non-human organism or a part thereof, preferably a microorganism, a plant cell, a plant or a part thereof, as compared to a corresponding non-transformed wild type non-human organism or a part thereof; and
[83249] (b) growing the non-human organism or a part thereof under conditions which permit the production of sedoheptulose-7-phosphate or a composition comprising sedoheptulose-7-phosphate in said non-human organism or in the culture medium surrounding said non-human organism.

[83250] A further embodiment of the present invention relates to a process for the production of fructose, which comprises
[83251] (a) increasing or generating the activity of a cell division protein non-targeted in a non-human organism or a part thereof, preferably a microorganism, a plant cell, a plant or a part thereof, as compared to a corresponding non-transformed wild type non-human organism or a part thereof; and
[83252] (b) growing the non-human organism or a part thereof under conditions which permit the production of fructose or a composition comprising fructose in said non-human organism or in the culture medium surrounding said non-human organism.

[83253] A further embodiment of the present invention relates to a process for the production of glucose, which comprises
[83254] (a) increasing or generating the activity of a cell division protein non-targeted in a non-human organism or a part thereof, preferably a microorganism, a plant cell, a plant or a part thereof, as compared to a corresponding non-transformed wild type non-human organism or a part thereof; and
[83255] (b) growing the non-human organism or a part thereof under conditions which permit the production of glucose or a composition comprising glucose in said non-human organism or in the culture medium surrounding said non-human organism.

[83256] A further embodiment of the present invention relates to a process for the production of sucrose, which comprises
[83257] (a) increasing or generating the activity of a cell division protein non-targeted in a non-human organism or a part thereof, preferably a microorganism, a plant cell, a plant or a part thereof, as compared to a corresponding non-transformed wild type non-human organism or a part thereof; and
[83258] (b) growing the non-human organism or a part thereof under conditions which permit the production of sucrose or a composition comprising sucrose in said non-human organism or in the culture medium surrounding said non-human organism.

[83259] A further embodiment of the present invention relates to a process for the production of glucose-1-phosphate, which comprises
[83260] (a) increasing or generating the activity of a branched-chain amino acid ABC transporter permease protein non-targeted in a non-human organism or a part thereof, preferably a microorganism, a plant cell, a plant or a part thereof, as compared to a corresponding non-transformed wild type non-human organism or a part thereof; and
[83261] (b) growing the non-human organism or a part thereof under conditions which permit the production of glucose-1-phosphate or a composition comprising glucose-1-phosphate in said non-human organism or in the culture medium surrounding said non-human organism.

[83262] A further embodiment of the present invention relates to a process for the production of 3,4,5-trihydroxypentanoic acid, which comprises
[83263] (a) increasing or generating the activity of a branched-chain amino acid ABC transporter permease protein non-targeted in a non-human organism or a part thereof, preferably a microorganism, a plant cell, a plant or a part thereof, as compared to a corresponding non-transformed wild type non-human organism or a part thereof; and
[83264] (b) growing the non-human organism or a part thereof under conditions which permit the production of 3,4,5-trihydroxypentanoic acid or a composition comprising 3,4,5-trihydroxypentanoic acid in said non-human organism or in the culture medium surrounding said non-human organism.

[83265] A further embodiment of the present invention relates to a process for the production of myo-inositol, which comprises
[83266] (a) increasing or generating the activity of a 3-isopropylmalate dehydratase large subunit non-targeted in a non-human organism or a part thereof, preferably a microorganism, a plant cell, a plant or a part thereof, as compared to a corresponding non-transformed wild type non-human organism or a part thereof; and
[83267] (b) growing the non-human organism or a part thereof under conditions which permit the production of myo-inositol or a composition comprising myo-inositol in said non-human organism or in the culture medium surrounding said non-human organism.

[83268] A further embodiment of the present invention relates to a process for the production of fructose, which comprises
[83269] (a) increasing or generating the activity of a multiple antibiotic resistance protein non-targeted in a non-human organism or a part thereof, preferably a microorganism, a plant cell, a plant or a part thereof, as compared to a corresponding non-transformed wild type non-human organism or a part thereof; and
[83270] (b) growing the non-human organism or a part thereof under conditions which permit the production of fructose or a composition comprising fructose in said non-human organism or in the culture medium surrounding said non-human organism.

[83271] A further embodiment of the present invention relates to a process for the production of glucose, which comprises
[83272] (a) increasing or generating the activity of a multiple antibiotic resistance protein non-targeted in a non-human organism or a part thereof, preferably a microorganism, a plant cell, a plant or a part thereof, as compared to a corresponding non-transformed wild type non-human organism or a part thereof; and
[83273] (b) growing the non-human organism or a part thereof under conditions which permit the production of glucose or a composition comprising glucose in said non-human organism or in the culture medium surrounding said non-human organism.

[83274] A further embodiment of the present invention relates to a process for the production of glucose-1-phosphate, which comprises
[83275] (a) increasing or generating the activity of a multiple antibiotic resistance protein non-targeted in a non-human organism or a part thereof, preferably a microorganism, a plant cell, a plant or a part thereof, as compared to a corresponding non-transformed wild type non-human organism or a part thereof; and
[83276] (b) growing the non-human organism or a part thereof under conditions which permit the production of glucose-1-phosphate or a composition comprising glucose-1-phosphate in said non-human organism or in the culture medium surrounding said non-human organism.

[83277] A further embodiment of the present invention relates to a process for the production of fructose, which comprises
[83278] (a) increasing or generating the activity of a TTC1386-protein non-targeted in a non-human organism or a part thereof, preferably a microorganism, a plant cell, a plant or a part thereof, as compared to a corresponding non-transformed wild type non-human organism or a part thereof; and
[83279] (b) growing the non-human organism or a part thereof under conditions which permit the production of fructose or a composition comprising fructose in said non-human organism or in the culture medium surrounding said non-human organism.

[83280] A further embodiment of the present invention relates to a process for the production of glucose, which comprises
[83281] (a) increasing or generating the activity of a TTC1386-protein non-targeted in a non-human organism or a part thereof, preferably a microorganism, a plant cell, a plant or a part thereof, as compared to a corresponding non-transformed wild type non-human organism or a part thereof; and
[83282] (b) growing the non-human organism or a part thereof under conditions which permit the production of glucose or a composition comprising glucose in said non-human organism or in the culture medium surrounding said non-human organism.

[83283] A further embodiment of the present invention relates to a process for the production of fructose, which comprises
[83284] (a) increasing or generating the activity of a homocitrate synthase non-targeted in a non-human organism or a part thereof, preferably a microorganism, a plant cell, a plant or a part thereof, as compared to a corresponding non-transformed wild type non-human organism or a part thereof; and
[83285] (b) growing the non-human organism or a part thereof under conditions which permit the production of fructose or a composition comprising fructose in said non-human organism or in the culture medium surrounding said non-human organism.

[83286] A further embodiment of the present invention relates to a process for the production of glucose-1-phosphate, which comprises
[83287] (a) increasing or generating the activity of a homocitrate synthase non-targeted in a non-human organism or a part thereof, preferably a microorganism, a plant cell, a plant or a part thereof, as compared to a corresponding non-transformed wild type non-human organism or a part thereof; and
[83288] (b) growing the non-human organism or a part thereof under conditions which permit the production of glucose-1-phosphate or a composition comprising glucose-1-phosphate in said non-human organism or in the culture medium surrounding said non-human organism.

[83289] A further embodiment of the present invention relates to a process for the production of sucrose, which comprises
[83290] (a) increasing or generating the activity of a homocitrate synthase non-targeted in a non-human organism or a part thereof, preferably a microorganism, a plant cell, a plant or a part thereof, as compared to a corresponding non-transformed wild type non-human organism or a part thereof; and
[83291] (b) growing the non-human organism or a part thereof under conditions which permit the production of sucrose or a composition comprising sucrose in said non-human organism or in the culture medium surrounding said non-human organism.

[83292] A further embodiment of the present invention relates to a process for the production of raffinose, which comprises
[83293] (a) increasing or generating the activity of a permease non-targeted in a non-human organism or a part thereof, preferably a microorganism, a plant cell, a plant or a part thereof, as compared to a corresponding non-transformed wild type non-human organism or a part thereof; and
[83294] (b) growing the non-human organism or a part thereof under conditions which permit the production of raffinose or a composition comprising raffinose in said non-human organism or in the culture medium surrounding said non-human organism.

[83295] A further embodiment of the present invention relates to a process for the production of 3,4,5-trihydroxypentanoic acid, which comprises
[83296] (a) increasing or generating the activity of a permease non-targeted in a non-human organism or a part thereof, preferably a microorganism, a plant cell, a plant or a part thereof, as compared to a corresponding non-transformed wild type non-human organism or a part thereof; and
[83297] (b) growing the non-human organism or a part thereof under conditions which permit the production of 3,4,5-trihydroxypentanoic acid or a composition comprising 3,4,5-trihydroxypentanoic acid in said non-human organism or in the culture medium surrounding said non-human organism.

[83298] A further embodiment of the present invention relates to a process for the production of glucose-1-phosphate, which comprises
[83299] (a) increasing or generating the activity of a oxidoreductase subunit non-targeted in a non-human organism or a part thereof, preferably a microorganism, a plant cell, a plant or a part thereof, as compared to a corresponding non-transformed wild type non-human organism or a part thereof; and
[83300] (b) growing the non-human organism or a part thereof under conditions which permit the production of glucose-1-phosphate or a composition comprising glucose-1-phosphate in said non-human organism or in the culture medium surrounding said non-human organism.

[83301] A further embodiment of the present invention relates to a process for the production of glucose-1-phosphate, which comprises
[83302] (a) increasing or generating the activity of a XM_{—}473199-protein non-targeted in a non-human organism or a part thereof, preferably a microorganism, a plant cell, a plant or a part thereof, as compared to a corresponding non-transformed wild type non-human organism or a part thereof; and
[83303] (b) growing the non-human organism or a part thereof under conditions which permit the production of glucose-1-phosphate or a composition comprising glucose-1-phosphate in said non-human organism or in the culture medium surrounding said non-human organism.

[83304] A further embodiment of the present invention relates to a process for the production of myo-inositol, which comprises
[83305] (a) increasing or generating the activity of a transcription factor non-targeted in a non-human organism or a part thereof, preferably a microorganism, a plant cell, a plant or a part thereof, as compared to a corresponding non-transformed wild type non-human organism or a part thereof; and
[83306] (b) growing the non-human organism or a part thereof under conditions which permit the production of myo-inositol or a composition comprising myo-inositol in said non-human organism or in the culture medium surrounding said non-human organism.

[83307] A further embodiment of the present invention relates to a process for the production of sucrose, which comprises
[83308] (a) increasing or generating the activity of a transcription factor non-targeted in a non-human organism or a part thereof, preferably a microorganism, a plant cell, a plant or a part thereof, as compared to a corresponding non-transformed wild type non-human organism or a part thereof; and
[83309] (b) growing the non-human organism or a part thereof under conditions which permit the production of sucrose or a composition comprising sucrose in said non-human organism or in the culture medium surrounding said non-human organism.

[83310] A further embodiment of the present invention relates to a process for the production of glucose-1-phosphate, which comprises
[83311] (a) increasing or generating the activity of a 3-deoxy-7-phosphoheptulonate synthase non-targeted in a non-human organism or a part thereof, preferably a microorganism, a plant cell, a plant or a part thereof, as compared to a corresponding non-transformed wild type non-human organism or a part thereof; and
[83312] (b) growing the non-human organism or a part thereof under conditions which permit the production of glucose-1-phosphate or a composition comprising glucose-1-phosphate in said non-human organism or in the culture medium surrounding said non-human organism.

[83313] A further embodiment of the present invention relates to a process for the production of glucose-1-phosphate, which comprises
[83314] (a) increasing or generating the activity of a phosphate permease non-targeted in a non-human organism or a part thereof, preferably a microorganism, a plant cell, a plant or a part thereof, as compared to a corresponding non-transformed wild type non-human organism or a part thereof; and
[83315] (b) growing the non-human organism or a part thereof under conditions which permit the production of glucose-1-phosphate or a composition comprising glucose-1-phosphate in said non-human organism or in the culture medium surrounding said non-human organism.

[83316] A further embodiment of the present invention relates to a process for the production of 3,4,5-trihydroxypentanoic acid, which comprises
[83317] (a) increasing or generating the activity of a phosphate permease non-targeted in a non-human organism or a part thereof, preferably a microorganism, a plant cell, a plant or a part thereof, as compared to a corresponding non-transformed wild type non-human organism or a part thereof; and
[83318] (b) growing the non-human organism or a part thereof under conditions which permit the production of 3,4,5-trihydroxypentanoic acid or a composition comprising 3,4,5-trihydroxypentanoic acid in said non-human organism or in the culture medium surrounding said non-human organism.

[83319] A further embodiment of the present invention relates to a process for the production of fructose, which comprises
[83320] (a) increasing or generating the activity of a ycl027w-protein non-targeted in a non-human organism or a part thereof, preferably a microorganism, a plant cell, a plant or a part thereof, as compared to a corresponding non-transformed wild type non-human organism or a part thereof; and
[83321] (b) growing the non-human organism or a part thereof under conditions which permit the production of fructose or a composition comprising fructose in said non-human organism or in the culture medium surrounding said non-human organism.

[83322] A further embodiment of the present invention relates to a process for the production of glucose-1-phosphate, which comprises
[83323] (a) increasing or generating the activity of a ycl027w-protein non-targeted in a non-human organism or a part thereof, preferably a microorganism, a plant cell, a plant or a part thereof, as compared to a corresponding non-transformed wild type non-human organism or a part thereof; and
[83324] (b) growing the non-human organism or a part thereof under conditions which permit the production of glucose-1-phosphate or a composition comprising glucose-1-phosphate in said non-human organism or in the culture medium surrounding said non-human organism.

[83325] A further embodiment of the present invention relates to a process for the production of myo-inositol, which comprises
[83326] (a) increasing or generating the activity of a serine/threonine dehydratase non-targeted in a non-human organism or a part thereof, preferably a microorganism, a plant cell, a plant or a part thereof, as compared to a corresponding non-transformed wild type non-human organism or a part thereof; and
[83327] (b) growing the non-human organism or a part thereof under conditions which permit the production of myo-inositol or a composition comprising myo-inositol in said non-human organism or in the culture medium surrounding said non-human organism.

[83328] A further embodiment of the present invention relates to a process for the production of sucrose, which comprises
[83329] (a) increasing or generating the activity of a serine/threonine dehydratase non-targeted in a non-human organism or a part thereof, preferably a microorganism, a plant cell, a plant or a part thereof, as compared to a corresponding non-transformed wild type non-human organism or a part thereof; and
[83330] (b) growing the non-human organism or a part thereof under conditions which permit the production of sucrose or a composition comprising sucrose in said non-human organism or in the culture medium surrounding said non-human organism.

[83331] A further embodiment of the present invention relates to a process for the production of fructose, which comprises
[83332] (a) increasing or generating the activity of a phosphoglycerate kinase non-targeted in a non-human organism or a part thereof, preferably a microorganism, a plant cell, a plant or a part thereof, as compared to a corresponding non-transformed wild type non-human organism or a part thereof; and
[83333] (b) growing the non-human organism or a part thereof under conditions which permit the production of fructose or a composition comprising fructose in said non-human organism or in the culture medium surrounding said non-human organism.

[83334] A further embodiment of the present invention relates to a process for the production of glucose, which comprises
[83335] (a) increasing or generating the activity of a phosphoglycerate kinase non-targeted in a non-human organism or a part thereof, preferably a microorganism, a plant cell, a plant or a part thereof, as compared to a corresponding non-transformed wild type non-human organism or a part thereof; and
[83336] (b) growing the non-human organism or a part thereof under conditions which permit the production of glucose or a composition comprising glucose in said non-human organism or in the culture medium surrounding said non-human organism.

[83337] A further embodiment of the present invention relates to a process for the production of raffinose, which comprises
[83338] (a) increasing or generating the activity of a YCR047W-A-protein non-targeted in a non-human organism or a part thereof, preferably a microorganism, a plant cell, a plant or a part thereof, as compared to a corresponding non-transformed wild type non-human organism or a part thereof; and
[83339] (b) growing the non-human organism or a part thereof under conditions which permit the production of raffinose or a composition comprising raffinose in said non-human organism or in the culture medium surrounding said non-human organism.

[83340] A further embodiment of the present invention relates to a process for the production of 3,4,5-trihydroxypentanoic acid, which comprises
[83341] (a) increasing or generating the activity of a ycr102c-protein non-targeted in a non-human organism or a part thereof, preferably a microorganism, a plant cell, a plant or a part thereof, as compared to a corresponding non-transformed wild type non-human organism or a part thereof; and
[83342] (b) growing the non-human organism or a part thereof under conditions which permit the production of 3,4,5-trihydroxypentanoic acid or a composition comprising 3,4,5-trihydroxypentanoic acid in said non-human organism or in the culture medium surrounding said non-human organism.

[83343] A further embodiment of the present invention relates to a process for the production of galactinol, which comprises
[83344] (a) increasing or generating the activity of a isocitrate dehydrogenase non-targeted in a non-human organism or a part thereof, preferably a microorganism, a plant cell, a plant or a part thereof, as compared to a corresponding non-transformed wild type non-human organism or a part thereof; and
[83345] (b) growing the non-human organism or a part thereof under conditions which permit the production of galactinol or a composition comprising galactinol in said non-human organism or in the culture medium surrounding said non-human organism.

[83346] A further embodiment of the present invention relates to a process for the production of myo-inositol, which comprises
[83347] (a) increasing or generating the activity of a cell division control protein non-targeted in a non-human organism or a part thereof, preferably a microorganism, a plant cell, a plant or a part thereof, as compared to a corresponding non-transformed wild type non-human organism or a part thereof; and
[83348] (b) growing the non-human organism or a part thereof under conditions which permit the production of myo-inositol or a composition comprising myo-inositol in said non-human organism or in the culture medium surrounding said non-human organism.

[83349] A further embodiment of the present invention relates to a process for the production of myo-inositol, which comprises
[83350] (a) increasing or generating the activity of a cyclin non-targeted in a non-human organism or a part thereof, preferably a microorganism, a plant cell, a plant or a part thereof, as compared to a corresponding non-transformed wild type non-human organism or a part thereof; and
[83351] (b) growing the non-human organism or a part thereof under conditions which permit the production of myo-inositol or a composition comprising myo-inositol in said non-human organism or in the culture medium surrounding said non-human organism.

[83352] A further embodiment of the present invention relates to a process for the production of raffinose, which comprises
[83353] (a) increasing or generating the activity of a YDL159W-A-protein non-targeted in a non-human organism or a part thereof, preferably a microorganism, a plant cell, a plant or a part thereof, as compared to a corresponding non-transformed wild type non-human organism or a part thereof; and
[83354] (b) growing the non-human organism or a part thereof under conditions which permit the production of raffinose or a composition comprising raffinose in said non-human organism or in the culture medium surrounding said non-human organism.

[83355] A further embodiment of the present invention relates to a process for the production of glucose-1-phosphate, which comprises
[83356] (a) increasing or generating the activity of a protein kinase non-targeted in a non-human organism or a part thereof, preferably a microorganism, a plant cell, a plant or a part thereof, as compared to a corresponding non-transformed wild type non-human organism or a part thereof; and
[83357] (b) growing the non-human organism or a part thereof under conditions which permit the production of glucose-1-phosphate or a composition comprising glucose-1-phosphate in said non-human organism or in the culture medium surrounding said non-human organism.

[83358] A further embodiment of the present invention relates to a process for the production of glucose-1-phosphate, which comprises
[83359] (a) increasing or generating the activity of a serine/threonine-protein phosphatase non-targeted in a non-human organism or a part thereof, preferably a microorganism, a plant cell, a plant or a part thereof, as compared to a corresponding non-transformed wild type non-human organism or a part thereof; and
[83360] (b) growing the non-human organism or a part thereof under conditions which permit the production of glucose-1-phosphate or a composition comprising glucose-1-phosphate in said non-human organism or in the culture medium surrounding said non-human organism.

[83361] A further embodiment of the present invention relates to a process for the production of 3,4,5-trihydroxypentanoic acid, which comprises
[83362] (a) increasing or generating the activity of a integral membrane protein non-targeted in a non-human organism or a part thereof, preferably a microorganism, a plant cell, a plant or a part thereof, as compared to a corresponding non-transformed wild type non-human organism or a part thereof; and
[83363] (b) growing the non-human organism or a part thereof under conditions which permit the production of 3,4,5-trihydroxypentanoic acid or a composition comprising 3,4,5-trihydroxypentanoic acid in said non-human organism or in the culture medium surrounding said non-human organism.

[83364] A further embodiment of the present invention relates to a process for the production of glucose-1-phosphate, which comprises
[83365] (a) increasing or generating the activity of a ydl235c-protein non-targeted in a non-human organism or a part thereof, preferably a microorganism, a plant cell, a plant or a part thereof, as compared to a corresponding non-transformed wild type non-human organism or a part thereof; and
[83366] (b) growing the non-human organism or a part thereof under conditions which permit the production of glucose-1-phosphate or a composition comprising glucose-1-phosphate in said non-human organism or in the culture medium surrounding said non-human organism.

[83367] A further embodiment of the present invention relates to a process for the production of myo-inositol, which comprises
[83368] (a) increasing or generating the activity of a ydl235c-protein non-targeted in a non-human organism or a part thereof, preferably a microorganism, a plant cell, a plant or a part thereof, as compared to a corresponding non-transformed wild type non-human organism or a part thereof; and
[83369] (b) growing the non-human organism or a part thereof under conditions which permit the production of myo-inositol or a composition comprising myo-inositol in said non-human organism or in the culture medium surrounding said non-human organism.

[83370] A further embodiment of the present invention relates to a process for the production of 3,4,5-trihydroxypentanoic acid, which comprises
[83371] (a) increasing or generating the activity of a ydl235c-protein non-targeted in a non-human organism or a part thereof, preferably a microorganism, a plant cell, a plant or a part thereof, as compared to a corresponding non-transformed wild type non-human organism or a part thereof; and
[83372] (b) growing the non-human organism or a part thereof under conditions which permit the production of 3,4,5-trihydroxypentanoic acid or a composition comprising 3,4,5-trihydroxypentanoic acid in said non-human organism or in the culture medium surrounding said non-human organism.

[83373] A further embodiment of the present invention relates to a process for the production of sucrose, which comprises
[83374] (a) increasing or generating the activity of a coproporphyrinogen III oxidase non-targeted in a non-human organism or a part thereof, preferably a microorganism, a plant cell, a plant or a part thereof, as compared to a corresponding non-transformed wild type non-human organism or a part thereof; and
[83375] (b) growing the non-human organism or a part thereof under conditions which permit the production of sucrose or a composition comprising sucrose in said non-human organism or in the culture medium surrounding said non-human organism.

[83376] A further embodiment of the present invention relates to a process for the production of glucose, which comprises
[83377] (a) increasing or generating the activity of a branched-chain amino acid permease non-targeted in a non-human organism or a part thereof, preferably a microorganism, a plant cell, a plant or a part thereof, as compared to a corresponding non-transformed wild type non-human organism or a part thereof; and
[83378] (b) growing the non-human organism or a part thereof under conditions which permit the production of glucose or a composition comprising glucose in said non-human organism or in the culture medium surrounding said non-human organism.

[83379] A further embodiment of the present invention relates to a process for the production of fructose, which comprises
[83380] (a) increasing or generating the activity of a ydr183w-protein non-targeted in a non-human organism or a part thereof, preferably a microorganism, a plant cell, a plant or a part thereof, as compared to a corresponding non-transformed wild type non-human organism or a part thereof; and
[83381] (b) growing the non-human organism or a part thereof under conditions which permit the production of fructose or a composition comprising fructose in said non-human organism or in the culture medium surrounding said non-human organism.

[83382] A further embodiment of the present invention relates to a process for the production of glucose, which comprises
[83383] (a) increasing or generating the activity of a ydr183w-protein non-targeted in a non-human organism or a part thereof, preferably a microorganism, a plant cell, a plant or a part thereof, as compared to a corresponding non-transformed wild type non-human organism or a part thereof; and
[83384] (b) growing the non-human organism or a part thereof under conditions which permit the production of glucose or a composition comprising glucose in said non-human organism or in the culture medium surrounding said non-human organism.

[83385] A further embodiment of the present invention relates to a process for the production of glucose-1-phosphate, which comprises
[83386] (a) increasing or generating the activity of a ydr507c-protein non-targeted in a non-human organism or a part thereof, preferably a microorganism, a plant cell, a plant or a part thereof, as compared to a corresponding non-transformed wild type non-human organism or a part thereof; and
[83387] (b) growing the non-human organism or a part thereof under conditions which permit the production of glucose-1-phosphate or a composition comprising glucose-1-phosphate in said non-human organism or in the culture medium surrounding said non-human organism.

[83388] A further embodiment of the present invention relates to a process for the production of fructose, which comprises
[83389] (a) increasing or generating the activity of a 1,4-alpha-glucan branching enzyme non-targeted in a non-human organism or a part thereof, preferably a microorganism, a plant cell, a plant or a part thereof, as compared to a corresponding non-transformed wild type non-human organism or a part thereof; and
[83390] (b) growing the non-human organism or a part thereof under conditions which permit the production of fructose or a composition comprising fructose in said non-human organism or in the culture medium surrounding said non-human organism.

[83391] A further embodiment of the present invention relates to a process for the production of glucose, which comprises
[83392] (a) increasing or generating the activity of a 1,4-alpha-glucan branching enzyme non-targeted in a non-human organism or a part thereof, preferably a microorganism, a plant cell, a plant or a part thereof, as compared to a corresponding non-transformed wild type non-human organism or a part thereof; and
[83393] (b) growing the non-human organism or a part thereof under conditions which permit the production of glucose or a composition comprising glucose in said non-human organism or in the culture medium surrounding said non-human organism.

[83394] A further embodiment of the present invention relates to a process for the production of 3,4,5-trihydroxypentanoic acid, which comprises
[83395] (a) increasing or generating the activity of a YEL030C-A-protein non-targeted in a non-human organism or a part thereof, preferably a microorganism, a plant cell, a plant or a part thereof, as compared to a corresponding non-transformed wild type non-human organism or a part thereof; and
[83396] (b) growing the non-human organism or a part thereof under conditions which permit the production of 3,4,5-trihydroxypentanoic acid or a composition comprising 3,4,5-trihydroxypentanoic acid in said non-human organism or in the culture medium surrounding said non-human organism.

[83397] A further embodiment of the present invention relates to a process for the production of glucose-1-phosphate, which comprises
[83398] (a) increasing or generating the activity of a aldolase non-targeted in a non-human organism or a part thereof, preferably a microorganism, a plant cell, a plant or a part thereof, as compared to a corresponding non-transformed wild type non-human organism or a part thereof; and
[83399] (b) growing the non-human organism or a part thereof under conditions which permit the production of glucose-1-phosphate or a composition comprising glucose-1-phosphate in said non-human organism or in the culture medium surrounding said non-human organism.

[83400] A further embodiment of the present invention relates to a process for the production of glucose, which comprises
[83401] (a) increasing or generating the activity of a O-acetyltransferase non-targeted in a non-human organism or a part thereof, preferably a microorganism, a plant cell, a plant or a part thereof, as compared to a corresponding non-transformed wild type non-human organism or a part thereof; and
[83402] (b) growing the non-human organism or a part thereof under conditions which permit the production of glucose or a composition comprising glucose in said non-human organism or in the culture medium surrounding said non-human organism.

[83403] A further embodiment of the present invention relates to a process for the production of raffinose, which comprises
[83404] (a) increasing or generating the activity of a yer177w-protein non-targeted in a non-human organism or a part thereof, preferably a microorganism, a plant cell, a plant or a part thereof, as compared to a corresponding non-transformed wild type non-human organism or a part thereof; and
[83405] (b) growing the non-human organism or a part thereof under conditions which permit the production of raffinose or a composition comprising raffinose in said non-human organism or in the culture medium surrounding said non-human organism.

[83406] A further embodiment of the present invention relates to a process for the production of myo-inositol, which comprises
[83407] (a) increasing or generating the activity of a YFL019C-protein non-targeted in a non-human organism or a part thereof, preferably a microorganism, a plant cell, a plant or a part thereof, as compared to a corresponding non-transformed wild type non-human organism or a part thereof; and
[83408] (b) growing the non-human organism or a part thereof under conditions which permit the production of myo-inositol or a composition comprising myo-inositol in said non-human organism or in the culture medium surrounding said non-human organism.

[83409] A further embodiment of the present invention relates to a process for the production of sucrose, which comprises
[83410] (a) increasing or generating the activity of a YFL019C-protein non-targeted in a non-human organism or a part thereof, preferably a microorganism, a plant cell, a plant or a part thereof, as compared to a corresponding non-transformed wild type non-human organism or a part thereof; and
[83411] (b) growing the non-human organism or a part thereof under conditions which permit the production of sucrose or a composition comprising sucrose in said non-human organism or in the culture medium surrounding said non-human organism.

[83412] A further embodiment of the present invention relates to a process for the production of sucrose, which comprises
[83413] (a) increasing or generating the activity of a hexokinase non-targeted in a non-human organism or a part thereof, preferably a microorganism, a plant cell, a plant or a part thereof, as compared to a corresponding non-transformed wild type non-human organism or a part thereof; and
[83414] (b) growing the non-human organism or a part thereof under conditions which permit the production of sucrose or a composition comprising sucrose in said non-human organism or in the culture medium surrounding said non-human organism.

[83415] A further embodiment of the present invention relates to a process for the production of glucose-1-phosphate, which comprises
[83416] (a) increasing or generating the activity of a oxidoreductase non-targeted in a non-human organism or a part thereof, preferably a microorganism, a plant cell, a plant or a part thereof, as compared to a corresponding non-transformed wild type non-human organism or a part thereof; and
[83417] (b) growing the non-human organism or a part thereof under conditions which permit the production of glucose-1-phosphate or a composition comprising glucose-1-phosphate in said non-human organism or in the culture medium surrounding said non-human organism.

[83418] A further embodiment of the present invention relates to a process for the production of 3,4,5-trihydroxypentanoic acid, which comprises
[83419] (a) increasing or generating the activity of a oxidoreductase non-targeted in a non-human organism or a part thereof, preferably a microorganism, a plant cell, a plant or a part thereof, as compared to a corresponding non-transformed wild type non-human organism or a part thereof; and
[83420] (b) growing the non-human organism or a part thereof under conditions which permit the production of 3,4,5-trihydroxypentanoic acid or a composition comprising 3,4,5-trihydroxypentanoic acid in said non-human organism or in the culture medium surrounding said non-human organism.

[83421] A further embodiment of the present invention relates to a process for the production of glucose-1-phosphate, which comprises
[83422] (a) increasing or generating the activity of a ygl096w-protein non-targeted in a non-human organism or a part thereof, preferably a microorganism, a plant cell, a plant or a part thereof, as compared to a corresponding non-transformed wild type non-human organism or a part thereof; and
[83423] (b) growing the non-human organism or a part thereof under conditions which permit the production of glucose-1-phosphate or a composition comprising glucose-1-phosphate in said non-human organism or in the culture medium surrounding said non-human organism.

[83424] A further embodiment of the present invention relates to a process for the production of 3,4,5-trihydroxypentanoic acid, which comprises
[83425] (a) increasing or generating the activity of a ygl096w-protein non-targeted in a non-human organism or a part thereof, preferably a microorganism, a plant cell, a plant or a part thereof, as compared to a corresponding non-transformed wild type non-human organism or a part thereof; and
[83426] (b) growing the non-human organism or a part thereof under conditions which permit the production of 3,4,5-trihydroxypentanoic acid or a composition comprising 3,4,5-trihydroxypentanoic acid in said non-human organism or in the culture medium surrounding said non-human organism.

[83427] A further embodiment of the present invention relates to a process for the production of raffinose, which comprises
[83428] (a) increasing or generating the activity of a ygl237c-protein non-targeted in a non-human organism or a part thereof, preferably a microorganism, a plant cell, a plant or a part thereof, as compared to a corresponding non-transformed wild type non-human organism or a part thereof; and
[83429] (b) growing the non-human organism or a part thereof under conditions which permit the production of raffinose or a composition comprising raffinose in said non-human organism or in the culture medium surrounding said non-human organism.

[83430] A further embodiment of the present invention relates to a process for the production of glucose-1-phosphate, which comprises
[83431] (a) increasing or generating the activity of a alcohol dehydrogenase non-targeted in a non-human organism or a part thereof, preferably a microorganism, a plant cell, a plant or a part thereof, as compared to a corresponding non-transformed wild type non-human organism or a part thereof; and
[83432] (b) growing the non-human organism or a part thereof under conditions which permit the production of glucose-1-phosphate or a composition comprising glucose-1-phosphate in said non-human organism or in the culture medium surrounding said non-human organism.

[83433] A further embodiment of the present invention relates to a process for the production of 3,4,5-trihydroxypentanoic acid, which comprises
[83434] (a) increasing or generating the activity of a alcohol dehydrogenase non-targeted in a non-human organism or a part thereof, preferably a microorganism, a plant cell, a plant or a part thereof, as compared to a corresponding non-transformed wild type non-human organism or a part thereof; and
[83435] (b) growing the non-human organism or a part thereof under conditions which permit the production of 3,4,5-trihydroxypentanoic acid or a composition comprising 3,4,5-trihydroxypentanoic acid in said non-human organism or in the culture medium surrounding said non-human organism.

[83436] A further embodiment of the present invention relates to a process for the production of glucose, which comprises
[83437] (a) increasing or generating the activity of a yhl013c-protein non-targeted in a non-human organism or a part thereof, preferably a microorganism, a plant cell, a plant or a part thereof, as compared to a corresponding non-transformed wild type non-human organism or a part thereof; and
[83438] (b) growing the non-human organism or a part thereof under conditions which permit the production of glucose or a composition comprising glucose in said non-human organism or in the culture medium surrounding said non-human organism.

[83439] A further embodiment of the present invention relates to a process for the production of glucose-1-phosphate, which comprises
[83440] (a) increasing or generating the activity of a yhl013c-protein non-targeted in a non-human organism or a part thereof, preferably a microorganism, a plant cell, a plant or a part thereof, as compared to a corresponding non-transformed wild type non-human organism or a part thereof; and
[83441] (b) growing the non-human organism or a part thereof under conditions which permit the production of glucose-1-phosphate or a composition comprising glucose-1-phosphate in said non-human organism or in the culture medium surrounding said non-human organism.

[83442] A further embodiment of the present invention relates to a process for the production of glucose-1-phosphate, which comprises
[83443] (a) increasing or generating the activity of a 3-phosphoglycerate dehydrogenase non-targeted in a non-human organism or a part thereof, preferably a microorganism, a plant cell, a plant or a part thereof, as compared to a corresponding non-transformed wild type non-human organism or a part thereof; and
[83444] (b) growing the non-human organism or a part thereof under conditions which permit the production of glucose-1-phosphate or a composition comprising glucose-1-phosphate in said non-human organism or in the culture medium surrounding said non-human organism.

[83445] A further embodiment of the present invention relates to a process for the production of fructose, which comprises
[83446] (a) increasing or generating the activity of a YIL083C-protein non-targeted in a non-human organism or a part thereof, preferably a microorganism, a plant cell, a plant or a part thereof, as compared to a corresponding non-transformed wild type non-human organism or a part thereof; and
[83447] (b) growing the non-human organism or a part thereof under conditions which permit the production of fructose or a composition comprising fructose in said non-human organism or in the culture medium surrounding said non-human organism.

[83448] A further embodiment of the present invention relates to a process for the production of myo-inositol, which comprises
[83449] (a) increasing or generating the activity of a DnaJ-like chaperone non-targeted in a non-human organism or a part thereof, preferably a microorganism, a plant cell, a plant or a part thereof, as compared to a corresponding non-transformed wild type non-human organism or a part thereof; and
[83450] (b) growing the non-human organism or a part thereof under conditions which permit the production of myo-inositol or a composition comprising myo-inositol in said non-human organism or in the culture medium surrounding said non-human organism.

[83451] A further embodiment of the present invention relates to a process for the production of 3,4,5-trihydroxypentanoic acid, which comprises
[83452] (a) increasing or generating the activity of a YJL127W-A-protein non-targeted in a non-human organism or a part thereof, preferably a microorganism, a plant cell, a plant or a part thereof, as compared to a corresponding non-transformed wild type non-human organism or a part thereof; and
[83453] (b) growing the non-human organism or a part thereof under conditions which permit the production of 3,4,5-trihydroxypentanoic acid or a composition comprising 3,4,5-trihydroxypentanoic acid in said non-human organism or in the culture medium surrounding said non-human organism.

[83454] A further embodiment of the present invention relates to a process for the production of fructose, which comprises
[83455] (a) increasing or generating the activity of a inositol-3-phosphate synthase non-targeted in a non-human organism or a part thereof, preferably a microorganism, a plant cell, a plant or a part thereof, as compared to a corresponding non-transformed wild type non-human organism or a part thereof; and
[83456] (b) growing the non-human organism or a part thereof under conditions which permit the production of fructose or a composition comprising fructose in said non-human organism or in the culture medium surrounding said non-human organism.

[83457] A further embodiment of the present invention relates to a process for the production of galactitol, which comprises
[83458] (a) increasing or generating the activity of a inositol-3-phosphate synthase non-targeted in a non-human organism or a part thereof, preferably a microorganism, a plant cell, a plant or a part thereof, as compared to a corresponding non-transformed wild type non-human organism or a part thereof; and
[83459] (b) growing the non-human organism or a part thereof under conditions which permit the production of galactitol or a composition comprising galactitol in said non-human organism or in the culture medium surrounding said non-human organism.

[83460] A further embodiment of the present invention relates to a process for the production of myo-inositol, which comprises
[83461] (a) increasing or generating the activity of a inositol-3-phosphate synthase non-targeted in a non-human organism or a part thereof, preferably a microorganism, a plant cell, a plant or a part thereof, as compared to a corresponding non-transformed wild type non-human organism or a part thereof; and
[83462] (b) growing the non-human organism or a part thereof under conditions which permit the production of myo-inositol or a composition comprising myo-inositol in said non-human organism or in the culture medium surrounding said non-human organism.

[83463] A further embodiment of the present invention relates to a process for the production of sorbitol, which comprises
[83464] (a) increasing or generating the activity of a hexose transporter non-targeted in a non-human organism or a part thereof, preferably a microorganism, a plant cell, a plant or a part thereof, as compared to a corresponding non-transformed wild type non-human organism or a part thereof; and
[83465] (b) growing the non-human organism or a part thereof under conditions which permit the production of sorbitol or a composition comprising sorbitol in said non-human organism or in the culture medium surrounding said non-human organism.

[83466] A further embodiment of the present invention relates to a process for the production of myo-inositol, which comprises
[83467] (a) increasing or generating the activity of a protein kinase non-targeted in a non-human organism or a part thereof, preferably a microorganism, a plant cell, a plant or a part thereof, as compared to a corresponding non-transformed wild type non-human organism or a part thereof; and
[83468] (b) growing the non-human organism or a part thereof under conditions which permit the production of myo-inositol or a composition comprising myo-inositol in said non-human organism or in the culture medium surrounding said non-human organism.

[83469] A further embodiment of the present invention relates to a process for the production of glucose, which comprises
[83470] (a) increasing or generating the activity of a cystathionine gamma-synthase non-targeted in a non-human organism or a part thereof, preferably a microorganism, a plant cell, a plant or a part thereof, as compared to a corresponding non-transformed wild type non-human organism or a part thereof; and
[83471] (b) growing the non-human organism or a part thereof under conditions which permit the production of glucose or a composition comprising glucose in said non-human organism or in the culture medium surrounding said non-human organism.

[83472] A further embodiment of the present invention relates to a process for the production of fructose, which comprises
[83473] (a) increasing or generating the activity of a fructose biphosphate aldolase non-targeted in a non-human organism or a part thereof, preferably a microorganism, a plant cell, a plant or a part thereof, as compared to a corresponding non-transformed wild type non-human organism or a part thereof; and
[83474] (b) growing the non-human organism or a part thereof under conditions which permit the production of fructose or a composition comprising fructose in said non-human organism or in the culture medium surrounding said non-human organism.

[83475] A further embodiment of the present invention relates to a process for the production of sedoheptulose-7-phosphate, which comprises
[83476] (a) increasing or generating the activity of a fructose biphosphate aldolase non-targeted in a non-human organism or a part thereof, preferably a microorganism, a plant cell, a plant or a part thereof, as compared to a corresponding non-transformed wild type non-human organism or a part thereof; and
[83477] (b) growing the non-human organism or a part thereof under conditions which permit the production of sedoheptulose-7-phosphate or a composition comprising sedoheptulose-7-phosphate in said non-human organism or in the culture medium surrounding said non-human organism.

[83478] A further embodiment of the present invention relates to a process for the production of glucose-1-phosphate, which comprises
[83479] (a) increasing or generating the activity of a acyl carrier protein non-targeted in a non-human organism or a part thereof, preferably a microorganism, a plant cell, a plant or a part thereof, as compared to a corresponding non-transformed wild type non-human organism or a part thereof; and
[83480] (b) growing the non-human organism or a part thereof under conditions which permit the production of glucose-1-phosphate or a composition comprising glucose-1-phosphate in said non-human organism or in the culture medium surrounding said non-human organism.

[83481] A further embodiment of the present invention relates to a process for the production of sucrose, which comprises
[83482] (a) increasing or generating the activity of a halotolerance protein non-targeted in a non-human organism or a part thereof, preferably a microorganism, a plant cell, a plant or a part thereof, as compared to a corresponding non-transformed wild type non-human organism or a part thereof; and
[83483] (b) growing the non-human organism or a part thereof under conditions which permit the production of sucrose or a composition comprising sucrose in said non-human organism or in the culture medium surrounding said non-human organism.

[83484] A further embodiment of the present invention relates to a process for the production of glucose, which comprises
[83485] (a) increasing or generating the activity of a phosphoenolpyruvate carboxykinase non-targeted in a non-human organism or a part thereof, preferably a microorganism, a plant cell, a plant or a part thereof, as compared to a corresponding non-transformed wild type non-human organism or a part thereof; and
[83486] (b) growing the non-human organism or a part thereof under conditions which permit the production of glucose or a composition comprising glucose in said non-human organism or in the culture medium surrounding said non-human organism.

[83487] A further embodiment of the present invention relates to a process for the production of glucose, which comprises
[83488] (a) increasing or generating the activity of a phosphoenolpyruvate carboxykinase non-targeted in a non-human organism or a part thereof, preferably a microorganism, a plant cell, a plant or a part thereof, as compared to a corresponding non-transformed wild type non-human organism or a part thereof; and
[83489] (b) growing the non-human organism or a part thereof under conditions which permit the production of glucose or a composition comprising glucose in said non-human organism or in the culture medium surrounding said non-human organism.

[83490] A further embodiment of the present invention relates to a process for the production of sucrose, which comprises
[83491] (a) increasing or generating the activity of a vacuolar sorting protein non-targeted in a non-human organism or a part thereof, preferably a microorganism, a plant cell, a plant or a part thereof, as compared to a corresponding non-transformed wild type non-human organism or a part thereof; and
[83492] (b) growing the non-human organism or a part thereof under conditions which permit the production of sucrose or a composition comprising sucrose in said non-human organism or in the culture medium surrounding said non-human organism.

[83493] A further embodiment of the present invention relates to a process for the production of glucose-1-phosphate, which comprises
[83494] (a) increasing or generating the activity of a thioredoxin non-targeted in a non-human organism or a part thereof, preferably a microorganism, a plant cell, a plant or a part thereof, as compared to a corresponding non-transformed wild type non-human organism or a part thereof; and
[83495] (b) growing the non-human organism or a part thereof under conditions which permit the production of glucose-1-phosphate or a composition comprising glucose-1-phosphate in said non-human organism or in the culture medium surrounding said non-human organism.

[83496] A further embodiment of the present invention relates to a process for the production of fructose, which comprises
[83497] (a) increasing or generating the activity of a hexose transporter non-targeted in a non-human organism or a part thereof, preferably a microorganism, a plant cell, a plant or a part thereof, as compared to a corresponding non-transformed wild type non-human organism or a part thereof; and
[83498] (b) growing the non-human organism or a part thereof under conditions which permit the production of fructose or a composition comprising fructose in said non-human organism or in the culture medium surrounding said non-human organism.

[83499] A further embodiment of the present invention relates to a process for the production of verbascose, which comprises
[83500] (a) increasing or generating the activity of a purine biosynthesis protein non-targeted in a non-human organism or a part thereof, preferably a microorganism, a plant cell, a plant or a part thereof, as compared to a corresponding non-transformed wild type non-human organism or a part thereof; and
[83501] (b) growing the non-human organism or a part thereof under conditions which permit the production of verbascose or a composition comprising verbascose in said non-human organism or in the culture medium surrounding said non-human organism.

[83502] A further embodiment of the present invention relates to a process for the production of glucose-1-phosphate, which comprises
[83503] (a) increasing or generating the activity of a ymr324c-protein non-targeted in a non-human organism or a part thereof, preferably a microorganism, a plant cell, a plant or a part thereof, as compared to a corresponding non-transformed wild type non-human organism or a part thereof; and
[83504] (b) growing the non-human organism or a part thereof under conditions which permit the production of glucose-1-phosphate or a composition comprising glucose-1-phosphate in said non-human organism or in the culture medium surrounding said non-human organism.

[83505] A further embodiment of the present invention relates to a process for the production of myo-inositol, which comprises
[83506] (a) increasing or generating the activity of a molecular chaperone non-targeted in a non-human organism or a part thereof, preferably a microorganism, a plant cell, a plant or a part thereof, as compared to a corresponding non-transformed wild type non-human organism or a part thereof; and
[83507] (b) growing the non-human organism or a part thereof under conditions which permit the production of myo-inositol or a composition comprising myo-inositol in said non-human organism or in the culture medium surrounding said non-human organism.

[83508] A further embodiment of the present invention relates to a process for the production of sucrose, which comprises
[83509] (a) increasing or generating the activity of a molecular chaperone non-targeted in a non-human organism or a part thereof, preferably a microorganism, a plant cell, a plant or a part thereof, as compared to a corresponding non-transformed wild type non-human organism or a part thereof; and
[83510] (b) growing the non-human organism or a part thereof under conditions which permit the production of sucrose or a composition comprising sucrose in said non-human organism or in the culture medium surrounding said non-human organism.

[83511] A further embodiment of the present invention relates to a process for the production of raffinose, which comprises
[83512] (a) increasing or generating the activity of a sterol O-acyltransferase non-targeted in a non-human organism or a part thereof, preferably a microorganism, a plant cell, a plant or a part thereof, as compared to a corresponding non-transformed wild type non-human organism or a part thereof; and
[83513] (b) growing the non-human organism or a part thereof under conditions which permit the production of raffinose or a composition comprising raffinose in said non-human organism or in the culture medium surrounding said non-human organism.

[83514] A further embodiment of the present invention relates to a process for the production of myo-inositol, which comprises
[83515] (a) increasing or generating the activity of a yol160w-protein non-targeted in a non-human organism or a part thereof, preferably a microorganism, a plant cell, a plant or a part thereof, as compared to a corresponding non-transformed wild type non-human organism or a part thereof; and
[83516] (b) growing the non-human organism or a part thereof under conditions which permit the production of myo-inositol or a composition comprising myo-inositol in said non-human organism or in the culture medium surrounding said non-human organism.

[83517] A further embodiment of the present invention relates to a process for the production of glucose, which comprises
[83518] (a) increasing or generating the activity of a phosphohydrolase non-targeted in a non-human organism or a part thereof, preferably a microorganism, a plant cell, a plant or a part thereof, as compared to a corresponding non-transformed wild type non-human organism or a part thereof; and
[83519] (b) growing the non-human organism or a part thereof under conditions which permit the production of glucose or a composition comprising glucose in said non-human organism or in the culture medium surrounding said non-human organism.

[83520] A further embodiment of the present invention relates to a process for the production of glucose-1-phosphate, which comprises
[83521] (a) increasing or generating the activity of a histone acetyltransferase non-targeted in a non-human organism or a part thereof, preferably a microorganism, a plant cell, a plant or a part thereof, as compared to a corresponding non-transformed wild type non-human organism or a part thereof; and
[83522] (b) growing the non-human organism or a part thereof under conditions which permit the production of glucose-1-phosphate or a composition comprising glucose-1-phosphate in said non-human organism or in the culture medium surrounding said non-human organism.

[83523] A further embodiment of the present invention relates to a process for the production of 3,4,5-trihydroxypentanoic acid, which comprises
[83524] (a) increasing or generating the activity of a subunit of COMPASS-protein complex non-targeted in a non-human organism or a part thereof, preferably a microorganism, a plant cell, a plant or a part thereof, as compared to a corresponding non-transformed wild type non-human organism or a part thereof; and
[83525] (b) growing the non-human organism or a part thereof under conditions which permit the production of 3,4,5-trihydroxypentanoic acid or a composition comprising 3,4,5-trihydroxypentanoic acid in said non-human organism or in the culture medium surrounding said non-human organism.

[83526] A further embodiment of the present invention relates to a process for the production of glucose-1-phosphate, which comprises
[83527] (a) increasing or generating the activity of a ypl144w-protein non-targeted in a non-human organism or a part thereof, preferably a microorganism, a plant cell, a plant or a part thereof, as compared to a corresponding non-transformed wild type non-human organism or a part thereof; and
[83528] (b) growing the non-human organism or a part thereof under conditions which permit the production of glucose-1-phosphate or a composition comprising glucose-1-phosphate in said non-human organism or in the culture medium surrounding said non-human organism.

[83529] A further embodiment of the present invention relates to a process for the production of 3,4,5-trihydroxypentanoic acid, which comprises
[83530] (a) increasing or generating the activity of a ypl144w-protein non-targeted in a non-human organism or a part thereof, preferably a microorganism, a plant cell, a plant or a part thereof, as compared to a corresponding non-transformed wild type non-human organism or a part thereof; and
[83531] (b) growing the non-human organism or a part thereof under conditions which permit the production of 3,4,5-trihydroxypentanoic acid or a composition comprising 3,4,5-trihydroxypentanoic acid in said non-human organism or in the culture medium surrounding said non-human organism.

[83532] A further embodiment of the present invention relates to a process for the production of glucose-1-phosphate, which comprises
[83533] (a) increasing or generating the activity of a ypr098c-protein non-targeted in a non-human organism or a part thereof, preferably a microorganism, a plant cell, a plant or a part thereof, as compared to a corresponding non-transformed wild type non-human organism or a part thereof; and
[83534] (b) growing the non-human organism or a part thereof under conditions which permit the production of glucose-1-phosphate or a composition comprising glucose-1-phosphate in said non-human organism or in the culture medium surrounding said non-human organism.

[83535] A further embodiment of the present invention relates to a process for the production of 3,4,5-trihydroxypentanoic acid, which comprises
[83536] (a) increasing or generating the activity of a ypr098c-protein non-targeted in a non-human organism or a part thereof, preferably a microorganism, a plant cell, a plant or a part thereof, as compared to a corresponding non-transformed wild type non-human organism or a part thereof; and
[83537] (b) growing the non-human organism or a part thereof under conditions which permit the production of 3,4,5-trihydroxypentanoic acid or a composition comprising 3,4,5-trihydroxypentanoic acid in said non-human organism or in the culture medium surrounding said non-human organism.

[83538] A further embodiment of the present invention relates to a process for the production of glucose-1-phosphate, which comprises
[83539] (a) increasing or generating the activity of a polyamine transporter non-targeted in a non-human organism or a part thereof, preferably a microorganism, a plant cell, a plant or a part thereof, as compared to a corresponding non-transformed wild type non-human organism or a part thereof; and
[83540] (b) growing the non-human organism or a part thereof under conditions which permit the production of glucose-1-phosphate or a composition comprising glucose-1-phosphate in said non-human organism or in the culture medium surrounding said non-human organism.

[83541] A further embodiment of the present invention relates to a process for the production of myo-inositol, which comprises
[83542] (a) increasing or generating the activity of a polyamine transporter non-targeted in a non-human organism or a part thereof, preferably a microorganism, a plant cell, a plant or a part thereof, as compared to a corresponding non-transformed wild type non-human organism or a part thereof; and
[83543] (b) growing the non-human organism or a part thereof under conditions which permit the production of myo-inositol or a composition comprising myo-inositol in said non-human organism or in the culture medium surrounding said non-human organism.

[83544] A further embodiment of the present invention relates to a process for the production of fructose, which comprises
[83545] (a) increasing or generating the activity of a Zm_{—}4842_BE510522-protein non-targeted in a non-human organism or a part thereof, preferably a microorganism, a plant cell, a plant or a part thereof, as compared to a corresponding non-transformed wild type non-human organism or a part thereof; and
[83546] (b) growing the non-human organism or a part thereof under conditions which permit the production of fructose or a composition comprising fructose in said non-human organism or in the culture medium surrounding said non-human organism.

[83547] A further embodiment of the present invention relates to a process for the production of glucose, which comprises
[83548] (a) increasing or generating the activity of a Zm_{—}4842_BE510522-protein non-targeted in a non-human organism or a part thereof, preferably a microorganism, a plant cell, a plant or a part thereof, as compared to a corresponding non-transformed wild type non-human organism or a part thereof; and
[83549] (b) growing the non-human organism or a part thereof under conditions which permit the production of glucose or a composition comprising glucose in said non-human organism or in the culture medium surrounding said non-human organism.

[83550] A further embodiment of the present invention relates to a process for the production of myo-inositol, which comprises
[83551] (a) increasing or generating the activity of a acetyltransferase non-targeted in a non-human organism or a part thereof, preferably a microorganism, a plant cell, a plant or a part thereof, as compared to a corresponding non-transformed wild type non-human organism or a part thereof; and
[83552] (b) growing the non-human organism or a part thereof under conditions which permit the production of myo-inositol or a composition comprising myo-inositol in said non-human organism or in the culture medium surrounding said non-human organism.

[83553] A further embodiment of the present invention relates to a process for the production of fructose, which comprises
[83554] (a) increasing or generating the activity of a 47266012-protein non-targeted in a non-human organism or a part thereof, preferably a microorganism, a plant cell, a plant or a part thereof, as compared to a corresponding non-transformed wild type non-human organism or a part thereof; and
[83555] (b) growing the non-human organism or a part thereof under conditions which permit the production of fructose or a composition comprising fructose in said non-human organism or in the culture medium surrounding said non-human organism.

[83556] A further embodiment of the present invention relates to a process for the production of glucose, which comprises
[83557] (a) increasing or generating the activity of a 47266012-protein non-targeted in a non-human organism or a part thereof, preferably a microorganism, a plant cell, a plant or a part thereof, as compared to a corresponding non-transformed wild type non-human organism or a part thereof; and
[83558] (b) growing the non-human organism or a part thereof under conditions which permit the production of glucose or a composition comprising glucose in said non-human organism or in the culture medium surrounding said non-human organism.

[83559] A further embodiment of the present invention relates to a process for the production of glucose-1-phosphate, which comprises
[83560] (a) increasing or generating the activity of a 47266012-protein non-targeted in a non-human organism or a part thereof, preferably a microorganism, a plant cell, a plant or a part thereof, as compared to a corresponding non-transformed wild type non-human organism or a part thereof; and
[83561] (b) growing the non-human organism or a part thereof under conditions which permit the production of glucose-1-phosphate or a composition comprising glucose-1-phosphate in said non-human organism or in the culture medium surrounding said non-human organism.

[83562] A further embodiment of the present invention relates to a process for the production of myo-inositol, which comprises
[83563] (a) increasing or generating the activity of a 47266012-protein non-targeted in a non-human organism or a part thereof, preferably a microorganism, a plant cell, a plant or a part thereof, as compared to a corresponding non-transformed wild type non-human organism or a part thereof; and
[83564] (b) growing the non-human organism or a part thereof under conditions which permit the production of myo-inositol or a composition comprising myo-inositol in said non-human organism or in the culture medium surrounding said non-human organism.

[83565] A further embodiment of the present invention relates to a process for the production of sedoheptulose-7-phosphate, which comprises
[83566] (a) increasing or generating the activity of a 47266012-protein non-targeted in a non-human organism or a part thereof, preferably a microorganism, a plant cell, a plant or a part thereof, as compared to a corresponding non-transformed wild type non-human organism or a part thereof; and
[83567] (b) growing the non-human organism or a part thereof under conditions which permit the production of sedoheptulose-7-phosphate or a composition comprising sedoheptulose-7-phosphate in said non-human organism or in the culture medium surrounding said non-human organism.

[83568] A further embodiment of the present invention relates to a process for the production of glucose, which comprises
[83569] (a) increasing or generating the activity of a 49747384_SOYBEAN-protein non-targeted in a non-human organism or a part thereof, preferably a microorganism, a plant cell, a plant or a part thereof, as compared to a corresponding non-transformed wild type non-human organism or a part thereof; and
[83570] (b) growing the non-human organism or a part thereof under conditions which permit the production of glucose or a composition comprising glucose in said non-human organism or in the culture medium surrounding said non-human organism.

[83571] A further embodiment of the present invention relates to a process for the production of glucose-1-phosphate, which comprises
[83572] (a) increasing or generating the activity of a 49747384_SOYBEAN-protein non-targeted in a non-human organism or a part thereof, preferably a microorganism, a plant cell, a plant or a part thereof, as compared to a corresponding non-transformed wild type non-human organism or a part thereof; and
[83573] (b) growing the non-human organism or a part thereof under conditions which permit the production of glucose-1-phosphate or a composition comprising glucose-1-phosphate in said non-human organism or in the culture medium surrounding said non-human organism.

[83574] A further embodiment of the present invention relates to a process for the production of myo-inositol, which comprises
[83575] (a) increasing or generating the activity of a 49747384_SOYBEAN-protein non-targeted in a non-human organism or a part thereof, preferably a microorganism, a plant cell, a plant or a part thereof, as compared to a corresponding non-transformed wild type non-human organism or a part thereof; and
[83576] (b) growing the non-human organism or a part thereof under conditions which permit the production of myo-inositol or a composition comprising myo-inositol in said non-human organism or in the culture medium surrounding said non-human organism.

[83577] A further embodiment of the present invention relates to a process for the production of raffinose, which comprises
[83578] (a) increasing or generating the activity of a 49747384_SOYBEAN-protein non-targeted in a non-human organism or a part thereof, preferably a microorganism, a plant cell, a plant or a part thereof, as compared to a corresponding non-transformed wild type non-human organism or a part thereof; and
[83579] (b) growing the non-human organism or a part thereof under conditions which permit the production of raffinose or a composition comprising raffinose in said non-human organism or in the culture medium surrounding said non-human organism.

[83580] A further embodiment of the present invention relates to a process for the production of sedoheptulose-7-phosphate, which comprises
[83581] (a) increasing or generating the activity of a 49747384_SOYBEAN-protein non-targeted in a non-human organism or a part thereof, preferably a microorganism, a plant cell, a plant or a part thereof, as compared to a corresponding non-transformed wild type non-human organism or a part thereof; and
[83582] (b) growing the non-human organism or a part thereof under conditions which permit the production of sedoheptulose-7-phosphate or a composition comprising sedoheptulose-7-phosphate in said non-human organism or in the culture medium surrounding said non-human organism.

[83583] A further embodiment of the present invention relates to a process for the production of fructose, which comprises
[83584] (a) increasing or generating the activity of a glucose-6-phosphate 1-dehydrogenase non-targeted in a non-human organism or a part thereof, preferably a microorganism, a plant cell, a plant or a part thereof, as compared to a corresponding non-transformed wild type non-human organism or a part thereof; and
[83585] (b) growing the non-human organism or a part thereof under conditions which permit the production of fructose or a composition comprising fructose in said non-human organism or in the culture medium surrounding said non-human organism.

[83586] A further embodiment of the present invention relates to a process for the production of glucose, which comprises
[83587] (a) increasing or generating the activity of a glucose-6-phosphate 1-dehydrogenase non-targeted in a non-human organism or a part thereof, preferably a microorganism, a plant cell, a plant or a part thereof, as compared to a corresponding non-transformed wild type non-human organism or a part thereof; and
[83588] (b) growing the non-human organism or a part thereof under conditions which permit the production of glucose or a composition comprising glucose in said non-human organism or in the culture medium surrounding said non-human organism.

[83589] A further embodiment of the present invention relates to a process for the production of glucose-1-phosphate, which comprises
[83590] (a) increasing or generating the activity of a glucose-6-phosphate 1-dehydrogenase non-targeted in a non-human organism or a part thereof, preferably a microorganism, a plant cell, a plant or a part thereof, as compared to a corresponding non-transformed wild type non-human organism or a part thereof; and
[83591] (b) growing the non-human organism or a part thereof under conditions which permit the production of glucose-1-phosphate or a composition comprising glucose-1-phosphate in said non-human organism or in the culture medium surrounding said non-human organism.

[83592] A further embodiment of the present invention relates to a process for the production of sedoheptulose-7-phosphate, which comprises
[83593] (a) increasing or generating the activity of a glucose-6-phosphate 1-dehydrogenase non-targeted in a non-human organism or a part thereof, preferably a microorganism, a plant cell, a plant or a part thereof, as compared to a corresponding non-transformed wild type non-human organism or a part thereof; and
[83594] (b) growing the non-human organism or a part thereof under conditions which permit the production of sedoheptulose-7-phosphate or a composition comprising sedoheptulose-7-phosphate in said non-human organism or in the culture medium surrounding said non-human organism.

[83595] A further embodiment of the present invention relates to a process for the production of sucrose, which comprises
[83596] (a) increasing or generating the activity of a glucose-6-phosphate 1-dehydrogenase non-targeted in a non-human organism or a part thereof, preferably a microorganism, a plant cell, a plant or a part thereof, as compared to a corresponding non-transformed wild type non-human organism or a part thereof; and
[83597] (b) growing the non-human organism or a part thereof under conditions which permit the production of sucrose or a composition comprising sucrose in said non-human organism or in the culture medium surrounding said non-human organism.

[83598] A further embodiment of the present invention relates to a process for the production of 3,4,5-trihydroxypentanoic acid, which comprises
[83599] (a) increasing or generating the activity of a glucose-6-phosphate 1-dehydrogenase non-targeted in a non-human organism or a part thereof, preferably a microorganism, a plant cell, a plant or a part thereof, as compared to a corresponding non-transformed wild type non-human organism or a part thereof; and
[83600] (b) growing the non-human organism or a part thereof under conditions which permit the production of 3,4,5-trihydroxypentanoic acid or a composition comprising 3,4,5-trihydroxypentanoic acid in said non-human organism or in the culture medium surrounding said non-human organism.

[83601] A further embodiment of the present invention relates to a process for the production of fructose, which comprises
[83602] (a) increasing or generating the activity of a DNA replication complex GINS protein non-targeted in a non-human organism or a part thereof, preferably a microorganism, a plant cell, a plant or a part thereof, as compared to a corresponding non-transformed wild type non-human organism or a part thereof; and
[83603] (b) growing the non-human organism or a part thereof under conditions which permit the production of fructose or a composition comprising fructose in said non-human organism or in the culture medium surrounding said non-human organism.

[83604] A further embodiment of the present invention relates to a process for the production of glucose, which comprises
[83605] (a) increasing or generating the activity of a acetyl CoA synthetase non-targeted in a non-human organism or a part thereof, preferably a microorganism, a plant cell, a plant or a part thereof, as compared to a corresponding non-transformed wild type non-human organism or a part thereof; and
[83606] (b) growing the non-human organism or a part thereof under conditions which permit the production of glucose or a composition comprising glucose in said non-human organism or in the culture medium surrounding said non-human organism.

[83607] A further embodiment of the present invention relates to a process for the production of 3,4,5-trihydroxypentanoic acid, which comprises
[83608] (a) increasing or generating the activity of a polypeptide comprising a polypeptide as depicted in the respective line in column 5 or 8 of Table II, application no. 17, or a homolog or a fragment thereof, a consensus sequence or at least one polypeptide motif as depicted in the respective line in column 8 of Table IV, application no. 17, whereby the respective line disclose in column 7 the fine chemical 3,4,5-trihydroxypentanoic acid; or
[83609] increasing or generating the activity of an expression product of one or more nucleic acid molecule(s) comprising a polynucleotide as depicted in the respective line in column 5 or 8 of Table I, application no. 17, preferably the coding region thereof, or a homolog or a fragment thereof, whereby the respective line disclose in column 7 the fine chemical 3,4,5-trihydroxypentanoic acid;
[83610] non-targeted in a non-human organism or a part thereof; preferably a microorganism, a plant cell, a plant or a part thereof, as compared to a corresponding non-transformed wild type non-human organism or a part thereof; and
[83611] (b) growing the non-human organism under conditions which permit the production of 3,4,5-trihydroxypentanoic acid, or a composition comprising 3,4,5-trihydroxypentanoic acid in said non-human organism or in the culture medium surrounding said non-human organism.

[83612] A further embodiment of the present invention relates to a process for the production of erythrol, which comprises
[83613] (a) increasing or generating the activity of a polypeptide comprising a polypeptide as depicted in the respective line in column 5 or 8 of Table II, application no. 17, or a homolog or a fragment thereof, a consensus sequence or at least one polypeptide motif as depicted in the respective line in column 8 of Table IV, application no. 17, whereby the respective line disclose in column 7 the fine chemical erythrol; or
[83614] increasing or generating the activity of an expression product of one or more nucleic acid molecule(s) comprising a polynucleotide as depicted in the respective line in column 5 or 8 of Table I, application no. 17, preferably the coding region thereof, or a homolog or a fragment thereof, whereby the respective line disclose in column 7 the fine chemical erythrol;
[83615] non-targeted in a non-human organism or a part thereof; preferably a microorganism, a plant cell, a plant or a part thereof, as compared to a corresponding non-transformed wild type non-human organism or a part thereof; and
[83616] (b) growing the non-human organism under conditions which permit the production of erythrol, or a composition comprising erythrol in said non-human organism or in the culture medium surrounding said non-human organism.

[83617] A further embodiment of the present invention relates to a process for the production of fructose, which comprises
[83618] (a) increasing or generating the activity of a polypeptide comprising a polypeptide as depicted in the respective line in column 5 or 8 of Table II, application no. 17, or a homolog or a fragment thereof, a consensus sequence or at least one polypeptide motif as depicted in the respective line in column 8 of Table IV, application no. 17, whereby the respective line disclose in column 7 the fine chemical fructose; or
[83619] increasing or generating the activity of an expression product of one or more nucleic acid molecule(s) comprising a polynucleotide as depicted in the respective line in column 5 or 8 of Table I, application no. 17, preferably the coding region thereof, or a homolog or a fragment thereof, whereby the respective line disclose in column 7 the fine chemical fructose;
[83620] non-targeted in a non-human organism or a part thereof; preferably a microorganism, a plant cell, a plant or a part thereof, as compared to a corresponding non-transformed wild type non-human organism or a part thereof; and
[83621] (b) growing the non-human organism under conditions which permit the production of fructose, or a composition comprising fructose in said non-human organism or in the culture medium surrounding said non-human organism.

[83622] A further embodiment of the present invention relates to a process for the production of fucose, which comprises
[83623] (a) increasing or generating the activity of a polypeptide comprising a polypeptide as depicted in the respective line in column 5 or 8 of Table II, application no. 17, or a homolog or a fragment thereof, a consensus sequence or at least one polypeptide motif as depicted in the respective line in column 8 of Table IV, application no. 17, whereby the respective line disclose in column 7 the fine chemical fucose; or
[83624] increasing or generating the activity of an expression product of one or more nucleic acid molecule(s) comprising a polynucleotide as depicted in the respective line in column 5 or 8 of Table I, application no. 17, preferably the coding region thereof, or a homolog or a fragment thereof, whereby the respective line disclose in column 7 the fine chemical fucose;
[83625] non-targeted in a non-human organism or a part thereof; preferably a microorganism, a plant cell, a plant or a part thereof, as compared to a corresponding non-transformed wild type non-human organism or a part thereof; and
[83626] (b) growing the non-human organism under conditions which permit the production of fucose, or a composition comprising fucose in said non-human organism or in the culture medium surrounding said non-human organism.

[83627] A further embodiment of the present invention relates to a process for the production of galactinol, which comprises
[83628] (a) increasing or generating the activity of a polypeptide comprising a polypeptide as depicted in the respective line in column 5 or 8 of Table II, application no. 17, or a homolog or a fragment thereof, a consensus sequence or at least one polypeptide motif as depicted in the respective line in column 8 of Table IV, application no. 17, whereby the respective line disclose in column 7 the fine chemical galactinol; or
[83629] increasing or generating the activity of an expression product of one or more nucleic acid molecule(s) comprising a polynucleotide as depicted in the respective line in column 5 or 8 of Table I, application no. 17, preferably the coding region thereof, or a homolog or a fragment thereof, whereby the respective line disclose in column 7 the fine chemical galactinol;
[83630] non-targeted in a non-human organism or a part thereof; preferably a microorganism, a plant cell, a plant or a part thereof, as compared to a corresponding non-transformed wild type non-human organism or a part thereof; and
[83631] (b) growing the non-human organism under conditions which permit the production of galactinol, or a composition comprising galactinol in said non-human organism or in the culture medium surrounding said non-human organism.

[83632] A further embodiment of the present invention relates to a process for the production of galactitol, which comprises
[83633] (a) increasing or generating the activity of a polypeptide comprising a polypeptide as depicted in the respective line in column 5 or 8 of Table II, application no. 17, or a homolog or a fragment thereof, a consensus sequence or at least one polypeptide motif as depicted in the respective line in column 8 of Table IV, application no. 17, whereby the respective line disclose in column 7 the fine chemical galactitol; or
[83634] increasing or generating the activity of an expression product of one or more nucleic acid molecule(s) comprising a polynucleotide as depicted in the respective line in column 5 or 8 of Table I, application no. 17, preferably the coding region thereof, or a homolog or a fragment thereof, whereby the respective line disclose in column 7 the fine chemical galactitol;
[83635] non-targeted in a non-human organism or a part thereof; preferably a microorganism, a plant cell, a plant or a part thereof, as compared to a corresponding non-transformed wild type non-human organism or a part thereof; and
[83636] (b) growing the non-human organism under conditions which permit the production of galactitol, or a composition comprising galactitol in said non-human organism or in the culture medium surrounding said non-human organism.

[83637] A further embodiment of the present invention relates to a process for the production of glucose, which comprises
[83638] (a) increasing or generating the activity of a polypeptide comprising a polypeptide as depicted in the respective line in column 5 or 8 of Table II, application no. 17, or a homolog or a fragment thereof, a consensus sequence or at least one polypeptide motif as depicted in the respective line in column 8 of Table IV, application no. 17, whereby the respective line disclose in column 7 the fine chemical glucose; or
[83639] increasing or generating the activity of an expression product of one or more nucleic acid molecule(s) comprising a polynucleotide as depicted in the respective line in column 5 or 8 of Table I, application no. 17, preferably the coding region thereof, or a homolog or a fragment thereof, whereby the respective line disclose in column 7 the fine chemical glucose;
[83640] non-targeted in a non-human organism or a part thereof; preferably a microorganism, a plant cell, a plant or a part thereof, as compared to a corresponding non-transformed wild type non-human organism or a part thereof; and
[83641] (b) growing the non-human organism under conditions which permit the production of glucose, or a composition comprising glucose in said non-human organism or in the culture medium surrounding said non-human organism.

[83642] A further embodiment of the present invention relates to a process for the production of glucose-1-phosphate, which comprises
[83643] (a) increasing or generating the activity of a polypeptide comprising a polypeptide as depicted in the respective line in column 5 or 8 of Table II, application no. 17, or a homolog or a fragment thereof, a consensus sequence or at least one polypeptide motif as depicted in the respective line in column 8 of Table IV, application no. 17, whereby the respective line disclose in column 7 the fine chemical glucose-1-phosphate; or
[83644] increasing or generating the activity of an expression product of one or more nucleic acid molecule(s) comprising a polynucleotide as depicted in the respective line in column 5 or 8 of Table I, application no. 17, preferably the coding region thereof, or a homolog or a fragment thereof, whereby the respective line disclose in column 7 the fine chemical glucose-1-phosphate;
[83645] non-targeted in a non-human organism or a part thereof; preferably a microorganism, a plant cell, a plant or a part thereof, as compared to a corresponding non-transformed wild type non-human organism or a part thereof; and
[83646] (b) growing the non-human organism under conditions which permit the production of glucose-1-phosphate, or a composition comprising glucose-1-phosphate in said non-human organism or in the culture medium surrounding said non-human organism.

[83647] A further embodiment of the present invention relates to a process for the production of mannitol, which comprises
[83648] (a) increasing or generating the activity of a polypeptide comprising a polypeptide as depicted in the respective line in column 5 or 8 of Table II, application no. 17, or a homolog or a fragment thereof, a consensus sequence or at least one polypeptide motif as depicted in the respective line in column 8 of Table IV, application no. 17, whereby the respective line disclose in column 7 the fine chemical mannitol; or
[83649] increasing or generating the activity of an expression product of one or more nucleic acid molecule(s) comprising a polynucleotide as depicted in the respective line in column 5 or 8 of Table I, application no. 17, preferably the coding region thereof, or a homolog or a fragment thereof, whereby the respective line disclose in column 7 the fine chemical mannitol;
[83650] non-targeted in a non-human organism or a part thereof; preferably a microorganism, a plant cell, a plant or a part thereof, as compared to a corresponding non-transformed wild type non-human organism or a part thereof; and
[83651] (b) growing the non-human organism under conditions which permit the production of mannitol, or a composition comprising mannitol in said non-human organism or in the culture medium surrounding said non-human organism.

[83652] A further embodiment of the present invention relates to a process for the production of melibiose, which comprises
[83653] (a) increasing or generating the activity of a polypeptide comprising a polypeptide as depicted in the respective line in column 5 or 8 of Table II, application no. 17, or a homolog or a fragment thereof, a consensus sequence or at least one polypeptide motif as depicted in the respective line in column 8 of Table IV, application no. 17, whereby the respective line disclose in column 7 the fine chemical melibiose; or
[83654] increasing or generating the activity of an expression product of one or more nucleic acid molecule(s) comprising a polynucleotide as depicted in the respective line in column 5 or 8 of Table I, application no. 17, preferably the coding region thereof, or a homolog or a fragment thereof, whereby the respective line disclose in column 7 the fine chemical melibiose;
[83655] non-targeted in a non-human organism or a part thereof; preferably a microorganism, a plant cell, a plant or a part thereof, as compared to a corresponding non-transformed wild type non-human organism or a part thereof; and
[83656] (b) growing the non-human organism under conditions which permit the production of melibiose, or a composition comprising melibiose in said non-human organism or in the culture medium surrounding said non-human organism.

[83657] A further embodiment of the present invention relates to a process for the production of myo-inositol, which comprises
[83658] (a) increasing or generating the activity of a polypeptide comprising a polypeptide as depicted in the respective line in column 5 or 8 of Table II, application no. 17, or a homolog or a fragment thereof, a consensus sequence or at least one polypeptide motif as depicted in the respective line in column 8 of Table IV, application no. 17, whereby the respective line disclose in column 7 the fine chemical myo-inositol; or
[83659] increasing or generating the activity of an expression product of one or more nucleic acid molecule(s) comprising a polynucleotide as depicted in the respective line in column 5 or 8 of Table I, application no. 17, preferably the coding region thereof, or a homolog or a fragment thereof, whereby the respective line disclose in column 7 the fine chemical myo-inositol;
[83660] non-targeted in a non-human organism or a part thereof; preferably a microorganism, a plant cell, a plant or a part thereof, as compared to a corresponding non-transformed wild type non-human organism or a part thereof; and
[83661] (b) growing the non-human organism under conditions which permit the production of myo-inositol, or a composition comprising myo-inositol in said non-human organism or in the culture medium surrounding said non-human organism.

[83662] A further embodiment of the present invention relates to a process for the production of raffinose, which comprises
[83663] (a) increasing or generating the activity of a polypeptide comprising a polypeptide as depicted in the respective line in column 5 or 8 of Table II, application no. 17, or a homolog or a fragment thereof, a consensus sequence or at least one polypeptide motif as depicted in the respective line in column 8 of Table IV, application no. 17, whereby the respective line disclose in column 7 the fine chemical raffinose; or
[83664] increasing or generating the activity of an expression product of one or more nucleic acid molecule(s) comprising a polynucleotide as depicted in the respective line in column 5 or 8 of Table I, application no. 17, preferably the coding region thereof, or a homolog or a fragment thereof, whereby the respective line disclose in column 7 the fine chemical raffinose;
[83665] non-targeted in a non-human organism or a part thereof; preferably a microorganism, a plant cell, a plant or a part thereof, as compared to a corresponding non-transformed wild type non-human organism or a part thereof; and
[83666] (b) growing the non-human organism under conditions which permit the production of raffinose, or a composition comprising raffinose in said non-human organism or in the culture medium surrounding said non-human organism.

[83667] A further embodiment of the present invention relates to a process for the production of saccharic acid, which comprises
[83668] (a) increasing or generating the activity of a polypeptide comprising a polypeptide as depicted in the respective line in column 5 or 8 of Table II, application no. 17, or a homolog or a fragment thereof, a consensus sequence or at least one polypeptide motif as depicted in the respective line in column 8 of Table IV, application no. 17, whereby the respective line disclose in column 7 the fine chemical saccharic acid; or
[83669] increasing or generating the activity of an expression product of one or more nucleic acid molecule(s) comprising a polynucleotide as depicted in the respective line in column 5 or 8 of Table I, application no. 17, preferably the coding region thereof, or a homolog or a fragment thereof, whereby the respective line disclose in column 7 the fine chemical saccharic acid;
[83670] non-targeted in a non-human organism or a part thereof; preferably a microorganism, a plant cell, a plant or a part thereof, as compared to a corresponding non-transformed wild type non-human organism or a part thereof; and
[83671] (b) growing the non-human organism under conditions which permit the production of saccharic acid, or a composition comprising saccharic acid in said non-human organism or in the culture medium surrounding said non-human organism.

[83672] A further embodiment of the present invention relates to a process for the production of sedoheptulose-7-phosphate, which comprises
[83673] (a) increasing or generating the activity of a polypeptide comprising a polypeptide as depicted in the respective line in column 5 or 8 of Table II, application no. 17, or a homolog or a fragment thereof, a consensus sequence or at least one polypeptide motif as depicted in the respective line in column 8 of Table IV, application no. 17, whereby the respective line disclose in column 7 the fine chemical sedoheptulose-7-phosphate; or
[83674] increasing or generating the activity of an expression product of one or more nucleic acid molecule(s) comprising a polynucleotide as depicted in the respective line in column 5 or 8 of Table I, application no. 17, preferably the coding region thereof, or a homolog or a fragment thereof, whereby the respective line disclose in column 7 the fine chemical sedoheptulose-7-phosphate;
[83675] non-targeted in a non-human organism or a part thereof; preferably a microorganism, a plant cell, a plant or a part thereof, as compared to a corresponding non-transformed wild type non-human organism or a part thereof; and
[83676] (b) growing the non-human organism under conditions which permit the production of sedoheptulose-7-phosphate, or a composition comprising sedoheptulose-7-phosphate in said non-human organism or in the culture medium surrounding said non-human organism.

[83677] A further embodiment of the present invention relates to a process for the production of sorbitol, which comprises
[83678] (a) increasing or generating the activity of a polypeptide comprising a polypeptide as depicted in the respective line in column 5 or 8 of Table II, application no. 17, or a homolog or a fragment thereof, a consensus sequence or at least one polypeptide motif as depicted in the respective line in column 8 of Table IV, application no. 17, whereby the respective line disclose in column 7 the fine chemical sorbitol; or
[83679] increasing or generating the activity of an expression product of one or more nucleic acid molecule(s) comprising a polynucleotide as depicted in the respective line in column 5 or 8 of Table I, application no. 17, preferably the coding region thereof, or a homolog or a fragment thereof, whereby the respective line disclose in column 7 the fine chemical sorbitol;
[83680] non-targeted in a non-human organism or a part thereof; preferably a microorganism, a plant cell, a plant or a part thereof, as compared to a corresponding non-transformed wild type non-human organism or a part thereof; and
[83681] (b) growing the non-human organism under conditions which permit the production of sorbitol, or a composition comprising sorbitol in said non-human organism or in the culture medium surrounding said non-human organism.

[83682] A further embodiment of the present invention relates to a process for the production of sucrose, which comprises
[83683] (a) increasing or generating the activity of a polypeptide comprising a polypeptide as depicted in the respective line in column 5 or 8 of Table II, application no. 17, or a homolog or a fragment thereof, a consensus sequence or at least one polypeptide motif as depicted in the respective line in column 8 of Table IV, application no. 17, whereby the respective line disclose in column 7 the fine chemical sucrose; or
[83684] increasing or generating the activity of an expression product of one or more nucleic acid molecule(s) comprising a polynucleotide as depicted in the respective line in column 5 or 8 of Table I, application no. 17, preferably the coding region thereof, or a homolog or a fragment thereof, whereby the respective line disclose in column 7 the fine chemical sucrose;
[83685] non-targeted in a non-human organism or a part thereof; preferably a microorganism, a plant cell, a plant or a part thereof, as compared to a corresponding non-transformed wild type non-human organism or a part thereof; and
[83686] (b) growing the non-human organism under conditions which permit the production of sucrose, or a composition comprising sucrose in said non-human organism or in the culture medium surrounding said non-human organism.

[83687] A further embodiment of the present invention relates to a process for the production of trehalose, which comprises
[83688] (a) increasing or generating the activity of a polypeptide comprising a polypeptide as depicted in the respective line in column 5 or 8 of Table II, application no. 17, or a homolog or a fragment thereof, a consensus sequence or at least one polypeptide motif as depicted in the respective line in column 8 of Table IV, application no. 17, whereby the respective line disclose in column 7 the fine chemical trehalose; or
[83689] increasing or generating the activity of an expression product of one or more nucleic acid molecule(s) comprising a polynucleotide as depicted in the respective line in column 5 or 8 of Table I, application no. 17, preferably the coding region thereof, or a homolog or a fragment thereof, whereby the respective line disclose in column 7 the fine chemical trehalose;
[83690] non-targeted in a non-human organism or a part thereof; preferably a microorganism, a plant cell, a plant or a part thereof, as compared to a corresponding non-transformed wild type non-human organism or a part thereof; and
[83691] (b) growing the non-human organism under conditions which permit the production of trehalose, or a composition comprising trehalose in said non-human organism or in the culture medium surrounding said non-human organism.

[83692] A further embodiment of the present invention relates to a process for the production of verbascose, which comprises
[83693] (a) increasing or generating the activity of a polypeptide comprising a polypeptide as depicted in the respective line in column 5 or 8 of Table II, application no. 17, or a homolog or a fragment thereof, a consensus sequence or at least one polypeptide motif as depicted in the respective line in column 8 of Table IV, application no. 17, whereby the respective line disclose in column 7 the fine chemical verbascose; or
[83694] increasing or generating the activity of an expression product of one or more nucleic acid molecule(s) comprising a polynucleotide as depicted in the respective line in column 5 or 8 of Table I, application no. 17, preferably the coding region thereof, or a homolog or a fragment thereof, whereby the respective line disclose in column 7 the fine chemical verbascose;
[83695] non-targeted in a non-human organism or a part thereof; preferably a microorganism, a plant cell, a plant or a part thereof, as compared to a corresponding non-transformed wild type non-human organism or a part thereof; and
[83696] (b) growing the non-human organism under conditions which permit the production of verbascose, or a composition comprising verbascose in said non-human organism or in the culture medium surrounding said non-human organism.

[83697] A further embodiment of the present invention relates to a process for the production of raffinose, which comprises
[83698] (a) increasing or generating one or more activities selected from the group consisting of galactinol synthase in an organelle, preferably in plastids or mitochondria, especially in plastids, of a non-human organism or a part thereof, preferably a microorganism, a plant cell, a plant or a part thereof, as compared to a corresponding non-transformed wild type non-human organism or a part thereof; and
[83699] (b) growing the non-human organism or a part thereof under conditions which permit the production of raffinose or a composition comprising raffinose in said non-human organism or in the culture medium surrounding said non-human organism.

[83700] A further embodiment of the present invention relates to a process for the production of glucose-1-phosphate, which comprises
[83701] (a) increasing or generating one or more activities selected from the group consisting of protein phosphatase in an organelle, preferably in plastids or mitochondria, especially in plastids, of a non-human organism or a part thereof, preferably a microorganism, a plant cell, a plant or a part thereof, as compared to a corresponding non-transformed wild type non-human organism or a part thereof; and
[83702] (b) growing the non-human organism or a part thereof under conditions which permit the production of glucose-1-phosphate or a composition comprising glucose-1-phosphate in said non-human organism or in the culture medium surrounding said non-human organism.

[83703] A further embodiment of the present invention relates to a process for the production of myo-inositol, which comprises
[83704] (a) increasing or generating one or more activities selected from the group consisting of protein phosphatase in an organelle, preferably in plastids or mitochondria, especially in plastids, of a non-human organism or a part thereof, preferably a microorganism, a plant cell, a plant or a part thereof, as compared to a corresponding non-transformed wild type non-human organism or a part thereof; and
[83705] (b) growing the non-human organism or a part thereof under conditions which permit the production of myo-inositol or a composition comprising myo-inositol in said non-human organism or in the culture medium surrounding said non-human organism.

[83706] A further embodiment of the present invention relates to a process for the production of glucose-1-phosphate, which comprises
[83707] (a) increasing or generating one or more activities selected from the group consisting of At1g19350-protein in an organelle, preferably in plastids or mitochondria, especially in plastids, of a non-human organism or a part thereof, preferably a microorganism, a plant cell, a plant or a part thereof, as compared to a corresponding non-transformed wild type non-human organism or a part thereof; and
[83708] (b) growing the non-human organism or a part thereof under conditions which permit the production of glucose-1-phosphate or a composition comprising glucose-1-phosphate in said non-human organism or in the culture medium surrounding said non-human organism.

[83709] A further embodiment of the present invention relates to a process for the production of 3,4,5-trihydroxypentanoic acid, which comprises
[83710] (a) increasing or generating one or more activities selected from the group consisting of At1g19350-protein in an organelle, preferably in plastids or mitochondria, especially in plastids, of a non-human organism or a part thereof, preferably a microorganism, a plant cell, a plant or a part thereof, as compared to a corresponding non-transformed wild type non-human organism or a part thereof; and
[83711] (b) growing the non-human organism or a part thereof under conditions which permit the production of 3,4,5-trihydroxypentanoic acid or a composition comprising 3,4,5-trihydroxypentanoic acid in said non-human organism or in the culture medium surrounding said non-human organism.

[83712] A further embodiment of the present invention relates to a process for the production of myo-inositol, which comprises
[83713] (a) increasing or generating one or more activities selected from the group consisting of chlorophyllase in an organelle, preferably in plastids or mitochondria, especially in plastids, of a non-human organism or a part thereof, preferably a microorganism, a plant cell, a plant or a part thereof, as compared to a corresponding non-transformed wild type non-human organism or a part thereof; and
[83714] (b) growing the non-human organism or a part thereof under conditions which permit the production of myo-inositol or a composition comprising myo-inositol in said non-human organism or in the culture medium surrounding said non-human organism.

[83715] A further embodiment of the present invention relates to a process for the production of fructose, which comprises
[83716] (a) increasing or generating one or more activities selected from the group consisting of cullin in an organelle, preferably in plastids or mitochondria, especially in plastids, of a non-human organism or a part thereof, preferably a microorganism, a plant cell, a plant or a part thereof, as compared to a corresponding non-transformed wild type non-human organism or a part thereof; and
[83717] (b) growing the non-human organism or a part thereof under conditions which permit the production of fructose or a composition comprising fructose in said non-human organism or in the culture medium surrounding said non-human organism.

[83718] A further embodiment of the present invention relates to a process for the production of fructose, which comprises
[83719] (a) increasing or generating one or more activities selected from the group consisting of eukaryotic translation initiation factor 5 in an organelle, preferably in plastids or mitochondria, especially in plastids, of a non-human organism or a part thereof, preferably a microorganism, a plant cell, a plant or a part thereof, as compared to a corresponding non-transformed wild type non-human organism or a part thereof; and
[83720] (b) growing the non-human organism or a part thereof under conditions which permit the production of fructose or a composition comprising fructose in said non-human organism or in the culture medium surrounding said non-human organism.

[83721] A further embodiment of the present invention relates to a process for the production of glucose, which comprises
[83722] (a) increasing or generating one or more activities selected from the group consisting of eukaryotic translation initiation factor 5 in an organelle, preferably in plastids or mitochondria, especially in plastids, of a non-human organism or a part thereof, preferably a microorganism, a plant cell, a plant or a part thereof, as compared to a corresponding non-transformed wild type non-human organism or a part thereof; and
[83723] (b) growing the non-human organism or a part thereof under conditions which permit the production of glucose or a composition comprising glucose in said non-human organism or in the culture medium surrounding said non-human organism.

[83724] A further embodiment of the present invention relates to a process for the production of raffinose, which comprises
[83725] (a) increasing or generating one or more activities selected from the group consisting of eukaryotic translation initiation factor 5 in an organelle, preferably in plastids or mitochondria, especially in plastids, of a non-human organism or a part thereof, preferably a microorganism, a plant cell, a plant or a part thereof, as compared to a corresponding non-transformed wild type non-human organism or a part thereof; and
[83726] (b) growing the non-human organism or a part thereof under conditions which permit the production of raffinose or a composition comprising raffinose in said non-human organism or in the culture medium surrounding said non-human organism.

[83727] A further embodiment of the present invention relates to a process for the production of sucrose, which comprises
[83728] (a) increasing or generating one or more activities selected from the group consisting of transcriptional regulator in an organelle, preferably in plastids or mitochondria, especially in plastids, of a non-human organism or a part thereof, preferably a microorganism, a plant cell, a plant or a part thereof, as compared to a corresponding non-transformed wild type non-human organism or a part thereof; and
[83729] (b) growing the non-human organism or a part thereof under conditions which permit the production of sucrose or a composition comprising sucrose in said non-human organism or in the culture medium surrounding said non-human organism.

[83730] A further embodiment of the present invention relates to a process for the production of raffinose, which comprises
[83731] (a) increasing or generating one or more activities selected from the group consisting of galactinol synthase in an organelle, preferably in plastids or mitochondria, especially in plastids, of a non-human organism or a part thereof, preferably a microorganism, a plant cell, a plant or a part thereof, as compared to a corresponding non-transformed wild type non-human organism or a part thereof; and
[83732] (b) growing the non-human organism or a part thereof under conditions which permit the production of raffinose or a composition comprising raffinose in said non-human organism or in the culture medium surrounding said non-human organism.

[83733] A further embodiment of the present invention relates to a process for the production of glucose, which comprises
[83734] (a) increasing or generating one or more activities selected from the group consisting of protein phosphatase in an organelle, preferably in plastids or mitochondria, especially in plastids, of a non-human organism or a part thereof, preferably a microorganism, a plant cell, a plant or a part thereof, as compared to a corresponding non-transformed wild type non-human organism or a part thereof; and
[83735] (b) growing the non-human organism or a part thereof under conditions which permit the production of glucose or a composition comprising glucose in said non-human organism or in the culture medium surrounding said non-human organism.

[83736] A further embodiment of the present invention relates to a process for the production of glucose-1-phosphate, which comprises
[83737] (a) increasing or generating one or more activities selected from the group consisting of protein phosphatase in an organelle, preferably in plastids or mitochondria, especially in plastids, of a non-human organism or a part thereof, preferably a microorganism, a plant cell, a plant or a part thereof, as compared to a corresponding non-transformed wild type non-human organism or a part thereof; and
[83738] (b) growing the non-human organism or a part thereof under conditions which permit the production of glucose-1-phosphate or a composition comprising glucose-1-phosphate in said non-human organism or in the culture medium surrounding said non-human organism.

[83739] A further embodiment of the present invention relates to a process for the production of myo-inositol, which comprises
[83740] (a) increasing or generating one or more activities selected from the group consisting of protein phosphatase in an organelle, preferably in plastids or mitochondria, especially in plastids, of a non-human organism or a part thereof, preferably a microorganism, a plant cell, a plant or a part thereof, as compared to a corresponding non-transformed wild type non-human organism or a part thereof; and
[83741] (b) growing the non-human organism or a part thereof under conditions which permit the production of myo-inositol or a composition comprising myo-inositol in said non-human organism or in the culture medium surrounding said non-human organism.

[83742] A further embodiment of the present invention relates to a process for the production of raffinose, which comprises
[83743] (a) increasing or generating one or more activities selected from the group consisting of protein phosphatase in an organelle, preferably in plastids or mitochondria, especially in plastids, of a non-human organism or a part thereof, preferably a microorganism, a plant cell, a plant or a part thereof, as compared to a corresponding non-transformed wild type non-human organism or a part thereof; and
[83744] (b) growing the non-human organism or a part thereof under conditions which permit the production of raffinose or a composition comprising raffinose in said non-human organism or in the culture medium surrounding said non-human organism.

[83745] A further embodiment of the present invention relates to a process for the production of sucrose, which comprises
[83746] (a) increasing or generating one or more activities selected from the group consisting of protein phosphatase in an organelle, preferably in plastids or mitochondria, especially in plastids, of a non-human organism or a part thereof, preferably a microorganism, a plant cell, a plant or a part thereof, as compared to a corresponding non-transformed wild type non-human organism or a part thereof; and
[83747] (b) growing the non-human organism or a part thereof under conditions which permit the production of sucrose or a composition comprising sucrose in said non-human organism or in the culture medium surrounding said non-human organism.

[83748] A further embodiment of the present invention relates to a process for the production of saccharic acid, which comprises
[83749] (a) increasing or generating one or more activities selected from the group consisting of protein phosphatase in an organelle, preferably in plastids or mitochondria, especially in plastids, of a non-human organism or a part thereof, preferably a microorganism, a plant cell, a plant or a part thereof, as compared to a corresponding non-transformed wild type non-human organism or a part thereof; and
[83750] (b) growing the non-human organism or a part thereof under conditions which permit the production of saccharic acid or a composition comprising saccharic acid in said non-human organism or in the culture medium surrounding said non-human organism.

[83751] A further embodiment of the present invention relates to a process for the production of fructose, which comprises
[83752] (a) increasing or generating one or more activities selected from the group consisting of transcription factor in an organelle, preferably in plastids or mitochondria, especially in plastids, of a non-human organism or a part thereof, preferably a microorganism, a plant cell, a plant or a part thereof, as compared to a corresponding non-transformed wild type non-human organism or a part thereof; and
[83753] (b) growing the non-human organism or a part thereof under conditions which permit the production of fructose or a composition comprising fructose in said non-human organism or in the culture medium surrounding said non-human organism.

[83754] A further embodiment of the present invention relates to a process for the production of glucose, which comprises
[83755] (a) increasing or generating one or more activities selected from the group consisting of transcription factor in an organelle, preferably in plastids or mitochondria, especially in plastids, of a non-human organism or a part thereof, preferably a microorganism, a plant cell, a plant or a part thereof, as compared to a corresponding non-transformed wild type non-human organism or a part thereof; and
[83756] (b) growing the non-human organism or a part thereof under conditions which permit the production of glucose or a composition comprising glucose in said non-human organism or in the culture medium surrounding said non-human organism.

[83757] A further embodiment of the present invention relates to a process for the production of glucose-1-phosphate, which comprises
[83758] (a) increasing or generating one or more activities selected from the group consisting of transcription factor in an organelle, preferably in plastids or mitochondria, especially in plastids, of a non-human organism or a part thereof, preferably a microorganism, a plant cell, a plant or a part thereof, as compared to a corresponding non-transformed wild type non-human organism or a part thereof; and
[83759] (b) growing the non-human organism or a part thereof under conditions which permit the production of glucose-1-phosphate or a composition comprising glucose-1-phosphate in said non-human organism or in the culture medium surrounding said non-human organism.

[83760] A further embodiment of the present invention relates to a process for the production of glucose-1-phosphate, which comprises
[83761] (a) increasing or generating one or more activities selected from the group consisting of protein phosphatase in an organelle, preferably in plastids or mitochondria, especially in plastids, of a non-human organism or a part thereof, preferably a microorganism, a plant cell, a plant or a part thereof, as compared to a corresponding non-transformed wild type non-human organism or a part thereof; and
[83762] (b) growing the non-human organism or a part thereof under conditions which permit the production of glucose-1-phosphate or a composition comprising glucose-1-phosphate in said non-human organism or in the culture medium surrounding said non-human organism.

[83763] A further embodiment of the present invention relates to a process for the production of saccharic acid, which comprises
[83764] (a) increasing or generating one or more activities selected from the group consisting of glutaredoxin in an organelle, preferably in plastids or mitochondria, especially in plastids, of a non-human organism or a part thereof, preferably a microorganism, a plant cell, a plant or a part thereof, as compared to a corresponding non-transformed wild type non-human organism or a part thereof; and
[83765] (b) growing the non-human organism or a part thereof under conditions which permit the production of saccharic acid or a composition comprising saccharic acid in said non-human organism or in the culture medium surrounding said non-human organism.

[83766] A further embodiment of the present invention relates to a process for the production of fructose, which comprises
[83767] (a) increasing or generating one or more activities selected from the group consisting of CBL-interacting protein kinase in an organelle, preferably in plastids or mitochondria, especially in plastids, of a non-human organism or a part thereof, preferably a microorganism, a plant cell, a plant or a part thereof, as compared to a corresponding non-transformed wild type non-human organism or a part thereof; and
[83768] (b) growing the non-human organism or a part thereof under conditions which permit the production of fructose or a composition comprising fructose in said non-human organism or in the culture medium surrounding said non-human organism.

[83769] A further embodiment of the present invention relates to a process for the production of glucose, which comprises
[83770] (a) increasing or generating one or more activities selected from the group consisting of CBL-interacting protein kinase in an organelle, preferably in plastids or mitochondria, especially in plastids, of a non-human organism or a part thereof, preferably a microorganism, a plant cell, a plant or a part thereof, as compared to a corresponding non-transformed wild type non-human organism or a part thereof; and
[83771] (b) growing the non-human organism or a part thereof under conditions which permit the production of glucose or a composition comprising glucose in said non-human organism or in the culture medium surrounding said non-human organism.

[83772] A further embodiment of the present invention relates to a process for the production of sedoheptulose-7-phosphate, which comprises
[83773] (a) increasing or generating one or more activities selected from the group consisting of CBL-interacting protein kinase in an organelle, preferably in plastids or mitochondria, especially in plastids, of a non-human organism or a part thereof, preferably a microorganism, a plant cell, a plant or a part thereof, as compared to a corresponding non-transformed wild type non-human organism or a part thereof; and
[83774] (b) growing the non-human organism or a part thereof under conditions which permit the production of sedoheptulose-7-phosphate or a composition comprising sedoheptulose-7-phosphate in said non-human organism or in the culture medium surrounding said non-human organism.

[83775] A further embodiment of the present invention relates to a process for the production of glucose-1-phosphate, which comprises
[83776] (a) increasing or generating one or more activities selected from the group consisting of phenylalanine ammonia-lyase in an organelle, preferably in plastids or mitochondria, especially in plastids, of a non-human organism or a part thereof, preferably a microorganism, a plant cell, a plant or a part thereof, as compared to a corresponding non-transformed wild type non-human organism or a part thereof; and
[83777] (b) growing the non-human organism or a part thereof under conditions which permit the production of glucose-1-phosphate or a composition comprising glucose-1-phosphate in said non-human organism or in the culture medium surrounding said non-human organism.

[83778] A further embodiment of the present invention relates to a process for the production of glucose-1-phosphate, which comprises
[83779] (a) increasing or generating one or more activities selected from the group consisting of MADS box protein transcription factor in an organelle, preferably in plastids or mitochondria, especially in plastids, of a non-human organism or a part thereof, preferably a microorganism, a plant cell, a plant or a part thereof, as compared to a corresponding non-transformed wild type non-human organism or a part thereof; and
[83780] (b) growing the non-human organism or a part thereof under conditions which permit the production of glucose-1-phosphate or a composition comprising glucose-1-phosphate in said non-human organism or in the culture medium surrounding said non-human organism.

[83781] A further embodiment of the present invention relates to a process for the production of myo-inositol, which comprises
[83782] (a) increasing or generating one or more activities selected from the group consisting of At2g45420-protein in an organelle, preferably in plastids or mitochondria, especially in plastids, of a non-human organism or a part thereof, preferably a microorganism, a plant cell, a plant or a part thereof, as compared to a corresponding non-transformed wild type non-human organism or a part thereof; and
[83783] (b) growing the non-human organism or a part thereof under conditions which permit the production of myo-inositol or a composition comprising myo-inositol in said non-human organism or in the culture medium surrounding said non-human organism.

[83784] A further embodiment of the present invention relates to a process for the production of glucose-1-phosphate, which comprises
[83785] (a) increasing or generating one or more activities selected from the group consisting of phosphatidylinositol 3- and 4-kinase family protein in an organelle, preferably in plastids or mitochondria, especially in plastids, of a non-human organism or a part thereof, preferably a microorganism, a plant cell, a plant or a part thereof, as compared to a corresponding non-transformed wild type non-human organism or a part thereof; and
[83786] (b) growing the non-human organism or a part thereof under conditions which permit the production of glucose-1-phosphate or a composition comprising glucose-1-phosphate in said non-human organism or in the culture medium surrounding said non-human organism.

[83787] A further embodiment of the present invention relates to a process for the production of raffinose, which comprises
[83788] (a) increasing or generating one or more activities selected from the group consisting of galactinol synthase in an organelle, preferably in plastids or mitochondria, especially in plastids, of a non-human organism or a part thereof, preferably a microorganism, a plant cell, a plant or a part thereof, as compared to a corresponding non-transformed wild type non-human organism or a part thereof; and
[83789] (b) growing the non-human organism or a part thereof under conditions which permit the production of raffinose or a composition comprising raffinose in said non-human organism or in the culture medium surrounding said non-human organism.

[83790] A further embodiment of the present invention relates to a process for the production of raffinose, which comprises
[83791] (a) increasing or generating one or more activities selected from the group consisting of galactinol synthase in an organelle, preferably in plastids or mitochondria, especially in plastids, of a non-human organism or a part thereof, preferably a microorganism, a plant cell, a plant or a part thereof, as compared to a corresponding non-transformed wild type non-human organism or a part thereof; and
[83792] (b) growing the non-human organism or a part thereof under conditions which permit the production of raffinose or a composition comprising raffinose in said non-human organism or in the culture medium surrounding said non-human organism.

[83793] A further embodiment of the present invention relates to a process for the production of fructose, which comprises
[83794] (a) increasing or generating one or more activities selected from the group consisting of heat shock transcription factor in an organelle, preferably in plastids or mitochondria, especially in plastids, of a non-human organism or a part thereof, preferably a microorganism, a plant cell, a plant or a part thereof, as compared to a corresponding non-transformed wild type non-human organism or a part thereof; and
[83795] (b) growing the non-human organism or a part thereof under conditions which permit the production of fructose or a composition comprising fructose in said non-human organism or in the culture medium surrounding said non-human organism.

[83796] A further embodiment of the present invention relates to a process for the production of glucose, which comprises
[83797] (a) increasing or generating one or more activities selected from the group consisting of heat shock transcription factor in an organelle, preferably in plastids or mitochondria, especially in plastids, of a non-human organism or a part thereof, preferably a microorganism, a plant cell, a plant or a part thereof, as compared to a corresponding non-transformed wild type non-human organism or a part thereof; and
[83798] (b) growing the non-human organism or a part thereof under conditions which permit the production of glucose or a composition comprising glucose in said non-human organism or in the culture medium surrounding said non-human organism.

[83799] A further embodiment of the present invention relates to a process for the production of myo-inositol, which comprises
[83800] (a) increasing or generating one or more activities selected from the group consisting of heat shock transcription factor in an organelle, preferably in plastids or mitochondria, especially in plastids, of a non-human organism or a part thereof, preferably a microorganism, a plant cell, a plant or a part thereof, as compared to a corresponding non-transformed wild type non-human organism or a part thereof; and
[83801] (b) growing the non-human organism or a part thereof under conditions which permit the production of myo-inositol or a composition comprising myo-inositol in said non-human organism or in the culture medium surrounding said non-human organism.

[83802] A further embodiment of the present invention relates to a process for the production of raffinose, which comprises
[83803] (a) increasing or generating one or more activities selected from the group consisting of heat shock transcription factor in an organelle, preferably in plastids or mitochondria, especially in plastids, of a non-human organism or a part thereof, preferably a microorganism, a plant cell, a plant or a part thereof, as compared to a corresponding non-transformed wild type non-human organism or a part thereof; and
[83804] (b) growing the non-human organism or a part thereof under conditions which permit the production of raffinose or a composition comprising raffinose in said non-human organism or in the culture medium surrounding said non-human organism.

[83805] A further embodiment of the present invention relates to a process for the production of fructose, which comprises
[83806] (a) increasing or generating one or more activities selected from the group consisting of pyruvate kinase in an organelle, preferably in plastids or mitochondria, especially in plastids, of a non-human organism or a part thereof, preferably a microorganism, a plant cell, a plant or a part thereof, as compared to a corresponding non-transformed wild type non-human organism or a part thereof; and
[83807] (b) growing the non-human organism or a part thereof under conditions which permit the production of fructose or a composition comprising fructose in said non-human organism or in the culture medium surrounding said non-human organism.

[83808] A further embodiment of the present invention relates to a process for the production of glucose, which comprises
[83809] (a) increasing or generating one or more activities selected from the group consisting of protein phosphatase in an organelle, preferably in plastids or mitochondria, especially in plastids, of a non-human organism or a part thereof, preferably a microorganism, a plant cell, a plant or a part thereof, as compared to a corresponding non-transformed wild type non-human organism or a part thereof; and
[83810] (b) growing the non-human organism or a part thereof under conditions which permit the production of glucose or a composition comprising glucose in said non-human organism or in the culture medium surrounding said non-human organism.

[83811] A further embodiment of the present invention relates to a process for the production of myo-inositol, which comprises
[83812] (a) increasing or generating one or more activities selected from the group consisting of protein phosphatase in an organelle, preferably in plastids or mitochondria, especially in plastids, of a non-human organism or a part thereof, preferably a microorganism, a plant cell, a plant or a part thereof, as compared to a corresponding non-transformed wild type non-human organism or a part thereof; and
[83813] (b) growing the non-human organism or a part thereof under conditions which permit the production of myo-inositol or a composition comprising myo-inositol in said non-human organism or in the culture medium surrounding said non-human organism.

[83814] A further embodiment of the present invention relates to a process for the production of fructose, which comprises
[83815] (a) increasing or generating one or more activities selected from the group consisting of thioredoxin family protein in an organelle, preferably in plastids or mitochondria, especially in plastids, of a non-human organism or a part thereof, preferably a microorganism, a plant cell, a plant or a part thereof, as compared to a corresponding non-transformed wild type non-human organism or a part thereof; and
[83816] (b) growing the non-human organism or a part thereof under conditions which permit the production of fructose or a composition comprising fructose in said non-human organism or in the culture medium surrounding said non-human organism.

[83817] A further embodiment of the present invention relates to a process for the production of glucose, which comprises
[83818] (a) increasing or generating one or more activities selected from the group consisting of thioredoxin family protein in an organelle, preferably in plastids or mitochondria, especially in plastids, of a non-human organism or a part thereof, preferably a microorganism, a plant cell, a plant or a part thereof, as compared to a corresponding non-transformed wild type non-human organism or a part thereof; and
[83819] (b) growing the non-human organism or a part thereof under conditions which permit the production of glucose or a composition comprising glucose in said non-human organism or in the culture medium surrounding said non-human organism.

[83820] A further embodiment of the present invention relates to a process for the production of myo-inositol, which comprises
[83821] (a) increasing or generating one or more activities selected from the group consisting of thioredoxin family protein in an organelle, preferably in plastids or mitochondria, especially in plastids, of a non-human organism or a part thereof, preferably a microorganism, a plant cell, a plant or a part thereof, as compared to a corresponding non-transformed wild type non-human organism or a part thereof; and
[83822] (b) growing the non-human organism or a part thereof under conditions which permit the production of myo-inositol or a composition comprising myo-inositol in said non-human organism or in the culture medium surrounding said non-human organism.

[83823] A further embodiment of the present invention relates to a process for the production of saccharic acid, which comprises
[83824] (a) increasing or generating one or more activities selected from the group consisting of DNA binding protein in an organelle, preferably in plastids or mitochondria, especially in plastids, of a non-human organism or a part thereof, preferably a microorganism, a plant cell, a plant or a part thereof, as compared to a corresponding non-transformed wild type non-human organism or a part thereof; and
[83825] (b) growing the non-human organism or a part thereof under conditions which permit the production of saccharic acid or a composition comprising saccharic acid in said non-human organism or in the culture medium surrounding said non-human organism.

[83826] A further embodiment of the present invention relates to a process for the production of glucose-1-phosphate, which comprises
[83827] (a) increasing or generating one or more activities selected from the group consisting of CCAAT-binding transcription factor in an organelle, preferably in plastids or mitochondria, especially in plastids, of a non-human organism or a part thereof, preferably a microorganism, a plant cell, a plant or a part thereof, as compared to a corresponding non-transformed wild type non-human organism or a part thereof; and
[83828] (b) growing the non-human organism or a part thereof under conditions which permit the production of glucose-1-phosphate or a composition comprising glucose-1-phosphate in said non-human organism or in the culture medium surrounding said non-human organism.

[83829] A further embodiment of the present invention relates to a process for the production of raffinose, which comprises
[83830] (a) increasing or generating one or more activities selected from the group consisting of CCAAT-binding transcription factor in an organelle, preferably in plastids or mitochondria, especially in plastids, of a non-human organism or a part thereof, preferably a microorganism, a plant cell, a plant or a part thereof, as compared to a corresponding non-transformed wild type non-human organism or a part thereof; and
[83831] (b) growing the non-human organism or a part thereof under conditions which permit the production of raffinose or a composition comprising raffinose in said non-human organism or in the culture medium surrounding said non-human organism.

[83832] A further embodiment of the present invention relates to a process for the production of fructose, which comprises
[83833] (a) increasing or generating one or more activities selected from the group consisting of protein kinase in an organelle, preferably in plastids or mitochondria, especially in plastids, of a non-human organism or a part thereof, preferably a microorganism, a plant cell, a plant or a part thereof, as compared to a corresponding non-transformed wild type non-human organism or a part thereof; and
[83834] (b) growing the non-human organism or a part thereof under conditions which permit the production of fructose or a composition comprising fructose in said non-human organism or in the culture medium surrounding said non-human organism.

[83835] A further embodiment of the present invention relates to a process for the production of glucose, which comprises
[83836] (a) increasing or generating one or more activities selected from the group consisting of protein kinase in an organelle, preferably in plastids or mitochondria, especially in plastids, of a non-human organism or a part thereof, preferably a microorganism, a plant cell, a plant or a part thereof, as compared to a corresponding non-transformed wild type non-human organism or a part thereof; and
[83837] (b) growing the non-human organism or a part thereof under conditions which permit the production of glucose or a composition comprising glucose in said non-human organism or in the culture medium surrounding said non-human organism.

[83838] A further embodiment of the present invention relates to a process for the production of sedoheptulose-7-phosphate, which comprises
[83839] (a) increasing or generating one or more activities selected from the group consisting of protein kinase in an organelle, preferably in plastids or mitochondria, especially in plastids, of a non-human organism or a part thereof, preferably a microorganism, a plant cell, a plant or a part thereof, as compared to a corresponding non-transformed wild type non-human organism or a part thereof; and
[83840] (b) growing the non-human organism or a part thereof under conditions which permit the production of sedoheptulose-7-phosphate or a composition comprising sedoheptulose-7-phosphate in said non-human organism or in the culture medium surrounding said non-human organism.

[83841] A further embodiment of the present invention relates to a process for the production of fructose, which comprises
[83842] (a) increasing or generating one or more activities selected from the group consisting of eukaryotic translation initiation factor in an organelle, preferably in plastids or mitochondria, especially in plastids, of a non-human organism or a part thereof, preferably a microorganism, a plant cell, a plant or a part thereof, as compared to a corresponding non-transformed wild type non-human organism or a part thereof; and
[83843] (b) growing the non-human organism or a part thereof under conditions which permit the production of fructose or a composition comprising fructose in said non-human organism or in the culture medium surrounding said non-human organism.

[83844] A further embodiment of the present invention relates to a process for the production of glucose, which comprises
[83845] (a) increasing or generating one or more activities selected from the group consisting of eukaryotic translation initiation factor in an organelle, preferably in plastids or mitochondria, especially in plastids, of a non-human organism or a part thereof, preferably a microorganism, a plant cell, a plant or a part thereof, as compared to a corresponding non-transformed wild type non-human organism or a part thereof; and
[83846] (b) growing the non-human organism or a part thereof under conditions which permit the production of glucose or a composition comprising glucose in said non-human organism or in the culture medium surrounding said non-human organism.

[83847] A further embodiment of the present invention relates to a process for the production of raffinose, which comprises
[83848] (a) increasing or generating one or more activities selected from the group consisting of eukaryotic translation initiation factor in an organelle, preferably in plastids or mitochondria, especially in plastids, of a non-human organism or a part thereof, preferably a microorganism, a plant cell, a plant or a part thereof, as compared to a corresponding non-transformed wild type non-human organism or a part thereof; and
[83849] (b) growing the non-human organism or a part thereof under conditions which permit the production of raffinose or a composition comprising raffinose in said non-human organism or in the culture medium surrounding said non-human organism.

[83850] A further embodiment of the present invention relates to a process for the production of myo-inositol, which comprises
[83851] (a) increasing or generating one or more activities selected from the group consisting of mitogen-activated protein kinase in an organelle, preferably in plastids or mitochondria, especially in plastids, of a non-human organism or a part thereof, preferably a microorganism, a plant cell, a plant or a part thereof, as compared to a corresponding non-transformed wild type non-human organism or a part thereof; and
[83852] (b) growing the non-human organism or a part thereof under conditions which permit the production of myo-inositol or a composition comprising myo-inositol in said non-human organism or in the culture medium surrounding said non-human organism.

[83853] A further embodiment of the present invention relates to a process for the production of sedoheptulose-7-phosphate, which comprises
[83854] (a) increasing or generating one or more activities selected from the group consisting of auxin response factor in an organelle, preferably in plastids or mitochondria, especially in plastids, of a non-human organism or a part thereof, preferably a microorganism, a plant cell, a plant or a part thereof, as compared to a corresponding non-transformed wild type non-human organism or a part thereof; and
[83855] (b) growing the non-human organism or a part thereof under conditions which permit the production of sedoheptulose-7-phosphate or a composition comprising sedoheptulose-7-phosphate in said non-human organism or in the culture medium surrounding said non-human organism.

[83856] A further embodiment of the present invention relates to a process for the production of fructose, which comprises
[83857] (a) increasing or generating one or more activities selected from the group consisting of monthiol glutaredoxin in an organelle, preferably in plastids or mitochondria, especially in plastids, of a non-human organism or a part thereof, preferably a microorganism, a plant cell, a plant or a part thereof, as compared to a corresponding non-transformed wild type non-human organism or a part thereof; and
[83858] (b) growing the non-human organism or a part thereof under conditions which permit the production of fructose or a composition comprising fructose in said non-human organism or in the culture medium surrounding said non-human organism.

[83859] A further embodiment of the present invention relates to a process for the production of glucose, which comprises
[83860] (a) increasing or generating one or more activities selected from the group consisting of monthiol glutaredoxin in an organelle, preferably in plastids or mitochondria, especially in plastids, of a non-human organism or a part thereof, preferably a microorganism, a plant cell, a plant or a part thereof, as compared to a corresponding non-transformed wild type non-human organism or a part thereof; and
[83861] (b) growing the non-human organism or a part thereof under conditions which permit the production of glucose or a composition comprising glucose in said non-human organism or in the culture medium surrounding said non-human organism.

[83862] A further embodiment of the present invention relates to a process for the production of glucose-1-phosphate, which comprises
[83863] (a) increasing or generating one or more activities selected from the group consisting of monthiol glutaredoxin in an organelle, preferably in plastids or mitochondria, especially in plastids, of a non-human organism or a part thereof, preferably a microorganism, a plant cell, a plant or a part thereof, as compared to a corresponding non-transformed wild type non-human organism or a part thereof; and
[83864] (b) growing the non-human organism or a part thereof under conditions which permit the production of glucose-1-phosphate or a composition comprising glucose-1-phosphate in said non-human organism or in the culture medium surrounding said non-human organism.

[83865] A further embodiment of the present invention relates to a process for the production of myo-inositol, which comprises
[83866] (a) increasing or generating one or more activities selected from the group consisting of monthiol glutaredoxin in an organelle, preferably in plastids or mitochondria, especially in plastids, of a non-human organism or a part thereof, preferably a microorganism, a plant cell, a plant or a part thereof, as compared to a corresponding non-transformed wild type non-human organism or a part thereof; and
[83867] (b) growing the non-human organism or a part thereof under conditions which permit the production of myo-inositol or a composition comprising myo-inositol in said non-human organism or in the culture medium surrounding said non-human organism.

[83868] A further embodiment of the present invention relates to a process for the production of sedoheptulose-7-phosphate, which comprises
[83869] (a) increasing or generating one or more activities selected from the group consisting of monthiol glutaredoxin in an organelle, preferably in plastids or mitochondria, especially in plastids, of a non-human organism or a part thereof, preferably a microorganism, a plant cell, a plant or a part thereof, as compared to a corresponding non-transformed wild type non-human organism or a part thereof; and
[83870] (b) growing the non-human organism or a part thereof under conditions which permit the production of sedoheptulose-7-phosphate or a composition comprising sedoheptulose-7-phosphate in said non-human organism or in the culture medium surrounding said non-human organism.

[83871] A further embodiment of the present invention relates to a process for the production of sucrose, which comprises
[83872] (a) increasing or generating one or more activities selected from the group consisting of monthiol glutaredoxin in an organelle, preferably in plastids or mitochondria, especially in plastids, of a non-human organism or a part thereof, preferably a microorganism, a plant cell, a plant or a part thereof, as compared to a corresponding non-transformed wild type non-human organism or a part thereof; and
[83873] (b) growing the non-human organism or a part thereof under conditions which permit the production of sucrose or a composition comprising sucrose in said non-human organism or in the culture medium surrounding said non-human organism.

[83874] A further embodiment of the present invention relates to a process for the production of fructose, which comprises
[83875] (a) increasing or generating one or more activities selected from the group consisting of glutaredoxin in an organelle, preferably in plastids or mitochondria, especially in plastids, of a non-human organism or a part thereof, preferably a microorganism, a plant cell, a plant or a part thereof, as compared to a corresponding non-transformed wild type non-human organism or a part thereof; and
[83876] (b) growing the non-human organism or a part thereof under conditions which permit the production of fructose or a composition comprising fructose in said non-human organism or in the culture medium surrounding said non-human organism.

[83877] A further embodiment of the present invention relates to a process for the production of glucose, which comprises
[83878] (a) increasing or generating one or more activities selected from the group consisting of glutaredoxin in an organelle, preferably in plastids or mitochondria, especially in plastids, of a non-human organism or a part thereof, preferably a microorganism, a plant cell, a plant or a part thereof, as compared to a corresponding non-transformed wild type non-human organism or a part thereof; and
[83879] (b) growing the non-human organism or a part thereof under conditions which permit the production of glucose or a composition comprising glucose in said non-human organism or in the culture medium surrounding said non-human organism.

[83880] A further embodiment of the present invention relates to a process for the production of glucose-1-phosphate, which comprises
[83881] (a) increasing or generating one or more activities selected from the group consisting of glutaredoxin in an organelle, preferably in plastids or mitochondria, especially in plastids, of a non-human organism or a part thereof, preferably a microorganism, a plant cell, a plant or a part thereof, as compared to a corresponding non-transformed wild type non-human organism or a part thereof; and
[83882] (b) growing the non-human organism or a part thereof under conditions which permit the production of glucose-1-phosphate or a composition comprising glucose-1-phosphate in said non-human organism or in the culture medium surrounding said non-human organism.

[83883] A further embodiment of the present invention relates to a process for the production of myo-inositol, which comprises
[83884] (a) increasing or generating one or more activities selected from the group consisting of glutaredoxin in an organelle, preferably in plastids or mitochondria, especially in plastids, of a non-human organism or a part thereof, preferably a microorganism, a plant cell, a plant or a part thereof, as compared to a corresponding non-transformed wild type non-human organism or a part thereof; and
[83885] (b) growing the non-human organism or a part thereof under conditions which permit the production of myo-inositol or a composition comprising myo-inositol in said non-human organism or in the culture medium surrounding said non-human organism.

[83886] A further embodiment of the present invention relates to a process for the production of sedoheptulose-7-phosphate, which comprises
[83887] (a) increasing or generating one or more activities selected from the group consisting of glutaredoxin in an organelle, preferably in plastids or mitochondria, especially in plastids, of a non-human organism or a part thereof, preferably a microorganism, a plant cell, a plant or a part thereof, as compared to a corresponding non-transformed wild type non-human organism or a part thereof; and
[83888] (b) growing the non-human organism or a part thereof under conditions which permit the production of sedoheptulose-7-phosphate or a composition comprising sedoheptulose-7-phosphate in said non-human organism or in the culture medium surrounding said non-human organism.

[83889] A further embodiment of the present invention relates to a process for the production of sucrose, which comprises
[83890] (a) increasing or generating one or more activities selected from the group consisting of glutaredoxin in an organelle, preferably in plastids or mitochondria, especially in plastids, of a non-human organism or a part thereof, preferably a microorganism, a plant cell, a plant or a part thereof, as compared to a corresponding non-transformed wild type non-human organism or a part thereof; and
[83891] (b) growing the non-human organism or a part thereof under conditions which permit the production of sucrose or a composition comprising sucrose in said non-human organism or in the culture medium surrounding said non-human organism.

[83892] A further embodiment of the present invention relates to a process for the production of glucose-1-phosphate, which comprises
[83893] (a) increasing or generating one or more activities selected from the group consisting of transcription factor in an organelle, preferably in plastids or mitochondria, especially in plastids, of a non-human organism or a part thereof, preferably a microorganism, a plant cell, a plant or a part thereof, as compared to a corresponding non-transformed wild type non-human organism or a part thereof; and
[83894] (b) growing the non-human organism or a part thereof under conditions which permit the production of glucose-1-phosphate or a composition comprising glucose-1-phosphate in said non-human organism or in the culture medium surrounding said non-human organism.

[83895] A further embodiment of the present invention relates to a process for the production of fructose, which comprises
[83896] (a) increasing or generating one or more activities selected from the group consisting of monothiol glutaredoxin in an organelle, preferably in plastids or mitochondria, especially in plastids, of a non-human organism or a part thereof, preferably a microorganism, a plant cell, a plant or a part thereof, as compared to a corresponding non-transformed wild type non-human organism or a part thereof; and
[83897] (b) growing the non-human organism or a part thereof under conditions which permit the production of fructose or a composition comprising fructose in said non-human organism or in the culture medium surrounding said non-human organism.

[83898] A further embodiment of the present invention relates to a process for the production of glucose, which comprises
[83899] (a) increasing or generating one or more activities selected from the group consisting of monothiol glutaredoxin in an organelle, preferably in plastids or mitochondria, especially in plastids, of a non-human organism or a part thereof, preferably a microorganism, a plant cell, a plant or a part thereof, as compared to a corresponding non-transformed wild type non-human organism or a part thereof; and
[83900] (b) growing the non-human organism or a part thereof under conditions which permit the production of glucose or a composition comprising glucose in said non-human organism or in the culture medium surrounding said non-human organism.

[83901] A further embodiment of the present invention relates to a process for the production of glucose-1-phosphate, which comprises
[83902] (a) increasing or generating one or more activities selected from the group consisting of monothiol glutaredoxin in an organelle, preferably in plastids or mitochondria, especially in plastids, of a non-human organism or a part thereof, preferably a microorganism, a plant cell, a plant or a part thereof, as compared to a corresponding non-transformed wild type non-human organism or a part thereof; and
[83903] (b) growing the non-human organism or a part thereof under conditions which permit the production of glucose-1-phosphate or a composition comprising glucose-1-phosphate in said non-human organism or in the culture medium surrounding said non-human organism.

[83904] A further embodiment of the present invention relates to a process for the production of myo-inositol, which comprises
[83905] (a) increasing or generating one or more activities selected from the group consisting of monothiol glutaredoxin in an organelle, preferably in plastids or mitochondria, especially in plastids, of a non-human organism or a part thereof, preferably a microorganism, a plant cell, a plant or a part thereof, as compared to a corresponding non-transformed wild type non-human organism or a part thereof; and
[83906] (b) growing the non-human organism or a part thereof under conditions which permit the production of myo-inositol or a composition comprising myo-inositol in said non-human organism or in the culture medium surrounding said non-human organism.

[83907] A further embodiment of the present invention relates to a process for the production of sedoheptulose-7-phosphate, which comprises
[83908] (a) increasing or generating one or more activities selected from the group consisting of monothiol glutaredoxin in an organelle, preferably in plastids or mitochondria, especially in plastids, of a non-human organism or a part thereof, preferably a microorganism, a plant cell, a plant or a part thereof, as compared to a corresponding non-transformed wild type non-human organism or a part thereof; and
[83909] (b) growing the non-human organism or a part thereof under conditions which permit the production of sedoheptulose-7-phosphate or a composition comprising sedoheptulose-7-phosphate in said non-human organism or in the culture medium surrounding said non-human organism.

[83910] A further embodiment of the present invention relates to a process for the production of sucrose, which comprises
[83911] (a) increasing or generating one or more activities selected from the group consisting of monothiol glutaredoxin in an organelle, preferably in plastids or mitochondria, especially in plastids, of a non-human organism or a part thereof, preferably a microorganism, a plant cell, a plant or a part thereof, as compared to a corresponding non-transformed wild type non-human organism or a part thereof; and
[83912] (b) growing the non-human organism or a part thereof under conditions which permit the production of sucrose or a composition comprising sucrose in said non-human organism or in the culture medium surrounding said non-human organism.

[83913] A further embodiment of the present invention relates to a process for the production of fructose, which comprises
[83914] (a) increasing or generating one or more activities selected from the group consisting of monothiol glutaredoxin in an organelle, preferably in plastids or mitochondria, especially in plastids, of a non-human organism or a part thereof, preferably a microorganism, a plant cell, a plant or a part thereof, as compared to a corresponding non-transformed wild type non-human organism or a part thereof; and
[83915] (b) growing the non-human organism or a part thereof under conditions which permit the production of fructose or a composition comprising fructose in said non-human organism or in the culture medium surrounding said non-human organism.

[83916] A further embodiment of the present invention relates to a process for the production of glucose, which comprises
[83917] (a) increasing or generating one or more activities selected from the group consisting of monothiol glutaredoxin in an organelle, preferably in plastids or mitochondria, especially in plastids, of a non-human organism or a part thereof, preferably a microorganism, a plant cell, a plant or a part thereof, as compared to a corresponding non-transformed wild type non-human organism or a part thereof; and
[83918] (b) growing the non-human organism or a part thereof under conditions which permit the production of glucose or a composition comprising glucose in said non-human organism or in the culture medium surrounding said non-human organism.

[83919] A further embodiment of the present invention relates to a process for the production of glucose-1-phosphate, which comprises
[83920] (a) increasing or generating one or more activities selected from the group consisting of monothiol glutaredoxin in an organelle, preferably in plastids or mitochondria, especially in plastids, of a non-human organism or a part thereof, preferably a microorganism, a plant cell, a plant or a part thereof, as compared to a corresponding non-transformed wild type non-human organism or a part thereof; and
[83921] (b) growing the non-human organism or a part thereof under conditions which permit the production of glucose-1-phosphate or a composition comprising glucose-1-phosphate in said non-human organism or in the culture medium surrounding said non-human organism.

[83922] A further embodiment of the present invention relates to a process for the production of myo-inositol, which comprises
[83923] (a) increasing or generating one or more activities selected from the group consisting of monothiol glutaredoxin in an organelle, preferably in plastids or mitochondria, especially in plastids, of a non-human organism or a part thereof, preferably a microorganism, a plant cell, a plant or a part thereof, as compared to a corresponding non-transformed wild type non-human organism or a part thereof; and
[83924] (b) growing the non-human organism or a part thereof under conditions which permit the production of myo-inositol or a composition comprising myo-inositol in said non-human organism or in the culture medium surrounding said non-human organism.

[83925] A further embodiment of the present invention relates to a process for the production of sedoheptulose-7-phosphate, which comprises
[83926] (a) increasing or generating one or more activities selected from the group consisting of monothiol glutaredoxin in an organelle, preferably in plastids or mitochondria, especially in plastids, of a non-human organism or a part thereof, preferably a microorganism, a plant cell, a plant or a part thereof, as compared to a corresponding non-transformed wild type non-human organism or a part thereof; and
[83927] (b) growing the non-human organism or a part thereof under conditions which permit the production of sedoheptulose-7-phosphate or a composition comprising sedoheptulose-7-phosphate in said non-human organism or in the culture medium surrounding said non-human organism.

[83928] A further embodiment of the present invention relates to a process for the production of sucrose, which comprises
[83929] (a) increasing or generating one or more activities selected from the group consisting of monothiol glutaredoxin in an organelle, preferably in plastids or mitochondria, especially in plastids, of a non-human organism or a part thereof, preferably a microorganism, a plant cell, a plant or a part thereof, as compared to a corresponding non-transformed wild type non-human organism or a part thereof; and
[83930] (b) growing the non-human organism or a part thereof under conditions which permit the production of sucrose or a composition comprising sucrose in said non-human organism or in the culture medium surrounding said non-human organism.

[83931] A further embodiment of the present invention relates to a process for the production of fructose, which comprises
[83932] (a) increasing or generating one or more activities selected from the group consisting of monothiol glutaredoxin in an organelle, preferably in plastids or mitochondria, especially in plastids, of a non-human organism or a part thereof, preferably a microorganism, a plant cell, a plant or a part thereof, as compared to a corresponding non-transformed wild type non-human organism or a part thereof; and
[83933] (b) growing the non-human organism or a part thereof under conditions which permit the production of fructose or a composition comprising fructose in said non-human organism or in the culture medium surrounding said non-human organism.

[83934] A further embodiment of the present invention relates to a process for the production of glucose, which comprises
[83935] (a) increasing or generating one or more activities selected from the group consisting of monothiol glutaredoxin in an organelle, preferably in plastids or mitochondria, especially in plastids, of a non-human organism or a part thereof, preferably a microorganism, a plant cell, a plant or a part thereof, as compared to a corresponding non-transformed wild type non-human organism or a part thereof; and
[83936] (b) growing the non-human organism or a part thereof under conditions which permit the production of glucose or a composition comprising glucose in said non-human organism or in the culture medium surrounding said non-human organism.

[83937] A further embodiment of the present invention relates to a process for the production of glucose-1-phosphate, which comprises
[83938] (a) increasing or generating one or more activities selected from the group consisting of monothiol glutaredoxin in an organelle, preferably in plastids or mitochondria, especially in plastids, of a non-human organism or a part thereof, preferably a microorganism, a plant cell, a plant or a part thereof, as compared to a corresponding non-transformed wild type non-human organism or a part thereof; and
[83939] (b) growing the non-human organism or a part thereof under conditions which permit the production of glucose-1-phosphate or a composition comprising glucose-1-phosphate in said non-human organism or in the culture medium surrounding said non-human organism.

[83940] A further embodiment of the present invention relates to a process for the production of myo-inositol, which comprises
[83941] (a) increasing or generating one or more activities selected from the group consisting of monothiol glutaredoxin in an organelle, preferably in plastids or mitochondria, especially in plastids, of a non-human organism or a part thereof, preferably a microorganism, a plant cell, a plant or a part thereof, as compared to a corresponding non-transformed wild type non-human organism or a part thereof; and
[83942] (b) growing the non-human organism or a part thereof under conditions which permit the production of myo-inositol or a composition comprising myo-inositol in said non-human organism or in the culture medium surrounding said non-human organism.

[83943] A further embodiment of the present invention relates to a process for the production of sucrose, which comprises
[83944] (a) increasing or generating one or more activities selected from the group consisting of monothiol glutaredoxin in an organelle, preferably in plastids or mitochondria, especially in plastids, of a non-human organism or a part thereof, preferably a microorganism, a plant cell, a plant or a part thereof, as compared to a corresponding non-transformed wild type non-human organism or a part thereof; and
[83945] (b) growing the non-human organism or a part thereof under conditions which permit the production of sucrose or a composition comprising sucrose in said non-human organism or in the culture medium surrounding said non-human organism.

[83946] A further embodiment of the present invention relates to a process for the production of fructose, which comprises
[83947] (a) increasing or generating one or more activities selected from the group consisting of monothiol glutaredoxin in an organelle, preferably in plastids or mitochondria, especially in plastids, of a non-human organism or a part thereof, preferably a microorganism, a plant cell, a plant or a part thereof, as compared to a corresponding non-transformed wild type non-human organism or a part thereof; and
[83948] (b) growing the non-human organism or a part thereof under conditions which permit the production of fructose or a composition comprising fructose in said non-human organism or in the culture medium surrounding said non-human organism.

[83949] A further embodiment of the present invention relates to a process for the production of glucose, which comprises
[83950] (a) increasing or generating one or more activities selected from the group consisting of monothiol glutaredoxin in an organelle, preferably in plastids or mitochondria, especially in plastids, of a non-human organism or a part thereof, preferably a microorganism, a plant cell, a plant or a part thereof, as compared to a corresponding non-transformed wild type non-human organism or a part thereof; and
[83951] (b) growing the non-human organism or a part thereof under conditions which permit the production of glucose or a composition comprising glucose in said non-human organism or in the culture medium surrounding said non-human organism.

[83952] A further embodiment of the present invention relates to a process for the production of sedoheptulose-7-phosphate, which comprises
[83953] (a) increasing or generating one or more activities selected from the group consisting of monothiol glutaredoxin in an organelle, preferably in plastids or mitochondria, especially in plastids, of a non-human organism or a part thereof, preferably a microorganism, a plant cell, a plant or a part thereof, as compared to a corresponding non-transformed wild type non-human organism or a part thereof; and
[83954] (b) growing the non-human organism or a part thereof under conditions which permit the production of sedoheptulose-7-phosphate or a composition comprising sedoheptulose-7-phosphate in said non-human organism or in the culture medium surrounding said non-human organism.

[83955] A further embodiment of the present invention relates to a process for the production of sucrose, which comprises
[83956] (a) increasing or generating one or more activities selected from the group consisting of monothiol glutaredoxin in an organelle, preferably in plastids or mitochondria, especially in plastids, of a non-human organism or a part thereof, preferably a microorganism, a plant cell, a plant or a part thereof, as compared to a corresponding non-transformed wild type non-human organism or a part thereof; and
[83957] (b) growing the non-human organism or a part thereof under conditions which permit the production of sucrose or a composition comprising sucrose in said non-human organism or in the culture medium surrounding said non-human organism.

[83958] A further embodiment of the present invention relates to a process for the production of myo-inositol, which comprises
[83959] (a) increasing or generating one or more activities selected from the group consisting of protein phosphatase in an organelle, preferably in plastids or mitochondria, especially in plastids, of a non-human organism or a part thereof, preferably a microorganism, a plant cell, a plant or a part thereof, as compared to a corresponding non-transformed wild type non-human organism or a part thereof; and
[83960] (b) growing the non-human organism or a part thereof under conditions which permit the production of myo-inositol or a composition comprising myo-inositol in said non-human organism or in the culture medium surrounding said non-human organism.

[83961] A further embodiment of the present invention relates to a process for the production of fructose, which comprises
[83962] (a) increasing or generating one or more activities selected from the group consisting of glutaredoxin in an organelle, preferably in plastids or mitochondria, especially in plastids, of a non-human organism or a part thereof, preferably a microorganism, a plant cell, a plant or a part thereof, as compared to a corresponding non-transformed wild type non-human organism or a part thereof; and
[83963] (b) growing the non-human organism or a part thereof under conditions which permit the production of fructose or a composition comprising fructose in said non-human organism or in the culture medium surrounding said non-human organism.

[83964] A further embodiment of the present invention relates to a process for the production of glucose, which comprises
[83965] (a) increasing or generating one or more activities selected from the group consisting of glutaredoxin in an organelle, preferably in plastids or mitochondria, especially in plastids, of a non-human organism or a part thereof, preferably a microorganism, a plant cell, a plant or a part thereof, as compared to a corresponding non-transformed wild type non-human organism or a part thereof; and
[83966] (b) growing the non-human organism or a part thereof under conditions which permit the production of glucose or a composition comprising glucose in said non-human organism or in the culture medium surrounding said non-human organism.

[83967] A further embodiment of the present invention relates to a process for the production of glucose-1-phosphate, which comprises
[83968] (a) increasing or generating one or more activities selected from the group consisting of glutaredoxin in an organelle, preferably in plastids or mitochondria, especially in plastids, of a non-human organism or a part thereof, preferably a microorganism, a plant cell, a plant or a part thereof, as compared to a corresponding non-transformed wild type non-human organism or a part thereof; and
[83969] (b) growing the non-human organism or a part thereof under conditions which permit the production of glucose-1-phosphate or a composition comprising glucose-1-phosphate in said non-human organism or in the culture medium surrounding said non-human organism.

[83970] A further embodiment of the present invention relates to a process for the production of myo-inositol, which comprises
[83971] (a) increasing or generating one or more activities selected from the group consisting of glutaredoxin in an organelle, preferably in plastids or mitochondria, especially in plastids, of a non-human organism or a part thereof, preferably a microorganism, a plant cell, a plant or a part thereof, as compared to a corresponding non-transformed wild type non-human organism or a part thereof; and
[83972] (b) growing the non-human organism or a part thereof under conditions which permit the production of myo-inositol or a composition comprising myo-inositol in said non-human organism or in the culture medium surrounding said non-human organism.

[83973] A further embodiment of the present invention relates to a process for the production of sedoheptulose-7-phosphate, which comprises
[83974] (a) increasing or generating one or more activities selected from the group consisting of glutaredoxin in an organelle, preferably in plastids or mitochondria, especially in plastids, of a non-human organism or a part thereof, preferably a microorganism, a plant cell, a plant or a part thereof, as compared to a corresponding non-transformed wild type non-human organism or a part thereof; and
[83975] (b) growing the non-human organism or a part thereof under conditions which permit the production of sedoheptulose-7-phosphate or a composition comprising sedoheptulose-7-phosphate in said non-human organism or in the culture medium surrounding said non-human organism.

[83976] A further embodiment of the present invention relates to a process for the production of sucrose, which comprises
[83977] (a) increasing or generating one or more activities selected from the group consisting of glutaredoxin in an organelle, preferably in plastids or mitochondria, especially in plastids, of a non-human organism or a part thereof, preferably a microorganism, a plant cell, a plant or a part thereof, as compared to a corresponding non-transformed wild type non-human organism or a part thereof; and
[83978] (b) growing the non-human organism or a part thereof under conditions which permit the production of sucrose or a composition comprising sucrose in said non-human organism or in the culture medium surrounding said non-human organism.

[83979] A further embodiment of the present invention relates to a process for the production of glucose-1-phosphate, which comprises
[83980] (a) increasing or generating one or more activities selected from the group consisting of cyclin D in an organelle, preferably in plastids or mitochondria, especially in plastids, of a non-human organism or a part thereof, preferably a microorganism, a plant cell, a plant or a part thereof, as compared to a corresponding non-transformed wild type non-human organism or a part thereof; and
[83981] (b) growing the non-human organism or a part thereof under conditions which permit the production of glucose-1-phosphate or a composition comprising glucose-1-phosphate in said non-human organism or in the culture medium surrounding said non-human organism.

[83982] A further embodiment of the present invention relates to a process for the production of raffinose, which comprises
[83983] (a) increasing or generating one or more activities selected from the group consisting of cyclin D in an organelle, preferably in plastids or mitochondria, especially in plastids, of a non-human organism or a part thereof, preferably a microorganism, a plant cell, a plant or a part thereof, as compared to a corresponding non-transformed wild type non-human organism or a part thereof; and
[83984] (b) growing the non-human organism or a part thereof under conditions which permit the production of raffinose or a composition comprising raffinose in said non-human organism or in the culture medium surrounding said non-human organism.

[83985] A further embodiment of the present invention relates to a process for the production of sucrose, which comprises
[83986] (a) increasing or generating one or more activities selected from the group consisting of cyclin D in an organelle, preferably in plastids or mitochondria, especially in plastids, of a non-human organism or a part thereof, preferably a microorganism, a plant cell, a plant or a part thereof, as compared to a corresponding non-transformed wild type non-human organism or a part thereof; and
[83987] (b) growing the non-human organism or a part thereof under conditions which permit the production of sucrose or a composition comprising sucrose in said non-human organism or in the culture medium surrounding said non-human organism.

[83988] A further embodiment of the present invention relates to a process for the production of fructose, which comprises
[83989] (a) increasing or generating one or more activities selected from the group consisting of calcium-dependent protein kinase in an organelle, preferably in plastids or mitochondria, especially in plastids, of a non-human organism or a part thereof, preferably a microorganism, a plant cell, a plant or a part thereof, as compared to a corresponding non-transformed wild type non-human organism or a part thereof; and
[83990] (b) growing the non-human organism or a part thereof under conditions which permit the production of fructose or a composition comprising fructose in said non-human organism or in the culture medium surrounding said non-human organism.

[83991] A further embodiment of the present invention relates to a process for the production of glucose-1-phosphate, which comprises
[83992] (a) increasing or generating one or more activities selected from the group consisting of calcium-dependent protein kinase in an organelle, preferably in plastids or mitochondria, especially in plastids, of a non-human organism or a part thereof, preferably a microorganism, a plant cell, a plant or a part thereof, as compared to a corresponding non-transformed wild type non-human organism or a part thereof; and
[83993] (b) growing the non-human organism or a part thereof under conditions which permit the production of glucose-1-phosphate or a composition comprising glucose-1-phosphate in said non-human organism or in the culture medium surrounding said non-human organism.

[83994] A further embodiment of the present invention relates to a process for the production of raffinose, which comprises
[83995] (a) increasing or generating one or more activities selected from the group consisting of calcium-dependent protein kinase in an organelle, preferably in plastids or mitochondria, especially in plastids, of a non-human organism or a part thereof, preferably a microorganism, a plant cell, a plant or a part thereof, as compared to a corresponding non-transformed wild type non-human organism or a part thereof; and
[83996] (b) growing the non-human organism or a part thereof under conditions which permit the production of raffinose or a composition comprising raffinose in said non-human organism or in the culture medium surrounding said non-human organism.

[83997] A further embodiment of the present invention relates to a process for the production of myo-inositol, which comprises
[83998] (a) increasing or generating one or more activities selected from the group consisting of protein phosphatase in an organelle, preferably in plastids or mitochondria, especially in plastids, of a non-human organism or a part thereof, preferably a microorganism, a plant cell, a plant or a part thereof, as compared to a corresponding non-transformed wild type non-human organism or a part thereof; and
[83999] (b) growing the non-human organism or a part thereof under conditions which permit the production of myo-inositol or a composition comprising myo-inositol in said non-human organism or in the culture medium surrounding said non-human organism.

[84000] A further embodiment of the present invention relates to a process for the production of fructose, which comprises
[84001] (a) increasing or generating one or more activities selected from the group consisting of heat shock transcription factor in an organelle, preferably in plastids or mitochondria, especially in plastids, of a non-human organism or a part thereof, preferably a microorganism, a plant cell, a plant or a part thereof, as compared to a corresponding non-transformed wild type non-human organism or a part thereof; and
[84002] (b) growing the non-human organism or a part thereof under conditions which permit the production of fructose or a composition comprising fructose in said non-human organism or in the culture medium surrounding said non-human organism.

[84003] A further embodiment of the present invention relates to a process for the production of glucose, which comprises
[84004] (a) increasing or generating one or more activities selected from the group consisting of heat shock transcription factor in an organelle, preferably in plastids or mitochondria, especially in plastids, of a non-human organism or a part thereof, preferably a microorganism, a plant cell, a plant or a part thereof, as compared to a corresponding non-transformed wild type non-human organism or a part thereof; and
[84005] (b) growing the non-human organism or a part thereof under conditions which permit the production of glucose or a composition comprising glucose in said non-human organism or in the culture medium surrounding said non-human organism.

[84006] A further embodiment of the present invention relates to a process for the production of glucose-1-phosphate, which comprises
[84007] (a) increasing or generating one or more activities selected from the group consisting of heat shock transcription factor in an organelle, preferably in plastids or mitochondria, especially in plastids, of a non-human organism or a part thereof, preferably a microorganism, a plant cell, a plant or a part thereof, as compared to a corresponding non-transformed wild type non-human organism or a part thereof; and
[84008] (b) growing the non-human organism or a part thereof under conditions which permit the production of glucose-1-phosphate or a composition comprising glucose-1-phosphate in said non-human organism or in the culture medium surrounding said non-human organism.

[84009] A further embodiment of the present invention relates to a process for the production of myo-inositol, which comprises
[84010] (a) increasing or generating one or more activities selected from the group consisting of heat shock transcription factor in an organelle, preferably in plastids or mitochondria, especially in plastids, of a non-human organism or a part thereof, preferably a microorganism, a plant cell, a plant or a part thereof, as compared to a corresponding non-transformed wild type non-human organism or a part thereof; and
[84011] (b) growing the non-human organism or a part thereof under conditions which permit the production of myo-inositol or a composition comprising myo-inositol in said non-human organism or in the culture medium surrounding said non-human organism.

[84012] A further embodiment of the present invention relates to a process for the production of raffinose, which comprises
[84013] (a) increasing or generating one or more activities selected from the group consisting of heat shock transcription factor in an organelle, preferably in plastids or mitochondria, especially in plastids, of a non-human organism or a part thereof, preferably a microorganism, a plant cell, a plant or a part thereof, as compared to a corresponding non-transformed wild type non-human organism or a part thereof; and
[84014] (b) growing the non-human organism or a part thereof under conditions which permit the production of raffinose or a composition comprising raffinose in said non-human organism or in the culture medium surrounding said non-human organism.

[84015] A further embodiment of the present invention relates to a process for the production of sucrose, which comprises
[84016] (a) increasing or generating one or more activities selected from the group consisting of heat shock transcription factor in an organelle, preferably in plastids or mitochondria, especially in plastids, of a non-human organism or a part thereof, preferably a microorganism, a plant cell, a plant or a part thereof, as compared to a corresponding non-transformed wild type non-human organism or a part thereof; and
[84017] (b) growing the non-human organism or a part thereof under conditions which permit the production of sucrose or a composition comprising sucrose in said non-human organism or in the culture medium surrounding said non-human organism.

[84018] A further embodiment of the present invention relates to a process for the production of myo-inositol, which comprises
[84019] (a) increasing or generating one or more activities selected from the group consisting of gibberellin 20-oxidase in an organelle, preferably in plastids or mitochondria, especially in plastids, of a non-human organism or a part thereof, preferably a microorganism, a plant cell, a plant or a part thereof, as compared to a corresponding non-transformed wild type non-human organism or a part thereof; and
[84020] (b) growing the non-human organism or a part thereof under conditions which permit the production of myo-inositol or a composition comprising myo-inositol in said non-human organism or in the culture medium surrounding said non-human organism.

[84021] A further embodiment of the present invention relates to a process for the production of myo-inositol, which comprises
[84022] (a) increasing or generating one or more activities selected from the group consisting of inositol-3-phosphate synthase in an organelle, preferably in plastids or mitochondria, especially in plastids, of a non-human organism or a part thereof, preferably a microorganism, a plant cell, a plant or a part thereof, as compared to a corresponding non-transformed wild type non-human organism or a part thereof; and
[84023] (b) growing the non-human organism or a part thereof under conditions which permit the production of myo-inositol or a composition comprising myo-inositol in said non-human organism or in the culture medium surrounding said non-human organism.

[84024] A further embodiment of the present invention relates to a process for the production of raffinose, which comprises
[84025] (a) increasing or generating one or more activities selected from the group consisting of inositol-3-phosphate synthase in an organelle, preferably in plastids or mitochondria, especially in plastids, of a non-human organism or a part thereof, preferably a microorganism, a plant cell, a plant or a part thereof, as compared to a corresponding non-transformed wild type non-human organism or a part thereof; and
[84026] (b) growing the non-human organism or a part thereof under conditions which permit the production of raffinose or a composition comprising raffinose in said non-human organism or in the culture medium surrounding said non-human organism.

[84027] A further embodiment of the present invention relates to a process for the production of glucose, which comprises
[84028] (a) increasing or generating one or more activities selected from the group consisting of glutaredoxin in an organelle, preferably in plastids or mitochondria, especially in plastids, of a non-human organism or a part thereof, preferably a microorganism, a plant cell, a plant or a part thereof, as compared to a corresponding non-transformed wild type non-human organism or a part thereof; and
[84029] (b) growing the non-human organism or a part thereof under conditions which permit the production of glucose or a composition comprising glucose in said non-human organism or in the culture medium surrounding said non-human organism.

[84030] A further embodiment of the present invention relates to a process for the production of fructose, which comprises
[84031] (a) increasing or generating one or more activities selected from the group consisting of At5g16650-protein in an organelle, preferably in plastids or mitochondria, especially in plastids, of a non-human organism or a part thereof, preferably a microorganism, a plant cell, a plant or a part thereof, as compared to a corresponding non-transformed wild type non-human organism or a part thereof; and
[84032] (b) growing the non-human organism or a part thereof under conditions which permit the production of fructose or a composition comprising fructose in said non-human organism or in the culture medium surrounding said non-human organism.

[84033] A further embodiment of the present invention relates to a process for the production of fructose, which comprises
[84034] (a) increasing or generating one or more activities selected from the group consisting of monothiol glutaredoxin in an organelle, preferably in plastids or mitochondria, especially in plastids, of a non-human organism or a part thereof, preferably a microorganism, a plant cell, a plant or a part thereof, as compared to a corresponding non-transformed wild type non-human organism or a part thereof; and
[84035] (b) growing the non-human organism or a part thereof under conditions which permit the production of fructose or a composition comprising fructose in said non-human organism or in the culture medium surrounding said non-human organism.

[84036] A further embodiment of the present invention relates to a process for the production of glucose, which comprises
[84037] (a) increasing or generating one or more activities selected from the group consisting of monothiol glutaredoxin in an organelle, preferably in plastids or mitochondria, especially in plastids, of a non-human organism or a part thereof, preferably a microorganism, a plant cell, a plant or a part thereof, as compared to a corresponding non-transformed wild type non-human organism or a part thereof; and
[84038] (b) growing the non-human organism or a part thereof under conditions which permit the production of glucose or a composition comprising glucose in said non-human organism or in the culture medium surrounding said non-human organism.

[84039] A further embodiment of the present invention relates to a process for the production of myo-inositol, which comprises
[84040] (a) increasing or generating one or more activities selected from the group consisting of monothiol glutaredoxin in an organelle, preferably in plastids or mitochondria, especially in plastids, of a non-human organism or a part thereof, preferably a microorganism, a plant cell, a plant or a part thereof, as compared to a corresponding non-transformed wild type non-human organism or a part thereof; and
[84041] (b) growing the non-human organism or a part thereof under conditions which permit the production of myo-inositol or a composition comprising myo-inositol in said non-human organism or in the culture medium surrounding said non-human organism.

[84042] A further embodiment of the present invention relates to a process for the production of sedoheptulose-7-phosphate, which comprises
[84043] (a) increasing or generating one or more activities selected from the group consisting of monothiol glutaredoxin in an organelle, preferably in plastids or mitochondria, especially in plastids, of a non-human organism or a part thereof, preferably a microorganism, a plant cell, a plant or a part thereof, as compared to a corresponding non-transformed wild type non-human organism or a part thereof; and
[84044] (b) growing the non-human organism or a part thereof under conditions which permit the production of sedoheptulose-7-phosphate or a composition comprising sedoheptulose-7-phosphate in said non-human organism or in the culture medium surrounding said non-human organism.

[84045] A further embodiment of the present invention relates to a process for the production of sucrose, which comprises
[84046] (a) increasing or generating one or more activities selected from the group consisting of monothiol glutaredoxin in an organelle, preferably in plastids or mitochondria, especially in plastids, of a non-human organism or a part thereof, preferably a microorganism, a plant cell, a plant or a part thereof, as compared to a corresponding non-transformed wild type non-human organism or a part thereof; and
[84047] (b) growing the non-human organism or a part thereof under conditions which permit the production of sucrose or a composition comprising sucrose in said non-human organism or in the culture medium surrounding said non-human organism.

[84048] A further embodiment of the present invention relates to a process for the production of fructose, which comprises
[84049] (a) increasing or generating one or more activities selected from the group consisting of transcription factor in an organelle, preferably in plastids or mitochondria, especially in plastids, of a non-human organism or a part thereof, preferably a microorganism, a plant cell, a plant or a part thereof, as compared to a corresponding non-transformed wild type non-human organism or a part thereof; and
[84050] (b) growing the non-human organism or a part thereof under conditions which permit the production of fructose or a composition comprising fructose in said non-human organism or in the culture medium surrounding said non-human organism.

[84051] A further embodiment of the present invention relates to a process for the production of glucose-1-phosphate, which comprises
[84052] (a) increasing or generating one or more activities selected from the group consisting of At5g43630-protein in an organelle, preferably in plastids or mitochondria, especially in plastids, of a non-human organism or a part thereof, preferably a microorganism, a plant cell, a plant or a part thereof, as compared to a corresponding non-transformed wild type non-human organism or a part thereof; and
[84053] (b) growing the non-human organism or a part thereof under conditions which permit the production of glucose-1-phosphate or a composition comprising glucose-1-phosphate in said non-human organism or in the culture medium surrounding said non-human organism.

[84054] A further embodiment of the present invention relates to a process for the production of myo-inositol, which comprises
[84055] (a) increasing or generating one or more activities selected from the group consisting of heat shock transcription factor in an organelle, preferably in plastids or mitochondria, especially in plastids, of a non-human organism or a part thereof, preferably a microorganism, a plant cell, a plant or a part thereof, as compared to a corresponding non-transformed wild type non-human organism or a part thereof; and
[84056] (b) growing the non-human organism or a part thereof under conditions which permit the production of myo-inositol or a composition comprising myo-inositol in said non-human organism or in the culture medium surrounding said non-human organism.

[84057] A further embodiment of the present invention relates to a process for the production of raffinose, which comprises
[84058] (a) increasing or generating one or more activities selected from the group consisting of heat shock transcription factor in an organelle, preferably in plastids or mitochondria, especially in plastids, of a non-human organism or a part thereof, preferably a microorganism, a plant cell, a plant or a part thereof, as compared to a corresponding non-transformed wild type non-human organism or a part thereof; and
[84059] (b) growing the non-human organism or a part thereof under conditions which permit the production of raffinose or a composition comprising raffinose in said non-human organism or in the culture medium surrounding said non-human organism.

[84060] A further embodiment of the present invention relates to a process for the production of glucose-1-phosphate, which comprises
[84061] (a) increasing or generating one or more activities selected from the group consisting of protein phosphatase in an organelle, preferably in plastids or mitochondria, especially in plastids, of a non-human organism or a part thereof, preferably a microorganism, a plant cell, a plant or a part thereof, as compared to a corresponding non-transformed wild type non-human organism or a part thereof; and
[84062] (b) growing the non-human organism or a part thereof under conditions which permit the production of glucose-1-phosphate or a composition comprising glucose-1-phosphate in said non-human organism or in the culture medium surrounding said non-human organism.

[84063] A further embodiment of the present invention relates to a process for the production of myo-inositol, which comprises
[84064] (a) increasing or generating one or more activities selected from the group consisting of protein phosphatase in an organelle, preferably in plastids or mitochondria, especially in plastids, of a non-human organism or a part thereof, preferably a microorganism, a plant cell, a plant or a part thereof, as compared to a corresponding non-transformed wild type non-human organism or a part thereof; and
[84065] (b) growing the non-human organism or a part thereof under conditions which permit the production of myo-inositol or a composition comprising myo-inositol in said non-human organism or in the culture medium surrounding said non-human organism.

[84066] A further embodiment of the present invention relates to a process for the production of fructose, which comprises
[84067] (a) increasing or generating one or more activities selected from the group consisting of RNA-binding protein in an organelle, preferably in plastids or mitochondria, especially in plastids, of a non-human organism or a part thereof, preferably a microorganism, a plant cell, a plant or a part thereof, as compared to a corresponding non-transformed wild type non-human organism or a part thereof; and
[84068] (b) growing the non-human organism or a part thereof under conditions which permit the production of fructose or a composition comprising fructose in said non-human organism or in the culture medium surrounding said non-human organism.

[84069] A further embodiment of the present invention relates to a process for the production of glucose, which comprises
[84070] (a) increasing or generating one or more activities selected from the group consisting of RNA-binding protein in an organelle, preferably in plastids or mitochondria, especially in plastids, of a non-human organism or a part thereof, preferably a microorganism, a plant cell, a plant or a part thereof, as compared to a corresponding non-transformed wild type non-human organism or a part thereof; and
[84071] (b) growing the non-human organism or a part thereof under conditions which permit the production of glucose or a composition comprising glucose in said non-human organism or in the culture medium surrounding said non-human organism.

[84072] A further embodiment of the present invention relates to a process for the production of fructose, which comprises
[84073] (a) increasing or generating one or more activities selected from the group consisting of MADS-box transcription factor in an organelle, preferably in plastids or mitochondria, especially in plastids, of a non-human organism or a part thereof, preferably a microorganism, a plant cell, a plant or a part thereof, as compared to a corresponding non-transformed wild type non-human organism or a part thereof; and
[84074] (b) growing the non-human organism or a part thereof under conditions which permit the production of fructose or a composition comprising fructose in said non-human organism or in the culture medium surrounding said non-human organism.

[84075] A further embodiment of the present invention relates to a process for the production of raffinose, which comprises
[84076] (a) increasing or generating one or more activities selected from the group consisting of MADS-box transcription factor in an organelle, preferably in plastids or mitochondria, especially in plastids, of a non-human organism or a part thereof, preferably a microorganism, a plant cell, a plant or a part thereof, as compared to a corresponding non-transformed wild type non-human organism or a part thereof; and
[84077] (b) growing the non-human organism or a part thereof under conditions which permit the production of raffinose or a composition comprising raffinose in said non-human organism or in the culture medium surrounding said non-human organism.

[84078] A further embodiment of the present invention relates to a process for the production of saccharic acid, which comprises
[84079] (a) increasing or generating one or more activities selected from the group consisting of MADS-box transcription factor in an organelle, preferably in plastids or mitochondria, especially in plastids, of a non-human organism or a part thereof, preferably a microorganism, a plant cell, a plant or a part thereof, as compared to a corresponding non-transformed wild type non-human organism or a part thereof; and
[84080] (b) growing the non-human organism or a part thereof under conditions which permit the production of saccharic acid or a composition comprising saccharic acid in said non-human organism or in the culture medium surrounding said non-human organism.

[84081] A further embodiment of the present invention relates to a process for the production of glucose-1-phosphate, which comprises
[84082] (a) increasing or generating one or more activities selected from the group consisting of protein kinase in an organelle, preferably in plastids or mitochondria, especially in plastids, of a non-human organism or a part thereof, preferably a microorganism, a plant cell, a plant or a part thereof, as compared to a corresponding non-transformed wild type non-human organism or a part thereof; and
[84083] (b) growing the non-human organism or a part thereof under conditions which permit the production of glucose-1-phosphate or a composition comprising glucose-1-phosphate in said non-human organism or in the culture medium surrounding said non-human organism.

[84084] A further embodiment of the present invention relates to a process for the production of raffinose, which comprises
[84085] (a) increasing or generating one or more activities selected from the group consisting of glycosyl transferase in an organelle, preferably in plastids or mitochondria, especially in plastids, of a non-human organism or a part thereof, preferably a microorganism, a plant cell, a plant or a part thereof, as compared to a corresponding non-transformed wild type non-human organism or a part thereof; and
[84086] (b) growing the non-human organism or a part thereof under conditions which permit the production of raffinose or a composition comprising raffinose in said non-human organism or in the culture medium surrounding said non-human organism.

[84087] A further embodiment of the present invention relates to a process for the production of sucrose, which comprises
[84088] (a) increasing or generating one or more activities selected from the group consisting of sec-independent protein translocase in an organelle, preferably in plastids or mitochondria, especially in plastids, of a non-human organism or a part thereof, preferably a microorganism, a plant cell, a plant or a part thereof, as compared to a corresponding non-transformed wild type non-human organism or a part thereof; and
[84089] (b) growing the non-human organism or a part thereof under conditions which permit the production of sucrose or a composition comprising sucrose in said non-human organism or in the culture medium surrounding said non-human organism.

[84090] A further embodiment of the present invention relates to a process for the production of 3,4,5-trihydroxypentanoic acid, which comprises
[84091] (a) increasing or generating one or more activities selected from the group consisting of beta-hydroxylase in an organelle, preferably in plastids or mitochondria, especially in plastids, of a non-human organism or a part thereof, preferably a microorganism, a plant cell, a plant or a part thereof, as compared to a corresponding non-transformed wild type non-human organism or a part thereof; and
[84092] (b) growing the non-human organism or a part thereof under conditions which permit the production of 3,4,5-trihydroxypentanoic acid or a composition comprising 3,4,5-trihydroxypentanoic acid in said non-human organism or in the culture medium surrounding said non-human organism.

[84093] A further embodiment of the present invention relates to a process for the production of fructose, which comprises
[84094] (a) increasing or generating one or more activities selected from the group consisting of elongation factor Tu in an organelle, preferably in plastids or mitochondria, especially in plastids, of a non-human organism or a part thereof, preferably a microorganism, a plant cell, a plant or a part thereof, as compared to a corresponding non-transformed wild type non-human organism or a part thereof; and
[84095] (b) growing the non-human organism or a part thereof under conditions which permit the production of fructose or a composition comprising fructose in said non-human organism or in the culture medium surrounding said non-human organism.

[84096] A further embodiment of the present invention relates to a process for the production of glucose, which comprises
[84097] (a) increasing or generating one or more activities selected from the group consisting of elongation factor Tu in an organelle, preferably in plastids or mitochondria, especially in plastids, of a non-human organism or a part thereof, preferably a microorganism, a plant cell, a plant or a part thereof, as compared to a corresponding non-transformed wild type non-human organism or a part thereof; and
[84098] (b) growing the non-human organism or a part thereof under conditions which permit the production of glucose or a composition comprising glucose in said non-human organism or in the culture medium surrounding said non-human organism.

[84099] A further embodiment of the present invention relates to a process for the production of fructose, which comprises
[84100] (a) increasing or generating one or more activities selected from the group consisting of ABC transporter permease protein in an organelle, preferably in plastids or mitochondria, especially in plastids, of a non-human organism or a part thereof, preferably a microorganism, a plant cell, a plant or a part thereof, as compared to a corresponding non-transformed wild type non-human organism or a part thereof; and
[84101] (b) growing the non-human organism or a part thereof under conditions which permit the production of fructose or a composition comprising fructose in said non-human organism or in the culture medium surrounding said non-human organism.

[84102] A further embodiment of the present invention relates to a process for the production of sucrose, which comprises
[84103] (a) increasing or generating one or more activities selected from the group consisting of ABC transporter permease protein in an organelle, preferably in plastids or mitochondria, especially in plastids, of a non-human organism or a part thereof, preferably a microorganism, a plant cell, a plant or a part thereof, as compared to a corresponding non-transformed wild type non-human organism or a part thereof; and
[84104] (b) growing the non-human organism or a part thereof under conditions which permit the production of sucrose or a composition comprising sucrose in said non-human organism or in the culture medium surrounding said non-human organism.

[84105] A further embodiment of the present invention relates to a process for the production of glucose-1-phosphate, which comprises
[84106] (a) increasing or generating one or more activities selected from the group consisting of acyl-CoA synthase in an organelle, preferably in plastids or mitochondria, especially in plastids, of a non-human organism or a part thereof, preferably a microorganism, a plant cell, a plant or a part thereof, as compared to a corresponding non-transformed wild type non-human organism or a part thereof; and
[84107] (b) growing the non-human organism or a part thereof under conditions which permit the production of glucose-1-phosphate or a composition comprising glucose-1-phosphate in said non-human organism or in the culture medium surrounding said non-human organism.

[84108] A further embodiment of the present invention relates to a process for the production of glucose, which comprises
[84109] (a) increasing or generating one or more activities selected from the group consisting of 2-oxoglutarate dehydrogenase E1 subunit in an organelle, preferably in plastids or mitochondria, especially in plastids, of a non-human organism or a part thereof, preferably a microorganism, a plant cell, a plant or a part thereof, as compared to a corresponding non-transformed wild type non-human organism or a part thereof; and
[84110] (b) growing the non-human organism or a part thereof under conditions which permit the production of glucose or a composition comprising glucose in said non-human organism or in the culture medium surrounding said non-human organism.

[84111] A further embodiment of the present invention relates to a process for the production of glucose-1-phosphate, which comprises
[84112] (a) increasing or generating one or more activities selected from the group consisting of 2-oxoglutarate dehydrogenase E1 subunit in an organelle, preferably in plastids or mitochondria, especially in plastids, of a non-human organism or a part thereof, preferably a microorganism, a plant cell, a plant or a part thereof, as compared to a corresponding non-transformed wild type non-human organism or a part thereof; and
[84113] (b) growing the non-human organism or a part thereof under conditions which permit the production of glucose-1-phosphate or a composition comprising glucose-1-phosphate in said non-human organism or in the culture medium surrounding said non-human organism.

[84114] A further embodiment of the present invention relates to a process for the production of myo-inositol, which comprises
[84115] (a) increasing or generating one or more activities selected from the group consisting of 2-oxoglutarate dehydrogenase E1 subunit in an organelle, preferably in plastids or mitochondria, especially in plastids, of a non-human organism or a part thereof, preferably a microorganism, a plant cell, a plant or a part thereof, as compared to a corresponding non-transformed wild type non-human organism or a part thereof; and
[84116] (b) growing the non-human organism or a part thereof under conditions which permit the production of myo-inositol or a composition comprising myo-inositol in said non-human organism or in the culture medium surrounding said non-human organism.

[84117] A further embodiment of the present invention relates to a process for the production of raffinose, which comprises
[84118] (a) increasing or generating one or more activities selected from the group consisting of 2-oxoglutarate dehydrogenase E1 subunit in an organelle, preferably in plastids or mitochondria, especially in plastids, of a non-human organism or a part thereof, preferably a microorganism, a plant cell, a plant or a part thereof, as compared to a corresponding non-transformed wild type non-human organism or a part thereof; and
[84119] (b) growing the non-human organism or a part thereof under conditions which permit the production of raffinose or a composition comprising raffinose in said non-human organism or in the culture medium surrounding said non-human organism.

[84120] A further embodiment of the present invention relates to a process for the production of sedoheptulose-7-phosphate, which comprises
[84121] (a) increasing or generating one or more activities selected from the group consisting of 2-oxoglutarate dehydrogenase E1 subunit in an organelle, preferably in plastids or mitochondria, especially in plastids, of a non-human organism or a part thereof, preferably a microorganism, a plant cell, a plant or a part thereof, as compared to a corresponding non-transformed wild type non-human organism or a part thereof; and
[84122] (b) growing the non-human organism or a part thereof under conditions which permit the production of sedoheptulose-7-phosphate or a composition comprising sedoheptulose-7-phosphate in said non-human organism or in the culture medium surrounding said non-human organism.

[84123] A further embodiment of the present invention relates to a process for the production of raffinose, which comprises
[84124] (a) increasing or generating one or more activities selected from the group consisting of GDP-mannose dehydrogenase in an organelle, preferably in plastids or mitochondria, especially in plastids, of a non-human organism or a part thereof, preferably a microorganism, a plant cell, a plant or a part thereof, as compared to a corresponding non-transformed wild type non-human organism or a part thereof; and
[84125] (b) growing the non-human organism or a part thereof under conditions which permit the production of raffinose or a composition comprising raffinose in said non-human organism or in the culture medium surrounding said non-human organism.

[84126] A further embodiment of the present invention relates to a process for the production of fructose, which comprises
[84127] (a) increasing or generating one or more activities selected from the group consisting of transcriptional regulator in an organelle, preferably in plastids or mitochondria, especially in plastids, of a non-human organism or a part thereof, preferably a microorganism, a plant cell, a plant or a part thereof, as compared to a corresponding non-transformed wild type non-human organism or a part thereof; and
[84128] (b) growing the non-human organism or a part thereof under conditions which permit the production of fructose or a composition comprising fructose in said non-human organism or in the culture medium surrounding said non-human organism.

[84129] A further embodiment of the present invention relates to a process for the production of glucose, which comprises
[84130] (a) increasing or generating one or more activities selected from the group consisting of transcriptional regulator in an organelle, preferably in plastids or mitochondria, especially in plastids, of a non-human organism or a part thereof, preferably a microorganism, a plant cell, a plant or a part thereof, as compared to a corresponding non-transformed wild type non-human organism or a part thereof; and
[84131] (b) growing the non-human organism or a part thereof under conditions which permit the production of glucose or a composition comprising glucose in said non-human organism or in the culture medium surrounding said non-human organism.

[84132] A further embodiment of the present invention relates to a process for the production of glucose-1-phosphate, which comprises
[84133] (a) increasing or generating one or more activities selected from the group consisting of transcriptional regulator in an organelle, preferably in plastids or mitochondria, especially in plastids, of a non-human organism or a part thereof, preferably a microorganism, a plant cell, a plant or a part thereof, as compared to a corresponding non-transformed wild type non-human organism or a part thereof; and
[84134] (b) growing the non-human organism or a part thereof under conditions which permit the production of glucose-1-phosphate or a composition comprising glucose-1-phosphate in said non-human organism or in the culture medium surrounding said non-human organism.

[84135] A further embodiment of the present invention relates to a process for the production of glucose-1-phosphate, which comprises
[84136] (a) increasing or generating one or more activities selected from the group consisting of oxidoreductase in an organelle, preferably in plastids or mitochondria, especially in plastids, of a non-human organism or a part thereof, preferably a microorganism, a plant cell, a plant or a part thereof, as compared to a corresponding non-transformed wild type non-human organism or a part thereof; and
[84137] (b) growing the non-human organism or a part thereof under conditions which permit the production of glucose-1-phosphate or a composition comprising glucose-1-phosphate in said non-human organism or in the culture medium surrounding said non-human organism.

[84138] A further embodiment of the present invention relates to a process for the production of myo-inositol, which comprises
[84139] (a) increasing or generating one or more activities selected from the group consisting of ThiF family protein in an organelle, preferably in plastids or mitochondria, especially in plastids, of a non-human organism or a part thereof, preferably a microorganism, a plant cell, a plant or a part thereof, as compared to a corresponding non-transformed wild type non-human organism or a part thereof; and
[84140] (b) growing the non-human organism or a part thereof under conditions which permit the production of myo-inositol or a composition comprising myo-inositol in said non-human organism or in the culture medium surrounding said non-human organism.

[84141] A further embodiment of the present invention relates to a process for the production of fructose, which comprises
[84142] (a) increasing or generating one or more activities selected from the group consisting of CTP synthase in an organelle, preferably in plastids or mitochondria, especially in plastids, of a non-human organism or a part thereof, preferably a microorganism, a plant cell, a plant or a part thereof, as compared to a corresponding non-transformed wild type non-human organism or a part thereof; and
[84143] (b) growing the non-human organism or a part thereof under conditions which permit the production of fructose or a composition comprising fructose in said non-human organism or in the culture medium surrounding said non-human organism.

[84144] A further embodiment of the present invention relates to a process for the production of glucose, which comprises
[84145] (a) increasing or generating one or more activities selected from the group consisting of CTP synthase in an organelle, preferably in plastids or mitochondria, especially in plastids, of a non-human organism or a part thereof, preferably a microorganism, a plant cell, a plant or a part thereof, as compared to a corresponding non-transformed wild type non-human organism or a part thereof; and
[84146] (b) growing the non-human organism or a part thereof under conditions which permit the production of glucose or a composition comprising glucose in said non-human organism or in the culture medium surrounding said non-human organism.

[84147] A further embodiment of the present invention relates to a process for the production of sucrose, which comprises
[84148] (a) increasing or generating one or more activities selected from the group consisting of CTP synthase in an organelle, preferably in plastids or mitochondria, especially in plastids, of a non-human organism or a part thereof, preferably a microorganism, a plant cell, a plant or a part thereof, as compared to a corresponding non-transformed wild type non-human organism or a part thereof; and
[84149] (b) growing the non-human organism or a part thereof under conditions which permit the production of sucrose or a composition comprising sucrose in said non-human organism or in the culture medium surrounding said non-human organism.

[84150] A further embodiment of the present invention relates to a process for the production of raffinose, which comprises
[84151] (a) increasing or generating one or more activities selected from the group consisting of protein-L-isoaspartate O-methyltransferase in an organelle, preferably in plastids or mitochondria, especially in plastids, of a non-human organism or a part thereof, preferably a microorganism, a plant cell, a plant or a part thereof, as compared to a corresponding non-transformed wild type non-human organism or a part thereof; and
[84152] (b) growing the non-human organism or a part thereof under conditions which permit the production of raffinose or a composition comprising raffinose in said non-human organism or in the culture medium surrounding said non-human organism.

[84153] A further embodiment of the present invention relates to a process for the production of myo-inositol, which comprises
[84154] (a) increasing or generating one or more activities selected from the group consisting of recombinase A in an organelle, preferably in plastids or mitochondria, especially in plastids, of a non-human organism or a part thereof, preferably a microorganism, a plant cell, a plant or a part thereof, as compared to a corresponding non-transformed wild type non-human organism or a part thereof; and
[84155] (b) growing the non-human organism or a part thereof under conditions which permit the production of myo-inositol or a composition comprising myo-inositol in said non-human organism or in the culture medium surrounding said non-human organism.

[84156] A further embodiment of the present invention relates to a process for the production of raffinose, which comprises
[84157] (a) increasing or generating one or more activities selected from the group consisting of recombinase A in an organelle, preferably in plastids or mitochondria, especially in plastids, of a non-human organism or a part thereof, preferably a microorganism, a plant cell, a plant or a part thereof, as compared to a corresponding non-transformed wild type non-human organism or a part thereof; and
[84158] (b) growing the non-human organism or a part thereof under conditions which permit the production of raffinose or a composition comprising raffinose in said non-human organism or in the culture medium surrounding said non-human organism.

[84159] A further embodiment of the present invention relates to a process for the production of myo-inositol, which comprises
[84160] (a) increasing or generating one or more activities selected from the group consisting of acetyltransferase in an organelle, preferably in plastids or mitochondria, especially in plastids, of a non-human organism or a part thereof, preferably a microorganism, a plant cell, a plant or a part thereof, as compared to a corresponding non-transformed wild type non-human organism or a part thereof; and
[84161] (b) growing the non-human organism or a part thereof under conditions which permit the production of myo-inositol or a composition comprising myo-inositol in said non-human organism or in the culture medium surrounding said non-human organism.

[84162] A further embodiment of the present invention relates to a process for the production of raffinose, which comprises
[84163] (a) increasing or generating one or more activities selected from the group consisting of acetyltransferase in an organelle, preferably in plastids or mitochondria, especially in plastids, of a non-human organism or a part thereof, preferably a microorganism, a plant cell, a plant or a part thereof, as compared to a corresponding non-transformed wild type non-human organism or a part thereof; and
[84164] (b) growing the non-human organism or a part thereof under conditions which permit the production of raffinose or a composition comprising raffinose in said non-human organism or in the culture medium surrounding said non-human organism.

[84165] A further embodiment of the present invention relates to a process for the production of raffinose, which comprises
[84166] (a) increasing or generating one or more activities selected from the group consisting of enoyl-CoA hydratase in an organelle, preferably in plastids or mitochondria, especially in plastids, of a non-human organism or a part thereof, preferably a microorganism, a plant cell, a plant or a part thereof, as compared to a corresponding non-transformed wild type non-human organism or a part thereof; and
[84167] (b) growing the non-human organism or a part thereof under conditions which permit the production of raffinose or a composition comprising raffinose in said non-human organism or in the culture medium surrounding said non-human organism.

[84168] A further embodiment of the present invention relates to a process for the production of fructose, which comprises
[84169] (a) increasing or generating one or more activities selected from the group consisting of NADH-quinone oxidoreductase subunit in an organelle, preferably in plastids or mitochondria, especially in plastids, of a non-human organism or a part thereof, preferably a microorganism, a plant cell, a plant or a part thereof, as compared to a corresponding non-transformed wild type non-human organism or a part thereof; and
[84170] (b) growing the non-human organism or a part thereof under conditions which permit the production of fructose or a composition comprising fructose in said non-human organism or in the culture medium surrounding said non-human organism.

[84171] A further embodiment of the present invention relates to a process for the production of glucose-1-phosphate, which comprises
[84172] (a) increasing or generating one or more activities selected from the group consisting of NADH-quinone oxidoreductase subunit in an organelle, preferably in plastids or mitochondria, especially in plastids, of a non-human organism or a part thereof, preferably a microorganism, a plant cell, a plant or a part thereof, as compared to a corresponding non-transformed wild type non-human organism or a part thereof; and
[84173] (b) growing the non-human organism or a part thereof under conditions which permit the production of glucose-1-phosphate or a composition comprising glucose-1-phosphate in said non-human organism or in the culture medium surrounding said non-human organism.

[84174] A further embodiment of the present invention relates to a process for the production of sucrose, which comprises
[84175] (a) increasing or generating one or more activities selected from the group consisting of NADH-quinone oxidoreductase subunit in an organelle, preferably in plastids or mitochondria, especially in plastids, of a non-human organism or a part thereof, preferably a microorganism, a plant cell, a plant or a part thereof, as compared to a corresponding non-transformed wild type non-human organism or a part thereof; and
[84176] (b) growing the non-human organism or a part thereof under conditions which permit the production of sucrose or a composition comprising sucrose in said non-human organism or in the culture medium surrounding said non-human organism.

[84177] A further embodiment of the present invention relates to a process for the production of 3,4,5-trihydroxypentanoic acid, which comprises
[84178] (a) increasing or generating one or more activities selected from the group consisting of isopropylmalate isomerase large subunit in an organelle, preferably in plastids or mitochondria, especially in plastids, of a non-human organism or a part thereof, preferably a microorganism, a plant cell, a plant or a part thereof, as compared to a corresponding non-transformed wild type non-human organism or a part thereof; and
[84179] (b) growing the non-human organism or a part thereof under conditions which permit the production of 3,4,5-trihydroxypentanoic acid or a composition comprising 3,4,5-trihydroxypentanoic acid in said non-human organism or in the culture medium surrounding said non-human organism.

[84180] A further embodiment of the present invention relates to a process for the production of fructose, which comprises
[84181] (a) increasing or generating one or more activities selected from the group consisting of hydrolase in an organelle, preferably in plastids or mitochondria, especially in plastids, of a non-human organism or a part thereof, preferably a microorganism, a plant cell, a plant or a part thereof, as compared to a corresponding non-transformed wild type non-human organism or a part thereof; and
[84182] (b) growing the non-human organism or a part thereof under conditions which permit the production of fructose or a composition comprising fructose in said non-human organism or in the culture medium surrounding said non-human organism.

[84183] A further embodiment of the present invention relates to a process for the production of glucose, which comprises
[84184] (a) increasing or generating one or more activities selected from the group consisting of hydrolase in an organelle, preferably in plastids or mitochondria, especially in plastids, of a non-human organism or a part thereof, preferably a microorganism, a plant cell, a plant or a part thereof, as compared to a corresponding non-transformed wild type non-human organism or a part thereof; and
[84185] (b) growing the non-human organism or a part thereof under conditions which permit the production of glucose or a composition comprising glucose in said non-human organism or in the culture medium surrounding said non-human organism.

[84186] A further embodiment of the present invention relates to a process for the production of sucrose, which comprises
[84187] (a) increasing or generating one or more activities selected from the group consisting of hydrolase in an organelle, preferably in plastids or mitochondria, especially in plastids, of a non-human organism or a part thereof, preferably a microorganism, a plant cell, a plant or a part thereof, as compared to a corresponding non-transformed wild type non-human organism or a part thereof; and
[84188] (b) growing the non-human organism or a part thereof under conditions which permit the production of sucrose or a composition comprising sucrose in said non-human organism or in the culture medium surrounding said non-human organism.

[84189] A further embodiment of the present invention relates to a process for the production of fructose, which comprises
[84190] (a) increasing or generating one or more activities selected from the group consisting of glutamate-ammonia-ligase in an organelle, preferably in plastids or mitochondria, especially in plastids, of a non-human organism or a part thereof, preferably a microorganism, a plant cell, a plant or a part thereof, as compared to a corresponding non-transformed wild type non-human organism or a part thereof; and
[84191] (b) growing the non-human organism or a part thereof under conditions which permit the production of fructose or a composition comprising fructose in said non-human organism or in the culture medium surrounding said non-human organism.

[84192] A further embodiment of the present invention relates to a process for the production of glucose, which comprises
[84193] (a) increasing or generating one or more activities selected from the group consisting of glutamate-ammonia-ligase in an organelle, preferably in plastids or mitochondria, especially in plastids, of a non-human organism or a part thereof, preferably a microorganism, a plant cell, a plant or a part thereof, as compared to a corresponding non-transformed wild type non-human organism or a part thereof; and
[84194] (b) growing the non-human organism or a part thereof under conditions which permit the production of glucose or a composition comprising glucose in said non-human organism or in the culture medium surrounding said non-human organism.

[84195] A further embodiment of the present invention relates to a process for the production of sucrose, which comprises
[84196] (a) increasing or generating one or more activities selected from the group consisting of glutamate-ammonia-ligase in an organelle, preferably in plastids or mitochondria, especially in plastids, of a non-human organism or a part thereof, preferably a microorganism, a plant cell, a plant or a part thereof, as compared to a corresponding non-transformed wild type non-human organism or a part thereof; and
[84197] (b) growing the non-human organism or a part thereof under conditions which permit the production of sucrose or a composition comprising sucrose in said non-human organism or in the culture medium surrounding said non-human organism.

[84198] A further embodiment of the present invention relates to a process for the production of fructose, which comprises
[84199] (a) increasing or generating one or more activities selected from the group consisting of fumarylacetoacetate hydrolase in an organelle, preferably in plastids or mitochondria, especially in plastids, of a non-human organism or a part thereof, preferably a microorganism, a plant cell, a plant or a part thereof, as compared to a corresponding non-transformed wild type non-human organism or a part thereof; and
[84200] (b) growing the non-human organism or a part thereof under conditions which permit the production of fructose or a composition comprising fructose in said non-human organism or in the culture medium surrounding said non-human organism.

[84201] A further embodiment of the present invention relates to a process for the production of raffinose, which comprises
[84202] (a) increasing or generating one or more activities selected from the group consisting of glycosyltransferase in an organelle, preferably in plastids or mitochondria, especially in plastids, of a non-human organism or a part thereof, preferably a microorganism, a plant cell, a plant or a part thereof, as compared to a corresponding non-transformed wild type non-human organism or a part thereof; and
[84203] (b) growing the non-human organism or a part thereof under conditions which permit the production of raffinose or a composition comprising raffinose in said non-human organism or in the culture medium surrounding said non-human organism.

[84204] A further embodiment of the present invention relates to a process for the production of myo-inositol, which comprises
[84205] (a) increasing or generating one or more activities selected from the group consisting of peptidyl-prolyl cis-trans isomerase in an organelle, preferably in plastids or mitochondria, especially in plastids, of a non-human organism or a part thereof, preferably a microorganism, a plant cell, a plant or a part thereof, as compared to a corresponding non-transformed wild type non-human organism or a part thereof; and
[84206] (b) growing the non-human organism or a part thereof under conditions which permit the production of myo-inositol or a composition comprising myo-inositol in said non-human organism or in the culture medium surrounding said non-human organism.

[84207] A further embodiment of the present invention relates to a process for the production of 3,4,5-trihydroxypentanoic acid, which comprises
[84208] (a) increasing or generating one or more activities selected from the group consisting of NAD(P)H dehydrogenase (quinone) in an organelle, preferably in plastids or mitochondria, especially in plastids, of a non-human organism or a part thereof, preferably a microorganism, a plant cell, a plant or a part thereof, as compared to a corresponding non-transformed wild type non-human organism or a part thereof; and
[84209] (b) growing the non-human organism or a part thereof under conditions which permit the production of 3,4,5-trihydroxypentanoic acid or a composition comprising 3,4,5-trihydroxypentanoic acid in said non-human organism or in the culture medium surrounding said non-human organism.

[84210] A further embodiment of the present invention relates to a process for the production of fructose, which comprises
[84211] (a) increasing or generating one or more activities selected from the group consisting of electron transfer flavoprotein subunit beta in an organelle, preferably in plastids or mitochondria, especially in plastids, of a non-human organism or a part thereof, preferably a microorganism, a plant cell, a plant or a part thereof, as compared to a corresponding non-transformed wild type non-human organism or a part thereof; and
[84212] (b) growing the non-human organism or a part thereof under conditions which permit the production of fructose or a composition comprising fructose in said non-human organism or in the culture medium surrounding said non-human organism.

[84213] A further embodiment of the present invention relates to a process for the production of glucose, which comprises
[84214] (a) increasing or generating one or more activities selected from the group consisting of electron transfer flavoprotein subunit beta in an organelle, preferably in plastids or mitochondria, especially in plastids, of a non-human organism or a part thereof, preferably a microorganism, a plant cell, a plant or a part thereof, as compared to a corresponding non-transformed wild type non-human organism or a part thereof; and
[84215] (b) growing the non-human organism or a part thereof under conditions which permit the production of glucose or a composition comprising glucose in said non-human organism or in the culture medium surrounding said non-human organism.

[84216] A further embodiment of the present invention relates to a process for the production of glucose-1-phosphate, which comprises
[84217] (a) increasing or generating one or more activities selected from the group consisting of purine nucleoside phosphorylase in an organelle, preferably in plastids or mitochondria, especially in plastids, of a non-human organism or a part thereof, preferably a microorganism, a plant cell, a plant or a part thereof, as compared to a corresponding non-transformed wild type non-human organism or a part thereof; and
[84218] (b) growing the non-human organism or a part thereof under conditions which permit the production of glucose-1-phosphate or a composition comprising glucose-1-phosphate in said non-human organism or in the culture medium surrounding said non-human organism.

[84219] A further embodiment of the present invention relates to a process for the production of 3,4,5-trihydroxypentanoic acid, which comprises
[84220] (a) increasing or generating one or more activities selected from the group consisting of purine nucleoside phosphorylase in an organelle, preferably in plastids or mitochondria, especially in plastids, of a non-human organism or a part thereof, preferably a microorganism, a plant cell, a plant or a part thereof, as compared to a corresponding non-transformed wild type non-human organism or a part thereof; and
[84221] (b) growing the non-human organism or a part thereof under conditions which permit the production of 3,4,5-trihydroxypentanoic acid or a composition comprising 3,4,5-trihydroxypentanoic acid in said non-human organism or in the culture medium surrounding said non-human organism.

[84222] A further embodiment of the present invention relates to a process for the production of raffinose, which comprises
[84223] (a) increasing or generating one or more activities selected from the group consisting of transcriptional regulator protein in an organelle, preferably in plastids or mitochondria, especially in plastids, of a non-human organism or a part thereof, preferably a microorganism, a plant cell, a plant or a part thereof, as compared to a corresponding non-transformed wild type non-human organism or a part thereof; and
[84224] (b) growing the non-human organism or a part thereof under conditions which permit the production of raffinose or a composition comprising raffinose in said non-human organism or in the culture medium surrounding said non-human organism.

[84225] A further embodiment of the present invention relates to a process for the production of glucose-1-phosphate, which comprises
[84226] (a) increasing or generating one or more activities selected from the group consisting of AX653549-protein in an organelle, preferably in plastids or mitochondria, especially in plastids, of a non-human organism or a part thereof, preferably a microorganism, a plant cell, a plant or a part thereof, as compared to a corresponding non-transformed wild type non-human organism or a part thereof; and
[84227] (b) growing the non-human organism or a part thereof under conditions which permit the production of glucose-1-phosphate or a composition comprising glucose-1-phosphate in said non-human organism or in the culture medium surrounding said non-human organism.

[84228] A further embodiment of the present invention relates to a process for the production of glucose-1-phosphate, which comprises
[84229] (a) increasing or generating one or more activities selected from the group consisting of AY087308-protein in an organelle, preferably in plastids or mitochondria, especially in plastids, of a non-human organism or a part thereof, preferably a microorganism, a plant cell, a plant or a part thereof, as compared to a corresponding non-transformed wild type non-human organism or a part thereof; and
[84230] (b) growing the non-human organism or a part thereof under conditions which permit the production of glucose-1-phosphate or a composition comprising glucose-1-phosphate in said non-human organism or in the culture medium surrounding said non-human organism.

[84231] A further embodiment of the present invention relates to a process for the production of myo-inositol, which comprises
[84232] (a) increasing or generating one or more activities selected from the group consisting of AY087308-protein in an organelle, preferably in plastids or mitochondria, especially in plastids, of a non-human organism or a part thereof, preferably a microorganism, a plant cell, a plant or a part thereof, as compared to a corresponding non-transformed wild type non-human organism or a part thereof; and
[84233] (b) growing the non-human organism or a part thereof under conditions which permit the production of myo-inositol or a composition comprising myo-inositol in said non-human organism or in the culture medium surrounding said non-human organism.

[84234] A further embodiment of the present invention relates to a process for the production of glucose-1-phosphate, which comprises
[84235] (a) increasing or generating one or more activities selected from the group consisting of pyruvate kinase in an organelle, preferably in plastids or mitochondria, especially in plastids, of a non-human organism or a part thereof, preferably a microorganism, a plant cell, a plant or a part thereof, as compared to a corresponding non-transformed wild type non-human organism or a part thereof; and
[84236] (b) growing the non-human organism or a part thereof under conditions which permit the production of glucose-1-phosphate or a composition comprising glucose-1-phosphate in said non-human organism or in the culture medium surrounding said non-human organism.

[84237] A further embodiment of the present invention relates to a process for the production of 3,4,5-trihydroxypentanoic acid, which comprises
[84238] (a) increasing or generating one or more activities selected from the group consisting of pyruvate kinase in an organelle, preferably in plastids or mitochondria, especially in plastids, of a non-human organism or a part thereof, preferably a microorganism, a plant cell, a plant or a part thereof, as compared to a corresponding non-transformed wild type non-human organism or a part thereof; and
[84239] (b) growing the non-human organism or a part thereof under conditions which permit the production of 3,4,5-trihydroxypentanoic acid or a composition comprising 3,4,5-trihydroxypentanoic acid in said non-human organism or in the culture medium surrounding said non-human organism.

[84240] A further embodiment of the present invention relates to a process for the production of glucose, which comprises
[84241] (a) increasing or generating one or more activities selected from the group consisting of threonine synthase in an organelle, preferably in plastids or mitochondria, especially in plastids, of a non-human organism or a part thereof, preferably a microorganism, a plant cell, a plant or a part thereof, as compared to a corresponding non-transformed wild type non-human organism or a part thereof; and
[84242] (b) growing the non-human organism or a part thereof under conditions which permit the production of glucose or a composition comprising glucose in said non-human organism or in the culture medium surrounding said non-human organism.

[84243] A further embodiment of the present invention relates to a process for the production of sucrose, which comprises
[84244] (a) increasing or generating one or more activities selected from the group consisting of threonine synthase in an organelle, preferably in plastids or mitochondria, especially in plastids, of a non-human organism or a part thereof, preferably a microorganism, a plant cell, a plant or a part thereof, as compared to a corresponding non-transformed wild type non-human organism or a part thereof; and
[84245] (b) growing the non-human organism or a part thereof under conditions which permit the production of sucrose or a composition comprising sucrose in said non-human organism or in the culture medium surrounding said non-human organism.

[84246] A further embodiment of the present invention relates to a process for the production of 3,4,5-trihydroxypentanoic acid, which comprises
[84247] (a) increasing or generating one or more activities selected from the group consisting of b0050-protein in an organelle, preferably in plastids or mitochondria, especially in plastids, of a non-human organism or a part thereof, preferably a microorganism, a plant cell, a plant or a part thereof, as compared to a corresponding non-transformed wild type non-human organism or a part thereof; and
[84248] (b) growing the non-human organism or a part thereof under conditions which permit the production of 3,4,5-trihydroxypentanoic acid or a composition comprising 3,4,5-trihydroxypentanoic acid in said non-human organism or in the culture medium surrounding said non-human organism.

[84249] A further embodiment of the present invention relates to a process for the production of raffinose, which comprises
[84250] (a) increasing or generating one or more activities selected from the group consisting of L-ribulose-5-phosphate 4-epimerase in an organelle, preferably in plastids or mitochondria, especially in plastids, of a non-human organism or a part thereof, preferably a microorganism, a plant cell, a plant or a part thereof, as compared to a corresponding non-transformed wild type non-human organism or a part thereof; and
[84251] (b) growing the non-human organism or a part thereof under conditions which permit the production of raffinose or a composition comprising raffinose in said non-human organism or in the culture medium surrounding said non-human organism.

[84252] A further embodiment of the present invention relates to a process for the production of sucrose, which comprises
[84253] (a) increasing or generating one or more activities selected from the group consisting of glucose dehydrogenase in an organelle, preferably in plastids or mitochondria, especially in plastids, of a non-human organism or a part thereof, preferably a microorganism, a plant cell, a plant or a part thereof, as compared to a corresponding non-transformed wild type non-human organism or a part thereof; and
[84254] (b) growing the non-human organism or a part thereof under conditions which permit the production of sucrose or a composition comprising sucrose in said non-human organism or in the culture medium surrounding said non-human organism.

[84255] A further embodiment of the present invention relates to a process for the production of glucose-1-phosphate, which comprises
[84256] (a) increasing or generating one or more activities selected from the group consisting of serine protease in an organelle, preferably in plastids or mitochondria, especially in plastids, of a non-human organism or a part thereof, preferably a microorganism, a plant cell, a plant or a part thereof, as compared to a corresponding non-transformed wild type non-human organism or a part thereof; and
[84257] (b) growing the non-human organism or a part thereof under conditions which permit the production of glucose-1-phosphate or a composition comprising glucose-1-phosphate in said non-human organism or in the culture medium surrounding said non-human organism.

[84258] A further embodiment of the present invention relates to a process for the production of myo-inositol, which comprises
[84259] (a) increasing or generating one or more activities selected from the group consisting of serine protease in an organelle, preferably in plastids or mitochondria, especially in plastids, of a non-human organism or a part thereof, preferably a microorganism, a plant cell, a plant or a part thereof, as compared to a corresponding non-transformed wild type non-human organism or a part thereof; and
[84260] (b) growing the non-human organism or a part thereof under conditions which permit the production of myo-inositol or a composition comprising myo-inositol in said non-human organism or in the culture medium surrounding said non-human organism.

[84261] A further embodiment of the present invention relates to a process for the production of sucrose, which comprises
[84262] (a) increasing or generating one or more activities selected from the group consisting of acyl-CoA dehydrogenase in an organelle, preferably in plastids or mitochondria, especially in plastids, of a non-human organism or a part thereof, preferably a microorganism, a plant cell, a plant or a part thereof, as compared to a corresponding non-transformed wild type non-human organism or a part thereof; and
[84263] (b) growing the non-human organism or a part thereof under conditions which permit the production of sucrose or a composition comprising sucrose in said non-human organism or in the culture medium surrounding said non-human organism.

[84264] A further embodiment of the present invention relates to a process for the production of glucose-1-phosphate, which comprises
[84265] (a) increasing or generating one or more activities selected from the group consisting of b0251-protein in an organelle, preferably in plastids or mitochondria, especially in plastids, of a non-human organism or a part thereof, preferably a microorganism, a plant cell, a plant or a part thereof, as compared to a corresponding non-transformed wild type non-human organism or a part thereof; and
[84266] (b) growing the non-human organism or a part thereof under conditions which permit the production of glucose-1-phosphate or a composition comprising glucose-1-phosphate in said non-human organism or in the culture medium surrounding said non-human organism.

[84267] A further embodiment of the present invention relates to a process for the production of fructose, which comprises
[84268] (a) increasing or generating one or more activities selected from the group consisting of betaine aldehyde dehydrogenase in an organelle, preferably in plastids or mitochondria, especially in plastids, of a non-human organism or a part thereof, preferably a microorganism, a plant cell, a plant or a part thereof, as compared to a corresponding non-transformed wild type non-human organism or a part thereof; and
[84269] (b) growing the non-human organism or a part thereof under conditions which permit the production of fructose or a composition comprising fructose in said non-human organism or in the culture medium surrounding said non-human organism.

[84270] A further embodiment of the present invention relates to a process for the production of melibiose, which comprises
[84271] (a) increasing or generating one or more activities selected from the group consisting of beta-galactosidase in an organelle, preferably in plastids or mitochondria, especially in plastids, of a non-human organism or a part thereof, preferably a microorganism, a plant cell, a plant or a part thereof, as compared to a corresponding non-transformed wild type non-human organism or a part thereof; and
[84272] (b) growing the non-human organism or a part thereof under conditions which permit the production of melibiose or a composition comprising melibiose in said non-human organism or in the culture medium surrounding said non-human organism.

[84273] A further embodiment of the present invention relates to a process for the production of glucose-1-phosphate, which comprises
[84274] (a) increasing or generating one or more activities selected from the group consisting of b0362-protein in an organelle, preferably in plastids or mitochondria, especially in plastids, of a non-human organism or a part thereof, preferably a microorganism, a plant cell, a plant or a part thereof, as compared to a corresponding non-transformed wild type non-human organism or a part thereof; and
[84275] (b) growing the non-human organism or a part thereof under conditions which permit the production of glucose-1-phosphate or a composition comprising glucose-1-phosphate in said non-human organism or in the culture medium surrounding said non-human organism.

[84276] A further embodiment of the present invention relates to a process for the production of glucose-1-phosphate, which comprises
[84277] (a) increasing or generating one or more activities selected from the group consisting of penicillin-binding protein in an organelle, preferably in plastids or mitochondria, especially in plastids, of a non-human organism or a part thereof, preferably a microorganism, a plant cell, a plant or a part thereof, as compared to a corresponding non-transformed wild type non-human organism or a part thereof; and
[84278] (b) growing the non-human organism or a part thereof under conditions which permit the production of glucose-1-phosphate or a composition comprising glucose-1-phosphate in said non-human organism or in the culture medium surrounding said non-human organism.

[84279] A further embodiment of the present invention relates to a process for the production of fructose, which comprises
[84280] (a) increasing or generating one or more activities selected from the group consisting of ATP-binding component of a transport system in an organelle, preferably in plastids or mitochondria, especially in plastids, of a non-human organism or a part thereof, preferably a microorganism, a plant cell, a plant or a part thereof, as compared to a corresponding non-transformed wild type non-human organism or a part thereof; and
[84281] (b) growing the non-human organism or a part thereof under conditions which permit the production of fructose or a composition comprising fructose in said non-human organism or in the culture medium surrounding said non-human organism.

[84282] A further embodiment of the present invention relates to a process for the production of glucose, which comprises
[84283] (a) increasing or generating one or more activities selected from the group consisting of ATP-binding component of a transport system in an organelle, preferably in plastids or mitochondria, especially in plastids, of a non-human organism or a part thereof, preferably a microorganism, a plant cell, a plant or a part thereof, as compared to a corresponding non-transformed wild type non-human organism or a part thereof; and
[84284] (b) growing the non-human organism or a part thereof under conditions which permit the production of glucose or a composition comprising glucose in said non-human organism or in the culture medium surrounding said non-human organism.

[84285] A further embodiment of the present invention relates to a process for the production of glucose, which comprises
[84286] (a) increasing or generating one or more activities selected from the group consisting of membrane transport protein in an organelle, preferably in plastids or mitochondria, especially in plastids, of a non-human organism or a part thereof, preferably a microorganism, a plant cell, a plant or a part thereof, as compared to a corresponding non-transformed wild type non-human organism or a part thereof; and
[84287] (b) growing the non-human organism or a part thereof under conditions which permit the production of glucose or a composition comprising glucose in said non-human organism or in the culture medium surrounding said non-human organism.

[84288] A further embodiment of the present invention relates to a process for the production of saccharic acid, which comprises
[84289] (a) increasing or generating one or more activities selected from the group consisting of b0488-protein in an organelle, preferably in plastids or mitochondria, especially in plastids, of a non-human organism or a part thereof, preferably a microorganism, a plant cell, a plant or a part thereof, as compared to a corresponding non-transformed wild type non-human organism or a part thereof; and
[84290] (b) growing the non-human organism or a part thereof under conditions which permit the production of saccharic acid or a composition comprising saccharic acid in said non-human organism or in the culture medium surrounding said non-human organism.

[84291] A further embodiment of the present invention relates to a process for the production of galactinol, which comprises
[84292] (a) increasing or generating one or more activities selected from the group consisting of glycerate kinase in an organelle, preferably in plastids or mitochondria, especially in plastids, of a non-human organism or a part thereof, preferably a microorganism, a plant cell, a plant or a part thereof, as compared to a corresponding non-transformed wild type non-human organism or a part thereof; and
[84293] (b) growing the non-human organism or a part thereof under conditions which permit the production of galactinol or a composition comprising galactinol in said non-human organism or in the culture medium surrounding said non-human organism.

[84294] A further embodiment of the present invention relates to a process for the production of fructose, which comprises
[84295] (a) increasing or generating one or more activities selected from the group consisting of isochorismate synthase in an organelle, preferably in plastids or mitochondria, especially in plastids, of a non-human organism or a part thereof, preferably a microorganism, a plant cell, a plant or a part thereof, as compared to a corresponding non-transformed wild type non-human organism or a part thereof; and
[84296] (b) growing the non-human organism or a part thereof under conditions which permit the production of fructose or a composition comprising fructose in said non-human organism or in the culture medium surrounding said non-human organism.

[84297] A further embodiment of the present invention relates to a process for the production of glucose, which comprises
[84298] (a) increasing or generating one or more activities selected from the group consisting of isochorismate synthase in an organelle, preferably in plastids or mitochondria, especially in plastids, of a non-human organism or a part thereof, preferably a microorganism, a plant cell, a plant or a part thereof, as compared to a corresponding non-transformed wild type non-human organism or a part thereof; and
[84299] (b) growing the non-human organism or a part thereof under conditions which permit the production of glucose or a composition comprising glucose in said non-human organism or in the culture medium surrounding said non-human organism.

[84300] A further embodiment of the present invention relates to a process for the production of raffinose, which comprises
[84301] (a) increasing or generating one or more activities selected from the group consisting of isochorismate synthase in an organelle, preferably in plastids or mitochondria, especially in plastids, of a non-human organism or a part thereof, preferably a microorganism, a plant cell, a plant or a part thereof, as compared to a corresponding non-transformed wild type non-human organism or a part thereof; and
[84302] (b) growing the non-human organism or a part thereof under conditions which permit the production of raffinose or a composition comprising raffinose in said non-human organism or in the culture medium surrounding said non-human organism.

[84303] A further embodiment of the present invention relates to a process for the production of sucrose, which comprises
[84304] (a) increasing or generating one or more activities selected from the group consisting of isochorismate synthase in an organelle, preferably in plastids or mitochondria, especially in plastids, of a non-human organism or a part thereof, preferably a microorganism, a plant cell, a plant or a part thereof, as compared to a corresponding non-transformed wild type non-human organism or a part thereof; and
[84305] (b) growing the non-human organism or a part thereof under conditions which permit the production of sucrose or a composition comprising sucrose in said non-human organism or in the culture medium surrounding said non-human organism.

[84306] A further embodiment of the present invention relates to a process for the production of 3,4,5-trihydroxypentanoic acid, which comprises
[84307] (a) increasing or generating one or more activities selected from the group consisting of B0644-protein in an organelle, preferably in plastids or mitochondria, especially in plastids, of a non-human organism or a part thereof, preferably a microorganism, a plant cell, a plant or a part thereof, as compared to a corresponding non-transformed wild type non-human organism or a part thereof; and
[84308] (b) growing the non-human organism or a part thereof under conditions which permit the production of 3,4,5-trihydroxypentanoic acid or a composition comprising 3,4,5-trihydroxypentanoic acid in said non-human organism or in the culture medium surrounding said non-human organism.

[84309] A further embodiment of the present invention relates to a process for the production of saccharic acid, which comprises
[84310] (a) increasing or generating one or more activities selected from the group consisting of pyrimidine-specific ribonucleoside hydrolase in an organelle, preferably in plastids or mitochondria, especially in plastids, of a non-human organism or a part thereof, preferably a microorganism, a plant cell, a plant or a part thereof, as compared to a corresponding non-transformed wild type non-human organism or a part thereof; and
[84311] (b) growing the non-human organism or a part thereof under conditions which permit the production of saccharic acid or a composition comprising saccharic acid in said non-human organism or in the culture medium surrounding said non-human organism.

[84312] A further embodiment of the present invention relates to a process for the production of erythrol, which comprises
[84313] (a) increasing or generating one or more activities selected from the group consisting of asparagine synthetase B in an organelle, preferably in plastids or mitochondria, especially in plastids, of a non-human organism or a part thereof, preferably a microorganism, a plant cell, a plant or a part thereof, as compared to a corresponding non-transformed wild type non-human organism or a part thereof; and
[84314] (b) growing the non-human organism or a part thereof under conditions which permit the production of erythrol or a composition comprising erythrol in said non-human organism or in the culture medium surrounding said non-human organism.

[84315] A further embodiment of the present invention relates to a process for the production of myo-inositol, which comprises
[84316] (a) increasing or generating one or more activities selected from the group consisting of sensor histidine kinase in an organelle, preferably in plastids or mitochondria, especially in plastids, of a non-human organism or a part thereof, preferably a microorganism, a plant cell, a plant or a part thereof, as compared to a corresponding non-transformed wild type non-human organism or a part thereof; and
[84317] (b) growing the non-human organism or a part thereof under conditions which permit the production of myo-inositol or a composition comprising myo-inositol in said non-human organism or in the culture medium surrounding said non-human organism.

[84318] A further embodiment of the present invention relates to a process for the production of myo-inositol, which comprises
[84319] (a) increasing or generating one or more activities selected from the group consisting of succinyl-CoA synthetase beta chain in an organelle, preferably in plastids or mitochondria, especially in plastids, of a non-human organism or a part thereof, preferably a microorganism, a plant cell, a plant or a part thereof, as compared to a corresponding non-transformed wild type non-human organism or a part thereof; and
[84320] (b) growing the non-human organism or a part thereof under conditions which permit the production of myo-inositol or a composition comprising myo-inositol in said non-human organism or in the culture medium surrounding said non-human organism.

[84321] A further embodiment of the present invention relates to a process for the production of fructose, which comprises
[84322] (a) increasing or generating one or more activities selected from the group consisting of zinc transporter in an organelle, preferably in plastids or mitochondria, especially in plastids, of a non-human organism or a part thereof, preferably a microorganism, a plant cell, a plant or a part thereof, as compared to a corresponding non-transformed wild type non-human organism or a part thereof; and
[84323] (b) growing the non-human organism or a part thereof under conditions which permit the production of fructose or a composition comprising fructose in said non-human organism or in the culture medium surrounding said non-human organism.

[84324] A further embodiment of the present invention relates to a process for the production of glucose, which comprises
[84325] (a) increasing or generating one or more activities selected from the group consisting of zinc transporter in an organelle, preferably in plastids or mitochondria, especially in plastids, of a non-human organism or a part thereof, preferably a microorganism, a plant cell, a plant or a part thereof, as compared to a corresponding non-transformed wild type non-human organism or a part thereof; and
[84326] (b) growing the non-human organism or a part thereof under conditions which permit the production of glucose or a composition comprising glucose in said non-human organism or in the culture medium surrounding said non-human organism.

[84327] A further embodiment of the present invention relates to a process for the production of glucose-1-phosphate, which comprises
[84328] (a) increasing or generating one or more activities selected from the group consisting of zinc transporter in an organelle, preferably in plastids or mitochondria, especially in plastids, of a non-human organism or a part thereof, preferably a microorganism, a plant cell, a plant or a part thereof, as compared to a corresponding non-transformed wild type non-human organism or a part thereof; and
[84329] (b) growing the non-human organism or a part thereof under conditions which permit the production of glucose-1-phosphate or a composition comprising glucose-1-phosphate in said non-human organism or in the culture medium surrounding said non-human organism.

[84330] A further embodiment of the present invention relates to a process for the production of raffinose, which comprises
[84331] (a) increasing or generating one or more activities selected from the group consisting of zinc transporter in an organelle, preferably in plastids or mitochondria, especially in plastids, of a non-human organism or a part thereof, preferably a microorganism, a plant cell, a plant or a part thereof, as compared to a corresponding non-transformed wild type non-human organism or a part thereof; and
[84332] (b) growing the non-human organism or a part thereof under conditions which permit the production of raffinose or a composition comprising raffinose in said non-human organism or in the culture medium surrounding said non-human organism.

[84333] A further embodiment of the present invention relates to a process for the production of glucose, which comprises
[84334] (a) increasing or generating one or more activities selected from the group consisting of b0801-protein in an organelle, preferably in plastids or mitochondria, especially in plastids, of a non-human organism or a part thereof, preferably a microorganism, a plant cell, a plant or a part thereof, as compared to a corresponding non-transformed wild type non-human organism or a part thereof; and
[84335] (b) growing the non-human organism or a part thereof under conditions which permit the production of glucose or a composition comprising glucose in said non-human organism or in the culture medium surrounding said non-human organism.

[84336] A further embodiment of the present invention relates to a process for the production of sedoheptulose-7-phosphate, which comprises
[84337] (a) increasing or generating one or more activities selected from the group consisting of putrescine transport system permease protein in an organelle, preferably in plastids or mitochondria, especially in plastids, of a non-human organism or a part thereof, preferably a microorganism, a plant cell, a plant or a part thereof, as compared to a corresponding non-transformed wild type non-human organism or a part thereof; and
[84338] (b) growing the non-human organism or a part thereof under conditions which permit the production of sedoheptulose-7-phosphate or a composition comprising sedoheptulose-7-phosphate in said non-human organism or in the culture medium surrounding said non-human organism.

[84339] A further embodiment of the present invention relates to a process for the production of raffinose, which comprises
[84340] (a) increasing or generating one or more activities selected from the group consisting of leucyl/phenylalanyl-tRNA-protein transferase in an organelle, preferably in plastids or mitochondria, especially in plastids, of a non-human organism or a part thereof, preferably a microorganism, a plant cell, a plant or a part thereof, as compared to a corresponding non-transformed wild type non-human organism or a part thereof; and
[84341] (b) growing the non-human organism or a part thereof under conditions which permit the production of raffinose or a composition comprising raffinose in said non-human organism or in the culture medium surrounding said non-human organism.

[84342] A further embodiment of the present invention relates to a process for the production of glucose-1-phosphate, which comprises
[84343] (a) increasing or generating one or more activities selected from the group consisting of b0970-protein in an organelle, preferably in plastids or mitochondria, especially in plastids, of a non-human organism or a part thereof, preferably a microorganism, a plant cell, a plant or a part thereof, as compared to a corresponding non-transformed wild type non-human organism or a part thereof; and
[84344] (b) growing the non-human organism or a part thereof under conditions which permit the production of glucose-1-phosphate or a composition comprising glucose-1-phosphate in said non-human organism or in the culture medium surrounding said non-human organism.

[84345] A further embodiment of the present invention relates to a process for the production of myo-inositol, which comprises
[84346] (a) increasing or generating one or more activities selected from the group consisting of phosphoanhydride phosphorylase in an organelle, preferably in plastids or mitochondria, especially in plastids, of a non-human organism or a part thereof, preferably a microorganism, a plant cell, a plant or a part thereof, as compared to a corresponding non-transformed wild type non-human organism or a part thereof; and
[84347] (b) growing the non-human organism or a part thereof under conditions which permit the production of myo-inositol or a composition comprising myo-inositol in said non-human organism or in the culture medium surrounding said non-human organism.

[84348] A further embodiment of the present invention relates to a process for the production of fructose, which comprises
[84349] (a) increasing or generating one or more activities selected from the group consisting of b1003-protein in an organelle, preferably in plastids or mitochondria, especially in plastids, of a non-human organism or a part thereof, preferably a microorganism, a plant cell, a plant or a part thereof, as compared to a corresponding non-transformed wild type non-human organism or a part thereof; and
[84350] (b) growing the non-human organism or a part thereof under conditions which permit the production of fructose or a composition comprising fructose in said non-human organism or in the culture medium surrounding said non-human organism.

[84351] A further embodiment of the present invention relates to a process for the production of glucose, which comprises
[84352] (a) increasing or generating one or more activities selected from the group consisting of b1003-protein in an organelle, preferably in plastids or mitochondria, especially in plastids, of a non-human organism or a part thereof, preferably a microorganism, a plant cell, a plant or a part thereof, as compared to a corresponding non-transformed wild type non-human organism or a part thereof; and
[84353] (b) growing the non-human organism or a part thereof under conditions which permit the production of glucose or a composition comprising glucose in said non-human organism or in the culture medium surrounding said non-human organism.

[84354] A further embodiment of the present invention relates to a process for the production of glucose-1-phosphate, which comprises
[84355] (a) increasing or generating one or more activities selected from the group consisting of b1003-protein in an organelle, preferably in plastids or mitochondria, especially in plastids, of a non-human organism or a part thereof, preferably a microorganism, a plant cell, a plant or a part thereof, as compared to a corresponding non-transformed wild type non-human organism or a part thereof; and
[84356] (b) growing the non-human organism or a part thereof under conditions which permit the production of glucose-1-phosphate or a composition comprising glucose-1-phosphate in said non-human organism or in the culture medium surrounding said non-human organism.

[84357] A further embodiment of the present invention relates to a process for the production of sedoheptulose-7-phosphate, which comprises
[84358] (a) increasing or generating one or more activities selected from the group consisting of b1003-protein in an organelle, preferably in plastids or mitochondria, especially in plastids, of a non-human organism or a part thereof, preferably a microorganism, a plant cell, a plant or a part thereof, as compared to a corresponding non-transformed wild type non-human organism or a part thereof; and
[84359] (b) growing the non-human organism or a part thereof under conditions which permit the production of sedoheptulose-7-phosphate or a composition comprising sedoheptulose-7-phosphate in said non-human organism or in the culture medium surrounding said non-human organism.

[84360] A further embodiment of the present invention relates to a process for the production of sucrose, which comprises
[84361] (a) increasing or generating one or more activities selected from the group consisting of b1003-protein in an organelle, preferably in plastids or mitochondria, especially in plastids, of a non-human organism or a part thereof, preferably a microorganism, a plant cell, a plant or a part thereof, as compared to a corresponding non-transformed wild type non-human organism or a part thereof; and
[84362] (b) growing the non-human organism or a part thereof under conditions which permit the production of sucrose or a composition comprising sucrose in said non-human organism or in the culture medium surrounding said non-human organism.

[84363] A further embodiment of the present invention relates to a process for the production of 3,4,5-trihydroxypentanoic acid, which comprises
[84364] (a) increasing or generating one or more activities selected from the group consisting of b1046-protein in an organelle, preferably in plastids or mitochondria, especially in plastids, of a non-human organism or a part thereof, preferably a microorganism, a plant cell, a plant or a part thereof, as compared to a corresponding non-transformed wild type non-human organism or a part thereof; and
[84365] (b) growing the non-human organism or a part thereof under conditions which permit the production of 3,4,5-trihydroxypentanoic acid or a composition comprising 3,4,5-trihydroxypentanoic acid in said non-human organism or in the culture medium surrounding said non-human organism.

[84366] A further embodiment of the present invention relates to a process for the production of glucose-1-phosphate, which comprises
[84367] (a) increasing or generating one or more activities selected from the group consisting of multidrug resistance protein in an organelle, preferably in plastids or mitochondria, especially in plastids, of a non-human organism or a part thereof, preferably a microorganism, a plant cell, a plant or a part thereof, as compared to a corresponding non-transformed wild type non-human organism or a part thereof; and
[84368] (b) growing the non-human organism or a part thereof under conditions which permit the production of glucose-1-phosphate or a composition comprising glucose-1-phosphate in said non-human organism or in the culture medium surrounding said non-human organism.

[84369] A further embodiment of the present invention relates to a process for the production of sucrose, which comprises
[84370] (a) increasing or generating one or more activities selected from the group consisting of multidrug resistance protein in an organelle, preferably in plastids or mitochondria, especially in plastids, of a non-human organism or a part thereof, preferably a microorganism, a plant cell, a plant or a part thereof, as compared to a corresponding non-transformed wild type non-human organism or a part thereof; and
[84371] (b) growing the non-human organism or a part thereof under conditions which permit the production of sucrose or a composition comprising sucrose in said non-human organism or in the culture medium surrounding said non-human organism.

[84372] A further embodiment of the present invention relates to a process for the production of fructose, which comprises
[84373] (a) increasing or generating one or more activities selected from the group consisting of outer membrane receptor protein precursor in an organelle, preferably in plastids or mitochondria, especially in plastids, of a non-human organism or a part thereof, preferably a microorganism, a plant cell, a plant or a part thereof, as compared to a corresponding non-transformed wild type non-human organism or a part thereof; and
[84374] (b) growing the non-human organism or a part thereof under conditions which permit the production of fructose or a composition comprising fructose in said non-human organism or in the culture medium surrounding said non-human organism.

[84375] A further embodiment of the present invention relates to a process for the production of glucose-1-phosphate, which comprises
[84376] (a) increasing or generating one or more activities selected from the group consisting of adenylosuccinate lyase in an organelle, preferably in plastids or mitochondria, especially in plastids, of a non-human organism or a part thereof, preferably a microorganism, a plant cell, a plant or a part thereof, as compared to a corresponding non-transformed wild type non-human organism or a part thereof; and
[84377] (b) growing the non-human organism or a part thereof under conditions which permit the production of glucose-1-phosphate or a composition comprising glucose-1-phosphate in said non-human organism or in the culture medium surrounding said non-human organism.

[84378] A further embodiment of the present invention relates to a process for the production of glucose, which comprises
[84379] (a) increasing or generating one or more activities selected from the group consisting of isocitrate dehydrogenase in an organelle, preferably in plastids or mitochondria, especially in plastids, of a non-human organism or a part thereof, preferably a microorganism, a plant cell, a plant or a part thereof, as compared to a corresponding non-transformed wild type non-human organism or a part thereof; and
[84380] (b) growing the non-human organism or a part thereof under conditions which permit the production of glucose or a composition comprising glucose in said non-human organism or in the culture medium surrounding said non-human organism.

[84381] A further embodiment of the present invention relates to a process for the production of glucose-1-phosphate, which comprises
[84382] (a) increasing or generating one or more activities selected from the group consisting of b1137-protein in an organelle, preferably in plastids or mitochondria, especially in plastids, of a non-human organism or a part thereof, preferably a microorganism, a plant cell, a plant or a part thereof, as compared to a corresponding non-transformed wild type non-human organism or a part thereof; and
[84383] (b) growing the non-human organism or a part thereof under conditions which permit the production of glucose-1-phosphate or a composition comprising glucose-1-phosphate in said non-human organism or in the culture medium surrounding said non-human organism.

[84384] A further embodiment of the present invention relates to a process for the production of glucose-1-phosphate, which comprises
[84385] (a) increasing or generating one or more activities selected from the group consisting of sodium/proton antiporter in an organelle, preferably in plastids or mitochondria, especially in plastids, of a non-human organism or a part thereof, preferably a microorganism, a plant cell, a plant or a part thereof, as compared to a corresponding non-transformed wild type non-human organism or a part thereof; and
[84386] (b) growing the non-human organism or a part thereof under conditions which permit the production of glucose-1-phosphate or a composition comprising glucose-1-phosphate in said non-human organism or in the culture medium surrounding said non-human organism.

[84387] A further embodiment of the present invention relates to a process for the production of glucose-1-phosphate, which comprises
[84388] (a) increasing or generating one or more activities selected from the group consisting of b1214-protein in an organelle, preferably in plastids or mitochondria, especially in plastids, of a non-human organism or a part thereof, preferably a microorganism, a plant cell, a plant or a part thereof, as compared to a corresponding non-transformed wild type non-human organism or a part thereof; and
[84389] (b) growing the non-human organism or a part thereof under conditions which permit the production of glucose-1-phosphate or a composition comprising glucose-1-phosphate in said non-human organism or in the culture medium surrounding said non-human organism.

[84390] A further embodiment of the present invention relates to a process for the production of 3,4,5-trihydroxypentanoic acid, which comprises
[84391] (a) increasing or generating one or more activities selected from the group consisting of b1214-protein in an organelle, preferably in plastids or mitochondria, especially in plastids, of a non-human organism or a part thereof, preferably a microorganism, a plant cell, a plant or a part thereof, as compared to a corresponding non-transformed wild type non-human organism or a part thereof; and
[84392] (b) growing the non-human organism or a part thereof under conditions which permit the production of 3,4,5-trihydroxypentanoic acid or a composition comprising 3,4,5-trihydroxypentanoic acid in said non-human organism or in the culture medium surrounding said non-human organism.

[84393] A further embodiment of the present invention relates to a process for the production of glucose-1-phosphate, which comprises
[84394] (a) increasing or generating one or more activities selected from the group consisting of b1219-protein in an organelle, preferably in plastids or mitochondria, especially in plastids, of a non-human organism or a part thereof, preferably a microorganism, a plant cell, a plant or a part thereof, as compared to a corresponding non-transformed wild type non-human organism or a part thereof; and
[84395] (b) growing the non-human organism or a part thereof under conditions which permit the production of glucose-1-phosphate or a composition comprising glucose-1-phosphate in said non-human organism or in the culture medium surrounding said non-human organism.

[84396] A further embodiment of the present invention relates to a process for the production of myo-inositol, which comprises
[84397] (a) increasing or generating one or more activities selected from the group consisting of b1219-protein in an organelle, preferably in plastids or mitochondria, especially in plastids, of a non-human organism or a part thereof, preferably a microorganism, a plant cell, a plant or a part thereof, as compared to a corresponding non-transformed wild type non-human organism or a part thereof; and
[84398] (b) growing the non-human organism or a part thereof under conditions which permit the production of myo-inositol or a composition comprising myo-inositol in said non-human organism or in the culture medium surrounding said non-human organism.

[84399] A further embodiment of the present invention relates to a process for the production of 3,4,5-trihydroxypentanoic acid, which comprises
[84400] (a) increasing or generating one or more activities selected from the group consisting of b1219-protein in an organelle, preferably in plastids or mitochondria, especially in plastids, of a non-human organism or a part thereof, preferably a microorganism, a plant cell, a plant or a part thereof, as compared to a corresponding non-transformed wild type non-human organism or a part thereof; and
[84401] (b) growing the non-human organism or a part thereof under conditions which permit the production of 3,4,5-trihydroxypentanoic acid or a composition comprising 3,4,5-trihydroxypentanoic acid in said non-human organism or in the culture medium surrounding said non-human organism.

[84402] A further embodiment of the present invention relates to a process for the production of myo-inositol, which comprises
[84403] (a) increasing or generating one or more activities selected from the group consisting of b1234-protein in an organelle, preferably in plastids or mitochondria, especially in plastids, of a non-human organism or a part thereof, preferably a microorganism, a plant cell, a plant or a part thereof, as compared to a corresponding non-transformed wild type non-human organism or a part thereof; and
[84404] (b) growing the non-human organism or a part thereof under conditions which permit the production of myo-inositol or a composition comprising myo-inositol in said non-human organism or in the culture medium surrounding said non-human organism.

[84405] A further embodiment of the present invention relates to a process for the production of galactinol, which comprises
[84406] (a) increasing or generating one or more activities selected from the group consisting of cardiolipin synthase in an organelle, preferably in plastids or mitochondria, especially in plastids, of a non-human organism or a part thereof, preferably a microorganism, a plant cell, a plant or a part thereof, as compared to a corresponding non-transformed wild type non-human organism or a part thereof; and
[84407] (b) growing the non-human organism or a part thereof under conditions which permit the production of galactinol or a composition comprising galactinol in said non-human organism or in the culture medium surrounding said non-human organism.

[84408] A further embodiment of the present invention relates to a process for the production of galactitol, which comprises
[84409] (a) increasing or generating one or more activities selected from the group consisting of cardiolipin synthase in an organelle, preferably in plastids or mitochondria, especially in plastids, of a non-human organism or a part thereof, preferably a microorganism, a plant cell, a plant or a part thereof, as compared to a corresponding non-transformed wild type non-human organism or a part thereof; and
[84410] (b) growing the non-human organism or a part thereof under conditions which permit the production of galactitol or a composition comprising galactitol in said non-human organism or in the culture medium surrounding said non-human organism.

[84411] A further embodiment of the present invention relates to a process for the production of sorbitol, which comprises
[84412] (a) increasing or generating one or more activities selected from the group consisting of cardiolipin synthase in an organelle, preferably in plastids or mitochondria, especially in plastids, of a non-human organism or a part thereof, preferably a microorganism, a plant cell, a plant or a part thereof, as compared to a corresponding non-transformed wild type non-human organism or a part thereof; and
[84413] (b) growing the non-human organism or a part thereof under conditions which permit the production of sorbitol or a composition comprising sorbitol in said non-human organism or in the culture medium surrounding said non-human organism.

[84414] A further embodiment of the present invention relates to a process for the production of 3,4,5-trihydroxypentanoic acid, which comprises
[84415] (a) increasing or generating one or more activities selected from the group consisting of intracellular septation protein in an organelle, preferably in plastids or mitochondria, especially in plastids, of a non-human organism or a part thereof, preferably a microorganism, a plant cell, a plant or a part thereof, as compared to a corresponding non-transformed wild type non-human organism or a part thereof; and
[84416] (b) growing the non-human organism or a part thereof under conditions which permit the production of 3,4,5-trihydroxypentanoic acid or a composition comprising 3,4,5-trihydroxypentanoic acid in said non-human organism or in the culture medium surrounding said non-human organism.

[84417] A further embodiment of the present invention relates to a process for the production of fructose, which comprises
[84418] (a) increasing or generating one or more activities selected from the group consisting of membrane protein in an organelle, preferably in plastids or mitochondria, especially in plastids, of a non-human organism or a part thereof, preferably a microorganism, a plant cell, a plant or a part thereof, as compared to a corresponding non-transformed wild type non-human organism or a part thereof; and
[84419] (b) growing the non-human organism or a part thereof under conditions which permit the production of fructose or a composition comprising fructose in said non-human organism or in the culture medium surrounding said non-human organism.

[84420] A further embodiment of the present invention relates to a process for the production of glucose, which comprises
[84421] (a) increasing or generating one or more activities selected from the group consisting of membrane protein in an organelle, preferably in plastids or mitochondria, especially in plastids, of a non-human organism or a part thereof, preferably a microorganism, a plant cell, a plant or a part thereof, as compared to a corresponding non-transformed wild type non-human organism or a part thereof; and
[84422] (b) growing the non-human organism or a part thereof under conditions which permit the production of glucose or a composition comprising glucose in said non-human organism or in the culture medium surrounding said non-human organism.

[84423] A further embodiment of the present invention relates to a process for the production of raffinose, which comprises
[84424] (a) increasing or generating one or more activities selected from the group consisting of membrane protein in an organelle, preferably in plastids or mitochondria, especially in plastids, of a non-human organism or a part thereof, preferably a microorganism, a plant cell, a plant or a part thereof, as compared to a corresponding non-transformed wild type non-human organism or a part thereof; and
[84425] (b) growing the non-human organism or a part thereof under conditions which permit the production of raffinose or a composition comprising raffinose in said non-human organism or in the culture medium surrounding said non-human organism.

[84426] A further embodiment of the present invention relates to a process for the production of sucrose, which comprises
[84427] (a) increasing or generating one or more activities selected from the group consisting of membrane protein in an organelle, preferably in plastids or mitochondria, especially in plastids, of a non-human organism or a part thereof, preferably a microorganism, a plant cell, a plant or a part thereof, as compared to a corresponding non-transformed wild type non-human organism or a part thereof; and
[84428] (b) growing the non-human organism or a part thereof under conditions which permit the production of sucrose or a composition comprising sucrose in said non-human organism or in the culture medium surrounding said non-human organism.

[84429] A further embodiment of the present invention relates to a process for the production of myo-inositol, which comprises
[84430] (a) increasing or generating one or more activities selected from the group consisting of tryptophan biosynthesis protein in an organelle, preferably in plastids or mitochondria, especially in plastids, of a non-human organism or a part thereof, preferably a microorganism, a plant cell, a plant or a part thereof, as compared to a corresponding non-transformed wild type non-human organism or a part thereof; and
[84431] (b) growing the non-human organism or a part thereof under conditions which permit the production of myo-inositol or a composition comprising myo-inositol in said non-human organism or in the culture medium surrounding said non-human organism.

[84432] A further embodiment of the present invention relates to a process for the production of fructose, which comprises
[84433] (a) increasing or generating one or more activities selected from the group consisting of b1285-protein in an organelle, preferably in plastids or mitochondria, especially in plastids, of a non-human organism or a part thereof, preferably a microorganism, a plant cell, a plant or a part thereof, as compared to a corresponding non-transformed wild type non-human organism or a part thereof; and
[84434] (b) growing the non-human organism or a part thereof under conditions which permit the production of fructose or a composition comprising fructose in said non-human organism or in the culture medium surrounding said non-human organism.

[84435] A further embodiment of the present invention relates to a process for the production of glucose-1-phosphate, which comprises
[84436] (a) increasing or generating one or more activities selected from the group consisting of phage-related repressor protein in an organelle, preferably in plastids or mitochondria, especially in plastids, of a non-human organism or a part thereof, preferably a microorganism, a plant cell, a plant or a part thereof, as compared to a corresponding non-transformed wild type non-human organism or a part thereof; and
[84437] (b) growing the non-human organism or a part thereof under conditions which permit the production of glucose-1-phosphate or a composition comprising glucose-1-phosphate in said non-human organism or in the culture medium surrounding said non-human organism.

[84438] A further embodiment of the present invention relates to a process for the production of glucose-1-phosphate, which comprises
[84439] (a) increasing or generating one or more activities selected from the group consisting of b1357-protein in an organelle, preferably in plastids or mitochondria, especially in plastids, of a non-human organism or a part thereof, preferably a microorganism, a plant cell, a plant or a part thereof, as compared to a corresponding non-transformed wild type non-human organism or a part thereof; and
[84440] (b) growing the non-human organism or a part thereof under conditions which permit the production of glucose-1-phosphate or a composition comprising glucose-1-phosphate in said non-human organism or in the culture medium surrounding said non-human organism.

[84441] A further embodiment of the present invention relates to a process for the production of glucose, which comprises
[84442] (a) increasing or generating one or more activities selected from the group consisting of phenylacetic acid degradation protein in an organelle, preferably in plastids or mitochondria, especially in plastids, of a non-human organism or a part thereof, preferably a microorganism, a plant cell, a plant or a part thereof, as compared to a corresponding non-transformed wild type non-human organism or a part thereof; and
[84443] (b) growing the non-human organism or a part thereof under conditions which permit the production of glucose or a composition comprising glucose in said non-human organism or in the culture medium surrounding said non-human organism.

[84444] A further embodiment of the present invention relates to a process for the production of 3,4,5-trihydroxypentanoic acid, which comprises
[84445] (a) increasing or generating one or more activities selected from the group consisting of phenylacetic acid degradation protein in an organelle, preferably in plastids or mitochondria, especially in plastids, of a non-human organism or a part thereof, preferably a microorganism, a plant cell, a plant or a part thereof, as compared to a corresponding non-transformed wild type non-human organism or a part thereof; and
[84446] (b) growing the non-human organism or a part thereof under conditions which permit the production of 3,4,5-trihydroxypentanoic acid or a composition comprising 3,4,5-trihydroxypentanoic acid in said non-human organism or in the culture medium surrounding said non-human organism.

[84447] A further embodiment of the present invention relates to a process for the production of sedoheptulose-7-phosphate, which comprises
[84448] (a) increasing or generating one or more activities selected from the group consisting of b1410-protein in an organelle, preferably in plastids or mitochondria, especially in plastids, of a non-human organism or a part thereof, preferably a microorganism, a plant cell, a plant or a part thereof, as compared to a corresponding non-transformed wild type non-human organism or a part thereof; and
[84449] (b) growing the non-human organism or a part thereof under conditions which permit the production of sedoheptulose-7-phosphate or a composition comprising sedoheptulose-7-phosphate in said non-human organism or in the culture medium surrounding said non-human organism.

[84450] A further embodiment of the present invention relates to a process for the production of myo-inositol, which comprises
[84451] (a) increasing or generating one or more activities selected from the group consisting of b1425-protein in an organelle, preferably in plastids or mitochondria, especially in plastids, of a non-human organism or a part thereof, preferably a microorganism, a plant cell, a plant or a part thereof, as compared to a corresponding non-transformed wild type non-human organism or a part thereof; and
[84452] (b) growing the non-human organism or a part thereof under conditions which permit the production of myo-inositol or a composition comprising myo-inositol in said non-human organism or in the culture medium surrounding said non-human organism.

[84453] A further embodiment of the present invention relates to a process for the production of glucose-1-phosphate, which comprises
[84454] (a) increasing or generating one or more activities selected from the group consisting of lipoprotein precursor in an organelle, preferably in plastids or mitochondria, especially in plastids, of a non-human organism or a part thereof, preferably a microorganism, a plant cell, a plant or a part thereof, as compared to a corresponding non-transformed wild type non-human organism or a part thereof; and
[84455] (b) growing the non-human organism or a part thereof under conditions which permit the production of glucose-1-phosphate or a composition comprising glucose-1-phosphate in said non-human organism or in the culture medium surrounding said non-human organism.

[84456] A further embodiment of the present invention relates to a process for the production of sedoheptulose-7-phosphate, which comprises
[84457] (a) increasing or generating one or more activities selected from the group consisting of lipoprotein precursor in an organelle, preferably in plastids or mitochondria, especially in plastids, of a non-human organism or a part thereof, preferably a microorganism, a plant cell, a plant or a part thereof, as compared to a corresponding non-transformed wild type non-human organism or a part thereof; and
[84458] (b) growing the non-human organism or a part thereof under conditions which permit the production of sedoheptulose-7-phosphate or a composition comprising sedoheptulose-7-phosphate in said non-human organism or in the culture medium surrounding said non-human organism.

[84459] A further embodiment of the present invention relates to a process for the production of 3,4,5-trihydroxypentanoic acid, which comprises
[84460] (a) increasing or generating one or more activities selected from the group consisting of lipoprotein precursor in an organelle, preferably in plastids or mitochondria, especially in plastids, of a non-human organism or a part thereof, preferably a microorganism, a plant cell, a plant or a part thereof, as compared to a corresponding non-transformed wild type non-human organism or a part thereof; and
[84461] (b) growing the non-human organism or a part thereof under conditions which permit the production of 3,4,5-trihydroxypentanoic acid or a composition comprising 3,4,5-trihydroxypentanoic acid in said non-human organism or in the culture medium surrounding said non-human organism.

[84462] A further embodiment of the present invention relates to a process for the production of 3,4,5-trihydroxypentanoic acid, which comprises
[84463] (a) increasing or generating one or more activities selected from the group consisting of b1445-protein in an organelle, preferably in plastids or mitochondria, especially in plastids, of a non-human organism or a part thereof, preferably a microorganism, a plant cell, a plant or a part thereof, as compared to a corresponding non-transformed wild type non-human organism or a part thereof; and
[84464] (b) growing the non-human organism or a part thereof under conditions which permit the production of 3,4,5-trihydroxypentanoic acid or a composition comprising 3,4,5-trihydroxypentanoic acid in said non-human organism or in the culture medium surrounding said non-human organism.

[84465] A further embodiment of the present invention relates to a process for the production of glucose-1-phosphate, which comprises
[84466] (a) increasing or generating one or more activities selected from the group consisting of b1470-protein in an organelle, preferably in plastids or mitochondria, especially in plastids, of a non-human organism or a part thereof, preferably a microorganism, a plant cell, a plant or a part thereof, as compared to a corresponding non-transformed wild type non-human organism or a part thereof; and
[84467] (b) growing the non-human organism or a part thereof under conditions which permit the production of glucose-1-phosphate or a composition comprising glucose-1-phosphate in said non-human organism or in the culture medium surrounding said non-human organism.

[84468] A further embodiment of the present invention relates to a process for the production of fructose, which comprises
[84469] (a) increasing or generating one or more activities selected from the group consisting of b1522-protein in an organelle, preferably in plastids or mitochondria, especially in plastids, of a non-human organism or a part thereof, preferably a microorganism, a plant cell, a plant or a part thereof, as compared to a corresponding non-transformed wild type non-human organism or a part thereof; and
[84470] (b) growing the non-human organism or a part thereof under conditions which permit the production of fructose or a composition comprising fructose in said non-human organism or in the culture medium surrounding said non-human organism.

[84471] A further embodiment of the present invention relates to a process for the production of glucose-1-phosphate, which comprises
[84472] (a) increasing or generating one or more activities selected from the group consisting of b1522-protein in an organelle, preferably in plastids or mitochondria, especially in plastids, of a non-human organism or a part thereof, preferably a microorganism, a plant cell, a plant or a part thereof, as compared to a corresponding non-transformed wild type non-human organism or a part thereof; and
[84473] (b) growing the non-human organism or a part thereof under conditions which permit the production of glucose-1-phosphate or a composition comprising glucose-1-phosphate in said non-human organism or in the culture medium surrounding said non-human organism.

[84474] A further embodiment of the present invention relates to a process for the production of glucose-1-phosphate, which comprises
[84475] (a) increasing or generating one or more activities selected from the group consisting of b1556-protein in an organelle, preferably in plastids or mitochondria, especially in plastids, of a non-human organism or a part thereof, preferably a microorganism, a plant cell, a plant or a part thereof, as compared to a corresponding non-transformed wild type non-human organism or a part thereof; and
[84476] (b) growing the non-human organism or a part thereof under conditions which permit the production of glucose-1-phosphate or a composition comprising glucose-1-phosphate in said non-human organism or in the culture medium surrounding said non-human organism.

[84477] A further embodiment of the present invention relates to a process for the production of sedoheptulose-7-phosphate, which comprises
[84478] (a) increasing or generating one or more activities selected from the group consisting of b1556-protein in an organelle, preferably in plastids or mitochondria, especially in plastids, of a non-human organism or a part thereof, preferably a microorganism, a plant cell, a plant or a part thereof, as compared to a corresponding non-transformed wild type non-human organism or a part thereof; and
[84479] (b) growing the non-human organism or a part thereof under conditions which permit the production of sedoheptulose-7-phosphate or a composition comprising sedoheptulose-7-phosphate in said non-human organism or in the culture medium surrounding said non-human organism.

[84480] A further embodiment of the present invention relates to a process for the production of glucose-1-phosphate, which comprises
[84481] (a) increasing or generating one or more activities selected from the group consisting of b1583-protein in an organelle, preferably in plastids or mitochondria, especially in plastids, of a non-human organism or a part thereof, preferably a microorganism, a plant cell, a plant or a part thereof, as compared to a corresponding non-transformed wild type non-human organism or a part thereof; and
[84482] (b) growing the non-human organism or a part thereof under conditions which permit the production of glucose-1-phosphate or a composition comprising glucose-1-phosphate in said non-human organism or in the culture medium surrounding said non-human organism.

[84483] A further embodiment of the present invention relates to a process for the production of glucose-1-phosphate, which comprises
[84484] (a) increasing or generating one or more activities selected from the group consisting of Fe—S subunit of oxidoreductase in an organelle, preferably in plastids or mitochondria, especially in plastids, of a non-human organism or a part thereof, preferably a microorganism, a plant cell, a plant or a part thereof, as compared to a corresponding non-transformed wild type non-human organism or a part thereof; and
[84485] (b) growing the non-human organism or a part thereof under conditions which permit the production of glucose-1-phosphate or a composition comprising glucose-1-phosphate in said non-human organism or in the culture medium surrounding said non-human organism.

[84486] A further embodiment of the present invention relates to a process for the production of 3,4,5-trihydroxypentanoic acid, which comprises
[84487] (a) increasing or generating one or more activities selected from the group consisting of Fe—S subunit of oxidoreductase in an organelle, preferably in plastids or mitochondria, especially in plastids, of a non-human organism or a part thereof, preferably a microorganism, a plant cell, a plant or a part thereof, as compared to a corresponding non-transformed wild type non-human organism or a part thereof; and
[84488] (b) growing the non-human organism or a part thereof under conditions which permit the production of 3,4,5-trihydroxypentanoic acid or a composition comprising 3,4,5-trihydroxypentanoic acid in said non-human organism or in the culture medium surrounding said non-human organism.

[84489] A further embodiment of the present invention relates to a process for the production of fructose, which comprises
[84490] (a) increasing or generating one or more activities selected from the group consisting of acid shock protein in an organelle, preferably in plastids or mitochondria, especially in plastids, of a non-human organism or a part thereof, preferably a microorganism, a plant cell, a plant or a part thereof, as compared to a corresponding non-transformed wild type non-human organism or a part thereof; and
[84491] (b) growing the non-human organism or a part thereof under conditions which permit the production of fructose or a composition comprising fructose in said non-human organism or in the culture medium surrounding said non-human organism.

[84492] A further embodiment of the present invention relates to a process for the production of glucose, which comprises
[84493] (a) increasing or generating one or more activities selected from the group consisting of acid shock protein in an organelle, preferably in plastids or mitochondria, especially in plastids, of a non-human organism or a part thereof, preferably a microorganism, a plant cell, a plant or a part thereof, as compared to a corresponding non-transformed wild type non-human organism or a part thereof; and
[84494] (b) growing the non-human organism or a part thereof under conditions which permit the production of glucose or a composition comprising glucose in said non-human organism or in the culture medium surrounding said non-human organism.

[84495] A further embodiment of the present invention relates to a process for the production of glucose-1-phosphate, which comprises
[84496] (a) increasing or generating one or more activities selected from the group consisting of acid shock protein in an organelle, preferably in plastids or mitochondria, especially in plastids, of a non-human organism or a part thereof, preferably a microorganism, a plant cell, a plant or a part thereof, as compared to a corresponding non-transformed wild type non-human organism or a part thereof; and
[84497] (b) growing the non-human organism or a part thereof under conditions which permit the production of glucose-1-phosphate or a composition comprising glucose-1-phosphate in said non-human organism or in the culture medium surrounding said non-human organism.

[84498] A further embodiment of the present invention relates to a process for the production of myo-inositol, which comprises
[84499] (a) increasing or generating one or more activities selected from the group consisting of acid shock protein in an organelle, preferably in plastids or mitochondria, especially in plastids, of a non-human organism or a part thereof, preferably a microorganism, a plant cell, a plant or a part thereof, as compared to a corresponding non-transformed wild type non-human organism or a part thereof; and
[84500] (b) growing the non-human organism or a part thereof under conditions which permit the production of myo-inositol or a composition comprising myo-inositol in said non-human organism or in the culture medium surrounding said non-human organism.

[84501] A further embodiment of the present invention relates to a process for the production of raffinose, which comprises
[84502] (a) increasing or generating one or more activities selected from the group consisting of acid shock protein in an organelle, preferably in plastids or mitochondria, especially in plastids, of a non-human organism or a part thereof, preferably a microorganism, a plant cell, a plant or a part thereof, as compared to a corresponding non-transformed wild type non-human organism or a part thereof; and
[84503] (b) growing the non-human organism or a part thereof under conditions which permit the production of raffinose or a composition comprising raffinose in said non-human organism or in the culture medium surrounding said non-human organism.

[84504] A further embodiment of the present invention relates to a process for the production of fructose, which comprises
[84505] (a) increasing or generating one or more activities selected from the group consisting of phosphotransferase system component in an organelle, preferably in plastids or mitochondria, especially in plastids, of a non-human organism or a part thereof, preferably a microorganism, a plant cell, a plant or a part thereof, as compared to a corresponding non-transformed wild type non-human organism or a part thereof; and
[84506] (b) growing the non-human organism or a part thereof under conditions which permit the production of fructose or a composition comprising fructose in said non-human organism or in the culture medium surrounding said non-human organism.

[84507] A further embodiment of the present invention relates to a process for the production of glucose, which comprises
[84508] (a) increasing or generating one or more activities selected from the group consisting of phosphotransferase system component in an organelle, preferably in plastids or mitochondria, especially in plastids, of a non-human organism or a part thereof, preferably a microorganism, a plant cell, a plant or a part thereof, as compared to a corresponding non-transformed wild type non-human organism or a part thereof; and
[84509] (b) growing the non-human organism or a part thereof under conditions which permit the production of glucose or a composition comprising glucose in said non-human organism or in the culture medium surrounding said non-human organism.

[84510] A further embodiment of the present invention relates to a process for the production of glucose, which comprises
[84511] (a) increasing or generating one or more activities selected from the group consisting of electron transport complex protein in an organelle, preferably in plastids or mitochondria, especially in plastids, of a non-human organism or a part thereof, preferably a microorganism, a plant cell, a plant or a part thereof, as compared to a corresponding non-transformed wild type non-human organism or a part thereof; and
[84512] (b) growing the non-human organism or a part thereof under conditions which permit the production of glucose or a composition comprising glucose in said non-human organism or in the culture medium surrounding said non-human organism.

[84513] A further embodiment of the present invention relates to a process for the production of glucose-1-phosphate, which comprises
[84514] (a) increasing or generating one or more activities selected from the group consisting of electron transport complex protein in an organelle, preferably in plastids or mitochondria, especially in plastids, of a non-human organism or a part thereof, preferably a microorganism, a plant cell, a plant or a part thereof, as compared to a corresponding non-transformed wild type non-human organism or a part thereof; and
[84515] (b) growing the non-human organism or a part thereof under conditions which permit the production of glucose-1-phosphate or a composition comprising glucose-1-phosphate in said non-human organism or in the culture medium surrounding said non-human organism.

[84516] A further embodiment of the present invention relates to a process for the production of 3,4,5-trihydroxypentanoic acid, which comprises
[84517] (a) increasing or generating one or more activities selected from the group consisting of electron transport complex protein in an organelle, preferably in plastids or mitochondria, especially in plastids, of a non-human organism or a part thereof, preferably a microorganism, a plant cell, a plant or a part thereof, as compared to a corresponding non-transformed wild type non-human organism or a part thereof; and
[84518] (b) growing the non-human organism or a part thereof under conditions which permit the production of 3,4,5-trihydroxypentanoic acid or a composition comprising 3,4,5-trihydroxypentanoic acid in said non-human organism or in the culture medium surrounding said non-human organism.

[84519] A further embodiment of the present invention relates to a process for the production of myo-inositol, which comprises
[84520] (a) increasing or generating one or more activities selected from the group consisting of methylglyoxalase in an organelle, preferably in plastids or mitochondria, especially in plastids, of a non-human organism or a part thereof, preferably a microorganism, a plant cell, a plant or a part thereof, as compared to a corresponding non-transformed wild type non-human organism or a part thereof; and
[84521] (b) growing the non-human organism or a part thereof under conditions which permit the production of myo-inositol or a composition comprising myo-inositol in said non-human organism or in the culture medium surrounding said non-human organism.

[84522] A further embodiment of the present invention relates to a process for the production of myo-inositol, which comprises
[84523] (a) increasing or generating one or more activities selected from the group consisting of b1670-protein in an organelle, preferably in plastids or mitochondria, especially in plastids, of a non-human organism or a part thereof, preferably a microorganism, a plant cell, a plant or a part thereof, as compared to a corresponding non-transformed wild type non-human organism or a part thereof; and
[84524] (b) growing the non-human organism or a part thereof under conditions which permit the production of myo-inositol or a composition comprising myo-inositol in said non-human organism or in the culture medium surrounding said non-human organism.

[84525] A further embodiment of the present invention relates to a process for the production of fructose, which comprises
[84526] (a) increasing or generating one or more activities selected from the group consisting of ABC transporter permease protein in an organelle, preferably in plastids or mitochondria, especially in plastids, of a non-human organism or a part thereof, preferably a microorganism, a plant cell, a plant or a part thereof, as compared to a corresponding non-transformed wild type non-human organism or a part thereof; and
[84527] (b) growing the non-human organism or a part thereof under conditions which permit the production of fructose or a composition comprising fructose in said non-human organism or in the culture medium surrounding said non-human organism.

[84528] A further embodiment of the present invention relates to a process for the production of myo-inositol, which comprises
[84529] (a) increasing or generating one or more activities selected from the group consisting of transport protein in an organelle, preferably in plastids or mitochondria, especially in plastids, of a non-human organism or a part thereof, preferably a microorganism, a plant cell, a plant or a part thereof, as compared to a corresponding non-transformed wild type non-human organism or a part thereof; and
[84530] (b) growing the non-human organism or a part thereof under conditions which permit the production of myo-inositol or a composition comprising myo-inositol in said non-human organism or in the culture medium surrounding said non-human organism.

[84531] A further embodiment of the present invention relates to a process for the production of fructose, which comprises
[84532] (a) increasing or generating one or more activities selected from the group consisting of b1796-protein in an organelle, preferably in plastids or mitochondria, especially in plastids, of a non-human organism or a part thereof, preferably a microorganism, a plant cell, a plant or a part thereof, as compared to a corresponding non-transformed wild type non-human organism or a part thereof; and
[84533] (b) growing the non-human organism or a part thereof under conditions which permit the production of fructose or a composition comprising fructose in said non-human organism or in the culture medium surrounding said non-human organism.

[84534] A further embodiment of the present invention relates to a process for the production of myo-inositol, which comprises
[84535] (a) increasing or generating one or more activities selected from the group consisting of para-aminobenzoate synthase component I in an organelle, preferably in plastids or mitochondria, especially in plastids, of a non-human organism or a part thereof, preferably a microorganism, a plant cell, a plant or a part thereof, as compared to a corresponding non-transformed wild type non-human organism or a part thereof; and
[84536] (b) growing the non-human organism or a part thereof under conditions which permit the production of myo-inositol or a composition comprising myo-inositol in said non-human organism or in the culture medium surrounding said non-human organism.

[84537] A further embodiment of the present invention relates to a process for the production of galactitol, which comprises
[84538] (a) increasing or generating one or more activities selected from the group consisting of L-serine dehydratase in an organelle, preferably in plastids or mitochondria, especially in plastids, of a non-human organism or a part thereof, preferably a microorganism, a plant cell, a plant or a part thereof, as compared to a corresponding non-transformed wild type non-human organism or a part thereof; and
[84539] (b) growing the non-human organism or a part thereof under conditions which permit the production of galactitol or a composition comprising galactitol in said non-human organism or in the culture medium surrounding said non-human organism.

[84540] A further embodiment of the present invention relates to a process for the production of sorbitol, which comprises
[84541] (a) increasing or generating one or more activities selected from the group consisting of L-serine dehydratase in an organelle, preferably in plastids or mitochondria, especially in plastids, of a non-human organism or a part thereof, preferably a microorganism, a plant cell, a plant or a part thereof, as compared to a corresponding non-transformed wild type non-human organism or a part thereof; and
[84542] (b) growing the non-human organism or a part thereof under conditions which permit the production of sorbitol or a composition comprising sorbitol in said non-human organism or in the culture medium surrounding said non-human organism.

[84543] A further embodiment of the present invention relates to a process for the production of myo-inositol, which comprises
[84544] (a) increasing or generating one or more activities selected from the group consisting of protease in an organelle, preferably in plastids or mitochondria, especially in plastids, of a non-human organism or a part thereof, preferably a microorganism, a plant cell, a plant or a part thereof, as compared to a corresponding non-transformed wild type non-human organism or a part thereof; and
[84545] (b) growing the non-human organism or a part thereof under conditions which permit the production of myo-inositol or a composition comprising myo-inositol in said non-human organism or in the culture medium surrounding said non-human organism.

[84546] A further embodiment of the present invention relates to a process for the production of erythrol, which comprises
[84547] (a) increasing or generating one or more activities selected from the group consisting of pyruvate kinase in an organelle, preferably in plastids or mitochondria, especially in plastids, of a non-human organism or a part thereof, preferably a microorganism, a plant cell, a plant or a part thereof, as compared to a corresponding non-transformed wild type non-human organism or a part thereof; and
[84548] (b) growing the non-human organism or a part thereof under conditions which permit the production of erythrol or a composition comprising erythrol in said non-human organism or in the culture medium surrounding said non-human organism.

[84549] A further embodiment of the present invention relates to a process for the production of myo-inositol, which comprises
[84550] (a) increasing or generating one or more activities selected from the group consisting of pyruvate kinase in an organelle, preferably in plastids or mitochondria, especially in plastids, of a non-human organism or a part thereof, preferably a microorganism, a plant cell, a plant or a part thereof, as compared to a corresponding non-transformed wild type non-human organism or a part thereof; and
[84551] (b) growing the non-human organism or a part thereof under conditions which permit the production of myo-inositol or a composition comprising myo-inositol in said non-human organism or in the culture medium surrounding said non-human organism.

[84552] A further embodiment of the present invention relates to a process for the production of sorbitol, which comprises
[84553] (a) increasing or generating one or more activities selected from the group consisting of pyruvate kinase in an organelle, preferably in plastids or mitochondria, especially in plastids, of a non-human organism or a part thereof, preferably a microorganism, a plant cell, a plant or a part thereof, as compared to a corresponding non-transformed wild type non-human organism or a part thereof; and
[84554] (b) growing the non-human organism or a part thereof under conditions which permit the production of sorbitol or a composition comprising sorbitol in said non-human organism or in the culture medium surrounding said non-human organism.

[84555] A further embodiment of the present invention relates to a process for the production of fructose, which comprises
[84556] (a) increasing or generating one or more activities selected from the group consisting of dATP pyrophosphohydrolase in an organelle, preferably in plastids or mitochondria, especially in plastids, of a non-human organism or a part thereof, preferably a microorganism, a plant cell, a plant or a part thereof, as compared to a corresponding non-transformed wild type non-human organism or a part thereof; and
[84557] (b) growing the non-human organism or a part thereof under conditions which permit the production of fructose or a composition comprising fructose in said non-human organism or in the culture medium surrounding said non-human organism.

[84558] A further embodiment of the present invention relates to a process for the production of glucose-1-phosphate, which comprises
[84559] (a) increasing or generating one or more activities selected from the group consisting of trehalose-6-phosphate synthase in an organelle, preferably in plastids or mitochondria, especially in plastids, of a non-human organism or a part thereof, preferably a microorganism, a plant cell, a plant or a part thereof, as compared to a corresponding non-transformed wild type non-human organism or a part thereof; and
[84560] (b) growing the non-human organism or a part thereof under conditions which permit the production of glucose-1-phosphate or a composition comprising glucose-1-phosphate in said non-human organism or in the culture medium surrounding said non-human organism.

[84561] A further embodiment of the present invention relates to a process for the production of trehalose, which comprises
[84562] (a) increasing or generating one or more activities selected from the group consisting of trehalose-6-phosphate synthase in an organelle, preferably in plastids or mitochondria, especially in plastids, of a non-human organism or a part thereof, preferably a microorganism, a plant cell, a plant or a part thereof, as compared to a corresponding non-transformed wild type non-human organism or a part thereof; and
[84563] (b) growing the non-human organism or a part thereof under conditions which permit the production of trehalose or a composition comprising trehalose in said non-human organism or in the culture medium surrounding said non-human organism.

[84564] A further embodiment of the present invention relates to a process for the production of erythrol, which comprises
[84565] (a) increasing or generating one or more activities selected from the group consisting of trehalose-phosphatase in an organelle, preferably in plastids or mitochondria, especially in plastids, of a non-human organism or a part thereof, preferably a microorganism, a plant cell, a plant or a part thereof, as compared to a corresponding non-transformed wild type non-human organism or a part thereof; and
[84566] (b) growing the non-human organism or a part thereof under conditions which permit the production of erythrol or a composition comprising erythrol in said non-human organism or in the culture medium surrounding said non-human organism.

[84567] A further embodiment of the present invention relates to a process for the production of fructose, which comprises
[84568] (a) increasing or generating one or more activities selected from the group consisting of trehalose-phosphatase in an organelle, preferably in plastids or mitochondria, especially in plastids, of a non-human organism or a part thereof, preferably a microorganism, a plant cell, a plant or a part thereof, as compared to a corresponding non-transformed wild type non-human organism or a part thereof; and
[84569] (b) growing the non-human organism or a part thereof under conditions which permit the production of fructose or a composition comprising fructose in said non-human organism or in the culture medium surrounding said non-human organism.

[84570] A further embodiment of the present invention relates to a process for the production of glucose, which comprises
[84571] (a) increasing or generating one or more activities selected from the group consisting of trehalose-phosphatase in an organelle, preferably in plastids or mitochondria, especially in plastids, of a non-human organism or a part thereof, preferably a microorganism, a plant cell, a plant or a part thereof, as compared to a corresponding non-transformed wild type non-human organism or a part thereof; and
[84572] (b) growing the non-human organism or a part thereof under conditions which permit the production of glucose or a composition comprising glucose in said non-human organism or in the culture medium surrounding said non-human organism.

[84573] A further embodiment of the present invention relates to a process for the production of sucrose, which comprises
[84574] (a) increasing or generating one or more activities selected from the group consisting of trehalose-phosphatase in an organelle, preferably in plastids or mitochondria, especially in plastids, of a non-human organism or a part thereof, preferably a microorganism, a plant cell, a plant or a part thereof, as compared to a corresponding non-transformed wild type non-human organism or a part thereof; and
[84575] (b) growing the non-human organism or a part thereof under conditions which permit the production of sucrose or a composition comprising sucrose in said non-human organism or in the culture medium surrounding said non-human organism.

[84576] A further embodiment of the present invention relates to a process for the production of raffinose, which comprises
[84577] (a) increasing or generating one or more activities selected from the group consisting of b1898-protein in an organelle, preferably in plastids or mitochondria, especially in plastids, of a non-human organism or a part thereof, preferably a microorganism, a plant cell, a plant or a part thereof, as compared to a corresponding non-transformed wild type non-human organism or a part thereof; and
[84578] (b) growing the non-human organism or a part thereof under conditions which permit the production of raffinose or a composition comprising raffinose in said non-human organism or in the culture medium surrounding said non-human organism.

[84579] A further embodiment of the present invention relates to a process for the production of glucose-1-phosphate, which comprises
[84580] (a) increasing or generating one or more activities selected from the group consisting of acetyltransferase in an organelle, preferably in plastids or mitochondria, especially in plastids, of a non-human organism or a part thereof, preferably a microorganism, a plant cell, a plant or a part thereof, as compared to a corresponding non-transformed wild type non-human organism or a part thereof; and
[84581] (b) growing the non-human organism or a part thereof under conditions which permit the production of glucose-1-phosphate or a composition comprising glucose-1-phosphate in said non-human organism or in the culture medium surrounding said non-human organism.

[84582] A further embodiment of the present invention relates to a process for the production of 3,4,5-trihydroxypentanoic acid, which comprises
[84583] (a) increasing or generating one or more activities selected from the group consisting of acetyltransferase in an organelle, preferably in plastids or mitochondria, especially in plastids, of a non-human organism or a part thereof, preferably a microorganism, a plant cell, a plant or a part thereof, as compared to a corresponding non-transformed wild type non-human organism or a part thereof; and
[84584] (b) growing the non-human organism or a part thereof under conditions which permit the production of 3,4,5-trihydroxypentanoic acid or a composition comprising 3,4,5-trihydroxypentanoic acid in said non-human organism or in the culture medium surrounding said non-human organism.

[84585] A further embodiment of the present invention relates to a process for the production of glucose, which comprises
[84586] (a) increasing or generating one or more activities selected from the group consisting of flagellar M-ring protein in an organelle, preferably in plastids or mitochondria, especially in plastids, of a non-human organism or a part thereof, preferably a microorganism, a plant cell, a plant or a part thereof, as compared to a corresponding non-transformed wild type non-human organism or a part thereof; and
[84587] (b) growing the non-human organism or a part thereof under conditions which permit the production of glucose or a composition comprising glucose in said non-human organism or in the culture medium surrounding said non-human organism.

[84588] A further embodiment of the present invention relates to a process for the production of myo-inositol, which comprises
[84589] (a) increasing or generating one or more activities selected from the group consisting of flagellar M-ring protein in an organelle, preferably in plastids or mitochondria, especially in plastids, of a non-human organism or a part thereof, preferably a microorganism, a plant cell, a plant or a part thereof, as compared to a corresponding non-transformed wild type non-human organism or a part thereof; and
[84590] (b) growing the non-human organism or a part thereof under conditions which permit the production of myo-inositol or a composition comprising myo-inositol in said non-human organism or in the culture medium surrounding said non-human organism.

[84591] A further embodiment of the present invention relates to a process for the production of fructose, which comprises
[84592] (a) increasing or generating one or more activities selected from the group consisting of O-antigen chain length determinant in an organelle, preferably in plastids or mitochondria, especially in plastids, of a non-human organism or a part thereof, preferably a microorganism, a plant cell, a plant or a part thereof, as compared to a corresponding non-transformed wild type non-human organism or a part thereof; and
[84593] (b) growing the non-human organism or a part thereof under conditions which permit the production of fructose or a composition comprising fructose in said non-human organism or in the culture medium surrounding said non-human organism.

[84594] A further embodiment of the present invention relates to a process for the production of glucose, which comprises
[84595] (a) increasing or generating one or more activities selected from the group consisting of b2032-protein in an organelle, preferably in plastids or mitochondria, especially in plastids, of a non-human organism or a part thereof, preferably a microorganism, a plant cell, a plant or a part thereof, as compared to a corresponding non-transformed wild type non-human organism or a part thereof; and
[84596] (b) growing the non-human organism or a part thereof under conditions which permit the production of glucose or a composition comprising glucose in said non-human organism or in the culture medium surrounding said non-human organism.

[84597] A further embodiment of the present invention relates to a process for the production of myo-inositol, which comprises
[84598] (a) increasing or generating one or more activities selected from the group consisting of b2032-protein in an organelle, preferably in plastids or mitochondria, especially in plastids, of a non-human organism or a part thereof, preferably a microorganism, a plant cell, a plant or a part thereof, as compared to a corresponding non-transformed wild type non-human organism or a part thereof; and
[84599] (b) growing the non-human organism or a part thereof under conditions which permit the production of myo-inositol or a composition comprising myo-inositol in said non-human organism or in the culture medium surrounding said non-human organism.

[84600] A further embodiment of the present invention relates to a process for the production of glucose-1-phosphate, which comprises
[84601] (a) increasing or generating one or more activities selected from the group consisting of colanic acid biosynthesis protein in an organelle, preferably in plastids or mitochondria, especially in plastids, of a non-human organism or a part thereof, preferably a microorganism, a plant cell, a plant or a part thereof, as compared to a corresponding non-transformed wild type non-human organism or a part thereof; and
[84602] (b) growing the non-human organism or a part thereof under conditions which permit the production of glucose-1-phosphate or a composition comprising glucose-1-phosphate in said non-human organism or in the culture medium surrounding said non-human organism.

[84603] A further embodiment of the present invention relates to a process for the production of fucose, which comprises
[84604] (a) increasing or generating one or more activities selected from the group consisting of GDP-mannose 4,6-dehydratase in an organelle, preferably in plastids or mitochondria, especially in plastids, of a non-human organism or a part thereof, preferably a microorganism, a plant cell, a plant or a part thereof, as compared to a corresponding non-transformed wild type non-human organism or a part thereof; and
[84605] (b) growing the non-human organism or a part thereof under conditions which permit the production of fucose or a composition comprising fucose in said non-human organism or in the culture medium surrounding said non-human organism.

[84606] A further embodiment of the present invention relates to a process for the production of fructose, which comprises
[84607] (a) increasing or generating one or more activities selected from the group consisting of transport protein in an organelle, preferably in plastids or mitochondria, especially in plastids, of a non-human organism or a part thereof, preferably a microorganism, a plant cell, a plant or a part thereof, as compared to a corresponding non-transformed wild type non-human organism or a part thereof; and
[84608] (b) growing the non-human organism or a part thereof under conditions which permit the production of fructose or a composition comprising fructose in said non-human organism or in the culture medium surrounding said non-human organism.

[84609] A further embodiment of the present invention relates to a process for the production of glucose-1-phosphate, which comprises
[84610] (a) increasing or generating one or more activities selected from the group consisting of transport protein in an organelle, preferably in plastids or mitochondria, especially in plastids, of a non-human organism or a part thereof, preferably a microorganism, a plant cell, a plant or a part thereof, as compared to a corresponding non-transformed wild type non-human organism or a part thereof; and
[84611] (b) growing the non-human organism or a part thereof under conditions which permit the production of glucose-1-phosphate or a composition comprising glucose-1-phosphate in said non-human organism or in the culture medium surrounding said non-human organism.

[84612] A further embodiment of the present invention relates to a process for the production of raffinose, which comprises
[84613] (a) increasing or generating one or more activities selected from the group consisting of transport protein in an organelle, preferably in plastids or mitochondria, especially in plastids, of a non-human organism or a part thereof, preferably a microorganism, a plant cell, a plant or a part thereof, as compared to a corresponding non-transformed wild type non-human organism or a part thereof; and
[84614] (b) growing the non-human organism or a part thereof under conditions which permit the production of raffinose or a composition comprising raffinose in said non-human organism or in the culture medium surrounding said non-human organism.

[84615] A further embodiment of the present invention relates to a process for the production of sucrose, which comprises
[84616] (a) increasing or generating one or more activities selected from the group consisting of transport protein in an organelle, preferably in plastids or mitochondria, especially in plastids, of a non-human organism or a part thereof, preferably a microorganism, a plant cell, a plant or a part thereof, as compared to a corresponding non-transformed wild type non-human organism or a part thereof; and
[84617] (b) growing the non-human organism or a part thereof under conditions which permit the production of sucrose or a composition comprising sucrose in said non-human organism or in the culture medium surrounding said non-human organism.

[84618] A further embodiment of the present invention relates to a process for the production of 3,4,5-trihydroxypentanoic acid, which comprises
[84619] (a) increasing or generating one or more activities selected from the group consisting of transport protein in an organelle, preferably in plastids or mitochondria, especially in plastids, of a non-human organism or a part thereof, preferably a microorganism, a plant cell, a plant or a part thereof, as compared to a corresponding non-transformed wild type non-human organism or a part thereof; and
[84620] (b) growing the non-human organism or a part thereof under conditions which permit the production of 3,4,5-trihydroxypentanoic acid or a composition comprising 3,4,5-trihydroxypentanoic acid in said non-human organism or in the culture medium surrounding said non-human organism.

[84621] A further embodiment of the present invention relates to a process for the production of glucose-1-phosphate, which comprises
[84622] (a) increasing or generating one or more activities selected from the group consisting of b2107-protein in an organelle, preferably in plastids or mitochondria, especially in plastids, of a non-human organism or a part thereof, preferably a microorganism, a plant cell, a plant or a part thereof, as compared to a corresponding non-transformed wild type non-human organism or a part thereof; and
[84623] (b) growing the non-human organism or a part thereof under conditions which permit the production of glucose-1-phosphate or a composition comprising glucose-1-phosphate in said non-human organism or in the culture medium surrounding said non-human organism.

[84624] A further embodiment of the present invention relates to a process for the production of 3,4,5-trihydroxypentanoic acid, which comprises
[84625] (a) increasing or generating one or more activities selected from the group consisting of b2107-protein in an organelle, preferably in plastids or mitochondria, especially in plastids, of a non-human organism or a part thereof, preferably a microorganism, a plant cell, a plant or a part thereof, as compared to a corresponding non-transformed wild type non-human organism or a part thereof; and
[84626] (b) growing the non-human organism or a part thereof under conditions which permit the production of 3,4,5-trihydroxypentanoic acid or a composition comprising 3,4,5-trihydroxypentanoic acid in said non-human organism or in the culture medium surrounding said non-human organism.

[84627] A further embodiment of the present invention relates to a process for the production of glucose-1-phosphate, which comprises
[84628] (a) increasing or generating one or more activities selected from the group consisting of b2139-protein in an organelle, preferably in plastids or mitochondria, especially in plastids, of a non-human organism or a part thereof, preferably a microorganism, a plant cell, a plant or a part thereof, as compared to a corresponding non-transformed wild type non-human organism or a part thereof; and
[84629] (b) growing the non-human organism or a part thereof under conditions which permit the production of glucose-1-phosphate or a composition comprising glucose-1-phosphate in said non-human organism or in the culture medium surrounding said non-human organism.

[84630] A further embodiment of the present invention relates to a process for the production of erythrol, which comprises
[84631] (a) increasing or generating one or more activities selected from the group consisting of sn-glycerol-3-phosphate dehydrogenase in an organelle, preferably in plastids or mitochondria, especially in plastids, of a non-human organism or a part thereof, preferably a microorganism, a plant cell, a plant or a part thereof, as compared to a corresponding non-transformed wild type non-human organism or a part thereof; and
[84632] (b) growing the non-human organism or a part thereof under conditions which permit the production of erythrol or a composition comprising erythrol in said non-human organism or in the culture medium surrounding said non-human organism.

[84633] A further embodiment of the present invention relates to a process for the production of fructose, which comprises
[84634] (a) increasing or generating one or more activities selected from the group consisting of ATP synthase subunit E in an organelle, preferably in plastids or mitochondria, especially in plastids, of a non-human organism or a part thereof, preferably a microorganism, a plant cell, a plant or a part thereof, as compared to a corresponding non-transformed wild type non-human organism or a part thereof; and
[84635] (b) growing the non-human organism or a part thereof under conditions which permit the production of fructose or a composition comprising fructose in said non-human organism or in the culture medium surrounding said non-human organism.

[84636] A further embodiment of the present invention relates to a process for the production of galactinol, which comprises
[84637] (a) increasing or generating one or more activities selected from the group consisting of aminotransferase in an organelle, preferably in plastids or mitochondria, especially in plastids, of a non-human organism or a part thereof, preferably a microorganism, a plant cell, a plant or a part thereof, as compared to a corresponding non-transformed wild type non-human organism or a part thereof; and
[84638] (b) growing the non-human organism or a part thereof under conditions which permit the production of galactinol or a composition comprising galactinol in said non-human organism or in the culture medium surrounding said non-human organism.

[84639] A further embodiment of the present invention relates to a process for the production of myo-inositol, which comprises
[84640] (a) increasing or generating one or more activities selected from the group consisting of b2345-protein in an organelle, preferably in plastids or mitochondria, especially in plastids, of a non-human organism or a part thereof, preferably a microorganism, a plant cell, a plant or a part thereof, as compared to a corresponding non-transformed wild type non-human organism or a part thereof; and
[84641] (b) growing the non-human organism or a part thereof under conditions which permit the production of myo-inositol or a composition comprising myo-inositol in said non-human organism or in the culture medium surrounding said non-human organism.

[84642] A further embodiment of the present invention relates to a process for the production of 3,4,5-trihydroxypentanoic acid, which comprises
[84643] (a) increasing or generating one or more activities selected from the group consisting of b2345-protein in an organelle, preferably in plastids or mitochondria, especially in plastids, of a non-human organism or a part thereof, preferably a microorganism, a plant cell, a plant or a part thereof, as compared to a corresponding non-transformed wild type non-human organism or a part thereof; and
[84644] (b) growing the non-human organism or a part thereof under conditions which permit the production of 3,4,5-trihydroxypentanoic acid or a composition comprising 3,4,5-trihydroxypentanoic acid in said non-human organism or in the culture medium surrounding said non-human organism.

[84645] A further embodiment of the present invention relates to a process for the production of verbascose, which comprises
[84646] (a) increasing or generating one or more activities selected from the group consisting of b2360-protein in an organelle, preferably in plastids or mitochondria, especially in plastids, of a non-human organism or a part thereof, preferably a microorganism, a plant cell, a plant or a part thereof, as compared to a corresponding non-transformed wild type non-human organism or a part thereof; and
[84647] (b) growing the non-human organism or a part thereof under conditions which permit the production of verbascose or a composition comprising verbascose in said non-human organism or in the culture medium surrounding said non-human organism.

[84648] A further embodiment of the present invention relates to a process for the production of 3,4,5-trihydroxypentanoic acid, which comprises
[84649] (a) increasing or generating one or more activities selected from the group consisting of b2360-protein in an organelle, preferably in plastids or mitochondria, especially in plastids, of a non-human organism or a part thereof, preferably a microorganism, a plant cell, a plant or a part thereof, as compared to a corresponding non-transformed wild type non-human organism or a part thereof; and
[84650] (b) growing the non-human organism or a part thereof under conditions which permit the production of 3,4,5-trihydroxypentanoic acid or a composition comprising 3,4,5-trihydroxypentanoic acid in said non-human organism or in the culture medium surrounding said non-human organism.

[84651] A further embodiment of the present invention relates to a process for the production of glucose-1-phosphate, which comprises
[84652] (a) increasing or generating one or more activities selected from the group consisting of b2361-protein in an organelle, preferably in plastids or mitochondria, especially in plastids, of a non-human organism or a part thereof, preferably a microorganism, a plant cell, a plant or a part thereof, as compared to a corresponding non-transformed wild type non-human organism or a part thereof; and
[84653] (b) growing the non-human organism or a part thereof under conditions which permit the production of glucose-1-phosphate or a composition comprising glucose-1-phosphate in said non-human organism or in the culture medium surrounding said non-human organism.

[84654] A further embodiment of the present invention relates to a process for the production of 3,4,5-trihydroxypentanoic acid, which comprises
[84655] (a) increasing or generating one or more activities selected from the group consisting of b2361-protein in an organelle, preferably in plastids or mitochondria, especially in plastids, of a non-human organism or a part thereof, preferably a microorganism, a plant cell, a plant or a part thereof, as compared to a corresponding non-transformed wild type non-human organism or a part thereof; and
[84656] (b) growing the non-human organism or a part thereof under conditions which permit the production of 3,4,5-trihydroxypentanoic acid or a composition comprising 3,4,5-trihydroxypentanoic acid in said non-human organism or in the culture medium surrounding said non-human organism.

[84657] A further embodiment of the present invention relates to a process for the production of sucrose, which comprises
[84658] (a) increasing or generating one or more activities selected from the group consisting of ion-transport protein in an organelle, preferably in plastids or mitochondria, especially in plastids, of a non-human organism or a part thereof, preferably a microorganism, a plant cell, a plant or a part thereof, as compared to a corresponding non-transformed wild type non-human organism or a part thereof; and
[84659] (b) growing the non-human organism or a part thereof under conditions which permit the production of sucrose or a composition comprising sucrose in said non-human organism or in the culture medium surrounding said non-human organism.

[84660] A further embodiment of the present invention relates to a process for the production of fructose, which comprises
[84661] (a) increasing or generating one or more activities selected from the group consisting of b2399-protein in an organelle, preferably in plastids or mitochondria, especially in plastids, of a non-human organism or a part thereof, preferably a microorganism, a plant cell, a plant or a part thereof, as compared to a corresponding non-transformed wild type non-human organism or a part thereof; and
[84662] (b) growing the non-human organism or a part thereof under conditions which permit the production of fructose or a composition comprising fructose in said non-human organism or in the culture medium surrounding said non-human organism.

[84663] A further embodiment of the present invention relates to a process for the production of glucose, which comprises
[84664] (a) increasing or generating one or more activities selected from the group consisting of b2399-protein in an organelle, preferably in plastids or mitochondria, especially in plastids, of a non-human organism or a part thereof, preferably a microorganism, a plant cell, a plant or a part thereof, as compared to a corresponding non-transformed wild type non-human organism or a part thereof; and
[84665] (b) growing the non-human organism or a part thereof under conditions which permit the production of glucose or a composition comprising glucose in said non-human organism or in the culture medium surrounding said non-human organism.

[84666] A further embodiment of the present invention relates to a process for the production of glucose-1-phosphate, which comprises
[84667] (a) increasing or generating one or more activities selected from the group consisting of b2399-protein in an organelle, preferably in plastids or mitochondria, especially in plastids, of a non-human organism or a part thereof, preferably a microorganism, a plant cell, a plant or a part thereof, as compared to a corresponding non-transformed wild type non-human organism or a part thereof; and
[84668] (b) growing the non-human organism or a part thereof under conditions which permit the production of glucose-1-phosphate or a composition comprising glucose-1-phosphate in said non-human organism or in the culture medium surrounding said non-human organism.

[84669] A further embodiment of the present invention relates to a process for the production of myo-inositol, which comprises
[84670] (a) increasing or generating one or more activities selected from the group consisting of b2399-protein in an organelle, preferably in plastids or mitochondria, especially in plastids, of a non-human organism or a part thereof, preferably a microorganism, a plant cell, a plant or a part thereof, as compared to a corresponding non-transformed wild type non-human organism or a part thereof; and
[84671] (b) growing the non-human organism or a part thereof under conditions which permit the production of myo-inositol or a composition comprising myo-inositol in said non-human organism or in the culture medium surrounding said non-human organism.

[84672] A further embodiment of the present invention relates to a process for the production of raffinose, which comprises
[84673] (a) increasing or generating one or more activities selected from the group consisting of b2399-protein in an organelle, preferably in plastids or mitochondria, especially in plastids, of a non-human organism or a part thereof, preferably a microorganism, a plant cell, a plant or a part thereof, as compared to a corresponding non-transformed wild type non-human organism or a part thereof; and
[84674] (b) growing the non-human organism or a part thereof under conditions which permit the production of raffinose or a composition comprising raffinose in said non-human organism or in the culture medium surrounding said non-human organism.

[84675] A further embodiment of the present invention relates to a process for the production of sedoheptulose-7-phosphate, which comprises
[84676] (a) increasing or generating one or more activities selected from the group consisting of b2399-protein in an organelle, preferably in plastids or mitochondria, especially in plastids, of a non-human organism or a part thereof, preferably a microorganism, a plant cell, a plant or a part thereof, as compared to a corresponding non-transformed wild type non-human organism or a part thereof; and
[84677] (b) growing the non-human organism or a part thereof under conditions which permit the production of sedoheptulose-7-phosphate or a composition comprising sedoheptulose-7-phosphate in said non-human organism or in the culture medium surrounding said non-human organism.

[84678] A further embodiment of the present invention relates to a process for the production of sucrose, which comprises
[84679] (a) increasing or generating one or more activities selected from the group consisting of b2399-protein in an organelle, preferably in plastids or mitochondria, especially in plastids, of a non-human organism or a part thereof, preferably a microorganism, a plant cell, a plant or a part thereof, as compared to a corresponding non-transformed wild type non-human organism or a part thereof; and
[84680] (b) growing the non-human organism or a part thereof under conditions which permit the production of sucrose or a composition comprising sucrose in said non-human organism or in the culture medium surrounding said non-human organism.

[84681] A further embodiment of the present invention relates to a process for the production of fructose, which comprises
[84682] (a) increasing or generating one or more activities selected from the group consisting of transcriptional regulator in an organelle, preferably in plastids or mitochondria, especially in plastids, of a non-human organism or a part thereof, preferably a microorganism, a plant cell, a plant or a part thereof, as compared to a corresponding non-transformed wild type non-human organism or a part thereof; and
[84683] (b) growing the non-human organism or a part thereof under conditions which permit the production of fructose or a composition comprising fructose in said non-human organism or in the culture medium surrounding said non-human organism.

[84684] A further embodiment of the present invention relates to a process for the production of raffinose, which comprises
[84685] (a) increasing or generating one or more activities selected from the group consisting of transcriptional regulator in an organelle, preferably in plastids or mitochondria, especially in plastids, of a non-human organism or a part thereof, preferably a microorganism, a plant cell, a plant or a part thereof, as compared to a corresponding non-transformed wild type non-human organism or a part thereof; and
[84686] (b) growing the non-human organism or a part thereof under conditions which permit the production of raffinose or a composition comprising raffinose in said non-human organism or in the culture medium surrounding said non-human organism.

[84687] A further embodiment of the present invention relates to a process for the production of myo-inositol, which comprises
[84688] (a) increasing or generating one or more activities selected from the group consisting of cysteine synthase A in an organelle, preferably in plastids or mitochondria, especially in plastids, of a non-human organism or a part thereof, preferably a microorganism, a plant cell, a plant or a part thereof, as compared to a corresponding non-transformed wild type non-human organism or a part thereof; and
[84689] (b) growing the non-human organism or a part thereof under conditions which permit the production of myo-inositol or a composition comprising myo-inositol in said non-human organism or in the culture medium surrounding said non-human organism.

[84690] A further embodiment of the present invention relates to a process for the production of verbascose, which comprises
[84691] (a) increasing or generating one or more activities selected from the group consisting of cysteine synthase A in an organelle, preferably in plastids or mitochondria, especially in plastids, of a non-human organism or a part thereof, preferably a microorganism, a plant cell, a plant or a part thereof, as compared to a corresponding non-transformed wild type non-human organism or a part thereof; and
[84692] (b) growing the non-human organism or a part thereof under conditions which permit the production of verbascose or a composition comprising verbascose in said non-human organism or in the culture medium surrounding said non-human organism.

[84693] A further embodiment of the present invention relates to a process for the production of glucose-1-phosphate, which comprises
[84694] (a) increasing or generating one or more activities selected from the group consisting of b2466-protein in an organelle, preferably in plastids or mitochondria, especially in plastids, of a non-human organism or a part thereof, preferably a microorganism, a plant cell, a plant or a part thereof, as compared to a corresponding non-transformed wild type non-human organism or a part thereof; and
[84695] (b) growing the non-human organism or a part thereof under conditions which permit the production of glucose-1-phosphate or a composition comprising glucose-1-phosphate in said non-human organism or in the culture medium surrounding said non-human organism.

[84696] A further embodiment of the present invention relates to a process for the production of myo-inositol, which comprises
[84697] (a) increasing or generating one or more activities selected from the group consisting of b2466-protein in an organelle, preferably in plastids or mitochondria, especially in plastids, of a non-human organism or a part thereof, preferably a microorganism, a plant cell, a plant or a part thereof, as compared to a corresponding non-transformed wild type non-human organism or a part thereof; and
[84698] (b) growing the non-human organism or a part thereof under conditions which permit the production of myo-inositol or a composition comprising myo-inositol in said non-human organism or in the culture medium surrounding said non-human organism.

[84699] A further embodiment of the present invention relates to a process for the production of 3,4,5-trihydroxypentanoic acid, which comprises
[84700] (a) increasing or generating one or more activities selected from the group consisting of b2466-protein in an organelle, preferably in plastids or mitochondria, especially in plastids, of a non-human organism or a part thereof, preferably a microorganism, a plant cell, a plant or a part thereof, as compared to a corresponding non-transformed wild type non-human organism or a part thereof; and
[84701] (b) growing the non-human organism or a part thereof under conditions which permit the production of 3,4,5-trihydroxypentanoic acid or a composition comprising 3,4,5-trihydroxypentanoic acid in said non-human organism or in the culture medium surrounding said non-human organism.

[84702] A further embodiment of the present invention relates to a process for the production of glucose-1-phosphate, which comprises
[84703] (a) increasing or generating one or more activities selected from the group consisting of b2474-protein in an organelle, preferably in plastids or mitochondria, especially in plastids, of a non-human organism or a part thereof, preferably a microorganism, a plant cell, a plant or a part thereof, as compared to a corresponding non-transformed wild type non-human organism or a part thereof; and
[84704] (b) growing the non-human organism or a part thereof under conditions which permit the production of glucose-1-phosphate or a composition comprising glucose-1-phosphate in said non-human organism or in the culture medium surrounding said non-human organism.

[84705] A further embodiment of the present invention relates to a process for the production of raffinose, which comprises
[84706] (a) increasing or generating one or more activities selected from the group consisting of 2,3-dihydroxy-2,3-dihydrophenylpropionatedehydrogenase in an organelle, preferably in plastids or mitochondria, especially in plastids, of a non-human organism or a part thereof, preferably a microorganism, a plant cell, a plant or a part thereof, as compared to a corresponding non-transformed wild type non-human organism or a part thereof; and
[84707] (b) growing the non-human organism or a part thereof under conditions which permit the production of raffinose or a composition comprising raffinose in said non-human organism or in the culture medium surrounding said non-human organism.

[84708] A further embodiment of the present invention relates to a process for the production of sucrose, which comprises
[84709] (a) increasing or generating one or more activities selected from the group consisting of putative transport system permease protein in an organelle, preferably in plastids or mitochondria, especially in plastids, of a non-human organism or a part thereof, preferably a microorganism, a plant cell, a plant or a part thereof, as compared to a corresponding non-transformed wild type non-human organism or a part thereof; and
[84710] (b) growing the non-human organism or a part thereof under conditions which permit the production of sucrose or a composition comprising sucrose in said non-human organism or in the culture medium surrounding said non-human organism.

[84711] A further embodiment of the present invention relates to a process for the production of glucose-1-phosphate, which comprises
[84712] (a) increasing or generating one or more activities selected from the group consisting of b2613-protein in an organelle, preferably in plastids or mitochondria, especially in plastids, of a non-human organism or a part thereof, preferably a microorganism, a plant cell, a plant or a part thereof, as compared to a corresponding non-transformed wild type non-human organism or a part thereof; and
[84713] (b) growing the non-human organism or a part thereof under conditions which permit the production of glucose-1-phosphate or a composition comprising glucose-1-phosphate in said non-human organism or in the culture medium surrounding said non-human organism.

[84714] A further embodiment of the present invention relates to a process for the production of myo-inositol, which comprises
[84715] (a) increasing or generating one or more activities selected from the group consisting of b2613-protein in an organelle, preferably in plastids or mitochondria, especially in plastids, of a non-human organism or a part thereof, preferably a microorganism, a plant cell, a plant or a part thereof, as compared to a corresponding non-transformed wild type non-human organism or a part thereof; and
[84716] (b) growing the non-human organism or a part thereof under conditions which permit the production of myo-inositol or a composition comprising myo-inositol in said non-human organism or in the culture medium surrounding said non-human organism.

[84717] A further embodiment of the present invention relates to a process for the production of fructose, which comprises
[84718] (a) increasing or generating one or more activities selected from the group consisting of transcriptional regulator in an organelle, preferably in plastids or mitochondria, especially in plastids, of a non-human organism or a part thereof, preferably a microorganism, a plant cell, a plant or a part thereof, as compared to a corresponding non-transformed wild type non-human organism or a part thereof; and
[84719] (b) growing the non-human organism or a part thereof under conditions which permit the production of fructose or a composition comprising fructose in said non-human organism or in the culture medium surrounding said non-human organism.

[84720] A further embodiment of the present invention relates to a process for the production of myo-inositol, which comprises
[84721] (a) increasing or generating one or more activities selected from the group consisting of transcriptional regulator in an organelle, preferably in plastids or mitochondria, especially in plastids, of a non-human organism or a part thereof, preferably a microorganism, a plant cell, a plant or a part thereof, as compared to a corresponding non-transformed wild type non-human organism or a part thereof; and
[84722] (b) growing the non-human organism or a part thereof under conditions which permit the production of myo-inositol or a composition comprising myo-inositol in said non-human organism or in the culture medium surrounding said non-human organism.

[84723] A further embodiment of the present invention relates to a process for the production of sucrose, which comprises
[84724] (a) increasing or generating one or more activities selected from the group consisting of transcriptional regulator in an organelle, preferably in plastids or mitochondria, especially in plastids, of a non-human organism or a part thereof, preferably a microorganism, a plant cell, a plant or a part thereof, as compared to a corresponding non-transformed wild type non-human organism or a part thereof; and
[84725] (b) growing the non-human organism or a part thereof under conditions which permit the production of sucrose or a composition comprising sucrose in said non-human organism or in the culture medium surrounding said non-human organism.

[84726] A further embodiment of the present invention relates to a process for the production of glucose-1-phosphate, which comprises
[84727] (a) increasing or generating one or more activities selected from the group consisting of b2653-protein in an organelle, preferably in plastids or mitochondria, especially in plastids, of a non-human organism or a part thereof, preferably a microorganism, a plant cell, a plant or a part thereof, as compared to a corresponding non-transformed wild type non-human organism or a part thereof; and
[84728] (b) growing the non-human organism or a part thereof under conditions which permit the production of glucose-1-phosphate or a composition comprising glucose-1-phosphate in said non-human organism or in the culture medium surrounding said non-human organism.

[84729] A further embodiment of the present invention relates to a process for the production of sedoheptulose-7-phosphate, which comprises
[84730] (a) increasing or generating one or more activities selected from the group consisting of b2653-protein in an organelle, preferably in plastids or mitochondria, especially in plastids, of a non-human organism or a part thereof, preferably a microorganism, a plant cell, a plant or a part thereof, as compared to a corresponding non-transformed wild type non-human organism or a part thereof; and
[84731] (b) growing the non-human organism or a part thereof under conditions which permit the production of sedoheptulose-7-phosphate or a composition comprising sedoheptulose-7-phosphate in said non-human organism or in the culture medium surrounding said non-human organism.

[84732] A further embodiment of the present invention relates to a process for the production of 3,4,5-trihydroxypentanoic acid, which comprises
[84733] (a) increasing or generating one or more activities selected from the group consisting of b2653-protein in an organelle, preferably in plastids or mitochondria, especially in plastids, of a non-human organism or a part thereof, preferably a microorganism, a plant cell, a plant or a part thereof, as compared to a corresponding non-transformed wild type non-human organism or a part thereof; and
[84734] (b) growing the non-human organism or a part thereof under conditions which permit the production of 3,4,5-trihydroxypentanoic acid or a composition comprising 3,4,5-trihydroxypentanoic acid in said non-human organism or in the culture medium surrounding said non-human organism.

[84735] A further embodiment of the present invention relates to a process for the production of glucose-1-phosphate, which comprises
[84736] (a) increasing or generating one or more activities selected from the group consisting of b2654-protein in an organelle, preferably in plastids or mitochondria, especially in plastids, of a non-human organism or a part thereof, preferably a microorganism, a plant cell, a plant or a part thereof, as compared to a corresponding non-transformed wild type non-human organism or a part thereof; and
[84737] (b) growing the non-human organism or a part thereof under conditions which permit the production of glucose-1-phosphate or a composition comprising glucose-1-phosphate in said non-human organism or in the culture medium surrounding said non-human organism.

[84738] A further embodiment of the present invention relates to a process for the production of 3,4,5-trihydroxypentanoic acid, which comprises
[84739] (a) increasing or generating one or more activities selected from the group consisting of b2654-protein in an organelle, preferably in plastids or mitochondria, especially in plastids, of a non-human organism or a part thereof, preferably a microorganism, a plant cell, a plant or a part thereof, as compared to a corresponding non-transformed wild type non-human organism or a part thereof; and
[84740] (b) growing the non-human organism or a part thereof under conditions which permit the production of 3,4,5-trihydroxypentanoic acid or a composition comprising 3,4,5-trihydroxypentanoic acid in said non-human organism or in the culture medium surrounding said non-human organism.

[84741] A further embodiment of the present invention relates to a process for the production of glucose-1-phosphate, which comprises
[84742] (a) increasing or generating one or more activities selected from the group consisting of b2670-protein in an organelle, preferably in plastids or mitochondria, especially in plastids, of a non-human organism or a part thereof, preferably a microorganism, a plant cell, a plant or a part thereof, as compared to a corresponding non-transformed wild type non-human organism or a part thereof; and
[84743] (b) growing the non-human organism or a part thereof under conditions which permit the production of glucose-1-phosphate or a composition comprising glucose-1-phosphate in said non-human organism or in the culture medium surrounding said non-human organism.

[84744] A further embodiment of the present invention relates to a process for the production of glucose-1-phosphate, which comprises
[84745] (a) increasing or generating one or more activities selected from the group consisting of b2673-protein in an organelle, preferably in plastids or mitochondria, especially in plastids, of a non-human organism or a part thereof, preferably a microorganism, a plant cell, a plant or a part thereof, as compared to a corresponding non-transformed wild type non-human organism or a part thereof; and
[84746] (b) growing the non-human organism or a part thereof under conditions which permit the production of glucose-1-phosphate or a composition comprising glucose-1-phosphate in said non-human organism or in the culture medium surrounding said non-human organism.

[84747] A further embodiment of the present invention relates to a process for the production of 3,4,5-trihydroxypentanoic acid, which comprises
[84748] (a) increasing or generating one or more activities selected from the group consisting of b2673-protein in an organelle, preferably in plastids or mitochondria, especially in plastids, of a non-human organism or a part thereof, preferably a microorganism, a plant cell, a plant or a part thereof, as compared to a corresponding non-transformed wild type non-human organism or a part thereof; and
[84749] (b) growing the non-human organism or a part thereof under conditions which permit the production of 3,4,5-trihydroxypentanoic acid or a composition comprising 3,4,5-trihydroxypentanoic acid in said non-human organism or in the culture medium surrounding said non-human organism.

[84750] A further embodiment of the present invention relates to a process for the production of myo-inositol, which comprises
[84751] (a) increasing or generating one or more activities selected from the group consisting of b2682-protein in an organelle, preferably in plastids or mitochondria, especially in plastids, of a non-human organism or a part thereof, preferably a microorganism, a plant cell, a plant or a part thereof, as compared to a corresponding non-transformed wild type non-human organism or a part thereof; and
[84752] (b) growing the non-human organism or a part thereof under conditions which permit the production of myo-inositol or a composition comprising myo-inositol in said non-human organism or in the culture medium surrounding said non-human organism.

[84753] A further embodiment of the present invention relates to a process for the production of glucose-1-phosphate, which comprises
[84754] (a) increasing or generating one or more activities selected from the group consisting of recombinase A in an organelle, preferably in plastids or mitochondria, especially in plastids, of a non-human organism or a part thereof, preferably a microorganism, a plant cell, a plant or a part thereof, as compared to a corresponding non-transformed wild type non-human organism or a part thereof; and
[84755] (b) growing the non-human organism or a part thereof under conditions which permit the production of glucose-1-phosphate or a composition comprising glucose-1-phosphate in said non-human organism or in the culture medium surrounding said non-human organism.

[84756] A further embodiment of the present invention relates to a process for the production of glucose-1-phosphate, which comprises
[84757] (a) increasing or generating one or more activities selected from the group consisting of murein transglycosylase in an organelle, preferably in plastids or mitochondria, especially in plastids, of a non-human organism or a part thereof, preferably a microorganism, a plant cell, a plant or a part thereof, as compared to a corresponding non-transformed wild type non-human organism or a part thereof; and
[84758] (b) growing the non-human organism or a part thereof under conditions which permit the production of glucose-1-phosphate or a composition comprising glucose-1-phosphate in said non-human organism or in the culture medium surrounding said non-human organism.

[84759] A further embodiment of the present invention relates to a process for the production of myo-inositol, which comprises
[84760] (a) increasing or generating one or more activities selected from the group consisting of transcriptional regulator in an organelle, preferably in plastids or mitochondria, especially in plastids, of a non-human organism or a part thereof, preferably a microorganism, a plant cell, a plant or a part thereof, as compared to a corresponding non-transformed wild type non-human organism or a part thereof; and
[84761] (b) growing the non-human organism or a part thereof under conditions which permit the production of myo-inositol or a composition comprising myo-inositol in said non-human organism or in the culture medium surrounding said non-human organism.

[84762] A further embodiment of the present invention relates to a process for the production of fructose, which comprises
[84763] (a) increasing or generating one or more activities selected from the group consisting of b2739-protein in an organelle, preferably in plastids or mitochondria, especially in plastids, of a non-human organism or a part thereof, preferably a microorganism, a plant cell, a plant or a part thereof, as compared to a corresponding non-transformed wild type non-human organism or a part thereof; and
[84764] (b) growing the non-human organism or a part thereof under conditions which permit the production of fructose or a composition comprising fructose in said non-human organism or in the culture medium surrounding said non-human organism.

[84765] A further embodiment of the present invention relates to a process for the production of glucose, which comprises
[84766] (a) increasing or generating one or more activities selected from the group consisting of b2739-protein in an organelle, preferably in plastids or mitochondria, especially in plastids, of a non-human organism or a part thereof, preferably a microorganism, a plant cell, a plant or a part thereof, as compared to a corresponding non-transformed wild type non-human organism or a part thereof; and
[84767] (b) growing the non-human organism or a part thereof under conditions which permit the production of glucose or a composition comprising glucose in said non-human organism or in the culture medium surrounding said non-human organism.

[84768] A further embodiment of the present invention relates to a process for the production of glucose, which comprises
[84769] (a) increasing or generating one or more activities selected from the group consisting of 2-C-methyl-D-erythritol 4-phosphate cytidylyltransferase in an organelle, preferably in plastids or mitochondria, especially in plastids, of a non-human organism or a part thereof, preferably a microorganism, a plant cell, a plant or a part thereof, as compared to a corresponding non-transformed wild type non-human organism or a part thereof; and
[84770] (b) growing the non-human organism or a part thereof under conditions which permit the production of glucose or a composition comprising glucose in said non-human organism or in the culture medium surrounding said non-human organism.

[84771] A further embodiment of the present invention relates to a process for the production of myo-inositol, which comprises
[84772] (a) increasing or generating one or more activities selected from the group consisting of 2-C-methyl-D-erythritol 4-phosphate cytidylyltransferase in an organelle, preferably in plastids or mitochondria, especially in plastids, of a non-human organism or a part thereof, preferably a microorganism, a plant cell, a plant or a part thereof, as compared to a corresponding non-transformed wild type non-human organism or a part thereof; and
[84773] (b) growing the non-human organism or a part thereof under conditions which permit the production of myo-inositol or a composition comprising myo-inositol in said non-human organism or in the culture medium surrounding said non-human organism.

[84774] A further embodiment of the present invention relates to a process for the production of raffinose, which comprises
[84775] (a) increasing or generating one or more activities selected from the group consisting of 2-C-methyl-D-erythritol 4-phosphate cytidylyltransferase in an organelle, preferably in plastids or mitochondria, especially in plastids, of a non-human organism or a part thereof, preferably a microorganism, a plant cell, a plant or a part thereof, as compared to a corresponding non-transformed wild type non-human organism or a part thereof; and
[84776] (b) growing the non-human organism or a part thereof under conditions which permit the production of raffinose or a composition comprising raffinose in said non-human organism or in the culture medium surrounding said non-human organism.

[84777] A further embodiment of the present invention relates to a process for the production of glucose-1-phosphate, which comprises
[84778] (a) increasing or generating one or more activities selected from the group consisting of phosphoadenosine phosphosulfate reductase in an organelle, preferably in plastids or mitochondria, especially in plastids, of a non-human organism or a part thereof, preferably a microorganism, a plant cell, a plant or a part thereof, as compared to a corresponding non-transformed wild type non-human organism or a part thereof; and
[84779] (b) growing the non-human organism or a part thereof under conditions which permit the production of glucose-1-phosphate or a composition comprising glucose-1-phosphate in said non-human organism or in the culture medium surrounding said non-human organism.

[84780] A further embodiment of the present invention relates to a process for the production of 3,4,5-trihydroxypentanoic acid, which comprises
[84781] (a) increasing or generating one or more activities selected from the group consisting of phosphoadenosine phosphosulfate reductase in an organelle, preferably in plastids or mitochondria, especially in plastids, of a non-human organism or a part thereof, preferably a microorganism, a plant cell, a plant or a part thereof, as compared to a corresponding non-transformed wild type non-human organism or a part thereof; and
[84782] (b) growing the non-human organism or a part thereof under conditions which permit the production of 3,4,5-trihydroxypentanoic acid or a composition comprising 3,4,5-trihydroxypentanoic acid in said non-human organism or in the culture medium surrounding said non-human organism.

[84783] A further embodiment of the present invention relates to a process for the production of fructose, which comprises
[84784] (a) increasing or generating one or more activities selected from the group consisting of flavodoxin in an organelle, preferably in plastids or mitochondria, especially in plastids, of a non-human organism or a part thereof, preferably a microorganism, a plant cell, a plant or a part thereof, as compared to a corresponding non-transformed wild type non-human organism or a part thereof; and
[84785] (b) growing the non-human organism or a part thereof under conditions which permit the production of fructose or a composition comprising fructose in said non-human organism or in the culture medium surrounding said non-human organism.

[84786] A further embodiment of the present invention relates to a process for the production of glucose, which comprises
[84787] (a) increasing or generating one or more activities selected from the group consisting of flavodoxin in an organelle, preferably in plastids or mitochondria, especially in plastids, of a non-human organism or a part thereof, preferably a microorganism, a plant cell, a plant or a part thereof, as compared to a corresponding non-transformed wild type non-human organism or a part thereof; and
[84788] (b) growing the non-human organism or a part thereof under conditions which permit the production of glucose or a composition comprising glucose in said non-human organism or in the culture medium surrounding said non-human organism.

[84789] A further embodiment of the present invention relates to a process for the production of glucose-1-phosphate, which comprises
[84790] (a) increasing or generating one or more activities selected from the group consisting of flavodoxin in an organelle, preferably in plastids or mitochondria, especially in plastids, of a non-human organism or a part thereof, preferably a microorganism, a plant cell, a plant or a part thereof, as compared to a corresponding non-transformed wild type non-human organism or a part thereof; and
[84791] (b) growing the non-human organism or a part thereof under conditions which permit the production of glucose-1-phosphate or a composition comprising glucose-1-phosphate in said non-human organism or in the culture medium surrounding said non-human organism.

[84792] A further embodiment of the present invention relates to a process for the production of myo-inositol, which comprises
[84793] (a) increasing or generating one or more activities selected from the group consisting of flavodoxin in an organelle, preferably in plastids or mitochondria, especially in plastids, of a non-human organism or a part thereof, preferably a microorganism, a plant cell, a plant or a part thereof, as compared to a corresponding non-transformed wild type non-human organism or a part thereof; and
[84794] (b) growing the non-human organism or a part thereof under conditions which permit the production of myo-inositol or a composition comprising myo-inositol in said non-human organism or in the culture medium surrounding said non-human organism.

[84795] A further embodiment of the present invention relates to a process for the production of 3,4,5-trihydroxypentanoic acid, which comprises
[84796] (a) increasing or generating one or more activities selected from the group consisting of flavodoxin in an organelle, preferably in plastids or mitochondria, especially in plastids, of a non-human organism or a part thereof, preferably a microorganism, a plant cell, a plant or a part thereof, as compared to a corresponding non-transformed wild type non-human organism or a part thereof; and
[84797] (b) growing the non-human organism or a part thereof under conditions which permit the production of 3,4,5-trihydroxypentanoic acid or a composition comprising 3,4,5-trihydroxypentanoic acid in said non-human organism or in the culture medium surrounding said non-human organism.

[84798] A further embodiment of the present invention relates to a process for the production of fructose, which comprises
[84799] (a) increasing or generating one or more activities selected from the group consisting of amino-acid acetyltransferase in an organelle, preferably in plastids or mitochondria, especially in plastids, of a non-human organism or a part thereof, preferably a microorganism, a plant cell, a plant or a part thereof, as compared to a corresponding non-transformed wild type non-human organism or a part thereof; and
[84800] (b) growing the non-human organism or a part thereof under conditions which permit the production of fructose or a composition comprising fructose in said non-human organism or in the culture medium surrounding said non-human organism.

[84801] A further embodiment of the present invention relates to a process for the production of glucose-1-phosphate, which comprises
[84802] (a) increasing or generating one or more activities selected from the group consisting of amino-acid acetyltransferase in an organelle, preferably in plastids or mitochondria, especially in plastids, of a non-human organism or a part thereof, preferably a microorganism, a plant cell, a plant or a part thereof, as compared to a corresponding non-transformed wild type non-human organism or a part thereof; and
[84803] (b) growing the non-human organism or a part thereof under conditions which permit the production of glucose-1-phosphate or a composition comprising glucose-1-phosphate in said non-human organism or in the culture medium surrounding said non-human organism.

[84804] A further embodiment of the present invention relates to a process for the production of myo-inositol, which comprises
[84805] (a) increasing or generating one or more activities selected from the group consisting of amino-acid acetyltransferase in an organelle, preferably in plastids or mitochondria, especially in plastids, of a non-human organism or a part thereof, preferably a microorganism, a plant cell, a plant or a part thereof, as compared to a corresponding non-transformed wild type non-human organism or a part thereof; and
[84806] (b) growing the non-human organism or a part thereof under conditions which permit the production of myo-inositol or a composition comprising myo-inositol in said non-human organism or in the culture medium surrounding said non-human organism.

[84807] A further embodiment of the present invention relates to a process for the production of raffinose, which comprises
[84808] (a) increasing or generating one or more activities selected from the group consisting of transcriptional regulator in an organelle, preferably in plastids or mitochondria, especially in plastids, of a non-human organism or a part thereof, preferably a microorganism, a plant cell, a plant or a part thereof, as compared to a corresponding non-transformed wild type non-human organism or a part thereof; and
[84809] (b) growing the non-human organism or a part thereof under conditions which permit the production of raffinose or a composition comprising raffinose in said non-human organism or in the culture medium surrounding said non-human organism.

[84810] A further embodiment of the present invention relates to a process for the production of glucose, which comprises
[84811] (a) increasing or generating one or more activities selected from the group consisting of arginine exporter protein in an organelle, preferably in plastids or mitochondria, especially in plastids, of a non-human organism or a part thereof, preferably a microorganism, a plant cell, a plant or a part thereof, as compared to a corresponding non-transformed wild type non-human organism or a part thereof; and
[84812] (b) growing the non-human organism or a part thereof under conditions which permit the production of glucose or a composition comprising glucose in said non-human organism or in the culture medium surrounding said non-human organism.

[84813] A further embodiment of the present invention relates to a process for the production of myo-inositol, which comprises
[84814] (a) increasing or generating one or more activities selected from the group consisting of arginine exporter protein in an organelle, preferably in plastids or mitochondria, especially in plastids, of a non-human organism or a part thereof, preferably a microorganism, a plant cell, a plant or a part thereof, as compared to a corresponding non-transformed wild type non-human organism or a part thereof; and
[84815] (b) growing the non-human organism or a part thereof under conditions which permit the production of myo-inositol or a composition comprising myo-inositol in said non-human organism or in the culture medium surrounding said non-human organism.

[84816] A further embodiment of the present invention relates to a process for the production of myo-inositol, which comprises
[84817] (a) increasing or generating one or more activities selected from the group consisting of b2932-protein in an organelle, preferably in plastids or mitochondria, especially in plastids, of a non-human organism or a part thereof, preferably a microorganism, a plant cell, a plant or a part thereof, as compared to a corresponding non-transformed wild type non-human organism or a part thereof; and
[84818] (b) growing the non-human organism or a part thereof under conditions which permit the production of myo-inositol or a composition comprising myo-inositol in said non-human organism or in the culture medium surrounding said non-human organism.

[84819] A further embodiment of the present invention relates to a process for the production of erythrol, which comprises
[84820] (a) increasing or generating one or more activities selected from the group consisting of L-serine dehydratase in an organelle, preferably in plastids or mitochondria, especially in plastids, of a non-human organism or a part thereof, preferably a microorganism, a plant cell, a plant or a part thereof, as compared to a corresponding non-transformed wild type non-human organism or a part thereof; and
[84821] (b) growing the non-human organism or a part thereof under conditions which permit the production of erythrol or a composition comprising erythrol in said non-human organism or in the culture medium surrounding said non-human organism.

[84822] A further embodiment of the present invention relates to a process for the production of myo-inositol, which comprises
[84823] (a) increasing or generating one or more activities selected from the group consisting of b3151-protein in an organelle, preferably in plastids or mitochondria, especially in plastids, of a non-human organism or a part thereof, preferably a microorganism, a plant cell, a plant or a part thereof, as compared to a corresponding non-transformed wild type non-human organism or a part thereof; and
[84824] (b) growing the non-human organism or a part thereof under conditions which permit the production of myo-inositol or a composition comprising myo-inositol in said non-human organism or in the culture medium surrounding said non-human organism.

[84825] A further embodiment of the present invention relates to a process for the production of raffinose, which comprises
[84826] (a) increasing or generating one or more activities selected from the group consisting of b3151-protein in an organelle, preferably in plastids or mitochondria, especially in plastids, of a non-human organism or a part thereof, preferably a microorganism, a plant cell, a plant or a part thereof, as compared to a corresponding non-transformed wild type non-human organism or a part thereof; and
[84827] (b) growing the non-human organism or a part thereof under conditions which permit the production of raffinose or a composition comprising raffinose in said non-human organism or in the culture medium surrounding said non-human organism.

[84828] A further embodiment of the present invention relates to a process for the production of sucrose, which comprises
[84829] (a) increasing or generating one or more activities selected from the group consisting of b3151-protein in an organelle, preferably in plastids or mitochondria, especially in plastids, of a non-human organism or a part thereof, preferably a microorganism, a plant cell, a plant or a part thereof, as compared to a corresponding non-transformed wild type non-human organism or a part thereof; and
[84830] (b) growing the non-human organism or a part thereof under conditions which permit the production of sucrose or a composition comprising sucrose in said non-human organism or in the culture medium surrounding said non-human organism.

[84831] A further embodiment of the present invention relates to a process for the production of fructose, which comprises
[84832] (a) increasing or generating one or more activities selected from the group consisting of b3221-protein in an organelle, preferably in plastids or mitochondria, especially in plastids, of a non-human organism or a part thereof, preferably a microorganism, a plant cell, a plant or a part thereof, as compared to a corresponding non-transformed wild type non-human organism or a part thereof; and
[84833] (b) growing the non-human organism or a part thereof under conditions which permit the production of fructose or a composition comprising fructose in said non-human organism or in the culture medium surrounding said non-human organism.

[84834] A further embodiment of the present invention relates to a process for the production of glucose, which comprises
[84835] (a) increasing or generating one or more activities selected from the group consisting of b3221-protein in an organelle, preferably in plastids or mitochondria, especially in plastids, of a non-human organism or a part thereof, preferably a microorganism, a plant cell, a plant or a part thereof, as compared to a corresponding non-transformed wild type non-human organism or a part thereof; and
[84836] (b) growing the non-human organism or a part thereof under conditions which permit the production of glucose or a composition comprising glucose in said non-human organism or in the culture medium surrounding said non-human organism.

[84837] A further embodiment of the present invention relates to a process for the production of 3,4,5-trihydroxypentanoic acid, which comprises
[84838] (a) increasing or generating one or more activities selected from the group consisting of b3221-protein in an organelle, preferably in plastids or mitochondria, especially in plastids, of a non-human organism or a part thereof, preferably a microorganism, a plant cell, a plant or a part thereof, as compared to a corresponding non-transformed wild type non-human organism or a part thereof; and
[84839] (b) growing the non-human organism or a part thereof under conditions which permit the production of 3,4,5-trihydroxypentanoic acid or a composition comprising 3,4,5-trihydroxypentanoic acid in said non-human organism or in the culture medium surrounding said non-human organism.

[84840] A further embodiment of the present invention relates to a process for the production of myo-inositol, which comprises
[84841] (a) increasing or generating one or more activities selected from the group consisting of b3246-protein in an organelle, preferably in plastids or mitochondria, especially in plastids, of a non-human organism or a part thereof, preferably a microorganism, a plant cell, a plant or a part thereof, as compared to a corresponding non-transformed wild type non-human organism or a part thereof; and
[84842] (b) growing the non-human organism or a part thereof under conditions which permit the production of myo-inositol or a composition comprising myo-inositol in said non-human organism or in the culture medium surrounding said non-human organism.

[84843] A further embodiment of the present invention relates to a process for the production of myo-inositol, which comprises
[84844] (a) increasing or generating one or more activities selected from the group consisting of acetyl CoA carboxylase in an organelle, preferably in plastids or mitochondria, especially in plastids, of a non-human organism or a part thereof, preferably a microorganism, a plant cell, a plant or a part thereof, as compared to a corresponding non-transformed wild type non-human organism or a part thereof; and
[84845] (b) growing the non-human organism or a part thereof under conditions which permit the production of myo-inositol or a composition comprising myo-inositol in said non-human organism or in the culture medium surrounding said non-human organism.

[84846] A further embodiment of the present invention relates to a process for the production of fructose, which comprises
[84847] (a) increasing or generating one or more activities selected from the group consisting of methyltransferase in an organelle, preferably in plastids or mitochondria, especially in plastids, of a non-human organism or a part thereof, preferably a microorganism, a plant cell, a plant or a part thereof, as compared to a corresponding non-transformed wild type non-human organism or a part thereof; and
[84848] (b) growing the non-human organism or a part thereof under conditions which permit the production of fructose or a composition comprising fructose in said non-human organism or in the culture medium surrounding said non-human organism.

[84849] A further embodiment of the present invention relates to a process for the production of glucose, which comprises
[84850] (a) increasing or generating one or more activities selected from the group consisting of methyltransferase in an organelle, preferably in plastids or mitochondria, especially in plastids, of a non-human organism or a part thereof, preferably a microorganism, a plant cell, a plant or a part thereof, as compared to a corresponding non-transformed wild type non-human organism or a part thereof; and
[84851] (b) growing the non-human organism or a part thereof under conditions which permit the production of glucose or a composition comprising glucose in said non-human organism or in the culture medium surrounding said non-human organism.

[84852] A further embodiment of the present invention relates to a process for the production of glucose-1-phosphate, which comprises
[84853] (a) increasing or generating one or more activities selected from the group consisting of methyltransferase in an organelle, preferably in plastids or mitochondria, especially in plastids, of a non-human organism or a part thereof, preferably a microorganism, a plant cell, a plant or a part thereof, as compared to a corresponding non-transformed wild type non-human organism or a part thereof; and
[84854] (b) growing the non-human organism or a part thereof under conditions which permit the production of glucose-1-phosphate or a composition comprising glucose-1-phosphate in said non-human organism or in the culture medium surrounding said non-human organism.

[84855] A further embodiment of the present invention relates to a process for the production of raffinose, which comprises
[84856] (a) increasing or generating one or more activities selected from the group consisting of methyltransferase in an organelle, preferably in plastids or mitochondria, especially in plastids, of a non-human organism or a part thereof, preferably a microorganism, a plant cell, a plant or a part thereof, as compared to a corresponding non-transformed wild type non-human organism or a part thereof; and
[84857] (b) growing the non-human organism or a part thereof under conditions which permit the production of raffinose or a composition comprising raffinose in said non-human organism or in the culture medium surrounding said non-human organism.

[84858] A further embodiment of the present invention relates to a process for the production of sucrose, which comprises
[84859] (a) increasing or generating one or more activities selected from the group consisting of methyltransferase in an organelle, preferably in plastids or mitochondria, especially in plastids, of a non-human organism or a part thereof, preferably a microorganism, a plant cell, a plant or a part thereof, as compared to a corresponding non-transformed wild type non-human organism or a part thereof; and
[84860] (b) growing the non-human organism or a part thereof under conditions which permit the production of sucrose or a composition comprising sucrose in said non-human organism or in the culture medium surrounding said non-human organism.

[84861] A further embodiment of the present invention relates to a process for the production of glucose, which comprises
[84862] (a) increasing or generating one or more activities selected from the group consisting of ferredoxin in an organelle, preferably in plastids or mitochondria, especially in plastids, of a non-human organism or a part thereof, preferably a microorganism, a plant cell, a plant or a part thereof, as compared to a corresponding non-transformed wild type non-human organism or a part thereof; and
[84863] (b) growing the non-human organism or a part thereof under conditions which permit the production of glucose or a composition comprising glucose in said non-human organism or in the culture medium surrounding said non-human organism.

[84864] A further embodiment of the present invention relates to a process for the production of myo-inositol, which comprises
[84865] (a) increasing or generating one or more activities selected from the group consisting of b3346-protein in an organelle, preferably in plastids or mitochondria, especially in plastids, of a non-human organism or a part thereof, preferably a microorganism, a plant cell, a plant or a part thereof, as compared to a corresponding non-transformed wild type non-human organism or a part thereof; and
[84866] (b) growing the non-human organism or a part thereof under conditions which permit the production of myo-inositol or a composition comprising myo-inositol in said non-human organism or in the culture medium surrounding said non-human organism.

[84867] A further embodiment of the present invention relates to a process for the production of raffinose, which comprises
[84868] (a) increasing or generating one or more activities selected from the group consisting of b3346-protein in an organelle, preferably in plastids or mitochondria, especially in plastids, of a non-human organism or a part thereof, preferably a microorganism, a plant cell, a plant or a part thereof, as compared to a corresponding non-transformed wild type non-human organism or a part thereof; and
[84869] (b) growing the non-human organism or a part thereof under conditions which permit the production of raffinose or a composition comprising raffinose in said non-human organism or in the culture medium surrounding said non-human organism.

[84870] A further embodiment of the present invention relates to a process for the production of 3,4,5-trihydroxypentanoic acid, which comprises
[84871] (a) increasing or generating one or more activities selected from the group consisting of b3346-protein in an organelle, preferably in plastids or mitochondria, especially in plastids, of a non-human organism or a part thereof, preferably a microorganism, a plant cell, a plant or a part thereof, as compared to a corresponding non-transformed wild type non-human organism or a part thereof; and
[84872] (b) growing the non-human organism or a part thereof under conditions which permit the production of 3,4,5-trihydroxypentanoic acid or a composition comprising 3,4,5-trihydroxypentanoic acid in said non-human organism or in the culture medium surrounding said non-human organism.

[84873] A further embodiment of the present invention relates to a process for the production of fructose, which comprises
[84874] (a) increasing or generating one or more activities selected from the group consisting of phosphoenolpyruvate carboxykinase in an organelle, preferably in plastids or mitochondria, especially in plastids, of a non-human organism or a part thereof, preferably a microorganism, a plant cell, a plant or a part thereof, as compared to a corresponding non-transformed wild type non-human organism or a part thereof; and
[84875] (b) growing the non-human organism or a part thereof under conditions which permit the production of fructose or a composition comprising fructose in said non-human organism or in the culture medium surrounding said non-human organism.

[84876] A further embodiment of the present invention relates to a process for the production of glucose, which comprises
[84877] (a) increasing or generating one or more activities selected from the group consisting of phosphoenolpyruvate carboxykinase in an organelle, preferably in plastids or mitochondria, especially in plastids, of a non-human organism or a part thereof, preferably a microorganism, a plant cell, a plant or a part thereof, as compared to a corresponding non-transformed wild type non-human organism or a part thereof; and
[84878] (b) growing the non-human organism or a part thereof under conditions which permit the production of glucose or a composition comprising glucose in said non-human organism or in the culture medium surrounding said non-human organism.

[84879] A further embodiment of the present invention relates to a process for the production of 3,4,5-trihydroxypentanoic acid, which comprises
[84880] (a) increasing or generating one or more activities selected from the group consisting of B3427-protein in an organelle, preferably in plastids or mitochondria, especially in plastids, of a non-human organism or a part thereof, preferably a microorganism, a plant cell, a plant or a part thereof, as compared to a corresponding non-transformed wild type non-human organism or a part thereof; and
[84881] (b) growing the non-human organism or a part thereof under conditions which permit the production of 3,4,5-trihydroxypentanoic acid or a composition comprising 3,4,5-trihydroxypentanoic acid in said non-human organism or in the culture medium surrounding said non-human organism.

[84882] A further embodiment of the present invention relates to a process for the production of fructose, which comprises
[84883] (a) increasing or generating one or more activities selected from the group consisting of glycogen synthase in an organelle, preferably in plastids or mitochondria, especially in plastids, of a non-human organism or a part thereof, preferably a microorganism, a plant cell, a plant or a part thereof, as compared to a corresponding non-transformed wild type non-human organism or a part thereof; and
[84884] (b) growing the non-human organism or a part thereof under conditions which permit the production of fructose or a composition comprising fructose in said non-human organism or in the culture medium surrounding said non-human organism.

[84885] A further embodiment of the present invention relates to a process for the production of glucose, which comprises
[84886] (a) increasing or generating one or more activities selected from the group consisting of glycogen synthase in an organelle, preferably in plastids or mitochondria, especially in plastids, of a non-human organism or a part thereof, preferably a microorganism, a plant cell, a plant or a part thereof, as compared to a corresponding non-transformed wild type non-human organism or a part thereof; and
[84887] (b) growing the non-human organism or a part thereof under conditions which permit the production of glucose or a composition comprising glucose in said non-human organism or in the culture medium surrounding said non-human organism.

[84888] A further embodiment of the present invention relates to a process for the production of myo-inositol, which comprises
[84889] (a) increasing or generating one or more activities selected from the group consisting of b3442-protein in an organelle, preferably in plastids or mitochondria, especially in plastids, of a non-human organism or a part thereof, preferably a microorganism, a plant cell, a plant or a part thereof, as compared to a corresponding non-transformed wild type non-human organism or a part thereof; and
[84890] (b) growing the non-human organism or a part thereof under conditions which permit the production of myo-inositol or a composition comprising myo-inositol in said non-human organism or in the culture medium surrounding said non-human organism.

[84891] A further embodiment of the present invention relates to a process for the production of 3,4,5-trihydroxypentanoic acid, which comprises
[84892] (a) increasing or generating one or more activities selected from the group consisting of B3443-protein in an organelle, preferably in plastids or mitochondria, especially in plastids, of a non-human organism or a part thereof, preferably a microorganism, a plant cell, a plant or a part thereof, as compared to a corresponding non-transformed wild type non-human organism or a part thereof; and
[84893] (b) growing the non-human organism or a part thereof under conditions which permit the production of 3,4,5-trihydroxypentanoic acid or a composition comprising 3,4,5-trihydroxypentanoic acid in said non-human organism or in the culture medium surrounding said non-human organism.

[84894] A further embodiment of the present invention relates to a process for the production of saccharic acid, which comprises
[84895] (a) increasing or generating one or more activities selected from the group consisting of sn-glycerol-3-phosphate transport system permease protein in an organelle, preferably in plastids or mitochondria, especially in plastids, of a non-human organism or a part thereof, preferably a microorganism, a plant cell, a plant or a part thereof, as compared to a corresponding non-transformed wild type non-human organism or a part thereof; and
[84896] (b) growing the non-human organism or a part thereof under conditions which permit the production of saccharic acid or a composition comprising saccharic acid in said non-human organism or in the culture medium surrounding said non-human organism.

[84897] A further embodiment of the present invention relates to a process for the production of glucose-1-phosphate, which comprises
[84898] (a) increasing or generating one or more activities selected from the group consisting of high-affinity branched-chain amino acid transport protein in an organelle, preferably in plastids or mitochondria, especially in plastids, of a non-human organism or a part thereof, preferably a microorganism, a plant cell, a plant or a part thereof, as compared to a corresponding non-transformed wild type non-human organism or a part thereof; and
[84899] (b) growing the non-human organism or a part thereof under conditions which permit the production of glucose-1-phosphate or a composition comprising glucose-1-phosphate in said non-human organism or in the culture medium surrounding said non-human organism.

[84900] A further embodiment of the present invention relates to a process for the production of myo-inositol, which comprises
[84901] (a) increasing or generating one or more activities selected from the group consisting of high-affinity branched-chain amino acid transport protein in an organelle, preferably in plastids or mitochondria, especially in plastids, of a non-human organism or a part thereof, preferably a microorganism, a plant cell, a plant or a part thereof, as compared to a corresponding non-transformed wild type non-human organism or a part thereof; and
[84902] (b) growing the non-human organism or a part thereof under conditions which permit the production of myo-inositol or a composition comprising myo-inositol in said non-human organism or in the culture medium surrounding said non-human organism.

[84903] A further embodiment of the present invention relates to a process for the production of fructose, which comprises
[84904] (a) increasing or generating one or more activities selected from the group consisting of trehalase in an organelle, preferably in plastids or mitochondria, especially in plastids, of a non-human organism or a part thereof, preferably a microorganism, a plant cell, a plant or a part thereof, as compared to a corresponding non-transformed wild type non-human organism or a part thereof; and
[84905] (b) growing the non-human organism or a part thereof under conditions which permit the production of fructose or a composition comprising fructose in said non-human organism or in the culture medium surrounding said non-human organism.

[84906] A further embodiment of the present invention relates to a process for the production of galactinol, which comprises
[84907] (a) increasing or generating one or more activities selected from the group consisting of trehalase in an organelle, preferably in plastids or mitochondria, especially in plastids, of a non-human organism or a part thereof, preferably a microorganism, a plant cell, a plant or a part thereof, as compared to a corresponding non-transformed wild type non-human organism or a part thereof; and
[84908] (b) growing the non-human organism or a part thereof under conditions which permit the production of galactinol or a composition comprising galactinol in said non-human organism or in the culture medium surrounding said non-human organism.

[84909] A further embodiment of the present invention relates to a process for the production of fructose, which comprises
[84910] (a) increasing or generating one or more activities selected from the group consisting of mannitol-1-phosphate dehydrogenase in an organelle, preferably in plastids or mitochondria, especially in plastids, of a non-human organism or a part thereof, preferably a microorganism, a plant cell, a plant or a part thereof, as compared to a corresponding non-transformed wild type non-human organism or a part thereof; and
[84911] (b) growing the non-human organism or a part thereof under conditions which permit the production of fructose or a composition comprising fructose in said non-human organism or in the culture medium surrounding said non-human organism.

[84912] A further embodiment of the present invention relates to a process for the production of mannitol, which comprises
[84913] (a) increasing or generating one or more activities selected from the group consisting of mannitol-1-phosphate dehydrogenase in an organelle, preferably in plastids or mitochondria, especially in plastids, of a non-human organism or a part thereof, preferably a microorganism, a plant cell, a plant or a part thereof, as compared to a corresponding non-transformed wild type non-human organism or a part thereof; and
[84914] (b) growing the non-human organism or a part thereof under conditions which permit the production of mannitol or a composition comprising mannitol in said non-human organism or in the culture medium surrounding said non-human organism.

[84915] A further embodiment of the present invention relates to a process for the production of sorbitol, which comprises
[84916] (a) increasing or generating one or more activities selected from the group consisting of mannitol-1-phosphate dehydrogenase in an organelle, preferably in plastids or mitochondria, especially in plastids, of a non-human organism or a part thereof, preferably a microorganism, a plant cell, a plant or a part thereof, as compared to a corresponding non-transformed wild type non-human organism or a part thereof; and
[84917] (b) growing the non-human organism or a part thereof under conditions which permit the production of sorbitol or a composition comprising sorbitol in said non-human organism or in the culture medium surrounding said non-human organism.

[84918] A further embodiment of the present invention relates to a process for the production of galactinol, which comprises
[84919] (a) increasing or generating one or more activities selected from the group consisting of ketol-acid reductoisomerase in an organelle, preferably in plastids or mitochondria, especially in plastids, of a non-human organism or a part thereof, preferably a microorganism, a plant cell, a plant or a part thereof, as compared to a corresponding non-transformed wild type non-human organism or a part thereof; and
[84920] (b) growing the non-human organism or a part thereof under conditions which permit the production of galactinol or a composition comprising galactinol in said non-human organism or in the culture medium surrounding said non-human organism.

[84921] A further embodiment of the present invention relates to a process for the production of myo-inositol, which comprises
[84922] (a) increasing or generating one or more activities selected from the group consisting of b3777-protein in an organelle, preferably in plastids or mitochondria, especially in plastids, of a non-human organism or a part thereof, preferably a microorganism, a plant cell, a plant or a part thereof, as compared to a corresponding non-transformed wild type non-human organism or a part thereof; and
[84923] (b) growing the non-human organism or a part thereof under conditions which permit the production of myo-inositol or a composition comprising myo-inositol in said non-human organism or in the culture medium surrounding said non-human organism.

[84924] A further embodiment of the present invention relates to a process for the production of myo-inositol, which comprises
[84925] (a) increasing or generating one or more activities selected from the group consisting of b3817-protein in an organelle, preferably in plastids or mitochondria, especially in plastids, of a non-human organism or a part thereof, preferably a microorganism, a plant cell, a plant or a part thereof, as compared to a corresponding non-transformed wild type non-human organism or a part thereof; and
[84926] (b) growing the non-human organism or a part thereof under conditions which permit the production of myo-inositol or a composition comprising myo-inositol in said non-human organism or in the culture medium surrounding said non-human organism.

[84927] A further embodiment of the present invention relates to a process for the production of raffinose, which comprises
[84928] (a) increasing or generating one or more activities selected from the group consisting of b3817-protein in an organelle, preferably in plastids or mitochondria, especially in plastids, of a non-human organism or a part thereof, preferably a microorganism, a plant cell, a plant or a part thereof, as compared to a corresponding non-transformed wild type non-human organism or a part thereof; and
[84929] (b) growing the non-human organism or a part thereof under conditions which permit the production of raffinose or a composition comprising raffinose in said non-human organism or in the culture medium surrounding said non-human organism.

[84930] A further embodiment of the present invention relates to a process for the production of myo-inositol, which comprises
[84931] (a) increasing or generating one or more activities selected from the group consisting of b3818-protein in an organelle, preferably in plastids or mitochondria, especially in plastids, of a non-human organism or a part thereof, preferably a microorganism, a plant cell, a plant or a part thereof, as compared to a corresponding non-transformed wild type non-human organism or a part thereof; and
[84932] (b) growing the non-human organism or a part thereof under conditions which permit the production of myo-inositol or a composition comprising myo-inositol in said non-human organism or in the culture medium surrounding said non-human organism.

[84933] A further embodiment of the present invention relates to a process for the production of myo-inositol, which comprises
[84934] (a) increasing or generating one or more activities selected from the group consisting of threonine efflux protein in an organelle, preferably in plastids or mitochondria, especially in plastids, of a non-human organism or a part thereof, preferably a microorganism, a plant cell, a plant or a part thereof, as compared to a corresponding non-transformed wild type non-human organism or a part thereof; and
[84935] (b) growing the non-human organism or a part thereof under conditions which permit the production of myo-inositol or a composition comprising myo-inositol in said non-human organism or in the culture medium surrounding said non-human organism.

[84936] A further embodiment of the present invention relates to a process for the production of myo-inositol, which comprises
[84937] (a) increasing or generating one or more activities selected from the group consisting of glutamine synthetase in an organelle, preferably in plastids or mitochondria, especially in plastids, of a non-human organism or a part thereof, preferably a microorganism, a plant cell, a plant or a part thereof, as compared to a corresponding non-transformed wild type non-human organism or a part thereof; and
[84938] (b) growing the non-human organism or a part thereof under conditions which permit the production of myo-inositol or a composition comprising myo-inositol in said non-human organism or in the culture medium surrounding said non-human organism.

[84939] A further embodiment of the present invention relates to a process for the production of verbascose, which comprises
[84940] (a) increasing or generating one or more activities selected from the group consisting of glutamine synthetase in an organelle, preferably in plastids or mitochondria, especially in plastids, of a non-human organism or a part thereof, preferably a microorganism, a plant cell, a plant or a part thereof, as compared to a corresponding non-transformed wild type non-human organism or a part thereof; and
[84941] (b) growing the non-human organism or a part thereof under conditions which permit the production of verbascose or a composition comprising verbascose in said non-human organism or in the culture medium surrounding said non-human organism.

[84942] A further embodiment of the present invention relates to a process for the production of glucose-1-phosphate, which comprises
[84943] (a) increasing or generating one or more activities selected from the group consisting of transcriptional regulator in an organelle, preferably in plastids or mitochondria, especially in plastids, of a non-human organism or a part thereof, preferably a microorganism, a plant cell, a plant or a part thereof, as compared to a corresponding non-transformed wild type non-human organism or a part thereof; and
[84944] (b) growing the non-human organism or a part thereof under conditions which permit the production of glucose-1-phosphate or a composition comprising glucose-1-phosphate in said non-human organism or in the culture medium surrounding said non-human organism.

[84945] A further embodiment of the present invention relates to a process for the production of fructose, which comprises
[84946] (a) increasing or generating one or more activities selected from the group consisting of b3989-protein in an organelle, preferably in plastids or mitochondria, especially in plastids, of a non-human organism or a part thereof, preferably a microorganism, a plant cell, a plant or a part thereof, as compared to a corresponding non-transformed wild type non-human organism or a part thereof; and
[84947] (b) growing the non-human organism or a part thereof under conditions which permit the production of fructose or a composition comprising fructose in said non-human organism or in the culture medium surrounding said non-human organism.

[84948] A further embodiment of the present invention relates to a process for the production of glucose, which comprises
[84949] (a) increasing or generating one or more activities selected from the group consisting of b3989-protein in an organelle, preferably in plastids or mitochondria, especially in plastids, of a non-human organism or a part thereof, preferably a microorganism, a plant cell, a plant or a part thereof, as compared to a corresponding non-transformed wild type non-human organism or a part thereof; and
[84950] (b) growing the non-human organism or a part thereof under conditions which permit the production of glucose or a composition comprising glucose in said non-human organism or in the culture medium surrounding said non-human organism.

[84951] A further embodiment of the present invention relates to a process for the production of glucose-1-phosphate, which comprises
[84952] (a) increasing or generating one or more activities selected from the group consisting of b3989-protein in an organelle, preferably in plastids or mitochondria, especially in plastids, of a non-human organism or a part thereof, preferably a microorganism, a plant cell, a plant or a part thereof, as compared to a corresponding non-transformed wild type non-human organism or a part thereof; and
[84953] (b) growing the non-human organism or a part thereof under conditions which permit the production of glucose-1-phosphate or a composition comprising glucose-1-phosphate in said non-human organism or in the culture medium surrounding said non-human organism.

[84954] A further embodiment of the present invention relates to a process for the production of raffinose, which comprises
[84955] (a) increasing or generating one or more activities selected from the group consisting of b3989-protein in an organelle, preferably in plastids or mitochondria, especially in plastids, of a non-human organism or a part thereof, preferably a microorganism, a plant cell, a plant or a part thereof, as compared to a corresponding non-transformed wild type non-human organism or a part thereof; and
[84956] (b) growing the non-human organism or a part thereof under conditions which permit the production of raffinose or a composition comprising raffinose in said non-human organism or in the culture medium surrounding said non-human organism.

[84957] A further embodiment of the present invention relates to a process for the production of sucrose, which comprises
[84958] (a) increasing or generating one or more activities selected from the group consisting of b3989-protein in an organelle, preferably in plastids or mitochondria, especially in plastids, of a non-human organism or a part thereof, preferably a microorganism, a plant cell, a plant or a part thereof, as compared to a corresponding non-transformed wild type non-human organism or a part thereof; and
[84959] (b) growing the non-human organism or a part thereof under conditions which permit the production of sucrose or a composition comprising sucrose in said non-human organism or in the culture medium surrounding said non-human organism.

[84960] A further embodiment of the present invention relates to a process for the production of galactinol, which comprises
[84961] (a) increasing or generating one or more activities selected from the group consisting of acetyltransferase in an organelle, preferably in plastids or mitochondria, especially in plastids, of a non-human organism or a part thereof, preferably a microorganism, a plant cell, a plant or a part thereof, as compared to a corresponding non-transformed wild type non-human organism or a part thereof; and
[84962] (b) growing the non-human organism or a part thereof under conditions which permit the production of galactinol or a composition comprising galactinol in said non-human organism or in the culture medium surrounding said non-human organism.

[84963] A further embodiment of the present invention relates to a process for the production of fructose, which comprises
[84964] (a) increasing or generating one or more activities selected from the group consisting of b4029-protein in an organelle, preferably in plastids or mitochondria, especially in plastids, of a non-human organism or a part thereof, preferably a microorganism, a plant cell, a plant or a part thereof, as compared to a corresponding non-transformed wild type non-human organism or a part thereof; and
[84965] (b) growing the non-human organism or a part thereof under conditions which permit the production of fructose or a composition comprising fructose in said non-human organism or in the culture medium surrounding said non-human organism.

[84966] A further embodiment of the present invention relates to a process for the production of glucose, which comprises
[84967] (a) increasing or generating one or more activities selected from the group consisting of b4029-protein in an organelle, preferably in plastids or mitochondria, especially in plastids, of a non-human organism or a part thereof, preferably a microorganism, a plant cell, a plant or a part thereof, as compared to a corresponding non-transformed wild type non-human organism or a part thereof; and
[84968] (b) growing the non-human organism or a part thereof under conditions which permit the production of glucose or a composition comprising glucose in said non-human organism or in the culture medium surrounding said non-human organism.

[84969] A further embodiment of the present invention relates to a process for the production of sedoheptulose-7-phosphate, which comprises
[84970] (a) increasing or generating one or more activities selected from the group consisting of b4029-protein in an organelle, preferably in plastids or mitochondria, especially in plastids, of a non-human organism or a part thereof, preferably a microorganism, a plant cell, a plant or a part thereof, as compared to a corresponding non-transformed wild type non-human organism or a part thereof; and
[84971] (b) growing the non-human organism or a part thereof under conditions which permit the production of sedoheptulose-7-phosphate or a composition comprising sedoheptulose-7-phosphate in said non-human organism or in the culture medium surrounding said non-human organism.

[84972] A further embodiment of the present invention relates to a process for the production of glucose-1-phosphate, which comprises
[84973] (a) increasing or generating one or more activities selected from the group consisting of chorismate lyase in an organelle, preferably in plastids or mitochondria, especially in plastids, of a non-human organism or a part thereof, preferably a microorganism, a plant cell, a plant or a part thereof, as compared to a corresponding non-transformed wild type non-human organism or a part thereof; and
[84974] (b) growing the non-human organism or a part thereof under conditions which permit the production of glucose-1-phosphate or a composition comprising glucose-1-phosphate in said non-human organism or in the culture medium surrounding said non-human organism.

[84975] A further embodiment of the present invention relates to a process for the production of 3,4,5-trihydroxypentanoic acid, which comprises
[84976] (a) increasing or generating one or more activities selected from the group consisting of chorismate lyase in an organelle, preferably in plastids or mitochondria, especially in plastids, of a non-human organism or a part thereof, preferably a microorganism, a plant cell, a plant or a part thereof, as compared to a corresponding non-transformed wild type non-human organism or a part thereof; and
[84977] (b) growing the non-human organism or a part thereof under conditions which permit the production of 3,4,5-trihydroxypentanoic acid or a composition comprising 3,4,5-trihydroxypentanoic acid in said non-human organism or in the culture medium surrounding said non-human organism.

[84978] A further embodiment of the present invention relates to a process for the production of fructose, which comprises
[84979] (a) increasing or generating one or more activities selected from the group consisting of b4050-protein in an organelle, preferably in plastids or mitochondria, especially in plastids, of a non-human organism or a part thereof, preferably a microorganism, a plant cell, a plant or a part thereof, as compared to a corresponding non-transformed wild type non-human organism or a part thereof; and
[84980] (b) growing the non-human organism or a part thereof under conditions which permit the production of fructose or a composition comprising fructose in said non-human organism or in the culture medium surrounding said non-human organism.

[84981] A further embodiment of the present invention relates to a process for the production of glucose, which comprises
[84982] (a) increasing or generating one or more activities selected from the group consisting of b4050-protein in an organelle, preferably in plastids or mitochondria, especially in plastids, of a non-human organism or a part thereof, preferably a microorganism, a plant cell, a plant or a part thereof, as compared to a corresponding non-transformed wild type non-human organism or a part thereof; and
[84983] (b) growing the non-human organism or a part thereof under conditions which permit the production of glucose or a composition comprising glucose in said non-human organism or in the culture medium surrounding said non-human organism.

[84984] A further embodiment of the present invention relates to a process for the production of myo-inositol, which comprises
[84985] (a) increasing or generating one or more activities selected from the group consisting of b4050-protein in an organelle, preferably in plastids or mitochondria, especially in plastids, of a non-human organism or a part thereof, preferably a microorganism, a plant cell, a plant or a part thereof, as compared to a corresponding non-transformed wild type non-human organism or a part thereof; and
[84986] (b) growing the non-human organism or a part thereof under conditions which permit the production of myo-inositol or a composition comprising myo-inositol in said non-human organism or in the culture medium surrounding said non-human organism.

[84987] A further embodiment of the present invention relates to a process for the production of fructose, which comprises
[84988] (a) increasing or generating one or more activities selected from the group consisting of b4056-protein in an organelle, preferably in plastids or mitochondria, especially in plastids, of a non-human organism or a part thereof, preferably a microorganism, a plant cell, a plant or a part thereof, as compared to a corresponding non-transformed wild type non-human organism or a part thereof; and
[84989] (b) growing the non-human organism or a part thereof under conditions which permit the production of fructose or a composition comprising fructose in said non-human organism or in the culture medium surrounding said non-human organism.

[84990] A further embodiment of the present invention relates to a process for the production of galactinol, which comprises
[84991] (a) increasing or generating one or more activities selected from the group consisting of acetyl-coenzyme A synthetase in an organelle, preferably in plastids or mitochondria, especially in plastids, of a non-human organism or a part thereof, preferably a microorganism, a plant cell, a plant or a part thereof, as compared to a corresponding non-transformed wild type non-human organism or a part thereof; and
[84992] (b) growing the non-human organism or a part thereof under conditions which permit the production of galactinol or a composition comprising galactinol in said non-human organism or in the culture medium surrounding said non-human organism.

[84993] A further embodiment of the present invention relates to a process for the production of glucose-1-phosphate, which comprises
[84994] (a) increasing or generating one or more activities selected from the group consisting of lipoprotein precursor in an organelle, preferably in plastids or mitochondria, especially in plastids, of a non-human organism or a part thereof, preferably a microorganism, a plant cell, a plant or a part thereof, as compared to a corresponding non-transformed wild type non-human organism or a part thereof; and
[84995] (b) growing the non-human organism or a part thereof under conditions which permit the production of glucose-1-phosphate or a composition comprising glucose-1-phosphate in said non-human organism or in the culture medium surrounding said non-human organism.

[84996] A further embodiment of the present invention relates to a process for the production of 3,4,5-trihydroxypentanoic acid, which comprises
[84997] (a) increasing or generating one or more activities selected from the group consisting of lipoprotein precursor in an organelle, preferably in plastids or mitochondria, especially in plastids, of a non-human organism or a part thereof, preferably a microorganism, a plant cell, a plant or a part thereof, as compared to a corresponding non-transformed wild type non-human organism or a part thereof; and
[84998] (b) growing the non-human organism or a part thereof under conditions which permit the production of 3,4,5-trihydroxypentanoic acid or a composition comprising 3,4,5-trihydroxypentanoic acid in said non-human organism or in the culture medium surrounding said non-human organism.

[84999] A further embodiment of the present invention relates to a process for the production of myo-inositol, which comprises
[85000] (a) increasing or generating one or more activities selected from the group consisting of b4250-protein in an organelle, preferably in plastids or mitochondria, especially in plastids, of a non-human organism or a part thereof, preferably a microorganism, a plant cell, a plant or a part thereof, as compared to a corresponding non-transformed wild type non-human organism or a part thereof; and
[85001] (b) growing the non-human organism or a part thereof under conditions which permit the production of myo-inositol or a composition comprising myo-inositol in said non-human organism or in the culture medium surrounding said non-human organism.

[85002] A further embodiment of the present invention relates to a process for the production of raffinose, which comprises
[85003] (a) increasing or generating one or more activities selected from the group consisting of b4250-protein in an organelle, preferably in plastids or mitochondria, especially in plastids, of a non-human organism or a part thereof, preferably a microorganism, a plant cell, a plant or a part thereof, as compared to a corresponding non-transformed wild type non-human organism or a part thereof; and
[85004] (b) growing the non-human organism or a part thereof under conditions which permit the production of raffinose or a composition comprising raffinose in said non-human organism or in the culture medium surrounding said non-human organism.

[85005] A further embodiment of the present invention relates to a process for the production of fructose, which comprises
[85006] (a) increasing or generating one or more activities selected from the group consisting of acetyltransferase in an organelle, preferably in plastids or mitochondria, especially in plastids, of a non-human organism or a part thereof, preferably a microorganism, a plant cell, a plant or a part thereof, as compared to a corresponding non-transformed wild type non-human organism or a part thereof; and
[85007] (b) growing the non-human organism or a part thereof under conditions which permit the production of fructose or a composition comprising fructose in said non-human organism or in the culture medium surrounding said non-human organism.

[85008] A further embodiment of the present invention relates to a process for the production of glucose, which comprises
[85009] (a) increasing or generating one or more activities selected from the group consisting of acetyltransferase in an organelle, preferably in plastids or mitochondria, especially in plastids, of a non-human organism or a part thereof, preferably a microorganism, a plant cell, a plant or a part thereof, as compared to a corresponding non-transformed wild type non-human organism or a part thereof; and
[85010] (b) growing the non-human organism or a part thereof under conditions which permit the production of glucose or a composition comprising glucose in said non-human organism or in the culture medium surrounding said non-human organism.

[85011] A further embodiment of the present invention relates to a process for the production of fructose, which comprises
[85012] (a) increasing or generating one or more activities selected from the group consisting of gluconate transport system permease 3 in an organelle, preferably in plastids or mitochondria, especially in plastids, of a non-human organism or a part thereof, preferably a microorganism, a plant cell, a plant or a part thereof, as compared to a corresponding non-transformed wild type non-human organism or a part thereof; and
[85013] (b) growing the non-human organism or a part thereof under conditions which permit the production of fructose or a composition comprising fructose in said non-human organism or in the culture medium surrounding said non-human organism.

[85014] A further embodiment of the present invention relates to a process for the production of galactinol, which comprises
[85015] (a) increasing or generating one or more activities selected from the group consisting of purine-nucleoside phosphorylase in an organelle, preferably in plastids or mitochondria, especially in plastids, of a non-human organism or a part thereof, preferably a microorganism, a plant cell, a plant or a part thereof, as compared to a corresponding non-transformed wild type non-human organism or a part thereof; and
[85016] (b) growing the non-human organism or a part thereof under conditions which permit the production of galactinol or a composition comprising galactinol in said non-human organism or in the culture medium surrounding said non-human organism.

[85017] A further embodiment of the present invention relates to a process for the production of myo-inositol, which comprises
[85018] (a) increasing or generating one or more activities selected from the group consisting of lysine decarboxylase in an organelle, preferably in plastids or mitochondria, especially in plastids, of a non-human organism or a part thereof, preferably a microorganism, a plant cell, a plant or a part thereof, as compared to a corresponding non-transformed wild type non-human organism or a part thereof; and
[85019] (b) growing the non-human organism or a part thereof under conditions which permit the production of myo-inositol or a composition comprising myo-inositol in said non-human organism or in the culture medium surrounding said non-human organism.

[85020] A further embodiment of the present invention relates to a process for the production of fructose, which comprises
[85021] (a) increasing or generating one or more activities selected from the group consisting of glutaredoxin in an organelle, preferably in plastids or mitochondria, especially in plastids, of a non-human organism or a part thereof, preferably a microorganism, a plant cell, a plant or a part thereof, as compared to a corresponding non-transformed wild type non-human organism or a part thereof; and
[85022] (b) growing the non-human organism or a part thereof under conditions which permit the production of fructose or a composition comprising fructose in said non-human organism or in the culture medium surrounding said non-human organism.

[85023] A further embodiment of the present invention relates to a process for the production of glucose, which comprises
[85024] (a) increasing or generating one or more activities selected from the group consisting of glutaredoxin in an organelle, preferably in plastids or mitochondria, especially in plastids, of a non-human organism or a part thereof, preferably a microorganism, a plant cell, a plant or a part thereof, as compared to a corresponding non-transformed wild type non-human organism or a part thereof; and
[85025] (b) growing the non-human organism or a part thereof under conditions which permit the production of glucose or a composition comprising glucose in said non-human organism or in the culture medium surrounding said non-human organism.

[85026] A further embodiment of the present invention relates to a process for the production of glucose-1-phosphate, which comprises
[85027] (a) increasing or generating one or more activities selected from the group consisting of glutaredoxin in an organelle, preferably in plastids or mitochondria, especially in plastids, of a non-human organism or a part thereof, preferably a microorganism, a plant cell, a plant or a part thereof, as compared to a corresponding non-transformed wild type non-human organism or a part thereof; and
[85028] (b) growing the non-human organism or a part thereof under conditions which permit the production of glucose-1-phosphate or a composition comprising glucose-1-phosphate in said non-human organism or in the culture medium surrounding said non-human organism.

[85029] A further embodiment of the present invention relates to a process for the production of myo-inositol, which comprises
[85030] (a) increasing or generating one or more activities selected from the group consisting of glutaredoxin in an organelle, preferably in plastids or mitochondria, especially in plastids, of a non-human organism or a part thereof, preferably a microorganism, a plant cell, a plant or a part thereof, as compared to a corresponding non-transformed wild type non-human organism or a part thereof; and
[85031] (b) growing the non-human organism or a part thereof under conditions which permit the production of myo-inositol or a composition comprising myo-inositol in said non-human organism or in the culture medium surrounding said non-human organism.

[85032] A further embodiment of the present invention relates to a process for the production of sucrose, which comprises
[85033] (a) increasing or generating one or more activities selected from the group consisting of glutaredoxin in an organelle, preferably in plastids or mitochondria, especially in plastids, of a non-human organism or a part thereof, preferably a microorganism, a plant cell, a plant or a part thereof, as compared to a corresponding non-transformed wild type non-human organism or a part thereof; and
[85034] (b) growing the non-human organism or a part thereof under conditions which permit the production of sucrose or a composition comprising sucrose in said non-human organism or in the culture medium surrounding said non-human organism.

[85035] A further embodiment of the present invention relates to a process for the production of glucose-1-phosphate, which comprises
[85036] (a) increasing or generating one or more activities selected from the group consisting of transcription factor in an organelle, preferably in plastids or mitochondria, especially in plastids, of a non-human organism or a part thereof, preferably a microorganism, a plant cell, a plant or a part thereof, as compared to a corresponding non-transformed wild type non-human organism or a part thereof; and
[85037] (b) growing the non-human organism or a part thereof under conditions which permit the production of glucose-1-phosphate or a composition comprising glucose-1-phosphate in said non-human organism or in the culture medium surrounding said non-human organism.

[85038] A further embodiment of the present invention relates to a process for the production of 3,4,5-trihydroxypentanoic acid, which comprises
[85039] (a) increasing or generating one or more activities selected from the group consisting of transcription factor in an organelle, preferably in plastids or mitochondria, especially in plastids, of a non-human organism or a part thereof, preferably a microorganism, a plant cell, a plant or a part thereof, as compared to a corresponding non-transformed wild type non-human organism or a part thereof; and
[85040] (b) growing the non-human organism or a part thereof under conditions which permit the production of 3,4,5-trihydroxypentanoic acid or a composition comprising 3,4,5-trihydroxypentanoic acid in said non-human organism or in the culture medium surrounding said non-human organism.

[85041] A further embodiment of the present invention relates to a process for the production of fructose, which comprises
[85042] (a) increasing or generating one or more activities selected from the group consisting of transcription factor in an organelle, preferably in plastids or mitochondria, especially in plastids, of a non-human organism or a part thereof, preferably a microorganism, a plant cell, a plant or a part thereof, as compared to a corresponding non-transformed wild type non-human organism or a part thereof; and
[85043] (b) growing the non-human organism or a part thereof under conditions which permit the production of fructose or a composition comprising fructose in said non-human organism or in the culture medium surrounding said non-human organism.

[85044] A further embodiment of the present invention relates to a process for the production of glucose-1-phosphate, which comprises
[85045] (a) increasing or generating one or more activities selected from the group consisting of GM02LC38418-protein in an organelle, preferably in plastids or mitochondria, especially in plastids, of a non-human organism or a part thereof, preferably a microorganism, a plant cell, a plant or a part thereof, as compared to a corresponding non-transformed wild type non-human organism or a part thereof; and
[85046] (b) growing the non-human organism or a part thereof under conditions which permit the production of glucose-1-phosphate or a composition comprising glucose-1-phosphate in said non-human organism or in the culture medium surrounding said non-human organism.

[85047] A further embodiment of the present invention relates to a process for the production of glucose-1-phosphate, which comprises
[85048] (a) increasing or generating one or more activities selected from the group consisting of cyclin D in an organelle, preferably in plastids or mitochondria, especially in plastids, of a non-human organism or a part thereof, preferably a microorganism, a plant cell, a plant or a part thereof, as compared to a corresponding non-transformed wild type non-human organism or a part thereof; and
[85049] (b) growing the non-human organism or a part thereof under conditions which permit the production of glucose-1-phosphate or a composition comprising glucose-1-phosphate in said non-human organism or in the culture medium surrounding said non-human organism.

[85050] A further embodiment of the present invention relates to a process for the production of raffinose, which comprises
[85051] (a) increasing or generating one or more activities selected from the group consisting of cyclin D in an organelle, preferably in plastids or mitochondria, especially in plastids, of a non-human organism or a part thereof, preferably a microorganism, a plant cell, a plant or a part thereof, as compared to a corresponding non-transformed wild type non-human organism or a part thereof; and
[85052] (b) growing the non-human organism or a part thereof under conditions which permit the production of raffinose or a composition comprising raffinose in said non-human organism or in the culture medium surrounding said non-human organism.

[85053] A further embodiment of the present invention relates to a process for the production of sucrose, which comprises
[85054] (a) increasing or generating one or more activities selected from the group consisting of cyclin D in an organelle, preferably in plastids or mitochondria, especially in plastids, of a non-human organism or a part thereof, preferably a microorganism, a plant cell, a plant or a part thereof, as compared to a corresponding non-transformed wild type non-human organism or a part thereof; and
[85055] (b) growing the non-human organism or a part thereof under conditions which permit the production of sucrose or a composition comprising sucrose in said non-human organism or in the culture medium surrounding said non-human organism.

[85056] A further embodiment of the present invention relates to a process for the production of 3,4,5-trihydroxypentanoic acid, which comprises
[85057] (a) increasing or generating one or more activities selected from the group consisting of GM02LC46-protein in an organelle, preferably in plastids or mitochondria, especially in plastids, of a non-human organism or a part thereof, preferably a microorganism, a plant cell, a plant or a part thereof, as compared to a corresponding non-transformed wild type non-human organism or a part thereof; and
[85058] (b) growing the non-human organism or a part thereof under conditions which permit the production of 3,4,5-trihydroxypentanoic acid or a composition comprising 3,4,5-trihydroxypentanoic acid in said non-human organism or in the culture medium surrounding said non-human organism.

[85059] A further embodiment of the present invention relates to a process for the production of 3,4,5-trihydroxypentanoic acid, which comprises
[85060] (a) increasing or generating one or more activities selected from the group consisting of transcription factor in an organelle, preferably in plastids or mitochondria, especially in plastids, of a non-human organism or a part thereof, preferably a microorganism, a plant cell, a plant or a part thereof, as compared to a corresponding non-transformed wild type non-human organism or a part thereof; and
[85061] (b) growing the non-human organism or a part thereof under conditions which permit the production of 3,4,5-trihydroxypentanoic acid or a composition comprising 3,4,5-trihydroxypentanoic acid in said non-human organism or in the culture medium surrounding said non-human organism.

[85062] A further embodiment of the present invention relates to a process for the production of myo-inositol, which comprises
[85063] (a) increasing or generating one or more activities selected from the group consisting of alkaline phosphatase in an organelle, preferably in plastids or mitochondria, especially in plastids, of a non-human organism or a part thereof, preferably a microorganism, a plant cell, a plant or a part thereof, as compared to a corresponding non-transformed wild type non-human organism or a part thereof; and
[85064] (b) growing the non-human organism or a part thereof under conditions which permit the production of myo-inositol or a composition comprising myo-inositol in said non-human organism or in the culture medium surrounding said non-human organism.

[85065] A further embodiment of the present invention relates to a process for the production of verbascose, which comprises
[85066] (a) increasing or generating one or more activities selected from the group consisting of flavodoxin in an organelle, preferably in plastids or mitochondria, especially in plastids, of a non-human organism or a part thereof, preferably a microorganism, a plant cell, a plant or a part thereof, as compared to a corresponding non-transformed wild type non-human organism or a part thereof; and
[85067] (b) growing the non-human organism or a part thereof under conditions which permit the production of verbascose or a composition comprising verbascose in said non-human organism or in the culture medium surrounding said non-human organism.

[85068] A further embodiment of the present invention relates to a process for the production of sucrose, which comprises
[85069] (a) increasing or generating one or more activities selected from the group consisting of sll0254-protein in an organelle, preferably in plastids or mitochondria, especially in plastids, of a non-human organism or a part thereof, preferably a microorganism, a plant cell, a plant or a part thereof, as compared to a corresponding non-transformed wild type non-human organism or a part thereof; and
[85070] (b) growing the non-human organism or a part thereof under conditions which permit the production of sucrose or a composition comprising sucrose in said non-human organism or in the culture medium surrounding said non-human organism.

[85071] A further embodiment of the present invention relates to a process for the production of verbascose, which comprises
[85072] (a) increasing or generating one or more activities selected from the group consisting of sll0281-protein in an organelle, preferably in plastids or mitochondria, especially in plastids, of a non-human organism or a part thereof, preferably a microorganism, a plant cell, a plant or a part thereof, as compared to a corresponding non-transformed wild type non-human organism or a part thereof; and
[85073] (b) growing the non-human organism or a part thereof under conditions which permit the production of verbascose or a composition comprising verbascose in said non-human organism or in the culture medium surrounding said non-human organism.

[85074] A further embodiment of the present invention relates to a process for the production of myo-inositol, which comprises
[85075] (a) increasing or generating one or more activities selected from the group consisting of sll0354-protein in an organelle, preferably in plastids or mitochondria, especially in plastids, of a non-human organism or a part thereof, preferably a microorganism, a plant cell, a plant or a part thereof, as compared to a corresponding non-transformed wild type non-human organism or a part thereof; and
[85076] (b) growing the non-human organism or a part thereof under conditions which permit the production of myo-inositol or a composition comprising myo-inositol in said non-human organism or in the culture medium surrounding said non-human organism.

[85077] A further embodiment of the present invention relates to a process for the production of myo-inositol, which comprises
[85078] (a) increasing or generating one or more activities selected from the group consisting of bifunctional protein (phosphoribosyltransferase and regulatory protein) in an organelle, preferably in plastids or mitochondria, especially in plastids, of a non-human organism or a part thereof, preferably a microorganism, a plant cell, a plant or a part thereof, as compared to a corresponding non-transformed wild type non-human organism or a part thereof; and
[85079] (b) growing the non-human organism or a part thereof under conditions which permit the production of myo-inositol or a composition comprising myo-inositol in said non-human organism or in the culture medium surrounding said non-human organism.

[85080] A further embodiment of the present invention relates to a process for the production of glucose-1-phosphate, which comprises
[85081] (a) increasing or generating one or more activities selected from the group consisting of sll0418-protein in an organelle, preferably in plastids or mitochondria, especially in plastids, of a non-human organism or a part thereof, preferably a microorganism, a plant cell, a plant or a part thereof, as compared to a corresponding non-transformed wild type non-human organism or a part thereof; and
[85082] (b) growing the non-human organism or a part thereof under conditions which permit the production of glucose-1-phosphate or a composition comprising glucose-1-phosphate in said non-human organism or in the culture medium surrounding said non-human organism.

[85083] A further embodiment of the present invention relates to a process for the production of myo-inositol, which comprises
[85084] (a) increasing or generating one or more activities selected from the group consisting of sll0418-protein in an organelle, preferably in plastids or mitochondria, especially in plastids, of a non-human organism or a part thereof, preferably a microorganism, a plant cell, a plant or a part thereof, as compared to a corresponding non-transformed wild type non-human organism or a part thereof; and
[85085] (b) growing the non-human organism or a part thereof under conditions which permit the production of myo-inositol or a composition comprising myo-inositol in said non-human organism or in the culture medium surrounding said non-human organism.

[85086] A further embodiment of the present invention relates to a process for the production of myo-inositol, which comprises
[85087] (a) increasing or generating one or more activities selected from the group consisting of sll0418-protein in an organelle, preferably in plastids or mitochondria, especially in plastids, of a non-human organism or a part thereof, preferably a microorganism, a plant cell, a plant or a part thereof, as compared to a corresponding non-transformed wild type non-human organism or a part thereof; and
[85088] (b) growing the non-human organism or a part thereof under conditions which permit the production of myo-inositol or a composition comprising myo-inositol in said non-human organism or in the culture medium surrounding said non-human organism.

[85089] A further embodiment of the present invention relates to a process for the production of saccharic acid, which comprises
[85090] (a) increasing or generating one or more activities selected from the group consisting of sll0418-protein in an organelle, preferably in plastids or mitochondria, especially in plastids, of a non-human organism or a part thereof, preferably a microorganism, a plant cell, a plant or a part thereof, as compared to a corresponding non-transformed wild type non-human organism or a part thereof; and
[85091] (b) growing the non-human organism or a part thereof under conditions which permit the production of saccharic acid or a composition comprising saccharic acid in said non-human organism or in the culture medium surrounding said non-human organism.

[85092] A further embodiment of the present invention relates to a process for the production of 3,4,5-trihydroxypentanoic acid, which comprises
[85093] (a) increasing or generating one or more activities selected from the group consisting of sll0418-protein in an organelle, preferably in plastids or mitochondria, especially in plastids, of a non-human organism or a part thereof, preferably a microorganism, a plant cell, a plant or a part thereof, as compared to a corresponding non-transformed wild type non-human organism or a part thereof; and
[85094] (b) growing the non-human organism or a part thereof under conditions which permit the production of 3,4,5-trihydroxypentanoic acid or a composition comprising 3,4,5-trihydroxypentanoic acid in said non-human organism or in the culture medium surrounding said non-human organism.

[85095] A further embodiment of the present invention relates to a process for the production of glucose-1-phosphate, which comprises
[85096] (a) increasing or generating one or more activities selected from the group consisting of urease subunit in an organelle, preferably in plastids or mitochondria, especially in plastids, of a non-human organism or a part thereof, preferably a microorganism, a plant cell, a plant or a part thereof, as compared to a corresponding non-transformed wild type non-human organism or a part thereof; and
[85097] (b) growing the non-human organism or a part thereof under conditions which permit the production of glucose-1-phosphate or a composition comprising glucose-1-phosphate in said non-human organism or in the culture medium surrounding said non-human organism.

[85098] A further embodiment of the present invention relates to a process for the production of glucose-1-phosphate, which comprises
[85099] (a) increasing or generating one or more activities selected from the group consisting of glucokinase in an organelle, preferably in plastids or mitochondria, especially in plastids, of a non-human organism or a part thereof, preferably a microorganism, a plant cell, a plant or a part thereof, as compared to a corresponding non-transformed wild type non-human organism or a part thereof; and
[85100] (b) growing the non-human organism or a part thereof under conditions which permit the production of glucose-1-phosphate or a composition comprising glucose-1-phosphate in said non-human organism or in the culture medium surrounding said non-human organism.

[85101] A further embodiment of the present invention relates to a process for the production of saccharic acid, which comprises
[85102] (a) increasing or generating one or more activities selected from the group consisting of urease accessory protein in an organelle, preferably in plastids or mitochondria, especially in plastids, of a non-human organism or a part thereof, preferably a microorganism, a plant cell, a plant or a part thereof, as compared to a corresponding non-transformed wild type non-human organism or a part thereof; and
[85103] (b) growing the non-human organism or a part thereof under conditions which permit the production of saccharic acid or a composition comprising saccharic acid in said non-human organism or in the culture medium surrounding said non-human organism.

[85104] A further embodiment of the present invention relates to a process for the production of glucose-1-phosphate, which comprises
[85105] (a) increasing or generating one or more activities selected from the group consisting of binding-protein-dependent transport systems inner membrane component in an organelle, preferably in plastids or mitochondria, especially in plastids, of a non-human organism or a part thereof, preferably a microorganism, a plant cell, a plant or a part thereof, as compared to a corresponding non-transformed wild type non-human organism or a part thereof; and
[85106] (b) growing the non-human organism or a part thereof under conditions which permit the production of glucose-1-phosphate or a composition comprising glucose-1-phosphate in said non-human organism or in the culture medium surrounding said non-human organism.

[85107] A further embodiment of the present invention relates to a process for the production of 3,4,5-trihydroxypentanoic acid, which comprises
[85108] (a) increasing or generating one or more activities selected from the group consisting of binding-protein-dependent transport systems inner membrane component in an organelle, preferably in plastids or mitochondria, especially in plastids, of a non-human organism or a part thereof, preferably a microorganism, a plant cell, a plant or a part thereof, as compared to a corresponding non-transformed wild type non-human organism or a part thereof; and
[85109] (b) growing the non-human organism or a part thereof under conditions which permit the production of 3,4,5-trihydroxypentanoic acid or a composition comprising 3,4,5-trihydroxypentanoic acid in said non-human organism or in the culture medium surrounding said non-human organism.

[85110] A further embodiment of the present invention relates to a process for the production of glucose-1-phosphate, which comprises
[85111] (a) increasing or generating one or more activities selected from the group consisting of 3-deoxy-7-phosphoheptulonate synthase in an organelle, preferably in plastids or mitochondria, especially in plastids, of a non-human organism or a part thereof, preferably a microorganism, a plant cell, a plant or a part thereof, as compared to a corresponding non-transformed wild type non-human organism or a part thereof; and
[85112] (b) growing the non-human organism or a part thereof under conditions which permit the production of glucose-1-phosphate or a composition comprising glucose-1-phosphate in said non-human organism or in the culture medium surrounding said non-human organism.

[85113] A further embodiment of the present invention relates to a process for the production of fructose, which comprises
[85114] (a) increasing or generating one or more activities selected from the group consisting of glycogen synthase in an organelle, preferably in plastids or mitochondria, especially in plastids, of a non-human organism or a part thereof, preferably a microorganism, a plant cell, a plant or a part thereof, as compared to a corresponding non-transformed wild type non-human organism or a part thereof; and
[85115] (b) growing the non-human organism or a part thereof under conditions which permit the production of fructose or a composition comprising fructose in said non-human organism or in the culture medium surrounding said non-human organism.

[85116] A further embodiment of the present invention relates to a process for the production of sucrose, which comprises
[85117] (a) increasing or generating one or more activities selected from the group consisting of glycogen synthase in an organelle, preferably in plastids or mitochondria, especially in plastids, of a non-human organism or a part thereof, preferably a microorganism, a plant cell, a plant or a part thereof, as compared to a corresponding non-transformed wild type non-human organism or a part thereof; and
[85118] (b) growing the non-human organism or a part thereof under conditions which permit the production of sucrose or a composition comprising sucrose in said non-human organism or in the culture medium surrounding said non-human organism.

[85119] A further embodiment of the present invention relates to a process for the production of glucose-1-phosphate, which comprises
[85120] (a) increasing or generating one or more activities selected from the group consisting of coproporphyrinogen oxidase in an organelle, preferably in plastids or mitochondria, especially in plastids, of a non-human organism or a part thereof, preferably a microorganism, a plant cell, a plant or a part thereof, as compared to a corresponding non-transformed wild type non-human organism or a part thereof; and
[85121] (b) growing the non-human organism or a part thereof under conditions which permit the production of glucose-1-phosphate or a composition comprising glucose-1-phosphate in said non-human organism or in the culture medium surrounding said non-human organism.

[85122] A further embodiment of the present invention relates to a process for the production of 3,4,5-trihydroxypentanoic acid, which comprises
[85123] (a) increasing or generating one or more activities selected from the group consisting of short chain dehydrogenase in an organelle, preferably in plastids or mitochondria, especially in plastids, of a non-human organism or a part thereof, preferably a microorganism, a plant cell, a plant or a part thereof, as compared to a corresponding non-transformed wild type non-human organism or a part thereof; and
[85124] (b) growing the non-human organism or a part thereof under conditions which permit the production of 3,4,5-trihydroxypentanoic acid or a composition comprising 3,4,5-trihydroxypentanoic acid in said non-human organism or in the culture medium surrounding said non-human organism.

[85125] A further embodiment of the present invention relates to a process for the production of raffinose, which comprises
[85126] (a) increasing or generating one or more activities selected from the group consisting of glycogen (starch) synthase in an organelle, preferably in plastids or mitochondria, especially in plastids, of a non-human organism or a part thereof, preferably a microorganism, a plant cell, a plant or a part thereof, as compared to a corresponding non-transformed wild type non-human organism or a part thereof; and
[85127] (b) growing the non-human organism or a part thereof under conditions which permit the production of raffinose or a composition comprising raffinose in said non-human organism or in the culture medium surrounding said non-human organism.

[85128] A further embodiment of the present invention relates to a process for the production of myo-inositol, which comprises
[85129] (a) increasing or generating one or more activities selected from the group consisting of carbamoyl-phosphate synthase subunit in an organelle, preferably in plastids or mitochondria, especially in plastids, of a non-human organism or a part thereof, preferably a microorganism, a plant cell, a plant or a part thereof, as compared to a corresponding non-transformed wild type non-human organism or a part thereof; and
[85130] (b) growing the non-human organism or a part thereof under conditions which permit the production of myo-inositol or a composition comprising myo-inositol in said non-human organism or in the culture medium surrounding said non-human organism.

[85131] A further embodiment of the present invention relates to a process for the production of 3,4,5-trihydroxypentanoic acid, which comprises
[85132] (a) increasing or generating one or more activities selected from the group consisting of carbamoyl-phosphate synthase subunit in an organelle, preferably in plastids or mitochondria, especially in plastids, of a non-human organism or a part thereof, preferably a microorganism, a plant cell, a plant or a part thereof, as compared to a corresponding non-transformed wild type non-human organism or a part thereof; and
[85133] (b) growing the non-human organism or a part thereof under conditions which permit the production of 3,4,5-trihydroxypentanoic acid or a composition comprising 3,4,5-trihydroxypentanoic acid in said non-human organism or in the culture medium surrounding said non-human organism.

[85134] A further embodiment of the present invention relates to a process for the production of myo-inositol, which comprises
[85135] (a) increasing or generating one or more activities selected from the group consisting of 4-alpha-glucanotransferase in an organelle, preferably in plastids or mitochondria, especially in plastids, of a non-human organism or a part thereof, preferably a microorganism, a plant cell, a plant or a part thereof, as compared to a corresponding non-transformed wild type non-human organism or a part thereof; and
[85136] (b) growing the non-human organism or a part thereof under conditions which permit the production of myo-inositol or a composition comprising myo-inositol in said non-human organism or in the culture medium surrounding said non-human organism.

[85137] A further embodiment of the present invention relates to a process for the production of 3,4,5-trihydroxypentanoic acid, which comprises
[85138] (a) increasing or generating one or more activities selected from the group consisting of alanine dehydrogenase in an organelle, preferably in plastids or mitochondria, especially in plastids, of a non-human organism or a part thereof, preferably a microorganism, a plant cell, a plant or a part thereof, as compared to a corresponding non-transformed wild type non-human organism or a part thereof; and
[85139] (b) growing the non-human organism or a part thereof under conditions which permit the production of 3,4,5-trihydroxypentanoic acid or a composition comprising 3,4,5-trihydroxypentanoic acid in said non-human organism or in the culture medium surrounding said non-human organism.

[85140] A further embodiment of the present invention relates to a process for the production of glucose, which comprises
[85141] (a) increasing or generating one or more activities selected from the group consisting of sll1761-protein in an organelle, preferably in plastids or mitochondria, especially in plastids, of a non-human organism or a part thereof, preferably a microorganism, a plant cell, a plant or a part thereof, as compared to a corresponding non-transformed wild type non-human organism or a part thereof; and
[85142] (b) growing the non-human organism or a part thereof under conditions which permit the production of glucose or a composition comprising glucose in said non-human organism or in the culture medium surrounding said non-human organism.

[85143] A further embodiment of the present invention relates to a process for the production of glucose, which comprises
[85144] (a) increasing or generating one or more activities selected from the group consisting of acyl transferase in an organelle, preferably in plastids or mitochondria, especially in plastids, of a non-human organism or a part thereof, preferably a microorganism, a plant cell, a plant or a part thereof, as compared to a corresponding non-transformed wild type non-human organism or a part thereof; and
[85145] (b) growing the non-human organism or a part thereof under conditions which permit the production of glucose or a composition comprising glucose in said non-human organism or in the culture medium surrounding said non-human organism.

[85146] A further embodiment of the present invention relates to a process for the production of glucose-1-phosphate, which comprises
[85147] (a) increasing or generating one or more activities selected from the group consisting of cation-transporting ATPase in an organelle, preferably in plastids or mitochondria, especially in plastids, of a non-human organism or a part thereof, preferably a microorganism, a plant cell, a plant or a part thereof, as compared to a corresponding non-transformed wild type non-human organism or a part thereof; and
[85148] (b) growing the non-human organism or a part thereof under conditions which permit the production of glucose-1-phosphate or a composition comprising glucose-1-phosphate in said non-human organism or in the culture medium surrounding said non-human organism.

[85149] A further embodiment of the present invention relates to a process for the production of glucose-1-phosphate, which comprises
[85150] (a) increasing or generating one or more activities selected from the group consisting of cation-transporting ATPase in an organelle, preferably in plastids or mitochondria, especially in plastids, of a non-human organism or a part thereof, preferably a microorganism, a plant cell, a plant or a part thereof, as compared to a corresponding non-transformed wild type non-human organism or a part thereof; and
[85151] (b) growing the non-human organism or a part thereof under conditions which permit the production of glucose-1-phosphate or a composition comprising glucose-1-phosphate in said non-human organism or in the culture medium surrounding said non-human organism.

[85152] A further embodiment of the present invention relates to a process for the production of myo-inositol, which comprises
[85153] (a) increasing or generating one or more activities selected from the group consisting of cation-transporting ATPase in an organelle, preferably in plastids or mitochondria, especially in plastids, of a non-human organism or a part thereof, preferably a microorganism, a plant cell, a plant or a part thereof, as compared to a corresponding non-transformed wild type non-human organism or a part thereof; and
[85154] (b) growing the non-human organism or a part thereof under conditions which permit the production of myo-inositol or a composition comprising myo-inositol in said non-human organism or in the culture medium surrounding said non-human organism.

[85155] A further embodiment of the present invention relates to a process for the production of raffinose, which comprises
[85156] (a) increasing or generating one or more activities selected from the group consisting of cation-transporting ATPase in an organelle, preferably in plastids or mitochondria, especially in plastids, of a non-human organism or a part thereof, preferably a microorganism, a plant cell, a plant or a part thereof, as compared to a corresponding non-transformed wild type non-human organism or a part thereof; and
[85157] (b) growing the non-human organism or a part thereof under conditions which permit the production of raffinose or a composition comprising raffinose in said non-human organism or in the culture medium surrounding said non-human organism.

[85158] A further embodiment of the present invention relates to a process for the production of glucose-1-phosphate, which comprises
[85159] (a) increasing or generating one or more activities selected from the group consisting of glycosidase in an organelle, preferably in plastids or mitochondria, especially in plastids, of a non-human organism or a part thereof, preferably a microorganism, a plant cell, a plant or a part thereof, as compared to a corresponding non-transformed wild type non-human organism or a part thereof; and
[85160] (b) growing the non-human organism or a part thereof under conditions which permit the production of glucose-1-phosphate or a composition comprising glucose-1-phosphate in said non-human organism or in the culture medium surrounding said non-human organism.

[85161] A further embodiment of the present invention relates to a process for the production of fructose, which comprises
[85162] (a) increasing or generating one or more activities selected from the group consisting of precorrin methylase in an organelle, preferably in plastids or mitochondria, especially in plastids, of a non-human organism or a part thereof, preferably a microorganism, a plant cell, a plant or a part thereof, as compared to a corresponding non-transformed wild type non-human organism or a part thereof; and
[85163] (b) growing the non-human organism or a part thereof under conditions which permit the production of fructose or a composition comprising fructose in said non-human organism or in the culture medium surrounding said non-human organism.

[85164] A further embodiment of the present invention relates to a process for the production of glucose, which comprises
[85165] (a) increasing or generating one or more activities selected from the group consisting of precorrin methylase in an organelle, preferably in plastids or mitochondria, especially in plastids, of a non-human organism or a part thereof, preferably a microorganism, a plant cell, a plant or a part thereof, as compared to a corresponding non-transformed wild type non-human organism or a part thereof; and
[85166] (b) growing the non-human organism or a part thereof under conditions which permit the production of glucose or a composition comprising glucose in said non-human organism or in the culture medium surrounding said non-human organism.

[85167] A further embodiment of the present invention relates to a process for the production of glucose-1-phosphate, which comprises
[85168] (a) increasing or generating one or more activities selected from the group consisting of oxidoreductase in an organelle, preferably in plastids or mitochondria, especially in plastids, of a non-human organism or a part thereof, preferably a microorganism, a plant cell, a plant or a part thereof, as compared to a corresponding non-transformed wild type non-human organism or a part thereof; and
[85169] (b) growing the non-human organism or a part thereof under conditions which permit the production of glucose-1-phosphate or a composition comprising glucose-1-phosphate in said non-human organism or in the culture medium surrounding said non-human organism.

[85170] A further embodiment of the present invention relates to a process for the production of 3,4,5-trihydroxypentanoic acid, which comprises
[85171] (a) increasing or generating one or more activities selected from the group consisting of oxidoreductase in an organelle, preferably in plastids or mitochondria, especially in plastids, of a non-human organism or a part thereof, preferably a microorganism, a plant cell, a plant or a part thereof, as compared to a corresponding non-transformed wild type non-human organism or a part thereof; and
[85172] (b) growing the non-human organism or a part thereof under conditions which permit the production of 3,4,5-trihydroxypentanoic acid or a composition comprising 3,4,5-trihydroxypentanoic acid in said non-human organism or in the culture medium surrounding said non-human organism.

[85173] A further embodiment of the present invention relates to a process for the production of glucose-1-phosphate, which comprises
[85174] (a) increasing or generating one or more activities selected from the group consisting of slr0600-protein in an organelle, preferably in plastids or mitochondria, especially in plastids, of a non-human organism or a part thereof, preferably a microorganism, a plant cell, a plant or a part thereof, as compared to a corresponding non-transformed wild type non-human organism or a part thereof; and
[85175] (b) growing the non-human organism or a part thereof under conditions which permit the production of glucose-1-phosphate or a composition comprising glucose-1-phosphate in said non-human organism or in the culture medium surrounding said non-human organism.

[85176] A further embodiment of the present invention relates to a process for the production of glucose-1-phosphate, which comprises
[85177] (a) increasing or generating one or more activities selected from the group consisting of Glu/Leu/Phe/Val dehydrogenase in an organelle, preferably in plastids or mitochondria, especially in plastids, of a non-human organism or a part thereof, preferably a microorganism, a plant cell, a plant or a part thereof, as compared to a corresponding non-transformed wild type non-human organism or a part thereof; and
[85178] (b) growing the non-human organism or a part thereof under conditions which permit the production of glucose-1-phosphate or a composition comprising glucose-1-phosphate in said non-human organism or in the culture medium surrounding said non-human organism.

[85179] A further embodiment of the present invention relates to a process for the production of glucose-1-phosphate, which comprises
[85180] (a) increasing or generating one or more activities selected from the group consisting of malate dehydrogenase in an organelle, preferably in plastids or mitochondria, especially in plastids, of a non-human organism or a part thereof, preferably a microorganism, a plant cell, a plant or a part thereof, as compared to a corresponding non-transformed wild type non-human organism or a part thereof; and
[85181] (b) growing the non-human organism or a part thereof under conditions which permit the production of glucose-1-phosphate or a composition comprising glucose-1-phosphate in said non-human organism or in the culture medium surrounding said non-human organism.

[85182] A further embodiment of the present invention relates to a process for the production of sucrose, which comprises
[85183] (a) increasing or generating one or more activities selected from the group consisting of geranylgeranyl pyrophosphate synthase in an organelle, preferably in plastids or mitochondria, especially in plastids, of a non-human organism or a part thereof, preferably a microorganism, a plant cell, a plant or a part thereof, as compared to a corresponding non-transformed wild type non-human organism or a part thereof; and
[85184] (b) growing the non-human organism or a part thereof under conditions which permit the production of sucrose or a composition comprising sucrose in said non-human organism or in the culture medium surrounding said non-human organism.

[85185] A further embodiment of the present invention relates to a process for the production of fructose, which comprises
[85186] (a) increasing or generating one or more activities selected from the group consisting of circadian clock protein in an organelle, preferably in plastids or mitochondria, especially in plastids, of a non-human organism or a part thereof, preferably a microorganism, a plant cell, a plant or a part thereof, as compared to a corresponding non-transformed wild type non-human organism or a part thereof; and
[85187] (b) growing the non-human organism or a part thereof under conditions which permit the production of fructose or a composition comprising fructose in said non-human organism or in the culture medium surrounding said non-human organism.

[85188] A further embodiment of the present invention relates to a process for the production of glucose, which comprises
[85189] (a) increasing or generating one or more activities selected from the group consisting of circadian clock protein in an organelle, preferably in plastids or mitochondria, especially in plastids, of a non-human organism or a part thereof, preferably a microorganism, a plant cell, a plant or a part thereof, as compared to a corresponding non-transformed wild type non-human organism or a part thereof; and
[85190] (b) growing the non-human organism or a part thereof under conditions which permit the production of glucose or a composition comprising glucose in said non-human organism or in the culture medium surrounding said non-human organism.

[85191] A further embodiment of the present invention relates to a process for the production of glucose-1-phosphate, which comprises
[85192] (a) increasing or generating one or more activities selected from the group consisting of circadian clock protein in an organelle, preferably in plastids or mitochondria, especially in plastids, of a non-human organism or a part thereof, preferably a microorganism, a plant cell, a plant or a part thereof, as compared to a corresponding non-transformed wild type non-human organism or a part thereof; and
[85193] (b) growing the non-human organism or a part thereof under conditions which permit the production of glucose-1-phosphate or a composition comprising glucose-1-phosphate in said non-human organism or in the culture medium surrounding said non-human organism.

[85194] A further embodiment of the present invention relates to a process for the production of glucose-1-phosphate, which comprises
[85195] (a) increasing or generating one or more activities selected from the group consisting of amine oxidase in an organelle, preferably in plastids or mitochondria, especially in plastids, of a non-human organism or a part thereof, preferably a microorganism, a plant cell, a plant or a part thereof, as compared to a corresponding non-transformed wild type non-human organism or a part thereof; and
[85196] (b) growing the non-human organism or a part thereof under conditions which permit the production of glucose-1-phosphate or a composition comprising glucose-1-phosphate in said non-human organism or in the culture medium surrounding said non-human organism.

[85197] A further embodiment of the present invention relates to a process for the production of fructose, which comprises
[85198] (a) increasing or generating one or more activities selected from the group consisting of kinase in an organelle, preferably in plastids or mitochondria, especially in plastids, of a non-human organism or a part thereof, preferably a microorganism, a plant cell, a plant or a part thereof, as compared to a corresponding non-transformed wild type non-human organism or a part thereof; and
[85199] (b) growing the non-human organism or a part thereof under conditions which permit the production of fructose or a composition comprising fructose in said non-human organism or in the culture medium surrounding said non-human organism.

[85200] A further embodiment of the present invention relates to a process for the production of glucose, which comprises
[85201] (a) increasing or generating one or more activities selected from the group consisting of kinase in an organelle, preferably in plastids or mitochondria, especially in plastids, of a non-human organism or a part thereof, preferably a microorganism, a plant cell, a plant or a part thereof, as compared to a corresponding non-transformed wild type non-human organism or a part thereof; and
[85202] (b) growing the non-human organism or a part thereof under conditions which permit the production of glucose or a composition comprising glucose in said non-human organism or in the culture medium surrounding said non-human organism.

[85203] A further embodiment of the present invention relates to a process for the production of glucose-1-phosphate, which comprises
[85204] (a) increasing or generating one or more activities selected from the group consisting of Mg-protoporphyrin IX monomethyl ester oxidative cyclase 66 kD subunit in an organelle, preferably in plastids or mitochondria, especially in plastids, of a non-human organism or a part thereof, preferably a microorganism, a plant cell, a plant or a part thereof, as compared to a corresponding non-transformed wild type non-human organism or a part thereof; and
[85205] (b) growing the non-human organism or a part thereof under conditions which permit the production of glucose-1-phosphate or a composition comprising glucose-1-phosphate in said non-human organism or in the culture medium surrounding said non-human organism.

[85206] A further embodiment of the present invention relates to a process for the production of myo-inositol, which comprises
[85207] (a) increasing or generating one or more activities selected from the group consisting of permease protein of ABC transporter in an organelle, preferably in plastids or mitochondria, especially in plastids, of a non-human organism or a part thereof, preferably a microorganism, a plant cell, a plant or a part thereof, as compared to a corresponding non-transformed wild type non-human organism or a part thereof; and
[85208] (b) growing the non-human organism or a part thereof under conditions which permit the production of myo-inositol or a composition comprising myo-inositol in said non-human organism or in the culture medium surrounding said non-human organism.

[85209] A further embodiment of the present invention relates to a process for the production of glucose-1-phosphate, which comprises
[85210] (a) increasing or generating one or more activities selected from the group consisting of dihydrolipoamide dehydrogenase in an organelle, preferably in plastids or mitochondria, especially in plastids, of a non-human organism or a part thereof, preferably a microorganism, a plant cell, a plant or a part thereof, as compared to a corresponding non-transformed wild type non-human organism or a part thereof; and
[85211] (b) growing the non-human organism or a part thereof under conditions which permit the production of glucose-1-phosphate or a composition comprising glucose-1-phosphate in said non-human organism or in the culture medium surrounding said non-human organism.

[85212] A further embodiment of the present invention relates to a process for the production of raffinose, which comprises
[85213] (a) increasing or generating one or more activities selected from the group consisting of dihydrolipoamide dehydrogenase in an organelle, preferably in plastids or mitochondria, especially in plastids, of a non-human organism or a part thereof, preferably a microorganism, a plant cell, a plant or a part thereof, as compared to a corresponding non-transformed wild type non-human organism or a part thereof; and
[85214] (b) growing the non-human organism or a part thereof under conditions which permit the production of raffinose or a composition comprising raffinose in said non-human organism or in the culture medium surrounding said non-human organism.

[85215] A further embodiment of the present invention relates to a process for the production of myo-inositol, which comprises
[85216] (a) increasing or generating one or more activities selected from the group consisting of slr1107-protein in an organelle, preferably in plastids or mitochondria, especially in plastids, of a non-human organism or a part thereof, preferably a microorganism, a plant cell, a plant or a part thereof, as compared to a corresponding non-transformed wild type non-human organism or a part thereof; and
[85217] (b) growing the non-human organism or a part thereof under conditions which permit the production of myo-inositol or a composition comprising myo-inositol in said non-human organism or in the culture medium surrounding said non-human organism.

[85218] A further embodiment of the present invention relates to a process for the production of glucose-1-phosphate, which comprises
[85219] (a) increasing or generating one or more activities selected from the group consisting of fatty acid desaturase in an organelle, preferably in plastids or mitochondria, especially in plastids, of a non-human organism or a part thereof, preferably a microorganism, a plant cell, a plant or a part thereof, as compared to a corresponding non-transformed wild type non-human organism or a part thereof; and
[85220] (b) growing the non-human organism or a part thereof under conditions which permit the production of glucose-1-phosphate or a composition comprising glucose-1-phosphate in said non-human organism or in the culture medium surrounding said non-human organism.

[85221] A further embodiment of the present invention relates to a process for the production of glucose-1-phosphate, which comprises
[85222] (a) increasing or generating one or more activities selected from the group consisting of CDP-diglyceride synthetase in an organelle, preferably in plastids or mitochondria, especially in plastids, of a non-human organism or a part thereof, preferably a microorganism, a plant cell, a plant or a part thereof, as compared to a corresponding non-transformed wild type non-human organism or a part thereof; and
[85223] (b) growing the non-human organism or a part thereof under conditions which permit the production of glucose-1-phosphate or a composition comprising glucose-1-phosphate in said non-human organism or in the culture medium surrounding said non-human organism.

[85224] A further embodiment of the present invention relates to a process for the production of myo-inositol, which comprises
[85225] (a) increasing or generating one or more activities selected from the group consisting of CDP-diglyceride synthetase in an organelle, preferably in plastids or mitochondria, especially in plastids, of a non-human organism or a part thereof, preferably a microorganism, a plant cell, a plant or a part thereof, as compared to a corresponding non-transformed wild type non-human organism or a part thereof; and
[85226] (b) growing the non-human organism or a part thereof under conditions which permit the production of myo-inositol or a composition comprising myo-inositol in said non-human organism or in the culture medium surrounding said non-human organism.

[85227] A further embodiment of the present invention relates to a process for the production of fructose, which comprises
[85228] (a) increasing or generating one or more activities selected from the group consisting of iron(III) dicitrate-binding protein in an organelle, preferably in plastids or mitochondria, especially in plastids, of a non-human organism or a part thereof, preferably a microorganism, a plant cell, a plant or a part thereof, as compared to a corresponding non-transformed wild type non-human organism or a part thereof; and
[85229] (b) growing the non-human organism or a part thereof under conditions which permit the production of fructose or a composition comprising fructose in said non-human organism or in the culture medium surrounding said non-human organism.

[85230] A further embodiment of the present invention relates to a process for the production of sucrose, which comprises
[85231] (a) increasing or generating one or more activities selected from the group consisting of photosystem I reaction center subunit XI in an organelle, preferably in plastids or mitochondria, especially in plastids, of a non-human organism or a part thereof, preferably a microorganism, a plant cell, a plant or a part thereof, as compared to a corresponding non-transformed wild type non-human organism or a part thereof; and
[85232] (b) growing the non-human organism or a part thereof under conditions which permit the production of sucrose or a composition comprising sucrose in said non-human organism or in the culture medium surrounding said non-human organism.

[85233] A further embodiment of the present invention relates to a process for the production of fructose, which comprises
[85234] (a) increasing or generating one or more activities selected from the group consisting of photosystem II protein in an organelle, preferably in plastids or mitochondria, especially in plastids, of a non-human organism or a part thereof, preferably a microorganism, a plant cell, a plant or a part thereof, as compared to a corresponding non-transformed wild type non-human organism or a part thereof; and
[85235] (b) growing the non-human organism or a part thereof under conditions which permit the production of fructose or a composition comprising fructose in said non-human organism or in the culture medium surrounding said non-human organism.

[85236] A further embodiment of the present invention relates to a process for the production of fructose, which comprises
[85237] (a) increasing or generating one or more activities selected from the group consisting of glutamine amidotransferase in an organelle, preferably in plastids or mitochondria, especially in plastids, of a non-human organism or a part thereof, preferably a microorganism, a plant cell, a plant or a part thereof, as compared to a corresponding non-transformed wild type non-human organism or a part thereof; and
[85238] (b) growing the non-human organism or a part thereof under conditions which permit the production of fructose or a composition comprising fructose in said non-human organism or in the culture medium surrounding said non-human organism.

[85239] A further embodiment of the present invention relates to a process for the production of myo-inositol, which comprises
[85240] (a) increasing or generating one or more activities selected from the group consisting of glutamine amidotransferase in an organelle, preferably in plastids or mitochondria, especially in plastids, of a non-human organism or a part thereof, preferably a microorganism, a plant cell, a plant or a part thereof, as compared to a corresponding non-transformed wild type non-human organism or a part thereof; and
[85241] (b) growing the non-human organism or a part thereof under conditions which permit the production of myo-inositol or a composition comprising myo-inositol in said non-human organism or in the culture medium surrounding said non-human organism.

[85242] A further embodiment of the present invention relates to a process for the production of glucose-1-phosphate, which comprises
[85243] (a) increasing or generating one or more activities selected from the group consisting of NADH dehydrogenase in an organelle, preferably in plastids or mitochondria, especially in plastids, of a non-human organism or a part thereof, preferably a microorganism, a plant cell, a plant or a part thereof, as compared to a corresponding non-transformed wild type non-human organism or a part thereof; and
[85244] (b) growing the non-human organism or a part thereof under conditions which permit the production of glucose-1-phosphate or a composition comprising glucose-1-phosphate in said non-human organism or in the culture medium surrounding said non-human organism.

[85245] A further embodiment of the present invention relates to a process for the production of raffinose, which comprises
[85246] (a) increasing or generating one or more activities selected from the group consisting of pyridoxal phosphate biosynthetic protein in an organelle, preferably in plastids or mitochondria, especially in plastids, of a non-human organism or a part thereof, preferably a microorganism, a plant cell, a plant or a part thereof, as compared to a corresponding non-transformed wild type non-human organism or a part thereof; and
[85247] (b) growing the non-human organism or a part thereof under conditions which permit the production of raffinose or a composition comprising raffinose in said non-human organism or in the culture medium surrounding said non-human organism.

[85248] A further embodiment of the present invention relates to a process for the production of glucose-1-phosphate, which comprises
[85249] (a) increasing or generating one or more activities selected from the group consisting of phosphoadenosine phosphosulfate reductase in an organelle, preferably in plastids or mitochondria, especially in plastids, of a non-human organism or a part thereof, preferably a microorganism, a plant cell, a plant or a part thereof, as compared to a corresponding non-transformed wild type non-human organism or a part thereof; and
[85250] (b) growing the non-human organism or a part thereof under conditions which permit the production of glucose-1-phosphate or a composition comprising glucose-1-phosphate in said non-human organism or in the culture medium surrounding said non-human organism.

[85251] A further embodiment of the present invention relates to a process for the production of glucose-1-phosphate, which comprises
[85252] (a) increasing or generating one or more activities selected from the group consisting of threonine dehydratase in an organelle, preferably in plastids or mitochondria, especially in plastids, of a non-human organism or a part thereof, preferably a microorganism, a plant cell, a plant or a part thereof, as compared to a corresponding non-transformed wild type non-human organism or a part thereof; and
[85253] (b) growing the non-human organism or a part thereof under conditions which permit the production of glucose-1-phosphate or a composition comprising glucose-1-phosphate in said non-human organism or in the culture medium surrounding said non-human organism.

[85254] A further embodiment of the present invention relates to a process for the production of 3,4,5-trihydroxypentanoic acid, which comprises
[85255] (a) increasing or generating one or more activities selected from the group consisting of threonine dehydratase in an organelle, preferably in plastids or mitochondria, especially in plastids, of a non-human organism or a part thereof, preferably a microorganism, a plant cell, a plant or a part thereof, as compared to a corresponding non-transformed wild type non-human organism or a part thereof; and
[85256] (b) growing the non-human organism or a part thereof under conditions which permit the production of 3,4,5-trihydroxypentanoic acid or a composition comprising 3,4,5-trihydroxypentanoic acid in said non-human organism or in the culture medium surrounding said non-human organism.

[85257] A further embodiment of the present invention relates to a process for the production of fructose, which comprises
[85258] (a) increasing or generating one or more activities selected from the group consisting of short-chain alcohol dehydrogenase family in an organelle, preferably in plastids or mitochondria, especially in plastids, of a non-human organism or a part thereof, preferably a microorganism, a plant cell, a plant or a part thereof, as compared to a corresponding non-transformed wild type non-human organism or a part thereof; and
[85259] (b) growing the non-human organism or a part thereof under conditions which permit the production of fructose or a composition comprising fructose in said non-human organism or in the culture medium surrounding said non-human organism.

[85260] A further embodiment of the present invention relates to a process for the production of glucose, which comprises
[85261] (a) increasing or generating one or more activities selected from the group consisting of short-chain alcohol dehydrogenase family in an organelle, preferably in plastids or mitochondria, especially in plastids, of a non-human organism or a part thereof, preferably a microorganism, a plant cell, a plant or a part thereof, as compared to a corresponding non-transformed wild type non-human organism or a part thereof; and
[85262] (b) growing the non-human organism or a part thereof under conditions which permit the production of glucose or a composition comprising glucose in said non-human organism or in the culture medium surrounding said non-human organism.

[85263] A further embodiment of the present invention relates to a process for the production of glucose-1-phosphate, which comprises
[85264] (a) increasing or generating one or more activities selected from the group consisting of short-chain alcohol dehydrogenase family in an organelle, preferably in plastids or mitochondria, especially in plastids, of a non-human organism or a part thereof, preferably a microorganism, a plant cell, a plant or a part thereof, as compared to a corresponding non-transformed wild type non-human organism or a part thereof; and
[85265] (b) growing the non-human organism or a part thereof under conditions which permit the production of glucose-1-phosphate or a composition comprising glucose-1-phosphate in said non-human organism or in the culture medium surrounding said non-human organism.

[85266] A further embodiment of the present invention relates to a process for the production of myo-inositol, which comprises
[85267] (a) increasing or generating one or more activities selected from the group consisting of short-chain alcohol dehydrogenase family in an organelle, preferably in plastids or mitochondria, especially in plastids, of a non-human organism or a part thereof, preferably a microorganism, a plant cell, a plant or a part thereof, as compared to a corresponding non-transformed wild type non-human organism or a part thereof; and
[85268] (b) growing the non-human organism or a part thereof under conditions which permit the production of myo-inositol or a composition comprising myo-inositol in said non-human organism or in the culture medium surrounding said non-human organism.

[85269] A further embodiment of the present invention relates to a process for the production of sucrose, which comprises
[85270] (a) increasing or generating one or more activities selected from the group consisting of short-chain alcohol dehydrogenase family in an organelle, preferably in plastids or mitochondria, especially in plastids, of a non-human organism or a part thereof, preferably a microorganism, a plant cell, a plant or a part thereof, as compared to a corresponding non-transformed wild type non-human organism or a part thereof; and
[85271] (b) growing the non-human organism or a part thereof under conditions which permit the production of sucrose or a composition comprising sucrose in said non-human organism or in the culture medium surrounding said non-human organism.

[85272] A further embodiment of the present invention relates to a process for the production of raffinose, which comprises
[85273] (a) increasing or generating one or more activities selected from the group consisting of phosphate acetyltransferase in an organelle, preferably in plastids or mitochondria, especially in plastids, of a non-human organism or a part thereof, preferably a microorganism, a plant cell, a plant or a part thereof, as compared to a corresponding non-transformed wild type non-human organism or a part thereof; and
[85274] (b) growing the non-human organism or a part thereof under conditions which permit the production of raffinose or a composition comprising raffinose in said non-human organism or in the culture medium surrounding said non-human organism.

[85275] A further embodiment of the present invention relates to a process for the production of glucose-1-phosphate, which comprises
[85276] (a) increasing or generating one or more activities selected from the group consisting of photosystem I reaction centre subunit in an organelle, preferably in plastids or mitochondria, especially in plastids, of a non-human organism or a part thereof, preferably a microorganism, a plant cell, a plant or a part thereof, as compared to a corresponding non-transformed wild type non-human organism or a part thereof; and
[85277] (b) growing the non-human organism or a part thereof under conditions which permit the production of glucose-1-phosphate or a composition comprising glucose-1-phosphate in said non-human organism or in the culture medium surrounding said non-human organism.

[85278] A further embodiment of the present invention relates to a process for the production of raffinose, which comprises
[85279] (a) increasing or generating one or more activities selected from the group consisting of photosystem I reaction centre subunit in an organelle, preferably in plastids or mitochondria, especially in plastids, of a non-human organism or a part thereof, preferably a microorganism, a plant cell, a plant or a part thereof, as compared to a corresponding non-transformed wild type non-human organism or a part thereof; and
[85280] (b) growing the non-human organism or a part thereof under conditions which permit the production of raffinose or a composition comprising raffinose in said non-human organism or in the culture medium surrounding said non-human organism.

[85281] A further embodiment of the present invention relates to a process for the production of 3,4,5-trihydroxypentanoic acid, which comprises
[85282] (a) increasing or generating one or more activities selected from the group consisting of photosystem I reaction centre subunit in an organelle, preferably in plastids or mitochondria, especially in plastids, of a non-human organism or a part thereof, preferably a microorganism, a plant cell, a plant or a part thereof, as compared to a corresponding non-transformed wild type non-human organism or a part thereof; and
[85283] (b) growing the non-human organism or a part thereof under conditions which permit the production of 3,4,5-trihydroxypentanoic acid or a composition comprising 3,4,5-trihydroxypentanoic acid in said non-human organism or in the culture medium surrounding said non-human organism.

[85284] A further embodiment of the present invention relates to a process for the production of fructose, which comprises
[85285] (a) increasing or generating one or more activities selected from the group consisting of Sec-independent protein translocase subunit in an organelle, preferably in plastids or mitochondria, especially in plastids, of a non-human organism or a part thereof, preferably a microorganism, a plant cell, a plant or a part thereof, as compared to a corresponding non-transformed wild type non-human organism or a part thereof; and
[85286] (b) growing the non-human organism or a part thereof under conditions which permit the production of fructose or a composition comprising fructose in said non-human organism or in the culture medium surrounding said non-human organism.

[85287] A further embodiment of the present invention relates to a process for the production of glucose, which comprises
[85288] (a) increasing or generating one or more activities selected from the group consisting of Sec-independent protein translocase subunit in an organelle, preferably in plastids or mitochondria, especially in plastids, of a non-human organism or a part thereof, preferably a microorganism, a plant cell, a plant or a part thereof, as compared to a corresponding non-transformed wild type non-human organism or a part thereof; and
[85289] (b) growing the non-human organism or a part thereof under conditions which permit the production of glucose or a composition comprising glucose in said non-human organism or in the culture medium surrounding said non-human organism.

[85290] A further embodiment of the present invention relates to a process for the production of sedoheptulose-7-phosphate, which comprises
[85291] (a) increasing or generating one or more activities selected from the group consisting of Sec-independent protein translocase subunit in an organelle, preferably in plastids or mitochondria, especially in plastids, of a non-human organism or a part thereof, preferably a microorganism, a plant cell, a plant or a part thereof, as compared to a corresponding non-transformed wild type non-human organism or a part thereof; and
[85292] (b) growing the non-human organism or a part thereof under conditions which permit the production of sedoheptulose-7-phosphate or a composition comprising sedoheptulose-7-phosphate in said non-human organism or in the culture medium surrounding said non-human organism.

[85293] A further embodiment of the present invention relates to a process for the production of fructose, which comprises
[85294] (a) increasing or generating one or more activities selected from the group consisting of cell division protein in an organelle, preferably in plastids or mitochondria, especially in plastids, of a non-human organism or a part thereof, preferably a microorganism, a plant cell, a plant or a part thereof, as compared to a corresponding non-transformed wild type non-human organism or a part thereof; and
[85295] (b) growing the non-human organism or a part thereof under conditions which permit the production of fructose or a composition comprising fructose in said non-human organism or in the culture medium surrounding said non-human organism.

[85296] A further embodiment of the present invention relates to a process for the production of glucose, which comprises
[85297] (a) increasing or generating one or more activities selected from the group consisting of cell division protein in an organelle, preferably in plastids or mitochondria, especially in plastids, of a non-human organism or a part thereof, preferably a microorganism, a plant cell, a plant or a part thereof, as compared to a corresponding non-transformed wild type non-human organism or a part thereof; and
[85298] (b) growing the non-human organism or a part thereof under conditions which permit the production of glucose or a composition comprising glucose in said non-human organism or in the culture medium surrounding said non-human organism.

[85299] A further embodiment of the present invention relates to a process for the production of sucrose, which comprises
[85300] (a) increasing or generating one or more activities selected from the group consisting of cell division protein in an organelle, preferably in plastids or mitochondria, especially in plastids, of a non-human organism or a part thereof, preferably a microorganism, a plant cell, a plant or a part thereof, as compared to a corresponding non-transformed wild type non-human organism or a part thereof; and
[85301] (b) growing the non-human organism or a part thereof under conditions which permit the production of sucrose or a composition comprising sucrose in said non-human organism or in the culture medium surrounding said non-human organism.

[85302] A further embodiment of the present invention relates to a process for the production of glucose-1-phosphate, which comprises
[85303] (a) increasing or generating one or more activities selected from the group consisting of branched-chain amino acid ABC transporter permease protein in an organelle, preferably in plastids or mitochondria, especially in plastids, of a non-human organism or a part thereof, preferably a microorganism, a plant cell, a plant or a part thereof, as compared to a corresponding non-transformed wild type non-human organism or a part thereof; and
[85304] (b) growing the non-human organism or a part thereof under conditions which permit the production of glucose-1-phosphate or a composition comprising glucose-1-phosphate in said non-human organism or in the culture medium surrounding said non-human organism.

[85305] A further embodiment of the present invention relates to a process for the production of 3,4,5-trihydroxypentanoic acid, which comprises
[85306] (a) increasing or generating one or more activities selected from the group consisting of branched-chain amino acid ABC transporter permease protein in an organelle, preferably in plastids or mitochondria, especially in plastids, of a non-human organism or a part thereof, preferably a microorganism, a plant cell, a plant or a part thereof, as compared to a corresponding non-transformed wild type non-human organism or a part thereof; and
[85307] (b) growing the non-human organism or a part thereof under conditions which permit the production of 3,4,5-trihydroxypentanoic acid or a composition comprising 3,4,5-trihydroxypentanoic acid in said non-human organism or in the culture medium surrounding said non-human organism.

[85308] A further embodiment of the present invention relates to a process for the production of myo-inositol, which comprises
[85309] (a) increasing or generating one or more activities selected from the group consisting of 3-isopropylmalate dehydratase large subunit in an organelle, preferably in plastids or mitochondria, especially in plastids, of a non-human organism or a part thereof, preferably a microorganism, a plant cell, a plant or a part thereof, as compared to a corresponding non-transformed wild type non-human organism or a part thereof; and
[85310] (b) growing the non-human organism or a part thereof under conditions which permit the production of myo-inositol or a composition comprising myo-inositol in said non-human organism or in the culture medium surrounding said non-human organism.

[85311] A further embodiment of the present invention relates to a process for the production of fructose, which comprises
[85312] (a) increasing or generating one or more activities selected from the group consisting of multiple antibiotic resistance protein in an organelle, preferably in plastids or mitochondria, especially in plastids, of a non-human organism or a part thereof, preferably a microorganism, a plant cell, a plant or a part thereof, as compared to a corresponding non-transformed wild type non-human organism or a part thereof; and
[85313] (b) growing the non-human organism or a part thereof under conditions which permit the production of fructose or a composition comprising fructose in said non-human organism or in the culture medium surrounding said non-human organism.

[85314] A further embodiment of the present invention relates to a process for the production of glucose, which comprises
[85315] (a) increasing or generating one or more activities selected from the group consisting of multiple antibiotic resistance protein in an organelle, preferably in plastids or mitochondria, especially in plastids, of a non-human organism or a part thereof, preferably a microorganism, a plant cell, a plant or a part thereof, as compared to a corresponding non-transformed wild type non-human organism or a part thereof; and
[85316] (b) growing the non-human organism or a part thereof under conditions which permit the production of glucose or a composition comprising glucose in said non-human organism or in the culture medium surrounding said non-human organism.

[85317] A further embodiment of the present invention relates to a process for the production of glucose-1-phosphate, which comprises
[85318] (a) increasing or generating one or more activities selected from the group consisting of multiple antibiotic resistance protein in an organelle, preferably in plastids or mitochondria, especially in plastids, of a non-human organism or a part thereof, preferably a microorganism, a plant cell, a plant or a part thereof, as compared to a corresponding non-transformed wild type non-human organism or a part thereof; and
[85319] (b) growing the non-human organism or a part thereof under conditions which permit the production of glucose-1-phosphate or a composition comprising glucose-1-phosphate in said non-human organism or in the culture medium surrounding said non-human organism.

[85320] A further embodiment of the present invention relates to a process for the production of fructose, which comprises
[85321] (a) increasing or generating one or more activities selected from the group consisting of TTC1386-protein in an organelle, preferably in plastids or mitochondria, especially in plastids, of a non-human organism or a part thereof, preferably a microorganism, a plant cell, a plant or a part thereof, as compared to a corresponding non-transformed wild type non-human organism or a part thereof; and
[85322] (b) growing the non-human organism or a part thereof under conditions which permit the production of fructose or a composition comprising fructose in said non-human organism or in the culture medium surrounding said non-human organism.

[85323] A further embodiment of the present invention relates to a process for the production of glucose, which comprises
[85324] (a) increasing or generating one or more activities selected from the group consisting of TTC1386-protein in an organelle, preferably in plastids or mitochondria, especially in plastids, of a non-human organism or a part thereof, preferably a microorganism, a plant cell, a plant or a part thereof, as compared to a corresponding non-transformed wild type non-human organism or a part thereof; and
[85325] (b) growing the non-human organism or a part thereof under conditions which permit the production of glucose or a composition comprising glucose in said non-human organism or in the culture medium surrounding said non-human organism.

[85326] A further embodiment of the present invention relates to a process for the production of fructose, which comprises
[85327] (a) increasing or generating one or more activities selected from the group consisting of homocitrate synthase in an organelle, preferably in plastids or mitochondria, especially in plastids, of a non-human organism or a part thereof, preferably a microorganism, a plant cell, a plant or a part thereof, as compared to a corresponding non-transformed wild type non-human organism or a part thereof; and
[85328] (b) growing the non-human organism or a part thereof under conditions which permit the production of fructose or a composition comprising fructose in said non-human organism or in the culture medium surrounding said non-human organism.

[85329] A further embodiment of the present invention relates to a process for the production of glucose-1-phosphate, which comprises
[85330] (a) increasing or generating one or more activities selected from the group consisting of homocitrate synthase in an organelle, preferably in plastids or mitochondria, especially in plastids, of a non-human organism or a part thereof, preferably a microorganism, a plant cell, a plant or a part thereof, as compared to a corresponding non-transformed wild type non-human organism or a part thereof; and
[85331] (b) growing the non-human organism or a part thereof under conditions which permit the production of glucose-1-phosphate or a composition comprising glucose-1-phosphate in said non-human organism or in the culture medium surrounding said non-human organism.

[85332] A further embodiment of the present invention relates to a process for the production of sucrose, which comprises
[85333] (a) increasing or generating one or more activities selected from the group consisting of homocitrate synthase in an organelle, preferably in plastids or mitochondria, especially in plastids, of a non-human organism or a part thereof, preferably a microorganism, a plant cell, a plant or a part thereof, as compared to a corresponding non-transformed wild type non-human organism or a part thereof; and
[85334] (b) growing the non-human organism or a part thereof under conditions which permit the production of sucrose or a composition comprising sucrose in said non-human organism or in the culture medium surrounding said non-human organism.

[85335] A further embodiment of the present invention relates to a process for the production of raffinose, which comprises
[85336] (a) increasing or generating one or more activities selected from the group consisting of permease in an organelle, preferably in plastids or mitochondria, especially in plastids, of a non-human organism or a part thereof, preferably a microorganism, a plant cell, a plant or a part thereof, as compared to a corresponding non-transformed wild type non-human organism or a part thereof; and
[85337] (b) growing the non-human organism or a part thereof under conditions which permit the production of raffinose or a composition comprising raffinose in said non-human organism or in the culture medium surrounding said non-human organism.

[85338] A further embodiment of the present invention relates to a process for the production of 3,4,5-trihydroxypentanoic acid, which comprises
[85339] (a) increasing or generating one or more activities selected from the group consisting of permease in an organelle, preferably in plastids or mitochondria, especially in plastids, of a non-human organism or a part thereof, preferably a microorganism, a plant cell, a plant or a part thereof, as compared to a corresponding non-transformed wild type non-human organism or a part thereof; and
[85340] (b) growing the non-human organism or a part thereof under conditions which permit the production of 3,4,5-trihydroxypentanoic acid or a composition comprising 3,4,5-trihydroxypentanoic acid in said non-human organism or in the culture medium surrounding said non-human organism.

[85341] A further embodiment of the present invention relates to a process for the production of glucose-1-phosphate, which comprises
[85342] (a) increasing or generating one or more activities selected from the group consisting of oxidoreductase subunit in an organelle, preferably in plastids or mitochondria, especially in plastids, of a non-human organism or a part thereof, preferably a microorganism, a plant cell, a plant or a part thereof, as compared to a corresponding non-transformed wild type non-human organism or a part thereof; and
[85343] (b) growing the non-human organism or a part thereof under conditions which permit the production of glucose-1-phosphate or a composition comprising glucose-1-phosphate in said non-human organism or in the culture medium surrounding said non-human organism.

[85344] A further embodiment of the present invention relates to a process for the production of glucose-1-phosphate, which comprises
[85345] (a) increasing or generating one or more activities selected from the group consisting of XM_{—}473199-protein in an organelle, preferably in plastids or mitochondria, especially in plastids, of a non-human organism or a part thereof, preferably a microorganism, a plant cell, a plant or a part thereof, as compared to a corresponding non-transformed wild type non-human organism or a part thereof; and
[85346] (b) growing the non-human organism or a part thereof under conditions which permit the production of glucose-1-phosphate or a composition comprising glucose-1-phosphate in said non-human organism or in the culture medium surrounding said non-human organism.

[85347] A further embodiment of the present invention relates to a process for the production of myo-inositol, which comprises
[85348] (a) increasing or generating one or more activities selected from the group consisting of transcription factor in an organelle, preferably in plastids or mitochondria, especially in plastids, of a non-human organism or a part thereof, preferably a microorganism, a plant cell, a plant or a part thereof, as compared to a corresponding non-transformed wild type non-human organism or a part thereof; and
[85349] (b) growing the non-human organism or a part thereof under conditions which permit the production of myo-inositol or a composition comprising myo-inositol in said non-human organism or in the culture medium surrounding said non-human organism.

[85350] A further embodiment of the present invention relates to a process for the production of sucrose, which comprises
[85351] (a) increasing or generating one or more activities selected from the group consisting of transcription factor in an organelle, preferably in plastids or mitochondria, especially in plastids, of a non-human organism or a part thereof, preferably a microorganism, a plant cell, a plant or a part thereof, as compared to a corresponding non-transformed wild type non-human organism or a part thereof; and
[85352] (b) growing the non-human organism or a part thereof under conditions which permit the production of sucrose or a composition comprising sucrose in said non-human organism or in the culture medium surrounding said non-human organism.

[85353] A further embodiment of the present invention relates to a process for the production of glucose-1-phosphate, which comprises
[85354] (a) increasing or generating one or more activities selected from the group consisting of 3-deoxy-7-phosphoheptulonate synthase in an organelle, preferably in plastids or mitochondria, especially in plastids, of a non-human organism or a part thereof, preferably a microorganism, a plant cell, a plant or a part thereof, as compared to a corresponding non-transformed wild type non-human organism or a part thereof; and
[85355] (b) growing the non-human organism or a part thereof under conditions which permit the production of glucose-1-phosphate or a composition comprising glucose-1-phosphate in said non-human organism or in the culture medium surrounding said non-human organism.

[85356] A further embodiment of the present invention relates to a process for the production of glucose-1-phosphate, which comprises
[85357] (a) increasing or generating one or more activities selected from the group consisting of phosphate permease in an organelle, preferably in plastids or mitochondria, especially in plastids, of a non-human organism or a part thereof, preferably a microorganism, a plant cell, a plant or a part thereof, as compared to a corresponding non-transformed wild type non-human organism or a part thereof; and
[85358] (b) growing the non-human organism or a part thereof under conditions which permit the production of glucose-1-phosphate or a composition comprising glucose-1-phosphate in said non-human organism or in the culture medium surrounding said non-human organism.

[85359] A further embodiment of the present invention relates to a process for the production of 3,4,5-trihydroxypentanoic acid, which comprises
[85360] (a) increasing or generating one or more activities selected from the group consisting of phosphate permease in an organelle, preferably in plastids or mitochondria, especially in plastids, of a non-human organism or a part thereof, preferably a microorganism, a plant cell, a plant or a part thereof, as compared to a corresponding non-transformed wild type non-human organism or a part thereof; and
[85361] (b) growing the non-human organism or a part thereof under conditions which permit the production of 3,4,5-trihydroxypentanoic acid or a composition comprising 3,4,5-trihydroxypentanoic acid in said non-human organism or in the culture medium surrounding said non-human organism.

[85362] A further embodiment of the present invention relates to a process for the production of fructose, which comprises
[85363] (a) increasing or generating one or more activities selected from the group consisting of ycl027w-protein in an organelle, preferably in plastids or mitochondria, especially in plastids, of a non-human organism or a part thereof, preferably a microorganism, a plant cell, a plant or a part thereof, as compared to a corresponding non-transformed wild type non-human organism or a part thereof; and
[85364] (b) growing the non-human organism or a part thereof under conditions which permit the production of fructose or a composition comprising fructose in said non-human organism or in the culture medium surrounding said non-human organism.

[85365] A further embodiment of the present invention relates to a process for the production of glucose-1-phosphate, which comprises
[85366] (a) increasing or generating one or more activities selected from the group consisting of ycl027w-protein in an organelle, preferably in plastids or mitochondria, especially in plastids, of a non-human organism or a part thereof, preferably a microorganism, a plant cell, a plant or a part thereof, as compared to a corresponding non-transformed wild type non-human organism or a part thereof; and
[85367] (b) growing the non-human organism or a part thereof under conditions which permit the production of glucose-1-phosphate or a composition comprising glucose-1-phosphate in said non-human organism or in the culture medium surrounding said non-human organism.

[85368] A further embodiment of the present invention relates to a process for the production of myo-inositol, which comprises
[85369] (a) increasing or generating one or more activities selected from the group consisting of serine/threonine dehydratase in an organelle, preferably in plastids or mitochondria, especially in plastids, of a non-human organism or a part thereof, preferably a microorganism, a plant cell, a plant or a part thereof, as compared to a corresponding non-transformed wild type non-human organism or a part thereof; and
[85370] (b) growing the non-human organism or a part thereof under conditions which permit the production of myo-inositol or a composition comprising myo-inositol in said non-human organism or in the culture medium surrounding said non-human organism.

[85371] A further embodiment of the present invention relates to a process for the production of sucrose, which comprises
[85372] (a) increasing or generating one or more activities selected from the group consisting of serine/threonine dehydratase in an organelle, preferably in plastids or mitochondria, especially in plastids, of a non-human organism or a part thereof, preferably a microorganism, a plant cell, a plant or a part thereof, as compared to a corresponding non-transformed wild type non-human organism or a part thereof; and
[85373] (b) growing the non-human organism or a part thereof under conditions which permit the production of sucrose or a composition comprising sucrose in said non-human organism or in the culture medium surrounding said non-human organism.

[85374] A further embodiment of the present invention relates to a process for the production of fructose, which comprises
[85375] (a) increasing or generating one or more activities selected from the group consisting of phosphoglycerate kinase in an organelle, preferably in plastids or mitochondria, especially in plastids, of a non-human organism or a part thereof, preferably a microorganism, a plant cell, a plant or a part thereof, as compared to a corresponding non-transformed wild type non-human organism or a part thereof; and
[85376] (b) growing the non-human organism or a part thereof under conditions which permit the production of fructose or a composition comprising fructose in said non-human organism or in the culture medium surrounding said non-human organism.

[85377] A further embodiment of the present invention relates to a process for the production of glucose, which comprises
[85378] (a) increasing or generating one or more activities selected from the group consisting of phosphoglycerate kinase in an organelle, preferably in plastids or mitochondria, especially in plastids, of a non-human organism or a part thereof, preferably a microorganism, a plant cell, a plant or a part thereof, as compared to a corresponding non-transformed wild type non-human organism or a part thereof; and
[85379] (b) growing the non-human organism or a part thereof under conditions which permit the production of glucose or a composition comprising glucose in said non-human organism or in the culture medium surrounding said non-human organism.

[85380] A further embodiment of the present invention relates to a process for the production of raffinose, which comprises
[85381] (a) increasing or generating one or more activities selected from the group consisting of YCR047W-A-protein in an organelle, preferably in plastids or mitochondria, especially in plastids, of a non-human organism or a part thereof, preferably a microorganism, a plant cell, a plant or a part thereof, as compared to a corresponding non-transformed wild type non-human organism or a part thereof; and
[85382] (b) growing the non-human organism or a part thereof under conditions which permit the production of raffinose or a composition comprising raffinose in said non-human organism or in the culture medium surrounding said non-human organism.

[85383] A further embodiment of the present invention relates to a process for the production of 3,4,5-trihydroxypentanoic acid, which comprises
[85384] (a) increasing or generating one or more activities selected from the group consisting of ycr102c-protein in an organelle, preferably in plastids or mitochondria, especially in plastids, of a non-human organism or a part thereof, preferably a microorganism, a plant cell, a plant or a part thereof, as compared to a corresponding non-transformed wild type non-human organism or a part thereof; and
[85385] (b) growing the non-human organism or a part thereof under conditions which permit the production of 3,4,5-trihydroxypentanoic acid or a composition comprising 3,4,5-trihydroxypentanoic acid in said non-human organism or in the culture medium surrounding said non-human organism.

[85386] A further embodiment of the present invention relates to a process for the production of galactinol, which comprises
[85387] (a) increasing or generating one or more activities selected from the group consisting of isocitrate dehydrogenase in an organelle, preferably in plastids or mitochondria, especially in plastids, of a non-human organism or a part thereof, preferably a microorganism, a plant cell, a plant or a part thereof, as compared to a corresponding non-transformed wild type non-human organism or a part thereof; and
[85388] (b) growing the non-human organism or a part thereof under conditions which permit the production of galactinol or a composition comprising galactinol in said non-human organism or in the culture medium surrounding said non-human organism.

[85389] A further embodiment of the present invention relates to a process for the production of myo-inositol, which comprises
[85390] (a) increasing or generating one or more activities selected from the group consisting of cell division control protein in an organelle, preferably in plastids or mitochondria, especially in plastids, of a non-human organism or a part thereof, preferably a microorganism, a plant cell, a plant or a part thereof, as compared to a corresponding non-transformed wild type non-human organism or a part thereof; and
[85391] (b) growing the non-human organism or a part thereof under conditions which permit the production of myo-inositol or a composition comprising myo-inositol in said non-human organism or in the culture medium surrounding said non-human organism.

[85392] A further embodiment of the present invention relates to a process for the production of myo-inositol, which comprises
[85393] (a) increasing or generating one or more activities selected from the group consisting of cyclin in an organelle, preferably in plastids or mitochondria, especially in plastids, of a non-human organism or a part thereof, preferably a microorganism, a plant cell, a plant or a part thereof, as compared to a corresponding non-transformed wild type non-human organism or a part thereof; and
[85394] (b) growing the non-human organism or a part thereof under conditions which permit the production of myo-inositol or a composition comprising myo-inositol in said non-human organism or in the culture medium surrounding said non-human organism.

[85395] A further embodiment of the present invention relates to a process for the production of raffinose, which comprises
[85396] (a) increasing or generating one or more activities selected from the group consisting of YDL159W-A-protein in an organelle, preferably in plastids or mitochondria, especially in plastids, of a non-human organism or a part thereof, preferably a microorganism, a plant cell, a plant or a part thereof, as compared to a corresponding non-transformed wild type non-human organism or a part thereof; and
[85397] (b) growing the non-human organism or a part thereof under conditions which permit the production of raffinose or a composition comprising raffinose in said non-human organism or in the culture medium surrounding said non-human organism.

[85398] A further embodiment of the present invention relates to a process for the production of glucose-1-phosphate, which comprises
[85399] (a) increasing or generating one or more activities selected from the group consisting of protein kinase in an organelle, preferably in plastids or mitochondria, especially in plastids, of a non-human organism or a part thereof, preferably a microorganism, a plant cell, a plant or a part thereof, as compared to a corresponding non-transformed wild type non-human organism or a part thereof; and
[85400] (b) growing the non-human organism or a part thereof under conditions which permit the production of glucose-1-phosphate or a composition comprising glucose-1-phosphate in said non-human organism or in the culture medium surrounding said non-human organism.

[85401] A further embodiment of the present invention relates to a process for the production of glucose-1-phosphate, which comprises
[85402] (a) increasing or generating one or more activities selected from the group consisting of serine/threonine-protein phosphatase in an organelle, preferably in plastids or mitochondria, especially in plastids, of a non-human organism or a part thereof, preferably a microorganism, a plant cell, a plant or a part thereof, as compared to a corresponding non-transformed wild type non-human organism or a part thereof; and
[85403] (b) growing the non-human organism or a part thereof under conditions which permit the production of glucose-1-phosphate or a composition comprising glucose-1-phosphate in said non-human organism or in the culture medium surrounding said non-human organism.

[85404] A further embodiment of the present invention relates to a process for the production of 3,4,5-trihydroxypentanoic acid, which comprises
[85405] (a) increasing or generating one or more activities selected from the group consisting of integral membrane protein in an organelle, preferably in plastids or mitochondria, especially in plastids, of a non-human organism or a part thereof, preferably a microorganism, a plant cell, a plant or a part thereof, as compared to a corresponding non-transformed wild type non-human organism or a part thereof; and
[85406] (b) growing the non-human organism or a part thereof under conditions which permit the production of 3,4,5-trihydroxypentanoic acid or a composition comprising 3,4,5-trihydroxypentanoic acid in said non-human organism or in the culture medium surrounding said non-human organism.

[85407] A further embodiment of the present invention relates to a process for the production of glucose-1-phosphate, which comprises
[85408] (a) increasing or generating one or more activities selected from the group consisting of ydl235c-protein in an organelle, preferably in plastids or mitochondria, especially in plastids, of a non-human organism or a part thereof, preferably a microorganism, a plant cell, a plant or a part thereof, as compared to a corresponding non-transformed wild type non-human organism or a part thereof; and
[85409] (b) growing the non-human organism or a part thereof under conditions which permit the production of glucose-1-phosphate or a composition comprising glucose-1-phosphate in said non-human organism or in the culture medium surrounding said non-human organism.

[85410] A further embodiment of the present invention relates to a process for the production of myo-inositol, which comprises
[85411] (a) increasing or generating one or more activities selected from the group consisting of ydl235c-protein in an organelle, preferably in plastids or mitochondria, especially in plastids, of a non-human organism or a part thereof, preferably a microorganism, a plant cell, a plant or a part thereof, as compared to a corresponding non-transformed wild type non-human organism or a part thereof; and
[85412] (b) growing the non-human organism or a part thereof under conditions which permit the production of myo-inositol or a composition comprising myo-inositol in said non-human organism or in the culture medium surrounding said non-human organism.

[85413] A further embodiment of the present invention relates to a process for the production of 3,4,5-trihydroxypentanoic acid, which comprises
[85414] (a) increasing or generating one or more activities selected from the group consisting of ydl235c-protein in an organelle, preferably in plastids or mitochondria, especially in plastids, of a non-human organism or a part thereof, preferably a microorganism, a plant cell, a plant or a part thereof, as compared to a corresponding non-transformed wild type non-human organism or a part thereof; and
[85415] (b) growing the non-human organism or a part thereof under conditions which permit the production of 3,4,5-trihydroxypentanoic acid or a composition comprising 3,4,5-trihydroxypentanoic acid in said non-human organism or in the culture medium surrounding said non-human organism.

[85416] A further embodiment of the present invention relates to a process for the production of sucrose, which comprises
[85417] (a) increasing or generating one or more activities selected from the group consisting of coproporphyrinogen III oxidase in an organelle, preferably in plastids or mitochondria, especially in plastids, of a non-human organism or a part thereof, preferably a microorganism, a plant cell, a plant or a part thereof, as compared to a corresponding non-transformed wild type non-human organism or a part thereof; and
[85418] (b) growing the non-human organism or a part thereof under conditions which permit the production of sucrose or a composition comprising sucrose in said non-human organism or in the culture medium surrounding said non-human organism.

[85419] A further embodiment of the present invention relates to a process for the production of glucose, which comprises
[85420] (a) increasing or generating one or more activities selected from the group consisting of branched-chain amino acid permease in an organelle, preferably in plastids or mitochondria, especially in plastids, of a non-human organism or a part thereof, preferably a microorganism, a plant cell, a plant or a part thereof, as compared to a corresponding non-transformed wild type non-human organism or a part thereof; and
[85421] (b) growing the non-human organism or a part thereof under conditions which permit the production of glucose or a composition comprising glucose in said non-human organism or in the culture medium surrounding said non-human organism.

[85422] A further embodiment of the present invention relates to a process for the production of fructose, which comprises
[85423] (a) increasing or generating one or more activities selected from the group consisting of ydr183w-protein in an organelle, preferably in plastids or mitochondria, especially in plastids, of a non-human organism or a part thereof, preferably a microorganism, a plant cell, a plant or a part thereof, as compared to a corresponding non-transformed wild type non-human organism or a part thereof; and
[85424] (b) growing the non-human organism or a part thereof under conditions which permit the production of fructose or a composition comprising fructose in said non-human organism or in the culture medium surrounding said non-human organism.

[85425] A further embodiment of the present invention relates to a process for the production of glucose, which comprises
[85426] (a) increasing or generating one or more activities selected from the group consisting of ydr183w-protein in an organelle, preferably in plastids or mitochondria, especially in plastids, of a non-human organism or a part thereof, preferably a microorganism, a plant cell, a plant or a part thereof, as compared to a corresponding non-transformed wild type non-human organism or a part thereof; and
[85427] (b) growing the non-human organism or a part thereof under conditions which permit the production of glucose or a composition comprising glucose in said non-human organism or in the culture medium surrounding said non-human organism.

[85428] A further embodiment of the present invention relates to a process for the production of glucose-1-phosphate, which comprises
[85429] (a) increasing or generating one or more activities selected from the group consisting of ydr507c-protein in an organelle, preferably in plastids or mitochondria, especially in plastids, of a non-human organism or a part thereof, preferably a microorganism, a plant cell, a plant or a part thereof, as compared to a corresponding non-transformed wild type non-human organism or a part thereof; and
[85430] (b) growing the non-human organism or a part thereof under conditions which permit the production of glucose-1-phosphate or a composition comprising glucose-1-phosphate in said non-human organism or in the culture medium surrounding said non-human organism.

[85431] A further embodiment of the present invention relates to a process for the production of fructose, which comprises
[85432] (a) increasing or generating one or more activities selected from the group consisting of 1,4-alpha-glucan branching enzyme in an organelle, preferably in plastids or mitochondria, especially in plastids, of a non-human organism or a part thereof, preferably a microorganism, a plant cell, a plant or a part thereof, as compared to a corresponding non-transformed wild type non-human organism or a part thereof; and
[85433] (b) growing the non-human organism or a part thereof under conditions which permit the production of fructose or a composition comprising fructose in said non-human organism or in the culture medium surrounding said non-human organism.

[85434] A further embodiment of the present invention relates to a process for the production of glucose, which comprises
[85435] (a) increasing or generating one or more activities selected from the group consisting of 1,4-alpha-glucan branching enzyme in an organelle, preferably in plastids or mitochondria, especially in plastids, of a non-human organism or a part thereof, preferably a microorganism, a plant cell, a plant or a part thereof, as compared to a corresponding non-transformed wild type non-human organism or a part thereof; and
[85436] (b) growing the non-human organism or a part thereof under conditions which permit the production of glucose or a composition comprising glucose in said non-human organism or in the culture medium surrounding said non-human organism.

[85437] A further embodiment of the present invention relates to a process for the production of 3,4,5-trihydroxypentanoic acid, which comprises
[85438] (a) increasing or generating one or more activities selected from the group consisting of YEL030C-A-protein in an organelle, preferably in plastids or mitochondria, especially in plastids, of a non-human organism or a part thereof, preferably a microorganism, a plant cell, a plant or a part thereof, as compared to a corresponding non-transformed wild type non-human organism or a part thereof; and
[85439] (b) growing the non-human organism or a part thereof under conditions which permit the production of 3,4,5-trihydroxypentanoic acid or a composition comprising 3,4,5-trihydroxypentanoic acid in said non-human organism or in the culture medium surrounding said non-human organism.

[85440] A further embodiment of the present invention relates to a process for the production of glucose-1-phosphate, which comprises
[85441] (a) increasing or generating one or more activities selected from the group consisting of aldolase in an organelle, preferably in plastids or mitochondria, especially in plastids, of a non-human organism or a part thereof, preferably a microorganism, a plant cell, a plant or a part thereof, as compared to a corresponding non-transformed wild type non-human organism or a part thereof; and
[85442] (b) growing the non-human organism or a part thereof under conditions which permit the production of glucose-1-phosphate or a composition comprising glucose-1-phosphate in said non-human organism or in the culture medium surrounding said non-human organism.

[85443] A further embodiment of the present invention relates to a process for the production of glucose, which comprises
[85444] (a) increasing or generating one or more activities selected from the group consisting of O-acetyltransferase in an organelle, preferably in plastids or mitochondria, especially in plastids, of a non-human organism or a part thereof, preferably a microorganism, a plant cell, a plant or a part thereof, as compared to a corresponding non-transformed wild type non-human organism or a part thereof; and
[85445] (b) growing the non-human organism or a part thereof under conditions which permit the production of glucose or a composition comprising glucose in said non-human organism or in the culture medium surrounding said non-human organism.

[85446] A further embodiment of the present invention relates to a process for the production of raffinose, which comprises
[85447] (a) increasing or generating one or more activities selected from the group consisting of yer177w-protein in an organelle, preferably in plastids or mitochondria, especially in plastids, of a non-human organism or a part thereof, preferably a microorganism, a plant cell, a plant or a part thereof, as compared to a corresponding non-transformed wild type non-human organism or a part thereof; and
[85448] (b) growing the non-human organism or a part thereof under conditions which permit the production of raffinose or a composition comprising raffinose in said non-human organism or in the culture medium surrounding said non-human organism.

[85449] A further embodiment of the present invention relates to a process for the production of myo-inositol, which comprises
[85450] (a) increasing or generating one or more activities selected from the group consisting of YFL019C-protein in an organelle, preferably in plastids or mitochondria, especially in plastids, of a non-human organism or a part thereof, preferably a microorganism, a plant cell, a plant or a part thereof, as compared to a corresponding non-transformed wild type non-human organism or a part thereof; and
[85451] (b) growing the non-human organism or a part thereof under conditions which permit the production of myo-inositol or a composition comprising myo-inositol in said non-human organism or in the culture medium surrounding said non-human organism.

[85452] A further embodiment of the present invention relates to a process for the production of sucrose, which comprises
[85453] (a) increasing or generating one or more activities selected from the group consisting of YFL019C-protein in an organelle, preferably in plastids or mitochondria, especially in plastids, of a non-human organism or a part thereof, preferably a microorganism, a plant cell, a plant or a part thereof, as compared to a corresponding non-transformed wild type non-human organism or a part thereof; and
[85454] (b) growing the non-human organism or a part thereof under conditions which permit the production of sucrose or a composition comprising sucrose in said non-human organism or in the culture medium surrounding said non-human organism.

[85455] A further embodiment of the present invention relates to a process for the production of sucrose, which comprises
[85456] (a) increasing or generating one or more activities selected from the group consisting of hexokinase in an organelle, preferably in plastids or mitochondria, especially in plastids, of a non-human organism or a part thereof, preferably a microorganism, a plant cell, a plant or a part thereof, as compared to a corresponding non-transformed wild type non-human organism or a part thereof; and
[85457] (b) growing the non-human organism or a part thereof under conditions which permit the production of sucrose or a composition comprising sucrose in said non-human organism or in the culture medium surrounding said non-human organism.

[85458] A further embodiment of the present invention relates to a process for the production of glucose-1-phosphate, which comprises
[85459] (a) increasing or generating one or more activities selected from the group consisting of oxidoreductase in an organelle, preferably in plastids or mitochondria, especially in plastids, of a non-human organism or a part thereof, preferably a microorganism, a plant cell, a plant or a part thereof, as compared to a corresponding non-transformed wild type non-human organism or a part thereof; and
[85460] (b) growing the non-human organism or a part thereof under conditions which permit the production of glucose-1-phosphate or a composition comprising glucose-1-phosphate in said non-human organism or in the culture medium surrounding said non-human organism.

[85461] A further embodiment of the present invention relates to a process for the production of 3,4,5-trihydroxypentanoic acid, which comprises
[85462] (a) increasing or generating one or more activities selected from the group consisting of oxidoreductase in an organelle, preferably in plastids or mitochondria, especially in plastids, of a non-human organism or a part thereof, preferably a microorganism, a plant cell, a plant or a part thereof, as compared to a corresponding non-transformed wild type non-human organism or a part thereof; and
[85463] (b) growing the non-human organism or a part thereof under conditions which permit the production of 3,4,5-trihydroxypentanoic acid or a composition comprising 3,4,5-trihydroxypentanoic acid in said non-human organism or in the culture medium surrounding said non-human organism.

[85464] A further embodiment of the present invention relates to a process for the production of glucose-1-phosphate, which comprises
[85465] (a) increasing or generating one or more activities selected from the group consisting of ygl096w-protein in an organelle, preferably in plastids or mitochondria, especially in plastids, of a non-human organism or a part thereof, preferably a microorganism, a plant cell, a plant or a part thereof, as compared to a corresponding non-transformed wild type non-human organism or a part thereof; and
[85466] (b) growing the non-human organism or a part thereof under conditions which permit the production of glucose-1-phosphate or a composition comprising glucose-1-phosphate in said non-human organism or in the culture medium surrounding said non-human organism.

[85467] A further embodiment of the present invention relates to a process for the production of 3,4,5-trihydroxypentanoic acid, which comprises
[85468] (a) increasing or generating one or more activities selected from the group consisting of ygl096w-protein in an organelle, preferably in plastids or mitochondria, especially in plastids, of a non-human organism or a part thereof, preferably a microorganism, a plant cell, a plant or a part thereof, as compared to a corresponding non-transformed wild type non-human organism or a part thereof; and
[85469] (b) growing the non-human organism or a part thereof under conditions which permit the production of 3,4,5-trihydroxypentanoic acid or a composition comprising 3,4,5-trihydroxypentanoic acid in said non-human organism or in the culture medium surrounding said non-human organism.

[85470] A further embodiment of the present invention relates to a process for the production of raffinose, which comprises
[85471] (a) increasing or generating one or more activities selected from the group consisting of ygl237c-protein in an organelle, preferably in plastids or mitochondria, especially in plastids, of a non-human organism or a part thereof, preferably a microorganism, a plant cell, a plant or a part thereof, as compared to a corresponding non-transformed wild type non-human organism or a part thereof; and
[85472] (b) growing the non-human organism or a part thereof under conditions which permit the production of raffinose or a composition comprising raffinose in said non-human organism or in the culture medium surrounding said non-human organism.

[85473] A further embodiment of the present invention relates to a process for the production of glucose-1-phosphate, which comprises
[85474] (a) increasing or generating one or more activities selected from the group consisting of alcohol dehydrogenase in an organelle, preferably in plastids or mitochondria, especially in plastids, of a non-human organism or a part thereof, preferably a microorganism, a plant cell, a plant or a part thereof, as compared to a corresponding non-transformed wild type non-human organism or a part thereof; and
[85475] (b) growing the non-human organism or a part thereof under conditions which permit the production of glucose-1-phosphate or a composition comprising glucose-1-phosphate in said non-human organism or in the culture medium surrounding said non-human organism.

[85476] A further embodiment of the present invention relates to a process for the production of 3,4,5-trihydroxypentanoic acid, which comprises
[85477] (a) increasing or generating one or more activities selected from the group consisting of alcohol dehydrogenase in an organelle, preferably in plastids or mitochondria, especially in plastids, of a non-human organism or a part thereof, preferably a microorganism, a plant cell, a plant or a part thereof, as compared to a corresponding non-transformed wild type non-human organism or a part thereof; and
[85478] (b) growing the non-human organism or a part thereof under conditions which permit the production of 3,4,5-trihydroxypentanoic acid or a composition comprising 3,4,5-trihydroxypentanoic acid in said non-human organism or in the culture medium surrounding said non-human organism.

[85479] A further embodiment of the present invention relates to a process for the production of glucose, which comprises
[85480] (a) increasing or generating one or more activities selected from the group consisting of yhl013c-protein in an organelle, preferably in plastids or mitochondria, especially in plastids, of a non-human organism or a part thereof, preferably a microorganism, a plant cell, a plant or a part thereof, as compared to a corresponding non-transformed wild type non-human organism or a part thereof; and
[85481] (b) growing the non-human organism or a part thereof under conditions which permit the production of glucose or a composition comprising glucose in said non-human organism or in the culture medium surrounding said non-human organism.

[85482] A further embodiment of the present invention relates to a process for the production of glucose-1-phosphate, which comprises
[85483] (a) increasing or generating one or more activities selected from the group consisting of yhl013c-protein in an organelle, preferably in plastids or mitochondria, especially in plastids, of a non-human organism or a part thereof, preferably a microorganism, a plant cell, a plant or a part thereof, as compared to a corresponding non-transformed wild type non-human organism or a part thereof; and
[85484] (b) growing the non-human organism or a part thereof under conditions which permit the production of glucose-1-phosphate or a composition comprising glucose-1-phosphate in said non-human organism or in the culture medium surrounding said non-human organism.

[85485] A further embodiment of the present invention relates to a process for the production of glucose-1-phosphate, which comprises
[85486] (a) increasing or generating one or more activities selected from the group consisting of 3-phosphoglycerate dehydrogenase in an organelle, preferably in plastids or mitochondria, especially in plastids, of a non-human organism or a part thereof, preferably a microorganism, a plant cell, a plant or a part thereof, as compared to a corresponding non-transformed wild type non-human organism or a part thereof; and
[85487] (b) growing the non-human organism or a part thereof under conditions which permit the production of glucose-1-phosphate or a composition comprising glucose-1-phosphate in said non-human organism or in the culture medium surrounding said non-human organism.

[85488] A further embodiment of the present invention relates to a process for the production of fructose, which comprises
[85489] (a) increasing or generating one or more activities selected from the group consisting of YIL083C-protein in an organelle, preferably in plastids or mitochondria, especially in plastids, of a non-human organism or a part thereof, preferably a microorganism, a plant cell, a plant or a part thereof, as compared to a corresponding non-transformed wild type non-human organism or a part thereof; and
[85490] (b) growing the non-human organism or a part thereof under conditions which permit the production of fructose or a composition comprising fructose in said non-human organism or in the culture medium surrounding said non-human organism.

[85491] A further embodiment of the present invention relates to a process for the production of myo-inositol, which comprises
[85492] (a) increasing or generating one or more activities selected from the group consisting of DnaJ-like chaperone in an organelle, preferably in plastids or mitochondria, especially in plastids, of a non-human organism or a part thereof, preferably a microorganism, a plant cell, a plant or a part thereof, as compared to a corresponding non-transformed wild type non-human organism or a part thereof; and
[85493] (b) growing the non-human organism or a part thereof under conditions which permit the production of myo-inositol or a composition comprising myo-inositol in said non-human organism or in the culture medium surrounding said non-human organism.

[85494] A further embodiment of the present invention relates to a process for the production of 3,4,5-trihydroxypentanoic acid, which comprises
[85495] (a) increasing or generating one or more activities selected from the group consisting of YJL127W-A-protein in an organelle, preferably in plastids or mitochondria, especially in plastids, of a non-human organism or a part thereof, preferably a microorganism, a plant cell, a plant or a part thereof, as compared to a corresponding non-transformed wild type non-human organism or a part thereof; and
[85496] (b) growing the non-human organism or a part thereof under conditions which permit the production of 3,4,5-trihydroxypentanoic acid or a composition comprising 3,4,5-trihydroxypentanoic acid in said non-human organism or in the culture medium surrounding said non-human organism.

[85497] A further embodiment of the present invention relates to a process for the production of fructose, which comprises
[85498] (a) increasing or generating one or more activities selected from the group consisting of inositol-3-phosphate synthase in an organelle, preferably in plastids or mitochondria, especially in plastids, of a non-human organism or a part thereof, preferably a microorganism, a plant cell, a plant or a part thereof, as compared to a corresponding non-transformed wild type non-human organism or a part thereof; and
[85499] (b) growing the non-human organism or a part thereof under conditions which permit the production of fructose or a composition comprising fructose in said non-human organism or in the culture medium surrounding said non-human organism.

[85500] A further embodiment of the present invention relates to a process for the production of galactitol, which comprises
[85501] (a) increasing or generating one or more activities selected from the group consisting of inositol-3-phosphate synthase in an organelle, preferably in plastids or mitochondria, especially in plastids, of a non-human organism or a part thereof, preferably a microorganism, a plant cell, a plant or a part thereof, as compared to a corresponding non-transformed wild type non-human organism or a part thereof; and
[85502] (b) growing the non-human organism or a part thereof under conditions which permit the production of galactitol or a composition comprising galactitol in said non-human organism or in the culture medium surrounding said non-human organism.

[85503] A further embodiment of the present invention relates to a process for the production of myo-inositol, which comprises
[85504] (a) increasing or generating one or more activities selected from the group consisting of inositol-3-phosphate synthase in an organelle, preferably in plastids or mitochondria, especially in plastids, of a non-human organism or a part thereof, preferably a microorganism, a plant cell, a plant or a part thereof, as compared to a corresponding non-transformed wild type non-human organism or a part thereof; and
[85505] (b) growing the non-human organism or a part thereof under conditions which permit the production of myo-inositol or a composition comprising myo-inositol in said non-human organism or in the culture medium surrounding said non-human organism.

[85506] A further embodiment of the present invention relates to a process for the production of sorbitol, which comprises
[85507] (a) increasing or generating one or more activities selected from the group consisting of hexose transporter in an organelle, preferably in plastids or mitochondria, especially in plastids, of a non-human organism or a part thereof, preferably a microorganism, a plant cell, a plant or a part thereof, as compared to a corresponding non-transformed wild type non-human organism or a part thereof; and
[85508] (b) growing the non-human organism or a part thereof under conditions which permit the production of sorbitol or a composition comprising sorbitol in said non-human organism or in the culture medium surrounding said non-human organism.

[85509] A further embodiment of the present invention relates to a process for the production of myo-inositol, which comprises
[85510] (a) increasing or generating one or more activities selected from the group consisting of protein kinase in an organelle, preferably in plastids or mitochondria, especially in plastids, of a non-human organism or a part thereof, preferably a microorganism, a plant cell, a plant or a part thereof, as compared to a corresponding non-transformed wild type non-human organism or a part thereof; and
[85511] (b) growing the non-human organism or a part thereof under conditions which permit the production of myo-inositol or a composition comprising myo-inositol in said non-human organism or in the culture medium surrounding said non-human organism.

[85512] A further embodiment of the present invention relates to a process for the production of glucose, which comprises
[85513] (a) increasing or generating one or more activities selected from the group consisting of cystathionine gamma-synthase in an organelle, preferably in plastids or mitochondria, especially in plastids, of a non-human organism or a part thereof, preferably a microorganism, a plant cell, a plant or a part thereof, as compared to a corresponding non-transformed wild type non-human organism or a part thereof; and
[85514] (b) growing the non-human organism or a part thereof under conditions which permit the production of glucose or a composition comprising glucose in said non-human organism or in the culture medium surrounding said non-human organism.

[85515] A further embodiment of the present invention relates to a process for the production of fructose, which comprises
[85516] (a) increasing or generating one or more activities selected from the group consisting of fructose biphosphate aldolase in an organelle, preferably in plastids or mitochondria, especially in plastids, of a non-human organism or a part thereof, preferably a microorganism, a plant cell, a plant or a part thereof, as compared to a corresponding non-transformed wild type non-human organism or a part thereof; and
[85517] (b) growing the non-human organism or a part thereof under conditions which permit the production of fructose or a composition comprising fructose in said non-human organism or in the culture medium surrounding said non-human organism.

[85518] A further embodiment of the present invention relates to a process for the production of sedoheptulose-7-phosphate, which comprises
[85519] (a) increasing or generating one or more activities selected from the group consisting of fructose biphosphate aldolase in an organelle, preferably in plastids or mitochondria, especially in plastids, of a non-human organism or a part thereof, preferably a microorganism, a plant cell, a plant or a part thereof, as compared to a corresponding non-transformed wild type non-human organism or a part thereof; and
[85520] (b) growing the non-human organism or a part thereof under conditions which permit the production of sedoheptulose-7-phosphate or a composition comprising sedoheptulose-7-phosphate in said non-human organism or in the culture medium surrounding said non-human organism.

[85521] A further embodiment of the present invention relates to a process for the production of glucose-1-phosphate, which comprises
[85522] (a) increasing or generating one or more activities selected from the group consisting of acyl carrier protein in an organelle, preferably in plastids or mitochondria, especially in plastids, of a non-human organism or a part thereof, preferably a microorganism, a plant cell, a plant or a part thereof, as compared to a corresponding non-transformed wild type non-human organism or a part thereof; and
[85523] (b) growing the non-human organism or a part thereof under conditions which permit the production of glucose-1-phosphate or a composition comprising glucose-1-phosphate in said non-human organism or in the culture medium surrounding said non-human organism.

[85524] A further embodiment of the present invention relates to a process for the production of sucrose, which comprises
[85525] (a) increasing or generating one or more activities selected from the group consisting of halotolerance protein in an organelle, preferably in plastids or mitochondria, especially in plastids, of a non-human organism or a part thereof, preferably a microorganism, a plant cell, a plant or a part thereof, as compared to a corresponding non-transformed wild type non-human organism or a part thereof; and
[85526] (b) growing the non-human organism or a part thereof under conditions which permit the production of sucrose or a composition comprising sucrose in said non-human organism or in the culture medium surrounding said non-human organism.

[85527] A further embodiment of the present invention relates to a process for the production of glucose, which comprises
[85528] (a) increasing or generating one or more activities selected from the group consisting of phosphoenolpyruvate carboxykinase in an organelle, preferably in plastids or mitochondria, especially in plastids, of a non-human organism or a part thereof, preferably a microorganism, a plant cell, a plant or a part thereof, as compared to a corresponding non-transformed wild type non-human organism or a part thereof; and
[85529] (b) growing the non-human organism or a part thereof under conditions which permit the production of glucose or a composition comprising glucose in said non-human organism or in the culture medium surrounding said non-human organism.

[85530] A further embodiment of the present invention relates to a process for the production of glucose, which comprises
[85531] (a) increasing or generating one or more activities selected from the group consisting of phosphoenolpyruvate carboxykinase in an organelle, preferably in plastids or mitochondria, especially in plastids, of a non-human organism or a part thereof, preferably a microorganism, a plant cell, a plant or a part thereof, as compared to a corresponding non-transformed wild type non-human organism or a part thereof; and
[85532] (b) growing the non-human organism or a part thereof under conditions which permit the production of glucose or a composition comprising glucose in said non-human organism or in the culture medium surrounding said non-human organism.

[85533] A further embodiment of the present invention relates to a process for the production of sucrose, which comprises
[85534] (a) increasing or generating one or more activities selected from the group consisting of vacuolar sorting protein in an organelle, preferably in plastids or mitochondria, especially in plastids, of a non-human organism or a part thereof, preferably a microorganism, a plant cell, a plant or a part thereof, as compared to a corresponding non-transformed wild type non-human organism or a part thereof; and
[85535] (b) growing the non-human organism or a part thereof under conditions which permit the production of sucrose or a composition comprising sucrose in said non-human organism or in the culture medium surrounding said non-human organism.

[85536] A further embodiment of the present invention relates to a process for the production of glucose-1-phosphate, which comprises
[85537] (a) increasing or generating one or more activities selected from the group consisting of thioredoxin in an organelle, preferably in plastids or mitochondria, especially in plastids, of a non-human organism or a part thereof, preferably a microorganism, a plant cell, a plant or a part thereof, as compared to a corresponding non-transformed wild type non-human organism or a part thereof; and
[85538] (b) growing the non-human organism or a part thereof under conditions which permit the production of glucose-1-phosphate or a composition comprising glucose-1-phosphate in said non-human organism or in the culture medium surrounding said non-human organism.

[85539] A further embodiment of the present invention relates to a process for the production of fructose, which comprises
[85540] (a) increasing or generating one or more activities selected from the group consisting of hexose transporter in an organelle, preferably in plastids or mitochondria, especially in plastids, of a non-human organism or a part thereof, preferably a microorganism, a plant cell, a plant or a part thereof, as compared to a corresponding non-transformed wild type non-human organism or a part thereof; and
[85541] (b) growing the non-human organism or a part thereof under conditions which permit the production of fructose or a composition comprising fructose in said non-human organism or in the culture medium surrounding said non-human organism.

[85542] A further embodiment of the present invention relates to a process for the production of verbascose, which comprises
[85543] (a) increasing or generating one or more activities selected from the group consisting of purine biosynthesis protein in an organelle, preferably in plastids or mitochondria, especially in plastids, of a non-human organism or a part thereof, preferably a microorganism, a plant cell, a plant or a part thereof, as compared to a corresponding non-transformed wild type non-human organism or a part thereof; and
[85544] (b) growing the non-human organism or a part thereof under conditions which permit the production of verbascose or a composition comprising verbascose in said non-human organism or in the culture medium surrounding said non-human organism.

[85545] A further embodiment of the present invention relates to a process for the production of glucose-1-phosphate, which comprises
[85546] (a) increasing or generating one or more activities selected from the group consisting of ymr324c-protein in an organelle, preferably in plastids or mitochondria, especially in plastids, of a non-human organism or a part thereof, preferably a microorganism, a plant cell, a plant or a part thereof, as compared to a corresponding non-transformed wild type non-human organism or a part thereof; and
[85547] (b) growing the non-human organism or a part thereof under conditions which permit the production of glucose-1-phosphate or a composition comprising glucose-1-phosphate in said non-human organism or in the culture medium surrounding said non-human organism.

[85548] A further embodiment of the present invention relates to a process for the production of myo-inositol, which comprises
[85549] (a) increasing or generating one or more activities selected from the group consisting of molecular chaperone in an organelle, preferably in plastids or mitochondria, especially in plastids, of a non-human organism or a part thereof, preferably a microorganism, a plant cell, a plant or a part thereof, as compared to a corresponding non-transformed wild type non-human organism or a part thereof; and
[85550] (b) growing the non-human organism or a part thereof under conditions which permit the production of myo-inositol or a composition comprising myo-inositol in said non-human organism or in the culture medium surrounding said non-human organism.

[85551] A further embodiment of the present invention relates to a process for the production of sucrose, which comprises
[85552] (a) increasing or generating one or more activities selected from the group consisting of molecular chaperone in an organelle, preferably in plastids or mitochondria, especially in plastids, of a non-human organism or a part thereof, preferably a microorganism, a plant cell, a plant or a part thereof, as compared to a corresponding non-transformed wild type non-human organism or a part thereof; and
[85553] (b) growing the non-human organism or a part thereof under conditions which permit the production of sucrose or a composition comprising sucrose in said non-human organism or in the culture medium surrounding said non-human organism.

[85554] A further embodiment of the present invention relates to a process for the production of raffinose, which comprises
[85555] (a) increasing or generating one or more activities selected from the group consisting of sterol O-acyltransferase in an organelle, preferably in plastids or mitochondria, especially in plastids, of a non-human organism or a part thereof, preferably a microorganism, a plant cell, a plant or a part thereof, as compared to a corresponding non-transformed wild type non-human organism or a part thereof; and
[85556] (b) growing the non-human organism or a part thereof under conditions which permit the production of raffinose or a composition comprising raffinose in said non-human organism or in the culture medium surrounding said non-human organism.

[85557] A further embodiment of the present invention relates to a process for the production of myo-inositol, which comprises
[85558] (a) increasing or generating one or more activities selected from the group consisting of yol160w-protein in an organelle, preferably in plastids or mitochondria, especially in plastids, of a non-human organism or a part thereof, preferably a microorganism, a plant cell, a plant or a part thereof, as compared to a corresponding non-transformed wild type non-human organism or a part thereof; and
[85559] (b) growing the non-human organism or a part thereof under conditions which permit the production of myo-inositol or a composition comprising myo-inositol in said non-human organism or in the culture medium surrounding said non-human organism.

[85560] A further embodiment of the present invention relates to a process for the production of glucose, which comprises
[85561] (a) increasing or generating one or more activities selected from the group consisting of phosphohydrolase in an organelle, preferably in plastids or mitochondria, especially in plastids, of a non-human organism or a part thereof, preferably a microorganism, a plant cell, a plant or a part thereof, as compared to a corresponding non-transformed wild type non-human organism or a part thereof; and
[85562] (b) growing the non-human organism or a part thereof under conditions which permit the production of glucose or a composition comprising glucose in said non-human organism or in the culture medium surrounding said non-human organism.

[85563] A further embodiment of the present invention relates to a process for the production of glucose-1-phosphate, which comprises
[85564] (a) increasing or generating one or more activities selected from the group consisting of histone acetyltransferase in an organelle, preferably in plastids or mitochondria, especially in plastids, of a non-human organism or a part thereof, preferably a microorganism, a plant cell, a plant or a part thereof, as compared to a corresponding non-transformed wild type non-human organism or a part thereof; and
[85565] (b) growing the non-human organism or a part thereof under conditions which permit the production of glucose-1-phosphate or a composition comprising glucose-1-phosphate in said non-human organism or in the culture medium surrounding said non-human organism.

[85566] A further embodiment of the present invention relates to a process for the production of 3,4,5-trihydroxypentanoic acid, which comprises
[85567] (a) increasing or generating one or more activities selected from the group consisting of subunit of COMPASS-protein complex in an organelle, preferably in plastids or mitochondria, especially in plastids, of a non-human organism or a part thereof, preferably a microorganism, a plant cell, a plant or a part thereof, as compared to a corresponding non-transformed wild type non-human organism or a part thereof; and
[85568] (b) growing the non-human organism or a part thereof under conditions which permit the production of 3,4,5-trihydroxypentanoic acid or a composition comprising 3,4,5-trihydroxypentanoic acid in said non-human organism or in the culture medium surrounding said non-human organism.

[85569] A further embodiment of the present invention relates to a process for the production of glucose-1-phosphate, which comprises
[85570] (a) increasing or generating one or more activities selected from the group consisting of ypl144w-protein in an organelle, preferably in plastids or mitochondria, especially in plastids, of a non-human organism or a part thereof, preferably a microorganism, a plant cell, a plant or a part thereof, as compared to a corresponding non-transformed wild type non-human organism or a part thereof; and
[85571] (b) growing the non-human organism or a part thereof under conditions which permit the production of glucose-1-phosphate or a composition comprising glucose-1-phosphate in said non-human organism or in the culture medium surrounding said non-human organism.

[85572] A further embodiment of the present invention relates to a process for the production of 3,4,5-trihydroxypentanoic acid, which comprises
[85573] (a) increasing or generating one or more activities selected from the group consisting of ypl144w-protein in an organelle, preferably in plastids or mitochondria, especially in plastids, of a non-human organism or a part thereof, preferably a microorganism, a plant cell, a plant or a part thereof, as compared to a corresponding non-transformed wild type non-human organism or a part thereof; and
[85574] (b) growing the non-human organism or a part thereof under conditions which permit the production of 3,4,5-trihydroxypentanoic acid or a composition comprising 3,4,5-trihydroxypentanoic acid in said non-human organism or in the culture medium surrounding said non-human organism.

[85575] A further embodiment of the present invention relates to a process for the production of glucose-1-phosphate, which comprises
[85576] (a) increasing or generating one or more activities selected from the group consisting of ypr098c-protein in an organelle, preferably in plastids or mitochondria, especially in plastids, of a non-human organism or a part thereof, preferably a microorganism, a plant cell, a plant or a part thereof, as compared to a corresponding non-transformed wild type non-human organism or a part thereof; and
[85577] (b) growing the non-human organism or a part thereof under conditions which permit the production of glucose-1-phosphate or a composition comprising glucose-1-phosphate in said non-human organism or in the culture medium surrounding said non-human organism.

[85578] A further embodiment of the present invention relates to a process for the production of 3,4,5-trihydroxypentanoic acid, which comprises
[85579] (a) increasing or generating one or more activities selected from the group consisting of ypr098c-protein in an organelle, preferably in plastids or mitochondria, especially in plastids, of a non-human organism or a part thereof, preferably a microorganism, a plant cell, a plant or a part thereof, as compared to a corresponding non-transformed wild type non-human organism or a part thereof; and
[85580] (b) growing the non-human organism or a part thereof under conditions which permit the production of 3,4,5-trihydroxypentanoic acid or a composition comprising 3,4,5-trihydroxypentanoic acid in said non-human organism or in the culture medium surrounding said non-human organism.

[85581] A further embodiment of the present invention relates to a process for the production of glucose-1-phosphate, which comprises
[85582] (a) increasing or generating one or more activities selected from the group consisting of polyamine transporter in an organelle, preferably in plastids or mitochondria, especially in plastids, of a non-human organism or a part thereof, preferably a microorganism, a plant cell, a plant or a part thereof, as compared to a corresponding non-transformed wild type non-human organism or a part thereof; and
[85583] (b) growing the non-human organism or a part thereof under conditions which permit the production of glucose-1-phosphate or a composition comprising glucose-1-phosphate in said non-human organism or in the culture medium surrounding said non-human organism.

[85584] A further embodiment of the present invention relates to a process for the production of myo-inositol, which comprises
[85585] (a) increasing or generating one or more activities selected from the group consisting of polyamine transporter in an organelle, preferably in plastids or mitochondria, especially in plastids, of a non-human organism or a part thereof, preferably a microorganism, a plant cell, a plant or a part thereof, as compared to a corresponding non-transformed wild type non-human organism or a part thereof; and
[85586] (b) growing the non-human organism or a part thereof under conditions which permit the production of myo-inositol or a composition comprising myo-inositol in said non-human organism or in the culture medium surrounding said non-human organism.

[85587] A further embodiment of the present invention relates to a process for the production of fructose, which comprises
[85588] (a) increasing or generating one or more activities selected from the group consisting of Zm_{—}4842_BE510522-protein in an organelle, preferably in plastids or mitochondria, especially in plastids, of a non-human organism or a part thereof, preferably a microorganism, a plant cell, a plant or a part thereof, as compared to a corresponding non-transformed wild type non-human organism or a part thereof; and
[85589] (b) growing the non-human organism or a part thereof under conditions which permit the production of fructose or a composition comprising fructose in said non-human organism or in the culture medium surrounding said non-human organism.

[85590] A further embodiment of the present invention relates to a process for the production of glucose, which comprises
[85591] (a) increasing or generating one or more activities selected from the group consisting of Zm_{—}4842_BE510522-protein in an organelle, preferably in plastids or mitochondria, especially in plastids, of a non-human organism or a part thereof, preferably a microorganism, a plant cell, a plant or a part thereof, as compared to a corresponding non-transformed wild type non-human organism or a part thereof; and
[85592] (b) growing the non-human organism or a part thereof under conditions which permit the production of glucose or a composition comprising glucose in said non-human organism or in the culture medium surrounding said non-human organism.

[85593] A further embodiment of the present invention relates to a process for the production of myo-inositol, which comprises
[85594] (a) increasing or generating one or more activities selected from the group consisting of acetyltransferase in an organelle, preferably in plastids or mitochondria, especially in plastids, of a non-human organism or a part thereof, preferably a microorganism, a plant cell, a plant or a part thereof, as compared to a corresponding non-transformed wild type non-human organism or a part thereof; and
[85595] (b) growing the non-human organism or a part thereof under conditions which permit the production of myo-inositol or a composition comprising myo-inositol in said non-human organism or in the culture medium surrounding said non-human organism.

[85596] A further embodiment of the present invention relates to a process for the production of fructose, which comprises
[85597] (a) increasing or generating one or more activities selected from the group consisting of 47266012-protein in an organelle, preferably in plastids or mitochondria, especially in plastids, of a non-human organism or a part thereof, preferably a microorganism, a plant cell, a plant or a part thereof, as compared to a corresponding non-transformed wild type non-human organism or a part thereof; and
[85598] (b) growing the non-human organism or a part thereof under conditions which permit the production of fructose or a composition comprising fructose in said non-human organism or in the culture medium surrounding said non-human organism.

[85599] A further embodiment of the present invention relates to a process for the production of glucose, which comprises
[85600] (a) increasing or generating one or more activities selected from the group consisting of 47266012-protein in an organelle, preferably in plastids or mitochondria, especially in plastids, of a non-human organism or a part thereof, preferably a microorganism, a plant cell, a plant or a part thereof, as compared to a corresponding non-transformed wild type non-human organism or a part thereof; and
[85601] (b) growing the non-human organism or a part thereof under conditions which permit the production of glucose or a composition comprising glucose in said non-human organism or in the culture medium surrounding said non-human organism.

[85602] A further embodiment of the present invention relates to a process for the production of glucose-1-phosphate, which comprises
[85603] (a) increasing or generating one or more activities selected from the group consisting of 47266012-protein in an organelle, preferably in plastids or mitochondria, especially in plastids, of a non-human organism or a part thereof, preferably a microorganism, a plant cell, a plant or a part thereof, as compared to a corresponding non-transformed wild type non-human organism or a part thereof; and
[85604] (b) growing the non-human organism or a part thereof under conditions which permit the production of glucose-1-phosphate or a composition comprising glucose-1-phosphate in said non-human organism or in the culture medium surrounding said non-human organism.

[85605] A further embodiment of the present invention relates to a process for the production of myo-inositol, which comprises
[85606] (a) increasing or generating one or more activities selected from the group consisting of 47266012-protein in an organelle, preferably in plastids or mitochondria, especially in plastids, of a non-human organism or a part thereof, preferably a microorganism, a plant cell, a plant or a part thereof, as compared to a corresponding non-transformed wild type non-human organism or a part thereof; and
[85607] (b) growing the non-human organism or a part thereof under conditions which permit the production of myo-inositol or a composition comprising myo-inositol in said non-human organism or in the culture medium surrounding said non-human organism.

[85608] A further embodiment of the present invention relates to a process for the production of sedoheptulose-7-phosphate, which comprises
[85609] (a) increasing or generating one or more activities selected from the group consisting of 47266012-protein in an organelle, preferably in plastids or mitochondria, especially in plastids, of a non-human organism or a part thereof, preferably a microorganism, a plant cell, a plant or a part thereof, as compared to a corresponding non-transformed wild type non-human organism or a part thereof; and
[85610] (b) growing the non-human organism or a part thereof under conditions which permit the production of sedoheptulose-7-phosphate or a composition comprising sedoheptulose-7-phosphate in said non-human organism or in the culture medium surrounding said non-human organism.

[85611] A further embodiment of the present invention relates to a process for the production of glucose, which comprises
[85612] (a) increasing or generating one or more activities selected from the group consisting of 49747384_SOYBEAN-protein in an organelle, preferably in plastids or mitochondria, especially in plastids, of a non-human organism or a part thereof, preferably a microorganism, a plant cell, a plant or a part thereof, as compared to a corresponding non-transformed wild type non-human organism or a part thereof; and
[85613] (b) growing the non-human organism or a part thereof under conditions which permit the production of glucose or a composition comprising glucose in said non-human organism or in the culture medium surrounding said non-human organism.

[85614] A further embodiment of the present invention relates to a process for the production of glucose-1-phosphate, which comprises
[85615] (a) increasing or generating one or more activities selected from the group consisting of 49747384_SOYBEAN-protein in an organelle, preferably in plastids or mitochondria, especially in plastids, of a non-human organism or a part thereof, preferably a microorganism, a plant cell, a plant or a part thereof, as compared to a corresponding non-transformed wild type non-human organism or a part thereof; and
[85616] (b) growing the non-human organism or a part thereof under conditions which permit the production of glucose-1-phosphate or a composition comprising glucose-1-phosphate in said non-human organism or in the culture medium surrounding said non-human organism.

[85617] A further embodiment of the present invention relates to a process for the production of myo-inositol, which comprises
[85618] (a) increasing or generating one or more activities selected from the group consisting of 49747384_SOYBEAN-protein in an organelle, preferably in plastids or mitochondria, especially in plastids, of a non-human organism or a part thereof, preferably a microorganism, a plant cell, a plant or a part thereof, as compared to a corresponding non-transformed wild type non-human organism or a part thereof; and
[85619] (b) growing the non-human organism or a part thereof under conditions which permit the production of myo-inositol or a composition comprising myo-inositol in said non-human organism or in the culture medium surrounding said non-human organism.

[85620] A further embodiment of the present invention relates to a process for the production of raffinose, which comprises
[85621] (a) increasing or generating one or more activities selected from the group consisting of 49747384_SOYBEAN-protein in an organelle, preferably in plastids or mitochondria, especially in plastids, of a non-human organism or a part thereof, preferably a microorganism, a plant cell, a plant or a part thereof, as compared to a corresponding non-transformed wild type non-human organism or a part thereof; and
[85622] (b) growing the non-human organism or a part thereof under conditions which permit the production of raffinose or a composition comprising raffinose in said non-human organism or in the culture medium surrounding said non-human organism.

[85623] A further embodiment of the present invention relates to a process for the production of sedoheptulose-7-phosphate, which comprises
[85624] (a) increasing or generating one or more activities selected from the group consisting of 49747384_SOYBEAN-protein in an organelle, preferably in plastids or mitochondria, especially in plastids, of a non-human organism or a part thereof, preferably a microorganism, a plant cell, a plant or a part thereof, as compared to a corresponding non-transformed wild type non-human organism or a part thereof; and
[85625] (b) growing the non-human organism or a part thereof under conditions which permit the production of sedoheptulose-7-phosphate or a composition comprising sedoheptulose-7-phosphate in said non-human organism or in the culture medium surrounding said non-human organism.

[85626] A further embodiment of the present invention relates to a process for the production of fructose, which comprises
[85627] (a) increasing or generating one or more activities selected from the group consisting of glucose-6-phosphate 1-dehydrogenase in an organelle, preferably in plastids or mitochondria, especially in plastids, of a non-human organism or a part thereof, preferably a microorganism, a plant cell, a plant or a part thereof, as compared to a corresponding non-transformed wild type non-human organism or a part thereof; and
[85628] (b) growing the non-human organism or a part thereof under conditions which permit the production of fructose or a composition comprising fructose in said non-human organism or in the culture medium surrounding said non-human organism.

[85629] A further embodiment of the present invention relates to a process for the production of glucose, which comprises
[85630] (a) increasing or generating one or more activities selected from the group consisting of glucose-6-phosphate 1-dehydrogenase in an organelle, preferably in plastids or mitochondria, especially in plastids, of a non-human organism or a part thereof, preferably a microorganism, a plant cell, a plant or a part thereof, as compared to a corresponding non-transformed wild type non-human organism or a part thereof; and
[85631] (b) growing the non-human organism or a part thereof under conditions which permit the production of glucose or a composition comprising glucose in said non-human organism or in the culture medium surrounding said non-human organism.

[85632] A further embodiment of the present invention relates to a process for the production of glucose-1-phosphate, which comprises
[85633] (a) increasing or generating one or more activities selected from the group consisting of glucose-6-phosphate 1-dehydrogenase in an organelle, preferably in plastids or mitochondria, especially in plastids, of a non-human organism or a part thereof, preferably a microorganism, a plant cell, a plant or a part thereof, as compared to a corresponding non-transformed wild type non-human organism or a part thereof; and
[85634] (b) growing the non-human organism or a part thereof under conditions which permit the production of glucose-1-phosphate or a composition comprising glucose-1-phosphate in said non-human organism or in the culture medium surrounding said non-human organism.

[85635] A further embodiment of the present invention relates to a process for the production of sedoheptulose-7-phosphate, which comprises
[85636] (a) increasing or generating one or more activities selected from the group consisting of glucose-6-phosphate 1-dehydrogenase in an organelle, preferably in plastids or mitochondria, especially in plastids, of a non-human organism or a part thereof, preferably a microorganism, a plant cell, a plant or a part thereof, as compared to a corresponding non-transformed wild type non-human organism or a part thereof; and
[85637] (b) growing the non-human organism or a part thereof under conditions which permit the production of sedoheptulose-7-phosphate or a composition comprising sedoheptulose-7-phosphate in said non-human organism or in the culture medium surrounding said non-human organism.

[85638] A further embodiment of the present invention relates to a process for the production of sucrose, which comprises
[85639] (a) increasing or generating one or more activities selected from the group consisting of glucose-6-phosphate 1-dehydrogenase in an organelle, preferably in plastids or mitochondria, especially in plastids, of a non-human organism or a part thereof, preferably a microorganism, a plant cell, a plant or a part thereof, as compared to a corresponding non-transformed wild type non-human organism or a part thereof; and
[85640] (b) growing the non-human organism or a part thereof under conditions which permit the production of sucrose or a composition comprising sucrose in said non-human organism or in the culture medium surrounding said non-human organism.

[85641] A further embodiment of the present invention relates to a process for the production of 3,4,5-trihydroxypentanoic acid, which comprises
[85642] (a) increasing or generating one or more activities selected from the group consisting of glucose-6-phosphate 1-dehydrogenase in an organelle, preferably in plastids or mitochondria, especially in plastids, of a non-human organism or a part thereof, preferably a microorganism, a plant cell, a plant or a part thereof, as compared to a corresponding non-transformed wild type non-human organism or a part thereof; and
[85643] (b) growing the non-human organism or a part thereof under conditions which permit the production of 3,4,5-trihydroxypentanoic acid or a composition comprising 3,4,5-trihydroxypentanoic acid in said non-human organism or in the culture medium surrounding said non-human organism.

[85644] A further embodiment of the present invention relates to a process for the production of fructose, which comprises
[85645] (a) increasing or generating one or more activities selected from the group consisting of DNA replication complex GINS protein in an organelle, preferably in plastids or mitochondria, especially in plastids, of a non-human organism or a part thereof, preferably a microorganism, a plant cell, a plant or a part thereof, as compared to a corresponding non-transformed wild type non-human organism or a part thereof; and
[85646] (b) growing the non-human organism or a part thereof under conditions which permit the production of fructose or a composition comprising fructose in said non-human organism or in the culture medium surrounding said non-human organism.

[85647] A further embodiment of the present invention relates to a process for the production of glucose, which comprises
[85648] (a) increasing or generating one or more activities selected from the group consisting of acetyl CoA synthetase in an organelle, preferably in plastids or mitochondria, especially in plastids, of a non-human organism or a part thereof, preferably a microorganism, a plant cell, a plant or a part thereof, as compared to a corresponding non-transformed wild type non-human organism or a part thereof; and
[85649] (b) growing the non-human organism or a part thereof under conditions which permit the production of glucose or a composition comprising glucose in said non-human organism or in the culture medium surrounding said non-human organism.

[85650] A further embodiment of the present invention relates to a process for the production of 3,4,5-trihydroxypentanoic acid, which comprises
[85651] (a1) increasing or generating the activity of a polypeptide comprising a polypeptide as depicted in the respective line in column 5 or 8 of Table II, application no. 17, or a homolog or fragment thereof, a consensus sequence or at least one polypeptide motif as depicted in column 8 of Table IV, application no. 17, whereby the respective line disclose in column 7 the fine chemical 3,4,5-trihydroxypentanoic acid; or
[85652] increasing or generating the activity of an expression product of one or more nucleic acid molecule(s) comprising a polynucleotide as depicted in the respective line in column 5 or 8 of Table I, application no. 17, preferably the coding region thereof, or a homolog or a fragment thereof, whereby the respective line disclose in column 7 the fine chemical 3,4,5-trihydroxypentanoic acid;
[85653] in an organelle, preferably in plastids or mitochondria, especially in plastids, in a non-human organism or a part thereof; preferably a microorganism, a plant cell, a plant or a part thereof, as compared to a corresponding non-transformed wild type non-human organism or a part thereof; or
[85654] (a2) increasing or generating the activity of a polypeptide comprising a polypeptide as depicted in the respective line in column 5 or 8 of Table II, application no. 17, or a homolog or a fragment thereof, a consensus sequence or at least one polypeptide motif as depicted in the respective line in column 8 of Table IV, application no. 17, which is joined to a transit peptide, whereby the respective line disclose in column 7 the fine chemical 3,4,5-trihydroxypentanoic acid; or
[85655] increasing or generating the activity of an expression product of one or more nucleic acid molecule(s) comprising a polynucleotide as depicted in the respective line in column 5 or 8 of Table I, application no. 17, preferably the coding region thereof, or a homolog or a fragment thereof, which is joined to a nucleic acid sequence encoding an organelle localization sequence, preferably a plastid or a mitochondrion localization sequence, especially a plastid localization sequence, whereby the respective line disclose in column 7 the fine chemical 3,4,5-trihydroxypentanoic acid;
[85656] in a non-human organism or a part thereof; preferably a microorganism, a plant cell, a plant or a part thereof, as compared to a corresponding non-transformed wild type non-human organism or a part thereof; or
[85657] (a3) increasing or generating the activity of a polypeptide comprising a polypeptide as depicted in the respective line in column 5 or 8 of Table II, application no. 17, or a homolog or a fragment thereof, a consensus sequence or at least one polypeptide motif as depicted in the respective line in column 8 of Table IV, application no. 17, whereby the respective line disclose in column 7 the fine chemical 3,4,5-trihydroxypentanoic acid; or
[85658] increasing or generating the activity of an expression product of one or more nucleic acid molecule(s) comprising a polynucleotide as depicted in the respective line in column 5 or 8 of Table I, application no. 17, preferably the coding region thereof, or a homolog or a fragment thereof, whereby the respective line disclose in column 7 the fine chemical 3,4,5-trihydroxypentanoic acid;
[85659] in an organelle, preferably in plastids or mitochondria, especially in plastids, in a non-human organism or a part thereof; preferably a microorganism, a plant cell, a plant or a part thereof, through transformation of the organelle, as compared to a corresponding non-transformed wild type non-human organism or a part thereof;
[85660] and
[85661] (b) growing the non-human organism under conditions which permit the production of 3,4,5-trihydroxypentanoic acid, or a composition comprising 3,4,5-trihydroxypentanoic acid in said non-human organism or in the culture medium surrounding said non-human organism.

[85662] A further embodiment of the present invention relates to a process for the production of erythrol, which comprises
[85663] (a1) increasing or generating the activity of a polypeptide comprising a polypeptide as depicted in the respective line in column 5 or 8 of Table II, application no. 17, or a homolog or fragment thereof, a consensus sequence or at least one polypeptide motif as depicted in column 8 of Table IV, application no. 17, whereby the respective line disclose in column 7 the fine chemical erythrol; or
[85664] increasing or generating the activity of an expression product of one or more nucleic acid molecule(s) comprising a polynucleotide as depicted in the respective line in column 5 or 8 of Table I, application no. 17, preferably the coding region thereof, or a homolog or a fragment thereof, whereby the respective line disclose in column 7 the fine chemical erythrol;
[85665] in an organelle, preferably in plastids or mitochondria, especially in plastids, in a non-human organism or a part thereof; preferably a microorganism, a plant cell, a plant or a part thereof, as compared to a corresponding non-transformed wild type non-human organism or a part thereof; or
[85666] (a2) increasing or generating the activity of a polypeptide comprising a polypeptide as depicted in the respective line in column 5 or 8 of Table II, application no. 17, or a homolog or a fragment thereof, a consensus sequence or at least one polypeptide motif as depicted in the respective line in column 8 of Table IV, application no. 17, which is joined to a transit peptide, whereby the respective line disclose in column 7 the fine chemical erythrol; or
[85667] increasing or generating the activity of an expression product of one or more nucleic acid molecule(s) comprising a polynucleotide as depicted in the respective line in column 5 or 8 of Table I, application no. 17, preferably the coding region thereof, or a homolog or a fragment thereof, which is joined to a nucleic acid sequence encoding an organelle localization sequence, preferably a plastid or a mitochondrion localization sequence, especially a plastid localization sequence, whereby the respective line disclose in column 7 the fine chemical erythrol;
[85668] in a non-human organism or a part thereof; preferably a microorganism, a plant cell, a plant or a part thereof, as compared to a corresponding non-transformed wild type non-human organism or a part thereof; or
[85669] (a3) increasing or generating the activity of a polypeptide comprising a polypeptide as depicted in the respective line in column 5 or 8 of Table II, application no. 17, or a homolog or a fragment thereof, a consensus sequence or at least one polypeptide motif as depicted in the respective line in column 8 of Table IV, application no. 17, whereby the respective line disclose in column 7 the fine chemical erythrol; or
[85670] increasing or generating the activity of an expression product of one or more nucleic acid molecule(s) comprising a polynucleotide as depicted in the respective line in column 5 or 8 of Table I, application no. 17, preferably the coding region thereof, or a homolog or a fragment thereof, whereby the respective line disclose in column 7 the fine chemical erythrol;
[85671] in an organelle, preferably in plastids or mitochondria, especially in plastids, in a non-human organism or a part thereof; preferably a microorganism, a plant cell, a plant or a part thereof, through transformation of the organelle, as compared to a corresponding non-transformed wild type non-human organism or a part thereof;
[85672] and
[85673] (b) growing the non-human organism under conditions which permit the production of erythrol, or a composition comprising erythrol in said non-human organism or in the culture medium surrounding said non-human organism.

[85674] A further embodiment of the present invention relates to a process for the production of fructose, which comprises
[85675] (a1) increasing or generating the activity of a polypeptide comprising a polypeptide as depicted in the respective line in column 5 or 8 of Table II, application no. 17, or a homolog or fragment thereof, a consensus sequence or at least one polypeptide motif as depicted in column 8 of Table IV, application no. 17, whereby the respective line disclose in column 7 the fine chemical fructose; or
[85676] increasing or generating the activity of an expression product of one or more nucleic acid molecule(s) comprising a polynucleotide as depicted in the respective line in column 5 or 8 of Table I, application no. 17, preferably the coding region thereof, or a homolog or a fragment thereof, whereby the respective line disclose in column 7 the fine chemical fructose;
[85677] in an organelle, preferably in plastids or mitochondria, especially in plastids, in a non-human organism or a part thereof; preferably a microorganism, a plant cell, a plant or a part thereof, as compared to a corresponding non-transformed wild type non-human organism or a part thereof; or
[85678] (a2) increasing or generating the activity of a polypeptide comprising a polypeptide as depicted in the respective line in column 5 or 8 of Table II, application no. 17, or a homolog or a fragment thereof, a consensus sequence or at least one polypeptide motif as depicted in the respective line in column 8 of Table IV, application no. 17, which is joined to a transit peptide, whereby the respective line disclose in column 7 the fine chemical fructose; or
[85679] increasing or generating the activity of an expression product of one or more nucleic acid molecule(s) comprising a polynucleotide as depicted in the respective line in column 5 or 8 of Table I, application no. 17, preferably the coding region thereof, or a homolog or a fragment thereof, which is joined to a nucleic acid sequence encoding an organelle localization sequence, preferably a plastid or a mitochondrion localization sequence, especially a plastid localization sequence, whereby the respective line disclose in column 7 the fine chemical fructose;
[85680] in a non-human organism or a part thereof; preferably a microorganism, a plant cell, a plant or a part thereof, as compared to a corresponding non-transformed wild type non-human organism or a part thereof; or
[85681] (a3) increasing or generating the activity of a polypeptide comprising a polypeptide as depicted in the respective line in column 5 or 8 of Table II, application no. 17, or a homolog or a fragment thereof, a consensus sequence or at least one polypeptide motif as depicted in the respective line in column 8 of Table IV, application no. 17, whereby the respective line disclose in column 7 the fine chemical fructose; or
[85682] increasing or generating the activity of an expression product of one or more nucleic acid molecule(s) comprising a polynucleotide as depicted in the respective line in column 5 or 8 of Table I, application no. 17, preferably the coding region thereof, or a homolog or a fragment thereof, whereby the respective line disclose in column 7 the fine chemical fructose;
[85683] in an organelle, preferably in plastids or mitochondria, especially in plastids, in a non-human organism or a part thereof; preferably a microorganism, a plant cell, a plant or a part thereof, through transformation of the organelle, as compared to a corresponding non-transformed wild type non-human organism or a part thereof;
[85684] and
[85685] (b) growing the non-human organism under conditions which permit the production of fructose, or a composition comprising fructose in said non-human organism or in the culture medium surrounding said non-human organism.

[85686] A further embodiment of the present invention relates to a process for the production of fucose, which comprises
[85687] (a1) increasing or generating the activity of a polypeptide comprising a polypeptide as depicted in the respective line in column 5 or 8 of Table II, application no. 17, or a homolog or fragment thereof, a consensus sequence or at least one polypeptide motif as depicted in column 8 of Table IV, application no. 17, whereby the respective line disclose in column 7 the fine chemical fucose; or
[85688] increasing or generating the activity of an expression product of one or more nucleic acid molecule(s) comprising a polynucleotide as depicted in the respective line in column 5 or 8 of Table I, application no. 17, preferably the coding region thereof, or a homolog or a fragment thereof, whereby the respective line disclose in column 7 the fine chemical fucose;
[85689] in an organelle, preferably in plastids or mitochondria, especially in plastids, in a non-human organism or a part thereof; preferably a microorganism, a plant cell, a plant or a part thereof, as compared to a corresponding non-transformed wild type non-human organism or a part thereof; or
[85690] (a2) increasing or generating the activity of a polypeptide comprising a polypeptide as depicted in the respective line in column 5 or 8 of Table II, application no. 17, or a homolog or a fragment thereof, a consensus sequence or at least one polypeptide motif as depicted in the respective line in column 8 of Table IV, application no. 17, which is joined to a transit peptide, whereby the respective line disclose in column 7 the fine chemical fucose; or
[85691] increasing or generating the activity of an expression product of one or more nucleic acid molecule(s) comprising a polynucleotide as depicted in the respective line in column 5 or 8 of Table I, application no. 17, preferably the coding region thereof, or a homolog or a fragment thereof, which is joined to a nucleic acid sequence encoding an organelle localization sequence, preferably a plastid or a mitochondrion localization sequence, especially a plastid localization sequence, whereby the respective line disclose in column 7 the fine chemical fucose;
[85692] in a non-human organism or a part thereof; preferably a microorganism, a plant cell, a plant or a part thereof, as compared to a corresponding non-transformed wild type non-human organism or a part thereof; or
[85693] (a3) increasing or generating the activity of a polypeptide comprising a polypeptide as depicted in the respective line in column 5 or 8 of Table II, application no. 17, or a homolog or a fragment thereof, a consensus sequence or at least one polypeptide motif as depicted in the respective line in column 8 of Table IV, application no. 17, whereby the respective line disclose in column 7 the fine chemical fucose; or
[85694] increasing or generating the activity of an expression product of one or more nucleic acid molecule(s) comprising a polynucleotide as depicted in the respective line in column 5 or 8 of Table I, application no. 17, preferably the coding region thereof, or a homolog or a fragment thereof, whereby the respective line disclose in column 7 the fine chemical fucose;
[85695] in an organelle, preferably in plastids or mitochondria, especially in plastids, in a non-human organism or a part thereof; preferably a microorganism, a plant cell, a plant or a part thereof, through transformation of the organelle, as compared to a corresponding non-transformed wild type non-human organism or a part thereof;
[85696] and
[85697] (b) growing the non-human organism under conditions which permit the production of fucose, or a composition comprising fucose in said non-human organism or in the culture medium surrounding said non-human organism.

[85698] A further embodiment of the present invention relates to a process for the production of galactinol, which comprises
[85699] (a1) increasing or generating the activity of a polypeptide comprising a polypeptide as depicted in the respective line in column 5 or 8 of Table II, application no. 17, or a homolog or fragment thereof, a consensus sequence or at least one polypeptide motif as depicted in column 8 of Table IV, application no. 17, whereby the respective line disclose in column 7 the fine chemical galactinol; or
[85700] increasing or generating the activity of an expression product of one or more nucleic acid molecule(s) comprising a polynucleotide as depicted in the respective line in column 5 or 8 of Table I, application no. 17, preferably the coding region thereof, or a homolog or a fragment thereof, whereby the respective line disclose in column 7 the fine chemical galactinol;
[85701] in an organelle, preferably in plastids or mitochondria, especially in plastids, in a non-human organism or a part thereof; preferably a microorganism, a plant cell, a plant or a part thereof, as compared to a corresponding non-transformed wild type non-human organism or a part thereof; or
[85702] (a2) increasing or generating the activity of a polypeptide comprising a polypeptide as depicted in the respective line in column 5 or 8 of Table II, application no. 17, or a homolog or a fragment thereof, a consensus sequence or at least one polypeptide motif as depicted in the respective line in column 8 of Table IV, application no. 17, which is joined to a transit peptide, whereby the respective line disclose in column 7 the fine chemical galactinol; or
[85703] increasing or generating the activity of an expression product of one or more nucleic acid molecule(s) comprising a polynucleotide as depicted in the respective line in column 5 or 8 of Table I, application no. 17, preferably the coding region thereof, or a homolog or a fragment thereof, which is joined to a nucleic acid sequence encoding an organelle localization sequence, preferably a plastid or a mitochondrion localization sequence, especially a plastid localization sequence, whereby the respective line disclose in column 7 the fine chemical galactinol;
[85704] in a non-human organism or a part thereof; preferably a microorganism, a plant cell, a plant or a part thereof, as compared to a corresponding non-transformed wild type non-human organism or a part thereof; or
[85705] (a3) increasing or generating the activity of a polypeptide comprising a polypeptide as depicted in the respective line in column 5 or 8 of Table II, application no. 17, or a homolog or a fragment thereof, a consensus sequence or at least one polypeptide motif as depicted in the respective line in column 8 of Table IV, application no. 17, whereby the respective line disclose in column 7 the fine chemical galactinol; or
[85706] increasing or generating the activity of an expression product of one or more nucleic acid molecule(s) comprising a polynucleotide as depicted in the respective line in column 5 or 8 of Table I, application no. 17, preferably the coding region thereof, or a homolog or a fragment thereof, whereby the respective line disclose in column 7 the fine chemical galactinol;
[85707] in an organelle, preferably in plastids or mitochondria, especially in plastids, in a non-human organism or a part thereof; preferably a microorganism, a plant cell, a plant or a part thereof, through transformation of the organelle, as compared to a corresponding non-transformed wild type non-human organism or a part thereof;
[85708] and
[85709] (b) growing the non-human organism under conditions which permit the production of galactinol, or a composition comprising galactinol in said non-human organism or in the culture medium surrounding said non-human organism.

[85710] A further embodiment of the present invention relates to a process for the production of galactitol, which comprises
[85711] (a1) increasing or generating the activity of a polypeptide comprising a polypeptide as depicted in the respective line in column 5 or 8 of Table II, application no. 17, or a homolog or fragment thereof, a consensus sequence or at least one polypeptide motif as depicted in column 8 of Table IV, application no. 17, whereby the respective line disclose in column 7 the fine chemical galactitol; or
[85712] increasing or generating the activity of an expression product of one or more nucleic acid molecule(s) comprising a polynucleotide as depicted in the respective line in column 5 or 8 of Table I, application no. 17, preferably the coding region thereof, or a homolog or a fragment thereof, whereby the respective line disclose in column 7 the fine chemical galactitol;
[85713] in an organelle, preferably in plastids or mitochondria, especially in plastids, in a non-human organism or a part thereof; preferably a microorganism, a plant cell, a plant or a part thereof, as compared to a corresponding non-transformed wild type non-human organism or a part thereof; or
[85714] (a2) increasing or generating the activity of a polypeptide comprising a polypeptide as depicted in the respective line in column 5 or 8 of Table II, application no. 17, or a homolog or a fragment thereof, a consensus sequence or at least one polypeptide motif as depicted in the respective line in column 8 of Table IV, application no. 17, which is joined to a transit peptide, whereby the respective line disclose in column 7 the fine chemical galactitol; or
[85715] increasing or generating the activity of an expression product of one or more nucleic acid molecule(s) comprising a polynucleotide as depicted in the respective line in column 5 or 8 of Table I, application no. 17, preferably the coding region thereof, or a homolog or a fragment thereof, which is joined to a nucleic acid sequence encoding an organelle localization sequence, preferably a plastid or a mitochondrion localization sequence, especially a plastid localization sequence, whereby the respective line disclose in column 7 the fine chemical galactitol;
[85716] in a non-human organism or a part thereof; preferably a microorganism, a plant cell, a plant or a part thereof, as compared to a corresponding non-transformed wild type non-human organism or a part thereof; or
[85717] (a3) increasing or generating the activity of a polypeptide comprising a polypeptide as depicted in the respective line in column 5 or 8 of Table II, application no. 17, or a homolog or a fragment thereof, a consensus sequence or at least one polypeptide motif as depicted in the respective line in column 8 of Table IV, application no. 17, whereby the respective line disclose in column 7 the fine chemical galactitol; or
[85718] increasing or generating the activity of an expression product of one or more nucleic acid molecule(s) comprising a polynucleotide as depicted in the respective line in column 5 or 8 of Table I, application no. 17, preferably the coding region thereof, or a homolog or a fragment thereof, whereby the respective line disclose in column 7 the fine chemical galactitol;
[85719] in an organelle, preferably in plastids or mitochondria, especially in plastids, in a non-human organism or a part thereof; preferably a microorganism, a plant cell, a plant or a part thereof, through transformation of the organelle, as compared to a corresponding non-transformed wild type non-human organism or a part thereof;
[85720] and
[85721] (b) growing the non-human organism under conditions which permit the production of galactitol, or a composition comprising galactitol in said non-human organism or in the culture medium surrounding said non-human organism.

[85722] A further embodiment of the present invention relates to a process for the production of glucose, which comprises
[85723] (a1) increasing or generating the activity of a polypeptide comprising a polypeptide as depicted in the respective line in column 5 or 8 of Table II, application no. 17, or a homolog or fragment thereof, a consensus sequence or at least one polypeptide motif as depicted in column 8 of Table IV, application no. 17, whereby the respective line disclose in column 7 the fine chemical glucose; or
[85724] increasing or generating the activity of an expression product of one or more nucleic acid molecule(s) comprising a polynucleotide as depicted in the respective line in column 5 or 8 of Table I, application no. 17, preferably the coding region thereof, or a homolog or a fragment thereof, whereby the respective line disclose in column 7 the fine chemical glucose;
[85725] in an organelle, preferably in plastids or mitochondria, especially in plastids, in a non-human organism or a part thereof; preferably a microorganism, a plant cell, a plant or a part thereof, as compared to a corresponding non-transformed wild type non-human organism or a part thereof; or
[85726] (a2) increasing or generating the activity of a polypeptide comprising a polypeptide as depicted in the respective line in column 5 or 8 of Table II, application no. 17, or a homolog or a fragment thereof, a consensus sequence or at least one polypeptide motif as depicted in the respective line in column 8 of Table IV, application no. 17, which is joined to a transit peptide, whereby the respective line disclose in column 7 the fine chemical glucose; or
[85727] increasing or generating the activity of an expression product of one or more nucleic acid molecule(s) comprising a polynucleotide as depicted in the respective line in column 5 or 8 of Table I, application no. 17, preferably the coding region thereof, or a homolog or a fragment thereof, which is joined to a nucleic acid sequence encoding an organelle localization sequence, preferably a plastid or a mitochondrion localization sequence, especially a plastid localization sequence, whereby the respective line disclose in column 7 the fine chemical glucose;
[85728] in a non-human organism or a part thereof; preferably a microorganism, a plant cell, a plant or a part thereof, as compared to a corresponding non-transformed wild type non-human organism or a part thereof; or
[85729] (a3) increasing or generating the activity of a polypeptide comprising a polypeptide as depicted in the respective line in column 5 or 8 of Table II, application no. 17, or a homolog or a fragment thereof, a consensus sequence or at least one polypeptide motif as depicted in the respective line in column 8 of Table IV, application no. 17, whereby the respective line disclose in column 7 the fine chemical glucose; or
[85730] increasing or generating the activity of an expression product of one or more nucleic acid molecule(s) comprising a polynucleotide as depicted in the respective line in column 5 or 8 of Table I, application no. 17, preferably the coding region thereof, or a homolog or a fragment thereof, whereby the respective line disclose in column 7 the fine chemical glucose;
[85731] in an organelle, preferably in plastids or mitochondria, especially in plastids, in a non-human organism or a part thereof; preferably a microorganism, a plant cell, a plant or a part thereof, through transformation of the organelle, as compared to a corresponding non-transformed wild type non-human organism or a part thereof;
[85732] and
[85733] (b) growing the non-human organism under conditions which permit the production of glucose, or a composition comprising glucose in said non-human organism or in the culture medium surrounding said non-human organism.

[85734] A further embodiment of the present invention relates to a process for the production of glucose-1-phosphate, which comprises
[85735] (a1) increasing or generating the activity of a polypeptide comprising a polypeptide as depicted in the respective line in column 5 or 8 of Table II, application no. 17, or a homolog or fragment thereof, a consensus sequence or at least one polypeptide motif as depicted in column 8 of Table IV, application no. 17, whereby the respective line disclose in column 7 the fine chemical glucose-1-phosphate; or
[85736] increasing or generating the activity of an expression product of one or more nucleic acid molecule(s) comprising a polynucleotide as depicted in the respective line in column 5 or 8 of Table I, application no. 17, preferably the coding region thereof, or a homolog or a fragment thereof, whereby the respective line disclose in column 7 the fine chemical glucose-1-phosphate;
[85737] in an organelle, preferably in plastids or mitochondria, especially in plastids, in a non-human organism or a part thereof; preferably a microorganism, a plant cell, a plant or a part thereof, as compared to a corresponding non-transformed wild type non-human organism or a part thereof; or
[85738] (a2) increasing or generating the activity of a polypeptide comprising a polypeptide as depicted in the respective line in column 5 or 8 of Table II, application no. 17, or a homolog or a fragment thereof, a consensus sequence or at least one polypeptide motif as depicted in the respective line in column 8 of Table IV, application no. 17, which is joined to a transit peptide, whereby the respective line disclose in column 7 the fine chemical glucose-1-phosphate; or
[85739] increasing or generating the activity of an expression product of one or more nucleic acid molecule(s) comprising a polynucleotide as depicted in the respective line in column 5 or 8 of Table I, application no. 17, preferably the coding region thereof, or a homolog or a fragment thereof, which is joined to a nucleic acid sequence encoding an organelle localization sequence, preferably a plastid or a mitochondrion localization sequence, especially a plastid localization sequence, whereby the respective line disclose in column 7 the fine chemical glucose-1-phosphate;
[85740] in a non-human organism or a part thereof; preferably a microorganism, a plant cell, a plant or a part thereof, as compared to a corresponding non-transformed wild type non-human organism or a part thereof; or
[85741] (a3) increasing or generating the activity of a polypeptide comprising a polypeptide as depicted in the respective line in column 5 or 8 of Table II, application no. 17, or a homolog or a fragment thereof, a consensus sequence or at least one polypeptide motif as depicted in the respective line in column 8 of Table IV, application no. 17, whereby the respective line disclose in column 7 the fine chemical glucose-1-phosphate; or
[85742] increasing or generating the activity of an expression product of one or more nucleic acid molecule(s) comprising a polynucleotide as depicted in the respective line in column 5 or 8 of Table I, application no. 17, preferably the coding region thereof, or a homolog or a fragment thereof, whereby the respective line disclose in column 7 the fine chemical glucose-1-phosphate;
[85743] in an organelle, preferably in plastids or mitochondria, especially in plastids, in a non-human organism or a part thereof; preferably a microorganism, a plant cell, a plant or a part thereof, through transformation of the organelle, as compared to a corresponding non-transformed wild type non-human organism or a part thereof;
[85744] and
[85745] (b) growing the non-human organism under conditions which permit the production of glucose-1-phosphate, or a composition comprising glucose-1-phosphate in said non-human organism or in the culture medium surrounding said non-human organism.

[85746] A further embodiment of the present invention relates to a process for the production of mannitol, which comprises
[85747] (a1) increasing or generating the activity of a polypeptide comprising a polypeptide as depicted in the respective line in column 5 or 8 of Table II, application no. 17, or a homolog or fragment thereof, a consensus sequence or at least one polypeptide motif as depicted in column 8 of Table IV, application no. 17, whereby the respective line disclose in column 7 the fine chemical mannitol; or
[85748] increasing or generating the activity of an expression product of one or more nucleic acid molecule(s) comprising a polynucleotide as depicted in the respective line in column 5 or 8 of Table I, application no. 17, preferably the coding region thereof, or a homolog or a fragment thereof, whereby the respective line disclose in column 7 the fine chemical mannitol;
[85749] in an organelle, preferably in plastids or mitochondria, especially in plastids, in a non-human organism or a part thereof; preferably a microorganism, a plant cell, a plant or a part thereof, as compared to a corresponding non-transformed wild type non-human organism or a part thereof; or
[85750] (a2) increasing or generating the activity of a polypeptide comprising a polypeptide as depicted in the respective line in column 5 or 8 of Table II, application no. 17, or a homolog or a fragment thereof, a consensus sequence or at least one polypeptide motif as depicted in the respective line in column 8 of Table IV, application no. 17, which is joined to a transit peptide, whereby the respective line disclose in column 7 the fine chemical mannitol; or
[85751] increasing or generating the activity of an expression product of one or more nucleic acid molecule(s) comprising a polynucleotide as depicted in the respective line in column 5 or 8 of Table I, application no. 17, preferably the coding region thereof, or a homolog or a fragment thereof, which is joined to a nucleic acid sequence encoding an organelle localization sequence, preferably a plastid or a mitochondrion localization sequence, especially a plastid localization sequence, whereby the respective line disclose in column 7 the fine chemical mannitol;
[85752] in a non-human organism or a part thereof; preferably a microorganism, a plant cell, a plant or a part thereof, as compared to a corresponding non-transformed wild type non-human organism or a part thereof; or
[85753] (a3) increasing or generating the activity of a polypeptide comprising a polypeptide as depicted in the respective line in column 5 or 8 of Table II, application no. 17, or a homolog or a fragment thereof, a consensus sequence or at least one polypeptide motif as depicted in the respective line in column 8 of Table IV, application no. 17, whereby the respective line disclose in column 7 the fine chemical mannitol; or
[85754] increasing or generating the activity of an expression product of one or more nucleic acid molecule(s) comprising a polynucleotide as depicted in the respective line in column 5 or 8 of Table I, application no. 17, preferably the coding region thereof, or a homolog or a fragment thereof, whereby the respective line disclose in column 7 the fine chemical mannitol;
[85755] in an organelle, preferably in plastids or mitochondria, especially in plastids, in a non-human organism or a part thereof; preferably a microorganism, a plant cell, a plant or a part thereof, through transformation of the organelle, as compared to a corresponding non-transformed wild type non-human organism or a part thereof;
[85756] and
[85757] (b) growing the non-human organism under conditions which permit the production of mannitol, or a composition comprising mannitol in said non-human organism or in the culture medium surrounding said non-human organism.

[85758] A further embodiment of the present invention relates to a process for the production of melibiose, which comprises
[85759] (a1) increasing or generating the activity of a polypeptide comprising a polypeptide as depicted in the respective line in column 5 or 8 of Table II, application no. 17, or a homolog or fragment thereof, a consensus sequence or at least one polypeptide motif as depicted in column 8 of Table IV, application no. 17, whereby the respective line disclose in column 7 the fine chemical melibiose; or
[85760] increasing or generating the activity of an expression product of one or more nucleic acid molecule(s) comprising a polynucleotide as depicted in the respective line in column 5 or 8 of Table I, application no. 17, preferably the coding region thereof, or a homolog or a fragment thereof, whereby the respective line disclose in column 7 the fine chemical melibiose;
[85761] in an organelle, preferably in plastids or mitochondria, especially in plastids, in a non-human organism or a part thereof; preferably a microorganism, a plant cell, a plant or a part thereof, as compared to a corresponding non-transformed wild type non-human organism or a part thereof; or
[85762] (a2) increasing or generating the activity of a polypeptide comprising a polypeptide as depicted in the respective line in column 5 or 8 of Table II, application no. 17, or a homolog or a fragment thereof, a consensus sequence or at least one polypeptide motif as depicted in the respective line in column 8 of Table IV, application no. 17, which is joined to a transit peptide, whereby the respective line disclose in column 7 the fine chemical melibiose; or
[85763] increasing or generating the activity of an expression product of one or more nucleic acid molecule(s) comprising a polynucleotide as depicted in the respective line in column 5 or 8 of Table I, application no. 17, preferably the coding region thereof, or a homolog or a fragment thereof, which is joined to a nucleic acid sequence encoding an organelle localization sequence, preferably a plastid or a mitochondrion localization sequence, especially a plastid localization sequence, whereby the respective line disclose in column 7 the fine chemical melibiose;
[85764] in a non-human organism or a part thereof; preferably a microorganism, a plant cell, a plant or a part thereof, as compared to a corresponding non-transformed wild type non-human organism or a part thereof; or
[85765] (a3) increasing or generating the activity of a polypeptide comprising a polypeptide as depicted in the respective line in column 5 or 8 of Table II, application no. 17, or a homolog or a fragment thereof, a consensus sequence or at least one polypeptide motif as depicted in the respective line in column 8 of Table IV, application no. 17, whereby the respective line disclose in column 7 the fine chemical melibiose; or
[85766] increasing or generating the activity of an expression product of one or more nucleic acid molecule(s) comprising a polynucleotide as depicted in the respective line in column 5 or 8 of Table I, application no. 17, preferably the coding region thereof, or a homolog or a fragment thereof, whereby the respective line disclose in column 7 the fine chemical melibiose;
[85767] in an organelle, preferably in plastids or mitochondria, especially in plastids, in a non-human organism or a part thereof; preferably a microorganism, a plant cell, a plant or a part thereof, through transformation of the organelle, as compared to a corresponding non-transformed wild type non-human organism or a part thereof;
[85768] and
[85769] (b) growing the non-human organism under conditions which permit the production of melibiose, or a composition comprising melibiose in said non-human organism or in the culture medium surrounding said non-human organism.

[85770] A further embodiment of the present invention relates to a process for the production of myo-inositol, which comprises
[85771] (a1) increasing or generating the activity of a polypeptide comprising a polypeptide as depicted in the respective line in column 5 or 8 of Table II, application no. 17, or a homolog or fragment thereof, a consensus sequence or at least one polypeptide motif as depicted in column 8 of Table IV, application no. 17, whereby the respective line disclose in column 7 the fine chemical myo-inositol; or
[85772] increasing or generating the activity of an expression product of one or more nucleic acid molecule(s) comprising a polynucleotide as depicted in the respective line in column 5 or 8 of Table I, application no. 17, preferably the coding region thereof, or a homolog or a fragment thereof, whereby the respective line disclose in column 7 the fine chemical myo-inositol;
[85773] in an organelle, preferably in plastids or mitochondria, especially in plastids, in a non-human organism or a part thereof; preferably a microorganism, a plant cell, a plant or a part thereof, as compared to a corresponding non-transformed wild type non-human organism or a part thereof; or
[85774] (a2) increasing or generating the activity of a polypeptide comprising a polypeptide as depicted in the respective line in column 5 or 8 of Table II, application no. 17, or a homolog or a fragment thereof, a consensus sequence or at least one polypeptide motif as depicted in the respective line in column 8 of Table IV, application no. 17, which is joined to a transit peptide, whereby the respective line disclose in column 7 the fine chemical myo-inositol; or
[85775] increasing or generating the activity of an expression product of one or more nucleic acid molecule(s) comprising a polynucleotide as depicted in the respective line in column 5 or 8 of Table I, application no. 17, preferably the coding region thereof, or a homolog or a fragment thereof, which is joined to a nucleic acid sequence encoding an organelle localization sequence, preferably a plastid or a mitochondrion localization sequence, especially a plastid localization sequence, whereby the respective line disclose in column 7 the fine chemical myo-inositol;
[85776] in a non-human organism or a part thereof; preferably a microorganism, a plant cell, a plant or a part thereof, as compared to a corresponding non-transformed wild type non-human organism or a part thereof; or
[85777] (a3) increasing or generating the activity of a polypeptide comprising a polypeptide as depicted in the respective line in column 5 or 8 of Table II, application no. 17, or a homolog or a fragment thereof, a consensus sequence or at least one polypeptide motif as depicted in the respective line in column 8 of Table IV, application no. 17, whereby the respective line disclose in column 7 the fine chemical myo-inositol; or
[85778] increasing or generating the activity of an expression product of one or more nucleic acid molecule(s) comprising a polynucleotide as depicted in the respective line in column 5 or 8 of Table I, application no. 17, preferably the coding region thereof, or a homolog or a fragment thereof, whereby the respective line disclose in column 7 the fine chemical myo-inositol;
[85779] in an organelle, preferably in plastids or mitochondria, especially in plastids, in a non-human organism or a part thereof; preferably a microorganism, a plant cell, a plant or a part thereof, through transformation of the organelle, as compared to a corresponding non-transformed wild type non-human organism or a part thereof;
[85780] and
[85781] (b) growing the non-human organism under conditions which permit the production of myo-inositol, or a composition comprising myo-inositol in said non-human organism or in the culture medium surrounding said non-human organism.

[85782] A further embodiment of the present invention relates to a process for the production of raffinose, which comprises
[85783] (a1) increasing or generating the activity of a polypeptide comprising a polypeptide as depicted in the respective line in column 5 or 8 of Table II, application no. 17, or a homolog or fragment thereof, a consensus sequence or at least one polypeptide motif as depicted in column 8 of Table IV, application no. 17, whereby the respective line disclose in column 7 the fine chemical raffinose; or
[85784] increasing or generating the activity of an expression product of one or more nucleic acid molecule(s) comprising a polynucleotide as depicted in the respective line in column 5 or 8 of Table I, application no. 17, preferably the coding region thereof, or a homolog or a fragment thereof, whereby the respective line disclose in column 7 the fine chemical raffinose;
[85785] in an organelle, preferably in plastids or mitochondria, especially in plastids, in a non-human organism or a part thereof; preferably a microorganism, a plant cell, a plant or a part thereof, as compared to a corresponding non-transformed wild type non-human organism or a part thereof; or
[85786] (a2) increasing or generating the activity of a polypeptide comprising a polypeptide as depicted in the respective line in column 5 or 8 of Table II, application no. 17, or a homolog or a fragment thereof, a consensus sequence or at least one polypeptide motif as depicted in the respective line in column 8 of Table IV, application no. 17, which is joined to a transit peptide, whereby the respective line disclose in column 7 the fine chemical raffinose; or
[85787] increasing or generating the activity of an expression product of one or more nucleic acid molecule(s) comprising a polynucleotide as depicted in the respective line in column 5 or 8 of Table I, application no. 17, preferably the coding region thereof, or a homolog or a fragment thereof, which is joined to a nucleic acid sequence encoding an organelle localization sequence, preferably a plastid or a mitochondrion localization sequence, especially a plastid localization sequence, whereby the respective line disclose in column 7 the fine chemical raffinose;
[85788] in a non-human organism or a part thereof; preferably a microorganism, a plant cell, a plant or a part thereof, as compared to a corresponding non-transformed wild type non-human organism or a part thereof; or
[85789] (a3) increasing or generating the activity of a polypeptide comprising a polypeptide as depicted in the respective line in column 5 or 8 of Table II, application no. 17, or a homolog or a fragment thereof, a consensus sequence or at least one polypeptide motif as depicted in the respective line in column 8 of Table IV, application no. 17, whereby the respective line disclose in column 7 the fine chemical raffinose; or
[85790] increasing or generating the activity of an expression product of one or more nucleic acid molecule(s) comprising a polynucleotide as depicted in the respective line in column 5 or 8 of Table I, application no. 17, preferably the coding region thereof, or a homolog or a fragment thereof, whereby the respective line disclose in column 7 the fine chemical raffinose;
[85791] in an organelle, preferably in plastids or mitochondria, especially in plastids, in a non-human organism or a part thereof; preferably a microorganism, a plant cell, a plant or a part thereof, through transformation of the organelle, as compared to a corresponding non-transformed wild type non-human organism or a part thereof;
[85792] and
[85793] (b) growing the non-human organism under conditions which permit the production of raffinose, or a composition comprising raffinose in said non-human organism or in the culture medium surrounding said non-human organism.

[85794] A further embodiment of the present invention relates to a process for the production of saccharic acid, which comprises
[85795] (a1) increasing or generating the activity of a polypeptide comprising a polypeptide as depicted in the respective line in column 5 or 8 of Table II, application no. 17, or a homolog or fragment thereof, a consensus sequence or at least one polypeptide motif as depicted in column 8 of Table IV, application no. 17, whereby the respective line disclose in column 7 the fine chemical saccharic acid; or
[85796] increasing or generating the activity of an expression product of one or more nucleic acid molecule(s) comprising a polynucleotide as depicted in the respective line in column 5 or 8 of Table I, application no. 17, preferably the coding region thereof, or a homolog or a fragment thereof, whereby the respective line disclose in column 7 the fine chemical saccharic acid;
[85797] in an organelle, preferably in plastids or mitochondria, especially in plastids, in a non-human organism or a part thereof; preferably a microorganism, a plant cell, a plant or a part thereof, as compared to a corresponding non-transformed wild type non-human organism or a part thereof; or
[85798] (a2) increasing or generating the activity of a polypeptide comprising a polypeptide as depicted in the respective line in column 5 or 8 of Table II, application no. 17, or a homolog or a fragment thereof, a consensus sequence or at least one polypeptide motif as depicted in the respective line in column 8 of Table IV, application no. 17, which is joined to a transit peptide, whereby the respective line disclose in column 7 the fine chemical saccharic acid; or
[85799] increasing or generating the activity of an expression product of one or more nucleic acid molecule(s) comprising a polynucleotide as depicted in the respective line in column 5 or 8 of Table I, application no. 17, preferably the coding region thereof, or a homolog or a fragment thereof, which is joined to a nucleic acid sequence encoding an organelle localization sequence, preferably a plastid or a mitochondrion localization sequence, especially a plastid localization sequence, whereby the respective line disclose in column 7 the fine chemical saccharic acid;
[85800] in a non-human organism or a part thereof; preferably a microorganism, a plant cell, a plant or a part thereof, as compared to a corresponding non-transformed wild type non-human organism or a part thereof; or
[85801] (a3) increasing or generating the activity of a polypeptide comprising a polypeptide as depicted in the respective line in column 5 or 8 of Table II, application no. 17, or a homolog or a fragment thereof, a consensus sequence or at least one polypeptide motif as depicted in the respective line in column 8 of Table IV, application no. 17, whereby the respective line disclose in column 7 the fine chemical saccharic acid; or
[85802] increasing or generating the activity of an expression product of one or more nucleic acid molecule(s) comprising a polynucleotide as depicted in the respective line in column 5 or 8 of Table I, application no. 17, preferably the coding region thereof, or a homolog or a fragment thereof, whereby the respective line disclose in column 7 the fine chemical saccharic acid;
[85803] in an organelle, preferably in plastids or mitochondria, especially in plastids, in a non-human organism or a part thereof; preferably a microorganism, a plant cell, a plant or a part thereof, through transformation of the organelle, as compared to a corresponding non-transformed wild type non-human organism or a part thereof;
[85804] and
[85805] (b) growing the non-human organism under conditions which permit the production of saccharic acid, or a composition comprising saccharic acid in said non-human organism or in the culture medium surrounding said non-human organism.

[85806] A further embodiment of the present invention relates to a process for the production of sedoheptulose-7-phosphate, which comprises
[85807] (a1) increasing or generating the activity of a polypeptide comprising a polypeptide as depicted in the respective line in column 5 or 8 of Table II, application no. 17, or a homolog or fragment thereof, a consensus sequence or at least one polypeptide motif as depicted in column 8 of Table IV, application no. 17, whereby the respective line disclose in column 7 the fine chemical sedoheptulose-7-phosphate; or
[85808] increasing or generating the activity of an expression product of one or more nucleic acid molecule(s) comprising a polynucleotide as depicted in the respective line in column 5 or 8 of Table I, application no. 17, preferably the coding region thereof, or a homolog or a fragment thereof, whereby the respective line disclose in column 7 the fine chemical sedoheptulose-7-phosphate;
[85809] in an organelle, preferably in plastids or mitochondria, especially in plastids, in a non-human organism or a part thereof; preferably a microorganism, a plant cell, a plant or a part thereof, as compared to a corresponding non-transformed wild type non-human organism or a part thereof; or
[85810] (a2) increasing or generating the activity of a polypeptide comprising a polypeptide as depicted in the respective line in column 5 or 8 of Table II, application no. 17, or a homolog or a fragment thereof, a consensus sequence or at least one polypeptide motif as depicted in the respective line in column 8 of Table IV, application no. 17, which is joined to a transit peptide, whereby the respective line disclose in column 7 the fine chemical sedoheptulose-7-phosphate; or
[85811] increasing or generating the activity of an expression product of one or more nucleic acid molecule(s) comprising a polynucleotide as depicted in the respective line in column 5 or 8 of Table I, application no. 17, preferably the coding region thereof, or a homolog or a fragment thereof, which is joined to a nucleic acid sequence encoding an organelle localization sequence, preferably a plastid or a mitochondrion localization sequence, especially a plastid localization sequence, whereby the respective line disclose in column 7 the fine chemical sedoheptulose-7-phosphate;
[85812] in a non-human organism or a part thereof; preferably a microorganism, a plant cell, a plant or a part thereof, as compared to a corresponding non-transformed wild type non-human organism or a part thereof; or
[85813] (a3) increasing or generating the activity of a polypeptide comprising a polypeptide as depicted in the respective line in column 5 or 8 of Table II, application no. 17, or a homolog or a fragment thereof, a consensus sequence or at least one polypeptide motif as depicted in the respective line in column 8 of Table IV, application no. 17, whereby the respective line disclose in column 7 the fine chemical sedoheptulose-7-phosphate; or
[85814] increasing or generating the activity of an expression product of one or more nucleic acid molecule(s) comprising a polynucleotide as depicted in the respective line in column 5 or 8 of Table I, application no. 17, preferably the coding region thereof, or a homolog or a fragment thereof, whereby the respective line disclose in column 7 the fine chemical sedoheptulose-7-phosphate;
[85815] in an organelle, preferably in plastids or mitochondria, especially in plastids, in a non-human organism or a part thereof; preferably a microorganism, a plant cell, a plant or a part thereof, through transformation of the organelle, as compared to a corresponding non-transformed wild type non-human organism or a part thereof;
[85816] and
[85817] (b) growing the non-human organism under conditions which permit the production of sedoheptulose-7-phosphate, or a composition comprising sedoheptulose-7-phosphate in said non-human organism or in the culture medium surrounding said non-human organism.

[85818] A further embodiment of the present invention relates to a process for the production of sorbitol, which comprises
[85819] (a1) increasing or generating the activity of a polypeptide comprising a polypeptide as depicted in the respective line in column 5 or 8 of Table II, application no. 17, or a homolog or fragment thereof, a consensus sequence or at least one polypeptide motif as depicted in column 8 of Table IV, application no. 17, whereby the respective line disclose in column 7 the fine chemical sorbitol; or
[85820] increasing or generating the activity of an expression product of one or more nucleic acid molecule(s) comprising a polynucleotide as depicted in the respective line in column 5 or 8 of Table I, application no. 17, preferably the coding region thereof, or a homolog or a fragment thereof, whereby the respective line disclose in column 7 the fine chemical sorbitol;
[85821] in an organelle, preferably in plastids or mitochondria, especially in plastids, in a non-human organism or a part thereof; preferably a microorganism, a plant cell, a plant or a part thereof, as compared to a corresponding non-transformed wild type non-human organism or a part thereof; or
[85822] (a2) increasing or generating the activity of a polypeptide comprising a polypeptide as depicted in the respective line in column 5 or 8 of Table II, application no. 17, or a homolog or a fragment thereof, a consensus sequence or at least one polypeptide motif as depicted in the respective line in column 8 of Table IV, application no. 17, which is joined to a transit peptide, whereby the respective line disclose in column 7 the fine chemical sorbitol; or
[85823] increasing or generating the activity of an expression product of one or more nucleic acid molecule(s) comprising a polynucleotide as depicted in the respective line in column 5 or 8 of Table I, application no. 17, preferably the coding region thereof, or a homolog or a fragment thereof, which is joined to a nucleic acid sequence encoding an organelle localization sequence, preferably a plastid or a mitochondrion localization sequence, especially a plastid localization sequence, whereby the respective line disclose in column 7 the fine chemical sorbitol;
[85824] in a non-human organism or a part thereof; preferably a microorganism, a plant cell, a plant or a part thereof, as compared to a corresponding non-transformed wild type non-human organism or a part thereof; or
[85825] (a3) increasing or generating the activity of a polypeptide comprising a polypeptide as depicted in the respective line in column 5 or 8 of Table II, application no. 17, or a homolog or a fragment thereof, a consensus sequence or at least one polypeptide motif as depicted in the respective line in column 8 of Table IV, application no. 17, whereby the respective line disclose in column 7 the fine chemical sorbitol; or
[85826] increasing or generating the activity of an expression product of one or more nucleic acid molecule(s) comprising a polynucleotide as depicted in the respective line in column 5 or 8 of Table I, application no. 17, preferably the coding region thereof, or a homolog or a fragment thereof, whereby the respective line disclose in column 7 the fine chemical sorbitol;
[85827] in an organelle, preferably in plastids or mitochondria, especially in plastids, in a non-human organism or a part thereof; preferably a microorganism, a plant cell, a plant or a part thereof, through transformation of the organelle, as compared to a corresponding non-transformed wild type non-human organism or a part thereof;
[85828] and
[85829] (b) growing the non-human organism under conditions which permit the production of sorbitol, or a composition comprising sorbitol in said non-human organism or in the culture medium surrounding said non-human organism.

[85830] A further embodiment of the present invention relates to a process for the production of sucrose, which comprises
[85831] (a1) increasing or generating the activity of a polypeptide comprising a polypeptide as depicted in the respective line in column 5 or 8 of Table II, application no. 17, or a homolog or fragment thereof, a consensus sequence or at least one polypeptide motif as depicted in column 8 of Table IV, application no. 17, whereby the respective line disclose in column 7 the fine chemical sucrose; or
[85832] increasing or generating the activity of an expression product of one or more nucleic acid molecule(s) comprising a polynucleotide as depicted in the respective line in column 5 or 8 of Table I, application no. 17, preferably the coding region thereof, or a homolog or a fragment thereof, whereby the respective line disclose in column 7 the fine chemical sucrose;
[85833] in an organelle, preferably in plastids or mitochondria, especially in plastids, in a non-human organism or a part thereof; preferably a microorganism, a plant cell, a plant or a part thereof, as compared to a corresponding non-transformed wild type non-human organism or a part thereof; or
[85834] (a2) increasing or generating the activity of a polypeptide comprising a polypeptide as depicted in the respective line in column 5 or 8 of Table II, application no. 17, or a homolog or a fragment thereof, a consensus sequence or at least one polypeptide motif as depicted in the respective line in column 8 of Table IV, application no. 17, which is joined to a transit peptide, whereby the respective line disclose in column 7 the fine chemical sucrose; or
[85835] increasing or generating the activity of an expression product of one or more nucleic acid molecule(s) comprising a polynucleotide as depicted in the respective line in column 5 or 8 of Table I, application no. 17, preferably the coding region thereof, or a homolog or a fragment thereof, which is joined to a nucleic acid sequence encoding an organelle localization sequence, preferably a plastid or a mitochondrion localization sequence, especially a plastid localization sequence, whereby the respective line disclose in column 7 the fine chemical sucrose;
[85836] in a non-human organism or a part thereof; preferably a microorganism, a plant cell, a plant or a part thereof, as compared to a corresponding non-transformed wild type non-human organism or a part thereof; or
[85837] (a3) increasing or generating the activity of a polypeptide comprising a polypeptide as depicted in the respective line in column 5 or 8 of Table II, application no. 17, or a homolog or a fragment thereof, a consensus sequence or at least one polypeptide motif as depicted in the respective line in column 8 of Table IV, application no. 17, whereby the respective line disclose in column 7 the fine chemical sucrose; or
[85838] increasing or generating the activity of an expression product of one or more nucleic acid molecule(s) comprising a polynucleotide as depicted in the respective line in column 5 or 8 of Table I, application no. 17, preferably the coding region thereof, or a homolog or a fragment thereof, whereby the respective line disclose in column 7 the fine chemical sucrose;
[85839] in an organelle, preferably in plastids or mitochondria, especially in plastids, in a non-human organism or a part thereof; preferably a microorganism, a plant cell, a plant or a part thereof, through transformation of the organelle, as compared to a corresponding non-transformed wild type non-human organism or a part thereof;
[85840] and
[85841] (b) growing the non-human organism under conditions which permit the production of sucrose, or a composition comprising sucrose in said non-human organism or in the culture medium surrounding said non-human organism.

[85842] A further embodiment of the present invention relates to a process for the production of trehalose, which comprises
[85843] (a1) increasing or generating the activity of a polypeptide comprising a polypeptide as depicted in the respective line in column 5 or 8 of Table II, application no. 17, or a homolog or fragment thereof, a consensus sequence or at least one polypeptide motif as depicted in column 8 of Table IV, application no. 17, whereby the respective line disclose in column 7 the fine chemical trehalose; or
[85844] increasing or generating the activity of an expression product of one or more nucleic acid molecule(s) comprising a polynucleotide as depicted in the respective line in column 5 or 8 of Table I, application no. 17, preferably the coding region thereof, or a homolog or a fragment thereof, whereby the respective line disclose in column 7 the fine chemical trehalose;
[85845] in an organelle, preferably in plastids or mitochondria, especially in plastids, in a non-human organism or a part thereof; preferably a microorganism, a plant cell, a plant or a part thereof, as compared to a corresponding non-transformed wild type non-human organism or a part thereof; or
[85846] (a2) increasing or generating the activity of a polypeptide comprising a polypeptide as depicted in the respective line in column 5 or 8 of Table II, application no. 17, or a homolog or a fragment thereof, a consensus sequence or at least one polypeptide motif as depicted in the respective line in column 8 of Table IV, application no. 17, which is joined to a transit peptide, whereby the respective line disclose in column 7 the fine chemical trehalose; or
[85847] increasing or generating the activity of an expression product of one or more nucleic acid molecule(s) comprising a polynucleotide as depicted in the respective line in column 5 or 8 of Table I, application no. 17, preferably the coding region thereof, or a homolog or a fragment thereof, which is joined to a nucleic acid sequence encoding an organelle localization sequence, preferably a plastid or a mitochondrion localization sequence, especially a plastid localization sequence, whereby the respective line disclose in column 7 the fine chemical trehalose;
[85848] in a non-human organism or a part thereof; preferably a microorganism, a plant cell, a plant or a part thereof, as compared to a corresponding non-transformed wild type non-human organism or a part thereof; or
[85849] (a3) increasing or generating the activity of a polypeptide comprising a polypeptide as depicted in the respective line in column 5 or 8 of Table II, application no. 17, or a homolog or a fragment thereof, a consensus sequence or at least one polypeptide motif as depicted in the respective line in column 8 of Table IV, application no. 17, whereby the respective line disclose in column 7 the fine chemical trehalose; or
[85850] increasing or generating the activity of an expression product of one or more nucleic acid molecule(s) comprising a polynucleotide as depicted in the respective line in column 5 or 8 of Table I, application no. 17, preferably the coding region thereof, or a homolog or a fragment thereof, whereby the respective line disclose in column 7 the fine chemical trehalose;
[85851] in an organelle, preferably in plastids or mitochondria, especially in plastids, in a non-human organism or a part thereof; preferably a microorganism, a plant cell, a plant or a part thereof, through transformation of the organelle, as compared to a corresponding non-transformed wild type non-human organism or a part thereof;
[85852] and
[85853] (b) growing the non-human organism under conditions which permit the production of trehalose, or a composition comprising trehalose in said non-human organism or in the culture medium surrounding said non-human organism.

[85854] A further embodiment of the present invention relates to a process for the production of verbascose, which comprises
[85855] (a1) increasing or generating the activity of a polypeptide comprising a polypeptide as depicted in the respective line in column 5 or 8 of Table II, application no. 17, or a homolog or fragment thereof, a consensus sequence or at least one polypeptide motif as depicted in column 8 of Table IV, application no. 17, whereby the respective line disclose in column 7 the fine chemical verbascose; or
[85856] increasing or generating the activity of an expression product of one or more nucleic acid molecule(s) comprising a polynucleotide as depicted in the respective line in column 5 or 8 of Table I, application no. 17, preferably the coding region thereof, or a homolog or a fragment thereof, whereby the respective line disclose in column 7 the fine chemical verbascose;
[85857] in an organelle, preferably in plastids or mitochondria, especially in plastids, in a non-human organism or a part thereof; preferably a microorganism, a plant cell, a plant or a part thereof, as compared to a corresponding non-transformed wild type non-human organism or a part thereof; or
[85858] (a2) increasing or generating the activity of a polypeptide comprising a polypeptide as depicted in the respective line in column 5 or 8 of Table II, application no. 17, or a homolog or a fragment thereof, a consensus sequence or at least one polypeptide motif as depicted in the respective line in column 8 of Table IV, application no. 17, which is joined to a transit peptide, whereby the respective line disclose in column 7 the fine chemical verbascose; or
[85859] increasing or generating the activity of an expression product of one or more nucleic acid molecule(s) comprising a polynucleotide as depicted in the respective line in column 5 or 8 of Table I, application no. 17, preferably the coding region thereof, or a homolog or a fragment thereof, which is joined to a nucleic acid sequence encoding an organelle localization sequence, preferably a plastid or a mitochondrion localization sequence, especially a plastid localization sequence, whereby the respective line disclose in column 7 the fine chemical verbascose;
[85860] in a non-human organism or a part thereof; preferably a microorganism, a plant cell, a plant or a part thereof, as compared to a corresponding non-transformed wild type non-human organism or a part thereof; or
[85861] (a3) increasing or generating the activity of a polypeptide comprising a polypeptide as depicted in the respective line in column 5 or 8 of Table II, application no. 17, or a homolog or a fragment thereof, a consensus sequence or at least one polypeptide motif as depicted in the respective line in column 8 of Table IV, application no. 17, whereby the respective line disclose in column 7 the fine chemical verbascose; or
[85862] increasing or generating the activity of an expression product of one or more nucleic acid molecule(s) comprising a polynucleotide as depicted in the respective line in column 5 or 8 of Table I, application no. 17, preferably the coding region thereof, or a homolog or a fragment thereof, whereby the respective line disclose in column 7 the fine chemical verbascose;
[85863] in an organelle, preferably in plastids or mitochondria, especially in plastids, in a non-human organism or a part thereof; preferably a microorganism, a plant cell, a plant or a part thereof, through transformation of the organelle, as compared to a corresponding non-transformed wild type non-human organism or a part thereof;
[85864] and
[85865] (b) growing the non-human organism under conditions which permit the production of verbascose, or a composition comprising verbascose in said non-human organism or in the culture medium surrounding said non-human organism.

[85866] Accordingly, the present invention relates to a process for the production of raffinose, which comprises
[85867] (a) increasing or generating the activity of a galactinol synthase in the cytosol of a cell of a non-human organism or a part thereof, preferably a microorganism, a plant cell, a plant or a part thereof, as compared to a corresponding non-transformed wild type non-human organism or a part thereof; and
[85868] (b) growing the non-human organism or a part thereof under conditions which permit the production of raffinose or a composition comprising raffinose in said non-human organism or in the culture medium surrounding said non-human organism.

[85869] Accordingly, the present invention relates to a process for the production of glucose-1-phosphate, which comprises
[85870] (a) increasing or generating the activity of a protein phosphatase in the cytosol of a cell of a non-human organism or a part thereof, preferably a microorganism, a plant cell, a plant or a part thereof, as compared to a corresponding non-transformed wild type non-human organism or a part thereof; and
[85871] (b) growing the non-human organism or a part thereof under conditions which permit the production of glucose-1-phosphate or a composition comprising glucose-1-phosphate in said non-human organism or in the culture medium surrounding said non-human organism.

[85872] Accordingly, the present invention relates to a process for the production of myo-inositol, which comprises
[85873] (a) increasing or generating the activity of a protein phosphatase in the cytosol of a cell of a non-human organism or a part thereof, preferably a microorganism, a plant cell, a plant or a part thereof, as compared to a corresponding non-transformed wild type non-human organism or a part thereof; and
[85874] (b) growing the non-human organism or a part thereof under conditions which permit the production of myo-inositol or a composition comprising myo-inositol in said non-human organism or in the culture medium surrounding said non-human organism.

[85875] Accordingly, the present invention relates to a process for the production of glucose-1-phosphate, which comprises
[85876] (a) increasing or generating the activity of a At1g19350-protein in the cytosol of a cell of a non-human organism or a part thereof, preferably a microorganism, a plant cell, a plant or a part thereof, as compared to a corresponding non-transformed wild type non-human organism or a part thereof; and
[85877] (b) growing the non-human organism or a part thereof under conditions which permit the production of glucose-1-phosphate or a composition comprising glucose-1-phosphate in said non-human organism or in the culture medium surrounding said non-human organism.

[85878] Accordingly, the present invention relates to a process for the production of 3,4,5-trihydroxypentanoic acid, which comprises
[85879] (a) increasing or generating the activity of a At1g19350-protein in the cytosol of a cell of a non-human organism or a part thereof, preferably a microorganism, a plant cell, a plant or a part thereof, as compared to a corresponding non-transformed wild type non-human organism or a part thereof; and
[85880] (b) growing the non-human organism or a part thereof under conditions which permit the production of 3,4,5-trihydroxypentanoic acid or a composition comprising 3,4,5-trihydroxypentanoic acid in said non-human organism or in the culture medium surrounding said non-human organism.

[85881] Accordingly, the present invention relates to a process for the production of myo-inositol, which comprises
[85882] (a) increasing or generating the activity of a chlorophyllase in the cytosol of a cell of a non-human organism or a part thereof, preferably a microorganism, a plant cell, a plant or a part thereof, as compared to a corresponding non-transformed wild type non-human organism or a part thereof; and
[85883] (b) growing the non-human organism or a part thereof under conditions which permit the production of myo-inositol or a composition comprising myo-inositol in said non-human organism or in the culture medium surrounding said non-human organism.

[85884] Accordingly, the present invention relates to a process for the production of fructose, which comprises
[85885] (a) increasing or generating the activity of a cullin in the cytosol of a cell of a non-human organism or a part thereof, preferably a microorganism, a plant cell, a plant or a part thereof, as compared to a corresponding non-transformed wild type non-human organism or a part thereof; and
[85886] (b) growing the non-human organism or a part thereof under conditions which permit the production of fructose or a composition comprising fructose in said non-human organism or in the culture medium surrounding said non-human organism.

[85887] Accordingly, the present invention relates to a process for the production of fructose, which comprises
[85888] (a) increasing or generating the activity of a eukaryotic translation initiation factor 5 in the cytosol of a cell of a non-human organism or a part thereof, preferably a microorganism, a plant cell, a plant or a part thereof, as compared to a corresponding non-transformed wild type non-human organism or a part thereof; and
[85889] (b) growing the non-human organism or a part thereof under conditions which permit the production of fructose or a composition comprising fructose in said non-human organism or in the culture medium surrounding said non-human organism.

[85890] Accordingly, the present invention relates to a process for the production of glucose, which comprises
[85891] (a) increasing or generating the activity of a eukaryotic translation initiation factor 5 in the cytosol of a cell of a non-human organism or a part thereof, preferably a microorganism, a plant cell, a plant or a part thereof, as compared to a corresponding non-transformed wild type non-human organism or a part thereof; and
[85892] (b) growing the non-human organism or a part thereof under conditions which permit the production of glucose or a composition comprising glucose in said non-human organism or in the culture medium surrounding said non-human organism.

[85893] Accordingly, the present invention relates to a process for the production of raffinose, which comprises
[85894] (a) increasing or generating the activity of a eukaryotic translation initiation factor 5 in the cytosol of a cell of a non-human organism or a part thereof, preferably a microorganism, a plant cell, a plant or a part thereof, as compared to a corresponding non-transformed wild type non-human organism or a part thereof; and
[85895] (b) growing the non-human organism or a part thereof under conditions which permit the production of raffinose or a composition comprising raffinose in said non-human organism or in the culture medium surrounding said non-human organism.

[85896] Accordingly, the present invention relates to a process for the production of sucrose, which comprises
[85897] (a) increasing or generating the activity of a transcriptional regulator in the cytosol of a cell of a non-human organism or a part thereof, preferably a microorganism, a plant cell, a plant or a part thereof, as compared to a corresponding non-transformed wild type non-human organism or a part thereof; and
[85898] (b) growing the non-human organism or a part thereof under conditions which permit the production of sucrose or a composition comprising sucrose in said non-human organism or in the culture medium surrounding said non-human organism.

[85899] Accordingly, the present invention relates to a process for the production of raffinose, which comprises
[85900] (a) increasing or generating the activity of a galactinol synthase in the cytosol of a cell of a non-human organism or a part thereof, preferably a microorganism, a plant cell, a plant or a part thereof, as compared to a corresponding non-transformed wild type non-human organism or a part thereof; and
[85901] (b) growing the non-human organism or a part thereof under conditions which permit the production of raffinose or a composition comprising raffinose in said non-human organism or in the culture medium surrounding said non-human organism.

[85902] Accordingly, the present invention relates to a process for the production of glucose, which comprises
[85903] (a) increasing or generating the activity of a protein phosphatase in the cytosol of a cell of a non-human organism or a part thereof, preferably a microorganism, a plant cell, a plant or a part thereof, as compared to a corresponding non-transformed wild type non-human organism or a part thereof; and
[85904] (b) growing the non-human organism or a part thereof under conditions which permit the production of glucose or a composition comprising glucose in said non-human organism or in the culture medium surrounding said non-human organism.

[85905] Accordingly, the present invention relates to a process for the production of glucose-1-phosphate, which comprises
[85906] (a) increasing or generating the activity of a protein phosphatase in the cytosol of a cell of a non-human organism or a part thereof, preferably a microorganism, a plant cell, a plant or a part thereof, as compared to a corresponding non-transformed wild type non-human organism or a part thereof; and
[85907] (b) growing the non-human organism or a part thereof under conditions which permit the production of glucose-1-phosphate or a composition comprising glucose-1-phosphate in said non-human organism or in the culture medium surrounding said non-human organism.

[85908] Accordingly, the present invention relates to a process for the production of myo-inositol, which comprises
[85909] (a) increasing or generating the activity of a protein phosphatase in the cytosol of a cell of a non-human organism or a part thereof, preferably a microorganism, a plant cell, a plant or a part thereof, as compared to a corresponding non-transformed wild type non-human organism or a part thereof; and
[85910] (b) growing the non-human organism or a part thereof under conditions which permit the production of myo-inositol or a composition comprising myo-inositol in said non-human organism or in the culture medium surrounding said non-human organism.

[85911] Accordingly, the present invention relates to a process for the production of raffinose, which comprises
[85912] (a) increasing or generating the activity of a protein phosphatase in the cytosol of a cell of a non-human organism or a part thereof, preferably a microorganism, a plant cell, a plant or a part thereof, as compared to a corresponding non-transformed wild type non-human organism or a part thereof; and
[85913] (b) growing the non-human organism or a part thereof under conditions which permit the production of raffinose or a composition comprising raffinose in said non-human organism or in the culture medium surrounding said non-human organism.

[85914] Accordingly, the present invention relates to a process for the production of sucrose, which comprises
[85915] (a) increasing or generating the activity of a protein phosphatase in the cytosol of a cell of a non-human organism or a part thereof, preferably a microorganism, a plant cell, a plant or a part thereof, as compared to a corresponding non-transformed wild type non-human organism or a part thereof; and
[85916] (b) growing the non-human organism or a part thereof under conditions which permit the production of sucrose or a composition comprising sucrose in said non-human organism or in the culture medium surrounding said non-human organism.

[85917] Accordingly, the present invention relates to a process for the production of saccharic acid, which comprises
[85918] (a) increasing or generating the activity of a protein phosphatase in the cytosol of a cell of a non-human organism or a part thereof, preferably a microorganism, a plant cell, a plant or a part thereof, as compared to a corresponding non-transformed wild type non-human organism or a part thereof; and
[85919] (b) growing the non-human organism or a part thereof under conditions which permit the production of saccharic acid or a composition comprising saccharic acid in said non-human organism or in the culture medium surrounding said non-human organism.

[85920] Accordingly, the present invention relates to a process for the production of fructose, which comprises
[85921] (a) increasing or generating the activity of a transcription factor in the cytosol of a cell of a non-human organism or a part thereof, preferably a microorganism, a plant cell, a plant or a part thereof, as compared to a corresponding non-transformed wild type non-human organism or a part thereof; and
[85922] (b) growing the non-human organism or a part thereof under conditions which permit the production of fructose or a composition comprising fructose in said non-human organism or in the culture medium surrounding said non-human organism.

[85923] Accordingly, the present invention relates to a process for the production of glucose, which comprises
[85924] (a) increasing or generating the activity of a transcription factor in the cytosol of a cell of a non-human organism or a part thereof, preferably a microorganism, a plant cell, a plant or a part thereof, as compared to a corresponding non-transformed wild type non-human organism or a part thereof; and
[85925] (b) growing the non-human organism or a part thereof under conditions which permit the production of glucose or a composition comprising glucose in said non-human organism or in the culture medium surrounding said non-human organism.

[85926] Accordingly, the present invention relates to a process for the production of glucose-1-phosphate, which comprises
[85927] (a) increasing or generating the activity of a transcription factor in the cytosol of a cell of a non-human organism or a part thereof, preferably a microorganism, a plant cell, a plant or a part thereof, as compared to a corresponding non-transformed wild type non-human organism or a part thereof; and
[85928] (b) growing the non-human organism or a part thereof under conditions which permit the production of glucose-1-phosphate or a composition comprising glucose-1-phosphate in said non-human organism or in the culture medium surrounding said non-human organism.

[85929] Accordingly, the present invention relates to a process for the production of glucose-1-phosphate, which comprises
[85930] (a) increasing or generating the activity of a protein phosphatase in the cytosol of a cell of a non-human organism or a part thereof, preferably a microorganism, a plant cell, a plant or a part thereof, as compared to a corresponding non-transformed wild type non-human organism or a part thereof; and
[85931] (b) growing the non-human organism or a part thereof under conditions which permit the production of glucose-1-phosphate or a composition comprising glucose-1-phosphate in said non-human organism or in the culture medium surrounding said non-human organism.

[85932] Accordingly, the present invention relates to a process for the production of saccharic acid, which comprises
[85933] (a) increasing or generating the activity of a glutaredoxin in the cytosol of a cell of a non-human organism or a part thereof, preferably a microorganism, a plant cell, a plant or a part thereof, as compared to a corresponding non-transformed wild type non-human organism or a part thereof; and
[85934] (b) growing the non-human organism or a part thereof under conditions which permit the production of saccharic acid or a composition comprising saccharic acid in said non-human organism or in the culture medium surrounding said non-human organism.

[85935] Accordingly, the present invention relates to a process for the production of fructose, which comprises
[85936] (a) increasing or generating the activity of a CBL-interacting protein kinase in the cytosol of a cell of a non-human organism or a part thereof, preferably a microorganism, a plant cell, a plant or a part thereof, as compared to a corresponding non-transformed wild type non-human organism or a part thereof; and
[85937] (b) growing the non-human organism or a part thereof under conditions which permit the production of fructose or a composition comprising fructose in said non-human organism or in the culture medium surrounding said non-human organism.

[85938] Accordingly, the present invention relates to a process for the production of glucose, which comprises
[85939] (a) increasing or generating the activity of a CBL-interacting protein kinase in the cytosol of a cell of a non-human organism or a part thereof, preferably a microorganism, a plant cell, a plant or a part thereof, as compared to a corresponding non-transformed wild type non-human organism or a part thereof; and
[85940] (b) growing the non-human organism or a part thereof under conditions which permit the production of glucose or a composition comprising glucose in said non-human organism or in the culture medium surrounding said non-human organism.

[85941] Accordingly, the present invention relates to a process for the production of sedoheptulose-7-phosphate, which comprises
[85942] (a) increasing or generating the activity of a CBL-interacting protein kinase in the cytosol of a cell of a non-human organism or a part thereof, preferably a microorganism, a plant cell, a plant or a part thereof, as compared to a corresponding non-transformed wild type non-human organism or a part thereof; and
[85943] (b) growing the non-human organism or a part thereof under conditions which permit the production of sedoheptulose-7-phosphate or a composition comprising sedoheptulose-7-phosphate in said non-human organism or in the culture medium surrounding said non-human organism.

[85944] Accordingly, the present invention relates to a process for the production of glucose-1-phosphate, which comprises
[85945] (a) increasing or generating the activity of a phenylalanine ammonia-lyase in the cytosol of a cell of a non-human organism or a part thereof, preferably a microorganism, a plant cell, a plant or a part thereof, as compared to a corresponding non-transformed wild type non-human organism or a part thereof; and
[85946] (b) growing the non-human organism or a part thereof under conditions which permit the production of glucose-1-phosphate or a composition comprising glucose-1-phosphate in said non-human organism or in the culture medium surrounding said non-human organism.

[85947] Accordingly, the present invention relates to a process for the production of glucose-1-phosphate, which comprises
[85948] (a) increasing or generating the activity of a MADS box protein transcription factor in the cytosol of a cell of a non-human organism or a part thereof, preferably a microorganism, a plant cell, a plant or a part thereof, as compared to a corresponding non-transformed wild type non-human organism or a part thereof; and
[85949] (b) growing the non-human organism or a part thereof under conditions which permit the production of glucose-1-phosphate or a composition comprising glucose-1-phosphate in said non-human organism or in the culture medium surrounding said non-human organism.

[85950] Accordingly, the present invention relates to a process for the production of myo-inositol, which comprises
[85951] (a) increasing or generating the activity of a At2g45420-protein in the cytosol of a cell of a non-human organism or a part thereof, preferably a microorganism, a plant cell, a plant or a part thereof, as compared to a corresponding non-transformed wild type non-human organism or a part thereof; and
[85952] (b) growing the non-human organism or a part thereof under conditions which permit the production of myo-inositol or a composition comprising myo-inositol in said non-human organism or in the culture medium surrounding said non-human organism.

[85953] Accordingly, the present invention relates to a process for the production of glucose-1-phosphate, which comprises
[85954] (a) increasing or generating the activity of a phosphatidylinositol 3- and 4-kinase family protein in the cytosol of a cell of a non-human organism or a part thereof, preferably a microorganism, a plant cell, a plant or a part thereof, as compared to a corresponding non-transformed wild type non-human organism or a part thereof; and
[85955] (b) growing the non-human organism or a part thereof under conditions which permit the production of glucose-1-phosphate or a composition comprising glucose-1-phosphate in said non-human organism or in the culture medium surrounding said non-human organism.

[85956] Accordingly, the present invention relates to a process for the production of raffinose, which comprises
[85957] (a) increasing or generating the activity of a galactinol synthase in the cytosol of a cell of a non-human organism or a part thereof, preferably a microorganism, a plant cell, a plant or a part thereof, as compared to a corresponding non-transformed wild type non-human organism or a part thereof; and
[85958] (b) growing the non-human organism or a part thereof under conditions which permit the production of raffinose or a composition comprising raffinose in said non-human organism or in the culture medium surrounding said non-human organism.

[85959] Accordingly, the present invention relates to a process for the production of raffinose, which comprises
[85960] (a) increasing or generating the activity of a galactinol synthase in the cytosol of a cell of a non-human organism or a part thereof, preferably a microorganism, a plant cell, a plant or a part thereof, as compared to a corresponding non-transformed wild type non-human organism or a part thereof; and
[85961] (b) growing the non-human organism or a part thereof under conditions which permit the production of raffinose or a composition comprising raffinose in said non-human organism or in the culture medium surrounding said non-human organism.

[85962] Accordingly, the present invention relates to a process for the production of fructose, which comprises
[85963] (a) increasing or generating the activity of a heat shock transcription factor in the cytosol of a cell of a non-human organism or a part thereof, preferably a microorganism, a plant cell, a plant or a part thereof, as compared to a corresponding non-transformed wild type non-human organism or a part thereof; and
[85964] (b) growing the non-human organism or a part thereof under conditions which permit the production of fructose or a composition comprising fructose in said non-human organism or in the culture medium surrounding said non-human organism.

[85965] Accordingly, the present invention relates to a process for the production of glucose, which comprises
[85966] (a) increasing or generating the activity of a heat shock transcription factor in the cytosol of a cell of a non-human organism or a part thereof, preferably a microorganism, a plant cell, a plant or a part thereof, as compared to a corresponding non-transformed wild type non-human organism or a part thereof; and
[85967] (b) growing the non-human organism or a part thereof under conditions which permit the production of glucose or a composition comprising glucose in said non-human organism or in the culture medium surrounding said non-human organism.

[85968] Accordingly, the present invention relates to a process for the production of myo-inositol, which comprises
[85969] (a) increasing or generating the activity of a heat shock transcription factor in the cytosol of a cell of a non-human organism or a part thereof, preferably a microorganism, a plant cell, a plant or a part thereof, as compared to a corresponding non-transformed wild type non-human organism or a part thereof; and
[85970] (b) growing the non-human organism or a part thereof under conditions which permit the production of myo-inositol or a composition comprising myo-inositol in said non-human organism or in the culture medium surrounding said non-human organism.

[85971] Accordingly, the present invention relates to a process for the production of raffinose, which comprises
[85972] (a) increasing or generating the activity of a heat shock transcription factor in the cytosol of a cell of a non-human organism or a part thereof, preferably a microorganism, a plant cell, a plant or a part thereof, as compared to a corresponding non-transformed wild type non-human organism or a part thereof; and
[85973] (b) growing the non-human organism or a part thereof under conditions which permit the production of raffinose or a composition comprising raffinose in said non-human organism or in the culture medium surrounding said non-human organism.

[85974] Accordingly, the present invention relates to a process for the production of fructose, which comprises
[85975] (a) increasing or generating the activity of a pyruvate kinase in the cytosol of a cell of a non-human organism or a part thereof, preferably a microorganism, a plant cell, a plant or a part thereof, as compared to a corresponding non-transformed wild type non-human organism or a part thereof; and
[85976] (b) growing the non-human organism or a part thereof under conditions which permit the production of fructose or a composition comprising fructose in said non-human organism or in the culture medium surrounding said non-human organism.

[85977] Accordingly, the present invention relates to a process for the production of glucose, which comprises
[85978] (a) increasing or generating the activity of a protein phosphatase in the cytosol of a cell of a non-human organism or a part thereof, preferably a microorganism, a plant cell, a plant or a part thereof, as compared to a corresponding non-transformed wild type non-human organism or a part thereof; and
[85979] (b) growing the non-human organism or a part thereof under conditions which permit the production of glucose or a composition comprising glucose in said non-human organism or in the culture medium surrounding said non-human organism.

[85980] Accordingly, the present invention relates to a process for the production of myo-inositol, which comprises
[85981] (a) increasing or generating the activity of a protein phosphatase in the cytosol of a cell of a non-human organism or a part thereof, preferably a microorganism, a plant cell, a plant or a part thereof, as compared to a corresponding non-transformed wild type non-human organism or a part thereof; and
[85982] (b) growing the non-human organism or a part thereof under conditions which permit the production of myo-inositol or a composition comprising myo-inositol in said non-human organism or in the culture medium surrounding said non-human organism.

[85983] Accordingly, the present invention relates to a process for the production of fructose, which comprises
[85984] (a) increasing or generating the activity of a thioredoxin family protein in the cytosol of a cell of a non-human organism or a part thereof, preferably a microorganism, a plant cell, a plant or a part thereof, as compared to a corresponding non-transformed wild type non-human organism or a part thereof; and
[85985] (b) growing the non-human organism or a part thereof under conditions which permit the production of fructose or a composition comprising fructose in said non-human organism or in the culture medium surrounding said non-human organism.

[85986] Accordingly, the present invention relates to a process for the production of glucose, which comprises
[85987] (a) increasing or generating the activity of a thioredoxin family protein in the cytosol of a cell of a non-human organism or a part thereof, preferably a microorganism, a plant cell, a plant or a part thereof, as compared to a corresponding non-transformed wild type non-human organism or a part thereof; and
[85988] (b) growing the non-human organism or a part thereof under conditions which permit the production of glucose or a composition comprising glucose in said non-human organism or in the culture medium surrounding said non-human organism.

[85989] Accordingly, the present invention relates to a process for the production of myo-inositol, which comprises
[85990] (a) increasing or generating the activity of a thioredoxin family protein in the cytosol of a cell of a non-human organism or a part thereof, preferably a microorganism, a plant cell, a plant or a part thereof, as compared to a corresponding non-transformed wild type non-human organism or a part thereof; and
[85991] (b) growing the non-human organism or a part thereof under conditions which permit the production of myo-inositol or a composition comprising myo-inositol in said non-human organism or in the culture medium surrounding said non-human organism.

[85992] Accordingly, the present invention relates to a process for the production of saccharic acid, which comprises
[85993] (a) increasing or generating the activity of a DNA binding protein in the cytosol of a cell of a non-human organism or a part thereof, preferably a microorganism, a plant cell, a plant or a part thereof, as compared to a corresponding non-transformed wild type non-human organism or a part thereof; and
[85994] (b) growing the non-human organism or a part thereof under conditions which permit the production of saccharic acid or a composition comprising saccharic acid in said non-human organism or in the culture medium surrounding said non-human organism.

[85995] Accordingly, the present invention relates to a process for the production of glucose-1-phosphate, which comprises
[85996] (a) increasing or generating the activity of a CCAAT-binding transcription factor in the cytosol of a cell of a non-human organism or a part thereof, preferably a microorganism, a plant cell, a plant or a part thereof, as compared to a corresponding non-transformed wild type non-human organism or a part thereof; and
[85997] (b) growing the non-human organism or a part thereof under conditions which permit the production of glucose-1-phosphate or a composition comprising glucose-1-phosphate in said non-human organism or in the culture medium surrounding said non-human organism.

[85998] Accordingly, the present invention relates to a process for the production of raffinose, which comprises
[85999] (a) increasing or generating the activity of a CCAAT-binding transcription factor in the cytosol of a cell of a non-human organism or a part thereof, preferably a microorganism, a plant cell, a plant or a part thereof, as compared to a corresponding non-transformed wild type non-human organism or a part thereof; and
[86000] (b) growing the non-human organism or a part thereof under conditions which permit the production of raffinose or a composition comprising raffinose in said non-human organism or in the culture medium surrounding said non-human organism.

[86001] Accordingly, the present invention relates to a process for the production of fructose, which comprises
[86002] (a) increasing or generating the activity of a protein kinase in the cytosol of a cell of a non-human organism or a part thereof, preferably a microorganism, a plant cell, a plant or a part thereof, as compared to a corresponding non-transformed wild type non-human organism or a part thereof; and
[86003] (b) growing the non-human organism or a part thereof under conditions which permit the production of fructose or a composition comprising fructose in said non-human organism or in the culture medium surrounding said non-human organism.

[86004] Accordingly, the present invention relates to a process for the production of glucose, which comprises
[86005] (a) increasing or generating the activity of a protein kinase in the cytosol of a cell of a non-human organism or a part thereof, preferably a microorganism, a plant cell, a plant or a part thereof, as compared to a corresponding non-transformed wild type non-human organism or a part thereof; and
[86006] (b) growing the non-human organism or a part thereof under conditions which permit the production of glucose or a composition comprising glucose in said non-human organism or in the culture medium surrounding said non-human organism.

[86007] Accordingly, the present invention relates to a process for the production of sedoheptulose-7-phosphate, which comprises
[86008] (a) increasing or generating the activity of a protein kinase in the cytosol of a cell of a non-human organism or a part thereof, preferably a microorganism, a plant cell, a plant or a part thereof, as compared to a corresponding non-transformed wild type non-human organism or a part thereof; and
[86009] (b) growing the non-human organism or a part thereof under conditions which permit the production of sedoheptulose-7-phosphate or a composition comprising sedoheptulose-7-phosphate in said non-human organism or in the culture medium surrounding said non-human organism.

[86010] Accordingly, the present invention relates to a process for the production of fructose, which comprises
[86011] (a) increasing or generating the activity of a eukaryotic translation initiation factor in the cytosol of a cell of a non-human organism or a part thereof, preferably a microorganism, a plant cell, a plant or a part thereof, as compared to a corresponding non-transformed wild type non-human organism or a part thereof; and
[86012] (b) growing the non-human organism or a part thereof under conditions which permit the production of fructose or a composition comprising fructose in said non-human organism or in the culture medium surrounding said non-human organism.

[86013] Accordingly, the present invention relates to a process for the production of glucose, which comprises
[86014] (a) increasing or generating the activity of a eukaryotic translation initiation factor in the cytosol of a cell of a non-human organism or a part thereof, preferably a microorganism, a plant cell, a plant or a part thereof, as compared to a corresponding non-transformed wild type non-human organism or a part thereof; and
[86015] (b) growing the non-human organism or a part thereof under conditions which permit the production of glucose or a composition comprising glucose in said non-human organism or in the culture medium surrounding said non-human organism.

[86016] Accordingly, the present invention relates to a process for the production of raffinose, which comprises
[86017] (a) increasing or generating the activity of a eukaryotic translation initiation factor in the cytosol of a cell of a non-human organism or a part thereof, preferably a microorganism, a plant cell, a plant or a part thereof, as compared to a corresponding non-transformed wild type non-human organism or a part thereof; and
[86018] (b) growing the non-human organism or a part thereof under conditions which permit the production of raffinose or a composition comprising raffinose in said non-human organism or in the culture medium surrounding said non-human organism.

[86019] Accordingly, the present invention relates to a process for the production of myo-inositol, which comprises
[86020] (a) increasing or generating the activity of a mitogen-activated protein kinase in the cytosol of a cell of a non-human organism or a part thereof, preferably a microorganism, a plant cell, a plant or a part thereof, as compared to a corresponding non-transformed wild type non-human organism or a part thereof; and
[86021] (b) growing the non-human organism or a part thereof under conditions which permit the production of myo-inositol or a composition comprising myo-inositol in said non-human organism or in the culture medium surrounding said non-human organism.

[86022] Accordingly, the present invention relates to a process for the production of sedoheptulose-7-phosphate, which comprises
[86023] (a) increasing or generating the activity of a auxin response factor in the cytosol of a cell of a non-human organism or a part thereof, preferably a microorganism, a plant cell, a plant or a part thereof, as compared to a corresponding non-transformed wild type non-human organism or a part thereof; and
[86024] (b) growing the non-human organism or a part thereof under conditions which permit the production of sedoheptulose-7-phosphate or a composition comprising sedoheptulose-7-phosphate in said non-human organism or in the culture medium surrounding said non-human organism.

[86025] Accordingly, the present invention relates to a process for the production of fructose, which comprises
[86026] (a) increasing or generating the activity of a monthiol glutaredoxin in the cytosol of a cell of a non-human organism or a part thereof, preferably a microorganism, a plant cell, a plant or a part thereof, as compared to a corresponding non-transformed wild type non-human organism or a part thereof; and
[86027] (b) growing the non-human organism or a part thereof under conditions which permit the production of fructose or a composition comprising fructose in said non-human organism or in the culture medium surrounding said non-human organism.

[86028] Accordingly, the present invention relates to a process for the production of glucose, which comprises
[86029] (a) increasing or generating the activity of a monthiol glutaredoxin in the cytosol of a cell of a non-human organism or a part thereof, preferably a microorganism, a plant cell, a plant or a part thereof, as compared to a corresponding non-transformed wild type non-human organism or a part thereof; and
[86030] (b) growing the non-human organism or a part thereof under conditions which permit the production of glucose or a composition comprising glucose in said non-human organism or in the culture medium surrounding said non-human organism.

[86031] Accordingly, the present invention relates to a process for the production of glucose-1-phosphate, which comprises
[86032] (a) increasing or generating the activity of a monthiol glutaredoxin in the cytosol of a cell of a non-human organism or a part thereof, preferably a microorganism, a plant cell, a plant or a part thereof, as compared to a corresponding non-transformed wild type non-human organism or a part thereof; and
[86033] (b) growing the non-human organism or a part thereof under conditions which permit the production of glucose-1-phosphate or a composition comprising glucose-1-phosphate in said non-human organism or in the culture medium surrounding said non-human organism.

[86034] Accordingly, the present invention relates to a process for the production of myo-inositol, which comprises
[86035] (a) increasing or generating the activity of a monthiol glutaredoxin in the cytosol of a cell of a non-human organism or a part thereof, preferably a microorganism, a plant cell, a plant or a part thereof, as compared to a corresponding non-transformed wild type non-human organism or a part thereof; and
[86036] (b) growing the non-human organism or a part thereof under conditions which permit the production of myo-inositol or a composition comprising myo-inositol in said non-human organism or in the culture medium surrounding said non-human organism.

[86037] Accordingly, the present invention relates to a process for the production of sedoheptulose-7-phosphate, which comprises
[86038] (a) increasing or generating the activity of a monthiol glutaredoxin in the cytosol of a cell of a non-human organism or a part thereof, preferably a microorganism, a plant cell, a plant or a part thereof, as compared to a corresponding non-transformed wild type non-human organism or a part thereof; and
[86039] (b) growing the non-human organism or a part thereof under conditions which permit the production of sedoheptulose-7-phosphate or a composition comprising sedoheptulose-7-phosphate in said non-human organism or in the culture medium surrounding said non-human organism.

[86040] Accordingly, the present invention relates to a process for the production of sucrose, which comprises
[86041] (a) increasing or generating the activity of a monthiol glutaredoxin in the cytosol of a cell of a non-human organism or a part thereof, preferably a microorganism, a plant cell, a plant or a part thereof, as compared to a corresponding non-transformed wild type non-human organism or a part thereof; and
[86042] (b) growing the non-human organism or a part thereof under conditions which permit the production of sucrose or a composition comprising sucrose in said non-human organism or in the culture medium surrounding said non-human organism.

[86043] Accordingly, the present invention relates to a process for the production of fructose, which comprises
[86044] (a) increasing or generating the activity of a glutaredoxin in the cytosol of a cell of a non-human organism or a part thereof, preferably a microorganism, a plant cell, a plant or a part thereof, as compared to a corresponding non-transformed wild type non-human organism or a part thereof; and
[86045] (b) growing the non-human organism or a part thereof under conditions which permit the production of fructose or a composition comprising fructose in said non-human organism or in the culture medium surrounding said non-human organism.

[86046] Accordingly, the present invention relates to a process for the production of glucose, which comprises
[86047] (a) increasing or generating the activity of a glutaredoxin in the cytosol of a cell of a non-human organism or a part thereof, preferably a microorganism, a plant cell, a plant or a part thereof, as compared to a corresponding non-transformed wild type non-human organism or a part thereof; and
[86048] (b) growing the non-human organism or a part thereof under conditions which permit the production of glucose or a composition comprising glucose in said non-human organism or in the culture medium surrounding said non-human organism.

[86049] Accordingly, the present invention relates to a process for the production of glucose-1-phosphate, which comprises
[86050] (a) increasing or generating the activity of a glutaredoxin in the cytosol of a cell of a non-human organism or a part thereof, preferably a microorganism, a plant cell, a plant or a part thereof, as compared to a corresponding non-transformed wild type non-human organism or a part thereof; and
[86051] (b) growing the non-human organism or a part thereof under conditions which permit the production of glucose-1-phosphate or a composition comprising glucose-1-phosphate in said non-human organism or in the culture medium surrounding said non-human organism.

[86052] Accordingly, the present invention relates to a process for the production of myo-inositol, which comprises
[86053] (a) increasing or generating the activity of a glutaredoxin in the cytosol of a cell of a non-human organism or a part thereof, preferably a microorganism, a plant cell, a plant or a part thereof, as compared to a corresponding non-transformed wild type non-human organism or a part thereof; and
[86054] (b) growing the non-human organism or a part thereof under conditions which permit the production of myo-inositol or a composition comprising myo-inositol in said non-human organism or in the culture medium surrounding said non-human organism.

[86055] Accordingly, the present invention relates to a process for the production of sedoheptulose-7-phosphate, which comprises
[86056] (a) increasing or generating the activity of a glutaredoxin in the cytosol of a cell of a non-human organism or a part thereof, preferably a microorganism, a plant cell, a plant or a part thereof, as compared to a corresponding non-transformed wild type non-human organism or a part thereof; and
[86057] (b) growing the non-human organism or a part thereof under conditions which permit the production of sedoheptulose-7-phosphate or a composition comprising sedoheptulose-7-phosphate in said non-human organism or in the culture medium surrounding said non-human organism.

[86058] Accordingly, the present invention relates to a process for the production of sucrose, which comprises
[86059] (a) increasing or generating the activity of a glutaredoxin in the cytosol of a cell of a non-human organism or a part thereof, preferably a microorganism, a plant cell, a plant or a part thereof, as compared to a corresponding non-transformed wild type non-human organism or a part thereof; and
[86060] (b) growing the non-human organism or a part thereof under conditions which permit the production of sucrose or a composition comprising sucrose in said non-human organism or in the culture medium surrounding said non-human organism.

[86061] Accordingly, the present invention relates to a process for the production of glucose-1-phosphate, which comprises
[86062] (a) increasing or generating the activity of a transcription factor in the cytosol of a cell of a non-human organism or a part thereof, preferably a microorganism, a plant cell, a plant or a part thereof, as compared to a corresponding non-transformed wild type non-human organism or a part thereof; and
[86063] (b) growing the non-human organism or a part thereof under conditions which permit the production of glucose-1-phosphate or a composition comprising glucose-1-phosphate in said non-human organism or in the culture medium surrounding said non-human organism.

[86064] Accordingly, the present invention relates to a process for the production of fructose, which comprises
[86065] (a) increasing or generating the activity of a monothiol glutaredoxin in the cytosol of a cell of a non-human organism or a part thereof, preferably a microorganism, a plant cell, a plant or a part thereof, as compared to a corresponding non-transformed wild type non-human organism or a part thereof; and
[86066] (b) growing the non-human organism or a part thereof under conditions which permit the production of fructose or a composition comprising fructose in said non-human organism or in the culture medium surrounding said non-human organism.

[86067] Accordingly, the present invention relates to a process for the production of glucose, which comprises
[86068] (a) increasing or generating the activity of a monothiol glutaredoxin in the cytosol of a cell of a non-human organism or a part thereof, preferably a microorganism, a plant cell, a plant or a part thereof, as compared to a corresponding non-transformed wild type non-human organism or a part thereof; and
[86069] (b) growing the non-human organism or a part thereof under conditions which permit the production of glucose or a composition comprising glucose in said non-human organism or in the culture medium surrounding said non-human organism.

[86070] Accordingly, the present invention relates to a process for the production of glucose-1-phosphate, which comprises
[86071] (a) increasing or generating the activity of a monothiol glutaredoxin in the cytosol of a cell of a non-human organism or a part thereof, preferably a microorganism, a plant cell, a plant or a part thereof, as compared to a corresponding non-transformed wild type non-human organism or a part thereof; and
[86072] (b) growing the non-human organism or a part thereof under conditions which permit the production of glucose-1-phosphate or a composition comprising glucose-1-phosphate in said non-human organism or in the culture medium surrounding said non-human organism.

[86073] Accordingly, the present invention relates to a process for the production of myo-inositol, which comprises
[86074] (a) increasing or generating the activity of a monothiol glutaredoxin in the cytosol of a cell of a non-human organism or a part thereof, preferably a microorganism, a plant cell, a plant or a part thereof, as compared to a corresponding non-transformed wild type non-human organism or a part thereof; and
[86075] (b) growing the non-human organism or a part thereof under conditions which permit the production of myo-inositol or a composition comprising myo-inositol in said non-human organism or in the culture medium surrounding said non-human organism.

[86076] Accordingly, the present invention relates to a process for the production of sedoheptulose-7-phosphate, which comprises
[86077] (a) increasing or generating the activity of a monothiol glutaredoxin in the cytosol of a cell of a non-human organism or a part thereof, preferably a microorganism, a plant cell, a plant or a part thereof, as compared to a corresponding non-transformed wild type non-human organism or a part thereof; and
[86078] (b) growing the non-human organism or a part thereof under conditions which permit the production of sedoheptulose-7-phosphate or a composition comprising sedoheptulose-7-phosphate in said non-human organism or in the culture medium surrounding said non-human organism.

[86079] Accordingly, the present invention relates to a process for the production of sucrose, which comprises
[86080] (a) increasing or generating the activity of a monothiol glutaredoxin in the cytosol of a cell of a non-human organism or a part thereof, preferably a microorganism, a plant cell, a plant or a part thereof, as compared to a corresponding non-transformed wild type non-human organism or a part thereof; and
[86081] (b) growing the non-human organism or a part thereof under conditions which permit the production of sucrose or a composition comprising sucrose in said non-human organism or in the culture medium surrounding said non-human organism.

[86082] Accordingly, the present invention relates to a process for the production of fructose, which comprises
[86083] (a) increasing or generating the activity of a monothiol glutaredoxin in the cytosol of a cell of a non-human organism or a part thereof, preferably a microorganism, a plant cell, a plant or a part thereof, as compared to a corresponding non-transformed wild type non-human organism or a part thereof; and
[86084] (b) growing the non-human organism or a part thereof under conditions which permit the production of fructose or a composition comprising fructose in said non-human organism or in the culture medium surrounding said non-human organism.

[86085] Accordingly, the present invention relates to a process for the production of glucose, which comprises
[86086] (a) increasing or generating the activity of a monothiol glutaredoxin in the cytosol of a cell of a non-human organism or a part thereof, preferably a microorganism, a plant cell, a plant or a part thereof, as compared to a corresponding non-transformed wild type non-human organism or a part thereof; and
[86087] (b) growing the non-human organism or a part thereof under conditions which permit the production of glucose or a composition comprising glucose in said non-human organism or in the culture medium surrounding said non-human organism.

[86088] Accordingly, the present invention relates to a process for the production of glucose-1-phosphate, which comprises
[86089] (a) increasing or generating the activity of a monothiol glutaredoxin in the cytosol of a cell of a non-human organism or a part thereof, preferably a microorganism, a plant cell, a plant or a part thereof, as compared to a corresponding non-transformed wild type non-human organism or a part thereof; and
[86090] (b) growing the non-human organism or a part thereof under conditions which permit the production of glucose-1-phosphate or a composition comprising glucose-1-phosphate in said non-human organism or in the culture medium surrounding said non-human organism.

[86091] Accordingly, the present invention relates to a process for the production of myo-inositol, which comprises
[86092] (a) increasing or generating the activity of a monothiol glutaredoxin in the cytosol of a cell of a non-human organism or a part thereof, preferably a microorganism, a plant cell, a plant or a part thereof, as compared to a corresponding non-transformed wild type non-human organism or a part thereof; and
[86093] (b) growing the non-human organism or a part thereof under conditions which permit the production of myo-inositol or a composition comprising myo-inositol in said non-human organism or in the culture medium surrounding said non-human organism.

[86094] Accordingly, the present invention relates to a process for the production of sedoheptulose-7-phosphate, which comprises
[86095] (a) increasing or generating the activity of a monothiol glutaredoxin in the cytosol of a cell of a non-human organism or a part thereof, preferably a microorganism, a plant cell, a plant or a part thereof, as compared to a corresponding non-transformed wild type non-human organism or a part thereof; and
[86096] (b) growing the non-human organism or a part thereof under conditions which permit the production of sedoheptulose-7-phosphate or a composition comprising sedoheptulose-7-phosphate in said non-human organism or in the culture medium surrounding said non-human organism.

[86097] Accordingly, the present invention relates to a process for the production of sucrose, which comprises
[86098] (a) increasing or generating the activity of a monothiol glutaredoxin in the cytosol of a cell of a non-human organism or a part thereof, preferably a microorganism, a plant cell, a plant or a part thereof, as compared to a corresponding non-transformed wild type non-human organism or a part thereof; and
[86099] (b) growing the non-human organism or a part thereof under conditions which permit the production of sucrose or a composition comprising sucrose in said non-human organism or in the culture medium surrounding said non-human organism.

[86100] Accordingly, the present invention relates to a process for the production of fructose, which comprises
[86101] (a) increasing or generating the activity of a monothiol glutaredoxin in the cytosol of a cell of a non-human organism or a part thereof, preferably a microorganism, a plant cell, a plant or a part thereof, as compared to a corresponding non-transformed wild type non-human organism or a part thereof; and
[86102] (b) growing the non-human organism or a part thereof under conditions which permit the production of fructose or a composition comprising fructose in said non-human organism or in the culture medium surrounding said non-human organism.

[86103] Accordingly, the present invention relates to a process for the production of glucose, which comprises
[86104] (a) increasing or generating the activity of a monothiol glutaredoxin in the cytosol of a cell of a non-human organism or a part thereof, preferably a microorganism, a plant cell, a plant or a part thereof, as compared to a corresponding non-transformed wild type non-human organism or a part thereof; and
[86105] (b) growing the non-human organism or a part thereof under conditions which permit the production of glucose or a composition comprising glucose in said non-human organism or in the culture medium surrounding said non-human organism.

[86106] Accordingly, the present invention relates to a process for the production of glucose-1-phosphate, which comprises
[86107] (a) increasing or generating the activity of a monothiol glutaredoxin in the cytosol of a cell of a non-human organism or a part thereof, preferably a microorganism, a plant cell, a plant or a part thereof, as compared to a corresponding non-transformed wild type non-human organism or a part thereof; and
[86108] (b) growing the non-human organism or a part thereof under conditions which permit the production of glucose-1-phosphate or a composition comprising glucose-1-phosphate in said non-human organism or in the culture medium surrounding said non-human organism.

[86109] Accordingly, the present invention relates to a process for the production of myo-inositol, which comprises
[86110] (a) increasing or generating the activity of a monothiol glutaredoxin in the cytosol of a cell of a non-human organism or a part thereof, preferably a microorganism, a plant cell, a plant or a part thereof, as compared to a corresponding non-transformed wild type non-human organism or a part thereof; and
[86111] (b) growing the non-human organism or a part thereof under conditions which permit the production of myo-inositol or a composition comprising myo-inositol in said non-human organism or in the culture medium surrounding said non-human organism.

[86112] Accordingly, the present invention relates to a process for the production of sucrose, which comprises
[86113] (a) increasing or generating the activity of a monothiol glutaredoxin in the cytosol of a cell of a non-human organism or a part thereof, preferably a microorganism, a plant cell, a plant or a part thereof, as compared to a corresponding non-transformed wild type non-human organism or a part thereof; and
[86114] (b) growing the non-human organism or a part thereof under conditions which permit the production of sucrose or a composition comprising sucrose in said non-human organism or in the culture medium surrounding said non-human organism.

[86115] Accordingly, the present invention relates to a process for the production of fructose, which comprises
[86116] (a) increasing or generating the activity of a monothiol glutaredoxin in the cytosol of a cell of a non-human organism or a part thereof, preferably a microorganism, a plant cell, a plant or a part thereof, as compared to a corresponding non-transformed wild type non-human organism or a part thereof; and
[86117] (b) growing the non-human organism or a part thereof under conditions which permit the production of fructose or a composition comprising fructose in said non-human organism or in the culture medium surrounding said non-human organism.

[86118] Accordingly, the present invention relates to a process for the production of glucose, which comprises
[86119] (a) increasing or generating the activity of a monothiol glutaredoxin in the cytosol of a cell of a non-human organism or a part thereof, preferably a microorganism, a plant cell, a plant or a part thereof, as compared to a corresponding non-transformed wild type non-human organism or a part thereof; and
[86120] (b) growing the non-human organism or a part thereof under conditions which permit the production of glucose or a composition comprising glucose in said non-human organism or in the culture medium surrounding said non-human organism.

[86121] Accordingly, the present invention relates to a process for the production of sedoheptulose-7-phosphate, which comprises
[86122] (a) increasing or generating the activity of a monothiol glutaredoxin in the cytosol of a cell of a non-human organism or a part thereof, preferably a microorganism, a plant cell, a plant or a part thereof, as compared to a corresponding non-transformed wild type non-human organism or a part thereof; and
[86123] (b) growing the non-human organism or a part thereof under conditions which permit the production of sedoheptulose-7-phosphate or a composition comprising sedoheptulose-7-phosphate in said non-human organism or in the culture medium surrounding said non-human organism.

[86124] Accordingly, the present invention relates to a process for the production of sucrose, which comprises
[86125] (a) increasing or generating the activity of a monothiol glutaredoxin in the cytosol of a cell of a non-human organism or a part thereof, preferably a microorganism, a plant cell, a plant or a part thereof, as compared to a corresponding non-transformed wild type non-human organism or a part thereof; and
[86126] (b) growing the non-human organism or a part thereof under conditions which permit the production of sucrose or a composition comprising sucrose in said non-human organism or in the culture medium surrounding said non-human organism.

[86127] Accordingly, the present invention relates to a process for the production of myo-inositol, which comprises
[86128] (a) increasing or generating the activity of a protein phosphatase in the cytosol of a cell of a non-human organism or a part thereof, preferably a microorganism, a plant cell, a plant or a part thereof, as compared to a corresponding non-transformed wild type non-human organism or a part thereof; and
[86129] (b) growing the non-human organism or a part thereof under conditions which permit the production of myo-inositol or a composition comprising myo-inositol in said non-human organism or in the culture medium surrounding said non-human organism.

[86130] Accordingly, the present invention relates to a process for the production of fructose, which comprises
[86131] (a) increasing or generating the activity of a glutaredoxin in the cytosol of a cell of a non-human organism or a part thereof, preferably a microorganism, a plant cell, a plant or a part thereof, as compared to a corresponding non-transformed wild type non-human organism or a part thereof; and
[86132] (b) growing the non-human organism or a part thereof under conditions which permit the production of fructose or a composition comprising fructose in said non-human organism or in the culture medium surrounding said non-human organism.

[86133] Accordingly, the present invention relates to a process for the production of glucose, which comprises
[86134] (a) increasing or generating the activity of a glutaredoxin in the cytosol of a cell of a non-human organism or a part thereof, preferably a microorganism, a plant cell, a plant or a part thereof, as compared to a corresponding non-transformed wild type non-human organism or a part thereof; and
[86135] (b) growing the non-human organism or a part thereof under conditions which permit the production of glucose or a composition comprising glucose in said non-human organism or in the culture medium surrounding said non-human organism.

[86136] Accordingly, the present invention relates to a process for the production of glucose-1-phosphate, which comprises
[86137] (a) increasing or generating the activity of a glutaredoxin in the cytosol of a cell of a non-human organism or a part thereof, preferably a microorganism, a plant cell, a plant or a part thereof, as compared to a corresponding non-transformed wild type non-human organism or a part thereof; and
[86138] (b) growing the non-human organism or a part thereof under conditions which permit the production of glucose-1-phosphate or a composition comprising glucose-1-phosphate in said non-human organism or in the culture medium surrounding said non-human organism.

[86139] Accordingly, the present invention relates to a process for the production of myo-inositol, which comprises
[86140] (a) increasing or generating the activity of a glutaredoxin in the cytosol of a cell of a non-human organism or a part thereof, preferably a microorganism, a plant cell, a plant or a part thereof, as compared to a corresponding non-transformed wild type non-human organism or a part thereof; and
[86141] (b) growing the non-human organism or a part thereof under conditions which permit the production of myo-inositol or a composition comprising myo-inositol in said non-human organism or in the culture medium surrounding said non-human organism.

[86142] Accordingly, the present invention relates to a process for the production of sedoheptulose-7-phosphate, which comprises
[86143] (a) increasing or generating the activity of a glutaredoxin in the cytosol of a cell of a non-human organism or a part thereof, preferably a microorganism, a plant cell, a plant or a part thereof, as compared to a corresponding non-transformed wild type non-human organism or a part thereof; and
[86144] (b) growing the non-human organism or a part thereof under conditions which permit the production of sedoheptulose-7-phosphate or a composition comprising sedoheptulose-7-phosphate in said non-human organism or in the culture medium surrounding said non-human organism.

[86145] Accordingly, the present invention relates to a process for the production of sucrose, which comprises
[86146] (a) increasing or generating the activity of a glutaredoxin in the cytosol of a cell of a non-human organism or a part thereof, preferably a microorganism, a plant cell, a plant or a part thereof, as compared to a corresponding non-transformed wild type non-human organism or a part thereof; and
[86147] (b) growing the non-human organism or a part thereof under conditions which permit the production of sucrose or a composition comprising sucrose in said non-human organism or in the culture medium surrounding said non-human organism.

[86148] Accordingly, the present invention relates to a process for the production of glucose-1-phosphate, which comprises
[86149] (a) increasing or generating the activity of a cyclin D in the cytosol of a cell of a non-human organism or a part thereof, preferably a microorganism, a plant cell, a plant or a part thereof, as compared to a corresponding non-transformed wild type non-human organism or a part thereof; and
[86150] (b) growing the non-human organism or a part thereof under conditions which permit the production of glucose-1-phosphate or a composition comprising glucose-1-phosphate in said non-human organism or in the culture medium surrounding said non-human organism.

[86151] Accordingly, the present invention relates to a process for the production of raffinose, which comprises
[86152] (a) increasing or generating the activity of a cyclin D in the cytosol of a cell of a non-human organism or a part thereof, preferably a microorganism, a plant cell, a plant or a part thereof, as compared to a corresponding non-transformed wild type non-human organism or a part thereof; and
[86153] (b) growing the non-human organism or a part thereof under conditions which permit the production of raffinose or a composition comprising raffinose in said non-human organism or in the culture medium surrounding said non-human organism.

[86154] Accordingly, the present invention relates to a process for the production of sucrose, which comprises
[86155] (a) increasing or generating the activity of a cyclin D in the cytosol of a cell of a non-human organism or a part thereof, preferably a microorganism, a plant cell, a plant or a part thereof, as compared to a corresponding non-transformed wild type non-human organism or a part thereof; and
[86156] (b) growing the non-human organism or a part thereof under conditions which permit the production of sucrose or a composition comprising sucrose in said non-human organism or in the culture medium surrounding said non-human organism.

[86157] Accordingly, the present invention relates to a process for the production of fructose, which comprises
[86158] (a) increasing or generating the activity of a calcium-dependent protein kinase in the cytosol of a cell of a non-human organism or a part thereof, preferably a microorganism, a plant cell, a plant or a part thereof, as compared to a corresponding non-transformed wild type non-human organism or a part thereof; and
[86159] (b) growing the non-human organism or a part thereof under conditions which permit the production of fructose or a composition comprising fructose in said non-human organism or in the culture medium surrounding said non-human organism.

[86160] Accordingly, the present invention relates to a process for the production of glucose-1-phosphate, which comprises
[86161] (a) increasing or generating the activity of a calcium-dependent protein kinase in the cytosol of a cell of a non-human organism or a part thereof, preferably a microorganism, a plant cell, a plant or a part thereof, as compared to a corresponding non-transformed wild type non-human organism or a part thereof; and
[86162] (b) growing the non-human organism or a part thereof under conditions which permit the production of glucose-1-phosphate or a composition comprising glucose-1-phosphate in said non-human organism or in the culture medium surrounding said non-human organism.

[86163] Accordingly, the present invention relates to a process for the production of raffinose, which comprises
[86164] (a) increasing or generating the activity of a calcium-dependent protein kinase in the cytosol of a cell of a non-human organism or a part thereof, preferably a microorganism, a plant cell, a plant or a part thereof, as compared to a corresponding non-transformed wild type non-human organism or a part thereof; and
[86165] (b) growing the non-human organism or a part thereof under conditions which permit the production of raffinose or a composition comprising raffinose in said non-human organism or in the culture medium surrounding said non-human organism.

[86166] Accordingly, the present invention relates to a process for the production of myo-inositol, which comprises
[86167] (a) increasing or generating the activity of a protein phosphatase in the cytosol of a cell of a non-human organism or a part thereof, preferably a microorganism, a plant cell, a plant or a part thereof, as compared to a corresponding non-transformed wild type non-human organism or a part thereof; and
[86168] (b) growing the non-human organism or a part thereof under conditions which permit the production of myo-inositol or a composition comprising myo-inositol in said non-human organism or in the culture medium surrounding said non-human organism.

[86169] Accordingly, the present invention relates to a process for the production of fructose, which comprises
[86170] (a) increasing or generating the activity of a heat shock transcription factor in the cytosol of a cell of a non-human organism or a part thereof, preferably a microorganism, a plant cell, a plant or a part thereof, as compared to a corresponding non-transformed wild type non-human organism or a part thereof; and
[86171] (b) growing the non-human organism or a part thereof under conditions which permit the production of fructose or a composition comprising fructose in said non-human organism or in the culture medium surrounding said non-human organism.

[86172] Accordingly, the present invention relates to a process for the production of glucose, which comprises
[86173] (a) increasing or generating the activity of a heat shock transcription factor in the cytosol of a cell of a non-human organism or a part thereof, preferably a microorganism, a plant cell, a plant or a part thereof, as compared to a corresponding non-transformed wild type non-human organism or a part thereof; and
[86174] (b) growing the non-human organism or a part thereof under conditions which permit the production of glucose or a composition comprising glucose in said non-human organism or in the culture medium surrounding said non-human organism.

[86175] Accordingly, the present invention relates to a process for the production of glucose-1-phosphate, which comprises
[86176] (a) increasing or generating the activity of a heat shock transcription factor in the cytosol of a cell of a non-human organism or a part thereof, preferably a microorganism, a plant cell, a plant or a part thereof, as compared to a corresponding non-transformed wild type non-human organism or a part thereof; and
[86177] (b) growing the non-human organism or a part thereof under conditions which permit the production of glucose-1-phosphate or a composition comprising glucose-1-phosphate in said non-human organism or in the culture medium surrounding said non-human organism.

[86178] Accordingly, the present invention relates to a process for the production of myo-inositol, which comprises
[86179] (a) increasing or generating the activity of a heat shock transcription factor in the cytosol of a cell of a non-human organism or a part thereof, preferably a microorganism, a plant cell, a plant or a part thereof, as compared to a corresponding non-transformed wild type non-human organism or a part thereof; and
[86180] (b) growing the non-human organism or a part thereof under conditions which permit the production of myo-inositol or a composition comprising myo-inositol in said non-human organism or in the culture medium surrounding said non-human organism.

[86181] Accordingly, the present invention relates to a process for the production of raffinose, which comprises
[86182] (a) increasing or generating the activity of a heat shock transcription factor in the cytosol of a cell of a non-human organism or a part thereof, preferably a microorganism, a plant cell, a plant or a part thereof, as compared to a corresponding non-transformed wild type non-human organism or a part thereof; and
[86183] (b) growing the non-human organism or a part thereof under conditions which permit the production of raffinose or a composition comprising raffinose in said non-human organism or in the culture medium surrounding said non-human organism.

[86184] Accordingly, the present invention relates to a process for the production of sucrose, which comprises
[86185] (a) increasing or generating the activity of a heat shock transcription factor in the cytosol of a cell of a non-human organism or a part thereof, preferably a microorganism, a plant cell, a plant or a part thereof, as compared to a corresponding non-transformed wild type non-human organism or a part thereof; and
[86186] (b) growing the non-human organism or a part thereof under conditions which permit the production of sucrose or a composition comprising sucrose in said non-human organism or in the culture medium surrounding said non-human organism.

[86187] Accordingly, the present invention relates to a process for the production of myo-inositol, which comprises
[86188] (a) increasing or generating the activity of a gibberellin 20-oxidase in the cytosol of a cell of a non-human organism or a part thereof, preferably a microorganism, a plant cell, a plant or a part thereof, as compared to a corresponding non-transformed wild type non-human organism or a part thereof; and
[86189] (b) growing the non-human organism or a part thereof under conditions which permit the production of myo-inositol or a composition comprising myo-inositol in said non-human organism or in the culture medium surrounding said non-human organism.

[86190] Accordingly, the present invention relates to a process for the production of myo-inositol, which comprises
[86191] (a) increasing or generating the activity of a inositol-3-phosphate synthase in the cytosol of a cell of a non-human organism or a part thereof, preferably a microorganism, a plant cell, a plant or a part thereof, as compared to a corresponding non-transformed wild type non-human organism or a part thereof; and
[86192] (b) growing the non-human organism or a part thereof under conditions which permit the production of myo-inositol or a composition comprising myo-inositol in said non-human organism or in the culture medium surrounding said non-human organism.

[86193] Accordingly, the present invention relates to a process for the production of raffinose, which comprises
[86194] (a) increasing or generating the activity of a inositol-3-phosphate synthase in the cytosol of a cell of a non-human organism or a part thereof, preferably a microorganism, a plant cell, a plant or a part thereof, as compared to a corresponding non-transformed wild type non-human organism or a part thereof; and
[86195] (b) growing the non-human organism or a part thereof under conditions which permit the production of raffinose or a composition comprising raffinose in said non-human organism or in the culture medium surrounding said non-human organism.

[86196] Accordingly, the present invention relates to a process for the production of glucose, which comprises
[86197] (a) increasing or generating the activity of a glutaredoxin in the cytosol of a cell of a non-human organism or a part thereof, preferably a microorganism, a plant cell, a plant or a part thereof, as compared to a corresponding non-transformed wild type non-human organism or a part thereof; and
[86198] (b) growing the non-human organism or a part thereof under conditions which permit the production of glucose or a composition comprising glucose in said non-human organism or in the culture medium surrounding said non-human organism.

[86199] Accordingly, the present invention relates to a process for the production of fructose, which comprises
[86200] (a) increasing or generating the activity of a At5g16650-protein in the cytosol of a cell of a non-human organism or a part thereof, preferably a microorganism, a plant cell, a plant or a part thereof, as compared to a corresponding non-transformed wild type non-human organism or a part thereof; and
[86201] (b) growing the non-human organism or a part thereof under conditions which permit the production of fructose or a composition comprising fructose in said non-human organism or in the culture medium surrounding said non-human organism.

[86202] Accordingly, the present invention relates to a process for the production of fructose, which comprises
[86203] (a) increasing or generating the activity of a monothiol glutaredoxin in the cytosol of a cell of a non-human organism or a part thereof, preferably a microorganism, a plant cell, a plant or a part thereof, as compared to a corresponding non-transformed wild type non-human organism or a part thereof; and
[86204] (b) growing the non-human organism or a part thereof under conditions which permit the production of fructose or a composition comprising fructose in said non-human organism or in the culture medium surrounding said non-human organism.

[86205] Accordingly, the present invention relates to a process for the production of glucose, which comprises
[86206] (a) increasing or generating the activity of a monothiol glutaredoxin in the cytosol of a cell of a non-human organism or a part thereof, preferably a microorganism, a plant cell, a plant or a part thereof, as compared to a corresponding non-transformed wild type non-human organism or a part thereof; and
[86207] (b) growing the non-human organism or a part thereof under conditions which permit the production of glucose or a composition comprising glucose in said non-human organism or in the culture medium surrounding said non-human organism.

[86208] Accordingly, the present invention relates to a process for the production of myo-inositol, which comprises
[86209] (a) increasing or generating the activity of a monothiol glutaredoxin in the cytosol of a cell of a non-human organism or a part thereof, preferably a microorganism, a plant cell, a plant or a part thereof, as compared to a corresponding non-transformed wild type non-human organism or a part thereof; and
[86210] (b) growing the non-human organism or a part thereof under conditions which permit the production of myo-inositol or a composition comprising myo-inositol in said non-human organism or in the culture medium surrounding said non-human organism.

[86211] Accordingly, the present invention relates to a process for the production of sedoheptulose-7-phosphate, which comprises
[86212] (a) increasing or generating the activity of a monothiol glutaredoxin in the cytosol of a cell of a non-human organism or a part thereof, preferably a microorganism, a plant cell, a plant or a part thereof, as compared to a corresponding non-transformed wild type non-human organism or a part thereof; and
[86213] (b) growing the non-human organism or a part thereof under conditions which permit the production of sedoheptulose-7-phosphate or a composition comprising sedoheptulose-7-phosphate in said non-human organism or in the culture medium surrounding said non-human organism.

[86214] Accordingly, the present invention relates to a process for the production of sucrose, which comprises
[86215] (a) increasing or generating the activity of a monothiol glutaredoxin in the cytosol of a cell of a non-human organism or a part thereof, preferably a microorganism, a plant cell, a plant or a part thereof, as compared to a corresponding non-transformed wild type non-human organism or a part thereof; and
[86216] (b) growing the non-human organism or a part thereof under conditions which permit the production of sucrose or a composition comprising sucrose in said non-human organism or in the culture medium surrounding said non-human organism.

[86217] Accordingly, the present invention relates to a process for the production of fructose, which comprises
[86218] (a) increasing or generating the activity of a transcription factor in the cytosol of a cell of a non-human organism or a part thereof, preferably a microorganism, a plant cell, a plant or a part thereof, as compared to a corresponding non-transformed wild type non-human organism or a part thereof; and
[86219] (b) growing the non-human organism or a part thereof under conditions which permit the production of fructose or a composition comprising fructose in said non-human organism or in the culture medium surrounding said non-human organism.

[86220] Accordingly, the present invention relates to a process for the production of glucose-1-phosphate, which comprises
[86221] (a) increasing or generating the activity of a At5g43630-protein in the cytosol of a cell of a non-human organism or a part thereof, preferably a microorganism, a plant cell, a plant or a part thereof, as compared to a corresponding non-transformed wild type non-human organism or a part thereof; and
[86222] (b) growing the non-human organism or a part thereof under conditions which permit the production of glucose-1-phosphate or a composition comprising glucose-1-phosphate in said non-human organism or in the culture medium surrounding said non-human organism.

[86223] Accordingly, the present invention relates to a process for the production of myo-inositol, which comprises
[86224] (a) increasing or generating the activity of a heat shock transcription factor in the cytosol of a cell of a non-human organism or a part thereof, preferably a microorganism, a plant cell, a plant or a part thereof, as compared to a corresponding non-transformed wild type non-human organism or a part thereof; and
[86225] (b) growing the non-human organism or a part thereof under conditions which permit the production of myo-inositol or a composition comprising myo-inositol in said non-human organism or in the culture medium surrounding said non-human organism.

[86226] Accordingly, the present invention relates to a process for the production of raffinose, which comprises
[86227] (a) increasing or generating the activity of a heat shock transcription factor in the cytosol of a cell of a non-human organism or a part thereof, preferably a microorganism, a plant cell, a plant or a part thereof, as compared to a corresponding non-transformed wild type non-human organism or a part thereof; and
[86228] (b) growing the non-human organism or a part thereof under conditions which permit the production of raffinose or a composition comprising raffinose in said non-human organism or in the culture medium surrounding said non-human organism.

[86229] Accordingly, the present invention relates to a process for the production of glucose-1-phosphate, which comprises
[86230] (a) increasing or generating the activity of a protein phosphatase in the cytosol of a cell of a non-human organism or a part thereof, preferably a microorganism, a plant cell, a plant or a part thereof, as compared to a corresponding non-transformed wild type non-human organism or a part thereof; and
[86231] (b) growing the non-human organism or a part thereof under conditions which permit the production of glucose-1-phosphate or a composition comprising glucose-1-phosphate in said non-human organism or in the culture medium surrounding said non-human organism.

[86232] Accordingly, the present invention relates to a process for the production of myo-inositol, which comprises
[86233] (a) increasing or generating the activity of a protein phosphatase in the cytosol of a cell of a non-human organism or a part thereof, preferably a microorganism, a plant cell, a plant or a part thereof, as compared to a corresponding non-transformed wild type non-human organism or a part thereof; and
[86234] (b) growing the non-human organism or a part thereof under conditions which permit the production of myo-inositol or a composition comprising myo-inositol in said non-human organism or in the culture medium surrounding said non-human organism.

[86235] Accordingly, the present invention relates to a process for the production of fructose, which comprises
[86236] (a) increasing or generating the activity of a RNA-binding protein in the cytosol of a cell of a non-human organism or a part thereof, preferably a microorganism, a plant cell, a plant or a part thereof, as compared to a corresponding non-transformed wild type non-human organism or a part thereof; and
[86237] (b) growing the non-human organism or a part thereof under conditions which permit the production of fructose or a composition comprising fructose in said non-human organism or in the culture medium surrounding said non-human organism.

[86238] Accordingly, the present invention relates to a process for the production of glucose, which comprises
[86239] (a) increasing or generating the activity of a RNA-binding protein in the cytosol of a cell of a non-human organism or a part thereof, preferably a microorganism, a plant cell, a plant or a part thereof, as compared to a corresponding non-transformed wild type non-human organism or a part thereof; and
[86240] (b) growing the non-human organism or a part thereof under conditions which permit the production of glucose or a composition comprising glucose in said non-human organism or in the culture medium surrounding said non-human organism.

[86241] Accordingly, the present invention relates to a process for the production of fructose, which comprises
[86242] (a) increasing or generating the activity of a MADS-box transcription factor in the cytosol of a cell of a non-human organism or a part thereof, preferably a microorganism, a plant cell, a plant or a part thereof, as compared to a corresponding non-transformed wild type non-human organism or a part thereof; and
[86243] (b) growing the non-human organism or a part thereof under conditions which permit the production of fructose or a composition comprising fructose in said non-human organism or in the culture medium surrounding said non-human organism.

[86244] Accordingly, the present invention relates to a process for the production of raffinose, which comprises
[86245] (a) increasing or generating the activity of a MADS-box transcription factor in the cytosol of a cell of a non-human organism or a part thereof, preferably a microorganism, a plant cell, a plant or a part thereof, as compared to a corresponding non-transformed wild type non-human organism or a part thereof; and
[86246] (b) growing the non-human organism or a part thereof under conditions which permit the production of raffinose or a composition comprising raffinose in said non-human organism or in the culture medium surrounding said non-human organism.

[86247] Accordingly, the present invention relates to a process for the production of saccharic acid, which comprises
[86248] (a) increasing or generating the activity of a MADS-box transcription factor in the cytosol of a cell of a non-human organism or a part thereof, preferably a microorganism, a plant cell, a plant or a part thereof, as compared to a corresponding non-transformed wild type non-human organism or a part thereof; and
[86249] (b) growing the non-human organism or a part thereof under conditions which permit the production of saccharic acid or a composition comprising saccharic acid in said non-human organism or in the culture medium surrounding said non-human organism.

[86250] Accordingly, the present invention relates to a process for the production of glucose-1-phosphate, which comprises
[86251] (a) increasing or generating the activity of a protein kinase in the cytosol of a cell of a non-human organism or a part thereof, preferably a microorganism, a plant cell, a plant or a part thereof, as compared to a corresponding non-transformed wild type non-human organism or a part thereof; and
[86252] (b) growing the non-human organism or a part thereof under conditions which permit the production of glucose-1-phosphate or a composition comprising glucose-1-phosphate in said non-human organism or in the culture medium surrounding said non-human organism.

[86253] Accordingly, the present invention relates to a process for the production of raffinose, which comprises
[86254] (a) increasing or generating the activity of a glycosyl transferase in the cytosol of a cell of a non-human organism or a part thereof, preferably a microorganism, a plant cell, a plant or a part thereof, as compared to a corresponding non-transformed wild type non-human organism or a part thereof; and
[86255] (b) growing the non-human organism or a part thereof under conditions which permit the production of raffinose or a composition comprising raffinose in said non-human organism or in the culture medium surrounding said non-human organism.

[86256] Accordingly, the present invention relates to a process for the production of sucrose, which comprises
[86257] (a) increasing or generating the activity of a sec-independent protein translocase in the cytosol of a cell of a non-human organism or a part thereof, preferably a microorganism, a plant cell, a plant or a part thereof, as compared to a corresponding non-transformed wild type non-human organism or a part thereof; and
[86258] (b) growing the non-human organism or a part thereof under conditions which permit the production of sucrose or a composition comprising sucrose in said non-human organism or in the culture medium surrounding said non-human organism.

[86259] Accordingly, the present invention relates to a process for the production of 3,4,5-trihydroxypentanoic acid, which comprises
[86260] (a) increasing or generating the activity of a beta-hydroxylase in the cytosol of a cell of a non-human organism or a part thereof, preferably a microorganism, a plant cell, a plant or a part thereof, as compared to a corresponding non-transformed wild type non-human organism or a part thereof; and
[86261] (b) growing the non-human organism or a part thereof under conditions which permit the production of 3,4,5-trihydroxypentanoic acid or a composition comprising 3,4,5-trihydroxypentanoic acid in said non-human organism or in the culture medium surrounding said non-human organism.

[86262] Accordingly, the present invention relates to a process for the production of fructose, which comprises
[86263] (a) increasing or generating the activity of a elongation factor Tu in the cytosol of a cell of a non-human organism or a part thereof, preferably a microorganism, a plant cell, a plant or a part thereof, as compared to a corresponding non-transformed wild type non-human organism or a part thereof; and
[86264] (b) growing the non-human organism or a part thereof under conditions which permit the production of fructose or a composition comprising fructose in said non-human organism or in the culture medium surrounding said non-human organism.

[86265] Accordingly, the present invention relates to a process for the production of glucose, which comprises
[86266] (a) increasing or generating the activity of a elongation factor Tu in the cytosol of a cell of a non-human organism or a part thereof, preferably a microorganism, a plant cell, a plant or a part thereof, as compared to a corresponding non-transformed wild type non-human organism or a part thereof; and
[86267] (b) growing the non-human organism or a part thereof under conditions which permit the production of glucose or a composition comprising glucose in said non-human organism or in the culture medium surrounding said non-human organism.

[86268] Accordingly, the present invention relates to a process for the production of fructose, which comprises
[86269] (a) increasing or generating the activity of a ABC transporter permease protein in the cytosol of a cell of a non-human organism or a part thereof, preferably a microorganism, a plant cell, a plant or a part thereof, as compared to a corresponding non-transformed wild type non-human organism or a part thereof; and
[86270] (b) growing the non-human organism or a part thereof under conditions which permit the production of fructose or a composition comprising fructose in said non-human organism or in the culture medium surrounding said non-human organism.

[86271] Accordingly, the present invention relates to a process for the production of sucrose, which comprises
[86272] (a) increasing or generating the activity of a ABC transporter permease protein in the cytosol of a cell of a non-human organism or a part thereof, preferably a microorganism, a plant cell, a plant or a part thereof, as compared to a corresponding non-transformed wild type non-human organism or a part thereof; and
[86273] (b) growing the non-human organism or a part thereof under conditions which permit the production of sucrose or a composition comprising sucrose in said non-human organism or in the culture medium surrounding said non-human organism.

[86274] Accordingly, the present invention relates to a process for the production of glucose-1-phosphate, which comprises
[86275] (a) increasing or generating the activity of a acyl-CoA synthase in the cytosol of a cell of a non-human organism or a part thereof, preferably a microorganism, a plant cell, a plant or a part thereof, as compared to a corresponding non-transformed wild type non-human organism or a part thereof; and
[86276] (b) growing the non-human organism or a part thereof under conditions which permit the production of glucose-1-phosphate or a composition comprising glucose-1-phosphate in said non-human organism or in the culture medium surrounding said non-human organism.

[86277] Accordingly, the present invention relates to a process for the production of glucose, which comprises
[86278] (a) increasing or generating the activity of a 2-oxoglutarate dehydrogenase E1 subunit in the cytosol of a cell of a non-human organism or a part thereof, preferably a microorganism, a plant cell, a plant or a part thereof, as compared to a corresponding non-transformed wild type non-human organism or a part thereof; and
[86279] (b) growing the non-human organism or a part thereof under conditions which permit the production of glucose or a composition comprising glucose in said non-human organism or in the culture medium surrounding said non-human organism.

[86280] Accordingly, the present invention relates to a process for the production of glucose-1-phosphate, which comprises
[86281] (a) increasing or generating the activity of a 2-oxoglutarate dehydrogenase E1 subunit in the cytosol of a cell of a non-human organism or a part thereof, preferably a microorganism, a plant cell, a plant or a part thereof, as compared to a corresponding non-transformed wild type non-human organism or a part thereof; and
[86282] (b) growing the non-human organism or a part thereof under conditions which permit the production of glucose-1-phosphate or a composition comprising glucose-1-phosphate in said non-human organism or in the culture medium surrounding said non-human organism.

[86283] Accordingly, the present invention relates to a process for the production of myo-inositol, which comprises
[86284] (a) increasing or generating the activity of a 2-oxoglutarate dehydrogenase E1 subunit in the cytosol of a cell of a non-human organism or a part thereof, preferably a microorganism, a plant cell, a plant or a part thereof, as compared to a corresponding non-transformed wild type non-human organism or a part thereof; and
[86285] (b) growing the non-human organism or a part thereof under conditions which permit the production of myo-inositol or a composition comprising myo-inositol in said non-human organism or in the culture medium surrounding said non-human organism.

[86286] Accordingly, the present invention relates to a process for the production of raffinose, which comprises
[86287] (a) increasing or generating the activity of a 2-oxoglutarate dehydrogenase E1 subunit in the cytosol of a cell of a non-human organism or a part thereof, preferably a microorganism, a plant cell, a plant or a part thereof, as compared to a corresponding non-transformed wild type non-human organism or a part thereof; and
[86288] (b) growing the non-human organism or a part thereof under conditions which permit the production of raffinose or a composition comprising raffinose in said non-human organism or in the culture medium surrounding said non-human organism.

[86289] Accordingly, the present invention relates to a process for the production of sedoheptulose-7-phosphate, which comprises
[86290] (a) increasing or generating the activity of a 2-oxoglutarate dehydrogenase E1 subunit in the cytosol of a cell of a non-human organism or a part thereof, preferably a microorganism, a plant cell, a plant or a part thereof, as compared to a corresponding non-transformed wild type non-human organism or a part thereof; and
[86291] (b) growing the non-human organism or a part thereof under conditions which permit the production of sedoheptulose-7-phosphate or a composition comprising sedoheptulose-7-phosphate in said non-human organism or in the culture medium surrounding said non-human organism.

[86292] Accordingly, the present invention relates to a process for the production of raffinose, which comprises
[86293] (a) increasing or generating the activity of a GDP-mannose dehydrogenase in the cytosol of a cell of a non-human organism or a part thereof, preferably a microorganism, a plant cell, a plant or a part thereof, as compared to a corresponding non-transformed wild type non-human organism or a part thereof; and
[86294] (b) growing the non-human organism or a part thereof under conditions which permit the production of raffinose or a composition comprising raffinose in said non-human organism or in the culture medium surrounding said non-human organism.

[86295] Accordingly, the present invention relates to a process for the production of fructose, which comprises
[86296] (a) increasing or generating the activity of a transcriptional regulator in the cytosol of a cell of a non-human organism or a part thereof, preferably a microorganism, a plant cell, a plant or a part thereof, as compared to a corresponding non-transformed wild type non-human organism or a part thereof; and
[86297] (b) growing the non-human organism or a part thereof under conditions which permit the production of fructose or a composition comprising fructose in said non-human organism or in the culture medium surrounding said non-human organism.

[86298] Accordingly, the present invention relates to a process for the production of glucose, which comprises
[86299] (a) increasing or generating the activity of a transcriptional regulator in the cytosol of a cell of a non-human organism or a part thereof, preferably a microorganism, a plant cell, a plant or a part thereof, as compared to a corresponding non-transformed wild type non-human organism or a part thereof; and
[86300] (b) growing the non-human organism or a part thereof under conditions which permit the production of glucose or a composition comprising glucose in said non-human organism or in the culture medium surrounding said non-human organism.

[86301] Accordingly, the present invention relates to a process for the production of glucose-1-phosphate, which comprises
[86302] (a) increasing or generating the activity of a transcriptional regulator in the cytosol of a cell of a non-human organism or a part thereof, preferably a microorganism, a plant cell, a plant or a part thereof, as compared to a corresponding non-transformed wild type non-human organism or a part thereof; and
[86303] (b) growing the non-human organism or a part thereof under conditions which permit the production of glucose-1-phosphate or a composition comprising glucose-1-phosphate in said non-human organism or in the culture medium surrounding said non-human organism.

[86304] Accordingly, the present invention relates to a process for the production of glucose-1-phosphate, which comprises
[86305] (a) increasing or generating the activity of a oxidoreductase in the cytosol of a cell of a non-human organism or a part thereof, preferably a microorganism, a plant cell, a plant or a part thereof, as compared to a corresponding non-transformed wild type non-human organism or a part thereof; and
[86306] (b) growing the non-human organism or a part thereof under conditions which permit the production of glucose-1-phosphate or a composition comprising glucose-1-phosphate in said non-human organism or in the culture medium surrounding said non-human organism.

[86307] Accordingly, the present invention relates to a process for the production of myo-inositol, which comprises
[86308] (a) increasing or generating the activity of a ThiF family protein in the cytosol of a cell of a non-human organism or a part thereof, preferably a microorganism, a plant cell, a plant or a part thereof, as compared to a corresponding non-transformed wild type non-human organism or a part thereof; and
[86309] (b) growing the non-human organism or a part thereof under conditions which permit the production of myo-inositol or a composition comprising myo-inositol in said non-human organism or in the culture medium surrounding said non-human organism.

[86310] Accordingly, the present invention relates to a process for the production of fructose, which comprises
[86311] (a) increasing or generating the activity of a CTP synthase in the cytosol of a cell of a non-human organism or a part thereof, preferably a microorganism, a plant cell, a plant or a part thereof, as compared to a corresponding non-transformed wild type non-human organism or a part thereof; and
[86312] (b) growing the non-human organism or a part thereof under conditions which permit the production of fructose or a composition comprising fructose in said non-human organism or in the culture medium surrounding said non-human organism.

[86313] Accordingly, the present invention relates to a process for the production of glucose, which comprises
[86314] (a) increasing or generating the activity of a CTP synthase in the cytosol of a cell of a non-human organism or a part thereof, preferably a microorganism, a plant cell, a plant or a part thereof, as compared to a corresponding non-transformed wild type non-human organism or a part thereof; and
[86315] (b) growing the non-human organism or a part thereof under conditions which permit the production of glucose or a composition comprising glucose in said non-human organism or in the culture medium surrounding said non-human organism.

[86316] Accordingly, the present invention relates to a process for the production of sucrose, which comprises
[86317] (a) increasing or generating the activity of a CTP synthase in the cytosol of a cell of a non-human organism or a part thereof, preferably a microorganism, a plant cell, a plant or a part thereof, as compared to a corresponding non-transformed wild type non-human organism or a part thereof; and
[86318] (b) growing the non-human organism or a part thereof under conditions which permit the production of sucrose or a composition comprising sucrose in said non-human organism or in the culture medium surrounding said non-human organism.

[86319] Accordingly, the present invention relates to a process for the production of raffinose, which comprises
[86320] (a) increasing or generating the activity of a protein-L-isoaspartate O-methyltransferase in the cytosol of a cell of a non-human organism or a part thereof, preferably a microorganism, a plant cell, a plant or a part thereof, as compared to a corresponding non-transformed wild type non-human organism or a part thereof; and
[86321] (b) growing the non-human organism or a part thereof under conditions which permit the production of raffinose or a composition comprising raffinose in said non-human organism or in the culture medium surrounding said non-human organism.

[86322] Accordingly, the present invention relates to a process for the production of myo-inositol, which comprises
[86323] (a) increasing or generating the activity of a recombinase A in the cytosol of a cell of a non-human organism or a part thereof, preferably a microorganism, a plant cell, a plant or a part thereof, as compared to a corresponding non-transformed wild type non-human organism or a part thereof; and
[86324] (b) growing the non-human organism or a part thereof under conditions which permit the production of myo-inositol or a composition comprising myo-inositol in said non-human organism or in the culture medium surrounding said non-human organism.

[86325] Accordingly, the present invention relates to a process for the production of raffinose, which comprises
[86326] (a) increasing or generating the activity of a recombinase A in the cytosol of a cell of a non-human organism or a part thereof, preferably a microorganism, a plant cell, a plant or a part thereof, as compared to a corresponding non-transformed wild type non-human organism or a part thereof; and
[86327] (b) growing the non-human organism or a part thereof under conditions which permit the production of raffinose or a composition comprising raffinose in said non-human organism or in the culture medium surrounding said non-human organism.

[86328] Accordingly, the present invention relates to a process for the production of myo-inositol, which comprises
[86329] (a) increasing or generating the activity of a acetyltransferase in the cytosol of a cell of a non-human organism or a part thereof, preferably a microorganism, a plant cell, a plant or a part thereof, as compared to a corresponding non-transformed wild type non-human organism or a part thereof; and
[86330] (b) growing the non-human organism or a part thereof under conditions which permit the production of myo-inositol or a composition comprising myo-inositol in said non-human organism or in the culture medium surrounding said non-human organism.

[86331] Accordingly, the present invention relates to a process for the production of raffinose, which comprises
[86332] (a) increasing or generating the activity of a acetyltransferase in the cytosol of a cell of a non-human organism or a part thereof, preferably a microorganism, a plant cell, a plant or a part thereof, as compared to a corresponding non-transformed wild type non-human organism or a part thereof; and
[86333] (b) growing the non-human organism or a part thereof under conditions which permit the production of raffinose or a composition comprising raffinose in said non-human organism or in the culture medium surrounding said non-human organism.

[86334] Accordingly, the present invention relates to a process for the production of raffinose, which comprises
[86335] (a) increasing or generating the activity of a enoyl-CoA hydratase in the cytosol of a cell of a non-human organism or a part thereof, preferably a microorganism, a plant cell, a plant or a part thereof, as compared to a corresponding non-transformed wild type non-human organism or a part thereof; and
[86336] (b) growing the non-human organism or a part thereof under conditions which permit the production of raffinose or a composition comprising raffinose in said non-human organism or in the culture medium surrounding said non-human organism.

[86337] Accordingly, the present invention relates to a process for the production of fructose, which comprises
[86338] (a) increasing or generating the activity of a NADH-quinone oxidoreductase subunit in the cytosol of a cell of a non-human organism or a part thereof, preferably a microorganism, a plant cell, a plant or a part thereof, as compared to a corresponding non-transformed wild type non-human organism or a part thereof; and
[86339] (b) growing the non-human organism or a part thereof under conditions which permit the production of fructose or a composition comprising fructose in said non-human organism or in the culture medium surrounding said non-human organism.

[86340] Accordingly, the present invention relates to a process for the production of glucose-1-phosphate, which comprises
[86341] (a) increasing or generating the activity of a NADH-quinone oxidoreductase subunit in the cytosol of a cell of a non-human organism or a part thereof, preferably a microorganism, a plant cell, a plant or a part thereof, as compared to a corresponding non-transformed wild type non-human organism or a part thereof; and
[86342] (b) growing the non-human organism or a part thereof under conditions which permit the production of glucose-1-phosphate or a composition comprising glucose-1-phosphate in said non-human organism or in the culture medium surrounding said non-human organism.

[86343] Accordingly, the present invention relates to a process for the production of sucrose, which comprises
[86344] (a) increasing or generating the activity of a NADH-quinone oxidoreductase subunit in the cytosol of a cell of a non-human organism or a part thereof, preferably a microorganism, a plant cell, a plant or a part thereof, as compared to a corresponding non-transformed wild type non-human organism or a part thereof; and
[86345] (b) growing the non-human organism or a part thereof under conditions which permit the production of sucrose or a composition comprising sucrose in said non-human organism or in the culture medium surrounding said non-human organism.

[86346] Accordingly, the present invention relates to a process for the production of 3,4,5-trihydroxypentanoic acid, which comprises
[86347] (a) increasing or generating the activity of a isopropylmalate isomerase large subunit in the cytosol of a cell of a non-human organism or a part thereof, preferably a microorganism, a plant cell, a plant or a part thereof, as compared to a corresponding non-transformed wild type non-human organism or a part thereof; and
[86348] (b) growing the non-human organism or a part thereof under conditions which permit the production of 3,4,5-trihydroxypentanoic acid or a composition comprising 3,4,5-trihydroxypentanoic acid in said non-human organism or in the culture medium surrounding said non-human organism.

[86349] Accordingly, the present invention relates to a process for the production of fructose, which comprises
[86350] (a) increasing or generating the activity of a hydrolase in the cytosol of a cell of a non-human organism or a part thereof, preferably a microorganism, a plant cell, a plant or a part thereof, as compared to a corresponding non-transformed wild type non-human organism or a part thereof; and
[86351] (b) growing the non-human organism or a part thereof under conditions which permit the production of fructose or a composition comprising fructose in said non-human organism or in the culture medium surrounding said non-human organism.

[86352] Accordingly, the present invention relates to a process for the production of glucose, which comprises
[86353] (a) increasing or generating the activity of a hydrolase in the cytosol of a cell of a non-human organism or a part thereof, preferably a microorganism, a plant cell, a plant or a part thereof, as compared to a corresponding non-transformed wild type non-human organism or a part thereof; and
[86354] (b) growing the non-human organism or a part thereof under conditions which permit the production of glucose or a composition comprising glucose in said non-human organism or in the culture medium surrounding said non-human organism.

[86355] Accordingly, the present invention relates to a process for the production of sucrose, which comprises
[86356] (a) increasing or generating the activity of a hydrolase in the cytosol of a cell of a non-human organism or a part thereof, preferably a microorganism, a plant cell, a plant or a part thereof, as compared to a corresponding non-transformed wild type non-human organism or a part thereof; and
[86357] (b) growing the non-human organism or a part thereof under conditions which permit the production of sucrose or a composition comprising sucrose in said non-human organism or in the culture medium surrounding said non-human organism.

[86358] Accordingly, the present invention relates to a process for the production of fructose, which comprises
[86359] (a) increasing or generating the activity of a glutamate-ammonia-ligase in the cytosol of a cell of a non-human organism or a part thereof, preferably a microorganism, a plant cell, a plant or a part thereof, as compared to a corresponding non-transformed wild type non-human organism or a part thereof; and
[86360] (b) growing the non-human organism or a part thereof under conditions which permit the production of fructose or a composition comprising fructose in said non-human organism or in the culture medium surrounding said non-human organism.

[86361] Accordingly, the present invention relates to a process for the production of glucose, which comprises
[86362] (a) increasing or generating the activity of a glutamate-ammonia-ligase in the cytosol of a cell of a non-human organism or a part thereof, preferably a microorganism, a plant cell, a plant or a part thereof, as compared to a corresponding non-transformed wild type non-human organism or a part thereof; and
[86363] (b) growing the non-human organism or a part thereof under conditions which permit the production of glucose or a composition comprising glucose in said non-human organism or in the culture medium surrounding said non-human organism.

[86364] Accordingly, the present invention relates to a process for the production of sucrose, which comprises
[86365] (a) increasing or generating the activity of a glutamate-ammonia-ligase in the cytosol of a cell of a non-human organism or a part thereof, preferably a microorganism, a plant cell, a plant or a part thereof, as compared to a corresponding non-transformed wild type non-human organism or a part thereof; and
[86366] (b) growing the non-human organism or a part thereof under conditions which permit the production of sucrose or a composition comprising sucrose in said non-human organism or in the culture medium surrounding said non-human organism.

[86367] Accordingly, the present invention relates to a process for the production of fructose, which comprises
[86368] (a) increasing or generating the activity of a fumarylacetoacetate hydrolase in the cytosol of a cell of a non-human organism or a part thereof, preferably a microorganism, a plant cell, a plant or a part thereof, as compared to a corresponding non-transformed wild type non-human organism or a part thereof; and
[86369] (b) growing the non-human organism or a part thereof under conditions which permit the production of fructose or a composition comprising fructose in said non-human organism or in the culture medium surrounding said non-human organism.

[86370] Accordingly, the present invention relates to a process for the production of raffinose, which comprises
[86371] (a) increasing or generating the activity of a glycosyltransferase in the cytosol of a cell of a non-human organism or a part thereof, preferably a microorganism, a plant cell, a plant or a part thereof, as compared to a corresponding non-transformed wild type non-human organism or a part thereof; and
[86372] (b) growing the non-human organism or a part thereof under conditions which permit the production of raffinose or a composition comprising raffinose in said non-human organism or in the culture medium surrounding said non-human organism.

[86373] Accordingly, the present invention relates to a process for the production of myo-inositol, which comprises
[86374] (a) increasing or generating the activity of a peptidyl-prolyl cis-trans isomerase in the cytosol of a cell of a non-human organism or a part thereof, preferably a microorganism, a plant cell, a plant or a part thereof, as compared to a corresponding non-transformed wild type non-human organism or a part thereof; and
[86375] (b) growing the non-human organism or a part thereof under conditions which permit the production of myo-inositol or a composition comprising myo-inositol in said non-human organism or in the culture medium surrounding said non-human organism.

[86376] Accordingly, the present invention relates to a process for the production of 3,4,5-trihydroxypentanoic acid, which comprises
[86377] (a) increasing or generating the activity of a NAD(P)H dehydrogenase (quinone) in the cytosol of a cell of a non-human organism or a part thereof, preferably a microorganism, a plant cell, a plant or a part thereof, as compared to a corresponding non-transformed wild type non-human organism or a part thereof; and
[86378] (b) growing the non-human organism or a part thereof under conditions which permit the production of 3,4,5-trihydroxypentanoic acid or a composition comprising 3,4,5-trihydroxypentanoic acid in said non-human organism or in the culture medium surrounding said non-human organism.

[86379] Accordingly, the present invention relates to a process for the production of fructose, which comprises
[86380] (a) increasing or generating the activity of a electron transfer flavoprotein subunit beta in the cytosol of a cell of a non-human organism or a part thereof, preferably a microorganism, a plant cell, a plant or a part thereof, as compared to a corresponding non-transformed wild type non-human organism or a part thereof; and
[86381] (b) growing the non-human organism or a part thereof under conditions which permit the production of fructose or a composition comprising fructose in said non-human organism or in the culture medium surrounding said non-human organism.

[86382] Accordingly, the present invention relates to a process for the production of glucose, which comprises
[86383] (a) increasing or generating the activity of a electron transfer flavoprotein subunit beta in the cytosol of a cell of a non-human organism or a part thereof, preferably a microorganism, a plant cell, a plant or a part thereof, as compared to a corresponding non-transformed wild type non-human organism or a part thereof; and
[86384] (b) growing the non-human organism or a part thereof under conditions which permit the production of glucose or a composition comprising glucose in said non-human organism or in the culture medium surrounding said non-human organism.

[86385] Accordingly, the present invention relates to a process for the production of glucose-1-phosphate, which comprises
[86386] (a) increasing or generating the activity of a purine nucleoside phosphorylase in the cytosol of a cell of a non-human organism or a part thereof, preferably a microorganism, a plant cell, a plant or a part thereof, as compared to a corresponding non-transformed wild type non-human organism or a part thereof; and
[86387] (b) growing the non-human organism or a part thereof under conditions which permit the production of glucose-1-phosphate or a composition comprising glucose-1-phosphate in said non-human organism or in the culture medium surrounding said non-human organism.

[86388] Accordingly, the present invention relates to a process for the production of 3,4,5-trihydroxypentanoic acid, which comprises
[86389] (a) increasing or generating the activity of a purine nucleoside phosphorylase in the cytosol of a cell of a non-human organism or a part thereof, preferably a microorganism, a plant cell, a plant or a part thereof, as compared to a corresponding non-transformed wild type non-human organism or a part thereof; and
[86390] (b) growing the non-human organism or a part thereof under conditions which permit the production of 3,4,5-trihydroxypentanoic acid or a composition comprising 3,4,5-trihydroxypentanoic acid in said non-human organism or in the culture medium surrounding said non-human organism.

[86391] Accordingly, the present invention relates to a process for the production of raffinose, which comprises
[86392] (a) increasing or generating the activity of a transcriptional regulator protein in the cytosol of a cell of a non-human organism or a part thereof, preferably a microorganism, a plant cell, a plant or a part thereof, as compared to a corresponding non-transformed wild type non-human organism or a part thereof; and
[86393] (b) growing the non-human organism or a part thereof under conditions which permit the production of raffinose or a composition comprising raffinose in said non-human organism or in the culture medium surrounding said non-human organism.

[86394] Accordingly, the present invention relates to a process for the production of glucose-1-phosphate, which comprises
[86395] (a) increasing or generating the activity of a AX653549-protein in the cytosol of a cell of a non-human organism or a part thereof, preferably a microorganism, a plant cell, a plant or a part thereof, as compared to a corresponding non-transformed wild type non-human organism or a part thereof; and
[86396] (b) growing the non-human organism or a part thereof under conditions which permit the production of glucose-1-phosphate or a composition comprising glucose-1-phosphate in said non-human organism or in the culture medium surrounding said non-human organism.

[86397] Accordingly, the present invention relates to a process for the production of glucose-1-phosphate, which comprises
[86398] (a) increasing or generating the activity of a AY087308-protein in the cytosol of a cell of a non-human organism or a part thereof, preferably a microorganism, a plant cell, a plant or a part thereof, as compared to a corresponding non-transformed wild type non-human organism or a part thereof; and
[86399] (b) growing the non-human organism or a part thereof under conditions which permit the production of glucose-1-phosphate or a composition comprising glucose-1-phosphate in said non-human organism or in the culture medium surrounding said non-human organism.

[86400] Accordingly, the present invention relates to a process for the production of myo-inositol, which comprises
[86401] (a) increasing or generating the activity of a AY087308-protein in the cytosol of a cell of a non-human organism or a part thereof, preferably a microorganism, a plant cell, a plant or a part thereof, as compared to a corresponding non-transformed wild type non-human organism or a part thereof; and
[86402] (b) growing the non-human organism or a part thereof under conditions which permit the production of myo-inositol or a composition comprising myo-inositol in said non-human organism or in the culture medium surrounding said non-human organism.

[86403] Accordingly, the present invention relates to a process for the production of glucose-1-phosphate, which comprises
[86404] (a) increasing or generating the activity of a pyruvate kinase in the cytosol of a cell of a non-human organism or a part thereof, preferably a microorganism, a plant cell, a plant or a part thereof, as compared to a corresponding non-transformed wild type non-human organism or a part thereof; and
[86405] (b) growing the non-human organism or a part thereof under conditions which permit the production of glucose-1-phosphate or a composition comprising glucose-1-phosphate in said non-human organism or in the culture medium surrounding said non-human organism.

[86406] Accordingly, the present invention relates to a process for the production of 3,4,5-trihydroxypentanoic acid, which comprises
[86407] (a) increasing or generating the activity of a pyruvate kinase in the cytosol of a cell of a non-human organism or a part thereof, preferably a microorganism, a plant cell, a plant or a part thereof, as compared to a corresponding non-transformed wild type non-human organism or a part thereof; and
[86408] (b) growing the non-human organism or a part thereof under conditions which permit the production of 3,4,5-trihydroxypentanoic acid or a composition comprising 3,4,5-trihydroxypentanoic acid in said non-human organism or in the culture medium surrounding said non-human organism.

[86409] Accordingly, the present invention relates to a process for the production of glucose, which comprises
[86410] (a) increasing or generating the activity of a threonine synthase in the cytosol of a cell of a non-human organism or a part thereof, preferably a microorganism, a plant cell, a plant or a part thereof, as compared to a corresponding non-transformed wild type non-human organism or a part thereof; and
[86411] (b) growing the non-human organism or a part thereof under conditions which permit the production of glucose or a composition comprising glucose in said non-human organism or in the culture medium surrounding said non-human organism.

[86412] Accordingly, the present invention relates to a process for the production of sucrose, which comprises
[86413] (a) increasing or generating the activity of a threonine synthase in the cytosol of a cell of a non-human organism or a part thereof, preferably a microorganism, a plant cell, a plant or a part thereof, as compared to a corresponding non-transformed wild type non-human organism or a part thereof; and
[86414] (b) growing the non-human organism or a part thereof under conditions which permit the production of sucrose or a composition comprising sucrose in said non-human organism or in the culture medium surrounding said non-human organism.

[86415] Accordingly, the present invention relates to a process for the production of 3,4,5-trihydroxypentanoic acid, which comprises
[86416] (a) increasing or generating the activity of a b0050-protein in the cytosol of a cell of a non-human organism or a part thereof, preferably a microorganism, a plant cell, a plant or a part thereof, as compared to a corresponding non-transformed wild type non-human organism or a part thereof; and
[86417] (b) growing the non-human organism or a part thereof under conditions which permit the production of 3,4,5-trihydroxypentanoic acid or a composition comprising 3,4,5-trihydroxypentanoic acid in said non-human organism or in the culture medium surrounding said non-human organism.

[86418] Accordingly, the present invention relates to a process for the production of raffinose, which comprises
[86419] (a) increasing or generating the activity of a L-ribulose-5-phosphate 4-epimerase in the cytosol of a cell of a non-human organism or a part thereof, preferably a microorganism, a plant cell, a plant or a part thereof, as compared to a corresponding non-transformed wild type non-human organism or a part thereof; and
[86420] (b) growing the non-human organism or a part thereof under conditions which permit the production of raffinose or a composition comprising raffinose in said non-human organism or in the culture medium surrounding said non-human organism.

[86421] Accordingly, the present invention relates to a process for the production of sucrose, which comprises
[86422] (a) increasing or generating the activity of a glucose dehydrogenase in the cytosol of a cell of a non-human organism or a part thereof, preferably a microorganism, a plant cell, a plant or a part thereof, as compared to a corresponding non-transformed wild type non-human organism or a part thereof; and
[86423] (b) growing the non-human organism or a part thereof under conditions which permit the production of sucrose or a composition comprising sucrose in said non-human organism or in the culture medium surrounding said non-human organism.

[86424] Accordingly, the present invention relates to a process for the production of glucose-1-phosphate, which comprises
[86425] (a) increasing or generating the activity of a serine protease in the cytosol of a cell of a non-human organism or a part thereof, preferably a microorganism, a plant cell, a plant or a part thereof, as compared to a corresponding non-transformed wild type non-human organism or a part thereof; and
[86426] (b) growing the non-human organism or a part thereof under conditions which permit the production of glucose-1-phosphate or a composition comprising glucose-1-phosphate in said non-human organism or in the culture medium surrounding said non-human organism.

[86427] Accordingly, the present invention relates to a process for the production of myo-inositol, which comprises
[86428] (a) increasing or generating the activity of a serine protease in the cytosol of a cell of a non-human organism or a part thereof, preferably a microorganism, a plant cell, a plant or a part thereof, as compared to a corresponding non-transformed wild type non-human organism or a part thereof; and
[86429] (b) growing the non-human organism or a part thereof under conditions which permit the production of myo-inositol or a composition comprising myo-inositol in said non-human organism or in the culture medium surrounding said non-human organism.

[86430] Accordingly, the present invention relates to a process for the production of sucrose, which comprises
[86431] (a) increasing or generating the activity of a acyl-CoA dehydrogenase in the cytosol of a cell of a non-human organism or a part thereof, preferably a microorganism, a plant cell, a plant or a part thereof, as compared to a corresponding non-transformed wild type non-human organism or a part thereof; and
[86432] (b) growing the non-human organism or a part thereof under conditions which permit the production of sucrose or a composition comprising sucrose in said non-human organism or in the culture medium surrounding said non-human organism.

[86433] Accordingly, the present invention relates to a process for the production of glucose-1-phosphate, which comprises
[86434] (a) increasing or generating the activity of a b0251-protein in the cytosol of a cell of a non-human organism or a part thereof, preferably a microorganism, a plant cell, a plant or a part thereof, as compared to a corresponding non-transformed wild type non-human organism or a part thereof; and
[86435] (b) growing the non-human organism or a part thereof under conditions which permit the production of glucose-1-phosphate or a composition comprising glucose-1-phosphate in said non-human organism or in the culture medium surrounding said non-human organism.

[86436] Accordingly, the present invention relates to a process for the production of fructose, which comprises
[86437] (a) increasing or generating the activity of a betaine aldehyde dehydrogenase in the cytosol of a cell of a non-human organism or a part thereof, preferably a microorganism, a plant cell, a plant or a part thereof, as compared to a corresponding non-transformed wild type non-human organism or a part thereof; and
[86438] (b) growing the non-human organism or a part thereof under conditions which permit the production of fructose or a composition comprising fructose in said non-human organism or in the culture medium surrounding said non-human organism.

[86439] Accordingly, the present invention relates to a process for the production of melibiose, which comprises
[86440] (a) increasing or generating the activity of a beta-galactosidase in the cytosol of a cell of a non-human organism or a part thereof, preferably a microorganism, a plant cell, a plant or a part thereof, as compared to a corresponding non-transformed wild type non-human organism or a part thereof; and
[86441] (b) growing the non-human organism or a part thereof under conditions which permit the production of melibiose or a composition comprising melibiose in said non-human organism or in the culture medium surrounding said non-human organism.

[86442] Accordingly, the present invention relates to a process for the production of glucose-1-phosphate, which comprises
[86443] (a) increasing or generating the activity of a b0362-protein in the cytosol of a cell of a non-human organism or a part thereof, preferably a microorganism, a plant cell, a plant or a part thereof, as compared to a corresponding non-transformed wild type non-human organism or a part thereof; and
[86444] (b) growing the non-human organism or a part thereof under conditions which permit the production of glucose-1-phosphate or a composition comprising glucose-1-phosphate in said non-human organism or in the culture medium surrounding said non-human organism.

[86445] Accordingly, the present invention relates to a process for the production of glucose-1-phosphate, which comprises
[86446] (a) increasing or generating the activity of a penicillin-binding protein in the cytosol of a cell of a non-human organism or a part thereof, preferably a microorganism, a plant cell, a plant or a part thereof, as compared to a corresponding non-transformed wild type non-human organism or a part thereof; and
[86447] (b) growing the non-human organism or a part thereof under conditions which permit the production of glucose-1-phosphate or a composition comprising glucose-1-phosphate in said non-human organism or in the culture medium surrounding said non-human organism.

[86448] Accordingly, the present invention relates to a process for the production of fructose, which comprises
[86449] (a) increasing or generating the activity of a ATP-binding component of a transport system in the cytosol of a cell of a non-human organism or a part thereof, preferably a microorganism, a plant cell, a plant or a part thereof, as compared to a corresponding non-transformed wild type non-human organism or a part thereof; and
[86450] (b) growing the non-human organism or a part thereof under conditions which permit the production of fructose or a composition comprising fructose in said non-human organism or in the culture medium surrounding said non-human organism.

[86451] Accordingly, the present invention relates to a process for the production of glucose, which comprises
[86452] (a) increasing or generating the activity of a ATP-binding component of a transport system in the cytosol of a cell of a non-human organism or a part thereof, preferably a microorganism, a plant cell, a plant or a part thereof, as compared to a corresponding non-transformed wild type non-human organism or a part thereof; and
[86453] (b) growing the non-human organism or a part thereof under conditions which permit the production of glucose or a composition comprising glucose in said non-human organism or in the culture medium surrounding said non-human organism.

[86454] Accordingly, the present invention relates to a process for the production of glucose, which comprises
[86455] (a) increasing or generating the activity of a membrane transport protein in the cytosol of a cell of a non-human organism or a part thereof, preferably a microorganism, a plant cell, a plant or a part thereof, as compared to a corresponding non-transformed wild type non-human organism or a part thereof; and
[86456] (b) growing the non-human organism or a part thereof under conditions which permit the production of glucose or a composition comprising glucose in said non-human organism or in the culture medium surrounding said non-human organism.

[86457] Accordingly, the present invention relates to a process for the production of saccharic acid, which comprises
[86458] (a) increasing or generating the activity of a b0488-protein in the cytosol of a cell of a non-human organism or a part thereof, preferably a microorganism, a plant cell, a plant or a part thereof, as compared to a corresponding non-transformed wild type non-human organism or a part thereof; and
[86459] (b) growing the non-human organism or a part thereof under conditions which permit the production of saccharic acid or a composition comprising saccharic acid in said non-human organism or in the culture medium surrounding said non-human organism.

[86460] Accordingly, the present invention relates to a process for the production of galactinol, which comprises
[86461] (a) increasing or generating the activity of a glycerate kinase in the cytosol of a cell of a non-human organism or a part thereof, preferably a microorganism, a plant cell, a plant or a part thereof, as compared to a corresponding non-transformed wild type non-human organism or a part thereof; and
[86462] (b) growing the non-human organism or a part thereof under conditions which permit the production of galactinol or a composition comprising galactinol in said non-human organism or in the culture medium surrounding said non-human organism.

[86463] Accordingly, the present invention relates to a process for the production of fructose, which comprises
[86464] (a) increasing or generating the activity of a isochorismate synthase in the cytosol of a cell of a non-human organism or a part thereof, preferably a microorganism, a plant cell, a plant or a part thereof, as compared to a corresponding non-transformed wild type non-human organism or a part thereof; and
[86465] (b) growing the non-human organism or a part thereof under conditions which permit the production of fructose or a composition comprising fructose in said non-human organism or in the culture medium surrounding said non-human organism.

[86466] Accordingly, the present invention relates to a process for the production of glucose, which comprises
[86467] (a) increasing or generating the activity of a isochorismate synthase in the cytosol of a cell of a non-human organism or a part thereof, preferably a microorganism, a plant cell, a plant or a part thereof, as compared to a corresponding non-transformed wild type non-human organism or a part thereof; and
[86468] (b) growing the non-human organism or a part thereof under conditions which permit the production of glucose or a composition comprising glucose in said non-human organism or in the culture medium surrounding said non-human organism.

[86469] Accordingly, the present invention relates to a process for the production of raffinose, which comprises
[86470] (a) increasing or generating the activity of a isochorismate synthase in the cytosol of a cell of a non-human organism or a part thereof, preferably a microorganism, a plant cell, a plant or a part thereof, as compared to a corresponding non-transformed wild type non-human organism or a part thereof; and
[86471] (b) growing the non-human organism or a part thereof under conditions which permit the production of raffinose or a composition comprising raffinose in said non-human organism or in the culture medium surrounding said non-human organism.

[86472] Accordingly, the present invention relates to a process for the production of sucrose, which comprises
[86473] (a) increasing or generating the activity of a isochorismate synthase in the cytosol of a cell of a non-human organism or a part thereof, preferably a microorganism, a plant cell, a plant or a part thereof, as compared to a corresponding non-transformed wild type non-human organism or a part thereof; and
[86474] (b) growing the non-human organism or a part thereof under conditions which permit the production of sucrose or a composition comprising sucrose in said non-human organism or in the culture medium surrounding said non-human organism.

[86475] Accordingly, the present invention relates to a process for the production of 3,4,5-trihydroxypentanoic acid, which comprises
[86476] (a) increasing or generating the activity of a B0644-protein in the cytosol of a cell of a non-human organism or a part thereof, preferably a microorganism, a plant cell, a plant or a part thereof, as compared to a corresponding non-transformed wild type non-human organism or a part thereof; and
[86477] (b) growing the non-human organism or a part thereof under conditions which permit the production of 3,4,5-trihydroxypentanoic acid or a composition comprising 3,4,5-trihydroxypentanoic acid in said non-human organism or in the culture medium surrounding said non-human organism.

[86478] Accordingly, the present invention relates to a process for the production of saccharic acid, which comprises
[86479] (a) increasing or generating the activity of a pyrimidine-specific ribonucleoside hydrolase in the cytosol of a cell of a non-human organism or a part thereof, preferably a microorganism, a plant cell, a plant or a part thereof, as compared to a corresponding non-transformed wild type non-human organism or a part thereof; and
[86480] (b) growing the non-human organism or a part thereof under conditions which permit the production of saccharic acid or a composition comprising saccharic acid in said non-human organism or in the culture medium surrounding said non-human organism.

[86481] Accordingly, the present invention relates to a process for the production of erythrol, which comprises
[86482] (a) increasing or generating the activity of a asparagine synthetase B in the cytosol of a cell of a non-human organism or a part thereof, preferably a microorganism, a plant cell, a plant or a part thereof, as compared to a corresponding non-transformed wild type non-human organism or a part thereof; and
[86483] (b) growing the non-human organism or a part thereof under conditions which permit the production of erythrol or a composition comprising erythrol in said non-human organism or in the culture medium surrounding said non-human organism.

[86484] Accordingly, the present invention relates to a process for the production of myo-inositol, which comprises
[86485] (a) increasing or generating the activity of a sensor histidine kinase in the cytosol of a cell of a non-human organism or a part thereof, preferably a microorganism, a plant cell, a plant or a part thereof, as compared to a corresponding non-transformed wild type non-human organism or a part thereof; and
[86486] (b) growing the non-human organism or a part thereof under conditions which permit the production of myo-inositol or a composition comprising myo-inositol in said non-human organism or in the culture medium surrounding said non-human organism.

[86487] Accordingly, the present invention relates to a process for the production of myo-inositol, which comprises
[86488] (a) increasing or generating the activity of a succinyl-CoA synthetase beta chain in the cytosol of a cell of a non-human organism or a part thereof, preferably a microorganism, a plant cell, a plant or a part thereof, as compared to a corresponding non-transformed wild type non-human organism or a part thereof; and
[86489] (b) growing the non-human organism or a part thereof under conditions which permit the production of myo-inositol or a composition comprising myo-inositol in said non-human organism or in the culture medium surrounding said non-human organism.

[86490] Accordingly, the present invention relates to a process for the production of fructose, which comprises
[86491] (a) increasing or generating the activity of a zinc transporter in the cytosol of a cell of a non-human organism or a part thereof, preferably a microorganism, a plant cell, a plant or a part thereof, as compared to a corresponding non-transformed wild type non-human organism or a part thereof; and
[86492] (b) growing the non-human organism or a part thereof under conditions which permit the production of fructose or a composition comprising fructose in said non-human organism or in the culture medium surrounding said non-human organism.

[86493] Accordingly, the present invention relates to a process for the production of glucose, which comprises
[86494] (a) increasing or generating the activity of a zinc transporter in the cytosol of a cell of a non-human organism or a part thereof, preferably a microorganism, a plant cell, a plant or a part thereof, as compared to a corresponding non-transformed wild type non-human organism or a part thereof; and
[86495] (b) growing the non-human organism or a part thereof under conditions which permit the production of glucose or a composition comprising glucose in said non-human organism or in the culture medium surrounding said non-human organism.

[86496] Accordingly, the present invention relates to a process for the production of glucose-1-phosphate, which comprises
[86497] (a) increasing or generating the activity of a zinc transporter in the cytosol of a cell of a non-human organism or a part thereof, preferably a microorganism, a plant cell, a plant or a part thereof, as compared to a corresponding non-transformed wild type non-human organism or a part thereof; and
[86498] (b) growing the non-human organism or a part thereof under conditions which permit the production of glucose-1-phosphate or a composition comprising glucose-1-phosphate in said non-human organism or in the culture medium surrounding said non-human organism.

[86499] Accordingly, the present invention relates to a process for the production of raffinose, which comprises
[86500] (a) increasing or generating the activity of a zinc transporter in the cytosol of a cell of a non-human organism or a part thereof, preferably a microorganism, a plant cell, a plant or a part thereof, as compared to a corresponding non-transformed wild type non-human organism or a part thereof; and
[86501] (b) growing the non-human organism or a part thereof under conditions which permit the production of raffinose or a composition comprising raffinose in said non-human organism or in the culture medium surrounding said non-human organism.

[86502] Accordingly, the present invention relates to a process for the production of glucose, which comprises
[86503] (a) increasing or generating the activity of a b0801-protein in the cytosol of a cell of a non-human organism or a part thereof, preferably a microorganism, a plant cell, a plant or a part thereof, as compared to a corresponding non-transformed wild type non-human organism or a part thereof; and
[86504] (b) growing the non-human organism or a part thereof under conditions which permit the production of glucose or a composition comprising glucose in said non-human organism or in the culture medium surrounding said non-human organism.

[86505] Accordingly, the present invention relates to a process for the production of sedoheptulose-7-phosphate, which comprises
[86506] (a) increasing or generating the activity of a putrescine transport system permease protein in the cytosol of a cell of a non-human organism or a part thereof, preferably a microorganism, a plant cell, a plant or a part thereof, as compared to a corresponding non-transformed wild type non-human organism or a part thereof; and
[86507] (b) growing the non-human organism or a part thereof under conditions which permit the production of sedoheptulose-7-phosphate or a composition comprising sedoheptulose-7-phosphate in said non-human organism or in the culture medium surrounding said non-human organism.

[86508] Accordingly, the present invention relates to a process for the production of raffinose, which comprises
[86509] (a) increasing or generating the activity of a leucyl/phenylalanyl-tRNA-protein transferase in the cytosol of a cell of a non-human organism or a part thereof, preferably a microorganism, a plant cell, a plant or a part thereof, as compared to a corresponding non-transformed wild type non-human organism or a part thereof; and
[86510] (b) growing the non-human organism or a part thereof under conditions which permit the production of raffinose or a composition comprising raffinose in said non-human organism or in the culture medium surrounding said non-human organism.

[86511] Accordingly, the present invention relates to a process for the production of glucose-1-phosphate, which comprises
[86512] (a) increasing or generating the activity of a b0970-protein in the cytosol of a cell of a non-human organism or a part thereof, preferably a microorganism, a plant cell, a plant or a part thereof, as compared to a corresponding non-transformed wild type non-human organism or a part thereof; and
[86513] (b) growing the non-human organism or a part thereof under conditions which permit the production of glucose-1-phosphate or a composition comprising glucose-1-phosphate in said non-human organism or in the culture medium surrounding said non-human organism.

[86514] Accordingly, the present invention relates to a process for the production of myo-inositol, which comprises
[86515] (a) increasing or generating the activity of a phosphoanhydride phosphorylase in the cytosol of a cell of a non-human organism or a part thereof, preferably a microorganism, a plant cell, a plant or a part thereof, as compared to a corresponding non-transformed wild type non-human organism or a part thereof; and
[86516] (b) growing the non-human organism or a part thereof under conditions which permit the production of myo-inositol or a composition comprising myo-inositol in said non-human organism or in the culture medium surrounding said non-human organism.

[86517] Accordingly, the present invention relates to a process for the production of fructose, which comprises
[86518] (a) increasing or generating the activity of a b1003-protein in the cytosol of a cell of a non-human organism or a part thereof, preferably a microorganism, a plant cell, a plant or a part thereof, as compared to a corresponding non-transformed wild type non-human organism or a part thereof; and
[86519] (b) growing the non-human organism or a part thereof under conditions which permit the production of fructose or a composition comprising fructose in said non-human organism or in the culture medium surrounding said non-human organism.

[86520] Accordingly, the present invention relates to a process for the production of glucose, which comprises
[86521] (a) increasing or generating the activity of a b1003-protein in the cytosol of a cell of a non-human organism or a part thereof, preferably a microorganism, a plant cell, a plant or a part thereof, as compared to a corresponding non-transformed wild type non-human organism or a part thereof; and
[86522] (b) growing the non-human organism or a part thereof under conditions which permit the production of glucose or a composition comprising glucose in said non-human organism or in the culture medium surrounding said non-human organism.

[86523] Accordingly, the present invention relates to a process for the production of glucose-1-phosphate, which comprises
[86524] (a) increasing or generating the activity of a b1003-protein in the cytosol of a cell of a non-human organism or a part thereof, preferably a microorganism, a plant cell, a plant or a part thereof, as compared to a corresponding non-transformed wild type non-human organism or a part thereof; and
[86525] (b) growing the non-human organism or a part thereof under conditions which permit the production of glucose-1-phosphate or a composition comprising glucose-1-phosphate in said non-human organism or in the culture medium surrounding said non-human organism.

[86526] Accordingly, the present invention relates to a process for the production of sedoheptulose-7-phosphate, which comprises
[86527] (a) increasing or generating the activity of a b1003-protein in the cytosol of a cell of a non-human organism or a part thereof, preferably a microorganism, a plant cell, a plant or a part thereof, as compared to a corresponding non-transformed wild type non-human organism or a part thereof; and
[86528] (b) growing the non-human organism or a part thereof under conditions which permit the production of sedoheptulose-7-phosphate or a composition comprising sedoheptulose-7-phosphate in said non-human organism or in the culture medium surrounding said non-human organism.

[86529] Accordingly, the present invention relates to a process for the production of sucrose, which comprises
[86530] (a) increasing or generating the activity of a b1003-protein in the cytosol of a cell of a non-human organism or a part thereof, preferably a microorganism, a plant cell, a plant or a part thereof, as compared to a corresponding non-transformed wild type non-human organism or a part thereof; and
[86531] (b) growing the non-human organism or a part thereof under conditions which permit the production of sucrose or a composition comprising sucrose in said non-human organism or in the culture medium surrounding said non-human organism.

[86532] Accordingly, the present invention relates to a process for the production of 3,4,5-trihydroxypentanoic acid, which comprises
[86533] (a) increasing or generating the activity of a b1046-protein in the cytosol of a cell of a non-human organism or a part thereof, preferably a microorganism, a plant cell, a plant or a part thereof, as compared to a corresponding non-transformed wild type non-human organism or a part thereof; and
[86534] (b) growing the non-human organism or a part thereof under conditions which permit the production of 3,4,5-trihydroxypentanoic acid or a composition comprising 3,4,5-trihydroxypentanoic acid in said non-human organism or in the culture medium surrounding said non-human organism.

[86535] Accordingly, the present invention relates to a process for the production of glucose-1-phosphate, which comprises
[86536] (a) increasing or generating the activity of a multidrug resistance protein in the cytosol of a cell of a non-human organism or a part thereof, preferably a microorganism, a plant cell, a plant or a part thereof, as compared to a corresponding non-transformed wild type non-human organism or a part thereof; and
[86537] (b) growing the non-human organism or a part thereof under conditions which permit the production of glucose-1-phosphate or a composition comprising glucose-1-phosphate in said non-human organism or in the culture medium surrounding said non-human organism.

[86538] Accordingly, the present invention relates to a process for the production of sucrose, which comprises
[86539] (a) increasing or generating the activity of a multidrug resistance protein in the cytosol of a cell of a non-human organism or a part thereof, preferably a microorganism, a plant cell, a plant or a part thereof, as compared to a corresponding non-transformed wild type non-human organism or a part thereof; and
[86540] (b) growing the non-human organism or a part thereof under conditions which permit the production of sucrose or a composition comprising sucrose in said non-human organism or in the culture medium surrounding said non-human organism.

[86541] Accordingly, the present invention relates to a process for the production of fructose, which comprises
[86542] (a) increasing or generating the activity of a outer membrane receptor protein precursor in the cytosol of a cell of a non-human organism or a part thereof, preferably a microorganism, a plant cell, a plant or a part thereof, as compared to a corresponding non-transformed wild type non-human organism or a part thereof; and
[86543] (b) growing the non-human organism or a part thereof under conditions which permit the production of fructose or a composition comprising fructose in said non-human organism or in the culture medium surrounding said non-human organism.

[86544] Accordingly, the present invention relates to a process for the production of glucose-1-phosphate, which comprises
[86545] (a) increasing or generating the activity of a adenylosuccinate lyase in the cytosol of a cell of a non-human organism or a part thereof, preferably a microorganism, a plant cell, a plant or a part thereof, as compared to a corresponding non-transformed wild type non-human organism or a part thereof; and
[86546] (b) growing the non-human organism or a part thereof under conditions which permit the production of glucose-1-phosphate or a composition comprising glucose-1-phosphate in said non-human organism or in the culture medium surrounding said non-human organism.

[86547] Accordingly, the present invention relates to a process for the production of glucose, which comprises
[86548] (a) increasing or generating the activity of a isocitrate dehydrogenase in the cytosol of a cell of a non-human organism or a part thereof, preferably a microorganism, a plant cell, a plant or a part thereof, as compared to a corresponding non-transformed wild type non-human organism or a part thereof; and
[86549] (b) growing the non-human organism or a part thereof under conditions which permit the production of glucose or a composition comprising glucose in said non-human organism or in the culture medium surrounding said non-human organism.

[86550] Accordingly, the present invention relates to a process for the production of glucose-1-phosphate, which comprises
[86551] (a) increasing or generating the activity of a b1137-protein in the cytosol of a cell of a non-human organism or a part thereof, preferably a microorganism, a plant cell, a plant or a part thereof, as compared to a corresponding non-transformed wild type non-human organism or a part thereof; and
[86552] (b) growing the non-human organism or a part thereof under conditions which permit the production of glucose-1-phosphate or a composition comprising glucose-1-phosphate in said non-human organism or in the culture medium surrounding said non-human organism.

[86553] Accordingly, the present invention relates to a process for the production of glucose-1-phosphate, which comprises
[86554] (a) increasing or generating the activity of a sodium/proton antiporter in the cytosol of a cell of a non-human organism or a part thereof, preferably a microorganism, a plant cell, a plant or a part thereof, as compared to a corresponding non-transformed wild type non-human organism or a part thereof; and
[86555] (b) growing the non-human organism or a part thereof under conditions which permit the production of glucose-1-phosphate or a composition comprising glucose-1-phosphate in said non-human organism or in the culture medium surrounding said non-human organism.

[86556] Accordingly, the present invention relates to a process for the production of glucose-1-phosphate, which comprises
[86557] (a) increasing or generating the activity of a b1214-protein in the cytosol of a cell of a non-human organism or a part thereof, preferably a microorganism, a plant cell, a plant or a part thereof, as compared to a corresponding non-transformed wild type non-human organism or a part thereof; and
[86558] (b) growing the non-human organism or a part thereof under conditions which permit the production of glucose-1-phosphate or a composition comprising glucose-1-phosphate in said non-human organism or in the culture medium surrounding said non-human organism.

[86559] Accordingly, the present invention relates to a process for the production of 3,4,5-trihydroxypentanoic acid, which comprises
[86560] (a) increasing or generating the activity of a b1214-protein in the cytosol of a cell of a non-human organism or a part thereof, preferably a microorganism, a plant cell, a plant or a part thereof, as compared to a corresponding non-transformed wild type non-human organism or a part thereof; and
[86561] (b) growing the non-human organism or a part thereof under conditions which permit the production of 3,4,5-trihydroxypentanoic acid or a composition comprising 3,4,5-trihydroxypentanoic acid in said non-human organism or in the culture medium surrounding said non-human organism.

[86562] Accordingly, the present invention relates to a process for the production of glucose-1-phosphate, which comprises
[86563] (a) increasing or generating the activity of a b1219-protein in the cytosol of a cell of a non-human organism or a part thereof, preferably a microorganism, a plant cell, a plant or a part thereof, as compared to a corresponding non-transformed wild type non-human organism or a part thereof; and
[86564] (b) growing the non-human organism or a part thereof under conditions which permit the production of glucose-1-phosphate or a composition comprising glucose-1-phosphate in said non-human organism or in the culture medium surrounding said non-human organism.

[86565] Accordingly, the present invention relates to a process for the production of myo-inositol, which comprises
[86566] (a) increasing or generating the activity of a b1219-protein in the cytosol of a cell of a non-human organism or a part thereof, preferably a microorganism, a plant cell, a plant or a part thereof, as compared to a corresponding non-transformed wild type non-human organism or a part thereof; and
[86567] (b) growing the non-human organism or a part thereof under conditions which permit the production of myo-inositol or a composition comprising myo-inositol in said non-human organism or in the culture medium surrounding said non-human organism.

[86568] Accordingly, the present invention relates to a process for the production of 3,4,5-trihydroxypentanoic acid, which comprises
[86569] (a) increasing or generating the activity of a b1219-protein in the cytosol of a cell of a non-human organism or a part thereof, preferably a microorganism, a plant cell, a plant or a part thereof, as compared to a corresponding non-transformed wild type non-human organism or a part thereof; and
[86570] (b) growing the non-human organism or a part thereof under conditions which permit the production of 3,4,5-trihydroxypentanoic acid or a composition comprising 3,4,5-trihydroxypentanoic acid in said non-human organism or in the culture medium surrounding said non-human organism.

[86571] Accordingly, the present invention relates to a process for the production of myo-inositol, which comprises
[86572] (a) increasing or generating the activity of a b1234-protein in the cytosol of a cell of a non-human organism or a part thereof, preferably a microorganism, a plant cell, a plant or a part thereof, as compared to a corresponding non-transformed wild type non-human organism or a part thereof; and
[86573] (b) growing the non-human organism or a part thereof under conditions which permit the production of myo-inositol or a composition comprising myo-inositol in said non-human organism or in the culture medium surrounding said non-human organism.

[86574] Accordingly, the present invention relates to a process for the production of galactinol, which comprises
[86575] (a) increasing or generating the activity of a cardiolipin synthase in the cytosol of a cell of a non-human organism or a part thereof, preferably a microorganism, a plant cell, a plant or a part thereof, as compared to a corresponding non-transformed wild type non-human organism or a part thereof; and
[86576] (b) growing the non-human organism or a part thereof under conditions which permit the production of galactinol or a composition comprising galactinol in said non-human organism or in the culture medium surrounding said non-human organism.

[86577] Accordingly, the present invention relates to a process for the production of galactitol, which comprises
[86578] (a) increasing or generating the activity of a cardiolipin synthase in the cytosol of a cell of a non-human organism or a part thereof, preferably a microorganism, a plant cell, a plant or a part thereof, as compared to a corresponding non-transformed wild type non-human organism or a part thereof; and
[86579] (b) growing the non-human organism or a part thereof under conditions which permit the production of galactitol or a composition comprising galactitol in said non-human organism or in the culture medium surrounding said non-human organism.

[86580] Accordingly, the present invention relates to a process for the production of sorbitol, which comprises
[86581] (a) increasing or generating the activity of a cardiolipin synthase in the cytosol of a cell of a non-human organism or a part thereof, preferably a microorganism, a plant cell, a plant or a part thereof, as compared to a corresponding non-transformed wild type non-human organism or a part thereof; and
[86582] (b) growing the non-human organism or a part thereof under conditions which permit the production of sorbitol or a composition comprising sorbitol in said non-human organism or in the culture medium surrounding said non-human organism.

[86583] Accordingly, the present invention relates to a process for the production of 3,4,5-trihydroxypentanoic acid, which comprises
[86584] (a) increasing or generating the activity of a intracellular septation protein in the cytosol of a cell of a non-human organism or a part thereof, preferably a microorganism, a plant cell, a plant or a part thereof, as compared to a corresponding non-transformed wild type non-human organism or a part thereof; and
[86585] (b) growing the non-human organism or a part thereof under conditions which permit the production of 3,4,5-trihydroxypentanoic acid or a composition comprising 3,4,5-trihydroxypentanoic acid in said non-human organism or in the culture medium surrounding said non-human organism.

[86586] Accordingly, the present invention relates to a process for the production of fructose, which comprises
[86587] (a) increasing or generating the activity of a membrane protein in the cytosol of a cell of a non-human organism or a part thereof, preferably a microorganism, a plant cell, a plant or a part thereof, as compared to a corresponding non-transformed wild type non-human organism or a part thereof; and
[86588] (b) growing the non-human organism or a part thereof under conditions which permit the production of fructose or a composition comprising fructose in said non-human organism or in the culture medium surrounding said non-human organism.

[86589] Accordingly, the present invention relates to a process for the production of glucose, which comprises
[86590] (a) increasing or generating the activity of a membrane protein in the cytosol of a cell of a non-human organism or a part thereof, preferably a microorganism, a plant cell, a plant or a part thereof, as compared to a corresponding non-transformed wild type non-human organism or a part thereof; and
[86591] (b) growing the non-human organism or a part thereof under conditions which permit the production of glucose or a composition comprising glucose in said non-human organism or in the culture medium surrounding said non-human organism.

[86592] Accordingly, the present invention relates to a process for the production of raffinose, which comprises
[86593] (a) increasing or generating the activity of a membrane protein in the cytosol of a cell of a non-human organism or a part thereof, preferably a microorganism, a plant cell, a plant or a part thereof, as compared to a corresponding non-transformed wild type non-human organism or a part thereof; and
[86594] (b) growing the non-human organism or a part thereof under conditions which permit the production of raffinose or a composition comprising raffinose in said non-human organism or in the culture medium surrounding said non-human organism.

[86595] Accordingly, the present invention relates to a process for the production of sucrose, which comprises
[86596] (a) increasing or generating the activity of a membrane protein in the cytosol of a cell of a non-human organism or a part thereof, preferably a microorganism, a plant cell, a plant or a part thereof, as compared to a corresponding non-transformed wild type non-human organism or a part thereof; and
[86597] (b) growing the non-human organism or a part thereof under conditions which permit the production of sucrose or a composition comprising sucrose in said non-human organism or in the culture medium surrounding said non-human organism.

[86598] Accordingly, the present invention relates to a process for the production of myo-inositol, which comprises
[86599] (a) increasing or generating the activity of a tryptophan biosynthesis protein in the cytosol of a cell of a non-human organism or a part thereof, preferably a microorganism, a plant cell, a plant or a part thereof, as compared to a corresponding non-transformed wild type non-human organism or a part thereof; and
[86600] (b) growing the non-human organism or a part thereof under conditions which permit the production of myo-inositol or a composition comprising myo-inositol in said non-human organism or in the culture medium surrounding said non-human organism.

[86601] Accordingly, the present invention relates to a process for the production of fructose, which comprises
[86602] (a) increasing or generating the activity of a b1285-protein in the cytosol of a cell of a non-human organism or a part thereof, preferably a microorganism, a plant cell, a plant or a part thereof, as compared to a corresponding non-transformed wild type non-human organism or a part thereof; and
[86603] (b) growing the non-human organism or a part thereof under conditions which permit the production of fructose or a composition comprising fructose in said non-human organism or in the culture medium surrounding said non-human organism.

[86604] Accordingly, the present invention relates to a process for the production of glucose-1-phosphate, which comprises
[86605] (a) increasing or generating the activity of a phage-related repressor protein in the cytosol of a cell of a non-human organism or a part thereof, preferably a microorganism, a plant cell, a plant or a part thereof, as compared to a corresponding non-transformed wild type non-human organism or a part thereof; and
[86606] (b) growing the non-human organism or a part thereof under conditions which permit the production of glucose-1-phosphate or a composition comprising glucose-1-phosphate in said non-human organism or in the culture medium surrounding said non-human organism.

[86607] Accordingly, the present invention relates to a process for the production of glucose-1-phosphate, which comprises
[86608] (a) increasing or generating the activity of a b1357-protein in the cytosol of a cell of a non-human organism or a part thereof, preferably a microorganism, a plant cell, a plant or a part thereof, as compared to a corresponding non-transformed wild type non-human organism or a part thereof; and
[86609] (b) growing the non-human organism or a part thereof under conditions which permit the production of glucose-1-phosphate or a composition comprising glucose-1-phosphate in said non-human organism or in the culture medium surrounding said non-human organism.

[86610] Accordingly, the present invention relates to a process for the production of glucose, which comprises
[86611] (a) increasing or generating the activity of a phenylacetic acid degradation protein in the cytosol of a cell of a non-human organism or a part thereof, preferably a microorganism, a plant cell, a plant or a part thereof, as compared to a corresponding non-transformed wild type non-human organism or a part thereof; and
[86612] (b) growing the non-human organism or a part thereof under conditions which permit the production of glucose or a composition comprising glucose in said non-human organism or in the culture medium surrounding said non-human organism.

[86613] Accordingly, the present invention relates to a process for the production of 3,4,5-trihydroxypentanoic acid, which comprises
[86614] (a) increasing or generating the activity of a phenylacetic acid degradation protein in the cytosol of a cell of a non-human organism or a part thereof, preferably a microorganism, a plant cell, a plant or a part thereof, as compared to a corresponding non-transformed wild type non-human organism or a part thereof; and
[86615] (b) growing the non-human organism or a part thereof under conditions which permit the production of 3,4,5-trihydroxypentanoic acid or a composition comprising 3,4,5-trihydroxypentanoic acid in said non-human organism or in the culture medium surrounding said non-human organism.

[86616] Accordingly, the present invention relates to a process for the production of sedoheptulose-7-phosphate, which comprises
[86617] (a) increasing or generating the activity of a b1410-protein in the cytosol of a cell of a non-human organism or a part thereof, preferably a microorganism, a plant cell, a plant or a part thereof, as compared to a corresponding non-transformed wild type non-human organism or a part thereof; and
[86618] (b) growing the non-human organism or a part thereof under conditions which permit the production of sedoheptulose-7-phosphate or a composition comprising sedoheptulose-7-phosphate in said non-human organism or in the culture medium surrounding said non-human organism.

[86619] Accordingly, the present invention relates to a process for the production of myo-inositol, which comprises
[86620] (a) increasing or generating the activity of a b1425-protein in the cytosol of a cell of a non-human organism or a part thereof, preferably a microorganism, a plant cell, a plant or a part thereof, as compared to a corresponding non-transformed wild type non-human organism or a part thereof; and
[86621] (b) growing the non-human organism or a part thereof under conditions which permit the production of myo-inositol or a composition comprising myo-inositol in said non-human organism or in the culture medium surrounding said non-human organism.

[86622] Accordingly, the present invention relates to a process for the production of glucose-1-phosphate, which comprises
[86623] (a) increasing or generating the activity of a lipoprotein precursor in the cytosol of a cell of a non-human organism or a part thereof, preferably a microorganism, a plant cell, a plant or a part thereof, as compared to a corresponding non-transformed wild type non-human organism or a part thereof; and
[86624] (b) growing the non-human organism or a part thereof under conditions which permit the production of glucose-1-phosphate or a composition comprising glucose-1-phosphate in said non-human organism or in the culture medium surrounding said non-human organism.

[86625] Accordingly, the present invention relates to a process for the production of sedoheptulose-7-phosphate, which comprises
[86626] (a) increasing or generating the activity of a lipoprotein precursor in the cytosol of a cell of a non-human organism or a part thereof, preferably a microorganism, a plant cell, a plant or a part thereof, as compared to a corresponding non-transformed wild type non-human organism or a part thereof; and
[86627] (b) growing the non-human organism or a part thereof under conditions which permit the production of sedoheptulose-7-phosphate or a composition comprising sedoheptulose-7-phosphate in said non-human organism or in the culture medium surrounding said non-human organism.

[86628] Accordingly, the present invention relates to a process for the production of 3,4,5-trihydroxypentanoic acid, which comprises
[86629] (a) increasing or generating the activity of a lipoprotein precursor in the cytosol of a cell of a non-human organism or a part thereof, preferably a microorganism, a plant cell, a plant or a part thereof, as compared to a corresponding non-transformed wild type non-human organism or a part thereof; and
[86630] (b) growing the non-human organism or a part thereof under conditions which permit the production of 3,4,5-trihydroxypentanoic acid or a composition comprising 3,4,5-trihydroxypentanoic acid in said non-human organism or in the culture medium surrounding said non-human organism.

[86631] Accordingly, the present invention relates to a process for the production of 3,4,5-trihydroxypentanoic acid, which comprises
[86632] (a) increasing or generating the activity of a b1445-protein in the cytosol of a cell of a non-human organism or a part thereof, preferably a microorganism, a plant cell, a plant or a part thereof, as compared to a corresponding non-transformed wild type non-human organism or a part thereof; and
[86633] (b) growing the non-human organism or a part thereof under conditions which permit the production of 3,4,5-trihydroxypentanoic acid or a composition comprising 3,4,5-trihydroxypentanoic acid in said non-human organism or in the culture medium surrounding said non-human organism.

[86634] Accordingly, the present invention relates to a process for the production of glucose-1-phosphate, which comprises
[86635] (a) increasing or generating the activity of a b1470-protein in the cytosol of a cell of a non-human organism or a part thereof, preferably a microorganism, a plant cell, a plant or a part thereof, as compared to a corresponding non-transformed wild type non-human organism or a part thereof; and
[86636] (b) growing the non-human organism or a part thereof under conditions which permit the production of glucose-1-phosphate or a composition comprising glucose-1-phosphate in said non-human organism or in the culture medium surrounding said non-human organism.

[86637] Accordingly, the present invention relates to a process for the production of fructose, which comprises
[86638] (a) increasing or generating the activity of a b1522-protein in the cytosol of a cell of a non-human organism or a part thereof, preferably a microorganism, a plant cell, a plant or a part thereof, as compared to a corresponding non-transformed wild type non-human organism or a part thereof; and
[86639] (b) growing the non-human organism or a part thereof under conditions which permit the production of fructose or a composition comprising fructose in said non-human organism or in the culture medium surrounding said non-human organism.

[86640] Accordingly, the present invention relates to a process for the production of glucose-1-phosphate, which comprises
[86641] (a) increasing or generating the activity of a b1522-protein in the cytosol of a cell of a non-human organism or a part thereof, preferably a microorganism, a plant cell, a plant or a part thereof, as compared to a corresponding non-transformed wild type non-human organism or a part thereof; and
[86642] (b) growing the non-human organism or a part thereof under conditions which permit the production of glucose-1-phosphate or a composition comprising glucose-1-phosphate in said non-human organism or in the culture medium surrounding said non-human organism.

[86643] Accordingly, the present invention relates to a process for the production of glucose-1-phosphate, which comprises
[86644] (a) increasing or generating the activity of a b1556-protein in the cytosol of a cell of a non-human organism or a part thereof, preferably a microorganism, a plant cell, a plant or a part thereof, as compared to a corresponding non-transformed wild type non-human organism or a part thereof; and
[86645] (b) growing the non-human organism or a part thereof under conditions which permit the production of glucose-1-phosphate or a composition comprising glucose-1-phosphate in said non-human organism or in the culture medium surrounding said non-human organism.

[86646] Accordingly, the present invention relates to a process for the production of sedoheptulose-7-phosphate, which comprises
[86647] (a) increasing or generating the activity of a b1556-protein in the cytosol of a cell of a non-human organism or a part thereof, preferably a microorganism, a plant cell, a plant or a part thereof, as compared to a corresponding non-transformed wild type non-human organism or a part thereof; and
[86648] (b) growing the non-human organism or a part thereof under conditions which permit the production of sedoheptulose-7-phosphate or a composition comprising sedoheptulose-7-phosphate in said non-human organism or in the culture medium surrounding said non-human organism.

[86649] Accordingly, the present invention relates to a process for the production of glucose-1-phosphate, which comprises
[86650] (a) increasing or generating the activity of a b1583-protein in the cytosol of a cell of a non-human organism or a part thereof, preferably a microorganism, a plant cell, a plant or a part thereof, as compared to a corresponding non-transformed wild type non-human organism or a part thereof; and
[86651] (b) growing the non-human organism or a part thereof under conditions which permit the production of glucose-1-phosphate or a composition comprising glucose-1-phosphate in said non-human organism or in the culture medium surrounding said non-human organism.

[86652] Accordingly, the present invention relates to a process for the production of glucose-1-phosphate, which comprises
[86653] (a) increasing or generating the activity of a Fe—S subunit of oxidoreductase in the cytosol of a cell of a non-human organism or a part thereof, preferably a microorganism, a plant cell, a plant or a part thereof, as compared to a corresponding non-transformed wild type non-human organism or a part thereof; and
[86654] (b) growing the non-human organism or a part thereof under conditions which permit the production of glucose-1-phosphate or a composition comprising glucose-1-phosphate in said non-human organism or in the culture medium surrounding said non-human organism.

[86655] Accordingly, the present invention relates to a process for the production of 3,4,5-trihydroxypentanoic acid, which comprises
[86656] (a) increasing or generating the activity of a Fe—S subunit of oxidoreductase in the cytosol of a cell of a non-human organism or a part thereof, preferably a microorganism, a plant cell, a plant or a part thereof, as compared to a corresponding non-transformed wild type non-human organism or a part thereof; and
[86657] (b) growing the non-human organism or a part thereof under conditions which permit the production of 3,4,5-trihydroxypentanoic acid or a composition comprising 3,4,5-trihydroxypentanoic acid in said non-human organism or in the culture medium surrounding said non-human organism.

[86658] Accordingly, the present invention relates to a process for the production of fructose, which comprises
[86659] (a) increasing or generating the activity of a acid shock protein in the cytosol of a cell of a non-human organism or a part thereof, preferably a microorganism, a plant cell, a plant or a part thereof, as compared to a corresponding non-transformed wild type non-human organism or a part thereof; and
[86660] (b) growing the non-human organism or a part thereof under conditions which permit the production of fructose or a composition comprising fructose in said non-human organism or in the culture medium surrounding said non-human organism.

[86661] Accordingly, the present invention relates to a process for the production of glucose, which comprises
[86662] (a) increasing or generating the activity of a acid shock protein in the cytosol of a cell of a non-human organism or a part thereof, preferably a microorganism, a plant cell, a plant or a part thereof, as compared to a corresponding non-transformed wild type non-human organism or a part thereof; and
[86663] (b) growing the non-human organism or a part thereof under conditions which permit the production of glucose or a composition comprising glucose in said non-human organism or in the culture medium surrounding said non-human organism.

[86664] Accordingly, the present invention relates to a process for the production of glucose-1-phosphate, which comprises
[86665] (a) increasing or generating the activity of a acid shock protein in the cytosol of a cell of a non-human organism or a part thereof, preferably a microorganism, a plant cell, a plant or a part thereof, as compared to a corresponding non-transformed wild type non-human organism or a part thereof; and
[86666] (b) growing the non-human organism or a part thereof under conditions which permit the production of glucose-1-phosphate or a composition comprising glucose-1-phosphate in said non-human organism or in the culture medium surrounding said non-human organism.

[86667] Accordingly, the present invention relates to a process for the production of myo-inositol, which comprises
[86668] (a) increasing or generating the activity of a acid shock protein in the cytosol of a cell of a non-human organism or a part thereof, preferably a microorganism, a plant cell, a plant or a part thereof, as compared to a corresponding non-transformed wild type non-human organism or a part thereof; and
[86669] (b) growing the non-human organism or a part thereof under conditions which permit the production of myo-inositol or a composition comprising myo-inositol in said non-human organism or in the culture medium surrounding said non-human organism.

[86670] Accordingly, the present invention relates to a process for the production of raffinose, which comprises
[86671] (a) increasing or generating the activity of a acid shock protein in the cytosol of a cell of a non-human organism or a part thereof, preferably a microorganism, a plant cell, a plant or a part thereof, as compared to a corresponding non-transformed wild type non-human organism or a part thereof; and
[86672] (b) growing the non-human organism or a part thereof under conditions which permit the production of raffinose or a composition comprising raffinose in said non-human organism or in the culture medium surrounding said non-human organism.

[86673] Accordingly, the present invention relates to a process for the production of fructose, which comprises
[86674] (a) increasing or generating the activity of a phosphotransferase system component in the cytosol of a cell of a non-human organism or a part thereof, preferably a microorganism, a plant cell, a plant or a part thereof, as compared to a corresponding non-transformed wild type non-human organism or a part thereof; and
[86675] (b) growing the non-human organism or a part thereof under conditions which permit the production of fructose or a composition comprising fructose in said non-human organism or in the culture medium surrounding said non-human organism.

[86676] Accordingly, the present invention relates to a process for the production of glucose, which comprises
[86677] (a) increasing or generating the activity of a phosphotransferase system component in the cytosol of a cell of a non-human organism or a part thereof, preferably a microorganism, a plant cell, a plant or a part thereof, as compared to a corresponding non-transformed wild type non-human organism or a part thereof; and
[86678] (b) growing the non-human organism or a part thereof under conditions which permit the production of glucose or a composition comprising glucose in said non-human organism or in the culture medium surrounding said non-human organism.

[86679] Accordingly, the present invention relates to a process for the production of glucose, which comprises
[86680] (a) increasing or generating the activity of a electron transport complex protein in the cytosol of a cell of a non-human organism or a part thereof, preferably a microorganism, a plant cell, a plant or a part thereof, as compared to a corresponding non-transformed wild type non-human organism or a part thereof; and
[86681] (b) growing the non-human organism or a part thereof under conditions which permit the production of glucose or a composition comprising glucose in said non-human organism or in the culture medium surrounding said non-human organism.

[86682] Accordingly, the present invention relates to a process for the production of glucose-1-phosphate, which comprises
[86683] (a) increasing or generating the activity of a electron transport complex protein in the cytosol of a cell of a non-human organism or a part thereof, preferably a microorganism, a plant cell, a plant or a part thereof, as compared to a corresponding non-transformed wild type non-human organism or a part thereof; and
[86684] (b) growing the non-human organism or a part thereof under conditions which permit the production of glucose-1-phosphate or a composition comprising glucose-1-phosphate in said non-human organism or in the culture medium surrounding said non-human organism.

[86685] Accordingly, the present invention relates to a process for the production of 3,4,5-trihydroxypentanoic acid, which comprises
[86686] (a) increasing or generating the activity of a electron transport complex protein in the cytosol of a cell of a non-human organism or a part thereof, preferably a microorganism, a plant cell, a plant or a part thereof, as compared to a corresponding non-transformed wild type non-human organism or a part thereof; and
[86687] (b) growing the non-human organism or a part thereof under conditions which permit the production of 3,4,5-trihydroxypentanoic acid or a composition comprising 3,4,5-trihydroxypentanoic acid in said non-human organism or in the culture medium surrounding said non-human organism.

[86688] Accordingly, the present invention relates to a process for the production of myo-inositol, which comprises
[86689] (a) increasing or generating the activity of a methylglyoxalase in the cytosol of a cell of a non-human organism or a part thereof, preferably a microorganism, a plant cell, a plant or a part thereof, as compared to a corresponding non-transformed wild type non-human organism or a part thereof; and
[86690] (b) growing the non-human organism or a part thereof under conditions which permit the production of myo-inositol or a composition comprising myo-inositol in said non-human organism or in the culture medium surrounding said non-human organism.

[86691] Accordingly, the present invention relates to a process for the production of myo-inositol, which comprises
[86692] (a) increasing or generating the activity of a b1670-protein in the cytosol of a cell of a non-human organism or a part thereof, preferably a microorganism, a plant cell, a plant or a part thereof, as compared to a corresponding non-transformed wild type non-human organism or a part thereof; and
[86693] (b) growing the non-human organism or a part thereof under conditions which permit the production of myo-inositol or a composition comprising myo-inositol in said non-human organism or in the culture medium surrounding said non-human organism.

[86694] Accordingly, the present invention relates to a process for the production of fructose, which comprises
[86695] (a) increasing or generating the activity of a ABC transporter permease protein in the cytosol of a cell of a non-human organism or a part thereof, preferably a microorganism, a plant cell, a plant or a part thereof, as compared to a corresponding non-transformed wild type non-human organism or a part thereof; and
[86696] (b) growing the non-human organism or a part thereof under conditions which permit the production of fructose or a composition comprising fructose in said non-human organism or in the culture medium surrounding said non-human organism.

[86697] Accordingly, the present invention relates to a process for the production of myo-inositol, which comprises
[86698] (a) increasing or generating the activity of a transport protein in the cytosol of a cell of a non-human organism or a part thereof, preferably a microorganism, a plant cell, a plant or a part thereof, as compared to a corresponding non-transformed wild type non-human organism or a part thereof; and
[86699] (b) growing the non-human organism or a part thereof under conditions which permit the production of myo-inositol or a composition comprising myo-inositol in said non-human organism or in the culture medium surrounding said non-human organism.

[86700] Accordingly, the present invention relates to a process for the production of fructose, which comprises
[86701] (a) increasing or generating the activity of a b1796-protein in the cytosol of a cell of a non-human organism or a part thereof, preferably a microorganism, a plant cell, a plant or a part thereof, as compared to a corresponding non-transformed wild type non-human organism or a part thereof; and
[86702] (b) growing the non-human organism or a part thereof under conditions which permit the production of fructose or a composition comprising fructose in said non-human organism or in the culture medium surrounding said non-human organism.

[86703] Accordingly, the present invention relates to a process for the production of myo-inositol, which comprises
[86704] (a) increasing or generating the activity of a para-aminobenzoate synthase component I in the cytosol of a cell of a non-human organism or a part thereof, preferably a microorganism, a plant cell, a plant or a part thereof, as compared to a corresponding non-transformed wild type non-human organism or a part thereof; and
[86705] (b) growing the non-human organism or a part thereof under conditions which permit the production of myo-inositol or a composition comprising myo-inositol in said non-human organism or in the culture medium surrounding said non-human organism.

[86706] Accordingly, the present invention relates to a process for the production of galactitol, which comprises
[86707] (a) increasing or generating the activity of a L-serine dehydratase in the cytosol of a cell of a non-human organism or a part thereof, preferably a microorganism, a plant cell, a plant or a part thereof, as compared to a corresponding non-transformed wild type non-human organism or a part thereof; and
[86708] (b) growing the non-human organism or a part thereof under conditions which permit the production of galactitol or a composition comprising galactitol in said non-human organism or in the culture medium surrounding said non-human organism.

[86709] Accordingly, the present invention relates to a process for the production of sorbitol, which comprises
[86710] (a) increasing or generating the activity of a L-serine dehydratase in the cytosol of a cell of a non-human organism or a part thereof, preferably a microorganism, a plant cell, a plant or a part thereof, as compared to a corresponding non-transformed wild type non-human organism or a part thereof; and
[86711] (b) growing the non-human organism or a part thereof under conditions which permit the production of sorbitol or a composition comprising sorbitol in said non-human organism or in the culture medium surrounding said non-human organism.

[86712] Accordingly, the present invention relates to a process for the production of myo-inositol, which comprises
[86713] (a) increasing or generating the activity of a protease in the cytosol of a cell of a non-human organism or a part thereof, preferably a microorganism, a plant cell, a plant or a part thereof, as compared to a corresponding non-transformed wild type non-human organism or a part thereof; and
[86714] (b) growing the non-human organism or a part thereof under conditions which permit the production of myo-inositol or a composition comprising myo-inositol in said non-human organism or in the culture medium surrounding said non-human organism.

[86715] Accordingly, the present invention relates to a process for the production of erythrol, which comprises
[86716] (a) increasing or generating the activity of a pyruvate kinase in the cytosol of a cell of a non-human organism or a part thereof, preferably a microorganism, a plant cell, a plant or a part thereof, as compared to a corresponding non-transformed wild type non-human organism or a part thereof; and
[86717] (b) growing the non-human organism or a part thereof under conditions which permit the production of erythrol or a composition comprising erythrol in said non-human organism or in the culture medium surrounding said non-human organism.

[86718] Accordingly, the present invention relates to a process for the production of myo-inositol, which comprises
[86719] (a) increasing or generating the activity of a pyruvate kinase in the cytosol of a cell of a non-human organism or a part thereof, preferably a microorganism, a plant cell, a plant or a part thereof, as compared to a corresponding non-transformed wild type non-human organism or a part thereof; and
[86720] (b) growing the non-human organism or a part thereof under conditions which permit the production of myo-inositol or a composition comprising myo-inositol in said non-human organism or in the culture medium surrounding said non-human organism.

[86721] Accordingly, the present invention relates to a process for the production of sorbitol, which comprises
[86722] (a) increasing or generating the activity of a pyruvate kinase in the cytosol of a cell of a non-human organism or a part thereof, preferably a microorganism, a plant cell, a plant or a part thereof, as compared to a corresponding non-transformed wild type non-human organism or a part thereof; and
[86723] (b) growing the non-human organism or a part thereof under conditions which permit the production of sorbitol or a composition comprising sorbitol in said non-human organism or in the culture medium surrounding said non-human organism.

[86724] Accordingly, the present invention relates to a process for the production of fructose, which comprises
[86725] (a) increasing or generating the activity of a dATP pyrophosphohydrolase in the cytosol of a cell of a non-human organism or a part thereof, preferably a microorganism, a plant cell, a plant or a part thereof, as compared to a corresponding non-transformed wild type non-human organism or a part thereof; and
[86726] (b) growing the non-human organism or a part thereof under conditions which permit the production of fructose or a composition comprising fructose in said non-human organism or in the culture medium surrounding said non-human organism.

[86727] Accordingly, the present invention relates to a process for the production of glucose-1-phosphate, which comprises
[86728] (a) increasing or generating the activity of a trehalose-6-phosphate synthase in the cytosol of a cell of a non-human organism or a part thereof, preferably a microorganism, a plant cell, a plant or a part thereof, as compared to a corresponding non-transformed wild type non-human organism or a part thereof; and
[86729] (b) growing the non-human organism or a part thereof under conditions which permit the production of glucose-1-phosphate or a composition comprising glucose-1-phosphate in said non-human organism or in the culture medium surrounding said non-human organism.

[86730] Accordingly, the present invention relates to a process for the production of trehalose, which comprises
[86731] (a) increasing or generating the activity of a trehalose-6-phosphate synthase in the cytosol of a cell of a non-human organism or a part thereof, preferably a microorganism, a plant cell, a plant or a part thereof, as compared to a corresponding non-transformed wild type non-human organism or a part thereof; and
[86732] (b) growing the non-human organism or a part thereof under conditions which permit the production of trehalose or a composition comprising trehalose in said non-human organism or in the culture medium surrounding said non-human organism.

[86733] Accordingly, the present invention relates to a process for the production of erythrol, which comprises
[86734] (a) increasing or generating the activity of a trehalose-phosphatase in the cytosol of a cell of a non-human organism or a part thereof, preferably a microorganism, a plant cell, a plant or a part thereof, as compared to a corresponding non-transformed wild type non-human organism or a part thereof; and
[86735] (b) growing the non-human organism or a part thereof under conditions which permit the production of erythrol or a composition comprising erythrol in said non-human organism or in the culture medium surrounding said non-human organism.

[86736] Accordingly, the present invention relates to a process for the production of fructose, which comprises
[86737] (a) increasing or generating the activity of a trehalose-phosphatase in the cytosol of a cell of a non-human organism or a part thereof, preferably a microorganism, a plant cell, a plant or a part thereof, as compared to a corresponding non-transformed wild type non-human organism or a part thereof; and
[86738] (b) growing the non-human organism or a part thereof under conditions which permit the production of fructose or a composition comprising fructose in said non-human organism or in the culture medium surrounding said non-human organism.

[86739] Accordingly, the present invention relates to a process for the production of glucose, which comprises
[86740] (a) increasing or generating the activity of a trehalose-phosphatase in the cytosol of a cell of a non-human organism or a part thereof, preferably a microorganism, a plant cell, a plant or a part thereof, as compared to a corresponding non-transformed wild type non-human organism or a part thereof; and
[86741] (b) growing the non-human organism or a part thereof under conditions which permit the production of glucose or a composition comprising glucose in said non-human organism or in the culture medium surrounding said non-human organism.

[86742] Accordingly, the present invention relates to a process for the production of sucrose, which comprises
[86743] (a) increasing or generating the activity of a trehalose-phosphatase in the cytosol of a cell of a non-human organism or a part thereof, preferably a microorganism, a plant cell, a plant or a part thereof, as compared to a corresponding non-transformed wild type non-human organism or a part thereof; and
[86744] (b) growing the non-human organism or a part thereof under conditions which permit the production of sucrose or a composition comprising sucrose in said non-human organism or in the culture medium surrounding said non-human organism.

[86745] Accordingly, the present invention relates to a process for the production of raffinose, which comprises
[86746] (a) increasing or generating the activity of a b1898-protein in the cytosol of a cell of a non-human organism or a part thereof, preferably a microorganism, a plant cell, a plant or a part thereof, as compared to a corresponding non-transformed wild type non-human organism or a part thereof; and
[86747] (b) growing the non-human organism or a part thereof under conditions which permit the production of raffinose or a composition comprising raffinose in said non-human organism or in the culture medium surrounding said non-human organism.

[86748] Accordingly, the present invention relates to a process for the production of glucose-1-phosphate, which comprises
[86749] (a) increasing or generating the activity of a acetyltransferase in the cytosol of a cell of a non-human organism or a part thereof, preferably a microorganism, a plant cell, a plant or a part thereof, as compared to a corresponding non-transformed wild type non-human organism or a part thereof; and
[86750] (b) growing the non-human organism or a part thereof under conditions which permit the production of glucose-1-phosphate or a composition comprising glucose-1-phosphate in said non-human organism or in the culture medium surrounding said non-human organism.

[86751] Accordingly, the present invention relates to a process for the production of 3,4,5-trihydroxypentanoic acid, which comprises
[86752] (a) increasing or generating the activity of a acetyltransferase in the cytosol of a cell of a non-human organism or a part thereof, preferably a microorganism, a plant cell, a plant or a part thereof, as compared to a corresponding non-transformed wild type non-human organism or a part thereof; and
[86753] (b) growing the non-human organism or a part thereof under conditions which permit the production of 3,4,5-trihydroxypentanoic acid or a composition comprising 3,4,5-trihydroxypentanoic acid in said non-human organism or in the culture medium surrounding said non-human organism.

[86754] Accordingly, the present invention relates to a process for the production of glucose, which comprises
[86755] (a) increasing or generating the activity of a flagellar M-ring protein in the cytosol of a cell of a non-human organism or a part thereof, preferably a microorganism, a plant cell, a plant or a part thereof, as compared to a corresponding non-transformed wild type non-human organism or a part thereof; and
[86756] (b) growing the non-human organism or a part thereof under conditions which permit the production of glucose or a composition comprising glucose in said non-human organism or in the culture medium surrounding said non-human organism.

[86757] Accordingly, the present invention relates to a process for the production of myo-inositol, which comprises
[86758] (a) increasing or generating the activity of a flagellar M-ring protein in the cytosol of a cell of a non-human organism or a part thereof, preferably a microorganism, a plant cell, a plant or a part thereof, as compared to a corresponding non-transformed wild type non-human organism or a part thereof; and
[86759] (b) growing the non-human organism or a part thereof under conditions which permit the production of myo-inositol or a composition comprising myo-inositol in said non-human organism or in the culture medium surrounding said non-human organism.

[86760] Accordingly, the present invention relates to a process for the production of fructose, which comprises
[86761] (a) increasing or generating the activity of a O-antigen chain length determinant in the cytosol of a cell of a non-human organism or a part thereof, preferably a microorganism, a plant cell, a plant or a part thereof, as compared to a corresponding non-transformed wild type non-human organism or a part thereof; and
[86762] (b) growing the non-human organism or a part thereof under conditions which permit the production of fructose or a composition comprising fructose in said non-human organism or in the culture medium surrounding said non-human organism.

[86763] Accordingly, the present invention relates to a process for the production of glucose, which comprises
[86764] (a) increasing or generating the activity of a b2032-protein in the cytosol of a cell of a non-human organism or a part thereof, preferably a microorganism, a plant cell, a plant or a part thereof, as compared to a corresponding non-transformed wild type non-human organism or a part thereof; and
[86765] (b) growing the non-human organism or a part thereof under conditions which permit the production of glucose or a composition comprising glucose in said non-human organism or in the culture medium surrounding said non-human organism.

[86766] Accordingly, the present invention relates to a process for the production of myo-inositol, which comprises
[86767] (a) increasing or generating the activity of a b2032-protein in the cytosol of a cell of a non-human organism or a part thereof, preferably a microorganism, a plant cell, a plant or a part thereof, as compared to a corresponding non-transformed wild type non-human organism or a part thereof; and
[86768] (b) growing the non-human organism or a part thereof under conditions which permit the production of myo-inositol or a composition comprising myo-inositol in said non-human organism or in the culture medium surrounding said non-human organism.

[86769] Accordingly, the present invention relates to a process for the production of glucose-1-phosphate, which comprises
[86770] (a) increasing or generating the activity of a colanic acid biosynthesis protein in the cytosol of a cell of a non-human organism or a part thereof, preferably a microorganism, a plant cell, a plant or a part thereof, as compared to a corresponding non-transformed wild type non-human organism or a part thereof; and
[86771] (b) growing the non-human organism or a part thereof under conditions which permit the production of glucose-1-phosphate or a composition comprising glucose-1-phosphate in said non-human organism or in the culture medium surrounding said non-human organism.

[86772] Accordingly, the present invention relates to a process for the production of fucose, which comprises
[86773] (a) increasing or generating the activity of a GDP-mannose 4,6-dehydratase in the cytosol of a cell of a non-human organism or a part thereof, preferably a microorganism, a plant cell, a plant or a part thereof, as compared to a corresponding non-transformed wild type non-human organism or a part thereof; and
[86774] (b) growing the non-human organism or a part thereof under conditions which permit the production of fucose or a composition comprising fucose in said non-human organism or in the culture medium surrounding said non-human organism.

[86775] Accordingly, the present invention relates to a process for the production of fructose, which comprises
[86776] (a) increasing or generating the activity of a transport protein in the cytosol of a cell of a non-human organism or a part thereof, preferably a microorganism, a plant cell, a plant or a part thereof, as compared to a corresponding non-transformed wild type non-human organism or a part thereof; and
[86777] (b) growing the non-human organism or a part thereof under conditions which permit the production of fructose or a composition comprising fructose in said non-human organism or in the culture medium surrounding said non-human organism.

[86778] Accordingly, the present invention relates to a process for the production of glucose-1-phosphate, which comprises
[86779] (a) increasing or generating the activity of a transport protein in the cytosol of a cell of a non-human organism or a part thereof, preferably a microorganism, a plant cell, a plant or a part thereof, as compared to a corresponding non-transformed wild type non-human organism or a part thereof; and
[86780] (b) growing the non-human organism or a part thereof under conditions which permit the production of glucose-1-phosphate or a composition comprising glucose-1-phosphate in said non-human organism or in the culture medium surrounding said non-human organism.

[86781] Accordingly, the present invention relates to a process for the production of raffinose, which comprises
[86782] (a) increasing or generating the activity of a transport protein in the cytosol of a cell of a non-human organism or a part thereof, preferably a microorganism, a plant cell, a plant or a part thereof, as compared to a corresponding non-transformed wild type non-human organism or a part thereof; and
[86783] (b) growing the non-human organism or a part thereof under conditions which permit the production of raffinose or a composition comprising raffinose in said non-human organism or in the culture medium surrounding said non-human organism.

[86784] Accordingly, the present invention relates to a process for the production of sucrose, which comprises
[86785] (a) increasing or generating the activity of a transport protein in the cytosol of a cell of a non-human organism or a part thereof, preferably a microorganism, a plant cell, a plant or a part thereof, as compared to a corresponding non-transformed wild type non-human organism or a part thereof; and
[86786] (b) growing the non-human organism or a part thereof under conditions which permit the production of sucrose or a composition comprising sucrose in said non-human organism or in the culture medium surrounding said non-human organism.

[86787] Accordingly, the present invention relates to a process for the production of 3,4,5-trihydroxypentanoic acid, which comprises
[86788] (a) increasing or generating the activity of a transport protein in the cytosol of a cell of a non-human organism or a part thereof, preferably a microorganism, a plant cell, a plant or a part thereof, as compared to a corresponding non-transformed wild type non-human organism or a part thereof; and
[86789] (b) growing the non-human organism or a part thereof under conditions which permit the production of 3,4,5-trihydroxypentanoic acid or a composition comprising 3,4,5-trihydroxypentanoic acid in said non-human organism or in the culture medium surrounding said non-human organism.

[86790] Accordingly, the present invention relates to a process for the production of glucose-1-phosphate, which comprises
[86791] (a) increasing or generating the activity of a b2107-protein in the cytosol of a cell of a non-human organism or a part thereof, preferably a microorganism, a plant cell, a plant or a part thereof, as compared to a corresponding non-transformed wild type non-human organism or a part thereof; and
[86792] (b) growing the non-human organism or a part thereof under conditions which permit the production of glucose-1-phosphate or a composition comprising glucose-1-phosphate in said non-human organism or in the culture medium surrounding said non-human organism.

[86793] Accordingly, the present invention relates to a process for the production of 3,4,5-trihydroxypentanoic acid, which comprises
[86794] (a) increasing or generating the activity of a b2107-protein in the cytosol of a cell of a non-human organism or a part thereof, preferably a microorganism, a plant cell, a plant or a part thereof, as compared to a corresponding non-transformed wild type non-human organism or a part thereof; and
[86795] (b) growing the non-human organism or a part thereof under conditions which permit the production of 3,4,5-trihydroxypentanoic acid or a composition comprising 3,4,5-trihydroxypentanoic acid in said non-human organism or in the culture medium surrounding said non-human organism.

[86796] Accordingly, the present invention relates to a process for the production of glucose-1-phosphate, which comprises
[86797] (a) increasing or generating the activity of a b2139-protein in the cytosol of a cell of a non-human organism or a part thereof, preferably a microorganism, a plant cell, a plant or a part thereof, as compared to a corresponding non-transformed wild type non-human organism or a part thereof; and
[86798] (b) growing the non-human organism or a part thereof under conditions which permit the production of glucose-1-phosphate or a composition comprising glucose-1-phosphate in said non-human organism or in the culture medium surrounding said non-human organism.

[86799] Accordingly, the present invention relates to a process for the production of erythrol, which comprises
[86800] (a) increasing or generating the activity of a sn-glycerol-3-phosphate dehydrogenase in the cytosol of a cell of a non-human organism or a part thereof, preferably a microorganism, a plant cell, a plant or a part thereof, as compared to a corresponding non-transformed wild type non-human organism or a part thereof; and
[86801] (b) growing the non-human organism or a part thereof under conditions which permit the production of erythrol or a composition comprising erythrol in said non-human organism or in the culture medium surrounding said non-human organism.

[86802] Accordingly, the present invention relates to a process for the production of fructose, which comprises
[86803] (a) increasing or generating the activity of a ATP synthase subunit E in the cytosol of a cell of a non-human organism or a part thereof, preferably a microorganism, a plant cell, a plant or a part thereof, as compared to a corresponding non-transformed wild type non-human organism or a part thereof; and
[86804] (b) growing the non-human organism or a part thereof under conditions which permit the production of fructose or a composition comprising fructose in said non-human organism or in the culture medium surrounding said non-human organism.

[86805] Accordingly, the present invention relates to a process for the production of galactinol, which comprises
[86806] (a) increasing or generating the activity of a aminotransferase in the cytosol of a cell of a non-human organism or a part thereof, preferably a microorganism, a plant cell, a plant or a part thereof, as compared to a corresponding non-transformed wild type non-human organism or a part thereof; and
[86807] (b) growing the non-human organism or a part thereof under conditions which permit the production of galactinol or a composition comprising galactinol in said non-human organism or in the culture medium surrounding said non-human organism.

[86808] Accordingly, the present invention relates to a process for the production of myo-inositol, which comprises
[86809] (a) increasing or generating the activity of a b2345-protein in the cytosol of a cell of a non-human organism or a part thereof, preferably a microorganism, a plant cell, a plant or a part thereof, as compared to a corresponding non-transformed wild type non-human organism or a part thereof; and
[86810] (b) growing the non-human organism or a part thereof under conditions which permit the production of myo-inositol or a composition comprising myo-inositol in said non-human organism or in the culture medium surrounding said non-human organism.

[86811] Accordingly, the present invention relates to a process for the production of 3,4,5-trihydroxypentanoic acid, which comprises
[86812] (a) increasing or generating the activity of a b2345-protein in the cytosol of a cell of a non-human organism or a part thereof, preferably a microorganism, a plant cell, a plant or a part thereof, as compared to a corresponding non-transformed wild type non-human organism or a part thereof; and
[86813] (b) growing the non-human organism or a part thereof under conditions which permit the production of 3,4,5-trihydroxypentanoic acid or a composition comprising 3,4,5-trihydroxypentanoic acid in said non-human organism or in the culture medium surrounding said non-human organism.

[86814] Accordingly, the present invention relates to a process for the production of verbascose, which comprises
[86815] (a) increasing or generating the activity of a b2360-protein in the cytosol of a cell of a non-human organism or a part thereof, preferably a microorganism, a plant cell, a plant or a part thereof, as compared to a corresponding non-transformed wild type non-human organism or a part thereof; and
[86816] (b) growing the non-human organism or a part thereof under conditions which permit the production of verbascose or a composition comprising verbascose in said non-human organism or in the culture medium surrounding said non-human organism.

[86817] Accordingly, the present invention relates to a process for the production of 3,4,5-trihydroxypentanoic acid, which comprises
[86818] (a) increasing or generating the activity of a b2360-protein in the cytosol of a cell of a non-human organism or a part thereof, preferably a microorganism, a plant cell, a plant or a part thereof, as compared to a corresponding non-transformed wild type non-human organism or a part thereof; and
[86819] (b) growing the non-human organism or a part thereof under conditions which permit the production of 3,4,5-trihydroxypentanoic acid or a composition comprising 3,4,5-trihydroxypentanoic acid in said non-human organism or in the culture medium surrounding said non-human organism.

[86820] Accordingly, the present invention relates to a process for the production of glucose-1-phosphate, which comprises
[86821] (a) increasing or generating the activity of a b2361-protein in the cytosol of a cell of a non-human organism or a part thereof, preferably a microorganism, a plant cell, a plant or a part thereof, as compared to a corresponding non-transformed wild type non-human organism or a part thereof; and
[86822] (b) growing the non-human organism or a part thereof under conditions which permit the production of glucose-1-phosphate or a composition comprising glucose-1-phosphate in said non-human organism or in the culture medium surrounding said non-human organism.

[86823] Accordingly, the present invention relates to a process for the production of 3,4,5-trihydroxypentanoic acid, which comprises
[86824] (a) increasing or generating the activity of a b2361-protein in the cytosol of a cell of a non-human organism or a part thereof, preferably a microorganism, a plant cell, a plant or a part thereof, as compared to a corresponding non-transformed wild type non-human organism or a part thereof; and
[86825] (b) growing the non-human organism or a part thereof under conditions which permit the production of 3,4,5-trihydroxypentanoic acid or a composition comprising 3,4,5-trihydroxypentanoic acid in said non-human organism or in the culture medium surrounding said non-human organism.

[86826] Accordingly, the present invention relates to a process for the production of sucrose, which comprises
[86827] (a) increasing or generating the activity of a ion-transport protein in the cytosol of a cell of a non-human organism or a part thereof, preferably a microorganism, a plant cell, a plant or a part thereof, as compared to a corresponding non-transformed wild type non-human organism or a part thereof; and
[86828] (b) growing the non-human organism or a part thereof under conditions which permit the production of sucrose or a composition comprising sucrose in said non-human organism or in the culture medium surrounding said non-human organism.

[86829] Accordingly, the present invention relates to a process for the production of fructose, which comprises
[86830] (a) increasing or generating the activity of a b2399-protein in the cytosol of a cell of a non-human organism or a part thereof, preferably a microorganism, a plant cell, a plant or a part thereof, as compared to a corresponding non-transformed wild type non-human organism or a part thereof; and
[86831] (b) growing the non-human organism or a part thereof under conditions which permit the production of fructose or a composition comprising fructose in said non-human organism or in the culture medium surrounding said non-human organism.

[86832] Accordingly, the present invention relates to a process for the production of glucose, which comprises
[86833] (a) increasing or generating the activity of a b2399-protein in the cytosol of a cell of a non-human organism or a part thereof, preferably a microorganism, a plant cell, a plant or a part thereof, as compared to a corresponding non-transformed wild type non-human organism or a part thereof; and
[86834] (b) growing the non-human organism or a part thereof under conditions which permit the production of glucose or a composition comprising glucose in said non-human organism or in the culture medium surrounding said non-human organism.

[86835] Accordingly, the present invention relates to a process for the production of glucose-1-phosphate, which comprises
[86836] (a) increasing or generating the activity of a b2399-protein in the cytosol of a cell of a non-human organism or a part thereof, preferably a microorganism, a plant cell, a plant or a part thereof, as compared to a corresponding non-transformed wild type non-human organism or a part thereof; and
[86837] (b) growing the non-human organism or a part thereof under conditions which permit the production of glucose-1-phosphate or a composition comprising glucose-1-phosphate in said non-human organism or in the culture medium surrounding said non-human organism.

[86838] Accordingly, the present invention relates to a process for the production of myo-inositol, which comprises
[86839] (a) increasing or generating the activity of a b2399-protein in the cytosol of a cell of a non-human organism or a part thereof, preferably a microorganism, a plant cell, a plant or a part thereof, as compared to a corresponding non-transformed wild type non-human organism or a part thereof; and
[86840] (b) growing the non-human organism or a part thereof under conditions which permit the production of myo-inositol or a composition comprising myo-inositol in said non-human organism or in the culture medium surrounding said non-human organism.

[86841] Accordingly, the present invention relates to a process for the production of raffinose, which comprises
[86842] (a) increasing or generating the activity of a b2399-protein in the cytosol of a cell of a non-human organism or a part thereof, preferably a microorganism, a plant cell, a plant or a part thereof, as compared to a corresponding non-transformed wild type non-human organism or a part thereof; and
[86843] (b) growing the non-human organism or a part thereof under conditions which permit the production of raffinose or a composition comprising raffinose in said non-human organism or in the culture medium surrounding said non-human organism.

[86844] Accordingly, the present invention relates to a process for the production of sedoheptulose-7-phosphate, which comprises
[86845] (a) increasing or generating the activity of a b2399-protein in the cytosol of a cell of a non-human organism or a part thereof, preferably a microorganism, a plant cell, a plant or a part thereof, as compared to a corresponding non-transformed wild type non-human organism or a part thereof; and
[86846] (b) growing the non-human organism or a part thereof under conditions which permit the production of sedoheptulose-7-phosphate or a composition comprising sedoheptulose-7-phosphate in said non-human organism or in the culture medium surrounding said non-human organism.

[86847] Accordingly, the present invention relates to a process for the production of sucrose, which comprises
[86848] (a) increasing or generating the activity of a b2399-protein in the cytosol of a cell of a non-human organism or a part thereof, preferably a microorganism, a plant cell, a plant or a part thereof, as compared to a corresponding non-transformed wild type non-human organism or a part thereof; and
[86849] (b) growing the non-human organism or a part thereof under conditions which permit the production of sucrose or a composition comprising sucrose in said non-human organism or in the culture medium surrounding said non-human organism.

[86850] Accordingly, the present invention relates to a process for the production of fructose, which comprises
[86851] (a) increasing or generating the activity of a transcriptional regulator in the cytosol of a cell of a non-human organism or a part thereof, preferably a microorganism, a plant cell, a plant or a part thereof, as compared to a corresponding non-transformed wild type non-human organism or a part thereof; and
[86852] (b) growing the non-human organism or a part thereof under conditions which permit the production of fructose or a composition comprising fructose in said non-human organism or in the culture medium surrounding said non-human organism.

[86853] Accordingly, the present invention relates to a process for the production of raffinose, which comprises
[86854] (a) increasing or generating the activity of a transcriptional regulator in the cytosol of a cell of a non-human organism or a part thereof, preferably a microorganism, a plant cell, a plant or a part thereof, as compared to a corresponding non-transformed wild type non-human organism or a part thereof; and
[86855] (b) growing the non-human organism or a part thereof under conditions which permit the production of raffinose or a composition comprising raffinose in said non-human organism or in the culture medium surrounding said non-human organism.

[86856] Accordingly, the present invention relates to a process for the production of myo-inositol, which comprises
[86857] (a) increasing or generating the activity of a cysteine synthase A in the cytosol of a cell of a non-human organism or a part thereof, preferably a microorganism, a plant cell, a plant or a part thereof, as compared to a corresponding non-transformed wild type non-human organism or a part thereof; and
[86858] (b) growing the non-human organism or a part thereof under conditions which permit the production of myo-inositol or a composition comprising myo-inositol in said non-human organism or in the culture medium surrounding said non-human organism.

[86859] Accordingly, the present invention relates to a process for the production of verbascose, which comprises
[86860] (a) increasing or generating the activity of a cysteine synthase A in the cytosol of a cell of a non-human organism or a part thereof, preferably a microorganism, a plant cell, a plant or a part thereof, as compared to a corresponding non-transformed wild type non-human organism or a part thereof; and
[86861] (b) growing the non-human organism or a part thereof under conditions which permit the production of verbascose or a composition comprising verbascose in said non-human organism or in the culture medium surrounding said non-human organism.

[86862] Accordingly, the present invention relates to a process for the production of glucose-1-phosphate, which comprises
[86863] (a) increasing or generating the activity of a b2466-protein in the cytosol of a cell of a non-human organism or a part thereof, preferably a microorganism, a plant cell, a plant or a part thereof, as compared to a corresponding non-transformed wild type non-human organism or a part thereof; and
[86864] (b) growing the non-human organism or a part thereof under conditions which permit the production of glucose-1-phosphate or a composition comprising glucose-1-phosphate in said non-human organism or in the culture medium surrounding said non-human organism.

[86865] Accordingly, the present invention relates to a process for the production of myo-inositol, which comprises
[86866] (a) increasing or generating the activity of a b2466-protein in the cytosol of a cell of a non-human organism or a part thereof, preferably a microorganism, a plant cell, a plant or a part thereof, as compared to a corresponding non-transformed wild type non-human organism or a part thereof; and
[86867] (b) growing the non-human organism or a part thereof under conditions which permit the production of myo-inositol or a composition comprising myo-inositol in said non-human organism or in the culture medium surrounding said non-human organism.

[86868] Accordingly, the present invention relates to a process for the production of 3,4,5-trihydroxypentanoic acid, which comprises
[86869] (a) increasing or generating the activity of a b2466-protein in the cytosol of a cell of a non-human organism or a part thereof, preferably a microorganism, a plant cell, a plant or a part thereof, as compared to a corresponding non-transformed wild type non-human organism or a part thereof; and
[86870] (b) growing the non-human organism or a part thereof under conditions which permit the production of 3,4,5-trihydroxypentanoic acid or a composition comprising 3,4,5-trihydroxypentanoic acid in said non-human organism or in the culture medium surrounding said non-human organism.

[86871] Accordingly, the present invention relates to a process for the production of glucose-1-phosphate, which comprises
[86872] (a) increasing or generating the activity of a b2474-protein in the cytosol of a cell of a non-human organism or a part thereof, preferably a microorganism, a plant cell, a plant or a part thereof, as compared to a corresponding non-transformed wild type non-human organism or a part thereof; and
[86873] (b) growing the non-human organism or a part thereof under conditions which permit the production of glucose-1-phosphate or a composition comprising glucose-1-phosphate in said non-human organism or in the culture medium surrounding said non-human organism.

[86874] Accordingly, the present invention relates to a process for the production of raffinose, which comprises
[86875] (a) increasing or generating the activity of a 2,3-dihydroxy-2,3-dihydrophenylpropionatedehydrogenase in the cytosol of a cell of a non-human organism or a part thereof, preferably a microorganism, a plant cell, a plant or a part thereof, as compared to a corresponding non-transformed wild type non-human organism or a part thereof; and
[86876] (b) growing the non-human organism or a part thereof under conditions which permit the production of raffinose or a composition comprising raffinose in said non-human organism or in the culture medium surrounding said non-human organism.

[86877] Accordingly, the present invention relates to a process for the production of sucrose, which comprises
[86878] (a) increasing or generating the activity of a putative transport system permease protein in the cytosol of a cell of a non-human organism or a part thereof, preferably a microorganism, a plant cell, a plant or a part thereof, as compared to a corresponding non-transformed wild type non-human organism or a part thereof; and
[86879] (b) growing the non-human organism or a part thereof under conditions which permit the production of sucrose or a composition comprising sucrose in said non-human organism or in the culture medium surrounding said non-human organism.

[86880] Accordingly, the present invention relates to a process for the production of glucose-1-phosphate, which comprises
[86881] (a) increasing or generating the activity of a b2613-protein in the cytosol of a cell of a non-human organism or a part thereof, preferably a microorganism, a plant cell, a plant or a part thereof, as compared to a corresponding non-transformed wild type non-human organism or a part thereof; and
[86882] (b) growing the non-human organism or a part thereof under conditions which permit the production of glucose-1-phosphate or a composition comprising glucose-1-phosphate in said non-human organism or in the culture medium surrounding said non-human organism.

[86883] Accordingly, the present invention relates to a process for the production of myo-inositol, which comprises
[86884] (a) increasing or generating the activity of a b2613-protein in the cytosol of a cell of a non-human organism or a part thereof, preferably a microorganism, a plant cell, a plant or a part thereof, as compared to a corresponding non-transformed wild type non-human organism or a part thereof; and
[86885] (b) growing the non-human organism or a part thereof under conditions which permit the production of myo-inositol or a composition comprising myo-inositol in said non-human organism or in the culture medium surrounding said non-human organism.

[86886] Accordingly, the present invention relates to a process for the production of fructose, which comprises
[86887] (a) increasing or generating the activity of a transcriptional regulator in the cytosol of a cell of a non-human organism or a part thereof, preferably a microorganism, a plant cell, a plant or a part thereof, as compared to a corresponding non-transformed wild type non-human organism or a part thereof; and
[86888] (b) growing the non-human organism or a part thereof under conditions which permit the production of fructose or a composition comprising fructose in said non-human organism or in the culture medium surrounding said non-human organism.

[86889] Accordingly, the present invention relates to a process for the production of myo-inositol, which comprises
[86890] (a) increasing or generating the activity of a transcriptional regulator in the cytosol of a cell of a non-human organism or a part thereof, preferably a microorganism, a plant cell, a plant or a part thereof, as compared to a corresponding non-transformed wild type non-human organism or a part thereof; and
[86891] (b) growing the non-human organism or a part thereof under conditions which permit the production of myo-inositol or a composition comprising myo-inositol in said non-human organism or in the culture medium surrounding said non-human organism.

[86892] Accordingly, the present invention relates to a process for the production of sucrose, which comprises
[86893] (a) increasing or generating the activity of a transcriptional regulator in the cytosol of a cell of a non-human organism or a part thereof, preferably a microorganism, a plant cell, a plant or a part thereof, as compared to a corresponding non-transformed wild type non-human organism or a part thereof; and
[86894] (b) growing the non-human organism or a part thereof under conditions which permit the production of sucrose or a composition comprising sucrose in said non-human organism or in the culture medium surrounding said non-human organism.

[86895] Accordingly, the present invention relates to a process for the production of glucose-1-phosphate, which comprises
[86896] (a) increasing or generating the activity of a b2653-protein in the cytosol of a cell of a non-human organism or a part thereof, preferably a microorganism, a plant cell, a plant or a part thereof, as compared to a corresponding non-transformed wild type non-human organism or a part thereof; and
[86897] (b) growing the non-human organism or a part thereof under conditions which permit the production of glucose-1-phosphate or a composition comprising glucose-1-phosphate in said non-human organism or in the culture medium surrounding said non-human organism.

[86898] Accordingly, the present invention relates to a process for the production of sedoheptulose-7-phosphate, which comprises
[86899] (a) increasing or generating the activity of a b2653-protein in the cytosol of a cell of a non-human organism or a part thereof, preferably a microorganism, a plant cell, a plant or a part thereof, as compared to a corresponding non-transformed wild type non-human organism or a part thereof; and
[86900] (b) growing the non-human organism or a part thereof under conditions which permit the production of sedoheptulose-7-phosphate or a composition comprising sedoheptulose-7-phosphate in said non-human organism or in the culture medium surrounding said non-human organism.

[86901] Accordingly, the present invention relates to a process for the production of 3,4,5-trihydroxypentanoic acid, which comprises
[86902] (a) increasing or generating the activity of a b2653-protein in the cytosol of a cell of a non-human organism or a part thereof, preferably a microorganism, a plant cell, a plant or a part thereof, as compared to a corresponding non-transformed wild type non-human organism or a part thereof; and
[86903] (b) growing the non-human organism or a part thereof under conditions which permit the production of 3,4,5-trihydroxypentanoic acid or a composition comprising 3,4,5-trihydroxypentanoic acid in said non-human organism or in the culture medium surrounding said non-human organism.

[86904] Accordingly, the present invention relates to a process for the production of glucose-1-phosphate, which comprises
[86905] (a) increasing or generating the activity of a b2654-protein in the cytosol of a cell of a non-human organism or a part thereof, preferably a microorganism, a plant cell, a plant or a part thereof, as compared to a corresponding non-transformed wild type non-human organism or a part thereof; and
[86906] (b) growing the non-human organism or a part thereof under conditions which permit the production of glucose-1-phosphate or a composition comprising glucose-1-phosphate in said non-human organism or in the culture medium surrounding said non-human organism.

[86907] Accordingly, the present invention relates to a process for the production of 3,4,5-trihydroxypentanoic acid, which comprises
[86908] (a) increasing or generating the activity of a b2654-protein in the cytosol of a cell of a non-human organism or a part thereof, preferably a microorganism, a plant cell, a plant or a part thereof, as compared to a corresponding non-transformed wild type non-human organism or a part thereof; and
[86909] (b) growing the non-human organism or a part thereof under conditions which permit the production of 3,4,5-trihydroxypentanoic acid or a composition comprising 3,4,5-trihydroxypentanoic acid in said non-human organism or in the culture medium surrounding said non-human organism.

[86910] Accordingly, the present invention relates to a process for the production of glucose-1-phosphate, which comprises
[86911] (a) increasing or generating the activity of a b2670-protein in the cytosol of a cell of a non-human organism or a part thereof, preferably a microorganism, a plant cell, a plant or a part thereof, as compared to a corresponding non-transformed wild type non-human organism or a part thereof; and
[86912] (b) growing the non-human organism or a part thereof under conditions which permit the production of glucose-1-phosphate or a composition comprising glucose-1-phosphate in said non-human organism or in the culture medium surrounding said non-human organism.

[86913] Accordingly, the present invention relates to a process for the production of glucose-1-phosphate, which comprises
[86914] (a) increasing or generating the activity of a b2673-protein in the cytosol of a cell of a non-human organism or a part thereof, preferably a microorganism, a plant cell, a plant or a part thereof, as compared to a corresponding non-transformed wild type non-human organism or a part thereof; and
[86915] (b) growing the non-human organism or a part thereof under conditions which permit the production of glucose-1-phosphate or a composition comprising glucose-1-phosphate in said non-human organism or in the culture medium surrounding said non-human organism.

[86916] Accordingly, the present invention relates to a process for the production of 3,4,5-trihydroxypentanoic acid, which comprises
[86917] (a) increasing or generating the activity of a b2673-protein in the cytosol of a cell of a non-human organism or a part thereof, preferably a microorganism, a plant cell, a plant or a part thereof, as compared to a corresponding non-transformed wild type non-human organism or a part thereof; and
[86918] (b) growing the non-human organism or a part thereof under conditions which permit the production of 3,4,5-trihydroxypentanoic acid or a composition comprising 3,4,5-trihydroxypentanoic acid in said non-human organism or in the culture medium surrounding said non-human organism.

[86919] Accordingly, the present invention relates to a process for the production of myo-inositol, which comprises
[86920] (a) increasing or generating the activity of a b2682-protein in the cytosol of a cell of a non-human organism or a part thereof, preferably a microorganism, a plant cell, a plant or a part thereof, as compared to a corresponding non-transformed wild type non-human organism or a part thereof; and
[86921] (b) growing the non-human organism or a part thereof under conditions which permit the production of myo-inositol or a composition comprising myo-inositol in said non-human organism or in the culture medium surrounding said non-human organism.

[86922] Accordingly, the present invention relates to a process for the production of glucose-1-phosphate, which comprises
[86923] (a) increasing or generating the activity of a recombinase A in the cytosol of a cell of a non-human organism or a part thereof, preferably a microorganism, a plant cell, a plant or a part thereof, as compared to a corresponding non-transformed wild type non-human organism or a part thereof; and
[86924] (b) growing the non-human organism or a part thereof under conditions which permit the production of glucose-1-phosphate or a composition comprising glucose-1-phosphate in said non-human organism or in the culture medium surrounding said non-human organism.

[86925] Accordingly, the present invention relates to a process for the production of glucose-1-phosphate, which comprises
[86926] (a) increasing or generating the activity of a murein transglycosylase in the cytosol of a cell of a non-human organism or a part thereof, preferably a microorganism, a plant cell, a plant or a part thereof, as compared to a corresponding non-transformed wild type non-human organism or a part thereof; and
[86927] (b) growing the non-human organism or a part thereof under conditions which permit the production of glucose-1-phosphate or a composition comprising glucose-1-phosphate in said non-human organism or in the culture medium surrounding said non-human organism.

[86928] Accordingly, the present invention relates to a process for the production of myo-inositol, which comprises
[86929] (a) increasing or generating the activity of a transcriptional regulator in the cytosol of a cell of a non-human organism or a part thereof, preferably a microorganism, a plant cell, a plant or a part thereof, as compared to a corresponding non-transformed wild type non-human organism or a part thereof; and
[86930] (b) growing the non-human organism or a part thereof under conditions which permit the production of myo-inositol or a composition comprising myo-inositol in said non-human organism or in the culture medium surrounding said non-human organism.

[86931] Accordingly, the present invention relates to a process for the production of fructose, which comprises
[86932] (a) increasing or generating the activity of a b2739-protein in the cytosol of a cell of a non-human organism or a part thereof, preferably a microorganism, a plant cell, a plant or a part thereof, as compared to a corresponding non-transformed wild type non-human organism or a part thereof; and
[86933] (b) growing the non-human organism or a part thereof under conditions which permit the production of fructose or a composition comprising fructose in said non-human organism or in the culture medium surrounding said non-human organism.

[86934] Accordingly, the present invention relates to a process for the production of glucose, which comprises
[86935] (a) increasing or generating the activity of a b2739-protein in the cytosol of a cell of a non-human organism or a part thereof, preferably a microorganism, a plant cell, a plant or a part thereof, as compared to a corresponding non-transformed wild type non-human organism or a part thereof; and
[86936] (b) growing the non-human organism or a part thereof under conditions which permit the production of glucose or a composition comprising glucose in said non-human organism or in the culture medium surrounding said non-human organism.

[86937] Accordingly, the present invention relates to a process for the production of glucose, which comprises
[86938] (a) increasing or generating the activity of a 2-C-methyl-D-erythritol 4-phosphate cytidylyltransferase in the cytosol of a cell of a non-human organism or a part thereof, preferably a microorganism, a plant cell, a plant or a part thereof, as compared to a corresponding non-transformed wild type non-human organism or a part thereof; and
[86939] (b) growing the non-human organism or a part thereof under conditions which permit the production of glucose or a composition comprising glucose in said non-human organism or in the culture medium surrounding said non-human organism.

[86940] Accordingly, the present invention relates to a process for the production of myo-inositol, which comprises
[86941] (a) increasing or generating the activity of a 2-C-methyl-D-erythritol 4-phosphate cytidylyltransferase in the cytosol of a cell of a non-human organism or a part thereof, preferably a microorganism, a plant cell, a plant or a part thereof, as compared to a corresponding non-transformed wild type non-human organism or a part thereof; and
[86942] (b) growing the non-human organism or a part thereof under conditions which permit the production of myo-inositol or a composition comprising myo-inositol in said non-human organism or in the culture medium surrounding said non-human organism.

[86943] Accordingly, the present invention relates to a process for the production of raffinose, which comprises
[86944] (a) increasing or generating the activity of a 2-C-methyl-D-erythritol 4-phosphate cytidylyltransferase in the cytosol of a cell of a non-human organism or a part thereof, preferably a microorganism, a plant cell, a plant or a part thereof, as compared to a corresponding non-transformed wild type non-human organism or a part thereof; and
[86945] (b) growing the non-human organism or a part thereof under conditions which permit the production of raffinose or a composition comprising raffinose in said non-human organism or in the culture medium surrounding said non-human organism.

[86946] Accordingly, the present invention relates to a process for the production of glucose-1-phosphate, which comprises
[86947] (a) increasing or generating the activity of a phosphoadenosine phosphosulfate reductase in the cytosol of a cell of a non-human organism or a part thereof, preferably a microorganism, a plant cell, a plant or a part thereof, as compared to a corresponding non-transformed wild type non-human organism or a part thereof; and
[86948] (b) growing the non-human organism or a part thereof under conditions which permit the production of glucose-1-phosphate or a composition comprising glucose-1-phosphate in said non-human organism or in the culture medium surrounding said non-human organism.

[86949] Accordingly, the present invention relates to a process for the production of 3,4,5-trihydroxypentanoic acid, which comprises
[86950] (a) increasing or generating the activity of a phosphoadenosine phosphosulfate reductase in the cytosol of a cell of a non-human organism or a part thereof, preferably a microorganism, a plant cell, a plant or a part thereof, as compared to a corresponding non-transformed wild type non-human organism or a part thereof; and
[86951] (b) growing the non-human organism or a part thereof under conditions which permit the production of 3,4,5-trihydroxypentanoic acid or a composition comprising 3,4,5-trihydroxypentanoic acid in said non-human organism or in the culture medium surrounding said non-human organism.

[86952] Accordingly, the present invention relates to a process for the production of fructose, which comprises
[86953] (a) increasing or generating the activity of a flavodoxin in the cytosol of a cell of a non-human organism or a part thereof, preferably a microorganism, a plant cell, a plant or a part thereof, as compared to a corresponding non-transformed wild type non-human organism or a part thereof; and
[86954] (b) growing the non-human organism or a part thereof under conditions which permit the production of fructose or a composition comprising fructose in said non-human organism or in the culture medium surrounding said non-human organism.

[86955] Accordingly, the present invention relates to a process for the production of glucose, which comprises
[86956] (a) increasing or generating the activity of a flavodoxin in the cytosol of a cell of a non-human organism or a part thereof, preferably a microorganism, a plant cell, a plant or a part thereof, as compared to a corresponding non-transformed wild type non-human organism or a part thereof; and
[86957] (b) growing the non-human organism or a part thereof under conditions which permit the production of glucose or a composition comprising glucose in said non-human organism or in the culture medium surrounding said non-human organism.

[86958] Accordingly, the present invention relates to a process for the production of glucose-1-phosphate, which comprises
[86959] (a) increasing or generating the activity of a flavodoxin in the cytosol of a cell of a non-human organism or a part thereof, preferably a microorganism, a plant cell, a plant or a part thereof, as compared to a corresponding non-transformed wild type non-human organism or a part thereof; and
[86960] (b) growing the non-human organism or a part thereof under conditions which permit the production of glucose-1-phosphate or a composition comprising glucose-1-phosphate in said non-human organism or in the culture medium surrounding said non-human organism.

[86961] Accordingly, the present invention relates to a process for the production of myo-inositol, which comprises
[86962] (a) increasing or generating the activity of a flavodoxin in the cytosol of a cell of a non-human organism or a part thereof, preferably a microorganism, a plant cell, a plant or a part thereof, as compared to a corresponding non-transformed wild type non-human organism or a part thereof; and
[86963] (b) growing the non-human organism or a part thereof under conditions which permit the production of myo-inositol or a composition comprising myo-inositol in said non-human organism or in the culture medium surrounding said non-human organism.

[86964] Accordingly, the present invention relates to a process for the production of 3,4,5-trihydroxypentanoic acid, which comprises
[86965] (a) increasing or generating the activity of a flavodoxin in the cytosol of a cell of a non-human organism or a part thereof, preferably a microorganism, a plant cell, a plant or a part thereof, as compared to a corresponding non-transformed wild type non-human organism or a part thereof; and
[86966] (b) growing the non-human organism or a part thereof under conditions which permit the production of 3,4,5-trihydroxypentanoic acid or a composition comprising 3,4,5-trihydroxypentanoic acid in said non-human organism or in the culture medium surrounding said non-human organism.

[86967] Accordingly, the present invention relates to a process for the production of fructose, which comprises
[86968] (a) increasing or generating the activity of a amino-acid acetyltransferase in the cytosol of a cell of a non-human organism or a part thereof, preferably a microorganism, a plant cell, a plant or a part thereof, as compared to a corresponding non-transformed wild type non-human organism or a part thereof; and
[86969] (b) growing the non-human organism or a part thereof under conditions which permit the production of fructose or a composition comprising fructose in said non-human organism or in the culture medium surrounding said non-human organism.

[86970] Accordingly, the present invention relates to a process for the production of glucose-1-phosphate, which comprises
[86971] (a) increasing or generating the activity of a amino-acid acetyltransferase in the cytosol of a cell of a non-human organism or a part thereof, preferably a microorganism, a plant cell, a plant or a part thereof, as compared to a corresponding non-transformed wild type non-human organism or a part thereof; and
[86972] (b) growing the non-human organism or a part thereof under conditions which permit the production of glucose-1-phosphate or a composition comprising glucose-1-phosphate in said non-human organism or in the culture medium surrounding said non-human organism.

[86973] Accordingly, the present invention relates to a process for the production of myo-inositol, which comprises
[86974] (a) increasing or generating the activity of a amino-acid acetyltransferase in the cytosol of a cell of a non-human organism or a part thereof, preferably a microorganism, a plant cell, a plant or a part thereof, as compared to a corresponding non-transformed wild type non-human organism or a part thereof; and
[86975] (b) growing the non-human organism or a part thereof under conditions which permit the production of myo-inositol or a composition comprising myo-inositol in said non-human organism or in the culture medium surrounding said non-human organism.

[86976] Accordingly, the present invention relates to a process for the production of raffinose, which comprises
[86977] (a) increasing or generating the activity of a transcriptional regulator in the cytosol of a cell of a non-human organism or a part thereof, preferably a microorganism, a plant cell, a plant or a part thereof, as compared to a corresponding non-transformed wild type non-human organism or a part thereof; and
[86978] (b) growing the non-human organism or a part thereof under conditions which permit the production of raffinose or a composition comprising raffinose in said non-human organism or in the culture medium surrounding said non-human organism.

[86979] Accordingly, the present invention relates to a process for the production of glucose, which comprises
[86980] (a) increasing or generating the activity of a arginine exporter protein in the cytosol of a cell of a non-human organism or a part thereof, preferably a microorganism, a plant cell, a plant or a part thereof, as compared to a corresponding non-transformed wild type non-human organism or a part thereof; and
[86981] (b) growing the non-human organism or a part thereof under conditions which permit the production of glucose or a composition comprising glucose in said non-human organism or in the culture medium surrounding said non-human organism.

[86982] Accordingly, the present invention relates to a process for the production of myo-inositol, which comprises
[86983] (a) increasing or generating the activity of a arginine exporter protein in the cytosol of a cell of a non-human organism or a part thereof, preferably a microorganism, a plant cell, a plant or a part thereof, as compared to a corresponding non-transformed wild type non-human organism or a part thereof; and
[86984] (b) growing the non-human organism or a part thereof under conditions which permit the production of myo-inositol or a composition comprising myo-inositol in said non-human organism or in the culture medium surrounding said non-human organism.

[86985] Accordingly, the present invention relates to a process for the production of myo-inositol, which comprises
[86986] (a) increasing or generating the activity of a b2932-protein in the cytosol of a cell of a non-human organism or a part thereof, preferably a microorganism, a plant cell, a plant or a part thereof, as compared to a corresponding non-transformed wild type non-human organism or a part thereof; and
[86987] (b) growing the non-human organism or a part thereof under conditions which permit the production of myo-inositol or a composition comprising myo-inositol in said non-human organism or in the culture medium surrounding said non-human organism.

[86988] Accordingly, the present invention relates to a process for the production of erythrol, which comprises
[86989] (a) increasing or generating the activity of a L-serine dehydratase in the cytosol of a cell of a non-human organism or a part thereof, preferably a microorganism, a plant cell, a plant or a part thereof, as compared to a corresponding non-transformed wild type non-human organism or a part thereof; and
[86990] (b) growing the non-human organism or a part thereof under conditions which permit the production of erythrol or a composition comprising erythrol in said non-human organism or in the culture medium surrounding said non-human organism.

[86991] Accordingly, the present invention relates to a process for the production of myo-inositol, which comprises
[86992] (a) increasing or generating the activity of a b3151-protein in the cytosol of a cell of a non-human organism or a part thereof, preferably a microorganism, a plant cell, a plant or a part thereof, as compared to a corresponding non-transformed wild type non-human organism or a part thereof; and
[86993] (b) growing the non-human organism or a part thereof under conditions which permit the production of myo-inositol or a composition comprising myo-inositol in said non-human organism or in the culture medium surrounding said non-human organism.

[86994] Accordingly, the present invention relates to a process for the production of raffinose, which comprises
[86995] (a) increasing or generating the activity of a b3151-protein in the cytosol of a cell of a non-human organism or a part thereof, preferably a microorganism, a plant cell, a plant or a part thereof, as compared to a corresponding non-transformed wild type non-human organism or a part thereof; and
[86996] (b) growing the non-human organism or a part thereof under conditions which permit the production of raffinose or a composition comprising raffinose in said non-human organism or in the culture medium surrounding said non-human organism.

[86997] Accordingly, the present invention relates to a process for the production of sucrose, which comprises
[86998] (a) increasing or generating the activity of a b3151-protein in the cytosol of a cell of a non-human organism or a part thereof, preferably a microorganism, a plant cell, a plant or a part thereof, as compared to a corresponding non-transformed wild type non-human organism or a part thereof; and
[86999] (b) growing the non-human organism or a part thereof under conditions which permit the production of sucrose or a composition comprising sucrose in said non-human organism or in the culture medium surrounding said non-human organism.

[87000] Accordingly, the present invention relates to a process for the production of fructose, which comprises
[87001] (a) increasing or generating the activity of a b3221-protein in the cytosol of a cell of a non-human organism or a part thereof, preferably a microorganism, a plant cell, a plant or a part thereof, as compared to a corresponding non-transformed wild type non-human organism or a part thereof; and
[87002] (b) growing the non-human organism or a part thereof under conditions which permit the production of fructose or a composition comprising fructose in said non-human organism or in the culture medium surrounding said non-human organism.

[87003] Accordingly, the present invention relates to a process for the production of glucose, which comprises
[87004] (a) increasing or generating the activity of a b3221-protein in the cytosol of a cell of a non-human organism or a part thereof, preferably a microorganism, a plant cell, a plant or a part thereof, as compared to a corresponding non-transformed wild type non-human organism or a part thereof; and
[87005] (b) growing the non-human organism or a part thereof under conditions which permit the production of glucose or a composition comprising glucose in said non-human organism or in the culture medium surrounding said non-human organism.

[87006] Accordingly, the present invention relates to a process for the production of 3,4,5-trihydroxypentanoic acid, which comprises
[87007] (a) increasing or generating the activity of a b3221-protein in the cytosol of a cell of a non-human organism or a part thereof, preferably a microorganism, a plant cell, a plant or a part thereof, as compared to a corresponding non-transformed wild type non-human organism or a part thereof; and
[87008] (b) growing the non-human organism or a part thereof under conditions which permit the production of 3,4,5-trihydroxypentanoic acid or a composition comprising 3,4,5-trihydroxypentanoic acid in said non-human organism or in the culture medium surrounding said non-human organism.

[87009] Accordingly, the present invention relates to a process for the production of myo-inositol, which comprises
[87010] (a) increasing or generating the activity of a b3246-protein in the cytosol of a cell of a non-human organism or a part thereof, preferably a microorganism, a plant cell, a plant or a part thereof, as compared to a corresponding non-transformed wild type non-human organism or a part thereof; and
[87011] (b) growing the non-human organism or a part thereof under conditions which permit the production of myo-inositol or a composition comprising myo-inositol in said non-human organism or in the culture medium surrounding said non-human organism.

[87012] Accordingly, the present invention relates to a process for the production of myo-inositol, which comprises
[87013] (a) increasing or generating the activity of a acetyl CoA carboxylase in the cytosol of a cell of a non-human organism or a part thereof, preferably a microorganism, a plant cell, a plant or a part thereof, as compared to a corresponding non-transformed wild type non-human organism or a part thereof; and
[87014] (b) growing the non-human organism or a part thereof under conditions which permit the production of myo-inositol or a composition comprising myo-inositol in said non-human organism or in the culture medium surrounding said non-human organism.

[87015] Accordingly, the present invention relates to a process for the production of fructose, which comprises
[87016] (a) increasing or generating the activity of a methyltransferase in the cytosol of a cell of a non-human organism or a part thereof, preferably a microorganism, a plant cell, a plant or a part thereof, as compared to a corresponding non-transformed wild type non-human organism or a part thereof; and
[87017] (b) growing the non-human organism or a part thereof under conditions which permit the production of fructose or a composition comprising fructose in said non-human organism or in the culture medium surrounding said non-human organism.

[87018] Accordingly, the present invention relates to a process for the production of glucose, which comprises
[87019] (a) increasing or generating the activity of a methyltransferase in the cytosol of a cell of a non-human organism or a part thereof, preferably a microorganism, a plant cell, a plant or a part thereof, as compared to a corresponding non-transformed wild type non-human organism or a part thereof; and
[87020] (b) growing the non-human organism or a part thereof under conditions which permit the production of glucose or a composition comprising glucose in said non-human organism or in the culture medium surrounding said non-human organism.

[87021] Accordingly, the present invention relates to a process for the production of glucose-1-phosphate, which comprises
[87022] (a) increasing or generating the activity of a methyltransferase in the cytosol of a cell of a non-human organism or a part thereof, preferably a microorganism, a plant cell, a plant or a part thereof, as compared to a corresponding non-transformed wild type non-human organism or a part thereof; and
[87023] (b) growing the non-human organism or a part thereof under conditions which permit the production of glucose-1-phosphate or a composition comprising glucose-1-phosphate in said non-human organism or in the culture medium surrounding said non-human organism.

[87024] Accordingly, the present invention relates to a process for the production of raffinose, which comprises
[87025] (a) increasing or generating the activity of a methyltransferase in the cytosol of a cell of a non-human organism or a part thereof, preferably a microorganism, a plant cell, a plant or a part thereof, as compared to a corresponding non-transformed wild type non-human organism or a part thereof; and
[87026] (b) growing the non-human organism or a part thereof under conditions which permit the production of raffinose or a composition comprising raffinose in said non-human organism or in the culture medium surrounding said non-human organism.

[87027] Accordingly, the present invention relates to a process for the production of sucrose, which comprises
[87028] (a) increasing or generating the activity of a methyltransferase in the cytosol of a cell of a non-human organism or a part thereof, preferably a microorganism, a plant cell, a plant or a part thereof, as compared to a corresponding non-transformed wild type non-human organism or a part thereof; and
[87029] (b) growing the non-human organism or a part thereof under conditions which permit the production of sucrose or a composition comprising sucrose in said non-human organism or in the culture medium surrounding said non-human organism.

[87030] Accordingly, the present invention relates to a process for the production of glucose, which comprises
[87031] (a) increasing or generating the activity of a ferredoxin in the cytosol of a cell of a non-human organism or a part thereof, preferably a microorganism, a plant cell, a plant or a part thereof, as compared to a corresponding non-transformed wild type non-human organism or a part thereof; and
[87032] (b) growing the non-human organism or a part thereof under conditions which permit the production of glucose or a composition comprising glucose in said non-human organism or in the culture medium surrounding said non-human organism.

[87033] Accordingly, the present invention relates to a process for the production of myo-inositol, which comprises
[87034] (a) increasing or generating the activity of a b3346-protein in the cytosol of a cell of a non-human organism or a part thereof, preferably a microorganism, a plant cell, a plant or a part thereof, as compared to a corresponding non-transformed wild type non-human organism or a part thereof; and
[87035] (b) growing the non-human organism or a part thereof under conditions which permit the production of myo-inositol or a composition comprising myo-inositol in said non-human organism or in the culture medium surrounding said non-human organism.

[87036] Accordingly, the present invention relates to a process for the production of raffinose, which comprises
[87037] (a) increasing or generating the activity of a b3346-protein in the cytosol of a cell of a non-human organism or a part thereof, preferably a microorganism, a plant cell, a plant or a part thereof, as compared to a corresponding non-transformed wild type non-human organism or a part thereof; and
[87038] (b) growing the non-human organism or a part thereof under conditions which permit the production of raffinose or a composition comprising raffinose in said non-human organism or in the culture medium surrounding said non-human organism.

[87039] Accordingly, the present invention relates to a process for the production of 3,4,5-trihydroxypentanoic acid, which comprises
[87040] (a) increasing or generating the activity of a b3346-protein in the cytosol of a cell of a non-human organism or a part thereof, preferably a microorganism, a plant cell, a plant or a part thereof, as compared to a corresponding non-transformed wild type non-human organism or a part thereof; and
[87041] (b) growing the non-human organism or a part thereof under conditions which permit the production of 3,4,5-trihydroxypentanoic acid or a composition comprising 3,4,5-trihydroxypentanoic acid in said non-human organism or in the culture medium surrounding said non-human organism.

[87042] Accordingly, the present invention relates to a process for the production of fructose, which comprises
[87043] (a) increasing or generating the activity of a phosphoenolpyruvate carboxykinase in the cytosol of a cell of a non-human organism or a part thereof, preferably a microorganism, a plant cell, a plant or a part thereof, as compared to a corresponding non-transformed wild type non-human organism or a part thereof; and
[87044] (b) growing the non-human organism or a part thereof under conditions which permit the production of fructose or a composition comprising fructose in said non-human organism or in the culture medium surrounding said non-human organism.

[87045] Accordingly, the present invention relates to a process for the production of glucose, which comprises
[87046] (a) increasing or generating the activity of a phosphoenolpyruvate carboxykinase in the cytosol of a cell of a non-human organism or a part thereof, preferably a microorganism, a plant cell, a plant or a part thereof, as compared to a corresponding non-transformed wild type non-human organism or a part thereof; and
[87047] (b) growing the non-human organism or a part thereof under conditions which permit the production of glucose or a composition comprising glucose in said non-human organism or in the culture medium surrounding said non-human organism.

[87048] Accordingly, the present invention relates to a process for the production of 3,4,5-trihydroxypentanoic acid, which comprises
[87049] (a) increasing or generating the activity of a B3427-protein in the cytosol of a cell of a non-human organism or a part thereof, preferably a microorganism, a plant cell, a plant or a part thereof, as compared to a corresponding non-transformed wild type non-human organism or a part thereof; and
[87050] (b) growing the non-human organism or a part thereof under conditions which permit the production of 3,4,5-trihydroxypentanoic acid or a composition comprising 3,4,5-trihydroxypentanoic acid in said non-human organism or in the culture medium surrounding said non-human organism.

[87051] Accordingly, the present invention relates to a process for the production of fructose, which comprises
[87052] (a) increasing or generating the activity of a glycogen synthase in the cytosol of a cell of a non-human organism or a part thereof, preferably a microorganism, a plant cell, a plant or a part thereof, as compared to a corresponding non-transformed wild type non-human organism or a part thereof; and
[87053] (b) growing the non-human organism or a part thereof under conditions which permit the production of fructose or a composition comprising fructose in said non-human organism or in the culture medium surrounding said non-human organism.

[87054] Accordingly, the present invention relates to a process for the production of glucose, which comprises
[87055] (a) increasing or generating the activity of a glycogen synthase in the cytosol of a cell of a non-human organism or a part thereof, preferably a microorganism, a plant cell, a plant or a part thereof, as compared to a corresponding non-transformed wild type non-human organism or a part thereof; and
[87056] (b) growing the non-human organism or a part thereof under conditions which permit the production of glucose or a composition comprising glucose in said non-human organism or in the culture medium surrounding said non-human organism.

[87057] Accordingly, the present invention relates to a process for the production of myo-inositol, which comprises
[87058] (a) increasing or generating the activity of a b3442-protein in the cytosol of a cell of a non-human organism or a part thereof, preferably a microorganism, a plant cell, a plant or a part thereof, as compared to a corresponding non-transformed wild type non-human organism or a part thereof; and
[87059] (b) growing the non-human organism or a part thereof under conditions which permit the production of myo-inositol or a composition comprising myo-inositol in said non-human organism or in the culture medium surrounding said non-human organism.

[87060] Accordingly, the present invention relates to a process for the production of 3,4,5-trihydroxypentanoic acid, which comprises
[87061] (a) increasing or generating the activity of a B3443-protein in the cytosol of a cell of a non-human organism or a part thereof, preferably a microorganism, a plant cell, a plant or a part thereof, as compared to a corresponding non-transformed wild type non-human organism or a part thereof; and
[87062] (b) growing the non-human organism or a part thereof under conditions which permit the production of 3,4,5-trihydroxypentanoic acid or a composition comprising 3,4,5-trihydroxypentanoic acid in said non-human organism or in the culture medium surrounding said non-human organism.

[87063] Accordingly, the present invention relates to a process for the production of saccharic acid, which comprises
[87064] (a) increasing or generating the activity of a sn-glycerol-3-phosphate transport system permease protein in the cytosol of a cell of a non-human organism or a part thereof, preferably a microorganism, a plant cell, a plant or a part thereof, as compared to a corresponding non-transformed wild type non-human organism or a part thereof; and
[87065] (b) growing the non-human organism or a part thereof under conditions which permit the production of saccharic acid or a composition comprising saccharic acid in said non-human organism or in the culture medium surrounding said non-human organism.

[87066] Accordingly, the present invention relates to a process for the production of glucose-1-phosphate, which comprises
[87067] (a) increasing or generating the activity of a high-affinity branched-chain amino acid transport protein in the cytosol of a cell of a non-human organism or a part thereof, preferably a microorganism, a plant cell, a plant or a part thereof, as compared to a corresponding non-transformed wild type non-human organism or a part thereof; and
[87068] (b) growing the non-human organism or a part thereof under conditions which permit the production of glucose-1-phosphate or a composition comprising glucose-1-phosphate in said non-human organism or in the culture medium surrounding said non-human organism.

[87069] Accordingly, the present invention relates to a process for the production of myo-inositol, which comprises
[87070] (a) increasing or generating the activity of a high-affinity branched-chain amino acid transport protein in the cytosol of a cell of a non-human organism or a part thereof, preferably a microorganism, a plant cell, a plant or a part thereof, as compared to a corresponding non-transformed wild type non-human organism or a part thereof; and
[87071] (b) growing the non-human organism or a part thereof under conditions which permit the production of myo-inositol or a composition comprising myo-inositol in said non-human organism or in the culture medium surrounding said non-human organism.

[87072] Accordingly, the present invention relates to a process for the production of fructose, which comprises
[87073] (a) increasing or generating the activity of a trehalase in the cytosol of a cell of a non-human organism or a part thereof, preferably a microorganism, a plant cell, a plant or a part thereof, as compared to a corresponding non-transformed wild type non-human organism or a part thereof; and
[87074] (b) growing the non-human organism or a part thereof under conditions which permit the production of fructose or a composition comprising fructose in said non-human organism or in the culture medium surrounding said non-human organism.

[87075] Accordingly, the present invention relates to a process for the production of galactinol, which comprises
[87076] (a) increasing or generating the activity of a trehalase in the cytosol of a cell of a non-human organism or a part thereof, preferably a microorganism, a plant cell, a plant or a part thereof, as compared to a corresponding non-transformed wild type non-human organism or a part thereof; and
[87077] (b) growing the non-human organism or a part thereof under conditions which permit the production of galactinol or a composition comprising galactinol in said non-human organism or in the culture medium surrounding said non-human organism.

[87078] Accordingly, the present invention relates to a process for the production of fructose, which comprises
[87079] (a) increasing or generating the activity of a mannitol-1-phosphate dehydrogenase in the cytosol of a cell of a non-human organism or a part thereof, preferably a microorganism, a plant cell, a plant or a part thereof, as compared to a corresponding non-transformed wild type non-human organism or a part thereof; and
[87080] (b) growing the non-human organism or a part thereof under conditions which permit the production of fructose or a composition comprising fructose in said non-human organism or in the culture medium surrounding said non-human organism.

[87081] Accordingly, the present invention relates to a process for the production of mannitol, which comprises
[87082] (a) increasing or generating the activity of a mannitol-1-phosphate dehydrogenase in the cytosol of a cell of a non-human organism or a part thereof, preferably a microorganism, a plant cell, a plant or a part thereof, as compared to a corresponding non-transformed wild type non-human organism or a part thereof; and
[87083] (b) growing the non-human organism or a part thereof under conditions which permit the production of mannitol or a composition comprising mannitol in said non-human organism or in the culture medium surrounding said non-human organism.

[87084] Accordingly, the present invention relates to a process for the production of sorbitol, which comprises
[87085] (a) increasing or generating the activity of a mannitol-1-phosphate dehydrogenase in the cytosol of a cell of a non-human organism or a part thereof, preferably a microorganism, a plant cell, a plant or a part thereof, as compared to a corresponding non-transformed wild type non-human organism or a part thereof; and
[87086] (b) growing the non-human organism or a part thereof under conditions which permit the production of sorbitol or a composition comprising sorbitol in said non-human organism or in the culture medium surrounding said non-human organism.

[87087] Accordingly, the present invention relates to a process for the production of galactinol, which comprises
[87088] (a) increasing or generating the activity of a ketol-acid reductoisomerase in the cytosol of a cell of a non-human organism or a part thereof, preferably a microorganism, a plant cell, a plant or a part thereof, as compared to a corresponding non-transformed wild type non-human organism or a part thereof; and
[87089] (b) growing the non-human organism or a part thereof under conditions which permit the production of galactinol or a composition comprising galactinol in said non-human organism or in the culture medium surrounding said non-human organism.

[87090] Accordingly, the present invention relates to a process for the production of myo-inositol, which comprises
[87091] (a) increasing or generating the activity of a b3777-protein in the cytosol of a cell of a non-human organism or a part thereof, preferably a microorganism, a plant cell, a plant or a part thereof, as compared to a corresponding non-transformed wild type non-human organism or a part thereof; and
[87092] (b) growing the non-human organism or a part thereof under conditions which permit the production of myo-inositol or a composition comprising myo-inositol in said non-human organism or in the culture medium surrounding said non-human organism.

[87093] Accordingly, the present invention relates to a process for the production of myo-inositol, which comprises
[87094] (a) increasing or generating the activity of a b3817-protein in the cytosol of a cell of a non-human organism or a part thereof, preferably a microorganism, a plant cell, a plant or a part thereof, as compared to a corresponding non-transformed wild type non-human organism or a part thereof; and
[87095] (b) growing the non-human organism or a part thereof under conditions which permit the production of myo-inositol or a composition comprising myo-inositol in said non-human organism or in the culture medium surrounding said non-human organism.

[87096] Accordingly, the present invention relates to a process for the production of raffinose, which comprises
[87097] (a) increasing or generating the activity of a b3817-protein in the cytosol of a cell of a non-human organism or a part thereof, preferably a microorganism, a plant cell, a plant or a part thereof, as compared to a corresponding non-transformed wild type non-human organism or a part thereof; and
[87098] (b) growing the non-human organism or a part thereof under conditions which permit the production of raffinose or a composition comprising raffinose in said non-human organism or in the culture medium surrounding said non-human organism.

[87099] Accordingly, the present invention relates to a process for the production of myo-inositol, which comprises
[87100] (a) increasing or generating the activity of a b3818-protein in the cytosol of a cell of a non-human organism or a part thereof, preferably a microorganism, a plant cell, a plant or a part thereof, as compared to a corresponding non-transformed wild type non-human organism or a part thereof; and
[87101] (b) growing the non-human organism or a part thereof under conditions which permit the production of myo-inositol or a composition comprising myo-inositol in said non-human organism or in the culture medium surrounding said non-human organism.

[87102] Accordingly, the present invention relates to a process for the production of myo-inositol, which comprises
[87103] (a) increasing or generating the activity of a threonine efflux protein in the cytosol of a cell of a non-human organism or a part thereof, preferably a microorganism, a plant cell, a plant or a part thereof, as compared to a corresponding non-transformed wild type non-human organism or a part thereof; and
[87104] (b) growing the non-human organism or a part thereof under conditions which permit the production of myo-inositol or a composition comprising myo-inositol in said non-human organism or in the culture medium surrounding said non-human organism.

[87105] Accordingly, the present invention relates to a process for the production of myo-inositol, which comprises
[87106] (a) increasing or generating the activity of a glutamine synthetase in the cytosol of a cell of a non-human organism or a part thereof, preferably a microorganism, a plant cell, a plant or a part thereof, as compared to a corresponding non-transformed wild type non-human organism or a part thereof; and
[87107] (b) growing the non-human organism or a part thereof under conditions which permit the production of myo-inositol or a composition comprising myo-inositol in said non-human organism or in the culture medium surrounding said non-human organism.

[87108] Accordingly, the present invention relates to a process for the production of verbascose, which comprises
[87109] (a) increasing or generating the activity of a glutamine synthetase in the cytosol of a cell of a non-human organism or a part thereof, preferably a microorganism, a plant cell, a plant or a part thereof, as compared to a corresponding non-transformed wild type non-human organism or a part thereof; and
[87110] (b) growing the non-human organism or a part thereof under conditions which permit the production of verbascose or a composition comprising verbascose in said non-human organism or in the culture medium surrounding said non-human organism.

[87111] Accordingly, the present invention relates to a process for the production of glucose-1-phosphate, which comprises
[87112] (a) increasing or generating the activity of a transcriptional regulator in the cytosol of a cell of a non-human organism or a part thereof, preferably a microorganism, a plant cell, a plant or a part thereof, as compared to a corresponding non-transformed wild type non-human organism or a part thereof; and
[87113] (b) growing the non-human organism or a part thereof under conditions which permit the production of glucose-1-phosphate or a composition comprising glucose-1-phosphate in said non-human organism or in the culture medium surrounding said non-human organism.

[87114] Accordingly, the present invention relates to a process for the production of fructose, which comprises
[87115] (a) increasing or generating the activity of a b3989-protein in the cytosol of a cell of a non-human organism or a part thereof, preferably a microorganism, a plant cell, a plant or a part thereof, as compared to a corresponding non-transformed wild type non-human organism or a part thereof; and
[87116] (b) growing the non-human organism or a part thereof under conditions which permit the production of fructose or a composition comprising fructose in said non-human organism or in the culture medium surrounding said non-human organism.

[87117] Accordingly, the present invention relates to a process for the production of glucose, which comprises
[87118] (a) increasing or generating the activity of a b3989-protein in the cytosol of a cell of a non-human organism or a part thereof, preferably a microorganism, a plant cell, a plant or a part thereof, as compared to a corresponding non-transformed wild type non-human organism or a part thereof; and
[87119] (b) growing the non-human organism or a part thereof under conditions which permit the production of glucose or a composition comprising glucose in said non-human organism or in the culture medium surrounding said non-human organism.

[87120] Accordingly, the present invention relates to a process for the production of glucose-1-phosphate, which comprises
[87121] (a) increasing or generating the activity of a b3989-protein in the cytosol of a cell of a non-human organism or a part thereof, preferably a microorganism, a plant cell, a plant or a part thereof, as compared to a corresponding non-transformed wild type non-human organism or a part thereof; and
[87122] (b) growing the non-human organism or a part thereof under conditions which permit the production of glucose-1-phosphate or a composition comprising glucose-1-phosphate in said non-human organism or in the culture medium surrounding said non-human organism.

[87123] Accordingly, the present invention relates to a process for the production of raffinose, which comprises
[87124] (a) increasing or generating the activity of a b3989-protein in the cytosol of a cell of a non-human organism or a part thereof, preferably a microorganism, a plant cell, a plant or a part thereof, as compared to a corresponding non-transformed wild type non-human organism or a part thereof; and
[87125] (b) growing the non-human organism or a part thereof under conditions which permit the production of raffinose or a composition comprising raffinose in said non-human organism or in the culture medium surrounding said non-human organism.

[87126] Accordingly, the present invention relates to a process for the production of sucrose, which comprises
[87127] (a) increasing or generating the activity of a b3989-protein in the cytosol of a cell of a non-human organism or a part thereof, preferably a microorganism, a plant cell, a plant or a part thereof, as compared to a corresponding non-transformed wild type non-human organism or a part thereof; and
[87128] (b) growing the non-human organism or a part thereof under conditions which permit the production of sucrose or a composition comprising sucrose in said non-human organism or in the culture medium surrounding said non-human organism.

[87129] Accordingly, the present invention relates to a process for the production of galactinol, which comprises
[87130] (a) increasing or generating the activity of a acetyltransferase in the cytosol of a cell of a non-human organism or a part thereof, preferably a microorganism, a plant cell, a plant or a part thereof, as compared to a corresponding non-transformed wild type non-human organism or a part thereof; and
[87131] (b) growing the non-human organism or a part thereof under conditions which permit the production of galactinol or a composition comprising galactinol in said non-human organism or in the culture medium surrounding said non-human organism.

[87132] Accordingly, the present invention relates to a process for the production of fructose, which comprises
[87133] (a) increasing or generating the activity of a b4029-protein in the cytosol of a cell of a non-human organism or a part thereof, preferably a microorganism, a plant cell, a plant or a part thereof, as compared to a corresponding non-transformed wild type non-human organism or a part thereof; and
[87134] (b) growing the non-human organism or a part thereof under conditions which permit the production of fructose or a composition comprising fructose in said non-human organism or in the culture medium surrounding said non-human organism.

[87135] Accordingly, the present invention relates to a process for the production of glucose, which comprises
[87136] (a) increasing or generating the activity of a b4029-protein in the cytosol of a cell of a non-human organism or a part thereof, preferably a microorganism, a plant cell, a plant or a part thereof, as compared to a corresponding non-transformed wild type non-human organism or a part thereof; and
[87137] (b) growing the non-human organism or a part thereof under conditions which permit the production of glucose or a composition comprising glucose in said non-human organism or in the culture medium surrounding said non-human organism.

[87138] Accordingly, the present invention relates to a process for the production of sedoheptulose-7-phosphate, which comprises
[87139] (a) increasing or generating the activity of a b4029-protein in the cytosol of a cell of a non-human organism or a part thereof, preferably a microorganism, a plant cell, a plant or a part thereof, as compared to a corresponding non-transformed wild type non-human organism or a part thereof; and
[87140] (b) growing the non-human organism or a part thereof under conditions which permit the production of sedoheptulose-7-phosphate or a composition comprising sedoheptulose-7-phosphate in said non-human organism or in the culture medium surrounding said non-human organism.

[87141] Accordingly, the present invention relates to a process for the production of glucose-1-phosphate, which comprises
[87142] (a) increasing or generating the activity of a chorismate lyase in the cytosol of a cell of a non-human organism or a part thereof, preferably a microorganism, a plant cell, a plant or a part thereof, as compared to a corresponding non-transformed wild type non-human organism or a part thereof; and
[87143] (b) growing the non-human organism or a part thereof under conditions which permit the production of glucose-1-phosphate or a composition comprising glucose-1-phosphate in said non-human organism or in the culture medium surrounding said non-human organism.

[87144] Accordingly, the present invention relates to a process for the production of 3,4,5-trihydroxypentanoic acid, which comprises
[87145] (a) increasing or generating the activity of a chorismate lyase in the cytosol of a cell of a non-human organism or a part thereof, preferably a microorganism, a plant cell, a plant or a part thereof, as compared to a corresponding non-transformed wild type non-human organism or a part thereof; and
[87146] (b) growing the non-human organism or a part thereof under conditions which permit the production of 3,4,5-trihydroxypentanoic acid or a composition comprising 3,4,5-trihydroxypentanoic acid in said non-human organism or in the culture medium surrounding said non-human organism.

[87147] Accordingly, the present invention relates to a process for the production of fructose, which comprises
[87148] (a) increasing or generating the activity of a b4050-protein in the cytosol of a cell of a non-human organism or a part thereof, preferably a microorganism, a plant cell, a plant or a part thereof, as compared to a corresponding non-transformed wild type non-human organism or a part thereof; and
[87149] (b) growing the non-human organism or a part thereof under conditions which permit the production of fructose or a composition comprising fructose in said non-human organism or in the culture medium surrounding said non-human organism.

[87150] Accordingly, the present invention relates to a process for the production of glucose, which comprises
[87151] (a) increasing or generating the activity of a b4050-protein in the cytosol of a cell of a non-human organism or a part thereof, preferably a microorganism, a plant cell, a plant or a part thereof, as compared to a corresponding non-transformed wild type non-human organism or a part thereof; and
[87152] (b) growing the non-human organism or a part thereof under conditions which permit the production of glucose or a composition comprising glucose in said non-human organism or in the culture medium surrounding said non-human organism.

[87153] Accordingly, the present invention relates to a process for the production of myo-inositol, which comprises
[87154] (a) increasing or generating the activity of a b4050-protein in the cytosol of a cell of a non-human organism or a part thereof, preferably a microorganism, a plant cell, a plant or a part thereof, as compared to a corresponding non-transformed wild type non-human organism or a part thereof; and
[87155] (b) growing the non-human organism or a part thereof under conditions which permit the production of myo-inositol or a composition comprising myo-inositol in said non-human organism or in the culture medium surrounding said non-human organism.

[87156] Accordingly, the present invention relates to a process for the production of fructose, which comprises
[87157] (a) increasing or generating the activity of a b4056-protein in the cytosol of a cell of a non-human organism or a part thereof, preferably a microorganism, a plant cell, a plant or a part thereof, as compared to a corresponding non-transformed wild type non-human organism or a part thereof; and
[87158] (b) growing the non-human organism or a part thereof under conditions which permit the production of fructose or a composition comprising fructose in said non-human organism or in the culture medium surrounding said non-human organism.

[87159] Accordingly, the present invention relates to a process for the production of galactinol, which comprises
[87160] (a) increasing or generating the activity of a acetyl-coenzyme A synthetase in the cytosol of a cell of a non-human organism or a part thereof, preferably a microorganism, a plant cell, a plant or a part thereof, as compared to a corresponding non-transformed wild type non-human organism or a part thereof; and
[87161] (b) growing the non-human organism or a part thereof under conditions which permit the production of galactinol or a composition comprising galactinol in said non-human organism or in the culture medium surrounding said non-human organism.

[87162] Accordingly, the present invention relates to a process for the production of glucose-1-phosphate, which comprises
[87163] (a) increasing or generating the activity of a lipoprotein precursor in the cytosol of a cell of a non-human organism or a part thereof, preferably a microorganism, a plant cell, a plant or a part thereof, as compared to a corresponding non-transformed wild type non-human organism or a part thereof; and
[87164] (b) growing the non-human organism or a part thereof under conditions which permit the production of glucose-1-phosphate or a composition comprising glucose-1-phosphate in said non-human organism or in the culture medium surrounding said non-human organism.

[87165] Accordingly, the present invention relates to a process for the production of 3,4,5-trihydroxypentanoic acid, which comprises
[87166] (a) increasing or generating the activity of a lipoprotein precursor in the cytosol of a cell of a non-human organism or a part thereof, preferably a microorganism, a plant cell, a plant or a part thereof, as compared to a corresponding non-transformed wild type non-human organism or a part thereof; and
[87167] (b) growing the non-human organism or a part thereof under conditions which permit the production of 3,4,5-trihydroxypentanoic acid or a composition comprising 3,4,5-trihydroxypentanoic acid in said non-human organism or in the culture medium surrounding said non-human organism.

[87168] Accordingly, the present invention relates to a process for the production of myo-inositol, which comprises
[87169] (a) increasing or generating the activity of a b4250-protein in the cytosol of a cell of a non-human organism or a part thereof, preferably a microorganism, a plant cell, a plant or a part thereof, as compared to a corresponding non-transformed wild type non-human organism or a part thereof; and
[87170] (b) growing the non-human organism or a part thereof under conditions which permit the production of myo-inositol or a composition comprising myo-inositol in said non-human organism or in the culture medium surrounding said non-human organism.

[87171] Accordingly, the present invention relates to a process for the production of raffinose, which comprises
[87172] (a) increasing or generating the activity of a b4250-protein in the cytosol of a cell of a non-human organism or a part thereof, preferably a microorganism, a plant cell, a plant or a part thereof, as compared to a corresponding non-transformed wild type non-human organism or a part thereof; and
[87173] (b) growing the non-human organism or a part thereof under conditions which permit the production of raffinose or a composition comprising raffinose in said non-human organism or in the culture medium surrounding said non-human organism.

[87174] Accordingly, the present invention relates to a process for the production of fructose, which comprises
[87175] (a) increasing or generating the activity of a acetyltransferase in the cytosol of a cell of a non-human organism or a part thereof, preferably a microorganism, a plant cell, a plant or a part thereof, as compared to a corresponding non-transformed wild type non-human organism or a part thereof; and
[87176] (b) growing the non-human organism or a part thereof under conditions which permit the production of fructose or a composition comprising fructose in said non-human organism or in the culture medium surrounding said non-human organism.

[87177] Accordingly, the present invention relates to a process for the production of glucose, which comprises
[87178] (a) increasing or generating the activity of a acetyltransferase in the cytosol of a cell of a non-human organism or a part thereof, preferably a microorganism, a plant cell, a plant or a part thereof, as compared to a corresponding non-transformed wild type non-human organism or a part thereof; and
[87179] (b) growing the non-human organism or a part thereof under conditions which permit the production of glucose or a composition comprising glucose in said non-human organism or in the culture medium surrounding said non-human organism.

[87180] Accordingly, the present invention relates to a process for the production of fructose, which comprises
[87181] (a) increasing or generating the activity of a gluconate transport system permease 3 in the cytosol of a cell of a non-human organism or a part thereof, preferably a microorganism, a plant cell, a plant or a part thereof, as compared to a corresponding non-transformed wild type non-human organism or a part thereof; and
[87182] (b) growing the non-human organism or a part thereof under conditions which permit the production of fructose or a composition comprising fructose in said non-human organism or in the culture medium surrounding said non-human organism.

[87183] Accordingly, the present invention relates to a process for the production of galactinol, which comprises
[87184] (a) increasing or generating the activity of a purine-nucleoside phosphorylase in the cytosol of a cell of a non-human organism or a part thereof, preferably a microorganism, a plant cell, a plant or a part thereof, as compared to a corresponding non-transformed wild type non-human organism or a part thereof; and
[87185] (b) growing the non-human organism or a part thereof under conditions which permit the production of galactinol or a composition comprising galactinol in said non-human organism or in the culture medium surrounding said non-human organism.

[87186] Accordingly, the present invention relates to a process for the production of myo-inositol, which comprises
[87187] (a) increasing or generating the activity of a lysine decarboxylase in the cytosol of a cell of a non-human organism or a part thereof, preferably a microorganism, a plant cell, a plant or a part thereof, as compared to a corresponding non-transformed wild type non-human organism or a part thereof; and
[87188] (b) growing the non-human organism or a part thereof under conditions which permit the production of myo-inositol or a composition comprising myo-inositol in said non-human organism or in the culture medium surrounding said non-human organism.

[87189] Accordingly, the present invention relates to a process for the production of fructose, which comprises
[87190] (a) increasing or generating the activity of a glutaredoxin in the cytosol of a cell of a non-human organism or a part thereof, preferably a microorganism, a plant cell, a plant or a part thereof, as compared to a corresponding non-transformed wild type non-human organism or a part thereof; and
[87191] (b) growing the non-human organism or a part thereof under conditions which permit the production of fructose or a composition comprising fructose in said non-human organism or in the culture medium surrounding said non-human organism.

[87192] Accordingly, the present invention relates to a process for the production of glucose, which comprises
[87193] (a) increasing or generating the activity of a glutaredoxin in the cytosol of a cell of a non-human organism or a part thereof, preferably a microorganism, a plant cell, a plant or a part thereof, as compared to a corresponding non-transformed wild type non-human organism or a part thereof; and
[87194] (b) growing the non-human organism or a part thereof under conditions which permit the production of glucose or a composition comprising glucose in said non-human organism or in the culture medium surrounding said non-human organism.

[87195] Accordingly, the present invention relates to a process for the production of glucose-1-phosphate, which comprises
[87196] (a) increasing or generating the activity of a glutaredoxin in the cytosol of a cell of a non-human organism or a part thereof, preferably a microorganism, a plant cell, a plant or a part thereof, as compared to a corresponding non-transformed wild type non-human organism or a part thereof; and
[87197] (b) growing the non-human organism or a part thereof under conditions which permit the production of glucose-1-phosphate or a composition comprising glucose-1-phosphate in said non-human organism or in the culture medium surrounding said non-human organism.

[87198] Accordingly, the present invention relates to a process for the production of myo-inositol, which comprises
[87199] (a) increasing or generating the activity of a glutaredoxin in the cytosol of a cell of a non-human organism or a part thereof, preferably a microorganism, a plant cell, a plant or a part thereof, as compared to a corresponding non-transformed wild type non-human organism or a part thereof; and
[87200] (b) growing the non-human organism or a part thereof under conditions which permit the production of myo-inositol or a composition comprising myo-inositol in said non-human organism or in the culture medium surrounding said non-human organism.

[87201] Accordingly, the present invention relates to a process for the production of sucrose, which comprises
[87202] (a) increasing or generating the activity of a glutaredoxin in the cytosol of a cell of a non-human organism or a part thereof, preferably a microorganism, a plant cell, a plant or a part thereof, as compared to a corresponding non-transformed wild type non-human organism or a part thereof; and
[87203] (b) growing the non-human organism or a part thereof under conditions which permit the production of sucrose or a composition comprising sucrose in said non-human organism or in the culture medium surrounding said non-human organism.

[87204] Accordingly, the present invention relates to a process for the production of glucose-1-phosphate, which comprises
[87205] (a) increasing or generating the activity of a transcription factor in the cytosol of a cell of a non-human organism or a part thereof, preferably a microorganism, a plant cell, a plant or a part thereof, as compared to a corresponding non-transformed wild type non-human organism or a part thereof; and
[87206] (b) growing the non-human organism or a part thereof under conditions which permit the production of glucose-1-phosphate or a composition comprising glucose-1-phosphate in said non-human organism or in the culture medium surrounding said non-human organism.

[87207] Accordingly, the present invention relates to a process for the production of 3,4,5-trihydroxypentanoic acid, which comprises
[87208] (a) increasing or generating the activity of a transcription factor in the cytosol of a cell of a non-human organism or a part thereof, preferably a microorganism, a plant cell, a plant or a part thereof, as compared to a corresponding non-transformed wild type non-human organism or a part thereof; and
[87209] (b) growing the non-human organism or a part thereof under conditions which permit the production of 3,4,5-trihydroxypentanoic acid or a composition comprising 3,4,5-trihydroxypentanoic acid in said non-human organism or in the culture medium surrounding said non-human organism.

[87210] Accordingly, the present invention relates to a process for the production of fructose, which comprises
[87211] (a) increasing or generating the activity of a transcription factor in the cytosol of a cell of a non-human organism or a part thereof, preferably a microorganism, a plant cell, a plant or a part thereof, as compared to a corresponding non-transformed wild type non-human organism or a part thereof; and
[87212] (b) growing the non-human organism or a part thereof under conditions which permit the production of fructose or a composition comprising fructose in said non-human organism or in the culture medium surrounding said non-human organism.

[87213] Accordingly, the present invention relates to a process for the production of glucose-1-phosphate, which comprises
[87214] (a) increasing or generating the activity of a GM02LC38418-protein in the cytosol of a cell of a non-human organism or a part thereof, preferably a microorganism, a plant cell, a plant or a part thereof, as compared to a corresponding non-transformed wild type non-human organism or a part thereof; and
[87215] (b) growing the non-human organism or a part thereof under conditions which permit the production of glucose-1-phosphate or a composition comprising glucose-1-phosphate in said non-human organism or in the culture medium surrounding said non-human organism.

[87216] Accordingly, the present invention relates to a process for the production of glucose-1-phosphate, which comprises
[87217] (a) increasing or generating the activity of a cyclin D in the cytosol of a cell of a non-human organism or a part thereof, preferably a microorganism, a plant cell, a plant or a part thereof, as compared to a corresponding non-transformed wild type non-human organism or a part thereof; and
[87218] (b) growing the non-human organism or a part thereof under conditions which permit the production of glucose-1-phosphate or a composition comprising glucose-1-phosphate in said non-human organism or in the culture medium surrounding said non-human organism.

[87219] Accordingly, the present invention relates to a process for the production of raffinose, which comprises
[87220] (a) increasing or generating the activity of a cyclin D in the cytosol of a cell of a non-human organism or a part thereof, preferably a microorganism, a plant cell, a plant or a part thereof, as compared to a corresponding non-transformed wild type non-human organism or a part thereof; and
[87221] (b) growing the non-human organism or a part thereof under conditions which permit the production of raffinose or a composition comprising raffinose in said non-human organism or in the culture medium surrounding said non-human organism.

[87222] Accordingly, the present invention relates to a process for the production of sucrose, which comprises
[87223] (a) increasing or generating the activity of a cyclin D in the cytosol of a cell of a non-human organism or a part thereof, preferably a microorganism, a plant cell, a plant or a part thereof, as compared to a corresponding non-transformed wild type non-human organism or a part thereof; and
[87224] (b) growing the non-human organism or a part thereof under conditions which permit the production of sucrose or a composition comprising sucrose in said non-human organism or in the culture medium surrounding said non-human organism.

[87225] Accordingly, the present invention relates to a process for the production of 3,4,5-trihydroxypentanoic acid, which comprises
[87226] (a) increasing or generating the activity of a GM02LC46-protein in the cytosol of a cell of a non-human organism or a part thereof, preferably a microorganism, a plant cell, a plant or a part thereof, as compared to a corresponding non-transformed wild type non-human organism or a part thereof; and
[87227] (b) growing the non-human organism or a part thereof under conditions which permit the production of 3,4,5-trihydroxypentanoic acid or a composition comprising 3,4,5-trihydroxypentanoic acid in said non-human organism or in the culture medium surrounding said non-human organism.

[87228] Accordingly, the present invention relates to a process for the production of 3,4,5-trihydroxypentanoic acid, which comprises
[87229] (a) increasing or generating the activity of a transcription factor in the cytosol of a cell of a non-human organism or a part thereof, preferably a microorganism, a plant cell, a plant or a part thereof, as compared to a corresponding non-transformed wild type non-human organism or a part thereof; and
[87230] (b) growing the non-human organism or a part thereof under conditions which permit the production of 3,4,5-trihydroxypentanoic acid or a composition comprising 3,4,5-trihydroxypentanoic acid in said non-human organism or in the culture medium surrounding said non-human organism.

[87231] Accordingly, the present invention relates to a process for the production of myo-inositol, which comprises
[87232] (a) increasing or generating the activity of a alkaline phosphatase in the cytosol of a cell of a non-human organism or a part thereof, preferably a microorganism, a plant cell, a plant or a part thereof, as compared to a corresponding non-transformed wild type non-human organism or a part thereof; and
[87233] (b) growing the non-human organism or a part thereof under conditions which permit the production of myo-inositol or a composition comprising myo-inositol in said non-human organism or in the culture medium surrounding said non-human organism.

[87234] Accordingly, the present invention relates to a process for the production of verbascose, which comprises
[87235] (a) increasing or generating the activity of a flavodoxin in the cytosol of a cell of a non-human organism or a part thereof, preferably a microorganism, a plant cell, a plant or a part thereof, as compared to a corresponding non-transformed wild type non-human organism or a part thereof; and
[87236] (b) growing the non-human organism or a part thereof under conditions which permit the production of verbascose or a composition comprising verbascose in said non-human organism or in the culture medium surrounding said non-human organism.

[87237] Accordingly, the present invention relates to a process for the production of sucrose, which comprises
[87238] (a) increasing or generating the activity of a sll0254-protein in the cytosol of a cell of a non-human organism or a part thereof, preferably a microorganism, a plant cell, a plant or a part thereof, as compared to a corresponding non-transformed wild type non-human organism or a part thereof; and
[87239] (b) growing the non-human organism or a part thereof under conditions which permit the production of sucrose or a composition comprising sucrose in said non-human organism or in the culture medium surrounding said non-human organism.

[87240] Accordingly, the present invention relates to a process for the production of verbascose, which comprises
[87241] (a) increasing or generating the activity of a sll0281-protein in the cytosol of a cell of a non-human organism or a part thereof, preferably a microorganism, a plant cell, a plant or a part thereof, as compared to a corresponding non-transformed wild type non-human organism or a part thereof; and
[87242] (b) growing the non-human organism or a part thereof under conditions which permit the production of verbascose or a composition comprising verbascose in said non-human organism or in the culture medium surrounding said non-human organism.

[87243] Accordingly, the present invention relates to a process for the production of myo-inositol, which comprises
[87244] (a) increasing or generating the activity of a sll0354-protein in the cytosol of a cell of a non-human organism or a part thereof, preferably a microorganism, a plant cell, a plant or a part thereof, as compared to a corresponding non-transformed wild type non-human organism or a part thereof; and
[87245] (b) growing the non-human organism or a part thereof under conditions which permit the production of myo-inositol or a composition comprising myo-inositol in said non-human organism or in the culture medium surrounding said non-human organism.

[87246] Accordingly, the present invention relates to a process for the production of myo-inositol, which comprises
[87247] (a) increasing or generating the activity of a bifunctional protein (phosphoribosyltransferase and regulatory protein) in the cytosol of a cell of a non-human organism or a part thereof, preferably a microorganism, a plant cell, a plant or a part thereof, as compared to a corresponding non-transformed wild type non-human organism or a part thereof; and
[87248] (b) growing the non-human organism or a part thereof under conditions which permit the production of myo-inositol or a composition comprising myo-inositol in said non-human organism or in the culture medium surrounding said non-human organism.

[87249] Accordingly, the present invention relates to a process for the production of glucose-1-phosphate, which comprises
[87250] (a) increasing or generating the activity of a sll0418-protein in the cytosol of a cell of a non-human organism or a part thereof, preferably a microorganism, a plant cell, a plant or a part thereof, as compared to a corresponding non-transformed wild type non-human organism or a part thereof; and
[87251] (b) growing the non-human organism or a part thereof under conditions which permit the production of glucose-1-phosphate or a composition comprising glucose-1-phosphate in said non-human organism or in the culture medium surrounding said non-human organism.

[87252] Accordingly, the present invention relates to a process for the production of myo-inositol, which comprises
[87253] (a) increasing or generating the activity of a sll0418-protein in the cytosol of a cell of a non-human organism or a part thereof, preferably a microorganism, a plant cell, a plant or a part thereof, as compared to a corresponding non-transformed wild type non-human organism or a part thereof; and
[87254] (b) growing the non-human organism or a part thereof under conditions which permit the production of myo-inositol or a composition comprising myo-inositol in said non-human organism or in the culture medium surrounding said non-human organism.

[87255] Accordingly, the present invention relates to a process for the production of myo-inositol, which comprises
[87256] (a) increasing or generating the activity of a sll0418-protein in the cytosol of a cell of a non-human organism or a part thereof, preferably a microorganism, a plant cell, a plant or a part thereof, as compared to a corresponding non-transformed wild type non-human organism or a part thereof; and
[87257] (b) growing the non-human organism or a part thereof under conditions which permit the production of myo-inositol or a composition comprising myo-inositol in said non-human organism or in the culture medium surrounding said non-human organism.

[87258] Accordingly, the present invention relates to a process for the production of saccharic acid, which comprises
[87259] (a) increasing or generating the activity of a sll0418-protein in the cytosol of a cell of a non-human organism or a part thereof, preferably a microorganism, a plant cell, a plant or a part thereof, as compared to a corresponding non-transformed wild type non-human organism or a part thereof; and
[87260] (b) growing the non-human organism or a part thereof under conditions which permit the production of saccharic acid or a composition comprising saccharic acid in said non-human organism or in the culture medium surrounding said non-human organism.

[87261] Accordingly, the present invention relates to a process for the production of 3,4,5-trihydroxypentanoic acid, which comprises
[87262] (a) increasing or generating the activity of a sll0418-protein in the cytosol of a cell of a non-human organism or a part thereof, preferably a microorganism, a plant cell, a plant or a part thereof, as compared to a corresponding non-transformed wild type non-human organism or a part thereof; and
[87263] (b) growing the non-human organism or a part thereof under conditions which permit the production of 3,4,5-trihydroxypentanoic acid or a composition comprising 3,4,5-trihydroxypentanoic acid in said non-human organism or in the culture medium surrounding said non-human organism.

[87264] Accordingly, the present invention relates to a process for the production of glucose-1-phosphate, which comprises
[87265] (a) increasing or generating the activity of a urease subunit in the cytosol of a cell of a non-human organism or a part thereof, preferably a microorganism, a plant cell, a plant or a part thereof, as compared to a corresponding non-transformed wild type non-human organism or a part thereof; and
[87266] (b) growing the non-human organism or a part thereof under conditions which permit the production of glucose-1-phosphate or a composition comprising glucose-1-phosphate in said non-human organism or in the culture medium surrounding said non-human organism.

[87267] Accordingly, the present invention relates to a process for the production of glucose-1-phosphate, which comprises
[87268] (a) increasing or generating the activity of a glucokinase in the cytosol of a cell of a non-human organism or a part thereof, preferably a microorganism, a plant cell, a plant or a part thereof, as compared to a corresponding non-transformed wild type non-human organism or a part thereof; and
[87269] (b) growing the non-human organism or a part thereof under conditions which permit the production of glucose-1-phosphate or a composition comprising glucose-1-phosphate in said non-human organism or in the culture medium surrounding said non-human organism.

[87270] Accordingly, the present invention relates to a process for the production of saccharic acid, which comprises
[87271] (a) increasing or generating the activity of a urease accessory protein in the cytosol of a cell of a non-human organism or a part thereof, preferably a microorganism, a plant cell, a plant or a part thereof, as compared to a corresponding non-transformed wild type non-human organism or a part thereof; and
[87272] (b) growing the non-human organism or a part thereof under conditions which permit the production of saccharic acid or a composition comprising saccharic acid in said non-human organism or in the culture medium surrounding said non-human organism.

[87273] Accordingly, the present invention relates to a process for the production of glucose-1-phosphate, which comprises
[87274] (a) increasing or generating the activity of a binding-protein-dependent transport systems inner membrane component in the cytosol of a cell of a non-human organism or a part thereof, preferably a microorganism, a plant cell, a plant or a part thereof, as compared to a corresponding non-transformed wild type non-human organism or a part thereof; and
[87275] (b) growing the non-human organism or a part thereof under conditions which permit the production of glucose-1-phosphate or a composition comprising glucose-1-phosphate in said non-human organism or in the culture medium surrounding said non-human organism.

[87276] Accordingly, the present invention relates to a process for the production of 3,4,5-trihydroxypentanoic acid, which comprises
[87277] (a) increasing or generating the activity of a binding-protein-dependent transport systems inner membrane component in the cytosol of a cell of a non-human organism or a part thereof, preferably a microorganism, a plant cell, a plant or a part thereof, as compared to a corresponding non-transformed wild type non-human organism or a part thereof; and
[87278] (b) growing the non-human organism or a part thereof under conditions which permit the production of 3,4,5-trihydroxypentanoic acid or a composition comprising 3,4,5-trihydroxypentanoic acid in said non-human organism or in the culture medium surrounding said non-human organism.

[87279] Accordingly, the present invention relates to a process for the production of glucose-1-phosphate, which comprises
[87280] (a) increasing or generating the activity of a 3-deoxy-7-phosphoheptulonate synthase in the cytosol of a cell of a non-human organism or a part thereof, preferably a microorganism, a plant cell, a plant or a part thereof, as compared to a corresponding non-transformed wild type non-human organism or a part thereof; and
[87281] (b) growing the non-human organism or a part thereof under conditions which permit the production of glucose-1-phosphate or a composition comprising glucose-1-phosphate in said non-human organism or in the culture medium surrounding said non-human organism.

[87282] Accordingly, the present invention relates to a process for the production of fructose, which comprises
[87283] (a) increasing or generating the activity of a glycogen synthase in the cytosol of a cell of a non-human organism or a part thereof, preferably a microorganism, a plant cell, a plant or a part thereof, as compared to a corresponding non-transformed wild type non-human organism or a part thereof; and
[87284] (b) growing the non-human organism or a part thereof under conditions which permit the production of fructose or a composition comprising fructose in said non-human organism or in the culture medium surrounding said non-human organism.

[87285] Accordingly, the present invention relates to a process for the production of sucrose, which comprises
[87286] (a) increasing or generating the activity of a glycogen synthase in the cytosol of a cell of a non-human organism or a part thereof, preferably a microorganism, a plant cell, a plant or a part thereof, as compared to a corresponding non-transformed wild type non-human organism or a part thereof; and
[87287] (b) growing the non-human organism or a part thereof under conditions which permit the production of sucrose or a composition comprising sucrose in said non-human organism or in the culture medium surrounding said non-human organism.

[87288] Accordingly, the present invention relates to a process for the production of glucose-1-phosphate, which comprises
[87289] (a) increasing or generating the activity of a coproporphyrinogen oxidase in the cytosol of a cell of a non-human organism or a part thereof, preferably a microorganism, a plant cell, a plant or a part thereof, as compared to a corresponding non-transformed wild type non-human organism or a part thereof; and
[87290] (b) growing the non-human organism or a part thereof under conditions which permit the production of glucose-1-phosphate or a composition comprising glucose-1-phosphate in said non-human organism or in the culture medium surrounding said non-human organism.

[87291] Accordingly, the present invention relates to a process for the production of 3,4,5-trihydroxypentanoic acid, which comprises
[87292] (a) increasing or generating the activity of a short chain dehydrogenase in the cytosol of a cell of a non-human organism or a part thereof, preferably a microorganism, a plant cell, a plant or a part thereof, as compared to a corresponding non-transformed wild type non-human organism or a part thereof; and
[87293] (b) growing the non-human organism or a part thereof under conditions which permit the production of 3,4,5-trihydroxypentanoic acid or a composition comprising 3,4,5-trihydroxypentanoic acid in said non-human organism or in the culture medium surrounding said non-human organism.

[87294] Accordingly, the present invention relates to a process for the production of raffinose, which comprises
[87295] (a) increasing or generating the activity of a glycogen (starch) synthase in the cytosol of a cell of a non-human organism or a part thereof, preferably a microorganism, a plant cell, a plant or a part thereof, as compared to a corresponding non-transformed wild type non-human organism or a part thereof; and
[87296] (b) growing the non-human organism or a part thereof under conditions which permit the production of raffinose or a composition comprising raffinose in said non-human organism or in the culture medium surrounding said non-human organism.

[87297] Accordingly, the present invention relates to a process for the production of myo-inositol, which comprises
[87298] (a) increasing or generating the activity of a carbamoyl-phosphate synthase subunit in the cytosol of a cell of a non-human organism or a part thereof, preferably a microorganism, a plant cell, a plant or a part thereof, as compared to a corresponding non-transformed wild type non-human organism or a part thereof; and
[87299] (b) growing the non-human organism or a part thereof under conditions which permit the production of myo-inositol or a composition comprising myo-inositol in said non-human organism or in the culture medium surrounding said non-human organism.

[87300] Accordingly, the present invention relates to a process for the production of 3,4,5-trihydroxypentanoic acid, which comprises
[87301] (a) increasing or generating the activity of a carbamoyl-phosphate synthase subunit in the cytosol of a cell of a non-human organism or a part thereof, preferably a microorganism, a plant cell, a plant or a part thereof, as compared to a corresponding non-transformed wild type non-human organism or a part thereof; and
[87302] (b) growing the non-human organism or a part thereof under conditions which permit the production of 3,4,5-trihydroxypentanoic acid or a composition comprising 3,4,5-trihydroxypentanoic acid in said non-human organism or in the culture medium surrounding said non-human organism.

[87303] Accordingly, the present invention relates to a process for the production of myo-inositol, which comprises
[87304] (a) increasing or generating the activity of a 4-alpha-glucanotransferase in the cytosol of a cell of a non-human organism or a part thereof, preferably a microorganism, a plant cell, a plant or a part thereof, as compared to a corresponding non-transformed wild type non-human organism or a part thereof; and
[87305] (b) growing the non-human organism or a part thereof under conditions which permit the production of myo-inositol or a composition comprising myo-inositol in said non-human organism or in the culture medium surrounding said non-human organism.

[87306] Accordingly, the present invention relates to a process for the production of 3,4,5-trihydroxypentanoic acid, which comprises
[87307] (a) increasing or generating the activity of a alanine dehydrogenase in the cytosol of a cell of a non-human organism or a part thereof, preferably a microorganism, a plant cell, a plant or a part thereof, as compared to a corresponding non-transformed wild type non-human organism or a part thereof; and
[87308] (b) growing the non-human organism or a part thereof under conditions which permit the production of 3,4,5-trihydroxypentanoic acid or a composition comprising 3,4,5-trihydroxypentanoic acid in said non-human organism or in the culture medium surrounding said non-human organism.

[87309] Accordingly, the present invention relates to a process for the production of glucose, which comprises
[87310] (a) increasing or generating the activity of a sll1761-protein in the cytosol of a cell of a non-human organism or a part thereof, preferably a microorganism, a plant cell, a plant or a part thereof, as compared to a corresponding non-transformed wild type non-human organism or a part thereof; and
[87311] (b) growing the non-human organism or a part thereof under conditions which permit the production of glucose or a composition comprising glucose in said non-human organism or in the culture medium surrounding said non-human organism.

[87312] Accordingly, the present invention relates to a process for the production of glucose, which comprises
[87313] (a) increasing or generating the activity of a acyl transferase in the cytosol of a cell of a non-human organism or a part thereof, preferably a microorganism, a plant cell, a plant or a part thereof, as compared to a corresponding non-transformed wild type non-human organism or a part thereof; and
[87314] (b) growing the non-human organism or a part thereof under conditions which permit the production of glucose or a composition comprising glucose in said non-human organism or in the culture medium surrounding said non-human organism.

[87315] Accordingly, the present invention relates to a process for the production of glucose-1-phosphate, which comprises
[87316] (a) increasing or generating the activity of a cation-transporting ATPase in the cytosol of a cell of a non-human organism or a part thereof, preferably a microorganism, a plant cell, a plant or a part thereof, as compared to a corresponding non-transformed wild type non-human organism or a part thereof; and
[87317] (b) growing the non-human organism or a part thereof under conditions which permit the production of glucose-1-phosphate or a composition comprising glucose-1-phosphate in said non-human organism or in the culture medium surrounding said non-human organism.

[87318] Accordingly, the present invention relates to a process for the production of glucose-1-phosphate, which comprises
[87319] (a) increasing or generating the activity of a cation-transporting ATPase in the cytosol of a cell of a non-human organism or a part thereof, preferably a microorganism, a plant cell, a plant or a part thereof, as compared to a corresponding non-transformed wild type non-human organism or a part thereof; and
[87320] (b) growing the non-human organism or a part thereof under conditions which permit the production of glucose-1-phosphate or a composition comprising glucose-1-phosphate in said non-human organism or in the culture medium surrounding said non-human organism.

[87321] Accordingly, the present invention relates to a process for the production of myo-inositol, which comprises
[87322] (a) increasing or generating the activity of a cation-transporting ATPase in the cytosol of a cell of a non-human organism or a part thereof, preferably a microorganism, a plant cell, a plant or a part thereof, as compared to a corresponding non-transformed wild type non-human organism or a part thereof; and
[87323] (b) growing the non-human organism or a part thereof under conditions which permit the production of myo-inositol or a composition comprising myo-inositol in said non-human organism or in the culture medium surrounding said non-human organism.

[87324] Accordingly, the present invention relates to a process for the production of raffinose, which comprises
[87325] (a) increasing or generating the activity of a cation-transporting ATPase in the cytosol of a cell of a non-human organism or a part thereof, preferably a microorganism, a plant cell, a plant or a part thereof, as compared to a corresponding non-transformed wild type non-human organism or a part thereof; and
[87326] (b) growing the non-human organism or a part thereof under conditions which permit the production of raffinose or a composition comprising raffinose in said non-human organism or in the culture medium surrounding said non-human organism.

[87327] Accordingly, the present invention relates to a process for the production of glucose-1-phosphate, which comprises
[87328] (a) increasing or generating the activity of a glycosidase in the cytosol of a cell of a non-human organism or a part thereof, preferably a microorganism, a plant cell, a plant or a part thereof, as compared to a corresponding non-transformed wild type non-human organism or a part thereof; and
[87329] (b) growing the non-human organism or a part thereof under conditions which permit the production of glucose-1-phosphate or a composition comprising glucose-1-phosphate in said non-human organism or in the culture medium surrounding said non-human organism.

[87330] Accordingly, the present invention relates to a process for the production of fructose, which comprises
[87331] (a) increasing or generating the activity of a precorrin methylase in the cytosol of a cell of a non-human organism or a part thereof, preferably a microorganism, a plant cell, a plant or a part thereof, as compared to a corresponding non-transformed wild type non-human organism or a part thereof; and
[87332] (b) growing the non-human organism or a part thereof under conditions which permit the production of fructose or a composition comprising fructose in said non-human organism or in the culture medium surrounding said non-human organism.

[87333] Accordingly, the present invention relates to a process for the production of glucose, which comprises
[87334] (a) increasing or generating the activity of a precorrin methylase in the cytosol of a cell of a non-human organism or a part thereof, preferably a microorganism, a plant cell, a plant or a part thereof, as compared to a corresponding non-transformed wild type non-human organism or a part thereof; and
[87335] (b) growing the non-human organism or a part thereof under conditions which permit the production of glucose or a composition comprising glucose in said non-human organism or in the culture medium surrounding said non-human organism.

[87336] Accordingly, the present invention relates to a process for the production of glucose-1-phosphate, which comprises
[87337] (a) increasing or generating the activity of a oxidoreductase in the cytosol of a cell of a non-human organism or a part thereof, preferably a microorganism, a plant cell, a plant or a part thereof, as compared to a corresponding non-transformed wild type non-human organism or a part thereof; and
[87338] (b) growing the non-human organism or a part thereof under conditions which permit the production of glucose-1-phosphate or a composition comprising glucose-1-phosphate in said non-human organism or in the culture medium surrounding said non-human organism.

[87339] Accordingly, the present invention relates to a process for the production of 3,4,5-trihydroxypentanoic acid, which comprises
[87340] (a) increasing or generating the activity of a oxidoreductase in the cytosol of a cell of a non-human organism or a part thereof, preferably a microorganism, a plant cell, a plant or a part thereof, as compared to a corresponding non-transformed wild type non-human organism or a part thereof; and
[87341] (b) growing the non-human organism or a part thereof under conditions which permit the production of 3,4,5-trihydroxypentanoic acid or a composition comprising 3,4,5-trihydroxypentanoic acid in said non-human organism or in the culture medium surrounding said non-human organism.

[87342] Accordingly, the present invention relates to a process for the production of glucose-1-phosphate, which comprises
[87343] (a) increasing or generating the activity of a slr0600-protein in the cytosol of a cell of a non-human organism or a part thereof, preferably a microorganism, a plant cell, a plant or a part thereof, as compared to a corresponding non-transformed wild type non-human organism or a part thereof; and
[87344] (b) growing the non-human organism or a part thereof under conditions which permit the production of glucose-1-phosphate or a composition comprising glucose-1-phosphate in said non-human organism or in the culture medium surrounding said non-human organism.

[87345] Accordingly, the present invention relates to a process for the production of glucose-1-phosphate, which comprises
[87346] (a) increasing or generating the activity of a Glu/Leu/Phe/Val dehydrogenase in the cytosol of a cell of a non-human organism or a part thereof, preferably a microorganism, a plant cell, a plant or a part thereof, as compared to a corresponding non-transformed wild type non-human organism or a part thereof; and
[87347] (b) growing the non-human organism or a part thereof under conditions which permit the production of glucose-1-phosphate or a composition comprising glucose-1-phosphate in said non-human organism or in the culture medium surrounding said non-human organism.

[87348] Accordingly, the present invention relates to a process for the production of glucose-1-phosphate, which comprises
[87349] (a) increasing or generating the activity of a malate dehydrogenase in the cytosol of a cell of a non-human organism or a part thereof, preferably a microorganism, a plant cell, a plant or a part thereof, as compared to a corresponding non-transformed wild type non-human organism or a part thereof; and
[87350] (b) growing the non-human organism or a part thereof under conditions which permit the production of glucose-1-phosphate or a composition comprising glucose-1-phosphate in said non-human organism or in the culture medium surrounding said non-human organism.

[87351] Accordingly, the present invention relates to a process for the production of sucrose, which comprises
[87352] (a) increasing or generating the activity of a geranylgeranyl pyrophosphate synthase in the cytosol of a cell of a non-human organism or a part thereof, preferably a microorganism, a plant cell, a plant or a part thereof, as compared to a corresponding non-transformed wild type non-human organism or a part thereof; and
[87353] (b) growing the non-human organism or a part thereof under conditions which permit the production of sucrose or a composition comprising sucrose in said non-human organism or in the culture medium surrounding said non-human organism.

[87354] Accordingly, the present invention relates to a process for the production of fructose, which comprises
[87355] (a) increasing or generating the activity of a circadian clock protein in the cytosol of a cell of a non-human organism or a part thereof, preferably a microorganism, a plant cell, a plant or a part thereof, as compared to a corresponding non-transformed wild type non-human organism or a part thereof; and
[87356] (b) growing the non-human organism or a part thereof under conditions which permit the production of fructose or a composition comprising fructose in said non-human organism or in the culture medium surrounding said non-human organism.

[87357] Accordingly, the present invention relates to a process for the production of glucose, which comprises
[87358] (a) increasing or generating the activity of a circadian clock protein in the cytosol of a cell of a non-human organism or a part thereof, preferably a microorganism, a plant cell, a plant or a part thereof, as compared to a corresponding non-transformed wild type non-human organism or a part thereof; and
[87359] (b) growing the non-human organism or a part thereof under conditions which permit the production of glucose or a composition comprising glucose in said non-human organism or in the culture medium surrounding said non-human organism.

[87360] Accordingly, the present invention relates to a process for the production of glucose-1-phosphate, which comprises
[87361] (a) increasing or generating the activity of a circadian clock protein in the cytosol of a cell of a non-human organism or a part thereof, preferably a microorganism, a plant cell, a plant or a part thereof, as compared to a corresponding non-transformed wild type non-human organism or a part thereof; and
[87362] (b) growing the non-human organism or a part thereof under conditions which permit the production of glucose-1-phosphate or a composition comprising glucose-1-phosphate in said non-human organism or in the culture medium surrounding said non-human organism.

[87363] Accordingly, the present invention relates to a process for the production of glucose-1-phosphate, which comprises
[87364] (a) increasing or generating the activity of a amine oxidase in the cytosol of a cell of a non-human organism or a part thereof, preferably a microorganism, a plant cell, a plant or a part thereof, as compared to a corresponding non-transformed wild type non-human organism or a part thereof; and
[87365] (b) growing the non-human organism or a part thereof under conditions which permit the production of glucose-1-phosphate or a composition comprising glucose-1-phosphate in said non-human organism or in the culture medium surrounding said non-human organism.

[87366] Accordingly, the present invention relates to a process for the production of fructose, which comprises
[87367] (a) increasing or generating the activity of a kinase in the cytosol of a cell of a non-human organism or a part thereof, preferably a microorganism, a plant cell, a plant or a part thereof, as compared to a corresponding non-transformed wild type non-human organism or a part thereof; and
[87368] (b) growing the non-human organism or a part thereof under conditions which permit the production of fructose or a composition comprising fructose in said non-human organism or in the culture medium surrounding said non-human organism.

[87369] Accordingly, the present invention relates to a process for the production of glucose, which comprises
[87370] (a) increasing or generating the activity of a kinase in the cytosol of a cell of a non-human organism or a part thereof, preferably a microorganism, a plant cell, a plant or a part thereof, as compared to a corresponding non-transformed wild type non-human organism or a part thereof; and
[87371] (b) growing the non-human organism or a part thereof under conditions which permit the production of glucose or a composition comprising glucose in said non-human organism or in the culture medium surrounding said non-human organism.

[87372] Accordingly, the present invention relates to a process for the production of glucose-1-phosphate, which comprises
[87373] (a) increasing or generating the activity of a Mg-protoporphyrin IX monomethyl ester oxidative cyclase 66 kD subunit in the cytosol of a cell of a non-human organism or a part thereof, preferably a microorganism, a plant cell, a plant or a part thereof, as compared to a corresponding non-transformed wild type non-human organism or a part thereof; and
[87374] (b) growing the non-human organism or a part thereof under conditions which permit the production of glucose-1-phosphate or a composition comprising glucose-1-phosphate in said non-human organism or in the culture medium surrounding said non-human organism.

[87375] Accordingly, the present invention relates to a process for the production of myo-inositol, which comprises
[87376] (a) increasing or generating the activity of a permease protein of ABC transporter in the cytosol of a cell of a non-human organism or a part thereof, preferably a microorganism, a plant cell, a plant or a part thereof, as compared to a corresponding non-transformed wild type non-human organism or a part thereof; and
[87377] (b) growing the non-human organism or a part thereof under conditions which permit the production of myo-inositol or a composition comprising myo-inositol in said non-human organism or in the culture medium surrounding said non-human organism.

[87378] Accordingly, the present invention relates to a process for the production of glucose-1-phosphate, which comprises
[87379] (a) increasing or generating the activity of a dihydrolipoamide dehydrogenase in the cytosol of a cell of a non-human organism or a part thereof, preferably a microorganism, a plant cell, a plant or a part thereof, as compared to a corresponding non-transformed wild type non-human organism or a part thereof; and
[87380] (b) growing the non-human organism or a part thereof under conditions which permit the production of glucose-1-phosphate or a composition comprising glucose-1-phosphate in said non-human organism or in the culture medium surrounding said non-human organism.

[87381] Accordingly, the present invention relates to a process for the production of raffinose, which comprises
[87382] (a) increasing or generating the activity of a dihydrolipoamide dehydrogenase in the cytosol of a cell of a non-human organism or a part thereof, preferably a microorganism, a plant cell, a plant or a part thereof, as compared to a corresponding non-transformed wild type non-human organism or a part thereof; and
[87383] (b) growing the non-human organism or a part thereof under conditions which permit the production of raffinose or a composition comprising raffinose in said non-human organism or in the culture medium surrounding said non-human organism.

[87384] Accordingly, the present invention relates to a process for the production of myo-inositol, which comprises
[87385] (a) increasing or generating the activity of a slr1107-protein in the cytosol of a cell of a non-human organism or a part thereof, preferably a microorganism, a plant cell, a plant or a part thereof, as compared to a corresponding non-transformed wild type non-human organism or a part thereof; and
[87386] (b) growing the non-human organism or a part thereof under conditions which permit the production of myo-inositol or a composition comprising myo-inositol in said non-human organism or in the culture medium surrounding said non-human organism.

[87387] Accordingly, the present invention relates to a process for the production of glucose-1-phosphate, which comprises
[87388] (a) increasing or generating the activity of a fatty acid desaturase in the cytosol of a cell of a non-human organism or a part thereof, preferably a microorganism, a plant cell, a plant or a part thereof, as compared to a corresponding non-transformed wild type non-human organism or a part thereof; and
[87389] (b) growing the non-human organism or a part thereof under conditions which permit the production of glucose-1-phosphate or a composition comprising glucose-1-phosphate in said non-human organism or in the culture medium surrounding said non-human organism.

[87390] Accordingly, the present invention relates to a process for the production of glucose-1-phosphate, which comprises
[87391] (a) increasing or generating the activity of a CDP-diglyceride synthetase in the cytosol of a cell of a non-human organism or a part thereof, preferably a microorganism, a plant cell, a plant or a part thereof, as compared to a corresponding non-transformed wild type non-human organism or a part thereof; and
[87392] (b) growing the non-human organism or a part thereof under conditions which permit the production of glucose-1-phosphate or a composition comprising glucose-1-phosphate in said non-human organism or in the culture medium surrounding said non-human organism.

[87393] Accordingly, the present invention relates to a process for the production of myo-inositol, which comprises
[87394] (a) increasing or generating the activity of a CDP-diglyceride synthetase in the cytosol of a cell of a non-human organism or a part thereof, preferably a microorganism, a plant cell, a plant or a part thereof, as compared to a corresponding non-transformed wild type non-human organism or a part thereof; and
[87395] (b) growing the non-human organism or a part thereof under conditions which permit the production of myo-inositol or a composition comprising myo-inositol in said non-human organism or in the culture medium surrounding said non-human organism.

[87396] Accordingly, the present invention relates to a process for the production of fructose, which comprises
[87397] (a) increasing or generating the activity of a iron(III) dicitrate-binding protein in the cytosol of a cell of a non-human organism or a part thereof, preferably a microorganism, a plant cell, a plant or a part thereof, as compared to a corresponding non-transformed wild type non-human organism or a part thereof; and
[87398] (b) growing the non-human organism or a part thereof under conditions which permit the production of fructose or a composition comprising fructose in said non-human organism or in the culture medium surrounding said non-human organism.

[87399] Accordingly, the present invention relates to a process for the production of sucrose, which comprises
[87400] (a) increasing or generating the activity of a photosystem I reaction center subunit XI in the cytosol of a cell of a non-human organism or a part thereof, preferably a microorganism, a plant cell, a plant or a part thereof, as compared to a corresponding non-transformed wild type non-human organism or a part thereof; and
[87401] (b) growing the non-human organism or a part thereof under conditions which permit the production of sucrose or a composition comprising sucrose in said non-human organism or in the culture medium surrounding said non-human organism.

[87402] Accordingly, the present invention relates to a process for the production of fructose, which comprises
[87403] (a) increasing or generating the activity of a photosystem II protein in the cytosol of a cell of a non-human organism or a part thereof, preferably a microorganism, a plant cell, a plant or a part thereof, as compared to a corresponding non-transformed wild type non-human organism or a part thereof; and
[87404] (b) growing the non-human organism or a part thereof under conditions which permit the production of fructose or a composition comprising fructose in said non-human organism or in the culture medium surrounding said non-human organism.

[87405] Accordingly, the present invention relates to a process for the production of fructose, which comprises
[87406] (a) increasing or generating the activity of a glutamine amidotransferase in the cytosol of a cell of a non-human organism or a part thereof, preferably a microorganism, a plant cell, a plant or a part thereof, as compared to a corresponding non-transformed wild type non-human organism or a part thereof; and
[87407] (b) growing the non-human organism or a part thereof under conditions which permit the production of fructose or a composition comprising fructose in said non-human organism or in the culture medium surrounding said non-human organism.

[87408] Accordingly, the present invention relates to a process for the production of myo-inositol, which comprises
[87409] (a) increasing or generating the activity of a glutamine amidotransferase in the cytosol of a cell of a non-human organism or a part thereof, preferably a microorganism, a plant cell, a plant or a part thereof, as compared to a corresponding non-transformed wild type non-human organism or a part thereof; and
[87410] (b) growing the non-human organism or a part thereof under conditions which permit the production of myo-inositol or a composition comprising myo-inositol in said non-human organism or in the culture medium surrounding said non-human organism.

[87411] Accordingly, the present invention relates to a process for the production of glucose-1-phosphate, which comprises
[87412] (a) increasing or generating the activity of a NADH dehydrogenase in the cytosol of a cell of a non-human organism or a part thereof, preferably a microorganism, a plant cell, a plant or a part thereof, as compared to a corresponding non-transformed wild type non-human organism or a part thereof; and
[87413] (b) growing the non-human organism or a part thereof under conditions which permit the production of glucose-1-phosphate or a composition comprising glucose-1-phosphate in said non-human organism or in the culture medium surrounding said non-human organism.

[87414] Accordingly, the present invention relates to a process for the production of raffinose, which comprises
[87415] (a) increasing or generating the activity of a pyridoxal phosphate biosynthetic protein in the cytosol of a cell of a non-human organism or a part thereof, preferably a microorganism, a plant cell, a plant or a part thereof, as compared to a corresponding non-transformed wild type non-human organism or a part thereof; and
[87416] (b) growing the non-human organism or a part thereof under conditions which permit the production of raffinose or a composition comprising raffinose in said non-human organism or in the culture medium surrounding said non-human organism.

[87417] Accordingly, the present invention relates to a process for the production of glucose-1-phosphate, which comprises
[87418] (a) increasing or generating the activity of a phosphoadenosine phosphosulfate reductase in the cytosol of a cell of a non-human organism or a part thereof, preferably a microorganism, a plant cell, a plant or a part thereof, as compared to a corresponding non-transformed wild type non-human organism or a part thereof; and
[87419] (b) growing the non-human organism or a part thereof under conditions which permit the production of glucose-1-phosphate or a composition comprising glucose-1-phosphate in said non-human organism or in the culture medium surrounding said non-human organism.

[87420] Accordingly, the present invention relates to a process for the production of glucose-1-phosphate, which comprises
[87421] (a) increasing or generating the activity of a threonine dehydratase in the cytosol of a cell of a non-human organism or a part thereof, preferably a microorganism, a plant cell, a plant or a part thereof, as compared to a corresponding non-transformed wild type non-human organism or a part thereof; and
[87422] (b) growing the non-human organism or a part thereof under conditions which permit the production of glucose-1-phosphate or a composition comprising glucose-1-phosphate in said non-human organism or in the culture medium surrounding said non-human organism.

[87423] Accordingly, the present invention relates to a process for the production of 3,4,5-trihydroxypentanoic acid, which comprises
[87424] (a) increasing or generating the activity of a threonine dehydratase in the cytosol of a cell of a non-human organism or a part thereof, preferably a microorganism, a plant cell, a plant or a part thereof, as compared to a corresponding non-transformed wild type non-human organism or a part thereof; and
[87425] (b) growing the non-human organism or a part thereof under conditions which permit the production of 3,4,5-trihydroxypentanoic acid or a composition comprising 3,4,5-trihydroxypentanoic acid in said non-human organism or in the culture medium surrounding said non-human organism.

[87426] Accordingly, the present invention relates to a process for the production of fructose, which comprises
[87427] (a) increasing or generating the activity of a short-chain alcohol dehydrogenase family in the cytosol of a cell of a non-human organism or a part thereof, preferably a microorganism, a plant cell, a plant or a part thereof, as compared to a corresponding non-transformed wild type non-human organism or a part thereof; and
[87428] (b) growing the non-human organism or a part thereof under conditions which permit the production of fructose or a composition comprising fructose in said non-human organism or in the culture medium surrounding said non-human organism.

[87429] Accordingly, the present invention relates to a process for the production of glucose, which comprises
[87430] (a) increasing or generating the activity of a short-chain alcohol dehydrogenase family in the cytosol of a cell of a non-human organism or a part thereof, preferably a microorganism, a plant cell, a plant or a part thereof, as compared to a corresponding non-transformed wild type non-human organism or a part thereof; and
[87431] (b) growing the non-human organism or a part thereof under conditions which permit the production of glucose or a composition comprising glucose in said non-human organism or in the culture medium surrounding said non-human organism.

[87432] Accordingly, the present invention relates to a process for the production of glucose-1-phosphate, which comprises
[87433] (a) increasing or generating the activity of a short-chain alcohol dehydrogenase family in the cytosol of a cell of a non-human organism or a part thereof, preferably a microorganism, a plant cell, a plant or a part thereof, as compared to a corresponding non-transformed wild type non-human organism or a part thereof; and
[87434] (b) growing the non-human organism or a part thereof under conditions which permit the production of glucose-1-phosphate or a composition comprising glucose-1-phosphate in said non-human organism or in the culture medium surrounding said non-human organism.

[87435] Accordingly, the present invention relates to a process for the production of myo-inositol, which comprises
[87436] (a) increasing or generating the activity of a short-chain alcohol dehydrogenase family in the cytosol of a cell of a non-human organism or a part thereof, preferably a microorganism, a plant cell, a plant or a part thereof, as compared to a corresponding non-transformed wild type non-human organism or a part thereof; and
[87437] (b) growing the non-human organism or a part thereof under conditions which permit the production of myo-inositol or a composition comprising myo-inositol in said non-human organism or in the culture medium surrounding said non-human organism.

[87438] Accordingly, the present invention relates to a process for the production of sucrose, which comprises
[87439] (a) increasing or generating the activity of a short-chain alcohol dehydrogenase family in the cytosol of a cell of a non-human organism or a part thereof, preferably a microorganism, a plant cell, a plant or a part thereof, as compared to a corresponding non-transformed wild type non-human organism or a part thereof; and
[87440] (b) growing the non-human organism or a part thereof under conditions which permit the production of sucrose or a composition comprising sucrose in said non-human organism or in the culture medium surrounding said non-human organism.

[87441] Accordingly, the present invention relates to a process for the production of raffinose, which comprises
[87442] (a) increasing or generating the activity of a phosphate acetyltransferase in the cytosol of a cell of a non-human organism or a part thereof, preferably a microorganism, a plant cell, a plant or a part thereof, as compared to a corresponding non-transformed wild type non-human organism or a part thereof; and
[87443] (b) growing the non-human organism or a part thereof under conditions which permit the production of raffinose or a composition comprising raffinose in said non-human organism or in the culture medium surrounding said non-human organism.

[87444] Accordingly, the present invention relates to a process for the production of glucose-1-phosphate, which comprises
[87445] (a) increasing or generating the activity of a photosystem I reaction centre subunit in the cytosol of a cell of a non-human organism or a part thereof, preferably a microorganism, a plant cell, a plant or a part thereof, as compared to a corresponding non-transformed wild type non-human organism or a part thereof; and
[87446] (b) growing the non-human organism or a part thereof under conditions which permit the production of glucose-1-phosphate or a composition comprising glucose-1-phosphate in said non-human organism or in the culture medium surrounding said non-human organism.

[87447] Accordingly, the present invention relates to a process for the production of raffinose, which comprises
[87448] (a) increasing or generating the activity of a photosystem I reaction centre subunit in the cytosol of a cell of a non-human organism or a part thereof, preferably a microorganism, a plant cell, a plant or a part thereof, as compared to a corresponding non-transformed wild type non-human organism or a part thereof; and
[87449] (b) growing the non-human organism or a part thereof under conditions which permit the production of raffinose or a composition comprising raffinose in said non-human organism or in the culture medium surrounding said non-human organism.

[87450] Accordingly, the present invention relates to a process for the production of 3,4,5-trihydroxypentanoic acid, which comprises
[87451] (a) increasing or generating the activity of a photosystem I reaction centre subunit in the cytosol of a cell of a non-human organism or a part thereof, preferably a microorganism, a plant cell, a plant or a part thereof, as compared to a corresponding non-transformed wild type non-human organism or a part thereof; and
[87452] (b) growing the non-human organism or a part thereof under conditions which permit the production of 3,4,5-trihydroxypentanoic acid or a composition comprising 3,4,5-trihydroxypentanoic acid in said non-human organism or in the culture medium surrounding said non-human organism.

[87453] Accordingly, the present invention relates to a process for the production of fructose, which comprises
[87454] (a) increasing or generating the activity of a Sec-independent protein translocase subunit in the cytosol of a cell of a non-human organism or a part thereof, preferably a microorganism, a plant cell, a plant or a part thereof, as compared to a corresponding non-transformed wild type non-human organism or a part thereof; and
[87455] (b) growing the non-human organism or a part thereof under conditions which permit the production of fructose or a composition comprising fructose in said non-human organism or in the culture medium surrounding said non-human organism.

[87456] Accordingly, the present invention relates to a process for the production of glucose, which comprises
[87457] (a) increasing or generating the activity of a Sec-independent protein translocase subunit in the cytosol of a cell of a non-human organism or a part thereof, preferably a microorganism, a plant cell, a plant or a part thereof, as compared to a corresponding non-transformed wild type non-human organism or a part thereof; and
[87458] (b) growing the non-human organism or a part thereof under conditions which permit the production of glucose or a composition comprising glucose in said non-human organism or in the culture medium surrounding said non-human organism.

[87459] Accordingly, the present invention relates to a process for the production of sedoheptulose-7-phosphate, which comprises
[87460] (a) increasing or generating the activity of a Sec-independent protein translocase subunit in the cytosol of a cell of a non-human organism or a part thereof, preferably a microorganism, a plant cell, a plant or a part thereof, as compared to a corresponding non-transformed wild type non-human organism or a part thereof; and
[87461] (b) growing the non-human organism or a part thereof under conditions which permit the production of sedoheptulose-7-phosphate or a composition comprising sedoheptulose-7-phosphate in said non-human organism or in the culture medium surrounding said non-human organism.

[87462] Accordingly, the present invention relates to a process for the production of fructose, which comprises
[87463] (a) increasing or generating the activity of a cell division protein in the cytosol of a cell of a non-human organism or a part thereof, preferably a microorganism, a plant cell, a plant or a part thereof, as compared to a corresponding non-transformed wild type non-human organism or a part thereof; and
[87464] (b) growing the non-human organism or a part thereof under conditions which permit the production of fructose or a composition comprising fructose in said non-human organism or in the culture medium surrounding said non-human organism.

[87465] Accordingly, the present invention relates to a process for the production of glucose, which comprises
[87466] (a) increasing or generating the activity of a cell division protein in the cytosol of a cell of a non-human organism or a part thereof, preferably a microorganism, a plant cell, a plant or a part thereof, as compared to a corresponding non-transformed wild type non-human organism or a part thereof; and
[87467] (b) growing the non-human organism or a part thereof under conditions which permit the production of glucose or a composition comprising glucose in said non-human organism or in the culture medium surrounding said non-human organism.

[87468] Accordingly, the present invention relates to a process for the production of sucrose, which comprises
[87469] (a) increasing or generating the activity of a cell division protein in the cytosol of a cell of a non-human organism or a part thereof, preferably a microorganism, a plant cell, a plant or a part thereof, as compared to a corresponding non-transformed wild type non-human organism or a part thereof; and
[87470] (b) growing the non-human organism or a part thereof under conditions which permit the production of sucrose or a composition comprising sucrose in said non-human organism or in the culture medium surrounding said non-human organism.

[87471] Accordingly, the present invention relates to a process for the production of glucose-1-phosphate, which comprises
[87472] (a) increasing or generating the activity of a branched-chain amino acid ABC transporter permease protein in the cytosol of a cell of a non-human organism or a part thereof, preferably a microorganism, a plant cell, a plant or a part thereof, as compared to a corresponding non-transformed wild type non-human organism or a part thereof; and
[87473] (b) growing the non-human organism or a part thereof under conditions which permit the production of glucose-1-phosphate or a composition comprising glucose-1-phosphate in said non-human organism or in the culture medium surrounding said non-human organism.

[87474] Accordingly, the present invention relates to a process for the production of 3,4,5-trihydroxypentanoic acid, which comprises
[87475] (a) increasing or generating the activity of a branched-chain amino acid ABC transporter permease protein in the cytosol of a cell of a non-human organism or a part thereof, preferably a microorganism, a plant cell, a plant or a part thereof, as compared to a corresponding non-transformed wild type non-human organism or a part thereof; and
[87476] (b) growing the non-human organism or a part thereof under conditions which permit the production of 3,4,5-trihydroxypentanoic acid or a composition comprising 3,4,5-trihydroxypentanoic acid in said non-human organism or in the culture medium surrounding said non-human organism.

[87477] Accordingly, the present invention relates to a process for the production of myo-inositol, which comprises
[87478] (a) increasing or generating the activity of a 3-isopropylmalate dehydratase large subunit in the cytosol of a cell of a non-human organism or a part thereof, preferably a microorganism, a plant cell, a plant or a part thereof, as compared to a corresponding non-transformed wild type non-human organism or a part thereof; and
[87479] (b) growing the non-human organism or a part thereof under conditions which permit the production of myo-inositol or a composition comprising myo-inositol in said non-human organism or in the culture medium surrounding said non-human organism.

[87480] Accordingly, the present invention relates to a process for the production of fructose, which comprises
[87481] (a) increasing or generating the activity of a multiple antibiotic resistance protein in the cytosol of a cell of a non-human organism or a part thereof, preferably a microorganism, a plant cell, a plant or a part thereof, as compared to a corresponding non-transformed wild type non-human organism or a part thereof; and
[87482] (b) growing the non-human organism or a part thereof under conditions which permit the production of fructose or a composition comprising fructose in said non-human organism or in the culture medium surrounding said non-human organism.

[87483] Accordingly, the present invention relates to a process for the production of glucose, which comprises
[87484] (a) increasing or generating the activity of a multiple antibiotic resistance protein in the cytosol of a cell of a non-human organism or a part thereof, preferably a microorganism, a plant cell, a plant or a part thereof, as compared to a corresponding non-transformed wild type non-human organism or a part thereof; and
[87485] (b) growing the non-human organism or a part thereof under conditions which permit the production of glucose or a composition comprising glucose in said non-human organism or in the culture medium surrounding said non-human organism.

[87486] Accordingly, the present invention relates to a process for the production of glucose-1-phosphate, which comprises
[87487] (a) increasing or generating the activity of a multiple antibiotic resistance protein in the cytosol of a cell of a non-human organism or a part thereof, preferably a microorganism, a plant cell, a plant or a part thereof, as compared to a corresponding non-transformed wild type non-human organism or a part thereof; and
[87488] (b) growing the non-human organism or a part thereof under conditions which permit the production of glucose-1-phosphate or a composition comprising glucose-1-phosphate in said non-human organism or in the culture medium surrounding said non-human organism.

[87489] Accordingly, the present invention relates to a process for the production of fructose, which comprises
[87490] (a) increasing or generating the activity of a TTC1386-protein in the cytosol of a cell of a non-human organism or a part thereof, preferably a microorganism, a plant cell, a plant or a part thereof, as compared to a corresponding non-transformed wild type non-human organism or a part thereof; and
[87491] (b) growing the non-human organism or a part thereof under conditions which permit the production of fructose or a composition comprising fructose in said non-human organism or in the culture medium surrounding said non-human organism.

[87492] Accordingly, the present invention relates to a process for the production of glucose, which comprises
[87493] (a) increasing or generating the activity of a TTC1386-protein in the cytosol of a cell of a non-human organism or a part thereof, preferably a microorganism, a plant cell, a plant or a part thereof, as compared to a corresponding non-transformed wild type non-human organism or a part thereof; and
[87494] (b) growing the non-human organism or a part thereof under conditions which permit the production of glucose or a composition comprising glucose in said non-human organism or in the culture medium surrounding said non-human organism.

[87495] Accordingly, the present invention relates to a process for the production of fructose, which comprises
[87496] (a) increasing or generating the activity of a homocitrate synthase in the cytosol of a cell of a non-human organism or a part thereof, preferably a microorganism, a plant cell, a plant or a part thereof, as compared to a corresponding non-transformed wild type non-human organism or a part thereof; and
[87497] (b) growing the non-human organism or a part thereof under conditions which permit the production of fructose or a composition comprising fructose in said non-human organism or in the culture medium surrounding said non-human organism.

[87498] Accordingly, the present invention relates to a process for the production of glucose-1-phosphate, which comprises
[87499] (a) increasing or generating the activity of a homocitrate synthase in the cytosol of a cell of a non-human organism or a part thereof, preferably a microorganism, a plant cell, a plant or a part thereof, as compared to a corresponding non-transformed wild type non-human organism or a part thereof; and
[87500] (b) growing the non-human organism or a part thereof under conditions which permit the production of glucose-1-phosphate or a composition comprising glucose-1-phosphate in said non-human organism or in the culture medium surrounding said non-human organism.

[87501] Accordingly, the present invention relates to a process for the production of sucrose, which comprises
[87502] (a) increasing or generating the activity of a homocitrate synthase in the cytosol of a cell of a non-human organism or a part thereof, preferably a microorganism, a plant cell, a plant or a part thereof, as compared to a corresponding non-transformed wild type non-human organism or a part thereof; and
[87503] (b) growing the non-human organism or a part thereof under conditions which permit the production of sucrose or a composition comprising sucrose in said non-human organism or in the culture medium surrounding said non-human organism.

[87504] Accordingly, the present invention relates to a process for the production of raffinose, which comprises
[87505] (a) increasing or generating the activity of a permease in the cytosol of a cell of a non-human organism or a part thereof, preferably a microorganism, a plant cell, a plant or a part thereof, as compared to a corresponding non-transformed wild type non-human organism or a part thereof; and
[87506] (b) growing the non-human organism or a part thereof under conditions which permit the production of raffinose or a composition comprising raffinose in said non-human organism or in the culture medium surrounding said non-human organism.

[87507] Accordingly, the present invention relates to a process for the production of 3,4,5-trihydroxypentanoic acid, which comprises
[87508] (a) increasing or generating the activity of a permease in the cytosol of a cell of a non-human organism or a part thereof, preferably a microorganism, a plant cell, a plant or a part thereof, as compared to a corresponding non-transformed wild type non-human organism or a part thereof; and
[87509] (b) growing the non-human organism or a part thereof under conditions which permit the production of 3,4,5-trihydroxypentanoic acid or a composition comprising 3,4,5-trihydroxypentanoic acid in said non-human organism or in the culture medium surrounding said non-human organism.

[87510] Accordingly, the present invention relates to a process for the production of glucose-1-phosphate, which comprises
[87511] (a) increasing or generating the activity of a oxidoreductase subunit in the cytosol of a cell of a non-human organism or a part thereof, preferably a microorganism, a plant cell, a plant or a part thereof, as compared to a corresponding non-transformed wild type non-human organism or a part thereof; and
[87512] (b) growing the non-human organism or a part thereof under conditions which permit the production of glucose-1-phosphate or a composition comprising glucose-1-phosphate in said non-human organism or in the culture medium surrounding said non-human organism.

[87513] Accordingly, the present invention relates to a process for the production of glucose-1-phosphate, which comprises
[87514] (a) increasing or generating the activity of a XM_{—}473199-protein in the cytosol of a cell of a non-human organism or a part thereof, preferably a microorganism, a plant cell, a plant or a part thereof, as compared to a corresponding non-transformed wild type non-human organism or a part thereof; and
[87515] (b) growing the non-human organism or a part thereof under conditions which permit the production of glucose-1-phosphate or a composition comprising glucose-1-phosphate in said non-human organism or in the culture medium surrounding said non-human organism.

[87516] Accordingly, the present invention relates to a process for the production of myo-inositol, which comprises
[87517] (a) increasing or generating the activity of a transcription factor in the cytosol of a cell of a non-human organism or a part thereof, preferably a microorganism, a plant cell, a plant or a part thereof, as compared to a corresponding non-transformed wild type non-human organism or a part thereof; and
[87518] (b) growing the non-human organism or a part thereof under conditions which permit the production of myo-inositol or a composition comprising myo-inositol in said non-human organism or in the culture medium surrounding said non-human organism.

[87519] Accordingly, the present invention relates to a process for the production of sucrose, which comprises
[87520] (a) increasing or generating the activity of a transcription factor in the cytosol of a cell of a non-human organism or a part thereof, preferably a microorganism, a plant cell, a plant or a part thereof, as compared to a corresponding non-transformed wild type non-human organism or a part thereof; and
[87521] (b) growing the non-human organism or a part thereof under conditions which permit the production of sucrose or a composition comprising sucrose in said non-human organism or in the culture medium surrounding said non-human organism.

[87522] Accordingly, the present invention relates to a process for the production of glucose-1-phosphate, which comprises
[87523] (a) increasing or generating the activity of a 3-deoxy-7-phosphoheptulonate synthase in the cytosol of a cell of a non-human organism or a part thereof, preferably a microorganism, a plant cell, a plant or a part thereof, as compared to a corresponding non-transformed wild type non-human organism or a part thereof; and
[87524] (b) growing the non-human organism or a part thereof under conditions which permit the production of glucose-1-phosphate or a composition comprising glucose-1-phosphate in said non-human organism or in the culture medium surrounding said non-human organism.

[87525] Accordingly, the present invention relates to a process for the production of glucose-1-phosphate, which comprises
[87526] (a) increasing or generating the activity of a phosphate permease in the cytosol of a cell of a non-human organism or a part thereof, preferably a microorganism, a plant cell, a plant or a part thereof, as compared to a corresponding non-transformed wild type non-human organism or a part thereof; and
[87527] (b) growing the non-human organism or a part thereof under conditions which permit the production of glucose-1-phosphate or a composition comprising glucose-1-phosphate in said non-human organism or in the culture medium surrounding said non-human organism.

[87528] Accordingly, the present invention relates to a process for the production of 3,4,5-trihydroxypentanoic acid, which comprises
[87529] (a) increasing or generating the activity of a phosphate permease in the cytosol of a cell of a non-human organism or a part thereof, preferably a microorganism, a plant cell, a plant or a part thereof, as compared to a corresponding non-transformed wild type non-human organism or a part thereof; and
[87530] (b) growing the non-human organism or a part thereof under conditions which permit the production of 3,4,5-trihydroxypentanoic acid or a composition comprising 3,4,5-trihydroxypentanoic acid in said non-human organism or in the culture medium surrounding said non-human organism.

[87531] Accordingly, the present invention relates to a process for the production of fructose, which comprises
[87532] (a) increasing or generating the activity of a ycl027w-protein in the cytosol of a cell of a non-human organism or a part thereof, preferably a microorganism, a plant cell, a plant or a part thereof, as compared to a corresponding non-transformed wild type non-human organism or a part thereof; and
[87533] (b) growing the non-human organism or a part thereof under conditions which permit the production of fructose or a composition comprising fructose in said non-human organism or in the culture medium surrounding said non-human organism.

[87534] Accordingly, the present invention relates to a process for the production of glucose-1-phosphate, which comprises
[87535] (a) increasing or generating the activity of a ycl027w-protein in the cytosol of a cell of a non-human organism or a part thereof, preferably a microorganism, a plant cell, a plant or a part thereof, as compared to a corresponding non-transformed wild type non-human organism or a part thereof; and
[87536] (b) growing the non-human organism or a part thereof under conditions which permit the production of glucose-1-phosphate or a composition comprising glucose-1-phosphate in said non-human organism or in the culture medium surrounding said non-human organism.

[87537] Accordingly, the present invention relates to a process for the production of myo-inositol, which comprises
[87538] (a) increasing or generating the activity of a serine/threonine dehydratase in the cytosol of a cell of a non-human organism or a part thereof, preferably a microorganism, a plant cell, a plant or a part thereof, as compared to a corresponding non-transformed wild type non-human organism or a part thereof; and
[87539] (b) growing the non-human organism or a part thereof under conditions which permit the production of myo-inositol or a composition comprising myo-inositol in said non-human organism or in the culture medium surrounding said non-human organism.

[87540] Accordingly, the present invention relates to a process for the production of sucrose, which comprises
[87541] (a) increasing or generating the activity of a serine/threonine dehydratase in the cytosol of a cell of a non-human organism or a part thereof, preferably a microorganism, a plant cell, a plant or a part thereof, as compared to a corresponding non-transformed wild type non-human organism or a part thereof; and
[87542] (b) growing the non-human organism or a part thereof under conditions which permit the production of sucrose or a composition comprising sucrose in said non-human organism or in the culture medium surrounding said non-human organism.

[87543] Accordingly, the present invention relates to a process for the production of fructose, which comprises
[87544] (a) increasing or generating the activity of a phosphoglycerate kinase in the cytosol of a cell of a non-human organism or a part thereof, preferably a microorganism, a plant cell, a plant or a part thereof, as compared to a corresponding non-transformed wild type non-human organism or a part thereof; and
[87545] (b) growing the non-human organism or a part thereof under conditions which permit the production of fructose or a composition comprising fructose in said non-human organism or in the culture medium surrounding said non-human organism.

[87546] Accordingly, the present invention relates to a process for the production of glucose, which comprises
[87547] (a) increasing or generating the activity of a phosphoglycerate kinase in the cytosol of a cell of a non-human organism or a part thereof, preferably a microorganism, a plant cell, a plant or a part thereof, as compared to a corresponding non-transformed wild type non-human organism or a part thereof; and
[87548] (b) growing the non-human organism or a part thereof under conditions which permit the production of glucose or a composition comprising glucose in said non-human organism or in the culture medium surrounding said non-human organism.

[87549] Accordingly, the present invention relates to a process for the production of raffinose, which comprises
[87550] (a) increasing or generating the activity of a YCR047W-A-protein in the cytosol of a cell of a non-human organism or a part thereof, preferably a microorganism, a plant cell, a plant or a part thereof, as compared to a corresponding non-transformed wild type non-human organism or a part thereof; and
[87551] (b) growing the non-human organism or a part thereof under conditions which permit the production of raffinose or a composition comprising raffinose in said non-human organism or in the culture medium surrounding said non-human organism.

[87552] Accordingly, the present invention relates to a process for the production of 3,4,5-trihydroxypentanoic acid, which comprises
[87553] (a) increasing or generating the activity of a ycr102c-protein in the cytosol of a cell of a non-human organism or a part thereof, preferably a microorganism, a plant cell, a plant or a part thereof, as compared to a corresponding non-transformed wild type non-human organism or a part thereof; and
[87554] (b) growing the non-human organism or a part thereof under conditions which permit the production of 3,4,5-trihydroxypentanoic acid or a composition comprising 3,4,5-trihydroxypentanoic acid in said non-human organism or in the culture medium surrounding said non-human organism.

[87555] Accordingly, the present invention relates to a process for the production of galactinol, which comprises
[87556] (a) increasing or generating the activity of a isocitrate dehydrogenase in the cytosol of a cell of a non-human organism or a part thereof, preferably a microorganism, a plant cell, a plant or a part thereof, as compared to a corresponding non-transformed wild type non-human organism or a part thereof; and
[87557] (b) growing the non-human organism or a part thereof under conditions which permit the production of galactinol or a composition comprising galactinol in said non-human organism or in the culture medium surrounding said non-human organism.

[87558] Accordingly, the present invention relates to a process for the production of myo-inositol, which comprises
[87559] (a) increasing or generating the activity of a cell division control protein in the cytosol of a cell of a non-human organism or a part thereof, preferably a microorganism, a plant cell, a plant or a part thereof, as compared to a corresponding non-transformed wild type non-human organism or a part thereof; and
[87560] (b) growing the non-human organism or a part thereof under conditions which permit the production of myo-inositol or a composition comprising myo-inositol in said non-human organism or in the culture medium surrounding said non-human organism.

[87561] Accordingly, the present invention relates to a process for the production of myo-inositol, which comprises
[87562] (a) increasing or generating the activity of a cyclin in the cytosol of a cell of a non-human organism or a part thereof, preferably a microorganism, a plant cell, a plant or a part thereof, as compared to a corresponding non-transformed wild type non-human organism or a part thereof; and
[87563] (b) growing the non-human organism or a part thereof under conditions which permit the production of myo-inositol or a composition comprising myo-inositol in said non-human organism or in the culture medium surrounding said non-human organism.

[87564] Accordingly, the present invention relates to a process for the production of raffinose, which comprises
[87565] (a) increasing or generating the activity of a YDL159W-A-protein in the cytosol of a cell of a non-human organism or a part thereof, preferably a microorganism, a plant cell, a plant or a part thereof, as compared to a corresponding non-transformed wild type non-human organism or a part thereof; and
[87566] (b) growing the non-human organism or a part thereof under conditions which permit the production of raffinose or a composition comprising raffinose in said non-human organism or in the culture medium surrounding said non-human organism.

[87567] Accordingly, the present invention relates to a process for the production of glucose-1-phosphate, which comprises
[87568] (a) increasing or generating the activity of a protein kinase in the cytosol of a cell of a non-human organism or a part thereof, preferably a microorganism, a plant cell, a plant or a part thereof, as compared to a corresponding non-transformed wild type non-human organism or a part thereof; and
[87569] (b) growing the non-human organism or a part thereof under conditions which permit the production of glucose-1-phosphate or a composition comprising glucose-1-phosphate in said non-human organism or in the culture medium surrounding said non-human organism.

[87570] Accordingly, the present invention relates to a process for the production of glucose-1-phosphate, which comprises
[87571] (a) increasing or generating the activity of a serine/threonine-protein phosphatase in the cytosol of a cell of a non-human organism or a part thereof, preferably a microorganism, a plant cell, a plant or a part thereof, as compared to a corresponding non-transformed wild type non-human organism or a part thereof; and
[87572] (b) growing the non-human organism or a part thereof under conditions which permit the production of glucose-1-phosphate or a composition comprising glucose-1-phosphate in said non-human organism or in the culture medium surrounding said non-human organism.

[87573] Accordingly, the present invention relates to a process for the production of 3,4,5-trihydroxypentanoic acid, which comprises
[87574] (a) increasing or generating the activity of a integral membrane protein in the cytosol of a cell of a non-human organism or a part thereof, preferably a microorganism, a plant cell, a plant or a part thereof, as compared to a corresponding non-transformed wild type non-human organism or a part thereof; and
[87575] (b) growing the non-human organism or a part thereof under conditions which permit the production of 3,4,5-trihydroxypentanoic acid or a composition comprising 3,4,5-trihydroxypentanoic acid in said non-human organism or in the culture medium surrounding said non-human organism.

[87576] Accordingly, the present invention relates to a process for the production of glucose-1-phosphate, which comprises
[87577] (a) increasing or generating the activity of a ydl235c-protein in the cytosol of a cell of a non-human organism or a part thereof, preferably a microorganism, a plant cell, a plant or a part thereof, as compared to a corresponding non-transformed wild type non-human organism or a part thereof; and
[87578] (b) growing the non-human organism or a part thereof under conditions which permit the production of glucose-1-phosphate or a composition comprising glucose-1-phosphate in said non-human organism or in the culture medium surrounding said non-human organism.

[87579] Accordingly, the present invention relates to a process for the production of myo-inositol, which comprises
[87580] (a) increasing or generating the activity of a ydl235c-protein in the cytosol of a cell of a non-human organism or a part thereof, preferably a microorganism, a plant cell, a plant or a part thereof, as compared to a corresponding non-transformed wild type non-human organism or a part thereof; and
[87581] (b) growing the non-human organism or a part thereof under conditions which permit the production of myo-inositol or a composition comprising myo-inositol in said non-human organism or in the culture medium surrounding said non-human organism.

[87582] Accordingly, the present invention relates to a process for the production of 3,4,5-trihydroxypentanoic acid, which comprises
[87583] (a) increasing or generating the activity of a ydl235c-protein in the cytosol of a cell of a non-human organism or a part thereof, preferably a microorganism, a plant cell, a plant or a part thereof, as compared to a corresponding non-transformed wild type non-human organism or a part thereof; and
[87584] (b) growing the non-human organism or a part thereof under conditions which permit the production of 3,4,5-trihydroxypentanoic acid or a composition comprising 3,4,5-trihydroxypentanoic acid in said non-human organism or in the culture medium surrounding said non-human organism.

[87585] Accordingly, the present invention relates to a process for the production of sucrose, which comprises
[87586] (a) increasing or generating the activity of a coproporphyrinogen III oxidase in the cytosol of a cell of a non-human organism or a part thereof, preferably a microorganism, a plant cell, a plant or a part thereof, as compared to a corresponding non-transformed wild type non-human organism or a part thereof; and
[87587] (b) growing the non-human organism or a part thereof under conditions which permit the production of sucrose or a composition comprising sucrose in said non-human organism or in the culture medium surrounding said non-human organism.

[87588] Accordingly, the present invention relates to a process for the production of glucose, which comprises
[87589] (a) increasing or generating the activity of a branched-chain amino acid permease in the cytosol of a cell of a non-human organism or a part thereof, preferably a microorganism, a plant cell, a plant or a part thereof, as compared to a corresponding non-transformed wild type non-human organism or a part thereof; and
[87590] (b) growing the non-human organism or a part thereof under conditions which permit the production of glucose or a composition comprising glucose in said non-human organism or in the culture medium surrounding said non-human organism.

[87591] Accordingly, the present invention relates to a process for the production of fructose, which comprises
[87592] (a) increasing or generating the activity of a ydr183w-protein in the cytosol of a cell of a non-human organism or a part thereof, preferably a microorganism, a plant cell, a plant or a part thereof, as compared to a corresponding non-transformed wild type non-human organism or a part thereof; and
[87593] (b) growing the non-human organism or a part thereof under conditions which permit the production of fructose or a composition comprising fructose in said non-human organism or in the culture medium surrounding said non-human organism.

[87594] Accordingly, the present invention relates to a process for the production of glucose, which comprises
[87595] (a) increasing or generating the activity of a ydr183w-protein in the cytosol of a cell of a non-human organism or a part thereof, preferably a microorganism, a plant cell, a plant or a part thereof, as compared to a corresponding non-transformed wild type non-human organism or a part thereof; and
[87596] (b) growing the non-human organism or a part thereof under conditions which permit the production of glucose or a composition comprising glucose in said non-human organism or in the culture medium surrounding said non-human organism.

[87597] Accordingly, the present invention relates to a process for the production of glucose-1-phosphate, which comprises
[87598] (a) increasing or generating the activity of a ydr507c-protein in the cytosol of a cell of a non-human organism or a part thereof, preferably a microorganism, a plant cell, a plant or a part thereof, as compared to a corresponding non-transformed wild type non-human organism or a part thereof; and
[87599] (b) growing the non-human organism or a part thereof under conditions which permit the production of glucose-1-phosphate or a composition comprising glucose-1-phosphate in said non-human organism or in the culture medium surrounding said non-human organism.

[87600] Accordingly, the present invention relates to a process for the production of fructose, which comprises
[87601] (a) increasing or generating the activity of a 1,4-alpha-glucan branching enzyme in the cytosol of a cell of a non-human organism or a part thereof, preferably a microorganism, a plant cell, a plant or a part thereof, as compared to a corresponding non-transformed wild type non-human organism or a part thereof; and
[87602] (b) growing the non-human organism or a part thereof under conditions which permit the production of fructose or a composition comprising fructose in said non-human organism or in the culture medium surrounding said non-human organism.

[87603] Accordingly, the present invention relates to a process for the production of glucose, which comprises
[87604] (a) increasing or generating the activity of a 1,4-alpha-glucan branching enzyme in the cytosol of a cell of a non-human organism or a part thereof, preferably a microorganism, a plant cell, a plant or a part thereof, as compared to a corresponding non-transformed wild type non-human organism or a part thereof; and
[87605] (b) growing the non-human organism or a part thereof under conditions which permit the production of glucose or a composition comprising glucose in said non-human organism or in the culture medium surrounding said non-human organism.

[87606] Accordingly, the present invention relates to a process for the production of 3,4,5-trihydroxypentanoic acid, which comprises
[87607] (a) increasing or generating the activity of a YEL030C-A-protein in the cytosol of a cell of a non-human organism or a part thereof, preferably a microorganism, a plant cell, a plant or a part thereof, as compared to a corresponding non-transformed wild type non-human organism or a part thereof; and
[87608] (b) growing the non-human organism or a part thereof under conditions which permit the production of 3,4,5-trihydroxypentanoic acid or a composition comprising 3,4,5-trihydroxypentanoic acid in said non-human organism or in the culture medium surrounding said non-human organism.

[87609] Accordingly, the present invention relates to a process for the production of glucose-1-phosphate, which comprises
[87610] (a) increasing or generating the activity of a aldolase in the cytosol of a cell of a non-human organism or a part thereof, preferably a microorganism, a plant cell, a plant or a part thereof, as compared to a corresponding non-transformed wild type non-human organism or a part thereof; and
[87611] (b) growing the non-human organism or a part thereof under conditions which permit the production of glucose-1-phosphate or a composition comprising glucose-1-phosphate in said non-human organism or in the culture medium surrounding said non-human organism.

[87612] Accordingly, the present invention relates to a process for the production of glucose, which comprises
[87613] (a) increasing or generating the activity of a O-acetyltransferase in the cytosol of a cell of a non-human organism or a part thereof, preferably a microorganism, a plant cell, a plant or a part thereof, as compared to a corresponding non-transformed wild type non-human organism or a part thereof; and
[87614] (b) growing the non-human organism or a part thereof under conditions which permit the production of glucose or a composition comprising glucose in said non-human organism or in the culture medium surrounding said non-human organism.

[87615] Accordingly, the present invention relates to a process for the production of raffinose, which comprises
[87616] (a) increasing or generating the activity of a yer177w-protein in the cytosol of a cell of a non-human organism or a part thereof, preferably a microorganism, a plant cell, a plant or a part thereof, as compared to a corresponding non-transformed wild type non-human organism or a part thereof; and
[87617] (b) growing the non-human organism or a part thereof under conditions which permit the production of raffinose or a composition comprising raffinose in said non-human organism or in the culture medium surrounding said non-human organism.

[87618] Accordingly, the present invention relates to a process for the production of myo-inositol, which comprises
[87619] (a) increasing or generating the activity of a YFL019C-protein in the cytosol of a cell of a non-human organism or a part thereof, preferably a microorganism, a plant cell, a plant or a part thereof, as compared to a corresponding non-transformed wild type non-human organism or a part thereof; and
[87620] (b) growing the non-human organism or a part thereof under conditions which permit the production of myo-inositol or a composition comprising myo-inositol in said non-human organism or in the culture medium surrounding said non-human organism.

[87621] Accordingly, the present invention relates to a process for the production of sucrose, which comprises
[87622] (a) increasing or generating the activity of a YFL019C-protein in the cytosol of a cell of a non-human organism or a part thereof, preferably a microorganism, a plant cell, a plant or a part thereof, as compared to a corresponding non-transformed wild type non-human organism or a part thereof; and
[87623] (b) growing the non-human organism or a part thereof under conditions which permit the production of sucrose or a composition comprising sucrose in said non-human organism or in the culture medium surrounding said non-human organism.

[87624] Accordingly, the present invention relates to a process for the production of sucrose, which comprises
[87625] (a) increasing or generating the activity of a hexokinase in the cytosol of a cell of a non-human organism or a part thereof, preferably a microorganism, a plant cell, a plant or a part thereof, as compared to a corresponding non-transformed wild type non-human organism or a part thereof; and
[87626] (b) growing the non-human organism or a part thereof under conditions which permit the production of sucrose or a composition comprising sucrose in said non-human organism or in the culture medium surrounding said non-human organism.

[87627] Accordingly, the present invention relates to a process for the production of glucose-1-phosphate, which comprises
[87628] (a) increasing or generating the activity of a oxidoreductase in the cytosol of a cell of a non-human organism or a part thereof, preferably a microorganism, a plant cell, a plant or a part thereof, as compared to a corresponding non-transformed wild type non-human organism or a part thereof; and
[87629] (b) growing the non-human organism or a part thereof under conditions which permit the production of glucose-1-phosphate or a composition comprising glucose-1-phosphate in said non-human organism or in the culture medium surrounding said non-human organism.

[87630] Accordingly, the present invention relates to a process for the production of 3,4,5-trihydroxypentanoic acid, which comprises
[87631] (a) increasing or generating the activity of a oxidoreductase in the cytosol of a cell of a non-human organism or a part thereof, preferably a microorganism, a plant cell, a plant or a part thereof, as compared to a corresponding non-transformed wild type non-human organism or a part thereof; and
[87632] (b) growing the non-human organism or a part thereof under conditions which permit the production of 3,4,5-trihydroxypentanoic acid or a composition comprising 3,4,5-trihydroxypentanoic acid in said non-human organism or in the culture medium surrounding said non-human organism.

[87633] Accordingly, the present invention relates to a process for the production of glucose-1-phosphate, which comprises
[87634] (a) increasing or generating the activity of a ygl096w-protein in the cytosol of a cell of a non-human organism or a part thereof, preferably a microorganism, a plant cell, a plant or a part thereof, as compared to a corresponding non-transformed wild type non-human organism or a part thereof; and
[87635] (b) growing the non-human organism or a part thereof under conditions which permit the production of glucose-1-phosphate or a composition comprising glucose-1-phosphate in said non-human organism or in the culture medium surrounding said non-human organism.

[87636] Accordingly, the present invention relates to a process for the production of 3,4,5-trihydroxypentanoic acid, which comprises
[87637] (a) increasing or generating the activity of a ygl096w-protein in the cytosol of a cell of a non-human organism or a part thereof, preferably a microorganism, a plant cell, a plant or a part thereof, as compared to a corresponding non-transformed wild type non-human organism or a part thereof; and
[87638] (b) growing the non-human organism or a part thereof under conditions which permit the production of 3,4,5-trihydroxypentanoic acid or a composition comprising 3,4,5-trihydroxypentanoic acid in said non-human organism or in the culture medium surrounding said non-human organism.

[87639] Accordingly, the present invention relates to a process for the production of raffinose, which comprises
[87640] (a) increasing or generating the activity of a ygl237c-protein in the cytosol of a cell of a non-human organism or a part thereof, preferably a microorganism, a plant cell, a plant or a part thereof, as compared to a corresponding non-transformed wild type non-human organism or a part thereof; and
[87641] (b) growing the non-human organism or a part thereof under conditions which permit the production of raffinose or a composition comprising raffinose in said non-human organism or in the culture medium surrounding said non-human organism.

[87642] Accordingly, the present invention relates to a process for the production of glucose-1-phosphate, which comprises
[87643] (a) increasing or generating the activity of a alcohol dehydrogenase in the cytosol of a cell of a non-human organism or a part thereof, preferably a microorganism, a plant cell, a plant or a part thereof, as compared to a corresponding non-transformed wild type non-human organism or a part thereof; and
[87644] (b) growing the non-human organism or a part thereof under conditions which permit the production of glucose-1-phosphate or a composition comprising glucose-1-phosphate in said non-human organism or in the culture medium surrounding said non-human organism.

[87645] Accordingly, the present invention relates to a process for the production of 3,4,5-trihydroxypentanoic acid, which comprises
[87646] (a) increasing or generating the activity of a alcohol dehydrogenase in the cytosol of a cell of a non-human organism or a part thereof, preferably a microorganism, a plant cell, a plant or a part thereof, as compared to a corresponding non-transformed wild type non-human organism or a part thereof; and
[87647] (b) growing the non-human organism or a part thereof under conditions which permit the production of 3,4,5-trihydroxypentanoic acid or a composition comprising 3,4,5-trihydroxypentanoic acid in said non-human organism or in the culture medium surrounding said non-human organism.

[87648] Accordingly, the present invention relates to a process for the production of glucose, which comprises
[87649] (a) increasing or generating the activity of a yhl013c-protein in the cytosol of a cell of a non-human organism or a part thereof, preferably a microorganism, a plant cell, a plant or a part thereof, as compared to a corresponding non-transformed wild type non-human organism or a part thereof; and
[87650] (b) growing the non-human organism or a part thereof under conditions which permit the production of glucose or a composition comprising glucose in said non-human organism or in the culture medium surrounding said non-human organism.

[87651] Accordingly, the present invention relates to a process for the production of glucose-1-phosphate, which comprises
[87652] (a) increasing or generating the activity of a yhl013c-protein in the cytosol of a cell of a non-human organism or a part thereof, preferably a microorganism, a plant cell, a plant or a part thereof, as compared to a corresponding non-transformed wild type non-human organism or a part thereof; and
[87653] (b) growing the non-human organism or a part thereof under conditions which permit the production of glucose-1-phosphate or a composition comprising glucose-1-phosphate in said non-human organism or in the culture medium surrounding said non-human organism.

[87654] Accordingly, the present invention relates to a process for the production of glucose-1-phosphate, which comprises
[87655] (a) increasing or generating the activity of a 3-phosphoglycerate dehydrogenase in the cytosol of a cell of a non-human organism or a part thereof, preferably a microorganism, a plant cell, a plant or a part thereof, as compared to a corresponding non-transformed wild type non-human organism or a part thereof; and
[87656] (b) growing the non-human organism or a part thereof under conditions which permit the production of glucose-1-phosphate or a composition comprising glucose-1-phosphate in said non-human organism or in the culture medium surrounding said non-human organism.

[87657] Accordingly, the present invention relates to a process for the production of fructose, which comprises
[87658] (a) increasing or generating the activity of a YIL083C-protein in the cytosol of a cell of a non-human organism or a part thereof, preferably a microorganism, a plant cell, a plant or a part thereof, as compared to a corresponding non-transformed wild type non-human organism or a part thereof; and
[87659] (b) growing the non-human organism or a part thereof under conditions which permit the production of fructose or a composition comprising fructose in said non-human organism or in the culture medium surrounding said non-human organism.

[87660] Accordingly, the present invention relates to a process for the production of myo-inositol, which comprises
[87661] (a) increasing or generating the activity of a DnaJ-like chaperone in the cytosol of a cell of a non-human organism or a part thereof, preferably a microorganism, a plant cell, a plant or a part thereof, as compared to a corresponding non-transformed wild type non-human organism or a part thereof; and
[87662] (b) growing the non-human organism or a part thereof under conditions which permit the production of myo-inositol or a composition comprising myo-inositol in said non-human organism or in the culture medium surrounding said non-human organism.

[87663] Accordingly, the present invention relates to a process for the production of 3,4,5-trihydroxypentanoic acid, which comprises
[87664] (a) increasing or generating the activity of a YJL127W-A-protein in the cytosol of a cell of a non-human organism or a part thereof, preferably a microorganism, a plant cell, a plant or a part thereof, as compared to a corresponding non-transformed wild type non-human organism or a part thereof; and
[87665] (b) growing the non-human organism or a part thereof under conditions which permit the production of 3,4,5-trihydroxypentanoic acid or a composition comprising 3,4,5-trihydroxypentanoic acid in said non-human organism or in the culture medium surrounding said non-human organism.

[87666] Accordingly, the present invention relates to a process for the production of fructose, which comprises
[87667] (a) increasing or generating the activity of a inositol-3-phosphate synthase in the cytosol of a cell of a non-human organism or a part thereof, preferably a microorganism, a plant cell, a plant or a part thereof, as compared to a corresponding non-transformed wild type non-human organism or a part thereof; and
[87668] (b) growing the non-human organism or a part thereof under conditions which permit the production of fructose or a composition comprising fructose in said non-human organism or in the culture medium surrounding said non-human organism.

[87669] Accordingly, the present invention relates to a process for the production of galactitol, which comprises
[87670] (a) increasing or generating the activity of a inositol-3-phosphate synthase in the cytosol of a cell of a non-human organism or a part thereof, preferably a microorganism, a plant cell, a plant or a part thereof, as compared to a corresponding non-transformed wild type non-human organism or a part thereof; and
[87671] (b) growing the non-human organism or a part thereof under conditions which permit the production of galactitol or a composition comprising galactitol in said non-human organism or in the culture medium surrounding said non-human organism.

[87672] Accordingly, the present invention relates to a process for the production of myo-inositol, which comprises
[87673] (a) increasing or generating the activity of a inositol-3-phosphate synthase in the cytosol of a cell of a non-human organism or a part thereof, preferably a microorganism, a plant cell, a plant or a part thereof, as compared to a corresponding non-transformed wild type non-human organism or a part thereof; and
[87674] (b) growing the non-human organism or a part thereof under conditions which permit the production of myo-inositol or a composition comprising myo-inositol in said non-human organism or in the culture medium surrounding said non-human organism.

[87675] Accordingly, the present invention relates to a process for the production of sorbitol, which comprises
[87676] (a) increasing or generating the activity of a hexose transporter in the cytosol of a cell of a non-human organism or a part thereof, preferably a microorganism, a plant cell, a plant or a part thereof, as compared to a corresponding non-transformed wild type non-human organism or a part thereof; and
[87677] (b) growing the non-human organism or a part thereof under conditions which permit the production of sorbitol or a composition comprising sorbitol in said non-human organism or in the culture medium surrounding said non-human organism.

[87678] Accordingly, the present invention relates to a process for the production of myo-inositol, which comprises
[87679] (a) increasing or generating the activity of a protein kinase in the cytosol of a cell of a non-human organism or a part thereof, preferably a microorganism, a plant cell, a plant or a part thereof, as compared to a corresponding non-transformed wild type non-human organism or a part thereof; and
[87680] (b) growing the non-human organism or a part thereof under conditions which permit the production of myo-inositol or a composition comprising myo-inositol in said non-human organism or in the culture medium surrounding said non-human organism.

[87681] Accordingly, the present invention relates to a process for the production of glucose, which comprises
[87682] (a) increasing or generating the activity of a cystathionine gamma-synthase in the cytosol of a cell of a non-human organism or a part thereof, preferably a microorganism, a plant cell, a plant or a part thereof, as compared to a corresponding non-transformed wild type non-human organism or a part thereof; and
[87683] (b) growing the non-human organism or a part thereof under conditions which permit the production of glucose or a composition comprising glucose in said non-human organism or in the culture medium surrounding said non-human organism.

[87684] Accordingly, the present invention relates to a process for the production of fructose, which comprises
[87685] (a) increasing or generating the activity of a fructose biphosphate aldolase in the cytosol of a cell of a non-human organism or a part thereof, preferably a microorganism, a plant cell, a plant or a part thereof, as compared to a corresponding non-transformed wild type non-human organism or a part thereof; and
[87686] (b) growing the non-human organism or a part thereof under conditions which permit the production of fructose or a composition comprising fructose in said non-human organism or in the culture medium surrounding said non-human organism.

[87687] Accordingly, the present invention relates to a process for the production of sedoheptulose-7-phosphate, which comprises
[87688] (a) increasing or generating the activity of a fructose biphosphate aldolase in the cytosol of a cell of a non-human organism or a part thereof, preferably a microorganism, a plant cell, a plant or a part thereof, as compared to a corresponding non-transformed wild type non-human organism or a part thereof; and
[87689] (b) growing the non-human organism or a part thereof under conditions which permit the production of sedoheptulose-7-phosphate or a composition comprising sedoheptulose-7-phosphate in said non-human organism or in the culture medium surrounding said non-human organism.

[87690] Accordingly, the present invention relates to a process for the production of glucose-1-phosphate, which comprises
[87691] (a) increasing or generating the activity of a acyl carrier protein in the cytosol of a cell of a non-human organism or a part thereof, preferably a microorganism, a plant cell, a plant or a part thereof, as compared to a corresponding non-transformed wild type non-human organism or a part thereof; and
[87692] (b) growing the non-human organism or a part thereof under conditions which permit the production of glucose-1-phosphate or a composition comprising glucose-1-phosphate in said non-human organism or in the culture medium surrounding said non-human organism.

[87693] Accordingly, the present invention relates to a process for the production of sucrose, which comprises
[87694] (a) increasing or generating the activity of a halotolerance protein in the cytosol of a cell of a non-human organism or a part thereof, preferably a microorganism, a plant cell, a plant or a part thereof, as compared to a corresponding non-transformed wild type non-human organism or a part thereof; and
[87695] (b) growing the non-human organism or a part thereof under conditions which permit the production of sucrose or a composition comprising sucrose in said non-human organism or in the culture medium surrounding said non-human organism.

[87696] Accordingly, the present invention relates to a process for the production of glucose, which comprises
[87697] (a) increasing or generating the activity of a phosphoenolpyruvate carboxykinase in the cytosol of a cell of a non-human organism or a part thereof, preferably a microorganism, a plant cell, a plant or a part thereof, as compared to a corresponding non-transformed wild type non-human organism or a part thereof; and
[87698] (b) growing the non-human organism or a part thereof under conditions which permit the production of glucose or a composition comprising glucose in said non-human organism or in the culture medium surrounding said non-human organism.

[87699] Accordingly, the present invention relates to a process for the production of glucose, which comprises
[87700] (a) increasing or generating the activity of a phosphoenolpyruvate carboxykinase in the cytosol of a cell of a non-human organism or a part thereof, preferably a microorganism, a plant cell, a plant or a part thereof, as compared to a corresponding non-transformed wild type non-human organism or a part thereof; and
[87701] (b) growing the non-human organism or a part thereof under conditions which permit the production of glucose or a composition comprising glucose in said non-human organism or in the culture medium surrounding said non-human organism.

[87702] Accordingly, the present invention relates to a process for the production of sucrose, which comprises
[87703] (a) increasing or generating the activity of a vacuolar sorting protein in the cytosol of a cell of a non-human organism or a part thereof, preferably a microorganism, a plant cell, a plant or a part thereof, as compared to a corresponding non-transformed wild type non-human organism or a part thereof; and
[87704] (b) growing the non-human organism or a part thereof under conditions which permit the production of sucrose or a composition comprising sucrose in said non-human organism or in the culture medium surrounding said non-human organism.

[87705] Accordingly, the present invention relates to a process for the production of glucose-1-phosphate, which comprises
[87706] (a) increasing or generating the activity of a thioredoxin in the cytosol of a cell of a non-human organism or a part thereof, preferably a microorganism, a plant cell, a plant or a part thereof, as compared to a corresponding non-transformed wild type non-human organism or a part thereof; and
[87707] (b) growing the non-human organism or a part thereof under conditions which permit the production of glucose-1-phosphate or a composition comprising glucose-1-phosphate in said non-human organism or in the culture medium surrounding said non-human organism.

[87708] Accordingly, the present invention relates to a process for the production of fructose, which comprises
[87709] (a) increasing or generating the activity of a hexose transporter in the cytosol of a cell of a non-human organism or a part thereof, preferably a microorganism, a plant cell, a plant or a part thereof, as compared to a corresponding non-transformed wild type non-human organism or a part thereof; and
[87710] (b) growing the non-human organism or a part thereof under conditions which permit the production of fructose or a composition comprising fructose in said non-human organism or in the culture medium surrounding said non-human organism.

[87711] Accordingly, the present invention relates to a process for the production of verbascose, which comprises
[87712] (a) increasing or generating the activity of a purine biosynthesis protein in the cytosol of a cell of a non-human organism or a part thereof, preferably a microorganism, a plant cell, a plant or a part thereof, as compared to a corresponding non-transformed wild type non-human organism or a part thereof; and
[87713] (b) growing the non-human organism or a part thereof under conditions which permit the production of verbascose or a composition comprising verbascose in said non-human organism or in the culture medium surrounding said non-human organism.

[87714] Accordingly, the present invention relates to a process for the production of glucose-1-phosphate, which comprises
[87715] (a) increasing or generating the activity of a ymr324c-protein in the cytosol of a cell of a non-human organism or a part thereof, preferably a microorganism, a plant cell, a plant or a part thereof, as compared to a corresponding non-transformed wild type non-human organism or a part thereof; and
[87716] (b) growing the non-human organism or a part thereof under conditions which permit the production of glucose-1-phosphate or a composition comprising glucose-1-phosphate in said non-human organism or in the culture medium surrounding said non-human organism.

[87717] Accordingly, the present invention relates to a process for the production of myo-inositol, which comprises
[87718] (a) increasing or generating the activity of a molecular chaperone in the cytosol of a cell of a non-human organism or a part thereof, preferably a microorganism, a plant cell, a plant or a part thereof, as compared to a corresponding non-transformed wild type non-human organism or a part thereof; and
[87719] (b) growing the non-human organism or a part thereof under conditions which permit the production of myo-inositol or a composition comprising myo-inositol in said non-human organism or in the culture medium surrounding said non-human organism.

[87720] Accordingly, the present invention relates to a process for the production of sucrose, which comprises
[87721] (a) increasing or generating the activity of a molecular chaperone in the cytosol of a cell of a non-human organism or a part thereof, preferably a microorganism, a plant cell, a plant or a part thereof, as compared to a corresponding non-transformed wild type non-human organism or a part thereof; and
[87722] (b) growing the non-human organism or a part thereof under conditions which permit the production of sucrose or a composition comprising sucrose in said non-human organism or in the culture medium surrounding said non-human organism.

[87723] Accordingly, the present invention relates to a process for the production of raffinose, which comprises
[87724] (a) increasing or generating the activity of a sterol O-acyltransferase in the cytosol of a cell of a non-human organism or a part thereof, preferably a microorganism, a plant cell, a plant or a part thereof, as compared to a corresponding non-transformed wild type non-human organism or a part thereof; and
[87725] (b) growing the non-human organism or a part thereof under conditions which permit the production of raffinose or a composition comprising raffinose in said non-human organism or in the culture medium surrounding said non-human organism.

[87726] Accordingly, the present invention relates to a process for the production of myo-inositol, which comprises
[87727] (a) increasing or generating the activity of a yol160w-protein in the cytosol of a cell of a non-human organism or a part thereof, preferably a microorganism, a plant cell, a plant or a part thereof, as compared to a corresponding non-transformed wild type non-human organism or a part thereof; and
[87728] (b) growing the non-human organism or a part thereof under conditions which permit the production of myo-inositol or a composition comprising myo-inositol in said non-human organism or in the culture medium surrounding said non-human organism.

[87729] Accordingly, the present invention relates to a process for the production of glucose, which comprises
[87730] (a) increasing or generating the activity of a phosphohydrolase in the cytosol of a cell of a non-human organism or a part thereof, preferably a microorganism, a plant cell, a plant or a part thereof, as compared to a corresponding non-transformed wild type non-human organism or a part thereof; and
[87731] (b) growing the non-human organism or a part thereof under conditions which permit the production of glucose or a composition comprising glucose in said non-human organism or in the culture medium surrounding said non-human organism.

[87732] Accordingly, the present invention relates to a process for the production of glucose-1-phosphate, which comprises
[87733] (a) increasing or generating the activity of a histone acetyltransferase in the cytosol of a cell of a non-human organism or a part thereof, preferably a microorganism, a plant cell, a plant or a part thereof, as compared to a corresponding non-transformed wild type non-human organism or a part thereof; and
[87734] (b) growing the non-human organism or a part thereof under conditions which permit the production of glucose-1-phosphate or a composition comprising glucose-1-phosphate in said non-human organism or in the culture medium surrounding said non-human organism.

[87735] Accordingly, the present invention relates to a process for the production of 3,4,5-trihydroxypentanoic acid, which comprises
[87736] (a) increasing or generating the activity of a subunit of COMPASS-protein complex in the cytosol of a cell of a non-human organism or a part thereof, preferably a microorganism, a plant cell, a plant or a part thereof, as compared to a corresponding non-transformed wild type non-human organism or a part thereof; and
[87737] (b) growing the non-human organism or a part thereof under conditions which permit the production of 3,4,5-trihydroxypentanoic acid or a composition comprising 3,4,5-trihydroxypentanoic acid in said non-human organism or in the culture medium surrounding said non-human organism.

[87738] Accordingly, the present invention relates to a process for the production of glucose-1-phosphate, which comprises
[87739] (a) increasing or generating the activity of a ypl144w-protein in the cytosol of a cell of a non-human organism or a part thereof, preferably a microorganism, a plant cell, a plant or a part thereof, as compared to a corresponding non-transformed wild type non-human organism or a part thereof; and
[87740] (b) growing the non-human organism or a part thereof under conditions which permit the production of glucose-1-phosphate or a composition comprising glucose-1-phosphate in said non-human organism or in the culture medium surrounding said non-human organism.

[87741] Accordingly, the present invention relates to a process for the production of 3,4,5-trihydroxypentanoic acid, which comprises
[87742] (a) increasing or generating the activity of a ypl144w-protein in the cytosol of a cell of a non-human organism or a part thereof, preferably a microorganism, a plant cell, a plant or a part thereof, as compared to a corresponding non-transformed wild type non-human organism or a part thereof; and
[87743] (b) growing the non-human organism or a part thereof under conditions which permit the production of 3,4,5-trihydroxypentanoic acid or a composition comprising 3,4,5-trihydroxypentanoic acid in said non-human organism or in the culture medium surrounding said non-human organism.

[87744] Accordingly, the present invention relates to a process for the production of glucose-1-phosphate, which comprises
[87745] (a) increasing or generating the activity of a ypr098c-protein in the cytosol of a cell of a non-human organism or a part thereof, preferably a microorganism, a plant cell, a plant or a part thereof, as compared to a corresponding non-transformed wild type non-human organism or a part thereof; and
[87746] (b) growing the non-human organism or a part thereof under conditions which permit the production of glucose-1-phosphate or a composition comprising glucose-1-phosphate in said non-human organism or in the culture medium surrounding said non-human organism.

[87747] Accordingly, the present invention relates to a process for the production of 3,4,5-trihydroxypentanoic acid, which comprises
[87748] (a) increasing or generating the activity of a ypr098c-protein in the cytosol of a cell of a non-human organism or a part thereof, preferably a microorganism, a plant cell, a plant or a part thereof, as compared to a corresponding non-transformed wild type non-human organism or a part thereof; and
[87749] (b) growing the non-human organism or a part thereof under conditions which permit the production of 3,4,5-trihydroxypentanoic acid or a composition comprising 3,4,5-trihydroxypentanoic acid in said non-human organism or in the culture medium surrounding said non-human organism.

[87750] Accordingly, the present invention relates to a process for the production of glucose-1-phosphate, which comprises
[87751] (a) increasing or generating the activity of a polyamine transporter in the cytosol of a cell of a non-human organism or a part thereof, preferably a microorganism, a plant cell, a plant or a part thereof, as compared to a corresponding non-transformed wild type non-human organism or a part thereof; and
[87752] (b) growing the non-human organism or a part thereof under conditions which permit the production of glucose-1-phosphate or a composition comprising glucose-1-phosphate in said non-human organism or in the culture medium surrounding said non-human organism.

[87753] Accordingly, the present invention relates to a process for the production of myo-inositol, which comprises
[87754] (a) increasing or generating the activity of a polyamine transporter in the cytosol of a cell of a non-human organism or a part thereof, preferably a microorganism, a plant cell, a plant or a part thereof, as compared to a corresponding non-transformed wild type non-human organism or a part thereof; and
[87755] (b) growing the non-human organism or a part thereof under conditions which permit the production of myo-inositol or a composition comprising myo-inositol in said non-human organism or in the culture medium surrounding said non-human organism.

[87756] Accordingly, the present invention relates to a process for the production of fructose, which comprises
[87757] (a) increasing or generating the activity of a Zm_{—}4842_BE510522-protein in the cytosol of a cell of a non-human organism or a part thereof, preferably a microorganism, a plant cell, a plant or a part thereof, as compared to a corresponding non-transformed wild type non-human organism or a part thereof; and
[87758] (b) growing the non-human organism or a part thereof under conditions which permit the production of fructose or a composition comprising fructose in said non-human organism or in the culture medium surrounding said non-human organism.

[87759] Accordingly, the present invention relates to a process for the production of glucose, which comprises
[87760] (a) increasing or generating the activity of a Zm_{—}4842_BE510522-protein in the cytosol of a cell of a non-human organism or a part thereof, preferably a microorganism, a plant cell, a plant or a part thereof, as compared to a corresponding non-transformed wild type non-human organism or a part thereof; and
[87761] (b) growing the non-human organism or a part thereof under conditions which permit the production of glucose or a composition comprising glucose in said non-human organism or in the culture medium surrounding said non-human organism.

[87762] Accordingly, the present invention relates to a process for the production of myo-inositol, which comprises
[87763] (a) increasing or generating the activity of a acetyltransferase in the cytosol of a cell of a non-human organism or a part thereof, preferably a microorganism, a plant cell, a plant or a part thereof, as compared to a corresponding non-transformed wild type non-human organism or a part thereof; and
[87764] (b) growing the non-human organism or a part thereof under conditions which permit the production of myo-inositol or a composition comprising myo-inositol in said non-human organism or in the culture medium surrounding said non-human organism.

[87765] Accordingly, the present invention relates to a process for the production of fructose, which comprises
[87766] (a) increasing or generating the activity of a 47266012-protein in the cytosol of a cell of a non-human organism or a part thereof, preferably a microorganism, a plant cell, a plant or a part thereof, as compared to a corresponding non-transformed wild type non-human organism or a part thereof; and
[87767] (b) growing the non-human organism or a part thereof under conditions which permit the production of fructose or a composition comprising fructose in said non-human organism or in the culture medium surrounding said non-human organism.

[87768] Accordingly, the present invention relates to a process for the production of glucose, which comprises
[87769] (a) increasing or generating the activity of a 47266012-protein in the cytosol of a cell of a non-human organism or a part thereof, preferably a microorganism, a plant cell, a plant or a part thereof, as compared to a corresponding non-transformed wild type non-human organism or a part thereof; and
[87770] (b) growing the non-human organism or a part thereof under conditions which permit the production of glucose or a composition comprising glucose in said non-human organism or in the culture medium surrounding said non-human organism.

[87771] Accordingly, the present invention relates to a process for the production of glucose-1-phosphate, which comprises
[87772] (a) increasing or generating the activity of a 47266012-protein in the cytosol of a cell of a non-human organism or a part thereof, preferably a microorganism, a plant cell, a plant or a part thereof, as compared to a corresponding non-transformed wild type non-human organism or a part thereof; and
[87773] (b) growing the non-human organism or a part thereof under conditions which permit the production of glucose-1-phosphate or a composition comprising glucose-1-phosphate in said non-human organism or in the culture medium surrounding said non-human organism.

[87774] Accordingly, the present invention relates to a process for the production of myo-inositol, which comprises
[87775] (a) increasing or generating the activity of a 47266012-protein in the cytosol of a cell of a non-human organism or a part thereof, preferably a microorganism, a plant cell, a plant or a part thereof, as compared to a corresponding non-transformed wild type non-human organism or a part thereof; and
[87776] (b) growing the non-human organism or a part thereof under conditions which permit the production of myo-inositol or a composition comprising myo-inositol in said non-human organism or in the culture medium surrounding said non-human organism.

[87777] Accordingly, the present invention relates to a process for the production of sedoheptulose-7-phosphate, which comprises
[87778] (a) increasing or generating the activity of a 47266012-protein in the cytosol of a cell of a non-human organism or a part thereof, preferably a microorganism, a plant cell, a plant or a part thereof, as compared to a corresponding non-transformed wild type non-human organism or a part thereof; and
[87779] (b) growing the non-human organism or a part thereof under conditions which permit the production of sedoheptulose-7-phosphate or a composition comprising sedoheptulose-7-phosphate in said non-human organism or in the culture medium surrounding said non-human organism.

[87780] Accordingly, the present invention relates to a process for the production of glucose, which comprises
[87781] (a) increasing or generating the activity of a 49747384_SOYBEAN-protein in the cytosol of a cell of a non-human organism or a part thereof, preferably a microorganism, a plant cell, a plant or a part thereof, as compared to a corresponding non-transformed wild type non-human organism or a part thereof; and
[87782] (b) growing the non-human organism or a part thereof under conditions which permit the production of glucose or a composition comprising glucose in said non-human organism or in the culture medium surrounding said non-human organism.

[87783] Accordingly, the present invention relates to a process for the production of glucose-1-phosphate, which comprises
[87784] (a) increasing or generating the activity of a 49747384_SOYBEAN-protein in the cytosol of a cell of a non-human organism or a part thereof, preferably a microorganism, a plant cell, a plant or a part thereof, as compared to a corresponding non-transformed wild type non-human organism or a part thereof; and
[87785] (b) growing the non-human organism or a part thereof under conditions which permit the production of glucose-1-phosphate or a composition comprising glucose-1-phosphate in said non-human organism or in the culture medium surrounding said non-human organism.

[87786] Accordingly, the present invention relates to a process for the production of myo-inositol, which comprises
[87787] (a) increasing or generating the activity of a 49747384_SOYBEAN-protein in the cytosol of a cell of a non-human organism or a part thereof, preferably a microorganism, a plant cell, a plant or a part thereof, as compared to a corresponding non-transformed wild type non-human organism or a part thereof; and
[87788] (b) growing the non-human organism or a part thereof under conditions which permit the production of myo-inositol or a composition comprising myo-inositol in said non-human organism or in the culture medium surrounding said non-human organism.

[87789] Accordingly, the present invention relates to a process for the production of raffinose, which comprises
[87790] (a) increasing or generating the activity of a 49747384_SOYBEAN-protein in the cytosol of a cell of a non-human organism or a part thereof, preferably a microorganism, a plant cell, a plant or a part thereof, as compared to a corresponding non-transformed wild type non-human organism or a part thereof; and
[87791] (b) growing the non-human organism or a part thereof under conditions which permit the production of raffinose or a composition comprising raffinose in said non-human organism or in the culture medium surrounding said non-human organism.

[87792] Accordingly, the present invention relates to a process for the production of sedoheptulose-7-phosphate, which comprises
[87793] (a) increasing or generating the activity of a 49747384_SOYBEAN-protein in the cytosol of a cell of a non-human organism or a part thereof, preferably a microorganism, a plant cell, a plant or a part thereof, as compared to a corresponding non-transformed wild type non-human organism or a part thereof; and
[87794] (b) growing the non-human organism or a part thereof under conditions which permit the production of sedoheptulose-7-phosphate or a composition comprising sedoheptulose-7-phosphate in said non-human organism or in the culture medium surrounding said non-human organism.

[87795] Accordingly, the present invention relates to a process for the production of fructose, which comprises
[87796] (a) increasing or generating the activity of a glucose-6-phosphate 1-dehydrogenase in the cytosol of a cell of a non-human organism or a part thereof, preferably a microorganism, a plant cell, a plant or a part thereof, as compared to a corresponding non-transformed wild type non-human organism or a part thereof; and
[87797] (b) growing the non-human organism or a part thereof under conditions which permit the production of fructose or a composition comprising fructose in said non-human organism or in the culture medium surrounding said non-human organism.

[87798] Accordingly, the present invention relates to a process for the production of glucose, which comprises
[87799] (a) increasing or generating the activity of a glucose-6-phosphate 1-dehydrogenase in the cytosol of a cell of a non-human organism or a part thereof, preferably a microorganism, a plant cell, a plant or a part thereof, as compared to a corresponding non-transformed wild type non-human organism or a part thereof; and
[87800] (b) growing the non-human organism or a part thereof under conditions which permit the production of glucose or a composition comprising glucose in said non-human organism or in the culture medium surrounding said non-human organism.

[87801] Accordingly, the present invention relates to a process for the production of glucose-1-phosphate, which comprises
[87802] (a) increasing or generating the activity of a glucose-6-phosphate 1-dehydrogenase in the cytosol of a cell of a non-human organism or a part thereof, preferably a microorganism, a plant cell, a plant or a part thereof, as compared to a corresponding non-transformed wild type non-human organism or a part thereof; and
[87803] (b) growing the non-human organism or a part thereof under conditions which permit the production of glucose-1-phosphate or a composition comprising glucose-1-phosphate in said non-human organism or in the culture medium surrounding said non-human organism.

[87804] Accordingly, the present invention relates to a process for the production of sedoheptulose-7-phosphate, which comprises
[87805] (a) increasing or generating the activity of a glucose-6-phosphate 1-dehydrogenase in the cytosol of a cell of a non-human organism or a part thereof, preferably a microorganism, a plant cell, a plant or a part thereof, as compared to a corresponding non-transformed wild type non-human organism or a part thereof; and
[87806] (b) growing the non-human organism or a part thereof under conditions which permit the production of sedoheptulose-7-phosphate or a composition comprising sedoheptulose-7-phosphate in said non-human organism or in the culture medium surrounding said non-human organism.

[87807] Accordingly, the present invention relates to a process for the production of sucrose, which comprises
[87808] (a) increasing or generating the activity of a glucose-6-phosphate 1-dehydrogenase in the cytosol of a cell of a non-human organism or a part thereof, preferably a microorganism, a plant cell, a plant or a part thereof, as compared to a corresponding non-transformed wild type non-human organism or a part thereof; and
[87809] (b) growing the non-human organism or a part thereof under conditions which permit the production of sucrose or a composition comprising sucrose in said non-human organism or in the culture medium surrounding said non-human organism.

[87810] Accordingly, the present invention relates to a process for the production of 3,4,5-trihydroxypentanoic acid, which comprises
[87811] (a) increasing or generating the activity of a glucose-6-phosphate 1-dehydrogenase in the cytosol of a cell of a non-human organism or a part thereof, preferably a microorganism, a plant cell, a plant or a part thereof, as compared to a corresponding non-transformed wild type non-human organism or a part thereof; and
[87812] (b) growing the non-human organism or a part thereof under conditions which permit the production of 3,4,5-trihydroxypentanoic acid or a composition comprising 3,4,5-trihydroxypentanoic acid in said non-human organism or in the culture medium surrounding said non-human organism.

[87813] Accordingly, the present invention relates to a process for the production of fructose, which comprises
[87814] (a) increasing or generating the activity of a DNA replication complex GINS protein in the cytosol of a cell of a non-human organism or a part thereof, preferably a microorganism, a plant cell, a plant or a part thereof, as compared to a corresponding non-transformed wild type non-human organism or a part thereof; and
[87815] (b) growing the non-human organism or a part thereof under conditions which permit the production of fructose or a composition comprising fructose in said non-human organism or in the culture medium surrounding said non-human organism.

[87816] Accordingly, the present invention relates to a process for the production of glucose, which comprises
[87817] (a) increasing or generating the activity of a acetyl CoA synthetase in the cytosol of a cell of a non-human organism or a part thereof, preferably a microorganism, a plant cell, a plant or a part thereof, as compared to a corresponding non-transformed wild type non-human organism or a part thereof; and
[87818] (b) growing the non-human organism or a part thereof under conditions which permit the production of glucose or a composition comprising glucose in said non-human organism or in the culture medium surrounding said non-human organism.

[87819] Accordingly, the present invention relates to a process for the production of 3,4,5-trihydroxypentanoic acid, which comprises
[87820] (a) increasing or generating the activity of a polypeptide comprising a polypeptide as depicted in the respective line in column 5 or 8 of Table II, application no. 17, or a homolog or a fragment thereof, a consensus sequence or at least one polypeptide motif as depicted in the respective line in column 8 of Table IV, application no. 17, whereby the respective line disclose in column 7 the fine chemical 3,4,5-trihydroxypentanoic acid; or
[87821] increasing or generating the activity of an expression product of one or more nucleic acid molecule(s) comprising a polynucleotide as depicted in the respective line in column 5 or 8 of Table I, application no. 17, preferably the coding region thereof, or a homolog or a fragment thereof, whereby the respective line disclose in column 7 the fine chemical 3,4,5-trihydroxypentanoic acid;
[87822] in the cytosol of a cell of a non-human organism or a part thereof; preferably a microorganism, a plant cell, a plant or a part thereof, as compared to a corresponding non-transformed wild type non-human organism or a part thereof; and
[87823] (b) growing the non-human organism under conditions which permit the production of 3,4,5-trihydroxypentanoic acid, or a composition comprising 3,4,5-trihydroxypentanoic acid in said non-human organism or in the culture medium surrounding said non-human organism.

[87824] Accordingly, the present invention relates to a process for the production of erythrol, which comprises
[87825] (a) increasing or generating the activity of a polypeptide comprising a polypeptide as depicted in the respective line in column 5 or 8 of Table II, application no. 17, or a homolog or a fragment thereof, a consensus sequence or at least one polypeptide motif as depicted in the respective line in column 8 of Table IV, application no. 17, whereby the respective line disclose in column 7 the fine chemical erythrol; or
[87826] increasing or generating the activity of an expression product of one or more nucleic acid molecule(s) comprising a polynucleotide as depicted in the respective line in column 5 or 8 of Table I, application no. 17, preferably the coding region thereof, or a homolog or a fragment thereof, whereby the respective line disclose in column 7 the fine chemical erythrol;
[87827] in the cytosol of a cell of a non-human organism or a part thereof; preferably a microorganism, a plant cell, a plant or a part thereof, as compared to a corresponding non-transformed wild type non-human organism or a part thereof; and
[87828] (b) growing the non-human organism under conditions which permit the production of erythrol, or a composition comprising erythrol in said non-human organism or in the culture medium surrounding said non-human organism.

[87829] Accordingly, the present invention relates to a process for the production of fructose, which comprises
[87830] (a) increasing or generating the activity of a polypeptide comprising a polypeptide as depicted in the respective line in column 5 or 8 of Table II, application no. 17, or a homolog or a fragment thereof, a consensus sequence or at least one polypeptide motif as depicted in the respective line in column 8 of Table IV, application no. 17, whereby the respective line disclose in column 7 the fine chemical fructose; or
[87831] increasing or generating the activity of an expression product of one or more nucleic acid molecule(s) comprising a polynucleotide as depicted in the respective line in column 5 or 8 of Table I, application no. 17, preferably the coding region thereof, or a homolog or a fragment thereof, whereby the respective line disclose in column 7 the fine chemical fructose;
[87832] in the cytosol of a cell of a non-human organism or a part thereof; preferably a microorganism, a plant cell, a plant or a part thereof, as compared to a corresponding non-transformed wild type non-human organism or a part thereof; and
[87833] (b) growing the non-human organism under conditions which permit the production of fructose, or a composition comprising fructose in said non-human organism or in the culture medium surrounding said non-human organism.

[87834] Accordingly, the present invention relates to a process for the production of fucose, which comprises
[87835] (a) increasing or generating the activity of a polypeptide comprising a polypeptide as depicted in the respective line in column 5 or 8 of Table II, application no. 17, or a homolog or a fragment thereof, a consensus sequence or at least one polypeptide motif as depicted in the respective line in column 8 of Table IV, application no. 17, whereby the respective line disclose in column 7 the fine chemical fucose; or
[87836] increasing or generating the activity of an expression product of one or more nucleic acid molecule(s) comprising a polynucleotide as depicted in the respective line in column 5 or 8 of Table I, application no. 17, preferably the coding region thereof, or a homolog or a fragment thereof, whereby the respective line disclose in column 7 the fine chemical fucose;
[87837] in the cytosol of a cell of a non-human organism or a part thereof; preferably a microorganism, a plant cell, a plant or a part thereof, as compared to a corresponding non-transformed wild type non-human organism or a part thereof; and
[87838] (b) growing the non-human organism under conditions which permit the production of fucose, or a composition comprising fucose in said non-human organism or in the culture medium surrounding said non-human organism.

[87839] Accordingly, the present invention relates to a process for the production of galactinol, which comprises
[87840] (a) increasing or generating the activity of a polypeptide comprising a polypeptide as depicted in the respective line in column 5 or 8 of Table II, application no. 17, or a homolog or a fragment thereof, a consensus sequence or at least one polypeptide motif as depicted in the respective line in column 8 of Table IV, application no. 17, whereby the respective line disclose in column 7 the fine chemical galactinol; or
[87841] increasing or generating the activity of an expression product of one or more nucleic acid molecule(s) comprising a polynucleotide as depicted in the respective line in column 5 or 8 of Table I, application no. 17, preferably the coding region thereof, or a homolog or a fragment thereof, whereby the respective line disclose in column 7 the fine chemical galactinol;
[87842] in the cytosol of a cell of a non-human organism or a part thereof; preferably a microorganism, a plant cell, a plant or a part thereof, as compared to a corresponding non-transformed wild type non-human organism or a part thereof; and
[87843] (b) growing the non-human organism under conditions which permit the production of galactinol, or a composition comprising galactinol in said non-human organism or in the culture medium surrounding said non-human organism.

[87844] Accordingly, the present invention relates to a process for the production of galactitol, which comprises
[87845] (a) increasing or generating the activity of a polypeptide comprising a polypeptide as depicted in the respective line in column 5 or 8 of Table II, application no. 17, or a homolog or a fragment thereof, a consensus sequence or at least one polypeptide motif as depicted in the respective line in column 8 of Table IV, application no. 17, whereby the respective line disclose in column 7 the fine chemical galactitol; or
[87846] increasing or generating the activity of an expression product of one or more nucleic acid molecule(s) comprising a polynucleotide as depicted in the respective line in column 5 or 8 of Table I, application no. 17, preferably the coding region thereof, or a homolog or a fragment thereof, whereby the respective line disclose in column 7 the fine chemical galactitol;
[87847] in the cytosol of a cell of a non-human organism or a part thereof; preferably a microorganism, a plant cell, a plant or a part thereof, as compared to a corresponding non-transformed wild type non-human organism or a part thereof; and
[87848] (b) growing the non-human organism under conditions which permit the production of galactitol, or a composition comprising galactitol in said non-human organism or in the culture medium surrounding said non-human organism.

[87849] Accordingly, the present invention relates to a process for the production of glucose, which comprises
[87850] (a) increasing or generating the activity of a polypeptide comprising a polypeptide as depicted in the respective line in column 5 or 8 of Table II, application no. 17, or a homolog or a fragment thereof, a consensus sequence or at least one polypeptide motif as depicted in the respective line in column 8 of Table IV, application no. 17, whereby the respective line disclose in column 7 the fine chemical glucose; or
[87851] increasing or generating the activity of an expression product of one or more nucleic acid molecule(s) comprising a polynucleotide as depicted in the respective line in column 5 or 8 of Table I, application no. 17, preferably the coding region thereof, or a homolog or a fragment thereof, whereby the respective line disclose in column 7 the fine chemical glucose;
[87852] in the cytosol of a cell of a non-human organism or a part thereof; preferably a microorganism, a plant cell, a plant or a part thereof, as compared to a corresponding non-transformed wild type non-human organism or a part thereof; and
[87853] (b) growing the non-human organism under conditions which permit the production of glucose, or a composition comprising glucose in said non-human organism or in the culture medium surrounding said non-human organism.

[87854] Accordingly, the present invention relates to a process for the production of glucose-1-phosphate, which comprises
[87855] (a) increasing or generating the activity of a polypeptide comprising a polypeptide as depicted in the respective line in column 5 or 8 of Table II, application no. 17, or a homolog or a fragment thereof, a consensus sequence or at least one polypeptide motif as depicted in the respective line in column 8 of Table IV, application no. 17, whereby the respective line disclose in column 7 the fine chemical glucose-1-phosphate; or
[87856] increasing or generating the activity of an expression product of one or more nucleic acid molecule(s) comprising a polynucleotide as depicted in the respective line in column 5 or 8 of Table I, application no. 17, preferably the coding region thereof, or a homolog or a fragment thereof, whereby the respective line disclose in column 7 the fine chemical glucose-1-phosphate;
[87857] in the cytosol of a cell of a non-human organism or a part thereof; preferably a microorganism, a plant cell, a plant or a part thereof, as compared to a corresponding non-transformed wild type non-human organism or a part thereof; and
[87858] (b) growing the non-human organism under conditions which permit the production of glucose-1-phosphate, or a composition comprising glucose-1-phosphate in said non-human organism or in the culture medium surrounding said non-human organism.

[87859] Accordingly, the present invention relates to a process for the production of mannitol, which comprises
[87860] (a) increasing or generating the activity of a polypeptide comprising a polypeptide as depicted in the respective line in column 5 or 8 of Table II, application no. 17, or a homolog or a fragment thereof, a consensus sequence or at least one polypeptide motif as depicted in the respective line in column 8 of Table IV, application no. 17, whereby the respective line disclose in column 7 the fine chemical mannitol; or
[87861] increasing or generating the activity of an expression product of one or more nucleic acid molecule(s) comprising a polynucleotide as depicted in the respective line in column 5 or 8 of Table I, application no. 17, preferably the coding region thereof, or a homolog or a fragment thereof, whereby the respective line disclose in column 7 the fine chemical mannitol;
[87862] in the cytosol of a cell of a non-human organism or a part thereof; preferably a microorganism, a plant cell, a plant or a part thereof, as compared to a corresponding non-transformed wild type non-human organism or a part thereof; and
[87863] (b) growing the non-human organism under conditions which permit the production of mannitol, or a composition comprising mannitol in said non-human organism or in the culture medium surrounding said non-human organism.

[87864] Accordingly, the present invention relates to a process for the production of melibiose, which comprises
[87865] (a) increasing or generating the activity of a polypeptide comprising a polypeptide as depicted in the respective line in column 5 or 8 of Table II, application no. 17, or a homolog or a fragment thereof, a consensus sequence or at least one polypeptide motif as depicted in the respective line in column 8 of Table IV, application no. 17, whereby the respective line disclose in column 7 the fine chemical melibiose; or
[87866] increasing or generating the activity of an expression product of one or more nucleic acid molecule(s) comprising a polynucleotide as depicted in the respective line in column 5 or 8 of Table I, application no. 17, preferably the coding region thereof, or a homolog or a fragment thereof, whereby the respective line disclose in column 7 the fine chemical melibiose;
[87867] in the cytosol of a cell of a non-human organism or a part thereof; preferably a microorganism, a plant cell, a plant or a part thereof, as compared to a corresponding non-transformed wild type non-human organism or a part thereof; and
[87868] (b) growing the non-human organism under conditions which permit the production of melibiose, or a composition comprising melibiose in said non-human organism or in the culture medium surrounding said non-human organism.

[87869] Accordingly, the present invention relates to a process for the production of myo-inositol, which comprises
[87870] (a) increasing or generating the activity of a polypeptide comprising a polypeptide as depicted in the respective line in column 5 or 8 of Table II, application no. 17, or a homolog or a fragment thereof, a consensus sequence or at least one polypeptide motif as depicted in the respective line in column 8 of Table IV, application no. 17, whereby the respective line disclose in column 7 the fine chemical myo-inositol; or
[87871] increasing or generating the activity of an expression product of one or more nucleic acid molecule(s) comprising a polynucleotide as depicted in the respective line in column 5 or 8 of Table I, application no. 17, preferably the coding region thereof, or a homolog or a fragment thereof, whereby the respective line disclose in column 7 the fine chemical myo-inositol;
[87872] in the cytosol of a cell of a non-human organism or a part thereof; preferably a microorganism, a plant cell, a plant or a part thereof, as compared to a corresponding non-transformed wild type non-human organism or a part thereof; and
[87873] (b) growing the non-human organism under conditions which permit the production of myo-inositol, or a composition comprising myo-inositol in said non-human organism or in the culture medium surrounding said non-human organism.

[87874] Accordingly, the present invention relates to a process for the production of raffinose, which comprises
[87875] (a) increasing or generating the activity of a polypeptide comprising a polypeptide as depicted in the respective line in column 5 or 8 of Table II, application no. 17, or a homolog or a fragment thereof, a consensus sequence or at least one polypeptide motif as depicted in the respective line in column 8 of Table IV, application no. 17, whereby the respective line disclose in column 7 the fine chemical raffinose; or
[87876] increasing or generating the activity of an expression product of one or more nucleic acid molecule(s) comprising a polynucleotide as depicted in the respective line in column 5 or 8 of Table I, application no. 17, preferably the coding region thereof, or a homolog or a fragment thereof, whereby the respective line disclose in column 7 the fine chemical raffinose;
[87877] in the cytosol of a cell of a non-human organism or a part thereof; preferably a microorganism, a plant cell, a plant or a part thereof, as compared to a corresponding non-transformed wild type non-human organism or a part thereof; and
[87878] (b) growing the non-human organism under conditions which permit the production of raffinose, or a composition comprising raffinose in said non-human organism or in the culture medium surrounding said non-human organism.

[87879] Accordingly, the present invention relates to a process for the production of saccharic acid, which comprises
[87880] (a) increasing or generating the activity of a polypeptide comprising a polypeptide as depicted in the respective line in column 5 or 8 of Table II, application no. 17, or a homolog or a fragment thereof, a consensus sequence or at least one polypeptide motif as depicted in the respective line in column 8 of Table IV, application no. 17, whereby the respective line disclose in column 7 the fine chemical saccharic acid; or
[87881] increasing or generating the activity of an expression product of one or more nucleic acid molecule(s) comprising a polynucleotide as depicted in the respective line in column 5 or 8 of Table I, application no. 17, preferably the coding region thereof, or a homolog or a fragment thereof, whereby the respective line disclose in column 7 the fine chemical saccharic acid;
[87882] in the cytosol of a cell of a non-human organism or a part thereof; preferably a microorganism, a plant cell, a plant or a part thereof, as compared to a corresponding non-transformed wild type non-human organism or a part thereof; and
[87883] (b) growing the non-human organism under conditions which permit the production of saccharic acid, or a composition comprising saccharic acid in said non-human organism or in the culture medium surrounding said non-human organism.

[87884] Accordingly, the present invention relates to a process for the production of sedoheptulose-7-phosphate, which comprises
[87885] (a) increasing or generating the activity of a polypeptide comprising a polypeptide as depicted in the respective line in column 5 or 8 of Table II, application no. 17, or a homolog or a fragment thereof, a consensus sequence or at least one polypeptide motif as depicted in the respective line in column 8 of Table IV, application no. 17, whereby the respective line disclose in column 7 the fine chemical sedoheptulose-7-phosphate; or
[87886] increasing or generating the activity of an expression product of one or more nucleic acid molecule(s) comprising a polynucleotide as depicted in the respective line in column 5 or 8 of Table I, application no. 17, preferably the coding region thereof, or a homolog or a fragment thereof, whereby the respective line disclose in column 7 the fine chemical sedoheptulose-7-phosphate;
[87887] in the cytosol of a cell of a non-human organism or a part thereof; preferably a microorganism, a plant cell, a plant or a part thereof, as compared to a corresponding non-transformed wild type non-human organism or a part thereof; and
[87888] (b) growing the non-human organism under conditions which permit the production of sedoheptulose-7-phosphate, or a composition comprising sedoheptulose-7-phosphate in said non-human organism or in the culture medium surrounding said non-human organism.

[87889] Accordingly, the present invention relates to a process for the production of sorbitol, which comprises
[87890] (a) increasing or generating the activity of a polypeptide comprising a polypeptide as depicted in the respective line in column 5 or 8 of Table II, application no. 17, or a homolog or a fragment thereof, a consensus sequence or at least one polypeptide motif as depicted in the respective line in column 8 of Table IV, application no. 17, whereby the respective line disclose in column 7 the fine chemical sorbitol; or
[87891] increasing or generating the activity of an expression product of one or more nucleic acid molecule(s) comprising a polynucleotide as depicted in the respective line in column 5 or 8 of Table I, application no. 17, preferably the coding region thereof, or a homolog or a fragment thereof, whereby the respective line disclose in column 7 the fine chemical sorbitol;
[87892] in the cytosol of a cell of a non-human organism or a part thereof; preferably a microorganism, a plant cell, a plant or a part thereof, as compared to a corresponding non-transformed wild type non-human organism or a part thereof; and
[87893] (b) growing the non-human organism under conditions which permit the production of sorbitol, or a composition comprising sorbitol in said non-human organism or in the culture medium surrounding said non-human organism.

[87894] Accordingly, the present invention relates to a process for the production of sucrose, which comprises
[87895] (a) increasing or generating the activity of a polypeptide comprising a polypeptide as depicted in the respective line in column 5 or 8 of Table II, application no. 17, or a homolog or a fragment thereof, a consensus sequence or at least one polypeptide motif as depicted in the respective line in column 8 of Table IV, application no. 17, whereby the respective line disclose in column 7 the fine chemical sucrose; or
[87896] increasing or generating the activity of an expression product of one or more nucleic acid molecule(s) comprising a polynucleotide as depicted in the respective line in column 5 or 8 of Table I, application no. 17, preferably the coding region thereof, or a homolog or a fragment thereof, whereby the respective line disclose in column 7 the fine chemical sucrose;
[87897] in the cytosol of a cell of a non-human organism or a part thereof; preferably a microorganism, a plant cell, a plant or a part thereof, as compared to a corresponding non-transformed wild type non-human organism or a part thereof; and
[87898] (b) growing the non-human organism under conditions which permit the production of sucrose, or a composition comprising sucrose in said non-human organism or in the culture medium surrounding said non-human organism.

[87899] Accordingly, the present invention relates to a process for the production of trehalose, which comprises
[87900] (a) increasing or generating the activity of a polypeptide comprising a polypeptide as depicted in the respective line in column 5 or 8 of Table II, application no. 17, or a homolog or a fragment thereof, a consensus sequence or at least one polypeptide motif as depicted in the respective line in column 8 of Table IV, application no. 17, whereby the respective line disclose in column 7 the fine chemical trehalose; or
[87901] increasing or generating the activity of an expression product of one or more nucleic acid molecule(s) comprising a polynucleotide as depicted in the respective line in column 5 or 8 of Table I, application no. 17, preferably the coding region thereof, or a homolog or a fragment thereof, whereby the respective line disclose in column 7 the fine chemical trehalose;
[87902] in the cytosol of a cell of a non-human organism or a part thereof; preferably a microorganism, a plant cell, a plant or a part thereof, as compared to a corresponding non-transformed wild type non-human organism or a part thereof; and
[87903] (b) growing the non-human organism under conditions which permit the production of trehalose, or a composition comprising trehalose in said non-human organism or in the culture medium surrounding said non-human organism.

[87904] Accordingly, the present invention relates to a process for the production of verbascose, which comprises
[87905] (a) increasing or generating the activity of a polypeptide comprising a polypeptide as depicted in the respective line in column 5 or 8 of Table II, application no. 17, or a homolog or a fragment thereof, a consensus sequence or at least one polypeptide motif as depicted in the respective line in column 8 of Table IV, application no. 17, whereby the respective line disclose in column 7 the fine chemical verbascose; or
[87906] increasing or generating the activity of an expression product of one or more nucleic acid molecule(s) comprising a polynucleotide as depicted in the respective line in column 5 or 8 of Table I, application no. 17, preferably the coding region thereof, or a homolog or a fragment thereof, whereby the respective line disclose in column 7 the fine chemical verbascose;
[87907] in the cytosol of a cell of a non-human organism or a part thereof; preferably a microorganism, a plant cell, a plant or a part thereof, as compared to a corresponding non-transformed wild type non-human organism or a part thereof; and
[87908] (b) growing the non-human organism under conditions which permit the production of verbascose, or a composition comprising verbascose in said non-human organism or in the culture medium surrounding said non-human organism.

[87909] In a further embodiment the activity of the polypeptide comprising a polypeptide as depicted in the respective line in column 5 or 8 of Table II, application no. 17, or a homolog or a fragment thereof, a consensus sequence or at least one polypeptide motif as depicted in the respective line in column 8 of Table IV, application no. 17, is increased or generated non-targeted in the above-mentioned process in a microorganism or plant or a part thereof.

[87910] In a further embodiment said polypeptide has the activity of the respective polypeptide represented by a protein comprising a polypeptide as depicted in the respective line in column 5 of Table II, application no. 17.

[87911] In a further embodiment the activity of the expression product of one or more nucleic acid molecule(s) comprising a polynucleotide as depicted in the respective line in column 5 or 8 of Table I, application no. 17, preferably the coding region thereof, or a homolog or a fragment thereof, is increased or generated non-targeted in the above-mentioned process in a microorganism or plant or a part thereof.

[87912] In a further embodiment the activity of the polypeptide comprising a polypeptide as depicted in the respective line in column 5 or 8 of Table II, application no. 17, or a homolog or a fragment thereof, a consensus sequence or at least one polypeptide motif as depicted in the respective line in column 8 of Table IV, application no. 17, is increased or generated in the above-mentioned process in an organelle preferably in plastids or mitochondria, especially in plastids, of a microorganism or plant.

[87913] In a further embodiment said polypeptide has the activity of the respective polypeptide represented by a protein comprising a polypeptide as depicted in the respective line in column 5 of Table II, application no. 17.

[87914] In a further embodiment the activity of the expression product of one or more nucleic acid molecule(s) comprising a polynucleotide as depicted in the respective line in column 5 or 8 of Table I, application no. 17, preferably the coding region thereof, or a homolog or a fragment thereof, is increased or generated in the above-mentioned process in an organelle, preferably in plasids or mitochondria, especially in plastids, of a microorganism or plant.

[87915] In a further embodiment the activity of the polypeptide comprising a polypeptide as depicted in the respective line in column 5 or 8 of Table II, application no. 17, or a homolog or a fragment thereof, a consensus sequence or at least one polypeptide motif as depicted in the respective line in column 8 of Table IV, application no. 17, is increased or generated in the above-mentioned process in the cyctosol of a cell, of a microorganism or plant.

[87916] In a further embodiment said polypeptide has the activity of the respective polypeptide represented by a protein comprising a polypeptide as depicted in the respective line in column 5 of Table II, application no. 17.

[87917] In a further embodiment the activity of the expression product of one or more nucleic acid molecule(s) comprising a polynucleotide as depicted in the respective line in column 5 or 8 of Table I, application no. 17, preferably the coding region thereof, or a homolog or a fragment thereof, is increased or generated in the above-mentioned process in the cytosol of a cell, of a microorganism or plant.

[87918] [0039.1.7.17] to [0066.1.7.17] for the disclosure of this paragraphs see [0039.1.7.7] to [0066.1.7.7] above

[87919] As mentioned above the nucleic acid sequences coding for the proteins as shown in Table II, application no. 17, column 5 or 8, or homologs or fragments thereof, are joined to a nucleic acid sequence encoding a plastidic transit peptide, e.g, if for the nucleic acid molecule in Table I, column 6 the term “plastidic” is indicated. This nucleic acid sequence encoding a transit peptide ensures transport of the protein to the organelle. The nucleic acid sequence of the gene to be expressed and the nucleic acid sequence encoding the transit peptide are operably linked. Therefore the transit peptide coding sequence is fused in frame to the nucleic acid sequence coding for proteins as shown in Table II, application no. 17, column 5 or 8, or homologs or fragments thereof, e.g., if for the nucleic acid molecule in Table I, column 6 the term “plastidic” is indicated.

[87920] [0068.1.7.17] to [0072.1.7.17] for the disclosure of this paragraph see [0068.1.7.7] to [0072.1.7.7] above

[87921] As mentioned above the nucleic acid sequences coding for the proteins as shown in the respective line in Table II, application no. 17, column 5 or 8, or homologs or fragments thereof, are joined to a nucleic acid sequence encoding a mitochondric transit peptide, e.g., if for the respective nucleic acid molecule in Table I, column 6 the term “mitochondric” is indicated. This nucleic acid sequence encoding a transit peptide ensures transport of the protein to the organelle. The nucleic acid sequence of the gene to be expressed and the nucleic acid sequence encoding the transit peptide are operably linked. Therefore the transit peptide encoding sequence is fused in frame to the nucleic acid sequence coding for proteins as shown in the respective line in Table II, application no. 17, column 5 or 8, or homologs or fragments thereof, e.g., if for the nucleic acid molecule in the respective line in Table I, column 6 the term “mitochondric” is indicated.

[87922] for the disclosure of this paragraph see [0074.1.7.7] above

[87923] for the disclosure of this paragraph see [0075.1.7.7] above

[87924] Nucleic acid sequences coding for the transit peptides may be chemically synthesized either in part or wholly according to structure of transit peptide sequences disclosed in the prior art. Said natural or chemically synthesized sequences can be directly linked to the sequences encoding the mature protein or via a linker nucleic acid sequence, which may be typically less than 500 base pairs, preferably less than 450, 400, 350, 300, 250 or 200 base pairs, more preferably less than 150, 100, 90, 80, 70, 60, 50, 40 or 30 base pairs and most preferably less than 25, 20, 15, 12, 9, 6 or 3 base pairs in length and are in frame to the coding sequence. Furthermore favorable nucleic acid sequences encoding transit peptides may comprise sequences derived from more than one biological and/or chemical source and may include a nucleic acid sequence derived from the amino-terminal region of the mature protein, which in its native state is linked to the transit peptide. In a preferred embodiment of the invention said amino-terminal region of the mature protein is typically less than 150 amino acids, preferably less than 140, 130, 120, 110, 100 or 90 amino acids, more preferably less than 80, 70, 60, 50, 40, 35, 30, 25 or 20 amino acids and most preferably less than 19, 18, 17, 16, 15, 14, 13, 12, 11 or 10 amino acids in length. But even shorter or longer stretches are also possible. In addition target sequences, which facilitate the transport of proteins to other cell compartments such as the vacuole, endoplasmic reticulum, golgi complex, glyoxysomes, peroxisomes, mitochondria (in case of a plastidal transit peptide) or plastids, especially chloroplasts (in case of a mitochondric transit peptide) may be also part of the inventive nucleic acid sequence. The proteins translated from said inventive nucleic acid sequences are a kind of fusion proteins that means the nucleic acid sequences encoding the plastidal transit peptide for example the ones shown in Table a, preferably the last one of the Table a are joint to the respective nucleic acid sequences shown in Table I, application no. 17, columns 5 or 8, especially the coding region thereof, or homologs or fragments thereof, in case of nucleic acid sequences being expressed in plastids, and that means the nucleic acid sequences encoding the mitochondric transit peptide for example the ones shown in Table b, preferably the last one of the Table b are joint to the respective nucleic acid sequences shown in Table I, application no. 17, columns 5 or 8, especially the coding region thereof, or homologs or fragments thereof, in case of nucleic acid sequences being expressed in mitochondria. The person skilled in the art is able to join said sequences in a functional manner. Advantageously the transit peptide part is cleaved off from the protein part shown in Table II, application no. 17, columns 5 or 8, or a homolog or fragment thereof, during or after the transport into the organelles, preferably into the plastids or mitochondria, respectively.

[87925] All products of the cleavage of the preferred transit peptide shown in the last line of Table a have preferably the N-terminal amino acid sequences QIA CSS or QIA EFQLTT in front of the start methionine of the respective protein mentioned in Table II, application no. 17, column 5 or 8. or homologs or fragments thereof. Other short amino acid sequences of an range of 1 to 20 amino acids preferable 2 to 15 amino acids, more preferable 3 to 10 amino acids most preferably 4 to 8 amino acids are also possible in front of the start methionine of the protein mentioned in Table II, application no. 17, columns 5 or 8, or homologs or fragments thereof. In case of the amino acid sequence QIA CSS the three amino acids in front of the start methionine are stemming from the LIC (=ligatation independent cloning) cassette. Said short amino acid sequence is preferred in the case of the expression of E. coli genes. In case of the amino acid sequence QIA EFQLTT the six amino acids in front of the start methionine are stemming from the LIC cassette. Said short amino acid sequence is preferred in the case of the expression of S. cerevisiae genes. The skilled worker knowns that other short sequences are also useful in the expression of the respective nucleic acid molecule comprising a polynucleotide as depicted in Table I, application no. 17, column 5 or 8, preferably the coding region thereof, or a homolog or a fragment thereof. Furthermore the skilled worker is aware of the fact that there is not a need for such short sequences in the expression of the genes.

[87926] for the disclosure of this paragraph see [0077.1.7.7] above

[87927] for the disclosure of this paragraph see [0078.1.7.7] above

[87928] Alternatively to the targeting of the respective sequences shown in Table II, application no. 17, columns 5 or 8, or homologs or fragments thereof, preferably of sequences in general encoded in the nucleus with the aid of the targeting sequences mentioned for example in Table a alone, Table b alone, or in combination with other targeting sequences preferably into plastids or mitochondria, respectively, the nucleic acids of the invention can directly be introduced into the plastidal or mitochondrial genome. Therefore in a preferred embodiment the respective nucleic acid sequences shown in the respective line in Table I, application no. 17, columns 5 or 8, preferably the coding region thereof, or homologs or fragments thereof, are directly introduced and expressed in plastids e.g., if for the nucleic acid molecule in the respective line in Table I, column 6, the term “plastidic” is indicated, or are directly introduced and expressed in mitochondria e.g., if for the nucleic acid molecule in the respective line in Table I, column 6 the term “mitochondric” is indicated.

[87929] The term “introduced” in the context of this specification shall mean the insertion of a nucleic acid sequence into the organism by means of a “transfection”, “transduction” or preferably by “transformation”.

[87930] A plastid, such as a chloroplast, or a mitochondrion, has been “transformed” by an exogenous (preferably foreign) nucleic acid sequence if a nucleic acid sequence has been introduced into the plastid or mitochondrion that means that this sequence has crossed the membrane or the membranes of the plastid or of the mitochondrion. The exogenous, preferably foreign, DNA may be integrated (covalently linked) into plastid or mitochondrial DNA making up the genome of the plastid or mitochondrion, or it may remain unintegrated (e.g., by including a chloroplast origin of replication). “Stably” integrated DNA sequences are those, which are inherited through plastid or mitochondrion replication, thereby transferring new plastids or mitochondria, with the features of the integrated DNA sequence to the progeny.

[87931] [0080.1.7.17] to [0083.1.7.17] for the disclosure of these paragraphs see [0080.1.7.7] to [0083.1.7.7] above

[87932] For the process of the present invention it may be of great advantage that by transforming the plastids the intraspecies specific transgene flow is blocked, because a lot of species such as corn, cotton and rice have a strict maternal inheritance of plastids. By placing the respective genes specified in the respective line in Table I, application no. 17, columns 5 or 8, preferably the coding region, or homologs or fragments thereof, e.g. if for the nucleic acid molecule in the respective line in column 6 of Table I the term “plastidic” is indicated, in the plastids of plants, these genes will not be present in the pollen of said plants.

[87933] A further preferred embodiment of the invention relates to the use of so called “chloroplast localization sequences”, in which a first RNA sequence or molecule is capable of transporting or “chaperoning” a second RNA sequence, such as a RNA sequence transcribed from the sequences depicted in the respective line in Table I, application no. 17, columns 5 or 8, preferably the coding region thereof, or a homolog or a fragment thereof, or a sequence encoding a protein, as depicted in the respective line in Table II, application no. 17, columns 5 and 8, or a homolog or a fragment thereof, from an external environment inside a cell or outside a plastid into a chloroplast. In one embodiment the chloroplast localization signal is substantially similar or complementary to a complete or intact viroid sequence. The chloroplast localization signal may be encoded by a DNA sequence, which is transcribed into the chloroplast localization RNA.

[87934] The term “viroid” refers to a naturally occurring single stranded RNA molecule (Flores, C. R. Acad. Sci. III. 324 (10), 943 (2001)). Viroids usually contain about 200-500 nucleotides and generally exist as circular molecules. Examples of viroids that contain chloroplast localization signals include but are not limited to ASBVd, PLMVd, CChMVd and ELVd. The viroid sequence or a functional part of it can be fused to the sequences depicted in the respective line in Table I, application no. 17, columns 5 or 8, preferably the coding region thereof, or a homolog or a fragment thereof, or a sequence encoding a protein, as depicted in the respective line in Table II, application no. 17, columns 5 or 8, or a homolog or a fragment thereof, in such a manner that the viroid sequence transports a sequence transcribed from a sequence as depicted in the respective line in Table I, application no. 17 columns 5 or 8, preferably the coding region thereof, or a homolog or a fragment thereof, or a sequence encoding a protein as depicted in the respective line in Table II, application no. 17 columns 5 or 8, or a homolog or a fragment thereof, into the chloroplasts, e.g. if for the nucleic acid molecule in column 6 of Table I the term “plastidic” is indicated. A preferred embodiment uses a modified ASBVd (Navarro et al., Virology. 268 (1), 218 (2000)).

[87935] In a further specific embodiment the protein to be expressed in the plastids such as the proteins depicted in the respective line in Table II, application no. 17, columns 5 or 8, or a homolog or a fragment thereof, e.g. if for the nucleic acid molecule in the respective line in column 6 of Table I the term “plastidic” is indicated, are encoded by different nucleic acids. Such a method is disclosed in WO 2004/040973, which shall be incorporated by reference. WO 2004/040973 teaches a method, which relates to the translocation of an RNA corresponding to a gene or gene fragment into the chloroplast by means of a chloroplast localization sequence. The genes, which should be expressed in the plant or plant cells, are split into nucleic acid fragments, which are introduced into different compartments in the plant e.g. the nucleus, the plastids and/or mitochondria. Additionally plant cells are described in which the chloroplast contains a ribozyme fused at one end to an RNA encoding a fragment of a protein used in the inventive process such that the ribozyme can trans-splice the translocated fusion RNA to the RNA encoding the gene fragment to form and as the case may be reunite the nucleic acid fragments to an intact mRNA encoding a functional protein for example as disclosed in the respective line in Table II, application no. 17, columns 5 or 8, or a homolog or a fragment thereof.

[87936] In a preferred embodiment of the invention the nucleic acid sequences as shown in the respective line in Table I, application no. 17, columns 5 or 8, preferably the coding region thereof, or homologs or fragments thereof, e.g. if for the nucleic acid molecule in the respective line in column 6 of Table I the term “plastidic” is indicated, used in the inventive process are transformed into plastids, which are metabolically active. Those plastids should preferably maintain at a high copy number in the plant or plant tissue of interest, most preferably the chloroplasts found in green plant tissues, such as leaves or cotyledons or in seeds.

[87937] For a good expression in the plastids the nucleic acid sequences as shown in the respective line in Table I, application no. 17, columns 5 or 8, preferably the coding region thereof, or homologs or fragments thereof, e.g. if for the nucleic acid molecule in the respective line in column 6 of Table I the term “plastidic” is indicated, are introduced into an expression cassette using preferably a promoter and terminater, which are active in plastids preferably a chloroplast promoter. Examples of such promoters include the psbA promoter from the gene from spinach or pea, the rbcL promoter, and the atpB promoter from corn.

[87938] [0089.1.7.17] to [0092.1.7.17] for the disclosure of these paragraphs see [0089.1.7.7] to [0092.1.7.7] above

[87939] Advantageously the process for the production of the fine chemical 3,4,5-trihydroxypentanoic acid, erythrol, fructose, fucose, galactinol, galactitol, glucose, glucose-1-phosphate, mannitol, melibiose, myo-inositol, raffinose, saccharic acid, sedoheptulose-7-phosphate, sorbitol, sucrose, trehalose, and/or verbascose leads to an enhanced production of the respective fine chemical. The terms “enhanced” or “increase” mean at least a 10%, 20%, 30%, 40% or 50%, preferably at least 60%, 70%, 80%, 90% or 100%, more preferably 150%, 200%, 300%, 400% or 500% higher production of the respective fine chemical 3,4,5-trihydroxypentanoic acid, erythrol, fructose, fucose, galactinol, galactitol, glucose, glucose-1-phosphate, mannitol, melibiose, myo-inositol, raffinose, saccharic acid, sedoheptulose-7-phosphate, sorbitol, sucrose, trehalose, and/or verbascose in comparison to the wild-type as defined above, e.g. that means in comparison to a non-human organism without the aforementioned modification of the activity of a protein as shown in the respective line in Table II, application no. 17, column 5 or 8, or a fragment or a homolog thereof. The modification of the activity of a protein as shown in the respective line in Table II, application no. 17, column 5 or 8, or a homolog or a fragment thereof, or their combination can be achieved by joining the protein to a respective transit peptide, e.g. if for the respective encoding nucleic acid molecule in column 6 of Table I the term “plastidic” or “mitochondric” is indicated.

[87940] Surprisingly it was found, that the transgenic expression of a protein as shown in the respective line in Table II, application no. 17, column 5, especially from the Saccaromyces cerevisiae, E. coli, Arabidopsis thaliana, Azotobacter vinelandii, Brassica napus, Glycine max, Oryza sativa, Physcomitrella patens, Synechocystis sp., Thermus thermophilus, Zea mays in a non-human organism, like a plant or a part thereof, such as Arabidopsis thaliana for example, or a microorganism, conferred a production of or an increase in 3,4,5-trihydroxypentanoic acid, erythrol, fructose, fucose, galactinol, galactitol, glucose, glucose-1-phosphate, mannitol, melibiose, myo-inositol, raffinose, saccharic acid, sedoheptulose-7-phosphate, sorbitol, sucrose, trehalose, and/or verbascose,respectively, to the transgenic non-human organism as compared to a corresponding non-transformed wild type.

[87941] In one embodiment the transgenic expression of a protein as shown in the respective line in Table II, application no. 17, column 5 or 8, or a homolog or a fragment thereof, especially from the Saccaromyces cerevisiae, E. coli, Arabidopsis thaliana, Azotobacter vinelandii, Brassica napus, Glycine max, Oryza sativa, Physcomitrella patens, Synechocystis sp., Thermus thermophilus, Zea mays in a non-human organism, like a plant or a part thereof, such as Arabidopsis thaliana for example, or a microorganism, confers a production of or an increase in 3,4,5-trihydroxypentanoic acid, erythrol, fructose, fucose, galactinol, galactitol, glucose, glucose-1-phosphate, mannitol, melibiose, myo-inositol, raffinose, saccharic acid, sedoheptulose7-phosphate, sorbitol, sucrose, trehalose, and/or verbascose,respectively, to the transgenic non-human organism as compared to a corresponding non-transformed wild type.

[87942] Accordingly, in one embodiment, an increase of raffinose in a non-human organism, as compared to a corresponding non-transformed wild type non-human organism, is conferred in the process of the invention, if the activity of a polypeptide showing the activity of a galactinol synthase, or if the activity of the polypeptide Atgols2, preferably represented by SEQ ID NO. 142993, or a homolog or fragment thereof, or if the activity of a polypeptide encoded by a nucleic acid molecule comprising the nucleic acid SEQ ID NO. 142992, preferably the coding region thereof, or a homolog or fragment thereof, e.g. derived from Arabidopsis thaliana, is increased or generated. For example the activity of a nucleic acid molecule or a polypeptide comprising the nucleic acid, preferably the coding region thereof, or polypeptide or the consensus sequence or the polypeptide motif, as depicted in Table I, II or IV, application No. 17, column 5 or 8 in the respective same line as the nucleic acid molecule SEQ ID NO. 142992 or polypeptide SEQ ID NO. 142993, respectively, or a homolog or a fragment thereof, is increased or generated, or if the activity galactinol synthase is increased or generated in a non-human organism, like a microorganism or a plant cell, plant or part thereof, especially with non-targeted localization, whereby the respective line disclose in column 7 the fine chemical raffinose. For example, an increase of the raffinose of at least 1 percent, particularly in a range of 1186 to 8115-percent is conferred as compared to a corresponding non-transformed wild type non-human organism.

[87943] Accordingly, in one embodiment, an increase of glucose-1-phosphate in a non-human organism, as compared to a corresponding non-transformed wild type non-human organism, is conferred in the process of the invention, if the activity of a polypeptide showing the activity of a protein phosphatase, or if the activity of the polypeptide At1g07430, preferably represented by SEQ ID NO. 17452, or a homolog or fragment thereof, or if the activity of a polypeptide encoded by a nucleic acid molecule comprising the nucleic acid SEQ ID NO. 17451, preferably the coding region thereof, or a homolog or fragment thereof, e.g. derived from Arabidopsis thaliana, is increased or generated. For example the activity of a nucleic acid molecule or a polypeptide comprising the nucleic acid, preferably the coding region thereof, or polypeptide or the consensus sequence or the polypeptide motif, as depicted in Table I, II or IV, application No. 17, column 5 or 8 in the respective same line as the nucleic acid molecule SEQ ID NO. 17451 or polypeptide SEQ ID NO. 17452, respectively, or a homolog or a fragment thereof, is increased or generated, or if the activity protein phosphatase is increased or generated in a non-human organism, like a microorganism or a plant cell, plant or part thereof, especially with non-targeted localization, whereby the respective line disclose in column 7 the fine chemical glucose-1-phosphate. For example, an increase of the glucose-1-phosphate of at least 1 percent, particularly in a range of 27 to 90-percent is conferred as compared to a corresponding non-transformed wild type non-human organism.

[87944] Accordingly, in one embodiment, an increase of myo-inositol in a non-human organism, as compared to a corresponding non-transformed wild type non-human organism, is conferred in the process of the invention, if the activity of a polypeptide showing the activity of a protein phosphatase, or if the activity of the polypeptide At1g07430, preferably represented by SEQ ID NO. 17452, or a homolog or fragment thereof, or if the activity of a polypeptide encoded by a nucleic acid molecule comprising the nucleic acid SEQ ID NO. 17451, preferably the coding region thereof, or a homolog or fragment thereof, e.g. derived from Arabidopsis thaliana, is increased or generated. For example the activity of a nucleic acid molecule or a polypeptide comprising the nucleic acid, preferably the coding region thereof, or polypeptide or the consensus sequence or the polypeptide motif, as depicted in Table I, II or IV, application No. 17, column 5 or 8 in the respective same line as the nucleic acid molecule SEQ ID NO. 17451 or polypeptide SEQ ID NO. 17452, respectively, or a homolog or a fragment thereof, is increased or generated, or if the activity protein phosphatase is increased or generated in a non-human organism, like a microorganism or a plant cell, plant or part thereof, especially with non-targeted localization, whereby the respective line disclose in column 7 the fine chemical myo-inositol. For example, an increase of the myo-inositol of at least 1 percent, particularly in a range of 25 to 96-percent is conferred as compared to a corresponding non-transformed wild type non-human organism.

[87945] Accordingly, in one embodiment, an increase of glucose-1-phosphate in a non-human organism, as compared to a corresponding non-transformed wild type non-human organism, is conferred in the process of the invention, if the activity of a polypeptide showing the activity of a At1g19350-protein, or if the activity of the polypeptide At1g19350, preferably represented by SEQ ID NO. 140772, or a homolog or fragment thereof, or if the activity of a polypeptide encoded by a nucleic acid molecule comprising the nucleic acid SEQ ID NO. 140771, preferably the coding region thereof, or a homolog or fragment thereof, e.g. derived from Arabidopsis thaliana, is increased or generated. For example the activity of a nucleic acid molecule or a polypeptide comprising the nucleic acid, preferably the coding region thereof, or polypeptide or the consensus sequence or the polypeptide motif, as depicted in Table I, II or IV, application No. 17, column 5 or 8 in the respective same line as the nucleic acid molecule SEQ ID NO. 140771 or polypeptide SEQ ID NO. 140772, respectively, or a homolog or a fragment thereof, is increased or generated, or if the activity At1g19350-protein is increased or generated in a non-human organism, like a microorganism or a plant cell, plant or part thereof, especially with non-targeted localization, whereby the respective line disclose in column 7 the fine chemical glucose-1-phosphate. For example, an increase of the glucose-1-phosphate of at least 1 percent, particularly in a range of 36 to 66-percent is conferred as compared to a corresponding non-transformed wild type non-human organism.

[87946] Accordingly, in one embodiment, an increase of 3,4,5-trihydroxypentanoic acid in a non-human organism, as compared to a corresponding non-transformed wild type non-human organism, is conferred in the process of the invention, if the activity of a polypeptide showing the activity of a At1g19350-protein, or if the activity of the polypeptide At1g19350, preferably represented by SEQ ID NO. 140772, or a homolog or fragment thereof, or if the activity of a polypeptide encoded by a nucleic acid molecule comprising the nucleic acid SEQ ID NO. 140771, preferably the coding region thereof, or a homolog or fragment thereof, e.g. derived from Arabidopsis thaliana, is increased or generated. For example the activity of a nucleic acid molecule or a polypeptide comprising the nucleic acid, preferably the coding region thereof, or polypeptide or the consensus sequence or the polypeptide motif, as depicted in Table I, II or IV, application No. 17, column 5 or 8 in the respective same line as the nucleic acid molecule SEQ ID NO. 140771 or polypeptide SEQ ID NO. 140772, respectively, or a homolog or a fragment thereof, is increased or generated, or if the activity At1g19350-protein is increased or generated in a non-human organism, like a microorganism or a plant cell, plant or part thereof, especially with non-targeted localization, whereby the respective line disclose in column 7 the fine chemical 3,4,5-trihydroxypentanoic acid. For example, an increase of the 3,4,5-trihydroxypentanoic acid of at least 1 percent, particularly in a range of 42 to 73-percent is conferred as compared to a corresponding non-transformed wild type non-human organism.

[87947] Accordingly, in one embodiment, an increase of myo-inositol in a non-human organism, as compared to a corresponding non-transformed wild type non-human organism, is conferred in the process of the invention, if the activity of a polypeptide showing the activity of a chlorophyllase, or if the activity of the polypeptide At1g19670, preferably represented by SEQ ID NO. 113652, or a homolog or fragment thereof, or if the activity of a polypeptide encoded by a nucleic acid molecule comprising the nucleic acid SEQ ID NO. 113651, preferably the coding region thereof, or a homolog or fragment thereof, e.g. derived from Arabidopsis thaliana, is increased or generated. For example the activity of a nucleic acid molecule or a polypeptide comprising the nucleic acid, preferably the coding region thereof, or polypeptide or the consensus sequence or the polypeptide motif, as depicted in Table I, II or IV, application No. 17, column 5 or 8 in the respective same line as the nucleic acid molecule SEQ ID NO. 113651 or polypeptide SEQ ID NO. 113652, respectively, or a homolog or a fragment thereof, is increased or generated, or if the activity chlorophyllase is increased or generated in a non-human organism, like a microorganism or a plant cell, plant or part thereof, especially with non-targeted localization, whereby the respective line disclose in column 7 the fine chemical myo-inositol. For example, an increase of the myo-inositol of at least 1 percent, particularly in a range of 27 to 54-percent is conferred as compared to a corresponding non-transformed wild type non-human organism.

[87948] Accordingly, in one embodiment, an increase of fructose in a non-human organism, as compared to a corresponding non-transformed wild type non-human organism, is conferred in the process of the invention, if the activity of a polypeptide showing the activity of a cullin, or if the activity of the polypeptide At1g26830, preferably represented by SEQ ID NO. 17702, or a homolog or fragment thereof, or if the activity of a polypeptide encoded by a nucleic acid molecule comprising the nucleic acid SEQ ID NO. 17701, preferably the coding region thereof, or a homolog or fragment thereof, e.g. derived from Arabidopsis thaliana, is increased or generated. For example the activity of a nucleic acid molecule or a polypeptide comprising the nucleic acid, preferably the coding region thereof, or polypeptide or the consensus sequence or the polypeptide motif, as depicted in Table I, II or IV, application No. 17, column 5 or 8 in the respective same line as the nucleic acid molecule SEQ ID NO. 17701 or polypeptide SEQ ID NO. 17702, respectively, or a homolog or a fragment thereof, is increased or generated, or if the activity cullin is increased or generated in a non-human organism, like a microorganism or a plant cell, plant or part thereof, especially with non-targeted localization, whereby the respective line disclose in column 7 the fine chemical fructose. For example, an increase of the fructose of at least 1 percent, particularly in a range of 107 to 121-percent is conferred as compared to a corresponding non-transformed wild type non-human organism.

[87949] Accordingly, in one embodiment, an increase of fructose in a non-human organism, as compared to a corresponding non-transformed wild type non-human organism, is conferred in the process of the invention, if the activity of a polypeptide showing the activity of a eukaryotic translation initiation factor 5, or if the activity of the polypeptide At1g36730, preferably represented by SEQ ID NO. 17969, or a homolog or fragment thereof, or if the activity of a polypeptide encoded by a nucleic acid molecule comprising the nucleic acid SEQ ID NO. 17968, preferably the coding region thereof, or a homolog or fragment thereof, e.g. derived from Arabidopsis thaliana, is increased or generated. For example the activity of a nucleic acid molecule or a polypeptide comprising the nucleic acid, preferably the coding region thereof, or polypeptide or the consensus sequence or the polypeptide motif, as depicted in Table I, II or IV, application No. 17, column 5 or 8 in the respective same line as the nucleic acid molecule SEQ ID NO. 17968 or polypeptide SEQ ID NO. 17969, respectively, or a homolog or a fragment thereof, is increased or generated, or if the activity eukaryotic translation initiation factor 5 is increased or generated in a non-human organism, like a microorganism or a plant cell, plant or part thereof, especially with non-targeted localization, whereby the respective line disclose in column 7 the fine chemical fructose. For example, an increase of the fructose of at least 1 percent, particularly in a range of 119 to 725-percent is conferred as compared to a corresponding non-transformed wild type non-human organism.

[87950] Accordingly, in one embodiment, an increase of glucose in a non-human organism, as compared to a corresponding non-transformed wild type non-human organism, is conferred in the process of the invention, if the activity of a polypeptide showing the activity of a eukaryotic translation initiation factor 5, or if the activity of the polypeptide At1g36730, preferably represented by SEQ ID NO. 17969, or a homolog or fragment thereof, or if the activity of a polypeptide encoded by a nucleic acid molecule comprising the nucleic acid SEQ ID NO. 17968, preferably the coding region thereof, or a homolog or fragment thereof, e.g. derived from Arabidopsis thaliana, is increased or generated. For example the activity of a nucleic acid molecule or a polypeptide comprising the nucleic acid, preferably the coding region thereof, or polypeptide or the consensus sequence or the polypeptide motif, as depicted in Table I, II or IV, application No. 17, column 5 or 8 in the respective same line as the nucleic acid molecule SEQ ID NO. 17968 or polypeptide SEQ ID NO. 17969, respectively, or a homolog or a fragment thereof, is increased or generated, or if the activity eukaryotic translation initiation factor 5 is increased or generated in a non-human organism, like a microorganism or a plant cell, plant or part thereof, especially with non-targeted localization, whereby the respective line disclose in column 7 the fine chemical glucose. For example, an increase of the glucose of at least 1 percent, particularly in a range of 95 to 312-percent is conferred as compared to a corresponding non-transformed wild type non-human organism.

[87951] Accordingly, in one embodiment, an increase of raffinose in a non-human organism, as compared to a corresponding non-transformed wild type non-human organism, is conferred in the process of the invention, if the activity of a polypeptide showing the activity of a eukaryotic translation initiation factor 5, or if the activity of the polypeptide At1g36730, preferably represented by SEQ ID NO. 17969, or a homolog or fragment thereof, or if the activity of a polypeptide encoded by a nucleic acid molecule comprising the nucleic acid SEQ ID NO. 17968, preferably the coding region thereof, or a homolog or fragment thereof, e.g. derived from Arabidopsis thaliana, is increased or generated. For example the activity of a nucleic acid molecule or a polypeptide comprising the nucleic acid, preferably the coding region thereof, or polypeptide or the consensus sequence or the polypeptide motif, as depicted in Table I, II or IV, application No. 17, column 5 or 8 in the respective same line as the nucleic acid molecule SEQ ID NO. 17968 or polypeptide SEQ ID NO. 17969, respectively, or a homolog or a fragment thereof, is increased or generated, or if the activity eukaryotic translation initiation factor 5 is increased or generated in a non-human organism, like a microorganism or a plant cell, plant or part thereof, especially with non-targeted localization, whereby the respective line disclose in column 7 the fine chemical raffinose. For example, an increase of the raffinose of at least 1 percent, particularly in a range of 57 to 150-percent is conferred as compared to a corresponding non-transformed wild type non-human organism.

[87952] Accordingly, in one embodiment, an increase of sucrose in a non-human organism, as compared to a corresponding non-transformed wild type non-human organism, is conferred in the process of the invention, if the activity of a polypeptide showing the activity of a transcriptional regulator, or if the activity of the polypeptide At1g43850, preferably represented by SEQ ID NO. 18071, or a homolog or fragment thereof, or if the activity of a polypeptide encoded by a nucleic acid molecule comprising the nucleic acid SEQ ID NO. 18070, preferably the coding region thereof, or a homolog or fragment thereof, e.g. derived from Arabidopsis thaliana, is increased or generated. For example the activity of a nucleic acid molecule or a polypeptide comprising the nucleic acid, preferably the coding region thereof, or polypeptide or the consensus sequence or the polypeptide motif, as depicted in Table I, II or IV, application No. 17, column 5 or 8 in the respective same line as the nucleic acid molecule SEQ ID NO. 18070 or polypeptide SEQ ID NO. 18071, respectively, or a homolog or a fragment thereof, is increased or generated, or if the activity transcriptional regulator is increased or generated in a non-human organism, like a microorganism or a plant cell, plant or part thereof, especially with non-targeted localization, whereby the respective line disclose in column 7 the fine chemical sucrose. For example, an increase of the sucrose of at least 1 percent, particularly in a range of 40 to 87-percent is conferred as compared to a corresponding non-transformed wild type non-human organism.

[87953] Accordingly, in one embodiment, an increase of raffinose in a non-human organism, as compared to a corresponding non-transformed wild type non-human organism, is conferred in the process of the invention, if the activity of a polypeptide showing the activity of a galactinol synthase, or if the activity of the polypeptide At1g60470, preferably represented by SEQ ID NO. 140842, or a homolog or fragment thereof, or if the activity of a polypeptide encoded by a nucleic acid molecule comprising the nucleic acid SEQ ID NO. 140841, preferably the coding region thereof, or a homolog or fragment thereof, e.g. derived from Arabidopsis thaliana, is increased or generated. For example the activity of a nucleic acid molecule or a polypeptide comprising the nucleic acid, preferably the coding region thereof, or polypeptide or the consensus sequence or the polypeptide motif, as depicted in Table I, II or IV, application No. 17, column 5 or 8 in the respective same line as the nucleic acid molecule SEQ ID NO. 140841 or polypeptide SEQ ID NO. 140842, respectively, or a homolog or a fragment thereof, is increased or generated, or if the activity galactinol synthase is increased or generated in a non-human organism, like a microorganism or a plant cell, plant or part thereof, especially with non-targeted localization, whereby the respective line disclose in column 7 the fine chemical raffinose. For example, an increase of the raffinose of at least 1 percent, particularly in a range of 182 to 2025-percent is conferred as compared to a corresponding non-transformed wild type non-human organism.

[87954] Accordingly, in one embodiment, an increase of glucose in a non-human organism, as compared to a corresponding non-transformed wild type non-human organism, is conferred in the process of the invention, if the activity of a polypeptide showing the activity of a protein phosphatase, or if the activity of the polypeptide At1g72770, preferably represented by SEQ ID NO. 19420, or a homolog or fragment thereof, or if the activity of a polypeptide encoded by a nucleic acid molecule comprising the nucleic acid SEQ ID NO. 19419, preferably the coding region thereof, or a homolog or fragment thereof, e.g. derived from Arabidopsis thaliana, is increased or generated. For example the activity of a nucleic acid molecule or a polypeptide comprising the nucleic acid, preferably the coding region thereof, or polypeptide or the consensus sequence or the polypeptide motif, as depicted in Table I, II or IV, application No. 17, column 5 or 8 in the respective same line as the nucleic acid molecule SEQ ID NO. 19419 or polypeptide SEQ ID NO. 19420, respectively, or a homolog or a fragment thereof, is increased or generated, or if the activity protein phosphatase is increased or generated in a non-human organism, like a microorganism or a plant cell, plant or part thereof, especially with non-targeted localization, whereby the respective line disclose in column 7 the fine chemical glucose. For example, an increase of the glucose of at least 1 percent, particularly in a range of 69 to 193-percent is conferred as compared to a corresponding non-transformed wild type non-human organism.

[87955] Accordingly, in one embodiment, an increase of glucose-1-phosphate in a non-human organism, as compared to a corresponding non-transformed wild type non-human organism, is conferred in the process of the invention, if the activity of a polypeptide showing the activity of a protein phosphatase, or if the activity of the polypeptide At1g72770, preferably represented by SEQ ID NO. 19420, or a homolog or fragment thereof, or if the activity of a polypeptide encoded by a nucleic acid molecule comprising the nucleic acid SEQ ID NO. 19419, preferably the coding region thereof, or a homolog or fragment thereof, e.g. derived from Arabidopsis thaliana, is increased or generated. For example the activity of a nucleic acid molecule or a polypeptide comprising the nucleic acid, preferably the coding region thereof, or polypeptide or the consensus sequence or the polypeptide motif, as depicted in Table I, II or IV, application No. 17, column 5 or 8 in the respective same line as the nucleic acid molecule SEQ ID NO. 19419 or polypeptide SEQ ID NO. 19420, respectively, or a homolog or a fragment thereof, is increased or generated, or if the activity protein phosphatase is increased or generated in a non-human organism, like a microorganism or a plant cell, plant or part thereof, especially with non-targeted localization, whereby the respective line disclose in column 7 the fine chemical glucose-1-phosphate. For example, an increase of the glucose-1-phosphate of at least 1 percent, particularly in a range of 19 to 102-percent is conferred as compared to a corresponding non-transformed wild type non-human organism.

[87956] Accordingly, in one embodiment, an increase of myo-inositol in a non-human organism, as compared to a corresponding non-transformed wild type non-human organism, is conferred in the process of the invention, if the activity of a polypeptide showing the activity of a protein phosphatase, or if the activity of the polypeptide At1g72770, preferably represented by SEQ ID NO. 19420, or a homolog or fragment thereof, or if the activity of a polypeptide encoded by a nucleic acid molecule comprising the nucleic acid SEQ ID NO. 19419, preferably the coding region thereof, or a homolog or fragment thereof, e.g. derived from Arabidopsis thaliana, is increased or generated. For example the activity of a nucleic acid molecule or a polypeptide comprising the nucleic acid, preferably the coding region thereof, or polypeptide or the consensus sequence or the polypeptide motif, as depicted in Table I, II or IV, application No. 17, column 5 or 8 in the respective same line as the nucleic acid molecule SEQ ID NO. 19419 or polypeptide SEQ ID NO. 19420, respectively, or a homolog or a fragment thereof, is increased or generated, or if the activity protein phosphatase is increased or generated in a non-human organism, like a microorganism or a plant cell, plant or part thereof, especially with non-targeted localization, whereby the respective line disclose in column 7 the fine chemical myo-inositol. For example, an increase of the myo-inositol of at least 1 percent, particularly in a range of 49 to 123-percent is conferred as compared to a corresponding non-transformed wild type non-human organism.

[87957] Accordingly, in one embodiment, an increase of raffinose in a non-human organism, as compared to a corresponding non-transformed wild type non-human organism, is conferred in the process of the invention, if the activity of a polypeptide showing the activity of a protein phosphatase, or if the activity of the polypeptide At1g72770, preferably represented by SEQ ID NO. 19420, or a homolog or fragment thereof, or if the activity of a polypeptide encoded by a nucleic acid molecule comprising the nucleic acid SEQ ID NO. 19419, preferably the coding region thereof, or a homolog or fragment thereof, e.g. derived from Arabidopsis thaliana, is increased or generated. For example the activity of a nucleic acid molecule or a polypeptide comprising the nucleic acid, preferably the coding region thereof, or polypeptide or the consensus sequence or the polypeptide motif, as depicted in Table I, II or IV, application No. 17, column 5 or 8 in the respective same line as the nucleic acid molecule SEQ ID NO. 19419 or polypeptide SEQ ID NO. 19420, respectively, or a homolog or a fragment thereof, is increased or generated, or if the activity protein phosphatase is increased or generated in a non-human organism, like a microorganism or a plant cell, plant or part thereof, especially with non-targeted localization, whereby the respective line disclose in column 7 the fine chemical raffinose. For example, an increase of the raffinose of at least 1 percent, particularly in a range of 55 to 339-percent is conferred as compared to a corresponding non-transformed wild type non-human organism.

[87958] Accordingly, in one embodiment, an increase of sucrose in a non-human organism, as compared to a corresponding non-transformed wild type non-human organism, is conferred in the process of the invention, if the activity of a polypeptide showing the activity of a protein phosphatase, or if the activity of the polypeptide At1g72770, preferably represented by SEQ ID NO. 19420, or a homolog or fragment thereof, or if the activity of a polypeptide encoded by a nucleic acid molecule comprising the nucleic acid SEQ ID NO. 19419, preferably the coding region thereof, or a homolog or fragment thereof, e.g. derived from Arabidopsis thaliana, is increased or generated. For example the activity of a nucleic acid molecule or a polypeptide comprising the nucleic acid, preferably the coding region thereof, or polypeptide or the consensus sequence or the polypeptide motif, as depicted in Table I, II or IV, application No. 17, column 5 or 8 in the respective same line as the nucleic acid molecule SEQ ID NO. 19419 or polypeptide SEQ ID NO. 19420, respectively, or a homolog or a fragment thereof, is increased or generated, or if the activity protein phosphatase is increased or generated in a non-human organism, like a microorganism or a plant cell, plant or part thereof, especially with non-targeted localization, whereby the respective line disclose in column 7 the fine chemical sucrose. For example, an increase of the sucrose of at least 1 percent, particularly in a range of 35 to 82-percent is conferred as compared to a corresponding non-transformed wild type non-human organism.

[87959] Accordingly, in one embodiment, an increase of saccharic acid in a non-human organism, as compared to a corresponding non-transformed wild type non-human organism, is conferred in the process of the invention, if the activity of a polypeptide showing the activity of a protein phosphatase, or if the activity of the polypeptide At1g78200, preferably represented by SEQ ID NO. 141014, or a homolog or fragment thereof, or if the activity of a polypeptide encoded by a nucleic acid molecule comprising the nucleic acid SEQ ID NO. 141013, preferably the coding region thereof, or a homolog or fragment thereof, e.g. derived from Arabidopsis thaliana, is increased or generated. For example the activity of a nucleic acid molecule or a polypeptide comprising the nucleic acid, preferably the coding region thereof, or polypeptide or the consensus sequence or the polypeptide motif, as depicted in Table I, II or IV, application No. 17, column 5 or 8 in the respective same line as the nucleic acid molecule SEQ ID NO. 141013 or polypeptide SEQ ID NO. 141014, respectively, or a homolog or a fragment thereof, is increased or generated, or if the activity protein phosphatase is increased or generated in a non-human organism, like a microorganism or a plant cell, plant or part thereof, especially with non-targeted localization, whereby the respective line disclose in column 7 the fine chemical saccharic acid. For example, an increase of the saccharic acid of at least 1 percent, particularly in a range of 49 to 143-percent is conferred as compared to a corresponding non-transformed wild type non-human organism.

[87960] Accordingly, in one embodiment, an increase of fructose in a non-human organism, as compared to a corresponding non-transformed wild type non-human organism, is conferred in the process of the invention, if the activity of a polypeptide showing the activity of a transcription factor, or if the activity of the polypeptide At2g17560, preferably represented by SEQ ID NO. 19503, or a homolog or fragment thereof, or if the activity of a polypeptide encoded by a nucleic acid molecule comprising the nucleic acid SEQ ID NO. 19502, preferably the coding region thereof, or a homolog or fragment thereof, e.g. derived from Arabidopsis thaliana, is increased or generated. For example the activity of a nucleic acid molecule or a polypeptide comprising the nucleic acid, preferably the coding region thereof, or polypeptide or the consensus sequence or the polypeptide motif, as depicted in Table I, II or IV, application No. 17, column 5 or 8 in the respective same line as the nucleic acid molecule SEQ ID NO. 19502 or polypeptide SEQ ID NO. 19503, respectively, or a homolog or a fragment thereof, is increased or generated, or if the activity transcription factor is increased or generated in a non-human organism, like a microorganism or a plant cell, plant or part thereof, especially with non-targeted localization, whereby the respective line disclose in column 7 the fine chemical fructose. For example, an increase of the fructose of at least 1 percent, particularly in a range of 77 to 460-percent is conferred as compared to a corresponding non-transformed wild type non-human organism.

[87961] Accordingly, in one embodiment, an increase of glucose in a non-human organism, as compared to a corresponding non-transformed wild type non-human organism, is conferred in the process of the invention, if the activity of a polypeptide showing the activity of a transcription factor, or if the activity of the polypeptide At2g17560, preferably represented by SEQ ID NO. 19503, or a homolog or fragment thereof, or if the activity of a polypeptide encoded by a nucleic acid molecule comprising the nucleic acid SEQ ID NO. 19502, preferably the coding region thereof, or a homolog or fragment thereof, e.g. derived from Arabidopsis thaliana, is increased or generated. For example the activity of a nucleic acid molecule or a polypeptide comprising the nucleic acid, preferably the coding region thereof, or polypeptide or the consensus sequence or the polypeptide motif, as depicted in Table I, II or IV, application No. 17, column 5 or 8 in the respective same line as the nucleic acid molecule SEQ ID NO. 19502 or polypeptide SEQ ID NO. 19503, respectively, or a homolog or a fragment thereof, is increased or generated, or if the activity transcription factor is increased or generated in a non-human organism, like a microorganism or a plant cell, plant or part thereof, especially with non-targeted localization, whereby the respective line disclose in column 7 the fine chemical glucose. For example, an increase of the glucose of at least 1 percent, particularly in a range of 67 to 304-percent is conferred as compared to a corresponding non-transformed wild type non-human organism.

[87962] Accordingly, in one embodiment, an increase of glucose-1-phosphate in a non-human organism, as compared to a corresponding non-transformed wild type non-human organism, is conferred in the process of the invention, if the activity of a polypeptide showing the activity of a transcription factor, or if the activity of the polypeptide At2g17560, preferably represented by SEQ ID NO. 19503, or a homolog or fragment thereof, or if the activity of a polypeptide encoded by a nucleic acid molecule comprising the nucleic acid SEQ ID NO. 19502, preferably the coding region thereof, or a homolog or fragment thereof, e.g. derived from Arabidopsis thaliana, is increased or generated. For example the activity of a nucleic acid molecule or a polypeptide comprising the nucleic acid, preferably the coding region thereof, or polypeptide or the consensus sequence or the polypeptide motif, as depicted in Table I, II or IV, application No. 17, column 5 or 8 in the respective same line as the nucleic acid molecule SEQ ID NO. 19502 or polypeptide SEQ ID NO. 19503, respectively, or a homolog or a fragment thereof, is increased or generated, or if the activity transcription factor is increased or generated in a non-human organism, like a microorganism or a plant cell, plant or part thereof, especially with non-targeted localization, whereby the respective line disclose in column 7 the fine chemical glucose-1-phosphate. For example, an increase of the glucose-1-phosphate of at least 1 percent, particularly in a range of 23 to 32-percent is conferred as compared to a corresponding non-transformed wild type non-human organism.

[87963] Accordingly, in one embodiment, an increase of glucose-1-phosphate in a non-human organism, as compared to a corresponding non-transformed wild type non-human organism, is conferred in the process of the invention, if the activity of a polypeptide showing the activity of a protein phosphatase, or if the activity of the polypeptide At2g25070, preferably represented by SEQ ID NO. 1299, or a homolog or fragment thereof, or if the activity of a polypeptide encoded by a nucleic acid molecule comprising the nucleic acid SEQ ID NO. 1298, preferably the coding region thereof, or a homolog or fragment thereof, e.g. derived from Arabidopsis thaliana, is increased or generated. For example the activity of a nucleic acid molecule or a polypeptide comprising the nucleic acid, preferably the coding region thereof, or polypeptide or the consensus sequence or the polypeptide motif, as depicted in Table I, II or IV, application No. 17, column 5 or 8 in the respective same line as the nucleic acid molecule SEQ ID NO. 1298 or polypeptide SEQ ID NO. 1299, respectively, or a homolog or a fragment thereof, is increased or generated, or if the activity protein phosphatase is increased or generated in a non-human organism, like a microorganism or a plant cell, plant or part thereof, especially with non-targeted localization, whereby the respective line disclose in column 7 the fine chemical glucose-1-phosphate. For example, an increase of the glucose-1-phosphate of at least 1 percent, particularly in a range of 19 to 37-percent is conferred as compared to a corresponding non-transformed wild type non-human organism.

[87964] Accordingly, in one embodiment, an increase of saccharic acid in a non-human organism, as compared to a corresponding non-transformed wild type non-human organism, is conferred in the process of the invention, if the activity of a polypeptide showing the activity of a glutaredoxin, or if the activity of the polypeptide At2g30540, preferably represented by SEQ ID NO. 20347, or a homolog or fragment thereof, or if the activity of a polypeptide encoded by a nucleic acid molecule comprising the nucleic acid SEQ ID NO. 20346, preferably the coding region thereof, or a homolog or fragment thereof, e.g. derived from Arabidopsis thaliana, is increased or generated. For example the activity of a nucleic acid molecule or a polypeptide comprising the nucleic acid, preferably the coding region thereof, or polypeptide or the consensus sequence or the polypeptide motif, as depicted in Table I, II or IV, application No. 17, column 5 or 8 in the respective same line as the nucleic acid molecule SEQ ID NO. 20346 or polypeptide SEQ ID NO. 20347, respectively, or a homolog or a fragment thereof, is increased or generated, or if the activity glutaredoxin is increased or generated in a non-human organism, like a microorganism or a plant cell, plant or part thereof, especially with non-targeted localization, whereby the respective line disclose in column 7 the fine chemical saccharic acid. For example, an increase of the saccharic acid of at least 1 percent, particularly in a range of 44 to 162-percent is conferred as compared to a corresponding non-transformed wild type non-human organism.

[87965] Accordingly, in one embodiment, an increase of fructose in a non-human organism, as compared to a corresponding non-transformed wild type non-human organism, is conferred in the process of the invention, if the activity of a polypeptide showing the activity of a CBL-interacting protein kinase, or if the activity of the polypeptide At2g34180, preferably represented by SEQ ID NO. 20579, or a homolog or fragment thereof, or if the activity of a polypeptide encoded by a nucleic acid molecule comprising the nucleic acid SEQ ID NO. 20578, preferably the coding region thereof, or a homolog or fragment thereof, e.g. derived from Arabidopsis thaliana, is increased or generated. For example the activity of a nucleic acid molecule or a polypeptide comprising the nucleic acid, preferably the coding region thereof, or polypeptide or the consensus sequence or the polypeptide motif, as depicted in Table I, II or IV, application No. 17, column 5 or 8 in the respective same line as the nucleic acid molecule SEQ ID NO. 20578 or polypeptide SEQ ID NO. 20579, respectively, or a homolog or a fragment thereof, is increased or generated, or if the activity CBL-interacting protein kinase is increased or generated in a non-human organism, like a microorganism or a plant cell, plant or part thereof, especially with non-targeted localization, whereby the respective line disclose in column 7 the fine chemical fructose. For example, an increase of the fructose of at least 1 percent, particularly in a range of 820 to 7343-percent is conferred as compared to a corresponding non-transformed wild type non-human organism.

[87966] Accordingly, in one embodiment, an increase of glucose in a non-human organism, as compared to a corresponding non-transformed wild type non-human organism, is conferred in the process of the invention, if the activity of a polypeptide showing the activity of a CBL-interacting protein kinase, or if the activity of the polypeptide At2g34180, preferably represented by SEQ ID NO. 20579, or a homolog or fragment thereof, or if the activity of a polypeptide encoded by a nucleic acid molecule comprising the nucleic acid SEQ ID NO. 20578, preferably the coding region thereof, or a homolog or fragment thereof, e.g. derived from Arabidopsis thaliana, is increased or generated. For example the activity of a nucleic acid molecule or a polypeptide comprising the nucleic acid, preferably the coding region thereof, or polypeptide or the consensus sequence or the polypeptide motif, as depicted in Table I, II or IV, application No. 17, column 5 or 8 in the respective same line as the nucleic acid molecule SEQ ID NO. 20578 or polypeptide SEQ ID NO. 20579, respectively, or a homolog or a fragment thereof, is increased or generated, or if the activity CBL-interacting protein kinase is increased or generated in a non-human organism, like a microorganism or a plant cell, plant or part thereof, especially with non-targeted localization, whereby the respective line disclose in column 7 the fine chemical glucose. For example, an increase of the glucose of at least 1 percent, particularly in a range of 339 to 2993-percent is conferred as compared to a corresponding non-transformed wild type non-human organism.

[87967] Accordingly, in one embodiment, an increase of sedoheptulose-7-phosphate in a non-human organism, as compared to a corresponding non-transformed wild type non-human organism, is conferred in the process of the invention, if the activity of a polypeptide showing the activity of a CBL-interacting protein kinase, or if the activity of the polypeptide At2g34180, preferably represented by SEQ ID NO. 20579, or a homolog or fragment thereof, or if the activity of a polypeptide encoded by a nucleic acid molecule comprising the nucleic acid SEQ ID NO. 20578, preferably the coding region thereof, or a homolog or fragment thereof, e.g. derived from Arabidopsis thaliana, is increased or generated. For example the activity of a nucleic acid molecule or a polypeptide comprising the nucleic acid, preferably the coding region thereof, or polypeptide or the consensus sequence or the polypeptide motif, as depicted in Table I, II or IV, application No. 17, column 5 or 8 in the respective same line as the nucleic acid molecule SEQ ID NO. 20578 or polypeptide SEQ ID NO. 20579, respectively, or a homolog or a fragment thereof, is increased or generated, or if the activity CBL-interacting protein kinase is increased or generated in a non-human organism, like a microorganism or a plant cell, plant or part thereof, especially with non-targeted localization, whereby the respective line disclose in column 7 the fine chemical sedoheptulose-7-phosphate. For example, an increase of the sedoheptulose-7-phosphate of at least 1 percent, particularly in a range of 190 to 580-percent is conferred as compared to a corresponding non-transformed wild type non-human organism.

[87968] Accordingly, in one embodiment, an increase of glucose-1-phosphate in a non-human organism, as compared to a corresponding non-transformed wild type non-human organism, is conferred in the process of the invention, if the activity of a polypeptide showing the activity of a phenylalanine ammonia-lyase, or if the activity of the polypeptide At2g37040, preferably represented by SEQ ID NO. 133043, or a homolog or fragment thereof, or if the activity of a polypeptide encoded by a nucleic acid molecule comprising the nucleic acid SEQ ID NO. 133042, preferably the coding region thereof, or a homolog or fragment thereof, e.g. derived from Arabidopsis thaliana, is increased or generated. For example the activity of a nucleic acid molecule or a polypeptide comprising the nucleic acid, preferably the coding region thereof, or polypeptide or the consensus sequence or the polypeptide motif, as depicted in Table I, II or IV, application No. 17, column 5 or 8 in the respective same line as the nucleic acid molecule SEQ ID NO. 133042 or polypeptide SEQ ID NO. 133043, respectively, or a homolog or a fragment thereof, is increased or generated, or if the activity phenylalanine ammonia-lyase is increased or generated in a non-human organism, like a microorganism or a plant cell, plant or part thereof, especially with non-targeted localization, whereby the respective line disclose in column 7 the fine chemical glucose-1-phosphate. For example, an increase of the glucose-1-phosphate of at least 1 percent, particularly in a range of 34 to 95-percent is conferred as compared to a corresponding non-transformed wild type non-human organism.

[87969] Accordingly, in one embodiment, an increase of glucose-1-phosphate in a non-human organism, as compared to a corresponding non-transformed wild type non-human organism, is conferred in the process of the invention, if the activity of a polypeptide showing the activity of a MADS box protein transcription factor, or if the activity of the polypeptide At2g42830, preferably represented by SEQ ID NO. 108728, or a homolog or fragment thereof, or if the activity of a polypeptide encoded by a nucleic acid molecule comprising the nucleic acid SEQ ID NO. 108727, preferably the coding region thereof, or a homolog or fragment thereof, e.g. derived from Arabidopsis thaliana, is increased or generated. For example the activity of a nucleic acid molecule or a polypeptide comprising the nucleic acid, preferably the coding region thereof, or polypeptide or the consensus sequence or the polypeptide motif, as depicted in Table I, II or IV, application No. 17, column 5 or 8 in the respective same line as the nucleic acid molecule SEQ ID NO. 108727 or polypeptide SEQ ID NO. 108728, respectively, or a homolog or a fragment thereof, is increased or generated, or if the activity MADS box protein transcription factor is increased or generated in a non-human organism, like a microorganism or a plant cell, plant or part thereof, especially with non-targeted localization, whereby the respective line disclose in column 7 the fine chemical glucose-1-phosphate. For example, an increase of the glucose-1-phosphate of at least 1 percent, particularly in a range of 33 to 85-percent is conferred as compared to a corresponding non-transformed wild type non-human organism.

[87970] Accordingly, in one embodiment, an increase of myo-inositol in a non-human organism, as compared to a corresponding non-transformed wild type non-human organism, is conferred in the process of the invention, if the activity of a polypeptide showing the activity of a At2g45420-protein, or if the activity of the polypeptide At2g45420, preferably represented by SEQ ID NO. 1624, or a homolog or fragment thereof, or if the activity of a polypeptide encoded by a nucleic acid molecule comprising the nucleic acid SEQ ID NO. 1623, preferably the coding region thereof, or a homolog or fragment thereof, e.g. derived from Arabidopsis thaliana, is increased or generated. For example the activity of a nucleic acid molecule or a polypeptide comprising the nucleic acid, preferably the coding region thereof, or polypeptide or the consensus sequence or the polypeptide motif, as depicted in Table I, II or IV, application No. 17, column 5 or 8 in the respective same line as the nucleic acid molecule SEQ ID NO. 1623 or polypeptide SEQ ID NO. 1624, respectively, or a homolog or a fragment thereof, is increased or generated, or if the activity At2g45420-protein is increased or generated in a non-human organism, like a microorganism or a plant cell, plant or part thereof, especially with non-targeted localization, whereby the respective line disclose in column 7 the fine chemical myo-inositol. For example, an increase of the myo-inositol of at least 1 percent, particularly in a range of 28 to 34-percent is conferred as compared to a corresponding non-transformed wild type non-human organism.

[87971] Accordingly, in one embodiment, an increase of glucose-1-phosphate in a non-human organism, as compared to a corresponding non-transformed wild type non-human organism, is conferred in the process of the invention, if the activity of a polypeptide showing the activity of a phosphatidylinositol 3- and 4-kinase family protein, or if the activity of the polypeptide At2g46500, preferably represented by SEQ ID NO. 21107, or a homolog or fragment thereof, or if the activity of a polypeptide encoded by a nucleic acid molecule comprising the nucleic acid SEQ ID NO. 21106, preferably the coding region thereof, or a homolog or fragment thereof, e.g.

[87972] derived from Arabidopsis thaliana, is increased or generated. For example the activity of a nucleic acid molecule or a polypeptide comprising the nucleic acid, preferably the coding region thereof, or polypeptide or the consensus sequence or the polypeptide motif, as depicted in Table I, II or IV, application No. 17, column 5 or 8 in the respective same line as the nucleic acid molecule SEQ ID NO. 21106 or polypeptide SEQ ID NO. 21107, respectively, or a homolog or a fragment thereof, is increased or generated, or if the activity phosphatidylinositol 3- and 4-kinase family protein is increased or generated in a non-human organism, like a microorganism or a plant cell, plant or part thereof, especially with non-targeted localization, whereby the respective line disclose in column 7 the fine chemical glucose-1-phosphate. For example, an increase of the glucose-1-phosphate of at least 1 percent, particularly in a range of 19 to 26-percent is conferred as compared to a corresponding non-transformed wild type non-human organism.

[87973] Accordingly, in one embodiment, an increase of raffinose in a non-human organism, as compared to a corresponding non-transformed wild type non-human organism, is conferred in the process of the invention, if the activity of a polypeptide showing the activity of a galactinol synthase, or if the activity of the polypeptide At2g47180, preferably represented by SEQ ID NO. 141638, or a homolog or fragment thereof, or if the activity of a polypeptide encoded by a nucleic acid molecule comprising the nucleic acid SEQ ID NO. 141637, preferably the coding region thereof, or a homolog or fragment thereof, e.g. derived from Arabidopsis thaliana, is increased or generated. For example the activity of a nucleic acid molecule or a polypeptide comprising the nucleic acid, preferably the coding region thereof, or polypeptide or the consensus sequence or the polypeptide motif, as depicted in Table I, II or IV, application No. 17, column 5 or 8 in the respective same line as the nucleic acid molecule SEQ ID NO. 141637 or polypeptide SEQ ID NO. 141638, respectively, or a homolog or a fragment thereof, is increased or generated, or if the activity galactinol synthase is increased or generated in a non-human organism, like a microorganism or a plant cell, plant or part thereof, especially with non-targeted localization, whereby the respective line disclose in column 7 the fine chemical raffinose. For example, an increase of the raffinose of at least 1 percent, particularly in a range of 569 to 4907-percent is conferred as compared to a corresponding non-transformed wild type non-human organism.

[87974] Accordingly, in one embodiment, an increase of raffinose in a non-human organism, as compared to a corresponding non-transformed wild type non-human organism, is conferred in the process of the invention, if the activity of a polypeptide showing the activity of a galactinol synthase, or if the activity of the polypeptide At2g47180, preferably represented by SEQ ID NO. 141638, or a homolog or fragment thereof, or if the activity of a polypeptide encoded by a nucleic acid molecule comprising the nucleic acid SEQ ID NO. 141637, preferably the coding region thereof, or a homolog or fragment thereof, e.g. derived from Arabidopsis thaliana, is increased or generated. For example the activity of a nucleic acid molecule or a polypeptide comprising the nucleic acid, preferably the coding region thereof, or polypeptide or the consensus sequence or the polypeptide motif, as depicted in Table I, II or IV, application No. 17, column 5 or 8 in the respective same line as the nucleic acid molecule SEQ ID NO. 141637 or polypeptide SEQ ID NO. 141638, respectively, or a homolog or a fragment thereof, is increased or generated, or if the activity galactinol synthase is increased or generated in a non-human organism, like a microorganism or a plant cell, plant or part thereof, especially with non-targeted localization, whereby the respective line disclose in column 7 the fine chemical raffinose. For example, an increase of the raffinose of at least 1 percent, particularly in a range of 158 to 11191-percent is conferred as compared to a corresponding non-transformed wild type non-human organism.

[87975] Accordingly, in one embodiment, an increase of fructose in a non-human organism, as compared to a corresponding non-transformed wild type non-human organism, is conferred in the process of the invention, if the activity of a polypeptide showing the activity of a heat shock transcription factor, or if the activity of the polypeptide At3g02990, preferably represented by SEQ ID NO. 68658, or a homolog or fragment thereof, or if the activity of a polypeptide encoded by a nucleic acid molecule comprising the nucleic acid SEQ ID NO. 68657, preferably the coding region thereof, or a homolog or fragment thereof, e.g. derived from Arabidopsis thaliana, is increased or generated. For example the activity of a nucleic acid molecule or a polypeptide comprising the nucleic acid, preferably the coding region thereof, or polypeptide or the consensus sequence or the polypeptide motif, as depicted in Table I, II or IV, application No. 17, column 5 or 8 in the respective same line as the nucleic acid molecule SEQ ID NO. 68657 or polypeptide SEQ ID NO. 68658, respectively, or a homolog or a fragment thereof, is increased or generated, or if the activity heat shock transcription factor is increased or generated in a non-human organism, like a microorganism or a plant cell, plant or part thereof, especially with non-targeted localization, whereby the respective line disclose in column 7 the fine chemical fructose. For example, an increase of the fructose of at least 1 percent, particularly in a range of 426 to 970-percent is conferred as compared to a corresponding non-transformed wild type non-human organism.

[87976] Accordingly, in one embodiment, an increase of glucose in a non-human organism, as compared to a corresponding non-transformed wild type non-human organism, is conferred in the process of the invention, if the activity of a polypeptide showing the activity of a heat shock transcription factor, or if the activity of the polypeptide At3g02990, preferably represented by SEQ ID NO. 68658, or a homolog or fragment thereof, or if the activity of a polypeptide encoded by a nucleic acid molecule comprising the nucleic acid SEQ ID NO. 68657, preferably the coding region thereof, or a homolog or fragment thereof, e.g. derived from Arabidopsis thaliana, is increased or generated. For example the activity of a nucleic acid molecule or a polypeptide comprising the nucleic acid, preferably the coding region thereof, or polypeptide or the consensus sequence or the polypeptide motif, as depicted in Table I, II or IV, application No. 17, column 5 or 8 in the respective same line as the nucleic acid molecule SEQ ID NO. 68657 or polypeptide SEQ ID NO. 68658, respectively, or a homolog or a fragment thereof, is increased or generated, or if the activity heat shock transcription factor is increased or generated in a non-human organism, like a microorganism or a plant cell, plant or part thereof, especially with non-targeted localization, whereby the respective line disclose in column 7 the fine chemical glucose. For example, an increase of the glucose of at least 1 percent, particularly in a range of 58 to 465-percent is conferred as compared to a corresponding non-transformed wild type non-human organism.

[87977] Accordingly, in one embodiment, an increase of myo-inositol in a non-human organism, as compared to a corresponding non-transformed wild type non-human organism, is conferred in the process of the invention, if the activity of a polypeptide showing the activity of a heat shock transcription factor, or if the activity of the polypeptide At3g02990, preferably represented by SEQ ID NO. 68658, or a homolog or fragment thereof, or if the activity of a polypeptide encoded by a nucleic acid molecule comprising the nucleic acid SEQ ID NO. 68657, preferably the coding region thereof, or a homolog or fragment thereof, e.g. derived from Arabidopsis thaliana, is increased or generated. For example the activity of a nucleic acid molecule or a polypeptide comprising the nucleic acid, preferably the coding region thereof, or polypeptide or the consensus sequence or the polypeptide motif, as depicted in Table I, II or IV, application No. 17, column 5 or 8 in the respective same line as the nucleic acid molecule SEQ ID NO. 68657 or polypeptide SEQ ID NO. 68658, respectively, or a homolog or a fragment thereof, is increased or generated, or if the activity heat shock transcription factor is increased or generated in a non-human organism, like a microorganism or a plant cell, plant or part thereof, especially with non-targeted localization, whereby the respective line disclose in column 7 the fine chemical myo-inositol. For example, an increase of the myo-inositol of at least 1 percent, particularly in a range of 29 to 46-percent is conferred as compared to a corresponding non-transformed wild type non-human organism.

[87978] Accordingly, in one embodiment, an increase of raffinose in a non-human organism, as compared to a corresponding non-transformed wild type non-human organism, is conferred in the process of the invention, if the activity of a polypeptide showing the activity of a heat shock transcription factor, or if the activity of the polypeptide At3g02990, preferably represented by SEQ ID NO. 68658, or a homolog or fragment thereof, or if the activity of a polypeptide encoded by a nucleic acid molecule comprising the nucleic acid SEQ ID NO. 68657, preferably the coding region thereof, or a homolog or fragment thereof, e.g. derived from Arabidopsis thaliana, is increased or generated. For example the activity of a nucleic acid molecule or a polypeptide comprising the nucleic acid, preferably the coding region thereof, or polypeptide or the consensus sequence or the polypeptide motif, as depicted in Table I, II or IV, application No. 17, column 5 or 8 in the respective same line as the nucleic acid molecule SEQ ID NO. 68657 or polypeptide SEQ ID NO. 68658, respectively, or a homolog or a fragment thereof, is increased or generated, or if the activity heat shock transcription factor is increased or generated in a non-human organism, like a microorganism or a plant cell, plant or part thereof, especially with non-targeted localization, whereby the respective line disclose in column 7 the fine chemical raffinose. For example, an increase of the raffinose of at least 1 percent, particularly in a range of 117 to 1149-percent is conferred as compared to a corresponding non-transformed wild type non-human organism.

[87979] Accordingly, in one embodiment, an increase of fructose in a non-human organism, as compared to a corresponding non-transformed wild type non-human organism, is conferred in the process of the invention, if the activity of a polypeptide showing the activity of a pyruvate kinase, or if the activity of the polypeptide At3g04050, preferably represented by SEQ ID NO. 21498, or a homolog or fragment thereof, or if the activity of a polypeptide encoded by a nucleic acid molecule comprising the nucleic acid SEQ ID NO. 21497, preferably the coding region thereof, or a homolog or fragment thereof, e.g. derived from Arabidopsis thaliana, is increased or generated. For example the activity of a nucleic acid molecule or a polypeptide comprising the nucleic acid, preferably the coding region thereof, or polypeptide or the consensus sequence or the polypeptide motif, as depicted in Table I, II or IV, application No. 17, column 5 or 8 in the respective same line as the nucleic acid molecule SEQ ID NO. 21497 or polypeptide SEQ ID NO. 21498, respectively, or a homolog or a fragment thereof, is increased or generated, or if the activity pyruvate kinase is increased or generated in a non-human organism, like a microorganism or a plant cell, plant or part thereof, especially with plastidic localization, whereby the respective line disclose in column 7 the fine chemical fructose. For example, an increase of the fructose of at least 1 percent, particularly in a range of 192 to 299-percent is conferred as compared to a corresponding non-transformed wild type non-human organism.

[87980] Accordingly, in one embodiment, an increase of glucose in a non-human organism, as compared to a corresponding non-transformed wild type non-human organism, is conferred in the process of the invention, if the activity of a polypeptide showing the activity of a protein phosphatase, or if the activity of the polypeptide At3g06270, preferably represented by SEQ ID NO. 22016, or a homolog or fragment thereof, or if the activity of a polypeptide encoded by a nucleic acid molecule comprising the nucleic acid SEQ ID NO. 22015, preferably the coding region thereof, or a homolog or fragment thereof, e.g. derived from Arabidopsis thaliana, is increased or generated. For example the activity of a nucleic acid molecule or a polypeptide comprising the nucleic acid, preferably the coding region thereof, or polypeptide or the consensus sequence or the polypeptide motif, as depicted in Table I, II or IV, application No. 17, column 5 or 8 in the respective same line as the nucleic acid molecule SEQ ID NO. 22015 or polypeptide SEQ ID NO. 22016, respectively, or a homolog or a fragment thereof, is increased or generated, or if the activity protein phosphatase is increased or generated in a non-human organism, like a microorganism or a plant cell, plant or part thereof, especially with non-targeted localization, whereby the respective line disclose in column 7 the fine chemical glucose. For example, an increase of the glucose of at least 1 percent, particularly in a range of 85 to 185-percent is conferred as compared to a corresponding non-transformed wild type non-human organism.

[87981] Accordingly, in one embodiment, an increase of myo-inositol in a non-human organism, as compared to a corresponding non-transformed wild type non-human organism, is conferred in the process of the invention, if the activity of a polypeptide showing the activity of a protein phosphatase, or if the activity of the polypeptide At3g06270, preferably represented by SEQ ID NO. 22016, or a homolog or fragment thereof, or if the activity of a polypeptide encoded by a nucleic acid molecule comprising the nucleic acid SEQ ID NO. 22015, preferably the coding region thereof, or a homolog or fragment thereof, e.g. derived from Arabidopsis thaliana, is increased or generated. For example the activity of a nucleic acid molecule or a polypeptide comprising the nucleic acid, preferably the coding region thereof, or polypeptide or the consensus sequence or the polypeptide motif, as depicted in Table I, II or IV, application No. 17, column 5 or 8 in the respective same line as the nucleic acid molecule SEQ ID NO. 22015 or polypeptide SEQ ID NO. 22016, respectively, or a homolog or a fragment thereof, is increased or generated, or if the activity protein phosphatase is increased or generated in a non-human organism, like a microorganism or a plant cell, plant or part thereof, especially with non-targeted localization, whereby the respective line disclose in column 7 the fine chemical myo-inositol. For example, an increase of the myo-inositol of at least 1 percent, particularly in a range of 25 to 80-percent is conferred as compared to a corresponding non-transformed wild type non-human organism.

[87982] Accordingly, in one embodiment, an increase of fructose in a non-human organism, as compared to a corresponding non-transformed wild type non-human organism, is conferred in the process of the invention, if the activity of a polypeptide showing the activity of a thioredoxin family protein, or if the activity of the polypeptide At3g08710, preferably represented by SEQ ID NO. 22250, or a homolog or fragment thereof, or if the activity of a polypeptide encoded by a nucleic acid molecule comprising the nucleic acid SEQ ID NO. 22249, preferably the coding region thereof, or a homolog or fragment thereof, e.g. derived from Arabidopsis thaliana, is increased or generated. For example the activity of a nucleic acid molecule or a polypeptide comprising the nucleic acid, preferably the coding region thereof, or polypeptide or the consensus sequence or the polypeptide motif, as depicted in Table I, II or IV, application No. 17, column 5 or 8 in the respective same line as the nucleic acid molecule SEQ ID NO. 22249 or polypeptide SEQ ID NO. 22250, respectively, or a homolog or a fragment thereof, is increased or generated, or if the activity thioredoxin family protein is increased or generated in a non-human organism, like a microorganism or a plant cell, plant or part thereof, especially with non-targeted localization, whereby the respective line disclose in column 7 the fine chemical fructose. For example, an increase of the fructose of at least 1 percent, particularly in a range of 93 to 182-percent is conferred as compared to a corresponding non-transformed wild type non-human organism.

[87983] Accordingly, in one embodiment, an increase of glucose in a non-human organism, as compared to a corresponding non-transformed wild type non-human organism, is conferred in the process of the invention, if the activity of a polypeptide showing the activity of a thioredoxin family protein, or if the activity of the polypeptide At3g08710, preferably represented by SEQ ID NO. 22250, or a homolog or fragment thereof, or if the activity of a polypeptide encoded by a nucleic acid molecule comprising the nucleic acid SEQ ID NO. 22249, preferably the coding region thereof, or a homolog or fragment thereof, e.g. derived from Arabidopsis thaliana, is increased or generated. For example the activity of a nucleic acid molecule or a polypeptide comprising the nucleic acid, preferably the coding region thereof, or polypeptide or the consensus sequence or the polypeptide motif, as depicted in Table I, II or IV, application No. 17, column 5 or 8 in the respective same line as the nucleic acid molecule SEQ ID NO. 22249 or polypeptide SEQ ID NO. 22250, respectively, or a homolog or a fragment thereof, is increased or generated, or if the activity thioredoxin family protein is increased or generated in a non-human organism, like a microorganism or a plant cell, plant or part thereof, especially with non-targeted localization, whereby the respective line disclose in column 7 the fine chemical glucose. For example, an increase of the glucose of at least 1 percent, particularly in a range of 69 to 147-percent is conferred as compared to a corresponding non-transformed wild type non-human organism.

[87984] Accordingly, in one embodiment, an increase of myo-inositol in a non-human organism, as compared to a corresponding non-transformed wild type non-human organism, is conferred in the process of the invention, if the activity of a polypeptide showing the activity of a thioredoxin family protein, or if the activity of the polypeptide At3g08710, preferably represented by SEQ ID NO. 22250, or a homolog or fragment thereof, or if the activity of a polypeptide encoded by a nucleic acid molecule comprising the nucleic acid SEQ ID NO. 22249, preferably the coding region thereof, or a homolog or fragment thereof, e.g. derived from Arabidopsis thaliana, is increased or generated. For example the activity of a nucleic acid molecule or a polypeptide comprising the nucleic acid, preferably the coding region thereof, or polypeptide or the consensus sequence or the polypeptide motif, as depicted in Table I, II or IV, application No. 17, column 5 or 8 in the respective same line as the nucleic acid molecule SEQ ID NO. 22249 or polypeptide SEQ ID NO. 22250, respectively, or a homolog or a fragment thereof, is increased or generated, or if the activity thioredoxin family protein is increased or generated in a non-human organism, like a microorganism or a plant cell, plant or part thereof, especially with non-targeted localization, whereby the respective line disclose in column 7 the fine chemical myo-inositol. For example, an increase of the myo-inositol of at least 1 percent, particularly in a range of 32 to 123-percent is conferred as compared to a corresponding non-transformed wild type non-human organism.

[87985] Accordingly, in one embodiment, an increase of saccharic acid in a non-human organism, as compared to a corresponding non-transformed wild type non-human organism, is conferred in the process of the invention, if the activity of a polypeptide showing the activity of a DNA binding protein, or if the activity of the polypeptide At3g14230, preferably represented by SEQ ID NO. 22700, or a homolog or fragment thereof, or if the activity of a polypeptide encoded by a nucleic acid molecule comprising the nucleic acid SEQ ID NO. 22699, preferably the coding region thereof, or a homolog or fragment thereof, e.g. derived from Arabidopsis thaliana, is increased or generated. For example the activity of a nucleic acid molecule or a polypeptide comprising the nucleic acid, preferably the coding region thereof, or polypeptide or the consensus sequence or the polypeptide motif, as depicted in Table I, II or IV, application No. 17, column 5 or 8 in the respective same line as the nucleic acid molecule SEQ ID NO. 22699 or polypeptide SEQ ID NO. 22700, respectively, or a homolog or a fragment thereof, is increased or generated, or if the activity DNA binding protein is increased or generated in a non-human organism, like a microorganism or a plant cell, plant or part thereof, especially with plastidic localization, whereby the respective line disclose in column 7 the fine chemical saccharic acid. For example, an increase of the saccharic acid of at least 1 percent, particularly in a range of 57 to 182-percent is conferred as compared to a corresponding non-transformed wild type non-human organism.

[87986] Accordingly, in one embodiment, an increase of glucose-1-phosphate in a non-human organism, as compared to a corresponding non-transformed wild type non-human organism, is conferred in the process of the invention, if the activity of a polypeptide showing the activity of a CCAAT-binding transcription factor, or if the activity of the polypeptide At3g20910, preferably represented by SEQ ID NO. 22922, or a homolog or fragment thereof, or if the activity of a polypeptide encoded by a nucleic acid molecule comprising the nucleic acid SEQ ID NO. 22921, preferably the coding region thereof, or a homolog or fragment thereof, e.g. derived from Arabidopsis thaliana, is increased or generated. For example the activity of a nucleic acid molecule or a polypeptide comprising the nucleic acid, preferably the coding region thereof, or polypeptide or the consensus sequence or the polypeptide motif, as depicted in Table I, II or IV, application No. 17, column 5 or 8 in the respective same line as the nucleic acid molecule SEQ ID NO. 22921 or polypeptide SEQ ID NO. 22922, respectively, or a homolog or a fragment thereof, is increased or generated, or if the activity CCAAT-binding transcription factor is increased or generated in a non-human organism, like a microorganism or a plant cell, plant or part thereof, especially with non-targeted localization, whereby the respective line disclose in column 7 the fine chemical glucose-1-phosphate. For example, an increase of the glucose-1-phosphate of at least 1 percent, particularly in a range of 18 to 45-percent is conferred as compared to a corresponding non-transformed wild type non-human organism.

[87987] Accordingly, in one embodiment, an increase of raffinose in a non-human organism, as compared to a corresponding non-transformed wild type non-human organism, is conferred in the process of the invention, if the activity of a polypeptide showing the activity of a CCAAT-binding transcription factor, or if the activity of the polypeptide At3g20910, preferably represented by SEQ ID NO. 22922, or a homolog or fragment thereof, or if the activity of a polypeptide encoded by a nucleic acid molecule comprising the nucleic acid SEQ ID NO. 22921, preferably the coding region thereof, or a homolog or fragment thereof, e.g. derived from Arabidopsis thaliana, is increased or generated. For example the activity of a nucleic acid molecule or a polypeptide comprising the nucleic acid, preferably the coding region thereof, or polypeptide or the consensus sequence or the polypeptide motif, as depicted in Table I, II or IV, application No. 17, column 5 or 8 in the respective same line as the nucleic acid molecule SEQ ID NO. 22921 or polypeptide SEQ ID NO. 22922, respectively, or a homolog or a fragment thereof, is increased or generated, or if the activity CCAAT-binding transcription factor is increased or generated in a non-human organism, like a microorganism or a plant cell, plant or part thereof, especially with non-targeted localization, whereby the respective line disclose in column 7 the fine chemical raffinose. For example, an increase of the raffinose of at least 1 percent, particularly in a range of 55 to 114-percent is conferred as compared to a corresponding non-transformed wild type non-human organism.

[87988] Accordingly, in one embodiment, an increase of fructose in a non-human organism, as compared to a corresponding non-transformed wild type non-human organism, is conferred in the process of the invention, if the activity of a polypeptide showing the activity of a protein kinase, or if the activity of the polypeptide At3g23000, preferably represented by SEQ ID NO. 1816, or a homolog or fragment thereof, or if the activity of a polypeptide encoded by a nucleic acid molecule comprising the nucleic acid SEQ ID NO. 1815, preferably the coding region thereof, or a homolog or fragment thereof, e.g. derived from Arabidopsis thaliana, is increased or generated. For example the activity of a nucleic acid molecule or a polypeptide comprising the nucleic acid, preferably the coding region thereof, or polypeptide or the consensus sequence or the polypeptide motif, as depicted in Table I, II or IV, application No. 17, column 5 or 8 in the respective same line as the nucleic acid molecule SEQ ID NO. 1815 or polypeptide SEQ ID NO. 1816, respectively, or a homolog or a fragment thereof, is increased or generated, or if the activity protein kinase is increased or generated in a non-human organism, like a microorganism or a plant cell, plant or part thereof, especially with non-targeted localization, whereby the respective line disclose in column 7 the fine chemical fructose. For example, an increase of the fructose of at least 1 percent, particularly in a range of 123 to 2049-percent is conferred as compared to a corresponding non-transformed wild type non-human organism.

[87989] Accordingly, in one embodiment, an increase of glucose in a non-human organism, as compared to a corresponding non-transformed wild type non-human organism, is conferred in the process of the invention, if the activity of a polypeptide showing the activity of a protein kinase, or if the activity of the polypeptide At3g23000, preferably represented by SEQ ID NO. 1816, or a homolog or fragment thereof, or if the activity of a polypeptide encoded by a nucleic acid molecule comprising the nucleic acid SEQ ID NO. 1815, preferably the coding region thereof, or a homolog or fragment thereof, e.g. derived from Arabidopsis thaliana, is increased or generated. For example the activity of a nucleic acid molecule or a polypeptide comprising the nucleic acid, preferably the coding region thereof, or polypeptide or the consensus sequence or the polypeptide motif, as depicted in Table I, II or IV, application No. 17, column 5 or 8 in the respective same line as the nucleic acid molecule SEQ ID NO. 1815 or polypeptide SEQ ID NO. 1816, respectively, or a homolog or a fragment thereof, is increased or generated, or if the activity protein kinase is increased or generated in a non-human organism, like a microorganism or a plant cell, plant or part thereof, especially with non-targeted localization, whereby the respective line disclose in column 7 the fine chemical glucose. For example, an increase of the glucose of at least 1 percent, particularly in a range of 177 to 3162-percent is conferred as compared to a corresponding non-transformed wild type non-human organism.

[87990] Accordingly, in one embodiment, an increase of sedoheptulose-7-phosphate in a non-human organism, as compared to a corresponding non-transformed wild type non-human organism, is conferred in the process of the invention, if the activity of a polypeptide showing the activity of a protein kinase, or if the activity of the polypeptide At3g23000, preferably represented by SEQ ID NO. 1816, or a homolog or fragment thereof, or if the activity of a polypeptide encoded by a nucleic acid molecule comprising the nucleic acid SEQ ID NO. 1815, preferably the coding region thereof, or a homolog or fragment thereof, e.g. derived from Arabidopsis thaliana, is increased or generated. For example the activity of a nucleic acid molecule or a polypeptide comprising the nucleic acid, preferably the coding region thereof, or polypeptide or the consensus sequence or the polypeptide motif, as depicted in Table I, II or IV, application No. 17, column 5 or 8 in the respective same line as the nucleic acid molecule SEQ ID NO. 1815 or polypeptide SEQ ID NO. 1816, respectively, or a homolog or a fragment thereof, is increased or generated, or if the activity protein kinase is increased or generated in a non-human organism, like a microorganism or a plant cell, plant or part thereof, especially with non-targeted localization, whereby the respective line disclose in column 7 the fine chemical sedoheptulose-7-phosphate. For example, an increase of the sedoheptulose-7-phosphate of at least 1 percent, particularly in a range of 116 to 571-percent is conferred as compared to a corresponding non-transformed wild type non-human organism.

[87991] Accordingly, in one embodiment, an increase of fructose in a non-human organism, as compared to a corresponding non-transformed wild type non-human organism, is conferred in the process of the invention, if the activity of a polypeptide showing the activity of a eukaryotic translation initiation factor, or if the activity of the polypeptide At3g26400, preferably represented by SEQ ID NO. 68728, or a homolog or fragment thereof, or if the activity of a polypeptide encoded by a nucleic acid molecule comprising the nucleic acid SEQ ID NO. 68727, preferably the coding region thereof, or a homolog or fragment thereof, e.g. derived from Arabidopsis thaliana, is increased or generated. For example the activity of a nucleic acid molecule or a polypeptide comprising the nucleic acid, preferably the coding region thereof, or polypeptide or the consensus sequence or the polypeptide motif, as depicted in Table I, II or IV, application No. 17, column 5 or 8 in the respective same line as the nucleic acid molecule SEQ ID NO. 68727 or polypeptide SEQ ID NO. 68728, respectively, or a homolog or a fragment thereof, is increased or generated, or if the activity eukaryotic translation initiation factor is increased or generated in a non-human organism, like a microorganism or a plant cell, plant or part thereof, especially with non-targeted localization, whereby the respective line disclose in column 7 the fine chemical fructose. For example, an increase of the fructose of at least 1 percent, particularly in a range of 79 to 583-percent is conferred as compared to a corresponding non-transformed wild type non-human organism.

[87992] Accordingly, in one embodiment, an increase of glucose in a non-human organism, as compared to a corresponding non-transformed wild type non-human organism, is conferred in the process of the invention, if the activity of a polypeptide showing the activity of a eukaryotic translation initiation factor, or if the activity of the polypeptide At3g26400, preferably represented by SEQ ID NO. 68728, or a homolog or fragment thereof, or if the activity of a polypeptide encoded by a nucleic acid molecule comprising the nucleic acid SEQ ID NO. 68727, preferably the coding region thereof, or a homolog or fragment thereof, e.g. derived from Arabidopsis thaliana, is increased or generated. For example the activity of a nucleic acid molecule or a polypeptide comprising the nucleic acid, preferably the coding region thereof, or polypeptide or the consensus sequence or the polypeptide motif, as depicted in Table I, II or IV, application No. 17, column 5 or 8 in the respective same line as the nucleic acid molecule SEQ ID NO. 68727 or polypeptide SEQ ID NO. 68728, respectively, or a homolog or a fragment thereof, is increased or generated, or if the activity eukaryotic translation initiation factor is increased or generated in a non-human organism, like a microorganism or a plant cell, plant or part thereof, especially with non-targeted localization, whereby the respective line disclose in column 7 the fine chemical glucose. For example, an increase of the glucose of at least 1 percent, particularly in a range of 112 to 264-percent is conferred as compared to a corresponding non-transformed wild type non-human organism.

[87993] Accordingly, in one embodiment, an increase of raffinose in a non-human organism, as compared to a corresponding non-transformed wild type non-human organism, is conferred in the process of the invention, if the activity of a polypeptide showing the activity of a eukaryotic translation initiation factor, or if the activity of the polypeptide At3g26400, preferably represented by SEQ ID NO. 68728, or a homolog or fragment thereof, or if the activity of a polypeptide encoded by a nucleic acid molecule comprising the nucleic acid SEQ ID NO. 68727, preferably the coding region thereof, or a homolog or fragment thereof, e.g. derived from Arabidopsis thaliana, is increased or generated. For example the activity of a nucleic acid molecule or a polypeptide comprising the nucleic acid, preferably the coding region thereof, or polypeptide or the consensus sequence or the polypeptide motif, as depicted in Table I, II or IV, application No. 17, column 5 or 8 in the respective same line as the nucleic acid molecule SEQ ID NO. 68727 or polypeptide SEQ ID NO. 68728, respectively, or a homolog or a fragment thereof, is increased or generated, or if the activity eukaryotic translation initiation factor is increased or generated in a non-human organism, like a microorganism or a plant cell, plant or part thereof, especially with non-targeted localization, whereby the respective line disclose in column 7 the fine chemical raffinose. For example, an increase of the raffinose of at least 1 percent, particularly in a range of 89 to 129-percent is conferred as compared to a corresponding non-transformed wild type non-human organism.

[87994] Accordingly, in one embodiment, an increase of myo-inositol in a non-human organism, as compared to a corresponding non-transformed wild type non-human organism, is conferred in the process of the invention, if the activity of a polypeptide showing the activity of a mitogenactivated protein kinase, or if the activity of the polypeptide At3g59790, preferably represented by SEQ ID NO. 141759, or a homolog or fragment thereof, or if the activity of a polypeptide encoded by a nucleic acid molecule comprising the nucleic acid SEQ ID NO. 141758, preferably the coding region thereof, or a homolog or fragment thereof, e.g. derived from Arabidopsis thaliana, is increased or generated. For example the activity of a nucleic acid molecule or a polypeptide comprising the nucleic acid, preferably the coding region thereof, or polypeptide or the consensus sequence or the polypeptide motif, as depicted in Table I, II or IV, application No. 17, column 5 or 8 in the respective same line as the nucleic acid molecule SEQ ID NO. 141758 or polypeptide SEQ ID NO. 141759, respectively, or a homolog or a fragment thereof, is increased or generated, or if the activity mitogen-activated protein kinase is increased or generated in a non-human organism, like a microorganism or a plant cell, plant or part thereof, especially with non-targeted localization, whereby the respective line disclose in column 7 the fine chemical myo-inositol. For example, an increase of the myo-inositol of at least 1 percent, particularly in a range of 33 to 77-percent is conferred as compared to a corresponding non-transformed wild type non-human organism.

[87995] Accordingly, in one embodiment, an increase of sedoheptulose-7-phosphate in a non-human organism, as compared to a corresponding non-transformed wild type non-human organism, is conferred in the process of the invention, if the activity of a polypeptide showing the activity of a auxin response factor, or if the activity of the polypeptide At3g61830, preferably represented by SEQ ID NO. 2368, or a homolog or fragment thereof, or if the activity of a polypeptide encoded by a nucleic acid molecule comprising the nucleic acid SEQ ID NO. 2367, preferably the coding region thereof, or a homolog or fragment thereof, e.g. derived from Arabidopsis thaliana, is increased or generated. For example the activity of a nucleic acid molecule or a polypeptide comprising the nucleic acid, preferably the coding region thereof, or polypeptide or the consensus sequence or the polypeptide motif, as depicted in Table I, II or IV, application No. 17, column 5 or 8 in the respective same line as the nucleic acid molecule SEQ ID NO. 2367 or polypeptide SEQ ID NO. 2368, respectively, or a homolog or a fragment thereof, is increased or generated, or if the activity auxin response factor is increased or generated in a non-human organism, like a microorganism or a plant cell, plant or part thereof, especially with non-targeted localization, whereby the respective line disclose in column 7 the fine chemical sedoheptulose-7-phosphate. For example, an increase of the sedoheptulose-7-phosphate of at least 1 percent, particularly in a range of 54 to 87-percent is conferred as compared to a corresponding non-transformed wild type non-human organism.

[87996] Accordingly, in one embodiment, an increase of fructose in a non-human organism, as compared to a corresponding non-transformed wild type non-human organism, is conferred in the process of the invention, if the activity of a polypeptide showing the activity of a monthiol glutaredoxin, or if the activity of the polypeptide At3g62930, preferably represented by SEQ ID NO. 2574, or a homolog or fragment thereof, or if the activity of a polypeptide encoded by a nucleic acid molecule comprising the nucleic acid SEQ ID NO. 2573, preferably the coding region thereof, or a homolog or fragment thereof, e.g. derived from Arabidopsis thaliana, is increased or generated. For example the activity of a nucleic acid molecule or a polypeptide comprising the nucleic acid, preferably the coding region thereof, or polypeptide or the consensus sequence or the polypeptide motif, as depicted in Table I, II or IV, application No. 17, column 5 or 8 in the respective same line as the nucleic acid molecule SEQ ID NO. 2573 or polypeptide SEQ ID NO. 2574, respectively, or a homolog or a fragment thereof, is increased or generated, or if the activity monthiol glutaredoxin is increased or generated in a non-human organism, like a microorganism or a plant cell, plant or part thereof, especially with non-targeted localization, whereby the respective line disclose in column 7 the fine chemical fructose. For example, an increase of the fructose of at least 1 percent, particularly in a range of 194 to 4745-percent is conferred as compared to a corresponding non-transformed wild type non-human organism.

[87997] Accordingly, in one embodiment, an increase of glucose in a non-human organism, as compared to a corresponding non-transformed wild type non-human organism, is conferred in the process of the invention, if the activity of a polypeptide showing the activity of a monthiol glutaredoxin, or if the activity of the polypeptide At3g62930, preferably represented by SEQ ID NO. 2574, or a homolog or fragment thereof, or if the activity of a polypeptide encoded by a nucleic acid molecule comprising the nucleic acid SEQ ID NO. 2573, preferably the coding region thereof, or a homolog or fragment thereof, e.g. derived from Arabidopsis thaliana, is increased or generated. For example the activity of a nucleic acid molecule or a polypeptide comprising the nucleic acid, preferably the coding region thereof, or polypeptide or the consensus sequence or the polypeptide motif, as depicted in Table I, II or IV, application No. 17, column 5 or 8 in the respective same line as the nucleic acid molecule SEQ ID NO. 2573 or polypeptide SEQ ID NO. 2574, respectively, or a homolog or a fragment thereof, is increased or generated, or if the activity monthiol glutaredoxin is increased or generated in a non-human organism, like a microorganism or a plant cell, plant or part thereof, especially with non-targeted localization, whereby the respective line disclose in column 7 the fine chemical glucose. For example, an increase of the glucose of at least 1 percent, particularly in a range of 207 to 4142-percent is conferred as compared to a corresponding non-transformed wild type non-human organism.

[87998] Accordingly, in one embodiment, an increase of glucose-1-phosphate in a non-human organism, as compared to a corresponding non-transformed wild type non-human organism, is conferred in the process of the invention, if the activity of a polypeptide showing the activity of a monthiol glutaredoxin, or if the activity of the polypeptide At3g62930, preferably represented by SEQ ID NO. 2574, or a homolog or fragment thereof, or if the activity of a polypeptide encoded by a nucleic acid molecule comprising the nucleic acid SEQ ID NO. 2573, preferably the coding region thereof, or a homolog or fragment thereof, e.g. derived from Arabidopsis thaliana, is increased or generated. For example the activity of a nucleic acid molecule or a polypeptide comprising the nucleic acid, preferably the coding region thereof, or polypeptide or the consensus sequence or the polypeptide motif, as depicted in Table I, II or IV, application No. 17, column 5 or 8 in the respective same line as the nucleic acid molecule SEQ ID NO. 2573 or polypeptide SEQ ID NO. 2574, respectively, or a homolog or a fragment thereof, is increased or generated, or if the activity monthiol glutaredoxin is increased or generated in a non-human organism, like a microorganism or a plant cell, plant or part thereof, especially with non-targeted localization, whereby the respective line disclose in column 7 the fine chemical glucose-1-phosphate. For example, an increase of the glucose-1-phosphate of at least 1 percent, particularly in a range of 32 to 176-percent is conferred as compared to a corresponding non-transformed wild type non-human organism.

[87999] Accordingly, in one embodiment, an increase of myo-inositol in a non-human organism, as compared to a corresponding non-transformed wild type non-human organism, is conferred in the process of the invention, if the activity of a polypeptide showing the activity of a monthiol glutaredoxin, or if the activity of the polypeptide At3g62930, preferably represented by SEQ ID NO. 2574, or a homolog or fragment thereof, or if the activity of a polypeptide encoded by a nucleic acid molecule comprising the nucleic acid SEQ ID NO. 2573, preferably the coding region thereof, or a homolog or fragment thereof, e.g. derived from Arabidopsis thaliana, is increased or generated. For example the activity of a nucleic acid molecule or a polypeptide comprising the nucleic acid, preferably the coding region thereof, or polypeptide or the consensus sequence or the polypeptide motif, as depicted in Table I, II or IV, application No. 17, column 5 or 8 in the respective same line as the nucleic acid molecule SEQ ID NO. 2573 or polypeptide SEQ ID NO. 2574, respectively, or a homolog or a fragment thereof, is increased or generated, or if the activity monthiol glutaredoxin is increased or generated in a non-human organism, like a microorganism or a plant cell, plant or part thereof, especially with non-targeted localization, whereby the respective line disclose in column 7 the fine chemical myo-inositol. For example, an increase of the myo-inositol of at least 1 percent, particularly in a range of 36 to 118-percent is conferred as compared to a corresponding non-transformed wild type non-human organism.

[88000] Accordingly, in one embodiment, an increase of sedoheptulose-7-phosphate in a non-human organism, as compared to a corresponding non-transformed wild type non-human organism, is conferred in the process of the invention, if the activity of a polypeptide showing the activity of a monthiol glutaredoxin, or if the activity of the polypeptide At3g62930, preferably represented by SEQ ID NO. 2574, or a homolog or fragment thereof, or if the activity of a polypeptide encoded by a nucleic acid molecule comprising the nucleic acid SEQ ID NO. 2573, preferably the coding region thereof, or a homolog or fragment thereof, e.g. derived from Arabidopsis thaliana, is increased or generated. For example the activity of a nucleic acid molecule or a polypeptide comprising the nucleic acid, preferably the coding region thereof, or polypeptide or the consensus sequence or the polypeptide motif, as depicted in Table I, II or IV, application No. 17, column 5 or 8 in the respective same line as the nucleic acid molecule SEQ ID NO. 2573 or polypeptide SEQ ID NO. 2574, respectively, or a homolog or a fragment thereof, is increased or generated, or if the activity monthiol glutaredoxin is increased or generated in a non-human organism, like a microorganism or a plant cell, plant or part thereof, especially with non-targeted localization, whereby the respective line disclose in column 7 the fine chemical sedoheptulose-7-phosphate. For example, an increase of the sedoheptulose-7-phosphate of at least 1 percent, particularly in a range of 85 to 752-percent is conferred as compared to a corresponding non-transformed wild type non-human organism.

[88001] Accordingly, in one embodiment, an increase of sucrose in a non-human organism, as compared to a corresponding non-transformed wild type non-human organism, is conferred in the process of the invention, if the activity of a polypeptide showing the activity of a monthiol glutaredoxin, or if the activity of the polypeptide At3g62930, preferably represented by SEQ ID NO. 2574, or a homolog or fragment thereof, or if the activity of a polypeptide encoded by a nucleic acid molecule comprising the nucleic acid SEQ ID NO. 2573, preferably the coding region thereof, or a homolog or fragment thereof, e.g. derived from Arabidopsis thaliana, is increased or generated. For example the activity of a nucleic acid molecule or a polypeptide comprising the nucleic acid, preferably the coding region thereof, or polypeptide or the consensus sequence or the polypeptide motif, as depicted in Table I, II or IV, application No. 17, column 5 or 8 in the respective same line as the nucleic acid molecule SEQ ID NO. 2573 or polypeptide SEQ ID NO. 2574, respectively, or a homolog or a fragment thereof, is increased or generated, or if the activity monthiol glutaredoxin is increased or generated in a non-human organism, like a microorganism or a plant cell, plant or part thereof, especially with non-targeted localization, whereby the respective line disclose in column 7 the fine chemical sucrose. For example, an increase of the sucrose of at least 1 percent, particularly in a range of 58 to 129-percent is conferred as compared to a corresponding non-transformed wild type non-human organism.

[88002] Accordingly, in one embodiment, an increase of fructose in a non-human organism, as compared to a corresponding non-transformed wild type non-human organism, is conferred in the process of the invention, if the activity of a polypeptide showing the activity of a glutaredoxin, or if the activity of the polypeptide At3g62950, preferably represented by SEQ ID NO. 2936, or a homolog or fragment thereof, or if the activity of a polypeptide encoded by a nucleic acid molecule comprising the nucleic acid SEQ ID NO. 2935, preferably the coding region thereof, or a homolog or fragment thereof, e.g. derived from Arabidopsis thaliana, is increased or generated. For example the activity of a nucleic acid molecule or a polypeptide comprising the nucleic acid, preferably the coding region thereof, or polypeptide or the consensus sequence or the polypeptide motif, as depicted in Table I, II or IV, application No. 17, column 5 or 8 in the respective same line as the nucleic acid molecule SEQ ID NO. 2935 or polypeptide SEQ ID NO. 2936, respectively, or a homolog or a fragment thereof, is increased or generated, or if the activity glutaredoxin is increased or generated in a non-human organism, like a microorganism or a plant cell, plant or part thereof, especially with non-targeted localization, whereby the respective line disclose in column 7 the fine chemical fructose. For example, an increase of the fructose of at least 1 percent, particularly in a range of 623 to 3749-percent is conferred as compared to a corresponding non-transformed wild type non-human organism.

[88003] Accordingly, in one embodiment, an increase of glucose in a non-human organism, as compared to a corresponding non-transformed wild type non-human organism, is conferred in the process of the invention, if the activity of a polypeptide showing the activity of a glutaredoxin, or if the activity of the polypeptide At3g62950, preferably represented by SEQ ID NO. 2936, or a homolog or fragment thereof, or if the activity of a polypeptide encoded by a nucleic acid molecule comprising the nucleic acid SEQ ID NO. 2935, preferably the coding region thereof, or a homolog or fragment thereof, e.g. derived from Arabidopsis thaliana, is increased or generated. For example the activity of a nucleic acid molecule or a polypeptide comprising the nucleic acid, preferably the coding region thereof, or polypeptide or the consensus sequence or the polypeptide motif, as depicted in Table I, II or IV, application No. 17, column 5 or 8 in the respective same line as the nucleic acid molecule SEQ ID NO. 2935 or polypeptide SEQ ID NO. 2936, respectively, or a homolog or a fragment thereof, is increased or generated, or if the activity glutaredoxin is increased or generated in a non-human organism, like a microorganism or a plant cell, plant or part thereof, especially with non-targeted localization, whereby the respective line disclose in column 7 the fine chemical glucose. For example, an increase of the glucose of at least 1 percent, particularly in a range of 867 to 3374-percent is conferred as compared to a corresponding non-transformed wild type non-human organism.

[88004] Accordingly, in one embodiment, an increase of glucose-1-phosphate in a non-human organism, as compared to a corresponding non-transformed wild type non-human organism, is conferred in the process of the invention, if the activity of a polypeptide showing the activity of a glutaredoxin, or if the activity of the polypeptide At3g62950, preferably represented by SEQ ID NO. 2936, or a homolog or fragment thereof, or if the activity of a polypeptide encoded by a nucleic acid molecule comprising the nucleic acid SEQ ID NO. 2935, preferably the coding region thereof, or a homolog or fragment thereof, e.g. derived from Arabidopsis thaliana, is increased or generated. For example the activity of a nucleic acid molecule or a polypeptide comprising the nucleic acid, preferably the coding region thereof, or polypeptide or the consensus sequence or the polypeptide motif, as depicted in Table I, II or IV, application No. 17, column 5 or 8 in the respective same line as the nucleic acid molecule SEQ ID NO. 2935 or polypeptide SEQ ID NO. 2936, respectively, or a homolog or a fragment thereof, is increased or generated, or if the activity glutaredoxin is increased or generated in a non-human organism, like a microorganism or a plant cell, plant or part thereof, especially with non-targeted localization, whereby the respective line disclose in column 7 the fine chemical glucose-1-phosphate. For example, an increase of the glucose-1-phosphate of at least 1 percent, particularly in a range of 31 to 141-percent is conferred as compared to a corresponding non-transformed wild type non-human organism.

[88005] Accordingly, in one embodiment, an increase of myo-inositol in a non-human organism, as compared to a corresponding non-transformed wild type non-human organism, is conferred in the process of the invention, if the activity of a polypeptide showing the activity of a glutaredoxin, or if the activity of the polypeptide At3g62950, preferably represented by SEQ ID NO. 2936, or a homolog or fragment thereof, or if the activity of a polypeptide encoded by a nucleic acid molecule comprising the nucleic acid SEQ ID NO. 2935, preferably the coding region thereof, or a homolog or fragment thereof, e.g. derived from Arabidopsis thaliana, is increased or generated. For example the activity of a nucleic acid molecule or a polypeptide comprising the nucleic acid, preferably the coding region thereof, or polypeptide or the consensus sequence or the polypeptide motif, as depicted in Table I, II or IV, application No. 17, column 5 or 8 in the respective same line as the nucleic acid molecule SEQ ID NO. 2935 or polypeptide SEQ ID NO. 2936, respectively, or a homolog or a fragment thereof, is increased or generated, or if the activity glutaredoxin is increased or generated in a non-human organism, like a microorganism or a plant cell, plant or part thereof, especially with non-targeted localization, whereby the respective line disclose in column 7 the fine chemical myo-inositol. For example, an increase of the myo-inositol of at least 1 percent, particularly in a range of 46 to 95-percent is conferred as compared to a corresponding non-transformed wild type non-human organism.

[88006] Accordingly, in one embodiment, an increase of sedoheptulose-7-phosphate in a non-human organism, as compared to a corresponding non-transformed wild type non-human organism, is conferred in the process of the invention, if the activity of a polypeptide showing the activity of a glutaredoxin, or if the activity of the polypeptide At3g62950, preferably represented by SEQ ID NO. 2936, or a homolog or fragment thereof, or if the activity of a polypeptide encoded by a nucleic acid molecule comprising the nucleic acid SEQ ID NO. 2935, preferably the coding region thereof, or a homolog or fragment thereof, e.g. derived from Arabidopsis thaliana, is increased or generated. For example the activity of a nucleic acid molecule or a polypeptide comprising the nucleic acid, preferably the coding region thereof, or polypeptide or the consensus sequence or the polypeptide motif, as depicted in Table I, II or IV, application No. 17, column 5 or 8 in the respective same line as the nucleic acid molecule SEQ ID NO. 2935 or polypeptide SEQ ID NO. 2936, respectively, or a homolog or a fragment thereof, is increased or generated, or if the activity glutaredoxin is increased or generated in a non-human organism, like a microorganism or a plant cell, plant or part thereof, especially with non-targeted localization, whereby the respective line disclose in column 7 the fine chemical sedoheptulose-7-phosphate. For example, an increase of the sedoheptulose-7-phosphate of at least 1 percent, particularly in a range of 167 to 848-percent is conferred as compared to a corresponding non-transformed wild type non-human organism.

[88007] Accordingly, in one embodiment, an increase of sucrose in a non-human organism, as compared to a corresponding non-transformed wild type non-human organism, is conferred in the process of the invention, if the activity of a polypeptide showing the activity of a glutaredoxin, or if the activity of the polypeptide At3g62950, preferably represented by SEQ ID NO. 2936, or a homolog or fragment thereof, or if the activity of a polypeptide encoded by a nucleic acid molecule comprising the nucleic acid SEQ ID NO. 2935, preferably the coding region thereof, or a homolog or fragment thereof, e.g. derived from Arabidopsis thaliana, is increased or generated. For example the activity of a nucleic acid molecule or a polypeptide comprising the nucleic acid, preferably the coding region thereof, or polypeptide or the consensus sequence or the polypeptide motif, as depicted in Table I, II or IV, application No. 17, column 5 or 8 in the respective same line as the nucleic acid molecule SEQ ID NO. 2935 or polypeptide SEQ ID NO. 2936, respectively, or a homolog or a fragment thereof, is increased or generated, or if the activity glutaredoxin is increased or generated in a non-human organism, like a microorganism or a plant cell, plant or part thereof, especially with non-targeted localization, whereby the respective line disclose in column 7 the fine chemical sucrose. For example, an increase of the sucrose of at least 1 percent, particularly in a range of 49 to 114-percent is conferred as compared to a corresponding non-transformed wild type non-human organism.

[88008] Accordingly, in one embodiment, an increase of glucose-1-phosphate in a non-human organism, as compared to a corresponding non-transformed wild type non-human organism, is conferred in the process of the invention, if the activity of a polypeptide showing the activity of a transcription factor, or if the activity of the polypeptide At4g09960, preferably represented by SEQ ID NO. 109718, or a homolog or fragment thereof, or if the activity of a polypeptide encoded by a nucleic acid molecule comprising the nucleic acid SEQ ID NO. 109717, preferably the coding region thereof, or a homolog or fragment thereof, e.g. derived from Arabidopsis thaliana, is increased or generated. For example the activity of a nucleic acid molecule or a polypeptide comprising the nucleic acid, preferably the coding region thereof, or polypeptide or the consensus sequence or the polypeptide motif, as depicted in Table I, II or IV, application No. 17, column 5 or 8 in the respective same line as the nucleic acid molecule SEQ ID NO. 109717 or polypeptide SEQ ID NO. 109718, respectively, or a homolog or a fragment thereof, is increased or generated, or if the activity transcription factor is increased or generated in a non-human organism, like a microorganism or a plant cell, plant or part thereof, especially with non-targeted localization, whereby the respective line disclose in column 7 the fine chemical glucose-1-phosphate. For example, an increase of the glucose-1-phosphate of at least 1 percent, particularly in a range of 18 to 53-percent is conferred as compared to a corresponding non-transformed wild type non-human organism.

[88009] Accordingly, in one embodiment, an increase of fructose in a non-human organism, as compared to a corresponding non-transformed wild type non-human organism, is conferred in the process of the invention, if the activity of a polypeptide showing the activity of a monothiol glutaredoxin, or if the activity of the polypeptide At4g15660, preferably represented by SEQ ID NO. 23483, or a homolog or fragment thereof, or if the activity of a polypeptide encoded by a nucleic acid molecule comprising the nucleic acid SEQ ID NO. 23482, preferably the coding region thereof, or a homolog or fragment thereof, e.g. derived from Arabidopsis thaliana, is increased or generated. For example the activity of a nucleic acid molecule or a polypeptide comprising the nucleic acid, preferably the coding region thereof, or polypeptide or the consensus sequence or the polypeptide motif, as depicted in Table I, II or IV, application No. 17, column 5 or 8 in the respective same line as the nucleic acid molecule SEQ ID NO. 23482 or polypeptide SEQ ID NO. 23483, respectively, or a homolog or a fragment thereof, is increased or generated, or if the activity monothiol glutaredoxin is increased or generated in a non-human organism, like a microorganism or a plant cell, plant or part thereof, especially with non-targeted localization, whereby the respective line disclose in column 7 the fine chemical fructose. For example, an increase of the fructose of at least 1 percent, particularly in a range of 321 to 3175-percent is conferred as compared to a corresponding non-transformed wild type non-human organism.

[88010] Accordingly, in one embodiment, an increase of glucose in a non-human organism, as compared to a corresponding non-transformed wild type non-human organism, is conferred in the process of the invention, if the activity of a polypeptide showing the activity of a monothiol glutaredoxin, or if the activity of the polypeptide At4g15660, preferably represented by SEQ ID NO. 23483, or a homolog or fragment thereof, or if the activity of a polypeptide encoded by a nucleic acid molecule comprising the nucleic acid SEQ ID NO. 23482, preferably the coding region thereof, or a homolog or fragment thereof, e.g. derived from Arabidopsis thaliana, is increased or generated. For example the activity of a nucleic acid molecule or a polypeptide comprising the nucleic acid, preferably the coding region thereof, or polypeptide or the consensus sequence or the polypeptide motif, as depicted in Table I, II or IV, application No. 17, column 5 or 8 in the respective same line as the nucleic acid molecule SEQ ID NO. 23482 or polypeptide SEQ ID NO. 23483, respectively, or a homolog or a fragment thereof, is increased or generated, or if the activity monothiol glutaredoxin is increased or generated in a non-human organism, like a microorganism or a plant cell, plant or part thereof, especially with non-targeted localization, whereby the respective line disclose in column 7 the fine chemical glucose. For example, an increase of the glucose of at least 1 percent, particularly in a range of 231 to 2124-percent is conferred as compared to a corresponding non-transformed wild type non-human organism.

[88011] Accordingly, in one embodiment, an increase of glucose-1-phosphate in a non-human organism, as compared to a corresponding non-transformed wild type non-human organism, is conferred in the process of the invention, if the activity of a polypeptide showing the activity of a monothiol glutaredoxin, or if the activity of the polypeptide At4g15660, preferably represented by SEQ ID NO. 23483, or a homolog or fragment thereof, or if the activity of a polypeptide encoded by a nucleic acid molecule comprising the nucleic acid SEQ ID NO. 23482, preferably the coding region thereof, or a homolog or fragment thereof, e.g. derived from Arabidopsis thaliana, is increased or generated. For example the activity of a nucleic acid molecule or a polypeptide comprising the nucleic acid, preferably the coding region thereof, or polypeptide or the consensus sequence or the polypeptide motif, as depicted in Table I, II or IV, application No. 17, column 5 or 8 in the respective same line as the nucleic acid molecule SEQ ID NO. 23482 or polypeptide SEQ ID NO. 23483, respectively, or a homolog or a fragment thereof, is increased or generated, or if the activity monothiol glutaredoxin is increased or generated in a non-human organism, like a microorganism or a plant cell, plant or part thereof, especially with non-targeted localization, whereby the respective line disclose in column 7 the fine chemical glucose-1-phosphate. For example, an increase of the glucose-1-phosphate of at least 1 percent, particularly in a range of 107 to 199-percent is conferred as compared to a corresponding non-transformed wild type non-human organism.

[88012] Accordingly, in one embodiment, an increase of myo-inositol in a non-human organism, as compared to a corresponding non-transformed wild type non-human organism, is conferred in the process of the invention, if the activity of a polypeptide showing the activity of a monothiol glutaredoxin, or if the activity of the polypeptide At4g15660, preferably represented by SEQ ID NO. 23483, or a homolog or fragment thereof, or if the activity of a polypeptide encoded by a nucleic acid molecule comprising the nucleic acid SEQ ID NO. 23482, preferably the coding region thereof, or a homolog or fragment thereof, e.g. derived from Arabidopsis thaliana, is increased or generated. For example the activity of a nucleic acid molecule or a polypeptide comprising the nucleic acid, preferably the coding region thereof, or polypeptide or the consensus sequence or the polypeptide motif, as depicted in Table I, II or IV, application No. 17, column 5 or 8 in the respective same line as the nucleic acid molecule SEQ ID NO. 23482 or polypeptide SEQ ID NO. 23483, respectively, or a homolog or a fragment thereof, is increased or generated, or if the activity monothiol glutaredoxin is increased or generated in a non-human organism, like a microorganism or a plant cell, plant or part thereof, especially with non-targeted localization, whereby the respective line disclose in column 7 the fine chemical myo-inositol. For example, an increase of the myo-inositol of at least 1 percent, particularly in a range of 97 to 241-percent is conferred as compared to a corresponding non-transformed wild type non-human organism.

[88013] Accordingly, in one embodiment, an increase of sedoheptulose-7-phosphate in a non-human organism, as compared to a corresponding non-transformed wild type non-human organism, is conferred in the process of the invention, if the activity of a polypeptide showing the activity of a monothiol glutaredoxin, or if the activity of the polypeptide At4g15660, preferably represented by SEQ ID NO. 23483, or a homolog or fragment thereof, or if the activity of a polypeptide encoded by a nucleic acid molecule comprising the nucleic acid SEQ ID NO. 23482, preferably the coding region thereof, or a homolog or fragment thereof, e.g. derived from Arabidopsis thaliana, is increased or generated. For example the activity of a nucleic acid molecule or a polypeptide comprising the nucleic acid, preferably the coding region thereof, or polypeptide or the consensus sequence or the polypeptide motif, as depicted in Table I, II or IV, application No. 17, column 5 or 8 in the respective same line as the nucleic acid molecule SEQ ID NO. 23482 or polypeptide SEQ ID NO. 23483, respectively, or a homolog or a fragment thereof, is increased or generated, or if the activity monothiol glutaredoxin is increased or generated in a non-human organism, like a microorganism or a plant cell, plant or part thereof, especially with non-targeted localization, whereby the respective line disclose in column 7 the fine chemical sedoheptulose7-phosphate. For example, an increase of the sedoheptulose-7-phosphate of at least 1 percent, particularly in a range of 183 to 692-percent is conferred as compared to a corresponding non-transformed wild type non-human organism.

[88014] Accordingly, in one embodiment, an increase of sucrose in a non-human organism, as compared to a corresponding non-transformed wild type non-human organism, is conferred in the process of the invention, if the activity of a polypeptide showing the activity of a monothiol glutaredoxin, or if the activity of the polypeptide At4g15660, preferably represented by SEQ ID NO. 23483, or a homolog or fragment thereof, or if the activity of a polypeptide encoded by a nucleic acid molecule comprising the nucleic acid SEQ ID NO. 23482, preferably the coding region thereof, or a homolog or fragment thereof, e.g. derived from Arabidopsis thaliana, is increased or generated. For example the activity of a nucleic acid molecule or a polypeptide comprising the nucleic acid, preferably the coding region thereof, or polypeptide or the consensus sequence or the polypeptide motif, as depicted in Table I, II or IV, application No. 17, column 5 or 8 in the respective same line as the nucleic acid molecule SEQ ID NO. 23482 or polypeptide SEQ ID NO. 23483, respectively, or a homolog or a fragment thereof, is increased or generated, or if the activity monothiol glutaredoxin is increased or generated in a non-human organism, like a microorganism or a plant cell, plant or part thereof, especially with non-targeted localization, whereby the respective line disclose in column 7 the fine chemical sucrose. For example, an increase of the sucrose of at least 1 percent, particularly in a range of 41 to 106-percent is conferred as compared to a corresponding non-transformed wild type non-human organism.

[88015] Accordingly, in one embodiment, an increase of fructose in a non-human organism, as compared to a corresponding non-transformed wild type non-human organism, is conferred in the process of the invention, if the activity of a polypeptide showing the activity of a monothiol glutaredoxin, or if the activity of the polypeptide At4g15670, preferably represented by SEQ ID NO. 3280, or a homolog or fragment thereof, or if the activity of a polypeptide encoded by a nucleic acid molecule comprising the nucleic acid SEQ ID NO. 3279, preferably the coding region thereof, or a homolog or fragment thereof, e.g. derived from Arabidopsis thaliana, is increased or generated. For example the activity of a nucleic acid molecule or a polypeptide comprising the nucleic acid, preferably the coding region thereof, or polypeptide or the consensus sequence or the polypeptide motif, as depicted in Table I, II or IV, application No. 17, column 5 or 8 in the respective same line as the nucleic acid molecule SEQ ID NO. 3279 or polypeptide SEQ ID NO. 3280, respectively, or a homolog or a fragment thereof, is increased or generated, or if the activity monothiol glutaredoxin is increased or generated in a non-human organism, like a microorganism or a plant cell, plant or part thereof, especially with non-targeted localization, whereby the respective line disclose in column 7 the fine chemical fructose. For example, an increase of the fructose of at least 1 percent, particularly in a range of 624 to 6054-percent is conferred as compared to a corresponding non-transformed wild type non-human organism.

[88016] Accordingly, in one embodiment, an increase of glucose in a non-human organism, as compared to a corresponding non-transformed wild type non-human organism, is conferred in the process of the invention, if the activity of a polypeptide showing the activity of a monothiol glutaredoxin, or if the activity of the polypeptide At4g15670, preferably represented by SEQ ID NO. 3280, or a homolog or fragment thereof, or if the activity of a polypeptide encoded by a nucleic acid molecule comprising the nucleic acid SEQ ID NO. 3279, preferably the coding region thereof, or a homolog or fragment thereof, e.g. derived from Arabidopsis thaliana, is increased or generated. For example the activity of a nucleic acid molecule or a polypeptide comprising the nucleic acid, preferably the coding region thereof, or polypeptide or the consensus sequence or the polypeptide motif, as depicted in Table I, II or IV, application No. 17, column 5 or 8 in the respective same line as the nucleic acid molecule SEQ ID NO. 3279 or polypeptide SEQ ID NO. 3280, respectively, or a homolog or a fragment thereof, is increased or generated, or if the activity monothiol glutaredoxin is increased or generated in a non-human organism, like a microorganism or a plant cell, plant or part thereof, especially with non-targeted localization, whereby the respective line disclose in column 7 the fine chemical glucose. For example, an increase of the glucose of at least 1 percent, particularly in a range of 156 to 1091-percent is conferred as compared to a corresponding non-transformed wild type non-human organism.

[88017] Accordingly, in one embodiment, an increase of glucose-1-phosphate in a non-human organism, as compared to a corresponding non-transformed wild type non-human organism, is conferred in the process of the invention, if the activity of a polypeptide showing the activity of a monothiol glutaredoxin, or if the activity of the polypeptide At4g15670, preferably represented by SEQ ID NO. 3280, or a homolog or fragment thereof, or if the activity of a polypeptide encoded by a nucleic acid molecule comprising the nucleic acid SEQ ID NO. 3279, preferably the coding region thereof, or a homolog or fragment thereof, e.g. derived from Arabidopsis thaliana, is increased or generated. For example the activity of a nucleic acid molecule or a polypeptide comprising the nucleic acid, preferably the coding region thereof, or polypeptide or the consensus sequence or the polypeptide motif, as depicted in Table I, II or IV, application No. 17, column 5 or 8 in the respective same line as the nucleic acid molecule SEQ ID NO. 3279 or polypeptide SEQ ID NO. 3280, respectively, or a homolog or a fragment thereof, is increased or generated, or if the activity monothiol glutaredoxin is increased or generated in a non-human organism, like a microorganism or a plant cell, plant or part thereof, especially with non-targeted localization, whereby the respective line disclose in column 7 the fine chemical glucose-1-phosphate. For example, an increase of the glucose-1-phosphate of at least 1 percent, particularly in a range of 124 to 251-percent is conferred as compared to a corresponding non-transformed wild type non-human organism.

[88018] Accordingly, in one embodiment, an increase of myo-inositol in a non-human organism, as compared to a corresponding non-transformed wild type non-human organism, is conferred in the process of the invention, if the activity of a polypeptide showing the activity of a monothiol glutaredoxin, or if the activity of the polypeptide At4g15670, preferably represented by SEQ ID NO. 3280, or a homolog or fragment thereof, or if the activity of a polypeptide encoded by a nucleic acid molecule comprising the nucleic acid SEQ ID NO. 3279, preferably the coding region thereof, or a homolog or fragment thereof, e.g. derived from Arabidopsis thaliana, is increased or generated. For example the activity of a nucleic acid molecule or a polypeptide comprising the nucleic acid, preferably the coding region thereof, or polypeptide or the consensus sequence or the polypeptide motif, as depicted in Table I, II or IV, application No. 17, column 5 or 8 in the respective same line as the nucleic acid molecule SEQ ID NO. 3279 or polypeptide SEQ ID NO. 3280, respectively, or a homolog or a fragment thereof, is increased or generated, or if the activity monothiol glutaredoxin is increased or generated in a non-human organism, like a microorganism or a plant cell, plant or part thereof, especially with non-targeted localization, whereby the respective line disclose in column 7 the fine chemical myo-inositol. For example, an increase of the myo-inositol of at least 1 percent, particularly in a range of 123 to 337-percent is conferred as compared to a corresponding non-transformed wild type non-human organism.

[88019] Accordingly, in one embodiment, an increase of sedoheptulose-7-phosphate in a non-human organism, as compared to a corresponding non-transformed wild type non-human organism, is conferred in the process of the invention, if the activity of a polypeptide showing the activity of a monothiol glutaredoxin, or if the activity of the polypeptide At4g15670, preferably represented by SEQ ID NO. 3280, or a homolog or fragment thereof, or if the activity of a polypeptide encoded by a nucleic acid molecule comprising the nucleic acid SEQ ID NO. 3279, preferably the coding region thereof, or a homolog or fragment thereof, e.g. derived from Arabidopsis thaliana, is increased or generated. For example the activity of a nucleic acid molecule or a polypeptide comprising the nucleic acid, preferably the coding region thereof, or polypeptide or the consensus sequence or the polypeptide motif, as depicted in Table I, II or IV, application No. 17, column 5 or 8 in the respective same line as the nucleic acid molecule SEQ ID NO. 3279 or polypeptide SEQ ID NO. 3280, respectively, or a homolog or a fragment thereof, is increased or generated, or if the activity monothiol glutaredoxin is increased or generated in a non-human organism, like a microorganism or a plant cell, plant or part thereof, especially with non-targeted localization, whereby the respective line disclose in column 7 the fine chemical sedoheptulose7-phosphate. For example, an increase of the sedoheptulose-7-phosphate of at least 1 percent, particularly in a range of 82 to 1306-percent is conferred as compared to a corresponding non-transformed wild type non-human organism.

[88020] Accordingly, in one embodiment, an increase of sucrose in a non-human organism, as compared to a corresponding non-transformed wild type non-human organism, is conferred in the process of the invention, if the activity of a polypeptide showing the activity of a monothiol glutaredoxin, or if the activity of the polypeptide At4g15670, preferably represented by SEQ ID NO. 3280, or a homolog or fragment thereof, or if the activity of a polypeptide encoded by a nucleic acid molecule comprising the nucleic acid SEQ ID NO. 3279, preferably the coding region thereof, or a homolog or fragment thereof, e.g. derived from Arabidopsis thaliana, is increased or generated. For example the activity of a nucleic acid molecule or a polypeptide comprising the nucleic acid, preferably the coding region thereof, or polypeptide or the consensus sequence or the polypeptide motif, as depicted in Table I, II or IV, application No. 17, column 5 or 8 in the respective same line as the nucleic acid molecule SEQ ID NO. 3279 or polypeptide SEQ ID NO. 3280, respectively, or a homolog or a fragment thereof, is increased or generated, or if the activity monothiol glutaredoxin is increased or generated in a non-human organism, like a microorganism or a plant cell, plant or part thereof, especially with non-targeted localization, whereby the respective line disclose in column 7 the fine chemical sucrose. For example, an increase of the sucrose of at least 1 percent, particularly in a range of 38 to 91-percent is conferred as compared to a corresponding non-transformed wild type non-human organism.

[88021] Accordingly, in one embodiment, an increase of fructose in a non-human organism, as compared to a corresponding non-transformed wild type non-human organism, is conferred in the process of the invention, if the activity of a polypeptide showing the activity of a monothiol glutaredoxin, or if the activity of the polypeptide At4g15690, preferably represented by SEQ ID NO. 23845, or a homolog or fragment thereof, or if the activity of a polypeptide encoded by a nucleic acid molecule comprising the nucleic acid SEQ ID NO. 23844, preferably the coding region thereof, or a homolog or fragment thereof, e.g. derived from Arabidopsis thaliana, is increased or generated. For example the activity of a nucleic acid molecule or a polypeptide comprising the nucleic acid, preferably the coding region thereof, or polypeptide or the consensus sequence or the polypeptide motif, as depicted in Table I, II or IV, application No. 17, column 5 or 8 in the respective same line as the nucleic acid molecule SEQ ID NO. 23844 or polypeptide SEQ ID NO. 23845, respectively, or a homolog or a fragment thereof, is increased or generated, or if the activity monothiol glutaredoxin is increased or generated in a non-human organism, like a microorganism or a plant cell, plant or part thereof, especially with non-targeted localization, whereby the respective line disclose in column 7 the fine chemical fructose. For example, an increase of the fructose of at least 1 percent, particularly in a range of 100 to 2161-percent is conferred as compared to a corresponding non-transformed wild type non-human organism.

[88022] Accordingly, in one embodiment, an increase of glucose in a non-human organism, as compared to a corresponding non-transformed wild type non-human organism, is conferred in the process of the invention, if the activity of a polypeptide showing the activity of a monothiol glutaredoxin, or if the activity of the polypeptide At4g15690, preferably represented by SEQ ID NO. 23845, or a homolog or fragment thereof, or if the activity of a polypeptide encoded by a nucleic acid molecule comprising the nucleic acid SEQ ID NO. 23844, preferably the coding region thereof, or a homolog or fragment thereof, e.g. derived from Arabidopsis thaliana, is increased or generated. For example the activity of a nucleic acid molecule or a polypeptide comprising the nucleic acid, preferably the coding region thereof, or polypeptide or the consensus sequence or the polypeptide motif, as depicted in Table I, II or IV, application No. 17, column 5 or 8 in the respective same line as the nucleic acid molecule SEQ ID NO. 23844 or polypeptide SEQ ID NO. 23845, respectively, or a homolog or a fragment thereof, is increased or generated, or if the activity monothiol glutaredoxin is increased or generated in a non-human organism, like a microorganism or a plant cell, plant or part thereof, especially with non-targeted localization, whereby the respective line disclose in column 7 the fine chemical glucose. For example, an increase of the glucose of at least 1 percent, particularly in a range of 98 to 1660-percent is conferred as compared to a corresponding non-transformed wild type non-human organism.

[88023] Accordingly, in one embodiment, an increase of glucose-1-phosphate in a non-human organism, as compared to a corresponding non-transformed wild type non-human organism, is conferred in the process of the invention, if the activity of a polypeptide showing the activity of a monothiol glutaredoxin, or if the activity of the polypeptide At4g15690, preferably represented by SEQ ID NO. 23845, or a homolog or fragment thereof, or if the activity of a polypeptide encoded by a nucleic acid molecule comprising the nucleic acid SEQ ID NO. 23844, preferably the coding region thereof, or a homolog or fragment thereof, e.g. derived from Arabidopsis thaliana, is increased or generated. For example the activity of a nucleic acid molecule or a polypeptide comprising the nucleic acid, preferably the coding region thereof, or polypeptide or the consensus sequence or the polypeptide motif, as depicted in Table I, II or IV, application No. 17, column 5 or 8 in the respective same line as the nucleic acid molecule SEQ ID NO. 23844 or polypeptide SEQ ID NO. 23845, respectively, or a homolog or a fragment thereof, is increased or generated, or if the activity monothiol glutaredoxin is increased or generated in a non-human organism, like a microorganism or a plant cell, plant or part thereof, especially with non-targeted localization, whereby the respective line disclose in column 7 the fine chemical glucose-1-phosphate. For example, an increase of the glucose-1-phosphate of at least 1 percent, particularly in a range of 49 to 103-percent is conferred as compared to a corresponding non-transformed wild type non-human organism.

[88024] Accordingly, in one embodiment, an increase of myo-inositol in a non-human organism, as compared to a corresponding non-transformed wild type non-human organism, is conferred in the process of the invention, if the activity of a polypeptide showing the activity of a monothiol glutaredoxin, or if the activity of the polypeptide At4g15690, preferably represented by SEQ ID NO. 23845, or a homolog or fragment thereof, or if the activity of a polypeptide encoded by a nucleic acid molecule comprising the nucleic acid SEQ ID NO. 23844, preferably the coding region thereof, or a homolog or fragment thereof, e.g. derived from Arabidopsis thaliana, is increased or generated. For example the activity of a nucleic acid molecule or a polypeptide comprising the nucleic acid, preferably the coding region thereof, or polypeptide or the consensus sequence or the polypeptide motif, as depicted in Table I, II or IV, application No. 17, column 5 or 8 in the respective same line as the nucleic acid molecule SEQ ID NO. 23844 or polypeptide SEQ ID NO. 23845, respectively, or a homolog or a fragment thereof, is increased or generated, or if the activity monothiol glutaredoxin is increased or generated in a non-human organism, like a microorganism or a plant cell, plant or part thereof, especially with non-targeted localization, whereby the respective line disclose in column 7 the fine chemical myo-inositol. For example, an increase of the myo-inositol of at least 1 percent, particularly in a range of 50 to 145-percent is conferred as compared to a corresponding non-transformed wild type non-human organism.

[88025] Accordingly, in one embodiment, an increase of sucrose in a non-human organism, as compared to a corresponding non-transformed wild type non-human organism, is conferred in the process of the invention, if the activity of a polypeptide showing the activity of a monothiol glutaredoxin, or if the activity of the polypeptide At4g15690, preferably represented by SEQ ID NO. 23845, or a homolog or fragment thereof, or if the activity of a polypeptide encoded by a nucleic acid molecule comprising the nucleic acid SEQ ID NO. 23844, preferably the coding region thereof, or a homolog or fragment thereof, e.g. derived from Arabidopsis thaliana, is increased or generated. For example the activity of a nucleic acid molecule or a polypeptide comprising the nucleic acid, preferably the coding region thereof, or polypeptide or the consensus sequence or the polypeptide motif, as depicted in Table I, II or IV, application No. 17, column 5 or 8 in the respective same line as the nucleic acid molecule SEQ ID NO. 23844 or polypeptide SEQ ID NO. 23845, respectively, or a homolog or a fragment thereof, is increased or generated, or if the activity monothiol glutaredoxin is increased or generated in a non-human organism, like a microorganism or a plant cell, plant or part thereof, especially with non-targeted localization, whereby the respective line disclose in column 7 the fine chemical sucrose. For example, an increase of the sucrose of at least 1 percent, particularly in a range of 34 to 69-percent is conferred as compared to a corresponding non-transformed wild type non-human organism.

[88026] Accordingly, in one embodiment, an increase of fructose in a non-human organism, as compared to a corresponding non-transformed wild type non-human organism, is conferred in the process of the invention, if the activity of a polypeptide showing the activity of a monothiol glutaredoxin, or if the activity of the polypeptide At4g15700, preferably represented by SEQ ID NO. 3655, or a homolog or fragment thereof, or if the activity of a polypeptide encoded by a nucleic acid molecule comprising the nucleic acid SEQ ID NO. 3654, preferably the coding region thereof, or a homolog or fragment thereof, e.g. derived from Arabidopsis thaliana, is increased or generated. For example the activity of a nucleic acid molecule or a polypeptide comprising the nucleic acid, preferably the coding region thereof, or polypeptide or the consensus sequence or the polypeptide motif, as depicted in Table I, II or IV, application No. 17, column 5 or 8 in the respective same line as the nucleic acid molecule SEQ ID NO. 3654 or polypeptide SEQ ID NO. 3655, respectively, or a homolog or a fragment thereof, is increased or generated, or if the activity monothiol glutaredoxin is increased or generated in a non-human organism, like a microorganism or a plant cell, plant or part thereof, especially with non-targeted localization, whereby the respective line disclose in column 7 the fine chemical fructose. For example, an increase of the fructose of at least 1 percent, particularly in a range of 722 to 1818-percent is conferred as compared to a corresponding non-transformed wild type non-human organism.

[88027] Accordingly, in one embodiment, an increase of glucose in a non-human organism, as compared to a corresponding non-transformed wild type non-human organism, is conferred in the process of the invention, if the activity of a polypeptide showing the activity of a monothiol glutaredoxin, or if the activity of the polypeptide At4g15700, preferably represented by SEQ ID NO. 3655, or a homolog or fragment thereof, or if the activity of a polypeptide encoded by a nucleic acid molecule comprising the nucleic acid SEQ ID NO. 3654, preferably the coding region thereof, or a homolog or fragment thereof, e.g. derived from Arabidopsis thaliana, is increased or generated. For example the activity of a nucleic acid molecule or a polypeptide comprising the nucleic acid, preferably the coding region thereof, or polypeptide or the consensus sequence or the polypeptide motif, as depicted in Table I, II or IV, application No. 17, column 5 or 8 in the respective same line as the nucleic acid molecule SEQ ID NO. 3654 or polypeptide SEQ ID NO. 3655, respectively, or a homolog or a fragment thereof, is increased or generated, or if the activity monothiol glutaredoxin is increased or generated in a non-human organism, like a microorganism or a plant cell, plant or part thereof, especially with non-targeted localization, whereby the respective line disclose in column 7 the fine chemical glucose. For example, an increase of the glucose of at least 1 percent, particularly in a range of 469 to 1285-percent is conferred as compared to a corresponding non-transformed wild type non-human organism.

[88028] Accordingly, in one embodiment, an increase of sedoheptulose-7-phosphate in a non-human organism, as compared to a corresponding non-transformed wild type non-human organism, is conferred in the process of the invention, if the activity of a polypeptide showing the activity of a monothiol glutaredoxin, or if the activity of the polypeptide At4g15700, preferably represented by SEQ ID NO. 3655, or a homolog or fragment thereof, or if the activity of a polypeptide encoded by a nucleic acid molecule comprising the nucleic acid SEQ ID NO. 3654, preferably the coding region thereof, or a homolog or fragment thereof, e.g. derived from Arabidopsis thaliana, is increased or generated. For example the activity of a nucleic acid molecule or a polypeptide comprising the nucleic acid, preferably the coding region thereof, or polypeptide or the consensus sequence or the polypeptide motif, as depicted in Table I, II or IV, application No. 17, column 5 or 8 in the respective same line as the nucleic acid molecule SEQ ID NO. 3654 or polypeptide SEQ ID NO. 3655, respectively, or a homolog or a fragment thereof, is increased or generated, or if the activity monothiol glutaredoxin is increased or generated in a non-human organism, like a microorganism or a plant cell, plant or part thereof, especially with non-targeted localization, whereby the respective line disclose in column 7 the fine chemical sedoheptulose7-phosphate. For example, an increase of the sedoheptulose-7-phosphate of at least 1 percent, particularly in a range of 254 to 653-percent is conferred as compared to a corresponding non-transformed wild type non-human organism.

[88029] Accordingly, in one embodiment, an increase of sucrose in a non-human organism, as compared to a corresponding non-transformed wild type non-human organism, is conferred in the process of the invention, if the activity of a polypeptide showing the activity of a monothiol glutaredoxin, or if the activity of the polypeptide At4g15700, preferably represented by SEQ ID NO. 3655, or a homolog or fragment thereof, or if the activity of a polypeptide encoded by a nucleic acid molecule comprising the nucleic acid SEQ ID NO. 3654, preferably the coding region thereof, or a homolog or fragment thereof, e.g. derived from Arabidopsis thaliana, is increased or generated. For example the activity of a nucleic acid molecule or a polypeptide comprising the nucleic acid, preferably the coding region thereof, or polypeptide or the consensus sequence or the polypeptide motif, as depicted in Table I, II or IV, application No. 17, column 5 or 8 in the respective same line as the nucleic acid molecule SEQ ID NO. 3654 or polypeptide SEQ ID NO. 3655, respectively, or a homolog or a fragment thereof, is increased or generated, or if the activity monothiol glutaredoxin is increased or generated in a non-human organism, like a microorganism or a plant cell, plant or part thereof, especially with non-targeted localization, whereby the respective line disclose in column 7 the fine chemical sucrose. For example, an increase of the sucrose of at least 1 percent, particularly in a range of 83 to 229-percent is conferred as compared to a corresponding non-transformed wild type non-human organism.

[88030] Accordingly, in one embodiment, an increase of myo-inositol in a non-human organism, as compared to a corresponding non-transformed wild type non-human organism, is conferred in the process of the invention, if the activity of a polypeptide showing the activity of a protein phosphatase, or if the activity of the polypeptide At4g26080, preferably represented by SEQ ID NO. 68850, or a homolog or fragment thereof, or if the activity of a polypeptide encoded by a nucleic acid molecule comprising the nucleic acid SEQ ID NO. 68849, preferably the coding region thereof, or a homolog or fragment thereof, e.g. derived from Arabidopsis thaliana, is increased or generated. For example the activity of a nucleic acid molecule or a polypeptide comprising the nucleic acid, preferably the coding region thereof, or polypeptide or the consensus sequence or the polypeptide motif, as depicted in Table I, II or IV, application No. 17, column 5 or 8 in the respective same line as the nucleic acid molecule SEQ ID NO. 68849 or polypeptide SEQ ID NO. 68850, respectively, or a homolog or a fragment thereof, is increased or generated, or if the activity protein phosphatase is increased or generated in a non-human organism, like a microorganism or a plant cell, plant or part thereof, especially with non-targeted localization, whereby the respective line disclose in column 7 the fine chemical myo-inositol. For example, an increase of the myo-inositol of at least 1 percent, particularly in a range of 33 to 138-percent is conferred as compared to a corresponding non-transformed wild type non-human organism.

[88031] Accordingly, in one embodiment, an increase of fructose in a non-human organism, as compared to a corresponding non-transformed wild type non-human organism, is conferred in the process of the invention, if the activity of a polypeptide showing the activity of a glutaredoxin, or if the activity of the polypeptide At4g33040, preferably represented by SEQ ID NO. 4103, or a homolog or fragment thereof, or if the activity of a polypeptide encoded by a nucleic acid molecule comprising the nucleic acid SEQ ID NO. 4102, preferably the coding region thereof, or a homolog or fragment thereof, e.g. derived from Arabidopsis thaliana, is increased or generated. For example the activity of a nucleic acid molecule or a polypeptide comprising the nucleic acid, preferably the coding region thereof, or polypeptide or the consensus sequence or the polypeptide motif, as depicted in Table I, II or IV, application No. 17, column 5 or 8 in the respective same line as the nucleic acid molecule SEQ ID NO. 4102 or polypeptide SEQ ID NO. 4103, respectively, or a homolog or a fragment thereof, is increased or generated, or if the activity glutaredoxin is increased or generated in a non-human organism, like a microorganism or a plant cell, plant or part thereof, especially with non-targeted localization, whereby the respective line disclose in column 7 the fine chemical fructose. For example, an increase of the fructose of at least 1 percent, particularly in a range of 79 to 387-percent is conferred as compared to a corresponding non-transformed wild type non-human organism.

[88032] Accordingly, in one embodiment, an increase of glucose in a non-human organism, as compared to a corresponding non-transformed wild type non-human organism, is conferred in the process of the invention, if the activity of a polypeptide showing the activity of a glutaredoxin, or if the activity of the polypeptide At4g33040, preferably represented by SEQ ID NO. 4103, or a homolog or fragment thereof, or if the activity of a polypeptide encoded by a nucleic acid molecule comprising the nucleic acid SEQ ID NO. 4102, preferably the coding region thereof, or a homolog or fragment thereof, e.g. derived from Arabidopsis thaliana, is increased or generated. For example the activity of a nucleic acid molecule or a polypeptide comprising the nucleic acid, preferably the coding region thereof, or polypeptide or the consensus sequence or the polypeptide motif, as depicted in Table I, II or IV, application No. 17, column 5 or 8 in the respective same line as the nucleic acid molecule SEQ ID NO. 4102 or polypeptide SEQ ID NO. 4103, respectively, or a homolog or a fragment thereof, is increased or generated, or if the activity glutaredoxin is increased or generated in a non-human organism, like a microorganism or a plant cell, plant or part thereof, especially with non-targeted localization, whereby the respective line disclose in column 7 the fine chemical glucose. For example, an increase of the glucose of at least 1 percent, particularly in a range of 58 to 294-percent is conferred as compared to a corresponding non-transformed wild type non-human organism.

[88033] Accordingly, in one embodiment, an increase of glucose-1-phosphate in a non-human organism, as compared to a corresponding non-transformed wild type non-human organism, is conferred in the process of the invention, if the activity of a polypeptide showing the activity of a glutaredoxin, or if the activity of the polypeptide At4g33040, preferably represented by SEQ ID NO. 4103, or a homolog or fragment thereof, or if the activity of a polypeptide encoded by a nucleic acid molecule comprising the nucleic acid SEQ ID NO. 4102, preferably the coding region thereof, or a homolog or fragment thereof, e.g. derived from Arabidopsis thaliana, is increased or generated. For example the activity of a nucleic acid molecule or a polypeptide comprising the nucleic acid, preferably the coding region thereof, or polypeptide or the consensus sequence or the polypeptide motif, as depicted in Table I, II or IV, application No. 17, column 5 or 8 in the respective same line as the nucleic acid molecule SEQ ID NO. 4102 or polypeptide SEQ ID NO. 4103, respectively, or a homolog or a fragment thereof, is increased or generated, or if the activity glutaredoxin is increased or generated in a non-human organism, like a microorganism or a plant cell, plant or part thereof, especially with non-targeted localization, whereby the respective line disclose in column 7 the fine chemical glucose-1-phosphate. For example, an increase of the glucose-1-phosphate of at least 1 percent, particularly in a range of 19 to 65-percent is conferred as compared to a corresponding non-transformed wild type non-human organism.

[88034] Accordingly, in one embodiment, an increase of myo-inositol in a non-human organism, as compared to a corresponding non-transformed wild type non-human organism, is conferred in the process of the invention, if the activity of a polypeptide showing the activity of a glutaredoxin, or if the activity of the polypeptide At4g33040, preferably represented by SEQ ID NO. 4103, or a homolog or fragment thereof, or if the activity of a polypeptide encoded by a nucleic acid molecule comprising the nucleic acid SEQ ID NO. 4102, preferably the coding region thereof, or a homolog or fragment thereof, e.g. derived from Arabidopsis thaliana, is increased or generated. For example the activity of a nucleic acid molecule or a polypeptide comprising the nucleic acid, preferably the coding region thereof, or polypeptide or the consensus sequence or the polypeptide motif, as depicted in Table I, II or IV, application No. 17, column 5 or 8 in the respective same line as the nucleic acid molecule SEQ ID NO. 4102 or polypeptide SEQ ID NO. 4103, respectively, or a homolog or a fragment thereof, is increased or generated, or if the activity glutaredoxin is increased or generated in a non-human organism, like a microorganism or a plant cell, plant or part thereof, especially with non-targeted localization, whereby the respective line disclose in column 7 the fine chemical myo-inositol. For example, an increase of the myo-inositol of at least 1 percent, particularly in a range of 50 to 110-percent is conferred as compared to a corresponding non-transformed wild type non-human organism.

[88035] Accordingly, in one embodiment, an increase of sedoheptulose-7-phosphate in a non-human organism, as compared to a corresponding non-transformed wild type non-human organism, is conferred in the process of the invention, if the activity of a polypeptide showing the activity of a glutaredoxin, or if the activity of the polypeptide At4g33040, preferably represented by SEQ ID NO. 4103, or a homolog or fragment thereof, or if the activity of a polypeptide encoded by a nucleic acid molecule comprising the nucleic acid SEQ ID NO. 4102, preferably the coding region thereof, or a homolog or fragment thereof, e.g. derived from Arabidopsis thaliana, is increased or generated. For example the activity of a nucleic acid molecule or a polypeptide comprising the nucleic acid, preferably the coding region thereof, or polypeptide or the consensus sequence or the polypeptide motif, as depicted in Table I, II or IV, application No. 17, column 5 or 8 in the respective same line as the nucleic acid molecule SEQ ID NO. 4102 or polypeptide SEQ ID NO. 4103, respectively, or a homolog or a fragment thereof, is increased or generated, or if the activity glutaredoxin is increased or generated in a non-human organism, like a microorganism or a plant cell, plant or part thereof, especially with non-targeted localization, whereby the respective line disclose in column 7 the fine chemical sedoheptulose-7-phosphate. For example, an increase of the sedoheptulose-7-phosphate of at least 1 percent, particularly in a range of 47 to 108-percent is conferred as compared to a corresponding non-transformed wild type non-human organism.

[88036] Accordingly, in one embodiment, an increase of sucrose in a non-human organism, as compared to a corresponding non-transformed wild type non-human organism, is conferred in the process of the invention, if the activity of a polypeptide showing the activity of a glutaredoxin, or if the activity of the polypeptide At4g33040, preferably represented by SEQ ID NO. 4103, or a homolog or fragment thereof, or if the activity of a polypeptide encoded by a nucleic acid molecule comprising the nucleic acid SEQ ID NO. 4102, preferably the coding region thereof, or a homolog or fragment thereof, e.g. derived from Arabidopsis thaliana, is increased or generated.

[88037] For example the activity of a nucleic acid molecule or a polypeptide comprising the nucleic acid, preferably the coding region thereof, or polypeptide or the consensus sequence or the polypeptide motif, as depicted in Table I, II or IV, application No. 17, column 5 or 8 in the respective same line as the nucleic acid molecule SEQ ID NO. 4102 or polypeptide SEQ ID NO. 4103, respectively, or a homolog or a fragment thereof, is increased or generated, or if the activity glutaredoxin is increased or generated in a non-human organism, like a microorganism or a plant cell, plant or part thereof, especially with non-targeted localization, whereby the respective line disclose in column 7 the fine chemical sucrose. For example, an increase of the sucrose of at least 1 percent, particularly in a range of 28 to 74-percent is conferred as compared to a corresponding non-transformed wild type non-human organism.

[88038] Accordingly, in one embodiment, an increase of glucose-1-phosphate in a non-human organism, as compared to a corresponding non-transformed wild type non-human organism, is conferred in the process of the invention, if the activity of a polypeptide showing the activity of a cyclin D , or if the activity of the polypeptide At4g34160, preferably represented by SEQ ID NO. 24312, or a homolog or fragment thereof, or if the activity of a polypeptide encoded by a nucleic acid molecule comprising the nucleic acid SEQ ID NO. 24311, preferably the coding region thereof, or a homolog or fragment thereof, e.g. derived from Arabidopsis thaliana, is increased or generated. For example the activity of a nucleic acid molecule or a polypeptide comprising the nucleic acid, preferably the coding region thereof, or polypeptide or the consensus sequence or the polypeptide motif, as depicted in Table I, II or IV, application No. 17, column 5 or 8 in the respective same line as the nucleic acid molecule SEQ ID NO. 24311 or polypeptide SEQ ID NO. 24312, respectively, or a homolog or a fragment thereof, is increased or generated, or if the activity cyclin D is increased or generated in a non-human organism, like a microorganism or a plant cell, plant or part thereof, especially with non-targeted localization, whereby the respective line disclose in column 7 the fine chemical glucose-1-phosphate. For example, an increase of the glucose-1-phosphate of at least 1 percent, particularly in a range of 20 to 47-percent is conferred as compared to a corresponding non-transformed wild type non-human organism.

[88039] Accordingly, in one embodiment, an increase of raffinose in a non-human organism, as compared to a corresponding non-transformed wild type non-human organism, is conferred in the process of the invention, if the activity of a polypeptide showing the activity of a cyclin D , or if the activity of the polypeptide At4g34160, preferably represented by SEQ ID NO. 24312, or a homolog or fragment thereof, or if the activity of a polypeptide encoded by a nucleic acid molecule comprising the nucleic acid SEQ ID NO. 24311, preferably the coding region thereof, or a homolog or fragment thereof, e.g. derived from Arabidopsis thaliana, is increased or generated. For example the activity of a nucleic acid molecule or a polypeptide comprising the nucleic acid, preferably the coding region thereof, or polypeptide or the consensus sequence or the polypeptide motif, as depicted in Table I, II or IV, application No. 17, column 5 or 8 in the respective same line as the nucleic acid molecule SEQ ID NO. 24311 or polypeptide SEQ ID NO. 24312, respectively, or a homolog or a fragment thereof, is increased or generated, or if the activity cyclin D is increased or generated in a non-human organism, like a microorganism or a plant cell, plant or part thereof, especially with non-targeted localization, whereby the respective line disclose in column 7 the fine chemical raffinose. For example, an increase of the raffinose of at least 1 percent, particularly in a range of 131 to 327-percent is conferred as compared to a corresponding non-transformed wild type non-human organism.

[88040] Accordingly, in one embodiment, an increase of sucrose in a non-human organism, as compared to a corresponding non-transformed wild type non-human organism, is conferred in the process of the invention, if the activity of a polypeptide showing the activity of a cyclin D , or if the activity of the polypeptide At4g34160, preferably represented by SEQ ID NO. 24312, or a homolog or fragment thereof, or if the activity of a polypeptide encoded by a nucleic acid molecule comprising the nucleic acid SEQ ID NO. 24311, preferably the coding region thereof, or a homolog or fragment thereof, e.g. derived from Arabidopsis thaliana, is increased or generated. For example the activity of a nucleic acid molecule or a polypeptide comprising the nucleic acid, preferably the coding region thereof, or polypeptide or the consensus sequence or the polypeptide motif, as depicted in Table I, II or IV, application No. 17, column 5 or 8 in the respective same line as the nucleic acid molecule SEQ ID NO. 24311 or polypeptide SEQ ID NO. 24312, respectively, or a homolog or a fragment thereof, is increased or generated, or if the activity cyclin D is increased or generated in a non-human organism, like a microorganism or a plant cell, plant or part thereof, especially with non-targeted localization, whereby the respective line disclose in column 7 the fine chemical sucrose. For example, an increase of the sucrose of at least 1 percent, particularly in a range of 31 to 97-percent is conferred as compared to a corresponding non-transformed wild type non-human organism.

[88041] Accordingly, in one embodiment, an increase of fructose in a non-human organism, as compared to a corresponding non-transformed wild type non-human organism, is conferred in the process of the invention, if the activity of a polypeptide showing the activity of a calcium-dependent protein kinase, or if the activity of the polypeptide At4g35310, preferably represented by SEQ ID NO. 4349, or a homolog or fragment thereof, or if the activity of a polypeptide encoded by a nucleic acid molecule comprising the nucleic acid SEQ ID NO. 4348, preferably the coding region thereof, or a homolog or fragment thereof, e.g. derived from Arabidopsis thaliana, is increased or generated. For example the activity of a nucleic acid molecule or a polypeptide comprising the nucleic acid, preferably the coding region thereof, or polypeptide or the consensus sequence or the polypeptide motif, as depicted in Table I, II or IV, application No. 17, column 5 or 8 in the respective same line as the nucleic acid molecule SEQ ID NO. 4348 or polypeptide SEQ ID NO. 4349, respectively, or a homolog or a fragment thereof, is increased or generated, or if the activity calcium-dependent protein kinase is increased or generated in a non-human organism, like a microorganism or a plant cell, plant or part thereof, especially with non-targeted localization, whereby the respective line disclose in column 7 the fine chemical fructose. For example, an increase of the fructose of at least 1 percent, particularly in a range of 112 to 350-percent is conferred as compared to a corresponding non-transformed wild type non-human organism.

[88042] Accordingly, in one embodiment, an increase of glucose-1-phosphate in a non-human organism, as compared to a corresponding non-transformed wild type non-human organism, is conferred in the process of the invention, if the activity of a polypeptide showing the activity of a calcium-dependent protein kinase, or if the activity of the polypeptide At4g35310, preferably represented by SEQ ID NO. 4349, or a homolog or fragment thereof, or if the activity of a polypeptide encoded by a nucleic acid molecule comprising the nucleic acid SEQ ID NO. 4348, preferably the coding region thereof, or a homolog or fragment thereof, e.g. derived from Arabidopsis thaliana, is increased or generated. For example the activity of a nucleic acid molecule or a polypeptide comprising the nucleic acid, preferably the coding region thereof, or polypeptide or the consensus sequence or the polypeptide motif, as depicted in Table I, II or IV, application No. 17, column 5 or 8 in the respective same line as the nucleic acid molecule SEQ ID NO. 4348 or polypeptide SEQ ID NO. 4349, respectively, or a homolog or a fragment thereof, is increased or generated, or if the activity calcium-dependent protein kinase is increased or generated in a non-human organism, like a microorganism or a plant cell, plant or part thereof, especially with non-targeted localization, whereby the respective line disclose in column 7 the fine chemical glucose-1-phosphate. For example, an increase of the glucose-1-phosphate of at least 1 percent, particularly in a range of 32 to 55-percent is conferred as compared to a corresponding non-transformed wild type non-human organism.

[88043] Accordingly, in one embodiment, an increase of raffinose in a non-human organism, as compared to a corresponding non-transformed wild type non-human organism, is conferred in the process of the invention, if the activity of a polypeptide showing the activity of a calcium-dependent protein kinase, or if the activity of the polypeptide At4g35310, preferably represented by SEQ ID NO. 4349, or a homolog or fragment thereof, or if the activity of a polypeptide encoded by a nucleic acid molecule comprising the nucleic acid SEQ ID NO. 4348, preferably the coding region thereof, or a homolog or fragment thereof, e.g. derived from Arabidopsis thaliana, is increased or generated. For example the activity of a nucleic acid molecule or a polypeptide comprising the nucleic acid, preferably the coding region thereof, or polypeptide or the consensus sequence or the polypeptide motif, as depicted in Table I, II or IV, application No. 17, column 5 or 8 in the respective same line as the nucleic acid molecule SEQ ID NO. 4348 or polypeptide SEQ ID NO. 4349, respectively, or a homolog or a fragment thereof, is increased or generated, or if the activity calcium-dependent protein kinase is increased or generated in a non-human organism, like a microorganism or a plant cell, plant or part thereof, especially with non-targeted localization, whereby the respective line disclose in column 7 the fine chemical raffinose. For example, an increase of the raffinose of at least 1 percent, particularly in a range of 66 to 186-percent is conferred as compared to a corresponding non-transformed wild type non-human organism.

[88044] Accordingly, in one embodiment, an increase of myo-inositol in a non-human organism, as compared to a corresponding non-transformed wild type non-human organism, is conferred in the process of the invention, if the activity of a polypeptide showing the activity of a protein phosphatase, or if the activity of the polypeptide At5g02760, preferably represented by SEQ ID NO. 68988, or a homolog or fragment thereof, or if the activity of a polypeptide encoded by a nucleic acid molecule comprising the nucleic acid SEQ ID NO. 68987, preferably the coding region thereof, or a homolog or fragment thereof, e.g. derived from Arabidopsis thaliana, is increased or generated. For example the activity of a nucleic acid molecule or a polypeptide comprising the nucleic acid, preferably the coding region thereof, or polypeptide or the consensus sequence or the polypeptide motif, as depicted in Table I, II or IV, application No. 17, column 5 or 8 in the respective same line as the nucleic acid molecule SEQ ID NO. 68987 or polypeptide SEQ ID NO. 68988, respectively, or a homolog or a fragment thereof, is increased or generated, or if the activity protein phosphatase is increased or generated in a non-human organism, like a microorganism or a plant cell, plant or part thereof, especially with non-targeted localization, whereby the respective line disclose in column 7 the fine chemical myo-inositol. For example, an increase of the myo-inositol of at least 1 percent, particularly in a range of 25 to 104-percent is conferred as compared to a corresponding non-transformed wild type non-human organism.

[88045] Accordingly, in one embodiment, an increase of fructose in a non-human organism, as compared to a corresponding non-transformed wild type non-human organism, is conferred in the process of the invention, if the activity of a polypeptide showing the activity of a heat shock transcription factor, or if the activity of the polypeptide At5g03720, preferably represented by SEQ ID NO. 24439, or a homolog or fragment thereof, or if the activity of a polypeptide encoded by a nucleic acid molecule comprising the nucleic acid SEQ ID NO. 24438, preferably the coding region thereof, or a homolog or fragment thereof, e.g. derived from Arabidopsis thaliana, is increased or generated. For example the activity of a nucleic acid molecule or a polypeptide comprising the nucleic acid, preferably the coding region thereof, or polypeptide or the consensus sequence or the polypeptide motif, as depicted in Table I, II or IV, application No. 17, column 5 or 8 in the respective same line as the nucleic acid molecule SEQ ID NO. 24438 or polypeptide SEQ ID NO. 24439, respectively, or a homolog or a fragment thereof, is increased or generated, or if the activity heat shock transcription factor is increased or generated in a non-human organism, like a microorganism or a plant cell, plant or part thereof, especially with non-targeted localization, whereby the respective line disclose in column 7 the fine chemical fructose. For example, an increase of the fructose of at least 1 percent, particularly in a range of 134 to 1766-percent is conferred as compared to a corresponding non-transformed wild type non-human organism.

[88046] Accordingly, in one embodiment, an increase of glucose in a non-human organism, as compared to a corresponding non-transformed wild type non-human organism, is conferred in the process of the invention, if the activity of a polypeptide showing the activity of a heat shock transcription factor, or if the activity of the polypeptide At5g03720, preferably represented by SEQ ID NO. 24439, or a homolog or fragment thereof, or if the activity of a polypeptide encoded by a nucleic acid molecule comprising the nucleic acid SEQ ID NO. 24438, preferably the coding region thereof, or a homolog or fragment thereof, e.g. derived from Arabidopsis thaliana, is increased or generated. For example the activity of a nucleic acid molecule or a polypeptide comprising the nucleic acid, preferably the coding region thereof, or polypeptide or the consensus sequence or the polypeptide motif, as depicted in Table I, II or IV, application No. 17, column 5 or 8 in the respective same line as the nucleic acid molecule SEQ ID NO. 24438 or polypeptide SEQ ID NO. 24439, respectively, or a homolog or a fragment thereof, is increased or generated, or if the activity heat shock transcription factor is increased or generated in a non-human organism, like a microorganism or a plant cell, plant or part thereof, especially with non-targeted localization, whereby the respective line disclose in column 7 the fine chemical glucose. For example, an increase of the glucose of at least 1 percent, particularly in a range of 106 to 2148-percent is conferred as compared to a corresponding non-transformed wild type non-human organism.

[88047] Accordingly, in one embodiment, an increase of glucose-1-phosphate in a non-human organism, as compared to a corresponding non-transformed wild type non-human organism, is conferred in the process of the invention, if the activity of a polypeptide showing the activity of a heat shock transcription factor, or if the activity of the polypeptide At5g03720, preferably represented by SEQ ID NO. 24439, or a homolog or fragment thereof, or if the activity of a polypeptide encoded by a nucleic acid molecule comprising the nucleic acid SEQ ID NO. 24438, preferably the coding region thereof, or a homolog or fragment thereof, e.g. derived from Arabidopsis thaliana, is increased or generated. For example the activity of a nucleic acid molecule or a polypeptide comprising the nucleic acid, preferably the coding region thereof, or polypeptide or the consensus sequence or the polypeptide motif, as depicted in Table I, II or IV, application No. 17, column 5 or 8 in the respective same line as the nucleic acid molecule SEQ ID NO. 24438 or polypeptide SEQ ID NO. 24439, respectively, or a homolog or a fragment thereof, is increased or generated, or if the activity heat shock transcription factor is increased or generated in a non-human organism, like a microorganism or a plant cell, plant or part thereof, especially with non-targeted localization, whereby the respective line disclose in column 7 the fine chemical glucose-1-phosphate. For example, an increase of the glucose-1-phosphate of at least 1 percent, particularly in a range of 28 to 106-percent is conferred as compared to a corresponding non-transformed wild type non-human organism.

[88048] Accordingly, in one embodiment, an increase of myo-inositol in a non-human organism, as compared to a corresponding non-transformed wild type non-human organism, is conferred in the process of the invention, if the activity of a polypeptide showing the activity of a heat shock transcription factor, or if the activity of the polypeptide At5g03720, preferably represented by SEQ ID NO. 24439, or a homolog or fragment thereof, or if the activity of a polypeptide encoded by a nucleic acid molecule comprising the nucleic acid SEQ ID NO. 24438, preferably the coding region thereof, or a homolog or fragment thereof, e.g. derived from Arabidopsis thaliana, is increased or generated. For example the activity of a nucleic acid molecule or a polypeptide comprising the nucleic acid, preferably the coding region thereof, or polypeptide or the consensus sequence or the polypeptide motif, as depicted in Table I, II or IV, application No. 17, column 5 or 8 in the respective same line as the nucleic acid molecule SEQ ID NO. 24438 or polypeptide SEQ ID NO. 24439, respectively, or a homolog or a fragment thereof, is increased or generated, or if the activity heat shock transcription factor is increased or generated in a non-human organism, like a microorganism or a plant cell, plant or part thereof, especially with non-targeted localization, whereby the respective line disclose in column 7 the fine chemical myo-inositol. For example, an increase of the myo-inositol of at least 1 percent, particularly in a range of 92 to 427-percent is conferred as compared to a corresponding non-transformed wild type non-human organism.

[88049] Accordingly, in one embodiment, an increase of raffinose in a non-human organism, as compared to a corresponding non-transformed wild type non-human organism, is conferred in the process of the invention, if the activity of a polypeptide showing the activity of a heat shock transcription factor, or if the activity of the polypeptide At5g03720, preferably represented by SEQ ID NO. 24439, or a homolog or fragment thereof, or if the activity of a polypeptide encoded by a nucleic acid molecule comprising the nucleic acid SEQ ID NO. 24438, preferably the coding region thereof, or a homolog or fragment thereof, e.g. derived from Arabidopsis thaliana, is increased or generated. For example the activity of a nucleic acid molecule or a polypeptide comprising the nucleic acid, preferably the coding region thereof, or polypeptide or the consensus sequence or the polypeptide motif, as depicted in Table I, II or IV, application No. 17, column 5 or 8 in the respective same line as the nucleic acid molecule SEQ ID NO. 24438 or polypeptide SEQ ID NO. 24439, respectively, or a homolog or a fragment thereof, is increased or generated, or if the activity heat shock transcription factor is increased or generated in a non-human organism, like a microorganism or a plant cell, plant or part thereof, especially with non-targeted localization, whereby the respective line disclose in column 7 the fine chemical raffinose. For example, an increase of the raffinose of at least 1 percent, particularly in a range of 1744 to 12039-percent is conferred as compared to a corresponding non-transformed wild type non-human organism.

[88050] Accordingly, in one embodiment, an increase of sucrose in a non-human organism, as compared to a corresponding non-transformed wild type non-human organism, is conferred in the process of the invention, if the activity of a polypeptide showing the activity of a heat shock transcription factor, or if the activity of the polypeptide At5g03720, preferably represented by SEQ ID NO. 24439, or a homolog or fragment thereof, or if the activity of a polypeptide encoded by a nucleic acid molecule comprising the nucleic acid SEQ ID NO. 24438, preferably the coding region thereof, or a homolog or fragment thereof, e.g. derived from Arabidopsis thaliana, is increased or generated. For example the activity of a nucleic acid molecule or a polypeptide comprising the nucleic acid, preferably the coding region thereof, or polypeptide or the consensus sequence or the polypeptide motif, as depicted in Table I, II or IV, application No. 17, column 5 or 8 in the respective same line as the nucleic acid molecule SEQ ID NO. 24438 or polypeptide SEQ ID NO. 24439, respectively, or a homolog or a fragment thereof, is increased or generated, or if the activity heat shock transcription factor is increased or generated in a non-human organism, like a microorganism or a plant cell, plant or part thereof, especially with non-targeted localization, whereby the respective line disclose in column 7 the fine chemical sucrose. For example, an increase of the sucrose of at least 1 percent, particularly in a range of 35 to 100-percent is conferred as compared to a corresponding non-transformed wild type non-human organism.

[88051] Accordingly, in one embodiment, an increase of myo-inositol in a non-human organism, as compared to a corresponding non-transformed wild type non-human organism, is conferred in the process of the invention, if the activity of a polypeptide showing the activity of a gibberellin 20-oxidase, or if the activity of the polypeptide At5g07200, preferably represented by SEQ ID NO. 24493, or a homolog or fragment thereof, or if the activity of a polypeptide encoded by a nucleic acid molecule comprising the nucleic acid SEQ ID NO. 24492, preferably the coding region thereof, or a homolog or fragment thereof, e.g. derived from Arabidopsis thaliana, is increased or generated. For example the activity of a nucleic acid molecule or a polypeptide comprising the nucleic acid, preferably the coding region thereof, or polypeptide or the consensus sequence or the polypeptide motif, as depicted in Table I, II or IV, application No. 17, column 5 or 8 in the respective same line as the nucleic acid molecule SEQ ID NO. 24492 or polypeptide SEQ ID NO. 24493, respectively, or a homolog or a fragment thereof, is increased or generated, or if the activity gibberellin 20-oxidase is increased or generated in a non-human organism, like a microorganism or a plant cell, plant or part thereof, especially with non-targeted localization, whereby the respective line disclose in column 7 the fine chemical myo-inositol. For example, an increase of the myo-inositol of at least 1 percent, particularly in a range of 24 to 47-percent is conferred as compared to a corresponding non-transformed wild type non-human organism.

[88052] Accordingly, in one embodiment, an increase of myo-inositol in a non-human organism, as compared to a corresponding non-transformed wild type non-human organism, is conferred in the process of the invention, if the activity of a polypeptide showing the activity of a inositol-3-phosphate synthase, or if the activity of the polypeptide At5g10170, preferably represented by SEQ ID NO. 142754, or a homolog or fragment thereof, or if the activity of a polypeptide encoded by a nucleic acid molecule comprising the nucleic acid SEQ ID NO. 142753, preferably the coding region thereof, or a homolog or fragment thereof, e.g. derived from Arabidopsis thaliana, is increased or generated. For example the activity of a nucleic acid molecule or a polypeptide comprising the nucleic acid, preferably the coding region thereof, or polypeptide or the consensus sequence or the polypeptide motif, as depicted in Table I, II or IV, application No. 17, column 5 or 8 in the respective same line as the nucleic acid molecule SEQ ID NO. 142753 or polypeptide SEQ ID NO. 142754, respectively, or a homolog or a fragment thereof, is increased or generated, or if the activity inositol-3-phosphate synthase is increased or generated in a non-human organism, like a microorganism or a plant cell, plant or part thereof, especially with non-targeted localization, whereby the respective line disclose in column 7 the fine chemical myo-inositol. For example, an increase of the myo-inositol of at least 1 percent, particularly in a range of 83 to 386-percent is conferred as compared to a corresponding non-transformed wild type non-human organism.

[88053] Accordingly, in one embodiment, an increase of raffinose in a non-human organism, as compared to a corresponding non-transformed wild type non-human organism, is conferred in the process of the invention, if the activity of a polypeptide showing the activity of a inositol-3-phosphate synthase, or if the activity of the polypeptide At5g10170, preferably represented by SEQ ID NO. 142754, or a homolog or fragment thereof, or if the activity of a polypeptide encoded by a nucleic acid molecule comprising the nucleic acid SEQ ID NO. 142753, preferably the coding region thereof, or a homolog or fragment thereof, e.g. derived from Arabidopsis thaliana, is increased or generated. For example the activity of a nucleic acid molecule or a polypeptide comprising the nucleic acid, preferably the coding region thereof, or polypeptide or the consensus sequence or the polypeptide motif, as depicted in Table I, II or IV, application No. 17, column 5 or 8 in the respective same line as the nucleic acid molecule SEQ ID NO. 142753 or polypeptide SEQ ID NO. 142754, respectively, or a homolog or a fragment thereof, is increased or generated, or if the activity inositol-3-phosphate synthase is increased or generated in a non-human organism, like a microorganism or a plant cell, plant or part thereof, especially with non-targeted localization, whereby the respective line disclose in column 7 the fine chemical raffinose. For example, an increase of the raffinose of at least 1 percent, particularly in a range of 72 to 155-percent is conferred as compared to a corresponding non-transformed wild type non-human organism.

[88054] Accordingly, in one embodiment, an increase of glucose in a non-human organism, as compared to a corresponding non-transformed wild type non-human organism, is conferred in the process of the invention, if the activity of a polypeptide showing the activity of a glutaredoxin, or if the activity of the polypeptide At5g14070, preferably represented by SEQ ID NO. 69276, or a homolog or fragment thereof, or if the activity of a polypeptide encoded by a nucleic acid molecule comprising the nucleic acid SEQ ID NO. 69275, preferably the coding region thereof, or a homolog or fragment thereof, e.g. derived from Arabidopsis thaliana, is increased or generated. For example the activity of a nucleic acid molecule or a polypeptide comprising the nucleic acid, preferably the coding region thereof, or polypeptide or the consensus sequence or the polypeptide motif, as depicted in Table I, II or IV, application No. 17, column 5 or 8 in the respective same line as the nucleic acid molecule SEQ ID NO. 69275 or polypeptide SEQ ID NO. 69276, respectively, or a homolog or a fragment thereof, is increased or generated, or if the activity glutaredoxin is increased or generated in a non-human organism, like a microorganism or a plant cell, plant or part thereof, especially with non-targeted localization, whereby the respective line disclose in column 7 the fine chemical glucose. For example, an increase of the glucose of at least 1 percent, particularly in a range of 70 to 248-percent is conferred as compared to a corresponding non-transformed wild type non-human organism.

[88055] Accordingly, in one embodiment, an increase of fructose in a non-human organism, as compared to a corresponding non-transformed wild type non-human organism, is conferred in the process of the invention, if the activity of a polypeptide showing the activity of a At5g16650-protein, or if the activity of the polypeptide At5g16650, preferably represented by SEQ ID NO. 25284, or a homolog or fragment thereof, or if the activity of a polypeptide encoded by a nucleic acid molecule comprising the nucleic acid SEQ ID NO. 25283, preferably the coding region thereof, or a homolog or fragment thereof, e.g. derived from Arabidopsis thaliana, is increased or generated. For example the activity of a nucleic acid molecule or a polypeptide comprising the nucleic acid, preferably the coding region thereof, or polypeptide or the consensus sequence or the polypeptide motif, as depicted in Table I, II or IV, application No. 17, column 5 or 8 in the respective same line as the nucleic acid molecule SEQ ID NO. 25283 or polypeptide SEQ ID NO. 25284, respectively, or a homolog or a fragment thereof, is increased or generated, or if the activity At5g16650-protein is increased or generated in a non-human organism, like a microorganism or a plant cell, plant or part thereof, especially with non-targeted localization, whereby the respective line disclose in column 7 the fine chemical fructose. For example, an increase of the fructose of at least 1 percent, particularly in a range of 80 to 153-percent is conferred as compared to a corresponding non-transformed wild type non-human organism.

[88056] Accordingly, in one embodiment, an increase of fructose in a non-human organism, as compared to a corresponding non-transformed wild type non-human organism, is conferred in the process of the invention, if the activity of a polypeptide showing the activity of a monothiol glutaredoxin, or if the activity of the polypeptide At5g18600, preferably represented by SEQ ID NO. 4905, or a homolog or fragment thereof, or if the activity of a polypeptide encoded by a nucleic acid molecule comprising the nucleic acid SEQ ID NO. 4904, preferably the coding region thereof, or a homolog or fragment thereof, e.g. derived from Arabidopsis thaliana, is increased or generated. For example the activity of a nucleic acid molecule or a polypeptide comprising the nucleic acid, preferably the coding region thereof, or polypeptide or the consensus sequence or the polypeptide motif, as depicted in Table I, II or IV, application No. 17, column 5 or 8 in the respective same line as the nucleic acid molecule SEQ ID NO. 4904 or polypeptide SEQ ID NO. 4905, respectively, or a homolog or a fragment thereof, is increased or generated, or if the activity monothiol glutaredoxin is increased or generated in a non-human organism, like a microorganism or a plant cell, plant or part thereof, especially with non-targeted localization, whereby the respective line disclose in column 7 the fine chemical fructose. For example, an increase of the fructose of at least 1 percent, particularly in a range of 228 to 2679-percent is conferred as compared to a corresponding non-transformed wild type non-human organism.

[88057] Accordingly, in one embodiment, an increase of glucose in a non-human organism, as compared to a corresponding non-transformed wild type non-human organism, is conferred in the process of the invention, if the activity of a polypeptide showing the activity of a monothiol glutaredoxin, or if the activity of the polypeptide At5g18600, preferably represented by SEQ ID NO. 4905, or a homolog or fragment thereof, or if the activity of a polypeptide encoded by a nucleic acid molecule comprising the nucleic acid SEQ ID NO. 4904, preferably the coding region thereof, or a homolog or fragment thereof, e.g. derived from Arabidopsis thaliana, is increased or generated. For example the activity of a nucleic acid molecule or a polypeptide comprising the nucleic acid, preferably the coding region thereof, or polypeptide or the consensus sequence or the polypeptide motif, as depicted in Table I, II or IV, application No. 17, column 5 or 8 in the respective same line as the nucleic acid molecule SEQ ID NO. 4904 or polypeptide SEQ ID NO. 4905, respectively, or a homolog or a fragment thereof, is increased or generated, or if the activity monothiol glutaredoxin is increased or generated in a non-human organism, like a microorganism or a plant cell, plant or part thereof, especially with non-targeted localization, whereby the respective line disclose in column 7 the fine chemical glucose. For example, an increase of the glucose of at least 1 percent, particularly in a range of 187 to 2197-percent is conferred as compared to a corresponding non-transformed wild type non-human organism.

[88058] Accordingly, in one embodiment, an increase of myo-inositol in a non-human organism, as compared to a corresponding non-transformed wild type non-human organism, is conferred in the process of the invention, if the activity of a polypeptide showing the activity of a monothiol glutaredoxin, or if the activity of the polypeptide At5g18600, preferably represented by SEQ ID NO. 4905, or a homolog or fragment thereof, or if the activity of a polypeptide encoded by a nucleic acid molecule comprising the nucleic acid SEQ ID NO. 4904, preferably the coding region thereof, or a homolog or fragment thereof, e.g. derived from Arabidopsis thaliana, is increased or generated. For example the activity of a nucleic acid molecule or a polypeptide comprising the nucleic acid, preferably the coding region thereof, or polypeptide or the consensus sequence or the polypeptide motif, as depicted in Table I, II or IV, application No. 17, column 5 or 8 in the respective same line as the nucleic acid molecule SEQ ID NO. 4904 or polypeptide SEQ ID NO. 4905, respectively, or a homolog or a fragment thereof, is increased or generated, or if the activity monothiol glutaredoxin is increased or generated in a non-human organism, like a microorganism or a plant cell, plant or part thereof, especially with non-targeted localization, whereby the respective line disclose in column 7 the fine chemical myo-inositol. For example, an increase of the myo-inositol of at least 1 percent, particularly in a range of 46 to 76-percent is conferred as compared to a corresponding non-transformed wild type non-human organism.

[88059] Accordingly, in one embodiment, an increase of sedoheptulose-7-phosphate in a non-human organism, as compared to a corresponding non-transformed wild type non-human organism, is conferred in the process of the invention, if the activity of a polypeptide showing the activity of a monothiol glutaredoxin, or if the activity of the polypeptide At5g18600, preferably represented by SEQ ID NO. 4905, or a homolog or fragment thereof, or if the activity of a polypeptide encoded by a nucleic acid molecule comprising the nucleic acid SEQ ID NO. 4904, preferably the coding region thereof, or a homolog or fragment thereof, e.g. derived from Arabidopsis thaliana, is increased or generated. For example the activity of a nucleic acid molecule or a polypeptide comprising the nucleic acid, preferably the coding region thereof, or polypeptide or the consensus sequence or the polypeptide motif, as depicted in Table I, II or IV, application No. 17, column 5 or 8 in the respective same line as the nucleic acid molecule SEQ ID NO. 4904 or polypeptide SEQ ID NO. 4905, respectively, or a homolog or a fragment thereof, is increased or generated, or if the activity monothiol glutaredoxin is increased or generated in a non-human organism, like a microorganism or a plant cell, plant or part thereof, especially with non-targeted localization, whereby the respective line disclose in column 7 the fine chemical sedoheptulose7-phosphate. For example, an increase of the sedoheptulose-7-phosphate of at least 1 percent, particularly in a range of 149 to 336-percent is conferred as compared to a corresponding non-transformed wild type non-human organism.

[88060] Accordingly, in one embodiment, an increase of sucrose in a non-human organism, as compared to a corresponding non-transformed wild type non-human organism, is conferred in the process of the invention, if the activity of a polypeptide showing the activity of a monothiol glutaredoxin, or if the activity of the polypeptide At5g18600, preferably represented by SEQ ID NO. 4905, or a homolog or fragment thereof, or if the activity of a polypeptide encoded by a nucleic acid molecule comprising the nucleic acid SEQ ID NO. 4904, preferably the coding region thereof, or a homolog or fragment thereof, e.g. derived from Arabidopsis thaliana, is increased or generated. For example the activity of a nucleic acid molecule or a polypeptide comprising the nucleic acid, preferably the coding region thereof, or polypeptide or the consensus sequence or the polypeptide motif, as depicted in Table I, II or IV, application No. 17, column 5 or 8 in the respective same line as the nucleic acid molecule SEQ ID NO. 4904 or polypeptide SEQ ID NO. 4905, respectively, or a homolog or a fragment thereof, is increased or generated, or if the activity monothiol glutaredoxin is increased or generated in a non-human organism, like a microorganism or a plant cell, plant or part thereof, especially with non-targeted localization, whereby the respective line disclose in column 7 the fine chemical sucrose. For example, an increase of the sucrose of at least 1 percent, particularly in a range of 40 to 141-percent is conferred as compared to a corresponding non-transformed wild type non-human organism.

[88061] Accordingly, in one embodiment, an increase of fructose in a non-human organism, as compared to a corresponding non-transformed wild type non-human organism, is conferred in the process of the invention, if the activity of a polypeptide showing the activity of a transcription factor, or if the activity of the polypeptide At5g39760, preferably represented by SEQ ID NO. 25429, or a homolog or fragment thereof, or if the activity of a polypeptide encoded by a nucleic acid molecule comprising the nucleic acid SEQ ID NO. 25428, preferably the coding region thereof, or a homolog or fragment thereof, e.g. derived from Arabidopsis thaliana, is increased or generated. For example the activity of a nucleic acid molecule or a polypeptide comprising the nucleic acid, preferably the coding region thereof, or polypeptide or the consensus sequence or the polypeptide motif, as depicted in Table I, II or IV, application No. 17, column 5 or 8 in the respective same line as the nucleic acid molecule SEQ ID NO. 25428 or polypeptide SEQ ID NO. 25429, respectively, or a homolog or a fragment thereof, is increased or generated, or if the activity transcription factor is increased or generated in a non-human organism, like a microorganism or a plant cell, plant or part thereof, especially with non-targeted localization, whereby the respective line disclose in column 7 the fine chemical fructose. For example, an increase of the fructose of at least 1 percent, particularly in a range of 114 to 219-percent is conferred as compared to a corresponding non-transformed wild type non-human organism.

[88062] Accordingly, in one embodiment, an increase of glucose-1-phosphate in a non-human organism, as compared to a corresponding non-transformed wild type non-human organism, is conferred in the process of the invention, if the activity of a polypeptide showing the activity of a At5g43630-protein, or if the activity of the polypeptide At5g43630, preferably represented by SEQ ID NO. 142930, or a homolog or fragment thereof, or if the activity of a polypeptide encoded by a nucleic acid molecule comprising the nucleic acid SEQ ID NO. 142929, preferably the coding region thereof, or a homolog or fragment thereof, e.g. derived from Arabidopsis thaliana, is increased or generated. For example the activity of a nucleic acid molecule or a polypeptide comprising the nucleic acid, preferably the coding region thereof, or polypeptide or the consensus sequence or the polypeptide motif, as depicted in Table I, II or IV, application No. 17, column 5 or 8 in the respective same line as the nucleic acid molecule SEQ ID NO. 142929 or polypeptide SEQ ID NO. 142930, respectively, or a homolog or a fragment thereof, is increased or generated, or if the activity At5g43630-protein is increased or generated in a non-human organism, like a microorganism or a plant cell, plant or part thereof, especially with non-targeted localization, whereby the respective line disclose in column 7 the fine chemical glucose-1-phosphate. For example, an increase of the glucose-1-phosphate of at least 1 percent, particularly in a range of 65 to 74-percent is conferred as compared to a corresponding non-transformed wild type non-human organism.

[88063] Accordingly, in one embodiment, an increase of myo-inositol in a non-human organism, as compared to a corresponding non-transformed wild type non-human organism, is conferred in the process of the invention, if the activity of a polypeptide showing the activity of a heat shock transcription factor, or if the activity of the polypeptide At5g54070, preferably represented by SEQ ID NO. 142934, or a homolog or fragment thereof, or if the activity of a polypeptide encoded by a nucleic acid molecule comprising the nucleic acid SEQ ID NO. 142933, preferably the coding region thereof, or a homolog or fragment thereof, e.g. derived from Arabidopsis thaliana, is increased or generated. For example the activity of a nucleic acid molecule or a polypeptide comprising the nucleic acid, preferably the coding region thereof, or polypeptide or the consensus sequence or the polypeptide motif, as depicted in Table I, II or IV, application No. 17, column 5 or 8 in the respective same line as the nucleic acid molecule SEQ ID NO. 142933 or polypeptide SEQ ID NO. 142934, respectively, or a homolog or a fragment thereof, is increased or generated, or if the activity heat shock transcription factor is increased or generated in a non-human organism, like a microorganism or a plant cell, plant or part thereof, especially with non-targeted localization, whereby the respective line disclose in column 7 the fine chemical myo-inositol. For example, an increase of the myo-inositol of at least 1 percent, particularly in a range of 30 to 65-percent is conferred as compared to a corresponding non-transformed wild type non-human organism.

[88064] Accordingly, in one embodiment, an increase of raffinose in a non-human organism, as compared to a corresponding non-transformed wild type non-human organism, is conferred in the process of the invention, if the activity of a polypeptide showing the activity of a heat shock transcription factor, or if the activity of the polypeptide At5g54070, preferably represented by SEQ ID NO. 142934, or a homolog or fragment thereof, or if the activity of a polypeptide encoded by a nucleic acid molecule comprising the nucleic acid SEQ ID NO. 142933, preferably the coding region thereof, or a homolog or fragment thereof, e.g. derived from Arabidopsis thaliana, is increased or generated. For example the activity of a nucleic acid molecule or a polypeptide comprising the nucleic acid, preferably the coding region thereof, or polypeptide or the consensus sequence or the polypeptide motif, as depicted in Table I, II or IV, application No. 17, column 5 or 8 in the respective same line as the nucleic acid molecule SEQ ID NO. 142933 or polypeptide SEQ ID NO. 142934, respectively, or a homolog or a fragment thereof, is increased or generated, or if the activity heat shock transcription factor is increased or generated in a non-human organism, like a microorganism or a plant cell, plant or part thereof, especially with non-targeted localization, whereby the respective line disclose in column 7 the fine chemical raffinose. For example, an increase of the raffinose of at least 1 percent, particularly in a range of 68 to 383-percent is conferred as compared to a corresponding non-transformed wild type non-human organism.

[88065] Accordingly, in one embodiment, an increase of glucose-1-phosphate in a non-human organism, as compared to a corresponding non-transformed wild type non-human organism, is conferred in the process of the invention, if the activity of a polypeptide showing the activity of a protein phosphatase, or if the activity of the polypeptide At5g57050, preferably represented by SEQ ID NO. 5319, or a homolog or fragment thereof, or if the activity of a polypeptide encoded by a nucleic acid molecule comprising the nucleic acid SEQ ID NO. 5318, preferably the coding region thereof, or a homolog or fragment thereof, e.g. derived from Arabidopsis thaliana, is increased or generated. For example the activity of a nucleic acid molecule or a polypeptide comprising the nucleic acid, preferably the coding region thereof, or polypeptide or the consensus sequence or the polypeptide motif, as depicted in Table I, II or IV, application No. 17, column 5 or 8 in the respective same line as the nucleic acid molecule SEQ ID NO. 5318 or polypeptide SEQ ID NO. 5319, respectively, or a homolog or a fragment thereof, is increased or generated, or if the activity protein phosphatase is increased or generated in a non-human organism, like a microorganism or a plant cell, plant or part thereof, especially with non-targeted localization, whereby the respective line disclose in column 7 the fine chemical glucose-1-phosphate. For example, an increase of the glucose-1-phosphate of at least 1 percent, particularly in a range of 37 to 73-percent is conferred as compared to a corresponding non-transformed wild type non-human organism.

[88066] Accordingly, in one embodiment, an increase of myo-inositol in a non-human organism, as compared to a corresponding non-transformed wild type non-human organism, is conferred in the process of the invention, if the activity of a polypeptide showing the activity of a protein phosphatase, or if the activity of the polypeptide At5g57050, preferably represented by SEQ ID NO. 5319, or a homolog or fragment thereof, or if the activity of a polypeptide encoded by a nucleic acid molecule comprising the nucleic acid SEQ ID NO. 5318, preferably the coding region thereof, or a homolog or fragment thereof, e.g. derived from Arabidopsis thaliana, is increased or generated. For example the activity of a nucleic acid molecule or a polypeptide comprising the nucleic acid, preferably the coding region thereof, or polypeptide or the consensus sequence or the polypeptide motif, as depicted in Table I, II or IV, application No. 17, column 5 or 8 in the respective same line as the nucleic acid molecule SEQ ID NO. 5318 or polypeptide SEQ ID NO. 5319, respectively, or a homolog or a fragment thereof, is increased or generated, or if the activity protein phosphatase is increased or generated in a non-human organism, like a microorganism or a plant cell, plant or part thereof, especially with non-targeted localization, whereby the respective line disclose in column 7 the fine chemical myo-inositol. For example, an increase of the myo-inositol of at least 1 percent, particularly in a range of 27 to 112-percent is conferred as compared to a corresponding non-transformed wild type non-human organism.

[88067] Accordingly, in one embodiment, an increase of fructose in a non-human organism, as compared to a corresponding non-transformed wild type non-human organism, is conferred in the process of the invention, if the activity of a polypeptide showing the activity of a RNA-binding protein, or if the activity of the polypeptide At5g60110, preferably represented by SEQ ID NO. 70007, or a homolog or fragment thereof, or if the activity of a polypeptide encoded by a nucleic acid molecule comprising the nucleic acid SEQ ID NO. 70006, preferably the coding region thereof, or a homolog or fragment thereof, e.g. derived from Arabidopsis thaliana, is increased or generated. For example the activity of a nucleic acid molecule or a polypeptide comprising the nucleic acid, preferably the coding region thereof, or polypeptide or the consensus sequence or the polypeptide motif, as depicted in Table I, II or IV, application No. 17, column 5 or 8 in the respective same line as the nucleic acid molecule SEQ ID NO. 70006 or polypeptide SEQ ID NO. 70007, respectively, or a homolog or a fragment thereof, is increased or generated, or if the activity RNA-binding protein is increased or generated in a non-human organism, like a microorganism or a plant cell, plant or part thereof, especially with non-targeted localization, whereby the respective line disclose in column 7 the fine chemical fructose. For example, an increase of the fructose of at least 1 percent, particularly in a range of 90 to 185-percent is conferred as compared to a corresponding non-transformed wild type non-human organism.

[88068] Accordingly, in one embodiment, an increase of glucose in a non-human organism, as compared to a corresponding non-transformed wild type non-human organism, is conferred in the process of the invention, if the activity of a polypeptide showing the activity of a RNA-binding protein, or if the activity of the polypeptide At5g60110, preferably represented by SEQ ID NO. 70007, or a homolog or fragment thereof, or if the activity of a polypeptide encoded by a nucleic acid molecule comprising the nucleic acid SEQ ID NO. 70006, preferably the coding region thereof, or a homolog or fragment thereof, e.g. derived from Arabidopsis thaliana, is increased or generated. For example the activity of a nucleic acid molecule or a polypeptide comprising the nucleic acid, preferably the coding region thereof, or polypeptide or the consensus sequence or the polypeptide motif, as depicted in Table I, II or IV, application No. 17, column 5 or 8 in the respective same line as the nucleic acid molecule SEQ ID NO. 70006 or polypeptide SEQ ID NO. 70007, respectively, or a homolog or a fragment thereof, is increased or generated, or if the activity RNA-binding protein is increased or generated in a non-human organism, like a microorganism or a plant cell, plant or part thereof, especially with non-targeted localization, whereby the respective line disclose in column 7 the fine chemical glucose. For example, an increase of the glucose of at least 1 percent, particularly in a range of 68 to 191-percent is conferred as compared to a corresponding non-transformed wild type non-human organism.

[88069] Accordingly, in one embodiment, an increase of fructose in a non-human organism, as compared to a corresponding non-transformed wild type non-human organism, is conferred in the process of the invention, if the activity of a polypeptide showing the activity of a MADS-box transcription factor, or if the activity of the polypeptide At5g60440, preferably represented by SEQ ID NO. 102900, or a homolog or fragment thereof, or if the activity of a polypeptide encoded by a nucleic acid molecule comprising the nucleic acid SEQ ID NO. 102899, preferably the coding region thereof, or a homolog or fragment thereof, e.g. derived from Arabidopsis thaliana, is increased or generated. For example the activity of a nucleic acid molecule or a polypeptide comprising the nucleic acid, preferably the coding region thereof, or polypeptide or the consensus sequence or the polypeptide motif, as depicted in Table I, II or IV, application No. 17, column 5 or 8 in the respective same line as the nucleic acid molecule SEQ ID NO. 102899 or polypeptide SEQ ID NO. 102900, respectively, or a homolog or a fragment thereof, is increased or generated, or if the activity MADS-box transcription factor is increased or generated in a non-human organism, like a microorganism or a plant cell, plant or part thereof, especially with non-targeted localization, whereby the respective line disclose in column 7 the fine chemical fructose. For example, an increase of the fructose of at least 1 percent, particularly in a range of 91 to 939-percent is conferred as compared to a corresponding non-transformed wild type non-human organism.

[88070] Accordingly, in one embodiment, an increase of raffinose in a non-human organism, as compared to a corresponding non-transformed wild type non-human organism, is conferred in the process of the invention, if the activity of a polypeptide showing the activity of a MADS-box transcription factor, or if the activity of the polypeptide At5g60440, preferably represented by SEQ ID NO. 102900, or a homolog or fragment thereof, or if the activity of a polypeptide encoded by a nucleic acid molecule comprising the nucleic acid SEQ ID NO. 102899, preferably the coding region thereof, or a homolog or fragment thereof, e.g. derived from Arabidopsis thaliana, is increased or generated. For example the activity of a nucleic acid molecule or a polypeptide comprising the nucleic acid, preferably the coding region thereof, or polypeptide or the consensus sequence or the polypeptide motif, as depicted in Table I, II or IV, application No. 17, column 5 or 8 in the respective same line as the nucleic acid molecule SEQ ID NO. 102899 or polypeptide SEQ ID NO. 102900, respectively, or a homolog or a fragment thereof, is increased or generated, or if the activity MADS-box transcription factor is increased or generated in a non-human organism, like a microorganism or a plant cell, plant or part thereof, especially with non-targeted localization, whereby the respective line disclose in column 7 the fine chemical raffinose. For example, an increase of the raffinose of at least 1 percent, particularly in a range of 93 to 149-percent is conferred as compared to a corresponding non-transformed wild type non-human organism.

[88071] Accordingly, in one embodiment, an increase of saccharic acid in a non-human organism, as compared to a corresponding non-transformed wild type non-human organism, is conferred in the process of the invention, if the activity of a polypeptide showing the activity of a MADS-box transcription factor, or if the activity of the polypeptide At5g60440, preferably represented by SEQ ID NO. 102900, or a homolog or fragment thereof, or if the activity of a polypeptide encoded by a nucleic acid molecule comprising the nucleic acid SEQ ID NO. 102899, preferably the coding region thereof, or a homolog or fragment thereof, e.g. derived from Arabidopsis thaliana, is increased or generated. For example the activity of a nucleic acid molecule or a polypeptide comprising the nucleic acid, preferably the coding region thereof, or polypeptide or the consensus sequence or the polypeptide motif, as depicted in Table I, II or IV, application No. 17, column 5 or 8 in the respective same line as the nucleic acid molecule SEQ ID NO. 102899 or polypeptide SEQ ID NO. 102900, respectively, or a homolog or a fragment thereof, is increased or generated, or if the activity MADS-box transcription factor is increased or generated in a non-human organism, like a microorganism or a plant cell, plant or part thereof, especially with non-targeted localization, whereby the respective line disclose in column 7 the fine chemical saccharic acid. For example, an increase of the saccharic acid of at least 1 percent, partitularly in a range of 43 to 64-percent is conferred as compared to a corresponding non-transformed wild type non-human organism.

[88072] Accordingly, in one embodiment, an increase of glucose-1-phosphate in a non-human organism, as compared to a corresponding non-transformed wild type non-human organism, is conferred in the process of the invention, if the activity of a polypeptide showing the activity of a protein kinase, or if the activity of the polypeptide At5g66710, preferably represented by SEQ ID NO. 122804, or a homolog or fragment thereof, or if the activity of a polypeptide encoded by a nucleic acid molecule comprising the nucleic acid SEQ ID NO. 122803, preferably the coding region thereof, or a homolog or fragment thereof, e.g. derived from Arabidopsis thaliana, is increased or generated. For example the activity of a nucleic acid molecule or a polypeptide comprising the nucleic acid, preferably the coding region thereof, or polypeptide or the consensus sequence or the polypeptide motif, as depicted in Table I, II or IV, application No. 17, column 5 or 8 in the respective same line as the nucleic acid molecule SEQ ID NO. 122803 or polypeptide SEQ ID NO. 122804, respectively, or a homolog or a fragment thereof, is increased or generated, or if the activity protein kinase is increased or generated in a non-human organism, like a microorganism or a plant cell, plant or part thereof, especially with non-targeted localization, whereby the respective line disclose in column 7 the fine chemical glucose-1-phosphate. For example, an increase of the glucose-1-phosphate of at least 1 percent, particularly in a range of 20 to 49-percent is conferred as compared to a corresponding non-transformed wild type non-human organism.

[88073] Accordingly, in one embodiment, an increase of raffinose in a non-human organism, as compared to a corresponding non-transformed wild type non-human organism, is conferred in the process of the invention, if the activity of a polypeptide showing the activity of a glycosyl transferase, or if the activity of the polypeptide AvinDRAFT_{—}1534, preferably represented by SEQ ID NO. 26121, or a homolog or fragment thereof, or if the activity of a polypeptide encoded by a nucleic acid molecule comprising the nucleic acid SEQ ID NO. 26120, preferably the coding region thereof, or a homolog or fragment thereof, e.g. derived from Azotobacter vinelandii, is increased or generated. For example the activity of a nucleic acid molecule or a polypeptide comprising the nucleic acid, preferably the coding region thereof, or polypeptide or the consensus sequence or the polypeptide motif, as depicted in Table I, II or IV, application No. 17, column 5 or 8 in the respective same line as the nucleic acid molecule SEQ ID NO. 26120 or polypeptide SEQ ID NO. 26121, respectively, or a homolog or a fragment thereof, is increased or generated, or if the activity glycosyl transferase is increased or generated in a non-human organism, like a microorganism or a plant cell, plant or part thereof, especially with non-targeted localization, whereby the respective line disclose in column 7 the fine chemical raffinose. For example, an increase of the raffinose of at least 1 percent, particularly in a range of 86 to 92-percent is conferred as compared to a corresponding non-transformed wild type non-human organism.

[88074] Accordingly, in one embodiment, an increase of sucrose in a non-human organism, as compared to a corresponding non-transformed wild type non-human organism, is conferred in the process of the invention, if the activity of a polypeptide showing the activity of a secindependent protein translocase, or if the activity of the polypeptide AvinDRAFT_{—}1624, preferably represented by SEQ ID NO. 26197, or a homolog or fragment thereof, or if the activity of a polypeptide encoded by a nucleic acid molecule comprising the nucleic acid SEQ ID NO. 26196, preferably the coding region thereof, or a homolog or fragment thereof, e.g. derived from Azotobacter vinelandii, is increased or generated. For example the activity of a nucleic acid molecule or a polypeptide comprising the nucleic acid, preferably the coding region thereof, or polypeptide or the consensus sequence or the polypeptide motif, as depicted in Table I, II or IV, application No. 17, column 5 or 8 in the respective same line as the nucleic acid molecule SEQ ID NO. 26196 or polypeptide SEQ ID NO. 26197, respectively, or a homolog or a fragment thereof, is increased or generated, or if the activity sec-independent protein translocase is increased or generated in a non-human organism, like a microorganism or a plant cell, plant or part thereof, especially with non-targeted localization, whereby the respective line disclose in column 7 the fine chemical sucrose. For example, an increase of the sucrose of at least 1 percent, particularly in a range of 26 to 41-percent is conferred as compared to a corresponding non-transformed wild type non-human organism.

[88075] Accordingly, in one embodiment, an increase of 3,4,5-trihydroxypentanoic acid in a non-human organism, as compared to a corresponding non-transformed wild type non-human organism, is conferred in the process of the invention, if the activity of a polypeptide showing the activity of a beta-hydroxylase, or if the activity of the polypeptide AvinDRAFT_{—}2091, preferably represented by SEQ ID NO. 6041, or a homolog or fragment thereof, or if the activity of a polypeptide encoded by a nucleic acid molecule comprising the nucleic acid SEQ ID NO. 6040, preferably the coding region thereof, or a homolog or fragment thereof, e.g. derived from Azotobacter vinelandii, is increased or generated. For example the activity of a nucleic acid molecule or a polypeptide comprising the nucleic acid, preferably the coding region thereof, or polypeptide or the consensus sequence or the polypeptide motif, as depicted in Table I, II or IV, application No. 17, column 5 or 8 in the respective same line as the nucleic acid molecule SEQ ID NO. 6040 or polypeptide SEQ ID NO. 6041, respectively, or a homolog or a fragment thereof, is increased or generated, or if the activity beta-hydroxylase is increased or generated in a non-human organism, like a microorganism or a plant cell, plant or part thereof, especially with non-targeted localization, whereby the respective line disclose in column 7 the fine chemical 3,4,5-trihydroxypentanoic acid. For example, an increase of the 3,4,5-trihydroxypentanoic acid of at least 1 percent, particularly in a range of 43 to 115-percent is conferred as compared to a corresponding non-transformed wild type non-human organism.

[88076] Accordingly, in one embodiment, an increase of fructose in a non-human organism, as compared to a corresponding non-transformed wild type non-human organism, is conferred in the process of the invention, if the activity of a polypeptide showing the activity of a elongation factor Tu, or if the activity of the polypeptide AvinDRAFT_{—}2344, preferably represented by SEQ ID NO. 27022, or a homolog or fragment thereof, or if the activity of a polypeptide encoded by a nucleic acid molecule comprising the nucleic acid SEQ ID NO. 27021, preferably the coding region thereof, or a homolog or fragment thereof, e.g. derived from Azotobacter vinelandii, is increased or generated. For example the activity of a nucleic acid molecule or a polypeptide comprising the nucleic acid, preferably the coding region thereof, or polypeptide or the consensus sequence or the polypeptide motif, as depicted in Table I, II or IV, application No. 17, column 5 or 8 in the respective same line as the nucleic acid molecule SEQ ID NO. 27021 or polypeptide SEQ ID NO. 27022, respectively, or a homolog or a fragment thereof, is increased or generated, or if the activity elongation factor Tu is increased or generated in a non-human organism, like a microorganism or a plant cell, plant or part thereof, especially with non-targeted localization, whereby the respective line disclose in column 7 the fine chemical fructose. For example, an increase of the fructose of at least 1 percent, particularly in a range of 131 to 486-percent is conferred as compared to a corresponding non-transformed wild type non-human organism.

[88077] Accordingly, in one embodiment, an increase of glucose in a non-human organism, as compared to a corresponding non-transformed wild type non-human organism, is conferred in the process of the invention, if the activity of a polypeptide showing the activity of a elongation factor Tu, or if the activity of the polypeptide AvinDRAFT_{—}2344, preferably represented by SEQ ID NO. 27022, or a homolog or fragment thereof, or if the activity of a polypeptide encoded by a nucleic acid molecule comprising the nucleic acid SEQ ID NO. 27021, preferably the coding region thereof, or a homolog or fragment thereof, e.g. derived from Azotobacter vinelandii, is increased or generated. For example the activity of a nucleic acid molecule or a polypeptide comprising the nucleic acid, preferably the coding region thereof, or polypeptide or the consensus sequence or the polypeptide motif, as depicted in Table I, II or IV, application No. 17, column 5 or 8 in the respective same line as the nucleic acid molecule SEQ ID NO. 27021 or polypeptide SEQ ID NO. 27022, respectively, or a homolog or a fragment thereof, is increased or generated, or if the activity elongation factor Tu is increased or generated in a non-human organism, like a microorganism or a plant cell, plant or part thereof, especially with non-targeted localization, whereby the respective line disclose in column 7 the fine chemical glucose. For example, an increase of the glucose of at least 1 percent, particularly in a range of 58 to 207-percent is conferred as compared to a corresponding non-transformed wild type non-human organism.

[88078] Accordingly, in one embodiment, an increase of fructose in a non-human organism, as compared to a corresponding non-transformed wild type non-human organism, is conferred in the process of the invention, if the activity of a polypeptide showing the activity of a ABC transporter permease protein, or if the activity of the polypeptide AvinDRAFT_{—}2521, preferably represented by SEQ ID NO. 27883, or a homolog or fragment thereof, or if the activity of a polypeptide encoded by a nucleic acid molecule comprising the nucleic acid SEQ ID NO. 27882, preferably the coding region thereof, or a homolog or fragment thereof, e.g. derived from Azotobacter vinelandii, is increased or generated. For example the activity of a nucleic acid molecule or a polypeptide comprising the nucleic acid, preferably the coding region thereof, or polypeptide or the consensus sequence or the polypeptide motif, as depicted in Table I, II or IV, application No. 17, column 5 or 8 in the respective same line as the nucleic acid molecule SEQ ID NO. 27882 or polypeptide SEQ ID NO. 27883, respectively, or a homolog or a fragment thereof, is increased or generated, or if the activity ABC transporter permease protein is increased or generated in a non-human organism, like a microorganism or a plant cell, plant or part thereof, especially with non-targeted localization, whereby the respective line disclose in column 7 the fine chemical fructose. For example, an increase of the fructose of at least 1 percent, particularly in a range of 77 to 744-percent is conferred as compared to a corresponding non-transformed wild type non-human organism.

[88079] Accordingly, in one embodiment, an increase of sucrose in a non-human organism, as compared to a corresponding non-transformed wild type non-human organism, is conferred in the process of the invention, if the activity of a polypeptide showing the activity of a ABC transporter permease protein, or if the activity of the polypeptide AvinDRAFT_{—}2521, preferably represented by SEQ ID NO. 27883, or a homolog or fragment thereof, or if the activity of a polypeptide encoded by a nucleic acid molecule comprising the nucleic acid SEQ ID NO. 27882, preferably the coding region thereof, or a homolog or fragment thereof, e.g. derived from Azotobacter vinelandii, is increased or generated. For example the activity of a nucleic acid molecule or a polypeptide comprising the nucleic acid, preferably the coding region thereof, or polypeptide or the consensus sequence or the polypeptide motif, as depicted in Table I, II or IV, application No. 17, column 5 or 8 in the respective same line as the nucleic acid molecule SEQ ID NO. 27882 or polypeptide SEQ ID NO. 27883, respectively, or a homolog or a fragment thereof, is increased or generated, or if the activity ABC transporter permease protein is increased or generated in a non-human organism, like a microorganism or a plant cell, plant or part thereof, especially with non-targeted localization, whereby the respective line disclose in column 7 the fine chemical sucrose. For example, an increase of the sucrose of at least 1 percent, particularly in a range of 24 to 95-percent is conferred as compared to a corresponding non-transformed wild type non-human organism.

[88080] Accordingly, in one embodiment, an increase of glucose-1-phosphate in a non-human organism, as compared to a corresponding non-transformed wild type non-human organism, is conferred in the process of the invention, if the activity of a polypeptide showing the activity of a acyl-CoA synthase, or if the activity of the polypeptide AvinDRAFT_{—}2754, preferably represented by SEQ ID NO. 28041, or a homolog or fragment thereof, or if the activity of a polypeptide encoded by a nucleic acid molecule comprising the nucleic acid SEQ ID NO. 28040, preferably the coding region thereof, or a homolog or fragment thereof, e.g. derived from Azotobacter vinelandii, is increased or generated. For example the activity of a nucleic acid molecule or a polypeptide comprising the nucleic acid, preferably the coding region thereof, or polypeptide or the consensus sequence or the polypeptide motif, as depicted in Table I, II or IV, application No. 17, column 5 or 8 in the respective same line as the nucleic acid molecule SEQ ID NO. 28040 or polypeptide SEQ ID NO. 28041, respectively, or a homolog or a fragment thereof, is increased or generated, or if the activity acyl-CoA synthase is increased or generated in a non-human organism, like a microorganism or a plant cell, plant or part thereof, especially with non-targeted localization, whereby the respective line disclose in column 7 the fine chemical glucose-1-phosphate. For example, an increase of the glucose-1-phosphate of at least 1 percent, particularly in a range of 28 to 54-percent is conferred as compared to a corresponding non-transformed wild type non-human organism.

[88081] Accordingly, in one embodiment, an increase of glucose in a non-human organism, as compared to a corresponding non-transformed wild type non-human organism, is conferred in the process of the invention, if the activity of a polypeptide showing the activity of a 2-oxoglutarate dehydrogenase E1 subunit, or if the activity of the polypeptide AvinDRAFT_{—}3028, preferably represented by SEQ ID NO. 6076, or a homolog or fragment thereof, or if the activity of a polypeptide encoded by a nucleic acid molecule comprising the nucleic acid SEQ ID NO. 6075, preferably the coding region thereof, or a homolog or fragment thereof, e.g. derived from Azotobacter vinelandii, is increased or generated. For example the activity of a nucleic acid molecule or a polypeptide comprising the nucleic acid, preferably the coding region thereof, or polypeptide or the consensus sequence or the polypeptide motif, as depicted in Table I, II or IV, application No. 17, column 5 or 8 in the respective same line as the nucleic acid molecule SEQ ID NO. 6075 or polypeptide SEQ ID NO. 6076, respectively, or a homolog or a fragment thereof, is increased or generated, or if the activity 2-oxoglutarate dehydrogenase E1 subunit is increased or generated in a non-human organism, like a microorganism or a plant cell, plant or part thereof, especially with non-targeted localization, whereby the respective line disclose in column 7 the fine chemical glucose. For example, an increase of the glucose of at least 1 percent, particularly in a range of 77 to 249-percent is conferred as compared to a corresponding non-transformed wild type non-human organism.

[88082] Accordingly, in one embodiment, an increase of glucose-1-phosphate in a non-human organism, as compared to a corresponding non-transformed wild type non-human organism, is conferred in the process of the invention, if the activity of a polypeptide showing the activity of a 2-oxoglutarate dehydrogenase E1 subunit, or if the activity of the polypeptide AvinDRAFT_{—}3028, preferably represented by SEQ ID NO. 6076, or a homolog or fragment thereof, or if the activity of a polypeptide encoded by a nucleic acid molecule comprising the nucleic acid SEQ ID NO. 6075, preferably the coding region thereof, or a homolog or fragment thereof, e.g. derived from Azotobacter vinelandii, is increased or generated. For example the activity of a nucleic acid molecule or a polypeptide comprising the nucleic acid, preferably the coding region thereof, or polypeptide or the consensus sequence or the polypeptide motif, as depicted in Table I, II or IV, application No. 17, column 5 or 8 in the respective same line as the nucleic acid molecule SEQ ID NO. 6075 or polypeptide SEQ ID NO. 6076, respectively, or a homolog or a fragment thereof, is increased or generated, or if the activity 2-oxoglutarate dehydrogenase E1 subunit is increased or generated in a non-human organism, like a microorganism or a plant cell, plant or part thereof, especially with non-targeted localization, whereby the respective line disclose in column 7 the fine chemical glucose-1-phosphate. For example, an increase of the glucose-1-phosphate of at least 1 percent, particularly in a range of 19 to 137-percent is conferred as compared to a corresponding non-transformed wild type non-human organism.

[88083] Accordingly, in one embodiment, an increase of myo-inositol in a non-human organism, as compared to a corresponding non-transformed wild type non-human organism, is conferred in the process of the invention, if the activity of a polypeptide showing the activity of a 2-oxoglutarate dehydrogenase E1 subunit, or if the activity of the polypeptide AvinDRAFT_{—}3028, preferably represented by SEQ ID NO. 6076, or a homolog or fragment thereof, or if the activity of a polypeptide encoded by a nucleic acid molecule comprising the nucleic acid SEQ ID NO. 6075, preferably the coding region thereof, or a homolog or fragment thereof, e.g. derived from Azotobacter vinelandii, is increased or generated. For example the activity of a nucleic acid molecule or a polypeptide comprising the nucleic acid, preferably the coding region thereof, or polypeptide or the consensus sequence or the polypeptide motif, as depicted in Table I, II or IV, application No. 17, column 5 or 8 in the respective same line as the nucleic acid molecule SEQ ID NO. 6075 or polypeptide SEQ ID NO. 6076, respectively, or a homolog or a fragment thereof, is increased or generated, or if the activity 2-oxoglutarate dehydrogenase E1 subunit is increased or generated in a non-human organism, like a microorganism or a plant cell, plant or part thereof, especially with non-targeted localization, whereby the respective line disclose in column 7 the fine chemical myo-inositol. For example, an increase of the myo-inositol of at least 1 percent, particularly in a range of 39 to 273-percent is conferred as compared to a corresponding non-transformed wild type non-human organism.

[88084] Accordingly, in one embodiment, an increase of raffinose in a non-human organism, as compared to a corresponding non-transformed wild type non-human organism, is conferred in the process of the invention, if the activity of a polypeptide showing the activity of a 2-oxoglutarate dehydrogenase E1 subunit, or if the activity of the polypeptide AvinDRAFT_{—}3028, preferably represented by SEQ ID NO. 6076, or a homolog or fragment thereof, or if the activity of a polypeptide encoded by a nucleic acid molecule comprising the nucleic acid SEQ ID NO. 6075, preferably the coding region thereof, or a homolog or fragment thereof, e.g. derived from Azotobacter vinelandii, is increased or generated. For example the activity of a nucleic acid molecule or a polypeptide comprising the nucleic acid, preferably the coding region thereof, or polypeptide or the consensus sequence or the polypeptide motif, as depicted in Table I, II or IV, application No. 17, column 5 or 8 in the respective same line as the nucleic acid molecule SEQ ID NO. 6075 or polypeptide SEQ ID NO. 6076, respectively, or a homolog or a fragment thereof, is increased or generated, or if the activity 2-oxoglutarate dehydrogenase E1 subunit is increased or generated in a non-human organism, like a microorganism or a plant cell, plant or part thereof, especially with non-targeted localization, whereby the respective line disclose in column 7 the fine chemical raffinose. For example, an increase of the raffinose of at least 1 percent, particularly in a range of 65 to 493-percent is conferred as compared to a corresponding non-transformed wild type non-human organism.

[88085] Accordingly, in one embodiment, an increase of sedoheptulose-7-phosphate in a non-human organism, as compared to a corresponding non-transformed wild type non-human organism, is conferred in the process of the invention, if the activity of a polypeptide showing the activity of a 2-oxoglutarate dehydrogenase E1 subunit, or if the activity of the polypeptide AvinDRAFT_{—}3028, preferably represented by SEQ ID NO. 6076, or a homolog or fragment thereof, or if the activity of a polypeptide encoded by a nucleic acid molecule comprising the nucleic acid SEQ ID NO. 6075, preferably the coding region thereof, or a homolog or fragment thereof, e.g. derived from Azotobacter vinelandii, is increased or generated. For example the activity of a nucleic acid molecule or a polypeptide comprising the nucleic acid, preferably the coding region thereof, or polypeptide or the consensus sequence or the polypeptide motif, as depicted in Table I, II or IV, application No. 17, column 5 or 8 in the respective same line as the nucleic acid molecule SEQ ID NO. 6075 or polypeptide SEQ ID NO. 6076, respectively, or a homolog or a fragment thereof, is increased or generated, or if the activity 2-oxoglutarate dehydrogenase E1 subunit is increased or generated in a non-human organism, like a microorganism or a plant cell, plant or part thereof, especially with non-targeted localization, whereby the respective line disclose in column 7 the fine chemical sedoheptulose-7-phosphate. For example, an increase of the sedoheptulose-7-phosphate of at least 1 percent, particularly in a range of 50 to 123-percent is conferred as compared to a corresponding non-transformed wild type non-human organism.

[88086] Accordingly, in one embodiment, an increase of raffinose in a non-human organism, as compared to a corresponding non-transformed wild type non-human organism, is conferred in the process of the invention, if the activity of a polypeptide showing the activity of a GDP-mannose dehydrogenase, or if the activity of the polypeptide AvinDRAFT_{—}3135, preferably represented by SEQ ID NO. 72347, or a homolog or fragment thereof, or if the activity of a polypeptide encoded by a nucleic acid molecule comprising the nucleic acid SEQ ID NO. 72346, preferably the coding region thereof, or a homolog or fragment thereof, e.g. derived from Azotobacter vinelandii, is increased or generated. For example the activity of a nucleic acid molecule or a polypeptide comprising the nucleic acid, preferably the coding region thereof, or polypeptide or the consensus sequence or the polypeptide motif, as depicted in Table I, II or IV, application No. 17, column 5 or 8 in the respective same line as the nucleic acid molecule SEQ ID NO. 72346 or polypeptide SEQ ID NO. 72347, respectively, or a homolog or a fragment thereof, is increased or generated, or if the activity GDP-mannose dehydrogenase is increased or generated in a non-human organism, like a microorganism or a plant cell, plant or part thereof, especially with non-targeted localization, whereby the respective line disclose in column 7 the fine chemical raffinose. For example, an increase of the raffinose of at least 1 percent, particularly in a range of 427 to 3237-percent is conferred as compared to a corresponding non-transformed wild type non-human organism.

[88087] Accordingly, in one embodiment, an increase of fructose in a non-human organism, as compared to a corresponding non-transformed wild type non-human organism, is conferred in the process of the invention, if the activity of a polypeptide showing the activity of a transcriptional regulator, or if the activity of the polypeptide AvinDRAFT_{—}3209, preferably represented by SEQ ID NO. 29287, or a homolog or fragment thereof, or if the activity of a polypeptide encoded by a nucleic acid molecule comprising the nucleic acid SEQ ID NO. 29286, preferably the coding region thereof, or a homolog or fragment thereof, e.g. derived from Azotobacter vinelandii, is increased or generated. For example the activity of a nucleic acid molecule or a polypeptide comprising the nucleic acid, preferably the coding region thereof, or polypeptide or the consensus sequence or the polypeptide motif, as depicted in Table I, II or IV, application No. 17, column 5 or 8 in the respective same line as the nucleic acid molecule SEQ ID NO. 29286 or polypeptide SEQ ID NO. 29287, respectively, or a homolog or a fragment thereof, is increased or generated, or if the activity transcriptional regulator is increased or generated in a non-human organism, like a microorganism or a plant cell, plant or part thereof, especially with non-targeted localization, whereby the respective line disclose in column 7 the fine chemical fructose. For example, an increase of the fructose of at least 1 percent, particularly in a range of 78 to 155-percent is conferred as compared to a corresponding non-transformed wild type non-human organism.

[88088] Accordingly, in one embodiment, an increase of glucose in a non-human organism, as compared to a corresponding non-transformed wild type non-human organism, is conferred in the process of the invention, if the activity of a polypeptide showing the activity of a transcriptional regulator, or if the activity of the polypeptide AvinDRAFT_{—}3209, preferably represented by SEQ ID NO. 29287, or a homolog or fragment thereof, or if the activity of a polypeptide encoded by a nucleic acid molecule comprising the nucleic acid SEQ ID NO. 29286, preferably the coding region thereof, or a homolog or fragment thereof, e.g. derived from Azotobacter vinelandii, is increased or generated. For example the activity of a nucleic acid molecule or a polypeptide comprising the nucleic acid, preferably the coding region thereof, or polypeptide or the consensus sequence or the polypeptide motif, as depicted in Table I, II or IV, application No. 17, column 5 or 8 in the respective same line as the nucleic acid molecule SEQ ID NO. 29286 or polypeptide SEQ ID NO. 29287, respectively, or a homolog or a fragment thereof, is increased or generated, or if the activity transcriptional regulator is increased or generated in a non-human organism, like a microorganism or a plant cell, plant or part thereof, especially with non-targeted localization, whereby the respective line disclose in column 7 the fine chemical glucose. For example, an increase of the glucose of at least 1 percent, particularly in a range of 72 to 167-percent is conferred as compared to a corresponding non-transformed wild type non-human organism.

[88089] Accordingly, in one embodiment, an increase of glucose-1-phosphate in a non-human organism, as compared to a corresponding non-transformed wild type non-human organism, is conferred in the process of the invention, if the activity of a polypeptide showing the activity of a transcriptional regulator, or if the activity of the polypeptide AvinDRAFT_{—}3209, preferably represented by SEQ ID NO. 29287, or a homolog or fragment thereof, or if the activity of a polypeptide encoded by a nucleic acid molecule comprising the nucleic acid SEQ ID NO. 29286, preferably the coding region thereof, or a homolog or fragment thereof, e.g. derived from Azotobacter vinelandii, is increased or generated. For example the activity of a nucleic acid molecule or a polypeptide comprising the nucleic acid, preferably the coding region thereof, or polypeptide or the consensus sequence or the polypeptide motif, as depicted in Table I, II or IV, application No. 17, column 5 or 8 in the respective same line as the nucleic acid molecule SEQ ID NO. 29286 or polypeptide SEQ ID NO. 29287, respectively, or a homolog or a fragment thereof, is increased or generated, or if the activity transcriptional regulator is increased or generated in a non-human organism, like a microorganism or a plant cell, plant or part thereof, especially with non-targeted localization, whereby the respective line disclose in column 7 the fine chemical glucose-1-phosphate. For example, an increase of the glucose-1-phosphate of at least 1 percent, particularly in a range of 20 to 26-percent is conferred as compared to a corresponding non-transformed wild type non-human organism.

[88090] Accordingly, in one embodiment, an increase of glucose-1-phosphate in a non-human organism, as compared to a corresponding non-transformed wild type non-human organism, is conferred in the process of the invention, if the activity of a polypeptide showing the activity of a oxidoreductase, or if the activity of the polypeptide AvinDRAFT_{—}3253, preferably represented by SEQ ID NO. 29501, or a homolog or fragment thereof, or if the activity of a polypeptide encoded by a nucleic acid molecule comprising the nucleic acid SEQ ID NO. 29500, preferably the coding region thereof, or a homolog or fragment thereof, e.g. derived from Azotobacter vinelandii, is increased or generated. For example the activity of a nucleic acid molecule or a polypeptide comprising the nucleic acid, preferably the coding region thereof, or polypeptide or the consensus sequence or the polypeptide motif, as depicted in Table I, II or IV, application No. 17, column 5 or 8 in the respective same line as the nucleic acid molecule SEQ ID NO. 29500 or polypeptide SEQ ID NO. 29501, respectively, or a homolog or a fragment thereof, is increased or generated, or if the activity oxidoreductase is increased or generated in a non-human organism, like a microorganism or a plant cell, plant or part thereof, especially with non-targeted localization, whereby the respective line disclose in column 7 the fine chemical glucose-1-phosphate. For example, an increase of the glucose-1-phosphate of at least 1 percent, particularly in a range of 19 to 61-percent is conferred as compared to a corresponding non-transformed wild type non-human organism.

[88091] Accordingly, in one embodiment, an increase of myo-inositol in a non-human organism, as compared to a corresponding non-transformed wild type non-human organism, is conferred in the process of the invention, if the activity of a polypeptide showing the activity of a ThiF family protein, or if the activity of the polypeptide AvinDRAFT_{—}3577, preferably represented by SEQ ID NO. 111156, or a homolog or fragment thereof, or if the activity of a polypeptide encoded by a nucleic acid molecule comprising the nucleic acid SEQ ID NO. 111155, preferably the coding region thereof, or a homolog or fragment thereof, e.g. derived from Azotobacter vinelandii, is increased or generated. For example the activity of a nucleic acid molecule or a polypeptide comprising the nucleic acid, preferably the coding region thereof, or polypeptide or the consensus sequence or the polypeptide motif, as depicted in Table I, II or IV, application No. 17, column 5 or 8 in the respective same line as the nucleic acid molecule SEQ ID NO. 111155 or polypeptide SEQ ID NO. 111156, respectively, or a homolog or a fragment thereof, is increased or generated, or if the activity ThiF family protein is increased or generated in a non-human organism, like a microorganism or a plant cell, plant or part thereof, especially with non-targeted localization, whereby the respective line disclose in column 7 the fine chemical myo-inositol. For example, an increase of the myo-inositol of at least 1 percent, particularly in a range of 27 to 74-percent is conferred as compared to a corresponding non-transformed wild type non-human organism.

[88092] Accordingly, in one embodiment, an increase of fructose in a non-human organism, as compared to a corresponding non-transformed wild type non-human organism, is conferred in the process of the invention, if the activity of a polypeptide showing the activity of a CTP synthase, or if the activity of the polypeptide AvinDRAFT_{—}3605, preferably represented by SEQ ID NO. 31027, or a homolog or fragment thereof, or if the activity of a polypeptide encoded by a nucleic acid molecule comprising the nucleic acid SEQ ID NO. 31026, preferably the coding region thereof, or a homolog or fragment thereof, e.g. derived from Azotobacter vinelandii, is increased or generated. For example the activity of a nucleic acid molecule or a polypeptide comprising the nucleic acid, preferably the coding region thereof, or polypeptide or the consensus sequence or the polypeptide motif, as depicted in Table I, II or IV, application No. 17, column 5 or 8 in the respective same line as the nucleic acid molecule SEQ ID NO. 31026 or polypeptide SEQ ID NO. 31027, respectively, or a homolog or a fragment thereof, is increased or generated, or if the activity CTP synthase is increased or generated in a non-human organism, like a microorganism or a plant cell, plant or part thereof, especially with non-targeted localization, whereby the respective line disclose in column 7 the fine chemical fructose. For example, an increase of the fructose of at least 1 percent, particularly in a range of 170 to 743-percent is conferred as compared to a corresponding non-transformed wild type non-human organism.

[88093] Accordingly, in one embodiment, an increase of glucose in a non-human organism, as compared to a corresponding non-transformed wild type non-human organism, is conferred in the process of the invention, if the activity of a polypeptide showing the activity of a CTP synthase, or if the activity of the polypeptide AvinDRAFT_{—}3605, preferably represented by SEQ ID NO. 31027, or a homolog or fragment thereof, or if the activity of a polypeptide encoded by a nucleic acid molecule comprising the nucleic acid SEQ ID NO. 31026, preferably the coding region thereof, or a homolog or fragment thereof, e.g. derived from Azotobacter vinelandii, is increased or generated. For example the activity of a nucleic acid molecule or a polypeptide comprising the nucleic acid, preferably the coding region thereof, or polypeptide or the consensus sequence or the polypeptide motif, as depicted in Table I, II or IV, application No. 17, column 5 or 8 in the respective same line as the nucleic acid molecule SEQ ID NO. 31026 or polypeptide SEQ ID NO. 31027, respectively, or a homolog or a fragment thereof, is increased or generated, or if the activity CTP synthase is increased or generated in a non-human organism, like a microorganism or a plant cell, plant or part thereof, especially with non-targeted localization, whereby the respective line disclose in column 7 the fine chemical glucose. For example, an increase of the glucose of at least 1 percent, particularly in a range of 67 to 683-percent is conferred as compared to a corresponding non-transformed wild type non-human organism.

[88094] Accordingly, in one embodiment, an increase of sucrose in a non-human organism, as compared to a corresponding non-transformed wild type non-human organism, is conferred in the process of the invention, if the activity of a polypeptide showing the activity of a CTP synthase, or if the activity of the polypeptide AvinDRAFT_{—}3605, preferably represented by SEQ ID NO. 31027, or a homolog or fragment thereof, or if the activity of a polypeptide encoded by a nucleic acid molecule comprising the nucleic acid SEQ ID NO. 31026, preferably the coding region thereof, or a homolog or fragment thereof, e.g. derived from Azotobacter vinelandii, is increased or generated. For example the activity of a nucleic acid molecule or a polypeptide comprising the nucleic acid, preferably the coding region thereof, or polypeptide or the consensus sequence or the polypeptide motif, as depicted in Table I, II or IV, application No. 17, column 5 or 8 in the respective same line as the nucleic acid molecule SEQ ID NO. 31026 or polypeptide SEQ ID NO. 31027, respectively, or a homolog or a fragment thereof, is increased or generated, or if the activity CTP synthase is increased or generated in a non-human organism, like a microorganism or a plant cell, plant or part thereof, especially with non-targeted localization, whereby the respective line disclose in column 7 the fine chemical sucrose. For example, an increase of the sucrose of at least 1 percent, particularly in a range of 46 to 102-percent is conferred as compared to a corresponding non-transformed wild type non-human organism.

[88095] Accordingly, in one embodiment, an increase of raffinose in a non-human organism, as compared to a corresponding non-transformed wild type non-human organism, is conferred in the process of the invention, if the activity of a polypeptide showing the activity of a protein-L-isoaspartate O-methyltransferase, or if the activity of the polypeptide AvinDRAFT_{—}3616, preferably represented by SEQ ID NO. 143122, or a homolog or fragment thereof, or if the activity of a polypeptide encoded by a nucleic acid molecule comprising the nucleic acid SEQ ID NO. 143121, preferably the coding region thereof, or a homolog or fragment thereof, e.g. derived from Azotobacter vinelandii, is increased or generated. For example the activity of a nucleic acid molecule or a polypeptide comprising the nucleic acid, preferably the coding region thereof, or polypeptide or the consensus sequence or the polypeptide motif, as depicted in Table I, II or IV, application No. 17, column 5 or 8 in the respective same line as the nucleic acid molecule SEQ ID NO. 143121 or polypeptide SEQ ID NO. 143122, respectively, or a homolog or a fragment thereof, is increased or generated, or if the activity protein-L-isoaspartate O-methyltransferase is increased or generated in a non-human organism, like a microorganism or a plant cell, plant or part thereof, especially with non-targeted localization, whereby the respective line disclose in column 7 the fine chemical raffinose. For example, an increase of the raffinose of at least 1 percent, particularly in a range of 55 to 99-percent is conferred as compared to a corresponding non-transformed wild type non-human organism.

[88096] Accordingly, in one embodiment, an increase of myo-inositol in a non-human organism, as compared to a corresponding non-transformed wild type non-human organism, is conferred in the process of the invention, if the activity of a polypeptide showing the activity of a recombinase A, or if the activity of the polypeptide AvinDRAFT_{—}3629, preferably represented by SEQ ID NO. 114232, or a homolog or fragment thereof, or if the activity of a polypeptide encoded by a nucleic acid molecule comprising the nucleic acid SEQ ID NO. 114231, preferably the coding region thereof, or a homolog or fragment thereof, e.g. derived from Azotobacter vinelandii, is increased or generated. For example the activity of a nucleic acid molecule or a polypeptide comprising the nucleic acid, preferably the coding region thereof, or polypeptide or the consensus sequence or the polypeptide motif, as depicted in Table I, II or IV, application No. 17, column 5 or 8 in the respective same line as the nucleic acid molecule SEQ ID NO. 114231 or polypeptide SEQ ID NO. 114232, respectively, or a homolog or a fragment thereof, is increased or generated, or if the activity recombinase A is increased or generated in a non-human organism, like a microorganism or a plant cell, plant or part thereof, especially with non-targeted localization, whereby the respective line disclose in column 7 the fine chemical myo-inositol. For example, an increase of the myo-inositol of at least 1 percent, particularly in a range of 44 to 288-percent is conferred as compared to a corresponding non-transformed wild type non-human organism.

[88097] Accordingly, in one embodiment, an increase of raffinose in a non-human organism, as compared to a corresponding non-transformed wild type non-human organism, is conferred in the process of the invention, if the activity of a polypeptide showing the activity of a recombinase A, or if the activity of the polypeptide AvinDRAFT_{—}3629, preferably represented by SEQ ID NO. 114232, or a homolog or fragment thereof, or if the activity of a polypeptide encoded by a nucleic acid molecule comprising the nucleic acid SEQ ID NO. 114231, preferably the coding region thereof, or a homolog or fragment thereof, e.g. derived from Azotobacter vinelandii, is increased or generated. For example the activity of a nucleic acid molecule or a polypeptide comprising the nucleic acid, preferably the coding region thereof, or polypeptide or the consensus sequence or the polypeptide motif, as depicted in Table I, II or IV, application No. 17, column 5 or 8 in the respective same line as the nucleic acid molecule SEQ ID NO. 114231 or polypeptide SEQ ID NO. 114232, respectively, or a homolog or a fragment thereof, is increased or generated, or if the activity recombinase A is increased or generated in a non-human organism, like a microorganism or a plant cell, plant or part thereof, especially with non-targeted localization, whereby the respective line disclose in column 7 the fine chemical raffinose. For example, an increase of the raffinose of at least 1 percent, particularly in a range of 107 to 400-percent is conferred as compared to a corresponding non-transformed wild type non-human organism.

[88098] Accordingly, in one embodiment, an increase of myo-inositol in a non-human organism, as compared to a corresponding non-transformed wild type non-human organism, is conferred in the process of the invention, if the activity of a polypeptide showing the activity of a acetyltransferase, or if the activity of the polypeptide AvinDRAFT_{—}4265, preferably represented by SEQ ID NO. 143399, or a homolog or fragment thereof, or if the activity of a polypeptide encoded by a nucleic acid molecule comprising the nucleic acid SEQ ID NO. 143398, preferably the coding region thereof, or a homolog or fragment thereof, e.g. derived from Azotobacter vinelandii, is increased or generated. For example the activity of a nucleic acid molecule or a polypeptide comprising the nucleic acid, preferably the coding region thereof, or polypeptide or the consensus sequence or the polypeptide motif, as depicted in Table I, II or IV, application No. 17, column 5 or 8 in the respective same line as the nucleic acid molecule SEQ ID NO. 143398 or polypeptide SEQ ID NO. 143399, respectively, or a homolog or a fragment thereof, is increased or generated, or if the activity acetyltransferase is increased or generated in a non-human organism, like a microorganism or a plant cell, plant or part thereof, especially with non-targeted localization, whereby the respective line disclose in column 7 the fine chemical myo-inositol. For example, an increase of the myo-inositol of at least 1 percent, particularly in a range of 29 to 72-percent is conferred as compared to a corresponding non-transformed wild type non-human organism.

[88099] Accordingly, in one embodiment, an increase of raffinose in a non-human organism, as compared to a corresponding non-transformed wild type non-human organism, is conferred in the process of the invention, if the activity of a polypeptide showing the activity of a acetyltransferase, or if the activity of the polypeptide AvinDRAFT_{—}4265, preferably represented by SEQ ID NO. 143399, or a homolog or fragment thereof, or if the activity of a polypeptide encoded by a nucleic acid molecule comprising the nucleic acid SEQ ID NO. 143398, preferably the coding region thereof, or a homolog or fragment thereof, e.g. derived from Azotobacter vinelandii, is increased or generated. For example the activity of a nucleic acid molecule or a polypeptide comprising the nucleic acid, preferably the coding region thereof, or polypeptide or the consensus sequence or the polypeptide motif, as depicted in Table I, II or IV, application No. 17, column 5 or 8 in the respective same line as the nucleic acid molecule SEQ ID NO. 143398 or polypeptide SEQ ID NO. 143399, respectively, or a homolog or a fragment thereof, is increased or generated, or if the activity acetyltransferase is increased or generated in a non-human organism, like a microorganism or a plant cell, plant or part thereof, especially with non-targeted localization, whereby the respective line disclose in column 7 the fine chemical raffinose. For example, an increase of the raffinose of at least 1 percent, particularly in a range of 62 to 126-percent is conferred as compared to a corresponding non-transformed wild type non-human organism.

[88100] Accordingly, in one embodiment, an increase of raffinose in a non-human organism, as compared to a corresponding non-transformed wild type non-human organism, is conferred in the process of the invention, if the activity of a polypeptide showing the activity of a enoyl-CoA hydratase, or if the activity of the polypeptide AvinDRAFT_{—}4420, preferably represented by SEQ ID NO. 73039, or a homolog or fragment thereof, or if the activity of a polypeptide encoded by a nucleic acid molecule comprising the nucleic acid SEQ ID NO. 73038, preferably the coding region thereof, or a homolog or fragment thereof, e.g. derived from Azotobacter vinelandii, is increased or generated. For example the activity of a nucleic acid molecule or a polypeptide comprising the nucleic acid, preferably the coding region thereof, or polypeptide or the consensus sequence or the polypeptide motif, as depicted in Table I, II or IV, application No. 17, column 5 or 8 in the respective same line as the nucleic acid molecule SEQ ID NO. 73038 or polypeptide SEQ ID NO. 73039, respectively, or a homolog or a fragment thereof, is increased or generated, or if the activity enoyl-CoA hydratase is increased or generated in a non-human organism, like a microorganism or a plant cell, plant or part thereof, especially with non-targeted localization, whereby the respective line disclose in column 7 the fine chemical raffinose. For example, an increase of the raffinose of at least 1 percent, particularly in a range of 74 to 180-percent is conferred as compared to a corresponding non-transformed wild type non-human organism.

[88101] Accordingly, in one embodiment, an increase of fructose in a non-human organism, as compared to a corresponding non-transformed wild type non-human organism, is conferred in the process of the invention, if the activity of a polypeptide showing the activity of a NADH-quinone oxidoreductase subunit, or if the activity of the polypeptide AvinDRAFT_{—}4606, preferably represented by SEQ ID NO. 73720, or a homolog or fragment thereof, or if the activity of a polypeptide encoded by a nucleic acid molecule comprising the nucleic acid SEQ ID NO. 73719, preferably the coding region thereof, or a homolog or fragment thereof, e.g. derived from Azotobacter vinelandii, is increased or generated. For example the activity of a nucleic acid molecule or a polypeptide comprising the nucleic acid, preferably the coding region thereof, or polypeptide or the consensus sequence or the polypeptide motif, as depicted in Table I, II or IV, application No. 17, column 5 or 8 in the respective same line as the nucleic acid molecule SEQ ID NO. 73719 or polypeptide SEQ ID NO. 73720, respectively, or a homolog or a fragment thereof, is increased or generated, or if the activity NADH-quinone oxidoreductase subunit is increased or generated in a non-human organism, like a microorganism or a plant cell, plant or part thereof, especially with non-targeted localization, whereby the respective line disclose in column 7 the fine chemical fructose. For example, an increase of the fructose of at least 1 percent, particularly in a range of 125 to 130-percent is conferred as compared to a corresponding non-transformed wild type non-human organism.

[88102] Accordingly, in one embodiment, an increase of glucose-1-phosphate in a non-human organism, as compared to a corresponding non-transformed wild type non-human organism, is conferred in the process of the invention, if the activity of a polypeptide showing the activity of a NADH-quinone oxidoreductase subunit, or if the activity of the polypeptide AvinDRAFT_{—}4606, preferably represented by SEQ ID NO. 73720, or a homolog or fragment thereof, or if the activity of a polypeptide encoded by a nucleic acid molecule comprising the nucleic acid SEQ ID NO. 73719, preferably the coding region thereof, or a homolog or fragment thereof, e.g. derived from Azotobacter vinelandii, is increased or generated. For example the activity of a nucleic acid molecule or a polypeptide comprising the nucleic acid, preferably the coding region thereof, or polypeptide or the consensus sequence or the polypeptide motif, as depicted in Table I, II or IV, application No. 17, column 5 or 8 in the respective same line as the nucleic acid molecule SEQ ID NO. 73719 or polypeptide SEQ ID NO. 73720, respectively, or a homolog or a fragment thereof, is increased or generated, or if the activity NADH-quinone oxidoreductase subunit is increased or generated in a non-human organism, like a microorganism or a plant cell, plant or part thereof, especially with non-targeted localization, whereby the respective line disclose in column 7 the fine chemical glucose-1-phosphate. For example, an increase of the glucose-1-phosphate of at least 1 percent, particularly in a range of 24 to 34-percent is conferred as compared to a corresponding non-transformed wild type non-human organism.

[88103] Accordingly, in one embodiment, an increase of sucrose in a non-human organism, as compared to a corresponding non-transformed wild type non-human organism, is conferred in the process of the invention, if the activity of a polypeptide showing the activity of a NADH-quinone oxidoreductase subunit, or if the activity of the polypeptide AvinDRAFT_{—}4606, preferably represented by SEQ ID NO. 73720, or a homolog or fragment thereof, or if the activity of a polypeptide encoded by a nucleic acid molecule comprising the nucleic acid SEQ ID NO. 73719, preferably the coding region thereof, or a homolog or fragment thereof, e.g. derived from Azotobacter vinelandii, is increased or generated. For example the activity of a nucleic acid molecule or a polypeptide comprising the nucleic acid, preferably the coding region thereof, or polypeptide or the consensus sequence or the polypeptide motif, as depicted in Table I, II or IV, application No. 17, column 5 or 8 in the respective same line as the nucleic acid molecule SEQ ID NO. 73719 or polypeptide SEQ ID NO. 73720, respectively, or a homolog or a fragment thereof, is increased or generated, or if the activity NADH-quinone oxidoreductase subunit is increased or generated in a non-human organism, like a microorganism or a plant cell, plant or part thereof, especially with non-targeted localization, whereby the respective line disclose in column 7 the fine chemical sucrose. For example, an increase of the sucrose of at least 1 percent, particularly in a range of 28 to 74-percent is conferred as compared to a corresponding non-transformed wild type non-human organism.

[88104] Accordingly, in one embodiment, an increase of 3,4,5-trihydroxypentanoic acid in a non-human organism, as compared to a corresponding non-transformed wild type non-human organism, is conferred in the process of the invention, if the activity of a polypeptide showing the activity of a isopropylmalate isomerase large subunit, or if the activity of the polypeptide AvinDRAFT_{—}4847, preferably represented by SEQ ID NO. 102942, or a homolog or fragment thereof, or if the activity of a polypeptide encoded by a nucleic acid molecule comprising the nucleic acid SEQ ID NO. 102941, preferably the coding region thereof, or a homolog or fragment thereof, e.g. derived from Azotobacter vinelandii, is increased or generated. For example the activity of a nucleic acid molecule or a polypeptide comprising the nucleic acid, preferably the coding region thereof, or polypeptide or the consensus sequence or the polypeptide motif, as depicted in Table I, II or IV, application No. 17, column 5 or 8 in the respective same line as the nucleic acid molecule SEQ ID NO. 102941 or polypeptide SEQ ID NO. 102942, respectively, or a homolog or a fragment thereof, is increased or generated, or if the activity isopropylmalate isomerase large subunit is increased or generated in a non-human organism, like a microorganism or a plant cell, plant or part thereof, especially with non-targeted localization, whereby the respective line disclose in column 7 the fine chemical 3,4,5-trihydroxypentanoic acid. For example, an increase of the 3,4,5-trihydroxypentanoic acid of at least 1 percent, particularly in a range of 44 to 86-percent is conferred as compared to a corresponding non-transformed wild type non-human organism.

[88105] Accordingly, in one embodiment, an increase of fructose in a non-human organism, as compared to a corresponding non-transformed wild type non-human organism, is conferred in the process of the invention, if the activity of a polypeptide showing the activity of a hydrolase, or if the activity of the polypeptide AvinDRAFT_{—}5103, preferably represented by SEQ ID NO. 6511, or a homolog or fragment thereof, or if the activity of a polypeptide encoded by a nucleic acid molecule comprising the nucleic acid SEQ ID NO. 6510, preferably the coding region thereof, or a homolog or fragment thereof, e.g. derived from Azotobacter vinelandii, is increased or generated. For example the activity of a nucleic acid molecule or a polypeptide comprising the nucleic acid, preferably the coding region thereof, or polypeptide or the consensus sequence or the polypeptide motif, as depicted in Table I, II or IV, application No. 17, column 5 or 8 in the respective same line as the nucleic acid molecule SEQ ID NO. 6510 or polypeptide SEQ ID NO. 6511, respectively, or a homolog or a fragment thereof, is increased or generated, or if the activity hydrolase is increased or generated in a non-human organism, like a microorganism or a plant cell, plant or part thereof, especially with non-targeted localization, whereby the respective line disclose in column 7 the fine chemical fructose. For example, an increase of the fructose of at least 1 percent, particularly in a range of 83 to 1502-percent is conferred as compared to a corresponding non-transformed wild type non-human organism.

[88106] Accordingly, in one embodiment, an increase of glucose in a non-human organism, as compared to a corresponding non-transformed wild type non-human organism, is conferred in the process of the invention, if the activity of a polypeptide showing the activity of a hydrolase, or if the activity of the polypeptide AvinDRAFT_{—}5103, preferably represented by SEQ ID NO. 6511, or a homolog or fragment thereof, or if the activity of a polypeptide encoded by a nucleic acid molecule comprising the nucleic acid SEQ ID NO. 6510, preferably the coding region thereof, or a homolog or fragment thereof, e.g. derived from Azotobacter vinelandii, is increased or generated. For example the activity of a nucleic acid molecule or a polypeptide comprising the nucleic acid, preferably the coding region thereof, or polypeptide or the consensus sequence or the polypeptide motif, as depicted in Table I, II or IV, application No. 17, column 5 or 8 in the respective same line as the nucleic acid molecule SEQ ID NO. 6510 or polypeptide SEQ ID NO. 6511, respectively, or a homolog or a fragment thereof, is increased or generated, or if the activity hydrolase is increased or generated in a non-human organism, like a microorganism or a plant cell, plant or part thereof, especially with non-targeted localization, whereby the respective line disclose in column 7 the fine chemical glucose. For example, an increase of the glucose of at least 1 percent, particularly in a range of 62 to 605-percent is conferred as compared to a corresponding non-transformed wild type non-human organism.

[88107] Accordingly, in one embodiment, an increase of sucrose in a non-human organism, as compared to a corresponding non-transformed wild type non-human organism, is conferred in the process of the invention, if the activity of a polypeptide showing the activity of a hydrolase, or if the activity of the polypeptide AvinDRAFT_{—}5103, preferably represented by SEQ ID NO. 6511, or a homolog or fragment thereof, or if the activity of a polypeptide encoded by a nucleic acid molecule comprising the nucleic acid SEQ ID NO. 6510, preferably the coding region thereof, or a homolog or fragment thereof, e.g. derived from Azotobacter vinelandii, is increased or generated. For example the activity of a nucleic acid molecule or a polypeptide comprising the nucleic acid, preferably the coding region thereof, or polypeptide or the consensus sequence or the polypeptide motif, as depicted in Table I, II or IV, application No. 17, column 5 or 8 in the respective same line as the nucleic acid molecule SEQ ID NO. 6510 or polypeptide SEQ ID NO. 6511, respectively, or a homolog or a fragment thereof, is increased or generated, or if the activity hydrolase is increased or generated in a non-human organism, like a microorganism or a plant cell, plant or part thereof, especially with non-targeted localization, whereby the respective line disclose in column 7 the fine chemical sucrose. For example, an increase of the sucrose of at least 1 percent, particularly in a range of 31 to 48-percent is conferred as compared to a corresponding non-transformed wild type non-human organism.

[88108] Accordingly, in one embodiment, an increase of fructose in a non-human organism, as compared to a corresponding non-transformed wild type non-human organism, is conferred in the process of the invention, if the activity of a polypeptide showing the activity of a glutamate-ammonia-ligase, or if the activity of the polypeptide AvinDRAFT_{—}5246, preferably represented by SEQ ID NO. 32038, or a homolog or fragment thereof, or if the activity of a polypeptide encoded by a nucleic acid molecule comprising the nucleic acid SEQ ID NO. 32037, preferably the coding region thereof, or a homolog or fragment thereof, e.g. derived from Azotobacter vinelandii, is increased or generated. For example the activity of a nucleic acid molecule or a polypeptide comprising the nucleic acid, preferably the coding region thereof, or polypeptide or the consensus sequence or the polypeptide motif, as depicted in Table I, II or IV, application No. 17, column 5 or 8 in the respective same line as the nucleic acid molecule SEQ ID NO. 32037 or polypeptide SEQ ID NO. 32038, respectively, or a homolog or a fragment thereof, is increased or generated, or if the activity glutamate-ammonia-ligase is increased or generated in a non-human organism, like a microorganism or a plant cell, plant or part thereof, especially with non-targeted localization, whereby the respective line disclose in column 7 the fine chemical fructose. For example, an increase of the fructose of at least 1 percent, particularly in a range of 82 to 370-percent is conferred as compared to a corresponding non-transformed wild type non-human organism.

[88109] Accordingly, in one embodiment, an increase of glucose in a non-human organism, as compared to a corresponding non-transformed wild type non-human organism, is conferred in the process of the invention, if the activity of a polypeptide showing the activity of a glutamate-ammonia-ligase, or if the activity of the polypeptide AvinDRAFT_{—}5246, preferably represented by SEQ ID NO. 32038, or a homolog or fragment thereof, or if the activity of a polypeptide encoded by a nucleic acid molecule comprising the nucleic acid SEQ ID NO. 32037, preferably the coding region thereof, or a homolog or fragment thereof, e.g. derived from Azotobacter vinelandii, is increased or generated. For example the activity of a nucleic acid molecule or a polypeptide comprising the nucleic acid, preferably the coding region thereof, or polypeptide or the consensus sequence or the polypeptide motif, as depicted in Table I, II or IV, application No. 17, column 5 or 8 in the respective same line as the nucleic acid molecule SEQ ID NO. 32037 or polypeptide SEQ ID NO. 32038, respectively, or a homolog or a fragment thereof, is increased or generated, or if the activity glutamate-ammonia-ligase is increased or generated in a non-human organism, like a microorganism or a plant cell, plant or part thereof, especially with non-targeted localization, whereby the respective line disclose in column 7 the fine chemical glucose. For example, an increase of the glucose of at least 1 percent, particularly in a range of 61 to 200-percent is conferred as compared to a corresponding non-transformed wild type non-human organism.

[88110] Accordingly, in one embodiment, an increase of sucrose in a non-human organism, as compared to a corresponding non-transformed wild type non-human organism, is conferred in the process of the invention, if the activity of a polypeptide showing the activity of a glutamate-ammonia-ligase, or if the activity of the polypeptide AvinDRAFT_{—}5246, preferably represented by SEQ ID NO. 32038, or a homolog or fragment thereof, or if the activity of a polypeptide encoded by a nucleic acid molecule comprising the nucleic acid SEQ ID NO. 32037, preferably the coding region thereof, or a homolog or fragment thereof, e.g. derived from Azotobacter vinelandii, is increased or generated. For example the activity of a nucleic acid molecule or a polypeptide comprising the nucleic acid, preferably the coding region thereof, or polypeptide or the consensus sequence or the polypeptide motif, as depicted in Table I, II or IV, application No. 17, column 5 or 8 in the respective same line as the nucleic acid molecule SEQ ID NO. 32037 or polypeptide SEQ ID NO. 32038, respectively, or a homolog or a fragment thereof, is increased or generated, or if the activity glutamate-ammonia-ligase is increased or generated in a non-human organism, like a microorganism or a plant cell, plant or part thereof, especially with non-targeted localization, whereby the respective line disclose in column 7 the fine chemical sucrose. For example, an increase of the sucrose of at least 1 percent, particularly in a range of 27 to 38-percent is conferred as compared to a corresponding non-transformed wild type non-human organism.

[88111] Accordingly, in one embodiment, an increase of fructose in a non-human organism, as compared to a corresponding non-transformed wild type non-human organism, is conferred in the process of the invention, if the activity of a polypeptide showing the activity of a fumarylacetoacetate hydrolase, or if the activity of the polypeptide AvinDRAFT_{—}5292, preferably represented by SEQ ID NO. 32309, or a homolog or fragment thereof, or if the activity of a polypeptide encoded by a nucleic acid molecule comprising the nucleic acid SEQ ID NO. 32308, preferably the coding region thereof, or a homolog or fragment thereof, e.g. derived from Azotobacter vinelandii, is increased or generated. For example the activity of a nucleic acid molecule or a polypeptide comprising the nucleic acid, preferably the coding region thereof, or polypeptide or the consensus sequence or the polypeptide motif, as depicted in Table I, II or IV, application No. 17, column 5 or 8 in the respective same line as the nucleic acid molecule SEQ ID NO. 32308 or polypeptide SEQ ID NO. 32309, respectively, or a homolog or a fragment thereof, is increased or generated, or if the activity fumarylacetoacetate hydrolase is increased or generated in a non-human organism, like a microorganism or a plant cell, plant or part thereof, especially with non-targeted localization, whereby the respective line disclose in column 7 the fine chemical fructose. For example, an increase of the fructose of at least 1 percent, particularly in a range of 186 to 188-percent is conferred as compared to a corresponding non-transformed wild type non-human organism.

[88112] Accordingly, in one embodiment, an increase of raffinose in a non-human organism, as compared to a corresponding non-transformed wild type non-human organism, is conferred in the process of the invention, if the activity of a polypeptide showing the activity of a glycosyltransferase, or if the activity of the polypeptide AvinDRAFT_{—}5967, preferably represented by SEQ ID NO. 143496, or a homolog or fragment thereof, or if the activity of a polypeptide encoded by a nucleic acid molecule comprising the nucleic acid SEQ ID NO. 143495, preferably the coding region thereof, or a homolog or fragment thereof, e.g. derived from Azotobacter vinelandii, is increased or generated. For example the activity of a nucleic acid molecule or a polypeptide comprising the nucleic acid, preferably the coding region thereof, or polypeptide or the consensus sequence or the polypeptide motif, as depicted in Table I, II or IV, application No. 17, column 5 or 8 in the respective same line as the nucleic acid molecule SEQ ID NO. 143495 or polypeptide SEQ ID NO. 143496, respectively, or a homolog or a fragment thereof, is increased or generated, or if the activity glycosyltransferase is increased or generated in a non-human organism, like a microorganism or a plant cell, plant or part thereof, especially with non-targeted localization, whereby the respective line disclose in column 7 the fine chemical raffinose. For example, an increase of the raffinose of at least 1 percent, particularly in a range of 1093 to 3766-percent is conferred as compared to a corresponding non-transformed wild type non-human organism.

[88113] Accordingly, in one embodiment, an increase of myo-inositol in a non-human organism, as compared to a corresponding non-transformed wild type non-human organism, is conferred in the process of the invention, if the activity of a polypeptide showing the activity of a peptidylprolyl cis-trans isomerase, or if the activity of the polypeptide AvinDRAFT_{—}6075, preferably represented by SEQ ID NO. 6675, or a homolog or fragment thereof, or if the activity of a polypeptide encoded by a nucleic acid molecule comprising the nucleic acid SEQ ID NO. 6674, preferably the coding region thereof, or a homolog or fragment thereof, e.g. derived from Azotobacter vinelandii, is increased or generated. For example the activity of a nucleic acid molecule or a polypeptide comprising the nucleic acid, preferably the coding region thereof, or polypeptide or the consensus sequence or the polypeptide motif, as depicted in Table I, II or IV, application No. 17, column 5 or 8 in the respective same line as the nucleic acid molecule SEQ ID NO. 6674 or polypeptide SEQ ID NO. 6675, respectively, or a homolog or a fragment thereof, is increased or generated, or if the activity peptidyl-prolyl cis-trans isomerase is increased or generated in a non-human organism, like a microorganism or a plant cell, plant or part thereof, especially with non-targeted localization, whereby the respective line disclose in column 7 the fine chemical myo-inositol. For example, an increase of the myo-inositol of at least 1 percent, particularly in a range of 31 to 126-percent is conferred as compared to a corresponding non-transformed wild type non-human organism.

[88114] Accordingly, in one embodiment, an increase of 3,4,5-trihydroxypentanoic acid in a non-human organism, as compared to a corresponding non-transformed wild type non-human organism, is conferred in the process of the invention, if the activity of a polypeptide showing the activity of a NAD(P)H dehydrogenase (quinone), or if the activity of the polypeptide AVINDRAFT_{—}6261, preferably represented by SEQ ID NO. 143615, or a homolog or fragment thereof, or if the activity of a polypeptide encoded by a nucleic acid molecule comprising the nucleic acid SEQ ID NO. 143614, preferably the coding region thereof, or a homolog or fragment thereof, e.g. derived from Azotobacter vinelandii, is increased or generated. For example the activity of a nucleic acid molecule or a polypeptide comprising the nucleic acid, preferably the coding region thereof, or polypeptide or the consensus sequence or the polypeptide motif, as depicted in Table I, II or IV, application No. 17, column 5 or 8 in the respective same line as the nucleic acid molecule SEQ ID NO. 143614 or polypeptide SEQ ID NO. 143615, respectively, or a homolog or a fragment thereof, is increased or generated, or if the activity NAD(P)H dehydrogenase (quinone) is increased or generated in a non-human organism, like a microorganism or a plant cell, plant or part thereof, especially with non-targeted localization, whereby the respective line disclose in column 7 the fine chemical 3,4,5-trihydroxypentanoic acid. For example, an increase of the 3,4,5-trihydroxypentanoic acid of at least 1 percent, particularly in a range of 33 to 77-percent is conferred as compared to a corresponding non-transformed wild type non-human organism.

[88115] Accordingly, in one embodiment, an increase of fructose in a non-human organism, as compared to a corresponding non-transformed wild type non-human organism, is conferred in the process of the invention, if the activity of a polypeptide showing the activity of a electron transfer flavoprotein subunit beta, or if the activity of the polypeptide AvinDRAFT_{—}6679, preferably represented by SEQ ID NO. 74730, or a homolog or fragment thereof, or if the activity of a polypeptide encoded by a nucleic acid molecule comprising the nucleic acid SEQ ID NO. 74729, preferably the coding region thereof, or a homolog or fragment thereof, e.g. derived from Azotobacter vinelandii, is increased or generated. For example the activity of a nucleic acid molecule or a polypeptide comprising the nucleic acid, preferably the coding region thereof, or polypeptide or the consensus sequence or the polypeptide motif, as depicted in Table I, II or IV, application No. 17, column 5 or 8 in the respective same line as the nucleic acid molecule SEQ ID NO. 74729 or polypeptide SEQ ID NO. 74730, respectively, or a homolog or a fragment thereof, is increased or generated, or if the activity electron transfer flavoprotein subunit beta is increased or generated in a non-human organism, like a microorganism or a plant cell, plant or part thereof, especially with non-targeted localization, whereby the respective line disclose in column 7 the fine chemical fructose. For example, an increase of the fructose of at least 1 percent, particularly in a range of 117 to 1104-percent is conferred as compared to a corresponding non-transformed wild type non-human organism.

[88116] Accordingly, in one embodiment, an increase of glucose in a non-human organism, as compared to a corresponding non-transformed wild type non-human organism, is conferred in the process of the invention, if the activity of a polypeptide showing the activity of a electron transfer flavoprotein subunit beta, or if the activity of the polypeptide AvinDRAFT_{—}6679, preferably represented by SEQ ID NO. 74730, or a homolog or fragment thereof, or if the activity of a polypeptide encoded by a nucleic acid molecule comprising the nucleic acid SEQ ID NO. 74729, preferably the coding region thereof, or a homolog or fragment thereof, e.g. derived from Azotobacter vinelandii, is increased or generated. For example the activity of a nucleic acid molecule or a polypeptide comprising the nucleic acid, preferably the coding region thereof, or polypeptide or the consensus sequence or the polypeptide motif, as depicted in Table I, II or IV, application No. 17, column 5 or 8 in the respective same line as the nucleic acid molecule SEQ ID NO. 74729 or polypeptide SEQ ID NO. 74730, respectively, or a homolog or a fragment thereof, is increased or generated, or if the activity electron transfer flavoprotein subunit beta is increased or generated in a non-human organism, like a microorganism or a plant cell, plant or part thereof, especially with non-targeted localization, whereby the respective line disclose in column 7 the fine chemical glucose. For example, an increase of the glucose of at least 1 percent, particularly in a range of 80 to 613-percent is conferred as compared to a corresponding non-transformed wild type non-human organism.

[88117] Accordingly, in one embodiment, an increase of glucose-1-phosphate in a non-human organism, as compared to a corresponding non-transformed wild type non-human organism, is conferred in the process of the invention, if the activity of a polypeptide showing the activity of a purine nucleoside phosphorylase, or if the activity of the polypeptide AvinDRAFT_{—}6700, preferably represented by SEQ ID NO. 34045, or a homolog or fragment thereof, or if the activity of a polypeptide encoded by a nucleic acid molecule comprising the nucleic acid SEQ ID NO. 34044, preferably the coding region thereof, or a homolog or fragment thereof, e.g. derived from Azotobacter vinelandii, is increased or generated. For example the activity of a nucleic acid molecule or a polypeptide comprising the nucleic acid, preferably the coding region thereof, or polypeptide or the consensus sequence or the polypeptide motif, as depicted in Table I, II or IV, application No. 17, column 5 or 8 in the respective same line as the nucleic acid molecule SEQ ID NO. 34044 or polypeptide SEQ ID NO. 34045, respectively, or a homolog or a fragment thereof, is increased or generated, or if the activity purine nucleoside phosphorylase is increased or generated in a non-human organism, like a microorganism or a plant cell, plant or part thereof, especially with non-targeted localization, whereby the respective line disclose in column 7 the fine chemical glucose-1-phosphate. For example, an increase of the glucose-1-phosphate of at least 1 percent, particularly in a range of 53 to 114-percent is conferred as compared to a corresponding non-transformed wild type non-human organism.

[88118] Accordingly, in one embodiment, an increase of 3,4,5-trihydroxypentanoic acid in a non-human organism, as compared to a corresponding non-transformed wild type non-human organism, is conferred in the process of the invention, if the activity of a polypeptide showing the activity of a purine nucleoside phosphorylase, or if the activity of the polypeptide AvinDRAFT_{—}6700, preferably represented by SEQ ID NO. 34045, or a homolog or fragment thereof, or if the activity of a polypeptide encoded by a nucleic acid molecule comprising the nucleic acid SEQ ID NO. 34044, preferably the coding region thereof, or a homolog or fragment thereof, e.g. derived from Azotobacter vinelandii, is increased or generated. For example the activity of a nucleic acid molecule or a polypeptide comprising the nucleic acid, preferably the coding region thereof, or polypeptide or the consensus sequence or the polypeptide motif, as depicted in Table I, II or IV, application No. 17, column 5 or 8 in the respective same line as the nucleic acid molecule SEQ ID NO. 34044 or polypeptide SEQ ID NO. 34045, respectively, or a homolog or a fragment thereof, is increased or generated, or if the activity purine nucleoside phosphorylase is increased or generated in a non-human organism, like a microorganism or a plant cell, plant or part thereof, especially with non-targeted localization, whereby the respective line disclose in column 7 the fine chemical 3,4,5-trihydroxypentanoic acid. For example, an increase of the 3,4,5-trihydroxypentanoic acid of at least 1 percent, particularly in a range of 60 to 108-percent is conferred as compared to a corresponding non-transformed wild type non-human organism.

[88119] Accordingly, in one embodiment, an increase of raffinose in a non-human organism, as compared to a corresponding non-transformed wild type non-human organism, is conferred in the process of the invention, if the activity of a polypeptide showing the activity of a transcriptional regulator protein, or if the activity of the polypeptide AvinDRAFT_{—}6864, preferably represented by SEQ ID NO. 34205, or a homolog or fragment thereof, or if the activity of a polypeptide encoded by a nucleic acid molecule comprising the nucleic acid SEQ ID NO. 34204, preferably the coding region thereof, or a homolog or fragment thereof, e.g. derived from Azotobacter vinelandii, is increased or generated. For example the activity of a nucleic acid molecule or a polypeptide comprising the nucleic acid, preferably the coding region thereof, or polypeptide or the consensus sequence or the polypeptide motif, as depicted in Table I, II or IV, application No. 17, column 5 or 8 in the respective same line as the nucleic acid molecule SEQ ID NO. 34204 or polypeptide SEQ ID NO. 34205, respectively, or a homolog or a fragment thereof, is increased or generated, or if the activity transcriptional regulator protein is increased or generated in a non-human organism, like a microorganism or a plant cell, plant or part thereof, especially with non-targeted localization, whereby the respective line disclose in column 7 the fine chemical raffinose. For example, an increase of the raffinose of at least 1 percent, particularly in a range of 62 to 341-percent is conferred as compared to a corresponding non-transformed wild type non-human organism.

[88120] Accordingly, in one embodiment, an increase of glucose-1-phosphate in a non-human organism, as compared to a corresponding non-transformed wild type non-human organism, is conferred in the process of the invention, if the activity of a polypeptide showing the activity of a AX653549-protein, or if the activity of the polypeptide AX653549, preferably represented by SEQ ID NO. 34302, or a homolog or fragment thereof, or if the activity of a polypeptide encoded by a nucleic acid molecule comprising the nucleic acid SEQ ID NO. 34301, preferably the coding region thereof, or a homolog or fragment thereof, e.g. derived from Oryza sativa, is increased or generated. For example the activity of a nucleic acid molecule or a polypeptide comprising the nucleic acid, preferably the coding region thereof, or polypeptide or the consensus sequence or the polypeptide motif, as depicted in Table I, II or IV, application No. 17, column 5 or 8 in the respective same line as the nucleic acid molecule SEQ ID NO. 34301 or polypeptide SEQ ID NO. 34302, respectively, or a homolog or a fragment thereof, is increased or generated, or if the activity AX653549-protein is increased or generated in a non-human organism, like a microorganism or a plant cell, plant or part thereof, especially with non-targeted localization, whereby the respective line disclose in column 7 the fine chemical glucose-1-phosphate. For example, an increase of the glucose-1-phosphate of at least 1 percent, particularly in a range of 28 to 50-percent is conferred as compared to a corresponding non-transformed wild type non-human organism.

[88121] Accordingly, in one embodiment, an increase of glucose-1-phosphate in a non-human organism, as compared to a corresponding non-transformed wild type non-human organism, is conferred in the process of the invention, if the activity of a polypeptide showing the activity of a AY087308-protein, or if the activity of the polypeptide AY087308, preferably represented by SEQ ID NO. 34603, or a homolog or fragment thereof, or if the activity of a polypeptide encoded by a nucleic acid molecule comprising the nucleic acid SEQ ID NO. 34602, preferably the coding region thereof, or a homolog or fragment thereof, e.g. derived from Arabidopsis thaliana, is increased or generated. For example the activity of a nucleic acid molecule or a polypeptide comprising the nucleic acid, preferably the coding region thereof, or polypeptide or the consensus sequence or the polypeptide motif, as depicted in Table I, II or IV, application No. 17, column 5 or 8 in the respective same line as the nucleic acid molecule SEQ ID NO. 34602 or polypeptide SEQ ID NO. 34603, respectively, or a homolog or a fragment thereof, is increased or generated, or if the activity AY087308-protein is increased or generated in a non-human organism, like a microorganism or a plant cell, plant or part thereof, especially with non-targeted localization, whereby the respective line disclose in column 7 the fine chemical glucose-1-phosphate. For example, an increase of the glucose-1-phosphate of at least 1 percent, particularly in a range of 28 to 47-percent is conferred as compared to a corresponding non-transformed wild type non-human organism.

[88122] Accordingly, in one embodiment, an increase of myo-inositol in a non-human organism, as compared to a corresponding non-transformed wild type non-human organism, is conferred in the process of the invention, if the activity of a polypeptide showing the activity of a AY087308-protein, or if the activity of the polypeptide AY087308, preferably represented by SEQ ID NO. 34603, or a homolog or fragment thereof, or if the activity of a polypeptide encoded by a nucleic acid molecule comprising the nucleic acid SEQ ID NO. 34602, preferably the coding region thereof, or a homolog or fragment thereof, e.g. derived from Arabidopsis thaliana, is increased or generated. For example the activity of a nucleic acid molecule or a polypeptide comprising the nucleic acid, preferably the coding region thereof, or polypeptide or the consensus sequence or the polypeptide motif, as depicted in Table I, II or IV, application No. 17, column 5 or 8 in the respective same line as the nucleic acid molecule SEQ ID NO. 34602 or polypeptide SEQ ID NO. 34603, respectively, or a homolog or a fragment thereof, is increased or generated, or if the activity AY087308-protein is increased or generated in a non-human organism, like a microorganism or a plant cell, plant or part thereof, especially with non-targeted localization, whereby the respective line disclose in column 7 the fine chemical myo-inositol. For example, an increase of the myo-inositol of at least 1 percent, particularly in a range of 26 to 85-percent is conferred as compared to a corresponding non-transformed wild type non-human organism.

[88123] Accordingly, in one embodiment, an increase of glucose-1-phosphate in a non-human organism, as compared to a corresponding non-transformed wild type non-human organism, is conferred in the process of the invention, if the activity of a polypeptide showing the activity of a pyruvate kinase, or if the activity of the polypeptide AY623894, preferably represented by SEQ ID NO. 103434, or a homolog or fragment thereof, or if the activity of a polypeptide encoded by a nucleic acid molecule comprising the nucleic acid SEQ ID NO. 103433, preferably the coding region thereof, or a homolog or fragment thereof, e.g. derived from Zea mays, is increased or generated. For example the activity of a nucleic acid molecule or a polypeptide comprising the nucleic acid, preferably the coding region thereof, or polypeptide or the consensus sequence or the polypeptide motif, as depicted in Table I, II or IV, application No. 17, column 5 or 8 in the respective same line as the nucleic acid molecule SEQ ID NO. 103433 or polypeptide SEQ ID NO. 103434, respectively, or a homolog or a fragment thereof, is increased or generated, or if the activity pyruvate kinase is increased or generated in a non-human organism, like a microorganism or a plant cell, plant or part thereof, especially with non-targeted localization, whereby the respective line disclose in column 7 the fine chemical glucose-1-phosphate. For example, an increase of the glucose-1-phosphate of at least 1 percent, particularly in a range of 58 to 113-percent is conferred as compared to a corresponding non-transformed wild type non-human organism.

[88124] Accordingly, in one embodiment, an increase of 3,4,5-trihydroxypentanoic acid in a non-human organism, as compared to a corresponding non-transformed wild type non-human organism, is conferred in the process of the invention, if the activity of a polypeptide showing the activity of a pyruvate kinase, or if the activity of the polypeptide AY623894, preferably represented by SEQ ID NO. 103434, or a homolog or fragment thereof, or if the activity of a polypeptide encoded by a nucleic acid molecule comprising the nucleic acid SEQ ID NO. 103433, preferably the coding region thereof, or a homolog or fragment thereof, e.g. derived from Zea mays, is increased or generated. For example the activity of a nucleic acid molecule or a polypeptide comprising the nucleic acid, preferably the coding region thereof, or polypeptide or the consensus sequence or the polypeptide motif, as depicted in Table I, II or IV, application No. 17, column 5 or 8 in the respective same line as the nucleic acid molecule SEQ ID NO. 103433 or polypeptide SEQ ID NO. 103434, respectively, or a homolog or a fragment thereof, is increased or generated, or if the activity pyruvate kinase is increased or generated in a non-human organism, like a microorganism or a plant cell, plant or part thereof, especially with non-targeted localization, whereby the respective line disclose in column 7 the fine chemical 3,4,5-trihydroxypentanoic acid. For example, an increase of the 3,4,5-trihydroxypentanoic acid of at least 1 percent, particularly in a range of 33 to 167-percent is conferred as compared to a corresponding non-transformed wild type non-human organism.

[88125] Accordingly, in one embodiment, an increase of glucose in a non-human organism, as compared to a corresponding non-transformed wild type non-human organism, is conferred in the process of the invention, if the activity of a polypeptide showing the activity of a threonine synthase, or if the activity of the polypeptide B0004, preferably represented by SEQ ID NO. 34890, or a homolog or fragment thereof, or if the activity of a polypeptide encoded by a nucleic acid molecule comprising the nucleic acid SEQ ID NO. 34889, preferably the coding region thereof, or a homolog or fragment thereof, e.g. derived from Escherichia coli, is increased or generated.

[88126] For example the activity of a nucleic acid molecule or a polypeptide comprising the nucleic acid, preferably the coding region thereof, or polypeptide or the consensus sequence or the polypeptide motif, as depicted in Table I, II or IV, application No. 17, column 5 or 8 in the respective same line as the nucleic acid molecule SEQ ID NO. 34889 or polypeptide SEQ ID NO. 34890, respectively, or a homolog or a fragment thereof, is increased or generated, or if the activity threonine synthase is increased or generated in a non-human organism, like a microorganism or a plant cell, plant or part thereof, especially with plastidic localization, whereby the respective line disclose in column 7 the fine chemical glucose. For example, an increase of the glucose of at least 1 percent, particularly in a range of 62 to 423-percent is conferred as compared to a corresponding non-transformed wild type non-human organism.

[88127] Accordingly, in one embodiment, an increase of sucrose in a non-human organism, as compared to a corresponding non-transformed wild type non-human organism, is conferred in the process of the invention, if the activity of a polypeptide showing the activity of a threonine synthase, or if the activity of the polypeptide B0004, preferably represented by SEQ ID NO. 34890, or a homolog or fragment thereof, or if the activity of a polypeptide encoded by a nucleic acid molecule comprising the nucleic acid SEQ ID NO. 34889, preferably the coding region thereof, or a homolog or fragment thereof, e.g. derived from Escherichia coli, is increased or generated. For example the activity of a nucleic acid molecule or a polypeptide comprising the nucleic acid, preferably the coding region thereof, or polypeptide or the consensus sequence or the polypeptide motif, as depicted in Table I, II or IV, application No. 17, column 5 or 8 in the respective same line as the nucleic acid molecule SEQ ID NO. 34889 or polypeptide SEQ ID NO. 34890, respectively, or a homolog or a fragment thereof, is increased or generated, or if the activity threonine synthase is increased or generated in a non-human organism, like a microorganism or a plant cell, plant or part thereof, especially with plastidic localization, whereby the respective line disclose in column 7 the fine chemical sucrose. For example, an increase of the sucrose of at least 1 percent, particularly in a range of 25 to 120-percent is conferred as compared to a corresponding non-transformed wild type non-human organism.

[88128] Accordingly, in one embodiment, an increase of 3,4,5-trihydroxypentanoic acid in a non-human organism, as compared to a corresponding non-transformed wild type non-human organism, is conferred in the process of the invention, if the activity of a polypeptide showing the activity of a b0050-protein, or if the activity of the polypeptide B0050, preferably represented by SEQ ID NO. 103959, or a homolog or fragment thereof, or if the activity of a polypeptide encoded by a nucleic acid molecule comprising the nucleic acid SEQ ID NO. 103958, preferably the coding region thereof, or a homolog or fragment thereof, e.g. derived from Escherichia coli, is increased or generated. For example the activity of a nucleic acid molecule or a polypeptide comprising the nucleic acid, preferably the coding region thereof, or polypeptide or the consensus sequence or the polypeptide motif, as depicted in Table I, II or IV, application No. 17, column 5 or 8 in the respective same line as the nucleic acid molecule SEQ ID NO. 103958 or polypeptide SEQ ID NO. 103959, respectively, or a homolog or a fragment thereof, is increased or generated, or if the activity b0050-protein is increased or generated in a non-human organism, like a microorganism or a plant cell, plant or part thereof, especially with non-targeted localization, whereby the respective line disclose in column 7 the fine chemical 3,4,5-trihydroxypentanoic acid. For example, an increase of the 3,4,5-trihydroxypentanoic acid of at least 1 percent, particularly in a range of 33 to 63-percent is conferred as compared to a corresponding non-transformed wild type non-human organism.

[88129] Accordingly, in one embodiment, an increase of raffinose in a non-human organism, as compared to a corresponding non-transformed wild type non-human organism, is conferred in the process of the invention, if the activity of a polypeptide showing the activity of a L-ribulose-5-phosphate 4-epimerase, or if the activity of the polypeptide B0061, preferably represented by SEQ ID NO. 35205, or a homolog or fragment thereof, or if the activity of a polypeptide encoded by a nucleic acid molecule comprising the nucleic acid SEQ ID NO. 35204, preferably the coding region thereof, or a homolog or fragment thereof, e.g. derived from Escherichia coli, is increased or generated. For example the activity of a nucleic acid molecule or a polypeptide comprising the nucleic acid, preferably the coding region thereof, or polypeptide or the consensus sequence or the polypeptide motif, as depicted in Table I, II or IV, application No. 17, column 5 or 8 in the respective same line as the nucleic acid molecule SEQ ID NO. 35204 or polypeptide SEQ ID NO. 35205, respectively, or a homolog or a fragment thereof, is increased or generated, or if the activity L-ribulose-5-phosphate 4-epimerase is increased or generated in a non-human organism, like a microorganism or a plant cell, plant or part thereof, especially with non-targeted localization, whereby the respective line disclose in column 7 the fine chemical raffinose. For example, an increase of the raffinose of at least 1 percent, particularly in a range of 38 to 63-percent is conferred as compared to a corresponding non-transformed wild type non-human organism.

[88130] Accordingly, in one embodiment, an increase of sucrose in a non-human organism, as compared to a corresponding non-transformed wild type non-human organism, is conferred in the process of the invention, if the activity of a polypeptide showing the activity of a glucose dehydrogenase, or if the activity of the polypeptide B0124, preferably represented by SEQ ID NO. 35483, or a homolog or fragment thereof, or if the activity of a polypeptide encoded by a nucleic acid molecule comprising the nucleic acid SEQ ID NO. 35482, preferably the coding region thereof, or a homolog or fragment thereof, e.g. derived from Escherichia coli, is increased or generated. For example the activity of a nucleic acid molecule or a polypeptide comprising the nucleic acid, preferably the coding region thereof, or polypeptide or the consensus sequence or the polypeptide motif, as depicted in Table I, II or IV, application No. 17, column 5 or 8 in the respective same line as the nucleic acid molecule SEQ ID NO. 35482 or polypeptide SEQ ID NO. 35483, respectively, or a homolog or a fragment thereof, is increased or generated, or if the activity glucose dehydrogenase is increased or generated in a non-human organism, like a microorganism or a plant cell, plant or part thereof, especially with non-targeted localization, whereby the respective line disclose in column 7 the fine chemical sucrose. For example, an increase of the sucrose of at least 1 percent, particularly in a range of 27 to 83-percent is conferred as compared to a corresponding non-transformed wild type non-human organism.

[88131] Accordingly, in one embodiment, an increase of glucose-1-phosphate in a non-human organism, as compared to a corresponding non-transformed wild type non-human organism, is conferred in the process of the invention, if the activity of a polypeptide showing the activity of a serine protease, or if the activity of the polypeptide B0161, preferably represented by SEQ ID NO. 7082, or a homolog or fragment thereof, or if the activity of a polypeptide encoded by a nucleic acid molecule comprising the nucleic acid SEQ ID NO. 7081, preferably the coding region thereof, or a homolog or fragment thereof, e.g. derived from Escherichia coli, is increased or generated. For example the activity of a nucleic acid molecule or a polypeptide comprising the nucleic acid, preferably the coding region thereof, or polypeptide or the consensus sequence or the polypeptide motif, as depicted in Table I, II or IV, application No. 17, column 5 or 8 in the respective same line as the nucleic acid molecule SEQ ID NO. 7081 or polypeptide SEQ ID NO. 7082, respectively, or a homolog or a fragment thereof, is increased or generated, or if the activity serine protease is increased or generated in a non-human organism, like a microorganism or a plant cell, plant or part thereof, especially with non-targeted localization, whereby the respective line disclose in column 7 the fine chemical glucose-1-phosphate. For example, an increase of the glucose-1-phosphate of at least 1 percent, particularly in a range of 24 to 53-percent is conferred as compared to a corresponding non-transformed wild type non-human organism.

[88132] Accordingly, in one embodiment, an increase of myo-inositol in a non-human organism, as compared to a corresponding non-transformed wild type non-human organism, is conferred in the process of the invention, if the activity of a polypeptide showing the activity of a serine protease, or if the activity of the polypeptide B0161, preferably represented by SEQ ID NO. 7082, or a homolog or fragment thereof, or if the activity of a polypeptide encoded by a nucleic acid molecule comprising the nucleic acid SEQ ID NO. 7081, preferably the coding region thereof, or a homolog or fragment thereof, e.g. derived from Escherichia coli, is increased or generated.

[88133] For example the activity of a nucleic acid molecule or a polypeptide comprising the nucleic acid, preferably the coding region thereof, or polypeptide or the consensus sequence or the polypeptide motif, as depicted in Table I, II or IV, application No. 17, column 5 or 8 in the respective same line as the nucleic acid molecule SEQ ID NO. 7081 or polypeptide SEQ ID NO. 7082, respectively, or a homolog or a fragment thereof, is increased or generated, or if the activity serine protease is increased or generated in a non-human organism, like a microorganism or a plant cell, plant or part thereof, especially with non-targeted localization, whereby the respective line disclose in column 7 the fine chemical myo-inositol. For example, an increase of the myo-inositol of at least 1 percent, particularly in a range of 25 to 62-percent is conferred as compared to a corresponding non-transformed wild type non-human organism.

[88134] Accordingly, in one embodiment, an increase of sucrose in a non-human organism, as compared to a corresponding non-transformed wild type non-human organism, is conferred in the process of the invention, if the activity of a polypeptide showing the activity of a acyl-CoA dehydrogenase, or if the activity of the polypeptide B0221, preferably represented by SEQ ID NO. 35591, or a homolog or fragment thereof, or if the activity of a polypeptide encoded by a nucleic acid molecule comprising the nucleic acid SEQ ID NO. 35590, preferably the coding region thereof, or a homolog or fragment thereof, e.g. derived from Escherichia coli, is increased or generated. For example the activity of a nucleic acid molecule or a polypeptide comprising the nucleic acid, preferably the coding region thereof, or polypeptide or the consensus sequence or the polypeptide motif, as depicted in Table I, II or IV, application No. 17, column 5 or 8 in the respective same line as the nucleic acid molecule SEQ ID NO. 35590 or polypeptide SEQ ID NO. 35591, respectively, or a homolog or a fragment thereof, is increased or generated, or if the activity acyl-CoA dehydrogenase is increased or generated in a non-human organism, like a microorganism or a plant cell, plant or part thereof, especially with non-targeted localization, whereby the respective line disclose in column 7 the fine chemical sucrose. For example, an increase of the sucrose of at least 1 percent, particularly in a range of 25 to 89-percent is conferred as compared to a corresponding non-transformed wild type non-human organism.

[88135] Accordingly, in one embodiment, an increase of glucose-1-phosphate in a non-human organism, as compared to a corresponding non-transformed wild type non-human organism, is conferred in the process of the invention, if the activity of a polypeptide showing the activity of a b0251-protein, or if the activity of the polypeptide B0251, preferably represented by SEQ ID NO. 143743, or a homolog or fragment thereof, or if the activity of a polypeptide encoded by a nucleic acid molecule comprising the nucleic acid SEQ ID NO. 143742, preferably the coding region thereof, or a homolog or fragment thereof, e.g. derived from Escherichia coli, is increased or generated. For example the activity of a nucleic acid molecule or a polypeptide comprising the nucleic acid, preferably the coding region thereof, or polypeptide or the consensus sequence or the polypeptide motif, as depicted in Table I, II or IV, application No. 17, column 5 or 8 in the respective same line as the nucleic acid molecule SEQ ID NO. 143742 or polypeptide SEQ ID NO. 143743, respectively, or a homolog or a fragment thereof, is increased or generated, or if the activity b0251-protein is increased or generated in a non-human organism, like a microorganism or a plant cell, plant or part thereof, especially with non-targeted localization, whereby the respective line disclose in column 7 the fine chemical glucose-1-phosphate. For example, an increase of the glucose-1-phosphate of at least 1 percent, particularly in a range of 20 to 59-percent is conferred as compared to a corresponding non-transformed wild type non-human organism.

[88136] Accordingly, in one embodiment, an increase of fructose in a non-human organism, as compared to a corresponding non-transformed wild type non-human organism, is conferred in the process of the invention, if the activity of a polypeptide showing the activity of a betaine aldehyde dehydrogenase, or if the activity of the polypeptide B0312, preferably represented by SEQ ID NO. 121112, or a homolog or fragment thereof, or if the activity of a polypeptide encoded by a nucleic acid molecule comprising the nucleic acid SEQ ID NO. 121111, preferably the coding region thereof, or a homolog or fragment thereof, e.g. derived from Escherichia coli, is increased or generated. For example the activity of a nucleic acid molecule or a polypeptide comprising the nucleic acid, preferably the coding region thereof, or polypeptide or the consensus sequence or the polypeptide motif, as depicted in Table I, II or IV, application No. 17, column 5 or 8 in the respective same line as the nucleic acid molecule SEQ ID NO. 121111 or polypeptide SEQ ID NO. 121112, respectively, or a homolog or a fragment thereof, is increased or generated, or if the activity betaine aldehyde dehydrogenase is increased or generated in a non-human organism, like a microorganism or a plant cell, plant or part thereof, especially with non-targeted localization, whereby the respective line disclose in column 7 the fine chemical fructose. For example, an increase of the fructose of at least 1 percent, particularly in a range of 76 to 386-percent is conferred as compared to a corresponding non-transformed wild type non-human organism.

[88137] Accordingly, in one embodiment, an increase of melibiose in a non-human organism, as compared to a corresponding non-transformed wild type non-human organism, is conferred in the process of the invention, if the activity of a polypeptide showing the activity of a beta-galactosidase, or if the activity of the polypeptide B0344, preferably represented by SEQ ID NO. 35734, or a homolog or fragment thereof, or if the activity of a polypeptide encoded by a nucleic acid molecule comprising the nucleic acid SEQ ID NO. 35733, preferably the coding region thereof, or a homolog or fragment thereof, e.g. derived from Escherichia coli, is increased or generated. For example the activity of a nucleic acid molecule or a polypeptide comprising the nucleic acid, preferably the coding region thereof, or polypeptide or the consensus sequence or the polypeptide motif, as depicted in Table I, II or IV, application No. 17, column 5 or 8 in the respective same line as the nucleic acid molecule SEQ ID NO. 35733 or polypeptide SEQ ID NO. 35734, respectively, or a homolog or a fragment thereof, is increased or generated, or if the activity beta-galactosidase is increased or generated in a non-human organism, like a microorganism or a plant cell, plant or part thereof, especially with plastidic localization, whereby the respective line disclose in column 7 the fine chemical melibiose. For example, an increase of the melibiose of at least 1 percent, particularly in a range of 65 to 79-percent is conferred as compared to a corresponding non-transformed wild type non-human organism.

[88138] Accordingly, in one embodiment, an increase of glucose-1-phosphate in a non-human organism, as compared to a corresponding non-transformed wild type non-human organism, is conferred in the process of the invention, if the activity of a polypeptide showing the activity of a b0362-protein, or if the activity of the polypeptide B0362, preferably represented by SEQ ID NO. 143762, or a homolog or fragment thereof, or if the activity of a polypeptide encoded by a nucleic acid molecule comprising the nucleic acid SEQ ID NO. 143761, preferably the coding region thereof, or a homolog or fragment thereof, e.g. derived from Escherichia coli, is increased or generated. For example the activity of a nucleic acid molecule or a polypeptide comprising the nucleic acid, preferably the coding region thereof, or polypeptide or the consensus sequence or the polypeptide motif, as depicted in Table I, II or IV, application No. 17, column 5 or 8 in the respective same line as the nucleic acid molecule SEQ ID NO. 143761 or polypeptide SEQ ID NO. 143762, respectively, or a homolog or a fragment thereof, is increased or generated, or if the activity b0362-protein is increased or generated in a non-human organism, like a microorganism or a plant cell, plant or part thereof, especially with non-targeted localization, whereby the respective line disclose in column 7 the fine chemical glucose-1-phosphate. For example, an increase of the glucose-1-phosphate of at least 1 percent, particularly in a range of 18 to 22-percent is conferred as compared to a corresponding non-transformed wild type non-human organism.

[88139] Accordingly, in one embodiment, an increase of glucose-1-phosphate in a non-human organism, as compared to a corresponding non-transformed wild type non-human organism, is conferred in the process of the invention, if the activity of a polypeptide showing the activity of a penicillin-binding protein, or if the activity of the polypeptide B0376, preferably represented by SEQ ID NO. 143772, or a homolog or fragment thereof, or if the activity of a polypeptide encoded by a nucleic acid molecule comprising the nucleic acid SEQ ID NO. 143771, preferably the coding region thereof, or a homolog or fragment thereof, e.g. derived from Escherichia coli, is increased or generated. For example the activity of a nucleic acid molecule or a polypeptide comprising the nucleic acid, preferably the coding region thereof, or polypeptide or the consensus sequence or the polypeptide motif, as depicted in Table I, II or IV, application No. 17, column 5 or 8 in the respective same line as the nucleic acid molecule SEQ ID NO. 143771 or polypeptide SEQ ID NO. 143772, respectively, or a homolog or a fragment thereof, is increased or generated, or if the activity penicillin-binding protein is increased or generated in a non-human organism, like a microorganism or a plant cell, plant or part thereof, especially with non-targeted localization, whereby the respective line disclose in column 7 the fine chemical glucose-1-phosphate. For example, an increase of the glucose-1-phosphate of at least 1 percent, particularly in a range of 27 to 37-percent is conferred as compared to a corresponding non-transformed wild type non-human organism.

[88140] Accordingly, in one embodiment, an increase of fructose in a non-human organism, as compared to a corresponding non-transformed wild type non-human organism, is conferred in the process of the invention, if the activity of a polypeptide showing the activity of a ATP-binding component of a transport system, or if the activity of the polypeptide B0449, preferably represented by SEQ ID NO. 7334, or a homolog or fragment thereof, or if the activity of a polypeptide encoded by a nucleic acid molecule comprising the nucleic acid SEQ ID NO. 7333, preferably the coding region thereof, or a homolog or fragment thereof, e.g. derived from Escherichia coli, is increased or generated. For example the activity of a nucleic acid molecule or a polypeptide comprising the nucleic acid, preferably the coding region thereof, or polypeptide or the consensus sequence or the polypeptide motif, as depicted in Table I, II or IV, application No. 17, column 5 or 8 in the respective same line as the nucleic acid molecule SEQ ID NO. 7333 or polypeptide SEQ ID NO. 7334, respectively, or a homolog or a fragment thereof, is increased or generated, or if the activity ATP-binding component of a transport system is increased or generated in a non-human organism, like a microorganism or a plant cell, plant or part thereof, especially with non-targeted localization, whereby the respective line disclose in column 7 the fine chemical fructose. For example, an increase of the fructose of at least 1 percent, particularly in a range of 121 to 729-percent is conferred as compared to a corresponding non-transformed wild type non-human organism.

[88141] Accordingly, in one embodiment, an increase of glucose in a non-human organism, as compared to a corresponding non-transformed wild type non-human organism, is conferred in the process of the invention, if the activity of a polypeptide showing the activity of a ATP-binding component of a transport system, or if the activity of the polypeptide B0449, preferably represented by SEQ ID NO. 7334, or a homolog or fragment thereof, or if the activity of a polypeptide encoded by a nucleic acid molecule comprising the nucleic acid SEQ ID NO. 7333, preferably the coding region thereof, or a homolog or fragment thereof, e.g. derived from Escherichia coli, is increased or generated. For example the activity of a nucleic acid molecule or a polypeptide comprising the nucleic acid, preferably the coding region thereof, or polypeptide or the consensus sequence or the polypeptide motif, as depicted in Table I, II or IV, application No. 17, column 5 or 8 in the respective same line as the nucleic acid molecule SEQ ID NO. 7333 or polypeptide SEQ ID NO. 7334, respectively, or a homolog or a fragment thereof, is increased or generated, or if the activity ATP-binding component of a transport system is increased or generated in a non-human organism, like a microorganism or a plant cell, plant or part thereof, especially with non-targeted localization, whereby the respective line disclose in column 7 the fine chemical glucose. For example, an increase of the glucose of at least 1 percent, particularly in a range of 63 to 243-percent is conferred as compared to a corresponding non-transformed wild type non-human organism.

[88142] Accordingly, in one embodiment, an increase of glucose in a non-human organism, as compared to a corresponding non-transformed wild type non-human organism, is conferred in the process of the invention, if the activity of a polypeptide showing the activity of a membrane transport protein, or if the activity of the polypeptide B0486, preferably represented by SEQ ID NO. 7687, or a homolog or fragment thereof, or if the activity of a polypeptide encoded by a nucleic acid molecule comprising the nucleic acid SEQ ID NO. 7686, preferably the coding region thereof, or a homolog or fragment thereof, e.g. derived from Escherichia coli, is increased or generated. For example the activity of a nucleic acid molecule or a polypeptide comprising the nucleic acid, preferably the coding region thereof, or polypeptide or the consensus sequence or the polypeptide motif, as depicted in Table I, II or IV, application No. 17, column 5 or 8 in the respective same line as the nucleic acid molecule SEQ ID NO. 7686 or polypeptide SEQ ID NO. 7687, respectively, or a homolog or a fragment thereof, is increased or generated, or if the activity membrane transport protein is increased or generated in a non-human organism, like a microorganism or a plant cell, plant or part thereof, especially with non-targeted localization, whereby the respective line disclose in column 7 the fine chemical glucose. For example, an increase of the glucose of at least 1 percent, particularly in a range of 61 to 135-percent is conferred as compared to a corresponding non-transformed wild type non-human organism.

[88143] Accordingly, in one embodiment, an increase of saccharic acid in a non-human organism, as compared to a corresponding non-transformed wild type non-human organism, is conferred in the process of the invention, if the activity of a polypeptide showing the activity of a b0488-protein, or if the activity of the polypeptide B0488, preferably represented by SEQ ID NO. 143818, or a homolog or fragment thereof, or if the activity of a polypeptide encoded by a nucleic acid molecule comprising the nucleic acid SEQ ID NO. 143817, preferably the coding region thereof, or a homolog or fragment thereof, e.g. derived from Escherichia coli, is increased or generated. For example the activity of a nucleic acid molecule or a polypeptide comprising the nucleic acid, preferably the coding region thereof, or polypeptide or the consensus sequence or the polypeptide motif, as depicted in Table I, II or IV, application No. 17, column 5 or 8 in the respective same line as the nucleic acid molecule SEQ ID NO. 143817 or polypeptide SEQ ID NO. 143818, respectively, or a homolog or a fragment thereof, is increased or generated, or if the activity b0488-protein is increased or generated in a non-human organism, like a microorganism or a plant cell, plant or part thereof, especially with plastidic localization, whereby the respective line disclose in column 7 the fine chemical saccharic acid. For example, an increase of the saccharic acid of at least 1 percent, particularly in a range of 57 to 74-percent is conferred as compared to a corresponding non-transformed wild type non-human organism.

[88144] Accordingly, in one embodiment, an increase of galactinol in a non-human organism, as compared to a corresponding non-transformed wild type non-human organism, is conferred in the process of the invention, if the activity of a polypeptide showing the activity of a glycerate kinase, or if the activity of the polypeptide B0514, preferably represented by SEQ ID NO. 134403, or a homolog or fragment thereof, or if the activity of a polypeptide encoded by a nucleic acid molecule comprising the nucleic acid SEQ ID NO. 134402, preferably the coding region thereof, or a homolog or fragment thereof, e.g. derived from Escherichia coli, is increased or generated. For example the activity of a nucleic acid molecule or a polypeptide comprising the nucleic acid, preferably the coding region thereof, or polypeptide or the consensus sequence or the polypeptide motif, as depicted in Table I, II or IV, application No. 17, column 5 or 8 in the respective same line as the nucleic acid molecule SEQ ID NO. 134402 or polypeptide SEQ ID NO. 134403, respectively, or a homolog or a fragment thereof, is increased or generated, or if the activity glycerate kinase is increased or generated in a non-human organism, like a microorganism or a plant cell, plant or part thereof, especially with non-targeted localization, whereby the respective line disclose in column 7 the fine chemical galactinol. For example, an increase of the galactinol of at least 1 percent, particularly in a range of 42 to 174-percent is conferred as compared to a corresponding non-transformed wild type non-human organism.

[88145] Accordingly, in one embodiment, an increase of fructose in a non-human organism, as compared to a corresponding non-transformed wild type non-human organism, is conferred in the process of the invention, if the activity of a polypeptide showing the activity of a isochorismate synthase, or if the activity of the polypeptide B0593, preferably represented by SEQ ID NO. 35968, or a homolog or fragment thereof, or if the activity of a polypeptide encoded by a nucleic acid molecule comprising the nucleic acid SEQ ID NO. 35967, preferably the coding region thereof, or a homolog or fragment thereof, e.g. derived from Escherichia coli, is increased or generated. For example the activity of a nucleic acid molecule or a polypeptide comprising the nucleic acid, preferably the coding region thereof, or polypeptide or the consensus sequence or the polypeptide motif, as depicted in Table I, II or IV, application No. 17, column 5 or 8 in the respective same line as the nucleic acid molecule SEQ ID NO. 35967 or polypeptide SEQ ID NO. 35968, respectively, or a homolog or a fragment thereof, is increased or generated, or if the activity isochorismate synthase is increased or generated in a non-human organism, like a microorganism or a plant cell, plant or part thereof, especially with plastidic localization, whereby the respective line disclose in column 7 the fine chemical fructose. For example, an increase of the fructose of at least 1 percent, particularly in a range of 188 to 824-percent is conferred as compared to a corresponding non-transformed wild type non-human organism.

[88146] Accordingly, in one embodiment, an increase of glucose in a non-human organism, as compared to a corresponding non-transformed wild type non-human organism, is conferred in the process of the invention, if the activity of a polypeptide showing the activity of a isochorismate synthase, or if the activity of the polypeptide B0593, preferably represented by SEQ ID NO. 35968, or a homolog or fragment thereof, or if the activity of a polypeptide encoded by a nucleic acid molecule comprising the nucleic acid SEQ ID NO. 35967, preferably the coding region thereof, or a homolog or fragment thereof, e.g. derived from Escherichia coli, is increased or generated. For example the activity of a nucleic acid molecule or a polypeptide comprising the nucleic acid, preferably the coding region thereof, or polypeptide or the consensus sequence or the polypeptide motif, as depicted in Table I, II or IV, application No. 17, column 5 or 8 in the respective same line as the nucleic acid molecule SEQ ID NO. 35967 or polypeptide SEQ ID NO. 35968, respectively, or a homolog or a fragment thereof, is increased or generated, or if the activity isochorismate synthase is increased or generated in a non-human organism, like a microorganism or a plant cell, plant or part thereof, especially with plastidic localization, whereby the respective line disclose in column 7 the fine chemical glucose. For example, an increase of the glucose of at least 1 percent, particularly in a range of 73 to 258-percent is conferred as compared to a corresponding non-transformed wild type non-human organism.

[88147] Accordingly, in one embodiment, an increase of raffinose in a non-human organism, as compared to a corresponding non-transformed wild type non-human organism, is conferred in the process of the invention, if the activity of a polypeptide showing the activity of a isochorismate synthase, or if the activity of the polypeptide B0593, preferably represented by SEQ ID NO. 35968, or a homolog or fragment thereof, or if the activity of a polypeptide encoded by a nucleic acid molecule comprising the nucleic acid SEQ ID NO. 35967, preferably the coding region thereof, or a homolog or fragment thereof, e.g. derived from Escherichia coli, is increased or generated. For example the activity of a nucleic acid molecule or a polypeptide comprising the nucleic acid, preferably the coding region thereof, or polypeptide or the consensus sequence or the polypeptide motif, as depicted in Table I, II or IV, application No. 17, column 5 or 8 in the respective same line as the nucleic acid molecule SEQ ID NO. 35967 or polypeptide SEQ ID NO. 35968, respectively, or a homolog or a fragment thereof, is increased or generated, or if the activity isochorismate synthase is increased or generated in a non-human organism, like a microorganism or a plant cell, plant or part thereof, especially with plastidic localization, whereby the respective line disclose in column 7 the fine chemical raffinose. For example, an increase of the raffinose of at least 1 percent, particularly in a range of 70 to 127-percent is conferred as compared to a corresponding non-transformed wild type non-human organism.

[88148] Accordingly, in one embodiment, an increase of sucrose in a non-human organism, as compared to a corresponding non-transformed wild type non-human organism, is conferred in the process of the invention, if the activity of a polypeptide showing the activity of a isochorismate synthase, or if the activity of the polypeptide B0593, preferably represented by SEQ ID NO. 35968, or a homolog or fragment thereof, or if the activity of a polypeptide encoded by a nucleic acid molecule comprising the nucleic acid SEQ ID NO. 35967, preferably the coding region thereof, or a homolog or fragment thereof, e.g. derived from Escherichia coli, is increased or generated. For example the activity of a nucleic acid molecule or a polypeptide comprising the nucleic acid, preferably the coding region thereof, or polypeptide or the consensus sequence or the polypeptide motif, as depicted in Table I, II or IV, application No. 17, column 5 or 8 in the respective same line as the nucleic acid molecule SEQ ID NO. 35967 or polypeptide SEQ ID NO. 35968, respectively, or a homolog or a fragment thereof, is increased or generated, or if the activity isochorismate synthase is increased or generated in a non-human organism, like a microorganism or a plant cell, plant or part thereof, especially with plastidic localization, whereby the respective line disclose in column 7 the fine chemical sucrose. For example, an increase of the sucrose of at least 1 percent, particularly in a range of 25 to 48-percent is conferred as compared to a corresponding non-transformed wild type non-human organism.

[88149] Accordingly, in one embodiment, an increase of 3,4,5-trihydroxypentanoic acid in a non-human organism, as compared to a corresponding non-transformed wild type non-human organism, is conferred in the process of the invention, if the activity of a polypeptide showing the activity of a B0644-protein, or if the activity of the polypeptide B0644, preferably represented by SEQ ID NO. 143902, or a homolog or fragment thereof, or if the activity of a polypeptide encoded by a nucleic acid molecule comprising the nucleic acid SEQ ID NO. 143901, preferably the coding region thereof, or a homolog or fragment thereof, e.g. derived from Escherichia coli, is increased or generated. For example the activity of a nucleic acid molecule or a polypeptide comprising the nucleic acid, preferably the coding region thereof, or polypeptide or the consensus sequence or the polypeptide motif, as depicted in Table I, II or IV, application No. 17, column 5 or 8 in the respective same line as the nucleic acid molecule SEQ ID NO. 143901 or polypeptide SEQ ID NO. 143902, respectively, or a homolog or a fragment thereof, is increased or generated, or if the activity B0644-protein is increased or generated in a non-human organism, like a microorganism or a plant cell, plant or part thereof, especially with plastidic localization, whereby the respective line disclose in column 7 the fine chemical 3,4,5-trihydroxypentanoic acid. For example, an increase of the 3,4,5-trihydroxypentanoic acid of at least 1 percent, particularly in a range of 40 to 79-percent is conferred as compared to a corresponding non-transformed wild type non-human organism.

[88150] Accordingly, in one embodiment, an increase of saccharic acid in a non-human organism, as compared to a corresponding non-transformed wild type non-human organism, is conferred in the process of the invention, if the activity of a polypeptide showing the activity of a pyrimidine-specific ribonucleoside hydrolase, or if the activity of the polypeptide B0651, preferably represented by SEQ ID NO. 143955, or a homolog or fragment thereof, or if the activity of a polypeptide encoded by a nucleic acid molecule comprising the nucleic acid SEQ ID NO. 143954, preferably the coding region thereof, or a homolog or fragment thereof, e.g. derived from Escherichia coli, is increased or generated. For example the activity of a nucleic acid molecule or a polypeptide comprising the nucleic acid, preferably the coding region thereof, or polypeptide or the consensus sequence or the polypeptide motif, as depicted in Table I, II or IV, application No. 17, column 5 or 8 in the respective same line as the nucleic acid molecule SEQ ID NO. 143954 or polypeptide SEQ ID NO. 143955, respectively, or a homolog or a fragment thereof, is increased or generated, or if the activity pyrimidine-specific ribonucleoside hydrolase is increased or generated in a non-human organism, like a microorganism or a plant cell, plant or part thereof, especially with non-targeted localization, whereby the respective line disclose in column 7 the fine chemical saccharic acid. For example, an increase of the saccharic acid of at least 1 percent, particularly in a range of 40 to 46-percent is conferred as compared to a corresponding non-transformed wild type non-human organism.

[88151] Accordingly, in one embodiment, an increase of erythrol in a non-human organism, as compared to a corresponding non-transformed wild type non-human organism, is conferred in the process of the invention, if the activity of a polypeptide showing the activity of a asparagine synthetase B, or if the activity of the polypeptide B0674, preferably represented by SEQ ID NO. 144208, or a homolog or fragment thereof, or if the activity of a polypeptide encoded by a nucleic acid molecule comprising the nucleic acid SEQ ID NO. 144207, preferably the coding region thereof, or a homolog or fragment thereof, e.g. derived from Escherichia coli, is increased or generated. For example the activity of a nucleic acid molecule or a polypeptide comprising the nucleic acid, preferably the coding region thereof, or polypeptide or the consensus sequence or the polypeptide motif, as depicted in Table I, II or IV, application No. 17, column 5 or 8 in the respective same line as the nucleic acid molecule SEQ ID NO. 144207 or polypeptide SEQ ID NO. 144208, respectively, or a homolog or a fragment thereof, is increased or generated, or if the activity asparagine synthetase B is increased or generated in a non-human organism, like a microorganism or a plant cell, plant or part thereof, especially with plastidic localization, whereby the respective line disclose in column 7 the fine chemical erythrol. For example, an increase of the erythrol of at least 1 percent, particularly in a range of 239 to 281-percent is conferred as compared to a corresponding non-transformed wild type non-human organism.

[88152] Accordingly, in one embodiment, an increase of myo-inositol in a non-human organism, as compared to a corresponding non-transformed wild type non-human organism, is conferred in the process of the invention, if the activity of a polypeptide showing the activity of a sensor histidine kinase, or if the activity of the polypeptide B0695, preferably represented by SEQ ID NO. 93679, or a homolog or fragment thereof, or if the activity of a polypeptide encoded by a nucleic acid molecule comprising the nucleic acid SEQ ID NO. 93678, preferably the coding region thereof, or a homolog or fragment thereof, e.g. derived from Escherichia coli, is increased or generated. For example the activity of a nucleic acid molecule or a polypeptide comprising the nucleic acid, preferably the coding region thereof, or polypeptide or the consensus sequence or the polypeptide motif, as depicted in Table I, II or IV, application No. 17, column 5 or 8 in the respective same line as the nucleic acid molecule SEQ ID NO. 93678 or polypeptide SEQ ID NO. 93679, respectively, or a homolog or a fragment thereof, is increased or generated, or if the activity sensor histidine kinase is increased or generated in a non-human organism, like a microorganism or a plant cell, plant or part thereof, especially with non-targeted localization, whereby the respective line disclose in column 7 the fine chemical myo-inositol. For example, an increase of the myo-inositol of at least 1 percent, particularly in a range of 27 to 58-percent is conferred as compared to a corresponding non-transformed wild type non-human organism.

[88153] Accordingly, in one embodiment, an increase of myo-inositol in a non-human organism, as compared to a corresponding non-transformed wild type non-human organism, is conferred in the process of the invention, if the activity of a polypeptide showing the activity of a succinyl-CoA synthetase beta chain, or if the activity of the polypeptide B0728, preferably represented by SEQ ID NO. 93794, or a homolog or fragment thereof, or if the activity of a polypeptide encoded by a nucleic acid molecule comprising the nucleic acid SEQ ID NO. 93793, preferably the coding region thereof, or a homolog or fragment thereof, e.g. derived from Escherichia coli, is increased or generated. For example the activity of a nucleic acid molecule or a polypeptide comprising the nucleic acid, preferably the coding region thereof, or polypeptide or the consensus sequence or the polypeptide motif, as depicted in Table I, II or IV, application No. 17, column 5 or 8 in the respective same line as the nucleic acid molecule SEQ ID NO. 93793 or polypeptide SEQ ID NO. 93794, respectively, or a homolog or a fragment thereof, is increased or generated, or if the activity succinyl-CoA synthetase beta chain is increased or generated in a non-human organism, like a microorganism or a plant cell, plant or part thereof, especially with plastidic localization, whereby the respective line disclose in column 7 the fine chemical myo-inositol. For example, an increase of the myo-inositol of at least 1 percent, particularly in a range of 26 to 47-percent is conferred as compared to a corresponding non-transformed wild type non-human organism.

[88154] Accordingly, in one embodiment, an increase of fructose in a non-human organism, as compared to a corresponding non-transformed wild type non-human organism, is conferred in the process of the invention, if the activity of a polypeptide showing the activity of a zinc transporter, or if the activity of the polypeptide B0752, preferably represented by SEQ ID NO. 36115, or a homolog or fragment thereof, or if the activity of a polypeptide encoded by a nucleic acid molecule comprising the nucleic acid SEQ ID NO. 36114, preferably the coding region thereof, or a homolog or fragment thereof, e.g. derived from Escherichia coli, is increased or generated. For example the activity of a nucleic acid molecule or a polypeptide comprising the nucleic acid, preferably the coding region thereof, or polypeptide or the consensus sequence or the polypeptide motif, as depicted in Table I, II or IV, application No. 17, column 5 or 8 in the respective same line as the nucleic acid molecule SEQ ID NO. 36114 or polypeptide SEQ ID NO. 36115, respectively, or a homolog or a fragment thereof, is increased or generated, or if the activity zinc transporter is increased or generated in a non-human organism, like a microorganism or a plant cell, plant or part thereof, especially with non-targeted localization, whereby the respective line disclose in column 7 the fine chemical fructose. For example, an increase of the fructose of at least 1 percent, particularly in a range of 77 to 258-percent is conferred as compared to a corresponding non-transformed wild type non-human organism.

[88155] Accordingly, in one embodiment, an increase of glucose in a non-human organism, as compared to a corresponding non-transformed wild type non-human organism, is conferred in the process of the invention, if the activity of a polypeptide showing the activity of a zinc transporter, or if the activity of the polypeptide B0752, preferably represented by SEQ ID NO. 36115, or a homolog or fragment thereof, or if the activity of a polypeptide encoded by a nucleic acid molecule comprising the nucleic acid SEQ ID NO. 36114, preferably the coding region thereof, or a homolog or fragment thereof, e.g. derived from Escherichia coli, is increased or generated. For example the activity of a nucleic acid molecule or a polypeptide comprising the nucleic acid, preferably the coding region thereof, or polypeptide or the consensus sequence or the polypeptide motif, as depicted in Table I, II or IV, application No. 17, column 5 or 8 in the respective same line as the nucleic acid molecule SEQ ID NO. 36114 or polypeptide SEQ ID NO. 36115, respectively, or a homolog or a fragment thereof, is increased or generated, or if the activity zinc transporter is increased or generated in a non-human organism, like a microorganism or a plant cell, plant or part thereof, especially with non-targeted localization, whereby the respective line disclose in column 7 the fine chemical glucose. For example, an increase of the glucose of at least 1 percent, particularly in a range of 76 to 641-percent is conferred as compared to a corresponding non-transformed wild type non-human organism.

[88156] Accordingly, in one embodiment, an increase of glucose-1-phosphate in a non-human organism, as compared to a corresponding non-transformed wild type non-human organism, is conferred in the process of the invention, if the activity of a polypeptide showing the activity of a zinc transporter, or if the activity of the polypeptide B0752, preferably represented by SEQ ID NO. 36115, or a homolog or fragment thereof, or if the activity of a polypeptide encoded by a nucleic acid molecule comprising the nucleic acid SEQ ID NO. 36114, preferably the coding region thereof, or a homolog or fragment thereof, e.g. derived from Escherichia coli, is increased or generated. For example the activity of a nucleic acid molecule or a polypeptide comprising the nucleic acid, preferably the coding region thereof, or polypeptide or the consensus sequence or the polypeptide motif, as depicted in Table I, II or IV, application No. 17, column 5 or 8 in the respective same line as the nucleic acid molecule SEQ ID NO. 36114 or polypeptide SEQ ID NO. 36115, respectively, or a homolog or a fragment thereof, is increased or generated, or if the activity zinc transporter is increased or generated in a non-human organism, like a microorganism or a plant cell, plant or part thereof, especially with non-targeted localization, whereby the respective line disclose in column 7 the fine chemical glucose-1-phosphate. For example, an increase of the glucose-1-phosphate of at least 1 percent, particularly in a range of 30 to 78-percent is conferred as compared to a corresponding non-transformed wild type non-human organism.

[88157] Accordingly, in one embodiment, an increase of raffinose in a non-human organism, as compared to a corresponding non-transformed wild type non-human organism, is conferred in the process of the invention, if the activity of a polypeptide showing the activity of a zinc transporter, or if the activity of the polypeptide B0752, preferably represented by SEQ ID NO. 36115, or a homolog or fragment thereof, or if the activity of a polypeptide encoded by a nucleic acid molecule comprising the nucleic acid SEQ ID NO. 36114, preferably the coding region thereof, or a homolog or fragment thereof, e.g. derived from Escherichia coli, is increased or generated. For example the activity of a nucleic acid molecule or a polypeptide comprising the nucleic acid, preferably the coding region thereof, or polypeptide or the consensus sequence or the polypeptide motif, as depicted in Table I, II or IV, application No. 17, column 5 or 8 in the respective same line as the nucleic acid molecule SEQ ID NO. 36114 or polypeptide SEQ ID NO. 36115, respectively, or a homolog or a fragment thereof, is increased or generated, or if the activity zinc transporter is increased or generated in a non-human organism, like a microorganism or a plant cell, plant or part thereof, especially with non-targeted localization, whereby the respective line disclose in column 7 the fine chemical raffinose. For example, an increase of the raffinose of at least 1 percent, particularly in a range of 65 to 646-percent is conferred as compared to a corresponding non-transformed wild type non-human organism.

[88158] Accordingly, in one embodiment, an increase of glucose in a non-human organism, as compared to a corresponding non-transformed wild type non-human organism, is conferred in the process of the invention, if the activity of a polypeptide showing the activity of a b0801-protein, or if the activity of the polypeptide B0801, preferably represented by SEQ ID NO. 75808, or a homolog or fragment thereof, or if the activity of a polypeptide encoded by a nucleic acid molecule comprising the nucleic acid SEQ ID NO. 75807, preferably the coding region thereof, or a homolog or fragment thereof, e.g. derived from Escherichia coli, is increased or generated. For example the activity of a nucleic acid molecule or a polypeptide comprising the nucleic acid, preferably the coding region thereof, or polypeptide or the consensus sequence or the polypeptide motif, as depicted in Table I, II or IV, application No. 17, column 5 or 8 in the respective same line as the nucleic acid molecule SEQ ID NO. 75807 or polypeptide SEQ ID NO. 75808, respectively, or a homolog or a fragment thereof, is increased or generated, or if the activity b0801-protein is increased or generated in a non-human organism, like a microorganism or a plant cell, plant or part thereof, especially with non-targeted localization, whereby the respective line disclose in column 7 the fine chemical glucose. For example, an increase of the glucose of at least 1 percent, particularly in a range of 108 to 170-percent is conferred as compared to a corresponding non-transformed wild type non-human organism.

[88159] Accordingly, in one embodiment, an increase of sedoheptulose-7-phosphate in a non-human organism, as compared to a corresponding non-transformed wild type non-human organism, is conferred in the process of the invention, if the activity of a polypeptide showing the activity of a putrescine transport system permease protein, or if the activity of the polypeptide B0856, preferably represented by SEQ ID NO. 131360, or a homolog or fragment thereof, or if the activity of a polypeptide encoded by a nucleic acid molecule comprising the nucleic acid SEQ ID NO. 131359, preferably the coding region thereof, or a homolog or fragment thereof, e.g. derived from Escherichia coli, is increased or generated. For example the activity of a nucleic acid molecule or a polypeptide comprising the nucleic acid, preferably the coding region thereof, or polypeptide or the consensus sequence or the polypeptide motif, as depicted in Table I, II or IV, application No. 17, column 5 or 8 in the respective same line as the nucleic acid molecule SEQ ID NO. 131359 or polypeptide SEQ ID NO. 131360, respectively, or a homolog or a fragment thereof, is increased or generated, or if the activity putrescine transport system permease protein is increased or generated in a non-human organism, like a microorganism or a plant cell, plant or part thereof, especially with plastidic localization, whereby the respective line disclose in column 7 the fine chemical sedoheptulose-7-phosphate. For example, an increase of the sedoheptulose-7-phosphate of at least 1 percent, particularly in a range of 74 to 127-percent is conferred as compared to a corresponding non-transformed wild type non-human organism.

[88160] Accordingly, in one embodiment, an increase of raffinose in a non-human organism, as compared to a corresponding non-transformed wild type non-human organism, is conferred in the process of the invention, if the activity of a polypeptide showing the activity of a leucyl/phenylalanyl-tRNA-protein transferase, or if the activity of the polypeptide B0885, preferably represented by SEQ ID NO. 36490, or a homolog or fragment thereof, or if the activity of a polypeptide encoded by a nucleic acid molecule comprising the nucleic acid SEQ ID NO. 36489, preferably the coding region thereof, or a homolog or fragment thereof, e.g. derived from Escherichia coli, is increased or generated. For example the activity of a nucleic acid molecule or a polypeptide comprising the nucleic acid, preferably the coding region thereof, or polypeptide or the consensus sequence or the polypeptide motif, as depicted in Table I, II or IV, application No. 17, column 5 or 8 in the respective same line as the nucleic acid molecule SEQ ID NO. 36489 or polypeptide SEQ ID NO. 36490, respectively, or a homolog or a fragment thereof, is increased or generated, or if the activity leucyl/phenylalanyl-tRNA-protein transferase is increased or generated in a non-human organism, like a microorganism or a plant cell, plant or part thereof, especially with non-targeted localization, whereby the respective line disclose in column 7 the fine chemical raffinose. For example, an increase of the raffinose of at least 1 percent, particularly in a range of 67 to 76-percent is conferred as compared to a corresponding non-transformed wild type non-human organism.

[88161] Accordingly, in one embodiment, an increase of glucose-1-phosphate in a non-human organism, as compared to a corresponding non-transformed wild type non-human organism, is conferred in the process of the invention, if the activity of a polypeptide showing the activity of a b0970-protein, or if the activity of the polypeptide B0970, preferably represented by SEQ ID NO. 144480, or a homolog or fragment thereof, or if the activity of a polypeptide encoded by a nucleic acid molecule comprising the nucleic acid SEQ ID NO. 144479, preferably the coding region thereof, or a homolog or fragment thereof, e.g. derived from Escherichia coli, is increased or generated. For example the activity of a nucleic acid molecule or a polypeptide comprising the nucleic acid, preferably the coding region thereof, or polypeptide or the consensus sequence or the polypeptide motif, as depicted in Table I, II or IV, application No. 17, column 5 or 8 in the respective same line as the nucleic acid molecule SEQ ID NO. 144479 or polypeptide SEQ ID NO. 144480, respectively, or a homolog or a fragment thereof, is increased or generated, or if the activity b0970-protein is increased or generated in a non-human organism, like a microorganism or a plant cell, plant or part thereof, especially with non-targeted localization, whereby the respective line disclose in column 7 the fine chemical glucose-1-phosphate. For example, an increase of the glucose-1-phosphate of at least 1 percent, particularly in a range of 22 to 130-percent is conferred as compared to a corresponding non-transformed wild type non-human organism.

[88162] Accordingly, in one embodiment, an increase of myo-inositol in a non-human organism, as compared to a corresponding non-transformed wild type non-human organism, is conferred in the process of the invention, if the activity of a polypeptide showing the activity of a phosphoanhydride phosphorylase, or if the activity of the polypeptide B0980, preferably represented by SEQ ID NO. 36810, or a homolog or fragment thereof, or if the activity of a polypeptide encoded by a nucleic acid molecule comprising the nucleic acid SEQ ID NO. 36809, preferably the coding region thereof, or a homolog or fragment thereof, e.g. derived from Escherichia coli, is increased or generated. For example the activity of a nucleic acid molecule or a polypeptide comprising the nucleic acid, preferably the coding region thereof, or polypeptide or the consensus sequence or the polypeptide motif, as depicted in Table I, II or IV, application No. 17, column 5 or 8 in the respective same line as the nucleic acid molecule SEQ ID NO. 36809 or polypeptide SEQ ID NO. 36810, respectively, or a homolog or a fragment thereof, is increased or generated, or if the activity phosphoanhydride phosphorylase is increased or generated in a non-human organism, like a microorganism or a plant cell, plant or part thereof, especially with non-targeted localization, whereby the respective line disclose in column 7 the fine chemical myo-inositol. For example, an increase of the myo-inositol of at least 1 percent, particularly in a range of 26 to 130-percent is conferred as compared to a corresponding non-transformed wild type non-human organism.

[88163] Accordingly, in one embodiment, an increase of fructose in a non-human organism, as compared to a corresponding non-transformed wild type non-human organism, is conferred in the process of the invention, if the activity of a polypeptide showing the activity of a b1003-protein, or if the activity of the polypeptide B1003, preferably represented by SEQ ID NO. 7942, or a homolog or fragment thereof, or if the activity of a polypeptide encoded by a nucleic acid molecule comprising the nucleic acid SEQ ID NO. 7941, preferably the coding region thereof, or a homolog or fragment thereof, e.g. derived from Escherichia coli, is increased or generated. For example the activity of a nucleic acid molecule or a polypeptide comprising the nucleic acid, preferably the coding region thereof, or polypeptide or the consensus sequence or the polypeptide motif, as depicted in Table I, II or IV, application No. 17, column 5 or 8 in the respective same line as the nucleic acid molecule SEQ ID NO. 7941 or polypeptide SEQ ID NO. 7942, respectively, or a homolog or a fragment thereof, is increased or generated, or if the activity b1003-protein is increased or generated in a non-human organism, like a microorganism or a plant cell, plant or part thereof, especially with non-targeted localization, whereby the respective line disclose in column 7 the fine chemical fructose. For example, an increase of the fructose of at least 1 percent, particularly in a range of 278 to 1463-percent is conferred as compared to a corresponding non-transformed wild type non-human organism.

[88164] Accordingly, in one embodiment, an increase of glucose in a non-human organism, as compared to a corresponding non-transformed wild type non-human organism, is conferred in the process of the invention, if the activity of a polypeptide showing the activity of a b1003-protein, or if the activity of the polypeptide B1003, preferably represented by SEQ ID NO. 7942, or a homolog or fragment thereof, or if the activity of a polypeptide encoded by a nucleic acid molecule comprising the nucleic acid SEQ ID NO. 7941, preferably the coding region thereof, or a homolog or fragment thereof, e.g. derived from Escherichia coli, is increased or generated. For example the activity of a nucleic acid molecule or a polypeptide comprising the nucleic acid, preferably the coding region thereof, or polypeptide or the consensus sequence or the polypeptide motif, as depicted in Table I, II or IV, application No. 17, column 5 or 8 in the respective same line as the nucleic acid molecule SEQ ID NO. 7941 or polypeptide SEQ ID NO. 7942, respectively, or a homolog or a fragment thereof, is increased or generated, or if the activity b1003-protein is increased or generated in a non-human organism, like a microorganism or a plant cell, plant or part thereof, especially with non-targeted localization, whereby the respective line disclose in column 7 the fine chemical glucose. For example, an increase of the glucose of at least 1 percent, particularly in a range of 44 to 339-percent is conferred as compared to a corresponding non-transformed wild type non-human organism.

[88165] Accordingly, in one embodiment, an increase of glucose-1-phosphate in a non-human organism, as compared to a corresponding non-transformed wild type non-human organism, is conferred in the process of the invention, if the activity of a polypeptide showing the activity of a b1003-protein, or if the activity of the polypeptide B1003, preferably represented by SEQ ID NO. 7942, or a homolog or fragment thereof, or if the activity of a polypeptide encoded by a nucleic acid molecule comprising the nucleic acid SEQ ID NO. 7941, preferably the coding region thereof, or a homolog or fragment thereof, e.g. derived from Escherichia coli, is increased or generated. For example the activity of a nucleic acid molecule or a polypeptide comprising the nucleic acid, preferably the coding region thereof, or polypeptide or the consensus sequence or the polypeptide motif, as depicted in Table I, II or IV, application No. 17, column 5 or 8 in the respective same line as the nucleic acid molecule SEQ ID NO. 7941 or polypeptide SEQ ID NO. 7942, respectively, or a homolog or a fragment thereof, is increased or generated, or if the activity b1003-protein is increased or generated in a non-human organism, like a microorganism or a plant cell, plant or part thereof, especially with non-targeted localization, whereby the respective line disclose in column 7 the fine chemical glucose-1-phosphate. For example, an increase of the glucose-1-phosphate of at least 1 percent, particularly in a range of 30 to 102-percent is conferred as compared to a corresponding non-transformed wild type non-human organism.

[88166] Accordingly, in one embodiment, an increase of sedoheptulose-7-phosphate in a non-human organism, as compared to a corresponding non-transformed wild type non-human organism, is conferred in the process of the invention, if the activity of a polypeptide showing the activity of a b1003-protein, or if the activity of the polypeptide B1003, preferably represented by SEQ ID NO. 7942, or a homolog or fragment thereof, or if the activity of a polypeptide encoded by a nucleic acid molecule comprising the nucleic acid SEQ ID NO. 7941, preferably the coding region thereof, or a homolog or fragment thereof, e.g. derived from Escherichia coli, is increased or generated. For example the activity of a nucleic acid molecule or a polypeptide comprising the nucleic acid, preferably the coding region thereof, or polypeptide or the consensus sequence or the polypeptide motif, as depicted in Table I, II or IV, application No. 17, column 5 or 8 in the respective same line as the nucleic acid molecule SEQ ID NO. 7941 or polypeptide SEQ ID NO. 7942, respectively, or a homolog or a fragment thereof, is increased or generated, or if the activity b1003-protein is increased or generated in a non-human organism, like a microorganism or a plant cell, plant or part thereof, especially with non-targeted localization, whereby the respective line disclose in column 7 the fine chemical sedoheptulose-7-phosphate. For example, an increase of the sedoheptulose-7-phosphate of at least 1 percent, particularly in a range of 62 to 799-percent is conferred as compared to a corresponding non-transformed wild type non-human organism.

[88167] Accordingly, in one embodiment, an increase of sucrose in a non-human organism, as compared to a corresponding non-transformed wild type non-human organism, is conferred in the process of the invention, if the activity of a polypeptide showing the activity of a b1003-protein, or if the activity of the polypeptide B1003, preferably represented by SEQ ID NO. 7942, or a homolog or fragment thereof, or if the activity of a polypeptide encoded by a nucleic acid molecule comprising the nucleic acid SEQ ID NO. 7941, preferably the coding region thereof, or a homolog or fragment thereof, e.g. derived from Escherichia coli, is increased or generated. For example the activity of a nucleic acid molecule or a polypeptide comprising the nucleic acid, preferably the coding region thereof, or polypeptide or the consensus sequence or the polypeptide motif, as depicted in Table I, II or IV, application No. 17, column 5 or 8 in the respective same line as the nucleic acid molecule SEQ ID NO. 7941 or polypeptide SEQ ID NO. 7942, respectively, or a homolog or a fragment thereof, is increased or generated, or if the activity b1003-protein is increased or generated in a non-human organism, like a microorganism or a plant cell, plant or part thereof, especially with non-targeted localization, whereby the respective line disclose in column 7 the fine chemical sucrose. For example, an increase of the sucrose of at least 1 percent, particularly in a range of 57 to 120-percent is conferred as compared to a corresponding non-transformed wild type non-human organism.

[88168] Accordingly, in one embodiment, an increase of 3,4,5-trihydroxypentanoic acid in a non-human organism, as compared to a corresponding non-transformed wild type non-human organism, is conferred in the process of the invention, if the activity of a polypeptide showing the activity of a b1046-protein, or if the activity of the polypeptide B1046, preferably represented by SEQ ID NO. 124052, or a homolog or fragment thereof, or if the activity of a polypeptide encoded by a nucleic acid molecule comprising the nucleic acid SEQ ID NO. 124051, preferably the coding region thereof, or a homolog or fragment thereof, e.g. derived from Escherichia coli, is increased or generated. For example the activity of a nucleic acid molecule or a polypeptide comprising the nucleic acid, preferably the coding region thereof, or polypeptide or the consensus sequence or the polypeptide motif, as depicted in Table I, II or IV, application No. 17, column 5 or 8 in the respective same line as the nucleic acid molecule SEQ ID NO. 124051 or polypeptide SEQ ID NO. 124052, respectively, or a homolog or a fragment thereof, is increased or generated, or if the activity b1046-protein is increased or generated in a non-human organism, like a microorganism or a plant cell, plant or part thereof, especially with plastidic localization, whereby the respective line disclose in column 7 the fine chemical 3,4,5-trihydroxypentanoic acid. For example, an increase of the 3,4,5-trihydroxypentanoic acid of at least 1 percent, particularly in a range of 33 to 49-percent is conferred as compared to a corresponding non-transformed wild type non-human organism.

[88169] Accordingly, in one embodiment, an increase of glucose-1-phosphate in a non-human organism, as compared to a corresponding non-transformed wild type non-human organism, is conferred in the process of the invention, if the activity of a polypeptide showing the activity of a multidrug resistance protein, or if the activity of the polypeptide B1065, preferably represented by SEQ ID NO. 76033, or a homolog or fragment thereof, or if the activity of a polypeptide encoded by a nucleic acid molecule comprising the nucleic acid SEQ ID NO. 76032, preferably the coding region thereof, or a homolog or fragment thereof, e.g. derived from Escherichia coli, is increased or generated. For example the activity of a nucleic acid molecule or a polypeptide comprising the nucleic acid, preferably the coding region thereof, or polypeptide or the consensus sequence or the polypeptide motif, as depicted in Table I, II or IV, application No. 17, column 5 or 8 in the respective same line as the nucleic acid molecule SEQ ID NO. 76032 or polypeptide SEQ ID NO. 76033, respectively, or a homolog or a fragment thereof, is increased or generated, or if the activity multidrug resistance protein is increased or generated in a non-human organism, like a microorganism or a plant cell, plant or part thereof, especially with plastidic localization, whereby the respective line disclose in column 7 the fine chemical glucose-1-phosphate. For example, an increase of the glucose-1-phosphate of at least 1 percent, particularly in a range of 19 to 35-percent is conferred as compared to a corresponding non-transformed wild type non-human organism.

[88170] Accordingly, in one embodiment, an increase of sucrose in a non-human organism, as compared to a corresponding non-transformed wild type non-human organism, is conferred in the process of the invention, if the activity of a polypeptide showing the activity of a multidrug resistance protein, or if the activity of the polypeptide B1065, preferably represented by SEQ ID NO. 76033, or a homolog or fragment thereof, or if the activity of a polypeptide encoded by a nucleic acid molecule comprising the nucleic acid SEQ ID NO. 76032, preferably the coding region thereof, or a homolog or fragment thereof, e.g. derived from Escherichia coli, is increased or generated. For example the activity of a nucleic acid molecule or a polypeptide comprising the nucleic acid, preferably the coding region thereof, or polypeptide or the consensus sequence or the polypeptide motif, as depicted in Table I, II or IV, application No. 17, column 5 or 8 in the respective same line as the nucleic acid molecule SEQ ID NO. 76032 or polypeptide SEQ ID NO. 76033, respectively, or a homolog or a fragment thereof, is increased or generated, or if the activity multidrug resistance protein is increased or generated in a non-human organism, like a microorganism or a plant cell, plant or part thereof, especially with plastidic localization, whereby the respective line disclose in column 7 the fine chemical sucrose. For example, an increase of the sucrose of at least 1 percent, particularly in a range of 32 to 37-percent is conferred as compared to a corresponding non-transformed wild type non-human organism.

[88171] Accordingly, in one embodiment, an increase of fructose in a non-human organism, as compared to a corresponding non-transformed wild type non-human organism, is conferred in the process of the invention, if the activity of a polypeptide showing the activity of a outer membrane receptor protein precursor, or if the activity of the polypeptide B1102, preferably represented by SEQ ID NO. 114980, or a homolog or fragment thereof, or if the activity of a polypeptide encoded by a nucleic acid molecule comprising the nucleic acid SEQ ID NO. 114979, preferably the coding region thereof, or a homolog or fragment thereof, e.g. derived from Escherichia coli, is increased or generated. For example the activity of a nucleic acid molecule or a polypeptide comprising the nucleic acid, preferably the coding region thereof, or polypeptide or the consensus sequence or the polypeptide motif, as depicted in Table I, II or IV, application No. 17, column 5 or 8 in the respective same line as the nucleic acid molecule SEQ ID NO. 114979 or polypeptide SEQ ID NO. 114980, respectively, or a homolog or a fragment thereof, is increased or generated, or if the activity outer membrane receptor protein precursor is increased or generated in a non-human organism, like a microorganism or a plant cell, plant or part thereof, especially with non-targeted localization, whereby the respective line disclose in column 7 the fine chemical fructose. For example, an increase of the fructose of at least 1 percent, particularly in a range of 87 to 189-percent is conferred as compared to a corresponding non-transformed wild type non-human organism.

[88172] Accordingly, in one embodiment, an increase of glucose-1-phosphate in a non-human organism, as compared to a corresponding non-transformed wild type non-human organism, is conferred in the process of the invention, if the activity of a polypeptide showing the activity of a adenylosuccinate lyase, or if the activity of the polypeptide B1131, preferably represented by SEQ ID NO. 144612, or a homolog or fragment thereof, or if the activity of a polypeptide encoded by a nucleic acid molecule comprising the nucleic acid SEQ ID NO. 144611, preferably the coding region thereof, or a homolog or fragment thereof, e.g. derived from Escherichia coli, is increased or generated. For example the activity of a nucleic acid molecule or a polypeptide comprising the nucleic acid, preferably the coding region thereof, or polypeptide or the consensus sequence or the polypeptide motif, as depicted in Table I, II or IV, application No. 17, column 5 or 8 in the respective same line as the nucleic acid molecule SEQ ID NO. 144611 or polypeptide SEQ ID NO. 144612, respectively, or a homolog or a fragment thereof, is increased or generated, or if the activity adenylosuccinate lyase is increased or generated in a non-human organism, like a microorganism or a plant cell, plant or part thereof, especially with plastidic localization, whereby the respective line disclose in column 7 the fine chemical glucose-1-phosphate. For example, an increase of the glucose-1-phosphate of at least 1 percent, particularly in a range of 18 to 23-percent is conferred as compared to a corresponding non-transformed wild type non-human organism.

[88173] Accordingly, in one embodiment, an increase of glucose in a non-human organism, as compared to a corresponding non-transformed wild type non-human organism, is conferred in the process of the invention, if the activity of a polypeptide showing the activity of a isocitrate dehydrogenase, or if the activity of the polypeptide B1136, preferably represented by SEQ ID NO. 36972, or a homolog or fragment thereof, or if the activity of a polypeptide encoded by a nucleic acid molecule comprising the nucleic acid SEQ ID NO. 36971, preferably the coding region thereof, or a homolog or fragment thereof, e.g. derived from Escherichia coli, is increased or generated. For example the activity of a nucleic acid molecule or a polypeptide comprising the nucleic acid, preferably the coding region thereof, or polypeptide or the consensus sequence or the polypeptide motif, as depicted in Table I, II or IV, application No. 17, column 5 or 8 in the respective same line as the nucleic acid molecule SEQ ID NO. 36971 or polypeptide SEQ ID NO. 36972, respectively, or a homolog or a fragment thereof, is increased or generated, or if the activity isocitrate dehydrogenase is increased or generated in a non-human organism, like a microorganism or a plant cell, plant or part thereof, especially with plastidic localization, whereby the respective line disclose in column 7 the fine chemical glucose. For example, an increase of the glucose of at least 1 percent, particularly in a range of 50 to 104-percent is conferred as compared to a corresponding non-transformed wild type non-human organism.

[88174] Accordingly, in one embodiment, an increase of glucose-1-phosphate in a non-human organism, as compared to a corresponding non-transformed wild type non-human organism, is conferred in the process of the invention, if the activity of a polypeptide showing the activity of a b1137-protein, or if the activity of the polypeptide B1137, preferably represented by SEQ ID NO. 37391, or a homolog or fragment thereof, or if the activity of a polypeptide encoded by a nucleic acid molecule comprising the nucleic acid SEQ ID NO. 37390, preferably the coding region thereof, or a homolog or fragment thereof, e.g. derived from Escherichia coli, is increased or generated. For example the activity of a nucleic acid molecule or a polypeptide comprising the nucleic acid, preferably the coding region thereof, or polypeptide or the consensus sequence or the polypeptide motif, as depicted in Table I, II or IV, application No. 17, column 5 or 8 in the respective same line as the nucleic acid molecule SEQ ID NO. 37390 or polypeptide SEQ ID NO. 37391, respectively, or a homolog or a fragment thereof, is increased or generated, or if the activity b1137-protein is increased or generated in a non-human organism, like a microorganism or a plant cell, plant or part thereof, especially with non-targeted localization, whereby the respective line disclose in column 7 the fine chemical glucose-1-phosphate. For example, an increase of the glucose-1-phosphate of at least 1 percent, particularly in a range of 20 to 65-percent is conferred as compared to a corresponding non-transformed wild type non-human organism.

[88175] Accordingly, in one embodiment, an increase of glucose-1-phosphate in a non-human organism, as compared to a corresponding non-transformed wild type non-human organism, is conferred in the process of the invention, if the activity of a polypeptide showing the activity of a sodium/proton antiporter, or if the activity of the polypeptide B1186, preferably represented by SEQ ID NO. 37401, or a homolog or fragment thereof, or if the activity of a polypeptide encoded by a nucleic acid molecule comprising the nucleic acid SEQ ID NO. 37400, preferably the coding region thereof, or a homolog or fragment thereof, e.g. derived from Escherichia coli, is increased or generated. For example the activity of a nucleic acid molecule or a polypeptide comprising the nucleic acid, preferably the coding region thereof, or polypeptide or the consensus sequence or the polypeptide motif, as depicted in Table I, II or IV, application No. 17, column 5 or 8 in the respective same line as the nucleic acid molecule SEQ ID NO. 37400 or polypeptide SEQ ID NO. 37401, respectively, or a homolog or a fragment thereof, is increased or generated, or if the activity sodium/proton antiporter is increased or generated in a non-human organism, like a microorganism or a plant cell, plant or part thereof, especially with non-targeted localization, whereby the respective line disclose in column 7 the fine chemical glucose-1-phosphate. For example, an increase of the glucose-1-phosphate of at least 1 percent, particularly in a range of 24 to 126-percent is conferred as compared to a corresponding non-transformed wild type non-human organism.

[88176] Accordingly, in one embodiment, an increase of glucose-1-phosphate in a non-human organism, as compared to a corresponding non-transformed wild type non-human organism, is conferred in the process of the invention, if the activity of a polypeptide showing the activity of a b1214-protein, or if the activity of the polypeptide B1214, preferably represented by SEQ ID NO. 144858, or a homolog or fragment thereof, or if the activity of a polypeptide encoded by a nucleic acid molecule comprising the nucleic acid SEQ ID NO. 144857, preferably the coding region thereof, or a homolog or fragment thereof, e.g. derived from Escherichia coli, is increased or generated. For example the activity of a nucleic acid molecule or a polypeptide comprising the nucleic acid, preferably the coding region thereof, or polypeptide or the consensus sequence or the polypeptide motif, as depicted in Table I, II or IV, application No. 17, column 5 or 8 in the respective same line as the nucleic acid molecule SEQ ID NO. 144857 or polypeptide SEQ ID NO. 144858, respectively, or a homolog or a fragment thereof, is increased or generated, or if the activity b1214-protein is increased or generated in a non-human organism, like a microorganism or a plant cell, plant or part thereof, especially with non-targeted localization, whereby the respective line disclose in column 7 the fine chemical glucose-1-phosphate. For example, an increase of the glucose-1-phosphate of at least 1 percent, particularly in a range of 43 to 71-percent is conferred as compared to a corresponding non-transformed wild type non-human organism.

[88177] Accordingly, in one embodiment, an increase of 3,4,5-trihydroxypentanoic acid in a non-human organism, as compared to a corresponding non-transformed wild type non-human organism, is conferred in the process of the invention, if the activity of a polypeptide showing the activity of a B1214-protein, or if the activity of the polypeptide B1214, preferably represented by SEQ ID NO. 144858, or a homolog or fragment thereof, or if the activity of a polypeptide encoded by a nucleic acid molecule comprising the nucleic acid SEQ ID NO. 144857, preferably the coding region thereof, or a homolog or fragment thereof, e.g. derived from Escherichia coli, is increased or generated. For example the activity of a nucleic acid molecule or a polypeptide comprising the nucleic acid, preferably the coding region thereof, or polypeptide or the consensus sequence or the polypeptide motif, as depicted in Table I, II or IV, application No. 17, column 5 or 8 in the respective same line as the nucleic acid molecule SEQ ID NO. 144857 or polypeptide SEQ ID NO. 144858, respectively, or a homolog or a fragment thereof, is increased or generated, or if the activity b1214-protein is increased or generated in a non-human organism, like a microorganism or a plant cell, plant or part thereof, especially with non-targeted localization, whereby the respective line disclose in column 7 the fine chemical 3,4,5-trihydroxypentanoic acid. For example, an increase of the 3,4,5-trihydroxypentanoic acid of at least 1 percent, particularly in a range of 40 to 58-percent is conferred as compared to a corresponding non-transformed wild type non-human organism.

[88178] Accordingly, in one embodiment, an increase of glucose-1-phosphate in a non-human organism, as compared to a corresponding non-transformed wild type non-human organism, is conferred in the process of the invention, if the activity of a polypeptide showing the activity of a b1219-protein, or if the activity of the polypeptide B1219, preferably represented by SEQ ID NO. 112073, or a homolog or fragment thereof, or if the activity of a polypeptide encoded by a nucleic acid molecule comprising the nucleic acid SEQ ID NO. 112072, preferably the coding region thereof, or a homolog or fragment thereof, e.g. derived from Escherichia coli, is increased or generated. For example the activity of a nucleic acid molecule or a polypeptide comprising the nucleic acid, preferably the coding region thereof, or polypeptide or the consensus sequence or the polypeptide motif, as depicted in Table I, II or IV, application No. 17, column 5 or 8 in the respective same line as the nucleic acid molecule SEQ ID NO. 112072 or polypeptide SEQ ID NO. 112073, respectively, or a homolog or a fragment thereof, is increased or generated, or if the activity b1219-protein is increased or generated in a non-human organism, like a microorganism or a plant cell, plant or part thereof, especially with non-targeted localization, whereby the respective line disclose in column 7 the fine chemical glucose-1-phosphate. For example, an increase of the glucose-1-phosphate of at least 1 percent, particularly in a range of 40 to 58-percent is conferred as compared to a corresponding non-transformed wild type non-human organism.

[88179] Accordingly, in one embodiment, an increase of myo-inositol in a non-human organism, as compared to a corresponding non-transformed wild type non-human organism, is conferred in the process of the invention, if the activity of a polypeptide showing the activity of a b1219-protein, or if the activity of the polypeptide B1219, preferably represented by SEQ ID NO. 112073, or a homolog or fragment thereof, or if the activity of a polypeptide encoded by a nucleic acid molecule comprising the nucleic acid SEQ ID NO. 112072, preferably the coding region thereof, or a homolog or fragment thereof, e.g. derived from Escherichia coli, is increased or generated. For example the activity of a nucleic acid molecule or a polypeptide comprising the nucleic acid, preferably the coding region thereof, or polypeptide or the consensus sequence or the polypeptide motif, as depicted in Table I, II or IV, application No. 17, column 5 or 8 in the respective same line as the nucleic acid molecule SEQ ID NO. 112072 or polypeptide SEQ ID NO. 112073, respectively, or a homolog or a fragment thereof, is increased or generated, or if the activity b1219-protein is increased or generated in a non-human organism, like a microorganism or a plant cell, plant or part thereof, especially with non-targeted localization, whereby the respective line disclose in column 7 the fine chemical myo-inositol. For example, an increase of the myo-inositol of at least 1 percent, particularly in a range of 36 to 38-percent is conferred as compared to a corresponding non-transformed wild type non-human organism.

[88180] Accordingly, in one embodiment, an increase of 3,4,5-trihydroxypentanoic acid in a non-human organism, as compared to a corresponding non-transformed wild type non-human organism, is conferred in the process of the invention, if the activity of a polypeptide showing the activity of a b1219-protein, or if the activity of the polypeptide B1219, preferably represented by SEQ ID NO. 112073, or a homolog or fragment thereof, or if the activity of a polypeptide encoded by a nucleic acid molecule comprising the nucleic acid SEQ ID NO. 112072, preferably the coding region thereof, or a homolog or fragment thereof, e.g. derived from Escherichia coli, is increased or generated. For example the activity of a nucleic acid molecule or a polypeptide comprising the nucleic acid, preferably the coding region thereof, or polypeptide or the consensus sequence or the polypeptide motif, as depicted in Table I, II or IV, application No. 17, column 5 or 8 in the respective same line as the nucleic acid molecule SEQ ID NO. 112072 or polypeptide SEQ ID NO. 112073, respectively, or a homolog or a fragment thereof, is increased or generated, or if the activity b1219-protein is increased or generated in a non-human organism, like a microorganism or a plant cell, plant or part thereof, especially with non-targeted localization, whereby the respective line disclose in column 7 the fine chemical 3,4,5-trihydroxypentanoic acid. For example, an increase of the 3,4,5-trihydroxypentanoic acid of at least 1 percent, particularly in a range of 35 to 76-percent is conferred as compared to a corresponding non-transformed wild type non-human organism.

[88181] Accordingly, in one embodiment, an increase of myo-inositol in a non-human organism, as compared to a corresponding non-transformed wild type non-human organism, is conferred in the process of the invention, if the activity of a polypeptide showing the activity of a b1234-protein, or if the activity of the polypeptide B1234, preferably represented by SEQ ID NO. 112112, or a homolog or fragment thereof, or if the activity of a polypeptide encoded by a nucleic acid molecule comprising the nucleic acid SEQ ID NO. 112111, preferably the coding region thereof, or a homolog or fragment thereof, e.g. derived from Escherichia coli, is increased or generated. For example the activity of a nucleic acid molecule or a polypeptide comprising the nucleic acid, preferably the coding region thereof, or polypeptide or the consensus sequence or the polypeptide motif, as depicted in Table I, II or IV, application No. 17, column 5 or 8 in the respective same line as the nucleic acid molecule SEQ ID NO. 112111 or polypeptide SEQ ID NO. 112112, respectively, or a homolog or a fragment thereof, is increased or generated, or if the activity b1234-protein is increased or generated in a non-human organism, like a microorganism or a plant cell, plant or part thereof, especially with non-targeted localization, whereby the respective line disclose in column 7 the fine chemical myo-inositol. For example, an increase of the myo-inositol of at least 1 percent, particularly in a range of 26 to 38-percent is conferred as compared to a corresponding non-transformed wild type non-human organism.

[88182] Accordingly, in one embodiment, an increase of galactinol in a non-human organism, as compared to a corresponding non-transformed wild type non-human organism, is conferred in the process of the invention, if the activity of a polypeptide showing the activity of a cardiolipin synthase, or if the activity of the polypeptide B1249, preferably represented by SEQ ID NO. 98779, or a homolog or fragment thereof, or if the activity of a polypeptide encoded by a nucleic acid molecule comprising the nucleic acid SEQ ID NO. 98778, preferably the coding region thereof, or a homolog or fragment thereof, e.g. derived from Escherichia coli, is increased or generated. For example the activity of a nucleic acid molecule or a polypeptide comprising the nucleic acid, preferably the coding region thereof, or polypeptide or the consensus sequence or the polypeptide motif, as depicted in Table I, II or IV, application No. 17, column 5 or 8 in the respective same line as the nucleic acid molecule SEQ ID NO. 98778 or polypeptide SEQ ID NO. 98779, respectively, or a homolog or a fragment thereof, is increased or generated, or if the activity cardiolipin synthase is increased or generated in a non-human organism, like a microorganism or a plant cell, plant or part thereof, especially with plastidic localization, whereby the respective line disclose in column 7 the fine chemical galactinol. For example, an increase of the galactinol of at least 1 percent, particularly in a range of 40 to 153-percent is conferred as compared to a corresponding non-transformed wild type non-human organism.

[88183] Accordingly, in one embodiment, an increase of galactitol in a non-human organism, as compared to a corresponding non-transformed wild type non-human organism, is conferred in the process of the invention, if the activity of a polypeptide showing the activity of a cardiolipin synthase, or if the activity of the polypeptide B1249, preferably represented by SEQ ID NO. 98779, or a homolog or fragment thereof, or if the activity of a polypeptide encoded by a nucleic acid molecule comprising the nucleic acid SEQ ID NO. 98778, preferably the coding region thereof, or a homolog or fragment thereof, e.g. derived from Escherichia coli, is increased or generated. For example the activity of a nucleic acid molecule or a polypeptide comprising the nucleic acid, preferably the coding region thereof, or polypeptide or the consensus sequence or the polypeptide motif, as depicted in Table I, II or IV, application No. 17, column 5 or 8 in the respective same line as the nucleic acid molecule SEQ ID NO. 98778 or polypeptide SEQ ID NO. 98779, respectively, or a homolog or a fragment thereof, is increased or generated, or if the activity cardiolipin synthase is increased or generated in a non-human organism, like a microorganism or a plant cell, plant or part thereof, especially with plastidic localization, whereby the respective line disclose in column 7 the fine chemical galactitol. For example, an increase of the galactitol of at least 1 percent, particularly in a range of 65 to 272-percent is conferred as compared to a corresponding non-transformed wild type non-human organism.

[88184] Accordingly, in one embodiment, an increase of sorbitol in a non-human organism, as compared to a corresponding non-transformed wild type non-human organism, is conferred in the process of the invention, if the activity of a polypeptide showing the activity of a cardiolipin synthase, or if the activity of the polypeptide B1249, preferably represented by SEQ ID NO. 98779, or a homolog or fragment thereof, or if the activity of a polypeptide encoded by a nucleic acid molecule comprising the nucleic acid SEQ ID NO. 98778, preferably the coding region thereof, or a homolog or fragment thereof, e.g. derived from Escherichia coli, is increased or generated. For example the activity of a nucleic acid molecule or a polypeptide comprising the nucleic acid, preferably the coding region thereof, or polypeptide or the consensus sequence or the polypeptide motif, as depicted in Table I, II or IV, application No. 17, column 5 or 8 in the respective same line as the nucleic acid molecule SEQ ID NO. 98778 or polypeptide SEQ ID NO. 98779, respectively, or a homolog or a fragment thereof, is increased or generated, or if the activity cardiolipin synthase is increased or generated in a non-human organism, like a microorganism or a plant cell, plant or part thereof, especially with plastidic localization, whereby the respective line disclose in column 7 the fine chemical sorbitol. For example, an increase of the sorbitol of at least 1 percent, particularly in a range of 65 to 272-percent is conferred as compared to a corresponding non-transformed wild type non-human organism.

[88185] Accordingly, in one embodiment, an increase of 3,4,5-trihydroxypentanoic acid in a non-human organism, as compared to a corresponding non-transformed wild type non-human organism, is conferred in the process of the invention, if the activity of a polypeptide showing the activity of a intracellular septation protein, or if the activity of the polypeptide B1254, preferably represented by SEQ ID NO. 144895, or a homolog or fragment thereof, or if the activity of a polypeptide encoded by a nucleic acid molecule comprising the nucleic acid SEQ ID NO. 144894, preferably the coding region thereof, or a homolog or fragment thereof, e.g. derived from Escherichia coli, is increased or generated. For example the activity of a nucleic acid molecule or a polypeptide comprising the nucleic acid, preferably the coding region thereof, or polypeptide or the consensus sequence or the polypeptide motif, as depicted in Table I, II or IV, application No. 17, column 5 or 8 in the respective same line as the nucleic acid molecule SEQ ID NO. 144894 or polypeptide SEQ ID NO. 144895, respectively, or a homolog or a fragment thereof, is increased or generated, or if the activity intracellular septation protein is increased or generated in a non-human organism, like a microorganism or a plant cell, plant or part thereof, especially with non-targeted localization, whereby the respective line disclose in column 7 the fine chemical 3,4,5-trihydroxypentanoic acid. For example, an increase of the 3,4,5-trihydroxypentanoic acid of at least 1 percent, particularly in a range of 37 to 56-percent is conferred as compared to a corresponding non-transformed wild type non-human organism.

[88186] Accordingly, in one embodiment, an increase of fructose in a non-human organism, as compared to a corresponding non-transformed wild type non-human organism, is conferred in the process of the invention, if the activity of a polypeptide showing the activity of a membrane protein, or if the activity of the polypeptide B1255, preferably represented by SEQ ID NO. 37484, or a homolog or fragment thereof, or if the activity of a polypeptide encoded by a nucleic acid molecule comprising the nucleic acid SEQ ID NO. 37483, preferably the coding region thereof, or a homolog or fragment thereof, e.g. derived from Escherichia coli, is increased or generated. For example the activity of a nucleic acid molecule or a polypeptide comprising the nucleic acid, preferably the coding region thereof, or polypeptide or the consensus sequence or the polypeptide motif, as depicted in Table I, II or IV, application No. 17, column 5 or 8 in the respective same line as the nucleic acid molecule SEQ ID NO. 37483 or polypeptide SEQ ID NO. 37484, respectively, or a homolog or a fragment thereof, is increased or generated, or if the activity membrane protein is increased or generated in a non-human organism, like a microorganism or a plant cell, plant or part thereof, especially with non-targeted localization, whereby the respective line disclose in column 7 the fine chemical fructose. For example, an increase of the fructose of at least 1 percent, particularly in a range of 80 to 727-percent is conferred as compared to a corresponding non-transformed wild type non-human organism.

[88187] Accordingly, in one embodiment, an increase of glucose in a non-human organism, as compared to a corresponding non-transformed wild type non-human organism, is conferred in the process of the invention, if the activity of a polypeptide showing the activity of a membrane protein, or if the activity of the polypeptide B1255, preferably represented by SEQ ID NO. 37484, or a homolog or fragment thereof, or if the activity of a polypeptide encoded by a nucleic acid molecule comprising the nucleic acid SEQ ID NO. 37483, preferably the coding region thereof, or a homolog or fragment thereof, e.g. derived from Escherichia coli, is increased or generated. For example the activity of a nucleic acid molecule or a polypeptide comprising the nucleic acid, preferably the coding region thereof, or polypeptide or the consensus sequence or the polypeptide motif, as depicted in Table I, II or IV, application No. 17, column 5 or 8 in the respective same line as the nucleic acid molecule SEQ ID NO. 37483 or polypeptide SEQ ID NO. 37484, respectively, or a homolog or a fragment thereof, is increased or generated, or if the activity membrane protein is increased or generated in a non-human organism, like a microorganism or a plant cell, plant or part thereof, especially with non-targeted localization, whereby the respective line disclose in column 7 the fine chemical glucose. For example, an increase of the glucose of at least 1 percent, particularly in a range of 66 to 597-percent is conferred as compared to a corresponding non-transformed wild type non-human organism.

[88188] Accordingly, in one embodiment, an increase of raffinose in a non-human organism, as compared to a corresponding non-transformed wild type non-human organism, is conferred in the process of the invention, if the activity of a polypeptide showing the activity of a membrane protein, or if the activity of the polypeptide B1255, preferably represented by SEQ ID NO. 37484, or a homolog or fragment thereof, or if the activity of a polypeptide encoded by a nucleic acid molecule comprising the nucleic acid SEQ ID NO. 37483, preferably the coding region thereof, or a homolog or fragment thereof, e.g. derived from Escherichia coli, is increased or generated. For example the activity of a nucleic acid molecule or a polypeptide comprising the nucleic acid, preferably the coding region thereof, or polypeptide or the consensus sequence or the polypeptide motif, as depicted in Table I, II or IV, application No. 17, column 5 or 8 in the respective same line as the nucleic acid molecule SEQ ID NO. 37483 or polypeptide SEQ ID NO. 37484, respectively, or a homolog or a fragment thereof, is increased or generated, or if the activity membrane protein is increased or generated in a non-human organism, like a microorganism or a plant cell, plant or part thereof, especially with non-targeted localization, whereby the respective line disclose in column 7 the fine chemical raffinose. For example, an increase of the raffinose of at least 1 percent, particularly in a range of 82 to 369-percent is conferred as compared to a corresponding non-transformed wild type non-human organism.

[88189] Accordingly, in one embodiment, an increase of sucrose in a non-human organism, as compared to a corresponding non-transformed wild type non-human organism, is conferred in the process of the invention, if the activity of a polypeptide showing the activity of a membrane protein, or if the activity of the polypeptide B1255, preferably represented by SEQ ID NO. 37484, or a homolog or fragment thereof, or if the activity of a polypeptide encoded by a nucleic acid molecule comprising the nucleic acid SEQ ID NO. 37483, preferably the coding region thereof, or a homolog or fragment thereof, e.g. derived from Escherichia coli, is increased or generated. For example the activity of a nucleic acid molecule or a polypeptide comprising the nucleic acid, preferably the coding region thereof, or polypeptide or the consensus sequence or the polypeptide motif, as depicted in Table I, II or IV, application No. 17, column 5 or 8 in the respective same line as the nucleic acid molecule SEQ ID NO. 37483 or polypeptide SEQ ID NO. 37484, respectively, or a homolog or a fragment thereof, is increased or generated, or if the activity membrane protein is increased or generated in a non-human organism, like a microorganism or a plant cell, plant or part thereof, especially with non-targeted localization, whereby the respective line disclose in column 7 the fine chemical sucrose. For example, an increase of the sucrose of at least 1 percent, particularly in a range of 33 to 52-percent is conferred as compared to a corresponding non-transformed wild type non-human organism.

[88190] Accordingly, in one embodiment, an increase of myo-inositol in a non-human organism, as compared to a corresponding non-transformed wild type non-human organism, is conferred in the process of the invention, if the activity of a polypeptide showing the activity of a tryptophan biosynthesis protein, or if the activity of the polypeptide B1262, preferably represented by SEQ ID NO. 76158, or a homolog or fragment thereof, or if the activity of a polypeptide encoded by a nucleic acid molecule comprising the nucleic acid SEQ ID NO. 76157, preferably the coding region thereof, or a homolog or fragment thereof, e.g. derived from Escherichia coli, is increased or generated. For example the activity of a nucleic acid molecule or a polypeptide comprising the nucleic acid, preferably the coding region thereof, or polypeptide or the consensus sequence or the polypeptide motif, as depicted in Table I, II or IV, application No. 17, column 5 or 8 in the respective same line as the nucleic acid molecule SEQ ID NO. 76157 or polypeptide SEQ ID NO. 76158, respectively, or a homolog or a fragment thereof, is increased or generated, or if the activity tryptophan biosynthesis protein is increased or generated in a non-human organism, like a microorganism or a plant cell, plant or part thereof, especially with plastidic localization, whereby the respective line disclose in column 7 the fine chemical myo-inositol. For example, an increase of the myo-inositol of at least 1 percent, particularly in a range of 32 to 577-percent is conferred as compared to a corresponding non-transformed wild type non-human organism.

[88191] Accordingly, in one embodiment, an increase of fructose in a non-human organism, as compared to a corresponding non-transformed wild type non-human organism, is conferred in the process of the invention, if the activity of a polypeptide showing the activity of a b1285-protein, or if the activity of the polypeptide B1285, preferably represented by SEQ ID NO. 134656, or a homolog or fragment thereof, or if the activity of a polypeptide encoded by a nucleic acid molecule comprising the nucleic acid SEQ ID NO. 134655, preferably the coding region thereof, or a homolog or fragment thereof, e.g. derived from Escherichia coli, is increased or generated. For example the activity of a nucleic acid molecule or a polypeptide comprising the nucleic acid, preferably the coding region thereof, or polypeptide or the consensus sequence or the polypeptide motif, as depicted in Table I, II or IV, application No. 17, column 5 or 8 in the respective same line as the nucleic acid molecule SEQ ID NO. 134655 or polypeptide SEQ ID NO. 134656, respectively, or a homolog or a fragment thereof, is increased or generated, or if the activity b1285-protein is increased or generated in a non-human organism, like a microorganism or a plant cell, plant or part thereof, especially with non-targeted localization, whereby the respective line disclose in column 7 the fine chemical fructose. For example, an increase of the fructose of at least 1 percent, particularly in a range of 71 to 127-percent is conferred as compared to a corresponding non-transformed wild type non-human organism.

[88192] Accordingly, in one embodiment, an increase of glucose-1-phosphate in a non-human organism, as compared to a corresponding non-transformed wild type non-human organism, is conferred in the process of the invention, if the activity of a polypeptide showing the activity of a phage-related repressor protein, or if the activity of the polypeptide B1356, preferably represented by SEQ ID NO. 124558, or a homolog or fragment thereof, or if the activity of a polypeptide encoded by a nucleic acid molecule comprising the nucleic acid SEQ ID NO. 124557, preferably the coding region thereof, or a homolog or fragment thereof, e.g. derived from Escherichia coli, is increased or generated. For example the activity of a nucleic acid molecule or a polypeptide comprising the nucleic acid, preferably the coding region thereof, or polypeptide or the consensus sequence or the polypeptide motif, as depicted in Table I, II or IV, application No. 17, column 5 or 8 in the respective same line as the nucleic acid molecule SEQ ID NO. 124557 or polypeptide SEQ ID NO. 124558, respectively, or a homolog or a fragment thereof, is increased or generated, or if the activity phage-related repressor protein is increased or generated in a non-human organism, like a microorganism or a plant cell, plant or part thereof, especially with non-targeted localization, whereby the respective line disclose in column 7 the fine chemical glucose-1-phosphate. For example, an increase of the glucose-1-phosphate of at least 1-percent, particularly in a range of 19 to 20-percent is conferred as compared to a corresponding non-transformed wild type non-human organism.

[88193] Accordingly, in one embodiment, an increase of glucose-1-phosphate in a non-human organism, as compared to a corresponding non-transformed wild type non-human organism, is conferred in the process of the invention, if the activity of a polypeptide showing the activity of a b1357-protein, or if the activity of the polypeptide B1357, preferably represented by SEQ ID NO. 145067, or a homolog or fragment thereof, or if the activity of a polypeptide encoded by a nucleic acid molecule comprising the nucleic acid SEQ ID NO. 145066, preferably the coding region thereof, or a homolog or fragment thereof, e.g. derived from Escherichia coli, is increased or generated. For example the activity of a nucleic acid molecule or a polypeptide comprising the nucleic acid, preferably the coding region thereof, or polypeptide or the consensus sequence or the polypeptide motif, as depicted in Table I, II or IV, application No. 17, column 5 or 8 in the respective same line as the nucleic acid molecule SEQ ID NO. 145066 or polypeptide SEQ ID NO. 145067, respectively, or a homolog or a fragment thereof, is increased or generated, or if the activity b1357-protein is increased or generated in a non-human organism, like a microorganism or a plant cell, plant or part thereof, especially with non-targeted localization, whereby the respective line disclose in column 7 the fine chemical glucose-1-phosphate. For example, an increase of the glucose-1-phosphate of at least 1 percent, particularly in a range of 20 to 44-percent is conferred as compared to a corresponding non-transformed wild type non-human organism.

[88194] Accordingly, in one embodiment, an increase of glucose in a non-human organism, as compared to a corresponding non-transformed wild type non-human organism, is conferred in the process of the invention, if the activity of a polypeptide showing the activity of a phenylacetic acid degradation protein, or if the activity of the polypeptide B1390, preferably represented by SEQ ID NO. 134698, or a homolog or fragment thereof, or if the activity of a polypeptide encoded by a nucleic acid molecule comprising the nucleic acid SEQ ID NO. 134697, preferably the coding region thereof, or a homolog or fragment thereof, e.g. derived from Escherichia coli, is increased or generated. For example the activity of a nucleic acid molecule or a polypeptide comprising the nucleic acid, preferably the coding region thereof, or polypeptide or the consensus sequence or the polypeptide motif, as depicted in Table I, II or IV, application No. 17, column 5 or 8 in the respective same line as the nucleic acid molecule SEQ ID NO. 134697 or polypeptide SEQ ID NO. 134698, respectively, or a homolog or a fragment thereof, is increased or generated, or if the activity phenylacetic acid degradation protein is increased or generated in a non-human organism, like a microorganism or a plant cell, plant or part thereof, especially with non-targeted localization, whereby the respective line disclose in column 7 the fine chemical glucose. For example, an increase of the glucose of at least 1 percent, particularly in a range of 57 to 120-percent is conferred as compared to a corresponding non-transformed wild type non-human organism.

[88195] Accordingly, in one embodiment, an increase of 3,4,5-trihydroxypentanoic acid in a non-human organism, as compared to a corresponding non-transformed wild type non-human organism, is conferred in the process of the invention, if the activity of a polypeptide showing the activity of a phenylacetic acid degradation protein, or if the activity of the polypeptide B1391, preferably represented by SEQ ID NO. 131490, or a homolog or fragment thereof, or if the activity of a polypeptide encoded by a nucleic acid molecule comprising the nucleic acid SEQ ID NO. 131489, preferably the coding region thereof, or a homolog or fragment thereof, e.g. derived from Escherichia coli, is increased or generated. For example the activity of a nucleic acid molecule or a polypeptide comprising the nucleic acid, preferably the coding region thereof, or polypeptide or the consensus sequence or the polypeptide motif, as depicted in Table I, II or IV, application No. 17, column 5 or 8 in the respective same line as the nucleic acid molecule SEQ ID NO. 131489 or polypeptide SEQ ID NO. 131490, respectively, or a homolog or a fragment thereof, is increased or generated, or if the activity phenylacetic acid degradation protein is increased or generated in a non-human organism, like a microorganism or a plant cell, plant or part thereof, especially with non-targeted localization, whereby the respective line disclose in column 7 the fine chemical 3,4,5-trihydroxypentanoic acid. For example, an increase of the 3,4,5-trihydroxypentanoic acid of at least 1 percent, particularly in a range of 43 to 95-percent is conferred as compared to a corresponding non-transformed wild type non-human organism.

[88196] Accordingly, in one embodiment, an increase of sedoheptulose-7-phosphate in a non-human organism, as compared to a corresponding non-transformed wild type non-human organism, is conferred in the process of the invention, if the activity of a polypeptide showing the activity of a b1410-protein, or if the activity of the polypeptide B1410, preferably represented by SEQ ID NO. 145092, or a homolog or fragment thereof, or if the activity of a polypeptide encoded by a nucleic acid molecule comprising the nucleic acid SEQ ID NO. 145091, preferably the coding region thereof, or a homolog or fragment thereof, e.g. derived from Escherichia coli, is increased or generated. For example the activity of a nucleic acid molecule or a polypeptide comprising the nucleic acid, preferably the coding region thereof, or polypeptide or the consensus sequence or the polypeptide motif, as depicted in Table I, II or IV, application No. 17, column 5 or 8 in the respective same line as the nucleic acid molecule SEQ ID NO. 145091 or polypeptide SEQ ID NO. 145092, respectively, or a homolog or a fragment thereof, is increased or generated, or if the activity b1410-protein is increased or generated in a non-human organism, like a microorganism or a plant cell, plant or part thereof, especially with plastidic localization, whereby the respective line disclose in column 7 the fine chemical sedoheptulose-7-phosphate. For example, an increase of the sedoheptulose-7-phosphate of at least 1 percent, particularly in a range of 43 to 112-percent is conferred as compared to a corresponding non-transformed wild type non-human organism.

[88197] Accordingly, in one embodiment, an increase of myo-inositol in a non-human organism, as compared to a corresponding non-transformed wild type non-human organism, is conferred in the process of the invention, if the activity of a polypeptide showing the activity of a b1425-protein, or if the activity of the polypeptide B1425, preferably represented by SEQ ID NO. 134757, or a homolog or fragment thereof, or if the activity of a polypeptide encoded by a nucleic acid molecule comprising the nucleic acid SEQ ID NO. 134756, preferably the coding region thereof, or a homolog or fragment thereof, e.g. derived from Escherichia coli, is increased or generated. For example the activity of a nucleic acid molecule or a polypeptide comprising the nucleic acid, preferably the coding region thereof, or polypeptide or the consensus sequence or the polypeptide motif, as depicted in Table I, II or IV, application No. 17, column 5 or 8 in the respective same line as the nucleic acid molecule SEQ ID NO. 134756 or polypeptide SEQ ID NO. 134757, respectively, or a homolog or a fragment thereof, is increased or generated, or if the activity b1425-protein is increased or generated in a non-human organism, like a microorganism or a plant cell, plant or part thereof, especially with non-targeted localization, whereby the respective line disclose in column 7 the fine chemical myo-inositol. For example, an increase of the myo-inositol of at least 1 percent, particularly in a range of 25 to 36-percent is conferred as compared to a corresponding non-transformed wild type non-human organism.

[88198] Accordingly, in one embodiment, an increase of glucose-1-phosphate in a non-human organism, as compared to a corresponding non-transformed wild type non-human organism, is conferred in the process of the invention, if the activity of a polypeptide showing the activity of a lipoprotein precursor, or if the activity of the polypeptide B1431, preferably represented by SEQ ID NO. 38267, or a homolog or fragment thereof, or if the activity of a polypeptide encoded by a nucleic acid molecule comprising the nucleic acid SEQ ID NO. 38266, preferably the coding region thereof, or a homolog or fragment thereof, e.g. derived from Escherichia coli, is increased or generated. For example the activity of a nucleic acid molecule or a polypeptide comprising the nucleic acid, preferably the coding region thereof, or polypeptide or the consensus sequence or the polypeptide motif, as depicted in Table I, II or IV, application No. 17, column 5 or 8 in the respective same line as the nucleic acid molecule SEQ ID NO. 38266 or polypeptide SEQ ID NO. 38267, respectively, or a homolog or a fragment thereof, is increased or generated, or if the activity lipoprotein precursor is increased or generated in a non-human organism, like a microorganism or a plant cell, plant or part thereof, especially with plastidic localization, whereby the respective line disclose in column 7 the fine chemical glucose-1-phosphate. For example, an increase of the glucose-1-phosphate of at least 1 percent, particularly in a range of 31 to 52-percent is conferred as compared to a corresponding non-transformed wild type non-human organism.

[88199] Accordingly, in one embodiment, an increase of sedoheptulose-7-phosphate in a non-human organism, as compared to a corresponding non-transformed wild type non-human organism, is conferred in the process of the invention, if the activity of a polypeptide showing the activity of a lipoprotein precursor, or if the activity of the polypeptide B1431, preferably represented by SEQ ID NO. 38267, or a homolog or fragment thereof, or if the activity of a polypeptide encoded by a nucleic acid molecule comprising the nucleic acid SEQ ID NO. 38266, preferably the coding region thereof, or a homolog or fragment thereof, e.g. derived from Escherichia coli, is increased or generated. For example the activity of a nucleic acid molecule or a polypeptide comprising the nucleic acid, preferably the coding region thereof, or polypeptide or the consensus sequence or the polypeptide motif, as depicted in Table I, II or IV, application No. 17, column 5 or 8 in the respective same line as the nucleic acid molecule SEQ ID NO. 38266 or polypeptide SEQ ID NO. 38267, respectively, or a homolog or a fragment thereof, is increased or generated, or if the activity lipoprotein precursor is increased or generated in a non-human organism, like a microorganism or a plant cell, plant or part thereof, especially with plastidic localization, whereby the respective line disclose in column 7 the fine chemical sedoheptulose-7-phosphate. For example, an increase of the sedoheptulose-7-phosphate of at least 1 percent, particularly in a range of 32 to 52-percent is conferred as compared to a corresponding non-transformed wild type non-human organism.

[88200] Accordingly, in one embodiment, an increase of 3,4,5-trihydroxypentanoic acid in a non-human organism, as compared to a corresponding non-transformed wild type non-human organism, is conferred in the process of the invention, if the activity of a polypeptide showing the activity of a lipoprotein precursor, or if the activity of the polypeptide B1431, preferably represented by SEQ ID NO. 38267, or a homolog or fragment thereof, or if the activity of a polypeptide encoded by a nucleic acid molecule comprising the nucleic acid SEQ ID NO. 38266, preferably the coding region thereof, or a homolog or fragment thereof, e.g. derived from Escherichia coli, is increased or generated. For example the activity of a nucleic acid molecule or a polypeptide comprising the nucleic acid, preferably the coding region thereof, or polypeptide or the consensus sequence or the polypeptide motif, as depicted in Table I, II or IV, application No. 17, column 5 or 8 in the respective same line as the nucleic acid molecule SEQ ID NO. 38266 or polypeptide SEQ ID NO. 38267, respectively, or a homolog or a fragment thereof, is increased or generated, or if the activity lipoprotein precursor is increased or generated in a non-human organism, like a microorganism or a plant cell, plant or part thereof, especially with plastidic localization, whereby the respective line disclose in column 7 the fine chemical 3,4,5-trihydroxypentanoic acid. For example, an increase of the 3,4,5-trihydroxypentanoic acid of at least 1 percent, particularly in a range of 37 to 89-percent is conferred as compared to a corresponding non-transformed wild type non-human organism.

[88201] Accordingly, in one embodiment, an increase of 3,4,5-trihydroxypentanoic acid in a non-human organism, as compared to a corresponding non-transformed wild type non-human organism, is conferred in the process of the invention, if the activity of a polypeptide showing the activity of a b1445-protein, or if the activity of the polypeptide B1445, preferably represented by SEQ ID NO. 38290, or a homolog or fragment thereof, or if the activity of a polypeptide encoded by a nucleic acid molecule comprising the nucleic acid SEQ ID NO. 38289, preferably the coding region thereof, or a homolog or fragment thereof, e.g. derived from Escherichia coli, is increased or generated. For example the activity of a nucleic acid molecule or a polypeptide comprising the nucleic acid, preferably the coding region thereof, or polypeptide or the consensus sequence or the polypeptide motif, as depicted in Table I, II or IV, application No. 17, column 5 or 8 in the respective same line as the nucleic acid molecule SEQ ID NO. 38289 or polypeptide SEQ ID NO. 38290, respectively, or a homolog or a fragment thereof, is increased or generated, or if the activity b1445-protein is increased or generated in a non-human organism, like a microorganism or a plant cell, plant or part thereof, especially with non-targeted localization, whereby the respective line disclose in column 7 the fine chemical 3,4,5-trihydroxypentanoic acid. For example, an increase of the 3,4,5-trihydroxypentanoic acid of at least 1 percent, particularly in a range of 47 to 50-percent is conferred as compared to a corresponding non-transformed wild type non-human organism.

[88202] Accordingly, in one embodiment, an increase of glucose-1-phosphate in a non-human organism, as compared to a corresponding non-transformed wild type non-human organism, is conferred in the process of the invention, if the activity of a polypeptide showing the activity of a b1470-protein, or if the activity of the polypeptide B1470, preferably represented by SEQ ID NO. 115057, or a homolog or fragment thereof, or if the activity of a polypeptide encoded by a nucleic acid molecule comprising the nucleic acid SEQ ID NO. 115056, preferably the coding region thereof, or a homolog or fragment thereof, e.g. derived from Escherichia coli, is increased or generated. For example the activity of a nucleic acid molecule or a polypeptide comprising the nucleic acid, preferably the coding region thereof, or polypeptide or the consensus sequence or the polypeptide motif, as depicted in Table I, II or IV, application No. 17, column 5 or 8 in the respective same line as the nucleic acid molecule SEQ ID NO. 115056 or polypeptide SEQ ID NO. 115057, respectively, or a homolog or a fragment thereof, is increased or generated, or if the activity b1470-protein is increased or generated in a non-human organism, like a microorganism or a plant cell, plant or part thereof, especially with non-targeted localization, whereby the respective line disclose in column 7 the fine chemical glucose-1-phosphate. For example, an increase of the glucose-1-phosphate of at least 1 percent, particularly in a range of 18 to 44-percent is conferred as compared to a corresponding non-transformed wild type non-human organism.

[88203] Accordingly, in one embodiment, an increase of fructose in a non-human organism, as compared to a corresponding non-transformed wild type non-human organism, is conferred in the process of the invention, if the activity of a polypeptide showing the activity of a b1522-protein, or if the activity of the polypeptide B1522, preferably represented by SEQ ID NO. 7948, or a homolog or fragment thereof, or if the activity of a polypeptide encoded by a nucleic acid molecule comprising the nucleic acid SEQ ID NO. 7947, preferably the coding region thereof, or a homolog or fragment thereof, e.g. derived from Escherichia coli, is increased or generated. For example the activity of a nucleic acid molecule or a polypeptide comprising the nucleic acid, preferably the coding region thereof, or polypeptide or the consensus sequence or the polypeptide motif, as depicted in Table I, II or IV, application No. 17, column 5 or 8 in the respective same line as the nucleic acid molecule SEQ ID NO. 7947 or polypeptide SEQ ID NO. 7948, respectively, or a homolog or a fragment thereof, is increased or generated, or if the activity b1522-protein is increased or generated in a non-human organism, like a microorganism or a plant cell, plant or part thereof, especially with non-targeted localization, whereby the respective line disclose in column 7 the fine chemical fructose. For example, an increase of the fructose of at least 1 percent, particularly in a range of 83 to 364-percent is conferred as compared to a corresponding non-transformed wild type non-human organism.

[88204] Accordingly, in one embodiment, an increase of glucose-1-phosphate in a non-human organism, as compared to a corresponding non-transformed wild type non-human organism, is conferred in the process of the invention, if the activity of a polypeptide showing the activity of a b1522-protein, or if the activity of the polypeptide B1522, preferably represented by SEQ ID NO. 7948, or a homolog or fragment thereof, or if the activity of a polypeptide encoded by a nucleic acid molecule comprising the nucleic acid SEQ ID NO. 7947, preferably the coding region thereof, or a homolog or fragment thereof, e.g. derived from Escherichia coli, is increased or generated. For example the activity of a nucleic acid molecule or a polypeptide comprising the nucleic acid, preferably the coding region thereof, or polypeptide or the consensus sequence or the polypeptide motif, as depicted in Table I, II or IV, application No. 17, column 5 or 8 in the respective same line as the nucleic acid molecule SEQ ID NO. 7947 or polypeptide SEQ ID NO. 7948, respectively, or a homolog or a fragment thereof, is increased or generated, or if the activity b1522-protein is increased or generated in a non-human organism, like a microorganism or a plant cell, plant or part thereof, especially with non-targeted localization, whereby the respective line disclose in column 7 the fine chemical glucose-1-phosphate. For example, an increase of the glucose-1-phosphate of at least 1 percent, particularly in a range of 20 to 41-percent is conferred as compared to a corresponding non-transformed wild type non-human organism.

[88205] Accordingly, in one embodiment, an increase of glucose-1-phosphate in a non-human organism, as compared to a corresponding non-transformed wild type non-human organism, is conferred in the process of the invention, if the activity of a polypeptide showing the activity of a b1556-protein, or if the activity of the polypeptide B1556, preferably represented by SEQ ID NO. 145143, or a homolog or fragment thereof, or if the activity of a polypeptide encoded by a nucleic acid molecule comprising the nucleic acid SEQ ID NO. 145142, preferably the coding region thereof, or a homolog or fragment thereof, e.g. derived from Escherichia coli, is increased or generated. For example the activity of a nucleic acid molecule or a polypeptide comprising the nucleic acid, preferably the coding region thereof, or polypeptide or the consensus sequence or the polypeptide motif, as depicted in Table I, II or IV, application No. 17, column 5 or 8 in the respective same line as the nucleic acid molecule SEQ ID NO. 145142 or polypeptide SEQ ID NO. 145143, respectively, or a homolog or a fragment thereof, is increased or generated, or if the activity b1556-protein is increased or generated in a non-human organism, like a microorganism or a plant cell, plant or part thereof, especially with plastidic localization, whereby the respective line disclose in column 7 the fine chemical glucose-1-phosphate. For example, an increase of the glucose-1-phosphate of at least 1 percent, particularly in a range of 35 to 57-percent is conferred as compared to a corresponding non-transformed wild type non-human organism.

[88206] Accordingly, in one embodiment, an increase of sedoheptulose-7-phosphate in a non-human organism, as compared to a corresponding non-transformed wild type non-human organism, is conferred in the process of the invention, if the activity of a polypeptide showing the activity of a b1556-protein, or if the activity of the polypeptide B1556, preferably represented by SEQ ID NO. 145143, or a homolog or fragment thereof, or if the activity of a polypeptide encoded by a nucleic acid molecule comprising the nucleic acid SEQ ID NO. 145142, preferably the coding region thereof, or a homolog or fragment thereof, e.g. derived from Escherichia coli, is increased or generated. For example the activity of a nucleic acid molecule or a polypeptide comprising the nucleic acid, preferably the coding region thereof, or polypeptide or the consensus sequence or the polypeptide motif, as depicted in Table I, II or IV, application No. 17, column 5 or 8 in the respective same line as the nucleic acid molecule SEQ ID NO. 145142 or polypeptide SEQ ID NO. 145143, respectively, or a homolog or a fragment thereof, is increased or generated, or if the activity b1556-protein is increased or generated in a non-human organism, like a microorganism or a plant cell, plant or part thereof, especially with plastidic localization, whereby the respective line disclose in column 7 the fine chemical sedoheptulose-7-phosphate. For example, an increase of the sedoheptulose-7-phosphate of at least 1 percent, particularly in a range of 86 to 382-percent is conferred as compared to a corresponding non-transformed wild type non-human organism.

[88207] Accordingly, in one embodiment, an increase of glucose-1-phosphate in a non-human organism, as compared to a corresponding non-transformed wild type non-human organism, is conferred in the process of the invention, if the activity of a polypeptide showing the activity of a b1583-protein, or if the activity of the polypeptide B1583, preferably represented by SEQ ID NO. 78139, or a homolog or fragment thereof, or if the activity of a polypeptide encoded by a nucleic acid molecule comprising the nucleic acid SEQ ID NO. 78138, preferably the coding region thereof, or a homolog or fragment thereof, e.g. derived from Escherichia coli, is increased or generated. For example the activity of a nucleic acid molecule or a polypeptide comprising the nucleic acid, preferably the coding region thereof, or polypeptide or the consensus sequence or the polypeptide motif, as depicted in Table I, II or IV, application No. 17, column 5 or 8 in the respective same line as the nucleic acid molecule SEQ ID NO. 78138 or polypeptide SEQ ID NO. 78139, respectively, or a homolog or a fragment thereof, is increased or generated, or if the activity b1583-protein is increased or generated in a non-human organism, like a microorganism or a plant cell, plant or part thereof, especially with non-targeted localization, whereby the respective line disclose in column 7 the fine chemical glucose-1-phosphate. For example, an increase of the glucose-1-phosphate of at least 1 percent, particularly in a range of 23 to 46-percent is conferred as compared to a corresponding non-transformed wild type non-human organism.

[88208] Accordingly, in one embodiment, an increase of glucose-1-phosphate in a non-human organism, as compared to a corresponding non-transformed wild type non-human organism, is conferred in the process of the invention, if the activity of a polypeptide showing the activity of a FeS subunit of oxidoreductase, or if the activity of the polypeptide B1589, preferably represented by SEQ ID NO. 78155, or a homolog or fragment thereof, or if the activity of a polypeptide encoded by a nucleic acid molecule comprising the nucleic acid SEQ ID NO. 78154, preferably the coding region thereof, or a homolog or fragment thereof, e.g. derived from Escherichia coli, is increased or generated. For example the activity of a nucleic acid molecule or a polypeptide comprising the nucleic acid, preferably the coding region thereof, or polypeptide or the consensus sequence or the polypeptide motif, as depicted in Table I, II or IV, application No. 17, column 5 or 8 in the respective same line as the nucleic acid molecule SEQ ID NO. 78154 or polypeptide SEQ ID NO. 78155, respectively, or a homolog or a fragment thereof, is increased or generated, or if the activity Fe—S subunit of oxidoreductase is increased or generated in a non-human organism, like a microorganism or a plant cell, plant or part thereof, especially with non-targeted localization, whereby the respective line disclose in column 7 the fine chemical glucose-1-phosphate. For example, an increase of the glucose-1-phosphate of at least 1 percent, particularly in a range of 50 to 114-percent is conferred as compared to a corresponding non-transformed wild type non-human organism.

[88209] Accordingly, in one embodiment, an increase of 3,4,5-trihydroxypentanoic acid in a non-human organism, as compared to a corresponding non-transformed wild type non-human organism, is conferred in the process of the invention, if the activity of a polypeptide showing the activity of a Fe—S subunit of oxidoreductase, or if the activity of the polypeptide B1589, preferably represented by SEQ ID NO. 78155, or a homolog or fragment thereof, or if the activity of a polypeptide encoded by a nucleic acid molecule comprising the nucleic acid SEQ ID NO. 78154, preferably the coding region thereof, or a homolog or fragment thereof, e.g. derived from Escherichia coli, is increased or generated. For example the activity of a nucleic acid molecule or a polypeptide comprising the nucleic acid, preferably the coding region thereof, or polypeptide or the consensus sequence or the polypeptide motif, as depicted in Table I, II or IV, application No. 17, column 5 or 8 in the respective same line as the nucleic acid molecule SEQ ID NO. 78154 or polypeptide SEQ ID NO. 78155, respectively, or a homolog or a fragment thereof, is increased or generated, or if the activity Fe—S subunit of oxidoreductase is increased or generated in a non-human organism, like a microorganism or a plant cell, plant or part thereof, especially with non-targeted localization, whereby the respective line disclose in column 7 the fine chemical 3,4,5-trihydroxypentanoic acid. For example, an increase of the 3,4,5-trihydroxypentanoic acid of at least 1 percent, particularly in a range of 33 to 122-percent is conferred as compared to a corresponding non-transformed wild type non-human organism.

[88210] Accordingly, in one embodiment, an increase of fructose in a non-human organism, as compared to a corresponding non-transformed wild type non-human organism, is conferred in the process of the invention, if the activity of a polypeptide showing the activity of a acid shock protein, or if the activity of the polypeptide B1597, preferably represented by SEQ ID NO. 38301, or a homolog or fragment thereof, or if the activity of a polypeptide encoded by a nucleic acid molecule comprising the nucleic acid SEQ ID NO. 38300, preferably the coding region thereof, or a homolog or fragment thereof, e.g. derived from Escherichia coli, is increased or generated. For example the activity of a nucleic acid molecule or a polypeptide comprising the nucleic acid, preferably the coding region thereof, or polypeptide or the consensus sequence or the polypeptide motif, as depicted in Table I, II or IV, application No. 17, column 5 or 8 in the respective same line as the nucleic acid molecule SEQ ID NO. 38300 or polypeptide SEQ ID NO. 38301, respectively, or a homolog or a fragment thereof, is increased or generated, or if the activity acid shock protein is increased or generated in a non-human organism, like a microorganism or a plant cell, plant or part thereof, especially with non-targeted localization, whereby the respective line disclose in column 7 the fine chemical fructose. For example, an increase of the fructose of at least 1 percent, particularly in a range of 78 to 250-percent is conferred as compared to a corresponding non-transformed wild type non-human organism.

[88211] Accordingly, in one embodiment, an increase of glucose in a non-human organism, as compared to a corresponding non-transformed wild type non-human organism, is conferred in the process of the invention, if the activity of a polypeptide showing the activity of a acid shock protein, or if the activity of the polypeptide B1597, preferably represented by SEQ ID NO. 38301, or a homolog or fragment thereof, or if the activity of a polypeptide encoded by a nucleic acid molecule comprising the nucleic acid SEQ ID NO. 38300, preferably the coding region thereof, or a homolog or fragment thereof, e.g. derived from Escherichia coli, is increased or generated. For example the activity of a nucleic acid molecule or a polypeptide comprising the nucleic acid, preferably the coding region thereof, or polypeptide or the consensus sequence or the polypeptide motif, as depicted in Table I, II or IV, application No. 17, column 5 or 8 in the respective same line as the nucleic acid molecule SEQ ID NO. 38300 or polypeptide SEQ ID NO. 38301, respectively, or a homolog or a fragment thereof, is increased or generated, or if the activity acid shock protein is increased or generated in a non-human organism, like a microorganism or a plant cell, plant or part thereof, especially with non-targeted localization, whereby the respective line disclose in column 7 the fine chemical glucose. For example, an increase of the glucose of at least 1 percent, particularly in a range of 86 to 187-percent is conferred as compared to a corresponding non-transformed wild type non-human organism.

[88212] Accordingly, in one embodiment, an increase of glucose-1-phosphate in a non-human organism, as compared to a corresponding non-transformed wild type non-human organism, is conferred in the process of the invention, if the activity of a polypeptide showing the activity of a acid shock protein, or if the activity of the polypeptide B1597, preferably represented by SEQ ID NO. 38301, or a homolog or fragment thereof, or if the activity of a polypeptide encoded by a nucleic acid molecule comprising the nucleic acid SEQ ID NO. 38300, preferably the coding region thereof, or a homolog or fragment thereof, e.g. derived from Escherichia coli, is increased or generated. For example the activity of a nucleic acid molecule or a polypeptide comprising the nucleic acid, preferably the coding region thereof, or polypeptide or the consensus sequence or the polypeptide motif, as depicted in Table I, II or IV, application No. 17, column 5 or 8 in the respective same line as the nucleic acid molecule SEQ ID NO. 38300 or polypeptide SEQ ID NO. 38301, respectively, or a homolog or a fragment thereof, is increased or generated, or if the activity acid shock protein is increased or generated in a non-human organism, like a microorganism or a plant cell, plant or part thereof, especially with non-targeted localization, whereby the respective line disclose in column 7 the fine chemical glucose-1-phosphate. For example, an increase of the glucose-1-phosphate of at least 1 percent, particularly in a range of 47 to 249-percent is conferred as compared to a corresponding non-transformed wild type non-human organism.

[88213] Accordingly, in one embodiment, an increase of myo-inositol in a non-human organism, as compared to a corresponding non-transformed wild type non-human organism, is conferred in the process of the invention, if the activity of a polypeptide showing the activity of a acid shock protein, or if the activity of the polypeptide B1597, preferably represented by SEQ ID NO. 38301, or a homolog or fragment thereof, or if the activity of a polypeptide encoded by a nucleic acid molecule comprising the nucleic acid SEQ ID NO. 38300, preferably the coding region thereof, or a homolog or fragment thereof, e.g. derived from Escherichia coli, is increased or generated. For example the activity of a nucleic acid molecule or a polypeptide comprising the nucleic acid, preferably the coding region thereof, or polypeptide or the consensus sequence or the polypeptide motif, as depicted in Table I, II or IV, application No. 17, column 5 or 8 in the respective same line as the nucleic acid molecule SEQ ID NO. 38300 or polypeptide SEQ ID NO. 38301, respectively, or a homolog or a fragment thereof, is increased or generated, or if the activity acid shock protein is increased or generated in a non-human organism, like a microorganism or a plant cell, plant or part thereof, especially with non-targeted localization, whereby the respective line disclose in column 7 the fine chemical myo-inositol. For example, an increase of the myo-inositol of at least 1 percent, particularly in a range of 33 to 81-percent is conferred as compared to a corresponding non-transformed wild type non-human organism.

[88214] Accordingly, in one embodiment, an increase of raffinose in a non-human organism, as compared to a corresponding non-transformed wild type non-human organism, is conferred in the process of the invention, if the activity of a polypeptide showing the activity of a acid shock protein, or if the activity of the polypeptide B1597, preferably represented by SEQ ID NO. 38301, or a homolog or fragment thereof, or if the activity of a polypeptide encoded by a nucleic acid molecule comprising the nucleic acid SEQ ID NO. 38300, preferably the coding region thereof, or a homolog or fragment thereof, e.g. derived from Escherichia coli, is increased or generated. For example the activity of a nucleic acid molecule or a polypeptide comprising the nucleic acid, preferably the coding region thereof, or polypeptide or the consensus sequence or the polypeptide motif, as depicted in Table I, II or IV, application No. 17, column 5 or 8 in the respective same line as the nucleic acid molecule SEQ ID NO. 38300 or polypeptide SEQ ID NO. 38301, respectively, or a homolog or a fragment thereof, is increased or generated, or if the activity acid shock protein is increased or generated in a non-human organism, like a microorganism or a plant cell, plant or part thereof, especially with non-targeted localization, whereby the respective line disclose in column 7 the fine chemical raffinose. For example, an increase of the raffinose of at least 1 percent, particularly in a range of 65 to 199-percent is conferred as compared to a corresponding non-transformed wild type non-human organism.

[88215] Accordingly, in one embodiment, an increase of fructose in a non-human organism, as compared to a corresponding non-transformed wild type non-human organism, is conferred in the process of the invention, if the activity of a polypeptide showing the activity of a phosphotransferase system component, or if the activity of the polypeptide B1621, preferably represented by SEQ ID NO. 124572, or a homolog or fragment thereof, or if the activity of a polypeptide encoded by a nucleic acid molecule comprising the nucleic acid SEQ ID NO. 124571, preferably the coding region thereof, or a homolog or fragment thereof, e.g. derived from Escherichia coli, is increased or generated. For example the activity of a nucleic acid molecule or a polypeptide comprising the nucleic acid, preferably the coding region thereof, or polypeptide or the consensus sequence or the polypeptide motif, as depicted in Table I, II or IV, application No. 17, column 5 or 8 in the respective same line as the nucleic acid molecule SEQ ID NO. 124571 or polypeptide SEQ ID NO. 124572, respectively, or a homolog or a fragment thereof, is increased or generated, or if the activity phosphotransferase system component is increased or generated in a non-human organism, like a microorganism or a plant cell, plant or part thereof, especially with non-targeted localization, whereby the respective line disclose in column 7 the fine chemical fructose. For example, an increase of the fructose of at least 1 percent, particularly in a range of 107 to 424-percent is conferred as compared to a corresponding non-transformed wild type non-human organism.

[88216] Accordingly, in one embodiment, an increase of glucose in a non-human organism, as compared to a corresponding non-transformed wild type non-human organism, is conferred in the process of the invention, if the activity of a polypeptide showing the activity of a phosphotransferase system component, or if the activity of the polypeptide B1621, preferably represented by SEQ ID NO. 124572, or a homolog or fragment thereof, or if the activity of a polypeptide encoded by a nucleic acid molecule comprising the nucleic acid SEQ ID NO. 124571, preferably the coding region thereof, or a homolog or fragment thereof, e.g. derived from Escherichia coli, is increased or generated. For example the activity of a nucleic acid molecule or a polypeptide comprising the nucleic acid, preferably the coding region thereof, or polypeptide or the consensus sequence or the polypeptide motif, as depicted in Table I, II or IV, application No. 17, column 5 or 8 in the respective same line as the nucleic acid molecule SEQ ID NO. 124571 or polypeptide SEQ ID NO. 124572, respectively, or a homolog or a fragment thereof, is increased or generated, or if the activity phosphotransferase system component is increased or generated in a non-human organism, like a microorganism or a plant cell, plant or part thereof, especially with non-targeted localization, whereby the respective line disclose in column 7 the fine chemical glucose. For example, an increase of the glucose of at least 1 percent, particularly in a range of 77 to 119-percent is conferred as compared to a corresponding non-transformed wild type non-human organism.

[88217] Accordingly, in one embodiment, an increase of glucose in a non-human organism, as compared to a corresponding non-transformed wild type non-human organism, is conferred in the process of the invention, if the activity of a polypeptide showing the activity of a electron transport complex protein, or if the activity of the polypeptide B1627, preferably represented by SEQ ID NO. 38346, or a homolog or fragment thereof, or if the activity of a polypeptide encoded by a nucleic acid molecule comprising the nucleic acid SEQ ID NO. 38345, preferably the coding region thereof, or a homolog or fragment thereof, e.g. derived from Escherichia coli, is increased or generated. For example the activity of a nucleic acid molecule or a polypeptide comprising the nucleic acid, preferably the coding region thereof, or polypeptide or the consensus sequence or the polypeptide motif, as depicted in Table I, II or IV, application No. 17, column 5 or 8 in the respective same line as the nucleic acid molecule SEQ ID NO. 38345 or polypeptide SEQ ID NO. 38346, respectively, or a homolog or a fragment thereof, is increased or generated, or if the activity electron transport complex protein is increased or generated in a non-human organism, like a microorganism or a plant cell, plant or part thereof, especially with non-targeted localization, whereby the respective line disclose in column 7 the fine chemical glucose. For example, an increase of the glucose of at least 1 percent, particularly in a range of 72 to 186-percent is conferred as compared to a corresponding non-transformed wild type non-human organism.

[88218] Accordingly, in one embodiment, an increase of glucose-1-phosphate in a non-human organism, as compared to a corresponding non-transformed wild type non-human organism, is conferred in the process of the invention, if the activity of a polypeptide showing the activity of a electron transport complex protein, or if the activity of the polypeptide B1627, preferably represented by SEQ ID NO. 38346, or a homolog or fragment thereof, or if the activity of a polypeptide encoded by a nucleic acid molecule comprising the nucleic acid SEQ ID NO. 38345, preferably the coding region thereof, or a homolog or fragment thereof, e.g. derived from Escherichia coli, is increased or generated. For example the activity of a nucleic acid molecule or a polypeptide comprising the nucleic acid, preferably the coding region thereof, or polypeptide or the consensus sequence or the polypeptide motif, as depicted in Table I, II or IV, application No. 17, column 5 or 8 in the respective same line as the nucleic acid molecule SEQ ID NO. 38345 or polypeptide SEQ ID NO. 38346, respectively, or a homolog or a fragment thereof, is increased or generated, or if the activity electron transport complex protein is increased or generated in a non-human organism, like a microorganism or a plant cell, plant or part thereof, especially with non-targeted localization, whereby the respective line disclose in column 7 the fine chemical glucose-1-phosphate. For example, an increase of the glucose-1-phosphate of at least 1-percent, particularly in a range of 32 to 78-percent is conferred as compared to a corresponding non-transformed wild type non-human organism.

[88219] Accordingly, in one embodiment, an increase of 3,4,5-trihydroxypentanoic acid in a non-human organism, as compared to a corresponding non-transformed wild type non-human organism, is conferred in the process of the invention, if the activity of a polypeptide showing the activity of a electron transport complex protein, or if the activity of the polypeptide B1627, preferably represented by SEQ ID NO. 38346, or a homolog or fragment thereof, or if the activity of a polypeptide encoded by a nucleic acid molecule comprising the nucleic acid SEQ ID NO. 38345, preferably the coding region thereof, or a homolog or fragment thereof, e.g. derived from Escherichia coli, is increased or generated. For example the activity of a nucleic acid molecule or a polypeptide comprising the nucleic acid, preferably the coding region thereof, or polypeptide or the consensus sequence or the polypeptide motif, as depicted in Table I, II or IV, application No. 17, column 5 or 8 in the respective same line as the nucleic acid molecule SEQ ID NO. 38345 or polypeptide SEQ ID NO. 38346, respectively, or a homolog or a fragment thereof, is increased or generated, or if the activity electron transport complex protein is increased or generated in a non-human organism, like a microorganism or a plant cell, plant or part thereof, especially with non-targeted localization, whereby the respective line disclose in column 7 the fine chemical 3,4,5-trihydroxypentanoic acid. For example, an increase of the 3,4,5-trihydroxypentanoic acid of at least 1 percent, particularly in a range of 55 to 78-percent is conferred as compared to a corresponding non-transformed wild type non-human organism.

[88220] Accordingly, in one embodiment, an increase of myo-inositol in a non-human organism, as compared to a corresponding non-transformed wild type non-human organism, is conferred in the process of the invention, if the activity of a polypeptide showing the activity of a methylglyoxalase, or if the activity of the polypeptide B1651, preferably represented by SEQ ID NO. 78266, or a homolog or fragment thereof, or if the activity of a polypeptide encoded by a nucleic acid molecule comprising the nucleic acid SEQ ID NO. 78265, preferably the coding region thereof, or a homolog or fragment thereof, e.g. derived from Escherichia coli, is increased or generated. For example the activity of a nucleic acid molecule or a polypeptide comprising the nucleic acid, preferably the coding region thereof, or polypeptide or the consensus sequence or the polypeptide motif, as depicted in Table I, II or IV, application No. 17, column 5 or 8 in the respective same line as the nucleic acid molecule SEQ ID NO. 78265 or polypeptide SEQ ID NO. 78266, respectively, or a homolog or a fragment thereof, is increased or generated, or if the activity methylglyoxalase is increased or generated in a non-human organism, like a microorganism or a plant cell, plant or part thereof, especially with non-targeted localization, whereby the respective line disclose in column 7 the fine chemical myo-inositol. For example, an increase of the myo-inositol of at least 1 percent, particularly in a range of 25 to 41-percent is conferred as compared to a corresponding non-transformed wild type non-human organism.

[88221] Accordingly, in one embodiment, an increase of myo-inositol in a non-human organism, as compared to a corresponding non-transformed wild type non-human organism, is conferred in the process of the invention, if the activity of a polypeptide showing the activity of a b1670-protein, or if the activity of the polypeptide B1670, preferably represented by SEQ ID NO. 78754, or a homolog or fragment thereof, or if the activity of a polypeptide encoded by a nucleic acid molecule comprising the nucleic acid SEQ ID NO. 78753, preferably the coding region thereof, or a homolog or fragment thereof, e.g. derived from Escherichia coli, is increased or generated. For example the activity of a nucleic acid molecule or a polypeptide comprising the nucleic acid, preferably the coding region thereof, or polypeptide or the consensus sequence or the polypeptide motif, as depicted in Table I, II or IV, application No. 17, column 5 or 8 in the respective same line as the nucleic acid molecule SEQ ID NO. 78753 or polypeptide SEQ ID NO. 78754, respectively, or a homolog or a fragment thereof, is increased or generated, or if the activity b1670-protein is increased or generated in a non-human organism, like a microorganism or a plant cell, plant or part thereof, especially with non-targeted localization, whereby the respective line disclose in column 7 the fine chemical myo-inositol. For example, an increase of the myo-inositol of at least 1 percent, particularly in a range of 30 to 45-percent is conferred as compared to a corresponding non-transformed wild type non-human organism.

[88222] Accordingly, in one embodiment, an increase of fructose in a non-human organism, as compared to a corresponding non-transformed wild type non-human organism, is conferred in the process of the invention, if the activity of a polypeptide showing the activity of a ABC transporter permease protein, or if the activity of the polypeptide B1755, preferably represented by SEQ ID NO. 78853, or a homolog or fragment thereof, or if the activity of a polypeptide encoded by a nucleic acid molecule comprising the nucleic acid SEQ ID NO. 78852, preferably the coding region thereof, or a homolog or fragment thereof, e.g. derived from Escherichia coli, is increased or generated. For example the activity of a nucleic acid molecule or a polypeptide comprising the nucleic acid, preferably the coding region thereof, or polypeptide or the consensus sequence or the polypeptide motif, as depicted in Table I, II or IV, application No. 17, column 5 or 8 in the respective same line as the nucleic acid molecule SEQ ID NO. 78852 or polypeptide SEQ ID NO. 78853, respectively, or a homolog or a fragment thereof, is increased or generated, or if the activity ABC transporter permease protein is increased or generated in a non-human organism, like a microorganism or a plant cell, plant or part thereof, especially with non-targeted localization, whereby the respective line disclose in column 7 the fine chemical fructose. For example, an increase of the fructose of at least 1 percent, particularly in a range of 83 to 94-percent is conferred as compared to a corresponding non-transformed wild type non-human organism.

[88223] Accordingly, in one embodiment, an increase of myo-inositol in a non-human organism, as compared to a corresponding non-transformed wild type non-human organism, is conferred in the process of the invention, if the activity of a polypeptide showing the activity of a transport protein, or if the activity of the polypeptide B1791, preferably represented by SEQ ID NO. 78884, or a homolog or fragment thereof, or if the activity of a polypeptide encoded by a nucleic acid molecule comprising the nucleic acid SEQ ID NO. 78883, preferably the coding region thereof, or a homolog or fragment thereof, e.g. derived from Escherichia coli, is increased or generated. For example the activity of a nucleic acid molecule or a polypeptide comprising the nucleic acid, preferably the coding region thereof, or polypeptide or the consensus sequence or the polypeptide motif, as depicted in Table I, II or IV, application No. 17, column 5 or 8 in the respective same line as the nucleic acid molecule SEQ ID NO. 78883 or polypeptide SEQ ID NO. 78884, respectively, or a homolog or a fragment thereof, is increased or generated, or if the activity transport protein is increased or generated in a non-human organism, like a microorganism or a plant cell, plant or part thereof, especially with non-targeted localization, whereby the respective line disclose in column 7 the fine chemical myo-inositol. For example, an increase of the myo-inositol of at least 1 percent, particularly in a range of 25 to 344-percent is conferred as compared to a corresponding non-transformed wild type non-human organism.

[88224] Accordingly, in one embodiment, an increase of fructose in a non-human organism, as compared to a corresponding non-transformed wild type non-human organism, is conferred in the process of the invention, if the activity of a polypeptide showing the activity of a b1796-protein, or if the activity of the polypeptide B1796, preferably represented by SEQ ID NO. 99197, or a homolog or fragment thereof, or if the activity of a polypeptide encoded by a nucleic acid molecule comprising the nucleic acid SEQ ID NO. 99196, preferably the coding region thereof, or a homolog or fragment thereof, e.g. derived from Escherichia coli, is increased or generated. For example the activity of a nucleic acid molecule or a polypeptide comprising the nucleic acid, preferably the coding region thereof, or polypeptide or the consensus sequence or the polypeptide motif, as depicted in Table I, II or IV, application No. 17, column 5 or 8 in the respective same line as the nucleic acid molecule SEQ ID NO. 99196 or polypeptide SEQ ID NO. 99197, respectively, or a homolog or a fragment thereof, is increased or generated, or if the activity b1796-protein is increased or generated in a non-human organism, like a microorganism or a plant cell, plant or part thereof, especially with non-targeted localization, whereby the respective line disclose in column 7 the fine chemical fructose. For example, an increase of the fructose of at least 1 percent, particularly in a range of 85 to 93-percent is conferred as compared to a corresponding non-transformed wild type non-human organism.

[88225] Accordingly, in one embodiment, an increase of myo-inositol in a non-human organism, as compared to a corresponding non-transformed wild type non-human organism, is conferred in the process of the invention, if the activity of a polypeptide showing the activity of a paraaminobenzoate synthase componentl, or if the activity of the polypeptide B1812, preferably represented by SEQ ID NO. 145181, or a homolog or fragment thereof, or if the activity of a polypeptide encoded by a nucleic acid molecule comprising the nucleic acid SEQ ID NO. 145180, preferably the coding region thereof, or a homolog or fragment thereof, e.g. derived from Escherichia coli, is increased or generated. For example the activity of a nucleic acid molecule or a polypeptide comprising the nucleic acid, preferably the coding region thereof, or polypeptide or the consensus sequence or the polypeptide motif, as depicted in Table I, II or IV, application No. 17, column 5 or 8 in the respective same line as the nucleic acid molecule SEQ ID NO. 145180 or polypeptide SEQ ID NO. 145181, respectively, or a homolog or a fragment thereof, is increased or generated, or if the activity para-aminobenzoate synthase componentl is increased or generated in a non-human organism, like a microorganism or a plant cell, plant or part thereof, especially with non-targeted localization, whereby the respective line disclose in column 7 the fine chemical myo-inositol. For example, an increase of the myo-inositol of at least 1 percent, particularly in a range of 33 to 49-percent is conferred as compared to a corresponding non-transformed wild type non-human organism.

[88226] Accordingly, in one embodiment, an increase of galactitol in a non-human organism, as compared to a corresponding non-transformed wild type non-human organism, is conferred in the process of the invention, if the activity of a polypeptide showing the activity of a L-serine dehydratase, or if the activity of the polypeptide B1814, preferably represented by SEQ ID NO. 8034, or a homolog or fragment thereof, or if the activity of a polypeptide encoded by a nucleic acid molecule comprising the nucleic acid SEQ ID NO. 8033, preferably the coding region thereof, or a homolog or fragment thereof, e.g. derived from Escherichia coli, is increased or generated. For example the activity of a nucleic acid molecule or a polypeptide comprising the nucleic acid, preferably the coding region thereof, or polypeptide or the consensus sequence or the polypeptide motif, as depicted in Table I, II or IV, application No. 17, column 5 or 8 in the respective same line as the nucleic acid molecule SEQ ID NO. 8033 or polypeptide SEQ ID NO. 8034, respectively, or a homolog or a fragment thereof, is increased or generated, or if the activity L-serine dehydratase is increased or generated in a non-human organism, like a microorganism or a plant cell, plant or part thereof, especially with plastidic localization, whereby the respective line disclose in column 7 the fine chemical galactitol. For example, an increase of the galactitol of at least 1 percent, particularly in a range of 55 to 2661-percent is conferred as compared to a corresponding non-transformed wild type non-human organism.

[88227] Accordingly, in one embodiment, an increase of sorbitol in a non-human organism, as compared to a corresponding non-transformed wild type non-human organism, is conferred in the process of the invention, if the activity of a polypeptide showing the activity of a L-serine dehydratase, or if the activity of the polypeptide B1814, preferably represented by SEQ ID NO. 8034, or a homolog or fragment thereof, or if the activity of a polypeptide encoded by a nucleic acid molecule comprising the nucleic acid SEQ ID NO. 8033, preferably the coding region thereof, or a homolog or fragment thereof, e.g. derived from Escherichia coli, is increased or generated. For example the activity of a nucleic acid molecule or a polypeptide comprising the nucleic acid, preferably the coding region thereof, or polypeptide or the consensus sequence or the polypeptide motif, as depicted in Table I, II or IV, application No. 17, column 5 or 8 in the respective same line as the nucleic acid molecule SEQ ID NO. 8033 or polypeptide SEQ ID NO. 8034, respectively, or a homolog or a fragment thereof, is increased or generated, or if the activity L-serine dehydratase is increased or generated in a non-human organism, like a microorganism or a plant cell, plant or part thereof, especially with plastidic localization, whereby the respective line disclose in column 7 the fine chemical sorbitol. For example, an increase of the sorbitol of at least 1 percent, particularly in a range of 55 to 2661-percent is conferred as compared to a corresponding non-transformed wild type non-human organism.

[88228] Accordingly, in one embodiment, an increase of myo-inositol in a non-human organism, as compared to a corresponding non-transformed wild type non-human organism, is conferred in the process of the invention, if the activity of a polypeptide showing the activity of a protease, or if the activity of the polypeptide B1845, preferably represented by SEQ ID NO. 38574, or a homolog or fragment thereof, or if the activity of a polypeptide encoded by a nucleic acid molecule comprising the nucleic acid SEQ ID NO. 38573, preferably the coding region thereof, or a homolog or fragment thereof, e.g. derived from Escherichia coli, is increased or generated. For example the activity of a nucleic acid molecule or a polypeptide comprising the nucleic acid, preferably the coding region thereof, or polypeptide or the consensus sequence or the polypeptide motif, as depicted in Table I, II or IV, application No. 17, column 5 or 8 in the respective same line as the nucleic acid molecule SEQ ID NO. 38573 or polypeptide SEQ ID NO. 38574, respectively, or a homolog or a fragment thereof, is increased or generated, or if the activity protease is increased or generated in a non-human organism, like a microorganism or a plant cell, plant or part thereof, especially with non-targeted localization, whereby the respective line disclose in column 7 the fine chemical myo-inositol. For example, an increase of the myo-inositol of at least 1 percent, particularly in a range of 26 to 51-percent is conferred as compared to a corresponding non-transformed wild type non-human organism.

[88229] Accordingly, in one embodiment, an increase of erythrol in a non-human organism, as compared to a corresponding non-transformed wild type non-human organism, is conferred in the process of the invention, if the activity of a polypeptide showing the activity of a pyruvate kinase, or if the activity of the polypeptide B1854, preferably represented by SEQ ID NO. 8364, or a homolog or fragment thereof, or if the activity of a polypeptide encoded by a nucleic acid molecule comprising the nucleic acid SEQ ID NO. 8363, preferably the coding region thereof, or a homolog or fragment thereof, e.g. derived from Escherichia coli, is increased or generated. For example the activity of a nucleic acid molecule or a polypeptide comprising the nucleic acid, preferably the coding region thereof, or polypeptide or the consensus sequence or the polypeptide motif, as depicted in Table I, II or IV, application No. 17, column 5 or 8 in the respective same line as the nucleic acid molecule SEQ ID NO. 8363 or polypeptide SEQ ID NO. 8364, respectively, or a homolog or a fragment thereof, is increased or generated, or if the activity pyruvate kinase is increased or generated in a non-human organism, like a microorganism or a plant cell, plant or part thereof, especially with plastidic localization, whereby the respective line disclose in column 7 the fine chemical erythrol. For example, an increase of the erythrol of at least 1 percent, particularly in a range of 140 to 330-percent is conferred as compared to a corresponding non-transformed wild type non-human organism.

[88230] Accordingly, in one embodiment, an increase of myo-inositol in a non-human organism, as compared to a corresponding non-transformed wild type non-human organism, is conferred in the process of the invention, if the activity of a polypeptide showing the activity of a pyruvate kinase, or if the activity of the polypeptide B1854, preferably represented by SEQ ID NO. 8364, or a homolog or fragment thereof, or if the activity of a polypeptide encoded by a nucleic acid molecule comprising the nucleic acid SEQ ID NO. 8363, preferably the coding region thereof, or a homolog or fragment thereof, e.g. derived from Escherichia coli, is increased or generated. For example the activity of a nucleic acid molecule or a polypeptide comprising the nucleic acid, preferably the coding region thereof, or polypeptide or the consensus sequence or the polypeptide motif, as depicted in Table I, II or IV, application No. 17, column 5 or 8 in the respective same line as the nucleic acid molecule SEQ ID NO. 8363 or polypeptide SEQ ID NO. 8364, respectively, or a homolog or a fragment thereof, is increased or generated, or if the activity pyruvate kinase is increased or generated in a non-human organism, like a microorganism or a plant cell, plant or part thereof, especially with plastidic localization, whereby the respective line disclose in column 7 the fine chemical myo-inositol. For example, an increase of the myo-inositol of at least 1 percent, particularly in a range of 44 to 81-percent is conferred as compared to a corresponding non-transformed wild type non-human organism.

[88231] Accordingly, in one embodiment, an increase of sorbitol in a non-human organism, as compared to a corresponding non-transformed wild type non-human organism, is conferred in the process of the invention, if the activity of a polypeptide showing the activity of a pyruvate kinase, or if the activity of the polypeptide B1854, preferably represented by SEQ ID NO. 8364, or a homolog or fragment thereof, or if the activity of a polypeptide encoded by a nucleic acid molecule comprising the nucleic acid SEQ ID NO. 8363, preferably the coding region thereof, or a homolog or fragment thereof, e.g. derived from Escherichia coli, is increased or generated. For example the activity of a nucleic acid molecule or a polypeptide comprising the nucleic acid, preferably the coding region thereof, or polypeptide or the consensus sequence or the polypeptide motif, as depicted in Table I, II or IV, application No. 17, column 5 or 8 in the respective same line as the nucleic acid molecule SEQ ID NO. 8363 or polypeptide SEQ ID NO. 8364, respectively, or a homolog or a fragment thereof, is increased or generated, or if the activity pyruvate kinase is increased or generated in a non-human organism, like a microorganism or a plant cell, plant or part thereof, especially with plastidic localization, whereby the respective line disclose in column 7 the fine chemical sorbitol. For example, an increase of the sorbitol of at least 1 percent, particularly in a range of 200 to 414-percent is conferred as compared to a corresponding non-transformed wild type non-human organism.

[88232] Accordingly, in one embodiment, an increase of fructose in a non-human organism, as compared to a corresponding non-transformed wild type non-human organism, is conferred in the process of the invention, if the activity of a polypeptide showing the activity of a dATP pyrophosphohydrolase, or if the activity of the polypeptide B1865, preferably represented by SEQ ID NO. 134784, or a homolog or fragment thereof, or if the activity of a polypeptide encoded by a nucleic acid molecule comprising the nucleic acid SEQ ID NO. 134783, preferably the coding region thereof, or a homolog or fragment thereof, e.g. derived from Escherichia coli, is increased or generated. For example the activity of a nucleic acid molecule or a polypeptide comprising the nucleic acid, preferably the coding region thereof, or polypeptide or the consensus sequence or the polypeptide motif, as depicted in Table I, II or IV, application No. 17, column 5 or 8 in the respective same line as the nucleic acid molecule SEQ ID NO. 134783 or polypeptide SEQ ID NO. 134784, respectively, or a homolog or a fragment thereof, is increased or generated, or if the activity dATP pyrophosphohydrolase is increased or generated in a non-human organism, like a microorganism or a plant cell, plant or part thereof, especially with non-targeted localization, whereby the respective line disclose in column 7 the fine chemical fructose. For example, an increase of the fructose of at least 1 percent, particularly in a range of 32 to 105-percent is conferred as compared to a corresponding non-transformed wild type non-human organism.

[88233] Accordingly, in one embodiment, an increase of glucose-1-phosphate in a non-human organism, as compared to a corresponding non-transformed wild type non-human organism, is conferred in the process of the invention, if the activity of a polypeptide showing the activity of a trehalose-6-phosphate synthase, or if the activity of the polypeptide B1896, preferably represented by SEQ ID NO. 145412, or a homolog or fragment thereof, or if the activity of a polypeptide encoded by a nucleic acid molecule comprising the nucleic acid SEQ ID NO. 145411, preferably the coding region thereof, or a homolog or fragment thereof, e.g. derived from Escherichia coli, is increased or generated. For example the activity of a nucleic acid molecule or a polypeptide comprising the nucleic acid, preferably the coding region thereof, or polypeptide or the consensus sequence or the polypeptide motif, as depicted in Table I, II or IV, application No. 17, column 5 or 8 in the respective same line as the nucleic acid molecule SEQ ID NO. 145411 or polypeptide SEQ ID NO. 145412, respectively, or a homolog or a fragment thereof, is increased or generated, or if the activity trehalose-6-phosphate synthase is increased or generated in a non-human organism, like a microorganism or a plant cell, plant or part thereof, especially with non-targeted localization, whereby the respective line disclose in column 7 the fine chemical glucose-1-phosphate. For example, an increase of the glucose-1-phosphate of at least 1-percent, particularly in a range of 19 to 74-percent is conferred as compared to a corresponding non-transformed wild type non-human organism.

[88234] Accordingly, in one embodiment, an increase of trehalose in a non-human organism, as compared to a corresponding non-transformed wild type non-human organism, is conferred in the process of the invention, if the activity of a polypeptide showing the activity of a trehalose-6-phosphate synthase, or if the activity of the polypeptide B1896, preferably represented by SEQ ID NO. 145412, or a homolog or fragment thereof, or if the activity of a polypeptide encoded by a nucleic acid molecule comprising the nucleic acid SEQ ID NO. 145411, preferably the coding region thereof, or a homolog or fragment thereof, e.g. derived from Escherichia coli, is increased or generated. For example the activity of a nucleic acid molecule or a polypeptide comprising the nucleic acid, preferably the coding region thereof, or polypeptide or the consensus sequence or the polypeptide motif, as depicted in Table I, II or IV, application No. 17, column 5 or 8 in the respective same line as the nucleic acid molecule SEQ ID NO. 145411 or polypeptide SEQ ID NO. 145412, respectively, or a homolog or a fragment thereof, is increased or generated, or if the activity trehalose-6-phosphate synthase is increased or generated in a non-human organism, like a microorganism or a plant cell, plant or part thereof, especially with non-targeted localization, whereby the respective line disclose in column 7 the fine chemical trehalose. For example, an increase of the trehalose of at least 1 percent, particularly in a range of 294 to 441-percent is conferred as compared to a corresponding non-transformed wild type non-human organism.

[88235] Accordingly, in one embodiment, an increase of erythrol in a non-human organism, as compared to a corresponding non-transformed wild type non-human organism, is conferred in the process of the invention, if the activity of a polypeptide showing the activity of a trehalosephosphatase, or if the activity of the polypeptide B1897, preferably represented by SEQ ID NO. 79057, or a homolog or fragment thereof, or if the activity of a polypeptide encoded by a nucleic acid molecule comprising the nucleic acid SEQ ID NO. 79056, preferably the coding region thereof, or a homolog or fragment thereof, e.g. derived from Escherichia coli, is increased or generated. For example the activity of a nucleic acid molecule or a polypeptide comprising the nucleic acid, preferably the coding region thereof, or polypeptide or the consensus sequence or the polypeptide motif, as depicted in Table I, II or IV, application No. 17, column 5 or 8 in the respective same line as the nucleic acid molecule SEQ ID NO. 79056 or polypeptide SEQ ID NO. 79057, respectively, or a homolog or a fragment thereof, is increased or generated, or if the activity trehalose-phosphatase is increased or generated in a non-human organism, like a microorganism or a plant cell, plant or part thereof, especially with plastidic localization, whereby the respective line disclose in column 7 the fine chemical erythrol. For example, an increase of the erythrol of at least 1 percent, particularly in a range of 139 to 3201-percent is conferred as compared to a corresponding non-transformed wild type non-human organism.

[88236] Accordingly, in one embodiment, an increase of fructose in a non-human organism, as compared to a corresponding non-transformed wild type non-human organism, is conferred in the process of the invention, if the activity of a polypeptide showing the activity of a trehalosephosphatase, or if the activity of the polypeptide B1897, preferably represented by SEQ ID NO. 79057, or a homolog or fragment thereof, or if the activity of a polypeptide encoded by a nucleic acid molecule comprising the nucleic acid SEQ ID NO. 79056, preferably the coding region thereof, or a homolog or fragment thereof, e.g. derived from Escherichia coli, is increased or generated. For example the activity of a nucleic acid molecule or a polypeptide comprising the nucleic acid, preferably the coding region thereof, or polypeptide or the consensus sequence or the polypeptide motif, as depicted in Table I, II or IV, application No. 17, column 5 or 8 in the respective same line as the nucleic acid molecule SEQ ID NO. 79056 or polypeptide SEQ ID NO. 79057, respectively, or a homolog or a fragment thereof, is increased or generated, or if the activity trehalose-phosphatase is increased or generated in a non-human organism, like a microorganism or a plant cell, plant or part thereof, especially with non-targeted localization, whereby the respective line disclose in column 7 the fine chemical fructose. For example, an increase of the fructose of at least 1 percent, particularly in a range of 202 to 2339-percent is conferred as compared to a corresponding non-transformed wild type non-human organism.

[88237] Accordingly, in one embodiment, an increase of glucose in a non-human organism, as compared to a corresponding non-transformed wild type non-human organism, is conferred in the process of the invention, if the activity of a polypeptide showing the activity of a trehalosephosphatase, or if the activity of the polypeptide B1897, preferably represented by SEQ ID NO. 79057, or a homolog or fragment thereof, or if the activity of a polypeptide encoded by a nucleic acid molecule comprising the nucleic acid SEQ ID NO. 79056, preferably the coding region thereof, or a homolog or fragment thereof, e.g. derived from Escherichia coli, is increased or generated. For example the activity of a nucleic acid molecule or a polypeptide comprising the nucleic acid, preferably the coding region thereof, or polypeptide or the consensus sequence or the polypeptide motif, as depicted in Table I, II or IV, application No. 17, column 5 or 8 in the respective same line as the nucleic acid molecule SEQ ID NO. 79056 or polypeptide SEQ ID NO. 79057, respectively, or a homolog or a fragment thereof, is increased or generated, or if the activity trehalose-phosphatase is increased or generated in a non-human organism, like a microorganism or a plant cell, plant or part thereof, especially with non-targeted localization, whereby the respective line disclose in column 7 the fine chemical glucose. For example, an increase of the glucose of at least 1 percent, particularly in a range of 120 to 1091-percent is conferred as compared to a corresponding non-transformed wild type non-human organism.

[88238] Accordingly, in one embodiment, an increase of sucrose in a non-human organism, as compared to a corresponding non-transformed wild type non-human organism, is conferred in the process of the invention, if the activity of a polypeptide showing the activity of a trehalosephosphatase, or if the activity of the polypeptide B1897, preferably represented by SEQ ID NO. 79057, or a homolog or fragment thereof, or if the activity of a polypeptide encoded by a nucleic acid molecule comprising the nucleic acid SEQ ID NO. 79056, preferably the coding region thereof, or a homolog or fragment thereof, e.g. derived from Escherichia coli, is increased or generated. For example the activity of a nucleic acid molecule or a polypeptide comprising the nucleic acid, preferably the coding region thereof, or polypeptide or the consensus sequence or the polypeptide motif, as depicted in Table I, II or IV, application No. 17, column 5 or 8 in the respective same line as the nucleic acid molecule SEQ ID NO. 79056 or polypeptide SEQ ID NO. 79057, respectively, or a homolog or a fragment thereof, is increased or generated, or if the activity trehalose-phosphatase is increased or generated in a non-human organism, like a microorganism or a plant cell, plant or part thereof, especially with non-targeted localization, whereby the respective line disclose in column 7 the fine chemical sucrose. For example, an increase of the sucrose of at least 1 percent, particularly in a range of 38 to 103-percent is conferred as compared to a corresponding non-transformed wild type non-human organism.

[88239] Accordingly, in one embodiment, an increase of raffinose in a non-human organism, as compared to a corresponding non-transformed wild type non-human organism, is conferred in the process of the invention, if the activity of a polypeptide showing the activity of a b1898-protein, or if the activity of the polypeptide B1898, preferably represented by SEQ ID NO. 38768, or a homolog or fragment thereof, or if the activity of a polypeptide encoded by a nucleic acid molecule comprising the nucleic acid SEQ ID NO. 38767, preferably the coding region thereof, or a homolog or fragment thereof, e.g. derived from Escherichia coli, is increased or generated. For example the activity of a nucleic acid molecule or a polypeptide comprising the nucleic acid, preferably the coding region thereof, or polypeptide or the consensus sequence or the polypeptide motif, as depicted in Table I, II or IV, application No. 17, column 5 or 8 in the respective same line as the nucleic acid molecule SEQ ID NO. 38767 or polypeptide SEQ ID NO. 38768, respectively, or a homolog or a fragment thereof, is increased or generated, or if the activity b1898-protein is increased or generated in a non-human organism, like a microorganism or a plant cell, plant or part thereof, especially with non-targeted localization, whereby the respective line disclose in column 7 the fine chemical raffinose. For example, an increase of the raffinose of at least 1 percent, particularly in a range of 55 to 329-percent is conferred as compared to a corresponding non-transformed wild type non-human organism.

[88240] Accordingly, in one embodiment, an increase of glucose-1-phosphate in a non-human organism, as compared to a corresponding non-transformed wild type non-human organism, is conferred in the process of the invention, if the activity of a polypeptide showing the activity of a acetyltransferase, or if the activity of the polypeptide B1932, preferably represented by SEQ ID NO. 131800, or a homolog or fragment thereof, or if the activity of a polypeptide encoded by a nucleic acid molecule comprising the nucleic acid SEQ ID NO. 131799, preferably the coding region thereof, or a homolog or fragment thereof, e.g. derived from Escherichia coli, is increased or generated. For example the activity of a nucleic acid molecule or a polypeptide comprising the nucleic acid, preferably the coding region thereof, or polypeptide or the consensus sequence or the polypeptide motif, as depicted in Table I, II or IV, application No. 17, column 5 or 8 in the respective same line as the nucleic acid molecule SEQ ID NO. 131799 or polypeptide SEQ ID NO. 131800, respectively, or a homolog or a fragment thereof, is increased or generated, or if the activity acetyltransferase is increased or generated in a non-human organism, like a microorganism or a plant cell, plant or part thereof, especially with non-targeted localization, whereby the respective line disclose in column 7 the fine chemical glucose-1-phosphate. For example, an increase of the glucose-1-phosphate of at least 1 percent, particularly in a range of 19 to 107-percent is conferred as compared to a corresponding non-transformed wild type non-human organism.

[88241] Accordingly, in one embodiment, an increase of 3,4,5-trihydroxypentanoic acid in a non-human organism, as compared to a corresponding non-transformed wild type non-human organism, is conferred in the process of the invention, if the activity of a polypeptide showing the activity of a acetyltransferase, or if the activity of the polypeptide B1932, preferably represented by SEQ ID NO. 131800, or a homolog or fragment thereof, or if the activity of a polypeptide encoded by a nucleic acid molecule comprising the nucleic acid SEQ ID NO. 131799, preferably the coding region thereof, or a homolog or fragment thereof, e.g. derived from Escherichia coli, is increased or generated. For example the activity of a nucleic acid molecule or a polypeptide comprising the nucleic acid, preferably the coding region thereof, or polypeptide or the consensus sequence or the polypeptide motif, as depicted in Table I, II or IV, application No. 17, column 5 or 8 in the respective same line as the nucleic acid molecule SEQ ID NO. 131799 or polypeptide SEQ ID NO. 131800, respectively, or a homolog or a fragment thereof, is increased or generated, or if the activity acetyltransferase is increased or generated in a non-human organism, like a microorganism or a plant cell, plant or part thereof, especially with non-targeted localization, whereby the respective line disclose in column 7 the fine chemical 3,4,5-trihydroxypentanoic acid. For example, an increase of the 3,4,5-trihydroxypentanoic acid of at least 1 percent, particularly in a range of 33 to 84-percent is conferred as compared to a corresponding non-transformed wild type non-human organism.

[88242] Accordingly, in one embodiment, an increase of glucose in a non-human organism, as compared to a corresponding non-transformed wild type non-human organism, is conferred in the process of the invention, if the activity of a polypeptide showing the activity of a flagellar M-ring protein, or if the activity of the polypeptide B1938, preferably represented by SEQ ID NO. 134865, or a homolog or fragment thereof, or if the activity of a polypeptide encoded by a nucleic acid molecule comprising the nucleic acid SEQ ID NO. 134864, preferably the coding region thereof, or a homolog or fragment thereof, e.g. derived from Escherichia coli, is increased or generated. For example the activity of a nucleic acid molecule or a polypeptide comprising the nucleic acid, preferably the coding region thereof, or polypeptide or the consensus sequence or the polypeptide motif, as depicted in Table I, II or IV, application No. 17, column 5 or 8 in the respective same line as the nucleic acid molecule SEQ ID NO. 134864 or polypeptide SEQ ID NO. 134865, respectively, or a homolog or a fragment thereof, is increased or generated, or if the activity flagellar M-ring protein is increased or generated in a non-human organism, like a microorganism or a plant cell, plant or part thereof, especially with non-targeted localization, whereby the respective line disclose in column 7 the fine chemical glucose. For example, an increase of the glucose of at least 1 percent, particularly in a range of 65 to 201-percent is conferred as compared to a corresponding non-transformed wild type non-human organism.

[88243] Accordingly, in one embodiment, an increase of myo-inositol in a non-human organism, as compared to a corresponding non-transformed wild type non-human organism, is conferred in the process of the invention, if the activity of a polypeptide showing the activity of a flagellar M-ring protein, or if the activity of the polypeptide B1938, preferably represented by SEQ ID NO. 134865, or a homolog or fragment thereof, or if the activity of a polypeptide encoded by a nucleic acid molecule comprising the nucleic acid SEQ ID NO. 134864, preferably the coding region thereof, or a homolog or fragment thereof, e.g. derived from Escherichia coli, is increased or generated. For example the activity of a nucleic acid molecule or a polypeptide comprising the nucleic acid, preferably the coding region thereof, or polypeptide or the consensus sequence or the polypeptide motif, as depicted in Table I, II or IV, application No. 17, column 5 or 8 in the respective same line as the nucleic acid molecule SEQ ID NO. 134864 or polypeptide SEQ ID NO. 134865, respectively, or a homolog or a fragment thereof, is increased or generated, or if the activity flagellar M-ring protein is increased or generated in a non-human organism, like a microorganism or a plant cell, plant or part thereof, especially with non-targeted localization, whereby the respective line disclose in column 7 the fine chemical myo-inositol. For example, an increase of the myo-inositol of at least 1 percent, particularly in a range of 28 to 190-percent is conferred as compared to a corresponding non-transformed wild type non-human organism.

[88244] Accordingly, in one embodiment, an increase of fructose in a non-human organism, as compared to a corresponding non-transformed wild type non-human organism, is conferred in the process of the invention, if the activity of a polypeptide showing the activity of a O-antigen chain length determinant, or if the activity of the polypeptide B2027, preferably represented by SEQ ID NO. 79218, or a homolog or fragment thereof, or if the activity of a polypeptide encoded by a nucleic acid molecule comprising the nucleic acid SEQ ID NO. 79217, preferably the coding region thereof, or a homolog or fragment thereof, e.g. derived from Escherichia coli, is increased or generated. For example the activity of a nucleic acid molecule or a polypeptide comprising the nucleic acid, preferably the coding region thereof, or polypeptide or the consensus sequence or the polypeptide motif, as depicted in Table I, II or IV, application No. 17, column 5 or 8 in the respective same line as the nucleic acid molecule SEQ ID NO. 79217 or polypeptide SEQ ID NO. 79218, respectively, or a homolog or a fragment thereof, is increased or generated, or if the activity O-antigen chain length determinant is increased or generated in a non-human organism, like a microorganism or a plant cell, plant or part thereof, especially with non-targeted localization, whereby the respective line disclose in column 7 the fine chemical fructose. For example, an increase of the fructose of at least 1 percent, particularly in a range of 156 to 232-percent is conferred as compared to a corresponding non-transformed wild type non-human organism.

[88245] Accordingly, in one embodiment, an increase of glucose in a non-human organism, as compared to a corresponding non-transformed wild type non-human organism, is conferred in the process of the invention, if the activity of a polypeptide showing the activity of a b2032-protein, or if the activity of the polypeptide B2032, preferably represented by SEQ ID NO. 8921, or a homolog or fragment thereof, or if the activity of a polypeptide encoded by a nucleic acid molecule comprising the nucleic acid SEQ ID NO. 8920, preferably the coding region thereof, or a homolog or fragment thereof, e.g. derived from Escherichia coli, is increased or generated. For example the activity of a nucleic acid molecule or a polypeptide comprising the nucleic acid, preferably the coding region thereof, or polypeptide or the consensus sequence or the polypeptide motif, as depicted in Table I, II or IV, application No. 17, column 5 or 8 in the respective same line as the nucleic acid molecule SEQ ID NO. 8920 or polypeptide SEQ ID NO. 8921, respectively, or a hornolog or a fragment thereof, is increased or generated, or if the activity b2032-protein is increased or generated in a non-human organism, like a microorganism or a plant cell, plant or part thereof, especially with non-targeted localization, whereby the respective line disclose in column 7 the fine chemical glucose. For example, an increase of the glucose of at least 1 percent, particularly in a range of 61 to 157-percent is conferred as compared to a corresponding non-transformed wild type non-human organism.

[88246] Accordingly, in one embodiment, an increase of myo-inositol in a non-human organism, as compared to a corresponding non-transformed wild type non-human organism, is conferred in the process of the invention, if the activity of a polypeptide showing the activity of a b2032-protein, or if the activity of the polypeptide B2032, preferably represented by SEQ ID NO. 8921, or a homolog or fragment thereof, or if the activity of a polypeptide encoded by a nucleic acid molecule comprising the nucleic acid SEQ ID NO. 8920, preferably the coding region thereof, or a homolog or fragment thereof, e.g. derived from Escherichia coli, is increased or generated. For example the activity of a nucleic acid molecule or a polypeptide comprising the nucleic acid, preferably the coding region thereof, or polypeptide or the consensus sequence or the polypeptide motif, as depicted in Table I, II or IV, application No. 17, column 5 or 8 in the respective same line as the nucleic acid molecule SEQ ID NO. 8920 or polypeptide SEQ ID NO. 8921, respectively, or a homolog or a fragment thereof, is increased or generated, or if the activity b2032-protein is increased or generated in a non-human organism, like a microorganism or a plant cell, plant or part thereof, especially with non-targeted localization, whereby the respective line disclose in column 7 the fine chemical myo-inositol. For example, an increase of the myo-inositol of at least 1 percent, particularly in a range of 27 to 212-percent is conferred as compared to a corresponding non-transformed wild type non-human organism.

[88247] Accordingly, in one embodiment, an increase of glucose-1-phosphate in a non-human organism, as compared to a corresponding non-transformed wild type non-human organism, is conferred in the process of the invention, if the activity of a polypeptide showing the activity of a colanic acid biosynthesis protein, or if the activity of the polypeptide B2043, preferably represented by SEQ ID NO. 112194, or a homolog or fragment thereof, or if the activity of a polypeptide encoded by a nucleic acid molecule comprising the nucleic acid SEQ ID NO. 112193, preferably the coding region thereof, or a homolog or fragment thereof, e.g. derived from Escherichia coli, is increased or generated. For example the activity of a nucleic acid molecule or a polypeptide comprising the nucleic acid, preferably the coding region thereof, or polypeptide or the consensus sequence or the polypeptide motif, as depicted in Table I, II or IV, application No. 17, column 5 or 8 in the respective same line as the nucleic acid molecule SEQ ID NO. 112193 or polypeptide SEQ ID NO. 112194, respectively, or a homolog or a fragment thereof, is increased or generated, or if the activity colanic acid biosynthesis protein is increased or generated in a non-human organism, like a microorganism or a plant cell, plant or part thereof, especially with non-targeted localization, whereby the respective line disclose in column 7 the fine chemical glucose-1-phosphate. For example, an increase of the glucose-1-phosphate of at least 1-percent, particularly in a range of 18 to 35-percent is conferred as compared to a corresponding non-transformed wild type non-human organism.

[88248] Accordingly, in one embodiment, an increase of fucose in a non-human organism, as compared to a corresponding non-transformed wild type non-human organism, is conferred in the process of the invention, if the activity of a polypeptide showing the activity of a GDP-mannose 4,6-dehydratase, or if the activity of the polypeptide B2053, preferably represented by SEQ ID NO. 104278, or a homolog or fragment thereof, or if the activity of a polypeptide encoded by a nucleic acid molecule comprising the nucleic acid SEQ ID NO. 104277, preferably the coding region thereof, or a homolog or fragment thereof, e.g. derived from Escherichia coli, is increased or generated. For example the activity of a nucleic acid molecule or a polypeptide comprising the nucleic acid, preferably the coding region thereof, or polypeptide or the consensus sequence or the polypeptide motif, as depicted in Table I, II or IV, application No. 17, column 5 or 8 in the respective same line as the nucleic acid molecule SEQ ID NO. 104277 or polypeptide SEQ ID NO. 104278, respectively, or a homolog or a fragment thereof, is increased or generated, or if the activity GDP-mannose 4,6-dehydratase is increased or generated in a non-human organism, like a microorganism or a plant cell, plant or part thereof, especially with non-targeted localization, whereby the respective line disclose in column 7 the fine chemical fucose. For example, an increase of the fucose of at least 1 percent, particularly in a range of 1022 to 6264-percent is conferred as compared to a corresponding non-transformed wild type non-human organism.

[88249] Accordingly, in one embodiment, an increase of fructose in a non-human organism, as compared to a corresponding non-transformed wild type non-human organism, is conferred in the process of the invention, if the activity of a polypeptide showing the activity of a transport protein, or if the activity of the polypeptide B2063, preferably represented by SEQ ID NO. 38948, or a homolog or fragment thereof, or if the activity of a polypeptide encoded by a nucleic acid molecule comprising the nucleic acid SEQ ID NO. 38947, preferably the coding region thereof, or a homolog or fragment thereof, e.g. derived from Escherichia coli, is increased or generated. For example the activity of a nucleic acid molecule or a polypeptide comprising the nucleic acid, preferably the coding region thereof, or polypeptide or the consensus sequence or the polypeptide motif, as depicted in Table I, II or IV, application No. 17, column 5 or 8 in the respective same line as the nucleic acid molecule SEQ ID NO. 38947 or polypeptide SEQ ID NO. 38948, respectively, or a homolog or a fragment thereof, is increased or generated, or if the activity transport protein is increased or generated in a non-human organism, like a microorganism or a plant cell, plant or part thereof, especially with non-targeted localization, whereby the respective line disclose in column 7 the fine chemical fructose. For example, an increase of the fructose of at least 1 percent, particularly in a range of 78 to 1849-percent is conferred as compared to a corresponding non-transformed wild type non-human organism.

[88250] Accordingly, in one embodiment, an increase of glucose-1-phosphate in a non-human organism, as compared to a corresponding non-transformed wild type non-human organism, is conferred in the process of the invention, if the activity of a polypeptide showing the activity of a transport protein, or if the activity of the polypeptide B2063, preferably represented by SEQ ID NO. 38948, or a homolog or fragment thereof, or if the activity of a polypeptide encoded by a nucleic acid molecule comprising the nucleic acid SEQ ID NO. 38947, preferably the coding region thereof, or a homolog or fragment thereof, e.g. derived from Escherichia coli, is increased or generated. For example the activity of a nucleic acid molecule or a polypeptide comprising the nucleic acid, preferably the coding region thereof, or polypeptide or the consensus sequence or the polypeptide motif, as depicted in Table I, II or IV, application No. 17, column 5 or 8 in the respective same line as the nucleic acid molecule SEQ ID NO. 38947 or polypeptide SEQ ID NO. 38948, respectively, or a homolog or a fragment thereof, is increased or generated, or if the activity transport protein is increased or generated in a non-human organism, like a microorganism or a plant cell, plant or part thereof, especially with non-targeted localization, whereby the respective line disclose in column 7 the fine chemical glucose-1-phosphate. For example, an increase of the glucose-1-phosphate of at least 1 percent, particularly in a range of 32 to 87-percent is conferred as compared to a corresponding non-transformed wild type non-human organism.

[88251] Accordingly, in one embodiment, an increase of raffinose in a non-human organism, as compared to a corresponding non-transformed wild type non-human organism, is conferred in the process of the invention, if the activity of a polypeptide showing the activity of a transport protein, or if the activity of the polypeptide B2063, preferably represented by SEQ ID NO. 38948, or a homolog or fragment thereof, or if the activity of a polypeptide encoded by a nucleic acid molecule comprising the nucleic acid SEQ ID NO. 38947, preferably the coding region thereof, or a homolog or fragment thereof, e.g. derived from Escherichia coli, is increased or generated.

[88252] For example the activity of a nucleic acid molecule or a polypeptide comprising the nucleic acid, preferably the coding region thereof, or polypeptide or the consensus sequence or the polypeptide motif, as depicted in Table I, II or IV, application No. 17, column 5 or 8 in the respective same line as the nucleic acid molecule SEQ ID NO. 38947 or polypeptide SEQ ID NO. 38948, respectively, or a homolog or a fragment thereof, is increased or generated, or if the activity transport protein is increased or generated in a non-human organism, like a microorganism or a plant cell, plant or part thereof, especially with non-targeted localization, whereby the respective line disclose in column 7 the fine chemical raffinose. For example, an increase of the raffinose of at least 1 percent, particularly in a range of 59 to 242-percent is conferred as compared to a corresponding non-transformed wild type non-human organism.

[88253] Accordingly, in one embodiment, an increase of sucrose in a non-human organism, as compared to a corresponding non-transformed wild type non-human organism, is conferred in the process of the invention, if the activity of a polypeptide showing the activity of a transport protein, or if the activity of the polypeptide B2063, preferably represented by SEQ ID NO. 38948, or a homolog or fragment thereof, or if the activity of a polypeptide encoded by a nucleic acid molecule comprising the nucleic acid SEQ ID NO. 38947, preferably the coding region thereof, or a homolog or fragment thereof, e.g. derived from Escherichia coli, is increased or generated. For example the activity of a nucleic acid molecule or a polypeptide comprising the nucleic acid, preferably the coding region thereof, or polypeptide or the consensus sequence or the polypeptide motif, as depicted in Table I, II or IV, application No. 17, column 5 or 8 in the respective same line as the nucleic acid molecule SEQ ID NO. 38947 or polypeptide SEQ ID NO. 38948, respectively, or a homolog or a fragment thereof, is increased or generated, or if the activity transport protein is increased or generated in a non-human organism, like a microorganism or a plant cell, plant or part thereof, especially with non-targeted localization, whereby the respective line disclose in column 7 the fine chemical sucrose. For example, an increase of the sucrose of at least 1 percent, particularly in a range of 24 to 87-percent is conferred as compared to a corresponding non-transformed wild type non-human organism.

[88254] Accordingly, in one embodiment, an increase of 3,4,5-trihydroxypentanoic acid in a non-human organism, as compared to a corresponding non-transformed wild type non-human organism, is conferred in the process of the invention, if the activity of a polypeptide showing the activity of a transport protein, or if the activity of the polypeptide B2063, preferably represented by SEQ ID NO. 38948, or a homolog or fragment thereof, or if the activity of a polypeptide encoded by a nucleic acid molecule comprising the nucleic acid SEQ ID NO. 38947, preferably the coding region thereof, or a homolog or fragment thereof, e.g. derived from Escherichia coli, is increased or generated. For example the activity of a nucleic acid molecule or a polypeptide comprising the nucleic acid, preferably the coding region thereof, or polypeptide or the consensus sequence or the polypeptide motif, as depicted in Table I, II or IV, application No. 17, column 5 or 8 in the respective same line as the nucleic acid molecule SEQ ID NO. 38947 or polypeptide SEQ ID NO. 38948, respectively, or a homolog or a fragment thereof, is increased or generated, or if the activity transport protein is increased or generated in a non-human organism, like a microorganism or a plant cell, plant or part thereof, especially with non-targeted localization, whereby the respective line disclose in column 7 the fine chemical 3,4,5-trihydroxypentanoic acid. For example, an increase of the 3,4,5-trihydroxypentanoic acid of at least 1 percent, particularly in a range of 37 to 111-percent is conferred as compared to a corresponding non-transformed wild type non-human organism.

[88255] Accordingly, in one embodiment, an increase of glucose-1-phosphate in a non-human organism, as compared to a corresponding non-transformed wild type non-human organism, is conferred in the process of the invention, if the activity of a polypeptide showing the activity of a b2107-protein, or if the activity of the polypeptide B2107, preferably represented by SEQ ID NO. 39003, or a homolog or fragment thereof, or if the activity of a polypeptide encoded by a nucleic acid molecule comprising the nucleic acid SEQ ID NO. 39002, preferably the coding region thereof, or a homolog or fragment thereof, e.g. derived from Escherichia coli, is increased or generated. For example the activity of a nucleic acid molecule or a polypeptide comprising the nucleic acid, preferably the coding region thereof, or polypeptide or the consensus sequence or the polypeptide motif, as depicted in Table I, II or IV, application No. 17, column 5 or 8 in the respective same line as the nucleic acid molecule SEQ ID NO. 39002 or polypeptide SEQ ID NO. 39003, respectively, or a homolog or a fragment thereof, is increased or generated, or if the activity b2107-protein is increased or generated in a non-human organism, like a microorganism or a plant cell, plant or part thereof, especially with non-targeted localization, whereby the respective line disclose in column 7 the fine chemical glucose-1-phosphate. For example, an increase of the glucose-1-phosphate of at least 1 percent, particularly in a range of 37 to 71-percent is conferred as compared to a corresponding non-transformed wild type non-human organism.

[88256] Accordingly, in one embodiment, an increase of 3,4,5-trihydroxypentanoic acid in a non-human organism, as compared to a corresponding non-transformed wild type non-human organism, is conferred in the process of the invention, if the activity of a polypeptide showing the activity of a b2107-protein, or if the activity of the polypeptide B2107, preferably represented by SEQ ID NO. 39003, or a homolog or fragment thereof, or if the activity of a polypeptide encoded by a nucleic acid molecule comprising the nucleic acid SEQ ID NO. 39002, preferably the coding region thereof, or a homolog or fragment thereof, e.g. derived from Escherichia coli, is increased or generated. For example the activity of a nucleic acid molecule or a polypeptide comprising the nucleic acid, preferably the coding region thereof, or polypeptide or the consensus sequence or the polypeptide motif, as depicted in Table I, II or IV, application No. 17, column 5 or 8 in the respective same line as the nucleic acid molecule SEQ ID NO. 39002 or polypeptide SEQ ID NO. 39003, respectively, or a homolog or a fragment thereof, is increased or generated, or if the activity b2107-protein is increased or generated in a non-human organism, like a microorganism or a plant cell, plant or part thereof, especially with non-targeted localization, whereby the respective line disclose in column 7 the fine chemical 3,4,5-trihydroxypentanoic acid. For example, an increase of the 3,4,5-trihydroxypentanoic acid of at least 1 percent, particularly in a range of 39 to 94-percent is conferred as compared to a corresponding non-transformed wild type non-human organism.

[88257] Accordingly, in one embodiment, an increase of glucose-1-phosphate in a non-human organism, as compared to a corresponding non-transformed wild type non-human organism, is conferred in the process of the invention, if the activity of a polypeptide showing the activity of a b2139-protein, or if the activity of the polypeptide B2139, preferably represented by SEQ ID NO. 125086, or a homolog or fragment thereof, or if the activity of a polypeptide encoded by a nucleic acid molecule comprising the nucleic acid SEQ ID NO. 125085, preferably the coding region thereof, or a homolog or fragment thereof, e.g. derived from Escherichia coli, is increased or generated. For example the activity of a nucleic acid molecule or a polypeptide comprising the nucleic acid, preferably the coding region thereof, or polypeptide or the consensus sequence or the polypeptide motif, as depicted in Table I, II or IV, application No. 17, column 5 or 8 in the respective same line as the nucleic acid molecule SEQ ID NO. 125085 or polypeptide SEQ ID NO. 125086, respectively, or a homolog or a fragment thereof, is increased or generated, or if the activity b2139-protein is increased or generated in a non-human organism, like a microorganism or a plant cell, plant or part thereof, especially with plastidic localization, whereby the respective line disclose in column 7 the fine chemical glucose-1-phosphate. For example, an increase of the glucose-1-phosphate of at least 1 percent, particularly in a range of 32 to 44-percent is conferred as compared to a corresponding non-transformed wild type non-human organism.

[88258] Accordingly, in one embodiment, an increase of erythrol in a non-human organism, as compared to a corresponding non-transformed wild type non-human organism, is conferred in the process of the invention, if the activity of a polypeptide showing the activity of a sn-glycerol-3-phosphate dehydrogenase, or if the activity of the polypeptide B2242, preferably represented by SEQ ID NO. 79280, or a homolog or fragment thereof, or if the activity of a polypeptide encoded by a nucleic acid molecule comprising the nucleic acid SEQ ID NO. 79279, preferably the coding region thereof, or a homolog or fragment thereof, e.g. derived from Escherichia coli, is increased or generated. For example the activity of a nucleic acid molecule or a polypeptide comprising the nucleic acid, preferably the coding region thereof, or polypeptide or the consensus sequence or the polypeptide motif, as depicted in Table I, II or IV, application No. 17, column 5 or 8 in the respective same line as the nucleic acid molecule SEQ ID NO. 79279 or polypeptide SEQ ID NO. 79280, respectively, or a homolog or a fragment thereof, is increased or generated, or if the activity sn-glycerol-3-phosphate dehydrogenase is increased or generated in a non-human organism, like a microorganism or a plant cell, plant or part thereof, especially with plastidic localization, whereby the respective line disclose in column 7 the fine chemical erythrol. For example, an increase of the erythrol of at least 1 percent, particularly in a range of 244 to 808-percent is conferred as compared to a corresponding non-transformed wild type non-human organism.

[88259] Accordingly, in one embodiment, an increase of fructose in a non-human organism, as compared to a corresponding non-transformed wild type non-human organism, is conferred in the process of the invention, if the activity of a polypeptide showing the activity of a ATP synthase subunit E, or if the activity of the polypeptide B2285, preferably represented by SEQ ID NO. 99621, or a homolog or fragment thereof, or if the activity of a polypeptide encoded by a nucleic acid molecule comprising the nucleic acid SEQ ID NO. 99620, preferably the coding region thereof, or a homolog or fragment thereof, e.g. derived from Escherichia coli, is increased or generated. For example the activity of a nucleic acid molecule or a polypeptide comprising the nucleic acid, preferably the coding region thereof, or polypeptide or the consensus sequence or the polypeptide motif, as depicted in Table I, II or IV, application No. 17, column 5 or 8 in the respective same line as the nucleic acid molecule SEQ ID NO. 99620 or polypeptide SEQ ID NO. 99621, respectively, or a homolog or a fragment thereof, is increased or generated, or if the activity ATP synthase subunit E is increased or generated in a non-human organism, like a microorganism or a plant cell, plant or part thereof, especially with non-targeted localization, whereby the respective line disclose in column 7 the fine chemical fructose. For example, an increase of the fructose of at least 1 percent, particularly in a range of 26 to 113-percent is conferred as compared to a corresponding non-transformed wild type non-human organism.

[88260] Accordingly, in one embodiment, an increase of galactinol in a non-human organism, as compared to a corresponding non-transformed wild type non-human organism, is conferred in the process of the invention, if the activity of a polypeptide showing the activity of a aminotransferase, or if the activity of the polypeptide B2290, preferably represented by SEQ ID NO. 145693, or a homolog or fragment thereof, or if the activity of a polypeptide encoded by a nucleic acid molecule comprising the nucleic acid SEQ ID NO. 145692, preferably the coding region thereof, or a homolog or fragment thereof, e.g. derived from Escherichia coli, is increased or generated. For example the activity of a nucleic acid molecule or a polypeptide comprising the nucleic acid, preferably the coding region thereof, or polypeptide or the consensus sequence or the polypeptide motif, as depicted in Table I, II or IV, application No. 17, column 5 or 8 in the respective same line as the nucleic acid molecule SEQ ID NO. 145692 or polypeptide SEQ ID NO. 145693, respectively, or a homolog or a fragment thereof, is increased or generated, or if the activity aminotransferase is increased or generated in a non-human organism, like a microorganism or a plant cell, plant or part thereof, especially with non-targeted localization, whereby the respective line disclose in column 7 the fine chemical galactinol. For example, an increase of the galactinol of at least 1 percent, particularly in a range of 54 to 149-percent is conferred as compared to a corresponding non-transformed wild type non-human organism.

[88261] Accordingly, in one embodiment, an increase of myo-inositol in a non-human organism, as compared to a corresponding non-transformed wild type non-human organism, is conferred in the process of the invention, if the activity of a polypeptide showing the activity of a b2345-protein, or if the activity of the polypeptide B2345, preferably represented by SEQ ID NO. 9157, or a homolog or fragment thereof, or if the activity of a polypeptide encoded by a nucleic acid molecule comprising the nucleic acid SEQ ID NO. 9156, preferably the coding region thereof, or a homolog or fragment thereof, e.g. derived from Escherichia coli, is increased or generated. For example the activity of a nucleic acid molecule or a polypeptide comprising the nucleic acid, preferably the coding region thereof, or polypeptide or the consensus sequence or the polypeptide motif, as depicted in Table I, II or IV, application No. 17, column 5 or 8 in the respective same line as the nucleic acid molecule SEQ ID NO. 9156 or polypeptide SEQ ID NO. 9157, respectively, or a homolog or a fragment thereof, is increased or generated, or if the activity b2345-protein is increased or generated in a non-human organism, like a microorganism or a plant cell, plant or part thereof, especially with non-targeted localization, whereby the respective line disclose in column 7 the fine chemical myo-inositol. For example, an increase of the myo-inositol of at least 1 percent, particularly in a range of 25 to 60-percent is conferred as compared to a corresponding non-transformed wild type non-human organism.

[88262] Accordingly, in one embodiment, an increase of 3,4,5-trihydroxypentanoic acid in a non-human organism, as compared to a corresponding non-transformed wild type non-human organism, is conferred in the process of the invention, if the activity of a polypeptide showing the activity of a b2345-protein, or if the activity of the polypeptide B2345, preferably represented by SEQ ID NO. 9157, or a homolog or fragment thereof, or if the activity of a polypeptide encoded by a nucleic acid molecule comprising the nucleic acid SEQ ID NO. 9156, preferably the coding region thereof, or a homolog or fragment thereof, e.g. derived from Escherichia coli, is increased or generated. For example the activity of a nucleic acid molecule or a polypeptide comprising the nucleic acid, preferably the coding region thereof, or polypeptide or the consensus sequence or the polypeptide motif, as depicted in Table I, II or IV, application No. 17, column 5 or 8 in the respective same line as the nucleic acid molecule SEQ ID NO. 9156 or polypeptide SEQ ID NO. 9157, respectively, or a homolog or a fragment thereof, is increased or generated, or if the activity b2345-protein is increased or generated in a non-human organism, like a microorganism or a plant cell, plant or part thereof, especially with non-targeted localization, whereby the respective line disclose in column 7 the fine chemical 3,4,5-trihydroxypentanoic acid. For example, an increase of the 3,4,5-trihydroxypentanoic acid of at least 1 percent, particularly in a range of 41 to 68-percent is conferred as compared to a corresponding non-transformed wild type non-human organism.

[88263] Accordingly, in one embodiment, an increase of verbascose in a non-human organism, as compared to a corresponding non-transformed wild type non-human organism, is conferred in the process of the invention, if the activity of a polypeptide showing the activity of a b2360-protein, or if the activity of the polypeptide B2360, preferably represented by SEQ ID NO. 39220, or a homolog or fragment thereof, or if the activity of a polypeptide encoded by a nucleic acid molecule comprising the nucleic acid SEQ ID NO. 39219, preferably the coding region thereof, or a homolog or fragment thereof, e.g. derived from Escherichia coli, is increased or generated. For example the activity of a nucleic acid molecule or a polypeptide comprising the nucleic acid, preferably the coding region thereof, or polypeptide or the consensus sequence or the polypeptide motif, as depicted in Table I, II or IV, application No. 17, column 5 or 8 in the respective same line as the nucleic acid molecule SEQ ID NO. 39219 or polypeptide SEQ ID NO. 39220, respectively, or a homolog or a fragment thereof, is increased or generated, or if the activity b2360-protein is increased or generated in a non-human organism, like a microorganism or a plant cell, plant or part thereof, especially with non-targeted localization, whereby the respective line disclose in column 7 the fine chemical verbascose. For example, an increase of the verbascose of at least 1 percent, particularly in a range of 67 to 1435-percent is conferred as compared to a corresponding non-transformed wild type non-human organism.

[88264] Accordingly, in one embodiment, an increase of 3,4,5-trihydroxypentanoic acid in a non-human organism, as compared to a corresponding non-transformed wild type non-human organism, is conferred in the process of the invention, if the activity of a polypeptide showing the activity of a b2360-protein, or if the activity of the polypeptide B2360, preferably represented by SEQ ID NO. 39220, or a homolog or fragment thereof, or if the activity of a polypeptide encoded by a nucleic acid molecule comprising the nucleic acid SEQ ID NO. 39219, preferably the coding region thereof, or a homolog or fragment thereof, e.g. derived from Escherichia coli, is increased or generated. For example the activity of a nucleic acid molecule or a polypeptide comprising the nucleic acid, preferably the coding region thereof, or polypeptide or the consensus sequence or the polypeptide motif, as depicted in Table I, II or IV, application No. 17, column 5 or 8 in the respective same line as the nucleic acid molecule SEQ ID NO. 39219 or polypeptide SEQ ID NO. 39220, respectively, or a homolog or a fragment thereof, is increased or generated, or if the activity b2360-protein is increased or generated in a non-human organism, like a microorganism or a plant cell, plant or part thereof, especially with non-targeted localization, whereby the respective line disclose in column 7 the fine chemical 3,4,5-trihydroxypentanoic acid. For example, an increase of the 3,4,5-trihydroxypentanoic acid of at least 1 percent, particularly in a range of 38 to 65-percent is conferred as compared to a corresponding non-transformed wild type non-human organism.

[88265] Accordingly, in one embodiment, an increase of glucose-1-phosphate in a non-human organism, as compared to a corresponding non-transformed wild type non-human organism, is conferred in the process of the invention, if the activity of a polypeptide showing the activity of a b2361-protein, or if the activity of the polypeptide B2361, preferably represented by SEQ ID NO. 146205, or a homolog or fragment thereof, or if the activity of a polypeptide encoded by a nucleic acid molecule comprising the nucleic acid SEQ ID NO. 146204, preferably the coding region thereof, or a homolog or fragment thereof, e.g. derived from Escherichia coli, is increased or generated. For example the activity of a nucleic acid molecule or a polypeptide comprising the nucleic acid, preferably the coding region thereof, or polypeptide or the consensus sequence or the polypeptide motif, as depicted in Table I, II or IV, application No. 17, column 5 or 8 in the respective same line as the nucleic acid molecule SEQ ID NO. 146204 or polypeptide SEQ ID NO. 146205, respectively, or a homolog or a fragment thereof, is increased or generated, or if the activity b2361-protein is increased or generated in a non-human organism, like a microorganism or a plant cell, plant or part thereof, especially with non-targeted localization, whereby the respective line disclose in column 7 the fine chemical glucose-1-phosphate. For example, an increase of the glucose-1-phosphate of at least 1 percent, particularly in a range of 31 to 46-percent is conferred as compared to a corresponding non-transformed wild type non-human organism.

[88266] Accordingly, in one embodiment, an increase of 3,4,5-trihydroxypentanoic acid in a non-human organism, as compared to a corresponding non-transformed wild type non-human organism, is conferred in the process of the invention, if the activity of a polypeptide showing the activity of a B2361-protein, or if the activity of the polypeptide B2361, preferably represented by SEQ ID NO. 146205, or a homolog or fragment thereof, or if the activity of a polypeptide encoded by a nucleic acid molecule comprising the nucleic acid SEQ ID NO. 146204, preferably the coding region thereof, or a homolog or fragment thereof, e.g. derived from Escherichia coli, is increased or generated. For example the activity of a nucleic acid molecule or a polypeptide comprising the nucleic acid, preferably the coding region thereof, or polypeptide or the consensus sequence or the polypeptide motif, as depicted in Table I, II or IV, application No. 17, column 5 or 8 in the respective same line as the nucleic acid molecule SEQ ID NO. 146204 or polypeptide SEQ ID NO. 146205, respectively, or a homolog or a fragment thereof, is increased or generated, or if the activity b2361-protein is increased or generated in a non-human organism, like a microorganism or a plant cell, plant or part thereof, especially with non-targeted localization, whereby the respective line disclose in column 7 the fine chemical 3,4,5-trihydroxypentanoic acid. For example, an increase of the 3,4,5-trihydroxypentanoic acid of at least 1 percent, particularly in a range of 33 to 79-percent is conferred as compared to a corresponding non-transformed wild type non-human organism.

[88267] Accordingly, in one embodiment, an increase of sucrose in a non-human organism, as compared to a corresponding non-transformed wild type non-human organism, is conferred in the process of the invention, if the activity of a polypeptide showing the activity of a ion-transport protein, or if the activity of the polypeptide B2389, preferably represented by SEQ ID NO. 146239, or a homolog or fragment thereof, or if the activity of a polypeptide encoded by a nucleic acid molecule comprising the nucleic acid SEQ ID NO. 146238, preferably the coding region thereof, or a homolog or fragment thereof, e.g. derived from Escherichia coli, is increased or generated. For example the activity of a nucleic acid molecule or a polypeptide comprising the nucleic acid, preferably the coding region thereof, or polypeptide or the consensus sequence or the polypeptide motif, as depicted in Table I, II or IV, application No. 17, column 5 or 8 in the respective same line as the nucleic acid molecule SEQ ID NO. 146238 or polypeptide SEQ ID NO. 146239, respectively, or a homolog or a fragment thereof, is increased or generated, or if the activity ion-transport protein is increased or generated in a non-human organism, like a microorganism or a plant cell, plant or part thereof, especially with non-targeted localization, whereby the respective line disclose in column 7 the fine chemical sucrose. For example, an increase of the sucrose of at least 1 percent, particularly in a range of 32 to 83-percent is conferred as compared to a corresponding non-transformed wild type non-human organism.

[88268] Accordingly, in one embodiment, an increase of fructose in a non-human organism, as compared to a corresponding non-transformed wild type non-human organism, is conferred in the process of the invention, if the activity of a polypeptide showing the activity of a b2399-protein, or if the activity of the polypeptide B2399, preferably represented by SEQ ID NO. 39238, or a homolog or fragment thereof, or if the activity of a polypeptide encoded by a nucleic acid molecule comprising the nucleic acid SEQ ID NO. 39237, preferably the coding region thereof, or a homolog or fragment thereof, e.g. derived from Escherichia coli, is increased or generated. For example the activity of a nucleic acid molecule or a polypeptide comprising the nucleic acid, preferably the coding region thereof, or polypeptide or the consensus sequence or the polypeptide motif, as depicted in Table I, II or IV, application No. 17, column 5 or 8 in the respective same line as the nucleic acid molecule SEQ ID NO. 39237 or polypeptide SEQ ID NO. 39238, respectively, or a homolog or a fragment thereof, is increased or generated, or if the activity b2399-protein is increased or generated in a non-human organism, like a microorganism or a plant cell, plant or part thereof, especially with non-targeted localization, whereby the respective line disclose in column 7 the fine chemical fructose. For example, an increase of the fructose of at least 1 percent, particularly in a range of 147 to 1537-percent is conferred as compared to a corresponding non-transformed wild type non-human organism.

[88269] Accordingly, in one embodiment, an increase of glucose in a non-human organism, as compared to a corresponding non-transformed wild type non-human organism, is conferred in the process of the invention, if the activity of a polypeptide showing the activity of a b2399-protein, or if the activity of the polypeptide B2399, preferably represented by SEQ ID NO. 39238, or a homolog or fragment thereof, or if the activity of a polypeptide encoded by a nucleic acid molecule comprising the nucleic acid SEQ ID NO. 39237, preferably the coding region thereof, or a homolog or fragment thereof, e.g. derived from Escherichia coli, is increased or generated. For example the activity of a nucleic acid molecule or a polypeptide comprising the nucleic acid, preferably the coding region thereof, or polypeptide or the consensus sequence or the polypeptide motif, as depicted in Table I, II or IV, application No. 17, column 5 or 8 in the respective same line as the nucleic acid molecule SEQ ID NO. 39237 or polypeptide SEQ ID NO. 39238, respectively, or a homolog or a fragment thereof, is increased or generated, or if the activity b2399-protein is increased or generated in a non-human organism, like a microorganism or a plant cell, plant or part thereof, especially with non-targeted localization, whereby the respective line disclose in column 7 the fine chemical glucose. For example, an increase of the glucose of at least 1 percent, particularly in a range of 97 to 2165-percent is conferred as compared to a corresponding non-transformed wild type non-human organism.

[88270] Accordingly, in one embodiment, an increase of glucose-1-phosphate in a non-human organism, as compared to a corresponding non-transformed wild type non-human organism, is conferred in the process of the invention, if the activity of a polypeptide showing the activity of a b2399-protein, or if the activity of the polypeptide B2399, preferably represented by SEQ ID NO. 39238, or a homolog or fragment thereof, or if the activity of a polypeptide encoded by a nucleic acid molecule comprising the nucleic acid SEQ ID NO. 39237, preferably the coding region thereof, or a homolog or fragment thereof, e.g. derived from Escherichia coli, is increased or generated. For example the activity of a nucleic acid molecule or a polypeptide comprising the nucleic acid, preferably the coding region thereof, or polypeptide or the consensus sequence or the polypeptide motif, as depicted in Table I, II or IV, application No. 17, column 5 or 8 in the respective same line as the nucleic acid molecule SEQ ID NO. 39237 or polypeptide SEQ ID NO. 39238, respectively, or a homolog or a fragment thereof, is increased or generated, or if the activity b2399-protein is increased or generated in a non-human organism, like a microorganism or a plant cell, plant or part thereof, especially with non-targeted localization, whereby the respective line disclose in column 7 the fine chemical glucose-1-phosphate. For example, an increase of the glucose-1-phosphate of at least 1 percent, particularly in a range of 68 to 231-percent is conferred as compared to a corresponding non-transformed wild type non-human organism.

[88271] Accordingly, in one embodiment, an increase of myo-inositol in a non-human organism, as compared to a corresponding non-transformed wild type non-human organism, is conferred in the process of the invention, if the activity of a polypeptide showing the activity of a b2399-protein, or if the activity of the polypeptide B2399, preferably represented by SEQ ID NO. 39238, or a homolog or fragment thereof, or if the activity of a polypeptide encoded by a nucleic acid molecule comprising the nucleic acid SEQ ID NO. 39237, preferably the coding region thereof, or a homolog or fragment thereof, e.g. derived from Escherichia coli, is increased or generated. For example the activity of a nucleic acid molecule or a polypeptide comprising the nucleic acid, preferably the coding region thereof, or polypeptide or the consensus sequence or the polypeptide motif, as depicted in Table I, II or IV, application No. 17, column 5 or 8 in the respective same line as the nucleic acid molecule SEQ ID NO. 39237 or polypeptide SEQ ID NO. 39238, respectively, or a homolog or a fragment thereof, is increased or generated, or if the activity b2399-protein is increased or generated in a non-human organism, like a microorganism or a plant cell, plant or part thereof, especially with non-targeted localization, whereby the respective line disclose in column 7 the fine chemical myo-inositol. For example, an increase of the myo-inositol of at least 1 percent, particularly in a range of 33 to 1261-percent is conferred as compared to a corresponding non-transformed wild type non-human organism.

[88272] Accordingly, in one embodiment, an increase of raffinose in a non-human organism, as compared to a corresponding non-transformed wild type non-human organism, is conferred in the process of the invention, if the activity of a polypeptide showing the activity of a b2399-protein, or if the activity of the polypeptide B2399, preferably represented by SEQ ID NO. 39238, or a homolog or fragment thereof, or if the activity of a polypeptide encoded by a nucleic acid molecule comprising the nucleic acid SEQ ID NO. 39237, preferably the coding region thereof, or a homolog or fragment thereof, e.g. derived from Escherichia coli, is increased or generated. For example the activity of a nucleic acid molecule or a polypeptide comprising the nucleic acid, preferably the coding region thereof, or polypeptide or the consensus sequence or the polypeptide motif, as depicted in Table I, II or IV, application No. 17, column 5 or 8 in the respective same line as the nucleic acid molecule SEQ ID NO. 39237 or polypeptide SEQ ID NO. 39238, respectively, or a homolog or a fragment thereof, is increased or generated, or if the activity b2399-protein is increased or generated in a non-human organism, like a microorganism or a plant cell, plant or part thereof, especially with non-targeted localization, whereby the respective line disclose in column 7 the fine chemical raffinose. For example, an increase of the raffinose of at least 1 percent, particularly in a range of 862 to 3481-percent is conferred as compared to a corresponding non-transformed wild type non-human organism.

[88273] Accordingly, in one embodiment, an increase of sedoheptulose-7-phosphate in a non-human organism, as compared to a corresponding non-transformed wild type non-human organism, is conferred in the process of the invention, if the activity of a polypeptide showing the activity of a b2399-protein, or if the activity of the polypeptide B2399, preferably represented by SEQ ID NO. 39238, or a homolog or fragment thereof, or if the activity of a polypeptide encoded by a nucleic acid molecule comprising the nucleic acid SEQ ID NO. 39237, preferably the coding region thereof, or a homolog or fragment thereof, e.g. derived from Escherichia coli, is increased or generated. For example the activity of a nucleic acid molecule or a polypeptide comprising the nucleic acid, preferably the coding region thereof, or polypeptide or the consensus sequence or the polypeptide motif, as depicted in Table I, II or IV, application No. 17, column 5 or 8 in the respective same line as the nucleic acid molecule SEQ ID NO. 39237 or polypeptide SEQ ID NO. 39238, respectively, or a homolog or a fragment thereof, is increased or generated, or if the activity b2399-protein is increased or generated in a non-human organism, like a microorganism or a plant cell, plant or part thereof, especially with non-targeted localization, whereby the respective line disclose in column 7 the fine chemical sedoheptulose-7-phosphate. For example, an increase of the sedoheptulose-7-phosphate of at least 1 percent, particularly in a range of 51 to 583-percent is conferred as compared to a corresponding non-transformed wild type non-human organism.

[88274] Accordingly, in one embodiment, an increase of sucrose in a non-human organism, as compared to a corresponding non-transformed wild type non-human organism, is conferred in the process of the invention, if the activity of a polypeptide showing the activity of a b2399-protein, or if the activity of the polypeptide B2399, preferably represented by SEQ ID NO. 39238, or a homolog or fragment thereof, or if the activity of a polypeptide encoded by a nucleic acid molecule comprising the nucleic acid SEQ ID NO. 39237, preferably the coding region thereof, or a homolog or fragment thereof, e.g. derived from Escherichia coli, is increased or generated. For example the activity of a nucleic acid molecule or a polypeptide comprising the nucleic acid, preferably the coding region thereof, or polypeptide or the consensus sequence or the polypeptide motif, as depicted in Table I, II or IV, application No. 17, column 5 or 8 in the respective same line as the nucleic acid molecule SEQ ID NO. 39237 or polypeptide SEQ ID NO. 39238, respectively, or a homolog or a fragment thereof, is increased or generated, or if the activity b2399-protein is increased or generated in a non-human organism, like a microorganism or a plant cell, plant or part thereof, especially with non-targeted localization, whereby the respective line disclose in column 7 the fine chemical sucrose. For example, an increase of the sucrose of at least 1 percent, particularly in a range of 26 to 131-percent is conferred as compared to a corresponding non-transformed wild type non-human organism.

[88275] Accordingly, in one embodiment, an increase of fructose in a non-human organism, as compared to a corresponding non-transformed wild type non-human organism, is conferred in the process of the invention, if the activity of a polypeptide showing the activity of a transcriptional regulator, or if the activity of the polypeptide B2405, preferably represented by SEQ ID NO. 39256, or a homolog or fragment thereof, or if the activity of a polypeptide encoded by a nucleic acid molecule comprising the nucleic acid SEQ ID NO. 39255, preferably the coding region thereof, or a homolog or fragment thereof, e.g. derived from Escherichia coli, is increased or generated. For example the activity of a nucleic acid molecule or a polypeptide comprising the nucleic acid, preferably the coding region thereof, or polypeptide or the consensus sequence or the polypeptide motif, as depicted in Table I, II or IV, application No. 17, column 5 or 8 in the respective same line as the nucleic acid molecule SEQ ID NO. 39255 or polypeptide SEQ ID NO. 39256, respectively, or a homolog or a fragment thereof, is increased or generated, or if the activity transcriptional regulator is increased or generated in a non-human organism, like a microorganism or a plant cell, plant or part thereof, especially with non-targeted localization, whereby the respective line disclose in column 7 the fine chemical fructose. For example, an increase of the fructose of at least 1 percent, particularly in a range of 77 to 106-percent is conferred as compared to a corresponding non-transformed wild type non-human organism.

[88276] Accordingly, in one embodiment, an increase of raffinose in a non-human organism, as compared to a corresponding non-transformed wild type non-human organism, is conferred in the process of the invention, if the activity of a polypeptide showing the activity of a transcriptional regulator, or if the activity of the polypeptide B2405, preferably represented by SEQ ID NO. 39256, or a homolog or fragment thereof, or if the activity of a polypeptide encoded by a nucleic acid molecule comprising the nucleic acid SEQ ID NO. 39255, preferably the coding region thereof, or a homolog or fragment thereof, e.g. derived from Escherichia coli, is increased or generated. For example the activity of a nucleic acid molecule or a polypeptide comprising the nucleic acid, preferably the coding region thereof, or polypeptide or the consensus sequence or the polypeptide motif, as depicted in Table I, II or IV, application No. 17, column 5 or 8 in the respective same line as the nucleic acid molecule SEQ ID NO. 39255 or polypeptide SEQ ID NO. 39256, respectively, or a homolog or a fragment thereof, is increased or generated, or if the activity transcriptional regulator is increased or generated in a non-human organism, like a microorganism or a plant cell, plant or part thereof, especially with non-targeted localization, whereby the respective line disclose in column 7 the fine chemical raffinose. For example, an increase of the raffinose of at least 1 percent, particularly in a range of 58 to 61-percent is conferred as compared to a corresponding non-transformed wild type non-human organism.

[88277] Accordingly, in one embodiment, an increase of myo-inositol in a non-human organism, as compared to a corresponding non-transformed wild type non-human organism, is conferred in the process of the invention, if the activity of a polypeptide showing the activity of a cysteine synthase A, or if the activity of the polypeptide B2414, preferably represented by SEQ ID NO. 39301, or a homolog or fragment thereof, or if the activity of a polypeptide encoded by a nucleic acid molecule comprising the nucleic acid SEQ ID NO. 39300, preferably the coding region thereof, or a homolog or fragment thereof, e.g. derived from Escherichia coli, is increased or generated. For example the activity of a nucleic acid molecule or a polypeptide comprising the nucleic acid, preferably the coding region thereof, or polypeptide or the consensus sequence or the polypeptide motif, as depicted in Table I, II or IV, application No. 17, column 5 or 8 in the respective same line as the nucleic acid molecule SEQ ID NO. 39300 or polypeptide SEQ ID NO. 39301, respectively, or a homolog or a fragment thereof, is increased or generated, or if the activity cysteine synthase A is increased or generated in a non-human organism, like a microorganism or a plant cell, plant or part thereof, especially with non-targeted localization, whereby the respective line disclose in column 7 the fine chemical myo-inositol. For example, an increase of the myo-inositol of at least 1 percent, particularly in a range of 26 to 55-percent is conferred as compared to a corresponding non-transformed wild type non-human organism.

[88278] Accordingly, in one embodiment, an increase of verbascose in a non-human organism, as compared to a corresponding non-transformed wild type non-human organism, is conferred in the process of the invention, if the activity of a polypeptide showing the activity of a cysteine synthase A, or if the activity of the polypeptide B2414, preferably represented by SEQ ID NO. 39301, or a homolog or fragment thereof, or if the activity of a polypeptide encoded by a nucleic acid molecule comprising the nucleic acid SEQ ID NO. 39300, preferably the coding region thereof, or a homolog or fragment thereof, e.g. derived from Escherichia coli, is increased or generated. For example the activity of a nucleic acid molecule or a polypeptide comprising the nucleic acid, preferably the coding region thereof, or polypeptide or the consensus sequence or the polypeptide motif, as depicted in Table I, II or IV, application No. 17, column 5 or 8 in the respective same line as the nucleic acid molecule SEQ ID NO. 39300 or polypeptide SEQ ID NO. 39301, respectively, or a homolog or a fragment thereof, is increased or generated, or if the activity cysteine synthase A is increased or generated in a non-human organism, like a microorganism or a plant cell, plant or part thereof, especially with non-targeted localization, whereby the respective line disclose in column 7 the fine chemical verbascose. For example, an increase of the verbascose of at least 1 percent, particularly in a range of 49 to 743-percent is conferred as compared to a corresponding non-transformed wild type non-human organism.

[88279] Accordingly, in one embodiment, an increase of glucose-1-phosphate in a non-human organism, as compared to a corresponding non-transformed wild type non-human organism, is conferred in the process of the invention, if the activity of a polypeptide showing the activity of a b2466-protein, or if the activity of the polypeptide B2466, preferably represented by SEQ ID NO. 146262, or a homolog or fragment thereof, or if the activity of a polypeptide encoded by a nucleic acid molecule comprising the nucleic acid SEQ ID NO. 146261, preferably the coding region thereof, or a homolog or fragment thereof, e.g. derived from Escherichia coli, is increased or generated. For example the activity of a nucleic acid molecule or a polypeptide comprising the nucleic acid, preferably the coding region thereof, or polypeptide or the consensus sequence or the polypeptide motif, as depicted in Table I, II or IV, application No. 17, column 5 or 8 in the respective same line as the nucleic acid molecule SEQ ID NO. 146261 or polypeptide SEQ ID NO. 146262, respectively, or a homolog or a fragment thereof, is increased or generated, or if the activity b2466-protein is increased or generated in a non-human organism, like a microorganism or a plant cell, plant or part thereof, especially with non-targeted localization, whereby the respective line disclose in column 7 the fine chemical glucose-1-phosphate. For example, an increase of the glucose-1-phosphate of at least 1 percent, particularly in a range of 35 to 116-percent is conferred as compared to a corresponding non-transformed wild type non-human organism.

[88280] Accordingly, in one embodiment, an increase of myo-inositol in a non-human organism, as compared to a corresponding non-transformed wild type non-human organism, is conferred in the process of the invention, if the activity of a polypeptide showing the activity of a b2466-protein, or if the activity of the polypeptide B2466, preferably represented by SEQ ID NO. 146262, or a homolog or fragment thereof, or if the activity of a polypeptide encoded by a nucleic acid molecule comprising the nucleic acid SEQ ID NO. 146261, preferably the coding region thereof, or a homolog or fragment thereof, e.g. derived from Escherichia coli, is increased or generated. For example the activity of a nucleic acid molecule or a polypeptide comprising the nucleic acid, preferably the coding region thereof, or polypeptide or the consensus sequence or the polypeptide motif, as depicted in Table I, II or IV, application No. 17, column 5 or 8 in the respective same line as the nucleic acid molecule SEQ ID NO. 146261 or polypeptide SEQ ID NO. 146262, respectively, or a homolog or a fragment thereof, is increased or generated, or if the activity b2466-protein is increased or generated in a non-human organism, like a microorganism or a plant cell, plant or part thereof, especially with non-targeted localization, whereby the respective line disclose in column 7 the fine chemical myo-inositol. For example, an increase of the myo-inositol of at least 1 percent, particularly in a range of 33 to 154-percent is conferred as compared to a corresponding non-transformed wild type non-human organism.

[88281] Accordingly, in one embodiment, an increase of 3,4,5-trihydroxypentanoic acid in a non-human organism, as compared to a corresponding non-transformed wild type non-human organism, is conferred in the process of the invention, if the activity of a polypeptide showing the activity of a b2466-protein, or if the activity of the polypeptide B2466, preferably represented by SEQ ID NO. 146262, or a homolog or fragment thereof, or if the activity of a polypeptide encoded by a nucleic acid molecule comprising the nucleic acid SEQ ID NO. 146261, preferably the coding region thereof, or a homolog or fragment thereof, e.g. derived from Escherichia coli, is increased or generated. For example the activity of a nucleic acid molecule or a polypeptide comprising the nucleic acid, preferably the coding region thereof, or polypeptide or the consensus sequence or the polypeptide motif, as depicted in Table I, II or IV, application No. 17, column 5 or 8 in the respective same line as the nucleic acid molecule SEQ ID NO. 146261 or polypeptide SEQ ID NO. 146262, respectively, or a homolog or a fragment thereof, is increased or generated, or if the activity b2466-protein is increased or generated in a non-human organism, like a microorganism or a plant cell, plant or part thereof, especially with non-targeted localization, whereby the respective line disclose in column 7 the fine chemical 3,4,5-trihydroxypentanoic acid. For example, an increase of the 3,4,5-trihydroxypentanoic acid of at least 1 percent, partitularly in a range of 37 to 62-percent is conferred as compared to a corresponding non-transformed wild type non-human organism.

[88282] Accordingly, in one embodiment, an increase of glucose-1-phosphate in a non-human organism, as compared to a corresponding non-transformed wild type non-human organism, is conferred in the process of the invention, if the activity of a polypeptide showing the activity of a b2474-protein, or if the activity of the polypeptide B2474, preferably represented by SEQ ID NO. 40330, or a homolog or fragment thereof, or if the activity of a polypeptide encoded by a nucleic acid molecule comprising the nucleic acid SEQ ID NO. 40329, preferably the coding region thereof, or a homolog or fragment thereof, e.g. derived from Escherichia coli, is increased or generated. For example the activity of a nucleic acid molecule or a polypeptide comprising the nucleic acid, preferably the coding region thereof, or polypeptide or the consensus sequence or the polypeptide motif, as depicted in Table I, II or IV, application No. 17, column 5 or 8 in the respective same line as the nucleic acid molecule SEQ ID NO. 40329 or polypeptide SEQ ID NO. 40330, respectively, or a homolog or a fragment thereof, is increased or generated, or if the activity b2474-protein is increased or generated in a non-human organism, like a microorganism or a plant cell, plant or part thereof, especially with non-targeted localization, whereby the respective line disclose in column 7 the fine chemical glucose-1-phosphate. For example, an increase of the glucose-1-phosphate of at least 1 percent, particularly in a range of 23 to 57-percent is conferred as compared to a corresponding non-transformed wild type non-human organism.

[88283] Accordingly, in one embodiment, an increase of raffinose in a non-human organism, as compared to a corresponding non-transformed wild type non-human organism, is conferred in the process of the invention, if the activity of a polypeptide showing the activity of a 2,3-dihydroxy-2,3-dihydrophenylpropionatedehydrogenase, or if the activity of the polypeptide B2541, preferably represented by SEQ ID NO. 40384, or a homolog or fragment thereof, or if the activity of a polypeptide encoded by a nucleic acid molecule comprising the nucleic acid SEQ ID NO. 40383, preferably the coding region thereof, or a homolog or fragment thereof, e.g. derived from Escherichia coli, is increased or generated. For example the activity of a nucleic acid molecule or a polypeptide comprising the nucleic acid, preferably the coding region thereof, or polypeptide or the consensus sequence or the polypeptide motif, as depicted in Table I, II or IV, application No. 17, column 5 or 8 in the respective same line as the nucleic acid molecule SEQ ID NO. 40383 or polypeptide SEQ ID NO. 40384, respectively, or a homolog or a fragment thereof, is increased or generated, or if the activity 2,3-dihydroxy-2,3-dihydrophenylpropionatedehydrogenase is increased or generated in a non-human organism, like a microorganism or a plant cell, plant or part thereof, especially with non-targeted localization, whereby the respective line disclose in column 7 the fine chemical raffinose. For example, an increase of the raffinose of at least 1 percent, particularly in a range of 95 to 173-percent is conferred as compared to a corresponding non-transformed wild type non-human organism.

[88284] Accordingly, in one embodiment, an increase of sucrose in a non-human organism, as compared to a corresponding non-transformed wild type non-human organism, is conferred in the process of the invention, if the activity of a polypeptide showing the activity of a putative transport system permease protein, or if the activity of the polypeptide B2546, preferably represented by SEQ ID NO. 99899, or a homolog or fragment thereof, or if the activity of a polypeptide encoded by a nucleic acid molecule comprising the nucleic acid SEQ ID NO. 99898, preferably the coding region thereof, or a homolog or fragment thereof, e.g. derived from Escherichia coli, is increased or generated. For example the activity of a nucleic acid molecule or a polypeptide comprising the nucleic acid, preferably the coding region thereof, or polypeptide or the consensus sequence or the polypeptide motif, as depicted in Table I, II or IV, application No. 17, column 5 or 8 in the respective same line as the nucleic acid molecule SEQ ID NO. 99898 or polypeptide SEQ ID NO. 99899, respectively, or a homolog or a fragment thereof, is increased or generated, or if the activity putative transport system permease protein is increased or generated in a non-human organism, like a microorganism or a plant cell, plant or part thereof, especially with non-targeted localization, whereby the respective line disclose in column 7 the fine chemical sucrose. For example, an increase of the sucrose of at least 1 percent, particularly in a range of 23 to 38-percent is conferred as compared to a corresponding non-transformed wild type non-human organism.

[88285] Accordingly, in one embodiment, an increase of glucose-1-phosphate in a non-human organism, as compared to a corresponding non-transformed wild type non-human organism, is conferred in the process of the invention, if the activity of a polypeptide showing the activity of a b2613-protein, or if the activity of the polypeptide B2613, preferably represented by SEQ ID NO. 40666, or a homolog or fragment thereof, or if the activity of a polypeptide encoded by a nucleic acid molecule comprising the nucleic acid SEQ ID NO. 40665, preferably the coding region thereof, or a homolog or fragment thereof, e.g. derived from Escherichia coli, is increased or generated. For example the activity of a nucleic acid molecule or a polypeptide comprising the nucleic acid, preferably the coding region thereof, or polypeptide or the consensus sequence or the polypeptide motif, as depicted in Table I, II or IV, application No. 17, column 5 or 8 in the respective same line as the nucleic acid molecule SEQ ID NO. 40665 or polypeptide SEQ ID NO. 40666, respectively, or a homolog or a fragment thereof, is increased or generated, or if the activity b2613-protein is increased or generated in a non-human organism, like a microorganism or a plant cell, plant or part thereof, especially with non-targeted localization, whereby the respective line disclose in column 7 the fine chemical glucose-1-phosphate. For example, an increase of the glucose-1-phosphate of at least 1 percent, particularly in a range of 18 to 42-percent is conferred as compared to a corresponding non-transformed wild type non-human organism

[88286] Accordingly, in one embodiment, an increase of myo-inositol in a non-human organism, as compared to a corresponding non-transformed wild type non-human organism, is conferred in the process of the invention, if the activity of a polypeptide showing the activity of a b2613-protein, or if the activity of the polypeptide B2613, preferably represented by SEQ ID NO. 40666, or a homolog or fragment thereof, or if the activity of a polypeptide encoded by a nucleic acid molecule comprising the nucleic acid SEQ ID NO. 40665, preferably the coding region thereof, or a homolog or fragment thereof, e.g. derived from Escherichia coli, is increased or generated. For example the activity of a nucleic acid molecule or a polypeptide comprising the nucleic acid, preferably the coding region thereof, or polypeptide or the consensus sequence or the polypeptide motif, as depicted in Table I, II or IV, application No. 17, column 5 or 8 in the respective same line as the nucleic acid molecule SEQ ID NO. 40665 or polypeptide SEQ ID NO. 40666, respectively, or a homolog or a fragment thereof, is increased or generated, or if the activity b2613-protein is increased or generated in a non-human organism, like a microorganism or a plant cell, plant or part thereof, especially with non-targeted localization, whereby the respective line disclose in column 7 the fine chemical myo-inositol. For example, an increase of the myo-inositol of at least 1 percent, particularly in a range of 26 to 43-percent is conferred as compared to a corresponding non-transformed wild type non-human organism.

[88287] Accordingly, in one embodiment, an increase of fructose in a non-human organism, as compared to a corresponding non-transformed wild type non-human organism, is conferred in the process of the invention, if the activity of a polypeptide showing the activity of a transcriptional regulator, or if the activity of the polypeptide B2634, preferably represented by SEQ ID NO. 40727, or a homolog or fragment thereof, or if the activity of a polypeptide encoded by a nucleic acid molecule comprising the nucleic acid SEQ ID NO. 40726, preferably the coding region thereof, or a homolog or fragment thereof, e.g. derived from Escherichia coli, is increased or generated. For example the activity of a nucleic acid molecule or a polypeptide comprising the nucleic acid, preferably the coding region thereof, or polypeptide or the consensus sequence or the polypeptide motif, as depicted in Table I, II or IV, application No. 17, column 5 or 8 in the respective same line as the nucleic acid molecule SEQ ID NO. 40726 or polypeptide SEQ ID NO. 40727, respectively, or a homolog or a fragment thereof, is increased or generated, or if the activity transcriptional regulator is increased or generated in a non-human organism, like a microorganism or a plant cell, plant or part thereof, especially with non-targeted localization, whereby the respective line disclose in column 7 the fine chemical fructose. For example, an increase of the fructose of at least 1 percent, particularly in a range of 110 to 4796-percent is conferred as compared to a corresponding non-transformed wild type non-human organism.

[88288] Accordingly, in one embodiment, an increase of myo-inositol in a non-human organism, as compared to a corresponding non-transformed wild type non-human organism, is conferred in the process of the invention, if the activity of a polypeptide showing the activity of a transcriptional regulator, or if the activity of the polypeptide B2634, preferably represented by SEQ ID NO. 40727, or a homolog or fragment thereof, or if the activity of a polypeptide encoded by a nucleic acid molecule comprising the nucleic acid SEQ ID NO. 40726, preferably the coding region thereof, or a homolog or fragment thereof, e.g. derived from Escherichia coli, is increased or generated. For example the activity of a nucleic acid molecule or a polypeptide comprising the nucleic acid, preferably the coding region thereof, or polypeptide or the consensus sequence or the polypeptide motif, as depicted in Table I, II or IV, application No. 17, column 5 or 8 in the respective same line as the nucleic acid molecule SEQ ID NO. 40726 or polypeptide SEQ ID NO. 40727, respectively, or a homolog or a fragment thereof, is increased or generated, or if the activity transcriptional regulator is increased or generated in a non-human organism, like a microorganism or a plant cell, plant or part thereof, especially with non-targeted localization, whereby the respective line disclose in column 7 the fine chemical myo-inositol. For example, an increase of the myo-inositol of at least 1 percent, particularly in a range of 27 to 1006-percent is conferred as compared to a corresponding non-transformed wild type non-human organism.

[88289] Accordingly, in one embodiment, an increase of sucrose in a non-human organism, as compared to a corresponding non-transformed wild type non-human organism, is conferred in the process of the invention, if the activity of a polypeptide showing the activity of a transcriptional regulator, or if the activity of the polypeptide B2634, preferably represented by SEQ ID NO. 40727, or a homolog or fragment thereof, or if the activity of a polypeptide encoded by a nucleic acid molecule comprising the nucleic acid SEQ ID NO. 40726, preferably the coding region thereof, or a homolog or fragment thereof, e.g. derived from Escherichia coli, is increased or generated. For example the activity of a nucleic acid molecule or a polypeptide comprising the nucleic acid, preferably the coding region thereof, or polypeptide or the consensus sequence or the polypeptide motif, as depicted in Table I, II or IV, application No. 17, column 5 or 8 in the respective same line as the nucleic acid molecule SEQ ID NO. 40726 or polypeptide SEQ ID NO. 40727, respectively, or a homolog or a fragment thereof, is increased or generated, or if the activity transcriptional regulator is increased or generated in a non-human organism, like a microorganism or a plant cell, plant or part thereof, especially with non-targeted localization, whereby the respective line disclose in column 7 the fine chemical sucrose. For example, an increase of the sucrose of at least 1 percent, particularly in a range of 28 to 696-percent is conferred as compared to a corresponding non-transformed wild type non-human organism.

[88290] Accordingly, in one embodiment, an increase of glucose-1-phosphate in a non-human organism, as compared to a corresponding non-transformed wild type non-human organism, is conferred in the process of the invention, if the activity of a polypeptide showing the activity of a b2653-protein, or if the activity of the polypeptide B2653, preferably represented by SEQ ID NO. 146289, or a homolog or fragment thereof, or if the activity of a polypeptide encoded by a nucleic acid molecule comprising the nucleic acid SEQ ID NO. 146288, preferably the coding region thereof, or a homolog or fragment thereof, e.g. derived from Escherichia coli, is increased or generated. For example the activity of a nucleic acid molecule or a polypeptide comprising the nucleic acid, preferably the coding region thereof, or polypeptide or the consensus sequence or the polypeptide motif, as depicted in Table I, II or IV, application No. 17, column 5 or 8 in the respective same line as the nucleic acid molecule SEQ ID NO. 146288 or polypeptide SEQ ID NO. 146289, respectively, or a homolog or a fragment thereof, is increased or generated, or if the activity b2653-protein is increased or generated in a non-human organism, like a microorganism or a plant cell, plant or part thereof, especially with non-targeted localization, whereby the respective line disclose in column 7 the fine chemical glucose-1-phosphate. For example, an increase of the glucose-1-phosphate of at least 1 percent, particularly in a range of 31 to 45-percent is conferred as compared to a corresponding non-transformed wild type non-human organism.

[88291] Accordingly, in one embodiment, an increase of sedoheptulose-7-phosphate in a non-human organism, as compared to a corresponding non-transformed wild type non-human organism, is conferred in the process of the invention, if the activity of a polypeptide showing the activity of a b2653-protein, or if the activity of the polypeptide B2653, preferably represented by SEQ ID NO. 146289, or a homolog or fragment thereof, or if the activity of a polypeptide encoded by a nucleic acid molecule comprising the nucleic acid SEQ ID NO. 146288, preferably the coding region thereof, or a homolog or fragment thereof, e.g. derived from Escherichia coli, is increased or generated. For example the activity of a nucleic acid molecule or a polypeptide comprising the nucleic acid, preferably the coding region thereof, or polypeptide or the consensus sequence or the polypeptide motif, as depicted in Table I, II or IV, application No. 17, column 5 or 8 in the respective same line as the nucleic acid molecule SEQ ID NO. 146288 or polypeptide SEQ ID NO. 146289, respectively, or a homolog or a fragment thereof, is increased or generated, or if the activity b2653-protein is increased or generated in a non-human organism, like a microorganism or a plant cell, plant or part thereof, especially with non-targeted localization, whereby the respective line disclose in column 7 the fine chemical sedoheptulose-7-phosphate. For example, an increase of the sedoheptulose-7-phosphate of at least 1 percent, particularly in a range of 57 to 70-percent is conferred as compared to a corresponding non-transformed wild type non-human organism.

[88292] Accordingly, in one embodiment, an increase of 3,4,5-trihydroxypentanoic acid in a non-human organism, as compared to a corresponding non-transformed wild type non-human organism, is conferred in the process of the invention, if the activity of a polypeptide showing the activity of a b2653-protein, or if the activity of the polypeptide B2653, preferably represented by SEQ ID NO. 146289, or a homolog or fragment thereof, or if the activity of a polypeptide encoded by a nucleic acid molecule comprising the nucleic acid SEQ ID NO. 146288, preferably the coding region thereof, or a homolog or fragment thereof, e.g. derived from Escherichia coli, is increased or generated. For example the activity of a nucleic acid molecule or a polypeptide comprising the nucleic acid, preferably the coding region thereof, or polypeptide or the consensus sequence or the polypeptide motif, as depicted in Table I, II or IV, application No. 17, column 5 or 8 in the respective same line as the nucleic acid molecule SEQ ID NO. 146288 or polypeptide SEQ ID NO. 146289, respectively, or a homolog or a fragment thereof, is increased or generated, or if the activity b2653-protein is increased or generated in a non-human organism, like a microorganism or a plant cell, plant or part thereof, especially with non-targeted localization, whereby the respective line disclose in column 7 the fine chemical 3,4,5-trihydroxypentanoic acid. For example, an increase of the 3,4,5-trihydroxypentanoic acid of at least 1 percent, particularly in a range of 37 to 69-percent is conferred as compared to a corresponding non-transformed wild type non-human organism.

[88293] Accordingly, in one embodiment, an increase of glucose-1-phosphate in a non-human organism, as compared to a corresponding non-transformed wild type non-human organism, is conferred in the process of the invention, if the activity of a polypeptide showing the activity of a b2654-protein, or if the activity of the polypeptide B2654, preferably represented by SEQ ID NO. 125227, or a homolog or fragment thereof, or if the activity of a polypeptide encoded by a nucleic acid molecule comprising the nucleic acid SEQ ID NO. 125226, preferably the coding region thereof, or a homolog or fragment thereof, e.g. derived from Escherichia coli, is increased or generated. For example the activity of a nucleic acid molecule or a polypeptide comprising the nucleic acid, preferably the coding region thereof, or polypeptide or the consensus sequence or the polypeptide motif, as depicted in Table I, II or IV, application No. 17, column 5 or 8 in the respective same line as the nucleic acid molecule SEQ ID NO. 125226 or polypeptide SEQ ID NO. 125227, respectively, or a homolog or a fragment thereof, is increased or generated, or if the activity b2654-protein is increased or generated in a non-human organism, like a microorganism or a plant cell, plant or part thereof, especially with non-targeted localization, whereby the respective line disclose in column 7 the fine chemical glucose-1-phosphate. For example, an increase of the glucose-1-phosphate of at least 1 percent, particularly in a range of 39 to 54-percent is conferred as compared to a corresponding non-transformed wild type non-human organism.

[88294] Accordingly, in one embodiment, an increase of 3,4,5-trihydroxypentanoic acid in a non-human organism, as compared to a corresponding non-transformed wild type non-human organism, is conferred in the process of the invention, if the activity of a polypeptide showing the activity of a b2654-protein, or if the activity of the polypeptide B2654, preferably represented by SEQ ID NO. 125227, or a homolog or fragment thereof, or if the activity of a polypeptide encoded by a nucleic acid molecule comprising the nucleic acid SEQ ID NO. 125226, preferably the coding region thereof, or a homolog or fragment thereof, e.g. derived from Escherichia coli, is increased or generated. For example the activity of a nucleic acid molecule or a polypeptide comprising the nucleic acid, preferably the coding region thereof, or polypeptide or the consensus sequence or the polypeptide motif, as depicted in Table I, II or IV, application No. 17, column 5 or 8 in the respective same line as the nucleic acid molecule SEQ ID NO. 125226 or polypeptide SEQ ID NO. 125227, respectively, or a homolog or a fragment thereof, is increased or generated, or if the activity b2654-protein is increased or generated in a non-human organism, like a microorganism or a plant cell, plant or part thereof, especially with non-targeted localization, whereby the respective line disclose in column 7 the fine chemical 3,4,5-trihydroxypentanoic acid. For example, an increase of the 3,4,5-trihydroxypentanoic acid of at least 1 percent, particularly in a range of 34 to 70-percent is conferred as compared to a corresponding non-transformed wild type non-human organism.

[88295] Accordingly, in one embodiment, an increase of glucose-1-phosphate in a non-human organism, as compared to a corresponding non-transformed wild type non-human organism, is conferred in the process of the invention, if the activity of a polypeptide showing the activity of a b2670-protein, or if the activity of the polypeptide B2670, preferably represented by SEQ ID NO. 146295, or a homolog or fragment thereof, or if the activity of a polypeptide encoded by a nucleic acid molecule comprising the nucleic acid SEQ ID NO. 146294, preferably the coding region thereof, or a homolog or fragment thereof, e.g. derived from Escherichia coli, is increased or generated. For example the activity of a nucleic acid molecule or a polypeptide comprising the nucleic acid, preferably the coding region thereof, or polypeptide or the consensus sequence or the polypeptide motif, as depicted in Table I, II or IV, application No. 17, column 5 or 8 in the respective same line as the nucleic acid molecule SEQ ID NO. 146294 or polypeptide SEQ ID NO. 146295, respectively, or a homolog or a fragment thereof, is increased or generated, or if the activity b2670-protein is increased or generated in a non-human organism, like a microorganism or a plant cell, plant or part thereof, especially with non-targeted localization, whereby the respective line disclose in column 7 the fine chemical glucose-1-phosphate. For example, an increase of the glucose-1-phosphate of at least 1 percent, particularly in a range of 34 to 97-percent is conferred as compared to a corresponding non-transformed wild type non-human organism.

[88296] Accordingly, in one embodiment, an increase of glucose-1-phosphate in a non-human organism, as compared to a corresponding non-transformed wild type non-human organism, is conferred in the process of the invention, if the activity of a polypeptide showing the activity of a b2673-protein, or if the activity of the polypeptide B2673, preferably represented by SEQ ID NO. 9245, or a homolog or fragment thereof, or if the activity of a polypeptide encoded by a nucleic acid molecule comprising the nucleic acid SEQ ID NO. 9244, preferably the coding region thereof, or a homolog or fragment thereof, e.g. derived from Escherichia coli, is increased or generated. For example the activity of a nucleic acid molecule or a polypeptide comprising the nucleic acid, preferably the coding region thereof, or polypeptide or the consensus sequence or the polypeptide motif, as depicted in Table I, II or IV, application No. 17, column 5 or 8 in the respective same line as the nucleic acid molecule SEQ ID NO. 9244 or polypeptide SEQ ID NO. 9245, respectively, or a homolog or a fragment thereof, is increased or generated, or if the activity b2673-protein is increased or generated in a non-human organism, like a microorganism or a plant cell, plant or part thereof, especially with non-targeted localization, whereby the respective line disclose in column 7 the fine chemical glucose-1-phosphate. For example, an increase of the glucose-1-phosphate of at least 1 percent, particularly in a range of 31 to 60-percent is conferred as compared to a corresponding non-transformed wild type non-human organism.

[88297] Accordingly, in one embodiment, an increase of 3,4,5-trihydroxypentanoic acid in a non-human organism, as compared to a corresponding non-transformed wild type non-human organism, is conferred in the process of the invention, if the activity of a polypeptide showing the activity of a b2673-protein, or if the activity of the polypeptide B2673, preferably represented by SEQ ID NO. 9245, or a homolog or fragment thereof, or if the activity of a polypeptide encoded by a nucleic acid molecule comprising the nucleic acid SEQ ID NO. 9244, preferably the coding region thereof, or a homolog or fragment thereof, e.g. derived from Escherichia coli, is increased or generated. For example the activity of a nucleic acid molecule or a polypeptide comprising the nucleic acid, preferably the coding region thereof, or polypeptide or the consensus sequence or the polypeptide motif, as depicted in Table I, II or IV, application No. 17, column 5 or 8 in the respective same line as the nucleic acid molecule SEQ ID NO. 9244 or polypeptide SEQ ID NO. 9245, respectively, or a homolog or a fragment thereof, is increased or generated, or if the activity b2673-protein is increased or generated in a non-human organism, like a microorganism or a plant cell, plant or part thereof, especially with non-targeted localization, whereby the respective line disclose in column 7 the fine chemical 3,4,5-trihydroxypentanoic acid. For example, an increase of the 3,4,5-trihydroxypentanoic acid of at least 1 percent, particularly in a range of 40 to 56-percent is conferred as compared to a corresponding non-transformed wild type non-human organism.

[88298] Accordingly, in one embodiment, an increase of myo-inositol in a non-human organism, as compared to a corresponding non-transformed wild type non-human organism, is conferred in the process of the invention, if the activity of a polypeptide showing the activity of a b2682-protein, or if the activity of the polypeptide B2682, preferably represented by SEQ ID NO. 115656, or a homolog or fragment thereof, or if the activity of a polypeptide encoded by a nucleic acid molecule comprising the nucleic acid SEQ ID NO. 115655, preferably the coding region thereof, or a homolog or fragment thereof, e.g. derived from Escherichia coli, is increased or generated. For example the activity of a nucleic acid molecule or a polypeptide comprising the nucleic acid, preferably the coding region thereof, or polypeptide or the consensus sequence or the polypeptide motif, as depicted in Table I, II or IV, application No. 17, column 5 or 8 in the respective same line as the nucleic acid molecule SEQ ID NO. 115655 or polypeptide SEQ ID NO. 115656, respectively, or a homolog or a fragment thereof, is increased or generated, or if the activity b2682-protein is increased or generated in a non-human organism, like a microorganism or a plant cell, plant or part thereof, especially with non-targeted localization, whereby the respective line disclose in column 7 the fine chemical myo-inositol. For example, an increase of the myo-inositol of at least 1 percent, particularly in a range of 25 to 113-percent is conferred as compared to a corresponding non-transformed wild type non-human organism.

[88299] Accordingly, in one embodiment, an increase of glucose-1-phosphate in a non-human organism, as compared to a corresponding non-transformed wild type non-human organism, is conferred in the process of the invention, if the activity of a polypeptide showing the activity of a recombinase A, or if the activity of the polypeptide B2699, preferably represented by SEQ ID NO. 100106, or a homolog or fragment thereof, or if the activity of a polypeptide encoded by a nucleic acid molecule comprising the nucleic acid SEQ ID NO. 100105, preferably the coding region thereof, or a homolog or fragment thereof, e.g. derived from Escherichia coli, is increased or generated. For example the activity of a nucleic acid molecule or a polypeptide comprising the nucleic acid, preferably the coding region thereof, or polypeptide or the consensus sequence or the polypeptide motif, as depicted in Table I, II or IV, application No. 17, column 5 or 8 in the respective same line as the nucleic acid molecule SEQ ID NO. 100105 or polypeptide SEQ ID NO. 100106, respectively, or a homolog or a fragment thereof, is increased or generated, or if the activity recombinase A is increased or generated in a non-human organism, like a microorganism or a plant cell, plant or part thereof, especially with non-targeted localization, whereby the respective line disclose in column 7 the fine chemical glucose-1-phosphate. For example, an increase of the glucose-1-phosphate of at least 1 percent, particularly in a range of 65 to 214-percent is conferred as compared to a corresponding non-transformed wild type non-human organism.

[88300] Accordingly, in one embodiment, an increase of glucose-1-phosphate in a non-human organism, as compared to a corresponding non-transformed wild type non-human organism, is conferred in the process of the invention, if the activity of a polypeptide showing the activity of a murein transglycosylase, or if the activity of the polypeptide B2701, preferably represented by SEQ ID NO. 80757, or a homolog or fragment thereof, or if the activity of a polypeptide encoded by a nucleic acid molecule comprising the nucleic acid SEQ ID NO. 80756, preferably the coding region thereof, or a homolog or fragment thereof, e.g. derived from Escherichia coli, is increased or generated. For example the activity of a nucleic acid molecule or a polypeptide comprising the nucleic acid, preferably the coding region thereof, or polypeptide or the consensus sequence or the polypeptide motif, as depicted in Table I, II or IV, application No. 17, column 5 or 8 in the respective same line as the nucleic acid molecule SEQ ID NO. 80756 or polypeptide SEQ ID NO. 80757, respectively, or a homolog or a fragment thereof, is increased or generated, or if the activity murein transglycosylase is increased or generated in a non-human organism, like a microorganism or a plant cell, plant or part thereof, especially with non-targeted localization, whereby the respective line disclose in column 7 the fine chemical glucose-1-phosphate. For example, an increase of the glucose-1-phosphate of at least 1 percent, particularly in a range of 36 to 59-percent is conferred as compared to a corresponding non-transformed wild type non-human organism.

[88301] Accordingly, in one embodiment, an increase of myo-inositol in a non-human organism, as compared to a corresponding non-transformed wild type non-human organism, is conferred in the process of the invention, if the activity of a polypeptide showing the activity of a transcriptional regulator, or if the activity of the polypeptide B2714, preferably represented by SEQ ID NO. 40742, or a homolog or fragment thereof, or if the activity of a polypeptide encoded by a nucleic acid molecule comprising the nucleic acid SEQ ID NO. 40741, preferably the coding region thereof, or a homolog or fragment thereof, e.g. derived from Escherichia coli, is increased or generated. For example the activity of a nucleic acid molecule or a polypeptide comprising the nucleic acid, preferably the coding region thereof, or polypeptide or the consensus sequence or the polypeptide motif, as depicted in Table I, II or IV, application No. 17, column 5 or 8 in the respective same line as the nucleic acid molecule SEQ ID NO. 40741 or polypeptide SEQ ID NO. 40742, respectively, or a homolog or a fragment thereof, is increased or generated, or if the activity transcriptional regulator is increased or generated in a non-human organism, like a microorganism or a plant cell, plant or part thereof, especially with non-targeted localization, whereby the respective line disclose in column 7 the fine chemical myo-inositol. For example, an increase of the myo-inositol of at least 1 percent, particularly in a range of 29 to 45-percent is conferred as compared to a corresponding non-transformed wild type non-human organism.

[88302] Accordingly, in one embodiment, an increase of fructose in a non-human organism, as compared to a corresponding non-transformed wild type non-human organism, is conferred in the process of the invention, if the activity of a polypeptide showing the activity of a b2739-protein, or if the activity of the polypeptide B2739, preferably represented by SEQ ID NO. 80907, or a homolog or fragment thereof, or if the activity of a polypeptide encoded by a nucleic acid molecule comprising the nucleic acid SEQ ID NO. 80906, preferably the coding region thereof, or a homolog or fragment thereof, e.g. derived from Escherichia coli, is increased or generated. For example the activity of a nucleic acid molecule or a polypeptide comprising the nucleic acid, preferably the coding region thereof, or polypeptide or the consensus sequence or the polypeptide motif, as depicted in Table I, II or IV, application No. 17, column 5 or 8 in the respective same line as the nucleic acid molecule SEQ ID NO. 80906 or polypeptide SEQ ID NO. 80907, respectively, or a homolog or a fragment thereof, is increased or generated, or if the activity b2739-protein is increased or generated in a non-human organism, like a microorganism or a plant cell, plant or part thereof, especially with non-targeted localization, whereby the respective line disclose in column 7 the fine chemical fructose. For example, an increase of the fructose of at least 1 percent, particularly in a range of 76 to 544-percent is conferred as compared to a corresponding non-transformed wild type non-human organism.

[88303] Accordingly, in one embodiment, an increase of glucose in a non-human organism, as compared to a corresponding non-transformed wild type non-human organism, is conferred in the process of the invention, if the activity of a polypeptide showing the activity of a b2739-protein, or if the activity of the polypeptide B2739, preferably represented by SEQ ID NO. 80907, or a homolog or fragment thereof, or if the activity of a polypeptide encoded by a nucleic acid molecule comprising the nucleic acid SEQ ID NO. 80906, preferably the coding region thereof, or a homolog or fragment thereof, e.g. derived from Escherichia coli, is increased or generated. For example the activity of a nucleic acid molecule or a polypeptide comprising the nucleic acid, preferably the coding region thereof, or polypeptide or the consensus sequence or the polypeptide motif, as depicted in Table I, II or IV, application No. 17, column 5 or 8 in the respective same line as the nucleic acid molecule SEQ ID NO. 80906 or polypeptide SEQ ID NO. 80907, respectively, or a homolog or a fragment thereof, is increased or generated, or if the activity b2739-protein is increased or generated in a non-human organism, like a microorganism or a plant cell, plant or part thereof, especially with non-targeted localization, whereby the respective line disclose in column 7 the fine chemical glucose. For example, an increase of the glucose of at least 1 percent, particularly in a range of 77 to 212-percent is conferred as compared to a corresponding non-transformed wild type non-human organism.

[88304] Accordingly, in one embodiment, an increase of glucose in a non-human organism, as compared to a corresponding non-transformed wild type non-human organism, is conferred in the process of the invention, if the activity of a polypeptide showing the activity of a 2-C-methyl-D-erythritol 4-phosphate cytidylyltransferase, or if the activity of the polypeptide B2747, preferably represented by SEQ ID NO. 81076, or a homolog or fragment thereof, or if the activity of a polypeptide encoded by a nucleic acid molecule comprising the nucleic acid SEQ ID NO. 81075, preferably the coding region thereof, or a homolog or fragment thereof, e.g. derived from Escherichia coli, is increased or generated. For example the activity of a nucleic acid molecule or a polypeptide comprising the nucleic acid, preferably the coding region thereof, or polypeptide or the consensus sequence or the polypeptide motif, as depicted in Table I, II or IV, application No. 17, column 5 or 8 in the respective same line as the nucleic acid molecule SEQ ID NO. 81075 or polypeptide SEQ ID NO. 81076, respectively, or a homolog or a fragment thereof, is increased or generated, or if the activity 2-C-methyl-D-erythritol 4-phosphate cytidylyltransferase is increased or generated in a non-human organism, like a microorganism or a plant cell, plant or part thereof, especially with non-targeted localization, whereby the respective line disclose in column 7 the fine chemical glucose. For example, an increase of the glucose of at least 1 percent, particularly in a range of 81 to 417-percent is conferred as compared to a corresponding non-transformed wild type non-human organism.

[88305] Accordingly, in one embodiment, an increase of myo-inositol in a non-human organism, as compared to a corresponding non-transformed wild type non-human organism, is conferred in the process of the invention, if the activity of a polypeptide showing the activity of a 2-C-methyl-D-erythritol 4-phosphate cytidylyltransferase, or if the activity of the polypeptide B2747, preferably represented by SEQ ID NO. 81076, or a homolog or fragment thereof, or if the activity of a polypeptide encoded by a nucleic acid molecule comprising the nucleic acid SEQ ID NO. 81075, preferably the coding region thereof, or a homolog or fragment thereof, e.g. derived from Escherichia coli, is increased or generated. For example the activity of a nucleic acid molecule or a polypeptide comprising the nucleic acid, preferably the coding region thereof, or polypeptide or the consensus sequence or the polypeptide motif, as depicted in Table I, II or IV, application No. 17, column 5 or 8 in the respective same line as the nucleic acid molecule SEQ ID NO. 81075 or polypeptide SEQ ID NO. 81076, respectively, or a homolog or a fragment thereof, is increased or generated, or if the activity 2-C-methyl-D-erythritol 4-phosphate cytidylyltransferase is increased or generated in a non-human organism, like a microorganism or a plant cell, plant or part thereof, especially with non-targeted localization, whereby the respective line disclose in column 7 the fine chemical myo-inositol. For example, an increase of the myo-inositol of at least 1-percent, particularly in a range of 34 to 238-percent is conferred as compared to a corresponding non-transformed wild type non-human organism.

[88306] Accordingly, in one embodiment, an increase of raffinose in a non-human organism, as compared to a corresponding non-transformed wild type non-human organism, is conferred in the process of the invention, if the activity of a polypeptide showing the activity of a 2-C-methyl-D-erythritol 4-phosphate cytidylyltransferase, or if the activity of the polypeptide B2747, preferably represented by SEQ ID NO. 81076, or a homolog or fragment thereof, or if the activity of a polypeptide encoded by a nucleic acid molecule comprising the nucleic acid SEQ ID NO. 81075, preferably the coding region thereof, or a homolog or fragment thereof, e.g. derived from Escherichia coli, is increased or generated. For example the activity of a nucleic acid molecule or a polypeptide comprising the nucleic acid, preferably the coding region thereof, or polypeptide or the consensus sequence or the polypeptide motif, as depicted in Table I, II or IV, application No. 17, column 5 or 8 in the respective same line as the nucleic acid molecule SEQ ID NO. 81075 or polypeptide SEQ ID NO. 81076, respectively, or a homolog or a fragment thereof, is increased or generated, or if the activity 2-C-methyl-D-erythritol 4-phosphate cytidylyltransferase is increased or generated in a non-human organism, like a microorganism or a plant cell, plant or part thereof, especially with non-targeted localization, whereby the respective line disclose in column 7 the fine chemical raffinose. For example, an increase of the raffinose of at least 1 percent, particularly in a range of 64 to 612-percent is conferred as compared to a corresponding non-transformed wild type non-human organism.

[88307] Accordingly, in one embodiment, an increase of glucose-1-phosphate in a non-human organism, as compared to a corresponding non-transformed wild type non-human organism, is conferred in the process of the invention, if the activity of a polypeptide showing the activity of a phosphoadenosine phosphosulfate reductase, or if the activity of the polypeptide B2762, preferably represented by SEQ ID NO. 81452, or a homolog or fragment thereof, or if the activity of a polypeptide encoded by a nucleic acid molecule comprising the nucleic acid SEQ ID NO. 81451, preferably the coding region thereof, or a homolog or fragment thereof, e.g. derived from Escherichia coli, is increased or generated. For example the activity of a nucleic acid molecule or a polypeptide comprising the nucleic acid, preferably the coding region thereof, or polypeptide or the consensus sequence or the polypeptide motif, as depicted in Table I, II or IV, application No. 17, column 5 or 8 in the respective same line as the nucleic acid molecule SEQ ID NO. 81451 or polypeptide SEQ ID NO. 81452, respectively, or a homolog or a fragment thereof, is increased or generated, or if the activity phosphoadenosine phosphosulfate reductase is increased or generated in a non-human organism, like a microorganism or a plant cell, plant or part thereof, especially with non-targeted localization, whereby the respective line disclose in column 7 the fine chemical glucose-1-phosphate. For example, an increase of the glucose-1-phosphate of at least 1 percent, particularly in a range of 18 to 30-percent is conferred as compared to a corresponding non-transformed wild type non-human organism.

[88308] Accordingly, in one embodiment, an increase of 3,4,5-trihydroxypentanoic acid in a non-human organism, as compared to a corresponding non-transformed wild type non-human organism, is conferred in the process of the invention, if the activity of a polypeptide showing the activity of a phosphoadenosine phosphosulfate reductase, or if the activity of the polypeptide B2762, preferably represented by SEQ ID NO. 81452, or a homolog or fragment thereof, or if the activity of a polypeptide encoded by a nucleic acid molecule comprising the nucleic acid SEQ ID NO. 81451, preferably the coding region thereof, or a homolog or fragment thereof, e.g. derived from Escherichia coli, is increased or generated. For example the activity of a nucleic acid molecule or a polypeptide comprising the nucleic acid, preferably the coding region thereof, or polypeptide or the consensus sequence or the polypeptide motif, as depicted in Table I, II or IV, application No. 17, column 5 or 8 in the respective same line as the nucleic acid molecule SEQ ID NO. 81451 or polypeptide SEQ ID NO. 81452, respectively, or a homolog or a fragment thereof, is increased or generated, or if the activity phosphoadenosine phosphosulfate reductase is increased or generated in a non-human organism, like a microorganism or a plant cell, plant or part thereof, especially with non-targeted localization, whereby the respective line disclose in column 7 the fine chemical 3,4,5-trihydroxypentanoic acid. For example, an increase of the 3,4,5-trihydroxypentanoic acid of at least 1 percent, particularly in a range of 35 to 58-percent is conferred as compared to a corresponding non-transformed wild type non-human organism.

[88309] Accordingly, in one embodiment, an increase of fructose in a non-human organism, as compared to a corresponding non-transformed wild type non-human organism, is conferred in the process of the invention, if the activity of a polypeptide showing the activity of a flavodoxin, or if the activity of the polypeptide B2790, preferably represented by SEQ ID NO. 115720, or a homolog or fragment thereof, or if the activity of a polypeptide encoded by a nucleic acid molecule comprising the nucleic acid SEQ ID NO. 115719, preferably the coding region thereof, or a homolog or fragment thereof, e.g. derived from Escherichia coli, is increased or generated. For example the activity of a nucleic acid molecule or a polypeptide comprising the nucleic acid, preferably the coding region thereof, or polypeptide or the consensus sequence or the polypeptide motif, as depicted in Table I, II or IV, application No. 17, column 5 or 8 in the respective same line as the nucleic acid molecule SEQ ID NO. 115719 or polypeptide SEQ ID NO. 115720, respectively, or a homolog or a fragment thereof, is increased or generated, or if the activity flavodoxin is increased or generated in a non-human organism, like a microorganism or a plant cell, plant or part thereof, especially with non-targeted localization, whereby the respective line disclose in column 7 the fine chemical fructose. For example, an increase of the fructose of at least 1 percent, particularly in a range of 134 to 138-percent is conferred as compared to a corresponding non-transformed wild type non-human organism.

[88310] Accordingly, in one embodiment, an increase of glucose in a non-human organism, as compared to a corresponding non-transformed wild type non-human organism, is conferred in the process of the invention, if the activity of a polypeptide showing the activity of a flavodoxin, or if the activity of the polypeptide B2790, preferably represented by SEQ ID NO. 115720, or a homolog or fragment thereof, or if the activity of a polypeptide encoded by a nucleic acid molecule comprising the nucleic acid SEQ ID NO. 115719, preferably the coding region thereof, or a homolog or fragment thereof, e.g. derived from Escherichia coli, is increased or generated. For example the activity of a nucleic acid molecule or a polypeptide comprising the nucleic acid, preferably the coding region thereof, or polypeptide or the consensus sequence or the polypeptide motif, as depicted in Table I, II or IV, application No. 17, column 5 or 8 in the respective same line as the nucleic acid molecule SEQ ID NO. 115719 or polypeptide SEQ ID NO. 115720, respectively, or a homolog or a fragment thereof, is increased or generated, or if the activity flavodoxin is increased or generated in a non-human organism, like a microorganism or a plant cell, plant or part thereof, especially with non-targeted localization, whereby the respective line disclose in column 7 the fine chemical glucose. For example, an increase of the glucose of at least 1 percent, particularly in a range of 60 to 155-percent is conferred as compared to a corresponding non-transformed wild type non-human organism.

[88311] Accordingly, in one embodiment, an increase of glucose-1-phosphate in a non-human organism, as compared to a corresponding non-transformed wild type non-human organism, is conferred in the process of the invention, if the activity of a polypeptide showing the activity of a flavodoxin, or if the activity of the polypeptide B2790, preferably represented by SEQ ID NO. 115720, or a homolog or fragment thereof, or if the activity of a polypeptide encoded by a nucleic acid molecule comprising the nucleic acid SEQ ID NO. 115719, preferably the coding region thereof, or a homolog or fragment thereof, e.g. derived from Escherichia coli, is increased or generated. For example the activity of a nucleic acid molecule or a polypeptide comprising the nucleic acid, preferably the coding region thereof, or polypeptide or the consensus sequence or the polypeptide motif, as depicted in Table I, II or IV, application No. 17, column 5 or 8 in the respective same line as the nucleic acid molecule SEQ ID NO. 115719 or polypeptide SEQ ID NO. 115720, respectively, or a homolog or a fragment thereof, is increased or generated, or if the activity flavodoxin is increased or generated in a non-human organism, like a microorganism or a plant cell, plant or part thereof, especially with non-targeted localization, whereby the respective line disclose in column 7 the fine chemical glucose-1-phosphate. For example, an increase of the glucose-1-phosphate of at least 1 percent, particularly in a range of 32 to 81-percent is conferred as compared to a corresponding non-transformed wild type non-human organism.

[88312] Accordingly, in one embodiment, an increase of myo-inositol in a non-human organism, as compared to a corresponding non-transformed wild type non-human organism, is conferred in the process of the invention, if the activity of a polypeptide showing the activity of a flavodoxin, or if the activity of the polypeptide B2790, preferably represented by SEQ ID NO. 115720, or a homolog or fragment thereof, or if the activity of a polypeptide encoded by a nucleic acid molecule comprising the nucleic acid SEQ ID NO. 115719, preferably the coding region thereof, or a homolog or fragment thereof, e.g. derived from Escherichia coli, is increased or generated. For example the activity of a nucleic acid molecule or a polypeptide comprising the nucleic acid, preferably the coding region thereof, or polypeptide or the consensus sequence or the polypeptide motif, as depicted in Table I, II or IV, application No. 17, column 5 or 8 in the respective same line as the nucleic acid molecule SEQ ID NO. 115719 or polypeptide SEQ ID NO. 115720, respectively, or a homolog or a fragment thereof, is increased or generated, or if the activity flavodoxin is increased or generated in a non-human organism, like a microorganism or a plant cell, plant or part thereof, especially with non-targeted localization, whereby the respective line disclose in column 7 the fine chemical myo-inositol. For example, an increase of the myo-inositol of at least 1 percent, particularly in a range of 25 to 116-percent is conferred as compared to a corresponding non-transformed wild type non-human organism.

[88313] Accordingly, in one embodiment, an increase of 3,4,5-trihydroxypentanoic acid in a non-human organism, as compared to a corresponding non-transformed wild type non-human organism, is conferred in the process of the invention, if the activity of a polypeptide showing the activity of a flavodoxin, or if the activity of the polypeptide B2790, preferably represented by SEQ ID NO. 115720, or a homolog or fragment thereof, or if the activity of a polypeptide encoded by a nucleic acid molecule comprising the nucleic acid SEQ ID NO. 115719, preferably the coding region thereof, or a homolog or fragment thereof, e.g. derived from Escherichia coli, is increased or generated. For example the activity of a nucleic acid molecule or a polypeptide comprising the nucleic acid, preferably the coding region thereof, or polypeptide or the consensus sequence or the polypeptide motif, as depicted in Table I, II or IV, application No. 17, column 5 or 8 in the respective same line as the nucleic acid molecule SEQ ID NO. 115719 or polypeptide SEQ ID NO. 115720, respectively, or a homolog or a fragment thereof, is increased or generated, or if the activity flavodoxin is increased or generated in a non-human organism, like a microorganism or a plant cell, plant or part thereof, especially with non-targeted localization, whereby the respective line disclose in column 7 the fine chemical 3,4,5-trihydroxypentanoic acid. For example, an increase of the 3,4,5-trihydroxypentanoic acid of at least 1 percent, particularly in a range of 43 to 90-percent is conferred as compared to a corresponding non-transformed wild type non-human organism.

[88314] Accordingly, in one embodiment, an increase of fructose in a non-human organism, as compared to a corresponding non-transformed wild type non-human organism, is conferred in the process of the invention, if the activity of a polypeptide showing the activity of a amino-acid acetyltransferase, or if the activity of the polypeptide B2818, preferably represented by SEQ ID NO. 81577, or a homolog or fragment thereof, or if the activity of a polypeptide encoded by a nucleic acid molecule comprising the nucleic acid SEQ ID NO. 81576, preferably the coding region thereof, or a homolog or fragment thereof, e.g. derived from Escherichia coli, is increased or generated. For example the activity of a nucleic acid molecule or a polypeptide comprising the nucleic acid, preferably the coding region thereof, or polypeptide or the consensus sequence or the polypeptide motif, as depicted in Table I, II or IV, application No. 17, column 5 or 8 in the respective same line as the nucleic acid molecule SEQ ID NO. 81576 or polypeptide SEQ ID NO. 81577, respectively, or a homolog or a fragment thereof, is increased or generated, or if the activity amino-acid acetyltransferase is increased or generated in a non-human organism, like a microorganism or a plant cell, plant or part thereof, especially with non-targeted localization, whereby the respective line disclose in column 7 the fine chemical fructose. For example, an increase of the fructose of at least 1 percent, particularly in a range of 89 to 1378-percent is conferred as compared to a corresponding non-transformed wild type non-human organism.

[88315] Accordingly, in one embodiment, an increase of glucose-1-phosphate in a non-human organism, as compared to a corresponding non-transformed wild type non-human organism, is conferred in the process of the invention, if the activity of a polypeptide showing the activity of a amino-acid acetyltransferase, or if the activity of the polypeptide B2818, preferably represented by SEQ ID NO. 81577, or a homolog or fragment thereof, or if the activity of a polypeptide encoded by a nucleic acid molecule comprising the nucleic acid SEQ ID NO. 81576, preferably the coding region thereof, or a homolog or fragment thereof, e.g. derived from Escherichia coli, is increased or generated. For example the activity of a nucleic acid molecule or a polypeptide comprising the nucleic acid, preferably the coding region thereof, or polypeptide or the consensus sequence or the polypeptide motif, as depicted in Table I, II or IV, application No. 17, column 5 or 8 in the respective same line as the nucleic acid molecule SEQ ID NO. 81576 or polypeptide SEQ ID NO. 81577, respectively, or a homolog or a fragment thereof, is increased or generated, or if the activity amino-acid acetyltransferase is increased or generated in a non-human organism, like a microorganism or a plant cell, plant or part thereof, especially with non-targeted localization, whereby the respective line disclose in column 7 the fine chemical glucose-1-phosphate. For example, an increase of the glucose-1-phosphate of at least 1 percent, particularly in a range of 25 to 43-percent is conferred as compared to a corresponding non-transformed wild type non-human organism.

[88316] Accordingly, in one embodiment, an increase of myo-inositol in a non-human organism, as compared to a corresponding non-transformed wild type non-human organism, is conferred in the process of the invention, if the activity of a polypeptide showing the activity of a amino-acid acetyltransferase, or if the activity of the polypeptide B2818, preferably represented by SEQ ID NO. 81577, or a homolog or fragment thereof, or if the activity of a polypeptide encoded by a nucleic acid molecule comprising the nucleic acid SEQ ID NO. 81576, preferably the coding region thereof, or a homolog or fragment thereof, e.g. derived from Escherichia coli, is increased or generated. For example the activity of a nucleic acid molecule or a polypeptide comprising the nucleic acid, preferably the coding region thereof, or polypeptide or the consensus sequence or the polypeptide motif, as depicted in Table I, II or IV, application No. 17, column 5 or 8 in the respective same line as the nucleic acid molecule SEQ ID NO. 81576 or polypeptide SEQ ID NO. 81577, respectively, or a homolog or a fragment thereof, is increased or generated, or if the activity amino-acid acetyltransferase is increased or generated in a non-human organism, like a microorganism or a plant cell, plant or part thereof, especially with non-targeted localization, whereby the respective line disclose in column 7 the fine chemical myo-inositol. For example, an increase of the myo-inositol of at least 1 percent, particularly in a range of 25 to 67-percent is conferred as compared to a corresponding non-transformed wild type non-human organism.

[88317] Accordingly, in one embodiment, an increase of raffinose in a non-human organism, as compared to a corresponding non-transformed wild type non-human organism, is conferred in the process of the invention, if the activity of a polypeptide showing the activity of a transcriptional regulator, or if the activity of the polypeptide B2839, preferably represented by SEQ ID NO. 81936, or a homolog or fragment thereof, or if the activity of a polypeptide encoded by a nucleic acid molecule comprising the nucleic acid SEQ ID NO. 81935, preferably the coding region thereof, or a homolog or fragment thereof, e.g. derived from Escherichia coli, is increased or generated. For example the activity of a nucleic acid molecule or a polypeptide comprising the nucleic acid, preferably the coding region thereof, or polypeptide or the consensus sequence or the polypeptide motif, as depicted in Table I, II or IV, application No. 17, column 5 or 8 in the respective same line as the nucleic acid molecule SEQ ID NO. 81935 or polypeptide SEQ ID NO. 81936, respectively, or a homolog or a fragment thereof, is increased or generated, or if the activity transcriptional regulator is increased or generated in a non-human organism, like a microorganism or a plant cell, plant or part thereof, especially with non-targeted localization, whereby the respective line disclose in column 7 the fine chemical raffinose. For example, an increase of the raffinose of at least 1 percent, particularly in a range of 121 to 159-percent is conferred as compared to a corresponding non-transformed wild type non-human organism.

[88318] Accordingly, in one embodiment, an increase of glucose in a non-human organism, as compared to a corresponding non-transformed wild type non-human organism, is conferred in the process of the invention, if the activity of a polypeptide showing the activity of a arginine exporter protein, or if the activity of the polypeptide B2923, preferably represented by SEQ ID NO. 9334, or a homolog or fragment thereof, or if the activity of a polypeptide encoded by a nucleic acid molecule comprising the nucleic acid SEQ ID NO. 9333, preferably the coding region thereof, or a homolog or fragment thereof, e.g. derived from Escherichia coli, is increased or generated. For example the activity of a nucleic acid molecule or a polypeptide comprising the nucleic acid, preferably the coding region thereof, or polypeptide or the consensus sequence or the polypeptide motif, as depicted in Table I, II or IV, application No. 17, column 5 or 8 in the respective same line as the nucleic acid molecule SEQ ID NO. 9333 or polypeptide SEQ ID NO. 9334, respectively, or a homolog or a fragment thereof, is increased or generated, or if the activity arginine exporter protein is increased or generated in a non-human organism, like a microorganism or a plant cell, plant or part thereof, especially with non-targeted localization, whereby the respective line disclose in column 7 the fine chemical glucose. For example, an increase of the glucose of at least 1 percent, particularly in a range of 77 to 194-percent is conferred as compared to a corresponding non-transformed wild type non-human organism.

[88319] Accordingly, in one embodiment, an increase of myo-inositol in a non-human organism, as compared to a corresponding non-transformed wild type non-human organism, is conferred in the process of the invention, if the activity of a polypeptide showing the activity of a arginine exporter protein, or if the activity of the polypeptide B2923, preferably represented by SEQ ID NO. 9334, or a homolog or fragment thereof, or if the activity of a polypeptide encoded by a nucleic acid molecule comprising the nucleic acid SEQ ID NO. 9333, preferably the coding region thereof, or a homolog or fragment thereof, e.g. derived from Escherichia coli, is increased or generated. For example the activity of a nucleic acid molecule or a polypeptide comprising the nucleic acid, preferably the coding region thereof, or polypeptide or the consensus sequence or the polypeptide motif, as depicted in Table I, II or IV, application No. 17, column 5 or 8 in the respective same line as the nucleic acid molecule SEQ ID NO. 9333 or polypeptide SEQ ID NO. 9334, respectively, or a homolog or a fragment thereof, is increased or generated, or if the activity arginine exporter protein is increased or generated in a non-human organism, like a microorganism or a plant cell, plant or part thereof, especially with non-targeted localization, whereby the respective line disclose in column 7 the fine chemical myo-inositol. For example, an increase of the myo-inositol of at least 1 percent, particularly in a range of 24 to 107-percent is conferred as compared to a corresponding non-transformed wild type non-human organism.

[88320] Accordingly, in one embodiment, an increase of myo-inositol in a non-human organism, as compared to a corresponding non-transformed wild type non-human organism, is conferred in the process of the invention, if the activity of a polypeptide showing the activity of a b2932-protein, or if the activity of the polypeptide B2932, preferably represented by SEQ ID NO. 146328, or a homolog or fragment thereof, or if the activity of a polypeptide encoded by a nucleic acid molecule comprising the nucleic acid SEQ ID NO. 146327, preferably the coding region thereof, or a homolog or fragment thereof, e.g. derived from Escherichia coli, is increased or generated. For example the activity of a nucleic acid molecule or a polypeptide comprising the nucleic acid, preferably the coding region thereof, or polypeptide or the consensus sequence or the polypeptide motif, as depicted in Table I, II or IV, application No. 17, column 5 or 8 in the respective same line as the nucleic acid molecule SEQ ID NO. 146327 or polypeptide SEQ ID NO. 146328, respectively, or a homolog or a fragment thereof, is increased or generated, or if the activity b2932-protein is increased or generated in a non-human organism, like a microorganism or a plant cell, plant or part thereof, especially with non-targeted localization, whereby the respective line disclose in column 7 the fine chemical myo-inositol. For example, an increase of the myo-inositol of at least 1 percent, particularly in a range of 26 to 61-percent is conferred as compared to a corresponding non-transformed wild type non-human organism.

[88321] Accordingly, in one embodiment, an increase of erythrol in a non-human organism, as compared to a corresponding non-transformed wild type non-human organism, is conferred in the process of the invention, if the activity of a polypeptide showing the activity of a L-serine dehydratase, or if the activity of the polypeptide B3112, preferably represented by SEQ ID NO. 104661, or a homolog or fragment thereof, or if the activity of a polypeptide encoded by a nucleic acid molecule comprising the nucleic acid SEQ ID NO. 104660, preferably the coding region thereof, or a homolog or fragment thereof, e.g. derived from Escherichia coli, is increased or generated. For example the activity of a nucleic acid molecule or a polypeptide comprising the nucleic acid, preferably the coding region thereof, or polypeptide or the consensus sequence or the polypeptide motif, as depicted in Table I, II or IV, application No. 17, column 5 or 8 in the respective same line as the nucleic acid molecule SEQ ID NO. 104660 or polypeptide SEQ ID NO. 104661, respectively, or a homolog or a fragment thereof, is increased or generated, or if the activity L-serine dehydratase is increased or generated in a non-human organism, like a microorganism or a plant cell, plant or part thereof, especially with plastidic localization, whereby the respective line disclose in column 7 the fine chemical erythrol. For example, an increase of the erythrol of at least 1 percent, particularly in a range of 147 to 413-percent is conferred as compared to a corresponding non-transformed wild type non-human organism.

[88322] Accordingly, in one embodiment, an increase of myo-inositol in a non-human organism, as compared to a corresponding non-transformed wild type non-human organism, is conferred in the process of the invention, if the activity of a polypeptide showing the activity of a b3151-protein, or if the activity of the polypeptide B3151, preferably represented by SEQ ID NO. 42478, or a homolog or fragment thereof, or if the activity of a polypeptide encoded by a nucleic acid molecule comprising the nucleic acid SEQ ID NO. 42477, preferably the coding region thereof, or a homolog or fragment thereof, e.g. derived from Escherichia coli, is increased or generated. For example the activity of a nucleic acid molecule or a polypeptide comprising the nucleic acid, preferably the coding region thereof, or polypeptide or the consensus sequence or the polypeptide motif, as depicted in Table I, II or IV, application No. 17, column 5 or 8 in the respective same line as the nucleic acid molecule SEQ ID NO. 42477 or polypeptide SEQ ID NO. 42478, respectively, or a homolog or a fragment thereof, is increased or generated, or if the activity b3151-protein is increased or generated in a non-human organism, like a microorganism or a plant cell, plant or part thereof, especially with non-targeted localization, whereby the respective line disclose in column 7 the fine chemical myo-inositol. For example, an increase of the myo-inositol of at least 1 percent, particularly in a range of 33 to 139-percent is conferred as compared to a corresponding non-transformed wild type non-human organism.

[88323] Accordingly, in one embodiment, an increase of raffinose in a non-human organism, as compared to a corresponding non-transformed wild type non-human organism, is conferred in the process of the invention, if the activity of a polypeptide showing the activity of a b3151-protein, or if the activity of the polypeptide B3151, preferably represented by SEQ ID NO. 42478, or a homolog or fragment thereof, or if the activity of a polypeptide encoded by a nucleic acid molecule comprising the nucleic acid SEQ ID NO. 42477, preferably the coding region thereof, or a homolog or fragment thereof, e.g. derived from Escherichia coli, is increased or generated. For example the activity of a nucleic acid molecule or a polypeptide comprising the nucleic acid, preferably the coding region thereof, or polypeptide or the consensus sequence or the polypeptide motif, as depicted in Table I, II or IV, application No. 17, column 5 or 8 in the respective same line as the nucleic acid molecule SEQ ID NO. 42477 or polypeptide SEQ ID NO. 42478, respectively, or a homolog or a fragment thereof, is increased or generated, or if the activity b3151-protein is increased or generated in a non-human organism, like a microorganism or a plant cell, plant or part thereof, especially with non-targeted localization, whereby the respective line disclose in column 7 the fine chemical raffinose. For example, an increase of the raffinose of at least 1 percent, particularly in a range of 65 to 188-percent is conferred as compared to a corresponding non-transformed wild type non-human organism.

[88324] Accordingly, in one embodiment, an increase of sucrose in a non-human organism, as compared to a corresponding non-transformed wild type non-human organism, is conferred in the process of the invention, if the activity of a polypeptide showing the activity of a b3151-protein, or if the activity of the polypeptide B3151, preferably represented by SEQ ID NO. 42478, or a homolog or fragment thereof, or if the activity of a polypeptide encoded by a nucleic acid molecule comprising the nucleic acid SEQ ID NO. 42477, preferably the coding region thereof, or a homolog or fragment thereof, e.g. derived from Escherichia coli, is increased or generated. For example the activity of a nucleic acid molecule or a polypeptide comprising the nucleic acid, preferably the coding region thereof, or polypeptide or the consensus sequence or the polypeptide motif, as depicted in Table I, II or IV, application No. 17, column 5 or 8 in the respective same line as the nucleic acid molecule SEQ ID NO. 42477 or polypeptide SEQ ID NO. 42478, respectively, or a homolog or a fragment thereof, is increased or generated, or if the activity b3151-protein is increased or generated in a non-human organism, like a microorganism or a plant cell, plant or part thereof, especially with non-targeted localization, whereby the respective line disclose in column 7 the fine chemical sucrose. For example, an increase of the sucrose of at least 1 percent, particularly in a range of 25 to 64-percent is conferred as compared to a corresponding non-transformed wild type non-human organism.

[88325] Accordingly, in one embodiment, an increase of fructose in a non-human organism, as compared to a corresponding non-transformed wild type non-human organism, is conferred in the process of the invention, if the activity of a polypeptide showing the activity of a b3221-protein, or if the activity of the polypeptide B3221, preferably represented by SEQ ID NO. 82511, or a homolog or fragment thereof, or if the activity of a polypeptide encoded by a nucleic acid molecule comprising the nucleic acid SEQ ID NO. 82510, preferably the coding region thereof, or a homolog or fragment thereof, e.g. derived from Escherichia coli, is increased or generated. For example the activity of a nucleic acid molecule or a polypeptide comprising the nucleic acid, preferably the coding region thereof, or polypeptide or the consensus sequence or the polypeptide motif, as depicted in Table I, II or IV, application No. 17, column 5 or 8 in the respective same line as the nucleic acid molecule SEQ ID NO. 82510 or polypeptide SEQ ID NO. 82511, respectively, or a homolog or a fragment thereof, is increased or generated, or if the activity b3221-protein is increased or generated in a non-human organism, like a microorganism or a plant cell, plant or part thereof, especially with plastidic localization, whereby the respective line disclose in column 7 the fine chemical fructose. For example, an increase of the fructose of at least 1 percent, particularly in a range of 40 to 58-percent is conferred as compared to a corresponding non-transformed wild type non-human organism.

[88326] Accordingly, in one embodiment, an increase of glucose in a non-human organism, as compared to a corresponding non-transformed wild type non-human organism, is conferred in the process of the invention, if the activity of a polypeptide showing the activity of a b3221-protein, or if the activity of the polypeptide B3221, preferably represented by SEQ ID NO. 82511, or a homolog or fragment thereof, or if the activity of a polypeptide encoded by a nucleic acid molecule comprising the nucleic acid SEQ ID NO. 82510, preferably the coding region thereof, or a homolog or fragment thereof, e.g. derived from Escherichia coli, is increased or generated. For example the activity of a nucleic acid molecule or a polypeptide comprising the nucleic acid, preferably the coding region thereof, or polypeptide or the consensus sequence or the polypeptide motif, as depicted in Table I, II or IV, application No. 17, column 5 or 8 in the respective same line as the nucleic acid molecule SEQ ID NO. 82510 or polypeptide SEQ ID NO. 82511, respectively, or a homolog or a fragment thereof, is increased or generated, or if the activity b3221-protein is increased or generated in a non-human organism, like a microorganism or a plant cell, plant or part thereof, especially with plastidic localization, whereby the respective line disclose in column 7 the fine chemical glucose. For example, an increase of the glucose of at least 1 percent, particularly in a range of 58 to 73-percent is conferred as compared to a corresponding non-transformed wild type non-human organism.

[88327] Accordingly, in one embodiment, an increase of 3,4,5-trihydroxypentanoic acid in a non-human organism, as compared to a corresponding non-transformed wild type non-human organism, is conferred in the process of the invention, if the activity of a polypeptide showing the activity of a b3221-protein, or if the activity of the polypeptide B3221, preferably represented by SEQ ID NO. 82511, or a homolog or fragment thereof, or if the activity of a polypeptide encoded by a nucleic acid molecule comprising the nucleic acid SEQ ID NO. 82510, preferably the coding region thereof, or a homolog or fragment thereof, e.g. derived from Escherichia coli, is increased or generated. For example the activity of a nucleic acid molecule or a polypeptide comprising the nucleic acid, preferably the coding region thereof, or polypeptide or the consensus sequence or the polypeptide motif, as depicted in Table I, II or IV, application No. 17, column 5 or 8 in the respective same line as the nucleic acid molecule SEQ ID NO. 82510 or polypeptide SEQ ID NO. 82511, respectively, or a homolog or a fragment thereof, is increased or generated, or if the activity b3221-protein is increased or generated in a non-human organism, like a microorganism or a plant cell, plant or part thereof, especially with plastidic localization, whereby the respective line disclose in column 7 the fine chemical 3,4,5-trihydroxypentanoic acid. For example, an increase of the 3,4,5-trihydroxypentanoic acid of at least 1 percent, particularly in a range of 44 to 62-percent is conferred as compared to a corresponding non-transformed wild type non-human organism.

[88328] Accordingly, in one embodiment, an increase of myo-inositol in a non-human organism, as compared to a corresponding non-transformed wild type non-human organism, is conferred in the process of the invention, if the activity of a polypeptide showing the activity of a b3246-protein, or if the activity of the polypeptide B3246, preferably represented by SEQ ID NO. 9471, or a homolog or fragment thereof, or if the activity of a polypeptide encoded by a nucleic acid molecule comprising the nucleic acid SEQ ID NO. 9470, preferably the coding region thereof, or a homolog or fragment thereof, e.g. derived from Escherichia coli, is increased or generated. For example the activity of a nucleic acid molecule or a polypeptide comprising the nucleic acid, preferably the coding region thereof, or polypeptide or the consensus sequence or the polypeptide motif, as depicted in Table I, II or IV, application No. 17, column 5 or 8 in the respective same line as the nucleic acid molecule SEQ ID NO. 9470 or polypeptide SEQ ID NO. 9471, respectively, or a homolog or a fragment thereof, is increased or generated, or if the activity b3246-protein is increased or generated in a non-human organism, like a microorganism or a plant cell, plant or part thereof, especially with non-targeted localization, whereby the respective line disclose in column 7 the fine chemical myo-inositol. For example, an increase of the myo-inositol of at least 1 percent, particularly in a range of 311 to 476-percent is conferred as compared to a corresponding non-transformed wild type non-human organism.

[88329] Accordingly, in one embodiment, an increase of myo-inositol in a non-human organism, as compared to a corresponding non-transformed wild type non-human organism, is conferred in the process of the invention, if the activity of a polypeptide showing the activity of a acetyl CoA carboxylase, or if the activity of the polypeptide B3256, preferably represented by SEQ ID NO. 9493, or a homolog or fragment thereof, or if the activity of a polypeptide encoded by a nucleic acid molecule comprising the nucleic acid SEQ ID NO. 9492, preferably the coding region thereof, or a homolog or fragment thereof, e.g. derived from Escherichia coli, is increased or generated. For example the activity of a nucleic acid molecule or a polypeptide comprising the nucleic acid, preferably the coding region thereof, or polypeptide or the consensus sequence or the polypeptide motif, as depicted in Table I, II or IV, application No. 17, column 5 or 8 in the respective same line as the nucleic acid molecule SEQ ID NO. 9492 or polypeptide SEQ ID NO. 9493, respectively, or a homolog or a fragment thereof, is increased or generated, or if the activity acetyl CoA carboxylase is increased or generated in a non-human organism, like a microorganism or a plant cell, plant or part thereof, especially with non-targeted localization, whereby the respective line disclose in column 7 the fine chemical myo-inositol. For example, an increase of the myo-inositol of at least 1 percent, particularly in a range of 25 to 229-percent is conferred as compared to a corresponding non-transformed wild type non-human organism.

[88330] Accordingly, in one embodiment, an increase of fructose in a non-human organism, as compared to a corresponding non-transformed wild type non-human organism, is conferred in the process of the invention, if the activity of a polypeptide showing the activity of a methyltransferase, or if the activity of the polypeptide B3262, preferably represented by SEQ ID NO. 42503, or a homolog or fragment thereof, or if the activity of a polypeptide encoded by a nucleic acid molecule comprising the nucleic acid SEQ ID NO. 42502, preferably the coding region thereof, or a homolog or fragment thereof, e.g. derived from Escherichia coli, is increased or generated. For example the activity of a nucleic acid molecule or a polypeptide comprising the nucleic acid, preferably the coding region thereof, or polypeptide or the consensus sequence or the polypeptide motif, as depicted in Table I, II or IV, application No. 17, column 5 or 8 in the respective same line as the nucleic acid molecule SEQ ID NO. 42502 or polypeptide SEQ ID NO. 42503, respectively, or a homolog or a fragment thereof, is increased or generated, or if the activity methyltransferase is increased or generated in a non-human organism, like a microorganism or a plant cell, plant or part thereof, especially with non-targeted localization, whereby the respective line disclose in column 7 the fine chemical fructose. For example, an increase of the fructose of at least 1 percent, particularly in a range of 79 to 736-percent is conferred as compared to a corresponding non-transformed wild type non-human organism.

[88331] Accordingly, in one embodiment, an increase of glucose in a non-human organism, as compared to a corresponding non-transformed wild type non-human organism, is conferred in the process of the invention, if the activity of a polypeptide showing the activity of a methyltransferase, or if the activity of the polypeptide B3262, preferably represented by SEQ ID NO. 42503, or a homolog or fragment thereof, or if the activity of a polypeptide encoded by a nucleic acid molecule comprising the nucleic acid SEQ ID NO. 42502, preferably the coding region thereof, or a homolog or fragment thereof, e.g. derived from Escherichia coli, is increased or generated. For example the activity of a nucleic acid molecule or a polypeptide comprising the nucleic acid, preferably the coding region thereof, or polypeptide or the consensus sequence or the polypeptide motif, as depicted in Table I, II or IV, application No. 17, column 5 or 8 in the respective same line as the nucleic acid molecule SEQ ID NO. 42502 or polypeptide SEQ ID NO. 42503, respectively, or a homolog or a fragment thereof, is increased or generated, or if the activity methyltransferase is increased or generated in a non-human organism, like a microorganism or a plant cell, plant or part thereof, especially with non-targeted localization, whereby the respective line disclose in column 7 the fine chemical glucose. For example, an increase of the glucose of at least 1 percent, particularly in a range of 58 to 334-percent is conferred as compared to a corresponding non-transformed wild type non-human organism.

[88332] Accordingly, in one embodiment, an increase of glucose-1-phosphate in a non-human organism, as compared to a corresponding non-transformed wild type non-human organism, is conferred in the process of the invention, if the activity of a polypeptide showing the activity of a methyltransferase, or if the activity of the polypeptide B3262, preferably represented by SEQ ID NO. 42503, or a homolog or fragment thereof, or if the activity of a polypeptide encoded by a nucleic acid molecule comprising the nucleic acid SEQ ID NO. 42502, preferably the coding region thereof, or a homolog or fragment thereof, e.g. derived from Escherichia coli, is increased or generated. For example the activity of a nucleic acid molecule or a polypeptide comprising the nucleic acid, preferably the coding region thereof, or polypeptide or the consensus sequence or the polypeptide motif, as depicted in Table I, II or IV, application No. 17, column 5 or 8 in the respective same line as the nucleic acid molecule SEQ ID NO. 42502 or polypeptide SEQ ID NO. 42503, respectively, or a homolog or a fragment thereof, is increased or generated, or if the activity methyltransferase is increased or generated in a non-human organism, like a microorganism or a plant cell, plant or part thereof, especially with non-targeted localization, whereby the respective line disclose in column 7 the fine chemical glucose-1-phosphate. For example, an increase of the glucose-1-phosphate of at least 1 percent, particularly in a range of 43 to 64-percent is conferred as compared to a corresponding non-transformed wild type non-human organism.

[88333] Accordingly, in one embodiment, an increase of raffinose in a non-human organism, as compared to a corresponding non-transformed wild type non-human organism, is conferred in the process of the invention, if the activity of a polypeptide showing the activity of a methyltransferase, or if the activity of the polypeptide B3262, preferably represented by SEQ ID NO. 42503, or a homolog or fragment thereof, or if the activity of a polypeptide encoded by a nucleic acid molecule comprising the nucleic acid SEQ ID NO. 42502, preferably the coding region thereof, or a homolog or fragment thereof, e.g. derived from Escherichia coli, is increased or generated. For example the activity of a nucleic acid molecule or a polypeptide comprising the nucleic acid, preferably the coding region thereof, or polypeptide or the consensus sequence or the polypeptide motif, as depicted in Table I, II or IV, application No. 17, column 5 or 8 in the respective same line as the nucleic acid molecule SEQ ID NO. 42502 or polypeptide SEQ ID NO. 42503, respectively, or a homolog or a fragment thereof, is increased or generated, or if the activity methyltransferase is increased or generated in a non-human organism, like a microorganism or a plant cell, plant or part thereof, especially with non-targeted localization, whereby the respective line disclose in column 7 the fine chemical raffinose. For example, an increase of the raffinose of at least 1 percent, particularly in a range of 186 to 930-percent is conferred as compared to a corresponding non-transformed wild type non-human organism.

[88334] Accordingly, in one embodiment, an increase of sucrose in a non-human organism, as compared to a corresponding non-transformed wild type non-human organism, is conferred in the process of the invention, if the activity of a polypeptide showing the activity of a methyltransferase, or if the activity of the polypeptide B3262, preferably represented by SEQ ID NO. 42503, or a homolog or fragment thereof, or if the activity of a polypeptide encoded by a nucleic acid molecule comprising the nucleic acid SEQ ID NO. 42502, preferably the coding region thereof, or a homolog or fragment thereof, e.g. derived from Escherichia coli, is increased or generated. For example the activity of a nucleic acid molecule or a polypeptide comprising the nucleic acid, preferably the coding region thereof, or polypeptide or the consensus sequence or the polypeptide motif, as depicted in Table I, II or IV, application No. 17, column 5 or 8 in the respective same line as the nucleic acid molecule SEQ ID NO. 42502 or polypeptide SEQ ID NO. 42503, respectively, or a homolog or a fragment thereof, is increased or generated, or if the activity methyltransferase is increased or generated in a non-human organism, like a microorganism or a plant cell, plant or part thereof, especially with non-targeted localization, whereby the respective line disclose in column 7 the fine chemical sucrose. For example, an increase of the sucrose of at least 1 percent, particularly in a range of 30 to 67-percent is conferred as compared to a corresponding non-transformed wild type non-human organism.

[88335] Accordingly, in one embodiment, an increase of glucose in a non-human organism, as compared to a corresponding non-transformed wild type non-human organism, is conferred in the process of the invention, if the activity of a polypeptide showing the activity of a ferredoxin, or if the activity of the polypeptide B3337, preferably represented by SEQ ID NO. 146365, or a homolog or fragment thereof, or if the activity of a polypeptide encoded by a nucleic acid molecule comprising the nucleic acid SEQ ID NO. 146364, preferably the coding region thereof, or a homolog or fragment thereof, e.g. derived from Escherichia coli, is increased or generated. For example the activity of a nucleic acid molecule or a polypeptide comprising the nucleic acid, preferably the coding region thereof, or polypeptide or the consensus sequence or the polypeptide motif, as depicted in Table I, II or IV, application No. 17, column 5 or 8 in the respective same line as the nucleic acid molecule SEQ ID NO. 146364 or polypeptide SEQ ID NO. 146365, respectively, or a homolog or a fragment thereof, is increased or generated, or if the activity ferredoxin is increased or generated in a non-human organism, like a microorganism or a plant cell, plant or part thereof, especially with plastidic localization, whereby the respective line disclose in column 7 the fine chemical glucose. For example, an increase of the glucose of at least 1 percent, particularly in a range of 38 to 48-percent is conferred as compared to a corresponding non-transformed wild type non-human organism.

[88336] Accordingly, in one embodiment, an increase of myo-inositol in a non-human organism, as compared to a corresponding non-transformed wild type non-human organism, is conferred in the process of the invention, if the activity of a polypeptide showing the activity of a b3346-protein, or if the activity of the polypeptide B3346, preferably represented by SEQ ID NO. 10105, or a homolog or fragment thereof, or if the activity of a polypeptide encoded by a nucleic acid molecule comprising the nucleic acid SEQ ID NO. 10104, preferably the coding region thereof, or a homolog or fragment thereof, e.g. derived from Escherichia coli, is increased or generated. For example the activity of a nucleic acid molecule or a polypeptide comprising the nucleic acid, preferably the coding region thereof, or polypeptide or the consensus sequence or the polypeptide motif, as depicted in Table I, II or IV, application No. 17, column 5 or 8 in the respective same line as the nucleic acid molecule SEQ ID NO. 10104 or polypeptide SEQ ID NO. 10105, respectively, or a homolog or a fragment thereof, is increased or generated, or if the activity b3346-protein is increased or generated in a non-human organism, like a microorganism or a plant cell, plant or part thereof, especially with non-targeted localization, whereby the respective line disclose in column 7 the fine chemical myo-inositol. For example, an increase of the myo-inositol of at least 1 percent, particularly in a range of 30 to 74-percent is conferred as compared to a corresponding non-transformed wild type non-human organism.

[88337] Accordingly, in one embodiment, an increase of raffinose in a non-human organism, as compared to a corresponding non-transformed wild type non-human organism, is conferred in the process of the invention, if the activity of a polypeptide showing the activity of a b3346-protein, or if the activity of the polypeptide B3346, preferably represented by SEQ ID NO. 10105, or a homolog or fragment thereof, or if the activity of a polypeptide encoded by a nucleic acid molecule comprising the nucleic acid SEQ ID NO. 10104, preferably the coding region thereof, or a homolog or fragment thereof, e.g. derived from Escherichia coli, is increased or generated. For example the activity of a nucleic acid molecule or a polypeptide comprising the nucleic acid, preferably the coding region thereof, or polypeptide or the consensus sequence or the polypeptide motif, as depicted in Table I, II or IV, application No. 17, column 5 or 8 in the respective same line as the nucleic acid molecule SEQ ID NO. 10104 or polypeptide SEQ ID NO. 10105, respectively, or a homolog or a fragment thereof, is increased or generated, or if the activity b3346-protein is increased or generated in a non-human organism, like a microorganism or a plant cell, plant or part thereof, especially with non-targeted localization, whereby the respective line disclose in column 7 the fine chemical raffinose. For example, an increase of the raffinose of at least 1 percent, particularly in a range of 73 to 370-percent is conferred as compared to a corresponding non-transformed wild type non-human organism.

[88338] Accordingly, in one embodiment, an increase of 3,4,5-trihydroxypentanoic acid in a non-human organism, as compared to a corresponding non-transformed wild type non-human organism, is conferred in the process of the invention, if the activity of a polypeptide showing the activity of a b3346-protein, or if the activity of the polypeptide B3346, preferably represented by SEQ ID NO. 10105, or a homolog or fragment thereof, or if the activity of a polypeptide encoded by a nucleic acid molecule comprising the nucleic acid SEQ ID NO. 10104, preferably the coding region thereof, or a homolog or fragment thereof, e.g. derived from Escherichia coli, is increased or generated. For example the activity of a nucleic acid molecule or a polypeptide comprising the nucleic acid, preferably the coding region thereof, or polypeptide or the consensus sequence or the polypeptide motif, as depicted in Table I, II or IV, application No. 17, column 5 or 8 in the respective same line as the nucleic acid molecule SEQ ID NO. 10104 or polypeptide SEQ ID NO. 10105, respectively, or a homolog or a fragment thereof, is increased or generated, or if the activity b3346-protein is increased or generated in a non-human organism, like a microorganism or a plant cell, plant or part thereof, especially with non-targeted localization, whereby the respective line disclose in column 7 the fine chemical 3,4,5-trihydroxypentanoic acid. For example, an increase of the 3,4,5-trihydroxypentanoic acid of at least 1 percent, particularly in a range of 34 to 74-percent is conferred as compared to a corresponding non-transformed wild type non-human organism.

[88339] Accordingly, in one embodiment, an increase of fructose in a non-human organism, as compared to a corresponding non-transformed wild type non-human organism, is conferred in the process of the invention, if the activity of a polypeptide showing the activity of a phosphoenolpyruvate carboxykinase, or if the activity of the polypeptide B3403, preferably represented by SEQ ID NO. 82867, or a homolog or fragment thereof, or if the activity of a polypeptide encoded by a nucleic acid molecule comprising the nucleic acid SEQ ID NO. 82866, preferably the coding region thereof, or a homolog or fragment thereof, e.g. derived from Escherichia coli, is increased or generated. For example the activity of a nucleic acid molecule or a polypeptide comprising the nucleic acid, preferably the coding region thereof, or polypeptide or the consensus sequence or the polypeptide motif, as depicted in Table I, II or IV, application No. 17, column 5 or 8 in the respective same line as the nucleic acid molecule SEQ ID NO. 82866 or polypeptide SEQ ID NO. 82867, respectively, or a homolog or a fragment thereof, is increased or generated, or if the activity phosphoenolpyruvate carboxykinase is increased or generated in a non-human organism, like a microorganism or a plant cell, plant or part thereof, especially with non-targeted localization, whereby the respective line disclose in column 7 the fine chemical fructose. For example, an increase of the fructose of at least 1 percent, particularly in a range of 77 to 143-percent is conferred as compared to a corresponding non-transformed wild type non-human organism.

[88340] Accordingly, in one embodiment, an increase of glucose in a non-human organism, as compared to a corresponding non-transformed wild type non-human organism, is conferred in the process of the invention, if the activity of a polypeptide showing the activity of a phosphoenolpyruvate carboxykinase, or if the activity of the polypeptide B3403, preferably represented by SEQ ID NO. 82867, or a homolog or fragment thereof, or if the activity of a polypeptide encoded by a nucleic acid molecule comprising the nucleic acid SEQ ID NO. 82866, preferably the coding region thereof, or a homolog or fragment thereof, e.g. derived from Escherichia coli, is increased or generated. For example the activity of a nucleic acid molecule or a polypeptide comprising the nucleic acid, preferably the coding region thereof, or polypeptide or the consensus sequence or the polypeptide motif, as depicted in Table I, II or IV, application No. 17, column 5 or 8 in the respective same line as the nucleic acid molecule SEQ ID NO. 82866 or polypeptide SEQ ID NO. 82867, respectively, or a homolog or a fragment thereof, is increased or generated, or if the activity phosphoenolpyruvate carboxykinase is increased or generated in a non-human organism, like a microorganism or a plant cell, plant or part thereof, especially with non-targeted localization, whereby the respective line disclose in column 7 the fine chemical glucose. For example, an increase of the glucose of at least 1 percent, particularly in a range of 79 to 87-percent is conferred as compared to a corresponding non-transformed wild type non-human organism.

[88341] Accordingly, in one embodiment, an increase of 3,4,5-trihydroxypentanoic acid in a non-human organism, as compared to a corresponding non-transformed wild type non-human organism, is conferred in the process of the invention, if the activity of a polypeptide showing the activity of a B3427-protein, or if the activity of the polypeptide B3427, preferably represented by SEQ ID NO. 42580, or a homolog or fragment thereof, or if the activity of a polypeptide encoded by a nucleic acid molecule comprising the nucleic acid SEQ ID NO. 42579, preferably the coding region thereof, or a homolog or fragment thereof, e.g. derived from Escherichia coli, is increased or generated. For example the activity of a nucleic acid molecule or a polypeptide comprising the nucleic acid, preferably the coding region thereof, or polypeptide or the consensus sequence or the polypeptide motif, as depicted in Table I, II or IV, application No. 17, column 5 or 8 in the respective same line as the nucleic acid molecule SEQ ID NO. 42579 or polypeptide SEQ ID NO. 42580, respectively, or a homolog or a fragment thereof, is increased or generated, or if the activity B3427-protein is increased or generated in a non-human organism, like a microorganism or a plant cell, plant or part thereof, especially with non-targeted localization, whereby the respective line disclose in column 7 the fine chemical 3,4,5-trihydroxypentanoic acid. For example, an increase of the 3,4,5-trihydroxypentanoic acid of at least 1 percent, particularly in a range of 39 to 125-percent is conferred as compared to a corresponding non-transformed wild type non-human organism.

[88342] Accordingly, in one embodiment, an increase of fructose in a non-human organism, as compared to a corresponding non-transformed wild type non-human organism, is conferred in the process of the invention, if the activity of a polypeptide showing the activity of a glycogen synthase, or if the activity of the polypeptide B3429, preferably represented by SEQ ID NO. 94052, or a homolog or fragment thereof, or if the activity of a polypeptide encoded by a nucleic acid molecule comprising the nucleic acid SEQ ID NO. 94051, preferably the coding region thereof, or a homolog or fragment thereof, e.g. derived from Escherichia coli, is increased or generated. For example the activity of a nucleic acid molecule or a polypeptide comprising the nucleic acid, preferably the coding region thereof, or polypeptide or the consensus sequence or the polypeptide motif, as depicted in Table I, II or IV, application No. 17, column 5 or 8 in the respective same line as the nucleic acid molecule SEQ ID NO. 94051 or polypeptide SEQ ID NO. 94052, respectively, or a homolog or a fragment thereof, is increased or generated, or if the activity glycogen synthase is increased or generated in a non-human organism, like a microorganism or a plant cell, plant or part thereof, especially with mitochondrial localization, whereby the respective line disclose in column 7 the fine chemical fructose. For example, an increase of the fructose of at least 1 percent, particularly in a range of 79 to 211-percent is conferred as compared to a corresponding non-transformed wild type non-human organism.

[88343] Accordingly, in one embodiment, an increase of glucose in a non-human organism, as compared to a corresponding non-transformed wild type non-human organism, is conferred in the process of the invention, if the activity of a polypeptide showing the activity of a glycogen synthase, or if the activity of the polypeptide B3429, preferably represented by SEQ ID NO. 94052, or a homolog or fragment thereof, or if the activity of a polypeptide encoded by a nucleic acid molecule comprising the nucleic acid SEQ ID NO. 94051, preferably the coding region thereof, or a homolog or fragment thereof, e.g. derived from Escherichia coli, is increased or generated. For example the activity of a nucleic acid molecule or a polypeptide comprising the nucleic acid, preferably the coding region thereof, or polypeptide or the consensus sequence or the polypeptide motif, as depicted in Table I, II or IV, application No. 17, column 5 or 8 in the respective same line as the nucleic acid molecule SEQ ID NO. 94051 or polypeptide SEQ ID NO. 94052, respectively, or a homolog or a fragment thereof, is increased or generated, or if the activity glycogen synthase is increased or generated in a non-human organism, like a microorganism or a plant cell, plant or part thereof, especially with mitochondrial localization, whereby the respective line disclose in column 7 the fine chemical glucose. For example, an increase of the glucose of at least 1 percent, particularly in a range of 39 to 65-percent is conferred as compared to a corresponding non-transformed wild type non-human organism.

[88344] Accordingly, in one embodiment, an increase of myo-inositol in a non-human organism, as compared to a corresponding non-transformed wild type non-human organism, is conferred in the process of the invention, if the activity of a polypeptide showing the activity of a b3442-protein, or if the activity of the polypeptide B3442, preferably represented by SEQ ID NO. 94381, or a homolog or fragment thereof, or if the activity of a polypeptide encoded by a nucleic acid molecule comprising the nucleic acid SEQ ID NO. 94380, preferably the coding region thereof, or a homolog or fragment thereof, e.g. derived from Escherichia coli, is increased or generated. For example the activity of a nucleic acid molecule or a polypeptide comprising the nucleic acid, preferably the coding region thereof, or polypeptide or the consensus sequence or the polypeptide motif, as depicted in Table I, II or IV, application No. 17, column 5 or 8 in the respective same line as the nucleic acid molecule SEQ ID NO. 94380 or polypeptide SEQ ID NO. 94381, respectively, or a homolog or a fragment thereof, is increased or generated, or if the activity b3442-protein is increased or generated in a non-human organism, like a microorganism or a plant cell, plant or part thereof, especially with non-targeted localization, whereby the respective line disclose in column 7 the fine chemical myo-inositol. For example, an increase of the myo-inositol of at least 1 percent, particularly in a range of 27 to 82-percent is conferred as compared to a corresponding non-transformed wild type non-human organism.

[88345] Accordingly, in one embodiment, an increase of 3,4,5-trihydroxypentanoic acid in a non-human organism, as compared to a corresponding non-transformed wild type non-human organism, is conferred in the process of the invention, if the activity of a polypeptide showing the activity of a B3443-protein, or if the activity of the polypeptide B3443, preferably represented by SEQ ID NO. 146441, or a homolog or fragment thereof, or if the activity of a polypeptide encoded by a nucleic acid molecule comprising the nucleic acid SEQ ID NO. 146440, preferably the coding region thereof, or a homolog or fragment thereof, e.g. derived from Escherichia coli, is increased or generated. For example the activity of a nucleic acid molecule or a polypeptide comprising the nucleic acid, preferably the coding region thereof, or polypeptide or the consensus sequence or the polypeptide motif, as depicted in Table I, II or IV, application No. 17, column 5 or 8 in the respective same line as the nucleic acid molecule SEQ ID NO. 146440 or polypeptide SEQ ID NO. 146441, respectively, or a homolog or a fragment thereof, is increased or generated, or if the activity B3443-protein is increased or generated in a non-human organism, like a microorganism or a plant cell, plant or part thereof, especially with plastidic localization, whereby the respective line disclose in column 7 the fine chemical 3,4,5-trihydroxypentanoic acid. For example, an increase of the 3,4,5-trihydroxypentanoic acid of at least 1 percent, partitularly in a range of 44 to 69-percent is conferred as compared to a corresponding non-transformed wild type non-human organism.

[88346] Accordingly, in one embodiment, an increase of saccharic acid in a non-human organism, as compared to a corresponding non-transformed wild type non-human organism, is conferred in the process of the invention, if the activity of a polypeptide showing the activity of a sn-glycerol-3-phosphate transport system permease protein, or if the activity of the polypeptide B3451, preferably represented by SEQ ID NO. 116173, or a homolog or fragment thereof, or if the activity of a polypeptide encoded by a nucleic acid molecule comprising the nucleic acid SEQ ID NO. 116172, preferably the coding region thereof, or a homolog or fragment thereof, e.g. derived from Escherichia coli, is increased or generated. For example the activity of a nucleic acid molecule or a polypeptide comprising the nucleic acid, preferably the coding region thereof, or polypeptide or the consensus sequence or the polypeptide motif, as depicted in Table I, II or IV, application No. 17, column 5 or 8 in the respective same line as the nucleic acid molecule SEQ ID NO. 116172 or polypeptide SEQ ID NO. 116173, respectively, or a homolog or a fragment thereof, is increased or generated, or if the activity sn-glycerol-3-phosphate transport system permease protein is increased or generated in a non-human organism, like a microorganism or a plant cell, plant or part thereof, especially with plastidic localization, whereby the respective line disclose in column 7 the fine chemical saccharic acid. For example, an increase of the saccharic acid of at least 1 percent, particularly in a range of 53 to 59-percent is conferred as compared to a corresponding non-transformed wild type non-human organism.

[88347] Accordingly, in one embodiment, an increase of glucose-1-phosphate in a non-human organism, as compared to a corresponding non-transformed wild type non-human organism, is conferred in the process of the invention, if the activity of a polypeptide showing the activity of a high-affinity branched-chain amino acid transport protein, or if the activity of the polypeptide B3457, preferably represented by SEQ ID NO. 146473, or a homolog or fragment thereof, or if the activity of a polypeptide encoded by a nucleic acid molecule comprising the nucleic acid SEQ ID NO. 146472, preferably the coding region thereof, or a homolog or fragment thereof, e.g. derived from Escherichia coli, is increased or generated. For example the activity of a nucleic acid molecule or a polypeptide comprising the nucleic acid, preferably the coding region thereof, or polypeptide or the consensus sequence or the polypeptide motif, as depicted in Table I, II or IV, application No. 17, column 5 or 8 in the respective same line as the nucleic acid molecule SEQ ID NO. 146472 or polypeptide SEQ ID NO. 146473, respectively, or a homolog or a fragment thereof, is increased or generated, or if the activity high-affinity branched-chain amino acid transport protein is increased or generated in a non-human organism, like a microorganism or a plant cell, plant or part thereof, especially with non-targeted localization, whereby the respective line disclose in column 7 the fine chemical glucose-1-phosphate. For example, an increase of the glucose-1-phosphate of at least 1 percent, particularly in a range of 28 to 51-percent is conferred as compared to a corresponding non-transformed wild type non-human organism.

[88348] Accordingly, in one embodiment, an increase of myo-inositol in a non-human organism, as compared to a corresponding non-transformed wild type non-human organism, is conferred in the process of the invention, if the activity of a polypeptide showing the activity of a high-affinity branched-chain amino acid transport protein, or if the activity of the polypeptide B3457, preferably represented by SEQ ID NO. 146473, or a homolog or fragment thereof, or if the activity of a polypeptide encoded by a nucleic acid molecule comprising the nucleic acid SEQ ID NO. 146472, preferably the coding region thereof, or a homolog or fragment thereof, e.g. derived from Escherichia coli, is increased or generated. For example the activity of a nucleic acid molecule or a polypeptide comprising the nucleic acid, preferably the coding region thereof, or polypeptide or the consensus sequence or the polypeptide motif, as depicted in Table I, II or IV, application No. 17, column 5 or 8 in the respective same line as the nucleic acid molecule SEQ ID NO. 146472 or polypeptide SEQ ID NO. 146473, respectively, or a homolog or a fragment thereof, is increased or generated, or if the activity high-affinity branched-chain amino acid transport protein is increased or generated in a non-human organism, like a microorganism or a plant cell, plant or part thereof, especially with non-targeted localization, whereby the respective line disclose in column 7 the fine chemical myo-inositol. For example, an increase of the myo-inositol of at least 1 percent, particularly in a range of 24 to 54-percent is conferred as compared to a corresponding non-transformed wild type non-human organism.

[88349] Accordingly, in one embodiment, an increase of fructose in a non-human organism, as compared to a corresponding non-transformed wild type non-human organism, is conferred in the process of the invention, if the activity of a polypeptide showing the activity of a trehalase, or if the activity of the polypeptide B3519, preferably represented by SEQ ID NO. 146647, or a homolog or fragment thereof, or if the activity of a polypeptide encoded by a nucleic acid molecule comprising the nucleic acid SEQ ID NO. 146646, preferably the coding region thereof, or a homolog or fragment thereof, e.g. derived from Escherichia coli, is increased or generated. For example the activity of a nucleic acid molecule or a polypeptide comprising the nucleic acid, preferably the coding region thereof, or polypeptide or the consensus sequence or the polypeptide motif, as depicted in Table I, II or IV, application No. 17, column 5 or 8 in the respective same line as the nucleic acid molecule SEQ ID NO. 146646 or polypeptide SEQ ID NO. 146647, respectively, or a homolog or a fragment thereof, is increased or generated, or if the activity trehalase is increased or generated in a non-human organism, like a microorganism or a plant cell, plant or part thereof, especially with plastidic localization, whereby the respective line disclose in column 7 the fine chemical fructose. For example, an increase of the fructose of at least 1 percent, particularly in a range of 24 to 71-percent is conferred as compared to a corresponding non-transformed wild type non-human organism.

[88350] Accordingly, in one embodiment, an increase of galactinol in a non-human organism, as compared to a corresponding non-transformed wild type non-human organism, is conferred in the process of the invention, if the activity of a polypeptide showing the activity of a trehalase, or if the activity of the polypeptide B3519, preferably represented by SEQ ID NO. 146647, or a homolog or fragment thereof, or if the activity of a polypeptide encoded by a nucleic acid molecule comprising the nucleic acid SEQ ID NO. 146646, preferably the coding region thereof, or a homolog or fragment thereof, e.g. derived from Escherichia coli, is increased or generated. For example the activity of a nucleic acid molecule or a polypeptide comprising the nucleic acid, preferably the coding region thereof, or polypeptide or the consensus sequence or the polypeptide motif, as depicted in Table I, II or IV, application No. 17, column 5 or 8 in the respective same line as the nucleic acid molecule SEQ ID NO. 146646 or polypeptide SEQ ID NO. 146647, respectively, or a homolog or a fragment thereof, is increased or generated, or if the activity trehalase is increased or generated in a non-human organism, like a microorganism or a plant cell, plant or part thereof, especially with plastidic localization, whereby the respective line disclose in column 7 the fine chemical galactinol. For example, an increase of the galactinol of at least 1 percent, particularly in a range of 40 to 107-percent is conferred as compared to a corresponding non-transformed wild type non-human organism.

[88351] Accordingly, in one embodiment, an increase of fructose in a non-human organism, as compared to a corresponding non-transformed wild type non-human organism, is conferred in the process of the invention, if the activity of a polypeptide showing the activity of a mannitol-1-phosphate dehydrogenase, or if the activity of the polypeptide B3600, preferably represented by SEQ ID NO. 146733, or a homolog or fragment thereof, or if the activity of a polypeptide encoded by a nucleic acid molecule comprising the nucleic acid SEQ ID NO. 146732, preferably the coding region thereof, or a homolog or fragment thereof, e.g. derived from Escherichia coli, is increased or generated. For example the activity of a nucleic acid molecule or a polypeptide comprising the nucleic acid, preferably the coding region thereof, or polypeptide or the consensus sequence or the polypeptide motif, as depicted in Table I, II or IV, application No. 17, column 5 or 8 in the respective same line as the nucleic acid molecule SEQ ID NO. 146732 or polypeptide SEQ ID NO. 146733, respectively, or a homolog or a fragment thereof, is increased or generated, or if the activity mannitol-1-phosphate dehydrogenase is increased or generated in a non-human organism, like a microorganism or a plant cell, plant or part thereof, especially with non-targeted localization, whereby the respective line disclose in column 7 the fine chemical fructose. For example, an increase of the fructose of at least 1 percent, particularly in a range of 69 to 185-percent is conferred as compared to a corresponding non-transformed wild type non-human organism.

[88352] Accordingly, in one embodiment, an increase of mannitol in a non-human organism, as compared to a corresponding non-transformed wild type non-human organism, is conferred in the process of the invention, if the activity of a polypeptide showing the activity of a mannitol-1-phosphate dehydrogenase, or if the activity of the polypeptide B3600, preferably represented by SEQ ID NO. 146733, or a homolog or fragment thereof, or if the activity of a polypeptide encoded by a nucleic acid molecule comprising the nucleic acid SEQ ID NO. 146732, preferably the coding region thereof, or a homolog or fragment thereof, e.g. derived from Escherichia coli, is increased or generated. For example the activity of a nucleic acid molecule or a polypeptide comprising the nucleic acid, preferably the coding region thereof, or polypeptide or the consensus sequence or the polypeptide motif, as depicted in Table I, II or IV, application No. 17, column 5 or 8 in the respective same line as the nucleic acid molecule SEQ ID NO. 146732 or polypeptide SEQ ID NO. 146733, respectively, or a homolog or a fragment thereof, is increased or generated, or if the activity mannitol-1-phosphate dehydrogenase is increased or generated in a non-human organism, like a microorganism or a plant cell, plant or part thereof, especially with non-targeted localization, whereby the respective line disclose in column 7 the fine chemical mannitol. For example, an increase of the mannitol of at least 1 percent, particularly in a range of 422 to 16165-percent is conferred as compared to a corresponding non-transformed wild type non-human organism.

[88353] Accordingly, in one embodiment, an increase of sorbitol in a non-human organism, as compared to a corresponding non-transformed wild type non-human organism, is conferred in the process of the invention, if the activity of a polypeptide showing the activity of a mannitol-1-phosphate dehydrogenase, or if the activity of the polypeptide B3600, preferably represented by SEQ ID NO. 146733, or a homolog or fragment thereof, or if the activity of a polypeptide encoded by a nucleic acid molecule comprising the nucleic acid SEQ ID NO. 146732, preferably the coding region thereof, or a homolog or fragment thereof, e.g. derived from Escherichia coli, is increased or generated. For example the activity of a nucleic acid molecule or a polypeptide comprising the nucleic acid, preferably the coding region thereof, or polypeptide or the consensus sequence or the polypeptide motif, as depicted in Table I, II or IV, application No. 17, column 5 or 8 in the respective same line as the nucleic acid molecule SEQ ID NO. 146732 or polypeptide SEQ ID NO. 146733, respectively, or a homolog or a fragment thereof, is increased or generated, or if the activity mannitol-1-phosphate dehydrogenase is increased or generated in a non-human organism, like a microorganism or a plant cell, plant or part thereof, especially with non-targeted localization, whereby the respective line disclose in column 7 the fine chemical sorbitol. For example, an increase of the sorbitol of at least 1 percent, particularly in a range of 3140 to 12520-percent is conferred as compared to a corresponding non-transformed wild type non-human organism.

[88354] Accordingly, in one embodiment, an increase of galactinol in a non-human organism, as compared to a corresponding non-transformed wild type non-human organism, is conferred in the process of the invention, if the activity of a polypeptide showing the activity of a ketol-acid reductoisomerase, or if the activity of the polypeptide B3774, preferably represented by SEQ ID NO. 94387, or a homolog or fragment thereof, or if the activity of a polypeptide encoded by a nucleic acid molecule comprising the nucleic acid SEQ ID NO. 94386, preferably the coding region thereof, or a homolog or fragment thereof, e.g. derived from Escherichia coli, is increased or generated. For example the activity of a nucleic acid molecule or a polypeptide comprising the nucleic acid, preferably the coding region thereof, or polypeptide or the consensus sequence or the polypeptide motif, as depicted in Table I, II or IV, application No. 17, column 5 or 8 in the respective same line as the nucleic acid molecule SEQ ID NO. 94386 or polypeptide SEQ ID NO. 94387, respectively, or a homolog or a fragment thereof, is increased or generated, or if the activity ketol-acid reductoisomerase is increased or generated in a non-human organism, like a microorganism or a plant cell, plant or part thereof, especially with non-targeted localization, whereby the respective line disclose in column 7 the fine chemical galactinol. For example, an increase of the galactinol of at least 1 percent, particularly in a range of 37 to 119-percent is conferred as compared to a corresponding non-transformed wild type non-human organism.

[88355] Accordingly, in one embodiment, an increase of myo-inositol in a non-human organism, as compared to a corresponding non-transformed wild type non-human organism, is conferred in the process of the invention, if the activity of a polypeptide showing the activity of a b3777-protein, or if the activity of the polypeptide B3777, preferably represented by SEQ ID NO. 136099, or a homolog or fragment thereof, or if the activity of a polypeptide encoded by a nucleic acid molecule comprising the nucleic acid SEQ ID NO. 136098, preferably the coding region thereof, or a homolog or fragment thereof, e.g. derived from Escherichia coli, is increased or generated. For example the activity of a nucleic acid molecule or a polypeptide comprising the nucleic acid, preferably the coding region thereof, or polypeptide or the consensus sequence or the polypeptide motif, as depicted in Table I, II or IV, application No. 17, column 5 or 8 in the respective same line as the nucleic acid molecule SEQ ID NO. 136098 or polypeptide SEQ ID NO. 136099, respectively, or a homolog or a fragment thereof, is increased or generated, or if the activity b3777-protein is increased or generated in a non-human organism, like a microorganism or a plant cell, plant or part thereof, especially with non-targeted localization, whereby the respective line disclose in column 7 the fine chemical myo-inositol. For example, an increase of the myo-inositol of at least 1 percent, particularly in a range of 26 to 50-percent is conferred as compared to a corresponding non-transformed wild type non-human organism.

[88356] Accordingly, in one embodiment, an increase of myo-inositol in a non-human organism, as compared to a corresponding non-transformed wild type non-human organism, is conferred in the process of the invention, if the activity of a polypeptide showing the activity of a b3817-protein, or if the activity of the polypeptide B3817, preferably represented by SEQ ID NO. 10709, or a homolog or fragment thereof, or if the activity of a polypeptide encoded by a nucleic acid molecule comprising the nucleic acid SEQ ID NO. 10708, preferably the coding region thereof, or a homolog or fragment thereof, e.g. derived from Escherichia coli, is increased or generated. For example the activity of a nucleic acid molecule or a polypeptide comprising the nucleic acid, preferably the coding region thereof, or polypeptide or the consensus sequence or the polypeptide motif, as depicted in Table I, II or IV, application No. 17, column 5 or 8 in the respective same line as the nucleic acid molecule SEQ ID NO. 10708 or polypeptide SEQ ID NO. 10709, respectively, or a homolog or a fragment thereof, is increased or generated, or if the activity b3817-protein is increased or generated in a non-human organism, like a microorganism or a plant cell, plant or part thereof, especially with non-targeted localization, whereby the respective line disclose in column 7 the fine chemical myo-inositol. For example, an increase of the myo-inositol of at least 1 percent, particularly in a range of 38 to 203-percent is conferred as compared to a corresponding non-transformed wild type non-human organism.

[88357] Accordingly, in one embodiment, an increase of raffinose in a non-human organism, as compared to a corresponding non-transformed wild type non-human organism, is conferred in the process of the invention, if the activity of a polypeptide showing the activity of a b3817-protein, or if the activity of the polypeptide B3817, preferably represented by SEQ ID NO. 10709, or a homolog or fragment thereof, or if the activity of a polypeptide encoded by a nucleic acid molecule comprising the nucleic acid SEQ ID NO. 10708, preferably the coding region thereof, or a homolog or fragment thereof, e.g. derived from Escherichia coli, is increased or generated. For example the activity of a nucleic acid molecule or a polypeptide comprising the nucleic acid, preferably the coding region thereof, or polypeptide or the consensus sequence or the polypeptide motif, as depicted in Table I, II or IV, application No. 17, column 5 or 8 in the respective same line as the nucleic acid molecule SEQ ID NO. 10708 or polypeptide SEQ ID NO. 10709, respectively, or a homolog or a fragment thereof, is increased or generated, or if the activity b3817-protein is increased or generated in a non-human organism, like a microorganism or a plant cell, plant or part thereof, especially with non-targeted localization, whereby the respective line disclose in column 7 the fine chemical raffinose. For example, an increase of the raffinose of at least 1 percent, particularly in a range of 220 to 467-percent is conferred as compared to a corresponding non-transformed wild type non-human organism.

[88358] Accordingly, in one embodiment, an increase of myo-inositol in a non-human organism, as compared to a corresponding non-transformed wild type non-human organism, is conferred in the process of the invention, if the activity of a polypeptide showing the activity of a b3818-protein, or if the activity of the polypeptide B3818, preferably represented by SEQ ID NO. 146835, or a homolog or fragment thereof, or if the activity of a polypeptide encoded by a nucleic acid molecule comprising the nucleic acid SEQ ID NO. 146834, preferably the coding region thereof, or a homolog or fragment thereof, e.g. derived from Escherichia coli, is increased or generated. For example the activity of a nucleic acid molecule or a polypeptide comprising the nucleic acid, preferably the coding region thereof, or polypeptide or the consensus sequence or the polypeptide motif, as depicted in Table I, II or IV, application No. 17, column 5 or 8 in the respective same line as the nucleic acid molecule SEQ ID NO. 146834 or polypeptide SEQ ID NO. 146835, respectively, or a homolog or a fragment thereof, is increased or generated, or if the activity b3818-protein is increased or generated in a non-human organism, like a microorganism or a plant cell, plant or part thereof, especially with non-targeted localization, whereby the respective line disclose in column 7 the fine chemical myo-inositol. For example, an increase of the myo-inositol of at least 1 percent, particularly in a range of 31 to 45-percent is conferred as compared to a corresponding non-transformed wild type non-human organism.

[88359] Accordingly, in one embodiment, an increase of myo-inositol in a non-human organism, as compared to a corresponding non-transformed wild type non-human organism, is conferred in the process of the invention, if the activity of a polypeptide showing the activity of a threonine efflux protein, or if the activity of the polypeptide B3823, preferably represented by SEQ ID NO. 10727, or a homolog or fragment thereof, or if the activity of a polypeptide encoded by a nucleic acid molecule comprising the nucleic acid SEQ ID NO. 10726, preferably the coding region thereof, or a homolog or fragment thereof, e.g. derived from Escherichia coli, is increased or generated. For example the activity of a nucleic acid molecule or a polypeptide comprising the nucleic acid, preferably the coding region thereof, or polypeptide or the consensus sequence or the polypeptide motif, as depicted in Table I, II or IV, application No. 17, column 5 or 8 in the respective same line as the nucleic acid molecule SEQ ID NO. 10726 or polypeptide SEQ ID NO. 10727, respectively, or a homolog or a fragment thereof, is increased or generated, or if the activity threonine efflux protein is increased or generated in a non-human organism, like a microorganism or a plant cell, plant or part thereof, especially with non-targeted localization, whereby the respective line disclose in column 7 the fine chemical myo-inositol. For example, an increase of the myo-inositol of at least 1 percent, particularly in a range of 29 to 113-percent is conferred as compared to a corresponding non-transformed wild type non-human organism.

[88360] Accordingly, in one embodiment, an increase of myo-inositol in a non-human organism, as compared to a corresponding non-transformed wild type non-human organism, is conferred in the process of the invention, if the activity of a polypeptide showing the activity of a glutamine synthetase, or if the activity of the polypeptide B3870, preferably represented by SEQ ID NO. 101328, or a homolog or fragment thereof, or if the activity of a polypeptide encoded by a nucleic acid molecule comprising the nucleic acid SEQ ID NO. 101327, preferably the coding region thereof, or a homolog or fragment thereof, e.g. derived from Escherichia coli, is increased or generated. For example the activity of a nucleic acid molecule or a polypeptide comprising the nucleic acid, preferably the coding region thereof, or polypeptide or the consensus sequence or the polypeptide motif, as depicted in Table I, II or IV, application No. 17, column 5 or 8 in the respective same line as the nucleic acid molecule SEQ ID NO. 101327 or polypeptide SEQ ID NO. 101328, respectively, or a homolog or a fragment thereof, is increased or generated, or if the activity glutamine synthetase is increased or generated in a non-human organism, like a microorganism or a plant cell, plant or part thereof, especially with plastidic localization, whereby the respective line disclose in column 7 the fine chemical myo-inositol. For example, an increase of the myo-inositol of at least 1 percent, particularly in a range of 26 to 69-percent is conferred as compared to a corresponding non-transformed wild type non-human organism.

[88361] Accordingly, in one embodiment, an increase of verbascose in a non-human organism, as compared to a corresponding non-transformed wild type non-human organism, is conferred in the process of the invention, if the activity of a polypeptide showing the activity of a glutamine synthetase, or if the activity of the polypeptide B3870, preferably represented by SEQ ID NO. 101328, or a homolog or fragment thereof, or if the activity of a polypeptide encoded by a nucleic acid molecule comprising the nucleic acid SEQ ID NO. 101327, preferably the coding region thereof, or a homolog or fragment thereof, e.g. derived from Escherichia coli, is increased or generated. For example the activity of a nucleic acid molecule or a polypeptide comprising the nucleic acid, preferably the coding region thereof, or polypeptide or the consensus sequence or the polypeptide motif, as depicted in Table I, II or IV, application No. 17, column 5 or 8 in the respective same line as the nucleic acid molecule SEQ ID NO. 101327 or polypeptide SEQ ID NO. 101328, respectively, or a homolog or a fragment thereof, is increased or generated, or if the activity glutamine synthetase is increased or generated in a non-human organism, like a microorganism or a plant cell, plant or part thereof, especially with plastidic localization, whereby the respective line disclose in column 7 the fine chemical verbascose. For example, an increase of the verbascose of at least 1 percent, particularly in a range of 67 to 181-percent is conferred as compared to a corresponding non-transformed wild type non-human organism.

[88362] Accordingly, in one embodiment, an increase of glucose-1-phosphate in a non-human organism, as compared to a corresponding non-transformed wild type non-human organism, is conferred in the process of the invention, if the activity of a polypeptide showing the activity of a transcriptional regulator, or if the activity of the polypeptide B3872, preferably represented by SEQ ID NO. 83822, or a homolog or fragment thereof, or if the activity of a polypeptide encoded by a nucleic acid molecule comprising the nucleic acid SEQ ID NO. 83821, preferably the coding region thereof, or a homolog or fragment thereof, e.g. derived from Escherichia coli, is increased or generated. For example the activity of a nucleic acid molecule or a polypeptide comprising the nucleic acid, preferably the coding region thereof, or polypeptide or the consensus sequence or the polypeptide motif, as depicted in Table I, II or IV, application No. 17, column 5 or 8 in the respective same line as the nucleic acid molecule SEQ ID NO. 83821 or polypeptide SEQ ID NO. 83822, respectively, or a homolog or a fragment thereof, is increased or generated, or if the activity transcriptional regulator is increased or generated in a non-human organism, like a microorganism or a plant cell, plant or part thereof, especially with plastidic localization, whereby the respective line disclose in column 7 the fine chemical glucose-1-phosphate. For example, an increase of the glucose-1-phosphate of at least 1 percent, particularly in a range of 27 to 59-percent is conferred as compared to a corresponding non-transformed wild type non-human organism.

[88363] Accordingly, in one embodiment, an increase of fructose in a non-human organism, as compared to a corresponding non-transformed wild type non-human organism, is conferred in the process of the invention, if the activity of a polypeptide showing the activity of a b3989-protein, or if the activity of the polypeptide B3989, preferably represented by SEQ ID NO. 44373, or a homolog or fragment thereof, or if the activity of a polypeptide encoded by a nucleic acid molecule comprising the nucleic acid SEQ ID NO. 44372, preferably the coding region thereof, or a homolog or fragment thereof, e.g. derived from Escherichia coli, is increased or generated. For example the activity of a nucleic acid molecule or a polypeptide comprising the nucleic acid, preferably the coding region thereof, or polypeptide or the consensus sequence or the polypeptide motif, as depicted in Table I, II or IV, application No. 17, column 5 or 8 in the respective same line as the nucleic acid molecule SEQ ID NO. 44372 or polypeptide SEQ ID NO. 44373, respectively, or a homolog or a fragment thereof, is increased or generated, or if the activity b3989-protein is increased or generated in a non-human organism, like a microorganism or a plant cell, plant or part thereof, especially with non-targeted localization, whereby the respective line disclose in column 7 the fine chemical fructose. For example, an increase of the fructose of at least 1 percent, particularly in a range of 105 to 1389-percent is conferred as compared to a corresponding non-transformed wild type non-human organism.

[88364] Accordingly, in one embodiment, an increase of glucose in a non-human organism, as compared to a corresponding non-transformed wild type non-human organism, is conferred in the process of the invention, if the activity of a polypeptide showing the activity of a b3989-protein, or if the activity of the polypeptide B3989, preferably represented by SEQ ID NO. 44373, or a homolog or fragment thereof, or if the activity of a polypeptide encoded by a nucleic acid molecule comprising the nucleic acid SEQ ID NO. 44372, preferably the coding region thereof, or a homolog or fragment thereof, e.g. derived from Escherichia coli, is increased or generated. For example the activity of a nucleic acid molecule or a polypeptide comprising the nucleic acid, preferably the coding region thereof, or polypeptide or the consensus sequence or the polypeptide motif, as depicted in Table I, II or IV, application No. 17, column 5 or 8 in the respective same line as the nucleic acid molecule SEQ ID NO. 44372 or polypeptide SEQ ID NO. 44373, respectively, or a homolog or a fragment thereof, is increased or generated, or if the activity b3989-protein is increased or generated in a non-human organism, like a microorganism or a plant cell, plant or part thereof, especially with non-targeted localization, whereby the respective line disclose in column 7 the fine chemical glucose. For example, an increase of the glucose of at least 1 percent, particularly in a range of 90 to 370-percent is conferred as compared to a corresponding non-transformed wild type non-human organism.

[88365] Accordingly, in one embodiment, an increase of glucose-1-phosphate in a non-human organism, as compared to a corresponding non-transformed wild type non-human organism, is conferred in the process of the invention, if the activity of a polypeptide showing the activity of a b3989-protein, or if the activity of the polypeptide B3989, preferably represented by SEQ ID NO. 44373, or a homolog or fragment thereof, or if the activity of a polypeptide encoded by a nucleic acid molecule comprising the nucleic acid SEQ ID NO. 44372, preferably the coding region thereof, or a homolog or fragment thereof, e.g. derived from Escherichia coli, is increased or generated. For example the activity of a nucleic acid molecule or a polypeptide comprising the nucleic acid, preferably the coding region thereof, or polypeptide or the consensus sequence or the polypeptide motif, as depicted in Table I, II or IV, application No. 17, column 5 or 8 in the respective same line as the nucleic acid molecule SEQ ID NO. 44372 or polypeptide SEQ ID NO. 44373, respectively, or a homolog or a fragment thereof, is increased or generated, or if the activity b3989-protein is increased or generated in a non-human organism, like a microorganism or a plant cell, plant or part thereof, especially with non-targeted localization, whereby the respective line disclose in column 7 the fine chemical glucose-1-phosphate. For example, an increase of the glucose-1-phosphate of at least 1 percent, particularly in a range of 18 to 43-percent is conferred as compared to a corresponding non-transformed wild type non-human organism.

[88366] Accordingly, in one embodiment, an increase of raffinose in a non-human organism, as compared to a corresponding non-transformed wild type non-human organism, is conferred in the process of the invention, if the activity of a polypeptide showing the activity of a b3989-protein, or if the activity of the polypeptide B3989, preferably represented by SEQ ID NO. 44373, or a homolog or fragment thereof, or if the activity of a polypeptide encoded by a nucleic acid molecule comprising the nucleic acid SEQ ID NO. 44372, preferably the coding region thereof, or a homolog or fragment thereof, e.g. derived from Escherichia coli, is increased or generated. For example the activity of a nucleic acid molecule or a polypeptide comprising the nucleic acid, preferably the coding region thereof, or polypeptide or the consensus sequence or the polypeptide motif, as depicted in Table I, II or IV, application No. 17, column 5 or 8 in the respective same line as the nucleic acid molecule SEQ ID NO. 44372 or polypeptide SEQ ID NO. 44373, respectively, or a homolog or a fragment thereof, is increased or generated, or if the activity b3989-protein is increased or generated in a non-human organism, like a microorganism or a plant cell, plant or part thereof, especially with non-targeted localization, whereby the respective line disclose in column 7 the fine chemical raffinose. For example, an increase of the raffinose of at least 1 percent, particularly in a range of 95 to 272-percent is conferred as compared to a corresponding non-transformed wild type non-human organism.

[88367] Accordingly, in one embodiment, an increase of sucrose in a non-human organism, as compared to a corresponding non-transformed wild type non-human organism, is conferred in the process of the invention, if the activity of a polypeptide showing the activity of a b3989-protein, or if the activity of the polypeptide B3989, preferably represented by SEQ ID NO. 44373, or a homolog or fragment thereof, or if the activity of a polypeptide encoded by a nucleic acid molecule comprising the nucleic acid SEQ ID NO. 44372, preferably the coding region thereof, or a homolog or fragment thereof, e.g. derived from Escherichia coli, is increased or generated. For example the activity of a nucleic acid molecule or a polypeptide comprising the nucleic acid, preferably the coding region thereof, or polypeptide or the consensus sequence or the polypeptide motif, as depicted in Table I, II or IV, application No. 17, column 5 or 8 in the respective same line as the nucleic acid molecule SEQ ID NO. 44372 or polypeptide SEQ ID NO. 44373, respectively, or a homolog or a fragment thereof, is increased or generated, or if the activity b3989-protein is increased or generated in a non-human organism, like a microorganism or a plant cell, plant or part thereof, especially with non-targeted localization, whereby the respective line disclose in column 7 the fine chemical sucrose. For example, an increase of the sucrose of at least 1 percent, particularly in a range of 37 to 65-percent is conferred as compared to a corresponding non-transformed wild type non-human organism.

[88368] Accordingly, in one embodiment, an increase of galactinol in a non-human organism, as compared to a corresponding non-transformed wild type non-human organism, is conferred in the process of the invention, if the activity of a polypeptide showing the activity of a acetyltransferase, or if the activity of the polypeptide B4012, preferably represented by SEQ ID NO. 44379, or a homolog or fragment thereof, or if the activity of a polypeptide encoded by a nucleic acid molecule comprising the nucleic acid SEQ ID NO. 44378, preferably the coding region thereof, or a homolog or fragment thereof, e.g. derived from Escherichia coli, is increased or generated. For example the activity of a nucleic acid molecule or a polypeptide comprising the nucleic acid, preferably the coding region thereof, or polypeptide or the consensus sequence or the polypeptide motif, as depicted in Table I, II or IV, application No. 17, column 5 or 8 in the respective same line as the nucleic acid molecule SEQ ID NO. 44378 or polypeptide SEQ ID NO. 44379, respectively, or a homolog or a fragment thereof, is increased or generated, or if the activity acetyltransferase is increased or generated in a non-human organism, like a microorganism or a plant cell, plant or part thereof, especially with non-targeted localization, whereby the respective line disclose in column 7 the fine chemical galactinol. For example, an increase of the galactinol of at least 1 percent, particularly in a range of 37 to 102-percent is conferred as compared to a corresponding non-transformed wild type non-human organism.

[88369] Accordingly, in one embodiment, an increase of fructose in a non-human organism, as compared to a corresponding non-transformed wild type non-human organism, is conferred in the process of the invention, if the activity of a polypeptide showing the activity of a b4029-protein, or if the activity of the polypeptide B4029, preferably represented by SEQ ID NO. 10741, or a homolog or fragment thereof, or if the activity of a polypeptide encoded by a nucleic acid molecule comprising the nucleic acid SEQ ID NO. 10740, preferably the coding region thereof, or a homolog or fragment thereof, e.g. derived from Escherichia coli, is increased or generated. For example the activity of a nucleic acid molecule or a polypeptide comprising the nucleic acid, preferably the coding region thereof, or polypeptide or the consensus sequence or the polypeptide motif, as depicted in Table I, II or IV, application No. 17, column 5 or 8 in the respective same line as the nucleic acid molecule SEQ ID NO. 10740 or polypeptide SEQ ID NO. 10741, respectively, or a homolog or a fragment thereof, is increased or generated, or if the activity b4029-protein is increased or generated in a non-human organism, like a microorganism or a plant cell, plant or part thereof, especially with non-targeted localization, whereby the respective line disclose in column 7 the fine chemical fructose. For example, an increase of the fructose of at least 1 percent, particularly in a range of 83 to 2120-percent is conferred as compared to a corresponding non-transformed wild type non-human organism.

[88370] Accordingly, in one embodiment, an increase of glucose in a non-human organism, as compared to a corresponding non-transformed wild type non-human organism, is conferred in the process of the invention, if the activity of a polypeptide showing the activity of a b4029-protein, or if the activity of the polypeptide B4029, preferably represented by SEQ ID NO. 10741, or a homolog or fragment thereof, or if the activity of a polypeptide encoded by a nucleic acid molecule comprising the nucleic acid SEQ ID NO. 10740, preferably the coding region thereof, or a homolog or fragment thereof, e.g. derived from Escherichia coli, is increased or generated. For example the activity of a nucleic acid molecule or a polypeptide comprising the nucleic acid, preferably the coding region thereof, or polypeptide or the consensus sequence or the polypeptide motif, as depicted in Table I, II or IV, application No. 17, column 5 or 8 in the respective same line as the nucleic acid molecule SEQ ID NO. 10740 or polypeptide SEQ ID NO. 10741, respectively, or a homolog or a fragment thereof, is increased or generated, or if the activity b4029-protein is increased or generated in a non-human organism, like a microorganism or a plant cell, plant or part thereof, especially with non-targeted localization, whereby the respective line disclose in column 7 the fine chemical glucose. For example, an increase of the glucose of at least 1 percent, particularly in a range of 72 to 1072-percent is conferred as compared to a corresponding non-transformed wild type non-human organism.

[88371] Accordingly, in one embodiment, an increase of sedoheptulose-7-phosphate in a non-human organism, as compared to a corresponding non-transformed wild type non-human organism, is conferred in the process of the invention, if the activity of a polypeptide showing the activity of a b4029-protein, or if the activity of the polypeptide B4029, preferably represented by SEQ ID NO. 10741, or a homolog or fragment thereof, or if the activity of a polypeptide encoded by a nucleic acid molecule comprising the nucleic acid SEQ ID NO. 10740, preferably the coding region thereof, or a homolog or fragment thereof, e.g. derived from Escherichia coli, is increased or generated. For example the activity of a nucleic acid molecule or a polypeptide comprising the nucleic acid, preferably the coding region thereof, or polypeptide or the consensus sequence or the polypeptide motif, as depicted in Table I, II or IV, application No. 17, column 5 or 8 in the respective same line as the nucleic acid molecule SEQ ID NO. 10740 or polypeptide SEQ ID NO. 10741, respectively, or a homolog or a fragment thereof, is increased or generated, or if the activity b4029-protein is increased or generated in a non-human organism, like a microorganism or a plant cell, plant or part thereof, especially with non-targeted localization, whereby the respective line disclose in column 7 the fine chemical sedoheptulose-7-phosphate. For example, an increase of the sedoheptulose-7-phosphate of at least 1 percent, particularly in a range of 46 to 404-percent is conferred as compared to a corresponding non-transformed wild type non-human organism.

[88372] Accordingly, in one embodiment, an increase of glucose-1-phosphate in a non-human organism, as compared to a corresponding non-transformed wild type non-human organism, is conferred in the process of the invention, if the activity of a polypeptide showing the activity of a chorismate lyase, or if the activity of the polypeptide B4039, preferably represented by SEQ ID NO. 146849, or a homolog or fragment thereof, or if the activity of a polypeptide encoded by a nucleic acid molecule comprising the nucleic acid SEQ ID NO. 146848, preferably the coding region thereof, or a homolog or fragment thereof, e.g. derived from Escherichia coli, is increased or generated. For example the activity of a nucleic acid molecule or a polypeptide comprising the nucleic acid, preferably the coding region thereof, or polypeptide or the consensus sequence or the polypeptide motif, as depicted in Table I, II or IV, application No. 17, column 5 or 8 in the respective same line as the nucleic acid molecule SEQ ID NO. 146848 or polypeptide SEQ ID NO. 146849, respectively, or a homolog or a fragment thereof, is increased or generated, or if the activity chorismate lyase is increased or generated in a non-human organism, like a microorganism or a plant cell, plant or part thereof, especially with plastidic localization, whereby the respective line disclose in column 7 the fine chemical glucose-1-phosphate. For example, an increase of the glucose-1-phosphate of at least 1 percent, particularly in a range of 20 to 54-percent is conferred as compared to a corresponding non-transformed wild type non-human organism.

[88373] Accordingly, in one embodiment, an increase of 3,4,5-trihydroxypentanoic acid in a non-human organism, as compared to a corresponding non-transformed wild type non-human organism, is conferred in the process of the invention, if the activity of a polypeptide showing the activity of a chorismate lyase, or if the activity of the polypeptide B4039, preferably represented by SEQ ID NO. 146849, or a homolog or fragment thereof, or if the activity of a polypeptide encoded by a nucleic acid molecule comprising the nucleic acid SEQ ID NO. 146848, preferably the coding region thereof, or a homolog or fragment thereof, e.g. derived from Escherichia coli, is increased or generated. For example the activity of a nucleic acid molecule or a polypeptide comprising the nucleic acid, preferably the coding region thereof, or polypeptide or the consensus sequence or the polypeptide motif, as depicted in Table I, II or IV, application No. 17, column 5 or 8 in the respective same line as the nucleic acid molecule SEQ ID NO. 146848 or polypeptide SEQ ID NO. 146849, respectively, or a homolog or a fragment thereof, is increased or generated, or if the activity chorismate lyase is increased or generated in a non-human organism, like a microorganism or a plant cell, plant or part thereof, especially with plastidic localization, whereby the respective line disclose in column 7 the fine chemical 3,4,5-trihydroxypentanoic acid. For example, an increase of the 3,4,5-trihydroxypentanoic acid of at least 1 percent, particularly in a range of 33 to 87-percent is conferred as compared to a corresponding non-transformed wild type non-human organism.

[88374] Accordingly, in one embodiment, an increase of fructose in a non-human organism, as compared to a corresponding non-transformed wild type non-human organism, is conferred in the process of the invention, if the activity of a polypeptide showing the activity of a b4050-protein, or if the activity of the polypeptide B4050, preferably represented by SEQ ID NO. 106533, or a homolog or fragment thereof, or if the activity of a polypeptide encoded by a nucleic acid molecule comprising the nucleic acid SEQ ID NO. 106532, preferably the coding region thereof, or a homolog or fragment thereof, e.g. derived from Escherichia coli, is increased or generated. For example the activity of a nucleic acid molecule or a polypeptide comprising the nucleic acid, preferably the coding region thereof, or polypeptide or the consensus sequence or the polypeptide motif, as depicted in Table I, II or IV, application No. 17, column 5 or 8 in the respective same line as the nucleic acid molecule SEQ ID NO. 106532 or polypeptide SEQ ID NO. 106533, respectively, or a homolog or a fragment thereof, is increased or generated, or if the activity b4050-protein is increased or generated in a non-human organism, like a microorganism or a plant cell, plant or part thereof, especially with non-targeted localization, whereby the respective line disclose in column 7 the fine chemical fructose. For example, an increase of the fructose of at least 1 percent, particularly in a range of 114 to 1402-percent is conferred as compared to a corresponding non-transformed wild type non-human organism.

[88375] Accordingly, in one embodiment, an increase of glucose in a non-human organism, as compared to a corresponding non-transformed wild type non-human organism, is conferred in the process of the invention, if the activity of a polypeptide showing the activity of a b4050-protein, or if the activity of the polypeptide B4050, preferably represented by SEQ ID NO. 106533, or a homolog or fragment thereof, or if the activity of a polypeptide encoded by a nucleic acid molecule comprising the nucleic acid SEQ ID NO. 106532, preferably the coding region thereof, or a homolog or fragment thereof, e.g. derived from Escherichia coli, is increased or generated. For example the activity of a nucleic acid molecule or a polypeptide comprising the nucleic acid, preferably the coding region thereof, or polypeptide or the consensus sequence or the polypeptide motif, as depicted in Table I, II or IV, application No. 17, column 5 or 8 in the respective same line as the nucleic acid molecule SEQ ID NO. 106532 or polypeptide SEQ ID NO. 106533, respectively, or a homolog or a fragment thereof, is increased or generated, or if the activity b4050-protein is increased or generated in a non-human organism, like a microorganism or a plant cell, plant or part thereof, especially with non-targeted localization, whereby the respective line disclose in column 7 the fine chemical glucose. For example, an increase of the glucose of at least 1 percent, particularly in a range of 102 to 725-percent is conferred as compared to a corresponding non-transformed wild type non-human organism.

[88376] Accordingly, in one embodiment, an increase of myo-inositol in a non-human organism, as compared to a corresponding non-transformed wild type non-human organism, is conferred in the process of the invention, if the activity of a polypeptide showing the activity of a b4050-protein, or if the activity of the polypeptide B4050, preferably represented by SEQ ID NO. 106533, or a homolog or fragment thereof, or if the activity of a polypeptide encoded by a nucleic acid molecule comprising the nucleic acid SEQ ID NO. 106532, preferably the coding region thereof, or a homolog or fragment thereof, e.g. derived from Escherichia coli, is increased or generated. For example the activity of a nucleic acid molecule or a polypeptide comprising the nucleic acid, preferably the coding region thereof, or polypeptide or the consensus sequence or the polypeptide motif, as depicted in Table I, II or IV, application No. 17, column 5 or 8 in the respective same line as the nucleic acid molecule SEQ ID NO. 106532 or polypeptide SEQ ID NO. 106533, respectively, or a homolog or a fragment thereof, is increased or generated, or if the activity b4050-protein is increased or generated in a non-human organism, like a microorganism or a plant cell, plant or part thereof, especially with non-targeted localization, whereby the respective line disclose in column 7 the fine chemical myo-inositol. For example, an increase of the myo-inositol of at least 1 percent, particularly in a range of 27 to 309-percent is conferred as compared to a corresponding non-transformed wild type non-human organism.

[88377] Accordingly, in one embodiment, an increase of fructose in a non-human organism, as compared to a corresponding non-transformed wild type non-human organism, is conferred in the process of the invention, if the activity of a polypeptide showing the activity of a b4056-protein, or if the activity of the polypeptide B4056, preferably represented by SEQ ID NO. 94543, or a homolog or fragment thereof, or if the activity of a polypeptide encoded by a nucleic acid molecule comprising the nucleic acid SEQ ID NO. 94542, preferably the coding region thereof, or a homolog or fragment thereof, e.g. derived from Escherichia coli, is increased or generated. For example the activity of a nucleic acid molecule or a polypeptide comprising the nucleic acid, preferably the coding region thereof, or polypeptide or the consensus sequence or the polypeptide motif, as depicted in Table I, II or IV, application No. 17, column 5 or 8 in the respective same line as the nucleic acid molecule SEQ ID NO. 94542 or polypeptide SEQ ID NO. 94543, respectively, or a homolog or a fragment thereof, is increased or generated, or if the activity b4056-protein is increased or generated in a non-human organism, like a microorganism or a plant cell, plant or part thereof, especially with non-targeted localization, whereby the respective line disclose in column 7 the fine chemical fructose. For example, an increase of the fructose of at least 1 percent, particularly in a range of 140 to 163-percent is conferred as compared to a corresponding non-transformed wild type non-human organism.

[88378] Accordingly, in one embodiment, an increase of galactinol in a non-human organism, as compared to a corresponding non-transformed wild type non-human organism, is conferred in the process of the invention, if the activity of a polypeptide showing the activity of a acetylcoenzyme A synthetase, or if the activity of the polypeptide B4069, preferably represented by SEQ ID NO. 126422, or a homolog or fragment thereof, or if the activity of a polypeptide encoded by a nucleic acid molecule comprising the nucleic acid SEQ ID NO. 126421, preferably the coding region thereof, or a homolog or fragment thereof, e.g. derived from Escherichia coli, is increased or generated. For example the activity of a nucleic acid molecule or a polypeptide comprising the nucleic acid, preferably the coding region thereof, or polypeptide or the consensus sequence or the polypeptide motif, as depicted in Table I, II or IV, application No. 17, column 5 or 8 in the respective same line as the nucleic acid molecule SEQ ID NO. 126421 or polypeptide SEQ ID NO. 126422, respectively, or a homolog or a fragment thereof, is increased or generated, or if the activity acetyl-coenzyme A synthetase is increased or generated in a non-human organism, like a microorganism or a plant cell, plant or part thereof, especially with plastidic localization, whereby the respective line disclose in column 7 the fine chemical galactinol. For example, an increase of the galactinol of at least 1 percent, particularly in a range of 47 to 118-percent is conferred as compared to a corresponding non-transformed wild type non-human organism.

[88379] Accordingly, in one embodiment, an increase of glucose-1-phosphate in a non-human organism, as compared to a corresponding non-transformed wild type non-human organism, is conferred in the process of the invention, if the activity of a polypeptide showing the activity of a lipoprotein precursor, or if the activity of the polypeptide B4189, preferably represented by SEQ ID NO. 146922, or a homolog or fragment thereof, or if the activity of a polypeptide encoded by a nucleic acid molecule comprising the nucleic acid SEQ ID NO. 146921, preferably the coding region thereof, or a homolog or fragment thereof, e.g. derived from Escherichia coli, is increased or generated. For example the activity of a nucleic acid molecule or a polypeptide comprising the nucleic acid, preferably the coding region thereof, or polypeptide or the consensus sequence or the polypeptide motif, as depicted in Table I, II or IV, application No. 17, column 5 or 8 in the respective same line as the nucleic acid molecule SEQ ID NO. 146921 or polypeptide SEQ ID NO. 146922, respectively, or a homolog or a fragment thereof, is increased or generated, or if the activity lipoprotein precursor is increased or generated in a non-human organism, like a microorganism or a plant cell, plant or part thereof, especially with non-targeted localization, whereby the respective line disclose in column 7 the fine chemical glucose-1-phosphate. For example, an increase of the glucose-1-phosphate of at least 1 percent, particularly in a range of 31 to 67-percent is conferred as compared to a corresponding non-transformed wild type non-human organism.

[88380] Accordingly, in one embodiment, an increase of 3,4,5-trihydroxypentanoic acid in a non-human organism, as compared to a corresponding non-transformed wild type non-human organism, is conferred in the process of the invention, if the activity of a polypeptide showing the activity of a lipoprotein precursor, or if the activity of the polypeptide B4189, preferably represented by SEQ ID NO. 146922, or a homolog or fragment thereof, or if the activity of a polypeptide encoded by a nucleic acid molecule comprising the nucleic acid SEQ ID NO. 146921, preferably the coding region thereof, or a homolog or fragment thereof, e.g. derived from Escherichia coli, is increased or generated. For example the activity of a nucleic acid molecule or a polypeptide comprising the nucleic acid, preferably the coding region thereof, or polypeptide or the consensus sequence or the polypeptide motif, as depicted in Table I, II or IV, application No. 17, column 5 or 8 in the respective same line as the nucleic acid molecule SEQ ID NO. 146921 or polypeptide SEQ ID NO. 146922, respectively, or a homolog or a fragment thereof, is increased or generated, or if the activity lipoprotein precursor is increased or generated in a non-human organism, like a microorganism or a plant cell, plant or part thereof, especially with non-targeted localization, whereby the respective line disclose in column 7 the fine chemical 3,4,5-trihydroxypentanoic acid. For example, an increase of the 3,4,5-trihydroxypentanoic acid of at least 1 percent, particularly in a range of 43 to 74-percent is conferred as compared to a corresponding non-transformed wild type non-human organism.

[88381] Accordingly, in one embodiment, an increase of myo-inositol in a non-human organism, as compared to a corresponding non-transformed wild type non-human organism, is conferred in the process of the invention, if the activity of a polypeptide showing the activity of a b4250-protein, or if the activity of the polypeptide B4250, preferably represented by SEQ ID NO. 94736, or a homolog or fragment thereof, or if the activity of a polypeptide encoded by a nucleic acid molecule comprising the nucleic acid SEQ ID NO. 94735, preferably the coding region thereof, or a homolog or fragment thereof, e.g. derived from Escherichia coli, is increased or generated. For example the activity of a nucleic acid molecule or a polypeptide comprising the nucleic acid, preferably the coding region thereof, or polypeptide or the consensus sequence or the polypeptide motif, as depicted in Table I, II or IV, application No. 17, column 5 or 8 in the respective same line as the nucleic acid molecule SEQ ID NO. 94735 or polypeptide SEQ ID NO. 94736, respectively, or a homolog or a fragment thereof, is increased or generated, or if the activity b4250-protein is increased or generated in a non-human organism, like a microorganism or a plant cell, plant or part thereof, especially with non-targeted localization, whereby the respective line disclose in column 7 the fine chemical myo-inositol. For example, an increase of the myo-inositol of at least 1 percent, particularly in a range of 31 to 169-percent is conferred as compared to a corresponding non-transformed wild type non-human organism.

[88382] Accordingly, in one embodiment, an increase of raffinose in a non-human organism, as compared to a corresponding non-transformed wild type non-human organism, is conferred in the process of the invention, if the activity of a polypeptide showing the activity of a b4250-protein, or if the activity of the polypeptide B4250, preferably represented by SEQ ID NO. 94736, or a homolog or fragment thereof, or if the activity of a polypeptide encoded by a nucleic acid molecule comprising the nucleic acid SEQ ID NO. 94735, preferably the coding region thereof, or a homolog or fragment thereof, e.g. derived from Escherichia coli, is increased or generated. For example the activity of a nucleic acid molecule or a polypeptide comprising the nucleic acid, preferably the coding region thereof, or polypeptide or the consensus sequence or the polypeptide motif, as depicted in Table I, II or IV, application No. 17, column 5 or 8 in the respective same line as the nucleic acid molecule SEQ ID NO. 94735 or polypeptide SEQ ID NO. 94736, respectively, or a homolog or a fragment thereof, is increased or generated, or if the activity b4250-protein is increased or generated in a non-human organism, like a microorganism or a plant cell, plant or part thereof, especially with non-targeted localization, whereby the respective line disclose in column 7 the fine chemical raffinose. For example, an increase of the raffinose of at least 1 percent, particularly in a range of 188 to 278-percent is conferred as compared to a corresponding non-transformed wild type non-human organism.

[88383] Accordingly, in one embodiment, an increase of fructose in a non-human organism, as compared to a corresponding non-transformed wild type non-human organism, is conferred in the process of the invention, if the activity of a polypeptide showing the activity of a acetyltransferase, or if the activity of the polypeptide B4256, preferably represented by SEQ ID NO. 45322, or a homolog or fragment thereof, or if the activity of a polypeptide encoded by a nucleic acid molecule comprising the nucleic acid SEQ ID NO. 45321, preferably the coding region thereof, or a homolog or fragment thereof, e.g. derived from Escherichia coli, is increased or generated.

[88384] For example the activity of a nucleic acid molecule or a polypeptide comprising the nucleic acid, preferably the coding region thereof, or polypeptide or the consensus sequence or the polypeptide motif, as depicted in Table I, II or IV, application No. 17, column 5 or 8 in the respective same line as the nucleic acid molecule SEQ ID NO. 45321 or polypeptide SEQ ID NO. 45322, respectively, or a homolog or a fragment thereof, is increased or generated, or if the activity acetyltransferase is increased or generated in a non-human organism, like a microorganism or a plant cell, plant or part thereof, especially with non-targeted localization, whereby the respective line disclose in column 7 the fine chemical fructose. For example, an increase of the fructose of at least 1 percent, particularly in a range of 219 to 2357-percent is conferred as compared to a corresponding non-transformed wild type non-human organism.

[88385] Accordingly, in one embodiment, an increase of glucose in a non-human organism, as compared to a corresponding non-transformed wild type non-human organism, is conferred in the process of the invention, if the activity of a polypeptide showing the activity of a acetyltransferase, or if the activity of the polypeptide B4256, preferably represented by SEQ ID NO. 45322, or a homolog or fragment thereof, or if the activity of a polypeptide encoded by a nucleic acid molecule comprising the nucleic acid SEQ ID NO. 45321, preferably the coding region thereof, or a homolog or fragment thereof, e.g. derived from Escherichia coli, is increased or generated. For example the activity of a nucleic acid molecule or a polypeptide comprising the nucleic acid, preferably the coding region thereof, or polypeptide or the consensus sequence or the polypeptide motif, as depicted in Table I, II or IV, application No. 17, column 5 or 8 in the respective same line as the nucleic acid molecule SEQ ID NO. 45321 or polypeptide SEQ ID NO. 45322, respectively, or a homolog or a fragment thereof, is increased or generated, or if the activity acetyltransferase is increased or generated in a non-human organism, like a microorganism or a plant cell, plant or part thereof, especially with non-targeted localization, whereby the respective line disclose in column 7 the fine chemical glucose. For example, an increase of the glucose of at least 1 percent, particularly in a range of 88 to 504-percent is conferred as compared to a corresponding non-transformed wild type non-human organism.

[88386] Accordingly, in one embodiment, an increase of fructose in a non-human organism, as compared to a corresponding non-transformed wild type non-human organism, is conferred in the process of the invention, if the activity of a polypeptide showing the activity of a gluconate transport system permease 3, or if the activity of the polypeptide B4321, preferably represented by SEQ ID NO. 45395, or a homolog or fragment thereof, or if the activity of a polypeptide encoded by a nucleic acid molecule comprising the nucleic acid SEQ ID NO. 45394, preferably the coding region thereof, or a homolog or fragment thereof, e.g. derived from Escherichia coli, is increased or generated. For example the activity of a nucleic acid molecule or a polypeptide comprising the nucleic acid, preferably the coding region thereof, or polypeptide or the consensus sequence or the polypeptide motif, as depicted in Table I, II or IV, application No. 17, column 5 or 8 in the respective same line as the nucleic acid molecule SEQ ID NO. 45394 or polypeptide SEQ ID NO. 45395, respectively, or a homolog or a fragment thereof, is increased or generated, or if the activity gluconate transport system permease 3 is increased or generated in a non-human organism, like a microorganism or a plant cell, plant or part thereof, especially with non-targeted localization, whereby the respective line disclose in column 7 the fine chemical fructose. For example, an increase of the fructose of at least 1 percent, particularly in a range of 104 to 177-percent is conferred as compared to a corresponding non-transformed wild type non-human organism.

[88387] Accordingly, in one embodiment, an increase of galactinol in a non-human organism, as compared to a corresponding non-transformed wild type non-human organism, is conferred in the process of the invention, if the activity of a polypeptide showing the activity of a purinenucleoside phosphorylase, or if the activity of the polypeptide B4384, preferably represented by SEQ ID NO. 45557, or a homolog or fragment thereof, or if the activity of a polypeptide encoded by a nucleic acid molecule comprising the nucleic acid SEQ ID NO. 45556, preferably the coding region thereof, or a homolog or fragment thereof, e.g. derived from Escherichia coli, is increased or generated. For example the activity of a nucleic acid molecule or a polypeptide comprising the nucleic acid, preferably the coding region thereof, or polypeptide or the consensus sequence or the polypeptide motif, as depicted in Table I, II or IV, application No. 17, column 5 or 8 in the respective same line as the nucleic acid molecule SEQ ID NO. 45556 or polypeptide SEQ ID NO. 45557, respectively, or a homolog or a fragment thereof, is increased or generated, or if the activity purine-nucleoside phosphorylase is increased or generated in a non-human organism, like a microorganism or a plant cell, plant or part thereof, especially with non-targeted localization, whereby the respective line disclose in column 7 the fine chemical galactinol. For example, an increase of the galactinol of at least 1 percent, particularly in a range of 56 to 127-percent is conferred as compared to a corresponding non-transformed wild type non-human organism.

[88388] Accordingly, in one embodiment, an increase of myo-inositol in a non-human organism, as compared to a corresponding non-transformed wild type non-human organism, is conferred in the process of the invention, if the activity of a polypeptide showing the activity of a lysine decarboxylase, or if the activity of the polypeptide D90900, preferably represented by SEQ ID NO. 84080, or a homolog or fragment thereof, or if the activity of a polypeptide encoded by a nucleic acid molecule comprising the nucleic acid SEQ ID NO. 84079, preferably the coding region thereof, or a homolog or fragment thereof, e.g. derived from Synechocystis sp., is increased or generated. For example the activity of a nucleic acid molecule or a polypeptide comprising the nucleic acid, preferably the coding region thereof, or polypeptide or the consensus sequence or the polypeptide motif, as depicted in Table I, II or IV, application No. 17, column 5 or 8 in the respective same line as the nucleic acid molecule SEQ ID NO. 84079 or polypeptide SEQ ID NO. 84080, respectively, or a homolog or a fragment thereof, is increased or generated, or if the activity lysine decarboxylase is increased or generated in a non-human organism, like a microorganism or a plant cell, plant or part thereof, especially with plastidic localization, whereby the respective line disclose in column 7 the fine chemical myo-inositol. For example, an increase of the myo-inositol of at least 1 percent, particularly in a range of 37 to 67-percent is conferred as compared to a corresponding non-transformed wild type non-human organism.

[88389] Accordingly, in one embodiment, an increase of fructose in a non-human organism, as compared to a corresponding non-transformed wild type non-human organism, is conferred in the process of the invention, if the activity of a polypeptide showing the activity of a glutaredoxin, or if the activity of the polypeptide GM02LC12622, preferably represented by SEQ ID NO. 10812, or a homolog or fragment thereof, or if the activity of a polypeptide encoded by a nucleic acid molecule comprising the nucleic acid SEQ ID NO. 10811, preferably the coding region thereof, or a homolog or fragment thereof, e.g. derived from Glycine max, is increased or generated. For example the activity of a nucleic acid molecule or a polypeptide comprising the nucleic acid, preferably the coding region thereof, or polypeptide or the consensus sequence or the polypeptide motif, as depicted in Table I, II or IV, application No. 17, column 5 or 8 in the respective same line as the nucleic acid molecule SEQ ID NO. 10811 or polypeptide SEQ ID NO. 10812, respectively, or a homolog or a fragment thereof, is increased or generated, or if the activity glutaredoxin is increased or generated in a non-human organism, like a microorganism or a plant cell, plant or part thereof, especially with non-targeted localization, whereby the respective line disclose in column 7 the fine chemical fructose. For example, an increase of the fructose of at least 1 percent, particularly in a range of 222 to 4601-percent is conferred as compared to a corresponding non-transformed wild type non-human organism.

[88390] Accordingly, in one embodiment, an increase of glucose in a non-human organism, as compared to a corresponding non-transformed wild type non-human organism, is conferred in the process of the invention, if the activity of a polypeptide showing the activity of a glutaredoxin, or if the activity of the polypeptide GM02LC12622, preferably represented by SEQ ID NO. 10812, or a homolog or fragment thereof, or if the activity of a polypeptide encoded by a nucleic acid molecule comprising the nucleic acid SEQ ID NO. 10811, preferably the coding region thereof, or a homolog or fragment thereof, e.g. derived from Glycine max, is increased or generated. For example the activity of a nucleic acid molecule or a polypeptide comprising the nucleic acid, preferably the coding region thereof, or polypeptide or the consensus sequence or the polypeptide motif, as depicted in Table I, II or IV, application No. 17, column 5 or 8 in the respective same line as the nucleic acid molecule SEQ ID NO. 10811 or polypeptide SEQ ID NO. 10812, respectively, or a homolog or a fragment thereof, is increased or generated, or if the activity glutaredoxin is increased or generated in a non-human organism, like a microorganism or a plant cell, plant or part thereof, especially with non-targeted localization, whereby the respective line disclose in column 7 the fine chemical glucose. For example, an increase of the glucose of at least 1 percent, particularly in a range of 88 to 366-percent is conferred as compared to a corresponding non-transformed wild type non-human organism.

[88391] Accordingly, in one embodiment, an increase of glucose-1-phosphate in a non-human organism, as compared to a corresponding non-transformed wild type non-human organism, is conferred in the process of the invention, if the activity of a polypeptide showing the activity of a glutaredoxin, or if the activity of the polypeptide GM02LC12622, preferably represented by SEQ ID NO. 10812, or a homolog or fragment thereof, or if the activity of a polypeptide encoded by a nucleic acid molecule comprising the nucleic acid SEQ ID NO. 10811, preferably the coding region thereof, or a homolog or fragment thereof, e.g. derived from Glycine max, is increased or generated. For example the activity of a nucleic acid molecule or a polypeptide comprising the nucleic acid, preferably the coding region thereof, or polypeptide or the consensus sequence or the polypeptide motif, as depicted in Table I, II or IV, application No. 17, column 5 or 8 in the respective same line as the nucleic acid molecule SEQ ID NO. 10811 or polypeptide SEQ ID NO. 10812, respectively, or a homolog or a fragment thereof, is increased or generated, or if the activity glutaredoxin is increased or generated in a non-human organism, like a microorganism or a plant cell, plant or part thereof, especially with non-targeted localization, whereby the respective line disclose in column 7 the fine chemical glucose-1-phosphate. For example, an increase of the glucose-1-phosphate of at least 1 percent, particularly in a range of 26 to 99-percent is conferred as compared to a corresponding non-transformed wild type non-human organism.

[88392] Accordingly, in one embodiment, an increase of myo-inositol in a non-human organism, as compared to a corresponding non-transformed wild type non-human organism, is conferred in the process of the invention, if the activity of a polypeptide showing the activity of a glutaredoxin, or if the activity of the polypeptide GM02LC12622, preferably represented by SEQ ID NO. 10812, or a homolog or fragment thereof, or if the activity of a polypeptide encoded by a nucleic acid molecule comprising the nucleic acid SEQ ID NO. 10811, preferably the coding region thereof, or a homolog or fragment thereof, e.g. derived from Glycine max, is increased or generated. For example the activity of a nucleic acid molecule or a polypeptide comprising the nucleic acid, preferably the coding region thereof, or polypeptide or the consensus sequence or the polypeptide motif, as depicted in Table I, II or IV, application No. 17, column 5 or 8 in the respective same line as the nucleic acid molecule SEQ ID NO. 10811 or polypeptide SEQ ID NO. 10812, respectively, or a homolog or a fragment thereof, is increased or generated, or if the activity glutaredoxin is increased or generated in a non-human organism, like a microorganism or a plant cell, plant or part thereof, especially with non-targeted localization, whereby the respective line disclose in column 7 the fine chemical myo-inositol. For example, an increase of the myo-inositol of at least 1 percent, particularly in a range of 25 to 119-percent is conferred as compared to a corresponding non-transformed wild type non-human organism.

[88393] Accordingly, in one embodiment, an increase of sucrose in a non-human organism, as compared to a corresponding non-transformed wild type non-human organism, is conferred in the process of the invention, if the activity of a polypeptide showing the activity of a glutaredoxin, or if the activity of the polypeptide GM02LC12622, preferably represented by SEQ ID NO. 10812, or a homolog or fragment thereof, or if the activity of a polypeptide encoded by a nucleic acid molecule comprising the nucleic acid SEQ ID NO. 10811, preferably the coding region thereof, or a homolog or fragment thereof, e.g. derived from Glycine max, is increased or generated. For example the activity of a nucleic acid molecule or a polypeptide comprising the nucleic acid, preferably the coding region thereof, or polypeptide or the consensus sequence or the polypeptide motif, as depicted in Table I, II or IV, application No. 17, column 5 or 8 in the respective same line as the nucleic acid molecule SEQ ID NO. 10811 or polypeptide SEQ ID NO. 10812, respectively, or a homolog or a fragment thereof, is increased or generated, or if the activity glutaredoxin is increased or generated in a non-human organism, like a microorganism or a plant cell, plant or part thereof, especially with non-targeted localization, whereby the respective line disclose in column 7 the fine chemical sucrose. For example, an increase of the sucrose of at least 1 percent, particularly in a range of 30 to 134-percent is conferred as compared to a corresponding non-transformed wild type non-human organism.

[88394] Accordingly, in one embodiment, an increase of glucose-1-phosphate in a non-human organism, as compared to a corresponding non-transformed wild type non-human organism, is conferred in the process of the invention, if the activity of a polypeptide showing the activity of a transcription factor, or if the activity of the polypeptide GM02LC19289, preferably represented by SEQ ID NO. 46752, or a homolog or fragment thereof, or if the activity of a polypeptide encoded by a nucleic acid molecule comprising the nucleic acid SEQ ID NO. 46751, preferably the coding region thereof, or a homolog or fragment thereof, e.g. derived from Glycine max, is increased or generated. For example the activity of a nucleic acid molecule or a polypeptide comprising the nucleic acid, preferably the coding region thereof, or polypeptide or the consensus sequence or the polypeptide motif, as depicted in Table I, II or IV, application No. 17, column 5 or 8 in the respective same line as the nucleic acid molecule SEQ ID NO. 46751 or polypeptide SEQ ID NO. 46752, respectively, or a homolog or a fragment thereof, is increased or generated, or if the activity transcription factor is increased or generated in a non-human organism, like a microorganism or a plant cell, plant or part thereof, especially with non-targeted localization, whereby the respective line disclose in column 7 the fine chemical glucose-1-phosphate. For example, an increase of the glucose-1-phosphate of at least 1 percent, particularly in a range of 35 to 110-percent is conferred as compared to a corresponding non-transformed wild type non-human organism.

[88395] Accordingly, in one embodiment, an increase of 3,4,5-trihydroxypentanoic acid in a non-human organism, as compared to a corresponding non-transformed wild type non-human organism, is conferred in the process of the invention, if the activity of a polypeptide showing the activity of a transcription factor, or if the activity of the polypeptide GM02LC19289, preferably represented by SEQ ID NO. 46752, or a homolog or fragment thereof, or if the activity of a polypeptide encoded by a nucleic acid molecule comprising the nucleic acid SEQ ID NO. 46751, preferably the coding region thereof, or a homolog or fragment thereof, e.g. derived from Glycine max, is increased or generated. For example the activity of a nucleic acid molecule or a polypeptide comprising the nucleic acid, preferably the coding region thereof, or polypeptide or the consensus sequence or the polypeptide motif, as depicted in Table I, II or IV, application No. 17, column 5 or 8 in the respective same line as the nucleic acid molecule SEQ ID NO. 46751 or polypeptide SEQ ID NO. 46752, respectively, or a homolog or a fragment thereof, is increased or generated, or if the activity transcription factor is increased or generated in a non-human organism, like a microorganism or a plant cell, plant or part thereof, especially with non-targeted localization, whereby the respective line disclose in column 7 the fine chemical 3,4,5-trihydroxypentanoic acid. For example, an increase of the 3,4,5-trihydroxypentanoic acid of at least 1 percent, particularly in a range of 39 to 119-percent is conferred as compared to a corresponding non-transformed wild type non-human organism.

[88396] Accordingly, in one embodiment, an increase of fructose in a non-human organism, as compared to a corresponding non-transformed wild type non-human organism, is conferred in the process of the invention, if the activity of a polypeptide showing the activity of a transcription factor, or if the activity of the polypeptide GM02LC21368, preferably represented by SEQ ID NO. 84199, or a homolog or fragment thereof, or if the activity of a polypeptide encoded by a nucleic acid molecule comprising the nucleic acid SEQ ID NO. 84198, preferably the coding region thereof, or a homolog or fragment thereof, e.g. derived from Glycine max, is increased or generated. For example the activity of a nucleic acid molecule or a polypeptide comprising the nucleic acid, preferably the coding region thereof, or polypeptide or the consensus sequence or the polypeptide motif, as depicted in Table I, II or IV, application No. 17, column 5 or 8 in the respective same line as the nucleic acid molecule SEQ ID NO. 84198 or polypeptide SEQ ID NO. 84199, respectively, or a homolog or a fragment thereof, is increased or generated, or if the activity transcription factor is increased or generated in a non-human organism, like a microorganism or a plant cell, plant or part thereof, especially with non-targeted localization, whereby the respective line disclose in column 7 the fine chemical fructose. For example, an increase of the fructose of at least 1 percent, particularly in a range of 82 to 665-percent is conferred as compared to a corresponding non-transformed wild type non-human organism.

[88397] Accordingly, in one embodiment, an increase of glucose-1-phosphate in a non-human organism, as compared to a corresponding non-transformed wild type non-human organism, is conferred in the process of the invention, if the activity of a polypeptide showing the activity of a GM02LC38418-protein, or if the activity of the polypeptide GM02LC38418, preferably represented by SEQ ID NO. 116313, or a homolog or fragment thereof, or if the activity of a polypeptide encoded by a nucleic acid molecule comprising the nucleic acid SEQ ID NO. 116312, preferably the coding region thereof, or a homolog or fragment thereof, e.g. derived from Glycine max, is increased or generated. For example the activity of a nucleic acid molecule or a polypeptide comprising the nucleic acid, preferably the coding region thereof, or polypeptide or the consensus sequence or the polypeptide motif, as depicted in Table I, II or IV, application No. 17, column 5 or 8 in the respective same line as the nucleic acid molecule SEQ ID NO. 116312 or polypeptide SEQ ID NO. 116313, respectively, or a homolog or a fragment thereof, is increased or generated, or if the activity GM02LC38418-protein is increased or generated in a non-human organism, like a microorganism or a plant cell, plant or part thereof, especially with non-targeted localization, whereby the respective line disclose in column 7 the fine chemical glucose-1-phosphate. For example, an increase of the glucose-1-phosphate of at least 1 percent, particularly in a range of 46 to 57-percent is conferred as compared to a corresponding non-transformed wild type non-human organism.

[88398] Accordingly, in one embodiment, an increase of glucose-1-phosphate in a non-human organism, as compared to a corresponding non-transformed wild type non-human organism, is conferred in the process of the invention, if the activity of a polypeptide showing the activity of a cyclin D, or if the activity of the polypeptide GM02LC44512, preferably represented by SEQ ID NO. 46851, or a homolog or fragment thereof, or if the activity of a polypeptide encoded by a nucleic acid molecule comprising the nucleic acid SEQ ID NO. 46850, preferably the coding region thereof, or a homolog or fragment thereof, e.g. derived from Glycine max, is increased or generated. For example the activity of a nucleic acid molecule or a polypeptide comprising the nucleic acid, preferably the coding region thereof, or polypeptide or the consensus sequence or the polypeptide motif, as depicted in Table I, II or IV, application No. 17, column 5 or 8 in the respective same line as the nucleic acid molecule SEQ ID NO. 46850 or polypeptide SEQ ID NO. 46851, respectively, or a homolog or a fragment thereof, is increased or generated, or if the activity cyclin D is increased or generated in a non-human organism, like a microorganism or a plant cell, plant or part thereof, especially with non-targeted localization, whereby the respective line disclose in column 7 the fine chemical glucose-1-phosphate. For example, an increase of the glucose-1-phosphate of at least 1 percent, particularly in a range of 47 to 85-percent is conferred as compared to a corresponding non-transformed wild type non-human organism.

[88399] Accordingly, in one embodiment, an increase of raffinose in a non-human organism, as compared to a corresponding non-transformed wild type non-human organism, is conferred in the process of the invention, if the activity of a polypeptide showing the activity of a cyclin D, or if the activity of the polypeptide GM02LC44512, preferably represented by SEQ ID NO. 46851, or a homolog or fragment thereof, or if the activity of a polypeptide encoded by a nucleic acid molecule comprising the nucleic acid SEQ ID NO. 46850, preferably the coding region thereof, or a homolog or fragment thereof, e.g. derived from Glycine max, is increased or generated. For example the activity of a nucleic acid molecule or a polypeptide comprising the nucleic acid, preferably the coding region thereof, or polypeptide or the consensus sequence or the polypeptide motif, as depicted in Table I, II or IV, application No. 17, column 5 or 8 in the respective same line as the nucleic acid molecule SEQ ID NO. 46850 or polypeptide SEQ ID NO. 46851, respectively, or a homolog or a fragment thereof, is increased or generated, or if the activity cyclin D is increased or generated in a non-human organism, like a microorganism or a plant cell, plant or part thereof, especially with non-targeted localization, whereby the respective line disclose in column 7 the fine chemical raffinose. For example, an increase of the raffinose of at least 1 percent, particularly in a range of 60 to 997-percent is conferred as compared to a corresponding non-transformed wild type non-human organism.

[88400] Accordingly, in one embodiment, an increase of sucrose in a non-human organism, as compared to a corresponding non-transformed wild type non-human organism, is conferred in the process of the invention, if the activity of a polypeptide showing the activity of a cyclin D, or if the activity of the polypeptide GM02LC44512, preferably represented by SEQ ID NO. 46851, or a homolog or fragment thereof, or if the activity of a polypeptide encoded by a nucleic acid molecule comprising the nucleic acid SEQ ID NO. 46850, preferably the coding region thereof, or a homolog or fragment thereof, e.g. derived from Glycine max, is increased or generated. For example the activity of a nucleic acid molecule or a polypeptide comprising the nucleic acid, preferably the coding region thereof, or polypeptide or the consensus sequence or the polypeptide motif, as depicted in Table I, II or IV, application No. 17, column 5 or 8 in the respective same line as the nucleic acid molecule SEQ ID NO. 46850 or polypeptide SEQ ID NO. 46851, respectively, or a homolog or a fragment thereof, is increased or generated, or if the activity cyclin D is increased or generated in a non-human organism, like a microorganism or a plant cell, plant or part thereof, especially with non-targeted localization, whereby the respective line disclose in column 7 the fine chemical sucrose. For example, an increase of the sucrose of at least 1 percent, particularly in a range of 28 to 94-percent is conferred as compared to a corresponding non-transformed wild type non-human organism.

[88401] Accordingly, in one embodiment, an increase of 3,4,5-trihydroxypentanoic acid in a non-human organism, as compared to a corresponding non-transformed wild type non-human organism, is conferred in the process of the invention, if the activity of a polypeptide showing the activity of a GM02LC46-protein, or if the activity of the polypeptide GM02LC46, preferably represented by SEQ ID NO. 47027, or a homolog or fragment thereof, or if the activity of a polypeptide encoded by a nucleic acid molecule comprising the nucleic acid SEQ ID NO. 47026, preferably the coding region thereof, or a homolog or fragment thereof, e.g. derived from Glycine max, is increased or generated. For example the activity of a nucleic acid molecule or a polypeptide comprising the nucleic acid, preferably the coding region thereof, or polypeptide or the consensus sequence or the polypeptide motif, as depicted in Table I, II or IV, application No. 17, column 5 or 8 in the respective same line as the nucleic acid molecule SEQ ID NO. 47026 or polypeptide SEQ ID NO. 47027, respectively, or a homolog or a fragment thereof, is increased or generated, or if the activity GM02LC46-protein is increased or generated in a non-human organism, like a microorganism or a plant cell, plant or part thereof, especially with non-targeted localization, whereby the respective line disclose in column 7 the fine chemical 3,4,5-trihydroxypentanoic acid. For example, an increase of the 3,4,5-trihydroxypentanoic acid of at least 1 percent, particularly in a range of 35 to 69-percent is conferred as compared to a corresponding non-transformed wild type non-human organism.

[88402] Accordingly, in one embodiment, an increase of 3,4,5-trihydroxypentanoic acid in a non-human organism, as compared to a corresponding non-transformed wild type non-human organism, is conferred in the process of the invention, if the activity of a polypeptide showing the activity of a transcription factor, or if the activity of the polypeptide GM02LC6021, preferably represented by SEQ ID NO. 47106, or a homolog or fragment thereof, or if the activity of a polypeptide encoded by a nucleic acid molecule comprising the nucleic acid SEQ ID NO. 47105, preferably the coding region thereof, or a homolog or fragment thereof, e.g. derived from Glycine max, is increased or generated. For example the activity of a nucleic acid molecule or a polypeptide comprising the nucleic acid, preferably the coding region thereof, or polypeptide or the consensus sequence or the polypeptide motif, as depicted in Table I, II or IV, application No. 17, column 5 or 8 in the respective same line as the nucleic acid molecule SEQ ID NO. 47105 or polypeptide SEQ ID NO. 47106, respectively, or a homolog or a fragment thereof, is increased or generated, or if the activity transcription factor is increased or generated in a non-human organism, like a microorganism or a plant cell, plant or part thereof, especially with non-targeted localization, whereby the respective line disclose in column 7 the fine chemical 3,4,5-trihydroxypentanoic acid. For example, an increase of the 3,4,5-trihydroxypentanoic acid of at least 1 percent, particularly in a range of 38 to 92-percent is conferred as compared to a corresponding non-transformed wild type non-human organism.

[88403] Accordingly, in one embodiment, an increase of myo-inositol in a non-human organism, as compared to a corresponding non-transformed wild type non-human organism, is conferred in the process of the invention, if the activity of a polypeptide showing the activity of a alkaline phosphatase, or if the activity of the polypeptide Sll0222, preferably represented by SEQ ID NO. 146940, or a homolog or fragment thereof, or if the activity of a polypeptide encoded by a nucleic acid molecule comprising the nucleic acid SEQ ID NO. 146939, preferably the coding region thereof, or a homolog or fragment thereof, e.g. derived from Synechocystis sp., is increased or generated. For example the activity of a nucleic acid molecule or a polypeptide comprising the nucleic acid, preferably the coding region thereof, or polypeptide or the consensus sequence or the polypeptide motif, as depicted in Table I, II or IV, application No. 17, column 5 or 8 in the respective same line as the nucleic acid molecule SEQ ID NO. 146939 or polypeptide SEQ ID NO. 146940, respectively, or a homolog or a fragment thereof, is increased or generated, or if the activity alkaline phosphatase is increased or generated in a non-human organism, like a microorganism or a plant cell, plant or part thereof, especially with plastidic localization, whereby the respective line disclose in column 7 the fine chemical myo-inositol. For example, an increase of the myo-inositol of at least 1 percent, particularly in a range of 26 to 48-percent is conferred as compared to a corresponding non-transformed wild type non-human organism.

[88404] Accordingly, in one embodiment, an increase of verbascose in a non-human organism, as compared to a corresponding non-transformed wild type non-human organism, is conferred in the process of the invention, if the activity of a polypeptide showing the activity of a flavodoxin, or if the activity of the polypeptide Sll0248, preferably represented by SEQ ID NO. 49144, or a homolog or fragment thereof, or if the activity of a polypeptide encoded by a nucleic acid molecule comprising the nucleic acid SEQ ID NO. 49143, preferably the coding region thereof, or a homolog or fragment thereof, e.g. derived from Synechocystis sp., is increased or generated. For example the activity of a nucleic acid molecule or a polypeptide comprising the nucleic acid, preferably the coding region thereof, or polypeptide or the consensus sequence or the polypeptide motif, as depicted in Table I, II or IV, application No. 17, column 5 or 8 in the respective same line as the nucleic acid molecule SEQ ID NO. 49143 or polypeptide SEQ ID NO. 49144, respectively, or a homolog or a fragment thereof, is increased or generated, or if the activity flavodoxin is increased or generated in a non-human organism, like a microorganism or a plant cell, plant or part thereof, especially with plastidic localization, whereby the respective line disclose in column 7 the fine chemical verbascose. For example, an increase of the verbascose of at least 1 percent, particularly in a range of 88 to 378-percent is conferred as compared to a corresponding non-transformed wild type non-human organism.

[88405] Accordingly, in one embodiment, an increase of sucrose in a non-human organism, as compared to a corresponding non-transformed wild type non-human organism, is conferred in the process of the invention, if the activity of a polypeptide showing the activity of a sll0254-protein, or if the activity of the polypeptide Sll0254, preferably represented by SEQ ID NO. 49801, or a homolog or fragment thereof, or if the activity of a polypeptide encoded by a nucleic acid molecule comprising the nucleic acid SEQ ID NO. 49800, preferably the coding region thereof, or a homolog or fragment thereof, e.g. derived from Synechocystis sp., is increased or generated. For example the activity of a nucleic acid molecule or a polypeptide comprising the nucleic acid, preferably the coding region thereof, or polypeptide or the consensus sequence or the polypeptide motif, as depicted in Table I, II or IV, application No. 17, column 5 or 8 in the respective same line as the nucleic acid molecule SEQ ID NO. 49800 or polypeptide SEQ ID NO. 49801, respectively, or a homolog or a fragment thereof, is increased or generated, or if the activity sll0254-protein is increased or generated in a non-human organism, like a microorganism or a plant cell, plant or part thereof, especially with mitochondrial localization, whereby the respective line disclose in column 7 the fine chemical sucrose. For example, an increase of the sucrose of at least 1 percent, particularly in a range of 25 to 62-percent is conferred as compared to a corresponding non-transformed wild type non-human organism.

[88406] Accordingly, in one embodiment, an increase of verbascose in a non-human organism, as compared to a corresponding non-transformed wild type non-human organism, is conferred in the process of the invention, if the activity of a polypeptide showing the activity of a sll0281-protein, or if the activity of the polypeptide Sll0281, preferably represented by SEQ ID NO. 84866, or a homolog or fragment thereof, or if the activity of a polypeptide encoded by a nucleic acid molecule comprising the nucleic acid SEQ ID NO. 84865, preferably the coding region thereof, or a homolog or fragment thereof, e.g. derived from Synechocystis sp., is increased or generated. For example the activity of a nucleic acid molecule or a polypeptide comprising the nucleic acid, preferably the coding region thereof, or polypeptide or the consensus sequence or the polypeptide motif, as depicted in Table I, II or IV, application No. 17, column 5 or 8 in the respective same line as the nucleic acid molecule SEQ ID NO. 84865 or polypeptide SEQ ID NO. 84866, respectively, or a homolog or a fragment thereof, is increased or generated, or if the activity sll0281-protein is increased or generated in a non-human organism, like a microorganism or a plant cell, plant or part thereof, especially with plastidic localization, whereby the respective line disclose in column 7 the fine chemical verbascose. For example, an increase of the verbascose of at least 1 percent, particularly in a range of 107 to 525-percent is conferred as compared to a corresponding non-transformed wild type non-human organism.

[88407] Accordingly, in one embodiment, an increase of myo-inositol in a non-human organism, as compared to a corresponding non-transformed wild type non-human organism, is conferred in the process of the invention, if the activity of a polypeptide showing the activity of a sll0354-protein, or if the activity of the polypeptide Sll0354, preferably represented by SEQ ID NO. 50071, or a homolog or fragment thereof, or if the activity of a polypeptide encoded by a nucleic acid molecule comprising the nucleic acid SEQ ID NO. 50070, preferably the coding region thereof, or a homolog or fragment thereof, e.g. derived from Synechocystis sp., is increased or generated. For example the activity of a nucleic acid molecule or a polypeptide comprising the nucleic acid, preferably the coding region thereof, or polypeptide or the consensus sequence or the polypeptide motif, as depicted in Table I, II or IV, application No. 17, column 5 or 8 in the respective same line as the nucleic acid molecule SEQ ID NO. 50070 or polypeptide SEQ ID NO. 50071, respectively, or a homolog or a fragment thereof, is increased or generated, or if the activity sll0354-protein is increased or generated in a non-human organism, like a microorganism or a plant cell, plant or part thereof, especially with non-targeted localization, whereby the respective line disclose in column 7 the fine chemical myo-inositol. For example, an increase of the myo-inositol of at least 1 percent, particularly in a range of 25 to 38-percent is conferred as compared to a corresponding non-transformed wild type non-human organism.

[88408] Accordingly, in one embodiment, an increase of myo-inositol in a non-human organism, as compared to a corresponding non-transformed wild type non-human organism, is conferred in the process of the invention, if the activity of a polypeptide showing the activity of a bifunctional protein (phosphoribosyltransferase and regulatory protein), or if the activity of the polypeptide Sll0368, preferably represented by SEQ ID NO. 106921, or a homolog or fragment thereof, or if the activity of a polypeptide encoded by a nucleic acid molecule comprising the nucleic acid SEQ ID NO. 106920, preferably the coding region thereof, or a homolog or fragment thereof, e.g. derived from Synechocystis sp., is increased or generated. For example the activity of a nucleic acid molecule or a polypeptide comprising the nucleic acid, preferably the coding region thereof, or polypeptide or the consensus sequence or the polypeptide motif, as depicted in Table I, II or IV, application No. 17, column 5 or 8 in the respective same line as the nucleic acid molecule SEQ ID NO. 106920 or polypeptide SEQ ID NO. 106921, respectively, or a homolog or a fragment thereof, is increased or generated, or if the activity bifunctional protein (phosphoribosyltransferase and regulatory protein) is increased or generated in a non-human organism, like a microorganism or a plant cell, plant or part thereof, especially with mitochondrial localization, whereby the respective line disclose in column 7 the fine chemical myo-inositol. For example, an increase of the myo-inositol of at least 1 percent, particularly in a range of 25 to 77-percent is conferred as compared to a corresponding non-transformed wild type non-human organism.

[88409] Accordingly, in one embodiment, an increase of glucose-1-phosphate in a non-human organism, as compared to a corresponding non-transformed wild type non-human organism, is conferred in the process of the invention, if the activity of a polypeptide showing the activity of a sll0418-protein, or if the activity of the polypeptide Sll0418, preferably represented by SEQ ID NO. 94943, or a homolog or fragment thereof, or if the activity of a polypeptide encoded by a nucleic acid molecule comprising the nucleic acid SEQ ID NO. 94942, preferably the coding region thereof, or a homolog or fragment thereof, e.g. derived from Synechocystis sp., is increased or generated. For example the activity of a nucleic acid molecule or a polypeptide comprising the nucleic acid, preferably the coding region thereof, or polypeptide or the consensus sequence or the polypeptide motif, as depicted in Table I, II or IV, application No. 17, column 5 or 8 in the respective same line as the nucleic acid molecule SEQ ID NO. 94942 or polypeptide SEQ ID NO. 94943, respectively, or a homolog or a fragment thereof, is increased or generated, or if the activity sll0418-protein is increased or generated in a non-human organism, like a microorganism or a plant cell, plant or part thereof, especially with non-targeted localization, whereby the respective line disclose in column 7 the fine chemical glucose-1-phosphate. For example, an increase of the glucose-1-phosphate of at least 1 percent, particularly in a range of 43 to 164-percent is conferred as compared to a corresponding non-transformed wild type non-human organism.

[88410] Accordingly, in one embodiment, an increase of myo-inositol in a non-human organism, as compared to a corresponding non-transformed wild type non-human organism, is conferred in the process of the invention, if the activity of a polypeptide showing the activity of a sll0418-protein, or if the activity of the polypeptide Sll0418, preferably represented by SEQ ID NO. 94943, or a homolog or fragment thereof, or if the activity of a polypeptide encoded by a nucleic acid molecule comprising the nucleic acid SEQ ID NO. 94942, preferably the coding region thereof, or a homolog or fragment thereof, e.g. derived from Synechocystis sp., is increased or generated. For example the activity of a nucleic acid molecule or a polypeptide comprising the nucleic acid, preferably the coding region thereof, or polypeptide or the consensus sequence or the polypeptide motif, as depicted in Table I, II or IV, application No. 17, column 5 or 8 in the respective same line as the nucleic acid molecule SEQ ID NO. 94942 or polypeptide SEQ ID NO. 94943, respectively, or a homolog or a fragment thereof, is increased or generated, or if the activity sll0418-protein is increased or generated in a non-human organism, like a microorganism or a plant cell, plant or part thereof, especially with mitochondrial localization, whereby the respective line disclose in column 7 the fine chemical myo-inositol. For example, an increase of the myo-inositol of at least 1 percent, particularly in a range of 33 to 56-percent is conferred as compared to a corresponding non-transformed wild type non-human organism.

[88411] Accordingly, in one embodiment, an increase of myo-inositol in a non-human organism, as compared to a corresponding non-transformed wild type non-human organism, is conferred in the process of the invention, if the activity of a polypeptide showing the activity of a sll0418-protein, or if the activity of the polypeptide Sll0418, preferably represented by SEQ ID NO. 94943, or a homolog or fragment thereof, or if the activity of a polypeptide encoded by a nucleic acid molecule comprising the nucleic acid SEQ ID NO. 94942, preferably the coding region thereof, or a homolog or fragment thereof, e.g. derived from Synechocystis sp., is increased or generated. For example the activity of a nucleic acid molecule or a polypeptide comprising the nucleic acid, preferably the coding region thereof, or polypeptide or the consensus sequence or the polypeptide motif, as depicted in Table I, II or IV, application No. 17, column 5 or 8 in the respective same line as the nucleic acid molecule SEQ ID NO. 94942 or polypeptide SEQ ID NO. 94943, respectively, or a homolog or a fragment thereof, is increased or generated, or if the activity sll0418-protein is increased or generated in a non-human organism, like a microorganism or a plant cell, plant or part thereof, especially with non-targeted localization, whereby the respective line disclose in column 7 the fine chemical myo-inositol. For example, an increase of the myo-inositol of at least 1 percent, particularly in a range of 26 to 38-percent is conferred as compared to a corresponding non-transformed wild type non-human organism.

[88412] Accordingly, in one embodiment, an increase of saccharic acid in a non-human organism, as compared to a corresponding non-transformed wild type non-human organism, is conferred in the process of the invention, if the activity of a polypeptide showing the activity of a sll0418-protein, or if the activity of the polypeptide Sll0418, preferably represented by SEQ ID NO. 94943, or a homolog or fragment thereof, or if the activity of a polypeptide encoded by a nucleic acid molecule comprising the nucleic acid SEQ ID NO. 94942, preferably the coding region thereof, or a homolog or fragment thereof, e.g. derived from Synechocystis sp., is increased or generated. For example the activity of a nucleic acid molecule or a polypeptide comprising the nucleic acid, preferably the coding region thereof, or polypeptide or the consensus sequence or the polypeptide motif, as depicted in Table I, II or IV, application No. 17, column 5 or 8 in the respective same line as the nucleic acid molecule SEQ ID NO. 94942 or polypeptide SEQ ID NO. 94943, respectively, or a homolog or a fragment thereof, is increased or generated, or if the activity sll0418-protein is increased or generated in a non-human organism, like a microorganism or a plant cell, plant or part thereof, especially with non-targeted localization, whereby the respective line disclose in column 7 the fine chemical saccharic acid. For example, an increase of the saccharic acid of at least 1 percent, particularly in a range of 51 to 100-percent is conferred as compared to a corresponding non-transformed wild type non-human organism.

[88413] Accordingly, in one embodiment, an increase of 3,4,5-trihydroxypentanoic acid in a non-human organism, as compared to a corresponding non-transformed wild type non-human organism, is conferred in the process of the invention, if the activity of a polypeptide showing the activity of a sll0418-protein, or if the activity of the polypeptide Sll0418, preferably represented by SEQ ID NO. 94943, or a homolog or fragment thereof, or if the activity of a polypeptide encoded by a nucleic acid molecule comprising the nucleic acid SEQ ID NO. 94942, preferably the coding region thereof, or a homolog or fragment thereof, e.g. derived from Synechocystis sp., is increased or generated. For example the activity of a nucleic acid molecule or a polypeptide comprising the nucleic acid, preferably the coding region thereof, or polypeptide or the consensus sequence or the polypeptide motif, as depicted in Table I, II or IV, application No. 17, column 5 or 8 in the respective same line as the nucleic acid molecule SEQ ID NO. 94942 or polypeptide SEQ ID NO. 94943, respectively, or a homolog or a fragment thereof, is increased or generated, or if the activity sll0418-protein is increased or generated in a non-human organism, like a microorganism or a plant cell, plant or part thereof, especially with non-targeted localization, whereby the respective line disclose in column 7 the fine chemical 3,4,5-trihydroxypentanoic acid. For example, an increase of the 3,4,5-trihydroxypentanoic acid of at least 1 percent, particularly in a range of 37 to 157-percent is conferred as compared to a corresponding non-transformed wild type non-human organism.

[88414] Accordingly, in one embodiment, an increase of glucose-1-phosphate in a non-human organism, as compared to a corresponding non-transformed wild type non-human organism, is conferred in the process of the invention, if the activity of a polypeptide showing the activity of a urease subunit, or if the activity of the polypeptide Sll0420, preferably represented by SEQ ID NO. 50105, or a homolog or fragment thereof, or if the activity of a polypeptide encoded by a nucleic acid molecule comprising the nucleic acid SEQ ID NO. 50104, preferably the coding region thereof, or a homolog or fragment thereof, e.g. derived from Synechocystis sp., is increased or generated. For example the activity of a nucleic acid molecule or a polypeptide comprising the nucleic acid, preferably the coding region thereof, or polypeptide or the consensus sequence or the polypeptide motif, as depicted in Table I, II or IV, application No. 17, column 5 or 8 in the respective same line as the nucleic acid molecule SEQ ID NO. 50104 or polypeptide SEQ ID NO. 50105, respectively, or a homolog or a fragment thereof, is increased or generated, or if the activity urease subunit is increased or generated in a non-human organism, like a microorganism or a plant cell, plant or part thereof, especially with non-targeted localization, whereby the respective line disclose in column 7 the fine chemical glucose-1-phosphate. For example, an increase of the glucose-1-phosphate of at least 1 percent, particularly in a range of 23 to 36-percent is conferred as compared to a corresponding non-transformed wild type non-human organism.

[88415] Accordingly, in one embodiment, an increase of glucose-1-phosphate in a non-human organism, as compared to a corresponding non-transformed wild type non-human organism, is conferred in the process of the invention, if the activity of a polypeptide showing the activity of a glucokinase, or if the activity of the polypeptide Sll0593, preferably represented by SEQ ID NO. 85511, or a homolog or fragment thereof, or if the activity of a polypeptide encoded by a nucleic acid molecule comprising the nucleic acid SEQ ID NO. 85510, preferably the coding region thereof, or a homolog or fragment thereof, e.g. derived from Synechocystis sp., is increased or generated. For example the activity of a nucleic acid molecule or a polypeptide comprising the nucleic acid, preferably the coding region thereof, or polypeptide or the consensus sequence or the polypeptide motif, as depicted in Table I, II or IV, application No. 17, column 5 or 8 in the respective same line as the nucleic acid molecule SEQ ID NO. 85510 or polypeptide SEQ ID NO. 85511, respectively, or a homolog or a fragment thereof, is increased or generated, or if the activity glucokinase is increased or generated in a non-human organism, like a microorganism or a plant cell, plant or part thereof, especially with plastidic localization, whereby the respective line disclose in column 7 the fine chemical glucose-1-phosphate. For example, an increase of the glucose-1-phosphate of at least 1 percent, particularly in a range of 35 to 72-percent is conferred as compared to a corresponding non-transformed wild type non-human organism.

[88416] Accordingly, in one embodiment, an increase of saccharic acid in a non-human organism, as compared to a corresponding non-transformed wild type non-human organism, is conferred in the process of the invention, if the activity of a polypeptide showing the activity of a urease accessory protein, or if the activity of the polypeptide Sll0643, preferably represented by SEQ ID NO. 146946, or a homolog or fragment thereof, or if the activity of a polypeptide encoded by a nucleic acid molecule comprising the nucleic acid SEQ ID NO. 146945, preferably the coding region thereof, or a homolog or fragment thereof, e.g. derived from Synechocystis sp., is increased or generated. For example the activity of a nucleic acid molecule or a polypeptide comprising the nucleic acid, preferably the coding region thereof, or polypeptide or the consensus sequence or the polypeptide motif, as depicted in Table I, II or IV, application No. 17, column 5 or 8 in the respective same line as the nucleic acid molecule SEQ ID NO. 146945 or polypeptide SEQ ID NO. 146946, respectively, or a homolog or a fragment thereof, is increased or generated, or if the activity urease accessory protein is increased or generated in a non-human organism, like a microorganism or a plant cell, plant or part thereof, especially with non-targeted localization, whereby the respective line disclose in column 7 the fine chemical saccharic acid. For example, an increase of the saccharic acid of at least 1 percent, particularly in a range of 46 to 111-percent is conferred as compared to a corresponding non-transformed wild type non-human organism.

[88417] Accordingly, in one embodiment, an increase of glucose-1-phosphate in a non-human organism, as compared to a corresponding non-transformed wild type non-human organism, is conferred in the process of the invention, if the activity of a polypeptide showing the activity of a binding-protein-dependent transport systems inner membrane component, or if the activity of the polypeptide Sll0833, preferably represented by SEQ ID NO. 101708, or a homolog or fragment thereof, or if the activity of a polypeptide encoded by a nucleic acid molecule comprising the nucleic acid SEQ ID NO. 101707, preferably the coding region thereof, or a homolog or fragment thereof, e.g. derived from Synechocystis sp., is increased or generated. For example the activity of a nucleic acid molecule or a polypeptide comprising the nucleic acid, preferably the coding region thereof, or polypeptide or the consensus sequence or the polypeptide motif, as depicted in Table I, II or IV, application No. 17, column 5 or 8 in the respective same line as the nucleic acid molecule SEQ ID NO. 101707 or polypeptide SEQ ID NO. 101708, respectively, or a homolog or a fragment thereof, is increased or generated, or if the activity binding-protein-dependent transport systems inner membrane component is increased or generated in a non-human organism, like a microorganism or a plant cell, plant or part thereof, especially with non-targeted localization, whereby the respective line disclose in column 7 the fine chemical glucose-1-phosphate. For example, an increase of the glucose-1-phosphate of at least 1 percent, particularly in a range of 33 to 132-percent is conferred as compared to a corresponding non-transformed wild type non-human organism.

[88418] Accordingly, in one embodiment, an increase of 3,4,5-trihydroxypentanoic acid in a non-human organism, as compared to a corresponding non-transformed wild type non-human organism, is conferred in the process of the invention, if the activity of a polypeptide showing the activity of a binding-protein-dependent transport systems inner membrane component, or if the activity of the polypeptide Sll0833, preferably represented by SEQ ID NO. 101708, or a homolog or fragment thereof, or if the activity of a polypeptide encoded by a nucleic acid molecule comprising the nucleic acid SEQ ID NO. 101707, preferably the coding region thereof, or a homolog or fragment thereof, e.g. derived from Synechocystis sp., is increased or generated. For example the activity of a nucleic acid molecule or a polypeptide comprising the nucleic acid, preferably the coding region thereof, or polypeptide or the consensus sequence or the polypeptide motif, as depicted in Table I, II or IV, application No. 17, column 5 or 8 in the respective same line as the nucleic acid molecule SEQ ID NO. 101707 or polypeptide SEQ ID NO. 101708, respectively, or a homolog or a fragment thereof, is increased or generated, or if the activity binding-protein-dependent transport systems inner membrane component is increased or generated in a non-human organism, like a microorganism or a plant cell, plant or part thereof, especially with non-targeted localization, whereby the respective line disclose in column 7 the fine chemical 3,4,5-trihydroxypentanoic acid. For example, an increase of the 3,4,5-trihydroxypentanoic acid of at least 1 percent, particularly in a range of 39 to 122-percent is conferred as compared to a corresponding non-transformed wild type non-human organism.

[88419] Accordingly, in one embodiment, an increase of glucose-1-phosphate in a non-human organism, as compared to a corresponding non-transformed wild type non-human organism, is conferred in the process of the invention, if the activity of a polypeptide showing the activity of a 3-deoxy-7-phosphoheptulonate synthase, or if the activity of the polypeptide Sll0934, preferably represented by SEQ ID NO. 52247, or a homolog or fragment thereof, or if the activity of a polypeptide encoded by a nucleic acid molecule comprising the nucleic acid SEQ ID NO. 52246, preferably the coding region thereof, or a homolog or fragment thereof, e.g. derived from Synechocystis sp., is increased or generated. For example the activity of a nucleic acid molecule or a polypeptide comprising the nucleic acid, preferably the coding region thereof, or polypeptide or the consensus sequence or the polypeptide motif, as depicted in Table I, II or IV, application No. 17, column 5 or 8 in the respective same line as the nucleic acid molecule SEQ ID NO. 52246 or polypeptide SEQ ID NO. 52247, respectively, or a homolog or a fragment thereof, is increased or generated, or if the activity 3-deoxy-7-phosphoheptulonate synthase is increased or generated in a non-human organism, like a microorganism or a plant cell, plant or part thereof, especially with mitochondrial localization, whereby the respective line disclose in column 7 the fine chemical glucose-1-phosphate. For example, an increase of the glucose-1-phosphate of at least 1 percent, particularly in a range of 39 to 58-percent is conferred as compared to a corresponding non-transformed wild type non-human organism.

[88420] Accordingly, in one embodiment, an increase of fructose in a non-human organism, as compared to a corresponding non-transformed wild type non-human organism, is conferred in the process of the invention, if the activity of a polypeptide showing the activity of a glycogen synthase, or if the activity of the polypeptide Sll0945, preferably represented by SEQ ID NO. 52365, or a homolog or fragment thereof, or if the activity of a polypeptide encoded by a nucleic acid molecule comprising the nucleic acid SEQ ID NO. 52364, preferably the coding region thereof, or a homolog or fragment thereof, e.g. derived from Synechocystis sp., is increased or generated. For example the activity of a nucleic acid molecule or a polypeptide comprising the nucleic acid, preferably the coding region thereof, or polypeptide or the consensus sequence or the polypeptide motif, as depicted in Table I, II or IV, application No. 17, column 5 or 8 in the respective same line as the nucleic acid molecule SEQ ID NO. 52364 or polypeptide SEQ ID NO. 52365, respectively, or a homolog or a fragment thereof, is increased or generated, or if the activity glycogen synthase is increased or generated in a non-human organism, like a microorganism or a plant cell, plant or part thereof, especially with non-targeted localization, whereby the respective line disclose in column 7 the fine chemical fructose. For example, an increase of the fructose of at least 1 percent, particularly in a range of 94 to 495-percent is conferred as compared to a corresponding non-transformed wild type non-human organism.

[88421] Accordingly, in one embodiment, an increase of sucrose in a non-human organism, as compared to a corresponding non-transformed wild type non-human organism, is conferred in the process of the invention, if the activity of a polypeptide showing the activity of a glycogen synthase, or if the activity of the polypeptide Sll0945, preferably represented by SEQ ID NO. 52365, or a homolog or fragment thereof, or if the activity of a polypeptide encoded by a nucleic acid molecule comprising the nucleic acid SEQ ID NO. 52364, preferably the coding region thereof, or a homolog or fragment thereof, e.g. derived from Synechocystis sp., is increased or generated. For example the activity of a nucleic acid molecule or a polypeptide comprising the nucleic acid, preferably the coding region thereof, or polypeptide or the consensus sequence or the polypeptide motif, as depicted in Table I, II or IV, application No. 17, column 5 or 8 in the respective same line as the nucleic acid molecule SEQ ID NO. 52364 or polypeptide SEQ ID NO. 52365, respectively, or a homolog or a fragment thereof, is increased or generated, or if the activity glycogen synthase is increased or generated in a non-human organism, like a microorganism or a plant cell, plant or part thereof, especially with non-targeted localization, whereby the respective line disclose in column 7 the fine chemical sucrose. For example, an increase of the sucrose of at least 1 percent, particularly in a range of 30 to 82-percent is conferred as compared to a corresponding non-transformed wild type non-human organism.

[88422] Accordingly, in one embodiment, an increase of glucose-1-phosphate in a non-human organism, as compared to a corresponding non-transformed wild type non-human organism, is conferred in the process of the invention, if the activity of a polypeptide showing the activity of a coproporphyrinogen oxidase, or if the activity of the polypeptide Sll1185, preferably represented by SEQ ID NO. 53190, or a homolog or fragment thereof, or if the activity of a polypeptide encoded by a nucleic acid molecule comprising the nucleic acid SEQ ID NO. 53189, preferably the coding region thereof, or a homolog or fragment thereof, e.g. derived from Synechocystis sp., is increased or generated. For example the activity of a nucleic acid molecule or a polypeptide comprising the nucleic acid, preferably the coding region thereof, or polypeptide or the consensus sequence or the polypeptide motif, as depicted in Table I, II or IV, application No. 17, column 5 or 8 in the respective same line as the nucleic acid molecule SEQ ID NO. 53189 or polypeptide SEQ ID NO. 53190, respectively, or a homolog or a fragment thereof, is increased or generated, or if the activity coproporphyrinogen oxidase is increased or generated in a non-human organism, like a microorganism or a plant cell, plant or part thereof, especially with non-targeted localization, whereby the respective line disclose in column 7 the fine chemical glucose-1-phosphate. For example, an increase of the glucose-1-phosphate of at least 1 percent, particularly in a range of 32 to 41-percent is conferred as compared to a corresponding non-transformed wild type non-human organism.

[88423] Accordingly, in one embodiment, an increase of 3,4,5-trihydroxypentanoic acid in a non-human organism, as compared to a corresponding non-transformed wild type non-human organism, is conferred in the process of the invention, if the activity of a polypeptide showing the activity of a short chain dehydrogenase, or if the activity of the polypeptide SLL1308, preferably represented by SEQ ID NO. 147209, or a homolog or fragment thereof, or if the activity of a polypeptide encoded by a nucleic acid molecule comprising the nucleic acid SEQ ID NO. 147208, preferably the coding region thereof, or a homolog or fragment thereof, e.g. derived from Synechocystis sp., is increased or generated. For example the activity of a nucleic acid molecule or a polypeptide comprising the nucleic acid, preferably the coding region thereof, or polypeptide or the consensus sequence or the polypeptide motif, as depicted in Table I, II or IV, application No. 17, column 5 or 8 in the respective same line as the nucleic acid molecule SEQ ID NO. 147208 or polypeptide SEQ ID NO. 147209, respectively, or a homolog or a fragment thereof, is increased or generated, or if the activity short chain dehydrogenase is increased or generated in a non-human organism, like a microorganism or a plant cell, plant or part thereof, especially with non-targeted localization, whereby the respective line disclose in column 7 the fine chemical 3,4,5-trihydroxypentanoic acid. For example, an increase of the 3,4,5-trihydroxypentanoic acid of at least 1 percent, particularly in a range of 34 to 69-percent is conferred as compared to a corresponding non-transformed wild type non-human organism.

[88424] Accordingly, in one embodiment, an increase of raffinose in a non-human organism, as compared to a corresponding non-transformed wild type non-human organism, is conferred in the process of the invention, if the activity of a polypeptide showing the activity of a glycogen (starch) synthase, or if the activity of the polypeptide Sll1393, preferably represented by SEQ ID NO. 53457, or a homolog or fragment thereof, or if the activity of a polypeptide encoded by a nucleic acid molecule comprising the nucleic acid SEQ ID NO. 53456, preferably the coding region thereof, or a homolog or fragment thereof, e.g. derived from Synechocystis sp., is increased or generated. For example the activity of a nucleic acid molecule or a polypeptide comprising the nucleic acid, preferably the coding region thereof, or polypeptide or the consensus sequence or the polypeptide motif, as depicted in Table I, II or IV, application No. 17, column 5 or 8 in the respective same line as the nucleic acid molecule SEQ ID NO. 53456 or polypeptide SEQ ID NO. 53457, respectively, or a homolog or a fragment thereof, is increased or generated, or if the activity glycogen (starch) synthase is increased or generated in a non-human organism, like a microorganism or a plant cell, plant or part thereof, especially with non-targeted localization, whereby the respective line disclose in column 7 the fine chemical raffinose. For example, an increase of the raffinose of at least 1 percent, particularly in a range of 71 to 157-percent is conferred as compared to a corresponding non-transformed wild type non-human organism.

[88425] Accordingly, in one embodiment, an increase of myo-inositol in a non-human organism, as compared to a corresponding non-transformed wild type non-human organism, is conferred in the process of the invention, if the activity of a polypeptide showing the activity of a carbamoylphosphate synthase subunit, or if the activity of the polypeptide Sll1498, preferably represented by SEQ ID NO. 95048, or a homolog or fragment thereof, or if the activity of a polypeptide encoded by a nucleic acid molecule comprising the nucleic acid SEQ ID NO. 95047, preferably the coding region thereof, or a homolog or fragment thereof, e.g. derived from Synechocystis sp., is increased or generated. For example the activity of a nucleic acid molecule or a polypeptide comprising the nucleic acid, preferably the coding region thereof, or polypeptide or the consensus sequence or the polypeptide motif, as depicted in Table I, II or IV, application No. 17, column 5 or 8 in the respective same line as the nucleic acid molecule SEQ ID NO. 95047 or polypeptide SEQ ID NO. 95048, respectively, or a homolog or a fragment thereof, is increased or generated, or if the activity carbamoyl-phosphate synthase subunit is increased or generated in a non-human organism, like a microorganism or a plant cell, plant or part thereof, especially with non-targeted localization, whereby the respective line disclose in column 7 the fine chemical myo-inositol. For example, an increase of the myo-inositol of at least 1 percent, particularly in a range of 24 to 28-percent is conferred as compared to a corresponding non-transformed wild type non-human organism.

[88426] Accordingly, in one embodiment, an increase of 3,4,5-trihydroxypentanoic acid in a non-human organism, as compared to a corresponding non-transformed wild type non-human organism, is conferred in the process of the invention, if the activity of a polypeptide showing the activity of a carbamoyl-phosphate synthase subunit, or if the activity of the polypeptide Sll1498, preferably represented by SEQ ID NO. 95048, or a homolog or fragment thereof, or if the activity of a polypeptide encoded by a nucleic acid molecule comprising the nucleic acid SEQ ID NO. 95047, preferably the coding region thereof, or a homolog or fragment thereof, e.g. derived from Synechocystis sp., is increased or generated. For example the activity of a nucleic acid molecule or a polypeptide comprising the nucleic acid, preferably the coding region thereof, or polypeptide or the consensus sequence or the polypeptide motif, as depicted in Table I, II or IV, application No. 17, column 5 or 8 in the respective same line as the nucleic acid molecule SEQ ID NO. 95047 or polypeptide SEQ ID NO. 95048, respectively, or a homolog or a fragment thereof, is increased or generated, or if the activity carbamoyl-phosphate synthase subunit is increased or generated in a non-human organism, like a microorganism or a plant cell, plant or part thereof, especially with non-targeted localization, whereby the respective line disclose in column 7 the fine chemical 3,4,5-trihydroxypentanoic acid. For example, an increase of the 3,4,5-trihydroxypentanoic acid of at least 1 percent, particularly in a range of 38 to 68-percent is conferred as compared to a corresponding non-transformed wild type non-human organism.

[88427] Accordingly, in one embodiment, an increase of myo-inositol in a non-human organism, as compared to a corresponding non-transformed wild type non-human organism, is conferred in the process of the invention, if the activity of a polypeptide showing the activity of a 4-alpha-glucanotransferase, or if the activity of the polypeptide Sll1676, preferably represented by SEQ ID NO. 54898, or a homolog or fragment thereof, or if the activity of a polypeptide encoded by a nucleic acid molecule comprising the nucleic acid SEQ ID NO. 54897, preferably the coding region thereof, or a homolog or fragment thereof, e.g. derived from Synechocystis sp., is increased or generated. For example the activity of a nucleic acid molecule or a polypeptide comprising the nucleic acid, preferably the coding region thereof, or polypeptide or the consensus sequence or the polypeptide motif, as depicted in Table I, II or IV, application No. 17, column 5 or 8 in the respective same line as the nucleic acid molecule SEQ ID NO. 54897 or polypeptide SEQ ID NO. 54898, respectively, or a homolog or a fragment thereof, is increased or generated, or if the activity 4-alpha-glucanotransferase is increased or generated in a non-human organism, like a microorganism or a plant cell, plant or part thereof, especially with non-targeted localization, whereby the respective line disclose in column 7 the fine chemical myo-inositol. For example, an increase of the myo-inositol of at least 1 percent, particularly in a range of 20 to 24-percent is conferred as compared to a corresponding non-transformed wild type non-human organism.

[88428] Accordingly, in one embodiment, an increase of 3,4,5-trihydroxypentanoic acid in a non-human organism, as compared to a corresponding non-transformed wild type non-human organism, is conferred in the process of the invention, if the activity of a polypeptide showing the activity of a alanine dehydrogenase, or if the activity of the polypeptide Sll1682, preferably represented by SEQ ID NO. 55064, or a homolog or fragment thereof, or if the activity of a polypeptide encoded by a nucleic acid molecule comprising the nucleic acid SEQ ID NO. 55063, preferably the coding region thereof, or a homolog or fragment thereof, e.g. derived from Synechocystis sp., is increased or generated. For example the activity of a nucleic acid molecule or a polypeptide comprising the nucleic acid, preferably the coding region thereof, or polypeptide or the consensus sequence or the polypeptide motif, as depicted in Table I, II or IV, application No. 17, column 5 or 8 in the respective same line as the nucleic acid molecule SEQ ID NO. 55063 or polypeptide SEQ ID NO. 55064, respectively, or a homolog or a fragment thereof, is increased or generated, or if the activity alanine dehydrogenase is increased or generated in a non-human organism, like a microorganism or a plant cell, plant or part thereof, especially with plastidic localization, whereby the respective line disclose in column 7 the fine chemical 3,4,5-trihydroxypentanoic acid. For example, an increase of the 3,4,5-trihydroxypentanoic acid of at least 1 percent, particularly in a range of 33 to 65-percent is conferred as compared to a corresponding non-transformed wild type non-human organism.

[88429] Accordingly, in one embodiment, an increase of glucose in a non-human organism, as compared to a corresponding non-transformed wild type non-human organism, is conferred in the process of the invention, if the activity of a polypeptide showing the activity of a sll1761-protein, or if the activity of the polypeptide Sll1761, preferably represented by SEQ ID NO. 55380, or a homolog or fragment thereof, or if the activity of a polypeptide encoded by a nucleic acid molecule comprising the nucleic acid SEQ ID NO. 55379, preferably the coding region thereof, or a homolog or fragment thereof, e.g. derived from Synechocystis sp., is increased or generated. For example the activity of a nucleic acid molecule or a polypeptide comprising the nucleic acid, preferably the coding region thereof, or polypeptide or the consensus sequence or the polypeptide motif, as depicted in Table I, II or IV, application No. 17, column 5 or 8 in the respective same line as the nucleic acid molecule SEQ ID NO. 55379 or polypeptide SEQ ID NO. 55380, respectively, or a homolog or a fragment thereof, is increased or generated, or if the activity sll1761-protein is increased or generated in a non-human organism, like a microorganism or a plant cell, plant or part thereof, especially with non-targeted localization, whereby the respective line disclose in column 7 the fine chemical glucose. For example, an increase of the glucose of at least 1 percent, particularly in a range of 62 to 157-percent is conferred as compared to a corresponding non-transformed wild type non-human organism.

[88430] Accordingly, in one embodiment, an increase of glucose in a non-human organism, as compared to a corresponding non-transformed wild type non-human organism, is conferred in the process of the invention, if the activity of a polypeptide showing the activity of a acyl transferase, or if the activity of the polypeptide Sll1848, preferably represented by SEQ ID NO. 86448, or a homolog or fragment thereof, or if the activity of a polypeptide encoded by a nucleic acid molecule comprising the nucleic acid SEQ ID NO. 86447, preferably the coding region thereof, or a homolog or fragment thereof, e.g. derived from Synechocystis sp., is increased or generated. For example the activity of a nucleic acid molecule or a polypeptide comprising the nucleic acid, preferably the coding region thereof, or polypeptide or the consensus sequence or the polypeptide motif, as depicted in Table I, II or IV, application No. 17, column 5 or 8 in the respective same line as the nucleic acid molecule SEQ ID NO. 86447 or polypeptide SEQ ID NO. 86448, respectively, or a homolog or a fragment thereof, is increased or generated, or if the activity acyl transferase is increased or generated in a non-human organism, like a microorganism or a plant cell, plant or part thereof, especially with plastidic localization, whereby the respective line disclose in column 7 the fine chemical glucose. For example, an increase of the glucose of at least 1-percent, particularly in a range of 115 to 341-percent is conferred as compared to a corresponding non-transformed wild type non-human organism.

[88431] Accordingly, in one embodiment, an increase of glucose-1-phosphate in a non-human organism, as compared to a corresponding non-transformed wild type non-human organism, is conferred in the process of the invention, if the activity of a polypeptide showing the activity of a cation-transporting ATPase, or if the activity of the polypeptide Sll1920, preferably represented by SEQ ID NO. 55386, or a homolog or fragment thereof, or if the activity of a polypeptide encoded by a nucleic acid molecule comprising the nucleic acid SEQ ID NO. 55385, preferably the coding region thereof, or a homolog or fragment thereof, e.g. derived from Synechocystis sp., is increased or generated. For example the activity of a nucleic acid molecule or a polypeptide comprising the nucleic acid, preferably the coding region thereof, or polypeptide or the consensus sequence or the polypeptide motif, as depicted in Table I, II or IV, application No. 17, column 5 or 8 in the respective same line as the nucleic acid molecule SEQ ID NO. 55385 or polypeptide SEQ ID NO. 55386, respectively, or a homolog or a fragment thereof, is increased or generated, or if the activity cation-transporting ATPase is increased or generated in a non-human organism, like a microorganism or a plant cell, plant or part thereof, especially with mitochondrial localization, whereby the respective line disclose in column 7 the fine chemical glucose-1-phosphate. For example, an increase of the glucose-1-phosphate of at least 1 percent, particularly in a range of 20 to 106-percent is conferred as compared to a corresponding non-transformed wild type non-human organism.

[88432] Accordingly, in one embodiment, an increase of glucose-1-phosphate in a non-human organism, as compared to a corresponding non-transformed wild type non-human organism, is conferred in the process of the invention, if the activity of a polypeptide showing the activity of a cation-transporting ATPase, or if the activity of the polypeptide Sll1920, preferably represented by SEQ ID NO. 55386, or a homolog or fragment thereof, or if the activity of a polypeptide encoded by a nucleic acid molecule comprising the nucleic acid SEQ ID NO. 55385, preferably the coding region thereof, or a homolog or fragment thereof, e.g. derived from Synechocystis sp., is increased or generated. For example the activity of a nucleic acid molecule or a polypeptide comprising the nucleic acid, preferably the coding region thereof, or polypeptide or the consensus sequence or the polypeptide motif, as depicted in Table I, II or IV, application No. 17, column 5 or 8 in the respective same line as the nucleic acid molecule SEQ ID NO. 55385 or polypeptide SEQ ID NO. 55386, respectively, or a homolog or a fragment thereof, is increased or generated, or if the activity cation-transporting ATPase is increased or generated in a non-human organism, like a microorganism or a plant cell, plant or part thereof, especially with non-targeted localization, whereby the respective line disclose in column 7 the fine chemical glucose-1-phosphate. For example, an increase of the glucose-1-phosphate of at least 1 percent, particularly in a range of 20 to 136-percent is conferred as compared to a corresponding non-transformed wild type non-human organism.

[88433] Accordingly, in one embodiment, an increase of myo-inositol in a non-human organism, as compared to a corresponding non-transformed wild type non-human organism, is conferred in the process of the invention, if the activity of a polypeptide showing the activity of a cation-transporting ATPase, or if the activity of the polypeptide Sll1920, preferably represented by SEQ ID NO. 55386, or a homolog or fragment thereof, or if the activity of a polypeptide encoded by a nucleic acid molecule comprising the nucleic acid SEQ ID NO. 55385, preferably the coding region thereof, or a homolog or fragment thereof, e.g. derived from Synechocystis sp., is increased or generated. For example the activity of a nucleic acid molecule or a polypeptide comprising the nucleic acid, preferably the coding region thereof, or polypeptide or the consensus sequence or the polypeptide motif, as depicted in Table I, II or IV, application No. 17, column 5 or 8 in the respective same line as the nucleic acid molecule SEQ ID NO. 55385 or polypeptide SEQ ID NO. 55386, respectively, or a homolog or a fragment thereof, is increased or generated, or if the activity cation-transporting ATPase is increased or generated in a non-human organism, like a microorganism or a plant cell, plant or part thereof, especially with mitochondrial localization, whereby the respective line disclose in column 7 the fine chemical myo-inositol. For example, an increase of the myo-inositol of at least 1 percent, particularly in a range of 25 to 28-percent is conferred as compared to a corresponding non-transformed wild type non-human organism.

[88434] Accordingly, in one embodiment, an increase of raffinose in a non-human organism, as compared to a corresponding non-transformed wild type non-human organism, is conferred in the process of the invention, if the activity of a polypeptide showing the activity of a cation-transporting ATPase, or if the activity of the polypeptide Sll1920, preferably represented by SEQ ID NO. 55386, or a homolog or fragment thereof, or if the activity of a polypeptide encoded by a nucleic acid molecule comprising the nucleic acid SEQ ID NO. 55385, preferably the coding region thereof, or a homolog or fragment thereof, e.g. derived from Synechocystis sp., is increased or generated. For example the activity of a nucleic acid molecule or a polypeptide comprising the nucleic acid, preferably the coding region thereof, or polypeptide or the consensus sequence or the polypeptide motif, as depicted in Table I, II or IV, application No. 17, column 5 or 8 in the respective same line as the nucleic acid molecule SEQ ID NO. 55385 or polypeptide SEQ ID NO. 55386, respectively, or a homolog or a fragment thereof, is increased or generated, or if the activity cation-transporting ATPase is increased or generated in a non-human organism, like a microorganism or a plant cell, plant or part thereof, especially with non-targeted localization, whereby the respective line disclose in column 7 the fine chemical raffinose. For example, an increase of the raffinose of at least 1 percent, particularly in a range of 85 to 216-percent is conferred as compared to a corresponding non-transformed wild type non-human organism.

[88435] Accordingly, in one embodiment, an increase of glucose-1-phosphate in a non-human organism, as compared to a corresponding non-transformed wild type non-human organism, is conferred in the process of the invention, if the activity of a polypeptide showing the activity of a glycosidase, or if the activity of the polypeptide Slr0237, preferably represented by SEQ ID NO. 55772, or a homolog or fragment thereof, or if the activity of a polypeptide encoded by a nucleic acid molecule comprising the nucleic acid SEQ ID NO. 55771, preferably the coding region thereof, or a homolog or fragment thereof, e.g. derived from Synechocystis sp., is increased or generated. For example the activity of a nucleic acid molecule or a polypeptide comprising the nucleic acid, preferably the coding region thereof, or polypeptide or the consensus sequence or the polypeptide motif, as depicted in Table I, II or IV, application No. 17, column 5 or 8 in the respective same line as the nucleic acid molecule SEQ ID NO. 55771 or polypeptide SEQ ID NO. 55772, respectively, or a homolog or a fragment thereof, is increased or generated, or if the activity glycosidase is increased or generated in a non-human organism, like a microorganism or a plant cell, plant or part thereof, especially with non-targeted localization, whereby the respective line disclose in column 7 the fine chemical glucose-1-phosphate. For example, an increase of the glucose-1-phosphate of at least 1 percent, particularly in a range of 31 to 55-percent is conferred as compared to a corresponding non-transformed wild type non-human organism.

[88436] Accordingly, in one embodiment, an increase of fructose in a non-human organism, as compared to a corresponding non-transformed wild type non-human organism, is conferred in the process of the invention, if the activity of a polypeptide showing the activity of a precorrin methylase, or if the activity of the polypeptide Slr0239, preferably represented by SEQ ID NO. 86541, or a homolog or fragment thereof, or if the activity of a polypeptide encoded by a nucleic acid molecule comprising the nucleic acid SEQ ID NO. 86540, preferably the coding region thereof, or a homolog or fragment thereof, e.g. derived from Synechocystis sp., is increased or generated. For example the activity of a nucleic acid molecule or a polypeptide comprising the nucleic acid, preferably the coding region thereof, or polypeptide or the consensus sequence or the polypeptide motif, as depicted in Table I, II or IV, application No. 17, column 5 or 8 in the respective same line as the nucleic acid molecule SEQ ID NO. 86540 or polypeptide SEQ ID NO. 86541, respectively, or a homolog or a fragment thereof, is increased or generated, or if the activity precorrin methylase is increased or generated in a non-human organism, like a microorganism or a plant cell, plant or part thereof, especially with mitochondrial localization, whereby the respective line disclose in column 7 the fine chemical fructose. For example, an increase of the fructose of at least 1 percent, particularly in a range of 76 to 426-percent is conferred as compared to a corresponding non-transformed wild type non-human organism.

[88437] Accordingly, in one embodiment, an increase of glucose in a non-human organism, as compared to a corresponding non-transformed wild type non-human organism, is conferred in the process of the invention, if the activity of a polypeptide showing the activity of a precorrin methylase, or if the activity of the polypeptide Slr0239, preferably represented by SEQ ID NO. 86541, or a homolog or fragment thereof, or if the activity of a polypeptide encoded by a nucleic acid molecule comprising the nucleic acid SEQ ID NO. 86540, preferably the coding region thereof, or a homolog or fragment thereof, e.g. derived from Synechocystis sp., is increased or generated. For example the activity of a nucleic acid molecule or a polypeptide comprising the nucleic acid, preferably the coding region thereof, or polypeptide or the consensus sequence or the polypeptide motif, as depicted in Table I, II or IV, application No. 17, column 5 or 8 in the respective same line as the nucleic acid molecule SEQ ID NO. 86540 or polypeptide SEQ ID NO. 86541, respectively, or a homolog or a fragment thereof, is increased or generated, or if the activity precorrin methylase is increased or generated in a non-human organism, like a microorganism or a plant cell, plant or part thereof, especially with mitochondrial localization, whereby the respective line disclose in column 7 the fine chemical glucose. For example, an increase of the glucose of at least 1 percent, particularly in a range of 65 to 167-percent is conferred as compared to a corresponding non-transformed wild type non-human organism.

[88438] Accordingly, in one embodiment, an increase of glucose-1-phosphate in a non-human organism, as compared to a corresponding non-transformed wild type non-human organism, is conferred in the process of the invention, if the activity of a polypeptide showing the activity of a oxidoreductase, or if the activity of the polypeptide Slr0338, preferably represented by SEQ ID NO. 11991, or a homolog or fragment thereof, or if the activity of a polypeptide encoded by a nucleic acid molecule comprising the nucleic acid SEQ ID NO. 11990, preferably the coding region thereof, or a homolog or fragment thereof, e.g. derived from Synechocystis sp., is increased or generated. For example the activity of a nucleic acid molecule or a polypeptide comprising the nucleic acid, preferably the coding region thereof, or polypeptide or the consensus sequence or the polypeptide motif, as depicted in Table I, II or IV, application No. 17, column 5 or 8 in the respective same line as the nucleic acid molecule SEQ ID NO. 11990 or polypeptide SEQ ID NO. 11991, respectively, or a homolog or a fragment thereof, is increased or generated, or if the activity oxidoreductase is increased or generated in a non-human organism, like a microorganism or a plant cell, plant or part thereof, especially with non-targeted localization, whereby the respective line disclose in column 7 the fine chemical glucose-1-phosphate. For example, an increase of the glucose-1-phosphate of at least 1 percent, particularly in a range of 18 to 64-percent is conferred as compared to a corresponding non-transformed wild type non-human organism.

[88439] Accordingly, in one embodiment, an increase of 3,4,5-trihydroxypentanoic acid in a non-human organism, as compared to a corresponding non-transformed wild type non-human organism, is conferred in the process of the invention, if the activity of a polypeptide showing the activity of a oxidoreductase, or if the activity of the polypeptide Slr0338, preferably represented by SEQ ID NO. 11991, or a homolog or fragment thereof, or if the activity of a polypeptide encoded by a nucleic acid molecule comprising the nucleic acid SEQ ID NO. 11990, preferably the coding region thereof, or a homolog or fragment thereof, e.g. derived from Synechocystis sp., is increased or generated. For example the activity of a nucleic acid molecule or a polypeptide comprising the nucleic acid, preferably the coding region thereof, or polypeptide or the consensus sequence or the polypeptide motif, as depicted in Table I, II or IV, application No. 17, column 5 or 8 in the respective same line as the nucleic acid molecule SEQ ID NO. 11990 or polypeptide SEQ ID NO. 11991, respectively, or a homolog or a fragment thereof, is increased or generated, or if the activity oxidoreductase is increased or generated in a non-human organism, like a microorganism or a plant cell, plant or part thereof, especially with non-targeted localization, whereby the respective line disclose in column 7 the fine chemical 3,4,5-trihydroxypentanoic acid. For example, an increase of the 3,4,5-trihydroxypentanoic acid of at least 1 percent, particularly in a range of 43 to 133-percent is conferred as compared to a corresponding non-transformed wild type non-human organism.

[88440] Accordingly, in one embodiment, an increase of glucose-1-phosphate in a non-human organism, as compared to a corresponding non-transformed wild type non-human organism, is conferred in the process of the invention, if the activity of a polypeptide showing the activity of a slr0600-protein, or if the activity of the polypeptide Slr0600, preferably represented by SEQ ID NO. 56515, or a homolog or fragment thereof, or if the activity of a polypeptide encoded by a nucleic acid molecule comprising the nucleic acid SEQ ID NO. 56514, preferably the coding region thereof, or a homolog or fragment thereof, e.g. derived from Synechocystis sp., is increased or generated. For example the activity of a nucleic acid molecule or a polypeptide comprising the nucleic acid, preferably the coding region thereof, or polypeptide or the consensus sequence or the polypeptide motif, as depicted in Table I, II or IV, application No. 17, column 5 or 8 in the respective same line as the nucleic acid molecule SEQ ID NO. 56514 or polypeptide SEQ ID NO. 56515, respectively, or a homolog or a fragment thereof, is increased or generated, or if the activity slr0600-protein is increased or generated in a non-human organism, like a microorganism or a plant cell, plant or part thereof, especially with non-targeted localization, whereby the respective line disclose in column 7 the fine chemical glucose-1-phosphate. For example, an increase of the glucose-1-phosphate of at least 1 percent, particularly in a range of 18 to 91-percent is conferred as compared to a corresponding non-transformed wild type non-human organism.

[88441] Accordingly, in one embodiment, an increase of glucose-1-phosphate in a non-human organism, as compared to a corresponding non-transformed wild type non-human organism, is conferred in the process of the invention, if the activity of a polypeptide showing the activity of a Glu/Leu/Phe/Val dehydrogenase , or if the activity of the polypeptide Slr0710, preferably represented by SEQ ID NO. 56895, or a homolog or fragment thereof, or if the activity of a polypeptide encoded by a nucleic acid molecule comprising the nucleic acid SEQ ID NO. 56894, preferably the coding region thereof, or a homolog or fragment thereof, e.g. derived from Synechocystis sp., is increased or generated. For example the activity of a nucleic acid molecule or a polypeptide comprising the nucleic acid, preferably the coding region thereof, or polypeptide or the consensus sequence or the polypeptide motif, as depicted in Table I, II or IV, application No. 17, column 5 or 8 in the respective same line as the nucleic acid molecule SEQ ID NO. 56894 or polypeptide SEQ ID NO. 56895, respectively, or a homolog or a fragment thereof, is increased or generated, or if the activity Glu/Leu/Phe/Val dehydrogenase is increased or generated in a non-human organism, like a microorganism or a plant cell, plant or part thereof, especially with mitochondrial localization, whereby the respective line disclose in column 7 the fine chemical glucose-1-phosphate. For example, an increase of the glucose-1-phosphate of at least 1-percent, particularly in a range of 24 to 37-percent is conferred as compared to a corresponding non-transformed wild type non-human organism.

[88442] Accordingly, in one embodiment, an increase of glucose-1-phosphate in a non-human organism, as compared to a corresponding non-transformed wild type non-human organism, is conferred in the process of the invention, if the activity of a polypeptide showing the activity of a malate dehydrogenase, or if the activity of the polypeptide Slr0721, preferably represented by SEQ ID NO. 87398, or a homolog or fragment thereof, or if the activity of a polypeptide encoded by a nucleic acid molecule comprising the nucleic acid SEQ ID NO. 87397, preferably the coding region thereof, or a homolog or fragment thereof, e.g. derived from Synechocystis sp., is increased or generated. For example the activity of a nucleic acid molecule or a polypeptide comprising the nucleic acid, preferably the coding region thereof, or polypeptide or the consensus sequence or the polypeptide motif, as depicted in Table I, II or IV, application No. 17, column 5 or 8 in the respective same line as the nucleic acid molecule SEQ ID NO. 87397 or polypeptide SEQ ID NO. 87398, respectively, or a homolog or a fragment thereof, is increased or generated, or if the activity malate dehydrogenase is increased or generated in a non-human organism, like a microorganism or a plant cell, plant or part thereof, especially with plastidic localization, whereby the respective line disclose in column 7 the fine chemical glucose-1-phosphate. For example, an increase of the glucose-1-phosphate of at least 1 percent, particularly in a range of 24 to 119-percent is conferred as compared to a corresponding non-transformed wild type non-human organism.

[88443] Accordingly, in one embodiment, an increase of sucrose in a non-human organism, as compared to a corresponding non-transformed wild type non-human organism, is conferred in the process of the invention, if the activity of a polypeptide showing the activity of a geranylgeranyl pyrophosphate synthase, or if the activity of the polypeptide Slr0739, preferably represented by SEQ ID NO. 57236, or a homolog or fragment thereof, or if the activity of a polypeptide encoded by a nucleic acid molecule comprising the nucleic acid SEQ ID NO. 57235, preferably the coding region thereof, or a homolog or fragment thereof, e.g. derived from Synechocystis sp., is increased or generated. For example the activity of a nucleic acid molecule or a polypeptide comprising the nucleic acid, preferably the coding region thereof, or polypeptide or the consensus sequence or the polypeptide motif, as depicted in Table I, II or IV, application No. 17, column 5 or 8 in the respective same line as the nucleic acid molecule SEQ ID NO. 57235 or polypeptide SEQ ID NO. 57236, respectively, or a homolog or a fragment thereof, is increased or generated, or if the activity geranylgeranyl pyrophosphate synthase is increased or generated in a non-human organism, like a microorganism or a plant cell, plant or part thereof, especially with plastidic localization, whereby the respective line disclose in column 7 the fine chemical sucrose. For example, an increase of the sucrose of at least 1 percent, particularly in a range of 26 to 34-percent is conferred as compared to a corresponding non-transformed wild type non-human organism.

[88444] Accordingly, in one embodiment, an increase of fructose in a non-human organism, as compared to a corresponding non-transformed wild type non-human organism, is conferred in the process of the invention, if the activity of a polypeptide showing the activity of a circadian clock protein, or if the activity of the polypeptide Slr0757, preferably represented by SEQ ID NO. 147347, or a homolog or fragment thereof, or if the activity of a polypeptide encoded by a nucleic acid molecule comprising the nucleic acid SEQ ID NO. 147346, preferably the coding region thereof, or a homolog or fragment thereof, e.g. derived from Synechocystis sp., is increased or generated. For example the activity of a nucleic acid molecule or a polypeptide comprising the nucleic acid, preferably the coding region thereof, or polypeptide or the consensus sequence or the polypeptide motif, as depicted in Table I, II or IV, application No. 17, column 5 or 8 in the respective same line as the nucleic acid molecule SEQ ID NO. 147346 or polypeptide SEQ ID NO. 147347, respectively, or a homolog or a fragment thereof, is increased or generated, or if the activity circadian clock protein is increased or generated in a non-human organism, like a microorganism or a plant cell, plant or part thereof, especially with mitochondrial localization, whereby the respective line disclose in column 7 the fine chemical fructose. For example, an increase of the fructose of at least 1 percent, particularly in a range of 100 to 243-percent is conferred as compared to a corresponding non-transformed wild type non-human organism.

[88445] Accordingly, in one embodiment, an increase of glucose in a non-human organism, as compared to a corresponding non-transformed wild type non-human organism, is conferred in the process of the invention, if the activity of a polypeptide showing the activity of a circadian clock protein, or if the activity of the polypeptide Slr0757, preferably represented by SEQ ID NO. 147347, or a homolog or fragment thereof, or if the activity of a polypeptide encoded by a nucleic acid molecule comprising the nucleic acid SEQ ID NO. 147346, preferably the coding region thereof, or a homolog or fragment thereof, e.g. derived from Synechocystis sp., is increased or generated. For example the activity of a nucleic acid molecule or a polypeptide comprising the nucleic acid, preferably the coding region thereof, or polypeptide or the consensus sequence or the polypeptide motif, as depicted in Table I, II or IV, application No. 17, column 5 or 8 in the respective same line as the nucleic acid molecule SEQ ID NO. 147346 or polypeptide SEQ ID NO. 147347, respectively, or a homolog or a fragment thereof, is increased or generated, or if the activity circadian clock protein is increased or generated in a non-human organism, like a microorganism or a plant cell, plant or part thereof, especially with mitochondrial localization, whereby the respective line disclose in column 7 the fine chemical glucose. For example, an increase of the glucose of at least 1 percent, particularly in a range of 72 to 114-percent is conferred as compared to a corresponding non-transformed wild type non-human organism.

[88446] Accordingly, in one embodiment, an increase of glucose-1-phosphate in a non-human organism, as compared to a corresponding non-transformed wild type non-human organism, is conferred in the process of the invention, if the activity of a polypeptide showing the activity of a circadian clock protein, or if the activity of the polypeptide Slr0757, preferably represented by SEQ ID NO. 147347, or a homolog or fragment thereof, or if the activity of a polypeptide encoded by a nucleic acid molecule comprising the nucleic acid SEQ ID NO. 147346, preferably the coding region thereof, or a homolog or fragment thereof, e.g. derived from Synechocystis sp., is increased or generated. For example the activity of a nucleic acid molecule or a polypeptide comprising the nucleic acid, preferably the coding region thereof, or polypeptide or the consensus sequence or the polypeptide motif, as depicted in Table I, II or IV, application No. 17, column 5 or 8 in the respective same line as the nucleic acid molecule SEQ ID NO. 147346 or polypeptide SEQ ID NO. 147347, respectively, or a homolog or a fragment thereof, is increased or generated, or if the activity circadian clock protein is increased or generated in a non-human organism, like a microorganism or a plant cell, plant or part thereof, especially with mitochondrial localization, whereby the respective line disclose in column 7 the fine chemical glucose-1-phosphate. For example, an increase of the glucose-1-phosphate of at least 1 percent, particularly in a range of 39 to 56-percent is conferred as compared to a corresponding non-transformed wild type non-human organism.

[88447] Accordingly, in one embodiment, an increase of glucose-1-phosphate in a non-human organism, as compared to a corresponding non-transformed wild type non-human organism, is conferred in the process of the invention, if the activity of a polypeptide showing the activity of a amine oxidase, or if the activity of the polypeptide Slr0782, preferably represented by SEQ ID NO. 57680, or a homolog or fragment thereof, or if the activity of a polypeptide encoded by a nucleic acid molecule comprising the nucleic acid SEQ ID NO. 57679, preferably the coding region thereof, or a homolog or fragment thereof, e.g. derived from Synechocystis sp., is increased or generated. For example the activity of a nucleic acid molecule or a polypeptide comprising the nucleic acid, preferably the coding region thereof, or polypeptide or the consensus sequence or the polypeptide motif, as depicted in Table I, II or IV, application No. 17, column 5 or 8 in the respective same line as the nucleic acid molecule SEQ ID NO. 57679 or polypeptide SEQ ID NO. 57680, respectively, or a homolog or a fragment thereof, is increased or generated, or if the activity amine oxidase is increased or generated in a non-human organism, like a microorganism or a plant cell, plant or part thereof, especially with mitochondrial localization, whereby the respective line disclose in column 7 the fine chemical glucose-1-phosphate. For example, an increase of the glucose-1-phosphate of at least 1 percent, particularly in a range of 33 to 68-percent is conferred as compared to a corresponding non-transformed wild type non-human organism.

[88448] Accordingly, in one embodiment, an increase of fructose in a non-human organism, as compared to a corresponding non-transformed wild type non-human organism, is conferred in the process of the invention, if the activity of a polypeptide showing the activity of a kinase, or if the activity of the polypeptide Slr0862, preferably represented by SEQ ID NO. 87611, or a homolog or fragment thereof, or if the activity of a polypeptide encoded by a nucleic acid molecule comprising the nucleic acid SEQ ID NO. 87610, preferably the coding region thereof, or a homolog or fragment thereof, e.g. derived from Synechocystis sp., is increased or generated. For example the activity of a nucleic acid molecule or a polypeptide comprising the nucleic acid, preferably the coding region thereof, or polypeptide or the consensus sequence or the polypeptide motif, as depicted in Table I, II or IV, application No. 17, column 5 or 8 in the respective same line as the nucleic acid molecule SEQ ID NO. 87610 or polypeptide SEQ ID NO. 87611, respectively, or a homolog or a fragment thereof, is increased or generated, or if the activity kinase is increased or generated in a non-human organism, like a microorganism or a plant cell, plant or part thereof, especially with mitochondrial localization, whereby the respective line disclose in column 7 the fine chemical fructose. For example, an increase of the fructose of at least 1 percent, particularly in a range of 80 to 98-percent is conferred as compared to a corresponding non-transformed wild type non-human organism.

[88449] Accordingly, in one embodiment, an increase of glucose in a non-human organism, as compared to a corresponding non-transformed wild type non-human organism, is conferred in the process of the invention, if the activity of a polypeptide showing the activity of a kinase, or if the activity of the polypeptide Slr0862, preferably represented by SEQ ID NO. 87611, or a homolog or fragment thereof, or if the activity of a polypeptide encoded by a nucleic acid molecule comprising the nucleic acid SEQ ID NO. 87610, preferably the coding region thereof, or a homolog or fragment thereof, e.g. derived from Synechocystis sp., is increased or generated. For example the activity of a nucleic acid molecule or a polypeptide comprising the nucleic acid, preferably the coding region thereof, or polypeptide or the consensus sequence or the polypeptide motif, as depicted in Table I, II or IV, application No. 17, column 5 or 8 in the respective same line as the nucleic acid molecule SEQ ID NO. 87610 or polypeptide SEQ ID NO. 87611, respectively, or a homolog or a fragment thereof, is increased or generated, or if the activity kinase is increased or generated in a non-human organism, like a microorganism or a plant cell, plant or part thereof, especially with mitochondrial localization, whereby the respective line disclose in column 7 the fine chemical glucose. For example, an increase of the glucose of at least 1 percent, particularly in a range of 54 to 88-percent is conferred as compared to a corresponding non-transformed wild type non-human organism.

[88450] Accordingly, in one embodiment, an increase of glucose-1-phosphate in a non-human organism, as compared to a corresponding non-transformed wild type non-human organism, is conferred in the process of the invention, if the activity of a polypeptide showing the activity of a Mg-protoporphyrin IX monomethyl ester oxidative cyclase 66 kD subunit, or if the activity of the polypeptide Slr0905, preferably represented by SEQ ID NO. 147408, or a homolog or fragment thereof, or if the activity of a polypeptide encoded by a nucleic acid molecule comprising the nucleic acid SEQ ID NO. 147407, preferably the coding region thereof, or a homolog or fragment thereof, e.g. derived from Synechocystis sp., is increased or generated. For example the activity of a nucleic acid molecule or a polypeptide comprising the nucleic acid, preferably the coding region thereof, or polypeptide or the consensus sequence or the polypeptide motif, as depicted in Table I, II or IV, application No. 17, column 5 or 8 in the respective same line as the nucleic acid molecule SEQ ID NO. 147407 or polypeptide SEQ ID NO. 147408, respectively, or a homolog or a fragment thereof, is increased or generated, or if the activity Mg-protoporphyrin IX monomethyl ester oxidative cyclase 66 kD subunit is increased or generated in a non-human organism, like a microorganism or a plant cell, plant or part thereof, especially with mitochondrial localization, whereby the respective line disclose in column 7 the fine chemical glucose-1-phosphate. For example, an increase of the glucose-1-phosphate of at least 1 percent, particularly in a range of 32 to 57-percent is conferred as compared to a corresponding non-transformed wild type non-human organism.

[88451] Accordingly, in one embodiment, an increase of myo-inositol in a non-human organism, as compared to a corresponding non-transformed wild type non-human organism, is conferred in the process of the invention, if the activity of a polypeptide showing the activity of a permease protein of ABC transporter, or if the activity of the polypeptide Slr0949, preferably represented by SEQ ID NO. 119223, or a homolog or fragment thereof, or if the activity of a polypeptide encoded by a nucleic acid molecule comprising the nucleic acid SEQ ID NO. 119222, preferably the coding region thereof, or a homolog or fragment thereof, e.g. derived from Synechocystis sp., is increased or generated. For example the activity of a nucleic acid molecule or a polypeptide comprising the nucleic acid, preferably the coding region thereof, or polypeptide or the consensus sequence or the polypeptide motif, as depicted in Table I, II or IV, application No. 17, column 5 or 8 in the respective same line as the nucleic acid molecule SEQ ID NO. 119222 or polypeptide SEQ ID NO. 119223, respectively, or a homolog or a fragment thereof, is increased or generated, or if the activity permease protein of ABC transporter is increased or generated in a non-human organism, like a microorganism or a plant cell, plant or part thereof, especially with mitochondrial localization, whereby the respective line disclose in column 7 the fine chemical myo-inositol. For example, an increase of the myo-inositol of at least 1 percent, particularly in a range of 25 to 56-percent is conferred as compared to a corresponding non-transformed wild type non-human organism.

[88452] Accordingly, in one embodiment, an increase of glucose-1-phosphate in a non-human organism, as compared to a corresponding non-transformed wild type non-human organism, is conferred in the process of the invention, if the activity of a polypeptide showing the activity of a dihydrolipoamide dehydrogenase, or if the activity of the polypeptide Slr1096, preferably represented by SEQ ID NO. 57735, or a homolog or fragment thereof, or if the activity of a polypeptide encoded by a nucleic acid molecule comprising the nucleic acid SEQ ID NO. 57734, preferably the coding region thereof, or a homolog or fragment thereof, e.g. derived from Synechocystis sp., is increased or generated. For example the activity of a nucleic acid molecule or a polypeptide comprising the nucleic acid, preferably the coding region thereof, or polypeptide or the consensus sequence or the polypeptide motif, as depicted in Table I, II or IV, application No. 17, column 5 or 8 in the respective same line as the nucleic acid molecule SEQ ID NO. 57734 or polypeptide SEQ ID NO. 57735, respectively, or a homolog or a fragment thereof, is increased or generated, or if the activity dihydrolipoamide dehydrogenase is increased or generated in a non-human organism, like a microorganism or a plant cell, plant or part thereof, especially with non-targeted localization, whereby the respective line disclose in column 7 the fine chemical glucose-1-phosphate. For example, an increase of the glucose-1-phosphate of at least 1-percent, particularly in a range of 31 to 90-percent is conferred as compared to a corresponding non-transformed wild type non-human organism.

[88453] Accordingly, in one embodiment, an increase of raffinose in a non-human organism, as compared to a corresponding non-transformed wild type non-human organism, is conferred in the process of the invention, if the activity of a polypeptide showing the activity of a dihydrolipoamide dehydrogenase, or if the activity of the polypeptide Slr1096, preferably represented by SEQ ID NO. 57735, or a homolog or fragment thereof, or if the activity of a polypeptide encoded by a nucleic acid molecule comprising the nucleic acid SEQ ID NO. 57734, preferably the coding region thereof, or a homolog or fragment thereof, e.g. derived from Synechocystis sp., is increased or generated. For example the activity of a nucleic acid molecule or a polypeptide comprising the nucleic acid, preferably the coding region thereof, or polypeptide or the consensus sequence or the polypeptide motif, as depicted in Table I, II or IV, application No. 17, column 5 or 8 in the respective same line as the nucleic acid molecule SEQ ID NO. 57734 or polypeptide SEQ ID NO. 57735, respectively, or a homolog or a fragment thereof, is increased or generated, or if the activity dihydrolipoamide dehydrogenase is increased or generated in a non-human organism, like a microorganism or a plant cell, plant or part thereof, especially with non-targeted localization, whereby the respective line disclose in column 7 the fine chemical raffinose. For example, an increase of the raffinose of at least 1 percent, particularly in a range of 81 to 216-percent is conferred as compared to a corresponding non-transformed wild type non-human organism.

[88454] Accordingly, in one embodiment, an increase of myo-inositol in a non-human organism, as compared to a corresponding non-transformed wild type non-human organism, is conferred in the process of the invention, if the activity of a polypeptide showing the activity of a slr1107-protein, or if the activity of the polypeptide Slr1107, preferably represented by SEQ ID NO. 101777, or a homolog or fragment thereof, or if the activity of a polypeptide encoded by a nucleic acid molecule comprising the nucleic acid SEQ ID NO. 101776, preferably the coding region thereof, or a homolog or fragment thereof, e.g. derived from Synechocystis sp., is increased or generated. For example the activity of a nucleic acid molecule or a polypeptide comprising the nucleic acid, preferably the coding region thereof, or polypeptide or the consensus sequence or the polypeptide motif, as depicted in Table I, II or IV, application No. 17, column 5 or 8 in the respective same line as the nucleic acid molecule SEQ ID NO. 101776 or polypeptide SEQ ID NO. 101777, respectively, or a homolog or a fragment thereof, is increased or generated, or if the activity slr1107-protein is increased or generated in a non-human organism, like a microorganism or a plant cell, plant or part thereof, especially with plastidic localization, whereby the respective line disclose in column 7 the fine chemical myo-inositol. For example, an increase of the myo-inositol of at least 1 percent, particularly in a range of 21 to 26-percent is conferred as compared to a corresponding non-transformed wild type non-human organism.

[88455] Accordingly, in one embodiment, an increase of glucose-1-phosphate in a non-human organism, as compared to a corresponding non-transformed wild type non-human organism, is conferred in the process of the invention, if the activity of a polypeptide showing the activity of a fatty acid desaturase, or if the activity of the polypeptide Slr1350, preferably represented by SEQ ID NO. 116714, or a homolog or fragment thereof, or if the activity of a polypeptide encoded by a nucleic acid molecule comprising the nucleic acid SEQ ID NO. 116713, preferably the coding region thereof, or a homolog or fragment thereof, e.g. derived from Synechocystis sp., is increased or generated. For example the activity of a nucleic acid molecule or a polypeptide comprising the nucleic acid, preferably the coding region thereof, or polypeptide or the consensus sequence or the polypeptide motif, as depicted in Table I, II or IV, application No. 17, column 5 or 8 in the respective same line as the nucleic acid molecule SEQ ID NO. 116713 or polypeptide SEQ ID NO. 116714, respectively, or a homolog or a fragment thereof, is increased or generated, or if the activity fatty acid desaturase is increased or generated in a non-human organism, like a microorganism or a plant cell, plant or part thereof, especially with mitochondrial localization, whereby the respective line disclose in column 7 the fine chemical glucose-1-phosphate. For example, an increase of the glucose-1-phosphate of at least 1 percent, particularly in a range of 26 to 61-percent is conferred as compared to a corresponding non-transformed wild type non-human organism.

[88456] Accordingly, in one embodiment, an increase of glucose-1-phosphate in a non-human organism, as compared to a corresponding non-transformed wild type non-human organism, is conferred in the process of the invention, if the activity of a polypeptide showing the activity of a CDP-diglyceride synthetase, or if the activity of the polypeptide Slr1369, preferably represented by SEQ ID NO. 58473, or a homolog or fragment thereof, or if the activity of a polypeptide encoded by a nucleic acid molecule comprising the nucleic acid SEQ ID NO. 58472, preferably the coding region thereof, or a homolog or fragment thereof, e.g. derived from Synechocystis sp., is increased or generated. For example the activity of a nucleic acid molecule or a polypeptide comprising the nucleic acid, preferably the coding region thereof, or polypeptide or the consensus sequence or the polypeptide motif, as depicted in Table I, II or IV, application No. 17, column 5 or 8 in the respective same line as the nucleic acid molecule SEQ ID NO. 58472 or polypeptide SEQ ID NO. 58473, respectively, or a homolog or a fragment thereof, is increased or generated, or if the activity CDP-diglyceride synthetase is increased or generated in a non-human organism, like a microorganism or a plant cell, plant or part thereof, especially with mitochondrial localization, whereby the respective line disclose in column 7 the fine chemical glucose-1-phosphate. For example, an increase of the glucose-1-phosphate of at least 1 percent, particularly in a range of 39 to 63-percent is conferred as compared to a corresponding non-transformed wild type non-human organism.

[88457] Accordingly, in one embodiment, an increase of myo-inositol in a non-human organism, as compared to a corresponding non-transformed wild type non-human organism, is conferred in the process of the invention, if the activity of a polypeptide showing the activity of a CDP-diglyceride synthetase, or if the activity of the polypeptide Slr1369, preferably represented by SEQ ID NO. 58473, or a homolog or fragment thereof, or if the activity of a polypeptide encoded by a nucleic acid molecule comprising the nucleic acid SEQ ID NO. 58472, preferably the coding region thereof, or a homolog or fragment thereof, e.g. derived from Synechocystis sp., is increased or generated. For example the activity of a nucleic acid molecule or a polypeptide comprising the nucleic acid, preferably the coding region thereof, or polypeptide or the consensus sequence or the polypeptide motif, as depicted in Table I, II or IV, application No. 17, column 5 or 8 in the respective same line as the nucleic acid molecule SEQ ID NO. 58472 or polypeptide SEQ ID NO. 58473, respectively, or a homolog or a fragment thereof, is increased or generated, or if the activity CDP-diglyceride synthetase is increased or generated in a non-human organism, like a microorganism or a plant cell, plant or part thereof, especially with mitochondrial localization, whereby the respective line disclose in column 7 the fine chemical myo-inositol. For example, an increase of the myo-inositol of at least 1 percent, particularly in a range of 29 to 62-percent is conferred as compared to a corresponding non-transformed wild type non-human organism.

[88458] Accordingly, in one embodiment, an increase of fructose in a non-human organism, as compared to a corresponding non-transformed wild type non-human organism, is conferred in the process of the invention, if the activity of a polypeptide showing the activity of a iron(III) dicitrate-binding protein, or if the activity of the polypeptide Slr1492, preferably represented by SEQ ID NO. 58669, or a homolog or fragment thereof, or if the activity of a polypeptide encoded by a nucleic acid molecule comprising the nucleic acid SEQ ID NO. 58668, preferably the coding region thereof, or a homolog or fragment thereof, e.g. derived from Synechocystis sp., is increased or generated. For example the activity of a nucleic acid molecule or a polypeptide comprising the nucleic acid, preferably the coding region thereof, or polypeptide or the consensus sequence or the polypeptide motif, as depicted in Table I, II or IV, application No. 17, column 5 or 8 in the respective same line as the nucleic acid molecule SEQ ID NO. 58668 or polypeptide SEQ ID NO. 58669, respectively, or a homolog or a fragment thereof, is increased or generated, or if the activity iron(III) dicitrate-binding protein is increased or generated in a non-human organism, like a microorganism or a plant cell, plant or part thereof, especially with mitochondrial localization, whereby the respective line disclose in column 7 the fine chemical fructose. For example, an increase of the fructose of at least 1 percent, particularly in a range of 82 to 150-percent is conferred as compared to a corresponding non-transformed wild type non-human organism.

[88459] Accordingly, in one embodiment, an increase of sucrose in a non-human organism, as compared to a corresponding non-transformed wild type non-human organism, is conferred in the process of the invention, if the activity of a polypeptide showing the activity of a photosystem I reaction center subunit XI, or if the activity of the polypeptide Slr1655, preferably represented by SEQ ID NO. 12071, or a homolog or fragment thereof, or if the activity of a polypeptide encoded by a nucleic acid molecule comprising the nucleic acid SEQ ID NO. 12070, preferably the coding region thereof, or a homolog or fragment thereof, e.g. derived from Synechocystis sp., is increased or generated. For example the activity of a nucleic acid molecule or a polypeptide comprising the nucleic acid, preferably the coding region thereof, or polypeptide or the consensus sequence or the polypeptide motif, as depicted in Table I, II or IV, application No. 17, column 5 or 8 in the respective same line as the nucleic acid molecule SEQ ID NO. 12070 or polypeptide SEQ ID NO. 12071, respectively, or a homolog or a fragment thereof, is increased or generated, or if the activity photosystem I reaction center subunit XI is increased or generated in a non-human organism, like a microorganism or a plant cell, plant or part thereof, especially with mitochondrial localization, whereby the respective line disclose in column 7 the fine chemical sucrose. For example, an increase of the sucrose of at least 1 percent, particularly in a range of 26 to 64-percent is conferred as compared to a corresponding non-transformed wild type non-human organism.

[88460] Accordingly, in one embodiment, an increase of fructose in a non-human organism, as compared to a corresponding non-transformed wild type non-human organism, is conferred in the process of the invention, if the activity of a polypeptide showing the activity of a photosystem II protein, or if the activity of the polypeptide Slr1739, preferably represented by SEQ ID NO. 58732, or a homolog or fragment thereof, or if the activity of a polypeptide encoded by a nucleic acid molecule comprising the nucleic acid SEQ ID NO. 58731, preferably the coding region thereof, or a homolog or fragment thereof, e.g. derived from Synechocystis sp., is increased or generated. For example the activity of a nucleic acid molecule or a polypeptide comprising the nucleic acid, preferably the coding region thereof, or polypeptide or the consensus sequence or the polypeptide motif, as depicted in Table I, II or IV, application No. 17, column 5 or 8 in the respective same line as the nucleic acid molecule SEQ ID NO. 58731 or polypeptide SEQ ID NO. 58732, respectively, or a homolog or a fragment thereof, is increased or generated, or if the activity photosystem II protein is increased or generated in a non-human organism, like a microorganism or a plant cell, plant or part thereof, especially with plastidic localization, whereby the respective line disclose in column 7 the fine chemical fructose. For example, an increase of the fructose of at least 1 percent, particularly in a range of 84 to 407-percent is conferred as compared to a corresponding non-transformed wild type non-human organism.

[88461] Accordingly, in one embodiment, an increase of fructose in a non-human organism, as compared to a corresponding non-transformed wild type non-human organism, is conferred in the process of the invention, if the activity of a polypeptide showing the activity of a glutamine amidotransferase, or if the activity of the polypeptide Slr1742, preferably represented by SEQ ID NO. 58752, or a homolog or fragment thereof, or if the activity of a polypeptide encoded by a nucleic acid molecule comprising the nucleic acid SEQ ID NO. 58751, preferably the coding region thereof, or a homolog or fragment thereof, e.g. derived from Synechocystis sp., is increased or generated. For example the activity of a nucleic acid molecule or a polypeptide comprising the nucleic acid, preferably the coding region thereof, or polypeptide or the consensus sequence or the polypeptide motif, as depicted in Table I, II or IV, application No. 17, column 5 or 8 in the respective same line as the nucleic acid molecule SEQ ID NO. 58751 or polypeptide SEQ ID NO. 58752, respectively, or a homolog or a fragment thereof, is increased or generated, or if the activity glutamine amidotransferase is increased or generated in a non-human organism, like a microorganism or a plant cell, plant or part thereof, especially with plastidic localization, whereby the respective line disclose in column 7 the fine chemical fructose. For example, an increase of the fructose of at least 1 percent, particularly in a range of 76 to 91-percent is conferred as compared to a corresponding non-transformed wild type non-human organism.

[88462] Accordingly, in one embodiment, an increase of myo-inositol in a non-human organism, as compared to a corresponding non-transformed wild type non-human organism, is conferred in the process of the invention, if the activity of a polypeptide showing the activity of a glutamine amidotransferase, or if the activity of the polypeptide Slr1742, preferably represented by SEQ ID NO. 58752, or a homolog or fragment thereof, or if the activity of a polypeptide encoded by a nucleic acid molecule comprising the nucleic acid SEQ ID NO. 58751, preferably the coding region thereof, or a homolog or fragment thereof, e.g. derived from Synechocystis sp., is increased or generated. For example the activity of a nucleic acid molecule or a polypeptide comprising the nucleic acid, preferably the coding region thereof, or polypeptide or the consensus sequence or the polypeptide motif, as depicted in Table I, II or IV, application No. 17, column 5 or 8 in the respective same line as the nucleic acid molecule SEQ ID NO. 58751 or polypeptide SEQ ID NO. 58752, respectively, or a homolog or a fragment thereof, is increased or generated, or if the activity glutamine amidotransferase is increased or generated in a non-human organism, like a microorganism or a plant cell, plant or part thereof, especially with plastidic localization, whereby the respective line disclose in column 7 the fine chemical myo-inositol. For example, an increase of the myo-inositol of at least 1 percent, particularly in a range of 27 to 35-percent is conferred as compared to a corresponding non-transformed wild type non-human organism.

[88463] Accordingly, in one embodiment, an increase of glucose-1-phosphate in a non-human organism, as compared to a corresponding non-transformed wild type non-human organism, is conferred in the process of the invention, if the activity of a polypeptide showing the activity of a NADH dehydrogenase, or if the activity of the polypeptide Slr1743, preferably represented by SEQ ID NO. 147458, or a homolog or fragment thereof, or if the activity of a polypeptide encoded by a nucleic acid molecule comprising the nucleic acid SEQ ID NO. 147457, preferably the coding region thereof, or a homolog or fragment thereof, e.g. derived from Synechocystis sp., is increased or generated. For example the activity of a nucleic acid molecule or a polypeptide comprising the nucleic acid, preferably the coding region thereof, or polypeptide or the consensus sequence or the polypeptide motif, as depicted in Table I, II or IV, application No. 17, column 5 or 8 in the respective same line as the nucleic acid molecule SEQ ID NO. 147457 or polypeptide SEQ ID NO. 147458, respectively, or a homolog or a fragment thereof, is increased or generated, or if the activity NADH dehydrogenase is increased or generated in a non-human organism, like a microorganism or a plant cell, plant or part thereof, especially with plastidic localization, whereby the respective line disclose in column 7 the fine chemical glucose-1-phosphate. For example, an increase of the glucose-1-phosphate of at least 1 percent, particularly in a range of 28 to 51-percent is conferred as compared to a corresponding non-transformed wild type non-human organism.

[88464] Accordingly, in one embodiment, an increase of raffinose in a non-human organism, as compared to a corresponding non-transformed wild type non-human organism, is conferred in the process of the invention, if the activity of a polypeptide showing the activity of a pyridoxal phosphate biosynthetic protein, or if the activity of the polypeptide Slr1779, preferably represented by SEQ ID NO. 147638, or a homolog or fragment thereof, or if the activity of a polypeptide encoded by a nucleic acid molecule comprising the nucleic acid SEQ ID NO. 147637, preferably the coding region thereof, or a homolog or fragment thereof, e.g. derived from Synechocystis sp., is increased or generated. For example the activity of a nucleic acid molecule or a polypeptide comprising the nucleic acid, preferably the coding region thereof, or polypeptide or the consensus sequence or the polypeptide motif, as depicted in Table I, II or IV, application No. 17, column 5 or 8 in the respective same line as the nucleic acid molecule SEQ ID NO. 147637 or polypeptide SEQ ID NO. 147638, respectively, or a homolog or a fragment thereof, is increased or generated, or if the activity pyridoxal phosphate biosynthetic protein is increased or generated in a non-human organism, like a microorganism or a plant cell, plant or part thereof, especially with plastidic localization, whereby the respective line disclose in column 7 the fine chemical raffinose. For example, an increase of the raffinose of at least 1 percent, particularly in a range of 55 to 176-percent is conferred as compared to a corresponding non-transformed wild type non-human organism.

[88465] Accordingly, in one embodiment, an increase of glucose-1-phosphate in a non-human organism, as compared to a corresponding non-transformed wild type non-human organism, is conferred in the process of the invention, if the activity of a polypeptide showing the activity of a phosphoadenosine phosphosulfate reductase , or if the activity of the polypeptide Slr1791, preferably represented by SEQ ID NO. 12141, or a homolog or fragment thereof, or if the activity of a polypeptide encoded by a nucleic acid molecule comprising the nucleic acid SEQ ID NO. 12140, preferably the coding region thereof, or a homolog or fragment thereof, e.g. derived from Synechocystis sp., is increased or generated. For example the activity of a nucleic acid molecule or a polypeptide comprising the nucleic acid, preferably the coding region thereof, or polypeptide or the consensus sequence or the polypeptide motif, as depicted in Table I, II or IV, application No. 17, column 5 or 8 in the respective same line as the nucleic acid molecule SEQ ID NO. 12140 or polypeptide SEQ ID NO. 12141, respectively, or a homolog or a fragment thereof, is increased or generated, or if the activity phosphoadenosine phosphosulfate reductase is increased or generated in a non-human organism, like a microorganism or a plant cell, plant or part thereof, especially with plastidic localization, whereby the respective line disclose in column 7 the fine chemical glucose-1-phosphate. For example, an increase of the glucose-1-phosphate of at least 1 percent, particularly in a range of 21 to 48-percent is conferred as compared to a corresponding non-transformed wild type non-human organism.

[88466] Accordingly, in one embodiment, an increase of glucose-1-phosphate in a non-human organism, as compared to a corresponding non-transformed wild type non-human organism, is conferred in the process of the invention, if the activity of a polypeptide showing the activity of a threonine dehydratase, or if the activity of the polypeptide Slr2072, preferably represented by SEQ ID NO. 12342, or a homolog or fragment thereof, or if the activity of a polypeptide encoded by a nucleic acid molecule comprising the nucleic acid SEQ ID NO. 12341, preferably the coding region thereof, or a homolog or fragment thereof, e.g. derived from Synechocystis sp., is increased or generated. For example the activity of a nucleic acid molecule or a polypeptide comprising the nucleic acid, preferably the coding region thereof, or polypeptide or the consensus sequence or the polypeptide motif, as depicted in Table I, II or IV, application No. 17, column 5 or 8 in the respective same line as the nucleic acid molecule SEQ ID NO. 12341 or polypeptide SEQ ID NO. 12342, respectively, or a homolog or a fragment thereof, is increased or generated, or if the activity threonine dehydratase is increased or generated in a non-human organism, like a microorganism or a plant cell, plant or part thereof, especially with plastidic localization, whereby the respective line disclose in column 7 the fine chemical glucose-1-phosphate. For example, an increase of the glucose-1-phosphate of at least 1 percent, particularly in a range of 28 to 82-percent is conferred as compared to a corresponding non-transformed wild type non-human organism.

[88467] Accordingly, in one embodiment, an increase of 3,4,5-trihydroxypentanoic acid in a non-human organism, as compared to a corresponding non-transformed wild type non-human organism, is conferred in the process of the invention, if the activity of a polypeptide showing the activity of a threonine dehydratase, or if the activity of the polypeptide Slr2072, preferably represented by SEQ ID NO. 12342, or a homolog or fragment thereof, or if the activity of a polypeptide encoded by a nucleic acid molecule comprising the nucleic acid SEQ ID NO. 12341, preferably the coding region thereof, or a homolog or fragment thereof, e.g. derived from Synechocystis sp., is increased or generated. For example the activity of a nucleic acid molecule or a polypeptide comprising the nucleic acid, preferably the coding region thereof, or polypeptide or the consensus sequence or the polypeptide motif, as depicted in Table I, II or IV, application No. 17, column 5 or 8 in the respective same line as the nucleic acid molecule SEQ ID NO. 12341 or polypeptide SEQ ID NO. 12342, respectively, or a homolog or a fragment thereof, is increased or generated, or if the activity threonine dehydratase is increased or generated in a non-human organism, like a microorganism or a plant cell, plant or part thereof, especially with plastidic localization, whereby the respective line disclose in column 7 the fine chemical 3,4,5-trihydroxypentanoic acid. For example, an increase of the 3,4,5-trihydroxypentanoic acid of at least 1 percent, particularly in a range of 34 to 121-percent is conferred as compared to a corresponding non-transformed wild type non-human organism.

[88468] Accordingly, in one embodiment, an increase of fructose in a non-human organism, as compared to a corresponding non-transformed wild type non-human organism, is conferred in the process of the invention, if the activity of a polypeptide showing the activity of a short-chain alcohol dehydrogenase family, or if the activity of the polypeptide Slr2124, preferably represented by SEQ ID NO. 59371, or a homolog or fragment thereof, or if the activity of a polypeptide encoded by a nucleic acid molecule comprising the nucleic acid SEQ ID NO. 59370, preferably the coding region thereof, or a homolog or fragment thereof, e.g. derived from Synechocystis sp., is increased or generated. For example the activity of a nucleic acid molecule or a polypeptide comprising the nucleic acid, preferably the coding region thereof, or polypeptide or the consensus sequence or the polypeptide motif, as depicted in Table I, II or IV, application No. 17, column 5 or 8 in the respective same line as the nucleic acid molecule SEQ ID NO. 59370 or polypeptide SEQ ID NO. 59371, respectively, or a homolog or a fragment thereof, is increased or generated, or if the activity short-chain alcohol dehydrogenase family is increased or generated in a non-human organism, like a microorganism or a plant cell, plant or part thereof, especially with plastidic localization, whereby the respective line disclose in column 7 the fine chemical fructose. For example, an increase of the fructose of at least 1 percent, particularly in a range of 152 to 214-percent is conferred as compared to a corresponding non-transformed wild type non-human organism.

[88469] Accordingly, in one embodiment, an increase of glucose in a non-human organism, as compared to a corresponding non-transformed wild type non-human organism, is conferred in the process of the invention, if the activity of a polypeptide showing the activity of a short-chain alcohol dehydrogenase family, or if the activity of the polypeptide Slr2124, preferably represented by SEQ ID NO. 59371, or a homolog or fragment thereof, or if the activity of a polypeptide encoded by a nucleic acid molecule comprising the nucleic acid SEQ ID NO. 59370, preferably the coding region thereof, or a homolog or fragment thereof, e.g. derived from Synechocystis sp., is increased or generated. For example the activity of a nucleic acid molecule or a polypeptide comprising the nucleic acid, preferably the coding region thereof, or polypeptide or the consensus sequence or the polypeptide motif, as depicted in Table I, II or IV, application No. 17, column 5 or 8 in the respective same line as the nucleic acid molecule SEQ ID NO. 59370 or polypeptide SEQ ID NO. 59371, respectively, or a homolog or a fragment thereof, is increased or generated, or if the activity short-chain alcohol dehydrogenase family is increased or generated in a non-human organism, like a microorganism or a plant cell, plant or part thereof, especially with plastidic localization, whereby the respective line disclose in column 7 the fine chemical glucose. For example, an increase of the glucose of at least 1 percent, particularly in a range of 123 to 150-percent is conferred as compared to a corresponding non-transformed wild type non-human organism.

[88470] Accordingly, in one embodiment, an increase of glucose-1-phosphate in a non-human organism, as compared to a corresponding non-transformed wild type non-human organism, is conferred in the process of the invention, if the activity of a polypeptide showing the activity of a short-chain alcohol dehydrogenase family, or if the activity of the polypeptide Slr2124, preferably represented by SEQ ID NO. 59371, or a homolog or fragment thereof, or if the activity of a polypeptide encoded by a nucleic acid molecule comprising the nucleic acid SEQ ID NO. 59370, preferably the coding region thereof, or a homolog or fragment thereof, e.g. derived from Synechocystis sp., is increased or generated. For example the activity of a nucleic acid molecule or a polypeptide comprising the nucleic acid, preferably the coding region thereof, or polypeptide or the consensus sequence or the polypeptide motif, as depicted in Table I, II or IV, application No. 17, column 5 or 8 in the respective same line as the nucleic acid molecule SEQ ID NO. 59370 or polypeptide SEQ ID NO. 59371, respectively, or a homolog or a fragment thereof, is increased or generated, or if the activity short-chain alcohol dehydrogenase family is increased or generated in a non-human organism, like a microorganism or a plant cell, plant or part thereof, especially with plastidic localization, whereby the respective line disclose in column 7 the fine chemical glucose-1-phosphate. For example, an increase of the glucose-1-phosphate of at least 1 percent, particularly in a range of 31 to 31-percent is conferred as compared to a corresponding non-transformed wild type non-human organism.

[88471] Accordingly, in one embodiment, an increase of myo-inositol in a non-human organism, as compared to a corresponding non-transformed wild type non-human organism, is conferred in the process of the invention, if the activity of a polypeptide showing the activity of a short-chain alcohol dehydrogenase family, or if the activity of the polypeptide Slr2124, preferably represented by SEQ ID NO. 59371, or a homolog or fragment thereof, or if the activity of a polypeptide encoded by a nucleic acid molecule comprising the nucleic acid SEQ ID NO. 59370, preferably the coding region thereof, or a homolog or fragment thereof, e.g. derived from Synechocystis sp., is increased or generated. For example the activity of a nucleic acid molecule or a polypeptide comprising the nucleic acid, preferably the coding region thereof, or polypeptide or the consensus sequence or the polypeptide motif, as depicted in Table I, II or IV, application No. 17, column 5 or 8 in the respective same line as the nucleic acid molecule SEQ ID NO. 59370 or polypeptide SEQ ID NO. 59371, respectively, or a homolog or a fragment thereof, is increased or generated, or if the activity short-chain alcohol dehydrogenase family is increased or generated in a non-human organism, like a microorganism or a plant cell, plant or part thereof, especially with plastidic localization, whereby the respective line disclose in column 7 the fine chemical myo-inositol. For example, an increase of the myo-inositol of at least 1 percent, particularly in a range of 24 to 38-percent is conferred as compared to a corresponding non-transformed wild type non-human organism.

[88472] Accordingly, in one embodiment, an increase of sucrose in a non-human organism, as compared to a corresponding non-transformed wild type non-human organism, is conferred in the process of the invention, if the activity of a polypeptide showing the activity of a short-chain alcohol dehydrogenase family, or if the activity of the polypeptide Slr2124, preferably represented by SEQ ID NO. 59371, or a homolog or fragment thereof, or if the activity of a polypeptide encoded by a nucleic acid molecule comprising the nucleic acid SEQ ID NO. 59370, preferably the coding region thereof, or a homolog or fragment thereof, e.g. derived from Synechocystis sp., is increased or generated. For example the activity of a nucleic acid molecule or a polypeptide comprising the nucleic acid, preferably the coding region thereof, or polypeptide or the consensus sequence or the polypeptide motif, as depicted in Table I, II or IV, application No. 17, column 5 or 8 in the respective same line as the nucleic acid molecule SEQ ID NO. 59370 or polypeptide SEQ ID NO. 59371, respectively, or a homolog or a fragment thereof, is increased or generated, or if the activity short-chain alcohol dehydrogenase family is increased or generated in a non-human organism, like a microorganism or a plant cell, plant or part thereof, especially with plastidic localization, whereby the respective line disclose in column 7 the fine chemical sucrose. For example, an increase of the sucrose of at least 1 percent, particularly in a range of 24 to 45-percent is conferred as compared to a corresponding non-transformed wild type non-human organism.

[88473] Accordingly, in one embodiment, an increase of raffinose in a non-human organism, as compared to a corresponding non-transformed wild type non-human organism, is conferred in the process of the invention, if the activity of a polypeptide showing the activity of a phosphate acetyltransferase, or if the activity of the polypeptide Slr2132, preferably represented by SEQ ID NO. 147837, or a homolog or fragment thereof, or if the activity of a polypeptide encoded by a nucleic acid molecule comprising the nucleic acid SEQ ID NO. 147836, preferably the coding region thereof, or a homolog or fragment thereof, e.g. derived from Synechocystis sp., is increased or generated. For example the activity of a nucleic acid molecule or a polypeptide comprising the nucleic acid, preferably the coding region thereof, or polypeptide or the consensus sequence or the polypeptide motif, as depicted in Table I, II or IV, application No. 17, column 5 or 8 in the respective same line as the nucleic acid molecule SEQ ID NO. 147836 or polypeptide SEQ ID NO. 147837, respectively, or a homolog or a fragment thereof, is increased or generated, or if the activity phosphate acetyltransferase is increased or generated in a non-human organism, like a microorganism or a plant cell, plant or part thereof, especially with mitochondrial localization, whereby the respective line disclose in column 7 the fine chemical raffinose. For example, an increase of the raffinose of at least 1 percent, particularly in a range of 75 to 205-percent is conferred as compared to a corresponding non-transformed wild type non-human organism.

[88474] Accordingly, in one embodiment, an increase of glucose-1-phosphate in a non-human organism, as compared to a corresponding non-transformed wild type non-human organism, is conferred in the process of the invention, if the activity of a polypeptide showing the activity of a photosystem I reaction centre subunit, or if the activity of the polypeptide Smr0004, preferably represented by SEQ ID NO. 136908, or a homolog or fragment thereof, or if the activity of a polypeptide encoded by a nucleic acid molecule comprising the nucleic acid SEQ ID NO. 136907, preferably the coding region thereof, or a homolog or fragment thereof, e.g. derived from Synechocystis sp., is increased or generated. For example the activity of a nucleic acid molecule or a polypeptide comprising the nucleic acid, preferably the coding region thereof, or polypeptide or the consensus sequence or the polypeptide motif, as depicted in Table I, II or IV, application No. 17, column 5 or 8 in the respective same line as the nucleic acid molecule SEQ ID NO. 136907 or polypeptide SEQ ID NO. 136908, respectively, or a homolog or a fragment thereof, is increased or generated, or if the activity photosystem I reaction centre subunit is increased or generated in a non-human organism, like a microorganism or a plant cell, plant or part thereof, especially with plastidic localization, whereby the respective line disclose in column 7 the fine chemical glucose-1-phosphate. For example, an increase of the glucose-1-phosphate of at least 1 percent, particularly in a range of 31 to 52-percent is conferred as compared to a corresponding non-transformed wild type non-human organism.

[88475] Accordingly, in one embodiment, an increase of raffinose in a non-human organism, as compared to a corresponding non-transformed wild type non-human organism, is conferred in the process of the invention, if the activity of a polypeptide showing the activity of a photosystem I reaction centre subunit, or if the activity of the polypeptide Smr0004, preferably represented by SEQ ID NO. 136908, or a homolog or fragment thereof, or if the activity of a polypeptide encoded by a nucleic acid molecule comprising the nucleic acid SEQ ID NO. 136907, preferably the coding region thereof, or a homolog or fragment thereof, e.g. derived from Synechocystis sp., is increased or generated. For example the activity of a nucleic acid molecule or a polypeptide comprising the nucleic acid, preferably the coding region thereof, or polypeptide or the consensus sequence or the polypeptide motif, as depicted in Table I, II or IV, application No. 17, column 5 or 8 in the respective same line as the nucleic acid molecule SEQ ID NO. 136907 or polypeptide SEQ ID NO. 136908, respectively, or a homolog or a fragment thereof, is increased or generated, or if the activity photosystem I reaction centre subunit is increased or generated in a non-human organism, like a microorganism or a plant cell, plant or part thereof, especially with plastidic localization, whereby the respective line disclose in column 7 the fine chemical raffinose. For example, an increase of the raffinose of at least 1 percent, particularly in a range of 79 to 166-percent is conferred as compared to a corresponding non-transformed wild type non-human organism.

[88476] Accordingly, in one embodiment, an increase of 3,4,5-trihydroxypentanoic acid in a non-human organism, as compared to a corresponding non-transformed wild type non-human organism, is conferred in the process of the invention, if the activity of a polypeptide showing the activity of a photosystem I reaction centre subunit, or if the activity of the polypeptide Smr0004, preferably represented by SEQ ID NO. 136908, or a homolog or fragment thereof, or if the activity of a polypeptide encoded by a nucleic acid molecule comprising the nucleic acid SEQ ID NO. 136907, preferably the coding region thereof, or a homolog or fragment thereof, e.g. derived from Synechocystis sp., is increased or generated. For example the activity of a nucleic acid molecule or a polypeptide comprising the nucleic acid, preferably the coding region thereof, or polypeptide or the consensus sequence or the polypeptide motif, as depicted in Table I, II or IV, application No. 17, column 5 or 8 in the respective same line as the nucleic acid molecule SEQ ID NO. 136907 or polypeptide SEQ ID NO. 136908, respectively, or a homolog or a fragment thereof, is increased or generated, or if the activity photosystem I reaction centre subunit is increased or generated in a non-human organism, like a microorganism or a plant cell, plant or part thereof, especially with plastidic localization, whereby the respective line disclose in column 7 the fine chemical 3,4,5-trihydroxypentanoic acid. For example, an increase of the 3,4,5-trihydroxypentanoic acid of at least 1 percent, particularly in a range of 33 to 78-percent is conferred as compared to a corresponding non-transformed wild type non-human organism.

[88477] Accordingly, in one embodiment, an increase of fructose in a non-human organism, as compared to a corresponding non-transformed wild type non-human organism, is conferred in the process of the invention, if the activity of a polypeptide showing the activity of a Sec-independent protein translocase subunit, or if the activity of the polypeptide TTC0019, preferably represented by SEQ ID NO. 12699, or a homolog or fragment thereof, or if the activity of a polypeptide encoded by a nucleic acid molecule comprising the nucleic acid SEQ ID NO. 12698, preferably the coding region thereof, or a homolog or fragment thereof, e.g. derived from Thermus thermophilus, is increased or generated. For example the activity of a nucleic acid molecule or a polypeptide comprising the nucleic acid, preferably the coding region thereof, or polypeptide or the consensus sequence or the polypeptide motif, as depicted in Table I, II or IV, application No. 17, column 5 or 8 in the respective same line as the nucleic acid molecule SEQ ID NO. 12698 or polypeptide SEQ ID NO. 12699, respectively, or a homolog or a fragment thereof, is increased or generated, or if the activity Sec-independent protein translocase subunit is increased or generated in a non-human organism, like a microorganism or a plant cell, plant or part thereof, especially with non-targeted localization, whereby the respective line disclose in column 7 the fine chemical fructose. For example, an increase of the fructose of at least 1 percent, particularly in a range of 83 to 4740-percent is conferred as compared to a corresponding non-transformed wild type non-human organism.

[88478] Accordingly, in one embodiment, an increase of glucose in a non-human organism, as compared to a corresponding non-transformed wild type non-human organism, is conferred in the process of the invention, if the activity of a polypeptide showing the activity of a Sec-independent protein translocase subunit, or if the activity of the polypeptide TTC0019, preferably represented by SEQ ID NO. 12699, or a homolog or fragment thereof, or if the activity of a polypeptide encoded by a nucleic acid molecule comprising the nucleic acid SEQ ID NO. 12698, preferably the coding region thereof, or a homolog or fragment thereof, e.g. derived from Thermus thermophilus, is increased or generated. For example the activity of a nucleic acid molecule or a polypeptide comprising the nucleic acid, preferably the coding region thereof, or polypeptide or the consensus sequence or the polypeptide motif, as depicted in Table I, II or IV, application No. 17, column 5 or 8 in the respective same line as the nucleic acid molecule SEQ ID NO. 12698 or polypeptide SEQ ID NO. 12699, respectively, or a homolog or a fragment thereof, is increased or generated, or if the activity Sec-independent protein translocase subunit is increased or generated in a non-human organism, like a microorganism or a plant cell, plant or part thereof, especially with non-targeted localization, whereby the respective line disclose in column 7 the fine chemical glucose. For example, an increase of the glucose of at least 1 percent, particularly in a range of 62 to 1517-percent is conferred as compared to a corresponding non-transformed wild type non-human organism.

[88479] Accordingly, in one embodiment, an increase of sedoheptulose-7-phosphate in a non-human organism, as compared to a corresponding non-transformed wild type non-human organism, is conferred in the process of the invention, if the activity of a polypeptide showing the activity of a Sec-independent protein translocase subunit, or if the activity of the polypeptide TTC0019, preferably represented by SEQ ID NO. 12699, or a homolog or fragment thereof, or if the activity of a polypeptide encoded by a nucleic acid molecule comprising the nucleic acid SEQ ID NO. 12698, preferably the coding region thereof, or a homolog or fragment thereof, e.g. derived from Thermus thermophilus, is increased or generated. For example the activity of a nucleic acid molecule or a polypeptide comprising the nucleic acid, preferably the coding region thereof, or polypeptide or the consensus sequence or the polypeptide motif, as depicted in Table I, II or IV, application No. 17, column 5 or 8 in the respective same line as the nucleic acid molecule SEQ ID NO. 12698 or polypeptide SEQ ID NO. 12699, respectively, or a homolog or a fragment thereof, is increased or generated, or if the activity Sec-independent protein translocase subunit is increased or generated in a non-human organism, like a microorganism or a plant cell, plant or part thereof, especially with non-targeted localization, whereby the respective line disclose in column 7 the fine chemical sedoheptulose-7-phosphate. For example, an increase of the sedoheptulose-7-phosphate of at least 1 percent, particularly in a range of 57 to 296-percent is conferred as compared to a corresponding non-transformed wild type non-human organism.

[88480] Accordingly, in one embodiment, an increase of fructose in a non-human organism, as compared to a corresponding non-transformed wild type non-human organism, is conferred in the process of the invention, if the activity of a polypeptide showing the activity of a cell division protein, or if the activity of the polypeptide TTC0035, preferably represented by SEQ ID NO. 60302, or a homolog or fragment thereof, or if the activity of a polypeptide encoded by a nucleic acid molecule comprising the nucleic acid SEQ ID NO. 60301, preferably the coding region thereof, or a homolog or fragment thereof, e.g. derived from Thermus thermophilus, is increased or generated. For example the activity of a nucleic acid molecule or a polypeptide comprising the nuoleic acid, preferably the coding region thereof, or polypeptide or the consensus sequence or the polypeptide motif, as depicted in Table I, II or IV, application No. 17, column 5 or 8 in the respective same line as the nucleic acid molecule SEQ ID NO. 60301 or polypeptide SEQ ID NO. 60302, respectively, or a homolog or a fragment thereof, is increased or generated, or if the activity cell division protein is increased or generated in a non-human organism, like a microorganism or a plant cell, plant or part thereof, especially with non-targeted localization, whereby the respective line disclose in column 7 the fine chemical fructose. For example, an increase of the fructose of at least 1 percent, particularly in a range of 77 to 154-percent is conferred as compared to a corresponding non-transformed wild type non-human organism.

[88481] Accordingly, in one embodiment, an increase of glucose in a non-human organism, as compared to a corresponding non-transformed wild type non-human organism, is conferred in the process of the invention, if the activity of a polypeptide showing the activity of a cell division protein, or if the activity of the polypeptide TTC0035, preferably represented by SEQ ID NO. 60302, or a homolog or fragment thereof, or if the activity of a polypeptide encoded by a nucleic acid molecule comprising the nucleic acid SEQ ID NO. 60301, preferably the coding region thereof, or a homolog or fragment thereof, e.g. derived from Thermus thermophilus, is increased or generated. For example the activity of a nucleic acid molecule or a polypeptide comprising the nucleic acid, preferably the coding region thereof, or polypeptide or the consensus sequence or the polypeptide motif, as depicted in Table I, II or IV, application No. 17, column 5 or 8 in the respective same line as the nucleic acid molecule SEQ ID NO. 60301 or polypeptide SEQ ID NO. 60302, respectively, or a homolog or a fragment thereof, is increased or generated, or if the activity cell division protein is increased or generated in a non-human organism, like a microorganism or a plant cell, plant or part thereof, especially with non-targeted localization, whereby the respective line disclose in column 7 the fine chemical glucose. For example, an increase of the glucose of at least 1 percent, particularly in a range of 51 to 84-percent is conferred as compared to a corresponding non-transformed wild type non-human organism.

[88482] Accordingly, in one embodiment, an increase of sucrose in a non-human organism, as compared to a corresponding non-transformed wild type non-human organism, is conferred in the process of the invention, if the activity of a polypeptide showing the activity of a cell division protein, or if the activity of the polypeptide TTC0035, preferably represented by SEQ ID NO. 60302, or a homolog or fragment thereof, or if the activity of a polypeptide encoded by a nucleic acid molecule comprising the nucleic acid SEQ ID NO. 60301, preferably the coding region thereof, or a homolog or fragment thereof, e.g. derived from Thermus thermophilus, is increased or generated. For example the activity of a nucleic acid molecule or a polypeptide comprising the nucleic acid, preferably the coding region thereof, or polypeptide or the consensus sequence or the polypeptide motif, as depicted in Table I, II or IV, application No. 17, column 5 or 8 in the respective same line as the nucleic acid molecule SEQ ID NO. 60301 or polypeptide SEQ ID NO. 60302, respectively, or a homolog or a fragment thereof, is increased or generated, or if the activity cell division protein is increased or generated in a non-human organism, like a microorganism or a plant cell, plant or part thereof, especially with non-targeted localization, whereby the respective line disclose in column 7 the fine chemical sucrose. For example, an increase of the sucrose of at least 1 percent, particularly in a range of 27 to 34-percent is conferred as compared to a corresponding non-transformed wild type non-human organism.

[88483] Accordingly, in one embodiment, an increase of glucose-1-phosphate in a non-human organism, as compared to a corresponding non-transformed wild type non-human organism, is conferred in the process of the invention, if the activity of a polypeptide showing the activity of a branched-chain amino acid ABC transporter permease protein, or if the activity of the polypeptide TTC0216, preferably represented by SEQ ID NO. 60860, or a homolog or fragment thereof, or if the activity of a polypeptide encoded by a nucleic acid molecule comprising the nucleic acid SEQ ID NO. 60859, preferably the coding region thereof, or a homolog or fragment thereof, e.g. derived from Thermus thermophilus, is increased or generated. For example the activity of a nucleic acid molecule or a polypeptide comprising the nucleic acid, preferably the coding region thereof, or polypeptide or the consensus sequence or the polypeptide motif, as depicted in Table I, II or IV, application No. 17, column 5 or 8 in the respective same line as the nucleic acid molecule SEQ ID NO. 60859 or polypeptide SEQ ID NO. 60860, respectively, or a homolog or a fragment thereof, is increased or generated, or if the activity branched-chain amino acid ABC transporter permease protein is increased or generated in a non-human organism, like a microorganism or a plant cell, plant or part thereof, especially with non-targeted localization, whereby the respective line disclose in column 7 the fine chemical glucose-1-phosphate. For example, an increase of the glucose-1-phosphate of at least 1 percent, particularly in a range of 32 to 117 -percent is conferred as compared to a corresponding non-transformed wild type non-human organism.

[88484] Accordingly, in one embodiment, an increase of 3,4,5-trihydroxypentanoic acid in a non-human organism, as compared to a corresponding non-transformed wild type non-human organism, is conferred in the process of the invention, if the activity of a polypeptide showing the activity of a branched-chain amino acid ABC transporter permease protein, or if the activity of the polypeptide TTC0216, preferably represented by SEQ ID NO. 60860, or a homolog or fragment thereof, or if the activity of a polypeptide encoded by a nucleic acid molecule comprising the nucleic acid SEQ ID NO. 60859, preferably the coding region thereof, or a homolog or fragment thereof, e.g. derived from Thermus thermophilus, is increased or generated. For example the activity of a nucleic acid molecule or a polypeptide comprising the nucleic acid, preferably the coding region thereof, or polypeptide or the consensus sequence or the polypeptide motif, as depicted in Table I, II or IV, application No. 17, column 5 or 8 in the respective same line as the nucleic acid molecule SEQ ID NO. 60859 or polypeptide SEQ ID NO. 60860, respectively, or a homolog or a fragment thereof, is increased or generated, or if the activity branched-chain amino acid ABC transporter permease protein is increased or generated in a non-human organism, like a microorganism or a plant cell, plant or part thereof, especially with non-targeted localization, whereby the respective line disclose in column 7 the fine chemical 3,4,5-trihydroxypentanoic acid. For example, an increase of the 3,4,5-trihydroxypentanoic acid of at least 1 percent, particularly in a range of 46 to 95-percent is conferred as compared to a corresponding non-transformed wild type non-human organism.

[88485] Accordingly, in one embodiment, an increase of myo-inositol in a non-human organism, as compared to a corresponding non-transformed wild type non-human organism, is conferred in the process of the invention, if the activity of a polypeptide showing the activity of a 3-isopropylmalate dehydratase large subunit, or if the activity of the polypeptide TTC0865, preferably represented by SEQ ID NO. 147945, or a homolog or fragment thereof, or if the activity of a polypeptide encoded by a nucleic acid molecule comprising the nucleic acid SEQ ID NO. 147944, preferably the coding region thereof, or a homolog or fragment thereof, e.g. derived from Thermus thermophilus, is increased or generated. For example the activity of a nucleic acid molecule or a polypeptide comprising the nucleic acid, preferably the coding region thereof, or polypeptide or the consensus sequence or the polypeptide motif, as depicted in Table I, II or IV, application No. 17, column 5 or 8 in the respective same line as the nucleic acid molecule SEQ ID NO. 147944 or polypeptide SEQ ID NO. 147945, respectively, or a homolog or a fragment thereof, is increased or generated, or if the activity 3-isopropylmalate dehydratase large subunit is increased or generated in a non-human organism, like a microorganism or a plant cell, plant or part thereof, especially with non-targeted localization, whereby the respective line disclose in column 7 the fine chemical myo-inositol. For example, an increase of the myo-inositol of at least 1 percent, particularly in a range of 30 to 49-percent is conferred as compared to a corresponding non-transformed wild type non-human organism.

[88486] Accordingly, in one embodiment, an increase of fructose in a non-human organism, as compared to a corresponding non-transformed wild type non-human organism, is conferred in the process of the invention, if the activity of a polypeptide showing the activity of a multiple antibiotic resistance protein, or if the activity of the polypeptide TTC1193, preferably represented by SEQ ID NO. 61724, or a homolog or fragment thereof, or if the activity of a polypeptide encoded by a nucleic acid molecule comprising the nucleic acid SEQ ID NO. 61723, preferably the coding region thereof, or a homolog or fragment thereof, e.g. derived from Thermus thermophilus, is increased or generated. For example the activity of a nucleic acid molecule or a polypeptide comprising the nucleic acid, preferably the coding region thereof, or polypeptide or the consensus sequence or the polypeptide motif, as depicted in Table I, II or IV, application No. 17, column 5 or 8 in the respective same line as the nucleic acid molecule SEQ ID NO. 61723 or polypeptide SEQ ID NO. 61724, respectively, or a homolog or a fragment thereof, is increased or generated, or if the activity multiple antibiotic resistance protein is increased or generated in a non-human organism, like a microorganism or a plant cell, plant or part thereof, especially with non-targeted localization, whereby the respective line disclose in column 7 the fine chemical fructose. For example, an increase of the fructose of at least 1 percent, particularly in a range of 88 to 1786-percent is conferred as compared to a corresponding non-transformed wild type non-human organism.

[88487] Accordingly, in one embodiment, an increase of glucose in a non-human organism, as compared to a corresponding non-transformed wild type non-human organism, is conferred in the process of the invention, if the activity of a polypeptide showing the activity of a multiple antibiotic resistance protein, or if the activity of the polypeptide TTC1193, preferably represented by SEQ ID NO. 61724, or a homolog or fragment thereof, or if the activity of a polypeptide encoded by a nucleic acid molecule comprising the nucleic acid SEQ ID NO. 61723, preferably the coding region thereof, or a homolog or fragment thereof, e.g. derived from Thermus thermophilus, is increased or generated. For example the activity of a nucleic acid molecule or a polypeptide comprising the nucleic acid, preferably the coding region thereof, or polypeptide or the consensus sequence or the polypeptide motif, as depicted in Table I, II or IV, application No. 17, column 5 or 8 in the respective same line as the nucleic acid molecule SEQ ID NO. 61723 or polypeptide SEQ ID NO. 61724, respectively, or a homolog or a fragment thereof, is increased or generated, or if the activity multiple antibiotic resistance protein is increased or generated in a non-human organism, like a microorganism or a plant cell, plant or part thereof, especially with non-targeted localization, whereby the respective line disclose in column 7 the fine chemical glucose. For example, an increase of the glucose of at least 1 percent, particularly in a range of 63 to 1072-percent is conferred as compared to a corresponding non-transformed wild type non-human organism.

[88488] Accordingly, in one embodiment, an increase of glucose-1-phosphate in a non-human organism, as compared to a corresponding non-transformed wild type non-human organism, is conferred in the process of the invention, if the activity of a polypeptide showing the activity of a multiple antibiotic resistance protein, or if the activity of the polypeptide TTC1193, preferably represented by SEQ ID NO. 61724, or a homolog or fragment thereof, or if the activity of a polypeptide encoded by a nucleic acid molecule comprising the nucleic acid SEQ ID NO. 61723, preferably the coding region thereof, or a homolog or fragment thereof, e.g. derived from Thermus thermophilus, is increased or generated. For example the activity of a nucleic acid molecule or a polypeptide comprising the nucleic acid, preferably the coding region thereof, or polypeptide or the consensus sequence or the polypeptide motif, as depicted in Table I, II or IV, application No. 17, column 5 or 8 in the respective same line as the nucleic acid molecule SEQ ID NO. 61723 or polypeptide SEQ ID NO. 61724, respectively, or a homolog or a fragment thereof, is increased or generated, or if the activity multiple antibiotic resistance protein is increased or generated in a non-human organism, like a microorganism or a plant cell, plant or part thereof, especially with non-targeted localization, whereby the respective line disclose in column 7 the fine chemical glucose-1-phosphate. For example, an increase of the glucose-1-phosphate of at least 1 percent, particularly in a range of 38 to 77-percent is conferred as compared to a corresponding non-transformed wild type non-human organism.

[88489] Accordingly, in one embodiment, an increase of fructose in a non-human organism, as compared to a corresponding non-transformed wild type non-human organism, is conferred in the process of the invention, if the activity of a polypeptide showing the activity of a TTC1386-protein, or if the activity of the polypeptide TTC1386, preferably represented by SEQ ID NO. 62080, or a homolog or fragment thereof, or if the activity of a polypeptide encoded by a nucleic acid molecule comprising the nucleic acid SEQ ID NO. 62079, preferably the coding region thereof, or a homolog or fragment thereof, e.g. derived from Thermus thermophilus, is increased or generated. For example the activity of a nucleic acid molecule or a polypeptide comprising the nucleic acid, preferably the coding region thereof, or polypeptide or the consensus sequence or the polypeptide motif, as depicted in Table I, II or IV, application No. 17, column 5 or 8 in the respective same line as the nucleic acid molecule SEQ ID NO. 62079 or polypeptide SEQ ID NO. 62080, respectively, or a homolog or a fragment thereof, is increased or generated, or if the activity TTC1386-protein is increased or generated in a non-human organism, like a microorganism or a plant cell, plant or part thereof, especially with non-targeted localization, whereby the respective line disclose in column 7 the fine chemical fructose. For example, an increase of the fructose of at least 1 percent, particularly in a range of 363 to 1435-percent is conferred as compared to a corresponding non-transformed wild type non-human organism.

[88490] Accordingly, in one embodiment, an increase of glucose in a non-human organism, as compared to a corresponding non-transformed wild type non-human organism, is conferred in the process of the invention, if the activity of a polypeptide showing the activity of a TTC1386-protein, or if the activity of the polypeptide TTC1386, preferably represented by SEQ ID NO. 62080, or a homolog or fragment thereof, or if the activity of a polypeptide encoded by a nucleic acid molecule comprising the nucleic acid SEQ ID NO. 62079, preferably the coding region thereof, or a homolog or fragment thereof, e.g. derived from Thermus thermophilus, is increased or generated. For example the activity of a nucleic acid molecule or a polypeptide comprising the nucleic acid, preferably the coding region thereof, or polypeptide or the consensus sequence or the polypeptide motif, as depicted in Table I, II or IV, application No. 17, column 5 or 8 in the respective same line as the nucleic acid molecule SEQ ID NO. 62079 or polypeptide SEQ ID NO. 62080, respectively, or a homolog or a fragment thereof, is increased or generated, or if the activity TTC1386-protein is increased or generated in a non-human organism, like a microorganism or a plant cell, plant or part thereof, especially with non-targeted localization, whereby the respective line disclose in column 7 the fine chemical glucose. For example, an increase of the glucose of at least 1 percent, particularly in a range of 197 to 296-percent is conferred as compared to a corresponding non-transformed wild type non-human organism.

[88491] Accordingly, in one embodiment, an increase of fructose in a non-human organism, as compared to a corresponding non-transformed wild type non-human organism, is conferred in the process of the invention, if the activity of a polypeptide showing the activity of a homocitrate synthase, or if the activity of the polypeptide TTC1550, preferably represented by SEQ ID NO. 12975, or a homolog or fragment thereof, or if the activity of a polypeptide encoded by a nucleic acid molecule comprising the nucleic acid SEQ ID NO. 12974, preferably the coding region thereof, or a homolog or fragment thereof, e.g. derived from Thermus thermophilus, is increased or generated. For example the activity of a nucleic acid molecule or a polypeptide comprising the nucleic acid, preferably the coding region thereof, or polypeptide or the consensus sequence or the polypeptide motif, as depicted in Table I, II or IV, application No. 17, column 5 or 8 in the respective same line as the nucleic acid molecule SEQ ID NO. 12974 or polypeptide SEQ ID NO. 12975, respectively, or a homolog or a fragment thereof, is increased or generated, or if the activity homocitrate synthase is increased or generated in a non-human organism, like a microorganism or a plant cell, plant or part thereof, especially with non-targeted localization, whereby the respective line disclose in column 7 the fine chemical fructose. For example, an increase of the fructose of at least 1 percent, particularly in a range of 128 to 915-percent is conferred as compared to a corresponding non-transformed wild type non-human organism.

[88492] Accordingly, in one embodiment, an increase of glucose-1-phosphate in a non-human organism, as compared to a corresponding non-transformed wild type non-human organism, is conferred in the process of the invention, if the activity of a polypeptide showing the activity of a homocitrate synthase, or if the activity of the polypeptide TTC1550, preferably represented by SEQ ID NO. 12975, or a homolog or fragment thereof, or if the activity of a polypeptide encoded by a nucleic acid molecule comprising the nucleic acid SEQ ID NO. 12974, preferably the coding region thereof, or a homolog or fragment thereof, e.g. derived from Thermus thermophilus, is increased or generated. For example the activity of a nucleic acid molecule or a polypeptide comprising the nucleic acid, preferably the coding region thereof, or polypeptide or the consensus sequence or the polypeptide motif, as depicted in Table I, II or IV, application No. 17, column 5 or 8 in the respective same line as the nucleic acid molecule SEQ ID NO. 12974 or polypeptide SEQ ID NO. 12975, respectively, or a homolog or a fragment thereof, is increased or generated, or if the activity homocitrate synthase is increased or generated in a non-human organism, like a microorganism or a plant cell, plant or part thereof, especially with non-targeted localization, whereby the respective line disclose in column 7 the fine chemical glucose-1-phosphate. For example, an increase of the glucose-1-phosphate of at least 1 percent, particularly in a range of 19 to 53-percent is conferred as compared to a corresponding non-transformed wild type non-human organism.

[88493] Accordingly, in one embodiment, an increase of sucrose in a non-human organism, as compared to a corresponding non-transformed wild type non-human organism, is conferred in the process of the invention, if the activity of a polypeptide showing the activity of a homocitrate synthase, or if the activity of the polypeptide TTC1550, preferably represented by SEQ ID NO. 12975, or a homolog or fragment thereof, or if the activity of a polypeptide encoded by a nucleic acid molecule comprising the nucleic acid SEQ ID NO. 12974, preferably the coding region thereof, or a homolog or fragment thereof, e.g. derived from Thermus thermophilus, is increased or generated. For example the activity of a nucleic acid molecule or a polypeptide comprising the nucleic acid, preferably the coding region thereof, or polypeptide or the consensus sequence or the polypeptide motif, as depicted in Table I, II or IV, application No. 17, column 5 or 8 in the respective same line as the nucleic acid molecule SEQ ID NO. 12974 or polypeptide SEQ ID NO. 12975, respectively, or a homolog or a fragment thereof, is increased or generated, or if the activity homocitrate synthase is increased or generated in a non-human organism, like a microorganism or a plant cell, plant or part thereof, especially with non-targeted localization, whereby the respective line disclose in column 7 the fine chemical sucrose. For example, an increase of the sucrose of at least 1 percent, particularly in a range of 24 to 83-percent is conferred as compared to a corresponding non-transformed wild type non-human organism.

[88494] Accordingly, in one embodiment, an increase of raffinose in a non-human organism, as compared to a corresponding non-transformed wild type non-human organism, is conferred in the process of the invention, if the activity of a polypeptide showing the activity of a permease, or if the activity of the polypeptide TTC1893, preferably represented by SEQ ID NO. 148560, or a homolog or fragment thereof, or if the activity of a polypeptide encoded by a nucleic acid molecule comprising the nucleic acid SEQ ID NO. 148559, preferably the coding region thereof, or a homolog or fragment thereof, e.g. derived from Thermus thermophilus, is increased or generated. For example the activity of a nucleic acid molecule or a polypeptide comprising the nucleic acid, preferably the coding region thereof, or polypeptide or the consensus sequence or the polypeptide motif, as depicted in Table I, II or IV, application No. 17, column 5 or 8 in the respective same line as the nucleic acid molecule SEQ ID NO. 148559 or polypeptide SEQ ID NO. 148560, respectively, or a homolog or a fragment thereof, is increased or generated, or if the activity permease is increased or generated in a non-human organism, like a microorganism or a plant cell, plant or part thereof, especially with non-targeted localization, whereby the respective line disclose in column 7 the fine chemical raffinose. For example, an increase of the raffinose of at least 1 percent, particularly in a range of 66 to 72-percent is conferred as compared to a corresponding non-transformed wild type non-human organism.

[88495] Accordingly, in one embodiment, an increase of 3,4,5-trihydroxypentanoic acid in a non-human organism, as compared to a corresponding non-transformed wild type non-human organism, is conferred in the process of the invention, if the activity of a polypeptide showing the activity of a permease, or if the activity of the polypeptide TTC1893, preferably represented by SEQ ID NO. 148560, or a homolog or fragment thereof, or if the activity of a polypeptide encoded by a nucleic acid molecule comprising the nucleic acid SEQ ID NO. 148559, preferably the coding region thereof, or a homolog or fragment thereof, e.g. derived from Thermus thermophilus, is increased or generated. For example the activity of a nucleic acid molecule or a polypeptide comprising the nucleic acid, preferably the coding region thereof, or polypeptide or the consensus sequence or the polypeptide motif, as depicted in Table I, II or IV, application No. 17, column 5 or 8 in the respective same line as the nucleic acid molecule SEQ ID NO. 148559 or polypeptide SEQ ID NO. 148560, respectively, or a homolog or a fragment thereof, is increased or generated, or if the activity permease is increased or generated in a non-human organism, like a microorganism or a plant cell, plant or part thereof, especially with non-targeted localization, whereby the respective line disclose in column 7 the fine chemical 3,4,5-trihydroxypentanoic acid. For example, an increase of the 3,4,5-trihydroxypentanoic acid of at least 1 percent, particularly in a range of 47 to 62-percent is conferred as compared to a corresponding non-transformed wild type non-human organism.

[88496] Accordingly, in one embodiment, an increase of glucose-1-phosphate in a non-human organism, as compared to a corresponding non-transformed wild type non-human organism, is conferred in the process of the invention, if the activity of a polypeptide showing the activity of a oxidoreductase subunit, or if the activity of the polypeptide TTC1918, preferably represented by SEQ ID NO. 62161, or a homolog or fragment thereof, or if the activity of a polypeptide encoded by a nucleic acid molecule comprising the nucleic acid SEQ ID NO. 62160, preferably the coding region thereof, or a homolog or fragment thereof, e.g. derived from Thermus thermophilus, is increased or generated. For example the activity of a nucleic acid molecule or a polypeptide comprising the nucleic acid, preferably the coding region thereof, or polypeptide or the consensus sequence or the polypeptide motif, as depicted in Table I, II or IV, application No. 17, column 5 or 8 in the respective same line as the nucleic acid molecule SEQ ID NO. 62160 or polypeptide SEQ ID NO. 62161, respectively, or a homolog or a fragment thereof, is increased or generated, or if the activity oxidoreductase subunit is increased or generated in a non-human organism, like a microorganism or a plant cell, plant or part thereof, especially with non-targeted localization, whereby the respective line disclose in column 7 the fine chemical glucose-1-phosphate. For example, an increase of the glucose-1-phosphate of at least 1 percent, particularly in a range of 21 to 42-percent is conferred as compared to a corresponding non-transformed wild type non-human organism.

[88497] Accordingly, in one embodiment, an increase of glucose-1-phosphate in a non-human organism, as compared to a corresponding non-transformed wild type non-human organism, is conferred in the process of the invention, if the activity of a polypeptide showing the activity of a XM_{—}473199-protein, or if the activity of the polypeptide XM_{—}473199, preferably represented by SEQ ID NO. 62245, or a homolog or fragment thereof, or if the activity of a polypeptide encoded by a nucleic acid molecule comprising the nucleic acid SEQ ID NO. 62244, preferably the coding region thereof, or a homolog or fragment thereof, e.g. derived from Oryza sativa, is increased or generated. For example the activity of a nucleic acid molecule or a polypeptide comprising the nucleic acid, preferably the coding region thereof, or polypeptide or the consensus sequence or the polypeptide motif, as depicted in Table I, II or IV, application No. 17, column 5 or 8 in the respective same line as the nucleic acid molecule SEQ ID NO. 62244 or polypeptide SEQ ID NO. 62245, respectively, or a homolog or a fragment thereof, is increased or generated, or if the activity XM_{—}473199-protein is increased or generated in a non-human organism, like a microorganism or a plant cell, plant or part thereof, especially with non-targeted localization, whereby the respective line disclose in column 7 the fine chemical glucose-1-phosphate. For example, an increase of the glucose-1-phosphate of at least 1 percent, particularly in a range of 18 to 54-percent is conferred as compared to a corresponding non-transformed wild type non-human organism.

[88498] Accordingly, in one embodiment, an increase of myo-inositol in a non-human organism, as compared to a corresponding non-transformed wild type non-human organism, is conferred in the process of the invention, if the activity of a polypeptide showing the activity of a transcription factor, or if the activity of the polypeptide Ybl021c, preferably represented by SEQ ID NO. 62525, or a homolog or fragment thereof, or if the activity of a polypeptide encoded by a nucleic acid molecule comprising the nucleic acid SEQ ID NO. 62524, preferably the coding region thereof, or a homolog or fragment thereof, e.g. derived from Saccharomyces cerevisiae, is increased or generated. For example the activity of a nucleic acid molecule or a polypeptide comprising the nucleic acid, preferably the coding region thereof, or polypeptide or the consensus sequence or the polypeptide motif, as depicted in Table I, II or IV, application No. 17, column 5 or 8 in the respective same line as the nucleic acid molecule SEQ ID NO. 62524 or polypeptide SEQ ID NO. 62525, respectively, or a homolog or a fragment thereof, is increased or generated, or if the activity transcription factor is increased or generated in a non-human organism, like a microorganism or a plant cell, plant or part thereof, especially with non-targeted localization, whereby the respective line disclose in column 7 the fine chemical myo-inositol. For example, an increase of the myo-inositol of at least 1 percent, particularly in a range of 26 to 84-percent is conferred as compared to a corresponding non-transformed wild type non-human organism.

[88499] Accordingly, in one embodiment, an increase of sucrose in a non-human organism, as compared to a corresponding non-transformed wild type non-human organism, is conferred in the process of the invention, if the activity of a polypeptide showing the activity of a transcription factor, or if the activity of the polypeptide Ybl021 c, preferably represented by SEQ ID NO. 62525, or a homolog or fragment thereof, or if the activity of a polypeptide encoded by a nucleic acid molecule comprising the nucleic acid SEQ ID NO. 62524, preferably the coding region thereof, or a homolog or fragment thereof, e.g. derived from Saccharomyces cerevisiae, is increased or generated. For example the activity of a nucleic acid molecule or a polypeptide comprising the nucleic acid, preferably the coding region thereof, or polypeptide or the consensus sequence or the polypeptide motif, as depicted in Table I, II or IV, application No. 17, column 5 or 8 in the respective same line as the nucleic acid molecule SEQ ID NO. 62524 or polypeptide SEQ ID NO. 62525, respectively, or a homolog or a fragment thereof, is increased or generated, or if the activity transcription factor is increased or generated in a non-human organism, like a microorganism or a plant cell, plant or part thereof, especially with non-targeted localization, whereby the respective line disclose in column 7 the fine chemical sucrose. For example, an increase of the sucrose of at least 1 percent, particularly in a range of 25 to 53-percent is conferred as compared to a corresponding non-transformed wild type non-human organism.

[88500] Accordingly, in one embodiment, an increase of glucose-1-phosphate in a non-human organism, as compared to a corresponding non-transformed wild type non-human organism, is conferred in the process of the invention, if the activity of a polypeptide showing the activity of a 3-deoxy-7-phosphoheptulonate synthase, or if the activity of the polypeptide Ybr249c, preferably represented by SEQ ID NO. 88880, or a homolog or fragment thereof, or if the activity of a polypeptide encoded by a nucleic acid molecule comprising the nucleic acid SEQ ID NO. 88879, preferably the coding region thereof, or a homolog or fragment thereof, e.g. derived from Saccharomyces cerevisiae, is increased or generated. For example the activity of a nucleic acid molecule or a polypeptide comprising the nucleic acid, preferably the coding region thereof, or polypeptide or the consensus sequence or the polypeptide motif, as depicted in Table I, II or IV, application No. 17, column 5 or 8 in the respective same line as the nucleic acid molecule SEQ ID NO. 88879 or polypeptide SEQ ID NO. 88880, respectively, or a homolog or a fragment thereof, is increased or generated, or if the activity 3-deoxy-7-phosphoheptulonate synthase is increased or generated in a non-human organism, like a microorganism or a plant cell, plant or part thereof, especially with plastidic localization, whereby the respective line disclose in column 7 the fine chemical glucose-1-phosphate. For example, an increase of the glucose-1-phosphate of at least 1 percent, particularly in a range of 32 to 59-percent is conferred as compared to a corresponding non-transformed wild type non-human organism.

[88501] Accordingly, in one embodiment, an increase of glucose-1-phosphate in a non-human organism, as compared to a corresponding non-transformed wild type non-human organism, is conferred in the process of the invention, if the activity of a polypeptide showing the activity of a phosphate permease, or if the activity of the polypeptide Ybr296c, preferably represented by SEQ ID NO. 89318, or a homolog or fragment thereof, or if the activity of a polypeptide encoded by a nucleic acid molecule comprising the nucleic acid SEQ ID NO. 89317, preferably the coding region thereof, or a homolog or fragment thereof, e.g. derived from Saccharomyces cerevisiae, is increased or generated. For example the activity of a nucleic acid molecule or a polypeptide comprising the nucleic acid, preferably the coding region thereof, or polypeptide or the consensus sequence or the polypeptide motif, as depicted in Table I, II or IV, application No. 17, column 5 or 8 in the respective same line as the nucleic acid molecule SEQ ID NO. 89317 or polypeptide SEQ ID NO. 89318, respectively, or a homolog or a fragment thereof, is increased or generated, or if the activity phosphate permease is increased or generated in a non-human organism, like a microorganism or a plant cell, plant or part thereof, especially with non-targeted localization, whereby the respective line disclose in column 7 the fine chemical glucose-1-phosphate. For example, an increase of the glucose-1-phosphate of at least 1 percent, particularly in a range of 35 to 46-percent is conferred as compared to a corresponding non-transformed wild type non-human organism.

[88502] Accordingly, in one embodiment, an increase of 3,4,5-trihydroxypentanoic acid in a non-human organism, as compared to a corresponding non-transformed wild type non-human organism, is conferred in the process of the invention, if the activity of a polypeptide showing the activity of a phosphate permease, or if the activity of the polypeptide Ybr296c, preferably represented by SEQ ID NO. 89318, or a homolog or fragment thereof, or if the activity of a polypeptide encoded by a nucleic acid molecule comprising the nucleic acid SEQ ID NO. 89317, preferably the coding region thereof, or a homolog or fragment thereof, e.g. derived from Saccharomyces cerevisiae, is increased or generated. For example the activity of a nucleic acid molecule or a polypeptide comprising the nucleic acid, preferably the coding region thereof, or polypeptide or the consensus sequence or the polypeptide motif, as depicted in Table I, II or IV, application No. 17, column 5 or 8 in the respective same line as the nucleic acid molecule SEQ ID NO. 89317 or polypeptide SEQ ID NO. 89318, respectively, or a homolog or a fragment thereof, is increased or generated, or if the activity phosphate permease is increased or generated in a non-human organism, like a microorganism or a plant cell, plant or part thereof, especially with non-targeted localization, whereby the respective line disclose in column 7 the fine chemical 3,4,5-trihydroxypentanoic acid. For example, an increase of the 3,4,5-trihydroxypentanoic acid of at least 1 percent, particularly in a range of 37 to 53-percent is conferred as compared to a corresponding non-transformed wild type non-human organism.

[88503] Accordingly, in one embodiment, an increase of fructose in a non-human organism, as compared to a corresponding non-transformed wild type non-human organism, is conferred in the process of the invention, if the activity of a polypeptide showing the activity of a ycl027w-protein, or if the activity of the polypeptide Ycl027w, preferably represented by SEQ ID NO. 96981, or a homolog or fragment thereof, or if the activity of a polypeptide encoded by a nucleic acid molecule comprising the nucleic acid SEQ ID NO. 96980, preferably the coding region thereof, or a homolog or fragment thereof, e.g. derived from Saccharomyces cerevisiae, is increased or generated. For example the activity of a nucleic acid molecule or a polypeptide comprising the nucleic acid, preferably the coding region thereof, or polypeptide or the consensus sequence or the polypeptide motif, as depicted in Table I, II or IV, application No. 17, column 5 or 8 in the respective same line as the nucleic acid molecule SEQ ID NO. 96980 or polypeptide SEQ ID NO. 96981, respectively, or a homolog or a fragment thereof, is increased or generated, or if the activity ycl027w-protein is increased or generated in a non-human organism, like a microorganism or a plant cell, plant or part thereof, especially with plastidic localization, whereby the respective line disclose in column 7 the fine chemical fructose. For example, an increase of the fructose of at least 1 percent, particularly in a range of 61 to 266-percent is conferred as compared to a corresponding non-transformed wild type non-human organism.

[88504] Accordingly, in one embodiment, an increase of glucose-1-phosphate in a non-human organism, as compared to a corresponding non-transformed wild type non-human organism, is conferred in the process of the invention, if the activity of a polypeptide showing the activity of a ycl027w-protein, or if the activity of the polypeptide Ycl027w, preferably represented by SEQ ID NO. 96981, or a homolog or fragment thereof, or if the activity of a polypeptide encoded by a nucleic acid molecule comprising the nucleic acid SEQ ID NO. 96980, preferably the coding region thereof, or a homolog or fragment thereof, e.g. derived from Saccharomyces cerevisiae, is increased or generated. For example the activity of a nucleic acid molecule or a polypeptide comprising the nucleic acid, preferably the coding region thereof, or polypeptide or the consensus sequence or the polypeptide motif, as depicted in Table I, II or IV, application No. 17, column 5 or 8 in the respective same line as the nucleic acid molecule SEQ ID NO. 96980 or polypeptide SEQ ID NO. 96981, respectively, or a homolog or a fragment thereof, is increased or generated, or if the activity ycl027w-protein is increased or generated in a non-human organism, like a microorganism or a plant cell, plant or part thereof, especially with plastidic localization, whereby the respective line disclose in column 7 the fine chemical glucose-1-phosphate. For example, an increase of the glucose-1-phosphate of at least 1 percent, particularly in a range of 35 to 66-percent is conferred as compared to a corresponding non-transformed wild type non-human organism.

[88505] Accordingly, in one embodiment, an increase of myo-inositol in a non-human organism, as compared to a corresponding non-transformed wild type non-human organism, is conferred in the process of the invention, if the activity of a polypeptide showing the activity of a serine/threonine dehydratase, or if the activity of the polypeptide Ycl064c, preferably represented by SEQ ID NO. 89396, or a homolog or fragment thereof, or if the activity of a polypeptide encoded by a nucleic acid molecule comprising the nucleic acid SEQ ID NO. 89395, preferably the coding region thereof, or a homolog or fragment thereof, e.g. derived from Saccharomyces cerevisiae, is increased or generated. For example the activity of a nucleic acid molecule or a polypeptide comprising the nucleic acid, preferably the coding region thereof, or polypeptide or the consensus sequence or the polypeptide motif, as depicted in Table I, II or IV, application No. 17, column 5 or 8 in the respective same line as the nucleic acid molecule SEQ ID NO. 89395 or polypeptide SEQ ID NO. 89396, respectively, or a homolog or a fragment thereof, is increased or generated, or if the activity serine/threonine dehydratase is increased or generated in a non-human organism, like a microorganism or a plant cell, plant or part thereof, especially with plastidic localization, whereby the respective line disclose in column 7 the fine chemical myo-inositol. For example, an increase of the myo-inositol of at least 1 percent, particularly in a range of 28 to 48-percent is conferred as compared to a corresponding non-transformed wild type non-human organism.

[88506] Accordingly, in one embodiment, an increase of sucrose in a non-human organism, as compared to a corresponding non-transformed wild type non-human organism, is conferred in the process of the invention, if the activity of a polypeptide showing the activity of a serine/threonine dehydratase, or if the activity of the polypeptide Ycl064c, preferably represented by SEQ ID NO. 89396, or a homolog or fragment thereof, or if the activity of a polypeptide encoded by a nucleic acid molecule comprising the nucleic acid SEQ ID NO. 89395, preferably the coding region thereof, or a homolog or fragment thereof, e.g. derived from Saccharomyces cerevisiae, is increased or generated. For example the activity of a nucleic acid molecule or a polypeptide comprising the nucleic acid, preferably the coding region thereof, or polypeptide or the consensus sequence or the polypeptide motif, as depicted in Table I, II or IV, application No. 17, column 5 or 8 in the respective same line as the nucleic acid molecule SEQ ID NO. 89395 or polypeptide SEQ ID NO. 89396, respectively, or a homolog or a fragment thereof, is increased or generated, or if the activity serine/threonine dehydratase is increased or generated in a non-human organism, like a microorganism or a plant cell, plant or part thereof, especially with plastidic localization, whereby the respective line disclose in column 7 the fine chemical sucrose. For example, an increase of the sucrose of at least 1 percent, particularly in a range of 37 to 37-percent is conferred as compared to a corresponding non-transformed wild type non-human organism.

[88507] Accordingly, in one embodiment, an increase of fructose in a non-human organism, as compared to a corresponding non-transformed wild type non-human organism, is conferred in the process of the invention, if the activity of a polypeptide showing the activity of a phosphoglycerate kinase, or if the activity of the polypeptide Ycr012w, preferably represented by SEQ ID NO. 108114, or a homolog or fragment thereof, or if the activity of a polypeptide encoded by a nucleic acid molecule comprising the nucleic acid SEQ ID NO. 108113, preferably the coding region thereof, or a homolog or fragment thereof, e.g. derived from Saccharomyces cerevisiae, is increased or generated. For example the activity of a nucleic acid molecule or a polypeptide comprising the nucleic acid, preferably the coding region thereof, or polypeptide or the consensus sequence or the polypeptide motif, as depicted in Table I, II or IV, application No. 17, column 5 or 8 in the respective same line as the nucleic acid molecule SEQ ID NO. 108113 or polypeptide SEQ ID NO. 108114, respectively, or a homolog or a fragment thereof, is increased or generated, or if the activity phosphoglycerate kinase is increased or generated in a non-human organism, like a microorganism or a plant cell, plant or part thereof, especially with non-targeted localization, whereby the respective line disclose in column 7 the fine chemical fructose. For example, an increase of the fructose of at least 1 percent, particularly in a range of 83 to 188-percent is conferred as compared to a corresponding non-transformed wild type non-human organism.

[88508] Accordingly, in one embodiment, an increase of glucose in a non-human organism, as compared to a corresponding non-transformed wild type non-human organism, is conferred in the process of the invention, if the activity of a polypeptide showing the activity of a phosphoglycerate kinase, or if the activity of the polypeptide Ycr012w, preferably represented by SEQ ID NO. 108114, or a homolog or fragment thereof, or if the activity of a polypeptide encoded by a nucleic acid molecule comprising the nucleic acid SEQ ID NO. 108113, preferably the coding region thereof, or a homolog or fragment thereof, e.g. derived from Saccharomyces cerevisiae, is increased or generated. For example the activity of a nucleic acid molecule or a polypeptide comprising the nucleic acid, preferably the coding region thereof, or polypeptide or the consensus sequence or the polypeptide motif, as depicted in Table I, II or IV, application No. 17, column 5 or 8 in the respective same line as the nucleic acid molecule SEQ ID NO. 108113 or polypeptide SEQ ID NO. 108114, respectively, or a homolog or a fragment thereof, is increased or generated, or if the activity phosphoglycerate kinase is increased or generated in a non-human organism, like a microorganism or a plant cell, plant or part thereof, especially with non-targeted localization, whereby the respective line disclose in column 7 the fine chemical glucose. For example, an increase of the glucose of at least 1 percent, particularly in a range of 81 to 181-percent is conferred as compared to a corresponding non-transformed wild type non-human organism.

[88509] Accordingly, in one embodiment, an increase of raffinose in a non-human organism, as compared to a corresponding non-transformed wild type non-human organism, is conferred in the process of the invention, if the activity of a polypeptide showing the activity of a YCR047W-A-protein, or if the activity of the polypeptide Ycr047w-a, preferably represented by SEQ ID NO. 148580, or a homolog or fragment thereof, or if the activity of a polypeptide encoded by a nucleic acid molecule comprising the nucleic acid SEQ ID NO. 148579, preferably the coding region thereof, or a homolog or fragment thereof, e.g. derived from Saccharomyces cerevisiae, is increased or generated. For example the activity of a nucleic acid molecule or a polypeptide comprising the nucleic acid, preferably the coding region thereof, or polypeptide or the consensus sequence or the polypeptide motif, as depicted in Table I, II or IV, application No. 17, column 5 or 8 in the respective same line as the nucleic acid molecule SEQ ID NO. 148579 or polypeptide SEQ ID NO. 148580, respectively, or a homolog or a fragment thereof, is increased or generated, or if the activity YCR047W-A-protein is increased or generated in a non-human organism, like a microorganism or a plant cell, plant or part thereof, especially with non-targeted localization, whereby the respective line disclose in column 7 the fine chemical raffinose. For example, an increase of the raffinose of at least 1 percent, particularly in a range of 69 to 234-percent is conferred as compared to a corresponding non-transformed wild type non-human organism.

[88510] Accordingly, in one embodiment, an increase of 3,4,5-trihydroxypentanoic acid in a non-human organism, as compared to a corresponding non-transformed wild type non-human organism, is conferred in the process of the invention, if the activity of a polypeptide showing the activity of a ycr102c-protein, or if the activity of the polypeptide Ycr102c, preferably represented by SEQ ID NO. 63265, or a homolog or fragment thereof, or if the activity of a polypeptide encoded by a nucleic acid molecule comprising the nucleic acid SEQ ID NO. 63264, preferably the coding region thereof, or a homolog or fragment thereof, e.g. derived from Saccharomyces cerevisiae, is increased or generated. For example the activity of a nucleic acid molecule or a polypeptide comprising the nucleic acid, preferably the coding region thereof, or polypeptide or the consensus sequence or the polypeptide motif, as depicted in Table I, II or IV, application No. 17, column 5 or 8 in the respective same line as the nucleic acid molecule SEQ ID NO. 63264 or polypeptide SEQ ID NO. 63265, respectively, or a homolog or a fragment thereof, is increased or generated, or if the activity ycr102c-protein is increased or generated in a non-human organism, like a microorganism or a plant cell, plant or part thereof, especially with plastidic localization, whereby the respective line disclose in column 7 the fine chemical 3,4,5-trihydroxypentanoic acid. For example, an increase of the 3,4,5-trihydroxypentanoic acid of at least 1 percent, particularly in a range of 39 to 87-percent is conferred as compared to a corresponding non-transformed wild type non-human organism.

[88511] Accordingly, in one embodiment, an increase of galactinol in a non-human organism, as compared to a corresponding non-transformed wild type non-human organism, is conferred in the process of the invention, if the activity of a polypeptide showing the activity of a isocitrate dehydrogenase, or if the activity of the polypeptide Ydl066w, preferably represented by SEQ ID NO. 122229, or a homolog or fragment thereof, or if the activity of a polypeptide encoded by a nucleic acid molecule comprising the nucleic acid SEQ ID NO. 122228, preferably the coding region thereof, or a homolog or fragment thereof, e.g. derived from Saccharomyces cerevisiae, is increased or generated. For example the activity of a nucleic acid molecule or a polypeptide comprising the nucleic acid, preferably the coding region thereof, or polypeptide or the consensus sequence or the polypeptide motif, as depicted in Table I, II or IV, application No. 17, column 5 or 8 in the respective same line as the nucleic acid molecule SEQ ID NO. 122228 or polypeptide SEQ ID NO. 122229, respectively, or a homolog or a fragment thereof, is increased or generated, or if the activity isocitrate dehydrogenase is increased or generated in a non-human organism, like a microorganism or a plant cell, plant or part thereof, especially with non-targeted localization, whereby the respective line disclose in column 7 the fine chemical galactinol. For example, an increase of the galactinol of at least 1 percent, particularly in a range of 37 to 61-percent is conferred as compared to a corresponding non-transformed wild type non-human organism.

[88512] Accordingly, in one embodiment, an increase of myo-inositol in a non-human organism, as compared to a corresponding non-transformed wild type non-human organism, is conferred in the process of the invention, if the activity of a polypeptide showing the activity of a cell division control protein, or if the activity of the polypeptide Ydl126c, preferably represented by SEQ ID NO. 120046, or a homolog or fragment thereof, or if the activity of a polypeptide encoded by a nucleic acid molecule comprising the nucleic acid SEQ ID NO. 120045, preferably the coding region thereof, or a homolog or fragment thereof, e.g. derived from Saccharomyces cerevisiae, is increased or generated. For example the activity of a nucleic acid molecule or a polypeptide comprising the nucleic acid, preferably the coding region thereof, or polypeptide or the consensus sequence or the polypeptide motif, as depicted in Table I, II or IV, application No. 17, column 5 or 8 in the respective same line as the nucleic acid molecule SEQ ID NO. 120045 or polypeptide SEQ ID NO. 120046, respectively, or a homolog or a fragment thereof, is increased or generated, or if the activity cell division control protein is increased or generated in a non-human organism, like a microorganism or a plant cell, plant or part thereof, especially with non-targeted localization, whereby the respective line disclose in column 7 the fine chemical myo-inositol. For example, an increase of the myo-inositol of at least 1 percent, particularly in a range of 24 to 35-percent is conferred as compared to a corresponding non-transformed wild type non-human organism.

[88513] Accordingly, in one embodiment, an increase of myo-inositol in a non-human organism, as compared to a corresponding non-transformed wild type non-human organism, is conferred in the process of the invention, if the activity of a polypeptide showing the activity of a cyclin, or if the activity of the polypeptide Ydl155w, preferably represented by SEQ ID NO. 14172, or a homolog or fragment thereof, or if the activity of a polypeptide encoded by a nucleic acid molecule comprising the nucleic acid SEQ ID NO. 14171, preferably the coding region thereof, or a homolog or fragment thereof, e.g. derived from Saccharomyces cerevisiae, is increased or generated. For example the activity of a nucleic acid molecule or a polypeptide comprising the nucleic acid, preferably the coding region thereof, or polypeptide or the consensus sequence or the polypeptide motif, as depicted in Table I, II or IV, application No. 17, column 5 or 8 in the respective same line as the nucleic acid molecule SEQ ID NO. 14171 or polypeptide SEQ ID NO. 14172, respectively, or a homolog or a fragment thereof, is increased or generated, or if the activity cyclin is increased or generated in a non-human organism, like a microorganism or a plant cell, plant or part thereof, especially with non-targeted localization, whereby the respective line disclose in column 7 the fine chemical myo-inositol. For example, an increase of the myo-inositol of at least 1 percent, particularly in a range of 33 to 112-percent is conferred as compared to a corresponding non-transformed wild type non-human organism.

[88514] Accordingly, in one embodiment, an increase of raffinose in a non-human organism, as compared to a corresponding non-transformed wild type non-human organism, is conferred in the process of the invention, if the activity of a polypeptide showing the activity of a YDL159W-A-protein, or if the activity of the polypeptide Ydl159w-a, preferably represented by SEQ ID NO. 137499, or a homolog or fragment thereof, or if the activity of a polypeptide encoded by a nucleic acid molecule comprising the nucleic acid SEQ ID NO. 137498, preferably the coding region thereof, or a homolog or fragment thereof, e.g. derived from Saccharomyces cerevisiae, is increased or generated. For example the activity of a nucleic acid molecule or a polypeptide comprising the nucleic acid, preferably the coding region thereof, or polypeptide or the consensus sequence or the polypeptide motif, as depicted in Table I, II or IV, application No. 17, column 5 or 8 in the respective same line as the nucleic acid molecule SEQ ID NO. 137498 or polypeptide SEQ ID NO. 137499, respectively, or a homolog or a fragment thereof, is increased or generated, or if the activity YDL159W-A-protein is increased or generated in a non-human organism, like a microorganism or a plant cell, plant or part thereof, especially with non-targeted localization, whereby the respective line disclose in column 7 the fine chemical raffinose. For example, an increase of the raffinose of at least 1 percent, particularly in a range of 57 to 204-percent is conferred as compared to a corresponding non-transformed wild type non-human organism.

[88515] Accordingly, in one embodiment, an increase of glucose-1-phosphate in a non-human organism, as compared to a corresponding non-transformed wild type non-human organism, is conferred in the process of the invention, if the activity of a polypeptide showing the activity of a protein kinase, or if the activity of the polypeptide Ydl168w, preferably represented by SEQ ID NO. 14303, or a homolog or fragment thereof, or if the activity of a polypeptide encoded by a nucleic acid molecule comprising the nucleic acid SEQ ID NO. 14302, preferably the coding region thereof, or a homolog or fragment thereof, e.g. derived from Saccharomyces cerevisiae, is increased or generated. For example the activity of a nucleic acid molecule or a polypeptide comprising the nucleic acid, preferably the coding region thereof, or polypeptide or the consensus sequence or the polypeptide motif, as depicted in Table I, II or IV, application No. 17, column 5 or 8 in the respective same line as the nucleic acid molecule SEQ ID NO. 14302 or polypeptide SEQ ID NO. 14303, respectively, or a homolog or a fragment thereof, is increased or generated, or if the activity protein kinase is increased or generated in a non-human organism, like a microorganism or a plant cell, plant or part thereof, especially with plastidic localization, whereby the respective line disclose in column 7 the fine chemical glucose-1-phosphate. For example, an increase of the glucose-1-phosphate of at least 1 percent, particularly in a range of 34 to 126-percent is conferred as compared to a corresponding non-transformed wild type non-human organism.

[88516] Accordingly, in one embodiment, an increase of glucose-1-phosphate in a non-human organism, as compared to a corresponding non-transformed wild type non-human organism, is conferred in the process of the invention, if the activity of a polypeptide showing the activity of a serine/threonine-protein phosphatase, or if the activity of the polypeptide Ydl188c, preferably represented by SEQ ID NO. 89484, or a homolog or fragment thereof, or if the activity of a polypeptide encoded by a nucleic acid molecule comprising the nucleic acid SEQ ID NO. 89483, preferably the coding region thereof, or a homolog or fragment thereof, e.g. derived from Saccharomyces cerevisiae, is increased or generated. For example the activity of a nucleic acid molecule or a polypeptide comprising the nucleic acid, preferably the coding region thereof, or polypeptide or the consensus sequence or the polypeptide motif, as depicted in Table I, II or IV, application No. 17, column 5 or 8 in the respective same line as the nucleic acid molecule SEQ ID NO. 89483 or polypeptide SEQ ID NO. 89484, respectively, or a homolog or a fragment thereof, is increased or generated, or if the activity serine/threonine-protein phosphatase is increased or generated in a non-human organism, like a microorganism or a plant cell, plant or part thereof, especially with plastidic localization, whereby the respective line disclose in column 7 the fine chemical glucose-1-phosphate. For example, an increase of the glucose-1-phosphate of at least 1 percent, particularly in a range of 40 to 58-percent is conferred as compared to a corresponding non-transformed wild type non-human organism.

[88517] Accordingly, in one embodiment, an increase of 3,4,5-trihydroxypentanoic acid in a non-human organism, as compared to a corresponding non-transformed wild type non-human organism, is conferred in the process of the invention, if the activity of a polypeptide showing the activity of a integral membrane protein, or if the activity of the polypeptide YDL222C, preferably represented by SEQ ID NO. 148584, or a homolog or fragment thereof, or if the activity of a polypeptide encoded by a nucleic acid molecule comprising the nucleic acid SEQ ID NO. 148583, preferably the coding region thereof, or a homolog or fragment thereof, e.g. derived from Saccharomyces cerevisiae, is increased or generated. For example the activity of a nucleic acid molecule or a polypeptide comprising the nucleic acid, preferably the coding region thereof, or polypeptide or the consensus sequence or the polypeptide motif, as depicted in Table I, II or IV, application No. 17, column 5 or 8 in the respective same line as the nucleic acid molecule SEQ ID NO. 148583 or polypeptide SEQ ID NO. 148584, respectively, or a homolog or a fragment thereof, is increased or generated, or if the activity integral membrane protein is increased or generated in a non-human organism, like a microorganism or a plant cell, plant or part thereof, especially with plastidic localization, whereby the respective line disclose in column 7 the fine chemical 3,4,5-trihydroxypentanoic acid. For example, an increase of the 3,4,5-trihydroxypentanoic acid of at least 1 percent, particularly in a range of 36 to 79-percent is conferred as compared to a corresponding non-transformed wild type non-human organism.

[88518] Accordingly, in one embodiment, an increase of glucose-1-phosphate in a non-human organism, as compared to a corresponding non-transformed wild type non-human organism, is conferred in the process of the invention, if the activity of a polypeptide showing the activity of a ydl235c-protein, or if the activity of the polypeptide Ydl235c, preferably represented by SEQ ID NO. 113314, or a homolog or fragment thereof, or if the activity of a polypeptide encoded by a nucleic acid molecule comprising the nucleic acid SEQ ID NO. 113313, preferably the coding region thereof, or a homolog or fragment thereof, e.g. derived from Saccharomyces cerevisiae, is increased or generated. For example the activity of a nucleic acid molecule or a polypeptide comprising the nucleic acid, preferably the coding region thereof, or polypeptide or the consensus sequence or the polypeptide motif, as depicted in Table I, II or IV, application No. 17, column 5 or 8 in the respective same line as the nucleic acid molecule SEQ ID NO. 113313 or polypeptide SEQ ID NO. 113314, respectively, or a homolog or a fragment thereof, is increased or generated, or if the activity ydl235c-protein is increased or generated in a non-human organism, like a microorganism or a plant cell, plant or part thereof, especially with plastidic localization, whereby the respective line disclose in column 7 the fine chemical glucose-1-phosphate. For example, an increase of the glucose-1-phosphate of at least 1 percent, particularly in a range of 31 to 88-percent is conferred as compared to a corresponding non-transformed wild type non-human organism.

[88519] Accordingly, in one embodiment, an increase of myo-inositol in a non-human organism, as compared to a corresponding non-transformed wild type non-human organism, is conferred in the process of the invention, if the activity of a polypeptide showing the activity of a ydl235c-protein, or if the activity of the polypeptide Ydl235c, preferably represented by SEQ ID NO. 113314, or a homolog or fragment thereof, or if the activity of a polypeptide encoded by a nucleic acid molecule comprising the nucleic acid SEQ ID NO. 113313, preferably the coding region thereof, or a homolog or fragment thereof, e.g. derived from Saccharomyces cerevisiae, is increased or generated. For example the activity of a nucleic acid molecule or a polypeptide comprising the nucleic acid, preferably the coding region thereof, or polypeptide or the consensus sequence or the polypeptide motif, as depicted in Table I, II or IV, application No. 17, column 5 or 8 in the respective same line as the nucleic acid molecule SEQ ID NO. 113313 or polypeptide SEQ ID NO. 113314, respectively, or a homolog or a fragment thereof, is increased or generated, or if the activity ydl235c-protein is increased or generated in a non-human organism, like a microorganism or a plant cell, plant or part thereof, especially with plastidic localization, whereby the respective line disclose in column 7 the fine chemical myo-inositol. For example, an increase of the myo-inositol of at least 1 percent, particularly in a range of 30 to 103-percent is conferred as compared to a corresponding non-transformed wild type non-human organism.

[88520] Accordingly, in one embodiment, an increase of 3,4,5-trihydroxypentanoic acid in a non-human organism, as compared to a corresponding non-transformed wild type non-human organism, is conferred in the process of the invention, if the activity of a polypeptide showing the activity of a ydl235c-protein, or if the activity of the polypeptide Ydl235c, preferably represented by SEQ ID NO. 113314, or a homolog or fragment thereof, or if the activity of a polypeptide encoded by a nucleic acid molecule comprising the nucleic acid SEQ ID NO. 113313, preferably the coding region thereof, or a homolog or fragment thereof, e.g. derived from Saccharomyces cerevisiae, is increased or generated. For example the activity of a nucleic acid molecule or a polypeptide comprising the nucleic acid, preferably the coding region thereof, or polypeptide or the consensus sequence or the polypeptide motif, as depicted in Table I, II or IV, application No. 17, column 5 or 8 in the respective same line as the nucleic acid molecule SEQ ID NO. 113313 or polypeptide SEQ ID NO. 113314, respectively, or a homolog or a fragment thereof, is increased or generated, or if the activity ydl235c-protein is increased or generated in a non-human organism, like a microorganism or a plant cell, plant or part thereof, especially with plastidic localization, whereby the respective line disclose in column 7 the fine chemical 3,4,5-trihydroxypentanoic acid. For example, an increase of the 3,4,5-trihydroxypentanoic acid of at least 1 percent, particularly in a range of 48 to 88-percent is conferred as compared to a corresponding non-transformed wild type non-human organism.

[88521] Accordingly, in one embodiment, an increase of sucrose in a non-human organism, as compared to a corresponding non-transformed wild type non-human organism, is conferred in the process of the invention, if the activity of a polypeptide showing the activity of a coproporphyrinogen III oxidase, or if the activity of the polypeptide Ydr044w, preferably represented by SEQ ID NO. 63335, or a homolog or fragment thereof, or if the activity of a polypeptide encoded by a nucleic acid molecule comprising the nucleic acid SEQ ID NO. 63334, preferably the coding region thereof, or a homolog or fragment thereof, e.g. derived from Saccharomyces cerevisiae, is increased or generated. For example the activity of a nucleic acid molecule or a polypeptide comprising the nucleic acid, preferably the coding region thereof, or polypeptide or the consensus sequence or the polypeptide motif, as depicted in Table I, II or IV, application No. 17, column 5 or 8 in the respective same line as the nucleic acid molecule SEQ ID NO. 63334 or polypeptide SEQ ID NO. 63335, respectively, or a homolog or a fragment thereof, is increased or generated, or if the activity coproporphyrinogen III oxidase is increased or generated in a non-human organism, like a microorganism or a plant cell, plant or part thereof, especially with plastidic localization, whereby the respective line disclose in column 7 the fine chemical sucrose. For example, an increase of the sucrose of at least 1 percent, particularly in a range of 31 to 77-percent is conferred as compared to a corresponding non-transformed wild type non-human organism.

[88522] Accordingly, in one embodiment, an increase of glucose in a non-human organism, as compared to a corresponding non-transformed wild type non-human organism, is conferred in the process of the invention, if the activity of a polypeptide showing the activity of a branched-chain amino acid permease, or if the activity of the polypeptide Ydr046c, preferably represented by SEQ ID NO. 63545, or a homolog or fragment thereof, or if the activity of a polypeptide encoded by a nucleic acid molecule comprising the nucleic acid SEQ ID NO. 63544, preferably the coding region thereof, or a homolog or fragment thereof, e.g. derived from Saccharomyces cerevisiae, is increased or generated. For example the activity of a nucleic acid molecule or a polypeptide comprising the nucleic acid, preferably the coding region thereof, or polypeptide or the consensus sequence or the polypeptide motif, as depicted in Table I, II or IV, application No. 17, column 5 or 8 in the respective same line as the nucleic acid molecule SEQ ID NO. 63544 or polypeptide SEQ ID NO. 63545, respectively, or a homolog or a fragment thereof, is increased or generated, or if the activity branched-chain amino acid permease is increased or generated in a non-human organism, like a microorganism or a plant cell, plant or part thereof, especially with plastidic localization, whereby the respective line disclose in column 7 the fine chemical glucose. For example, an increase of the glucose of at least 1 percent, particularly in a range of 36 to 43-percent is conferred as compared to a corresponding non-transformed wild type non-human organism.

[88523] Accordingly, in one embodiment, an increase of fructose in a non-human organism, as compared to a corresponding non-transformed wild type non-human organism, is conferred in the process of the invention, if the activity of a polypeptide showing the activity of a ydr183w-protein, or if the activity of the polypeptide Ydr183w, preferably represented by SEQ ID NO. 90104, or a homolog or fragment thereof, or if the activity of a polypeptide encoded by a nucleic acid molecule comprising the nucleic acid SEQ ID NO. 90103, preferably the coding region thereof, or a homolog or fragment thereof, e.g. derived from Saccharomyces cerevisiae, is increased or generated. For example the activity of a nucleic acid molecule or a polypeptide comprising the nucleic acid, preferably the coding region thereof, or polypeptide or the consensus sequence or the polypeptide motif, as depicted in Table I, II or IV, application No. 17, column 5 or 8 in the respective same line as the nucleic acid molecule SEQ ID NO. 90103 or polypeptide SEQ ID NO. 90104, respectively, or a homolog or a fragment thereof, is increased or generated, or if the activity ydr183w-protein is increased or generated in a non-human organism, like a microorganism or a plant cell, plant or part thereof, especially with plastidic localization, whereby the respective line disclose in column 7 the fine chemical fructose. For example, an increase of the fructose of at least 1 percent, particularly in a range of 158 to 249-percent is conferred as compared to a corresponding non-transformed wild type non-human organism.

[88524] Accordingly, in one embodiment, an increase of glucose in a non-human organism, as compared to a corresponding non-transformed wild type non-human organism, is conferred in the process of the invention, if the activity of a polypeptide showing the activity of a ydr183w-protein, or if the activity of the polypeptide Ydr183w, preferably represented by SEQ ID NO. 90104, or a homolog or fragment thereof, or if the activity of a polypeptide encoded by a nucleic acid molecule comprising the nucleic acid SEQ ID NO. 90103, preferably the coding region thereof, or a homolog or fragment thereof, e.g. derived from Saccharomyces cerevisiae, is increased or generated. For example the activity of a nucleic acid molecule or a polypeptide comprising the nucleic acid, preferably the coding region thereof, or polypeptide or the consensus sequence or the polypeptide motif, as depicted in Table I, II or IV, application No. 17, column 5 or 8 in the respective same line as the nucleic acid molecule SEQ ID NO. 90103 or polypeptide SEQ ID NO. 90104, respectively, or a homolog or a fragment thereof, is increased or generated, or if the activity ydr183w-protein is increased or generated in a non-human organism, like a microorganism or a plant cell, plant or part thereof, especially with plastidic localization, whereby the respective line disclose in column 7 the fine chemical glucose. For example, an increase of the glucose of at least 1 percent, particularly in a range of 60 to 74-percent is conferred as compared to a corresponding non-transformed wild type non-human organism.

[88525] Accordingly, in one embodiment, an increase of glucose-1-phosphate in a non-human organism, as compared to a corresponding non-transformed wild type non-human organism, is conferred in the process of the invention, if the activity of a polypeptide showing the activity of a ydr507c-protein, or if the activity of the polypeptide Ydr507c, preferably represented by SEQ ID NO. 90166, or a homolog or fragment thereof, or if the activity of a polypeptide encoded by a nucleic acid molecule comprising the nucleic acid SEQ ID NO. 90165, preferably the coding region thereof, or a homolog or fragment thereof, e.g. derived from Saccharomyces cerevisiae, is increased or generated. For example the activity of a nucleic acid molecule or a polypeptide comprising the nucleic acid, preferably the coding region thereof, or polypeptide or the consensus sequence or the polypeptide motif, as depicted in Table I, II or IV, application No. 17, column 5 or 8 in the respective same line as the nucleic acid molecule SEQ ID NO. 90165 or polypeptide SEQ ID NO. 90166, respectively, or a homolog or a fragment thereof, is increased or generated, or if the activity ydr507c-protein is increased or generated in a non-human organism, like a microorganism or a plant cell, plant or part thereof, especially with non-targeted localization, whereby the respective line disclose in column 7 the fine chemical glucose-1-phosphate. For example, an increase of the glucose-1-phosphate of at least 1 percent, particularly in a range of 18 to 88-percent is conferred as compared to a corresponding non-transformed wild type non-human organism.

[88526] Accordingly, in one embodiment, an increase of fructose in a non-human organism, as compared to a corresponding non-transformed wild type non-human organism, is conferred in the process of the invention, if the activity of a polypeptide showing the activity of a 1,4-alpha-glucan branching enzyme, or if the activity of the polypeptide Yel011w, preferably represented by SEQ ID NO. 148615, or a homolog or fragment thereof, or if the activity of a polypeptide encoded by a nucleic acid molecule comprising the nucleic acid SEQ ID NO. 148614, preferably the coding region thereof, or a homolog or fragment thereof, e.g. derived from Saccharomyces cerevisiae, is increased or generated. For example the activity of a nucleic acid molecule or a polypeptide comprising the nucleic acid, preferably the coding region thereof, or polypeptide or the consensus sequence or the polypeptide motif, as depicted in Table I, II or IV, application No. 17, column 5 or 8 in the respective same line as the nucleic acid molecule SEQ ID NO. 148614 or polypeptide SEQ ID NO. 148615, respectively, or a homolog or a fragment thereof, is increased or generated, or if the activity 1,4-alpha-glucan branching enzyme is increased or generated in a non-human organism, like a microorganism or a plant cell, plant or part thereof, especially with non-targeted localization, whereby the respective line disclose in column 7 the fine chemical fructose. For example, an increase of the fructose of at least 1 percent, particularly in a range of 113 to 539-percent is conferred as compared to a corresponding non-transformed wild type non-human organism.

[88527] Accordingly, in one embodiment, an increase of glucose in a non-human organism, as compared to a corresponding non-transformed wild type non-human organism, is conferred in the process of the invention, if the activity of a polypeptide showing the activity of a 1,4-alpha-glucan branching enzyme, or if the activity of the polypeptide Yel011w, preferably represented by SEQ ID NO. 148615, or a homolog or fragment thereof, or if the activity of a polypeptide encoded by a nucleic acid molecule comprising the nucleic acid SEQ ID NO. 148614, preferably the coding region thereof, or a homolog or fragment thereof, e.g. derived from Saccharomyces cerevisiae, is increased or generated. For example the activity of a nucleic acid molecule or a polypeptide comprising the nucleic acid, preferably the coding region thereof, or polypeptide or the consensus sequence or the polypeptide motif, as depicted in Table I, II or IV, application No. 17, column 5 or 8 in the respective same line as the nucleic acid molecule SEQ ID NO. 148614 or polypeptide SEQ ID NO. 148615, respectively, or a homolog or a fragment thereof, is increased or generated, or if the activity 1,4-alpha-glucan branching enzyme is increased or generated in a non-human organism, like a microorganism or a plant cell, plant or part thereof, especially with non-targeted localization, whereby the respective line disclose in column 7 the fine chemical glucose. For example, an increase of the glucose of at least 1 percent, particularly in a range of 71 to 431-percent is conferred as compared to a corresponding non-transformed wild type non-human organism.

[88528] Accordingly, in one embodiment, an increase of 3,4,5-trihydroxypentanoic acid in a non-human organism, as compared to a corresponding non-transformed wild type non-human organism, is conferred in the process of the invention, if the activity of a polypeptide showing the activity of a YEL030C-A-protein, or if the activity of the polypeptide Yel030c-a, preferably represented by SEQ ID NO. 97295, or a homolog or fragment thereof, or if the activity of a polypeptide encoded by a nucleic acid molecule comprising the nucleic acid SEQ ID NO. 97294, preferably the coding region thereof, or a homolog or fragment thereof, e.g. derived from Saccharomyces cerevisiae, is increased or generated. For example the activity of a nucleic acid molecule or a polypeptide comprising the nucleic acid, preferably the coding region thereof, or polypeptide or the consensus sequence or the polypeptide motif, as depicted in Table I, II or IV, application No. 17, column 5 or 8 in the respective same line as the nucleic acid molecule SEQ ID NO. 97294 or polypeptide SEQ ID NO. 97295, respectively, or a homolog or a fragment thereof, is increased or generated, or if the activity YEL030C-A-protein is increased or generated in a non-human organism, like a microorganism or a plant cell, plant or part thereof, especially with non-targeted localization, whereby the respective line disclose in column 7 the fine chemical 3,4,5-trihydroxypentanoic acid. For example, an increase of the 3,4,5-trihydroxypentanoic acid of at least 1 percent, particularly in a range of 33 to 87-percent is conferred as compared to a corresponding non-transformed wild type non-human organism.

[88529] Accordingly, in one embodiment, an increase of glucose-1-phosphate in a non-human organism, as compared to a corresponding non-transformed wild type non-human organism, is conferred in the process of the invention, if the activity of a polypeptide showing the activity of a aldolase, or if the activity of the polypeptide Yel046c, preferably represented by SEQ ID NO. 128512, or a homolog or fragment thereof, or if the activity of a polypeptide encoded by a nucleic acid molecule comprising the nucleic acid SEQ ID NO. 128511, preferably the coding region thereof, or a homolog or fragment thereof, e.g. derived from Saccharomyces cerevisiae, is increased or generated. For example the activity of a nucleic acid molecule or a polypeptide comprising the nucleic acid, preferably the coding region thereof, or polypeptide or the consensus sequence or the polypeptide motif, as depicted in Table I, II or IV, application No. 17, column 5 or 8 in the respective same line as the nucleic acid molecule SEQ ID NO. 128511 or polypeptide SEQ ID NO. 128512, respectively, or a homolog or a fragment thereof, is increased or generated, or if the activity aldolase is increased or generated in a non-human organism, like a microorganism or a plant cell, plant or part thereof, especially with non-targeted localization, whereby the respective line disclose in column 7 the fine chemical glucose-1-phosphate. For example, an increase of the glucose-1-phosphate of at least 1 percent, particularly in a range of 21 to 112-percent is conferred as compared to a corresponding non-transformed wild type non-human organism.

[88530] Accordingly, in one embodiment, an increase of glucose in a non-human organism, as compared to a corresponding non-transformed wild type non-human organism, is conferred in the process of the invention, if the activity of a polypeptide showing the activity of a O-acetyltransferase, or if the activity of the polypeptide Yer024w, preferably represented by SEQ ID NO. 148812, or a homolog or fragment thereof, or if the activity of a polypeptide encoded by a nucleic acid molecule comprising the nucleic acid SEQ ID NO. 148811, preferably the coding region thereof, or a homolog or fragment thereof, e.g. derived from Saccharomyces cerevisiae, is increased or generated. For example the activity of a nucleic acid molecule or a polypeptide comprising the nucleic acid, preferably the coding region thereof, or polypeptide or the consensus sequence or the polypeptide motif, as depicted in Table I, II or IV, application No. 17, column 5 or 8 in the respective same line as the nucleic acid molecule SEQ ID NO. 148811 or polypeptide SEQ ID NO. 148812, respectively, or a homolog or a fragment thereof, is increased or generated, or if the activity O-acetyltransferase is increased or generated in a non-human organism, like a microorganism or a plant cell, plant or part thereof, especially with plastidic localization, whereby the respective line disclose in column 7 the fine chemical glucose. For example, an increase of the glucose of at least 1 percent, particularly in a range of 47 to 92-percent is conferred as compared to a corresponding non-transformed wild type non-human organism.

[88531] Accordingly, in one embodiment, an increase of raffinose in a non-human organism, as compared to a corresponding non-transformed wild type non-human organism, is conferred in the process of the invention, if the activity of a polypeptide showing the activity of a yer177w-protein, or if the activity of the polypeptide Yer177w, preferably represented by SEQ ID NO. 148834, or a homolog or fragment thereof, or if the activity of a polypeptide encoded by a nucleic acid molecule comprising the nucleic acid SEQ ID NO. 148833, preferably the coding region thereof, or a homolog or fragment thereof, e.g. derived from Saccharomyces cerevisiae, is increased or generated. For example the activity of a nucleic acid molecule or a polypeptide comprising the nucleic acid, preferably the coding region thereof, or polypeptide or the consensus sequence or the polypeptide motif, as depicted in Table I, II or IV, application No. 17, column 5 or 8 in the respective same line as the nucleic acid molecule SEQ ID NO. 148833 or polypeptide SEQ ID NO. 148834, respectively, or a homolog or a fragment thereof, is increased or generated, or if the activity yer177w-protein is increased or generated in a non-human organism, like a microorganism or a plant cell, plant or part thereof, especially with plastidic localization, whereby the respective line disclose in column 7 the fine chemical raffinose. For example, an increase of the raffinose of at least 1 percent, particularly in a range of 112 to 148-percent is conferred as compared to a corresponding non-transformed wild type non-human organism.

[88532] Accordingly, in one embodiment, an increase of myo-inositol in a non-human organism, as compared to a corresponding non-transformed wild type non-human organism, is conferred in the process of the invention, if the activity of a polypeptide showing the activity of a YFL019C-protein, or if the activity of the polypeptide Yfl019c, preferably represented by SEQ ID NO. 64145, or a homolog or fragment thereof, or if the activity of a polypeptide encoded by a nucleic acid molecule comprising the nucleic acid SEQ ID NO. 64144, preferably the coding region thereof, or a homolog or fragment thereof, e.g. derived from Saccharomyces cerevisiae, is increased or generated. For example the activity of a nucleic acid molecule or a polypeptide comprising the nucleic acid, preferably the coding region thereof, or polypeptide or the consensus sequence or the polypeptide motif, as depicted in Table I, II or IV, application No. 17, column 5 or 8 in the respective same line as the nucleic acid molecule SEQ ID NO. 64144 or polypeptide SEQ ID NO. 64145, respectively, or a homolog or a fragment thereof, is increased or generated, or if the activity YFL019C-protein is increased or generated in a non-human organism, like a microorganism or a plant cell, plant or part thereof, especially with non-targeted localization, whereby the respective line disclose in column 7 the fine chemical myo-inositol. For example, an increase of the myo-inositol of at least 1 percent, particularly in a range of 28 to 275-percent is conferred as compared to a corresponding non-transformed wild type non-human organism.

[88533] Accordingly, in one embodiment, an increase of sucrose in a non-human organism, as compared to a corresponding non-transformed wild type non-human organism, is conferred in the process of the invention, if the activity of a polypeptide showing the activity of a YFL019C-protein, or if the activity of the polypeptide Yfl019c, preferably represented by SEQ ID NO. 64145, or a homolog or fragment thereof, or if the activity of a polypeptide encoded by a nucleic acid molecule comprising the nucleic acid SEQ ID NO. 64144, preferably the coding region thereof, or a homolog or fragment thereof, e.g. derived from Saccharomyces cerevisiae, is increased or generated. For example the activity of a nucleic acid molecule or a polypeptide comprising the nucleic acid, preferably the coding region thereof, or polypeptide or the consensus sequence or the polypeptide motif, as depicted in Table I, II or IV, application No. 17, column 5 or 8 in the respective same line as the nucleic acid molecule SEQ ID NO. 64144 or polypeptide SEQ ID NO. 64145, respectively, or a homolog or a fragment thereof, is increased or generated, or if the activity YFL019C-protein is increased or generated in a non-human organism, like a microorganism or a plant cell, plant or part thereof, especially with non-targeted localization, whereby the respective line disclose in column 7 the fine chemical sucrose. For example, an increase of the sucrose of at least 1 percent, particularly in a range of 26 to 126-percent is conferred as compared to a corresponding non-transformed wild type non-human organism.

[88534] Accordingly, in one embodiment, an increase of sucrose in a non-human organism, as compared to a corresponding non-transformed wild type non-human organism, is conferred in the process of the invention, if the activity of a polypeptide showing the activity of a hexokinase, or if the activity of the polypeptide Yfr053c, preferably represented by SEQ ID NO. 149220, or a homolog or fragment thereof, or if the activity of a polypeptide encoded by a nucleic acid molecule comprising the nucleic acid SEQ ID NO. 149219, preferably the coding region thereof, or a homolog or fragment thereof, e.g. derived from Saccharomyces cerevisiae, is increased or generated. For example the activity of a nucleic acid molecule or a polypeptide comprising the nucleic acid, preferably the coding region thereof, or polypeptide or the consensus sequence or the polypeptide motif, as depicted in Table I, II or IV, application No. 17, column 5 or 8 in the respective same line as the nucleic acid molecule SEQ ID NO. 149219 or polypeptide SEQ ID NO. 149220, respectively, or a homolog or a fragment thereof, is increased or generated, or if the activity hexokinase is increased or generated in a non-human organism, like a microorganism or a plant cell, plant or part thereof, especially with non-targeted localization, whereby the respective line disclose in column 7 the fine chemical sucrose. For example, an increase of the sucrose of at least 1 percent, particularly in a range of 27 to 45-percent is conferred as compared to a corresponding non-transformed wild type non-human organism.

[88535] Accordingly, in one embodiment, an increase of glucose-1-phosphate in a non-human organism, as compared to a corresponding non-transformed wild type non-human organism, is conferred in the process of the invention, if the activity of a polypeptide showing the activity of a oxidoreductase, or if the activity of the polypeptide Ygl039w, preferably represented by SEQ ID NO. 120437, or a homolog or fragment thereof, or if the activity of a polypeptide encoded by a nucleic acid molecule comprising the nucleic acid SEQ ID NO. 120436, preferably the coding region thereof, or a homolog or fragment thereof, e.g. derived from Saccharomyces cerevisiae, is increased or generated. For example the activity of a nucleic acid molecule or a polypeptide comprising the nucleic acid, preferably the coding region thereof, or polypeptide or the consensus sequence or the polypeptide motif, as depicted in Table I, II or IV, application No. 17, column 5 or 8 in the respective same line as the nucleic acid molecule SEQ ID NO. 120436 or polypeptide SEQ ID NO. 120437, respectively, or a homolog or a fragment thereof, is increased or generated, or if the activity oxidoreductase is increased or generated in a non-human organism, like a microorganism or a plant cell, plant or part thereof, especially with plastidic localization, whereby the respective line disclose in column 7 the fine chemical glucose-1-phosphate. For example, an increase of the glucose-1-phosphate of at least 1 percent, particularly in a range of 30 to 57-percent is conferred as compared to a corresponding non-transformed wild type non-human organism.

[88536] Accordingly, in one embodiment, an increase of 3,4,5-trihydroxypentanoic acid in a non-human organism, as compared to a corresponding non-transformed wild type non-human organism, is conferred in the process of the invention, if the activity of a polypeptide showing the activity of a oxidoreductase, or if the activity of the polypeptide Ygl039w, preferably represented by SEQ ID NO. 120437, or a homolog or fragment thereof, or if the activity of a polypeptide encoded by a nucleic acid molecule comprising the nucleic acid SEQ ID NO. 120436, preferably the coding region thereof, or a homolog or fragment thereof, e.g. derived from Saccharomyces cerevisiae, is increased or generated. For example the activity of a nucleic acid molecule or a polypeptide comprising the nucleic acid, preferably the coding region thereof, or polypeptide or the consensus sequence or the polypeptide motif, as depicted in Table I, II or IV, application No. 17, column 5 or 8 in the respective same line as the nucleic acid molecule SEQ ID NO. 120436 or polypeptide SEQ ID NO. 120437, respectively, or a homolog or a fragment thereof, is increased or generated, or if the activity oxidoreductase is increased or generated in a non-human organism, like a microorganism or a plant cell, plant or part thereof, especially with plastidic localization, whereby the respective line disclose in column 7 the fine chemical 3,4,5-trihydroxypentanoic acid. For example, an increase of the 3,4,5-trihydroxypentanoic acid of at least 1 percent, particularly in a range of 36 to 92-percent is conferred as compared to a corresponding non-transformed wild type non-human organism.

[88537] Accordingly, in one embodiment, an increase of glucose-1-phosphate in a non-human organism, as compared to a corresponding non-transformed wild type non-human organism, is conferred in the process of the invention, if the activity of a polypeptide showing the activity of a ygl096w-protein, or if the activity of the polypeptide Ygl096w, preferably represented by SEQ ID NO. 90279, or a homolog or fragment thereof, or if the activity of a polypeptide encoded by a nucleic acid molecule comprising the nucleic acid SEQ ID NO. 90278, preferably the coding region thereof, or a homolog or fragment thereof, e.g. derived from Saccharomyces cerevisiae, is increased or generated. For example the activity of a nucleic acid molecule or a polypeptide comprising the nucleic acid, preferably the coding region thereof, or polypeptide or the consensus sequence or the polypeptide motif, as depicted in Table I, II or IV, application No. 17, column 5 or 8 in the respective same line as the nucleic acid molecule SEQ ID NO. 90278 or polypeptide SEQ ID NO. 90279, respectively, or a homolog or a fragment thereof, is increased or generated, or if the activity ygl096w-protein is increased or generated in a non-human organism, like a microorganism or a plant cell, plant or part thereof, especially with plastidic localization, whereby the respective line disclose in column 7 the fine chemical glucose-1-phosphate. For example, an increase of the glucose-1-phosphate of at least 1 percent, particularly in a range of 18 to 48-percent is conferred as compared to a corresponding non-transformed wild type non-human organism.

[88538] Accordingly, in one embodiment, an increase of 3,4,5-trihydroxypentanoic acid in a non-human organism, as compared to a corresponding non-transformed wild type non-human organism, is conferred in the process of the invention, if the activity of a polypeptide showing the activity of a ygl096w-protein, or if the activity of the polypeptide Ygl096w, preferably represented by SEQ ID NO. 90279, or a homolog or fragment thereof, or if the activity of a polypeptide encoded by a nucleic acid molecule comprising the nucleic acid SEQ ID NO. 90278, preferably the coding region thereof, or a homolog or fragment thereof, e.g. derived from Saccharomyces cerevisiae, is increased or generated. For example the activity of a nucleic acid molecule or a polypeptide comprising the nucleic acid, preferably the coding region thereof, or polypeptide or the consensus sequence or the polypeptide motif, as depicted in Table I, II or IV, application No. 17, column 5 or 8 in the respective same line as the nucleic acid molecule SEQ ID NO. 90278 or polypeptide SEQ ID NO. 90279, respectively, or a homolog or a fragment thereof, is increased or generated, or if the activity ygl096w-protein is increased or generated in a non-human organism, like a microorganism or a plant cell, plant or part thereof, especially with plastidic localization, whereby the respective line disclose in column 7 the fine chemical 3,4,5-trihydroxypentanoic acid. For example, an increase of the 3,4,5-trihydroxypentanoic acid of at least 1 percent, particularly in a range of 33 to 86-percent is conferred as compared to a corresponding non-transformed wild type non-human organism.

[88539] Accordingly, in one embodiment, an increase of raffinose in a non-human organism, as compared to a corresponding non-transformed wild type non-human organism, is conferred in the process of the invention, if the activity of a polypeptide showing the activity of a ygl237c-protein, or if the activity of the polypeptide Ygl237c, preferably represented by SEQ ID NO. 64178, or a homolog or fragment thereof, or if the activity of a polypeptide encoded by a nucleic acid molecule comprising the nucleic acid SEQ ID NO. 64177, preferably the coding region thereof, or a homolog or fragment thereof, e.g. derived from Saccharomyces cerevisiae, is increased or generated. For example the activity of a nucleic acid molecule or a polypeptide comprising the nucleic acid, preferably the coding region thereof, or polypeptide or the consensus sequence or the polypeptide motif, as depicted in Table I, II or IV, application No. 17, column 5 or 8 in the respective same line as the nucleic acid molecule SEQ ID NO. 64177 or polypeptide SEQ ID NO. 64178, respectively, or a homolog or a fragment thereof, is increased or generated, or if the activity ygl237c-protein is increased or generated in a non-human organism, like a microorganism or a plant cell, plant or part thereof, especially with non-targeted localization, whereby the respective line disclose in column 7 the fine chemical raffinose. For example, an increase of the raffinose of at least 1 percent, particularly in a range of 68 to 290-percent is conferred as compared to a corresponding non-transformed wild type non-human organism.

[88540] Accordingly, in one embodiment, an increase of glucose-1-phosphate in a non-human organism, as compared to a corresponding non-transformed wild type non-human organism, is conferred in the process of the invention, if the activity of a polypeptide showing the activity of a alcohol dehydrogenase, or if the activity of the polypeptide Ygl256w, preferably represented by SEQ ID NO. 130743, or a homolog or fragment thereof, or if the activity of a polypeptide encoded by a nucleic acid molecule comprising the nucleic acid SEQ ID NO. 130742, preferably the coding region thereof, or a homolog or fragment thereof, e.g. derived from Saccharomyces cerevisiae, is increased or generated. For example the activity of a nucleic acid molecule or a polypeptide comprising the nucleic acid, preferably the coding region thereof, or polypeptide or the consensus sequence or the polypeptide motif, as depicted in Table I, II or IV, application No. 17, column 5 or 8 in the respective same line as the nucleic acid molecule SEQ ID NO. 130742 or polypeptide SEQ ID NO. 130743, respectively, or a homolog or a fragment thereof, is increased or generated, or if the activity alcohol dehydrogenase is increased or generated in a non-human organism, like a microorganism or a plant cell, plant or part thereof, especially with plastidic localization, whereby the respective line disclose in column 7 the fine chemical glucose-1-phosphate. For example, an increase of the glucose-1-phosphate of at least 1 percent, particularly in a range of 44 to 105-percent is conferred as compared to a corresponding non-transformed wild type non-human organism.

[88541] Accordingly, in one embodiment, an increase of 3,4,5-trihydroxypentanoic acid in a non-human organism, as compared to a corresponding non-transformed wild type non-human organism, is conferred in the process of the invention, if the activity of a polypeptide showing the activity of a alcohol dehydrogenase, or if the activity of the polypeptide Ygl256w, preferably represented by SEQ ID NO. 130743, or a homolog or fragment thereof, or if the activity of a polypeptide encoded by a nucleic acid molecule comprising the nucleic acid SEQ ID NO. 130742, preferably the coding region thereof, or a homolog or fragment thereof, e.g. derived from Saccharomyces cerevisiae, is increased or generated. For example the activity of a nucleic acid molecule or a polypeptide comprising the nucleic acid, preferably the coding region thereof, or polypeptide or the consensus sequence or the polypeptide motif, as depicted in Table I, II or IV, application No. 17, column 5 or 8 in the respective same line as the nucleic acid molecule SEQ ID NO. 130742 or polypeptide SEQ ID NO. 130743, respectively, or a homolog or a fragment thereof, is increased or generated, or if the activity alcohol dehydrogenase is increased or generated in a non-human organism, like a microorganism or a plant cell, plant or part thereof, especially with plastidic localization, whereby the respective line disclose in column 7 the fine chemical 3,4,5-trihydroxypentanoic acid. For example, an increase of the 3,4,5-trihydroxypentanoic acid of at least 1 percent, particularly in a range of 40 to 101-percent is conferred as compared to a corresponding non-transformed wild type non-human organism.

[88542] Accordingly, in one embodiment, an increase of glucose in a non-human organism, as compared to a corresponding non-transformed wild type non-human organism, is conferred in the process of the invention, if the activity of a polypeptide showing the activity of a yhl013c-protein, or if the activity of the polypeptide Yhl013c, preferably represented by SEQ ID NO. 14716, or a homolog or fragment thereof, or if the activity of a polypeptide encoded by a nucleic acid molecule comprising the nucleic acid SEQ ID NO. 14715, preferably the coding region thereof, or a homolog or fragment thereof, e.g. derived from Saccharomyces cerevisiae, is increased or generated. For example the activity of a nucleic acid molecule or a polypeptide comprising the nucleic acid, preferably the coding region thereof, or polypeptide or the consensus sequence or the polypeptide motif, as depicted in Table I, II or IV, application No. 17, column 5 or 8 in the respective same line as the nucleic acid molecule SEQ ID NO. 14715 or polypeptide SEQ ID NO. 14716, respectively, or a homolog or a fragment thereof, is increased or generated, or if the activity yhl013c-protein is increased or generated in a non-human organism, like a microorganism or a plant cell, plant or part thereof, especially with plastidic localization, whereby the respective line disclose in column 7 the fine chemical glucose. For example, an increase of the glucose of at least 1 percent, particularly in a range of 137 to 173-percent is conferred as compared to a corresponding non-transformed wild type non-human organism.

[88543] Accordingly, in one embodiment, an increase of glucose-1-phosphate in a non-human organism, as compared to a corresponding non-transformed wild type non-human organism, is conferred in the process of the invention, if the activity of a polypeptide showing the activity of a yhl013c-protein, or if the activity of the polypeptide Yhl013c, preferably represented by SEQ ID NO. 14716, or a homolog or fragment thereof, or if the activity of a polypeptide encoded by a nucleic acid molecule comprising the nucleic acid SEQ ID NO. 14715, preferably the coding region thereof, or a homolog or fragment thereof, e.g. derived from Saccharomyces cerevisiae, is increased or generated. For example the activity of a nucleic acid molecule or a polypeptide comprising the nucleic acid, preferably the coding region thereof, or polypeptide or the consensus sequence or the polypeptide motif, as depicted in Table I, II or IV, application No. 17, column 5 or 8 in the respective same line as the nucleic acid molecule SEQ ID NO. 14715 or polypeptide SEQ ID NO. 14716, respectively, or a homolog or a fragment thereof, is increased or generated, or if the activity yhl013c-protein is increased or generated in a non-human organism, like a microorganism or a plant cell, plant or part thereof, especially with plastidic localization, whereby the respective line disclose in column 7 the fine chemical glucose-1-phosphate. For example, an increase of the glucose-1-phosphate of at least 1 percent, particularly in a range of 18 to 38-percent is conferred as compared to a corresponding non-transformed wild type non-human organism.

[88544] Accordingly, in one embodiment, an increase of glucose-1-phosphate in a non-human organism, as compared to a corresponding non-transformed wild type non-human organism, is conferred in the process of the invention, if the activity of a polypeptide showing the activity of a 3-phosphoglycerate dehydrogenase, or if the activity of the polypeptide Yil074c, preferably represented by SEQ ID NO. 64564, or a homolog or fragment thereof, or if the activity of a polypeptide encoded by a nucleic acid molecule comprising the nucleic acid SEQ ID NO. 64563, preferably the coding region thereof, or a homolog or fragment thereof, e.g. derived from Saccharomyces cerevisiae, is increased or generated. For example the activity of a nucleic acid molecule or a polypeptide comprising the nucleic acid, preferably the coding region thereof, or polypeptide or the consensus sequence or the polypeptide motif, as depicted in Table I, II or IV, application No. 17, column 5 or 8 in the respective same line as the nucleic acid molecule SEQ ID NO. 64563 or polypeptide SEQ ID NO. 64564, respectively, or a homolog or a fragment thereof, is increased or generated, or if the activity 3-phosphoglycerate dehydrogenase is increased or generated in a non-human organism, like a microorganism or a plant cell, plant or part thereof, especially with plastidic localization, whereby the respective line disclose in column 7 the fine chemical glucose-1-phosphate. For example, an increase of the glucose-1-phosphate of at least 1 percent, particularly in a range of 36 to 70-percent is conferred as compared to a corresponding non-transformed wild type non-human organism.

[88545] Accordingly, in one embodiment, an increase of fructose in a non-human organism, as compared to a corresponding non-transformed wild type non-human organism, is conferred in the process of the invention, if the activity of a polypeptide showing the activity of a YIL083C-protein, or if the activity of the polypeptide Yil083c, preferably represented by SEQ ID NO. 149455, or a homolog or fragment thereof, or if the activity of a polypeptide encoded by a nucleic acid molecule comprising the nucleic acid SEQ ID NO. 149454, preferably the coding region thereof, or a homolog or fragment thereof, e.g. derived from Saccharomyces cerevisiae, is increased or generated. For example the activity of a nucleic acid molecule or a polypeptide comprising the nucleic acid, preferably the coding region thereof, or polypeptide or the consensus sequence or the polypeptide motif, as depicted in Table I, II or IV, application No. 17, column 5 or 8 in the respective same line as the nucleic acid molecule SEQ ID NO. 149454 or polypeptide SEQ ID NO. 149455, respectively, or a homolog or a fragment thereof, is increased or generated, or if the activity YIL083C-protein is increased or generated in a non-human organism, like a microorganism or a plant cell, plant or part thereof, especially with plastidic localization, whereby the respective line disclose in column 7 the fine chemical fructose. For example, an increase of the fructose of at least 1 percent, particularly in a range of 89 to 140-percent is conferred as compared to a corresponding non-transformed wild type non-human organism.

[88546] Accordingly, in one embodiment, an increase of myo-inositol in a non-human organism, as compared to a corresponding non-transformed wild type non-human organism, is conferred in the process of the invention, if the activity of a polypeptide showing the activity of a DnaJ-like chaperone, or if the activity of the polypeptide Yjl073w, preferably represented by SEQ ID NO. 64965, or a homolog or fragment thereof, or if the activity of a polypeptide encoded by a nucleic acid molecule comprising the nucleic acid SEQ ID NO. 64964, preferably the coding region thereof, or a homolog or fragment thereof, e.g. derived from Saccharomyces cerevisiae, is increased or generated. For example the activity of a nucleic acid molecule or a polypeptide comprising the nucleic acid, preferably the coding region thereof, or polypeptide or the consensus sequence or the polypeptide motif, as depicted in Table I, II or IV, application No. 17, column 5 or 8 in the respective same line as the nucleic acid molecule SEQ ID NO. 64964 or polypeptide SEQ ID NO. 64965, respectively, or a homolog or a fragment thereof, is increased or generated, or if the activity DnaJ-like chaperone is increased or generated in a non-human organism, like a microorganism or a plant cell, plant or part thereof, especially with plastidic localization, whereby the respective line disclose in column 7 the fine chemical myo-inositol. For example, an increase of the myo-inositol of at least 1 percent, particularly in a range of 25 to 34-percent is conferred as compared to a corresponding non-transformed wild type non-human organism.

[88547] Accordingly, in one embodiment, an increase of 3,4,5-trihydroxypentanoic acid in a non-human organism, as compared to a corresponding non-transformed wild type non-human organism, is conferred in the process of the invention, if the activity of a polypeptide showing the activity of a YJL127W-A-protein, or if the activity of the polypeptide Yjl127w-a, preferably represented by SEQ ID NO. 97632, or a homolog or fragment thereof, or if the activity of a polypeptide encoded by a nucleic acid molecule comprising the nucleic acid SEQ ID NO. 97631, preferably the coding region thereof, or a homolog or fragment thereof, e.g. derived from Saccharomyces cerevisiae, is increased or generated. For example the activity of a nucleic acid molecule or a polypeptide comprising the nucleic acid, preferably the coding region thereof, or polypeptide or the consensus sequence or the polypeptide motif, as depicted in Table I, II or IV, application No. 17, column 5 or 8 in the respective same line as the nucleic acid molecule SEQ ID NO. 97631 or polypeptide SEQ ID NO. 97632, respectively, or a homolog or a fragment thereof, is increased or generated, or if the activity YJL127W-A-protein is increased or generated in a non-human organism, like a microorganism or a plant cell, plant or part thereof, especially with non-targeted localization, whereby the respective line disclose in column 7 the fine chemical 3,4,5-trihydroxypentanoic acid. For example, an increase of the 3,4,5-trihydroxypentanoic acid of at least 1 percent, particularly in a range of 39 to 102-percent is conferred as compared to a corresponding non-transformed wild type non-human organism.

[88548] Accordingly, in one embodiment, an increase of fructose in a non-human organism, as compared to a corresponding non-transformed wild type non-human organism, is conferred in the process of the invention, if the activity of a polypeptide showing the activity of a inositol-3-phosphate synthase, or if the activity of the polypeptide Yjl153c, preferably represented by SEQ ID NO. 149633, or a homolog or fragment thereof, or if the activity of a polypeptide encoded by a nucleic acid molecule comprising the nucleic acid SEQ ID NO. 149632, preferably the coding region thereof, or a homolog or fragment thereof, e.g. derived from Saccharomyces cerevisiae, is increased or generated. For example the activity of a nucleic acid molecule or a polypeptide comprising the nucleic acid, preferably the coding region thereof, or polypeptide or the consensus sequence or the polypeptide motif, as depicted in Table I, II or IV, application No. 17, column 5 or 8 in the respective same line as the nucleic acid molecule SEQ ID NO. 149632 or polypeptide SEQ ID NO. 149633, respectively, or a homolog or a fragment thereof, is increased or generated, or if the activity inositol-3-phosphate synthase is increased or generated in a non-human organism, like a microorganism or a plant cell, plant or part thereof, especially with non-targeted localization, whereby the respective line disclose in column 7 the fine chemical fructose. For example, an increase of the fructose of at least 1 percent, particularly in a range of 51 to 79-percent is conferred as compared to a corresponding non-transformed wild type non-human organism.

[88549] Accordingly, in one embodiment, an increase of galactitol in a non-human organism, as compared to a corresponding non-transformed wild type non-human organism, is conferred in the process of the invention, if the activity of a polypeptide showing the activity of a inositol-3-phosphate synthase, or if the activity of the polypeptide Yjl153c, preferably represented by SEQ ID NO. 149633, or a homolog or fragment thereof, or if the activity of a polypeptide encoded by a nucleic acid molecule comprising the nucleic acid SEQ ID NO. 149632, preferably the coding region thereof, or a homolog or fragment thereof, e.g. derived from Saccharomyces cerevisiae, is increased or generated. For example the activity of a nucleic acid molecule or a polypeptide comprising the nucleic acid, preferably the coding region thereof, or polypeptide or the consensus sequence or the polypeptide motif, as depicted in Table I, II or IV, application No. 17, column 5 or 8 in the respective same line as the nucleic acid molecule SEQ ID NO. 149632 or polypeptide SEQ ID NO. 149633, respectively, or a homolog or a fragment thereof, is increased or generated, or if the activity inositol-3-phosphate synthase is increased or generated in a non-human organism, like a microorganism or a plant cell, plant or part thereof, especially with non-targeted localization, whereby the respective line disclose in column 7 the fine chemical galactitol. For example, an increase of the galactitol of at least 1 percent, particularly in a range of 96 to 292-percent is conferred as compared to a corresponding non-transformed wild type non-human organism.

[88550] Accordingly, in one embodiment, an increase of myo-inositol in a non-human organism, as compared to a corresponding non-transformed wild type non-human organism, is conferred in the process of the invention, if the activity of a polypeptide showing the activity of a inositol-3-phosphate synthase, or if the activity of the polypeptide Yjl153c, preferably represented by SEQ ID NO. 149633, or a homolog or fragment thereof, or if the activity of a polypeptide encoded by a nucleic acid molecule comprising the nucleic acid SEQ ID NO. 149632, preferably the coding region thereof, or a homolog or fragment thereof, e.g. derived from Saccharomyces cerevisiae, is increased or generated. For example the activity of a nucleic acid molecule or a polypeptide comprising the nucleic acid, preferably the coding region thereof, or polypeptide or the consensus sequence or the polypeptide motif, as depicted in Table I, II or IV, application No. 17, column 5 or 8 in the respective same line as the nucleic acid molecule SEQ ID NO. 149632 or polypeptide SEQ ID NO. 149633, respectively, or a homolog or a fragment thereof, is increased or generated, or if the activity inositol-3-phosphate synthase is increased or generated in a non-human organism, like a microorganism or a plant cell, plant or part thereof, especially with non-targeted localization, whereby the respective line disclose in column 7 the fine chemical myo-inositol. For example, an increase of the myo-inositol of at least 1 percent, particularly in a range of 24 to 70-percent is conferred as compared to a corresponding non-transformed wild type non-human organism.

[88551] Accordingly, in one embodiment, an increase of sorbitol in a non-human organism, as compared to a corresponding non-transformed wild type non-human organism, is conferred in the process of the invention, if the activity of a polypeptide showing the activity of a hexose transporter, or if the activity of the polypeptide Yjl219w, preferably represented by SEQ ID NO. 97636, or a homolog or fragment thereof, or if the activity of a polypeptide encoded by a nucleic acid molecule comprising the nucleic acid SEQ ID NO. 97635, preferably the coding region thereof, or a homolog or fragment thereof, e.g. derived from Saccharomyces cerevisiae, is increased or generated. For example the activity of a nucleic acid molecule or a polypeptide comprising the nucleic acid, preferably the coding region thereof, or polypeptide or the consensus sequence or the polypeptide motif, as depicted in Table I, II or IV, application No. 17, column 5 or 8 in the respective same line as the nucleic acid molecule SEQ ID NO. 97635 or polypeptide SEQ ID NO. 97636, respectively, or a homolog or a fragment thereof, is increased or generated, or if the activity hexose transporter is increased or generated in a non-human organism, like a microorganism or a plant cell, plant or part thereof, especially with non-targeted localization, whereby the respective line disclose in column 7 the fine chemical sorbitol. For example, an increase of the sorbitol of at least 1 percent, particularly in a range of 121 to 350-percent is conferred as compared to a corresponding non-transformed wild type non-human organism.

[88552] Accordingly, in one embodiment, an increase of myo-inositol in a non-human organism, as compared to a corresponding non-transformed wild type non-human organism, is conferred in the process of the invention, if the activity of a polypeptide showing the activity of a protein kinase, or if the activity of the polypeptide Yjr066w, preferably represented by SEQ ID NO. 149802, or a homolog or fragment thereof, or if the activity of a polypeptide encoded by a nucleic acid molecule comprising the nucleic acid SEQ ID NO. 149801, preferably the coding region thereof, or a homolog or fragment thereof, e.g. derived from Saccharomyces cerevisiae, is increased or generated. For example the activity of a nucleic acid molecule or a polypeptide comprising the nucleic acid, preferably the coding region thereof, or polypeptide or the consensus sequence or the polypeptide motif, as depicted in Table I, II or IV, application No. 17, column 5 or 8 in the respective same line as the nucleic acid molecule SEQ ID NO. 149801 or polypeptide SEQ ID NO. 149802, respectively, or a homolog or a fragment thereof, is increased or generated, or if the activity protein kinase is increased or generated in a non-human organism, like a microorganism or a plant cell, plant or part thereof, especially with non-targeted localization, whereby the respective line disclose in column 7 the fine chemical myo-inositol. For example, an increase of the myo-inositol of at least 1 percent, particularly in a range of 26 to 87-percent is conferred as compared to a corresponding non-transformed wild type non-human organism.

[88553] Accordingly, in one embodiment, an increase of glucose in a non-human organism, as compared to a corresponding non-transformed wild type non-human organism, is conferred in the process of the invention, if the activity of a polypeptide showing the activity of a cystathionine gamma-synthase, or if the activity of the polypeptide Yjr130c, preferably represented by SEQ ID NO. 14844, or a homolog or fragment thereof, or if the activity of a polypeptide encoded by a nucleic acid molecule comprising the nucleic acid SEQ ID NO. 14843, preferably the coding region thereof, or a homolog or fragment thereof, e.g. derived from Saccharomyces cerevisiae, is increased or generated. For example the activity of a nucleic acid molecule or a polypeptide comprising the nucleic acid, preferably the coding region thereof, or polypeptide or the consensus sequence or the polypeptide motif, as depicted in Table I, II or IV, application No. 17, column 5 or 8 in the respective same line as the nucleic acid molecule SEQ ID NO. 14843 or polypeptide SEQ ID NO. 14844, respectively, or a homolog or a fragment thereof, is increased or generated, or if the activity cystathionine gamma-synthase is increased or generated in a non-human organism, like a microorganism or a plant cell, plant or part thereof, especially with non-targeted localization, whereby the respective line disclose in column 7 the fine chemical glucose. For example, an increase of the glucose of at least 1 percent, particularly in a range of 45 to 92-percent is conferred as compared to a corresponding non-transformed wild type non-human organism.

[88554] Accordingly, in one embodiment, an increase of fructose in a non-human organism, as compared to a corresponding non-transformed wild type non-human organism, is conferred in the process of the invention, if the activity of a polypeptide showing the activity of a fructose biphosphate aldolase, or if the activity of the polypeptide Ykl060c, preferably represented by SEQ ID NO. 149869, or a homolog or fragment thereof, or if the activity of a polypeptide encoded by a nucleic acid molecule comprising the nucleic acid SEQ ID NO. 149868, preferably the coding region thereof, or a homolog or fragment thereof, e.g. derived from Saccharomyces cerevisiae, is increased or generated. For example the activity of a nucleic acid molecule or a polypeptide comprising the nucleic acid, preferably the coding region thereof, or polypeptide or the consensus sequence or the polypeptide motif, as depicted in Table I, II or IV, application No. 17, column 5 or 8 in the respective same line as the nucleic acid molecule SEQ ID NO. 149868 or polypeptide SEQ ID NO. 149869, respectively, or a homolog or a fragment thereof, is increased or generated, or if the activity fructose biphosphate aldolase is increased or generated in a non-human organism, like a microorganism or a plant cell, plant or part thereof, especially with non-targeted localization, whereby the respective line disclose in column 7 the fine chemical fructose. For example, an increase of the fructose of at least 1 percent, particularly in a range of 82 to 133-percent is conferred as compared to a corresponding non-transformed wild type non-human organism.

[88555] Accordingly, in one embodiment, an increase of sedoheptulose-7-phosphate in a non-human organism, as compared to a corresponding non-transformed wild type non-human organism, is conferred in the process of the invention, if the activity of a polypeptide showing the activity of a fructose biphosphate aldolase, or if the activity of the polypeptide Ykl060c, preferably represented by SEQ ID NO. 149869, or a homolog or fragment thereof, or if the activity of a polypeptide encoded by a nucleic acid molecule comprising the nucleic acid SEQ ID NO. 149868, preferably the coding region thereof, or a homolog or fragment thereof, e.g. derived from Saccharomyces cerevisiae, is increased or generated. For example the activity of a nucleic acid molecule or a polypeptide comprising the nucleic acid, preferably the coding region thereof, or polypeptide or the consensus sequence or the polypeptide motif, as depicted in Table I, II or IV, application No. 17, column 5 or 8 in the respective same line as the nucleic acid molecule SEQ ID NO. 149868 or polypeptide SEQ ID NO. 149869, respectively, or a homolog or a fragment thereof, is increased or generated, or if the activity fructose biphosphate aldolase is increased or generated in a non-human organism, like a microorganism or a plant cell, plant or part thereof, especially with non-targeted localization, whereby the respective line disclose in column 7 the fine chemical sedoheptulose-7-phosphate. For example, an increase of the sedoheptulose-7-phosphate of at least 1 percent, particularly in a range of 43 to 61-percent is conferred as compared to a corresponding non-transformed wild type non-human organism.

[88556] Accordingly, in one embodiment, an increase of glucose-1-phosphate in a non-human organism, as compared to a corresponding non-transformed wild type non-human organism, is conferred in the process of the invention, if the activity of a polypeptide showing the activity of a acyl carrier protein, or if the activity of the polypeptide Ykl192c, preferably represented by SEQ ID NO. 150064, or a homolog or fragment thereof, or if the activity of a polypeptide encoded by a nucleic acid molecule comprising the nucleic acid SEQ ID NO. 150063, preferably the coding region thereof, or a homolog or fragment thereof, e.g. derived from Saccharomyces cerevisiae, is increased or generated. For example the activity of a nucleic acid molecule or a polypeptide comprising the nucleic acid, preferably the coding region thereof, or polypeptide or the consensus sequence or the polypeptide motif, as depicted in Table I, II or IV, application No. 17, column 5 or 8 in the respective same line as the nucleic acid molecule SEQ ID NO. 150063 or polypeptide SEQ ID NO. 150064, respectively, or a homolog or a fragment thereof, is increased or generated, or if the activity acyl carrier protein is increased or generated in a non-human organism, like a microorganism or a plant cell, plant or part thereof, especially with plastidic localization, whereby the respective line disclose in column 7 the fine chemical glucose-1-phosphate. For example, an increase of the glucose-1-phosphate of at least 1 percent, particularly in a range of 42 to 49-percent is conferred as compared to a corresponding non-transformed wild type non-human organism.

[88557] Accordingly, in one embodiment, an increase of sucrose in a non-human organism, as compared to a corresponding non-transformed wild type non-human organism, is conferred in the process of the invention, if the activity of a polypeptide showing the activity of a halotolerance protein, or if the activity of the polypeptide Ykr072c, preferably represented by SEQ ID NO. 130904, or a homolog or fragment thereof, or if the activity of a polypeptide encoded by a nucleic acid molecule comprising the nucleic acid SEQ ID NO. 130903, preferably the coding region thereof, or a homolog or fragment thereof, e.g. derived from Saccharomyces cerevisiae, is increased or generated. For example the activity of a nucleic acid molecule or a polypeptide comprising the nucleic acid, preferably the coding region thereof, or polypeptide or the consensus sequence or the polypeptide motif, as depicted in Table I, II or IV, application No. 17, column 5 or 8 in the respective same line as the nucleic acid molecule SEQ ID NO. 130903 or polypeptide SEQ ID NO. 130904, respectively, or a homolog or a fragment thereof, is increased or generated, or if the activity halotolerance protein is increased or generated in a non-human organism, like a microorganism or a plant cell, plant or part thereof, especially with non-targeted localization, whereby the respective line disclose in column 7 the fine chemical sucrose. For example, an increase of the sucrose of at least 1 percent, particularly in a range of 23 to 51-percent is conferred as compared to a corresponding non-transformed wild type non-human organism.

[88558] Accordingly, in one embodiment, an increase of glucose in a non-human organism, as compared to a corresponding non-transformed wild type non-human organism, is conferred in the process of the invention, if the activity of a polypeptide showing the activity of a phosphoenolpyruvate carboxykinase, or if the activity of the polypeptide Ykr097w, preferably represented by SEQ ID NO. 98076, or a homolog or fragment thereof, or if the activity of a polypeptide encoded by a nucleic acid molecule comprising the nucleic acid SEQ ID NO. 98075, preferably the coding region thereof, or a homolog or fragment thereof, e.g. derived from Saccharomyces cerevisiae, is increased or generated. For example the activity of a nucleic acid molecule or a polypeptide comprising the nucleic acid, preferably the coding region thereof, or polypeptide or the consensus sequence or the polypeptide motif, as depicted in Table I, II or IV, application No. 17, column 5 or 8 in the respective same line as the nucleic acid molecule SEQ ID NO. 98075 or polypeptide SEQ ID NO. 98076, respectively, or a homolog or a fragment thereof, is increased or generated, or if the activity phosphoenolpyruvate carboxykinase is increased or generated in a non-human organism, like a microorganism or a plant cell, plant or part thereof, especially with non-targeted localization, whereby the respective line disclose in column 7 the fine chemical glucose. For example, an increase of the glucose of at least 1 percent, particularly in a range of 62 to 110-percent is conferred as compared to a corresponding non-transformed wild type non-human organism.

[88559] Accordingly, in one embodiment, an increase of glucose in a non-human organism, as compared to a corresponding non-transformed wild type non-human organism, is conferred in the process of the invention, if the activity of a polypeptide showing the activity of a phosphoenolpyruvate carboxykinase, or if the activity of the polypeptide Ykr097w, preferably represented by SEQ ID NO. 98076, or a homolog or fragment thereof, or if the activity of a polypeptide encoded by a nucleic acid molecule comprising the nucleic acid SEQ ID NO. 98075, preferably the coding region thereof, or a homolog or fragment thereof, e.g. derived from Saccharomyces cerevisiae, is increased or generated. For example the activity of a nucleic acid molecule or a polypeptide comprising the nucleic acid, preferably the coding region thereof, or polypeptide or the consensus sequence or the polypeptide motif, as depicted in Table I, II or IV, application No. 17, column 5 or 8 in the respective same line as the nucleic acid molecule SEQ ID NO. 98075 or polypeptide SEQ ID NO. 98076, respectively, or a homolog or a fragment thereof, is increased or generated, or if the activity phosphoenolpyruvate carboxykinase is increased or generated in a non-human organism, like a microorganism or a plant cell, plant or part thereof, especially with plastidic localization, whereby the respective line disclose in column 7 the fine chemical glucose. For example, an increase of the glucose of at least 1 percent, particularly in a range of 70 to 93-percent is conferred as compared to a corresponding non-transformed wild type non-human organism.

[88560] Accordingly, in one embodiment, an increase of sucrose in a non-human organism, as compared to a corresponding non-transformed wild type non-human organism, is conferred in the process of the invention, if the activity of a polypeptide showing the activity of a vacuolar sorting protein, or if the activity of the polypeptide Ylr025w, preferably represented by SEQ ID NO. 150604, or a homolog or fragment thereof, or if the activity of a polypeptide encoded by a nucleic acid molecule comprising the nucleic acid SEQ ID NO. 150603, preferably the coding region thereof, or a homolog or fragment thereof, e.g. derived from Saccharomyces cerevisiae, is increased or generated. For example the activity of a nucleic acid molecule or a polypeptide comprising the nucleic acid, preferably the coding region thereof, or polypeptide or the consensus sequence or the polypeptide motif, as depicted in Table I, II or IV, application No. 17, column 5 or 8 in the respective same line as the nucleic acid molecule SEQ ID NO. 150603 or polypeptide SEQ ID NO. 150604, respectively, or a homolog or a fragment thereof, is increased or generated, or if the activity vacuolar sorting protein is increased or generated in a non-human organism, like a microorganism or a plant cell, plant or part thereof, especially with non-targeted localization, whereby the respective line disclose in column 7 the fine chemical sucrose. For example, an increase of the sucrose of at least 1 percent, particularly in a range of 31 to 31-percent is conferred as compared to a corresponding non-transformed wild type non-human organism.

[88561] Accordingly, in one embodiment, an increase of glucose-1-phosphate in a non-human organism, as compared to a corresponding non-transformed wild type non-human organism, is conferred in the process of the invention, if the activity of a polypeptide showing the activity of a thioredoxin, or if the activity of the polypeptide Ylr043c, preferably represented by SEQ ID NO. 91046, or a homolog or fragment thereof, or if the activity of a polypeptide encoded by a nucleic acid molecule comprising the nucleic acid SEQ ID NO. 91045, preferably the coding region thereof, or a homolog or fragment thereof, e.g. derived from Saccharomyces cerevisiae, is increased or generated. For example the activity of a nucleic acid molecule or a polypeptide comprising the nucleic acid, preferably the coding region thereof, or polypeptide or the consensus sequence or the polypeptide motif, as depicted in Table I, II or IV, application No. 17, column 5 or 8 in the respective same line as the nucleic acid molecule SEQ ID NO. 91045 or polypeptide SEQ ID NO. 91046, respectively, or a homolog or a fragment thereof, is increased or generated, or if the activity thioredoxin is increased or generated in a non-human organism, like a microorganism or a plant cell, plant or part thereof, especially with plastidic localization, whereby the respective line disclose in column 7 the fine chemical glucose-1-phosphate. For example, an increase of the glucose-1-phosphate of at least 1 percent, particularly in a range of 19 to 78-percent is conferred as compared to a corresponding non-transformed wild type non-human organism.

[88562] Accordingly, in one embodiment, an increase of fructose in a non-human organism, as compared to a corresponding non-transformed wild type non-human organism, is conferred in the process of the invention, if the activity of a polypeptide showing the activity of a hexose transporter, or if the activity of the polypeptide Ylr081w, preferably represented by SEQ ID NO. 150683, or a homolog or fragment thereof, or if the activity of a polypeptide encoded by a nucleic acid molecule comprising the nucleic acid SEQ ID NO. 150682, preferably the coding region thereof, or a homolog or fragment thereof, e.g. derived from Saccharomyces cerevisiae, is increased or generated. For example the activity of a nucleic acid molecule or a polypeptide comprising the nucleic acid, preferably the coding region thereof, or polypeptide or the consensus sequence or the polypeptide motif, as depicted in Table I, II or IV, application No. 17, column 5 or 8 in the respective same line as the nucleic acid molecule SEQ ID NO. 150682 or polypeptide SEQ ID NO. 150683, respectively, or a homolog or a fragment thereof, is increased or generated, or if the activity hexose transporter is increased or generated in a non-human organism, like a microorganism or a plant cell, plant or part thereof, especially with non-targeted localization, whereby the respective line disclose in column 7 the fine chemical fructose. For example, an increase of the fructose of at least 1 percent, particularly in a range of 68 to 128-percent is conferred as compared to a corresponding non-transformed wild type non-human organism.

[88563] Accordingly, in one embodiment, an increase of verbascose in a non-human organism, as compared to a corresponding non-transformed wild type non-human organism, is conferred in the process of the invention, if the activity of a polypeptide showing the activity of a purine biosynthesis protein, or if the activity of the polypeptide Ymr120c, preferably represented by SEQ ID NO. 91974, or a homolog or fragment thereof, or if the activity of a polypeptide encoded by a nucleic acid molecule comprising the nucleic acid SEQ ID NO. 91973, preferably the coding region thereof, or a homolog or fragment thereof, e.g. derived from Saccharomyces cerevisiae, is increased or generated. For example the activity of a nucleic acid molecule or a polypeptide comprising the nucleic acid, preferably the coding region thereof, or polypeptide or the consensus sequence or the polypeptide motif, as depicted in Table I, II or IV, application No. 17, column 5 or 8 in the respective same line as the nucleic acid molecule SEQ ID NO. 91973 or polypeptide SEQ ID NO. 91974, respectively, or a homolog or a fragment thereof, is increased or generated, or if the activity purine biosynthesis protein is increased or generated in a non-human organism, like a microorganism or a plant cell, plant or part thereof, especially with plastidic localization, whereby the respective line disclose in column 7 the fine chemical verbascose. For example, an increase of the verbascose of at least 1 percent, particularly in a range of 135 to 3405-percent is conferred as compared to a corresponding non-transformed wild type non-human organism.

[88564] Accordingly, in one embodiment, an increase of glucose-1-phosphate in a non-human organism, as compared to a corresponding non-transformed wild type non-human organism, is conferred in the process of the invention, if the activity of a polypeptide showing the activity of a ymr324c-protein, or if the activity of the polypeptide Ymr324c, preferably represented by SEQ ID NO. 130987, or a homolog or fragment thereof, or if the activity of a polypeptide encoded by a nucleic acid molecule comprising the nucleic acid SEQ ID NO. 130986, preferably the coding region thereof, or a homolog or fragment thereof, e.g. derived from Saccharomyces cerevisiae, is increased or generated. For example the activity of a nucleic acid molecule or a polypeptide comprising the nucleic acid, preferably the coding region thereof, or polypeptide or the consensus sequence or the polypeptide motif, as depicted in Table I, II or IV, application No. 17, column 5 or 8 in the respective same line as the nucleic acid molecule SEQ ID NO. 130986 or polypeptide SEQ ID NO. 130987, respectively, or a homolog or a fragment thereof, is increased or generated, or if the activity ymr324c-protein is increased or generated in a non-human organism, like a microorganism or a plant cell, plant or part thereof, especially with plastidic localization, whereby the respective line disclose in column 7 the fine chemical glucose-1-phosphate. For example, an increase of the glucose-1-phosphate of at least 1 percent, particularly in a range of 34 to 58-percent is conferred as compared to a corresponding non-transformed wild type non-human organism.

[88565] Accordingly, in one embodiment, an increase of myo-inositol in a non-human organism, as compared to a corresponding non-transformed wild type non-human organism, is conferred in the process of the invention, if the activity of a polypeptide showing the activity of a molecular chaperone, or if the activity of the polypeptide Ynl064c, preferably represented by SEQ ID NO. 117496, or a homolog or fragment thereof, or if the activity of a polypeptide encoded by a nucleic acid molecule comprising the nucleic acid SEQ ID NO. 117495, preferably the coding region thereof, or a homolog or fragment thereof, e.g. derived from Saccharomyces cerevisiae, is increased or generated. For example the activity of a nucleic acid molecule or a polypeptide comprising the nucleic acid, preferably the coding region thereof, or polypeptide or the consensus sequence or the polypeptide motif, as depicted in Table I, II or IV, application No. 17, column 5 or 8 in the respective same line as the nucleic acid molecule SEQ ID NO. 117495 or polypeptide SEQ ID NO. 117496, respectively, or a homolog or a fragment thereof, is increased or generated, or if the activity molecular chaperone is increased or generated in a non-human organism, like a microorganism or a plant cell, plant or part thereof, especially with non-targeted localization, whereby the respective line disclose in column 7 the fine chemical myo-inositol. For example, an increase of the myo-inositol of at least 1 percent, particularly in a range of 28 to 50-percent is conferred as compared to a corresponding non-transformed wild type non-human organism.

[88566] Accordingly, in one embodiment, an increase of sucrose in a non-human organism, as compared to a corresponding non-transformed wild type non-human organism, is conferred in the process of the invention, if the activity of a polypeptide showing the activity of a molecular chaperone, or if the activity of the polypeptide Ynl064c, preferably represented by SEQ ID NO. 117496, or a homolog or fragment thereof, or if the activity of a polypeptide encoded by a nucleic acid molecule comprising the nucleic acid SEQ ID NO. 117495, preferably the coding region thereof, or a homolog or fragment thereof, e.g. derived from Saccharomyces cerevisiae, is increased or generated. For example the activity of a nucleic acid molecule or a polypeptide comprising the nucleic acid, preferably the coding region thereof, or polypeptide or the consensus sequence or the polypeptide motif, as depicted in Table I, II or IV, application No. 17, column 5 or 8 in the respective same line as the nucleic acid molecule SEQ ID NO. 117495 or polypeptide SEQ ID NO. 117496, respectively, or a homolog or a fragment thereof, is increased or generated, or if the activity molecular chaperone is increased or generated in a non-human organism, like a microorganism or a plant cell, plant or part thereof, especially with non-targeted localization, whereby the respective line disclose in column 7 the fine chemical sucrose. For example, an increase of the sucrose of at least 1 percent, particularly in a range of 25 to 31-percent is conferred as compared to a corresponding non-transformed wild type non-human organism.

[88567] Accordingly, in one embodiment, an increase of raffinose in a non-human organism, as compared to a corresponding non-transformed wild type non-human organism, is conferred in the process of the invention, if the activity of a polypeptide showing the activity of a sterol O-acyltransferase, or if the activity of the polypeptide Ynr019w, preferably represented by SEQ ID NO. 67647, or a homolog or fragment thereof, or if the activity of a polypeptide encoded by a nucleic acid molecule comprising the nucleic acid SEQ ID NO. 67646, preferably the coding region thereof, or a homolog or fragment thereof, e.g. derived from Saccharomyces cerevisiae, is increased or generated. For example the activity of a nucleic acid molecule or a polypeptide comprising the nucleic acid, preferably the coding region thereof, or polypeptide or the consensus sequence or the polypeptide motif, as depicted in Table I, II or IV, application No. 17, column 5 or 8 in the respective same line as the nucleic acid molecule SEQ ID NO. 67646 or polypeptide SEQ ID NO. 67647, respectively, or a homolog or a fragment thereof, is increased or generated, or if the activity sterol O-acyltransferase is increased or generated in a non-human organism, like a microorganism or a plant cell, plant or part thereof, especially with plastidic localization, whereby the respective line disclose in column 7 the fine chemical raffinose. For example, an increase of the raffinose of at least 1 percent, particularly in a range of 64 to 132-percent is conferred as compared to a corresponding non-transformed wild type non-human organism.

[88568] Accordingly, in one embodiment, an increase of myo-inositol in a non-human organism, as compared to a corresponding non-transformed wild type non-human organism, is conferred in the process of the invention, if the activity of a polypeptide showing the activity of a yol160w-protein, or if the activity of the polypeptide Yol160w, preferably represented by SEQ ID NO. 15180, or a homolog or fragment thereof, or if the activity of a polypeptide encoded by a nucleic acid molecule comprising the nucleic acid SEQ ID NO. 15179, preferably the coding region thereof, or a homolog or fragment thereof, e.g. derived from Saccharomyces cerevisiae, is increased or generated. For example the activity of a nucleic acid molecule or a polypeptide comprising the nucleic acid, preferably the coding region thereof, or polypeptide or the consensus sequence or the polypeptide motif, as depicted in Table I, II or IV, application No. 17, column 5 or 8 in the respective same line as the nucleic acid molecule SEQ ID NO. 15179 or polypeptide SEQ ID NO. 15180, respectively, or a homolog or a fragment thereof, is increased or generated, or if the activity yol160w-protein is increased or generated in a non-human organism, like a microorganism or a plant cell, plant or part thereof, especially with plastidic localization, whereby the respective line disclose in column 7 the fine chemical myo-inositol. For example, an increase of the myo-inositol of at least 1 percent, particularly in a range of 27 to 30-percent is conferred as compared to a corresponding non-transformed wild type non-human organism.

[88569] Accordingly, in one embodiment, an increase of glucose in a non-human organism, as compared to a corresponding non-transformed wild type non-human organism, is conferred in the process of the invention, if the activity of a polypeptide showing the activity of a phosphohydrolase, or if the activity of the polypeptide Yor163w, preferably represented by SEQ ID NO. 151863, or a homolog or fragment thereof, or if the activity of a polypeptide encoded by a nucleic acid molecule comprising the nucleic acid SEQ ID NO. 151862, preferably the coding region thereof, or a homolog or fragment thereof, e.g. derived from Saccharomyces cerevisiae, is increased or generated. For example the activity of a nucleic acid molecule or a polypeptide comprising the nucleic acid, preferably the coding region thereof, or polypeptide or the consensus sequence or the polypeptide motif, as depicted in Table I, II or IV, application No. 17, column 5 or 8 in the respective same line as the nucleic acid molecule SEQ ID NO. 151862 or polypeptide SEQ ID NO. 151863, respectively, or a homolog or a fragment thereof, is increased or generated, or if the activity phosphohydrolase is increased or generated in a non-human organism, like a microorganism or a plant cell, plant or part thereof, especially with plastidic localization, whereby the respective line disclose in column 7 the fine chemical glucose. For example, an increase of the glucose of at least 1 percent, particularly in a range of 42 to 80-percent is conferred as compared to a corresponding non-transformed wild type non-human organism.

[88570] Accordingly, in one embodiment, an increase of glucose-1-phosphate in a non-human organism, as compared to a corresponding non-transformed wild type non-human organism, is conferred in the process of the invention, if the activity of a polypeptide showing the activity of a histone acetyltransferase, or if the activity of the polypeptide Yor244w, preferably represented by SEQ ID NO. 92541, or a homolog or fragment thereof, or if the activity of a polypeptide encoded by a nucleic acid molecule comprising the nucleic acid SEQ ID NO. 92540, preferably the coding region thereof, or a homolog or fragment thereof, e.g. derived from Saccharomyces cerevisiae, is increased or generated. For example the activity of a nucleic acid molecule or a polypeptide comprising the nucleic acid, preferably the coding region thereof, or polypeptide or the consensus sequence or the polypeptide motif, as depicted in Table I, II or IV, application No. 17, column 5 or 8 in the respective same line as the nucleic acid molecule SEQ ID NO. 92540 or polypeptide SEQ ID NO. 92541, respectively, or a homolog or a fragment thereof, is increased or generated, or if the activity histone acetyltransferase is increased or generated in a non-human organism, like a microorganism or a plant cell, plant or part thereof, especially with plastidic localization, whereby the respective line disclose in column 7 the fine chemical glucose-1-phosphate. For example, an increase of the glucose-1-phosphate of at least 1 percent, particularly in a range of 31 to 53-percent is conferred as compared to a corresponding non-transformed wild type non-human organism.

[88571] Accordingly, in one embodiment, an increase of 3,4,5-trihydroxypentanoic acid in a non-human organism, as compared to a corresponding non-transformed wild type non-human organism, is conferred in the process of the invention, if the activity of a polypeptide showing the activity of a subunit of COMPASS-protein complex, or if the activity of the polypeptide Ypl138c, preferably represented by SEQ ID NO. 151911, or a homolog or fragment thereof, or if the activity of a polypeptide encoded by a nucleic acid molecule comprising the nucleic acid SEQ ID NO. 151910, preferably the coding region thereof, or a homolog or fragment thereof, e.g. derived from Saccharomyces cerevisiae, is increased or generated. For example the activity of a nucleic acid molecule or a polypeptide comprising the nucleic acid, preferably the coding region thereof, or polypeptide or the consensus sequence or the polypeptide motif, as depicted in Table I, II or IV, application No. 17, column 5 or 8 in the respective same line as the nucleic acid molecule SEQ ID NO. 151910 or polypeptide SEQ ID NO. 151911, respectively, or a homolog or a fragment thereof, is increased or generated, or if the activity subunit of COMPASS-protein complex is increased or generated in a non-human organism, like a microorganism or a plant cell, plant or part thereof, especially with plastidic localization, whereby the respective line disclose in column 7 the fine chemical 3,4,5-trihydroxypentanoic acid. For example, an increase of the 3,4,5-trihydroxypentanoic acid of at least 1 percent, particularly in a range of 32 to 115-percent is conferred as compared to a corresponding non-transformed wild type non-human organism.

[88572] Accordingly, in one embodiment, an increase of glucose-1-phosphate in a non-human organism, as compared to a corresponding non-transformed wild type non-human organism, is conferred in the process of the invention, if the activity of a polypeptide showing the activity of a ypl144w-protein, or if the activity of the polypeptide Ypl144w, preferably represented by SEQ ID NO. 151928, or a homolog or fragment thereof, or if the activity of a polypeptide encoded by a nucleic acid molecule comprising the nucleic acid SEQ ID NO. 151927, preferably the coding region thereof, or a homolog or fragment thereof, e.g. derived from Saccharomyces cerevisiae, is increased or generated. For example the activity of a nucleic acid molecule or a polypeptide comprising the nucleic acid, preferably the coding region thereof, or polypeptide or the consensus sequence or the polypeptide motif, as depicted in Table I, II or IV, application No. 17, column 5 or 8 in the respective same line as the nucleic acid molecule SEQ ID NO. 151927 or polypeptide SEQ ID NO. 151928, respectively, or a homolog or a fragment thereof, is increased or generated, or if the activity ypl144w-protein is increased or generated in a non-human organism, like a microorganism or a plant cell, plant or part thereof, especially with plastidic localization, whereby the respective line disclose in column 7 the fine chemical glucose-1-phosphate. For example, an increase of the glucose-1-phosphate of at least 1 percent, particularly in a range of 33 to 71-percent is conferred as compared to a corresponding non-transformed wild type non-human organism.

[88573] Accordingly, in one embodiment, an increase of 3,4,5-trihydroxypentanoic acid in a non-human organism, as compared to a corresponding non-transformed wild type non-human organism, is conferred in the process of the invention, if the activity of a polypeptide showing the activity of a ypl144w-protein, or if the activity of the polypeptide Ypl144w, preferably represented by SEQ ID NO. 151928, or a homolog or fragment thereof, or if the activity of a polypeptide encoded by a nucleic acid molecule comprising the nucleic acid SEQ ID NO. 151927, preferably the coding region thereof, or a homolog or fragment thereof, e.g. derived from Saccharomyces cerevisiae, is increased or generated. For example the activity of a nucleic acid molecule or a polypeptide comprising the nucleic acid, preferably the coding region thereof, or polypeptide or the consensus sequence or the polypeptide motif, as depicted in Table I, II or IV, application No. 17, column 5 or 8 in the respective same line as the nucleic acid molecule SEQ ID NO. 151927 or polypeptide SEQ ID NO. 151928, respectively, or a homolog or a fragment thereof, is increased or generated, or if the activity ypl144w-protein is increased or generated in a non-human organism, like a microorganism or a plant cell, plant or part thereof, especially with plastidic localization, whereby the respective line disclose in column 7 the fine chemical 3,4,5-trihydroxypentanoic acid. For example, an increase of the 3,4,5-trihydroxypentanoic acid of at least 1 percent, particularly in a range of 36 to 66-percent is conferred as compared to a corresponding non-transformed wild type non-human organism.

[88574] Accordingly, in one embodiment, an increase of glucose-1-phosphate in a non-human organism, as compared to a corresponding non-transformed wild type non-human organism, is conferred in the process of the invention, if the activity of a polypeptide showing the activity of a ypr098c-protein, or if the activity of the polypeptide Ypr098c, preferably represented by SEQ ID NO. 151932, or a homolog or fragment thereof, or if the activity of a polypeptide encoded by a nucleic acid molecule comprising the nucleic acid SEQ ID NO. 151931, preferably the coding region thereof, or a homolog or fragment thereof, e.g. derived from Saccharomyces cerevisiae, is increased or generated. For example the activity of a nucleic acid molecule or a polypeptide comprising the nucleic acid, preferably the coding region thereof, or polypeptide or the consensus sequence or the polypeptide motif, as depicted in Table I, II or IV, application No. 17, column 5 or 8 in the respective same line as the nucleic acid molecule SEQ ID NO. 151931 or polypeptide SEQ ID NO. 151932, respectively, or a homolog or a fragment thereof, is increased or generated, or if the activity ypr098c-protein is increased or generated in a non-human organism, like a microorganism or a plant cell, plant or part thereof, especially with plastidic localization, whereby the respective line disclose in column 7 the fine chemical glucose-1-phosphate. For example, an increase of the glucose-1-phosphate of at least 1 percent, particularly in a range of 47 to 110-percent is conferred as compared to a corresponding non-transformed wild type non-human organism.

[88575] Accordingly, in one embodiment, an increase of 3,4,5-trihydroxypentanoic acid in a non-human organism, as compared to a corresponding non-transformed wild type non-human organism, is conferred in the process of the invention, if the activity of a polypeptide showing the activity of a ypr098c-protein, or if the activity of the polypeptide Ypr098c, preferably represented by SEQ ID NO. 151932, or a homolog or fragment thereof, or if the activity of a polypeptide encoded by a nucleic acid molecule comprising the nucleic acid SEQ ID NO. 151931, preferably the coding region thereof, or a homolog or fragment thereof, e.g. derived from Saccharomyces cerevisiae, is increased or generated. For example the activity of a nucleic acid molecule or a polypeptide comprising the nucleic acid, preferably the coding region thereof, or polypeptide or the consensus sequence or the polypeptide motif, as depicted in Table I, II or IV, application No. 17, column 5 or 8 in the respective same line as the nucleic acid molecule SEQ ID NO. 151931 or polypeptide SEQ ID NO. 151932, respectively, or a homolog or a fragment thereof, is increased or generated, or if the activity ypr098c-protein is increased or generated in a non-human organism, like a microorganism or a plant cell, plant or part thereof, especially with plastidic localization, whereby the respective line disclose in column 7 the fine chemical 3,4,5-trihydroxypentanoic acid. For example, an increase of the 3,4,5-trihydroxypentanoic acid of at least 1 percent, particularly in a range of 63 to 122-percent is conferred as compared to a corresponding non-transformed wild type non-human organism.

[88576] Accordingly, in one embodiment, an increase of glucose-1-phosphate in a non-human organism, as compared to a corresponding non-transformed wild type non-human organism, is conferred in the process of the invention, if the activity of a polypeptide showing the activity of a polyamine transporter, or if the activity of the polypeptide Ypr156c, preferably represented by SEQ ID NO. 151959, or a homolog or fragment thereof, or if the activity of a polypeptide encoded by a nucleic acid molecule comprising the nucleic acid SEQ ID NO. 151958, preferably the coding region thereof, or a homolog or fragment thereof, e.g. derived from Saccharomyces cerevisiae, is increased or generated. For example the activity of a nucleic acid molecule or a polypeptide comprising the nucleic acid, preferably the coding region thereof, or polypeptide or the consensus sequence or the polypeptide motif, as depicted in Table I, II or IV, application No. 17, column 5 or 8 in the respective same line as the nucleic acid molecule SEQ ID NO. 151958 or polypeptide SEQ ID NO. 151959, respectively, or a homolog or a fragment thereof, is increased or generated, or if the activity polyamine transporter is increased or generated in a non-human organism, like a microorganism or a plant cell, plant or part thereof, especially with plastidic localization, whereby the respective line disclose in column 7 the fine chemical glucose-1-phosphate. For example, an increase of the glucose-1-phosphate of at least 1 percent, particularly in a range of 19 to 58-percent is conferred as compared to a corresponding non-transformed wild type non-human organism.

[88577] Accordingly, in one embodiment, an increase of myo-inositol in a non-human organism, as compared to a corresponding non-transformed wild type non-human organism, is conferred in the process of the invention, if the activity of a polypeptide showing the activity of a polyamine transporter, or if the activity of the polypeptide Ypr156c, preferably represented by SEQ ID NO. 151959, or a homolog or fragment thereof, or if the activity of a polypeptide encoded by a nucleic acid molecule comprising the nucleic acid SEQ ID NO. 151958, preferably the coding region thereof, or a homolog or fragment thereof, e.g. derived from Saccharomyces cerevisiae, is increased or generated. For example the activity of a nucleic acid molecule or a polypeptide comprising the nucleic acid, preferably the coding region thereof, or polypeptide or the consensus sequence or the polypeptide motif, as depicted in Table I, II or IV, application No. 17, column 5 or 8 in the respective same line as the nucleic acid molecule SEQ ID NO. 151958 or polypeptide SEQ ID NO. 151959, respectively, or a homolog or a fragment thereof, is increased or generated, or if the activity polyamine transporter is increased or generated in a non-human organism, like a microorganism or a plant cell, plant or part thereof, especially with plastidic localization, whereby the respective line disclose in column 7 the fine chemical myo-inositol. For example, an increase of the myo-inositol of at least 1 percent, particularly in a range of 27 to 92-percent is conferred as compared to a corresponding non-transformed wild type non-human organism.

[88578] Accordingly, in one embodiment, an increase of fructose in a non-human organism, as compared to a corresponding non-transformed wild type non-human organism, is conferred in the process of the invention, if the activity of a polypeptide showing the activity of a Zm_{—}4842_BE510522-protein, or if the activity of the polypeptide Zm_{—}4842_BE510522, preferably represented by SEQ ID NO. 68414, or a homolog or fragment thereof, or if the activity of a polypeptide encoded by a nucleic acid molecule comprising the nucleic acid SEQ ID NO. 68413, preferably the coding region thereof, or a homolog or fragment thereof, e.g. derived from Zea mays, is increased or generated. For example the activity of a nucleic acid molecule or a polypeptide comprising the nucleic acid, preferably the coding region thereof, or polypeptide or the consensus sequence or the polypeptide motif, as depicted in Table I, II or IV, application No. 17, column 5 or 8 in the respective same line as the nucleic acid molecule SEQ ID NO. 68413 or polypeptide SEQ ID NO. 68414, respectively, or a homolog or a fragment thereof, is increased or generated, or if the activity Zm_{—}4842_BE510522-protein is increased or generated in a non-human organism, like a microorganism or a plant cell, plant or part thereof, especially with non-targeted localization, whereby the respective line disclose in column 7 the fine chemical fructose. For example, an increase of the fructose of at least 1 percent, particularly in a range of 106 to 493-percent is conferred as compared to a corresponding non-transformed wild type non-human organism.

[88579] Accordingly, in one embodiment, an increase of glucose in a non-human organism, as compared to a corresponding non-transformed wild type non-human organism, is conferred in the process of the invention, if the activity of a polypeptide showing the activity of a Zm_{—}4842_BE510522-protein, or if the activity of the polypeptide Zm_{—}4842_BE510522, preferably represented by SEQ ID NO. 68414, or a homolog or fragment thereof, or if the activity of a polypeptide encoded by a nucleic acid molecule comprising the nucleic acid SEQ ID NO. 68413, preferably the coding region thereof, or a homolog or fragment thereof, e.g. derived from Zea mays, is increased or generated. For example the activity of a nucleic acid molecule or a polypeptide comprising the nucleic acid, preferably the coding region thereof, or polypeptide or the consensus sequence or the polypeptide motif, as depicted in Table I, II or IV, application No. 17, column 5 or 8 in the respective same line as the nucleic acid molecule SEQ ID NO. 68413 or polypeptide SEQ ID NO. 68414, respectively, or a homolog or a fragment thereof, is increased or generated, or if the activity Zm_{—}4842_BE510522-protein is increased or generated in a non-human organism, like a microorganism or a plant cell, plant or part thereof, especially with non-targeted localization, whereby the respective line disclose in column 7 the fine chemical glucose. For example, an increase of the glucose of at least 1 percent, particularly in a range of 68 to 257-percent is conferred as compared to a corresponding non-transformed wild type non-human organism.

[88580] Accordingly, in one embodiment, an increase of myo-inositol in a non-human organism, as compared to a corresponding non-transformed wild type non-human organism, is conferred in the process of the invention, if the activity of a polypeptide showing the activity of a acetyltransferase, or if the activity of the polypeptide 44849766_CANOLA, preferably represented by SEQ ID NO. 140627, or a homolog or fragment thereof, or if the activity of a polypeptide encoded by a nucleic acid molecule comprising the nucleic acid SEQ ID NO. 140626, preferably the coding region thereof, or a homolog or fragment thereof, e.g. derived from Brassica napus, is increased or generated. For example the activity of a nucleic acid molecule or a polypeptide comprising the nucleic acid, preferably the coding region thereof, or polypeptide or the consensus sequence or the polypeptide motif, as depicted in Table I, II or IV, application No. 17, column 5 or 8 in the respective same line as the nucleic acid molecule SEQ ID NO. 140626 or polypeptide SEQ ID NO. 140627, respectively, or a homolog or a fragment thereof, is increased or generated, or if the activity acetyltransferase is increased or generated in a non-human organism, like a microorganism or a plant cell, plant or part thereof, especially with plastidic localization, whereby the respective line disclose in column 7 the fine chemical myo-inositol. For example, an increase of the myo-inositol of at least 1 percent, particularly in a range of 36 to 104-percent is conferred as compared to a corresponding non-transformed wild type non-human organism.

[88581] Accordingly, in one embodiment, an increase of fructose in a non-human organism, as compared to a corresponding non-transformed wild type non-human organism, is conferred in the process of the invention, if the activity of a polypeptide showing the activity of a 47266012-protein, or if the activity of the polypeptide 47266012_SOYBEAN, preferably represented by SEQ ID NO. 15188, or a homolog or fragment thereof, or if the activity of a polypeptide encoded by a nucleic acid molecule comprising the nucleic acid SEQ ID NO. 15187, preferably the coding region thereof, or a homolog or fragment thereof, e.g. derived from Glycine max, is increased or generated. For example the activity of a nucleic acid molecule or a polypeptide comprising the nucleic acid, preferably the coding region thereof, or polypeptide or the consensus sequence or the polypeptide motif, as depicted in Table I, II or IV, application No. 17, column 5 or 8 in the respective same line as the nucleic acid molecule SEQ ID NO. 15187 or polypeptide SEQ ID NO. 15188, respectively, or a homolog or a fragment thereof, is increased or generated, or if the activity 47266012-protein is increased or generated in a non-human organism, like a microorganism or a plant cell, plant or part thereof, especially with non-targeted localization, whereby the respective line disclose in column 7 the fine chemical fructose. For example, an increase of the fructose of at least 1 percent, particularly in a range of 78 to 200-percent is conferred as compared to a corresponding non-transformed wild type non-human organism.

[88582] Accordingly, in one embodiment, an increase of glucose in a non-human organism, as compared to a corresponding non-transformed wild type non-human organism, is conferred in the process of the invention, if the activity of a polypeptide showing the activity of a 47266012-protein, or if the activity of the polypeptide 47266012_SOYBEAN, preferably represented by SEQ ID NO. 15188, or a homolog or fragment thereof, or if the activity of a polypeptide encoded by a nucleic acid molecule comprising the nucleic acid SEQ ID NO. 15187, preferably the coding region thereof, or a homolog or fragment thereof, e.g. derived from Glycine max, is increased or generated. For example the activity of a nucleic acid molecule or a polypeptide comprising the nucleic acid, preferably the coding region thereof, or polypeptide or the consensus sequence or the polypeptide motif, as depicted in Table I, II or IV, application No. 17, column 5 or 8 in the respective same line as the nucleic acid molecule SEQ ID NO. 15187 or polypeptide SEQ ID NO. 15188, respectively, or a homolog or a fragment thereof, is increased or generated, or if the activity 47266012-protein is increased or generated in a non-human organism, like a microorganism or a plant cell, plant or part thereof, especially with non-targeted localization, whereby the respective line disclose in column 7 the fine chemical glucose. For example, an increase of the glucose of at least 1 percent, particularly in a range of 60 to 140-percent is conferred as compared to a corresponding non-transformed wild type non-human organism.

[88583] Accordingly, in one embodiment, an increase of glucose-1-phosphate in a non-human organism, as compared to a corresponding non-transformed wild type non-human organism, is conferred in the process of the invention, if the activity of a polypeptide showing the activity of a 47266012-protein, or if the activity of the polypeptide 47266012_SOYBEAN, preferably represented by SEQ ID NO. 15188, or a homolog or fragment thereof, or if the activity of a polypeptide encoded by a nucleic acid molecule comprising the nucleic acid SEQ ID NO. 15187, preferably the coding region thereof, or a homolog or fragment thereof, e.g. derived from Glycine max, is increased or generated. For example the activity of a nucleic acid molecule or a polypeptide comprising the nucleic acid, preferably the coding region thereof, or polypeptide or the consensus sequence or the polypeptide motif, as depicted in Table I, II or IV, application No. 17, column 5 or 8 in the respective same line as the nucleic acid molecule SEQ ID NO. 15187 or polypeptide SEQ ID NO. 15188, respectively, or a homolog or a fragment thereof, is increased or generated, or if the activity 47266012-protein is increased or generated in a non-human organism, like a microorganism or a plant cell, plant or part thereof, especially with non-targeted localization, whereby the respective line disclose in column 7 the fine chemical glucose-1-phosphate. For example, an increase of the glucose-1-phosphate of at least 1 percent, particularly in a range of 21 to 69-percent is conferred as compared to a corresponding non-transformed wild type non-human organism.

[88584] Accordingly, in one embodiment, an increase of myo-inositol in a non-human organism, as compared to a corresponding non-transformed wild type non-human organism, is conferred in the process of the invention, if the activity of a polypeptide showing the activity of a 47266012-protein, or if the activity of the polypeptide 47266012_SOYBEAN, preferably represented by SEQ ID NO. 15188, or a homolog or fragment thereof, or if the activity of a polypeptide encoded by a nucleic acid molecule comprising the nucleic acid SEQ ID NO. 15187, preferably the coding region thereof, or a homolog or fragment thereof, e.g. derived from Glycine max, is increased or generated. For example the activity of a nucleic acid molecule or a polypeptide comprising the nucleic acid, preferably the coding region thereof, or polypeptide or the consensus sequence or the polypeptide motif, as depicted in Table I, II or IV, application No. 17, column 5 or 8 in the respective same line as the nucleic acid molecule SEQ ID NO. 15187 or polypeptide SEQ ID NO. 15188, respectively, or a homolog or a fragment thereof, is increased or generated, or if the activity 47266012-protein is increased or generated in a non-human organism, like a microorganism or a plant cell, plant or part thereof, especially with non-targeted localization, whereby the respective line disclose in column 7 the fine chemical myo-inositol. For example, an increase of the myo-inositol of at least 1 percent, particularly in a range of 27 to 62-percent is conferred as compared to a corresponding non-transformed wild type non-human organism.

[88585] Accordingly, in one embodiment, an increase of sedoheptulose-7-phosphate in a non-human organism, as compared to a corresponding non-transformed wild type non-human organism, is conferred in the process of the invention, if the activity of a polypeptide showing the activity of a 47266012-protein, or if the activity of the polypeptide 47266012_SOYBEAN, preferably represented by SEQ ID NO. 15188, or a homolog or fragment thereof, or if the activity of a polypeptide encoded by a nucleic acid molecule comprising the nucleic acid SEQ ID NO. 15187, preferably the coding region thereof, or a homolog or fragment thereof, e.g. derived from Glycine max, is increased or generated. For example the activity of a nucleic acid molecule or a polypeptide comprising the nucleic acid, preferably the coding region thereof, or polypeptide or the consensus sequence or the polypeptide motif, as depicted in Table I, II or IV, application No. 17, column 5 or 8 in the respective same line as the nucleic acid molecule SEQ ID NO. 15187 or polypeptide SEQ ID NO. 15188, respectively, or a homolog or a fragment thereof, is increased or generated, or if the activity 47266012-protein is increased or generated in a non-human organism, like a microorganism or a plant cell, plant or part thereof, especially with non-targeted localization, whereby the respective line disclose in column 7 the fine chemical sedoheptulose7-phosphate. For example, an increase of the sedoheptulose-7-phosphate of at least 1 percent, particularly in a range of 48 to 72-percent is conferred as compared to a corresponding non-transformed wild type non-human organism.

[88586] Accordingly, in one embodiment, an increase of glucose in a non-human organism, as compared to a corresponding non-transformed wild type non-human organism, is conferred in the process of the invention, if the activity of a polypeptide showing the activity of a 49747384_SOYBEAN-protein, or if the activity of the polypeptide 49747384_SOYBEAN, preferably represented by SEQ ID NO. 70, or a homolog or fragment thereof, or if the activity of a polypeptide encoded by a nucleic acid molecule comprising the nucleic acid SEQ ID NO. 69, preferably the coding region thereof, or a homolog or fragment thereof, e.g. derived from Glycine max, is increased or generated. For example the activity of a nucleic acid molecule or a polypeptide comprising the nucleic acid, preferably the coding region thereof, or polypeptide or the consensus sequence or the polypeptide motif, as depicted in Table I, II or IV, application No. 17, column 5 or 8 in the respective same line as the nucleic acid molecule SEQ ID NO. 69 or polypeptide SEQ ID NO. 70, respectively, or a homolog or a fragment thereof, is increased or generated, or if the activity 49747384_SOYBEAN-protein is increased or generated in a non-human organism, like a microorganism or a plant cell, plant or part thereof, especially with non-targeted localization, whereby the respective line disclose in column 7 the fine chemical glucose. For example, an increase of the glucose of at least 1 percent, particularly in a range of 101 to 120-percent is conferred as compared to a corresponding non-transformed wild type non-human organism.

[88587] Accordingly, in one embodiment, an increase of glucose-1-phosphate in a non-human organism, as compared to a corresponding non-transformed wild type non-human organism, is conferred in the process of the invention, if the activity of a polypeptide showing the activity of a 49747384_SOYBEAN-protein, or if the activity of the polypeptide 49747384_SOYBEAN, preferably represented by SEQ ID NO. 70, or a homolog or fragment thereof, or if the activity of a polypeptide encoded by a nucleic acid molecule comprising the nucleic acid SEQ ID NO. 69, preferably the coding region thereof, or a homolog or fragment thereof, e.g. derived from Glycine max, is increased or generated. For example the activity of a nucleic acid molecule or a polypeptide comprising the nucleic acid, preferably the coding region thereof, or polypeptide or the consensus sequence or the polypeptide motif, as depicted in Table I, II or IV, application No. 17, column 5 or 8 in the respective same line as the nucleic acid molecule SEQ ID NO. 69 or polypeptide SEQ ID NO. 70, respectively, or a homolog or a fragment thereof, is increased or generated, or if the activity 49747384_SOYBEAN-protein is increased or generated in a non-human organism, like a microorganism or a plant cell, plant or part thereof, especially with non-targeted localization, whereby the respective line disclose in column 7 the fine chemical glucose-1-phosphate. For example, an increase of the glucose-1-phosphate of at least 1 percent, particularly in a range of 27 to 72-percent is conferred as compared to a corresponding non-transformed wild type non-human organism.

[88588] Accordingly, in one embodiment, an increase of myo-inositol in a non-human organism, as compared to a corresponding non-transformed wild type non-human organism, is conferred in the process of the invention, if the activity of a polypeptide showing the activity of a 49747384_SOYBEAN-protein, or if the activity of the polypeptide 49747384_SOYBEAN, preferably represented by SEQ ID NO. 70, or a homolog or fragment thereof, or if the activity of a polypeptide encoded by a nucleic acid molecule comprising the nucleic acid SEQ ID NO. 69, preferably the coding region thereof, or a homolog or fragment thereof, e.g. derived from Glycine max, is increased or generated. For example the activity of a nucleic acid molecule or a polypeptide comprising the nucleic acid, preferably the coding region thereof, or polypeptide or the consensus sequence or the polypeptide motif, as depicted in Table I, II or IV, application No. 17, column 5 or 8 in the respective same line as the nucleic acid molecule SEQ ID NO. 69 or polypeptide SEQ ID NO. 70, respectively, or a homolog or a fragment thereof, is increased or generated, or if the activity 49747384_SOYBEAN-protein is increased or generated in a non-human organism, like a microorganism or a plant cell, plant or part thereof, especially with non-targeted localization, whereby the respective line disclose in column 7 the fine chemical myo-inositol. For example, an increase of the myo-inositol of at least 1 percent, particularly in a range of 33 to 71-percent is conferred as compared to a corresponding non-transformed wild type non-human organism.

[88589] Accordingly, in one embodiment, an increase of raffinose in a non-human organism, as compared to a corresponding non-transformed wild type non-human organism, is conferred in the process of the invention, if the activity of a polypeptide showing the activity of a 49747384_SOYBEAN-protein, or if the activity of the polypeptide 49747384_SOYBEAN, preferably represented by SEQ ID NO. 70, or a homolog or fragment thereof, or if the activity of a polypeptide encoded by a nucleic acid molecule comprising the nucleic acid SEQ ID NO. 69, preferably the coding region thereof, or a homolog or fragment thereof, e.g. derived from Glycine max, is increased or generated. For example the activity of a nucleic acid molecule or a polypeptide comprising the nucleic acid, preferably the coding region thereof, or polypeptide or the consensus sequence or the polypeptide motif, as depicted in Table I, II or IV, application No. 17, column 5 or 8 in the respective same line as the nucleic acid molecule SEQ ID NO. 69 or polypeptide SEQ ID NO. 70, respectively, or a homolog or a fragment thereof, is increased or generated, or if the activity 49747384_SOYBEAN-protein is increased or generated in a non-human organism, like a microorganism or a plant cell, plant or part thereof, especially with non-targeted localization, whereby the respective line disclose in column 7 the fine chemical raffinose. For example, an increase of the raffinose of at least 1 percent, particularly in a range of 64 to 155-percent is conferred as compared to a corresponding non-transformed wild type non-human organism.

[88590] Accordingly, in one embodiment, an increase of sedoheptulose-7-phosphate in a non-human organism, as compared to a corresponding non-transformed wild type non-human organism, is conferred in the process of the invention, if the activity of a polypeptide showing the activity of a 49747384_SOYBEAN-protein, or if the activity of the polypeptide 49747384_SOYBEAN, preferably represented by SEQ ID NO. 70, or a homolog or fragment thereof, or if the activity of a polypeptide encoded by a nucleic acid molecule comprising the nucleic acid SEQ ID NO. 69, preferably the coding region thereof, or a homolog or fragment thereof, e.g. derived from Glycine max, is increased or generated. For example the activity of a nucleic acid molecule or a polypeptide comprising the nucleic acid, preferably the coding region thereof, or polypeptide or the consensus sequence or the polypeptide motif, as depicted in Table I, II or IV, application No. 17, column 5 or 8 in the respective same line as the nucleic acid molecule SEQ ID NO. 69 or polypeptide SEQ ID NO. 70, respectively, or a homolog or a fragment thereof, is increased or generated, or if the activity 49747384_SOYBEAN-protein is increased or generated in a non-human organism, like a microorganism or a plant cell, plant or part thereof, especially with non-targeted localization, whereby the respective line disclose in column 7 the fine chemical sedoheptulose-7-phosphate. For example, an increase of the sedoheptulose-7-phosphate of at least 1-percent, particularly in a range of 46 to 85-percent is conferred as compared to a corresponding non-transformed wild type non-human organism.

[88591] Accordingly, in one embodiment, an increase of fructose in a non-human organism, as compared to a corresponding non-transformed wild type non-human organism, is conferred in the process of the invention, if the activity of a polypeptide showing the activity of a glucose-6-phosphate 1-dehydrogenase, or if the activity of the polypeptide 59582753_SOYBEAN, preferably represented by SEQ ID NO. 16884, or a homolog or fragment thereof, or if the activity of a polypeptide encoded by a nucleic acid molecule comprising the nucleic acid SEQ ID NO. 16883, preferably the coding region thereof, or a homolog or fragment thereof, e.g. derived from Glycine max, is increased or generated. For example the activity of a nucleic acid molecule or a polypeptide comprising the nucleic acid, preferably the coding region thereof, or polypeptide or the consensus sequence or the polypeptide motif, as depicted in Table I, II or IV, application No. 17, column 5 or 8 in the respective same line as the nucleic acid molecule SEQ ID NO. 16883 or polypeptide SEQ ID NO. 16884, respectively, or a homolog or a fragment thereof, is increased or generated, or if the activity glucose-6-phosphate 1-dehydrogenase is increased or generated in a non-human organism, like a microorganism or a plant cell, plant or part thereof, especially with plastidic localization, whereby the respective line disclose in column 7 the fine chemical fructose. For example, an increase of the fructose of at least 1 percent, particularly in a range of 77 to 404-percent is conferred as compared to a corresponding non-transformed wild type non-human organism.

[88592] Accordingly, in one embodiment, an increase of glucose in a non-human organism, as compared to a corresponding non-transformed wild type non-human organism, is conferred in the process of the invention, if the activity of a polypeptide showing the activity of a glucose-6-phosphate 1-dehydrogenase, or if the activity of the polypeptide 59582753_SOYBEAN, preferably represented by SEQ ID NO. 16884, or a homolog or fragment thereof, or if the activity of a polypeptide encoded by a nucleic acid molecule comprising the nucleic acid SEQ ID NO. 16883, preferably the coding region thereof, or a homolog or fragment thereof, e.g. derived from Glycine max, is increased or generated. For example the activity of a nucleic acid molecule or a polypeptide comprising the nucleic acid, preferably the coding region thereof, or polypeptide or the consensus sequence or the polypeptide motif, as depicted in Table I, II or IV, application No. 17, column 5 or 8 in the respective same line as the nucleic acid molecule SEQ ID NO. 16883 or polypeptide SEQ ID NO. 16884, respectively, or a homolog or a fragment thereof, is increased or generated, or if the activity glucose-6-phosphate 1-dehydrogenase is increased or generated in a non-human organism, like a microorganism or a plant cell, plant or part thereof, especially with plastidic localization, whereby the respective line disclose in column 7 the fine chemical glucose. For example, an increase of the glucose of at least 1 percent, particularly in a range of 98 to 367-percent is conferred as compared to a corresponding non-transformed wild type non-human organism.

[88593] Accordingly, in one embodiment, an increase of glucose-1-phosphate in a non-human organism, as compared to a corresponding non-transformed wild type non-human organism, is conferred in the process of the invention, if the activity of a polypeptide showing the activity of a glucose-6-phosphate 1-dehydrogenase, or if the activity of the polypeptide 59582753_SOYBEAN, preferably represented by SEQ ID NO. 16884, or a homolog or fragment thereof, or if the activity of a polypeptide encoded by a nucleic acid molecule comprising the nucleic acid SEQ ID NO. 16883, preferably the coding region thereof, or a homolog or fragment thereof, e.g. derived from Glycine max, is increased or generated. For example the activity of a nucleic acid molecule or a polypeptide comprising the nucleic acid, preferably the coding region thereof, or polypeptide or the consensus sequence or the polypeptide motif, as depicted in Table I, II or IV, application No. 17, column 5 or 8 in the respective same line as the nucleic acid molecule SEQ ID NO. 16883 or polypeptide SEQ ID NO. 16884, respectively, or a homolog or a fragment thereof, is increased or generated, or if the activity glucose-6-phosphate 1-dehydrogenase is increased or generated in a non-human organism, like a microorganism or a plant cell, plant or part thereof, especially with plastidic localization, whereby the respective line disclose in column 7 the fine chemical glucose-1-phosphate. For example, an increase of the glucose-1-phosphate of at least 1 percent, particularly in a range of 32 to 101-percent is conferred as compared to a corresponding non-transformed wild type non-human organism.

[88594] Accordingly, in one embodiment, an increase of sedoheptulose-7-phosphate in a non-human organism, as compared to a corresponding non-transformed wild type non-human organism, is conferred in the process of the invention, if the activity of a polypeptide showing the activity of a glucose-6-phosphate 1-dehydrogenase, or if the activity of the polypeptide 59582753_SOYBEAN, preferably represented by SEQ ID NO. 16884, or a homolog or fragment thereof, or if the activity of a polypeptide encoded by a nucleic acid molecule comprising the nucleic acid SEQ ID NO. 16883, preferably the coding region thereof, or a homolog or fragment thereof, e.g. derived from Glycine max, is increased or generated. For example the activity of a nucleic acid molecule or a polypeptide comprising the nucleic acid, preferably the coding region thereof, or polypeptide or the consensus sequence or the polypeptide motif, as depicted in Table I, II or IV, application No. 17, column 5 or 8 in the respective same line as the nucleic acid molecule SEQ ID NO. 16883 or polypeptide SEQ ID NO. 16884, respectively, or a homolog or a fragment thereof, is increased or generated, or if the activity glucose-6-phosphate 1-dehydrogenase is increased or generated in a non-human organism, like a microorganism or a plant cell, plant or part thereof, especially with plastidic localization, whereby the respective line disclose in column 7 the fine chemical sedoheptulose-7-phosphate. For example, an increase of the sedoheptulose-7-phosphate of at least 1 percent, particularly in a range of 56 to 350-percent is conferred as compared to a corresponding non-transformed wild type non-human organism.

[88595] Accordingly, in one embodiment, an increase of sucrose in a non-human organism, as compared to a corresponding non-transformed wild type non-human organism, is conferred in the process of the invention, if the activity of a polypeptide showing the activity of a glucose-6-phosphate 1-dehydrogenase, or if the activity of the polypeptide 59582753_SOYBEAN, preferably represented by SEQ ID NO. 16884, or a homolog or fragment thereof, or if the activity of a polypeptide encoded by a nucleic acid molecule comprising the nucleic acid SEQ ID NO. 16883, preferably the coding region thereof, or a homolog or fragment thereof, e.g. derived from Glycine max, is increased or generated. For example the activity of a nucleic acid molecule or a polypeptide comprising the nucleic acid, preferably the coding region thereof, or polypeptide or the consensus sequence or the polypeptide motif, as depicted in Table I, II or IV, application No. 17, column 5 or 8 in the respective same line as the nucleic acid molecule SEQ ID NO. 16883 or polypeptide SEQ ID NO. 16884, respectively, or a homolog or a fragment thereof, is increased or generated, or if the activity glucose-6-phosphate 1-dehydrogenase is increased or generated in a non-human organism, like a microorganism or a plant cell, plant or part thereof, especially with plastidic localization, whereby the respective line disclose in column 7 the fine chemical sucrose. For example, an increase of the sucrose of at least 1 percent, particularly in a range of 30 to 79-percent is conferred as compared to a corresponding non-transformed wild type non-human organism.

[88596] Accordingly, in one embodiment, an increase of 3,4,5-trihydroxypentanoic acid in a non-human organism, as compared to a corresponding non-transformed wild type non-human organism, is conferred in the process of the invention, if the activity of a polypeptide showing the activity of a glucose-6-phosphate 1-dehydrogenase, or if the activity of the polypeptide 59582753_SOYBEAN, preferably represented by SEQ ID NO. 16884, or a homolog or fragment thereof, or if the activity of a polypeptide encoded by a nucleic acid molecule comprising the nucleic acid SEQ ID NO. 16883, preferably the coding region thereof, or a homolog or fragment thereof, e.g. derived from Glycine max, is increased or generated. For example the activity of a nucleic acid molecule or a polypeptide comprising the nucleic acid, preferably the coding region thereof, or polypeptide or the consensus sequence or the polypeptide motif, as depicted in Table I, II or IV, application No. 17, column 5 or 8 in the respective same line as the nucleic acid molecule SEQ ID NO. 16883 or polypeptide SEQ ID NO. 16884, respectively, or a homolog or a fragment thereof, is increased or generated, or if the activity glucose-6-phosphate 1-dehydrogenase is increased or generated in a non-human organism, like a microorganism or a plant cell, plant or part thereof, especially with plastidic localization, whereby the respective line disclose in column 7 the fine chemical 3,4,5-trihydroxypentanoic acid. For example, an increase of the 3,4,5-trihydroxypentanoic acid of at least 1 percent, particularly in a range of 37 to 139-percent is conferred as compared to a corresponding non-transformed wild type non-human organism.

[88597] Accordingly, in one embodiment, an increase of fructose in a non-human organism, as compared to a corresponding non-transformed wild type non-human organism, is conferred in the process of the invention, if the activity of a polypeptide showing the activity of a DNA replication complex GINS protein, or if the activity of the polypeptide YJL072C, preferably represented by SEQ ID NO. 149529, or a homolog or fragment thereof, or if the activity of a polypeptide encoded by a nucleic acid molecule comprising the nucleic acid SEQ ID NO. 149528, preferably the coding region thereof, or a homolog or fragment thereof, e.g. derived from Saccharomyces cerevisiae, is increased or generated. For example the activity of a nucleic acid molecule or a polypeptide comprising the nucleic acid, preferably the coding region thereof, or polypeptide or the consensus sequence or the polypeptide motif, as depicted in Table I, II or IV, application No. 17, column 5 or 8 in the respective same line as the nucleic acid molecule SEQ ID NO. 149528 or polypeptide SEQ ID NO. 149529, respectively, or a homolog or a fragment thereof, is increased or generated, or if the activity DNA replication complex GINS protein is increased or generated in a non-human organism, like a microorganism or a plant cell, plant or part thereof, especially with non-targeted localization, whereby the respective line disclose in column 7 the fine chemical fructose. For example, an increase of the fructose of at least 1 percent, particularly in a range of 1 to 418-percent is conferred as compared to a corresponding non-transformed wild type non-human organism.

[88598] Accordingly, in one embodiment, an increase of glucose in a non-human organism, as compared to a corresponding non-transformed wild type non-human organism, is conferred in the process of the invention, if the activity of a polypeptide showing the activity of a acetyl CoA synthetase, or if the activity of the polypeptide YLR153C, preferably represented by SEQ ID NO. 150961, or a homolog or fragment thereof, or if the activity of a polypeptide encoded by a nucleic acid molecule comprising the nucleic acid SEQ ID NO. 150960, preferably the coding region thereof, or a homolog or fragment thereof, e.g. derived from Saccharomyces cerevisiae, is increased or generated. For example the activity of a nucleic acid molecule or a polypeptide comprising the nucleic acid, preferably the coding region thereof, or polypeptide or the consensus sequence or the polypeptide motif, as depicted in Table I, II or IV, application No. 17, column 5 or 8 in the respective same line as the nucleic acid molecule SEQ ID NO. 150960 or polypeptide SEQ ID NO. 150961, respectively, or a homolog or a fragment thereof, is increased or generated, or if the activity acetyl CoA synthetase is increased or generated in a non-human organism, like a microorganism or a plant cell, plant or part thereof, especially with plastidic localization, whereby the respective line disclose in column 7 the fine chemical glucose. For example, an increase of the glucose of at least 1 percent, particularly in a range of 12 to 372-percent is conferred as compared to a corresponding non-transformed wild type non-human organism.

[88599] [0096.1.7.17] to for the disclosure of these paragraphs see [0096.1.7.7] to [0103.1.7.7] above

[88600] In this paragraph “A” means “Goffeau et al., Science 274 (5287), 546 (1996)”, “B” means “Blattner et al., Science 277 (5331), 1453 (1997)”, “C” means “Nakamura et al., Nucleic Acids Res. 28(1), 72 (2000)”, “D” means “deposition of the sequences to the EMBL/GenBank/DDBJ databases under “Sequencing of the draft genome assembly of Azotobacter vinelandii AvOP”. in June 2005 by Copeland et al.”, “E” means “Henne et al., Nat. Biotechnol. 22 (5), 547 (2004)”, “F” means “Kaul et al., Nature 408 (6814), 796 (2000)”, and “G” means “Matsumoto et al., Nature 436 (7052), 793 (2005)”.

[88601] The nucleic acid sequence of Atgols2 from Arabidopsis thaliana, e.g. as shown in the respective line in column 5 of Table I, application no. 17, has been published in F. And the activity of the gene product thereof is the activity of galactinol synthase.

[88602] Accordingly, in one embodiment, the process of the present invention for producing raffinose in a non-human organism, like a microorganism or a plant or a part thereof, comprises increasing or generating the activity of a gene product with the activity of a gene product conferring the activity of “galactinol synthase”, especially from Arabidopsis thaliana or its functional equivalent or its homolog, e.g. the increase of
[88603] (a) a gene product of a gene comprising the nucleic acid molecule as shown in the respective line in column 5 of Table I (whereby the respective line disclose in column 7 the fine chemical raffinose), application no. 17, preferably the coding region thereof, or a homolog or a fragment thereof, and being depicted in the same respective line as said Atgols2, or a functional equivalent or a homolog thereof as shown in column 8 of Table I, application no. 17, preferably the coding region thereof, particularly a homolog or functional equivalent as shown in column 8 of Table I B, application no. 17, and being depicted in the same respective line as said Atgols2, and preferably the activity is increased non-targeted, or
[88604] (b) a polypeptide comprising a polypeptide, a consensus sequence or at least a polypeptide motif as shown in the respective line in column 5 of Table II or in column 8 of Table IV, application no. 17, respectively, and being depicted in the same respective line as said Atgols2, or a functional equivalent or a homolog thereof as depicted in column 8 of Table II, application no. 17, preferably a homolog or functional equivalent as depicted in column 8 of Table II B, application no. 17, and being depicted in the same respective line as said Atgols2, and preferably the activity is increased non-targeted, whereby the respective line disclose in column 7 the fine chemical raffinose.

[88605] Accordingly, in one embodiment, the molecule which activity is to be increased in the process of the invention is the gene product with an activity as a “galactinol synthase”, preferably it is the molecule of section (a) or (b) of this paragraph.

[88606] In particular, it was observed that in plants, especially in Arabidopsis thaliana, increasing or generating the activity of a gene product non-targeted with the activity of a “galactinol synthase”, preferably being encoded by a gene comprising the nucleic acid sequence SEQ ID NO. 142992, preferably the coding region thereof, conferred the production of or the increase in raffinose compared with the wild type control.

[88607] The nucleic acid sequence of At1g07430 from Arabidopsis thaliana, e.g. as shown in the respective line in column 5 of Table I, application no. 17, has been published in F. And the activity of the gene product thereof is the activity of protein phosphatase.

[88608] Accordingly, in one embodiment, the process of the present invention for producing glucose-1-phosphate in a non-human organism, like a microorganism or a plant or a part thereof, comprises increasing or generating the activity of a gene product with the activity of a gene product conferring the activity of “protein phosphatase”, especially from Arabidopsis thaliana or its functional equivalent or its homolog, e.g. the increase of
[88609] (a) a gene product of a gene comprising the nucleic acid molecule as shown in the respective line in column 5 of Table I (whereby the respective line disclose in column 7 the fine chemical glucose-1-phosphate), application no. 17, preferably the coding region thereof, or a homolog or a fragment thereof, and being depicted in the same respective line as said At1g07430, or a functional equivalent or a homolog thereof as shown in column 8 of Table I, application no. 17, preferably the coding region thereof, particularly a homolog or functional equivalent as shown in column 8 of Table I B, application no. 17, and being depicted in the same respective line as said At1g07430, and preferably the activity is increased non-targeted, or
[88610] (b) a polypeptide comprising a polypeptide, a consensus sequence or at least a polypeptide motif as shown in the respective line in column 5 of Table II or in column 8 of Table IV, application no. 17, respectively, and being depicted in the same respective line as said At1g07430, or a functional equivalent or a homolog thereof as depicted in column 8 of Table II, application no. 17, preferably a homolog or functional equivalent as depicted in column 8 of Table II B, application no. 17, and being depicted in the same respective line as said At1g07430, and preferably the activity is increased non-targeted, whereby the respective line disclose in column 7 the fine chemical glucose-1-phosphate.

[88611] Accordingly, in one embodiment, the molecule which activity is to be increased in the process of the invention is the gene product with an activity as a “protein phosphatase”, preferably it is the molecule of section (a) or (b) of this paragraph.

[88612] In particular, it was observed that in plants, especially in Arabidopsis thaliana, increasing or generating the activity of a gene product non-targeted with the activity of a “protein phosphatase”, preferably being encoded by a gene comprising the nucleic acid sequence SEQ ID NO. 17451, preferably the coding region thereof, conferred the production of or the increase in glucose-1-phosphate compared with the wild type control.

[88613] The nucleic acid sequence of At1g07430 from Arabidopsis thaliana, e.g. as shown in the respective line in column 5 of Table I, application no. 17, has been published in F. And the activity of the gene product thereof is the activity of protein phosphatase.

[88614] Accordingly, in one embodiment, the process of the present invention for producing myo-inositol in a non-human organism, like a microorganism or a plant or a part thereof, comprises increasing or generating the activity of a gene product with the activity of a gene product conferring the activity of “protein phosphatase”, especially from Arabidopsis thaliana or its functional equivalent or its homolog, e.g. the increase of
[88615] (a) a gene product of a gene comprising the nucleic acid molecule as shown in the respective line in column 5 of Table I (whereby the respective line disclose in column 7 the fine chemical myo-inositol), application no. 17, preferably the coding region thereof, or a homolog or a fragment thereof, and being depicted in the same respective line as said At1g07430, or a functional equivalent or a homolog thereof as shown in column 8 of Table I, application no. 17, preferably the coding region thereof, particularly a homolog or functional equivalent as shown in column 8 of Table I B, application no. 17, and being depicted in the same respective line as said At1g07430, and preferably the activity is increased non-targeted, or
[88616] (b) a polypeptide comprising a polypeptide, a consensus sequence or at least a polypeptide motif as shown in the respective line in column 5 of Table II or in column 8 of Table IV, application no. 17, respectively, and being depicted in the same respective line as said At1g07430, or a functional equivalent or a homolog thereof as depicted in column 8 of Table II, application no. 17, preferably a homolog or functional equivalent as depicted in column 8 of Table II B, application no. 17, and being depicted in the same respective line as said At1g07430, and preferably the activity is increased non-targeted, whereby the respective line disclose in column 7 the fine chemical myo-inositol.

[88617] Accordingly, in one embodiment, the molecule which activity is to be increased in the process of the invention is the gene product with an activity as a “protein phosphatase”, preferably it is the molecule of section (a) or (b) of this paragraph.

[88618] In particular, it was observed that in plants, especially in Arabidopsis thaliana, increasing or generating the activity of a gene product non-targeted with the activity of a “protein phosphatase”, preferably being encoded by a gene comprising the nucleic acid sequence SEQ ID NO. 17451, preferably the coding region thereof, conferred the production of or the increase in myo-inositol compared with the wild type control.

[88619] The nucleic acid sequence of At1g19350 from Arabidopsis thaliana, e.g. as shown in the respective line in column 5 of Table I, application no. 17, has been published in F. And the activity of the gene product thereof is the activity of At1g19350-protein.

[88620] Accordingly, in one embodiment, the process of the present invention for producing glucose-1-phosphate in a non-human organism, like a microorganism or a plant or a part thereof, comprises increasing or generating the activity of a gene product with the activity of a gene product conferring the activity of “At1g19350-protein”, especially from Arabidopsis thaliana or its functional equivalent or its homolog, e.g. the increase of
[88621] (a) a gene product of a gene comprising the nucleic acid molecule as shown in the respective line in column 5 of Table I (whereby the respective line disclose in column 7 the fine chemical glucose-1-phosphate), application no. 17, preferably the coding region thereof, or a homolog or a fragment thereof, and being depicted in the same respective line as said At1g19350, or a functional equivalent or a homolog thereof as shown in column 8 of Table I, application no. 17, preferably the coding region thereof, particularly a homolog or functional equivalent as shown in column 8 of Table I B, application no. 17, and being depicted in the same respective line as said At1g19350, and preferably the activity is increased non-targeted, or
[88622] (b) a polypeptide comprising a polypeptide, a consensus sequence or at least a polypeptide motif as shown in the respective line in column 5 of Table II or in column 8 of Table IV, application no. 17, respectively, and being depicted in the same respective line as said At1g19350, or a functional equivalent or a homolog thereof as depicted in column 8 of Table II, application no. 17, preferably a homolog or functional equivalent as depicted in column 8 of Table II B, application no. 17, and being depicted in the same respective line as said At1g19350, and preferably the activity is increased non-targeted, whereby the respective line disclose in column 7 the fine chemical glucose-1-phosphate.

[88623] Accordingly, in one embodiment, the molecule which activity is to be increased in the process of the invention is the gene product with an activity as a “At1g19350-protein”, preferably it is the molecule of section (a) or (b) of this paragraph.

[88624] In particular, it was observed that in plants, especially in Arabidopsis thaliana, increasing or generating the activity of a gene product non-targeted with the activity of a “At1g19350-protein”, preferably being encoded by a gene comprising the nucleic acid sequence SEQ ID NO. 140771, preferably the coding region thereof, conferred the production of or the increase in glucose-1-phosphate compared with the wild type control.

[88625] The nucleic acid sequence of At1g19350 from Arabidopsis thaliana, e.g. as shown in the respective line in column 5 of Table I, application no. 17, has been published in F. And the activity of the gene product thereof is the activity of At1g19350-protein.

[88626] Accordingly, in one embodiment, the process of the present invention for producing 3,4,5-trihydroxypentanoic acid in a non-human organism, like a microorganism or a plant or a part thereof, comprises increasing or generating the activity of a gene product with the activity of a gene product conferring the activity of “At1g19350-protein”, especially from Arabidopsis thaliana or its functional equivalent or its homolog, e.g. the increase of
[88627] (a) a gene product of a gene comprising the nucleic acid molecule as shown in the respective line in column 5 of Table I (whereby the respective line disclose in column 7 the fine chemical 3,4,5-trihydroxypentanoic acid), application no. 17, preferably the coding region thereof, or a homolog or a fragment thereof, and being depicted in the same respective line as said At1g19350, or a functional equivalent or a homolog thereof as shown in column 8 of Table I, application no. 17, preferably the coding region thereof, particularly a homolog or functional equivalent as shown in column 8 of Table I B, application no. 17, and being depicted in the same respective line as said At1g19350, and preferably the activity is increased non-targeted, or
[88628] (b) a polypeptide comprising a polypeptide, a consensus sequence or at least a polypeptide motif as shown in the respective line in column 5 of Table II or in column 8 of Table IV, application no. 17, respectively, and being depicted in the same respective line as said At1g19350, or a functional equivalent or a homolog thereof as depicted in column 8 of Table II, application no. 17, preferably a homolog or functional equivalent as depicted in column 8 of Table II B, application no. 17, and being depicted in the same respective line as said At1g19350, and preferably the activity is increased non-targeted, whereby the respective line disclose in column 7 the fine chemical 3,4,5-trihydroxypentanoic acid.

[88629] Accordingly, in one embodiment, the molecule which activity is to be increased in the process of the invention is the gene product with an activity as a “At1g19350-protein”, preferably it is the molecule of section (a) or (b) of this paragraph.

[88630] In particular, it was observed that in plants, especially in Arabidopsis thaliana, increasing or generating the activity of a gene product non-targeted with the activity of a “At1g19350-protein”, preferably being encoded by a gene comprising the nucleic acid sequence SEQ ID NO. 140771, preferably the coding region thereof, conferred the production of or the increase in 3,4,5-trihydroxypentanoic acid compared with the wild type control.

[88631] The nucleic acid sequence of At1g19670 from Arabidopsis thaliana, e.g. as shown in the respective line in column 5 of Table I, application no. 17, has been published in F. And the activity of the gene product thereof is the activity of chlorophyllase.

[88632] Accordingly, in one embodiment, the process of the present invention for producing myo-inositol in a non-human organism, like a microorganism or a plant or a part thereof, comprises increasing or generating the activity of a gene product with the activity of a gene product conferring the activity of “chlorophyllase”, especially from Arabidopsis thaliana or its functional equivalent or its homolog, e.g. the increase of
[88633] (a) a gene product of a gene comprising the nucleic acid molecule as shown in the respective line in column 5 of Table I (whereby the respective line disclose in column 7 the fine chemical myo-inositol), application no. 17, preferably the coding region thereof, or a homolog or a fragment thereof, and being depicted in the same respective line as said At1g19670, or a functional equivalent or a homolog thereof as shown in column 8 of Table I, application no. 17, preferably the coding region thereof, particularly a homolog or functional equivalent as shown in column 8 of Table I B, application no. 17, and being depicted in the same respective line as said At1g19670, and preferably the activity is increased non-targeted, or
[88634] (b) a polypeptide comprising a polypeptide, a consensus sequence or at least a polypeptide motif as shown in the respective line in column 5 of Table II or in column 8 of Table IV, application no. 17, respectively, and being depicted in the same respective line as said At1g19670, or a functional equivalent or a homolog thereof as depicted in column 8 of Table II, application no. 17, preferably a homolog or functional equivalent as depicted in column 8 of Table II B, application no. 17, and being depicted in the same respective line as said At1g19670, and preferably the activity is increased non-targeted, whereby the respective line disclose in column 7 the fine chemical myo-inositol.

[88635] Accordingly, in one embodiment, the molecule which activity is to be increased in the process of the invention is the gene product with an activity as a “chlorophyllase”, preferably it is the molecule of section (a) or (b) of this paragraph.

[88636] In particular, it was observed that in plants, especially in Arabidopsis thaliana, increasing or generating the activity of a gene product non-targeted with the activity of a “chlorophyllase”, preferably being encoded by a gene comprising the nucleic acid sequence SEQ ID NO. 113651, preferably the coding region thereof, conferred the production of or the increase in myo-inositol compared with the wild type control.

[88637] The nucleic acid sequence of At1g26830 from Arabidopsis thaliana, e.g. as shown in the respective line in column 5 of Table I, application no. 17, has been published in F. And the activity of the gene product thereof is the activity of cullin.

[88638] Accordingly, in one embodiment, the process of the present invention for producing fructose in a non-human organism, like a microorganism or a plant or a part thereof, comprises increasing or generating the activity of a gene product with the activity of a gene product conferring the activity of “cullin”, especially from Arabidopsis thaliana or its functional equivalent or its homolog, e.g. the increase of
[88639] (a) a gene product of a gene comprising the nucleic acid molecule as shown in the respective line in column 5 of Table I (whereby the respective line disclose in column 7 the fine chemical fructose), application no. 17, preferably the coding region thereof, or a homolog or a fragment thereof, and being depicted in the same respective line as said At1g26830, or a functional equivalent or a homolog thereof as shown in column 8 of Table I, application no. 17, preferably the coding region thereof, particularly a homolog or functional equivalent as shown in column 8 of Table I B, application no. 17, and being depicted in the same respective line as said At1g26830, and preferably the activity is increased non-targeted, or
[88640] (b) a polypeptide comprising a polypeptide, a consensus sequence or at least a polypeptide motif as shown in the respective line in column 5 of Table II or in column 8 of Table IV, application no. 17, respectively, and being depicted in the same respective line as said At1g26830, or a functional equivalent or a homolog thereof as depicted in column 8 of Table II, application no. 17, preferably a homolog or functional equivalent as depicted in column 8 of Table II B, application no. 17, and being depicted in the same respective line as said At1g26830, and preferably the activity is increased non-targeted, whereby the respective line disclose in column 7 the fine chemical fructose.

[88641] Accordingly, in one embodiment, the molecule which activity is to be increased in the process of the invention is the gene product with an activity as a “cullin”, preferably it is the molecule of section (a) or (b) of this paragraph.

[88642] In particular, it was observed that in plants, especially in Arabidopsis thaliana, increasing or generating the activity of a gene product non-targeted with the activity of a “cullin”, preferably being encoded by a gene comprising the nucleic acid sequence SEQ ID NO. 17701, preferably the coding region thereof, conferred the production of or the increase in fructose compared with the wild type control.

[88643] The nucleic acid sequence of At1g36730 from Arabidopsis thaliana, e.g. as shown in the respective line in column 5 of Table I, application no. 17, has been published in F. And the activity of the gene product thereof is the activity of eukaryotic translation initiation factor 5.

[88644] Accordingly, in one embodiment, the process of the present invention for producing fructose in a non-human organism, like a microorganism or a plant or a part thereof, comprises increasing or generating the activity of a gene product with the activity of a gene product conferring the activity of “eukaryotic translation initiation factor 5”, especially from Arabidopsis thaliana or its functional equivalent or its homolog, e.g. the increase of
[88645] (a) a gene product of a gene comprising the nucleic acid molecule as shown in the respective line in column 5 of Table I (whereby the respective line disclose in column 7 the fine chemical fructose), application no. 17, preferably the coding region thereof, or a homolog or a fragment thereof, and being depicted in the same respective line as said At1g36730, or a functional equivalent or a homolog thereof as shown in column 8 of Table I, application no. 17, preferably the coding region thereof, particularly a homolog or functional equivalent as shown in column 8 of Table I B, application no. 17, and being depicted in the same respective line as said At1g36730, and preferably the activity is increased non-targeted, or
[88646] (b) a polypeptide comprising a polypeptide, a consensus sequence or at least a polypeptide motif as shown in the respective line in column 5 of Table II or in column 8 of Table IV, application no. 17, respectively, and being depicted in the same respective line as said At1g36730, or a functional equivalent or a homolog thereof as depicted in column 8 of Table II, application no. 17, preferably a homolog or functional equivalent as depicted in column 8 of Table II B, application no. 17, and being depicted in the same respective line as said At1g36730, and preferably the activity is increased non-targeted, whereby the respective line disclose in column 7 the fine chemical fructose.

[88647] Accordingly, in one embodiment, the molecule which activity is to be increased in the process of the invention is the gene product with an activity as a “eukaryotic translation initiation factor 5”, preferably it is the molecule of section (a) or (b) of this paragraph.

[88648] In particular, it was observed that in plants, especially in Arabidopsis thaliana, increasing or generating the activity of a gene product non-targeted with the activity of a “eukaryotic translation initiation factor 5”, preferably being encoded by a gene comprising the nucleic acid sequence SEQ ID NO. 17968, preferably the coding region thereof, conferred the production of or the increase in fructose compared with the wild type control.

[88649] The nucleic acid sequence of At1g36730 from Arabidopsis thaliana, e.g. as shown in the respective line in column 5 of Table I, application no. 17, has been published in F. And the activity of the gene product thereof is the activity of eukaryotic translation initiation factor 5.

[88650] Accordingly, in one embodiment, the process of the present invention for producing glucose in a non-human organism, like a microorganism or a plant or a part thereof, comprises increasing or generating the activity of a gene product with the activity of a gene product conferring the activity of “eukaryotic translation initiation factor 5”, especially from Arabidopsis thaliana or its functional equivalent or its homolog, e.g. the increase of
[88651] (a) a gene product of a gene comprising the nucleic acid molecule as shown in the respective line in column 5 of Table I (whereby the respective line disclose in column 7 the fine chemical glucose), application no. 17, preferably the coding region thereof, or a homolog or a fragment thereof, and being depicted in the same respective line as said At1g36730, or a functional equivalent or a homolog thereof as shown in column 8 of Table I, application no. 17, preferably the coding region thereof, particularly a homolog or functional equivalent as shown in column 8 of Table I B, application no. 17, and being depicted in the same respective line as said At1g36730, and preferably the activity is increased non-targeted, or
[88652] (b) a polypeptide comprising a polypeptide, a consensus sequence or at least a polypeptide motif as shown in the respective line in column 5 of Table II or in column 8 of Table IV, application no. 17, respectively, and being depicted in the same respective line as said At1g36730, or a functional equivalent or a homolog thereof as depicted in column 8 of Table II, application no. 17, preferably a homolog or functional equivalent as depicted in column 8 of Table II B, application no. 17, and being depicted in the same respective line as said At1g36730, and preferably the activity is increased non-targeted, whereby the respective line disclose in column 7 the fine chemical glucose.

[88653] Accordingly, in one embodiment, the molecule which activity is to be increased in the process of the invention is the gene product with an activity as a “eukaryotic translation initiation factor 5”, preferably it is the molecule of section (a) or (b) of this paragraph.

[88654] In particular, it was observed that in plants, especially in Arabidopsis thaliana, increasing or generating the activity of a gene product non-targeted with the activity of a “eukaryotic translation initiation factor 5”, preferably being encoded by a gene comprising the nucleic acid sequence SEQ ID NO. 17968, preferably the coding region thereof, conferred the production of or the increase in glucose compared with the wild type control.

[88655] The nucleic acid sequence of At1g36730 from Arabidopsis thaliana, e.g. as shown in the respective line in column 5 of Table I, application no. 17, has been published in F. And the activity of the gene product thereof is the activity of eukaryotic translation initiation factor 5.

[88656] Accordingly, in one embodiment, the process of the present invention for producing raffinose in a non-human organism, like a microorganism or a plant or a part thereof, comprises increasing or generating the activity of a gene product with the activity of a gene product conferring the activity of “eukaryotic translation initiation factor 5”, especially from Arabidopsis thaliana or its functional equivalent or its homolog, e.g. the increase of
[88657] (a) a gene product of a gene comprising the nucleic acid molecule as shown in the respective line in column 5 of Table I (whereby the respective line disclose in column 7 the fine chemical raffinose), application no. 17, preferably the coding region thereof, or a homolog or a fragment thereof, and being depicted in the same respective line as said At1g36730, or a functional equivalent or a homolog thereof as shown in column 8 of Table I, application no. 17, preferably the coding region thereof, particularly a homolog or functional equivalent as shown in column 8 of Table I B, application no. 17, and being depicted in the same respective line as said At1g36730, and preferably the activity is increased non-targeted, or
[88658] (b) a polypeptide comprising a polypeptide, a consensus sequence or at least a polypeptide motif as shown in the respective line in column 5 of Table II or in column 8 of Table IV, application no. 17, respectively, and being depicted in the same respective line as said At1g36730, or a functional equivalent or a homolog thereof as depicted in column 8 of Table II, application no. 17, preferably a homolog or functional equivalent as depicted in column 8 of Table II B, application no. 17, and being depicted in the same respective line as said At1g36730, and preferably the activity is increased non-targeted, whereby the respective line disclose in column 7 the fine chemical raffinose.

[88659] Accordingly, in one embodiment, the molecule which activity is to be increased in the process of the invention is the gene product with an activity as a “eukaryotic translation initiation factor 5”, preferably it is the molecule of section (a) or (b) of this paragraph.

[88660] In particular, it was observed that in plants, especially in Arabidopsis thaliana, increasing or generating the activity of a gene product non-targeted with the activity of a “eukaryotic translation initiation factor 5”, preferably being encoded by a gene comprising the nucleic acid sequence SEQ ID NO. 17968, preferably the coding region thereof, conferred the production of or the increase in raffinose compared with the wild type control.

[88661] The nucleic acid sequence of At1g43850 from Arabidopsis thaliana, e.g. as shown in the respective line in column 5 of Table I, application no. 17, has been published in F. And the activity of the gene product thereof is the activity of transcriptional regulator.

[88662] Accordingly, in one embodiment, the process of the present invention for producing sucrose in a non-human organism, like a microorganism or a plant or a part thereof, comprises increasing or generating the activity of a gene product with the activity of a gene product conferring the activity of “transcriptional regulator”, especially from Arabidopsis thaliana or its functional equivalent or its homolog, e.g. the increase of
[88663] (a) a gene product of a gene comprising the nucleic acid molecule as shown in the respective line in column 5 of Table I (whereby the respective line disclose in column 7 the fine chemical sucrose), application no. 17, preferably the coding region thereof, or a homolog or a fragment thereof, and being depicted in the same respective line as said At1g43850, or a functional equivalent or a homolog thereof as shown in column 8 of Table I, application no. 17, preferably the coding region thereof, particularly a homolog or functional equivalent as shown in column 8 of Table I B, application no. 17, and being depicted in the same respective line as said At1g43850, and preferably the activity is increased non-targeted, or
[88664] (b) a polypeptide comprising a polypeptide, a consensus sequence or at least a polypeptide motif as shown in the respective line in column 5 of Table II or in column 8 of Table IV, application no. 17, respectively, and being depicted in the same respective line as said At1g43850, or a functional equivalent or a homolog thereof as depicted in column 8 of Table II, application no. 17, preferably a homolog or functional equivalent as depicted in column 8 of Table II B, application no. 17, and being depicted in the same respective line as said At1g43850, and preferably the activity is increased non-targeted, whereby the respective line disclose in column 7 the fine chemical sucrose.

[88665] Accordingly, in one embodiment, the molecule which activity is to be increased in the process of the invention is the gene product with an activity as a “transcriptional regulator”, preferably it is the molecule of section (a) or (b) of this paragraph.

[88666] In particular, it was observed that in plants, especially in Arabidopsis thaliana, increasing or generating the activity of a gene product non-targeted with the activity of a “transcriptional regulator”, preferably being encoded by a gene comprising the nucleic acid sequence SEQ ID NO. 18070, preferably the coding region thereof, conferred the production of or the increase in sucrose compared with the wild type control.

[88667] The nucleic acid sequence of At1g60470 from Arabidopsis thaliana, e.g. as shown in the respective line in column 5 of Table I, application no. 17, has been published in F. And the activity of the gene product thereof is the activity of galactinol synthase.

[88668] Accordingly, in one embodiment, the process of the present invention for producing raffinose in a non-human organism, like a microorganism or a plant or a part thereof, comprises increasing or generating the activity of a gene product with the activity of a gene product conferring the activity of “galactinol synthase”, especially from Arabidopsis thaliana or its functional equivalent or its homolog, e.g. the increase of
[88669] (a) a gene product of a gene comprising the nucleic acid molecule as shown in the respective line in column 5 of Table I (whereby the respective line disclose in column 7 the fine chemical raffinose), application no. 17, preferably the coding region thereof, or a homolog or a fragment thereof, and being depicted in the same respective line as said At1g60470, or a functional equivalent or a homolog thereof as shown in column 8 of Table I, application no. 17, preferably the coding region thereof, particularly a homolog or functional equivalent as shown in column 8 of Table I B, application no. 17, and being depicted in the same respective line as said At1g60470, and preferably the activity is increased non-targeted, or
[88670] (b) a polypeptide comprising a polypeptide, a consensus sequence or at least a polypeptide motif as shown in the respective line in column 5 of Table II or in column 8 of Table IV, application no. 17, respectively, and being depicted in the same respective line as said At1g60470, or a functional equivalent or a homolog thereof as depicted in column 8 of Table II, application no. 17, preferably a homolog or functional equivalent as depicted in column 8 of Table II B, application no. 17, and being depicted in the same respective line as said At1g60470, and preferably the activity is increased non-targeted, whereby the respective line disclose in column 7 the fine chemical raffinose.

[88671] Accordingly, in one embodiment, the molecule which activity is to be increased in the process of the invention is the gene product with an activity as a “galactinol synthase”, preferably it is the molecule of section (a) or (b) of this paragraph.

[88672] In particular, it was observed that in plants, especially in Arabidopsis thaliana, increasing or generating the activity of a gene product non-targeted with the activity of a “galactinol synthase”, preferably being encoded by a gene comprising the nucleic acid sequence SEQ ID NO. 140841, preferably the coding region thereof, conferred the production of or the increase in raffinose compared with the wild type control.

[88673] The nucleic acid sequence of At1g72770 from Arabidopsis thaliana, e.g. as shown in the respective line in column 5 of Table I, application no. 17, has been published in F. And the activity of the gene product thereof is the activity of protein phosphatase.

[88674] Accordingly, in one embodiment, the process of the present invention for producing glucose in a non-human organism, like a microorganism or a plant or a part thereof, comprises increasing or generating the activity of a gene product with the activity of a gene product conferring the activity of “protein phosphatase”, especially from Arabidopsis thaliana or its functional equivalent or its homolog, e.g. the increase of
[88675] (a) a gene product of a gene comprising the nucleic acid molecule as shown in the respective line in column 5 of Table I (whereby the respective line disclose in column 7 the fine chemical glucose), application no. 17, preferably the coding region thereof, or a homolog or a fragment thereof, and being depicted in the same respective line as said At1g72770, or a functional equivalent or a homolog thereof as shown in column 8 of Table I, application no. 17, preferably the coding region thereof, particularly a homolog or functional equivalent as shown in column 8 of Table I B, application no. 17, and being depicted in the same respective line as said At1g72770, and preferably the activity is increased non-targeted, or
[88676] (b) a polypeptide comprising a polypeptide, a consensus sequence or at least a polypeptide motif as shown in the respective line in column 5 of Table II or in column 8 of Table IV, application no. 17, respectively, and being depicted in the same respective line as said At1g72770, or a functional equivalent or a homolog thereof as depicted in column 8 of Table II, application no. 17, preferably a homolog or functional equivalent as depicted in column 8 of Table II B, application no. 17, and being depicted in the same respective line as said At1g72770, and preferably the activity is increased non-targeted, whereby the respective line disclose in column 7 the fine chemical glucose.

[88677] Accordingly, in one embodiment, the molecule which activity is to be increased in the process of the invention is the gene product with an activity as a “protein phosphatase”, preferably it is the molecule of section (a) or (b) of this paragraph.

[88678] In particular, it was observed that in plants, especially in Arabidopsis thaliana, increasing or generating the activity of a gene product non-targeted with the activity of a “protein phosphatase”, preferably being encoded by a gene comprising the nucleic acid sequence SEQ ID NO. 19419, preferably the coding region thereof, conferred the production of or the increase in glucose compared with the wild type control.

[88679] The nucleic acid sequence of At1g72770 from Arabidopsis thaliana, e.g. as shown in the respective line in column 5 of Table I, application no. 17, has been published in F. And the activity of the gene product thereof is the activity of protein phosphatase.

[88680] Accordingly, in one embodiment, the process of the present invention for producing glucose-1-phosphate in a non-human organism, like a microorganism or a plant or a part thereof, comprises increasing or generating the activity of a gene product with the activity of a gene product conferring the activity of “protein phosphatase”, especially from Arabidopsis thaliana or its functional equivalent or its homolog, e.g. the increase of
[88681] (a) a gene product of a gene comprising the nucleic acid molecule as shown in the respective line in column 5 of Table I (whereby the respective line disclose in column 7 the fine chemical glucose-1-phosphate), application no. 17, preferably the coding region thereof, or a homolog or a fragment thereof, and being depicted in the same respective line as said At1g72770, or a functional equivalent or a homolog thereof as shown in column 8 of Table I, application no. 17, preferably the coding region thereof, particularly a homolog or functional equivalent as shown in column 8 of Table I B, application no. 17, and being depicted in the same respective line as said At1g72770, and preferably the activity is increased non-targeted, or
[88682] (b) a polypeptide comprising a polypeptide, a consensus sequence or at least a polypeptide motif as shown in the respective line in column 5 of Table II or in column 8 of Table IV, application no. 17, respectively, and being depicted in the same respective line as said At1g72770, or a functional equivalent or a homolog thereof as depicted in column 8 of Table II, application no. 17, preferably a homolog or functional equivalent as depicted in column 8 of Table II B, application no. 17, and being depicted in the same respective line as said At1g72770, and preferably the activity is increased non-targeted, whereby the respective line disclose in column 7 the fine chemical glucose-1-phosphate.

[88683] Accordingly, in one embodiment, the molecule which activity is to be increased in the process of the invention is the gene product with an activity as a “protein phosphatase”, preferably it is the molecule of section (a) or (b) of this paragraph.

[88684] In particular, it was observed that in plants, especially in Arabidopsis thaliana, increasing or generating the activity of a gene product non-targeted with the activity of a “protein phosphatase”, preferably being encoded by a gene comprising the nucleic acid sequence SEQ ID NO. 19419, preferably the coding region thereof, conferred the production of or the increase in glucose-1-phosphate compared with the wild type control.

[88685] The nucleic acid sequence of At1g72770 from Arabidopsis thaliana, e.g. as shown in the respective line in column 5 of Table I, application no. 17, has been published in F. And the activity of the gene product thereof is the activity of protein phosphatase.

[88686] Accordingly, in one embodiment, the process of the present invention for producing myo-inositol in a non-human organism, like a microorganism or a plant or a part thereof, comprises increasing or generating the activity of a gene product with the activity of a gene product conferring the activity of “protein phosphatase”, especially from Arabidopsis thaliana or its functional equivalent or its homolog, e.g. the increase of
[88687] (a) a gene product of a gene comprising the nucleic acid molecule as shown in the respective line in column 5 of Table I (whereby the respective line disclose in column 7 the fine chemical myo-inositol), application no. 17, preferably the coding region thereof, or a homolog or a fragment thereof, and being depicted in the same respective line as said At1g72770, or a functional equivalent or a homolog thereof as shown in column 8 of Table I, application no. 17, preferably the coding region thereof, particularly a homolog or functional equivalent as shown in column 8 of Table I B, application no. 17, and being depicted in the same respective line as said At1g72770, and preferably the activity is increased non-targeted, or
[88688] (b) a polypeptide comprising a polypeptide, a consensus sequence or at least a polypeptide motif as shown in the respective line in column 5 of Table II or in column 8 of Table IV, application no. 17, respectively, and being depicted in the same respective line as said At1g72770, or a functional equivalent or a homolog thereof as depicted in column 8 of Table II, application no. 17, preferably a homolog or functional equivalent as depicted in column 8 of Table II B, application no. 17, and being depicted in the same respective line as said At1g72770, and preferably the activity is increased non-targeted, whereby the respective line disclose in column 7 the fine chemical myo-inositol.

[88689] Accordingly, in one embodiment, the molecule which activity is to be increased in the process of the invention is the gene product with an activity as a “protein phosphatase”, preferably it is the molecule of section (a) or (b) of this paragraph.

[88690] In particular, it was observed that in plants, especially in Arabidopsis thaliana, increasing or generating the activity of a gene product non-targeted with the activity of a “protein phosphatase”, preferably being encoded by a gene comprising the nucleic acid sequence SEQ ID NO. 19419, preferably the coding region thereof, conferred the production of or the increase in myo-inositol compared with the wild type control.

[88691] The nucleic acid sequence of At1g72770 from Arabidopsis thaliana, e.g. as shown in the respective line in column 5 of Table I, application no. 17, has been published in F. And the activity of the gene product thereof is the activity of protein phosphatase.

[88692] Accordingly, in one embodiment, the process of the present invention for producing raffinose in a non-human organism, like a microorganism or a plant or a part thereof, comprises increasing or generating the activity of a gene product with the activity of a gene product conferring the activity of “protein phosphatase”, especially from Arabidopsis thaliana or its functional equivalent or its homolog, e.g. the increase of
[88693] (a) a gene product of a gene comprising the nucleic acid molecule as shown in the respective line in column 5 of Table I (whereby the respective line disclose in column 7 the fine chemical raffinose), application no. 17, preferably the coding region thereof, or a homolog or a fragment thereof, and being depicted in the same respective line as said At1g72770, or a functional equivalent or a homolog thereof as shown in column 8 of Table I, application no. 17, preferably the coding region thereof, particularly a homolog or functional equivalent as shown in column 8 of Table I B, application no. 17, and being depicted in the same respective line as said At1g72770, and preferably the activity is increased non-targeted, or
[88694] (b) a polypeptide comprising a polypeptide, a consensus sequence or at least a polypeptide motif as shown in the respective line in column 5 of Table II or in column 8 of Table IV, application no. 17, respectively, and being depicted in the same respective line as said At1g72770, or a functional equivalent or a homolog thereof as depicted in column 8 of Table II, application no. 17, preferably a homolog or functional equivalent as depicted in column 8 of Table II B, application no. 17, and being depicted in the same respective line as said At1g72770, and preferably the activity is increased non-targeted, whereby the respective line disclose in column 7 the fine chemical raffinose.

[88695] Accordingly, in one embodiment, the molecule which activity is to be increased in the process of the invention is the gene product with an activity as a “protein phosphatase”, preferably it is the molecule of section (a) or (b) of this paragraph.

[88696] In particular, it was observed that in plants, especially in Arabidopsis thaliana, increasing or generating the activity of a gene product non-targeted with the activity of a “protein phosphatase”, preferably being encoded by a gene comprising the nucleic acid sequence SEQ ID NO. 19419, preferably the coding region thereof, conferred the production of or the increase in raffinose compared with the wild type control.

[88697] The nucleic acid sequence of At1g72770 from Arabidopsis thaliana, e.g. as shown in the respective line in column 5 of Table I, application no. 17, has been published in F. And the activity of the gene product thereof is the activity of protein phosphatase.

[88698] Accordingly, in one embodiment, the process of the present invention for producing sucrose in a non-human organism, like a microorganism or a plant or a part thereof, comprises increasing or generating the activity of a gene product with the activity of a gene product conferring the activity of “protein phosphatase”, especially from Arabidopsis thaliana or its functional equivalent or its homolog, e.g. the increase of
[88699] (a) a gene product of a gene comprising the nucleic acid molecule as shown in the respective line in column 5 of Table I (whereby the respective line disclose in column 7 the fine chemical sucrose), application no. 17, preferably the coding region thereof, or a homolog or a fragment thereof, and being depicted in the same respective line as said At1g72770, or a functional equivalent or a homolog thereof as shown in column 8 of Table I, application no. 17, preferably the coding region thereof, particularly a homolog or functional equivalent as shown in column 8 of Table I B, application no. 17, and being depicted in the same respective line as said At1g72770, and preferably the activity is increased non-targeted, or
[88700] (b) a polypeptide comprising a polypeptide, a consensus sequence or at least a polypeptide motif as shown in the respective line in column 5 of Table II or in column 8 of Table IV, application no. 17, respectively, and being depicted in the same respective line as said At1g72770, or a functional equivalent or a homolog thereof as depicted in column 8 of Table II, application no. 17, preferably a homolog or functional equivalent as depicted in column 8 of Table II B, application no. 17, and being depicted in the same respective line as said At1g72770, and preferably the activity is increased non-targeted, whereby the respective line disclose in column 7 the fine chemical sucrose.

[88701] Accordingly, in one embodiment, the molecule which activity is to be increased in the process of the invention is the gene product with an activity as a “protein phosphatase”, preferably it is the molecule of section (a) or (b) of this paragraph.

[88702] In particular, it was observed that in plants, especially in Arabidopsis thaliana, increasing or generating the activity of a gene product non-targeted with the activity of a “protein phosphatase”, preferably being encoded by a gene comprising the nucleic acid sequence SEQ ID NO. 19419, preferably the coding region thereof, conferred the production of or the increase in sucrose compared with the wild type control.

[88703] The nucleic acid sequence of At1g78200 from Arabidopsis thaliana, e.g. as shown in the respective line in column 5 of Table I, application no. 17, has been published in F. And the activity of the gene product thereof is the activity of protein phosphatase.

[88704] Accordingly, in one embodiment, the process of the present invention for producing saccharic acid in a non-human organism, like a microorganism or a plant or a part thereof, comprises increasing or generating the activity of a gene product with the activity of a gene product conferring the activity of “protein phosphatase”, especially from Arabidopsis thaliana or its functional equivalent or its homolog, e.g. the increase of
[88705] (a) a gene product of a gene comprising the nucleic acid molecule as shown in the respective line in column 5 of Table I (whereby the respective line disclose in column 7 the fine chemical saccharic acid), application no. 17, preferably the coding region thereof, or a homolog or a fragment thereof, and being depicted in the same respective line as said At1g78200, or a functional equivalent or a homolog thereof as shown in column 8 of Table I, application no. 17, preferably the coding region thereof, particularly a homolog or functional equivalent as shown in column 8 of Table I B, application no. 17, and being depicted in the same respective line as said At1g78200, and preferably the activity is increased non-targeted, or
[88706] (b) a polypeptide comprising a polypeptide, a consensus sequence or at least a polypeptide motif as shown in the respective line in column 5 of Table II or in column 8 of Table IV, application no. 17, respectively, and being depicted in the same respective line as said At1g78200, or a functional equivalent or a homolog thereof as depicted in column 8 of Table II, application no. 17, preferably a homolog or functional equivalent as depicted in column 8 of Table II B, application no. 17, and being depicted in the same respective line as said At1g78200, and preferably the activity is increased non-targeted, whereby the respective line disclose in column 7 the fine chemical saccharic acid.

[88707] Accordingly, in one embodiment, the molecule which activity is to be increased in the process of the invention is the gene product with an activity as a “protein phosphatase”, preferably it is the molecule of section (a) or (b) of this paragraph.

[88708] In particular, it was observed that in plants, especially in Arabidopsis thaliana, increasing or generating the activity of a gene product non-targeted with the activity of a “protein phosphatase”, preferably being encoded by a gene comprising the nucleic acid sequence SEQ ID NO. 141013, preferably the coding region thereof, conferred the production of or the increase in saccharic acid compared with the wild type control.

[88709] The nucleic acid sequence of At2g17560 from Arabidopsis thaliana, e.g. as shown in the respective line in column 5 of Table I, application no. 17, has been published in F. And the activity of the gene product thereof is the activity of transcription factor.

[88710] Accordingly, in one embodiment, the process of the present invention for producing fructose in a non-human organism, like a microorganism or a plant or a part thereof, comprises increasing or generating the activity of a gene product with the activity of a gene product conferring the activity of “transcription factor”, especially from Arabidopsis thaliana or its functional equivalent or its homolog, e.g. the increase of
[88711] (a) a gene product of a gene comprising the nucleic acid molecule as shown in the respective line in column 5 of Table I (whereby the respective line disclose in column 7 the fine chemical fructose), application no. 17, preferably the coding region thereof, or a homolog or a fragment thereof, and being depicted in the same respective line as said At2g17560, or a functional equivalent or a homolog thereof as shown in column 8 of Table I, application no. 17, preferably the coding region thereof, particularly a homolog or functional equivalent as shown in column 8 of Table I B, application no. 17, and being depicted in the same respective line as said At2g17560, and preferably the activity is increased non-targeted, or
[88712] (b) a polypeptide comprising a polypeptide, a consensus sequence or at least a polypeptide motif as shown in the respective line in column 5 of Table II or in column 8 of Table IV, application no. 17, respectively, and being depicted in the same respective line as said At2g17560, or a functional equivalent or a homolog thereof as depicted in column 8 of Table II, application no. 17, preferably a homolog or functional equivalent as depicted in column 8 of Table II B, application no. 17, and being depicted in the same respective line as said At2g17560, and preferably the activity is increased non-targeted, whereby the respective line disclose in column 7 the fine chemical fructose.

[88713] Accordingly, in one embodiment, the molecule which activity is to be increased in the process of the invention is the gene product with an activity as a “transcription factor”, preferably it is the molecule of section (a) or (b) of this paragraph.

[88714] In particular, it was observed that in plants, especially in Arabidopsis thaliana, increasing or generating the activity of a gene product non-targeted with the activity of a “transcription factor”, preferably being encoded by a gene comprising the nucleic acid sequence SEQ ID NO. 19502, preferably the coding region thereof, conferred the production of or the increase in fructose compared with the wild type control.

[88715] The nucleic acid sequence of At2g17560 from Arabidopsis thaliana, e.g. as shown in the respective line in column 5 of Table I, application no. 17, has been published in F. And the activity of the gene product thereof is the activity of transcription factor.

[88716] Accordingly, in one embodiment, the process of the present invention for producing glucose in a non-human organism, like a microorganism or a plant or a part thereof, comprises increasing or generating the activity of a gene product with the activity of a gene product conferring the activity of “transcription factor”, especially from Arabidopsis thaliana or its functional equivalent or its homolog, e.g. the increase of
[88717] (a) a gene product of a gene comprising the nucleic acid molecule as shown in the respective line in column 5 of Table I (whereby the respective line disclose in column 7 the fine chemical glucose), application no. 17, preferably the coding region thereof, or a homolog or a fragment thereof, and being depicted in the same respective line as said At2g17560, or a functional equivalent or a homolog thereof as shown in column 8 of Table I, application no. 17, preferably the coding region thereof, particularly a homolog or functional equivalent as shown in column 8 of Table I B, application no. 17, and being depicted in the same respective line as said At2g17560, and preferably the activity is increased non-targeted, or
[88718] (b) a polypeptide comprising a polypeptide, a consensus sequence or at least a polypeptide motif as shown in the respective line in column 5 of Table II or in column 8 of Table IV, application no. 17, respectively, and being depicted in the same respective line as said At2g17560, or a functional equivalent or a homolog thereof as depicted in column 8 of Table II, application no. 17, preferably a homolog or functional equivalent as depicted in column 8 of Table II B, application no. 17, and being depicted in the same respective line as said At2g17560, and preferably the activity is increased non-targeted, whereby the respective line disclose in column 7 the fine chemical glucose.

[88719] Accordingly, in one embodiment, the molecule which activity is to be increased in the process of the invention is the gene product with an activity as a “transcription factor”, preferably it is the molecule of section (a) or (b) of this paragraph.

[88720] In particular, it was observed that in plants, especially in Arabidopsis thaliana, increasing or generating the activity of a gene product non-targeted with the activity of a “transcription factor”, preferably being encoded by a gene comprising the nucleic acid sequence SEQ ID NO. 19502, preferably the coding region thereof, conferred the production of or the increase in glucose compared with the wild type control.

[88721] The nucleic acid sequence of At2g17560 from Arabidopsis thaliana, e.g. as shown in the respective line in column 5 of Table I, application no. 17, has been published in F. And the activity of the gene product thereof is the activity of transcription factor.

[88722] Accordingly, in one embodiment, the process of the present invention for producing glucose-1-phosphate in a non-human organism, like a microorganism or a plant or a part thereof, comprises increasing or generating the activity of a gene product with the activity of a gene product conferring the activity of “transcription factor”, especially from Arabidopsis thaliana or its functional equivalent or its homolog, e.g. the increase of
[88723] (a) a gene product of a gene comprising the nucleic acid molecule as shown in the respective line in column 5 of Table I (whereby the respective line disclose in column 7 the fine chemical glucose-1-phosphate), application no. 17, preferably the coding region thereof, or a homolog or a fragment thereof, and being depicted in the same respective line as said At2g17560, or a functional equivalent or a homolog thereof as shown in column 8 of Table I, application no. 17, preferably the coding region thereof, particularly a homolog or functional equivalent as shown in column 8 of Table I B, application no. 17, and being depicted in the same respective line as said At2g17560, and preferably the activity is increased non-targeted, or
[88724] (b) a polypeptide comprising a polypeptide, a consensus sequence or at least a polypeptide motif as shown in the respective line in column 5 of Table II or in column 8 of Table IV, application no. 17, respectively, and being depicted in the same respective line as said At2g17560, or a functional equivalent or a homolog thereof as depicted in column 8 of Table II, application no. 17, preferably a homolog or functional equivalent as depicted in column 8 of Table II B, application no. 17, and being depicted in the same respective line as said At2g17560, and preferably the activity is increased non-targeted, whereby the respective line disclose in column 7 the fine chemical glucose-1-phosphate.

[88725] Accordingly, in one embodiment, the molecule which activity is to be increased in the process of the invention is the gene product with an activity as a “transcription factor”, preferably it is the molecule of section (a) or (b) of this paragraph.

[88726] In particular, it was observed that in plants, especially in Arabidopsis thaliana, increasing or generating the activity of a gene product non-targeted with the activity of a “transcription factor”, preferably being encoded by a gene comprising the nucleic acid sequence SEQ ID NO. 19502, preferably the coding region thereof, conferred the production of or the increase in glucose-1-phosphate compared with the wild type control.

[88727] The nucleic acid sequence of At2g25070 from Arabidopsis thaliana, e.g. as shown in the respective line in column 5 of Table I, application no. 17, has been published in F. And the activity of the gene product thereof is the activity of protein phosphatase.

[88728] Accordingly, in one embodiment, the process of the present invention for producing glucose-1-phosphate in a non-human organism, like a microorganism or a plant or a part thereof, comprises increasing or generating the activity of a gene product with the activity of a gene product conferring the activity of “protein phosphatase”, especially from Arabidopsis thaliana or its functional equivalent or its homolog, e.g. the increase of
[88729] (a) a gene product of a gene comprising the nucleic acid molecule as shown in the respective line in column 5 of Table I (whereby the respective line disclose in column 7 the fine chemical glucose-1-phosphate), application no. 17, preferably the coding region thereof, or a homolog or a fragment thereof, and being depicted in the same respective line as said At2g25070, or a functional equivalent or a homolog thereof as shown in column 8 of Table I, application no. 17, preferably the coding region thereof, particularly a homolog or functional equivalent as shown in column 8 of Table I B, application no. 17, and being depicted in the same respective line as said At2g25070, and preferably the activity is increased non-targeted, or
[88730] (b) a polypeptide comprising a polypeptide, a consensus sequence or at least a polypeptide motif as shown in the respective line in column 5 of Table II or in column 8 of Table IV, application no. 17, respectively, and being depicted in the same respective line as said At2g25070, or a functional equivalent or a homolog thereof as depicted in column 8 of Table II, application no. 17, preferably a homolog or functional equivalent as depicted in column 8 of Table II B, application no. 17, and being depicted in the same respective line as said At2g25070, and preferably the activity is increased non-targeted, whereby the respective line disclose in column 7 the fine chemical glucose-1-phosphate.

[88731] Accordingly, in one embodiment, the molecule which activity is to be increased in the process of the invention is the gene product with an activity as a “protein phosphatase”, preferably it is the molecule of section (a) or (b) of this paragraph.

[88732] In particular, it was observed that in plants, especially in Arabidopsis thaliana, increasing or generating the activity of a gene product non-targeted with the activity of a “protein phosphatase”, preferably being encoded by a gene comprising the nucleic acid sequence SEQ ID NO. 1298, preferably the coding region thereof, conferred the production of or the increase in glucose-1-phosphate compared with the wild type control.

[88733] The nucleic acid sequence of At2g30540 from Arabidopsis thaliana, e.g. as shown in the respective line in column 5 of Table I, application no. 17, has been published in F. And the activity of the gene product thereof is the activity of glutaredoxin.

[88734] Accordingly, in one embodiment, the process of the present invention for producing saccharic acid in a non-human organism, like a microorganism or a plant or a part thereof, comprises increasing or generating the activity of a gene product with the activity of a gene product conferring the activity of “glutaredoxin”, especially from Arabidopsis thaliana or its functional equivalent or its homolog, e.g. the increase of
[88735] (a) a gene product of a gene comprising the nucleic acid molecule as shown in the respective line in column 5 of Table I (whereby the respective line disclose in column 7 the fine chemical saccharic acid), application no. 17, preferably the coding region thereof, or a homolog or a fragment thereof, and being depicted in the same respective line as said At2g30540, or a functional equivalent or a homolog thereof as shown in column 8 of Table I, application no. 17, preferably the coding region thereof, particularly a homolog or functional equivalent as shown in column 8 of Table I B, application no. 17, and being depicted in the same respective line as said At2g30540, and preferably the activity is increased non-targeted, or
[88736] (b) a polypeptide comprising a polypeptide, a consensus sequence or at least a polypeptide motif as shown in the respective line in column 5 of Table II or in column 8 of Table IV, application no. 17, respectively, and being depicted in the same respective line as said At2g30540, or a functional equivalent or a homolog thereof as depicted in column 8 of Table II, application no. 17, preferably a homolog or functional equivalent as depicted in column 8 of Table II B, application no. 17, and being depicted in the same respective line as said At2g30540, and preferably the activity is increased non-targeted, whereby the respective line disclose in column 7 the fine chemical saccharic acid.

[88737] Accordingly, in one embodiment, the molecule which activity is to be increased in the process of the invention is the gene product with an activity as a “glutaredoxin”, preferably it is the molecule of section (a) or (b) of this paragraph.

[88738] In particular, it was observed that in plants, especially in Arabidopsis thaliana, increasing or generating the activity of a gene product non-targeted with the activity of a “glutaredoxin”, preferably being encoded by a gene comprising the nucleic acid sequence SEQ ID NO. 20346, preferably the coding region thereof, conferred the production of or the increase in saccharic acid compared with the wild type control.

[88739] The nucleic acid sequence of At2g34180 from Arabidopsis thaliana, e.g. as shown in the respective line in column 5 of Table I, application no. 17, has been published in F. And the activity of the gene product thereof is the activity of CBL-interacting protein kinase.

[88740] Accordingly, in one embodiment, the process of the present invention for producing fructose in a non-human organism, like a microorganism or a plant or a part thereof, comprises increasing or generating the activity of a gene product with the activity of a gene product conferring the activity of “CBL-interacting protein kinase”, especially from Arabidopsis thaliana or its functional equivalent or its homolog, e.g. the increase of
[88741] (a) a gene product of a gene comprising the nucleic acid molecule as shown in the respective line in column 5 of Table I (whereby the respective line disclose in column 7 the fine chemical fructose), application no. 17, preferably the coding region thereof, or a homolog or a fragment thereof, and being depicted in the same respective line as said At2g34180, or a functional equivalent or a homolog thereof as shown in column 8 of Table I, application no. 17, preferably the coding region thereof, particularly a homolog or functional equivalent as shown in column 8 of Table I B, application no. 17, and being depicted in the same respective line as said At2g34180, and preferably the activity is increased non-targeted, or
[88742] (b) a polypeptide comprising a polypeptide, a consensus sequence or at least a polypeptide motif as shown in the respective line in column 5 of Table II or in column 8 of Table IV, application no. 17, respectively, and being depicted in the same respective line as said At2g34180, or a functional equivalent or a homolog thereof as depicted in column 8 of Table II, application no. 17, preferably a homolog or functional equivalent as depicted in column 8 of Table II B, application no. 17, and being depicted in the same respective line as said At2g34180, and preferably the activity is increased non-targeted, whereby the respective line disclose in column 7 the fine chemical fructose.

[88743] Accordingly, in one embodiment, the molecule which activity is to be increased in the process of the invention is the gene product with an activity as a “CBL-interacting protein kinase”, preferably it is the molecule of section (a) or (b) of this paragraph.

[88744] In particular, it was observed that in plants, especially in Arabidopsis thaliana, increasing or generating the activity of a gene product non-targeted with the activity of a “CBL-interacting protein kinase”, preferably being encoded by a gene comprising the nucleic acid sequence SEQ ID NO. 20578, preferably the coding region thereof, conferred the production of or the increase in fructose compared with the wild type control.

[88745] The nucleic acid sequence of At2g34180 from Arabidopsis thaliana, e.g. as shown in the respective line in column 5 of Table I, application no. 17, has been published in F. And the activity of the gene product thereof is the activity of CBL-interacting protein kinase.

[88746] Accordingly, in one embodiment, the process of the present invention for producing glucose in a non-human organism, like a microorganism or a plant or a part thereof, comprises increasing or generating the activity of a gene product with the activity of a gene product conferring the activity of “CBL-interacting protein kinase”, especially from Arabidopsis thaliana or its functional equivalent or its homolog, e.g. the increase of
[88747] (a) a gene product of a gene comprising the nucleic acid molecule as shown in the respective line in column 5 of Table I (whereby the respective line disclose in column 7 the fine chemical glucose), application no. 17, preferably the coding region thereof, or a homolog or a fragment thereof, and being depicted in the same respective line as said At2g34180, or a functional equivalent or a homolog thereof as shown in column 8 of Table I, application no. 17, preferably the coding region thereof, particularly a homolog or functional equivalent as shown in column 8 of Table I B, application no. 17, and being depicted in the same respective line as said At2g34180, and preferably the activity is increased non-targeted, or
[88748] (b) a polypeptide comprising a polypeptide, a consensus sequence or at least a polypeptide motif as shown in the respective line in column 5 of Table II or in column 8 of Table IV, application no. 17, respectively, and being depicted in the same respective line as said At2g34180, or a functional equivalent or a homolog thereof as depicted in column 8 of Table II, application no. 17, preferably a homolog or functional equivalent as depicted in column 8 of Table II B, application no. 17, and being depicted in the same respective line as said At2g34180, and preferably the activity is increased non-targeted, whereby the respective line disclose in column 7 the fine chemical glucose.

[88749] Accordingly, in one embodiment, the molecule which activity is to be increased in the process of the invention is the gene product with an activity as a “CBL-interacting protein kinase”, preferably it is the molecule of section (a) or (b) of this paragraph.

[88750] In particular, it was observed that in plants, especially in Arabidopsis thaliana, increasing or generating the activity of a gene product non-targeted with the activity of a “CBL-interacting protein kinase”, preferably being encoded by a gene comprising the nucleic acid sequence SEQ ID NO. 20578, preferably the coding region thereof, conferred the production of or the increase in glucose compared with the wild type control.

[88751] The nucleic acid sequence of At2g34180 from Arabidopsis thaliana, e.g. as shown in the respective line in column 5 of Table I, application no. 17, has been published in F. And the activity of the gene product thereof is the activity of CBL-interacting protein kinase.

[88752] Accordingly, in one embodiment, the process of the present invention for producing sedoheptulose-7-phosphate in a non-human organism, like a microorganism or a plant or a part thereof, comprises increasing or generating the activity of a gene product with the activity of a gene product conferring the activity of “CBL-interacting protein kinase”, especially from Arabidopsis thaliana or its functional equivalent or its homolog, e.g. the increase of
[88753] (a) a gene product of a gene comprising the nucleic acid molecule as shown in the respective line in column 5 of Table I (whereby the respective line disclose in column 7 the fine chemical sedoheptulose-7-phosphate), application no. 17, preferably the coding region thereof, or a homolog or a fragment thereof, and being depicted in the same respective line as said At2g34180, or a functional equivalent or a homolog thereof as shown in column 8 of Table I, application no. 17, preferably the coding region thereof, particularly a homolog or functional equivalent as shown in column 8 of Table I B, application no. 17, and being depicted in the same respective line as said At2g34180, and preferably the activity is increased non-targeted, or
[88754] (b) a polypeptide comprising a polypeptide, a consensus sequence or at least a polypeptide motif as shown in the respective line in column 5 of Table II or in column 8 of Table IV, application no. 17, respectively, and being depicted in the same respective line as said At2g34180, or a functional equivalent or a homolog thereof as depicted in column 8 of Table II, application no. 17, preferably a homolog or functional equivalent as depicted in column 8 of Table II B, application no. 17, and being depicted in the same respective line as said At2g34180, and preferably the activity is increased non-targeted, whereby the respective line disclose in column 7 the fine chemical sedoheptulose-7-phosphate.

[88755] Accordingly, in one embodiment, the molecule which activity is to be increased in the process of the invention is the gene product with an activity as a “CBL-interacting protein kinase”, preferably it is the molecule of section (a) or (b) of this paragraph.

[88756] In particular, it was observed that in plants, especially in Arabidopsis thaliana, increasing or generating the activity of a gene product non-targeted with the activity of a “CBL-interacting protein kinase”, preferably being encoded by a gene comprising the nucleic acid sequence SEQ ID NO. 20578, preferably the coding region thereof, conferred the production of or the increase in sedoheptulose-7-phosphate compared with the wild type control.

[88757] The nucleic acid sequence of At2g37040 from Arabidopsis thaliana, e.g. as shown in the respective line in column 5 of Table I, application no. 17, has been published in F. And the activity of the gene product thereof is the activity of phenylalanine ammonia-lyase.

[88758] Accordingly, in one embodiment, the process of the present invention for producing glucose-1-phosphate in a non-human organism, like a microorganism or a plant or a part thereof, comprises increasing or generating the activity of a gene product with the activity of a gene product conferring the activity of “phenylalanine ammonia-lyase”, especially from Arabidopsis thaliana or its functional equivalent or its homolog, e.g. the increase of
[88759] (a) a gene product of a gene comprising the nucleic acid molecule as shown in the respective line in column 5 of Table I (whereby the respective line disclose in column 7 the fine chemical glucose-1-phosphate), application no. 17, preferably the coding region thereof, or a homolog or a fragment thereof, and being depicted in the same respective line as said At2g37040, or a functional equivalent or a homolog thereof as shown in column 8 of Table I, application no. 17, preferably the coding region thereof, particularly a homolog or functional equivalent as shown in column 8 of Table I B, application no. 17, and being depicted in the same respective line as said At2g37040, and preferably the activity is increased non-targeted, or
[88760] (b) a polypeptide comprising a polypeptide, a consensus sequence or at least a polypeptide motif as shown in the respective line in column 5 of Table II or in column 8 of Table IV, application no. 17, respectively, and being depicted in the same respective line as said At2g37040, or a functional equivalent or a homolog thereof as depicted in column 8 of Table II, application no. 17, preferably a homolog or functional equivalent as depicted in column 8 of Table II B, application no. 17, and being depicted in the same respective line as said At2g37040, and preferably the activity is increased non-targeted, whereby the respective line disclose in column 7 the fine chemical glucose-1-phosphate.

[88761] Accordingly, in one embodiment, the molecule which activity is to be increased in the process of the invention is the gene product with an activity as a “phenylalanine ammonia-lyase”, preferably it is the molecule of section (a) or (b) of this paragraph.

[88762] In particular, it was observed that in plants, especially in Arabidopsis thaliana, increasing or generating the activity of a gene product non-targeted with the activity of a “phenylalanine ammonia-lyase”, preferably being encoded by a gene comprising the nucleic acid sequence SEQ ID NO. 133042, preferably the coding region thereof, conferred the production of or the increase in glucose-1-phosphate compared with the wild type control.

[88763] The nucleic acid sequence of At2g42830 from Arabidopsis thaliana, e.g. as shown in the respective line in column 5 of Table I, application no. 17, has been published in F. And the activity of the gene product thereof is the activity of MADS box protein transcription factor.

[88764] Accordingly, in one embodiment, the process of the present invention for producing glucose-1-phosphate in a non-human organism, like a microorganism or a plant or a part thereof, comprises increasing or generating the activity of a gene product with the activity of a gene product conferring the activity of “MADS box protein transcription factor”, especially from Arabidopsis thaliana or its functional equivalent or its homolog, e.g. the increase of
[88765] (a) a gene product of a gene comprising the nucleic acid molecule as shown in the respective line in column 5 of Table I (whereby the respective line disclose in column 7 the fine chemical glucose-1-phosphate), application no. 17, preferably the coding region thereof, or a homolog or a fragment thereof, and being depicted in the same respective line as said At2g42830, or a functional equivalent or a homolog thereof as shown in column 8 of Table I, application no. 17, preferably the coding region thereof, particularly a homolog or functional equivalent as shown in column 8 of Table I B, application no. 17, and being depicted in the same respective line as said At2g42830, and preferably the activity is increased non-targeted, or
[88766] (b) a polypeptide comprising a polypeptide, a consensus sequence or at least a polypeptide motif as shown in the respective line in column 5 of Table II or in column 8 of Table IV, application no. 17, respectively, and being depicted in the same respective line as said At2g42830, or a functional equivalent or a homolog thereof as depicted in column 8 of Table II, application no. 17, preferably a homolog or functional equivalent as depicted in column 8 of Table II B, application no. 17, and being depicted in the same respective line as said At2g42830, and preferably the activity is increased non-targeted, whereby the respective line disclose in column 7 the fine chemical glucose-1-phosphate.

[88767] Accordingly, in one embodiment, the molecule which activity is to be increased in the process of the invention is the gene product with an activity as a “MADS box protein transcription factor”, preferably it is the molecule of section (a) or (b) of this paragraph.

[88768] In particular, it was observed that in plants, especially in Arabidopsis thaliana, increasing or generating the activity of a gene product non-targeted with the activity of a “MADS box protein transcription factor”, preferably being encoded by a gene comprising the nucleic acid sequence SEQ ID NO. 108727, preferably the coding region thereof, conferred the production of or the increase in glucose-1-phosphate compared with the wild type control.

[88769] The nucleic acid sequence of At2g45420 from Arabidopsis thaliana, e.g. as shown in the respective line in column 5 of Table I, application no. 17, has been published in F. And the activity of the gene product thereof is the activity of At2g45420-protein.

[88770] Accordingly, in one embodiment, the process of the present invention for producing myo-inositol in a non-human organism, like a microorganism or a plant or a part thereof, comprises increasing or generating the activity of a gene product with the activity of a gene product conferring the activity of “At2g45420-protein”, especially from Arabidopsis thaliana or its functional equivalent or its homolog, e.g. the increase of
[88771] (a) a gene product of a gene comprising the nucleic acid molecule as shown in the respective line in column 5 of Table I (whereby the respective line disclose in column 7 the fine chemical myo-inositol), application no. 17, preferably the coding region thereof, or a homolog or a fragment thereof, and being depicted in the same respective line as said At2g45420, or a functional equivalent or a homolog thereof as shown in column 8 of Table I, application no. 17, preferably the coding region thereof, particularly a homolog or functional equivalent as shown in column 8 of Table I B, application no. 17, and being depicted in the same respective line as said At2g45420, and preferably the activity is increased non-targeted, or
[88772] (b) a polypeptide comprising a polypeptide, a consensus sequence or at least a polypeptide motif as shown in the respective line in column 5 of Table II or in column 8 of Table IV, application no. 17, respectively, and being depicted in the same respective line as said At2g45420, or a functional equivalent or a homolog thereof as depicted in column 8 of Table II, application no. 17, preferably a homolog or functional equivalent as depicted in column 8 of Table II B, application no. 17, and being depicted in the same respective line as said At2g45420, and preferably the activity is increased non-targeted, whereby the respective line disclose in column 7 the fine chemical myo-inositol.

[88773] Accordingly, in one embodiment, the molecule which activity is to be increased in the process of the invention is the gene product with an activity as a “At2g45420-protein”, preferably it is the molecule of section (a) or (b) of this paragraph.

[88774] In particular, it was observed that in plants, especially in Arabidopsis thaliana, increasing or generating the activity of a gene product non-targeted with the activity of a “At2g45420-protein”, preferably being encoded by a gene comprising the nucleic acid sequence SEQ ID NO. 1623, preferably the coding region thereof, conferred the production of or the increase in myo-inositol compared with the wild type control.

[88775] The nucleic acid sequence of At2g46500 from Arabidopsis thaliana, e.g. as shown in the respective line in column 5 of Table I, application no. 17, has been published in F. And the activity of the gene product thereof is the activity of phosphatidylinositol 3- and 4-kinase family protein.

[88776] Accordingly, in one embodiment, the process of the present invention for producing glucose-1-phosphate in a non-human organism, like a microorganism or a plant or a part thereof, comprises increasing or generating the activity of a gene product with the activity of a gene product conferring the activity of “phosphatidylinositol 3- and 4-kinase family protein”, especially from Arabidopsis thaliana or its functional equivalent or its homolog, e.g. the increase of
[88777] (a) a gene product of a gene comprising the nucleic acid molecule as shown in the respective line in column 5 of Table I (whereby the respective line disclose in column 7 the fine chemical glucose-1-phosphate), application no. 17, preferably the coding region thereof, or a homolog or a fragment thereof, and being depicted in the same respective line as said At2g46500, or a functional equivalent or a homolog thereof as shown in column 8 of Table I, application no. 17, preferably the coding region thereof, particularly a homolog or functional equivalent as shown in column 8 of Table I B, application no. 17, and being depicted in the same respective line as said At2g46500, and preferably the activity is increased non-targeted, or
[88778] (b) a polypeptide comprising a polypeptide, a consensus sequence or at least a polypeptide motif as shown in the respective line in column 5 of Table II or in column 8 of Table IV, application no. 17, respectively, and being depicted in the same respective line as said At2g46500, or a functional equivalent or a homolog thereof as depicted in column 8 of Table II, application no. 17, preferably a homolog or functional equivalent as depicted in column 8 of Table II B, application no. 17, and being depicted in the same respective line as said At2g46500, and preferably the activity is increased non-targeted, whereby the respective line disclose in column 7 the fine chemical glucose-1-phosphate.

[88779] Accordingly, in one embodiment, the molecule which activity is to be increased in the process of the invention is the gene product with an activity as a “phosphatidylinositol 3- and 4-kinase family protein”, preferably it is the molecule of section (a) or (b) of this paragraph.

[88780] In particular, it was observed that in plants, especially in Arabidopsis thaliana, increasing or generating the activity of a gene product non-targeted with the activity of a “phosphatidylinositol 3- and 4-kinase family protein”, preferably being encoded by a gene comprising the nucleic acid sequence SEQ ID NO. 21106, preferably the coding region thereof, conferred the production of or the increase in glucose-1-phosphate compared with the wild type control.

[88781] The nucleic acid sequence of At2g47180 from Arabidopsis thaliana, e.g. as shown in the respective line in column 5 of Table I, application no. 17, has been published in F. And the activity of the gene product thereof is the activity of galactinol synthase.

[88782] Accordingly, in one embodiment, the process of the present invention for producing raffinose in a non-human organism, like a microorganism or a plant or a part thereof, comprises increasing or generating the activity of a gene product with the activity of a gene product conferring the activity of “galactinol synthase”, especially from Arabidopsis thaliana or its functional equivalent or its homolog, e.g. the increase of
[88783] (a) a gene product of a gene comprising the nucleic acid molecule as shown in the respective line in column 5 of Table I (whereby the respective line disclose in column 7 the fine chemical raffinose), application no. 17, preferably the coding region thereof, or a homolog or a fragment thereof, and being depicted in the same respective line as said At2g47180, or a functional equivalent or a homolog thereof as shown in column 8 of Table I, application no. 17, preferably the coding region thereof, particularly a homolog or functional equivalent as shown in column 8 of Table I B, application no. 17, and being depicted in the same respective line as said At2g47180, and preferably the activity is increased non-targeted, or
[88784] (b) a polypeptide comprising a polypeptide, a consensus sequence or at least a polypeptide motif as shown in the respective line in column 5 of Table II or in column 8 of Table IV, application no. 17, respectively, and being depicted in the same respective line as said At2g47180, or a functional equivalent or a homolog thereof as depicted in column 8 of Table II, application no. 17, preferably a homolog or functional equivalent as depicted in column 8 of Table II B, application no. 17, and being depicted in the same respective line as said At2g47180, and preferably the activity is increased non-targeted, whereby the respective line disclose in column 7 the fine chemical raffinose.

[88785] Accordingly, in one embodiment, the molecule which activity is to be increased in the process of the invention is the gene product with an activity as a “galactinol synthase”, preferably it is the molecule of section (a) or (b) of this paragraph.

[88786] In particular, it was observed that in plants, especially in Arabidopsis thaliana, increasing or generating the activity of a gene product non-targeted with the activity of a “galactinol synthase”, preferably being encoded by a gene comprising the nucleic acid sequence SEQ ID NO. 141637, preferably the coding region thereof, conferred the production of or the increase in raffinose compared with the wild type control.

[88787] The nucleic acid sequence of At2g47180 from Arabidopsis thaliana, e.g. as shown in the respective line in column 5 of Table I, application no. 17, has been published in F. And the activity of the gene product thereof is the activity of galactinol synthase.

[88788] Accordingly, in one embodiment, the process of the present invention for producing raffinose in a non-human organism, like a microorganism or a plant or a part thereof, comprises increasing or generating the activity of a gene product with the activity of a gene product conferring the activity of “galactinol synthase”, especially from Arabidopsis thaliana or its functional equivalent or its homolog, e.g. the increase of
[88789] (a) a gene product of a gene comprising the nucleic acid molecule as shown in the respective line in column 5 of Table I (whereby the respective line disclose in column 7 the fine chemical raffinose), application no. 17, preferably the coding region thereof, or a homolog or a fragment thereof, and being depicted in the same respective line as said At2g47180, or a functional equivalent or a homolog thereof as shown in column 8 of Table I, application no. 17, preferably the coding region thereof, particularly a homolog or functional equivalent as shown in column 8 of Table I B, application no. 17, and being depicted in the same respective line as said At2g47180, and preferably the activity is increased non-targeted, or
[88790] (b) a polypeptide comprising a polypeptide, a consensus sequence or at least a polypeptide motif as shown in the respective line in column 5 of Table II or in column 8 of Table IV, application no. 17, respectively, and being depicted in the same respective line as said At2g47180, or a functional equivalent or a homolog thereof as depicted in column 8 of Table II, application no. 17, preferably a homolog or functional equivalent as depicted in column 8 of Table II B, application no. 17, and being depicted in the same respective line as said At2g47180, and preferably the activity is increased non-targeted, whereby the respective line disclose in column 7 the fine chemical raffinose.

[88791] Accordingly, in one embodiment, the molecule which activity is to be increased in the process of the invention is the gene product with an activity as a “galactinol synthase”, preferably it is the molecule of section (a) or (b) of this paragraph.

[88792] In particular, it was observed that in plants, especially in Arabidopsis thaliana, increasing or generating the activity of a gene product non-targeted with the activity of a “galactinol synthase”, preferably being encoded by a gene comprising the nucleic acid sequence SEQ ID NO. 141637, preferably the coding region thereof, conferred the production of or the increase in raffinose compared with the wild type control.

[88793] The nucleic acid sequence of At3g02990 from Arabidopsis thaliana, e.g. as shown in the respective line in column 5 of Table I, application no. 17, has been published in F. And the activity of the gene product thereof is the activity of heat shock transcription factor.

[88794] Accordingly, in one embodiment, the process of the present invention for producing fructose in a non-human organism, like a microorganism or a plant or a part thereof, comprises increasing or generating the activity of a gene product with the activity of a gene product conferring the activity of “heat shock transcription factor”, especially from Arabidopsis thaliana or its functional equivalent or its homolog, e.g. the increase of
[88795] (a) a gene product of a gene comprising the nucleic acid molecule as shown in the respective line in column 5 of Table I (whereby the respective line disclose in column 7 the fine chemical fructose), application no. 17, preferably the coding region thereof, or a homolog or a fragment thereof, and being depicted in the same respective line as said At3g02990, or a functional equivalent or a homolog thereof as shown in column 8 of Table I, application no. 17, preferably the coding region thereof, particularly a homolog or functional equivalent as shown in column 8 of Table I B, application no. 17, and being depicted in the same respective line as said At3g02990, and preferably the activity is increased non-targeted, or
[88796] (b) a polypeptide comprising a polypeptide, a consensus sequence or at least a polypeptide motif as shown in the respective line in column 5 of Table II or in column 8 of Table IV, application no. 17, respectively, and being depicted in the same respective line as said At3g02990, or a functional equivalent or a homolog thereof as depicted in column 8 of Table II, application no. 17, preferably a homolog or functional equivalent as depicted in column 8 of Table II B, application no. 17, and being depicted in the same respective line as said At3g02990, and preferably the activity is increased non-targeted, whereby the respective line disclose in column 7 the fine chemical fructose.

[88797] Accordingly, in one embodiment, the molecule which activity is to be increased in the process of the invention is the gene product with an activity as a “heat shock transcription factor”, preferably it is the molecule of section (a) or (b) of this paragraph.

[88798] In particular, it was observed that in plants, especially in Arabidopsis thaliana, increasing or generating the activity of a gene product non-targeted with the activity of a “heat shock transcription factor”, preferably being encoded by a gene comprising the nucleic acid sequence SEQ ID NO. 68657, preferably the coding region thereof, conferred the production of or the increase in fructose compared with the wild type control.

[88799] The nucleic acid sequence of At3g02990 from Arabidopsis thaliana, e.g. as shown in the respective line in column 5 of Table I, application no. 17, has been published in F. And the activity of the gene product thereof is the activity of heat shock transcription factor.

[88800] Accordingly, in one embodiment, the process of the present invention for producing glucose in a non-human organism, like a microorganism or a plant or a part thereof, comprises increasing or generating the activity of a gene product with the activity of a gene product conferring the activity of “heat shock transcription factor”, especially from Arabidopsis thaliana or its functional equivalent or its homolog, e.g. the increase of
[88801] (a) a gene product of a gene comprising the nucleic acid molecule as shown in the respective line in column 5 of Table I (whereby the respective line disclose in column 7 the fine chemical glucose), application no. 17, preferably the coding region thereof, or a homolog or a fragment thereof, and being depicted in the same respective line as said At3g02990, or a functional equivalent or a homolog thereof as shown in column 8 of Table I, application no. 17, preferably the coding region thereof, particularly a homolog or functional equivalent as shown in column 8 of Table I B, application no. 17, and being depicted in the same respective line as said At3g02990, and preferably the activity is increased non-targeted, or
[88802] (b) a polypeptide comprising a polypeptide, a consensus sequence or at least a polypeptide motif as shown in the respective line in column 5 of Table II or in column 8 of Table IV, application no. 17, respectively, and being depicted in the same respective line as said At3g02990, or a functional equivalent or a homolog thereof as depicted in column 8 of Table II, application no. 17, preferably a homolog or functional equivalent as depicted in column 8 of Table II B, application no. 17, and being depicted in the same respective line as said At3g02990, and preferably the activity is increased non-targeted, whereby the respective line disclose in column 7 the fine chemical glucose.

[88803] Accordingly, in one embodiment, the molecule which activity is to be increased in the process of the invention is the gene product with an activity as a “heat shock transcription factor”, preferably it is the molecule of section (a) or (b) of this paragraph.

[88804] In particular, it was observed that in plants, especially in Arabidopsis thaliana, increasing or generating the activity of a gene product non-targeted with the activity of a “heat shock transcription factor”, preferably being encoded by a gene comprising the nucleic acid sequence SEQ ID NO. 68657, preferably the coding region thereof, conferred the production of or the increase in glucose compared with the wild type control.

[88805] The nucleic acid sequence of At3g02990 from Arabidopsis thaliana, e.g. as shown in the respective line in column 5 of Table I, application no. 17, has been published in F. And the activity of the gene product thereof is the activity of heat shock transcription factor.

[88806] Accordingly, in one embodiment, the process of the present invention for producing myo-inositol in a non-human organism, like a microorganism or a plant or a part thereof, comprises increasing or generating the activity of a gene product with the activity of a gene product conferring the activity of “heat shock transcription factor”, especially from Arabidopsis thaliana or its functional equivalent or its homolog, e.g. the increase of
[88807] (a) a gene product of a gene comprising the nucleic acid molecule as shown in the respective line in column 5 of Table I (whereby the respective line disclose in column 7 the fine chemical myo-inositol), application no. 17, preferably the coding region thereof, or a homolog or a fragment thereof, and being depicted in the same respective line as said At3g02990, or a functional equivalent or a homolog thereof as shown in column 8 of Table I, application no. 17, preferably the coding region thereof, particularly a homolog or functional equivalent as shown in column 8 of Table I B, application no. 17, and being depicted in the same respective line as said At3g02990, and preferably the activity is increased non-targeted, or
[88808] (b) a polypeptide comprising a polypeptide, a consensus sequence or at least a polypeptide motif as shown in the respective line in column 5 of Table II or in column 8 of Table IV, application no. 17, respectively, and being depicted in the same respective line as said At3g02990, or a functional equivalent or a homolog thereof as depicted in column 8 of Table II, application no. 17, preferably a homolog or functional equivalent as depicted in column 8 of Table II B, application no. 17, and being depicted in the same respective line as said At3g02990, and preferably the activity is increased non-targeted, whereby the respective line disclose in column 7 the fine chemical myo-inositol.

[88809] Accordingly, in one embodiment, the molecule which activity is to be increased in the process of the invention is the gene product with an activity as a “heat shock transcription factor”, preferably it is the molecule of section (a) or (b) of this paragraph.

[88810] In particular, it was observed that in plants, especially in Arabidopsis thaliana, increasing or generating the activity of a gene product non-targeted with the activity of a “heat shock transcription factor”, preferably being encoded by a gene comprising the nucleic acid sequence SEQ ID NO. 68657, preferably the coding region thereof, conferred the production of or the increase in myo-inositol compared with the wild type control.

[88811] The nucleic acid sequence of At3g02990 from Arabidopsis thaliana, e.g. as shown in the respective line in column 5 of Table I, application no. 17, has been published in F. And the activity of the gene product thereof is the activity of heat shock transcription factor.

[88812] Accordingly, in one embodiment, the process of the present invention for producing raffinose in a non-human organism, like a microorganism or a plant or a part thereof, comprises increasing or generating the activity of a gene product with the activity of a gene product conferring the activity of “heat shock transcription factor”, especially from Arabidopsis thaliana or its functional equivalent or its homolog, e.g. the increase of
[88813] (a) a gene product of a gene comprising the nucleic acid molecule as shown in the respective line in column 5 of Table I (whereby the respective line disclose in column 7 the fine chemical raffinose), application no. 17, preferably the coding region thereof, or a homolog or a fragment thereof, and being depicted in the same respective line as said At3g02990, or a functional equivalent or a homolog thereof as shown in column 8 of Table I, application no. 17, preferably the coding region thereof, particularly a homolog or functional equivalent as shown in column 8 of Table I B, application no. 17, and being depicted in the same respective line as said At3g02990, and preferably the activity is increased non-targeted, or
[88814] (b) a polypeptide comprising a polypeptide, a consensus sequence or at least a polypeptide motif as shown in the respective line in column 5 of Table II or in column 8 of Table IV, application no. 17, respectively, and being depicted in the same respective line as said At3g02990, or a functional equivalent or a homolog thereof as depicted in column 8 of Table II, application no. 17, preferably a homolog or functional equivalent as depicted in column 8 of Table II B, application no. 17, and being depicted in the same respective line as said At3g02990, and preferably the activity is increased non-targeted, whereby the respective line disclose in column 7 the fine chemical raffinose.

[88815] Accordingly, in one embodiment, the molecule which activity is to be increased in the process of the invention is the gene product with an activity as a “heat shock transcription factor”, preferably it is the molecule of section (a) or (b) of this paragraph.

[88816] In particular, it was observed that in plants, especially in Arabidopsis thaliana, increasing or generating the activity of a gene product non-targeted with the activity of a “heat shock transcription factor”, preferably being encoded by a gene comprising the nucleic acid sequence SEQ ID NO. 68657, preferably the coding region thereof, conferred the production of or the increase in raffinose compared with the wild type control.

[88817] The nucleic acid sequence of At3g04050 from Arabidopsis thaliana, e.g. as shown in the respective line in column 5 of Table I, application no. 17, has been published in F. And the activity of the gene product thereof is the activity of pyruvate kinase.

[88818] Accordingly, in one embodiment, the process of the present invention for producing fructose in a non-human organism, like a microorganism or a plant or a part thereof, comprises increasing or generating the activity of a gene product with the activity of a gene product conferring the activity of “pyruvate kinase”, especially from Arabidopsis thaliana or its functional equivalent or its homolog, e.g. the increase of
[88819] (a) a gene product of a gene comprising the nucleic acid molecule as shown in the respective line in column 5 of Table I (whereby the respective line disclose in column 7 the fine chemical fructose), application no. 17, preferably the coding region thereof, or a homolog or a fragment thereof, and being depicted in the same respective line as said At3g04050, or a functional equivalent or a homolog thereof as shown in column 8 of Table I, application no. 17, preferably the coding region thereof, particularly a homolog or functional equivalent as shown in column 8 of Table I B, application no. 17, and being depicted in the same respective line as said At3g04050, and preferably the activity is increased plastidic, or
[88820] (b) a polypeptide comprising a polypeptide, a consensus sequence or at least a polypeptide motif as shown in the respective line in column 5 of Table II or in column 8 of Table IV, application no. 17, respectively, and being depicted in the same respective line as said At3g04050, or a functional equivalent or a homolog thereof as depicted in column 8 of Table II, application no. 17, preferably a homolog or functional equivalent as depicted in column 8 of Table II B, application no. 17, and being depicted in the same respective line as said At3g04050, and preferably the activity is increased plastidic, whereby the respective line disclose in column 7 the fine chemical fructose.

[88821] Accordingly, in one embodiment, the molecule which activity is to be increased in the process of the invention is the gene product with an activity as a “pyruvate kinase”, preferably it is the molecule of section (a) or (b) of this paragraph.

[88822] In particular, it was observed that in plants, especially in Arabidopsis thaliana, increasing or generating the activity of a gene product plastidic with the activity of a “pyruvate kinase”, preferably being encoded by a gene comprising the nucleic acid sequence SEQ ID NO. 21497, preferably the coding region thereof, conferred the production of or the increase in fructose compared with the wild type control.

[88823] The nucleic acid sequence of At3g06270 from Arabidopsis thaliana, e.g. as shown in the respective line in column 5 of Table I, application no. 17, has been published in F. And the activity of the gene product thereof is the activity of protein phosphatase.

[88824] Accordingly, in one embodiment, the process of the present invention for producing glucose in a non-human organism, like a microorganism or a plant or a part thereof, comprises increasing or generating the activity of a gene product with the activity of a gene product conferring the activity of “protein phosphatase”, especially from Arabidopsis thaliana or its functional equivalent or its homolog, e.g. the increase of
[88825] (a) a gene product of a gene comprising the nucleic acid molecule as shown in the respective line in column 5 of Table I (whereby the respective line disclose in column 7 the fine chemical glucose), application no. 17, preferably the coding region thereof, or a homolog or a fragment thereof, and being depicted in the same respective line as said At3g06270, or a functional equivalent or a homolog thereof as shown in column 8 of Table I, application no. 17, preferably the coding region thereof, particularly a homolog or functional equivalent as shown in column 8 of Table I B, application no. 17, and being depicted in the same respective line as said At3g06270, and preferably the activity is increased non-targeted, or
[88826] (b) a polypeptide comprising a polypeptide, a consensus sequence or at least a polypeptide motif as shown in the respective line in column 5 of Table II or in column 8 of Table IV, application no. 17, respectively, and being depicted in the same respective line as said At3g06270, or a functional equivalent or a homolog thereof as depicted in column 8 of Table II, application no. 17, preferably a homolog or functional equivalent as depicted in column 8 of Table II B, application no. 17, and being depicted in the same respective line as said At3g06270, and preferably the activity is increased non-targeted, whereby the respective line disclose in column 7 the fine chemical glucose.

[88827] Accordingly, in one embodiment, the molecule which activity is to be increased in the process of the invention is the gene product with an activity as a “protein phosphatase”, preferably it is the molecule of section (a) or (b) of this paragraph.

[88828] In particular, it was observed that in plants, especially in Arabidopsis thaliana, increasing or generating the activity of a gene product non-targeted with the activity of a “protein phosphatase”, preferably being encoded by a gene comprising the nucleic acid sequence SEQ ID NO. 22015, preferably the coding region thereof, conferred the production of or the increase in glucose compared with the wild type control.

[88829] The nucleic acid sequence of At3g06270 from Arabidopsis thaliana, e.g. as shown in the respective line in column 5 of Table I, application no. 17, has been published in F. And the activity of the gene product thereof is the activity of protein phosphatase.

[88830] Accordingly, in one embodiment, the process of the present invention for producing myo-inositol in a non-human organism, like a microorganism or a plant or a part thereof, comprises increasing or generating the activity of a gene product with the activity of a gene product conferring the activity of “protein phosphatase”, especially from Arabidopsis thaliana or its functional equivalent or its homolog, e.g. the increase of
[88831] (a) a gene product of a gene comprising the nucleic acid molecule as shown in the respective line in column 5 of Table I (whereby the respective line disclose in column 7 the fine chemical myo-inositol), application no. 17, preferably the coding region thereof, or a homolog or a fragment thereof, and being depicted in the same respective line as said At3g06270, or a functional equivalent or a homolog thereof as shown in column 8 of Table I, application no. 17, preferably the coding region thereof, particularly a homolog or functional equivalent as shown in column 8 of Table I B, application no. 17, and being depicted in the same respective line as said At3g06270, and preferably the activity is increased non-targeted, or
[88832] (b) a polypeptide comprising a polypeptide, a consensus sequence or at least a polypeptide motif as shown in the respective line in column 5 of Table II or in column 8 of Table IV, application no. 17, respectively, and being depicted in the same respective line as said At3g06270, or a functional equivalent or a homolog thereof as depicted in column 8 of Table II, application no. 17, preferably a homolog or functional equivalent as depicted in column 8 of Table II B, application no. 17, and being depicted in the same respective line as said At3g06270, and preferably the activity is increased non-targeted, whereby the respective line disclose in column 7 the fine chemical myo-inositol.

[88833] Accordingly, in one embodiment, the molecule which activity is to be increased in the process of the invention is the gene product with an activity as a “protein phosphatase”, preferably it is the molecule of section (a) or (b) of this paragraph.

[88834] In particular, it was observed that in plants, especially in Arabidopsis thaliana, increasing or generating the activity of a gene product non-targeted with the activity of a “protein phosphatase”, preferably being encoded by a gene comprising the nucleic acid sequence SEQ ID NO. 22015, preferably the coding region thereof, conferred the production of or the increase in myo-inositol compared with the wild type control.

[88835] The nucleic acid sequence of At3g08710 from Arabidopsis thaliana, e.g. as shown in the respective line in column 5 of Table I, application no. 17, has been published in F. And the activity of the gene product thereof is the activity of thioredoxin family protein.

[88836] Accordingly, in one embodiment, the process of the present invention for producing fructose in a non-human organism, like a microorganism or a plant or a part thereof, comprises increasing or generating the activity of a gene product with the activity of a gene product conferring the activity of “thioredoxin family protein”, especially from Arabidopsis thaliana or its functional equivalent or its homolog, e.g. the increase of
[88837] (a) a gene product of a gene comprising the nucleic acid molecule as shown in the respective line in column 5 of Table I (whereby the respective line disclose in column 7 the fine chemical fructose), application no. 17, preferably the coding region thereof, or a homolog or a fragment thereof, and being depicted in the same respective line as said At3g08710, or a functional equivalent or a homolog thereof as shown in column 8 of Table I, application no. 17, preferably the coding region thereof, particularly a homolog or functional equivalent as shown in column 8 of Table I B, application no. 17, and being depicted in the same respective line as said At3g08710, and preferably the activity is increased non-targeted, or
[88838] (b) a polypeptide comprising a polypeptide, a consensus sequence or at least a polypeptide motif as shown in the respective line in column 5 of Table II or in column 8 of Table IV, application no. 17, respectively, and being depicted in the same respective line as said At3g08710, or a functional equivalent or a homolog thereof as depicted in column 8 of Table II, application no. 17, preferably a homolog or functional equivalent as depicted in column 8 of Table II B, application no. 17, and being depicted in the same respective line as said At3g08710, and preferably the activity is increased non-targeted, whereby the respective line disclose in column 7 the fine chemical fructose.

[88839] Accordingly, in one embodiment, the molecule which activity is to be increased in the process of the invention is the gene product with an activity as a “thioredoxin family protein”, preferably it is the molecule of section (a) or (b) of this paragraph.

[88840] In particular, it was observed that in plants, especially in Arabidopsis thaliana, increasing or generating the activity of a gene product non-targeted with the activity of a “thioredoxin family protein”, preferably being encoded by a gene comprising the nucleic acid sequence SEQ ID NO. 22249, preferably the coding region thereof, conferred the production of or the increase in fructose compared with the wild type control.

[88841] The nucleic acid sequence of At3g08710 from Arabidopsis thaliana, e.g. as shown in the respective line in column 5 of Table I, application no. 17, has been published in F. And the activity of the gene product thereof is the activity of thioredoxin family protein.

[88842] Accordingly, in one embodiment, the process of the present invention for producing glucose in a non-human organism, like a microorganism or a plant or a part thereof, comprises increasing or generating the activity of a gene product with the activity of a gene product conferring the activity of “thioredoxin family protein”, especially from Arabidopsis thaliana or its functional equivalent or its homolog, e.g. the increase of
[88843] (a) a gene product of a gene comprising the nucleic acid molecule as shown in the respective line in column 5 of Table I (whereby the respective line disclose in column 7 the fine chemical glucose), application no. 17, preferably the coding region thereof, or a homolog or a fragment thereof, and being depicted in the same respective line as said At3g08710, or a functional equivalent or a homolog thereof as shown in column 8 of Table I, application no. 17, preferably the coding region thereof, particularly a homolog or functional equivalent as shown in column 8 of Table I B, application no. 17, and being depicted in the same respective line as said At3g08710, and preferably the activity is increased non-targeted, or
[88844] (b) a polypeptide comprising a polypeptide, a consensus sequence or at least a polypeptide motif as shown in the respective line in column 5 of Table II or in column 8 of Table IV, application no. 17, respectively, and being depicted in the same respective line as said At3g08710, or a functional equivalent or a homolog thereof as depicted in column 8 of Table II, application no. 17, preferably a homolog or functional equivalent as depicted in column 8 of Table II B, application no. 17, and being depicted in the same respective line as said At3g08710, and preferably the activity is increased non-targeted, whereby the respective line disclose in column 7 the fine chemical glucose.

[88845] Accordingly, in one embodiment, the molecule which activity is to be increased in the process of the invention is the gene product with an activity as a “thioredoxin family protein”, preferably it is the molecule of section (a) or (b) of this paragraph.

[88846] In particular, it was observed that in plants, especially in Arabidopsis thaliana, increasing or generating the activity of a gene product non-targeted with the activity of a “thioredoxin family protein”, preferably being encoded by a gene comprising the nucleic acid sequence SEQ ID NO. 22249, preferably the coding region thereof, conferred the production of or the increase in glucose compared with the wild type control.

[88847] The nucleic acid sequence of At3g08710 from Arabidopsis thaliana, e.g. as shown in the respective line in column 5 of Table I, application no. 17, has been published in F. And the activity of the gene product thereof is the activity of thioredoxin family protein.

[88848] Accordingly, in one embodiment, the process of the present invention for producing myo-inositol in a non-human organism, like a microorganism or a plant or a part thereof, comprises increasing or generating the activity of a gene product with the activity of a gene product conferring the activity of “thioredoxin family protein”, especially from Arabidopsis thaliana or its functional equivalent or its homolog, e.g. the increase of
[88849] (a) a gene product of a gene comprising the nucleic acid molecule as shown in the respective line in column 5 of Table I (whereby the respective line disclose in column 7 the fine chemical myo-inositol), application no. 17, preferably the coding region thereof, or a homolog or a fragment thereof, and being depicted in the same respective line as said At3g08710, or a functional equivalent or a homolog thereof as shown in column 8 of Table I, application no. 17, preferably the coding region thereof, particularly a homolog or functional equivalent as shown in column 8 of Table I B, application no. 17, and being depicted in the same respective line as said At3g08710, and preferably the activity is increased non-targeted, or
[88850] (b) a polypeptide comprising a polypeptide, a consensus sequence or at least a polypeptide motif as shown in the respective line in column 5 of Table II or in column 8 of Table IV, application no. 17, respectively, and being depicted in the same respective line as said At3g08710, or a functional equivalent or a homolog thereof as depicted in column 8 of Table II, application no. 17, preferably a homolog or functional equivalent as depicted in column 8 of Table II B, application no. 17, and being depicted in the same respective line as said At3g08710, and preferably the activity is increased non-targeted, whereby the respective line disclose in column 7 the fine chemical myo-inositol.

[88851] Accordingly, in one embodiment, the molecule which activity is to be increased in the process of the invention is the gene product with an activity as a “thioredoxin family protein”, preferably it is the molecule of section (a) or (b) of this paragraph.

[88852] In particular, it was observed that in plants, especially in Arabidopsis thaliana, increasing or generating the activity of a gene product non-targeted with the activity of a “thioredoxin family protein”, preferably being encoded by a gene comprising the nucleic acid sequence SEQ ID NO. 22249, preferably the coding region thereof, conferred the production of or the increase in myo-inositol compared with the wild type control.

[88853] The nucleic acid sequence of At3g14230 from Arabidopsis thaliana, e.g. as shown in the respective line in column 5 of Table I, application no. 17, has been published in F. And the activity of the gene product thereof is the activity of DNA binding protein.

[88854] Accordingly, in one embodiment, the process of the present invention for producing saccharic acid in a non-human organism, like a microorganism or a plant or a part thereof, comprises increasing or generating the activity of a gene product with the activity of a gene product conferring the activity of “DNA binding protein”, especially from Arabidopsis thaliana or its functional equivalent or its homolog, e.g. the increase of
[88855] (a) a gene product of a gene comprising the nucleic acid molecule as shown in the respective line in column 5 of Table I (whereby the respective line disclose in column 7 the fine chemical saccharic acid), application no. 17, preferably the coding region thereof, or a homolog or a fragment thereof, and being depicted in the same respective line as said At3g14230, or a functional equivalent or a homolog thereof as shown in column 8 of Table I, application no. 17, preferably the coding region thereof, particularly a homolog or functional equivalent as shown in column 8 of Table I B, application no. 17, and being depicted in the same respective line as said At3g14230, and preferably the activity is increased plastidic, or
[88856] (b) a polypeptide comprising a polypeptide, a consensus sequence or at least a polypeptide motif as shown in the respective line in column 5 of Table II or in column 8 of Table IV, application no. 17, respectively, and being depicted in the same respective line as said At3g14230, or a functional equivalent or a homolog thereof as depicted in column 8 of Table II, application no. 17, preferably a homolog or functional equivalent as depicted in column 8 of Table II B, application no. 17, and being depicted in the same respective line as said At3g14230, and preferably the activity is increased plastidic, whereby the respective line disclose in column 7 the fine chemical saccharic acid.

[88857] Accordingly, in one embodiment, the molecule which activity is to be increased in the process of the invention is the gene product with an activity as a “DNA binding protein”, preferably it is the molecule of section (a) or (b) of this paragraph.

[88858] In particular, it was observed that in plants, especially in Arabidopsis thaliana, increasing or generating the activity of a gene product plastidic with the activity of a “DNA binding protein”, preferably being encoded by a gene comprising the nucleic acid sequence SEQ ID NO. 22699, preferably the coding region thereof, conferred the production of or the increase in saccharic acid compared with the wild type control.

[88859] The nucleic acid sequence of At3g20910 from Arabidopsis thaliana, e.g. as shown in the respective line in column 5 of Table I, application no. 17, has been published in F. And the activity of the gene product thereof is the activity of CCAAT-binding transcription factor.

[88860] Accordingly, in one embodiment, the process of the present invention for producing glucose-1-phosphate in a non-human organism, like a microorganism or a plant or a part thereof, comprises increasing or generating the activity of a gene product with the activity of a gene product conferring the activity of “CCAAT-binding transcription factor”, especially from Arabidopsis thaliana or its functional equivalent or its homolog, e.g. the increase of
[88861] (a) a gene product of a gene comprising the nucleic acid molecule as shown in the respective line in column 5 of Table I (whereby the respective line disclose in column 7 the fine chemical glucose-1-phosphate), application no. 17, preferably the coding region thereof, or a homolog or a fragment thereof, and being depicted in the same respective line as said At3g20910, or a functional equivalent or a homolog thereof as shown in column 8 of Table I, application no. 17, preferably the coding region thereof, particularly a homolog or functional equivalent as shown in column 8 of Table I B, application no. 17, and being depicted in the same respective line as said At3g20910, and preferably the activity is increased non-targeted, or
[88862] (b) a polypeptide comprising a polypeptide, a consensus sequence or at least a polypeptide motif as shown in the respective line in column 5 of Table II or in column 8 of Table IV, application no. 17, respectively, and being depicted in the same respective line as said At3g20910, or a functional equivalent or a homolog thereof as depicted in column 8 of Table II, application no. 17, preferably a homolog or functional equivalent as depicted in column 8 of Table II B, application no. 17, and being depicted in the same respective line as said At3g20910, and preferably the activity is increased non-targeted, whereby the respective line disclose in column 7 the fine chemical glucose-1-phosphate.

[88863] Accordingly, in one embodiment, the molecule which activity is to be increased in the process of the invention is the gene product with an activity as a “CCAAT-binding transcription factor”, preferably it is the molecule of section (a) or (b) of this paragraph.

[88864] In particular, it was observed that in plants, especially in Arabidopsis thaliana, increasing or generating the activity of a gene product non-targeted with the activity of a “CCAAT-binding transcription factor”, preferably being encoded by a gene comprising the nucleic acid sequence SEQ ID NO. 22921, preferably the coding region thereof, conferred the production of or the increase in glucose-1-phosphate compared with the wild type control.

[88865] The nucleic acid sequence of At3g20910 from Arabidopsis thaliana, e.g. as shown in the respective line in column 5 of Table I, application no. 17, has been published in F. And the activity of the gene product thereof is the activity of CCAAT-binding transcription factor.

[88866] Accordingly, in one embodiment, the process of the present invention for producing raffinose in a non-human organism, like a microorganism or a plant or a part thereof, comprises increasing or generating the activity of a gene product with the activity of a gene product conferring the activity of “CCAAT-binding transcription factor”, especially from Arabidopsis thaliana or its functional equivalent or its homolog, e.g. the increase of
[88867] (a) a gene product of a gene comprising the nucleic acid molecule as shown in the respective line in column 5 of Table I (whereby the respective line disclose in column 7 the fine chemical raffinose), application no. 17, preferably the coding region thereof, or a homolog or a fragment thereof, and being depicted in the same respective line as said At3g20910, or a functional equivalent or a homolog thereof as shown in column 8 of Table I, application no. 17, preferably the coding region thereof, particularly a homolog or functional equivalent as shown in column 8 of Table I B, application no. 17, and being depicted in the same respective line as said At3g20910, and preferably the activity is increased non-targeted, or
[88868] (b) a polypeptide comprising a polypeptide, a consensus sequence or at least a polypeptide motif as shown in the respective line in column 5 of Table II or in column 8 of Table IV, application no. 17, respectively, and being depicted in the same respective line as said At3g20910, or a functional equivalent or a homolog thereof as depicted in column 8 of Table II, application no. 17, preferably a homolog or functional equivalent as depicted in column 8 of Table II B, application no. 17, and being depicted in the same respective line as said At3g20910, and preferably the activity is increased non-targeted, whereby the respective line disclose in column 7 the fine chemical raffinose.

[88869] Accordingly, in one embodiment, the molecule which activity is to be increased in the process of the invention is the gene product with an activity as a “CCAAT-binding transcription factor”, preferably it is the molecule of section (a) or (b) of this paragraph.

[88870] In particular, it was observed that in plants, especially in Arabidopsis thaliana, increasing or generating the activity of a gene product non-targeted with the activity of a “CCAAT-binding transcription factor”, preferably being encoded by a gene comprising the nucleic acid sequence SEQ ID NO. 22921, preferably the coding region thereof, conferred the production of or the increase in raffinose compared with the wild type control.

[88871] The nucleic acid sequence of At3g23000 from Arabidopsis thaliana, e.g. as shown in the respective line in column 5 of Table I, application no. 17, has been published in F. And the activity of the gene product thereof is the activity of protein kinase.

[88872] Accordingly, in one embodiment, the process of the present invention for producing fructose in a non-human organism, like a microorganism or a plant or a part thereof, comprises increasing or generating the activity of a gene product with the activity of a gene product conferring the activity of “protein kinase”, especially from Arabidopsis thaliana or its functional equivalent or its homolog, e.g. the increase of
[88873] (a) a gene product of a gene comprising the nucleic acid molecule as shown in the respective line in column 5 of Table I (whereby the respective line disclose in column 7 the fine chemical fructose), application no. 17, preferably the coding region thereof, or a homolog or a fragment thereof, and being depicted in the same respective line as said At3g23000, or a functional equivalent or a homolog thereof as shown in column 8 of Table I, application no. 17, preferably the coding region thereof, particularly a homolog or functional equivalent as shown in column 8 of Table I B, application no. 17, and being depicted in the same respective line as said At3g23000, and preferably the activity is increased non-targeted, or
[88874] (b) a polypeptide comprising a polypeptide, a consensus sequence or at least a polypeptide motif as shown in the respective line in column 5 of Table II or in column 8 of Table IV, application no. 17, respectively, and being depicted in the same respective line as said At3g23000, or a functional equivalent or a homolog thereof as depicted in column 8 of Table II, application no. 17, preferably a homolog or functional equivalent as depicted in column 8 of Table II B, application no. 17, and being depicted in the same respective line as said At3g23000, and preferably the activity is increased non-targeted, whereby the respective line disclose in column 7 the fine chemical fructose.

[88875] Accordingly, in one embodiment, the molecule which activity is to be increased in the process of the invention is the gene product with an activity as a “protein kinase”, preferably it is the molecule of section (a) or (b) of this paragraph.

[88876] In particular, it was observed that in plants, especially in Arabidopsis thaliana, increasing or generating the activity of a gene product non-targeted with the activity of a “protein kinase”, preferably being encoded by a gene comprising the nucleic acid sequence SEQ ID NO. 1815, preferably the coding region thereof, conferred the production of or the increase in fructose compared with the wild type control.

[88877] The nucleic acid sequence of At3g23000 from Arabidopsis thaliana, e.g. as shown in the respective line in column 5 of Table I, application no. 17, has been published in F. And the activity of the gene product thereof is the activity of protein kinase.

[88878] Accordingly, in one embodiment, the process of the present invention for producing glucose in a non-human organism, like a microorganism or a plant or a part thereof, comprises increasing or generating the activity of a gene product with the activity of a gene product conferring the activity of “protein kinase”, especially from Arabidopsis thaliana or its functional equivalent or its homolog, e.g. the increase of
[88879] (a) a gene product of a gene comprising the nucleic acid molecule as shown in the respective line in column 5 of Table I (whereby the respective line disclose in column 7 the fine chemical glucose), application no. 17, preferably the coding region thereof, or a homolog or a fragment thereof, and being depicted in the same respective line as said At3g23000, or a functional equivalent or a homolog thereof as shown in column 8 of Table I, application no. 17, preferably the coding region thereof, particularly a homolog or functional equivalent as shown in column 8 of Table I B, application no. 17, and being depicted in the same respective line as said At3g23000, and preferably the activity is increased non-targeted, or
[88880] (b) a polypeptide comprising a polypeptide, a consensus sequence or at least a polypeptide motif as shown in the respective line in column 5 of Table II or in column 8 of Table IV, application no. 17, respectively, and being depicted in the same respective line as said At3g23000, or a functional equivalent or a homolog thereof as depicted in column 8 of Table II, application no. 17, preferably a homolog or functional equivalent as depicted in column 8 of Table II B, application no. 17, and being depicted in the same respective line as said At3g23000, and preferably the activity is increased non-targeted, whereby the respective line disclose in column 7 the fine chemical glucose.

[88881] Accordingly, in one embodiment, the molecule which activity is to be increased in the process of the invention is the gene product with an activity as a “protein kinase”, preferably it is the molecule of section (a) or (b) of this paragraph.

[88882] In particular, it was observed that in plants, especially in Arabidopsis thaliana, increasing or generating the activity of a gene product non-targeted with the activity of a “protein kinase”, preferably being encoded by a gene comprising the nucleic acid sequence SEQ ID NO. 1815, preferably the coding region thereof, conferred the production of or the increase in glucose compared with the wild type control.

[88883] The nucleic acid sequence of At3g23000 from Arabidopsis thaliana, e.g. as shown in the respective line in column 5 of Table I, application no. 17, has been published in F. And the activity of the gene product thereof is the activity of protein kinase.

[88884] Accordingly, in one embodiment, the process of the present invention for producing sedoheptulose-7-phosphate in a non-human organism, like a microorganism or a plant or a part thereof, comprises increasing or generating the activity of a gene product with the activity of a gene product conferring the activity of “protein kinase”, especially from Arabidopsis thaliana or its functional equivalent or its homolog, e.g. the increase of
[88885] (a) a gene product of a gene comprising the nucleic acid molecule as shown in the respective line in column 5 of Table I (whereby the respective line disclose in column 7 the fine chemical sedoheptulose-7-phosphate), application no. 17, preferably the coding region thereof, or a homolog or a fragment thereof, and being depicted in the same respective line as said At3g23000, or a functional equivalent or a homolog thereof as shown in column 8 of Table I, application no. 17, preferably the coding region thereof, particularly a homolog or functional equivalent as shown in column 8 of Table I B, application no. 17, and being depicted in the same respective line as said At3g23000, and preferably the activity is increased non-targeted, or
[88886] (b) a polypeptide comprising a polypeptide, a consensus sequence or at least a polypeptide motif as shown in the respective line in column 5 of Table II or in column 8 of Table IV, application no. 17, respectively, and being depicted in the same respective line as said At3g23000, or a functional equivalent or a homolog thereof as depicted in column 8 of Table II, application no. 17, preferably a homolog or functional equivalent as depicted in column 8 of Table II B, application no. 17, and being depicted in the same respective line as said At3g23000, and preferably the activity is increased non-targeted, whereby the respective line disclose in column 7 the fine chemical sedoheptulose-7-phosphate.

[88887] Accordingly, in one embodiment, the molecule which activity is to be increased in the process of the invention is the gene product with an activity as a “protein kinase”, preferably it is the molecule of section (a) or (b) of this paragraph.

[88888] In particular, it was observed that in plants, especially in Arabidopsis thaliana, increasing or generating the activity of a gene product non-targeted with the activity of a “protein kinase”, preferably being encoded by a gene comprising the nucleic acid sequence SEQ ID NO. 1815, preferably the coding region thereof, conferred the production of or the increase in sedoheptulose-7-phosphate compared with the wild type control.

[88889] The nucleic acid sequence of At3g26400 from Arabidopsis thaliana, e.g. as shown in the respective line in column 5 of Table I, application no. 17, has been published in F. And the activity of the gene product thereof is the activity of eukaryotic translation initiation factor.

[88890] Accordingly, in one embodiment, the process of the present invention for producing fructose in a non-human organism, like a microorganism or a plant or a part thereof, comprises increasing or generating the activity of a gene product with the activity of a gene product conferring the activity of “eukaryotic translation initiation factor”, especially from Arabidopsis thaliana or its functional equivalent or its homolog, e.g. the increase of
[88891] (a) a gene product of a gene comprising the nucleic acid molecule as shown in the respective line in column 5 of Table I (whereby the respective line disclose in column 7 the fine chemical fructose), application no. 17, preferably the coding region thereof, or a homolog or a fragment thereof, and being depicted in the same respective line as said At3g26400, or a functional equivalent or a homolog thereof as shown in column 8 of Table I, application no. 17, preferably the coding region thereof, particularly a homolog or functional equivalent as shown in column 8 of Table I B, application no. 17, and being depicted in the same respective line as said At3g26400, and preferably the activity is increased non-targeted, or
[88892] (b) a polypeptide comprising a polypeptide, a consensus sequence or at least a polypeptide motif as shown in the respective line in column 5 of Table II or in column 8 of Table IV, application no. 17, respectively, and being depicted in the same respective line as said At3g26400, or a functional equivalent or a homolog thereof as depicted in column 8 of Table II, application no. 17, preferably a homolog or functional equivalent as depicted in column 8 of Table II B, application no. 17, and being depicted in the same respective line as said At3g26400, and preferably the activity is increased non-targeted, whereby the respective line disclose in column 7 the fine chemical fructose.

[88893] Accordingly, in one embodiment, the molecule which activity is to be increased in the process of the invention is the gene product with an activity as a “eukaryotic translation initiation factor”, preferably it is the molecule of section (a) or (b) of this paragraph.

[88894] In particular, it was observed that in plants, especially in Arabidopsis thaliana, increasing or generating the activity of a gene product non-targeted with the activity of a “eukaryotic translation initiation factor”, preferably being encoded by a gene comprising the nucleic acid sequence SEQ ID NO. 68727, preferably the coding region thereof, conferred the production of or the increase in fructose compared with the wild type control.

[88895] The nucleic acid sequence of At3g26400 from Arabidopsis thaliana, e.g. as shown in the respective line in column 5 of Table I, application no. 17, has been published in F. And the activity of the gene product thereof is the activity of eukaryotic translation initiation factor.

[88896] Accordingly, in one embodiment, the process of the present invention for producing glucose in a non-human organism, like a microorganism or a plant or a part thereof, comprises increasing or generating the activity of a gene product with the activity of a gene product conferring the activity of “eukaryotic translation initiation factor”, especially from Arabidopsis thaliana or its functional equivalent or its homolog, e.g. the increase of
[88897] (a) a gene product of a gene comprising the nucleic acid molecule as shown in the respective line in column 5 of Table I (whereby the respective line disclose in column 7 the fine chemical glucose), application no. 17, preferably the coding region thereof, or a homolog or a fragment thereof, and being depicted in the same respective line as said At3g26400, or a functional equivalent or a homolog thereof as shown in column 8 of Table I, application no. 17, preferably the coding region thereof, particularly a homolog or functional equivalent as shown in column 8 of Table I B, application no. 17, and being depicted in the same respective line as said At3g26400, and preferably the activity is increased non-targeted, or
[88898] (b) a polypeptide comprising a polypeptide, a consensus sequence or at least a polypeptide motif as shown in the respective line in column 5 of Table II or in column 8 of Table IV, application no. 17, respectively, and being depicted in the same respective line as said At3g26400, or a functional equivalent or a homolog thereof as depicted in column 8 of Table II, application no. 17, preferably a homolog or functional equivalent as depicted in column 8 of Table II B, application no. 17, and being depicted in the same respective line as said At3g26400, and preferably the activity is increased non-targeted, whereby the respective line disclose in column 7 the fine chemical glucose.

[88899] Accordingly, in one embodiment, the molecule which activity is to be increased in the process of the invention is the gene product with an activity as a “eukaryotic translation initiation factor”, preferably it is the molecule of section (a) or (b) of this paragraph.

[88900] In particular, it was observed that in plants, especially in Arabidopsis thaliana, increasing or generating the activity of a gene product non-targeted with the activity of a “eukaryotic translation initiation factor”, preferably being encoded by a gene comprising the nucleic acid sequence SEQ ID NO. 68727, preferably the coding region thereof, conferred the production of or the increase in glucose compared with the wild type control.

[88901] The nucleic acid sequence of At3g26400 from Arabidopsis thaliana, e.g. as shown in the respective line in column 5 of Table I, application no. 17, has been published in F. And the activity of the gene product thereof is the activity of eukaryotic translation initiation factor.

[88902] Accordingly, in one embodiment, the process of the present invention for producing raffinose in a non-human organism, like a microorganism or a plant or a part thereof, comprises increasing or generating the activity of a gene product with the activity of a gene product conferring the activity of “eukaryotic translation initiation factor”, especially from Arabidopsis thaliana or its functional equivalent or its homolog, e.g. the increase of
[88903] (a) a gene product of a gene comprising the nucleic acid molecule as shown in the respective line in column 5 of Table I (whereby the respective line disclose in column 7 the fine chemical raffinose), application no. 17, preferably the coding region thereof, or a homolog or a fragment thereof, and being depicted in the same respective line as said At3g26400, or a functional equivalent or a homolog thereof as shown in column 8 of Table I, application no. 17, preferably the coding region thereof, particularly a homolog or functional equivalent as shown in column 8 of Table I B, application no. 17, and being depicted in the same respective line as said At3g26400, and preferably the activity is increased non-targeted, or
[88904] (b) a polypeptide comprising a polypeptide, a consensus sequence or at least a polypeptide motif as shown in the respective line in column 5 of Table II or in column 8 of Table IV, application no. 17, respectively, and being depicted in the same respective line as said At3g26400, or a functional equivalent or a homolog thereof as depicted in column 8 of Table II, application no. 17, preferably a homolog or functional equivalent as depicted in column 8 of Table II B, application no. 17, and being depicted in the same respective line as said At3g26400, and preferably the activity is increased non-targeted, whereby the respective line disclose in column 7 the fine chemical raffinose.

[88905] Accordingly, in one embodiment, the molecule which activity is to be increased in the process of the invention is the gene product with an activity as a “eukaryotic translation initiation factor”, preferably it is the molecule of section (a) or (b) of this paragraph.

[88906] In particular, it was observed that in plants, especially in Arabidopsis thaliana, increasing or generating the activity of a gene product non-targeted with the activity of a “eukaryotic translation initiation factor”, preferably being encoded by a gene comprising the nucleic acid sequence SEQ ID NO. 68727, preferably the coding region thereof, conferred the production of or the increase in raffinose compared with the wild type control.

[88907] The nucleic acid sequence of At3g59790 from Arabidopsis thaliana, e.g. as shown in the respective line in column 5 of Table I, application no. 17, has been published in F. And the activity of the gene product thereof is the activity of mitogen-activated protein kinase.

[88908] Accordingly, in one embodiment, the process of the present invention for producing myo-inositol in a non-human organism, like a microorganism or a plant or a part thereof, comprises increasing or generating the activity of a gene product with the activity of a gene product conferring the activity of “mitogen-activated protein kinase”, especially from Arabidopsis thaliana or its functional equivalent or its homolog, e.g. the increase of
[88909] (a) a gene product of a gene comprising the nucleic acid molecule as shown in the respective line in column 5 of Table I (whereby the respective line disclose in column 7 the fine chemical myo-inositol), application no. 17, preferably the coding region thereof, or a homolog or a fragment thereof, and being depicted in the same respective line as said At3g59790, or a functional equivalent or a homolog thereof as shown in column 8 of Table I, application no. 17, preferably the coding region thereof, particularly a homolog or functional equivalent as shown in column 8 of Table I B, application no. 17, and being depicted in the same respective line as said At3g59790, and preferably the activity is increased non-targeted, or
[88910] (b) a polypeptide comprising a polypeptide, a consensus sequence or at least a polypeptide motif as shown in the respective line in column 5 of Table II or in column 8 of Table IV, application no. 17, respectively, and being depicted in the same respective line as said At3g59790, or a functional equivalent or a homolog thereof as depicted in column 8 of Table II, application no. 17, preferably a homolog or functional equivalent as depicted in column 8 of Table II B, application no. 17, and being depicted in the same respective line as said At3g59790, and preferably the activity is increased non-targeted, whereby the respective line disclose in column 7 the fine chemical myo-inositol.

[88911] Accordingly, in one embodiment, the molecule which activity is to be increased in the process of the invention is the gene product with an activity as a “mitogen-activated protein kinase”, preferably it is the molecule of section (a) or (b) of this paragraph.

[88912] In particular, it was observed that in plants, especially in Arabidopsis thaliana, increasing or generating the activity of a gene product non-targeted with the activity of a “mitogen-activated protein kinase”, preferably being encoded by a gene comprising the nucleic acid sequence SEQ ID NO. 141758, preferably the coding region thereof, conferred the production of or the increase in myo-inositol compared with the wild type control.

[88913] The nucleic acid sequence of At3g61830 from Arabidopsis thaliana, e.g. as shown in the respective line in column 5 of Table I, application no. 17, has been published in F. And the activity of the gene product thereof is the activity of auxin response factor.

[88914] Accordingly, in one embodiment, the process of the present invention for producing sedoheptulose-7-phosphate in a non-human organism, like a microorganism or a plant or a part thereof, comprises increasing or generating the activity of a gene product with the activity of a gene product conferring the activity of “auxin response factor”, especially from Arabidopsis thaliana or its functional equivalent or its homolog, e.g. the increase of
[88915] (a) a gene product of a gene comprising the nucleic acid molecule as shown in the respective line in column 5 of Table I (whereby the respective line disclose in column 7 the fine chemical sedoheptulose-7-phosphate), application no. 17, preferably the coding region thereof, or a homolog or a fragment thereof, and being depicted in the same respective line as said At3g61830, or a functional equivalent or a homolog thereof as shown in column 8 of Table I, application no. 17, preferably the coding region thereof, particularly a homolog or functional equivalent as shown in column 8 of Table I B, application no. 17, and being depicted in the same respective line as said At3g61830, and preferably the activity is increased non-targeted, or
[88916] (b) a polypeptide comprising a polypeptide, a consensus sequence or at least a polypeptide motif as shown in the respective line in column 5 of Table II or in column 8 of Table IV, application no. 17, respectively, and being depicted in the same respective line as said At3g61830, or a functional equivalent or a homolog thereof as depicted in column 8 of Table II, application no. 17, preferably a homolog or functional equivalent as depicted in column 8 of Table II B, application no. 17, and being depicted in the same respective line as said At3g61830, and preferably the activity is increased non-targeted, whereby the respective line disclose in column 7 the fine chemical sedoheptulose-7-phosphate.

[88917] Accordingly, in one embodiment, the molecule which activity is to be increased in the process of the invention is the gene product with an activity as a “auxin response factor”, preferably it is the molecule of section (a) or (b) of this paragraph.

[88918] In particular, it was observed that in plants, especially in Arabidopsis thaliana, increasing or generating the activity of a gene product non-targeted with the activity of a “auxin response factor”, preferably being encoded by a gene comprising the nucleic acid sequence SEQ ID NO. 2367, preferably the coding region thereof, conferred the production of or the increase in sedoheptulose-7-phosphate compared with the wild type control.

[88919] The nucleic acid sequence of At3g62930 from Arabidopsis thaliana, e.g. as shown in the respective line in column 5 of Table I, application no. 17, has been published in F. And the activity of the gene product thereof is the activity of monthiol glutaredoxin.

[88920] Accordingly, in one embodiment, the process of the present invention for producing fructose in a non-human organism, like a microorganism or a plant or a part thereof, comprises increasing or generating the activity of a gene product with the activity of a gene product conferring the activity of “monthiol glutaredoxin”, especially from Arabidopsis thaliana or its functional equivalent or its homolog, e.g. the increase of
[88921] (a) a gene product of a gene comprising the nucleic acid molecule as shown in the respective line in column 5 of Table I (whereby the respective line disclose in column 7 the fine chemical fructose), application no. 17, preferably the coding region thereof, or a homolog or a fragment thereof, and being depicted in the same respective line as said At3g62930, or a functional equivalent or a homolog thereof as shown in column 8 of Table I, application no. 17, preferably the coding region thereof, particularly a homolog or functional equivalent as shown in column 8 of Table I B, application no. 17, and being depicted in the same respective line as said At3g62930, and preferably the activity is increased non-targeted, or
[88922] (b) a polypeptide comprising a polypeptide, a consensus sequence or at least a polypeptide motif as shown in the respective line in column 5 of Table II or in column 8 of Table IV, application no. 17, respectively, and being depicted in the same respective line as said At3g62930, or a functional equivalent or a homolog thereof as depicted in column 8 of Table II, application no. 17, preferably a homolog or functional equivalent as depicted in column 8 of Table II B, application no. 17, and being depicted in the same respective line as said At3g62930, and preferably the activity is increased non-targeted, whereby the respective line disclose in column 7 the fine chemical fructose.

[88923] Accordingly, in one embodiment, the molecule which activity is to be increased in the process of the invention is the gene product with an activity as a “monthiol glutaredoxin”, preferably it is the molecule of section (a) or (b) of this paragraph.

[88924] In particular, it was observed that in plants, especially in Arabidopsis thaliana, increasing or generating the activity of a gene product non-targeted with the activity of a “monthiol glutaredoxin”, preferably being encoded by a gene comprising the nucleic acid sequence SEQ ID NO. 2573, preferably the coding region thereof, conferred the production of or the increase in fructose compared with the wild type control.

[88925] The nucleic acid sequence of At3g62930 from Arabidopsis thaliana, e.g. as shown in the respective line in column 5 of Table I, application no. 17, has been published in F. And the activity of the gene product thereof is the activity of monthiol glutaredoxin.

[88926] Accordingly, in one embodiment, the process of the present invention for producing glucose in a non-human organism, like a microorganism or a plant or a part thereof, comprises increasing or generating the activity of a gene product with the activity of a gene product conferring the activity of “monthiol glutaredoxin”, especially from Arabidopsis thaliana or its functional equivalent or its homolog, e.g. the increase of
[88927] (a) a gene product of a gene comprising the nucleic acid molecule as shown in the respective line in column 5 of Table I (whereby the respective line disclose in column 7 the fine chemical glucose), application no. 17, preferably the coding region thereof, or a homolog or a fragment thereof, and being depicted in the same respective line as said At3g62930, or a functional equivalent or a homolog thereof as shown in column 8 of Table I, application no. 17, preferably the coding region thereof, particularly a homolog or functional equivalent as shown in column 8 of Table I B, application no. 17, and being depicted in the same respective line as said At3g62930, and preferably the activity is increased non-targeted, or
[88928] (b) a polypeptide comprising a polypeptide, a consensus sequence or at least a polypeptide motif as shown in the respective line in column 5 of Table II or in column 8 of Table IV, application no. 17, respectively, and being depicted in the same respective line as said At3g62930, or a functional equivalent or a homolog thereof as depicted in column 8 of Table II, application no. 17, preferably a homolog or functional equivalent as depicted in column 8 of Table II B, application no. 17, and being depicted in the same respective line as said At3g62930, and preferably the activity is increased non-targeted, whereby the respective line disclose in column 7 the fine chemical glucose.

[88929] Accordingly, in one embodiment, the molecule which activity is to be increased in the process of the invention is the gene product with an activity as a “monthiol glutaredoxin”, preferably it is the molecule of section (a) or (b) of this paragraph.

[88930] In particular, it was observed that in plants, especially in Arabidopsis thaliana, increasing or generating the activity of a gene product non-targeted with the activity of a “monthiol glutaredoxin”, preferably being encoded by a gene comprising the nucleic acid sequence SEQ ID NO. 2573, preferably the coding region thereof, conferred the production of or the increase in glucose compared with the wild type control.

[88931] The nucleic acid sequence of At3g62930 from Arabidopsis thaliana, e.g. as shown in the respective line in column 5 of Table I, application no. 17, has been published in F. And the activity of the gene product thereof is the activity of monthiol glutaredoxin.

[88932] Accordingly, in one embodiment, the process of the present invention for producing glucose-1-phosphate in a non-human organism, like a microorganism or a plant or a part thereof, comprises increasing or generating the activity of a gene product with the activity of a gene product conferring the activity of “monthiol glutaredoxin”, especially from Arabidopsis thaliana or its functional equivalent or its homolog, e.g. the increase of
[88933] (a) a gene product of a gene comprising the nucleic acid molecule as shown in the respective line in column 5 of Table I (whereby the respective line disclose in column 7 the fine chemical glucose-1-phosphate), application no. 17, preferably the coding region thereof, or a homolog or a fragment thereof, and being depicted in the same respective line as said At3g62930, or a functional equivalent or a homolog thereof as shown in column 8 of Table I, application no. 17, preferably the coding region thereof, particularly a homolog or functional equivalent as shown in column 8 of Table I B, application no. 17, and being depicted in the same respective line as said At3g62930, and preferably the activity is increased non-targeted, or
[88934] (b) a polypeptide comprising a polypeptide, a consensus sequence or at least a polypeptide motif as shown in the respective line in column 5 of Table II or in column 8 of Table IV, application no. 17, respectively, and being depicted in the same respective line as said At3g62930, or a functional equivalent or a homolog thereof as depicted in column 8 of Table II, application no. 17, preferably a homolog or functional equivalent as depicted in column 8 of Table II B, application no. 17, and being depicted in the same respective line as said At3g62930, and preferably the activity is increased non-targeted, whereby the respective line disclose in column 7 the fine chemical glucose-1-phosphate.

[88935] Accordingly, in one embodiment, the molecule which activity is to be increased in the process of the invention is the gene product with an activity as a “monthiol glutaredoxin”, preferably it is the molecule of section (a) or (b) of this paragraph.

[88936] In particular, it was observed that in plants, especially in Arabidopsis thaliana, increasing or generating the activity of a gene product non-targeted with the activity of a “monthiol glutaredoxin”, preferably being encoded by a gene comprising the nucleic acid sequence SEQ ID NO. 2573, preferably the coding region thereof, conferred the production of or the increase in glucose-1-phosphate compared with the wild type control.

[88937] The nucleic acid sequence of At3g62930 from Arabidopsis thaliana, e.g. as shown in the respective line in column 5 of Table I, application no. 17, has been published in F. And the activity of the gene product thereof is the activity of monthiol glutaredoxin.

[88938] Accordingly, in one embodiment, the process of the present invention for producing myo-inositol in a non-human organism, like a microorganism or a plant or a part thereof, comprises increasing or generating the activity of a gene product with the activity of a gene product conferring the activity of “monthiol glutaredoxin”, especially from Arabidopsis thaliana or its functional equivalent or its homolog, e.g. the increase of
[88939] (a) a gene product of a gene comprising the nucleic acid molecule as shown in the respective line in column 5 of Table I (whereby the respective line disclose in column 7 the fine chemical myo-inositol), application no. 17, preferably the coding region thereof, or a homolog or a fragment thereof, and being depicted in the same respective line as said At3g62930, or a functional equivalent or a homolog thereof as shown in column 8 of Table I, application no. 17, preferably the coding region thereof, particularly a homolog or functional equivalent as shown in column 8 of Table I B, application no. 17, and being depicted in the same respective line as said At3g62930, and preferably the activity is increased non-targeted, or
[88940] (b) a polypeptide comprising a polypeptide, a consensus sequence or at least a polypeptide motif as shown in the respective line in column 5 of Table II or in column 8 of Table IV, application no. 17, respectively, and being depicted in the same respective line as said At3g62930, or a functional equivalent or a homolog thereof as depicted in column 8 of Table II, application no. 17, preferably a homolog or functional equivalent as depicted in column 8 of Table II B, application no. 17, and being depicted in the same respective line as said At3g62930, and preferably the activity is increased non-targeted, whereby the respective line disclose in column 7 the fine chemical myo-inositol.

[88941] Accordingly, in one embodiment, the molecule which activity is to be increased in the process of the invention is the gene product with an activity as a “monthiol glutaredoxin”, preferably it is the molecule of section (a) or (b) of this paragraph.

[88942] In particular, it was observed that in plants, especially in Arabidopsis thaliana, increasing or generating the activity of a gene product non-targeted with the activity of a “monthiol glutaredoxin”, preferably being encoded by a gene comprising the nucleic acid sequence SEQ ID NO. 2573, preferably the coding region thereof, conferred the production of or the increase in myo-inositol compared with the wild type control.

[88943] The nucleic acid sequence of At3g62930 from Arabidopsis thaliana, e.g. as shown in the respective line in column 5 of Table I, application no. 17, has been published in F. And the activity of the gene product thereof is the activity of monthiol glutaredoxin.

[88944] Accordingly, in one embodiment, the process of the present invention for producing sedoheptulose-7-phosphate in a non-human organism, like a microorganism or a plant or a part thereof, comprises increasing or generating the activity of a gene product with the activity of a gene product conferring the activity of “monthiol glutaredoxin”, especially from Arabidopsis thaliana or its functional equivalent or its homolog, e.g. the increase of
[88945] (a) a gene product of a gene comprising the nucleic acid molecule as shown in the respective line in column 5 of Table I (whereby the respective line disclose in column 7 the fine chemical sedoheptulose-7-phosphate), application no. 17, preferably the coding region thereof, or a homolog or a fragment thereof, and being depicted in the same respective line as said At3g62930, or a functional equivalent or a homolog thereof as shown in column 8 of Table I, application no. 17, preferably the coding region thereof, particularly a homolog or functional equivalent as shown in column 8 of Table I B, application no. 17, and being depicted in the same respective line as said At3g62930, and preferably the activity is increased non-targeted, or
[88946] (b) a polypeptide comprising a polypeptide, a consensus sequence or at least a polypeptide motif as shown in the respective line in column 5 of Table II or in column 8 of Table IV, application no. 17, respectively, and being depicted in the same respective line as said At3g62930, or a functional equivalent or a homolog thereof as depicted in column 8 of Table II, application no. 17, preferably a homolog or functional equivalent as depicted in column 8 of Table II B, application no. 17, and being depicted in the same respective line as said At3g62930, and preferably the activity is increased non-targeted, whereby the respective line disclose in column 7 the fine chemical sedoheptulose-7-phosphate.

[88947] Accordingly, in one embodiment, the molecule which activity is to be increased in the process of the invention is the gene product with an activity as a “monthiol glutaredoxin”, preferably it is the molecule of section (a) or (b) of this paragraph.

[88948] In particular, it was observed that in plants, especially in Arabidopsis thaliana, increasing or generating the activity of a gene product non-targeted with the activity of a “monthiol glutaredoxin”, preferably being encoded by a gene comprising the nucleic acid sequence SEQ ID NO. 2573, preferably the coding region thereof, conferred the production of or the increase in sedoheptulose-7-phosphate compared with the wild type control.

[88949] The nucleic acid sequence of At3g62930 from Arabidopsis thaliana, e.g. as shown in the respective line in column 5 of Table I, application no. 17, has been published in F. And the activity of the gene product thereof is the activity of monthiol glutaredoxin.

[88950] Accordingly, in one embodiment, the process of the present invention for producing sucrose in a non-human organism, like a microorganism or a plant or a part thereof, comprises increasing or generating the activity of a gene product with the activity of a gene product conferring the activity of “monthiol glutaredoxin”, especially from Arabidopsis thaliana or its functional equivalent or its homolog, e.g. the increase of
[88951] (a) a gene product of a gene comprising the nucleic acid molecule as shown in the respective line in column 5 of Table I (whereby the respective line disclose in column 7 the fine chemical sucrose), application no. 17, preferably the coding region thereof, or a homolog or a fragment thereof, and being depicted in the same respective line as said At3g62930, or a functional equivalent or a homolog thereof as shown in column 8 of Table I, application no. 17, preferably the coding region thereof, particularly a homolog or functional equivalent as shown in column 8 of Table I B, application no. 17, and being depicted in the same respective line as said At3g62930, and preferably the activity is increased non-targeted, or
[88952] (b) a polypeptide comprising a polypeptide, a consensus sequence or at least a polypeptide motif as shown in the respective line in column 5 of Table II or in column 8 of Table IV, application no. 17, respectively, and being depicted in the same respective line as said At3g62930, or a functional equivalent or a homolog thereof as depicted in column 8 of Table II, application no. 17, preferably a homolog or functional equivalent as depicted in column 8 of Table II B, application no. 17, and being depicted in the same respective line as said At3g62930, and preferably the activity is increased non-targeted, whereby the respective line disclose in column 7 the fine chemical sucrose.

[88953] Accordingly, in one embodiment, the molecule which activity is to be increased in the process of the invention is the gene product with an activity as a “monthiol glutaredoxin”, preferably it is the molecule of section (a) or (b) of this paragraph.

[88954] In particular, it was observed that in plants, especially in Arabidopsis thaliana, increasing or generating the activity of a gene product non-targeted with the activity of a “monthiol glutaredoxin”, preferably being encoded by a gene comprising the nucleic acid sequence SEQ ID NO. 2573, preferably the coding region thereof, conferred the production of or the increase in sucrose compared with the wild type control.

[88955] The nucleic acid sequence of At3g62950 from Arabidopsis thaliana, e.g. as shown in the respective line in column 5 of Table I, application no. 17, has been published in F. And the activity of the gene product thereof is the activity of glutaredoxin.

[88956] Accordingly, in one embodiment, the process of the present invention for producing fructose in a non-human organism, like a microorganism or a plant or a part thereof, comprises increasing or generating the activity of a gene product with the activity of a gene product conferring the activity of “glutaredoxin”, especially from Arabidopsis thaliana or its functional equivalent or its homolog, e.g. the increase of
[88957] (a) a gene product of a gene comprising the nucleic acid molecule as shown in the respective line in column 5 of Table I (whereby the respective line disclose in column 7 the fine chemical fructose), application no. 17, preferably the coding region thereof, or a homolog or a fragment thereof, and being depicted in the same respective line as said At3g62950, or a functional equivalent or a homolog thereof as shown in column 8 of Table I, application no. 17, preferably the coding region thereof, particularly a homolog or functional equivalent as shown in column 8 of Table I B, application no. 17, and being depicted in the same respective line as said At3g62950, and preferably the activity is increased non-targeted, or
[88958] (b) a polypeptide comprising a polypeptide, a consensus sequence or at least a polypeptide motif as shown in the respective line in column 5 of Table II or in column 8 of Table IV, application no. 17, respectively, and being depicted in the same respective line as said At3g62950, or a functional equivalent or a homolog thereof as depicted in column 8 of Table II, application no. 17, preferably a homolog or functional equivalent as depicted in column 8 of Table II B, application no. 17, and being depicted in the same respective line as said At3g62950, and preferably the activity is increased non-targeted, whereby the respective line disclose in column 7 the fine chemical fructose.

[88959] Accordingly, in one embodiment, the molecule which activity is to be increased in the process of the invention is the gene product with an activity as a “glutaredoxin”, preferably it is the molecule of section (a) or (b) of this paragraph.

[88960] In particular, it was observed that in plants, especially in Arabidopsis thaliana, increasing or generating the activity of a gene product non-targeted with the activity of a “glutaredoxin”, preferably being encoded by a gene comprising the nucleic acid sequence SEQ ID NO. 2935, preferably the coding region thereof, conferred the production of or the increase in fructose compared with the wild type control.

[88961] The nucleic acid sequence of At3g62950 from Arabidopsis thaliana, e.g. as shown in the respective line in column 5 of Table I, application no. 17, has been published in F. And the activity of the gene product thereof is the activity of glutaredoxin.

[88962] Accordingly, in one embodiment, the process of the present invention for producing glucose in a non-human organism, like a microorganism or a plant or a part thereof, comprises increasing or generating the activity of a gene product with the activity of a gene product conferring the activity of “glutaredoxin”, especially from Arabidopsis thaliana or its functional equivalent or its homolog, e.g. the increase of
[88963] (a) a gene product of a gene comprising the nucleic acid molecule as shown in the respective line in column 5 of Table I (whereby the respective line disclose in column 7 the fine chemical glucose), application no. 17, preferably the coding region thereof, or a homolog or a fragment thereof, and being depicted in the same respective line as said At3g62950, or a functional equivalent or a homolog thereof as shown in column 8 of Table I, application no. 17, preferably the coding region thereof, particularly a homolog or functional equivalent as shown in column 8 of Table I B, application no. 17, and being depicted in the same respective line as said At3g62950, and preferably the activity is increased non-targeted, or
[88964] (b) a polypeptide comprising a polypeptide, a consensus sequence or at least a polypeptide motif as shown in the respective line in column 5 of Table II or in column 8 of Table IV, application no. 17, respectively, and being depicted in the same respective line as said At3g62950, or a functional equivalent or a homolog thereof as depicted in column 8 of Table II, application no. 17, preferably a homolog or functional equivalent as depicted in column 8 of Table II B, application no. 17, and being depicted in the same respective line as said At3g62950, and preferably the activity is increased non-targeted, whereby the respective line disclose in column 7 the fine chemical glucose.

[88965] Accordingly, in one embodiment, the molecule which activity is to be increased in the process of the invention is the gene product with an activity as a “glutaredoxin”, preferably it is the molecule of section (a) or (b) of this paragraph.

[88966] In particular, it was observed that in plants, especially in Arabidopsis thaliana, increasing or generating the activity of a gene product non-targeted with the activity of a “glutaredoxin”, preferably being encoded by a gene comprising the nucleic acid sequence SEQ ID NO. 2935, preferably the coding region thereof, conferred the production of or the increase in glucose compared with the wild type control.

[88967] The nucleic acid sequence of At3g62950 from Arabidopsis thaliana, e.g. as shown in the respective line in column 5 of Table I, application no. 17, has been published in F. And the activity of the gene product thereof is the activity of glutaredoxin.

[88968] Accordingly, in one embodiment, the process of the present invention for producing glucose-1-phosphate in a non-human organism, like a microorganism or a plant or a part thereof, comprises increasing or generating the activity of a gene product with the activity of a gene product conferring the activity of “glutaredoxin”, especially from Arabidopsis thaliana or its functional equivalent or its homolog, e.g. the increase of
[88969] (a) a gene product of a gene comprising the nucleic acid molecule as shown in the respective line in column 5 of Table I (whereby the respective line disclose in column 7 the fine chemical glucose-1-phosphate), application no. 17, preferably the coding region thereof, or a homolog or a fragment thereof, and being depicted in the same respective line as said At3g62950, or a functional equivalent or a homolog thereof as shown in column 8 of Table I, application no. 17, preferably the coding region thereof, particularly a homolog or functional equivalent as shown in column 8 of Table I B, application no. 17, and being depicted in the same respective line as said At3g62950, and preferably the activity is increased non-targeted, or
[88970] (b) a polypeptide comprising a polypeptide, a consensus sequence or at least a polypeptide motif as shown in the respective line in column 5 of Table II or in column 8 of Table IV, application no. 17, respectively, and being depicted in the same respective line as said At3g62950, or a functional equivalent or a homolog thereof as depicted in column 8 of Table II, application no. 17, preferably a homolog or functional equivalent as depicted in column 8 of Table II B, application no. 17, and being depicted in the same respective line as said At3g62950, and preferably the activity is increased non-targeted, whereby the respective line disclose in column 7 the fine chemical glucose-1-phosphate.

[88971] Accordingly, in one embodiment, the molecule which activity is to be increased in the process of the invention is the gene product with an activity as a “glutaredoxin”, preferably it is the molecule of section (a) or (b) of this paragraph.

[88972] In particular, it was observed that in plants, especially in Arabidopsis thaliana, increasing or generating the activity of a gene product non-targeted with the activity of a “glutaredoxin”, preferably being encoded by a gene comprising the nucleic acid sequence SEQ ID NO. 2935, preferably the coding region thereof, conferred the production of or the increase in glucose-1-phosphate compared with the wild type control.

[88973] The nucleic acid sequence of At3g62950 from Arabidopsis thaliana, e.g. as shown in the respective line in column 5 of Table I, application no. 17, has been published in F. And the activity of the gene product thereof is the activity of glutaredoxin.

[88974] Accordingly, in one embodiment, the process of the present invention for producing myo-inositol in a non-human organism, like a microorganism or a plant or a part thereof, comprises increasing or generating the activity of a gene product with the activity of a gene product conferring the activity of “glutaredoxin”, especially from Arabidopsis thaliana or its functional equivalent or its homolog, e.g. the increase of
[88975] (a) a gene product of a gene comprising the nucleic acid molecule as shown in the respective line in column 5 of Table I (whereby the respective line disclose in column 7 the fine chemical myo-inositol), application no. 17, preferably the coding region thereof, or a homolog or a fragment thereof, and being depicted in the same respective line as said At3g62950, or a functional equivalent or a homolog thereof as shown in column 8 of Table I, application no. 17, preferably the coding region thereof, particularly a homolog or functional equivalent as shown in column 8 of Table I B, application no. 17, and being depicted in the same respective line as said At3g62950, and preferably the activity is increased non-targeted, or
[88976] (b) a polypeptide comprising a polypeptide, a consensus sequence or at least a polypeptide motif as shown in the respective line in column 5 of Table II or in column 8 of Table IV, application no. 17, respectively, and being depicted in the same respective line as said At3g62950, or a functional equivalent or a homolog thereof as depicted in column 8 of Table II, application no. 17, preferably a homolog or functional equivalent as depicted in column 8 of Table II B, application no. 17, and being depicted in the same respective line as said At3g62950, and preferably the activity is increased non-targeted, whereby the respective line disclose in column 7 the fine chemical myo-inositol.

[88977] Accordingly, in one embodiment, the molecule which activity is to be increased in the process of the invention is the gene product with an activity as a “glutaredoxin”, preferably it is the molecule of section (a) or (b) of this paragraph.

[88978] In particular, it was observed that in plants, especially in Arabidopsis thaliana, increasing or generating the activity of a gene product non-targeted with the activity of a “glutaredoxin”, preferably being encoded by a gene comprising the nucleic acid sequence SEQ ID NO. 2935, preferably the coding region thereof, conferred the production of or the increase in myo-inositol compared with the wild type control.

[88979] The nucleic acid sequence of At3g62950 from Arabidopsis thaliana, e.g. as shown in the respective line in column 5 of Table I, application no. 17, has been published in F. And the activity of the gene product thereof is the activity of glutaredoxin.

[88980] Accordingly, in one embodiment, the process of the present invention for producing sedoheptulose-7-phosphate in a non-human organism, like a microorganism or a plant or a part thereof, comprises increasing or generating the activity of a gene product with the activity of a gene product conferring the activity of “glutaredoxin”, especially from Arabidopsis thaliana or its functional equivalent or its homolog, e.g. the increase of
[88981] (a) a gene product of a gene comprising the nucleic acid molecule as shown in the respective line in column 5 of Table I (whereby the respective line disclose in column 7 the fine chemical sedoheptulose-7-phosphate), application no. 17, preferably the coding region thereof, or a homolog or a fragment thereof, and being depicted in the same respective line as said At3g62950, or a functional equivalent or a homolog thereof as shown in column 8 of Table I, application no. 17, preferably the coding region thereof, particularly a homolog or functional equivalent as shown in column 8 of Table I B, application no. 17, and being depicted in the same respective line as said At3g62950, and preferably the activity is increased non-targeted, or
[88982] (b) a polypeptide comprising a polypeptide, a consensus sequence or at least a polypeptide motif as shown in the respective line in column 5 of Table II or in column 8 of Table IV, application no. 17, respectively, and being depicted in the same respective line as said At3g62950, or a functional equivalent or a homolog thereof as depicted in column 8 of Table II, application no. 17, preferably a homolog or functional equivalent as depicted in column 8 of Table II B, application no. 17, and being depicted in the same respective line as said At3g62950, and preferably the activity is increased non-targeted, whereby the respective line disclose in column 7 the fine chemical sedoheptulose-7-phosphate.

[88983] Accordingly, in one embodiment, the molecule which activity is to be increased in the process of the invention is the gene product with an activity as a “glutaredoxin”, preferably it is the molecule of section (a) or (b) of this paragraph.

[88984] In particular, it was observed that in plants, especially in Arabidopsis thaliana, increasing or generating the activity of a gene product non-targeted with the activity of a “glutaredoxin”, preferably being encoded by a gene comprising the nucleic acid sequence SEQ ID NO. 2935, preferably the coding region thereof, conferred the production of or the increase in sedoheptulose7-phosphate compared with the wild type control.

[88985] The nucleic acid sequence of At3g62950 from Arabidopsis thaliana, e.g. as shown in the respective line in column 5 of Table I, application no. 17, has been published in F. And the activity of the gene product thereof is the activity of glutaredoxin.

[88986] Accordingly, in one embodiment, the process of the present invention for producing sucrose in a non-human organism, like a microorganism or a plant or a part thereof, comprises increasing or generating the activity of a gene product with the activity of a gene product conferring the activity of “glutaredoxin”, especially from Arabidopsis thaliana or its functional equivalent or its homolog, e.g. the increase of
[88987] (a) a gene product of a gene comprising the nucleic acid molecule as shown in the respective line in column 5 of Table I (whereby the respective line disclose in column 7 the fine chemical sucrose), application no. 17, preferably the coding region thereof, or a homolog or a fragment thereof, and being depicted in the same respective line as said At3g62950, or a functional equivalent or a homolog thereof as shown in column 8 of Table I, application no. 17, preferably the coding region thereof, particularly a homolog or functional equivalent as shown in column 8 of Table I B, application no. 17, and being depicted in the same respective line as said At3g62950, and preferably the activity is increased non-targeted, or
[88988] (b) a polypeptide comprising a polypeptide, a consensus sequence or at least a polypeptide motif as shown in the respective line in column 5 of Table II or in column 8 of Table IV, application no. 17, respectively, and being depicted in the same respective line as said At3g62950, or a functional equivalent or a homolog thereof as depicted in column 8 of Table II, application no. 17, preferably a homolog or functional equivalent as depicted in column 8 of Table II B, application no. 17, and being depicted in the same respective line as said At3g62950, and preferably the activity is increased non-targeted, whereby the respective line disclose in column 7 the fine chemical sucrose.

[88989] Accordingly, in one embodiment, the molecule which activity is to be increased in the process of the invention is the gene product with an activity as a “glutaredoxin”, preferably it is the molecule of section (a) or (b) of this paragraph.

[88990] In particular, it was observed that in plants, especially in Arabidopsis thaliana, increasing or generating the activity of a gene product non-targeted with the activity of a “glutaredoxin”, preferably being encoded by a gene comprising the nucleic acid sequence SEQ ID NO. 2935, preferably the coding region thereof, conferred the production of or the increase in sucrose compared with the wild type control.

[88991] The nucleic acid sequence of At4g09960 from Arabidopsis thaliana, e.g. as shown in the respective line in column 5 of Table I, application no. 17, has been published in F. And the activity of the gene product thereof is the activity of transcription factor.

[88992] Accordingly, in one embodiment, the process of the present invention for producing glucose-1-phosphate in a non-human organism, like a microorganism or a plant or a part thereof, comprises increasing or generating the activity of a gene product with the activity of a gene product conferring the activity of “transcription factor”, especially from Arabidopsis thaliana or its functional equivalent or its homolog, e.g. the increase of
[88993] (a) a gene product of a gene comprising the nucleic acid molecule as shown in the respective line in column 5 of Table I (whereby the respective line disclose in column 7 the fine chemical glucose-1-phosphate), application no. 17, preferably the coding region thereof, or a homolog or a fragment thereof, and being depicted in the same respective line as said At4g09960, or a functional equivalent or a homolog thereof as shown in column 8 of Table I, application no. 17, preferably the coding region thereof, particularly a homolog or functional equivalent as shown in column 8 of Table I B, application no. 17, and being depicted in the same respective line as said At4g09960, and preferably the activity is increased non-targeted, or
[88994] (b) a polypeptide comprising a polypeptide, a consensus sequence or at least a polypeptide motif as shown in the respective line in column 5 of Table II or in column 8 of Table IV, application no. 17, respectively, and being depicted in the same respective line as said At4g09960, or a functional equivalent or a homolog thereof as depicted in column 8 of Table II, application no. 17, preferably a homolog or functional equivalent as depicted in column 8 of Table II B, application no. 17, and being depicted in the same respective line as said At4g09960, and preferably the activity is increased non-targeted, whereby the respective line disclose in column 7 the fine chemical glucose-1-phosphate.

[88995] Accordingly, in one embodiment, the molecule which activity is to be increased in the process of the invention is the gene product with an activity as a “transcription factor”, preferably it is the molecule of section (a) or (b) of this paragraph.

[88996] In particular, it was observed that in plants, especially in Arabidopsis thaliana, increasing or generating the activity of a gene product non-targeted with the activity of a “transcription factor”, preferably being encoded by a gene comprising the nucleic acid sequence SEQ ID NO. 109717, preferably the coding region thereof, conferred the production of or the increase in glucose-1-phosphate compared with the wild type control.

[88997] The nucleic acid sequence of At4g15660 from Arabidopsis thaliana, e.g. as shown in the respective line in column 5 of Table I, application no. 17, has been published in F. And the activity of the gene product thereof is the activity of monothiol glutaredoxin.

[88998] Accordingly, in one embodiment, the process of the present invention for producing fructose in a non-human organism, like a microorganism or a plant or a part thereof, comprises increasing or generating the activity of a gene product with the activity of a gene product conferring the activity of “monothiol glutaredoxin”, especially from Arabidopsis thaliana or its functional equivalent or its homolog, e.g. the increase of
[88999] (a) a gene product of a gene comprising the nucleic acid molecule as shown in the respective line in column 5 of Table I (whereby the respective line disclose in column 7 the fine chemical fructose), application no. 17, preferably the coding region thereof, or a homolog or a fragment thereof, and being depicted in the same respective line as said At4g15660, or a functional equivalent or a homolog thereof as shown in column 8 of Table I, application no. 17, preferably the coding region thereof, particularly a homolog or functional equivalent as shown in column 8 of Table I B, application no. 17, and being depicted in the same respective line as said At4g15660, and preferably the activity is increased non-targeted, or
[89000] (b) a polypeptide comprising a polypeptide, a consensus sequence or at least a polypeptide motif as shown in the respective line in column 5 of Table II or in column 8 of Table IV, application no. 17, respectively, and being depicted in the same respective line as said At4g15660, or a functional equivalent or a homolog thereof as depicted in column 8 of Table II, application no. 17, preferably a homolog or functional equivalent as depicted in column 8 of Table II B, application no. 17, and being depicted in the same respective line as said At4g15660, and preferably the activity is increased non-targeted, whereby the respective line disclose in column 7 the fine chemical fructose.

[89001] Accordingly, in one embodiment, the molecule which activity is to be increased in the process of the invention is the gene product with an activity as a “monothiol glutaredoxin”, preferably it is the molecule of section (a) or (b) of this paragraph.

[89002] In particular, it was observed that in plants, especially in Arabidopsis thaliana, increasing or generating the activity of a gene product non-targeted with the activity of a “monothiol glutaredoxin”, preferably being encoded by a gene comprising the nucleic acid sequence SEQ ID NO. 23482, preferably the coding region thereof, conferred the production of or the increase in fructose compared with the wild type control.

[89003] The nucleic acid sequence of At4g15660 from Arabidopsis thaliana, e.g. as shown in the respective line in column 5 of Table I, application no. 17, has been published in F. And the activity of the gene product thereof is the activity of monothiol glutaredoxin.

[89004] Accordingly, in one embodiment, the process of the present invention for producing glucose in a non-human organism, like a microorganism or a plant or a part thereof, comprises increasing or generating the activity of a gene product with the activity of a gene product conferring the activity of “monothiol glutaredoxin”, especially from Arabidopsis thaliana or its functional equivalent or its homolog, e.g. the increase of
[89005] (a) a gene product of a gene comprising the nucleic acid molecule as shown in the respective line in column 5 of Table I (whereby the respective line disclose in column 7 the fine chemical glucose), application no. 17, preferably the coding region thereof, or a homolog or a fragment thereof, and being depicted in the same respective line as said At4g15660, or a functional equivalent or a homolog thereof as shown in column 8 of Table I, application no. 17, preferably the coding region thereof, particularly a homolog or functional equivalent as shown in column 8 of Table I B, application no. 17, and being depicted in the same respective line as said At4g15660, and preferably the activity is increased non-targeted, or
[89006] (b) a polypeptide comprising a polypeptide, a consensus sequence or at least a polypeptide motif as shown in the respective line in column 5 of Table II or in column 8 of Table IV, application no. 17, respectively, and being depicted in the same respective line as said At4g15660, or a functional equivalent or a homolog thereof as depicted in column 8 of Table II, application no. 17, preferably a homolog or functional equivalent as depicted in column 8 of Table II B, application no. 17, and being depicted in the same respective line as said At4g15660, and preferably the activity is increased non-targeted, whereby the respective line disclose in column 7 the fine chemical glucose.

[89007] Accordingly, in one embodiment, the molecule which activity is to be increased in the process of the invention is the gene product with an activity as a “monothiol glutaredoxin”, preferably it is the molecule of section (a) or (b) of this paragraph.

[89008] In particular, it was observed that in plants, especially in Arabidopsis thaliana, increasing or generating the activity of a gene product non-targeted with the activity of a “monothiol glutaredoxin”, preferably being encoded by a gene comprising the nucleic acid sequence SEQ ID NO. 23482, preferably the coding region thereof, conferred the production of or the increase in glucose compared with the wild type control.

[89009] The nucleic acid sequence of At4g15660 from Arabidopsis thaliana, e.g. as shown in the respective line in column 5 of Table I, application no. 17, has been published in F. And the activity of the gene product thereof is the activity of monothiol glutaredoxin.

[89010] Accordingly, in one embodiment, the process of the present invention for producing glucose-1-phosphate in a non-human organism, like a microorganism or a plant or a part thereof, comprises increasing or generating the activity of a gene product with the activity of a gene product conferring the activity of “monothiol glutaredoxin”, especially from Arabidopsis thaliana or its functional equivalent or its homolog, e.g. the increase of
[89011] (a) a gene product of a gene comprising the nucleic acid molecule as shown in the respective line in column 5 of Table I (whereby the respective line disclose in column 7 the fine chemical glucose-1-phosphate), application no. 17, preferably the coding region thereof, or a homolog or a fragment thereof, and being depicted in the same respective line as said At4g15660, or a functional equivalent or a homolog thereof as shown in column 8 of Table I, application no. 17, preferably the coding region thereof, particularly a homolog or functional equivalent as shown in column 8 of Table I B, application no. 17, and being depicted in the same respective line as said At4g15660, and preferably the activity is increased non-targeted, or
[89012] (b) a polypeptide comprising a polypeptide, a consensus sequence or at least a polypeptide motif as shown in the respective line in column 5 of Table II or in column 8 of Table IV, application no. 17, respectively, and being depicted in the same respective line as said At4g15660, or a functional equivalent or a homolog thereof as depicted in column 8 of Table II, application no. 17, preferably a homolog or functional equivalent as depicted in column 8 of Table II B, application no. 17, and being depicted in the same respective line as said At4g15660, and preferably the activity is increased non-targeted, whereby the respective line disclose in column 7 the fine chemical glucose-1-phosphate.

[89013] Accordingly, in one embodiment, the molecule which activity is to be increased in the process of the invention is the gene product with an activity as a “monothiol glutaredoxin”, preferably it is the molecule of section (a) or (b) of this paragraph.

[89014] In particular, it was observed that in plants, especially in Arabidopsis thaliana, increasing or generating the activity of a gene product non-targeted with the activity of a “monothiol glutaredoxin”, preferably being encoded by a gene comprising the nucleic acid sequence SEQ ID NO. 23482, preferably the coding region thereof, conferred the production of or the increase in glucose-1-phosphate compared with the wild type control.

[89015] The nucleic acid sequence of At4g15660 from Arabidopsis thaliana, e.g. as shown in the respective line in column 5 of Table I, application no. 17, has been published in F. And the activity of the gene product thereof is the activity of monothiol glutaredoxin.

[89016] Accordingly, in one embodiment, the process of the present invention for producing myo-inositol in a non-human organism, like a microorganism or a plant or a part thereof, comprises increasing or generating the activity of a gene product with the activity of a gene product conferring the activity of “monothiol glutaredoxin”, especially from Arabidopsis thaliana or its functional equivalent or its homolog, e.g. the increase of
[89017] (a) a gene product of a gene comprising the nucleic acid molecule as shown in the respective line in column 5 of Table I (whereby the respective line disclose in column 7 the fine chemical myo-inositol), application no. 17, preferably the coding region thereof, or a homolog or a fragment thereof, and being depicted in the same respective line as said At4g15660, or a functional equivalent or a homolog thereof as shown in column 8 of Table I, application no. 17, preferably the coding region thereof, particularly a homolog or functional equivalent as shown in column 8 of Table I B, application no. 17, and being depicted in the same respective line as said At4g15660, and preferably the activity is increased non-targeted, or
[89018] (b) a polypeptide comprising a polypeptide, a consensus sequence or at least a polypeptide motif as shown in the respective line in column 5 of Table II or in column 8 of Table IV, application no. 17, respectively, and being depicted in the same respective line as said At4g15660, or a functional equivalent or a homolog thereof as depicted in column 8 of Table II, application no. 17, preferably a homolog or functional equivalent as depicted in column 8 of Table II B, application no. 17, and being depicted in the same respective line as said At4g15660, and preferably the activity is increased non-targeted, whereby the respective line disclose in column 7 the fine chemical myo-inositol.

[89019] Accordingly, in one embodiment, the molecule which activity is to be increased in the process of the invention is the gene product with an activity as a “monothiol glutaredoxin”, preferably it is the molecule of section (a) or (b) of this paragraph.

[89020] In particular, it was observed that in plants, especially in Arabidopsis thaliana, increasing or generating the activity of a gene product non-targeted with the activity of a “monothiol glutaredoxin”, preferably being encoded by a gene comprising the nucleic acid sequence SEQ ID NO. 23482, preferably the coding region thereof, conferred the production of or the increase in myo-inositol compared with the wild type control.

[89021] The nucleic acid sequence of At4g15660 from Arabidopsis thaliana, e.g. as shown in the respective line in column 5 of Table I, application no. 17, has been published in F. And the activity of the gene product thereof is the activity of monothiol glutaredoxin.

[89022] Accordingly, in one embodiment, the process of the present invention for producing sedoheptulose-7-phosphate in a non-human organism, like a microorganism or a plant or a part thereof, comprises increasing or generating the activity of a gene product with the activity of a gene product conferring the activity of “monothiol glutaredoxin”, especially from Arabidopsis thaliana or its functional equivalent or its homolog, e.g. the increase of
[89023] (a) a gene product of a gene comprising the nucleic acid molecule as shown in the respective line in column 5 of Table I (whereby the respective line disclose in column 7 the fine chemical sedoheptulose-7-phosphate), application no. 17, preferably the coding region thereof, or a homolog or a fragment thereof, and being depicted in the same respective line as said At4g15660, or a functional equivalent or a homolog thereof as shown in column 8 of Table I, application no. 17, preferably the coding region thereof, particularly a homolog or functional equivalent as shown in column 8 of Table I B, application no. 17, and being depicted in the same respective line as said At4g15660, and preferably the activity is increased non-targeted, or
[89024] (b) a polypeptide comprising a polypeptide, a consensus sequence or at least a polypeptide motif as shown in the respective line in column 5 of Table II or in column 8 of Table IV, application no. 17, respectively, and being depicted in the same respective line as said At4g15660, or a functional equivalent or a homolog thereof as depicted in column 8 of Table II, application no. 17, preferably a homolog or functional equivalent as depicted in column 8 of Table II B, application no. 17, and being depicted in the same respective line as said At4g15660, and preferably the activity is increased non-targeted, whereby the respective line disclose in column 7 the fine chemical sedoheptulose-7-phosphate.

[89025] Accordingly, in one embodiment, the molecule which activity is to be increased in the process of the invention is the gene product with an activity as a “monothiol glutaredoxin”, preferably it is the molecule of section (a) or (b) of this paragraph.

[89026] In particular, it was observed that in plants, especially in Arabidopsis thaliana, increasing or generating the activity of a gene product non-targeted with the activity of a “monothiol glutaredoxin”, preferably being encoded by a gene comprising the nucleic acid sequence SEQ ID NO. 23482, preferably the coding region thereof, conferred the production of or the increase in sedoheptulose-7-phosphate compared with the wild type control.

[89027] The nucleic acid sequence of At4g15660 from Arabidopsis thaliana, e.g. as shown in the respective line in column 5 of Table I, application no. 17, has been published in F. And the activity of the gene product thereof is the activity of monothiol glutaredoxin.

[89028] Accordingly, in one embodiment, the process of the present invention for producing sucrose in a non-human organism, like a microorganism or a plant or a part thereof, comprises increasing or generating the activity of a gene product with the activity of a gene product conferring the activity of “monothiol glutaredoxin”, especially from Arabidopsis thaliana or its functional equivalent or its homolog, e.g. the increase of
[89029] (a) a gene product of a gene comprising the nucleic acid molecule as shown in the respective line in column 5 of Table I (whereby the respective line disclose in column 7 the fine chemical sucrose), application no. 17, preferably the coding region thereof, or a homolog or a fragment thereof, and being depicted in the same respective line as said At4g15660, or a functional equivalent or a homolog thereof as shown in column 8 of Table I, application no. 17, preferably the coding region thereof, particularly a homolog or functional equivalent as shown in column 8 of Table I B, application no. 17, and being depicted in the same respective line as said At4g15660, and preferably the activity is increased non-targeted, or
[89030] (b) a polypeptide comprising a polypeptide, a consensus sequence or at least a polypeptide motif as shown in the respective line in column 5 of Table II or in column 8 of Table IV, application no. 17, respectively, and being depicted in the same respective line as said At4g15660, or a functional equivalent or a homolog thereof as depicted in column 8 of Table II, application no. 17, preferably a homolog or functional equivalent as depicted in column 8 of Table II B, application no. 17, and being depicted in the same respective line as said At4g15660, and preferably the activity is increased non-targeted, whereby the respective line disclose in column 7 the fine chemical sucrose.

[89031] Accordingly, in one embodiment, the molecule which activity is to be increased in the process of the invention is the gene product with an activity as a “monothiol glutaredoxin”, preferably it is the molecule of section (a) or (b) of this paragraph.

[89032] In particular, it was observed that in plants, especially in Arabidopsis thaliana, increasing or generating the activity of a gene product non-targeted with the activity of a “monothiol glutaredoxin”, preferably being encoded by a gene comprising the nucleic acid sequence SEQ ID NO. 23482, preferably the coding region thereof, conferred the production of or the increase in sucrose compared with the wild type control.

[89033] The nucleic acid sequence of At4g15670 from Arabidopsis thaliana, e.g. as shown in the respective line in column 5 of Table I, application no. 17, has been published in F. And the activity of the gene product thereof is the activity of monothiol glutaredoxin.

[89034] Accordingly, in one embodiment, the process of the present invention for producing fructose in a non-human organism, like a microorganism or a plant or a part thereof, comprises increasing or generating the activity of a gene product with the activity of a gene product conferring the activity of “monothiol glutaredoxin”, especially from Arabidopsis thaliana or its functional equivalent or its homolog, e.g. the increase of
[89035] (a) a gene product of a gene comprising the nucleic acid molecule as shown in the respective line in column 5 of Table I (whereby the respective line disclose in column 7 the fine chemical fructose), application no. 17, preferably the coding region thereof, or a homolog or a fragment thereof, and being depicted in the same respective line as said At4g15670, or a functional equivalent or a homolog thereof as shown in column 8 of Table I, application no. 17, preferably the coding region thereof, particularly a homolog or functional equivalent as shown in column 8 of Table I B, application no. 17, and being depicted in the same respective line as said At4g15670, and preferably the activity is increased non-targeted, or
[89036] (b) a polypeptide comprising a polypeptide, a consensus sequence or at least a polypeptide motif as shown in the respective line in column 5 of Table II or in column 8 of Table IV, application no. 17, respectively, and being depicted in the same respective line as said At4g15670, or a functional equivalent or a homolog thereof as depicted in column 8 of Table II, application no. 17, preferably a homolog or functional equivalent as depicted in column 8 of Table II B, application no. 17, and being depicted in the same respective line as said At4g15670, and preferably the activity is increased non-targeted, whereby the respective line disclose in column 7 the fine chemical fructose.

[89037] Accordingly, in one embodiment, the molecule which activity is to be increased in the process of the invention is the gene product with an activity as a “monothiol glutaredoxin”, preferably it is the molecule of section (a) or (b) of this paragraph.

[89038] In particular, it was observed that in plants, especially in Arabidopsis thaliana, increasing or generating the activity of a gene product non-targeted with the activity of a “monothiol glutaredoxin”, preferably being encoded by a gene comprising the nucleic acid sequence SEQ ID NO. 3279, preferably the coding region thereof, conferred the production of or the increase in fructose compared with the wild type control.

[89039] The nucleic acid sequence of At4g15670 from Arabidopsis thaliana, e.g. as shown in the respective line in column 5 of Table I, application no. 17, has been published in F. And the activity of the gene product thereof is the activity of monothiol glutaredoxin.

[89040] Accordingly, in one embodiment, the process of the present invention for producing glucose in a non-human organism, like a microorganism or a plant or a part thereof, comprises increasing or generating the activity of a gene product with the activity of a gene product conferring the activity of “monothiol glutaredoxin”, especially from Arabidopsis thaliana or its functional equivalent or its homolog, e.g. the increase of
[89041] (a) a gene product of a gene comprising the nucleic acid molecule as shown in the respective line in column 5 of Table I (whereby the respective line disclose in column 7 the fine chemical glucose), application no. 17, preferably the coding region thereof, or a homolog or a fragment thereof, and being depicted in the same respective line as said At4g15670, or a functional equivalent or a homolog thereof as shown in column 8 of Table I, application no. 17, preferably the coding region thereof, particularly a homolog or functional equivalent as shown in column 8 of Table I B, application no. 17, and being depicted in the same respective line as said At4g15670, and preferably the activity is increased non-targeted, or
[89042] (b) a polypeptide comprising a polypeptide, a consensus sequence or at least a polypeptide motif as shown in the respective line in column 5 of Table II or in column 8 of Table IV, application no. 17, respectively, and being depicted in the same respective line as said At4g15670, or a functional equivalent or a homolog thereof as depicted in column 8 of Table II, application no. 17, preferably a homolog or functional equivalent as depicted in column 8 of Table II B, application no. 17, and being depicted in the same respective line as said At4g15670, and preferably the activity is increased non-targeted, whereby the respective line disclose in column 7 the fine chemical glucose.

[89043] Accordingly, in one embodiment, the molecule which activity is to be increased in the process of the invention is the gene product with an activity as a “monothiol glutaredoxin”, preferably it is the molecule of section (a) or (b) of this paragraph.

[89044] In particular, it was observed that in plants, especially in Arabidopsis thaliana, increasing or generating the activity of a gene product non-targeted with the activity of a “monothiol glutaredoxin”, preferably being encoded by a gene comprising the nucleic acid sequence SEQ ID NO. 3279, preferably the coding region thereof, conferred the production of or the increase in glucose compared with the wild type control.

[89045] The nucleic acid sequence of At4g15670 from Arabidopsis thaliana, e.g. as shown in the respective line in column 5 of Table I, application no. 17, has been published in F. And the activity of the gene product thereof is the activity of monothiol glutaredoxin.

[89046] Accordingly, in one embodiment, the process of the present invention for producing glucose-1-phosphate in a non-human organism, like a microorganism or a plant or a part thereof, comprises increasing or generating the activity of a gene product with the activity of a gene product conferring the activity of “monothiol glutaredoxin”, especially from Arabidopsis thaliana or its functional equivalent or its homolog, e.g. the increase of
[89047] (a) a gene product of a gene comprising the nucleic acid molecule as shown in the respective line in column 5 of Table I (whereby the respective line disclose in column 7 the fine chemical glucose-1-phosphate), application no. 17, preferably the coding region thereof, or a homolog or a fragment thereof, and being depicted in the same respective line as said At4g15670, or a functional equivalent or a homolog thereof as shown in column 8 of Table I, application no. 17, preferably the coding region thereof, particularly a homolog or functional equivalent as shown in column 8 of Table I B, application no. 17, and being depicted in the same respective line as said At4g15670, and preferably the activity is increased non-targeted, or
[89048] (b) a polypeptide comprising a polypeptide, a consensus sequence or at least a polypeptide motif as shown in the respective line in column 5 of Table II or in column 8 of Table IV, application no. 17, respectively, and being depicted in the same respective line as said At4g15670, or a functional equivalent or a homolog thereof as depicted in column 8 of Table II, application no. 17, preferably a homolog or functional equivalent as depicted in column 8 of Table II B, application no. 17, and being depicted in the same respective line as said At4g15670, and preferably the activity is increased non-targeted, whereby the respective line disclose in column 7 the fine chemical glucose-1-phosphate.

[89049] Accordingly, in one embodiment, the molecule which activity is to be increased in the process of the invention is the gene product with an activity as a “monothiol glutaredoxin”, preferably it is the molecule of section (a) or (b) of this paragraph.

[89050] In particular, it was observed that in plants, especially in Arabidopsis thaliana, increasing or generating the activity of a gene product non-targeted with the activity of a “monothiol glutaredoxin”, preferably being encoded by a gene comprising the nucleic acid sequence SEQ ID NO. 3279, preferably the coding region thereof, conferred the production of or the increase in glucose-1-phosphate compared with the wild type control.

[89051] The nucleic acid sequence of At4g15670 from Arabidopsis thaliana, e.g. as shown in the respective line in column 5 of Table I, application no. 17, has been published in F. And the activity of the gene product thereof is the activity of monothiol glutaredoxin.

[89052] Accordingly, in one embodiment, the process of the present invention for producing myo-inositol in a non-human organism, like a microorganism or a plant or a part thereof, comprises increasing or generating the activity of a gene product with the activity of a gene product conferring the activity of “monothiol glutaredoxin”, especially from Arabidopsis thaliana or its functional equivalent or its homolog, e.g. the increase of
[89053] (a) a gene product of a gene comprising the nucleic acid molecule as shown in the respective line in column 5 of Table I (whereby the respective line disclose in column 7 the fine chemical myo-inositol), application no. 17, preferably the coding region thereof, or a homolog or a fragment thereof, and being depicted in the same respective line as said At4g15670, or a functional equivalent or a homolog thereof as shown in column 8 of Table I, application no. 17, preferably the coding region thereof, particularly a homolog or functional equivalent as shown in column 8 of Table I B, application no. 17, and being depicted in the same respective line as said At4g15670, and preferably the activity is increased non-targeted, or
[89054] (b) a polypeptide comprising a polypeptide, a consensus sequence or at least a polypeptide motif as shown in the respective line in column 5 of Table II or in column 8 of Table IV, application no. 17, respectively, and being depicted in the same respective line as said At4g15670, or a functional equivalent or a homolog thereof as depicted in column 8 of Table II, application no. 17, preferably a homolog or functional equivalent as depicted in column 8 of Table II B, application no. 17, and being depicted in the same respective line as said At4g15670, and preferably the activity is increased non-targeted, whereby the respective line disclose in column 7 the fine chemical myo-inositol.

[89055] Accordingly, in one embodiment, the molecule which activity is to be increased in the process of the invention is the gene product with an activity as a “monothiol glutaredoxin”, preferably it is the molecule of section (a) or (b) of this paragraph.

[89056] In particular, it was observed that in plants, especially in Arabidopsis thaliana, increasing or generating the activity of a gene product non-targeted with the activity of a “monothiol glutaredoxin”, preferably being encoded by a gene comprising the nucleic acid sequence SEQ ID NO. 3279, preferably the coding region thereof, conferred the production of or the increase in myo-inositol compared with the wild type control.

[89057] The nucleic acid sequence of At4g15670 from Arabidopsis thaliana, e.g. as shown in the respective line in column 5 of Table I, application no. 17, has been published in F. And the activity of the gene product thereof is the activity of monothiol glutaredoxin.

[89058] Accordingly, in one embodiment, the process of the present invention for producing sedoheptulose-7-phosphate in a non-human organism, like a microorganism or a plant or a part thereof, comprises increasing or generating the activity of a gene product with the activity of a gene product conferring the activity of “monothiol glutaredoxin”, especially from Arabidopsis thaliana or its functional equivalent or its homolog, e.g. the increase of
[89059] (a) a gene product of a gene comprising the nucleic acid molecule as shown in the respective line in column 5 of Table I (whereby the respective line disclose in column 7 the fine chemical sedoheptulose-7-phosphate), application no. 17, preferably the coding region thereof, or a homolog or a fragment thereof, and being depicted in the same respective line as said At4g15670, or a functional equivalent or a homolog thereof as shown in column 8 of Table I, application no. 17, preferably the coding region thereof, particularly a homolog or functional equivalent as shown in column 8 of Table I B, application no. 17, and being depicted in the same respective line as said At4g15670, and preferably the activity is increased non-targeted, or
[89060] (b) a polypeptide comprising a polypeptide, a consensus sequence or at least a polypeptide motif as shown in the respective line in column 5 of Table II or in column 8 of Table IV, application no. 17, respectively, and being depicted in the same respective line as said At4g15670, or a functional equivalent or a homolog thereof as depicted in column 8 of Table II, application no. 17, preferably a homolog or functional equivalent as depicted in column 8 of Table II B, application no. 17, and being depicted in the same respective line as said At4g15670, and preferably the activity is increased non-targeted, whereby the respective line disclose in column 7 the fine chemical sedoheptulose-7-phosphate.

[89061] Accordingly, in one embodiment, the molecule which activity is to be increased in the process of the invention is the gene product with an activity as a “monothiol glutaredoxin”, preferably it is the molecule of section (a) or (b) of this paragraph.

[89062] In particular, it was observed that in plants, especially in Arabidopsis thaliana, increasing or generating the activity of a gene product non-targeted with the activity of a “monothiol glutaredoxin”, preferably being encoded by a gene comprising the nucleic acid sequence SEQ ID NO. 3279, preferably the coding region thereof, conferred the production of or the increase in sedoheptulose-7-phosphate compared with the wild type control.

[89063] The nucleic acid sequence of At4g15670 from Arabidopsis thaliana, e.g. as shown in the respective line in column 5 of Table I, application no. 17, has been published in F. And the activity of the gene product thereof is the activity of monothiol glutaredoxin.

[89064] Accordingly, in one embodiment, the process of the present invention for producing sucrose in a non-human organism, like a microorganism or a plant or a part thereof, comprises increasing or generating the activity of a gene product with the activity of a gene product conferring the activity of “monothiol glutaredoxin”, especially from Arabidopsis thaliana or its functional equivalent or its homolog, e.g. the increase of
[89065] (a) a gene product of a gene comprising the nucleic acid molecule as shown in the respective line in column 5 of Table I (whereby the respective line disclose in column 7 the fine chemical sucrose), application no. 17, preferably the coding region thereof, or a homolog or a fragment thereof, and being depicted in the same respective line as said At4g15670, or a functional equivalent or a homolog thereof as shown in column 8 of Table I, application no. 17, preferably the coding region thereof, particularly a homolog or functional equivalent as shown in column 8 of Table I B, application no. 17, and being depicted in the same respective line as said At4g15670, and preferably the activity is increased non-targeted, or
[89066] (b) a polypeptide comprising a polypeptide, a consensus sequence or at least a polypeptide motif as shown in the respective line in column 5 of Table II or in column 8 of Table IV, application no. 17, respectively, and being depicted in the same respective line as said At4g15670, or a functional equivalent or a homolog thereof as depicted in column 8 of Table II, application no. 17, preferably a homolog or functional equivalent as depicted in column 8 of Table II B, application no. 17, and being depicted in the same respective line as said At4g15670, and preferably the activity is increased non-targeted, whereby the respective line disclose in column 7 the fine chemical sucrose.

[89067] Accordingly, in one embodiment, the molecule which activity is to be increased in the process of the invention is the gene product with an activity as a “monothiol glutaredoxin”, preferably it is the molecule of section (a) or (b) of this paragraph.

[89068] In particular, it was observed that in plants, especially in Arabidopsis thaliana, increasing or generating the activity of a gene product non-targeted with the activity of a “monothiol glutaredoxin”, preferably being encoded by a gene comprising the nucleic acid sequence SEQ ID NO. 3279, preferably the coding region thereof, conferred the production of or the increase in sucrose compared with the wild type control.

[89069] The nucleic acid sequence of At4g15690 from Arabidopsis thaliana, e.g. as shown in the respective line in column 5 of Table I, application no. 17, has been published in F. And the activity of the gene product thereof is the activity of monothiol glutaredoxin.

[89070] Accordingly, in one embodiment, the process of the present invention for producing fructose in a non-human organism, like a microorganism or a plant or a part thereof, comprises increasing or generating the activity of a gene product with the activity of a gene product conferring the activity of “monothiol glutaredoxin”, especially from Arabidopsis thaliana or its functional equivalent or its homolog, e.g. the increase of
[89071] (a) a gene product of a gene comprising the nucleic acid molecule as shown in the respective line in column 5 of Table I (whereby the respective line disclose in column 7 the fine chemical fructose), application no. 17, preferably the coding region thereof, or a homolog or a fragment thereof, and being depicted in the same respective line as said At4g15690, or a functional equivalent or a homolog thereof as shown in column 8 of Table I, application no. 17, preferably the coding region thereof, particularly a homolog or functional equivalent as shown in column 8 of Table I B, application no. 17, and being depicted in the same respective line as said At4g15690, and preferably the activity is increased non-targeted, or
[89072] (b) a polypeptide comprising a polypeptide, a consensus sequence or at least a polypeptide motif as shown in the respective line in column 5 of Table II or in column 8 of Table IV, application no. 17, respectively, and being depicted in the same respective line as said At4g15690, or a functional equivalent or a homolog thereof as depicted in column 8 of Table II, application no. 17, preferably a homolog or functional equivalent as depicted in column 8 of Table II B, application no. 17, and being depicted in the same respective line as said At4g15690, and preferably the activity is increased non-targeted, whereby the respective line disclose in column 7 the fine chemical fructose.

[89073] Accordingly, in one embodiment, the molecule which activity is to be increased in the process of the invention is the gene product with an activity as a “monothiol glutaredoxin”, preferably it is the molecule of section (a) or (b) of this paragraph.

[89074] In particular, it was observed that in plants, especially in Arabidopsis thaliana, increasing or generating the activity of a gene product non-targeted with the activity of a “monothiol glutaredoxin”, preferably being encoded by a gene comprising the nucleic acid sequence SEQ ID NO. 23844, preferably the coding region thereof, conferred the production of or the increase in fructose compared with the wild type control.

[89075] The nucleic acid sequence of At4g15690 from Arabidopsis thaliana, e.g. as shown in the respective line in column 5 of Table I, application no. 17, has been published in F. And the activity of the gene product thereof is the activity of monothiol glutaredoxin.

[89076] Accordingly, in one embodiment, the process of the present invention for producing glucose in a non-human organism, like a microorganism or a plant or a part thereof, comprises increasing or generating the activity of a gene product with the activity of a gene product conferring the activity of “monothiol glutaredoxin”, especially from Arabidopsis thaliana or its functional equivalent or its homolog, e.g. the increase of
[89077] (a) a gene product of a gene comprising the nucleic acid molecule as shown in the respective line in column 5 of Table I (whereby the respective line disclose in column 7 the fine chemical glucose), application no. 17, preferably the coding region thereof, or a homolog or a fragment thereof, and being depicted in the same respective line as said At4g15690, or a functional equivalent or a homolog thereof as shown in column 8 of Table I, application no. 17, preferably the coding region thereof, particularly a homolog or functional equivalent as shown in column 8 of Table I B, application no. 17, and being depicted in the same respective line as said At4g15690, and preferably the activity is increased non-targeted, or
[89078] (b) a polypeptide comprising a polypeptide, a consensus sequence or at least a polypeptide motif as shown in the respective line in column 5 of Table II or in column 8 of Table IV, application no. 17, respectively, and being depicted in the same respective line as said At4g15690, or a functional equivalent or a homolog thereof as depicted in column 8 of Table II, application no. 17, preferably a homolog or functional equivalent as depicted in column 8 of Table II B, application no. 17, and being depicted in the same respective line as said At4g15690, and preferably the activity is increased non-targeted, whereby the respective line disclose in column 7 the fine chemical glucose.

[89079] Accordingly, in one embodiment, the molecule which activity is to be increased in the process of the invention is the gene product with an activity as a “monothiol glutaredoxin”, preferably it is the molecule of section (a) or (b) of this paragraph.

[89080] In particular, it was observed that in plants, especially in Arabidopsis thaliana, increasing or generating the activity of a gene product non-targeted with the activity of a “monothiol glutaredoxin”, preferably being encoded by a gene comprising the nucleic acid sequence SEQ ID NO. 23844, preferably the coding region thereof, conferred the production of or the increase in glucose compared with the wild type control.

[89081] The nucleic acid sequence of At4g15690 from Arabidopsis thaliana, e.g. as shown in the respective line in column 5 of Table I, application no. 17, has been published in F. And the activity of the gene product thereof is the activity of monothiol glutaredoxin.

[89082] Accordingly, in one embodiment, the process of the present invention for producing glucose-1-phosphate in a non-human organism, like a microorganism or a plant or a part thereof, comprises increasing or generating the activity of a gene product with the activity of a gene product conferring the activity of “monothiol glutaredoxin”, especially from Arabidopsis thaliana or its functional equivalent or its homolog, e.g. the increase of
[89083] (a) a gene product of a gene comprising the nucleic acid molecule as shown in the respective line in column 5 of Table I (whereby the respective line disclose in column 7 the fine chemical glucose-1-phosphate), application no. 17, preferably the coding region thereof, or a homolog or a fragment thereof, and being depicted in the same respective line as said At4g15690, or a functional equivalent or a homolog thereof as shown in column 8 of Table I, application no. 17, preferably the coding region thereof, particularly a homolog or functional equivalent as shown in column 8 of Table I B, application no. 17, and being depicted in the same respective line as said At4g15690, and preferably the activity is increased non-targeted, or
[89084] (b) a polypeptide comprising a polypeptide, a consensus sequence or at least a polypeptide motif as shown in the respective line in column 5 of Table II or in column 8 of Table IV, application no. 17, respectively, and being depicted in the same respective line as said At4g15690, or a functional equivalent or a homolog thereof as depicted in column 8 of Table II, application no. 17, preferably a homolog or functional equivalent as depicted in column 8 of Table II B, application no. 17, and being depicted in the same respective line as said At4g15690, and preferably the activity is increased non-targeted, whereby the respective line disclose in column 7 the fine chemical glucose-1-phosphate.

[89085] Accordingly, in one embodiment, the molecule which activity is to be increased in the process of the invention is the gene product with an activity as a “monothiol glutaredoxin”, preferably it is the molecule of section (a) or (b) of this paragraph.

[89086] In particular, it was observed that in plants, especially in Arabidopsis thaliana, increasing or generating the activity of a gene product non-targeted with the activity of a “monothiol glutaredoxin”, preferably being encoded by a gene comprising the nucleic acid sequence SEQ ID NO. 23844, preferably the coding region thereof, conferred the production of or the increase in glucose-1-phosphate compared with the wild type control.

[89087] The nucleic acid sequence of At4g15690 from Arabidopsis thaliana, e.g. as shown in the respective line in column 5 of Table I, application no. 17, has been published in F. And the activity of the gene product thereof is the activity of monothiol glutaredoxin.

[89088] Accordingly, in one embodiment, the process of the present invention for producing myo-inositol in a non-human organism, like a microorganism or a plant or a part thereof, comprises increasing or generating the activity of a gene product with the activity of a gene product conferring the activity of “monothiol glutaredoxin”, especially from Arabidopsis thaliana or its functional equivalent or its homolog, e.g. the increase of
[89089] (a) a gene product of a gene comprising the nucleic acid molecule as shown in the respective line in column 5 of Table I (whereby the respective line disclose in column 7 the fine chemical myo-inositol), application no. 17, preferably the coding region thereof, or a homolog or a fragment thereof, and being depicted in the same respective line as said At4g15690, or a functional equivalent or a homolog thereof as shown in column 8 of Table I, application no. 17, preferably the coding region thereof, particularly a homolog or functional equivalent as shown in column 8 of Table I B, application no. 17, and being depicted in the same respective line as said At4g15690, and preferably the activity is increased non-targeted, or
[89090] (b) a polypeptide comprising a polypeptide, a consensus sequence or at least a polypeptide motif as shown in the respective line in column 5 of Table II or in column 8 of Table IV, application no. 17, respectively, and being depicted in the same respective line as said At4g15690, or a functional equivalent or a homolog thereof as depicted in column 8 of Table II, application no. 17, preferably a homolog or functional equivalent as depicted in column 8 of Table II B, application no. 17, and being depicted in the same respective line as said At4g15690, and preferably the activity is increased non-targeted, whereby the respective line disclose in column 7 the fine chemical myo-inositol.

[89091] Accordingly, in one embodiment, the molecule which activity is to be increased in the process of the invention is the gene product with an activity as a “monothiol glutaredoxin”, preferably it is the molecule of section (a) or (b) of this paragraph.

[89092] In particular, it was observed that in plants, especially in Arabidopsis thaliana, increasing or generating the activity of a gene product non-targeted with the activity of a “monothiol glutaredoxin”, preferably being encoded by a gene comprising the nucleic acid sequence SEQ ID NO. 23844, preferably the coding region thereof, conferred the production of or the increase in myo-inositol compared with the wild type control.

[89093] The nucleic acid sequence of At4g15690 from Arabidopsis thaliana, e.g. as shown in the respective line in column 5 of Table I, application no. 17, has been published in F. And the activity of the gene product thereof is the activity of monothiol glutaredoxin.

[89094] Accordingly, in one embodiment, the process of the present invention for producing sucrose in a non-human organism, like a microorganism or a plant or a part thereof, comprises increasing or generating the activity of a gene product with the activity of a gene product conferring the activity of “monothiol glutaredoxin”, especially from Arabidopsis thaliana or its functional equivalent or its homolog, e.g. the increase of
[89095] (a) a gene product of a gene comprising the nucleic acid molecule as shown in the respective line in column 5 of Table I (whereby the respective line disclose in column 7 the fine chemical sucrose), application no. 17, preferably the coding region thereof, or a homolog or a fragment thereof, and being depicted in the same respective line as said At4g15690, or a functional equivalent or a homolog thereof as shown in column 8 of Table I, application no. 17, preferably the coding region thereof, particularly a homolog or functional equivalent as shown in column 8 of Table I B, application no. 17, and being depicted in the same respective line as said At4g15690, and preferably the activity is increased non-targeted, or
[89096] (b) a polypeptide comprising a polypeptide, a consensus sequence or at least a polypeptide motif as shown in the respective line in column 5 of Table II or in column 8 of Table IV, application no. 17, respectively, and being depicted in the same respective line as said At4g15690, or a functional equivalent or a homolog thereof as depicted in column 8 of Table II, application no. 17, preferably a homolog or functional equivalent as depicted in column 8 of Table II B, application no. 17, and being depicted in the same respective line as said At4g15690, and preferably the activity is increased non-targeted, whereby the respective line disclose in column 7 the fine chemical sucrose.

[89097] Accordingly, in one embodiment, the molecule which activity is to be increased in the process of the invention is the gene product with an activity as a “monothiol glutaredoxin”, preferably it is the molecule of section (a) or (b) of this paragraph.

[89098] In particular, it was observed that in plants, especially in Arabidopsis thaliana, increasing or generating the activity of a gene product non-targeted with the activity of a “monothiol glutaredoxin”, preferably being encoded by a gene comprising the nucleic acid sequence SEQ ID NO. 23844, preferably the coding region thereof, conferred the production of or the increase in sucrose compared with the wild type control.

[89099] The nucleic acid sequence of At4g15700 from Arabidopsis thaliana, e.g. as shown in the respective line in column 5 of Table I, application no. 17, has been published in F. And the activity of the gene product thereof is the activity of monothiol glutaredoxin.

[89100] Accordingly, in one embodiment, the process of the present invention for producing fructose in a non-human organism, like a microorganism or a plant or a part thereof, comprises increasing or generating the activity of a gene product with the activity of a gene product conferring the activity of “monothiol glutaredoxin”, especially from Arabidopsis thaliana or its functional equivalent or its homolog, e.g. the increase of
[89101] (a) a gene product of a gene comprising the nucleic acid molecule as shown in the respective line in column 5 of Table I (whereby the respective line disclose in column 7 the fine chemical fructose), application no. 17, preferably the coding region thereof, or a homolog or a fragment thereof, and being depicted in the same respective line as said At4g15700, or a functional equivalent or a homolog thereof as shown in column 8 of Table I, application no. 17, preferably the coding region thereof, particularly a homolog or functional equivalent as shown in column 8 of Table I B, application no. 17, and being depicted in the same respective line as said At4g15700, and preferably the activity is increased non-targeted, or
[89102] (b) a polypeptide comprising a polypeptide, a consensus sequence or at least a polypeptide motif as shown in the respective line in column 5 of Table II or in column 8 of Table IV, application no. 17, respectively, and being depicted in the same respective line as said At4g15700, or a functional equivalent or a homolog thereof as depicted in column 8 of Table II, application no. 17, preferably a homolog or functional equivalent as depicted in column 8 of Table II B, application no. 17, and being depicted in the same respective line as said At4g15700, and preferably the activity is increased non-targeted, whereby the respective line disclose in column 7 the fine chemical fructose.

[89103] Accordingly, in one embodiment, the molecule which activity is to be increased in the process of the invention is the gene product with an activity as a “monothiol glutaredoxin”, preferably it is the molecule of section (a) or (b) of this paragraph.

[89104] In particular, it was observed that in plants, especially in Arabidopsis thaliana, increasing or generating the activity of a gene product non-targeted with the activity of a “monothiol glutaredoxin”, preferably being encoded by a gene comprising the nucleic acid sequence SEQ ID NO. 3654, preferably the coding region thereof, conferred the production of or the increase in fructose compared with the wild type control.

[89105] The nucleic acid sequence of At4g15700 from Arabidopsis thaliana, e.g. as shown in the respective line in column 5 of Table I, application no. 17, has been published in F. And the activity of the gene product thereof is the activity of monothiol glutaredoxin.

[89106] Accordingly, in one embodiment, the process of the present invention for producing glucose in a non-human organism, like a microorganism or a plant or a part thereof, comprises increasing or generating the activity of a gene product with the activity of a gene product conferring the activity of “monothiol glutaredoxin”, especially from Arabidopsis thaliana or its functional equivalent or its homolog, e.g. the increase of
[89107] (a) a gene product of a gene comprising the nucleic acid molecule as shown in the respective line in column 5 of Table I (whereby the respective line disclose in column 7 the fine chemical glucose), application no. 17, preferably the coding region thereof, or a homolog or a fragment thereof, and being depicted in the same respective line as said At4g15700, or a functional equivalent or a homolog thereof as shown in column 8 of Table I, application no. 17, preferably the coding region thereof, particularly a homolog or functional equivalent as shown in column 8 of Table I B, application no. 17, and being depicted in the same respective line as said At4g15700, and preferably the activity is increased non-targeted, or
[89108] (b) a polypeptide comprising a polypeptide, a consensus sequence or at least a polypeptide motif as shown in the respective line in column 5 of Table II or in column 8 of Table IV, application no. 17, respectively, and being depicted in the same respective line as said At4g15700, or a functional equivalent or a homolog thereof as depicted in column 8 of Table II, application no. 17, preferably a homolog or functional equivalent as depicted in column 8 of Table II B, application no. 17, and being depicted in the same respective line as said At4g15700, and preferably the activity is increased non-targeted, whereby the respective line disclose in column 7 the fine chemical glucose.

[89109] Accordingly, in one embodiment, the molecule which activity is to be increased in the process of the invention is the gene product with an activity as a “monothiol glutaredoxin”, preferably it is the molecule of section (a) or (b) of this paragraph.

[89110] In particular, it was observed that in plants, especially in Arabidopsis thaliana, increasing or generating the activity of a gene product non-targeted with the activity of a “monothiol glutaredoxin”, preferably being encoded by a gene comprising the nucleic acid sequence SEQ ID NO. 3654, preferably the coding region thereof, conferred the production of or the increase in glucose compared with the wild type control.

[89111] The nucleic acid sequence of At4g15700 from Arabidopsis thaliana, e.g. as shown in the respective line in column 5 of Table I, application no. 17, has been published in F. And the activity of the gene product thereof is the activity of monothiol glutaredoxin.

[89112] Accordingly, in one embodiment, the process of the present invention for producing sedoheptulose-7-phosphate in a non-human organism, like a microorganism or a plant or a part thereof, comprises increasing or generating the activity of a gene product with the activity of a gene product conferring the activity of “monothiol glutaredoxin”, especially from Arabidopsis thaliana or its functional equivalent or its homolog, e.g. the increase of
[89113] (a) a gene product of a gene comprising the nucleic acid molecule as shown in the respective line in column 5 of Table I (whereby the respective line disclose in column 7 the fine chemical sedoheptulose-7-phosphate), application no. 17, preferably the coding region thereof, or a homolog or a fragment thereof, and being depicted in the same respective line as said At4g15700, or a functional equivalent or a homolog thereof as shown in column 8 of Table I, application no. 17, preferably the coding region thereof, particularly a homolog or functional equivalent as shown in column 8 of Table I B, application no. 17, and being depicted in the same respective line as said At4g15700, and preferably the activity is increased non-targeted, or
[89114] (b) a polypeptide comprising a polypeptide, a consensus sequence or at least a polypeptide motif as shown in the respective line in column 5 of Table II or in column 8 of Table IV, application no. 17, respectively, and being depicted in the same respective line as said At4g15700, or a functional equivalent or a homolog thereof as depicted in column 8 of Table II, application no. 17, preferably a homolog or functional equivalent as depicted in column 8 of Table II B, application no. 17, and being depicted in the same respective line as said At4g15700, and preferably the activity is increased non-targeted, whereby the respective line disclose in column 7 the fine chemical sedoheptulose-7-phosphate.

[89115] Accordingly, in one embodiment, the molecule which activity is to be increased in the process of the invention is the gene product with an activity as a “monothiol glutaredoxin”, preferably it is the molecule of section (a) or (b) of this paragraph.

[89116] In particular, it was observed that in plants, especially in Arabidopsis thaliana, increasing or generating the activity of a gene product non-targeted with the activity of a “monothiol glutaredoxin”, preferably being encoded by a gene comprising the nucleic acid sequence SEQ ID NO. 3654, preferably the coding region thereof, conferred the production of or the increase in sedoheptulose-7-phosphate compared with the wild type control.

[89117] The nucleic acid sequence of At4g15700 from Arabidopsis thaliana, e.g. as shown in the respective line in column 5 of Table I, application no. 17, has been published in F. And the activity of the gene product thereof is the activity of monothiol glutaredoxin.

[89118] Accordingly, in one embodiment, the process of the present invention for producing sucrose in a non-human organism, like a microorganism or a plant or a part thereof, comprises increasing or generating the activity of a gene product with the activity of a gene product conferring the activity of “monothiol glutaredoxin”, especially from Arabidopsis thaliana or its functional equivalent or its homolog, e.g. the increase of
[89119] (a) a gene product of a gene comprising the nucleic acid molecule as shown in the respective line in column 5 of Table I (whereby the respective line disclose in column 7 the fine chemical sucrose), application no. 17, preferably the coding region thereof, or a homolog or a fragment thereof, and being depicted in the same respective line as said At4g15700, or a functional equivalent or a homolog thereof as shown in column 8 of Table I, application no. 17, preferably the coding region thereof, particularly a homolog or functional equivalent as shown in column 8 of Table I B, application no. 17, and being depicted in the same respective line as said At4g15700, and preferably the activity is increased non-targeted, or
[89120] (b) a polypeptide comprising a polypeptide, a consensus sequence or at least a polypeptide motif as shown in the respective line in column 5 of Table II or in column 8 of Table IV, application no. 17, respectively, and being depicted in the same respective line as said At4g15700, or a functional equivalent or a homolog thereof as depicted in column 8 of Table II, application no. 17, preferably a homolog or functional equivalent as depicted in column 8 of Table II B, application no. 17, and being depicted in the same respective line as said At4g15700, and preferably the activity is increased non-targeted, whereby the respective line disclose in column 7 the fine chemical sucrose.

[89121] Accordingly, in one embodiment, the molecule which activity is to be increased in the process of the invention is the gene product with an activity as a “monothiol glutaredoxin”, preferably it is the molecule of section (a) or (b) of this paragraph.

[89122] In particular, it was observed that in plants, especially in Arabidopsis thaliana, increasing or generating the activity of a gene product non-targeted with the activity of a “monothiol glutaredoxin”, preferably being encoded by a gene comprising the nucleic acid sequence SEQ ID NO. 3654, preferably the coding region thereof, conferred the production of or the increase in sucrose compared with the wild type control.

[89123] The nucleic acid sequence of At4g26080 from Arabidopsis thaliana, e.g. as shown in the respective line in column 5 of Table I, application no. 17, has been published in F. And the activity of the gene product thereof is the activity of protein phosphatase.

[89124] Accordingly, in one embodiment, the process of the present invention for producing myo-inositol in a non-human organism, like a microorganism or a plant or a part thereof, comprises increasing or generating the activity of a gene product with the activity of a gene product conferring the activity of “protein phosphatase”, especially from Arabidopsis thaliana or its functional equivalent or its homolog, e.g. the increase of
[89125] (a) a gene product of a gene comprising the nucleic acid molecule as shown in the respective line in column 5 of Table I (whereby the respective line disclose in column 7 the fine chemical myo-inositol), application no. 17, preferably the coding region thereof, or a homolog or a fragment thereof, and being depicted in the same respective line as said At4g26080, or a functional equivalent or a homolog thereof as shown in column 8 of Table I, application no. 17, preferably the coding region thereof, particularly a homolog or functional equivalent as shown in column 8 of Table I B, application no. 17, and being depicted in the same respective line as said At4g26080, and preferably the activity is increased non-targeted, or
[89126] (b) a polypeptide comprising a polypeptide, a consensus sequence or at least a polypeptide motif as shown in the respective line in column 5 of Table II or in column 8 of Table IV, application no. 17, respectively, and being depicted in the same respective line as said At4g26080, or a functional equivalent or a homolog thereof as depicted in column 8 of Table II, application no. 17, preferably a homolog or functional equivalent as depicted in column 8 of Table II B, application no. 17, and being depicted in the same respective line as said At4g26080, and preferably the activity is increased non-targeted, whereby the respective line disclose in column 7 the fine chemical myo-inositol.

[89127] Accordingly, in one embodiment, the molecule which activity is to be increased in the process of the invention is the gene product with an activity as a “protein phosphatase”, preferably it is the molecule of section (a) or (b) of this paragraph.

[89128] In particular, it was observed that in plants, especially in Arabidopsis thaliana, increasing or generating the activity of a gene product non-targeted with the activity of a “protein phosphatase”, preferably being encoded by a gene comprising the nucleic acid sequence SEQ ID NO. 68849, preferably the coding region thereof, conferred the production of or the increase in myo-inositol compared with the wild type control.

[89129] The nucleic acid sequence of At4g33040 from Arabidopsis thaliana, e.g. as shown in the respective line in column 5 of Table I, application no. 17, has been published in F. And the activity of the gene product thereof is the activity of glutaredoxin.

[89130] Accordingly, in one embodiment, the process of the present invention for producing fructose in a non-human organism, like a microorganism or a plant or a part thereof, comprises increasing or generating the activity of a gene product with the activity of a gene product conferring the activity of “glutaredoxin”, especially from Arabidopsis thaliana or its functional equivalent or its homolog, e.g. the increase of
[89131] (a) a gene product of a gene comprising the nucleic acid molecule as shown in the respective line in column 5 of Table I (whereby the respective line disclose in column 7 the fine chemical fructose), application no. 17, preferably the coding region thereof, or a homolog or a fragment thereof, and being depicted in the same respective line as said At4g33040, or a functional equivalent or a homolog thereof as shown in column 8 of Table I, application no. 17, preferably the coding region thereof, particularly a homolog or functional equivalent as shown in column 8 of Table I B, application no. 17, and being depicted in the same respective line as said At4g33040, and preferably the activity is increased non-targeted, or
[89132] (b) a polypeptide comprising a polypeptide, a consensus sequence or at least a polypeptide motif as shown in the respective line in column 5 of Table II or in column 8 of Table IV, application no. 17, respectively, and being depicted in the same respective line as said At4g33040, or a functional equivalent or a homolog thereof as depicted in column 8 of Table II, application no. 17, preferably a homolog or functional equivalent as depicted in column 8 of Table II B, application no. 17, and being depicted in the same respective line as said At4g33040, and preferably the activity is increased non-targeted, whereby the respective line disclose in column 7 the fine chemical fructose.

[89133] Accordingly, in one embodiment, the molecule which activity is to be increased in the process of the invention is the gene product with an activity as a “glutaredoxin”, preferably it is the molecule of section (a) or (b) of this paragraph.

[89134] In particular, it was observed that in plants, especially in Arabidopsis thaliana, increasing or generating the activity of a gene product non-targeted with the activity of a “glutaredoxin”, preferably being encoded by a gene comprising the nucleic acid sequence SEQ ID NO. 4102, preferably the coding region thereof, conferred the production of or the increase in fructose compared with the wild type control.

[89135] The nucleic acid sequence of At4g33040 from Arabidopsis thaliana, e.g. as shown in the respective line in column 5 of Table I, application no. 17, has been published in F. And the activity of the gene product thereof is the activity of glutaredoxin.

[89136] Accordingly, in one embodiment, the process of the present invention for producing glucose in a non-human organism, like a microorganism or a plant or a part thereof, comprises increasing or generating the activity of a gene product with the activity of a gene product conferring the activity of “glutaredoxin”, especially from Arabidopsis thaliana or its functional equivalent or its homolog, e.g. the increase of
[89137] (a) a gene product of a gene comprising the nucleic acid molecule as shown in the respective line in column 5 of Table I (whereby the respective line disclose in column 7 the fine chemical glucose), application no. 17, preferably the coding region thereof, or a homolog or a fragment thereof, and being depicted in the same respective line as said At4g33040, or a functional equivalent or a homolog thereof as shown in column 8 of Table I, application no. 17, preferably the coding region thereof, particularly a homolog or functional equivalent as shown in column 8 of Table I B, application no. 17, and being depicted in the same respective line as said At4g33040, and preferably the activity is increased non-targeted, or
[89138] (b) a polypeptide comprising a polypeptide, a consensus sequence or at least a polypeptide motif as shown in the respective line in column 5 of Table II or in column 8 of Table IV, application no. 17, respectively, and being depicted in the same respective line as said At4g33040, or a functional equivalent or a homolog thereof as depicted in column 8 of Table II, application no. 17, preferably a homolog or functional equivalent as depicted in column 8 of Table II B, application no. 17, and being depicted in the same respective line as said At4g33040, and preferably the activity is increased non-targeted, whereby the respective line disclose in column 7 the fine chemical glucose.

[89139] Accordingly, in one embodiment, the molecule which activity is to be increased in the process of the invention is the gene product with an activity as a “glutaredoxin”, preferably it is the molecule of section (a) or (b) of this paragraph.

[89140] In particular, it was observed that in plants, especially in Arabidopsis thaliana, increasing or generating the activity of a gene product non-targeted with the activity of a “glutaredoxin”, preferably being encoded by a gene comprising the nucleic acid sequence SEQ ID NO. 4102, preferably the coding region thereof, conferred the production of or the increase in glucose compared with the wild type control.

[89141] The nucleic acid sequence of At4g33040 from Arabidopsis thaliana, e.g. as shown in the respective line in column 5 of Table I, application no. 17, has been published in F. And the activity of the gene product thereof is the activity of glutaredoxin.

[89142] Accordingly, in one embodiment, the process of the present invention for producing glucose-1-phosphate in a non-human organism, like a microorganism or a plant or a part thereof, comprises increasing or generating the activity of a gene product with the activity of a gene product conferring the activity of “glutaredoxin”, especially from Arabidopsis thaliana or its functional equivalent or its homolog, e.g. the increase of
[89143] (a) a gene product of a gene comprising the nucleic acid molecule as shown in the respective line in column 5 of Table I (whereby the respective line disclose in column 7 the fine chemical glucose-1-phosphate), application no. 17, preferably the coding region thereof, or a homolog or a fragment thereof, and being depicted in the same respective line as said At4g33040, or a functional equivalent or a homolog thereof as shown in column 8 of Table I, application no. 17, preferably the coding region thereof, particularly a homolog or functional equivalent as shown in column 8 of Table I B, application no. 17, and being depicted in the same respective line as said At4g33040, and preferably the activity is increased non-targeted, or
[89144] (b) a polypeptide comprising a polypeptide, a consensus sequence or at least a polypeptide motif as shown in the respective line in column 5 of Table II or in column 8 of Table IV, application no. 17, respectively, and being depicted in the same respective line as said At4g33040, or a functional equivalent or a homolog thereof as depicted in column 8 of Table II, application no. 17, preferably a homolog or functional equivalent as depicted in column 8 of Table II B, application no. 17, and being depicted in the same respective line as said At4g33040, and preferably the activity is increased non-targeted, whereby the respective line disclose in column 7 the fine chemical glucose-1-phosphate.

[89145] Accordingly, in one embodiment, the molecule which activity is to be increased in the process of the invention is the gene product with an activity as a “glutaredoxin”, preferably it is the molecule of section (a) or (b) of this paragraph.

[89146] In particular, it was observed that in plants, especially in Arabidopsis thaliana, increasing or generating the activity of a gene product non-targeted with the activity of a “glutaredoxin”, preferably being encoded by a gene comprising the nucleic acid sequence SEQ ID NO. 4102, preferably the coding region thereof, conferred the production of or the increase in glucose-1-phosphate compared with the wild type control.

[89147] The nucleic acid sequence of At4g33040 from Arabidopsis thaliana, e.g. as shown in the respective line in column 5 of Table I, application no. 17, has been published in F. And the activity of the gene product thereof is the activity of glutaredoxin.

[89148] Accordingly, in one embodiment, the process of the present invention for producing myo-inositol in a non-human organism, like a microorganism or a plant or a part thereof, comprises increasing or generating the activity of a gene product with the activity of a gene product conferring the activity of “glutaredoxin”, especially from Arabidopsis thaliana or its functional equivalent or its homolog, e.g. the increase of
[89149] (a) a gene product of a gene comprising the nucleic acid molecule as shown in the respective line in column 5 of Table I (whereby the respective line disclose in column 7 the fine chemical myo-inositol), application no. 17, preferably the coding region thereof, or a homolog or a fragment thereof, and being depicted in the same respective line as said At4g33040, or a functional equivalent or a homolog thereof as shown in column 8 of Table I, application no. 17, preferably the coding region thereof, particularly a homolog or functional equivalent as shown in column 8 of Table I B, application no. 17, and being depicted in the same respective line as said At4g33040, and preferably the activity is increased non-targeted, or
[89150] (b) a polypeptide comprising a polypeptide, a consensus sequence or at least a polypeptide motif as shown in the respective line in column 5 of Table II or in column 8 of Table IV, application no. 17, respectively, and being depicted in the same respective line as said At4g33040, or a functional equivalent or a homolog thereof as depicted in column 8 of Table II, application no. 17, preferably a homolog or functional equivalent as depicted in column 8 of Table II B, application no. 17, and being depicted in the same respective line as said At4g33040, and preferably the activity is increased non-targeted, whereby the respective line disclose in column 7 the fine chemical myo-inositol.

[89151] Accordingly, in one embodiment, the molecule which activity is to be increased in the process of the invention is the gene product with an activity as a “glutaredoxin”, preferably it is the molecule of section (a) or (b) of this paragraph.

[89152] In particular, it was observed that in plants, especially in Arabidopsis thaliana, increasing or generating the activity of a gene product non-targeted with the activity of a “glutaredoxin”, preferably being encoded by a gene comprising the nucleic acid sequence SEQ ID NO. 4102, preferably the coding region thereof, conferred the production of or the increase in myo-inositol compared with the wild type control.

[89153] The nucleic acid sequence of At4g33040 from Arabidopsis thaliana, e.g. as shown in the respective line in column 5 of Table I, application no. 17, has been published in F. And the activity of the gene product thereof is the activity of glutaredoxin.

[89154] Accordingly, in one embodiment, the process of the present invention for producing sedoheptulose-7-phosphate in a non-human organism, like a microorganism or a plant or a part thereof, comprises increasing or generating the activity of a gene product with the activity of a gene product conferring the activity of “glutaredoxin”, especially from Arabidopsis thaliana or its functional equivalent or its homolog, e.g. the increase of
[89155] (a) a gene product of a gene comprising the nucleic acid molecule as shown in the respective line in column 5 of Table I (whereby the respective line disclose in column 7 the fine chemical sedoheptulose-7-phosphate), application no. 17, preferably the coding region thereof, or a homolog or a fragment thereof, and being depicted in the same respective line as said At4g33040, or a functional equivalent or a homolog thereof as shown in column 8 of Table I, application no. 17, preferably the coding region thereof, particularly a homolog or functional equivalent as shown in column 8 of Table I B, application no. 17, and being depicted in the same respective line as said At4g33040, and preferably the activity is increased non-targeted, or
[89156] (b) a polypeptide comprising a polypeptide, a consensus sequence or at least a polypeptide motif as shown in the respective line in column 5 of Table II or in column 8 of Table IV, application no. 17, respectively, and being depicted in the same respective line as said At4g33040, or a functional equivalent or a homolog thereof as depicted in column 8 of Table II, application no. 17, preferably a homolog or functional equivalent as depicted in column 8 of Table II B, application no. 17, and being depicted in the same respective line as said At4g33040, and preferably the activity is increased non-targeted, whereby the respective line disclose in column 7 the fine chemical sedoheptulose-7-phosphate.

[89157] Accordingly, in one embodiment, the molecule which activity is to be increased in the process of the invention is the gene product with an activity as a “glutaredoxin”, preferably it is the molecule of section (a) or (b) of this paragraph.

[89158] In particular, it was observed that in plants, especially in Arabidopsis thaliana, increasing or generating the activity of a gene product non-targeted with the activity of a “glutaredoxin”, preferably being encoded by a gene comprising the nucleic acid sequence SEQ ID NO. 4102, preferably the coding region thereof, conferred the production of or the increase in sedoheptulose7-phosphate compared with the wild type control.

[89159] The nucleic acid sequence of At4g33040 from Arabidopsis thaliana, e.g. as shown in the respective line in column 5 of Table I, application no. 17, has been published in F. And the activity of the gene product thereof is the activity of glutaredoxin.

[89160] Accordingly, in one embodiment, the process of the present invention for producing sucrose in a non-human organism, like a microorganism or a plant or a part thereof, comprises increasing or generating the activity of a gene product with the activity of a gene product conferring the activity of “glutaredoxin”, especially from Arabidopsis thaliana or its functional equivalent or its homolog, e.g. the increase of
[89161] (a) a gene product of a gene comprising the nucleic acid molecule as shown in the respective line in column 5 of Table I (whereby the respective line disclose in column 7 the fine chemical sucrose), application no. 17, preferably the coding region thereof, or a homolog or a fragment thereof, and being depicted in the same respective line as said At4g33040, or a functional equivalent or a homolog thereof as shown in column 8 of Table I, application no. 17, preferably the coding region thereof, particularly a homolog or functional equivalent as shown in column 8 of Table I B, application no. 17, and being depicted in the same respective line as said At4g33040, and preferably the activity is increased non-targeted, or
[89162] (b) a polypeptide comprising a polypeptide, a consensus sequence or at least a polypeptide motif as shown in the respective line in column 5 of Table II or in column 8 of Table IV, application no. 17, respectively, and being depicted in the same respective line as said At4g33040, or a functional equivalent or a homolog thereof as depicted in column 8 of Table II, application no. 17, preferably a homolog or functional equivalent as depicted in column 8 of Table II B, application no. 17, and being depicted in the same respective line as said At4g33040, and preferably the activity is increased non-targeted, whereby the respective line disclose in column 7 the fine chemical sucrose.

[89163] Accordingly, in one embodiment, the molecule which activity is to be increased in the process of the invention is the gene product with an activity as a “glutaredoxin”, preferably it is the molecule of section (a) or (b) of this paragraph.

[89164] In particular, it was observed that in plants, especially in Arabidopsis thaliana, increasing or generating the activity of a gene product non-targeted with the activity of a “glutaredoxin”, preferably being encoded by a gene comprising the nucleic acid sequence SEQ ID NO. 4102, preferably the coding region thereof, conferred the production of or the increase in sucrose compared with the wild type control.

[89165] The nucleic acid sequence of At4g34160 from Arabidopsis thaliana, e.g. as shown in the respective line in column 5 of Table I, application no. 17, has been published in F. And the activity of the gene product thereof is the activity of cyclin D .

[89166] Accordingly, in one embodiment, the process of the present invention for producing glucose-1-phosphate in a non-human organism, like a microorganism or a plant or a part thereof, comprises increasing or generating the activity of a gene product with the activity of a gene product conferring the activity of “cyclin D”, especially from Arabidopsis thaliana or its functional equivalent or its homolog, e.g. the increase of
[89167] (a) a gene product of a gene comprising the nucleic acid molecule as shown in the respective line in column 5 of Table I (whereby the respective line disclose in column 7 the fine chemical glucose-1-phosphate), application no. 17, preferably the coding region thereof, or a homolog or a fragment thereof, and being depicted in the same respective line as said At4g34160, or a functional equivalent or a homolog thereof as shown in column 8 of Table I, application no. 17, preferably the coding region thereof, particularly a homolog or functional equivalent as shown in column 8 of Table I B, application no. 17, and being depicted in the same respective line as said At4g34160, and preferably the activity is increased non-targeted, or
[89168] (b) a polypeptide comprising a polypeptide, a consensus sequence or at least a polypeptide motif as shown in the respective line in column 5 of Table II or in column 8 of Table IV, application no. 17, respectively, and being depicted in the same respective line as said At4g34160, or a functional equivalent or a homolog thereof as depicted in column 8 of Table II, application no. 17, preferably a homolog or functional equivalent as depicted in column 8 of Table II B, application no. 17, and being depicted in the same respective line as said At4g34160, and preferably the activity is increased non-targeted, whereby the respective line disclose in column 7 the fine chemical glucose-1-phosphate.

[89169] Accordingly, in one embodiment, the molecule which activity is to be increased in the process of the invention is the gene product with an activity as a “cyclin D”, preferably it is the molecule of section (a) or (b) of this paragraph.

[89170] In particular, it was observed that in plants, especially in Arabidopsis thaliana, increasing or generating the activity of a gene product non-targeted with the activity of a “cyclin D”, preferably being encoded by a gene comprising the nucleic acid sequence SEQ ID NO. 24311, preferably the coding region thereof, conferred the production of or the increase in glucose-1-phosphate compared with the wild type control.

[89171] The nucleic acid sequence of At4g34160 from Arabidopsis thaliana, e.g. as shown in the respective line in column 5 of Table I, application no. 17, has been published in F. And the activity of the gene product thereof is the activity of cyclin D .

[89172] Accordingly, in one embodiment, the process of the present invention for producing raffinose in a non-human organism, like a microorganism or a plant or a part thereof, comprises increasing or generating the activity of a gene product with the activity of a gene product conferring the activity of “cyclin D”, especially from Arabidopsis thaliana or its functional equivalent or its homolog, e.g. the increase of
[89173] (a) a gene product of a gene comprising the nucleic acid molecule as shown in the respective line in column 5 of Table I (whereby the respective line disclose in column 7 the fine chemical raffinose), application no. 17, preferably the coding region thereof, or a homolog or a fragment thereof, and being depicted in the same respective line as said At4g34160, or a functional equivalent or a homolog thereof as shown in column 8 of Table I, application no. 17, preferably the coding region thereof, particularly a homolog or functional equivalent as shown in column 8 of Table I B, application no. 17, and being depicted in the same respective line as said At4g34160, and preferably the activity is increased non-targeted, or
[89174] (b) a polypeptide comprising a polypeptide, a consensus sequence or at least a polypeptide motif as shown in the respective line in column 5 of Table II or in column 8 of Table IV, application no. 17, respectively, and being depicted in the same respective line as said At4g34160, or a functional equivalent or a homolog thereof as depicted in column 8 of Table II, application no. 17, preferably a homolog or functional equivalent as depicted in column 8 of Table II B, application no. 17, and being depicted in the same respective line as said At4g34160, and preferably the activity is increased non-targeted, whereby the respective line disclose in column 7 the fine chemical raffinose.

[89175] Accordingly, in one embodiment, the molecule which activity is to be increased in the process of the invention is the gene product with an activity as a “cyclin D”, preferably it is the molecule of section (a) or (b) of this paragraph.

[89176] In particular, it was observed that in plants, especially in Arabidopsis thaliana, increasing or generating the activity of a gene product non-targeted with the activity of a “cyclin D”, preferably being encoded by a gene comprising the nucleic acid sequence SEQ ID NO. 24311, preferably the coding region thereof, conferred the production of or the increase in raffinose compared with the wild type control.

[89177] The nucleic acid sequence of At4g34160 from Arabidopsis thaliana, e.g. as shown in the respective line in column 5 of Table I, application no. 17, has been published in F. And the activity of the gene product thereof is the activity of cyclin D .

[89178] Accordingly, in one embodiment, the process of the present invention for producing sucrose in a non-human organism, like a microorganism or a plant or a part thereof, comprises increasing or generating the activity of a gene product with the activity of a gene product conferring the activity of “cyclin D”, especially from Arabidopsis thaliana or its functional equivalent or its homolog, e.g. the increase of
[89179] (a) a gene product of a gene comprising the nucleic acid molecule as shown in the respective line in column 5 of Table I (whereby the respective line disclose in column 7 the fine chemical sucrose), application no. 17, preferably the coding region thereof, or a homolog or a fragment thereof, and being depicted in the same respective line as said At4g34160, or a functional equivalent or a homolog thereof as shown in column 8 of Table I, application no. 17, preferably the coding region thereof, particularly a homolog or functional equivalent as shown in column 8 of Table I B, application no. 17, and being depicted in the same respective line as said At4g34160, and preferably the activity is increased non-targeted, or
[89180] (b) a polypeptide comprising a polypeptide, a consensus sequence or at least a polypeptide motif as shown in the respective line in column 5 of Table II or in column 8 of Table IV, application no. 17, respectively, and being depicted in the same respective line as said At4g34160, or a functional equivalent or a homolog thereof as depicted in column 8 of Table II, application no. 17, preferably a homolog or functional equivalent as depicted in column 8 of Table II B, application no. 17, and being depicted in the same respective line as said At4g34160, and preferably the activity is increased non-targeted, whereby the respective line disclose in column 7 the fine chemical sucrose.

[89181] Accordingly, in one embodiment, the molecule which activity is to be increased in the process of the invention is the gene product with an activity as a “cyclin D”, preferably it is the molecule of section (a) or (b) of this paragraph.

[89182] In particular, it was observed that in plants, especially in Arabidopsis thaliana, increasing or generating the activity of a gene product non-targeted with the activity of a “cyclin D”, preferably being encoded by a gene comprising the nucleic acid sequence SEQ ID NO. 24311, preferably the coding region thereof, conferred the production of or the increase in sucrose compared with the wild type control.

[89183] The nucleic acid sequence of At4g35310 from Arabidopsis thaliana, e.g. as shown in the respective line in column 5 of Table I, application no. 17, has been published in F. And the activity of the gene product thereof is the activity of calcium-dependent protein kinase.

[89184] Accordingly, in one embodiment, the process of the present invention for producing fructose in a non-human organism, like a microorganism or a plant or a part thereof, comprises increasing or generating the activity of a gene product with the activity of a gene product conferring the activity of “calcium-dependent protein kinase”, especially from Arabidopsis thaliana or its functional equivalent or its homolog, e.g. the increase of
[89185] (a) a gene product of a gene comprising the nucleic acid molecule as shown in the respective line in column 5 of Table I (whereby the respective line disclose in column 7 the fine chemical fructose), application no. 17, preferably the coding region thereof, or a homolog or a fragment thereof, and being depicted in the same respective line as said At4g35310, or a functional equivalent or a homolog thereof as shown in column 8 of Table I, application no. 17, preferably the coding region thereof, particularly a homolog or functional equivalent as shown in column 8 of Table I B, application no. 17, and being depicted in the same respective line as said At4g35310, and preferably the activity is increased non-targeted, or
[89186] (b) a polypeptide comprising a polypeptide, a consensus sequence or at least a polypeptide motif as shown in the respective line in column 5 of Table II or in column 8 of Table IV, application no. 17, respectively, and being depicted in the same respective line as said At4g35310, or a functional equivalent or a homolog thereof as depicted in column 8 of Table II, application no. 17, preferably a homolog or functional equivalent as depicted in column 8 of Table II B, application no. 17, and being depicted in the same respective line as said At4g35310, and preferably the activity is increased non-targeted, whereby the respective line disclose in column 7 the fine chemical fructose.

[89187] Accordingly, in one embodiment, the molecule which activity is to be increased in the process of the invention is the gene product with an activity as a “calcium-dependent protein kinase”, preferably it is the molecule of section (a) or (b) of this paragraph.

[89188] In particular, it was observed that in plants, especially in Arabidopsis thaliana, increasing or generating the activity of a gene product non-targeted with the activity of a “calcium-dependent protein kinase”, preferably being encoded by a gene comprising the nucleic acid sequence SEQ ID NO. 4348, preferably the coding region thereof, conferred the production of or the increase in fructose compared with the wild type control.

[89189] The nucleic acid sequence of At4g35310 from Arabidopsis thaliana, e.g. as shown in the respective line in column 5 of Table I, application no. 17, has been published in F. And the activity of the gene product thereof is the activity of calcium-dependent protein kinase.

[89190] Accordingly, in one embodiment, the process of the present invention for producing glucose-1-phosphate in a non-human organism, like a microorganism or a plant or a part thereof, comprises increasing or generating the activity of a gene product with the activity of a gene product conferring the activity of “calcium-dependent protein kinase”, especially from Arabidopsis thaliana or its functional equivalent or its homolog, e.g. the increase of
[89191] (a) a gene product of a gene comprising the nucleic acid molecule as shown in the respective line in column 5 of Table I (whereby the respective line disclose in column 7 the fine chemical glucose-1-phosphate), application no. 17, preferably the coding region thereof, or a homolog or a fragment thereof, and being depicted in the same respective line as said At4g35310, or a functional equivalent or a homolog thereof as shown in column 8 of Table I, application no. 17, preferably the coding region thereof, particularly a homolog or functional equivalent as shown in column 8 of Table I B, application no. 17, and being depicted in the same respective line as said At4g35310, and preferably the activity is increased non-targeted, or
[89192] (b) a polypeptide comprising a polypeptide, a consensus sequence or at least a polypeptide motif as shown in the respective line in column 5 of Table II or in column 8 of Table IV, application no. 17, respectively, and being depicted in the same respective line as said At4g35310, or a functional equivalent or a homolog thereof as depicted in column 8 of Table II, application no. 17, preferably a homolog or functional equivalent as depicted in column 8 of Table II B, application no. 17, and being depicted in the same respective line as said At4g35310, and preferably the activity is increased non-targeted, whereby the respective line disclose in column 7 the fine chemical glucose-1-phosphate.

[89193] Accordingly, in one embodiment, the molecule which activity is to be increased in the process of the invention is the gene product with an activity as a “calcium-dependent protein kinase”, preferably it is the molecule of section (a) or (b) of this paragraph.

[89194] In particular, it was observed that in plants, especially in Arabidopsis thaliana, increasing or generating the activity of a gene product non-targeted with the activity of a “calcium-dependent protein kinase”, preferably being encoded by a gene comprising the nucleic acid sequence SEQ ID NO. 4348, preferably the coding region thereof, conferred the production of or the increase in glucose-1-phosphate compared with the wild type control.

[89195] The nucleic acid sequence of At4g35310 from Arabidopsis thaliana, e.g. as shown in the respective line in column 5 of Table I, application no. 17, has been published in F. And the activity of the gene product thereof is the activity of calcium-dependent protein kinase.

[89196] Accordingly, in one embodiment, the process of the present invention for producing raffinose in a non-human organism, like a microorganism or a plant or a part thereof, comprises increasing or generating the activity of a gene product with the activity of a gene product conferring the activity of “calcium-dependent protein kinase”, especially from Arabidopsis thaliana or its functional equivalent or its homolog, e.g. the increase of
[89197] (a) a gene product of a gene comprising the nucleic acid molecule as shown in the respective line in column 5 of Table I (whereby the respective line disclose in column 7 the fine chemical raffinose), application no. 17, preferably the coding region thereof, or a homolog or a fragment thereof, and being depicted in the same respective line as said At4g35310, or a functional equivalent or a homolog thereof as shown in column 8 of Table I, application no. 17, preferably the coding region thereof, particularly a homolog or functional equivalent as shown in column 8 of Table I B, application no. 17, and being depicted in the same respective line as said At4g35310, and preferably the activity is increased non-targeted, or
[89198] (b) a polypeptide comprising a polypeptide, a consensus sequence or at least a polypeptide motif as shown in the respective line in column 5 of Table II or in column 8 of Table IV, application no. 17, respectively, and being depicted in the same respective line as said At4g35310, or a functional equivalent or a homolog thereof as depicted in column 8 of Table II, application no. 17, preferably a homolog or functional equivalent as depicted in column 8 of Table II B, application no. 17, and being depicted in the same respective line as said At4g35310, and preferably the activity is increased non-targeted, whereby the respective line disclose in column 7 the fine chemical raffinose.

[89199] Accordingly, in one embodiment, the molecule which activity is to be increased in the process of the invention is the gene product with an activity as a “calcium-dependent protein kinase”, preferably it is the molecule of section (a) or (b) of this paragraph.

[89200] In particular, it was observed that in plants, especially in Arabidopsis thaliana, increasing or generating the activity of a gene product non-targeted with the activity of a “calcium-dependent protein kinase”, preferably being encoded by a gene comprising the nucleic acid sequence SEQ ID NO. 4348, preferably the coding region thereof, conferred the production of or the increase in raffinose compared with the wild type control.

[89201] The nucleic acid sequence of At5g02760 from Arabidopsis thaliana, e.g. as shown in the respective line in column 5 of Table I, application no. 17, has been published in F. And the activity of the gene product thereof is the activity of protein phosphatase.

[89202] Accordingly, in one embodiment, the process of the present invention for producing myo-inositol in a non-human organism, like a microorganism or a plant or a part thereof, comprises increasing or generating the activity of a gene product with the activity of a gene product conferring the activity of “protein phosphatase”, especially from Arabidopsis thaliana or its functional equivalent or its homolog, e.g. the increase of
[89203] (a) a gene product of a gene comprising the nucleic acid molecule as shown in the respective line in column 5 of Table I (whereby the respective line disclose in column 7 the fine chemical myo-inositol), application no. 17, preferably the coding region thereof, or a homolog or a fragment thereof, and being depicted in the same respective line as said At5g02760, or a functional equivalent or a homolog thereof as shown in column 8 of Table I, application no. 17, preferably the coding region thereof, particularly a homolog or functional equivalent as shown in column 8 of Table I B, application no. 17, and being depicted in the same respective line as said At5g02760, and preferably the activity is increased non-targeted, or
[89204] (b) a polypeptide comprising a polypeptide, a consensus sequence or at least a polypeptide motif as shown in the respective line in column 5 of Table II or in column 8 of Table IV, application no. 17, respectively, and being depicted in the same respective line as said At5g02760, or a functional equivalent or a homolog thereof as depicted in column 8 of Table II, application no. 17, preferably a homolog or functional equivalent as depicted in column 8 of Table II B, application no. 17, and being depicted in the same respective line as said At5g02760, and preferably the activity is increased non-targeted, whereby the respective line disclose in column 7 the fine chemical myo-inositol.

[89205] Accordingly, in one embodiment, the molecule which activity is to be increased in the process of the invention is the gene product with an activity as a “protein phosphatase”, preferably it is the molecule of section (a) or (b) of this paragraph.

[89206] In particular, it was observed that in plants, especially in Arabidopsis thaliana, increasing or generating the activity of a gene product non-targeted with the activity of a “protein phosphatase”, preferably being encoded by a gene comprising the nucleic acid sequence SEQ ID NO. 68987, preferably the coding region thereof, conferred the production of or the increase in myo-inositol compared with the wild type control.

[89207] The nucleic acid sequence of At5g03720 from Arabidopsis thaliana, e.g. as shown in the respective line in column 5 of Table I, application no. 17, has been published in F. And the activity of the gene product thereof is the activity of heat shock transcription factor.

[89208] Accordingly, in one embodiment, the process of the present invention for producing fructose in a non-human organism, like a microorganism or a plant or a part thereof, comprises increasing or generating the activity of a gene product with the activity of a gene product conferring the activity of “heat shock transcription factor”, especially from Arabidopsis thaliana or its functional equivalent or its homolog, e.g. the increase of
[89209] (a) a gene product of a gene comprising the nucleic acid molecule as shown in the respective line in column 5 of Table I (whereby the respective line disclose in column 7 the fine chemical fructose), application no. 17, preferably the coding region thereof, or a homolog or a fragment thereof, and being depicted in the same respective line as said At5g03720, or a functional equivalent or a homolog thereof as shown in column 8 of Table I, application no. 17, preferably the coding region thereof, particularly a homolog or functional equivalent as shown in column 8 of Table I B, application no. 17, and being depicted in the same respective line as said At5g03720, and preferably the activity is increased non-targeted, or
[89210] (b) a polypeptide comprising a polypeptide, a consensus sequence or at least a polypeptide motif as shown in the respective line in column 5 of Table II or in column 8 of Table IV, application no. 17, respectively, and being depicted in the same respective line as said At5g03720, or a functional equivalent or a homolog thereof as depicted in column 8 of Table II, application no. 17, preferably a homolog or functional equivalent as depicted in column 8 of Table II B, application no. 17, and being depicted in the same respective line as said At5g03720, and preferably the activity is increased non-targeted, whereby the respective line disclose in column 7 the fine chemical fructose.

[89211] Accordingly, in one embodiment, the molecule which activity is to be increased in the process of the invention is the gene product with an activity as a “heat shock transcription factor”, preferably it is the molecule of section (a) or (b) of this paragraph.

[89212] In particular, it was observed that in plants, especially in Arabidopsis thaliana, increasing or generating the activity of a gene product non-targeted with the activity of a “heat shock transcription factor”, preferably being encoded by a gene comprising the nucleic acid sequence SEQ ID NO. 24438, preferably the coding region thereof, conferred the production of or the increase in fructose compared with the wild type control.

[89213] The nucleic acid sequence of At5g03720 from Arabidopsis thaliana, e.g. as shown in the respective line in column 5 of Table I, application no. 17, has been published in F. And the activity of the gene product thereof is the activity of heat shock transcription factor.

[89214] Accordingly, in one embodiment, the process of the present invention for producing glucose in a non-human organism, like a microorganism or a plant or a part thereof, comprises increasing or generating the activity of a gene product with the activity of a gene product conferring the activity of “heat shock transcription factor”, especially from Arabidopsis thaliana or its functional equivalent or its homolog, e.g. the increase of
[89215] (a) a gene product of a gene comprising the nucleic acid molecule as shown in the respective line in column 5 of Table I (whereby the respective line disclose in column 7 the fine chemical glucose), application no. 17, preferably the coding region thereof, or a homolog or a fragment thereof, and being depicted in the same respective line as said At5g03720, or a functional equivalent or a homolog thereof as shown in column 8 of Table I, application no. 17, preferably the coding region thereof, particularly a homolog or functional equivalent as shown in column 8 of Table I B, application no. 17, and being depicted in the same respective line as said At5g03720, and preferably the activity is increased non-targeted, or
[89216] (b) a polypeptide comprising a polypeptide, a consensus sequence or at least a polypeptide motif as shown in the respective line in column 5 of Table II or in column 8 of Table IV, application no. 17, respectively, and being depicted in the same respective line as said At5g03720, or a functional equivalent or a homolog thereof as depicted in column 8 of Table II, application no. 17, preferably a homolog or functional equivalent as depicted in column 8 of Table II B, application no. 17, and being depicted in the same respective line as said At5g03720, and preferably the activity is increased non-targeted, whereby the respective line disclose in column 7 the fine chemical glucose.

[89217] Accordingly, in one embodiment, the molecule which activity is to be increased in the process of the invention is the gene product with an activity as a “heat shock transcription factor”, preferably it is the molecule of section (a) or (b) of this paragraph.

[89218] In particular, it was observed that in plants, especially in Arabidopsis thaliana, increasing or generating the activity of a gene product non-targeted with the activity of a “heat shock transcription factor”, preferably being encoded by a gene comprising the nucleic acid sequence SEQ ID NO. 24438, preferably the coding region thereof, conferred the production of or the increase in glucose compared with the wild type control.

[89219] The nucleic acid sequence of At5g03720 from Arabidopsis thaliana, e.g. as shown in the respective line in column 5 of Table I, application no. 17, has been published in F. And the activity of the gene product thereof is the activity of heat shock transcription factor.

[89220] Accordingly, in one embodiment, the process of the present invention for producing glucose-1-phosphate in a non-human organism, like a microorganism or a plant or a part thereof, comprises increasing or generating the activity of a gene product with the activity of a gene product conferring the activity of “heat shock transcription factor”, especially from Arabidopsis thaliana or its functional equivalent or its homolog, e.g. the increase of
[89221] (a) a gene product of a gene comprising the nucleic acid molecule as shown in the respective line in column 5 of Table I (whereby the respective line disclose in column 7 the fine chemical glucose-1-phosphate), application no. 17, preferably the coding region thereof, or a homolog or a fragment thereof, and being depicted in the same respective line as said At5g03720, or a functional equivalent or a homolog thereof as shown in column 8 of Table I, application no. 17, preferably the coding region thereof, particularly a homolog or functional equivalent as shown in column 8 of Table I B, application no. 17, and being depicted in the same respective line as said At5g03720, and preferably the activity is increased non-targeted, or
[89222] (b) a polypeptide comprising a polypeptide, a consensus sequence or at least a polypeptide motif as shown in the respective line in column 5 of Table II or in column 8 of Table IV, application no. 17, respectively, and being depicted in the same respective line as said At5g03720, or a functional equivalent or a homolog thereof as depicted in column 8 of Table II, application no. 17, preferably a homolog or functional equivalent as depicted in column 8 of Table II B, application no. 17, and being depicted in the same respective line as said At5g03720, and preferably the activity is increased non-targeted, whereby the respective line disclose in column 7 the fine chemical glucose-1-phosphate.

[89223] Accordingly, in one embodiment, the molecule which activity is to be increased in the process of the invention is the gene product with an activity as a “heat shock transcription factor”, preferably it is the molecule of section (a) or (b) of this paragraph.

[89224] In particular, it was observed that in plants, especially in Arabidopsis thaliana, increasing or generating the activity of a gene product non-targeted with the activity of a “heat shock transcription factor”, preferably being encoded by a gene comprising the nucleic acid sequence SEQ ID NO. 24438, preferably the coding region thereof, conferred the production of or the increase in glucose-1-phosphate compared with the wild type control.

[89225] The nucleic acid sequence of At5g03720 from Arabidopsis thaliana, e.g. as shown in the respective line in column 5 of Table I, application no. 17, has been published in F. And the activity of the gene product thereof is the activity of heat shock transcription factor.

[89226] Accordingly, in one embodiment, the process of the present invention for producing myo-inositol in a non-human organism, like a microorganism or a plant or a part thereof, comprises increasing or generating the activity of a gene product with the activity of a gene product conferring the activity of “heat shock transcription factor”, especially from Arabidopsis thaliana or its functional equivalent or its homolog, e.g. the increase of
[89227] (a) a gene product of a gene comprising the nucleic acid molecule as shown in the respective line in column 5 of Table I (whereby the respective line disclose in column 7 the fine chemical myo-inositol), application no. 17, preferably the coding region thereof, or a homolog or a fragment thereof, and being depicted in the same respective line as said At5g03720, or a functional equivalent or a homolog thereof as shown in column 8 of Table I, application no. 17, preferably the coding region thereof, particularly a homolog or functional equivalent as shown in column 8 of Table I B, application no. 17, and being depicted in the same respective line as said At5g03720, and preferably the activity is increased non-targeted, or
[89228] (b) a polypeptide comprising a polypeptide, a consensus sequence or at least a polypeptide motif as shown in the respective line in column 5 of Table II or in column 8 of Table IV, application no. 17, respectively, and being depicted in the same respective line as said At5g03720, or a functional equivalent or a homolog thereof as depicted in column 8 of Table II, application no. 17, preferably a homolog or functional equivalent as depicted in column 8 of Table II B, application no. 17, and being depicted in the same respective line as said At5g03720, and preferably the activity is increased non-targeted, whereby the respective line disclose in column 7 the fine chemical myo-inositol.

[89229] Accordingly, in one embodiment, the molecule which activity is to be increased in the process of the invention is the gene product with an activity as a “heat shock transcription factor”, preferably it is the molecule of section (a) or (b) of this paragraph.

[89230] In particular, it was observed that in plants, especially in Arabidopsis thaliana, increasing or generating the activity of a gene product non-targeted with the activity of a “heat shock transcription factor”, preferably being encoded by a gene comprising the nucleic acid sequence SEQ ID NO. 24438, preferably the coding region thereof, conferred the production of or the increase in myo-inositol compared with the wild type control.

[89231] The nucleic acid sequence of At5g03720 from Arabidopsis thaliana, e.g. as shown in the respective line in column 5 of Table I, application no. 17, has been published in F. And the activity of the gene product thereof is the activity of heat shock transcription factor.

[89232] Accordingly, in one embodiment, the process of the present invention for producing raffinose in a non-human organism, like a microorganism or a plant or a part thereof, comprises increasing or generating the activity of a gene product with the activity of a gene product conferring the activity of “heat shock transcription factor”, especially from Arabidopsis thaliana or its functional equivalent or its homolog, e.g. the increase of
[89233] (a) a gene product of a gene comprising the nucleic acid molecule as shown in the respective line in column 5 of Table I (whereby the respective line disclose in column 7 the fine chemical raffinose), application no. 17, preferably the coding region thereof, or a homolog or a fragment thereof, and being depicted in the same respective line as said At5g03720, or a functional equivalent or a homolog thereof as shown in column 8 of Table I, application no. 17, preferably the coding region thereof, particularly a homolog or functional equivalent as shown in column 8 of Table I B, application no. 17, and being depicted in the same respective line as said At5g03720, and preferably the activity is increased non-targeted, or
[89234] (b) a polypeptide comprising a polypeptide, a consensus sequence or at least a polypeptide motif as shown in the respective line in column 5 of Table II or in column 8 of Table IV, application no. 17, respectively, and being depicted in the same respective line as said At5g03720, or a functional equivalent or a homolog thereof as depicted in column 8 of Table II, application no. 17, preferably a homolog or functional equivalent as depicted in column 8 of Table II B, application no. 17, and being depicted in the same respective line as said At5g03720, and preferably the activity is increased non-targeted, whereby the respective line disclose in column 7 the fine chemical raffinose.

[89235] Accordingly, in one embodiment, the molecule which activity is to be increased in the process of the invention is the gene product with an activity as a “heat shock transcription factor”, preferably it is the molecule of section (a) or (b) of this paragraph.

[89236] In particular, it was observed that in plants, especially in Arabidopsis thaliana, increasing or generating the activity of a gene product non-targeted with the activity of a “heat shock transcription factor”, preferably being encoded by a gene comprising the nucleic acid sequence SEQ ID NO. 24438, preferably the coding region thereof, conferred the production of or the increase in raffinose compared with the wild type control.

[89237] The nucleic acid sequence of At5g03720 from Arabidopsis thaliana, e.g. as shown in the respective line in column 5 of Table I, application no. 17, has been published in F. And the activity of the gene product thereof is the activity of heat shock transcription factor.

[89238] Accordingly, in one embodiment, the process of the present invention for producing sucrose in a non-human organism, like a microorganism or a plant or a part thereof, comprises increasing or generating the activity of a gene product with the activity of a gene product conferring the activity of “heat shock transcription factor”, especially from Arabidopsis thaliana or its functional equivalent or its homolog, e.g. the increase of
[89239] (a) a gene product of a gene comprising the nucleic acid molecule as shown in the respective line in column 5 of Table I (whereby the respective line disclose in column 7 the fine chemical sucrose), application no. 17, preferably the coding region thereof, or a homolog or a fragment thereof, and being depicted in the same respective line as said At5g03720, or a functional equivalent or a homolog thereof as shown in column 8 of Table I, application no. 17, preferably the coding region thereof, particularly a homolog or functional equivalent as shown in column 8 of Table I B, application no. 17, and being depicted in the same respective line as said At5g03720, and preferably the activity is increased non-targeted, or
[89240] (b) a polypeptide comprising a polypeptide, a consensus sequence or at least a polypeptide motif as shown in the respective line in column 5 of Table II or in column 8 of Table IV, application no. 17, respectively, and being depicted in the same respective line as said At5g03720, or a functional equivalent or a homolog thereof as depicted in column 8 of Table II, application no. 17, preferably a homolog or functional equivalent as depicted in column 8 of Table II B, application no. 17, and being depicted in the same respective line as said At5g03720, and preferably the activity is increased non-targeted, whereby the respective line disclose in column 7 the fine chemical sucrose.

[89241] Accordingly, in one embodiment, the molecule which activity is to be increased in the process of the invention is the gene product with an activity as a “heat shock transcription factor”, preferably it is the molecule of section (a) or (b) of this paragraph.

[89242] In particular, it was observed that in plants, especially in Arabidopsis thaliana, increasing or generating the activity of a gene product non-targeted with the activity of a “heat shock transcription factor”, preferably being encoded by a gene comprising the nucleic acid sequence SEQ ID NO. 24438, preferably the coding region thereof, conferred the production of or the increase in sucrose compared with the wild type control.

[89243] The nucleic acid sequence of At5g07200 from Arabidopsis thaliana, e.g. as shown in the respective line in column 5 of Table I, application no. 17, has been published in F. And the activity of the gene product thereof is the activity of gibberellin 20-oxidase.

[89244] Accordingly, in one embodiment, the process of the present invention for producing myo-inositol in a non-human organism, like a microorganism or a plant or a part thereof, comprises increasing or generating the activity of a gene product with the activity of a gene product conferring the activity of “gibberellin 20-oxidase”, especially from Arabidopsis thaliana or its functional equivalent or its homolog, e.g. the increase of
[89245] (a) a gene product of a gene comprising the nucleic acid molecule as shown in the respective line in column 5 of Table I (whereby the respective line disclose in column 7 the fine chemical myo-inositol), application no. 17, preferably the coding region thereof, or a homolog or a fragment thereof, and being depicted in the same respective line as said At5g07200, or a functional equivalent or a homolog thereof as shown in column 8 of Table I, application no. 17, preferably the coding region thereof, particularly a homolog or functional equivalent as shown in column 8 of Table I B, application no. 17, and being depicted in the same respective line as said At5g07200, and preferably the activity is increased non-targeted, or
[89246] (b) a polypeptide comprising a polypeptide, a consensus sequence or at least a polypeptide motif as shown in the respective line in column 5 of Table II or in column 8 of Table IV, application no. 17, respectively, and being depicted in the same respective line as said At5g07200, or a functional equivalent or a homolog thereof as depicted in column 8 of Table II, application no. 17, preferably a homolog or functional equivalent as depicted in column 8 of Table II B, application no. 17, and being depicted in the same respective line as said At5g07200, and preferably the activity is increased non-targeted, whereby the respective line disclose in column 7 the fine chemical myo-inositol.

[89247] Accordingly, in one embodiment, the molecule which activity is to be increased in the process of the invention is the gene product with an activity as a “gibberellin 20-oxidase”, preferably it is the molecule of section (a) or (b) of this paragraph.

[89248] In particular, it was observed that in plants, especially in Arabidopsis thaliana, increasing or generating the activity of a gene product non-targeted with the activity of a “gibberellin 20-oxidase”, preferably being encoded by a gene comprising the nucleic acid sequence SEQ ID NO. 24492, preferably the coding region thereof, conferred the production of or the increase in myo-inositol compared with the wild type control.

[89249] The nucleic acid sequence of At5g10170 from Arabidopsis thaliana, e.g. as shown in the respective line in column 5 of Table I, application no. 17, has been published in F. And the activity of the gene product thereof is the activity of inositol-3-phosphate synthase.

[89250] Accordingly, in one embodiment, the process of the present invention for producing myo-inositol in a non-human organism, like a microorganism or a plant or a part thereof, comprises increasing or generating the activity of a gene product with the activity of a gene product conferring the activity of “inositol-3-phosphate synthase”, especially from Arabidopsis thaliana or its functional equivalent or its homolog, e.g. the increase of
[89251] (a) a gene product of a gene comprising the nucleic acid molecule as shown in the respective line in column 5 of Table I (whereby the respective line disclose in column 7 the fine chemical myo-inositol), application no. 17, preferably the coding region thereof, or a homolog or a fragment thereof, and being depicted in the same respective line as said At5g10170, or a functional equivalent or a homolog thereof as shown in column 8 of Table I, application no. 17, preferably the coding region thereof, particularly a homolog or functional equivalent as shown in column 8 of Table I B, application no. 17, and being depicted in the same respective line as said At5g10170, and preferably the activity is increased non-targeted, or
[89252] (b) a polypeptide comprising a polypeptide, a consensus sequence or at least a polypeptide motif as shown in the respective line in column 5 of Table II or in column 8 of Table IV, application no. 17, respectively, and being depicted in the same respective line as said At5g10170, or a functional equivalent or a homolog thereof as depicted in column 8 of Table II, application no. 17, preferably a homolog or functional equivalent as depicted in column 8 of Table II B, application no. 17, and being depicted in the same respective line as said At5g10170, and preferably the activity is increased non-targeted, whereby the respective line disclose in column 7 the fine chemical myo-inositol.

[89253] Accordingly, in one embodiment, the molecule which activity is to be increased in the process of the invention is the gene product with an activity as a “inositol-3-phosphate synthase”, preferably it is the molecule of section (a) or (b) of this paragraph.

[89254] In particular, it was observed that in plants, especially in Arabidopsis thaliana, increasing or generating the activity of a gene product non-targeted with the activity of a “inositol-3-phosphate synthase”, preferably being encoded by a gene comprising the nucleic acid sequence SEQ ID NO. 142753, preferably the coding region thereof, conferred the production of or the increase in myo-inositol compared with the wild type control.

[89255] The nucleic acid sequence of At5g10170 from Arabidopsis thaliana, e.g. as shown in the respective line in column 5 of Table I, application no. 17, has been published in F. And the activity of the gene product thereof is the activity of inositol-3-phosphate synthase.

[89256] Accordingly, in one embodiment, the process of the present invention for producing raffinose in a non-human organism, like a microorganism or a plant or a part thereof, comprises increasing or generating the activity of a gene product with the activity of a gene product conferring the activity of “inositol-3-phosphate synthase”, especially from Arabidopsis thaliana or its functional equivalent or its homolog, e.g. the increase of
[89257] (a) a gene product of a gene comprising the nucleic acid molecule as shown in the respective line in column 5 of Table I (whereby the respective line disclose in column 7 the fine chemical raffinose), application no. 17, preferably the coding region thereof, or a homolog or a fragment thereof, and being depicted in the same respective line as said At5g10170, or a functional equivalent or a homolog thereof as shown in column 8 of Table I, application no. 17, preferably the coding region thereof, particularly a homolog or functional equivalent as shown in column 8 of Table I B, application no. 17, and being depicted in the same respective line as said At5g10170, and preferably the activity is increased non-targeted, or
[89258] (b) a polypeptide comprising a polypeptide, a consensus sequence or at least a polypeptide motif as shown in the respective line in column 5 of Table II or in column 8 of Table IV, application no. 17, respectively, and being depicted in the same respective line as said At5g10170, or a functional equivalent or a homolog thereof as depicted in column 8 of Table II, application no. 17, preferably a homolog or functional equivalent as depicted in column 8 of Table II B, application no. 17, and being depicted in the same respective line as said At5g10170, and preferably the activity is increased non-targeted, whereby the respective line disclose in column 7 the fine chemical raffinose.

[89259] Accordingly, in one embodiment, the molecule which activity is to be increased in the process of the invention is the gene product with an activity as a “inositol-3-phosphate synthase”, preferably it is the molecule of section (a) or (b) of this paragraph.

[89260] In particular, it was observed that in plants, especially in Arabidopsis thaliana, increasing or generating the activity of a gene product non-targeted with the activity of a “inositol-3-phosphate synthase”, preferably being encoded by a gene comprising the nucleic acid sequence SEQ ID NO. 142753, preferably the coding region thereof, conferred the production of or the increase in raffinose compared with the wild type control.

[89261] The nucleic acid sequence of At5g14070 from Arabidopsis thaliana, e.g. as shown in the respective line in column 5 of Table I, application no. 17, has been published in F. And the activity of the gene product thereof is the activity of glutaredoxin.

[89262] Accordingly, in one embodiment, the process of the present invention for producing glucose in a non-human organism, like a microorganism or a plant or a part thereof, comprises increasing or generating the activity of a gene product with the activity of a gene product conferring the activity of “glutaredoxin”, especially from Arabidopsis thaliana or its functional equivalent or its homolog, e.g. the increase of
[89263] (a) a gene product of a gene comprising the nucleic acid molecule as shown in the respective line in column 5 of Table I (whereby the respective line disclose in column 7 the fine chemical glucose), application no. 17, preferably the coding region thereof, or a homolog or a fragment thereof, and being depicted in the same respective line as said At5g14070, or a functional equivalent or a homolog thereof as shown in column 8 of Table I, application no. 17, preferably the coding region thereof, particularly a homolog or functional equivalent as shown in column 8 of Table I B, application no. 17, and being depicted in the same respective line as said At5g14070, and preferably the activity is increased non-targeted, or
[89264] (b) a polypeptide comprising a polypeptide, a consensus sequence or at least a polypeptide motif as shown in the respective line in column 5 of Table II or in column 8 of Table IV, application no. 17, respectively, and being depicted in the same respective line as said At5g14070, or a functional equivalent or a homolog thereof as depicted in column 8 of Table II, application no. 17, preferably a homolog or functional equivalent as depicted in column 8 of Table II B, application no. 17, and being depicted in the same respective line as said At5g14070, and preferably the activity is increased non-targeted, whereby the respective line disclose in column 7 the fine chemical glucose.

[89265] Accordingly, in one embodiment, the molecule which activity is to be increased in the process of the invention is the gene product with an activity as a “glutaredoxin”, preferably it is the molecule of section (a) or (b) of this paragraph.

[89266] In particular, it was observed that in plants, especially in Arabidopsis thaliana, increasing or generating the activity of a gene product non-targeted with the activity of a “glutaredoxin”, preferably being encoded by a gene comprising the nucleic acid sequence SEQ ID NO. 69275, preferably the coding region thereof, conferred the production of or the increase in glucose compared with the wild type control.

[89267] The nucleic acid sequence of At5g16650 from Arabidopsis thaliana, e.g. as shown in the respective line in column 5 of Table I, application no. 17, has been published in F. And the activity of the gene product thereof is the activity of At5g16650-protein.

[89268] Accordingly, in one embodiment, the process of the present invention for producing fructose in a non-human organism, like a microorganism or a plant or a part thereof, comprises increasing or generating the activity of a gene product with the activity of a gene product conferring the activity of “At5g16650-protein”, especially from Arabidopsis thaliana or its functional equivalent or its homolog, e.g. the increase of
[89269] (a) a gene product of a gene comprising the nucleic acid molecule as shown in the respective line in column 5 of Table I (whereby the respective line disclose in column 7 the fine chemical fructose), application no. 17, preferably the coding region thereof, or a homolog or a fragment thereof, and being depicted in the same respective line as said At5g16650, or a functional equivalent or a homolog thereof as shown in column 8 of Table I, application no. 17, preferably the coding region thereof, particularly a homolog or functional equivalent as shown in column 8 of Table I B, application no. 17, and being depicted in the same respective line as said At5g16650, and preferably the activity is increased non-targeted, or
[89270] (b) a polypeptide comprising a polypeptide, a consensus sequence or at least a polypeptide motif as shown in the respective line in column 5 of Table II or in column 8 of Table IV, application no. 17, respectively, and being depicted in the same respective line as said At5g16650, or a functional equivalent or a homolog thereof as depicted in column 8 of Table II, application no. 17, preferably a homolog or functional equivalent as depicted in column 8 of Table II B, application no. 17, and being depicted in the same respective line as said At5g16650, and preferably the activity is increased non-targeted, whereby the respective line disclose in column 7 the fine chemical fructose.

[89271] Accordingly, in one embodiment, the molecule which activity is to be increased in the process of the invention is the gene product with an activity as a “At5g16650-protein”, preferably it is the molecule of section (a) or (b) of this paragraph.

[89272] In particular, it was observed that in plants, especially in Arabidopsis thaliana, increasing or generating the activity of a gene product non-targeted with the activity of a “At5g16650-protein”, preferably being encoded by a gene comprising the nucleic acid sequence SEQ ID NO. 25283, preferably the coding region thereof, conferred the production of or the increase in fructose compared with the wild type control.

[89273] The nucleic acid sequence of At5g18600 from Arabidopsis thaliana, e.g. as shown in the respective line in column 5 of Table I, application no. 17, has been published in F. And the activity of the gene product thereof is the activity of monothiol glutaredoxin.

[89274] Accordingly, in one embodiment, the process of the present invention for producing fructose in a non-human organism, like a microorganism or a plant or a part thereof, comprises increasing or generating the activity of a gene product with the activity of a gene product conferring the activity of “monothiol glutaredoxin”, especially from Arabidopsis thaliana or its functional equivalent or its homolog, e.g. the increase of
[89275] (a) a gene product of a gene comprising the nucleic acid molecule as shown in the respective line in column 5 of Table I (whereby the respective line disclose in column 7 the fine chemical fructose), application no. 17, preferably the coding region thereof, or a homolog or a fragment thereof, and being depicted in the same respective line as said At5g18600, or a functional equivalent or a homolog thereof as shown in column 8 of Table I, application no. 17, preferably the coding region thereof, particularly a homolog or functional equivalent as shown in column 8 of Table I B, application no. 17, and being depicted in the same respective line as said At5g18600, and preferably the activity is increased non-targeted, or
[89276] (b) a polypeptide comprising a polypeptide, a consensus sequence or at least a polypeptide motif as shown in the respective line in column 5 of Table II or in column 8 of Table IV, application no. 17, respectively, and being depicted in the same respective line as said At5g18600, or a functional equivalent or a homolog thereof as depicted in column 8 of Table II, application no. 17, preferably a homolog or functional equivalent as depicted in column 8 of Table II B, application no. 17, and being depicted in the same respective line as said At5g18600, and preferably the activity is increased non-targeted, whereby the respective line disclose in column 7 the fine chemical fructose.

[89277] Accordingly, in one embodiment, the molecule which activity is to be increased in the process of the invention is the gene product with an activity as a “monothiol glutaredoxin”, preferably it is the molecule of section (a) or (b) of this paragraph.

[89278] In particular, it was observed that in plants, especially in Arabidopsis thaliana, increasing or generating the activity of a gene product non-targeted with the activity of a “monothiol glutaredoxin”, preferably being encoded by a gene comprising the nucleic acid sequence SEQ ID NO. 4904, preferably the coding region thereof, conferred the production of or the increase in fructose compared with the wild type control.

[89279] The nucleic acid sequence of At5g18600 from Arabidopsis thaliana, e.g. as shown in the respective line in column 5 of Table I, application no. 17, has been published in F. And the activity of the gene product thereof is the activity of monothiol glutaredoxin.

[89280] Accordingly, in one embodiment, the process of the present invention for producing glucose in a non-human organism, like a microorganism or a plant or a part thereof, comprises increasing or generating the activity of a gene product with the activity of a gene product conferring the activity of “monothiol glutaredoxin”, especially from Arabidopsis thaliana or its functional equivalent or its homolog, e.g. the increase of
[89281] (a) a gene product of a gene comprising the nucleic acid molecule as shown in the respective line in column 5 of Table I (whereby the respective line disclose in column 7 the fine chemical glucose), application no. 17, preferably the coding region thereof, or a homolog or a fragment thereof, and being depicted in the same respective line as said At5g18600, or a functional equivalent or a homolog thereof as shown in column 8 of Table I, application no. 17, preferably the coding region thereof, particularly a homolog or functional equivalent as shown in column 8 of Table I B, application no. 17, and being depicted in the same respective line as said At5g18600, and preferably the activity is increased non-targeted, or
[89282] (b) a polypeptide comprising a polypeptide, a consensus sequence or at least a polypeptide motif as shown in the respective line in column 5 of Table II or in column 8 of Table IV, application no. 17, respectively, and being depicted in the same respective line as said At5g18600, or a functional equivalent or a homolog thereof as depicted in column 8 of Table II, application no. 17, preferably a homolog or functional equivalent as depicted in column 8 of Table II B, application no. 17, and being depicted in the same respective line as said At5g18600, and preferably the activity is increased non-targeted, whereby the respective line disclose in column 7 the fine chemical glucose.

[89283] Accordingly, in one embodiment, the molecule which activity is to be increased in the process of the invention is the gene product with an activity as a “monothiol glutaredoxin”, preferably it is the molecule of section (a) or (b) of this paragraph.

[89284] In particular, it was observed that in plants, especially in Arabidopsis thaliana, increasing or generating the activity of a gene product non-targeted with the activity of a “monothiol glutaredoxin”, preferably being encoded by a gene comprising the nucleic acid sequence SEQ ID NO. 4904, preferably the coding region thereof, conferred the production of or the increase in glucose compared with the wild type control.

[89285] The nucleic acid sequence of At5g18600 from Arabidopsis thaliana, e.g. as shown in the respective line in column 5 of Table I, application no. 17, has been published in F. And the activity of the gene product thereof is the activity of monothiol glutaredoxin.

[89286] Accordingly, in one embodiment, the process of the present invention for producing myo-inositol in a non-human organism, like a microorganism or a plant or a part thereof, comprises increasing or generating the activity of a gene product with the activity of a gene product conferring the activity of “monothiol glutaredoxin”, especially from Arabidopsis thaliana or its functional equivalent or its homolog, e.g. the increase of
[89287] (a) a gene product of a gene comprising the nucleic acid molecule as shown in the respective line in column 5 of Table I (whereby the respective line disclose in column 7 the fine chemical myo-inositol), application no. 17, preferably the coding region thereof, or a homolog or a fragment thereof, and being depicted in the same respective line as said At5g18600, or a functional equivalent or a homolog thereof as shown in column 8 of Table I, application no. 17, preferably the coding region thereof, particularly a homolog or functional equivalent as shown in column 8 of Table I B, application no. 17, and being depicted in the same respective line as said At5g18600, and preferably the activity is increased non-targeted, or
[89288] (b) a polypeptide comprising a polypeptide, a consensus sequence or at least a polypeptide motif as shown in the respective line in column 5 of Table II or in column 8 of Table IV, application no. 17, respectively, and being depicted in the same respective line as said At5g18600, or a functional equivalent or a homolog thereof as depicted in column 8 of Table II, application no. 17, preferably a homolog or functional equivalent as depicted in column 8 of Table II B, application no. 17, and being depicted in the same respective line as said At5g18600, and preferably the activity is increased non-targeted, whereby the respective line disclose in column 7 the fine chemical myo-inositol.

[89289] Accordingly, in one embodiment, the molecule which activity is to be increased in the process of the invention is the gene product with an activity as a “monothiol glutaredoxin”, preferably it is the molecule of section (a) or (b) of this paragraph.

[89290] In particular, it was observed that in plants, especially in Arabidopsis thaliana, increasing or generating the activity of a gene product non-targeted with the activity of a “monothiol glutaredoxin”, preferably being encoded by a gene comprising the nucleic acid sequence SEQ ID NO. 4904, preferably the coding region thereof, conferred the production of or the increase in myo-inositol compared with the wild type control.

[89291] The nucleic acid sequence of At5g18600 from Arabidopsis thaliana, e.g. as shown in the respective line in column 5 of Table I, application no. 17, has been published in F. And the activity of the gene product thereof is the activity of monothiol glutaredoxin.

[89292] Accordingly, in one embodiment, the process of the present invention for producing sedoheptulose-7-phosphate in a non-human organism, like a microorganism or a plant or a part thereof, comprises increasing or generating the activity of a gene product with the activity of a gene product conferring the activity of “monothiol glutaredoxin”, especially from Arabidopsis thaliana or its functional equivalent or its homolog, e.g. the increase of
[89293] (a) a gene product of a gene comprising the nucleic acid molecule as shown in the respective line in column 5 of Table I (whereby the respective line disclose in column 7 the fine chemical sedoheptulose-7-phosphate), application no. 17, preferably the coding region thereof, or a homolog or a fragment thereof, and being depicted in the same respective line as said At5g18600, or a functional equivalent or a homolog thereof as shown in column 8 of Table I, application no. 17, preferably the coding region thereof, particularly a homolog or functional equivalent as shown in column 8 of Table I B, application no. 17, and being depicted in the same respective line as said At5g18600, and preferably the activity is increased non-targeted, or
[89294] (b) a polypeptide comprising a polypeptide, a consensus sequence or at least a polypeptide motif as shown in the respective line in column 5 of Table II or in column 8 of Table IV, application no. 17, respectively, and being depicted in the same respective line as said At5g18600, or a functional equivalent or a homolog thereof as depicted in column 8 of Table II, application no. 17, preferably a homolog or functional equivalent as depicted in column 8 of Table II B, application no. 17, and being depicted in the same respective line as said At5g18600, and preferably the activity is increased non-targeted, whereby the respective line disclose in column 7 the fine chemical sedoheptulose-7-phosphate.

[89295] Accordingly, in one embodiment, the molecule which activity is to be increased in the process of the invention is the gene product with an activity as a “monothiol glutaredoxin”, preferably it is the molecule of section (a) or (b) of this paragraph.

[89296] In particular, it was observed that in plants, especially in Arabidopsis thaliana, increasing or generating the activity of a gene product non-targeted with the activity of a “monothiol glutaredoxin”, preferably being encoded by a gene comprising the nucleic acid sequence SEQ ID NO. 4904, preferably the coding region thereof, conferred the production of or the increase in sedoheptulose-7-phosphate compared with the wild type control.

[89297] The nucleic acid sequence of At5g18600 from Arabidopsis thaliana, e.g. as shown in the respective line in column 5 of Table I, application no. 17, has been published in F. And the activity of the gene product thereof is the activity of monothiol glutaredoxin.

[89298] Accordingly, in one embodiment, the process of the present invention for producing sucrose in a non-human organism, like a microorganism or a plant or a part thereof, comprises increasing or generating the activity of a gene product with the activity of a gene product conferring the activity of “monothiol glutaredoxin”, especially from Arabidopsis thaliana or its functional equivalent or its homolog, e.g. the increase of
[89299] (a) a gene product of a gene comprising the nucleic acid molecule as shown in the respective line in column 5 of Table I (whereby the respective line disclose in column 7 the fine chemical sucrose), application no. 17, preferably the coding region thereof, or a homolog or a fragment thereof, and being depicted in the same respective line as said At5g18600, or a functional equivalent or a homolog thereof as shown in column 8 of Table I, application no. 17, preferably the coding region thereof, particularly a homolog or functional equivalent as shown in column 8 of Table I B, application no. 17, and being depicted in the same respective line as said At5g18600, and preferably the activity is increased non-targeted, or
[89300] (b) a polypeptide comprising a polypeptide, a consensus sequence or at least a polypeptide motif as shown in the respective line in column 5 of Table II or in column 8 of Table IV, application no. 17, respectively, and being depicted in the same respective line as said At5g18600, or a functional equivalent or a homolog thereof as depicted in column 8 of Table II, application no. 17, preferably a homolog or functional equivalent as depicted in column 8 of Table II B, application no. 17, and being depicted in the same respective line as said At5g18600, and preferably the activity is increased non-targeted, whereby the respective line disclose in column 7 the fine chemical sucrose.

[89301] Accordingly, in one embodiment, the molecule which activity is to be increased in the process of the invention is the gene product with an activity as a “monothiol glutaredoxin”, preferably it is the molecule of section (a) or (b) of this paragraph.

[89302] In particular, it was observed that in plants, especially in Arabidopsis thaliana, increasing or generating the activity of a gene product non-targeted with the activity of a “monothiol glutaredoxin”, preferably being encoded by a gene comprising the nucleic acid sequence SEQ ID NO. 4904, preferably the coding region thereof, conferred the production of or the increase in sucrose compared with the wild type control.

[89303] The nucleic acid sequence of At5g39760 from Arabidopsis thaliana, e.g. as shown in the respective line in column 5 of Table I, application no. 17, has been published in F. And the activity of the gene product thereof is the activity of transcription factor.

[89304] Accordingly, in one embodiment, the process of the present invention for producing fructose in a non-human organism, like a microorganism or a plant or a part thereof, comprises increasing or generating the activity of a gene product with the activity of a gene product conferring the activity of “transcription factor”, especially from Arabidopsis thaliana or its functional equivalent or its homolog, e.g. the increase of
[89305] (a) a gene product of a gene comprising the nucleic acid molecule as shown in the respective line in column 5 of Table I (whereby the respective line disclose in column 7 the fine chemical fructose), application no. 17, preferably the coding region thereof, or a homolog or a fragment thereof, and being depicted in the same respective line as said At5g39760, or a functional equivalent or a homolog thereof as shown in column 8 of Table I, application no. 17, preferably the coding region thereof, particularly a homolog or functional equivalent as shown in column 8 of Table I B, application no. 17, and being depicted in the same respective line as said At5g39760, and preferably the activity is increased non-targeted, or
[89306] (b) a polypeptide comprising a polypeptide, a consensus sequence or at least a polypeptide motif as shown in the respective line in column 5 of Table II or in column 8 of Table IV, application no. 17, respectively, and being depicted in the same respective line as said At5g39760, or a functional equivalent or a homolog thereof as depicted in column 8 of Table II, application no. 17, preferably a homolog or functional equivalent as depicted in column 8 of Table II B, application no. 17, and being depicted in the same respective line as said At5g39760, and preferably the activity is increased non-targeted, whereby the respective line disclose in column 7 the fine chemical fructose.

[89307] Accordingly, in one embodiment, the molecule which activity is to be increased in the process of the invention is the gene product with an activity as a “transcription factor”, preferably it is the molecule of section (a) or (b) of this paragraph.

[89308] In particular, it was observed that in plants, especially in Arabidopsis thaliana, increasing or generating the activity of a gene product non-targeted with the activity of a “transcription factor”, preferably being encoded by a gene comprising the nucleic acid sequence SEQ ID NO. 25428, preferably the coding region thereof, conferred the production of or the increase in fructose compared with the wild type control.

[89309] The nucleic acid sequence of At5g43630 from Arabidopsis thaliana, e.g. as shown in the respective line in column 5 of Table I, application no. 17, has been published in F. And the activity of the gene product thereof is the activity of At5g43630-protein.

[89310] Accordingly, in one embodiment, the process of the present invention for producing glucose-1-phosphate in a non-human organism, like a microorganism or a plant or a part thereof, comprises increasing or generating the activity of a gene product with the activity of a gene product conferring the activity of “At5g43630-protein”, especially from Arabidopsis thaliana or its functional equivalent or its homolog, e.g. the increase of
[89311] (a) a gene product of a gene comprising the nucleic acid molecule as shown in the respective line in column 5 of Table I (whereby the respective line disclose in column 7 the fine chemical glucose-1-phosphate), application no. 17, preferably the coding region thereof, or a homolog or a fragment thereof, and being depicted in the same respective line as said At5g43630, or a functional equivalent or a homolog thereof as shown in column 8 of Table I, application no. 17, preferably the coding region thereof, particularly a homolog or functional equivalent as shown in column 8 of Table I B, application no. 17, and being depicted in the same respective line as said At5g43630, and preferably the activity is increased non-targeted, or
[89312] (b) a polypeptide comprising a polypeptide, a consensus sequence or at least a polypeptide motif as shown in the respective line in column 5 of Table II or in column 8 of Table IV, application no. 17, respectively, and being depicted in the same respective line as said At5g43630, or a functional equivalent or a homolog thereof as depicted in column 8 of Table II, application no. 17, preferably a homolog or functional equivalent as depicted in column 8 of Table II B, application no. 17, and being depicted in the same respective line as said At5g43630, and preferably the activity is increased non-targeted, whereby the respective line disclose in column 7 the fine chemical glucose-1-phosphate.

[89313] Accordingly, in one embodiment, the molecule which activity is to be increased in the process of the invention is the gene product with an activity as a “At5g43630-protein”, preferably it is the molecule of section (a) or (b) of this paragraph.

[89314] In particular, it was observed that in plants, especially in Arabidopsis thaliana, increasing or generating the activity of a gene product non-targeted with the activity of a “At5g43630-protein”, preferably being encoded by a gene comprising the nucleic acid sequence SEQ ID NO. 142929, preferably the coding region thereof, conferred the production of or the increase in glucose-1-phosphate compared with the wild type control.

[89315] The nucleic acid sequence of At5g54070 from Arabidopsis thaliana, e.g. as shown in the respective line in column 5 of Table I, application no. 17, has been published in F. And the activity of the gene product thereof is the activity of heat shock transcription factor.

[89316] Accordingly, in one embodiment, the process of the present invention for producing myo-inositol in a non-human organism, like a microorganism or a plant or a part thereof, comprises increasing or generating the activity of a gene product with the activity of a gene product conferring the activity of “heat shock transcription factor”, especially from Arabidopsis thaliana or its functional equivalent or its homolog, e.g. the increase of
[89317] (a) a gene product of a gene comprising the nucleic acid molecule as shown in the respective line in column 5 of Table I (whereby the respective line disclose in column 7 the fine chemical myo-inositol), application no. 17, preferably the coding region thereof, or a homolog or a fragment thereof, and being depicted in the same respective line as said At5g54070, or a functional equivalent or a homolog thereof as shown in column 8 of Table I, application no. 17, preferably the coding region thereof, particularly a homolog or functional equivalent as shown in column 8 of Table I B, application no. 17, and being depicted in the same respective line as said At5g54070, and preferably the activity is increased non-targeted, or
[89318] (b) a polypeptide comprising a polypeptide, a consensus sequence or at least a polypeptide motif as shown in the respective line in column 5 of Table II or in column 8 of Table IV, application no. 17, respectively, and being depicted in the same respective line as said At5g54070, or a functional equivalent or a homolog thereof as depicted in column 8 of Table II, application no. 17, preferably a homolog or functional equivalent as depicted in column 8 of Table II B, application no. 17, and being depicted in the same respective line as said At5g54070, and preferably the activity is increased non-targeted, whereby the respective line disclose in column 7 the fine chemical myo-inositol.

[89319] Accordingly, in one embodiment, the molecule which activity is to be increased in the process of the invention is the gene product with an activity as a “heat shock transcription factor”, preferably it is the molecule of section (a) or (b) of this paragraph.

[89320] In particular, it was observed that in plants, especially in Arabidopsis thaliana, increasing or generating the activity of a gene product non-targeted with the activity of a “heat shock transcription factor”, preferably being encoded by a gene comprising the nucleic acid sequence SEQ ID NO. 142933, preferably the coding region thereof, conferred the production of or the increase in myo-inositol compared with the wild type control.

[89321] The nucleic acid sequence of At5g54070 from Arabidopsis thaliana, e.g. as shown in the respective line in column 5 of Table I, application no. 17, has been published in F. And the activity of the gene product thereof is the activity of heat shock transcription factor.

[89322] Accordingly, in one embodiment, the process of the present invention for producing raffinose in a non-human organism, like a microorganism or a plant or a part thereof, comprises increasing or generating the activity of a gene product with the activity of a gene product conferring the activity of “heat shock transcription factor”, especially from Arabidopsis thaliana or its functional equivalent or its homolog, e.g. the increase of
[89323] (a) a gene product of a gene comprising the nucleic acid molecule as shown in the respective line in column 5 of Table I (whereby the respective line disclose in column 7 the fine chemical raffinose), application no. 17, preferably the coding region thereof, or a homolog or a fragment thereof, and being depicted in the same respective line as said At5g54070, or a functional equivalent or a homolog thereof as shown in column 8 of Table I, application no. 17, preferably the coding region thereof, particularly a homolog or functional equivalent as shown in column 8 of Table I B, application no. 17, and being depicted in the same respective line as said At5g54070, and preferably the activity is increased non-targeted, or
[89324] (b) a polypeptide comprising a polypeptide, a consensus sequence or at least a polypeptide motif as shown in the respective line in column 5 of Table II or in column 8 of Table IV, application no. 17, respectively, and being depicted in the same respective line as said At5g54070, or a functional equivalent or a homolog thereof as depicted in column 8 of Table II, application no. 17, preferably a homolog or functional equivalent as depicted in column 8 of Table II B, application no. 17, and being depicted in the same respective line as said At5g54070, and preferably the activity is increased non-targeted, whereby the respective line disclose in column 7 the fine chemical raffinose.

[89325] Accordingly, in one embodiment, the molecule which activity is to be increased in the process of the invention is the gene product with an activity as a “heat shock transcription factor”, preferably it is the molecule of section (a) or (b) of this paragraph.

[89326] In particular, it was observed that in plants, especially in Arabidopsis thaliana, increasing or generating the activity of a gene product non-targeted with the activity of a “heat shock transcription factor”, preferably being encoded by a gene comprising the nucleic acid sequence SEQ ID NO. 142933, preferably the coding region thereof, conferred the production of or the increase in raffinose compared with the wild type control.

[89327] The nucleic acid sequence of At5g57050 from Arabidopsis thaliana, e.g. as shown in the respective line in column 5 of Table I, application no. 17, has been published in F. And the activity of the gene product thereof is the activity of protein phosphatase.

[89328] Accordingly, in one embodiment, the process of the present invention for producing glucose-1-phosphate in a non-human organism, like a microorganism or a plant or a part thereof, comprises increasing or generating the activity of a gene product with the activity of a gene product conferring the activity of “protein phosphatase”, especially from Arabidopsis thaliana or its functional equivalent or its homolog, e.g. the increase of
[89329] (a) a gene product of a gene comprising the nucleic acid molecule as shown in the respective line in column 5 of Table I (whereby the respective line disclose in column 7 the fine chemical glucose-1-phosphate), application no. 17, preferably the coding region thereof, or a homolog or a fragment thereof, and being depicted in the same respective line as said At5g57050, or a functional equivalent or a homolog thereof as shown in column 8 of Table I, application no. 17, preferably the coding region thereof, particularly a homolog or functional equivalent as shown in column 8 of Table I B, application no. 17, and being depicted in the same respective line as said At5g57050, and preferably the activity is increased non-targeted, or
[89330] (b) a polypeptide comprising a polypeptide, a consensus sequence or at least a polypeptide motif as shown in the respective line in column 5 of Table II or in column 8 of Table IV, application no. 17, respectively, and being depicted in the same respective line as said At5g57050, or a functional equivalent or a homolog thereof as depicted in column 8 of Table II, application no. 17, preferably a homolog or functional equivalent as depicted in column 8 of Table II B, application no. 17, and being depicted in the same respective line as said At5g57050, and preferably the activity is increased non-targeted, whereby the respective line disclose in column 7 the fine chemical glucose-1-phosphate.

[89331] Accordingly, in one embodiment, the molecule which activity is to be increased in the process of the invention is the gene product with an activity as a “protein phosphatase”, preferably it is the molecule of section (a) or (b) of this paragraph.

[89332] In particular, it was observed that in plants, especially in Arabidopsis thaliana, increasing or generating the activity of a gene product non-targeted with the activity of a “protein phosphatase”, preferably being encoded by a gene comprising the nucleic acid sequence SEQ ID NO. 5318, preferably the coding region thereof, conferred the production of or the increase in glucose-1-phosphate compared with the wild type control.

[89333] The nucleic acid sequence of At5g57050 from Arabidopsis thaliana, e.g. as shown in the respective line in column 5 of Table I, application no. 17, has been published in F. And the activity of the gene product thereof is the activity of protein phosphatase.

[89334] Accordingly, in one embodiment, the process of the present invention for producing myo-inositol in a non-human organism, like a microorganism or a plant or a part thereof, comprises increasing or generating the activity of a gene product with the activity of a gene product conferring the activity of “protein phosphatase”, especially from Arabidopsis thaliana or its functional equivalent or its homolog, e.g. the increase of
[89335] (a) a gene product of a gene comprising the nucleic acid molecule as shown in the respective line in column 5 of Table I (whereby the respective line disclose in column 7 the fine chemical myo-inositol), application no. 17, preferably the coding region thereof, or a homolog or a fragment thereof, and being depicted in the same respective line as said At5g57050, or a functional equivalent or a homolog thereof as shown in column 8 of Table I, application no. 17, preferably the coding region thereof, particularly a homolog or functional equivalent as shown in column 8 of Table I B, application no. 17, and being depicted in the same respective line as said At5g57050, and preferably the activity is increased non-targeted, or
[89336] (b) a polypeptide comprising a polypeptide, a consensus sequence or at least a polypeptide motif as shown in the respective line in column 5 of Table II or in column 8 of Table IV, application no. 17, respectively, and being depicted in the same respective line as said At5g57050, or a functional equivalent or a homolog thereof as depicted in column 8 of Table II, application no. 17, preferably a homolog or functional equivalent as depicted in column 8 of Table II B, application no. 17, and being depicted in the same respective line as said At5g57050, and preferably the activity is increased non-targeted, whereby the respective line disclose in column 7 the fine chemical myo-inositol.

[89337] Accordingly, in one embodiment, the molecule which activity is to be increased in the process of the invention is the gene product with an activity as a “protein phosphatase”, preferably it is the molecule of section (a) or (b) of this paragraph.

[89338] In particular, it was observed that in plants, especially in Arabidopsis thaliana, increasing or generating the activity of a gene product non-targeted with the activity of a “protein phosphatase”, preferably being encoded by a gene comprising the nucleic acid sequence SEQ ID NO. 5318, preferably the coding region thereof, conferred the production of or the increase in myo-inositol compared with the wild type control.

[89339] The nucleic acid sequence of At5g60110 from Arabidopsis thaliana, e.g. as shown in the respective line in column 5 of Table I, application no. 17, has been published in F. And the activity of the gene product thereof is the activity of RNA-binding protein.

[89340] Accordingly, in one embodiment, the process of the present invention for producing fructose in a non-human organism, like a microorganism or a plant or a part thereof, comprises increasing or generating the activity of a gene product with the activity of a gene product conferring the activity of “RNA-binding protein”, especially from Arabidopsis thaliana or its functional equivalent or its homolog, e.g. the increase of
[89341] (a) a gene product of a gene comprising the nucleic acid molecule as shown in the respective line in column 5 of Table I (whereby the respective line disclose in column 7 the fine chemical fructose), application no. 17, preferably the coding region thereof, or a homolog or a fragment thereof, and being depicted in the same respective line as said At5g60110, or a functional equivalent or a homolog thereof as shown in column 8 of Table I, application no. 17, preferably the coding region thereof, particularly a homolog or functional equivalent as shown in column 8 of Table I B, application no. 17, and being depicted in the same respective line as said At5g60110, and preferably the activity is increased non-targeted, or
[89342] (b) a polypeptide comprising a polypeptide, a consensus sequence or at least a polypeptide motif as shown in the respective line in column 5 of Table II or in column 8 of Table IV, application no. 17, respectively, and being depicted in the same respective line as said At5g60110, or a functional equivalent or a homolog thereof as depicted in column 8 of Table II, application no. 17, preferably a homolog or functional equivalent as depicted in column 8 of Table II B, application no. 17, and being depicted in the same respective line as said At5g60110, and preferably the activity is increased non-targeted, whereby the respective line disclose in column 7 the fine chemical fructose.

[89343] Accordingly, in one embodiment, the molecule which activity is to be increased in the process of the invention is the gene product with an activity as a “RNA-binding protein”, preferably it is the molecule of section (a) or (b) of this paragraph.

[89344] In particular, it was observed that in plants, especially in Arabidopsis thaliana, increasing or generating the activity of a gene product non-targeted with the activity of a “RNA-binding protein”, preferably being encoded by a gene comprising the nucleic acid sequence SEQ ID NO. 70006, preferably the coding region thereof, conferred the production of or the increase in fructose compared with the wild type control.

[89345] The nucleic acid sequence of At5g60110 from Arabidopsis thaliana, e.g. as shown in the respective line in column 5 of Table I, application no. 17, has been published in F. And the activity of the gene product thereof is the activity of RNA-binding protein.

[89346] Accordingly, in one embodiment, the process of the present invention for producing glucose in a non-human organism, like a microorganism or a plant or a part thereof, comprises increasing or generating the activity of a gene product with the activity of a gene product conferring the activity of “RNA-binding protein”, especially from Arabidopsis thaliana or its functional equivalent or its homolog, e.g. the increase of
[89347] (a) a gene product of a gene comprising the nucleic acid molecule as shown in the respective line in column 5 of Table I (whereby the respective line disclose in column 7 the fine chemical glucose), application no. 17, preferably the coding region thereof, or a homolog or a fragment thereof, and being depicted in the same respective line as said At5g60110, or a functional equivalent or a homolog thereof as shown in column 8 of Table I, application no. 17, preferably the coding region thereof, particularly a homolog or functional equivalent as shown in column 8 of Table I B, application no. 17, and being depicted in the same respective line as said At5g60110, and preferably the activity is increased non-targeted, or
[89348] (b) a polypeptide comprising a polypeptide, a consensus sequence or at least a polypeptide motif as shown in the respective line in column 5 of Table II or in column 8 of Table IV, application no. 17, respectively, and being depicted in the same respective line as said At5g60110, or a functional equivalent or a homolog thereof as depicted in column 8 of Table II, application no. 17, preferably a homolog or functional equivalent as depicted in column 8 of Table II B, application no. 17, and being depicted in the same respective line as said At5g60110, and preferably the activity is increased non-targeted, whereby the respective line disclose in column 7 the fine chemical glucose.

[89349] Accordingly, in one embodiment, the molecule which activity is to be increased in the process of the invention is the gene product with an activity as a “RNA-binding protein”, preferably it is the molecule of section (a) or (b) of this paragraph.

[89350] In particular, it was observed that in plants, especially in Arabidopsis thaliana, increasing or generating the activity of a gene product non-targeted with the activity of a “RNA-binding protein”, preferably being encoded by a gene comprising the nucleic acid sequence SEQ ID NO. 70006, preferably the coding region thereof, conferred the production of or the increase in glucose compared with the wild type control.

[89351] The nucleic acid sequence of At5g60440 from Arabidopsis thaliana, e.g. as shown in the respective line in column 5 of Table I, application no. 17, has been published in F. And the activity of the gene product thereof is the activity of MADS-box transcription factor.

[89352] Accordingly, in one embodiment, the process of the present invention for producing fructose in a non-human organism, like a microorganism or a plant or a part thereof, comprises increasing or generating the activity of a gene product with the activity of a gene product conferring the activity of “MADS-box transcription factor”, especially from Arabidopsis thaliana or its functional equivalent or its homolog, e.g. the increase of
[89353] (a) a gene product of a gene comprising the nucleic acid molecule as shown in the respective line in column 5 of Table I (whereby the respective line disclose in column 7 the fine chemical fructose), application no. 17, preferably the coding region thereof, or a homolog or a fragment thereof, and being depicted in the same respective line as said At5g60440, or a functional equivalent or a homolog thereof as shown in column 8 of Table I, application no. 17, preferably the coding region thereof, particularly a homolog or functional equivalent as shown in column 8 of Table I B, application no. 17, and being depicted in the same respective line as said At5g60440, and preferably the activity is increased non-targeted, or
[89354] (b) a polypeptide comprising a polypeptide, a consensus sequence or at least a polypeptide motif as shown in the respective line in column 5 of Table II or in column 8 of Table IV, application no. 17, respectively, and being depicted in the same respective line as said At5g60440, or a functional equivalent or a homolog thereof as depicted in column 8 of Table II, application no. 17, preferably a homolog or functional equivalent as depicted in column 8 of Table II B, application no. 17, and being depicted in the same respective line as said At5g60440, and preferably the activity is increased non-targeted, whereby the respective line disclose in column 7 the fine chemical fructose.

[89355] Accordingly, in one embodiment, the molecule which activity is to be increased in the process of the invention is the gene product with an activity as a “MADS-box transcription factor”, preferably it is the molecule of section (a) or (b) of this paragraph.

[89356] In particular, it was observed that in plants, especially in Arabidopsis thaliana, increasing or generating the activity of a gene product non-targeted with the activity of a “MADS-box transcription factor”, preferably being encoded by a gene comprising the nucleic acid sequence SEQ ID NO. 102899, preferably the coding region thereof, conferred the production of or the increase in fructose compared with the wild type control.

[89357] The nucleic acid sequence of At5g60440 from Arabidopsis thaliana, e.g. as shown in the respective line in column 5 of Table I, application no. 17, has been published in F. And the activity of the gene product thereof is the activity of MADS-box transcription factor.

[89358] Accordingly, in one embodiment, the process of the present invention for producing raffinose in a non-human organism, like a microorganism or a plant or a part thereof, comprises increasing or generating the activity of a gene product with the activity of a gene product conferring the activity of “MADS-box transcription factor”, especially from Arabidopsis thaliana or its functional equivalent or its homolog, e.g. the increase of
[89359] (a) a gene product of a gene comprising the nucleic acid molecule as shown in the respective line in column 5 of Table I (whereby the respective line disclose in column 7 the fine chemical raffinose), application no. 17, preferably the coding region thereof, or a homolog or a fragment thereof, and being depicted in the same respective line as said At5g60440, or a functional equivalent or a homolog thereof as shown in column 8 of Table I, application no. 17, preferably the coding region thereof, particularly a homolog or functional equivalent as shown in column 8 of Table I B, application no. 17, and being depicted in the same respective line as said At5g60440, and preferably the activity is increased non-targeted, or
[89360] (b) a polypeptide comprising a polypeptide, a consensus sequence or at least a polypeptide motif as shown in the respective line in column 5 of Table II or in column 8 of Table IV, application no. 17, respectively, and being depicted in the same respective line as said At5g60440, or a functional equivalent or a homolog thereof as depicted in column 8 of Table II, application no. 17, preferably a homolog or functional equivalent as depicted in column 8 of Table II B, application no. 17, and being depicted in the same respective line as said At5g60440, and preferably the activity is increased non-targeted, whereby the respective line disclose in column 7 the fine chemical raffinose.

[89361] Accordingly, in one embodiment, the molecule which activity is to be increased in the process of the invention is the gene product with an activity as a “MADS-box transcription factor”, preferably it is the molecule of section (a) or (b) of this paragraph.

[89362] In particular, it was observed that in plants, especially in Arabidopsis thaliana, increasing or generating the activity of a gene product non-targeted with the activity of a “MADS-box transcription factor”, preferably being encoded by a gene comprising the nucleic acid sequence SEQ ID NO. 102899, preferably the coding region thereof, conferred the production of or the increase in raffinose compared with the wild type control.

[89363] The nucleic acid sequence of At5g60440 from Arabidopsis thaliana, e.g. as shown in the respective line in column 5 of Table I, application no. 17, has been published in F. And the activity of the gene product thereof is the activity of MADS-box transcription factor.

[89364] Accordingly, in one embodiment, the process of the present invention for producing saccharic acid in a non-human organism, like a microorganism or a plant or a part thereof, comprises increasing or generating the activity of a gene product with the activity of a gene product conferring the activity of “MADS-box transcription factor”, especially from Arabidopsis thaliana or its functional equivalent or its homolog, e.g. the increase of
[89365] (a) a gene product of a gene comprising the nucleic acid molecule as shown in the respective line in column 5 of Table I (whereby the respective line disclose in column 7 the fine chemical saccharic acid), application no. 17, preferably the coding region thereof, or a homolog or a fragment thereof, and being depicted in the same respective line as said At5g60440, or a functional equivalent or a homolog thereof as shown in column 8 of Table I, application no. 17, preferably the coding region thereof, particularly a homolog or functional equivalent as shown in column 8 of Table I B, application no. 17, and being depicted in the same respective line as said At5g60440, and preferably the activity is increased non-targeted, or
[89366] (b) a polypeptide comprising a polypeptide, a consensus sequence or at least a polypeptide motif as shown in the respective line in column 5 of Table II or in column 8 of Table IV, application no. 17, respectively, and being depicted in the same respective line as said At5g60440, or a functional equivalent or a homolog thereof as depicted in column 8 of Table II, application no. 17, preferably a homolog or functional equivalent as depicted in column 8 of Table II B, application no. 17, and being depicted in the same respective line as said At5g60440, and preferably the activity is increased non-targeted, whereby the respective line disclose in column 7 the fine chemical saccharic acid.

[89367] Accordingly, in one embodiment, the molecule which activity is to be increased in the process of the invention is the gene product with an activity as a “MADS-box transcription factor”, preferably it is the molecule of section (a) or (b) of this paragraph.

[89368] In particular, it was observed that in plants, especially in Arabidopsis thaliana, increasing or generating the activity of a gene product non-targeted with the activity of a “MADS-box transcription factor”, preferably being encoded by a gene comprising the nucleic acid sequence SEQ ID NO. 102899, preferably the coding region thereof, conferred the production of or the increase in saccharic acid compared with the wild type control.

[89369] The nucleic acid sequence of At5g66710 from Arabidopsis thaliana, e.g. as shown in the respective line in column 5 of Table I, application no. 17, has been published in F. And the activity of the gene product thereof is the activity of protein kinase.

[89370] Accordingly, in one embodiment, the process of the present invention for producing glucose-1-phosphate in a non-human organism, like a microorganism or a plant or a part thereof, comprises increasing or generating the activity of a gene product with the activity of a gene product conferring the activity of “protein kinase”, especially from Arabidopsis thaliana or its functional equivalent or its homolog, e.g. the increase of
[89371] (a) a gene product of a gene comprising the nucleic acid molecule as shown in the respective line in column 5 of Table I (whereby the respective line disclose in column 7 the fine chemical glucose-1-phosphate), application no. 17, preferably the coding region thereof, or a homolog or a fragment thereof, and being depicted in the same respective line as said At5g66710, or a functional equivalent or a homolog thereof as shown in column 8 of Table I, application no. 17, preferably the coding region thereof, particularly a homolog or functional equivalent as shown in column 8 of Table I B, application no. 17, and being depicted in the same respective line as said At5g66710, and preferably the activity is increased non-targeted, or
[89372] (b) a polypeptide comprising a polypeptide, a consensus sequence or at least a polypeptide motif as shown in the respective line in column 5 of Table II or in column 8 of Table IV, application no. 17, respectively, and being depicted in the same respective line as said At5g66710, or a functional equivalent or a homolog thereof as depicted in column 8 of Table II, application no. 17, preferably a homolog or functional equivalent as depicted in column 8 of Table II B, application no. 17, and being depicted in the same respective line as said At5g66710, and preferably the activity is increased non-targeted, whereby the respective line disclose in column 7 the fine chemical glucose-1-phosphate.

[89373] Accordingly, in one embodiment, the molecule which activity is to be increased in the process of the invention is the gene product with an activity as a “protein kinase”, preferably it is the molecule of section (a) or (b) of this paragraph.

[89374] In particular, it was observed that in plants, especially in Arabidopsis thaliana, increasing or generating the activity of a gene product non-targeted with the activity of a “protein kinase”, preferably being encoded by a gene comprising the nucleic acid sequence SEQ ID NO. 122803, preferably the coding region thereof, conferred the production of or the increase in glucose-1-phosphate compared with the wild type control.

[89375] The nucleic acid sequence of AvinDRAFT_{—}1534 from Azotobacter vinelandii, e.g. as shown in the respective line in column 5 of Table I, application no. 17, has been published in D. And the activity of the gene product thereof is the activity of glycosyl transferase.

[89376] Accordingly, in one embodiment, the process of the present invention for producing raffinose in a non-human organism, like a microorganism or a plant or a part thereof, comprises increasing or generating the activity of a gene product with the activity of a gene product conferring the activity of “glycosyl transferase”, especially from Azotobacter vinelandii or its functional equivalent or its homolog, e.g. the increase of
[89377] (a) a gene product of a gene comprising the nucleic acid molecule as shown in the respective line in column 5 of Table I (whereby the respective line disclose in column 7 the fine chemical raffinose), application no. 17, preferably the coding region thereof, or a homolog or a fragment thereof, and being depicted in the same respective line as said AvinDRAFT_{—}1534, or a functional equivalent or a homolog thereof as shown in column 8 of Table I, application no. 17, preferably the coding region thereof, particularly a homolog or functional equivalent as shown in column 8 of Table I B, application no. 17, and being depicted in the same respective line as said AvinDRAFT_{—}1534, and preferably the activity is increased non-targeted, or
[89378] (b) a polypeptide comprising a polypeptide, a consensus sequence or at least a polypeptide motif as shown in the respective line in column 5 of Table II or in column 8 of Table IV, application no. 17, respectively, and being depicted in the same respective line as said AvinDRAFT_{—}1534, or a functional equivalent or a homolog thereof as depicted in column 8 of Table II, application no. 17, preferably a homolog or functional equivalent as depicted in column 8 of Table II B, application no. 17, and being depicted in the same respective line as said AvinDRAFT_{—}1534, and preferably the activity is increased non-targeted, whereby the respective line disclose in column 7 the fine chemical raffinose.

[89379] Accordingly, in one embodiment, the molecule which activity is to be increased in the process of the invention is the gene product with an activity as a “glycosyl transferase”, preferably it is the molecule of section (a) or (b) of this paragraph.

[89380] In particular, it was observed that in plants, especially in Arabidopsis thaliana, increasing or generating the activity of a gene product non-targeted with the activity of a “glycosyl transferase”, preferably being encoded by a gene comprising the nucleic acid sequence SEQ ID NO. 26120, preferably the coding region thereof, conferred the production of or the increase in raffinose compared with the wild type control.

[89381] The nucleic acid sequence of AvinDRAFT_{—}1624 from Azotobacter vinelandii, e.g. as shown in the respective line in column 5 of Table I, application no. 17, has been published in D. And the activity of the gene product thereof is the activity of sec-independent protein translocase.

[89382] Accordingly, in one embodiment, the process of the present invention for producing sucrose in a non-human organism, like a microorganism or a plant or a part thereof, comprises increasing or generating the activity of a gene product with the activity of a gene product conferring the activity of “sec-independent protein translocase”, especially from Azotobacter vinelandii or its functional equivalent or its homolog, e.g. the increase of
[89383] (a) a gene product of a gene comprising the nucleic acid molecule as shown in the respective line in column 5 of Table I (whereby the respective line disclose in column 7 the fine chemical sucrose), application no. 17, preferably the coding region thereof, or a homolog or a fragment thereof, and being depicted in the same respective line as said AvinDRAFT_{—}1624, or a functional equivalent or a homolog thereof as shown in column 8 of Table I, application no. 17, preferably the coding region thereof, particularly a homolog or functional equivalent as shown in column 8 of Table I B, application no. 17, and being depicted in the same respective line as said AvinDRAFT_{—}1624, and preferably the activity is increased non-targeted, or
[89384] (b) a polypeptide comprising a polypeptide, a consensus sequence or at least a polypeptide motif as shown in the respective line in column 5 of Table II or in column 8 of Table IV, application no. 17, respectively, and being depicted in the same respective line as said AvinDRAFT_{—}1624, or a functional equivalent or a homolog thereof as depicted in column 8 of Table II, application no. 17, preferably a homolog or functional equivalent as depicted in column 8 of Table II B, application no. 17, and being depicted in the same respective line as said AvinDRAFT_{—}1624, and preferably the activity is increased non-targeted, whereby the respective line disclose in column 7 the fine chemical sucrose.

[89385] Accordingly, in one embodiment, the molecule which activity is to be increased in the process of the invention is the gene product with an activity as a “sec-independent protein translocase”, preferably it is the molecule of section (a) or (b) of this paragraph.

[89386] In particular, it was observed that in plants, especially in Arabidopsis thaliana, increasing or generating the activity of a gene product non-targeted with the activity of a “sec-independent protein translocase”, preferably being encoded by a gene comprising the nucleic acid sequence SEQ ID NO. 26196, preferably the coding region thereof, conferred the production of or the increase in sucrose compared with the wild type control.

[89387] The nucleic acid sequence of AvinDRAFT_{—}2091 from Azotobacter vinelandii, e.g. as shown in the respective line in column 5 of Table I, application no. 17, has been published in D. And the activity of the gene product thereof is the activity of beta-hydroxylase.

[89388] Accordingly, in one embodiment, the process of the present invention for producing 3,4,5-trihydroxypentanoic acid in a non-human organism, like a microorganism or a plant or a part thereof, comprises increasing or generating the activity of a gene product with the activity of a gene product conferring the activity of “beta-hydroxylase”, especially from Azotobacter vinelandii or its functional equivalent or its homolog, e.g. the increase of
[89389] (a) a gene product of a gene comprising the nucleic acid molecule as shown in the respective line in column 5 of Table I (whereby the respective line disclose in column 7 the fine chemical 3,4,5-trihydroxypentanoic acid), application no. 17, preferably the coding region thereof, or a homolog or a fragment thereof, and being depicted in the same respective line as said AvinDRAFT_{—}2091, or a functional equivalent or a homolog thereof as shown in column 8 of Table I, application no. 17, preferably the coding region thereof, particularly a homolog or functional equivalent as shown in column 8 of Table I B, application no. 17, and being depicted in the same respective line as said AvinDRAFT_{—}2091, and preferably the activity is increased non-targeted, or
[89390] (b) a polypeptide comprising a polypeptide, a consensus sequence or at least a polypeptide motif as shown in the respective line in column 5 of Table II or in column 8 of Table IV, application no. 17, respectively, and being depicted in the same respective line as said AvinDRAFT_{—}2091, or a functional equivalent or a homolog thereof as depicted in column 8 of Table II, application no. 17, preferably a homolog or functional equivalent as depicted in column 8 of Table II B, application no. 17, and being depicted in the same respective line as said AvinDRAFT_{—}2091, and preferably the activity is increased non-targeted, whereby the respective line disclose in column 7 the fine chemical 3,4,5-trihydroxypentanoic acid.

[89391] Accordingly, in one embodiment, the molecule which activity is to be increased in the process of the invention is the gene product with an activity as a “beta-hydroxylase”, preferably it is the molecule of section (a) or (b) of this paragraph.

[89392] In particular, it was observed that in plants, especially in Arabidopsis thaliana, increasing or generating the activity of a gene product non-targeted with the activity of a “beta-hydroxylase”, preferably being encoded by a gene comprising the nucleic acid sequence SEQ ID NO. 6040, preferably the coding region thereof, conferred the production of or the increase in 3,4,5-trihydroxypentanoic acid compared with the wild type control.

[89393] The nucleic acid sequence of AvinDRAFT_{—}2344 from Azotobacter vinelandii, e.g. as shown in the respective line in column 5 of Table I, application no. 17, has been published in D. And the activity of the gene product thereof is the activity of elongation factor Tu.

[89394] Accordingly, in one embodiment, the process of the present invention for producing fructose in a non-human organism, like a microorganism or a plant or a part thereof, comprises increasing or generating the activity of a gene product with the activity of a gene product conferring the activity of “elongation factor Tu”, especially from Azotobacter vinelandii or its functional equivalent or its homolog, e.g. the increase of
[89395] (a) a gene product of a gene comprising the nucleic acid molecule as shown in the respective line in column 5 of Table I (whereby the respective line disclose in column 7 the fine chemical fructose), application no. 17, preferably the coding region thereof, or a homolog or a fragment thereof, and being depicted in the same respective line as said AvinDRAFT_{—}2344, or a functional equivalent or a homolog thereof as shown in column 8 of Table I, application no. 17, preferably the coding region thereof, particularly a homolog or functional equivalent as shown in column 8 of Table I B, application no. 17, and being depicted in the same respective line as said AvinDRAFT_{—}2344, and preferably the activity is increased non-targeted, or
[89396] (b) a polypeptide comprising a polypeptide, a consensus sequence or at least a polypeptide motif as shown in the respective line in column 5 of Table II or in column 8 of Table IV, application no. 17, respectively, and being depicted in the same respective line as said AvinDRAFT_{—}2344, or a functional equivalent or a homolog thereof as depicted in column 8 of Table II, application no. 17, preferably a homolog or functional equivalent as depicted in column 8 of Table II B, application no. 17, and being depicted in the same respective line as said AvinDRAFT_{—}2344, and preferably the activity is increased non-targeted, whereby the respective line disclose in column 7 the fine chemical fructose.

[89397] Accordingly, in one embodiment, the molecule which activity is to be increased in the process of the invention is the gene product with an activity as a “elongation factor Tu”, preferably it is the molecule of section (a) or (b) of this paragraph.

[89398] In particular, it was observed that in plants, especially in Arabidopsis thaliana, increasing or generating the activity of a gene product non-targeted with the activity of a “elongation factor Tu”, preferably being encoded by a gene comprising the nucleic acid sequence SEQ ID NO. 27021, preferably the coding region thereof, conferred the production of or the increase in fructose compared with the wild type control.

[89399] The nucleic acid sequence of AvinDRAFT_{—}2344 from Azotobacter vinelandii, e.g. as shown in the respective line in column 5 of Table I, application no. 17, has been published in D. And the activity of the gene product thereof is the activity of elongation factor Tu.

[89400] Accordingly, in one embodiment, the process of the present invention for producing glucose in a non-human organism, like a microorganism or a plant or a part thereof, comprises increasing or generating the activity of a gene product with the activity of a gene product conferring the activity of “elongation factor Tu”, especially from Azotobacter vinelandii or its functional equivalent or its homolog, e.g. the increase of
[89401] (a) a gene product of a gene comprising the nucleic acid molecule as shown in the respective line in column 5 of Table I (whereby the respective line disclose in column 7 the fine chemical glucose), application no. 17, preferably the coding region thereof, or a homolog or a fragment thereof, and being depicted in the same respective line as said AvinDRAFT_{—}2344, or a functional equivalent or a homolog thereof as shown in column 8 of Table I, application no. 17, preferably the coding region thereof, particularly a homolog or functional equivalent as shown in column 8 of Table I B, application no. 17, and being depicted in the same respective line as said AvinDRAFT_{—}2344, and preferably the activity is increased non-targeted, or
[89402] (b) a polypeptide comprising a polypeptide, a consensus sequence or at least a polypeptide motif as shown in the respective line in column 5 of Table II or in column 8 of Table IV, application no. 17, respectively, and being depicted in the same respective line as said AvinDRAFT_{—}2344, or a functional equivalent or a homolog thereof as depicted in column 8 of Table II, application no. 17, preferably a homolog or functional equivalent as depicted in column 8 of Table II B, application no. 17, and being depicted in the same respective line as said AvinDRAFT_{—}2344, and preferably the activity is increased non-targeted, whereby the respective line disclose in column 7 the fine chemical glucose.

[89403] Accordingly, in one embodiment, the molecule which activity is to be increased in the process of the invention is the gene product with an activity as a “elongation factor Tu”, preferably it is the molecule of section (a) or (b) of this paragraph.

[89404] In particular, it was observed that in plants, especially in Arabidopsis thaliana, increasing or generating the activity of a gene product non-targeted with the activity of a “elongation factor Tu”, preferably being encoded by a gene comprising the nucleic acid sequence SEQ ID NO. 27021, preferably the coding region thereof, conferred the production of or the increase in glucose compared with the wild type control.

[89405] The nucleic acid sequence of AvinDRAFT_{—}2521 from Azotobacter vinelandii, e.g. as shown in the respective line in column 5 of Table I, application no. 17, has been published in D. And the activity of the gene product thereof is the activity of ABC transporter permease protein.

[89406] Accordingly, in one embodiment, the process of the present invention for producing fructose in a non-human organism, like a microorganism or a plant or a part thereof, comprises increasing or generating the activity of a gene product with the activity of a gene product conferring the activity of “ABC transporter permease protein”, especially from Azotobacter vinelandii or its functional equivalent or its homolog, e.g. the increase of
[89407] (a) a gene product of a gene comprising the nucleic acid molecule as shown in the respective line in column 5 of Table I (whereby the respective line disclose in column 7 the fine chemical fructose), application no. 17, preferably the coding region thereof, or a homolog or a fragment thereof, and being depicted in the same respective line as said AvinDRAFT_{—}2521, or a functional equivalent or a homolog thereof as shown in column 8 of Table I, application no. 17, preferably the coding region thereof, particularly a homolog or functional equivalent as shown in column 8 of Table I B, application no. 17, and being depicted in the same respective line as said AvinDRAFT_{—}2521, and preferably the activity is increased non-targeted, or
[89408] (b) a polypeptide comprising a polypeptide, a consensus sequence or at least a polypeptide motif as shown in the respective line in column 5 of Table II or in column 8 of Table IV, application no. 17, respectively, and being depicted in the same respective line as said AvinDRAFT_{—}2521, or a functional equivalent or a homolog thereof as depicted in column 8 of Table II, application no. 17, preferably a homolog or functional equivalent as depicted in column 8 of Table II B, application no. 17, and being depicted in the same respective line as said AvinDRAFT_{—}2521, and preferably the activity is increased non-targeted, whereby the respective line disclose in column 7 the fine chemical fructose.

[89409] Accordingly, in one embodiment, the molecule which activity is to be increased in the process of the invention is the gene product with an activity as a “ABC transporter permease protein”, preferably it is the molecule of section (a) or (b) of this paragraph.

[89410] In particular, it was observed that in plants, especially in Arabidopsis thaliana, increasing or generating the activity of a gene product non-targeted with the activity of a “ABC transporter permease protein”, preferably being encoded by a gene comprising the nucleic acid sequence SEQ ID NO. 27882, preferably the coding region thereof, conferred the production of or the increase in fructose compared with the wild type control.

[89411] The nucleic acid sequence of AvinDRAFT_{—}2521 from Azotobacter vinelandii, e.g. as shown in the respective line in column 5 of Table I, application no. 17, has been published in D. And the activity of the gene product thereof is the activity of ABC transporter permease protein.

[89412] Accordingly, in one embodiment, the process of the present invention for producing sucrose in a non-human organism, like a microorganism or a plant or a part thereof, comprises increasing or generating the activity of a gene product with the activity of a gene product conferring the activity of “ABC transporter permease protein”, especially from Azotobacter vinelandii or its functional equivalent or its homolog, e.g. the increase of
[89413] (a) a gene product of a gene comprising the nucleic acid molecule as shown in the respective line in column 5 of Table I (whereby the respective line disclose in column 7 the fine chemical sucrose), application no. 17, preferably the coding region thereof, or a homolog or a fragment thereof, and being depicted in the same respective line as said AvinDRAFT_{—}2521, or a functional equivalent or a homolog thereof as shown in column 8 of Table I, application no. 17, preferably the coding region thereof, particularly a homolog or functional equivalent as shown in column 8 of Table I B, application no. 17, and being depicted in the same respective line as said AvinDRAFT_{—}2521, and preferably the activity is increased non-targeted, or
[89414] (b) a polypeptide comprising a polypeptide, a consensus sequence or at least a polypeptide motif as shown in the respective line in column 5 of Table II or in column 8 of Table IV, application no. 17, respectively, and being depicted in the same respective line as said AvinDRAFT_{—}2521, or a functional equivalent or a homolog thereof as depicted in column 8 of Table II, application no. 17, preferably a homolog or functional equivalent as depicted in column 8 of Table II B, application no. 17, and being depicted in the same respective line as said AvinDRAFT_{—}2521, and preferably the activity is increased non-targeted, whereby the respective line disclose in column 7 the fine chemical sucrose.

[89415] Accordingly, in one embodiment, the molecule which activity is to be increased in the process of the invention is the gene product with an activity as a “ABC transporter permease protein”, preferably it is the molecule of section (a) or (b) of this paragraph.

[89416] In particular, it was observed that in plants, especially in Arabidopsis thaliana, increasing or generating the activity of a gene product non-targeted with the activity of a “ABC transporter permease protein”, preferably being encoded by a gene comprising the nucleic acid sequence SEQ ID NO. 27882, preferably the coding region thereof, conferred the production of or the increase in sucrose compared with the wild type control.

[89417] The nucleic acid sequence of AvinDRAFT_{—}2754 from Azotobacter vinelandii, e.g. as shown in the respective line in column 5 of Table I, application no. 17, has been published in D. And the activity of the gene product thereof is the activity of acyl-CoA synthase.

[89418] Accordingly, in one embodiment, the process of the present invention for producing glucose-1-phosphate in a non-human organism, like a microorganism or a plant or a part thereof, comprises increasing or generating the activity of a gene product with the activity of a gene product conferring the activity of “acyl-CoA synthase”, especially from Azotobacter vinelandii or its functional equivalent or its homolog, e.g. the increase of
[89419] (a) a gene product of a gene comprising the nucleic acid molecule as shown in the respective line in column 5 of Table I (whereby the respective line disclose in column 7 the fine chemical glucose-1-phosphate), application no. 17, preferably the coding region thereof, or a homolog or a fragment thereof, and being depicted in the same respective line as said AvinDRAFT_{—}2754, or a functional equivalent or a homolog thereof as shown in column 8 of Table I, application no. 17, preferably the coding region thereof, particularly a homolog or functional equivalent as shown in column 8 of Table I B, application no. 17, and being depicted in the same respective line as said AvinDRAFT_{—}2754, and preferably the activity is increased non-targeted, or
[89420] (b) a polypeptide comprising a polypeptide, a consensus sequence or at least a polypeptide motif as shown in the respective line in column 5 of Table II or in column 8 of Table IV, application no. 17, respectively, and being depicted in the same respective line as said AvinDRAFT_{—}2754, or a functional equivalent or a homolog thereof as depicted in column 8 of Table II, application no. 17, preferably a homolog or functional equivalent as depicted in column 8 of Table II B, application no. 17, and being depicted in the same respective line as said AvinDRAFT_{—}2754, and preferably the activity is increased non-targeted, whereby the respective line disclose in column 7 the fine chemical glucose-1-phosphate.

[89421] Accordingly, in one embodiment, the molecule which activity is to be increased in the process of the invention is the gene product with an activity as a “acyl-CoA synthase”, preferably it is the molecule of section (a) or (b) of this paragraph.

[89422] In particular, it was observed that in plants, especially in Arabidopsis thaliana, increasing or generating the activity of a gene product non-targeted with the activity of a “acyl-CoA synthase”, preferably being encoded by a gene comprising the nucleic acid sequence SEQ ID NO. 28040, preferably the coding region thereof, conferred the production of or the increase in glucose-1-phosphate compared with the wild type control.

[89423] The nucleic acid sequence of AvinDRAFT_{—}3028 from Azotobacter vinelandii, e.g. as shown in the respective line in column 5 of Table I, application no. 17, has been published in D. And the activity of the gene product thereof is the activity of 2-oxoglutarate dehydrogenase E1 subunit.

[89424] Accordingly, in one embodiment, the process of the present invention for producing glucose in a non-human organism, like a microorganism or a plant or a part thereof, comprises increasing or generating the activity of a gene product with the activity of a gene product conferring the activity of “2-oxoglutarate dehydrogenase E1 subunit”, especially from Azotobacter vinelandii or its functional equivalent or its homolog, e.g. the increase of
[89425] (a) a gene product of a gene comprising the nucleic acid molecule as shown in the respective line in column 5 of Table I (whereby the respective line disclose in column 7 the fine chemical glucose), application no. 17, preferably the coding region thereof, or a homolog or a fragment thereof, and being depicted in the same respective line as said AvinDRAFT_{—}3028, or a functional equivalent or a homolog thereof as shown in column 8 of Table I, application no. 17, preferably the coding region thereof, particularly a homolog or functional equivalent as shown in column 8 of Table I B, application no. 17, and being depicted in the same respective line as said AvinDRAFT_{—}3028, and preferably the activity is increased non-targeted, or
[89426] (b) a polypeptide comprising a polypeptide, a consensus sequence or at least a polypeptide motif as shown in the respective line in column 5 of Table II or in column 8 of Table IV, application no. 17, respectively, and being depicted in the same respective line as said AvinDRAFT_{—}3028, or a functional equivalent or a homolog thereof as depicted in column 8 of Table II, application no. 17, preferably a homolog or functional equivalent as depicted in column 8 of Table II B, application no. 17, and being depicted in the same respective line as said AvinDRAFT_{—}3028, and preferably the activity is increased non-targeted, whereby the respective line disclose in column 7 the fine chemical glucose.

[89427] Accordingly, in one embodiment, the molecule which activity is to be increased in the process of the invention is the gene product with an activity as a “2-oxoglutarate dehydrogenase E1 subunit”, preferably it is the molecule of section (a) or (b) of this paragraph.

[89428] In particular, it was observed that in plants, especially in Arabidopsis thaliana, increasing or generating the activity of a gene product non-targeted with the activity of a “2-oxoglutarate dehydrogenase E1 subunit”, preferably being encoded by a gene comprising the nucleic acid sequence SEQ ID NO. 6075, preferably the coding region thereof, conferred the production of or the increase in glucose compared with the wild type control.

[89429] The nucleic acid sequence of AvinDRAFT_{—}3028 from Azotobacter vinelandii, e.g. as shown in the respective line in column 5 of Table I, application no. 17, has been published in D. And the activity of the gene product thereof is the activity of 2-oxoglutarate dehydrogenase E1 subunit.

[89430] Accordingly, in one embodiment, the process of the present invention for producing glucose-1-phosphate in a non-human organism, like a microorganism or a plant or a part thereof, comprises increasing or generating the activity of a gene product with the activity of a gene product conferring the activity of “2-oxoglutarate dehydrogenase E1 subunit”, especially from Azotobacter vinelandii or its functional equivalent or its homolog, e.g. the increase of
[89431] (a) a gene product of a gene comprising the nucleic acid molecule as shown in the respective line in column 5 of Table I (whereby the respective line disclose in column 7 the fine chemical glucose-1-phosphate), application no. 17, preferably the coding region thereof, or a homolog or a fragment thereof, and being depicted in the same respective line as said AvinDRAFT_{—}3028, or a functional equivalent or a homolog thereof as shown in column 8 of Table I, application no. 17, preferably the coding region thereof, particularly a homolog or functional equivalent as shown in column 8 of Table I B, application no. 17, and being depicted in the same respective line as said AvinDRAFT_{—}3028, and preferably the activity is increased non-targeted, or
[89432] (b) a polypeptide comprising a polypeptide, a consensus sequence or at least a polypeptide motif as shown in the respective line in column 5 of Table II or in column 8 of Table IV, application no. 17, respectively, and being depicted in the same respective line as said AvinDRAFT_{—}3028, or a functional equivalent or a homolog thereof as depicted in column 8 of Table II, application no. 17, preferably a homolog or functional equivalent as depicted in column 8 of Table II B, application no. 17, and being depicted in the same respective line as said AvinDRAFT_{—}3028, and preferably the activity is increased non-targeted, whereby the respective line disclose in column 7 the fine chemical glucose-1-phosphate.

[89433] Accordingly, in one embodiment, the molecule which activity is to be increased in the process of the invention is the gene product with an activity as a “2-oxoglutarate dehydrogenase E1 subunit”, preferably it is the molecule of section (a) or (b) of this paragraph.

[89434] In particular, it was observed that in plants, especially in Arabidopsis thaliana, increasing or generating the activity of a gene product non-targeted with the activity of a “2-oxoglutarate dehydrogenase E1 subunit”, preferably being encoded by a gene comprising the nucleic acid sequence SEQ ID NO. 6075, preferably the coding region thereof, conferred the production of or the increase in glucose-1-phosphate compared with the wild type control.

[89435] The nucleic acid sequence of AvinDRAFT_{—}3028 from Azotobacter vinelandii, e.g. as shown in the respective line in column 5 of Table I, application no. 17, has been published in D. And the activity of the gene product thereof is the activity of 2-oxoglutarate dehydrogenase E1 subunit.

[89436] Accordingly, in one embodiment, the process of the present invention for producing myo-inositol in a non-human organism, like a microorganism or a plant or a part thereof, comprises increasing or generating the activity of a gene product with the activity of a gene product conferring the activity of “2-oxoglutarate dehydrogenase E1 subunit”, especially from Azotobacter vinelandii or its functional equivalent or its homolog, e.g. the increase of
[89437] (a) a gene product of a gene comprising the nucleic acid molecule as shown in the respective line in column 5 of Table I (whereby the respective line disclose in column 7 the fine chemical myo-inositol), application no. 17, preferably the coding region thereof, or a homolog or a fragment thereof, and being depicted in the same respective line as said AvinDRAFT_{—}3028, or a functional equivalent or a homolog thereof as shown in column 8 of Table I, application no. 17, preferably the coding region thereof, particularly a homolog or functional equivalent as shown in column 8 of Table I B, application no. 17, and being depicted in the same respective line as said AvinDRAFT_{—}3028, and preferably the activity is increased non-targeted, or
[89438] (b) a polypeptide comprising a polypeptide, a consensus sequence or at least a polypeptide motif as shown in the respective line in column 5 of Table II or in column 8 of Table IV, application no. 17, respectively, and being depicted in the same respective line as said AvinDRAFT_{—}3028, or a functional equivalent or a homolog thereof as depicted in column 8 of Table II, application no. 17, preferably a homolog or functional equivalent as depicted in column 8 of Table II B, application no. 17, and being depicted in the same respective line as said AvinDRAFT_{—}3028, and preferably the activity is increased non-targeted, whereby the respective line disclose in column 7 the fine chemical myo-inositol.

[89439] Accordingly, in one embodiment, the molecule which activity is to be increased in the process of the invention is the gene product with an activity as a “2-oxoglutarate dehydrogenase E1 subunit”, preferably it is the molecule of section (a) or (b) of this paragraph.

[89440] In particular, it was observed that in plants, especially in Arabidopsis thaliana, increasing or generating the activity of a gene product non-targeted with the activity of a “2-oxoglutarate dehydrogenase E1 subunit”, preferably being encoded by a gene comprising the nucleic acid sequence SEQ ID NO. 6075, preferably the coding region thereof, conferred the production of or the increase in myo-inositol compared with the wild type control.

[89441] The nucleic acid sequence of AvinDRAFT_{—}3028 from Azotobacter vinelandii, e.g. as shown in the respective line in column 5 of Table I, application no. 17, has been published in D. And the activity of the gene product thereof is the activity of 2-oxoglutarate dehydrogenase E1 subunit.

[89442] Accordingly, in one embodiment, the process of the present invention for producing raffinose in a non-human organism, like a microorganism or a plant or a part thereof, comprises increasing or generating the activity of a gene product with the activity of a gene product conferring the activity of “2-oxoglutarate dehydrogenase E1 subunit”, especially from Azotobacter vinelandii or its functional equivalent or its homolog, e.g. the increase of
[89443] (a) a gene product of a gene comprising the nucleic acid molecule as shown in the respective line in column 5 of Table I (whereby the respective line disclose in column 7 the fine chemical raffinose), application no. 17, preferably the coding region thereof, or a homolog or a fragment thereof, and being depicted in the same respective line as said AvinDRAFT_{—}3028, or a functional equivalent or a homolog thereof as shown in column 8 of Table I, application no. 17, preferably the coding region thereof, particularly a homolog or functional equivalent as shown in column 8 of Table I B, application no. 17, and being depicted in the same respective line as said AvinDRAFT_{—}3028, and preferably the activity is increased non-targeted, or
[89444] (b) a polypeptide comprising a polypeptide, a consensus sequence or at least a polypeptide motif as shown in the respective line in column 5 of Table II or in column 8 of Table IV, application no. 17, respectively, and being depicted in the same respective line as said AvinDRAFT_{—}3028, or a functional equivalent or a homolog thereof as depicted in column 8 of Table II, application no. 17, preferably a homolog or functional equivalent as depicted in column 8 of Table II B, application no. 17, and being depicted in the same respective line as said AvinDRAFT_{—}3028, and preferably the activity is increased non-targeted, whereby the respective line disclose in column 7 the fine chemical raffinose.

[89445] Accordingly, in one embodiment, the molecule which activity is to be increased in the process of the invention is the gene product with an activity as a “2-oxoglutarate dehydrogenase E1 subunit”, preferably it is the molecule of section (a) or (b) of this paragraph.

[89446] In particular, it was observed that in plants, especially in Arabidopsis thaliana, increasing or generating the activity of a gene product non-targeted with the activity of a “2-oxoglutarate dehydrogenase E1 subunit”, preferably being encoded by a gene comprising the nucleic acid sequence SEQ ID NO. 6075, preferably the coding region thereof, conferred the production of or the increase in raffinose compared with the wild type control.

[89447] The nucleic acid sequence of AvinDRAFT_{—}3028 from Azotobacter vinelandii, e.g. as shown in the respective line in column 5 of Table I, application no. 17, has been published in D. And the activity of the gene product thereof is the activity of 2-oxoglutarate dehydrogenase E1 subunit.

[89448] Accordingly, in one embodiment, the process of the present invention for producing sedoheptulose-7-phosphate in a non-human organism, like a microorganism or a plant or a part thereof, comprises increasing or generating the activity of a gene product with the activity of a gene product conferring the activity of “2-oxoglutarate dehydrogenase E1 subunit”, especially from Azotobacter vinelandii or its functional equivalent or its homolog, e.g. the increase of
[89449] (a) a gene product of a gene comprising the nucleic acid molecule as shown in the respective line in column 5 of Table I (whereby the respective line disclose in column 7 the fine chemical sedoheptulose-7-phosphate), application no. 17, preferably the coding region thereof, or a homolog or a fragment thereof, and being depicted in the same respective line as said AvinDRAFT_{—}3028, or a functional equivalent or a homolog thereof as shown in column 8 of Table I, application no. 17, preferably the coding region thereof, particularly a homolog or functional equivalent as shown in column 8 of Table I B, application no. 17, and being depicted in the same respective line as said AvinDRAFT_{—}3028, and preferably the activity is increased non-targeted, or
[89450] (b) a polypeptide comprising a polypeptide, a consensus sequence or at least a polypeptide motif as shown in the respective line in column 5 of Table II or in column 8 of Table IV, application no. 17, respectively, and being depicted in the same respective line as said AvinDRAFT_{—}3028, or a functional equivalent or a homolog thereof as depicted in column 8 of Table II, application no. 17, preferably a homolog or functional equivalent as depicted in column 8 of Table II B, application no. 17, and being depicted in the same respective line as said AvinDRAFT_{—}3028, and preferably the activity is increased non-targeted, whereby the respective line disclose in column 7 the fine chemical sedoheptulose-7-phosphate.

[89451] Accordingly, in one embodiment, the molecule which activity is to be increased in the process of the invention is the gene product with an activity as a “2-oxoglutarate dehydrogenase E1 subunit”, preferably it is the molecule of section (a) or (b) of this paragraph.

[89452] In particular, it was observed that in plants, especially in Arabidopsis thaliana, increasing or generating the activity of a gene product non-targeted with the activity of a “2-oxoglutarate dehydrogenase E1 subunit”, preferably being encoded by a gene comprising the nucleic acid sequence SEQ ID NO. 6075, preferably the coding region thereof, conferred the production of or the increase in sedoheptulose-7-phosphate compared with the wild type control.

[89453] The nucleic acid sequence of AvinDRAFT_{—}3135 from Azotobacter vinelandii, e.g. as shown in the respective line in column 5 of Table I, application no. 17, has been published in D. And the activity of the gene product thereof is the activity of GDP-mannose dehydrogenase.

[89454] Accordingly, in one embodiment, the process of the present invention for producing raffinose in a non-human organism, like a microorganism or a plant or a part thereof, comprises increasing or generating the activity of a gene product with the activity of a gene product conferring the activity of “GDP-mannose dehydrogenase”, especially from Azotobacter vinelandii or its functional equivalent or its homolog, e.g. the increase of
[89455] (a) a gene product of a gene comprising the nucleic acid molecule as shown in the respective line in column 5 of Table I (whereby the respective line disclose in column 7 the fine chemical raffinose), application no. 17, preferably the coding region thereof, or a homolog or a fragment thereof, and being depicted in the same respective line as said AvinDRAFT_{—}3135, or a functional equivalent or a homolog thereof as shown in column 8 of Table I, application no. 17, preferably the coding region thereof, particularly a homolog or functional equivalent as shown in column 8 of Table I B, application no. 17, and being depicted in the same respective line as said AvinDRAFT_{—}3135, and preferably the activity is increased non-targeted, or
[89456] (b) a polypeptide comprising a polypeptide, a consensus sequence or at least a polypeptide motif as shown in the respective line in column 5 of Table II or in column 8 of Table IV, application no. 17, respectively, and being depicted in the same respective line as said AvinDRAFT_{—}3135, or a functional equivalent or a homolog thereof as depicted in column 8 of Table II, application no. 17, preferably a homolog or functional equivalent as depicted in column 8 of Table II B, application no. 17, and being depicted in the same respective line as said AvinDRAFT_{—}3135, and preferably the activity is increased non-targeted, whereby the respective line disclose in column 7 the fine chemical raffinose.

[89457] Accordingly, in one embodiment, the molecule which activity is to be increased in the process of the invention is the gene product with an activity as a “GDP-mannose dehydrogenase”, preferably it is the molecule of section (a) or (b) of this paragraph.

[89458] In particular, it was observed that in plants, especially in Arabidopsis thaliana, increasing or generating the activity of a gene product non-targeted with the activity of a “GDP-mannose dehydrogenase”, preferably being encoded by a gene comprising the nucleic acid sequence SEQ ID NO. 72346, preferably the coding region thereof, conferred the production of or the increase in raffinose compared with the wild type control.

[89459] The nucleic acid sequence of AvinDRAFT_{—}3209 from Azotobacter vinelandii, e.g. as shown in the respective line in column 5 of Table I, application no. 17, has been published in D. And the activity of the gene product thereof is the activity of transcriptional regulator.

[89460] Accordingly, in one embodiment, the process of the present invention for producing fructose in a non-human organism, like a microorganism or a plant or a part thereof, comprises increasing or generating the activity of a gene product with the activity of a gene product conferring the activity of “transcriptional regulator”, especially from Azotobacter vinelandii or its functional equivalent or its homolog, e.g. the increase of
[89461] (a) a gene product of a gene comprising the nucleic acid molecule as shown in the respective line in column 5 of Table I (whereby the respective line disclose in column 7 the fine chemical fructose), application no. 17, preferably the coding region thereof, or a homolog or a fragment thereof, and being depicted in the same respective line as said AvinDRAFT_{—}3209, or a functional equivalent or a homolog thereof as shown in column 8 of Table I, application no. 17, preferably the coding region thereof, particularly a homolog or functional equivalent as shown in column 8 of Table I B, application no. 17, and being depicted in the same respective line as said AvinDRAFT_{—}3209, and preferably the activity is increased non-targeted, or
[89462] (b) a polypeptide comprising a polypeptide, a consensus sequence or at least a polypeptide motif as shown in the respective line in column 5 of Table II or in column 8 of Table IV, application no. 17, respectively, and being depicted in the same respective line as said AvinDRAFT_{—}3209, or a functional equivalent or a homolog thereof as depicted in column 8 of Table II, application no. 17, preferably a homolog or functional equivalent as depicted in column 8 of Table II B, application no. 17, and being depicted in the same respective line as said AvinDRAFT_{—}3209, and preferably the activity is increased non-targeted, whereby the respective line disclose in column 7 the fine chemical fructose.

[89463] Accordingly, in one embodiment, the molecule which activity is to be increased in the process of the invention is the gene product with an activity as a “transcriptional regulator”, preferably it is the molecule of section (a) or (b) of this paragraph.

[89464] In particular, it was observed that in plants, especially in Arabidopsis thaliana, increasing or generating the activity of a gene product non-targeted with the activity of a “transcriptional regulator”, preferably being encoded by a gene comprising the nucleic acid sequence SEQ ID NO. 29286, preferably the coding region thereof, conferred the production of or the increase in fructose compared with the wild type control.

[89465] The nucleic acid sequence of AvinDRAFT_{—}3209 from Azotobacter vinelandii, e.g. as shown in the respective line in column 5 of Table I, application no. 17, has been published in D. And the activity of the gene product thereof is the activity of transcriptional regulator.

[89466] Accordingly, in one embodiment, the process of the present invention for producing glucose in a non-human organism, like a microorganism or a plant or a part thereof, comprises increasing or generating the activity of a gene product with the activity of a gene product conferring the activity of “transcriptional regulator”, especially from Azotobacter vinelandii or its functional equivalent or its homolog, e.g. the increase of
[89467] (a) a gene product of a gene comprising the nucleic acid molecule as shown in the respective line in column 5 of Table I (whereby the respective line disclose in column 7 the fine chemical glucose), application no. 17, preferably the coding region thereof, or a homolog or a fragment thereof, and being depicted in the same respective line as said AvinDRAFT_{—}3209, or a functional equivalent or a homolog thereof as shown in column 8 of Table I, application no. 17, preferably the coding region thereof, particularly a homolog or functional equivalent as shown in column 8 of Table I B, application no. 17, and being depicted in the same respective line as said AvinDRAFT_{—}3209, and preferably the activity is increased non-targeted, or
[89468] (b) a polypeptide comprising a polypeptide, a consensus sequence or at least a polypeptide motif as shown in the respective line in column 5 of Table II or in column 8 of Table IV, application no. 17, respectively, and being depicted in the same respective line as said AvinDRAFT_{—}3209, or a functional equivalent or a homolog thereof as depicted in column 8 of Table II, application no. 17, preferably a homolog or functional equivalent as depicted in column 8 of Table II B, application no. 17, and being depicted in the same respective line as said AvinDRAFT_{—}3209, and preferably the activity is increased non-targeted, whereby the respective line disclose in column 7 the fine chemical glucose.

[89469] Accordingly, in one embodiment, the molecule which activity is to be increased in the process of the invention is the gene product with an activity as a “transcriptional regulator”, preferably it is the molecule of section (a) or (b) of this paragraph.

[89470] In particular, it was observed that in plants, especially in Arabidopsis thaliana, increasing or generating the activity of a gene product non-targeted with the activity of a “transcriptional regulator”, preferably being encoded by a gene comprising the nucleic acid sequence SEQ ID NO. 29286, preferably the coding region thereof, conferred the production of or the increase in glucose compared with the wild type control.

[89471] The nucleic acid sequence of AvinDRAFT_{—}3209 from Azotobacter vinelandii, e.g. as shown in the respective line in column 5 of Table I, application no. 17, has been published in D. And the activity of the gene product thereof is the activity of transcriptional regulator.

[89472] Accordingly, in one embodiment, the process of the present invention for producing glucose-1-phosphate in a non-human organism, like a microorganism or a plant or a part thereof, comprises increasing or generating the activity of a gene product with the activity of a gene product conferring the activity of “transcriptional regulator”, especially from Azotobacter vinelandii or its functional equivalent or its homolog, e.g. the increase of
[89473] (a) a gene product of a gene comprising the nucleic acid molecule as shown in the respective line in column 5 of Table I (whereby the respective line disclose in column 7 the fine chemical glucose-1-phosphate), application no. 17, preferably the coding region thereof, or a homolog or a fragment thereof, and being depicted in the same respective line as said AvinDRAFT_{—}3209, or a functional equivalent or a homolog thereof as shown in column 8 of Table I, application no. 17, preferably the coding region thereof, particularly a homolog or functional equivalent as shown in column 8 of Table I B, application no. 17, and being depicted in the same respective line as said AvinDRAFT_{—}3209, and preferably the activity is increased non-targeted, or
[89474] (b) a polypeptide comprising a polypeptide, a consensus sequence or at least a polypeptide motif as shown in the respective line in column 5 of Table II or in column 8 of Table IV, application no. 17, respectively, and being depicted in the same respective line as said AvinDRAFT_{—}3209, or a functional equivalent or a homolog thereof as depicted in column 8 of Table II, application no. 17, preferably a homolog or functional equivalent as depicted in column 8 of Table II B, application no. 17, and being depicted in the same respective line as said AvinDRAFT_{—}3209, and preferably the activity is increased non-targeted, whereby the respective line disclose in column 7 the fine chemical glucose-1-phosphate.

[89475] Accordingly, in one embodiment, the molecule which activity is to be increased in the process of the invention is the gene product with an activity as a “transcriptional regulator”, preferably it is the molecule of section (a) or (b) of this paragraph.

[89476] In particular, it was observed that in plants, especially in Arabidopsis thaliana, increasing or generating the activity of a gene product non-targeted with the activity of a “transcriptional regulator”, preferably being encoded by a gene comprising the nucleic acid sequence SEQ ID NO. 29286, preferably the coding region thereof, conferred the production of or the increase in glucose-1-phosphate compared with the wild type control.

[89477] The nucleic acid sequence of AvinDRAFT_{—}3253 from Azotobacter vinelandii, e.g. as shown in the respective line in column 5 of Table I, application no. 17, has been published in D. And the activity of the gene product thereof is the activity of oxidoreductase.

[89478] Accordingly, in one embodiment, the process of the present invention for producing glucose-1-phosphate in a non-human organism, like a microorganism or a plant or a part thereof, comprises increasing or generating the activity of a gene product with the activity of a gene product conferring the activity of “oxidoreductase”, especially from Azotobacter vinelandii or its functional equivalent or its homolog, e.g. the increase of
[89479] (a) a gene product of a gene comprising the nucleic acid molecule as shown in the respective line in column 5 of Table I (whereby the respective line disclose in column 7 the fine chemical glucose-1-phosphate), application no. 17, preferably the coding region thereof, or a homolog or a fragment thereof, and being depicted in the same respective line as said AvinDRAFT_{—}3253, or a functional equivalent or a homolog thereof as shown in column 8 of Table I, application no. 17, preferably the coding region thereof, particularly a homolog or functional equivalent as shown in column 8 of Table I B, application no. 17, and being depicted in the same respective line as said AvinDRAFT_{—}3253, and preferably the activity is increased non-targeted, or
[89480] (b) a polypeptide comprising a polypeptide, a consensus sequence or at least a polypeptide motif as shown in the respective line in column 5 of Table II or in column 8 of Table IV, application no. 17, respectively, and being depicted in the same respective line as said AvinDRAFT_{—}3253, or a functional equivalent or a homolog thereof as depicted in column 8 of Table II, application no. 17, preferably a homolog or functional equivalent as depicted in column 8 of Table II B, application no. 17, and being depicted in the same respective line as said AvinDRAFT_{—}3253, and preferably the activity is increased non-targeted, whereby the respective line disclose in column 7 the fine chemical glucose-1-phosphate.

[89481] Accordingly, in one embodiment, the molecule which activity is to be increased in the process of the invention is the gene product with an activity as a “oxidoreductase”, preferably it is the molecule of section (a) or (b) of this paragraph.

[89482] In particular, it was observed that in plants, especially in Arabidopsis thaliana, increasing or generating the activity of a gene product non-targeted with the activity of a “oxidoreductase”, preferably being encoded by a gene comprising the nucleic acid sequence SEQ ID NO. 29500, preferably the coding region thereof, conferred the production of or the increase in glucose-1-phosphate compared with the wild type control.

[89483] The nucleic acid sequence of AvinDRAFT_{—}3577 from Azotobacter vinelandii, e.g. as shown in the respective line in column 5 of Table I, application no. 17, has been published in D. And the activity of the gene product thereof is the activity of ThiF family protein.

[89484] Accordingly, in one embodiment, the process of the present invention for producing myo-inositol in a non-human organism, like a microorganism or a plant or a part thereof, comprises increasing or generating the activity of a gene product with the activity of a gene product conferring the activity of “ThiF family protein”, especially from Azotobacter vinelandii or its functional equivalent or its homolog, e.g. the increase of
[89485] (a) a gene product of a gene comprising the nucleic acid molecule as shown in the respective line in column 5 of Table I (whereby the respective line disclose in column 7 the fine chemical myo-inositol), application no. 17, preferably the coding region thereof, or a homolog or a fragment thereof, and being depicted in the same respective line as said AvinDRAFT_{—}3577, or a functional equivalent or a homolog thereof as shown in column 8 of Table I, application no. 17, preferably the coding region thereof, particularly a homolog or functional equivalent as shown in column 8 of Table I B, application no. 17, and being depicted in the same respective line as said AvinDRAFT_{—}3577, and preferably the activity is increased non-targeted, or
[89486] (b) a polypeptide comprising a polypeptide, a consensus sequence or at least a polypeptide motif as shown in the respective line in column 5 of Table II or in column 8 of Table IV, application no. 17, respectively, and being depicted in the same respective line as said AvinDRAFT_{—}3577, or a functional equivalent or a homolog thereof as depicted in column 8 of Table II, application no. 17, preferably a homolog or functional equivalent as depicted in column 8 of Table II B, application no. 17, and being depicted in the same respective line as said AvinDRAFT_{—}3577, and preferably the activity is increased non-targeted, whereby the respective line disclose in column 7 the fine chemical myo-inositol.

[89487] Accordingly, in one embodiment, the molecule which activity is to be increased in the process of the invention is the gene product with an activity as a “ThiF family protein”, preferably it is the molecule of section (a) or (b) of this paragraph.

[89488] In particular, it was observed that in plants, especially in Arabidopsis thaliana, increasing or generating the activity of a gene product non-targeted with the activity of a “ThiF family protein”, preferably being encoded by a gene comprising the nucleic acid sequence SEQ ID NO. 111155, preferably the coding region thereof, conferred the production of or the increase in myo-inositol compared with the wild type control.

[89489] The nucleic acid sequence of AvinDRAFT_{—}3605 from Azotobacter vinelandii, e.g. as shown in the respective line in column 5 of Table I, application no. 17, has been published in D. And the activity of the gene product thereof is the activity of CTP synthase.

[89490] Accordingly, in one embodiment, the process of the present invention for producing fructose in a non-human organism, like a microorganism or a plant or a part thereof, comprises increasing or generating the activity of a gene product with the activity of a gene product conferring the activity of “CTP synthase”, especially from Azotobacter vinelandii or its functional equivalent or its homolog, e.g. the increase of
[89491] (a) a gene product of a gene comprising the nucleic acid molecule as shown in the respective line in column 5 of Table I (whereby the respective line disclose in column 7 the fine chemical fructose), application no. 17, preferably the coding region thereof, or a homolog or a fragment thereof, and being depicted in the same respective line as said AvinDRAFT_{—}3605, or a functional equivalent or a homolog thereof as shown in column 8 of Table I, application no. 17, preferably the coding region thereof, particularly a homolog or functional equivalent as shown in column 8 of Table I B, application no. 17, and being depicted in the same respective line as said AvinDRAFT_{—}3605, and preferably the activity is increased non-targeted, or
[89492] (b) a polypeptide comprising a polypeptide, a consensus sequence or at least a polypeptide motif as shown in the respective line in column 5 of Table II or in column 8 of Table IV, application no. 17, respectively, and being depicted in the same respective line as said AvinDRAFT_{—}3605, or a functional equivalent or a homolog thereof as depicted in column 8 of Table II, application no. 17, preferably a homolog or functional equivalent as depicted in column 8 of Table II B, application no. 17, and being depicted in the same respective line as said AvinDRAFT_{—}3605, and preferably the activity is increased non-targeted, whereby the respective line disclose in column 7 the fine chemical fructose.

[89493] Accordingly, in one embodiment, the molecule which activity is to be increased in the process of the invention is the gene product with an activity as a “CTP synthase”, preferably it is the molecule of section (a) or (b) of this paragraph.

[89494] In particular, it was observed that in plants, especially in Arabidopsis thaliana, increasing or generating the activity of a gene product non-targeted with the activity of a “CTP synthase”, preferably being encoded by a gene comprising the nucleic acid sequence SEQ ID NO. 31026, preferably the coding region thereof, conferred the production of or the increase in fructose compared with the wild type control.

[89495] The nucleic acid sequence of AvinDRAFT_{—}3605 from Azotobacter vinelandii, e.g. as shown in the respective line in column 5 of Table I, application no. 17, has been published in D. And the activity of the gene product thereof is the activity of CTP synthase.

[89496] Accordingly, in one embodiment, the process of the present invention for producing glucose in a non-human organism, like a microorganism or a plant or a part thereof, comprises increasing or generating the activity of a gene product with the activity of a gene product conferring the activity of “CTP synthase”, especially from Azotobacter vinelandii or its functional equivalent or its homolog, e.g. the increase of
[89497] (a) a gene product of a gene comprising the nucleic acid molecule as shown in the respective line in column 5 of Table I (whereby the respective line disclose in column 7 the fine chemical glucose), application no. 17, preferably the coding region thereof, or a homolog or a fragment thereof, and being depicted in the same respective line as said AvinDRAFT_{—}3605, or a functional equivalent or a homolog thereof as shown in column 8 of Table I, application no. 17, preferably the coding region thereof, particularly a homolog or functional equivalent as shown in column 8 of Table I B, application no. 17, and being depicted in the same respective line as said AvinDRAFT_{—}3605, and preferably the activity is increased non-targeted, or
[89498] (b) a polypeptide comprising a polypeptide, a consensus sequence or at least a polypeptide motif as shown in the respective line in column 5 of Table II or in column 8 of Table IV, application no. 17, respectively, and being depicted in the same respective line as said AvinDRAFT_{—}3605, or a functional equivalent or a homolog thereof as depicted in column 8 of Table II, application no. 17, preferably a homolog or functional equivalent as depicted in column 8 of Table II B, application no. 17, and being depicted in the same respective line as said AvinDRAFT_{—}3605, and preferably the activity is increased non-targeted, whereby the respective line disclose in column 7 the fine chemical glucose.

[89499] Accordingly, in one embodiment, the molecule which activity is to be increased in the process of the invention is the gene product with an activity as a “CTP synthase”, preferably it is the molecule of section (a) or (b) of this paragraph.

[89500] In particular, it was observed that in plants, especially in Arabidopsis thaliana, increasing or generating the activity of a gene product non-targeted with the activity of a “CTP synthase”, preferably being encoded by a gene comprising the nucleic acid sequence SEQ ID NO. 31026, preferably the coding region thereof, conferred the production of or the increase in glucose compared with the wild type control.

[89501] The nucleic acid sequence of AvinDRAFT_{—}3605 from Azotobacter vinelandii, e.g. as shown in the respective line in column 5 of Table I, application no. 17, has been published in D. And the activity of the gene product thereof is the activity of CTP synthase.

[89502] Accordingly, in one embodiment, the process of the present invention for producing sucrose in a non-human organism, like a microorganism or a plant or a part thereof, comprises increasing or generating the activity of a gene product with the activity of a gene product conferring the activity of “CTP synthase”, especially from Azotobacter vinelandii or its functional equivalent or its homolog, e.g. the increase of
[89503] (a) a gene product of a gene comprising the nucleic acid molecule as shown in the respective line in column 5 of Table I (whereby the respective line disclose in column 7 the fine chemical sucrose), application no. 17, preferably the coding region thereof, or a homolog or a fragment thereof, and being depicted in the same respective line as said AvinDRAFT_{—}3605, or a functional equivalent or a homolog thereof as shown in column 8 of Table I, application no. 17, preferably the coding region thereof, particularly a homolog or functional equivalent as shown in column 8 of Table I B, application no. 17, and being depicted in the same respective line as said AvinDRAFT_{—}3605, and preferably the activity is increased non-targeted, or
[89504] (b) a polypeptide comprising a polypeptide, a consensus sequence or at least a polypeptide motif as shown in the respective line in column 5 of Table II or in column 8 of Table IV, application no. 17, respectively, and being depicted in the same respective line as said AvinDRAFT_{—}3605, or a functional equivalent or a homolog thereof as depicted in column 8 of Table II, application no. 17, preferably a homolog or functional equivalent as depicted in column 8 of Table II B, application no. 17, and being depicted in the same respective line as said AvinDRAFT_{—}3605, and preferably the activity is increased non-targeted, whereby the respective line disclose in column 7 the fine chemical sucrose.

[89505] Accordingly, in one embodiment, the molecule which activity is to be increased in the process of the invention is the gene product with an activity as a “CTP synthase”, preferably it is the molecule of section (a) or (b) of this paragraph.

[89506] In particular, it was observed that in plants, especially in Arabidopsis thaliana, increasing or generating the activity of a gene product non-targeted with the activity of a “CTP synthase”, preferably being encoded by a gene comprising the nucleic acid sequence SEQ ID NO. 31026, preferably the coding region thereof, conferred the production of or the increase in sucrose compared with the wild type control.

[89507] The nucleic acid sequence of AvinDRAFT_{—}3616 from Azotobacter vinelandii, e.g. as shown in the respective line in column 5 of Table I, application no. 17, has been published in D. And the activity of the gene product thereof is the activity of protein-L-isoaspartate O-methyltransferase.

[89508] Accordingly, in one embodiment, the process of the present invention for producing raffinose in a non-human organism, like a microorganism or a plant or a part thereof, comprises increasing or generating the activity of a gene product with the activity of a gene product conferring the activity of “protein-L-isoaspartate O-methyltransferase”, especially from Azotobacter vinelandii or its functional equivalent or its homolog, e.g. the increase of
[89509] (a) a gene product of a gene comprising the nucleic acid molecule as shown in the respective line in column 5 of Table I (whereby the respective line disclose in column 7 the fine chemical raffinose), application no. 17, preferably the coding region thereof, or a homolog or a fragment thereof, and being depicted in the same respective line as said AvinDRAFT_{—}3616, or a functional equivalent or a homolog thereof as shown in column 8 of Table I, application no. 17, preferably the coding region thereof, particularly a homolog or functional equivalent as shown in column 8 of Table I B, application no. 17, and being depicted in the same respective line as said AvinDRAFT_{—}3616, and preferably the activity is increased non-targeted, or
[89510] (b) a polypeptide comprising a polypeptide, a consensus sequence or at least a polypeptide motif as shown in the respective line in column 5 of Table II or in column 8 of Table IV, application no. 17, respectively, and being depicted in the same respective line as said AvinDRAFT_{—}3616, or a functional equivalent or a homolog thereof as depicted in column 8 of Table II, application no. 17, preferably a homolog or functional equivalent as depicted in column 8 of Table II B, application no. 17, and being depicted in the same respective line as said AvinDRAFT_{—}3616, and preferably the activity is increased non-targeted, whereby the respective line disclose in column 7 the fine chemical raffinose.

[89511] Accordingly, in one embodiment, the molecule which activity is to be increased in the process of the invention is the gene product with an activity as a “protein-L-isoaspartate O-methyltransferase”, preferably it is the molecule of section (a) or (b) of this paragraph.

[89512] In particular, it was observed that in plants, especially in Arabidopsis thaliana, increasing or generating the activity of a gene product non-targeted with the activity of a “protein-L-isoaspartate O-methyltransferase”, preferably being encoded by a gene comprising the nucleic acid sequence SEQ ID NO. 143121, preferably the coding region thereof, conferred the production of or the increase in raffinose compared with the wild type control.

[89513] The nucleic acid sequence of AvinDRAFT_{—}3629 from Azotobacter vinelandii, e.g. as shown in the respective line in column 5 of Table I, application no. 17, has been published in D. And the activity of the gene product thereof is the activity of recombinase A.

[89514] Accordingly, in one embodiment, the process of the present invention for producing myo-inositol in a non-human organism, like a microorganism or a plant or a part thereof, comprises increasing or generating the activity of a gene product with the activity of a gene product conferring the activity of “recombinase A”, especially from Azotobacter vinelandii or its functional equivalent or its homolog, e.g. the increase of
[89515] (a) a gene product of a gene comprising the nucleic acid molecule as shown in the respective line in column 5 of Table I (whereby the respective line disclose in column 7 the fine chemical myo-inositol), application no. 17, preferably the coding region thereof, or a homolog or a fragment thereof, and being depicted in the same respective line as said AvinDRAFT_{—}3629, or a functional equivalent or a homolog thereof as shown in column 8 of Table I, application no. 17, preferably the coding region thereof, particularly a homolog or functional equivalent as shown in column 8 of Table I B, application no. 17, and being depicted in the same respective line as said AvinDRAFT_{—}3629, and preferably the activity is increased non-targeted, or
[89516] (b) a polypeptide comprising a polypeptide, a consensus sequence or at least a polypeptide motif as shown in the respective line in column 5 of Table II or in column 8 of Table IV, application no. 17, respectively, and being depicted in the same respective line as said AvinDRAFT_{—}3629, or a functional equivalent or a homolog thereof as depicted in column 8 of Table II, application no. 17, preferably a homolog or functional equivalent as depicted in column 8 of Table II B, application no. 17, and being depicted in the same respective line as said AvinDRAFT_{—}3629, and preferably the activity is increased non-targeted, whereby the respective line disclose in column 7 the fine chemical myo-inositol.

[89517] Accordingly, in one embodiment, the molecule which activity is to be increased in the process of the invention is the gene product with an activity as a “recombinase A”, preferably it is the molecule of section (a) or (b) of this paragraph.

[89518] In particular, it was observed that in plants, especially in Arabidopsis thaliana, increasing or generating the activity of a gene product non-targeted with the activity of a “recombinase A”, preferably being encoded by a gene comprising the nucleic acid sequence SEQ ID NO. 114231, preferably the coding region thereof, conferred the production of or the increase in myo-inositol compared with the wild type control.

[89519] The nucleic acid sequence of AvinDRAFT_{—}3629 from Azotobacter vinelandii, e.g. as shown in the respective line in column 5 of Table I, application no. 17, has been published in D. And the activity of the gene product thereof is the activity of recombinase A.

[89520] Accordingly, in one embodiment, the process of the present invention for producing raffinose in a non-human organism, like a microorganism or a plant or a part thereof, comprises increasing or generating the activity of a gene product with the activity of a gene product conferring the activity of “recombinase A”, especially from Azotobacter vinelandii or its functional equivalent or its homolog, e.g. the increase of
[89521] (a) a gene product of a gene comprising the nucleic acid molecule as shown in the respective line in column 5 of Table I (whereby the respective line disclose in column 7 the fine chemical raffinose), application no. 17, preferably the coding region thereof, or a homolog or a fragment thereof, and being depicted in the same respective line as said AvinDRAFT_{—}3629, or a functional equivalent or a homolog thereof as shown in column 8 of Table I, application no. 17, preferably the coding region thereof, particularly a homolog or functional equivalent as shown in column 8 of Table I B, application no. 17, and being depicted in the same respective line as said AvinDRAFT_{—}3629, and preferably the activity is increased non-targeted, or
[89522] (b) a polypeptide comprising a polypeptide, a consensus sequence or at least a polypeptide motif as shown in the respective line in column 5 of Table II or in column 8 of Table IV, application no. 17, respectively, and being depicted in the same respective line as said AvinDRAFT_{—}3629, or a functional equivalent or a homolog thereof as depicted in column 8 of Table II, application no. 17, preferably a homolog or functional equivalent as depicted in column 8 of Table II B, application no. 17, and being depicted in the same respective line as said AvinDRAFT_{—}3629, and preferably the activity is increased non-targeted, whereby the respective line disclose in column 7 the fine chemical raffinose.

[89523] Accordingly, in one embodiment, the molecule which activity is to be increased in the process of the invention is the gene product with an activity as a “recombinase A”, preferably it is the molecule of section (a) or (b) of this paragraph.

[89524] In particular, it was observed that in plants, especially in Arabidopsis thaliana, increasing or generating the activity of a gene product non-targeted with the activity of a “recombinase A”, preferably being encoded by a gene comprising the nucleic acid sequence SEQ ID NO. 114231, preferably the coding region thereof, conferred the production of or the increase in raffinose compared with the wild type control.

[89525] The nucleic acid sequence of AvinDRAFT_{—}4265 from Azotobacter vinelandii, e.g. as shown in the respective line in column 5 of Table I, application no. 17, has been published in D. And the activity of the gene product thereof is the activity of acetyltransferase.

[89526] Accordingly, in one embodiment, the process of the present invention for producing myo-inositol in a non-human organism, like a microorganism or a plant or a part thereof, comprises increasing or generating the activity of a gene product with the activity of a gene product conferring the activity of “acetyltransferase”, especially from Azotobacter vinelandii or its functional equivalent or its homolog, e.g. the increase of
[89527] (a) a gene product of a gene comprising the nucleic acid molecule as shown in the respective line in column 5 of Table I (whereby the respective line disclose in column 7 the fine chemical myo-inositol), application no. 17, preferably the coding region thereof, or a homolog or a fragment thereof, and being depicted in the same respective line as said AvinDRAFT_{—}4265, or a functional equivalent or a homolog thereof as shown in column 8 of Table I, application no. 17, preferably the coding region thereof, particularly a homolog or functional equivalent as shown in column 8 of Table I B, application no. 17, and being depicted in the same respective line as said AvinDRAFT_{—}4265, and preferably the activity is increased non-targeted, or
[89528] (b) a polypeptide comprising a polypeptide, a consensus sequence or at least a polypeptide motif as shown in the respective line in column 5 of Table II or in column 8 of Table IV, application no. 17, respectively, and being depicted in the same respective line as said AvinDRAFT_{—}4265, or a functional equivalent or a homolog thereof as depicted in column 8 of Table II, application no. 17, preferably a homolog or functional equivalent as depicted in column 8 of Table II B, application no. 17, and being depicted in the same respective line as said AvinDRAFT_{—}4265, and preferably the activity is increased non-targeted, whereby the respective line disclose in column 7 the fine chemical myo-inositol.

[89529] Accordingly, in one embodiment, the molecule which activity is to be increased in the process of the invention is the gene product with an activity as a “acetyltransferase”, preferably it is the molecule of section (a) or (b) of this paragraph.

[89530] In particular, it was observed that in plants, especially in Arabidopsis thaliana, increasing or generating the activity of a gene product non-targeted with the activity of a “acetyltransferase”, preferably being encoded by a gene comprising the nucleic acid sequence SEQ ID NO. 143398, preferably the coding region thereof, conferred the production of or the increase in myo-inositol compared with the wild type control.

[89531] The nucleic acid sequence of AvinDRAFT_{—}4265 from Azotobacter vinelandii, e.g. as shown in the respective line in column 5 of Table I, application no. 17, has been published in D. And the activity of the gene product thereof is the activity of acetyltransferase.

[89532] Accordingly, in one embodiment, the process of the present invention for producing raffinose in a non-human organism, like a microorganism or a plant or a part thereof, comprises increasing or generating the activity of a gene product with the activity of a gene product conferring the activity of “acetyltransferase”, especially from Azotobacter vinelandii or its functional equivalent or its homolog, e.g. the increase of
[89533] (a) a gene product of a gene comprising the nucleic acid molecule as shown in the respective line in column 5 of Table I (whereby the respective line disclose in column 7 the fine chemical raffinose), application no. 17, preferably the coding region thereof, or a homolog or a fragment thereof, and being depicted in the same respective line as said AvinDRAFT_{—}4265, or a functional equivalent or a homolog thereof as shown in column 8 of Table I, application no. 17, preferably the coding region thereof, particularly a homolog or functional equivalent as shown in column 8 of Table I B, application no. 17, and being depicted in the same respective line as said AvinDRAFT_{—}4265, and preferably the activity is increased non-targeted, or
[89534] (b) a polypeptide comprising a polypeptide, a consensus sequence or at least a polypeptide motif as shown in the respective line in column 5 of Table II or in column 8 of Table IV, application no. 17, respectively, and being depicted in the same respective line as said AvinDRAFT_{—}4265, or a functional equivalent or a homolog thereof as depicted in column 8 of Table II, application no. 17, preferably a homolog or functional equivalent as depicted in column 8 of Table II B, application no. 17, and being depicted in the same respective line as said AvinDRAFT_{—}4265, and preferably the activity is increased non-targeted, whereby the respective line disclose in column 7 the fine chemical raffinose.

[89535] Accordingly, in one embodiment, the molecule which activity is to be increased in the process of the invention is the gene product with an activity as a “acetyltransferase”, preferably it is the molecule of section (a) or (b) of this paragraph.

[89536] In particular, it was observed that in plants, especially in Arabidopsis thaliana, increasing or generating the activity of a gene product non-targeted with the activity of a “acetyltransferase”, preferably being encoded by a gene comprising the nucleic acid sequence SEQ ID NO. 143398, preferably the coding region thereof, conferred the production of or the increase in raffinose compared with the wild type control.

[89537] The nucleic acid sequence of AvinDRAFT_{—}4420 from Azotobacter vinelandii, e.g. as shown in the respective line in column 5 of Table I, application no. 17, has been published in D. And the activity of the gene product thereof is the activity of enoyl-CoA hydratase.

[89538] Accordingly, in one embodiment, the process of the present invention for producing raffinose in a non-human organism, like a microorganism or a plant or a part thereof, comprises increasing or generating the activity of a gene product with the activity of a gene product conferring the activity of “enoyl-CoA hydratase”, especially from Azotobacter vinelandii or its functional equivalent or its homolog, e.g. the increase of
[89539] (a) a gene product of a gene comprising the nucleic acid molecule as shown in the respective line in column 5 of Table I (whereby the respective line disclose in column 7 the fine chemical raffinose), application no. 17, preferably the coding region thereof, or a homolog or a fragment thereof, and being depicted in the same respective line as said AvinDRAFT_{—}4420, or a functional equivalent or a homolog thereof as shown in column 8 of Table I, application no. 17, preferably the coding region thereof, particularly a homolog or functional equivalent as shown in column 8 of Table I B, application no. 17, and being depicted in the same respective line as said AvinDRAFT_{—}4420, and preferably the activity is increased non-targeted, or
[89540] (b) a polypeptide comprising a polypeptide, a consensus sequence or at least a polypeptide motif as shown in the respective line in column 5 of Table II or in column 8 of Table IV, application no. 17, respectively, and being depicted in the same respective line as said AvinDRAFT_{—}4420, or a functional equivalent or a homolog thereof as depicted in column 8 of Table II, application no. 17, preferably a homolog or functional equivalent as depicted in column 8 of Table II B, application no. 17, and being depicted in the same respective line as said AvinDRAFT_{—}4420, and preferably the activity is increased non-targeted, whereby the respective line disclose in column 7 the fine chemical raffinose.

[89541] Accordingly, in one embodiment, the molecule which activity is to be increased in the process of the invention is the gene product with an activity as a “enoyl-CoA hydratase”, preferably it is the molecule of section (a) or (b) of this paragraph.

[89542] In particular, it was observed that in plants, especially in Arabidopsis thaliana, increasing or generating the activity of a gene product non-targeted with the activity of a “enoyl-CoA hydratase”, preferably being encoded by a gene comprising the nucleic acid sequence SEQ ID NO. 73038, preferably the coding region thereof, conferred the production of or the increase in raffinose compared with the wild type control.

[89543] The nucleic acid sequence of AvinDRAFT_{—}4606 from Azotobacter vinelandii, e.g. as shown in the respective line in column 5 of Table I, application no. 17, has been published in D. And the activity of the gene product thereof is the activity of NADH-quinone oxidoreductase subunit.

[89544] Accordingly, in one embodiment, the process of the present invention for producing fructose in a non-human organism, like a microorganism or a plant or a part thereof, comprises increasing or generating the activity of a gene product with the activity of a gene product conferring the activity of “NADH-quinone oxidoreductase subunit”, especially from Azotobacter vinelandii or its functional equivalent or its homolog, e.g. the increase of
[89545] (a) a gene product of a gene comprising the nucleic acid molecule as shown in the respective line in column 5 of Table I (whereby the respective line disclose in column 7 the fine chemical fructose), application no. 17, preferably the coding region thereof, or a homolog or a fragment thereof, and being depicted in the same respective line as said AvinDRAFT_{—}4606, or a functional equivalent or a homolog thereof as shown in column 8 of Table I, application no. 17, preferably the coding region thereof, particularly a homolog or functional equivalent as shown in column 8 of Table I B, application no. 17, and being depicted in the same respective line as said AvinDRAFT_{—}4606, and preferably the activity is increased non-targeted, or
[89546] (b) a polypeptide comprising a polypeptide, a consensus sequence or at least a polypeptide motif as shown in the respective line in column 5 of Table II or in column 8 of Table IV, application no. 17, respectively, and being depicted in the same respective line as said AvinDRAFT_{—}4606, or a functional equivalent or a homolog thereof as depicted in column 8 of Table II, application no. 17, preferably a homolog or functional equivalent as depicted in column 8 of Table II B, application no. 17, and being depicted in the same respective line as said AvinDRAFT_{—}4606, and preferably the activity is increased non-targeted, whereby the respective line disclose in column 7 the fine chemical fructose.

[89547] Accordingly, in one embodiment, the molecule which activity is to be increased in the process of the invention is the gene product with an activity as a “NADH-quinone oxidoreductase subunit”, preferably it is the molecule of section (a) or (b) of this paragraph.

[89548] In particular, it was observed that in plants, especially in Arabidopsis thaliana, increasing or generating the activity of a gene product non-targeted with the activity of a “NADH-quinone oxidoreductase subunit”, preferably being encoded by a gene comprising the nucleic acid sequence SEQ ID NO. 73719, preferably the coding region thereof, conferred the production of or the increase in fructose compared with the wild type control.

[89549] The nucleic acid sequence of AvinDRAFT_{—}4606 from Azotobacter vinelandii, e.g. as shown in the respective line in column 5 of Table I, application no. 17, has been published in D. And the activity of the gene product thereof is the activity of NADH-quinone oxidoreductase subunit.

[89550] Accordingly, in one embodiment, the process of the present invention for producing glucose-1-phosphate in a non-human organism, like a microorganism or a plant or a part thereof, comprises increasing or generating the activity of a gene product with the activity of a gene product conferring the activity of “NADH-quinone oxidoreductase subunit”, especially from Azotobacter vinelandii or its functional equivalent or its homolog, e.g. the increase of
[89551] (a) a gene product of a gene comprising the nucleic acid molecule as shown in the respective line in column 5 of Table I (whereby the respective line disclose in column 7 the fine chemical glucose-1-phosphate), application no. 17, preferably the coding region thereof, or a homolog or a fragment thereof, and being depicted in the same respective line as said AvinDRAFT_{—}4606, or a functional equivalent or a homolog thereof as shown in column 8 of Table I, application no. 17, preferably the coding region thereof, particularly a homolog or functional equivalent as shown in column 8 of Table I B, application no. 17, and being depicted in the same respective line as said AvinDRAFT_{—}4606, and preferably the activity is increased non-targeted, or
[89552] (b) a polypeptide comprising a polypeptide, a consensus sequence or at least a polypeptide motif as shown in the respective line in column 5 of Table II or in column 8 of Table IV, application no. 17, respectively, and being depicted in the same respective line as said AvinDRAFT_{—}4606, or a functional equivalent or a homolog thereof as depicted in column 8 of Table II, application no. 17, preferably a homolog or functional equivalent as depicted in column 8 of Table II B, application no. 17, and being depicted in the same respective line as said AvinDRAFT_{—}4606, and preferably the activity is increased non-targeted, whereby the respective line disclose in column 7 the fine chemical glucose-1-phosphate.

[89553] Accordingly, in one embodiment, the molecule which activity is to be increased in the process of the invention is the gene product with an activity as a “NADH-quinone oxidoreductase subunit”, preferably it is the molecule of section (a) or (b) of this paragraph.

[89554] In particular, it was observed that in plants, especially in Arabidopsis thaliana, increasing or generating the activity of a gene product non-targeted with the activity of a “NADH-quinone oxidoreductase subunit”, preferably being encoded by a gene comprising the nucleic acid sequence SEQ ID NO. 73719, preferably the coding region thereof, conferred the production of or the increase in glucose-1-phosphate compared with the wild type control.

[89555] The nucleic acid sequence of AvinDRAFT_{—}4606 from Azotobacter vinelandii, e.g. as shown in the respective line in column 5 of Table I, application no. 17, has been published in D. And the activity of the gene product thereof is the activity of NADH-quinone oxidoreductase subunit.

[89556] Accordingly, in one embodiment, the process of the present invention for producing sucrose in a non-human organism, like a microorganism or a plant or a part thereof, comprises increasing or generating the activity of a gene product with the activity of a gene product conferring the activity of “NADH-quinone oxidoreductase subunit”, especially from Azotobacter vinelandii or its functional equivalent or its homolog, e.g. the increase of
[89557] (a) a gene product of a gene comprising the nucleic acid molecule as shown in the respective line in column 5 of Table I (whereby the respective line disclose in column 7 the fine chemical sucrose), application no. 17, preferably the coding region thereof, or a homolog or a fragment thereof, and being depicted in the same respective line as said AvinDRAFT_{—}4606, or a functional equivalent or a homolog thereof as shown in column 8 of Table I, application no. 17, preferably the coding region thereof, particularly a homolog or functional equivalent as shown in column 8 of Table I B, application no. 17, and being depicted in the same respective line as said AvinDRAFT_{—}4606, and preferably the activity is increased non-targeted, or
[89558] (b) a polypeptide comprising a polypeptide, a consensus sequence or at least a polypeptide motif as shown in the respective line in column 5 of Table II or in column 8 of Table IV, application no. 17, respectively, and being depicted in the same respective line as said AvinDRAFT_{—}4606, or a functional equivalent or a homolog thereof as depicted in column 8 of Table II, application no. 17, preferably a homolog or functional equivalent as depicted in column 8 of Table II B, application no. 17, and being depicted in the same respective line as said AvinDRAFT_{—}4606, and preferably the activity is increased non-targeted, whereby the respective line disclose in column 7 the fine chemical sucrose.

[89559] Accordingly, in one embodiment, the molecule which activity is to be increased in the process of the invention is the gene product with an activity as a “NADH-quinone oxidoreductase subunit”, preferably it is the molecule of section (a) or (b) of this paragraph.

[89560] In particular, it was observed that in plants, especially in Arabidopsis thaliana, increasing or generating the activity of a gene product non-targeted with the activity of a “NADH-quinone oxidoreductase subunit”, preferably being encoded by a gene comprising the nucleic acid sequence SEQ ID NO. 73719, preferably the coding region thereof, conferred the production of or the increase in sucrose compared with the wild type control.

[89561] The nucleic acid sequence of AvinDRAFT_{—}4847 from Azotobacter vinelandii, e.g. as shown in the respective line in column 5 of Table I, application no. 17, has been published in D. And the activity of the gene product thereof is the activity of isopropylmalate isomerase large subunit.

[89562] Accordingly, in one embodiment, the process of the present invention for producing 3,4,5-trihydroxypentanoic acid in a non-human organism, like a microorganism or a plant or a part thereof, comprises increasing or generating the activity of a gene product with the activity of a gene product conferring the activity of “isopropylmalate isomerase large subunit”, especially from Azotobacter vinelandii or its functional equivalent or its homolog, e.g. the increase of
[89563] (a) a gene product of a gene comprising the nucleic acid molecule as shown in the respective line in column 5 of Table I (whereby the respective line disclose in column 7 the fine chemical 3,4,5-trihydroxypentanoic acid), application no. 17, preferably the coding region thereof, or a homolog or a fragment thereof, and being depicted in the same respective line as said AvinDRAFT_{—}4847, or a functional equivalent or a homolog thereof as shown in column 8 of Table I, application no. 17, preferably the coding region thereof, particularly a homolog or functional equivalent as shown in column 8 of Table I B, application no. 17, and being depicted in the same respective line as said AvinDRAFT_{—}4847, and preferably the activity is increased non-targeted, or
[89564] (b) a polypeptide comprising a polypeptide, a consensus sequence or at least a polypeptide motif as shown in the respective line in column 5 of Table II or in column 8 of Table IV, application no. 17, respectively, and being depicted in the same respective line as said AvinDRAFT_{—}4847, or a functional equivalent or a homolog thereof as depicted in column 8 of Table II, application no. 17, preferably a homolog or functional equivalent as depicted in column 8 of Table II B, application no. 17, and being depicted in the same respective line as said AvinDRAFT_{—}4847, and preferably the activity is increased non-targeted, whereby the respective line disclose in column 7 the fine chemical 3,4,5-trihydroxypentanoic acid.

[89565] Accordingly, in one embodiment, the molecule which activity is to be increased in the process of the invention is the gene product with an activity as a “isopropylmalate isomerase large subunit”, preferably it is the molecule of section (a) or (b) of this paragraph.

[89566] In particular, it was observed that in plants, especially in Arabidopsis thaliana, increasing or generating the activity of a gene product non-targeted with the activity of a “isopropylmalate isomerase large subunit”, preferably being encoded by a gene comprising the nucleic acid sequence SEQ ID NO. 102941, preferably the coding region thereof, conferred the production of or the increase in 3,4,5-trihydroxypentanoic acid compared with the wild type control.

[89567] The nucleic acid sequence of AvinDRAFT_{—}5103 from Azotobacter vinelandii, e.g. as shown in the respective line in column 5 of Table I, application no. 17, has been published in D. And the activity of the gene product thereof is the activity of hydrolase.

[89568] Accordingly, in one embodiment, the process of the present invention for producing fructose in a non-human organism, like a microorganism or a plant or a part thereof, comprises increasing or generating the activity of a gene product with the activity of a gene product conferring the activity of “hydrolase”, especially from Azotobacter vinelandii or its functional equivalent or its homolog, e.g. the increase of
[89569] (a) a gene product of a gene comprising the nucleic acid molecule as shown in the respective line in column 5 of Table I (whereby the respective line disclose in column 7 the fine chemical fructose), application no. 17, preferably the coding region thereof, or a homolog or a fragment thereof, and being depicted in the same respective line as said AvinDRAFT_{—}5103, or a functional equivalent or a homolog thereof as shown in column 8 of Table I, application no. 17, preferably the coding region thereof, particularly a homolog or functional equivalent as shown in column 8 of Table I B, application no. 17, and being depicted in the same respective line as said AvinDRAFT_{—}5103, and preferably the activity is increased non-targeted, or
[89570] (b) a polypeptide comprising a polypeptide, a consensus sequence or at least a polypeptide motif as shown in the respective line in column 5 of Table II or in column 8 of Table IV, application no. 17, respectively, and being depicted in the same respective line as said AvinDRAFT_{—}5103, or a functional equivalent or a homolog thereof as depicted in column 8 of Table II, application no. 17, preferably a homolog or functional equivalent as depicted in column 8 of Table II B, application no. 17, and being depicted in the same respective line as said AvinDRAFT_{—}5103, and preferably the activity is increased non-targeted, whereby the respective line disclose in column 7 the fine chemical fructose.

[89571] Accordingly, in one embodiment, the molecule which activity is to be increased in the process of the invention is the gene product with an activity as a “hydrolase”, preferably it is the molecule of section (a) or (b) of this paragraph.

[89572] In particular, it was observed that in plants, especially in Arabidopsis thaliana, increasing or generating the activity of a gene product non-targeted with the activity of a “hydrolase”, preferably being encoded by a gene comprising the nucleic acid sequence SEQ ID NO. 6510, preferably the coding region thereof, conferred the production of or the increase in fructose compared with the wild type control.

[89573] The nucleic acid sequence of AvinDRAFT_{—}5103 from Azotobacter vinelandii, e.g. as shown in the respective line in column 5 of Table I, application no. 17, has been published in D. And the activity of the gene product thereof is the activity of hydrolase.

[89574] Accordingly, in one embodiment, the process of the present invention for producing glucose in a non-human organism, like a microorganism or a plant or a part thereof, comprises increasing or generating the activity of a gene product with the activity of a gene product conferring the activity of “hydrolase”, especially from Azotobacter vinelandii or its functional equivalent or its homolog, e.g. the increase of
[89575] (a) a gene product of a gene comprising the nucleic acid molecule as shown in the respective line in column 5 of Table I (whereby the respective line disclose in column 7 the fine chemical glucose), application no. 17, preferably the coding region thereof, or a homolog or a fragment thereof, and being depicted in the same respective line as said AvinDRAFT_{—}5103, or a functional equivalent or a homolog thereof as shown in column 8 of Table I, application no. 17, preferably the coding region thereof, particularly a homolog or functional equivalent as shown in column 8 of Table I B, application no. 17, and being depicted in the same respective line as said AvinDRAFT_{—}5103, and preferably the activity is increased non-targeted, or
[89576] (b) a polypeptide comprising a polypeptide, a consensus sequence or at least a polypeptide motif as shown in the respective line in column 5 of Table II or in column 8 of Table IV, application no. 17, respectively, and being depicted in the same respective line as said AvinDRAFT_{—}5103, or a functional equivalent or a homolog thereof as depicted in column 8 of Table II, application no. 17, preferably a homolog or functional equivalent as depicted in column 8 of Table II B, application no. 17, and being depicted in the same respective line as said AvinDRAFT_{—}5103, and preferably the activity is increased non-targeted, whereby the respective line disclose in column 7 the fine chemical glucose.

[89577] Accordingly, in one embodiment, the molecule which activity is to be increased in the process of the invention is the gene product with an activity as a “hydrolase”, preferably it is the molecule of section (a) or (b) of this paragraph.

[89578] In particular, it was observed that in plants, especially in Arabidopsis thaliana, increasing or generating the activity of a gene product non-targeted with the activity of a “hydrolase”, preferably being encoded by a gene comprising the nucleic acid sequence SEQ ID NO. 6510, preferably the coding region thereof, conferred the production of or the increase in glucose compared with the wild type control.

[89579] The nucleic acid sequence of AvinDRAFT_{—}5103 from Azotobacter vinelandii, e.g. as shown in the respective line in column 5 of Table I, application no. 17, has been published in D. And the activity of the gene product thereof is the activity of hydrolase.

[89580] Accordingly, in one embodiment, the process of the present invention for producing sucrose in a non-human organism, like a microorganism or a plant or a part thereof, comprises increasing or generating the activity of a gene product with the activity of a gene product conferring the activity of “hydrolase”, especially from Azotobacter vinelandii or its functional equivalent or its homolog, e.g. the increase of
[89581] (a) a gene product of a gene comprising the nucleic acid molecule as shown in the respective line in column 5 of Table I (whereby the respective line disclose in column 7 the fine chemical sucrose), application no. 17, preferably the coding region thereof, or a homolog or a fragment thereof, and being depicted in the same respective line as said AvinDRAFT_{—}5103, or a functional equivalent or a homolog thereof as shown in column 8 of Table I, application no. 17, preferably the coding region thereof, particularly a homolog or functional equivalent as shown in column 8 of Table I B, application no. 17, and being depicted in the same respective line as said AvinDRAFT_{—}5103, and preferably the activity is increased non-targeted, or
[89582] (b) a polypeptide comprising a polypeptide, a consensus sequence or at least a polypeptide motif as shown in the respective line in column 5 of Table II or in column 8 of Table IV, application no. 17, respectively, and being depicted in the same respective line as said AvinDRAFT_{—}5103, or a functional equivalent or a homolog thereof as depicted in column 8 of Table II, application no. 17, preferably a homolog or functional equivalent as depicted in column 8 of Table II B, application no. 17, and being depicted in the same respective line as said AvinDRAFT_{—}5103, and preferably the activity is increased non-targeted, whereby the respective line disclose in column 7 the fine chemical sucrose.

[89583] Accordingly, in one embodiment, the molecule which activity is to be increased in the process of the invention is the gene product with an activity as a “hydrolase”, preferably it is the molecule of section (a) or (b) of this paragraph.

[89584] In particular, it was observed that in plants, especially in Arabidopsis thaliana, increasing or generating the activity of a gene product non-targeted with the activity of a “hydrolase”, preferably being encoded by a gene comprising the nucleic acid sequence SEQ ID NO. 6510, preferably the coding region thereof, conferred the production of or the increase in sucrose compared with the wild type control.

[89585] The nucleic acid sequence of AvinDRAFT_{—}5246 from Azotobacter vinelandii, e.g. as shown in the respective line in column 5 of Table I, application no. 17, has been published in D. And the activity of the gene product thereof is the activity of glutamate-ammonia-ligase.

[89586] Accordingly, in one embodiment, the process of the present invention for producing fructose in a non-human organism, like a microorganism or a plant or a part thereof, comprises increasing or generating the activity of a gene product with the activity of a gene product conferring the activity of “glutamate-ammonia-ligase”, especially from Azotobacter vinelandii or its functional equivalent or its homolog, e.g. the increase of
[89587] (a) a gene product of a gene comprising the nucleic acid molecule as shown in the respective line in column 5 of Table I (whereby the respective line disclose in column 7 the fine chemical fructose), application no. 17, preferably the coding region thereof, or a homolog or a fragment thereof, and being depicted in the same respective line as said AvinDRAFT_{—}5246, or a functional equivalent or a homolog thereof as shown in column 8 of Table I, application no. 17, preferably the coding region thereof, particularly a homolog or functional equivalent as shown in column 8 of Table I B, application no. 17, and being depicted in the same respective line as said AvinDRAFT_{—}5246, and preferably the activity is increased non-targeted, or
[89588] (b) a polypeptide comprising a polypeptide, a consensus sequence or at least a polypeptide motif as shown in the respective line in column 5 of Table II or in column 8 of Table IV, application no. 17, respectively, and being depicted in the same respective line as said AvinDRAFT_{—}5246, or a functional equivalent or a homolog thereof as depicted in column 8 of Table II, application no. 17, preferably a homolog or functional equivalent as depicted in column 8 of Table II B, application no. 17, and being depicted in the same respective line as said AvinDRAFT_{—}5246, and preferably the activity is increased non-targeted, whereby the respective line disclose in column 7 the fine chemical fructose.

[89589] Accordingly, in one embodiment, the molecule which activity is to be increased in the process of the invention is the gene product with an activity as a “glutamate-ammonia-ligase”, preferably it is the molecule of section (a) or (b) of this paragraph.

[89590] In particular, it was observed that in plants, especially in Arabidopsis thaliana, increasing or generating the activity of a gene product non-targeted with the activity of a “glutamate-ammonia-ligase”, preferably being encoded by a gene comprising the nucleic acid sequence SEQ ID NO. 32037, preferably the coding region thereof, conferred the production of or the increase in fructose compared with the wild type control.

[89591] The nucleic acid sequence of AvinDRAFT_{—}5246 from Azotobacter vinelandii, e.g. as shown in the respective line in column 5 of Table I, application no. 17, has been published in D. And the activity of the gene product thereof is the activity of glutamate-ammonia-ligase.

[89592] Accordingly, in one embodiment, the process of the present invention for producing glucose in a non-human organism, like a microorganism or a plant or a part thereof, comprises increasing or generating the activity of a gene product with the activity of a gene product conferring the activity of “glutamate-ammonia-ligase”, especially from Azotobacter vinelandii or its functional equivalent or its homolog, e.g. the increase of
[89593] (a) a gene product of a gene comprising the nucleic acid molecule as shown in the respective line in column 5 of Table I (whereby the respective line disclose in column 7 the fine chemical glucose), application no. 17, preferably the coding region thereof, or a homolog or a fragment thereof, and being depicted in the same respective line as said AvinDRAFT_{—}5246, or a functional equivalent or a homolog thereof as shown in column 8 of Table I, application no. 17, preferably the coding region thereof, particularly a homolog or functional equivalent as shown in column 8 of Table I B, application no. 17, and being depicted in the same respective line as said AvinDRAFT_{—}5246, and preferably the activity is increased non-targeted, or
[89594] (b) a polypeptide comprising a polypeptide, a consensus sequence or at least a polypeptide motif as shown in the respective line in column 5 of Table II or in column 8 of Table IV, application no. 17, respectively, and being depicted in the same respective line as said AvinDRAFT_{—}5246, or a functional equivalent or a homolog thereof as depicted in column 8 of Table II, application no. 17, preferably a homolog or functional equivalent as depicted in column 8 of Table II B, application no. 17, and being depicted in the same respective line as said AvinDRAFT_{—}5246, and preferably the activity is increased non-targeted, whereby the respective line disclose in column 7 the fine chemical glucose.

[89595] Accordingly, in one embodiment, the molecule which activity is to be increased in the process of the invention is the gene product with an activity as a “glutamate-ammonia-ligase”, preferably it is the molecule of section (a) or (b) of this paragraph.

[89596] In particular, it was observed that in plants, especially in Arabidopsis thaliana, increasing or generating the activity of a gene product non-targeted with the activity of a “glutamate-ammonia-ligase”, preferably being encoded by a gene comprising the nucleic acid sequence SEQ ID NO. 32037, preferably the coding region thereof, conferred the production of or the increase in glucose compared with the wild type control.

[89597] The nucleic acid sequence of AvinDRAFT_{—}5246 from Azotobacter vinelandii, e.g. as shown in the respective line in column 5 of Table I, application no. 17, has been published in D. And the activity of the gene product thereof is the activity of glutamate-ammonia-ligase.

[89598] Accordingly, in one embodiment, the process of the present invention for producing sucrose in a non-human organism, like a microorganism or a plant or a part thereof, comprises increasing or generating the activity of a gene product with the activity of a gene product conferring the activity of “glutamate-ammonia-ligase”, especially from Azotobacter vinelandii or its functional equivalent or its homolog, e.g. the increase of
[89599] (a) a gene product of a gene comprising the nucleic acid molecule as shown in the respective line in column 5 of Table I (whereby the respective line disclose in column 7 the fine chemical sucrose), application no. 17, preferably the coding region thereof, or a homolog or a fragment thereof, and being depicted in the same respective line as said AvinDRAFT_{—}5246, or a functional equivalent or a homolog thereof as shown in column 8 of Table I, application no. 17, preferably the coding region thereof, particularly a homolog or functional equivalent as shown in column 8 of Table I B, application no. 17, and being depicted in the same respective line as said AvinDRAFT_{—}5246, and preferably the activity is increased non-targeted, or
[89600] (b) a polypeptide comprising a polypeptide, a consensus sequence or at least a polypeptide motif as shown in the respective line in column 5 of Table II or in column 8 of Table IV, application no. 17, respectively, and being depicted in the same respective line as said AvinDRAFT_{—}5246, or a functional equivalent or a homolog thereof as depicted in column 8 of Table II, application no. 17, preferably a homolog or functional equivalent as depicted in column 8 of Table II B, application no. 17, and being depicted in the same respective line as said AvinDRAFT_{—}5246, and preferably the activity is increased non-targeted, whereby the respective line disclose in column 7 the fine chemical sucrose.

[89601] Accordingly, in one embodiment, the molecule which activity is to be increased in the process of the invention is the gene product with an activity as a “glutamate-ammonia-ligase”, preferably it is the molecule of section (a) or (b) of this paragraph.

[89602] In particular, it was observed that in plants, especially in Arabidopsis thaliana, increasing or generating the activity of a gene product non-targeted with the activity of a “glutamate-ammonia-ligase”, preferably being encoded by a gene comprising the nucleic acid sequence SEQ ID NO. 32037, preferably the coding region thereof, conferred the production of or the increase in sucrose compared with the wild type control.

[89603] The nucleic acid sequence of AvinDRAFT_{—}5292 from Azotobacter vinelandii, e.g. as shown in the respective line in column 5 of Table I, application no. 17, has been published in D. And the activity of the gene product thereof is the activity of fumarylacetoacetate hydrolase.

[89604] Accordingly, in one embodiment, the process of the present invention for producing fructose in a non-human organism, like a microorganism or a plant or a part thereof, comprises increasing or generating the activity of a gene product with the activity of a gene product conferring the activity of “fumarylacetoacetate hydrolase”, especially from Azotobacter vinelandii or its functional equivalent or its homolog, e.g. the increase of
[89605] (a) a gene product of a gene comprising the nucleic acid molecule as shown in the respective line in column 5 of Table I (whereby the respective line disclose in column 7 the fine chemical fructose), application no. 17, preferably the coding region thereof, or a homolog or a fragment thereof, and being depicted in the same respective line as said AvinDRAFT_{—}5292, or a functional equivalent or a homolog thereof as shown in column 8 of Table I, application no. 17, preferably the coding region thereof, particularly a homolog or functional equivalent as shown in column 8 of Table I B, application no. 17, and being depicted in the same respective line as said AvinDRAFT_{—}5292, and preferably the activity is increased non-targeted, or
[89606] (b) a polypeptide comprising a polypeptide, a consensus sequence or at least a polypeptide motif as shown in the respective line in column 5 of Table II or in column 8 of Table IV, application no. 17, respectively, and being depicted in the same respective line as said AvinDRAFT_{—}5292, or a functional equivalent or a homolog thereof as depicted in column 8 of Table II, application no. 17, preferably a homolog or functional equivalent as depicted in column 8 of Table II B, application no. 17, and being depicted in the same respective line as said AvinDRAFT_{—}5292, and preferably the activity is increased non-targeted, whereby the respective line disclose in column 7 the fine chemical fructose.

[89607] Accordingly, in one embodiment, the molecule which activity is to be increased in the process of the invention is the gene product with an activity as a “fumarylacetoacetate hydrolase”, preferably it is the molecule of section (a) or (b) of this paragraph.

[89608] In particular, it was observed that in plants, especially in Arabidopsis thaliana, increasing or generating the activity of a gene product non-targeted with the activity of a “fumarylacetoacetate hydrolase”, preferably being encoded by a gene comprising the nucleic acid sequence SEQ ID NO. 32308, preferably the coding region thereof, conferred the production of or the increase in fructose compared with the wild type control.

[89609] The nucleic acid sequence of AvinDRAFT_{—}5967 from Azotobacter vinelandii, e.g. as shown in the respective line in column 5 of Table I, application no. 17, has been published in D. And the activity of the gene product thereof is the activity of glycosyltransferase.

[89610] Accordingly, in one embodiment, the process of the present invention for producing raffinose in a non-human organism, like a microorganism or a plant or a part thereof, comprises increasing or generating the activity of a gene product with the activity of a gene product conferring the activity of “glycosyltransferase”, especially from Azotobacter vinelandii or its functional equivalent or its homolog, e.g. the increase of
[89611] (a) a gene product of a gene comprising the nucleic acid molecule as shown in the respective line in column 5 of Table I (whereby the respective line disclose in column 7 the fine chemical raffinose), application no. 17, preferably the coding region thereof, or a homolog or a fragment thereof, and being depicted in the same respective line as said AvinDRAFT_{—}5967, or a functional equivalent or a homolog thereof as shown in column 8 of Table I, application no. 17, preferably the coding region thereof, particularly a homolog or functional equivalent as shown in column 8 of Table I B, application no. 17, and being depicted in the same respective line as said AvinDRAFT_{—}5967, and preferably the activity is increased non-targeted, or
[89612] (b) a polypeptide comprising a polypeptide, a consensus sequence or at least a polypeptide motif as shown in the respective line in column 5 of Table II or in column 8 of Table IV, application no. 17, respectively, and being depicted in the same respective line as said AvinDRAFT_{—}5967, or a functional equivalent or a homolog thereof as depicted in column 8 of Table II, application no. 17, preferably a homolog or functional equivalent as depicted in column 8 of Table II B, application no. 17, and being depicted in the same respective line as said AvinDRAFT_{—}5967, and preferably the activity is increased non-targeted, whereby the respective line disclose in column 7 the fine chemical raffinose.

[89613] Accordingly, in one embodiment, the molecule which activity is to be increased in the process of the invention is the gene product with an activity as a “glycosyltransferase”, preferably it is the molecule of section (a) or (b) of this paragraph.

[89614] In particular, it was observed that in plants, especially in Arabidopsis thaliana, increasing or generating the activity of a gene product non-targeted with the activity of a “glycosyltransferase”, preferably being encoded by a gene comprising the nucleic acid sequence SEQ ID NO. 143495, preferably the coding region thereof, conferred the production of or the increase in raffinose compared with the wild type control.

[89615] The nucleic acid sequence of AvinDRAFT_{—}6075 from Azotobacter vinelandii, e.g. as shown in the respective line in column 5 of Table I, application no. 17, has been published in D. And the activity of the gene product thereof is the activity of peptidyl-prolyl cis-trans isomerase.

[89616] Accordingly, in one embodiment, the process of the present invention for producing myo-inositol in a non-human organism, like a microorganism or a plant or a part thereof, comprises increasing or generating the activity of a gene product with the activity of a gene product conferring the activity of “peptidyl-prolyl cis-trans isomerase”, especially from Azotobacter vinelandii or its functional equivalent or its homolog, e.g. the increase of
[89617] (a) a gene product of a gene comprising the nucleic acid molecule as shown in the respective line in column 5 of Table I (whereby the respective line disclose in column 7 the fine chemical myo-inositol), application no. 17, preferably the coding region thereof, or a homolog or a fragment thereof, and being depicted in the same respective line as said AvinDRAFT_{—}6075, or a functional equivalent or a homolog thereof as shown in column 8 of Table I, application no. 17, preferably the coding region thereof, particularly a homolog or functional equivalent as shown in column 8 of Table I B, application no. 17, and being depicted in the same respective line as said AvinDRAFT_{—}6075, and preferably the activity is increased non-targeted, or
[89618] (b) a polypeptide comprising a polypeptide, a consensus sequence or at least a polypeptide motif as shown in the respective line in column 5 of Table II or in column 8 of Table IV, application no. 17, respectively, and being depicted in the same respective line as said AvinDRAFT_{—}6075, or a functional equivalent or a homolog thereof as depicted in column 8 of Table II, application no. 17, preferably a homolog or functional equivalent as depicted in column 8 of Table II B, application no. 17, and being depicted in the same respective line as said AvinDRAFT_{—}6075, and preferably the activity is increased non-targeted, whereby the respective line disclose in column 7 the fine chemical myo-inositol.

[89619] Accordingly, in one embodiment, the molecule which activity is to be increased in the process of the invention is the gene product with an activity as a “peptidyl-prolyl cis-trans isomerase”, preferably it is the molecule of section (a) or (b) of this paragraph.

[89620] In particular, it was observed that in plants, especially in Arabidopsis thaliana, increasing or generating the activity of a gene product non-targeted with the activity of a “peptidyl-prolyl cistrans isomerase”, preferably being encoded by a gene comprising the nucleic acid sequence SEQ ID NO. 6674, preferably the coding region thereof, conferred the production of or the increase in myo-inositol compared with the wild type control.

[89621] The nucleic acid sequence of AVINDRAFT_{—}6261 from Azotobacter vinelandii, e.g. as shown in the respective line in column 5 of Table I, application no. 17, has been published in D. And the activity of the gene product thereof is the activity of NAD(P)H dehydrogenase (quinone).

[89622] Accordingly, in one embodiment, the process of the present invention for producing 3,4,5-trihydroxypentanoic acid in a non-human organism, like a microorganism or a plant or a part thereof, comprises increasing or generating the activity of a gene product with the activity of a gene product conferring the activity of “NAD(P)H dehydrogenase (quinone)”, especially from Azotobacter vinelandii or its functional equivalent or its homolog, e.g. the increase of
[89623] (a) a gene product of a gene comprising the nucleic acid molecule as shown in the respective line in column 5 of Table I (whereby the respective line disclose in column 7 the fine chemical 3,4,5-trihydroxypentanoic acid), application no. 17, preferably the coding region thereof, or a homolog or a fragment thereof, and being depicted in the same respective line as said AVINDRAFT_{—}6261, or a functional equivalent or a homolog thereof as shown in column 8 of Table I, application no. 17, preferably the coding region thereof, particularly a homolog or functional equivalent as shown in column 8 of Table I B, application no. 17, and being depicted in the same respective line as said AVINDRAFT_{—}6261, and preferably the activity is increased non-targeted, or
[89624] (b) a polypeptide comprising a polypeptide, a consensus sequence or at least a polypeptide motif as shown in the respective line in column 5 of Table II or in column 8 of Table IV, application no. 17, respectively, and being depicted in the same respective line as said AVINDRAFT_{—}6261, or a functional equivalent or a homolog thereof as depicted in column 8 of Table II, application no. 17, preferably a homolog or functional equivalent as depicted in column 8 of Table II B, application no. 17, and being depicted in the same respective line as said AVINDRAFT_{—}6261, and preferably the activity is increased non-targeted, whereby the respective line disclose in column 7 the fine chemical 3,4,5-trihydroxypentanoic acid.

[89625] Accordingly, in one embodiment, the molecule which activity is to be increased in the process of the invention is the gene product with an activity as a “NAD(P)H dehydrogenase (quinone)”, preferably it is the molecule of section (a) or (b) of this paragraph.

[89626] In particular, it was observed that in plants, especially in Arabidopsis thaliana, increasing or generating the activity of a gene product non-targeted with the activity of a “NAD(P)H dehydrogenase (quinone)”, preferably being encoded by a gene comprising the nucleic acid sequence SEQ ID NO. 143614, preferably the coding region thereof, conferred the production of or the increase in 3,4,5-trihydroxypentanoic acid compared with the wild type control.

[89627] The nucleic acid sequence of AvinDRAFT_{—}6679 from Azotobacter vinelandii, e.g. as shown in the respective line in column 5 of Table I, application no. 17, has been published in D. And the activity of the gene product thereof is the activity of electron transfer flavoprotein subunit beta.

[89628] Accordingly, in one embodiment, the process of the present invention for producing fructose in a non-human organism, like a microorganism or a plant or a part thereof, comprises increasing or generating the activity of a gene product with the activity of a gene product conferring the activity of “electron transfer flavoprotein subunit beta”, especially from Azotobacter vinelandii or its functional equivalent or its homolog, e.g. the increase of
[89629] (a) a gene product of a gene comprising the nucleic acid molecule as shown in the respective line in column 5 of Table I (whereby the respective line disclose in column 7 the fine chemical fructose), application no. 17, preferably the coding region thereof, or a homolog or a fragment thereof, and being depicted in the same respective line as said AvinDRAFT_{—}6679, or a functional equivalent or a homolog thereof as shown in column 8 of Table I, application no. 17, preferably the coding region thereof, particularly a homolog or functional equivalent as shown in column 8 of Table I B, application no. 17, and being depicted in the same respective line as said AvinDRAFT_{—}6679, and preferably the activity is increased non-targeted, or
[89630] (b) a polypeptide comprising a polypeptide, a consensus sequence or at least a polypeptide motif as shown in the respective line in column 5 of Table II or in column 8 of Table IV, application no. 17, respectively, and being depicted in the same respective line as said AvinDRAFT_{—}6679, or a functional equivalent or a homolog thereof as depicted in column 8 of Table II, application no. 17, preferably a homolog or functional equivalent as depicted in column 8 of Table II B, application no. 17, and being depicted in the same respective line as said AvinDRAFT_{—}6679, and preferably the activity is increased non-targeted, whereby the respective line disclose in column 7 the fine chemical fructose.

[89631] Accordingly, in one embodiment, the molecule which activity is to be increased in the process of the invention is the gene product with an activity as a “electron transfer flavoprotein subunit beta”, preferably it is the molecule of section (a) or (b) of this paragraph.

[89632] In particular, it was observed that in plants, especially in Arabidopsis thaliana, increasing or generating the activity of a gene product non-targeted with the activity of a “electron transfer flavoprotein subunit beta”, preferably being encoded by a gene comprising the nucleic acid sequence SEQ ID NO. 74729, preferably the coding region thereof, conferred the production of or the increase in fructose compared with the wild type control.

[89633] The nucleic acid sequence of AvinDRAFT_{—}6679 from Azotobacter vinelandii, e.g. as shown in the respective line in column 5 of Table I, application no. 17, has been published in D. And the activity of the gene product thereof is the activity of electron transfer flavoprotein subunit beta.

[89634] Accordingly, in one embodiment, the process of the present invention for producing glucose in a non-human organism, like a microorganism or a plant or a part thereof, comprises increasing or generating the activity of a gene product with the activity of a gene product conferring the activity of “electron transfer flavoprotein subunit beta”, especially from Azotobacter vinelandii or its functional equivalent or its homolog, e.g. the increase of
[89635] (a) a gene product of a gene comprising the nucleic acid molecule as shown in the respective line in column 5 of Table I (whereby the respective line disclose in column 7 the fine chemical glucose), application no. 17, preferably the coding region thereof, or a homolog or a fragment thereof, and being depicted in the same respective line as said AvinDRAFT_{—}6679, or a functional equivalent or a homolog thereof as shown in column 8 of Table I, application no. 17, preferably the coding region thereof, particularly a homolog or functional equivalent as shown in column 8 of Table I B, application no. 17, and being depicted in the same respective line as said AvinDRAFT_{—}6679, and preferably the activity is increased non-targeted, or
[89636] (b) a polypeptide comprising a polypeptide, a consensus sequence or at least a polypeptide motif as shown in the respective line in column 5 of Table II or in column 8 of Table IV, application no. 17, respectively, and being depicted in the same respective line as said AvinDRAFT_{—}6679, or a functional equivalent or a homolog thereof as depicted in column 8 of Table II, application no. 17, preferably a homolog or functional equivalent as depicted in column 8 of Table II B, application no. 17, and being depicted in the same respective line as said AvinDRAFT_{—}6679, and preferably the activity is increased non-targeted, whereby the respective line disclose in column 7 the fine chemical glucose.

[89637] Accordingly, in one embodiment, the molecule which activity is to be increased in the process of the invention is the gene product with an activity as a “electron transfer flavoprotein subunit beta”, preferably it is the molecule of section (a) or (b) of this paragraph.

[89638] In particular, it was observed that in plants, especially in Arabidopsis thaliana, increasing or generating the activity of a gene product non-targeted with the activity of a “electron transfer flavoprotein subunit beta”, preferably being encoded by a gene comprising the nucleic acid sequence SEQ ID NO. 74729, preferably the coding region thereof, conferred the production of or the increase in glucose compared with the wild type control.

[89639] The nucleic acid sequence of AvinDRAFT_{—}6700 from Azotobacter vinelandii, e.g. as shown in the respective line in column 5 of Table I, application no. 17, has been published in D. And the activity of the gene product thereof is the activity of purine nucleoside phosphorylase.

[89640] Accordingly, in one embodiment, the process of the present invention for producing glucose-1-phosphate in a non-human organism, like a microorganism or a plant or a part thereof, comprises increasing or generating the activity of a gene product with the activity of a gene product conferring the activity of “purine nucleoside phosphorylase”, especially from Azotobacter vinelandii or its functional equivalent or its homolog, e.g. the increase of
[89641] (a) a gene product of a gene comprising the nucleic acid molecule as shown in the respective line in column 5 of Table I (whereby the respective line disclose in column 7 the fine chemical glucose-1-phosphate), application no. 17, preferably the coding region thereof, or a homolog or a fragment thereof, and being depicted in the same respective line as said AvinDRAFT_{—}6700, or a functional equivalent or a homolog thereof as shown in column 8 of Table I, application no. 17, preferably the coding region thereof, particularly a homolog or functional equivalent as shown in column 8 of Table I B, application no. 17, and being depicted in the same respective line as said AvinDRAFT_{—}6700, and preferably the activity is increased non-targeted, or
[89642] (b) a polypeptide comprising a polypeptide, a consensus sequence or at least a polypeptide motif as shown in the respective line in column 5 of Table II or in column 8 of Table IV, application no. 17, respectively, and being depicted in the same respective line as said AvinDRAFT_{—}6700, or a functional equivalent or a homolog thereof as depicted in column 8 of Table II, application no. 17, preferably a homolog or functional equivalent as depicted in column 8 of Table II B, application no. 17, and being depicted in the same respective line as said AvinDRAFT_{—}6700, and preferably the activity is increased non-targeted, whereby the respective line disclose in column 7 the fine chemical glucose-1-phosphate.

[89643] Accordingly, in one embodiment, the molecule which activity is to be increased in the process of the invention is the gene product with an activity as a “purine nucleoside phosphorylase”, preferably it is the molecule of section (a) or (b) of this paragraph.

[89644] In particular, it was observed that in plants, especially in Arabidopsis thaliana, increasing or generating the activity of a gene product non-targeted with the activity of a “purine nucleoside phosphorylase”, preferably being encoded by a gene comprising the nucleic acid sequence SEQ ID NO. 34044, preferably the coding region thereof, conferred the production of or the increase in glucose-1-phosphate compared with the wild type control.

[89645] The nucleic acid sequence of AvinDRAFT_{—}6700 from Azotobacter vinelandii, e.g. as shown in the respective line in column 5 of Table I, application no. 17, has been published in D. And the activity of the gene product thereof is the activity of purine nucleoside phosphorylase.

[89646] Accordingly, in one embodiment, the process of the present invention for producing 3,4,5-trihydroxypentanoic acid in a non-human organism, like a microorganism or a plant or a part thereof, comprises increasing or generating the activity of a gene product with the activity of a gene product conferring the activity of “purine nucleoside phosphorylase”, especially from Azotobacter vinelandii or its functional equivalent or its homolog, e.g. the increase of
[89647] (a) a gene product of a gene comprising the nucleic acid molecule as shown in the respective line in column 5 of Table I (whereby the respective line disclose in column 7 the fine chemical 3,4,5-trihydroxypentanoic acid), application no. 17, preferably the coding region thereof, or a homolog or a fragment thereof, and being depicted in the same respective line as said AvinDRAFT_{—}6700, or a functional equivalent or a homolog thereof as shown in column 8 of Table I, application no. 17, preferably the coding region thereof, particularly a homolog or functional equivalent as shown in column 8 of Table I B, application no. 17, and being depicted in the same respective line as said AvinDRAFT_{—}6700, and preferably the activity is increased non-targeted, or
[89648] (b) a polypeptide comprising a polypeptide, a consensus sequence or at least a polypeptide motif as shown in the respective line in column 5 of Table II or in column 8 of Table IV, application no. 17, respectively, and being depicted in the same respective line as said AvinDRAFT_{—}6700, or a functional equivalent or a homolog thereof as depicted in column 8 of Table II, application no. 17, preferably a homolog or functional equivalent as depicted in column 8 of Table II B, application no. 17, and being depicted in the same respective line as said AvinDRAFT_{—}6700, and preferably the activity is increased non-targeted, whereby the respective line disclose in column 7 the fine chemical 3,4,5-trihydroxypentanoic acid.

[89649] Accordingly, in one embodiment, the molecule which activity is to be increased in the process of the invention is the gene product with an activity as a “purine nucleoside phosphorylase”, preferably it is the molecule of section (a) or (b) of this paragraph.

[89650] In particular, it was observed that in plants, especially in Arabidopsis thaliana, increasing or generating the activity of a gene product non-targeted with the activity of a “purine nucleoside phosphorylase”, preferably being encoded by a gene comprising the nucleic acid sequence SEQ ID NO. 34044, preferably the coding region thereof, conferred the production of or the increase in 3,4,5-trihydroxypentanoic acid compared with the wild type control.

[89651] The nucleic acid sequence of AvinDRAFT_{—}6864 from Azotobacter vinelandii, e.g. as shown in the respective line in column 5 of Table I, application no. 17, has been published in D. And the activity of the gene product thereof is the activity of transcriptional regulator protein.

[89652] Accordingly, in one embodiment, the process of the present invention for producing raffinose in a non-human organism, like a microorganism or a plant or a part thereof, comprises increasing or generating the activity of a gene product with the activity of a gene product conferring the activity of “transcriptional regulator protein”, especially from Azotobacter vinelandii or its functional equivalent or its homolog, e.g. the increase of
[89653] (a) a gene product of a gene comprising the nucleic acid molecule as shown in the respective line in column 5 of Table I (whereby the respective line disclose in column 7 the fine chemical raffinose), application no. 17, preferably the coding region thereof, or a homolog or a fragment thereof, and being depicted in the same respective line as said AvinDRAFT_{—}6864, or a functional equivalent or a homolog thereof as shown in column 8 of Table I, application no. 17, preferably the coding region thereof, particularly a homolog or functional equivalent as shown in column 8 of Table I B, application no. 17, and being depicted in the same respective line as said AvinDRAFT_{—}6864, and preferably the activity is increased non-targeted, or
[89654] (b) a polypeptide comprising a polypeptide, a consensus sequence or at least a polypeptide motif as shown in the respective line in column 5 of Table II or in column 8 of Table IV, application no. 17, respectively, and being depicted in the same respective line as said AvinDRAFT_{—}6864, or a functional equivalent or a homolog thereof as depicted in column 8 of Table II, application no. 17, preferably a homolog or functional equivalent as depicted in column 8 of Table II B, application no. 17, and being depicted in the same respective line as said AvinDRAFT_{—}6864, and preferably the activity is increased non-targeted, whereby the respective line disclose in column 7 the fine chemical raffinose.

[89655] Accordingly, in one embodiment, the molecule which activity is to be increased in the process of the invention is the gene product with an activity as a “transcriptional regulator protein”, preferably it is the molecule of section (a) or (b) of this paragraph.

[89656] In particular, it was observed that in plants, especially in Arabidopsis thaliana, increasing or generating the activity of a gene product non-targeted with the activity of a “transcriptional regulator protein”, preferably being encoded by a gene comprising the nucleic acid sequence SEQ ID NO. 34204, preferably the coding region thereof, conferred the production of or the increase in raffinose compared with the wild type control.

[89657] The nucleic acid sequence of AX653549 from Oryza sativa, e.g. as shown in the respective line in column 5 of Table I, application no. 17, has been published in G. And the activity of the gene product thereof is the activity of AX653549-protein.

[89658] Accordingly, in one embodiment, the process of the present invention for producing glucose-1-phosphate in a non-human organism, like a microorganism or a plant or a part thereof, comprises increasing or generating the activity of a gene product with the activity of a gene product conferring the activity of “AX653549-protein”, especially from Oryza sativa or its functional equivalent or its homolog, e.g. the increase of
[89659] (a) a gene product of a gene comprising the nucleic acid molecule as shown in the respective line in column 5 of Table I (whereby the respective line disclose in column 7 the fine chemical glucose-1-phosphate), application no. 17, preferably the coding region thereof, or a homolog or a fragment thereof, and being depicted in the same respective line as said AX653549, or a functional equivalent or a homolog thereof as shown in column 8 of Table I, application no. 17, preferably the coding region thereof, particularly a homolog or functional equivalent as shown in column 8 of Table I B, application no. 17, and being depicted in the same respective line as said AX653549, and preferably the activity is increased non-targeted, or
[89660] (b) a polypeptide comprising a polypeptide, a consensus sequence or at least a polypeptide motif as shown in the respective line in column 5 of Table II or in column 8 of Table IV, application no. 17, respectively, and being depicted in the same respective line as said AX653549, or a functional equivalent or a homolog thereof as depicted in column 8 of Table II, application no. 17, preferably a homolog or functional equivalent as depicted in column 8 of Table II B, application no. 17, and being depicted in the same respective line as said AX653549, and preferably the activity is increased non-targeted, whereby the respective line disclose in column 7 the fine chemical glucose-1-phosphate.

[89661] Accordingly, in one embodiment, the molecule which activity is to be increased in the process of the invention is the gene product with an activity as a “AX653549-protein”, preferably it is the molecule of section (a) or (b) of this paragraph.

[89662] In particular, it was observed that in plants, especially in Arabidopsis thaliana, increasing or generating the activity of a gene product non-targeted with the activity of a “AX653549-protein”, preferably being encoded by a gene comprising the nucleic acid sequence SEQ ID NO. 34301, preferably the coding region thereof, conferred the production of or the increase in glucose-1-phosphate compared with the wild type control.

[89663] The nucleic acid sequence of AY087308 from Arabidopsis thaliana, e.g. as shown in the respective line in column 5 of Table I, application no. 17, has been published in F. And the activity of the gene product thereof is the activity of AY087308-protein.

[89664] Accordingly, in one embodiment, the process of the present invention for producing glucose-1-phosphate in a non-human organism, like a microorganism or a plant or a part thereof, comprises increasing or generating the activity of a gene product with the activity of a gene product conferring the activity of “AY087308-protein”, especially from Arabidopsis thaliana or its functional equivalent or its homolog, e.g. the increase of
[89665] (a) a gene product of a gene comprising the nucleic acid molecule as shown in the respective line in column 5 of Table I (whereby the respective line disclose in column 7 the fine chemical glucose-1-phosphate), application no. 17, preferably the coding region thereof, or a homolog or a fragment thereof, and being depicted in the same respective line as said AY087308, or a functional equivalent or a homolog thereof as shown in column 8 of Table I, application no. 17, preferably the coding region thereof, particularly a homolog or functional equivalent as shown in column 8 of Table I B, application no. 17, and being depicted in the same respective line as said AY087308, and preferably the activity is increased non-targeted, or
[89666] (b) a polypeptide comprising a polypeptide, a consensus sequence or at least a polypeptide motif as shown in the respective line in column 5 of Table II or in column 8 of Table IV, application no. 17, respectively, and being depicted in the same respective line as said AY087308, or a functional equivalent or a homolog thereof as depicted in column 8 of Table II, application no. 17, preferably a homolog or functional equivalent as depicted in column 8 of Table II B, application no. 17, and being depicted in the same respective line as said AY087308, and preferably the activity is increased non-targeted, whereby the respective line disclose in column 7 the fine chemical glucose-1-phosphate.

[89667] Accordingly, in one embodiment, the molecule which activity is to be increased in the process of the invention is the gene product with an activity as a “AY087308-protein”, preferably it is the molecule of section (a) or (b) of this paragraph.

[89668] In particular, it was observed that in plants, especially in Arabidopsis thaliana, increasing or generating the activity of a gene product non-targeted with the activity of a “AY087308-protein”, preferably being encoded by a gene comprising the nucleic acid sequence SEQ ID NO. 34602, preferably the coding region thereof, conferred the production of or the increase in glucose-1-phosphate compared with the wild type control.

[89669] The nucleic acid sequence of AY087308 from Arabidopsis thaliana, e.g. as shown in the respective line in column 5 of Table I, application no. 17, has been published in F. And the activity of the gene product thereof is the activity of AY087308-protein.

[89670] Accordingly, in one embodiment, the process of the present invention for producing myo-inositol in a non-human organism, like a microorganism or a plant or a part thereof, comprises increasing or generating the activity of a gene product with the activity of a gene product conferring the activity of “AY087308-protein”, especially from Arabidopsis thaliana or its functional equivalent or its homolog, e.g. the increase of
[89671] (a) a gene product of a gene comprising the nucleic acid molecule as shown in the respective line in column 5 of Table I (whereby the respective line disclose in column 7 the fine chemical myo-inositol), application no. 17, preferably the coding region thereof, or a homolog or a fragment thereof, and being depicted in the same respective line as said AY087308, or a functional equivalent or a homolog thereof as shown in column 8 of Table I, application no. 17, preferably the coding region thereof, particularly a homolog or functional equivalent as shown in column 8 of Table I B, application no. 17, and being depicted in the same respective line as said AY087308, and preferably the activity is increased non-targeted, or
[89672] (b) a polypeptide comprising a polypeptide, a consensus sequence or at least a polypeptide motif as shown in the respective line in column 5 of Table II or in column 8 of Table IV, application no. 17, respectively, and being depicted in the same respective line as said AY087308, or a functional equivalent or a homolog thereof as depicted in column 8 of Table II, application no. 17, preferably a homolog or functional equivalent as depicted in column 8 of Table II B, application no. 17, and being depicted in the same respective line as said AY087308, and preferably the activity is increased non-targeted, whereby the respective line disclose in column 7 the fine chemical myo-inositol.

[89673] Accordingly, in one embodiment, the molecule which activity is to be increased in the process of the invention is the gene product with an activity as a “AY087308-protein”, preferably it is the molecule of section (a) or (b) of this paragraph.

[89674] In particular, it was observed that in plants, especially in Arabidopsis thaliana, increasing or generating the activity of a gene product non-targeted with the activity of a “AY087308-protein”, preferably being encoded by a gene comprising the nucleic acid sequence SEQ ID NO. 34602, preferably the coding region thereof, conferred the production of or the increase in myo-inositol compared with the wild type control.

[89675] The nucleic acid sequence of AY623894 from Zea mays, e.g. as shown in the respective line in column 5 of Table I, application no. 17, is unpublished. And the activity of the gene product thereof is the activity of pyruvate kinase.

[89676] Accordingly, in one embodiment, the process of the present invention for producing glucose-1-phosphate in a non-human organism, like a microorganism or a plant or a part thereof, comprises increasing or generating the activity of a gene product with the activity of a gene product conferring the activity of “pyruvate kinase”, especially from Zea mays or its functional equivalent or its homolog, e.g. the increase of
[89677] (a) a gene product of a gene comprising the nucleic acid molecule as shown in the respective line in column 5 of Table I (whereby the respective line disclose in column 7 the fine chemical glucose-1-phosphate), application no. 17, preferably the coding region thereof, or a homolog or a fragment thereof, and being depicted in the same respective line as said AY623894, or a functional equivalent or a homolog thereof as shown in column 8 of Table I, application no. 17, preferably the coding region thereof, particularly a homolog or functional equivalent as shown in column 8 of Table I B, application no. 17, and being depicted in the same respective line as said AY623894, and preferably the activity is increased non-targeted, or
[89678] (b) a polypeptide comprising a polypeptide, a consensus sequence or at least a polypeptide motif as shown in the respective line in column 5 of Table II or in column 8 of Table IV, application no. 17, respectively, and being depicted in the same respective line as said AY623894, or a functional equivalent or a homolog thereof as depicted in column 8 of Table II, application no. 17, preferably a homolog or functional equivalent as depicted in column 8 of Table II B, application no. 17, and being depicted in the same respective line as said AY623894, and preferably the activity is increased non-targeted, whereby the respective line disclose in column 7 the fine chemical glucose-1-phosphate.

[89679] Accordingly, in one embodiment, the molecule which activity is to be increased in the process of the invention is the gene product with an activity as a “pyruvate kinase”, preferably it is the molecule of section (a) or (b) of this paragraph.

[89680] In particular, it was observed that in plants, especially in Arabidopsis thaliana, increasing or generating the activity of a gene product non-targeted with the activity of a “pyruvate kinase”, preferably being encoded by a gene comprising the nucleic acid sequence SEQ ID NO. 103433, preferably the coding region thereof, conferred the production of or the increase in glucose-1-phosphate compared with the wild type control.

[89681] The nucleic acid sequence of AY623894 from Zea mays, e.g. as shown in the respective line in column 5 of Table I, application no. 17, is unpublished. And the activity of the gene product thereof is the activity of pyruvate kinase.

[89682] Accordingly, in one embodiment, the process of the present invention for producing 3,4,5-trihydroxypentanoic acid in a non-human organism, like a microorganism or a plant or a part thereof, comprises increasing or generating the activity of a gene product with the activity of a gene product conferring the activity of “pyruvate kinase”, especially from Zea mays or its functional equivalent or its homolog, e.g. the increase of
[89683] (a) a gene product of a gene comprising the nucleic acid molecule as shown in the respective line in column 5 of Table I (whereby the respective line disclose in column 7 the fine chemical 3,4,5-trihydroxypentanoic acid), application no. 17, preferably the coding region thereof, or a homolog or a fragment thereof, and being depicted in the same respective line as said AY623894, or a functional equivalent or a homolog thereof as shown in column 8 of Table I, application no. 17, preferably the coding region thereof, particularly a homolog or functional equivalent as shown in column 8 of Table I B, application no. 17, and being depicted in the same respective line as said AY623894, and preferably the activity is increased non-targeted, or
[89684] (b) a polypeptide comprising a polypeptide, a consensus sequence or at least a polypeptide motif as shown in the respective line in column 5 of Table II or in column 8 of Table IV, application no. 17, respectively, and being depicted in the same respective line as said AY623894, or a functional equivalent or a homolog thereof as depicted in column 8 of Table II, application no. 17, preferably a homolog or functional equivalent as depicted in column 8 of Table II B, application no. 17, and being depicted in the same respective line as said AY623894, and preferably the activity is increased non-targeted, whereby the respective line disclose in column 7 the fine chemical 3,4,5-trihydroxypentanoic acid.

[89685] Accordingly, in one embodiment, the molecule which activity is to be increased in the process of the invention is the gene product with an activity as a “pyruvate kinase”, preferably it is the molecule of section (a) or (b) of this paragraph.

[89686] In particular, it was observed that in plants, especially in Arabidopsis thaliana, increasing or generating the activity of a gene product non-targeted with the activity of a “pyruvate kinase”, preferably being encoded by a gene comprising the nucleic acid sequence SEQ ID NO. 103433, preferably the coding region thereof, conferred the production of or the increase in 3,4,5-trihydroxypentanoic acid compared with the wild type control.

[89687] The nucleic acid sequence of B0004 from Escherichia coli, e.g. as shown in the respective line in column 5 of Table I, application no. 17, has been published in B. And the activity of the gene product thereof is the activity of threonine synthase.

[89688] Accordingly, in one embodiment, the process of the present invention for producing glucose in a non-human organism, like a microorganism or a plant or a part thereof, comprises increasing or generating the activity of a gene product with the activity of a gene product conferring the activity of “threonine synthase”, especially from Escherichia coli or its functional equivalent or its homolog, e.g. the increase of
[89689] (a) a gene product of a gene comprising the nucleic acid molecule as shown in the respective line in column 5 of Table I (whereby the respective line disclose in column 7 the fine chemical glucose), application no. 17, preferably the coding region thereof, or a homolog or a fragment thereof, and being depicted in the same respective line as said B0004, or a functional equivalent or a homolog thereof as shown in column 8 of Table I, application no. 17, preferably the coding region thereof, particularly a homolog or functional equivalent as shown in column 8 of Table I B, application no. 17, and being depicted in the same respective line as said B0004, and preferably the activity is increased plastidic, or
[89690] (b) a polypeptide comprising a polypeptide, a consensus sequence or at least a polypeptide motif as shown in the respective line in column 5 of Table II or in column 8 of Table IV, application no. 17, respectively, and being depicted in the same respective line as said B0004, or a functional equivalent or a homolog thereof as depicted in column 8 of Table II, application no. 17, preferably a homolog or functional equivalent as depicted in column 8 of Table II B, application no. 17, and being depicted in the same respective line as said B0004, and preferably the activity is increased plastidic, whereby the respective line disclose in column 7 the fine chemical glucose.

[89691] Accordingly, in one embodiment, the molecule which activity is to be increased in the process of the invention is the gene product with an activity as a “threonine synthase”, preferably it is the molecule of section (a) or (b) of this paragraph.

[89692] In particular, it was observed that in plants, especially in Arabidopsis thaliana, increasing or generating the activity of a gene product plastidic with the activity of a “threonine synthase”, preferably being encoded by a gene comprising the nucleic acid sequence SEQ ID NO. 34889, preferably the coding region thereof, conferred the production of or the increase in glucose compared with the wild type control.

[89693] The nucleic acid sequence of B0004 from Escherichia coli, e.g. as shown in the respective line in column 5 of Table I, application no. 17, has been published in B. And the activity of the gene product thereof is the activity of threonine synthase.

[89694] Accordingly, in one embodiment, the process of the present invention for producing sucrose in a non-human organism, like a microorganism or a plant or a part thereof, comprises increasing or generating the activity of a gene product with the activity of a gene product conferring the activity of “threonine synthase”, especially from Escherichia coli or its functional equivalent or its homolog, e.g. the increase of
[89695] (a) a gene product of a gene comprising the nucleic acid molecule as shown in the respective line in column 5 of Table I (whereby the respective line disclose in column 7 the fine chemical sucrose), application no. 17, preferably the coding region thereof, or a homolog or a fragment thereof, and being depicted in the same respective line as said B0004, or a functional equivalent or a homolog thereof as shown in column 8 of Table I, application no. 17, preferably the coding region thereof, particularly a homolog or functional equivalent as shown in column 8 of Table I B, application no. 17, and being depicted in the same respective line as said B0004, and preferably the activity is increased plastidic, or
[89696] (b) a polypeptide comprising a polypeptide, a consensus sequence or at least a polypeptide motif as shown in the respective line in column 5 of Table II or in column 8 of Table IV, application no. 17, respectively, and being depicted in the same respective line as said B0004, or a functional equivalent or a homolog thereof as depicted in column 8 of Table II, application no. 17, preferably a homolog or functional equivalent as depicted in column 8 of Table II B, application no. 17, and being depicted in the same respective line as said B0004, and preferably the activity is increased plastidic, whereby the respective line disclose in column 7 the fine chemical sucrose.

[89697] Accordingly, in one embodiment, the molecule which activity is to be increased in the process of the invention is the gene product with an activity as a “threonine synthase”, preferably it is the molecule of section (a) or (b) of this paragraph.

[89698] In particular, it was observed that in plants, especially in Arabidopsis thaliana, increasing or generating the activity of a gene product plastidic with the activity of a “threonine synthase”, preferably being encoded by a gene comprising the nucleic acid sequence SEQ ID NO. 34889, preferably the coding region thereof, conferred the production of or the increase in sucrose compared with the wild type control.

[89699] The nucleic acid sequence of B0050 from Escherichia coli, e.g. as shown in the respective line in column 5 of Table I, application no. 17, has been published in B. And the activity of the gene product thereof is the activity of b0050-protein.

[89700] Accordingly, in one embodiment, the process of the present invention for producing 3,4,5-trihydroxypentanoic acid in a non-human organism, like a microorganism or a plant or a part thereof, comprises increasing or generating the activity of a gene product with the activity of a gene product conferring the activity of “b0050-protein”, especially from Escherichia coli or its functional equivalent or its homolog, e.g. the increase of
[89701] (a) a gene product of a gene comprising the nucleic acid molecule as shown in the respective line in column 5 of Table I (whereby the respective line disclose in column 7 the fine chemical 3,4,5-trihydroxypentanoic acid), application no. 17, preferably the coding region thereof, or a homolog or a fragment thereof, and being depicted in the same respective line as said B0050, or a functional equivalent or a homolog thereof as shown in column 8 of Table I, application no. 17, preferably the coding region thereof, particularly a homolog or functional equivalent as shown in column 8 of Table I B, application no. 17, and being depicted in the same respective line as said B0050, and preferably the activity is increased non-targeted, or
[89702] (b) a polypeptide comprising a polypeptide, a consensus sequence or at least a polypeptide motif as shown in the respective line in column 5 of Table II or in column 8 of Table IV, application no. 17, respectively, and being depicted in the same respective line as said B0050, or a functional equivalent or a homolog thereof as depicted in column 8 of Table II, application no. 17, preferably a homolog or functional equivalent as depicted in column 8 of Table II B, application no. 17, and being depicted in the same respective line as said B0050, and preferably the activity is increased non-targeted, whereby the respective line disclose in column 7 the fine chemical 3,4,5-trihydroxypentanoic acid.

[89703] Accordingly, in one embodiment, the molecule which activity is to be increased in the process of the invention is the gene product with an activity as a “b0050-protein”, preferably it is the molecule of section (a) or (b) of this paragraph.

[89704] In particular, it was observed that in plants, especially in Arabidopsis thaliana, increasing or generating the activity of a gene product non-targeted with the activity of a “b0050-protein”, preferably being encoded by a gene comprising the nucleic acid sequence SEQ ID NO. 103958, preferably the coding region thereof, conferred the production of or the increase in 3,4,5-trihydroxypentanoic acid compared with the wild type control.

[89705] The nucleic acid sequence of B0061 from Escherichia coli, e.g. as shown in the respective line in column 5 of Table I, application no. 17, has been published in B. And the activity of the gene product thereof is the activity of L-ribulose-5-phosphate 4-epimerase.

[89706] Accordingly, in one embodiment, the process of the present invention for producing raffinose in a non-human organism, like a microorganism or a plant or a part thereof, comprises increasing or generating the activity of a gene product with the activity of a gene product conferring the activity of “L-ribulose-5-phosphate 4-epimerase”, especially from Escherichia coli or its functional equivalent or its homolog, e.g. the increase of
[89707] (a) a gene product of a gene comprising the nucleic acid molecule as shown in the respective line in column 5 of Table I (whereby the respective line disclose in column 7 the fine chemical raffinose), application no. 17, preferably the coding region thereof, or a homolog or a fragment thereof, and being depicted in the same respective line as said B0061, or a functional equivalent or a homolog thereof as shown in column 8 of Table I, application no. 17, preferably the coding region thereof, particularly a homolog or functional equivalent as shown in column 8 of Table I B, application no. 17, and being depicted in the same respective line as said B0061, and preferably the activity is increased non-targeted, or
[89708] (b) a polypeptide comprising a polypeptide, a consensus sequence or at least a polypeptide motif as shown in the respective line in column 5 of Table II or in column 8 of Table IV, application no. 17, respectively, and being depicted in the same respective line as said B0061, or a functional equivalent or a homolog thereof as depicted in column 8 of Table II, application no. 17, preferably a homolog or functional equivalent as depicted in column 8 of Table II B, application no. 17, and being depicted in the same respective line as said B0061, and preferably the activity is increased non-targeted, whereby the respective line disclose in column 7 the fine chemical raffinose.

[89709] Accordingly, in one embodiment, the molecule which activity is to be increased in the process of the invention is the gene product with an activity as a “L-ribulose-5-phosphate 4-epimerase”, preferably it is the molecule of section (a) or (b) of this paragraph.

[89710] In particular, it was observed that in plants, especially in Arabidopsis thaliana, increasing or generating the activity of a gene product non-targeted with the activity of a “L-ribulose-5-phosphate 4-epimerase”, preferably being encoded by a gene comprising the nucleic acid sequence SEQ ID NO. 35204, preferably the coding region thereof, conferred the production of or the increase in raffinose compared with the wild type control.

[89711] The nucleic acid sequence of B0124 from Escherichia coli, e.g. as shown in the respective line in column 5 of Table I, application no. 17, has been published in B. And the activity of the gene product thereof is the activity of glucose dehydrogenase.

[89712] Accordingly, in one embodiment, the process of the present invention for producing sucrose in a non-human organism, like a microorganism or a plant or a part thereof, comprises increasing or generating the activity of a gene product with the activity of a gene product conferring the activity of “glucose dehydrogenase”, especially from Escherichia coli or its functional equivalent or its homolog, e.g. the increase of
[89713] (a) a gene product of a gene comprising the nucleic acid molecule as shown in the respective line in column 5 of Table I (whereby the respective line disclose in column 7 the fine chemical sucrose), application no. 17, preferably the coding region thereof, or a homolog or a fragment thereof, and being depicted in the same respective line as said B0124, or a functional equivalent or a homolog thereof as shown in column 8 of Table I, application no. 17, preferably the coding region thereof, particularly a homolog or functional equivalent as shown in column 8 of Table I B, application no. 17, and being depicted in the same respective line as said B0124, and preferably the activity is increased non-targeted, or
[89714] (b) a polypeptide comprising a polypeptide, a consensus sequence or at least a polypeptide motif as shown in the respective line in column 5 of Table II or in column 8 of Table IV, application no. 17, respectively, and being depicted in the same respective line as said B0124, or a functional equivalent or a homolog thereof as depicted in column 8 of Table II, application no. 17, preferably a homolog or functional equivalent as depicted in column 8 of Table II B, application no. 17, and being depicted in the same respective line as said B0124, and preferably the activity is increased non-targeted, whereby the respective line disclose in column 7 the fine chemical sucrose.

[89715] Accordingly, in one embodiment, the molecule which activity is to be increased in the process of the invention is the gene product with an activity as a “glucose dehydrogenase”, preferably it is the molecule of section (a) or (b) of this paragraph.

[89716] In particular, it was observed that in plants, especially in Arabidopsis thaliana, increasing or generating the activity of a gene product non-targeted with the activity of a “glucose dehydrogenase”, preferably being encoded by a gene comprising the nucleic acid sequence SEQ ID NO. 35482, preferably the coding region thereof, conferred the production of or the increase in sucrose compared with the wild type control.

[89717] The nucleic acid sequence of B0161 from Escherichia coli, e.g. as shown in the respective line in column 5 of Table I, application no. 17, has been published in B. And the activity of the gene product thereof is the activity of serine protease.

[89718] Accordingly, in one embodiment, the process of the present invention for producing glucose-1-phosphate in a non-human organism, like a microorganism or a plant or a part thereof, comprises increasing or generating the activity of a gene product with the activity of a gene product conferring the activity of “serine protease”, especially from Escherichia coli or its functional equivalent or its homolog, e.g. the increase of
[89719] (a) a gene product of a gene comprising the nucleic acid molecule as shown in the respective line in column 5 of Table I (whereby the respective line disclose in column 7 the fine chemical glucose-1-phosphate), application no. 17, preferably the coding region thereof, or a homolog or a fragment thereof, and being depicted in the same respective line as said B0161, or a functional equivalent or a homolog thereof as shown in column 8 of Table I, application no. 17, preferably the coding region thereof, particularly a homolog or functional equivalent as shown in column 8 of Table I B, application no. 17, and being depicted in the same respective line as said B0161, and preferably the activity is increased non-targeted, or
[89720] (b) a polypeptide comprising a polypeptide, a consensus sequence or at least a polypeptide motif as shown in the respective line in column 5 of Table II or in column 8 of Table IV, application no. 17, respectively, and being depicted in the same respective line as said B0161, or a functional equivalent or a homolog thereof as depicted in column 8 of Table II, application no. 17, preferably a homolog or functional equivalent as depicted in column 8 of Table II B, application no. 17, and being depicted in the same respective line as said B0161, and preferably the activity is increased non-targeted, whereby the respective line disclose in column 7 the fine chemical glucose-1-phosphate.

[89721] Accordingly, in one embodiment, the molecule which activity is to be increased in the process of the invention is the gene product with an activity as a “serine protease”, preferably it is the molecule of section (a) or (b) of this paragraph.

[89722] In particular, it was observed that in plants, especially in Arabidopsis thaliana, increasing or generating the activity of a gene product non-targeted with the activity of a “serine protease”, preferably being encoded by a gene comprising the nucleic acid sequence SEQ ID NO. 7081, preferably the coding region thereof, conferred the production of or the increase in glucose-1-phosphate compared with the wild type control.

[89723] The nucleic acid sequence of B0161 from Escherichia coli, e.g. as shown in the respective line in column 5 of Table I, application no. 17, has been published in B. And the activity of the gene product thereof is the activity of serine protease.

[89724] Accordingly, in one embodiment, the process of the present invention for producing myo-inositol in a non-human organism, like a microorganism or a plant or a part thereof, comprises increasing or generating the activity of a gene product with the activity of a gene product conferring the activity of “serine protease”, especially from Escherichia coli or its functional equivalent or its homolog, e.g. the increase of
[89725] (a) a gene product of a gene comprising the nucleic acid molecule as shown in the respective line in column 5 of Table I (whereby the respective line disclose in column 7 the fine chemical myo-inositol), application no. 17, preferably the coding region thereof, or a homolog or a fragment thereof, and being depicted in the same respective line as said B0161, or a functional equivalent or a homolog thereof as shown in column 8 of Table I, application no. 17, preferably the coding region thereof, particularly a homolog or functional equivalent as shown in column 8 of Table I B, application no. 17, and being depicted in the same respective line as said B0161, and preferably the activity is increased non-targeted, or
[89726] (b) a polypeptide comprising a polypeptide, a consensus sequence or at least a polypeptide motif as shown in the respective line in column 5 of Table II or in column 8 of Table IV, application no. 17, respectively, and being depicted in the same respective line as said B0161, or a functional equivalent or a homolog thereof as depicted in column 8 of Table II, application no. 17, preferably a homolog or functional equivalent as depicted in column 8 of Table II B, application no. 17, and being depicted in the same respective line as said B0161, and preferably the activity is increased non-targeted, whereby the respective line disclose in column 7 the fine chemical myo-inositol.

[89727] Accordingly, in one embodiment, the molecule which activity is to be increased in the process of the invention is the gene product with an activity as a “serine protease”, preferably it is the molecule of section (a) or (b) of this paragraph.

[89728] In particular, it was observed that in plants, especially in Arabidopsis thaliana, increasing or generating the activity of a gene product non-targeted with the activity of a “serine protease”, preferably being encoded by a gene comprising the nucleic acid sequence SEQ ID NO. 7081, preferably the coding region thereof, conferred the production of or the increase in myo-inositol compared with the wild type control.

[89729] The nucleic acid sequence of B0221 from Escherichia coli, e.g. as shown in the respective line in column 5 of Table I, application no. 17, has been published in B. And the activity of the gene product thereof is the activity of acyl-CoA dehydrogenase.

[89730] Accordingly, in one embodiment, the process of the present invention for producing sucrose in a non-human organism, like a microorganism or a plant or a part thereof, comprises increasing or generating the activity of a gene product with the activity of a gene product conferring the activity of “acyl-CoA dehydrogenase”, especially from Escherichia coli or its functional equivalent or its homolog, e.g. the increase of
[89731] (a) a gene product of a gene comprising the nucleic acid molecule as shown in the respective line in column 5 of Table I (whereby the respective line disclose in column 7 the fine chemical sucrose), application no. 17, preferably the coding region thereof, or a homolog or a fragment thereof, and being depicted in the same respective line as said B0221, or a functional equivalent or a homolog thereof as shown in column 8 of Table I, application no. 17, preferably the coding region thereof, particularly a homolog or functional equivalent as shown in column 8 of Table I B, application no. 17, and being depicted in the same respective line as said B0221, and preferably the activity is increased non-targeted, or
[89732] (b) a polypeptide comprising a polypeptide, a consensus sequence or at least a polypeptide motif as shown in the respective line in column 5 of Table II or in column 8 of Table IV, application no. 17, respectively, and being depicted in the same respective line as said B0221, or a functional equivalent or a homolog thereof as depicted in column 8 of Table II, application no. 17, preferably a homolog or functional equivalent as depicted in column 8 of Table II B, application no. 17, and being depicted in the same respective line as said B0221, and preferably the activity is increased non-targeted, whereby the respective line disclose in column 7 the fine chemical sucrose.

[89733] Accordingly, in one embodiment, the molecule which activity is to be increased in the process of the invention is the gene product with an activity as a “acyl-CoA dehydrogenase”, preferably it is the molecule of section (a) or (b) of this paragraph.

[89734] In particular, it was observed that in plants, especially in Arabidopsis thaliana, increasing or generating the activity of a gene product non-targeted with the activity of a “acyl-CoA dehydrogenase”, preferably being encoded by a gene comprising the nucleic acid sequence SEQ ID NO. 35590, preferably the coding region thereof, conferred the production of or the increase in sucrose compared with the wild type control.

[89735] The nucleic acid sequence of B0251 from Escherichia coli, e.g. as shown in the respective line in column 5 of Table I, application no. 17, has been published in B. And the activity of the gene product thereof is the activity of b0251-protein.

[89736] Accordingly, in one embodiment, the process of the present invention for producing glucose-1-phosphate in a non-human organism, like a microorganism or a plant or a part thereof, comprises increasing or generating the activity of a gene product with the activity of a gene product conferring the activity of “b0251-protein”, especially from Escherichia coli or its functional equivalent or its homolog, e.g. the increase of
[89737] (a) a gene product of a gene comprising the nucleic acid molecule as shown in the respective line in column 5 of Table I (whereby the respective line disclose in column 7 the fine chemical glucose-1-phosphate), application no. 17, preferably the coding region thereof, or a homolog or a fragment thereof, and being depicted in the same respective line as said B0251, or a functional equivalent or a homolog thereof as shown in column 8 of Table I, application no. 17, preferably the coding region thereof, particularly a homolog or functional equivalent as shown in column 8 of Table I B, application no. 17, and being depicted in the same respective line as said B0251, and preferably the activity is increased non-targeted, or
[89738] (b) a polypeptide comprising a polypeptide, a consensus sequence or at least a polypeptide motif as shown in the respective line in column 5 of Table II or in column 8 of Table IV, application no. 17, respectively, and being depicted in the same respective line as said B0251, or a functional equivalent or a homolog thereof as depicted in column 8 of Table II, application no. 17, preferably a homolog or functional equivalent as depicted in column 8 of Table II B, application no. 17, and being depicted in the same respective line as said B0251, and preferably the activity is increased non-targeted, whereby the respective line disclose in column 7 the fine chemical glucose-1-phosphate.

[89739] Accordingly, in one embodiment, the molecule which activity is to be increased in the process of the invention is the gene product with an activity as a “b0251-protein”, preferably it is the molecule of section (a) or (b) of this paragraph.

[89740] In particular, it was observed that in plants, especially in Arabidopsis thaliana, increasing or generating the activity of a gene product non-targeted with the activity of a “b0251-protein”, preferably being encoded by a gene comprising the nucleic acid sequence SEQ ID NO. 143742, preferably the coding region thereof, conferred the production of or the increase in glucose-1-phosphate compared with the wild type control.

[89741] The nucleic acid sequence of B0312 from Escherichia coli, e.g. as shown in the respective line in column 5 of Table I, application no. 17, has been published in B. And the activity of the gene product thereof is the activity of betaine aldehyde dehydrogenase.

[89742] Accordingly, in one embodiment, the process of the present invention for producing fructose in a non-human organism, like a microorganism or a plant or a part thereof, comprises increasing or generating the activity of a gene product with the activity of a gene product conferring the activity of “betaine aldehyde dehydrogenase”, especially from Escherichia coli or its functional equivalent or its homolog, e.g. the increase of
[89743] (a) a gene product of a gene comprising the nucleic acid molecule as shown in the respective line in column 5 of Table I (whereby the respective line disclose in column 7 the fine chemical fructose), application no. 17, preferably the coding region thereof, or a homolog or a fragment thereof, and being depicted in the same respective line as said B0312, or a functional equivalent or a homolog thereof as shown in column 8 of Table I, application no. 17, preferably the coding region thereof, particularly a homolog or functional equivalent as shown in column 8 of Table I B, application no. 17, and being depicted in the same respective line as said B0312, and preferably the activity is increased non-targeted, or
[89744] (b) a polypeptide comprising a polypeptide, a consensus sequence or at least a polypeptide motif as shown in the respective line in column 5 of Table II or in column 8 of Table IV, application no. 17, respectively, and being depicted in the same respective line as said B0312, or a functional equivalent or a homolog thereof as depicted in column 8 of Table II, application no. 17, preferably a homolog or functional equivalent as depicted in column 8 of Table II B, application no. 17, and being depicted in the same respective line as said B0312, and preferably the activity is increased non-targeted, whereby the respective line disclose in column 7 the fine chemical fructose.

[89745] Accordingly, in one embodiment, the molecule which activity is to be increased in the process of the invention is the gene product with an activity as a “betaine aldehyde dehydrogenase”, preferably it is the molecule of section (a) or (b) of this paragraph.

[89746] In particular, it was observed that in plants, especially in Arabidopsis thaliana, increasing or generating the activity of a gene product non-targeted with the activity of a “betaine aldehyde dehydrogenase”, preferably being encoded by a gene comprising the nucleic acid sequence SEQ ID NO. 121111, preferably the coding region thereof, conferred the production of or the increase in fructose compared with the wild type control.

[89747] The nucleic acid sequence of B0344 from Escherichia coli, e.g. as shown in the respective line in column 5 of Table I, application no. 17, has been published in B. And the activity of the gene product thereof is the activity of beta-galactosidase.

[89748] Accordingly, in one embodiment, the process of the present invention for producing melibiose in a non-human organism, like a microorganism or a plant or a part thereof, comprises increasing or generating the activity of a gene product with the activity of a gene product conferring the activity of “beta-galactosidase”, especially from Escherichia coli or its functional equivalent or its homolog, e.g. the increase of
[89749] (a) a gene product of a gene comprising the nucleic acid molecule as shown in the respective line in column 5 of Table I (whereby the respective line disclose in column 7 the fine chemical melibiose), application no. 17, preferably the coding region thereof, or a homolog or a fragment thereof, and being depicted in the same respective line as said B0344, or a functional equivalent or a homolog thereof as shown in column 8 of Table I, application no. 17, preferably the coding region thereof, particularly a homolog or functional equivalent as shown in column 8 of Table I B, application no. 17, and being depicted in the same respective line as said B0344, and preferably the activity is increased plastidic, or
[89750] (b) a polypeptide comprising a polypeptide, a consensus sequence or at least a polypeptide motif as shown in the respective line in column 5 of Table II or in column 8 of Table IV, application no. 17, respectively, and being depicted in the same respective line as said B0344, or a functional equivalent or a homolog thereof as depicted in column 8 of Table II, application no. 17, preferably a homolog or functional equivalent as depicted in column 8 of Table II B, application no. 17, and being depicted in the same respective line as said B0344, and preferably the activity is increased plastidic, whereby the respective line disclose in column 7 the fine chemical melibiose.

[89751] Accordingly, in one embodiment, the molecule which activity is to be increased in the process of the invention is the gene product with an activity as a “beta-galactosidase”, preferably it is the molecule of section (a) or (b) of this paragraph.

[89752] In particular, it was observed that in plants, especially in Arabidopsis thaliana, increasing or generating the activity of a gene product plastidic with the activity of a “beta-galactosidase”, preferably being encoded by a gene comprising the nucleic acid sequence SEQ ID NO. 35733, preferably the coding region thereof, conferred the production of or the increase in melibiose compared with the wild type control.

[89753] The nucleic acid sequence of B0362 from Escherichia coli, e.g. as shown in the respective line in column 5 of Table I, application no. 17, has been published in B. And the activity of the gene product thereof is the activity of b0362-protein.

[89754] Accordingly, in one embodiment, the process of the present invention for producing glucose-1-phosphate in a non-human organism, like a microorganism or a plant or a part thereof, comprises increasing or generating the activity of a gene product with the activity of a gene product conferring the activity of “b0362-protein”, especially from Escherichia coli or its functional equivalent or its homolog, e.g. the increase of
[89755] (a) a gene product of a gene comprising the nucleic acid molecule as shown in the respective line in column 5 of Table I (whereby the respective line disclose in column 7 the fine chemical glucose-1-phosphate), application no. 17, preferably the coding region thereof, or a homolog or a fragment thereof, and being depicted in the same respective line as said B0362, or a functional equivalent or a homolog thereof as shown in column 8 of Table I, application no. 17, preferably the coding region thereof, particularly a homolog or functional equivalent as shown in column 8 of Table I B, application no. 17, and being depicted in the same respective line as said B0362, and preferably the activity is increased non-targeted, or
[89756] (b) a polypeptide comprising a polypeptide, a consensus sequence or at least a polypeptide motif as shown in the respective line in column 5 of Table II or in column 8 of Table IV, application no. 17, respectively, and being depicted in the same respective line as said B0362, or a functional equivalent or a homolog thereof as depicted in column 8 of Table II, application no. 17, preferably a homolog or functional equivalent as depicted in column 8 of Table II B, application no. 17, and being depicted in the same respective line as said B0362, and preferably the activity is increased non-targeted, whereby the respective line disclose in column 7 the fine chemical glucose-1-phosphate.

[89757] Accordingly, in one embodiment, the molecule which activity is to be increased in the process of the invention is the gene product with an activity as a “b0362-protein”, preferably it is the molecule of section (a) or (b) of this paragraph.

[89758] In particular, it was observed that in plants, especially in Arabidopsis thaliana, increasing or generating the activity of a gene product non-targeted with the activity of a “b0362-protein”, preferably being encoded by a gene comprising the nucleic acid sequence SEQ ID NO. 143761, preferably the coding region thereof, conferred the production of or the increase in glucose-1-phosphate compared with the wild type control.

[89759] The nucleic acid sequence of B0376 from Escherichia coli, e.g. as shown in the respective line in column 5 of Table I, application no. 17, has been published in B. And the activity of the gene product thereof is the activity of penicillin-binding protein.

[89760] Accordingly, in one embodiment, the process of the present invention for producing glucose-1-phosphate in a non-human organism, like a microorganism or a plant or a part thereof, comprises increasing or generating the activity of a gene product with the activity of a gene product conferring the activity of “penicillin-binding protein”, especially from Escherichia coli or its functional equivalent or its homolog, e.g. the increase of
[89761] (a) a gene product of a gene comprising the nucleic acid molecule as shown in the respective line in column 5 of Table I (whereby the respective line disclose in column 7 the fine chemical glucose-1-phosphate), application no. 17, preferably the coding region thereof, or a homolog or a fragment thereof, and being depicted in the same respective line as said B0376, or a functional equivalent or a homolog thereof as shown in column 8 of Table I, application no. 17, preferably the coding region thereof, particularly a homolog or functional equivalent as shown in column 8 of Table I B, application no. 17, and being depicted in the same respective line as said B0376, and preferably the activity is increased non-targeted, or
[89762] (b) a polypeptide comprising a polypeptide, a consensus sequence or at least a polypeptide motif as shown in the respective line in column 5 of Table II or in column 8 of Table IV, application no. 17, respectively, and being depicted in the same respective line as said B0376, or a functional equivalent or a homolog thereof as depicted in column 8 of Table II, application no. 17, preferably a homolog or functional equivalent as depicted in column 8 of Table II B, application no. 17, and being depicted in the same respective line as said B0376, and preferably the activity is increased non-targeted, whereby the respective line disclose in column 7 the fine chemical glucose-1-phosphate.

[89763] Accordingly, in one embodiment, the molecule which activity is to be increased in the process of the invention is the gene product with an activity as a “penicillin-binding protein”, preferably it is the molecule of section (a) or (b) of this paragraph.

[89764] In particular, it was observed that in plants, especially in Arabidopsis thaliana, increasing or generating the activity of a gene product non-targeted with the activity of a “penicillin-binding protein”, preferably being encoded by a gene comprising the nucleic acid sequence SEQ ID NO. 143771, preferably the coding region thereof, conferred the production of or the increase in glucose-1-phosphate compared with the wild type control.

[89765] The nucleic acid sequence of B0449 from Escherichia coli, e.g. as shown in the respective line in column 5 of Table I, application no. 17, has been published in B. And the activity of the gene product thereof is the activity of ATP-binding component of a transport system.

[89766] Accordingly, in one embodiment, the process of the present invention for producing fructose in a non-human organism, like a microorganism or a plant or a part thereof, comprises increasing or generating the activity of a gene product with the activity of a gene product conferring the activity of “ATP-binding component of a transport system”, especially from Escherichia coli or its functional equivalent or its homolog, e.g. the increase of
[89767] (a) a gene product of a gene comprising the nucleic acid molecule as shown in the respective line in column 5 of Table I (whereby the respective line disclose in column 7 the fine chemical fructose), application no. 17, preferably the coding region thereof, or a homolog or a fragment thereof, and being depicted in the same respective line as said B0449, or a functional equivalent or a homolog thereof as shown in column 8 of Table I, application no. 17, preferably the coding region thereof, particularly a homolog or functional equivalent as shown in column 8 of Table I B, application no. 17, and being depicted in the same respective line as said B0449, and preferably the activity is increased non-targeted, or
[89768] (b) a polypeptide comprising a polypeptide, a consensus sequence or at least a polypeptide motif as shown in the respective line in column 5 of Table II or in column 8 of Table IV, application no. 17, respectively, and being depicted in the same respective line as said B0449, or a functional equivalent or a homolog thereof as depicted in column 8 of Table II, application no. 17, preferably a homolog or functional equivalent as depicted in column 8 of Table II B, application no. 17, and being depicted in the same respective line as said B0449, and preferably the activity is increased non-targeted, whereby the respective line disclose in column 7 the fine chemical fructose.

[89769] Accordingly, in one embodiment, the molecule which activity is to be increased in the process of the invention is the gene product with an activity as a “ATP-binding component of a transport system”, preferably it is the molecule of section (a) or (b) of this paragraph.

[89770] In particular, it was observed that in plants, especially in Arabidopsis thaliana, increasing or generating the activity of a gene product non-targeted with the activity of a “ATP-binding component of a transport system”, preferably being encoded by a gene comprising the nucleic acid sequence SEQ ID NO. 7333, preferably the coding region thereof, conferred the production of or the increase in fructose compared with the wild type control.

[89771] The nucleic acid sequence of B0449 from Escherichia coli, e.g. as shown in the respective line in column 5 of Table I, application no. 17, has been published in B. And the activity of the gene product thereof is the activity of ATP-binding component of a transport system.

[89772] Accordingly, in one embodiment, the process of the present invention for producing glucose in a non-human organism, like a microorganism or a plant or a part thereof, comprises increasing or generating the activity of a gene product with the activity of a gene product conferring the activity of “ATP-binding component of a transport system”, especially from Escherichia coli or its functional equivalent or its homolog, e.g. the increase of
[89773] (a) a gene product of a gene comprising the nucleic acid molecule as shown in the respective line in column 5 of Table I (whereby the respective line disclose in column 7 the fine chemical glucose), application no. 17, preferably the coding region thereof, or a homolog or a fragment thereof, and being depicted in the same respective line as said B0449, or a functional equivalent or a homolog thereof as shown in column 8 of Table I, application no. 17, preferably the coding region thereof, particularly a homolog or functional equivalent as shown in column 8 of Table I B, application no. 17, and being depicted in the same respective line as said B0449, and preferably the activity is increased non-targeted, or
[89774] (b) a polypeptide comprising a polypeptide, a consensus sequence or at least a polypeptide motif as shown in the respective line in column 5 of Table II or in column 8 of Table IV, application no. 17, respectively, and being depicted in the same respective line as said B0449, or a functional equivalent or a homolog thereof as depicted in column 8 of Table II, application no. 17, preferably a homolog or functional equivalent as depicted in column 8 of Table II B, application no. 17, and being depicted in the same respective line as said B0449, and preferably the activity is increased non-targeted, whereby the respective line disclose in column 7 the fine chemical glucose.

[89775] Accordingly, in one embodiment, the molecule which activity is to be increased in the process of the invention is the gene product with an activity as a “ATP-binding component of a transport system”, preferably it is the molecule of section (a) or (b) of this paragraph.

[89776] In particular, it was observed that in plants, especially in Arabidopsis thaliana, increasing or generating the activity of a gene product non-targeted with the activity of a “ATP-binding component of a transport system”, preferably being encoded by a gene comprising the nucleic acid sequence SEQ ID NO. 7333, preferably the coding region thereof, conferred the production of or the increase in glucose compared with the wild type control.

[89777] The nucleic acid sequence of B0486 from Escherichia coli, e.g. as shown in the respective line in column 5 of Table I, application no. 17, has been published in B. And the activity of the gene product thereof is the activity of membrane transport protein.

[89778] Accordingly, in one embodiment, the process of the present invention for producing glucose in a non-human organism, like a microorganism or a plant or a part thereof, comprises increasing or generating the activity of a gene product with the activity of a gene product conferring the activity of “membrane transport protein”, especially from Escherichia coli or its functional equivalent or its homolog, e.g. the increase of
[89779] (a) a gene product of a gene comprising the nucleic acid molecule as shown in the respective line in column 5 of Table I (whereby the respective line disclose in column 7 the fine chemical glucose), application no. 17, preferably the coding region thereof, or a homolog or a fragment thereof, and being depicted in the same respective line as said B0486, or a functional equivalent or a homolog thereof as shown in column 8 of Table I, application no. 17, preferably the coding region thereof, particularly a homolog or functional equivalent as shown in column 8 of Table I B, application no. 17, and being depicted in the same respective line as said B0486, and preferably the activity is increased non-targeted, or
[89780] (b) a polypeptide comprising a polypeptide, a consensus sequence or at least a polypeptide motif as shown in the respective line in column 5 of Table II or in column 8 of Table IV, application no. 17, respectively, and being depicted in the same respective line as said B0486, or a functional equivalent or a homolog thereof as depicted in column 8 of Table II, application no. 17, preferably a homolog or functional equivalent as depicted in column 8 of Table II B, application no. 17, and being depicted in the same respective line as said B0486, and preferably the activity is increased non-targeted, whereby the respective line disclose in column 7 the fine chemical glucose.

[89781] Accordingly, in one embodiment, the molecule which activity is to be increased in the process of the invention is the gene product with an activity as a “membrane transport protein”, preferably it is the molecule of section (a) or (b) of this paragraph.

[89782] In particular, it was observed that in plants, especially in Arabidopsis thaliana, increasing or generating the activity of a gene product non-targeted with the activity of a “membrane transport protein”, preferably being encoded by a gene comprising the nucleic acid sequence SEQ ID NO. 7686, preferably the coding region thereof, conferred the production of or the increase in glucose compared with the wild type control.

[89783] The nucleic acid sequence of B0488 from Escherichia coli, e.g. as shown in the respective line in column 5 of Table I, application no. 17, has been published in B. And the activity of the gene product thereof is the activity of b0488-protein.

[89784] Accordingly, in one embodiment, the process of the present invention for producing saccharic acid in a non-human organism, like a microorganism or a plant or a part thereof, comprises increasing or generating the activity of a gene product with the activity of a gene product conferring the activity of “b0488-protein”, especially from Escherichia coli or its functional equivalent or its homolog, e.g. the increase of
[89785] (a) a gene product of a gene comprising the nucleic acid molecule as shown in the respective line in column 5 of Table I (whereby the respective line disclose in column 7 the fine chemical saccharic acid), application no. 17, preferably the coding region thereof, or a homolog or a fragment thereof, and being depicted in the same respective line as said B0488, or a functional equivalent or a homolog thereof as shown in column 8 of Table I, application no. 17, preferably the coding region thereof, particularly a homolog or functional equivalent as shown in column 8 of Table I B, application no. 17, and being depicted in the same respective line as said B0488, and preferably the activity is increased plastidic, or
[89786] (b) a polypeptide comprising a polypeptide, a consensus sequence or at least a polypeptide motif as shown in the respective line in column 5 of Table II or in column 8 of Table IV, application no. 17, respectively, and being depicted in the same respective line as said B0488, or a functional equivalent or a homolog thereof as depicted in column 8 of Table II, application no. 17, preferably a homolog or functional equivalent as depicted in column 8 of Table II B, application no. 17, and being depicted in the same respective line as said B0488, and preferably the activity is increased plastidic, whereby the respective line disclose in column 7 the fine chemical saccharic acid.

[89787] Accordingly, in one embodiment, the molecule which activity is to be increased in the process of the invention is the gene product with an activity as a “b0488-protein”, preferably it is the molecule of section (a) or (b) of this paragraph.

[89788] In particular, it was observed that in plants, especially in Arabidopsis thaliana, increasing or generating the activity of a gene product plastidic with the activity of a “b0488-protein”, preferably being encoded by a gene comprising the nucleic acid sequence SEQ ID NO. 143817, preferably the coding region thereof, conferred the production of or the increase in saccharic acid compared with the wild type control.

[89789] The nucleic acid sequence of B0514 from Escherichia coli, e.g. as shown in the respective line in column 5 of Table I, application no. 17, has been published in B. And the activity of the gene product thereof is the activity of glycerate kinase.

[89790] Accordingly, in one embodiment, the process of the present invention for producing galactinol in a non-human organism, like a microorganism or a plant or a part thereof, comprises increasing or generating the activity of a gene product with the activity of a gene product conferring the activity of “glycerate kinase”, especially from Escherichia coli or its functional equivalent or its homolog, e.g. the increase of
[89791] (a) a gene product of a gene comprising the nucleic acid molecule as shown in the respective line in column 5 of Table I (whereby the respective line disclose in column 7 the fine chemical galactinol), application no. 17, preferably the coding region thereof, or a homolog or a fragment thereof, and being depicted in the same respective line as said B0514, or a functional equivalent or a homolog thereof as shown in column 8 of Table I, application no. 17, preferably the coding region thereof, particularly a homolog or functional equivalent as shown in column 8 of Table I B, application no. 17, and being depicted in the same respective line as said B0514, and preferably the activity is increased non-targeted, or
[89792] (b) a polypeptide comprising a polypeptide, a consensus sequence or at least a polypeptide motif as shown in the respective line in column 5 of Table II or in column 8 of Table IV, application no. 17, respectively, and being depicted in the same respective line as said B0514, or a functional equivalent or a homolog thereof as depicted in column 8 of Table II, application no. 17, preferably a homolog or functional equivalent as depicted in column 8 of Table II B, application no. 17, and being depicted in the same respective line as said B0514, and preferably the activity is increased non-targeted, whereby the respective line disclose in column 7 the fine chemical galactinol.

[89793] Accordingly, in one embodiment, the molecule which activity is to be increased in the process of the invention is the gene product with an activity as a “glycerate kinase”, preferably it is the molecule of section (a) or (b) of this paragraph.

[89794] In particular, it was observed that in plants, especially in Arabidopsis thaliana, increasing or generating the activity of a gene product non-targeted with the activity of a “glycerate kinase”, preferably being encoded by a gene comprising the nucleic acid sequence SEQ ID NO. 134402, preferably the coding region thereof, conferred the production of or the increase in galactinol compared with the wild type control.

[89795] The nucleic acid sequence of B0593 from Escherichia coli, e.g. as shown in the respective line in column 5 of Table I, application no. 17, has been published in B. And the activity of the gene product thereof is the activity of isochorismate synthase.

[89796] Accordingly, in one embodiment, the process of the present invention for producing fructose in a non-human organism, like a microorganism or a plant or a part thereof, comprises increasing or generating the activity of a gene product with the activity of a gene product conferring the activity of “isochorismate synthase”, especially from Escherichia coli or its functional equivalent or its homolog, e.g. the increase of
[89797] (a) a gene product of a gene comprising the nucleic acid molecule as shown in the respective line in column 5 of Table I (whereby the respective line disclose in column 7 the fine chemical fructose), application no. 17, preferably the coding region thereof, or a homolog or a fragment thereof, and being depicted in the same respective line as said B0593, or a functional equivalent or a homolog thereof as shown in column 8 of Table I, application no. 17, preferably the coding region thereof, particularly a homolog or functional equivalent as shown in column 8 of Table I B, application no. 17, and being depicted in the same respective line as said B0593, and preferably the activity is increased plastidic, or
[89798] (b) a polypeptide comprising a polypeptide, a consensus sequence or at least a polypeptide motif as shown in the respective line in column 5 of Table II or in column 8 of Table IV, application no. 17, respectively, and being depicted in the same respective line as said B0593, or a functional equivalent or a homolog thereof as depicted in column 8 of Table II, application no. 17, preferably a homolog or functional equivalent as depicted in column 8 of Table II B, application no. 17, and being depicted in the same respective line as said B0593, and preferably the activity is increased plastidic, whereby the respective line disclose in column 7 the fine chemical fructose.

[89799] Accordingly, in one embodiment, the molecule which activity is to be increased in the process of the invention is the gene product with an activity as a “isochorismate synthase”, preferably it is the molecule of section (a) or (b) of this paragraph.

[89800] In particular, it was observed that in plants, especially in Arabidopsis thaliana, increasing or generating the activity of a gene product plastidic with the activity of a “isochorismate synthase”, preferably being encoded by a gene comprising the nucleic acid sequence SEQ ID NO. 35967, preferably the coding region thereof, conferred the production of or the increase in fructose compared with the wild type control.

[89801] The nucleic acid sequence of B0593 from Escherichia coli, e.g. as shown in the respective line in column 5 of Table I, application no. 17, has been published in B. And the activity of the gene product thereof is the activity of isochorismate synthase.

[89802] Accordingly, in one embodiment, the process of the present invention for producing glucose in a non-human organism, like a microorganism or a plant or a part thereof, comprises increasing or generating the activity of a gene product with the activity of a gene product conferring the activity of “isochorismate synthase”, especially from Escherichia coli or its functional equivalent or its homolog, e.g. the increase of
[89803] (a) a gene product of a gene comprising the nucleic acid molecule as shown in the respective line in column 5 of Table I (whereby the respective line disclose in column 7 the fine chemical glucose), application no. 17, preferably the coding region thereof, or a homolog or a fragment thereof, and being depicted in the same respective line as said B0593, or a functional equivalent or a homolog thereof as shown in column 8 of Table I, application no. 17, preferably the coding region thereof, particularly a homolog or functional equivalent as shown in column 8 of Table I B, application no. 17, and being depicted in the same respective line as said B0593, and preferably the activity is increased plastidic, or
[89804] (b) a polypeptide comprising a polypeptide, a consensus sequence or at least a polypeptide motif as shown in the respective line in column 5 of Table II or in column 8 of Table IV, application no. 17, respectively, and being depicted in the same respective line as said B0593, or a functional equivalent or a homolog thereof as depicted in column 8 of Table II, application no. 17, preferably a homolog or functional equivalent as depicted in column 8 of Table II B, application no. 17, and being depicted in the same respective line as said B0593, and preferably the activity is increased plastidic, whereby the respective line disclose in column 7 the fine chemical glucose.

[89805] Accordingly, in one embodiment, the molecule which activity is to be increased in the process of the invention is the gene product with an activity as a “isochorismate synthase”, preferably it is the molecule of section (a) or (b) of this paragraph.

[89806] In particular, it was observed that in plants, especially in Arabidopsis thaliana, increasing or generating the activity of a gene product plastidic with the activity of a “isochorismate synthase”, preferably being encoded by a gene comprising the nucleic acid sequence SEQ ID NO. 35967, preferably the coding region thereof, conferred the production of or the increase in glucose compared with the wild type control.

[89807] The nucleic acid sequence of B0593 from Escherichia coli, e.g. as shown in the respective line in column 5 of Table I, application no. 17, has been published in B. And the activity of the gene product thereof is the activity of isochorismate synthase.

[89808] Accordingly, in one embodiment, the process of the present invention for producing raffinose in a non-human organism, like a microorganism or a plant or a part thereof, comprises increasing or generating the activity of a gene product with the activity of a gene product conferring the activity of “isochorismate synthase”, especially from Escherichia coli or its functional equivalent or its homolog, e.g. the increase of
[89809] (a) a gene product of a gene comprising the nucleic acid molecule as shown in the respective line in column 5 of Table I (whereby the respective line disclose in column 7 the fine chemical raffinose), application no. 17, preferably the coding region thereof, or a homolog or a fragment thereof, and being depicted in the same respective line as said B0593, or a functional equivalent or a homolog thereof as shown in column 8 of Table I, application no. 17, preferably the coding region thereof, particularly a homolog or functional equivalent as shown in column 8 of Table I B, application no. 17, and being depicted in the same respective line as said B0593, and preferably the activity is increased plastidic, or
[89810] (b) a polypeptide comprising a polypeptide, a consensus sequence or at least a polypeptide motif as shown in the respective line in column 5 of Table II or in column 8 of Table IV, application no. 17, respectively, and being depicted in the same respective line as said B0593, or a functional equivalent or a homolog thereof as depicted in column 8 of Table II, application no. 17, preferably a homolog or functional equivalent as depicted in column 8 of Table II B, application no. 17, and being depicted in the same respective line as said B0593, and preferably the activity is increased plastidic, whereby the respective line disclose in column 7 the fine chemical raffinose.

[89811] Accordingly, in one embodiment, the molecule which activity is to be increased in the process of the invention is the gene product with an activity as a “isochorismate synthase”, preferably it is the molecule of section (a) or (b) of this paragraph.

[89812] In particular, it was observed that in plants, especially in Arabidopsis thaliana, increasing or generating the activity of a gene product plastidic with the activity of a “isochorismate synthase”, preferably being encoded by a gene comprising the nucleic acid sequence SEQ ID NO. 35967, preferably the coding region thereof, conferred the production of or the increase in raffinose compared with the wild type control.

[89813] The nucleic acid sequence of B0593 from Escherichia coli, e.g. as shown in the respective line in column 5 of Table I, application no. 17, has been published in B. And the activity of the gene product thereof is the activity of isochorismate synthase.

[89814] Accordingly, in one embodiment, the process of the present invention for producing sucrose in a non-human organism, like a microorganism or a plant or a part thereof, comprises increasing or generating the activity of a gene product with the activity of a gene product conferring the activity of “isochorismate synthase”, especially from Escherichia coli or its functional equivalent or its homolog, e.g. the increase of
[89815] (a) a gene product of a gene comprising the nucleic acid molecule as shown in the respective line in column 5 of Table I (whereby the respective line disclose in column 7 the fine chemical sucrose), application no. 17, preferably the coding region thereof, or a homolog or a fragment thereof, and being depicted in the same respective line as said B0593, or a functional equivalent or a homolog thereof as shown in column 8 of Table I, application no. 17, preferably the coding region thereof, particularly a homolog or functional equivalent as shown in column 8 of Table I B, application no. 17, and being depicted in the same respective line as said B0593, and preferably the activity is increased plastidic, or
[89816] (b) a polypeptide comprising a polypeptide, a consensus sequence or at least a polypeptide motif as shown in the respective line in column 5 of Table II or in column 8 of Table IV, application no. 17, respectively, and being depicted in the same respective line as said B0593, or a functional equivalent or a homolog thereof as depicted in column 8 of Table II, application no. 17, preferably a homolog or functional equivalent as depicted in column 8 of Table II B, application no. 17, and being depicted in the same respective line as said B0593, and preferably the activity is increased plastidic, whereby the respective line disclose in column 7 the fine chemical sucrose.

[89817] Accordingly, in one embodiment, the molecule which activity is to be increased in the process of the invention is the gene product with an activity as a “isochorismate synthase”, preferably it is the molecule of section (a) or (b) of this paragraph.

[89818] In particular, it was observed that in plants, especially in Arabidopsis thaliana, increasing or generating the activity of a gene product plastidic with the activity of a “isochorismate synthase”, preferably being encoded by a gene comprising the nucleic acid sequence SEQ ID NO. 35967, preferably the coding region thereof, conferred the production of or the increase in sucrose compared with the wild type control.

[89819] The nucleic acid sequence of B0644 from Escherichia coli, e.g. as shown in the respective line in column 5 of Table I, application no. 17, has been published in B. And the activity of the gene product thereof is the activity of B0644-protein.

[89820] Accordingly, in one embodiment, the process of the present invention for producing 3,4,5-trihydroxypentanoic acid in a non-human organism, like a microorganism or a plant or a part thereof, comprises increasing or generating the activity of a gene product with the activity of a gene product conferring the activity of “B0644-protein”, especially from Escherichia coli or its functional equivalent or its homolog, e.g. the increase of
[89821] (a) a gene product of a gene comprising the nucleic acid molecule as shown in the respective line in column 5 of Table I (whereby the respective line disclose in column 7 the fine chemical 3,4,5-trihydroxypentanoic acid), application no. 17, preferably the coding region thereof, or a homolog or a fragment thereof, and being depicted in the same respective line as said B0644, or a functional equivalent or a homolog thereof as shown in column 8 of Table I, application no. 17, preferably the coding region thereof, particularly a homolog or functional equivalent as shown in column 8 of Table I B, application no. 17, and being depicted in the same respective line as said B0644, and preferably the activity is increased plastidic, or
[89822] (b) a polypeptide comprising a polypeptide, a consensus sequence or at least a polypeptide motif as shown in the respective line in column 5 of Table II or in column 8 of Table IV, application no. 17, respectively, and being depicted in the same respective line as said B0644, or a functional equivalent or a homolog thereof as depicted in column 8 of Table II, application no. 17, preferably a homolog or functional equivalent as depicted in column 8 of Table II B, application no. 17, and being depicted in the same respective line as said B0644, and preferably the activity is increased plastidic, whereby the respective line disclose in column 7 the fine chemical 3,4,5-trihydroxypentanoic acid.

[89823] Accordingly, in one embodiment, the molecule which activity is to be increased in the process of the invention is the gene product with an activity as a “B0644-protein”, preferably it is the molecule of section (a) or (b) of this paragraph.

[89824] In particular, it was observed that in plants, especially in Arabidopsis thaliana, increasing or generating the activity of a gene product plastidic with the activity of a “B0644-protein”, preferably being encoded by a gene comprising the nucleic acid sequence SEQ ID NO. 143901, preferably the coding region thereof, conferred the production of or the increase in 3,4,5-trihydroxypentanoic acid compared with the wild type control.

[89825] The nucleic acid sequence of B0651 from Escherichia coli, e.g. as shown in the respective line in column 5 of Table I, application no. 17, has been published in B. And the activity of the gene product thereof is the activity of pyrimidine-specific ribonucleoside hydrolase.

[89826] Accordingly, in one embodiment, the process of the present invention for producing saccharic acid in a non-human organism, like a microorganism or a plant or a part thereof, comprises increasing or generating the activity of a gene product with the activity of a gene product conferring the activity of “pyrimidine-specific ribonucleoside hydrolase”, especially from Escherichia coli or its functional equivalent or its homolog, e.g. the increase of
[89827] (a) a gene product of a gene comprising the nucleic acid molecule as shown in the respective line in column 5 of Table I (whereby the respective line disclose in column 7 the fine chemical saccharic acid), application no. 17, preferably the coding region thereof, or a homolog or a fragment thereof, and being depicted in the same respective line as said B0651, or a functional equivalent or a homolog thereof as shown in column 8 of Table I, application no. 17, preferably the coding region thereof, particularly a homolog or functional equivalent as shown in column 8 of Table I B, application no. 17, and being depicted in the same respective line as said B0651, and preferably the activity is increased non-targeted, or
[89828] (b) a polypeptide comprising a polypeptide, a consensus sequence or at least a polypeptide motif as shown in the respective line in column 5 of Table II or in column 8 of Table IV, application no. 17, respectively, and being depicted in the same respective line as said B0651, or a functional equivalent or a homolog thereof as depicted in column 8 of Table II, application no. 17, preferably a homolog or functional equivalent as depicted in column 8 of Table II B, application no. 17, and being depicted in the same respective line as said B0651, and preferably the activity is increased non-targeted, whereby the respective line disclose in column 7 the fine chemical saccharic acid.

[89829] Accordingly, in one embodiment, the molecule which activity is to be increased in the process of the invention is the gene product with an activity as a “pyrimidine-specific ribonucleoside hydrolase”, preferably it is the molecule of section (a) or (b) of this paragraph.

[89830] In particular, it was observed that in plants, especially in Arabidopsis thaliana, increasing or generating the activity of a gene product non-targeted with the activity of a “pyrimidine-specific ribonucleoside hydrolase”, preferably being encoded by a gene comprising the nucleic acid sequence SEQ ID NO. 143954, preferably the coding region thereof, conferred the production of or the increase in saccharic acid compared with the wild type control.

[89831] The nucleic acid sequence of B0674 from Escherichia coli, e.g. as shown in the respective line in column 5 of Table I, application no. 17, has been published in B. And the activity of the gene product thereof is the activity of asparagine synthetase B.

[89832] Accordingly, in one embodiment, the process of the present invention for producing erythrol in a non-human organism, like a microorganism or a plant or a part thereof, comprises increasing or generating the activity of a gene product with the activity of a gene product conferring the activity of “asparagine synthetase B”, especially from Escherichia coli or its functional equivalent or its homolog, e.g. the increase of
[89833] (a) a gene product of a gene comprising the nucleic acid molecule as shown in the respective line in column 5 of Table I (whereby the respective line disclose in column 7 the fine chemical erythrol), application no. 17, preferably the coding region thereof, or a homolog or a fragment thereof, and being depicted in the same respective line as said B0674, or a functional equivalent or a homolog thereof as shown in column 8 of Table I, application no. 17, preferably the coding region thereof, particularly a homolog or functional equivalent as shown in column 8 of Table I B, application no. 17, and being depicted in the same respective line as said B0674, and preferably the activity is increased plastidic, or
[89834] (b) a polypeptide comprising a polypeptide, a consensus sequence or at least a polypeptide motif as shown in the respective line in column 5 of Table II or in column 8 of Table IV, application no. 17, respectively, and being depicted in the same respective line as said B0674, or a functional equivalent or a homolog thereof as depicted in column 8 of Table II, application no. 17, preferably a homolog or functional equivalent as depicted in column 8 of Table II B, application no. 17, and being depicted in the same respective line as said B0674, and preferably the activity is increased plastidic, whereby the respective line disclose in column 7 the fine chemical erythrol.

[89835] Accordingly, in one embodiment, the molecule which activity is to be increased in the process of the invention is the gene product with an activity as a “asparagine synthetase B”, preferably it is the molecule of section (a) or (b) of this paragraph.

[89836] In particular, it was observed that in plants, especially in Arabidopsis thaliana, increasing or generating the activity of a gene product plastidic with the activity of a “asparagine synthetase B”, preferably being encoded by a gene comprising the nucleic acid sequence SEQ ID NO. 144207, preferably the coding region thereof, conferred the production of or the increase in erythrol compared with the wild type control.

[89837] The nucleic acid sequence of B0695 from Escherichia coli, e.g. as shown in the respective line in column 5 of Table I, application no. 17, has been published in B. And the activity of the gene product thereof is the activity of sensor histidine kinase.

[89838] Accordingly, in one embodiment, the process of the present invention for producing myo-inositol in a non-human organism, like a microorganism or a plant or a part thereof, comprises increasing or generating the activity of a gene product with the activity of a gene product conferring the activity of “sensor histidine kinase”, especially from Escherichia coli or its functional equivalent or its homolog, e.g. the increase of
[89839] (a) a gene product of a gene comprising the nucleic acid molecule as shown in the respective line in column 5 of Table I (whereby the respective line disclose in column 7 the fine chemical myo-inositol), application no. 17, preferably the coding region thereof, or a homolog or a fragment thereof, and being depicted in the same respective line as said B0695, or a functional equivalent or a homolog thereof as shown in column 8 of Table I, application no. 17, preferably the coding region thereof, particularly a homolog or functional equivalent as shown in column 8 of Table I B, application no. 17, and being depicted in the same respective line as said B0695, and preferably the activity is increased non-targeted, or
[89840] (b) a polypeptide comprising a polypeptide, a consensus sequence or at least a polypeptide motif as shown in the respective line in column 5 of Table II or in column 8 of Table IV, application no. 17, respectively, and being depicted in the same respective line as said B0695, or a functional equivalent or a homolog thereof as depicted in column 8 of Table II, application no. 17, preferably a homolog or functional equivalent as depicted in column 8 of Table II B, application no. 17, and being depicted in the same respective line as said B0695, and preferably the activity is increased non-targeted, whereby the respective line disclose in column 7 the fine chemical myo-inositol.

[89841] Accordingly, in one embodiment, the molecule which activity is to be increased in the process of the invention is the gene product with an activity as a “sensor histidine kinase”, preferably it is the molecule of section (a) or (b) of this paragraph.

[89842] In particular, it was observed that in plants, especially in Arabidopsis thaliana, increasing or generating the activity of a gene product non-targeted with the activity of a “sensor histidine kinase”, preferably being encoded by a gene comprising the nucleic acid sequence SEQ ID NO. 93678, preferably the coding region thereof, conferred the production of or the increase in myo-inositol compared with the wild type control.

[89843] The nucleic acid sequence of B0728 from Escherichia coli, e.g. as shown in the respective line in column 5 of Table I, application no. 17, has been published in B. And the activity of the gene product thereof is the activity of succinyl-CoA synthetase beta chain.

[89844] Accordingly, in one embodiment, the process of the present invention for producing myo-inositol in a non-human organism, like a microorganism or a plant or a part thereof, comprises increasing or generating the activity of a gene product with the activity of a gene product conferring the activity of “succinyl-CoA synthetase beta chain”, especially from Escherichia coli or its functional equivalent or its homolog, e.g. the increase of
[89845] (a) a gene product of a gene comprising the nucleic acid molecule as shown in the respective line in column 5 of Table I (whereby the respective line disclose in column 7 the fine chemical myo-inositol), application no. 17, preferably the coding region thereof, or a homolog or a fragment thereof, and being depicted in the same respective line as said B0728, or a functional equivalent or a homolog thereof as shown in column 8 of Table I, application no. 17, preferably the coding region thereof, particularly a homolog or functional equivalent as shown in column 8 of Table I B, application no. 17, and being depicted in the same respective line as said B0728, and preferably the activity is increased plastidic, or
[89846] (b) a polypeptide comprising a polypeptide, a consensus sequence or at least a polypeptide motif as shown in the respective line in column 5 of Table II or in column 8 of Table IV, application no. 17, respectively, and being depicted in the same respective line as said B0728, or a functional equivalent or a homolog thereof as depicted in column 8 of Table II, application no. 17, preferably a homolog or functional equivalent as depicted in column 8 of Table II B, application no. 17, and being depicted in the same respective line as said B0728, and preferably the activity is increased plastidic, whereby the respective line disclose in column 7 the fine chemical myo-inositol.

[89847] Accordingly, in one embodiment, the molecule which activity is to be increased in the process of the invention is the gene product with an activity as a “succinyl-CoA synthetase beta chain”, preferably it is the molecule of section (a) or (b) of this paragraph.

[89848] In particular, it was observed that in plants, especially in Arabidopsis thaliana, increasing or generating the activity of a gene product plastidic with the activity of a “succinyl-CoA synthetase beta chain”, preferably being encoded by a gene comprising the nucleic acid sequence SEQ ID NO. 93793, preferably the coding region thereof, conferred the production of or the increase in myo-inositol compared with the wild type control.

[89849] The nucleic acid sequence of B0752 from Escherichia coli, e.g. as shown in the respective line in column 5 of Table I, application no. 17, has been published in B. And the activity of the gene product thereof is the activity of zinc transporter.

[89850] Accordingly, in one embodiment, the process of the present invention for producing fructose in a non-human organism, like a microorganism or a plant or a part thereof, comprises increasing or generating the activity of a gene product with the activity of a gene product conferring the activity of “zinc transporter”, especially from Escherichia coli or its functional equivalent or its homolog, e.g. the increase of
[89851] (a) a gene product of a gene comprising the nucleic acid molecule as shown in the respective line in column 5 of Table I (whereby the respective line disclose in column 7 the fine chemical fructose), application no. 17, preferably the coding region thereof, or a homolog or a fragment thereof, and being depicted in the same respective line as said B0752, or a functional equivalent or a homolog thereof as shown in column 8 of Table I, application no. 17, preferably the coding region thereof, particularly a homolog or functional equivalent as shown in column 8 of Table I B, application no. 17, and being depicted in the same respective line as said B0752, and preferably the activity is increased non-targeted, or
[89852] (b) a polypeptide comprising a polypeptide, a consensus sequence or at least a polypeptide motif as shown in the respective line in column 5 of Table II or in column 8 of Table IV, application no. 17, respectively, and being depicted in the same respective line as said B0752, or a functional equivalent or a homolog thereof as depicted in column 8 of Table II, application no. 17, preferably a homolog or functional equivalent as depicted in column 8 of Table II B, application no. 17, and being depicted in the same respective line as said B0752, and preferably the activity is increased non-targeted, whereby the respective line disclose in column 7 the fine chemical fructose.

[89853] Accordingly, in one embodiment, the molecule which activity is to be increased in the process of the invention is the gene product with an activity as a “zinc transporter”, preferably it is the molecule of section (a) or (b) of this paragraph.

[89854] In particular, it was observed that in plants, especially in Arabidopsis thaliana, increasing or generating the activity of a gene product non-targeted with the activity of a “zinc transporter”, preferably being encoded by a gene comprising the nucleic acid sequence SEQ ID NO. 36114, preferably the coding region thereof, conferred the production of or the increase in fructose compared with the wild type control.

[89855] The nucleic acid sequence of B0752 from Escherichia coli, e.g. as shown in the respective line in column 5 of Table I, application no. 17, has been published in B. And the activity of the gene product thereof is the activity of zinc transporter.

[89856] Accordingly, in one embodiment, the process of the present invention for producing glucose in a non-human organism, like a microorganism or a plant or a part thereof, comprises increasing or generating the activity of a gene product with the activity of a gene product conferring the activity of “zinc transporter”, especially from Escherichia coli or its functional equivalent or its homolog, e.g. the increase of
[89857] (a) a gene product of a gene comprising the nucleic acid molecule as shown in the respective line in column 5 of Table I (whereby the respective line disclose in column 7 the fine chemical glucose), application no. 17, preferably the coding region thereof, or a homolog or a fragment thereof, and being depicted in the same respective line as said B0752, or a functional equivalent or a homolog thereof as shown in column 8 of Table I, application no. 17, preferably the coding region thereof, particularly a homolog or functional equivalent as shown in column 8 of Table I B, application no. 17, and being depicted in the same respective line as said B0752, and preferably the activity is increased non-targeted, or
[89858] (b) a polypeptide comprising a polypeptide, a consensus sequence or at least a polypeptide motif as shown in the respective line in column 5 of Table II or in column 8 of Table IV, application no. 17, respectively, and being depicted in the same respective line as said B0752, or a functional equivalent or a homolog thereof as depicted in column 8 of Table II, application no. 17, preferably a homolog or functional equivalent as depicted in column 8 of Table II B, application no. 17, and being depicted in the same respective line as said B0752, and preferably the activity is increased non-targeted, whereby the respective line disclose in column 7 the fine chemical glucose.

[89859] Accordingly, in one embodiment, the molecule which activity is to be increased in the process of the invention is the gene product with an activity as a “zinc transporter”, preferably it is the molecule of section (a) or (b) of this paragraph.

[89860] In particular, it was observed that in plants, especially in Arabidopsis thaliana, increasing or generating the activity of a gene product non-targeted with the activity of a “zinc transporter”, preferably being encoded by a gene comprising the nucleic acid sequence SEQ ID NO. 36114, preferably the coding region thereof, conferred the production of or the increase in glucose compared with the wild type control.

[89861] The nucleic acid sequence of B0752 from Escherichia coli, e.g. as shown in the respective line in column 5 of Table I, application no. 17, has been published in B. And the activity of the gene product thereof is the activity of zinc transporter.

[89862] Accordingly, in one embodiment, the process of the present invention for producing glucose-1-phosphate in a non-human organism, like a microorganism or a plant or a part thereof, comprises increasing or generating the activity of a gene product with the activity of a gene product conferring the activity of “zinc transporter”, especially from Escherichia coli or its functional equivalent or its homolog, e.g. the increase of
[89863] (a) a gene product of a gene comprising the nucleic acid molecule as shown in the respective line in column 5 of Table I (whereby the respective line disclose in column 7 the fine chemical glucose-1-phosphate), application no. 17, preferably the coding region thereof, or a homolog or a fragment thereof, and being depicted in the same respective line as said B0752, or a functional equivalent or a homolog thereof as shown in column 8 of Table I, application no. 17, preferably the coding region thereof, particularly a homolog or functional equivalent as shown in column 8 of Table I B, application no. 17, and being depicted in the same respective line as said B0752, and preferably the activity is increased non-targeted, or
[89864] (b) a polypeptide comprising a polypeptide, a consensus sequence or at least a polypeptide motif as shown in the respective line in column 5 of Table II or in column 8 of Table IV, application no. 17, respectively, and being depicted in the same respective line as said B0752, or a functional equivalent or a homolog thereof as depicted in column 8 of Table II, application no. 17, preferably a homolog or functional equivalent as depicted in column 8 of Table II B, application no. 17, and being depicted in the same respective line as said B0752, and preferably the activity is increased non-targeted, whereby the respective line disclose in column 7 the fine chemical glucose-1-phosphate.

[89865] Accordingly, in one embodiment, the molecule which activity is to be increased in the process of the invention is the gene product with an activity as a “zinc transporter”, preferably it is the molecule of section (a) or (b) of this paragraph.

[89866] In particular, it was observed that in plants, especially in Arabidopsis thaliana, increasing or generating the activity of a gene product non-targeted with the activity of a “zinc transporter”, preferably being encoded by a gene comprising the nucleic acid sequence SEQ ID NO. 36114, preferably the coding region thereof, conferred the production of or the increase in glucose-1-phosphate compared with the wild type control.

[89867] The nucleic acid sequence of B0752 from Escherichia coli, e.g. as shown in the respective line in column 5 of Table I, application no. 17, has been published in B. And the activity of the gene product thereof is the activity of zinc transporter.

[89868] Accordingly, in one embodiment, the process of the present invention for producing raffinose in a non-human organism, like a microorganism or a plant or a part thereof, comprises increasing or generating the activity of a gene product with the activity of a gene product conferring the activity of “zinc transporter”, especially from Escherichia coli or its functional equivalent or its homolog, e.g. the increase of
[89869] (a) a gene product of a gene comprising the nucleic acid molecule as shown in the respective line in column 5 of Table I (whereby the respective line disclose in column 7 the fine chemical raffinose), application no. 17, preferably the coding region thereof, or a homolog or a fragment thereof, and being depicted in the same respective line as said B0752, or a functional equivalent or a homolog thereof as shown in column 8 of Table I, application no. 17, preferably the coding region thereof, particularly a homolog or functional equivalent as shown in column 8 of Table I B, application no. 17, and being depicted in the same respective line as said B0752, and preferably the activity is increased non-targeted, or
[89870] (b) a polypeptide comprising a polypeptide, a consensus sequence or at least a polypeptide motif as shown in the respective line in column 5 of Table II or in column 8 of Table IV, application no. 17, respectively, and being depicted in the same respective line as said B0752, or a functional equivalent or a homolog thereof as depicted in column 8 of Table II, application no. 17, preferably a homolog or functional equivalent as depicted in column 8 of Table II B, application no. 17, and being depicted in the same respective line as said B0752, and preferably the activity is increased non-targeted, whereby the respective line disclose in column 7 the fine chemical raffinose.

[89871] Accordingly, in one embodiment, the molecule which activity is to be increased in the process of the invention is the gene product with an activity as a “zinc transporter”, preferably it is the molecule of section (a) or (b) of this paragraph.

[89872] In particular, it was observed that in plants, especially in Arabidopsis thaliana, increasing or generating the activity of a gene product non-targeted with the activity of a “zinc transporter”, preferably being encoded by a gene comprising the nucleic acid sequence SEQ ID NO. 36114, preferably the coding region thereof, conferred the production of or the increase in raffinose compared with the wild type control.

[89873] The nucleic acid sequence of B0801 from Escherichia coli, e.g. as shown in the respective line in column 5 of Table I, application no. 17, has been published in B. And the activity of the gene product thereof is the activity of b0801-protein.

[89874] Accordingly, in one embodiment, the process of the present invention for producing glucose in a non-human organism, like a microorganism or a plant or a part thereof, comprises increasing or generating the activity of a gene product with the activity of a gene product conferring the activity of “b0801-protein”, especially from Escherichia coli or its functional equivalent or its homolog, e.g. the increase of
[89875] (a) a gene product of a gene comprising the nucleic acid molecule as shown in the respective line in column 5 of Table I (whereby the respective line disclose in column 7 the fine chemical glucose), application no. 17, preferably the coding region thereof, or a homolog or a fragment thereof, and being depicted in the same respective line as said B0801, or a functional equivalent or a homolog thereof as shown in column 8 of Table I, application no. 17, preferably the coding region thereof, particularly a homolog or functional equivalent as shown in column 8 of Table I B, application no. 17, and being depicted in the same respective line as said B0801, and preferably the activity is increased non-targeted, or
[89876] (b) a polypeptide comprising a polypeptide, a consensus sequence or at least a polypeptide motif as shown in the respective line in column 5 of Table II or in column 8 of Table IV, application no. 17, respectively, and being depicted in the same respective line as said B0801, or a functional equivalent or a homolog thereof as depicted in column 8 of Table II, application no. 17, preferably a homolog or functional equivalent as depicted in column 8 of Table II B, application no. 17, and being depicted in the same respective line as said B0801, and preferably the activity is increased non-targeted, whereby the respective line disclose in column 7 the fine chemical glucose.

[89877] Accordingly, in one embodiment, the molecule which activity is to be increased in the process of the invention is the gene product with an activity as a “b0801-protein”, preferably it is the molecule of section (a) or (b) of this paragraph.

[89878] In particular, it was observed that in plants, especially in Arabidopsis thaliana, increasing or generating the activity of a gene product non-targeted with the activity of a “b0801-protein”, preferably being encoded by a gene comprising the nucleic acid sequence SEQ ID NO. 75807, preferably the coding region thereof, conferred the production of or the increase in glucose compared with the wild type control.

[89879] The nucleic acid sequence of B0856 from Escherichia coli, e.g. as shown in the respective line in column 5 of Table I, application no. 17, has been published in B. And the activity of the gene product thereof is the activity of putrescine transport system permease protein.

[89880] Accordingly, in one embodiment, the process of the present invention for producing sedoheptulose-7-phosphate in a non-human organism, like a microorganism or a plant or a part thereof, comprises increasing or generating the activity of a gene product with the activity of a gene product conferring the activity of “putrescine transport system permease protein”, especially from Escherichia coli or its functional equivalent or its homolog, e.g. the increase of
[89881] (a) a gene product of a gene comprising the nucleic acid molecule as shown in the respective line in column 5 of Table I (whereby the respective line disclose in column 7 the fine chemical sedoheptulose-7-phosphate), application no. 17, preferably the coding region thereof, or a homolog or a fragment thereof, and being depicted in the same respective line as said B0856, or a functional equivalent or a homolog thereof as shown in column 8 of Table I, application no. 17, preferably the coding region thereof, particularly a homolog or functional equivalent as shown in column 8 of Table I B, application no. 17, and being depicted in the same respective line as said B0856, and preferably the activity is increased plastidic, or
[89882] (b) a polypeptide comprising a polypeptide, a consensus sequence or at least a polypeptide motif as shown in the respective line in column 5 of Table II or in column 8 of Table IV, application no. 17, respectively, and being depicted in the same respective line as said B0856, or a functional equivalent or a homolog thereof as depicted in column 8 of Table II, application no. 17, preferably a homolog or functional equivalent as depicted in column 8 of Table II B, application no. 17, and being depicted in the same respective line as said B0856, and preferably the activity is increased plastidic, whereby the respective line disclose in column 7 the fine chemical sedoheptulose-7-phosphate.

[89883] Accordingly, in one embodiment, the molecule which activity is to be increased in the process of the invention is the gene product with an activity as a “putrescine transport system permease protein”, preferably it is the molecule of section (a) or (b) of this paragraph.

[89884] In particular, it was observed that in plants, especially in Arabidopsis thaliana, increasing or generating the activity of a gene product plastidic with the activity of a “putrescine transport system permease protein”, preferably being encoded by a gene comprising the nucleic acid sequence SEQ ID NO. 131359, preferably the coding region thereof, conferred the production of or the increase in sedoheptulose-7-phosphate compared with the wild type control.

[89885] The nucleic acid sequence of B0885 from Escherichia coli, e.g. as shown in the respective line in column 5 of Table I, application no. 17, has been published in B. And the activity of the gene product thereof is the activity of leucyl/phenylalanyl-tRNA-protein transferase.

[89886] Accordingly, in one embodiment, the process of the present invention for producing raffinose in a non-human organism, like a microorganism or a plant or a part thereof, comprises increasing or generating the activity of a gene product with the activity of a gene product conferring the activity of “leucyl/phenylalanyl-tRNA-protein transferase”, especially from Escherichia coli or its functional equivalent or its homolog, e.g. the increase of
[89887] (a) a gene product of a gene comprising the nucleic acid molecule as shown in the respective line in column 5 of Table I (whereby the respective line disclose in column 7 the fine chemical raffinose), application no. 17, preferably the coding region thereof, or a homolog or a fragment thereof, and being depicted in the same respective line as said B0885, or a functional equivalent or a homolog thereof as shown in column 8 of Table I, application no. 17, preferably the coding region thereof, particularly a homolog or functional equivalent as shown in column 8 of Table I B, application no. 17, and being depicted in the same respective line as said B0885, and preferably the activity is increased non-targeted, or
[89888] (b) a polypeptide comprising a polypeptide, a consensus sequence or at least a polypeptide motif as shown in the respective line in column 5 of Table II or in column 8 of Table IV, application no. 17, respectively, and being depicted in the same respective line as said B0885, or a functional equivalent or a homolog thereof as depicted in column 8 of Table II, application no. 17, preferably a homolog or functional equivalent as depicted in column 8 of Table II B, application no. 17, and being depicted in the same respective line as said B0885, and preferably the activity is increased non-targeted, whereby the respective line disclose in column 7 the fine chemical raffinose.

[89889] Accordingly, in one embodiment, the molecule which activity is to be increased in the process of the invention is the gene product with an activity as a “leucyl/phenylalanyl-tRNA-protein transferase”, preferably it is the molecule of section (a) or (b) of this paragraph.

[89890] In particular, it was observed that in plants, especially in Arabidopsis thaliana, increasing or generating the activity of a gene product non-targeted with the activity of a “leucyl/phenylalanyl-tRNA-protein transferase”, preferably being encoded by a gene comprising the nucleic acid sequence SEQ ID NO. 36489, preferably the coding region thereof, conferred the production of or the increase in raffinose compared with the wild type control.

[89891] The nucleic acid sequence of B0970 from Escherichia coli, e.g. as shown in the respective line in column 5 of Table I, application no. 17, has been published in B. And the activity of the gene product thereof is the activity of b0970-protein.

[89892] Accordingly, in one embodiment, the process of the present invention for producing glucose-1-phosphate in a non-human organism, like a microorganism or a plant or a part thereof, comprises increasing or generating the activity of a gene product with the activity of a gene product conferring the activity of “b0970-protein”, especially from Escherichia coli or its functional equivalent or its homolog, e.g. the increase of
[89893] (a) a gene product of a gene comprising the nucleic acid molecule as shown in the respective line in column 5 of Table I (whereby the respective line disclose in column 7 the fine chemical glucose-1-phosphate), application no. 17, preferably the coding region thereof, or a homolog or a fragment thereof, and being depicted in the same respective line as said B0970, or a functional equivalent or a homolog thereof as shown in column 8 of Table I, application no. 17, preferably the coding region thereof, particularly a homolog or functional equivalent as shown in column 8 of Table I B, application no. 17, and being depicted in the same respective line as said B0970, and preferably the activity is increased non-targeted, or
[89894] (b) a polypeptide comprising a polypeptide, a consensus sequence or at least a polypeptide motif as shown in the respective line in column 5 of Table II or in column 8 of Table IV, application no. 17, respectively, and being depicted in the same respective line as said B0970, or a functional equivalent or a homolog thereof as depicted in column 8 of Table II, application no. 17, preferably a homolog or functional equivalent as depicted in column 8 of Table II B, application no. 17, and being depicted in the same respective line as said B0970, and preferably the activity is increased non-targeted, whereby the respective line disclose in column 7 the fine chemical glucose-1-phosphate.

[89895] Accordingly, in one embodiment, the molecule which activity is to be increased in the process of the invention is the gene product with an activity as a “b0970-protein”, preferably it is the molecule of section (a) or (b) of this paragraph.

[89896] In particular, it was observed that in plants, especially in Arabidopsis thaliana, increasing or generating the activity of a gene product non-targeted with the activity of a “b0970-protein”, preferably being encoded by a gene comprising the nucleic acid sequence SEQ ID NO. 144479, preferably the coding region thereof, conferred the production of or the increase in glucose-1-phosphate compared with the wild type control.

[89897] The nucleic acid sequence of B0980 from Escherichia coli, e.g. as shown in the respective line in column 5 of Table I, application no. 17, has been published in B. And the activity of the gene product thereof is the activity of phosphoanhydride phosphorylase.

[89898] Accordingly, in one embodiment, the process of the present invention for producing myo-inositol in a non-human organism, like a microorganism or a plant or a part thereof, comprises increasing or generating the activity of a gene product with the activity of a gene product conferring the activity of “phosphoanhydride phosphorylase”, especially from Escherichia coli or its functional equivalent or its homolog, e.g. the increase of
[89899] (a) a gene product of a gene comprising the nucleic acid molecule as shown in the respective line in column 5 of Table I (whereby the respective line disclose in column 7 the fine chemical myo-inositol), application no. 17, preferably the coding region thereof, or a homolog or a fragment thereof, and being depicted in the same respective line as said B0980, or a functional equivalent or a homolog thereof as shown in column 8 of Table I, application no. 17, preferably the coding region thereof, particularly a homolog or functional equivalent as shown in column 8 of Table I B, application no. 17, and being depicted in the same respective line as said B0980, and preferably the activity is increased non-targeted, or
[89900] (b) a polypeptide comprising a polypeptide, a consensus sequence or at least a polypeptide motif as shown in the respective line in column 5 of Table II or in column 8 of Table IV, application no. 17, respectively, and being depicted in the same respective line as said B0980, or a functional equivalent or a homolog thereof as depicted in column 8 of Table II, application no. 17, preferably a homolog or functional equivalent as depicted in column 8 of Table II B, application no. 17, and being depicted in the same respective line as said B0980, and preferably the activity is increased non-targeted, whereby the respective line disclose in column 7 the fine chemical myo-inositol.

[89901] Accordingly, in one embodiment, the molecule which activity is to be increased in the process of the invention is the gene product with an activity as a “phosphoanhydride phosphorylase”, preferably it is the molecule of section (a) or (b) of this paragraph.

[89902] In particular, it was observed that in plants, especially in Arabidopsis thaliana, increasing or generating the activity of a gene product non-targeted with the activity of a “phosphoanhydride phosphorylase”, preferably being encoded by a gene comprising the nucleic acid sequence SEQ ID NO. 36809, preferably the coding region thereof, conferred the production of or the increase in myo-inositol compared with the wild type control.

[89903] The nucleic acid sequence of B1003 from Escherichia coli, e.g. as shown in the respective line in column 5 of Table I, application no. 17, has been published in B. And the activity of the gene product thereof is the activity of b1003-protein.

[89904] Accordingly, in one embodiment, the process of the present invention for producing fructose in a non-human organism, like a microorganism or a plant or a part thereof, comprises increasing or generating the activity of a gene product with the activity of a gene product conferring the activity of “b1003-protein”, especially from Escherichia coli or its functional equivalent or its homolog, e.g. the increase of
[89905] (a) a gene product of a gene comprising the nucleic acid molecule as shown in the respective line in column 5 of Table I (whereby the respective line disclose in column 7 the fine chemical fructose), application no. 17, preferably the coding region thereof, or a homolog or a fragment thereof, and being depicted in the same respective line as said B1003, or a functional equivalent or a homolog thereof as shown in column 8 of Table I, application no. 17, preferably the coding region thereof, particularly a homolog or functional equivalent as shown in column 8 of Table I B, application no. 17, and being depicted in the same respective line as said B1003, and preferably the activity is increased non-targeted, or
[89906] (b) a polypeptide comprising a polypeptide, a consensus sequence or at least a polypeptide motif as shown in the respective line in column 5 of Table II or in column 8 of Table IV, application no. 17, respectively, and being depicted in the same respective line as said B1003, or a functional equivalent or a homolog thereof as depicted in column 8 of Table II, application no. 17, preferably a homolog or functional equivalent as depicted in column 8 of Table II B, application no. 17, and being depicted in the same respective line as said B1003, and preferably the activity is increased non-targeted, whereby the respective line disclose in column 7 the fine chemical fructose.

[89907] Accordingly, in one embodiment, the molecule which activity is to be increased in the process of the invention is the gene product with an activity as a “b1003-protein”, preferably it is the molecule of section (a) or (b) of this paragraph.

[89908] In particular, it was observed that in plants, especially in Arabidopsis thaliana, increasing or generating the activity of a gene product non-targeted with the activity of a “b1003-protein”, preferably being encoded by a gene comprising the nucleic acid sequence SEQ ID NO. 7941, preferably the coding region thereof, conferred the production of or the increase in fructose compared with the wild type control.

[89909] The nucleic acid sequence of B1003 from Escherichia coli, e.g. as shown in the respective line in column 5 of Table I, application no. 17, has been published in B. And the activity of the gene product thereof is the activity of b1003-protein.

[89910] Accordingly, in one embodiment, the process of the present invention for producing glucose in a non-human organism, like a microorganism or a plant or a part thereof, comprises increasing or generating the activity of a gene product with the activity of a gene product conferring the activity of “b1003-protein”, especially from Escherichia coli or its functional equivalent or its homolog, e.g. the increase of
[89911] (a) a gene product of a gene comprising the nucleic acid molecule as shown in the respective line in column 5 of Table I (whereby the respective line disclose in column 7 the fine chemical glucose), application no. 17, preferably the coding region thereof, or a homolog or a fragment thereof, and being depicted in the same respective line as said B1003, or a functional equivalent or a homolog thereof as shown in column 8 of Table I, application no. 17, preferably the coding region thereof, particularly a homolog or functional equivalent as shown in column 8 of Table I B, application no. 17, and being depicted in the same respective line as said B1003, and preferably the activity is increased non-targeted, or
[89912] (b) a polypeptide comprising a polypeptide, a consensus sequence or at least a polypeptide motif as shown in the respective line in column 5 of Table II or in column 8 of Table IV, application no. 17, respectively, and being depicted in the same respective line as said B1003, or a functional equivalent or a homolog thereof as depicted in column 8 of Table II, application no. 17, preferably a homolog or functional equivalent as depicted in column 8 of Table II B, application no. 17, and being depicted in the same respective line as said B1003, and preferably the activity is increased non-targeted, whereby the respective line disclose in column 7 the fine chemical glucose.

[89913] Accordingly, in one embodiment, the molecule which activity is to be increased in the process of the invention is the gene product with an activity as a “b1003-protein”, preferably it is the molecule of section (a) or (b) of this paragraph.

[89914] In particular, it was observed that in plants, especially in Arabidopsis thaliana, increasing or generating the activity of a gene product non-targeted with the activity of a “b1003-protein”, preferably being encoded by a gene comprising the nucleic acid sequence SEQ ID NO. 7941, preferably the coding region thereof, conferred the production of or the increase in glucose compared with the wild type control.

[89915] The nucleic acid sequence of B1003 from Escherichia coli, e.g. as shown in the respective line in column 5 of Table I, application no. 17, has been published in B. And the activity of the gene product thereof is the activity of b1003-protein.

[89916] Accordingly, in one embodiment, the process of the present invention for producing glucose-1-phosphate in a non-human organism, like a microorganism or a plant or a part thereof, comprises increasing or generating the activity of a gene product with the activity of a gene product conferring the activity of “b1003-protein”, especially from Escherichia coli or its functional equivalent or its homolog, e.g. the increase of
[89917] (a) a gene product of a gene comprising the nucleic acid molecule as shown in the respective line in column 5 of Table I (whereby the respective line disclose in column 7 the fine chemical glucose-1-phosphate), application no. 17, preferably the coding region thereof, or a homolog or a fragment thereof, and being depicted in the same respective line as said B1003, or a functional equivalent or a homolog thereof as shown in column 8 of Table I, application no. 17, preferably the coding region thereof, particularly a homolog or functional equivalent as shown in column 8 of Table I B, application no. 17, and being depicted in the same respective line as said B1003, and preferably the activity is increased non-targeted, or
[89918] (b) a polypeptide comprising a polypeptide, a consensus sequence or at least a polypeptide motif as shown in the respective line in column 5 of Table II or in column 8 of Table IV, application no. 17, respectively, and being depicted in the same respective line as said B1003, or a functional equivalent or a homolog thereof as depicted in column 8 of Table II, application no. 17, preferably a homolog or functional equivalent as depicted in column 8 of Table II B, application no. 17, and being depicted in the same respective line as said B1003, and preferably the activity is increased non-targeted, whereby the respective line disclose in column 7 the fine chemical glucose-1-phosphate.

[89919] Accordingly, in one embodiment, the molecule which activity is to be increased in the process of the invention is the gene product with an activity as a “b1003-protein”, preferably it is the molecule of section (a) or (b) of this paragraph.

[89920] In particular, it was observed that in plants, especially in Arabidopsis thaliana, increasing or generating the activity of a gene product non-targeted with the activity of a “b1003-protein”, preferably being encoded by a gene comprising the nucleic acid sequence SEQ ID NO. 7941, preferably the coding region thereof, conferred the production of or the increase in glucose-1-phosphate compared with the wild type control.

[89921] The nucleic acid sequence of B1003 from Escherichia coli, e.g. as shown in the respective line in column 5 of Table I, application no. 17, has been published in B. And the activity of the gene product thereof is the activity of b1003-protein.

[89922] Accordingly, in one embodiment, the process of the present invention for producing sedoheptulose-7-phosphate in a non-human organism, like a microorganism or a plant or a part thereof, comprises increasing or generating the activity of a gene product with the activity of a gene product conferring the activity of “b1003-protein”, especially from Escherichia coli or its functional equivalent or its homolog, e.g. the increase of
[89923] (a) a gene product of a gene comprising the nucleic acid molecule as shown in the respective line in column 5 of Table I (whereby the respective line disclose in column 7 the fine chemical sedoheptulose-7-phosphate), application no. 17, preferably the coding region thereof, or a homolog or a fragment thereof, and being depicted in the same respective line as said B1003, or a functional equivalent or a homolog thereof as shown in column 8 of Table I, application no. 17, preferably the coding region thereof, particularly a homolog or functional equivalent as shown in column 8 of Table I B, application no. 17, and being depicted in the same respective line as said B1003, and preferably the activity is increased non-targeted, or
[89924] (b) a polypeptide comprising a polypeptide, a consensus sequence or at least a polypeptide motif as shown in the respective line in column 5 of Table II or in column 8 of Table IV, application no. 17, respectively, and being depicted in the same respective line as said B1003, or a functional equivalent or a homolog thereof as depicted in column 8 of Table II, application no. 17, preferably a homolog or functional equivalent as depicted in column 8 of Table II B, application no. 17, and being depicted in the same respective line as said B1003, and preferably the activity is increased non-targeted, whereby the respective line disclose in column 7 the fine chemical sedoheptulose-7-phosphate.

[89925] Accordingly, in one embodiment, the molecule which activity is to be increased in the process of the invention is the gene product with an activity as a “b1003-protein”, preferably it is the molecule of section (a) or (b) of this paragraph.

[89926] In particular, it was observed that in plants, especially in Arabidopsis thaliana, increasing or generating the activity of a gene product non-targeted with the activity of a “b1003-protein”, preferably being encoded by a gene comprising the nucleic acid sequence SEQ ID NO. 7941, preferably the coding region thereof, conferred the production of or the increase in sedoheptulose-7-phosphate compared with the wild type control.

[89927] The nucleic acid sequence of B1003 from Escherichia coli, e.g. as shown in the respective line in column 5 of Table I, application no. 17, has been published in B. And the activity of the gene product thereof is the activity of b1003-protein.

[89928] Accordingly, in one embodiment, the process of the present invention for producing sucrose in a non-human organism, like a microorganism or a plant or a part thereof, comprises increasing or generating the activity of a gene product with the activity of a gene product conferring the activity of “b1003-protein”, especially from Escherichia coli or its functional equivalent or its homolog, e.g. the increase of
[89929] (a) a gene product of a gene comprising the nucleic acid molecule as shown in the respective line in column 5 of Table I (whereby the respective line disclose in column 7 the fine chemical sucrose), application no. 17, preferably the coding region thereof, or a homolog or a fragment thereof, and being depicted in the same respective line as said B1003, or a functional equivalent or a homolog thereof as shown in column 8 of Table I, application no. 17, preferably the coding region thereof, particularly a homolog or functional equivalent as shown in column 8 of Table I B, application no. 17, and being depicted in the same respective line as said B1003, and preferably the activity is increased non-targeted, or
[89930] (b) a polypeptide comprising a polypeptide, a consensus sequence or at least a polypeptide motif as shown in the respective line in column 5 of Table II or in column 8 of Table IV, application no. 17, respectively, and being depicted in the same respective line as said B1003, or a functional equivalent or a homolog thereof as depicted in column 8 of Table II, application no. 17, preferably a homolog or functional equivalent as depicted in column 8 of Table II B, application no. 17, and being depicted in the same respective line as said B1003, and preferably the activity is increased non-targeted, whereby the respective line disclose in column 7 the fine chemical sucrose.

[89931] Accordingly, in one embodiment, the molecule which activity is to be increased in the process of the invention is the gene product with an activity as a “b1003-protein”, preferably it is the molecule of section (a) or (b) of this paragraph.

[89932] In particular, it was observed that in plants, especially in Arabidopsis thaliana, increasing or generating the activity of a gene product non-targeted with the activity of a “b1003-protein”, preferably being encoded by a gene comprising the nucleic acid sequence SEQ ID NO. 7941, preferably the coding region thereof, conferred the production of or the increase in sucrose compared with the wild type control.

[89933] The nucleic acid sequence of B1046 from Escherichia coli, e.g. as shown in the respective line in column 5 of Table I, application no. 17, has been published in B. And the activity of the gene product thereof is the activity of b1046-protein.

[89934] Accordingly, in one embodiment, the process of the present invention for producing 3,4,5-trihydroxypentanoic acid in a non-human organism, like a microorganism or a plant or a part thereof, comprises increasing or generating the activity of a gene product with the activity of a gene product conferring the activity of “b1046-protein”, especially from Escherichia coli or its functional equivalent or its homolog, e.g. the increase of
[89935] (a) a gene product of a gene comprising the nucleic acid molecule as shown in the respective line in column 5 of Table I (whereby the respective line disclose in column 7 the fine chemical 3,4,5-trihydroxypentanoic acid), application no. 17, preferably the coding region thereof, or a homolog or a fragment thereof, and being depicted in the same respective line as said B1046, or a functional equivalent or a homolog thereof as shown in column 8 of Table I, application no. 17, preferably the coding region thereof, particularly a homolog or functional equivalent as shown in column 8 of Table I B, application no. 17, and being depicted in the same respective line as said B1046, and preferably the activity is increased plastidic, or
[89936] (b) a polypeptide comprising a polypeptide, a consensus sequence or at least a polypeptide motif as shown in the respective line in column 5 of Table II or in column 8 of Table IV, application no. 17, respectively, and being depicted in the same respective line as said B1046, or a functional equivalent or a homolog thereof as depicted in column 8 of Table II, application no. 17, preferably a homolog or functional equivalent as depicted in column 8 of Table II B, application no. 17, and being depicted in the same respective line as said B1046, and preferably the activity is increased plastidic, whereby the respective line disclose in column 7 the fine chemical 3,4,5-trihydroxypentanoic acid.

[89937] Accordingly, in one embodiment, the molecule which activity is to be increased in the process of the invention is the gene product with an activity as a “b1046-protein”, preferably it is the molecule of section (a) or (b) of this paragraph.

[89938] In particular, it was observed that in plants, especially in Arabidopsis thaliana, increasing or generating the activity of a gene product plastidic with the activity of a “b1046-protein”, preferably being encoded by a gene comprising the nucleic acid sequence SEQ ID NO. 124051, preferably the coding region thereof, conferred the production of or the increase in 3,4,5-trihydroxypentanoic acid compared with the wild type control.

[89939] The nucleic acid sequence of B1065 from Escherichia coli, e.g. as shown in the respective line in column 5 of Table I, application no. 17, has been published in B. And the activity of the gene product thereof is the activity of multidrug resistance protein.

[89940] Accordingly, in one embodiment, the process of the present invention for producing glucose-1-phosphate in a non-human organism, like a microorganism or a plant or a part thereof, comprises increasing or generating the activity of a gene product with the activity of a gene product conferring the activity of “multidrug resistance protein”, especially from Escherichia coli or its functional equivalent or its homolog, e.g. the increase of
[89941] (a) a gene product of a gene comprising the nucleic acid molecule as shown in the respective line in column 5 of Table I (whereby the respective line disclose in column 7 the fine chemical glucose-1-phosphate), application no. 17, preferably the coding region thereof, or a homolog or a fragment thereof, and being depicted in the same respective line as said B1065, or a functional equivalent or a homolog thereof as shown in column 8 of Table I, application no. 17, preferably the coding region thereof, particularly a homolog or functional equivalent as shown in column 8 of Table I B, application no. 17, and being depicted in the same respective line as said B1065, and preferably the activity is increased plastidic, or
[89942] (b) a polypeptide comprising a polypeptide, a consensus sequence or at least a polypeptide motif as shown in the respective line in column 5 of Table II or in column 8 of Table IV, application no. 17, respectively, and being depicted in the same respective line as said B1065, or a functional equivalent or a homolog thereof as depicted in column 8 of Table II, application no. 17, preferably a homolog or functional equivalent as depicted in column 8 of Table II B, application no. 17, and being depicted in the same respective line as said B1065, and preferably the activity is increased plastidic, whereby the respective line disclose in column 7 the fine chemical glucose-1-phosphate.

[89943] Accordingly, in one embodiment, the molecule which activity is to be increased in the process of the invention is the gene product with an activity as a “multidrug resistance protein”, preferably it is the molecule of section (a) or (b) of this paragraph.

[89944] In particular, it was observed that in plants, especially in Arabidopsis thaliana, increasing or generating the activity of a gene product plastidic with the activity of a “multidrug resistance protein”, preferably being encoded by a gene comprising the nucleic acid sequence SEQ ID NO. 76032, preferably the coding region thereof, conferred the production of or the increase in glucose-1-phosphate compared with the wild type control.

[89945] The nucleic acid sequence of B1065 from Escherichia coli, e.g. as shown in the respective line in column 5 of Table I, application no. 17, has been published in B. And the activity of the gene product thereof is the activity of multidrug resistance protein.

[89946] Accordingly, in one embodiment, the process of the present invention for producing sucrose in a non-human organism, like a microorganism or a plant or a part thereof, comprises increasing or generating the activity of a gene product with the activity of a gene product conferring the activity of “multidrug resistance protein”, especially from Escherichia coli or its functional equivalent or its homolog, e.g. the increase of
[89947] (a) a gene product of a gene comprising the nucleic acid molecule as shown in the respective line in column 5 of Table I (whereby the respective line disclose in column 7 the fine chemical sucrose), application no. 17, preferably the coding region thereof, or a homolog or a fragment thereof, and being depicted in the same respective line as said B1065, or a functional equivalent or a homolog thereof as shown in column 8 of Table I, application no. 17, preferably the coding region thereof, particularly a homolog or functional equivalent as shown in column 8 of Table I B, application no. 17, and being depicted in the same respective line as said B1065, and preferably the activity is increased plastidic, or
[89948] (b) a polypeptide comprising a polypeptide, a consensus sequence or at least a polypeptide motif as shown in the respective line in column 5 of Table II or in column 8 of Table IV, application no. 17, respectively, and being depicted in the same respective line as said B1065, or a functional equivalent or a homolog thereof as depicted in column 8 of Table II, application no. 17, preferably a homolog or functional equivalent as depicted in column 8 of Table II B, application no. 17, and being depicted in the same respective line as said B1065, and preferably the activity is increased plastidic, whereby the respective line disclose in column 7 the fine chemical sucrose.

[89949] Accordingly, in one embodiment, the molecule which activity is to be increased in the process of the invention is the gene product with an activity as a “multidrug resistance protein”, preferably it is the molecule of section (a) or (b) of this paragraph.

[89950] In particular, it was observed that in plants, especially in Arabidopsis thaliana, increasing or generating the activity of a gene product plastidic with the activity of a “multidrug resistance protein”, preferably being encoded by a gene comprising the nucleic acid sequence SEQ ID NO. 76032, preferably the coding region thereof, conferred the production of or the increase in sucrose compared with the wild type control.

[89951] The nucleic acid sequence of B1102 from Escherichia coli, e.g. as shown in the respective line in column 5 of Table I, application no. 17, has been published in B. And the activity of the gene product thereof is the activity of outer membrane receptor protein precursor.

[89952] Accordingly, in one embodiment, the process of the present invention for producing fructose in a non-human organism, like a microorganism or a plant or a part thereof, comprises increasing or generating the activity of a gene product with the activity of a gene product conferring the activity of “outer membrane receptor protein precursor”, especially from Escherichia coli or its functional equivalent or its homolog, e.g. the increase of
[89953] (a) a gene product of a gene comprising the nucleic acid molecule as shown in the respective line in column 5 of Table I (whereby the respective line disclose in column 7 the fine chemical fructose), application no. 17, preferably the coding region thereof, or a homolog or a fragment thereof, and being depicted in the same respective line as said B1102, or a functional equivalent or a homolog thereof as shown in column 8 of Table I, application no. 17, preferably the coding region thereof, particularly a homolog or functional equivalent as shown in column 8 of Table I B, application no. 17, and being depicted in the same respective line as said B1102, and preferably the activity is increased non-targeted, or
[89954] (b) a polypeptide comprising a polypeptide, a consensus sequence or at least a polypeptide motif as shown in the respective line in column 5 of Table II or in column 8 of Table IV, application no. 17, respectively, and being depicted in the same respective line as said B1102, or a functional equivalent or a homolog thereof as depicted in column 8 of Table II, application no. 17, preferably a homolog or functional equivalent as depicted in column 8 of Table II B, application no. 17, and being depicted in the same respective line as said B1102, and preferably the activity is increased non-targeted, whereby the respective line disclose in column 7 the fine chemical fructose.

[89955] Accordingly, in one embodiment, the molecule which activity is to be increased in the process of the invention is the gene product with an activity as a “outer membrane receptor protein precursor”, preferably it is the molecule of section (a) or (b) of this paragraph.

[89956] In particular, it was observed that in plants, especially in Arabidopsis thaliana, increasing or generating the activity of a gene product non-targeted with the activity of a “outer membrane receptor protein precursor”, preferably being encoded by a gene comprising the nucleic acid sequence SEQ ID NO. 114979, preferably the coding region thereof, conferred the production of or the increase in fructose compared with the wild type control.

[89957] The nucleic acid sequence of B1131 from Escherichia coli, e.g. as shown in the respective line in column 5 of Table I, application no. 17, has been published in B. And the activity of the gene product thereof is the activity of adenylosuccinate lyase.

[89958] Accordingly, in one embodiment, the process of the present invention for producing glucose-1-phosphate in a non-human organism, like a microorganism or a plant or a part thereof, comprises increasing or generating the activity of a gene product with the activity of a gene product conferring the activity of “adenylosuccinate lyase”, especially from Escherichia coli or its functional equivalent or its homolog, e.g. the increase of
[89959] (a) a gene product of a gene comprising the nucleic acid molecule as shown in the respective line in column 5 of Table I (whereby the respective line disclose in column 7 the fine chemical glucose-1-phosphate), application no. 17, preferably the coding region thereof, or a homolog or a fragment thereof, and being depicted in the same respective line as said B1131, or a functional equivalent or a homolog thereof as shown in column 8 of Table I, application no. 17, preferably the coding region thereof, particularly a homolog or functional equivalent as shown in column 8 of Table I B, application no. 17, and being depicted in the same respective line as said B1131, and preferably the activity is increased plastidic, or
[89960] (b) a polypeptide comprising a polypeptide, a consensus sequence or at least a polypeptide motif as shown in the respective line in column 5 of Table II or in column 8 of Table IV, application no. 17, respectively, and being depicted in the same respective line as said B1131, or a functional equivalent or a homolog thereof as depicted in column 8 of Table II, application no. 17, preferably a homolog or functional equivalent as depicted in column 8 of Table II B, application no. 17, and being depicted in the same respective line as said B1131, and preferably the activity is increased plastidic, whereby the respective line disclose in column 7 the fine chemical glucose-1-phosphate.

[89961] Accordingly, in one embodiment, the molecule which activity is to be increased in the process of the invention is the gene product with an activity as a “adenylosuccinate lyase”, preferably it is the molecule of section (a) or (b) of this paragraph.

[89962] In particular, it was observed that in plants, especially in Arabidopsis thaliana, increasing or generating the activity of a gene product plastidic with the activity of a “adenylosuccinate lyase”, preferably being encoded by a gene comprising the nucleic acid sequence SEQ ID NO. 144611, preferably the coding region thereof, conferred the production of or the increase in glucose-1-phosphate compared with the wild type control.

[89963] The nucleic acid sequence of B1136 from Escherichia coli, e.g. as shown in the respective line in column 5 of Table I, application no. 17, has been published in B. And the activity of the gene product thereof is the activity of isocitrate dehydrogenase.

[89964] Accordingly, in one embodiment, the process of the present invention for producing glucose in a non-human organism, like a microorganism or a plant or a part thereof, comprises increasing or generating the activity of a gene product with the activity of a gene product conferring the activity of “isocitrate dehydrogenase”, especially from Escherichia coli or its functional equivalent or its homolog, e.g. the increase of
[89965] (a) a gene product of a gene comprising the nucleic acid molecule as shown in the respective line in column 5 of Table I (whereby the respective line disclose in column 7 the fine chemical glucose), application no. 17, preferably the coding region thereof, or a homolog or a fragment thereof, and being depicted in the same respective line as said B1136, or a functional equivalent or a homolog thereof as shown in column 8 of Table I, application no. 17, preferably the coding region thereof, particularly a homolog or functional equivalent as shown in column 8 of Table I B, application no. 17, and being depicted in the same respective line as said B1136, and preferably the activity is increased plastidic, or
[89966] (b) a polypeptide comprising a polypeptide, a consensus sequence or at least a polypeptide motif as shown in the respective line in column 5 of Table II or in column 8 of Table IV, application no. 17, respectively, and being depicted in the same respective line as said B1136, or a functional equivalent or a homolog thereof as depicted in column 8 of Table II, application no. 17, preferably a homolog or functional equivalent as depicted in column 8 of Table II B, application no. 17, and being depicted in the same respective line as said B1136, and preferably the activity is increased plastidic, whereby the respective line disclose in column 7 the fine chemical glucose.

[89967] Accordingly, in one embodiment, the molecule which activity is to be increased in the process of the invention is the gene product with an activity as a “isocitrate dehydrogenase”, preferably it is the molecule of section (a) or (b) of this paragraph.

[89968] In particular, it was observed that in plants, especially in Arabidopsis thaliana, increasing or generating the activity of a gene product plastidic with the activity of a “isocitrate dehydrogenase”, preferably being encoded by a gene comprising the nucleic acid sequence SEQ ID NO. 36971, preferably the coding region thereof, conferred the production of or the increase in glucose compared with the wild type control.

[89969] The nucleic acid sequence of B1137 from Escherichia coli, e.g. as shown in the respective line in column 5 of Table I, application no. 17, has been published in B. And the activity of the gene product thereof is the activity of b1137-protein.

[89970] Accordingly, in one embodiment, the process of the present invention for producing glucose-1-phosphate in a non-human organism, like a microorganism or a plant or a part thereof, comprises increasing or generating the activity of a gene product with the activity of a gene product conferring the activity of “b1137-protein”, especially from Escherichia coli or its functional equivalent or its homolog, e.g. the increase of
[89971] (a) a gene product of a gene comprising the nucleic acid molecule as shown in the respective line in column 5 of Table I (whereby the respective line disclose in column 7 the fine chemical glucose-1-phosphate), application no. 17, preferably the coding region thereof, or a homolog or a fragment thereof, and being depicted in the same respective line as said B1137, or a functional equivalent or a homolog thereof as shown in column 8 of Table I, application no. 17, preferably the coding region thereof, particularly a homolog or functional equivalent as shown in column 8 of Table I B, application no. 17, and being depicted in the same respective line as said B1137, and preferably the activity is increased non-targeted, or
[89972] (b) a polypeptide comprising a polypeptide, a consensus sequence or at least a polypeptide motif as shown in the respective line in column 5 of Table II or in column 8 of Table IV, application no. 17, respectively, and being depicted in the same respective line as said B1137, or a functional equivalent or a homolog thereof as depicted in column 8 of Table II, application no. 17, preferably a homolog or functional equivalent as depicted in column 8 of Table II B, application no. 17, and being depicted in the same respective line as said B1137, and preferably the activity is increased non-targeted, whereby the respective line disclose in column 7 the fine chemical glucose-1-phosphate.

[89973] Accordingly, in one embodiment, the molecule which activity is to be increased in the process of the invention is the gene product with an activity as a “b1137-protein”, preferably it is the molecule of section (a) or (b) of this paragraph.

[89974] In particular, it was observed that in plants, especially in Arabidopsis thaliana, increasing or generating the activity of a gene product non-targeted with the activity of a “b1137-protein”, preferably being encoded by a gene comprising the nucleic acid sequence SEQ ID NO. 37390, preferably the coding region thereof, conferred the production of or the increase in glucose-1-phosphate compared with the wild type control.

[89975] The nucleic acid sequence of B1186 from Escherichia coli, e.g. as shown in the respective line in column 5 of Table I, application no. 17, has been published in B. And the activity of the gene product thereof is the activity of sodium/proton antiporter.

[89976] Accordingly, in one embodiment, the process of the present invention for producing glucose-1-phosphate in a non-human organism, like a microorganism or a plant or a part thereof, comprises increasing or generating the activity of a gene product with the activity of a gene product conferring the activity of “sodium/proton antiporter”, especially from Escherichia coli or its functional equivalent or its homolog, e.g. the increase of
[89977] (a) a gene product of a gene comprising the nucleic acid molecule as shown in the respective line in column 5 of Table I (whereby the respective line disclose in column 7 the fine chemical glucose-1-phosphate), application no. 17, preferably the coding region thereof, or a homolog or a fragment thereof, and being depicted in the same respective line as said B1186, or a functional equivalent or a homolog thereof as shown in column 8 of Table I, application no. 17, preferably the coding region thereof, particularly a homolog or functional equivalent as shown in column 8 of Table I B, application no. 17, and being depicted in the same respective line as said B1186, and preferably the activity is increased non-targeted, or
[89978] (b) a polypeptide comprising a polypeptide, a consensus sequence or at least a polypeptide motif as shown in the respective line in column 5 of Table II or in column 8 of Table IV, application no. 17, respectively, and being depicted in the same respective line as said B1186, or a functional equivalent or a homolog thereof as depicted in column 8 of Table II, application no. 17, preferably a homolog or functional equivalent as depicted in column 8 of Table II B, application no. 17, and being depicted in the same respective line as said B1186, and preferably the activity is increased non-targeted, whereby the respective line disclose in column 7 the fine chemical glucose-1-phosphate.

[89979] Accordingly, in one embodiment, the molecule which activity is to be increased in the process of the invention is the gene product with an activity as a “sodium/proton antiporter”, preferably it is the molecule of section (a) or (b) of this paragraph.

[89980] In particular, it was observed that in plants, especially in Arabidopsis thaliana, increasing or generating the activity of a gene product non-targeted with the activity of a “sodium/proton antiporter”, preferably being encoded by a gene comprising the nucleic acid sequence SEQ ID NO. 37400, preferably the coding region thereof, conferred the production of or the increase in glucose-1-phosphate compared with the wild type control.

[89981] The nucleic acid sequence of B1214 from Escherichia coli, e.g. as shown in the respective line in column 5 of Table I, application no. 17, has been published in B. And the activity of the gene product thereof is the activity of b1214-protein.

[89982] Accordingly, in one embodiment, the process of the present invention for producing glucose-1-phosphate in a non-human organism, like a microorganism or a plant or a part thereof, comprises increasing or generating the activity of a gene product with the activity of a gene product conferring the activity of “b1214-protein”, especially from Escherichia coli or its functional equivalent or its homolog, e.g. the increase of
[89983] (a) a gene product of a gene comprising the nucleic acid molecule as shown in the respective line in column 5 of Table I (whereby the respective line disclose in column 7 the fine chemical glucose-1-phosphate), application no. 17, preferably the coding region thereof, or a homolog or a fragment thereof, and being depicted in the same respective line as said B1214, or a functional equivalent or a homolog thereof as shown in column 8 of Table I, application no. 17, preferably the coding region thereof, particularly a homolog or functional equivalent as shown in column 8 of Table I B, application no. 17, and being depicted in the same respective line as said B1214, and preferably the activity is increased non-targeted, or
[89984] (b) a polypeptide comprising a polypeptide, a consensus sequence or at least a polypeptide motif as shown in the respective line in column 5 of Table II or in column 8 of Table IV, application no. 17, respectively, and being depicted in the same respective line as said B1214, or a functional equivalent or a homolog thereof as depicted in column 8 of Table II, application no. 17, preferably a homolog or functional equivalent as depicted in column 8 of Table II B, application no. 17, and being depicted in the same respective line as said B1214, and preferably the activity is increased non-targeted, whereby the respective line disclose in column 7 the fine chemical glucose-1-phosphate.

[89985] Accordingly, in one embodiment, the molecule which activity is to be increased in the process of the invention is the gene product with an activity as a “b1214-protein”, preferably it is the molecule of section (a) or (b) of this paragraph.

[89986] In particular, it was observed that in plants, especially in Arabidopsis thaliana, increasing or generating the activity of a gene product non-targeted with the activity of a “b1214-protein”, preferably being encoded by a gene comprising the nucleic acid sequence SEQ ID NO. 144857, preferably the coding region thereof, conferred the production of or the increase in glucose-1-phosphate compared with the wild type control.

[89987] The nucleic acid sequence of B1214 from Escherichia coli, e.g. as shown in the respective line in column 5 of Table I, application no. 17, has been published in B. And the activity of the gene product thereof is the activity of b1214-protein.

[89988] Accordingly, in one embodiment, the process of the present invention for producing 3,4,5-trihydroxypentanoic acid in a non-human organism, like a microorganism or a plant or a part thereof, comprises increasing or generating the activity of a gene product with the activity of a gene product conferring the activity of “b1214-protein”, especially from Escherichia coli or its functional equivalent or its homolog, e.g. the increase of
[89989] (a) a gene product of a gene comprising the nucleic acid molecule as shown in the respective line in column 5 of Table I (whereby the respective line disclose in column 7 the fine chemical 3,4,5-trihydroxypentanoic acid), application no. 17, preferably the coding region thereof, or a homolog or a fragment thereof, and being depicted in the same respective line as said B1214, or a functional equivalent or a homolog thereof as shown in column 8 of Table I, application no. 17, preferably the coding region thereof, particularly a homolog or functional equivalent as shown in column 8 of Table I B, application no. 17, and being depicted in the same respective line as said B1214, and preferably the activity is increased non-targeted, or
[89990] (b) a polypeptide comprising a polypeptide, a consensus sequence or at least a polypeptide motif as shown in the respective line in column 5 of Table II or in column 8 of Table IV, application no. 17, respectively, and being depicted in the same respective line as said B1214, or a functional equivalent or a homolog thereof as depicted in column 8 of Table II, application no. 17, preferably a homolog or functional equivalent as depicted in column 8 of Table II B, application no. 17, and being depicted in the same respective line as said B1214, and preferably the activity is increased non-targeted, whereby the respective line disclose in column 7 the fine chemical 3,4,5-trihydroxypentanoic acid.

[89991] Accordingly, in one embodiment, the molecule which activity is to be increased in the process of the invention is the gene product with an activity as a “b1214-protein”, preferably it is the molecule of section (a) or (b) of this paragraph.

[89992] In particular, it was observed that in plants, especially in Arabidopsis thaliana, increasing or generating the activity of a gene product non-targeted with the activity of a “b1214-protein”, preferably being encoded by a gene comprising the nucleic acid sequence SEQ ID NO. 144857, preferably the coding region thereof, conferred the production of or the increase in 3,4,5-trihydroxypentanoic acid compared with the wild type control.

[89993] The nucleic acid sequence of B1219 from Escherichia coli, e.g. as shown in the respective line in column 5 of Table I, application no. 17, has been published in B. And the activity of the gene product thereof is the activity of b1219-protein.

[89994] Accordingly, in one embodiment, the process of the present invention for producing glucose-1-phosphate in a non-human organism, like a microorganism or a plant or a part thereof, comprises increasing or generating the activity of a gene product with the activity of a gene product conferring the activity of “b1219-protein”, especially from Escherichia coli or its functional equivalent or its homolog, e.g. the increase of
[89995] (a) a gene product of a gene comprising the nucleic acid molecule as shown in the respective line in column 5 of Table I (whereby the respective line disclose in column 7 the fine chemical glucose-1-phosphate), application no. 17, preferably the coding region thereof, or a homolog or a fragment thereof, and being depicted in the same respective line as said B1219, or a functional equivalent or a homolog thereof as shown in column 8 of Table I, application no. 17, preferably the coding region thereof, particularly a homolog or functional equivalent as shown in column 8 of Table I B, application no. 17, and being depicted in the same respective line as said B1219, and preferably the activity is increased non-targeted, or
[89996] (b) a polypeptide comprising a polypeptide, a consensus sequence or at least a polypeptide motif as shown in the respective line in column 5 of Table II or in column 8 of Table IV, application no. 17, respectively, and being depicted in the same respective line as said B1219, or a functional equivalent or a homolog thereof as depicted in column 8 of Table II, application no. 17, preferably a homolog or functional equivalent as depicted in column 8 of Table II B, application no. 17, and being depicted in the same respective line as said B1219, and preferably the activity is increased non-targeted, whereby the respective line disclose in column 7 the fine chemical glucose-1-phosphate.

[89997] Accordingly, in one embodiment, the molecule which activity is to be increased in the process of the invention is the gene product with an activity as a “b1219-protein”, preferably it is the molecule of section (a) or (b) of this paragraph.

[89998] In particular, it was observed that in plants, especially in Arabidopsis thaliana, increasing or generating the activity of a gene product non-targeted with the activity of a “b1219-protein”, preferably being encoded by a gene comprising the nucleic acid sequence SEQ ID NO. 112072, preferably the coding region thereof, conferred the production of or the increase in glucose-1-phosphate compared with the wild type control.

[89999] The nucleic acid sequence of B1219 from Escherichia coli, e.g. as shown in the respective line in column 5 of Table I, application no. 17, has been published in B. And the activity of the gene product thereof is the activity of b1219-protein.

[90000] Accordingly, in one embodiment, the process of the present invention for producing myo-inositol in a non-human organism, like a microorganism or a plant or a part thereof, comprises increasing or generating the activity of a gene product with the activity of a gene product conferring the activity of “b1219-protein”, especially from Escherichia coli or its functional equivalent or its homolog, e.g. the increase of
[90001] (a) a gene product of a gene comprising the nucleic acid molecule as shown in the respective line in column 5 of Table I (whereby the respective line disclose in column 7 the fine chemical myo-inositol), application no. 17, preferably the coding region thereof, or a homolog or a fragment thereof, and being depicted in the same respective line as said B1219, or a functional equivalent or a homolog thereof as shown in column 8 of Table I, application no. 17, preferably the coding region thereof, particularly a homolog or functional equivalent as shown in column 8 of Table I B, application no. 17, and being depicted in the same respective line as said B1219, and preferably the activity is increased non-targeted, or
[90002] (b) a polypeptide comprising a polypeptide, a consensus sequence or at least a polypeptide motif as shown in the respective line in column 5 of Table II or in column 8 of Table IV, application no. 17, respectively, and being depicted in the same respective line as said B1219, or a functional equivalent or a homolog thereof as depicted in column 8 of Table II, application no. 17, preferably a homolog or functional equivalent as depicted in column 8 of Table II B, application no. 17, and being depicted in the same respective line as said B1219, and preferably the activity is increased non-targeted, whereby the respective line disclose in column 7 the fine chemical myo-inositol.

[90003] Accordingly, in one embodiment, the molecule which activity is to be increased in the process of the invention is the gene product with an activity as a “b1219-protein”, preferably it is the molecule of section (a) or (b) of this paragraph.

[90004] In particular, it was observed that in plants, especially in Arabidopsis thaliana, increasing or generating the activity of a gene product non-targeted with the activity of a “b1219-protein”, preferably being encoded by a gene comprising the nucleic acid sequence SEQ ID NO. 112072, preferably the coding region thereof, conferred the production of or the increase in myo-inositol compared with the wild type control.

[90005] The nucleic acid sequence of B1219 from Escherichia coli, e.g. as shown in the respective line in column 5 of Table I, application no. 17, has been published in B. And the activity of the gene product thereof is the activity of b1219-protein.

[90006] Accordingly, in one embodiment, the process of the present invention for producing 3,4,5-trihydroxypentanoic acid in a non-human organism, like a microorganism or a plant or a part thereof, comprises increasing or generating the activity of a gene product with the activity of a gene product conferring the activity of “b1219-protein”, especially from Escherichia coli or its functional equivalent or its homolog, e.g. the increase of
[90007] (a) a gene product of a gene comprising the nucleic acid molecule as shown in the respective line in column 5 of Table I (whereby the respective line disclose in column 7 the fine chemical 3,4,5-trihydroxypentanoic acid), application no. 17, preferably the coding region thereof, or a homolog or a fragment thereof, and being depicted in the same respective line as said B1219, or a functional equivalent or a homolog thereof as shown in column 8 of Table I, application no. 17, preferably the coding region thereof, particularly a homolog or functional equivalent as shown in column 8 of Table I B, application no. 17, and being depicted in the same respective line as said B1219, and preferably the activity is increased non-targeted, or
[90008] (b) a polypeptide comprising a polypeptide, a consensus sequence or at least a polypeptide motif as shown in the respective line in column 5 of Table II or in column 8 of Table IV, application no. 17, respectively, and being depicted in the same respective line as said B1219, or a functional equivalent or a homolog thereof as depicted in column 8 of Table II, application no. 17, preferably a homolog or functional equivalent as depicted in column 8 of Table II B, application no. 17, and being depicted in the same respective line as said B1219, and preferably the activity is increased non-targeted, whereby the respective line disclose in column 7 the fine chemical 3,4,5-trihydroxypentanoic acid.

[90009] Accordingly, in one embodiment, the molecule which activity is to be increased in the process of the invention is the gene product with an activity as a “b1219-protein”, preferably it is the molecule of section (a) or (b) of this paragraph.

[90010] In particular, it was observed that in plants, especially in Arabidopsis thaliana, increasing or generating the activity of a gene product non-targeted with the activity of a “b1219-protein”, preferably being encoded by a gene comprising the nucleic acid sequence SEQ ID NO. 112072, preferably the coding region thereof, conferred the production of or the increase in 3,4,5-trihydroxypentanoic acid compared with the wild type control.

[90011] The nucleic acid sequence of B1234 from Escherichia coli, e.g. as shown in the respective line in column 5 of Table I, application no. 17, has been published in B. And the activity of the gene product thereof is the activity of b1234-protein.

[90012] Accordingly, in one embodiment, the process of the present invention for producing myo-inositol in a non-human organism, like a microorganism or a plant or a part thereof, comprises increasing or generating the activity of a gene product with the activity of a gene product conferring the activity of “b1234-protein”, especially from Escherichia coli or its functional equivalent or its homolog, e.g. the increase of
[90013] (a) a gene product of a gene comprising the nucleic acid molecule as shown in the respective line in column 5 of Table I (whereby the respective line disclose in column 7 the fine chemical myo-inositol), application no. 17, preferably the coding region thereof, or a homolog or a fragment thereof, and being depicted in the same respective line as said B1234, or a functional equivalent or a homolog thereof as shown in column 8 of Table I, application no. 17, preferably the coding region thereof, particularly a homolog or functional equivalent as shown in column 8 of Table I B, application no. 17, and being depicted in the same respective line as said B1234, and preferably the activity is increased non-targeted, or
[90014] (b) a polypeptide comprising a polypeptide, a consensus sequence or at least a polypeptide motif as shown in the respective line in column 5 of Table II or in column 8 of Table IV, application no. 17, respectively, and being depicted in the same respective line as said B1234, or a functional equivalent or a homolog thereof as depicted in column 8 of Table II, application no. 17, preferably a homolog or functional equivalent as depicted in column 8 of Table II B, application no. 17, and being depicted in the same respective line as said B1234, and preferably the activity is increased non-targeted, whereby the respective line disclose in column 7 the fine chemical myo-inositol.

[90015] Accordingly, in one embodiment, the molecule which activity is to be increased in the process of the invention is the gene product with an activity as a “b1234-protein”, preferably it is the molecule of section (a) or (b) of this paragraph.

[90016] In particular, it was observed that in plants, especially in Arabidopsis thaliana, increasing or generating the activity of a gene product non-targeted with the activity of a “b1234-protein”, preferably being encoded by a gene comprising the nucleic acid sequence SEQ ID NO. 112111, preferably the coding region thereof, conferred the production of or the increase in myo-inositol compared with the wild type control.

[90017] The nucleic acid sequence of B1249 from Escherichia coli, e.g. as shown in the respective line in column 5 of Table I, application no. 17, has been published in B. And the activity of the gene product thereof is the activity of cardiolipin synthase.

[90018] Accordingly, in one embodiment, the process of the present invention for producing galactinol in a non-human organism, like a microorganism or a plant or a part thereof, comprises increasing or generating the activity of a gene product with the activity of a gene product conferring the activity of “cardiolipin synthase”, especially from Escherichia coli or its functional equivalent or its homolog, e.g. the increase of
[90019] (a) a gene product of a gene comprising the nucleic acid molecule as shown in the respective line in column 5 of Table I (whereby the respective line disclose in column 7 the fine chemical galactinol), application no. 17, preferably the coding region thereof, or a homolog or a fragment thereof, and being depicted in the same respective line as said B1249, or a functional equivalent or a homolog thereof as shown in column 8 of Table I, application no. 17, preferably the coding region thereof, particularly a homolog or functional equivalent as shown in column 8 of Table I B, application no. 17, and being depicted in the same respective line as said B1249, and preferably the activity is increased plastidic, or
[90020] (b) a polypeptide comprising a polypeptide, a consensus sequence or at least a polypeptide motif as shown in the respective line in column 5 of Table II or in column 8 of Table IV, application no. 17, respectively, and being depicted in the same respective line as said B1249, or a functional equivalent or a homolog thereof as depicted in column 8 of Table II, application no. 17, preferably a homolog or functional equivalent as depicted in column 8 of Table II B, application no. 17, and being depicted in the same respective line as said B1249, and preferably the activity is increased plastidic, whereby the respective line disclose in column 7 the fine chemical galactinol.

[90021] Accordingly, in one embodiment, the molecule which activity is to be increased in the process of the invention is the gene product with an activity as a “cardiolipin synthase”, preferably it is the molecule of section (a) or (b) of this paragraph.

[90022] In particular, it was observed that in plants, especially in Arabidopsis thaliana, increasing or generating the activity of a gene product plastidic with the activity of a “cardiolipin synthase”, preferably being encoded by a gene comprising the nucleic acid sequence SEQ ID NO. 98778, preferably the coding region thereof, conferred the production of or the increase in galactinol compared with the wild type control.

[90023] The nucleic acid sequence of B1249 from Escherichia coli, e.g. as shown in the respective line in column 5 of Table I, application no. 17, has been published in B. And the activity of the gene product thereof is the activity of cardiolipin synthase.

[90024] Accordingly, in one embodiment, the process of the present invention for producing galactitol in a non-human organism, like a microorganism or a plant or a part thereof, comprises increasing or generating the activity of a gene product with the activity of a gene product conferring the activity of “cardiolipin synthase”, especially from Escherichia coli or its functional equivalent or its homolog, e.g. the increase of
[90025] (a) a gene product of a gene comprising the nucleic acid molecule as shown in the respective line in column 5 of Table I (whereby the respective line disclose in column 7 the fine chemical galactitol), application no. 17, preferably the coding region thereof, or a homolog or a fragment thereof, and being depicted in the same respective line as said B1249, or a functional equivalent or a homolog thereof as shown in column 8 of Table I, application no. 17, preferably the coding region thereof, particularly a homolog or functional equivalent as shown in column 8 of Table I B, application no. 17, and being depicted in the same respective line as said B1249, and preferably the activity is increased plastidic, or
[90026] (b) a polypeptide comprising a polypeptide, a consensus sequence or at least a polypeptide motif as shown in the respective line in column 5 of Table II or in column 8 of Table IV, application no. 17, respectively, and being depicted in the same respective line as said B1249, or a functional equivalent or a homolog thereof as depicted in column 8 of Table II, application no. 17, preferably a homolog or functional equivalent as depicted in column 8 of Table II B, application no. 17, and being depicted in the same respective line as said B1249, and preferably the activity is increased plastidic, whereby the respective line disclose in column 7 the fine chemical galactitol.

[90027] Accordingly, in one embodiment, the molecule which activity is to be increased in the process of the invention is the gene product with an activity as a “cardiolipin synthase”, preferably it is the molecule of section (a) or (b) of this paragraph.

[90028] In particular, it was observed that in plants, especially in Arabidopsis thaliana, increasing or generating the activity of a gene product plastidic with the activity of a “cardiolipin synthase”, preferably being encoded by a gene comprising the nucleic acid sequence SEQ ID NO. 98778, preferably the coding region thereof, conferred the production of or the increase in galactitol compared with the wild type control.

[90029] The nucleic acid sequence of B1249 from Escherichia coli, e.g. as shown in the respective line in column 5 of Table I, application no. 17, has been published in B. And the activity of the gene product thereof is the activity of cardiolipin synthase.

[90030] Accordingly, in one embodiment, the process of the present invention for producing sorbitol in a non-human organism, like a microorganism or a plant or a part thereof, comprises increasing or generating the activity of a gene product with the activity of a gene product conferring the activity of “cardiolipin synthase”, especially from Escherichia coli or its functional equivalent or its homolog, e.g. the increase of
[90031] (a) a gene product of a gene comprising the nucleic acid molecule as shown in the respective line in column 5 of Table I (whereby the respective line disclose in column 7 the fine chemical sorbitol), application no. 17, preferably the coding region thereof, or a homolog or a fragment thereof, and being depicted in the same respective line as said B1249, or a functional equivalent or a homolog thereof as shown in column 8 of Table I, application no. 17, preferably the coding region thereof, particularly a homolog or functional equivalent as shown in column 8 of Table I B, application no. 17, and being depicted in the same respective line as said B1249, and preferably the activity is increased plastidic, or
[90032] (b) a polypeptide comprising a polypeptide, a consensus sequence or at least a polypeptide motif as shown in the respective line in column 5 of Table II or in column 8 of Table IV, application no. 17, respectively, and being depicted in the same respective line as said B1249, or a functional equivalent or a homolog thereof as depicted in column 8 of Table II, application no. 17, preferably a homolog or functional equivalent as depicted in column 8 of Table II B, application no. 17, and being depicted in the same respective line as said B1249, and preferably the activity is increased plastidic, whereby the respective line disclose in column 7 the fine chemical sorbitol.

[90033] Accordingly, in one embodiment, the molecule which activity is to be increased in the process of the invention is the gene product with an activity as a “cardiolipin synthase”, preferably it is the molecule of section (a) or (b) of this paragraph.

[90034] In particular, it was observed that in plants, especially in Arabidopsis thaliana, increasing or generating the activity of a gene product plastidic with the activity of a “cardiolipin synthase”, preferably being encoded by a gene comprising the nucleic acid sequence SEQ ID NO. 98778, preferably the coding region thereof, conferred the production of or the increase in sorbitol compared with the wild type control.

[90035] The nucleic acid sequence of B1254 from Escherichia coli, e.g. as shown in the respective line in column 5 of Table I, application no. 17, has been published in B. And the activity of the gene product thereof is the activity of intracellular septation protein.

[90036] Accordingly, in one embodiment, the process of the present invention for producing 3,4,5-trihydroxypentanoic acid in a non-human organism, like a microorganism or a plant or a part thereof, comprises increasing or generating the activity of a gene product with the activity of a gene product conferring the activity of “intracellular septation protein”, especially from Escherichia coli or its functional equivalent or its homolog, e.g. the increase of
[90037] (a) a gene product of a gene comprising the nucleic acid molecule as shown in the respective line in column 5 of Table I (whereby the respective line disclose in column 7 the fine chemical 3,4,5-trihydroxypentanoic acid), application no. 17, preferably the coding region thereof, or a homolog or a fragment thereof, and being depicted in the same respective line as said B1254, or a functional equivalent or a homolog thereof as shown in column 8 of Table I, application no. 17, preferably the coding region thereof, particularly a homolog or functional equivalent as shown in column 8 of Table I B, application no. 17, and being depicted in the same respective line as said B1254, and preferably the activity is increased non-targeted, or
[90038] (b) a polypeptide comprising a polypeptide, a consensus sequence or at least a polypeptide motif as shown in the respective line in column 5 of Table II or in column 8 of Table IV, application no. 17, respectively, and being depicted in the same respective line as said B1254, or a functional equivalent or a homolog thereof as depicted in column 8 of Table II, application no. 17, preferably a homolog or functional equivalent as depicted in column 8 of Table II B, application no. 17, and being depicted in the same respective line as said B1254, and preferably the activity is increased non-targeted, whereby the respective line disclose in column 7 the fine chemical 3,4,5-trihydroxypentanoic acid.

[90039] Accordingly, in one embodiment, the molecule which activity is to be increased in the process of the invention is the gene product with an activity as a “intracellular septation protein”, preferably it is the molecule of section (a) or (b) of this paragraph.

[90040] In particular, it was observed that in plants, especially in Arabidopsis thaliana, increasing or generating the activity of a gene product non-targeted with the activity of a “intracellular septation protein”, preferably being encoded by a gene comprising the nucleic acid sequence SEQ ID NO. 144894, preferably the coding region thereof, conferred the production of or the increase in 3,4,5-trihydroxypentanoic acid compared with the wild type control.

[90041] The nucleic acid sequence of B1255 from Escherichia coli, e.g. as shown in the respective line in column 5 of Table I, application no. 17, has been published in B. And the activity of the gene product thereof is the activity of membrane protein.

[90042] Accordingly, in one embodiment, the process of the present invention for producing fructose in a non-human organism, like a microorganism or a plant or a part thereof, comprises increasing or generating the activity of a gene product with the activity of a gene product conferring the activity of “membrane protein”, especially from Escherichia coli or its functional equivalent or its homolog, e.g. the increase of
[90043] (a) a gene product of a gene comprising the nucleic acid molecule as shown in the respective line in column 5 of Table I (whereby the respective line disclose in column 7 the fine chemical fructose), application no. 17, preferably the coding region thereof, or a homolog or a fragment thereof, and being depicted in the same respective line as said B1255, or a functional equivalent or a homolog thereof as shown in column 8 of Table I, application no. 17, preferably the coding region thereof, particularly a homolog or functional equivalent as shown in column 8 of Table I B, application no. 17, and being depicted in the same respective line as said B1255, and preferably the activity is increased non-targeted, or
[90044] (b) a polypeptide comprising a polypeptide, a consensus sequence or at least a polypeptide motif as shown in the respective line in column 5 of Table II or in column 8 of Table IV, application no. 17, respectively, and being depicted in the same respective line as said B1255, or a functional equivalent or a homolog thereof as depicted in column 8 of Table II, application no. 17, preferably a homolog or functional equivalent as depicted in column 8 of Table II B, application no. 17, and being depicted in the same respective line as said B1255, and preferably the activity is increased non-targeted, whereby the respective line disclose in column 7 the fine chemical fructose.

[90045] Accordingly, in one embodiment, the molecule which activity is to be increased in the process of the invention is the gene product with an activity as a “membrane protein”, preferably it is the molecule of section (a) or (b) of this paragraph.

[90046] In particular, it was observed that in plants, especially in Arabidopsis thaliana, increasing or generating the activity of a gene product non-targeted with the activity of a “membrane protein”, preferably being encoded by a gene comprising the nucleic acid sequence SEQ ID NO. 37483, preferably the coding region thereof, conferred the production of or the increase in fructose compared with the wild type control.

[90047] The nucleic acid sequence of B1255 from Escherichia coli, e.g. as shown in the respective line in column 5 of Table I, application no. 17, has been published in B. And the activity of the gene product thereof is the activity of membrane protein.

[90048] Accordingly, in one embodiment, the process of the present invention for producing glucose in a non-human organism, like a microorganism or a plant or a part thereof, comprises increasing or generating the activity of a gene product with the activity of a gene product conferring the activity of “membrane protein”, especially from Escherichia coli or its functional equivalent or its homolog, e.g. the increase of
[90049] (a) a gene product of a gene comprising the nucleic acid molecule as shown in the respective line in column 5 of Table I (whereby the respective line disclose in column 7 the fine chemical glucose), application no. 17, preferably the coding region thereof, or a homolog or a fragment thereof, and being depicted in the same respective line as said B1255, or a functional equivalent or a homolog thereof as shown in column 8 of Table I, application no. 17, preferably the coding region thereof, particularly a homolog or functional equivalent as shown in column 8 of Table I B, application no. 17, and being depicted in the same respective line as said B1255, and preferably the activity is increased non-targeted, or
[90050] (b) a polypeptide comprising a polypeptide, a consensus sequence or at least a polypeptide motif as shown in the respective line in column 5 of Table II or in column 8 of Table IV, application no. 17, respectively, and being depicted in the same respective line as said B1255, or a functional equivalent or a homolog thereof as depicted in column 8 of Table II, application no. 17, preferably a homolog or functional equivalent as depicted in column 8 of Table II B, application no. 17, and being depicted in the same respective line as said B1255, and preferably the activity is increased non-targeted, whereby the respective line disclose in column 7 the fine chemical glucose.

[90051] Accordingly, in one embodiment, the molecule which activity is to be increased in the process of the invention is the gene product with an activity as a “membrane protein”, preferably it is the molecule of section (a) or (b) of this paragraph.

[90052] In particular, it was observed that in plants, especially in Arabidopsis thaliana, increasing or generating the activity of a gene product non-targeted with the activity of a “membrane protein”, preferably being encoded by a gene comprising the nucleic acid sequence SEQ ID NO. 37483, preferably the coding region thereof, conferred the production of or the increase in glucose compared with the wild type control.

[90053] The nucleic acid sequence of B1255 from Escherichia coli, e.g. as shown in the respective line in column 5 of Table I, application no. 17, has been published in B. And the activity of the gene product thereof is the activity of membrane protein.

[90054] Accordingly, in one embodiment, the process of the present invention for producing raffinose in a non-human organism, like a microorganism or a plant or a part thereof, comprises increasing or generating the activity of a gene product with the activity of a gene product conferring the activity of “membrane protein”, especially from Escherichia coli or its functional equivalent or its homolog, e.g. the increase of
[90055] (a) a gene product of a gene comprising the nucleic acid molecule as shown in the respective line in column 5 of Table I (whereby the respective line disclose in column 7 the fine chemical raffinose), application no. 17, preferably the coding region thereof, or a homolog or a fragment thereof, and being depicted in the same respective line as said B1255, or a functional equivalent or a homolog thereof as shown in column 8 of Table I, application no. 17, preferably the coding region thereof, particularly a homolog or functional equivalent as shown in column 8 of Table I B, application no. 17, and being depicted in the same respective line as said B1255, and preferably the activity is increased non-targeted, or
[90056] (b) a polypeptide comprising a polypeptide, a consensus sequence or at least a polypeptide motif as shown in the respective line in column 5 of Table II or in column 8 of Table IV, application no. 17, respectively, and being depicted in the same respective line as said B1255, or a functional equivalent or a homolog thereof as depicted in column 8 of Table II, application no. 17, preferably a homolog or functional equivalent as depicted in column 8 of Table II B, application no. 17, and being depicted in the same respective line as said B1255, and preferably the activity is increased non-targeted, whereby the respective line disclose in column 7 the fine chemical raffinose.

[90057] Accordingly, in one embodiment, the molecule which activity is to be increased in the process of the invention is the gene product with an activity as a “membrane protein”, preferably it is the molecule of section (a) or (b) of this paragraph.

[90058] In particular, it was observed that in plants, especially in Arabidopsis thaliana, increasing or generating the activity of a gene product non-targeted with the activity of a “membrane protein”, preferably being encoded by a gene comprising the nucleic acid sequence SEQ ID NO. 37483, preferably the coding region thereof, conferred the production of or the increase in raffinose compared with the wild type control.

[90059] The nucleic acid sequence of B1255 from Escherichia coli, e.g. as shown in the respective line in column 5 of Table I, application no. 17, has been published in B. And the activity of the gene product thereof is the activity of membrane protein.

[90060] Accordingly, in one embodiment, the process of the present invention for producing sucrose in a non-human organism, like a microorganism or a plant or a part thereof, comprises increasing or generating the activity of a gene product with the activity of a gene product conferring the activity of “membrane protein”, especially from Escherichia coli or its functional equivalent or its homolog, e.g. the increase of
[90061] (a) a gene product of a gene comprising the nucleic acid molecule as shown in the respective line in column 5 of Table I (whereby the respective line disclose in column 7 the fine chemical sucrose), application no. 17, preferably the coding region thereof, or a homolog or a fragment thereof, and being depicted in the same respective line as said B1255, or a functional equivalent or a homolog thereof as shown in column 8 of Table I, application no. 17, preferably the coding region thereof, particularly a homolog or functional equivalent as shown in column 8 of Table I B, application no. 17, and being depicted in the same respective line as said B1255, and preferably the activity is increased non-targeted, or
[90062] (b) a polypeptide comprising a polypeptide, a consensus sequence or at least a polypeptide motif as shown in the respective line in column 5 of Table II or in column 8 of Table IV, application no. 17, respectively, and being depicted in the same respective line as said B1255, or a functional equivalent or a homolog thereof as depicted in column 8 of Table II, application no. 17, preferably a homolog or functional equivalent as depicted in column 8 of Table II B, application no. 17, and being depicted in the same respective line as said B1255, and preferably the activity is increased non-targeted, whereby the respective line disclose in column 7 the fine chemical sucrose.

[90063] Accordingly, in one embodiment, the molecule which activity is to be increased in the process of the invention is the gene product with an activity as a “membrane protein”, preferably it is the molecule of section (a) or (b) of this paragraph.

[90064] In particular, it was observed that in plants, especially in Arabidopsis thaliana, increasing or generating the activity of a gene product non-targeted with the activity of a “membrane protein”, preferably being encoded by a gene comprising the nucleic acid sequence SEQ ID NO. 37483, preferably the coding region thereof, conferred the production of or the increase in sucrose compared with the wild type control.

[90065] The nucleic acid sequence of B1262 from Escherichia coli, e.g. as shown in the respective line in column 5 of Table I, application no. 17, has been published in B. And the activity of the gene product thereof is the activity of tryptophan biosynthesis protein.

[90066] Accordingly, in one embodiment, the process of the present invention for producing myo-inositol in a non-human organism, like a microorganism or a plant or a part thereof, comprises increasing or generating the activity of a gene product with the activity of a gene product conferring the activity of “tryptophan biosynthesis protein”, especially from Escherichia coli or its functional equivalent or its homolog, e.g. the increase of
[90067] (a) a gene product of a gene comprising the nucleic acid molecule as shown in the respective line in column 5 of Table I (whereby the respective line disclose in column 7 the fine chemical myo-inositol), application no. 17, preferably the coding region thereof, or a homolog or a fragment thereof, and being depicted in the same respective line as said B1262, or a functional equivalent or a homolog thereof as shown in column 8 of Table I, application no. 17, preferably the coding region thereof, particularly a homolog or functional equivalent as shown in column 8 of Table I B, application no. 17, and being depicted in the same respective line as said B1262, and preferably the activity is increased plastidic, or
[90068] (b) a polypeptide comprising a polypeptide, a consensus sequence or at least a polypeptide motif as shown in the respective line in column 5 of Table II or in column 8 of Table IV, application no. 17, respectively, and being depicted in the same respective line as said B1262, or a functional equivalent or a homolog thereof as depicted in column 8 of Table II, application no. 17, preferably a homolog or functional equivalent as depicted in column 8 of Table II B, application no. 17, and being depicted in the same respective line as said B1262, and preferably the activity is increased plastidic, whereby the respective line disclose in column 7 the fine chemical myo-inositol.

[90069] Accordingly, in one embodiment, the molecule which activity is to be increased in the process of the invention is the gene product with an activity as a “tryptophan biosynthesis protein”, preferably it is the molecule of section (a) or (b) of this paragraph.

[90070] In particular, it was observed that in plants, especially in Arabidopsis thaliana, increasing or generating the activity of a gene product plastidic with the activity of a “tryptophan biosynthesis protein”, preferably being encoded by a gene comprising the nucleic acid sequence SEQ ID NO. 76157, preferably the coding region thereof, conferred the production of or the increase in myo-inositol compared with the wild type control.

[90071] The nucleic acid sequence of B1285 from Escherichia coli, e.g. as shown in the respective line in column 5 of Table I, application no. 17, has been published in B. And the activity of the gene product thereof is the activity of b1285-protein.

[90072] Accordingly, in one embodiment, the process of the present invention for producing fructose in a non-human organism, like a microorganism or a plant or a part thereof, comprises increasing or generating the activity of a gene product with the activity of a gene product conferring the activity of “b1285-protein”, especially from Escherichia coli or its functional equivalent or its homolog, e.g. the increase of
[90073] (a) a gene product of a gene comprising the nucleic acid molecule as shown in the respective line in column 5 of Table I (whereby the respective line disclose in column 7 the fine chemical fructose), application no. 17, preferably the coding region thereof, or a homolog or a fragment thereof, and being depicted in the same respective line as said B1285, or a functional equivalent or a homolog thereof as shown in column 8 of Table I, application no. 17, preferably the coding region thereof, particularly a homolog or functional equivalent as shown in column 8 of Table I B, application no. 17, and being depicted in the same respective line as said B1285, and preferably the activity is increased non-targeted, or
[90074] (b) a polypeptide comprising a polypeptide, a consensus sequence or at least a polypeptide motif as shown in the respective line in column 5 of Table II or in column 8 of Table IV, application no. 17, respectively, and being depicted in the same respective line as said B1285, or a functional equivalent or a homolog thereof as depicted in column 8 of Table II, application no. 17, preferably a homolog or functional equivalent as depicted in column 8 of Table II B, application no. 17, and being depicted in the same respective line as said B1285, and preferably the activity is increased non-targeted, whereby the respective line disclose in column 7 the fine chemical fructose.

[90075] Accordingly, in one embodiment, the molecule which activity is to be increased in the process of the invention is the gene product with an activity as a “b1285-protein”, preferably it is the molecule of section (a) or (b) of this paragraph.

[90076] In particular, it was observed that in plants, especially in Arabidopsis thaliana, increasing or generating the activity of a gene product non-targeted with the activity of a “b1285-protein”, preferably being encoded by a gene comprising the nucleic acid sequence SEQ ID NO. 134655, preferably the coding region thereof, conferred the production of or the increase in fructose compared with the wild type control.

[90077] The nucleic acid sequence of B1356 from Escherichia coli, e.g. as shown in the respective line in column 5 of Table I, application no. 17, has been published in B. And the activity of the gene product thereof is the activity of phage-related repressor protein.

[90078] Accordingly, in one embodiment, the process of the present invention for producing glucose-1-phosphate in a non-human organism, like a microorganism or a plant or a part thereof, comprises increasing or generating the activity of a gene product with the activity of a gene product conferring the activity of “phage-related repressor protein”, especially from Escherichia coli or its functional equivalent or its homolog, e.g. the increase of
[90079] (a) a gene product of a gene comprising the nucleic acid molecule as shown in the respective line in column 5 of Table I (whereby the respective line disclose in column 7 the fine chemical glucose-1-phosphate), application no. 17, preferably the coding region thereof, or a homolog or a fragment thereof, and being depicted in the same respective line as said B1356, or a functional equivalent or a homolog thereof as shown in column 8 of Table I, application no. 17, preferably the coding region thereof, particularly a homolog or functional equivalent as shown in column 8 of Table I B, application no. 17, and being depicted in the same respective line as said B1356, and preferably the activity is increased non-targeted, or
[90080] (b) a polypeptide comprising a polypeptide, a consensus sequence or at least a polypeptide motif as shown in the respective line in column 5 of Table II or in column 8 of Table IV, application no. 17, respectively, and being depicted in the same respective line as said B1356, or a functional equivalent or a homolog thereof as depicted in column 8 of Table II, application no. 17, preferably a homolog or functional equivalent as depicted in column 8 of Table II B, application no. 17, and being depicted in the same respective line as said B1356, and preferably the activity is increased non-targeted, whereby the respective line disclose in column 7 the fine chemical glucose-1-phosphate.

[90081] Accordingly, in one embodiment, the molecule which activity is to be increased in the process of the invention is the gene product with an activity as a “phage-related repressor protein”, preferably it is the molecule of section (a) or (b) of this paragraph.

[90082] In particular, it was observed that in plants, especially in Arabidopsis thaliana, increasing or generating the activity of a gene product non-targeted with the activity of a “phage-related repressor protein”, preferably being encoded by a gene comprising the nucleic acid sequence SEQ ID NO. 124557, preferably the coding region thereof, conferred the production of or the increase in glucose-1-phosphate compared with the wild type control.

[90083] The nucleic acid sequence of B1357 from Escherichia coli, e.g. as shown in the respective line in column 5 of Table I, application no. 17, has been published in B. And the activity of the gene product thereof is the activity of b1357-protein.

[90084] Accordingly, in one embodiment, the process of the present invention for producing glucose-1-phosphate in a non-human organism, like a microorganism or a plant or a part thereof, comprises increasing or generating the activity of a gene product with the activity of a gene product conferring the activity of “b1357-protein”, especially from Escherichia coli or its functional equivalent or its homolog, e.g. the increase of
[90085] (a) a gene product of a gene comprising the nucleic acid molecule as shown in the respective line in column 5 of Table I (whereby the respective line disclose in column 7 the fine chemical glucose-1-phosphate), application no. 17, preferably the coding region thereof, or a homolog or a fragment thereof, and being depicted in the same respective line as said B1357, or a functional equivalent or a homolog thereof as shown in column 8 of Table I, application no. 17, preferably the coding region thereof, particularly a homolog or functional equivalent as shown in column 8 of Table I B, application no. 17, and being depicted in the same respective line as said B1357, and preferably the activity is increased non-targeted, or
[90086] (b) a polypeptide comprising a polypeptide, a consensus sequence or at least a polypeptide motif as shown in the respective line in column 5 of Table II or in column 8 of Table IV, application no. 17, respectively, and being depicted in the same respective line as said B1357, or a functional equivalent or a homolog thereof as depicted in column 8 of Table II, application no. 17, preferably a homolog or functional equivalent as depicted in column 8 of Table II B, application no. 17, and being depicted in the same respective line as said B1357, and preferably the activity is increased non-targeted, whereby the respective line disclose in column 7 the fine chemical glucose-1-phosphate.

[90087] Accordingly, in one embodiment, the molecule which activity is to be increased in the process of the invention is the gene product with an activity as a “b1357-protein”, preferably it is the molecule of section (a) or (b) of this paragraph.

[90088] In particular, it was observed that in plants, especially in Arabidopsis thaliana, increasing or generating the activity of a gene product non-targeted with the activity of a “b1357-protein”, preferably being encoded by a gene comprising the nucleic acid sequence SEQ ID NO. 145066, preferably the coding region thereof, conferred the production of or the increase in glucose-1-phosphate compared with the wild type control.

[90089] The nucleic acid sequence of B1390 from Escherichia coli, e.g. as shown in the respective line in column 5 of Table I, application no. 17, has been published in B. And the activity of the gene product thereof is the activity of phenylacetic acid degradation protein.

[90090] Accordingly, in one embodiment, the process of the present invention for producing glucose in a non-human organism, like a microorganism or a plant or a part thereof, comprises increasing or generating the activity of a gene product with the activity of a gene product conferring the activity of “phenylacetic acid degradation protein”, especially from Escherichia coli or its functional equivalent or its homolog, e.g. the increase of
[90091] (a) a gene product of a gene comprising the nucleic acid molecule as shown in the respective line in column 5 of Table I (whereby the respective line disclose in column 7 the fine chemical glucose), application no. 17, preferably the coding region thereof, or a homolog or a fragment thereof, and being depicted in the same respective line as said B1390, or a functional equivalent or a homolog thereof as shown in column 8 of Table I, application no. 17, preferably the coding region thereof, particularly a homolog or functional equivalent as shown in column 8 of Table I B, application no. 17, and being depicted in the same respective line as said B1390, and preferably the activity is increased non-targeted, or
[90092] (b) a polypeptide comprising a polypeptide, a consensus sequence or at least a polypeptide motif as shown in the respective line in column 5 of Table II or in column 8 of Table IV, application no. 17, respectively, and being depicted in the same respective line as said B1390, or a functional equivalent or a homolog thereof as depicted in column 8 of Table II, application no. 17, preferably a homolog or functional equivalent as depicted in column 8 of Table II B, application no. 17, and being depicted in the same respective line as said B1390, and preferably the activity is increased non-targeted, whereby the respective line disclose in column 7 the fine chemical glucose.

[90093] Accordingly, in one embodiment, the molecule which activity is to be increased in the process of the invention is the gene product with an activity as a “phenylacetic acid degradation protein”, preferably it is the molecule of section (a) or (b) of this paragraph.

[90094] In particular, it was observed that in plants, especially in Arabidopsis thaliana, increasing or generating the activity of a gene product non-targeted with the activity of a “phenylacetic acid degradation protein”, preferably being encoded by a gene comprising the nucleic acid sequence SEQ ID NO. 134697, preferably the coding region thereof, conferred the production of or the increase in glucose compared with the wild type control.

[90095] The nucleic acid sequence of B1391 from Escherichia coli, e.g. as shown in the respective line in column 5 of Table I, application no. 17, has been published in B. And the activity of the gene product thereof is the activity of phenylacetic acid degradation protein.

[90096] Accordingly, in one embodiment, the process of the present invention for producing 3,4,5-trihydroxypentanoic acid in a non-human organism, like a microorganism or a plant or a part thereof, comprises increasing or generating the activity of a gene product with the activity of a gene product conferring the activity of “phenylacetic acid degradation protein”, especially from Escherichia coli or its functional equivalent or its homolog, e.g. the increase of
[90097] (a) a gene product of a gene comprising the nucleic acid molecule as shown in the respective line in column 5 of Table I (whereby the respective line disclose in column 7 the fine chemical 3,4,5-trihydroxypentanoic acid), application no. 17, preferably the coding region thereof, or a homolog or a fragment thereof, and being depicted in the same respective line as said B1391, or a functional equivalent or a homolog thereof as shown in column 8 of Table I, application no. 17, preferably the coding region thereof, particularly a homolog or functional equivalent as shown in column 8 of Table I B, application no. 17, and being depicted in the same respective line as said B1391, and preferably the activity is increased non-targeted, or
[90098] (b) a polypeptide comprising a polypeptide, a consensus sequence or at least a polypeptide motif as shown in the respective line in column 5 of Table II or in column 8 of Table IV, application no. 17, respectively, and being depicted in the same respective line as said B1391, or a functional equivalent or a homolog thereof as depicted in column 8 of Table II, application no. 17, preferably a homolog or functional equivalent as depicted in column 8 of Table II B, application no. 17, and being depicted in the same respective line as said B1391, and preferably the activity is increased non-targeted, whereby the respective line disclose in column 7 the fine chemical 3,4,5-trihydroxypentanoic acid.

[90099] Accordingly, in one embodiment, the molecule which activity is to be increased in the process of the invention is the gene product with an activity as a “phenylacetic acid degradation protein”, preferably it is the molecule of section (a) or (b) of this paragraph.

[90100] In particular, it was observed that in plants, especially in Arabidopsis thaliana, increasing or generating the activity of a gene product non-targeted with the activity of a “phenylacetic acid degradation protein”, preferably being encoded by a gene comprising the nucleic acid sequence SEQ ID NO. 131489, preferably the coding region thereof, conferred the production of or the increase in 3,4,5-trihydroxypentanoic acid compared with the wild type control.

[90101] The nucleic acid sequence of B1410 from Escherichia coli, e.g. as shown in the respective line in column 5 of Table I, application no. 17, has been published in B. And the activity of the gene product thereof is the activity of b1410-protein.

[90102] Accordingly, in one embodiment, the process of the present invention for producing sedoheptulose-7-phosphate in a non-human organism, like a microorganism or a plant or a part thereof, comprises increasing or generating the activity of a gene product with the activity of a gene product conferring the activity of “b1410-protein”, especially from Escherichia coli or its functional equivalent or its homolog, e.g. the increase of
[90103] (a) a gene product of a gene comprising the nucleic acid molecule as shown in the respective line in column 5 of Table I (whereby the respective line disclose in column 7 the fine chemical sedoheptulose-7-phosphate), application no. 17, preferably the coding region thereof, or a homolog or a fragment thereof, and being depicted in the same respective line as said B1410, or a functional equivalent or a homolog thereof as shown in column 8 of Table I, application no. 17, preferably the coding region thereof, particularly a homolog or functional equivalent as shown in column 8 of Table I B, application no. 17, and being depicted in the same respective line as said B1410, and preferably the activity is increased plastidic, or
[90104] (b) a polypeptide comprising a polypeptide, a consensus sequence or at least a polypeptide motif as shown in the respective line in column 5 of Table II or in column 8 of Table IV, application no. 17, respectively, and being depicted in the same respective line as said B1410, or a functional equivalent or a homolog thereof as depicted in column 8 of Table II, application no. 17, preferably a homolog or functional equivalent as depicted in column 8 of Table II B, application no. 17, and being depicted in the same respective line as said B1410, and preferably the activity is increased plastidic, whereby the respective line disclose in column 7 the fine chemical sedoheptulose-7-phosphate.

[90105] Accordingly, in one embodiment, the molecule which activity is to be increased in the process of the invention is the gene product with an activity as a “b1410-protein”, preferably it is the molecule of section (a) or (b) of this paragraph.

[90106] In particular, it was observed that in plants, especially in Arabidopsis thaliana, increasing or generating the activity of a gene product plastidic with the activity of a “b1410-protein”, preferably being encoded by a gene comprising the nucleic acid sequence SEQ ID NO. 145091, preferably the coding region thereof, conferred the production of or the increase in sedoheptulose7-phosphate compared with the wild type control.

[90107] The nucleic acid sequence of B1425 from Escherichia coli, e.g. as shown in the respective line in column 5 of Table I, application no. 17, has been published in B. And the activity of the gene product thereof is the activity of b1425-protein.

[90108] Accordingly, in one embodiment, the process of the present invention for producing myo-inositol in a non-human organism, like a microorganism or a plant or a part thereof, comprises increasing or generating the activity of a gene product with the activity of a gene product conferring the activity of “b1425-protein”, especially from Escherichia coli or its functional equivalent or its homolog, e.g. the increase of
[90109] (a) a gene product of a gene comprising the nucleic acid molecule as shown in the respective line in column 5 of Table I (whereby the respective line disclose in column 7 the fine chemical myo-inositol), application no. 17, preferably the coding region thereof, or a homolog or a fragment thereof, and being depicted in the same respective line as said B1425, or a functional equivalent or a homolog thereof as shown in column 8 of Table I, application no. 17, preferably the coding region thereof, particularly a homolog or functional equivalent as shown in column 8 of Table I B, application no. 17, and being depicted in the same respective line as said B1425, and preferably the activity is increased non-targeted, or
[90110] (b) a polypeptide comprising a polypeptide, a consensus sequence or at least a polypeptide motif as shown in the respective line in column 5 of Table II or in column 8 of Table IV, application no. 17, respectively, and being depicted in the same respective line as said B1425, or a functional equivalent or a homolog thereof as depicted in column 8 of Table II, application no. 17, preferably a homolog or functional equivalent as depicted in column 8 of Table II B, application no. 17, and being depicted in the same respective line as said B1425, and preferably the activity is increased non-targeted, whereby the respective line disclose in column 7 the fine chemical myo-inositol.

[90111] Accordingly, in one embodiment, the molecule which activity is to be increased in the process of the invention is the gene product with an activity as a “b1425-protein”, preferably it is the molecule of section (a) or (b) of this paragraph.

[90112] In particular, it was observed that in plants, especially in Arabidopsis thaliana, increasing or generating the activity of a gene product non-targeted with the activity of a “b1425-protein”, preferably being encoded by a gene comprising the nucleic acid sequence SEQ ID NO. 134756, preferably the coding region thereof, conferred the production of or the increase in myo-inositol compared with the wild type control.

[90113] The nucleic acid sequence of B1431 from Escherichia coli, e.g. as shown in the respective line in column 5 of Table I, application no. 17, has been published in B. And the activity of the gene product thereof is the activity of lipoprotein precursor.

[90114] Accordingly, in one embodiment, the process of the present invention for producing glucose-1-phosphate in a non-human organism, like a microorganism or a plant or a part thereof, comprises increasing or generating the activity of a gene product with the activity of a gene product conferring the activity of “lipoprotein precursor”, especially from Escherichia coli or its functional equivalent or its homolog, e.g. the increase of
[90115] (a) a gene product of a gene comprising the nucleic acid molecule as shown in the respective line in column 5 of Table I (whereby the respective line disclose in column 7 the fine chemical glucose-1-phosphate), application no. 17, preferably the coding region thereof, or a homolog or a fragment thereof, and being depicted in the same respective line as said B1431, or a functional equivalent or a homolog thereof as shown in column 8 of Table I, application no. 17, preferably the coding region thereof, particularly a homolog or functional equivalent as shown in column 8 of Table I B, application no. 17, and being depicted in the same respective line as said B1431, and preferably the activity is increased plastidic, or
[90116] (b) a polypeptide comprising a polypeptide, a consensus sequence or at least a polypeptide motif as shown in the respective line in column 5 of Table II or in column 8 of Table IV, application no. 17, respectively, and being depicted in the same respective line as said B1431, or a functional equivalent or a homolog thereof as depicted in column 8 of Table II, application no. 17, preferably a homolog or functional equivalent as depicted in column 8 of Table II B, application no. 17, and being depicted in the same respective line as said B1431, and preferably the activity is increased plastidic, whereby the respective line disclose in column 7 the fine chemical glucose-1-phosphate.

[90117] Accordingly, in one embodiment, the molecule which activity is to be increased in the process of the invention is the gene product with an activity as a “lipoprotein precursor”, preferably it is the molecule of section (a) or (b) of this paragraph.

[90118] In particular, it was observed that in plants, especially in Arabidopsis thaliana, increasing or generating the activity of a gene product plastidic with the activity of a “lipoprotein precursor”, preferably being encoded by a gene comprising the nucleic acid sequence SEQ ID NO. 38266, preferably the coding region thereof, conferred the production of or the increase in glucose-1-phosphate compared with the wild type control.

[90119] The nucleic acid sequence of B1431 from Escherichia coli, e.g. as shown in the respective line in column 5 of Table I, application no. 17, has been published in B. And the activity of the gene product thereof is the activity of lipoprotein precursor.

[90120] Accordingly, in one embodiment, the process of the present invention for producing sedoheptulose-7-phosphate in a non-human organism, like a microorganism or a plant or a part thereof, comprises increasing or generating the activity of a gene product with the activity of a gene product conferring the activity of “lipoprotein precursor”, especially from Escherichia coli or its functional equivalent or its homolog, e.g. the increase of
[90121] (a) a gene product of a gene comprising the nucleic acid molecule as shown in the respective line in column 5 of Table I (whereby the respective line disclose in column 7 the fine chemical sedoheptulose-7-phosphate), application no. 17, preferably the coding region thereof, or a homolog or a fragment thereof, and being depicted in the same respective line as said B1431, or a functional equivalent or a homolog thereof as shown in column 8 of Table I, application no. 17, preferably the coding region thereof, particularly a homolog or functional equivalent as shown in column 8 of Table I B, application no. 17, and being depicted in the same respective line as said B1431, and preferably the activity is increased plastidic, or
[90122] (b) a polypeptide comprising a polypeptide, a consensus sequence or at least a polypeptide motif as shown in the respective line in column 5 of Table II or in column 8 of Table IV, application no. 17, respectively, and being depicted in the same respective line as said B1431, or a functional equivalent or a homolog thereof as depicted in column 8 of Table II, application no. 17, preferably a homolog or functional equivalent as depicted in column 8 of Table II B, application no. 17, and being depicted in the same respective line as said B1431, and preferably the activity is increased plastidic, whereby the respective line disclose in column 7 the fine chemical sedoheptulose-7-phosphate.

[90123] Accordingly, in one embodiment, the molecule which activity is to be increased in the process of the invention is the gene product with an activity as a “lipoprotein precursor”, preferably it is the molecule of section (a) or (b) of this paragraph.

[90124] In particular, it was observed that in plants, especially in Arabidopsis thaliana, increasing or generating the activity of a gene product plastidic with the activity of a “lipoprotein precursor”, preferably being encoded by a gene comprising the nucleic acid sequence SEQ ID NO. 38266, preferably the coding region thereof, conferred the production of or the increase in sedoheptulose-7-phosphate compared with the wild type control.

[90125] The nucleic acid sequence of B1431 from Escherichia coli, e.g. as shown in the respective line in column 5 of Table I, application no. 17, has been published in B. And the activity of the gene product thereof is the activity of lipoprotein precursor.

[90126] Accordingly, in one embodiment, the process of the present invention for producing 3,4,5-trihydroxypentanoic acid in a non-human organism, like a microorganism or a plant or a part thereof, comprises increasing or generating the activity of a gene product with the activity of a gene product conferring the activity of “lipoprotein precursor”, especially from Escherichia coli or its functional equivalent or its homolog, e.g. the increase of
[90127] (a) a gene product of a gene comprising the nucleic acid molecule as shown in the respective line in column 5 of Table I (whereby the respective line disclose in column 7 the fine chemical 3,4,5-trihydroxypentanoic acid), application no. 17, preferably the coding region thereof, or a homolog or a fragment thereof, and being depicted in the same respective line as said B1431, or a functional equivalent or a homolog thereof as shown in column 8 of Table I, application no. 17, preferably the coding region thereof, particularly a homolog or functional equivalent as shown in column 8 of Table I B, application no. 17, and being depicted in the same respective line as said B1431, and preferably the activity is increased plastidic, or
[90128] (b) a polypeptide comprising a polypeptide, a consensus sequence or at least a polypeptide motif as shown in the respective line in column 5 of Table II or in column 8 of Table IV, application no. 17, respectively, and being depicted in the same respective line as said B1431, or a functional equivalent or a homolog thereof as depicted in column 8 of Table II, application no. 17, preferably a homolog or functional equivalent as depicted in column 8 of Table II B, application no. 17, and being depicted in the same respective line as said B1431, and preferably the activity is increased plastidic, whereby the respective line disclose in column 7 the fine chemical 3,4,5-trihydroxypentanoic acid.

[90129] Accordingly, in one embodiment, the molecule which activity is to be increased in the process of the invention is the gene product with an activity as a “lipoprotein precursor”, preferably it is the molecule of section (a) or (b) of this paragraph.

[90130] In particular, it was observed that in plants, especially in Arabidopsis thaliana, increasing or generating the activity of a gene product plastidic with the activity of a “lipoprotein precursor”, preferably being encoded by a gene comprising the nucleic acid sequence SEQ ID NO. 38266, preferably the coding region thereof, conferred the production of or the increase in 3,4,5-trihydroxypentanoic acid compared with the wild type control.

[90131] The nucleic acid sequence of B1445 from Escherichia coli, e.g. as shown in the respective line in column 5 of Table I, application no. 17, has been published in B. And the activity of the gene product thereof is the activity of b1445-protein.

[90132] Accordingly, in one embodiment, the process of the present invention for producing 3,4,5-trihydroxypentanoic acid in a non-human organism, like a microorganism or a plant or a part thereof, comprises increasing or generating the activity of a gene product with the activity of a gene product conferring the activity of “b1445-protein”, especially from Escherichia coli or its functional equivalent or its homolog, e.g. the increase of
[90133] (a) a gene product of a gene comprising the nucleic acid molecule as shown in the respective line in column 5 of Table I (whereby the respective line disclose in column 7 the fine chemical 3,4,5-trihydroxypentanoic acid), application no. 17, preferably the coding region thereof, or a homolog or a fragment thereof, and being depicted in the same respective line as said B1445, or a functional equivalent or a homolog thereof as shown in column 8 of Table I, application no. 17, preferably the coding region thereof, particularly a homolog or functional equivalent as shown in column 8 of Table I B, application no. 17, and being depicted in the same respective line as said B1445, and preferably the activity is increased non-targeted, or
[90134] (b) a polypeptide comprising a polypeptide, a consensus sequence or at least a polypeptide motif as shown in the respective line in column 5 of Table II or in column 8 of Table IV, application no. 17, respectively, and being depicted in the same respective line as said B1445, or a functional equivalent or a homolog thereof as depicted in column 8 of Table II, application no. 17, preferably a homolog or functional equivalent as depicted in column 8 of Table II B, application no. 17, and being depicted in the same respective line as said B1445, and preferably the activity is increased non-targeted, whereby the respective line disclose in column 7 the fine chemical 3,4,5-trihydroxypentanoic acid.

[90135] Accordingly, in one embodiment, the molecule which activity is to be increased in the process of the invention is the gene product with an activity as a “b1445-protein”, preferably it is the molecule of section (a) or (b) of this paragraph.

[90136] In particular, it was observed that in plants, especially in Arabidopsis thaliana, increasing or generating the activity of a gene product non-targeted with the activity of a “b1445-protein”, preferably being encoded by a gene comprising the nucleic acid sequence SEQ ID NO. 38289, preferably the coding region thereof, conferred the production of or the increase in 3,4,5-trihydroxypentanoic acid compared with the wild type control.

[90137] The nucleic acid sequence of B1470 from Escherichia coli, e.g. as shown in the respective line in column 5 of Table I, application no. 17, has been published in B. And the activity of the gene product thereof is the activity of b1470-protein.

[90138] Accordingly, in one embodiment, the process of the present invention for producing glucose-1-phosphate in a non-human organism, like a microorganism or a plant or a part thereof, comprises increasing or generating the activity of a gene product with the activity of a gene product conferring the activity of “b1470-protein”, especially from Escherichia coli or its functional equivalent or its homolog, e.g. the increase of
[90139] (a) a gene product of a gene comprising the nucleic acid molecule as shown in the respective line in column 5 of Table I (whereby the respective line disclose in column 7 the fine chemical glucose-1-phosphate), application no. 17, preferably the coding region thereof, or a homolog or a fragment thereof, and being depicted in the same respective line as said B1470, or a functional equivalent or a homolog thereof as shown in column 8 of Table I, application no. 17, preferably the coding region thereof, particularly a homolog or functional equivalent as shown in column 8 of Table I B, application no. 17, and being depicted in the same respective line as said B1470, and preferably the activity is increased non-targeted, or
[90140] (b) a polypeptide comprising a polypeptide, a consensus sequence or at least a polypeptide motif as shown in the respective line in column 5 of Table II or in column 8 of Table IV, application no. 17, respectively, and being depicted in the same respective line as said B1470, or a functional equivalent or a homolog thereof as depicted in column 8 of Table II, application no. 17, preferably a homolog or functional equivalent as depicted in column 8 of Table II B, application no. 17, and being depicted in the same respective line as said B1470, and preferably the activity is increased non-targeted, whereby the respective line disclose in column 7 the fine chemical glucose-1-phosphate.

[90141] Accordingly, in one embodiment, the molecule which activity is to be increased in the process of the invention is the gene product with an activity as a “b1470-protein”, preferably it is the molecule of section (a) or (b) of this paragraph.

[90142] In particular, it was observed that in plants, especially in Arabidopsis thaliana, increasing or generating the activity of a gene product non-targeted with the activity of a “b1470-protein”, preferably being encoded by a gene comprising the nucleic acid sequence SEQ ID NO. 115056, preferably the coding region thereof, conferred the production of or the increase in glucose-1-phosphate compared with the wild type control.

[90143] The nucleic acid sequence of B1522 from Escherichia coli, e.g. as shown in the respective line in column 5 of Table I, application no. 17, has been published in B. And the activity of the gene product thereof is the activity of b1522-protein.

[90144] Accordingly, in one embodiment, the process of the present invention for producing fructose in a non-human organism, like a microorganism or a plant or a part thereof, comprises increasing or generating the activity of a gene product with the activity of a gene product conferring the activity of “b1522-protein”, especially from Escherichia coli or its functional equivalent or its homolog, e.g. the increase of
[90145] (a) a gene product of a gene comprising the nucleic acid molecule as shown in the respective line in column 5 of Table I (whereby the respective line disclose in column 7 the fine chemical fructose), application no. 17, preferably the coding region thereof, or a homolog or a fragment thereof, and being depicted in the same respective line as said B1522, or a functional equivalent or a homolog thereof as shown in column 8 of Table I, application no. 17, preferably the coding region thereof, particularly a homolog or functional equivalent as shown in column 8 of Table I B, application no. 17, and being depicted in the same respective line as said B1522, and preferably the activity is increased non-targeted, or
[90146] (b) a polypeptide comprising a polypeptide, a consensus sequence or at least a polypeptide motif as shown in the respective line in column 5 of Table II or in column 8 of Table IV, application no. 17, respectively, and being depicted in the same respective line as said B1522, or a functional equivalent or a homolog thereof as depicted in column 8 of Table II, application no. 17, preferably a homolog or functional equivalent as depicted in column 8 of Table II B, application no. 17, and being depicted in the same respective line as said B1522, and preferably the activity is increased non-targeted, whereby the respective line disclose in column 7 the fine chemical fructose.

[90147] Accordingly, in one embodiment, the molecule which activity is to be increased in the process of the invention is the gene product with an activity as a “b1522-protein”, preferably it is the molecule of section (a) or (b) of this paragraph.

[90148] In particular, it was observed that in plants, especially in Arabidopsis thaliana, increasing or generating the activity of a gene product non-targeted with the activity of a “b1522-protein”, preferably being encoded by a gene comprising the nucleic acid sequence SEQ ID NO. 7947, preferably the coding region thereof, conferred the production of or the increase in fructose compared with the wild type control.

[90149] The nucleic acid sequence of B1522 from Escherichia coli, e.g. as shown in the respective line in column 5 of Table I, application no. 17, has been published in B. And the activity of the gene product thereof is the activity of b1522-protein.

[90150] Accordingly, in one embodiment, the process of the present invention for producing glucose-1-phosphate in a non-human organism, like a microorganism or a plant or a part thereof, comprises increasing or generating the activity of a gene product with the activity of a gene product conferring the activity of “b1522-protein”, especially from Escherichia coli or its functional equivalent or its homolog, e.g. the increase of
[90151] (a) a gene product of a gene comprising the nucleic acid molecule as shown in the respective line in column 5 of Table I (whereby the respective line disclose in column 7 the fine chemical glucose-1-phosphate), application no. 17, preferably the coding region thereof, or a homolog or a fragment thereof, and being depicted in the same respective line as said B1522, or a functional equivalent or a homolog thereof as shown in column 8 of Table I, application no. 17, preferably the coding region thereof, particularly a homolog or functional equivalent as shown in column 8 of Table I B, application no. 17, and being depicted in the same respective line as said B1522, and preferably the activity is increased non-targeted, or
[90152] (b) a polypeptide comprising a polypeptide, a consensus sequence or at least a polypeptide motif as shown in the respective line in column 5 of Table II or in column 8 of Table IV, application no. 17, respectively, and being depicted in the same respective line as said B1522, or a functional equivalent or a homolog thereof as depicted in column 8 of Table II, application no. 17, preferably a homolog or functional equivalent as depicted in column 8 of Table II B, application no. 17, and being depicted in the same respective line as said B1522, and preferably the activity is increased non-targeted, whereby the respective line disclose in column 7 the fine chemical glucose-1-phosphate.

[90153] Accordingly, in one embodiment, the molecule which activity is to be increased in the process of the invention is the gene product with an activity as a “b1522-protein”, preferably it is the molecule of section (a) or (b) of this paragraph.

[90154] In particular, it was observed that in plants, especially in Arabidopsis thaliana, increasing or generating the activity of a gene product non-targeted with the activity of a “b1522-protein”, preferably being encoded by a gene comprising the nucleic acid sequence SEQ ID NO. 7947, preferably the coding region thereof, conferred the production of or the increase in glucose-1-phosphate compared with the wild type control.

[90155] The nucleic acid sequence of B1556 from Escherichia coli, e.g. as shown in the respective line in column 5 of Table I, application no. 17, has been published in B. And the activity of the gene product thereof is the activity of b1556-protein.

[90156] Accordingly, in one embodiment, the process of the present invention for producing glucose-1-phosphate in a non-human organism, like a microorganism or a plant or a part thereof, comprises increasing or generating the activity of a gene product with the activity of a gene product conferring the activity of “b1556-protein”, especially from Escherichia coli or its functional equivalent or its homolog, e.g. the increase of
[90157] (a) a gene product of a gene comprising the nucleic acid molecule as shown in the respective line in column 5 of Table I (whereby the respective line disclose in column 7 the fine chemical glucose-1-phosphate), application no. 17, preferably the coding region thereof, or a homolog or a fragment thereof, and being depicted in the same respective line as said B1556, or a functional equivalent or a homolog thereof as shown in column 8 of Table I, application no. 17, preferably the coding region thereof, particularly a homolog or functional equivalent as shown in column 8 of Table I B, application no. 17, and being depicted in the same respective line as said B1556, and preferably the activity is increased plastidic, or
[90158] (b) a polypeptide comprising a polypeptide, a consensus sequence or at least a polypeptide motif as shown in the respective line in column 5 of Table II or in column 8 of Table IV, application no. 17, respectively, and being depicted in the same respective line as said B1556, or a functional equivalent or a homolog thereof as depicted in column 8 of Table II, application no. 17, preferably a homolog or functional equivalent as depicted in column 8 of Table II B, application no. 17, and being depicted in the same respective line as said B1556, and preferably the activity is increased plastidic, whereby the respective line disclose in column 7 the fine chemical glucose-1-phosphate.

[90159] Accordingly, in one embodiment, the molecule which activity is to be increased in the process of the invention is the gene product with an activity as a “b1556-protein”, preferably it is the molecule of section (a) or (b) of this paragraph.

[90160] In particular, it was observed that in plants, especially in Arabidopsis thaliana, increasing or generating the activity of a gene product plastidic with the activity of a “b1556-protein”, preferably being encoded by a gene comprising the nucleic acid sequence SEQ ID NO. 145142, preferably the coding region thereof, conferred the production of or the increase in glucose-1-phosphate compared with the wild type control.

[90161] The nucleic acid sequence of B1556 from Escherichia coli, e.g. as shown in the respective line in column 5 of Table I, application no. 17, has been published in B. And the activity of the gene product thereof is the activity of b1556-protein.

[90162] Accordingly, in one embodiment, the process of the present invention for producing sedoheptulose-7-phosphate in a non-human organism, like a microorganism or a plant or a part thereof, comprises increasing or generating the activity of a gene product with the activity of a gene product conferring the activity of “b1556-protein”, especially from Escherichia coli or its functional equivalent or its homolog, e.g. the increase of
[90163] (a) a gene product of a gene comprising the nucleic acid molecule as shown in the respective line in column 5 of Table I (whereby the respective line disclose in column 7 the fine chemical sedoheptulose-7-phosphate), application no. 17, preferably the coding region thereof, or a homolog or a fragment thereof, and being depicted in the same respective line as said B1556, or a functional equivalent or a homolog thereof as shown in column 8 of Table I, application no. 17, preferably the coding region thereof, particularly a homolog or functional equivalent as shown in column 8 of Table I B, application no. 17, and being depicted in the same respective line as said B1556, and preferably the activity is increased plastidic, or
[90164] (b) a polypeptide comprising a polypeptide, a consensus sequence or at least a polypeptide motif as shown in the respective line in column 5 of Table II or in column 8 of Table IV, application no. 17, respectively, and being depicted in the same respective line as said B1556, or a functional equivalent or a homolog thereof as depicted in column 8 of Table II, application no. 17, preferably a homolog or functional equivalent as depicted in column 8 of Table II B, application no. 17, and being depicted in the same respective line as said B1556, and preferably the activity is increased plastidic, whereby the respective line disclose in column 7 the fine chemical sedoheptulose-7-phosphate.

[90165] Accordingly, in one embodiment, the molecule which activity is to be increased in the process of the invention is the gene product with an activity as a “b1556-protein”, preferably it is the molecule of section (a) or (b) of this paragraph.

[90166] In particular, it was observed that in plants, especially in Arabidopsis thaliana, increasing or generating the activity of a gene product plastidic with the activity of a “b1556-protein”, preferably being encoded by a gene comprising the nucleic acid sequence SEQ ID NO. 145142, preferably the coding region thereof, conferred the production of or the increase in sedoheptulose7-phosphate compared with the wild type control.

[90167] The nucleic acid sequence of B1583 from Escherichia coli, e.g. as shown in the respective line in column 5 of Table I, application no. 17, has been published in B. And the activity of the gene product thereof is the activity of b1583-protein.

[90168] Accordingly, in one embodiment, the process of the present invention for producing glucose-1-phosphate in a non-human organism, like a microorganism or a plant or a part thereof, comprises increasing or generating the activity of a gene product with the activity of a gene product conferring the activity of “b1583-protein”, especially from Escherichia coli or its functional equivalent or its homolog, e.g. the increase of
[90169] (a) a gene product of a gene comprising the nucleic acid molecule as shown in the respective line in column 5 of Table I (whereby the respective line disclose in column 7 the fine chemical glucose-1-phosphate), application no. 17, preferably the coding region thereof, or a homolog or a fragment thereof, and being depicted in the same respective line as said B1583, or a functional equivalent or a homolog thereof as shown in column 8 of Table I, application no. 17, preferably the coding region thereof, particularly a homolog or functional equivalent as shown in column 8 of Table I B, application no. 17, and being depicted in the same respective line as said B1583, and preferably the activity is increased non-targeted, or
[90170] (b) a polypeptide comprising a polypeptide, a consensus sequence or at least a polypeptide motif as shown in the respective line in column 5 of Table II or in column 8 of Table IV, application no. 17, respectively, and being depicted in the same respective line as said B1583, or a functional equivalent or a homolog thereof as depicted in column 8 of Table II, application no. 17, preferably a homolog or functional equivalent as depicted in column 8 of Table II B, application no. 17, and being depicted in the same respective line as said B1583, and preferably the activity is increased non-targeted, whereby the respective line disclose in column 7 the fine chemical glucose-1-phosphate.

[90171] Accordingly, in one embodiment, the molecule which activity is to be increased in the process of the invention is the gene product with an activity as a “b1583-protein”, preferably it is the molecule of section (a) or (b) of this paragraph.

[90172] In particular, it was observed that in plants, especially in Arabidopsis thaliana, increasing or generating the activity of a gene product non-targeted with the activity of a “b1583-protein”, preferably being encoded by a gene comprising the nucleic acid sequence SEQ ID NO. 78138, preferably the coding region thereof, conferred the production of or the increase in glucose-1-phosphate compared with the wild type control.

[90173] The nucleic acid sequence of B1589 from Escherichia coli, e.g. as shown in the respective line in column 5 of Table I, application no. 17, has been published in B. And the activity of the gene product thereof is the activity of Fe—S subunit of oxidoreductase.

[90174] Accordingly, in one embodiment, the process of the present invention for producing glucose-1-phosphate in a non-human organism, like a microorganism or a plant or a part thereof, comprises increasing or generating the activity of a gene product with the activity of a gene product conferring the activity of “Fe—S subunit of oxidoreductase”, especially from Escherichia coli or its functional equivalent or its homolog, e.g. the increase of
[90175] (a) a gene product of a gene comprising the nucleic acid molecule as shown in the respective line in column 5 of Table I (whereby the respective line disclose in column 7 the fine chemical glucose-1-phosphate), application no. 17, preferably the coding region thereof, or a homolog or a fragment thereof, and being depicted in the same respective line as said B1589, or a functional equivalent or a homolog thereof as shown in column 8 of Table I, application no. 17, preferably the coding region thereof, particularly a homolog or functional equivalent as shown in column 8 of Table I B, application no. 17, and being depicted in the same respective line as said B1589, and preferably the activity is increased non-targeted, or
[90176] (b) a polypeptide comprising a polypeptide, a consensus sequence or at least a polypeptide motif as shown in the respective line in column 5 of Table II or in column 8 of Table IV, application no. 17, respectively, and being depicted in the same respective line as said B1589, or a functional equivalent or a homolog thereof as depicted in column 8 of Table II, application no. 17, preferably a homolog or functional equivalent as depicted in column 8 of Table II B, application no. 17, and being depicted in the same respective line as said B1589, and preferably the activity is increased non-targeted, whereby the respective line disclose in column 7 the fine chemical glucose-1-phosphate.

[90177] Accordingly, in one embodiment, the molecule which activity is to be increased in the process of the invention is the gene product with an activity as a “Fe—S subunit of oxidoreductase”, preferably it is the molecule of section (a) or (b) of this paragraph.

[90178] In particular, it was observed that in plants, especially in Arabidopsis thaliana, increasing or generating the activity of a gene product non-targeted with the activity of a “Fe—S subunit of oxidoreductase”, preferably being encoded by a gene comprising the nucleic acid sequence SEQ ID NO. 78154, preferably the coding region thereof, conferred the production of or the increase in glucose-1-phosphate compared with the wild type control.

[90179] The nucleic acid sequence of B1589 from Escherichia coli, e.g. as shown in the respective line in column 5 of Table I, application no. 17, has been published in B. And the activity of the gene product thereof is the activity of Fe—S subunit of oxidoreductase.

[90180] Accordingly, in one embodiment, the process of the present invention for producing 3,4,5-trihydroxypentanoic acid in a non-human organism, like a microorganism or a plant or a part thereof, comprises increasing or generating the activity of a gene product with the activity of a gene product conferring the activity of “Fe—S subunit of oxidoreductase”, especially from Escherichia coli or its functional equivalent or its homolog, e.g. the increase of
[90181] (a) a gene product of a gene comprising the nucleic acid molecule as shown in the respective line in column 5 of Table I (whereby the respective line disclose in column 7 the fine chemical 3,4,5-trihydroxypentanoic acid), application no. 17, preferably the coding region thereof, or a homolog or a fragment thereof, and being depicted in the same respective line as said B1589, or a functional equivalent or a homolog thereof as shown in column 8 of Table I, application no. 17, preferably the coding region thereof, particularly a homolog or functional equivalent as shown in column 8 of Table I B, application no. 17, and being depicted in the same respective line as said B1589, and preferably the activity is increased non-targeted, or
[90182] (b) a polypeptide comprising a polypeptide, a consensus sequence or at least a polypeptide motif as shown in the respective line in column 5 of Table II or in column 8 of Table IV, application no. 17, respectively, and being depicted in the same respective line as said B1589, or a functional equivalent or a homolog thereof as depicted in column 8 of Table II, application no. 17, preferably a homolog or functional equivalent as depicted in column 8 of Table II B, application no. 17, and being depicted in the same respective line as said B1589, and preferably the activity is increased non-targeted, whereby the respective line disclose in column 7 the fine chemical 3,4,5-trihydroxypentanoic acid.

[90183] Accordingly, in one embodiment, the molecule which activity is to be increased in the process of the invention is the gene product with an activity as a “Fe—S subunit of oxidoreductase”, preferably it is the molecule of section (a) or (b) of this paragraph.

[90184] In particular, it was observed that in plants, especially in Arabidopsis thaliana, increasing or generating the activity of a gene product non-targeted with the activity of a “Fe—S subunit of oxidoreductase”, preferably being encoded by a gene comprising the nucleic acid sequence SEQ ID NO. 78154, preferably the coding region thereof, conferred the production of or the increase in 3,4,5-trihydroxypentanoic acid compared with the wild type control.

[90185] The nucleic acid sequence of B1597 from Escherichia coli, e.g. as shown in the respective line in column 5 of Table I, application no. 17, has been published in B. And the activity of the gene product thereof is the activity of acid shock protein.

[90186] Accordingly, in one embodiment, the process of the present invention for producing fructose in a non-human organism, like a microorganism or a plant or a part thereof, comprises increasing or generating the activity of a gene product with the activity of a gene product conferring the activity of “acid shock protein”, especially from Escherichia coli or its functional equivalent or its homolog, e.g. the increase of
[90187] (a) a gene product of a gene comprising the nucleic acid molecule as shown in the respective line in column 5 of Table I (whereby the respective line disclose in column 7 the fine chemical fructose), application no. 17, preferably the coding region thereof, or a homolog or a fragment thereof, and being depicted in the same respective line as said B1597, or a functional equivalent or a homolog thereof as shown in column 8 of Table I, application no. 17, preferably the coding region thereof, particularly a homolog or functional equivalent as shown in column 8 of Table I B, application no. 17, and being depicted in the same respective line as said B1597, and preferably the activity is increased non-targeted, or
[90188] (b) a polypeptide comprising a polypeptide, a consensus sequence or at least a polypeptide motif as shown in the respective line in column 5 of Table II or in column 8 of Table IV, application no. 17, respectively, and being depicted in the same respective line as said B1597, or a functional equivalent or a homolog thereof as depicted in column 8 of Table II, application no. 17, preferably a homolog or functional equivalent as depicted in column 8 of Table II B, application no. 17, and being depicted in the same respective line as said B1597, and preferably the activity is increased non-targeted, whereby the respective line disclose in column 7 the fine chemical fructose.

[90189] Accordingly, in one embodiment, the molecule which activity is to be increased in the process of the invention is the gene product with an activity as a “acid shock protein”, preferably it is the molecule of section (a) or (b) of this paragraph.

[90190] In particular, it was observed that in plants, especially in Arabidopsis thaliana, increasing or generating the activity of a gene product non-targeted with the activity of a “acid shock protein”, preferably being encoded by a gene comprising the nucleic acid sequence SEQ ID NO. 38300, preferably the coding region thereof, conferred the production of or the increase in fructose compared with the wild type control.

[90191] The nucleic acid sequence of B1597 from Escherichia coli, e.g. as shown in the respective line in column 5 of Table I, application no. 17, has been published in B. And the activity of the gene product thereof is the activity of acid shock protein.

[90192] Accordingly, in one embodiment, the process of the present invention for producing glucose in a non-human organism, like a microorganism or a plant or a part thereof, comprises increasing or generating the activity of a gene product with the activity of a gene product conferring the activity of “acid shock protein”, especially from Escherichia coli or its functional equivalent or its homolog, e.g. the increase of
[90193] (a) a gene product of a gene comprising the nucleic acid molecule as shown in the respective line in column 5 of Table I (whereby the respective line disclose in column 7 the fine chemical glucose), application no. 17, preferably the coding region thereof, or a homolog or a fragment thereof, and being depicted in the same respective line as said B1597, or a functional equivalent or a homolog thereof as shown in column 8 of Table I, application no. 17, preferably the coding region thereof, particularly a homolog or functional equivalent as shown in column 8 of Table I B, application no. 17, and being depicted in the same respective line as said B1597, and preferably the activity is increased non-targeted, or
[90194] (b) a polypeptide comprising a polypeptide, a consensus sequence or at least a polypeptide motif as shown in the respective line in column 5 of Table II or in column 8 of Table IV, application no. 17, respectively, and being depicted in the same respective line as said B1597, or a functional equivalent or a homolog thereof as depicted in column 8 of Table II, application no. 17, preferably a homolog or functional equivalent as depicted in column 8 of Table II B, application no. 17, and being depicted in the same respective line as said B1597, and preferably the activity is increased non-targeted, whereby the respective line disclose in column 7 the fine chemical glucose.

[90195] Accordingly, in one embodiment, the molecule which activity is to be increased in the process of the invention is the gene product with an activity as a “acid shock protein”, preferably it is the molecule of section (a) or (b) of this paragraph.

[90196] In particular, it was observed that in plants, especially in Arabidopsis thaliana, increasing or generating the activity of a gene product non-targeted with the activity of a “acid shock protein”, preferably being encoded by a gene comprising the nucleic acid sequence SEQ ID NO. 38300, preferably the coding region thereof, conferred the production of or the increase in glucose compared with the wild type control.

[90197] The nucleic acid sequence of B1597 from Escherichia coli, e.g. as shown in the respective line in column 5 of Table I, application no. 17, has been published in B. And the activity of the gene product thereof is the activity of acid shock protein.

[90198] Accordingly, in one embodiment, the process of the present invention for producing glucose-1-phosphate in a non-human organism, like a microorganism or a plant or a part thereof, comprises increasing or generating the activity of a gene product with the activity of a gene product conferring the activity of “acid shock protein”, especially from Escherichia coli or its functional equivalent or its homolog, e.g. the increase of
[90199] (a) a gene product of a gene comprising the nucleic acid molecule as shown in the respective line in column 5 of Table I (whereby the respective line disclose in column 7 the fine chemical glucose-1-phosphate), application no. 17, preferably the coding region thereof, or a homolog or a fragment thereof, and being depicted in the same respective line as said B1597, or a functional equivalent or a homolog thereof as shown in column 8 of Table I, application no. 17, preferably the coding region thereof, particularly a homolog or functional equivalent as shown in column 8 of Table I B, application no. 17, and being depicted in the same respective line as said B1597, and preferably the activity is increased non-targeted, or
[90200] (b) a polypeptide comprising a polypeptide, a consensus sequence or at least a polypeptide motif as shown in the respective line in column 5 of Table II or in column 8 of Table IV, application no. 17, respectively, and being depicted in the same respective line as said B1597, or a functional equivalent or a homolog thereof as depicted in column 8 of Table II, application no. 17, preferably a homolog or functional equivalent as depicted in column 8 of Table II B, application no. 17, and being depicted in the same respective line as said B1597, and preferably the activity is increased non-targeted, whereby the respective line disclose in column 7 the fine chemical glucose-1-phosphate.

[90201] Accordingly, in one embodiment, the molecule which activity is to be increased in the process of the invention is the gene product with an activity as a “acid shock protein”, preferably it is the molecule of section (a) or (b) of this paragraph.

[90202] In particular, it was observed that in plants, especially in Arabidopsis thaliana, increasing or generating the activity of a gene product non-targeted with the activity of a “acid shock protein”, preferably being encoded by a gene comprising the nucleic acid sequence SEQ ID NO. 38300, preferably the coding region thereof, conferred the production of or the increase in glucose-1-phosphate compared with the wild type control.

[90203] The nucleic acid sequence of B1597 from Escherichia coli, e.g. as shown in the respective line in column 5 of Table I, application no. 17, has been published in B. And the activity of the gene product thereof is the activity of acid shock protein.

[90204] Accordingly, in one embodiment, the process of the present invention for producing myo-inositol in a non-human organism, like a microorganism or a plant or a part thereof, comprises increasing or generating the activity of a gene product with the activity of a gene product conferring the activity of “acid shock protein”, especially from Escherichia coli or its functional equivalent or its homolog, e.g. the increase of
[90205] (a) a gene product of a gene comprising the nucleic acid molecule as shown in the respective line in column 5 of Table I (whereby the respective line disclose in column 7 the fine chemical myo-inositol), application no. 17, preferably the coding region thereof, or a homolog or a fragment thereof, and being depicted in the same respective line as said B1597, or a functional equivalent or a homolog thereof as shown in column 8 of Table I, application no. 17, preferably the coding region thereof, particularly a homolog or functional equivalent as shown in column 8 of Table I B, application no. 17, and being depicted in the same respective line as said B1597, and preferably the activity is increased non-targeted, or
[90206] (b) a polypeptide comprising a polypeptide, a consensus sequence or at least a polypeptide motif as shown in the respective line in column 5 of Table II or in column 8 of Table IV, application no. 17, respectively, and being depicted in the same respective line as said B1597, or a functional equivalent or a homolog thereof as depicted in column 8 of Table II, application no. 17, preferably a homolog or functional equivalent as depicted in column 8 of Table II B, application no. 17, and being depicted in the same respective line as said B1597, and preferably the activity is increased non-targeted, whereby the respective line disclose in column 7 the fine chemical myo-inositol.

[90207] Accordingly, in one embodiment, the molecule which activity is to be increased in the process of the invention is the gene product with an activity as a “acid shock protein”, preferably it is the molecule of section (a) or (b) of this paragraph.

[90208] In particular, it was observed that in plants, especially in Arabidopsis thaliana, increasing or generating the activity of a gene product non-targeted with the activity of a “acid shock protein”, preferably being encoded by a gene comprising the nucleic acid sequence SEQ ID NO. 38300, preferably the coding region thereof, conferred the production of or the increase in myo-inositol compared with the wild type control.

[90209] The nucleic acid sequence of B1597 from Escherichia coli, e.g. as shown in the respective line in column 5 of Table I, application no. 17, has been published in B. And the activity of the gene product thereof is the activity of acid shock protein.

[90210] Accordingly, in one embodiment, the process of the present invention for producing raffinose in a non-human organism, like a microorganism or a plant or a part thereof, comprises increasing or generating the activity of a gene product with the activity of a gene product conferring the activity of “acid shock protein”, especially from Escherichia coli or its functional equivalent or its homolog, e.g. the increase of
[90211] (a) a gene product of a gene comprising the nucleic acid molecule as shown in the respective line in column 5 of Table I (whereby the respective line disclose in column 7 the fine chemical raffinose), application no. 17, preferably the coding region thereof, or a homolog or a fragment thereof, and being depicted in the same respective line as said B1597, or a functional equivalent or a homolog thereof as shown in column 8 of Table I, application no. 17, preferably the coding region thereof, particularly a homolog or functional equivalent as shown in column 8 of Table I B, application no. 17, and being depicted in the same respective line as said B1597, and preferably the activity is increased non-targeted, or
[90212] (b) a polypeptide comprising a polypeptide, a consensus sequence or at least a polypeptide motif as shown in the respective line in column 5 of Table II or in column 8 of Table IV, application no. 17, respectively, and being depicted in the same respective line as said B1597, or a functional equivalent or a homolog thereof as depicted in column 8 of Table II, application no. 17, preferably a homolog or functional equivalent as depicted in column 8 of Table II B, application no. 17, and being depicted in the same respective line as said B1597, and preferably the activity is increased non-targeted, whereby the respective line disclose in column 7 the fine chemical raffinose.

[90213] Accordingly, in one embodiment, the molecule which activity is to be increased in the process of the invention is the gene product with an activity as a “acid shock protein”, preferably it is the molecule of section (a) or (b) of this paragraph.

[90214] In particular, it was observed that in plants, especially in Arabidopsis thaliana, increasing or generating the activity of a gene product non-targeted with the activity of a “acid shock protein”, preferably being encoded by a gene comprising the nucleic acid sequence SEQ ID NO. 38300, preferably the coding region thereof, conferred the production of or the increase in raffinose compared with the wild type control.

[90215] The nucleic acid sequence of B1621 from Escherichia coli, e.g. as shown in the respective line in column 5 of Table I, application no. 17, has been published in B. And the activity of the gene product thereof is the activity of phosphotransferase system component.

[90216] Accordingly, in one embodiment, the process of the present invention for producing fructose in a non-human organism, like a microorganism or a plant or a part thereof, comprises increasing or generating the activity of a gene product with the activity of a gene product conferring the activity of “phosphotransferase system component”, especially from Escherichia coli or its functional equivalent or its homolog, e.g. the increase of
[90217] (a) a gene product of a gene comprising the nucleic acid molecule as shown in the respective line in column 5 of Table I (whereby the respective line disclose in column 7 the fine chemical fructose), application no. 17, preferably the coding region thereof, or a homolog or a fragment thereof, and being depicted in the same respective line as said B1621, or a functional equivalent or a homolog thereof as shown in column 8 of Table I, application no. 17, preferably the coding region thereof, particularly a homolog or functional equivalent as shown in column 8 of Table I B, application no. 17, and being depicted in the same respective line as said B1621, and preferably the activity is increased non-targeted, or
[90218] (b) a polypeptide comprising a polypeptide, a consensus sequence or at least a polypeptide motif as shown in the respective line in column 5 of Table II or in column 8 of Table IV, application no. 17, respectively, and being depicted in the same respective line as said B1621, or a functional equivalent or a homolog thereof as depicted in column 8 of Table II, application no. 17, preferably a homolog or functional equivalent as depicted in column 8 of Table II B, application no. 17, and being depicted in the same respective line as said B1621, and preferably the activity is increased non-targeted, whereby the respective line disclose in column 7 the fine chemical fructose.

[90219] Accordingly, in one embodiment, the molecule which activity is to be increased in the process of the invention is the gene product with an activity as a “phosphotransferase system component”, preferably it is the molecule of section (a) or (b) of this paragraph.

[90220] In particular, it was observed that in plants, especially in Arabidopsis thaliana, increasing or generating the activity of a gene product non-targeted with the activity of a “phosphotransferase system component”, preferably being encoded by a gene comprising the nucleic acid sequence SEQ ID NO. 124571, preferably the coding region thereof, conferred the production of or the increase in fructose compared with the wild type control.

[90221] The nucleic acid sequence of B1621 from Escherichia coli, e.g. as shown in the respective line in column 5 of Table I, application no. 17, has been published in B. And the activity of the gene product thereof is the activity of phosphotransferase system component.

[90222] Accordingly, in one embodiment, the process of the present invention for producing glucose in a non-human organism, like a microorganism or a plant or a part thereof, comprises increasing or generating the activity of a gene product with the activity of a gene product conferring the activity of “phosphotransferase system component”, especially from Escherichia coli or its functional equivalent or its homolog, e.g. the increase of
[90223] (a) a gene product of a gene comprising the nucleic acid molecule as shown in the respective line in column 5 of Table I (whereby the respective line disclose in column 7 the fine chemical glucose), application no. 17, preferably the coding region thereof, or a homolog or a fragment thereof, and being depicted in the same respective line as said B1621, or a functional equivalent or a homolog thereof as shown in column 8 of Table I, application no. 17, preferably the coding region thereof, particularly a homolog or functional equivalent as shown in column 8 of Table I B, application no. 17, and being depicted in the same respective line as said B1621, and preferably the activity is increased non-targeted, or
[90224] (b) a polypeptide comprising a polypeptide, a consensus sequence or at least a polypeptide motif as shown in the respective line in column 5 of Table II or in column 8 of Table IV, application no. 17, respectively, and being depicted in the same respective line as said B1621, or a functional equivalent or a homolog thereof as depicted in column 8 of Table II, application no. 17, preferably a homolog or functional equivalent as depicted in column 8 of Table II B, application no. 17, and being depicted in the same respective line as said B1621, and preferably the activity is increased non-targeted, whereby the respective line disclose in column 7 the fine chemical glucose.

[90225] Accordingly, in one embodiment, the molecule which activity is to be increased in the process of the invention is the gene product with an activity as a “phosphotransferase system component”, preferably it is the molecule of section (a) or (b) of this paragraph.

[90226] In particular, it was observed that in plants, especially in Arabidopsis thaliana, increasing or generating the activity of a gene product non-targeted with the activity of a “phosphotransferase system component”, preferably being encoded by a gene comprising the nucleic acid sequence SEQ ID NO. 124571, preferably the coding region thereof, conferred the production of or the increase in glucose compared with the wild type control.

[90227] The nucleic acid sequence of B1627 from Escherichia coli, e.g. as shown in the respective line in column 5 of Table I, application no. 17, has been published in B. And the activity of the gene product thereof is the activity of electron transport complex protein.

[90228] Accordingly, in one embodiment, the process of the present invention for producing glucose in a non-human organism, like a microorganism or a plant or a part thereof, comprises increasing or generating the activity of a gene product with the activity of a gene product conferring the activity of “electron transport complex protein”, especially from Escherichia coli or its functional equivalent or its homolog, e.g. the increase of
[90229] (a) a gene product of a gene comprising the nucleic acid molecule as shown in the respective line in column 5 of Table I (whereby the respective line disclose in column 7 the fine chemical glucose), application no. 17, preferably the coding region thereof, or a homolog or a fragment thereof, and being depicted in the same respective line as said B1627, or a functional equivalent or a homolog thereof as shown in column 8 of Table I, application no. 17, preferably the coding region thereof, particularly a homolog or functional equivalent as shown in column 8 of Table I B, application no. 17, and being depicted in the same respective line as said B1627, and preferably the activity is increased non-targeted, or
[90230] (b) a polypeptide comprising a polypeptide, a consensus sequence or at least a polypeptide motif as shown in the respective line in column 5 of Table II or in column 8 of Table IV, application no. 17, respectively, and being depicted in the same respective line as said B1627, or a functional equivalent or a homolog thereof as depicted in column 8 of Table II, application no. 17, preferably a homolog or functional equivalent as depicted in column 8 of Table II B, application no. 17, and being depicted in the same respective line as said B1627, and preferably the activity is increased non-targeted, whereby the respective line disclose in column 7 the fine chemical glucose.

[90231] Accordingly, in one embodiment, the molecule which activity is to be increased in the process of the invention is the gene product with an activity as a “electron transport complex protein”, preferably it is the molecule of section (a) or (b) of this paragraph.

[90232] In particular, it was observed that in plants, especially in Arabidopsis thaliana, increasing or generating the activity of a gene product non-targeted with the activity of a “electron transport complex protein”, preferably being encoded by a gene comprising the nucleic acid sequence SEQ ID NO. 38345, preferably the coding region thereof, conferred the production of or the increase in glucose compared with the wild type control.

[90233] The nucleic acid sequence of B1627 from Escherichia coli, e.g. as shown in the respective line in column 5 of Table I, application no. 17, has been published in B. And the activity of the gene product thereof is the activity of electron transport complex protein.

[90234] Accordingly, in one embodiment, the process of the present invention for producing glucose-1-phosphate in a non-human organism, like a microorganism or a plant or a part thereof, comprises increasing or generating the activity of a gene product with the activity of a gene product conferring the activity of “electron transport complex protein”, especially from Escherichia coli or its functional equivalent or its homolog, e.g. the increase of
[90235] (a) a gene product of a gene comprising the nucleic acid molecule as shown in the respective line in column 5 of Table I (whereby the respective line disclose in column 7 the fine chemical glucose-1-phosphate), application no. 17, preferably the coding region thereof, or a homolog or a fragment thereof, and being depicted in the same respective line as said B1627, or a functional equivalent or a homolog thereof as shown in column 8 of Table I, application no. 17, preferably the coding region thereof, particularly a homolog or functional equivalent as shown in column 8 of Table I B, application no. 17, and being depicted in the same respective line as said B1627, and preferably the activity is increased non-targeted, or
[90236] (b) a polypeptide comprising a polypeptide, a consensus sequence or at least a polypeptide motif as shown in the respective line in column 5 of Table II or in column 8 of Table IV, application no. 17, respectively, and being depicted in the same respective line as said B1627, or a functional equivalent or a homolog thereof as depicted in column 8 of Table II, application no. 17, preferably a homolog or functional equivalent as depicted in column 8 of Table II B, application no. 17, and being depicted in the same respective line as said B1627, and preferably the activity is increased non-targeted, whereby the respective line disclose in column 7 the fine chemical glucose-1-phosphate.

[90237] Accordingly, in one embodiment, the molecule which activity is to be increased in the process of the invention is the gene product with an activity as a “electron transport complex protein”, preferably it is the molecule of section (a) or (b) of this paragraph.

[90238] In particular, it was observed that in plants, especially in Arabidopsis thaliana, increasing or generating the activity of a gene product non-targeted with the activity of a “electron transport complex protein”, preferably being encoded by a gene comprising the nucleic acid sequence SEQ ID NO. 38345, preferably the coding region thereof, conferred the production of or the increase in glucose-1-phosphate compared with the wild type control.

[90239] The nucleic acid sequence of B1627 from Escherichia coli, e.g. as shown in the respective line in column 5 of Table I, application no. 17, has been published in B. And the activity of the gene product thereof is the activity of electron transport complex protein.

[90240] Accordingly, in one embodiment, the process of the present invention for producing 3,4,5-trihydroxypentanoic acid in a non-human organism, like a microorganism or a plant or a part thereof, comprises increasing or generating the activity of a gene product with the activity of a gene product conferring the activity of “electron transport complex protein”, especially from Escherichia coli or its functional equivalent or its homolog, e.g. the increase of
[90241] (a) a gene product of a gene comprising the nucleic acid molecule as shown in the respective line in column 5 of Table I (whereby the respective line disclose in column 7 the fine chemical 3,4,5-trihydroxypentanoic acid), application no. 17, preferably the coding region thereof, or a homolog or a fragment thereof, and being depicted in the same respective line as said B1627, or a functional equivalent or a homolog thereof as shown in column 8 of Table I, application no. 17, preferably the coding region thereof, particularly a homolog or functional equivalent as shown in column 8 of Table I B, application no. 17, and being depicted in the same respective line as said B1627, and preferably the activity is increased non-targeted, or
[90242] (b) a polypeptide comprising a polypeptide, a consensus sequence or at least a polypeptide motif as shown in the respective line in column 5 of Table II or in column 8 of Table IV, application no. 17, respectively, and being depicted in the same respective line as said B1627, or a functional equivalent or a homolog thereof as depicted in column 8 of Table II, application no. 17, preferably a homolog or functional equivalent as depicted in column 8 of Table II B, application no. 17, and being depicted in the same respective line as said B1627, and preferably the activity is increased non-targeted, whereby the respective line disclose in column 7 the fine chemical 3,4,5-trihydroxypentanoic acid.

[90243] Accordingly, in one embodiment, the molecule which activity is to be increased in the process of the invention is the gene product with an activity as a “electron transport complex protein”, preferably it is the molecule of section (a) or (b) of this paragraph.

[90244] In particular, it was observed that in plants, especially in Arabidopsis thaliana, increasing or generating the activity of a gene product non-targeted with the activity of a “electron transport complex protein”, preferably being encoded by a gene comprising the nucleic acid sequence SEQ ID NO. 38345, preferably the coding region thereof, conferred the production of or the increase in 3,4,5-trihydroxypentanoic acid compared with the wild type control.

[90245] The nucleic acid sequence of B1651 from Escherichia coli, e.g. as shown in the respective line in column 5 of Table I, application no. 17, has been published in B. And the activity of the gene product thereof is the activity of methylglyoxalase.

[90246] Accordingly, in one embodiment, the process of the present invention for producing myo-inositol in a non-human organism, like a microorganism or a plant or a part thereof, comprises increasing or generating the activity of a gene product with the activity of a gene product conferring the activity of “methylglyoxalase”, especially from Escherichia coli or its functional equivalent or its homolog, e.g. the increase of
[90247] (a) a gene product of a gene comprising the nucleic acid molecule as shown in the respective line in column 5 of Table I (whereby the respective line disclose in column 7 the fine chemical myo-inositol), application no. 17, preferably the coding region thereof, or a homolog or a fragment thereof, and being depicted in the same respective line as said B1651, or a functional equivalent or a homolog thereof as shown in column 8 of Table I, application no. 17, preferably the coding region thereof, particularly a homolog or functional equivalent as shown in column 8 of Table I B, application no. 17, and being depicted in the same respective line as said B1651, and preferably the activity is increased non-targeted, or
[90248] (b) a polypeptide comprising a polypeptide, a consensus sequence or at least a polypeptide motif as shown in the respective line in column 5 of Table II or in column 8 of Table IV, application no. 17, respectively, and being depicted in the same respective line as said B1651, or a functional equivalent or a homolog thereof as depicted in column 8 of Table II, application no. 17, preferably a homolog or functional equivalent as depicted in column 8 of Table II B, application no. 17, and being depicted in the same respective line as said B1651, and preferably the activity is increased non-targeted, whereby the respective line disclose in column 7 the fine chemical myo-inositol.

[90249] Accordingly, in one embodiment, the molecule which activity is to be increased in the process of the invention is the gene product with an activity as a “methylglyoxalase”, preferably it is the molecule of section (a) or (b) of this paragraph.

[90250] In particular, it was observed that in plants, especially in Arabidopsis thaliana, increasing or generating the activity of a gene product non-targeted with the activity of a “methylglyoxalase”, preferably being encoded by a gene comprising the nucleic acid sequence SEQ ID NO. 78265, preferably the coding region thereof, conferred the production of or the increase in myo-inositol compared with the wild type control.

[90251] The nucleic acid sequence of B1670 from Escherichia coli, e.g. as shown in the respective line in column 5 of Table I, application no. 17, has been published in B. And the activity of the gene product thereof is the activity of b1670-protein.

[90252] Accordingly, in one embodiment, the process of the present invention for producing myo-inositol in a non-human organism, like a microorganism or a plant or a part thereof, comprises increasing or generating the activity of a gene product with the activity of a gene product conferring the activity of “b1670-protein”, especially from Escherichia coli or its functional equivalent or its homolog, e.g. the increase of
[90253] (a) a gene product of a gene comprising the nucleic acid molecule as shown in the respective line in column 5 of Table I (whereby the respective line disclose in column 7 the fine chemical myo-inositol), application no. 17, preferably the coding region thereof, or a homolog or a fragment thereof, and being depicted in the same respective line as said B1670, or a functional equivalent or a homolog thereof as shown in column 8 of Table I, application no. 17, preferably the coding region thereof, particularly a homolog or functional equivalent as shown in column 8 of Table I B, application no. 17, and being depicted in the same respective line as said B1670, and preferably the activity is increased non-targeted, or
[90254] (b) a polypeptide comprising a polypeptide, a consensus sequence or at least a polypeptide motif as shown in the respective line in column 5 of Table II or in column 8 of Table IV, application no. 17, respectively, and being depicted in the same respective line as said B1670, or a functional equivalent or a homolog thereof as depicted in column 8 of Table II, application no. 17, preferably a homolog or functional equivalent as depicted in column 8 of Table II B, application no. 17, and being depicted in the same respective line as said B1670, and preferably the activity is increased non-targeted, whereby the respective line disclose in column 7 the fine chemical myo-inositol.

[90255] Accordingly, in one embodiment, the molecule which activity is to be increased in the process of the invention is the gene product with an activity as a “b1670-protein”, preferably it is the molecule of section (a) or (b) of this paragraph.

[90256] In particular, it was observed that in plants, especially in Arabidopsis thaliana, increasing or generating the activity of a gene product non-targeted with the activity of a “b1670-protein”, preferably being encoded by a gene comprising the nucleic acid sequence SEQ ID NO. 78753, preferably the coding region thereof, conferred the production of or the increase in myo-inositol compared with the wild type control.

[90257] The nucleic acid sequence of B1755 from Escherichia coli, e.g. as shown in the respective line in column 5 of Table I, application no. 17, has been published in B. And the activity of the gene product thereof is the activity of ABC transporter permease protein.

[90258] Accordingly, in one embodiment, the process of the present invention for producing fructose in a non-human organism, like a microorganism or a plant or a part thereof, comprises increasing or generating the activity of a gene product with the activity of a gene product conferring the activity of “ABC transporter permease protein”, especially from Escherichia coli or its functional equivalent or its homolog, e.g. the increase of
[90259] (a) a gene product of a gene comprising the nucleic acid molecule as shown in the respective line in column 5 of Table I (whereby the respective line disclose in column 7 the fine chemical fructose), application no. 17, preferably the coding region thereof, or a homolog or a fragment thereof, and being depicted in the same respective line as said B1755, or a functional equivalent or a homolog thereof as shown in column 8 of Table I, application no. 17, preferably the coding region thereof, particularly a homolog or functional equivalent as shown in column 8 of Table I B, application no. 17, and being depicted in the same respective line as said B1755, and preferably the activity is increased non-targeted, or
[90260] (b) a polypeptide comprising a polypeptide, a consensus sequence or at least a polypeptide motif as shown in the respective line in column 5 of Table II or in column 8 of Table IV, application no. 17, respectively, and being depicted in the same respective line as said B1755, or a functional equivalent or a homolog thereof as depicted in column 8 of Table II, application no. 17, preferably a homolog or functional equivalent as depicted in column 8 of Table II B, application no. 17, and being depicted in the same respective line as said B1755, and preferably the activity is increased non-targeted, whereby the respective line disclose in column 7 the fine chemical fructose.

[90261] Accordingly, in one embodiment, the molecule which activity is to be increased in the process of the invention is the gene product with an activity as a “ABC transporter permease protein”, preferably it is the molecule of section (a) or (b) of this paragraph.

[90262] In particular, it was observed that in plants, especially in Arabidopsis thaliana, increasing or generating the activity of a gene product non-targeted with the activity of a “ABC transporter permease protein”, preferably being encoded by a gene comprising the nucleic acid sequence SEQ ID NO. 78852, preferably the coding region thereof, conferred the production of or the increase in fructose compared with the wild type control.

[90263] The nucleic acid sequence of B1791 from Escherichia coli, e.g. as shown in the respective line in column 5 of Table I, application no. 17, has been published in B. And the activity of the gene product thereof is the activity of transport protein.

[90264] Accordingly, in one embodiment, the process of the present invention for producing myo-inositol in a non-human organism, like a microorganism or a plant or a part thereof, comprises increasing or generating the activity of a gene product with the activity of a gene product conferring the activity of “transport protein”, especially from Escherichia coli or its functional equivalent or its homolog, e.g. the increase of
[90265] (a) a gene product of a gene comprising the nucleic acid molecule as shown in the respective line in column 5 of Table I (whereby the respective line disclose in column 7 the fine chemical myo-inositol), application no. 17, preferably the coding region thereof, or a homolog or a fragment thereof, and being depicted in the same respective line as said B1791, or a functional equivalent or a homolog thereof as shown in column 8 of Table I, application no. 17, preferably the coding region thereof, particularly a homolog or functional equivalent as shown in column 8 of Table I B, application no. 17, and being depicted in the same respective line as said B1791, and preferably the activity is increased non-targeted, or
[90266] (b) a polypeptide comprising a polypeptide, a consensus sequence or at least a polypeptide motif as shown in the respective line in column 5 of Table II or in column 8 of Table IV, application no. 17, respectively, and being depicted in the same respective line as said B1791, or a functional equivalent or a homolog thereof as depicted in column 8 of Table II, application no. 17, preferably a homolog or functional equivalent as depicted in column 8 of Table II B, application no. 17, and being depicted in the same respective line as said B1791, and preferably the activity is increased non-targeted, whereby the respective line disclose in column 7 the fine chemical myo-inositol.

[90267] Accordingly, in one embodiment, the molecule which activity is to be increased in the process of the invention is the gene product with an activity as a “transport protein”, preferably it is the molecule of section (a) or (b) of this paragraph.

[90268] In particular, it was observed that in plants, especially in Arabidopsis thaliana, increasing or generating the activity of a gene product non-targeted with the activity of a “transport protein”, preferably being encoded by a gene comprising the nucleic acid sequence SEQ ID NO. 78883, preferably the coding region thereof, conferred the production of or the increase in myo-inositol compared with the wild type control.

[90269] The nucleic acid sequence of B1796 from Escherichia coli, e.g. as shown in the respective line in column 5 of Table I, application no. 17, has been published in B. And the activity of the gene product thereof is the activity of b1796-protein.

[90270] Accordingly, in one embodiment, the process of the present invention for producing fructose in a non-human organism, like a microorganism or a plant or a part thereof, comprises increasing or generating the activity of a gene product with the activity of a gene product conferring the activity of “b1796-protein”, especially from Escherichia coli or its functional equivalent or its homolog, e.g. the increase of
[90271] (a) a gene product of a gene comprising the nucleic acid molecule as shown in the respective line in column 5 of Table I (whereby the respective line disclose in column 7 the fine chemical fructose), application no. 17, preferably the coding region thereof, or a homolog or a fragment thereof, and being depicted in the same respective line as said B1796, or a functional equivalent or a homolog thereof as shown in column 8 of Table I, application no. 17, preferably the coding region thereof, particularly a homolog or functional equivalent as shown in column 8 of Table I B, application no. 17, and being depicted in the same respective line as said B1796, and preferably the activity is increased non-targeted, or
[90272] (b) a polypeptide comprising a polypeptide, a consensus sequence or at least a polypeptide motif as shown in the respective line in column 5 of Table II or in column 8 of Table IV, application no. 17, respectively, and being depicted in the same respective line as said B1796, or a functional equivalent or a homolog thereof as depicted in column 8 of Table II, application no. 17, preferably a homolog or functional equivalent as depicted in column 8 of Table II B, application no. 17, and being depicted in the same respective line as said B1796, and preferably the activity is increased non-targeted, whereby the respective line disclose in column 7 the fine chemical fructose.

[90273] Accordingly, in one embodiment, the molecule which activity is to be increased in the process of the invention is the gene product with an activity as a “b1796-protein”, preferably it is the molecule of section (a) or (b) of this paragraph.

[90274] In particular, it was observed that in plants, especially in Arabidopsis thaliana, increasing or generating the activity of a gene product non-targeted with the activity of a “b1796-protein”, preferably being encoded by a gene comprising the nucleic acid sequence SEQ ID NO. 99196, preferably the coding region thereof, conferred the production of or the increase in fructose compared with the wild type control.

[90275] The nucleic acid sequence of B1812 from Escherichia coli, e.g. as shown in the respective line in column 5 of Table I, application no. 17, has been published in B. And the activity of the gene product thereof is the activity of para-aminobenzoate synthase component I.

[90276] Accordingly, in one embodiment, the process of the present invention for producing myo-inositol in a non-human organism, like a microorganism or a plant or a part thereof, comprises increasing or generating the activity of a gene product with the activity of a gene product conferring the activity of “para-aminobenzoate synthase componentl”, especially from Escherichia coli or its functional equivalent or its homolog, e.g. the increase of
[90277] (a) a gene product of a gene comprising the nucleic acid molecule as shown in the respective line in column 5 of Table I (whereby the respective line disclose in column 7 the fine chemical myo-inositol), application no. 17, preferably the coding region thereof, or a homolog or a fragment thereof, and being depicted in the same respective line as said B1812, or a functional equivalent or a homolog thereof as shown in column 8 of Table I, application no. 17, preferably the coding region thereof, particularly a homolog or functional equivalent as shown in column 8 of Table I B, application no. 17, and being depicted in the same respective line as said B1812, and preferably the activity is increased non-targeted, or
[90278] (b) a polypeptide comprising a polypeptide, a consensus sequence or at least a polypeptide motif as shown in the respective line in column 5 of Table II or in column 8 of Table IV, application no. 17, respectively, and being depicted in the same respective line as said B1812, or a functional equivalent or a homolog thereof as depicted in column 8 of Table II, application no. 17, preferably a homolog or functional equivalent as depicted in column 8 of Table II B, application no. 17, and being depicted in the same respective line as said B1812, and preferably the activity is increased non-targeted, whereby the respective line disclose in column 7 the fine chemical myo-inositol.

[90279] Accordingly, in one embodiment, the molecule which activity is to be increased in the process of the invention is the gene product with an activity as a “para-aminobenzoate synthase componentl”, preferably it is the molecule of section (a) or (b) of this paragraph.

[90280] In particular, it was observed that in plants, especially in Arabidopsis thaliana, increasing or generating the activity of a gene product non-targeted with the activity of a “paraaminobenzoate synthase componentl”, preferably being encoded by a gene comprising the nucleic acid sequence SEQ ID NO. 145180, preferably the coding region thereof, conferred the production of or the increase in myo-inositol compared with the wild type control.

[90281] The nucleic acid sequence of B1814 from Escherichia coli, e.g. as shown in the respective line in column 5 of Table I, application no. 17, has been published in B. And the activity of the gene product thereof is the activity of L-serine dehydratase.

[90282] Accordingly, in one embodiment, the process of the present invention for producing galactitol in a non-human organism, like a microorganism or a plant or a part thereof, comprises increasing or generating the activity of a gene product with the activity of a gene product conferring the activity of “L-serine dehydratase”, especially from Escherichia coli or its functional equivalent or its homolog, e.g. the increase of
[90283] (a) a gene product of a gene comprising the nucleic acid molecule as shown in the respective line in column 5 of Table I (whereby the respective line disclose in column 7 the fine chemical galactitol), application no. 17, preferably the coding region thereof, or a homolog or a fragment thereof, and being depicted in the same respective line as said B1814, or a functional equivalent or a homolog thereof as shown in column 8 of Table I, application no. 17, preferably the coding region thereof, particularly a homolog or functional equivalent as shown in column 8 of Table I B, application no. 17, and being depicted in the same respective line as said B1814, and preferably the activity is increased plastidic, or
[90284] (b) a polypeptide comprising a polypeptide, a consensus sequence or at least a polypeptide motif as shown in the respective line in column 5 of Table II or in column 8 of Table IV, application no. 17, respectively, and being depicted in the same respective line as said B1814, or a functional equivalent or a homolog thereof as depicted in column 8 of Table II, application no. 17, preferably a homolog or functional equivalent as depicted in column 8 of Table II B, application no. 17, and being depicted in the same respective line as said B1814, and preferably the activity is increased plastidic, whereby the respective line disclose in column 7 the fine chemical galactitol.

[90285] Accordingly, in one embodiment, the molecule which activity is to be increased in the process of the invention is the gene product with an activity as a “L-serine dehydratase”, preferably it is the molecule of section (a) or (b) of this paragraph.

[90286] In particular, it was observed that in plants, especially in Arabidopsis thaliana, increasing or generating the activity of a gene product plastidic with the activity of a “L-serine dehydratase”, preferably being encoded by a gene comprising the nucleic acid sequence SEQ ID NO. 8033, preferably the coding region thereof, conferred the production of or the increase in galactitol compared with the wild type control.

[90287] The nucleic acid sequence of B1814 from Escherichia coli, e.g. as shown in the respective line in column 5 of Table I, application no. 17, has been published in B. And the activity of the gene product thereof is the activity of L-serine dehydratase.

[90288] Accordingly, in one embodiment, the process of the present invention for producing sorbitol in a non-human organism, like a microorganism or a plant or a part thereof, comprises increasing or generating the activity of a gene product with the activity of a gene product conferring the activity of “L-serine dehydratase”, especially from Escherichia coli or its functional equivalent or its homolog, e.g. the increase of
[90289] (a) a gene product of a gene comprising the nucleic acid molecule as shown in the respective line in column 5 of Table I (whereby the respective line disclose in column 7 the fine chemical sorbitol), application no. 17, preferably the coding region thereof, or a homolog or a fragment thereof, and being depicted in the same respective line as said B1814, or a functional equivalent or a homolog thereof as shown in column 8 of Table I, application no. 17, preferably the coding region thereof, particularly a homolog or functional equivalent as shown in column 8 of Table I B, application no. 17, and being depicted in the same respective line as said B1814, and preferably the activity is increased plastidic, or
[90290] (b) a polypeptide comprising a polypeptide, a consensus sequence or at least a polypeptide motif as shown in the respective line in column 5 of Table II or in column 8 of Table IV, application no. 17, respectively, and being depicted in the same respective line as said B1814, or a functional equivalent or a homolog thereof as depicted in column 8 of Table II, application no. 17, preferably a homolog or functional equivalent as depicted in column 8 of Table II B, application no. 17, and being depicted in the same respective line as said B1814, and preferably the activity is increased plastidic, whereby the respective line disclose in column 7 the fine chemical sorbitol.

[90291] Accordingly, in one embodiment, the molecule which activity is to be increased in the process of the invention is the gene product with an activity as a “L-serine dehydratase”, preferably it is the molecule of section (a) or (b) of this paragraph.

[90292] In particular, it was observed that in plants, especially in Arabidopsis thaliana, increasing or generating the activity of a gene product plastidic with the activity of a “L-serine dehydratase”, preferably being encoded by a gene comprising the nucleic acid sequence SEQ ID NO. 8033, preferably the coding region thereof, conferred the production of or the increase in sorbitol compared with the wild type control.

[90293] The nucleic acid sequence of B1845 from Escherichia coli, e.g. as shown in the respective line in column 5 of Table I, application no. 17, has been published in B. And the activity of the gene product thereof is the activity of protease.

[90294] Accordingly, in one embodiment, the process of the present invention for producing myo-inositol in a non-human organism, like a microorganism or a plant or a part thereof, comprises increasing or generating the activity of a gene product with the activity of a gene product conferring the activity of “protease”, especially from Escherichia coli or its functional equivalent or its homolog, e.g. the increase of
[90295] (a) a gene product of a gene comprising the nucleic acid molecule as shown in the respective line in column 5 of Table I (whereby the respective line disclose in column 7 the fine chemical myo-inositol), application no. 17, preferably the coding region thereof, or a homolog or a fragment thereof, and being depicted in the same respective line as said B1845, or a functional equivalent or a homolog thereof as shown in column 8 of Table I, application no. 17, preferably the coding region thereof, particularly a homolog or functional equivalent as shown in column 8 of Table I B, application no. 17, and being depicted in the same respective line as said B1845, and preferably the activity is increased non-targeted, or
[90296] (b) a polypeptide comprising a polypeptide, a consensus sequence or at least a polypeptide motif as shown in the respective line in column 5 of Table II or in column 8 of Table IV, application no. 17, respectively, and being depicted in the same respective line as said B1845, or a functional equivalent or a homolog thereof as depicted in column 8 of Table II, application no. 17, preferably a homolog or functional equivalent as depicted in column 8 of Table II B, application no. 17, and being depicted in the same respective line as said B1845, and preferably the activity is increased non-targeted, whereby the respective line disclose in column 7 the fine chemical myo-inositol.

[90297] Accordingly, in one embodiment, the molecule which activity is to be increased in the process of the invention is the gene product with an activity as a “protease”, preferably it is the molecule of section (a) or (b) of this paragraph.

[90298] In particular, it was observed that in plants, especially in Arabidopsis thaliana, increasing or generating the activity of a gene product non-targeted with the activity of a “protease”, preferably being encoded by a gene comprising the nucleic acid sequence SEQ ID NO. 38573, preferably the coding region thereof, conferred the production of or the increase in myo-inositol compared with the wild type control.

[90299] The nucleic acid sequence of B1854 from Escherichia coli, e.g. as shown in the respective line in column 5 of Table I, application no. 17, has been published in B. And the activity of the gene product thereof is the activity of pyruvate kinase.

[90300] Accordingly, in one embodiment, the process of the present invention for producing erythrol in a non-human organism, like a microorganism or a plant or a part thereof, comprises increasing or generating the activity of a gene product with the activity of a gene product conferring the activity of “pyruvate kinase”, especially from Escherichia coli or its functional equivalent or its homolog, e.g. the increase of
[90301] (a) a gene product of a gene comprising the nucleic acid molecule as shown in the respective line in column 5 of Table I (whereby the respective line disclose in column 7 the fine chemical erythrol), application no. 17, preferably the coding region thereof, or a homolog or a fragment thereof, and being depicted in the same respective line as said B1854, or a functional equivalent or a homolog thereof as shown in column 8 of Table I, application no. 17, preferably the coding region thereof, particularly a homolog or functional equivalent as shown in column 8 of Table I B, application no. 17, and being depicted in the same respective line as said B1854, and preferably the activity is increased plastidic, or
[90302] (b) a polypeptide comprising a polypeptide, a consensus sequence or at least a polypeptide motif as shown in the respective line in column 5 of Table II or in column 8 of Table IV, application no. 17, respectively, and being depicted in the same respective line as said B1854, or a functional equivalent or a homolog thereof as depicted in column 8 of Table II, application no. 17, preferably a homolog or functional equivalent as depicted in column 8 of Table II B, application no. 17, and being depicted in the same respective line as said B1854, and preferably the activity is increased plastidic, whereby the respective line disclose in column 7 the fine chemical erythrol.

[90303] Accordingly, in one embodiment, the molecule which activity is to be increased in the process of the invention is the gene product with an activity as a “pyruvate kinase”, preferably it is the molecule of section (a) or (b) of this paragraph.

[90304] In particular, it was observed that in plants, especially in Arabidopsis thaliana, increasing or generating the activity of a gene product plastidic with the activity of a “pyruvate kinase”, preferably being encoded by a gene comprising the nucleic acid sequence SEQ ID NO. 8363, preferably the coding region thereof, conferred the production of or the increase in erythrol compared with the wild type control.

[90305] The nucleic acid sequence of B1854 from Escherichia coli, e.g. as shown in the respective line in column 5 of Table I, application no. 17, has been published in B. And the activity of the gene product thereof is the activity of pyruvate kinase.

[90306] Accordingly, in one embodiment, the process of the present invention for producing myo-inositol in a non-human organism, like a microorganism or a plant or a part thereof, comprises increasing or generating the activity of a gene product with the activity of a gene product conferring the activity of “pyruvate kinase”, especially from Escherichia coli or its functional equivalent or its homolog, e.g. the increase of
[90307] (a) a gene product of a gene comprising the nucleic acid molecule as shown in the respective line in column 5 of Table I (whereby the respective line disclose in column 7 the fine chemical myo-inositol), application no. 17, preferably the coding region thereof, or a homolog or a fragment thereof, and being depicted in the same respective line as said B1854, or a functional equivalent or a homolog thereof as shown in column 8 of Table I, application no. 17, preferably the coding region thereof, particularly a homolog or functional equivalent as shown in column 8 of Table I B, application no. 17, and being depicted in the same respective line as said B1854, and preferably the activity is increased plastidic, or
[90308] (b) a polypeptide comprising a polypeptide, a consensus sequence or at least a polypeptide motif as shown in the respective line in column 5 of Table II or in column 8 of Table IV, application no. 17, respectively, and being depicted in the same respective line as said B1854, or a functional equivalent or a homolog thereof as depicted in column 8 of Table II, application no. 17, preferably a homolog or functional equivalent as depicted in column 8 of Table II B, application no. 17, and being depicted in the same respective line as said B1854, and preferably the activity is increased plastidic, whereby the respective line disclose in column 7 the fine chemical myo-inositol.

[90309] Accordingly, in one embodiment, the molecule which activity is to be increased in the process of the invention is the gene product with an activity as a “pyruvate kinase”, preferably it is the molecule of section (a) or (b) of this paragraph.

[90310] In particular, it was observed that in plants, especially in Arabidopsis thaliana, increasing or generating the activity of a gene product plastidic with the activity of a “pyruvate kinase”, preferably being encoded by a gene comprising the nucleic acid sequence SEQ ID NO. 8363, preferably the coding region thereof, conferred the production of or the increase in myo-inositol compared with the wild type control.

[90311] The nucleic acid sequence of B1854 from Escherichia coli, e.g. as shown in the respective line in column 5 of Table I, application no. 17, has been published in B. And the activity of the gene product thereof is the activity of pyruvate kinase.

[90312] Accordingly, in one embodiment, the process of the present invention for producing sorbitol in a non-human organism, like a microorganism or a plant or a part thereof, comprises increasing or generating the activity of a gene product with the activity of a gene product conferring the activity of “pyruvate kinase”, especially from Escherichia coli or its functional equivalent or its homolog, e.g. the increase of
[90313] (a) a gene product of a gene comprising the nucleic acid molecule as shown in the respective line in column 5 of Table I (whereby the respective line disclose in column 7 the fine chemical sorbitol), application no. 17, preferably the coding region thereof, or a homolog or a fragment thereof, and being depicted in the same respective line as said B1854, or a functional equivalent or a homolog thereof as shown in column 8 of Table I, application no. 17, preferably the coding region thereof, particularly a homolog or functional equivalent as shown in column 8 of Table I B, application no. 17, and being depicted in the same respective line as said B1854, and preferably the activity is increased plastidic, or
[90314] (b) a polypeptide comprising a polypeptide, a consensus sequence or at least a polypeptide motif as shown in the respective line in column 5 of Table II or in column 8 of Table IV, application no. 17, respectively, and being depicted in the same respective line as said B1854, or a functional equivalent or a homolog thereof as depicted in column 8 of Table II, application no. 17, preferably a homolog or functional equivalent as depicted in column 8 of Table II B, application no. 17, and being depicted in the same respective line as said B1854, and preferably the activity is increased plastidic, whereby the respective line disclose in column 7 the fine chemical sorbitol.

[90315] Accordingly, in one embodiment, the molecule which activity is to be increased in the process of the invention is the gene product with an activity as a “pyruvate kinase”, preferably it is the molecule of section (a) or (b) of this paragraph.

[90316] In particular, it was observed that in plants, especially in Arabidopsis thaliana, increasing or generating the activity of a gene product plastidic with the activity of a “pyruvate kinase”, preferably being encoded by a gene comprising the nucleic acid sequence SEQ ID NO. 8363, preferably the coding region thereof, conferred the production of or the increase in sorbitol compared with the wild type control.

[90317] The nucleic acid sequence of B1865 from Escherichia coli, e.g. as shown in the respective line in column 5 of Table I, application no. 17, has been published in B. And the activity of the gene product thereof is the activity of dATP pyrophosphohydrolase.

[90318] Accordingly, in one embodiment, the process of the present invention for producing fructose in a non-human organism, like a microorganism or a plant or a part thereof, comprises increasing or generating the activity of a gene product with the activity of a gene product conferring the activity of “dATP pyrophosphohydrolase”, especially from Escherichia coli or its functional equivalent or its homolog, e.g. the increase of
[90319] (a) a gene product of a gene comprising the nucleic acid molecule as shown in the respective line in column 5 of Table I (whereby the respective line disclose in column 7 the fine chemical fructose), application no. 17, preferably the coding region thereof, or a homolog or a fragment thereof, and being depicted in the same respective line as said B1865, or a functional equivalent or a homolog thereof as shown in column 8 of Table I, application no. 17, preferably the coding region thereof, particularly a homolog or functional equivalent as shown in column 8 of Table I B, application no. 17, and being depicted in the same respective line as said B1865, and preferably the activity is increased non-targeted, or
[90320] (b) a polypeptide comprising a polypeptide, a consensus sequence or at least a polypeptide motif as shown in the respective line in column 5 of Table II or in column 8 of Table IV, application no. 17, respectively, and being depicted in the same respective line as said B1865, or a functional equivalent or a homolog thereof as depicted in column 8 of Table II, application no. 17, preferably a homolog or functional equivalent as depicted in column 8 of Table II B, application no. 17, and being depicted in the same respective line as said B1865, and preferably the activity is increased non-targeted, whereby the respective line disclose in column 7 the fine chemical fructose.

[90321] Accordingly, in one embodiment, the molecule which activity is to be increased in the process of the invention is the gene product with an activity as a “dATP pyrophosphohydrolase”, preferably it is the molecule of section (a) or (b) of this paragraph.

[90322] In particular, it was observed that in plants, especially in Arabidopsis thaliana, increasing or generating the activity of a gene product non-targeted with the activity of a “dATP pyrophosphohydrolase”, preferably being encoded by a gene comprising the nucleic acid sequence SEQ ID NO. 134783, preferably the coding region thereof, conferred the production of or the increase in fructose compared with the wild type control.

[90323] The nucleic acid sequence of B1896 from Escherichia coli, e.g. as shown in the respective line in column 5 of Table I, application no. 17, has been published in B. And the activity of the gene product thereof is the activity of trehalose-6-phosphate synthase.

[90324] Accordingly, in one embodiment, the process of the present invention for producing glucose-1-phosphate in a non-human organism, like a microorganism or a plant or a part thereof, comprises increasing or generating the activity of a gene product with the activity of a gene product conferring the activity of “trehalose-6-phosphate synthase”, especially from Escherichia coli or its functional equivalent or its homolog, e.g. the increase of
[90325] (a) a gene product of a gene comprising the nucleic acid molecule as shown in the respective line in column 5 of Table I (whereby the respective line disclose in column 7 the fine chemical glucose-1-phosphate), application no. 17, preferably the coding region thereof, or a homolog or a fragment thereof, and being depicted in the same respective line as said B1896, or a functional equivalent or a homolog thereof as shown in column 8 of Table I, application no. 17, preferably the coding region thereof, particularly a homolog or functional equivalent as shown in column 8 of Table I B, application no. 17, and being depicted in the same respective line as said B1896, and preferably the activity is increased non-targeted, or
[90326] (b) a polypeptide comprising a polypeptide, a consensus sequence or at least a polypeptide motif as shown in the respective line in column 5 of Table II or in column 8 of Table IV, application no. 17, respectively, and being depicted in the same respective line as said B1896, or a functional equivalent or a homolog thereof as depicted in column 8 of Table II, application no. 17, preferably a homolog or functional equivalent as depicted in column 8 of Table II B, application no. 17, and being depicted in the same respective line as said B1896, and preferably the activity is increased non-targeted, whereby the respective line disclose in column 7 the fine chemical glucose-1-phosphate.

[90327] Accordingly, in one embodiment, the molecule which activity is to be increased in the process of the invention is the gene product with an activity as a “trehalose-6-phosphate synthase”, preferably it is the molecule of section (a) or (b) of this paragraph.

[90328] In particular, it was observed that in plants, especially in Arabidopsis thaliana, increasing or generating the activity of a gene product non-targeted with the activity of a “trehalose-6-phosphate synthase”, preferably being encoded by a gene comprising the nucleic acid sequence SEQ ID NO. 145411, preferably the coding region thereof, conferred the production of or the increase in glucose-1-phosphate compared with the wild type control.

[90329] The nucleic acid sequence of B1896 from Escherichia coli, e.g. as shown in the respective line in column 5 of Table I, application no. 17, has been published in B. And the activity of the gene product thereof is the activity of trehalose-6-phosphate synthase.

[90330] Accordingly, in one embodiment, the process of the present invention for producing trehalose in a non-human organism, like a microorganism or a plant or a part thereof, comprises increasing or generating the activity of a gene product with the activity of a gene product conferring the activity of “trehalose-6-phosphate synthase”, especially from Escherichia coli or its functional equivalent or its homolog, e.g. the increase of
[90331] (a) a gene product of a gene comprising the nucleic acid molecule as shown in the respective line in column 5 of Table I (whereby the respective line disclose in column 7 the fine chemical trehalose), application no. 17, preferably the coding region thereof, or a homolog or a fragment thereof, and being depicted in the same respective line as said B1896, or a functional equivalent or a homolog thereof as shown in column 8 of Table I, application no. 17, preferably the coding region thereof, particularly a homolog or functional equivalent as shown in column 8 of Table I B, application no. 17, and being depicted in the same respective line as said B1896, and preferably the activity is increased non-targeted, or
[90332] (b) a polypeptide comprising a polypeptide, a consensus sequence or at least a polypeptide motif as shown in the respective line in column 5 of Table II or in column 8 of Table IV, application no. 17, respectively, and being depicted in the same respective line as said B1896, or a functional equivalent or a homolog thereof as depicted in column 8 of Table II, application no. 17, preferably a homolog or functional equivalent as depicted in column 8 of Table II B, application no. 17, and being depicted in the same respective line as said B1896, and preferably the activity is increased non-targeted, whereby the respective line disclose in column 7 the fine chemical trehalose.

[90333] Accordingly, in one embodiment, the molecule which activity is to be increased in the process of the invention is the gene product with an activity as a “trehalose-6-phosphate synthase”, preferably it is the molecule of section (a) or (b) of this paragraph.

[90334] In particular, it was observed that in plants, especially in Arabidopsis thaliana, increasing or generating the activity of a gene product non-targeted with the activity of a “trehalose-6-phosphate synthase”, preferably being encoded by a gene comprising the nucleic acid sequence SEQ ID NO. 145411, preferably the coding region thereof, conferred the production of or the increase in trehalose compared with the wild type control.

[90335] The nucleic acid sequence of B1897 from Escherichia coli, e.g. as shown in the respective line in column 5 of Table I, application no. 17, has been published in B. And the activity of the gene product thereof is the activity of trehalose-phosphatase.

[90336] Accordingly, in one embodiment, the process of the present invention for producing erythrol in a non-human organism, like a microorganism or a plant or a part thereof, comprises increasing or generating the activity of a gene product with the activity of a gene product conferring the activity of “trehalose-phosphatase”, especially from Escherichia coli or its functional equivalent or its homolog, e.g. the increase of
[90337] (a) a gene product of a gene comprising the nucleic acid molecule as shown in the respective line in column 5 of Table I (whereby the respective line disclose in column 7 the fine chemical erythrol), application no. 17, preferably the coding region thereof, or a homolog or a fragment thereof, and being depicted in the same respective line as said B1897, or a functional equivalent or a homolog thereof as shown in column 8 of Table I, application no. 17, preferably the coding region thereof, particularly a homolog or functional equivalent as shown in column 8 of Table I B, application no. 17, and being depicted in the same respective line as said B1897, and preferably the activity is increased plastidic, or
[90338] (b) a polypeptide comprising a polypeptide, a consensus sequence or at least a polypeptide motif as shown in the respective line in column 5 of Table II or in column 8 of Table IV, application no. 17, respectively, and being depicted in the same respective line as said B1897, or a functional equivalent or a homolog thereof as depicted in column 8 of Table II, application no. 17, preferably a homolog or functional equivalent as depicted in column 8 of Table II B, application no. 17, and being depicted in the same respective line as said B1897, and preferably the activity is increased plastidic, whereby the respective line disclose in column 7 the fine chemical erythrol.

[90339] Accordingly, in one embodiment, the molecule which activity is to be increased in the process of the invention is the gene product with an activity as a “trehalose-phosphatase”, preferably it is the molecule of section (a) or (b) of this paragraph.

[90340] In particular, it was observed that in plants, especially in Arabidopsis thaliana, increasing or generating the activity of a gene product plastidic with the activity of a “trehalose-phosphatase”, preferably being encoded by a gene comprising the nucleic acid sequence SEQ ID NO. 79056, preferably the coding region thereof, conferred the production of or the increase in erythrol compared with the wild type control.

[90341] The nucleic acid sequence of B1897 from Escherichia coli, e.g. as shown in the respective line in column 5 of Table I, application no. 17, has been published in B. And the activity of the gene product thereof is the activity of trehalose-phosphatase.

[90342] Accordingly, in one embodiment, the process of the present invention for producing fructose in a non-human organism, like a microorganism or a plant or a part thereof, comprises increasing or generating the activity of a gene product with the activity of a gene product conferring the activity of “trehalose-phosphatase”, especially from Escherichia coli or its functional equivalent or its homolog, e.g. the increase of
[90343] (a) a gene product of a gene comprising the nucleic acid molecule as shown in the respective line in column 5 of Table I (whereby the respective line disclose in column 7 the fine chemical fructose), application no. 17, preferably the coding region thereof, or a homolog or a fragment thereof, and being depicted in the same respective line as said B1897, or a functional equivalent or a homolog thereof as shown in column 8 of Table I, application no. 17, preferably the coding region thereof, particularly a homolog or functional equivalent as shown in column 8 of Table I B, application no. 17, and being depicted in the same respective line as said B1897, and preferably the activity is increased non-targeted, or
[90344] (b) a polypeptide comprising a polypeptide, a consensus sequence or at least a polypeptide motif as shown in the respective line in column 5 of Table II or in column 8 of Table IV, application no. 17, respectively, and being depicted in the same respective line as said B1897, or a functional equivalent or a homolog thereof as depicted in column 8 of Table II, application no. 17, preferably a homolog or functional equivalent as depicted in column 8 of Table II B, application no. 17, and being depicted in the same respective line as said B1897, and preferably the activity is increased non-targeted, whereby the respective line disclose in column 7 the fine chemical fructose.

[90345] Accordingly, in one embodiment, the molecule which activity is to be increased in the process of the invention is the gene product with an activity as a “trehalose-phosphatase”, preferably it is the molecule of section (a) or (b) of this paragraph.

[90346] In particular, it was observed that in plants, especially in Arabidopsis thaliana, increasing or generating the activity of a gene product non-targeted with the activity of a “trehalosephosphatase”, preferably being encoded by a gene comprising the nucleic acid sequence SEQ ID NO. 79056, preferably the coding region thereof, conferred the production of or the increase in fructose compared with the wild type control.

[90347] The nucleic acid sequence of B1897 from Escherichia coli, e.g. as shown in the respective line in column 5 of Table I, application no. 17, has been published in B. And the activity of the gene product thereof is the activity of trehalose-phosphatase.

[90348] Accordingly, in one embodiment, the process of the present invention for producing glucose in a non-human organism, like a microorganism or a plant or a part thereof, comprises increasing or generating the activity of a gene product with the activity of a gene product conferring the activity of “trehalose-phosphatase”, especially from Escherichia coli or its functional equivalent or its homolog, e.g. the increase of
[90349] (a) a gene product of a gene comprising the nucleic acid molecule as shown in the respective line in column 5 of Table I (whereby the respective line disclose in column 7 the fine chemical glucose), application no. 17, preferably the coding region thereof, or a homolog or a fragment thereof, and being depicted in the same respective line as said B1897, or a functional equivalent or a homolog thereof as shown in column 8 of Table I, application no. 17, preferably the coding region thereof, particularly a homolog or functional equivalent as shown in column 8 of Table I B, application no. 17, and being depicted in the same respective line as said B1897, and preferably the activity is increased non-targeted, or
[90350] (b) a polypeptide comprising a polypeptide, a consensus sequence or at least a polypeptide motif as shown in the respective line in column 5 of Table II or in column 8 of Table IV, application no. 17, respectively, and being depicted in the same respective line as said B1897, or a functional equivalent or a homolog thereof as depicted in column 8 of Table II, application no. 17, preferably a homolog or functional equivalent as depicted in column 8 of Table II B, application no. 17, and being depicted in the same respective line as said B1897, and preferably the activity is increased non-targeted, whereby the respective line disclose in column 7 the fine chemical glucose.

[90351] Accordingly, in one embodiment, the molecule which activity is to be increased in the process of the invention is the gene product with an activity as a “trehalose-phosphatase”, preferably it is the molecule of section (a) or (b) of this paragraph.

[90352] In particular, it was observed that in plants, especially in Arabidopsis thaliana, increasing or generating the activity of a gene product non-targeted with the activity of a “trehalosephosphatase”, preferably being encoded by a gene comprising the nucleic acid sequence SEQ ID NO. 79056, preferably the coding region thereof, conferred the production of or the increase in glucose compared with the wild type control.

[90353] The nucleic acid sequence of B1897 from Escherichia coli, e.g. as shown in the respective line in column 5 of Table I, application no. 17, has been published in B. And the activity of the gene product thereof is the activity of trehalose-phosphatase.

[90354] Accordingly, in one embodiment, the process of the present invention for producing sucrose in a non-human organism, like a microorganism or a plant or a part thereof, comprises increasing or generating the activity of a gene product with the activity of a gene product conferring the activity of “trehalose-phosphatase”, especially from Escherichia coli or its functional equivalent or its homolog, e.g. the increase of
[90355] (a) a gene product of a gene comprising the nucleic acid molecule as shown in the respective line in column 5 of Table I (whereby the respective line disclose in column 7 the fine chemical sucrose), application no. 17, preferably the coding region thereof, or a homolog or a fragment thereof, and being depicted in the same respective line as said B1897, or a functional equivalent or a homolog thereof as shown in column 8 of Table I, application no. 17, preferably the coding region thereof, particularly a homolog or functional equivalent as shown in column 8 of Table I B, application no. 17, and being depicted in the same respective line as said B1897, and preferably the activity is increased non-targeted, or
[90356] (b) a polypeptide comprising a polypeptide, a consensus sequence or at least a polypeptide motif as shown in the respective line in column 5 of Table II or in column 8 of Table IV, application no. 17, respectively, and being depicted in the same respective line as said B1897, or a functional equivalent or a homolog thereof as depicted in column 8 of Table II, application no. 17, preferably a homolog or functional equivalent as depicted in column 8 of Table II B, application no. 17, and being depicted in the same respective line as said B1897, and preferably the activity is increased non-targeted, whereby the respective line disclose in column 7 the fine chemical sucrose.

[90357] Accordingly, in one embodiment, the molecule which activity is to be increased in the process of the invention is the gene product with an activity as a “trehalose-phosphatase”, preferably it is the molecule of section (a) or (b) of this paragraph.

[90358] In particular, it was observed that in plants, especially in Arabidopsis thaliana, increasing or generating the activity of a gene product non-targeted with the activity of a “trehalosephosphatase”, preferably being encoded by a gene comprising the nucleic acid sequence SEQ ID NO. 79056, preferably the coding region thereof, conferred the production of or the increase in sucrose compared with the wild type control.

[90359] The nucleic acid sequence of B1898 from Escherichia coli, e.g. as shown in the respective line in column 5 of Table I, application no. 17, has been published in B. And the activity of the gene product thereof is the activity of b1898-protein.

[90360] Accordingly, in one embodiment, the process of the present invention for producing raffinose in a non-human organism, like a microorganism or a plant or a part thereof, comprises increasing or generating the activity of a gene product with the activity of a gene product conferring the activity of “b1898-protein”, especially from Escherichia coli or its functional equivalent or its homolog, e.g. the increase of
[90361] (a) a gene product of a gene comprising the nucleic acid molecule as shown in the respective line in column 5 of Table I (whereby the respective line disclose in column 7 the fine chemical raffinose), application no. 17, preferably the coding region thereof, or a homolog or a fragment thereof, and being depicted in the same respective line as said B1898, or a functional equivalent or a homolog thereof as shown in column 8 of Table I, application no. 17, preferably the coding region thereof, particularly a homolog or functional equivalent as shown in column 8 of Table I B, application no. 17, and being depicted in the same respective line as said B1898, and preferably the activity is increased non-targeted, or
[90362] (b) a polypeptide comprising a polypeptide, a consensus sequence or at least a polypeptide motif as shown in the respective line in column 5 of Table II or in column 8 of Table IV, application no. 17, respectively, and being depicted in the same respective line as said B1898, or a functional equivalent or a homolog thereof as depicted in column 8 of Table II, application no. 17, preferably a homolog or functional equivalent as depicted in column 8 of Table II B, application no. 17, and being depicted in the same respective line as said B1898, and preferably the activity is increased non-targeted, whereby the respective line disclose in column 7 the fine chemical raffinose.

[90363] Accordingly, in one embodiment, the molecule which activity is to be increased in the process of the invention is the gene product with an activity as a “b1898-protein”, preferably it is the molecule of section (a) or (b) of this paragraph.

[90364] In particular, it was observed that in plants, especially in Arabidopsis thaliana, increasing or generating the activity of a gene product non-targeted with the activity of a “b1898-protein”, preferably being encoded by a gene comprising the nucleic acid sequence SEQ ID NO. 38767, preferably the coding region thereof, conferred the production of or the increase in raffinose compared with the wild type control.

[90365] The nucleic acid sequence of B1932 from Escherichia coli, e.g. as shown in the respective line in column 5 of Table I, application no. 17, has been published in B. And the activity of the gene product thereof is the activity of acetyltransferase.

[90366] Accordingly, in one embodiment, the process of the present invention for producing glucose-1-phosphate in a non-human organism, like a microorganism or a plant or a part thereof, comprises increasing or generating the activity of a gene product with the activity of a gene product conferring the activity of “acetyltransferase”, especially from Escherichia coli or its functional equivalent or its homolog, e.g. the increase of
[90367] (a) a gene product of a gene comprising the nucleic acid molecule as shown in the respective line in column 5 of Table I (whereby the respective line disclose in column 7 the fine chemical glucose-1-phosphate), application no. 17, preferably the coding region thereof, or a homolog or a fragment thereof, and being depicted in the same respective line as said B1932, or a functional equivalent or a homolog thereof as shown in column 8 of Table I, application no. 17, preferably the coding region thereof, particularly a homolog or functional equivalent as shown in column 8 of Table I B, application no. 17, and being depicted in the same respective line as said B1932, and preferably the activity is increased non-targeted, or
[90368] (b) a polypeptide comprising a polypeptide, a consensus sequence or at least a polypeptide motif as shown in the respective line in column 5 of Table II or in column 8 of Table IV, application no. 17, respectively, and being depicted in the same respective line as said B1932, or a functional equivalent or a homolog thereof as depicted in column 8 of Table II, application no. 17, preferably a homolog or functional equivalent as depicted in column 8 of Table II B, application no. 17, and being depicted in the same respective line as said B1932, and preferably the activity is increased non-targeted, whereby the respective line disclose in column 7 the fine chemical glucose-1-phosphate.

[90369] Accordingly, in one embodiment, the molecule which activity is to be increased in the process of the invention is the gene product with an activity as a “acetyltransferase”, preferably it is the molecule of section (a) or (b) of this paragraph.

[90370] In particular, it was observed that in plants, especially in Arabidopsis thaliana, increasing or generating the activity of a gene product non-targeted with the activity of a “acetyltransferase”, preferably being encoded by a gene comprising the nucleic acid sequence SEQ ID NO. 131799, preferably the coding region thereof, conferred the production of or the increase in glucose-1-phosphate compared with the wild type control.

[90371] The nucleic acid sequence of B1932 from Escherichia coli, e.g. as shown in the respective line in column 5 of Table I, application no. 17, has been published in B. And the activity of the gene product thereof is the activity of acetyltransferase.

[90372] Accordingly, in one embodiment, the process of the present invention for producing 3,4,5-trihydroxypentanoic acid in a non-human organism, like a microorganism or a plant or a part thereof, comprises increasing or generating the activity of a gene product with the activity of a gene product conferring the activity of “acetyltransferase”, especially from Escherichia coli or its functional equivalent or its homolog, e.g. the increase of
[90373] (a) a gene product of a gene comprising the nucleic acid molecule as shown in the respective line in column 5 of Table I (whereby the respective line disclose in column 7 the fine chemical 3,4,5-trihydroxypentanoic acid), application no. 17, preferably the coding region thereof, or a homolog or a fragment thereof, and being depicted in the same respective line as said B1932, or a functional equivalent or a homolog thereof as shown in column 8 of Table I, application no. 17, preferably the coding region thereof, particularly a homolog or functional equivalent as shown in column 8 of Table I B, application no. 17, and being depicted in the same respective line as said B1932, and preferably the activity is increased non-targeted, or
[90374] (b) a polypeptide comprising a polypeptide, a consensus sequence or at least a polypeptide motif as shown in the respective line in column 5 of Table II or in column 8 of Table IV, application no. 17, respectively, and being depicted in the same respective line as said B1932, or a functional equivalent or a homolog thereof as depicted in column 8 of Table II, application no. 17, preferably a homolog or functional equivalent as depicted in column 8 of Table II B, application no. 17, and being depicted in the same respective line as said B1932, and preferably the activity is increased non-targeted, whereby the respective line disclose in column 7 the fine chemical 3,4,5-trihydroxypentanoic acid.

[90375] Accordingly, in one embodiment, the molecule which activity is to be increased in the process of the invention is the gene product with an activity as a “acetyltransferase”, preferably it is the molecule of section (a) or (b) of this paragraph.

[90376] In particular, it was observed that in plants, especially in Arabidopsis thaliana, increasing or generating the activity of a gene product non-targeted with the activity of a “acetyltransferase”, preferably being encoded by a gene comprising the nucleic acid sequence SEQ ID NO. 131799, preferably the coding region thereof, conferred the production of or the increase in 3,4,5-trihydroxypentanoic acid compared with the wild type control.

[90377] The nucleic acid sequence of B1938 from Escherichia coli, e.g. as shown in the respective line in column 5 of Table I, application no. 17, has been published in B. And the activity of the gene product thereof is the activity of flagellar M-ring protein.

[90378] Accordingly, in one embodiment, the process of the present invention for producing glucose in a non-human organism, like a microorganism or a plant or a part thereof, comprises increasing or generating the activity of a gene product with the activity of a gene product conferring the activity of “flagellar M-ring protein”, especially from Escherichia coli or its functional equivalent or its homolog, e.g. the increase of
[90379] (a) a gene product of a gene comprising the nucleic acid molecule as shown in the respective line in column 5 of Table I (whereby the respective line disclose in column 7 the fine chemical glucose), application no. 17, preferably the coding region thereof, or a homolog or a fragment thereof, and being depicted in the same respective line as said B1938, or a functional equivalent or a homolog thereof as shown in column 8 of Table I, application no. 17, preferably the coding region thereof, particularly a homolog or functional equivalent as shown in column 8 of Table I B, application no. 17, and being depicted in the same respective line as said B1938, and preferably the activity is increased non-targeted, or
[90380] (b) a polypeptide comprising a polypeptide, a consensus sequence or at least a polypeptide motif as shown in the respective line in column 5 of Table II or in column 8 of Table IV, application no. 17, respectively, and being depicted in the same respective line as said B1938, or a functional equivalent or a homolog thereof as depicted in column 8 of Table II, application no. 17, preferably a homolog or functional equivalent as depicted in column 8 of Table II B, application no. 17, and being depicted in the same respective line as said B1938, and preferably the activity is increased non-targeted, whereby the respective line disclose in column 7 the fine chemical glucose.

[90381] Accordingly, in one embodiment, the molecule which activity is to be increased in the process of the invention is the gene product with an activity as a “flagellar M-ring protein”, preferably it is the molecule of section (a) or (b) of this paragraph.

[90382] In particular, it was observed that in plants, especially in Arabidopsis thaliana, increasing or generating the activity of a gene product non-targeted with the activity of a “flagellar M-ring protein”, preferably being encoded by a gene comprising the nucleic acid sequence SEQ ID NO. 134864, preferably the coding region thereof, conferred the production of or the increase in glucose compared with the wild type control.

[90383] The nucleic acid sequence of B1938 from Escherichia coli, e.g. as shown in the respective line in column 5 of Table I, application no. 17, has been published in B. And the activity of the gene product thereof is the activity of flagellar M-ring protein.

[90384] Accordingly, in one embodiment, the process of the present invention for producing myo-inositol in a non-human organism, like a microorganism or a plant or a part thereof, comprises increasing or generating the activity of a gene product with the activity of a gene product conferring the activity of “flagellar M-ring protein”, especially from Escherichia coli or its functional equivalent or its homolog, e.g. the increase of
[90385] (a) a gene product of a gene comprising the nucleic acid molecule as shown in the respective line in column 5 of Table I (whereby the respective line disclose in column 7 the fine chemical myo-inositol), application no. 17, preferably the coding region thereof, or a homolog or a fragment thereof, and being depicted in the same respective line as said B1938, or a functional equivalent or a homolog thereof as shown in column 8 of Table I, application no. 17, preferably the coding region thereof, particularly a homolog or functional equivalent as shown in column 8 of Table I B, application no. 17, and being depicted in the same respective line as said B1938, and preferably the activity is increased non-targeted, or
[90386] (b) a polypeptide comprising a polypeptide, a consensus sequence or at least a polypeptide motif as shown in the respective line in column 5 of Table II or in column 8 of Table IV, application no. 17, respectively, and being depicted in the same respective line as said B1938, or a functional equivalent or a homolog thereof as depicted in column 8 of Table II, application no. 17, preferably a homolog or functional equivalent as depicted in column 8 of Table II B, application no. 17, and being depicted in the same respective line as said B1938, and preferably the activity is increased non-targeted, whereby the respective line disclose in column 7 the fine chemical myo-inositol.

[90387] Accordingly, in one embodiment, the molecule which activity is to be increased in the process of the invention is the gene product with an activity as a “flagellar M-ring protein”, preferably it is the molecule of section (a) or (b) of this paragraph.

[90388] In particular, it was observed that in plants, especially in Arabidopsis thaliana, increasing or generating the activity of a gene product non-targeted with the activity of a “flagellar M-ring protein”, preferably being encoded by a gene comprising the nucleic acid sequence SEQ ID NO. 134864, preferably the coding region thereof, conferred the production of or the increase in myo-inositol compared with the wild type control.

[90389] The nucleic acid sequence of B2027 from Escherichia coli, e.g. as shown in the respective line in column 5 of Table I, application no. 17, has been published in B. And the activity of the gene product thereof is the activity of O-antigen chain length determinant.

[90390] Accordingly, in one embodiment, the process of the present invention for producing fructose in a non-human organism, like a microorganism or a plant or a part thereof, comprises increasing or generating the activity of a gene product with the activity of a gene product conferring the activity of “O-antigen chain length determinant”, especially from Escherichia coli or its functional equivalent or its homolog, e.g. the increase of
[90391] (a) a gene product of a gene comprising the nucleic acid molecule as shown in the respective line in column 5 of Table I (whereby the respective line disclose in column 7 the fine chemical fructose), application no. 17, preferably the coding region thereof, or a homolog or a fragment thereof, and being depicted in the same respective line as said B2027, or a functional equivalent or a homolog thereof as shown in column 8 of Table I, application no. 17, preferably the coding region thereof, particularly a homolog or functional equivalent as shown in column 8 of Table I B, application no. 17, and being depicted in the same respective line as said B2027, and preferably the activity is increased non-targeted, or
[90392] (b) a polypeptide comprising a polypeptide, a consensus sequence or at least a polypeptide motif as shown in the respective line in column 5 of Table II or in column 8 of Table IV, application no. 17, respectively, and being depicted in the same respective line as said B2027, or a functional equivalent or a homolog thereof as depicted in column 8 of Table II, application no. 17, preferably a homolog or functional equivalent as depicted in column 8 of Table II B, application no. 17, and being depicted in the same respective line as said B2027, and preferably the activity is increased non-targeted, whereby the respective line disclose in column 7 the fine chemical fructose.

[90393] Accordingly, in one embodiment, the molecule which activity is to be increased in the process of the invention is the gene product with an activity as a “O-antigen chain length determinant”, preferably it is the molecule of section (a) or (b) of this paragraph.

[90394] In particular, it was observed that in plants, especially in Arabidopsis thaliana, increasing or generating the activity of a gene product non-targeted with the activity of a “O-antigen chain length determinant”, preferably being encoded by a gene comprising the nucleic acid sequence SEQ ID NO. 79217, preferably the coding region thereof, conferred the production of or the increase in fructose compared with the wild type control.

[90395] The nucleic acid sequence of B2032 from Escherichia coli, e.g. as shown in the respective line in column 5 of Table I, application no. 17, has been published in B. And the activity of the gene product thereof is the activity of b2032-protein.

[90396] Accordingly, in one embodiment, the process of the present invention for producing glucose in a non-human organism, like a microorganism or a plant or a part thereof, comprises increasing or generating the activity of a gene product with the activity of a gene product conferring the activity of “b2032-protein”, especially from Escherichia coli or its functional equivalent or its homolog, e.g. the increase of
[90397] (a) a gene product of a gene comprising the nucleic acid molecule as shown in the respective line in column 5 of Table I (whereby the respective line disclose in column 7 the fine chemical glucose), application no. 17, preferably the coding region thereof, or a homolog or a fragment thereof, and being depicted in the same respective line as said B2032, or a functional equivalent or a homolog thereof as shown in column 8 of Table I, application no. 17, preferably the coding region thereof, particularly a homolog or functional equivalent as shown in column 8 of Table I B, application no. 17, and being depicted in the same respective line as said B2032, and preferably the activity is increased non-targeted, or
[90398] (b) a polypeptide comprising a polypeptide, a consensus sequence or at least a polypeptide motif as shown in the respective line in column 5 of Table II or in column 8 of Table IV, application no. 17, respectively, and being depicted in the same respective line as said B2032, or a functional equivalent or a homolog thereof as depicted in column 8 of Table II, application no. 17, preferably a homolog or functional equivalent as depicted in column 8 of Table II B, application no. 17, and being depicted in the same respective line as said B2032, and preferably the activity is increased non-targeted, whereby the respective line disclose in column 7 the fine chemical glucose.

[90399] Accordingly, in one embodiment, the molecule which activity is to be increased in the process of the invention is the gene product with an activity as a “b2032-protein”, preferably it is the molecule of section (a) or (b) of this paragraph.

[90400] In particular, it was observed that in plants, especially in Arabidopsis thaliana, increasing or generating the activity of a gene product non-targeted with the activity of a “b2032-protein”, preferably being encoded by a gene comprising the nucleic acid sequence SEQ ID NO. 8920, preferably the coding region thereof, conferred the production of or the increase in glucose compared with the wild type control.

[90401] The nucleic acid sequence of B2032 from Escherichia coli, e.g. as shown in the respective line in column 5 of Table I, application no. 17, has been published in B. And the activity of the gene product thereof is the activity of b2032-protein.

[90402] Accordingly, in one embodiment, the process of the present invention for producing myo-inositol in a non-human organism, like a microorganism or a plant or a part thereof, comprises increasing or generating the activity of a gene product with the activity of a gene product conferring the activity of “b2032-protein”, especially from Escherichia coli or its functional equivalent or its homolog, e.g. the increase of
[90403] (a) a gene product of a gene comprising the nucleic acid molecule as shown in the respective line in column 5 of Table I (whereby the respective line disclose in column 7 the fine chemical myo-inositol), application no. 17, preferably the coding region thereof, or a homolog or a fragment thereof, and being depicted in the same respective line as said B2032, or a functional equivalent or a homolog thereof as shown in column 8 of Table I, application no. 17, preferably the coding region thereof, particularly a homolog or functional equivalent as shown in column 8 of Table I B, application no. 17, and being depicted in the same respective line as said B2032, and preferably the activity is increased non-targeted, or
[90404] (b) a polypeptide comprising a polypeptide, a consensus sequence or at least a polypeptide motif as shown in the respective line in column 5 of Table II or in column 8 of Table IV, application no. 17, respectively, and being depicted in the same respective line as said B2032, or a functional equivalent or a homolog thereof as depicted in column 8 of Table II, application no. 17, preferably a homolog or functional equivalent as depicted in column 8 of Table II B, application no. 17, and being depicted in the same respective line as said B2032, and preferably the activity is increased non-targeted, whereby the respective line disclose in column 7 the fine chemical myo-inositol.

[90405] Accordingly, in one embodiment, the molecule which activity is to be increased in the process of the invention is the gene product with an activity as a “b2032-protein”, preferably it is the molecule of section (a) or (b) of this paragraph.

[90406] In particular, it was observed that in plants, especially in Arabidopsis thaliana, increasing or generating the activity of a gene product non-targeted with the activity of a “b2032-protein”, preferably being encoded by a gene comprising the nucleic acid sequence SEQ ID NO. 8920, preferably the coding region thereof, conferred the production of or the increase in myo-inositol compared with the wild type control.

[90407] The nucleic acid sequence of B2043 from Escherichia coli, e.g. as shown in the respective line in column 5 of Table I, application no. 17, has been published in B. And the activity of the gene product thereof is the activity of colanic acid biosynthesis protein.

[90408] Accordingly, in one embodiment, the process of the present invention for producing glucose-1-phosphate in a non-human organism, like a microorganism or a plant or a part thereof, comprises increasing or generating the activity of a gene product with the activity of a gene product conferring the activity of “colanic acid biosynthesis protein”, especially from Escherichia coli or its functional equivalent or its homolog, e.g. the increase of
[90409] (a) a gene product of a gene comprising the nucleic acid molecule as shown in the respective line in column 5 of Table I (whereby the respective line disclose in column 7 the fine chemical glucose-1-phosphate), application no. 17, preferably the coding region thereof, or a homolog or a fragment thereof, and being depicted in the same respective line as said B2043, or a functional equivalent or a homolog thereof as shown in column 8 of Table I, application no. 17, preferably the coding region thereof, particularly a homolog or functional equivalent as shown in column 8 of Table I B, application no. 17, and being depicted in the same respective line as said B2043, and preferably the activity is increased non-targeted, or
[90410] (b) a polypeptide comprising a polypeptide, a consensus sequence or at least a polypeptide motif as shown in the respective line in column 5 of Table II or in column 8 of Table IV, application no. 17, respectively, and being depicted in the same respective line as said B2043, or a functional equivalent or a homolog thereof as depicted in column 8 of Table II, application no. 17, preferably a homolog or functional equivalent as depicted in column 8 of Table II B, application no. 17, and being depicted in the same respective line as said B2043, and preferably the activity is increased non-targeted, whereby the respective line disclose in column 7 the fine chemical glucose-1-phosphate.

[90411] Accordingly, in one embodiment, the molecule which activity is to be increased in the process of the invention is the gene product with an activity as a “colanic acid biosynthesis protein”, preferably it is the molecule of section (a) or (b) of this paragraph.

[90412] In particular, it was observed that in plants, especially in Arabidopsis thaliana, increasing or generating the activity of a gene product non-targeted with the activity of a “colanic acid biosynthesis protein”, preferably being encoded by a gene comprising the nucleic acid sequence SEQ ID NO. 112193, preferably the coding region thereof, conferred the production of or the increase in glucose-1-phosphate compared with the wild type control.

[90413] The nucleic acid sequence of B2053 from Escherichia coli, e.g. as shown in the respective line in column 5 of Table I, application no. 17, has been published in B. And the activity of the gene product thereof is the activity of GDP-mannose 4,6-dehydratase.

[90414] Accordingly, in one embodiment, the process of the present invention for producing fucose in a non-human organism, like a microorganism or a plant or a part thereof, comprises increasing or generating the activity of a gene product with the activity of a gene product conferring the activity of “GDP-mannose 4,6-dehydratase”, especially from Escherichia coli or its functional equivalent or its homolog, e.g. the increase of
[90415] (a) a gene product of a gene comprising the nucleic acid molecule as shown in the respective line in column 5 of Table I (whereby the respective line disclose in column 7 the fine chemical fucose), application no. 17, preferably the coding region thereof, or a homolog or a fragment thereof, and being depicted in the same respective line as said B2053, or a functional equivalent or a homolog thereof as shown in column 8 of Table I, application no. 17, preferably the coding region thereof, particularly a homolog or functional equivalent as shown in column 8 of Table I B, application no. 17, and being depicted in the same respective line as said B2053, and preferably the activity is increased non-targeted, or
[90416] (b) a polypeptide comprising a polypeptide, a consensus sequence or at least a polypeptide motif as shown in the respective line in column 5 of Table II or in column 8 of Table IV, application no. 17, respectively, and being depicted in the same respective line as said B2053, or a functional equivalent or a homolog thereof as depicted in column 8 of Table II, application no. 17, preferably a homolog or functional equivalent as depicted in column 8 of Table II B, application no. 17, and being depicted in the same respective line as said B2053, and preferably the activity is increased non-targeted, whereby the respective line disclose in column 7 the fine chemical fucose.

[90417] Accordingly, in one embodiment, the molecule which activity is to be increased in the process of the invention is the gene product with an activity as a “GDP-mannose 4,6-dehydratase”, preferably it is the molecule of section (a) or (b) of this paragraph.

[90418] In particular, it was observed that in plants, especially in Arabidopsis thaliana, increasing or generating the activity of a gene product non-targeted with the activity of a “GDP-mannose 4,6-dehydratase”, preferably being encoded by a gene comprising the nucleic acid sequence SEQ ID NO. 104277, preferably the coding region thereof, conferred the production of or the increase in fucose compared with the wild type control.

[90419] The nucleic acid sequence of B2063 from Escherichia coli, e.g. as shown in the respective line in column 5 of Table I, application no. 17, has been published in B. And the activity of the gene product thereof is the activity of transport protein.

[90420] Accordingly, in one embodiment, the process of the present invention for producing fructose in a non-human organism, like a microorganism or a plant or a part thereof, comprises increasing or generating the activity of a gene product with the activity of a gene product conferring the activity of “transport protein”, especially from Escherichia coli or its functional equivalent or its homolog, e.g. the increase of
[90421] (a) a gene product of a gene comprising the nucleic acid molecule as shown in the respective line in column 5 of Table I (whereby the respective line disclose in column 7 the fine chemical fructose), application no. 17, preferably the coding region thereof, or a homolog or a fragment thereof, and being depicted in the same respective line as said B2063, or a functional equivalent or a homolog thereof as shown in column 8 of Table I, application no. 17, preferably the coding region thereof, particularly a homolog or functional equivalent as shown in column 8 of Table I B, application no. 17, and being depicted in the same respective line as said B2063, and preferably the activity is increased non-targeted, or
[90422] (b) a polypeptide comprising a polypeptide, a consensus sequence or at least a polypeptide motif as shown in the respective line in column 5 of Table II or in column 8 of Table IV, application no. 17, respectively, and being depicted in the same respective line as said B2063, or a functional equivalent or a homolog thereof as depicted in column 8 of Table II, application no. 17, preferably a homolog or functional equivalent as depicted in column 8 of Table II B, application no. 17, and being depicted in the same respective line as said B2063, and preferably the activity is increased non-targeted, whereby the respective line disclose in column 7 the fine chemical fructose.

[90423] Accordingly, in one embodiment, the molecule which activity is to be increased in the process of the invention is the gene product with an activity as a “transport protein”, preferably it is the molecule of section (a) or (b) of this paragraph.

[90424] In particular, it was observed that in plants, especially in Arabidopsis thaliana, increasing or generating the activity of a gene product non-targeted with the activity of a “transport protein”, preferably being encoded by a gene comprising the nucleic acid sequence SEQ ID NO. 38947, preferably the coding region thereof, conferred the production of or the increase in fructose compared with the wild type control.

[90425] The nucleic acid sequence of B2063 from Escherichia coli, e.g. as shown in the respective line in column 5 of Table I, application no. 17, has been published in B. And the activity of the gene product thereof is the activity of transport protein.

[90426] Accordingly, in one embodiment, the process of the present invention for producing glucose-1-phosphate in a non-human organism, like a microorganism or a plant or a part thereof, comprises increasing or generating the activity of a gene product with the activity of a gene product conferring the activity of “transport protein”, especially from Escherichia coli or its functional equivalent or its homolog, e.g. the increase of
[90427] (a) a gene product of a gene comprising the nucleic acid molecule as shown in the respective line in column 5 of Table I (whereby the respective line disclose in column 7 the fine chemical glucose-1-phosphate), application no. 17, preferably the coding region thereof, or a homolog or a fragment thereof, and being depicted in the same respective line as said B2063, or a functional equivalent or a homolog thereof as shown in column 8 of Table I, application no. 17, preferably the coding region thereof, particularly a homolog or functional equivalent as shown in column 8 of Table I B, application no. 17, and being depicted in the same respective line as said B2063, and preferably the activity is increased non-targeted, or
[90428] (b) a polypeptide comprising a polypeptide, a consensus sequence or at least a polypeptide motif as shown in the respective line in column 5 of Table II or in column 8 of Table IV, application no. 17, respectively, and being depicted in the same respective line as said B2063, or a functional equivalent or a homolog thereof as depicted in column 8 of Table II, application no. 17, preferably a homolog or functional equivalent as depicted in column 8 of Table II B, application no. 17, and being depicted in the same respective line as said B2063, and preferably the activity is increased non-targeted, whereby the respective line disclose in column 7 the fine chemical glucose-1-phosphate.

[90429] Accordingly, in one embodiment, the molecule which activity is to be increased in the process of the invention is the gene product with an activity as a “transport protein”, preferably it is the molecule of section (a) or (b) of this paragraph.

[90430] In particular, it was observed that in plants, especially in Arabidopsis thaliana, increasing or generating the activity of a gene product non-targeted with the activity of a “transport protein”, preferably being encoded by a gene comprising the nucleic acid sequence SEQ ID NO. 38947, preferably the coding region thereof, conferred the production of or the increase in glucose-1-phosphate compared with the wild type control.

[90431] The nucleic acid sequence of B2063 from Escherichia coli, e.g. as shown in the respective line in column 5 of Table I, application no. 17, has been published in B. And the activity of the gene product thereof is the activity of transport protein.

[90432] Accordingly, in one embodiment, the process of the present invention for producing raffinose in a non-human organism, like a microorganism or a plant or a part thereof, comprises increasing or generating the activity of a gene product with the activity of a gene product conferring the activity of “transport protein”, especially from Escherichia coli or its functional equivalent or its homolog, e.g. the increase of
[90433] (a) a gene product of a gene comprising the nucleic acid molecule as shown in the respective line in column 5 of Table I (whereby the respective line disclose in column 7 the fine chemical raffinose), application no. 17, preferably the coding region thereof, or a homolog or a fragment thereof, and being depicted in the same respective line as said B2063, or a functional equivalent or a homolog thereof as shown in column 8 of Table I, application no. 17, preferably the coding region thereof, particularly a homolog or functional equivalent as shown in column 8 of Table I B, application no. 17, and being depicted in the same respective line as said B2063, and preferably the activity is increased non-targeted, or
[90434] (b) a polypeptide comprising a polypeptide, a consensus sequence or at least a polypeptide motif as shown in the respective line in column 5 of Table II or in column 8 of Table IV, application no. 17, respectively, and being depicted in the same respective line as said B2063, or a functional equivalent or a homolog thereof as depicted in column 8 of Table II, application no. 17, preferably a homolog or functional equivalent as depicted in column 8 of Table II B, application no. 17, and being depicted in the same respective line as said B2063, and preferably the activity is increased non-targeted, whereby the respective line disclose in column 7 the fine chemical raffinose.

[90435] Accordingly, in one embodiment, the molecule which activity is to be increased in the process of the invention is the gene product with an activity as a “transport protein”, preferably it is the molecule of section (a) or (b) of this paragraph.

[90436] In particular, it was observed that in plants, especially in Arabidopsis thaliana, increasing or generating the activity of a gene product non-targeted with the activity of a “transport protein”, preferably being encoded by a gene comprising the nucleic acid sequence SEQ ID NO. 38947, preferably the coding region thereof, conferred the production of or the increase in raffinose compared with the wild type control.

[90437] The nucleic acid sequence of B2063 from Escherichia coli, e.g. as shown in the respective line in column 5 of Table I, application no. 17, has been published in B. And the activity of the gene product thereof is the activity of transport protein.

[90438] Accordingly, in one embodiment, the process of the present invention for producing sucrose in a non-human organism, like a microorganism or a plant or a part thereof, comprises increasing or generating the activity of a gene product with the activity of a gene product conferring the activity of “transport protein”, especially from Escherichia coli or its functional equivalent or its homolog, e.g. the increase of
[90439] (a) a gene product of a gene comprising the nucleic acid molecule as shown in the respective line in column 5 of Table I (whereby the respective line disclose in column 7 the fine chemical sucrose), application no. 17, preferably the coding region thereof, or a homolog or a fragment thereof, and being depicted in the same respective line as said B2063, or a functional equivalent or a homolog thereof as shown in column 8 of Table I, application no. 17, preferably the coding region thereof, particularly a homolog or functional equivalent as shown in column 8 of Table I B, application no. 17, and being depicted in the same respective line as said B2063, and preferably the activity is increased non-targeted, or
[90440] (b) a polypeptide comprising a polypeptide, a consensus sequence or at least a polypeptide motif as shown in the respective line in column 5 of Table II or in column 8 of Table IV, application no. 17, respectively, and being depicted in the same respective line as said B2063, or a functional equivalent or a homolog thereof as depicted in column 8 of Table II, application no. 17, preferably a homolog or functional equivalent as depicted in column 8 of Table II B, application no. 17, and being depicted in the same respective line as said B2063, and preferably the activity is increased non-targeted, whereby the respective line disclose in column 7 the fine chemical sucrose.

[90441] Accordingly, in one embodiment, the molecule which activity is to be increased in the process of the invention is the gene product with an activity as a “transport protein”, preferably it is the molecule of section (a) or (b) of this paragraph.

[90442] In particular, it was observed that in plants, especially in Arabidopsis thaliana, increasing or generating the activity of a gene product non-targeted with the activity of a “transport protein”, preferably being encoded by a gene comprising the nucleic acid sequence SEQ ID NO. 38947, preferably the coding region thereof, conferred the production of or the increase in sucrose compared with the wild type control.

[90443] The nucleic acid sequence of B2063 from Escherichia coli, e.g. as shown in the respective line in column 5 of Table I, application no. 17, has been published in B. And the activity of the gene product thereof is the activity of transport protein.

[90444] Accordingly, in one embodiment, the process of the present invention for producing 3,4,5-trihydroxypentanoic acid in a non-human organism, like a microorganism or a plant or a part thereof, comprises increasing or generating the activity of a gene product with the activity of a gene product conferring the activity of “transport protein”, especially from Escherichia coli or its functional equivalent or its homolog, e.g. the increase of
[90445] (a) a gene product of a gene comprising the nucleic acid molecule as shown in the respective line in column 5 of Table I (whereby the respective line disclose in column 7 the fine chemical 3,4,5-trihydroxypentanoic acid), application no. 17, preferably the coding region thereof, or a homolog or a fragment thereof, and being depicted in the same respective line as said B2063, or a functional equivalent or a homolog thereof as shown in column 8 of Table I, application no. 17, preferably the coding region thereof, particularly a homolog or functional equivalent as shown in column 8 of Table I B, application no. 17, and being depicted in the same respective line as said B2063, and preferably the activity is increased non-targeted, or
[90446] (b) a polypeptide comprising a polypeptide, a consensus sequence or at least a polypeptide motif as shown in the respective line in column 5 of Table II or in column 8 of Table IV, application no. 17, respectively, and being depicted in the same respective line as said B2063, or a functional equivalent or a homolog thereof as depicted in column 8 of Table II, application no. 17, preferably a homolog or functional equivalent as depicted in column 8 of Table II B, application no. 17, and being depicted in the same respective line as said B2063, and preferably the activity is increased non-targeted, whereby the respective line disclose in column 7 the fine chemical 3,4,5-trihydroxypentanoic acid.

[90447] Accordingly, in one embodiment, the molecule which activity is to be increased in the process of the invention is the gene product with an activity as a “transport protein”, preferably it is the molecule of section (a) or (b) of this paragraph.

[90448] In particular, it was observed that in plants, especially in Arabidopsis thaliana, increasing or generating the activity of a gene product non-targeted with the activity of a “transport protein”, preferably being encoded by a gene comprising the nucleic acid sequence SEQ ID NO. 38947, preferably the coding region thereof, conferred the production of or the increase in 3,4,5-trihydroxypentanoic acid compared with the wild type control.

[90449] The nucleic acid sequence of B2107 from Escherichia coli, e.g. as shown in the respective line in column 5 of Table I, application no. 17, has been published in B. And the activity of the gene product thereof is the activity of b2107-protein.

[90450] Accordingly, in one embodiment, the process of the present invention for producing glucose-1-phosphate in a non-human organism, like a microorganism or a plant or a part thereof, comprises increasing or generating the activity of a gene product with the activity of a gene product conferring the activity of “b2107-protein”, especially from Escherichia coli or its functional equivalent or its homolog, e.g. the increase of
[90451] (a) a gene product of a gene comprising the nucleic acid molecule as shown in the respective line in column 5 of Table I (whereby the respective line disclose in column 7 the fine chemical glucose-1-phosphate), application no. 17, preferably the coding region thereof, or a homolog or a fragment thereof, and being depicted in the same respective line as said B2107, or a functional equivalent or a homolog thereof as shown in column 8 of Table I, application no. 17, preferably the coding region thereof, particularly a homolog or functional equivalent as shown in column 8 of Table I B, application no. 17, and being depicted in the same respective line as said B2107, and preferably the activity is increased non-targeted, or
[90452] (b) a polypeptide comprising a polypeptide, a consensus sequence or at least a polypeptide motif as shown in the respective line in column 5 of Table II or in column 8 of Table IV, application no. 17, respectively, and being depicted in the same respective line as said B2107, or a functional equivalent or a homolog thereof as depicted in column 8 of Table II, application no. 17, preferably a homolog or functional equivalent as depicted in column 8 of Table II B, application no. 17, and being depicted in the same respective line as said B2107, and preferably the activity is increased non-targeted, whereby the respective line disclose in column 7 the fine chemical glucose-1-phosphate.

[90453] Accordingly, in one embodiment, the molecule which activity is to be increased in the process of the invention is the gene product with an activity as a “b2107-protein”, preferably it is the molecule of section (a) or (b) of this paragraph.

[90454] In particular, it was observed that in plants, especially in Arabidopsis thaliana, increasing or generating the activity of a gene product non-targeted with the activity of a “b2107-protein”, preferably being encoded by a gene comprising the nucleic acid sequence SEQ ID NO. 39002, preferably the coding region thereof, conferred the production of or the increase in glucose-1-phosphate compared with the wild type control.

[90455] The nucleic acid sequence of B2107 from Escherichia coli, e.g. as shown in the respective line in column 5 of Table I, application no. 17, has been published in B. And the activity of the gene product thereof is the activity of b2107-protein.

[90456] Accordingly, in one embodiment, the process of the present invention for producing 3,4,5-trihydroxypentanoic acid in a non-human organism, like a microorganism or a plant or a part thereof, comprises increasing or generating the activity of a gene product with the activity of a gene product conferring the activity of “b2107-protein”, especially from Escherichia coli or its functional equivalent or its homolog, e.g. the increase of
[90457] (a) a gene product of a gene comprising the nucleic acid molecule as shown in the respective line in column 5 of Table I (whereby the respective line disclose in column 7 the fine chemical 3,4,5-trihydroxypentanoic acid), application no. 17, preferably the coding region thereof, or a homolog or a fragment thereof, and being depicted in the same respective line as said B2107, or a functional equivalent or a homolog thereof as shown in column 8 of Table I, application no. 17, preferably the coding region thereof, particularly a homolog or functional equivalent as shown in column 8 of Table I B, application no. 17, and being depicted in the same respective line as said B2107, and preferably the activity is increased non-targeted, or
[90458] (b) a polypeptide comprising a polypeptide, a consensus sequence or at least a polypeptide motif as shown in the respective line in column 5 of Table II or in column 8 of Table IV, application no. 17, respectively, and being depicted in the same respective line as said B2107, or a functional equivalent or a homolog thereof as depicted in column 8 of Table II, application no. 17, preferably a homolog or functional equivalent as depicted in column 8 of Table II B, application no. 17, and being depicted in the same respective line as said B2107, and preferably the activity is increased non-targeted, whereby the respective line disclose in column 7 the fine chemical 3,4,5-trihydroxypentanoic acid.

[90459] Accordingly, in one embodiment, the molecule which activity is to be increased in the process of the invention is the gene product with an activity as a “b2107-protein”, preferably it is the molecule of section (a) or (b) of this paragraph.

[90460] In particular, it was observed that in plants, especially in Arabidopsis thaliana, increasing or generating the activity of a gene product non-targeted with the activity of a “b2107-protein”, preferably being encoded by a gene comprising the nucleic acid sequence SEQ ID NO. 39002, preferably the coding region thereof, conferred the production of or the increase in 3,4,5-trihydroxypentanoic acid compared with the wild type control.

[90461] The nucleic acid sequence of B2139 from Escherichia coli, e.g. as shown in the respective line in column 5 of Table I, application no. 17, has been published in B. And the activity of the gene product thereof is the activity of b2139-protein.

[90462] Accordingly, in one embodiment, the process of the present invention for producing glucose-1-phosphate in a non-human organism, like a microorganism or a plant or a part thereof, comprises increasing or generating the activity of a gene product with the activity of a gene product conferring the activity of “b2139-protein”, especially from Escherichia coli or its functional equivalent or its homolog, e.g. the increase of
[90463] (a) a gene product of a gene comprising the nucleic acid molecule as shown in the respective line in column 5 of Table I (whereby the respective line disclose in column 7 the fine chemical glucose-1-phosphate), application no. 17, preferably the coding region thereof, or a homolog or a fragment thereof, and being depicted in the same respective line as said B2139, or a functional equivalent or a homolog thereof as shown in column 8 of Table I, application no. 17, preferably the coding region thereof, particularly a homolog or functional equivalent as shown in column 8 of Table I B, application no. 17, and being depicted in the same respective line as said B2139, and preferably the activity is increased plastidic, or
[90464] (b) a polypeptide comprising a polypeptide, a consensus sequence or at least a polypeptide motif as shown in the respective line in column 5 of Table II or in column 8 of Table IV, application no. 17, respectively, and being depicted in the same respective line as said B2139, or a functional equivalent or a homolog thereof as depicted in column 8 of Table II, application no. 17, preferably a homolog or functional equivalent as depicted in column 8 of Table II B, application no. 17, and being depicted in the same respective line as said B2139, and preferably the activity is increased plastidic, whereby the respective line disclose in column 7 the fine chemical glucose-1-phosphate.

[90465] Accordingly, in one embodiment, the molecule which activity is to be increased in the process of the invention is the gene product with an activity as a “b2139-protein”, preferably it is the molecule of section (a) or (b) of this paragraph.

[90466] In particular, it was observed that in plants, especially in Arabidopsis thaliana, increasing or generating the activity of a gene product plastidic with the activity of a “b2139-protein”, preferably being encoded by a gene comprising the nucleic acid sequence SEQ ID NO. 125085, preferably the coding region thereof, conferred the production of or the increase in glucose-1-phosphate compared with the wild type control.

[90467] The nucleic acid sequence of B2242 from Escherichia coli, e.g. as shown in the respective line in column 5 of Table I, application no. 17, has been published in B. And the activity of the gene product thereof is the activity of sn-glycerol-3-phosphate dehydrogenase.

[90468] Accordingly, in one embodiment, the process of the present invention for producing erythrol in a non-human organism, like a microorganism or a plant or a part thereof, comprises increasing or generating the activity of a gene product with the activity of a gene product conferring the activity of “sn-glycerol-3-phosphate dehydrogenase”, especially from Escherichia coli or its functional equivalent or its homolog, e.g. the increase of
[90469] (a) a gene product of a gene comprising the nucleic acid molecule as shown in the respective line in column 5 of Table I (whereby the respective line disclose in column 7 the fine chemical erythrol), application no. 17, preferably the coding region thereof, or a homolog or a fragment thereof, and being depicted in the same respective line as said B2242, or a functional equivalent or a homolog thereof as shown in column 8 of Table I, application no. 17, preferably the coding region thereof, particularly a homolog or functional equivalent as shown in column 8 of Table I B, application no. 17, and being depicted in the same respective line as said B2242, and preferably the activity is increased plastidic, or
[90470] (b) a polypeptide comprising a polypeptide, a consensus sequence or at least a polypeptide motif as shown in the respective line in column 5 of Table II or in column 8 of Table IV, application no. 17, respectively, and being depicted in the same respective line as said B2242, or a functional equivalent or a homolog thereof as depicted in column 8 of Table II, application no. 17, preferably a homolog or functional equivalent as depicted in column 8 of Table II B, application no. 17, and being depicted in the same respective line as said B2242, and preferably the activity is increased plastidic, whereby the respective line disclose in column 7 the fine chemical erythrol.

[90471] Accordingly, in one embodiment, the molecule which activity is to be increased in the process of the invention is the gene product with an activity as a “sn-glycerol-3-phosphate dehydrogenase”, preferably it is the molecule of section (a) or (b) of this paragraph.

[90472] In particular, it was observed that in plants, especially in Arabidopsis thaliana, increasing or generating the activity of a gene product plastidic with the activity of a “sn-glycerol-3-phosphate dehydrogenase”, preferably being encoded by a gene comprising the nucleic acid sequence SEQ ID NO. 79279, preferably the coding region thereof, conferred the production of or the increase in erythrol compared with the wild type control.

[90473] The nucleic acid sequence of B2285 from Escherichia coli, e.g. as shown in the respective line in column 5 of Table I, application no. 17, has been published in B. And the activity of the gene product thereof is the activity of ATP synthase subunit E.

[90474] Accordingly, in one embodiment, the process of the present invention for producing fructose in a non-human organism, like a microorganism or a plant or a part thereof, comprises increasing or generating the activity of a gene product with the activity of a gene product conferring the activity of “ATP synthase subunit E”, especially from Escherichia coli or its functional equivalent or its homolog, e.g. the increase of
[90475] (a) a gene product of a gene comprising the nucleic acid molecule as shown in the respective line in column 5 of Table I (whereby the respective line disclose in column 7 the fine chemical fructose), application no. 17, preferably the coding region thereof, or a homolog or a fragment thereof, and being depicted in the same respective line as said B2285, or a functional equivalent or a homolog thereof as shown in column 8 of Table I, application no. 17, preferably the coding region thereof, particularly a homolog or functional equivalent as shown in column 8 of Table I B, application no. 17, and being depicted in the same respective line as said B2285, and preferably the activity is increased non-targeted, or
[90476] (b) a polypeptide comprising a polypeptide, a consensus sequence or at least a polypeptide motif as shown in the respective line in column 5 of Table II or in column 8 of Table IV, application no. 17, respectively, and being depicted in the same respective line as said B2285, or a functional equivalent or a homolog thereof as depicted in column 8 of Table II, application no. 17, preferably a homolog or functional equivalent as depicted in column 8 of Table II B, application no. 17, and being depicted in the same respective line as said B2285, and preferably the activity is increased non-targeted, whereby the respective line disclose in column 7 the fine chemical fructose.

[90477] Accordingly, in one embodiment, the molecule which activity is to be increased in the process of the invention is the gene product with an activity as a “ATP synthase subunit E”, preferably it is the molecule of section (a) or (b) of this paragraph.

[90478] In particular, it was observed that in plants, especially in Arabidopsis thaliana, increasing or generating the activity of a gene product non-targeted with the activity of a “ATP synthase subunit E”, preferably being encoded by a gene comprising the nucleic acid sequence SEQ ID NO. 99620, preferably the coding region thereof, conferred the production of or the increase in fructose compared with the wild type control.

[90479] The nucleic acid sequence of B2290 from Escherichia coli, e.g. as shown in the respective line in column 5 of Table I, application no. 17, has been published in B. And the activity of the gene product thereof is the activity of aminotransferase.

[90480] Accordingly, in one embodiment, the process of the present invention for producing galactinol in a non-human organism, like a microorganism or a plant or a part thereof, comprises increasing or generating the activity of a gene product with the activity of a gene product conferring the activity of “aminotransferase”, especially from Escherichia coli or its functional equivalent or its homolog, e.g. the increase of
[90481] (a) a gene product of a gene comprising the nucleic acid molecule as shown in the respective line in column 5 of Table I (whereby the respective line disclose in column 7 the fine chemical galactinol), application no. 17, preferably the coding region thereof, or a homolog or a fragment thereof, and being depicted in the same respective line as said B2290, or a functional equivalent or a homolog thereof as shown in column 8 of Table I, application no. 17, preferably the coding region thereof, particularly a homolog or functional equivalent as shown in column 8 of Table I B, application no. 17, and being depicted in the same respective line as said B2290, and preferably the activity is increased non-targeted, or
[90482] (b) a polypeptide comprising a polypeptide, a consensus sequence or at least a polypeptide motif as shown in the respective line in column 5 of Table II or in column 8 of Table IV, application no. 17, respectively, and being depicted in the same respective line as said B2290, or a functional equivalent or a homolog thereof as depicted in column 8 of Table II, application no. 17, preferably a homolog or functional equivalent as depicted in column 8 of Table II B, application no. 17, and being depicted in the same respective line as said B2290, and preferably the activity is increased non-targeted, whereby the respective line disclose in column 7 the fine chemical galactinol.

[90483] Accordingly, in one embodiment, the molecule which activity is to be increased in the process of the invention is the gene product with an activity as a “aminotransferase”, preferably it is the molecule of section (a) or (b) of this paragraph.

[90484] In particular, it was observed that in plants, especially in Arabidopsis thaliana, increasing or generating the activity of a gene product non-targeted with the activity of a “aminotransferase”, preferably being encoded by a gene comprising the nucleic acid sequence SEQ ID NO. 145692, preferably the coding region thereof, conferred the production of or the increase in galactinol compared with the wild type control.

[90485] The nucleic acid sequence of B2345 from Escherichia coli, e.g. as shown in the respective line in column 5 of Table I, application no. 17, has been published in B. And the activity of the gene product thereof is the activity of b2345-protein.

[90486] Accordingly, in one embodiment, the process of the present invention for producing myo-inositol in a non-human organism, like a microorganism or a plant or a part thereof, comprises increasing or generating the activity of a gene product with the activity of a gene product conferring the activity of “b2345-protein”, especially from Escherichia coli or its functional equivalent or its homolog, e.g. the increase of
[90487] (a) a gene product of a gene comprising the nucleic acid molecule as shown in the respective line in column 5 of Table I (whereby the respective line disclose in column 7 the fine chemical myo-inositol), application no. 17, preferably the coding region thereof, or a homolog or a fragment thereof, and being depicted in the same respective line as said B2345, or a functional equivalent or a homolog thereof as shown in column 8 of Table I, application no. 17, preferably the coding region thereof, particularly a homolog or functional equivalent as shown in column 8 of Table I B, application no. 17, and being depicted in the same respective line as said B2345, and preferably the activity is increased non-targeted, or
[90488] (b) a polypeptide comprising a polypeptide, a consensus sequence or at least a polypeptide motif as shown in the respective line in column 5 of Table II or in column 8 of Table IV, application no. 17, respectively, and being depicted in the same respective line as said B2345, or a functional equivalent or a homolog thereof as depicted in column 8 of Table II, application no. 17, preferably a homolog or functional equivalent as depicted in column 8 of Table II B, application no. 17, and being depicted in the same respective line as said B2345, and preferably the activity is increased non-targeted, whereby the respective line disclose in column 7 the fine chemical myo-inositol.

[90489] Accordingly, in one embodiment, the molecule which activity is to be increased in the process of the invention is the gene product with an activity as a “b2345-protein”, preferably it is the molecule of section (a) or (b) of this paragraph.

[90490] In particular, it was observed that in plants, especially in Arabidopsis thaliana, increasing or generating the activity of a gene product non-targeted with the activity of a “b2345-protein”, preferably being encoded by a gene comprising the nucleic acid sequence SEQ ID NO. 9156, preferably the coding region thereof, conferred the production of or the increase in myo-inositol compared with the wild type control.

[90491] The nucleic acid sequence of B2345 from Escherichia coli, e.g. as shown in the respective line in column 5 of Table I, application no. 17, has been published in B. And the activity of the gene product thereof is the activity of b2345-protein.

[90492] Accordingly, in one embodiment, the process of the present invention for producing 3,4,5-trihydroxypentanoic acid in a non-human organism, like a microorganism or a plant or a part thereof, comprises increasing or generating the activity of a gene product with the activity of a gene product conferring the activity of “b2345-protein”, especially from Escherichia coli or its functional equivalent or its homolog, e.g. the increase of
[90493] (a) a gene product of a gene comprising the nucleic acid molecule as shown in the respective line in column 5 of Table I (whereby the respective line disclose in column 7 the fine chemical 3,4,5-trihydroxypentanoic acid), application no. 17, preferably the coding region thereof, or a homolog or a fragment thereof, and being depicted in the same respective line as said B2345, or a functional equivalent or a homolog thereof as shown in column 8 of Table I, application no. 17, preferably the coding region thereof, particularly a homolog or functional equivalent as shown in column 8 of Table I B, application no. 17, and being depicted in the same respective line as said B2345, and preferably the activity is increased non-targeted, or
[90494] (b) a polypeptide comprising a polypeptide, a consensus sequence or at least a polypeptide motif as shown in the respective line in column 5 of Table II or in column 8 of Table IV, application no. 17, respectively, and being depicted in the same respective line as said B2345, or a functional equivalent or a homolog thereof as depicted in column 8 of Table II, application no. 17, preferably a homolog or functional equivalent as depicted in column 8 of Table II B, application no. 17, and being depicted in the same respective line as said B2345, and preferably the activity is increased non-targeted, whereby the respective line disclose in column 7 the fine chemical 3,4,5-trihydroxypentanoic acid.

[90495] Accordingly, in one embodiment, the molecule which activity is to be increased in the process of the invention is the gene product with an activity as a “b2345-protein”, preferably it is the molecule of section (a) or (b) of this paragraph.

[90496] In particular, it was observed that in plants, especially in Arabidopsis thaliana, increasing or generating the activity of a gene product non-targeted with the activity of a “b2345-protein”, preferably being encoded by a gene comprising the nucleic acid sequence SEQ ID NO. 9156, preferably the coding region thereof, conferred the production of or the increase in 3,4,5-trihydroxypentanoic acid compared with the wild type control.

[90497] The nucleic acid sequence of B2360 from Escherichia coli, e.g. as shown in the respective line in column 5 of Table I, application no. 17, has been published in B. And the activity of the gene product thereof is the activity of b2360-protein.

[90498] Accordingly, in one embodiment, the process of the present invention for producing verbascose in a non-human organism, like a microorganism or a plant or a part thereof, comprises increasing or generating the activity of a gene product with the activity of a gene product conferring the activity of “b2360-protein”, especially from Escherichia coli or its functional equivalent or its homolog, e.g. the increase of
[90499] (a) a gene product of a gene comprising the nucleic acid molecule as shown in the respective line in column 5 of Table I (whereby the respective line disclose in column 7 the fine chemical verbascose), application no. 17, preferably the coding region thereof, or a homolog or a fragment thereof, and being depicted in the same respective line as said B2360, or a functional equivalent or a homolog thereof as shown in column 8 of Table I, application no. 17, preferably the coding region thereof, particularly a homolog or functional equivalent as shown in column 8 of Table I B, application no. 17, and being depicted in the same respective line as said B2360, and preferably the activity is increased non-targeted, or
[90500] (b) a polypeptide comprising a polypeptide, a consensus sequence or at least a polypeptide motif as shown in the respective line in column 5 of Table II or in column 8 of Table IV, application no. 17, respectively, and being depicted in the same respective line as said B2360, or a functional equivalent or a homolog thereof as depicted in column 8 of Table II, application no. 17, preferably a homolog or functional equivalent as depicted in column 8 of Table II B, application no. 17, and being depicted in the same respective line as said B2360, and preferably the activity is increased non-targeted, whereby the respective line disclose in column 7 the fine chemical verbascose.

[90501] Accordingly, in one embodiment, the molecule which activity is to be increased in the process of the invention is the gene product with an activity as a “b2360-protein”, preferably it is the molecule of section (a) or (b) of this paragraph.

[90502] In particular, it was observed that in plants, especially in Arabidopsis thaliana, increasing or generating the activity of a gene product non-targeted with the activity of a “b2360-protein”, preferably being encoded by a gene comprising the nucleic acid sequence SEQ ID NO. 39219, preferably the coding region thereof, conferred the production of or the increase in verbascose compared with the wild type control.

[90503] The nucleic acid sequence of B2360 from Escherichia coli, e.g. as shown in the respective line in column 5 of Table I, application no. 17, has been published in B. And the activity of the gene product thereof is the activity of b2360-protein.

[90504] Accordingly, in one embodiment, the process of the present invention for producing 3,4,5-trihydroxypentanoic acid in a non-human organism, like a microorganism or a plant or a part thereof, comprises increasing or generating the activity of a gene product with the activity of a gene product conferring the activity of “b2360-protein”, especially from Escherichia coli or its functional equivalent or its homolog, e.g. the increase of
[90505] (a) a gene product of a gene comprising the nucleic acid molecule as shown in the respective line in column 5 of Table I (whereby the respective line disclose in column 7 the fine chemical 3,4,5-trihydroxypentanoic acid), application no. 17, preferably the coding region thereof, or a homolog or a fragment thereof, and being depicted in the same respective line as said B2360, or a functional equivalent or a homolog thereof as shown in column 8 of Table I, application no. 17, preferably the coding region thereof, particularly a homolog or functional equivalent as shown in column 8 of Table I B, application no. 17, and being depicted in the same respective line as said B2360, and preferably the activity is increased non-targeted, or
[90506] (b) a polypeptide comprising a polypeptide, a consensus sequence or at least a polypeptide motif as shown in the respective line in column 5 of Table II or in column 8 of Table IV, application no. 17, respectively, and being depicted in the same respective line as said B2360, or a functional equivalent or a homolog thereof as depicted in column 8 of Table II, application no. 17, preferably a homolog or functional equivalent as depicted in column 8 of Table II B, application no. 17, and being depicted in the same respective line as said B2360, and preferably the activity is increased non-targeted, whereby the respective line disclose in column 7 the fine chemical 3,4,5-trihydroxypentanoic acid.

[90507] Accordingly, in one embodiment, the molecule which activity is to be increased in the process of the invention is the gene product with an activity as a “b2360-protein”, preferably it is the molecule of section (a) or (b) of this paragraph.

[90508] In particular, it was observed that in plants, especially in Arabidopsis thaliana, increasing or generating the activity of a gene product non-targeted with the activity of a “b2360-protein”, preferably being encoded by a gene comprising the nucleic acid sequence SEQ ID NO. 39219, preferably the coding region thereof, conferred the production of or the increase in 3,4,5-trihydroxypentanoic acid compared with the wild type control.

[90509] The nucleic acid sequence of B2361 from Escherichia coli, e.g. as shown in the respective line in column 5 of Table I, application no. 17, has been published in B. And the activity of the gene product thereof is the activity of b2361-protein.

[90510] Accordingly, in one embodiment, the process of the present invention for producing glucose-1-phosphate in a non-human organism, like a microorganism or a plant or a part thereof, comprises increasing or generating the activity of a gene product with the activity of a gene product conferring the activity of “b2361-protein”, especially from Escherichia coli or its functional equivalent or its homolog, e.g. the increase of
[90511] (a) a gene product of a gene comprising the nucleic acid molecule as shown in the respective line in column 5 of Table I (whereby the respective line disclose in column 7 the fine chemical glucose-1-phosphate), application no. 17, preferably the coding region thereof, or a homolog or a fragment thereof, and being depicted in the same respective line as said B2361, or a functional equivalent or a homolog thereof as shown in column 8 of Table I, application no. 17, preferably the coding region thereof, particularly a homolog or functional equivalent as shown in column 8 of Table I B, application no. 17, and being depicted in the same respective line as said B2361, and preferably the activity is increased non-targeted, or
[90512] (b) a polypeptide comprising a polypeptide, a consensus sequence or at least a polypeptide motif as shown in the respective line in column 5 of Table II or in column 8 of Table IV, application no. 17, respectively, and being depicted in the same respective line as said B2361, or a functional equivalent or a homolog thereof as depicted in column 8 of Table II, application no. 17, preferably a homolog or functional equivalent as depicted in column 8 of Table II B, application no. 17, and being depicted in the same respective line as said B2361, and preferably the activity is increased non-targeted, whereby the respective line disclose in column 7 the fine chemical glucose-1-phosphate.

[90513] Accordingly, in one embodiment, the molecule which activity is to be increased in the process of the invention is the gene product with an activity as a “b2361-protein”, preferably it is the molecule of section (a) or (b) of this paragraph.

[90514] In particular, it was observed that in plants, especially in Arabidopsis thaliana, increasing or generating the activity of a gene product non-targeted with the activity of a “b2361-protein”, preferably being encoded by a gene comprising the nucleic acid sequence SEQ ID NO. 146204, preferably the coding region thereof, conferred the production of or the increase in glucose-1-phosphate compared with the wild type control.

[90515] The nucleic acid sequence of B2361 from Escherichia coli, e.g. as shown in the respective line in column 5 of Table I, application no. 17, has been published in B. And the activity of the gene product thereof is the activity of b2361-protein.

[90516] Accordingly, in one embodiment, the process of the present invention for producing 3,4,5-trihydroxypentanoic acid in a non-human organism, like a microorganism or a plant or a part thereof, comprises increasing or generating the activity of a gene product with the activity of a gene product conferring the activity of “b2361-protein”, especially from Escherichia coli or its functional equivalent or its homolog, e.g. the increase of
[90517] (a) a gene product of a gene comprising the nucleic acid molecule as shown in the respective line in column 5 of Table I (whereby the respective line disclose in column 7 the fine chemical 3,4,5-trihydroxypentanoic acid), application no. 17, preferably the coding region thereof, or a homolog or a fragment thereof, and being depicted in the same respective line as said B2361, or a functional equivalent or a homolog thereof as shown in column 8 of Table I, application no. 17, preferably the coding region thereof, particularly a homolog or functional equivalent as shown in column 8 of Table I B, application no. 17, and being depicted in the same respective line as said B2361, and preferably the activity is increased non-targeted, or
[90518] (b) a polypeptide comprising a polypeptide, a consensus sequence or at least a polypeptide motif as shown in the respective line in column 5 of Table II or in column 8 of Table IV, application no. 17, respectively, and being depicted in the same respective line as said B2361, or a functional equivalent or a homolog thereof as depicted in column 8 of Table II, application no. 17, preferably a homolog or functional equivalent as depicted in column 8 of Table II B, application no. 17, and being depicted in the same respective line as said B2361, and preferably the activity is increased non-targeted, whereby the respective line disclose in column 7 the fine chemical 3,4,5-trihydroxypentanoic acid.

[90519] Accordingly, in one embodiment, the molecule which activity is to be increased in the process of the invention is the gene product with an activity as a “b2361-protein”, preferably it is the molecule of section (a) or (b) of this paragraph.

[90520] In particular, it was observed that in plants, especially in Arabidopsis thaliana, increasing or generating the activity of a gene product non-targeted with the activity of a “b2361-protein”, preferably being encoded by a gene comprising the nucleic acid sequence SEQ ID NO. 146204, preferably the coding region thereof, conferred the production of or the increase in 3,4,5-trihydroxypentanoic acid compared with the wild type control.

[90521] The nucleic acid sequence of B2389 from Escherichia coli, e.g. as shown in the respective line in column 5 of Table I, application no. 17, has been published in B. And the activity of the gene product thereof is the activity of ion-transport protein.

[90522] Accordingly, in one embodiment, the process of the present invention for producing sucrose in a non-human organism, like a microorganism or a plant or a part thereof, comprises increasing or generating the activity of a gene product with the activity of a gene product conferring the activity of “ion-transport protein”, especially from Escherichia coli or its functional equivalent or its homolog, e.g. the increase of
[90523] (a) a gene product of a gene comprising the nucleic acid molecule as shown in the respective line in column 5 of Table I (whereby the respective line disclose in column 7 the fine chemical sucrose), application no. 17, preferably the coding region thereof, or a homolog or a fragment thereof, and being depicted in the same respective line as said B2389, or a functional equivalent or a homolog thereof as shown in column 8 of Table I, application no. 17, preferably the coding region thereof, particularly a homolog or functional equivalent as shown in column 8 of Table I B, application no. 17, and being depicted in the same respective line as said B2389, and preferably the activity is increased non-targeted, or
[90524] (b) a polypeptide comprising a polypeptide, a consensus sequence or at least a polypeptide motif as shown in the respective line in column 5 of Table II or in column 8 of Table IV, application no. 17, respectively, and being depicted in the same respective line as said B2389, or a functional equivalent or a homolog thereof as depicted in column 8 of Table II, application no. 17, preferably a homolog or functional equivalent as depicted in column 8 of Table II B, application no. 17, and being depicted in the same respective line as said B2389, and preferably the activity is increased non-targeted, whereby the respective line disclose in column 7 the fine chemical sucrose.

[90525] Accordingly, in one embodiment, the molecule which activity is to be increased in the process of the invention is the gene product with an activity as a “ion-transport protein”, preferably it is the molecule of section (a) or (b) of this paragraph.

[90526] In particular, it was observed that in plants, especially in Arabidopsis thaliana, increasing or generating the activity of a gene product non-targeted with the activity of a “ion-transport protein”, preferably being encoded by a gene comprising the nucleic acid sequence SEQ ID NO. 146238, preferably the coding region thereof, conferred the production of or the increase in sucrose compared with the wild type control.

[90527] The nucleic acid sequence of B2399 from Escherichia coli, e.g. as shown in the respective line in column 5 of Table I, application no. 17, has been published in B. And the activity of the gene product thereof is the activity of b2399-protein.

[90528] Accordingly, in one embodiment, the process of the present invention for producing fructose in a non-human organism, like a microorganism or a plant or a part thereof, comprises increasing or generating the activity of a gene product with the activity of a gene product conferring the activity of “b2399-protein”, especially from Escherichia coli or its functional equivalent or its homolog, e.g. the increase of
[90529] (a) a gene product of a gene comprising the nucleic acid molecule as shown in the respective line in column 5 of Table I (whereby the respective line disclose in column 7 the fine chemical fructose), application no. 17, preferably the coding region thereof, or a homolog or a fragment thereof, and being depicted in the same respective line as said B2399, or a functional equivalent or a homolog thereof as shown in column 8 of Table I, application no. 17, preferably the coding region thereof, particularly a homolog or functional equivalent as shown in column 8 of Table I B, application no. 17, and being depicted in the same respective line as said B2399, and preferably the activity is increased non-targeted, or
[90530] (b) a polypeptide comprising a polypeptide, a consensus sequence or at least a polypeptide motif as shown in the respective line in column 5 of Table II or in column 8 of Table IV, application no. 17, respectively, and being depicted in the same respective line as said B2399, or a functional equivalent or a homolog thereof as depicted in column 8 of Table II, application no. 17, preferably a homolog or functional equivalent as depicted in column 8 of Table II B, application no. 17, and being depicted in the same respective line as said B2399, and preferably the activity is increased non-targeted, whereby the respective line disclose in column 7 the fine chemical fructose.

[90531] Accordingly, in one embodiment, the molecule which activity is to be increased in the process of the invention is the gene product with an activity as a “b2399-protein”, preferably it is the molecule of section (a) or (b) of this paragraph.

[90532] In particular, it was observed that in plants, especially in Arabidopsis thaliana, increasing or generating the activity of a gene product non-targeted with the activity of a “b2399-protein”, preferably being encoded by a gene comprising the nucleic acid sequence SEQ ID NO. 39237, preferably the coding region thereof, conferred the production of or the increase in fructose compared with the wild type control.

[90533] The nucleic acid sequence of B2399 from Escherichia coli, e.g. as shown in the respective line in column 5 of Table I, application no. 17, has been published in B. And the activity of the gene product thereof is the activity of b2399-protein.

[90534] Accordingly, in one embodiment, the process of the present invention for producing glucose in a non-human organism, like a microorganism or a plant or a part thereof, comprises increasing or generating the activity of a gene product with the activity of a gene product conferring the activity of “b2399-protein”, especially from Escherichia coli or its functional equivalent or its homolog, e.g. the increase of
[90535] (a) a gene product of a gene comprising the nucleic acid molecule as shown in the respective line in column 5 of Table I (whereby the respective line disclose in column 7 the fine chemical glucose), application no. 17, preferably the coding region thereof, or a homolog or a fragment thereof, and being depicted in the same respective line as said B2399, or a functional equivalent or a homolog thereof as shown in column 8 of Table I, application no. 17, preferably the coding region thereof, particularly a homolog or functional equivalent as shown in column 8 of Table I B, application no. 17, and being depicted in the same respective line as said B2399, and preferably the activity is increased non-targeted, or
[90536] (b) a polypeptide comprising a polypeptide, a consensus sequence or at least a polypeptide motif as shown in the respective line in column 5 of Table II or in column 8 of Table IV, application no. 17, respectively, and being depicted in the same respective line as said B2399, or a functional equivalent or a homolog thereof as depicted in column 8 of Table II, application no. 17, preferably a homolog or functional equivalent as depicted in column 8 of Table II B, application no. 17, and being depicted in the same respective line as said B2399, and preferably the activity is increased non-targeted, whereby the respective line disclose in column 7 the fine chemical glucose.

[90537] Accordingly, in one embodiment, the molecule which activity is to be increased in the process of the invention is the gene product with an activity as a “b2399-protein”, preferably it is the molecule of section (a) or (b) of this paragraph.

[90538] In particular, it was observed that in plants, especially in Arabidopsis thaliana, increasing or generating the activity of a gene product non-targeted with the activity of a “b2399-protein”, preferably being encoded by a gene comprising the nucleic acid sequence SEQ ID NO. 39237, preferably the coding region thereof, conferred the production of or the increase in glucose compared with the wild type control.

[90539] The nucleic acid sequence of B2399 from Escherichia coli, e.g. as shown in the respective line in column 5 of Table I, application no. 17, has been published in B. And the activity of the gene product thereof is the activity of b2399-protein.

[90540] Accordingly, in one embodiment, the process of the present invention for producing glucose-1-phosphate in a non-human organism, like a microorganism or a plant or a part thereof, comprises increasing or generating the activity of a gene product with the activity of a gene product conferring the activity of “b2399-protein”, especially from Escherichia coli or its functional equivalent or its homolog, e.g. the increase of
[90541] (a) a gene product of a gene comprising the nucleic acid molecule as shown in the respective line in column 5 of Table I (whereby the respective line disclose in column 7 the fine chemical glucose-1-phosphate), application no. 17, preferably the coding region thereof, or a homolog or a fragment thereof, and being depicted in the same respective line as said B2399, or a functional equivalent or a homolog thereof as shown in column 8 of Table I, application no. 17, preferably the coding region thereof, particularly a homolog or functional equivalent as shown in column 8 of Table I B, application no. 17, and being depicted in the same respective line as said B2399, and preferably the activity is increased non-targeted, or
[90542] (b) a polypeptide comprising a polypeptide, a consensus sequence or at least a polypeptide motif as shown in the respective line in column 5 of Table II or in column 8 of Table IV, application no. 17, respectively, and being depicted in the same respective line as said B2399, or a functional equivalent or a homolog thereof as depicted in column 8 of Table II, application no. 17, preferably a homolog or functional equivalent as depicted in column 8 of Table II B, application no. 17, and being depicted in the same respective line as said B2399, and preferably the activity is increased non-targeted, whereby the respective line disclose in column 7 the fine chemical glucose-1-phosphate.

[90543] Accordingly, in one embodiment, the molecule which activity is to be increased in the process of the invention is the gene product with an activity as a “b2399-protein”, preferably it is the molecule of section (a) or (b) of this paragraph.

[90544] In particular, it was observed that in plants, especially in Arabidopsis thaliana, increasing or generating the activity of a gene product non-targeted with the activity of a “b2399-protein”, preferably being encoded by a gene comprising the nucleic acid sequence SEQ ID NO. 39237, preferably the coding region thereof, conferred the production of or the increase in glucose-1-phosphate compared with the wild type control.

[90545] The nucleic acid sequence of B2399 from Escherichia coli, e.g. as shown in the respective line in column 5 of Table I, application no. 17, has been published in B. And the activity of the gene product thereof is the activity of b2399-protein.

[90546] Accordingly, in one embodiment, the process of the present invention for producing myo-inositol in a non-human organism, like a microorganism or a plant or a part thereof, comprises increasing or generating the activity of a gene product with the activity of a gene product conferring the activity of “b2399-protein”, especially from Escherichia coli or its functional equivalent or its homolog, e.g. the increase of
[90547] (a) a gene product of a gene comprising the nucleic acid molecule as shown in the respective line in column 5 of Table I (whereby the respective line disclose in column 7 the fine chemical myo-inositol), application no. 17, preferably the coding region thereof, or a homolog or a fragment thereof, and being depicted in the same respective line as said B2399, or a functional equivalent or a homolog thereof as shown in column 8 of Table I, application no. 17, preferably the coding region thereof, particularly a homolog or functional equivalent as shown in column 8 of Table I B, application no. 17, and being depicted in the same respective line as said B2399, and preferably the activity is increased non-targeted, or
[90548] (b) a polypeptide comprising a polypeptide, a consensus sequence or at least a polypeptide motif as shown in the respective line in column 5 of Table II or in column 8 of Table IV, application no. 17, respectively, and being depicted in the same respective line as said B2399, or a functional equivalent or a homolog thereof as depicted in column 8 of Table II, application no. 17, preferably a homolog or functional equivalent as depicted in column 8 of Table II B, application no. 17, and being depicted in the same respective line as said B2399, and preferably the activity is increased non-targeted, whereby the respective line disclose in column 7 the fine chemical myo-inositol.

[90549] Accordingly, in one embodiment, the molecule which activity is to be increased in the process of the invention is the gene product with an activity as a “b2399-protein”, preferably it is the molecule of section (a) or (b) of this paragraph.

[90550] In particular, it was observed that in plants, especially in Arabidopsis thaliana, increasing or generating the activity of a gene product non-targeted with the activity of a “b2399-protein”, preferably being encoded by a gene comprising the nucleic acid sequence SEQ ID NO. 39237, preferably the coding region thereof, conferred the production of or the increase in myo-inositol compared with the wild type control.

[90551] The nucleic acid sequence of B2399 from Escherichia coli, e.g. as shown in the respective line in column 5 of Table I, application no. 17, has been published in B. And the activity of the gene product thereof is the activity of b2399-protein.

[90552] Accordingly, in one embodiment, the process of the present invention for producing raffinose in a non-human organism, like a microorganism or a plant or a part thereof, comprises increasing or generating the activity of a gene product with the activity of a gene product conferring the activity of “b2399-protein”, especially from Escherichia coli or its functional equivalent or its homolog, e.g. the increase of
[90553] (a) a gene product of a gene comprising the nucleic acid molecule as shown in the respective line in column 5 of Table I (whereby the respective line disclose in column 7 the fine chemical raffinose), application no. 17, preferably the coding region thereof, or a homolog or a fragment thereof, and being depicted in the same respective line as said B2399, or a functional equivalent or a homolog thereof as shown in column 8 of Table I, application no. 17, preferably the coding region thereof, particularly a homolog or functional equivalent as shown in column 8 of Table I B, application no. 17, and being depicted in the same respective line as said B2399, and preferably the activity is increased non-targeted, or
[90554] (b) a polypeptide comprising a polypeptide, a consensus sequence or at least a polypeptide motif as shown in the respective line in column 5 of Table II or in column 8 of Table IV, application no. 17, respectively, and being depicted in the same respective line as said B2399, or a functional equivalent or a homolog thereof as depicted in column 8 of Table II, application no. 17, preferably a homolog or functional equivalent as depicted in column 8 of Table II B, application no. 17, and being depicted in the same respective line as said B2399, and preferably the activity is increased non-targeted, whereby the respective line disclose in column 7 the fine chemical raffinose.

[90555] Accordingly, in one embodiment, the molecule which activity is to be increased in the process of the invention is the gene product with an activity as a “b2399-protein”, preferably it is the molecule of section (a) or (b) of this paragraph.

[90556] In particular, it was observed that in plants, especially in Arabidopsis thaliana, increasing or generating the activity of a gene product non-targeted with the activity of a “b2399-protein”, preferably being encoded by a gene comprising the nucleic acid sequence SEQ ID NO. 39237, preferably the coding region thereof, conferred the production of or the increase in raffinose compared with the wild type control.

[90557] The nucleic acid sequence of B2399 from Escherichia coli, e.g. as shown in the respective line in column 5 of Table I, application no. 17, has been published in B. And the activity of the gene product thereof is the activity of b2399-protein.

[90558] Accordingly, in one embodiment, the process of the present invention for producing sedoheptulose-7-phosphate in a non-human organism, like a microorganism or a plant or a part thereof, comprises increasing or generating the activity of a gene product with the activity of a gene product conferring the activity of “b2399-protein”, especially from Escherichia coli or its functional equivalent or its homolog, e.g. the increase of
[90559] (a) a gene product of a gene comprising the nucleic acid molecule as shown in the respective line in column 5 of Table I (whereby the respective line disclose in column 7 the fine chemical sedoheptulose-7-phosphate), application no. 17, preferably the coding region thereof, or a homolog or a fragment thereof, and being depicted in the same respective line as said B2399, or a functional equivalent or a homolog thereof as shown in column 8 of Table I, application no. 17, preferably the coding region thereof, particularly a homolog or functional equivalent as shown in column 8 of Table I B, application no. 17, and being depicted in the same respective line as said B2399, and preferably the activity is increased non-targeted, or
[90560] (b) a polypeptide comprising a polypeptide, a consensus sequence or at least a polypeptide motif as shown in the respective line in column 5 of Table II or in column 8 of Table IV, application no. 17, respectively, and being depicted in the same respective line as said B2399, or a functional equivalent or a homolog thereof as depicted in column 8 of Table II, application no. 17, preferably a homolog or functional equivalent as depicted in column 8 of Table II B, application no. 17, and being depicted in the same respective line as said B2399, and preferably the activity is increased non-targeted, whereby the respective line disclose in column 7 the fine chemical sedoheptulose-7-phosphate.

[90561] Accordingly, in one embodiment, the molecule which activity is to be increased in the process of the invention is the gene product with an activity as a “b2399-protein”, preferably it is the molecule of section (a) or (b) of this paragraph.

[90562] In particular, it was observed that in plants, especially in Arabidopsis thaliana, increasing or generating the activity of a gene product non-targeted with the activity of a “b2399-protein”, preferably being encoded by a gene comprising the nucleic acid sequence SEQ ID NO. 39237, preferably the coding region thereof, conferred the production of or the increase in sedoheptulose-7-phosphate compared with the wild type control.

[90563] The nucleic acid sequence of B2399 from Escherichia coli, e.g. as shown in the respective line in column 5 of Table I, application no. 17, has been published in B. And the activity of the gene product thereof is the activity of b2399-protein.

[90564] Accordingly, in one embodiment, the process of the present invention for producing sucrose in a non-human organism, like a microorganism or a plant or a part thereof, comprises increasing or generating the activity of a gene product with the activity of a gene product conferring the activity of “b2399-protein”, especially from Escherichia coli or its functional equivalent or its homolog, e.g. the increase of
[90565] (a) a gene product of a gene comprising the nucleic acid molecule as shown in the respective line in column 5 of Table I (whereby the respective line disclose in column 7 the fine chemical sucrose), application no. 17, preferably the coding region thereof, or a homolog or a fragment thereof, and being depicted in the same respective line as said B2399, or a functional equivalent or a homolog thereof as shown in column 8 of Table I, application no. 17, preferably the coding region thereof, particularly a homolog or functional equivalent as shown in column 8 of Table I B, application no. 17, and being depicted in the same respective line as said B2399, and preferably the activity is increased non-targeted, or
[90566] (b) a polypeptide comprising a polypeptide, a consensus sequence or at least a polypeptide motif as shown in the respective line in column 5 of Table II or in column 8 of Table IV, application no. 17, respectively, and being depicted in the same respective line as said B2399, or a functional equivalent or a homolog thereof as depicted in column 8 of Table II, application no. 17, preferably a homolog or functional equivalent as depicted in column 8 of Table II B, application no. 17, and being depicted in the same respective line as said B2399, and preferably the activity is increased non-targeted, whereby the respective line disclose in column 7 the fine chemical sucrose.

[90567] Accordingly, in one embodiment, the molecule which activity is to be increased in the process of the invention is the gene product with an activity as a “b2399-protein”, preferably it is the molecule of section (a) or (b) of this paragraph.

[90568] In particular, it was observed that in plants, especially in Arabidopsis thaliana, increasing or generating the activity of a gene product non-targeted with the activity of a “b2399-protein”, preferably being encoded by a gene comprising the nucleic acid sequence SEQ ID NO. 39237, preferably the coding region thereof, conferred the production of or the increase in sucrose compared with the wild type control.

[90569] The nucleic acid sequence of B2405 from Escherichia coli, e.g. as shown in the respective line in column 5 of Table I, application no. 17, has been published in B. And the activity of the gene product thereof is the activity of transcriptional regulator.

[90570] Accordingly, in one embodiment, the process of the present invention for producing fructose in a non-human organism, like a microorganism or a plant or a part thereof, comprises increasing or generating the activity of a gene product with the activity of a gene product conferring the activity of “transcriptional regulator”, especially from Escherichia coli or its functional equivalent or its homolog, e.g. the increase of
[90571] (a) a gene product of a gene comprising the nucleic acid molecule as shown in the respective line in column 5 of Table I (whereby the respective line disclose in column 7 the fine chemical fructose), application no. 17, preferably the coding region thereof, or a homolog or a fragment thereof, and being depicted in the same respective line as said B2405, or a functional equivalent or a homolog thereof as shown in column 8 of Table I, application no. 17, preferably the coding region thereof, particularly a homolog or functional equivalent as shown in column 8 of Table I B, application no. 17, and being depicted in the same respective line as said B2405, and preferably the activity is increased non-targeted, or
[90572] (b) a polypeptide comprising a polypeptide, a consensus sequence or at least a polypeptide motif as shown in the respective line in column 5 of Table II or in column 8 of Table IV, application no. 17, respectively, and being depicted in the same respective line as said B2405, or a functional equivalent or a homolog thereof as depicted in column 8 of Table II, application no. 17, preferably a homolog or functional equivalent as depicted in column 8 of Table II B, application no. 17, and being depicted in the same respective line as said B2405, and preferably the activity is increased non-targeted, whereby the respective line disclose in column 7 the fine chemical fructose.

[90573] Accordingly, in one embodiment, the molecule which activity is to be increased in the process of the invention is the gene product with an activity as a “transcriptional regulator”, preferably it is the molecule of section (a) or (b) of this paragraph.

[90574] In particular, it was observed that in plants, especially in Arabidopsis thaliana, increasing or generating the activity of a gene product non-targeted with the activity of a “transcriptional regulator”, preferably being encoded by a gene comprising the nucleic acid sequence SEQ ID NO. 39255, preferably the coding region thereof, conferred the production of or the increase in fructose compared with the wild type control.

[90575] The nucleic acid sequence of B2405 from Escherichia coli, e.g. as shown in the respective line in column 5 of Table I, application no. 17, has been published in B. And the activity of the gene product thereof is the activity of transcriptional regulator.

[90576] Accordingly, in one embodiment, the process of the present invention for producing raffinose in a non-human organism, like a microorganism or a plant or a part thereof, comprises increasing or generating the activity of a gene product with the activity of a gene product conferring the activity of “transcriptional regulator”, especially from Escherichia coli or its functional equivalent or its homolog, e.g. the increase of
[90577] (a) a gene product of a gene comprising the nucleic acid molecule as shown in the respective line in column 5 of Table I (whereby the respective line disclose in column 7 the fine chemical raffinose), application no. 17, preferably the coding region thereof, or a homolog or a fragment thereof, and being depicted in the same respective line as said B2405, or a functional equivalent or a homolog thereof as shown in column 8 of Table I, application no. 17, preferably the coding region thereof, particularly a homolog or functional equivalent as shown in column 8 of Table I B, application no. 17, and being depicted in the same respective line as said B2405, and preferably the activity is increased non-targeted, or
[90578] (b) a polypeptide comprising a polypeptide, a consensus sequence or at least a polypeptide motif as shown in the respective line in column 5 of Table II or in column 8 of Table IV, application no. 17, respectively, and being depicted in the same respective line as said B2405, or a functional equivalent or a homolog thereof as depicted in column 8 of Table II, application no. 17, preferably a homolog or functional equivalent as depicted in column 8 of Table II B, application no. 17, and being depicted in the same respective line as said B2405, and preferably the activity is increased non-targeted, whereby the respective line disclose in column 7 the fine chemical raffinose.

[90579] Accordingly, in one embodiment, the molecule which activity is to be increased in the process of the invention is the gene product with an activity as a “transcriptional regulator”, preferably it is the molecule of section (a) or (b) of this paragraph.

[90580] In particular, it was observed that in plants, especially in Arabidopsis thaliana, increasing or generating the activity of a gene product non-targeted with the activity of a “transcriptional regulator”, preferably being encoded by a gene comprising the nucleic acid sequence SEQ ID NO. 39255, preferably the coding region thereof, conferred the production of or the increase in raffinose compared with the wild type control.

[90581] The nucleic acid sequence of B2414 from Escherichia coli, e.g. as shown in the respective line in column 5 of Table I, application no. 17, has been published in B. And the activity of the gene product thereof is the activity of cysteine synthase A.

[90582] Accordingly, in one embodiment, the process of the present invention for producing myo-inositol in a non-human organism, like a microorganism or a plant or a part thereof, comprises increasing or generating the activity of a gene product with the activity of a gene product conferring the activity of “cysteine synthase A”, especially from Escherichia coli or its functional equivalent or its homolog, e.g. the increase of
[90583] (a) a gene product of a gene comprising the nucleic acid molecule as shown in the respective line in column 5 of Table I (whereby the respective line disclose in column 7 the fine chemical myo-inositol), application no. 17, preferably the coding region thereof, or a homolog or a fragment thereof, and being depicted in the same respective line as said B2414, or a functional equivalent or a homolog thereof as shown in column 8 of Table I, application no. 17, preferably the coding region thereof, particularly a homolog or functional equivalent as shown in column 8 of Table I B, application no. 17, and being depicted in the same respective line as said B2414, and preferably the activity is increased non-targeted, or
[90584] (b) a polypeptide comprising a polypeptide, a consensus sequence or at least a polypeptide motif as shown in the respective line in column 5 of Table II or in column 8 of Table IV, application no. 17, respectively, and being depicted in the same respective line as said B2414, or a functional equivalent or a homolog thereof as depicted in column 8 of Table II, application no. 17, preferably a homolog or functional equivalent as depicted in column 8 of Table II B, application no. 17, and being depicted in the same respective line as said B2414, and preferably the activity is increased non-targeted, whereby the respective line disclose in column 7 the fine chemical myo-inositol.

[90585] Accordingly, in one embodiment, the molecule which activity is to be increased in the process of the invention is the gene product with an activity as a “cysteine synthase A”, preferably it is the molecule of section (a) or (b) of this paragraph.

[90586] In particular, it was observed that in plants, especially in Arabidopsis thaliana, increasing or generating the activity of a gene product non-targeted with the activity of a “cysteine synthase A”, preferably being encoded by a gene comprising the nucleic acid sequence SEQ ID NO. 39300, preferably the coding region thereof, conferred the production of or the increase in myo-inositol compared with the wild type control.

[90587] The nucleic acid sequence of B2414 from Escherichia coli, e.g. as shown in the respective line in column 5 of Table I, application no. 17, has been published in B. And the activity of the gene product thereof is the activity of cysteine synthase A.

[90588] Accordingly, in one embodiment, the process of the present invention for producing verbascose in a non-human organism, like a microorganism or a plant or a part thereof, comprises increasing or generating the activity of a gene product with the activity of a gene product conferring the activity of “cysteine synthase A”, especially from Escherichia coli or its functional equivalent or its homolog, e.g. the increase of
[90589] (a) a gene product of a gene comprising the nucleic acid molecule as shown in the respective line in column 5 of Table I (whereby the respective line disclose in column 7 the fine chemical verbascose), application no. 17, preferably the coding region thereof, or a homolog or a fragment thereof, and being depicted in the same respective line as said B2414, or a functional equivalent or a homolog thereof as shown in column 8 of Table I, application no. 17, preferably the coding region thereof, particularly a homolog or functional equivalent as shown in column 8 of Table I B, application no. 17, and being depicted in the same respective line as said B2414, and preferably the activity is increased non-targeted, or
[90590] (b) a polypeptide comprising a polypeptide, a consensus sequence or at least a polypeptide motif as shown in the respective line in column 5 of Table II or in column 8 of Table IV, application no. 17, respectively, and being depicted in the same respective line as said B2414, or a functional equivalent or a homolog thereof as depicted in column 8 of Table II, application no. 17, preferably a homolog or functional equivalent as depicted in column 8 of Table II B, application no. 17, and being depicted in the same respective line as said B2414, and preferably the activity is increased non-targeted, whereby the respective line disclose in column 7 the fine chemical verbascose.

[90591] Accordingly, in one embodiment, the molecule which activity is to be increased in the process of the invention is the gene product with an activity as a “cysteine synthase A”, preferably it is the molecule of section (a) or (b) of this paragraph.

[90592] In particular, it was observed that in plants, especially in Arabidopsis thaliana, increasing or generating the activity of a gene product non-targeted with the activity of a “cysteine synthase A”, preferably being encoded by a gene comprising the nucleic acid sequence SEQ ID NO. 39300, preferably the coding region thereof, conferred the production of or the increase in verbascose compared with the wild type control.

[90593] The nucleic acid sequence of B2466 from Escherichia coli, e.g. as shown in the respective line in column 5 of Table I, application no. 17, has been published in B. And the activity of the gene product thereof is the activity of b2466-protein.

[90594] Accordingly, in one embodiment, the process of the present invention for producing glucose-1-phosphate in a non-human organism, like a microorganism or a plant or a part thereof, comprises increasing or generating the activity of a gene product with the activity of a gene product conferring the activity of “b2466-protein”, especially from Escherichia coli or its functional equivalent or its homolog, e.g. the increase of
[90595] (a) a gene product of a gene comprising the nucleic acid molecule as shown in the respective line in column 5 of Table I (whereby the respective line disclose in column 7 the fine chemical glucose-1-phosphate), application no. 17, preferably the coding region thereof, or a homolog or a fragment thereof, and being depicted in the same respective line as said B2466, or a functional equivalent or a homolog thereof as shown in column 8 of Table I, application no. 17, preferably the coding region thereof, particularly a homolog or functional equivalent as shown in column 8 of Table I B, application no. 17, and being depicted in the same respective line as said B2466, and preferably the activity is increased non-targeted, or
[90596] (b) a polypeptide comprising a polypeptide, a consensus sequence or at least a polypeptide motif as shown in the respective line in column 5 of Table II or in column 8 of Table IV, application no. 17, respectively, and being depicted in the same respective line as said B2466, or a functional equivalent or a homolog thereof as depicted in column 8 of Table II, application no. 17, preferably a homolog or functional equivalent as depicted in column 8 of Table II B, application no. 17, and being depicted in the same respective line as said B2466, and preferably the activity is increased non-targeted, whereby the respective line disclose in column 7 the fine chemical glucose-1-phosphate.

[90597] Accordingly, in one embodiment, the molecule which activity is to be increased in the process of the invention is the gene product with an activity as a “b2466-protein”, preferably it is the molecule of section (a) or (b) of this paragraph.

[90598] In particular, it was observed that in plants, especially in Arabidopsis thaliana, increasing or generating the activity of a gene product non-targeted with the activity of a “b2466-protein”, preferably being encoded by a gene comprising the nucleic acid sequence SEQ ID NO. 146261, preferably the coding region thereof, conferred the production of or the increase in glucose-1-phosphate compared with the wild type control.

[90599] The nucleic acid sequence of B2466 from Escherichia coli, e.g. as shown in the respective line in column 5 of Table I, application no. 17, has been published in B. And the activity of the gene product thereof is the activity of b2466-protein.

[90600] Accordingly, in one embodiment, the process of the present invention for producing myo-inositol in a non-human organism, like a microorganism or a plant or a part thereof, comprises increasing or generating the activity of a gene product with the activity of a gene product conferring the activity of “b2466-protein”, especially from Escherichia coli or its functional equivalent or its homolog, e.g. the increase of
[90601] (a) a gene product of a gene comprising the nucleic acid molecule as shown in the respective line in column 5 of Table I (whereby the respective line disclose in column 7 the fine chemical myo-inositol), application no. 17, preferably the coding region thereof, or a homolog or a fragment thereof, and being depicted in the same respective line as said B2466, or a functional equivalent or a homolog thereof as shown in column 8 of Table I, application no. 17, preferably the coding region thereof, particularly a homolog or functional equivalent as shown in column 8 of Table I B, application no. 17, and being depicted in the same respective line as said B2466, and preferably the activity is increased non-targeted, or
[90602] (b) a polypeptide comprising a polypeptide, a consensus sequence or at least a polypeptide motif as shown in the respective line in column 5 of Table II or in column 8 of Table IV, application no. 17, respectively, and being depicted in the same respective line as said B2466, or a functional equivalent or a homolog thereof as depicted in column 8 of Table II, application no. 17, preferably a homolog or functional equivalent as depicted in column 8 of Table II B, application no. 17, and being depicted in the same respective line as said B2466, and preferably the activity is increased non-targeted, whereby the respective line disclose in column 7 the fine chemical myo-inositol.

[90603] Accordingly, in one embodiment, the molecule which activity is to be increased in the process of the invention is the gene product with an activity as a “b2466-protein”, preferably it is the molecule of section (a) or (b) of this paragraph.

[90604] In particular, it was observed that in plants, especially in Arabidopsis thaliana, increasing or generating the activity of a gene product non-targeted with the activity of a “b2466-protein”, preferably being encoded by a gene comprising the nucleic acid sequence SEQ ID NO. 146261, preferably the coding region thereof, conferred the production of or the increase in myo-inositol compared with the wild type control.

[90605] The nucleic acid sequence of B2466 from Escherichia coli, e.g. as shown in the respective line in column 5 of Table I, application no. 17, has been published in B. And the activity of the gene product thereof is the activity of b2466-protein.

[90606] Accordingly, in one embodiment, the process of the present invention for producing 3,4,5-trihydroxypentanoic acid in a non-human organism, like a microorganism or a plant or a part thereof, comprises increasing or generating the activity of a gene product with the activity of a gene product conferring the activity of “b2466-protein”, especially from Escherichia coli or its functional equivalent or its homolog, e.g. the increase of
[90607] (a) a gene product of a gene comprising the nucleic acid molecule as shown in the respective line in column 5 of Table I (whereby the respective line disclose in column 7 the fine chemical 3,4,5-trihydroxypentanoic acid), application no. 17, preferably the coding region thereof, or a homolog or a fragment thereof, and being depicted in the same respective line as said B2466, or a functional equivalent or a homolog thereof as shown in column 8 of Table I, application no. 17, preferably the coding region thereof, particularly a homolog or functional equivalent as shown in column 8 of Table I B, application no. 17, and being depicted in the same respective line as said B2466, and preferably the activity is increased non-targeted, or
[90608] (b) a polypeptide comprising a polypeptide, a consensus sequence or at least a polypeptide motif as shown in the respective line in column 5 of Table II or in column 8 of Table IV, application no. 17, respectively, and being depicted in the same respective line as said B2466, or a functional equivalent or a homolog thereof as depicted in column 8 of Table II, application no. 17, preferably a homolog or functional equivalent as depicted in column 8 of Table II B, application no. 17, and being depicted in the same respective line as said B2466, and preferably the activity is increased non-targeted, whereby the respective line disclose in column 7 the fine chemical 3,4,5-trihydroxypentanoic acid.

[90609] Accordingly, in one embodiment, the molecule which activity is to be increased in the process of the invention is the gene product with an activity as a “b2466-protein”, preferably it is the molecule of section (a) or (b) of this paragraph.

[90610] In particular, it was observed that in plants, especially in Arabidopsis thaliana, increasing or generating the activity of a gene product non-targeted with the activity of a “b2466-protein”, preferably being encoded by a gene comprising the nucleic acid sequence SEQ ID NO. 146261, preferably the coding region thereof, conferred the production of or the increase in 3,4,5-trihydroxypentanoic acid compared with the wild type control.

[90611] The nucleic acid sequence of B2474 from Escherichia coli, e.g. as shown in the respective line in column 5 of Table I, application no. 17, has been published in B. And the activity of the gene product thereof is the activity of b2474-protein.

[90612] Accordingly, in one embodiment, the process of the present invention for producing glucose-1-phosphate in a non-human organism, like a microorganism or a plant or a part thereof, comprises increasing or generating the activity of a gene product with the activity of a gene product conferring the activity of “b2474-protein”, especially from Escherichia coli or its functional equivalent or its homolog, e.g. the increase of
[90613] (a) a gene product of a gene comprising the nucleic acid molecule as shown in the respective line in column 5 of Table I (whereby the respective line disclose in column 7 the fine chemical glucose-1-phosphate), application no. 17, preferably the coding region thereof, or a homolog or a fragment thereof, and being depicted in the same respective line as said B2474, or a functional equivalent or a homolog thereof as shown in column 8 of Table I, application no. 17, preferably the coding region thereof, particularly a homolog or functional equivalent as shown in column 8 of Table I B, application no. 17, and being depicted in the same respective line as said B2474, and preferably the activity is increased non-targeted, or
[90614] (b) a polypeptide comprising a polypeptide, a consensus sequence or at least a polypeptide motif as shown in the respective line in column 5 of Table II or in column 8 of Table IV, application no. 17, respectively, and being depicted in the same respective line as said B2474, or a functional equivalent or a homolog thereof as depicted in column 8 of Table II, application no. 17, preferably a homolog or functional equivalent as depicted in column 8 of Table II B, application no. 17, and being depicted in the same respective line as said B2474, and preferably the activity is increased non-targeted, whereby the respective line disclose in column 7 the fine chemical glucose-1-phosphate.

[90615] Accordingly, in one embodiment, the molecule which activity is to be increased in the process of the invention is the gene product with an activity as a “b2474-protein”, preferably it is the molecule of section (a) or (b) of this paragraph.

[90616] In particular, it was observed that in plants, especially in Arabidopsis thaliana, increasing or generating the activity of a gene product non-targeted with the activity of a “b2474-protein”, preferably being encoded by a gene comprising the nucleic acid sequence SEQ ID NO. 40329, preferably the coding region thereof, conferred the production of or the increase in glucose-1-phosphate compared with the wild type control.

[90617] The nucleic acid sequence of B2541 from Escherichia coli, e.g. as shown in the respective line in column 5 of Table I, application no. 17, has been published in B. And the activity of the gene product thereof is the activity of 2,3-dihydroxy-2,3-dihydrophenylpropionatedehydrogenase.

[90618] Accordingly, in one embodiment, the process of the present invention for producing raffinose in a non-human organism, like a microorganism or a plant or a part thereof, comprises increasing or generating the activity of a gene product with the activity of a gene product conferring the activity of “2,3-dihydroxy-2,3-dihydrophenylpropionatedehydrogenase”, especially from Escherichia coli or its functional equivalent or its homolog, e.g. the increase of
[90619] (a) a gene product of a gene comprising the nucleic acid molecule as shown in the respective line in column 5 of Table I (whereby the respective line disclose in column 7 the fine chemical raffinose), application no. 17, preferably the coding region thereof, or a homolog or a fragment thereof, and being depicted in the same respective line as said B2541, or a functional equivalent or a homolog thereof as shown in column 8 of Table I, application no. 17, preferably the coding region thereof, particularly a homolog or functional equivalent as shown in column 8 of Table I B, application no. 17, and being depicted in the same respective line as said B2541, and preferably the activity is increased non-targeted, or
[90620] (b) a polypeptide comprising a polypeptide, a consensus sequence or at least a polypeptide motif as shown in the respective line in column 5 of Table II or in column 8 of Table IV, application no. 17, respectively, and being depicted in the same respective line as said B2541, or a functional equivalent or a homolog thereof as depicted in column 8 of Table II, application no. 17, preferably a homolog or functional equivalent as depicted in column 8 of Table II B, application no. 17, and being depicted in the same respective line as said B2541, and preferably the activity is increased non-targeted, whereby the respective line disclose in column 7 the fine chemical raffinose.

[90621] Accordingly, in one embodiment, the molecule which activity is to be increased in the process of the invention is the gene product with an activity as a “2,3-dihydroxy-2,3-dihydrophenylpropionatedehydrogenase”, preferably it is the molecule of section (a) or (b) of this paragraph.

[90622] In particular, it was observed that in plants, especially in Arabidopsis thaliana, increasing or generating the activity of a gene product non-targeted with the activity of a “2,3-dihydroxy-2,3-dihydrophenylpropionatedehydrogenase”, preferably being encoded by a gene comprising the nucleic acid sequence SEQ ID NO. 40383, preferably the coding region thereof, conferred the production of or the increase in raffinose compared with the wild type control.

[90623] The nucleic acid sequence of B2546 from Escherichia coli, e.g. as shown in the respective line in column 5 of Table I, application no. 17, has been published in B. And the activity of the gene product thereof is the activity of putative transport system permease protein.

[90624] Accordingly, in one embodiment, the process of the present invention for producing sucrose in a non-human organism, like a microorganism or a plant or a part thereof, comprises increasing or generating the activity of a gene product with the activity of a gene product conferring the activity of “putative transport system permease protein”, especially from Escherichia coli or its functional equivalent or its homolog, e.g. the increase of
[90625] (a) a gene product of a gene comprising the nucleic acid molecule as shown in the respective line in column 5 of Table I (whereby the respective line disclose in column 7 the fine chemical sucrose), application no. 17, preferably the coding region thereof, or a homolog or a fragment thereof, and being depicted in the same respective line as said B2546, or a functional equivalent or a homolog thereof as shown in column 8 of Table I, application no. 17, preferably the coding region thereof, particularly a homolog or functional equivalent as shown in column 8 of Table I B, application no. 17, and being depicted in the same respective line as said B2546, and preferably the activity is increased non-targeted, or
[90626] (b) a polypeptide comprising a polypeptide, a consensus sequence or at least a polypeptide motif as shown in the respective line in column 5 of Table II or in column 8 of Table IV, application no. 17, respectively, and being depicted in the same respective line as said B2546, or a functional equivalent or a homolog thereof as depicted in column 8 of Table II, application no. 17, preferably a homolog or functional equivalent as depicted in column 8 of Table II B, application no. 17, and being depicted in the same respective line as said B2546, and preferably the activity is increased non-targeted, whereby the respective line disclose in column 7 the fine chemical sucrose.

[90627] Accordingly, in one embodiment, the molecule which activity is to be increased in the process of the invention is the gene product with an activity as a “putative transport system permease protein”, preferably it is the molecule of section (a) or (b) of this paragraph.

[90628] In particular, it was observed that in plants, especially in Arabidopsis thaliana, increasing or generating the activity of a gene product non-targeted with the activity of a “putative transport system permease protein”, preferably being encoded by a gene comprising the nucleic acid sequence SEQ ID NO. 99898, preferably the coding region thereof, conferred the production of or the increase in sucrose compared with the wild type control.

[90629] The nucleic acid sequence of B2613 from Escherichia coli, e.g. as shown in the respective line in column 5 of Table I, application no. 17, has been published in B. And the activity of the gene product thereof is the activity of b2613-protein.

[90630] Accordingly, in one embodiment, the process of the present invention for producing glucose-1-phosphate in a non-human organism, like a microorganism or a plant or a part thereof, comprises increasing or generating the activity of a gene product with the activity of a gene product conferring the activity of “b2613-protein”, especially from Escherichia coli or its functional equivalent or its homolog, e.g. the increase of
[90631] (a) a gene product of a gene comprising the nucleic acid molecule as shown in the respective line in column 5 of Table I (whereby the respective line disclose in column 7 the fine chemical glucose-1-phosphate), application no. 17, preferably the coding region thereof, or a homolog or a fragment thereof, and being depicted in the same respective line as said B2613, or a functional equivalent or a homolog thereof as shown in column 8 of Table I, application no. 17, preferably the coding region thereof, particularly a homolog or functional equivalent as shown in column 8 of Table I B, application no. 17, and being depicted in the same respective line as said B2613, and preferably the activity is increased non-targeted, or
[90632] (b) a polypeptide comprising a polypeptide, a consensus sequence or at least a polypeptide motif as shown in the respective line in column 5 of Table II or in column 8 of Table IV, application no. 17, respectively, and being depicted in the same respective line as said B2613, or a functional equivalent or a homolog thereof as depicted in column 8 of Table II, application no. 17, preferably a homolog or functional equivalent as depicted in column 8 of Table II B, application no. 17, and being depicted in the same respective line as said B2613, and preferably the activity is increased non-targeted, whereby the respective line disclose in column 7 the fine chemical glucose-1-phosphate.

[90633] Accordingly, in one embodiment, the molecule which activity is to be increased in the process of the invention is the gene product with an activity as a “b2613-protein”, preferably it is the molecule of section (a) or (b) of this paragraph.

[90634] In particular, it was observed that in plants, especially in Arabidopsis thaliana, increasing or generating the activity of a gene product non-targeted with the activity of a “b2613-protein”, preferably being encoded by a gene comprising the nucleic acid sequence SEQ ID NO. 40665, preferably the coding region thereof, conferred the production of or the increase in glucose-1-phosphate compared with the wild type control.

[90635] The nucleic acid sequence of B2613 from Escherichia coli, e.g. as shown in the respective line in column 5 of Table I, application no. 17, has been published in B. And the activity of the gene product thereof is the activity of b2613-protein.

[90636] Accordingly, in one embodiment, the process of the present invention for producing myo-inositol in a non-human organism, like a microorganism or a plant or a part thereof, comprises increasing or generating the activity of a gene product with the activity of a gene product conferring the activity of “b2613-protein”, especially from Escherichia coli or its functional equivalent or its homolog, e.g. the increase of
[90637] (a) a gene product of a gene comprising the nucleic acid molecule as shown in the respective line in column 5 of Table I (whereby the respective line disclose in column 7 the fine chemical myo-inositol), application no. 17, preferably the coding region thereof, or a homolog or a fragment thereof, and being depicted in the same respective line as said B2613, or a functional equivalent or a homolog thereof as shown in column 8 of Table I, application no. 17, preferably the coding region thereof, particularly a homolog or functional equivalent as shown in column 8 of Table I B, application no. 17, and being depicted in the same respective line as said B2613, and preferably the activity is increased non-targeted, or
[90638] (b) a polypeptide comprising a polypeptide, a consensus sequence or at least a polypeptide motif as shown in the respective line in column 5 of Table II or in column 8 of Table IV, application no. 17, respectively, and being depicted in the same respective line as said B2613, or a functional equivalent or a homolog thereof as depicted in column 8 of Table II, application no. 17, preferably a homolog or functional equivalent as depicted in column 8 of Table II B, application no. 17, and being depicted in the same respective line as said B2613, and preferably the activity is increased non-targeted, whereby the respective line disclose in column 7 the fine chemical myo-inositol.

[90639] Accordingly, in one embodiment, the molecule which activity is to be increased in the process of the invention is the gene product with an activity as a “b2613-protein”, preferably it is the molecule of section (a) or (b) of this paragraph.

[90640] In particular, it was observed that in plants, especially in Arabidopsis thaliana, increasing or generating the activity of a gene product non-targeted with the activity of a “b2613-protein”, preferably being encoded by a gene comprising the nucleic acid sequence SEQ ID NO. 40665, preferably the coding region thereof, conferred the production of or the increase in myo-inositol compared with the wild type control.

[90641] The nucleic acid sequence of B2634 from Escherichia coli, e.g. as shown in the respective line in column 5 of Table I, application no. 17, has been published in B. And the activity of the gene product thereof is the activity of transcriptional regulator.

[90642] Accordingly, in one embodiment, the process of the present invention for producing fructose in a non-human organism, like a microorganism or a plant or a part thereof, comprises increasing or generating the activity of a gene product with the activity of a gene product conferring the activity of “transcriptional regulator”, especially from Escherichia coli or its functional equivalent or its homolog, e.g. the increase of
[90643] (a) a gene product of a gene comprising the nucleic acid molecule as shown in the respective line in column 5 of Table I (whereby the respective line disclose in column 7 the fine chemical fructose), application no. 17, preferably the coding region thereof, or a homolog or a fragment thereof, and being depicted in the same respective line as said B2634, or a functional equivalent or a homolog thereof as shown in column 8 of Table I, application no. 17, preferably the coding region thereof, particularly a homolog or functional equivalent as shown in column 8 of Table I B, application no. 17, and being depicted in the same respective line as said B2634, and preferably the activity is increased non-targeted, or
[90644] (b) a polypeptide comprising a polypeptide, a consensus sequence or at least a polypeptide motif as shown in the respective line in column 5 of Table II or in column 8 of Table IV, application no. 17, respectively, and being depicted in the same respective line as said B2634, or a functional equivalent or a homolog thereof as depicted in column 8 of Table II, application no. 17, preferably a homolog or functional equivalent as depicted in column 8 of Table II B, application no. 17, and being depicted in the same respective line as said B2634, and preferably the activity is increased non-targeted, whereby the respective line disclose in column 7 the fine chemical fructose.

[90645] Accordingly, in one embodiment, the molecule which activity is to be increased in the process of the invention is the gene product with an activity as a “transcriptional regulator”, preferably it is the molecule of section (a) or (b) of this paragraph.

[90646] In particular, it was observed that in plants, especially in Arabidopsis thaliana, increasing or generating the activity of a gene product non-targeted with the activity of a “transcriptional regulator”, preferably being encoded by a gene comprising the nucleic acid sequence SEQ ID NO. 40726, preferably the coding region thereof, conferred the production of or the increase in fructose compared with the wild type control.

[90647] The nucleic acid sequence of B2634 from Escherichia coli, e.g. as shown in the respective line in column 5 of Table I, application no. 17, has been published in B. And the activity of the gene product thereof is the activity of transcriptional regulator.

[90648] Accordingly, in one embodiment, the process of the present invention for producing myo-inositol in a non-human organism, like a microorganism or a plant or a part thereof, comprises increasing or generating the activity of a gene product with the activity of a gene product conferring the activity of “transcriptional regulator”, especially from Escherichia coli or its functional equivalent or its homolog, e.g. the increase of
[90649] (a) a gene product of a gene comprising the nucleic acid molecule as shown in the respective line in column 5 of Table I (whereby the respective line disclose in column 7 the fine chemical myo-inositol), application no. 17, preferably the coding region thereof, or a homolog or a fragment thereof, and being depicted in the same respective line as said B2634, or a functional equivalent or a homolog thereof as shown in column 8 of Table I, application no. 17, preferably the coding region thereof, particularly a homolog or functional equivalent as shown in column 8 of Table I B, application no. 17, and being depicted in the same respective line as said B2634, and preferably the activity is increased non-targeted, or
[90650] (b) a polypeptide comprising a polypeptide, a consensus sequence or at least a polypeptide motif as shown in the respective line in column 5 of Table II or in column 8 of Table IV, application no. 17, respectively, and being depicted in the same respective line as said B2634, or a functional equivalent or a homolog thereof as depicted in column 8 of Table II, application no. 17, preferably a homolog or functional equivalent as depicted in column 8 of Table II B, application no. 17, and being depicted in the same respective line as said B2634, and preferably the activity is increased non-targeted, whereby the respective line disclose in column 7 the fine chemical myo-inositol.

[90651] Accordingly, in one embodiment, the molecule which activity is to be increased in the process of the invention is the gene product with an activity as a “transcriptional regulator”, preferably it is the molecule of section (a) or (b) of this paragraph.

[90652] In particular, it was observed that in plants, especially in Arabidopsis thaliana, increasing or generating the activity of a gene product non-targeted with the activity of a “transcriptional regulator”, preferably being encoded by a gene comprising the nucleic acid sequence SEQ ID NO. 40726, preferably the coding region thereof, conferred the production of or the increase in myo-inositol compared with the wild type control.

[90653] The nucleic acid sequence of B2634 from Escherichia coli, e.g. as shown in the respective line in column 5 of Table I, application no. 17, has been published in B. And the activity of the gene product thereof is the activity of transcriptional regulator.

[90654] Accordingly, in one embodiment, the process of the present invention for producing sucrose in a non-human organism, like a microorganism or a plant or a part thereof, comprises increasing or generating the activity of a gene product with the activity of a gene product conferring the activity of “transcriptional regulator”, especially from Escherichia coli or its functional equivalent or its homolog, e.g. the increase of
[90655] (a) a gene product of a gene comprising the nucleic acid molecule as shown in the respective line in column 5 of Table I (whereby the respective line disclose in column 7 the fine chemical sucrose), application no. 17, preferably the coding region thereof, or a homolog or a fragment thereof, and being depicted in the same respective line as said B2634, or a functional equivalent or a homolog thereof as shown in column 8 of Table I, application no. 17, preferably the coding region thereof, particularly a homolog or functional equivalent as shown in column 8 of Table I B, application no. 17, and being depicted in the same respective line as said B2634, and preferably the activity is increased non-targeted, or
[90656] (b) a polypeptide comprising a polypeptide, a consensus sequence or at least a polypeptide motif as shown in the respective line in column 5 of Table II or in column 8 of Table IV, application no. 17, respectively, and being depicted in the same respective line as said B2634, or a functional equivalent or a homolog thereof as depicted in column 8 of Table II, application no. 17, preferably a homolog or functional equivalent as depicted in column 8 of Table II B, application no. 17, and being depicted in the same respective line as said B2634, and preferably the activity is increased non-targeted, whereby the respective line disclose in column 7 the fine chemical sucrose.

[90657] Accordingly, in one embodiment, the molecule which activity is to be increased in the process of the invention is the gene product with an activity as a “transcriptional regulator”, preferably it is the molecule of section (a) or (b) of this paragraph.

[90658] In particular, it was observed that in plants, especially in Arabidopsis thaliana, increasing or generating the activity of a gene product non-targeted with the activity of a “transcriptional regulator”, preferably being encoded by a gene comprising the nucleic acid sequence SEQ ID NO. 40726, preferably the coding region thereof, conferred the production of or the increase in sucrose compared with the wild type control.

[90659] The nucleic acid sequence of B2653 from Escherichia coli, e.g. as shown in the respective line in column 5 of Table I, application no. 17, has been published in B. And the activity of the gene product thereof is the activity of b2653-protein.

[90660] Accordingly, in one embodiment, the process of the present invention for producing glucose-1-phosphate in a non-human organism, like a microorganism or a plant or a part thereof, comprises increasing or generating the activity of a gene product with the activity of a gene product conferring the activity of “b2653-protein”, especially from Escherichia coli or its functional equivalent or its homolog, e.g. the increase of
[90661] (a) a gene product of a gene comprising the nucleic acid molecule as shown in the respective line in column 5 of Table I (whereby the respective line disclose in column 7 the fine chemical glucose-1-phosphate), application no. 17, preferably the coding region thereof, or a homolog or a fragment thereof, and being depicted in the same respective line as said B2653, or a functional equivalent or a homolog thereof as shown in column 8 of Table I, application no. 17, preferably the coding region thereof, particularly a homolog or functional equivalent as shown in column 8 of Table I B, application no. 17, and being depicted in the same respective line as said B2653, and preferably the activity is increased non-targeted, or
[90662] (b) a polypeptide comprising a polypeptide, a consensus sequence or at least a polypeptide motif as shown in the respective line in column 5 of Table II or in column 8 of Table IV, application no. 17, respectively, and being depicted in the same respective line as said B2653, or a functional equivalent or a homolog thereof as depicted in column 8 of Table II, application no. 17, preferably a homolog or functional equivalent as depicted in column 8 of Table II B, application no. 17, and being depicted in the same respective line as said B2653, and preferably the activity is increased non-targeted, whereby the respective line disclose in column 7 the fine chemical glucose-1-phosphate.

[90663] Accordingly, in one embodiment, the molecule which activity is to be increased in the process of the invention is the gene product with an activity as a “b2653-protein”, preferably it is the molecule of section (a) or (b) of this paragraph.

[90664] In particular, it was observed that in plants, especially in Arabidopsis thaliana, increasing or generating the activity of a gene product non-targeted with the activity of a “b2653-protein”, preferably being encoded by a gene comprising the nucleic acid sequence SEQ ID NO. 146288, preferably the coding region thereof, conferred the production of or the increase in glucose-1-phosphate compared with the wild type control.

[90665] The nucleic acid sequence of B2653 from Escherichia coli, e.g. as shown in the respective line in column 5 of Table I, application no. 17, has been published in B. And the activity of the gene product thereof is the activity of b2653-protein.

[90666] Accordingly, in one embodiment, the process of the present invention for producing sedoheptulose-7-phosphate in a non-human organism, like a microorganism or a plant or a part thereof, comprises increasing or generating the activity of a gene product with the activity of a gene product conferring the activity of “b2653-protein”, especially from Escherichia coli or its functional equivalent or its homolog, e.g. the increase of
[90667] (a) a gene product of a gene comprising the nucleic acid molecule as shown in the respective line in column 5 of Table I (whereby the respective line disclose in column 7 the fine chemical sedoheptulose-7-phosphate), application no. 17, preferably the coding region thereof, or a homolog or a fragment thereof, and being depicted in the same respective line as said B2653, or a functional equivalent or a homolog thereof as shown in column 8 of Table I, application no. 17, preferably the coding region thereof, particularly a homolog or functional equivalent as shown in column 8 of Table I B, application no. 17, and being depicted in the same respective line as said B2653, and preferably the activity is increased non-targeted, or
[90668] (b) a polypeptide comprising a polypeptide, a consensus sequence or at least a polypeptide motif as shown in the respective line in column 5 of Table II or in column 8 of Table IV, application no. 17, respectively, and being depicted in the same respective line as said B2653, or a functional equivalent or a homolog thereof as depicted in column 8 of Table II, application no. 17, preferably a homolog or functional equivalent as depicted in column 8 of Table II B, application no. 17, and being depicted in the same respective line as said B2653, and preferably the activity is increased non-targeted, whereby the respective line disclose in column 7 the fine chemical sedoheptulose-7-phosphate.

[90669] Accordingly, in one embodiment, the molecule which activity is to be increased in the process of the invention is the gene product with an activity as a “b2653-protein”, preferably it is the molecule of section (a) or (b) of this paragraph.

[90670] In particular, it was observed that in plants, especially in Arabidopsis thaliana, increasing or generating the activity of a gene product non-targeted with the activity of a “b2653-protein”, preferably being encoded by a gene comprising the nucleic acid sequence SEQ ID NO. 146288, preferably the coding region thereof, conferred the production of or the increase in sedoheptulose-7-phosphate compared with the wild type control.

[90671] The nucleic acid sequence of B2653 from Escherichia coli, e.g. as shown in the respective line in column 5 of Table I, application no. 17, has been published in B. And the activity of the gene product thereof is the activity of b2653-protein.

[90672] Accordingly, in one embodiment, the process of the present invention for producing 3,4,5-trihydroxypentanoic acid in a non-human organism, like a microorganism or a plant or a part thereof, comprises increasing or generating the activity of a gene product with the activity of a gene product conferring the activity of “b2653-protein”, especially from Escherichia coli or its functional equivalent or its homolog, e.g. the increase of
[90673] (a) a gene product of a gene comprising the nucleic acid molecule as shown in the respective line in column 5 of Table I (whereby the respective line disclose in column 7 the fine chemical 3,4,5-trihydroxypentanoic acid), application no. 17, preferably the coding region thereof, or a homolog or a fragment thereof, and being depicted in the same respective line as said B2653, or a functional equivalent or a homolog thereof as shown in column 8 of Table I, application no. 17, preferably the coding region thereof, particularly a homolog or functional equivalent as shown in column 8 of Table I B, application no. 17, and being depicted in the same respective line as said B2653, and preferably the activity is increased non-targeted, or
[90674] (b) a polypeptide comprising a polypeptide, a consensus sequence or at least a polypeptide motif as shown in the respective line in column 5 of Table II or in column 8 of Table IV, application no. 17, respectively, and being depicted in the same respective line as said B2653, or a functional equivalent or a homolog thereof as depicted in column 8 of Table II, application no. 17, preferably a homolog or functional equivalent as depicted in column 8 of Table II B, application no. 17, and being depicted in the same respective line as said B2653, and preferably the activity is increased non-targeted, whereby the respective line disclose in column 7 the fine chemical 3,4,5-trihydroxypentanoic acid.

[90675] Accordingly, in one embodiment, the molecule which activity is to be increased in the process of the invention is the gene product with an activity as a “b2653-protein”, preferably it is the molecule of section (a) or (b) of this paragraph.

[90676] In particular, it was observed that in plants, especially in Arabidopsis thaliana, increasing or generating the activity of a gene product non-targeted with the activity of a “b2653-protein”, preferably being encoded by a gene comprising the nucleic acid sequence SEQ ID NO. 146288, preferably the coding region thereof, conferred the production of or the increase in 3,4,5-trihydroxypentanoic acid compared with the wild type control.

[90677] The nucleic acid sequence of B2654 from Escherichia coli, e.g. as shown in the respective line in column 5 of Table I, application no. 17, has been published in B. And the activity of the gene product thereof is the activity of b2654-protein.

[90678] Accordingly, in one embodiment, the process of the present invention for producing glucose-1-phosphate in a non-human organism, like a microorganism or a plant or a part thereof, comprises increasing or generating the activity of a gene product with the activity of a gene product conferring the activity of “b2654-protein”, especially from Escherichia coli or its functional equivalent or its homolog, e.g. the increase of
[90679] (a) a gene product of a gene comprising the nucleic acid molecule as shown in the respective line in column 5 of Table I (whereby the respective line disclose in column 7 the fine chemical glucose-1-phosphate), application no. 17, preferably the coding region thereof, or a homolog or a fragment thereof, and being depicted in the same respective line as said B2654, or a functional equivalent or a homolog thereof as shown in column 8 of Table I, application no. 17, preferably the coding region thereof, particularly a homolog or functional equivalent as shown in column 8 of Table I B, application no. 17, and being depicted in the same respective line as said B2654, and preferably the activity is increased non-targeted, or
[90680] (b) a polypeptide comprising a polypeptide, a consensus sequence or at least a polypeptide motif as shown in the respective line in column 5 of Table II or in column 8 of Table IV, application no. 17, respectively, and being depicted in the same respective line as said B2654, or a functional equivalent or a homolog thereof as depicted in column 8 of Table II, application no. 17, preferably a homolog or functional equivalent as depicted in column 8 of Table II B, application no. 17, and being depicted in the same respective line as said B2654, and preferably the activity is increased non-targeted, whereby the respective line disclose in column 7 the fine chemical glucose-1-phosphate.

[90681] Accordingly, in one embodiment, the molecule which activity is to be increased in the process of the invention is the gene product with an activity as a “b2654-protein”, preferably it is the molecule of section (a) or (b) of this paragraph.

[90682] In particular, it was observed that in plants, especially in Arabidopsis thaliana, increasing or generating the activity of a gene product non-targeted with the activity of a “b2654-protein”, preferably being encoded by a gene comprising the nucleic acid sequence SEQ ID NO. 125226, preferably the coding region thereof, conferred the production of or the increase in glucose-1-phosphate compared with the wild type control.

[90683] The nucleic acid sequence of B2654 from Escherichia coli, e.g. as shown in the respective line in column 5 of Table I, application no. 17, has been published in B. And the activity of the gene product thereof is the activity of b2654-protein.

[90684] Accordingly, in one embodiment, the process of the present invention for producing 3,4,5-trihydroxypentanoic acid in a non-human organism, like a microorganism or a plant or a part thereof, comprises increasing or generating the activity of a gene product with the activity of a gene product conferring the activity of “b2654-protein”, especially from Escherichia coli or its functional equivalent or its homolog, e.g. the increase of
[90685] (a) a gene product of a gene comprising the nucleic acid molecule as shown in the respective line in column 5 of Table I (whereby the respective line disclose in column 7 the fine chemical 3,4,5-trihydroxypentanoic acid), application no. 17, preferably the coding region thereof, or a homolog or a fragment thereof, and being depicted in the same respective line as said B2654, or a functional equivalent or a homolog thereof as shown in column 8 of Table I, application no. 17, preferably the coding region thereof, particularly a homolog or functional equivalent as shown in column 8 of Table I B, application no. 17, and being depicted in the same respective line as said B2654, and preferably the activity is increased non-targeted, or
[90686] (b) a polypeptide comprising a polypeptide, a consensus sequence or at least a polypeptide motif as shown in the respective line in column 5 of Table II or in column 8 of Table IV, application no. 17, respectively, and being depicted in the same respective line as said B2654, or a functional equivalent or a homolog thereof as depicted in column 8 of Table II, application no. 17, preferably a homolog or functional equivalent as depicted in column 8 of Table II B, application no. 17, and being depicted in the same respective line as said B2654, and preferably the activity is increased non-targeted, whereby the respective line disclose in column 7 the fine chemical 3,4,5-trihydroxypentanoic acid.

[90687] Accordingly, in one embodiment, the molecule which activity is to be increased in the process of the invention is the gene product with an activity as a “b2654-protein”, preferably it is the molecule of section (a) or (b) of this paragraph.

[90688] In particular, it was observed that in plants, especially in Arabidopsis thaliana, increasing or generating the activity of a gene product non-targeted with the activity of a “b2654-protein”, preferably being encoded by a gene comprising the nucleic acid sequence SEQ ID NO. 125226, preferably the coding region thereof, conferred the production of or the increase in 3,4,5-trihydroxypentanoic acid compared with the wild type control.

[90689] The nucleic acid sequence of B2670 from Escherichia coli, e.g. as shown in the respective line in column 5 of Table I, application no. 17, has been published in B. And the activity of the gene product thereof is the activity of b2670-protein.

[90690] Accordingly, in one embodiment, the process of the present invention for producing glucose-1-phosphate in a non-human organism, like a microorganism or a plant or a part thereof, comprises increasing or generating the activity of a gene product with the activity of a gene product conferring the activity of “b2670-protein”, especially from Escherichia coli or its functional equivalent or its homolog, e.g. the increase of
[90691] (a) a gene product of a gene comprising the nucleic acid molecule as shown in the respective line in column 5 of Table I (whereby the respective line disclose in column 7 the fine chemical glucose-1-phosphate), application no. 17, preferably the coding region thereof, or a homolog or a fragment thereof, and being depicted in the same respective line as said B2670, or a functional equivalent or a homolog thereof as shown in column 8 of Table I, application no. 17, preferably the coding region thereof, particularly a homolog or functional equivalent as shown in column 8 of Table I B, application no. 17, and being depicted in the same respective line as said B2670, and preferably the activity is increased non-targeted, or
[90692] (b) a polypeptide comprising a polypeptide, a consensus sequence or at least a polypeptide motif as shown in the respective line in column 5 of Table II or in column 8 of Table IV, application no. 17, respectively, and being depicted in the same respective line as said B2670, or a functional equivalent or a homolog thereof as depicted in column 8 of Table II, application no. 17, preferably a homolog or functional equivalent as depicted in column 8 of Table II B, application no. 17, and being depicted in the same respective line as said B2670, and preferably the activity is increased non-targeted, whereby the respective line disclose in column 7 the fine chemical glucose-1-phosphate.

[90693] Accordingly, in one embodiment, the molecule which activity is to be increased in the process of the invention is the gene product with an activity as a “b2670-protein”, preferably it is the molecule of section (a) or (b) of this paragraph.

[90694] In particular, it was observed that in plants, especially in Arabidopsis thaliana, increasing or generating the activity of a gene product non-targeted with the activity of a “b2670-protein”, preferably being encoded by a gene comprising the nucleic acid sequence SEQ ID NO. 146294, preferably the coding region thereof, conferred the production of or the increase in glucose-1-phosphate compared with the wild type control.

[90695] The nucleic acid sequence of B2673 from Escherichia coli, e.g. as shown in the respective line in column 5 of Table I, application no. 17, has been published in B. And the activity of the gene product thereof is the activity of b2673-protein.

[90696] Accordingly, in one embodiment, the process of the present invention for producing glucose-1-phosphate in a non-human organism, like a microorganism or a plant or a part thereof, comprises increasing or generating the activity of a gene product with the activity of a gene product conferring the activity of “b2673-protein”, especially from Escherichia coli or its functional equivalent or its homolog, e.g. the increase of
[90697] (a) a gene product of a gene comprising the nucleic acid molecule as shown in the respective line in column 5 of Table I (whereby the respective line disclose in column 7 the fine chemical glucose-1-phosphate), application no. 17, preferably the coding region thereof, or a homolog or a fragment thereof, and being depicted in the same respective line as said B2673, or a functional equivalent or a homolog thereof as shown in column 8 of Table I, application no. 17, preferably the coding region thereof, particularly a homolog or functional equivalent as shown in column 8 of Table I B, application no. 17, and being depicted in the same respective line as said B2673, and preferably the activity is increased non-targeted, or
[90698] (b) a polypeptide comprising a polypeptide, a consensus sequence or at least a polypeptide motif as shown in the respective line in column 5 of Table II or in column 8 of Table IV, application no. 17, respectively, and being depicted in the same respective line as said B2673, or a functional equivalent or a homolog thereof as depicted in column 8 of Table II, application no. 17, preferably a homolog or functional equivalent as depicted in column 8 of Table II B, application no. 17, and being depicted in the same respective line as said B2673, and preferably the activity is increased non-targeted, whereby the respective line disclose in column 7 the fine chemical glucose-1-phosphate.

[90699] Accordingly, in one embodiment, the molecule which activity is to be increased in the process of the invention is the gene product with an activity as a “b2673-protein”, preferably it is the molecule of section (a) or (b) of this paragraph.

[90700] In particular, it was observed that in plants, especially in Arabidopsis thaliana, increasing or generating the activity of a gene product non-targeted with the activity of a “b2673-protein”, preferably being encoded by a gene comprising the nucleic acid sequence SEQ ID NO. 9244, preferably the coding region thereof, conferred the production of or the increase in glucose-1-phosphate compared with the wild type control.

[90701] The nucleic acid sequence of B2673 from Escherichia coli, e.g. as shown in the respective line in column 5 of Table I, application no. 17, has been published in B. And the activity of the gene product thereof is the activity of b2673-protein.

[90702] Accordingly, in one embodiment, the process of the present invention for producing 3,4,5-trihydroxypentanoic acid in a non-human organism, like a microorganism or a plant or a part thereof, comprises increasing or generating the activity of a gene product with the activity of a gene product conferring the activity of “b2673-protein”, especially from Escherichia coli or its functional equivalent or its homolog, e.g. the increase of
[90703] (a) a gene product of a gene comprising the nucleic acid molecule as shown in the respective line in column 5 of Table I (whereby the respective line disclose in column 7 the fine chemical 3,4,5-trihydroxypentanoic acid), application no. 17, preferably the coding region thereof, or a homolog or a fragment thereof, and being depicted in the same respective line as said B2673, or a functional equivalent or a homolog thereof as shown in column 8 of Table I, application no. 17, preferably the coding region thereof, particularly a homolog or functional equivalent as shown in column 8 of Table I B, application no. 17, and being depicted in the same respective line as said B2673, and preferably the activity is increased non-targeted, or
[90704] (b) a polypeptide comprising a polypeptide, a consensus sequence or at least a polypeptide motif as shown in the respective line in column 5 of Table II or in column 8 of Table IV, application no. 17, respectively, and being depicted in the same respective line as said B2673, or a functional equivalent or a homolog thereof as depicted in column 8 of Table II, application no. 17, preferably a homolog or functional equivalent as depicted in column 8 of Table II B, application no. 17, and being depicted in the same respective line as said B2673, and preferably the activity is increased non-targeted, whereby the respective line disclose in column 7 the fine chemical 3,4,5-trihydroxypentanoic acid.

[90705] Accordingly, in one embodiment, the molecule which activity is to be increased in the process of the invention is the gene product with an activity as a “b2673-protein”, preferably it is the molecule of section (a) or (b) of this paragraph.

[90706] In particular, it was observed that in plants, especially in Arabidopsis thaliana, increasing or generating the activity of a gene product non-targeted with the activity of a “b2673-protein”, preferably being encoded by a gene comprising the nucleic acid sequence SEQ ID NO. 9244, preferably the coding region thereof, conferred the production of or the increase in 3,4,5-trihydroxypentanoic acid compared with the wild type control.

[90707] The nucleic acid sequence of B2682 from Escherichia coli, e.g. as shown in the respective line in column 5 of Table I, application no. 17, has been published in B. And the activity of the gene product thereof is the activity of b2682-protein.

[90708] Accordingly, in one embodiment, the process of the present invention for producing myo-inositol in a non-human organism, like a microorganism or a plant or a part thereof, comprises increasing or generating the activity of a gene product with the activity of a gene product conferring the activity of “b2682-protein”, especially from Escherichia coli or its functional equivalent or its homolog, e.g. the increase of
[90709] (a) a gene product of a gene comprising the nucleic acid molecule as shown in the respective line in column 5 of Table I (whereby the respective line disclose in column 7 the fine chemical myo-inositol), application no. 17, preferably the coding region thereof, or a homolog or a fragment thereof, and being depicted in the same respective line as said B2682, or a functional equivalent or a homolog thereof as shown in column 8 of Table I, application no. 17, preferably the coding region thereof, particularly a homolog or functional equivalent as shown in column 8 of Table I B, application no. 17, and being depicted in the same respective line as said B2682, and preferably the activity is increased non-targeted, or
[90710] (b) a polypeptide comprising a polypeptide, a consensus sequence or at least a polypeptide motif as shown in the respective line in column 5 of Table II or in column 8 of Table IV, application no. 17, respectively, and being depicted in the same respective line as said B2682, or a functional equivalent or a homolog thereof as depicted in column 8 of Table II, application no. 17, preferably a homolog or functional equivalent as depicted in column 8 of Table II B, application no. 17, and being depicted in the same respective line as said B2682, and preferably the activity is increased non-targeted, whereby the respective line disclose in column 7 the fine chemical myo-inositol.

[90711] Accordingly, in one embodiment, the molecule which activity is to be increased in the process of the invention is the gene product with an activity as a “b2682-protein”, preferably it is the molecule of section (a) or (b) of this paragraph.

[90712] In particular, it was observed that in plants, especially in Arabidopsis thaliana, increasing or generating the activity of a gene product non-targeted with the activity of a “b2682-protein”, preferably being encoded by a gene comprising the nucleic acid sequence SEQ ID NO. 115655, preferably the coding region thereof, conferred the production of or the increase in myo-inositol compared with the wild type control.

[90713] The nucleic acid sequence of B2699 from Escherichia coli, e.g. as shown in the respective line in column 5 of Table I, application no. 17, has been published in B. And the activity of the gene product thereof is the activity of recombinase A.

[90714] Accordingly, in one embodiment, the process of the present invention for producing glucose-1-phosphate in a non-human organism, like a microorganism or a plant or a part thereof, comprises increasing or generating the activity of a gene product with the activity of a gene product conferring the activity of “recombinase A”, especially from Escherichia coli or its functional equivalent or its homolog, e.g. the increase of
[90715] (a) a gene product of a gene comprising the nucleic acid molecule as shown in the respective line in column 5 of Table I (whereby the respective line disclose in column 7 the fine chemical glucose-1-phosphate), application no. 17, preferably the coding region thereof, or a homolog or a fragment thereof, and being depicted in the same respective line as said B2699, or a functional equivalent or a homolog thereof as shown in column 8 of Table I, application no. 17, preferably the coding region thereof, particularly a homolog or functional equivalent as shown in column 8 of Table I B, application no. 17, and being depicted in the same respective line as said B2699, and preferably the activity is increased non-targeted, or
[90716] (b) a polypeptide comprising a polypeptide, a consensus sequence or at least a polypeptide motif as shown in the respective line in column 5 of Table II or in column 8 of Table IV, application no. 17, respectively, and being depicted in the same respective line as said B2699, or a functional equivalent or a homolog thereof as depicted in column 8 of Table II, application no. 17, preferably a homolog or functional equivalent as depicted in column 8 of Table II B, application no. 17, and being depicted in the same respective line as said B2699, and preferably the activity is increased non-targeted, whereby the respective line disclose in column 7 the fine chemical glucose-1-phosphate.

[90717] Accordingly, in one embodiment, the molecule which activity is to be increased in the process of the invention is the gene product with an activity as a “recombinase A”, preferably it is the molecule of section (a) or (b) of this paragraph.

[90718] In particular, it was observed that in plants, especially in Arabidopsis thaliana, increasing or generating the activity of a gene product non-targeted with the activity of a “recombinase A”, preferably being encoded by a gene comprising the nucleic acid sequence SEQ ID NO. 100105, preferably the coding region thereof, conferred the production of or the increase in glucose-1-phosphate compared with the wild type control.

[90719] The nucleic acid sequence of B2701 from Escherichia coli, e.g. as shown in the respective line in column 5 of Table I, application no. 17, has been published in B. And the activity of the gene product thereof is the activity of murein transglycosylase.

[90720] Accordingly, in one embodiment, the process of the present invention for producing glucose-1-phosphate in a non-human organism, like a microorganism or a plant or a part thereof, comprises increasing or generating the activity of a gene product with the activity of a gene product conferring the activity of “murein transglycosylase”, especially from Escherichia coli or its functional equivalent or its homolog, e.g. the increase of
[90721] (a) a gene product of a gene comprising the nucleic acid molecule as shown in the respective line in column 5 of Table I (whereby the respective line disclose in column 7 the fine chemical glucose-1-phosphate), application no. 17, preferably the coding region thereof, or a homolog or a fragment thereof, and being depicted in the same respective line as said B2701, or a functional equivalent or a homolog thereof as shown in column 8 of Table I, application no. 17, preferably the coding region thereof, particularly a homolog or functional equivalent as shown in column 8 of Table I B, application no. 17, and being depicted in the same respective line as said B2701, and preferably the activity is increased non-targeted, or
[90722] (b) a polypeptide comprising a polypeptide, a consensus sequence or at least a polypeptide motif as shown in the respective line in column 5 of Table II or in column 8 of Table IV, application no. 17, respectively, and being depicted in the same respective line as said B2701, or a functional equivalent or a homolog thereof as depicted in column 8 of Table II, application no. 17, preferably a homolog or functional equivalent as depicted in column 8 of Table II B, application no. 17, and being depicted in the same respective line as said B2701, and preferably the activity is increased non-targeted, whereby the respective line disclose in column 7 the fine chemical glucose-1-phosphate.

[90723] Accordingly, in one embodiment, the molecule which activity is to be increased in the process of the invention is the gene product with an activity as a “murein transglycosylase”, preferably it is the molecule of section (a) or (b) of this paragraph.

[90724] In particular, it was observed that in plants, especially in Arabidopsis thaliana, increasing or generating the activity of a gene product non-targeted with the activity of a “murein transglycosylase”, preferably being encoded by a gene comprising the nucleic acid sequence SEQ ID NO. 80756, preferably the coding region thereof, conferred the production of or the increase in glucose-1-phosphate compared with the wild type control.

[90725] The nucleic acid sequence of B2714 from Escherichia coli, e.g. as shown in the respective line in column 5 of Table I, application no. 17, has been published in B. And the activity of the gene product thereof is the activity of transcriptional regulator.

[90726] Accordingly, in one embodiment, the process of the present invention for producing myo-inositol in a non-human organism, like a microorganism or a plant or a part thereof, comprises increasing or generating the activity of a gene product with the activity of a gene product conferring the activity of “transcriptional regulator”, especially from Escherichia coli or its functional equivalent or its homolog, e.g. the increase of
[90727] (a) a gene product of a gene comprising the nucleic acid molecule as shown in the respective line in column 5 of Table I (whereby the respective line disclose in column 7 the fine chemical myo-inositol), application no. 17, preferably the coding region thereof, or a homolog or a fragment thereof, and being depicted in the same respective line as said B2714, or a functional equivalent or a homolog thereof as shown in column 8 of Table I, application no. 17, preferably the coding region thereof, particularly a homolog or functional equivalent as shown in column 8 of Table I B, application no. 17, and being depicted in the same respective line as said B2714, and preferably the activity is increased non-targeted, or
[90728] (b) a polypeptide comprising a polypeptide, a consensus sequence or at least a polypeptide motif as shown in the respective line in column 5 of Table II or in column 8 of Table IV, application no. 17, respectively, and being depicted in the same respective line as said B2714, or a functional equivalent or a homolog thereof as depicted in column 8 of Table II, application no. 17, preferably a homolog or functional equivalent as depicted in column 8 of Table II B, application no. 17, and being depicted in the same respective line as said B2714, and preferably the activity is increased non-targeted, whereby the respective line disclose in column 7 the fine chemical myo-inositol.

[90729] Accordingly, in one embodiment, the molecule which activity is to be increased in the process of the invention is the gene product with an activity as a “transcriptional regulator”, preferably it is the molecule of section (a) or (b) of this paragraph.

[90730] In particular, it was observed that in plants, especially in Arabidopsis thaliana, increasing or generating the activity of a gene product non-targeted with the activity of a “transcriptional regulator”, preferably being encoded by a gene comprising the nucleic acid sequence SEQ ID NO. 40741, preferably the coding region thereof, conferred the production of or the increase in myo-inositol compared with the wild type control.

[90731] The nucleic acid sequence of B2739 from Escherichia coli, e.g. as shown in the respective line in column 5 of Table I, application no. 17, has been published in B. And the activity of the gene product thereof is the activity of b2739-protein.

[90732] Accordingly, in one embodiment, the process of the present invention for producing fructose in a non-human organism, like a microorganism or a plant or a part thereof, comprises increasing or generating the activity of a gene product with the activity of a gene product conferring the activity of “b2739-protein”, especially from Escherichia coli or its functional equivalent or its homolog, e.g. the increase of
[90733] (a) a gene product of a gene comprising the nucleic acid molecule as shown in the respective line in column 5 of Table I (whereby the respective line disclose in column 7 the fine chemical fructose), application no. 17, preferably the coding region thereof, or a homolog or a fragment thereof, and being depicted in the same respective line as said B2739, or a functional equivalent or a homolog thereof as shown in column 8 of Table I, application no. 17, preferably the coding region thereof, particularly a homolog or functional equivalent as shown in column 8 of Table I B, application no. 17, and being depicted in the same respective line as said B2739, and preferably the activity is increased non-targeted, or
[90734] (b) a polypeptide comprising a polypeptide, a consensus sequence or at least a polypeptide motif as shown in the respective line in column 5 of Table II or in column 8 of Table IV, application no. 17, respectively, and being depicted in the same respective line as said B2739, or a functional equivalent or a homolog thereof as depicted in column 8 of Table II, application no. 17, preferably a homolog or functional equivalent as depicted in column 8 of Table II B, application no. 17, and being depicted in the same respective line as said B2739, and preferably the activity is increased non-targeted, whereby the respective line disclose in column 7 the fine chemical fructose.

[90735] Accordingly, in one embodiment, the molecule which activity is to be increased in the process of the invention is the gene product with an activity as a “b2739-protein”, preferably it is the molecule of section (a) or (b) of this paragraph.

[90736] In particular, it was observed that in plants, especially in Arabidopsis thaliana, increasing or generating the activity of a gene product non-targeted with the activity of a “b2739-protein”, preferably being encoded by a gene comprising the nucleic acid sequence SEQ ID NO. 80906, preferably the coding region thereof, conferred the production of or the increase in fructose compared with the wild type control.

[90737] The nucleic acid sequence of B2739 from Escherichia coli, e.g. as shown in the respective line in column 5 of Table I, application no. 17, has been published in B. And the activity of the gene product thereof is the activity of b2739-protein.

[90738] Accordingly, in one embodiment, the process of the present invention for producing glucose in a non-human organism, like a microorganism or a plant or a part thereof, comprises increasing or generating the activity of a gene product with the activity of a gene product conferring the activity of “b2739-protein”, especially from Escherichia coli or its functional equivalent or its homolog, e.g. the increase of
[90739] (a) a gene product of a gene comprising the nucleic acid molecule as shown in the respective line in column 5 of Table I (whereby the respective line disclose in column 7 the fine chemical glucose), application no. 17, preferably the coding region thereof, or a homolog or a fragment thereof, and being depicted in the same respective line as said B2739, or a functional equivalent or a homolog thereof as shown in column 8 of Table I, application no. 17, preferably the coding region thereof, particularly a homolog or functional equivalent as shown in column 8 of Table I B, application no. 17, and being depicted in the same respective line as said B2739, and preferably the activity is increased non-targeted, or
[90740] (b) a polypeptide comprising a polypeptide, a consensus sequence or at least a polypeptide motif as shown in the respective line in column 5 of Table II or in column 8 of Table IV, application no. 17, respectively, and being depicted in the same respective line as said B2739, or a functional equivalent or a homolog thereof as depicted in column 8 of Table II, application no. 17, preferably a homolog or functional equivalent as depicted in column 8 of Table II B, application no. 17, and being depicted in the same respective line as said B2739, and preferably the activity is increased non-targeted, whereby the respective line disclose in column 7 the fine chemical glucose.

[90741] Accordingly, in one embodiment, the molecule which activity is to be increased in the process of the invention is the gene product with an activity as a “b2739-protein”, preferably it is the molecule of section (a) or (b) of this paragraph.

[90742] In particular, it was observed that in plants, especially in Arabidopsis thaliana, increasing or generating the activity of a gene product non-targeted with the activity of a “b2739-protein”, preferably being encoded by a gene comprising the nucleic acid sequence SEQ ID NO. 80906, preferably the coding region thereof, conferred the production of or the increase in glucose compared with the wild type control.

[90743] The nucleic acid sequence of B2747 from Escherichia coli, e.g. as shown in the respective line in column 5 of Table I, application no. 17, has been published in B. And the activity of the gene product thereof is the activity of 2-C-methyl-D-erythritol 4-phosphate cytidylyltransferase.

[90744] Accordingly, in one embodiment, the process of the present invention for producing glucose in a non-human organism, like a microorganism or a plant or a part thereof, comprises increasing or generating the activity of a gene product with the activity of a gene product conferring the activity of “2-C-methyl-D-erythritol 4-phosphate cytidylyltransferase”, especially from Escherichia coli or its functional equivalent or its homolog, e.g. the increase of
[90745] (a) a gene product of a gene comprising the nucleic acid molecule as shown in the respective line in column 5 of Table I (whereby the respective line disclose in column 7 the fine chemical glucose), application no. 17, preferably the coding region thereof, or a homolog or a fragment thereof, and being depicted in the same respective line as said B2747, or a functional equivalent or a homolog thereof as shown in column 8 of Table I, application no. 17, preferably the coding region thereof, particularly a homolog or functional equivalent as shown in column 8 of Table I B, application no. 17, and being depicted in the same respective line as said B2747, and preferably the activity is increased non-targeted, or
[90746] (b) a polypeptide comprising a polypeptide, a consensus sequence or at least a polypeptide motif as shown in the respective line in column 5 of Table II or in column 8 of Table IV, application no. 17, respectively, and being depicted in the same respective line as said B2747, or a functional equivalent or a homolog thereof as depicted in column 8 of Table II, application no. 17, preferably a homolog or functional equivalent as depicted in column 8 of Table II B, application no. 17, and being depicted in the same respective line as said B2747, and preferably the activity is increased non-targeted, whereby the respective line disclose in column 7 the fine chemical glucose.

[90747] Accordingly, in one embodiment, the molecule which activity is to be increased in the process of the invention is the gene product with an activity as a “2-C-methyl-D-erythritol 4-phosphate cytidylyltransferase”, preferably it is the molecule of section (a) or (b) of this paragraph.

[90748] In particular, it was observed that in plants, especially in Arabidopsis thaliana, increasing or generating the activity of a gene product non-targeted with the activity of a “2-C-methyl-D-erythritol 4-phosphate cytidylyltransferase”, preferably being encoded by a gene comprising the nucleic acid sequence SEQ ID NO. 81075, preferably the coding region thereof, conferred the production of or the increase in glucose compared with the wild type control.

[90749] The nucleic acid sequence of B2747 from Escherichia coli, e.g. as shown in the respective line in column 5 of Table I, application no. 17, has been published in B. And the activity of the gene product thereof is the activity of 2-C-methyl-D-erythritol 4-phosphate cytidylyltransferase.

[90750] Accordingly, in one embodiment, the process of the present invention for producing myo-inositol in a non-human organism, like a microorganism or a plant or a part thereof, comprises increasing or generating the activity of a gene product with the activity of a gene product conferring the activity of “2-C-methyl-D-erythritol 4-phosphate cytidylyltransferase”, especially from Escherichia coli or its functional equivalent or its homolog, e.g. the increase of
[90751] (a) a gene product of a gene comprising the nucleic acid molecule as shown in the respective line in column 5 of Table I (whereby the respective line disclose in column 7 the fine chemical myo-inositol), application no. 17, preferably the coding region thereof, or a homolog or a fragment thereof, and being depicted in the same respective line as said B2747, or a functional equivalent or a homolog thereof as shown in column 8 of Table I, application no. 17, preferably the coding region thereof, particularly a homolog or functional equivalent as shown in column 8 of Table I B, application no. 17, and being depicted in the same respective line as said B2747, and preferably the activity is increased non-targeted, or
[90752] (b) a polypeptide comprising a polypeptide, a consensus sequence or at least a polypeptide motif as shown in the respective line in column 5 of Table II or in column 8 of Table IV, application no. 17, respectively, and being depicted in the same respective line as said B2747, or a functional equivalent or a homolog thereof as depicted in column 8 of Table II, application no. 17, preferably a homolog or functional equivalent as depicted in column 8 of Table II B, application no. 17, and being depicted in the same respective line as said B2747, and preferably the activity is increased non-targeted, whereby the respective line disclose in column 7 the fine chemical myo-inositol.

[90753] Accordingly, in one embodiment, the molecule which activity is to be increased in the process of the invention is the gene product with an activity as a “2-C-methyl-D-erythritol 4-phosphate cytidylyltransferase”, preferably it is the molecule of section (a) or (b) of this paragraph.

[90754] In particular, it was observed that in plants, especially in Arabidopsis thaliana, increasing or generating the activity of a gene product non-targeted with the activity of a “2-C-methyl-D-erythritol 4-phosphate cytidylyltransferase”, preferably being encoded by a gene comprising the nucleic acid sequence SEQ ID NO. 81075, preferably the coding region thereof, conferred the production of or the increase in myo-inositol compared with the wild type control.

[90755] The nucleic acid sequence of B2747 from Escherichia coli, e.g. as shown in the respective line in column 5 of Table I, application no. 17, has been published in B. And the activity of the gene product thereof is the activity of 2-C-methyl-D-erythritol 4-phosphate cytidylyltransferase.

[90756] Accordingly, in one embodiment, the process of the present invention for producing raffinose in a non-human organism, like a microorganism or a plant or a part thereof, comprises increasing or generating the activity of a gene product with the activity of a gene product conferring the activity of “2-C-methyl-D-erythritol 4-phosphate cytidylyltransferase”, especially from Escherichia coli or its functional equivalent or its homolog, e.g. the increase of
[90757] (a) a gene product of a gene comprising the nucleic acid molecule as shown in the respective line in column 5 of Table I (whereby the respective line disclose in column 7 the fine chemical raffinose), application no. 17, preferably the coding region thereof, or a homolog or a fragment thereof, and being depicted in the same respective line as said B2747, or a functional equivalent or a homolog thereof as shown in column 8 of Table I, application no. 17, preferably the coding region thereof, particularly a homolog or functional equivalent as shown in column 8 of Table I B, application no. 17, and being depicted in the same respective line as said B2747, and preferably the activity is increased non-targeted, or
[90758] (b) a polypeptide comprising a polypeptide, a consensus sequence or at least a polypeptide motif as shown in the respective line in column 5 of Table II or in column 8 of Table IV, application no. 17, respectively, and being depicted in the same respective line as said B2747, or a functional equivalent or a homolog thereof as depicted in column 8 of Table II, application no. 17, preferably a homolog or functional equivalent as depicted in column 8 of Table II B, application no. 17, and being depicted in the same respective line as said B2747, and preferably the activity is increased non-targeted, whereby the respective line disclose in column 7 the fine chemical raffinose.

[90759] Accordingly, in one embodiment, the molecule which activity is to be increased in the process of the invention is the gene product with an activity as a “2-C-methyl-D-erythritol 4-phosphate cytidylyltransferase”, preferably it is the molecule of section (a) or (b) of this paragraph.

[90760] In particular, it was observed that in plants, especially in Arabidopsis thaliana, increasing or generating the activity of a gene product non-targeted with the activity of a “2-C-methyl-D-erythritol 4-phosphate cytidylyltransferase”, preferably being encoded by a gene comprising the nucleic acid sequence SEQ ID NO. 81075, preferably the coding region thereof, conferred the production of or the increase in raffinose compared with the wild type control.

[90761] The nucleic acid sequence of B2762 from Escherichia coli, e.g. as shown in the respective line in column 5 of Table I, application no. 17, has been published in B. And the activity of the gene product thereof is the activity of phosphoadenosine phosphosulfate reductase.

[90762] Accordingly, in one embodiment, the process of the present invention for producing glucose-1-phosphate in a non-human organism, like a microorganism or a plant or a part thereof, comprises increasing or generating the activity of a gene product with the activity of a gene product conferring the activity of “phosphoadenosine phosphosulfate reductase”, especially from Escherichia coli or its functional equivalent or its homolog, e.g. the increase of
[90763] (a) a gene product of a gene comprising the nucleic acid molecule as shown in the respective line in column 5 of Table I (whereby the respective line disclose in column 7 the fine chemical glucose-1-phosphate), application no. 17, preferably the coding region thereof, or a homolog or a fragment thereof, and being depicted in the same respective line as said B2762, or a functional equivalent or a homolog thereof as shown in column 8 of Table I, application no. 17, preferably the coding region thereof, particularly a homolog or functional equivalent as shown in column 8 of Table I B, application no. 17, and being depicted in the same respective line as said B2762, and preferably the activity is increased non-targeted, or
[90764] (b) a polypeptide comprising a polypeptide, a consensus sequence or at least a polypeptide motif as shown in the respective line in column 5 of Table II or in column 8 of Table IV, application no. 17, respectively, and being depicted in the same respective line as said B2762, or a functional equivalent or a homolog thereof as depicted in column 8 of Table II, application no. 17, preferably a homolog or functional equivalent as depicted in column 8 of Table II B, application no. 17, and being depicted in the same respective line as said B2762, and preferably the activity is increased non-targeted, whereby the respective line disclose in column 7 the fine chemical glucose-1-phosphate.

[90765] Accordingly, in one embodiment, the molecule which activity is to be increased in the process of the invention is the gene product with an activity as a “phosphoadenosine phosphosulfate reductase”, preferably it is the molecule of section (a) or (b) of this paragraph.

[90766] In particular, it was observed that in plants, especially in Arabidopsis thaliana, increasing or generating the activity of a gene product non-targeted with the activity of a “phosphoadenosine phosphosulfate reductase”, preferably being encoded by a gene comprising the nucleic acid sequence SEQ ID NO. 81451, preferably the coding region thereof, conferred the production of or the increase in glucose-1-phosphate compared with the wild type control.

[90767] The nucleic acid sequence of B2762 from Escherichia coli, e.g. as shown in the respective line in column 5 of Table I, application no. 17, has been published in B. And the activity of the gene product thereof is the activity of phosphoadenosine phosphosulfate reductase.

[90768] Accordingly, in one embodiment, the process of the present invention for producing 3,4,5-trihydroxypentanoic acid in a non-human organism, like a microorganism or a plant or a part thereof, comprises increasing or generating the activity of a gene product with the activity of a gene product conferring the activity of “phosphoadenosine phosphosulfate reductase”, especially from Escherichia coli or its functional equivalent or its homolog, e.g. the increase of
[90769] (a) a gene product of a gene comprising the nucleic acid molecule as shown in the respective line in column 5 of Table I (whereby the respective line disclose in column 7 the fine chemical 3,4,5-trihydroxypentanoic acid), application no. 17, preferably the coding region thereof, or a homolog or a fragment thereof, and being depicted in the same respective line as said B2762, or a functional equivalent or a homolog thereof as shown in column 8 of Table I, application no. 17, preferably the coding region thereof, particularly a homolog or functional equivalent as shown in column 8 of Table I B, application no. 17, and being depicted in the same respective line as said B2762, and preferably the activity is increased non-targeted, or
[90770] (b) a polypeptide comprising a polypeptide, a consensus sequence or at least a polypeptide motif as shown in the respective line in column 5 of Table II or in column 8 of Table IV, application no. 17, respectively, and being depicted in the same respective line as said B2762, or a functional equivalent or a homolog thereof as depicted in column 8 of Table II, application no. 17, preferably a homolog or functional equivalent as depicted in column 8 of Table II B, application no. 17, and being depicted in the same respective line as said B2762, and preferably the activity is increased non-targeted, whereby the respective line disclose in column 7 the fine chemical 3,4,5-trihydroxypentanoic acid.

[90771] Accordingly, in one embodiment, the molecule which activity is to be increased in the process of the invention is the gene product with an activity as a “phosphoadenosine phosphosulfate reductase”, preferably it is the molecule of section (a) or (b) of this paragraph.

[90772] In particular, it was observed that in plants, especially in Arabidopsis thaliana, increasing or generating the activity of a gene product non-targeted with the activity of a “phosphoadenosine phosphosulfate reductase”, preferably being encoded by a gene comprising the nucleic acid sequence SEQ ID NO. 81451, preferably the coding region thereof, conferred the production of or the increase in 3,4,5-trihydroxypentanoic acid compared with the wild type control.

[90773] The nucleic acid sequence of B2790 from Escherichia coli, e.g. as shown in the respective line in column 5 of Table I, application no. 17, has been published in B. And the activity of the gene product thereof is the activity of flavodoxin.

[90774] Accordingly, in one embodiment, the process of the present invention for producing fructose in a non-human organism, like a microorganism or a plant or a part thereof, comprises increasing or generating the activity of a gene product with the activity of a gene product conferring the activity of “flavodoxin”, especially from Escherichia coli or its functional equivalent or its homolog, e.g. the increase of
[90775] (a) a gene product of a gene comprising the nucleic acid molecule as shown in the respective line in column 5 of Table I (whereby the respective line disclose in column 7 the fine chemical fructose), application no. 17, preferably the coding region thereof, or a homolog or a fragment thereof, and being depicted in the same respective line as said B2790, or a functional equivalent or a homolog thereof as shown in column 8 of Table I, application no. 17, preferably the coding region thereof, particularly a homolog or functional equivalent as shown in column 8 of Table I B, application no. 17, and being depicted in the same respective line as said B2790, and preferably the activity is increased non-targeted, or
[90776] (b) a polypeptide comprising a polypeptide, a consensus sequence or at least a polypeptide motif as shown in the respective line in column 5 of Table II or in column 8 of Table IV, application no. 17, respectively, and being depicted in the same respective line as said B2790, or a functional equivalent or a homolog thereof as depicted in column 8 of Table II, application no. 17, preferably a homolog or functional equivalent as depicted in column 8 of Table II B, application no. 17, and being depicted in the same respective line as said B2790, and preferably the activity is increased non-targeted, whereby the respective line disclose in column 7 the fine chemical fructose.

[90777] Accordingly, in one embodiment, the molecule which activity is to be increased in the process of the invention is the gene product with an activity as a “flavodoxin”, preferably it is the molecule of section (a) or (b) of this paragraph.

[90778] In particular, it was observed that in plants, especially in Arabidopsis thaliana, increasing or generating the activity of a gene product non-targeted with the activity of a “flavodoxin”, preferably being encoded by a gene comprising the nucleic acid sequence SEQ ID NO. 115719, preferably the coding region thereof, conferred the production of or the increase in fructose compared with the wild type control.

[90779] The nucleic acid sequence of B2790 from Escherichia coli, e.g. as shown in the respective line in column 5 of Table I, application no. 17, has been published in B. And the activity of the gene product thereof is the activity of flavodoxin.

[90780] Accordingly, in one embodiment, the process of the present invention for producing glucose in a non-human organism, like a microorganism or a plant or a part thereof, comprises increasing or generating the activity of a gene product with the activity of a gene product conferring the activity of “flavodoxin”, especially from Escherichia coli or its functional equivalent or its homolog, e.g. the increase of
[90781] (a) a gene product of a gene comprising the nucleic acid molecule as shown in the respective line in column 5 of Table I (whereby the respective line disclose in column 7 the fine chemical glucose), application no. 17, preferably the coding region thereof, or a homolog or a fragment thereof, and being depicted in the same respective line as said B2790, or a functional equivalent or a homolog thereof as shown in column 8 of Table I, application no. 17, preferably the coding region thereof, particularly a homolog or functional equivalent as shown in column 8 of Table I B, application no. 17, and being depicted in the same respective line as said B2790, and preferably the activity is increased non-targeted, or
[90782] (b) a polypeptide comprising a polypeptide, a consensus sequence or at least a polypeptide motif as shown in the respective line in column 5 of Table II or in column 8 of Table IV, application no. 17, respectively, and being depicted in the same respective line as said B2790, or a functional equivalent or a homolog thereof as depicted in column 8 of Table II, application no. 17, preferably a homolog or functional equivalent as depicted in column 8 of Table II B, application no. 17, and being depicted in the same respective line as said B2790, and preferably the activity is increased non-targeted, whereby the respective line disclose in column 7 the fine chemical glucose.

[90783] Accordingly, in one embodiment, the molecule which activity is to be increased in the process of the invention is the gene product with an activity as a “flavodoxin”, preferably it is the molecule of section (a) or (b) of this paragraph.

[90784] In particular, it was observed that in plants, especially in Arabidopsis thaliana, increasing or generating the activity of a gene product non-targeted with the activity of a “flavodoxin”, preferably being encoded by a gene comprising the nucleic acid sequence SEQ ID NO. 115719, preferably the coding region thereof, conferred the production of or the increase in glucose compared with the wild type control.

[90785] The nucleic acid sequence of B2790 from Escherichia coli, e.g. as shown in the respective line in column 5 of Table I, application no. 17, has been published in B. And the activity of the gene product thereof is the activity of flavodoxin.

[90786] Accordingly, in one embodiment, the process of the present invention for producing glucose-1-phosphate in a non-human organism, like a microorganism or a plant or a part thereof, comprises increasing or generating the activity of a gene product with the activity of a gene product conferring the activity of “flavodoxin”, especially from Escherichia coli or its functional equivalent or its homolog, e.g. the increase of
[90787] (a) a gene product of a gene comprising the nucleic acid molecule as shown in the respective line in column 5 of Table I (whereby the respective line disclose in column 7 the fine chemical glucose-1-phosphate), application no. 17, preferably the coding region thereof, or a homolog or a fragment thereof, and being depicted in the same respective line as said B2790, or a functional equivalent or a homolog thereof as shown in column 8 of Table I, application no. 17, preferably the coding region thereof, particularly a homolog or functional equivalent as shown in column 8 of Table I B, application no. 17, and being depicted in the same respective line as said B2790, and preferably the activity is increased non-targeted, or
[90788] (b) a polypeptide comprising a polypeptide, a consensus sequence or at least a polypeptide motif as shown in the respective line in column 5 of Table II or in column 8 of Table IV, application no. 17, respectively, and being depicted in the same respective line as said B2790, or a functional equivalent or a homolog thereof as depicted in column 8 of Table II, application no. 17, preferably a homolog or functional equivalent as depicted in column 8 of Table II B, application no. 17, and being depicted in the same respective line as said B2790, and preferably the activity is increased non-targeted, whereby the respective line disclose in column 7 the fine chemical glucose-1-phosphate.

[90789] Accordingly, in one embodiment, the molecule which activity is to be increased in the process of the invention is the gene product with an activity as a “flavodoxin”, preferably it is the molecule of section (a) or (b) of this paragraph.

[90790] In particular, it was observed that in plants, especially in Arabidopsis thaliana, increasing or generating the activity of a gene product non-targeted with the activity of a “flavodoxin”, preferably being encoded by a gene comprising the nucleic acid sequence SEQ ID NO. 115719, preferably the coding region thereof, conferred the production of or the increase in glucose-1-phosphate compared with the wild type control.

[90791] The nucleic acid sequence of B2790 from Escherichia coli, e.g. as shown in the respective line in column 5 of Table I, application no. 17, has been published in B. And the activity of the gene product thereof is the activity of flavodoxin.

[90792] Accordingly, in one embodiment, the process of the present invention for producing myo-inositol in a non-human organism, like a microorganism or a plant or a part thereof, comprises increasing or generating the activity of a gene product with the activity of a gene product conferring the activity of “flavodoxin”, especially from Escherichia coli or its functional equivalent or its homolog, e.g. the increase of
[90793] (a) a gene product of a gene comprising the nucleic acid molecule as shown in the respective line in column 5 of Table I (whereby the respective line disclose in column 7 the fine chemical myo-inositol), application no. 17, preferably the coding region thereof, or a homolog or a fragment thereof, and being depicted in the same respective line as said B2790, or a functional equivalent or a homolog thereof as shown in column 8 of Table I, application no. 17, preferably the coding region thereof, particularly a homolog or functional equivalent as shown in column 8 of Table I B, application no. 17, and being depicted in the same respective line as said B2790, and preferably the activity is increased non-targeted, or
[90794] (b) a polypeptide comprising a polypeptide, a consensus sequence or at least a polypeptide motif as shown in the respective line in column 5 of Table II or in column 8 of Table IV, application no. 17, respectively, and being depicted in the same respective line as said B2790, or a functional equivalent or a homolog thereof as depicted in column 8 of Table II, application no. 17, preferably a homolog or functional equivalent as depicted in column 8 of Table II B, application no. 17, and being depicted in the same respective line as said B2790, and preferably the activity is increased non-targeted, whereby the respective line disclose in column 7 the fine chemical myo-inositol.

[90795] Accordingly, in one embodiment, the molecule which activity is to be increased in the process of the invention is the gene product with an activity as a “flavodoxin”, preferably it is the molecule of section (a) or (b) of this paragraph.

[90796] In particular, it was observed that in plants, especially in Arabidopsis thaliana, increasing or generating the activity of a gene product non-targeted with the activity of a “flavodoxin”, preferably being encoded by a gene comprising the nucleic acid sequence SEQ ID NO. 115719, preferably the coding region thereof, conferred the production of or the increase in myo-inositol compared with the wild type control.

[90797] The nucleic acid sequence of B2790 from Escherichia coli, e.g. as shown in the respective line in column 5 of Table I, application no. 17, has been published in B. And the activity of the gene product thereof is the activity of flavodoxin.

[90798] Accordingly, in one embodiment, the process of the present invention for producing 3,4,5-trihydroxypentanoic acid in a non-human organism, like a microorganism or a plant or a part thereof, comprises increasing or generating the activity of a gene product with the activity of a gene product conferring the activity of “flavodoxin”, especially from Escherichia coli or its functional equivalent or its homolog, e.g. the increase of
[90799] (a) a gene product of a gene comprising the nucleic acid molecule as shown in the respective line in column 5 of Table I (whereby the respective line disclose in column 7 the fine chemical 3,4,5-trihydroxypentanoic acid), application no. 17, preferably the coding region thereof, or a homolog or a fragment thereof, and being depicted in the same respective line as said B2790, or a functional equivalent or a homolog thereof as shown in column 8 of Table I, application no. 17, preferably the coding region thereof, particularly a homolog or functional equivalent as shown in column 8 of Table I B, application no. 17, and being depicted in the same respective line as said B2790, and preferably the activity is increased non-targeted, or
[90800] (b) a polypeptide comprising a polypeptide, a consensus sequence or at least a polypeptide motif as shown in the respective line in column 5 of Table II or in column 8 of Table IV, application no. 17, respectively, and being depicted in the same respective line as said B2790, or a functional equivalent or a homolog thereof as depicted in column 8 of Table II, application no. 17, preferably a homolog or functional equivalent as depicted in column 8 of Table II B, application no. 17, and being depicted in the same respective line as said B2790, and preferably the activity is increased non-targeted, whereby the respective line disclose in column 7 the fine chemical 3,4,5-trihydroxypentanoic acid.

[90801] Accordingly, in one embodiment, the molecule which activity is to be increased in the process of the invention is the gene product with an activity as a “flavodoxin”, preferably it is the molecule of section (a) or (b) of this paragraph.

[90802] In particular, it was observed that in plants, especially in Arabidopsis thaliana, increasing or generating the activity of a gene product non-targeted with the activity of a “flavodoxin”, preferably being encoded by a gene comprising the nucleic acid sequence SEQ ID NO. 115719, preferably the coding region thereof, conferred the production of or the increase in 3,4,5-trihydroxypentanoic acid compared with the wild type control.

[90803] The nucleic acid sequence of B2818 from Escherichia coli, e.g. as shown in the respective line in column 5 of Table I, application no. 17, has been published in B. And the activity of the gene product thereof is the activity of amino-acid acetyltransferase.

[90804] Accordingly, in one embodiment, the process of the present invention for producing fructose in a non-human organism, like a microorganism or a plant or a part thereof, comprises increasing or generating the activity of a gene product with the activity of a gene product conferring the activity of “amino-acid acetyltransferase”, especially from Escherichia coli or its functional equivalent or its homolog, e.g. the increase of
[90805] (a) a gene product of a gene comprising the nucleic acid molecule as shown in the respective line in column 5 of Table I (whereby the respective line disclose in column 7 the fine chemical fructose), application no. 17, preferably the coding region thereof, or a homolog or a fragment thereof, and being depicted in the same respective line as said B2818, or a functional equivalent or a homolog thereof as shown in column 8 of Table I, application no. 17, preferably the coding region thereof, particularly a homolog or functional equivalent as shown in column 8 of Table I B, application no. 17, and being depicted in the same respective line as said B2818, and preferably the activity is increased non-targeted, or
[90806] (b) a polypeptide comprising a polypeptide, a consensus sequence or at least a polypeptide motif as shown in the respective line in column 5 of Table II or in column 8 of Table IV, application no. 17, respectively, and being depicted in the same respective line as said B2818, or a functional equivalent or a homolog thereof as depicted in column 8 of Table II, application no. 17, preferably a homolog or functional equivalent as depicted in column 8 of Table II B, application no. 17, and being depicted in the same respective line as said B2818, and preferably the activity is increased non-targeted, whereby the respective line disclose in column 7 the fine chemical fructose.

[90807] Accordingly, in one embodiment, the molecule which activity is to be increased in the process of the invention is the gene product with an activity as a “amino-acid acetyltransferase”, preferably it is the molecule of section (a) or (b) of this paragraph.

[90808] In particular, it was observed that in plants, especially in Arabidopsis thaliana, increasing or generating the activity of a gene product non-targeted with the activity of a “amino-acid acetyltransferase”, preferably being encoded by a gene comprising the nucleic acid sequence SEQ ID NO. 81576, preferably the coding region thereof, conferred the production of or the increase in fructose compared with the wild type control.

[90809] The nucleic acid sequence of B2818 from Escherichia coli, e.g. as shown in the respective line in column 5 of Table I, application no. 17, has been published in B. And the activity of the gene product thereof is the activity of amino-acid acetyltransferase.

[90810] Accordingly, in one embodiment, the process of the present invention for producing glucose-1-phosphate in a non-human organism, like a microorganism or a plant or a part thereof, comprises increasing or generating the activity of a gene product with the activity of a gene product conferring the activity of “amino-acid acetyltransferase”, especially from Escherichia coli or its functional equivalent or its homolog, e.g. the increase of
[90811] (a) a gene product of a gene comprising the nucleic acid molecule as shown in the respective line in column 5 of Table I (whereby the respective line disclose in column 7 the fine chemical glucose-1-phosphate), application no. 17, preferably the coding region thereof, or a homolog or a fragment thereof, and being depicted in the same respective line as said B2818, or a functional equivalent or a homolog thereof as shown in column 8 of Table I, application no. 17, preferably the coding region thereof, particularly a homolog or functional equivalent as shown in column 8 of Table I B, application no. 17, and being depicted in the same respective line as said B2818, and preferably the activity is increased non-targeted, or
[90812] (b) a polypeptide comprising a polypeptide, a consensus sequence or at least a polypeptide motif as shown in the respective line in column 5 of Table II or in column 8 of Table IV, application no. 17, respectively, and being depicted in the same respective line as said B2818, or a functional equivalent or a homolog thereof as depicted in column 8 of Table II, application no. 17, preferably a homolog or functional equivalent as depicted in column 8 of Table II B, application no. 17, and being depicted in the same respective line as said B2818, and preferably the activity is increased non-targeted, whereby the respective line disclose in column 7 the fine chemical glucose-1-phosphate.

[90813] Accordingly, in one embodiment, the molecule which activity is to be increased in the process of the invention is the gene product with an activity as a “amino-acid acetyltransferase”, preferably it is the molecule of section (a) or (b) of this paragraph.

[90814] In particular, it was observed that in plants, especially in Arabidopsis thaliana, increasing or generating the activity of a gene product non-targeted with the activity of a “amino-acid acetyltransferase”, preferably being encoded by a gene comprising the nucleic acid sequence SEQ ID NO. 81576, preferably the coding region thereof, conferred the production of or the increase in glucose-1-phosphate compared with the wild type control.

[90815] The nucleic acid sequence of B2818 from Escherichia coli, e.g. as shown in the respective line in column 5 of Table I, application no. 17, has been published in B. And the activity of the gene product thereof is the activity of amino-acid acetyltransferase.

[90816] Accordingly, in one embodiment, the process of the present invention for producing myo-inositol in a non-human organism, like a microorganism or a plant or a part thereof, comprises increasing or generating the activity of a gene product with the activity of a gene product conferring the activity of “amino-acid acetyltransferase”, especially from Escherichia coli or its functional equivalent or its homolog, e.g. the increase of
[90817] (a) a gene product of a gene comprising the nucleic acid molecule as shown in the respective line in column 5 of Table I (whereby the respective line disclose in column 7 the fine chemical myo-inositol), application no. 17, preferably the coding region thereof, or a homolog or a fragment thereof, and being depicted in the same respective line as said B2818, or a functional equivalent or a homolog thereof as shown in column 8 of Table I, application no. 17, preferably the coding region thereof, particularly a homolog or functional equivalent as shown in column 8 of Table I B, application no. 17, and being depicted in the same respective line as said B2818, and preferably the activity is increased non-targeted, or
[90818] (b) a polypeptide comprising a polypeptide, a consensus sequence or at least a polypeptide motif as shown in the respective line in column 5 of Table II or in column 8 of Table IV, application no. 17, respectively, and being depicted in the same respective line as said B2818, or a functional equivalent or a homolog thereof as depicted in column 8 of Table II, application no. 17, preferably a homolog or functional equivalent as depicted in column 8 of Table II B, application no. 17, and being depicted in the same respective line as said B2818, and preferably the activity is increased non-targeted, whereby the respective line disclose in column 7 the fine chemical myo-inositol.

[90819] Accordingly, in one embodiment, the molecule which activity is to be increased in the process of the invention is the gene product with an activity as a “amino-acid acetyltransferase”, preferably it is the molecule of section (a) or (b) of this paragraph.

[90820] In particular, it was observed that in plants, especially in Arabidopsis thaliana, increasing or generating the activity of a gene product non-targeted with the activity of a “amino-acid acetyltransferase”, preferably being encoded by a gene comprising the nucleic acid sequence SEQ ID NO. 81576, preferably the coding region thereof, conferred the production of or the increase in myo-inositol compared with the wild type control.

[90821] The nucleic acid sequence of B2839 from Escherichia coli, e.g. as shown in the respective line in column 5 of Table I, application no. 17, has been published in B. And the activity of the gene product thereof is the activity of transcriptional regulator.

[90822] Accordingly, in one embodiment, the process of the present invention for producing raffinose in a non-human organism, like a microorganism or a plant or a part thereof, comprises increasing or generating the activity of a gene product with the activity of a gene product conferring the activity of “transcriptional regulator”, especially from Escherichia coli or its functional equivalent or its homolog, e.g. the increase of
[90823] (a) a gene product of a gene comprising the nucleic acid molecule as shown in the respective line in column 5 of Table I (whereby the respective line disclose in column 7 the fine chemical raffinose), application no. 17, preferably the coding region thereof, or a homolog or a fragment thereof, and being depicted in the same respective line as said B2839, or a functional equivalent or a homolog thereof as shown in column 8 of Table I, application no. 17, preferably the coding region thereof, particularly a homolog or functional equivalent as shown in column 8 of Table I B, application no. 17, and being depicted in the same respective line as said B2839, and preferably the activity is increased non-targeted, or
[90824] (b) a polypeptide comprising a polypeptide, a consensus sequence or at least a polypeptide motif as shown in the respective line in column 5 of Table II or in column 8 of Table IV, application no. 17, respectively, and being depicted in the same respective line as said B2839, or a functional equivalent or a homolog thereof as depicted in column 8 of Table II, application no. 17, preferably a homolog or functional equivalent as depicted in column 8 of Table II B, application no. 17, and being depicted in the same respective line as said B2839, and preferably the activity is increased non-targeted, whereby the respective line disclose in column 7 the fine chemical raffinose.

[90825] Accordingly, in one embodiment, the molecule which activity is to be increased in the process of the invention is the gene product with an activity as a “transcriptional regulator”, preferably it is the molecule of section (a) or (b) of this paragraph.

[90826] In particular, it was observed that in plants, especially in Arabidopsis thaliana, increasing or generating the activity of a gene product non-targeted with the activity of a “transcriptional regulator”, preferably being encoded by a gene comprising the nucleic acid sequence SEQ ID NO. 81935, preferably the coding region thereof, conferred the production of or the increase in raffinose compared with the wild type control.

[90827] The nucleic acid sequence of B2923 from Escherichia coli, e.g. as shown in the respective line in column 5 of Table I, application no. 17, has been published in B. And the activity of the gene product thereof is the activity of arginine exporter protein.

[90828] Accordingly, in one embodiment, the process of the present invention for producing glucose in a non-human organism, like a microorganism or a plant or a part thereof, comprises increasing or generating the activity of a gene product with the activity of a gene product conferring the activity of “arginine exporter protein”, especially from Escherichia coli or its functional equivalent or its homolog, e.g. the increase of
[90829] (a) a gene product of a gene comprising the nucleic acid molecule as shown in the respective line in column 5 of Table I (whereby the respective line disclose in column 7 the fine chemical glucose), application no. 17, preferably the coding region thereof, or a homolog or a fragment thereof, and being depicted in the same respective line as said B2923, or a functional equivalent or a homolog thereof as shown in column 8 of Table I, application no. 17, preferably the coding region thereof, particularly a homolog or functional equivalent as shown in column 8 of Table I B, application no. 17, and being depicted in the same respective line as said B2923, and preferably the activity is increased non-targeted, or
[90830] (b) a polypeptide comprising a polypeptide, a consensus sequence or at least a polypeptide motif as shown in the respective line in column 5 of Table II or in column 8 of Table IV, application no. 17, respectively, and being depicted in the same respective line as said B2923, or a functional equivalent or a homolog thereof as depicted in column 8 of Table II, application no. 17, preferably a homolog or functional equivalent as depicted in column 8 of Table II B, application no. 17, and being depicted in the same respective line as said B2923, and preferably the activity is increased non-targeted, whereby the respective line disclose in column 7 the fine chemical glucose.

[90831] Accordingly, in one embodiment, the molecule which activity is to be increased in the process of the invention is the gene product with an activity as a “arginine exporter protein”, preferably it is the molecule of section (a) or (b) of this paragraph.

[90832] In particular, it was observed that in plants, especially in Arabidopsis thaliana, increasing or generating the activity of a gene product non-targeted with the activity of a “arginine exporter protein”, preferably being encoded by a gene comprising the nucleic acid sequence SEQ ID NO. 9333, preferably the coding region thereof, conferred the production of or the increase in glucose compared with the wild type control.

[90833] The nucleic acid sequence of B2923 from Escherichia coli, e.g. as shown in the respective line in column 5 of Table I, application no. 17, has been published in B. And the activity of the gene product thereof is the activity of arginine exporter protein.

[90834] Accordingly, in one embodiment, the process of the present invention for producing myo-inositol in a non-human organism, like a microorganism or a plant or a part thereof, comprises increasing or generating the activity of a gene product with the activity of a gene product conferring the activity of “arginine exporter protein”, especially from Escherichia coli or its functional equivalent or its homolog, e.g. the increase of
[90835] (a) a gene product of a gene comprising the nucleic acid molecule as shown in the respective line in column 5 of Table I (whereby the respective line disclose in column 7 the fine chemical myo-inositol), application no. 17, preferably the coding region thereof, or a homolog or a fragment thereof, and being depicted in the same respective line as said B2923, or a functional equivalent or a homolog thereof as shown in column 8 of Table I, application no. 17, preferably the coding region thereof, particularly a homolog or functional equivalent as shown in column 8 of Table I B, application no. 17, and being depicted in the same respective line as said B2923, and preferably the activity is increased non-targeted, or
[90836] (b) a polypeptide comprising a polypeptide, a consensus sequence or at least a polypeptide motif as shown in the respective line in column 5 of Table II or in column 8 of Table IV, application no. 17, respectively, and being depicted in the same respective line as said B2923, or a functional equivalent or a homolog thereof as depicted in column 8 of Table II, application no. 17, preferably a homolog or functional equivalent as depicted in column 8 of Table II B, application no. 17, and being depicted in the same respective line as said B2923, and preferably the activity is increased non-targeted, whereby the respective line disclose in column 7 the fine chemical myo-inositol.

[90837] Accordingly, in one embodiment, the molecule which activity is to be increased in the process of the invention is the gene product with an activity as a “arginine exporter protein”, preferably it is the molecule of section (a) or (b) of this paragraph.

[90838] In particular, it was observed that in plants, especially in Arabidopsis thaliana, increasing or generating the activity of a gene product non-targeted with the activity of a “arginine exporter protein”, preferably being encoded by a gene comprising the nucleic acid sequence SEQ ID NO. 9333, preferably the coding region thereof, conferred the production of or the increase in myo-inositol compared with the wild type control.

[90839] The nucleic acid sequence of B2932 from Escherichia coli, e.g. as shown in the respective line in column 5 of Table I, application no. 17, has been published in B. And the activity of the gene product thereof is the activity of b2932-protein.

[90840] Accordingly, in one embodiment, the process of the present invention for producing myo-inositol in a non-human organism, like a microorganism or a plant or a part thereof, comprises increasing or generating the activity of a gene product with the activity of a gene product conferring the activity of “b2932-protein”, especially from Escherichia coli or its functional equivalent or its homolog, e.g. the increase of
[90841] (a) a gene product of a gene comprising the nucleic acid molecule as shown in the respective line in column 5 of Table I (whereby the respective line disclose in column 7 the fine chemical myo-inositol), application no. 17, preferably the coding region thereof, or a homolog or a fragment thereof, and being depicted in the same respective line as said B2932, or a functional equivalent or a homolog thereof as shown in column 8 of Table I, application no. 17, preferably the coding region thereof, particularly a homolog or functional equivalent as shown in column 8 of Table I B, application no. 17, and being depicted in the same respective line as said B2932, and preferably the activity is increased non-targeted, or
[90842] (b) a polypeptide comprising a polypeptide, a consensus sequence or at least a polypeptide motif as shown in the respective line in column 5 of Table II or in column 8 of Table IV, application no. 17, respectively, and being depicted in the same respective line as said B2932, or a functional equivalent or a homolog thereof as depicted in column 8 of Table II, application no. 17, preferably a homolog or functional equivalent as depicted in column 8 of Table II B, application no. 17, and being depicted in the same respective line as said B2932, and preferably the activity is increased non-targeted, whereby the respective line disclose in column 7 the fine chemical myo-inositol.

[90843] Accordingly, in one embodiment, the molecule which activity is to be increased in the process of the invention is the gene product with an activity as a “b2932-protein”, preferably it is the molecule of section (a) or (b) of this paragraph.

[90844] In particular, it was observed that in plants, especially in Arabidopsis thaliana, increasing or generating the activity of a gene product non-targeted with the activity of a “b2932-protein”, preferably being encoded by a gene comprising the nucleic acid sequence SEQ ID NO. 146327, preferably the coding region thereof, conferred the production of or the increase in myo-inositol compared with the wild type control.

[90845] The nucleic acid sequence of B3112 from Escherichia coli, e.g. as shown in the respective line in column 5 of Table I, application no. 17, has been published in B. And the activity of the gene product thereof is the activity of L-serine dehydratase.

[90846] Accordingly, in one embodiment, the process of the present invention for producing erythrol in a non-human organism, like a microorganism or a plant or a part thereof, comprises increasing or generating the activity of a gene product with the activity of a gene product conferring the activity of “L-serine dehydratase”, especially from Escherichia coli or its functional equivalent or its homolog, e.g. the increase of
[90847] (a) a gene product of a gene comprising the nucleic acid molecule as shown in the respective line in column 5 of Table I (whereby the respective line disclose in column 7 the fine chemical erythrol), application no. 17, preferably the coding region thereof, or a homolog or a fragment thereof, and being depicted in the same respective line as said B3112, or a functional equivalent or a homolog thereof as shown in column 8 of Table I, application no. 17, preferably the coding region thereof, particularly a homolog or functional equivalent as shown in column 8 of Table I B, application no. 17, and being depicted in the same respective line as said B3112, and preferably the activity is increased plastidic, or
[90848] (b) a polypeptide comprising a polypeptide, a consensus sequence or at least a polypeptide motif as shown in the respective line in column 5 of Table II or in column 8 of Table IV, application no. 17, respectively, and being depicted in the same respective line as said B3112, or a functional equivalent or a homolog thereof as depicted in column 8 of Table II, application no. 17, preferably a homolog or functional equivalent as depicted in column 8 of Table II B, application no. 17, and being depicted in the same respective line as said B3112, and preferably the activity is increased plastidic, whereby the respective line disclose in column 7 the fine chemical erythrol.

[90849] Accordingly, in one embodiment, the molecule which activity is to be increased in the process of the invention is the gene product with an activity as a “L-serine dehydratase”, preferably it is the molecule of section (a) or (b) of this paragraph.

[90850] In particular, it was observed that in plants, especially in Arabidopsis thaliana, increasing or generating the activity of a gene product plastidic with the activity of a “L-serine dehydratase”, preferably being encoded by a gene comprising the nucleic acid sequence SEQ ID NO. 104660, preferably the coding region thereof, conferred the production of or the increase in erythrol compared with the wild type control.

[90851] The nucleic acid sequence of B3151 from Escherichia coli, e.g. as shown in the respective line in column 5 of Table I, application no. 17, has been published in B. And the activity of the gene product thereof is the activity of b3151-protein.

[90852] Accordingly, in one embodiment, the process of the present invention for producing myo-inositol in a non-human organism, like a microorganism or a plant or a part thereof, comprises increasing or generating the activity of a gene product with the activity of a gene product conferring the activity of “b3151-protein”, especially from Escherichia coli or its functional equivalent or its homolog, e.g. the increase of
[90853] (a) a gene product of a gene comprising the nucleic acid molecule as shown in the respective line in column 5 of Table I (whereby the respective line disclose in column 7 the fine chemical myo-inositol), application no. 17, preferably the coding region thereof, or a homolog or a fragment thereof, and being depicted in the same respective line as said B3151, or a functional equivalent or a homolog thereof as shown in column 8 of Table I, application no. 17, preferably the coding region thereof, particularly a homolog or functional equivalent as shown in column 8 of Table I B, application no. 17, and being depicted in the same respective line as said B3151, and preferably the activity is increased non-targeted, or
[90854] (b) a polypeptide comprising a polypeptide, a consensus sequence or at least a polypeptide motif as shown in the respective line in column 5 of Table II or in column 8 of Table IV, application no. 17, respectively, and being depicted in the same respective line as said B3151, or a functional equivalent or a homolog thereof as depicted in column 8 of Table II, application no. 17, preferably a homolog or functional equivalent as depicted in column 8 of Table II B, application no. 17, and being depicted in the same respective line as said B3151, and preferably the activity is increased non-targeted, whereby the respective line disclose in column 7 the fine chemical myo-inositol.

[90855] Accordingly, in one embodiment, the molecule which activity is to be increased in the process of the invention is the gene product with an activity as a “b3151-protein”, preferably it is the molecule of section (a) or (b) of this paragraph.

[90856] In particular, it was observed that in plants, especially in Arabidopsis thaliana, increasing or generating the activity of a gene product non-targeted with the activity of a “b3151-protein”, preferably being encoded by a gene comprising the nucleic acid sequence SEQ ID NO. 42477, preferably the coding region thereof, conferred the production of or the increase in myo-inositol compared with the wild type control.

[90857] The nucleic acid sequence of B3151 from Escherichia coli, e.g. as shown in the respective line in column 5 of Table I, application no. 17, has been published in B. And the activity of the gene product thereof is the activity of b3151-protein.

[90858] Accordingly, in one embodiment, the process of the present invention for producing raffinose in a non-human organism, like a microorganism or a plant or a part thereof, comprises increasing or generating the activity of a gene product with the activity of a gene product conferring the activity of “b3151-protein”, especially from Escherichia coli or its functional equivalent or its homolog, e.g. the increase of
[90859] (a) a gene product of a gene comprising the nucleic acid molecule as shown in the respective line in column 5 of Table I (whereby the respective line disclose in column 7 the fine chemical raffinose), application no. 17, preferably the coding region thereof, or a homolog or a fragment thereof, and being depicted in the same respective line as said B3151, or a functional equivalent or a homolog thereof as shown in column 8 of Table I, application no. 17, preferably the coding region thereof, particularly a homolog or functional equivalent as shown in column 8 of Table I B, application no. 17, and being depicted in the same respective line as said B3151, and preferably the activity is increased non-targeted, or
[90860] (b) a polypeptide comprising a polypeptide, a consensus sequence or at least a polypeptide motif as shown in the respective line in column 5 of Table II or in column 8 of Table IV, application no. 17, respectively, and being depicted in the same respective line as said B3151, or a functional equivalent or a homolog thereof as depicted in column 8 of Table II, application no. 17, preferably a homolog or functional equivalent as depicted in column 8 of Table II B, application no. 17, and being depicted in the same respective line as said B3151, and preferably the activity is increased non-targeted, whereby the respective line disclose in column 7 the fine chemical raffinose.

[90861] Accordingly, in one embodiment, the molecule which activity is to be increased in the process of the invention is the gene product with an activity as a “b3151-protein”, preferably it is the molecule of section (a) or (b) of this paragraph.

[90862] In particular, it was observed that in plants, especially in Arabidopsis thaliana, increasing or generating the activity of a gene product non-targeted with the activity of a “b3151-protein”, preferably being encoded by a gene comprising the nucleic acid sequence SEQ ID NO. 42477, preferably the coding region thereof, conferred the production of or the increase in raffinose compared with the wild type control.

[90863] The nucleic acid sequence of B3151 from Escherichia coli, e.g. as shown in the respective line in column 5 of Table I, application no. 17, has been published in B. And the activity of the gene product thereof is the activity of b3151-protein.

[90864] Accordingly, in one embodiment, the process of the present invention for producing sucrose in a non-human organism, like a microorganism or a plant or a part thereof, comprises increasing or generating the activity of a gene product with the activity of a gene product conferring the activity of “b3151-protein”, especially from Escherichia coli or its functional equivalent or its homolog, e.g. the increase of
[90865] (a) a gene product of a gene comprising the nucleic acid molecule as shown in the respective line in column 5 of Table I (whereby the respective line disclose in column 7 the fine chemical sucrose), application no. 17, preferably the coding region thereof, or a homolog or a fragment thereof, and being depicted in the same respective line as said B3151, or a functional equivalent or a homolog thereof as shown in column 8 of Table I, application no. 17, preferably the coding region thereof, particularly a homolog or functional equivalent as shown in column 8 of Table I B, application no. 17, and being depicted in the same respective line as said B3151, and preferably the activity is increased non-targeted, or
[90866] (b) a polypeptide comprising a polypeptide, a consensus sequence or at least a polypeptide motif as shown in the respective line in column 5 of Table II or in column 8 of Table IV, application no. 17, respectively, and being depicted in the same respective line as said B3151, or a functional equivalent or a homolog thereof as depicted in column 8 of Table II, application no. 17, preferably a homolog or functional equivalent as depicted in column 8 of Table II B, application no. 17, and being depicted in the same respective line as said B3151, and preferably the activity is increased non-targeted, whereby the respective line disclose in column 7 the fine chemical sucrose.

[90867] Accordingly, in one embodiment, the molecule which activity is to be increased in the process of the invention is the gene product with an activity as a “b3151-protein”, preferably it is the molecule of section (a) or (b) of this paragraph.

[90868] In particular, it was observed that in plants, especially in Arabidopsis thaliana, increasing or generating the activity of a gene product non-targeted with the activity of a “b3151-protein”, preferably being encoded by a gene comprising the nucleic acid sequence SEQ ID NO. 42477, preferably the coding region thereof, conferred the production of or the increase in sucrose compared with the wild type control.

[90869] The nucleic acid sequence of B3221 from Escherichia coli, e.g. as shown in the respective line in column 5 of Table I, application no. 17, has been published in B. And the activity of the gene product thereof is the activity of b3221-protein.

[90870] Accordingly, in one embodiment, the process of the present invention for producing fructose in a non-human organism, like a microorganism or a plant or a part thereof, comprises increasing or generating the activity of a gene product with the activity of a gene product conferring the activity of “b3221-protein”, especially from Escherichia coli or its functional equivalent or its homolog, e.g. the increase of
[90871] (a) a gene product of a gene comprising the nucleic acid molecule as shown in the respective line in column 5 of Table I (whereby the respective line disclose in column 7 the fine chemical fructose), application no. 17, preferably the coding region thereof, or a homolog or a fragment thereof, and being depicted in the same respective line as said B3221, or a functional equivalent or a homolog thereof as shown in column 8 of Table I, application no. 17, preferably the coding region thereof, particularly a homolog or functional equivalent as shown in column 8 of Table I B, application no. 17, and being depicted in the same respective line as said B3221, and preferably the activity is increased plastidic, or
[90872] (b) a polypeptide comprising a polypeptide, a consensus sequence or at least a polypeptide motif as shown in the respective line in column 5 of Table II or in column 8 of Table IV, application no. 17, respectively, and being depicted in the same respective line as said B3221, or a functional equivalent or a homolog thereof as depicted in column 8 of Table II, application no. 17, preferably a homolog or functional equivalent as depicted in column 8 of Table II B, application no. 17, and being depicted in the same respective line as said B3221, and preferably the activity is increased plastidic, whereby the respective line disclose in column 7 the fine chemical fructose.

[90873] Accordingly, in one embodiment, the molecule which activity is to be increased in the process of the invention is the gene product with an activity as a “b3221-protein”, preferably it is the molecule of section (a) or (b) of this paragraph.

[90874] In particular, it was observed that in plants, especially in Arabidopsis thaliana, increasing or generating the activity of a gene product plastidic with the activity of a “b3221-protein”, preferably being encoded by a gene comprising the nucleic acid sequence SEQ ID NO. 82510, preferably the coding region thereof, conferred the production of or the increase in fructose compared with the wild type control.

[90875] The nucleic acid sequence of B3221 from Escherichia coli, e.g. as shown in the respective line in column 5 of Table I, application no. 17, has been published in B. And the activity of the gene product thereof is the activity of b3221-protein.

[90876] Accordingly, in one embodiment, the process of the present invention for producing glucose in a non-human organism, like a microorganism or a plant or a part thereof, comprises increasing or generating the activity of a gene product with the activity of a gene product conferring the activity of “b3221-protein”, especially from Escherichia coli or its functional equivalent or its homolog, e.g. the increase of
[90877] (a) a gene product of a gene comprising the nucleic acid molecule as shown in the respective line in column 5 of Table I (whereby the respective line disclose in column 7 the fine chemical glucose), application no. 17, preferably the coding region thereof, or a homolog or a fragment thereof, and being depicted in the same respective line as said B3221, or a functional equivalent or a homolog thereof as shown in column 8 of Table I, application no. 17, preferably the coding region thereof, particularly a homolog or functional equivalent as shown in column 8 of Table I B, application no. 17, and being depicted in the same respective line as said B3221, and preferably the activity is increased plastidic, or
[90878] (b) a polypeptide comprising a polypeptide, a consensus sequence or at least a polypeptide motif as shown in the respective line in column 5 of Table II or in column 8 of Table IV, application no. 17, respectively, and being depicted in the same respective line as said B3221, or a functional equivalent or a homolog thereof as depicted in column 8 of Table II, application no. 17, preferably a homolog or functional equivalent as depicted in column 8 of Table II B, application no. 17, and being depicted in the same respective line as said B3221, and preferably the activity is increased plastidic, whereby the respective line disclose in column 7 the fine chemical glucose.

[90879] Accordingly, in one embodiment, the molecule which activity is to be increased in the process of the invention is the gene product with an activity as a “b3221-protein”, preferably it is the molecule of section (a) or (b) of this paragraph.

[90880] In particular, it was observed that in plants, especially in Arabidopsis thaliana, increasing or generating the activity of a gene product plastidic with the activity of a “b3221-protein”, preferably being encoded by a gene comprising the nucleic acid sequence SEQ ID NO. 82510, preferably the coding region thereof, conferred the production of or the increase in glucose compared with the wild type control.

[90881] The nucleic acid sequence of B3221 from Escherichia coli, e.g. as shown in the respective line in column 5 of Table I, application no. 17, has been published in B. And the activity of the gene product thereof is the activity of b3221-protein.

[90882] Accordingly, in one embodiment, the process of the present invention for producing 3,4,5-trihydroxypentanoic acid in a non-human organism, like a microorganism or a plant or a part thereof, comprises increasing or generating the activity of a gene product with the activity of a gene product conferring the activity of “b3221-protein”, especially from Escherichia coli or its functional equivalent or its homolog, e.g. the increase of
[90883] (a) a gene product of a gene comprising the nucleic acid molecule as shown in the respective line in column 5 of Table I (whereby the respective line disclose in column 7 the fine chemical 3,4,5-trihydroxypentanoic acid), application no. 17, preferably the coding region thereof, or a homolog or a fragment thereof, and being depicted in the same respective line as said B3221, or a functional equivalent or a homolog thereof as shown in column 8 of Table I, application no. 17, preferably the coding region thereof, particularly a homolog or functional equivalent as shown in column 8 of Table I B, application no. 17, and being depicted in the same respective line as said B3221, and preferably the activity is increased plastidic, or
[90884] (b) a polypeptide comprising a polypeptide, a consensus sequence or at least a polypeptide motif as shown in the respective line in column 5 of Table II or in column 8 of Table IV, application no. 17, respectively, and being depicted in the same respective line as said B3221, or a functional equivalent or a homolog thereof as depicted in column 8 of Table II, application no. 17, preferably a homolog or functional equivalent as depicted in column 8 of Table II B, application no. 17, and being depicted in the same respective line as said B3221, and preferably the activity is increased plastidic, whereby the respective line disclose in column 7 the fine chemical 3,4,5-trihydroxypentanoic acid.

[90885] Accordingly, in one embodiment, the molecule which activity is to be increased in the process of the invention is the gene product with an activity as a “b3221-protein”, preferably it is the molecule of section (a) or (b) of this paragraph.

[90886] In particular, it was observed that in plants, especially in Arabidopsis thaliana, increasing or generating the activity of a gene product plastidic with the activity of a “b3221-protein”, preferably being encoded by a gene comprising the nucleic acid sequence SEQ ID NO. 82510, preferably the coding region thereof, conferred the production of or the increase in 3,4,5-trihydroxypentanoic acid compared with the wild type control.

[90887] The nucleic acid sequence of B3246 from Escherichia coli, e.g. as shown in the respective line in column 5 of Table I, application no. 17, has been published in B. And the activity of the gene product thereof is the activity of b3246-protein.

[90888] Accordingly, in one embodiment, the process of the present invention for producing myo-inositol in a non-human organism, like a microorganism or a plant or a part thereof, comprises increasing or generating the activity of a gene product with the activity of a gene product conferring the activity of “b3246-protein”, especially from Escherichia coli or its functional equivalent or its homolog, e.g. the increase of
[90889] (a) a gene product of a gene comprising the nucleic acid molecule as shown in the respective line in column 5 of Table I (whereby the respective line disclose in column 7 the fine chemical myo-inositol), application no. 17, preferably the coding region thereof, or a homolog or a fragment thereof, and being depicted in the same respective line as said B3246, or a functional equivalent or a homolog thereof as shown in column 8 of Table I, application no. 17, preferably the coding region thereof, particularly a homolog or functional equivalent as shown in column 8 of Table I B, application no. 17, and being depicted in the same respective line as said B3246, and preferably the activity is increased non-targeted, or
[90890] (b) a polypeptide comprising a polypeptide, a consensus sequence or at least a polypeptide motif as shown in the respective line in column 5 of Table II or in column 8 of Table IV, application no. 17, respectively, and being depicted in the same respective line as said B3246, or a functional equivalent or a homolog thereof as depicted in column 8 of Table II, application no. 17, preferably a homolog or functional equivalent as depicted in column 8 of Table II B, application no. 17, and being depicted in the same respective line as said B3246, and preferably the activity is increased non-targeted, whereby the respective line disclose in column 7 the fine chemical myo-inositol.

[90891] Accordingly, in one embodiment, the molecule which activity is to be increased in the process of the invention is the gene product with an activity as a “b3246-protein”, preferably it is the molecule of section (a) or (b) of this paragraph.

[90892] In particular, it was observed that in plants, especially in Arabidopsis thaliana, increasing or generating the activity of a gene product non-targeted with the activity of a “b3246-protein”, preferably being encoded by a gene comprising the nucleic acid sequence SEQ ID NO. 9470, preferably the coding region thereof, conferred the production of or the increase in myo-inositol compared with the wild type control.

[90893] The nucleic acid sequence of B3256 from Escherichia coli, e.g. as shown in the respective line in column 5 of Table I, application no. 17, has been published in B. And the activity of the gene product thereof is the activity of acetyl CoA carboxylase.

[90894] Accordingly, in one embodiment, the process of the present invention for producing myo-inositol in a non-human organism, like a microorganism or a plant or a part thereof, comprises increasing or generating the activity of a gene product with the activity of a gene product conferring the activity of “acetyl CoA carboxylase”, especially from Escherichia coli or its functional equivalent or its homolog, e.g. the increase of
[90895] (a) a gene product of a gene comprising the nucleic acid molecule as shown in the respective line in column 5 of Table I (whereby the respective line disclose in column 7 the fine chemical myo-inositol), application no. 17, preferably the coding region thereof, or a homolog or a fragment thereof, and being depicted in the same respective line as said B3256, or a functional equivalent or a homolog thereof as shown in column 8 of Table I, application no. 17, preferably the coding region thereof, particularly a homolog or functional equivalent as shown in column 8 of Table I B, application no. 17, and being depicted in the same respective line as said B3256, and preferably the activity is increased non-targeted, or
[90896] (b) a polypeptide comprising a polypeptide, a consensus sequence or at least a polypeptide motif as shown in the respective line in column 5 of Table II or in column 8 of Table IV, application no. 17, respectively, and being depicted in the same respective line as said B3256, or a functional equivalent or a homolog thereof as depicted in column 8 of Table II, application no. 17, preferably a homolog or functional equivalent as depicted in column 8 of Table II B, application no. 17, and being depicted in the same respective line as said B3256, and preferably the activity is increased non-targeted, whereby the respective line disclose in column 7 the fine chemical myo-inositol.

[90897] Accordingly, in one embodiment, the molecule which activity is to be increased in the process of the invention is the gene product with an activity as a “acetyl CoA carboxylase”, preferably it is the molecule of section (a) or (b) of this paragraph.

[90898] In particular, it was observed that in plants, especially in Arabidopsis thaliana, increasing or generating the activity of a gene product non-targeted with the activity of a “acetyl CoA carboxylase”, preferably being encoded by a gene comprising the nucleic acid sequence SEQ ID NO. 9492, preferably the coding region thereof, conferred the production of or the increase in myo-inositol compared with the wild type control.

[90899] The nucleic acid sequence of B3262 from Escherichia coli, e.g. as shown in the respective line in column 5 of Table I, application no. 17, has been published in B. And the activity of the gene product thereof is the activity of methyltransferase.

[90900] Accordingly, in one embodiment, the process of the present invention for producing fructose in a non-human organism, like a microorganism or a plant or a part thereof, comprises increasing or generating the activity of a gene product with the activity of a gene product conferring the activity of “methyltransferase”, especially from Escherichia coli or its functional equivalent or its homolog, e.g. the increase of
[90901] (a) a gene product of a gene comprising the nucleic acid molecule as shown in the respective line in column 5 of Table I (whereby the respective line disclose in column 7 the fine chemical fructose), application no. 17, preferably the coding region thereof, or a homolog or a fragment thereof, and being depicted in the same respective line as said B3262, or a functional equivalent or a homolog thereof as shown in column 8 of Table I, application no. 17, preferably the coding region thereof, particularly a homolog or functional equivalent as shown in column 8 of Table I B, application no. 17, and being depicted in the same respective line as said B3262, and preferably the activity is increased non-targeted, or
[90902] (b) a polypeptide comprising a polypeptide, a consensus sequence or at least a polypeptide motif as shown in the respective line in column 5 of Table II or in column 8 of Table IV, application no. 17, respectively, and being depicted in the same respective line as said B3262, or a functional equivalent or a homolog thereof as depicted in column 8 of Table II, application no. 17, preferably a homolog or functional equivalent as depicted in column 8 of Table II B, application no. 17, and being depicted in the same respective line as said B3262, and preferably the activity is increased non-targeted, whereby the respective line disclose in column 7 the fine chemical fructose.

[90903] Accordingly, in one embodiment, the molecule which activity is to be increased in the process of the invention is the gene product with an activity as a “methyltransferase”, preferably it is the molecule of section (a) or (b) of this paragraph.

[90904] In particular, it was observed that in plants, especially in Arabidopsis thaliana, increasing or generating the activity of a gene product non-targeted with the activity of a “methyltransferase”, preferably being encoded by a gene comprising the nucleic acid sequence SEQ ID NO. 42502, preferably the coding region thereof, conferred the production of or the increase in fructose compared with the wild type control.

[90905] The nucleic acid sequence of B3262 from Escherichia coli, e.g. as shown in the respective line in column 5 of Table I, application no. 17, has been published in B. And the activity of the gene product thereof is the activity of methyltransferase.

[90906] Accordingly, in one embodiment, the process of the present invention for producing glucose in a non-human organism, like a microorganism or a plant or a part thereof, comprises increasing or generating the activity of a gene product with the activity of a gene product conferring the activity of “methyltransferase”, especially from Escherichia coli or its functional equivalent or its homolog, e.g. the increase of
[90907] (a) a gene product of a gene comprising the nucleic acid molecule as shown in the respective line in column 5 of Table I (whereby the respective line disclose in column 7 the fine chemical glucose), application no. 17, preferably the coding region thereof, or a homolog or a fragment thereof, and being depicted in the same respective line as said B3262, or a functional equivalent or a homolog thereof as shown in column 8 of Table I, application no. 17, preferably the coding region thereof, particularly a homolog or functional equivalent as shown in column 8 of Table I B, application no. 17, and being depicted in the same respective line as said B3262, and preferably the activity is increased non-targeted, or
[90908] (b) a polypeptide comprising a polypeptide, a consensus sequence or at least a polypeptide motif as shown in the respective line in column 5 of Table II or in column 8 of Table IV, application no. 17, respectively, and being depicted in the same respective line as said B3262, or a functional equivalent or a homolog thereof as depicted in column 8 of Table II, application no. 17, preferably a homolog or functional equivalent as depicted in column 8 of Table II B, application no. 17, and being depicted in the same respective line as said B3262, and preferably the activity is increased non-targeted, whereby the respective line disclose in column 7 the fine chemical glucose.

[90909] Accordingly, in one embodiment, the molecule which activity is to be increased in the process of the invention is the gene product with an activity as a “methyltransferase”, preferably it is the molecule of section (a) or (b) of this paragraph.

[90910] In particular, it was observed that in plants, especially in Arabidopsis thaliana, increasing or generating the activity of a gene product non-targeted with the activity of a “methyltransferase”, preferably being encoded by a gene comprising the nucleic acid sequence SEQ ID NO. 42502, preferably the coding region thereof, conferred the production of or the increase in glucose compared with the wild type control.

[90911] The nucleic acid sequence of B3262 from Escherichia coli, e.g. as shown in the respective line in column 5 of Table I, application no. 17, has been published in B. And the activity of the gene product thereof is the activity of methyltransferase.

[90912] Accordingly, in one embodiment, the process of the present invention for producing glucose-1-phosphate in a non-human organism, like a microorganism or a plant or a part thereof, comprises increasing or generating the activity of a gene product with the activity of a gene product conferring the activity of “methyltransferase”, especially from Escherichia coli or its functional equivalent or its homolog, e.g. the increase of
[90913] (a) a gene product of a gene comprising the nucleic acid molecule as shown in the respective line in column 5 of Table I (whereby the respective line disclose in column 7 the fine chemical glucose-1-phosphate), application no. 17, preferably the coding region thereof, or a homolog or a fragment thereof, and being depicted in the same respective line as said B3262, or a functional equivalent or a homolog thereof as shown in column 8 of Table I, application no. 17, preferably the coding region thereof, particularly a homolog or functional equivalent as shown in column 8 of Table I B, application no. 17, and being depicted in the same respective line as said B3262, and preferably the activity is increased non-targeted, or
[90914] (b) a polypeptide comprising a polypeptide, a consensus sequence or at least a polypeptide motif as shown in the respective line in column 5 of Table II or in column 8 of Table IV, application no. 17, respectively, and being depicted in the same respective line as said B3262, or a functional equivalent or a homolog thereof as depicted in column 8 of Table II, application no. 17, preferably a homolog or functional equivalent as depicted in column 8 of Table II B, application no. 17, and being depicted in the same respective line as said B3262, and preferably the activity is increased non-targeted, whereby the respective line disclose in column 7 the fine chemical glucose-1-phosphate.

[90915] Accordingly, in one embodiment, the molecule which activity is to be increased in the process of the invention is the gene product with an activity as a “methyltransferase”, preferably it is the molecule of section (a) or (b) of this paragraph.

[90916] In particular, it was observed that in plants, especially in Arabidopsis thaliana, increasing or generating the activity of a gene product non-targeted with the activity of a “methyltransferase”, preferably being encoded by a gene comprising the nucleic acid sequence SEQ ID NO. 42502, preferably the coding region thereof, conferred the production of or the increase in glucose-1-phosphate compared with the wild type control.

[90917] The nucleic acid sequence of B3262 from Escherichia coli, e.g. as shown in the respective line in column 5 of Table I, application no. 17, has been published in B. And the activity of the gene product thereof is the activity of methyltransferase.

[90918] Accordingly, in one embodiment, the process of the present invention for producing raffinose in a non-human organism, like a microorganism or a plant or a part thereof, comprises increasing or generating the activity of a gene product with the activity of a gene product conferring the activity of “methyltransferase”, especially from Escherichia coli or its functional equivalent or its homolog, e.g. the increase of
[90919] (a) a gene product of a gene comprising the nucleic acid molecule as shown in the respective line in column 5 of Table I (whereby the respective line disclose in column 7 the fine chemical raffinose), application no. 17, preferably the coding region thereof, or a homolog or a fragment thereof, and being depicted in the same respective line as said B3262, or a functional equivalent or a homolog thereof as shown in column 8 of Table I, application no. 17, preferably the coding region thereof, particularly a homolog or functional equivalent as shown in column 8 of Table I B, application no. 17, and being depicted in the same respective line as said B3262, and preferably the activity is increased non-targeted, or
[90920] (b) a polypeptide comprising a polypeptide, a consensus sequence or at least a polypeptide motif as shown in the respective line in column 5 of Table II or in column 8 of Table IV, application no. 17, respectively, and being depicted in the same respective line as said B3262, or a functional equivalent or a homolog thereof as depicted in column 8 of Table II, application no. 17, preferably a homolog or functional equivalent as depicted in column 8 of Table II B, application no. 17, and being depicted in the same respective line as said B3262, and preferably the activity is increased non-targeted, whereby the respective line disclose in column 7 the fine chemical raffinose.

[90921] Accordingly, in one embodiment, the molecule which activity is to be increased in the process of the invention is the gene product with an activity as a “methyltransferase”, preferably it is the molecule of section (a) or (b) of this paragraph.

[90922] In particular, it was observed that in plants, especially in Arabidopsis thaliana, increasing or generating the activity of a gene product non-targeted with the activity of a “methyltransferase”, preferably being encoded by a gene comprising the nucleic acid sequence SEQ ID NO. 42502, preferably the coding region thereof, conferred the production of or the increase in raffinose compared with the wild type control.

[90923] The nucleic acid sequence of B3262 from Escherichia coli, e.g. as shown in the respective line in column 5 of Table I, application no. 17, has been published in B. And the activity of the gene product thereof is the activity of methyltransferase.

[90924] Accordingly, in one embodiment, the process of the present invention for producing sucrose in a non-human organism, like a microorganism or a plant or a part thereof, comprises increasing or generating the activity of a gene product with the activity of a gene product conferring the activity of “methyltransferase”, especially from Escherichia coli or its functional equivalent or its homolog, e.g. the increase of
[90925] (a) a gene product of a gene comprising the nucleic acid molecule as shown in the respective line in column 5 of Table I (whereby the respective line disclose in column 7 the fine chemical sucrose), application no. 17, preferably the coding region thereof, or a homolog or a fragment thereof, and being depicted in the same respective line as said B3262, or a functional equivalent or a homolog thereof as shown in column 8 of Table I, application no. 17, preferably the coding region thereof, particularly a homolog or functional equivalent as shown in column 8 of Table I B, application no. 17, and being depicted in the same respective line as said B3262, and preferably the activity is increased non-targeted, or
[90926] (b) a polypeptide comprising a polypeptide, a consensus sequence or at least a polypeptide motif as shown in the respective line in column 5 of Table II or in column 8 of Table IV, application no. 17, respectively, and being depicted in the same respective line as said B3262, or a functional equivalent or a homolog thereof as depicted in column 8 of Table II, application no. 17, preferably a homolog or functional equivalent as depicted in column 8 of Table II B, application no. 17, and being depicted in the same respective line as said B3262, and preferably the activity is increased non-targeted, whereby the respective line disclose in column 7 the fine chemical sucrose.

[90927] Accordingly, in one embodiment, the molecule which activity is to be increased in the process of the invention is the gene product with an activity as a “methyltransferase”, preferably it is the molecule of section (a) or (b) of this paragraph.

[90928] In particular, it was observed that in plants, especially in Arabidopsis thaliana, increasing or generating the activity of a gene product non-targeted with the activity of a “methyltransferase”, preferably being encoded by a gene comprising the nucleic acid sequence SEQ ID NO. 42502, preferably the coding region thereof, conferred the production of or the increase in sucrose compared with the wild type control.

[90929] The nucleic acid sequence of B3337 from Escherichia coli, e.g. as shown in the respective line in column 5 of Table I, application no. 17, has been published in B. And the activity of the gene product thereof is the activity of ferredoxin.

[90930] Accordingly, in one embodiment, the process of the present invention for producing glucose in a non-human organism, like a microorganism or a plant or a part thereof, comprises increasing or generating the activity of a gene product with the activity of a gene product conferring the activity of “ferredoxin”, especially from Escherichia coli or its functional equivalent or its homolog, e.g. the increase of
[90931] (a) a gene product of a gene comprising the nucleic acid molecule as shown in the respective line in column 5 of Table I (whereby the respective line disclose in column 7 the fine chemical glucose), application no. 17, preferably the coding region thereof, or a homolog or a fragment thereof, and being depicted in the same respective line as said B3337, or a functional equivalent or a homolog thereof as shown in column 8 of Table I, application no. 17, preferably the coding region thereof, particularly a homolog or functional equivalent as shown in column 8 of Table I B, application no. 17, and being depicted in the same respective line as said B3337, and preferably the activity is increased plastidic, or
[90932] (b) a polypeptide comprising a polypeptide, a consensus sequence or at least a polypeptide motif as shown in the respective line in column 5 of Table II or in column 8 of Table IV, application no. 17, respectively, and being depicted in the same respective line as said B3337, or a functional equivalent or a homolog thereof as depicted in column 8 of Table II, application no. 17, preferably a homolog or functional equivalent as depicted in column 8 of Table II B, application no. 17, and being depicted in the same respective line as said B3337, and preferably the activity is increased plastidic, whereby the respective line disclose in column 7 the fine chemical glucose.

[90933] Accordingly, in one embodiment, the molecule which activity is to be increased in the process of the invention is the gene product with an activity as a “ferredoxin”, preferably it is the molecule of section (a) or (b) of this paragraph.

[90934] In particular, it was observed that in plants, especially in Arabidopsis thaliana, increasing or generating the activity of a gene product plastidic with the activity of a “ferredoxin”, preferably being encoded by a gene comprising the nucleic acid sequence SEQ ID NO. 146364, preferably the coding region thereof, conferred the production of or the increase in glucose compared with the wild type control.

[90935] The nucleic acid sequence of B3346 from Escherichia coli, e.g. as shown in the respective line in column 5 of Table I, application no. 17, has been published in B. And the activity of the gene product thereof is the activity of b3346-protein.

[90936] Accordingly, in one embodiment, the process of the present invention for producing myo-inositol in a non-human organism, like a microorganism or a plant or a part thereof, comprises increasing or generating the activity of a gene product with the activity of a gene product conferring the activity of “b3346-protein”, especially from Escherichia coli or its functional equivalent or its homolog, e.g. the increase of
[90937] (a) a gene product of a gene comprising the nucleic acid molecule as shown in the respective line in column 5 of Table I (whereby the respective line disclose in column 7 the fine chemical myo-inositol), application no. 17, preferably the coding region thereof, or a homolog or a fragment thereof, and being depicted in the same respective line as said B3346, or a functional equivalent or a homolog thereof as shown in column 8 of Table I, application no. 17, preferably the coding region thereof, particularly a homolog or functional equivalent as shown in column 8 of Table I B, application no. 17, and being depicted in the same respective line as said B3346, and preferably the activity is increased non-targeted, or
[90938] (b) a polypeptide comprising a polypeptide, a consensus sequence or at least a polypeptide motif as shown in the respective line in column 5 of Table II or in column 8 of Table IV, application no. 17, respectively, and being depicted in the same respective line as said B3346, or a functional equivalent or a homolog thereof as depicted in column 8 of Table II, application no. 17, preferably a homolog or functional equivalent as depicted in column 8 of Table II B, application no. 17, and being depicted in the same respective line as said B3346, and preferably the activity is increased non-targeted, whereby the respective line disclose in column 7 the fine chemical myo-inositol.

[90939] Accordingly, in one embodiment, the molecule which activity is to be increased in the process of the invention is the gene product with an activity as a “b3346-protein”, preferably it is the molecule of section (a) or (b) of this paragraph.

[90940] In particular, it was observed that in plants, especially in Arabidopsis thaliana, increasing or generating the activity of a gene product non-targeted with the activity of a “b3346-protein”, preferably being encoded by a gene comprising the nucleic acid sequence SEQ ID NO. 10104, preferably the coding region thereof, conferred the production of or the increase in myo-inositol compared with the wild type control.

[90941] The nucleic acid sequence of B3346 from Escherichia coli, e.g. as shown in the respective line in column 5 of Table I, application no. 17, has been published in B. And the activity of the gene product thereof is the activity of b3346-protein.

[90942] Accordingly, in one embodiment, the process of the present invention for producing raffinose in a non-human organism, like a microorganism or a plant or a part thereof, comprises increasing or generating the activity of a gene product with the activity of a gene product conferring the activity of “b3346-protein”, especially from Escherichia coli or its functional equivalent or its homolog, e.g. the increase of
[90943] (a) a gene product of a gene comprising the nucleic acid molecule as shown in the respective line in column 5 of Table I (whereby the respective line disclose in column 7 the fine chemical raffinose), application no. 17, preferably the coding region thereof, or a homolog or a fragment thereof, and being depicted in the same respective line as said B3346, or a functional equivalent or a homolog thereof as shown in column 8 of Table I, application no. 17, preferably the coding region thereof, particularly a homolog or functional equivalent as shown in column 8 of Table I B, application no. 17, and being depicted in the same respective line as said B3346, and preferably the activity is increased non-targeted, or
[90944] (b) a polypeptide comprising a polypeptide, a consensus sequence or at least a polypeptide motif as shown in the respective line in column 5 of Table II or in column 8 of Table IV, application no. 17, respectively, and being depicted in the same respective line as said B3346, or a functional equivalent or a homolog thereof as depicted in column 8 of Table II, application no. 17, preferably a homolog or functional equivalent as depicted in column 8 of Table II B, application no. 17, and being depicted in the same respective line as said B3346, and preferably the activity is increased non-targeted, whereby the respective line disclose in column 7 the fine chemical raffinose.

[90945] Accordingly, in one embodiment, the molecule which activity is to be increased in the process of the invention is the gene product with an activity as a “b3346-protein”, preferably it is the molecule of section (a) or (b) of this paragraph.

[90946] In particular, it was observed that in plants, especially in Arabidopsis thaliana, increasing or generating the activity of a gene product non-targeted with the activity of a “b3346-protein”, preferably being encoded by a gene comprising the nucleic acid sequence SEQ ID NO. 10104, preferably the coding region thereof, conferred the production of or the increase in raffinose compared with the wild type control.

[90947] The nucleic acid sequence of B3346 from Escherichia coli, e.g. as shown in the respective line in column 5 of Table I, application no. 17, has been published in B. And the activity of the gene product thereof is the activity of b3346-protein.

[90948] Accordingly, in one embodiment, the process of the present invention for producing 3,4,5-trihydroxypentanoic acid in a non-human organism, like a microorganism or a plant or a part thereof, comprises increasing or generating the activity of a gene product with the activity of a gene product conferring the activity of “b3346-protein”, especially from Escherichia coli or its functional equivalent or its homolog, e.g. the increase of
[90949] (a) a gene product of a gene comprising the nucleic acid molecule as shown in the respective line in column 5 of Table I (whereby the respective line disclose in column 7 the fine chemical 3,4,5-trihydroxypentanoic acid), application no. 17, preferably the coding region thereof, or a homolog or a fragment thereof, and being depicted in the same respective line as said B3346, or a functional equivalent or a homolog thereof as shown in column 8 of Table I, application no. 17, preferably the coding region thereof, particularly a homolog or functional equivalent as shown in column 8 of Table I B, application no. 17, and being depicted in the same respective line as said B3346, and preferably the activity is increased non-targeted, or
[90950] (b) a polypeptide comprising a polypeptide, a consensus sequence or at least a polypeptide motif as shown in the respective line in column 5 of Table II or in column 8 of Table IV, application no. 17, respectively, and being depicted in the same respective line as said B3346, or a functional equivalent or a homolog thereof as depicted in column 8 of Table II, application no. 17, preferably a homolog or functional equivalent as depicted in column 8 of Table II B, application no. 17, and being depicted in the same respective line as said B3346, and preferably the activity is increased non-targeted, whereby the respective line disclose in column 7 the fine chemical 3,4,5-trihydroxypentanoic acid.

[90951] Accordingly, in one embodiment, the molecule which activity is to be increased in the process of the invention is the gene product with an activity as a “b3346-protein”, preferably it is the molecule of section (a) or (b) of this paragraph.

[90952] In particular, it was observed that in plants, especially in Arabidopsis thaliana, increasing or generating the activity of a gene product non-targeted with the activity of a “b3346-protein”, preferably being encoded by a gene comprising the nucleic acid sequence SEQ ID NO. 10104, preferably the coding region thereof, conferred the production of or the increase in 3,4,5-trihydroxypentanoic acid compared with the wild type control.

[90953] The nucleic acid sequence of B3403 from Escherichia coli, e.g. as shown in the respective line in column 5 of Table I, application no. 17, has been published in B. And the activity of the gene product thereof is the activity of phosphoenolpyruvate carboxykinase.

[90954] Accordingly, in one embodiment, the process of the present invention for producing fructose in a non-human organism, like a microorganism or a plant or a part thereof, comprises increasing or generating the activity of a gene product with the activity of a gene product conferring the activity of “phosphoenolpyruvate carboxykinase”, especially from Escherichia coli or its functional equivalent or its homolog, e.g. the increase of
[90955] (a) a gene product of a gene comprising the nucleic acid molecule as shown in the respective line in column 5 of Table I (whereby the respective line disclose in column 7 the fine chemical fructose), application no. 17, preferably the coding region thereof, or a homolog or a fragment thereof, and being depicted in the same respective line as said B3403, or a functional equivalent or a homolog thereof as shown in column 8 of Table I, application no. 17, preferably the coding region thereof, particularly a homolog or functional equivalent as shown in column 8 of Table I B, application no. 17, and being depicted in the same respective line as said B3403, and preferably the activity is increased non-targeted, or
[90956] (b) a polypeptide comprising a polypeptide, a consensus sequence or at least a polypeptide motif as shown in the respective line in column 5 of Table II or in column 8 of Table IV, application no. 17, respectively, and being depicted in the same respective line as said B3403, or a functional equivalent or a homolog thereof as depicted in column 8 of Table II, application no. 17, preferably a homolog or functional equivalent as depicted in column 8 of Table II B, application no. 17, and being depicted in the same respective line as said B3403, and preferably the activity is increased non-targeted, whereby the respective line disclose in column 7 the fine chemical fructose.

[90957] Accordingly, in one embodiment, the molecule which activity is to be increased in the process of the invention is the gene product with an activity as a “phosphoenolpyruvate carboxykinase”, preferably it is the molecule of section (a) or (b) of this paragraph.

[90958] In particular, it was observed that in plants, especially in Arabidopsis thaliana, increasing or generating the activity of a gene product non-targeted with the activity of a “phosphoenolpyruvate carboxykinase”, preferably being encoded by a gene comprising the nucleic acid sequence SEQ ID NO. 82866, preferably the coding region thereof, conferred the production of or the increase in fructose compared with the wild type control.

[90959] The nucleic acid sequence of B3403 from Escherichia coli, e.g. as shown in the respective line in column 5 of Table I, application no. 17, has been published in B. And the activity of the gene product thereof is the activity of phosphoenolpyruvate carboxykinase.

[90960] Accordingly, in one embodiment, the process of the present invention for producing glucose in a non-human organism, like a microorganism or a plant or a part thereof, comprises increasing or generating the activity of a gene product with the activity of a gene product conferring the activity of “phosphoenolpyruvate carboxykinase”, especially from Escherichia coli or its functional equivalent or its homolog, e.g. the increase of
[90961] (a) a gene product of a gene comprising the nucleic acid molecule as shown in the respective line in column 5 of Table I (whereby the respective line disclose in column 7 the fine chemical glucose), application no. 17, preferably the coding region thereof, or a homolog or a fragment thereof, and being depicted in the same respective line as said B3403, or a functional equivalent or a homolog thereof as shown in column 8 of Table I, application no. 17, preferably the coding region thereof, particularly a homolog or functional equivalent as shown in column 8 of Table I B, application no. 17, and being depicted in the same respective line as said B3403, and preferably the activity is increased non-targeted, or
[90962] (b) a polypeptide comprising a polypeptide, a consensus sequence or at least a polypeptide motif as shown in the respective line in column 5 of Table II or in column 8 of Table IV, application no. 17, respectively, and being depicted in the same respective line as said B3403, or a functional equivalent or a homolog thereof as depicted in column 8 of Table II, application no. 17, preferably a homolog or functional equivalent as depicted in column 8 of Table II B, application no. 17, and being depicted in the same respective line as said B3403, and preferably the activity is increased non-targeted, whereby the respective line disclose in column 7 the fine chemical glucose.

[90963] Accordingly, in one embodiment, the molecule which activity is to be increased in the process of the invention is the gene product with an activity as a “phosphoenolpyruvate carboxykinase”, preferably it is the molecule of section (a) or (b) of this paragraph.

[90964] In particular, it was observed that in plants, especially in Arabidopsis thaliana, increasing or generating the activity of a gene product non-targeted with the activity of a “phosphoenolpyruvate carboxykinase”, preferably being encoded by a gene comprising the nucleic acid sequence SEQ ID NO. 82866, preferably the coding region thereof, conferred the production of or the increase in glucose compared with the wild type control.

[90965] The nucleic acid sequence of B3427 from Escherichia coli, e.g. as shown in the respective line in column 5 of Table I, application no. 17, has been published in B. And the activity of the gene product thereof is the activity of B3427-protein.

[90966] Accordingly, in one embodiment, the process of the present invention for producing 3,4,5-trihydroxypentanoic acid in a non-human organism, like a microorganism or a plant or a part thereof, comprises increasing or generating the activity of a gene product with the activity of a gene product conferring the activity of “B3427-protein”, especially from Escherichia coli or its functional equivalent or its homolog, e.g. the increase of
[90967] (a) a gene product of a gene comprising the nucleic acid molecule as shown in the respective line in column 5 of Table I (whereby the respective line disclose in column 7 the fine chemical 3,4,5-trihydroxypentanoic acid), application no. 17, preferably the coding region thereof, or a homolog or a fragment thereof, and being depicted in the same respective line as said B3427, or a functional equivalent or a homolog thereof as shown in column 8 of Table I, application no. 17, preferably the coding region thereof, particularly a homolog or functional equivalent as shown in column 8 of Table I B, application no. 17, and being depicted in the same respective line as said B3427, and preferably the activity is increased non-targeted, or
[90968] (b) a polypeptide comprising a polypeptide, a consensus sequence or at least a polypeptide motif as shown in the respective line in column 5 of Table II or in column 8 of Table IV, application no. 17, respectively, and being depicted in the same respective line as said B3427, or a functional equivalent or a homolog thereof as depicted in column 8 of Table II, application no. 17, preferably a homolog or functional equivalent as depicted in column 8 of Table II B, application no. 17, and being depicted in the same respective line as said B3427, and preferably the activity is increased non-targeted, whereby the respective line disclose in column 7 the fine chemical 3,4,5-trihydroxypentanoic acid.

[90969] Accordingly, in one embodiment, the molecule which activity is to be increased in the process of the invention is the gene product with an activity as a “B3427-protein”, preferably it is the molecule of section (a) or (b) of this paragraph.

[90970] In particular, it was observed that in plants, especially in Arabidopsis thaliana, increasing or generating the activity of a gene product non-targeted with the activity of a “B3427-protein”, preferably being encoded by a gene comprising the nucleic acid sequence SEQ ID NO. 42579, preferably the coding region thereof, conferred the production of or the increase in 3,4,5-trihydroxypentanoic acid compared with the wild type control.

[90971] The nucleic acid sequence of B3429 from Escherichia coli, e.g. as shown in the respective line in column 5 of Table I, application no. 17, has been published in B. And the activity of the gene product thereof is the activity of glycogen synthase.

[90972] Accordingly, in one embodiment, the process of the present invention for producing fructose in a non-human organism, like a microorganism or a plant or a part thereof, comprises increasing or generating the activity of a gene product with the activity of a gene product conferring the activity of “glycogen synthase”, especially from Escherichia coli or its functional equivalent or its homolog, e.g. the increase of
[90973] (a) a gene product of a gene comprising the nucleic acid molecule as shown in the respective line in column 5 of Table I (whereby the respective line disclose in column 7 the fine chemical fructose), application no. 17, preferably the coding region thereof, or a homolog or a fragment thereof, and being depicted in the same respective line as said B3429, or a functional equivalent or a homolog thereof as shown in column 8 of Table I, application no. 17, preferably the coding region thereof, particularly a homolog or functional equivalent as shown in column 8 of Table I B, application no. 17, and being depicted in the same respective line as said B3429, and preferably the activity is increased mitochondrial, or
[90974] (b) a polypeptide comprising a polypeptide, a consensus sequence or at least a polypeptide motif as shown in the respective line in column 5 of Table II or in column 8 of Table IV, application no. 17, respectively, and being depicted in the same respective line as said B3429, or a functional equivalent or a homolog thereof as depicted in column 8 of Table II, application no. 17, preferably a homolog or functional equivalent as depicted in column 8 of Table II B, application no. 17, and being depicted in the same respective line as said B3429, and preferably the activity is increased mitochondrial, whereby the respective line disclose in column 7 the fine chemical fructose.

[90975] Accordingly, in one embodiment, the molecule which activity is to be increased in the process of the invention is the gene product with an activity as a “glycogen synthase”, preferably it is the molecule of section (a) or (b) of this paragraph.

[90976] In particular, it was observed that in plants, especially in Arabidopsis thaliana, increasing or generating the activity of a gene product mitochondrial with the activity of a “glycogen synthase”, preferably being encoded by a gene comprising the nucleic acid sequence SEQ ID NO. 94051, preferably the coding region thereof, conferred the production of or the increase in fructose compared with the wild type control.

[90977] The nucleic acid sequence of B3429 from Escherichia coli, e.g. as shown in the respective line in column 5 of Table I, application no. 17, has been published in B. And the activity of the gene product thereof is the activity of glycogen synthase.

[90978] Accordingly, in one embodiment, the process of the present invention for producing glucose in a non-human organism, like a microorganism or a plant or a part thereof, comprises increasing or generating the activity of a gene product with the activity of a gene product conferring the activity of “glycogen synthase”, especially from Escherichia coli or its functional equivalent or its homolog, e.g. the increase of
[90979] (a) a gene product of a gene comprising the nucleic acid molecule as shown in the respective line in column 5 of Table I (whereby the respective line disclose in column 7 the fine chemical glucose), application no. 17, preferably the coding region thereof, or a homolog or a fragment thereof, and being depicted in the same respective line as said B3429, or a functional equivalent or a homolog thereof as shown in column 8 of Table I, application no. 17, preferably the coding region thereof, particularly a homolog or functional equivalent as shown in column 8 of Table I B, application no. 17, and being depicted in the same respective line as said B3429, and preferably the activity is increased mitochondrial, or
[90980] (b) a polypeptide comprising a polypeptide, a consensus sequence or at least a polypeptide motif as shown in the respective line in column 5 of Table II or in column 8 of Table IV, application no. 17, respectively, and being depicted in the same respective line as said B3429, or a functional equivalent or a homolog thereof as depicted in column 8 of Table II, application no. 17, preferably a homolog or functional equivalent as depicted in column 8 of Table II B, application no. 17, and being depicted in the same respective line as said B3429, and preferably the activity is increased mitochondrial, whereby the respective line disclose in column 7 the fine chemical glucose.

[90981] Accordingly, in one embodiment, the molecule which activity is to be increased in the process of the invention is the gene product with an activity as a “glycogen synthase”, preferably it is the molecule of section (a) or (b) of this paragraph.

[90982] In particular, it was observed that in plants, especially in Arabidopsis thaliana, increasing or generating the activity of a gene product mitochondrial with the activity of a “glycogen synthase”, preferably being encoded by a gene comprising the nucleic acid sequence SEQ ID NO. 94051, preferably the coding region thereof, conferred the production of or the increase in glucose compared with the wild type control.

[90983] The nucleic acid sequence of B3442 from Escherichia coli, e.g. as shown in the respective line in column 5 of Table I, application no. 17, has been published in B. And the activity of the gene product thereof is the activity of b3442-protein.

[90984] Accordingly, in one embodiment, the process of the present invention for producing myo-inositol in a non-human organism, like a microorganism or a plant or a part thereof, comprises increasing or generating the activity of a gene product with the activity of a gene product conferring the activity of “b3442-protein”, especially from Escherichia coli or its functional equivalent or its homolog, e.g. the increase of
[90985] (a) a gene product of a gene comprising the nucleic acid molecule as shown in the respective line in column 5 of Table I (whereby the respective line disclose in column 7 the fine chemical myo-inositol), application no. 17, preferably the coding region thereof, or a homolog or a fragment thereof, and being depicted in the same respective line as said B3442, or a functional equivalent or a homolog thereof as shown in column 8 of Table I, application no. 17, preferably the coding region thereof, particularly a homolog or functional equivalent as shown in column 8 of Table I B, application no. 17, and being depicted in the same respective line as said B3442, and preferably the activity is increased non-targeted, or
[90986] (b) a polypeptide comprising a polypeptide, a consensus sequence or at least a polypeptide motif as shown in the respective line in column 5 of Table II or in column 8 of Table IV, application no. 17, respectively, and being depicted in the same respective line as said B3442, or a functional equivalent or a homolog thereof as depicted in column 8 of Table II, application no. 17, preferably a homolog or functional equivalent as depicted in column 8 of Table II B, application no. 17, and being depicted in the same respective line as said B3442, and preferably the activity is increased non-targeted, whereby the respective line disclose in column 7 the fine chemical myo-inositol.

[90987] Accordingly, in one embodiment, the molecule which activity is to be increased in the process of the invention is the gene product with an activity as a “b3442-protein”, preferably it is the molecule of section (a) or (b) of this paragraph.

[90988] In particular, it was observed that in plants, especially in Arabidopsis thaliana, increasing or generating the activity of a gene product non-targeted with the activity of a “b3442-protein”, preferably being encoded by a gene comprising the nucleic acid sequence SEQ ID NO. 94380, preferably the coding region thereof, conferred the production of or the increase in myo-inositol compared with the wild type control.

[90989] The nucleic acid sequence of B3443 from Escherichia coli, e.g. as shown in the respective line in column 5 of Table I, application no. 17, has been published in B. And the activity of the gene product thereof is the activity of B3443-protein.

[90990] Accordingly, in one embodiment, the process of the present invention for producing 3,4,5-trihydroxypentanoic acid in a non-human organism, like a microorganism or a plant or a part thereof, comprises increasing or generating the activity of a gene product with the activity of a gene product conferring the activity of “B3443-protein”, especially from Escherichia coli or its functional equivalent or its homolog, e.g. the increase of
[90991] (a) a gene product of a gene comprising the nucleic acid molecule as shown in the respective line in column 5 of Table I (whereby the respective line disclose in column 7 the fine chemical 3,4,5-trihydroxypentanoic acid), application no. 17, preferably the coding region thereof, or a homolog or a fragment thereof, and being depicted in the same respective line as said B3443, or a functional equivalent or a homolog thereof as shown in column 8 of Table I, application no. 17, preferably the coding region thereof, particularly a homolog or functional equivalent as shown in column 8 of Table I B, application no. 17, and being depicted in the same respective line as said B3443, and preferably the activity is increased plastidic, or
[90992] (b) a polypeptide comprising a polypeptide, a consensus sequence or at least a polypeptide motif as shown in the respective line in column 5 of Table II or in column 8 of Table IV, application no. 17, respectively, and being depicted in the same respective line as said B3443, or a functional equivalent or a homolog thereof as depicted in column 8 of Table II, application no. 17, preferably a homolog or functional equivalent as depicted in column 8 of Table II B, application no. 17, and being depicted in the same respective line as said B3443, and preferably the activity is increased plastidic, whereby the respective line disclose in column 7 the fine chemical 3,4,5-trihydroxypentanoic acid.

[90993] Accordingly, in one embodiment, the molecule which activity is to be increased in the process of the invention is the gene product with an activity as a “B3443-protein”, preferably it is the molecule of section (a) or (b) of this paragraph.

[90994] In particular, it was observed that in plants, especially in Arabidopsis thaliana, increasing or generating the activity of a gene product plastidic with the activity of a “B3443-protein”, preferably being encoded by a gene comprising the nucleic acid sequence SEQ ID NO. 146440, preferably the coding region thereof, conferred the production of or the increase in 3,4,5-trihydroxypentanoic acid compared with the wild type control.

[90995] The nucleic acid sequence of B3451 from Escherichia coli, e.g. as shown in the respective line in column 5 of Table I, application no. 17, has been published in B. And the activity of the gene product thereof is the activity of sn-glycerol-3-phosphate transport system permease protein.

[90996] Accordingly, in one embodiment, the process of the present invention for producing saccharic acid in a non-human organism, like a microorganism or a plant or a part thereof, comprises increasing or generating the activity of a gene product with the activity of a gene product conferring the activity of “sn-glycerol-3-phosphate transport system permease protein”, especially from Escherichia coli or its functional equivalent or its homolog, e.g. the increase of
[90997] (a) a gene product of a gene comprising the nucleic acid molecule as shown in the respective line in column 5 of Table I (whereby the respective line disclose in column 7 the fine chemical saccharic acid), application no. 17, preferably the coding region thereof, or a homolog or a fragment thereof, and being depicted in the same respective line as said B3451, or a functional equivalent or a homolog thereof as shown in column 8 of Table I, application no. 17, preferably the coding region thereof, particularly a homolog or functional equivalent as shown in column 8 of Table I B, application no. 17, and being depicted in the same respective line as said B3451, and preferably the activity is increased plastidic, or
[90998] (b) a polypeptide comprising a polypeptide, a consensus sequence or at least a polypeptide motif as shown in the respective line in column 5 of Table II or in column 8 of Table IV, application no. 17, respectively, and being depicted in the same respective line as said B3451, or a functional equivalent or a homolog thereof as depicted in column 8 of Table II, application no. 17, preferably a homolog or functional equivalent as depicted in column 8 of Table II B, application no. 17, and being depicted in the same respective line as said B3451, and preferably the activity is increased plastidic, whereby the respective line disclose in column 7 the fine chemical saccharic acid.

[90999] Accordingly, in one embodiment, the molecule which activity is to be increased in the process of the invention is the gene product with an activity as a “sn-glycerol-3-phosphate transport system permease protein”, preferably it is the molecule of section (a) or (b) of this paragraph.

[91000] In particular, it was observed that in plants, especially in Arabidopsis thaliana, increasing or generating the activity of a gene product plastidic with the activity of a “sn-glycerol-3-phosphate transport system permease protein”, preferably being encoded by a gene comprising the nucleic acid sequence SEQ ID NO. 116172, preferably the coding region thereof, conferred the production of or the increase in saccharic acid compared with the wild type control.

[91001] The nucleic acid sequence of B3457 from Escherichia coli, e.g. as shown in the respective line in column 5 of Table I, application no. 17, has been published in B. And the activity of the gene product thereof is the activity of high-affinity branched-chain amino acid transport protein.

[91002] Accordingly, in one embodiment, the process of the present invention for producing glucose-1-phosphate in a non-human organism, like a microorganism or a plant or a part thereof, comprises increasing or generating the activity of a gene product with the activity of a gene product conferring the activity of “high-affinity branched-chain amino acid transport protein”, especially from Escherichia coli or its functional equivalent or its homolog, e.g. the increase of
[91003] (a) a gene product of a gene comprising the nucleic acid molecule as shown in the respective line in column 5 of Table I (whereby the respective line disclose in column 7 the fine chemical glucose-1-phosphate), application no. 17, preferably the coding region thereof, or a homolog or a fragment thereof, and being depicted in the same respective line as said B3457, or a functional equivalent or a homolog thereof as shown in column 8 of Table I, application no. 17, preferably the coding region thereof, particularly a homolog or functional equivalent as shown in column 8 of Table I B, application no. 17, and being depicted in the same respective line as said B3457, and preferably the activity is increased non-targeted, or
[91004] (b) a polypeptide comprising a polypeptide, a consensus sequence or at least a polypeptide motif as shown in the respective line in column 5 of Table II or in column 8 of Table IV, application no. 17, respectively, and being depicted in the same respective line as said B3457, or a functional equivalent or a homolog thereof as depicted in column 8 of Table II, application no. 17, preferably a homolog or functional equivalent as depicted in column 8 of Table II B, application no. 17, and being depicted in the same respective line as said B3457, and preferably the activity is increased non-targeted, whereby the respective line disclose in column 7 the fine chemical glucose-1-phosphate.

[91005] Accordingly, in one embodiment, the molecule which activity is to be increased in the process of the invention is the gene product with an activity as a “high-affinity branched-chain amino acid transport protein”, preferably it is the molecule of section (a) or (b) of this paragraph.

[91006] In particular, it was observed that in plants, especially in Arabidopsis thaliana, increasing or generating the activity of a gene product non-targeted with the activity of a “high-affinity branched-chain amino acid transport protein”, preferably being encoded by a gene comprising the nucleic acid sequence SEQ ID NO. 146472, preferably the coding region thereof, conferred the production of or the increase in glucose-1-phosphate compared with the wild type control.

[91007] The nucleic acid sequence of B3457 from Escherichia coli, e.g. as shown in the respective line in column 5 of Table I, application no. 17, has been published in B. And the activity of the gene product thereof is the activity of high-affinity branched-chain amino acid transport protein.

[91008] Accordingly, in one embodiment, the process of the present invention for producing myo-inositol in a non-human organism, like a microorganism or a plant or a part thereof, comprises increasing or generating the activity of a gene product with the activity of a gene product conferring the activity of “high-affinity branched-chain amino acid transport protein”, especially from Escherichia coli or its functional equivalent or its homolog, e.g. the increase of
[91009] (a) a gene product of a gene comprising the nucleic acid molecule as shown in the respective line in column 5 of Table I (whereby the respective line disclose in column 7 the fine chemical myo-inositol), application no. 17, preferably the coding region thereof, or a homolog or a fragment thereof, and being depicted in the same respective line as said B3457, or a functional equivalent or a homolog thereof as shown in column 8 of Table I, application no. 17, preferably the coding region thereof, particularly a homolog or functional equivalent as shown in column 8 of Table I B, application no. 17, and being depicted in the same respective line as said B3457, and preferably the activity is increased non-targeted, or
[91010] (b) a polypeptide comprising a polypeptide, a consensus sequence or at least a polypeptide motif as shown in the respective line in column 5 of Table II or in column 8 of Table IV, application no. 17, respectively, and being depicted in the same respective line as said B3457, or a functional equivalent or a homolog thereof as depicted in column 8 of Table II, application no. 17, preferably a homolog or functional equivalent as depicted in column 8 of Table II B, application no. 17, and being depicted in the same respective line as said B3457, and preferably the activity is increased non-targeted, whereby the respective line disclose in column 7 the fine chemical myo-inositol.

[91011] Accordingly, in one embodiment, the molecule which activity is to be increased in the process of the invention is the gene product with an activity as a “high-affinity branched-chain amino acid transport protein”, preferably it is the molecule of section (a) or (b) of this paragraph.

[91012] In particular, it was observed that in plants, especially in Arabidopsis thaliana, increasing or generating the activity of a gene product non-targeted with the activity of a “high-affinity branched-chain amino acid transport protein”, preferably being encoded by a gene comprising the nucleic acid sequence SEQ ID NO. 146472, preferably the coding region thereof, conferred the production of or the increase in myo-inositol compared with the wild type control.

[91013] The nucleic acid sequence of B3519 from Escherichia coli, e.g. as shown in the respective line in column 5 of Table I, application no. 17, has been published in B. And the activity of the gene product thereof is the activity of trehalase.

[91014] Accordingly, in one embodiment, the process of the present invention for producing fructose in a non-human organism, like a microorganism or a plant or a part thereof, comprises increasing or generating the activity of a gene product with the activity of a gene product conferring the activity of “trehalase”, especially from Escherichia coli or its functional equivalent or its homolog, e.g. the increase of
[91015] (a) a gene product of a gene comprising the nucleic acid molecule as shown in the respective line in column 5 of Table I (whereby the respective line disclose in column 7 the fine chemical fructose), application no. 17, preferably the coding region thereof, or a homolog or a fragment thereof, and being depicted in the same respective line as said B3519, or a functional equivalent or a homolog thereof as shown in column 8 of Table I, application no. 17, preferably the coding region thereof, particularly a homolog or functional equivalent as shown in column 8 of Table I B, application no. 17, and being depicted in the same respective line as said B3519, and preferably the activity is increased plastidic, or
[91016] (b) a polypeptide comprising a polypeptide, a consensus sequence or at least a polypeptide motif as shown in the respective line in column 5 of Table II or in column 8 of Table IV, application no. 17, respectively, and being depicted in the same respective line as said B3519, or a functional equivalent or a homolog thereof as depicted in column 8 of Table II, application no. 17, preferably a homolog or functional equivalent as depicted in column 8 of Table II B, application no. 17, and being depicted in the same respective line as said B3519, and preferably the activity is increased plastidic, whereby the respective line disclose in column 7 the fine chemical fructose.

[91017] Accordingly, in one embodiment, the molecule which activity is to be increased in the process of the invention is the gene product with an activity as a “trehalase”, preferably it is the molecule of section (a) or (b) of this paragraph.

[91018] In particular, it was observed that in plants, especially in Arabidopsis thaliana, increasing or generating the activity of a gene product plastidic with the activity of a “trehalase”, preferably being encoded by a gene comprising the nucleic acid sequence SEQ ID NO. 146646, preferably the coding region thereof, conferred the production of or the increase in fructose compared with the wild type control.

[91019] The nucleic acid sequence of B3519 from Escherichia coli, e.g. as shown in the respective line in column 5 of Table I, application no. 17, has been published in B. And the activity of the gene product thereof is the activity of trehalase.

[91020] Accordingly, in one embodiment, the process of the present invention for producing galactinol in a non-human organism, like a microorganism or a plant or a part thereof, comprises increasing or generating the activity of a gene product with the activity of a gene product conferring the activity of “trehalase”, especially from Escherichia coli or its functional equivalent or its homolog, e.g. the increase of
[91021] (a) a gene product of a gene comprising the nucleic acid molecule as shown in the respective line in column 5 of Table I (whereby the respective line disclose in column 7 the fine chemical galactinol), application no. 17, preferably the coding region thereof, or a homolog or a fragment thereof, and being depicted in the same respective line as said B3519, or a functional equivalent or a homolog thereof as shown in column 8 of Table I, application no. 17, preferably the coding region thereof, particularly a homolog or functional equivalent as shown in column 8 of Table I B, application no. 17, and being depicted in the same respective line as said B3519, and preferably the activity is increased plastidic, or
[91022] (b) a polypeptide comprising a polypeptide, a consensus sequence or at least a polypeptide motif as shown in the respective line in column 5 of Table II or in column 8 of Table IV, application no. 17, respectively, and being depicted in the same respective line as said B3519, or a functional equivalent or a homolog thereof as depicted in column 8 of Table II, application no. 17, preferably a homolog or functional equivalent as depicted in column 8 of Table II B, application no. 17, and being depicted in the same respective line as said B3519, and preferably the activity is increased plastidic, whereby the respective line disclose in column 7 the fine chemical galactinol.

[91023] Accordingly, in one embodiment, the molecule which activity is to be increased in the process of the invention is the gene product with an activity as a “trehalase”, preferably it is the molecule of section (a) or (b) of this paragraph.

[91024] In particular, it was observed that in plants, especially in Arabidopsis thaliana, increasing or generating the activity of a gene product plastidic with the activity of a “trehalase”, preferably being encoded by a gene comprising the nucleic acid sequence SEQ ID NO. 146646, preferably the coding region thereof, conferred the production of or the increase in galactinol compared with the wild type control.

[91025] The nucleic acid sequence of B3600 from Escherichia coli, e.g. as shown in the respective line in column 5 of Table I, application no. 17, has been published in B. And the activity of the gene product thereof is the activity of mannitol-1-phosphate dehydrogenase.

[91026] Accordingly, in one embodiment, the process of the present invention for producing fructose in a non-human organism, like a microorganism or a plant or a part thereof, comprises increasing or generating the activity of a gene product with the activity of a gene product conferring the activity of “mannitol-1-phosphate dehydrogenase”, especially from Escherichia coli or its functional equivalent or its homolog, e.g. the increase of
[91027] (a) a gene product of a gene comprising the nucleic acid molecule as shown in the respective line in column 5 of Table I (whereby the respective line disclose in column 7 the fine chemical fructose), application no. 17, preferably the coding region thereof, or a homolog or a fragment thereof, and being depicted in the same respective line as said B3600, or a functional equivalent or a homolog thereof as shown in column 8 of Table I, application no. 17, preferably the coding region thereof, particularly a homolog or functional equivalent as shown in column 8 of Table I B, application no. 17, and being depicted in the same respective line as said B3600, and preferably the activity is increased non-targeted, or
[91028] (b) a polypeptide comprising a polypeptide, a consensus sequence or at least a polypeptide motif as shown in the respective line in column 5 of Table II or in column 8 of Table IV, application no. 17, respectively, and being depicted in the same respective line as said B3600, or a functional equivalent or a homolog thereof as depicted in column 8 of Table II, application no. 17, preferably a homolog or functional equivalent as depicted in column 8 of Table II B, application no. 17, and being depicted in the same respective line as said B3600, and preferably the activity is increased non-targeted, whereby the respective line disclose in column 7 the fine chemical fructose.

[91029] Accordingly, in one embodiment, the molecule which activity is to be increased in the process of the invention is the gene product with an activity as a “mannitol-1-phosphate dehydrogenase”, preferably it is the molecule of section (a) or (b) of this paragraph.

[91030] In particular, it was observed that in plants, especially in Arabidopsis thaliana, increasing or generating the activity of a gene product non-targeted with the activity of a “mannitol-1-phosphate dehydrogenase”, preferably being encoded by a gene comprising the nucleic acid sequence SEQ ID NO. 146732, preferably the coding region thereof, conferred the production of or the increase in fructose compared with the wild type control.

[91031] The nucleic acid sequence of B3600 from Escherichia coli, e.g. as shown in the respective line in column 5 of Table I, application no. 17, has been published in B. And the activity of the gene product thereof is the activity of mannitol-1-phosphate dehydrogenase.

[91032] Accordingly, in one embodiment, the process of the present invention for producing mannitol in a non-human organism, like a microorganism or a plant or a part thereof, comprises increasing or generating the activity of a gene product with the activity of a gene product conferring the activity of “mannitol-1-phosphate dehydrogenase”, especially from Escherichia coli or its functional equivalent or its homolog, e.g. the increase of
[91033] (a) a gene product of a gene comprising the nucleic acid molecule as shown in the respective line in column 5 of Table I (whereby the respective line disclose in column 7 the fine chemical mannitol), application no. 17, preferably the coding region thereof, or a homolog or a fragment thereof, and being depicted in the same respective line as said B3600, or a functional equivalent or a homolog thereof as shown in column 8 of Table I, application no. 17, preferably the coding region thereof, particularly a homolog or functional equivalent as shown in column 8 of Table I B, application no. 17, and being depicted in the same respective line as said B3600, and preferably the activity is increased non-targeted, or
[91034] (b) a polypeptide comprising a polypeptide, a consensus sequence or at least a polypeptide motif as shown in the respective line in column 5 of Table II or in column 8 of Table IV, application no. 17, respectively, and being depicted in the same respective line as said B3600, or a functional equivalent or a homolog thereof as depicted in column 8 of Table II, application no. 17, preferably a homolog or functional equivalent as depicted in column 8 of Table II B, application no. 17, and being depicted in the same respective line as said B3600, and preferably the activity is increased non-targeted, whereby the respective line disclose in column 7 the fine chemical mannitol.

[91035] Accordingly, in one embodiment, the molecule which activity is to be increased in the process of the invention is the gene product with an activity as a “mannitol-1-phosphate dehydrogenase”, preferably it is the molecule of section (a) or (b) of this paragraph.

[91036] In particular, it was observed that in plants, especially in Arabidopsis thaliana, increasing or generating the activity of a gene product non-targeted with the activity of a “mannitol-1-phosphate dehydrogenase”, preferably being encoded by a gene comprising the nucleic acid sequence SEQ ID NO. 146732, preferably the coding region thereof, conferred the production of or the increase in mannitol compared with the wild type control.

[91037] The nucleic acid sequence of B3600 from Escherichia coli, e.g. as shown in the respective line in column 5 of Table I, application no. 17, has been published in B. And the activity of the gene product thereof is the activity of mannitol-1-phosphate dehydrogenase.

[91038] Accordingly, in one embodiment, the process of the present invention for producing sorbitol in a non-human organism, like a microorganism or a plant or a part thereof, comprises increasing or generating the activity of a gene product with the activity of a gene product conferring the activity of “mannitol-1-phosphate dehydrogenase”, especially from Escherichia coli or its functional equivalent or its homolog, e.g. the increase of
[91039] (a) a gene product of a gene comprising the nucleic acid molecule as shown in the respective line in column 5 of Table I (whereby the respective line disclose in column 7 the fine chemical sorbitol), application no. 17, preferably the coding region thereof, or a homolog or a fragment thereof, and being depicted in the same respective line as said B3600, or a functional equivalent or a homolog thereof as shown in column 8 of Table I, application no. 17, preferably the coding region thereof, particularly a homolog or functional equivalent as shown in column 8 of Table I B, application no. 17, and being depicted in the same respective line as said B3600, and preferably the activity is increased non-targeted, or
[91040] (b) a polypeptide comprising a polypeptide, a consensus sequence or at least a polypeptide motif as shown in the respective line in column 5 of Table II or in column 8 of Table IV, application no. 17, respectively, and being depicted in the same respective line as said B3600, or a functional equivalent or a homolog thereof as depicted in column 8 of Table II, application no. 17, preferably a homolog or functional equivalent as depicted in column 8 of Table II B, application no. 17, and being depicted in the same respective line as said B3600, and preferably the activity is increased non-targeted, whereby the respective line disclose in column 7 the fine chemical sorbitol.

[91041] Accordingly, in one embodiment, the molecule which activity is to be increased in the process of the invention is the gene product with an activity as a “mannitol-1-phosphate dehydrogenase”, preferably it is the molecule of section (a) or (b) of this paragraph.

[91042] In particular, it was observed that in plants, especially in Arabidopsis thaliana, increasing or generating the activity of a gene product non-targeted with the activity of a “mannitol-1-phosphate dehydrogenase”, preferably being encoded by a gene comprising the nucleic acid sequence SEQ ID NO. 146732, preferably the coding region thereof, conferred the production of or the increase in sorbitol compared with the wild type control.

[91043] The nucleic acid sequence of B3774 from Escherichia coli, e.g. as shown in the respective line in column 5 of Table I, application no. 17, has been published in B. And the activity of the gene product thereof is the activity of ketol-acid reductoisomerase.

[91044] Accordingly, in one embodiment, the process of the present invention for producing galactinol in a non-human organism, like a microorganism or a plant or a part thereof, comprises increasing or generating the activity of a gene product with the activity of a gene product conferring the activity of “ketol-acid reductoisomerase”, especially from Escherichia coli or its functional equivalent or its homolog, e.g. the increase of
[91045] (a) a gene product of a gene comprising the nucleic acid molecule as shown in the respective line in column 5 of Table I (whereby the respective line disclose in column 7 the fine chemical galactinol), application no. 17, preferably the coding region thereof, or a homolog or a fragment thereof, and being depicted in the same respective line as said B3774, or a functional equivalent or a homolog thereof as shown in column 8 of Table I, application no. 17, preferably the coding region thereof, particularly a homolog or functional equivalent as shown in column 8 of Table I B, application no. 17, and being depicted in the same respective line as said B3774, and preferably the activity is increased non-targeted, or
[91046] (b) a polypeptide comprising a polypeptide, a consensus sequence or at least a polypeptide motif as shown in the respective line in column 5 of Table II or in column 8 of Table IV, application no. 17, respectively, and being depicted in the same respective line as said B3774, or a functional equivalent or a homolog thereof as depicted in column 8 of Table II, application no. 17, preferably a homolog or functional equivalent as depicted in column 8 of Table II B, application no. 17, and being depicted in the same respective line as said B3774, and preferably the activity is increased non-targeted, whereby the respective line disclose in column 7 the fine chemical galactinol.

[91047] Accordingly, in one embodiment, the molecule which activity is to be increased in the process of the invention is the gene product with an activity as a “ketol-acid reductoisomerase”, preferably it is the molecule of section (a) or (b) of this paragraph.

[91048] In particular, it was observed that in plants, especially in Arabidopsis thaliana, increasing or generating the activity of a gene product non-targeted with the activity of a “ketol-acid reductoisomerase”, preferably being encoded by a gene comprising the nucleic acid sequence SEQ ID NO. 94386, preferably the coding region thereof, conferred the production of or the increase in galactinol compared with the wild type control.

[91049] The nucleic acid sequence of B3777 from Escherichia coli, e.g. as shown in the respective line in column 5 of Table I, application no. 17, has been published in B. And the activity of the gene product thereof is the activity of b3777-protein.

[91050] Accordingly, in one embodiment, the process of the present invention for producing myo-inositol in a non-human organism, like a microorganism or a plant or a part thereof, comprises increasing or generating the activity of a gene product with the activity of a gene product conferring the activity of “b3777-protein”, especially from Escherichia coli or its functional equivalent or its homolog, e.g. the increase of
[91051] (a) a gene product of a gene comprising the nucleic acid molecule as shown in the respective line in column 5 of Table I (whereby the respective line disclose in column 7 the fine chemical myo-inositol), application no. 17, preferably the coding region thereof, or a homolog or a fragment thereof, and being depicted in the same respective line as said B3777, or a functional equivalent or a homolog thereof as shown in column 8 of Table I, application no. 17, preferably the coding region thereof, particularly a homolog or functional equivalent as shown in column 8 of Table I B, application no. 17, and being depicted in the same respective line as said B3777, and preferably the activity is increased non-targeted, or
[91052] (b) a polypeptide comprising a polypeptide, a consensus sequence or at least a polypeptide motif as shown in the respective line in column 5 of Table II or in column 8 of Table IV, application no. 17, respectively, and being depicted in the same respective line as said B3777, or a functional equivalent or a homolog thereof as depicted in column 8 of Table II, application no. 17, preferably a homolog or functional equivalent as depicted in column 8 of Table II B, application no. 17, and being depicted in the same respective line as said B3777, and preferably the activity is increased non-targeted, whereby the respective line disclose in column 7 the fine chemical myo-inositol.

[91053] Accordingly, in one embodiment, the molecule which activity is to be increased in the process of the invention is the gene product with an activity as a “b3777-protein”, preferably it is the molecule of section (a) or (b) of this paragraph.

[91054] In particular, it was observed that in plants, especially in Arabidopsis thaliana, increasing or generating the activity of a gene product non-targeted with the activity of a “b3777-protein”, preferably being encoded by a gene comprising the nucleic acid sequence SEQ ID NO. 136098, preferably the coding region thereof, conferred the production of or the increase in myo-inositol compared with the wild type control.

[91055] The nucleic acid sequence of B3817 from Escherichia coli, e.g. as shown in the respective line in column 5 of Table I, application no. 17, has been published in B. And the activity of the gene product thereof is the activity of b3817-protein.

[91056] Accordingly, in one embodiment, the process of the present invention for producing myo-inositol in a non-human organism, like a microorganism or a plant or a part thereof, comprises increasing or generating the activity of a gene product with the activity of a gene product conferring the activity of “b3817-protein”, especially from Escherichia coli or its functional equivalent or its homolog, e.g. the increase of
[91057] (a) a gene product of a gene comprising the nucleic acid molecule as shown in the respective line in column 5 of Table I (whereby the respective line disclose in column 7 the fine chemical myo-inositol), application no. 17, preferably the coding region thereof, or a homolog or a fragment thereof, and being depicted in the same respective line as said B3817, or a functional equivalent or a homolog thereof as shown in column 8 of Table I, application no. 17, preferably the coding region thereof, particularly a homolog or functional equivalent as shown in column 8 of Table I B, application no. 17, and being depicted in the same respective line as said B3817, and preferably the activity is increased non-targeted, or
[91058] (b) a polypeptide comprising a polypeptide, a consensus sequence or at least a polypeptide motif as shown in the respective line in column 5 of Table II or in column 8 of Table IV, application no. 17, respectively, and being depicted in the same respective line as said B3817, or a functional equivalent or a homolog thereof as depicted in column 8 of Table II, application no. 17, preferably a homolog or functional equivalent as depicted in column 8 of Table II B, application no. 17, and being depicted in the same respective line as said B3817, and preferably the activity is increased non-targeted, whereby the respective line disclose in column 7 the fine chemical myo-inositol.

[91059] Accordingly, in one embodiment, the molecule which activity is to be increased in the process of the invention is the gene product with an activity as a “b3817-protein”, preferably it is the molecule of section (a) or (b) of this paragraph.

[91060] In particular, it was observed that in plants, especially in Arabidopsis thaliana, increasing or generating the activity of a gene product non-targeted with the activity of a “b3817-protein”, preferably being encoded by a gene comprising the nucleic acid sequence SEQ ID NO. 10708, preferably the coding region thereof, conferred the production of or the increase in myo-inositol compared with the wild type control.

[91061] The nucleic acid sequence of B3817 from Escherichia coli, e.g. as shown in the respective line in column 5 of Table I, application no. 17, has been published in B. And the activity of the gene product thereof is the activity of b3817-protein.

[91062] Accordingly, in one embodiment, the process of the present invention for producing raffinose in a non-human organism, like a microorganism or a plant or a part thereof, comprises increasing or generating the activity of a gene product with the activity of a gene product conferring the activity of “b3817-protein”, especially from Escherichia coli or its functional equivalent or its homolog, e.g. the increase of
[91063] (a) a gene product of a gene comprising the nucleic acid molecule as shown in the respective line in column 5 of Table I (whereby the respective line disclose in column 7 the fine chemical raffinose), application no. 17, preferably the coding region thereof, or a homolog or a fragment thereof, and being depicted in the same respective line as said B3817, or a functional equivalent or a homolog thereof as shown in column 8 of Table I, application no. 17, preferably the coding region thereof, particularly a homolog or functional equivalent as shown in column 8 of Table I B, application no. 17, and being depicted in the same respective line as said B3817, and preferably the activity is increased non-targeted, or
[91064] (b) a polypeptide comprising a polypeptide, a consensus sequence or at least a polypeptide motif as shown in the respective line in column 5 of Table II or in column 8 of Table IV, application no. 17, respectively, and being depicted in the same respective line as said B3817, or a functional equivalent or a homolog thereof as depicted in column 8 of Table II, application no. 17, preferably a homolog or functional equivalent as depicted in column 8 of Table II B, application no. 17, and being depicted in the same respective line as said B3817, and preferably the activity is increased non-targeted, whereby the respective line disclose in column 7 the fine chemical raffinose.

[91065] Accordingly, in one embodiment, the molecule which activity is to be increased in the process of the invention is the gene product with an activity as a “b3817-protein”, preferably it is the molecule of section (a) or (b) of this paragraph.

[91066] In particular, it was observed that in plants, especially in Arabidopsis thaliana, increasing or generating the activity of a gene product non-targeted with the activity of a “b3817-protein”, preferably being encoded by a gene comprising the nucleic acid sequence SEQ ID NO. 10708, preferably the coding region thereof, conferred the production of or the increase in raffinose compared with the wild type control.

[91067] The nucleic acid sequence of B3818 from Escherichia coli, e.g. as shown in the respective line in column 5 of Table I, application no. 17, has been published in B. And the activity of the gene product thereof is the activity of b3818-protein.

[91068] Accordingly, in one embodiment, the process of the present invention for producing myo-inositol in a non-human organism, like a microorganism or a plant or a part thereof, comprises increasing or generating the activity of a gene product with the activity of a gene product conferring the activity of “b3818-protein”, especially from Escherichia coli or its functional equivalent or its homolog, e.g. the increase of
[91069] (a) a gene product of a gene comprising the nucleic acid molecule as shown in the respective line in column 5 of Table I (whereby the respective line disclose in column 7 the fine chemical myo-inositol), application no. 17, preferably the coding region thereof, or a homolog or a fragment thereof, and being depicted in the same respective line as said B3818, or a functional equivalent or a homolog thereof as shown in column 8 of Table I, application no. 17, preferably the coding region thereof, particularly a homolog or functional equivalent as shown in column 8 of Table I B, application no. 17, and being depicted in the same respective line as said B3818, and preferably the activity is increased non-targeted, or
[91070] (b) a polypeptide comprising a polypeptide, a consensus sequence or at least a polypeptide motif as shown in the respective line in column 5 of Table II or in column 8 of Table IV, application no. 17, respectively, and being depicted in the same respective line as said B3818, or a functional equivalent or a homolog thereof as depicted in column 8 of Table II, application no. 17, preferably a homolog or functional equivalent as depicted in column 8 of Table II B, application no. 17, and being depicted in the same respective line as said B3818, and preferably the activity is increased non-targeted, whereby the respective line disclose in column 7 the fine chemical myo-inositol.

[91071] Accordingly, in one embodiment, the molecule which activity is to be increased in the process of the invention is the gene product with an activity as a “b3818-protein”, preferably it is the molecule of section (a) or (b) of this paragraph.

[91072] In particular, it was observed that in plants, especially in Arabidopsis thaliana, increasing or generating the activity of a gene product non-targeted with the activity of a “b3818-protein”, preferably being encoded by a gene comprising the nucleic acid sequence SEQ ID NO. 146834, preferably the coding region thereof, conferred the production of or the increase in myo-inositol compared with the wild type control.

[91073] The nucleic acid sequence of B3823 from Escherichia coli, e.g. as shown in the respective line in column 5 of Table I, application no. 17, has been published in B. And the activity of the gene product thereof is the activity of threonine efflux protein.

[91074] Accordingly, in one embodiment, the process of the present invention for producing myo-inositol in a non-human organism, like a microorganism or a plant or a part thereof, comprises increasing or generating the activity of a gene product with the activity of a gene product conferring the activity of “threonine efflux protein”, especially from Escherichia coli or its functional equivalent or its homolog, e.g. the increase of
[91075] (a) a gene product of a gene comprising the nucleic acid molecule as shown in the respective line in column 5 of Table I (whereby the respective line disclose in column 7 the fine chemical myo-inositol), application no. 17, preferably the coding region thereof, or a homolog or a fragment thereof, and being depicted in the same respective line as said B3823, or a functional equivalent or a homolog thereof as shown in column 8 of Table I, application no. 17, preferably the coding region thereof, particularly a homolog or functional equivalent as shown in column 8 of Table I B, application no. 17, and being depicted in the same respective line as said B3823, and preferably the activity is increased non-targeted, or
[91076] (b) a polypeptide comprising a polypeptide, a consensus sequence or at least a polypeptide motif as shown in the respective line in column 5 of Table II or in column 8 of Table IV, application no. 17, respectively, and being depicted in the same respective line as said B3823, or a functional equivalent or a homolog thereof as depicted in column 8 of Table II, application no. 17, preferably a homolog or functional equivalent as depicted in column 8 of Table II B, application no. 17, and being depicted in the same respective line as said B3823, and preferably the activity is increased non-targeted, whereby the respective line disclose in column 7 the fine chemical myo-inositol.

[91077] Accordingly, in one embodiment, the molecule which activity is to be increased in the process of the invention is the gene product with an activity as a “threonine efflux protein”, preferably it is the molecule of section (a) or (b) of this paragraph.

[91078] In particular, it was observed that in plants, especially in Arabidopsis thaliana, increasing or generating the activity of a gene product non-targeted with the activity of a “threonine efflux protein”, preferably being encoded by a gene comprising the nucleic acid sequence SEQ ID NO. 10726, preferably the coding region thereof, conferred the production of or the increase in myo-inositol compared with the wild type control.

[91079] The nucleic acid sequence of B3870 from Escherichia coli, e.g. as shown in the respective line in column 5 of Table I, application no. 17, has been published in B. And the activity of the gene product thereof is the activity of glutamine synthetase.

[91080] Accordingly, in one embodiment, the process of the present invention for producing myo-inositol in a non-human organism, like a microorganism or a plant or a part thereof, comprises increasing or generating the activity of a gene product with the activity of a gene product conferring the activity of “glutamine synthetase”, especially from Escherichia coli or its functional equivalent or its homolog, e.g. the increase of
[91081] (a) a gene product of a gene comprising the nucleic acid molecule as shown in the respective line in column 5 of Table I (whereby the respective line disclose in column 7 the fine chemical myo-inositol), application no. 17, preferably the coding region thereof, or a homolog or a fragment thereof, and being depicted in the same respective line as said B3870, or a functional equivalent or a homolog thereof as shown in column 8 of Table I, application no. 17, preferably the coding region thereof, particularly a homolog or functional equivalent as shown in column 8 of Table I B, application no. 17, and being depicted in the same respective line as said B3870, and preferably the activity is increased plastidic, or
[91082] (b) a polypeptide comprising a polypeptide, a consensus sequence or at least a polypeptide motif as shown in the respective line in column 5 of Table II or in column 8 of Table IV, application no. 17, respectively, and being depicted in the same respective line as said B3870, or a functional equivalent or a homolog thereof as depicted in column 8 of Table II, application no. 17, preferably a homolog or functional equivalent as depicted in column 8 of Table II B, application no. 17, and being depicted in the same respective line as said B3870, and preferably the activity is increased plastidic, whereby the respective line disclose in column 7 the fine chemical myo-inositol.

[91083] Accordingly, in one embodiment, the molecule which activity is to be increased in the process of the invention is the gene product with an activity as a “glutamine synthetase”, preferably it is the molecule of section (a) or (b) of this paragraph.

[91084] In particular, it was observed that in plants, especially in Arabidopsis thaliana, increasing or generating the activity of a gene product plastidic with the activity of a “glutamine synthetase”, preferably being encoded by a gene comprising the nucleic acid sequence SEQ ID NO. 101327, preferably the coding region thereof, conferred the production of or the increase in myo-inositol compared with the wild type control.

[91085] The nucleic acid sequence of B3870 from Escherichia coli, e.g. as shown in the respective line in column 5 of Table I, application no. 17, has been published in B. And the activity of the gene product thereof is the activity of glutamine synthetase.

[91086] Accordingly, in one embodiment, the process of the present invention for producing verbascose in a non-human organism, like a microorganism or a plant or a part thereof, comprises increasing or generating the activity of a gene product with the activity of a gene product conferring the activity of “glutamine synthetase”, especially from Escherichia coli or its functional equivalent or its homolog, e.g. the increase of
[91087] (a) a gene product of a gene comprising the nucleic acid molecule as shown in the respective line in column 5 of Table I (whereby the respective line disclose in column 7 the fine chemical verbascose), application no. 17, preferably the coding region thereof, or a homolog or a fragment thereof, and being depicted in the same respective line as said B3870, or a functional equivalent or a homolog thereof as shown in column 8 of Table I, application no. 17, preferably the coding region thereof, particularly a homolog or functional equivalent as shown in column 8 of Table I B, application no. 17, and being depicted in the same respective line as said B3870, and preferably the activity is increased plastidic, or
[91088] (b) a polypeptide comprising a polypeptide, a consensus sequence or at least a polypeptide motif as shown in the respective line in column 5 of Table II or in column 8 of Table IV, application no. 17, respectively, and being depicted in the same respective line as said B3870, or a functional equivalent or a homolog thereof as depicted in column 8 of Table II, application no. 17, preferably a homolog or functional equivalent as depicted in column 8 of Table II B, application no. 17, and being depicted in the same respective line as said B3870, and preferably the activity is increased plastidic, whereby the respective line disclose in column 7 the fine chemical verbascose.

[91089] Accordingly, in one embodiment, the molecule which activity is to be increased in the process of the invention is the gene product with an activity as a “glutamine synthetase”, preferably it is the molecule of section (a) or (b) of this paragraph.

[91090] In particular, it was observed that in plants, especially in Arabidopsis thaliana, increasing or generating the activity of a gene product plastidic with the activity of a “glutamine synthetase”, preferably being encoded by a gene comprising the nucleic acid sequence SEQ ID NO. 101327, preferably the coding region thereof, conferred the production of or the increase in verbascose compared with the wild type control.

[91091] The nucleic acid sequence of B3872 from Escherichia coli, e.g. as shown in the respective line in column 5 of Table I, application no. 17, has been published in B. And the activity of the gene product thereof is the activity of transcriptional regulator.

[91092] Accordingly, in one embodiment, the process of the present invention for producing glucose-1-phosphate in a non-human organism, like a microorganism or a plant or a part thereof, comprises increasing or generating the activity of a gene product with the activity of a gene product conferring the activity of “transcriptional regulator”, especially from Escherichia coli or its functional equivalent or its homolog, e.g. the increase of
[91093] (a) a gene product of a gene comprising the nucleic acid molecule as shown in the respective line in column 5 of Table I (whereby the respective line disclose in column 7 the fine chemical glucose-1-phosphate), application no. 17, preferably the coding region thereof, or a homolog or a fragment thereof, and being depicted in the same respective line as said B3872, or a functional equivalent or a homolog thereof as shown in column 8 of Table I, application no. 17, preferably the coding region thereof, particularly a homolog or functional equivalent as shown in column 8 of Table I B, application no. 17, and being depicted in the same respective line as said B3872, and preferably the activity is increased plastidic, or
[91094] (b) a polypeptide comprising a polypeptide, a consensus sequence or at least a polypeptide motif as shown in the respective line in column 5 of Table II or in column 8 of Table IV, application no. 17, respectively, and being depicted in the same respective line as said B3872, or a functional equivalent or a homolog thereof as depicted in column 8 of Table II, application no. 17, preferably a homolog or functional equivalent as depicted in column 8 of Table II B, application no. 17, and being depicted in the same respective line as said B3872, and preferably the activity is increased plastidic, whereby the respective line disclose in column 7 the fine chemical glucose-1-phosphate.

[91095] Accordingly, in one embodiment, the molecule which activity is to be increased in the process of the invention is the gene product with an activity as a “transcriptional regulator”, preferably it is the molecule of section (a) or (b) of this paragraph.

[91096] In particular, it was observed that in plants, especially in Arabidopsis thaliana, increasing or generating the activity of a gene product plastidic with the activity of a “transcriptional regulator”, preferably being encoded by a gene comprising the nucleic acid sequence SEQ ID NO. 83821, preferably the coding region thereof, conferred the production of or the increase in glucose-1-phosphate compared with the wild type control.

[91097] The nucleic acid sequence of B3989 from Escherichia coli, e.g. as shown in the respective line in column 5 of Table I, application no. 17, has been published in B. And the activity of the gene product thereof is the activity of b3989-protein.

[91098] Accordingly, in one embodiment, the process of the present invention for producing fructose in a non-human organism, like a microorganism or a plant or a part thereof, comprises increasing or generating the activity of a gene product with the activity of a gene product conferring the activity of “b3989-protein”, especially from Escherichia coli or its functional equivalent or its homolog, e.g. the increase of
[91099] (a) a gene product of a gene comprising the nucleic acid molecule as shown in the respective line in column 5 of Table I (whereby the respective line disclose in column 7 the fine chemical fructose), application no. 17, preferably the coding region thereof, or a homolog or a fragment thereof, and being depicted in the same respective line as said B3989, or a functional equivalent or a homolog thereof as shown in column 8 of Table I, application no. 17, preferably the coding region thereof, particularly a homolog or functional equivalent as shown in column 8 of Table I B, application no. 17, and being depicted in the same respective line as said B3989, and preferably the activity is increased non-targeted, or
[91100] (b) a polypeptide comprising a polypeptide, a consensus sequence or at least a polypeptide motif as shown in the respective line in column 5 of Table II or in column 8 of Table IV, application no. 17, respectively, and being depicted in the same respective line as said B3989, or a functional equivalent or a homolog thereof as depicted in column 8 of Table II, application no. 17, preferably a homolog or functional equivalent as depicted in column 8 of Table II B, application no. 17, and being depicted in the same respective line as said B3989, and preferably the activity is increased non-targeted, whereby the respective line disclose in column 7 the fine chemical fructose.

[91101] Accordingly, in one embodiment, the molecule which activity is to be increased in the process of the invention is the gene product with an activity as a “b3989-protein”, preferably it is the molecule of section (a) or (b) of this paragraph.

[91102] In particular, it was observed that in plants, especially in Arabidopsis thaliana, increasing or generating the activity of a gene product non-targeted with the activity of a “b3989-protein”, preferably being encoded by a gene comprising the nucleic acid sequence SEQ ID NO. 44372, preferably the coding region thereof, conferred the production of or the increase in fructose compared with the wild type control.

[91103] The nucleic acid sequence of B3989 from Escherichia coli, e.g. as shown in the respective line in column 5 of Table I, application no. 17, has been published in B. And the activity of the gene product thereof is the activity of b3989-protein.

[91104] Accordingly, in one embodiment, the process of the present invention for producing glucose in a non-human organism, like a microorganism or a plant or a part thereof, comprises increasing or generating the activity of a gene product with the activity of a gene product conferring the activity of “b3989-protein”, especially from Escherichia coli or its functional equivalent or its homolog, e.g. the increase of
[91105] (a) a gene product of a gene comprising the nucleic acid molecule as shown in the respective line in column 5 of Table I (whereby the respective line disclose in column 7 the fine chemical glucose), application no. 17, preferably the coding region thereof, or a homolog or a fragment thereof, and being depicted in the same respective line as said B3989, or a functional equivalent or a homolog thereof as shown in column 8 of Table I, application no. 17, preferably the coding region thereof, particularly a homolog or functional equivalent as shown in column 8 of Table I B, application no. 17, and being depicted in the same respective line as said B3989, and preferably the activity is increased non-targeted, or
[91106] (b) a polypeptide comprising a polypeptide, a consensus sequence or at least a polypeptide motif as shown in the respective line in column 5 of Table II or in column 8 of Table IV, application no. 17, respectively, and being depicted in the same respective line as said B3989, or a functional equivalent or a homolog thereof as depicted in column 8 of Table II, application no. 17, preferably a homolog or functional equivalent as depicted in column 8 of Table II B, application no. 17, and being depicted in the same respective line as said B3989, and preferably the activity is increased non-targeted, whereby the respective line disclose in column 7 the fine chemical glucose.

[91107] Accordingly, in one embodiment, the molecule which activity is to be increased in the process of the invention is the gene product with an activity as a “b3989-protein”, preferably it is the molecule of section (a) or (b) of this paragraph.

[91108] In particular, it was observed that in plants, especially in Arabidopsis thaliana, increasing or generating the activity of a gene product non-targeted with the activity of a “b3989-protein”, preferably being encoded by a gene comprising the nucleic acid sequence SEQ ID NO. 44372, preferably the coding region thereof, conferred the production of or the increase in glucose compared with the wild type control.

[91109] The nucleic acid sequence of B3989 from Escherichia coli, e.g. as shown in the respective line in column 5 of Table I, application no. 17, has been published in B. And the activity of the gene product thereof is the activity of b3989-protein.

[91110] Accordingly, in one embodiment, the process of the present invention for producing glucose-1-phosphate in a non-human organism, like a microorganism or a plant or a part thereof, comprises increasing or generating the activity of a gene product with the activity of a gene product conferring the activity of “b3989-protein”, especially from Escherichia coli or its functional equivalent or its homolog, e.g. the increase of
[91111] (a) a gene product of a gene comprising the nucleic acid molecule as shown in the respective line in column 5 of Table I (whereby the respective line disclose in column 7 the fine chemical glucose-1-phosphate), application no. 17, preferably the coding region thereof, or a homolog or a fragment thereof, and being depicted in the same respective line as said B3989, or a functional equivalent or a homolog thereof as shown in column 8 of Table I, application no. 17, preferably the coding region thereof, particularly a homolog or functional equivalent as shown in column 8 of Table I B, application no. 17, and being depicted in the same respective line as said B3989, and preferably the activity is increased non-targeted, or
[91112] (b) a polypeptide comprising a polypeptide, a consensus sequence or at least a polypeptide motif as shown in the respective line in column 5 of Table II or in column 8 of Table IV, application no. 17, respectively, and being depicted in the same respective line as said B3989, or a functional equivalent or a homolog thereof as depicted in column 8 of Table II, application no. 17, preferably a homolog or functional equivalent as depicted in column 8 of Table II B, application no. 17, and being depicted in the same respective line as said B3989, and preferably the activity is increased non-targeted, whereby the respective line disclose in column 7 the fine chemical glucose-1-phosphate.

[91113] Accordingly, in one embodiment, the molecule which activity is to be increased in the process of the invention is the gene product with an activity as a “b3989-protein”, preferably it is the molecule of section (a) or (b) of this paragraph.

[91114] In particular, it was observed that in plants, especially in Arabidopsis thaliana, increasing or generating the activity of a gene product non-targeted with the activity of a “b3989-protein”, preferably being encoded by a gene comprising the nucleic acid sequence SEQ ID NO. 44372, preferably the coding region thereof, conferred the production of or the increase in glucose-1-phosphate compared with the wild type control.

[91115] The nucleic acid sequence of B3989 from Escherichia coli, e.g. as shown in the respective line in column 5 of Table I, application no. 17, has been published in B. And the activity of the gene product thereof is the activity of b3989-protein.

[91116] Accordingly, in one embodiment, the process of the present invention for producing raffinose in a non-human organism, like a microorganism or a plant or a part thereof, comprises increasing or generating the activity of a gene product with the activity of a gene product conferring the activity of “b3989-protein”, especially from Escherichia coli or its functional equivalent or its homolog, e.g. the increase of
[91117] (a) a gene product of a gene comprising the nucleic acid molecule as shown in the respective line in column 5 of Table I (whereby the respective line disclose in column 7 the fine chemical raffinose), application no. 17, preferably the coding region thereof, or a homolog or a fragment thereof, and being depicted in the same respective line as said B3989, or a functional equivalent or a homolog thereof as shown in column 8 of Table I, application no. 17, preferably the coding region thereof, particularly a homolog or functional equivalent as shown in column 8 of Table I B, application no. 17, and being depicted in the same respective line as said B3989, and preferably the activity is increased non-targeted, or
[91118] (b) a polypeptide comprising a polypeptide, a consensus sequence or at least a polypeptide motif as shown in the respective line in column 5 of Table II or in column 8 of Table IV, application no. 17, respectively, and being depicted in the same respective line as said B3989, or a functional equivalent or a homolog thereof as depicted in column 8 of Table II, application no. 17, preferably a homolog or functional equivalent as depicted in column 8 of Table II B, application no. 17, and being depicted in the same respective line as said B3989, and preferably the activity is increased non-targeted, whereby the respective line disclose in column 7 the fine chemical raffinose.

[91119] Accordingly, in one embodiment, the molecule which activity is to be increased in the process of the invention is the gene product with an activity as a “b3989-protein”, preferably it is the molecule of section (a) or (b) of this paragraph.

[91120] In particular, it was observed that in plants, especially in Arabidopsis thaliana, increasing or generating the activity of a gene product non-targeted with the activity of a “b3989-protein”, preferably being encoded by a gene comprising the nucleic acid sequence SEQ ID NO. 44372, preferably the coding region thereof, conferred the production of or the increase in raffinose compared with the wild type control.

[91121] The nucleic acid sequence of B3989 from Escherichia coli, e.g. as shown in the respective line in column 5 of Table I, application no. 17, has been published in B. And the activity of the gene product thereof is the activity of b3989-protein.

[91122] Accordingly, in one embodiment, the process of the present invention for producing sucrose in a non-human organism, like a microorganism or a plant or a part thereof, comprises increasing or generating the activity of a gene product with the activity of a gene product conferring the activity of “b3989-protein”, especially from Escherichia coli or its functional equivalent or its homolog, e.g. the increase of
[91123] (a) a gene product of a gene comprising the nucleic acid molecule as shown in the respective line in column 5 of Table I (whereby the respective line disclose in column 7 the fine chemical sucrose), application no. 17, preferably the coding region thereof, or a homolog or a fragment thereof, and being depicted in the same respective line as said B3989, or a functional equivalent or a homolog thereof as shown in column 8 of Table I, application no. 17, preferably the coding region thereof, particularly a homolog or functional equivalent as shown in column 8 of Table I B, application no. 17, and being depicted in the same respective line as said B3989, and preferably the activity is increased non-targeted, or
[91124] (b) a polypeptide comprising a polypeptide, a consensus sequence or at least a polypeptide motif as shown in the respective line in column 5 of Table II or in column 8 of Table IV, application no. 17, respectively, and being depicted in the same respective line as said B3989, or a functional equivalent or a homolog thereof as depicted in column 8 of Table II, application no. 17, preferably a homolog or functional equivalent as depicted in column 8 of Table II B, application no. 17, and being depicted in the same respective line as said B3989, and preferably the activity is increased non-targeted, whereby the respective line disclose in column 7 the fine chemical sucrose.

[91125] Accordingly, in one embodiment, the molecule which activity is to be increased in the process of the invention is the gene product with an activity as a “b3989-protein”, preferably it is the molecule of section (a) or (b) of this paragraph.

[91126] In particular, it was observed that in plants, especially in Arabidopsis thaliana, increasing or generating the activity of a gene product non-targeted with the activity of a “b3989-protein”, preferably being encoded by a gene comprising the nucleic acid sequence SEQ ID NO. 44372, preferably the coding region thereof, conferred the production of or the increase in sucrose compared with the wild type control.

[91127] The nucleic acid sequence of B4012 from Escherichia coli, e.g. as shown in the respective line in column 5 of Table I, application no. 17, has been published in B. And the activity of the gene product thereof is the activity of acetyltransferase.

[91128] Accordingly, in one embodiment, the process of the present invention for producing galactinol in a non-human organism, like a microorganism or a plant or a part thereof, comprises increasing or generating the activity of a gene product with the activity of a gene product conferring the activity of “acetyltransferase”, especially from Escherichia coli or its functional equivalent or its homolog, e.g. the increase of
[91129] (a) a gene product of a gene comprising the nucleic acid molecule as shown in the respective line in column 5 of Table I (whereby the respective line disclose in column 7 the fine chemical galactinol), application no. 17, preferably the coding region thereof, or a homolog or a fragment thereof, and being depicted in the same respective line as said B4012, or a functional equivalent or a homolog thereof as shown in column 8 of Table I, application no. 17, preferably the coding region thereof, particularly a homolog or functional equivalent as shown in column 8 of Table I B, application no. 17, and being depicted in the same respective line as said B4012, and preferably the activity is increased non-targeted, or
[91130] (b) a polypeptide comprising a polypeptide, a consensus sequence or at least a polypeptide motif as shown in the respective line in column 5 of Table II or in column 8 of Table IV, application no. 17, respectively, and being depicted in the same respective line as said B4012, or a functional equivalent or a homolog thereof as depicted in column 8 of Table II, application no. 17, preferably a homolog or functional equivalent as depicted in column 8 of Table II B, application no. 17, and being depicted in the same respective line as said B4012, and preferably the activity is increased non-targeted, whereby the respective line disclose in column 7 the fine chemical galactinol.

[91131] Accordingly, in one embodiment, the molecule which activity is to be increased in the process of the invention is the gene product with an activity as a “acetyltransferase”, preferably it is the molecule of section (a) or (b) of this paragraph.

[91132] In particular, it was observed that in plants, especially in Arabidopsis thaliana, increasing or generating the activity of a gene product non-targeted with the activity of a “acetyltransferase”, preferably being encoded by a gene comprising the nucleic acid sequence SEQ ID NO. 44378, preferably the coding region thereof, conferred the production of or the increase in galactinol compared with the wild type control.

[91133] The nucleic acid sequence of B4029 from Escherichia coli, e.g. as shown in the respective line in column 5 of Table I, application no. 17, has been published in B. And the activity of the gene product thereof is the activity of b4029-protein.

[91134] Accordingly, in one embodiment, the process of the present invention for producing fructose in a non-human organism, like a microorganism or a plant or a part thereof, comprises increasing or generating the activity of a gene product with the activity of a gene product conferring the activity of “b4029-protein”, especially from Escherichia coli or its functional equivalent or its homolog, e.g. the increase of
[91135] (a) a gene product of a gene comprising the nucleic acid molecule as shown in the respective line in column 5 of Table I (whereby the respective line disclose in column 7 the fine chemical fructose), application no. 17, preferably the coding region thereof, or a homolog or a fragment thereof, and being depicted in the same respective line as said B4029, or a functional equivalent or a homolog thereof as shown in column 8 of Table I, application no. 17, preferably the coding region thereof, particularly a homolog or functional equivalent as shown in column 8 of Table I B, application no. 17, and being depicted in the same respective line as said B4029, and preferably the activity is increased non-targeted, or
[91136] (b) a polypeptide comprising a polypeptide, a consensus sequence or at least a polypeptide motif as shown in the respective line in column 5 of Table II or in column 8 of Table IV, application no. 17, respectively, and being depicted in the same respective line as said B4029, or a functional equivalent or a homolog thereof as depicted in column 8 of Table II, application no. 17, preferably a homolog or functional equivalent as depicted in column 8 of Table II B, application no. 17, and being depicted in the same respective line as said B4029, and preferably the activity is increased non-targeted, whereby the respective line disclose in column 7 the fine chemical fructose.

[91137] Accordingly, in one embodiment, the molecule which activity is to be increased in the process of the invention is the gene product with an activity as a “b4029-protein”, preferably it is the molecule of section (a) or (b) of this paragraph.

[91138] In particular, it was observed that in plants, especially in Arabidopsis thaliana, increasing or generating the activity of a gene product non-targeted with the activity of a “b4029-protein”, preferably being encoded by a gene comprising the nucleic acid sequence SEQ ID NO. 10740, preferably the coding region thereof, conferred the production of or the increase in fructose compared with the wild type control.

[91139] The nucleic acid sequence of B4029 from Escherichia coli, e.g. as shown in the respective line in column 5 of Table I, application no. 17, has been published in B. And the activity of the gene product thereof is the activity of b4029-protein.

[91140] Accordingly, in one embodiment, the process of the present invention for producing glucose in a non-human organism, like a microorganism or a plant or a part thereof, comprises increasing or generating the activity of a gene product with the activity of a gene product conferring the activity of “b4029-protein”, especially from Escherichia coli or its functional equivalent or its homolog, e.g. the increase of
[91141] (a) a gene product of a gene comprising the nucleic acid molecule as shown in the respective line in column 5 of Table I (whereby the respective line disclose in column 7 the fine chemical glucose), application no. 17, preferably the coding region thereof, or a homolog or a fragment thereof, and being depicted in the same respective line as said B4029, or a functional equivalent or a homolog thereof as shown in column 8 of Table I, application no. 17, preferably the coding region thereof, particularly a homolog or functional equivalent as shown in column 8 of Table I B, application no. 17, and being depicted in the same respective line as said B4029, and preferably the activity is increased non-targeted, or
[91142] (b) a polypeptide comprising a polypeptide, a consensus sequence or at least a polypeptide motif as shown in the respective line in column 5 of Table II or in column 8 of Table IV, application no. 17, respectively, and being depicted in the same respective line as said B4029, or a functional equivalent or a homolog thereof as depicted in column 8 of Table II, application no. 17, preferably a homolog or functional equivalent as depicted in column 8 of Table II B, application no. 17, and being depicted in the same respective line as said B4029, and preferably the activity is increased non-targeted, whereby the respective line disclose in column 7 the fine chemical glucose.

[91143] Accordingly, in one embodiment, the molecule which activity is to be increased in the process of the invention is the gene product with an activity as a “b4029-protein”, preferably it is the molecule of section (a) or (b) of this paragraph.

[91144] In particular, it was observed that in plants, especially in Arabidopsis thaliana, increasing or generating the activity of a gene product non-targeted with the activity of a “b4029-protein”, preferably being encoded by a gene comprising the nucleic acid sequence SEQ ID NO. 10740, preferably the coding region thereof, conferred the production of or the increase in glucose compared with the wild type control.

[91145] The nucleic acid sequence of B4029 from Escherichia coli, e.g. as shown in the respective line in column 5 of Table I, application no. 17, has been published in B. And the activity of the gene product thereof is the activity of b4029-protein.

[91146] Accordingly, in one embodiment, the process of the present invention for producing sedoheptulose-7-phosphate in a non-human organism, like a microorganism or a plant or a part thereof, comprises increasing or generating the activity of a gene product with the activity of a gene product conferring the activity of “b4029-protein”, especially from Escherichia coli or its functional equivalent or its homolog, e.g. the increase of
[91147] (a) a gene product of a gene comprising the nucleic acid molecule as shown in the respective line in column 5 of Table I (whereby the respective line disclose in column 7 the fine chemical sedoheptulose-7-phosphate), application no. 17, preferably the coding region thereof, or a homolog or a fragment thereof, and being depicted in the same respective line as said B4029, or a functional equivalent or a homolog thereof as shown in column 8 of Table I, application no. 17, preferably the coding region thereof, particularly a homolog or functional equivalent as shown in column 8 of Table I B, application no. 17, and being depicted in the same respective line as said B4029, and preferably the activity is increased non-targeted, or
[91148] (b) a polypeptide comprising a polypeptide, a consensus sequence or at least a polypeptide motif as shown in the respective line in column 5 of Table II or in column 8 of Table IV, application no. 17, respectively, and being depicted in the same respective line as said B4029, or a functional equivalent or a homolog thereof as depicted in column 8 of Table II, application no. 17, preferably a homolog or functional equivalent as depicted in column 8 of Table II B, application no. 17, and being depicted in the same respective line as said B4029, and preferably the activity is increased non-targeted, whereby the respective line disclose in column 7 the fine chemical sedoheptulose-7-phosphate.

[91149] Accordingly, in one embodiment, the molecule which activity is to be increased in the process of the invention is the gene product with an activity as a “b4029-protein”, preferably it is the molecule of section (a) or (b) of this paragraph.

[91150] In particular, it was observed that in plants, especially in Arabidopsis thaliana, increasing or generating the activity of a gene product non-targeted with the activity of a “b4029-protein”, preferably being encoded by a gene comprising the nucleic acid sequence SEQ ID NO. 10740, preferably the coding region thereof, conferred the production of or the increase in sedoheptulose-7-phosphate compared with the wild type control.

[91151] The nucleic acid sequence of B4039 from Escherichia coli, e.g. as shown in the respective line in column 5 of Table I, application no. 17, has been published in B. And the activity of the gene product thereof is the activity of chorismate lyase.

[91152] Accordingly, in one embodiment, the process of the present invention for producing glucose-1-phosphate in a non-human organism, like a microorganism or a plant or a part thereof, comprises increasing or generating the activity of a gene product with the activity of a gene product conferring the activity of “chorismate lyase”, especially from Escherichia coli or its functional equivalent or its homolog, e.g. the increase of
[91153] (a) a gene product of a gene comprising the nucleic acid molecule as shown in the respective line in column 5 of Table I (whereby the respective line disclose in column 7 the fine chemical glucose-1-phosphate), application no. 17, preferably the coding region thereof, or a homolog or a fragment thereof, and being depicted in the same respective line as said B4039, or a functional equivalent or a homolog thereof as shown in column 8 of Table I, application no. 17, preferably the coding region thereof, particularly a homolog or functional equivalent as shown in column 8 of Table I B, application no. 17, and being depicted in the same respective line as said B4039, and preferably the activity is increased plastidic, or
[91154] (b) a polypeptide comprising a polypeptide, a consensus sequence or at least a polypeptide motif as shown in the respective line in column 5 of Table II or in column 8 of Table IV, application no. 17, respectively, and being depicted in the same respective line as said B4039, or a functional equivalent or a homolog thereof as depicted in column 8 of Table II, application no. 17, preferably a homolog or functional equivalent as depicted in column 8 of Table II B, application no. 17, and being depicted in the same respective line as said B4039, and preferably the activity is increased plastidic, whereby the respective line disclose in column 7 the fine chemical glucose-1-phosphate.

[91155] Accordingly, in one embodiment, the molecule which activity is to be increased in the process of the invention is the gene product with an activity as a “chorismate lyase”, preferably it is the molecule of section (a) or (b) of this paragraph.

[91156] In particular, it was observed that in plants, especially in Arabidopsis thaliana, increasing or generating the activity of a gene product plastidic with the activity of a “chorismate lyase”, preferably being encoded by a gene comprising the nucleic acid sequence SEQ ID NO. 146848, preferably the coding region thereof, conferred the production of or the increase in glucose-1-phosphate compared with the wild type control.

[91157] The nucleic acid sequence of B4039 from Escherichia coli, e.g. as shown in the respective line in column 5 of Table I, application no. 17, has been published in B. And the activity of the gene product thereof is the activity of chorismate lyase.

[91158] Accordingly, in one embodiment, the process of the present invention for producing 3,4,5-trihydroxypentanoic acid in a non-human organism, like a microorganism or a plant or a part thereof, comprises increasing or generating the activity of a gene product with the activity of a gene product conferring the activity of “chorismate lyase”, especially from Escherichia coli or its functional equivalent or its homolog, e.g. the increase of
[91159] (a) a gene product of a gene comprising the nucleic acid molecule as shown in the respective line in column 5 of Table I (whereby the respective line disclose in column 7 the fine chemical 3,4,5-trihydroxypentanoic acid), application no. 17, preferably the coding region thereof, or a homolog or a fragment thereof, and being depicted in the same respective line as said B4039, or a functional equivalent or a homolog thereof as shown in column 8 of Table I, application no. 17, preferably the coding region thereof, particularly a homolog or functional equivalent as shown in column 8 of Table I B, application no. 17, and being depicted in the same respective line as said B4039, and preferably the activity is increased plastidic, or
[91160] (b) a polypeptide comprising a polypeptide, a consensus sequence or at least a polypeptide motif as shown in the respective line in column 5 of Table II or in column 8 of Table IV, application no. 17, respectively, and being depicted in the same respective line as said B4039, or a functional equivalent or a homolog thereof as depicted in column 8 of Table II, application no. 17, preferably a homolog or functional equivalent as depicted in column 8 of Table II B, application no. 17, and being depicted in the same respective line as said B4039, and preferably the activity is increased plastidic, whereby the respective line disclose in column 7 the fine chemical 3,4,5-trihydroxypentanoic acid.

[91161] Accordingly, in one embodiment, the molecule which activity is to be increased in the process of the invention is the gene product with an activity as a “chorismate lyase”, preferably it is the molecule of section (a) or (b) of this paragraph.

[91162] In particular, it was observed that in plants, especially in Arabidopsis thaliana, increasing or generating the activity of a gene product plastidic with the activity of a “chorismate lyase”, preferably being encoded by a gene comprising the nucleic acid sequence SEQ ID NO. 146848, preferably the coding region thereof, conferred the production of or the increase in 3,4,5-trihydroxypentanoic acid compared with the wild type control.

[91163] The nucleic acid sequence of B4050 from Escherichia coli, e.g. as shown in the respective line in column 5 of Table I, application no. 17, has been published in B. And the activity of the gene product thereof is the activity of b4050-protein.

[91164] Accordingly, in one embodiment, the process of the present invention for producing fructose in a non-human organism, like a microorganism or a plant or a part thereof, comprises increasing or generating the activity of a gene product with the activity of a gene product conferring the activity of “b4050-protein”, especially from Escherichia coli or its functional equivalent or its homolog, e.g. the increase of
[91165] (a) a gene product of a gene comprising the nucleic acid molecule as shown in the respective line in column 5 of Table I (whereby the respective line disclose in column 7 the fine chemical fructose), application no. 17, preferably the coding region thereof, or a homolog or a fragment thereof, and being depicted in the same respective line as said B4050, or a functional equivalent or a homolog thereof as shown in column 8 of Table I, application no. 17, preferably the coding region thereof, particularly a homolog or functional equivalent as shown in column 8 of Table I B, application no. 17, and being depicted in the same respective line as said B4050, and preferably the activity is increased non-targeted, or
[91166] (b) a polypeptide comprising a polypeptide, a consensus sequence or at least a polypeptide motif as shown in the respective line in column 5 of Table II or in column 8 of Table IV, application no. 17, respectively, and being depicted in the same respective line as said B4050, or a functional equivalent or a homolog thereof as depicted in column 8 of Table II, application no. 17, preferably a homolog or functional equivalent as depicted in column 8 of Table II B, application no. 17, and being depicted in the same respective line as said B4050, and preferably the activity is increased non-targeted, whereby the respective line disclose in column 7 the fine chemical fructose.

[91167] Accordingly, in one embodiment, the molecule which activity is to be increased in the process of the invention is the gene product with an activity as a “b4050-protein”, preferably it is the molecule of section (a) or (b) of this paragraph.

[91168] In particular, it was observed that in plants, especially in Arabidopsis thaliana, increasing or generating the activity of a gene product non-targeted with the activity of a “b4050-protein”, preferably being encoded by a gene comprising the nucleic acid sequence SEQ ID NO. 106532, preferably the coding region thereof, conferred the production of or the increase in fructose compared with the wild type control.

[91169] The nucleic acid sequence of B4050 from Escherichia coli, e.g. as shown in the respective line in column 5 of Table I, application no. 17, has been published in B. And the activity of the gene product thereof is the activity of b4050-protein.

[91170] Accordingly, in one embodiment, the process of the present invention for producing glucose in a non-human organism, like a microorganism or a plant or a part thereof, comprises increasing or generating the activity of a gene product with the activity of a gene product conferring the activity of “b4050-protein”, especially from Escherichia coli or its functional equivalent or its homolog, e.g. the increase of
[91171] (a) a gene product of a gene comprising the nucleic acid molecule as shown in the respective line in column 5 of Table I (whereby the respective line disclose in column 7 the fine chemical glucose), application no. 17, preferably the coding region thereof, or a homolog or a fragment thereof, and being depicted in the same respective line as said B4050, or a functional equivalent or a homolog thereof as shown in column 8 of Table I, application no. 17, preferably the coding region thereof, particularly a homolog or functional equivalent as shown in column 8 of Table I B, application no. 17, and being depicted in the same respective line as said B4050, and preferably the activity is increased non-targeted, or
[91172] (b) a polypeptide comprising a polypeptide, a consensus sequence or at least a polypeptide motif as shown in the respective line in column 5 of Table II or in column 8 of Table IV, application no. 17, respectively, and being depicted in the same respective line as said B4050, or a functional equivalent or a homolog thereof as depicted in column 8 of Table II, application no. 17, preferably a homolog or functional equivalent as depicted in column 8 of Table II B, application no. 17, and being depicted in the same respective line as said B4050, and preferably the activity is increased non-targeted, whereby the respective line disclose in column 7 the fine chemical glucose.

[91173] Accordingly, in one embodiment, the molecule which activity is to be increased in the process of the invention is the gene product with an activity as a “b4050-protein”, preferably it is the molecule of section (a) or (b) of this paragraph.

[91174] In particular, it was observed that in plants, especially in Arabidopsis thaliana, increasing or generating the activity of a gene product non-targeted with the activity of a “b4050-protein”, preferably being encoded by a gene comprising the nucleic acid sequence SEQ ID NO. 106532, preferably the coding region thereof, conferred the production of or the increase in glucose compared with the wild type control.

[91175] The nucleic acid sequence of B4050 from Escherichia coli, e.g. as shown in the respective line in column 5 of Table I, application no. 17, has been published in B. And the activity of the gene product thereof is the activity of b4050-protein.

[91176] Accordingly, in one embodiment, the process of the present invention for producing myo-inositol in a non-human organism, like a microorganism or a plant or a part thereof, comprises increasing or generating the activity of a gene product with the activity of a gene product conferring the activity of “b4050-protein”, especially from Escherichia coli or its functional equivalent or its homolog, e.g. the increase of
[91177] (a) a gene product of a gene comprising the nucleic acid molecule as shown in the respective line in column 5 of Table I (whereby the respective line disclose in column 7 the fine chemical myo-inositol), application no. 17, preferably the coding region thereof, or a homolog or a fragment thereof, and being depicted in the same respective line as said B4050, or a functional equivalent or a homolog thereof as shown in column 8 of Table I, application no. 17, preferably the coding region thereof, particularly a homolog or functional equivalent as shown in column 8 of Table I B, application no. 17, and being depicted in the same respective line as said B4050, and preferably the activity is increased non-targeted, or
[91178] (b) a polypeptide comprising a polypeptide, a consensus sequence or at least a polypeptide motif as shown in the respective line in column 5 of Table II or in column 8 of Table IV, application no. 17, respectively, and being depicted in the same respective line as said B4050, or a functional equivalent or a homolog thereof as depicted in column 8 of Table II, application no. 17, preferably a homolog or functional equivalent as depicted in column 8 of Table II B, application no. 17, and being depicted in the same respective line as said B4050, and preferably the activity is increased non-targeted, whereby the respective line disclose in column 7 the fine chemical myo-inositol.

[91179] Accordingly, in one embodiment, the molecule which activity is to be increased in the process of the invention is the gene product with an activity as a “b4050-protein”, preferably it is the molecule of section (a) or (b) of this paragraph.

[91180] In particular, it was observed that in plants, especially in Arabidopsis thaliana, increasing or generating the activity of a gene product non-targeted with the activity of a “b4050-protein”, preferably being encoded by a gene comprising the nucleic acid sequence SEQ ID NO. 106532, preferably the coding region thereof, conferred the production of or the increase in myo-inositol compared with the wild type control.

[91181] The nucleic acid sequence of B4056 from Escherichia coli, e.g. as shown in the respective line in column 5 of Table I, application no. 17, has been published in B. And the activity of the gene product thereof is the activity of b4056-protein.

[91182] Accordingly, in one embodiment, the process of the present invention for producing fructose in a non-human organism, like a microorganism or a plant or a part thereof, comprises increasing or generating the activity of a gene product with the activity of a gene product conferring the activity of “b4056-protein”, especially from Escherichia coli or its functional equivalent or its homolog, e.g. the increase of
[91183] (a) a gene product of a gene comprising the nucleic acid molecule as shown in the respective line in column 5 of Table I (whereby the respective line disclose in column 7 the fine chemical fructose), application no. 17, preferably the coding region thereof, or a homolog or a fragment thereof, and being depicted in the same respective line as said B4056, or a functional equivalent or a homolog thereof as shown in column 8 of Table I, application no. 17, preferably the coding region thereof, particularly a homolog or functional equivalent as shown in column 8 of Table I B, application no. 17, and being depicted in the same respective line as said B4056, and preferably the activity is increased non-targeted, or
[91184] (b) a polypeptide comprising a polypeptide, a consensus sequence or at least a polypeptide motif as shown in the respective line in column 5 of Table II or in column 8 of Table IV, application no. 17, respectively, and being depicted in the same respective line as said B4056, or a functional equivalent or a homolog thereof as depicted in column 8 of Table II, application no. 17, preferably a homolog or functional equivalent as depicted in column 8 of Table II B, application no. 17, and being depicted in the same respective line as said B4056, and preferably the activity is increased non-targeted, whereby the respective line disclose in column 7 the fine chemical fructose.

[91185] Accordingly, in one embodiment, the molecule which activity is to be increased in the process of the invention is the gene product with an activity as a “b4056-protein”, preferably it is the molecule of section (a) or (b) of this paragraph.

[91186] In particular, it was observed that in plants, especially in Arabidopsis thaliana, increasing or generating the activity of a gene product non-targeted with the activity of a “b4056-protein”, preferably being encoded by a gene comprising the nucleic acid sequence SEQ ID NO. 94542, preferably the coding region thereof, conferred the production of or the increase in fructose compared with the wild type control.

[91187] The nucleic acid sequence of B4069 from Escherichia coli, e.g. as shown in the respective line in column 5 of Table I, application no. 17, has been published in B. And the activity of the gene product thereof is the activity of acetyl-coenzyme A synthetase.

[91188] Accordingly, in one embodiment, the process of the present invention for producing galactinol in a non-human organism, like a microorganism or a plant or a part thereof, comprises increasing or generating the activity of a gene product with the activity of a gene product conferring the activity of “acetyl-coenzyme A synthetase”, especially from Escherichia coli or its functional equivalent or its homolog, e.g. the increase of
[91189] (a) a gene product of a gene comprising the nucleic acid molecule as shown in the respective line in column 5 of Table I (whereby the respective line disclose in column 7 the fine chemical galactinol), application no. 17, preferably the coding region thereof, or a homolog or a fragment thereof, and being depicted in the same respective line as said B4069, or a functional equivalent or a homolog thereof as shown in column 8 of Table I, application no. 17, preferably the coding region thereof, particularly a homolog or functional equivalent as shown in column 8 of Table I B, application no. 17, and being depicted in the same respective line as said B4069, and preferably the activity is increased plastidic, or
[91190] (b) a polypeptide comprising a polypeptide, a consensus sequence or at least a polypeptide motif as shown in the respective line in column 5 of Table II or in column 8 of Table IV, application no. 17, respectively, and being depicted in the same respective line as said B4069, or a functional equivalent or a homolog thereof as depicted in column 8 of Table II, application no. 17, preferably a homolog or functional equivalent as depicted in column 8 of Table II B, application no. 17, and being depicted in the same respective line as said B4069, and preferably the activity is increased plastidic, whereby the respective line disclose in column 7 the fine chemical galactinol.

[91191] Accordingly, in one embodiment, the molecule which activity is to be increased in the process of the invention is the gene product with an activity as a “acetyl-coenzyme A synthetase”, preferably it is the molecule of section (a) or (b) of this paragraph.

[91192] In particular, it was observed that in plants, especially in Arabidopsis thaliana, increasing or generating the activity of a gene product plastidic with the activity of a “acetyl-coenzyme A synthetase”, preferably being encoded by a gene comprising the nucleic acid sequence SEQ ID NO. 126421, preferably the coding region thereof, conferred the production of or the increase in galactinol compared with the wild type control.

[91193] The nucleic acid sequence of B4189 from Escherichia coli, e.g. as shown in the respective line in column 5 of Table I, application no. 17, has been published in B. And the activity of the gene product thereof is the activity of lipoprotein precursor.

[91194] Accordingly, in one embodiment, the process of the present invention for producing glucose-1-phosphate in a non-human organism, like a microorganism or a plant or a part thereof, comprises increasing or generating the activity of a gene product with the activity of a gene product conferring the activity of “lipoprotein precursor”, especially from Escherichia coli or its functional equivalent or its homolog, e.g. the increase of
[91195] (a) a gene product of a gene comprising the nucleic acid molecule as shown in the respective line in column 5 of Table I (whereby the respective line disclose in column 7 the fine chemical glucose-1-phosphate), application no. 17, preferably the coding region thereof, or a homolog or a fragment thereof, and being depicted in the same respective line as said B4189, or a functional equivalent or a homolog thereof as shown in column 8 of Table I, application no. 17, preferably the coding region thereof, particularly a homolog or functional equivalent as shown in column 8 of Table I B, application no. 17, and being depicted in the same respective line as said B4189, and preferably the activity is increased non-targeted, or
[91196] (b) a polypeptide comprising a polypeptide, a consensus sequence or at least a polypeptide motif as shown in the respective line in column 5 of Table II or in column 8 of Table IV, application no. 17, respectively, and being depicted in the same respective line as said B4189, or a functional equivalent or a homolog thereof as depicted in column 8 of Table II, application no. 17, preferably a homolog or functional equivalent as depicted in column 8 of Table II B, application no. 17, and being depicted in the same respective line as said B4189, and preferably the activity is increased non-targeted, whereby the respective line disclose in column 7 the fine chemical glucose-1-phosphate.

[91197] Accordingly, in one embodiment, the molecule which activity is to be increased in the process of the invention is the gene product with an activity as a “lipoprotein precursor”, preferably it is the molecule of section (a) or (b) of this paragraph.

[91198] In particular, it was observed that in plants, especially in Arabidopsis thaliana, increasing or generating the activity of a gene product non-targeted with the activity of a “lipoprotein precursor”, preferably being encoded by a gene comprising the nucleic acid sequence SEQ ID NO. 146921, preferably the coding region thereof, conferred the production of or the increase in glucose-1-phosphate compared with the wild type control.

[91199] The nucleic acid sequence of B4189 from Escherichia coli, e.g. as shown in the respective line in column 5 of Table I, application no. 17, has been published in B. And the activity of the gene product thereof is the activity of lipoprotein precursor.

[91200] Accordingly, in one embodiment, the process of the present invention for producing 3,4,5-trihydroxypentanoic acid in a non-human organism, like a microorganism or a plant or a part thereof, comprises increasing or generating the activity of a gene product with the activity of a gene product conferring the activity of “lipoprotein precursor”, especially from Escherichia coli or its functional equivalent or its homolog, e.g. the increase of
[91201] (a) a gene product of a gene comprising the nucleic acid molecule as shown in the respective line in column 5 of Table I (whereby the respective line disclose in column 7 the fine chemical 3,4,5-trihydroxypentanoic acid), application no. 17, preferably the coding region thereof, or a homolog or a fragment thereof, and being depicted in the same respective line as said B4189, or a functional equivalent or a homolog thereof as shown in column 8 of Table I, application no. 17, preferably the coding region thereof, particularly a homolog or functional equivalent as shown in column 8 of Table I B, application no. 17, and being depicted in the same respective line as said B4189, and preferably the activity is increased non-targeted, or
[91202] (b) a polypeptide comprising a polypeptide, a consensus sequence or at least a polypeptide motif as shown in the respective line in column 5 of Table II or in column 8 of Table IV, application no. 17, respectively, and being depicted in the same respective line as said B4189, or a functional equivalent or a homolog thereof as depicted in column 8 of Table II, application no. 17, preferably a homolog or functional equivalent as depicted in column 8 of Table II B, application no. 17, and being depicted in the same respective line as said B4189, and preferably the activity is increased non-targeted, whereby the respective line disclose in column 7 the fine chemical 3,4,5-trihydroxypentanoic acid.

[91203] Accordingly, in one embodiment, the molecule which activity is to be increased in the process of the invention is the gene product with an activity as a “lipoprotein precursor”, preferably it is the molecule of section (a) or (b) of this paragraph.

[91204] In particular, it was observed that in plants, especially in Arabidopsis thaliana, increasing or generating the activity of a gene product non-targeted with the activity of a “lipoprotein precursor”, preferably being encoded by a gene comprising the nucleic acid sequence SEQ ID NO. 146921, preferably the coding region thereof, conferred the production of or the increase in 3,4,5-trihydroxypentanoic acid compared with the wild type control.

[91205] The nucleic acid sequence of B4250 from Escherichia coli, e.g. as shown in the respective line in column 5 of Table I, application no. 17, has been published in B. And the activity of the gene product thereof is the activity of b4250-protein.

[91206] Accordingly, in one embodiment, the process of the present invention for producing myo-inositol in a non-human organism, like a microorganism or a plant or a part thereof, comprises increasing or generating the activity of a gene product with the activity of a gene product conferring the activity of “b4250-protein”, especially from Escherichia coli or its functional equivalent or its homolog, e.g. the increase of
[91207] (a) a gene product of a gene comprising the nucleic acid molecule as shown in the respective line in column 5 of Table I (whereby the respective line disclose in column 7 the fine chemical myo-inositol), application no. 17, preferably the coding region thereof, or a homolog or a fragment thereof, and being depicted in the same respective line as said B4250, or a functional equivalent or a homolog thereof as shown in column 8 of Table I, application no. 17, preferably the coding region thereof, particularly a homolog or functional equivalent as shown in column 8 of Table I B, application no. 17, and being depicted in the same respective line as said B4250, and preferably the activity is increased non-targeted, or
[91208] (b) a polypeptide comprising a polypeptide, a consensus sequence or at least a polypeptide motif as shown in the respective line in column 5 of Table II or in column 8 of Table IV, application no. 17, respectively, and being depicted in the same respective line as said B4250, or a functional equivalent or a homolog thereof as depicted in column 8 of Table II, application no. 17, preferably a homolog or functional equivalent as depicted in column 8 of Table II B, application no. 17, and being depicted in the same respective line as said B4250, and preferably the activity is increased non-targeted, whereby the respective line disclose in column 7 the fine chemical myo-inositol.

[91209] Accordingly, in one embodiment, the molecule which activity is to be increased in the process of the invention is the gene product with an activity as a “b4250-protein”, preferably it is the molecule of section (a) or (b) of this paragraph.

[91210] In particular, it was observed that in plants, especially in Arabidopsis thaliana, increasing or generating the activity of a gene product non-targeted with the activity of a “b4250-protein”, preferably being encoded by a gene comprising the nucleic acid sequence SEQ ID NO. 94735, preferably the coding region thereof, conferred the production of or the increase in myo-inositol compared with the wild type control.

[91211] The nucleic acid sequence of B4250 from Escherichia coli, e.g. as shown in the respective line in column 5 of Table I, application no. 17, has been published in B. And the activity of the gene product thereof is the activity of b4250-protein.

[91212] Accordingly, in one embodiment, the process of the present invention for producing raffinose in a non-human organism, like a microorganism or a plant or a part thereof, comprises increasing or generating the activity of a gene product with the activity of a gene product conferring the activity of “b4250-protein”, especially from Escherichia coli or its functional equivalent or its homolog, e.g. the increase of
[91213] (a) a gene product of a gene comprising the nucleic acid molecule as shown in the respective line in column 5 of Table I (whereby the respective line disclose in column 7 the fine chemical raffinose), application no. 17, preferably the coding region thereof, or a homolog or a fragment thereof, and being depicted in the same respective line as said B4250, or a functional equivalent or a homolog thereof as shown in column 8 of Table I, application no. 17, preferably the coding region thereof, particularly a homolog or functional equivalent as shown in column 8 of Table I B, application no. 17, and being depicted in the same respective line as said B4250, and preferably the activity is increased non-targeted, or
[91214] (b) a polypeptide comprising a polypeptide, a consensus sequence or at least a polypeptide motif as shown in the respective line in column 5 of Table II or in column 8 of Table IV, application no. 17, respectively, and being depicted in the same respective line as said B4250, or a functional equivalent or a homolog thereof as depicted in column 8 of Table II, application no. 17, preferably a homolog or functional equivalent as depicted in column 8 of Table II B, application no. 17, and being depicted in the same respective line as said B4250, and preferably the activity is increased non-targeted, whereby the respective line disclose in column 7 the fine chemical raffinose.

[91215] Accordingly, in one embodiment, the molecule which activity is to be increased in the process of the invention is the gene product with an activity as a “b4250-protein”, preferably it is the molecule of section (a) or (b) of this paragraph.

[91216] In particular, it was observed that in plants, especially in Arabidopsis thaliana, increasing or generating the activity of a gene product non-targeted with the activity of a “b4250-protein”, preferably being encoded by a gene comprising the nucleic acid sequence SEQ ID NO. 94735, preferably the coding region thereof, conferred the production of or the increase in raffinose compared with the wild type control.

[91217] The nucleic acid sequence of B4256 from Escherichia coli, e.g. as shown in the respective line in column 5 of Table I, application no. 17, has been published in B. And the activity of the gene product thereof is the activity of acetyltransferase.

[91218] Accordingly, in one embodiment, the process of the present invention for producing fructose in a non-human organism, like a microorganism or a plant or a part thereof, comprises increasing or generating the activity of a gene product with the activity of a gene product conferring the activity of “acetyltransferase”, especially from Escherichia coli or its functional equivalent or its homolog, e.g. the increase of
[91219] (a) a gene product of a gene comprising the nucleic acid molecule as shown in the respective line in column 5 of Table I (whereby the respective line disclose in column 7 the fine chemical fructose), application no. 17, preferably the coding region thereof, or a homolog or a fragment thereof, and being depicted in the same respective line as said B4256, or a functional equivalent or a homolog thereof as shown in column 8 of Table I, application no. 17, preferably the coding region thereof, particularly a homolog or functional equivalent as shown in column 8 of Table I B, application no. 17, and being depicted in the same respective line as said B4256, and preferably the activity is increased non-targeted, or
[91220] (b) a polypeptide comprising a polypeptide, a consensus sequence or at least a polypeptide motif as shown in the respective line in column 5 of Table II or in column 8 of Table IV, application no. 17, respectively, and being depicted in the same respective line as said B4256, or a functional equivalent or a homolog thereof as depicted in column 8 of Table II, application no. 17, preferably a homolog or functional equivalent as depicted in column 8 of Table II B, application no. 17, and being depicted in the same respective line as said B4256, and preferably the activity is increased non-targeted, whereby the respective line disclose in column 7 the fine chemical fructose.

[91221] Accordingly, in one embodiment, the molecule which activity is to be increased in the process of the invention is the gene product with an activity as a “acetyltransferase”, preferably it is the molecule of section (a) or (b) of this paragraph.

[91222] In particular, it was observed that in plants, especially in Arabidopsis thaliana, increasing or generating the activity of a gene product non-targeted with the activity of a “acetyltransferase”, preferably being encoded by a gene comprising the nucleic acid sequence SEQ ID NO. 45321, preferably the coding region thereof, conferred the production of or the increase in fructose compared with the wild type control.

[91223] The nucleic acid sequence of B4256 from Escherichia coli, e.g. as shown in the respective line in column 5 of Table I, application no. 17, has been published in B. And the activity of the gene product thereof is the activity of acetyltransferase.

[91224] Accordingly, in one embodiment, the process of the present invention for producing glucose in a non-human organism, like a microorganism or a plant or a part thereof, comprises increasing or generating the activity of a gene product with the activity of a gene product conferring the activity of “acetyltransferase”, especially from Escherichia coli or its functional equivalent or its homolog, e.g. the increase of
[91225] (a) a gene product of a gene comprising the nucleic acid molecule as shown in the respective line in column 5 of Table I (whereby the respective line disclose in column 7 the fine chemical glucose), application no. 17, preferably the coding region thereof, or a homolog or a fragment thereof, and being depicted in the same respective line as said B4256, or a functional equivalent or a homolog thereof as shown in column 8 of Table I, application no. 17, preferably the coding region thereof, particularly a homolog or functional equivalent as shown in column 8 of Table I B, application no. 17, and being depicted in the same respective line as said B4256, and preferably the activity is increased non-targeted, or
[91226] (b) a polypeptide comprising a polypeptide, a consensus sequence or at least a polypeptide motif as shown in the respective line in column 5 of Table II or in column 8 of Table IV, application no. 17, respectively, and being depicted in the same respective line as said B4256, or a functional equivalent or a homolog thereof as depicted in column 8 of Table II, application no. 17, preferably a homolog or functional equivalent as depicted in column 8 of Table II B, application no. 17, and being depicted in the same respective line as said B4256, and preferably the activity is increased non-targeted, whereby the respective line disclose in column 7 the fine chemical glucose.

[91227] Accordingly, in one embodiment, the molecule which activity is to be increased in the process of the invention is the gene product with an activity as a “acetyltransferase”, preferably it is the molecule of section (a) or (b) of this paragraph.

[91228] In particular, it was observed that in plants, especially in Arabidopsis thaliana, increasing or generating the activity of a gene product non-targeted with the activity of a “acetyltransferase”, preferably being encoded by a gene comprising the nucleic acid sequence SEQ ID NO. 45321, preferably the coding region thereof, conferred the production of or the increase in glucose compared with the wild type control.

[91229] The nucleic acid sequence of B4321 from Escherichia coli, e.g. as shown in the respective line in column 5 of Table I, application no. 17, has been published in B. And the activity of the gene product thereof is the activity of gluconate transport system permease 3.

[91230] Accordingly, in one embodiment, the process of the present invention for producing fructose in a non-human organism, like a microorganism or a plant or a part thereof, comprises increasing or generating the activity of a gene product with the activity of a gene product conferring the activity of “gluconate transport system permease 3”, especially from Escherichia coli or its functional equivalent or its homolog, e.g. the increase of
[91231] (a) a gene product of a gene comprising the nucleic acid molecule as shown in the respective line in column 5 of Table I (whereby the respective line disclose in column 7 the fine chemical fructose), application no. 17, preferably the coding region thereof, or a homolog or a fragment thereof, and being depicted in the same respective line as said B4321, or a functional equivalent or a homolog thereof as shown in column 8 of Table I, application no. 17, preferably the coding region thereof, particularly a homolog or functional equivalent as shown in column 8 of Table I B, application no. 17, and being depicted in the same respective line as said B4321, and preferably the activity is increased non-targeted, or
[91232] (b) a polypeptide comprising a polypeptide, a consensus sequence or at least a polypeptide motif as shown in the respective line in column 5 of Table II or in column 8 of Table IV, application no. 17, respectively, and being depicted in the same respective line as said B4321, or a functional equivalent or a homolog thereof as depicted in column 8 of Table II, application no. 17, preferably a homolog or functional equivalent as depicted in column 8 of Table II B, application no. 17, and being depicted in the same respective line as said B4321, and preferably the activity is increased non-targeted, whereby the respective line disclose in column 7 the fine chemical fructose.

[91233] Accordingly, in one embodiment, the molecule which activity is to be increased in the process of the invention is the gene product with an activity as a “gluconate transport system permease 3”, preferably it is the molecule of section (a) or (b) of this paragraph.

[91234] In particular, it was observed that in plants, especially in Arabidopsis thaliana, increasing or generating the activity of a gene product non-targeted with the activity of a “gluconate transport system permease 3”, preferably being encoded by a gene comprising the nucleic acid sequence SEQ ID NO. 45394, preferably the coding region thereof, conferred the production of or the increase in fructose compared with the wild type control.

[91235] The nucleic acid sequence of B4384 from Escherichia coli, e.g. as shown in the respective line in column 5 of Table I, application no. 17, has been published in B. And the activity of the gene product thereof is the activity of purine-nucleoside phosphorylase.

[91236] Accordingly, in one embodiment, the process of the present invention for producing galactinol in a non-human organism, like a microorganism or a plant or a part thereof, comprises increasing or generating the activity of a gene product with the activity of a gene product conferring the activity of “purine-nucleoside phosphorylase”, especially from Escherichia coli or its functional equivalent or its homolog, e.g. the increase of
[91237] (a) a gene product of a gene comprising the nucleic acid molecule as shown in the respective line in column 5 of Table I (whereby the respective line disclose in column 7 the fine chemical galactinol), application no. 17, preferably the coding region thereof, or a homolog or a fragment thereof, and being depicted in the same respective line as said B4384, or a functional equivalent or a homolog thereof as shown in column 8 of Table I, application no. 17, preferably the coding region thereof, particularly a homolog or functional equivalent as shown in column 8 of Table I B, application no. 17, and being depicted in the same respective line as said B4384, and preferably the activity is increased non-targeted, or
[91238] (b) a polypeptide comprising a polypeptide, a consensus sequence or at least a polypeptide motif as shown in the respective line in column 5 of Table II or in column 8 of Table IV, application no. 17, respectively, and being depicted in the same respective line as said B4384, or a functional equivalent or a homolog thereof as depicted in column 8 of Table II, application no. 17, preferably a homolog or functional equivalent as depicted in column 8 of Table II B, application no. 17, and being depicted in the same respective line as said B4384, and preferably the activity is increased non-targeted, whereby the respective line disclose in column 7 the fine chemical galactinol.

[91239] Accordingly, in one embodiment, the molecule which activity is to be increased in the process of the invention is the gene product with an activity as a “purine-nucleoside phosphorylase”, preferably it is the molecule of section (a) or (b) of this paragraph.

[91240] In particular, it was observed that in plants, especially in Arabidopsis thaliana, increasing or generating the activity of a gene product non-targeted with the activity of a “purine-nucleoside phosphorylase”, preferably being encoded by a gene comprising the nucleic acid sequence SEQ ID NO. 45556, preferably the coding region thereof, conferred the production of or the increase in galactinol compared with the wild type control.

[91241] The nucleic acid sequence of D90900 from Synechocystis sp., e.g. as shown in the respective line in column 5 of Table I, application no. 17, has been published in C. And the activity of the gene product thereof is the activity of lysine decarboxylase.

[91242] Accordingly, in one embodiment, the process of the present invention for producing myo-inositol in a non-human organism, like a microorganism or a plant or a part thereof, comprises increasing or generating the activity of a gene product with the activity of a gene product conferring the activity of “lysine decarboxylase”, especially from Synechocystis sp. or its functional equivalent or its homolog, e.g. the increase of
[91243] (a) a gene product of a gene comprising the nucleic acid molecule as shown in the respective line in column 5 of Table I (whereby the respective line disclose in column 7 the fine chemical myo-inositol), application no. 17, preferably the coding region thereof, or a homolog or a fragment thereof, and being depicted in the same respective line as said D90900, or a functional equivalent or a homolog thereof as shown in column 8 of Table I, application no. 17, preferably the coding region thereof, particularly a homolog or functional equivalent as shown in column 8 of Table I B, application no. 17, and being depicted in the same respective line as said D90900, and preferably the activity is increased plastidic, or
[91244] (b) a polypeptide comprising a polypeptide, a consensus sequence or at least a polypeptide motif as shown in the respective line in column 5 of Table II or in column 8 of Table IV, application no. 17, respectively, and being depicted in the same respective line as said D90900, or a functional equivalent or a homolog thereof as depicted in column 8 of Table II, application no. 17, preferably a homolog or functional equivalent as depicted in column 8 of Table II B, application no. 17, and being depicted in the same respective line as said D90900, and preferably the activity is increased plastidic, whereby the respective line disclose in column 7 the fine chemical myo-inositol.

[91245] Accordingly, in one embodiment, the molecule which activity is to be increased in the process of the invention is the gene product with an activity as a “lysine decarboxylase”, preferably it is the molecule of section (a) or (b) of this paragraph.

[91246] In particular, it was observed that in plants, especially in Arabidopsis thaliana, increasing or generating the activity of a gene product plastidic with the activity of a “lysine decarboxylase”, preferably being encoded by a gene comprising the nucleic acid sequence SEQ ID NO. 84079, preferably the coding region thereof, conferred the production of or the increase in myo-inositol compared with the wild type control.

[91247] The nucleic acid sequence of GM02LC12622 from Glycine max, e.g. as shown in the respective line in column 5 of Table I, application no. 17, is unpublished. And the activity of the gene product thereof is the activity of glutaredoxin.

[91248] Accordingly, in one embodiment, the process of the present invention for producing fructose in a non-human organism, like a microorganism or a plant or a part thereof, comprises increasing or generating the activity of a gene product with the activity of a gene product conferring the activity of “glutaredoxin”, especially from Glycine max or its functional equivalent or its homolog, e.g. the increase of
[91249] (a) a gene product of a gene comprising the nucleic acid molecule as shown in the respective line in column 5 of Table I (whereby the respective line disclose in column 7 the fine chemical fructose), application no. 17, preferably the coding region thereof, or a homolog or a fragment thereof, and being depicted in the same respective line as said GM02LC12622, or a functional equivalent or a homolog thereof as shown in column 8 of Table I, application no. 17, preferably the coding region thereof, particularly a homolog or functional equivalent as shown in column 8 of Table I B, application no. 17, and being depicted in the same respective line as said GM02LC12622, and preferably the activity is increased non-targeted, or
[91250] (b) a polypeptide comprising a polypeptide, a consensus sequence or at least a polypeptide motif as shown in the respective line in column 5 of Table II or in column 8 of Table IV, application no. 17, respectively, and being depicted in the same respective line as said GM02LC12622, or a functional equivalent or a homolog thereof as depicted in column 8 of Table II, application no. 17, preferably a homolog or functional equivalent as depicted in column 8 of Table II B, application no. 17, and being depicted in the same respective line as said GM02LC12622, and preferably the activity is increased non-targeted, whereby the respective line disclose in column 7 the fine chemical fructose.

[91251] Accordingly, in one embodiment, the molecule which activity is to be increased in the process of the invention is the gene product with an activity as a “glutaredoxin”, preferably it is the molecule of section (a) or (b) of this paragraph.

[91252] In particular, it was observed that in plants, especially in Arabidopsis thaliana, increasing or generating the activity of a gene product non-targeted with the activity of a “glutaredoxin”, preferably being encoded by a gene comprising the nucleic acid sequence SEQ ID NO. 10811, preferably the coding region thereof, conferred the production of or the increase in fructose compared with the wild type control.

[91253] The nucleic acid sequence of GM02LC12622 from Glycine max, e.g. as shown in the respective line in column 5 of Table I, application no. 17, is unpublished. And the activity of the gene product thereof is the activity of glutaredoxin.

[91254] Accordingly, in one embodiment, the process of the present invention for producing glucose in a non-human organism, like a microorganism or a plant or a part thereof, comprises increasing or generating the activity of a gene product with the activity of a gene product conferring the activity of “glutaredoxin”, especially from Glycine max or its functional equivalent or its homolog, e.g. the increase of
[91255] (a) a gene product of a gene comprising the nucleic acid molecule as shown in the respective line in column 5 of Table I (whereby the respective line disclose in column 7 the fine chemical glucose), application no. 17, preferably the coding region thereof, or a homolog or a fragment thereof, and being depicted in the same respective line as said GM02LC12622, or a functional equivalent or a homolog thereof as shown in column 8 of Table I, application no. 17, preferably the coding region thereof, particularly a homolog or functional equivalent as shown in column 8 of Table I B, application no. 17, and being depicted in the same respective line as said GM02LC12622, and preferably the activity is increased non-targeted, or
[91256] (b) a polypeptide comprising a polypeptide, a consensus sequence or at least a polypeptide motif as shown in the respective line in column 5 of Table II or in column 8 of Table IV, application no. 17, respectively, and being depicted in the same respective line as said GM02LC12622, or a functional equivalent or a homolog thereof as depicted in column 8 of Table II, application no. 17, preferably a homolog or functional equivalent as depicted in column 8 of Table II B, application no. 17, and being depicted in the same respective line as said GM02LC12622, and preferably the activity is increased non-targeted, whereby the respective line disclose in column 7 the fine chemical glucose.

[91257] Accordingly, in one embodiment, the molecule which activity is to be increased in the process of the invention is the gene product with an activity as a “glutaredoxin”, preferably it is the molecule of section (a) or (b) of this paragraph.

[91258] In particular, it was observed that in plants, especially in Arabidopsis thaliana, increasing or generating the activity of a gene product non-targeted with the activity of a “glutaredoxin”, preferably being encoded by a gene comprising the nucleic acid sequence SEQ ID NO. 10811, preferably the coding region thereof, conferred the production of or the increase in glucose compared with the wild type control.

[91259] The nucleic acid sequence of GM02LC12622 from Glycine max, e.g. as shown in the respective line in column 5 of Table I, application no. 17, is unpublished. And the activity of the gene product thereof is the activity of glutaredoxin.

[91260] Accordingly, in one embodiment, the process of the present invention for producing glucose-1-phosphate in a non-human organism, like a microorganism or a plant or a part thereof, comprises increasing or generating the activity of a gene product with the activity of a gene product conferring the activity of “glutaredoxin”, especially from Glycine max or its functional equivalent or its homolog, e.g. the increase of
[91261] (a) a gene product of a gene comprising the nucleic acid molecule as shown in the respective line in column 5 of Table I (whereby the respective line disclose in column 7 the fine chemical glucose-1-phosphate), application no. 17, preferably the coding region thereof, or a homolog or a fragment thereof, and being depicted in the same respective line as said GM02LC12622, or a functional equivalent or a homolog thereof as shown in column 8 of Table I, application no. 17, preferably the coding region thereof, particularly a homolog or functional equivalent as shown in column 8 of Table I B, application no. 17, and being depicted in the same respective line as said GM02LC12622, and preferably the activity is increased non-targeted, or
[91262] (b) a polypeptide comprising a polypeptide, a consensus sequence or at least a polypeptide motif as shown in the respective line in column 5 of Table II or in column 8 of Table IV, application no. 17, respectively, and being depicted in the same respective line as said GM02LC12622, or a functional equivalent or a homolog thereof as depicted in column 8 of Table II, application no. 17, preferably a homolog or functional equivalent as depicted in column 8 of Table II B, application no. 17, and being depicted in the same respective line as said GM02LC12622, and preferably the activity is increased non-targeted, whereby the respective line disclose in column 7 the fine chemical glucose-1-phosphate.

[91263] Accordingly, in one embodiment, the molecule which activity is to be increased in the process of the invention is the gene product with an activity as a “glutaredoxin”, preferably it is the molecule of section (a) or (b) of this paragraph.

[91264] In particular, it was observed that in plants, especially in Arabidopsis thaliana, increasing or generating the activity of a gene product non-targeted with the activity of a “glutaredoxin”, preferably being encoded by a gene comprising the nucleic acid sequence SEQ ID NO. 10811, preferably the coding region thereof, conferred the production of or the increase in glucose-1-phosphate compared with the wild type control.

[91265] The nucleic acid sequence of GM02LC12622 from Glycine max, e.g. as shown in the respective line in column 5 of Table I, application no. 17, is unpublished. And the activity of the gene product thereof is the activity of glutaredoxin.

[91266] Accordingly, in one embodiment, the process of the present invention for producing myo-inositol in a non-human organism, like a microorganism or a plant or a part thereof, comprises increasing or generating the activity of a gene product with the activity of a gene product conferring the activity of “glutaredoxin”, especially from Glycine max or its functional equivalent or its homolog, e.g. the increase of
[91267] (a) a gene product of a gene comprising the nucleic acid molecule as shown in the respective line in column 5 of Table I (whereby the respective line disclose in column 7 the fine chemical myo-inositol), application no. 17, preferably the coding region thereof, or a homolog or a fragment thereof, and being depicted in the same respective line as said GM02LC12622, or a functional equivalent or a homolog thereof as shown in column 8 of Table I, application no. 17, preferably the coding region thereof, particularly a homolog or functional equivalent as shown in column 8 of Table I B, application no. 17, and being depicted in the same respective line as said GM02LC12622, and preferably the activity is increased non-targeted, or
[91268] (b) a polypeptide comprising a polypeptide, a consensus sequence or at least a polypeptide motif as shown in the respective line in column 5 of Table II or in column 8 of Table IV, application no. 17, respectively, and being depicted in the same respective line as said GM02LC12622, or a functional equivalent or a homolog thereof as depicted in column 8 of Table II, application no. 17, preferably a homolog or functional equivalent as depicted in column 8 of Table II B, application no. 17, and being depicted in the same respective line as said GM02LC12622, and preferably the activity is increased non-targeted, whereby the respective line disclose in column 7 the fine chemical myo-inositol.

[91269] Accordingly, in one embodiment, the molecule which activity is to be increased in the process of the invention is the gene product with an activity as a “glutaredoxin”, preferably it is the molecule of section (a) or (b) of this paragraph.

[91270] In particular, it was observed that in plants, especially in Arabidopsis thaliana, increasing or generating the activity of a gene product non-targeted with the activity of a “glutaredoxin”, preferably being encoded by a gene comprising the nucleic acid sequence SEQ ID NO. 10811, preferably the coding region thereof, conferred the production of or the increase in myo-inositol compared with the wild type control.

[91271] The nucleic acid sequence of GM02LC12622 from Glycine max, e.g. as shown in the respective line in column 5 of Table I, application no. 17, is unpublished. And the activity of the gene product thereof is the activity of glutaredoxin.

[91272] Accordingly, in one embodiment, the process of the present invention for producing sucrose in a non-human organism, like a microorganism or a plant or a part thereof, comprises increasing or generating the activity of a gene product with the activity of a gene product conferring the activity of “glutaredoxin”, especially from Glycine max or its functional equivalent or its homolog, e.g.

[91273] the increase of
[91274] (a) a gene product of a gene comprising the nucleic acid molecule as shown in the respective line in column 5 of Table I (whereby the respective line disclose in column 7 the fine chemical sucrose), application no. 17, preferably the coding region thereof, or a homolog or a fragment thereof, and being depicted in the same respective line as said GM02LC12622, or a functional equivalent or a homolog thereof as shown in column 8 of Table I, application no. 17, preferably the coding region thereof, particularly a homolog or functional equivalent as shown in column 8 of Table I B, application no. 17, and being depicted in the same respective line as said GM02LC12622, and preferably the activity is increased non-targeted, or
[91275] (b) a polypeptide comprising a polypeptide, a consensus sequence or at least a polypeptide motif as shown in the respective line in column 5 of Table II or in column 8 of Table IV, application no. 17, respectively, and being depicted in the same respective line as said GM02LC12622, or a functional equivalent or a homolog thereof as depicted in column 8 of Table II, application no. 17, preferably a homolog or functional equivalent as depicted in column 8 of Table II B, application no. 17, and being depicted in the same respective line as said GM02LC12622, and preferably the activity is increased non-targeted, whereby the respective line disclose in column 7 the fine chemical sucrose.

[91276] Accordingly, in one embodiment, the molecule which activity is to be increased in the process of the invention is the gene product with an activity as a “glutaredoxin”, preferably it is the molecule of section (a) or (b) of this paragraph.

[91277] In particular, it was observed that in plants, especially in Arabidopsis thaliana, increasing or generating the activity of a gene product non-targeted with the activity of a “glutaredoxin”, preferably being encoded by a gene comprising the nucleic acid sequence SEQ ID NO. 10811, preferably the coding region thereof, conferred the production of or the increase in sucrose compared with the wild type control.

[91278] The nucleic acid sequence of GM02LC19289 from Glycine max, e.g. as shown in the respective line in column 5 of Table I, application no. 17, is unpublished. And the activity of the gene product thereof is the activity of transcription factor.

[91279] Accordingly, in one embodiment, the process of the present invention for producing glucose-1-phosphate in a non-human organism, like a microorganism or a plant or a part thereof, comprises increasing or generating the activity of a gene product with the activity of a gene product conferring the activity of “transcription factor”, especially from Glycine max or its functional equivalent or its homolog, e.g. the increase of
[91280] (a) a gene product of a gene comprising the nucleic acid molecule as shown in the respective line in column 5 of Table I (whereby the respective line disclose in column 7 the fine chemical glucose-1-phosphate), application no. 17, preferably the coding region thereof, or a homolog or a fragment thereof, and being depicted in the same respective line as said GM02LC19289, or a functional equivalent or a homolog thereof as shown in column 8 of Table I, application no. 17, preferably the coding region thereof, particularly a homolog or functional equivalent as shown in column 8 of Table I B, application no. 17, and being depicted in the same respective line as said GM02LC19289, and preferably the activity is increased non-targeted, or
[91281] (b) a polypeptide comprising a polypeptide, a consensus sequence or at least a polypeptide motif as shown in the respective line in column 5 of Table II or in column 8 of Table IV, application no. 17, respectively, and being depicted in the same respective line as said GM02LC19289, or a functional equivalent or a homolog thereof as depicted in column 8 of Table II, application no. 17, preferably a homolog or functional equivalent as depicted in column 8 of Table II B, application no. 17, and being depicted in the same respective line as said GM02LC19289, and preferably the activity is increased non-targeted, whereby the respective line disclose in column 7 the fine chemical glucose-1-phosphate.

[91282] Accordingly, in one embodiment, the molecule which activity is to be increased in the process of the invention is the gene product with an activity as a “transcription factor”, preferably it is the molecule of section (a) or (b) of this paragraph.

[91283] In particular, it was observed that in plants, especially in Arabidopsis thaliana, increasing or generating the activity of a gene product non-targeted with the activity of a “transcription factor”, preferably being encoded by a gene comprising the nucleic acid sequence SEQ ID NO. 46751, preferably the coding region thereof, conferred the production of or the increase in glucose-1-phosphate compared with the wild type control.

[91284] The nucleic acid sequence of GM02LC19289 from Glycine max, e.g. as shown in the respective line in column 5 of Table I, application no. 17, is unpublished. And the activity of the gene product thereof is the activity of transcription factor.

[91285] Accordingly, in one embodiment, the process of the present invention for producing 3,4,5-trihydroxypentanoic acid in a non-human organism, like a microorganism or a plant or a part thereof, comprises increasing or generating the activity of a gene product with the activity of a gene product conferring the activity of “transcription factor”, especially from Glycine max or its functional equivalent or its homolog, e.g. the increase of
[91286] (a) a gene product of a gene comprising the nucleic acid molecule as shown in the respective line in column 5 of Table I (whereby the respective line disclose in column 7 the fine chemical 3,4,5-trihydroxypentanoic acid), application no. 17, preferably the coding region thereof, or a homolog or a fragment thereof, and being depicted in the same respective line as said GM02LC19289, or a functional equivalent or a homolog thereof as shown in column 8 of Table I, application no. 17, preferably the coding region thereof, particularly a homolog or functional equivalent as shown in column 8 of Table I B, application no. 17, and being depicted in the same respective line as said GM02LC19289, and preferably the activity is increased non-targeted, or
[91287] (b) a polypeptide comprising a polypeptide, a consensus sequence or at least a polypeptide motif as shown in the respective line in column 5 of Table II or in column 8 of Table IV, application no. 17, respectively, and being depicted in the same respective line as said GM02LC19289, or a functional equivalent or a homolog thereof as depicted in column 8 of Table II, application no. 17, preferably a homolog or functional equivalent as depicted in column 8 of Table II B, application no. 17, and being depicted in the same respective line as said GM02LC19289, and preferably the activity is increased non-targeted, whereby the respective line disclose in column 7 the fine chemical 3,4,5-trihydroxypentanoic acid.

[91288] Accordingly, in one embodiment, the molecule which activity is to be increased in the process of the invention is the gene product with an activity as a “transcription factor”, preferably it is the molecule of section (a) or (b) of this paragraph.

[91289] In particular, it was observed that in plants, especially in Arabidopsis thaliana, increasing or generating the activity of a gene product non-targeted with the activity of a “transcription factor”, preferably being encoded by a gene comprising the nucleic acid sequence SEQ ID NO. 46751, preferably the coding region thereof, conferred the production of or the increase in 3,4,5-trihydroxypentanoic acid compared with the wild type control.

[91290] The nucleic acid sequence of GM02LC21368 from Glycine max, e.g. as shown in the respective line in column 5 of Table I, application no. 17, is unpublished. And the activity of the gene product thereof is the activity of transcription factor.

[91291] Accordingly, in one embodiment, the process of the present invention for producing fructose in a non-human organism, like a microorganism or a plant or a part thereof, comprises increasing or generating the activity of a gene product with the activity of a gene product conferring the activity of “transcription factor”, especially from Glycine max or its functional equivalent or its homolog, e.g. the increase of
[91292] (a) a gene product of a gene comprising the nucleic acid molecule as shown in the respective line in column 5 of Table I (whereby the respective line disclose in column 7 the fine chemical fructose), application no. 17, preferably the coding region thereof, or a homolog or a fragment thereof, and being depicted in the same respective line as said GM02LC21368, or a functional equivalent or a homolog thereof as shown in column 8 of Table I, application no. 17, preferably the coding region thereof, particularly a homolog or functional equivalent as shown in column 8 of Table I B, application no. 17, and being depicted in the same respective line as said GM02LC21368, and preferably the activity is increased non-targeted, or
[91293] (b) a polypeptide comprising a polypeptide, a consensus sequence or at least a polypeptide motif as shown in the respective line in column 5 of Table II or in column 8 of Table IV, application no. 17, respectively, and being depicted in the same respective line as said GM02LC21368, or a functional equivalent or a homolog thereof as depicted in column 8 of Table II, application no. 17, preferably a homolog or functional equivalent as depicted in column 8 of Table II B, application no. 17, and being depicted in the same respective line as said GM02LC21368, and preferably the activity is increased non-targeted, whereby the respective line disclose in column 7 the fine chemical fructose.

[91294] Accordingly, in one embodiment, the molecule which activity is to be increased in the process of the invention is the gene product with an activity as a “transcription factor”, preferably it is the molecule of section (a) or (b) of this paragraph.

[91295] In particular, it was observed that in plants, especially in Arabidopsis thaliana, increasing or generating the activity of a gene product non-targeted with the activity of a “transcription factor”, preferably being encoded by a gene comprising the nucleic acid sequence SEQ ID NO. 84198, preferably the coding region thereof, conferred the production of or the increase in fructose compared with the wild type control.

[91296] The nucleic acid sequence of GM02LC38418 from Glycine max, e.g. as shown in the respective line in column 5 of Table I, application no. 17, is unpublished. And the activity of the gene product thereof is the activity of GM02LC38418-protein.

[91297] Accordingly, in one embodiment, the process of the present invention for producing glucose-1-phosphate in a non-human organism, like a microorganism or a plant or a part thereof, comprises increasing or generating the activity of a gene product with the activity of a gene product conferring the activity of “GM02LC38418-protein”, especially from Glycine max or its functional equivalent or its homolog, e.g. the increase of
[91298] (a) a gene product of a gene comprising the nucleic acid molecule as shown in the respective line in column 5 of Table I (whereby the respective line disclose in column 7 the fine chemical glucose-1-phosphate), application no. 17, preferably the coding region thereof, or a homolog or a fragment thereof, and being depicted in the same respective line as said GM02LC38418, or a functional equivalent or a homolog thereof as shown in column 8 of Table I, application no. 17, preferably the coding region thereof, particularly a homolog or functional equivalent as shown in column 8 of Table I B, application no. 17, and being depicted in the same respective line as said GM02LC38418, and preferably the activity is increased non-targeted, or
[91299] (b) a polypeptide comprising a polypeptide, a consensus sequence or at least a polypeptide motif as shown in the respective line in column 5 of Table II or in column 8 of Table IV, application no. 17, respectively, and being depicted in the same respective line as said GM02LC38418, or a functional equivalent or a homolog thereof as depicted in column 8 of Table II, application no. 17, preferably a homolog or functional equivalent as depicted in column 8 of Table II B, application no. 17, and being depicted in the same respective line as said GM02LC38418, and preferably the activity is increased non-targeted, whereby the respective line disclose in column 7 the fine chemical glucose-1-phosphate.

[91300] Accordingly, in one embodiment, the molecule which activity is to be increased in the process of the invention is the gene product with an activity as a “GM02LC38418-protein”, preferably it is the molecule of section (a) or (b) of this paragraph.

[91301] In particular, it was observed that in plants, especially in Arabidopsis thaliana, increasing or generating the activity of a gene product non-targeted with the activity of a “GM02LC38418-protein”, preferably being encoded by a gene comprising the nucleic acid sequence SEQ ID NO. 116312, preferably the coding region thereof, conferred the production of or the increase in glucose-1-phosphate compared with the wild type control.

[91302] The nucleic acid sequence of GM02LC44512 from Glycine max, e.g. as shown in the respective line in column 5 of Table I, application no. 17, is unpublished. And the activity of the gene product thereof is the activity of cyclin D.

[91303] Accordingly, in one embodiment, the process of the present invention for producing glucose-1-phosphate in a non-human organism, like a microorganism or a plant or a part thereof, comprises increasing or generating the activity of a gene product with the activity of a gene product conferring the activity of “cyclin D”, especially from Glycine max or its functional equivalent or its homolog, e.g. the increase of
[91304] (a) a gene product of a gene comprising the nucleic acid molecule as shown in the respective line in column 5 of Table I (whereby the respective line disclose in column 7 the fine chemical glucose-1-phosphate), application no. 17, preferably the coding region thereof, or a homolog or a fragment thereof, and being depicted in the same respective line as said GM02LC44512, or a functional equivalent or a homolog thereof as shown in column 8 of Table I, application no. 17, preferably the coding region thereof, particularly a homolog or functional equivalent as shown in column 8 of Table I B, application no. 17, and being depicted in the same respective line as said GM02LC44512, and preferably the activity is increased non-targeted, or
[91305] (b) a polypeptide comprising a polypeptide, a consensus sequence or at least a polypeptide motif as shown in the respective line in column 5 of Table II or in column 8 of Table IV, application no. 17, respectively, and being depicted in the same respective line as said GM02LC44512, or a functional equivalent or a homolog thereof as depicted in column 8 of Table II, application no. 17, preferably a homolog or functional equivalent as depicted in column 8 of Table II B, application no. 17, and being depicted in the same respective line as said GM02LC44512, and preferably the activity is increased non-targeted, whereby the respective line disclose in column 7 the fine chemical glucose-1-phosphate.

[91306] Accordingly, in one embodiment, the molecule which activity is to be increased in the process of the invention is the gene product with an activity as a “cyclin D”, preferably it is the molecule of section (a) or (b) of this paragraph.

[91307] In particular, it was observed that in plants, especially in Arabidopsis thaliana, increasing or generating the activity of a gene product non-targeted with the activity of a “cyclin D”, preferably being encoded by a gene comprising the nucleic acid sequence SEQ ID NO. 46850, preferably the coding region thereof, conferred the production of or the increase in glucose-1-phosphate compared with the wild type control.

[91308] The nucleic acid sequence of GM02LC44512 from Glycine max, e.g. as shown in the respective line in column 5 of Table I, application no. 17, is unpublished. And the activity of the gene product thereof is the activity of cyclin D.

[91309] Accordingly, in one embodiment, the process of the present invention for producing raffinose in a non-human organism, like a microorganism or a plant or a part thereof, comprises increasing or generating the activity of a gene product with the activity of a gene product conferring the activity of “cyclin D”, especially from Glycine max or its functional equivalent or its homolog, e.g. the increase of
[91310] (a) a gene product of a gene comprising the nucleic acid molecule as shown in the respective line in column 5 of Table I (whereby the respective line disclose in column 7 the fine chemical raffinose), application no. 17, preferably the coding region thereof, or a homolog or a fragment thereof, and being depicted in the same respective line as said GM02LC44512, or a functional equivalent or a homolog thereof as shown in column 8 of Table I, application no. 17, preferably the coding region thereof, particularly a homolog or functional equivalent as shown in column 8 of Table I B, application no. 17, and being depicted in the same respective line as said GM02LC44512, and preferably the activity is increased non-targeted, or
[91311] (b) a polypeptide comprising a polypeptide, a consensus sequence or at least a polypeptide motif as shown in the respective line in column 5 of Table II or in column 8 of Table IV, application no. 17, respectively, and being depicted in the same respective line as said GM02LC44512, or a functional equivalent or a homolog thereof as depicted in column 8 of Table II, application no. 17, preferably a homolog or functional equivalent as depicted in column 8 of Table II B, application no. 17, and being depicted in the same respective line as said GM02LC44512, and preferably the activity is increased non-targeted, whereby the respective line disclose in column 7 the fine chemical raffinose.

[91312] Accordingly, in one embodiment, the molecule which activity is to be increased in the process of the invention is the gene product with an activity as a “cyclin D”, preferably it is the molecule of section (a) or (b) of this paragraph.

[91313] In particular, it was observed that in plants, especially in Arabidopsis thaliana, increasing or generating the activity of a gene product non-targeted with the activity of a “cyclin D”, preferably being encoded by a gene comprising the nucleic acid sequence SEQ ID NO. 46850, preferably the coding region thereof, conferred the production of or the increase in raffinose compared with the wild type control.

[91314] The nucleic acid sequence of GM02LC44512 from Glycine max, e.g. as shown in the respective line in column 5 of Table I, application no. 17, is unpublished. And the activity of the gene product thereof is the activity of cyclin D.

[91315] Accordingly, in one embodiment, the process of the present invention for producing sucrose in a non-human organism, like a microorganism or a plant or a part thereof, comprises increasing or generating the activity of a gene product with the activity of a gene product conferring the activity of “cyclin D”, especially from Glycine max or its functional equivalent or its homolog, e.g. the increase of
[91316] (a) a gene product of a gene comprising the nucleic acid molecule as shown in the respective line in column 5 of Table I (whereby the respective line disclose in column 7 the fine chemical sucrose), application no. 17, preferably the coding region thereof, or a homolog or a fragment thereof, and being depicted in the same respective line as said GM02LC44512, or a functional equivalent or a homolog thereof as shown in column 8 of Table I, application no. 17, preferably the coding region thereof, particularly a homolog or functional equivalent as shown in column 8 of Table I B, application no. 17, and being depicted in the same respective line as said GM02LC44512, and preferably the activity is increased non-targeted, or
[91317] (b) a polypeptide comprising a polypeptide, a consensus sequence or at least a polypeptide motif as shown in the respective line in column 5 of Table II or in column 8 of Table IV, application no. 17, respectively, and being depicted in the same respective line as said GM02LC44512, or a functional equivalent or a homolog thereof as depicted in column 8 of Table II, application no. 17, preferably a homolog or functional equivalent as depicted in column 8 of Table II B, application no. 17, and being depicted in the same respective line as said GM02LC44512, and preferably the activity is increased non-targeted, whereby the respective line disclose in column 7 the fine chemical sucrose.

[91318] Accordingly, in one embodiment, the molecule which activity is to be increased in the process of the invention is the gene product with an activity as a “cyclin D”, preferably it is the molecule of section (a) or (b) of this paragraph.

[91319] In particular, it was observed that in plants, especially in Arabidopsis thaliana, increasing or generating the activity of a gene product non-targeted with the activity of a “cyclin D”, preferably being encoded by a gene comprising the nucleic acid sequence SEQ ID NO. 46850, preferably the coding region thereof, conferred the production of or the increase in sucrose compared with the wild type control.

[91320] The nucleic acid sequence of GM02LC46 from Glycine max, e.g. as shown in the respective line in column 5 of Table I, application no. 17, is unpublished. And the activity of the gene product thereof is the activity of GM02LC46-protein.

[91321] Accordingly, in one embodiment, the process of the present invention for producing 3,4,5-trihydroxypentanoic acid in a non-human organism, like a microorganism or a plant or a part thereof, comprises increasing or generating the activity of a gene product with the activity of a gene product conferring the activity of “GM02LC46-protein”, especially from Glycine max or its functional equivalent or its homolog, e.g. the increase of
[91322] (a) a gene product of a gene comprising the nucleic acid molecule as shown in the respective line in column 5 of Table I (whereby the respective line disclose in column 7 the fine chemical 3,4,5-trihydroxypentanoic acid), application no. 17, preferably the coding region thereof, or a homolog or a fragment thereof, and being depicted in the same respective line as said GM02LC46, or a functional equivalent or a homolog thereof as shown in column 8 of Table I, application no. 17, preferably the coding region thereof, particularly a homolog or functional equivalent as shown in column 8 of Table I B, application no. 17, and being depicted in the same respective line as said GM02LC46, and preferably the activity is increased non-targeted, or
[91323] (b) a polypeptide comprising a polypeptide, a consensus sequence or at least a polypeptide motif as shown in the respective line in column 5 of Table II or in column 8 of Table IV, application no. 17, respectively, and being depicted in the same respective line as said GM02LC46, or a functional equivalent or a homolog thereof as depicted in column 8 of Table II, application no. 17, preferably a homolog or functional equivalent as depicted in column 8 of Table II B, application no. 17, and being depicted in the same respective line as said GM02LC46, and preferably the activity is increased non-targeted, whereby the respective line disclose in column 7 the fine chemical 3,4,5-trihydroxypentanoic acid.

[91324] Accordingly, in one embodiment, the molecule which activity is to be increased in the process of the invention is the gene product with an activity as a “GM02LC46-protein”, preferably it is the molecule of section (a) or (b) of this paragraph.

[91325] In particular, it was observed that in plants, especially in Arabidopsis thaliana, increasing or generating the activity of a gene product non-targeted with the activity of a “GM02LC46-protein”, preferably being encoded by a gene comprising the nucleic acid sequence SEQ ID NO. 47026, preferably the coding region thereof, conferred the production of or the increase in 3,4,5-trihydroxypentanoic acid compared with the wild type control.

[91326] The nucleic acid sequence of GM02LC6021 from Glycine max, e.g. as shown in the respective line in column 5 of Table I, application no. 17, is unpublished. And the activity of the gene product thereof is the activity of transcription factor.

[91327] Accordingly, in one embodiment, the process of the present invention for producing 3,4,5-trihydroxypentanoic acid in a non-human organism, like a microorganism or a plant or a part thereof, comprises increasing or generating the activity of a gene product with the activity of a gene product conferring the activity of “transcription factor”, especially from Glycine max or its functional equivalent or its homolog, e.g. the increase of
[91328] (a) a gene product of a gene comprising the nucleic acid molecule as shown in the respective line in column 5 of Table I (whereby the respective line disclose in column 7 the fine chemical 3,4,5-trihydroxypentanoic acid), application no. 17, preferably the coding region thereof, or a homolog or a fragment thereof, and being depicted in the same respective line as said GM02LC6021, or a functional equivalent or a homolog thereof as shown in column 8 of Table I, application no. 17, preferably the coding region thereof, particularly a homolog or functional equivalent as shown in column 8 of Table I B, application no. 17, and being depicted in the same respective line as said GM02LC6021, and preferably the activity is increased non-targeted, or
[91329] (b) a polypeptide comprising a polypeptide, a consensus sequence or at least a polypeptide motif as shown in the respective line in column 5 of Table II or in column 8 of Table IV, application no. 17, respectively, and being depicted in the same respective line as said GM02LC6021, or a functional equivalent or a homolog thereof as depicted in column 8 of Table II, application no. 17, preferably a homolog or functional equivalent as depicted in column 8 of Table II B, application no. 17, and being depicted in the same respective line as said GM02LC6021, and preferably the activity is increased non-targeted, whereby the respective line disclose in column 7 the fine chemical 3,4,5-trihydroxypentanoic acid.

[91330] Accordingly, in one embodiment, the molecule which activity is to be increased in the process of the invention is the gene product with an activity as a “transcription factor”, preferably it is the molecule of section (a) or (b) of this paragraph.

[91331] In particular, it was observed that in plants, especially in Arabidopsis thaliana, increasing or generating the activity of a gene product non-targeted with the activity of a “transcription factor”, preferably being encoded by a gene comprising the nucleic acid sequence SEQ ID NO. 47105, preferably the coding region thereof, conferred the production of or the increase in 3,4,5-trihydroxypentanoic acid compared with the wild type control.

[91332] The nucleic acid sequence of Sll0222 from Synechocystis sp., e.g. as shown in the respective line in column 5 of Table I, application no. 17, has been published in C. And the activity of the gene product thereof is the activity of alkaline phosphatase.

[91333] Accordingly, in one embodiment, the process of the present invention for producing myo-inositol in a non-human organism, like a microorganism or a plant or a part thereof, comprises increasing or generating the activity of a gene product with the activity of a gene product conferring the activity of “alkaline phosphatase”, especially from Synechocystis sp. or its functional equivalent or its homolog, e.g. the increase of
[91334] (a) a gene product of a gene comprising the nucleic acid molecule as shown in the respective line in column 5 of Table I (whereby the respective line disclose in column 7 the fine chemical myo-inositol), application no. 17, preferably the coding region thereof, or a homolog or a fragment thereof, and being depicted in the same respective line as said Sll0222, or a functional equivalent or a homolog thereof as shown in column 8 of Table I, application no. 17, preferably the coding region thereof, particularly a homolog or functional equivalent as shown in column 8 of Table I B, application no. 17, and being depicted in the same respective line as said Sll0222, and preferably the activity is increased plastidic, or
[91335] (b) a polypeptide comprising a polypeptide, a consensus sequence or at least a polypeptide motif as shown in the respective line in column 5 of Table II or in column 8 of Table IV, application no. 17, respectively, and being depicted in the same respective line as said Sll0222, or a functional equivalent or a homolog thereof as depicted in column 8 of Table II, application no. 17, preferably a homolog or functional equivalent as depicted in column 8 of Table II B, application no. 17, and being depicted in the same respective line as said Sll0222, and preferably the activity is increased plastidic, whereby the respective line disclose in column 7 the fine chemical myo-inositol.

[91336] Accordingly, in one embodiment, the molecule which activity is to be increased in the process of the invention is the gene product with an activity as a “alkaline phosphatase”, preferably it is the molecule of section (a) or (b) of this paragraph.

[91337] In particular, it was observed that in plants, especially in Arabidopsis thaliana, increasing or generating the activity of a gene product plastidic with the activity of a “alkaline phosphatase”, preferably being encoded by a gene comprising the nucleic acid sequence SEQ ID NO. 146939, preferably the coding region thereof, conferred the production of or the increase in myo-inositol compared with the wild type control.

[91338] The nucleic acid sequence of Sll0248 from Synechocystis sp., e.g. as shown in the respective line in column 5 of Table I, application no. 17, has been published in C. And the activity of the gene product thereof is the activity of flavodoxin.

[91339] Accordingly, in one embodiment, the process of the present invention for producing verbascose in a non-human organism, like a microorganism or a plant or a part thereof, comprises increasing or generating the activity of a gene product with the activity of a gene product conferring the activity of “flavodoxin”, especially from Synechocystis sp. or its functional equivalent or its homolog, e.g. the increase of
[91340] (a) a gene product of a gene comprising the nucleic acid molecule as shown in the respective line in column 5 of Table I (whereby the respective line disclose in column 7 the fine chemical verbascose), application no. 17, preferably the coding region thereof, or a homolog or a fragment thereof, and being depicted in the same respective line as said Sll0248, or a functional equivalent or a homolog thereof as shown in column 8 of Table I, application no. 17, preferably the coding region thereof, particularly a homolog or functional equivalent as shown in column 8 of Table I B, application no. 17, and being depicted in the same respective line as said Sll0248, and preferably the activity is increased plastidic, or
[91341] (b) a polypeptide comprising a polypeptide, a consensus sequence or at least a polypeptide motif as shown in the respective line in column 5 of Table II or in column 8 of Table IV, application no. 17, respectively, and being depicted in the same respective line as said Sll0248, or a functional equivalent or a homolog thereof as depicted in column 8 of Table II, application no. 17, preferably a homolog or functional equivalent as depicted in column 8 of Table II B, application no. 17, and being depicted in the same respective line as said Sll0248, and preferably the activity is increased plastidic, whereby the respective line disclose in column 7 the fine chemical verbascose.

[91342] Accordingly, in one embodiment, the molecule which activity is to be increased in the process of the invention is the gene product with an activity as a “flavodoxin”, preferably it is the molecule of section (a) or (b) of this paragraph.

[91343] In particular, it was observed that in plants, especially in Arabidopsis thaliana, increasing or generating the activity of a gene product plastidic with the activity of a “flavodoxin”, preferably being encoded by a gene comprising the nucleic acid sequence SEQ ID NO. 49143, preferably the coding region thereof, conferred the production of or the increase in verbascose compared with the wild type control.

[91344] The nucleic acid sequence of Sll0254 from Synechocystis sp., e.g. as shown in the respective line in column 5 of Table I, application no. 17, has been published in C. And the activity of the gene product thereof is the activity of sll0254-protein.

[91345] Accordingly, in one embodiment, the process of the present invention for producing sucrose in a non-human organism, like a microorganism or a plant or a part thereof, comprises increasing or generating the activity of a gene product with the activity of a gene product conferring the activity of “sll0254-protein”, especially from Synechocystis sp. or its functional equivalent or its homolog, e.g. the increase of
[91346] (a) a gene product of a gene comprising the nucleic acid molecule as shown in the respective line in column 5 of Table I (whereby the respective line disclose in column 7 the fine chemical sucrose), application no. 17, preferably the coding region thereof, or a homolog or a fragment thereof, and being depicted in the same respective line as said Sll0254, or a functional equivalent or a homolog thereof as shown in column 8 of Table I, application no. 17, preferably the coding region thereof, particularly a homolog or functional equivalent as shown in column 8 of Table I B, application no. 17, and being depicted in the same respective line as said Sll0254, and preferably the activity is increased mitochondrial, or
[91347] (b) a polypeptide comprising a polypeptide, a consensus sequence or at least a polypeptide motif as shown in the respective line in column 5 of Table II or in column 8 of Table IV, application no. 17, respectively, and being depicted in the same respective line as said Sll0254, or a functional equivalent or a homolog thereof as depicted in column 8 of Table II, application no. 17, preferably a homolog or functional equivalent as depicted in column 8 of Table II B, application no. 17, and being depicted in the same respective line as said Sll0254, and preferably the activity is increased mitochondrial, whereby the respective line disclose in column 7 the fine chemical sucrose.

[91348] Accordingly, in one embodiment, the molecule which activity is to be increased in the process of the invention is the gene product with an activity as a “sll0254-protein”, preferably it is the molecule of section (a) or (b) of this paragraph.

[91349] In particular, it was observed that in plants, especially in Arabidopsis thaliana, increasing or generating the activity of a gene product mitochondrial with the activity of a “sll0254-protein”, preferably being encoded by a gene comprising the nucleic acid sequence SEQ ID NO. 49800, preferably the coding region thereof, conferred the production of or the increase in sucrose compared with the wild type control.

[91350] The nucleic acid sequence of Sll0281 from Synechocystis sp., e.g. as shown in the respective line in column 5 of Table I, application no. 17, has been published in C. And the activity of the gene product thereof is the activity of sll0281-protein.

[91351] Accordingly, in one embodiment, the process of the present invention for producing verbascose in a non-human organism, like a microorganism or a plant or a part thereof, comprises increasing or generating the activity of a gene product with the activity of a gene product conferring the activity of “sll0281-protein”, especially from Synechocystis sp. or its functional equivalent or its homolog, e.g. the increase of
[91352] (a) a gene product of a gene comprising the nucleic acid molecule as shown in the respective line in column 5 of Table I (whereby the respective line disclose in column 7 the fine chemical verbascose), application no. 17, preferably the coding region thereof, or a homolog or a fragment thereof, and being depicted in the same respective line as said Sll0281, or a functional equivalent or a homolog thereof as shown in column 8 of Table I, application no. 17, preferably the coding region thereof, particularly a homolog or functional equivalent as shown in column 8 of Table I B, application no. 17, and being depicted in the same respective line as said Sll0281, and preferably the activity is increased plastidic, or
[91353] (b) a polypeptide comprising a polypeptide, a consensus sequence or at least a polypeptide motif as shown in the respective line in column 5 of Table II or in column 8 of Table IV, application no. 17, respectively, and being depicted in the same respective line as said Sll0281, or a functional equivalent or a homolog thereof as depicted in column 8 of Table II, application no. 17, preferably a homolog or functional equivalent as depicted in column 8 of Table II B, application no. 17, and being depicted in the same respective line as said Sll0281, and preferably the activity is increased plastidic, whereby the respective line disclose in column 7 the fine chemical verbascose.

[91354] Accordingly, in one embodiment, the molecule which activity is to be increased in the process of the invention is the gene product with an activity as a “sll0281-protein”, preferably it is the molecule of section (a) or (b) of this paragraph.

[91355] In particular, it was observed that in plants, especially in Arabidopsis thaliana, increasing or generating the activity of a gene product plastidic with the activity of a “sll0281-protein”, preferably being encoded by a gene comprising the nucleic acid sequence SEQ ID NO. 84865, preferably the coding region thereof, conferred the production of or the increase in verbascose compared with the wild type control.

[91356] The nucleic acid sequence of Sll0354 from Synechocystis sp., e.g. as shown in the respective line in column 5 of Table I, application no. 17, has been published in C. And the activity of the gene product thereof is the activity of sll0354-protein.

[91357] Accordingly, in one embodiment, the process of the present invention for producing myo-inositol in a non-human organism, like a microorganism or a plant or a part thereof, comprises increasing or generating the activity of a gene product with the activity of a gene product conferring the activity of “sll0354-protein”, especially from Synechocystis sp. or its functional equivalent or its homolog, e.g. the increase of
[91358] (a) a gene product of a gene comprising the nucleic acid molecule as shown in the respective line in column 5 of Table I (whereby the respective line disclose in column 7 the fine chemical myo-inositol), application no. 17, preferably the coding region thereof, or a homolog or a fragment thereof, and being depicted in the same respective line as said Sll0354, or a functional equivalent or a homolog thereof as shown in column 8 of Table I, application no. 17, preferably the coding region thereof, particularly a homolog or functional equivalent as shown in column 8 of Table I B, application no. 17, and being depicted in the same respective line as said Sll0354, and preferably the activity is increased non-targeted, or
[91359] (b) a polypeptide comprising a polypeptide, a consensus sequence or at least a polypeptide motif as shown in the respective line in column 5 of Table II or in column 8 of Table IV, application no. 17, respectively, and being depicted in the same respective line as said Sll0354, or a functional equivalent or a homolog thereof as depicted in column 8 of Table II, application no. 17, preferably a homolog or functional equivalent as depicted in column 8 of Table II B, application no. 17, and being depicted in the same respective line as said Sll0354, and preferably the activity is increased non-targeted, whereby the respective line disclose in column 7 the fine chemical myo-inositol.

[91360] Accordingly, in one embodiment, the molecule which activity is to be increased in the process of the invention is the gene product with an activity as a “sll0354-protein”, preferably it is the molecule of section (a) or (b) of this paragraph.

[91361] In particular, it was observed that in plants, especially in Arabidopsis thaliana, increasing or generating the activity of a gene product non-targeted with the activity of a “sll0354-protein”, preferably being encoded by a gene comprising the nucleic acid sequence SEQ ID NO. 50070, preferably the coding region thereof, conferred the production of or the increase in myo-inositol compared with the wild type control.

[91362] The nucleic acid sequence of Sll0368 from Synechocystis sp., e.g. as shown in the respective line in column 5 of Table I, application no. 17, has been published in C. And the activity of the gene product thereof is the activity of bifunctional protein (phosphoribosyltransferase and regulatory protein).

[91363] Accordingly, in one embodiment, the process of the present invention for producing myo-inositol in a non-human organism, like a microorganism or a plant or a part thereof, comprises increasing or generating the activity of a gene product with the activity of a gene product conferring the activity of “bifunctional protein (phosphoribosyltransferase and regulatory protein)”, especially from Synechocystis sp. or its functional equivalent or its homolog, e.g. the increase of
[91364] (a) a gene product of a gene comprising the nucleic acid molecule as shown in the respective line in column 5 of Table I (whereby the respective line disclose in column 7 the fine chemical myo-inositol), application no. 17, preferably the coding region thereof, or a homolog or a fragment thereof, and being depicted in the same respective line as said Sll0368, or a functional equivalent or a homolog thereof as shown in column 8 of Table I, application no. 17, preferably the coding region thereof, particularly a homolog or functional equivalent as shown in column 8 of Table I B, application no. 17, and being depicted in the same respective line as said Sll0368, and preferably the activity is increased mitochondrial, or
[91365] (b) a polypeptide comprising a polypeptide, a consensus sequence or at least a polypeptide motif as shown in the respective line in column 5 of Table II or in column 8 of Table IV, application no. 17, respectively, and being depicted in the same respective line as said Sll0368, or a functional equivalent or a homolog thereof as depicted in column 8 of Table II, application no. 17, preferably a homolog or functional equivalent as depicted in column 8 of Table II B, application no. 17, and being depicted in the same respective line as said Sll0368, and preferably the activity is increased mitochondrial, whereby the respective line disclose in column 7 the fine chemical myo-inositol.

[91366] Accordingly, in one embodiment, the molecule which activity is to be increased in the process of the invention is the gene product with an activity as a “bifunctional protein (phosphoribosyltransferase and regulatory protein)”, preferably it is the molecule of section (a) or (b) of this paragraph.

[91367] In particular, it was observed that in plants, especially in Arabidopsis thaliana, increasing or generating the activity of a gene product mitochondrial with the activity of a “bifunctional protein (phosphoribosyltransferase and regulatory protein)”, preferably being encoded by a gene comprising the nucleic acid sequence SEQ ID NO. 106920, preferably the coding region thereof, conferred the production of or the increase in myo-inositol compared with the wild type control.

[91368] The nucleic acid sequence of Sll0418 from Synechocystis sp., e.g. as shown in the respective line in column 5 of Table I, application no. 17, has been published in C. And the activity of the gene product thereof is the activity of sll0418-protein.

[91369] Accordingly, in one embodiment, the process of the present invention for producing glucose-1-phosphate in a non-human organism, like a microorganism or a plant or a part thereof, comprises increasing or generating the activity of a gene product with the activity of a gene product conferring the activity of “sll0418-protein”, especially from Synechocystis sp. or its functional equivalent or its homolog, e.g. the increase of
[91370] (a) a gene product of a gene comprising the nucleic acid molecule as shown in the respective line in column 5 of Table I (whereby the respective line disclose in column 7 the fine chemical glucose-1-phosphate), application no. 17, preferably the coding region thereof, or a homolog or a fragment thereof, and being depicted in the same respective line as said Sll0418, or a functional equivalent or a homolog thereof as shown in column 8 of Table I, application no. 17, preferably the coding region thereof, particularly a homolog or functional equivalent as shown in column 8 of Table I B, application no. 17, and being depicted in the same respective line as said Sll0418, and preferably the activity is increased non-targeted, or
[91371] (b) a polypeptide comprising a polypeptide, a consensus sequence or at least a polypeptide motif as shown in the respective line in column 5 of Table II or in column 8 of Table IV, application no. 17, respectively, and being depicted in the same respective line as said Sll0418, or a functional equivalent or a homolog thereof as depicted in column 8 of Table II, application no. 17, preferably a homolog or functional equivalent as depicted in column 8 of Table II B, application no. 17, and being depicted in the same respective line as said Sll0418, and preferably the activity is increased non-targeted, whereby the respective line disclose in column 7 the fine chemical glucose-1-phosphate.

[91372] Accordingly, in one embodiment, the molecule which activity is to be increased in the process of the invention is the gene product with an activity as a “sll0418-protein”, preferably it is the molecule of section (a) or (b) of this paragraph.

[91373] In particular, it was observed that in plants, especially in Arabidopsis thaliana, increasing or generating the activity of a gene product non-targeted with the activity of a “sll0418-protein”, preferably being encoded by a gene comprising the nucleic acid sequence SEQ ID NO. 94942, preferably the coding region thereof, conferred the production of or the increase in glucose-1-phosphate compared with the wild type control.

[91374] The nucleic acid sequence of Sll0418 from Synechocystis sp., e.g. as shown in the respective line in column 5 of Table I, application no. 17, has been published in C. And the activity of the gene product thereof is the activity of sll0418-protein.

[91375] Accordingly, in one embodiment, the process of the present invention for producing myo-inositol in a non-human organism, like a microorganism or a plant or a part thereof, comprises increasing or generating the activity of a gene product with the activity of a gene product conferring the activity of “sll0418-protein”, especially from Synechocystis sp. or its functional equivalent or its homolog, e.g. the increase of
[91376] (a) a gene product of a gene comprising the nucleic acid molecule as shown in the respective line in column 5 of Table I (whereby the respective line disclose in column 7 the fine chemical myo-inositol), application no. 17, preferably the coding region thereof, or a homolog or a fragment thereof, and being depicted in the same respective line as said Sll0418, or a functional equivalent or a homolog thereof as shown in column 8 of Table I, application no. 17, preferably the coding region thereof, particularly a homolog or functional equivalent as shown in column 8 of Table I B, application no. 17, and being depicted in the same respective line as said Sll0418, and preferably the activity is increased mitochondrial, or
[91377] (b) a polypeptide comprising a polypeptide, a consensus sequence or at least a polypeptide motif as shown in the respective line in column 5 of Table II or in column 8 of Table IV, application no. 17, respectively, and being depicted in the same respective line as said Sll0418, or a functional equivalent or a homolog thereof as depicted in column 8 of Table II, application no. 17, preferably a homolog or functional equivalent as depicted in column 8 of Table II B, application no. 17, and being depicted in the same respective line as said Sll0418, and preferably the activity is increased mitochondrial, whereby the respective line disclose in column 7 the fine chemical myo-inositol.

[91378] Accordingly, in one embodiment, the molecule which activity is to be increased in the process of the invention is the gene product with an activity as a “sll0418-protein”, preferably it is the molecule of section (a) or (b) of this paragraph.

[91379] In particular, it was observed that in plants, especially in Arabidopsis thaliana, increasing or generating the activity of a gene product mitochondrial with the activity of a “sll0418-protein”, preferably being encoded by a gene comprising the nucleic acid sequence SEQ ID NO. 94942, preferably the coding region thereof, conferred the production of or the increase in myo-inositol compared with the wild type control.

[91380] The nucleic acid sequence of Sll0418 from Synechocystis sp., e.g. as shown in the respective line in column 5 of Table I, application no. 17, has been published in C. And the activity of the gene product thereof is the activity of sll0418-protein.

[91381] Accordingly, in one embodiment, the process of the present invention for producing myo-inositol in a non-human organism, like a microorganism or a plant or a part thereof, comprises increasing or generating the activity of a gene product with the activity of a gene product conferring the activity of “sll0418-protein”, especially from Synechocystis sp. or its functional equivalent or its homolog, e.g. the increase of
[91382] (a) a gene product of a gene comprising the nucleic acid molecule as shown in the respective line in column 5 of Table I (whereby the respective line disclose in column 7 the fine chemical myo-inositol), application no. 17, preferably the coding region thereof, or a homolog or a fragment thereof, and being depicted in the same respective line as said Sll0418, or a functional equivalent or a homolog thereof as shown in column 8 of Table I, application no. 17, preferably the coding region thereof, particularly a homolog or functional equivalent as shown in column 8 of Table I B, application no. 17, and being depicted in the same respective line as said Sll0418, and preferably the activity is increased non-targeted, or
[91383] (b) a polypeptide comprising a polypeptide, a consensus sequence or at least a polypeptide motif as shown in the respective line in column 5 of Table II or in column 8 of Table IV, application no. 17, respectively, and being depicted in the same respective line as said Sll0418, or a functional equivalent or a homolog thereof as depicted in column 8 of Table II, application no. 17, preferably a homolog or functional equivalent as depicted in column 8 of Table II B, application no. 17, and being depicted in the same respective line as said Sll0418, and preferably the activity is increased non-targeted, whereby the respective line disclose in column 7 the fine chemical myo-inositol.

[91384] Accordingly, in one embodiment, the molecule which activity is to be increased in the process of the invention is the gene product with an activity as a “sll0418-protein”, preferably it is the molecule of section (a) or (b) of this paragraph.

[91385] In particular, it was observed that in plants, especially in Arabidopsis thaliana, increasing or generating the activity of a gene product non-targeted with the activity of a “sll0418-protein”, preferably being encoded by a gene comprising the nucleic acid sequence SEQ ID NO. 94942, preferably the coding region thereof, conferred the production of or the increase in myo-inositol compared with the wild type control.

[91386] The nucleic acid sequence of Sll0418 from Synechocystis sp., e.g. as shown in the respective line in column 5 of Table I, application no. 17, has been published in C. And the activity of the gene product thereof is the activity of sll0418-protein.

[91387] Accordingly, in one embodiment, the process of the present invention for producing saccharic acid in a non-human organism, like a microorganism or a plant or a part thereof, comprises increasing or generating the activity of a gene product with the activity of a gene product conferring the activity of “sll0418-protein”, especially from Synechocystis sp. or its functional equivalent or its homolog, e.g. the increase of
[91388] (a) a gene product of a gene comprising the nucleic acid molecule as shown in the respective line in column 5 of Table I (whereby the respective line disclose in column 7 the fine chemical saccharic acid), application no. 17, preferably the coding region thereof, or a homolog or a fragment thereof, and being depicted in the same respective line as said Sll0418, or a functional equivalent or a homolog thereof as shown in column 8 of Table I, application no. 17, preferably the coding region thereof, particularly a homolog or functional equivalent as shown in column 8 of Table I B, application no. 17, and being depicted in the same respective line as said Sll0418, and preferably the activity is increased non-targeted, or
[91389] (b) a polypeptide comprising a polypeptide, a consensus sequence or at least a polypeptide motif as shown in the respective line in column 5 of Table II or in column 8 of Table IV, application no. 17, respectively, and being depicted in the same respective line as said Sll0418, or a functional equivalent or a homolog thereof as depicted in column 8 of Table II, application no. 17, preferably a homolog or functional equivalent as depicted in column 8 of Table II B, application no. 17, and being depicted in the same respective line as said Sll0418, and preferably the activity is increased non-targeted, whereby the respective line disclose in column 7 the fine chemical saccharic acid.

[91390] Accordingly, in one embodiment, the molecule which activity is to be increased in the process of the invention is the gene product with an activity as a “sll0418-protein”, preferably it is the molecule of section (a) or (b) of this paragraph.

[91391] In particular, it was observed that in plants, especially in Arabidopsis thaliana, increasing or generating the activity of a gene product non-targeted with the activity of a “sll0418-protein”, preferably being encoded by a gene comprising the nucleic acid sequence SEQ ID NO. 94942, preferably the coding region thereof, conferred the production of or the increase in saccharic acid compared with the wild type control.

[91392] The nucleic acid sequence of Sll0418 from Synechocystis sp., e.g. as shown in the respective line in column 5 of Table I, application no. 17, has been published in C. And the activity of the gene product thereof is the activity of sll0418-protein.

[91393] Accordingly, in one embodiment, the process of the present invention for producing 3,4,5-trihydroxypentanoic acid in a non-human organism, like a microorganism or a plant or a part thereof, comprises increasing or generating the activity of a gene product with the activity of a gene product conferring the activity of “sll0418-protein”, especially from Synechocystis sp. or its functional equivalent or its homolog, e.g. the increase of
[91394] (a) a gene product of a gene comprising the nucleic acid molecule as shown in the respective line in column 5 of Table I (whereby the respective line disclose in column 7 the fine chemical 3,4,5-trihydroxypentanoic acid), application no. 17, preferably the coding region thereof, or a homolog or a fragment thereof, and being depicted in the same respective line as said Sll0418, or a functional equivalent or a homolog thereof as shown in column 8 of Table I, application no. 17, preferably the coding region thereof, particularly a homolog or functional equivalent as shown in column 8 of Table I B, application no. 17, and being depicted in the same respective line as said Sll0418, and preferably the activity is increased non-targeted, or
[91395] (b) a polypeptide comprising a polypeptide, a consensus sequence or at least a polypeptide motif as shown in the respective line in column 5 of Table II or in column 8 of Table IV, application no. 17, respectively, and being depicted in the same respective line as said Sll0418, or a functional equivalent or a homolog thereof as depicted in column 8 of Table II, application no. 17, preferably a homolog or functional equivalent as depicted in column 8 of Table II B, application no. 17, and being depicted in the same respective line as said Sll0418, and preferably the activity is increased non-targeted, whereby the respective line disclose in column 7 the fine chemical 3,4,5-trihydroxypentanoic acid.

[91396] Accordingly, in one embodiment, the molecule which activity is to be increased in the process of the invention is the gene product with an activity as a “sll0418-protein”, preferably it is the molecule of section (a) or (b) of this paragraph.

[91397] In particular, it was observed that in plants, especially in Arabidopsis thaliana, increasing or generating the activity of a gene product non-targeted with the activity of a “sll0418-protein”, preferably being encoded by a gene comprising the nucleic acid sequence SEQ ID NO. 94942, preferably the coding region thereof, conferred the production of or the increase in 3,4,5-trihydroxypentanoic acid compared with the wild type control.

[91398] The nucleic acid sequence of Sll0420 from Synechocystis sp., e.g. as shown in the respective line in column 5 of Table I, application no. 17, has been published in C. And the activity of the gene product thereof is the activity of urease subunit.

[91399] Accordingly, in one embodiment, the process of the present invention for producing glucose-1-phosphate in a non-human organism, like a microorganism or a plant or a part thereof, comprises increasing or generating the activity of a gene product with the activity of a gene product conferring the activity of “urease subunit”, especially from Synechocystis sp. or its functional equivalent or its homolog, e.g. the increase of
[91400] (a) a gene product of a gene comprising the nucleic acid molecule as shown in the respective line in column 5 of Table I (whereby the respective line disclose in column 7 the fine chemical glucose-1-phosphate), application no. 17, preferably the coding region thereof, or a homolog or a fragment thereof, and being depicted in the same respective line as said Sll0420, or a functional equivalent or a homolog thereof as shown in column 8 of Table I, application no. 17, preferably the coding region thereof, particularly a homolog or functional equivalent as shown in column 8 of Table I B, application no. 17, and being depicted in the same respective line as said Sll0420, and preferably the activity is increased non-targeted, or
[91401] (b) a polypeptide comprising a polypeptide, a consensus sequence or at least a polypeptide motif as shown in the respective line in column 5 of Table II or in column 8 of Table IV, application no. 17, respectively, and being depicted in the same respective line as said Sll0420, or a functional equivalent or a homolog thereof as depicted in column 8 of Table II, application no. 17, preferably a homolog or functional equivalent as depicted in column 8 of Table II B, application no. 17, and being depicted in the same respective line as said Sll0420, and preferably the activity is increased non-targeted, whereby the respective line disclose in column 7 the fine chemical glucose-1-phosphate.

[91402] Accordingly, in one embodiment, the molecule which activity is to be increased in the process of the invention is the gene product with an activity as a “urease subunit”, preferably it is the molecule of section (a) or (b) of this paragraph.

[91403] In particular, it was observed that in plants, especially in Arabidopsis thaliana, increasing or generating the activity of a gene product non-targeted with the activity of a “urease subunit”, preferably being encoded by a gene comprising the nucleic acid sequence SEQ ID NO. 50104, preferably the coding region thereof, conferred the production of or the increase in glucose-1-phosphate compared with the wild type control.

[91404] The nucleic acid sequence of Sll0593 from Synechocystis sp., e.g. as shown in the respective line in column 5 of Table I, application no. 17, has been published in C. And the activity of the gene product thereof is the activity of glucokinase.

[91405] Accordingly, in one embodiment, the process of the present invention for producing glucose-1-phosphate in a non-human organism, like a microorganism or a plant or a part thereof, comprises increasing or generating the activity of a gene product with the activity of a gene product conferring the activity of “glucokinase”, especially from Synechocystis sp. or its functional equivalent or its homolog, e.g. the increase of
[91406] (a) a gene product of a gene comprising the nucleic acid molecule as shown in the respective line in column 5 of Table I (whereby the respective line disclose in column 7 the fine chemical glucose-1-phosphate), application no. 17, preferably the coding region thereof, or a homolog or a fragment thereof, and being depicted in the same respective line as said Sll0593, or a functional equivalent or a homolog thereof as shown in column 8 of Table I, application no. 17, preferably the coding region thereof, particularly a homolog or functional equivalent as shown in column 8 of Table I B, application no. 17, and being depicted in the same respective line as said Sll0593, and preferably the activity is increased plastidic, or
[91407] (b) a polypeptide comprising a polypeptide, a consensus sequence or at least a polypeptide motif as shown in the respective line in column 5 of Table II or in column 8 of Table IV, application no. 17, respectively, and being depicted in the same respective line as said Sll0593, or a functional equivalent or a homolog thereof as depicted in column 8 of Table II, application no. 17, preferably a homolog or functional equivalent as depicted in column 8 of Table II B, application no. 17, and being depicted in the same respective line as said Sll0593, and preferably the activity is increased plastidic, whereby the respective line disclose in column 7 the fine chemical glucose-1-phosphate.

[91408] Accordingly, in one embodiment, the molecule which activity is to be increased in the process of the invention is the gene product with an activity as a “glucokinase”, preferably it is the molecule of section (a) or (b) of this paragraph.

[91409] In particular, it was observed that in plants, especially in Arabidopsis thaliana, increasing or generating the activity of a gene product plastidic with the activity of a “glucokinase”, preferably being encoded by a gene comprising the nucleic acid sequence SEQ ID NO. 85510, preferably the coding region thereof, conferred the production of or the increase in glucose-1-phosphate compared with the wild type control.

[91410] The nucleic acid sequence of Sll0643 from Synechocystis sp., e.g. as shown in the respective line in column 5 of Table I, application no. 17, has been published in C. And the activity of the gene product thereof is the activity of urease accessory protein.

[91411] Accordingly, in one embodiment, the process of the present invention for producing saccharic acid in a non-human organism, like a microorganism or a plant or a part thereof, comprises increasing or generating the activity of a gene product with the activity of a gene product conferring the activity of “urease accessory protein”, especially from Synechocystis sp. or its functional equivalent or its homolog, e.g. the increase of
[91412] (a) a gene product of a gene comprising the nucleic acid molecule as shown in the respective line in column 5 of Table I (whereby the respective line disclose in column 7 the fine chemical saccharic acid), application no. 17, preferably the coding region thereof, or a homolog or a fragment thereof, and being depicted in the same respective line as said Sll0643, or a functional equivalent or a homolog thereof as shown in column 8 of Table I, application no. 17, preferably the coding region thereof, particularly a homolog or functional equivalent as shown in column 8 of Table I B, application no. 17, and being depicted in the same respective line as said Sll0643, and preferably the activity is increased non-targeted, or
[91413] (b) a polypeptide comprising a polypeptide, a consensus sequence or at least a polypeptide motif as shown in the respective line in column 5 of Table II or in column 8 of Table IV, application no. 17, respectively, and being depicted in the same respective line as said Sll0643, or a functional equivalent or a homolog thereof as depicted in column 8 of Table II, application no. 17, preferably a homolog or functional equivalent as depicted in column 8 of Table II B, application no. 17, and being depicted in the same respective line as said Sll0643, and preferably the activity is increased non-targeted, whereby the respective line disclose in column 7 the fine chemical saccharic acid.

[91414] Accordingly, in one embodiment, the molecule which activity is to be increased in the process of the invention is the gene product with an activity as a “urease accessory protein”, preferably it is the molecule of section (a) or (b) of this paragraph.

[91415] In particular, it was observed that in plants, especially in Arabidopsis thaliana, increasing or generating the activity of a gene product non-targeted with the activity of a “urease accessory protein”, preferably being encoded by a gene comprising the nucleic acid sequence SEQ ID NO. 146945, preferably the coding region thereof, conferred the production of or the increase in saccharic acid compared with the wild type control.

[91416] The nucleic acid sequence of Sll0833 from Synechocystis sp., e.g. as shown in the respective line in column 5 of Table I, application no. 17, has been published in C. And the activity of the gene product thereof is the activity of binding-protein-dependent transport systems inner membrane component.

[91417] Accordingly, in one embodiment, the process of the present invention for producing glucose-1-phosphate in a non-human organism, like a microorganism or a plant or a part thereof, comprises increasing or generating the activity of a gene product with the activity of a gene product conferring the activity of “binding-protein-dependent transport systems inner membrane component”, especially from Synechocystis sp. or its functional equivalent or its homolog, e.g. the increase of
[91418] (a) a gene product of a gene comprising the nucleic acid molecule as shown in the respective line in column 5 of Table I (whereby the respective line disclose in column 7 the fine chemical glucose-1-phosphate), application no. 17, preferably the coding region thereof, or a homolog or a fragment thereof, and being depicted in the same respective line as said Sll0833, or a functional equivalent or a homolog thereof as shown in column 8 of Table I, application no. 17, preferably the coding region thereof, particularly a homolog or functional equivalent as shown in column 8 of Table I B, application no. 17, and being depicted in the same respective line as said Sll0833, and preferably the activity is increased non-targeted, or
[91419] (b) a polypeptide comprising a polypeptide, a consensus sequence or at least a polypeptide motif as shown in the respective line in column 5 of Table II or in column 8 of Table IV, application no. 17, respectively, and being depicted in the same respective line as said Sll0833, or a functional equivalent or a homolog thereof as depicted in column 8 of Table II, application no. 17, preferably a homolog or functional equivalent as depicted in column 8 of Table II B, application no. 17, and being depicted in the same respective line as said Sll0833, and preferably the activity is increased non-targeted, whereby the respective line disclose in column 7 the fine chemical glucose-1-phosphate.

[91420] Accordingly, in one embodiment, the molecule which activity is to be increased in the process of the invention is the gene product with an activity as a “binding-protein-dependent transport systems inner membrane component”, preferably it is the molecule of section (a) or (b) of this paragraph.

[91421] In particular, it was observed that in plants, especially in Arabidopsis thaliana, increasing or generating the activity of a gene product non-targeted with the activity of a “binding-protein-dependent transport systems inner membrane component”, preferably being encoded by a gene comprising the nucleic acid sequence SEQ ID NO. 101707, preferably the coding region thereof, conferred the production of or the increase in glucose-1-phosphate compared with the wild type control.

[91422] The nucleic acid sequence of Sll0833 from Synechocystis sp., e.g. as shown in the respective line in column 5 of Table I, application no. 17, has been published in C. And the activity of the gene product thereof is the activity of binding-protein-dependent transport systems inner membrane component.

[91423] Accordingly, in one embodiment, the process of the present invention for producing 3,4,5-trihydroxypentanoic acid in a non-human organism, like a microorganism or a plant or a part thereof, comprises increasing or generating the activity of a gene product with the activity of a gene product conferring the activity of “binding-protein-dependent transport systems inner membrane component”, especially from Synechocystis sp. or its functional equivalent or its homolog, e.g. the increase of
[91424] (a) a gene product of a gene comprising the nucleic acid molecule as shown in the respective line in column 5 of Table I (whereby the respective line disclose in column 7 the fine chemical 3,4,5-trihydroxypentanoic acid), application no. 17, preferably the coding region thereof, or a homolog or a fragment thereof, and being depicted in the same respective line as said Sll0833, or a functional equivalent or a homolog thereof as shown in column 8 of Table I, application no. 17, preferably the coding region thereof, particularly a homolog or functional equivalent as shown in column 8 of Table I B, application no. 17, and being depicted in the same respective line as said Sll0833, and preferably the activity is increased non-targeted, or
[91425] (b) a polypeptide comprising a polypeptide, a consensus sequence or at least a polypeptide motif as shown in the respective line in column 5 of Table II or in column 8 of Table IV, application no. 17, respectively, and being depicted in the same respective line as said Sll0833, or a functional equivalent or a homolog thereof as depicted in column 8 of Table II, application no. 17, preferably a homolog or functional equivalent as depicted in column 8 of Table II B, application no. 17, and being depicted in the same respective line as said Sll0833, and preferably the activity is increased non-targeted, whereby the respective line disclose in column 7 the fine chemical 3,4,5-trihydroxypentanoic acid.

[91426] Accordingly, in one embodiment, the molecule which activity is to be increased in the process of the invention is the gene product with an activity as a “binding-protein-dependent transport systems inner membrane component”, preferably it is the molecule of section (a) or (b) of this paragraph.

[91427] In particular, it was observed that in plants, especially in Arabidopsis thaliana, increasing or generating the activity of a gene product non-targeted with the activity of a “binding-protein-dependent transport systems inner membrane component”, preferably being encoded by a gene comprising the nucleic acid sequence SEQ ID NO. 101707, preferably the coding region thereof, conferred the production of or the increase in 3,4,5-trihydroxypentanoic acid compared with the wild type control.

[91428] The nucleic acid sequence of Sll0934 from Synechocystis sp., e.g. as shown in the respective line in column 5 of Table I, application no. 17, has been published in C. And the activity of the gene product thereof is the activity of 3-deoxy-7-phosphoheptulonate synthase.

[91429] Accordingly, in one embodiment, the process of the present invention for producing glucose-1-phosphate in a non-human organism, like a microorganism or a plant or a part thereof, comprises increasing or generating the activity of a gene product with the activity of a gene product conferring the activity of “3-deoxy-7-phosphoheptulonate synthase”, especially from Synechocystis sp. or its functional equivalent or its homolog, e.g. the increase of
[91430] (a) a gene product of a gene comprising the nucleic acid molecule as shown in the respective line in column 5 of Table I (whereby the respective line disclose in column 7 the fine chemical glucose-1-phosphate), application no. 17, preferably the coding region thereof, or a homolog or a fragment thereof, and being depicted in the same respective line as said Sll0934, or a functional equivalent or a homolog thereof as shown in column 8 of Table I, application no. 17, preferably the coding region thereof, particularly a homolog or functional equivalent as shown in column 8 of Table I B, application no. 17, and being depicted in the same respective line as said Sll0934, and preferably the activity is increased mitochondrial, or
[91431] (b) a polypeptide comprising a polypeptide, a consensus sequence or at least a polypeptide motif as shown in the respective line in column 5 of Table II or in column 8 of Table IV, application no. 17, respectively, and being depicted in the same respective line as said Sll0934, or a functional equivalent or a homolog thereof as depicted in column 8 of Table II, application no. 17, preferably a homolog or functional equivalent as depicted in column 8 of Table II B, application no. 17, and being depicted in the same respective line as said Sll0934, and preferably the activity is increased mitochondrial, whereby the respective line disclose in column 7 the fine chemical glucose-1-phosphate.

[91432] Accordingly, in one embodiment, the molecule which activity is to be increased in the process of the invention is the gene product with an activity as a “3-deoxy-7-phosphoheptulonate synthase”, preferably it is the molecule of section (a) or (b) of this paragraph.

[91433] In particular, it was observed that in plants, especially in Arabidopsis thaliana, increasing or generating the activity of a gene product mitochondrial with the activity of a “3-deoxy-7-phosphoheptulonate synthase”, preferably being encoded by a gene comprising the nucleic acid sequence SEQ ID NO. 52246, preferably the coding region thereof, conferred the production of or the increase in glucose-1-phosphate compared with the wild type control.

[91434] The nucleic acid sequence of Sll0945 from Synechocystis sp., e.g. as shown in the respective line in column 5 of Table I, application no. 17, has been published in C. And the activity of the gene product thereof is the activity of glycogen synthase.

[91435] Accordingly, in one embodiment, the process of the present invention for producing fructose in a non-human organism, like a microorganism or a plant or a part thereof, comprises increasing or generating the activity of a gene product with the activity of a gene product conferring the activity of “glycogen synthase”, especially from Synechocystis sp. or its functional equivalent or its homolog, e.g. the increase of
[91436] (a) a gene product of a gene comprising the nucleic acid molecule as shown in the respective line in column 5 of Table I (whereby the respective line disclose in column 7 the fine chemical fructose), application no. 17, preferably the coding region thereof, or a homolog or a fragment thereof, and being depicted in the same respective line as said Sll0945, or a functional equivalent or a homolog thereof as shown in column 8 of Table I, application no. 17, preferably the coding region thereof, particularly a homolog or functional equivalent as shown in column 8 of Table I B, application no. 17, and being depicted in the same respective line as said Sll0945, and preferably the activity is increased non-targeted, or
[91437] (b) a polypeptide comprising a polypeptide, a consensus sequence or at least a polypeptide motif as shown in the respective line in column 5 of Table II or in column 8 of Table IV, application no. 17, respectively, and being depicted in the same respective line as said Sll0945, or a functional equivalent or a homolog thereof as depicted in column 8 of Table II, application no. 17, preferably a homolog or functional equivalent as depicted in column 8 of Table II B, application no. 17, and being depicted in the same respective line as said Sll0945, and preferably the activity is increased non-targeted, whereby the respective line disclose in column 7 the fine chemical fructose.

[91438] Accordingly, in one embodiment, the molecule which activity is to be increased in the process of the invention is the gene product with an activity as a “glycogen synthase”, preferably it is the molecule of section (a) or (b) of this paragraph.

[91439] In particular, it was observed that in plants, especially in Arabidopsis thaliana, increasing or generating the activity of a gene product non-targeted with the activity of a “glycogen synthase”, preferably being encoded by a gene comprising the nucleic acid sequence SEQ ID NO. 52364, preferably the coding region thereof, conferred the production of or the increase in fructose compared with the wild type control.

[91440] The nucleic acid sequence of Sll0945 from Synechocystis sp., e.g. as shown in the respective line in column 5 of Table I, application no. 17, has been published in C. And the activity of the gene product thereof is the activity of glycogen synthase.

[91441] Accordingly, in one embodiment, the process of the present invention for producing sucrose in a non-human organism, like a microorganism or a plant or a part thereof, comprises increasing or generating the activity of a gene product with the activity of a gene product conferring the activity of “glycogen synthase”, especially from Synechocystis sp. or its functional equivalent or its homolog, e.g. the increase of
[91442] (a) a gene product of a gene comprising the nucleic acid molecule as shown in the respective line in column 5 of Table I (whereby the respective line disclose in column 7 the fine chemical sucrose), application no. 17, preferably the coding region thereof, or a homolog or a fragment thereof, and being depicted in the same respective line as said Sll0945, or a functional equivalent or a homolog thereof as shown in column 8 of Table I, application no. 17, preferably the coding region thereof, particularly a homolog or functional equivalent as shown in column 8 of Table I B, application no. 17, and being depicted in the same respective line as said Sll0945, and preferably the activity is increased non-targeted, or
[91443] (b) a polypeptide comprising a polypeptide, a consensus sequence or at least a polypeptide motif as shown in the respective line in column 5 of Table II or in column 8 of Table IV, application no. 17, respectively, and being depicted in the same respective line as said Sll0945, or a functional equivalent or a homolog thereof as depicted in column 8 of Table II, application no. 17, preferably a homolog or functional equivalent as depicted in column 8 of Table II B, application no. 17, and being depicted in the same respective line as said Sll0945, and preferably the activity is increased non-targeted, whereby the respective line disclose in column 7 the fine chemical sucrose.

[91444] Accordingly, in one embodiment, the molecule which activity is to be increased in the process of the invention is the gene product with an activity as a “glycogen synthase”, preferably it is the molecule of section (a) or (b) of this paragraph.

[91445] In particular, it was observed that in plants, especially in Arabidopsis thaliana, increasing or generating the activity of a gene product non-targeted with the activity of a “glycogen synthase”, preferably being encoded by a gene comprising the nucleic acid sequence SEQ ID NO. 52364, preferably the coding region thereof, conferred the production of or the increase in sucrose compared with the wild type control.

[91446] The nucleic acid sequence of Sll1185 from Synechocystis sp., e.g. as shown in the respective line in column 5 of Table I, application no. 17, has been published in C. And the activity of the gene product thereof is the activity of coproporphyrinogen oxidase.

[91447] Accordingly, in one embodiment, the process of the present invention for producing glucose-1-phosphate in a non-human organism, like a microorganism or a plant or a part thereof, comprises increasing or generating the activity of a gene product with the activity of a gene product conferring the activity of “coproporphyrinogen oxidase”, especially from Synechocystis sp. or its functional equivalent or its homolog, e.g. the increase of
[91448] (a) a gene product of a gene comprising the nucleic acid molecule as shown in the respective line in column 5 of Table I (whereby the respective line disclose in column 7 the fine chemical glucose-1-phosphate), application no. 17, preferably the coding region thereof, or a homolog or a fragment thereof, and being depicted in the same respective line as said Sll1185, or a functional equivalent or a homolog thereof as shown in column 8 of Table I, application no. 17, preferably the coding region thereof, particularly a homolog or functional equivalent as shown in column 8 of Table I B, application no. 17, and being depicted in the same respective line as said Sll1185, and preferably the activity is increased non-targeted, or
[91449] (b) a polypeptide comprising a polypeptide, a consensus sequence or at least a polypeptide motif as shown in the respective line in column 5 of Table II or in column 8 of Table IV, application no. 17, respectively, and being depicted in the same respective line as said Sll1185, or a functional equivalent or a homolog thereof as depicted in column 8 of Table II, application no. 17, preferably a homolog or functional equivalent as depicted in column 8 of Table II B, application no. 17, and being depicted in the same respective line as said Sll1185, and preferably the activity is increased non-targeted, whereby the respective line disclose in column 7 the fine chemical glucose-1-phosphate.

[91450] Accordingly, in one embodiment, the molecule which activity is to be increased in the process of the invention is the gene product with an activity as a “coproporphyrinogen oxidase”, preferably it is the molecule of section (a) or (b) of this paragraph.

[91451] In particular, it was observed that in plants, especially in Arabidopsis thaliana, increasing or generating the activity of a gene product non-targeted with the activity of a “coproporphyrinogen oxidase”, preferably being encoded by a gene comprising the nucleic acid sequence SEQ ID NO. 53189, preferably the coding region thereof, conferred the production of or the increase in glucose-1-phosphate compared with the wild type control.

[91452] The nucleic acid sequence of SLL1308 from Synechocystis sp., e.g. as shown in the respective line in column 5 of Table I, application no. 17, has been published in C. And the activity of the gene product thereof is the activity of short chain dehydrogenase.

[91453] Accordingly, in one embodiment, the process of the present invention for producing 3,4,5-trihydroxypentanoic acid in a non-human organism, like a microorganism or a plant or a part thereof, comprises increasing or generating the activity of a gene product with the activity of a gene product conferring the activity of “short chain dehydrogenase”, especially from Synechocystis sp. or its functional equivalent or its homolog, e.g. the increase of
[91454] (a) a gene product of a gene comprising the nucleic acid molecule as shown in the respective line in column 5 of Table I (whereby the respective line disclose in column 7 the fine chemical 3,4,5-trihydroxypentanoic acid), application no. 17, preferably the coding region thereof, or a homolog or a fragment thereof, and being depicted in the same respective line as said SLL1308, or a functional equivalent or a homolog thereof as shown in column 8 of Table I, application no. 17, preferably the coding region thereof, particularly a homolog or functional equivalent as shown in column 8 of Table I B, application no. 17, and being depicted in the same respective line as said SLL1308, and preferably the activity is increased non-targeted, or
[91455] (b) a polypeptide comprising a polypeptide, a consensus sequence or at least a polypeptide motif as shown in the respective line in column 5 of Table II or in column 8 of Table IV, application no. 17, respectively, and being depicted in the same respective line as said SLL1308, or a functional equivalent or a homolog thereof as depicted in column 8 of Table II, application no. 17, preferably a homolog or functional equivalent as depicted in column 8 of Table II B, application no. 17, and being depicted in the same respective line as said SLL1308, and preferably the activity is increased non-targeted, whereby the respective line disclose in column 7 the fine chemical 3,4,5-trihydroxypentanoic acid.

[91456] Accordingly, in one embodiment, the molecule which activity is to be increased in the process of the invention is the gene product with an activity as a “short chain dehydrogenase”, preferably it is the molecule of section (a) or (b) of this paragraph.

[91457] In particular, it was observed that in plants, especially in Arabidopsis thaliana, increasing or generating the activity of a gene product non-targeted with the activity of a “short chain dehydrogenase”, preferably being encoded by a gene comprising the nucleic acid sequence SEQ ID NO. 147208, preferably the coding region thereof, conferred the production of or the increase in 3,4,5-trihydroxypentanoic acid compared with the wild type control.

[91458] The nucleic acid sequence of Sll1393 from Synechocystis sp., e.g. as shown in the respective line in column 5 of Table I, application no. 17, has been published in C. And the activity of the gene product thereof is the activity of glycogen (starch) synthase.

[91459] Accordingly, in one embodiment, the process of the present invention for producing raffinose in a non-human organism, like a microorganism or a plant or a part thereof, comprises increasing or generating the activity of a gene product with the activity of a gene product conferring the activity of “glycogen (starch) synthase”, especially from Synechocystis sp. or its functional equivalent or its homolog, e.g. the increase of
[91460] (a) a gene product of a gene comprising the nucleic acid molecule as shown in the respective line in column 5 of Table I (whereby the respective line disclose in column 7 the fine chemical raffinose), application no. 17, preferably the coding region thereof, or a homolog or a fragment thereof, and being depicted in the same respective line as said Sll1393, or a functional equivalent or a homolog thereof as shown in column 8 of Table I, application no. 17, preferably the coding region thereof, particularly a homolog or functional equivalent as shown in column 8 of Table I B, application no. 17, and being depicted in the same respective line as said Sll1393, and preferably the activity is increased non-targeted, or
[91461] (b) a polypeptide comprising a polypeptide, a consensus sequence or at least a polypeptide motif as shown in the respective line in column 5 of Table II or in column 8 of Table IV, application no. 17, respectively, and being depicted in the same respective line as said Sll1393, or a functional equivalent or a homolog thereof as depicted in column 8 of Table II, application no. 17, preferably a homolog or functional equivalent as depicted in column 8 of Table II B, application no. 17, and being depicted in the same respective line as said Sll1393, and preferably the activity is increased non-targeted, whereby the respective line disclose in column 7 the fine chemical raffinose.

[91462] Accordingly, in one embodiment, the molecule which activity is to be increased in the process of the invention is the gene product with an activity as a “glycogen (starch) synthase”, preferably it is the molecule of section (a) or (b) of this paragraph.

[91463] In particular, it was observed that in plants, especially in Arabidopsis thaliana, increasing or generating the activity of a gene product non-targeted with the activity of a “glycogen (starch) synthase”, preferably being encoded by a gene comprising the nucleic acid sequence SEQ ID NO. 53456, preferably the coding region thereof, conferred the production of or the increase in raffinose compared with the wild type control.

[91464] The nucleic acid sequence of Sll1498 from Synechocystis sp., e.g. as shown in the respective line in column 5 of Table I, application no. 17, has been published in C. And the activity of the gene product thereof is the activity of carbamoyl-phosphate synthase subunit.

[91465] Accordingly, in one embodiment, the process of the present invention for producing myo-inositol in a non-human organism, like a microorganism or a plant or a part thereof, comprises increasing or generating the activity of a gene product with the activity of a gene product conferring the activity of “carbamoyl-phosphate synthase subunit”, especially from Synechocystis sp. or its functional equivalent or its homolog, e.g. the increase of
[91466] (a) a gene product of a gene comprising the nucleic acid molecule as shown in the respective line in column 5 of Table I (whereby the respective line disclose in column 7 the fine chemical myo-inositol), application no. 17, preferably the coding region thereof, or a homolog or a fragment thereof, and being depicted in the same respective line as said Sll1498, or a functional equivalent or a homolog thereof as shown in column 8 of Table I, application no. 17, preferably the coding region thereof, particularly a homolog or functional equivalent as shown in column 8 of Table I B, application no. 17, and being depicted in the same respective line as said Sll1498, and preferably the activity is increased non-targeted, or
[91467] (b) a polypeptide comprising a polypeptide, a consensus sequence or at least a polypeptide motif as shown in the respective line in column 5 of Table II or in column 8 of Table IV, application no. 17, respectively, and being depicted in the same respective line as said Sll1498, or a functional equivalent or a homolog thereof as depicted in column 8 of Table II, application no. 17, preferably a homolog or functional equivalent as depicted in column 8 of Table II B, application no. 17, and being depicted in the same respective line as said Sll1498, and preferably the activity is increased non-targeted, whereby the respective line disclose in column 7 the fine chemical myo-inositol.

[91468] Accordingly, in one embodiment, the molecule which activity is to be increased in the process of the invention is the gene product with an activity as a “carbamoyl-phosphate synthase subunit”, preferably it is the molecule of section (a) or (b) of this paragraph.

[91469] In particular, it was observed that in plants, especially in Arabidopsis thaliana, increasing or generating the activity of a gene product non-targeted with the activity of a “carbamoylphosphate synthase subunit”, preferably being encoded by a gene comprising the nucleic acid sequence SEQ ID NO. 95047, preferably the coding region thereof, conferred the production of or the increase in myo-inositol compared with the wild type control.

[91470] The nucleic acid sequence of Sll1498 from Synechocystis sp., e.g. as shown in the respective line in column 5 of Table I, application no. 17, has been published in C. And the activity of the gene product thereof is the activity of carbamoyl-phosphate synthase subunit.

[91471] Accordingly, in one embodiment, the process of the present invention for producing 3,4,5-trihydroxypentanoic acid in a non-human organism, like a microorganism or a plant or a part thereof, comprises increasing or generating the activity of a gene product with the activity of a gene product conferring the activity of “carbamoyl-phosphate synthase subunit”, especially from Synechocystis sp. or its functional equivalent or its homolog, e.g. the increase of
[91472] (a) a gene product of a gene comprising the nucleic acid molecule as shown in the respective line in column 5 of Table I (whereby the respective line disclose in column 7 the fine chemical 3,4,5-trihydroxypentanoic acid), application no. 17, preferably the coding region thereof, or a homolog or a fragment thereof, and being depicted in the same respective line as said Sll1498, or a functional equivalent or a homolog thereof as shown in column 8 of Table I, application no. 17, preferably the coding region thereof, particularly a homolog or functional equivalent as shown in column 8 of Table I B, application no. 17, and being depicted in the same respective line as said Sll1498, and preferably the activity is increased non-targeted, or
[91473] (b) a polypeptide comprising a polypeptide, a consensus sequence or at least a polypeptide motif as shown in the respective line in column 5 of Table II or in column 8 of Table IV, application no. 17, respectively, and being depicted in the same respective line as said Sll1498, or a functional equivalent or a homolog thereof as depicted in column 8 of Table II, application no. 17, preferably a homolog or functional equivalent as depicted in column 8 of Table II B, application no. 17, and being depicted in the same respective line as said Sll1498, and preferably the activity is increased non-targeted, whereby the respective line disclose in column 7 the fine chemical 3,4,5-trihydroxypentanoic acid.

[91474] Accordingly, in one embodiment, the molecule which activity is to be increased in the process of the invention is the gene product with an activity as a “carbamoyl-phosphate synthase subunit”, preferably it is the molecule of section (a) or (b) of this paragraph.

[91475] In particular, it was observed that in plants, especially in Arabidopsis thaliana, increasing or generating the activity of a gene product non-targeted with the activity of a “carbamoylphosphate synthase subunit”, preferably being encoded by a gene comprising the nucleic acid sequence SEQ ID NO. 95047, preferably the coding region thereof, conferred the production of or the increase in 3,4,5-trihydroxypentanoic acid compared with the wild type control.

[91476] The nucleic acid sequence of Sll1676 from Synechocystis sp., e.g. as shown in the respective line in column 5 of Table I, application no. 17, has been published in C. And the activity of the gene product thereof is the activity of 4-alpha-glucanotransferase.

[91477] Accordingly, in one embodiment, the process of the present invention for producing myo-inositol in a non-human organism, like a microorganism or a plant or a part thereof, comprises increasing or generating the activity of a gene product with the activity of a gene product conferring the activity of “4-alpha-glucanotransferase”, especially from Synechocystis sp. or its functional equivalent or its homolog, e.g. the increase of
[91478] (a) a gene product of a gene comprising the nucleic acid molecule as shown in the respective line in column 5 of Table I (whereby the respective line disclose in column 7 the fine chemical myo-inositol), application no. 17, preferably the coding region thereof, or a homolog or a fragment thereof, and being depicted in the same respective line as said Sll1676, or a functional equivalent or a homolog thereof as shown in column 8 of Table I, application no. 17, preferably the coding region thereof, particularly a homolog or functional equivalent as shown in column 8 of Table I B, application no. 17, and being depicted in the same respective line as said Sll1676, and preferably the activity is increased non-targeted, or
[91479] (b) a polypeptide comprising a polypeptide, a consensus sequence or at least a polypeptide motif as shown in the respective line in column 5 of Table II or in column 8 of Table IV, application no. 17, respectively, and being depicted in the same respective line as said Sll1676, or a functional equivalent or a homolog thereof as depicted in column 8 of Table II, application no. 17, preferably a homolog or functional equivalent as depicted in column 8 of Table II B, application no. 17, and being depicted in the same respective line as said Sll1676, and preferably the activity is increased non-targeted, whereby the respective line disclose in column 7 the fine chemical myo-inositol.

[91480] Accordingly, in one embodiment, the molecule which activity is to be increased in the process of the invention is the gene product with an activity as a “4-alpha-glucanotransferase”, preferably it is the molecule of section (a) or (b) of this paragraph.

[91481] In particular, it was observed that in plants, especially in Arabidopsis thaliana, increasing or generating the activity of a gene product non-targeted with the activity of a “4-alpha-glucanotransferase”, preferably being encoded by a gene comprising the nucleic acid sequence SEQ ID NO. 54897, preferably the coding region thereof, conferred the production of or the increase in myo-inositol compared with the wild type control.

[91482] The nucleic acid sequence of Sll1682 from Synechocystis sp., e.g. as shown in the respective line in column 5 of Table I, application no. 17, has been published in C. And the activity of the gene product thereof is the activity of alanine dehydrogenase.

[91483] Accordingly, in one embodiment, the process of the present invention for producing 3,4,5-trihydroxypentanoic acid in a non-human organism, like a microorganism or a plant or a part thereof, comprises increasing or generating the activity of a gene product with the activity of a gene product conferring the activity of “alanine dehydrogenase”, especially from Synechocystis sp. or its functional equivalent or its homolog, e.g. the increase of
[91484] (a) a gene product of a gene comprising the nucleic acid molecule as shown in the respective line in column 5 of Table I (whereby the respective line disclose in column 7 the fine chemical 3,4,5-trihydroxypentanoic acid), application no. 17, preferably the coding region thereof, or a homolog or a fragment thereof, and being depicted in the same respective line as said Sll1682, or a functional equivalent or a homolog thereof as shown in column 8 of Table I, application no. 17, preferably the coding region thereof, particularly a homolog or functional equivalent as shown in column 8 of Table I B, application no. 17, and being depicted in the same respective line as said Sll1682, and preferably the activity is increased plastidic, or
[91485] (b) a polypeptide comprising a polypeptide, a consensus sequence or at least a polypeptide motif as shown in the respective line in column 5 of Table II or in column 8 of Table IV, application no. 17, respectively, and being depicted in the same respective line as said Sll1682, or a functional equivalent or a homolog thereof as depicted in column 8 of Table II, application no. 17, preferably a homolog or functional equivalent as depicted in column 8 of Table II B, application no. 17, and being depicted in the same respective line as said Sll1682, and preferably the activity is increased plastidic, whereby the respective line disclose in column 7 the fine chemical 3,4,5-trihydroxypentanoic acid.

[91486] Accordingly, in one embodiment, the molecule which activity is to be increased in the process of the invention is the gene product with an activity as a “alanine dehydrogenase”, preferably it is the molecule of section (a) or (b) of this paragraph.

[91487] In particular, it was observed that in plants, especially in Arabidopsis thaliana, increasing or generating the activity of a gene product plastidic with the activity of a “alanine dehydrogenase”, preferably being encoded by a gene comprising the nucleic acid sequence SEQ ID NO. 55063, preferably the coding region thereof, conferred the production of or the increase in 3,4,5-trihydroxypentanoic acid compared with the wild type control.

[91488] The nucleic acid sequence of Sll1761 from Synechocystis sp., e.g. as shown in the respective line in column 5 of Table I, application no. 17, has been published in C. And the activity of the gene product thereof is the activity of sll1761-protein.

[91489] Accordingly, in one embodiment, the process of the present invention for producing glucose in a non-human organism, like a microorganism or a plant or a part thereof, comprises increasing or generating the activity of a gene product with the activity of a gene product conferring the activity of “sll1761-protein”, especially from Synechocystis sp. or its functional equivalent or its homolog, e.g. the increase of
[91490] (a) a gene product of a gene comprising the nucleic acid molecule as shown in the respective line in column 5 of Table I (whereby the respective line disclose in column 7 the fine chemical glucose), application no. 17, preferably the coding region thereof, or a homolog or a fragment thereof, and being depicted in the same respective line as said Sll1761, or a functional equivalent or a homolog thereof as shown in column 8 of Table I, application no. 17, preferably the coding region thereof, particularly a homolog or functional equivalent as shown in column 8 of Table I B, application no. 17, and being depicted in the same respective line as said Sll1761, and preferably the activity is increased non-targeted, or
[91491] (b) a polypeptide comprising a polypeptide, a consensus sequence or at least a polypeptide motif as shown in the respective line in column 5 of Table II or in column 8 of Table IV, application no. 17, respectively, and being depicted in the same respective line as said Sll1761, or a functional equivalent or a homolog thereof as depicted in column 8 of Table II, application no. 17, preferably a homolog or functional equivalent as depicted in column 8 of Table II B, application no. 17, and being depicted in the same respective line as said Sll1761, and preferably the activity is increased non-targeted, whereby the respective line disclose in column 7 the fine chemical glucose.

[91492] Accordingly, in one embodiment, the molecule which activity is to be increased in the process of the invention is the gene product with an activity as a “sll1761-protein”, preferably it is the molecule of section (a) or (b) of this paragraph.

[91493] In particular, it was observed that in plants, especially in Arabidopsis thaliana, increasing or generating the activity of a gene product non-targeted with the activity of a “sll1761-protein”, preferably being encoded by a gene comprising the nucleic acid sequence SEQ ID NO. 55379, preferably the coding region thereof, conferred the production of or the increase in glucose compared with the wild type control.

[91494] The nucleic acid sequence of Sll1848 from Synechocystis sp., e.g. as shown in the respective line in column 5 of Table I, application no. 17, has been published in C. And the activity of the gene product thereof is the activity of acyl transferase.

[91495] Accordingly, in one embodiment, the process of the present invention for producing glucose in a non-human organism, like a microorganism or a plant or a part thereof, comprises increasing or generating the activity of a gene product with the activity of a gene product conferring the activity of “acyl transferase”, especially from Synechocystis sp. or its functional equivalent or its homolog, e.g. the increase of
[91496] (a) a gene product of a gene comprising the nucleic acid molecule as shown in the respective line in column 5 of Table I (whereby the respective line disclose in column 7 the fine chemical glucose), application no. 17, preferably the coding region thereof, or a homolog or a fragment thereof, and being depicted in the same respective line as said Sll1848, or a functional equivalent or a homolog thereof as shown in column 8 of Table I, application no. 17, preferably the coding region thereof, particularly a homolog or functional equivalent as shown in column 8 of Table I B, application no. 17, and being depicted in the same respective line as said Sll1848, and preferably the activity is increased plastidic, or
[91497] (b) a polypeptide comprising a polypeptide, a consensus sequence or at least a polypeptide motif as shown in the respective line in column 5 of Table II or in column 8 of Table IV, application no. 17, respectively, and being depicted in the same respective line as said Sll1848, or a functional equivalent or a homolog thereof as depicted in column 8 of Table II, application no. 17, preferably a homolog or functional equivalent as depicted in column 8 of Table II B, application no. 17, and being depicted in the same respective line as said Sll1848, and preferably the activity is increased plastidic, whereby the respective line disclose in column 7 the fine chemical glucose.

[91498] Accordingly, in one embodiment, the molecule which activity is to be increased in the process of the invention is the gene product with an activity as a “acyl transferase”, preferably it is the molecule of section (a) or (b) of this paragraph.

[91499] In particular, it was observed that in plants, especially in Arabidopsis thaliana, increasing or generating the activity of a gene product plastidic with the activity of a “acyl transferase”, preferably being encoded by a gene comprising the nucleic acid sequence SEQ ID NO. 86447, preferably the coding region thereof, conferred the production of or the increase in glucose compared with the wild type control.

[91500] The nucleic acid sequence of Sll1920 from Synechocystis sp., e.g. as shown in the respective line in column 5 of Table I, application no. 17, has been published in C. And the activity of the gene product thereof is the activity of cation-transporting ATPase.

[91501] Accordingly, in one embodiment, the process of the present invention for producing glucose-1-phosphate in a non-human organism, like a microorganism or a plant or a part thereof, comprises increasing or generating the activity of a gene product with the activity of a gene product conferring the activity of “cation-transporting ATPase”, especially from Synechocystis sp. or its functional equivalent or its homolog, e.g. the increase of
[91502] (a) a gene product of a gene comprising the nucleic acid molecule as shown in the respective line in column 5 of Table I (whereby the respective line disclose in column 7 the fine chemical glucose-1-phosphate), application no. 17, preferably the coding region thereof, or a homolog or a fragment thereof, and being depicted in the same respective line as said Sll1920, or a functional equivalent or a homolog thereof as shown in column 8 of Table I, application no. 17, preferably the coding region thereof, particularly a homolog or functional equivalent as shown in column 8 of Table I B, application no. 17, and being depicted in the same respective line as said Sll1920, and preferably the activity is increased mitochondrial, or
[91503] (b) a polypeptide comprising a polypeptide, a consensus sequence or at least a polypeptide motif as shown in the respective line in column 5 of Table II or in column 8 of Table IV, application no. 17, respectively, and being depicted in the same respective line as said Sll1920, or a functional equivalent or a homolog thereof as depicted in column 8 of Table II, application no. 17, preferably a homolog or functional equivalent as depicted in column 8 of Table II B, application no. 17, and being depicted in the same respective line as said Sll1920, and preferably the activity is increased mitochondrial, whereby the respective line disclose in column 7 the fine chemical glucose-1-phosphate.

[91504] Accordingly, in one embodiment, the molecule which activity is to be increased in the process of the invention is the gene product with an activity as a “cation-transporting ATPase”, preferably it is the molecule of section (a) or (b) of this paragraph.

[91505] In particular, it was observed that in plants, especially in Arabidopsis thaliana, increasing or generating the activity of a gene product mitochondrial with the activity of a “cation-transporting ATPase”, preferably being encoded by a gene comprising the nucleic acid sequence SEQ ID NO. 55385, preferably the coding region thereof, conferred the production of or the increase in glucose-1-phosphate compared with the wild type control.

[91506] The nucleic acid sequence of Sll1920 from Synechocystis sp., e.g. as shown in the respective line in column 5 of Table I, application no. 17, has been published in C. And the activity of the gene product thereof is the activity of cation-transporting ATPase.

[91507] Accordingly, in one embodiment, the process of the present invention for producing glucose-1-phosphate in a non-human organism, like a microorganism or a plant or a part thereof, comprises increasing or generating the activity of a gene product with the activity of a gene product conferring the activity of “cation-transporting ATPase”, especially from Synechocystis sp. or its functional equivalent or its homolog, e.g. the increase of
[91508] (a) a gene product of a gene comprising the nucleic acid molecule as shown in the respective line in column 5 of Table I (whereby the respective line disclose in column 7 the fine chemical glucose-1-phosphate), application no. 17, preferably the coding region thereof, or a homolog or a fragment thereof, and being depicted in the same respective line as said Sll1920, or a functional equivalent or a homolog thereof as shown in column 8 of Table I, application no. 17, preferably the coding region thereof, particularly a homolog or functional equivalent as shown in column 8 of Table I B, application no. 17, and being depicted in the same respective line as said Sll1920, and preferably the activity is increased non-targeted, or
[91509] (b) a polypeptide comprising a polypeptide, a consensus sequence or at least a polypeptide motif as shown in the respective line in column 5 of Table II or in column 8 of Table IV, application no. 17, respectively, and being depicted in the same respective line as said Sll1920, or a functional equivalent or a homolog thereof as depicted in column 8 of Table II, application no. 17, preferably a homolog or functional equivalent as depicted in column 8 of Table II B, application no. 17, and being depicted in the same respective line as said Sll1920, and preferably the activity is increased non-targeted, whereby the respective line disclose in column 7 the fine chemical glucose-1-phosphate.

[91510] Accordingly, in one embodiment, the molecule which activity is to be increased in the process of the invention is the gene product with an activity as a “cation-transporting ATPase”, preferably it is the molecule of section (a) or (b) of this paragraph.

[91511] In particular, it was observed that in plants, especially in Arabidopsis thaliana, increasing or generating the activity of a gene product non-targeted with the activity of a “cation-transporting ATPase”, preferably being encoded by a gene comprising the nucleic acid sequence SEQ ID NO. 55385, preferably the coding region thereof, conferred the production of or the increase in glucose-1-phosphate compared with the wild type control.

[91512] The nucleic acid sequence of Sll1920 from Synechocystis sp., e.g. as shown in the respective line in column 5 of Table I, application no. 17, has been published in C. And the activity of the gene product thereof is the activity of cation-transporting ATPase.

[91513] Accordingly, in one embodiment, the process of the present invention for producing myo-inositol in a non-human organism, like a microorganism or a plant or a part thereof, comprises increasing or generating the activity of a gene product with the activity of a gene product conferring the activity of “cation-transporting ATPase”, especially from Synechocystis sp. or its functional equivalent or its homolog, e.g. the increase of
[91514] (a) a gene product of a gene comprising the nucleic acid molecule as shown in the respective line in column 5 of Table I (whereby the respective line disclose in column 7 the fine chemical myo-inositol), application no. 17, preferably the coding region thereof, or a homolog or a fragment thereof, and being depicted in the same respective line as said Sll1920, or a functional equivalent or a homolog thereof as shown in column 8 of Table I, application no. 17, preferably the coding region thereof, particularly a homolog or functional equivalent as shown in column 8 of Table I B, application no. 17, and being depicted in the same respective line as said Sll1920, and preferably the activity is increased mitochondrial, or
[91515] (b) a polypeptide comprising a polypeptide, a consensus sequence or at least a polypeptide motif as shown in the respective line in column 5 of Table II or in column 8 of Table IV, application no. 17, respectively, and being depicted in the same respective line as said Sll1920, or a functional equivalent or a homolog thereof as depicted in column 8 of Table II, application no. 17, preferably a homolog or functional equivalent as depicted in column 8 of Table II B, application no. 17, and being depicted in the same respective line as said Sll1920, and preferably the activity is increased mitochondrial, whereby the respective line disclose in column 7 the fine chemical myo-inositol.

[91516] Accordingly, in one embodiment, the molecule which activity is to be increased in the process of the invention is the gene product with an activity as a “cation-transporting ATPase”, preferably it is the molecule of section (a) or (b) of this paragraph.

[91517] In particular, it was observed that in plants, especially in Arabidopsis thaliana, increasing or generating the activity of a gene product mitochondrial with the activity of a “cation-transporting ATPase”, preferably being encoded by a gene comprising the nucleic acid sequence SEQ ID NO. 55385, preferably the coding region thereof, conferred the production of or the increase in myo-inositol compared with the wild type control.

[91518] The nucleic acid sequence of Sll1920 from Synechocystis sp., e.g. as shown in the respective line in column 5 of Table I, application no. 17, has been published in C. And the activity of the gene product thereof is the activity of cation-transporting ATPase.

[91519] Accordingly, in one embodiment, the process of the present invention for producing raffinose in a non-human organism, like a microorganism or a plant or a part thereof, comprises increasing or generating the activity of a gene product with the activity of a gene product conferring the activity of “cation-transporting ATPase”, especially from Synechocystis sp. or its functional equivalent or its homolog, e.g. the increase of
[91520] (a) a gene product of a gene comprising the nucleic acid molecule as shown in the respective line in column 5 of Table I (whereby the respective line disclose in column 7 the fine chemical raffinose), application no. 17, preferably the coding region thereof, or a homolog or a fragment thereof, and being depicted in the same respective line as said Sll1920, or a functional equivalent or a homolog thereof as shown in column 8 of Table I, application no. 17, preferably the coding region thereof, particularly a homolog or functional equivalent as shown in column 8 of Table I B, application no. 17, and being depicted in the same respective line as said Sll1920, and preferably the activity is increased non-targeted, or
[91521] (b) a polypeptide comprising a polypeptide, a consensus sequence or at least a polypeptide motif as shown in the respective line in column 5 of Table II or in column 8 of Table IV, application no. 17, respectively, and being depicted in the same respective line as said Sll1920, or a functional equivalent or a homolog thereof as depicted in column 8 of Table II, application no. 17, preferably a homolog or functional equivalent as depicted in column 8 of Table II B, application no. 17, and being depicted in the same respective line as said Sll1920, and preferably the activity is increased non-targeted, whereby the respective line disclose in column 7 the fine chemical raffinose.

[91522] Accordingly, in one embodiment, the molecule which activity is to be increased in the process of the invention is the gene product with an activity as a “cation-transporting ATPase”, preferably it is the molecule of section (a) or (b) of this paragraph.

[91523] In particular, it was observed that in plants, especially in Arabidopsis thaliana, increasing or generating the activity of a gene product non-targeted with the activity of a “cation-transporting ATPase”, preferably being encoded by a gene comprising the nucleic acid sequence SEQ ID NO. 55385, preferably the coding region thereof, conferred the production of or the increase in raffinose compared with the wild type control.

[91524] The nucleic acid sequence of Slr0237 from Synechocystis sp., e.g. as shown in the respective line in column 5 of Table I, application no. 17, has been published in C. And the activity of the gene product thereof is the activity of glycosidase.

[91525] Accordingly, in one embodiment, the process of the present invention for producing glucose-1-phosphate in a non-human organism, like a microorganism or a plant or a part thereof, comprises increasing or generating the activity of a gene product with the activity of a gene product conferring the activity of “glycosidase”, especially from Synechocystis sp. or its functional equivalent or its homolog, e.g. the increase of
[91526] (a) a gene product of a gene comprising the nucleic acid molecule as shown in the respective line in column 5 of Table I (whereby the respective line disclose in column 7 the fine chemical glucose-1-phosphate), application no. 17, preferably the coding region thereof, or a homolog or a fragment thereof, and being depicted in the same respective line as said Slr0237, or a functional equivalent or a homolog thereof as shown in column 8 of Table I, application no. 17, preferably the coding region thereof, particularly a homolog or functional equivalent as shown in column 8 of Table I B, application no. 17, and being depicted in the same respective line as said Slr0237, and preferably the activity is increased non-targeted, or
[91527] (b) a polypeptide comprising a polypeptide, a consensus sequence or at least a polypeptide motif as shown in the respective line in column 5 of Table II or in column 8 of Table IV, application no. 17, respectively, and being depicted in the same respective line as said Slr0237, or a functional equivalent or a homolog thereof as depicted in column 8 of Table II, application no. 17, preferably a homolog or functional equivalent as depicted in column 8 of Table II B, application no. 17, and being depicted in the same respective line as said Slr0237, and preferably the activity is increased non-targeted, whereby the respective line disclose in column 7 the fine chemical glucose-1-phosphate.

[91528] Accordingly, in one embodiment, the molecule which activity is to be increased in the process of the invention is the gene product with an activity as a “glycosidase”, preferably it is the molecule of section (a) or (b) of this paragraph.

[91529] In particular, it was observed that in plants, especially in Arabidopsis thaliana, increasing or generating the activity of a gene product non-targeted with the activity of a “glycosidase”, preferably being encoded by a gene comprising the nucleic acid sequence SEQ ID NO. 55771, preferably the coding region thereof, conferred the production of or the increase in glucose-1-phosphate compared with the wild type control.

[91530] The nucleic acid sequence of Slr0239 from Synechocystis sp., e.g. as shown in the respective line in column 5 of Table I, application no. 17, has been published in C. And the activity of the gene product thereof is the activity of precorrin methylase.

[91531] Accordingly, in one embodiment, the process of the present invention for producing fructose in a non-human organism, like a microorganism or a plant or a part thereof, comprises increasing or generating the activity of a gene product with the activity of a gene product conferring the activity of “precorrin methylase”, especially from Synechocystis sp. or its functional equivalent or its homolog, e.g. the increase of
[91532] (a) a gene product of a gene comprising the nucleic acid molecule as shown in the respective line in column 5 of Table I (whereby the respective line disclose in column 7 the fine chemical fructose), application no. 17, preferably the coding region thereof, or a homolog or a fragment thereof, and being depicted in the same respective line as said Slr0239, or a functional equivalent or a homolog thereof as shown in column 8 of Table I, application no. 17, preferably the coding region thereof, particularly a homolog or functional equivalent as shown in column 8 of Table I B, application no. 17, and being depicted in the same respective line as said Slr0239, and preferably the activity is increased mitochondrial, or
[91533] (b) a polypeptide comprising a polypeptide, a consensus sequence or at least a polypeptide motif as shown in the respective line in column 5 of Table II or in column 8 of Table IV, application no. 17, respectively, and being depicted in the same respective line as said Slr0239, or a functional equivalent or a homolog thereof as depicted in column 8 of Table II, application no. 17, preferably a homolog or functional equivalent as depicted in column 8 of Table II B, application no. 17, and being depicted in the same respective line as said Slr0239, and preferably the activity is increased mitochondrial, whereby the respective line disclose in column 7 the fine chemical fructose.

[91534] Accordingly, in one embodiment, the molecule which activity is to be increased in the process of the invention is the gene product with an activity as a “precorrin methylase”, preferably it is the molecule of section (a) or (b) of this paragraph.

[91535] In particular, it was observed that in plants, especially in Arabidopsis thaliana, increasing or generating the activity of a gene product mitochondrial with the activity of a “precorrin methylase”, preferably being encoded by a gene comprising the nucleic acid sequence SEQ ID NO. 86540, preferably the coding region thereof, conferred the production of or the increase in fructose compared with the wild type control.

[91536] The nucleic acid sequence of Slr0239 from Synechocystis sp., e.g. as shown in the respective line in column 5 of Table I, application no. 17, has been published in C. And the activity of the gene product thereof is the activity of precorrin methylase.

[91537] Accordingly, in one embodiment, the process of the present invention for producing glucose in a non-human organism, like a microorganism or a plant or a part thereof, comprises increasing or generating the activity of a gene product with the activity of a gene product conferring the activity of “precorrin methylase”, especially from Synechocystis sp. or its functional equivalent or its homolog, e.g. the increase of
[91538] (a) a gene product of a gene comprising the nucleic acid molecule as shown in the respective line in column 5 of Table I (whereby the respective line disclose in column 7 the fine chemical glucose), application no. 17, preferably the coding region thereof, or a homolog or a fragment thereof, and being depicted in the same respective line as said Slr0239, or a functional equivalent or a homolog thereof as shown in column 8 of Table I, application no. 17, preferably the coding region thereof, particularly a homolog or functional equivalent as shown in column 8 of Table I B, application no. 17, and being depicted in the same respective line as said Slr0239, and preferably the activity is increased mitochondrial, or
[91539] (b) a polypeptide comprising a polypeptide, a consensus sequence or at least a polypeptide motif as shown in the respective line in column 5 of Table II or in column 8 of Table IV, application no. 17, respectively, and being depicted in the same respective line as said Slr0239, or a functional equivalent or a homolog thereof as depicted in column 8 of Table II, application no. 17, preferably a homolog or functional equivalent as depicted in column 8 of Table II B, application no. 17, and being depicted in the same respective line as said Slr0239, and preferably the activity is increased mitochondrial, whereby the respective line disclose in column 7 the fine chemical glucose.

[91540] Accordingly, in one embodiment, the molecule which activity is to be increased in the process of the invention is the gene product with an activity as a “precorrin methylase”, preferably it is the molecule of section (a) or (b) of this paragraph.

[91541] In particular, it was observed that in plants, especially in Arabidopsis thaliana, increasing or generating the activity of a gene product mitochondrial with the activity of a “precorrin methylase”, preferably being encoded by a gene comprising the nucleic acid sequence SEQ ID NO. 86540, preferably the coding region thereof, conferred the production of or the increase in glucose compared with the wild type control.

[91542] The nucleic acid sequence of Slr0338 from Synechocystis sp., e.g. as shown in the respective line in column 5 of Table I, application no. 17, has been published in C. And the activity of the gene product thereof is the activity of oxidoreductase.

[91543] Accordingly, in one embodiment, the process of the present invention for producing glucose-1-phosphate in a non-human organism, like a microorganism or a plant or a part thereof, comprises increasing or generating the activity of a gene product with the activity of a gene product conferring the activity of “oxidoreductase”, especially from Synechocystis sp. or its functional equivalent or its homolog, e.g. the increase of
[91544] (a) a gene product of a gene comprising the nucleic acid molecule as shown in the respective line in column 5 of Table I (whereby the respective line disclose in column 7 the fine chemical glucose-1-phosphate), application no. 17, preferably the coding region thereof, or a homolog or a fragment thereof, and being depicted in the same respective line as said Slr0338, or a functional equivalent or a homolog thereof as shown in column 8 of Table I, application no. 17, preferably the coding region thereof, particularly a homolog or functional equivalent as shown in column 8 of Table I B, application no. 17, and being depicted in the same respective line as said Slr0338, and preferably the activity is increased non-targeted, or
[91545] (b) a polypeptide comprising a polypeptide, a consensus sequence or at least a polypeptide motif as shown in the respective line in column 5 of Table II or in column 8 of Table IV, application no. 17, respectively, and being depicted in the same respective line as said Slr0338, or a functional equivalent or a homolog thereof as depicted in column 8 of Table II, application no. 17, preferably a homolog or functional equivalent as depicted in column 8 of Table II B, application no. 17, and being depicted in the same respective line as said Slr0338, and preferably the activity is increased non-targeted, whereby the respective line disclose in column 7 the fine chemical glucose-1-phosphate.

[91546] Accordingly, in one embodiment, the molecule which activity is to be increased in the process of the invention is the gene product with an activity as a “oxidoreductase”, preferably it is the molecule of section (a) or (b) of this paragraph.

[91547] In particular, it was observed that in plants, especially in Arabidopsis thaliana, increasing or generating the activity of a gene product non-targeted with the activity of a “oxidoreductase”, preferably being encoded by a gene comprising the nucleic acid sequence SEQ ID NO. 11990, preferably the coding region thereof, conferred the production of or the increase in glucose-1-phosphate compared with the wild type control.

[91548] The nucleic acid sequence of Slr0338 from Synechocystis sp., e.g. as shown in the respective line in column 5 of Table I, application no. 17, has been published in C. And the activity of the gene product thereof is the activity of oxidoreductase.

[91549] Accordingly, in one embodiment, the process of the present invention for producing 3,4,5-trihydroxypentanoic acid in a non-human organism, like a microorganism or a plant or a part thereof, comprises increasing or generating the activity of a gene product with the activity of a gene product conferring the activity of “oxidoreductase”, especially from Synechocystis sp. or its functional equivalent or its homolog, e.g. the increase of
[91550] (a) a gene product of a gene comprising the nucleic acid molecule as shown in the respective line in column 5 of Table I (whereby the respective line disclose in column 7 the fine chemical 3,4,5-trihydroxypentanoic acid), application no. 17, preferably the coding region thereof, or a homolog or a fragment thereof, and being depicted in the same respective line as said Slr0338, or a functional equivalent or a homolog thereof as shown in column 8 of Table I, application no. 17, preferably the coding region thereof, particularly a homolog or functional equivalent as shown in column 8 of Table I B, application no. 17, and being depicted in the same respective line as said Slr0338, and preferably the activity is increased non-targeted, or
[91551] (b) a polypeptide comprising a polypeptide, a consensus sequence or at least a polypeptide motif as shown in the respective line in column 5 of Table II or in column 8 of Table IV, application no. 17, respectively, and being depicted in the same respective line as said Slr0338, or a functional equivalent or a homolog thereof as depicted in column 8 of Table II, application no. 17, preferably a homolog or functional equivalent as depicted in column 8 of Table II B, application no. 17, and being depicted in the same respective line as said Slr0338, and preferably the activity is increased non-targeted, whereby the respective line disclose in column 7 the fine chemical 3,4,5-trihydroxypentanoic acid.

[91552] Accordingly, in one embodiment, the molecule which activity is to be increased in the process of the invention is the gene product with an activity as a “oxidoreductase”, preferably it is the molecule of section (a) or (b) of this paragraph.

[91553] In particular, it was observed that in plants, especially in Arabidopsis thaliana, increasing or generating the activity of a gene product non-targeted with the activity of a “oxidoreductase”, preferably being encoded by a gene comprising the nucleic acid sequence SEQ ID NO. 11990, preferably the coding region thereof, conferred the production of or the increase in 3,4,5-trihydroxypentanoic acid compared with the wild type control.

[91554] The nucleic acid sequence of Slr0600 from Synechocystis sp., e.g. as shown in the respective line in column 5 of Table I, application no. 17, has been published in C. And the activity of the gene product thereof is the activity of slr0600-protein.

[91555] Accordingly, in one embodiment, the process of the present invention for producing glucose-1-phosphate in a non-human organism, like a microorganism or a plant or a part thereof, comprises increasing or generating the activity of a gene product with the activity of a gene product conferring the activity of “slr0600-protein”, especially from Synechocystis sp. or its functional equivalent or its homolog, e.g. the increase of
[91556] (a) a gene product of a gene comprising the nucleic acid molecule as shown in the respective line in column 5 of Table I (whereby the respective line disclose in column 7 the fine chemical glucose-1-phosphate), application no. 17, preferably the coding region thereof, or a homolog or a fragment thereof, and being depicted in the same respective line as said Slr0600, or a functional equivalent or a homolog thereof as shown in column 8 of Table I, application no. 17, preferably the coding region thereof, particularly a homolog or functional equivalent as shown in column 8 of Table I B, application no. 17, and being depicted in the same respective line as said Slr0600, and preferably the activity is increased non-targeted, or
[91557] (b) a polypeptide comprising a polypeptide, a consensus sequence or at least a polypeptide motif as shown in the respective line in column 5 of Table II or in column 8 of Table IV, application no. 17, respectively, and being depicted in the same respective line as said Slr0600, or a functional equivalent or a homolog thereof as depicted in column 8 of Table II, application no. 17, preferably a homolog or functional equivalent as depicted in column 8 of Table II B, application no. 17, and being depicted in the same respective line as said Slr0600, and preferably the activity is increased non-targeted, whereby the respective line disclose in column 7 the fine chemical glucose-1-phosphate.

[91558] Accordingly, in one embodiment, the molecule which activity is to be increased in the process of the invention is the gene product with an activity as a “slr0600-protein”, preferably it is the molecule of section (a) or (b) of this paragraph.

[91559] In particular, it was observed that in plants, especially in Arabidopsis thaliana, increasing or generating the activity of a gene product non-targeted with the activity of a “slr0600-protein”, preferably being encoded by a gene comprising the nucleic acid sequence SEQ ID NO. 56514, preferably the coding region thereof, conferred the production of or the increase in glucose-1-phosphate compared with the wild type control.

[91560] The nucleic acid sequence of Slr0710 from Synechocystis sp., e.g. as shown in the respective line in column 5 of Table I, application no. 17, has been published in C. And the activity of the gene product thereof is the activity of Glu/Leu/Phe/Val dehydrogenase .

[91561] Accordingly, in one embodiment, the process of the present invention for producing glucose-1-phosphate in a non-human organism, like a microorganism or a plant or a part thereof, comprises increasing or generating the activity of a gene product with the activity of a gene product conferring the activity of “Glu/Leu/Phe/Val dehydrogenase”, especially from Synechocystis sp. or its functional equivalent or its homolog, e.g. the increase of
[91562] (a) a gene product of a gene comprising the nucleic acid molecule as shown in the respective line in column 5 of Table I (whereby the respective line disclose in column 7 the fine chemical glucose-1-phosphate), application no. 17, preferably the coding region thereof, or a homolog or a fragment thereof, and being depicted in the same respective line as said Slr0710, or a functional equivalent or a homolog thereof as shown in column 8 of Table I, application no. 17, preferably the coding region thereof, particularly a homolog or functional equivalent as shown in column 8 of Table I B, application no. 17, and being depicted in the same respective line as said Slr0710, and preferably the activity is increased mitochondrial, or
[91563] (b) a polypeptide comprising a polypeptide, a consensus sequence or at least a polypeptide motif as shown in the respective line in column 5 of Table II or in column 8 of Table IV, application no. 17, respectively, and being depicted in the same respective line as said Slr0710, or a functional equivalent or a homolog thereof as depicted in column 8 of Table II, application no. 17, preferably a homolog or functional equivalent as depicted in column 8 of Table II B, application no. 17, and being depicted in the same respective line as said Slr0710, and preferably the activity is increased mitochondrial, whereby the respective line disclose in column 7 the fine chemical glucose-1-phosphate.

[91564] Accordingly, in one embodiment, the molecule which activity is to be increased in the process of the invention is the gene product with an activity as a “Glu/Leu/Phe/Val dehydrogenase”, preferably it is the molecule of section (a) or (b) of this paragraph.

[91565] In particular, it was observed that in plants, especially in Arabidopsis thaliana, increasing or generating the activity of a gene product mitochondrial with the activity of a “Glu/Leu/PheNal dehydrogenase”, preferably being encoded by a gene comprising the nucleic acid sequence SEQ ID NO. 56894, preferably the coding region thereof, conferred the production of or the increase in glucose-1-phosphate compared with the wild type control.

[91566] The nucleic acid sequence of Slr0721 from Synechocystis sp., e.g. as shown in the respective line in column 5 of Table I, application no. 17, has been published in C. And the activity of the gene product thereof is the activity of malate dehydrogenase.

[91567] Accordingly, in one embodiment, the process of the present invention for producing glucose-1-phosphate in a non-human organism, like a microorganism or a plant or a part thereof, comprises increasing or generating the activity of a gene product with the activity of a gene product conferring the activity of “malate dehydrogenase”, especially from Synechocystis sp. or its functional equivalent or its homolog, e.g. the increase of
[91568] (a) a gene product of a gene comprising the nucleic acid molecule as shown in the respective line in column 5 of Table I (whereby the respective line disclose in column 7 the fine chemical glucose-1-phosphate), application no. 17, preferably the coding region thereof, or a homolog or a fragment thereof, and being depicted in the same respective line as said Slr0721, or a functional equivalent or a homolog thereof as shown in column 8 of Table I, application no. 17, preferably the coding region thereof, particularly a homolog or functional equivalent as shown in column 8 of Table I B, application no. 17, and being depicted in the same respective line as said Slr0721, and preferably the activity is increased plastidic, or
[91569] (b) a polypeptide comprising a polypeptide, a consensus sequence or at least a polypeptide motif as shown in the respective line in column 5 of Table II or in column 8 of Table IV, application no. 17, respectively, and being depicted in the same respective line as said Slr0721, or a functional equivalent or a homolog thereof as depicted in column 8 of Table II, application no. 17, preferably a homolog or functional equivalent as depicted in column 8 of Table II B, application no. 17, and being depicted in the same respective line as said Slr0721, and preferably the activity is increased plastidic, whereby the respective line disclose in column 7 the fine chemical glucose-1-phosphate.

[91570] Accordingly, in one embodiment, the molecule which activity is to be increased in the process of the invention is the gene product with an activity as a “malate dehydrogenase”, preferably it is the molecule of section (a) or (b) of this paragraph.

[91571] In particular, it was observed that in plants, especially in Arabidopsis thaliana, increasing or generating the activity of a gene product plastidic with the activity of a “malate dehydrogenase”, preferably being encoded by a gene comprising the nucleic acid sequence SEQ ID NO. 87397, preferably the coding region thereof, conferred the production of or the increase in glucose-1-phosphate compared with the wild type control.

[91572] The nucleic acid sequence of Slr0739 from Synechocystis sp., e.g. as shown in the respective line in column 5 of Table I, application no. 17, has been published in C. And the activity of the gene product thereof is the activity of geranylgeranyl pyrophosphate synthase.

[91573] Accordingly, in one embodiment, the process of the present invention for producing sucrose in a non-human organism, like a microorganism or a plant or a part thereof, comprises increasing or generating the activity of a gene product with the activity of a gene product conferring the activity of “geranylgeranyl pyrophosphate synthase”, especially from Synechocystis sp. or its functional equivalent or its homolog, e.g. the increase of
[91574] (a) a gene product of a gene comprising the nucleic acid molecule as shown in the respective line in column 5 of Table I (whereby the respective line disclose in column 7 the fine chemical sucrose), application no. 17, preferably the coding region thereof, or a homolog or a fragment thereof, and being depicted in the same respective line as said Slr0739, or a functional equivalent or a homolog thereof as shown in column 8 of Table I, application no. 17, preferably the coding region thereof, particularly a homolog or functional equivalent as shown in column 8 of Table I B, application no. 17, and being depicted in the same respective line as said Slr0739, and preferably the activity is increased plastidic, or
[91575] (b) a polypeptide comprising a polypeptide, a consensus sequence or at least a polypeptide motif as shown in the respective line in column 5 of Table II or in column 8 of Table IV, application no. 17, respectively, and being depicted in the same respective line as said Slr0739, or a functional equivalent or a homolog thereof as depicted in column 8 of Table II, application no. 17, preferably a homolog or functional equivalent as depicted in column 8 of Table II B, application no. 17, and being depicted in the same respective line as said Slr0739, and preferably the activity is increased plastidic, whereby the respective line disclose in column 7 the fine chemical sucrose.

[91576] Accordingly, in one embodiment, the molecule which activity is to be increased in the process of the invention is the gene product with an activity as a “geranylgeranyl pyrophosphate synthase”, preferably it is the molecule of section (a) or (b) of this paragraph.

[91577] In particular, it was observed that in plants, especially in Arabidopsis thaliana, increasing or generating the activity of a gene product plastidic with the activity of a “geranylgeranyl pyrophosphate synthase”, preferably being encoded by a gene comprising the nucleic acid sequence SEQ ID NO. 57235, preferably the coding region thereof, conferred the production of or the increase in sucrose compared with the wild type control.

[91578] The nucleic acid sequence of Slr0757 from Synechocystis sp., e.g. as shown in the respective line in column 5 of Table I, application no. 17, has been published in C. And the activity of the gene product thereof is the activity of circadian clock protein.

[91579] Accordingly, in one embodiment, the process of the present invention for producing fructose in a non-human organism, like a microorganism or a plant or a part thereof, comprises increasing or generating the activity of a gene product with the activity of a gene product conferring the activity of “circadian clock protein”, especially from Synechocystis sp. or its functional equivalent or its homolog, e.g. the increase of
[91580] (a) a gene product of a gene comprising the nucleic acid molecule as shown in the respective line in column 5 of Table I (whereby the respective line disclose in column 7 the fine chemical fructose), application no. 17, preferably the coding region thereof, or a homolog or a fragment thereof, and being depicted in the same respective line as said Slr0757, or a functional equivalent or a homolog thereof as shown in column 8 of Table I, application no. 17, preferably the coding region thereof, particularly a homolog or functional equivalent as shown in column 8 of Table I B, application no. 17, and being depicted in the same respective line as said Slr0757, and preferably the activity is increased mitochondrial, or
[91581] (b) a polypeptide comprising a polypeptide, a consensus sequence or at least a polypeptide motif as shown in the respective line in column 5 of Table II or in column 8 of Table IV, application no. 17, respectively, and being depicted in the same respective line as said Slr0757, or a functional equivalent or a homolog thereof as depicted in column 8 of Table II, application no. 17, preferably a homolog or functional equivalent as depicted in column 8 of Table II B, application no. 17, and being depicted in the same respective line as said Slr0757, and preferably the activity is increased mitochondrial, whereby the respective line disclose in column 7 the fine chemical fructose.

[91582] Accordingly, in one embodiment, the molecule which activity is to be increased in the process of the invention is the gene product with an activity as a “circadian clock protein”, preferably it is the molecule of section (a) or (b) of this paragraph.

[91583] In particular, it was observed that in plants, especially in Arabidopsis thaliana, increasing or generating the activity of a gene product mitochondrial with the activity of a “circadian clock protein”, preferably being encoded by a gene comprising the nucleic acid sequence SEQ ID NO. 147346, preferably the coding region thereof, conferred the production of or the increase in fructose compared with the wild type control.

[91584] The nucleic acid sequence of Slr0757 from Synechocystis sp., e.g. as shown in the respective line in column 5 of Table I, application no. 17, has been published in C. And the activity of the gene product thereof is the activity of circadian clock protein.

[91585] Accordingly, in one embodiment, the process of the present invention for producing glucose in a non-human organism, like a microorganism or a plant or a part thereof, comprises increasing or generating the activity of a gene product with the activity of a gene product conferring the activity of “circadian clock protein”, especially from Synechocystis sp. or its functional equivalent or its homolog, e.g. the increase of
[91586] (a) a gene product of a gene comprising the nucleic acid molecule as shown in the respective line in column 5 of Table I (whereby the respective line disclose in column 7 the fine chemical glucose), application no. 17, preferably the coding region thereof, or a homolog or a fragment thereof, and being depicted in the same respective line as said Slr0757, or a functional equivalent or a homolog thereof as shown in column 8 of Table I, application no. 17, preferably the coding region thereof, particularly a homolog or functional equivalent as shown in column 8 of Table I B, application no. 17, and being depicted in the same respective line as said Slr0757, and preferably the activity is increased mitochondrial, or
[91587] (b) a polypeptide comprising a polypeptide, a consensus sequence or at least a polypeptide motif as shown in the respective line in column 5 of Table II or in column 8 of Table IV, application no. 17, respectively, and being depicted in the same respective line as said Slr0757, or a functional equivalent or a homolog thereof as depicted in column 8 of Table II, application no. 17, preferably a homolog or functional equivalent as depicted in column 8 of Table II B, application no. 17, and being depicted in the same respective line as said Slr0757, and preferably the activity is increased mitochondrial, whereby the respective line disclose in column 7 the fine chemical glucose.

[91588] Accordingly, in one embodiment, the molecule which activity is to be increased in the process of the invention is the gene product with an activity as a “circadian clock protein”, preferably it is the molecule of section (a) or (b) of this paragraph.

[91589] In particular, it was observed that in plants, especially in Arabidopsis thaliana, increasing or generating the activity of a gene product mitochondrial with the activity of a “circadian clock protein”, preferably being encoded by a gene comprising the nucleic acid sequence SEQ ID NO. 147346, preferably the coding region thereof, conferred the production of or the increase in glucose compared with the wild type control.

[91590] The nucleic acid sequence of Slr0757 from Synechocystis sp., e.g. as shown in the respective line in column 5 of Table I, application no. 17, has been published in C. And the activity of the gene product thereof is the activity of circadian clock protein.

[91591] Accordingly, in one embodiment, the process of the present invention for producing glucose-1-phosphate in a non-human organism, like a microorganism or a plant or a part thereof, comprises increasing or generating the activity of a gene product with the activity of a gene product conferring the activity of “circadian clock protein”, especially from Synechocystis sp. or its functional equivalent or its homolog, e.g. the increase of
[91592] (a) a gene product of a gene comprising the nucleic acid molecule as shown in the respective line in column 5 of Table I (whereby the respective line disclose in column 7 the fine chemical glucose-1-phosphate), application no. 17, preferably the coding region thereof, or a homolog or a fragment thereof, and being depicted in the same respective line as said Slr0757, or a functional equivalent or a homolog thereof as shown in column 8 of Table I, application no. 17, preferably the coding region thereof, particularly a homolog or functional equivalent as shown in column 8 of Table I B, application no. 17, and being depicted in the same respective line as said Slr0757, and preferably the activity is increased mitochondrial, or
[91593] (b) a polypeptide comprising a polypeptide, a consensus sequence or at least a polypeptide motif as shown in the respective line in column 5 of Table II or in column 8 of Table IV, application no. 17, respectively, and being depicted in the same respective line as said Slr0757, or a functional equivalent or a homolog thereof as depicted in column 8 of Table II, application no. 17, preferably a homolog or functional equivalent as depicted in column 8 of Table II B, application no. 17, and being depicted in the same respective line as said Slr0757, and preferably the activity is increased mitochondrial, whereby the respective line disclose in column 7 the fine chemical glucose-1-phosphate.

[91594] Accordingly, in one embodiment, the molecule which activity is to be increased in the process of the invention is the gene product with an activity as a “circadian clock protein”, preferably it is the molecule of section (a) or (b) of this paragraph.

[91595] In particular, it was observed that in plants, especially in Arabidopsis thaliana, increasing or generating the activity of a gene product mitochondrial with the activity of a “circadian clock protein”, preferably being encoded by a gene comprising the nucleic acid sequence SEQ ID NO. 147346, preferably the coding region thereof, conferred the production of or the increase in glucose-1-phosphate compared with the wild type control.

[91596] The nucleic acid sequence of Slr0782 from Synechocystis sp., e.g. as shown in the respective line in column 5 of Table I, application no. 17, has been published in C. And the activity of the gene product thereof is the activity of amine oxidase.

[91597] Accordingly, in one embodiment, the process of the present invention for producing glucose-1-phosphate in a non-human organism, like a microorganism or a plant or a part thereof, comprises increasing or generating the activity of a gene product with the activity of a gene product conferring the activity of “amine oxidase”, especially from Synechocystis sp. or its functional equivalent or its homolog, e.g. the increase of
[91598] (a) a gene product of a gene comprising the nucleic acid molecule as shown in the respective line in column 5 of Table I (whereby the respective line disclose in column 7 the fine chemical glucose-1-phosphate), application no. 17, preferably the coding region thereof, or a homolog or a fragment thereof, and being depicted in the same respective line as said Slr0782, or a functional equivalent or a homolog thereof as shown in column 8 of Table I, application no. 17, preferably the coding region thereof, particularly a homolog or functional equivalent as shown in column 8 of Table I B, application no. 17, and being depicted in the same respective line as said Slr0782, and preferably the activity is increased mitochondrial, or
[91599] (b) a polypeptide comprising a polypeptide, a consensus sequence or at least a polypeptide motif as shown in the respective line in column 5 of Table II or in column 8 of Table IV, application no. 17, respectively, and being depicted in the same respective line as said Slr0782, or a functional equivalent or a homolog thereof as depicted in column 8 of Table II, application no. 17, preferably a homolog or functional equivalent as depicted in column 8 of Table II B, application no. 17, and being depicted in the same respective line as said Slr0782, and preferably the activity is increased mitochondrial, whereby the respective line disclose in column 7 the fine chemical glucose-1-phosphate.

[91600] Accordingly, in one embodiment, the molecule which activity is to be increased in the process of the invention is the gene product with an activity as a “amine oxidase”, preferably it is the molecule of section (a) or (b) of this paragraph.

[91601] In particular, it was observed that in plants, especially in Arabidopsis thaliana, increasing or generating the activity of a gene product mitochondrial with the activity of a “amine oxidase”, preferably being encoded by a gene comprising the nucleic acid sequence SEQ ID NO. 57679, preferably the coding region thereof, conferred the production of or the increase in glucose-1-phosphate compared with the wild type control.

[91602] The nucleic acid sequence of Slr0862 from Synechocystis sp., e.g. as shown in the respective line in column 5 of Table I, application no. 17, has been published in C. And the activity of the gene product thereof is the activity of kinase.

[91603] Accordingly, in one embodiment, the process of the present invention for producing fructose in a non-human organism, like a microorganism or a plant or a part thereof, comprises increasing or generating the activity of a gene product with the activity of a gene product conferring the activity of “kinase”, especially from Synechocystis sp. or its functional equivalent or its homolog, e.g. the increase of
[91604] (a) a gene product of a gene comprising the nucleic acid molecule as shown in the respective line in column 5 of Table I (whereby the respective line disclose in column 7 the fine chemical fructose), application no. 17, preferably the coding region thereof, or a homolog or a fragment thereof, and being depicted in the same respective line as said Slr0862, or a functional equivalent or a homolog thereof as shown in column 8 of Table I, application no. 17, preferably the coding region thereof, particularly a homolog or functional equivalent as shown in column 8 of Table I B, application no. 17, and being depicted in the same respective line as said Slr0862, and preferably the activity is increased mitochondrial, or
[91605] (b) a polypeptide comprising a polypeptide, a consensus sequence or at least a polypeptide motif as shown in the respective line in column 5 of Table II or in column 8 of Table IV, application no. 17, respectively, and being depicted in the same respective line as said Slr0862, or a functional equivalent or a homolog thereof as depicted in column 8 of Table II, application no. 17, preferably a homolog or functional equivalent as depicted in column 8 of Table II B, application no. 17, and being depicted in the same respective line as said Slr0862, and preferably the activity is increased mitochondrial, whereby the respective line disclose in column 7 the fine chemical fructose.

[91606] Accordingly, in one embodiment, the molecule which activity is to be increased in the process of the invention is the gene product with an activity as a “kinase”, preferably it is the molecule of section (a) or (b) of this paragraph.

[91607] In particular, it was observed that in plants, especially in Arabidopsis thaliana, increasing or generating the activity of a gene product mitochondrial with the activity of a “kinase”, preferably being encoded by a gene comprising the nucleic acid sequence SEQ ID NO. 87610, preferably the coding region thereof, conferred the production of or the increase in fructose compared with the wild type control.

[91608] The nucleic acid sequence of Slr0862 from Synechocystis sp., e.g. as shown in the respective line in column 5 of Table I, application no. 17, has been published in C. And the activity of the gene product thereof is the activity of kinase.

[91609] Accordingly, in one embodiment, the process of the present invention for producing glucose in a non-human organism, like a microorganism or a plant or a part thereof, comprises increasing or generating the activity of a gene product with the activity of a gene product conferring the activity of “kinase”, especially from Synechocystis sp. or its functional equivalent or its homolog, e.g.

[91610] the increase of
[91611] (a) a gene product of a gene comprising the nucleic acid molecule as shown in the respective line in column 5 of Table I (whereby the respective line disclose in column 7 the fine chemical glucose), application no. 17, preferably the coding region thereof, or a homolog or a fragment thereof, and being depicted in the same respective line as said Slr0862, or a functional equivalent or a homolog thereof as shown in column 8 of Table I, application no. 17, preferably the coding region thereof, particularly a homolog or functional equivalent as shown in column 8 of Table I B, application no. 17, and being depicted in the same respective line as said Slr0862, and preferably the activity is increased mitochondrial, or
[91612] (b) a polypeptide comprising a polypeptide, a consensus sequence or at least a polypeptide motif as shown in the respective line in column 5 of Table II or in column 8 of Table IV, application no. 17, respectively, and being depicted in the same respective line as said Slr0862, or a functional equivalent or a homolog thereof as depicted in column 8 of Table II, application no. 17, preferably a homolog or functional equivalent as depicted in column 8 of Table II B, application no. 17, and being depicted in the same respective line as said Slr0862, and preferably the activity is increased mitochondrial, whereby the respective line disclose in column 7 the fine chemical glucose.

[91613] Accordingly, in one embodiment, the molecule which activity is to be increased in the process of the invention is the gene product with an activity as a “kinase”, preferably it is the molecule of section (a) or (b) of this paragraph.

[91614] In particular, it was observed that in plants, especially in Arabidopsis thaliana, increasing or generating the activity of a gene product mitochondrial with the activity of a “kinase”, preferably being encoded by a gene comprising the nucleic acid sequence SEQ ID NO. 87610, preferably the coding region thereof, conferred the production of or the increase in glucose compared with the wild type control.

[91615] The nucleic acid sequence of Slr0905 from Synechocystis sp., e.g. as shown in the respective line in column 5 of Table I, application no. 17, has been published in C. And the activity of the gene product thereof is the activity of Mg-protoporphyrin IX monomethyl ester oxidative cyclase 66 kD subunit.

[91616] Accordingly, in one embodiment, the process of the present invention for producing glucose-1-phosphate in a non-human organism, like a microorganism or a plant or a part thereof, comprises increasing or generating the activity of a gene product with the activity of a gene product conferring the activity of “Mg-protoporphyrin IX monomethyl ester oxidative cyclase 66 kD subunit”, especially from Synechocystis sp. or its functional equivalent or its homolog, e.g. the increase of
[91617] (a) a gene product of a gene comprising the nucleic acid molecule as shown in the respective line in column 5 of Table I (whereby the respective line disclose in column 7 the fine chemical glucose-1-phosphate), application no. 17, preferably the coding region thereof, or a homolog or a fragment thereof, and being depicted in the same respective line as said Slr0905, or a functional equivalent or a homolog thereof as shown in column 8 of Table I, application no. 17, preferably the coding region thereof, particularly a homolog or functional equivalent as shown in column 8 of Table I B, application no. 17, and being depicted in the same respective line as said Slr0905, and preferably the activity is increased mitochondrial, or
[91618] (b) a polypeptide comprising a polypeptide, a consensus sequence or at least a polypeptide motif as shown in the respective line in column 5 of Table II or in column 8 of Table IV, application no. 17, respectively, and being depicted in the same respective line as said Slr0905, or a functional equivalent or a homolog thereof as depicted in column 8 of Table II, application no. 17, preferably a homolog or functional equivalent as depicted in column 8 of Table II B, application no. 17, and being depicted in the same respective line as said Slr0905, and preferably the activity is increased mitochondrial, whereby the respective line disclose in column 7 the fine chemical glucose-1-phosphate.

[91619] Accordingly, in one embodiment, the molecule which activity is to be increased in the process of the invention is the gene product with an activity as a “Mg-protoporphyrin IX monomethyl ester oxidative cyclase 66 kD subunit”, preferably it is the molecule of section (a) or (b) of this paragraph.

[91620] In particular, it was observed that in plants, especially in Arabidopsis thaliana, increasing or generating the activity of a gene product mitochondrial with the activity of a “Mg-protoporphyrin IX monomethyl ester oxidative cyclase 66 kD subunit”, preferably being encoded by a gene comprising the nucleic acid sequence SEQ ID NO. 147407, preferably the coding region thereof, conferred the production of or the increase in glucose-1-phosphate compared with the wild type control.

[91621] The nucleic acid sequence of Slr0949 from Synechocystis sp., e.g. as shown in the respective line in column 5 of Table I, application no. 17, has been published in C. And the activity of the gene product thereof is the activity of permease protein of ABC transporter.

[91622] Accordingly, in one embodiment, the process of the present invention for producing myo-inositol in a non-human organism, like a microorganism or a plant or a part thereof, comprises increasing or generating the activity of a gene product with the activity of a gene product conferring the activity of “permease protein of ABC transporter”, especially from Synechocystis sp. or its functional equivalent or its homolog, e.g. the increase of
[91623] (a) a gene product of a gene comprising the nucleic acid molecule as shown in the respective line in column 5 of Table I (whereby the respective line disclose in column 7 the fine chemical myo-inositol), application no. 17, preferably the coding region thereof, or a homolog or a fragment thereof, and being depicted in the same respective line as said Slr0949, or a functional equivalent or a homolog thereof as shown in column 8 of Table I, application no. 17, preferably the coding region thereof, particularly a homolog or functional equivalent as shown in column 8 of Table I B, application no. 17, and being depicted in the same respective line as said Slr0949, and preferably the activity is increased mitochondrial, or
[91624] (b) a polypeptide comprising a polypeptide, a consensus sequence or at least a polypeptide motif as shown in the respective line in column 5 of Table II or in column 8 of Table IV, application no. 17, respectively, and being depicted in the same respective line as said Slr0949, or a functional equivalent or a homolog thereof as depicted in column 8 of Table II, application no. 17, preferably a homolog or functional equivalent as depicted in column 8 of Table II B, application no. 17, and being depicted in the same respective line as said Slr0949, and preferably the activity is increased mitochondrial, whereby the respective line disclose in column 7 the fine chemical myo-inositol.

[91625] Accordingly, in one embodiment, the molecule which activity is to be increased in the process of the invention is the gene product with an activity as a “permease protein of ABC transporter”, preferably it is the molecule of section (a) or (b) of this paragraph.

[91626] In particular, it was observed that in plants, especially in Arabidopsis thaliana, increasing or generating the activity of a gene product mitochondrial with the activity of a “permease protein of ABC transporter”, preferably being encoded by a gene comprising the nucleic acid sequence SEQ ID NO. 119222, preferably the coding region thereof, conferred the production of or the increase in myo-inositol compared with the wild type control.

[91627] The nucleic acid sequence of Slr1096 from Synechocystis sp., e.g. as shown in the respective line in column 5 of Table I, application no. 17, has been published in C. And the activity of the gene product thereof is the activity of dihydrolipoamide dehydrogenase.

[91628] Accordingly, in one embodiment, the process of the present invention for producing glucose-1-phosphate in a non-human organism, like a microorganism or a plant or a part thereof, comprises increasing or generating the activity of a gene product with the activity of a gene product conferring the activity of “dihydrolipoamide dehydrogenase”, especially from Synechocystis sp. or its functional equivalent or its homolog, e.g. the increase of
[91629] (a) a gene product of a gene comprising the nucleic acid molecule as shown in the respective line in column 5 of Table I (whereby the respective line disclose in column 7 the fine chemical glucose-1-phosphate), application no. 17, preferably the coding region thereof, or a homolog or a fragment thereof, and being depicted in the same respective line as said Slr1096, or a functional equivalent or a homolog thereof as shown in column 8 of Table I, application no. 17, preferably the coding region thereof, particularly a homolog or functional equivalent as shown in column 8 of Table I B, application no. 17, and being depicted in the same respective line as said Slr1096, and preferably the activity is increased non-targeted, or
[91630] (b) a polypeptide comprising a polypeptide, a consensus sequence or at least a polypeptide motif as shown in the respective line in column 5 of Table II or in column 8 of Table IV, application no. 17, respectively, and being depicted in the same respective line as said Slr1096, or a functional equivalent or a homolog thereof as depicted in column 8 of Table II, application no. 17, preferably a homolog or functional equivalent as depicted in column 8 of Table II B, application no. 17, and being depicted in the same respective line as said Slr1096, and preferably the activity is increased non-targeted, whereby the respective line disclose in column 7 the fine chemical glucose-1-phosphate.

[91631] Accordingly, in one embodiment, the molecule which activity is to be increased in the process of the invention is the gene product with an activity as a “dihydrolipoamide dehydrogenase”, preferably it is the molecule of section (a) or (b) of this paragraph.

[91632] In particular, it was observed that in plants, especially in Arabidopsis thaliana, increasing or generating the activity of a gene product non-targeted with the activity of a “dihydrolipoamide dehydrogenase”, preferably being encoded by a gene comprising the nucleic acid sequence SEQ ID NO. 57734, preferably the coding region thereof, conferred the production of or the increase in glucose-1-phosphate compared with the wild type control.

[91633] The nucleic acid sequence of Slr1096 from Synechocystis sp., e.g. as shown in the respective line in column 5 of Table I, application no. 17, has been published in C. And the activity of the gene product thereof is the activity of dihydrolipoamide dehydrogenase.

[91634] Accordingly, in one embodiment, the process of the present invention for producing raffinose in a non-human organism, like a microorganism or a plant or a part thereof, comprises increasing or generating the activity of a gene product with the activity of a gene product conferring the activity of “dihydrolipoamide dehydrogenase”, especially from Synechocystis sp. or its functional equivalent or its homolog, e.g. the increase of
[91635] (a) a gene product of a gene comprising the nucleic acid molecule as shown in the respective line in column 5 of Table I (whereby the respective line disclose in column 7 the fine chemical raffinose), application no. 17, preferably the coding region thereof, or a homolog or a fragment thereof, and being depicted in the same respective line as said Slr1096, or a functional equivalent or a homolog thereof as shown in column 8 of Table I, application no. 17, preferably the coding region thereof, particularly a homolog or functional equivalent as shown in column 8 of Table I B, application no. 17, and being depicted in the same respective line as said Slr1096, and preferably the activity is increased non-targeted, or
[91636] (b) a polypeptide comprising a polypeptide, a consensus sequence or at least a polypeptide motif as shown in the respective line in column 5 of Table II or in column 8 of Table IV, application no. 17, respectively, and being depicted in the same respective line as said Slr1096, or a functional equivalent or a homolog thereof as depicted in column 8 of Table II, application no. 17, preferably a homolog or functional equivalent as depicted in column 8 of Table II B, application no. 17, and being depicted in the same respective line as said Slr1096, and preferably the activity is increased non-targeted, whereby the respective line disclose in column 7 the fine chemical raffinose.

[91637] Accordingly, in one embodiment, the molecule which activity is to be increased in the process of the invention is the gene product with an activity as a “dihydrolipoamide dehydrogenase”, preferably it is the molecule of section (a) or (b) of this paragraph.

[91638] In particular, it was observed that in plants, especially in Arabidopsis thaliana, increasing or generating the activity of a gene product non-targeted with the activity of a “dihydrolipoamide dehydrogenase”, preferably being encoded by a gene comprising the nucleic acid sequence SEQ ID NO. 57734, preferably the coding region thereof, conferred the production of or the increase in raffinose compared with the wild type control.

[91639] The nucleic acid sequence of Slr1107 from Synechocystis sp., e.g. as shown in the respective line in column 5 of Table I, application no. 17, has been published in C. And the activity of the gene product thereof is the activity of slr1107-protein.

[91640] Accordingly, in one embodiment, the process of the present invention for producing myo-inositol in a non-human organism, like a microorganism or a plant or a part thereof, comprises increasing or generating the activity of a gene product with the activity of a gene product conferring the activity of “slr1107-protein”, especially from Synechocystis sp. or its functional equivalent or its homolog, e.g. the increase of
[91641] (a) a gene product of a gene comprising the nucleic acid molecule as shown in the respective line in column 5 of Table I (whereby the respective line disclose in column 7 the fine chemical myo-inositol), application no. 17, preferably the coding region thereof, or a homolog or a fragment thereof, and being depicted in the same respective line as said Slr1107, or a functional equivalent or a homolog thereof as shown in column 8 of Table I, application no. 17, preferably the coding region thereof, particularly a homolog or functional equivalent as shown in column 8 of Table I B, application no. 17, and being depicted in the same respective line as said Slr1107, and preferably the activity is increased plastidic, or
[91642] (b) a polypeptide comprising a polypeptide, a consensus sequence or at least a polypeptide motif as shown in the respective line in column 5 of Table II or in column 8 of Table IV, application no. 17, respectively, and being depicted in the same respective line as said Slr1107, or a functional equivalent or a homolog thereof as depicted in column 8 of Table II, application no. 17, preferably a homolog or functional equivalent as depicted in column 8 of Table II B, application no. 17, and being depicted in the same respective line as said Slr1107, and preferably the activity is increased plastidic, whereby the respective line disclose in column 7 the fine chemical myo-inositol.

[91643] Accordingly, in one embodiment, the molecule which activity is to be increased in the process of the invention is the gene product with an activity as a “slr1107-protein”, preferably it is the molecule of section (a) or (b) of this paragraph.

[91644] In particular, it was observed that in plants, especially in Arabidopsis thaliana, increasing or generating the activity of a gene product plastidic with the activity of a “slr1107-protein”, preferably being encoded by a gene comprising the nucleic acid sequence SEQ ID NO. 101776, preferably the coding region thereof, conferred the production of or the increase in myo-inositol compared with the wild type control.

[91645] The nucleic acid sequence of Slr1350 from Synechocystis sp., e.g. as shown in the respective line in column 5 of Table I, application no. 17, has been published in C. And the activity of the gene product thereof is the activity of fatty acid desaturase.

[91646] Accordingly, in one embodiment, the process of the present invention for producing glucose-1-phosphate in a non-human organism, like a microorganism or a plant or a part thereof, comprises increasing or generating the activity of a gene product with the activity of a gene product conferring the activity of “fatty acid desaturase”, especially from Synechocystis sp. or its functional equivalent or its homolog, e.g. the increase of
[91647] (a) a gene product of a gene comprising the nucleic acid molecule as shown in the respective line in column 5 of Table I (whereby the respective line disclose in column 7 the fine chemical glucose-1-phosphate), application no. 17, preferably the coding region thereof, or a homolog or a fragment thereof, and being depicted in the same respective line as said Slr1350, or a functional equivalent or a homolog thereof as shown in column 8 of Table I, application no. 17, preferably the coding region thereof, particularly a homolog or functional equivalent as shown in column 8 of Table I B, application no. 17, and being depicted in the same respective line as said Slr1350, and preferably the activity is increased mitochondrial, or
[91648] (b) a polypeptide comprising a polypeptide, a consensus sequence or at least a polypeptide motif as shown in the respective line in column 5 of Table II or in column 8 of Table IV, application no. 17, respectively, and being depicted in the same respective line as said Slr1350, or a functional equivalent or a homolog thereof as depicted in column 8 of Table II, application no. 17, preferably a homolog or functional equivalent as depicted in column 8 of Table II B, application no. 17, and being depicted in the same respective line as said Slr1350, and preferably the activity is increased mitochondrial, whereby the respective line disclose in column 7 the fine chemical glucose-1-phosphate.

[91649] Accordingly, in one embodiment, the molecule which activity is to be increased in the process of the invention is the gene product with an activity as a “fatty acid desaturase”, preferably it is the molecule of section (a) or (b) of this paragraph.

[91650] In particular, it was observed that in plants, especially in Arabidopsis thaliana, increasing or generating the activity of a gene product mitochondrial with the activity of a “fatty acid desaturase”, preferably being encoded by a gene comprising the nucleic acid sequence SEQ ID NO. 116713, preferably the coding region thereof, conferred the production of or the increase in glucose-1-phosphate compared with the wild type control.

[91651] The nucleic acid sequence of Slr1369 from Synechocystis sp., e.g. as shown in the respective line in column 5 of Table I, application no. 17, has been published in C. And the activity of the gene product thereof is the activity of CDP-diglyceride synthetase.

[91652] Accordingly, in one embodiment, the process of the present invention for producing glucose-1-phosphate in a non-human organism, like a microorganism or a plant or a part thereof, comprises increasing or generating the activity of a gene product with the activity of a gene product conferring the activity of “CDP-diglyceride synthetase”, especially from Synechocystis sp. or its functional equivalent or its homolog, e.g. the increase of
[91653] (a) a gene product of a gene comprising the nucleic acid molecule as shown in the respective line in column 5 of Table I (whereby the respective line disclose in column 7 the fine chemical glucose-1-phosphate), application no. 17, preferably the coding region thereof, or a homolog or a fragment thereof, and being depicted in the same respective line as said Slr1369, or a functional equivalent or a homolog thereof as shown in column 8 of Table I, application no. 17, preferably the coding region thereof, particularly a homolog or functional equivalent as shown in column 8 of Table I B, application no. 17, and being depicted in the same respective line as said Slr1369, and preferably the activity is increased mitochondrial, or
[91654] (b) a polypeptide comprising a polypeptide, a consensus sequence or at least a polypeptide motif as shown in the respective line in column 5 of Table II or in column 8 of Table IV, application no. 17, respectively, and being depicted in the same respective line as said Slr1369, or a functional equivalent or a homolog thereof as depicted in column 8 of Table II, application no. 17, preferably a homolog or functional equivalent as depicted in column 8 of Table II B, application no. 17, and being depicted in the same respective line as said Slr1369, and preferably the activity is increased mitochondrial, whereby the respective line disclose in column 7 the fine chemical glucose-1-phosphate.

[91655] Accordingly, in one embodiment, the molecule which activity is to be increased in the process of the invention is the gene product with an activity as a “CDP-diglyceride synthetase”, preferably it is the molecule of section (a) or (b) of this paragraph.

[91656] In particular, it was observed that in plants, especially in Arabidopsis thaliana, increasing or generating the activity of a gene product mitochondrial with the activity of a “CDP-diglyceride synthetase”, preferably being encoded by a gene comprising the nucleic acid sequence SEQ ID NO. 58472, preferably the coding region thereof, conferred the production of or the increase in glucose-1-phosphate compared with the wild type control.

[91657] The nucleic acid sequence of Slr1369 from Synechocystis sp., e.g. as shown in the respective line in column 5 of Table I, application no. 17, has been published in C. And the activity of the gene product thereof is the activity of CDP-diglyceride synthetase.

[91658] Accordingly, in one embodiment, the process of the present invention for producing myo-inositol in a non-human organism, like a microorganism or a plant or a part thereof, comprises increasing or generating the activity of a gene product with the activity of a gene product conferring the activity of “CDP-diglyceride synthetase”, especially from Synechocystis sp. or its functional equivalent or its homolog, e.g. the increase of
[91659] (a) a gene product of a gene comprising the nucleic acid molecule as shown in the respective line in column 5 of Table I (whereby the respective line disclose in column 7 the fine chemical myo-inositol), application no. 17, preferably the coding region thereof, or a homolog or a fragment thereof, and being depicted in the same respective line as said Slr1369, or a functional equivalent or a homolog thereof as shown in column 8 of Table I, application no. 17, preferably the coding region thereof, particularly a homolog or functional equivalent as shown in column 8 of Table I B, application no. 17, and being depicted in the same respective line as said Slr1369, and preferably the activity is increased mitochondrial, or
[91660] (b) a polypeptide comprising a polypeptide, a consensus sequence or at least a polypeptide motif as shown in the respective line in column 5 of Table II or in column 8 of Table IV, application no. 17, respectively, and being depicted in the same respective line as said Slr1369, or a functional equivalent or a homolog thereof as depicted in column 8 of Table II, application no. 17, preferably a homolog or functional equivalent as depicted in column 8 of Table II B, application no. 17, and being depicted in the same respective line as said Slr1369, and preferably the activity is increased mitochondrial, whereby the respective line disclose in column 7 the fine chemical myo-inositol.

[91661] Accordingly, in one embodiment, the molecule which activity is to be increased in the process of the invention is the gene product with an activity as a “CDP-diglyceride synthetase”, preferably it is the molecule of section (a) or (b) of this paragraph.

[91662] In particular, it was observed that in plants, especially in Arabidopsis thaliana, increasing or generating the activity of a gene product mitochondrial with the activity of a “CDP-diglyceride synthetase”, preferably being encoded by a gene comprising the nucleic acid sequence SEQ ID NO. 58472, preferably the coding region thereof, conferred the production of or the increase in myo-inositol compared with the wild type control.

[91663] The nucleic acid sequence of Slr1492 from Synechocystis sp., e.g. as shown in the respective line in column 5 of Table I, application no. 17, has been published in C. And the activity of the gene product thereof is the activity of iron(III) dicitrate-binding protein.

[91664] Accordingly, in one embodiment, the process of the present invention for producing fructose in a non-human organism, like a microorganism or a plant or a part thereof, comprises increasing or generating the activity of a gene product with the activity of a gene product conferring the activity of “iron(III) dicitrate-binding protein”, especially from Synechocystis sp. or its functional equivalent or its homolog, e.g. the increase of
[91665] (a) a gene product of a gene comprising the nucleic acid molecule as shown in the respective line in column 5 of Table I (whereby the respective line disclose in column 7 the fine chemical fructose), application no. 17, preferably the coding region thereof, or a homolog or a fragment thereof, and being depicted in the same respective line as said Slr1492, or a functional equivalent or a homolog thereof as shown in column 8 of Table I, application no. 17, preferably the coding region thereof, particularly a homolog or functional equivalent as shown in column 8 of Table I B, application no. 17, and being depicted in the same respective line as said Slr1492, and preferably the activity is increased mitochondrial, or
[91666] (b) a polypeptide comprising a polypeptide, a consensus sequence or at least a polypeptide motif as shown in the respective line in column 5 of Table II or in column 8 of Table IV, application no. 17, respectively, and being depicted in the same respective line as said Slr1492, or a functional equivalent or a homolog thereof as depicted in column 8 of Table II, application no. 17, preferably a homolog or functional equivalent as depicted in column 8 of Table II B, application no. 17, and being depicted in the same respective line as said Slr1492, and preferably the activity is increased mitochondrial, whereby the respective line disclose in column 7 the fine chemical fructose.

[91667] Accordingly, in one embodiment, the molecule which activity is to be increased in the process of the invention is the gene product with an activity as a “iron(III) dicitrate-binding protein”, preferably it is the molecule of section (a) or (b) of this paragraph.

[91668] In particular, it was observed that in plants, especially in Arabidopsis thaliana, increasing or generating the activity of a gene product mitochondrial with the activity of a “iron(III) dicitratebinding protein”, preferably being encoded by a gene comprising the nucleic acid sequence SEQ ID NO. 58668, preferably the coding region thereof, conferred the production of or the increase in fructose compared with the wild type control.

[91669] The nucleic acid sequence of Slr1655 from Synechocystis sp., e.g. as shown in the respective line in column 5 of Table I, application no. 17, has been published in C. And the activity of the gene product thereof is the activity of photosystem I reaction center subunit XI.

[91670] Accordingly, in one embodiment, the process of the present invention for producing sucrose in a non-human organism, like a microorganism or a plant or a part thereof, comprises increasing or generating the activity of a gene product with the activity of a gene product conferring the activity of “photosystem I reaction center subunit XI”, especially from Synechocystis sp. or its functional equivalent or its homolog, e.g. the increase of
[91671] (a) a gene product of a gene comprising the nucleic acid molecule as shown in the respective line in column 5 of Table I (whereby the respective line disclose in column 7 the fine chemical sucrose), application no. 17, preferably the coding region thereof, or a homolog or a fragment thereof, and being depicted in the same respective line as said Slr1655, or a functional equivalent or a homolog thereof as shown in column 8 of Table I, application no. 17, preferably the coding region thereof, particularly a homolog or functional equivalent as shown in column 8 of Table I B, application no. 17, and being depicted in the same respective line as said Slr1655, and preferably the activity is increased mitochondrial, or
[91672] (b) a polypeptide comprising a polypeptide, a consensus sequence or at least a polypeptide motif as shown in the respective line in column 5 of Table II or in column 8 of Table IV, application no. 17, respectively, and being depicted in the same respective line as said Slr1655, or a functional equivalent or a homolog thereof as depicted in column 8 of Table II, application no. 17, preferably a homolog or functional equivalent as depicted in column 8 of Table II B, application no. 17, and being depicted in the same respective line as said Slr1655, and preferably the activity is increased mitochondrial, whereby the respective line disclose in column 7 the fine chemical sucrose.

[91673] Accordingly, in one embodiment, the molecule which activity is to be increased in the process of the invention is the gene product with an activity as a “photosystem I reaction center subunit XI”, preferably it is the molecule of section (a) or (b) of this paragraph.

[91674] In particular, it was observed that in plants, especially in Arabidopsis thaliana, increasing or generating the activity of a gene product mitochondrial with the activity of a “photosystem I reaction center subunit XI”, preferably being encoded by a gene comprising the nucleic acid sequence SEQ ID NO. 12070, preferably the coding region thereof, conferred the production of or the increase in sucrose compared with the wild type control.

[91675] The nucleic acid sequence of Slr1739 from Synechocystis sp., e.g. as shown in the respective line in column 5 of Table I, application no. 17, has been published in C. And the activity of the gene product thereof is the activity of photosystem II protein.

[91676] Accordingly, in one embodiment, the process of the present invention for producing fructose in a non-human organism, like a microorganism or a plant or a part thereof, comprises increasing or generating the activity of a gene product with the activity of a gene product conferring the activity of “photosystem II protein”, especially from Synechocystis sp. or its functional equivalent or its homolog, e.g. the increase of
[91677] (a) a gene product of a gene comprising the nucleic acid molecule as shown in the respective line in column 5 of Table I (whereby the respective line disclose in column 7 the fine chemical fructose), application no. 17, preferably the coding region thereof, or a homolog or a fragment thereof, and being depicted in the same respective line as said Slr1739, or a functional equivalent or a homolog thereof as shown in column 8 of Table I, application no. 17, preferably the coding region thereof, particularly a homolog or functional equivalent as shown in column 8 of Table I B, application no. 17, and being depicted in the same respective line as said Slr1739, and preferably the activity is increased plastidic, or
[91678] (b) a polypeptide comprising a polypeptide, a consensus sequence or at least a polypeptide motif as shown in the respective line in column 5 of Table II or in column 8 of Table IV, application no. 17, respectively, and being depicted in the same respective line as said Slr1739, or a functional equivalent or a homolog thereof as depicted in column 8 of Table II, application no. 17, preferably a homolog or functional equivalent as depicted in column 8 of Table II B, application no. 17, and being depicted in the same respective line as said Slr1739, and preferably the activity is increased plastidic, whereby the respective line disclose in column 7 the fine chemical fructose.

[91679] Accordingly, in one embodiment, the molecule which activity is to be increased in the process of the invention is the gene product with an activity as a “photosystem II protein”, preferably it is the molecule of section (a) or (b) of this paragraph.

[91680] In particular, it was observed that in plants, especially in Arabidopsis thaliana, increasing or generating the activity of a gene product plastidic with the activity of a “photosystem II protein”, preferably being encoded by a gene comprising the nucleic acid sequence SEQ ID NO. 58731, preferably the coding region thereof, conferred the production of or the increase in fructose compared with the wild type control.

[91681] The nucleic acid sequence of Slr1742 from Synechocystis sp., e.g. as shown in the respective line in column 5 of Table I, application no. 17, has been published in C. And the activity of the gene product thereof is the activity of glutamine amidotransferase.

[91682] Accordingly, in one embodiment, the process of the present invention for producing fructose in a non-human organism, like a microorganism or a plant or a part thereof, comprises increasing or generating the activity of a gene product with the activity of a gene product conferring the activity of “glutamine amidotransferase”, especially from Synechocystis sp. or its functional equivalent or its homolog, e.g. the increase of
[91683] (a) a gene product of a gene comprising the nucleic acid molecule as shown in the respective line in column 5 of Table I (whereby the respective line disclose in column 7 the fine chemical fructose), application no. 17, preferably the coding region thereof, or a homolog or a fragment thereof, and being depicted in the same respective line as said Slr1742, or a functional equivalent or a homolog thereof as shown in column 8 of Table I, application no. 17, preferably the coding region thereof, particularly a homolog or functional equivalent as shown in column 8 of Table I B, application no. 17, and being depicted in the same respective line as said Slr1742, and preferably the activity is increased plastidic, or
[91684] (b) a polypeptide comprising a polypeptide, a consensus sequence or at least a polypeptide motif as shown in the respective line in column 5 of Table II or in column 8 of Table IV, application no. 17, respectively, and being depicted in the same respective line as said Slr1742, or a functional equivalent or a homolog thereof as depicted in column 8 of Table II, application no. 17, preferably a homolog or functional equivalent as depicted in column 8 of Table II B, application no. 17, and being depicted in the same respective line as said Slr1742, and preferably the activity is increased plastidic, whereby the respective line disclose in column 7 the fine chemical fructose.

[91685] Accordingly, in one embodiment, the molecule which activity is to be increased in the process of the invention is the gene product with an activity as a “glutamine amidotransferase”, preferably it is the molecule of section (a) or (b) of this paragraph.

[91686] In particular, it was observed that in plants, especially in Arabidopsis thaliana, increasing or generating the activity of a gene product plastidic with the activity of a “glutamine amidotransferase”, preferably being encoded by a gene comprising the nucleic acid sequence SEQ ID NO. 58751, preferably the coding region thereof, conferred the production of or the increase in fructose compared with the wild type control.

[91687] The nucleic acid sequence of Slr1742 from Synechocystis sp., e.g. as shown in the respective line in column 5 of Table I, application no. 17, has been published in C. And the activity of the gene product thereof is the activity of glutamine amidotransferase.

[91688] Accordingly, in one embodiment, the process of the present invention for producing myo-inositol in a non-human organism, like a microorganism or a plant or a part thereof, comprises increasing or generating the activity of a gene product with the activity of a gene product conferring the activity of “glutamine amidotransferase”, especially from Synechocystis sp. or its functional equivalent or its homolog, e.g. the increase of
[91689] (a) a gene product of a gene comprising the nucleic acid molecule as shown in the respective line in column 5 of Table I (whereby the respective line disclose in column 7 the fine chemical myo-inositol), application no. 17, preferably the coding region thereof, or a homolog or a fragment thereof, and being depicted in the same respective line as said Slr1742, or a functional equivalent or a homolog thereof as shown in column 8 of Table I, application no. 17, preferably the coding region thereof, particularly a homolog or functional equivalent as shown in column 8 of Table I B, application no. 17, and being depicted in the same respective line as said Slr1742, and preferably the activity is increased plastidic, or
[91690] (b) a polypeptide comprising a polypeptide, a consensus sequence or at least a polypeptide motif as shown in the respective line in column 5 of Table II or in column 8 of Table IV, application no. 17, respectively, and being depicted in the same respective line as said Slr1742, or a functional equivalent or a homolog thereof as depicted in column 8 of Table II, application no. 17, preferably a homolog or functional equivalent as depicted in column 8 of Table II B, application no. 17, and being depicted in the same respective line as said Slr1742, and preferably the activity is increased plastidic, whereby the respective line disclose in column 7 the fine chemical myo-inositol.

[91691] Accordingly, in one embodiment, the molecule which activity is to be increased in the process of the invention is the gene product with an activity as a “glutamine amidotransferase”, preferably it is the molecule of section (a) or (b) of this paragraph.

[91692] In particular, it was observed that in plants, especially in Arabidopsis thaliana, increasing or generating the activity of a gene product plastidic with the activity of a “glutamine amidotransferase”, preferably being encoded by a gene comprising the nucleic acid sequence SEQ ID NO. 58751, preferably the coding region thereof, conferred the production of or the increase in myo-inositol compared with the wild type control.

[91693] The nucleic acid sequence of Slr1743 from Synechocystis sp., e.g. as shown in the respective line in column 5 of Table I, application no. 17, has been published in C. And the activity of the gene product thereof is the activity of NADH dehydrogenase.

[91694] Accordingly, in one embodiment, the process of the present invention for producing glucose-1-phosphate in a non-human organism, like a microorganism or a plant or a part thereof, comprises increasing or generating the activity of a gene product with the activity of a gene product conferring the activity of “NADH dehydrogenase”, especially from Synechocystis sp. or its functional equivalent or its homolog, e.g. the increase of
[91695] (a) a gene product of a gene comprising the nucleic acid molecule as shown in the respective line in column 5 of Table I (whereby the respective line disclose in column 7 the fine chemical glucose-1-phosphate), application no. 17, preferably the coding region thereof, or a homolog or a fragment thereof, and being depicted in the same respective line as said Slr1743, or a functional equivalent or a homolog thereof as shown in column 8 of Table I, application no. 17, preferably the coding region thereof, particularly a homolog or functional equivalent as shown in column 8 of Table I B, application no. 17, and being depicted in the same respective line as said Slr1743, and preferably the activity is increased plastidic, or
[91696] (b) a polypeptide comprising a polypeptide, a consensus sequence or at least a polypeptide motif as shown in the respective line in column 5 of Table II or in column 8 of Table IV, application no. 17, respectively, and being depicted in the same respective line as said Slr1743, or a functional equivalent or a homolog thereof as depicted in column 8 of Table II, application no. 17, preferably a homolog or functional equivalent as depicted in column 8 of Table II B, application no. 17, and being depicted in the same respective line as said Slr1743, and preferably the activity is increased plastidic, whereby the respective line disclose in column 7 the fine chemical glucose-1-phosphate.

[91697] Accordingly, in one embodiment, the molecule which activity is to be increased in the process of the invention is the gene product with an activity as a “NADH dehydrogenase”, preferably it is the molecule of section (a) or (b) of this paragraph.

[91698] In particular, it was observed that in plants, especially in Arabidopsis thaliana, increasing or generating the activity of a gene product plastidic with the activity of a “NADH dehydrogenase”, preferably being encoded by a gene comprising the nucleic acid sequence SEQ ID NO. 147457, preferably the coding region thereof, conferred the production of or the increase in glucose-1-phosphate compared with the wild type control.

[91699] The nucleic acid sequence of Slr1779 from Synechocystis sp., e.g. as shown in the respective line in column 5 of Table I, application no. 17, has been published in C. And the activity of the gene product thereof is the activity of pyridoxal phosphate biosynthetic protein.

[91700] Accordingly, in one embodiment, the process of the present invention for producing raffinose in a non-human organism, like a microorganism or a plant or a part thereof, comprises increasing or generating the activity of a gene product with the activity of a gene product conferring the activity of “pyridoxal phosphate biosynthetic protein”, especially from Synechocystis sp. or its functional equivalent or its homolog, e.g. the increase of
[91701] (a) a gene product of a gene comprising the nucleic acid molecule as shown in the respective line in column 5 of Table I (whereby the respective line disclose in column 7 the fine chemical raffinose), application no. 17, preferably the coding region thereof, or a homolog or a fragment thereof, and being depicted in the same respective line as said Slr1779, or a functional equivalent or a homolog thereof as shown in column 8 of Table I, application no. 17, preferably the coding region thereof, particularly a homolog or functional equivalent as shown in column 8 of Table I B, application no. 17, and being depicted in the same respective line as said Slr1779, and preferably the activity is increased plastidic, or
[91702] (b) a polypeptide comprising a polypeptide, a consensus sequence or at least a polypeptide motif as shown in the respective line in column 5 of Table II or in column 8 of Table IV, application no. 17, respectively, and being depicted in the same respective line as said Slr1779, or a functional equivalent or a homolog thereof as depicted in column 8 of Table II, application no. 17, preferably a homolog or functional equivalent as depicted in column 8 of Table II B, application no. 17, and being depicted in the same respective line as said Slr1779, and preferably the activity is increased plastidic, whereby the respective line disclose in column 7 the fine chemical raffinose.

[91703] Accordingly, in one embodiment, the molecule which activity is to be increased in the process of the invention is the gene product with an activity as a “pyridoxal phosphate biosynthetic protein”, preferably it is the molecule of section (a) or (b) of this paragraph.

[91704] In particular, it was observed that in plants, especially in Arabidopsis thaliana, increasing or generating the activity of a gene product plastidic with the activity of a “pyridoxal phosphate biosynthetic protein”, preferably being encoded by a gene comprising the nucleic acid sequence SEQ ID NO. 147637, preferably the coding region thereof, conferred the production of or the increase in raffinose compared with the wild type control.

[91705] The nucleic acid sequence of Slr1791 from Synechocystis sp., e.g. as shown in the respective line in column 5 of Table I, application no. 17, has been published in C. And the activity of the gene product thereof is the activity of phosphoadenosine phosphosulfate reductase .

[91706] Accordingly, in one embodiment, the process of the present invention for producing glucose-1-phosphate in a non-human organism, like a microorganism or a plant or a part thereof, comprises increasing or generating the activity of a gene product with the activity of a gene product conferring the activity of “phosphoadenosine phosphosulfate reductase”, especially from Synechocystis sp. or its functional equivalent or its homolog, e.g. the increase of
[91707] (a) a gene product of a gene comprising the nucleic acid molecule as shown in the respective line in column 5 of Table I (whereby the respective line disclose in column 7 the fine chemical glucose-1-phosphate), application no. 17, preferably the coding region thereof, or a homolog or a fragment thereof, and being depicted in the same respective line as said Slr1791, or a functional equivalent or a homolog thereof as shown in column 8 of Table I, application no. 17, preferably the coding region thereof, particularly a homolog or functional equivalent as shown in column 8 of Table I B, application no. 17, and being depicted in the same respective line as said Slr1791, and preferably the activity is increased plastidic, or
[91708] (b) a polypeptide comprising a polypeptide, a consensus sequence or at least a polypeptide motif as shown in the respective line in column 5 of Table II or in column 8 of Table IV, application no. 17, respectively, and being depicted in the same respective line as said Slr1791, or a functional equivalent or a homolog thereof as depicted in column 8 of Table II, application no. 17, preferably a homolog or functional equivalent as depicted in column 8 of Table II B, application no. 17, and being depicted in the same respective line as said Slr1791, and preferably the activity is increased plastidic, whereby the respective line disclose in column 7 the fine chemical glucose-1-phosphate.

[91709] Accordingly, in one embodiment, the molecule which activity is to be increased in the process of the invention is the gene product with an activity as a “phosphoadenosine phosphosulfate reductase”, preferably it is the molecule of section (a) or (b) of this paragraph.

[91710] In particular, it was observed that in plants, especially in Arabidopsis thaliana, increasing or generating the activity of a gene product plastidic with the activity of a “phosphoadenosine phosphosulfate reductase”, preferably being encoded by a gene comprising the nucleic acid sequence SEQ ID NO. 12140, preferably the coding region thereof, conferred the production of or the increase in glucose-1-phosphate compared with the wild type control.

[91711] The nucleic acid sequence of Slr2072 from Synechocystis sp., e.g. as shown in the respective line in column 5 of Table I, application no. 17, has been published in C. And the activity of the gene product thereof is the activity of threonine dehydratase.

[91712] Accordingly, in one embodiment, the process of the present invention for producing glucose-1-phosphate in a non-human organism, like a microorganism or a plant or a part thereof, comprises increasing or generating the activity of a gene product with the activity of a gene product conferring the activity of “threonine dehydratase”, especially from Synechocystis sp. or its functional equivalent or its homolog, e.g. the increase of
[91713] (a) a gene product of a gene comprising the nucleic acid molecule as shown in the respective line in column 5 of Table I (whereby the respective line disclose in column 7 the fine chemical glucose-1-phosphate), application no. 17, preferably the coding region thereof, or a homolog or a fragment thereof, and being depicted in the same respective line as said Slr2072, or a functional equivalent or a homolog thereof as shown in column 8 of Table I, application no. 17, preferably the coding region thereof, particularly a homolog or functional equivalent as shown in column 8 of Table I B, application no. 17, and being depicted in the same respective line as said Slr2072, and preferably the activity is increased plastidic, or
[91714] (b) a polypeptide comprising a polypeptide, a consensus sequence or at least a polypeptide motif as shown in the respective line in column 5 of Table II or in column 8 of Table IV, application no. 17, respectively, and being depicted in the same respective line as said Slr2072, or a functional equivalent or a homolog thereof as depicted in column 8 of Table II, application no. 17, preferably a homolog or functional equivalent as depicted in column 8 of Table II B, application no. 17, and being depicted in the same respective line as said Slr2072, and preferably the activity is increased plastidic, whereby the respective line disclose in column 7 the fine chemical glucose-1-phosphate.

[91715] Accordingly, in one embodiment, the molecule which activity is to be increased in the process of the invention is the gene product with an activity as a “threonine dehydratase”, preferably it is the molecule of section (a) or (b) of this paragraph.

[91716] In particular, it was observed that in plants, especially in Arabidopsis thaliana, increasing or generating the activity of a gene product plastidic with the activity of a “threonine dehydratase”, preferably being encoded by a gene comprising the nucleic acid sequence SEQ ID NO. 12341, preferably the coding region thereof, conferred the production of or the increase in glucose-1-phosphate compared with the wild type control.

[91717] The nucleic acid sequence of Slr2072 from Synechocystis sp., e.g. as shown in the respective line in column 5 of Table I, application no. 17, has been published in C. And the activity of the gene product thereof is the activity of threonine dehydratase.

[91718] Accordingly, in one embodiment, the process of the present invention for producing 3,4,5-trihydroxypentanoic acid in a non-human organism, like a microorganism or a plant or a part thereof, comprises increasing or generating the activity of a gene product with the activity of a gene product conferring the activity of “threonine dehydratase”, especially from Synechocystis sp. or its functional equivalent or its homolog, e.g. the increase of
[91719] (a) a gene product of a gene comprising the nucleic acid molecule as shown in the respective line in column 5 of Table I (whereby the respective line disclose in column 7 the fine chemical 3,4,5-trihydroxypentanoic acid), application no. 17, preferably the coding region thereof, or a homolog or a fragment thereof, and being depicted in the same respective line as said Slr2072, or a functional equivalent or a homolog thereof as shown in column 8 of Table I, application no. 17, preferably the coding region thereof, particularly a homolog or functional equivalent as shown in column 8 of Table I B, application no. 17, and being depicted in the same respective line as said Slr2072, and preferably the activity is increased plastidic, or
[91720] (b) a polypeptide comprising a polypeptide, a consensus sequence or at least a polypeptide motif as shown in the respective line in column 5 of Table II or in column 8 of Table IV, application no. 17, respectively, and being depicted in the same respective line as said Slr2072, or a functional equivalent or a homolog thereof as depicted in column 8 of Table II, application no. 17, preferably a homolog or functional equivalent as depicted in column 8 of Table II B, application no. 17, and being depicted in the same respective line as said Slr2072, and preferably the activity is increased plastidic, whereby the respective line disclose in column 7 the fine chemical 3,4,5-trihydroxypentanoic acid.

[91721] Accordingly, in one embodiment, the molecule which activity is to be increased in the process of the invention is the gene product with an activity as a “threonine dehydratase”, preferably it is the molecule of section (a) or (b) of this paragraph.

[91722] In particular, it was observed that in plants, especially in Arabidopsis thaliana, increasing or generating the activity of a gene product plastidic with the activity of a “threonine dehydratase”, preferably being encoded by a gene comprising the nucleic acid sequence SEQ ID NO. 12341, preferably the coding region thereof, conferred the production of or the increase in 3,4,5-trihydroxypentanoic acid compared with the wild type control.

[91723] The nucleic acid sequence of Slr2124 from Synechocystis sp., e.g. as shown in the respective line in column 5 of Table I, application no. 17, has been published in C. And the activity of the gene product thereof is the activity of short-chain alcohol dehydrogenase family.

[91724] Accordingly, in one embodiment, the process of the present invention for producing fructose in a non-human organism, like a microorganism or a plant or a part thereof, comprises increasing or generating the activity of a gene product with the activity of a gene product conferring the activity of “short-chain alcohol dehydrogenase family”, especially from Synechocystis sp. or its functional equivalent or its homolog, e.g. the increase of
[91725] (a) a gene product of a gene comprising the nucleic acid molecule as shown in the respective line in column 5 of Table I (whereby the respective line disclose in column 7 the fine chemical fructose), application no. 17, preferably the coding region thereof, or a homolog or a fragment thereof, and being depicted in the same respective line as said Slr2124, or a functional equivalent or a homolog thereof as shown in column 8 of Table I, application no. 17, preferably the coding region thereof, particularly a homolog or functional equivalent as shown in column 8 of Table I B, application no. 17, and being depicted in the same respective line as said Slr2124, and preferably the activity is increased plastidic, or
[91726] (b) a polypeptide comprising a polypeptide, a consensus sequence or at least a polypeptide motif as shown in the respective line in column 5 of Table II or in column 8 of Table IV, application no. 17, respectively, and being depicted in the same respective line as said Slr2124, or a functional equivalent or a homolog thereof as depicted in column 8 of Table II, application no. 17, preferably a homolog or functional equivalent as depicted in column 8 of Table II B, application no. 17, and being depicted in the same respective line as said Slr2124, and preferably the activity is increased plastidic, whereby the respective line disclose in column 7 the fine chemical fructose.

[91727] Accordingly, in one embodiment, the molecule which activity is to be increased in the process of the invention is the gene product with an activity as a “short-chain alcohol dehydrogenase family”, preferably it is the molecule of section (a) or (b) of this paragraph.

[91728] In particular, it was observed that in plants, especially in Arabidopsis thaliana, increasing or generating the activity of a gene product plastidic with the activity of a “short-chain alcohol dehydrogenase family”, preferably being encoded by a gene comprising the nucleic acid sequence SEQ ID NO. 59370, preferably the coding region thereof, conferred the production of or the increase in fructose compared with the wild type control.

[91729] The nucleic acid sequence of Slr2124 from Synechocystis sp., e.g. as shown in the respective line in column 5 of Table I, application no. 17, has been published in C. And the activity of the gene product thereof is the activity of short-chain alcohol dehydrogenase family.

[91730] Accordingly, in one embodiment, the process of the present invention for producing glucose in a non-human organism, like a microorganism or a plant or a part thereof, comprises increasing or generating the activity of a gene product with the activity of a gene product conferring the activity of “short-chain alcohol dehydrogenase family”, especially from Synechocystis sp. or its functional equivalent or its homolog, e.g. the increase of
[91731] (a) a gene product of a gene comprising the nucleic acid molecule as shown in the respective line in column 5 of Table I (whereby the respective line disclose in column 7 the fine chemical glucose), application no. 17, preferably the coding region thereof, or a homolog or a fragment thereof, and being depicted in the same respective line as said Slr2124, or a functional equivalent or a homolog thereof as shown in column 8 of Table I, application no. 17, preferably the coding region thereof, particularly a homolog or functional equivalent as shown in column 8 of Table I B, application no. 17, and being depicted in the same respective line as said Slr2124, and preferably the activity is increased plastidic, or
[91732] (b) a polypeptide comprising a polypeptide, a consensus sequence or at least a polypeptide motif as shown in the respective line in column 5 of Table II or in column 8 of Table IV, application no. 17, respectively, and being depicted in the same respective line as said Slr2124, or a functional equivalent or a homolog thereof as depicted in column 8 of Table II, application no. 17, preferably a homolog or functional equivalent as depicted in column 8 of Table II B, application no. 17, and being depicted in the same respective line as said Slr2124, and preferably the activity is increased plastidic, whereby the respective line disclose in column 7 the fine chemical glucose.

[91733] Accordingly, in one embodiment, the molecule which activity is to be increased in the process of the invention is the gene product with an activity as a “short-chain alcohol dehydrogenase family”, preferably it is the molecule of section (a) or (b) of this paragraph.

[91734] In particular, it was observed that in plants, especially in Arabidopsis thaliana, increasing or generating the activity of a gene product plastidic with the activity of a “short-chain alcohol dehydrogenase family”, preferably being encoded by a gene comprising the nucleic acid sequence SEQ ID NO. 59370, preferably the coding region thereof, conferred the production of or the increase in glucose compared with the wild type control.

[91735] The nucleic acid sequence of Slr2124 from Synechocystis sp., e.g. as shown in the respective line in column 5 of Table I, application no. 17, has been published in C. And the activity of the gene product thereof is the activity of short-chain alcohol dehydrogenase family.

[91736] Accordingly, in one embodiment, the process of the present invention for producing glucose-1-phosphate in a non-human organism, like a microorganism or a plant or a part thereof, comprises increasing or generating the activity of a gene product with the activity of a gene product conferring the activity of “short-chain alcohol dehydrogenase family”, especially from Synechocystis sp. or its functional equivalent or its homolog, e.g. the increase of
[91737] (a) a gene product of a gene comprising the nucleic acid molecule as shown in the respective line in column 5 of Table I (whereby the respective line disclose in column 7 the fine chemical glucose-1-phosphate), application no. 17, preferably the coding region thereof, or a homolog or a fragment thereof, and being depicted in the same respective line as said Slr2124, or a functional equivalent or a homolog thereof as shown in column 8 of Table I, application no. 17, preferably the coding region thereof, particularly a homolog or functional equivalent as shown in column 8 of Table I B, application no. 17, and being depicted in the same respective line as said Slr2124, and preferably the activity is increased plastidic, or
[91738] (b) a polypeptide comprising a polypeptide, a consensus sequence or at least a polypeptide motif as shown in the respective line in column 5 of Table II or in column 8 of Table IV, application no. 17, respectively, and being depicted in the same respective line as said Slr2124, or a functional equivalent or a homolog thereof as depicted in column 8 of Table II, application no. 17, preferably a homolog or functional equivalent as depicted in column 8 of Table II B, application no. 17, and being depicted in the same respective line as said Slr2124, and preferably the activity is increased plastidic, whereby the respective line disclose in column 7 the fine chemical glucose-1-phosphate.

[91739] Accordingly, in one embodiment, the molecule which activity is to be increased in the process of the invention is the gene product with an activity as a “short-chain alcohol dehydrogenase family”, preferably it is the molecule of section (a) or (b) of this paragraph.

[91740] In particular, it was observed that in plants, especially in Arabidopsis thaliana, increasing or generating the activity of a gene product plastidic with the activity of a “short-chain alcohol dehydrogenase family”, preferably being encoded by a gene comprising the nucleic acid sequence SEQ ID NO. 59370, preferably the coding region thereof, conferred the production of or the increase in glucose-1-phosphate compared with the wild type control.

[91741] The nucleic acid sequence of Slr2124 from Synechocystis sp., e.g. as shown in the respective line in column 5 of Table I, application no. 17, has been published in C. And the activity of the gene product thereof is the activity of short-chain alcohol dehydrogenase family.

[91742] Accordingly, in one embodiment, the process of the present invention for producing myo-inositol in a non-human organism, like a microorganism or a plant or a part thereof, comprises increasing or generating the activity of a gene product with the activity of a gene product conferring the activity of “short-chain alcohol dehydrogenase family”, especially from Synechocystis sp. or its functional equivalent or its homolog, e.g. the increase of
[91743] (a) a gene product of a gene comprising the nucleic acid molecule as shown in the respective line in column 5 of Table I (whereby the respective line disclose in column 7 the fine chemical myo-inositol), application no. 17, preferably the coding region thereof, or a homolog or a fragment thereof, and being depicted in the same respective line as said Slr2124, or a functional equivalent or a homolog thereof as shown in column 8 of Table I, application no. 17, preferably the coding region thereof, particularly a homolog or functional equivalent as shown in column 8 of Table I B, application no. 17, and being depicted in the same respective line as said Slr2124, and preferably the activity is increased plastidic, or
[91744] (b) a polypeptide comprising a polypeptide, a consensus sequence or at least a polypeptide motif as shown in the respective line in column 5 of Table II or in column 8 of Table IV, application no. 17, respectively, and being depicted in the same respective line as said Slr2124, or a functional equivalent or a homolog thereof as depicted in column 8 of Table II, application no. 17, preferably a homolog or functional equivalent as depicted in column 8 of Table II B, application no. 17, and being depicted in the same respective line as said Slr2124, and preferably the activity is increased plastidic, whereby the respective line disclose in column 7 the fine chemical myo-inositol.

[91745] Accordingly, in one embodiment, the molecule which activity is to be increased in the process of the invention is the gene product with an activity as a “short-chain alcohol dehydrogenase family”, preferably it is the molecule of section (a) or (b) of this paragraph.

[91746] In particular, it was observed that in plants, especially in Arabidopsis thaliana, increasing or generating the activity of a gene product plastidic with the activity of a “short-chain alcohol dehydrogenase family”, preferably being encoded by a gene comprising the nucleic acid sequence SEQ ID NO. 59370, preferably the coding region thereof, conferred the production of or the increase in myo-inositol compared with the wild type control.

[91747] The nucleic acid sequence of Slr2124 from Synechocystis sp., e.g. as shown in the respective line in column 5 of Table I, application no. 17, has been published in C. And the activity of the gene product thereof is the activity of short-chain alcohol dehydrogenase family.

[91748] Accordingly, in one embodiment, the process of the present invention for producing sucrose in a non-human organism, like a microorganism or a plant or a part thereof, comprises increasing or generating the activity of a gene product with the activity of a gene product conferring the activity of “short-chain alcohol dehydrogenase family”, especially from Synechocystis sp. or its functional equivalent or its homolog, e.g. the increase of
[91749] (a) a gene product of a gene comprising the nucleic acid molecule as shown in the respective line in column 5 of Table I (whereby the respective line disclose in column 7 the fine chemical sucrose), application no. 17, preferably the coding region thereof, or a homolog or a fragment thereof, and being depicted in the same respective line as said Slr2124, or a functional equivalent or a homolog thereof as shown in column 8 of Table I, application no. 17, preferably the coding region thereof, particularly a homolog or functional equivalent as shown in column 8 of Table I B, application no. 17, and being depicted in the same respective line as said Slr2124, and preferably the activity is increased plastidic, or
[91750] (b) a polypeptide comprising a polypeptide, a consensus sequence or at least a polypeptide motif as shown in the respective line in column 5 of Table II or in column 8 of Table IV, application no. 17, respectively, and being depicted in the same respective line as said Slr2124, or a functional equivalent or a homolog thereof as depicted in column 8 of Table II, application no. 17, preferably a homolog or functional equivalent as depicted in column 8 of Table II B, application no. 17, and being depicted in the same respective line as said Slr2124, and preferably the activity is increased plastidic, whereby the respective line disclose in column 7 the fine chemical sucrose.

[91751] Accordingly, in one embodiment, the molecule which activity is to be increased in the process of the invention is the gene product with an activity as a “short-chain alcohol dehydrogenase family”, preferably it is the molecule of section (a) or (b) of this paragraph.

[91752] In particular, it was observed that in plants, especially in Arabidopsis thaliana, increasing or generating the activity of a gene product plastidic with the activity of a “short-chain alcohol dehydrogenase family”, preferably being encoded by a gene comprising the nucleic acid sequence SEQ ID NO. 59370, preferably the coding region thereof, conferred the production of or the increase in sucrose compared with the wild type control.

[91753] The nucleic acid sequence of Slr2132 from Synechocystis sp., e.g. as shown in the respective line in column 5 of Table I, application no. 17, has been published in C. And the activity of the gene product thereof is the activity of phosphate acetyltransferase.

[91754] Accordingly, in one embodiment, the process of the present invention for producing raffinose in a non-human organism, like a microorganism or a plant or a part thereof, comprises increasing or generating the activity of a gene product with the activity of a gene product conferring the activity of “phosphate acetyltransferase”, especially from Synechocystis sp. or its functional equivalent or its homolog, e.g. the increase of
[91755] (a) a gene product of a gene comprising the nucleic acid molecule as shown in the respective line in column 5 of Table I (whereby the respective line disclose in column 7 the fine chemical raffinose), application no. 17, preferably the coding region thereof, or a homolog or a fragment thereof, and being depicted in the same respective line as said Slr2132, or a functional equivalent or a homolog thereof as shown in column 8 of Table I, application no. 17, preferably the coding region thereof, particularly a homolog or functional equivalent as shown in column 8 of Table I B, application no. 17, and being depicted in the same respective line as said Slr2132, and preferably the activity is increased mitochondrial, or
[91756] (b) a polypeptide comprising a polypeptide, a consensus sequence or at least a polypeptide motif as shown in the respective line in column 5 of Table II or in column 8 of Table IV, application no. 17, respectively, and being depicted in the same respective line as said Slr2132, or a functional equivalent or a homolog thereof as depicted in column 8 of Table II, application no. 17, preferably a homolog or functional equivalent as depicted in column 8 of Table II B, application no. 17, and being depicted in the same respective line as said Slr2132, and preferably the activity is increased mitochondrial, whereby the respective line disclose in column 7 the fine chemical raffinose.

[91757] Accordingly, in one embodiment, the molecule which activity is to be increased in the process of the invention is the gene product with an activity as a “phosphate acetyltransferase”, preferably it is the molecule of section (a) or (b) of this paragraph.

[91758] In particular, it was observed that in plants, especially in Arabidopsis thaliana, increasing or generating the activity of a gene product mitochondrial with the activity of a “phosphate acetyltransferase”, preferably being encoded by a gene comprising the nucleic acid sequence SEQ ID NO. 147836, preferably the coding region thereof, conferred the production of or the increase in raffinose compared with the wild type control.

[91759] The nucleic acid sequence of Smr0004 from Synechocystis sp., e.g. as shown in the respective line in column 5 of Table I, application no. 17, has been published in C. And the activity of the gene product thereof is the activity of photosystem I reaction centre subunit.

[91760] Accordingly, in one embodiment, the process of the present invention for producing glucose-1-phosphate in a non-human organism, like a microorganism or a plant or a part thereof, comprises increasing or generating the activity of a gene product with the activity of a gene product conferring the activity of “photosystem I reaction centre subunit”, especially from Synechocystis sp. or its functional equivalent or its homolog, e.g. the increase of
[91761] (a) a gene product of a gene comprising the nucleic acid molecule as shown in the respective line in column 5 of Table I (whereby the respective line disclose in column 7 the fine chemical glucose-1-phosphate), application no. 17, preferably the coding region thereof, or a homolog or a fragment thereof, and being depicted in the same respective line as said Smr0004, or a functional equivalent or a homolog thereof as shown in column 8 of Table I, application no. 17, preferably the coding region thereof, particularly a homolog or functional equivalent as shown in column 8 of Table I B, application no. 17, and being depicted in the same respective line as said Smr0004, and preferably the activity is increased plastidic, or
[91762] (b) a polypeptide comprising a polypeptide, a consensus sequence or at least a polypeptide motif as shown in the respective line in column 5 of Table II or in column 8 of Table IV, application no. 17, respectively, and being depicted in the same respective line as said Smr0004, or a functional equivalent or a homolog thereof as depicted in column 8 of Table II, application no. 17, preferably a homolog or functional equivalent as depicted in column 8 of Table II B, application no. 17, and being depicted in the same respective line as said Smr0004, and preferably the activity is increased plastidic, whereby the respective line disclose in column 7 the fine chemical glucose-1-phosphate.

[91763] Accordingly, in one embodiment, the molecule which activity is to be increased in the process of the invention is the gene product with an activity as a “photosystem I reaction centre subunit”, preferably it is the molecule of section (a) or (b) of this paragraph.

[91764] In particular, it was observed that in plants, especially in Arabidopsis thaliana, increasing or generating the activity of a gene product plastidic with the activity of a “photosystem I reaction centre subunit”, preferably being encoded by a gene comprising the nucleic acid sequence SEQ ID NO. 136907, preferably the coding region thereof, conferred the production of or the increase in glucose-1-phosphate compared with the wild type control.

[91765] The nucleic acid sequence of Smr0004 from Synechocystis sp., e.g. as shown in the respective line in column 5 of Table I, application no. 17, has been published in C. And the activity of the gene product thereof is the activity of photosystem I reaction centre subunit.

[91766] Accordingly, in one embodiment, the process of the present invention for producing raffinose in a non-human organism, like a microorganism or a plant or a part thereof, comprises increasing or generating the activity of a gene product with the activity of a gene product conferring the activity of “photosystem I reaction centre subunit”, especially from Synechocystis sp. or its functional equivalent or its homolog, e.g. the increase of
[91767] (a) a gene product of a gene comprising the nucleic acid molecule as shown in the respective line in column 5 of Table I (whereby the respective line disclose in column 7 the fine chemical raffinose), application no. 17, preferably the coding region thereof, or a homolog or a fragment thereof, and being depicted in the same respective line as said Smr0004, or a functional equivalent or a homolog thereof as shown in column 8 of Table I, application no. 17, preferably the coding region thereof, particularly a homolog or functional equivalent as shown in column 8 of Table I B, application no. 17, and being depicted in the same respective line as said Smr0004, and preferably the activity is increased plastidic, or
[91768] (b) a polypeptide comprising a polypeptide, a consensus sequence or at least a polypeptide motif as shown in the respective line in column 5 of Table II or in column 8 of Table IV, application no. 17, respectively, and being depicted in the same respective line as said Smr0004, or a functional equivalent or a homolog thereof as depicted in column 8 of Table II, application no. 17, preferably a homolog or functional equivalent as depicted in column 8 of Table II B, application no. 17, and being depicted in the same respective line as said Smr0004, and preferably the activity is increased plastidic, whereby the respective line disclose in column 7 the fine chemical raffinose.

[91769] Accordingly, in one embodiment, the molecule which activity is to be increased in the process of the invention is the gene product with an activity as a “photosystem I reaction centre subunit”, preferably it is the molecule of section (a) or (b) of this paragraph.

[91770] In particular, it was observed that in plants, especially in Arabidopsis thaliana, increasing or generating the activity of a gene product plastidic with the activity of a “photosystem I reaction centre subunit”, preferably being encoded by a gene comprising the nucleic acid sequence SEQ ID NO. 136907, preferably the coding region thereof, conferred the production of or the increase in raffinose compared with the wild type control.

[91771] The nucleic acid sequence of Smr0004 from Synechocystis sp., e.g. as shown in the respective line in column 5 of Table I, application no. 17, has been published in C. And the activity of the gene product thereof is the activity of photosystem I reaction centre subunit.

[91772] Accordingly, in one embodiment, the process of the present invention for producing 3,4,5-trihydroxypentanoic acid in a non-human organism, like a microorganism or a plant or a part thereof, comprises increasing or generating the activity of a gene product with the activity of a gene product conferring the activity of “photosystem I reaction centre subunit”, especially from Synechocystis sp. or its functional equivalent or its homolog, e.g. the increase of
[91773] (a) a gene product of a gene comprising the nucleic acid molecule as shown in the respective line in column 5 of Table I (whereby the respective line disclose in column 7 the fine chemical 3,4,5-trihydroxypentanoic acid), application no. 17, preferably the coding region thereof, or a homolog or a fragment thereof, and being depicted in the same respective line as said Smr0004, or a functional equivalent or a homolog thereof as shown in column 8 of Table I, application no. 17, preferably the coding region thereof, particularly a homolog or functional equivalent as shown in column 8 of Table I B, application no. 17, and being depicted in the same respective line as said Smr0004, and preferably the activity is increased plastidic, or
[91774] (b) a polypeptide comprising a polypeptide, a consensus sequence or at least a polypeptide motif as shown in the respective line in column 5 of Table II or in column 8 of Table IV, application no. 17, respectively, and being depicted in the same respective line as said Smr0004, or a functional equivalent or a homolog thereof as depicted in column 8 of Table II, application no. 17, preferably a homolog or functional equivalent as depicted in column 8 of Table II B, application no. 17, and being depicted in the same respective line as said Smr0004, and preferably the activity is increased plastidic, whereby the respective line disclose in column 7 the fine chemical 3,4,5-trihydroxypentanoic acid.

[91775] Accordingly, in one embodiment, the molecule which activity is to be increased in the process of the invention is the gene product with an activity as a “photosystem I reaction centre subunit”, preferably it is the molecule of section (a) or (b) of this paragraph.

[91776] In particular, it was observed that in plants, especially in Arabidopsis thaliana, increasing or generating the activity of a gene product plastidic with the activity of a “photosystem I reaction centre subunit”, preferably being encoded by a gene comprising the nucleic acid sequence SEQ ID NO. 136907, preferably the coding region thereof, conferred the production of or the increase in 3,4,5-trihydroxypentanoic acid compared with the wild type control.

[91777] The nucleic acid sequence of TTC0019 from Thermus thermophilus, e.g. as shown in the respective line in column 5 of Table I, application no. 17, has been published in E. And the activity of the gene product thereof is the activity of Sec-independent protein translocase subunit.

[91778] Accordingly, in one embodiment, the process of the present invention for producing fructose in a non-human organism, like a microorganism or a plant or a part thereof, comprises increasing or generating the activity of a gene product with the activity of a gene product conferring the activity of “Sec-independent protein translocase subunit”, especially from Thermus thermophilus or its functional equivalent or its homolog, e.g. the increase of
[91779] (a) a gene product of a gene comprising the nucleic acid molecule as shown in the respective line in column 5 of Table I (whereby the respective line disclose in column 7 the fine chemical fructose), application no. 17, preferably the coding region thereof, or a homolog or a fragment thereof, and being depicted in the same respective line as said TTC0019, or a functional equivalent or a homolog thereof as shown in column 8 of Table I, application no. 17, preferably the coding region thereof, particularly a homolog or functional equivalent as shown in column 8 of Table I B, application no. 17, and being depicted in the same respective line as said TTC0019, and preferably the activity is increased non-targeted, or
[91780] (b) a polypeptide comprising a polypeptide, a consensus sequence or at least a polypeptide motif as shown in the respective line in column 5 of Table II or in column 8 of Table IV, application no. 17, respectively, and being depicted in the same respective line as said TTC0019, or a functional equivalent or a homolog thereof as depicted in column 8 of Table II, application no. 17, preferably a homolog or functional equivalent as depicted in column 8 of Table II B, application no. 17, and being depicted in the same respective line as said TTC0019, and preferably the activity is increased non-targeted, whereby the respective line disclose in column 7 the fine chemical fructose.

[91781] Accordingly, in one embodiment, the molecule which activity is to be increased in the process of the invention is the gene product with an activity as a “Sec-independent protein translocase subunit”, preferably it is the molecule of section (a) or (b) of this paragraph.

[91782] In particular, it was observed that in plants, especially in Arabidopsis thaliana, increasing or generating the activity of a gene product non-targeted with the activity of a “Sec-independent protein translocase subunit”, preferably being encoded by a gene comprising the nucleic acid sequence SEQ ID NO. 12698, preferably the coding region thereof, conferred the production of or the increase in fructose compared with the wild type control.

[91783] The nucleic acid sequence of TTC0019 from Thermus thermophilus, e.g. as shown in the respective line in column 5 of Table I, application no. 17, has been published in E. And the activity of the gene product thereof is the activity of Sec-independent protein translocase subunit.

[91784] Accordingly, in one embodiment, the process of the present invention for producing glucose in a non-human organism, like a microorganism or a plant or a part thereof, comprises increasing or generating the activity of a gene product with the activity of a gene product conferring the activity of “Sec-independent protein translocase subunit”, especially from Thermus thermophilus or its functional equivalent or its homolog, e.g. the increase of
[91785] (a) a gene product of a gene comprising the nucleic acid molecule as shown in the respective line in column 5 of Table I (whereby the respective line disclose in column 7 the fine chemical glucose), application no. 17, preferably the coding region thereof, or a homolog or a fragment thereof, and being depicted in the same respective line as said TTC0019, or a functional equivalent or a homolog thereof as shown in column 8 of Table I, application no. 17, preferably the coding region thereof, particularly a homolog or functional equivalent as shown in column 8 of Table I B, application no. 17, and being depicted in the same respective line as said TTC0019, and preferably the activity is increased non-targeted, or
[91786] (b) a polypeptide comprising a polypeptide, a consensus sequence or at least a polypeptide motif as shown in the respective line in column 5 of Table II or in column 8 of Table IV, application no. 17, respectively, and being depicted in the same respective line as said TTC0019, or a functional equivalent or a homolog thereof as depicted in column 8 of Table II, application no. 17, preferably a homolog or functional equivalent as depicted in column 8 of Table II B, application no. 17, and being depicted in the same respective line as said TTC0019, and preferably the activity is increased non-targeted, whereby the respective line disclose in column 7 the fine chemical glucose.

[91787] Accordingly, in one embodiment, the molecule which activity is to be increased in the process of the invention is the gene product with an activity as a “Sec-independent protein translocase subunit”, preferably it is the molecule of section (a) or (b) of this paragraph.

[91788] In particular, it was observed that in plants, especially in Arabidopsis thaliana, increasing or generating the activity of a gene product non-targeted with the activity of a “Sec-independent protein translocase subunit”, preferably being encoded by a gene comprising the nucleic acid sequence SEQ ID NO. 12698, preferably the coding region thereof, conferred the production of or the increase in glucose compared with the wild type control.

[91789] The nucleic acid sequence of TTC0019 from Thermus thermophilus, e.g. as shown in the respective line in column 5 of Table I, application no. 17, has been published in E. And the activity of the gene product thereof is the activity of Sec-independent protein translocase subunit.

[91790] Accordingly, in one embodiment, the process of the present invention for producing sedoheptulose-7-phosphate in a non-human organism, like a microorganism or a plant or a part thereof, comprises increasing or generating the activity of a gene product with the activity of a gene product conferring the activity of “Sec-independent protein translocase subunit”, especially from Thermus thermophilus or its functional equivalent or its homolog, e.g. the increase of
[91791] (a) a gene product of a gene comprising the nucleic acid molecule as shown in the respective line in column 5 of Table I (whereby the respective line disclose in column 7 the fine chemical sedoheptulose-7-phosphate), application no. 17, preferably the coding region thereof, or a homolog or a fragment thereof, and being depicted in the same respective line as said TTC0019, or a functional equivalent or a homolog thereof as shown in column 8 of Table I, application no. 17, preferably the coding region thereof, particularly a homolog or functional equivalent as shown in column 8 of Table I B, application no. 17, and being depicted in the same respective line as said TTC0019, and preferably the activity is increased non-targeted, or
[91792] (b) a polypeptide comprising a polypeptide, a consensus sequence or at least a polypeptide motif as shown in the respective line in column 5 of Table II or in column 8 of Table IV, application no. 17, respectively, and being depicted in the same respective line as said TTC0019, or a functional equivalent or a homolog thereof as depicted in column 8 of Table II, application no. 17, preferably a homolog or functional equivalent as depicted in column 8 of Table II B, application no. 17, and being depicted in the same respective line as said TTC0019, and preferably the activity is increased non-targeted, whereby the respective line disclose in column 7 the fine chemical sedoheptulose-7-phosphate.

[91793] Accordingly, in one embodiment, the molecule which activity is to be increased in the process of the invention is the gene product with an activity as a “Sec-independent protein translocase subunit”, preferably it is the molecule of section (a) or (b) of this paragraph.

[91794] In particular, it was observed that in plants, especially in Arabidopsis thaliana, increasing or generating the activity of a gene product non-targeted with the activity of a “Sec-independent protein translocase subunit”, preferably being encoded by a gene comprising the nucleic acid sequence SEQ ID NO. 12698, preferably the coding region thereof, conferred the production of or the increase in sedoheptulose-7-phosphate compared with the wild type control.

[91795] The nucleic acid sequence of TTC0035 from Thermus thermophilus, e.g. as shown in the respective line in column 5 of Table I, application no. 17, has been published in E. And the activity of the gene product thereof is the activity of cell division protein.

[91796] Accordingly, in one embodiment, the process of the present invention for producing fructose in a non-human organism, like a microorganism or a plant or a part thereof, comprises increasing or generating the activity of a gene product with the activity of a gene product conferring the activity of “cell division protein”, especially from Thermus thermophilus or its functional equivalent or its homolog, e.g. the increase of
[91797] (a) a gene product of a gene comprising the nucleic acid molecule as shown in the respective line in column 5 of Table I (whereby the respective line disclose in column 7 the fine chemical fructose), application no. 17, preferably the coding region thereof, or a homolog or a fragment thereof, and being depicted in the same respective line as said TTC0035, or a functional equivalent or a homolog thereof as shown in column 8 of Table I, application no. 17, preferably the coding region thereof, particularly a homolog or functional equivalent as shown in column 8 of Table I B, application no. 17, and being depicted in the same respective line as said TTC0035, and preferably the activity is increased non-targeted, or
[91798] (b) a polypeptide comprising a polypeptide, a consensus sequence or at least a polypeptide motif as shown in the respective line in column 5 of Table II or in column 8 of Table IV, application no. 17, respectively, and being depicted in the same respective line as said TTC0035, or a functional equivalent or a homolog thereof as depicted in column 8 of Table II, application no. 17, preferably a homolog or functional equivalent as depicted in column 8 of Table II B, application no. 17, and being depicted in the same respective line as said TTC0035, and preferably the activity is increased non-targeted, whereby the respective line disclose in column 7 the fine chemical fructose.

[91799] Accordingly, in one embodiment, the molecule which activity is to be increased in the process of the invention is the gene product with an activity as a “cell division protein”, preferably it is the molecule of section (a) or (b) of this paragraph.

[91800] In particular, it was observed that in plants, especially in Arabidopsis thaliana, increasing or generating the activity of a gene product non-targeted with the activity of a “cell division protein”, preferably being encoded by a gene comprising the nucleic acid sequence SEQ ID NO. 60301, preferably the coding region thereof, conferred the production of or the increase in fructose compared with the wild type control.

[91801] The nucleic acid sequence of TTC0035 from Thermus thermophilus, e.g. as shown in the respective line in column 5 of Table I, application no. 17, has been published in E. And the activity of the gene product thereof is the activity of cell division protein.

[91802] Accordingly, in one embodiment, the process of the present invention for producing glucose in a non-human organism, like a microorganism or a plant or a part thereof, comprises increasing or generating the activity of a gene product with the activity of a gene product conferring the activity of “cell division protein”, especially from Thermus thermophilus or its functional equivalent or its homolog, e.g. the increase of
[91803] (a) a gene product of a gene comprising the nucleic acid molecule as shown in the respective line in column 5 of Table I (whereby the respective line disclose in column 7 the fine chemical glucose), application no. 17, preferably the coding region thereof, or a homolog or a fragment thereof, and being depicted in the same respective line as said TTC0035, or a functional equivalent or a homolog thereof as shown in column 8 of Table I, application no. 17, preferably the coding region thereof, particularly a homolog or functional equivalent as shown in column 8 of Table I B, application no. 17, and being depicted in the same respective line as said TTC0035, and preferably the activity is increased non-targeted, or
[91804] (b) a polypeptide comprising a polypeptide, a consensus sequence or at least a polypeptide motif as shown in the respective line in column 5 of Table II or in column 8 of Table IV, application no. 17, respectively, and being depicted in the same respective line as said TTC0035, or a functional equivalent or a homolog thereof as depicted in column 8 of Table II, application no. 17, preferably a homolog or functional equivalent as depicted in column 8 of Table II B, application no. 17, and being depicted in the same respective line as said TTC0035, and preferably the activity is increased non-targeted, whereby the respective line disclose in column 7 the fine chemical glucose.

[91805] Accordingly, in one embodiment, the molecule which activity is to be increased in the process of the invention is the gene product with an activity as a “cell division protein”, preferably it is the molecule of section (a) or (b) of this paragraph.

[91806] In particular, it was observed that in plants, especially in Arabidopsis thaliana, increasing or generating the activity of a gene product non-targeted with the activity of a “cell division protein”, preferably being encoded by a gene comprising the nucleic acid sequence SEQ ID NO. 60301, preferably the coding region thereof, conferred the production of or the increase in glucose compared with the wild type control.

[91807] The nucleic acid sequence of TTC0035 from Thermus thermophilus, e.g. as shown in the respective line in column 5 of Table I, application no. 17, has been published in E. And the activity of the gene product thereof is the activity of cell division protein.

[91808] Accordingly, in one embodiment, the process of the present invention for producing sucrose in a non-human organism, like a microorganism or a plant or a part thereof, comprises increasing or generating the activity of a gene product with the activity of a gene product conferring the activity of “cell division protein”, especially from Thermus thermophilus or its functional equivalent or its homolog, e.g. the increase of
[91809] (a) a gene product of a gene comprising the nucleic acid molecule as shown in the respective line in column 5 of Table I (whereby the respective line disclose in column 7 the fine chemical sucrose), application no. 17, preferably the coding region thereof, or a homolog or a fragment thereof, and being depicted in the same respective line as said TTC0035, or a functional equivalent or a homolog thereof as shown in column 8 of Table I, application no. 17, preferably the coding region thereof, particularly a homolog or functional equivalent as shown in column 8 of Table I B, application no. 17, and being depicted in the same respective line as said TTC0035, and preferably the activity is increased non-targeted, or
[91810] (b) a polypeptide comprising a polypeptide, a consensus sequence or at least a polypeptide motif as shown in the respective line in column 5 of Table II or in column 8 of Table IV, application no. 17, respectively, and being depicted in the same respective line as said TTC0035, or a functional equivalent or a homolog thereof as depicted in column 8 of Table II, application no. 17, preferably a homolog or functional equivalent as depicted in column 8 of Table II B, application no. 17, and being depicted in the same respective line as said TTC0035, and preferably the activity is increased non-targeted, whereby the respective line disclose in column 7 the fine chemical sucrose.

[91811] Accordingly, in one embodiment, the molecule which activity is to be increased in the process of the invention is the gene product with an activity as a “cell division protein”, preferably it is the molecule of section (a) or (b) of this paragraph.

[91812] In particular, it was observed that in plants, especially in Arabidopsis thaliana, increasing or generating the activity of a gene product non-targeted with the activity of a “cell division protein”, preferably being encoded by a gene comprising the nucleic acid sequence SEQ ID NO. 60301, preferably the coding region thereof, conferred the production of or the increase in sucrose compared with the wild type control.

[91813] The nucleic acid sequence of TTC0216 from Thermus thermophilus, e.g. as shown in the respective line in column 5 of Table I, application no. 17, has been published in E. And the activity of the gene product thereof is the activity of branched-chain amino acid ABC transporter permease protein.

[91814] Accordingly, in one embodiment, the process of the present invention for producing glucose-1-phosphate in a non-human organism, like a microorganism or a plant or a part thereof, comprises increasing or generating the activity of a gene product with the activity of a gene product conferring the activity of “branched-chain amino acid ABC transporter permease protein”, especially from Thermus thermophilus or its functional equivalent or its homolog, e.g. the increase of
[91815] (a) a gene product of a gene comprising the nucleic acid molecule as shown in the respective line in column 5 of Table I (whereby the respective line disclose in column 7 the fine chemical glucose-1-phosphate), application no. 17, preferably the coding region thereof, or a homolog or a fragment thereof, and being depicted in the same respective line as said TTC0216, or a functional equivalent or a homolog thereof as shown in column 8 of Table I, application no. 17, preferably the coding region thereof, particularly a homolog or functional equivalent as shown in column 8 of Table I B, application no. 17, and being depicted in the same respective line as said TTC0216, and preferably the activity is increased non-targeted, or
[91816] (b) a polypeptide comprising a polypeptide, a consensus sequence or at least a polypeptide motif as shown in the respective line in column 5 of Table II or in column 8 of Table IV, application no. 17, respectively, and being depicted in the same respective line as said TTC0216, or a functional equivalent or a homolog thereof as depicted in column 8 of Table II, application no. 17, preferably a homolog or functional equivalent as depicted in column 8 of Table II B, application no. 17, and being depicted in the same respective line as said TTC0216, and preferably the activity is increased non-targeted, whereby the respective line disclose in column 7 the fine chemical glucose-1-phosphate.

[91817] Accordingly, in one embodiment, the molecule which activity is to be increased in the process of the invention is the gene product with an activity as a “branched-chain amino acid ABC transporter permease protein”, preferably it is the molecule of section (a) or (b) of this paragraph.

[91818] In particular, it was observed that in plants, especially in Arabidopsis thaliana, increasing or generating the activity of a gene product non-targeted with the activity of a “branched-chain amino acid ABC transporter permease protein”, preferably being encoded by a gene comprising the nucleic acid sequence SEQ ID NO. 60859, preferably the coding region thereof, conferred the production of or the increase in glucose-1-phosphate compared with the wild type control.

[91819] The nucleic acid sequence of TTC0216 from Thermus thermophilus, e.g. as shown in the respective line in column 5 of Table I, application no. 17, has been published in E. And the activity of the gene product thereof is the activity of branched-chain amino acid ABC transporter permease protein.

[91820] Accordingly, in one embodiment, the process of the present invention for producing 3,4,5-trihydroxypentanoic acid in a non-human organism, like a microorganism or a plant or a part thereof, comprises increasing or generating the activity of a gene product with the activity of a gene product conferring the activity of “branched-chain amino acid ABC transporter permease protein”, especially from Thermus thermophilus or its functional equivalent or its homolog, e.g. the increase of
[91821] (a) a gene product of a gene comprising the nucleic acid molecule as shown in the respective line in column 5 of Table I (whereby the respective line disclose in column 7 the fine chemical 3,4,5-trihydroxypentanoic acid), application no. 17, preferably the coding region thereof, or a homolog or a fragment thereof, and being depicted in the same respective line as said TTC0216, or a functional equivalent or a homolog thereof as shown in column 8 of Table I, application no. 17, preferably the coding region thereof, particularly a homolog or functional equivalent as shown in column 8 of Table I B, application no. 17, and being depicted in the same respective line as said TTC0216, and preferably the activity is increased non-targeted, or
[91822] (b) a polypeptide comprising a polypeptide, a consensus sequence or at least a polypeptide motif as shown in the respective line in column 5 of Table II or in column 8 of Table IV, application no. 17, respectively, and being depicted in the same respective line as said TTC0216, or a functional equivalent or a homolog thereof as depicted in column 8 of Table II, application no. 17, preferably a homolog or functional equivalent as depicted in column 8 of Table II B, application no. 17, and being depicted in the same respective line as said TTC0216, and preferably the activity is increased non-targeted, whereby the respective line disclose in column 7 the fine chemical 3,4,5-trihydroxypentanoic acid.

[91823] Accordingly, in one embodiment, the molecule which activity is to be increased in the process of the invention is the gene product with an activity as a “branched-chain amino acid ABC transporter permease protein”, preferably it is the molecule of section (a) or (b) of this paragraph.

[91824] In particular, it was observed that in plants, especially in Arabidopsis thaliana, increasing or generating the activity of a gene product non-targeted with the activity of a “branched-chain amino acid ABC transporter permease protein”, preferably being encoded by a gene comprising the nucleic acid sequence SEQ ID NO. 60859, preferably the coding region thereof, conferred the production of or the increase in 3,4,5-trihydroxypentanoic acid compared with the wild type control.

[91825] The nucleic acid sequence of TTC0865 from Thermus thermophilus, e.g. as shown in the respective line in column 5 of Table I, application no. 17, has been published in E. And the activity of the gene product thereof is the activity of 3-isopropylmalate dehydratase large subunit.

[91826] Accordingly, in one embodiment, the process of the present invention for producing myo-inositol in a non-human organism, like a microorganism or a plant or a part thereof, comprises increasing or generating the activity of a gene product with the activity of a gene product conferring the activity of “3-isopropylmalate dehydratase large subunit”, especially from Thermus thermophilus or its functional equivalent or its homolog, e.g. the increase of
[91827] (a) a gene product of a gene comprising the nucleic acid molecule as shown in the respective line in column 5 of Table I (whereby the respective line disclose in column 7 the fine chemical myo-inositol), application no. 17, preferably the coding region thereof, or a homolog or a fragment thereof, and being depicted in the same respective line as said TTC0865, or a functional equivalent or a homolog thereof as shown in column 8 of Table I, application no. 17, preferably the coding region thereof, particularly a homolog or functional equivalent as shown in column 8 of Table I B, application no. 17, and being depicted in the same respective line as said TTC0865, and preferably the activity is increased non-targeted, or
[91828] (b) a polypeptide comprising a polypeptide, a consensus sequence or at least a polypeptide motif as shown in the respective line in column 5 of Table II or in column 8 of Table IV, application no. 17, respectively, and being depicted in the same respective line as said TTC0865, or a functional equivalent or a homolog thereof as depicted in column 8 of Table II, application no. 17, preferably a homolog or functional equivalent as depicted in column 8 of Table II B, application no. 17, and being depicted in the same respective line as said TTC0865, and preferably the activity is increased non-targeted, whereby the respective line disclose in column 7 the fine chemical myo-inositol.

[91829] Accordingly, in one embodiment, the molecule which activity is to be increased in the process of the invention is the gene product with an activity as a “3-isopropylmalate dehydratase large subunit”, preferably it is the molecule of section (a) or (b) of this paragraph.

[91830] In particular, it was observed that in plants, especially in Arabidopsis thaliana, increasing or generating the activity of a gene product non-targeted with the activity of a “3-isopropylmalate dehydratase large subunit”, preferably being encoded by a gene comprising the nucleic acid sequence SEQ ID NO. 147944, preferably the coding region thereof, conferred the production of or the increase in myo-inositol compared with the wild type control.

[91831] The nucleic acid sequence of TTC1193 from Thermus thermophilus, e.g. as shown in the respective line in column 5 of Table I, application no. 17, has been published in E. And the activity of the gene product thereof is the activity of multiple antibiotic resistance protein.

[91832] Accordingly, in one embodiment, the process of the present invention for producing fructose in a non-human organism, like a microorganism or a plant or a part thereof, comprises increasing or generating the activity of a gene product with the activity of a gene product conferring the activity of “multiple antibiotic resistance protein”, especially from Thermus thermophilus or its functional equivalent or its homolog, e.g. the increase of
[91833] (a) a gene product of a gene comprising the nucleic acid molecule as shown in the respective line in column 5 of Table I (whereby the respective line disclose in column 7 the fine chemical fructose), application no. 17, preferably the coding region thereof, or a homolog or a fragment thereof, and being depicted in the same respective line as said TTC1193, or a functional equivalent or a homolog thereof as shown in column 8 of Table I, application no. 17, preferably the coding region thereof, particularly a homolog or functional equivalent as shown in column 8 of Table I B, application no. 17, and being depicted in the same respective line as said TTC1193, and preferably the activity is increased non-targeted, or
[91834] (b) a polypeptide comprising a polypeptide, a consensus sequence or at least a polypeptide motif as shown in the respective line in column 5 of Table II or in column 8 of Table IV, application no. 17, respectively, and being depicted in the same respective line as said TTC1193, or a functional equivalent or a homolog thereof as depicted in column 8 of Table II, application no. 17, preferably a homolog or functional equivalent as depicted in column 8 of Table II B, application no. 17, and being depicted in the same respective line as said TTC1193, and preferably the activity is increased non-targeted, whereby the respective line disclose in column 7 the fine chemical fructose.

[91835] Accordingly, in one embodiment, the molecule which activity is to be increased in the process of the invention is the gene product with an activity as a “multiple antibiotic resistance protein”, preferably it is the molecule of section (a) or (b) of this paragraph.

[91836] In particular, it was observed that in plants, especially in Arabidopsis thaliana, increasing or generating the activity of a gene product non-targeted with the activity of a “multiple antibiotic resistance protein”, preferably being encoded by a gene comprising the nucleic acid sequence SEQ ID NO. 61723, preferably the coding region thereof, conferred the production of or the increase in fructose compared with the wild type control.

[91837] The nucleic acid sequence of TTC1193 from Thermus thermophilus, e.g. as shown in the respective line in column 5 of Table I, application no. 17, has been published in E. And the activity of the gene product thereof is the activity of multiple antibiotic resistance protein.

[91838] Accordingly, in one embodiment, the process of the present invention for producing glucose in a non-human organism, like a microorganism or a plant or a part thereof, comprises increasing or generating the activity of a gene product with the activity of a gene product conferring the activity of “multiple antibiotic resistance protein”, especially from Thermus thermophilus or its functional equivalent or its homolog, e.g. the increase of
[91839] (a) a gene product of a gene comprising the nucleic acid molecule as shown in the respective line in column 5 of Table I (whereby the respective line disclose in column 7 the fine chemical glucose), application no. 17, preferably the coding region thereof, or a homolog or a fragment thereof, and being depicted in the same respective line as said TTC1193, or a functional equivalent or a homolog thereof as shown in column 8 of Table I, application no. 17, preferably the coding region thereof, particularly a homolog or functional equivalent as shown in column 8 of Table I B, application no. 17, and being depicted in the same respective line as said TTC1193, and preferably the activity is increased non-targeted, or
[91840] (b) a polypeptide comprising a polypeptide, a consensus sequence or at least a polypeptide motif as shown in the respective line in column 5 of Table II or in column 8 of Table IV, application no. 17, respectively, and being depicted in the same respective line as said TTC1193, or a functional equivalent or a homolog thereof as depicted in column 8 of Table II, application no. 17, preferably a homolog or functional equivalent as depicted in column 8 of Table II B, application no. 17, and being depicted in the same respective line as said TTC1193, and preferably the activity is increased non-targeted, whereby the respective line disclose in column 7 the fine chemical glucose.

[91841] Accordingly, in one embodiment, the molecule which activity is to be increased in the process of the invention is the gene product with an activity as a “multiple antibiotic resistance protein”, preferably it is the molecule of section (a) or (b) of this paragraph.

[91842] In particular, it was observed that in plants, especially in Arabidopsis thaliana, increasing or generating the activity of a gene product non-targeted with the activity of a “multiple antibiotic resistance protein”, preferably being encoded by a gene comprising the nucleic acid sequence SEQ ID NO. 61723, preferably the coding region thereof, conferred the production of or the increase in glucose compared with the wild type control.

[91843] The nucleic acid sequence of TTC1193 from Thermus thermophilus, e.g. as shown in the respective line in column 5 of Table I, application no. 17, has been published in E. And the activity of the gene product thereof is the activity of multiple antibiotic resistance protein.

[91844] Accordingly, in one embodiment, the process of the present invention for producing glucose-1-phosphate in a non-human organism, like a microorganism or a plant or a part thereof, comprises increasing or generating the activity of a gene product with the activity of a gene product conferring the activity of “multiple antibiotic resistance protein”, especially from Thermus thermophilus or its functional equivalent or its homolog, e.g. the increase of
[91845] (a) a gene product of a gene comprising the nucleic acid molecule as shown in the respective line in column 5 of Table I (whereby the respective line disclose in column 7 the fine chemical glucose-1-phosphate), application no. 17, preferably the coding region thereof, or a homolog or a fragment thereof, and being depicted in the same respective line as said TTC1193, or a functional equivalent or a homolog thereof as shown in column 8 of Table I, application no. 17, preferably the coding region thereof, particularly a homolog or functional equivalent as shown in column 8 of Table I B, application no. 17, and being depicted in the same respective line as said TTC1193, and preferably the activity is increased non-targeted, or
[91846] (b) a polypeptide comprising a polypeptide, a consensus sequence or at least a polypeptide motif as shown in the respective line in column 5 of Table II or in column 8 of Table IV, application no. 17, respectively, and being depicted in the same respective line as said TTC1193, or a functional equivalent or a homolog thereof as depicted in column 8 of Table II, application no. 17, preferably a homolog or functional equivalent as depicted in column 8 of Table II B, application no. 17, and being depicted in the same respective line as said TTC1193, and preferably the activity is increased non-targeted, whereby the respective line disclose in column 7 the fine chemical glucose-1-phosphate.

[91847] Accordingly, in one embodiment, the molecule which activity is to be increased in the process of the invention is the gene product with an activity as a “multiple antibiotic resistance protein”, preferably it is the molecule of section (a) or (b) of this paragraph.

[91848] In particular, it was observed that in plants, especially in Arabidopsis thaliana, increasing or generating the activity of a gene product non-targeted with the activity of a “multiple antibiotic resistance protein”, preferably being encoded by a gene comprising the nucleic acid sequence SEQ ID NO. 61723, preferably the coding region thereof, conferred the production of or the increase in glucose-1-phosphate compared with the wild type control.

[91849] The nucleic acid sequence of TTC1386 from Thermus thermophilus, e.g. as shown in the respective line in column 5 of Table I, application no. 17, has been published in E. And the activity of the gene product thereof is the activity of TTC1386-protein.

[91850] Accordingly, in one embodiment, the process of the present invention for producing fructose in a non-human organism, like a microorganism or a plant or a part thereof, comprises increasing or generating the activity of a gene product with the activity of a gene product conferring the activity of “TTC1386-protein”, especially from Thermus thermophilus or its functional equivalent or its homolog, e.g. the increase of
[91851] (a) a gene product of a gene comprising the nucleic acid molecule as shown in the respective line in column 5 of Table I (whereby the respective line disclose in column 7 the fine chemical fructose), application no. 17, preferably the coding region thereof, or a homolog or a fragment thereof, and being depicted in the same respective line as said TTC1386, or a functional equivalent or a homolog thereof as shown in column 8 of Table I, application no. 17, preferably the coding region thereof, particularly a homolog or functional equivalent as shown in column 8 of Table I B, application no. 17, and being depicted in the same respective line as said TTC1386, and preferably the activity is increased non-targeted, or
[91852] (b) a polypeptide comprising a polypeptide, a consensus sequence or at least a polypeptide motif as shown in the respective line in column 5 of Table II or in column 8 of Table IV, application no. 17, respectively, and being depicted in the same respective line as said TTC1386, or a functional equivalent or a homolog thereof as depicted in column 8 of Table II, application no. 17, preferably a homolog or functional equivalent as depicted in column 8 of Table II B, application no. 17, and being depicted in the same respective line as said TTC1386, and preferably the activity is increased non-targeted, whereby the respective line disclose in column 7 the fine chemical fructose.

[91853] Accordingly, in one embodiment, the molecule which activity is to be increased in the process of the invention is the gene product with an activity as a “TTC1386-protein”, preferably it is the molecule of section (a) or (b) of this paragraph.

[91854] In particular, it was observed that in plants, especially in Arabidopsis thaliana, increasing or generating the activity of a gene product non-targeted with the activity of a “TTC1386-protein”, preferably being encoded by a gene comprising the nucleic acid sequence SEQ ID NO. 62079, preferably the coding region thereof, conferred the production of or the increase in fructose compared with the wild type control.

[91855] The nucleic acid sequence of TTC1386 from Thermus thermophilus, e.g. as shown in the respective line in column 5 of Table I, application no. 17, has been published in E. And the activity of the gene product thereof is the activity of TTC1386-protein.

[91856] Accordingly, in one embodiment, the process of the present invention for producing glucose in a non-human organism, like a microorganism or a plant or a part thereof, comprises increasing or generating the activity of a gene product with the activity of a gene product conferring the activity of “TTC1386-protein”, especially from Thermus thermophilus or its functional equivalent or its homolog, e.g. the increase of
[91857] (a) a gene product of a gene comprising the nucleic acid molecule as shown in the respective line in column 5 of Table I (whereby the respective line disclose in column 7 the fine chemical glucose), application no. 17, preferably the coding region thereof, or a homolog or a fragment thereof, and being depicted in the same respective line as said TTC1386, or a functional equivalent or a homolog thereof as shown in column 8 of Table I, application no. 17, preferably the coding region thereof, particularly a homolog or functional equivalent as shown in column 8 of Table I B, application no. 17, and being depicted in the same respective line as said TTC1386, and preferably the activity is increased non-targeted, or
[91858] (b) a polypeptide comprising a polypeptide, a consensus sequence or at least a polypeptide motif as shown in the respective line in column 5 of Table II or in column 8 of Table IV, application no. 17, respectively, and being depicted in the same respective line as said TTC1386, or a functional equivalent or a homolog thereof as depicted in column 8 of Table II, application no. 17, preferably a homolog or functional equivalent as depicted in column 8 of Table II B, application no. 17, and being depicted in the same respective line as said TTC1386, and preferably the activity is increased non-targeted, whereby the respective line disclose in column 7 the fine chemical glucose.

[91859] Accordingly, in one embodiment, the molecule which activity is to be increased in the process of the invention is the gene product with an activity as a “TTC1386-protein”, preferably it is the molecule of section (a) or (b) of this paragraph.

[91860] In particular, it was observed that in plants, especially in Arabidopsis thaliana, increasing or generating the activity of a gene product non-targeted with the activity of a “TTC1386-protein”, preferably being encoded by a gene comprising the nucleic acid sequence SEQ ID NO. 62079, preferably the coding region thereof, conferred the production of or the increase in glucose compared with the wild type control.

[91861] The nucleic acid sequence of TTC1550 from Thermus thermophilus, e.g. as shown in the respective line in column 5 of Table I, application no. 17, has been published in E. And the activity of the gene product thereof is the activity of homocitrate synthase.

[91862] Accordingly, in one embodiment, the process of the present invention for producing fructose in a non-human organism, like a microorganism or a plant or a part thereof, comprises increasing or generating the activity of a gene product with the activity of a gene product conferring the activity of “homocitrate synthase”, especially from Thermus thermophilus or its functional equivalent or its homolog, e.g. the increase of
[91863] (a) a gene product of a gene comprising the nucleic acid molecule as shown in the respective line in column 5 of Table I (whereby the respective line disclose in column 7 the fine chemical fructose), application no. 17, preferably the coding region thereof, or a homolog or a fragment thereof, and being depicted in the same respective line as said TTC1550, or a functional equivalent or a homolog thereof as shown in column 8 of Table I, application no. 17, preferably the coding region thereof, particularly a homolog or functional equivalent as shown in column 8 of Table I B, application no. 17, and being depicted in the same respective line as said TTC1550, and preferably the activity is increased non-targeted, or
[91864] (b) a polypeptide comprising a polypeptide, a consensus sequence or at least a polypeptide motif as shown in the respective line in column 5 of Table II or in column 8 of Table IV, application no. 17, respectively, and being depicted in the same respective line as said TTC1550, or a functional equivalent or a homolog thereof as depicted in column 8 of Table II, application no. 17, preferably a homolog or functional equivalent as depicted in column 8 of Table II B, application no. 17, and being depicted in the same respective line as said TTC1550, and preferably the activity is increased non-targeted, whereby the respective line disclose in column 7 the fine chemical fructose.

[91865] Accordingly, in one embodiment, the molecule which activity is to be increased in the process of the invention is the gene product with an activity as a “homocitrate synthase”, preferably it is the molecule of section (a) or (b) of this paragraph.

[91866] In particular, it was observed that in plants, especially in Arabidopsis thaliana, increasing or generating the activity of a gene product non-targeted with the activity of a “homocitrate synthase”, preferably being encoded by a gene comprising the nucleic acid sequence SEQ ID NO. 12974, preferably the coding region thereof, conferred the production of or the increase in fructose compared with the wild type control.

[91867] The nucleic acid sequence of TTC1550 from Thermus thermophilus, e.g. as shown in the respective line in column 5 of Table I, application no. 17, has been published in E. And the activity of the gene product thereof is the activity of homocitrate synthase.

[91868] Accordingly, in one embodiment, the process of the present invention for producing glucose-1-phosphate in a non-human organism, like a microorganism or a plant or a part thereof, comprises increasing or generating the activity of a gene product with the activity of a gene product conferring the activity of “homocitrate synthase”, especially from Thermus thermophilus or its functional equivalent or its homolog, e.g. the increase of
[91869] (a) a gene product of a gene comprising the nucleic acid molecule as shown in the respective line in column 5 of Table I (whereby the respective line disclose in column 7 the fine chemical glucose-1-phosphate), application no. 17, preferably the coding region thereof, or a homolog or a fragment thereof, and being depicted in the same respective line as said TTC1550, or a functional equivalent or a homolog thereof as shown in column 8 of Table I, application no. 17, preferably the coding region thereof, particularly a homolog or functional equivalent as shown in column 8 of Table I B, application no. 17, and being depicted in the same respective line as said TTC1550, and preferably the activity is increased non-targeted, or
[91870] (b) a polypeptide comprising a polypeptide, a consensus sequence or at least a polypeptide motif as shown in the respective line in column 5 of Table II or in column 8 of Table IV, application no. 17, respectively, and being depicted in the same respective line as said TTC1550, or a functional equivalent or a homolog thereof as depicted in column 8 of Table II, application no. 17, preferably a homolog or functional equivalent as depicted in column 8 of Table II B, application no. 17, and being depicted in the same respective line as said TTC1550, and preferably the activity is increased non-targeted, whereby the respective line disclose in column 7 the fine chemical glucose-1-phosphate.

[91871] Accordingly, in one embodiment, the molecule which activity is to be increased in the process of the invention is the gene product with an activity as a “homocitrate synthase”, preferably it is the molecule of section (a) or (b) of this paragraph.

[91872] In particular, it was observed that in plants, especially in Arabidopsis thaliana, increasing or generating the activity of a gene product non-targeted with the activity of a “homocitrate synthase”, preferably being encoded by a gene comprising the nucleic acid sequence SEQ ID NO. 12974, preferably the coding region thereof, conferred the production of or the increase in glucose-1-phosphate compared with the wild type control.

[91873] The nucleic acid sequence of TTC1550 from Thermus thermophilus, e.g. as shown in the respective line in column 5 of Table I, application no. 17, has been published in E. And the activity of the gene product thereof is the activity of homocitrate synthase.

[91874] Accordingly, in one embodiment, the process of the present invention for producing sucrose in a non-human organism, like a microorganism or a plant or a part thereof, comprises increasing or generating the activity of a gene product with the activity of a gene product conferring the activity of “homocitrate synthase”, especially from Thermus thermophilus or its functional equivalent or its homolog, e.g. the increase of
[91875] (a) a gene product of a gene comprising the nucleic acid molecule as shown in the respective line in column 5 of Table I (whereby the respective line disclose in column 7 the fine chemical sucrose), application no. 17, preferably the coding region thereof, or a homolog or a fragment thereof, and being depicted in the same respective line as said TTC1550, or a functional equivalent or a homolog thereof as shown in column 8 of Table I, application no. 17, preferably the coding region thereof, particularly a homolog or functional equivalent as shown in column 8 of Table I B, application no. 17, and being depicted in the same respective line as said TTC1550, and preferably the activity is increased non-targeted, or
[91876] (b) a polypeptide comprising a polypeptide, a consensus sequence or at least a polypeptide motif as shown in the respective line in column 5 of Table II or in column 8 of Table IV, application no. 17, respectively, and being depicted in the same respective line as said TTC1550, or a functional equivalent or a homolog thereof as depicted in column 8 of Table II, application no. 17, preferably a homolog or functional equivalent as depicted in column 8 of Table II B, application no. 17, and being depicted in the same respective line as said TTC1550, and preferably the activity is increased non-targeted, whereby the respective line disclose in column 7 the fine chemical sucrose.

[91877] Accordingly, in one embodiment, the molecule which activity is to be increased in the process of the invention is the gene product with an activity as a “homocitrate synthase”, preferably it is the molecule of section (a) or (b) of this paragraph.

[91878] In particular, it was observed that in plants, especially in Arabidopsis thaliana, increasing or generating the activity of a gene product non-targeted with the activity of a “homocitrate synthase”, preferably being encoded by a gene comprising the nucleic acid sequence SEQ ID NO. 12974, preferably the coding region thereof, conferred the production of or the increase in sucrose compared with the wild type control.

[91879] The nucleic acid sequence of TTC1893 from Thermus thermophilus, e.g. as shown in the respective line in column 5 of Table I, application no. 17, has been published in E. And the activity of the gene product thereof is the activity of permease.

[91880] Accordingly, in one embodiment, the process of the present invention for producing raffinose in a non-human organism, like a microorganism or a plant or a part thereof, comprises increasing or generating the activity of a gene product with the activity of a gene product conferring the activity of “permease”, especially from Thermus thermophilus or its functional equivalent or its homolog, e.g. the increase of
[91881] (a) a gene product of a gene comprising the nucleic acid molecule as shown in the respective line in column 5 of Table I (whereby the respective line disclose in column 7 the fine chemical raffinose), application no. 17, preferably the coding region thereof, or a homolog or a fragment thereof, and being depicted in the same respective line as said TTC1893, or a functional equivalent or a homolog thereof as shown in column 8 of Table I, application no. 17, preferably the coding region thereof, particularly a homolog or functional equivalent as shown in column 8 of Table I B, application no. 17, and being depicted in the same respective line as said TTC1893, and preferably the activity is increased non-targeted, or
[91882] (b) a polypeptide comprising a polypeptide, a consensus sequence or at least a polypeptide motif as shown in the respective line in column 5 of Table II or in column 8 of Table IV, application no. 17, respectively, and being depicted in the same respective line as said TTC1893, or a functional equivalent or a homolog thereof as depicted in column 8 of Table II, application no. 17, preferably a homolog or functional equivalent as depicted in column 8 of Table II B, application no. 17, and being depicted in the same respective line as said TTC1893, and preferably the activity is increased non-targeted, whereby the respective line disclose in column 7 the fine chemical raffinose.

[91883] Accordingly, in one embodiment, the molecule which activity is to be increased in the process of the invention is the gene product with an activity as a “permease”, preferably it is the molecule of section (a) or (b) of this paragraph.

[91884] In particular, it was observed that in plants, especially in Arabidopsis thaliana, increasing or generating the activity of a gene product non-targeted with the activity of a “permease”, preferably being encoded by a gene comprising the nucleic acid sequence SEQ ID NO. 148559, preferably the coding region thereof, conferred the production of or the increase in raffinose compared with the wild type control.

[91885] The nucleic acid sequence of TTC1893 from Thermus thermophilus, e.g. as shown in the respective line in column 5 of Table I, application no. 17, has been published in E. And the activity of the gene product thereof is the activity of permease.

[91886] Accordingly, in one embodiment, the process of the present invention for producing 3,4,5-trihydroxypentanoic acid in a non-human organism, like a microorganism or a plant or a part thereof, comprises increasing or generating the activity of a gene product with the activity of a gene product conferring the activity of “permease”, especially from Thermus thermophilus or its functional equivalent or its homolog, e.g. the increase of
[91887] (a) a gene product of a gene comprising the nucleic acid molecule as shown in the respective line in column 5 of Table I (whereby the respective line disclose in column 7 the fine chemical 3,4,5-trihydroxypentanoic acid), application no. 17, preferably the coding region thereof, or a homolog or a fragment thereof, and being depicted in the same respective line as said TTC1893, or a functional equivalent or a homolog thereof as shown in column 8 of Table I, application no. 17, preferably the coding region thereof, particularly a homolog or functional equivalent as shown in column 8 of Table I B, application no. 17, and being depicted in the same respective line as said TTC1893, and preferably the activity is increased non-targeted, or
[91888] (b) a polypeptide comprising a polypeptide, a consensus sequence or at least a polypeptide motif as shown in the respective line in column 5 of Table II or in column 8 of Table IV, application no. 17, respectively, and being depicted in the same respective line as said TTC1893, or a functional equivalent or a homolog thereof as depicted in column 8 of Table II, application no. 17, preferably a homolog or functional equivalent as depicted in column 8 of Table II B, application no. 17, and being depicted in the same respective line as said TTC1893, and preferably the activity is increased non-targeted, whereby the respective line disclose in column 7 the fine chemical 3,4,5-trihydroxypentanoic acid.

[91889] Accordingly, in one embodiment, the molecule which activity is to be increased in the process of the invention is the gene product with an activity as a “permease”, preferably it is the molecule of section (a) or (b) of this paragraph.

[91890] In particular, it was observed that in plants, especially in Arabidopsis thaliana, increasing or generating the activity of a gene product non-targeted with the activity of a “permease”, preferably being encoded by a gene comprising the nucleic acid sequence SEQ ID NO. 148559, preferably the coding region thereof, conferred the production of or the increase in 3,4,5-trihydroxypentanoic acid compared with the wild type control.

[91891] The nucleic acid sequence of TTC1918 from Thermus thermophilus, e.g. as shown in the respective line in column 5 of Table I, application no. 17, has been published in E. And the activity of the gene product thereof is the activity of oxidoreductase subunit.

[91892] Accordingly, in one embodiment, the process of the present invention for producing glucose-1-phosphate in a non-human organism, like a microorganism or a plant or a part thereof, comprises increasing or generating the activity of a gene product with the activity of a gene product conferring the activity of “oxidoreductase subunit”, especially from Thermus thermophilus or its functional equivalent or its homolog, e.g. the increase of
[91893] (a) a gene product of a gene comprising the nucleic acid molecule as shown in the respective line in column 5 of Table I (whereby the respective line disclose in column 7 the fine chemical glucose-1-phosphate), application no. 17, preferably the coding region thereof, or a homolog or a fragment thereof, and being depicted in the same respective line as said TTC1918, or a functional equivalent or a homolog thereof as shown in column 8 of Table I, application no. 17, preferably the coding region thereof, particularly a homolog or functional equivalent as shown in column 8 of Table I B, application no. 17, and being depicted in the same respective line as said TTC1918, and preferably the activity is increased non-targeted, or
[91894] (b) a polypeptide comprising a polypeptide, a consensus sequence or at least a polypeptide motif as shown in the respective line in column 5 of Table II or in column 8 of Table IV, application no. 17, respectively, and being depicted in the same respective line as said TTC1918, or a functional equivalent or a homolog thereof as depicted in column 8 of Table II, application no. 17, preferably a homolog or functional equivalent as depicted in column 8 of Table II B, application no. 17, and being depicted in the same respective line as said TTC1918, and preferably the activity is increased non-targeted, whereby the respective line disclose in column 7 the fine chemical glucose-1-phosphate.

[91895] Accordingly, in one embodiment, the molecule which activity is to be increased in the process of the invention is the gene product with an activity as a “oxidoreductase subunit”, preferably it is the molecule of section (a) or (b) of this paragraph.

[91896] In particular, it was observed that in plants, especially in Arabidopsis thaliana, increasing or generating the activity of a gene product non-targeted with the activity of a “oxidoreductase subunit”, preferably being encoded by a gene comprising the nucleic acid sequence SEQ ID NO. 62160, preferably the coding region thereof, conferred the production of or the increase in glucose-1-phosphate compared with the wild type control.

[91897] The nucleic acid sequence of XM_{—}473199 from Oryza sativa, e.g. as shown in the respective line in column 5 of Table I, application no. 17, has been published in G. And the activity of the gene product thereof is the activity of XM_{—}473199-protein.

[91898] Accordingly, in one embodiment, the process of the present invention for producing glucose-1-phosphate in a non-human organism, like a microorganism or a plant or a part thereof, comprises increasing or generating the activity of a gene product with the activity of a gene product conferring the activity of “XM_{—}473199-protein”, especially from Oryza sativa or its functional equivalent or its homolog, e.g. the increase of
[91899] (a) a gene product of a gene comprising the nucleic acid molecule as shown in the respective line in column 5 of Table I (whereby the respective line disclose in column 7 the fine chemical glucose-1-phosphate), application no. 17, preferably the coding region thereof, or a homolog or a fragment thereof, and being depicted in the same respective line as said XM_{—}473199, or a functional equivalent or a homolog thereof as shown in column 8 of Table I, application no. 17, preferably the coding region thereof, particularly a homolog or functional equivalent as shown in column 8 of Table I B, application no. 17, and being depicted in the same respective line as said XM_{—}473199, and preferably the activity is increased non-targeted, or
[91900] (b) a polypeptide comprising a polypeptide, a consensus sequence or at least a polypeptide motif as shown in the respective line in column 5 of Table II or in column 8 of Table IV, application no. 17, respectively, and being depicted in the same respective line as said XM_{—}473199, or a functional equivalent or a homolog thereof as depicted in column 8 of Table II, application no. 17, preferably a homolog or functional equivalent as depicted in column 8 of Table II B, application no. 17, and being depicted in the same respective line as said XM_{—}473199, and preferably the activity is increased non-targeted, whereby the respective line disclose in column 7 the fine chemical glucose-1-phosphate.

[91901] Accordingly, in one embodiment, the molecule which activity is to be increased in the process of the invention is the gene product with an activity as a “XM_{—}473199-protein”, preferably it is the molecule of section (a) or (b) of this paragraph.

[91902] In particular, it was observed that in plants, especially in Arabidopsis thaliana, increasing or generating the activity of a gene product non-targeted with the activity of a “XM_{—}473199-protein”, preferably being encoded by a gene comprising the nucleic acid sequence SEQ ID NO. 62244, preferably the coding region thereof, conferred the production of or the increase in glucose-1-phosphate compared with the wild type control.

[91903] The nucleic acid sequence of Ybl021c from Saccharomyces cerevisiae, e.g. as shown in the respective line in column 5 of Table I, application no. 17, has been published in A. And the activity of the gene product thereof is the activity of transcription factor.

[91904] Accordingly, in one embodiment, the process of the present invention for producing myo-inositol in a non-human organism, like a microorganism or a plant or a part thereof, comprises increasing or generating the activity of a gene product with the activity of a gene product conferring the activity of “transcription factor”, especially from Saccharomyces cerevisiae or its functional equivalent or its homolog, e.g. the increase of
[91905] (a) a gene product of a gene comprising the nucleic acid molecule as shown in the respective line in column 5 of Table I (whereby the respective line disclose in column 7 the fine chemical myo-inositol), application no. 17, preferably the coding region thereof, or a homolog or a fragment thereof, and being depicted in the same respective line as said Ybl021c, or a functional equivalent or a homolog thereof as shown in column 8 of Table I, application no. 17, preferably the coding region thereof, particularly a homolog or functional equivalent as shown in column 8 of Table I B, application no. 17, and being depicted in the same respective line as said Ybl021 c, and preferably the activity is increased non-targeted, or
[91906] (b) a polypeptide comprising a polypeptide, a consensus sequence or at least a polypeptide motif as shown in the respective line in column 5 of Table II or in column 8 of Table IV, application no. 17, respectively, and being depicted in the same respective line as said Ybl021c, or a functional equivalent or a homolog thereof as depicted in column 8 of Table II, application no. 17, preferably a homolog or functional equivalent as depicted in column 8 of Table II B, application no. 17, and being depicted in the same respective line as said Ybl021c, and preferably the activity is increased non-targeted, whereby the respective line disclose in column 7 the fine chemical myo-inositol.

[91907] Accordingly, in one embodiment, the molecule which activity is to be increased in the process of the invention is the gene product with an activity as a “transcription factor”, preferably it is the molecule of section (a) or (b) of this paragraph.

[91908] In particular, it was observed that in plants, especially in Arabidopsis thaliana, increasing or generating the activity of a gene product non-targeted with the activity of a “transcription factor”, preferably being encoded by a gene comprising the nucleic acid sequence SEQ ID NO. 62524, preferably the coding region thereof, conferred the production of or the increase in myo-inositol compared with the wild type control.

[91909] The nucleic acid sequence of Ybl021 c from Saccharomyces cerevisiae, e.g. as shown in the respective line in column 5 of Table I, application no. 17, has been published in A. And the activity of the gene product thereof is the activity of transcription factor.

[91910] Accordingly, in one embodiment, the process of the present invention for producing sucrose in a non-human organism, like a microorganism or a plant or a part thereof, comprises increasing or generating the activity of a gene product with the activity of a gene product conferring the activity of “transcription factor”, especially from Saccharomyces cerevisiae or its functional equivalent or its homolog, e.g. the increase of
[91911] (a) a gene product of a gene comprising the nucleic acid molecule as shown in the respective line in column 5 of Table I (whereby the respective line disclose in column 7 the fine chemical sucrose), application no. 17, preferably the coding region thereof, or a homolog or a fragment thereof, and being depicted in the same respective line as said Ybl021 c, or a functional equivalent or a homolog thereof as shown in column 8 of Table I, application no. 17, preferably the coding region thereof, particularly a homolog or functional equivalent as shown in column 8 of Table I B, application no. 17, and being depicted in the same respective line as said Ybl021c, and preferably the activity is increased non-targeted, or
[91912] (b) a polypeptide comprising a polypeptide, a consensus sequence or at least a polypeptide motif as shown in the respective line in column 5 of Table II or in column 8 of Table IV, application no. 17, respectively, and being depicted in the same respective line as said Ybl021c, or a functional equivalent or a homolog thereof as depicted in column 8 of Table II, application no. 17, preferably a homolog or functional equivalent as depicted in column 8 of Table II B, application no. 17, and being depicted in the same respective line as said Ybl021c, and preferably the activity is increased non-targeted, whereby the respective line disclose in column 7 the fine chemical sucrose.

[91913] Accordingly, in one embodiment, the molecule which activity is to be increased in the process of the invention is the gene product with an activity as a “transcription factor”, preferably it is the molecule of section (a) or (b) of this paragraph.

[91914] In particular, it was observed that in plants, especially in Arabidopsis thaliana, increasing or generating the activity of a gene product non-targeted with the activity of a “transcription factor”, preferably being encoded by a gene comprising the nucleic acid sequence SEQ ID NO. 62524, preferably the coding region thereof, conferred the production of or the increase in sucrose compared with the wild type control.

[91915] The nucleic acid sequence of Ybr249c from Saccharomyces cerevisiae, e.g. as shown in the respective line in column 5 of Table I, application no. 17, has been published in A. And the activity of the gene product thereof is the activity of 3-deoxy-7-phosphoheptulonate synthase.

[91916] Accordingly, in one embodiment, the process of the present invention for producing glucose-1-phosphate in a non-human organism, like a microorganism or a plant or a part thereof, comprises increasing or generating the activity of a gene product with the activity of a gene product conferring the activity of “3-deoxy-7-phosphoheptulonate synthase”, especially from Saccharomyces cerevisiae or its functional equivalent or its homolog, e.g. the increase of
[91917] (a) a gene product of a gene comprising the nucleic acid molecule as shown in the respective line in column 5 of Table I (whereby the respective line disclose in column 7 the fine chemical glucose-1-phosphate), application no. 17, preferably the coding region thereof, or a homolog or a fragment thereof, and being depicted in the same respective line as said Ybr249c, or a functional equivalent or a homolog thereof as shown in column 8 of Table I, application no. 17, preferably the coding region thereof, particularly a homolog or functional equivalent as shown in column 8 of Table I B, application no. 17, and being depicted in the same respective line as said Ybr249c, and preferably the activity is increased plastidic, or
[91918] (b) a polypeptide comprising a polypeptide, a consensus sequence or at least a polypeptide motif as shown in the respective line in column 5 of Table II or in column 8 of Table IV, application no. 17, respectively, and being depicted in the same respective line as said Ybr249c, or a functional equivalent or a homolog thereof as depicted in column 8 of Table II, application no. 17, preferably a homolog or functional equivalent as depicted in column 8 of Table II B, application no. 17, and being depicted in the same respective line as said Ybr249c, and preferably the activity is increased plastidic, whereby the respective line disclose in column 7 the fine chemical glucose-1-phosphate.

[91919] Accordingly, in one embodiment, the molecule which activity is to be increased in the process of the invention is the gene product with an activity as a “3-deoxy-7-phosphoheptulonate synthase”, preferably it is the molecule of section (a) or (b) of this paragraph.

[91920] In particular, it was observed that in plants, especially in Arabidopsis thaliana, increasing or generating the activity of a gene product plastidic with the activity of a “3-deoxy-7-phosphoheptulonate synthase”, preferably being encoded by a gene comprising the nucleic acid sequence SEQ ID NO. 88879, preferably the coding region thereof, conferred the production of or the increase in glucose-1-phosphate compared with the wild type control.

[91921] The nucleic acid sequence of Ybr296c from Saccharomyces cerevisiae, e.g. as shown in the respective line in column 5 of Table I, application no. 17, has been published in A. And the activity of the gene product thereof is the activity of phosphate permease.

[91922] Accordingly, in one embodiment, the process of the present invention for producing glucose-1-phosphate in a non-human organism, like a microorganism or a plant or a part thereof, comprises increasing or generating the activity of a gene product with the activity of a gene product conferring the activity of “phosphate permease”, especially from Saccharomyces cerevisiae or its functional equivalent or its homolog, e.g. the increase of
[91923] (a) a gene product of a gene comprising the nucleic acid molecule as shown in the respective line in column 5 of Table I (whereby the respective line disclose in column 7 the fine chemical glucose-1-phosphate), application no. 17, preferably the coding region thereof, or a homolog or a fragment thereof, and being depicted in the same respective line as said Ybr296c, or a functional equivalent or a homolog thereof as shown in column 8 of Table I, application no. 17, preferably the coding region thereof, particularly a homolog or functional equivalent as shown in column 8 of Table I B, application no. 17, and being depicted in the same respective line as said Ybr296c, and preferably the activity is increased non-targeted, or
[91924] (b) a polypeptide comprising a polypeptide, a consensus sequence or at least a polypeptide motif as shown in the respective line in column 5 of Table II or in column 8 of Table IV, application no. 17, respectively, and being depicted in the same respective line as said Ybr296c, or a functional equivalent or a homolog thereof as depicted in column 8 of Table II, application no. 17, preferably a homolog or functional equivalent as depicted in column 8 of Table II B, application no. 17, and being depicted in the same respective line as said Ybr296c, and preferably the activity is increased non-targeted, whereby the respective line disclose in column 7 the fine chemical glucose-1-phosphate.

[91925] Accordingly, in one embodiment, the molecule which activity is to be increased in the process of the invention is the gene product with an activity as a “phosphate permease”, preferably it is the molecule of section (a) or (b) of this paragraph.

[91926] In particular, it was observed that in plants, especially in Arabidopsis thaliana, increasing or generating the activity of a gene product non-targeted with the activity of a “phosphate permease”, preferably being encoded by a gene comprising the nucleic acid sequence SEQ ID NO. 89317, preferably the coding region thereof, conferred the production of or the increase in glucose-1-phosphate compared with the wild type control.

[91927] The nucleic acid sequence of Ybr296c from Saccharomyces cerevisiae, e.g. as shown in the respective line in column 5 of Table I, application no. 17, has been published in A. And the activity of the gene product thereof is the activity of phosphate permease.

[91928] Accordingly, in one embodiment, the process of the present invention for producing 3,4,5-trihydroxypentanoic acid in a non-human organism, like a microorganism or a plant or a part thereof, comprises increasing or generating the activity of a gene product with the activity of a gene product conferring the activity of “phosphate permease”, especially from Saccharomyces cerevisiae or its functional equivalent or its homolog, e.g. the increase of
[91929] (a) a gene product of a gene comprising the nucleic acid molecule as shown in the respective line in column 5 of Table I (whereby the respective line disclose in column 7 the fine chemical 3,4,5-trihydroxypentanoic acid), application no. 17, preferably the coding region thereof, or a homolog or a fragment thereof, and being depicted in the same respective line as said Ybr296c, or a functional equivalent or a homolog thereof as shown in column 8 of Table I, application no. 17, preferably the coding region thereof, particularly a homolog or functional equivalent as shown in column 8 of Table I B, application no. 17, and being depicted in the same respective line as said Ybr296c, and preferably the activity is increased non-targeted, or
[91930] (b) a polypeptide comprising a polypeptide, a consensus sequence or at least a polypeptide motif as shown in the respective line in column 5 of Table II or in column 8 of Table IV, application no. 17, respectively, and being depicted in the same respective line as said Ybr296c, or a functional equivalent or a homolog thereof as depicted in column 8 of Table II, application no. 17, preferably a homolog or functional equivalent as depicted in column 8 of Table II B, application no. 17, and being depicted in the same respective line as said Ybr296c, and preferably the activity is increased non-targeted, whereby the respective line disclose in column 7 the fine chemical 3,4,5-trihydroxypentanoic acid.

[91931] Accordingly, in one embodiment, the molecule which activity is to be increased in the process of the invention is the gene product with an activity as a “phosphate permease”, preferably it is the molecule of section (a) or (b) of this paragraph.

[91932] In particular, it was observed that in plants, especially in Arabidopsis thaliana, increasing or generating the activity of a gene product non-targeted with the activity of a “phosphate permease”, preferably being encoded by a gene comprising the nucleic acid sequence SEQ ID NO. 89317, preferably the coding region thereof, conferred the production of or the increase in 3,4,5-trihydroxypentanoic acid compared with the wild type control.

[91933] The nucleic acid sequence of Ycl027w from Saccharomyces cerevisiae, e.g. as shown in the respective line in column 5 of Table I, application no. 17, has been published in A. And the activity of the gene product thereof is the activity of ycl027w-protein.

[91934] Accordingly, in one embodiment, the process of the present invention for producing fructose in a non-human organism, like a microorganism or a plant or a part thereof, comprises increasing or generating the activity of a gene product with the activity of a gene product conferring the activity of “ycl027w-protein”, especially from Saccharomyces cerevisiae or its functional equivalent or its homolog, e.g. the increase of
[91935] (a) a gene product of a gene comprising the nucleic acid molecule as shown in the respective line in column 5 of Table I (whereby the respective line disclose in column 7 the fine chemical fructose), application no. 17, preferably the coding region thereof, or a homolog or a fragment thereof, and being depicted in the same respective line as said Ycl027w, or a functional equivalent or a homolog thereof as shown in column 8 of Table I, application no. 17, preferably the coding region thereof, particularly a homolog or functional equivalent as shown in column 8 of Table I B, application no. 17, and being depicted in the same respective line as said Ycl027w, and preferably the activity is increased plastidic, or
[91936] (b) a polypeptide comprising a polypeptide, a consensus sequence or at least a polypeptide motif as shown in the respective line in column 5 of Table II or in column 8 of Table IV, application no. 17, respectively, and being depicted in the same respective line as said Ycl027w, or a functional equivalent or a homolog thereof as depicted in column 8 of Table II, application no. 17, preferably a homolog or functional equivalent as depicted in column 8 of Table II B, application no. 17, and being depicted in the same respective line as said Ycl027w, and preferably the activity is increased plastidic, whereby the respective line disclose in column 7 the fine chemical fructose.

[91937] Accordingly, in one embodiment, the molecule which activity is to be increased in the process of the invention is the gene product with an activity as a “ycl027w-protein”, preferably it is the molecule of section (a) or (b) of this paragraph.

[91938] In particular, it was observed that in plants, especially in Arabidopsis thaliana, increasing or generating the activity of a gene product plastidic with the activity of a “ycl027w-protein”, preferably being encoded by a gene comprising the nucleic acid sequence SEQ ID NO. 96980, preferably the coding region thereof, conferred the production of or the increase in fructose compared with the wild type control.

[91939] The nucleic acid sequence of Ycl027w from Saccharomyces cerevisiae, e.g. as shown in the respective line in column 5 of Table I, application no. 17, has been published in A. And the activity of the gene product thereof is the activity of ycl027w-protein.

[91940] Accordingly, in one embodiment, the process of the present invention for producing glucose-1-phosphate in a non-human organism, like a microorganism or a plant or a part thereof, comprises increasing or generating the activity of a gene product with the activity of a gene product conferring the activity of “ycl027w-protein”, especially from Saccharomyces cerevisiae or its functional equivalent or its homolog, e.g. the increase of
[91941] (a) a gene product of a gene comprising the nucleic acid molecule as shown in the respective line in column 5 of Table I (whereby the respective line disclose in column 7 the fine chemical glucose-1-phosphate), application no. 17, preferably the coding region thereof, or a homolog or a fragment thereof, and being depicted in the same respective line as said Ycl027w, or a functional equivalent or a homolog thereof as shown in column 8 of Table I, application no. 17, preferably the coding region thereof, particularly a homolog or functional equivalent as shown in column 8 of Table I B, application no. 17, and being depicted in the same respective line as said Ycl027w, and preferably the activity is increased plastidic, or
[91942] (b) a polypeptide comprising a polypeptide, a consensus sequence or at least a polypeptide motif as shown in the respective line in column 5 of Table II or in column 8 of Table IV, application no. 17, respectively, and being depicted in the same respective line as said Ycl027w, or a functional equivalent or a homolog thereof as depicted in column 8 of Table II, application no. 17, preferably a homolog or functional equivalent as depicted in column 8 of Table II B, application no. 17, and being depicted in the same respective line as said Ycl027w, and preferably the activity is increased plastidic, whereby the respective line disclose in column 7 the fine chemical glucose-1-phosphate.

[91943] Accordingly, in one embodiment, the molecule which activity is to be increased in the process of the invention is the gene product with an activity as a “ycl027w-protein”, preferably it is the molecule of section (a) or (b) of this paragraph.

[91944] In particular, it was observed that in plants, especially in Arabidopsis thaliana, increasing or generating the activity of a gene product plastidic with the activity of a “ycl027w-protein”, preferably being encoded by a gene comprising the nucleic acid sequence SEQ ID NO. 96980, preferably the coding region thereof, conferred the production of or the increase in glucose-1-phosphate compared with the wild type control.

[91945] The nucleic acid sequence of Ycl064c from Saccharomyces cerevisiae, e.g. as shown in the respective line in column 5 of Table I, application no. 17, has been published in A. And the activity of the gene product thereof is the activity of serine/threonine dehydratase.

[91946] Accordingly, in one embodiment, the process of the present invention for producing myo-inositol in a non-human organism, like a microorganism or a plant or a part thereof, comprises increasing or generating the activity of a gene product with the activity of a gene product conferring the activity of “serine/threonine dehydratase”, especially from Saccharomyces cerevisiae or its functional equivalent or its homolog, e.g. the increase of
[91947] (a) a gene product of a gene comprising the nucleic acid molecule as shown in the respective line in column 5 of Table I (whereby the respective line disclose in column 7 the fine chemical myo-inositol), application no. 17, preferably the coding region thereof, or a homolog or a fragment thereof, and being depicted in the same respective line as said Ycl064c, or a functional equivalent or a homolog thereof as shown in column 8 of Table I, application no. 17, preferably the coding region thereof, particularly a homolog or functional equivalent as shown in column 8 of Table I B, application no. 17, and being depicted in the same respective line as said Ycl064c, and preferably the activity is increased plastidic, or
[91948] (b) a polypeptide comprising a polypeptide, a consensus sequence or at least a polypeptide motif as shown in the respective line in column 5 of Table II or in column 8 of Table IV, application no. 17, respectively, and being depicted in the same respective line as said Ycl064c, or a functional equivalent or a homolog thereof as depicted in column 8 of Table II, application no. 17, preferably a homolog or functional equivalent as depicted in column 8 of Table II B, application no. 17, and being depicted in the same respective line as said Ycl064c, and preferably the activity is increased plastidic, whereby the respective line disclose in column 7 the fine chemical myo-inositol.

[91949] Accordingly, in one embodiment, the molecule which activity is to be increased in the process of the invention is the gene product with an activity as a “serine/threonine dehydratase”, preferably it is the molecule of section (a) or (b) of this paragraph.

[91950] In particular, it was observed that in plants, especially in Arabidopsis thaliana, increasing or generating the activity of a gene product plastidic with the activity of a “serine/threonine dehydratase”, preferably being encoded by a gene comprising the nucleic acid sequence SEQ ID NO. 89395, preferably the coding region thereof, conferred the production of or the increase in myo-inositol compared with the wild type control.

[91951] The nucleic acid sequence of Ycl064c from Saccharomyces cerevisiae, e.g. as shown in the respective line in column 5 of Table I, application no. 17, has been published in A. And the activity of the gene product thereof is the activity of serine/threonine dehydratase.

[91952] Accordingly, in one embodiment, the process of the present invention for producing sucrose in a non-human organism, like a microorganism or a plant or a part thereof, comprises increasing or generating the activity of a gene product with the activity of a gene product conferring the activity of “serine/threonine dehydratase”, especially from Saccharomyces cerevisiae or its functional equivalent or its homolog, e.g. the increase of
[91953] (a) a gene product of a gene comprising the nucleic acid molecule as shown in the respective line in column 5 of Table I (whereby the respective line disclose in column 7 the fine chemical sucrose), application no. 17, preferably the coding region thereof, or a homolog or a fragment thereof, and being depicted in the same respective line as said Ycl064c, or a functional equivalent or a homolog thereof as shown in column 8 of Table I, application no. 17, preferably the coding region thereof, particularly a homolog or functional equivalent as shown in column 8 of Table I B, application no. 17, and being depicted in the same respective line as said Ycl064c, and preferably the activity is increased plastidic, or
[91954] (b) a polypeptide comprising a polypeptide, a consensus sequence or at least a polypeptide motif as shown in the respective line in column 5 of Table II or in column 8 of Table IV, application no. 17, respectively, and being depicted in the same respective line as said Ycl064c, or a functional equivalent or a homolog thereof as depicted in column 8 of Table II, application no. 17, preferably a homolog or functional equivalent as depicted in column 8 of Table II B, application no. 17, and being depicted in the same respective line as said Ycl064c, and preferably the activity is increased plastidic, whereby the respective line disclose in column 7 the fine chemical sucrose.

[91955] Accordingly, in one embodiment, the molecule which activity is to be increased in the process of the invention is the gene product with an activity as a “serine/threonine dehydratase”, preferably it is the molecule of section (a) or (b) of this paragraph.

[91956] In particular, it was observed that in plants, especially in Arabidopsis thaliana, increasing or generating the activity of a gene product plastidic with the activity of a “serine/threonine dehydratase”, preferably being encoded by a gene comprising the nucleic acid sequence SEQ ID NO. 89395, preferably the coding region thereof, conferred the production of or the increase in sucrose compared with the wild type control.

[91957] The nucleic acid sequence of Ycr012w from Saccharomyces cerevisiae, e.g. as shown in the respective line in column 5 of Table I, application no. 17, has been published in A. And the activity of the gene product thereof is the activity of phosphoglycerate kinase.

[91958] Accordingly, in one embodiment, the process of the present invention for producing fructose in a non-human organism, like a microorganism or a plant or a part thereof, comprises increasing or generating the activity of a gene product with the activity of a gene product conferring the activity of “phosphoglycerate kinase”, especially from Saccharomyces cerevisiae or its functional equivalent or its homolog, e.g. the increase of
[91959] (a) a gene product of a gene comprising the nucleic acid molecule as shown in the respective line in column 5 of Table I (whereby the respective line disclose in column 7 the fine chemical fructose), application no. 17, preferably the coding region thereof, or a homolog or a fragment thereof, and being depicted in the same respective line as said Ycr012w, or a functional equivalent or a homolog thereof as shown in column 8 of Table I, application no. 17, preferably the coding region thereof, particularly a homolog or functional equivalent as shown in column 8 of Table I B, application no. 17, and being depicted in the same respective line as said Ycr012w, and preferably the activity is increased non-targeted, or
[91960] (b) a polypeptide comprising a polypeptide, a consensus sequence or at least a polypeptide motif as shown in the respective line in column 5 of Table II or in column 8 of Table IV, application no. 17, respectively, and being depicted in the same respective line as said Ycr012w, or a functional equivalent or a homolog thereof as depicted in column 8 of Table II, application no. 17, preferably a homolog or functional equivalent as depicted in column 8 of Table II B, application no. 17, and being depicted in the same respective line as said Ycr012w, and preferably the activity is increased non-targeted, whereby the respective line disclose in column 7 the fine chemical fructose.

[91961] Accordingly, in one embodiment, the molecule which activity is to be increased in the process of the invention is the gene product with an activity as a “phosphoglycerate kinase”, preferably it is the molecule of section (a) or (b) of this paragraph.

[91962] In particular, it was observed that in plants, especially in Arabidopsis thaliana, increasing or generating the activity of a gene product non-targeted with the activity of a “phosphoglycerate kinase”, preferably being encoded by a gene comprising the nucleic acid sequence SEQ ID NO. 108113, preferably the coding region thereof, conferred the production of or the increase in fructose compared with the wild type control.

[91963] The nucleic acid sequence of Ycr012w from Saccharomyces cerevisiae, e.g. as shown in the respective line in column 5 of Table I, application no. 17, has been published in A. And the activity of the gene product thereof is the activity of phosphoglycerate kinase.

[91964] Accordingly, in one embodiment, the process of the present invention for producing glucose in a non-human organism, like a microorganism or a plant or a part thereof, comprises increasing or generating the activity of a gene product with the activity of a gene product conferring the activity of “phosphoglycerate kinase”, especially from Saccharomyces cerevisiae or its functional equivalent or its homolog, e.g. the increase of
[91965] (a) a gene product of a gene comprising the nucleic acid molecule as shown in the respective line in column 5 of Table I (whereby the respective line disclose in column 7 the fine chemical glucose), application no. 17, preferably the coding region thereof, or a homolog or a fragment thereof, and being depicted in the same respective line as said Ycr012w, or a functional equivalent or a homolog thereof as shown in column 8 of Table I, application no. 17, preferably the coding region thereof, particularly a homolog or functional equivalent as shown in column 8 of Table I B, application no. 17, and being depicted in the same respective line as said Ycr012w, and preferably the activity is increased non-targeted, or
[91966] (b) a polypeptide comprising a polypeptide, a consensus sequence or at least a polypeptide motif as shown in the respective line in column 5 of Table II or in column 8 of Table IV, application no. 17, respectively, and being depicted in the same respective line as said Ycr012w, or a functional equivalent or a homolog thereof as depicted in column 8 of Table II, application no. 17, preferably a homolog or functional equivalent as depicted in column 8 of Table II B, application no. 17, and being depicted in the same respective line as said Ycr012w, and preferably the activity is increased non-targeted, whereby the respective line disclose in column 7 the fine chemical glucose.

[91967] Accordingly, in one embodiment, the molecule which activity is to be increased in the process of the invention is the gene product with an activity as a “phosphoglycerate kinase”, preferably it is the molecule of section (a) or (b) of this paragraph.

[91968] In particular, it was observed that in plants, especially in Arabidopsis thaliana, increasing or generating the activity of a gene product non-targeted with the activity of a “phosphoglycerate kinase”, preferably being encoded by a gene comprising the nucleic acid sequence SEQ ID NO. 108113, preferably the coding region thereof, conferred the production of or the increase in glucose compared with the wild type control.

[91969] The nucleic acid sequence of Ycr047w-a from Saccharomyces cerevisiae, e.g. as shown in the respective line in column 5 of Table I, application no. 17, has been published in A. And the activity of the gene product thereof is the activity of YCR047W-A-protein.

[91970] Accordingly, in one embodiment, the process of the present invention for producing raffinose in a non-human organism, like a microorganism or a plant or a part thereof, comprises increasing or generating the activity of a gene product with the activity of a gene product conferring the activity of “YCR047W-A-protein”, especially from Saccharomyces cerevisiae or its functional equivalent or its homolog, e.g. the increase of
[91971] (a) a gene product of a gene comprising the nucleic acid molecule as shown in the respective line in column 5 of Table I (whereby the respective line disclose in column 7 the fine chemical raffinose), application no. 17, preferably the coding region thereof, or a homolog or a fragment thereof, and being depicted in the same respective line as said Ycr047w-a, or a functional equivalent or a homolog thereof as shown in column 8 of Table I, application no. 17, preferably the coding region thereof, particularly a homolog or functional equivalent as shown in column 8 of Table I B, application no. 17, and being depicted in the same respective line as said Ycr047w-a, and preferably the activity is increased non-targeted, or
[91972] (b) a polypeptide comprising a polypeptide, a consensus sequence or at least a polypeptide motif as shown in the respective line in column 5 of Table II or in column 8 of Table IV, application no. 17, respectively, and being depicted in the same respective line as said Ycr047w-a, or a functional equivalent or a homolog thereof as depicted in column 8 of Table II, application no. 17, preferably a homolog or functional equivalent as depicted in column 8 of Table II B, application no. 17, and being depicted in the same respective line as said Ycr047w-a, and preferably the activity is increased non-targeted, whereby the respective line disclose in column 7 the fine chemical raffinose.

[91973] Accordingly, in one embodiment, the molecule which activity is to be increased in the process of the invention is the gene product with an activity as a “YCR047W-A-protein”, preferably it is the molecule of section (a) or (b) of this paragraph.

[91974] In particular, it was observed that in plants, especially in Arabidopsis thaliana, increasing or generating the activity of a gene product non-targeted with the activity of a “YCR047W-A-protein”, preferably being encoded by a gene comprising the nucleic acid sequence SEQ ID NO. 148579, preferably the coding region thereof, conferred the production of or the increase in raffinose compared with the wild type control.

[91975] The nucleic acid sequence of Ycr102c from Saccharomyces cerevisiae, e.g. as shown in the respective line in column 5 of Table I, application no. 17, has been published in A. And the activity of the gene product thereof is the activity of ycr102c-protein.

[91976] Accordingly, in one embodiment, the process of the present invention for producing 3,4,5-trihydroxypentanoic acid in a non-human organism, like a microorganism or a plant or a part thereof, comprises increasing or generating the activity of a gene product with the activity of a gene product conferring the activity of “ycr102c-protein”, especially from Saccharomyces cerevisiae or its functional equivalent or its homolog, e.g. the increase of
[91977] (a) a gene product of a gene comprising the nucleic acid molecule as shown in the respective line in column 5 of Table I (whereby the respective line disclose in column 7 the fine chemical 3,4,5-trihydroxypentanoic acid), application no. 17, preferably the coding region thereof, or a homolog or a fragment thereof, and being depicted in the same respective line as said Ycr102c, or a functional equivalent or a homolog thereof as shown in column 8 of Table I, application no. 17, preferably the coding region thereof, particularly a homolog or functional equivalent as shown in column 8 of Table I B, application no. 17, and being depicted in the same respective line as said Ycr102c, and preferably the activity is increased plastidic, or
[91978] (b) a polypeptide comprising a polypeptide, a consensus sequence or at least a polypeptide motif as shown in the respective line in column 5 of Table II or in column 8 of Table IV, application no. 17, respectively, and being depicted in the same respective line as said Ycr102c, or a functional equivalent or a homolog thereof as depicted in column 8 of Table II, application no. 17, preferably a homolog or functional equivalent as depicted in column 8 of Table II B, application no. 17, and being depicted in the same respective line as said Ycr102c, and preferably the activity is increased plastidic, whereby the respective line disclose in column 7 the fine chemical 3,4,5-trihydroxypentanoic acid.

[91979] Accordingly, in one embodiment, the molecule which activity is to be increased in the process of the invention is the gene product with an activity as a “ycr102c-protein”, preferably it is the molecule of section (a) or (b) of this paragraph.

[91980] In particular, it was observed that in plants, especially in Arabidopsis thaliana, increasing or generating the activity of a gene product plastidic with the activity of a “ycr102c-protein”, preferably being encoded by a gene comprising the nucleic acid sequence SEQ ID NO. 63264, preferably the coding region thereof, conferred the production of or the increase in 3,4,5-trihydroxypentanoic acid compared with the wild type control.

[91981] The nucleic acid sequence of Ydl066w from Saccharomyces cerevisiae, e.g. as shown in the respective line in column 5 of Table I, application no. 17, has been published in A. And the activity of the gene product thereof is the activity of isocitrate dehydrogenase.

[91982] Accordingly, in one embodiment, the process of the present invention for producing galactinol in a non-human organism, like a microorganism or a plant or a part thereof, comprises increasing or generating the activity of a gene product with the activity of a gene product conferring the activity of “isocitrate dehydrogenase”, especially from Saccharomyces cerevisiae or its functional equivalent or its homolog, e.g. the increase of
[91983] (a) a gene product of a gene comprising the nucleic acid molecule as shown in the respective line in column 5 of Table I (whereby the respective line disclose in column 7 the fine chemical galactinol), application no. 17, preferably the coding region thereof, or a homolog or a fragment thereof, and being depicted in the same respective line as said Ydl066w, or a functional equivalent or a homolog thereof as shown in column 8 of Table I, application no. 17, preferably the coding region thereof, particularly a homolog or functional equivalent as shown in column 8 of Table I B, application no. 17, and being depicted in the same respective line as said Ydl066w, and preferably the activity is increased non-targeted, or
[91984] (b) a polypeptide comprising a polypeptide, a consensus sequence or at least a polypeptide motif as shown in the respective line in column 5 of Table II or in column 8 of Table IV, application no. 17, respectively, and being depicted in the same respective line as said Ydl066w, or a functional equivalent or a homolog thereof as depicted in column 8 of Table II, application no. 17, preferably a homolog or functional equivalent as depicted in column 8 of Table II B, application no. 17, and being depicted in the same respective line as said Ydl066w, and preferably the activity is increased non-targeted, whereby the respective line disclose in column 7 the fine chemical galactinol.

[91985] Accordingly, in one embodiment, the molecule which activity is to be increased in the process of the invention is the gene product with an activity as a “isocitrate dehydrogenase”, preferably it is the molecule of section (a) or (b) of this paragraph.

[91986] In particular, it was observed that in plants, especially in Arabidopsis thaliana, increasing or generating the activity of a gene product non-targeted with the activity of a “isocitrate dehydrogenase”, preferably being encoded by a gene comprising the nucleic acid sequence SEQ ID NO. 122228, preferably the coding region thereof, conferred the production of or the increase in galactinol compared with the wild type control.

[91987] The nucleic acid sequence of Ydl126c from Saccharomyces cerevisiae, e.g. as shown in the respective line in column 5 of Table I, application no. 17, has been published in A. And the activity of the gene product thereof is the activity of cell division control protein.

[91988] Accordingly, in one embodiment, the process of the present invention for producing myo-inositol in a non-human organism, like a microorganism or a plant or a part thereof, comprises increasing or generating the activity of a gene product with the activity of a gene product conferring the activity of “cell division control protein”, especially from Saccharomyces cerevisiae or its functional equivalent or its homolog, e.g. the increase of
[91989] (a) a gene product of a gene comprising the nucleic acid molecule as shown in the respective line in column 5 of Table I (whereby the respective line disclose in column 7 the fine chemical myo-inositol), application no. 17, preferably the coding region thereof, or a homolog or a fragment thereof, and being depicted in the same respective line as said Ydl126c, or a functional equivalent or a homolog thereof as shown in column 8 of Table I, application no. 17, preferably the coding region thereof, particularly a homolog or functional equivalent as shown in column 8 of Table I B, application no. 17, and being depicted in the same respective line as said Ydl126c, and preferably the activity is increased non-targeted, or
[91990] (b) a polypeptide comprising a polypeptide, a consensus sequence or at least a polypeptide motif as shown in the respective line in column 5 of Table II or in column 8 of Table IV, application no. 17, respectively, and being depicted in the same respective line as said Ydl126c, or a functional equivalent or a homolog thereof as depicted in column 8 of Table II, application no. 17, preferably a homolog or functional equivalent as depicted in column 8 of Table II B, application no. 17, and being depicted in the same respective line as said Ydl126c, and preferably the activity is increased non-targeted, whereby the respective line disclose in column 7 the fine chemical myo-inositol.

[91991] Accordingly, in one embodiment, the molecule which activity is to be increased in the process of the invention is the gene product with an activity as a “cell division control protein”, preferably it is the molecule of section (a) or (b) of this paragraph.

[91992] In particular, it was observed that in plants, especially in Arabidopsis thaliana, increasing or generating the activity of a gene product non-targeted with the activity of a “cell division control protein”, preferably being encoded by a gene comprising the nucleic acid sequence SEQ ID NO. 120045, preferably the coding region thereof, conferred the production of or the increase in myo-inositol compared with the wild type control.

[91993] The nucleic acid sequence of Ydl155w from Saccharomyces cerevisiae, e.g. as shown in the respective line in column 5 of Table I, application no. 17, has been published in A. And the activity of the gene product thereof is the activity of cyclin.

[91994] Accordingly, in one embodiment, the process of the present invention for producing myo-inositol in a non-human organism, like a microorganism or a plant or a part thereof, comprises increasing or generating the activity of a gene product with the activity of a gene product conferring the activity of “cyclin”, especially from Saccharomyces cerevisiae or its functional equivalent or its homolog, e.g. the increase of
[91995] (a) a gene product of a gene comprising the nucleic acid molecule as shown in the respective line in column 5 of Table I (whereby the respective line disclose in column 7 the fine chemical myo-inositol), application no. 17, preferably the coding region thereof, or a homolog or a fragment thereof, and being depicted in the same respective line as said Ydl155w, or a functional equivalent or a homolog thereof as shown in column 8 of Table I, application no. 17, preferably the coding region thereof, particularly a homolog or functional equivalent as shown in column 8 of Table I B, application no. 17, and being depicted in the same respective line as said Ydl155w, and preferably the activity is increased non-targeted, or
[91996] (b) a polypeptide comprising a polypeptide, a consensus sequence or at least a polypeptide motif as shown in the respective line in column 5 of Table II or in column 8 of Table IV, application no. 17, respectively, and being depicted in the same respective line as said Ydl155w, or a functional equivalent or a homolog thereof as depicted in column 8 of Table II, application no. 17, preferably a homolog or functional equivalent as depicted in column 8 of Table II B, application no. 17, and being depicted in the same respective line as said Ydl155w, and preferably the activity is increased non-targeted, whereby the respective line disclose in column 7 the fine chemical myo-inositol.

[91997] Accordingly, in one embodiment, the molecule which activity is to be increased in the process of the invention is the gene product with an activity as a “cyclin”, preferably it is the molecule of section (a) or (b) of this paragraph.

[91998] In particular, it was observed that in plants, especially in Arabidopsis thaliana, increasing or generating the activity of a gene product non-targeted with the activity of a “cyclin”, preferably being encoded by a gene comprising the nucleic acid sequence SEQ ID NO. 14171, preferably the coding region thereof, conferred the production of or the increase in myo-inositol compared with the wild type control.

[91999] The nucleic acid sequence of Ydl159w-a from Saccharomyces cerevisiae, e.g. as shown in the respective line in column 5 of Table I, application no. 17, has been published in A. And the activity of the gene product thereof is the activity of YDL159W-A-protein.

[92000] Accordingly, in one embodiment, the process of the present invention for producing raffinose in a non-human organism, like a microorganism or a plant or a part thereof, comprises increasing or generating the activity of a gene product with the activity of a gene product conferring the activity of “YDL159W-A-protein”, especially from Saccharomyces cerevisiae or its functional equivalent or its homolog, e.g. the increase of
[92001] (a) a gene product of a gene comprising the nucleic acid molecule as shown in the respective line in column 5 of Table I (whereby the respective line disclose in column 7 the fine chemical raffinose), application no. 17, preferably the coding region thereof, or a homolog or a fragment thereof, and being depicted in the same respective line as said Ydl159w-a, or a functional equivalent or a homolog thereof as shown in column 8 of Table I, application no. 17, preferably the coding region thereof, particularly a homolog or functional equivalent as shown in column 8 of Table I B, application no. 17, and being depicted in the same respective line as said Ydl159w-a, and preferably the activity is increased non-targeted, or
[92002] (b) a polypeptide comprising a polypeptide, a consensus sequence or at least a polypeptide motif as shown in the respective line in column 5 of Table II or in column 8 of Table IV, application no. 17, respectively, and being depicted in the same respective line as said Ydl159w-a, or a functional equivalent or a homolog thereof as depicted in column 8 of Table II, application no. 17, preferably a homolog or functional equivalent as depicted in column 8 of Table II B, application no. 17, and being depicted in the same respective line as said Ydl159w-a, and preferably the activity is increased non-targeted, whereby the respective line disclose in column 7 the fine chemical raffinose.

[92003] Accordingly, in one embodiment, the molecule which activity is to be increased in the process of the invention is the gene product with an activity as a “YDL159W-A-protein”, preferably it is the molecule of section (a) or (b) of this paragraph.

[92004] In particular, it was observed that in plants, especially in Arabidopsis thaliana, increasing or generating the activity of a gene product non-targeted with the activity of a “YDL159W-A-protein”, preferably being encoded by a gene comprising the nucleic acid sequence SEQ ID NO. 137498, preferably the coding region thereof, conferred the production of or the increase in raffinose compared with the wild type control.

[92005] The nucleic acid sequence of Ydl168w from Saccharomyces cerevisiae, e.g. as shown in the respective line in column 5 of Table I, application no. 17, has been published in A. And the activity of the gene product thereof is the activity of protein kinase.

[92006] Accordingly, in one embodiment, the process of the present invention for producing glucose-1-phosphate in a non-human organism, like a microorganism or a plant or a part thereof, comprises increasing or generating the activity of a gene product with the activity of a gene product conferring the activity of “protein kinase”, especially from Saccharomyces cerevisiae or its functional equivalent or its homolog, e.g. the increase of
[92007] (a) a gene product of a gene comprising the nucleic acid molecule as shown in the respective line in column 5 of Table I (whereby the respective line disclose in column 7 the fine chemical glucose-1-phosphate), application no. 17, preferably the coding region thereof, or a homolog or a fragment thereof, and being depicted in the same respective line as said Ydl168w, or a functional equivalent or a homolog thereof as shown in column 8 of Table I, application no. 17, preferably the coding region thereof, particularly a homolog or functional equivalent as shown in column 8 of Table I B, application no. 17, and being depicted in the same respective line as said Ydl168w, and preferably the activity is increased plastidic, or
[92008] (b) a polypeptide comprising a polypeptide, a consensus sequence or at least a polypeptide motif as shown in the respective line in column 5 of Table II or in column 8 of Table IV, application no. 17, respectively, and being depicted in the same respective line as said Ydl168w, or a functional equivalent or a homolog thereof as depicted in column 8 of Table II, application no. 17, preferably a homolog or functional equivalent as depicted in column 8 of Table II B, application no. 17, and being depicted in the same respective line as said Ydl168w, and preferably the activity is increased plastidic, whereby the respective line disclose in column 7 the fine chemical glucose-1-phosphate.

[92009] Accordingly, in one embodiment, the molecule which activity is to be increased in the process of the invention is the gene product with an activity as a “protein kinase”, preferably it is the molecule of section (a) or (b) of this paragraph.

[92010] In particular, it was observed that in plants, especially in Arabidopsis thaliana, increasing or generating the activity of a gene product plastidic with the activity of a “protein kinase”, preferably being encoded by a gene comprising the nucleic acid sequence SEQ ID NO. 14302, preferably the coding region thereof, conferred the production of or the increase in glucose-1-phosphate compared with the wild type control.

[92011] The nucleic acid sequence of Ydl188c from Saccharomyces cerevisiae, e.g. as shown in the respective line in column 5 of Table I, application no. 17, has been published in A. And the activity of the gene product thereof is the activity of serine/threonine-protein phosphatase.

[92012] Accordingly, in one embodiment, the process of the present invention for producing glucose-1-phosphate in a non-human organism, like a microorganism or a plant or a part thereof, comprises increasing or generating the activity of a gene product with the activity of a gene product conferring the activity of “serine/threonine-protein phosphatase”, especially from Saccharomyces cerevisiae or its functional equivalent or its homolog, e.g. the increase of
[92013] (a) a gene product of a gene comprising the nucleic acid molecule as shown in the respective line in column 5 of Table I (whereby the respective line disclose in column 7 the fine chemical glucose-1-phosphate), application no. 17, preferably the coding region thereof, or a homolog or a fragment thereof, and being depicted in the same respective line as said Ydl188c, or a functional equivalent or a homolog thereof as shown in column 8 of Table I, application no. 17, preferably the coding region thereof, particularly a homolog or functional equivalent as shown in column 8 of Table I B, application no. 17, and being depicted in the same respective line as said Ydl188c, and preferably the activity is increased plastidic, or
[92014] (b) a polypeptide comprising a polypeptide, a consensus sequence or at least a polypeptide motif as shown in the respective line in column 5 of Table II or in column 8 of Table IV, application no. 17, respectively, and being depicted in the same respective line as said Ydl188c, or a functional equivalent or a homolog thereof as depicted in column 8 of Table II, application no. 17, preferably a homolog or functional equivalent as depicted in column 8 of Table II B, application no. 17, and being depicted in the same respective line as said Ydl188c, and preferably the activity is increased plastidic, whereby the respective line disclose in column 7 the fine chemical glucose-1-phosphate.

[92015] Accordingly, in one embodiment, the molecule which activity is to be increased in the process of the invention is the gene product with an activity as a “serine/threonine-protein phosphatase”, preferably it is the molecule of section (a) or (b) of this paragraph.

[92016] In particular, it was observed that in plants, especially in Arabidopsis thaliana, increasing or generating the activity of a gene product plastidic with the activity of a “serine/threonine-protein phosphatase”, preferably being encoded by a gene comprising the nucleic acid sequence SEQ ID NO. 89483, preferably the coding region thereof, conferred the production of or the increase in glucose-1-phosphate compared with the wild type control.

[92017] The nucleic acid sequence of YDL222C from Saccharomyces cerevisiae, e.g. as shown in the respective line in column 5 of Table I, application no. 17, has been published in A. And the activity of the gene product thereof is the activity of integral membrane protein.

[92018] Accordingly, in one embodiment, the process of the present invention for producing 3,4,5-trihydroxypentanoic acid in a non-human organism, like a microorganism or a plant or a part thereof, comprises increasing or generating the activity of a gene product with the activity of a gene product conferring the activity of “integral membrane protein”, especially from Saccharomyces cerevisiae or its functional equivalent or its homolog, e.g. the increase of
[92019] (a) a gene product of a gene comprising the nucleic acid molecule as shown in the respective line in column 5 of Table I (whereby the respective line disclose in column 7 the fine chemical 3,4,5-trihydroxypentanoic acid), application no. 17, preferably the coding region thereof, or a homolog or a fragment thereof, and being depicted in the same respective line as said YDL222C, or a functional equivalent or a homolog thereof as shown in column 8 of Table I, application no. 17, preferably the coding region thereof, particularly a homolog or functional equivalent as shown in column 8 of Table I B, application no. 17, and being depicted in the same respective line as said YDL222C, and preferably the activity is increased plastidic, or
[92020] (b) a polypeptide comprising a polypeptide, a consensus sequence or at least a polypeptide motif as shown in the respective line in column 5 of Table II or in column 8 of Table IV, application no. 17, respectively, and being depicted in the same respective line as said YDL222C, or a functional equivalent or a homolog thereof as depicted in column 8 of Table II, application no. 17, preferably a homolog or functional equivalent as depicted in column 8 of Table II B, application no. 17, and being depicted in the same respective line as said YDL222C, and preferably the activity is increased plastidic, whereby the respective line disclose in column 7 the fine chemical 3,4,5-trihydroxypentanoic acid.

[92021] Accordingly, in one embodiment, the molecule which activity is to be increased in the process of the invention is the gene product with an activity as a “integral membrane protein”, preferably it is the molecule of section (a) or (b) of this paragraph.

[92022] In particular, it was observed that in plants, especially in Arabidopsis thaliana, increasing or generating the activity of a gene product plastidic with the activity of a “integral membrane protein”, preferably being encoded by a gene comprising the nucleic acid sequence SEQ ID NO. 148583, preferably the coding region thereof, conferred the production of or the increase in 3,4,5-trihydroxypentanoic acid compared with the wild type control.

[92023] The nucleic acid sequence of Ydl235c from Saccharomyces cerevisiae, e.g. as shown in the respective line in column 5 of Table I, application no. 17, has been published in A. And the activity of the gene product thereof is the activity of ydl235c-protein.

[92024] Accordingly, in one embodiment, the process of the present invention for producing glucose-1-phosphate in a non-human organism, like a microorganism or a plant or a part thereof, comprises increasing or generating the activity of a gene product with the activity of a gene product conferring the activity of “ydl235c-protein”, especially from Saccharomyces cerevisiae or its functional equivalent or its homolog, e.g. the increase of
[92025] (a) a gene product of a gene comprising the nucleic acid molecule as shown in the respective line in column 5 of Table I (whereby the respective line disclose in column 7 the fine chemical glucose-1-phosphate), application no. 17, preferably the coding region thereof, or a homolog or a fragment thereof, and being depicted in the same respective line as said Ydl235c, or a functional equivalent or a homolog thereof as shown in column 8 of Table I, application no. 17, preferably the coding region thereof, particularly a homolog or functional equivalent as shown in column 8 of Table I B, application no. 17, and being depicted in the same respective line as said Ydl235c, and preferably the activity is increased plastidic, or
[92026] (b) a polypeptide comprising a polypeptide, a consensus sequence or at least a polypeptide motif as shown in the respective line in column 5 of Table II or in column 8 of Table IV, application no. 17, respectively, and being depicted in the same respective line as said Ydl235c, or a functional equivalent or a homolog thereof as depicted in column 8 of Table II, application no. 17, preferably a homolog or functional equivalent as depicted in column 8 of Table II B, application no. 17, and being depicted in the same respective line as said Ydl235c, and preferably the activity is increased plastidic, whereby the respective line disclose in column 7 the fine chemical glucose-1-phosphate.

[92027] Accordingly, in one embodiment, the molecule which activity is to be increased in the process of the invention is the gene product with an activity as a “ydl235c-protein”, preferably it is the molecule of section (a) or (b) of this paragraph.

[92028] In particular, it was observed that in plants, especially in Arabidopsis thaliana, increasing or generating the activity of a gene product plastidic with the activity of a “ydl235c-protein”, preferably being encoded by a gene comprising the nucleic acid sequence SEQ ID NO. 113313, preferably the coding region thereof, conferred the production of or the increase in glucose-1-phosphate compared with the wild type control.

[92029] The nucleic acid sequence of Ydl235c from Saccharomyces cerevisiae, e.g. as shown in the respective line in column 5 of Table I, application no. 17, has been published in A. And the activity of the gene product thereof is the activity of ydl235c-protein.

[92030] Accordingly, in one embodiment, the process of the present invention for producing myo-inositol in a non-human organism, like a microorganism or a plant or a part thereof, comprises increasing or generating the activity of a gene product with the activity of a gene product conferring the activity of “ydl235c-protein”, especially from Saccharomyces cerevisiae or its functional equivalent or its homolog, e.g. the increase of
[92031] (a) a gene product of a gene comprising the nucleic acid molecule as shown in the respective line in column 5 of Table I (whereby the respective line disclose in column 7 the fine chemical myo-inositol), application no. 17, preferably the coding region thereof, or a homolog or a fragment thereof, and being depicted in the same respective line as said Ydl235c, or a functional equivalent or a homolog thereof as shown in column 8 of Table I, application no. 17, preferably the coding region thereof, particularly a homolog or functional equivalent as shown in column 8 of Table I B, application no. 17, and being depicted in the same respective line as said Ydl235c, and preferably the activity is increased plastidic, or
[92032] (b) a polypeptide comprising a polypeptide, a consensus sequence or at least a polypeptide motif as shown in the respective line in column 5 of Table II or in column 8 of Table IV, application no. 17, respectively, and being depicted in the same respective line as said Ydl235c, or a functional equivalent or a homolog thereof as depicted in column 8 of Table II, application no. 17, preferably a homolog or functional equivalent as depicted in column 8 of Table II B, application no. 17, and being depicted in the same respective line as said Ydl235c, and preferably the activity is increased plastidic, whereby the respective line disclose in column 7 the fine chemical myo-inositol.

[92033] Accordingly, in one embodiment, the molecule which activity is to be increased in the process of the invention is the gene product with an activity as a “ydl235c-protein”, preferably it is the molecule of section (a) or (b) of this paragraph.

[92034] In particular, it was observed that in plants, especially in Arabidopsis thaliana, increasing or generating the activity of a gene product plastidic with the activity of a “ydl235c-protein”, preferably being encoded by a gene comprising the nucleic acid sequence SEQ ID NO. 113313, preferably the coding region thereof, conferred the production of or the increase in myo-inositol compared with the wild type control.

[92035] The nucleic acid sequence of Ydl235c from Saccharomyces cerevisiae, e.g. as shown in the respective line in column 5 of Table I, application no. 17, has been published in A. And the activity of the gene product thereof is the activity of ydl235c-protein.

[92036] Accordingly, in one embodiment, the process of the present invention for producing 3,4,5-trihydroxypentanoic acid in a non-human organism, like a microorganism or a plant or a part thereof, comprises increasing or generating the activity of a gene product with the activity of a gene product conferring the activity of “ydl235c-protein”, especially from Saccharomyces cerevisiae or its functional equivalent or its homolog, e.g. the increase of
[92037] (a) a gene product of a gene comprising the nucleic acid molecule as shown in the respective line in column 5 of Table I (whereby the respective line disclose in column 7 the fine chemical 3,4,5-trihydroxypentanoic acid), application no. 17, preferably the coding region thereof, or a homolog or a fragment thereof, and being depicted in the same respective line as said Ydl235c, or a functional equivalent or a homolog thereof as shown in column 8 of Table I, application no. 17, preferably the coding region thereof, particularly a homolog or functional equivalent as shown in column 8 of Table I B, application no. 17, and being depicted in the same respective line as said Ydl235c, and preferably the activity is increased plastidic, or
[92038] (b) a polypeptide comprising a polypeptide, a consensus sequence or at least a polypeptide motif as shown in the respective line in column 5 of Table II or in column 8 of Table IV, application no. 17, respectively, and being depicted in the same respective line as said Ydl235c, or a functional equivalent or a homolog thereof as depicted in column 8 of Table II, application no. 17, preferably a homolog or functional equivalent as depicted in column 8 of Table II B, application no. 17, and being depicted in the same respective line as said Ydl235c, and preferably the activity is increased plastidic, whereby the respective line disclose in column 7 the fine chemical 3,4,5-trihydroxypentanoic acid.

[92039] Accordingly, in one embodiment, the molecule which activity is to be increased in the process of the invention is the gene product with an activity as a “ydl235c-protein”, preferably it is the molecule of section (a) or (b) of this paragraph.

[92040] In particular, it was observed that in plants, especially in Arabidopsis thaliana, increasing or generating the activity of a gene product plastidic with the activity of a “ydl235c-protein”, preferably being encoded by a gene comprising the nucleic acid sequence SEQ ID NO. 113313, preferably the coding region thereof, conferred the production of or the increase in 3,4,5-trihydroxypentanoic acid compared with the wild type control.

[92041] The nucleic acid sequence of Ydr044w from Saccharomyces cerevisiae, e.g. as shown in the respective line in column 5 of Table I, application no. 17, has been published in A. And the activity of the gene product thereof is the activity of coproporphyrinogen III oxidase.

[92042] Accordingly, in one embodiment, the process of the present invention for producing sucrose in a non-human organism, like a microorganism or a plant or a part thereof, comprises increasing or generating the activity of a gene product with the activity of a gene product conferring the activity of “coproporphyrinogen III oxidase”, especially from Saccharomyces cerevisiae or its functional equivalent or its homolog, e.g. the increase of
[92043] (a) a gene product of a gene comprising the nucleic acid molecule as shown in the respective line in column 5 of Table I (whereby the respective line disclose in column 7 the fine chemical sucrose), application no. 17, preferably the coding region thereof, or a homolog or a fragment thereof, and being depicted in the same respective line as said Ydr044w, or a functional equivalent or a homolog thereof as shown in column 8 of Table I, application no. 17, preferably the coding region thereof, particularly a homolog or functional equivalent as shown in column 8 of Table I B, application no. 17, and being depicted in the same respective line as said Ydr044w, and preferably the activity is increased plastidic, or
[92044] (b) a polypeptide comprising a polypeptide, a consensus sequence or at least a polypeptide motif as shown in the respective line in column 5 of Table II or in column 8 of Table IV, application no. 17, respectively, and being depicted in the same respective line as said Ydr044w, or a functional equivalent or a homolog thereof as depicted in column 8 of Table II, application no. 17, preferably a homolog or functional equivalent as depicted in column 8 of Table II B, application no. 17, and being depicted in the same respective line as said Ydr044w, and preferably the activity is increased plastidic, whereby the respective line disclose in column 7 the fine chemical sucrose.

[92045] Accordingly, in one embodiment, the molecule which activity is to be increased in the process of the invention is the gene product with an activity as a “coproporphyrinogen III oxidase”, preferably it is the molecule of section (a) or (b) of this paragraph.

[92046] In particular, it was observed that in plants, especially in Arabidopsis thaliana, increasing or generating the activity of a gene product plastidic with the activity of a “coproporphyrinogen III oxidase”, preferably being encoded by a gene comprising the nucleic acid sequence SEQ ID NO. 63334, preferably the coding region thereof, conferred the production of or the increase in sucrose compared with the wild type control.

[92047] The nucleic acid sequence of Ydr046c from Saccharomyces cerevisiae, e.g. as shown in the respective line in column 5 of Table I, application no. 17, has been published in A. And the activity of the gene product thereof is the activity of branched-chain amino acid permease.

[92048] Accordingly, in one embodiment, the process of the present invention for producing glucose in a non-human organism, like a microorganism or a plant or a part thereof, comprises increasing or generating the activity of a gene product with the activity of a gene product conferring the activity of “branched-chain amino acid permease”, especially from Saccharomyces cerevisiae or its functional equivalent or its homolog, e.g. the increase of
[92049] (a) a gene product of a gene comprising the nucleic acid molecule as shown in the respective line in column 5 of Table I (whereby the respective line disclose in column 7 the fine chemical glucose), application no. 17, preferably the coding region thereof, or a homolog or a fragment thereof, and being depicted in the same respective line as said Ydr046c, or a functional equivalent or a homolog thereof as shown in column 8 of Table I, application no. 17, preferably the coding region thereof, particularly a homolog or functional equivalent as shown in column 8 of Table I B, application no. 17, and being depicted in the same respective line as said Ydr046c, and preferably the activity is increased plastidic, or
[92050] (b) a polypeptide comprising a polypeptide, a consensus sequence or at least a polypeptide motif as shown in the respective line in column 5 of Table II or in column 8 of Table IV, application no. 17, respectively, and being depicted in the same respective line as said Ydr046c, or a functional equivalent or a homolog thereof as depicted in column 8 of Table II, application no. 17, preferably a homolog or functional equivalent as depicted in column 8 of Table II B, application no. 17, and being depicted in the same respective line as said Ydr046c, and preferably the activity is increased plastidic, whereby the respective line disclose in column 7 the fine chemical glucose.

[92051] Accordingly, in one embodiment, the molecule which activity is to be increased in the process of the invention is the gene product with an activity as a “branched-chain amino acid permease”, preferably it is the molecule of section (a) or (b) of this paragraph.

[92052] In particular, it was observed that in plants, especially in Arabidopsis thaliana, increasing or generating the activity of a gene product plastidic with the activity of a “branched-chain amino acid permease”, preferably being encoded by a gene comprising the nucleic acid sequence SEQ ID NO. 63544, preferably the coding region thereof, conferred the production of or the increase in glucose compared with the wild type control.

[92053] The nucleic acid sequence of Ydr183w from Saccharomyces cerevisiae, e.g. as shown in the respective line in column 5 of Table I, application no. 17, has been published in A. And the activity of the gene product thereof is the activity of ydr183w-protein.

[92054] Accordingly, in one embodiment, the process of the present invention for producing fructose in a non-human organism, like a microorganism or a plant or a part thereof, comprises increasing or generating the activity of a gene product with the activity of a gene product conferring the activity of “ydr183w-protein”, especially from Saccharomyces cerevisiae or its functional equivalent or its homolog, e.g. the increase of
[92055] (a) a gene product of a gene comprising the nucleic acid molecule as shown in the respective line in column 5 of Table I (whereby the respective line disclose in column 7 the fine chemical fructose), application no. 17, preferably the coding region thereof, or a homolog or a fragment thereof, and being depicted in the same respective line as said Ydr183w, or a functional equivalent or a homolog thereof as shown in column 8 of Table I, application no. 17, preferably the coding region thereof, particularly a homolog or functional equivalent as shown in column 8 of Table I B, application no. 17, and being depicted in the same respective line as said Ydr183w, and preferably the activity is increased plastidic, or
[92056] (b) a polypeptide comprising a polypeptide, a consensus sequence or at least a polypeptide motif as shown in the respective line in column 5 of Table II or in column 8 of Table IV, application no. 17, respectively, and being depicted in the same respective line as said Ydr183w, or a functional equivalent or a homolog thereof as depicted in column 8 of Table II, application no. 17, preferably a homolog or functional equivalent as depicted in column 8 of Table II B, application no. 17, and being depicted in the same respective line as said Ydr183w, and preferably the activity is increased plastidic, whereby the respective line disclose in column 7 the fine chemical fructose.

[92057] Accordingly, in one embodiment, the molecule which activity is to be increased in the process of the invention is the gene product with an activity as a “ydr183w-protein”, preferably it is the molecule of section (a) or (b) of this paragraph.

[92058] In particular, it was observed that in plants, especially in Arabidopsis thaliana, increasing or generating the activity of a gene product plastidic with the activity of a “ydr183w-protein”, preferably being encoded by a gene comprising the nucleic acid sequence SEQ ID NO. 90103, preferably the coding region thereof, conferred the production of or the increase in fructose compared with the wild type control.

[92059] The nucleic acid sequence of Ydr183w from Saccharomyces cerevisiae, e.g. as shown in the respective line in column 5 of Table I, application no. 17, has been published in A. And the activity of the gene product thereof is the activity of ydr183w-protein.

[92060] Accordingly, in one embodiment, the process of the present invention for producing glucose in a non-human organism, like a microorganism or a plant or a part thereof, comprises increasing or generating the activity of a gene product with the activity of a gene product conferring the activity of “ydr183w-protein”, especially from Saccharomyces cerevisiae or its functional equivalent or its homolog, e.g. the increase of
[92061] (a) a gene product of a gene comprising the nucleic acid molecule as shown in the respective line in column 5 of Table I (whereby the respective line disclose in column 7 the fine chemical glucose), application no. 17, preferably the coding region thereof, or a homolog or a fragment thereof, and being depicted in the same respective line as said Ydr183w, or a functional equivalent or a homolog thereof as shown in column 8 of Table I, application no. 17, preferably the coding region thereof, particularly a homolog or functional equivalent as shown in column 8 of Table I B, application no. 17, and being depicted in the same respective line as said Ydr183w, and preferably the activity is increased plastidic, or
[92062] (b) a polypeptide comprising a polypeptide, a consensus sequence or at least a polypeptide motif as shown in the respective line in column 5 of Table II or in column 8 of Table IV, application no. 17, respectively, and being depicted in the same respective line as said Ydr183w, or a functional equivalent or a homolog thereof as depicted in column 8 of Table II, application no. 17, preferably a homolog or functional equivalent as depicted in column 8 of Table II B, application no. 17, and being depicted in the same respective line as said Ydr183w, and preferably the activity is increased plastidic, whereby the respective line disclose in column 7 the fine chemical glucose.

[92063] Accordingly, in one embodiment, the molecule which activity is to be increased in the process of the invention is the gene product with an activity as a “ydr183w-protein”, preferably it is the molecule of section (a) or (b) of this paragraph.

[92064] In particular, it was observed that in plants, especially in Arabidopsis thaliana, increasing or generating the activity of a gene product plastidic with the activity of a “ydr183w-protein”, preferably being encoded by a gene comprising the nucleic acid sequence SEQ ID NO. 90103, preferably the coding region thereof, conferred the production of or the increase in glucose compared with the wild type control.

[92065] The nucleic acid sequence of Ydr507c from Saccharomyces cerevisiae, e.g. as shown in the respective line in column 5 of Table I, application no. 17, has been published in A. And the activity of the gene product thereof is the activity of ydr507c-protein.

[92066] Accordingly, in one embodiment, the process of the present invention for producing glucose-1-phosphate in a non-human organism, like a microorganism or a plant or a part thereof, comprises increasing or generating the activity of a gene product with the activity of a gene product conferring the activity of “ydr507c-protein”, especially from Saccharomyces cerevisiae or its functional equivalent or its homolog, e.g. the increase of
[92067] (a) a gene product of a gene comprising the nucleic acid molecule as shown in the respective line in column 5 of Table I (whereby the respective line disclose in column 7 the fine chemical glucose-1-phosphate), application no. 17, preferably the coding region thereof, or a homolog or a fragment thereof, and being depicted in the same respective line as said Ydr507c, or a functional equivalent or a homolog thereof as shown in column 8 of Table I, application no. 17, preferably the coding region thereof, particularly a homolog or functional equivalent as shown in column 8 of Table I B, application no. 17, and being depicted in the same respective line as said Ydr507c, and preferably the activity is increased non-targeted, or
[92068] (b) a polypeptide comprising a polypeptide, a consensus sequence or at least a polypeptide motif as shown in the respective line in column 5 of Table II or in column 8 of Table IV, application no. 17, respectively, and being depicted in the same respective line as said Ydr507c, or a functional equivalent or a homolog thereof as depicted in column 8 of Table II, application no. 17, preferably a homolog or functional equivalent as depicted in column 8 of Table II B, application no. 17, and being depicted in the same respective line as said Ydr507c, and preferably the activity is increased non-targeted, whereby the respective line disclose in column 7 the fine chemical glucose-1-phosphate.

[92069] Accordingly, in one embodiment, the molecule which activity is to be increased in the process of the invention is the gene product with an activity as a “ydr507c-protein”, preferably it is the molecule of section (a) or (b) of this paragraph.

[92070] In particular, it was observed that in plants, especially in Arabidopsis thaliana, increasing or generating the activity of a gene product non-targeted with the activity of a “ydr507c-protein”, preferably being encoded by a gene comprising the nucleic acid sequence SEQ ID NO. 90165, preferably the coding region thereof, conferred the production of or the increase in glucose-1-phosphate compared with the wild type control.

[92071] The nucleic acid sequence of Yel011w from Saccharomyces cerevisiae, e.g. as shown in the respective line in column 5 of Table I, application no. 17, has been published in A. And the activity of the gene product thereof is the activity of 1,4-alpha-glucan branching enzyme.

[92072] Accordingly, in one embodiment, the process of the present invention for producing fructose in a non-human organism, like a microorganism or a plant or a part thereof, comprises increasing or generating the activity of a gene product with the activity of a gene product conferring the activity of “1,4-alpha-glucan branching enzyme”, especially from Saccharomyces cerevisiae or its functional equivalent or its homolog, e.g. the increase of
[92073] (a) a gene product of a gene comprising the nucleic acid molecule as shown in the respective line in column 5 of Table I (whereby the respective line disclose in column 7 the fine chemical fructose), application no. 17, preferably the coding region thereof, or a homolog or a fragment thereof, and being depicted in the same respective line as said Yel011w, or a functional equivalent or a homolog thereof as shown in column 8 of Table I, application no. 17, preferably the coding region thereof, particularly a homolog or functional equivalent as shown in column 8 of Table I B, application no. 17, and being depicted in the same respective line as said Yel011w, and preferably the activity is increased non-targeted, or
[92074] (b) a polypeptide comprising a polypeptide, a consensus sequence or at least a polypeptide motif as shown in the respective line in column 5 of Table II or in column 8 of Table IV, application no. 17, respectively, and being depicted in the same respective line as said Yel011w, or a functional equivalent or a homolog thereof as depicted in column 8 of Table II, application no. 17, preferably a homolog or functional equivalent as depicted in column 8 of Table II B, application no. 17, and being depicted in the same respective line as said Yel011w, and preferably the activity is increased non-targeted, whereby the respective line disclose in column 7 the fine chemical fructose.

[92075] Accordingly, in one embodiment, the molecule which activity is to be increased in the process of the invention is the gene product with an activity as a “1,4-alpha-glucan branching enzyme”, preferably it is the molecule of section (a) or (b) of this paragraph.

[92076] In particular, it was observed that in plants, especially in Arabidopsis thaliana, increasing or generating the activity of a gene product non-targeted with the activity of a “1,4-alpha-glucan branching enzyme”, preferably being encoded by a gene comprising the nucleic acid sequence SEQ ID NO. 148614, preferably the coding region thereof, conferred the production of or the increase in fructose compared with the wild type control.

[92077] The nucleic acid sequence of Yel011w from Saccharomyces cerevisiae, e.g. as shown in the respective line in column 5 of Table I, application no. 17, has been published in A. And the activity of the gene product thereof is the activity of 1,4-alpha-glucan branching enzyme.

[92078] Accordingly, in one embodiment, the process of the present invention for producing glucose in a non-human organism, like a microorganism or a plant or a part thereof, comprises increasing or generating the activity of a gene product with the activity of a gene product conferring the activity of “1,4-alpha-glucan branching enzyme”, especially from Saccharomyces cerevisiae or its functional equivalent or its homolog, e.g. the increase of
[92079] (a) a gene product of a gene comprising the nucleic acid molecule as shown in the respective line in column 5 of Table I (whereby the respective line disclose in column 7 the fine chemical glucose), application no. 17, preferably the coding region thereof, or a homolog or a fragment thereof, and being depicted in the same respective line as said Yel011w, or a functional equivalent or a homolog thereof as shown in column 8 of Table I, application no. 17, preferably the coding region thereof, particularly a homolog or functional equivalent as shown in column 8 of Table I B, application no. 17, and being depicted in the same respective line as said Yel011w, and preferably the activity is increased non-targeted, or
[92080] (b) a polypeptide comprising a polypeptide, a consensus sequence or at least a polypeptide motif as shown in the respective line in column 5 of Table II or in column 8 of Table IV, application no. 17, respectively, and being depicted in the same respective line as said Yel011w, or a functional equivalent or a homolog thereof as depicted in column 8 of Table II, application no. 17, preferably a homolog or functional equivalent as depicted in column 8 of Table II B, application no. 17, and being depicted in the same respective line as said Yel011w, and preferably the activity is increased non-targeted, whereby the respective line disclose in column 7 the fine chemical glucose.

[92081] Accordingly, in one embodiment, the molecule which activity is to be increased in the process of the invention is the gene product with an activity as a “1,4-alpha-glucan branching enzyme”, preferably it is the molecule of section (a) or (b) of this paragraph.

[92082] In particular, it was observed that in plants, especially in Arabidopsis thaliana, increasing or generating the activity of a gene product non-targeted with the activity of a “1,4-alpha-glucan branching enzyme”, preferably being encoded by a gene comprising the nucleic acid sequence SEQ ID NO. 148614, preferably the coding region thereof, conferred the production of or the increase in glucose compared with the wild type control.

[92083] The nucleic acid sequence of Yel030c-a from Saccharomyces cerevisiae, e.g. as shown in the respective line in column 5 of Table I, application no. 17, has been published in A. And the activity of the gene product thereof is the activity of YEL030C-A-protein.

[92084] Accordingly, in one embodiment, the process of the present invention for producing 3,4,5-trihydroxypentanoic acid in a non-human organism, like a microorganism or a plant or a part thereof, comprises increasing or generating the activity of a gene product with the activity of a gene product conferring the activity of “YEL030C-A-protein”, especially from Saccharomyces cerevisiae or its functional equivalent or its homolog, e.g. the increase of
[92085] (a) a gene product of a gene comprising the nucleic acid molecule as shown in the respective line in column 5 of Table I (whereby the respective line disclose in column 7 the fine chemical 3,4,5-trihydroxypentanoic acid), application no. 17, preferably the coding region thereof, or a homolog or a fragment thereof, and being depicted in the same respective line as said Yel030c-a, or a functional equivalent or a homolog thereof as shown in column 8 of Table I, application no. 17, preferably the coding region thereof, particularly a homolog or functional equivalent as shown in column 8 of Table I B, application no. 17, and being depicted in the same respective line as said Yel030c-a, and preferably the activity is increased non-targeted, or
[92086] (b) a polypeptide comprising a polypeptide, a consensus sequence or at least a polypeptide motif as shown in the respective line in column 5 of Table II or in column 8 of Table IV, application no. 17, respectively, and being depicted in the same respective line as said Yel030c-a, or a functional equivalent or a homolog thereof as depicted in column 8 of Table II, application no. 17, preferably a homolog or functional equivalent as depicted in column 8 of Table II B, application no. 17, and being depicted in the same respective line as said Yel030c-a, and preferably the activity is increased non-targeted, whereby the respective line disclose in column 7 the fine chemical 3,4,5-trihydroxypentanoic acid.

[92087] Accordingly, in one embodiment, the molecule which activity is to be increased in the process of the invention is the gene product with an activity as a “YEL030C-A-protein”, preferably it is the molecule of section (a) or (b) of this paragraph.

[92088] In particular, it was observed that in plants, especially in Arabidopsis thaliana, increasing or generating the activity of a gene product non-targeted with the activity of a “YEL030C-A-protein”, preferably being encoded by a gene comprising the nucleic acid sequence SEQ ID NO. 97294, preferably the coding region thereof, conferred the production of or the increase in 3,4,5-trihydroxypentanoic acid compared with the wild type control.

[92089] The nucleic acid sequence of Yel046c from Saccharomyces cerevisiae, e.g. as shown in the respective line in column 5 of Table I, application no. 17, has been published in A. And the activity of the gene product thereof is the activity of aldolase.

[92090] Accordingly, in one embodiment, the process of the present invention for producing glucose-1-phosphate in a non-human organism, like a microorganism or a plant or a part thereof, comprises increasing or generating the activity of a gene product with the activity of a gene product conferring the activity of “aldolase”, especially from Saccharomyces cerevisiae or its functional equivalent or its homolog, e.g. the increase of
[92091] (a) a gene product of a gene comprising the nucleic acid molecule as shown in the respective line in column 5 of Table I (whereby the respective line disclose in column 7 the fine chemical glucose-1-phosphate), application no. 17, preferably the coding region thereof, or a homolog or a fragment thereof, and being depicted in the same respective line as said Yel046c, or a functional equivalent or a homolog thereof as shown in column 8 of Table I, application no. 17, preferably the coding region thereof, particularly a homolog or functional equivalent as shown in column 8 of Table I B, application no. 17, and being depicted in the same respective line as said Yel046c, and preferably the activity is increased non-targeted, or
[92092] (b) a polypeptide comprising a polypeptide, a consensus sequence or at least a polypeptide motif as shown in the respective line in column 5 of Table II or in column 8 of Table IV, application no. 17, respectively, and being depicted in the same respective line as said Yel046c, or a functional equivalent or a homolog thereof as depicted in column 8 of Table II, application no. 17, preferably a homolog or functional equivalent as depicted in column 8 of Table II B, application no. 17, and being depicted in the same respective line as said Yel046c, and preferably the activity is increased non-targeted, whereby the respective line disclose in column 7 the fine chemical glucose-1-phosphate.

[92093] Accordingly, in one embodiment, the molecule which activity is to be increased in the process of the invention is the gene product with an activity as a “aldolase”, preferably it is the molecule of section (a) or (b) of this paragraph.

[92094] In particular, it was observed that in plants, especially in Arabidopsis thaliana, increasing or generating the activity of a gene product non-targeted with the activity of a “aldolase”, preferably being encoded by a gene comprising the nucleic acid sequence SEQ ID NO. 128511, preferably the coding region thereof, conferred the production of or the increase in glucose-1-phosphate compared with the wild type control.

[92095] The nucleic acid sequence of Yer024w from Saccharomyces cerevisiae, e.g. as shown in the respective line in column 5 of Table I, application no. 17, has been published in A. And the activity of the gene product thereof is the activity of O-acetyltransferase.

[92096] Accordingly, in one embodiment, the process of the present invention for producing glucose in a non-human organism, like a microorganism or a plant or a part thereof, comprises increasing or generating the activity of a gene product with the activity of a gene product conferring the activity of “O-acetyltransferase”, especially from Saccharomyces cerevisiae or its functional equivalent or its homolog, e.g. the increase of
[92097] (a) a gene product of a gene comprising the nucleic acid molecule as shown in the respective line in column 5 of Table I (whereby the respective line disclose in column 7 the fine chemical glucose), application no. 17, preferably the coding region thereof, or a homolog or a fragment thereof, and being depicted in the same respective line as said Yer024w, or a functional equivalent or a homolog thereof as shown in column 8 of Table I, application no. 17, preferably the coding region thereof, particularly a homolog or functional equivalent as shown in column 8 of Table I B, application no. 17, and being depicted in the same respective line as said Yer024w, and preferably the activity is increased plastidic, or
[92098] (b) a polypeptide comprising a polypeptide, a consensus sequence or at least a polypeptide motif as shown in the respective line in column 5 of Table II or in column 8 of Table IV, application no. 17, respectively, and being depicted in the same respective line as said Yer024w, or a functional equivalent or a homolog thereof as depicted in column 8 of Table II, application no. 17, preferably a homolog or functional equivalent as depicted in column 8 of Table II B, application no. 17, and being depicted in the same respective line as said Yer024w, and preferably the activity is increased plastidic, whereby the respective line disclose in column 7 the fine chemical glucose.

[92099] Accordingly, in one embodiment, the molecule which activity is to be increased in the process of the invention is the gene product with an activity as a “O-acetyltransferase”, preferably it is the molecule of section (a) or (b) of this paragraph.

[92100] In particular, it was observed that in plants, especially in Arabidopsis thaliana, increasing or generating the activity of a gene product plastidic with the activity of a “O-acetyltransferase”, preferably being encoded by a gene comprising the nucleic acid sequence SEQ ID NO. 148811, preferably the coding region thereof, conferred the production of or the increase in glucose compared with the wild type control.

[92101] The nucleic acid sequence of Yer177w from Saccharomyces cerevisiae, e.g. as shown in the respective line in column 5 of Table I, application no. 17, has been published in A. And the activity of the gene product thereof is the activity of yer177w-protein.

[92102] Accordingly, in one embodiment, the process of the present invention for producing raffinose in a non-human organism, like a microorganism or a plant or a part thereof, comprises increasing or generating the activity of a gene product with the activity of a gene product conferring the activity of “yer177w-protein”, especially from Saccharomyces cerevisiae or its functional equivalent or its homolog, e.g. the increase of
[92103] (a) a gene product of a gene comprising the nucleic acid molecule as shown in the respective line in column 5 of Table I (whereby the respective line disclose in column 7 the fine chemical raffinose), application no. 17, preferably the coding region thereof, or a homolog or a fragment thereof, and being depicted in the same respective line as said Yer177w, or a functional equivalent or a homolog thereof as shown in column 8 of Table I, application no. 17, preferably the coding region thereof, particularly a homolog or functional equivalent as shown in column 8 of Table I B, application no. 17, and being depicted in the same respective line as said Yer177w, and preferably the activity is increased plastidic, or
[92104] (b) a polypeptide comprising a polypeptide, a consensus sequence or at least a polypeptide motif as shown in the respective line in column 5 of Table II or in column 8 of Table IV, application no. 17, respectively, and being depicted in the same respective line as said Yer177w, or a functional equivalent or a homolog thereof as depicted in column 8 of Table II, application no. 17, preferably a homolog or functional equivalent as depicted in column 8 of Table II B, application no. 17, and being depicted in the same respective line as said Yer177w, and preferably the activity is increased plastidic, whereby the respective line disclose in column 7 the fine chemical raffinose.

[92105] Accordingly, in one embodiment, the molecule which activity is to be increased in the process of the invention is the gene product with an activity as a “yer177w-protein”, preferably it is the molecule of section (a) or (b) of this paragraph.

[92106] In particular, it was observed that in plants, especially in Arabidopsis thaliana, increasing or generating the activity of a gene product plastidic with the activity of a “yer177w-protein”, preferably being encoded by a gene comprising the nucleic acid sequence SEQ ID NO. 148833, preferably the coding region thereof, conferred the production of or the increase in raffinose compared with the wild type control.

[92107] The nucleic acid sequence of Yfl019c from Saccharomyces cerevisiae, e.g. as shown in the respective line in column 5 of Table I, application no. 17, has been published in A. And the activity of the gene product thereof is the activity of YFL019C-protein.

[92108] Accordingly, in one embodiment, the process of the present invention for producing myo-inositol in a non-human organism, like a microorganism or a plant or a part thereof, comprises increasing or generating the activity of a gene product with the activity of a gene product conferring the activity of “YFL019C-protein”, especially from Saccharomyces cerevisiae or its functional equivalent or its homolog, e.g. the increase of
[92109] (a) a gene product of a gene comprising the nucleic acid molecule as shown in the respective line in column 5 of Table I (whereby the respective line disclose in column 7 the fine chemical myo-inositol), application no. 17, preferably the coding region thereof, or a homolog or a fragment thereof, and being depicted in the same respective line as said Yfl019c, or a functional equivalent or a homolog thereof as shown in column 8 of Table I, application no. 17, preferably the coding region thereof, particularly a homolog or functional equivalent as shown in column 8 of Table I B, application no. 17, and being depicted in the same respective line as said Yfl019c, and preferably the activity is increased non-targeted, or
[92110] (b) a polypeptide comprising a polypeptide, a consensus sequence or at least a polypeptide motif as shown in the respective line in column 5 of Table II or in column 8 of Table IV, application no. 17, respectively, and being depicted in the same respective line as said Yfl019c, or a functional equivalent or a homolog thereof as depicted in column 8 of Table II, application no. 17, preferably a homolog or functional equivalent as depicted in column 8 of Table II B, application no. 17, and being depicted in the same respective line as said Yfl019c, and preferably the activity is increased non-targeted, whereby the respective line disclose in column 7 the fine chemical myo-inositol.

[92111] Accordingly, in one embodiment, the molecule which activity is to be increased in the process of the invention is the gene product with an activity as a “YFL0190-protein”, preferably it is the molecule of section (a) or (b) of this paragraph.

[92112] In particular, it was observed that in plants, especially in Arabidopsis thaliana, increasing or generating the activity of a gene product non-targeted with the activity of a “YFL0190-protein”, preferably being encoded by a gene comprising the nucleic acid sequence SEQ ID NO. 64144, preferably the coding region thereof, conferred the production of or the increase in myo-inositol compared with the wild type control.

[92113] The nucleic acid sequence of Yfl019c from Saccharomyces cerevisiae, e.g. as shown in the respective line in column 5 of Table I, application no. 17, has been published in A. And the activity of the gene product thereof is the activity of YFL019C-protein.

[92114] Accordingly, in one embodiment, the process of the present invention for producing sucrose in a non-human organism, like a microorganism or a plant or a part thereof, comprises increasing or generating the activity of a gene product with the activity of a gene product conferring the activity of “YFL0190-protein”, especially from Saccharomyces cerevisiae or its functional equivalent or its homolog, e.g. the increase of
[92115] (a) a gene product of a gene comprising the nucleic acid molecule as shown in the respective line in column 5 of Table I (whereby the respective line disclose in column 7 the fine chemical sucrose), application no. 17, preferably the coding region thereof, or a homolog or a fragment thereof, and being depicted in the same respective line as said Yfl019c, or a functional equivalent or a homolog thereof as shown in column 8 of Table I, application no. 17, preferably the coding region thereof, particularly a homolog or functional equivalent as shown in column 8 of Table I B, application no. 17, and being depicted in the same respective line as said Yfl019c, and preferably the activity is increased non-targeted, or
[92116] (b) a polypeptide comprising a polypeptide, a consensus sequence or at least a polypeptide motif as shown in the respective line in column 5 of Table II or in column 8 of Table IV, application no. 17, respectively, and being depicted in the same respective line as said Yfl019c, or a functional equivalent or a homolog thereof as depicted in column 8 of Table II, application no. 17, preferably a homolog or functional equivalent as depicted in column 8 of Table II B, application no. 17, and being depicted in the same respective line as said Yfl019c, and preferably the activity is increased non-targeted, whereby the respective line disclose in column 7 the fine chemical sucrose.

[92117] Accordingly, in one embodiment, the molecule which activity is to be increased in the process of the invention is the gene product with an activity as a “YFL0190-protein”, preferably it is the molecule of section (a) or (b) of this paragraph.

[92118] In particular, it was observed that in plants, especially in Arabidopsis thaliana, increasing or generating the activity of a gene product non-targeted with the activity of a “YFL019C-protein”, preferably being encoded by a gene comprising the nucleic acid sequence SEQ ID NO. 64144, preferably the coding region thereof, conferred the production of or the increase in sucrose compared with the wild type control.

[92119] The nucleic acid sequence of Yfr053c from Saccharomyces cerevisiae, e.g. as shown in the respective line in column 5 of Table I, application no. 17, has been published in A. And the activity of the gene product thereof is the activity of hexokinase.

[92120] Accordingly, in one embodiment, the process of the present invention for producing sucrose in a non-human organism, like a microorganism or a plant or a part thereof, comprises increasing or generating the activity of a gene product with the activity of a gene product conferring the activity of “hexokinase”, especially from Saccharomyces cerevisiae or its functional equivalent or its homolog, e.g. the increase of
[92121] (a) a gene product of a gene comprising the nucleic acid molecule as shown in the respective line in column 5 of Table I (whereby the respective line disclose in column 7 the fine chemical sucrose), application no. 17, preferably the coding region thereof, or a homolog or a fragment thereof, and being depicted in the same respective line as said Yfr053c, or a functional equivalent or a homolog thereof as shown in column 8 of Table I, application no. 17, preferably the coding region thereof, particularly a homolog or functional equivalent as shown in column 8 of Table I B, application no. 17, and being depicted in the same respective line as said Yfr053c, and preferably the activity is increased non-targeted, or
[92122] (b) a polypeptide comprising a polypeptide, a consensus sequence or at least a polypeptide motif as shown in the respective line in column 5 of Table II or in column 8 of Table IV, application no. 17, respectively, and being depicted in the same respective line as said Yfr053c, or a functional equivalent or a homolog thereof as depicted in column 8 of Table II, application no. 17, preferably a homolog or functional equivalent as depicted in column 8 of Table II B, application no. 17, and being depicted in the same respective line as said Yfr053c, and preferably the activity is increased non-targeted, whereby the respective line disclose in column 7 the fine chemical sucrose.

[92123] Accordingly, in one embodiment, the molecule which activity is to be increased in the process of the invention is the gene product with an activity as a “hexokinase”, preferably it is the molecule of section (a) or (b) of this paragraph.

[92124] In particular, it was observed that in plants, especially in Arabidopsis thaliana, increasing or generating the activity of a gene product non-targeted with the activity of a “hexokinase”, preferably being encoded by a gene comprising the nucleic acid sequence SEQ ID NO. 149219, preferably the coding region thereof, conferred the production of or the increase in sucrose compared with the wild type control.

[92125] The nucleic acid sequence of Ygl039w from Saccharomyces cerevisiae, e.g. as shown in the respective line in column 5 of Table I, application no. 17, has been published in A. And the activity of the gene product thereof is the activity of oxidoreductase.

[92126] Accordingly, in one embodiment, the process of the present invention for producing glucose-1-phosphate in a non-human organism, like a microorganism or a plant or a part thereof, comprises increasing or generating the activity of a gene product with the activity of a gene product conferring the activity of “oxidoreductase”, especially from Saccharomyces cerevisiae or its functional equivalent or its homolog, e.g. the increase of
[92127] (a) a gene product of a gene comprising the nucleic acid molecule as shown in the respective line in column 5 of Table I (whereby the respective line disclose in column 7 the fine chemical glucose-1-phosphate), application no. 17, preferably the coding region thereof, or a homolog or a fragment thereof, and being depicted in the same respective line as said Ygl039w, or a functional equivalent or a homolog thereof as shown in column 8 of Table I, application no. 17, preferably the coding region thereof, particularly a homolog or functional equivalent as shown in column 8 of Table I B, application no. 17, and being depicted in the same respective line as said Ygl039w, and preferably the activity is increased plastidic, or
[92128] (b) a polypeptide comprising a polypeptide, a consensus sequence or at least a polypeptide motif as shown in the respective line in column 5 of Table II or in column 8 of Table IV, application no. 17, respectively, and being depicted in the same respective line as said Ygl039w, or a functional equivalent or a homolog thereof as depicted in column 8 of Table II, application no. 17, preferably a homolog or functional equivalent as depicted in column 8 of Table II B, application no. 17, and being depicted in the same respective line as said Ygl039w, and preferably the activity is increased plastidic, whereby the respective line disclose in column 7 the fine chemical glucose-1-phosphate.

[92129] Accordingly, in one embodiment, the molecule which activity is to be increased in the process of the invention is the gene product with an activity as a “oxidoreductase”, preferably it is the molecule of section (a) or (b) of this paragraph.

[92130] In particular, it was observed that in plants, especially in Arabidopsis thaliana, increasing or generating the activity of a gene product plastidic with the activity of a “oxidoreductase”, preferably being encoded by a gene comprising the nucleic acid sequence SEQ ID NO. 120436, preferably the coding region thereof, conferred the production of or the increase in glucose-1-phosphate compared with the wild type control.

[92131] The nucleic acid sequence of Ygl039w from Saccharomyces cerevisiae, e.g. as shown in the respective line in column 5 of Table I, application no. 17, has been published in A. And the activity of the gene product thereof is the activity of oxidoreductase.

[92132] Accordingly, in one embodiment, the process of the present invention for producing 3,4,5-trihydroxypentanoic acid in a non-human organism, like a microorganism or a plant or a part thereof, comprises increasing or generating the activity of a gene product with the activity of a gene product conferring the activity of “oxidoreductase”, especially from Saccharomyces cerevisiae or its functional equivalent or its homolog, e.g. the increase of
[92133] (a) a gene product of a gene comprising the nucleic acid molecule as shown in the respective line in column 5 of Table I (whereby the respective line disclose in column 7 the fine chemical 3,4,5-trihydroxypentanoic acid), application no. 17, preferably the coding region thereof, or a homolog or a fragment thereof, and being depicted in the same respective line as said Ygl039w, or a functional equivalent or a homolog thereof as shown in column 8 of Table I, application no. 17, preferably the coding region thereof, particularly a homolog or functional equivalent as shown in column 8 of Table I B, application no. 17, and being depicted in the same respective line as said Ygl039w, and preferably the activity is increased plastidic, or
[92134] (b) a polypeptide comprising a polypeptide, a consensus sequence or at least a polypeptide motif as shown in the respective line in column 5 of Table II or in column 8 of Table IV, application no. 17, respectively, and being depicted in the same respective line as said Ygl039w, or a functional equivalent or a homolog thereof as depicted in column 8 of Table II, application no. 17, preferably a homolog or functional equivalent as depicted in column 8 of Table II B, application no. 17, and being depicted in the same respective line as said Ygl039w, and preferably the activity is increased plastidic, whereby the respective line disclose in column 7 the fine chemical 3,4,5-trihydroxypentanoic acid.

[92135] Accordingly, in one embodiment, the molecule which activity is to be increased in the process of the invention is the gene product with an activity as a “oxidoreductase”, preferably it is the molecule of section (a) or (b) of this paragraph.

[92136] In particular, it was observed that in plants, especially in Arabidopsis thaliana, increasing or generating the activity of a gene product plastidic with the activity of a “oxidoreductase”, preferably being encoded by a gene comprising the nucleic acid sequence SEQ ID NO. 120436, preferably the coding region thereof, conferred the production of or the increase in 3,4,5-trihydroxypentanoic acid compared with the wild type control.

[92137] The nucleic acid sequence of Ygl096w from Saccharomyces cerevisiae, e.g. as shown in the respective line in column 5 of Table I, application no. 17, has been published in A. And the activity of the gene product thereof is the activity of ygl096w-protein.

[92138] Accordingly, in one embodiment, the process of the present invention for producing glucose-1-phosphate in a non-human organism, like a microorganism or a plant or a part thereof, comprises increasing or generating the activity of a gene product with the activity of a gene product conferring the activity of “ygl096w-protein”, especially from Saccharomyces cerevisiae or its functional equivalent or its homolog, e.g. the increase of
[92139] (a) a gene product of a gene comprising the nucleic acid molecule as shown in the respective line in column 5 of Table I (whereby the respective line disclose in column 7 the fine chemical glucose-1-phosphate), application no. 17, preferably the coding region thereof, or a homolog or a fragment thereof, and being depicted in the same respective line as said Ygl096w, or a functional equivalent or a homolog thereof as shown in column 8 of Table I, application no. 17, preferably the coding region thereof, particularly a homolog or functional equivalent as shown in column 8 of Table I B, application no. 17, and being depicted in the same respective line as said Ygl096w, and preferably the activity is increased plastidic, or
[92140] (b) a polypeptide comprising a polypeptide, a consensus sequence or at least a polypeptide motif as shown in the respective line in column 5 of Table II or in column 8 of Table IV, application no. 17, respectively, and being depicted in the same respective line as said Ygl096w, or a functional equivalent or a homolog thereof as depicted in column 8 of Table II, application no. 17, preferably a homolog or functional equivalent as depicted in column 8 of Table II B, application no. 17, and being depicted in the same respective line as said Ygl096w, and preferably the activity is increased plastidic, whereby the respective line disclose in column 7 the fine chemical glucose-1-phosphate.

[92141] Accordingly, in one embodiment, the molecule which activity is to be increased in the process of the invention is the gene product with an activity as a “ygl096w-protein”, preferably it is the molecule of section (a) or (b) of this paragraph.

[92142] In particular, it was observed that in plants, especially in Arabidopsis thaliana, increasing or generating the activity of a gene product plastidic with the activity of a “ygl096w-protein”, preferably being encoded by a gene comprising the nucleic acid sequence SEQ ID NO. 90278, preferably the coding region thereof, conferred the production of or the increase in glucose-1-phosphate compared with the wild type control.

[92143] The nucleic acid sequence of Ygl096w from Saccharomyces cerevisiae, e.g. as shown in the respective line in column 5 of Table I, application no. 17, has been published in A. And the activity of the gene product thereof is the activity of ygl096w-protein.

[92144] Accordingly, in one embodiment, the process of the present invention for producing 3,4,5-trihydroxypentanoic acid in a non-human organism, like a microorganism or a plant or a part thereof, comprises increasing or generating the activity of a gene product with the activity of a gene product conferring the activity of “ygl096w-protein”, especially from Saccharomyces cerevisiae or its functional equivalent or its homolog, e.g. the increase of
[92145] (a) a gene product of a gene comprising the nucleic acid molecule as shown in the respective line in column 5 of Table I (whereby the respective line disclose in column 7 the fine chemical 3,4,5-trihydroxypentanoic acid), application no. 17, preferably the coding region thereof, or a homolog or a fragment thereof, and being depicted in the same respective line as said Ygl096w, or a functional equivalent or a homolog thereof as shown in column 8 of Table I, application no. 17, preferably the coding region thereof, particularly a homolog or functional equivalent as shown in column 8 of Table I B, application no. 17, and being depicted in the same respective line as said Ygl096w, and preferably the activity is increased plastidic, or
[92146] (b) a polypeptide comprising a polypeptide, a consensus sequence or at least a polypeptide motif as shown in the respective line in column 5 of Table II or in column 8 of Table IV, application no. 17, respectively, and being depicted in the same respective line as said Ygl096w, or a functional equivalent or a homolog thereof as depicted in column 8 of Table II, application no. 17, preferably a homolog or functional equivalent as depicted in column 8 of Table II B, application no. 17, and being depicted in the same respective line as said Ygl096w, and preferably the activity is increased plastidic, whereby the respective line disclose in column 7 the fine chemical 3,4,5-trihydroxypentanoic acid.

[92147] Accordingly, in one embodiment, the molecule which activity is to be increased in the process of the invention is the gene product with an activity as a “ygl096w-protein”, preferably it is the molecule of section (a) or (b) of this paragraph.

[92148] In particular, it was observed that in plants, especially in Arabidopsis thaliana, increasing or generating the activity of a gene product plastidic with the activity of a “ygl096w-protein”, preferably being encoded by a gene comprising the nucleic acid sequence SEQ ID NO. 90278, preferably the coding region thereof, conferred the production of or the increase in 3,4,5-trihydroxypentanoic acid compared with the wild type control.

[92149] The nucleic acid sequence of Ygl237c from Saccharomyces cerevisiae, e.g. as shown in the respective line in column 5 of Table I, application no. 17, has been published in A. And the activity of the gene product thereof is the activity of ygl237c-protein.

[92150] Accordingly, in one embodiment, the process of the present invention for producing raffinose in a non-human organism, like a microorganism or a plant or a part thereof, comprises increasing or generating the activity of a gene product with the activity of a gene product conferring the activity of “ygl237c-protein”, especially from Saccharomyces cerevisiae or its functional equivalent or its homolog, e.g. the increase of
[92151] (a) a gene product of a gene comprising the nucleic acid molecule as shown in the respective line in column 5 of Table I (whereby the respective line disclose in column 7 the fine chemical raffinose), application no. 17, preferably the coding region thereof, or a homolog or a fragment thereof, and being depicted in the same respective line as said Ygl237c, or a functional equivalent or a homolog thereof as shown in column 8 of Table I, application no. 17, preferably the coding region thereof, particularly a homolog or functional equivalent as shown in column 8 of Table I B, application no. 17, and being depicted in the same respective line as said Ygl237c, and preferably the activity is increased non-targeted, or
[92152] (b) a polypeptide comprising a polypeptide, a consensus sequence or at least a polypeptide motif as shown in the respective line in column 5 of Table II or in column 8 of Table IV, application no. 17, respectively, and being depicted in the same respective line as said Ygl237c, or a functional equivalent or a homolog thereof as depicted in column 8 of Table II, application no. 17, preferably a homolog or functional equivalent as depicted in column 8 of Table II B, application no. 17, and being depicted in the same respective line as said Ygl237c, and preferably the activity is increased non-targeted, whereby the respective line disclose in column 7 the fine chemical raffinose.

[92153] Accordingly, in one embodiment, the molecule which activity is to be increased in the process of the invention is the gene product with an activity as a “ygl237c-protein”, preferably it is the molecule of section (a) or (b) of this paragraph.

[92154] In particular, it was observed that in plants, especially in Arabidopsis thaliana, increasing or generating the activity of a gene product non-targeted with the activity of a “ygl237c-protein”, preferably being encoded by a gene comprising the nucleic acid sequence SEQ ID NO. 64177, preferably the coding region thereof, conferred the production of or the increase in raffinose compared with the wild type control.

[92155] The nucleic acid sequence of Ygl256w from Saccharomyces cerevisiae, e.g. as shown in the respective line in column 5 of Table I, application no. 17, has been published in A. And the activity of the gene product thereof is the activity of alcohol dehydrogenase.

[92156] Accordingly, in one embodiment, the process of the present invention for producing glucose-1-phosphate in a non-human organism, like a microorganism or a plant or a part thereof, comprises increasing or generating the activity of a gene product with the activity of a gene product conferring the activity of “alcohol dehydrogenase”, especially from Saccharomyces cerevisiae or its functional equivalent or its homolog, e.g. the increase of
[92157] (a) a gene product of a gene comprising the nucleic acid molecule as shown in the respective line in column 5 of Table I (whereby the respective line disclose in column 7 the fine chemical glucose-1-phosphate), application no. 17, preferably the coding region thereof, or a homolog or a fragment thereof, and being depicted in the same respective line as said Ygl256w, or a functional equivalent or a homolog thereof as shown in column 8 of Table I, application no. 17, preferably the coding region thereof, particularly a homolog or functional equivalent as shown in column 8 of Table I B, application no. 17, and being depicted in the same respective line as said Ygl256w, and preferably the activity is increased plastidic, or
[92158] (b) a polypeptide comprising a polypeptide, a consensus sequence or at least a polypeptide motif as shown in the respective line in column 5 of Table II or in column 8 of Table IV, application no. 17, respectively, and being depicted in the same respective line as said Ygl256w, or a functional equivalent or a homolog thereof as depicted in column 8 of Table II, application no. 17, preferably a homolog or functional equivalent as depicted in column 8 of Table II B, application no. 17, and being depicted in the same respective line as said Ygl256w, and preferably the activity is increased plastidic, whereby the respective line disclose in column 7 the fine chemical glucose-1-phosphate.

[92159] Accordingly, in one embodiment, the molecule which activity is to be increased in the process of the invention is the gene product with an activity as a “alcohol dehydrogenase”, preferably it is the molecule of section (a) or (b) of this paragraph.

[92160] In particular, it was observed that in plants, especially in Arabidopsis thaliana, increasing or generating the activity of a gene product plastidic with the activity of a “alcohol dehydrogenase”, preferably being encoded by a gene comprising the nucleic acid sequence SEQ ID NO. 130742, preferably the coding region thereof, conferred the production of or the increase in glucose-1-phosphate compared with the wild type control.

[92161] The nucleic acid sequence of Ygl256w from Saccharomyces cerevisiae, e.g. as shown in the respective line in column 5 of Table I, application no. 17, has been published in A. And the activity of the gene product thereof is the activity of alcohol dehydrogenase.

[92162] Accordingly, in one embodiment, the process of the present invention for producing 3,4,5-trihydroxypentanoic acid in a non-human organism, like a microorganism or a plant or a part thereof, comprises increasing or generating the activity of a gene product with the activity of a gene product conferring the activity of “alcohol dehydrogenase”, especially from Saccharomyces cerevisiae or its functional equivalent or its homolog, e.g. the increase of
[92163] (a) a gene product of a gene comprising the nucleic acid molecule as shown in the respective line in column 5 of Table I (whereby the respective line disclose in column 7 the fine chemical 3,4,5-trihydroxypentanoic acid), application no. 17, preferably the coding region thereof, or a homolog or a fragment thereof, and being depicted in the same respective line as said Ygl256w, or a functional equivalent or a homolog thereof as shown in column 8 of Table I, application no. 17, preferably the coding region thereof, particularly a homolog or functional equivalent as shown in column 8 of Table I B, application no. 17, and being depicted in the same respective line as said Ygl256w, and preferably the activity is increased plastidic, or
[92164] (b) a polypeptide comprising a polypeptide, a consensus sequence or at least a polypeptide motif as shown in the respective line in column 5 of Table II or in column 8 of Table IV, application no. 17, respectively, and being depicted in the same respective line as said Ygl256w, or a functional equivalent or a homolog thereof as depicted in column 8 of Table II, application no. 17, preferably a homolog or functional equivalent as depicted in column 8 of Table II B, application no. 17, and being depicted in the same respective line as said Ygl256w, and preferably the activity is increased plastidic, whereby the respective line disclose in column 7 the fine chemical 3,4,5-trihydroxypentanoic acid.

[92165] Accordingly, in one embodiment, the molecule which activity is to be increased in the process of the invention is the gene product with an activity as a “alcohol dehydrogenase”, preferably it is the molecule of section (a) or (b) of this paragraph.

[92166] In particular, it was observed that in plants, especially in Arabidopsis thaliana, increasing or generating the activity of a gene product plastidic with the activity of a “alcohol dehydrogenase”, preferably being encoded by a gene comprising the nucleic acid sequence SEQ ID NO. 130742, preferably the coding region thereof, conferred the production of or the increase in 3,4,5-trihydroxypentanoic acid compared with the wild type control.

[92167] The nucleic acid sequence of Yhl013c from Saccharomyces cerevisiae, e.g. as shown in the respective line in column 5 of Table I, application no. 17, has been published in A. And the activity of the gene product thereof is the activity of yhl013c-protein.

[92168] Accordingly, in one embodiment, the process of the present invention for producing glucose in a non-human organism, like a microorganism or a plant or a part thereof, comprises increasing or generating the activity of a gene product with the activity of a gene product conferring the activity of “yhl013c-protein”, especially from Saccharomyces cerevisiae or its functional equivalent or its homolog, e.g. the increase of
[92169] (a) a gene product of a gene comprising the nucleic acid molecule as shown in the respective line in column 5 of Table I (whereby the respective line disclose in column 7 the fine chemical glucose), application no. 17, preferably the coding region thereof, or a homolog or a fragment thereof, and being depicted in the same respective line as said Yhl013c, or a functional equivalent or a homolog thereof as shown in column 8 of Table I, application no. 17, preferably the coding region thereof, particularly a homolog or functional equivalent as shown in column 8 of Table I B, application no. 17, and being depicted in the same respective line as said Yhl013c, and preferably the activity is increased plastidic, or
[92170] (b) a polypeptide comprising a polypeptide, a consensus sequence or at least a polypeptide motif as shown in the respective line in column 5 of Table II or in column 8 of Table IV, application no. 17, respectively, and being depicted in the same respective line as said Yhl013c, or a functional equivalent or a homolog thereof as depicted in column 8 of Table II, application no. 17, preferably a homolog or functional equivalent as depicted in column 8 of Table II B, application no. 17, and being depicted in the same respective line as said Yhl013c, and preferably the activity is increased plastidic, whereby the respective line disclose in column 7 the fine chemical glucose.

[92171] Accordingly, in one embodiment, the molecule which activity is to be increased in the process of the invention is the gene product with an activity as a “yhl013c-protein”, preferably it is the molecule of section (a) or (b) of this paragraph.

[92172] In particular, it was observed that in plants, especially in Arabidopsis thaliana, increasing or generating the activity of a gene product plastidic with the activity of a “yhl013c-protein”, preferably being encoded by a gene comprising the nucleic acid sequence SEQ ID NO. 14715, preferably the coding region thereof, conferred the production of or the increase in glucose compared with the wild type control.

[92173] The nucleic acid sequence of Yhl013c from Saccharomyces cerevisiae, e.g. as shown in the respective line in column 5 of Table I, application no. 17, has been published in A. And the activity of the gene product thereof is the activity of yhl013c-protein.

[92174] Accordingly, in one embodiment, the process of the present invention for producing glucose-1-phosphate in a non-human organism, like a microorganism or a plant or a part thereof, comprises increasing or generating the activity of a gene product with the activity of a gene product conferring the activity of “yhl013c-protein”, especially from Saccharomyces cerevisiae or its functional equivalent or its homolog, e.g. the increase of
[92175] (a) a gene product of a gene comprising the nucleic acid molecule as shown in the respective line in column 5 of Table I (whereby the respective line disclose in column 7 the fine chemical glucose-1-phosphate), application no. 17, preferably the coding region thereof, or a homolog or a fragment thereof, and being depicted in the same respective line as said Yhl013c, or a functional equivalent or a homolog thereof as shown in column 8 of Table I, application no. 17, preferably the coding region thereof, particularly a homolog or functional equivalent as shown in column 8 of Table I B, application no. 17, and being depicted in the same respective line as said Yhl013c, and preferably the activity is increased plastidic, or
[92176] (b) a polypeptide comprising a polypeptide, a consensus sequence or at least a polypeptide motif as shown in the respective line in column 5 of Table II or in column 8 of Table IV, application no. 17, respectively, and being depicted in the same respective line as said Yhl013c, or a functional equivalent or a homolog thereof as depicted in column 8 of Table II, application no. 17, preferably a homolog or functional equivalent as depicted in column 8 of Table II B, application no. 17, and being depicted in the same respective line as said Yhl013c, and preferably the activity is increased plastidic, whereby the respective line disclose in column 7 the fine chemical glucose-1-phosphate.

[92177] Accordingly, in one embodiment, the molecule which activity is to be increased in the process of the invention is the gene product with an activity as a “yhl013c-protein”, preferably it is the molecule of section (a) or (b) of this paragraph.

[92178] In particular, it was observed that in plants, especially in Arabidopsis thaliana, increasing or generating the activity of a gene product plastidic with the activity of a “yhl013c-protein”, preferably being encoded by a gene comprising the nucleic acid sequence SEQ ID NO. 14715, preferably the coding region thereof, conferred the production of or the increase in glucose-1-phosphate compared with the wild type control.

[92179] The nucleic acid sequence of Yil074c from Saccharomyces cerevisiae, e.g. as shown in the respective line in column 5 of Table I, application no. 17, has been published in A. And the activity of the gene product thereof is the activity of 3-phosphoglycerate dehydrogenase.

[92180] Accordingly, in one embodiment, the process of the present invention for producing glucose-1-phosphate in a non-human organism, like a microorganism or a plant or a part thereof, comprises increasing or generating the activity of a gene product with the activity of a gene product conferring the activity of “3-phosphoglycerate dehydrogenase”, especially from Saccharomyces cerevisiae or its functional equivalent or its homolog, e.g. the increase of
[92181] (a) a gene product of a gene comprising the nucleic acid molecule as shown in the respective line in column 5 of Table I (whereby the respective line disclose in column 7 the fine chemical glucose-1-phosphate), application no. 17, preferably the coding region thereof, or a homolog or a fragment thereof, and being depicted in the same respective line as said Yil074c, or a functional equivalent or a homolog thereof as shown in column 8 of Table I, application no. 17, preferably the coding region thereof, particularly a homolog or functional equivalent as shown in column 8 of Table I B, application no. 17, and being depicted in the same respective line as said Yil074c, and preferably the activity is increased plastidic, or
[92182] (b) a polypeptide comprising a polypeptide, a consensus sequence or at least a polypeptide motif as shown in the respective line in column 5 of Table II or in column 8 of Table IV, application no. 17, respectively, and being depicted in the same respective line as said Yil074c, or a functional equivalent or a homolog thereof as depicted in column 8 of Table II, application no. 17, preferably a homolog or functional equivalent as depicted in column 8 of Table II B, application no. 17, and being depicted in the same respective line as said Yil074c, and preferably the activity is increased plastidic, whereby the respective line disclose in column 7 the fine chemical glucose-1-phosphate.

[92183] Accordingly, in one embodiment, the molecule which activity is to be increased in the process of the invention is the gene product with an activity as a “3-phosphoglycerate dehydrogenase”, preferably it is the molecule of section (a) or (b) of this paragraph.

[92184] In particular, it was observed that in plants, especially in Arabidopsis thaliana, increasing or generating the activity of a gene product plastidic with the activity of a “3-phosphoglycerate dehydrogenase”, preferably being encoded by a gene comprising the nucleic acid sequence SEQ ID NO. 64563, preferably the coding region thereof, conferred the production of or the increase in glucose-1-phosphate compared with the wild type control.

[92185] The nucleic acid sequence of Yil083c from Saccharomyces cerevisiae, e.g. as shown in the respective line in column 5 of Table I, application no. 17, has been published in A. And the activity of the gene product thereof is the activity of YIL083C-protein.

[92186] Accordingly, in one embodiment, the process of the present invention for producing fructose in a non-human organism, like a microorganism or a plant or a part thereof, comprises increasing or generating the activity of a gene product with the activity of a gene product conferring the activity of “YIL083C-protein”, especially from Saccharomyces cerevisiae or its functional equivalent or its homolog, e.g. the increase of
[92187] (a) a gene product of a gene comprising the nucleic acid molecule as shown in the respective line in column 5 of Table I (whereby the respective line disclose in column 7 the fine chemical fructose), application no. 17, preferably the coding region thereof, or a homolog or a fragment thereof, and being depicted in the same respective line as said Yil083c, or a functional equivalent or a homolog thereof as shown in column 8 of Table I, application no. 17, preferably the coding region thereof, particularly a homolog or functional equivalent as shown in column 8 of Table I B, application no. 17, and being depicted in the same respective line as said Yil083c, and preferably the activity is increased plastidic, or
[92188] (b) a polypeptide comprising a polypeptide, a consensus sequence or at least a polypeptide motif as shown in the respective line in column 5 of Table II or in column 8 of Table IV, application no. 17, respectively, and being depicted in the same respective line as said Yil083c, or a functional equivalent or a homolog thereof as depicted in column 8 of Table II, application no. 17, preferably a homolog or functional equivalent as depicted in column 8 of Table II B, application no. 17, and being depicted in the same respective line as said Yil083c, and preferably the activity is increased plastidic, whereby the respective line disclose in column 7 the fine chemical fructose.

[92189] Accordingly, in one embodiment, the molecule which activity is to be increased in the process of the invention is the gene product with an activity as a “YIL083C-protein”, preferably it is the molecule of section (a) or (b) of this paragraph.

[92190] In particular, it was observed that in plants, especially in Arabidopsis thaliana, increasing or generating the activity of a gene product plastidic with the activity of a “YIL083C-protein”, preferably being encoded by a gene comprising the nucleic acid sequence SEQ ID NO. 149454, preferably the coding region thereof, conferred the production of or the increase in fructose compared with the wild type control.

[92191] The nucleic acid sequence of Yjl073w from Saccharomyces cerevisiae, e.g. as shown in the respective line in column 5 of Table I, application no. 17, has been published in A. And the activity of the gene product thereof is the activity of DnaJ-like chaperone.

[92192] Accordingly, in one embodiment, the process of the present invention for producing myo-inositol in a non-human organism, like a microorganism or a plant or a part thereof, comprises increasing or generating the activity of a gene product with the activity of a gene product conferring the activity of “DnaJ-like chaperone”, especially from Saccharomyces cerevisiae or its functional equivalent or its homolog, e.g. the increase of
[92193] (a) a gene product of a gene comprising the nucleic acid molecule as shown in the respective line in column 5 of Table I (whereby the respective line disclose in column 7 the fine chemical myo-inositol), application no. 17, preferably the coding region thereof, or a homolog or a fragment thereof, and being depicted in the same respective line as said Yjl073w, or a functional equivalent or a homolog thereof as shown in column 8 of Table I, application no. 17, preferably the coding region thereof, particularly a homolog or functional equivalent as shown in column 8 of Table I B, application no. 17, and being depicted in the same respective line as said Yjl073w, and preferably the activity is increased plastidic, or
[92194] (b) a polypeptide comprising a polypeptide, a consensus sequence or at least a polypeptide motif as shown in the respective line in column 5 of Table II or in column 8 of Table IV, application no. 17, respectively, and being depicted in the same respective line as said Yjl073w, or a functional equivalent or a homolog thereof as depicted in column 8 of Table II, application no. 17, preferably a homolog or functional equivalent as depicted in column 8 of Table II B, application no. 17, and being depicted in the same respective line as said Yjl073w, and preferably the activity is increased plastidic, whereby the respective line disclose in column 7 the fine chemical myo-inositol.

[92195] Accordingly, in one embodiment, the molecule which activity is to be increased in the process of the invention is the gene product with an activity as a “DnaJ-like chaperone”, preferably it is the molecule of section (a) or (b) of this paragraph.

[92196] In particular, it was observed that in plants, especially in Arabidopsis thaliana, increasing or generating the activity of a gene product plastidic with the activity of a “DnaJ-like chaperone”, preferably being encoded by a gene comprising the nucleic acid sequence SEQ ID NO. 64964, preferably the coding region thereof, conferred the production of or the increase in myo-inositol compared with the wild type control.

[92197] The nucleic acid sequence of Yjl127w-a from Saccharomyces cerevisiae, e.g. as shown in the respective line in column 5 of Table I, application no. 17, has been published in A. And the activity of the gene product thereof is the activity of YJL127W-A-protein.

[92198] Accordingly, in one embodiment, the process of the present invention for producing 3,4,5-trihydroxypentanoic acid in a non-human organism, like a microorganism or a plant or a part thereof, comprises increasing or generating the activity of a gene product with the activity of a gene product conferring the activity of “YJL127W-A-protein”, especially from Saccharomyces cerevisiae or its functional equivalent or its homolog, e.g. the increase of
[92199] (a) a gene product of a gene comprising the nucleic acid molecule as shown in the respective line in column 5 of Table I (whereby the respective line disclose in column 7 the fine chemical 3,4,5-trihydroxypentanoic acid), application no. 17, preferably the coding region thereof, or a homolog or a fragment thereof, and being depicted in the same respective line as said Yjl127w-a, or a functional equivalent or a homolog thereof as shown in column 8 of Table I, application no. 17, preferably the coding region thereof, particularly a homolog or functional equivalent as shown in column 8 of Table I B, application no. 17, and being depicted in the same respective line as said Yjl127w-a, and preferably the activity is increased non-targeted, or
[92200] (b) a polypeptide comprising a polypeptide, a consensus sequence or at least a polypeptide motif as shown in the respective line in column 5 of Table II or in column 8 of Table IV, application no. 17, respectively, and being depicted in the same respective line as said Yjl127w-a, or a functional equivalent or a homolog thereof as depicted in column 8 of Table II, application no. 17, preferably a homolog or functional equivalent as depicted in column 8 of Table II B, application no. 17, and being depicted in the same respective line as said Yjl127w-a, and preferably the activity is increased non-targeted, whereby the respective line disclose in column 7 the fine chemical 3,4,5-trihydroxypentanoic acid.

[92201] Accordingly, in one embodiment, the molecule which activity is to be increased in the process of the invention is the gene product with an activity as a “YJL127W-A-protein”, preferably it is the molecule of section (a) or (b) of this paragraph.

[92202] In particular, it was observed that in plants, especially in Arabidopsis thaliana, increasing or generating the activity of a gene product non-targeted with the activity of a “YJL127W-A-protein”, preferably being encoded by a gene comprising the nucleic acid sequence SEQ ID NO. 97631, preferably the coding region thereof, conferred the production of or the increase in 3,4,5-trihydroxypentanoic acid compared with the wild type control.

[92203] The nucleic acid sequence of Yjl153c from Saccharomyces cerevisiae, e.g. as shown in the respective line in column 5 of Table I, application no. 17, has been published in A. And the activity of the gene product thereof is the activity of inositol-3-phosphate synthase.

[92204] Accordingly, in one embodiment, the process of the present invention for producing fructose in a non-human organism, like a microorganism or a plant or a part thereof, comprises increasing or generating the activity of a gene product with the activity of a gene product conferring the activity of “inositol-3-phosphate synthase”, especially from Saccharomyces cerevisiae or its functional equivalent or its homolog, e.g. the increase of
[92205] (a) a gene product of a gene comprising the nucleic acid molecule as shown in the respective line in column 5 of Table I (whereby the respective line disclose in column 7 the fine chemical fructose), application no. 17, preferably the coding region thereof, or a homolog or a fragment thereof, and being depicted in the same respective line as said Yjl153c, or a functional equivalent or a homolog thereof as shown in column 8 of Table I, application no. 17, preferably the coding region thereof, particularly a homolog or functional equivalent as shown in column 8 of Table I B, application no. 17, and being depicted in the same respective line as said Yjl153c, and preferably the activity is increased non-targeted, or
[92206] (b) a polypeptide comprising a polypeptide, a consensus sequence or at least a polypeptide motif as shown in the respective line in column 5 of Table II or in column 8 of Table IV, application no. 17, respectively, and being depicted in the same respective line as said Yjl153c, or a functional equivalent or a homolog thereof as depicted in column 8 of Table II, application no. 17, preferably a homolog or functional equivalent as depicted in column 8 of Table II B, application no. 17, and being depicted in the same respective line as said Yjl153c, and preferably the activity is increased non-targeted, whereby the respective line disclose in column 7 the fine chemical fructose.

[92207] Accordingly, in one embodiment, the molecule which activity is to be increased in the process of the invention is the gene product with an activity as a “inositol-3-phosphate synthase”, preferably it is the molecule of section (a) or (b) of this paragraph.

[92208] In particular, it was observed that in plants, especially in Arabidopsis thaliana, increasing or generating the activity of a gene product non-targeted with the activity of a “inositol-3-phosphate synthase”, preferably being encoded by a gene comprising the nucleic acid sequence SEQ ID NO. 149632, preferably the coding region thereof, conferred the production of or the increase in fructose compared with the wild type control.

[92209] The nucleic acid sequence of Yjl153c from Saccharomyces cerevisiae, e.g. as shown in the respective line in column 5 of Table I, application no. 17, has been published in A. And the activity of the gene product thereof is the activity of inositol-3-phosphate synthase.

[92210] Accordingly, in one embodiment, the process of the present invention for producing galactitol in a non-human organism, like a microorganism or a plant or a part thereof, comprises increasing or generating the activity of a gene product with the activity of a gene product conferring the activity of “inositol-3-phosphate synthase”, especially from Saccharomyces cerevisiae or its functional equivalent or its homolog, e.g. the increase of
[92211] (a) a gene product of a gene comprising the nucleic acid molecule as shown in the respective line in column 5 of Table I (whereby the respective line disclose in column 7 the fine chemical galactitol), application no. 17, preferably the coding region thereof, or a homolog or a fragment thereof, and being depicted in the same respective line as said Yjl153c, or a functional equivalent or a homolog thereof as shown in column 8 of Table I, application no. 17, preferably the coding region thereof, particularly a homolog or functional equivalent as shown in column 8 of Table I B, application no. 17, and being depicted in the same respective line as said Yjl153c, and preferably the activity is increased non-targeted, or
[92212] (b) a polypeptide comprising a polypeptide, a consensus sequence or at least a polypeptide motif as shown in the respective line in column 5 of Table II or in column 8 of Table IV, application no. 17, respectively, and being depicted in the same respective line as said Yjl153c, or a functional equivalent or a homolog thereof as depicted in column 8 of Table II, application no. 17, preferably a homolog or functional equivalent as depicted in column 8 of Table II B, application no. 17, and being depicted in the same respective line as said Yjl153c, and preferably the activity is increased non-targeted, whereby the respective line disclose in column 7 the fine chemical galactitol.

[92213] Accordingly, in one embodiment, the molecule which activity is to be increased in the process of the invention is the gene product with an activity as a “inositol-3-phosphate synthase”, preferably it is the molecule of section (a) or (b) of this paragraph.

[92214] In particular, it was observed that in plants, especially in Arabidopsis thaliana, increasing or generating the activity of a gene product non-targeted with the activity of a “inositol-3-phosphate synthase”, preferably being encoded by a gene comprising the nucleic acid sequence SEQ ID NO. 149632, preferably the coding region thereof, conferred the production of or the increase in galactitol compared with the wild type control.

[92215] The nucleic acid sequence of Yjl153c from Saccharomyces cerevisiae, e.g. as shown in the respective line in column 5 of Table I, application no. 17, has been published in A. And the activity of the gene product thereof is the activity of inositol-3-phosphate synthase.

[92216] Accordingly, in one embodiment, the process of the present invention for producing myo-inositol in a non-human organism, like a microorganism or a plant or a part thereof, comprises increasing or generating the activity of a gene product with the activity of a gene product conferring the activity of “inositol-3-phosphate synthase”, especially from Saccharomyces cerevisiae or its functional equivalent or its homolog, e.g. the increase of
[92217] (a) a gene product of a gene comprising the nucleic acid molecule as shown in the respective line in column 5 of Table I (whereby the respective line disclose in column 7 the fine chemical myo-inositol), application no. 17, preferably the coding region thereof, or a homolog or a fragment thereof, and being depicted in the same respective line as said Yjl153c, or a functional equivalent or a homolog thereof as shown in column 8 of Table I, application no. 17, preferably the coding region thereof, particularly a homolog or functional equivalent as shown in column 8 of Table I B, application no. 17, and being depicted in the same respective line as said Yjl153c, and preferably the activity is increased non-targeted, or
[92218] (b) a polypeptide comprising a polypeptide, a consensus sequence or at least a polypeptide motif as shown in the respective line in column 5 of Table II or in column 8 of Table IV, application no. 17, respectively, and being depicted in the same respective line as said Yjl153c, or a functional equivalent or a homolog thereof as depicted in column 8 of Table II, application no. 17, preferably a homolog or functional equivalent as depicted in column 8 of Table II B, application no. 17, and being depicted in the same respective line as said Yjl153c, and preferably the activity is increased non-targeted, whereby the respective line disclose in column 7 the fine chemical myo-inositol.

[92219] Accordingly, in one embodiment, the molecule which activity is to be increased in the process of the invention is the gene product with an activity as a “inositol-3-phosphate synthase”, preferably it is the molecule of section (a) or (b) of this paragraph.

[92220] In particular, it was observed that in plants, especially in Arabidopsis thaliana, increasing or generating the activity of a gene product non-targeted with the activity of a “inositol-3-phosphate synthase”, preferably being encoded by a gene comprising the nucleic acid sequence SEQ ID NO. 149632, preferably the coding region thereof, conferred the production of or the increase in myo-inositol compared with the wild type control.

[92221] The nucleic acid sequence of Yjl219w from Saccharomyces cerevisiae, e.g. as shown in the respective line in column 5 of Table I, application no. 17, has been published in A. And the activity of the gene product thereof is the activity of hexose transporter.

[92222] Accordingly, in one embodiment, the process of the present invention for producing sorbitol in a non-human organism, like a microorganism or a plant or a part thereof, comprises increasing or generating the activity of a gene product with the activity of a gene product conferring the activity of “hexose transporter”, especially from Saccharomyces cerevisiae or its functional equivalent or its homolog, e.g. the increase of
[92223] (a) a gene product of a gene comprising the nucleic acid molecule as shown in the respective line in column 5 of Table I (whereby the respective line disclose in column 7 the fine chemical sorbitol), application no. 17, preferably the coding region thereof, or a homolog or a fragment thereof, and being depicted in the same respective line as said Yjl219w, or a functional equivalent or a homolog thereof as shown in column 8 of Table I, application no. 17, preferably the coding region thereof, particularly a homolog or functional equivalent as shown in column 8 of Table I B, application no. 17, and being depicted in the same respective line as said Yjl219w, and preferably the activity is increased non-targeted, or
[92224] (b) a polypeptide comprising a polypeptide, a consensus sequence or at least a polypeptide motif as shown in the respective line in column 5 of Table II or in column 8 of Table IV, application no. 17, respectively, and being depicted in the same respective line as said Yjl219w, or a functional equivalent or a homolog thereof as depicted in column 8 of Table II, application no. 17, preferably a homolog or functional equivalent as depicted in column 8 of Table II B, application no. 17, and being depicted in the same respective line as said Yjl219w, and preferably the activity is increased non-targeted, whereby the respective line disclose in column 7 the fine chemical sorbitol.

[92225] Accordingly, in one embodiment, the molecule which activity is to be increased in the process of the invention is the gene product with an activity as a “hexose transporter”, preferably it is the molecule of section (a) or (b) of this paragraph.

[92226] In particular, it was observed that in plants, especially in Arabidopsis thaliana, increasing or generating the activity of a gene product non-targeted with the activity of a “hexose transporter”, preferably being encoded by a gene comprising the nucleic acid sequence SEQ ID NO. 97635, preferably the coding region thereof, conferred the production of or the increase in sorbitol compared with the wild type control.

[92227] The nucleic acid sequence of Yjr066w from Saccharomyces cerevisiae, e.g. as shown in the respective line in column 5 of Table I, application no. 17, has been published in A. And the activity of the gene product thereof is the activity of protein kinase.

[92228] Accordingly, in one embodiment, the process of the present invention for producing myo-inositol in a non-human organism, like a microorganism or a plant or a part thereof, comprises increasing or generating the activity of a gene product with the activity of a gene product conferring the activity of “protein kinase”, especially from Saccharomyces cerevisiae or its functional equivalent or its homolog, e.g. the increase of
[92229] (a) a gene product of a gene comprising the nucleic acid molecule as shown in the respective line in column 5 of Table I (whereby the respective line disclose in column 7 the fine chemical myo-inositol), application no. 17, preferably the coding region thereof, or a homolog or a fragment thereof, and being depicted in the same respective line as said Yjr066w, or a functional equivalent or a homolog thereof as shown in column 8 of Table I, application no. 17, preferably the coding region thereof, particularly a homolog or functional equivalent as shown in column 8 of Table I B, application no. 17, and being depicted in the same respective line as said Yjr066w, and preferably the activity is increased non-targeted, or
[92230] (b) a polypeptide comprising a polypeptide, a consensus sequence or at least a polypeptide motif as shown in the respective line in column 5 of Table II or in column 8 of Table IV, application no. 17, respectively, and being depicted in the same respective line as said Yjr066w, or a functional equivalent or a homolog thereof as depicted in column 8 of Table II, application no. 17, preferably a homolog or functional equivalent as depicted in column 8 of Table II B, application no. 17, and being depicted in the same respective line as said Yjr066w, and preferably the activity is increased non-targeted, whereby the respective line disclose in column 7 the fine chemical myo-inositol.

[92231] Accordingly, in one embodiment, the molecule which activity is to be increased in the process of the invention is the gene product with an activity as a “protein kinase”, preferably it is the molecule of section (a) or (b) of this paragraph.

[92232] In particular, it was observed that in plants, especially in Arabidopsis thaliana, increasing or generating the activity of a gene product non-targeted with the activity of a “protein kinase”, preferably being encoded by a gene comprising the nucleic acid sequence SEQ ID NO. 149801, preferably the coding region thereof, conferred the production of or the increase in myo-inositol compared with the wild type control.

[92233] The nucleic acid sequence of Yjr130c from Saccharomyces cerevisiae, e.g. as shown in the respective line in column 5 of Table I, application no. 17, has been published in A. And the activity of the gene product thereof is the activity of cystathionine gamma-synthase.

[92234] Accordingly, in one embodiment, the process of the present invention for producing glucose in a non-human organism, like a microorganism or a plant or a part thereof, comprises increasing or generating the activity of a gene product with the activity of a gene product conferring the activity of “cystathionine gamma-synthase”, especially from Saccharomyces cerevisiae or its functional equivalent or its homolog, e.g. the increase of
[92235] (a) a gene product of a gene comprising the nucleic acid molecule as shown in the respective line in column 5 of Table I (whereby the respective line disclose in column 7 the fine chemical glucose), application no. 17, preferably the coding region thereof, or a homolog or a fragment thereof, and being depicted in the same respective line as said Yjr130c, or a functional equivalent or a homolog thereof as shown in column 8 of Table I, application no. 17, preferably the coding region thereof, particularly a homolog or functional equivalent as shown in column 8 of Table I B, application no. 17, and being depicted in the same respective line as said Yjr130c, and preferably the activity is increased non-targeted, or
[92236] (b) a polypeptide comprising a polypeptide, a consensus sequence or at least a polypeptide motif as shown in the respective line in column 5 of Table II or in column 8 of Table IV, application no. 17, respectively, and being depicted in the same respective line as said Yjr130c, or a functional equivalent or a homolog thereof as depicted in column 8 of Table II, application no. 17, preferably a homolog or functional equivalent as depicted in column 8 of Table II B, application no. 17, and being depicted in the same respective line as said Yjr130c, and preferably the activity is increased non-targeted, whereby the respective line disclose in column 7 the fine chemical glucose.

[92237] Accordingly, in one embodiment, the molecule which activity is to be increased in the process of the invention is the gene product with an activity as a “cystathionine gamma-synthase”, preferably it is the molecule of section (a) or (b) of this paragraph.

[92238] In particular, it was observed that in plants, especially in Arabidopsis thaliana, increasing or generating the activity of a gene product non-targeted with the activity of a “cystathionine gamma-synthase”, preferably being encoded by a gene comprising the nucleic acid sequence SEQ ID NO. 14843, preferably the coding region thereof, conferred the production of or the increase in glucose compared with the wild type control.

[92239] The nucleic acid sequence of Ykl060c from Saccharomyces cerevisiae, e.g. as shown in the respective line in column 5 of Table I, application no. 17, has been published in A. And the activity of the gene product thereof is the activity of fructose biphosphate aldolase.

[92240] Accordingly, in one embodiment, the process of the present invention for producing fructose in a non-human organism, like a microorganism or a plant or a part thereof, comprises increasing or generating the activity of a gene product with the activity of a gene product conferring the activity of “fructose biphosphate aldolase”, especially from Saccharomyces cerevisiae or its functional equivalent or its homolog, e.g. the increase of
[92241] (a) a gene product of a gene comprising the nucleic acid molecule as shown in the respective line in column 5 of Table I (whereby the respective line disclose in column 7 the fine chemical fructose), application no. 17, preferably the coding region thereof, or a homolog or a fragment thereof, and being depicted in the same respective line as said Ykl060c, or a functional equivalent or a homolog thereof as shown in column 8 of Table I, application no. 17, preferably the coding region thereof, particularly a homolog or functional equivalent as shown in column 8 of Table I B, application no. 17, and being depicted in the same respective line as said Ykl060c, and preferably the activity is increased non-targeted, or
[92242] (b) a polypeptide comprising a polypeptide, a consensus sequence or at least a polypeptide motif as shown in the respective line in column 5 of Table II or in column 8 of Table IV, application no. 17, respectively, and being depicted in the same respective line as said Ykl060c, or a functional equivalent or a homolog thereof as depicted in column 8 of Table II, application no. 17, preferably a homolog or functional equivalent as depicted in column 8 of Table II B, application no. 17, and being depicted in the same respective line as said Ykl060c, and preferably the activity is increased non-targeted, whereby the respective line disclose in column 7 the fine chemical fructose.

[92243] Accordingly, in one embodiment, the molecule which activity is to be increased in the process of the invention is the gene product with an activity as a “fructose biphosphate aldolase”, preferably it is the molecule of section (a) or (b) of this paragraph.

[92244] In particular, it was observed that in plants, especially in Arabidopsis thaliana, increasing or generating the activity of a gene product non-targeted with the activity of a “fructose biphosphate aldolase”, preferably being encoded by a gene comprising the nucleic acid sequence SEQ ID NO. 149868, preferably the coding region thereof, conferred the production of or the increase in fructose compared with the wild type control.

[92245] The nucleic acid sequence of Ykl060c from Saccharomyces cerevisiae, e.g. as shown in the respective line in column 5 of Table I, application no. 17, has been published in A. And the activity of the gene product thereof is the activity of fructose biphosphate aldolase.

[92246] Accordingly, in one embodiment, the process of the present invention for producing sedoheptulose-7-phosphate in a non-human organism, like a microorganism or a plant or a part thereof, comprises increasing or generating the activity of a gene product with the activity of a gene product conferring the activity of “fructose biphosphate aldolase”, especially from Saccharomyces cerevisiae or its functional equivalent or its homolog, e.g. the increase of
[92247] (a) a gene product of a gene comprising the nucleic acid molecule as shown in the respective line in column 5 of Table I (whereby the respective line disclose in column 7 the fine chemical sedoheptulose-7-phosphate), application no. 17, preferably the coding region thereof, or a homolog or a fragment thereof, and being depicted in the same respective line as said Ykl060c, or a functional equivalent or a homolog thereof as shown in column 8 of Table I, application no. 17, preferably the coding region thereof, particularly a homolog or functional equivalent as shown in column 8 of Table I B, application no. 17, and being depicted in the same respective line as said Ykl060c, and preferably the activity is increased non-targeted, or
[92248] (b) a polypeptide comprising a polypeptide, a consensus sequence or at least a polypeptide motif as shown in the respective line in column 5 of Table II or in column 8 of Table IV, application no. 17, respectively, and being depicted in the same respective line as said Ykl060c, or a functional equivalent or a homolog thereof as depicted in column 8 of Table II, application no. 17, preferably a homolog or functional equivalent as depicted in column 8 of Table II B, application no. 17, and being depicted in the same respective line as said Ykl060c, and preferably the activity is increased non-targeted, whereby the respective line disclose in column 7 the fine chemical sedoheptulose-7-phosphate.

[92249] Accordingly, in one embodiment, the molecule which activity is to be increased in the process of the invention is the gene product with an activity as a “fructose biphosphate aldolase”, preferably it is the molecule of section (a) or (b) of this paragraph.

[92250] In particular, it was observed that in plants, especially in Arabidopsis thaliana, increasing or generating the activity of a gene product non-targeted with the activity of a “fructose biphosphate aldolase”, preferably being encoded by a gene comprising the nucleic acid sequence SEQ ID NO. 149868, preferably the coding region thereof, conferred the production of or the increase in sedoheptulose-7-phosphate compared with the wild type control.

[92251] The nucleic acid sequence of Ykl192c from Saccharomyces cerevisiae, e.g. as shown in the respective line in column 5 of Table I, application no. 17, has been published in A. And the activity of the gene product thereof is the activity of acyl carrier protein.

[92252] Accordingly, in one embodiment, the process of the present invention for producing glucose-1-phosphate in a non-human organism, like a microorganism or a plant or a part thereof, comprises increasing or generating the activity of a gene product with the activity of a gene product conferring the activity of “acyl carrier protein”, especially from Saccharomyces cerevisiae or its functional equivalent or its homolog, e.g. the increase of
[92253] (a) a gene product of a gene comprising the nucleic acid molecule as shown in the respective line in column 5 of Table I (whereby the respective line disclose in column 7 the fine chemical glucose-1-phosphate), application no. 17, preferably the coding region thereof, or a homolog or a fragment thereof, and being depicted in the same respective line as said Ykl192c, or a functional equivalent or a homolog thereof as shown in column 8 of Table I, application no. 17, preferably the coding region thereof, particularly a homolog or functional equivalent as shown in column 8 of Table I B, application no. 17, and being depicted in the same respective line as said Ykl192c, and preferably the activity is increased plastidic, or
[92254] (b) a polypeptide comprising a polypeptide, a consensus sequence or at least a polypeptide motif as shown in the respective line in column 5 of Table II or in column 8 of Table IV, application no. 17, respectively, and being depicted in the same respective line as said Ykl192c, or a functional equivalent or a homolog thereof as depicted in column 8 of Table II, application no. 17, preferably a homolog or functional equivalent as depicted in column 8 of Table II B, application no. 17, and being depicted in the same respective line as said Ykl192c, and preferably the activity is increased plastidic, whereby the respective line disclose in column 7 the fine chemical glucose-1-phosphate.

[92255] Accordingly, in one embodiment, the molecule which activity is to be increased in the process of the invention is the gene product with an activity as a “acyl carrier protein”, preferably it is the molecule of section (a) or (b) of this paragraph.

[92256] In particular, it was observed that in plants, especially in Arabidopsis thaliana, increasing or generating the activity of a gene product plastidic with the activity of a “acyl carrier protein”, preferably being encoded by a gene comprising the nucleic acid sequence SEQ ID NO. 150063, preferably the coding region thereof, conferred the production of or the increase in glucose-1-phosphate compared with the wild type control.

[92257] The nucleic acid sequence of Ykr072c from Saccharomyces cerevisiae, e.g. as shown in the respective line in column 5 of Table I, application no. 17, has been published in A. And the activity of the gene product thereof is the activity of halotolerance protein.

[92258] Accordingly, in one embodiment, the process of the present invention for producing sucrose in a non-human organism, like a microorganism or a plant or a part thereof, comprises increasing or generating the activity of a gene product with the activity of a gene product conferring the activity of “halotolerance protein”, especially from Saccharomyces cerevisiae or its functional equivalent or its homolog, e.g. the increase of
[92259] (a) a gene product of a gene comprising the nucleic acid molecule as shown in the respective line in column 5 of Table I (whereby the respective line disclose in column 7 the fine chemical sucrose), application no. 17, preferably the coding region thereof, or a homolog or a fragment thereof, and being depicted in the same respective line as said Ykr072c, or a functional equivalent or a homolog thereof as shown in column 8 of Table I, application no. 17, preferably the coding region thereof, particularly a homolog or functional equivalent as shown in column 8 of Table I B, application no. 17, and being depicted in the same respective line as said Ykr072c, and preferably the activity is increased non-targeted, or
[92260] (b) a polypeptide comprising a polypeptide, a consensus sequence or at least a polypeptide motif as shown in the respective line in column 5 of Table II or in column 8 of Table IV, application no. 17, respectively, and being depicted in the same respective line as said Ykr072c, or a functional equivalent or a homolog thereof as depicted in column 8 of Table II, application no. 17, preferably a homolog or functional equivalent as depicted in column 8 of Table II B, application no. 17, and being depicted in the same respective line as said Ykr072c, and preferably the activity is increased non-targeted, whereby the respective line disclose in column 7 the fine chemical sucrose.

[92261] Accordingly, in one embodiment, the molecule which activity is to be increased in the process of the invention is the gene product with an activity as a “halotolerance protein”, preferably it is the molecule of section (a) or (b) of this paragraph.

[92262] In particular, it was observed that in plants, especially in Arabidopsis thaliana, increasing or generating the activity of a gene product non-targeted with the activity of a “halotolerance protein”, preferably being encoded by a gene comprising the nucleic acid sequence SEQ ID NO. 130903, preferably the coding region thereof, conferred the production of or the increase in sucrose compared with the wild type control.

[92263] The nucleic acid sequence of Ykr097w from Saccharomyces cerevisiae, e.g. as shown in the respective line in column 5 of Table I, application no. 17, has been published in A. And the activity of the gene product thereof is the activity of phosphoenolpyruvate carboxykinase.

[92264] Accordingly, in one embodiment, the process of the present invention for producing glucose in a non-human organism, like a microorganism or a plant or a part thereof, comprises increasing or generating the activity of a gene product with the activity of a gene product conferring the activity of “phosphoenolpyruvate carboxykinase”, especially from Saccharomyces cerevisiae or its functional equivalent or its homolog, e.g. the increase of
[92265] (a) a gene product of a gene comprising the nucleic acid molecule as shown in the respective line in column 5 of Table I (whereby the respective line disclose in column 7 the fine chemical glucose), application no. 17, preferably the coding region thereof, or a homolog or a fragment thereof, and being depicted in the same respective line as said Ykr097w, or a functional equivalent or a homolog thereof as shown in column 8 of Table I, application no. 17, preferably the coding region thereof, particularly a homolog or functional equivalent as shown in column 8 of Table I B, application no. 17, and being depicted in the same respective line as said Ykr097w, and preferably the activity is increased non-targeted, or
[92266] (b) a polypeptide comprising a polypeptide, a consensus sequence or at least a polypeptide motif as shown in the respective line in column 5 of Table II or in column 8 of Table IV, application no. 17, respectively, and being depicted in the same respective line as said Ykr097w, or a functional equivalent or a homolog thereof as depicted in column 8 of Table II, application no. 17, preferably a homolog or functional equivalent as depicted in column 8 of Table II B, application no. 17, and being depicted in the same respective line as said Ykr097w, and preferably the activity is increased non-targeted, whereby the respective line disclose in column 7 the fine chemical glucose.

[92267] Accordingly, in one embodiment, the molecule which activity is to be increased in the process of the invention is the gene product with an activity as a “phosphoenolpyruvate carboxykinase”, preferably it is the molecule of section (a) or (b) of this paragraph.

[92268] In particular, it was observed that in plants, especially in Arabidopsis thaliana, increasing or generating the activity of a gene product non-targeted with the activity of a “phosphoenolpyruvate carboxykinase”, preferably being encoded by a gene comprising the nucleic acid sequence SEQ ID NO. 98075, preferably the coding region thereof, conferred the production of or the increase in glucose compared with the wild type control.

[92269] The nucleic acid sequence of Ykr097w from Saccharomyces cerevisiae, e.g. as shown in the respective line in column 5 of Table I, application no. 17, has been published in A. And the activity of the gene product thereof is the activity of phosphoenolpyruvate carboxykinase.

[92270] Accordingly, in one embodiment, the process of the present invention for producing glucose in a non-human organism, like a microorganism or a plant or a part thereof, comprises increasing or generating the activity of a gene product with the activity of a gene product conferring the activity of “phosphoenolpyruvate carboxykinase”, especially from Saccharomyces cerevisiae or its functional equivalent or its homolog, e.g. the increase of
[92271] (a) a gene product of a gene comprising the nucleic acid molecule as shown in the respective line in column 5 of Table I (whereby the respective line disclose in column 7 the fine chemical glucose), application no. 17, preferably the coding region thereof, or a homolog or a fragment thereof, and being depicted in the same respective line as said Ykr097w, or a functional equivalent or a homolog thereof as shown in column 8 of Table I, application no. 17, preferably the coding region thereof, particularly a homolog or functional equivalent as shown in column 8 of Table I B, application no. 17, and being depicted in the same respective line as said Ykr097w, and preferably the activity is increased plastidic, or
[92272] (b) a polypeptide comprising a polypeptide, a consensus sequence or at least a polypeptide motif as shown in the respective line in column 5 of Table II or in column 8 of Table IV, application no. 17, respectively, and being depicted in the same respective line as said Ykr097w, or a functional equivalent or a homolog thereof as depicted in column 8 of Table II, application no. 17, preferably a homolog or functional equivalent as depicted in column 8 of Table II B, application no. 17, and being depicted in the same respective line as said Ykr097w, and preferably the activity is increased plastidic, whereby the respective line disclose in column 7 the fine chemical glucose.

[92273] Accordingly, in one embodiment, the molecule which activity is to be increased in the process of the invention is the gene product with an activity as a “phosphoenolpyruvate carboxykinase”, preferably it is the molecule of section (a) or (b) of this paragraph.

[92274] In particular, it was observed that in plants, especially in Arabidopsis thaliana, increasing or generating the activity of a gene product plastidic with the activity of a “phosphoenolpyruvate carboxykinase”, preferably being encoded by a gene comprising the nucleic acid sequence SEQ ID NO. 98075, preferably the coding region thereof, conferred the production of or the increase in glucose compared with the wild type control.

[92275] The nucleic acid sequence of Ylr025w from Saccharomyces cerevisiae, e.g. as shown in the respective line in column 5 of Table I, application no. 17, has been published in A. And the activity of the gene product thereof is the activity of vacuolar sorting protein.

[92276] Accordingly, in one embodiment, the process of the present invention for producing sucrose in a non-human organism, like a microorganism or a plant or a part thereof, comprises increasing or generating the activity of a gene product with the activity of a gene product conferring the activity of “vacuolar sorting protein”, especially from Saccharomyces cerevisiae or its functional equivalent or its homolog, e.g. the increase of
[92277] (a) a gene product of a gene comprising the nucleic acid molecule as shown in the respective line in column 5 of Table I (whereby the respective line disclose in column 7 the fine chemical sucrose), application no. 17, preferably the coding region thereof, or a homolog or a fragment thereof, and being depicted in the same respective line as said Ylr025w, or a functional equivalent or a homolog thereof as shown in column 8 of Table I, application no. 17, preferably the coding region thereof, particularly a homolog or functional equivalent as shown in column 8 of Table I B, application no. 17, and being depicted in the same respective line as said Ylr025w, and preferably the activity is increased non-targeted, or
[92278] (b) a polypeptide comprising a polypeptide, a consensus sequence or at least a polypeptide motif as shown in the respective line in column 5 of Table II or in column 8 of Table IV, application no. 17, respectively, and being depicted in the same respective line as said Ylr025w, or a functional equivalent or a homolog thereof as depicted in column 8 of Table II, application no. 17, preferably a homolog or functional equivalent as depicted in column 8 of Table II B, application no. 17, and being depicted in the same respective line as said Ylr025w, and preferably the activity is increased non-targeted, whereby the respective line disclose in column 7 the fine chemical sucrose.

[92279] Accordingly, in one embodiment, the molecule which activity is to be increased in the process of the invention is the gene product with an activity as a “vacuolar sorting protein”, preferably it is the molecule of section (a) or (b) of this paragraph.

[92280] In particular, it was observed that in plants, especially in Arabidopsis thaliana, increasing or generating the activity of a gene product non-targeted with the activity of a “vacuolar sorting protein”, preferably being encoded by a gene comprising the nucleic acid sequence SEQ ID NO. 150603, preferably the coding region thereof, conferred the production of or the increase in sucrose compared with the wild type control.

[92281] The nucleic acid sequence of Ylr043c from Saccharomyces cerevisiae, e.g. as shown in the respective line in column 5 of Table I, application no. 17, has been published in A. And the activity of the gene product thereof is the activity of thioredoxin.

[92282] Accordingly, in one embodiment, the process of the present invention for producing glucose-1-phosphate in a non-human organism, like a microorganism or a plant or a part thereof, comprises increasing or generating the activity of a gene product with the activity of a gene product conferring the activity of “thioredoxin”, especially from Saccharomyces cerevisiae or its functional equivalent or its homolog, e.g. the increase of
[92283] (a) a gene product of a gene comprising the nucleic acid molecule as shown in the respective line in column 5 of Table I (whereby the respective line disclose in column 7 the fine chemical glucose-1-phosphate), application no. 17, preferably the coding region thereof, or a homolog or a fragment thereof, and being depicted in the same respective line as said Ylr043c, or a functional equivalent or a homolog thereof as shown in column 8 of Table I, application no. 17, preferably the coding region thereof, particularly a homolog or functional equivalent as shown in column 8 of Table I B, application no. 17, and being depicted in the same respective line as said Ylr043c, and preferably the activity is increased plastidic, or
[92284] (b) a polypeptide comprising a polypeptide, a consensus sequence or at least a polypeptide motif as shown in the respective line in column 5 of Table II or in column 8 of Table IV, application no. 17, respectively, and being depicted in the same respective line as said Ylr043c, or a functional equivalent or a homolog thereof as depicted in column 8 of Table II, application no. 17, preferably a homolog or functional equivalent as depicted in column 8 of Table II B, application no. 17, and being depicted in the same respective line as said Ylr043c, and preferably the activity is increased plastidic, whereby the respective line disclose in column 7 the fine chemical glucose-1-phosphate.

[92285] Accordingly, in one embodiment, the molecule which activity is to be increased in the process of the invention is the gene product with an activity as a “thioredoxin”, preferably it is the molecule of section (a) or (b) of this paragraph.

[92286] In particular, it was observed that in plants, especially in Arabidopsis thaliana, increasing or generating the activity of a gene product plastidic with the activity of a “thioredoxin”, preferably being encoded by a gene comprising the nucleic acid sequence SEQ ID NO. 91045, preferably the coding region thereof, conferred the production of or the increase in glucose-1-phosphate compared with the wild type control.

[92287] The nucleic acid sequence of Ylr081w from Saccharomyces cerevisiae, e.g. as shown in the respective line in column 5 of Table I, application no. 17, has been published in A. And the activity of the gene product thereof is the activity of hexose transporter.

[92288] Accordingly, in one embodiment, the process of the present invention for producing fructose in a non-human organism, like a microorganism or a plant or a part thereof, comprises increasing or generating the activity of a gene product with the activity of a gene product conferring the activity of “hexose transporter”, especially from Saccharomyces cerevisiae or its functional equivalent or its homolog, e.g. the increase of
[92289] (a) a gene product of a gene comprising the nucleic acid molecule as shown in the respective line in column 5 of Table I (whereby the respective line disclose in column 7 the fine chemical fructose), application no. 17, preferably the coding region thereof, or a homolog or a fragment thereof, and being depicted in the same respective line as said Ylr081w, or a functional equivalent or a homolog thereof as shown in column 8 of Table I, application no. 17, preferably the coding region thereof, particularly a homolog or functional equivalent as shown in column 8 of Table I B, application no. 17, and being depicted in the same respective line as said Ylr081w, and preferably the activity is increased non-targeted, or
[92290] (b) a polypeptide comprising a polypeptide, a consensus sequence or at least a polypeptide motif as shown in the respective line in column 5 of Table II or in column 8 of Table IV, application no. 17, respectively, and being depicted in the same respective line as said Ylr081w, or a functional equivalent or a homolog thereof as depicted in column 8 of Table II, application no. 17, preferably a homolog or functional equivalent as depicted in column 8 of Table II B, application no. 17, and being depicted in the same respective line as said Ylr081w, and preferably the activity is increased non-targeted, whereby the respective line disclose in column 7 the fine chemical fructose.

[92291] Accordingly, in one embodiment, the molecule which activity is to be increased in the process of the invention is the gene product with an activity as a “hexose transporter”, preferably it is the molecule of section (a) or (b) of this paragraph.

[92292] In particular, it was observed that in plants, especially in Arabidopsis thaliana, increasing or generating the activity of a gene product non-targeted with the activity of a “hexose transporter”, preferably being encoded by a gene comprising the nucleic acid sequence SEQ ID NO. 150682, preferably the coding region thereof, conferred the production of or the increase in fructose compared with the wild type control.

[92293] The nucleic acid sequence of Ymr120c from Saccharomyces cerevisiae, e.g. as shown in the respective line in column 5 of Table I, application no. 17, has been published in A. And the activity of the gene product thereof is the activity of purine biosynthesis protein.

[92294] Accordingly, in one embodiment, the process of the present invention for producing verbascose in a non-human organism, like a microorganism or a plant or a part thereof, comprises increasing or generating the activity of a gene product with the activity of a gene product conferring the activity of “purine biosynthesis protein”, especially from Saccharomyces cerevisiae or its functional equivalent or its homolog, e.g. the increase of
[92295] (a) a gene product of a gene comprising the nucleic acid molecule as shown in the respective line in column 5 of Table I (whereby the respective line disclose in column 7 the fine chemical verbascose), application no. 17, preferably the coding region thereof, or a homolog or a fragment thereof, and being depicted in the same respective line as said Ymr120c, or a functional equivalent or a homolog thereof as shown in column 8 of Table I, application no. 17, preferably the coding region thereof, particularly a homolog or functional equivalent as shown in column 8 of Table I B, application no. 17, and being depicted in the same respective line as said Ymr120c, and preferably the activity is increased plastidic, or
[92296] (b) a polypeptide comprising a polypeptide, a consensus sequence or at least a polypeptide motif as shown in the respective line in column 5 of Table II or in column 8 of Table IV, application no. 17, respectively, and being depicted in the same respective line as said Ymr120c, or a functional equivalent or a homolog thereof as depicted in column 8 of Table II, application no. 17, preferably a homolog or functional equivalent as depicted in column 8 of Table II B, application no. 17, and being depicted in the same respective line as said Ymr120c, and preferably the activity is increased plastidic, whereby the respective line disclose in column 7 the fine chemical verbascose.

[92297] Accordingly, in one embodiment, the molecule which activity is to be increased in the process of the invention is the gene product with an activity as a “purine biosynthesis protein”, preferably it is the molecule of section (a) or (b) of this paragraph.

[92298] In particular, it was observed that in plants, especially in Arabidopsis thaliana, increasing or generating the activity of a gene product plastidic with the activity of a “purine biosynthesis protein”, preferably being encoded by a gene comprising the nucleic acid sequence SEQ ID NO. 91973, preferably the coding region thereof, conferred the production of or the increase in verbascose compared with the wild type control.

[92299] The nucleic acid sequence of Ymr324c from Saccharomyces cerevisiae, e.g. as shown in the respective line in column 5 of Table I, application no. 17, has been published in A. And the activity of the gene product thereof is the activity of ymr324c-protein.

[92300] Accordingly, in one embodiment, the process of the present invention for producing glucose-1-phosphate in a non-human organism, like a microorganism or a plant or a part thereof, comprises increasing or generating the activity of a gene product with the activity of a gene product conferring the activity of “ymr324c-protein”, especially from Saccharomyces cerevisiae or its functional equivalent or its homolog, e.g. the increase of
[92301] (a) a gene product of a gene comprising the nucleic acid molecule as shown in the respective line in column 5 of Table I (whereby the respective line disclose in column 7 the fine chemical glucose-1-phosphate), application no. 17, preferably the coding region thereof, or a homolog or a fragment thereof, and being depicted in the same respective line as said Ymr324c, or a functional equivalent or a homolog thereof as shown in column 8 of Table I, application no. 17, preferably the coding region thereof, particularly a homolog or functional equivalent as shown in column 8 of Table I B, application no. 17, and being depicted in the same respective line as said Ymr324c, and preferably the activity is increased plastidic, or
[92302] (b) a polypeptide comprising a polypeptide, a consensus sequence or at least a polypeptide motif as shown in the respective line in column 5 of Table II or in column 8 of Table IV, application no. 17, respectively, and being depicted in the same respective line as said Ymr324c, or a functional equivalent or a homolog thereof as depicted in column 8 of Table II, application no. 17, preferably a homolog or functional equivalent as depicted in column 8 of Table II B, application no. 17, and being depicted in the same respective line as said Ymr324c, and preferably the activity is increased plastidic, whereby the respective line disclose in column 7 the fine chemical glucose-1-phosphate.

[92303] Accordingly, in one embodiment, the molecule which activity is to be increased in the process of the invention is the gene product with an activity as a “ymr324c-protein”, preferably it is the molecule of section (a) or (b) of this paragraph.

[92304] In particular, it was observed that in plants, especially in Arabidopsis thaliana, increasing or generating the activity of a gene product plastidic with the activity of a “ymr324c-protein”, preferably being encoded by a gene comprising the nucleic acid sequence SEQ ID NO. 130986, preferably the coding region thereof, conferred the production of or the increase in glucose-1-phosphate compared with the wild type control.

[92305] The nucleic acid sequence of Ynl064c from Saccharomyces cerevisiae, e.g. as shown in the respective line in column 5 of Table I, application no. 17, has been published in A. And the activity of the gene product thereof is the activity of molecular chaperone.

[92306] Accordingly, in one embodiment, the process of the present invention for producing myo-inositol in a non-human organism, like a microorganism or a plant or a part thereof, comprises increasing or generating the activity of a gene product with the activity of a gene product conferring the activity of “molecular chaperone”, especially from Saccharomyces cerevisiae or its functional equivalent or its homolog, e.g. the increase of
[92307] (a) a gene product of a gene comprising the nucleic acid molecule as shown in the respective line in column 5 of Table I (whereby the respective line disclose in column 7 the fine chemical myo-inositol), application no. 17, preferably the coding region thereof, or a homolog or a fragment thereof, and being depicted in the same respective line as said Ynl064c, or a functional equivalent or a homolog thereof as shown in column 8 of Table I, application no. 17, preferably the coding region thereof, particularly a homolog or functional equivalent as shown in column 8 of Table I B, application no. 17, and being depicted in the same respective line as said Ynl064c, and preferably the activity is increased non-targeted, or
[92308] (b) a polypeptide comprising a polypeptide, a consensus sequence or at least a polypeptide motif as shown in the respective line in column 5 of Table II or in column 8 of Table IV, application no. 17, respectively, and being depicted in the same respective line as said Ynl064c, or a functional equivalent or a homolog thereof as depicted in column 8 of Table II, application no. 17, preferably a homolog or functional equivalent as depicted in column 8 of Table II B, application no. 17, and being depicted in the same respective line as said Ynl064c, and preferably the activity is increased non-targeted, whereby the respective line disclose in column 7 the fine chemical myo-inositol.

[92309] Accordingly, in one embodiment, the molecule which activity is to be increased in the process of the invention is the gene product with an activity as a “molecular chaperone”, preferably it is the molecule of section (a) or (b) of this paragraph.

[92310] In particular, it was observed that in plants, especially in Arabidopsis thaliana, increasing or generating the activity of a gene product non-targeted with the activity of a “molecular chaperone”, preferably being encoded by a gene comprising the nucleic acid sequence SEQ ID NO. 117495, preferably the coding region thereof, conferred the production of or the increase in myo-inositol compared with the wild type control.

[92311] The nucleic acid sequence of Ynl064c from Saccharomyces cerevisiae, e.g. as shown in the respective line in column 5 of Table I, application no. 17, has been published in A. And the activity of the gene product thereof is the activity of molecular chaperone.

[92312] Accordingly, in one embodiment, the process of the present invention for producing sucrose in a non-human organism, like a microorganism or a plant or a part thereof, comprises increasing or generating the activity of a gene product with the activity of a gene product conferring the activity of “molecular chaperone”, especially from Saccharomyces cerevisiae or its functional equivalent or its homolog, e.g. the increase of
[92313] (a) a gene product of a gene comprising the nucleic acid molecule as shown in the respective line in column 5 of Table I (whereby the respective line disclose in column 7 the fine chemical sucrose), application no. 17, preferably the coding region thereof, or a homolog or a fragment thereof, and being depicted in the same respective line as said Ynl064c, or a functional equivalent or a homolog thereof as shown in column 8 of Table I, application no. 17, preferably the coding region thereof, particularly a homolog or functional equivalent as shown in column 8 of Table I B, application no. 17, and being depicted in the same respective line as said Ynl064c, and preferably the activity is increased non-targeted, or
[92314] (b) a polypeptide comprising a polypeptide, a consensus sequence or at least a polypeptide motif as shown in the respective line in column 5 of Table II or in column 8 of Table IV, application no. 17, respectively, and being depicted in the same respective line as said Ynl064c, or a functional equivalent or a homolog thereof as depicted in column 8 of Table II, application no. 17, preferably a homolog or functional equivalent as depicted in column 8 of Table II B, application no. 17, and being depicted in the same respective line as said Ynl064c, and preferably the activity is increased non-targeted, whereby the respective line disclose in column 7 the fine chemical sucrose.

[92315] Accordingly, in one embodiment, the molecule which activity is to be increased in the process of the invention is the gene product with an activity as a “molecular chaperone”, preferably it is the molecule of section (a) or (b) of this paragraph.

[92316] In particular, it was observed that in plants, especially in Arabidopsis thaliana, increasing or generating the activity of a gene product non-targeted with the activity of a “molecular chaperone”, preferably being encoded by a gene comprising the nucleic acid sequence SEQ ID NO. 117495, preferably the coding region thereof, conferred the production of or the increase in sucrose compared with the wild type control.

[92317] The nucleic acid sequence of Ynr019w from Saccharomyces cerevisiae, e.g. as shown in the respective line in column 5 of Table I, application no. 17, has been published in A. And the activity of the gene product thereof is the activity of sterol O-acyltransferase.

[92318] Accordingly, in one embodiment, the process of the present invention for producing raffinose in a non-human organism, like a microorganism or a plant or a part thereof, comprises increasing or generating the activity of a gene product with the activity of a gene product conferring the activity of “sterol O-acyltransferase”, especially from Saccharomyces cerevisiae or its functional equivalent or its homolog, e.g. the increase of
[92319] (a) a gene product of a gene comprising the nucleic acid molecule as shown in the respective line in column 5 of Table I (whereby the respective line disclose in column 7 the fine chemical raffinose), application no. 17, preferably the coding region thereof, or a homolog or a fragment thereof, and being depicted in the same respective line as said Ynr019w, or a functional equivalent or a homolog thereof as shown in column 8 of Table I, application no. 17, preferably the coding region thereof, particularly a homolog or functional equivalent as shown in column 8 of Table I B, application no. 17, and being depicted in the same respective line as said Ynr019w, and preferably the activity is increased plastidic, or
[92320] (b) a polypeptide comprising a polypeptide, a consensus sequence or at least a polypeptide motif as shown in the respective line in column 5 of Table II or in column 8 of Table IV, application no. 17, respectively, and being depicted in the same respective line as said Ynr019w, or a functional equivalent or a homolog thereof as depicted in column 8 of Table II, application no. 17, preferably a homolog or functional equivalent as depicted in column 8 of Table II B, application no. 17, and being depicted in the same respective line as said Ynr019w, and preferably the activity is increased plastidic, whereby the respective line disclose in column 7 the fine chemical raffinose.

[92321] Accordingly, in one embodiment, the molecule which activity is to be increased in the process of the invention is the gene product with an activity as a “sterol O-acyltransferase”, preferably it is the molecule of section (a) or (b) of this paragraph.

[92322] In particular, it was observed that in plants, especially in Arabidopsis thaliana, increasing or generating the activity of a gene product plastidic with the activity of a “sterol O-acyltransferase”, preferably being encoded by a gene comprising the nucleic acid sequence SEQ ID NO. 67646, preferably the coding region thereof, conferred the production of or the increase in raffinose compared with the wild type control.

[92323] The nucleic acid sequence of Yol160w from Saccharomyces cerevisiae, e.g. as shown in the respective line in column 5 of Table I, application no. 17, has been published in A. And the activity of the gene product thereof is the activity of yol160w-protein.

[92324] Accordingly, in one embodiment, the process of the present invention for producing myo-inositol in a non-human organism, like a microorganism or a plant or a part thereof, comprises increasing or generating the activity of a gene product with the activity of a gene product conferring the activity of “yol160w-protein”, especially from Saccharomyces cerevisiae or its functional equivalent or its homolog, e.g. the increase of
[92325] (a) a gene product of a gene comprising the nucleic acid molecule as shown in the respective line in column 5 of Table I (whereby the respective line disclose in column 7 the fine chemical myo-inositol), application no. 17, preferably the coding region thereof, or a homolog or a fragment thereof, and being depicted in the same respective line as said Yol160w, or a functional equivalent or a homolog thereof as shown in column 8 of Table I, application no. 17, preferably the coding region thereof, particularly a homolog or functional equivalent as shown in column 8 of Table I B, application no. 17, and being depicted in the same respective line as said Yol160w, and preferably the activity is increased plastidic, or
[92326] (b) a polypeptide comprising a polypeptide, a consensus sequence or at least a polypeptide motif as shown in the respective line in column 5 of Table II or in column 8 of Table IV, application no. 17, respectively, and being depicted in the same respective line as said Yol160w, or a functional equivalent or a homolog thereof as depicted in column 8 of Table II, application no. 17, preferably a homolog or functional equivalent as depicted in column 8 of Table II B, application no. 17, and being depicted in the same respective line as said Yol160w, and preferably the activity is increased plastidic, whereby the respective line disclose in column 7 the fine chemical myo-inositol.

[92327] Accordingly, in one embodiment, the molecule which activity is to be increased in the process of the invention is the gene product with an activity as a “yol160w-protein”, preferably it is the molecule of section (a) or (b) of this paragraph.

[92328] In particular, it was observed that in plants, especially in Arabidopsis thaliana, increasing or generating the activity of a gene product plastidic with the activity of a “yol160w-protein”, preferably being encoded by a gene comprising the nucleic acid sequence SEQ ID NO. 15179, preferably the coding region thereof, conferred the production of or the increase in myo-inositol compared with the wild type control.

[92329] The nucleic acid sequence of Yor163w from Saccharomyces cerevisiae, e.g. as shown in the respective line in column 5 of Table I, application no. 17, has been published in A. And the activity of the gene product thereof is the activity of phosphohydrolase.

[92330] Accordingly, in one embodiment, the process of the present invention for producing glucose in a non-human organism, like a microorganism or a plant or a part thereof, comprises increasing or generating the activity of a gene product with the activity of a gene product conferring the activity of “phosphohydrolase”, especially from Saccharomyces cerevisiae or its functional equivalent or its homolog, e.g. the increase of
[92331] (a) a gene product of a gene comprising the nucleic acid molecule as shown in the respective line in column 5 of Table I (whereby the respective line disclose in column 7 the fine chemical glucose), application no. 17, preferably the coding region thereof, or a homolog or a fragment thereof, and being depicted in the same respective line as said Yor163w, or a functional equivalent or a homolog thereof as shown in column 8 of Table I, application no. 17, preferably the coding region thereof, particularly a homolog or functional equivalent as shown in column 8 of Table I B, application no. 17, and being depicted in the same respective line as said Yor163w, and preferably the activity is increased plastidic, or
[92332] (b) a polypeptide comprising a polypeptide, a consensus sequence or at least a polypeptide motif as shown in the respective line in column 5 of Table II or in column 8 of Table IV, application no. 17, respectively, and being depicted in the same respective line as said Yor163w, or a functional equivalent or a homolog thereof as depicted in column 8 of Table II, application no. 17, preferably a homolog or functional equivalent as depicted in column 8 of Table II B, application no. 17, and being depicted in the same respective line as said Yor163w, and preferably the activity is increased plastidic, whereby the respective line disclose in column 7 the fine chemical glucose.

[92333] Accordingly, in one embodiment, the molecule which activity is to be increased in the process of the invention is the gene product with an activity as a “phosphohydrolase”, preferably it is the molecule of section (a) or (b) of this paragraph.

[92334] In particular, it was observed that in plants, especially in Arabidopsis thaliana, increasing or generating the activity of a gene product plastidic with the activity of a “phosphohydrolase”, preferably being encoded by a gene comprising the nucleic acid sequence SEQ ID NO. 151862, preferably the coding region thereof, conferred the production of or the increase in glucose compared with the wild type control.

[92335] The nucleic acid sequence of Yor244w from Saccharomyces cerevisiae, e.g. as shown in the respective line in column 5 of Table I, application no. 17, has been published in A. And the activity of the gene product thereof is the activity of histone acetyltransferase.

[92336] Accordingly, in one embodiment, the process of the present invention for producing glucose-1-phosphate in a non-human organism, like a microorganism or a plant or a part thereof, comprises increasing or generating the activity of a gene product with the activity of a gene product conferring the activity of “histone acetyltransferase”, especially from Saccharomyces cerevisiae or its functional equivalent or its homolog, e.g. the increase of
[92337] (a) a gene product of a gene comprising the nucleic acid molecule as shown in the respective line in column 5 of Table I (whereby the respective line disclose in column 7 the fine chemical glucose-1-phosphate), application no. 17, preferably the coding region thereof, or a homolog or a fragment thereof, and being depicted in the same respective line as said Yor244w, or a functional equivalent or a homolog thereof as shown in column 8 of Table I, application no. 17, preferably the coding region thereof, particularly a homolog or functional equivalent as shown in column 8 of Table I B, application no. 17, and being depicted in the same respective line as said Yor244w, and preferably the activity is increased plastidic, or
[92338] (b) a polypeptide comprising a polypeptide, a consensus sequence or at least a polypeptide motif as shown in the respective line in column 5 of Table II or in column 8 of Table IV, application no. 17, respectively, and being depicted in the same respective line as said Yor244w, or a functional equivalent or a homolog thereof as depicted in column 8 of Table II, application no. 17, preferably a homolog or functional equivalent as depicted in column 8 of Table II B, application no. 17, and being depicted in the same respective line as said Yor244w, and preferably the activity is increased plastidic, whereby the respective line disclose in column 7 the fine chemical glucose-1-phosphate.

[92339] Accordingly, in one embodiment, the molecule which activity is to be increased in the process of the invention is the gene product with an activity as a “histone acetyltransferase”, preferably it is the molecule of section (a) or (b) of this paragraph.

[92340] In particular, it was observed that in plants, especially in Arabidopsis thaliana, increasing or generating the activity of a gene product plastidic with the activity of a “histone acetyltransferase”, preferably being encoded by a gene comprising the nucleic acid sequence SEQ ID NO. 92540, preferably the coding region thereof, conferred the production of or the increase in glucose-1-phosphate compared with the wild type control.

[92341] The nucleic acid sequence of Ypl138c from Saccharomyces cerevisiae, e.g. as shown in the respective line in column 5 of Table I, application no. 17, has been published in A. And the activity of the gene product thereof is the activity of subunit of COMPASS-protein complex.

[92342] Accordingly, in one embodiment, the process of the present invention for producing 3,4,5-trihydroxypentanoic acid in a non-human organism, like a microorganism or a plant or a part thereof, comprises increasing or generating the activity of a gene product with the activity of a gene product conferring the activity of “subunit of COMPASS-protein complex”, especially from Saccharomyces cerevisiae or its functional equivalent or its homolog, e.g. the increase of
[92343] (a) a gene product of a gene comprising the nucleic acid molecule as shown in the respective line in column 5 of Table I (whereby the respective line disclose in column 7 the fine chemical 3,4,5-trihydroxypentanoic acid), application no. 17, preferably the coding region thereof, or a homolog or a fragment thereof, and being depicted in the same respective line as said Ypl138c, or a functional equivalent or a homolog thereof as shown in column 8 of Table I, application no. 17, preferably the coding region thereof, particularly a homolog or functional equivalent as shown in column 8 of Table I B, application no. 17, and being depicted in the same respective line as said Ypl138c, and preferably the activity is increased plastidic, or
[92344] (b) a polypeptide comprising a polypeptide, a consensus sequence or at least a polypeptide motif as shown in the respective line in column 5 of Table II or in column 8 of Table IV, application no. 17, respectively, and being depicted in the same respective line as said Ypl138c, or a functional equivalent or a homolog thereof as depicted in column 8 of Table II, application no. 17, preferably a homolog or functional equivalent as depicted in column 8 of Table II B, application no. 17, and being depicted in the same respective line as said Ypl138c, and preferably the activity is increased plastidic, whereby the respective line disclose in column 7 the fine chemical 3,4,5-trihydroxypentanoic acid.

[92345] Accordingly, in one embodiment, the molecule which activity is to be increased in the process of the invention is the gene product with an activity as a “subunit of COMPASS-protein complex”, preferably it is the molecule of section (a) or (b) of this paragraph.

[92346] In particular, it was observed that in plants, especially in Arabidopsis thaliana, increasing or generating the activity of a gene product plastidic with the activity of a “subunit of COMPASSprotein complex”, preferably being encoded by a gene comprising the nucleic acid sequence SEQ ID NO. 151910, preferably the coding region thereof, conferred the production of or the increase in 3,4,5-trihydroxypentanoic acid compared with the wild type control.

[92347] The nucleic acid sequence of Ypl144w from Saccharomyces cerevisiae, e.g. as shown in the respective line in column 5 of Table I, application no. 17, has been published in A. And the activity of the gene product thereof is the activity of ypl144w-protein.

[92348] Accordingly, in one embodiment, the process of the present invention for producing glucose-1-phosphate in a non-human organism, like a microorganism or a plant or a part thereof, comprises increasing or generating the activity of a gene product with the activity of a gene product conferring the activity of “ypl144w-protein”, especially from Saccharomyces cerevisiae or its functional equivalent or its homolog, e.g. the increase of
[92349] (a) a gene product of a gene comprising the nucleic acid molecule as shown in the respective line in column 5 of Table I (whereby the respective line disclose in column 7 the fine chemical glucose-1-phosphate), application no. 17, preferably the coding region thereof, or a homolog or a fragment thereof, and being depicted in the same respective line as said Ypl144w, or a functional equivalent or a homolog thereof as shown in column 8 of Table I, application no. 17, preferably the coding region thereof, particularly a homolog or functional equivalent as shown in column 8 of Table I B, application no. 17, and being depicted in the same respective line as said Ypl144w, and preferably the activity is increased plastidic, or
[92350] (b) a polypeptide comprising a polypeptide, a consensus sequence or at least a polypeptide motif as shown in the respective line in column 5 of Table II or in column 8 of Table IV, application no. 17, respectively, and being depicted in the same respective line as said Ypl144w, or a functional equivalent or a homolog thereof as depicted in column 8 of Table II, application no. 17, preferably a homolog or functional equivalent as depicted in column 8 of Table II B, application no. 17, and being depicted in the same respective line as said Ypl144w, and preferably the activity is increased plastidic, whereby the respective line disclose in column 7 the fine chemical glucose-1-phosphate.

[92351] Accordingly, in one embodiment, the molecule which activity is to be increased in the process of the invention is the gene product with an activity as a “ypl144w-protein”, preferably it is the molecule of section (a) or (b) of this paragraph.

[92352] In particular, it was observed that in plants, especially in Arabidopsis thaliana, increasing or generating the activity of a gene product plastidic with the activity of a “ypl144w-protein”, preferably being encoded by a gene comprising the nucleic acid sequence SEQ ID NO. 151927, preferably the coding region thereof, conferred the production of or the increase in glucose-1-phosphate compared with the wild type control.

[92353] The nucleic acid sequence of Ypl144w from Saccharomyces cerevisiae, e.g. as shown in the respective line in column 5 of Table I, application no. 17, has been published in A. And the activity of the gene product thereof is the activity of ypl144w-protein.

[92354] Accordingly, in one embodiment, the process of the present invention for producing 3,4,5-trihydroxypentanoic acid in a non-human organism, like a microorganism or a plant or a part thereof, comprises increasing or generating the activity of a gene product with the activity of a gene product conferring the activity of “ypl144w-protein”, especially from Saccharomyces cerevisiae or its functional equivalent or its homolog, e.g. the increase of
[92355] (a) a gene product of a gene comprising the nucleic acid molecule as shown in the respective line in column 5 of Table I (whereby the respective line disclose in column 7 the fine chemical 3,4,5-trihydroxypentanoic acid), application no. 17, preferably the coding region thereof, or a homolog or a fragment thereof, and being depicted in the same respective line as said Ypl144w, or a functional equivalent or a homolog thereof as shown in column 8 of Table I, application no. 17, preferably the coding region thereof, particularly a homolog or functional equivalent as shown in column 8 of Table I B, application no. 17, and being depicted in the same respective line as said Ypl144w, and preferably the activity is increased plastidic, or
[92356] (b) a polypeptide comprising a polypeptide, a consensus sequence or at least a polypeptide motif as shown in the respective line in column 5 of Table II or in column 8 of Table IV, application no. 17, respectively, and being depicted in the same respective line as said Ypl144w, or a functional equivalent or a homolog thereof as depicted in column 8 of Table II, application no. 17, preferably a homolog or functional equivalent as depicted in column 8 of Table II B, application no. 17, and being depicted in the same respective line as said Ypl144w, and preferably the activity is increased plastidic, whereby the respective line disclose in column 7 the fine chemical 3,4,5-trihydroxypentanoic acid.

[92357] Accordingly, in one embodiment, the molecule which activity is to be increased in the process of the invention is the gene product with an activity as a “ypl144w-protein”, preferably it is the molecule of section (a) or (b) of this paragraph.

[92358] In particular, it was observed that in plants, especially in Arabidopsis thaliana, increasing or generating the activity of a gene product plastidic with the activity of a “ypl144w-protein”, preferably being encoded by a gene comprising the nucleic acid sequence SEQ ID NO. 151927, preferably the coding region thereof, conferred the production of or the increase in 3,4,5-trihydroxypentanoic acid compared with the wild type control.

[92359] The nucleic acid sequence of Ypr098c from Saccharomyces cerevisiae, e.g. as shown in the respective line in column 5 of Table I, application no. 17, has been published in A. And the activity of the gene product thereof is the activity of ypr098c-protein.

[92360] Accordingly, in one embodiment, the process of the present invention for producing glucose-1-phosphate in a non-human organism, like a microorganism or a plant or a part thereof, comprises increasing or generating the activity of a gene product with the activity of a gene product conferring the activity of “ypr098c-protein”, especially from Saccharomyces cerevisiae or its functional equivalent or its homolog, e.g. the increase of
[92361] (a) a gene product of a gene comprising the nucleic acid molecule as shown in the respective line in column 5 of Table I (whereby the respective line disclose in column 7 the fine chemical glucose-1-phosphate), application no. 17, preferably the coding region thereof, or a homolog or a fragment thereof, and being depicted in the same respective line as said Ypr098c, or a functional equivalent or a homolog thereof as shown in column 8 of Table I, application no. 17, preferably the coding region thereof, particularly a homolog or functional equivalent as shown in column 8 of Table I B, application no. 17, and being depicted in the same respective line as said Ypr098c, and preferably the activity is increased plastidic, or
[92362] (b) a polypeptide comprising a polypeptide, a consensus sequence or at least a polypeptide motif as shown in the respective line in column 5 of Table II or in column 8 of Table IV, application no. 17, respectively, and being depicted in the same respective line as said Ypr098c, or a functional equivalent or a homolog thereof as depicted in column 8 of Table II, application no. 17, preferably a homolog or functional equivalent as depicted in column 8 of Table II B, application no. 17, and being depicted in the same respective line as said Ypr098c, and preferably the activity is increased plastidic, whereby the respective line disclose in column 7 the fine chemical glucose-1-phosphate.

[92363] Accordingly, in one embodiment, the molecule which activity is to be increased in the process of the invention is the gene product with an activity as a “ypr098c-protein”, preferably it is the molecule of section (a) or (b) of this paragraph.

[92364] In particular, it was observed that in plants, especially in Arabidopsis thaliana, increasing or generating the activity of a gene product plastidic with the activity of a “ypr098c-protein”, preferably being encoded by a gene comprising the nucleic acid sequence SEQ ID NO. 151931, preferably the coding region thereof, conferred the production of or the increase in glucose-1-phosphate compared with the wild type control.

[92365] The nucleic acid sequence of Ypr098c from Saccharomyces cerevisiae, e.g. as shown in the respective line in column 5 of Table I, application no. 17, has been published in A. And the activity of the gene product thereof is the activity of ypr098c-protein.

[92366] Accordingly, in one embodiment, the process of the present invention for producing 3,4,5-trihydroxypentanoic acid in a non-human organism, like a microorganism or a plant or a part thereof, comprises increasing or generating the activity of a gene product with the activity of a gene product conferring the activity of “ypr098c-protein”, especially from Saccharomyces cerevisiae or its functional equivalent or its homolog, e.g. the increase of
[92367] (a) a gene product of a gene comprising the nucleic acid molecule as shown in the respective line in column 5 of Table I (whereby the respective line disclose in column 7 the fine chemical 3,4,5-trihydroxypentanoic acid), application no. 17, preferably the coding region thereof, or a homolog or a fragment thereof, and being depicted in the same respective line as said Ypr098c, or a functional equivalent or a homolog thereof as shown in column 8 of Table I, application no. 17, preferably the coding region thereof, particularly a homolog or functional equivalent as shown in column 8 of Table I B, application no. 17, and being depicted in the same respective line as said Ypr098c, and preferably the activity is increased plastidic, or
[92368] (b) a polypeptide comprising a polypeptide, a consensus sequence or at least a polypeptide motif as shown in the respective line in column 5 of Table II or in column 8 of Table IV, application no. 17, respectively, and being depicted in the same respective line as said Ypr098c, or a functional equivalent or a homolog thereof as depicted in column 8 of Table II, application no. 17, preferably a homolog or functional equivalent as depicted in column 8 of Table II B, application no. 17, and being depicted in the same respective line as said Ypr098c, and preferably the activity is increased plastidic, whereby the respective line disclose in column 7 the fine chemical 3,4,5-trihydroxypentanoic acid.

[92369] Accordingly, in one embodiment, the molecule which activity is to be increased in the process of the invention is the gene product with an activity as a “ypr098c-protein”, preferably it is the molecule of section (a) or (b) of this paragraph.

[92370] In particular, it was observed that in plants, especially in Arabidopsis thaliana, increasing or generating the activity of a gene product plastidic with the activity of a “ypr098c-protein”, preferably being encoded by a gene comprising the nucleic acid sequence SEQ ID NO. 151931, preferably the coding region thereof, conferred the production of or the increase in 3,4,5-trihydroxypentanoic acid compared with the wild type control.

[92371] The nucleic acid sequence of Ypr156c from Saccharomyces cerevisiae, e.g. as shown in the respective line in column 5 of Table I, application no. 17, has been published in A. And the activity of the gene product thereof is the activity of polyamine transporter.

[92372] Accordingly, in one embodiment, the process of the present invention for producing glucose-1-phosphate in a non-human organism, like a microorganism or a plant or a part thereof, comprises increasing or generating the activity of a gene product with the activity of a gene product conferring the activity of “polyamine transporter”, especially from Saccharomyces cerevisiae or its functional equivalent or its homolog, e.g. the increase of
[92373] (a) a gene product of a gene comprising the nucleic acid molecule as shown in the respective line in column 5 of Table I (whereby the respective line disclose in column 7 the fine chemical glucose-1-phosphate), application no. 17, preferably the coding region thereof, or a homolog or a fragment thereof, and being depicted in the same respective line as said Ypr156c, or a functional equivalent or a homolog thereof as shown in column 8 of Table I, application no. 17, preferably the coding region thereof, particularly a homolog or functional equivalent as shown in column 8 of Table I B, application no. 17, and being depicted in the same respective line as said Ypr156c, and preferably the activity is increased plastidic, or
[92374] (b) a polypeptide comprising a polypeptide, a consensus sequence or at least a polypeptide motif as shown in the respective line in column 5 of Table II or in column 8 of Table IV, application no. 17, respectively, and being depicted in the same respective line as said Ypr156c, or a functional equivalent or a homolog thereof as depicted in column 8 of Table II, application no. 17, preferably a homolog or functional equivalent as depicted in column 8 of Table II B, application no. 17, and being depicted in the same respective line as said Ypr156c, and preferably the activity is increased plastidic, whereby the respective line disclose in column 7 the fine chemical glucose-1-phosphate.

[92375] Accordingly, in one embodiment, the molecule which activity is to be increased in the process of the invention is the gene product with an activity as a “polyamine transporter”, preferably it is the molecule of section (a) or (b) of this paragraph.

[92376] In particular, it was observed that in plants, especially in Arabidopsis thaliana, increasing or generating the activity of a gene product plastidic with the activity of a “polyamine transporter”, preferably being encoded by a gene comprising the nucleic acid sequence SEQ ID NO. 151958, preferably the coding region thereof, conferred the production of or the increase in glucose-1-phosphate compared with the wild type control.

[92377] The nucleic acid sequence of Ypr156c from Saccharomyces cerevisiae, e.g. as shown in the respective line in column 5 of Table I, application no. 17, has been published in A. And the activity of the gene product thereof is the activity of polyamine transporter.

[92378] Accordingly, in one embodiment, the process of the present invention for producing myo-inositol in a non-human organism, like a microorganism or a plant or a part thereof, comprises increasing or generating the activity of a gene product with the activity of a gene product conferring the activity of “polyamine transporter”, especially from Saccharomyces cerevisiae or its functional equivalent or its homolog, e.g. the increase of
[92379] (a) a gene product of a gene comprising the nucleic acid molecule as shown in the respective line in column 5 of Table I (whereby the respective line disclose in column 7 the fine chemical myo-inositol), application no. 17, preferably the coding region thereof, or a homolog or a fragment thereof, and being depicted in the same respective line as said Ypr156c, or a functional equivalent or a homolog thereof as shown in column 8 of Table I, application no. 17, preferably the coding region thereof, particularly a homolog or functional equivalent as shown in column 8 of Table I B, application no. 17, and being depicted in the same respective line as said Ypr156c, and preferably the activity is increased plastidic, or
[92380] (b) a polypeptide comprising a polypeptide, a consensus sequence or at least a polypeptide motif as shown in the respective line in column 5 of Table II or in column 8 of Table IV, application no. 17, respectively, and being depicted in the same respective line as said Ypr156c, or a functional equivalent or a homolog thereof as depicted in column 8 of Table II, application no. 17, preferably a homolog or functional equivalent as depicted in column 8 of Table II B, application no. 17, and being depicted in the same respective line as said Ypr156c, and preferably the activity is increased plastidic, whereby the respective line disclose in column 7 the fine chemical myo-inositol.

[92381] Accordingly, in one embodiment, the molecule which activity is to be increased in the process of the invention is the gene product with an activity as a “polyamine transporter”, preferably it is the molecule of section (a) or (b) of this paragraph.

[92382] In particular, it was observed that in plants, especially in Arabidopsis thaliana, increasing or generating the activity of a gene product plastidic with the activity of a “polyamine transporter”, preferably being encoded by a gene comprising the nucleic acid sequence SEQ ID NO. 151958, preferably the coding region thereof, conferred the production of or the increase in myo-inositol compared with the wild type control.

[92383] The nucleic acid sequence of Zm_{—}4842_BE510522 from Zea mays, e.g. as shown in the respective line in column 5 of Table I, application no. 17, is unpublished. And the activity of the gene product thereof is the activity of Zm_{—}4842_BE510522-protein.

[92384] Accordingly, in one embodiment, the process of the present invention for producing fructose in a non-human organism, like a microorganism or a plant or a part thereof, comprises increasing or generating the activity of a gene product with the activity of a gene product conferring the activity of “Zm_{—}4842_BE510522-protein”, especially from Zea mays or its functional equivalent or its homolog, e.g. the increase of
[92385] (a) a gene product of a gene comprising the nucleic acid molecule as shown in the respective line in column 5 of Table I (whereby the respective line disclose in column 7 the fine chemical fructose), application no. 17, preferably the coding region thereof, or a homolog or a fragment thereof, and being depicted in the same respective line as said Zm_{—}4842_BE510522, or a functional equivalent or a homolog thereof as shown in column 8 of Table I, application no. 17, preferably the coding region thereof, particularly a homolog or functional equivalent as shown in column 8 of Table I B, application no. 17, and being depicted in the same respective line as said Zm_{—}4842_BE510522, and preferably the activity is increased non-targeted, or
[92386] (b) a polypeptide comprising a polypeptide, a consensus sequence or at least a polypeptide motif as shown in the respective line in column 5 of Table II or in column 8 of Table IV, application no. 17, respectively, and being depicted in the same respective line as said Zm_{—}4842_BE510522, or a functional equivalent or a homolog thereof as depicted in column 8 of Table II, application no. 17, preferably a homolog or functional equivalent as depicted in column 8 of Table II B, application no. 17, and being depicted in the same respective line as said Zm_{—}4842_BE510522, and preferably the activity is increased non-targeted, whereby the respective line disclose in column 7 the fine chemical fructose.

[92387] Accordingly, in one embodiment, the molecule which activity is to be increased in the process of the invention is the gene product with an activity as a “Zm_{—}4842_BE510522-protein”, preferably it is the molecule of section (a) or (b) of this paragraph.

[92388] In particular, it was observed that in plants, especially in Arabidopsis thaliana, increasing or generating the activity of a gene product non-targeted with the activity of a “Zm_{—}4842_BE510522-protein”, preferably being encoded by a gene comprising the nucleic acid sequence SEQ ID NO. 68413, preferably the coding region thereof, conferred the production of or the increase in fructose compared with the wild type control.

[92389] The nucleic acid sequence of Zm_{—}4842_BE510522 from Zea mays, e.g. as shown in the respective line in column 5 of Table I, application no. 17, is unpublished. And the activity of the gene product thereof is the activity of Zm_{—}4842_BE510522-protein.

[92390] Accordingly, in one embodiment, the process of the present invention for producing glucose in a non-human organism, like a microorganism or a plant or a part thereof, comprises increasing or generating the activity of a gene product with the activity of a gene product conferring the activity of “Zm_{—}4842_BE510522-protein”, especially from Zea mays or its functional equivalent or its homolog, e.g. the increase of
[92391] (a) a gene product of a gene comprising the nucleic acid molecule as shown in the respective line in column 5 of Table I (whereby the respective line disclose in column 7 the fine chemical glucose), application no. 17, preferably the coding region thereof, or a homolog or a fragment thereof, and being depicted in the same respective line as said Zm_{—}4842_BE510522, or a functional equivalent or a homolog thereof as shown in column 8 of Table I, application no. 17, preferably the coding region thereof, particularly a homolog or functional equivalent as shown in column 8 of Table I B, application no. 17, and being depicted in the same respective line as said Zm_{—}4842_BE510522, and preferably the activity is increased non-targeted, or
[92392] (b) a polypeptide comprising a polypeptide, a consensus sequence or at least a polypeptide motif as shown in the respective line in column 5 of Table II or in column 8 of Table IV, application no. 17, respectively, and being depicted in the same respective line as said Zm_{—}4842_BE510522, or a functional equivalent or a homolog thereof as depicted in column 8 of Table II, application no. 17, preferably a homolog or functional equivalent as depicted in column 8 of Table II B, application no. 17, and being depicted in the same respective line as said Zm_{—}4842_BE510522, and preferably the activity is increased non-targeted, whereby the respective line disclose in column 7 the fine chemical glucose.

[92393] Accordingly, in one embodiment, the molecule which activity is to be increased in the process of the invention is the gene product with an activity as a “Zm_{—}4842_BE510522-protein”, preferably it is the molecule of section (a) or (b) of this paragraph.

[92394] In particular, it was observed that in plants, especially in Arabidopsis thaliana, increasing or generating the activity of a gene product non-targeted with the activity of a “Zm_{—}4842_BE510522-protein”, preferably being encoded by a gene comprising the nucleic acid sequence SEQ ID NO. 68413, preferably the coding region thereof, conferred the production of or the increase in glucose compared with the wild type control.

[92395] The nucleic acid sequence of 44849766_CANOLA from Brassica napus, e.g. as shown in the respective line in column 5 of Table I, application no. 17, is unpublished. And the activity of the gene product thereof is the activity of acetyltransferase.

[92396] Accordingly, in one embodiment, the process of the present invention for producing myo-inositol in a non-human organism, like a microorganism or a plant or a part thereof, comprises increasing or generating the activity of a gene product with the activity of a gene product conferring the activity of “acetyltransferase”, especially from Brassica napus or its functional equivalent or its homolog, e.g. the increase of
[92397] (a) a gene product of a gene comprising the nucleic acid molecule as shown in the respective line in column 5 of Table I (whereby the respective line disclose in column 7 the fine chemical myo-inositol), application no. 17, preferably the coding region thereof, or a homolog or a fragment thereof, and being depicted in the same respective line as said 44849766_CANOLA, or a functional equivalent or a homolog thereof as shown in column 8 of Table I, application no. 17, preferably the coding region thereof, particularly a homolog or functional equivalent as shown in column 8 of Table I B, application no. 17, and being depicted in the same respective line as said 44849766_CANOLA, and preferably the activity is increased plastidic, or
[92398] (b) a polypeptide comprising a polypeptide, a consensus sequence or at least a polypeptide motif as shown in the respective line in column 5 of Table II or in column 8 of Table IV, application no. 17, respectively, and being depicted in the same respective line as said 44849766_CANOLA, or a functional equivalent or a homolog thereof as depicted in column 8 of Table II, application no. 17, preferably a homolog or functional equivalent as depicted in column 8 of Table II B, application no. 17, and being depicted in the same respective line as said 44849766_CANOLA, and preferably the activity is increased plastidic, whereby the respective line disclose in column 7 the fine chemical myo-inositol.

[92399] Accordingly, in one embodiment, the molecule which activity is to be increased in the process of the invention is the gene product with an activity as a “acetyltransferase”, preferably it is the molecule of section (a) or (b) of this paragraph.

[92400] In particular, it was observed that in plants, especially in Arabidopsis thaliana, increasing or generating the activity of a gene product plastidic with the activity of a “acetyltransferase”, preferably being encoded by a gene comprising the nucleic acid sequence SEQ ID NO. 140626, preferably the coding region thereof, conferred the production of or the increase in myo-inositol compared with the wild type control.

[92401] The nucleic acid sequence of 47266012_SOYBEAN from Glycine max, e.g. as shown in the respective line in column 5 of Table I, application no. 17, is unpublished. And the activity of the gene product thereof is the activity of 47266012-protein.

[92402] Accordingly, in one embodiment, the process of the present invention for producing fructose in a non-human organism, like a microorganism or a plant or a part thereof, comprises increasing or generating the activity of a gene product with the activity of a gene product conferring the activity of “47266012-protein”, especially from Glycine max or its functional equivalent or its homolog, e.g. the increase of
[92403] (a) a gene product of a gene comprising the nucleic acid molecule as shown in the respective line in column 5 of Table I (whereby the respective line disclose in column 7 the fine chemical fructose), application no. 17, preferably the coding region thereof, or a homolog or a fragment thereof, and being depicted in the same respective line as said 47266012_SOYBEAN, or a functional equivalent or a homolog thereof as shown in column 8 of Table I, application no. 17, preferably the coding region thereof, particularly a homolog or functional equivalent as shown in column 8 of Table I B, application no. 17, and being depicted in the same respective line as said 47266012_SOYBEAN, and preferably the activity is increased non-targeted, or
[92404] (b) a polypeptide comprising a polypeptide, a consensus sequence or at least a polypeptide motif as shown in the respective line in column 5 of Table II or in column 8 of Table IV, application no. 17, respectively, and being depicted in the same respective line as said 47266012_SOYBEAN, or a functional equivalent or a homolog thereof as depicted in column 8 of Table II, application no. 17, preferably a homolog or functional equivalent as depicted in column 8 of Table II B, application no. 17, and being depicted in the same respective line as said 47266012_SOYBEAN, and preferably the activity is increased non-targeted, whereby the respective line disclose in column 7 the fine chemical fructose.

[92405] Accordingly, in one embodiment, the molecule which activity is to be increased in the process of the invention is the gene product with an activity as a “47266012-protein”, preferably it is the molecule of section (a) or (b) of this paragraph.

[92406] In particular, it was observed that in plants, especially in Arabidopsis thaliana, increasing or generating the activity of a gene product non-targeted with the activity of a “47266012-protein”, preferably being encoded by a gene comprising the nucleic acid sequence SEQ ID NO. 15187, preferably the coding region thereof, conferred the production of or the increase in fructose compared with the wild type control.

[92407] The nucleic acid sequence of 47266012_SOYBEAN from Glycine max, e.g. as shown in the respective line in column 5 of Table I, application no. 17, is unpublished. And the activity of the gene product thereof is the activity of 47266012-protein.

[92408] Accordingly, in one embodiment, the process of the present invention for producing glucose in a non-human organism, like a microorganism or a plant or a part thereof, comprises increasing or generating the activity of a gene product with the activity of a gene product conferring the activity of “47266012-protein”, especially from Glycine max or its functional equivalent or its homolog, e.g. the increase of
[92409] (a) a gene product of a gene comprising the nucleic acid molecule as shown in the respective line in column 5 of Table I (whereby the respective line disclose in column 7 the fine chemical glucose), application no. 17, preferably the coding region thereof, or a homolog or a fragment thereof, and being depicted in the same respective line as said 47266012_SOYBEAN, or a functional equivalent or a homolog thereof as shown in column 8 of Table I, application no. 17, preferably the coding region thereof, particularly a homolog or functional equivalent as shown in column 8 of Table I B, application no. 17, and being depicted in the same respective line as said 47266012_SOYBEAN, and preferably the activity is increased non-targeted, or
[92410] (b) a polypeptide comprising a polypeptide, a consensus sequence or at least a polypeptide motif as shown in the respective line in column 5 of Table II or in column 8 of Table IV, application no. 17, respectively, and being depicted in the same respective line as said 47266012_SOYBEAN, or a functional equivalent or a homolog thereof as depicted in column 8 of Table II, application no. 17, preferably a homolog or functional equivalent as depicted in column 8 of Table II B, application no. 17, and being depicted in the same respective line as said 47266012_SOYBEAN, and preferably the activity is increased non-targeted, whereby the respective line disclose in column 7 the fine chemical glucose.

[92411] Accordingly, in one embodiment, the molecule which activity is to be increased in the process of the invention is the gene product with an activity as a “47266012-protein”, preferably it is the molecule of section (a) or (b) of this paragraph.

[92412] In particular, it was observed that in plants, especially in Arabidopsis thaliana, increasing or generating the activity of a gene product non-targeted with the activity of a “47266012-protein”, preferably being encoded by a gene comprising the nucleic acid sequence SEQ ID NO. 15187, preferably the coding region thereof, conferred the production of or the increase in glucose compared with the wild type control.

[92413] The nucleic acid sequence of 47266012_SOYBEAN from Glycine max, e.g. as shown in the respective line in column 5 of Table I, application no. 17, is unpublished. And the activity of the gene product thereof is the activity of 47266012-protein.

[92414] Accordingly, in one embodiment, the process of the present invention for producing glucose-1-phosphate in a non-human organism, like a microorganism or a plant or a part thereof, comprises increasing or generating the activity of a gene product with the activity of a gene product conferring the activity of “47266012-protein”, especially from Glycine max or its functional equivalent or its homolog, e.g. the increase of
[92415] (a) a gene product of a gene comprising the nucleic acid molecule as shown in the respective line in column 5 of Table I (whereby the respective line disclose in column 7 the fine chemical glucose-1-phosphate), application no. 17, preferably the coding region thereof, or a homolog or a fragment thereof, and being depicted in the same respective line as said 47266012_SOYBEAN, or a functional equivalent or a homolog thereof as shown in column 8 of Table I, application no. 17, preferably the coding region thereof, particularly a homolog or functional equivalent as shown in column 8 of Table I B, application no. 17, and being depicted in the same respective line as said 47266012_SOYBEAN, and preferably the activity is increased non-targeted, or
[92416] (b) a polypeptide comprising a polypeptide, a consensus sequence or at least a polypeptide motif as shown in the respective line in column 5 of Table II or in column 8 of Table IV, application no. 17, respectively, and being depicted in the same respective line as said 47266012_SOYBEAN, or a functional equivalent or a homolog thereof as depicted in column 8 of Table II, application no. 17, preferably a homolog or functional equivalent as depicted in column 8 of Table II B, application no. 17, and being depicted in the same respective line as said 47266012_SOYBEAN, and preferably the activity is increased non-targeted, whereby the respective line disclose in column 7 the fine chemical glucose-1-phosphate.

[92417] Accordingly, in one embodiment, the molecule which activity is to be increased in the process of the invention is the gene product with an activity as a “47266012-protein”, preferably it is the molecule of section (a) or (b) of this paragraph.

[92418] In particular, it was observed that in plants, especially in Arabidopsis thaliana, increasing or generating the activity of a gene product non-targeted with the activity of a “47266012-protein”, preferably being encoded by a gene comprising the nucleic acid sequence SEQ ID NO. 15187, preferably the coding region thereof, conferred the production of or the increase in glucose-1-phosphate compared with the wild type control.

[92419] The nucleic acid sequence of 47266012_SOYBEAN from Glycine max, e.g. as shown in the respective line in column 5 of Table I, application no. 17, is unpublished. And the activity of the gene product thereof is the activity of 47266012-protein.

[92420] Accordingly, in one embodiment, the process of the present invention for producing myo-inositol in a non-human organism, like a microorganism or a plant or a part thereof, comprises increasing or generating the activity of a gene product with the activity of a gene product conferring the activity of “47266012-protein”, especially from Glycine max or its functional equivalent or its homolog, e.g. the increase of
[92421] (a) a gene product of a gene comprising the nucleic acid molecule as shown in the respective line in column 5 of Table I (whereby the respective line disclose in column 7 the fine chemical myo-inositol), application no. 17, preferably the coding region thereof, or a homolog or a fragment thereof, and being depicted in the same respective line as said 47266012_SOYBEAN, or a functional equivalent or a homolog thereof as shown in column 8 of Table I, application no. 17, preferably the coding region thereof, particularly a homolog or functional equivalent as shown in column 8 of Table I B, application no. 17, and being depicted in the same respective line as said 47266012_SOYBEAN, and preferably the activity is increased non-targeted, or
[92422] (b) a polypeptide comprising a polypeptide, a consensus sequence or at least a polypeptide motif as shown in the respective line in column 5 of Table II or in column 8 of Table IV, application no. 17, respectively, and being depicted in the same respective line as said 47266012_SOYBEAN, or a functional equivalent or a homolog thereof as depicted in column 8 of Table II, application no. 17, preferably a homolog or functional equivalent as depicted in column 8 of Table II B, application no. 17, and being depicted in the same respective line as said 47266012_SOYBEAN, and preferably the activity is increased non-targeted, whereby the respective line disclose in column 7 the fine chemical myo-inositol.

[92423] Accordingly, in one embodiment, the molecule which activity is to be increased in the process of the invention is the gene product with an activity as a “47266012-protein”, preferably it is the molecule of section (a) or (b) of this paragraph.

[92424] In particular, it was observed that in plants, especially in Arabidopsis thaliana, increasing or generating the activity of a gene product non-targeted with the activity of a “47266012-protein”, preferably being encoded by a gene comprising the nucleic acid sequence SEQ ID NO. 15187, preferably the coding region thereof, conferred the production of or the increase in myo-inositol compared with the wild type control.

[92425] The nucleic acid sequence of 47266012_SOYBEAN from Glycine max, e.g. as shown in the respective line in column 5 of Table I, application no. 17, is unpublished. And the activity of the gene product thereof is the activity of 47266012-protein.

[92426] Accordingly, in one embodiment, the process of the present invention for producing sedoheptulose-7-phosphate in a non-human organism, like a microorganism or a plant or a part thereof, comprises increasing or generating the activity of a gene product with the activity of a gene product conferring the activity of “47266012-protein”, especially from Glycine max or its functional equivalent or its homolog, e.g. the increase of
[92427] (a) a gene product of a gene comprising the nucleic acid molecule as shown in the respective line in column 5 of Table I (whereby the respective line disclose in column 7 the fine chemical sedoheptulose-7-phosphate), application no. 17, preferably the coding region thereof, or a homolog or a fragment thereof, and being depicted in the same respective line as said 47266012_SOYBEAN, or a functional equivalent or a homolog thereof as shown in column 8 of Table I, application no. 17, preferably the coding region thereof, particularly a homolog or functional equivalent as shown in column 8 of Table I B, application no. 17, and being depicted in the same respective line as said 47266012_SOYBEAN, and preferably the activity is increased non-targeted, or
[92428] (b) a polypeptide comprising a polypeptide, a consensus sequence or at least a polypeptide motif as shown in the respective line in column 5 of Table II or in column 8 of Table IV, application no. 17, respectively, and being depicted in the same respective line as said 47266012_SOYBEAN, or a functional equivalent or a homolog thereof as depicted in column 8 of Table II, application no. 17, preferably a homolog or functional equivalent as depicted in column 8 of Table II B, application no. 17, and being depicted in the same respective line as said 47266012_SOYBEAN, and preferably the activity is increased non-targeted, whereby the respective line disclose in column 7 the fine chemical sedoheptulose-7-phosphate.

[92429] Accordingly, in one embodiment, the molecule which activity is to be increased in the process of the invention is the gene product with an activity as a “47266012-protein”, preferably it is the molecule of section (a) or (b) of this paragraph.

[92430] In particular, it was observed that in plants, especially in Arabidopsis thaliana, increasing or generating the activity of a gene product non-targeted with the activity of a “47266012-protein”, preferably being encoded by a gene comprising the nucleic acid sequence SEQ ID NO. 15187, preferably the coding region thereof, conferred the production of or the increase in sedoheptulose-7-phosphate compared with the wild type control.

[92431] The nucleic acid sequence of 49747384_SOYBEAN from Glycine max, e.g. as shown in the respective line in column 5 of Table I, application no. 17, is unpublished. And the activity of the gene product thereof is the activity of 49747384_SOYBEAN-protein.

[92432] Accordingly, in one embodiment, the process of the present invention for producing glucose in a non-human organism, like a microorganism or a plant or a part thereof, comprises increasing or generating the activity of a gene product with the activity of a gene product conferring the activity of “49747384_SOYBEAN-protein”, especially from Glycine max or its functional equivalent or its homolog, e.g. the increase of
[92433] (a) a gene product of a gene comprising the nucleic acid molecule as shown in the respective line in column 5 of Table I (whereby the respective line disclose in column 7 the fine chemical glucose), application no. 17, preferably the coding region thereof, or a homolog or a fragment thereof, and being depicted in the same respective line as said 49747384_SOYBEAN, or a functional equivalent or a homolog thereof as shown in column 8 of Table I, application no. 17, preferably the coding region thereof, particularly a homolog or functional equivalent as shown in column 8 of Table I B, application no. 17, and being depicted in the same respective line as said 49747384_SOYBEAN, and preferably the activity is increased non-targeted, or
[92434] (b) a polypeptide comprising a polypeptide, a consensus sequence or at least a polypeptide motif as shown in the respective line in column 5 of Table II or in column 8 of Table IV, application no. 17, respectively, and being depicted in the same respective line as said 49747384_SOYBEAN, or a functional equivalent or a homolog thereof as depicted in column 8 of Table II, application no. 17, preferably a homolog or functional equivalent as depicted in column 8 of Table II B, application no. 17, and being depicted in the same respective line as said 49747384_SOYBEAN, and preferably the activity is increased non-targeted, whereby the respective line disclose in column 7 the fine chemical glucose.

[92435] Accordingly, in one embodiment, the molecule which activity is to be increased in the process of the invention is the gene product with an activity as a “49747384_SOYBEAN-protein”, preferably it is the molecule of section (a) or (b) of this paragraph.

[92436] In particular, it was observed that in plants, especially in Arabidopsis thaliana, increasing or generating the activity of a gene product non-targeted with the activity of a “49747384_SOYBEAN-protein”, preferably being encoded by a gene comprising the nucleic acid sequence SEQ ID NO. 69, preferably the coding region thereof, conferred the production of or the increase in glucose compared with the wild type control.

[92437] The nucleic acid sequence of 49747384_SOYBEAN from Glycine max, e.g. as shown in the respective line in column 5 of Table I, application no. 17, is unpublished. And the activity of the gene product thereof is the activity of 49747384_SOYBEAN-protein.

[92438] Accordingly, in one embodiment, the process of the present invention for producing glucose-1-phosphate in a non-human organism, like a microorganism or a plant or a part thereof, comprises increasing or generating the activity of a gene product with the activity of a gene product conferring the activity of “49747384_SOYBEAN-protein”, especially from Glycine max or its functional equivalent or its homolog, e.g. the increase of
[92439] (a) a gene product of a gene comprising the nucleic acid molecule as shown in the respective line in column 5 of Table I (whereby the respective line disclose in column 7 the fine chemical glucose-1-phosphate), application no. 17, preferably the coding region thereof, or a homolog or a fragment thereof, and being depicted in the same respective line as said 49747384_SOYBEAN, or a functional equivalent or a homolog thereof as shown in column 8 of Table I, application no. 17, preferably the coding region thereof, particularly a homolog or functional equivalent as shown in column 8 of Table I B, application no. 17, and being depicted in the same respective line as said 49747384_SOYBEAN, and preferably the activity is increased non-targeted, or
[92440] (b) a polypeptide comprising a polypeptide, a consensus sequence or at least a polypeptide motif as shown in the respective line in column 5 of Table II or in column 8 of Table IV, application no. 17, respectively, and being depicted in the same respective line as said 49747384_SOYBEAN, or a functional equivalent or a homolog thereof as depicted in column 8 of Table II, application no. 17, preferably a homolog or functional equivalent as depicted in column 8 of Table II B, application no. 17, and being depicted in the same respective line as said 49747384_SOYBEAN, and preferably the activity is increased non-targeted, whereby the respective line disclose in column 7 the fine chemical glucose-1-phosphate.

[92441] Accordingly, in one embodiment, the molecule which activity is to be increased in the process of the invention is the gene product with an activity as a “49747384_SOYBEAN-protein”, preferably it is the molecule of section (a) or (b) of this paragraph.

[92442] In particular, it was observed that in plants, especially in Arabidopsis thaliana, increasing or generating the activity of a gene product non-targeted with the activity of a “49747384_SOYBEAN-protein”, preferably being encoded by a gene comprising the nucleic acid sequence SEQ ID NO. 69, preferably the coding region thereof, conferred the production of or the increase in glucose-1-phosphate compared with the wild type control.

[92443] The nucleic acid sequence of 49747384_SOYBEAN from Glycine max, e.g. as shown in the respective line in column 5 of Table I, application no. 17, is unpublished. And the activity of the gene product thereof is the activity of 49747384_SOYBEAN-protein.

[92444] Accordingly, in one embodiment, the process of the present invention for producing myo-inositol in a non-human organism, like a microorganism or a plant or a part thereof, comprises increasing or generating the activity of a gene product with the activity of a gene product conferring the activity of “49747384_SOYBEAN-protein”, especially from Glycine max or its functional equivalent or its homolog, e.g. the increase of
[92445] (a) a gene product of a gene comprising the nucleic acid molecule as shown in the respective line in column 5 of Table I (whereby the respective line disclose in column 7 the fine chemical myo-inositol), application no. 17, preferably the coding region thereof, or a homolog or a fragment thereof, and being depicted in the same respective line as said 49747384_SOYBEAN, or a functional equivalent or a homolog thereof as shown in column 8 of Table I, application no. 17, preferably the coding region thereof, particularly a homolog or functional equivalent as shown in column 8 of Table I B, application no. 17, and being depicted in the same respective line as said 49747384_SOYBEAN, and preferably the activity is increased non-targeted, or
[92446] (b) a polypeptide comprising a polypeptide, a consensus sequence or at least a polypeptide motif as shown in the respective line in column 5 of Table II or in column 8 of Table IV, application no. 17, respectively, and being depicted in the same respective line as said 49747384_SOYBEAN, or a functional equivalent or a homolog thereof as depicted in column 8 of Table II, application no. 17, preferably a homolog or functional equivalent as depicted in column 8 of Table II B, application no. 17, and being depicted in the same respective line as said 49747384_SOYBEAN, and preferably the activity is increased non-targeted, whereby the respective line disclose in column 7 the fine chemical myo-inositol.

[92447] Accordingly, in one embodiment, the molecule which activity is to be increased in the process of the invention is the gene product with an activity as a “49747384_SOYBEAN-protein”, preferably it is the molecule of section (a) or (b) of this paragraph.

[92448] In particular, it was observed that in plants, especially in Arabidopsis thaliana, increasing or generating the activity of a gene product non-targeted with the activity of a “49747384_SOYBEAN-protein”, preferably being encoded by a gene comprising the nucleic acid sequence SEQ ID NO. 69, preferably the coding region thereof, conferred the production of or the increase in myo-inositol compared with the wild type control.

[92449] The nucleic acid sequence of 49747384_SOYBEAN from Glycine max, e.g. as shown in the respective line in column 5 of Table I, application no. 17, is unpublished. And the activity of the gene product thereof is the activity of 49747384_SOYBEAN-protein.

[92450] Accordingly, in one embodiment, the process of the present invention for producing raffinose in a non-human organism, like a microorganism or a plant or a part thereof, comprises increasing or generating the activity of a gene product with the activity of a gene product conferring the activity of “49747384_SOYBEAN-protein”, especially from Glycine max or its functional equivalent or its homolog, e.g. the increase of
[92451] (a) a gene product of a gene comprising the nucleic acid molecule as shown in the respective line in column 5 of Table I (whereby the respective line disclose in column 7 the fine chemical raffinose), application no. 17, preferably the coding region thereof, or a homolog or a fragment thereof, and being depicted in the same respective line as said 49747384_SOYBEAN, or a functional equivalent or a homolog thereof as shown in column 8 of Table I, application no. 17, preferably the coding region thereof, particularly a homolog or functional equivalent as shown in column 8 of Table I B, application no. 17, and being depicted in the same respective line as said 49747384_SOYBEAN, and preferably the activity is increased non-targeted, or
[92452] (b) a polypeptide comprising a polypeptide, a consensus sequence or at least a polypeptide motif as shown in the respective line in column 5 of Table II or in column 8 of Table IV, application no. 17, respectively, and being depicted in the same respective line as said 49747384_SOYBEAN, or a functional equivalent or a homolog thereof as depicted in column 8 of Table II, application no. 17, preferably a homolog or functional equivalent as depicted in column 8 of Table II B, application no. 17, and being depicted in the same respective line as said 49747384_SOYBEAN, and preferably the activity is increased non-targeted, whereby the respective line disclose in column 7 the fine chemical raffinose.

[92453] Accordingly, in one embodiment, the molecule which activity is to be increased in the process of the invention is the gene product with an activity as a “49747384_SOYBEAN-protein”, preferably it is the molecule of section (a) or (b) of this paragraph.

[92454] In particular, it was observed that in plants, especially in Arabidopsis thaliana, increasing or generating the activity of a gene product non-targeted with the activity of a “49747384_SOYBEAN-protein”, preferably being encoded by a gene comprising the nucleic acid sequence SEQ ID NO. 69, preferably the coding region thereof, conferred the production of or the increase in raffinose compared with the wild type control.

[92455] The nucleic acid sequence of 49747384_SOYBEAN from Glycine max, e.g. as shown in the respective line in column 5 of Table I, application no. 17, is unpublished. And the activity of the gene product thereof is the activity of 49747384_SOYBEAN-protein.

[92456] Accordingly, in one embodiment, the process of the present invention for producing sedoheptulose-7-phosphate in a non-human organism, like a microorganism or a plant or a part thereof, comprises increasing or generating the activity of a gene product with the activity of a gene product conferring the activity of “49747384_SOYBEAN-protein”, especially from Glycine max or its functional equivalent or its homolog, e.g. the increase of
[92457] (a) a gene product of a gene comprising the nucleic acid molecule as shown in the respective line in column 5 of Table I (whereby the respective line disclose in column 7 the fine chemical sedoheptulose-7-phosphate), application no. 17, preferably the coding region thereof, or a homolog or a fragment thereof, and being depicted in the same respective line as said 49747384_SOYBEAN, or a functional equivalent or a homolog thereof as shown in column 8 of Table I, application no. 17, preferably the coding region thereof, particularly a homolog or functional equivalent as shown in column 8 of Table I B, application no. 17, and being depicted in the same respective line as said 49747384_SOYBEAN, and preferably the activity is increased non-targeted, or
[92458] (b) a polypeptide comprising a polypeptide, a consensus sequence or at least a polypeptide motif as shown in the respective line in column 5 of Table II or in column 8 of Table IV, application no. 17, respectively, and being depicted in the same respective line as said 49747384_SOYBEAN, or a functional equivalent or a homolog thereof as depicted in column 8 of Table II, application no. 17, preferably a homolog or functional equivalent as depicted in column 8 of Table II B, application no. 17, and being depicted in the same respective line as said 49747384_SOYBEAN, and preferably the activity is increased non-targeted, whereby the respective line disclose in column 7 the fine chemical sedoheptulose-7-phosphate.

[92459] Accordingly, in one embodiment, the molecule which activity is to be increased in the process of the invention is the gene product with an activity as a “49747384_SOYBEAN-protein”, preferably it is the molecule of section (a) or (b) of this paragraph.

[92460] In particular, it was observed that in plants, especially in Arabidopsis thaliana, increasing or generating the activity of a gene product non-targeted with the activity of a “49747384_SOYBEAN-protein”, preferably being encoded by a gene comprising the nucleic acid sequence SEQ ID NO. 69, preferably the coding region thereof, conferred the production of or the increase in sedoheptulose-7-phosphate compared with the wild type control.

[92461] The nucleic acid sequence of 59582753_SOYBEAN from Glycine max, e.g. as shown in the respective line in column 5 of Table I, application no. 17, is unpublished. And the activity of the gene product thereof is the activity of glucose-6-phosphate 1-dehydrogenase.

[92462] Accordingly, in one embodiment, the process of the present invention for producing fructose in a non-human organism, like a microorganism or a plant or a part thereof, comprises increasing or generating the activity of a gene product with the activity of a gene product conferring the activity of “glucose-6-phosphate 1-dehydrogenase”, especially from Glycine max or its functional equivalent or its homolog, e.g. the increase of
[92463] (a) a gene product of a gene comprising the nucleic acid molecule as shown in the respective line in column 5 of Table I (whereby the respective line disclose in column 7 the fine chemical fructose), application no. 17, preferably the coding region thereof, or a homolog or a fragment thereof, and being depicted in the same respective line as said 59582753_SOYBEAN, or a functional equivalent or a homolog thereof as shown in column 8 of Table I, application no. 17, preferably the coding region thereof, particularly a homolog or functional equivalent as shown in column 8 of Table I B, application no. 17, and being depicted in the same respective line as said 59582753_SOYBEAN, and preferably the activity is increased plastidic, or
[92464] (b) a polypeptide comprising a polypeptide, a consensus sequence or at least a polypeptide motif as shown in the respective line in column 5 of Table II or in column 8 of Table IV, application no. 17, respectively, and being depicted in the same respective line as said 59582753_SOYBEAN, or a functional equivalent or a homolog thereof as depicted in column 8 of Table II, application no. 17, preferably a homolog or functional equivalent as depicted in column 8 of Table II B, application no. 17, and being depicted in the same respective line as said 59582753_SOYBEAN, and preferably the activity is increased plastidic, whereby the respective line disclose in column 7 the fine chemical fructose.

[92465] Accordingly, in one embodiment, the molecule which activity is to be increased in the process of the invention is the gene product with an activity as a “glucose-6-phosphate 1-dehydrogenase”, preferably it is the molecule of section (a) or (b) of this paragraph.

[92466] In particular, it was observed that in plants, especially in Arabidopsis thaliana, increasing or generating the activity of a gene product plastidic with the activity of a “glucose-6-phosphate 1-dehydrogenase”, preferably being encoded by a gene comprising the nucleic acid sequence SEQ ID NO. 16883, preferably the coding region thereof, conferred the production of or the increase in fructose compared with the wild type control.

[92467] The nucleic acid sequence of 59582753_SOYBEAN from Glycine max, e.g. as shown in the respective line in column 5 of Table I, application no. 17, is unpublished. And the activity of the gene product thereof is the activity of glucose-6-phosphate 1-dehydrogenase.

[92468] Accordingly, in one embodiment, the process of the present invention for producing glucose in a non-human organism, like a microorganism or a plant or a part thereof, comprises increasing or generating the activity of a gene product with the activity of a gene product conferring the activity of “glucose-6-phosphate 1-dehydrogenase”, especially from Glycine max or its functional equivalent or its homolog, e.g. the increase of
[92469] (a) a gene product of a gene comprising the nucleic acid molecule as shown in the respective line in column 5 of Table I (whereby the respective line disclose in column 7 the fine chemical glucose), application no. 17, preferably the coding region thereof, or a homolog or a fragment thereof, and being depicted in the same respective line as said 59582753_SOYBEAN, or a functional equivalent or a homolog thereof as shown in column 8 of Table I, application no. 17, preferably the coding region thereof, particularly a homolog or functional equivalent as shown in column 8 of Table I B, application no. 17, and being depicted in the same respective line as said 59582753_SOYBEAN, and preferably the activity is increased plastidic, or
[92470] (b) a polypeptide comprising a polypeptide, a consensus sequence or at least a polypeptide motif as shown in the respective line in column 5 of Table II or in column 8 of Table IV, application no. 17, respectively, and being depicted in the same respective line as said 59582753_SOYBEAN, or a functional equivalent or a homolog thereof as depicted in column 8 of Table II, application no. 17, preferably a homolog or functional equivalent as depicted in column 8 of Table II B, application no. 17, and being depicted in the same respective line as said 59582753_SOYBEAN, and preferably the activity is increased plastidic, whereby the respective line disclose in column 7 the fine chemical glucose.

[92471] Accordingly, in one embodiment, the molecule which activity is to be increased in the process of the invention is the gene product with an activity as a “glucose-6-phosphate 1-dehydrogenase”, preferably it is the molecule of section (a) or (b) of this paragraph.

[92472] In particular, it was observed that in plants, especially in Arabidopsis thaliana, increasing or generating the activity of a gene product plastidic with the activity of a “glucose-6-phosphate 1-dehydrogenase”, preferably being encoded by a gene comprising the nucleic acid sequence SEQ ID NO. 16883, preferably the coding region thereof, conferred the production of or the increase in glucose compared with the wild type control.

[92473] The nucleic acid sequence of 59582753_SOYBEAN from Glycine max, e.g. as shown in the respective line in column 5 of Table I, application no. 17, is unpublished. And the activity of the gene product thereof is the activity of glucose-6-phosphate 1-dehydrogenase.

[92474] Accordingly, in one embodiment, the process of the present invention for producing glucose-1-phosphate in a non-human organism, like a microorganism or a plant or a part thereof, comprises increasing or generating the activity of a gene product with the activity of a gene product conferring the activity of “glucose-6-phosphate 1-dehydrogenase”, especially from Glycine max or its functional equivalent or its homolog, e.g. the increase of
[92475] (a) a gene product of a gene comprising the nucleic acid molecule as shown in the respective line in column 5 of Table I (whereby the respective line disclose in column 7 the fine chemical glucose-1-phosphate), application no. 17, preferably the coding region thereof, or a homolog or a fragment thereof, and being depicted in the same respective line as said 59582753_SOYBEAN, or a functional equivalent or a homolog thereof as shown in column 8 of Table I, application no. 17, preferably the coding region thereof, particularly a homolog or functional equivalent as shown in column 8 of Table I B, application no. 17, and being depicted in the same respective line as said 59582753_SOYBEAN, and preferably the activity is increased plastidic, or
[92476] (b) a polypeptide comprising a polypeptide, a consensus sequence or at least a polypeptide motif as shown in the respective line in column 5 of Table II or in column 8 of Table IV, application no. 17, respectively, and being depicted in the same respective line as said 59582753_SOYBEAN, or a functional equivalent or a homolog thereof as depicted in column 8 of Table II, application no. 17, preferably a homolog or functional equivalent as depicted in column 8 of Table II B, application no. 17, and being depicted in the same respective line as said 59582753_SOYBEAN, and preferably the activity is increased plastidic, whereby the respective line disclose in column 7 the fine chemical glucose-1-phosphate.

[92477] Accordingly, in one embodiment, the molecule which activity is to be increased in the process of the invention is the gene product with an activity as a “glucose-6-phosphate 1-dehydrogenase”, preferably it is the molecule of section (a) or (b) of this paragraph.

[92478] In particular, it was observed that in plants, especially in Arabidopsis thaliana, increasing or generating the activity of a gene product plastidic with the activity of a “glucose-6-phosphate 1-dehydrogenase”, preferably being encoded by a gene comprising the nucleic acid sequence SEQ ID NO. 16883, preferably the coding region thereof, conferred the production of or the increase in glucose-1-phosphate compared with the wild type control.

[92479] The nucleic acid sequence of 59582753_SOYBEAN from Glycine max, e.g. as shown in the respective line in column 5 of Table I, application no. 17, is unpublished. And the activity of the gene product thereof is the activity of glucose-6-phosphate 1-dehydrogenase.

[92480] Accordingly, in one embodiment, the process of the present invention for producing sedoheptulose-7-phosphate in a non-human organism, like a microorganism or a plant or a part thereof, comprises increasing or generating the activity of a gene product with the activity of a gene product conferring the activity of “glucose-6-phosphate 1-dehydrogenase”, especially from Glycine max or its functional equivalent or its homolog, e.g. the increase of
[92481] (a) a gene product of a gene comprising the nucleic acid molecule as shown in the respective line in column 5 of Table I (whereby the respective line disclose in column 7 the fine chemical sedoheptulose-7-phosphate), application no. 17, preferably the coding region thereof, or a homolog or a fragment thereof, and being depicted in the same respective line as said 59582753_SOYBEAN, or a functional equivalent or a homolog thereof as shown in column 8 of Table I, application no. 17, preferably the coding region thereof, particularly a homolog or functional equivalent as shown in column 8 of Table I B, application no. 17, and being depicted in the same respective line as said 59582753_SOYBEAN, and preferably the activity is increased plastidic, or
[92482] (b) a polypeptide comprising a polypeptide, a consensus sequence or at least a polypeptide motif as shown in the respective line in column 5 of Table II or in column 8 of Table IV, application no. 17, respectively, and being depicted in the same respective line as said 59582753_SOYBEAN, or a functional equivalent or a homolog thereof as depicted in column 8 of Table II, application no. 17, preferably a homolog or functional equivalent as depicted in column 8 of Table II B, application no. 17, and being depicted in the same respective line as said 59582753_SOYBEAN, and preferably the activity is increased plastidic, whereby the respective line disclose in column 7 the fine chemical sedoheptulose-7-phosphate.

[92483] Accordingly, in one embodiment, the molecule which activity is to be increased in the process of the invention is the gene product with an activity as a “glucose-6-phosphate 1-dehydrogenase”, preferably it is the molecule of section (a) or (b) of this paragraph.

[92484] In particular, it was observed that in plants, especially in Arabidopsis thaliana, increasing or generating the activity of a gene product plastidic with the activity of a “glucose-6-phosphate 1-dehydrogenase”, preferably being encoded by a gene comprising the nucleic acid sequence SEQ ID NO. 16883, preferably the coding region thereof, conferred the production of or the increase in sedoheptulose-7-phosphate compared with the wild type control.

[92485] The nucleic acid sequence of 59582753_SOYBEAN from Glycine max, e.g. as shown in the respective line in column 5 of Table I, application no. 17, is unpublished. And the activity of the gene product thereof is the activity of glucose-6-phosphate 1-dehydrogenase.

[92486] Accordingly, in one embodiment, the process of the present invention for producing sucrose in a non-human organism, like a microorganism or a plant or a part thereof, comprises increasing or generating the activity of a gene product with the activity of a gene product conferring the activity of “glucose-6-phosphate 1-dehydrogenase”, especially from Glycine max or its functional equivalent or its homolog, e.g. the increase of
[92487] (a) a gene product of a gene comprising the nucleic acid molecule as shown in the respective line in column 5 of Table I (whereby the respective line disclose in column 7 the fine chemical sucrose), application no. 17, preferably the coding region thereof, or a homolog or a fragment thereof, and being depicted in the same respective line as said 59582753_SOYBEAN, or a functional equivalent or a homolog thereof as shown in column 8 of Table I, application no. 17, preferably the coding region thereof, particularly a homolog or functional equivalent as shown in column 8 of Table I B, application no. 17, and being depicted in the same respective line as said 59582753_SOYBEAN, and preferably the activity is increased plastidic, or
[92488] (b) a polypeptide comprising a polypeptide, a consensus sequence or at least a polypeptide motif as shown in the respective line in column 5 of Table II or in column 8 of Table IV, application no. 17, respectively, and being depicted in the same respective line as said 59582753_SOYBEAN, or a functional equivalent or a homolog thereof as depicted in column 8 of Table II, application no. 17, preferably a homolog or functional equivalent as depicted in column 8 of Table II B, application no. 17, and being depicted in the same respective line as said 59582753_SOYBEAN, and preferably the activity is increased plastidic, whereby the respective line disclose in column 7 the fine chemical sucrose.

[92489] Accordingly, in one embodiment, the molecule which activity is to be increased in the process of the invention is the gene product with an activity as a “glucose-6-phosphate 1-dehydrogenase”, preferably it is the molecule of section (a) or (b) of this paragraph.

[92490] In particular, it was observed that in plants, especially in Arabidopsis thaliana, increasing or generating the activity of a gene product plastidic with the activity of a “glucose-6-phosphate 1-dehydrogenase”, preferably being encoded by a gene comprising the nucleic acid sequence SEQ ID NO. 16883, preferably the coding region thereof, conferred the production of or the increase in sucrose compared with the wild type control.

[92491] The nucleic acid sequence of 59582753_SOYBEAN from Glycine max, e.g. as shown in the respective line in column 5 of Table I, application no. 17, is unpublished. And the activity of the gene product thereof is the activity of glucose-6-phosphate 1-dehydrogenase.

[92492] Accordingly, in one embodiment, the process of the present invention for producing 3,4,5-trihydroxypentanoic acid in a non-human organism, like a microorganism or a plant or a part thereof, comprises increasing or generating the activity of a gene product with the activity of a gene product conferring the activity of “glucose-6-phosphate 1-dehydrogenase”, especially from Glycine max or its functional equivalent or its homolog, e.g. the increase of
[92493] (a) a gene product of a gene comprising the nucleic acid molecule as shown in the respective line in column 5 of Table I (whereby the respective line disclose in column 7 the fine chemical 3,4,5-trihydroxypentanoic acid), application no. 17, preferably the coding region thereof, or a homolog or a fragment thereof, and being depicted in the same respective line as said 59582753_SOYBEAN, or a functional equivalent or a homolog thereof as shown in column 8 of Table I, application no. 17, preferably the coding region thereof, particularly a homolog or functional equivalent as shown in column 8 of Table I B, application no. 17, and being depicted in the same respective line as said 59582753_SOYBEAN, and preferably the activity is increased plastidic, or
[92494] (b) a polypeptide comprising a polypeptide, a consensus sequence or at least a polypeptide motif as shown in the respective line in column 5 of Table II or in column 8 of Table IV, application no. 17, respectively, and being depicted in the same respective line as said 59582753_SOYBEAN, or a functional equivalent or a homolog thereof as depicted in column 8 of Table II, application no. 17, preferably a homolog or functional equivalent as depicted in column 8 of Table II B, application no. 17, and being depicted in the same respective line as said 59582753_SOYBEAN, and preferably the activity is increased plastidic, whereby the respective line disclose in column 7 the fine chemical 3,4,5-trihydroxypentanoic acid.

[92495] Accordingly, in one embodiment, the molecule which activity is to be increased in the process of the invention is the gene product with an activity as a “glucose-6-phosphate 1-dehydrogenase”, preferably it is the molecule of section (a) or (b) of this paragraph.

[92496] In particular, it was observed that in plants, especially in Arabidopsis thaliana, increasing or generating the activity of a gene product plastidic with the activity of a “glucose-6-phosphate 1-dehydrogenase”, preferably being encoded by a gene comprising the nucleic acid sequence SEQ ID NO. 16883, preferably the coding region thereof, conferred the production of or the increase in 3,4,5-trihydroxypentanoic acid compared with the wild type control.

[92497] The nucleic acid sequence of YJL072C from Saccharomyces cerevisiae, e.g. as shown in the respective line in column 5 of Table I, application no. 17, has been published in A. And the activity of the gene product thereof is the activity of DNA replication complex GINS protein.

[92498] Accordingly, in one embodiment, the process of the present invention for producing fructose in a non-human organism, like a microorganism or a plant or a part thereof, comprises increasing or generating the activity of a gene product with the activity of a gene product conferring the activity of “DNA replication complex GINS protein”, especially from Saccharomyces cerevisiae or its functional equivalent or its homolog, e.g. the increase of
[92499] (a) a gene product of a gene comprising the nucleic acid molecule as shown in the respective line in column 5 of Table I (whereby the respective line disclose in column 7 the fine chemical fructose), application no. 17, preferably the coding region thereof, or a homolog or a fragment thereof, and being depicted in the same respective line as said YJL072C, or a functional equivalent or a homolog thereof as shown in column 8 of Table I, application no. 17, preferably the coding region thereof, particularly a homolog or functional equivalent as shown in column 8 of Table I B, application no. 17, and being depicted in the same respective line as said YJL072C, and preferably the activity is increased non-targeted, or
[92500] (b) a polypeptide comprising a polypeptide, a consensus sequence or at least a polypeptide motif as shown in the respective line in column 5 of Table II or in column 8 of Table IV, application no. 17, respectively, and being depicted in the same respective line as said YJL072C, or a functional equivalent or a homolog thereof as depicted in column 8 of Table II, application no. 17, preferably a homolog or functional equivalent as depicted in column 8 of Table II B, application no. 17, and being depicted in the same respective line as said YJL072C, and preferably the activity is increased non-targeted, whereby the respective line disclose in column 7 the fine chemical fructose.

[92501] Accordingly, in one embodiment, the molecule which activity is to be increased in the process of the invention is the gene product with an activity as a “DNA replication complex GINS protein”, preferably it is the molecule of section (a) or (b) of this paragraph.

[92502] In particular, it was observed that in plants, especially in Arabidopsis thaliana, increasing or generating the activity of a gene product non-targeted with the activity of a “DNA replication complex GINS protein”, preferably being encoded by a gene comprising the nucleic acid sequence SEQ ID NO. 149528, preferably the coding region thereof, conferred the production of or the increase in fructose compared with the wild type control.

[92503] The nucleic acid sequence of YLR153C from Saccharomyces cerevisiae, e.g. as shown in the respective line in column 5 of Table I, application no. 17, has been published in A. And the activity of the gene product thereof is the activity of acetyl CoA synthetase.

[92504] Accordingly, in one embodiment, the process of the present invention for producing glucose in a non-human organism, like a microorganism or a plant or a part thereof, comprises increasing or generating the activity of a gene product with the activity of a gene product conferring the activity of “acetyl CoA synthetase”, especially from Saccharomyces cerevisiae or its functional equivalent or its homolog, e.g. the increase of
[92505] (a) a gene product of a gene comprising the nucleic acid molecule as shown in the respective line in column 5 of Table I (whereby the respective line disclose in column 7 the fine chemical glucose), application no. 17, preferably the coding region thereof, or a homolog or a fragment thereof, and being depicted in the same respective line as said YLR153C, or a functional equivalent or a homolog thereof as shown in column 8 of Table I, application no. 17, preferably the coding region thereof, particularly a homolog or functional equivalent as shown in column 8 of Table I B, application no. 17, and being depicted in the same respective line as said YLR153C, and preferably the activity is increased plastidic, or
[92506] (b) a polypeptide comprising a polypeptide, a consensus sequence or at least a polypeptide motif as shown in the respective line in column 5 of Table II or in column 8 of Table IV, application no. 17, respectively, and being depicted in the same respective line as said YLR153C, or a functional equivalent or a homolog thereof as depicted in column 8 of Table II, application no. 17, preferably a homolog or functional equivalent as depicted in column 8 of Table II B, application no. 17, and being depicted in the same respective line as said YLR153C, and preferably the activity is increased plastidic, whereby the respective line disclose in column 7 the fine chemical glucose.

[92507] Accordingly, in one embodiment, the molecule which activity is to be increased in the process of the invention is the gene product with an activity as a “acetyl CoA synthetase”, preferably it is the molecule of section (a) or (b) of this paragraph.

[92508] In particular, it was observed that in plants, especially in Arabidopsis thaliana, increasing or generating the activity of a gene product plastidic with the activity of a “acetyl CoA synthetase”, preferably being encoded by a gene comprising the nucleic acid sequence SEQ ID NO. 150960, preferably the coding region thereof, conferred the production of or the increase in glucose compared with the wild type control.

[92509] [0105.1.7.17] to [0107.1.7.17] for the disclosure of these paragraphs see [0105.1.7.7] to [0107.1.7.7] above

[92510] A protein having an activity conferring an increase in the amount or level of the fine chemical 3,4,5-trihydroxypentanoic acid, erythrol, fructose, fucose, galactinol, galactitol, glucose, glucose-1-phosphate, mannitol, melibiose, myo-inositol, raffinose, saccharic acid, sedoheptulose-7-phosphate, sorbitol, sucrose, trehalose, or verbascose, upon targeting to the plastids or mitochondria or upon non-targeting, preferably has the structure of the respective polypeptide described herein, in particular of the polypeptides comprising the consensus sequence or at least one polypeptide motifs as shown in the respective line in Table IV, application no. 17, column 8 or of the polypeptide comprising an amino acid sequence as disclosed in the respective line in Table II, application no. 17, columns 5 or 8, or homologs or fragments thereof as described herein, or is encoded by the nucleic acid molecule characterized herein or the nucleic acid molecule according to the invention, for example by the nucleic acid molecule as shown in the respective line in Table I, application no. 17, columns 5 or 8, preferably the coding region thereof, or homologs or fragments thereof and has the herein mentioned activity.

[92511] for the disclosure of this paragraph see [0109.1.7.7] above

[92512] for the disclosure of this paragraph see [0110.1.7.7] above

[92513] In one embodiment, the process of the present invention comprises one or more of the following steps
[92514] (a) stabilizing a protein conferring the generation or increased expression of a protein encoded by the nucleic acid molecule of the invention or of the polypeptide of the invention, e.g. of a polypeptide having the activity selected from the group consisting of 1,4-alpha-glucan branching enzyme, 2,3-dihydroxy-2,3-dihydrophenylpropionatedehydrogenase, 2-C-methyl-D-erythritol 4-phosphate cytidylyltransferase, 2-oxoglutarate dehydrogenase E1 subunit, 3-deoxy-7-phosphoheptulonate synthase, 3-isopropylmalate dehydratase large subunit, 3-phosphoglycerate dehydrogenase, 47266012-protein, 49747384_SOYBEAN-protein, 4-alpha-glucanotransferase, ABC transporter permease protein, acetyl CoA carboxylase, acetyl CoA synthetase, acetyl-coenzyme A synthetase, acetyltransferase, acid shock protein, acyl carrier protein, acyl transferase, acyl-CoA dehydrogenase, acyl-CoA synthase, adenylosuccinate lyase, alanine dehydrogenase, alcohol dehydrogenase, aldolase, alkaline phosphatase, amine oxidase, amino-acid acetyltransferase, aminotransferase, arginine exporter protein, asparagine synthetase B, AO g19350-protein, At2g45420-protein, At5g16650-protein, At5g43630-protein, ATP synthase subunit E, ATP-binding component of a transport system, auxin response factor, AX653549-protein, AY087308-protein, b0050-protein, b0251-protein, b0362-protein, b0488-protein, B0644-protein, b0801-protein, b0970-protein, b1003-protein, b1046-protein, b1137-protein, b1214-protein, b1219-protein, b1234-protein, b1285-protein, b1357-protein, b1410-protein, b1425-protein, b1445-protein, b1470-protein, b1522-protein, b1556-protein, b1583-protein, b1670-protein, b1796-protein, b1898-protein, b2032-protein, b2107-protein, b2139-protein, b2345-protein, b2360-protein, b2361-protein, b2399-protein, b2466-protein, b2474-protein, b2613-protein, b2653-protein, b2654-protein, b2670-protein, b2673-protein, b2682-protein, b2739-protein, b2932-protein, b3151-protein, b3221-protein, b3246-protein, b3346-protein, B3427-protein, b3442-protein, B3443-protein, b3777-protein, b3817-protein, b3818-protein, b3989-protein, b4029-protein, b4050-protein, b4056-protein, b4250-protein, beta-galactosidase, beta-hydroxylase, betaine aldehyde dehydrogenase, bifunctional protein (phosphoribosyltransferase and regulatory protein), binding-protein-dependent transport systems inner membrane component, branched-chain amino acid ABC transporter permease protein, branched-chain amino acid permease, calcium-dependent protein kinase, carbamoyl-phosphate synthase subunit, cardiolipin synthase, cation-transporting ATPase, CBL-interacting protein kinase, CCAAT-binding transcription factor, CDP-diglyceride synthetase, cell division control protein, cell division protein, chlorophyllase, chorismate lyase, circadian clock protein, colanic acid biosynthesis protein, coproporphyrinogen III oxidase, coproporphyrinogen oxidase, CTP synthase, cullin, cyclin, cyclin D, cystathionine gamma-synthase, cysteine synthase A, dATP pyrophosphohydrolase, dihydrolipoamide dehydrogenase, DNA binding protein, DNA replication complex GINS protein, DnaJ-like chaperone, electron transfer flavoprotein subunit beta, electron transport complex protein, elongation factor Tu, enoyl-CoA hydratase, eukaryotic translation initiation factor, eukaryotic translation initiation factor 5, fatty acid desaturase, ferredoxin, Fe—S subunit of oxidoreductase, flagellar M-ring protein, flavodoxin, fructose biphosphate aldolase, fumarylacetoacetate hydrolase, galactinol synthase, GDP-mannose 4,6-dehydratase, GDP-mannose dehydrogenase, geranylgeranyl pyrophosphate synthase, gibberellin 20-oxidase, Glu/Leu/PheNal dehydrogenase, glucokinase, gluconate transport system permease 3, glucose dehydrogenase, glucose-6-phosphate 1-dehydrogenase, glutamate-ammonia-ligase, glutamine amidotransferase, glutamine synthetase, glutaredoxin, glycerate kinase, glycogen (starch) synthase, glycogen synthase, glycosidase, glycosyl transferase, glycosyltransferase, GM02LC38418-protein, GM02LC46-protein, halotolerance protein, heat shock transcription factor, hexokinase, hexose transporter, high-affinity branched-chain amino acid transport protein, histone acetyltransferase, homocitrate synthase, hydrolase, inositol-3-phosphate synthase, integral membrane protein, intracellular septation protein, ion-transport protein, iron(III) dicitrate-binding protein, isochorismate synthase, isocitrate dehydrogenase, isopropylmalate isomerase large subunit, ketol-acid reductoisomerase, kinase, leucyl/phenylalanyl-tRNA-protein transferase, lipoprotein precursor, L-ribulose-5-phosphate 4-epimerase, L-serine dehydratase, lysine decarboxylase, MADS box protein transcription factor, MADS-box transcription factor, malate dehydrogenase, mannitol-1-phosphate dehydrogenase, membrane protein, membrane transport protein, methylglyoxalase, methyltransferase, Mg-protoporphyrin IX monomethyl ester oxidative cyclase 66 kD subunit, mitogen-activated protein kinase, molecular chaperone, monothiol glutaredoxin, monthiol glutaredoxin, multidrug resistance protein, multiple antibiotic resistance protein, murein transglycosylase, NAD(P)H dehydrogenase (quinone), NADH dehydrogenase, NADH-quinone oxidoreductase subunit, O-acetyltransferase, O-antigen chain length determinant, outer membrane receptor protein precursor, oxidoreductase, oxidoreductase subunit, para-aminobenzoate synthase component I, penicillin-binding protein, peptidyl-prolyl cis-trans isomerase, permease, permease protein of ABC transporter, phage-related repressor protein, phenylacetic acid degradation protein, phenylalanine ammonia-lyase, phosphate acetyltransferase, phosphate permease, phosphatidylinositol 3- and 4-kinase family protein, phosphoadenosine phosphosulfate reductase, phosphoanhydride phosphorylase, phosphoenolpyruvate carboxykinase, phosphoglycerate kinase, phosphohydrolase, phosphotransferase system component, photosystem I reaction center subunit XI, photosystem I reaction centre subunit, photosystem II protein, polyamine transporter, precorrin methylase, protease, protein kinase, protein phosphatase, protein-L-isoaspartate O-methyltransferase, purine biosynthesis protein, purine nucleoside phosphorylase, purine-nucleoside phosphorylase, putative transport system permease protein, putrescine transport system permease protein, pyridoxal phosphate biosynthetic protein, pyrimidine-specific ribonucleoside hydrolase, pyruvate kinase, recombinase A, RNA-binding protein, sec-independent protein translocase, Sec-independent protein translocase subunit, sensor histidine kinase, serine protease, serine/threonine dehydratase, serine/threonine-protein phosphatase, short chain dehydrogenase, short-chain alcohol dehydrogenase family, sll0254-protein, sll0281-protein, sll0354-protein, sll0418-protein, sll1761-protein, slr0600-protein, slr1107-protein, sn-glycerol-3-phosphate dehydrogenase, sn-glycerol-3-phosphate transport system permease protein, sodium/proton antiporter, sterol O-acyltransferase, subunit of COMPASS-protein complex, succinyl-CoA synthetase beta chain, ThiF family protein, thioredoxin, thioredoxin family protein, threonine dehydratase, threonine efflux protein, threonine synthase, transcription factor, transcriptional regulator, transcriptional regulator protein, transport protein, trehalase, trehalose-6-phosphate synthase, trehalose-phosphatase, tryptophan biosynthesis protein, TTC1386-protein, urease accessory protein, urease subunit, vacuolar sorting protein, XM_{—}473199-protein, ycl027w-protein, YCR047W-A-protein, ycr102c-protein, YDL159W-A-protein, ydl235c-protein, ydr183w-protein, ydr507c-protein, YEL030C-A-protein, yer177w-protein, YFL019C-protein, ygl096w-protein, ygl237c-protein, yhl013c-protein, YIL083C-protein, YJL127W-A-protein, ymr324c-protein, yol160w-protein, ypl144w-protein, ypr098c-protein, zinc transporter, and Zm_{—}4842_BE510522-protein, or of a polypeptide as indicated in the respective line in Table II, application no. 17, columns 5 or 8, or its homologs or fragments, and conferring the production of or an increase in 3,4,5-trihydroxypentanoic acid, erythrol, fructose, fucose, galactinol, galactitol, glucose, glucose-1-phosphate, mannitol, melibiose, myo-inositol, raffinose, saccharic acid, sedoheptulose-7-phosphate, sorbitol, sucrose, trehalose, or verbascose, respectively; and/or
[92515] (b) stabilizing a mRNA conferring the generation or increased expression of a FCRP, e.g. protein encoded by the nucleic acid molecule of the invention or its homologs or fragments, or of a mRNA encoding the polypeptide of the present invention having the hereinmentioned activity selected from the group consisting of said activities mentioned in (a) and conferring the production of or an increase in 3,4,5-trihydroxypentanoic acid, erythrol, fructose, fucose, galactinol, galactitol, glucose, glucose-1-phosphate, mannitol, melibiose, myo-inositol, raffinose, saccharic acid, sedoheptulose-7-phosphate, sorbitol, sucrose, trehalose, or verbascose, respectively; and/or
[92516] (c) increasing the specific activity of a protein conferring the increased expression of a FCRP, e.g. a protein encoded by the nucleic acid molecule of the invention or of the polypeptide of the present invention having herein-mentioned 3,4,5-trihydroxypentanoic acid, erythrol, fructose, fucose, galactinol, galactitol, glucose, glucose-1-phosphate, mannitol, melibiose, myo-inositol, raffinose, saccharic acid, sedoheptulose-7-phosphate, sorbitol, sucrose, trehalose, or verbascose generating or increasing activity, respectively, e.g. of a polypeptide having the activity of a protein as indicated in the respective line in Table II, application no. 17, columns 5 or 8, or its homologs or fragments, or decreasing the inhibitory regulation of the polypeptide of the invention; and/or
[92517] (d) generating or increasing the expression of an endogenous or artificial transcription factor mediating the expression of a protein conferring the generation or increased expression of a FCRP, e.g. a protein encoded by the nucleic acid molecule of the invention or of the polypeptide of the invention having herein-mentioned activity selected from the group consisting of said activities mentioned in (a) and conferring a 3,4,5-trihydroxypentanoic acid, erythrol, fructose, fucose, galactinol, galactitol, glucose, glucose-1-phosphate, mannitol, melibiose, myo-inositol, raffinose, saccharic acid, sedoheptulose-7-phosphate, sorbitol, sucrose, trehalose, or verbascose increasing activity, respectively, e.g. of a polypeptide having the activity of a protein as indicated in the respective line in Table II, application no. 17, columns 5 or 8 or its homologs; and/or
[92518] (e) stimulating activity of a protein conferring the increased expression of a FCRP, e.g. a protein encoded by the nucleic acid molecule of the present invention or a polypeptide of the present invention having herein-mentioned activity selected from the group consisting of said activities mentioned in (a) and conferring a 3,4,5-trihydroxypentanoic acid, erythrol, fructose, fucose, galactinol, galactitol, glucose, glucose-1-phosphate, mannitol, melibiose, myo-inositol, raffinose, saccharic acid, sedoheptulose-7-phosphate, sorbitol, sucrose, trehalose, or verbascose increasing activity, respectively, e.g. of a polypeptide having the activity of a protein as indicated in the respective line in Table II, application no. 17, columns 5 or 8, or its homologs or fragments, by adding one or more exogenous inducing factors to the non-human organism or parts thereof; and/or
[92519] (f) expressing a transgenic gene encoding a protein conferring the increased expression of a FCRP, e.g. a polypeptide encoded by the nucleic acid molecule of the present invention or a polypeptide of the present invention, having herein-mentioned activity selected from the group consisting of said activities mentioned in (a) and conferring a 3,4,5-trihydroxypentanoic acid, erythrol, fructose, fucose, galactinol, galactitol, glucose, glucose-1-phosphate, mannitol, melibiose, myo-inositol, raffinose, saccharic acid, sedoheptulose-7-phosphate, sorbitol, sucrose, trehalose, or verbascose increasing activity, respectively, e.g. of a polypeptide having the activity of a protein as indicated in the respective line in Table II, application no. 17, columns 5 or 8, or its homologs or fragments, and/or
[92520] (g) increasing the copy number of a gene conferring the increased expression of a nucleic acid molecule encoding a FCRP, e.g. a polypeptide encoded by the nucleic acid molecule of the invention or the polypeptide of the invention having herein-mentioned activity selected from the group consisting of said activities mentioned in (a) and conferring a 3,4,5-trihydroxypentanoic acid, erythrol, fructose, fucose, galactinol, galactitol, glucose, glucose-1-phosphate, mannitol, melibiose, myo-inositol, raffinose, saccharic acid, sedoheptulose-7-phosphate, sorbitol, sucrose, trehalose, or verbascose increasing activity, respectively, e.g. of a polypeptide having the activity of a protein as indicated in the respective line in Table II, application no. 17, columns 5 or 8, or its homologs or fragments; and/or
[92521] (h) increasing the expression of the endogenous gene encoding the FCRP, polypeptide of the invention, e.g. a polypeptide encoded by the nucleic acid molecule of the invention or the polypeptide of the invention having herein-mentioned activity selected from the group consisting of said activities mentioned in (a) and conferring a 3,4,5-trihydroxypentanoic acid, erythrol, fructose, fucose, galactinol, galactitol, glucose, glucose-1-phosphate, mannitol, melibiose, myo-inositol, raffinose, saccharic acid, sedoheptulose-7-phosphate, sorbitol, sucrose, trehalose, or verbascose; increasing activity, respectively, e.g. of a polypeptide having the activity of a protein as indicated in the respective line in Table II, application no. 17, columns 5 or 8, or its homologs or fragments, by adding positive expression or removing negative expression elements, e.g. homologous recombination can be used to either introduce positive regulatory elements like for plants the 35S enhancer into the promoter or to remove repressor elements form regulatory regions. Further gene conversion methods can be used to disrupt repressor elements or to enhance to activity of positive elements. Positive elements can be randomly introduced in plants by T-DNA or transposon mutagenesis and lines can be identified in which the positive elements have be integrated near to a gene of the invention, the expression of which is thereby enhanced; and/or
[92522] (i) modulating growth conditions of the non-human organism in such a manner, that the expression or activity of the gene encoding the FCRP, e.g. a protein of the invention or the protein itself is enhanced, for example microorganisms or plants can be grown for example under a higher temperature regime leading to an enhanced expression of heat shock proteins, which can lead to an enhanced 3,4,5-trihydroxypentanoic acid, erythrol, fructose, fucose, galactinol, galactitol, glucose, glucose-1-phosphate, mannitol, melibiose, myo-inositol, raffinose, saccharic acid, sedoheptulose-7-phosphate, sorbitol, sucrose, trehalose, or verbascose production, respectively; and/or
[92523] (j) selecting of non-human organisms with especially high activity of the proteins of the invention from natural or from mutagenized resources and breeding them into the target organisms, e.g. the elite crops; and/or
[92524] (k) directing a protein encoded by the nucleic acid molecule of the invention or of the polypeptide of the present invention having herein-mentioned activity selected from the group consisting of said activities mentioned in (a) and conferring a 3,4,5-trihydroxypentanoic acid, erythrol, fructose, fucose, galactinol, galactitol, glucose, glucose-1-phosphate, mannitol, melibiose, myo-inositol, raffinose, saccharic acid, sedoheptulose-7-phosphate, sorbitol, sucrose, trehalose, or verbascose increasing activity, respectively, e.g. of a polypeptide having the activity of a protein as indicated in the respective line in Table II, application no. 17, columns 5 or 8, or its homologs or fragments, if for the corresponding nucleic acid molecule in the respective line in column 6 of Table I the term “plastidic” is indicated, to the plastids by the addition of a plastidial targeting sequence or if for the corresponding nucleic acid molecule in the respective line in column 6 of Table I the term “mitochondric” is indicated, to the mitochondria by the addition of a mitochondrial targeting sequence; and/or
[92525] (l) generating the expression of a protein encoded by the nucleic acid molecule of the invention or of the polypeptide of the present invention having herein-mentioned activity selected from the group consisting of said activities mentioned in (a) and conferring a 3,4,5-trihydroxypentanoic acid, erythrol, fructose, fucose, galactinol, galactitol, glucose, glucose-1-phosphate, mannitol, melibiose, myo-inositol, raffinose, saccharic acid, sedoheptulose-7-phosphate, sorbitol, sucrose, trehalose, or verbascose increasing activity, respectively, e.g. of a polypeptide having the activity of a protein as indicated in the respective line in Table II, application no. 17, columns 5 or 8, or its homologs or fragments, if for the corresponding nucleic acid molecule in the respective line in column 6 of Table I the term “plastidic” or “mitochondric” is indicated, in these organelles by the stable or transient transformation, advantageously stable transformation, of organelles, preferably plastids or mitochondria, with an inventive nucleic acid sequence preferably in form of an expression cassette containing said sequence leading to the expression of the nucleic acids or polypeptides of the invention in the respective organelle; and/or
[92526] (m) generating the expression of a protein encoded by the nucleic acid molecule of the invention or of the polypeptide of the present invention having herein-mentioned activity selected from the group consisting of said activities mentioned in (a) and conferring a 3,4,5-trihydroxypentanoic acid, erythrol, fructose, fucose, galactinol, galactitol, glucose, glucose-1-phosphate, mannitol, melibiose, myo-inositol, raffinose, saccharic acid, sedoheptulose-7-phosphate, sorbitol, sucrose, trehalose, and/or verbascose increasing activity, respectively, e.g. of a polypeptide having the activity of a protein as indicated in the respective line in Table II, application no. 17, columns 5 or 8, or its homologs or fragments, if for the corresponding nucleic acid molecule in the respective line in column 6 of Table I the term “plastidic” or “mitochondric” is indicated, in these organelles by integration of a nucleic acid of the invention into the genome of the respective organelle under control of preferable a promoter selective for the respective organelle.

[92527] Preferably, said mRNA is the coding region of the nucleic acid molecule of the present invention and/or the protein conferring the increased expression of a protein encoded by the coding region of the nucleic acid molecule of the present invention alone or linked to a transit nucleic acid sequence or transit peptide encoding nucleic acid sequence or the polypeptide having the herein mentioned activity, e.g. conferring the generation of or increase of 3,4,5-trihydroxypentanoic acid, erythrol, fructose, fucose, galactinol, galactitol, glucose, glucose-1-phosphate, mannitol, melibiose, myo-inositol, raffinose, saccharic acid, sedoheptulose-7-phosphate, sorbitol, sucrose, trehalose, or verbascose, respectively, after increasing the expression or activity of the encoded polypeptide, non-targeted or in organelles such as plastids and/or mitochondria, preferably plastids, or having the activity of a polypeptide having an activity as the protein as shown in the respective line in Table II, application no. 17, column 3, or its homologs. Preferably the increase of 3,4,5-trihydroxypentanoic acid, erythrol, fructose, fucose, galactinol, galactitol, glucose, glucose-1-phosphate, mannitol, melibiose, myo-inositol, raffinose, saccharic acid, sedoheptulose-7-phosphate, sorbitol, sucrose, trehalose, or verbascose, respectively, takes place non-targeted or in plastids and/or mitochondria, preferably non-targeted or in plastids.

[92528] [0113.1.7.17] to [0122.1.7.17] for the disclosure of this paragraphs see [0113.1.7.7] to [0122.1.7.7] above

[92529] The activation of an endogenous polypeptide having above-mentioned activity, e.g. having the activity of a protein as shown in the respective line in Table II, application no. 17, column 3 or of the polypeptide of the invention, e.g. conferring the increase of the fine chemical 3,4,5-trihydroxypentanoic acid, erythrol, fructose, fucose, galactinol, galactitol, glucose, glucose-1-phosphate, mannitol, melibiose, myo-inositol, raffinose, saccharic acid, sedoheptulose7-phosphate, sorbitol, sucrose, trehalose, or verbascose, respectively, by increase of expression or activity in the cytoplasm, and/or in the cytosol, and/or in an organelle, such as plastids or mitochondria, can also be increased by introducing a synthetic transcription factor, which binds close to the coding region of the gene encoding the protein as shown in the respective line in Table II, application no. 17, column 5 or 8, or homologs or fragments thereof, and activates its transcription. A chimeric zinc finger protein can be constructed, which comprises a specific DNA-binding domain and an activation domain as e.g. the VP16 domain of Herpes Simplex virus. The specific binding domain can bind to the regulatory region of the gene encoding the protein as shown in the respective line in Table II, application no. 17, column 5 or 8, or homologs or fragments thereof. The expression of the chimeric transcription factor in a non-human organism, in particular in a plant, leads to a specific expression of the protein as shown in the respective line in Table II, application no. 17, column 5 or 8, or homologs or fragments thereof, see e.g. in WO01/52620, Oriz, Proc. Natl. Acad. Sci. USA 99, 13290 (2002), or Guan, Proc. Natl. Acad. Sci. USA 99, 13296 (2002).

[92530] [0124.1.7.17] to [0127.1.7.17] for the disclosure of this paragraphs see [0124.1.7.7] to [0127.1.7.7] above

[92531] Owing to the introduction of a gene or a plurality of genes conferring the expression of the nucleic acid molecule of the invention or the polypeptide of the invention, for example the nucleic acid construct mentioned below, or encoding the protein as shown in the respective line in Table II, application no. 17, column 5 or 8, or homologs or fragments thereof, into a non-human organism alone or in combination with other genes, it is possible not only to increase the biosynthetic flux towards the end product, but also to increase, modify or create de novo an advantageous, preferably novel metabolites composition in the non-human organism, e.g. an advantageous composition comprising a higher content of (from a viewpoint of nutritional physiology limited) 3,4,5-trihydroxypentanoic acid, erythrol, fructose, fucose, galactinol, galactitol, glucose, glucose-1-phosphate, mannitol, melibiose, myo-inositol, raffinose, saccharic acid, sedoheptulose-7-phosphate, sorbitol, sucrose, trehalose, or verbascose and if desired other saccharides and/or carbohydrates, and/or other metabolites, in free or bound form.

[92532] [0129.1.7.17] for the disclosure of this paragraph see [0129.1.7.7] above

[92533] Accordingly, in one embodiment, the process according to the invention relates to a process, which comprises:
[92534] (a) providing a non-human organism, preferably a microorganism, a plant cell, a plant tissue, a plant or a part thereof, more preferably a microorganism, a plant tissue, a plant or a part thereof;
[92535] (b) increasing the activity of a protein as shown in the respective line in Table II, application no. 17, column 3 or of a polypeptide being encoded by the respective nucleic acid molecule of the present invention and described below, e.g. conferring an increase of the fine chemical 3,4,5-trihydroxypentanoic acid, erythrol, fructose, fucose, galactinol, galactitol, glucose, glucose-1-phosphate, mannitol, melibiose, myo-inositol, raffinose, saccharic acid, sedoheptulose-7-phosphate, sorbitol, sucrose, trehalose, or verbascose, respectively, in the non-human organism, preferably in the microorganism, the plant cell, the plant tissue, the plant or a part thereof, more preferably a microorganism, a plant tissue, a plant or a part thereof, especially cytoplasmic or in an organelle, like plastids or mitochondria,
[92536] (c) growing the non-human organism, preferably the microorganism, the plant cell, the plant tissue, the plant or a part thereof, under conditions which permit the production of said chemical in the non-human organism, preferably the microorganism, the plant cell, the plant tissue, the plant or a part thereof; and
[92537] (d) if desired, recovering, optionally isolating, said fine chemical, in free and/or bound form, and, optionally further free and/or bound saccharides and/or carbohydrates, and/or other metabolites synthesized by the non-human organism, the microorganism, the plant cell, the plant tissue, the plant or a part thereof.

[92538] [0131.1.7.17] to [0133.1.7.17] for the disclosure of these paragraphs see [0131.1.7.7] to [0133.1.7.7] above

[92539] The non-human organism, in particular the microorganism, plant or part thereof, is advantageously grown in such a way that it is not only possible to recover, if desired to isolate the free or bound fine chemical or the free and bound fine chemical but as option it is also possible to produce, recover and, if desired to isolate, other free or/and bound vitamins and/or other metabolites.

[92540] The organisms are harvested in a manner known per se and appropriate for the particular organism. Microorganisms such as bacteria, mosses, yeasts and fungi or plant cells which are cultured in liquid media by fermentation may be removed, for example, by centrifugation, decanting or filtration. Plants are grown on solid media in a manner known per se and harvested accordingly.

[92541] The organisms, its cells or a part thereof or the recovered, and if desired isolated, saccharides, means all of the aforementioned carbohydrate, e.g. monosaccharides, preferably fructose and/or glucose, or other pentoses or hexoses; in free or bound form, preferably glucose-1-phosphate and/or sedoheptulose-7-phosphate; and/or derivates of monosaccharides, preferably (sugar) acids, e.g. saccharic acid, 3,4,5-trihydroxypentanoic acid; and/or sugar alcohols e.g. erythrol, galactitol, sorbitol, mannitol and/or myo-inositol; and/or deoxy-derivates, e.g. fucose; and/or disaccharides, preferably sucrose, melibiose, galactinol and/or trehalose, and/or oligosaccharides, preferably the RFOs (raffinose family of oligosaccharides: preferably the trisaccharide raffinose and/or the pentasaccharide verbascose), and/or polysaccharides, preferably starch and/or cellulose and/or oligosaccharides, polysaccharides, salts, amines, ethers, esters, preferably ester of phosphoric acid, glycosides containing said saccharides can then be processed further directly into foodstuffs or animal feeds or for other applications, for example according to the disclosures made in WO/2005/083093 or WO2005/012316, which are expressly incorporated herein by reference. The organism, its cells or a part thereof, such as microorganisms or plants or the recovered, and if desired isolated, respective fine chemical can then be processed further directly into foodstuffs or animal feeds or for other applications in nutrition or medicine or cosmetics, for example according to the disclosures made in U.S. Pat. No. 6,669,962 (Starch microcapsules for delivery of active agents); US No. 20050042737 (Starch process); US 20050054071 (Enzymes for starch processing); US 20050091716 (Novel plants and processes for obtaining them); U.S. Pat. No. 5,096,594 and U.S. Pat. No. 5,482,631 discloses a method of purifying cyclitols; U.S. Pat. No. 4,997,489 discloses soaking almond hulls in water to obtain a syrup containing fructose, glucose, inositol, and sorbitol; U.S. Pat. No. 5,296,364 discloses a microbial method for producing inositol; U.S. Pat. No. 4,734,402; US. 4,788,065; U.S. Pat. No. 6,465,037 and U.S. Pat. No. 6,355,295 relates to soy food ingredient based on carbohydrates, U.S. Pat. No. 6,653,451; US 20040128713: pertains to soybean plants having in their seeds significantly lower contents of raffinose, stachyose and phytic acid and significantly higher contents of sucrose and inorganic phosphate; US 20050008713 discloses compositions of plant carbohydrates for dietary supplements and nutritional support; which are expressly incorporated herein by reference.

[92542] [0135.1.7.17] to [0139.1.7.17] for the disclosure of these paragraphs see [0135.1.7.7] to [0139.1.7.7] above

[92543] In another embodiment, the invention relates to a (isolated) nucleic acid molecule, which comprises a nucleic acid molecule selected from the group consisting of:
[92544] (a) a nucleic acid molecule encoding a polypeptide shown in Table II, application no. 17, column 5 or 8, preferably shown in Table II B, application no. 17, column 8, or a homolog or a fragment thereof;
[92545] (b) a nucleic acid molecule shown in Table I, application no. 17, column 5 or 8, preferably shown in Table I B, application no. 17, column 8, preferably the coding region thereof, or a homolog or a fragment thereof;
[92546] (c) a nucleic acid molecule, which, as a result of the degeneracy of the genetic code, can be derived from a polypeptide sequence depicted in column 5 or 8 of Table II, application no. 17, preferably in column 8 of Table II B, application no. 17;
[92547] (d) a nucleic acid molecule having at least 30% identity, preferably at least 40%, 50%, 60%, 70%, 75%, 80%, 85%, 90%, 95%, 96%, 97%, 98%, 99%, 99.5%, with the nucleic acid molecule sequence of a polynucleotide comprising the nucleic acid molecule shown in column 5 or 8 of Table I, application no. 17, preferably shown in column 8 of Table I B, application no. 17, preferably the coding region thereof;
[92548] (e) a nucleic acid molecule encoding a polypeptide having at least 30% identity, preferably at least 40%, 50% 60%, 70%, 75%, 80%, 85%, 90%, 95%, 96%, 97%, 98%, 99%, 99.5%, identity with the amino acid sequence of the polypeptide encoded by the nucleic acid molecule of (a), (b), (c) or (d);
[92549] (f) a nucleic acid molecule which hybridizes with a nucleic acid molecule of (a), (b), (c), (d) or (e) under stringent hybridization conditions;
[92550] (g) a nucleic acid molecule encoding a polypeptide which can be isolated with the aid of monoclonal or polyclonal antibodies made against a polypeptide encoded by one of the nucleic acid molecules of (a), (b), (c), (d), (e) or (f);
[92551] (h) a nucleic acid molecule encoding a polypeptide comprising the consensus sequence or one or more polypeptide motifs as shown in column 8 of Table IV, application no. 17;
[92552] (i) a nucleic acid molecule encoding a polypeptide having the activity represented by a respective protein as depicted in column 5 of Table II, application no. 17;
[92553] (j) a nucleic acid molecule comprising a polynucleotide which is obtained by amplifying a cDNA library or a genomic library using the primers in Table III, application no. 17, column 8;
[92554] and
[92555] (k) nucleic acid molecule which is obtainable by screening a suitable nucleic acid library, especially a cDNA library and/or a genomic library, under stringent hybridization conditions with a probe comprising one of the sequences of the nucleic acid molecule of (a), (b), (c), (d), (e), (f), (g), (h), (i) or (j) or with a fragment of at least 15 nt, preferably 20 nt, 30 nt, 50 nt, 100 nt, 200 nt,500 nt, 1000 nt, 1500 nt, 2000 nt or 3000 nt of the nucleic acid molecule characterized in (a), (b), (c), (d), (e), (f), (g), (h), (i) or (j); or a nucleic acid molecule comprising a sequence which is complementary thereto.
   (All the references to Tables I to IV are references to the corresponding lines of Tables I to IV.)

[92556] In a preferred embodiment thereof said nucleic acid molecule according to (a), (b), (c), (d), (e), (f), (g), (h), (i), (j) or (k) encodes a polypeptide which has the activity of the respective polypeptide represented by a protein comprising a polypeptide as depicted in the respective line in column 5 of Table II, application no. 17.

[92557] In another preferred embodiment thereof said nucleic acid molecule according to (a), (b), (c), (d), (e), (f), (g), (h), (i), (j) or (k) confers a generation or an increase of the respective fine chemical in a non-human organism or a part thereof as compared to a corresponding wild-type non-human organism or part thereof.

[92558] In another preferred embodiment thereof said nucleic acid molecule according to (a), (b), (c), (d), (e), (f), (g), (h), (i), (j) or (k) encodes a polypeptide which has the activity of the respective polypeptide represented by a protein as depicted in the respective line in column 5 of Table II application no. 17 and confers a generation or an increase of the respective fine chemical in a non-human organism or a part thereof as compared to a corresponding wild-type non-human organism or part thereof.

[92559] In another embodiment, the invention relates to a (isolated) nucleic acid molecule, which comprises a nucleic acid molecule selected from the group consisting of:
[92560] (a) a nucleic acid molecule encoding a polypeptide shown in Table II, column 5 or 8, application no. 17, preferably shown in Table II A, application no. 17, in column 5 or in Table II A, application no. 17, column 8 or in Table II B, application no. 17, column 8, or a homolog or a fragment thereof;
[92561] (b) a nucleic acid molecule shown in Table I, application no. 17, column 5 or 8, preferably shown in Table I A, application no. 17, in column 5 or in Table I A, application no. 17, column 8 or in Table I B, application no. 17, column 8, preferably the coding region thereof, or a homolog or a fragment thereof;
[92562] (c) a nucleic acid molecule, which, as a result of the degeneracy of the genetic code, can be derived from a polypeptide sequence depicted in column 5 or 8 of Table II, application no. 17, preferably shown in Table II A, application no. 17, in column 5 or in Table II A, application no. 17, column 8 or in Table II B, application no. 17, column 8;
[92563] (d) a nucleic acid molecule having at least 30% identity, preferably at least 40%, 50%, 60%, 70%, 75%, 80%, 85%, 90%, 95%, 96%, 97%, 98%, 99%, 99.5%, with the nucleic acid molecule sequence of a polynucleotide comprising the nucleic acid molecule shown in column 5 or 8 of Table I, application no. 17, preferably shown in Table I A, application no. 17, in column 5 or in Table I A, application no. 17, column 8 or in Table I B column 8, preferably the coding region thereof;
[92564] (e) a nucleic acid molecule encoding a polypeptide having at least 30% identity, preferably at least 40%, 50% 60%, 70%, 75%, 80%, 85%, 90%, 95%, 96%, 97%, 98%, 99%, 99.5%, identity with the amino acid sequence of the polypeptide encoded by the nucleic acid molecule of (a), (b), (c) or (d);
[92565] (f) a nucleic acid molecule which hybridizes with a nucleic acid molecule of (a), (b), (c), (d) or (e) under stringent hybridization conditions;
[92566] (g) a nucleic acid molecule encoding a polypeptide which can be isolated with the aid of monoclonal or polyclonal antibodies made against a polypeptide encoded by one of the nucleic acid molecules of (a), (b), (c), (d), (e) or (f);
[92567] (h) a nucleic acid molecule encoding a polypeptide comprising the consensus sequence or one or more polypeptide motifs as shown in column 8 of Table IV, application no. 17;
[92568] (i) a nucleic acid molecule encoding a polypeptide having the activity represented by a respective protein as depicted in column 5 of Table II, application no. 17;
[92569] (j) a nucleic acid molecule comprising a polynucleotide which is obtained by amplifying a cDNA library or a genomic library using the primers in Table III, application no. 17, column 8;
[92570] and
[92571] (k) nucleic acid molecule which is obtainable by screening a suitable nucleic acid library, especially a cDNA library and/or a genomic library, under stringent hybridization conditions with a probe comprising one of the sequences of the nucleic acid molecule of (a), (b), (c), (d), (e), (f), (g), (h), (i) or (j) or with a fragment thereof having at least 15 nt, preferably 20 nt, 30 nt, 50 nt, 100 nt, 200 nt,500 nt, 1000 nt, 1500 nt, 2000 nt or 3000 nt of the nucleic acid molecule complementary to a nucleic acid sequence characterized in (a), (b), (c), (d), (e), (f), (g), (h), (i) or (j);
[92572] or a nucleic acid molecule comprising a sequence which is complementary thereto;
   whereby, preferably, the nucleic acid molecule according to (a), (b), (c), (d), (e), (f), (g), (h), (i), (j) or (k) distinguishes over the sequence depicted in Table I A and/or I B, application no. 17, column 5 or 8, or the coding regions thereof, by one or more nucleotides (especially but not exceeding 5%, preferably 4%, 3%, 2%, 1%, 0.5%, 0.2% or 0.1%). In an embodiment, the nucleic acid molecule of the invention does not consist of the sequence shown in Table I A and/or I B, application no. 17, column 5 or 8, or the coding region thereof. In another embodiment, the nucleic acid molecule of the present invention, preferably the coding region thereof, is at least 30%, 40%, 50%, 60%, 70%, 80%, 90%, 95% identical but less than 100%, 99.999%, 99.99%, 99.9%, 99%, 98%, 97%, 96% or 95% identical to the sequence shown in Table I A and/or I B, application no. 17, column 5 or 8, or the coding region thereof, respectively. In a further embodiment the nucleic acid molecule does not encode the polypeptide sequence shown in Table II A and/or II B, application no. 17, column 5 or 8 but homologs thereof. Accordingly, in one embodiment, the nucleic acid molecule of the present invention encodes in one embodiment a polypeptide which differs at least in one or more amino acids (especially but not exceeding 5%, preferably 4%, 3%, 2%, 1%, 0.5%, 0.2% or 0.1%) from the polypeptide shown in Table II, application no. 17, column 5 or 8 and does not encode a protein of the sequence shown in Table II A and/or II B, application no. 17, column 5 or 8. Accordingly, in one embodiment, the protein encoded by a sequence of a nucleic acid according to (a), (b), (c), (d), (e), (f), (g), (h), (i), (j) or (k) does not consist of the sequence shown in Table I A and/or I B, application no. 17, column 5 or 8, or the coding region thereof. In a further embodiment, the protein of the present invention is at least 30%, 40%, 50%, 60%, 70%, 80%, 90%, 95% identical to protein sequence depicted in Table II A and/or II B, application no. 17, column 5 or 8 but less than 100%, preferably less than 99.999%, 99.99%, 99.9%, 99%, 98%, 97%, 96% or 95% identical to the sequence shown in Table II A and/or II B, application no. 17, column 5 or 8.
   (All the references to Tables I to IV are references to the corresponding lines of Tables I to IV.)

[92573] In a preferred embodiment thereof said nucleic acid molecule according to (a), (b), (c), (d), (e), (f), (g), (h), (i), (j) or (k) encodes a polypeptide which has the activity of the respective polypeptide represented by a protein comprising a polypeptide as depicted in the respective line in column 5 of Table II, application no. 17.

[92574] In another preferred embodiment thereof said nucleic acid molecule according to (a), (b), (c), (d), (e), (f), (g), (h), (i), (j) or (k) confers a generation or an increase of the respective fine chemical in a non-human organism or a part thereof as compared to a corresponding wild-type non-human organism or part thereof.

[92575] In another preferred embodiment thereof said nucleic acid molecule according to (a), (b), (c), (d), (e), (f), (g), (h), (i), (j) or (k) encodes a polypeptide which has the activity of the respective polypeptide represented by a protein as depicted in the respective line in column 5 of Table II, application no. 17, and confers a generation or an increase of the respective fine chemical in a non-human organism or a part thereof as compared to a corresponding wild-type non-human organism or part thereof.

[92576] [0144.1.7.17] to [0155.1.7.17] for the disclosure of these paragraphs see [0144.1.7.7] to [0155.1.7.7] above

[92577] In a preferred embodiment a nucleic acid construct, for example an expression cassette, comprises upstream, i.e. at the 5′ end of the encoding sequence, a promoter and downstream, i.e. at the 3′ end, a polyadenylation signal and optionally other regulatory elements which are operably linked to the intervening encoding sequence with one of the nucleic acids as depicted in the respective line in Table I, application no. 17, column 5 or 8, preferably the coding region thereof, or a homolog or a fragment thereof. By an operable linkage is meant the sequential arrangement of promoter, encoding sequence, terminator, optionally other regulatory elements and optionally targeting sequences in such a way that each of the regulatory elements/targeting sequence can fulfill its function in the expression of the encoding sequence in due manner. In one embodiment the sequences preferred for operable linkage are targeting sequences for ensuring subcellular localization in organelles, like plastids or mitochondria. However, targeting sequences for ensuring subcellular localization in the endoplasmic reticulum (=ER), in the nucleus, in oil corpuscles or other compartments may also be employed as well as translation promoters such as the 5′ lead sequence in tobacco mosaic virus (Gallie et al., Nucl. Acids Res. 15, 8693 (1987)).

[92578] for the disclosure of this paragraph see [0157.1.7.7] above

[92579] In an embodiment, the invention relates to an expression cassette, comprising
[92580] 1) a promoter, preferably a promoter selected from the group consisting of Big35S, PCUbi, Super and USP;
[92581] 2) a nucleic acid molecule selected from the group consisting of
   [92582] (a) a nucleic acid molecule encoding a polypeptide shown in Table II, application no. 17, column 5 or 8, preferably shown in Table II A, application no. 17, column 5, or in Table II A, application no. 17, column 8, or in Table II B, application no. 17, column 8, or a homolog or a fragment thereof;
   [92583] (b) a nucleic acid molecule shown in Table I, application no. 17, column 5 or 8, preferably shown in Table I A, application no. 17, column 5, or in Table I A, application no. 17, column 8, or in Table I B, application no. 17, column 8, preferably the coding region thereof, or a homolog or a fragment thereof;
   [92584] (c) a nucleic acid molecule, which, as a result of the degeneracy of the genetic code, can be derived from a polypeptide sequence depicted in column 5 or 8 of Table II, application no. 17, preferably shown in Table II A, application no. 17, column 5, or in Table II A, application no. 17, column 8, or in Table II B, application no. 17, column 8;
   [92585] (d) a nucleic acid molecule having at least 30% identity, preferably at least 40%, 50%, 60%, 70%, 75%, 80%, 85%, 90%, 95%, 96%, 97%, 98%, 99%, 99.5%, with the nucleic acid molecule sequence of a polynucleotide comprising the nucleic acid molecule shown in column 5 or 8 of Table I, application no. 17, preferably shown in Table I A, application no. 17, column 5, or in Table I A, application no. 17, column 8, or in Table I B, application no. 17, column 8, preferably the coding region thereof;
   [92586] (e) a nucleic acid molecule encoding a polypeptide having at least 30% identity, preferably at least 40%, 50% 60%, 70%, 75%, 80%, 85%, 90%, 95%, 96%, 97%, 98%, 99%, 99.5%, identity with the amino acid sequence of the polypeptide encoded by the nucleic acid molecule of (a), (b), (c) or (d);
   [92587] (f) a nucleic acid molecule which hybridizes with a nucleic acid molecule of (a), (b), (c), (d) or (e) under stringent hybridization conditions;
   [92588] (g) a nucleic acid molecule encoding a polypeptide which can be isolated with the aid of monoclonal or polyclonal antibodies made against a polypeptide encoded by one of the nucleic acid molecules of (a), (b), (c), (d), (e) or (f);
   [92589] (h) a nucleic acid molecule encoding a polypeptide comprising the consensus sequence or one or more polypeptide motifs as shown in column 8 of Table IV, application no. 17;
   [92590] (i) a nucleic acid molecule encoding a polypeptide having the activity represented by a respective protein as depicted in column 5 of Table II, application no. 17;
   [92591] (j) a nucleic acid molecule comprising a polynucleotide which is obtained by amplifying a cDNA library or a genomic library using the primers in Table III, application no. 17, column 8;
   [92592] and
   [92593] (k) nucleic acid molecule which is obtainable by screening a suitable nucleic acid library, especially a cDNA library and/or a genomic library, under stringent hybridization conditions with a probe comprising one of the sequences of the nucleic acid molecule of (a), (b), (c), (d), (e), (f), (g), (h), (i) or (j) or with a fragment of at least 15 nt, preferably 20 nt, 30 nt, 50 nt, 100 nt, 200 nt,500 nt, 1000 nt, 1500 nt, 2000 nt or 3000 nt of the nucleic acid molecule characterized in (a), (b), (c), (d), (e), (f), (g), (h), (i) or (j);
   [92594] or a nucleic acid molecule comprising a sequence which is complementary thereto. and, optionally
[92595] 3) nucleic acid molecule encoding a transit peptide, preferably encoding a plastidal transit peptide or a mitochondrial transit peptide;
   which are operable linked.
   (All the references to Tables I to IV are references to the corresponding lines of Tables I to IV.)

[92596] In a preferred embodiment thereof said nucleic acid molecule according to 2 (a), (b), (c), (d), (e), (f), (g), (h), (i), (j) or (k) encodes a polypeptide which has the activity of the respective polypeptide represented by a protein comprising a polypeptide as depicted in the respective line in column 5 of Table II, application no. 17.

[92597] In another preferred embodiment thereof said nucleic acid molecule according to 2 (a), (b), (c), (d), (e), (f), (g), (h), (i), (j) or (k) confers a generation or an increase of the respective fine chemical in a non-human organism or a part thereof as compared to a corresponding wild-type non-human organism or part thereof.

[92598] In another preferred embodiment thereof said nucleic acid molecule according to 2 (a), (b), (c), (d), (e), (f), (g), (h), (i), (j) or (k) encodes a polypeptide which has the activity of the respective polypeptide represented by a protein as depicted in the respective line in column 5 of Table II application no. 17 and confers a generation or an increase of the respective fine chemical in a non-human organism or a part thereof as compared to a corresponding wild-type non-human organism or part thereof.

[92599] In another embodiment thereof the expression cassette comprises 3) a nucleic acid molecule encoding a transit peptide, preferably encoding a plastidal transit peptide, especially in case in column 6 of Table I, application no. 17, in the same line as of the respective nucleic acid molecule according to 2) “plastidic” is depicted, or encoding a mitochondrial transit peptide, especially in case in column 6 of Table I, application no. 17, in the same line as of the respective nucleic acid molecule according to 2) “mitochondric” is depicted.

[92600] In another embodiment thereof the expression cassette does not comprise 3) a nucleic acid molecule encoding a transit peptide, especially in case in column 6 of Table I, application no. 17, in the same line as of the respective nucleic acid molecule according to 2) “non-targeted” is depicted.

[92601] In a further embodiment, the invention relates to an expression cassette, comprising
[92602] 1) a promoter, preferably a promoter selected from the group consisting of Big35S, PCUbi, Super and USP;
[92603] 2) a nucleic acid molecule selected from the group consisting of
   [92604] (a) a nucleic acid molecule encoding a polypeptide shown in Table II, application no. 17, column 5 or 8, preferably shown in Table II A, application no. 17, column 5, or in Table II A, application no. 17, column 8, or in Table II B, application no. 17, column 8, or a homolog or a fragment thereof;
   [92605] (b) a nucleic acid molecule shown in Table I, application no. 17, column 5 or 8, preferably shown in Table I A, application no. 17, column 5, or in Table I A, application no. 17, column 8, or in Table I B, application no. 17, column 8, preferably the coding region thereof, or a homolog or a fragment thereof;
   [92606] (c) a nucleic acid molecule, which, as a result of the degeneracy of the genetic code, can be derived from a polypeptide sequence depicted in column 5 or 8 of Table II, application no. 17, preferably shown in Table II A, application no. 17, column 5, or in Table II A, application no. 17, column 8, or in Table II B, application no. 17, column 8;
   [92607] (d) a nucleic acid molecule having at least 30% identity, preferably at least 40%, 50%, 60%, 70%, 75%, 80%, 85%, 90%, 95%, 96%, 97%, 98%, 99%, 99.5%, with the nucleic acid molecule sequence of a polynucleotide comprising the nucleic acid molecule shown in column 5 or 8 of Table I, application no. 17, preferably shown in Table I A, application no. 17, column 5, or in Table I A, application no. 17, column 8,or in Table I B, application no. 17, column 8, preferably the coding region thereof;
   [92608] (e) a nucleic acid molecule encoding a polypeptide having at least 30% identity, preferably at least 40%, 50% 60%, 70%, 75%, 80%, 85%, 90%, 95%, 96%, 97%, 98%, 99%, 99.5%, identity with the amino acid sequence of the polypeptide encoded by the nucleic acid molecule of (a), (b), (c) or (d);
   [92609] (f) a nucleic acid molecule which hybridizes with a nucleic acid molecule of (a), (b), (c), (d) or (e) under stringent hybridization conditions;
   [92610] (g) a nucleic acid molecule encoding a polypeptide which can be isolated with the aid of monoclonal or polyclonal antibodies made against a polypeptide encoded by one of the nucleic acid molecules of (a), (b), (c), (d), (e) or (f);
   [92611] (h) a nucleic acid molecule encoding a polypeptide comprising the consensus sequence or one or more polypeptide motifs as shown in column 8 of Table IV, application no. 17;
   [92612] (i) a nucleic acid molecule encoding a polypeptide having the activity represented by a respective protein as depicted in column 5 of Table II, application no. 17;
   [92613] (j) a nucleic acid molecule comprising a polynucleotide which is obtained by amplifying a cDNA library or a genomic library using the primers in Table III, application no. 17, column 8;
   [92614] and
   [92615] (k) nucleic acid molecule which is obtainable by screening a suitable nucleic acid library, especially a cDNA library and/or a genomic library, under stringent hybridization conditions with a probe comprising one of the sequences of the nucleic acid molecule of (a), (b), (c), (d), (e), (f), (g), (h), (i) or (j) or with a fragment of at least 15 nt, preferably 20 nt, 30 nt, 50 nt, 100 nt, 200 nt,500 nt, 1000 nt, 1500 nt, 2000 nt or 3000 nt of the nucleic acid molecule characterized in (a), (b), (c), (d), (e), (f), (g), (h), (i) or (j);
   [92616] or a nucleic acid molecule comprising a sequence which is complementary thereto;
      and, optionally
[92617] 3) nucleic acid molecule encoding a transit peptide, preferably encoding a plastidal transit peptide or a mitochondrial transit peptide;
   which are operable linked and
   whereby, preferably, the nucleic acid molecule according to 2 (a), (b), (c), (d), (e), (f), (g), (h), (i), (j) or (k) distinguishes over the sequence depicted in Table I A and/or I B, application no. 17, column 5 or 8, or the coding region thereof, by one or more nucleotides (especially but not exceeding 5%, preferably 4%, 3%, 2%, 1%, 0.5%, 0.2% or 0.1%). In an embodiment, the nucleic acid molecule of the invention according to 2) does not consist of the sequence shown in Table I A and/or I B, application no. 17, column 5 or 8, or the coding region thereof. In another embodiment, the nucleic acid molecule of the present invention, preferably the coding region thereof, is at least 30%, 40%, 50%, 60%, 70%, 80%, 90%, 95% identical but less than 100%, 99.999%, 99.99%, 99.9%, 99%, 98%, 97%, 96% or 95% identical to the sequence shown in Table I A and/or I B, application no. 17, column 5 or 8, or the coding region thereof, respectively. In a further embodiment the nucleic acid molecule does not encode the polypeptide sequence shown in Table II A and/or II B, application no. 17, column 5 or 8 but homologs thereof.

[92618] Accordingly, in one embodiment, the nucleic acid molecule of the present invention encodes in one embodiment a polypeptide which differs at least in one or more amino acids (especially but not exceeding 5%, preferably 4%, 3%, 2%, 1%, 0.5%, 0.2% or 0.1%) from the polypeptide shown in Table II, application no. 17, column 5 or 8 and does not encode a protein of the sequence shown in Table II A and/or II B, application no. 17, column 5 or 8. Accordingly, in one embodiment, the protein encoded by a sequence of a nucleic acid according to 2(a), (b), (c), (d), (e), (f), (g), (h), (i), (j) or (k) does not consist of the sequence shown in Table I A and/or I B, application no. 17, column 5 or 8, or the coding region thereof. In a further embodiment, the protein of the present invention is at least 30%, 40%, 50%, 60%, 70%, 80%, 90%, 95% identical to protein sequence depicted in Table II A and/or II B, application no. 17, column 5 or 8 but less than 100%, 99.999%, 99.99%, 99.9%, 99%, 98%, 97%, 96% or 95% identical to the sequence shown in Table II A and/or II B, application no. 17, column 5 or 8.

(All the references to Tables I to IV are references to the corresponding lines of Tables I to IV.)

[92619] In a preferred embodiment thereof said nucleic acid molecule according to 2 (a), (b), (c), (d), (e), (f), (g), (h), (i), (j) or (k) encodes a polypeptide which has the activity of the respective polypeptide represented by a protein comprising a polypeptide as depicted in the respective line in column 5 of Table II, application no. 17.

[92620] In another preferred embodiment thereof said nucleic acid molecule according to 2 (a), (b), (c), (d), (e), (f), (g), (h), (i), (j) or (k) confers a generation or an increase of the respective fine chemical in a non-human organism or a part thereof as compared to a corresponding wild-type non-human organism or part thereof.

[92621] In another preferred embodiment thereof said nucleic acid molecule according to 2 (a), (b), (c), (d), (e), (f), (g), (h), (i), (j) or (k) encodes a polypeptide which has the activity of the respective polypeptide represented by a protein as depicted in the respective line in column 5 of Table II application no. 17 and confers a generation or an increase of the respective fine chemical in a non-human organism or a part thereof as compared to a corresponding wild-type non-human organism or part thereof.

[92622] In another embodiment thereof the expression cassette comprises 3) a nucleic acid molecule encoding a transit peptide, preferably encoding a plastidal transit peptide, especially in case in column 6 of Table I, application no. 17, in the same line as of the respective nucleic acid molecule according to 2) “plastidic” is depicted, or encoding a mitochondrial transit peptide, especially in case in column 6 of Table I, application no. 17, in the same line as of the respective nucleic acid molecule according to 2) “mitochondric” is depicted.

[92623] In another embodiment thereof the expression cassette does not comprise 3) a nucleic acid molecule encoding a transit peptide, especially in case in column 6 of Table I, application no. 17, in the same line as of the respective nucleic acid molecule according to 2) “non-targeted” is depicted.

[92624] In an embodiment the present invention relates to an expresssion cassette comprising a) a promoter, preferably a promoter selected from the group consisting of Big35S, PCUbi, Super and USP, in particular p-Super; and b) the nucleic acid SEQ ID NO. 142992, or a homolog or fragment thereof, or a homolog thereof being depicted in Table I, application no. 17, column 8, in the same line as SEQ ID NO. 142992, preferably the coding region thereof, a homolog or a fragment thereof; which are operable linked.

[92625] In an embodiment thereof the expression cassette comprises in addition c) a nucleic acid molecule encoding a transit peptide, especially a plastidal transit petide in case in Table I, application no. 17, in column 6 in the same line as SEQ ID NO. 142992 is depicted, plastidic is mentioned, or a mitochondrial transit peptide in case in Table I, application no. 17, in column 6 in the same line as SEQ ID NO. 142992 is depicted, mitochondric is mentioned; which is operable linked, too.

[92626] In another embodiment thereof the expression cassette does not comprise an additional transit peptide in case in Table I, application no. 17, in column 6 in the same line as SEQ ID NO. 142992 is depicted, non-targeted is mentioned.

[92627] In an embodiment the present invention relates to an expresssion cassette comprising a) a promoter, preferably a promoter selected from the group consisting of Big35S, PCUbi, Super and USP, in particular p-PcUBI; and b) the nucleic acid SEQ ID NO. 17451, or a homolog or fragment thereof, or a homolog thereof being depicted in Table I, application no. 17, column 8, in the same line as SEQ ID NO. 17451, preferably the coding region thereof, a homolog or a fragment thereof; which are operable linked.

[92628] In an embodiment thereof the expression cassette comprises in addition c) a nucleic acid molecule encoding a transit peptide, especially a plastidal transit petide in case in Table I, application no. 17, in column 6 in the same line as SEQ ID NO. 17451 is depicted, plastidic is mentioned, or a mitochondrial transit peptide in case in Table I, application no. 17, in column 6 in the same line as SEQ ID NO. 17451 is depicted, mitochondric is mentioned; which is operable linked, too.

[92629] In another embodiment thereof the expression cassette does not comprise an additional transit peptide in case in Table I, application no. 17, in column 6 in the same line as SEQ ID NO. 17451 is depicted, non-targeted is mentioned.

[92630] In an embodiment the present invention relates to an expresssion cassette comprising a) a promoter, preferably a promoter selected from the group consisting of Big35S, PCUbi, Super and USP, in particular p-PcUBI; and b) the nucleic acid SEQ ID NO. 140771, or a homolog or fragment thereof, or a homolog thereof being depicted in Table I, application no. 17, column 8, in the same line as SEQ ID NO. 140771, preferably the coding region thereof, a homolog or a fragment thereof; which are operable linked.

[92631] In an embodiment thereof the expression cassette comprises in addition c) a nucleic acid molecule encoding a transit peptide, especially a plastidal transit petide in case in Table I, application no. 17, in column 6 in the same line as SEQ ID NO. 140771 is depicted, plastidic is mentioned, or a mitochondrial transit peptide in case in Table I, application no. 17, in column 6 in the same line as SEQ ID NO. 140771 is depicted, mitochondric is mentioned; which is operable linked, too.

[92632] In another embodiment thereof the expression cassette does not comprise an additional transit peptide in case in Table I, application no. 17, in column 6 in the same line as SEQ ID NO. 140771 is depicted, non-targeted is mentioned.

[92633] In an embodiment the present invention relates to an expresssion cassette comprising a) a promoter, preferably a promoter selected from the group consisting of Big35S, PCUbi, Super and USP, in particular p-PcUBI; and b) the nucleic acid SEQ ID NO. 113651, or a homolog or fragment thereof, or a homolog thereof being depicted in Table I, application no. 17, column 8, in the same line as SEQ ID NO. 113651, preferably the coding region thereof, a homolog or a fragment thereof; which are operable linked.

[92634] In an embodiment thereof the expression cassette comprises in addition c) a nucleic acid molecule encoding a transit peptide, especially a plastidal transit petide in case in Table I, application no. 17, in column 6 in the same line as SEQ ID NO. 113651 is depicted, plastidic is mentioned, or a mitochondrial transit peptide in case in Table I, application no. 17, in column 6 in the same line as SEQ ID NO. 113651 is depicted, mitochondric is mentioned; which is operable linked, too.

[92635] In another embodiment thereof the expression cassette does not comprise an additional transit peptide in case in Table I, application no. 17, in column 6 in the same line as SEQ ID NO. 113651 is depicted, non-targeted is mentioned.

[92636] In an embodiment the present invention relates to an expresssion cassette comprising a) a promoter, preferably a promoter selected from the group consisting of Big35S, PCUbi, Super and USP, in particular p-PcUBI; and b) the nucleic acid SEQ ID NO. 17701, or a homolog or fragment thereof, or a homolog thereof being depicted in Table I, application no. 17, column 8, in the same line as SEQ ID NO. 17701, preferably the coding region thereof, a homolog or a fragment thereof; which are operable linked.

[92637] In an embodiment thereof the expression cassette comprises in addition c) a nucleic acid molecule encoding a transit peptide, especially a plastidal transit petide in case in Table I, application no. 17, in column 6 in the same line as SEQ ID NO. 17701 is depicted, plastidic is mentioned, or a mitochondrial transit peptide in case in Table I, application no. 17, in column 6 in the same line as SEQ ID NO. 17701 is depicted, mitochondric is mentioned; which is operable linked, too.

[92638] In another embodiment thereof the expression cassette does not comprise an additional transit peptide in case in Table I, application no. 17, in column 6 in the same line as SEQ ID NO. 17701 is depicted, non-targeted is mentioned.

[92639] In an embodiment the present invention relates to an expresssion cassette comprising a) a promoter, preferably a promoter selected from the group consisting of Big35S, PCUbi, Super and USP, in particular p-PcUBI; and b) the nucleic acid SEQ ID NO. 17968, or a homolog or fragment thereof, or a homolog thereof being depicted in Table I, application no. 17, column 8, in the same line as SEQ ID NO. 17968, preferably the coding region thereof, a homolog or a fragment thereof; which are operable linked.

[92640] In an embodiment thereof the expression cassette comprises in addition c) a nucleic acid molecule encoding a transit peptide, especially a plastidal transit petide in case in Table I, application no. 17, in column 6 in the same line as SEQ ID NO. 17968 is depicted, plastidic is mentioned, or a mitochondrial transit peptide in case in Table I, application no. 17, in column 6 in the same line as SEQ ID NO. 17968 is depicted, mitochondric is mentioned; which is operable linked, too.

[92641] In another embodiment thereof the expression cassette does not comprise an additional transit peptide in case in Table I, application no. 17, in column 6 in the same line as SEQ ID NO. 17968 is depicted, non-targeted is mentioned.

[92642] In an embodiment the present invention relates to an expresssion cassette comprising a) a promoter, preferably a promoter selected from the group consisting of Big35S, PCUbi, Super and USP, in particular p-PcUBI; and b) the nucleic acid SEQ ID NO. 18070, or a homolog or fragment thereof, or a homolog thereof being depicted in Table I, application no. 17, column 8, in the same line as SEQ ID NO. 18070, preferably the coding region thereof, a homolog or a fragment thereof; which are operable linked.

[92643] In an embodiment thereof the expression cassette comprises in addition c) a nucleic acid molecule encoding a transit peptide, especially a plastidal transit petide in case in Table I, application no. 17, in column 6 in the same line as SEQ ID NO. 18070 is depicted, plastidic is mentioned, or a mitochondrial transit peptide in case in Table I, application no. 17, in column 6 in the same line as SEQ ID NO. 18070 is depicted, mitochondric is mentioned; which is operable linked, too.

[92644] In another embodiment thereof the expression cassette does not comprise an additional transit peptide in case in Table I, application no. 17, in column 6 in the same line as SEQ ID NO. 18070 is depicted, non-targeted is mentioned.

[92645] In an embodiment the present invention relates to an expresssion cassette comprising a) a promoter, preferably a promoter selected from the group consisting of Big35S, PCUbi, Super and USP, in particular p-Super; and b) the nucleic acid SEQ ID NO. 140841, or a homolog or fragment thereof, or a homolog thereof being depicted in Table I, application no. 17, column 8, in the same line as SEQ ID NO. 140841, preferably the coding region thereof, a homolog or a fragment thereof; which are operable linked.

[92646] In an embodiment thereof the expression cassette comprises in addition c) a nucleic acid molecule encoding a transit peptide, especially a plastidal transit petide in case in Table I, application no. 17, in column 6 in the same line as SEQ ID NO. 140841 is depicted, plastidic is mentioned, or a mitochondrial transit peptide in case in Table I, application no. 17, in column 6 in the same line as SEQ ID NO. 140841 is depicted, mitochondric is mentioned; which is operable linked, too.

[92647] In another embodiment thereof the expression cassette does not comprise an additional transit peptide in case in Table I, application no. 17, in column 6 in the same line as SEQ ID NO. 140841 is depicted, non-targeted is mentioned.

[92648] In an embodiment the present invention relates to an expresssion cassette comprising a) a promoter, preferably a promoter selected from the group consisting of Big35S, PCUbi, Super and USP, in particular p-PcUBI; and b) the nucleic acid SEQ ID NO. 19419, or a homolog or fragment thereof, or a homolog thereof being depicted in Table I, application no. 17, column 8, in the same line as SEQ ID NO. 19419, preferably the coding region thereof, a homolog or a fragment thereof; which are operable linked.

[92649] In an embodiment thereof the expression cassette comprises in addition c) a nucleic acid molecule encoding a transit peptide, especially a plastidal transit petide in case in Table I, application no. 17, in column 6 in the same line as SEQ ID NO. 19419 is depicted, plastidic is mentioned, or a mitochondrial transit peptide in case in Table I, application no. 17, in column 6 in the same line as SEQ ID NO. 19419 is depicted, mitochondric is mentioned; which is operable linked, too.

[92650] In another embodiment thereof the expression cassette does not comprise an additional transit peptide in case in Table I, application no. 17, in column 6 in the same line as SEQ ID NO. 19419 is depicted, non-targeted is mentioned.

[92651] In an embodiment the present invention relates to an expresssion cassette comprising a) a promoter, preferably a promoter selected from the group consisting of Big35S, PCUbi, Super and USP, in particular p-PcUBI; and b) the nucleic acid SEQ ID NO. 141013, or a homolog or fragment thereof, or a homolog thereof being depicted in Table I, application no. 17, column 8, in the same line as SEQ ID NO. 141013, preferably the coding region thereof, a homolog or a fragment thereof; which are operable linked.

[92652] In an embodiment thereof the expression cassette comprises in addition c) a nucleic acid molecule encoding a transit peptide, especially a plastidal transit petide in case in Table I, application no. 17, in column 6 in the same line as SEQ ID NO. 141013 is depicted, plastidic is mentioned, or a mitochondrial transit peptide in case in Table I, application no. 17, in column 6 in the same line as SEQ ID NO. 141013 is depicted, mitochondric is mentioned; which is operable linked, too.

[92653] In another embodiment thereof the expression cassette does not comprise an additional transit peptide in case in Table I, application no. 17, in column 6 in the same line as SEQ ID NO. 141013 is depicted, non-targeted is mentioned.

[92654] In an embodiment the present invention relates to an expresssion cassette comprising a) a promoter, preferably a promoter selected from the group consisting of Big35S, PCUbi, Super and USP, in particular p-PcUBI; and b) the nucleic acid SEQ ID NO. 19502, or a homolog or fragment thereof, or a homolog thereof being depicted in Table I, application no. 17, column 8, in the same line as SEQ ID NO. 19502, preferably the coding region thereof, a homolog or a fragment thereof; which are operable linked.

[92655] In an embodiment thereof the expression cassette comprises in addition c) a nucleic acid molecule encoding a transit peptide, especially a plastidal transit petide in case in Table I, application no. 17, in column 6 in the same line as SEQ ID NO. 19502 is depicted, plastidic is mentioned, or a mitochondrial transit peptide in case in Table I, application no. 17, in column 6 in the same line as SEQ ID NO. 19502 is depicted, mitochondric is mentioned; which is operable linked, too.

[92656] In another embodiment thereof the expression cassette does not comprise an additional transit peptide in case in Table I, application no. 17, in column 6 in the same line as SEQ ID NO. 19502 is depicted, non-targeted is mentioned.

[92657] In an embodiment the present invention relates to an expresssion cassette comprising a) a promoter, preferably a promoter selected from the group consisting of Big35S, PCUbi, Super and USP, in particular p-PcUBI; and b) the nucleic acid SEQ ID NO. 1298, or a homolog or fragment thereof, or a homolog thereof being depicted in Table I, application no. 17, column 8, in the same line as SEQ ID NO. 1298, preferably the coding region thereof, a homolog or a fragment thereof; which are operable linked.

[92658] In an embodiment thereof the expression cassette comprises in addition c) a nucleic acid molecule encoding a transit peptide, especially a plastidal transit petide in case in Table I, application no. 17, in column 6 in the same line as SEQ ID NO. 1298 is depicted, plastidic is mentioned, or a mitochondrial transit peptide in case in Table I, application no. 17, in column 6 in the same line as SEQ ID NO. 1298 is depicted, mitochondric is mentioned; which is operable linked, too.

[92659] In another embodiment thereof the expression cassette does not comprise an additional transit peptide in case in Table I, application no. 17, in column 6 in the same line as SEQ ID NO. 1298 is depicted, non-targeted is mentioned.

[92660] In an embodiment the present invention relates to an expresssion cassette comprising a) a promoter, preferably a promoter selected from the group consisting of Big35S, PCUbi, Super and USP, in particular p-PcUBI; and b) the nucleic acid SEQ ID NO. 20346, or a homolog or fragment thereof, or a homolog thereof being depicted in Table I, application no. 17, column 8, in the same line as SEQ ID NO. 20346, preferably the coding region thereof, a homolog or a fragment thereof; which are operable linked.

[92661] In an embodiment thereof the expression cassette comprises in addition c) a nucleic acid molecule encoding a transit peptide, especially a plastidal transit petide in case in Table I, application no. 17, in column 6 in the same line as SEQ ID NO. 20346 is depicted, plastidic is mentioned, or a mitochondrial transit peptide in case in Table I, application no. 17, in column 6 in the same line as SEQ ID NO. 20346 is depicted, mitochondric is mentioned; which is operable linked, too.

[92662] In another embodiment thereof the expression cassette does not comprise an additional transit peptide in case in Table I, application no. 17, in column 6 in the same line as SEQ ID NO. 20346 is depicted, non-targeted is mentioned.

[92663] In an embodiment the present invention relates to an expresssion cassette comprising a) a promoter, preferably a promoter selected from the group consisting of Big35S, PCUbi, Super and USP, in particular p-PcUBI; and b) the nucleic acid SEQ ID NO. 20578, or a homolog or fragment thereof, or a homolog thereof being depicted in Table I, application no. 17, column 8, in the same line as SEQ ID NO. 20578, preferably the coding region thereof, a homolog or a fragment thereof; which are operable linked.

[92664] In an embodiment thereof the expression cassette comprises in addition c) a nucleic acid molecule encoding a transit peptide, especially a plastidal transit petide in case in Table I, application no. 17, in column 6 in the same line as SEQ ID NO. 20578 is depicted, plastidic is mentioned, or a mitochondrial transit peptide in case in Table I, application no. 17, in column 6 in the same line as SEQ ID NO. 20578 is depicted, mitochondric is mentioned; which is operable linked, too.

[92665] In another embodiment thereof the expression cassette does not comprise an additional transit peptide in case in Table I, application no. 17, in column 6 in the same line as SEQ ID NO. 20578 is depicted, non-targeted is mentioned.

[92666] In an embodiment the present invention relates to an expresssion cassette comprising a) a promoter, preferably a promoter selected from the group consisting of Big35S, PCUbi, Super and USP, in particular p-PcUBI; and b) the nucleic acid SEQ ID NO. 133042, or a homolog or fragment thereof, or a homolog thereof being depicted in Table I, application no. 17, column 8, in the same line as SEQ ID NO. 133042, preferably the coding region thereof, a homolog or a fragment thereof; which are operable linked.

[92667] In an embodiment thereof the expression cassette comprises in addition c) a nucleic acid molecule encoding a transit peptide, especially a plastidal transit petide in case in Table I, application no. 17, in column 6 in the same line as SEQ ID NO. 133042 is depicted, plastidic is mentioned, or a mitochondrial transit peptide in case in Table I, application no. 17, in column 6 in the same line as SEQ ID NO. 133042 is depicted, mitochondric is mentioned; which is operable linked, too.

[92668] In another embodiment thereof the expression cassette does not comprise an additional transit peptide in case in Table I, application no. 17, in column 6 in the same line as SEQ ID NO. 133042 is depicted, non-targeted is mentioned.

[92669] In an embodiment the present invention relates to an expresssion cassette comprising a) a promoter, preferably a promoter selected from the group consisting of Big35S, PCUbi, Super and USP, in particular p-PcUBI; and b) the nucleic acid SEQ ID NO. 108727, or a homolog or fragment thereof, or a homolog thereof being depicted in Table I, application no. 17, column 8, in the same line as SEQ ID NO. 108727, preferably the coding region thereof, a homolog or a fragment thereof; which are operable linked.

[92670] In an embodiment thereof the expression cassette comprises in addition c) a nucleic acid molecule encoding a transit peptide, especially a plastidal transit petide in case in Table I, application no. 17, in column 6 in the same line as SEQ ID NO. 108727 is depicted, plastidic is mentioned, or a mitochondrial transit peptide in case in Table I, application no. 17, in column 6 in the same line as SEQ ID NO. 108727 is depicted, mitochondric is mentioned; which is operable linked, too.

[92671] In another embodiment thereof the expression cassette does not comprise an additional transit peptide in case in Table I, application no. 17, in column 6 in the same line as SEQ ID NO. 108727 is depicted, non-targeted is mentioned.

[92672] In an embodiment the present invention relates to an expresssion cassette comprising a) a promoter, preferably a promoter selected from the group consisting of Big35S, PCUbi, Super and USP, in particular p-PcUBI; and b) the nucleic acid SEQ ID NO. 1623, or a homolog or fragment thereof, or a homolog thereof being depicted in Table I, application no. 17, column 8, in the same line as SEQ ID NO. 1623, preferably the coding region thereof, a homolog or a fragment thereof; which are operable linked.

[92673] In an embodiment thereof the expression cassette comprises in addition c) a nucleic acid molecule encoding a transit peptide, especially a plastidal transit petide in case in Table I, application no. 17, in column 6 in the same line as SEQ ID NO. 1623 is depicted, plastidic is mentioned, or a mitochondrial transit peptide in case in Table I, application no. 17, in column 6 in the same line as SEQ ID NO. 1623 is depicted, mitochondric is mentioned; which is operable linked, too.

[92674] In another embodiment thereof the expression cassette does not comprise an additional transit peptide in case in Table I, application no. 17, in column 6 in the same line as SEQ ID NO. 1623 is depicted, non-targeted is mentioned.

[92675] In an embodiment the present invention relates to an expresssion cassette comprising a) a promoter, preferably a promoter selected from the group consisting of Big35S, PCUbi, Super and USP, in particular p-PcUBI; and b) the nucleic acid SEQ ID NO. 21106, or a homolog or fragment thereof, or a homolog thereof being depicted in Table I, application no. 17, column 8, in the same line as SEQ ID NO. 21106, preferably the coding region thereof, a homolog or a fragment thereof; which are operable linked.

[92676] In an embodiment thereof the expression cassette comprises in addition c) a nucleic acid molecule encoding a transit peptide, especially a plastidal transit petide in case in Table I, application no. 17, in column 6 in the same line as SEQ ID NO. 21106 is depicted, plastidic is mentioned, or a mitochondrial transit peptide in case in Table I, application no. 17, in column 6 in the same line as SEQ ID NO. 21106 is depicted, mitochondric is mentioned; which is operable linked, too.

[92677] In another embodiment thereof the expression cassette does not comprise an additional transit peptide in case in Table I, application no. 17, in column 6 in the same line as SEQ ID NO. 21106 is depicted, non-targeted is mentioned.

[92678] In an embodiment the present invention relates to an expresssion cassette comprising a) a promoter, preferably a promoter selected from the group consisting of Big35S, PCUbi, Super and USP, in particular p-PcUBI; and b) the nucleic acid SEQ ID NO. 141637, or a homolog or fragment thereof, or a homolog thereof being depicted in Table I, application no. 17, column 8, in the same line as SEQ ID NO. 141637, preferably the coding region thereof, a homolog or a fragment thereof; which are operable linked.

[92679] In an embodiment thereof the expression cassette comprises in addition c) a nucleic acid molecule encoding a transit peptide, especially a plastidal transit petide in case in Table I, application no. 17, in column 6 in the same line as SEQ ID NO. 141637 is depicted, plastidic is mentioned, or a mitochondrial transit peptide in case in Table I, application no. 17, in column 6 in the same line as SEQ ID NO. 141637 is depicted, mitochondric is mentioned; which is operable linked, too.

[92680] In another embodiment thereof the expression cassette does not comprise an additional transit peptide in case in Table I, application no. 17, in column 6 in the same line as SEQ ID NO. 141637 is depicted, non-targeted is mentioned.

[92681] In an embodiment the present invention relates to an expresssion cassette comprising a) a promoter, preferably a promoter selected from the group consisting of Big35S, PCUbi, Super and USP, in particular Big35S; and b) the nucleic acid SEQ ID NO. 141637, or a homolog or fragment thereof, or a homolog thereof being depicted in Table I, application no. 17, column 8, in the same line as SEQ ID NO. 141637, preferably the coding region thereof, a homolog or a fragment thereof; which are operable linked.

[92682] In an embodiment thereof the expression cassette comprises in addition c) a nucleic acid molecule encoding a transit peptide, especially a plastidal transit petide in case in Table I, application no. 17, in column 6 in the same line as SEQ ID NO. 141637 is depicted, plastidic is mentioned, or a mitochondrial transit peptide in case in Table I, application no. 17, in column 6 in the same line as SEQ ID NO. 141637 is depicted, mitochondric is mentioned; which is operable linked, too.

[92683] In another embodiment thereof the expression cassette does not comprise an additional transit peptide in case in Table I, application no. 17, in column 6 in the same line as SEQ ID NO. 141637 is depicted, non-targeted is mentioned.

[92684] In an embodiment the present invention relates to an expresssion cassette comprising a) a promoter, preferably a promoter selected from the group consisting of Big35S, PCUbi, Super and USP, in particular p-PcUBI; and b) the nucleic acid SEQ ID NO. 68657, or a homolog or fragment thereof, or a homolog thereof being depicted in Table I, application no. 17, column 8, in the same line as SEQ ID NO. 68657, preferably the coding region thereof, a homolog or a fragment thereof; which are operable linked.

[92685] In an embodiment thereof the expression cassette comprises in addition c) a nucleic acid molecule encoding a transit peptide, especially a plastidal transit petide in case in Table I, application no. 17, in column 6 in the same line as SEQ ID NO. 68657 is depicted, plastidic is mentioned, or a mitochondrial transit peptide in case in Table I, application no. 17, in column 6 in the same line as SEQ ID NO. 68657 is depicted, mitochondric is mentioned; which is operable linked, too.

[92686] In another embodiment thereof the expression cassette does not comprise an additional transit peptide in case in Table I, application no. 17, in column 6 in the same line as SEQ ID NO. 68657 is depicted, non-targeted is mentioned.

[92687] In an embodiment the present invention relates to an expresssion cassette comprising a) a promoter, preferably a promoter selected from the group consisting of Big35S, PCUbi, Super and USP, in particular p-PcUBI; and b) the nucleic acid SEQ ID NO. 21497, or a homolog or fragment thereof, or a homolog thereof being depicted in Table I, application no. 17, column 8, in the same line as SEQ ID NO. 21497, preferably the coding region thereof, a homolog or a fragment thereof; which are operable linked.

[92688] In an embodiment thereof the expression cassette comprises in addition c) a nucleic acid molecule encoding a transit peptide, especially a plastidal transit petide in case in Table I, application no. 17, in column 6 in the same line as SEQ ID NO. 21497 is depicted, plastidic is mentioned, or a mitochondrial transit peptide in case in Table I, application no. 17, in column 6 in the same line as SEQ ID NO. 21497 is depicted, mitochondric is mentioned; which is operable linked, too.

[92689] In another embodiment thereof the expression cassette does not comprise an additional transit peptide in case in Table I, application no. 17, in column 6 in the same line as SEQ ID NO. 21497 is depicted, non-targeted is mentioned.

[92690] In an embodiment the present invention relates to an expresssion cassette comprising a) a promoter, preferably a promoter selected from the group consisting of Big35S, PCUbi, Super and USP, in particular p-PcUBI; and b) the nucleic acid SEQ ID NO. 22015, or a homolog or fragment thereof, or a homolog thereof being depicted in Table I, application no. 17, column 8, in the same line as SEQ ID NO. 22015, preferably the coding region thereof, a homolog or a fragment thereof; which are operable linked.

[92691] In an embodiment thereof the expression cassette comprises in addition c) a nucleic acid molecule encoding a transit peptide, especially a plastidal transit petide in case in Table I, application no. 17, in column 6 in the same line as SEQ ID NO. 22015 is depicted, plastidic is mentioned, or a mitochondrial transit peptide in case in Table I, application no. 17, in column 6 in the same line as SEQ ID NO. 22015 is depicted, mitochondric is mentioned; which is operable linked, too.

[92692] In another embodiment thereof the expression cassette does not comprise an additional transit peptide in case in Table I, application no. 17, in column 6 in the same line as SEQ ID NO. 22015 is depicted, non-targeted is mentioned.

[92693] In an embodiment the present invention relates to an expresssion cassette comprising a) a promoter, preferably a promoter selected from the group consisting of Big35S, PCUbi, Super and USP, in particular p-PcUBI; and b) the nucleic acid SEQ ID NO. 22249, or a homolog or fragment thereof, or a homolog thereof being depicted in Table I, application no. 17, column 8, in the same line as SEQ ID NO. 22249, preferably the coding region thereof, a homolog or a fragment thereof; which are operable linked.

[92694] In an embodiment thereof the expression cassette comprises in addition c) a nucleic acid molecule encoding a transit peptide, especially a plastidal transit petide in case in Table I, application no. 17, in column 6 in the same line as SEQ ID NO. 22249 is depicted, plastidic is mentioned, or a mitochondrial transit peptide in case in Table I, application no. 17, in column 6 in the same line as SEQ ID NO. 22249 is depicted, mitochondric is mentioned; which is operable linked, too.

[92695] In another embodiment thereof the expression cassette does not comprise an additional transit peptide in case in Table I, application no. 17, in column 6 in the same line as SEQ ID NO. 22249 is depicted, non-targeted is mentioned.

[92696] In an embodiment the present invention relates to an expresssion cassette comprising a) a promoter, preferably a promoter selected from the group consisting of Big35S, PCUbi, Super and USP, in particular p-PcUBI; and b) the nucleic acid SEQ ID NO. 22699, or a homolog or fragment thereof, or a homolog thereof being depicted in Table I, application no. 17, column 8, in the same line as SEQ ID NO. 22699, preferably the coding region thereof, a homolog or a fragment thereof; which are operable linked.

[92697] In an embodiment thereof the expression cassette comprises in addition c) a nucleic acid molecule encoding a transit peptide, especially a plastidal transit petide in case in Table I, application no. 17, in column 6 in the same line as SEQ ID NO. 22699 is depicted, plastidic is mentioned, or a mitochondrial transit peptide in case in Table I, application no. 17, in column 6 in the same line as SEQ ID NO. 22699 is depicted, mitochondric is mentioned; which is operable linked, too.

[92698] In another embodiment thereof the expression cassette does not comprise an additional transit peptide in case in Table I, application no. 17, in column 6 in the same line as SEQ ID NO. 22699 is depicted, non-targeted is mentioned.

[92699] In an embodiment the present invention relates to an expresssion cassette comprising a) a promoter, preferably a promoter selected from the group consisting of Big35S, PCUbi, Super and USP, in particular p-PcUBI; and b) the nucleic acid SEQ ID NO. 22921, or a homolog or fragment thereof, or a homolog thereof being depicted in Table I, application no. 17, column 8, in the same line as SEQ ID NO. 22921, preferably the coding region thereof, a homolog or a fragment thereof; which are operable linked.

[92700] In an embodiment thereof the expression cassette comprises in addition c) a nucleic acid molecule encoding a transit peptide, especially a plastidal transit petide in case in Table I, application no. 17, in column 6 in the same line as SEQ ID NO. 22921 is depicted, plastidic is mentioned, or a mitochondrial transit peptide in case in Table I, application no. 17, in column 6 in the same line as SEQ ID NO. 22921 is depicted, mitochondric is mentioned; which is operable linked, too.

[92701] In another embodiment thereof the expression cassette does not comprise an additional transit peptide in case in Table I, application no. 17, in column 6 in the same line as SEQ ID NO. 22921 is depicted, non-targeted is mentioned.

[92702] In an embodiment the present invention relates to an expresssion cassette comprising a) a promoter, preferably a promoter selected from the group consisting of Big35S, PCUbi, Super and USP, in particular p-PcUBI; and b) the nucleic acid SEQ ID NO. 1815, or a homolog or fragment thereof, or a homolog thereof being depicted in Table I, application no. 17, column 8, in the same line as SEQ ID NO. 1815, preferably the coding region thereof, a homolog or a fragment thereof; which are operable linked.

[92703] In an embodiment thereof the expression cassette comprises in addition c) a nucleic acid molecule encoding a transit peptide, especially a plastidal transit petide in case in Table I, application no. 17, in column 6 in the same line as SEQ ID NO. 1815 is depicted, plastidic is mentioned, or a mitochondrial transit peptide in case in Table I, application no. 17, in column 6 in the same line as SEQ ID NO. 1815 is depicted, mitochondric is mentioned; which is operable linked, too.

[92704] In another embodiment thereof the expression cassette does not comprise an additional transit peptide in case in Table I, application no. 17, in column 6 in the same line as SEQ ID NO. 1815 is depicted, non-targeted is mentioned.

[92705] In an embodiment the present invention relates to an expresssion cassette comprising a) a promoter, preferably a promoter selected from the group consisting of Big35S, PCUbi, Super and USP, in particular p-PcUBI; and b) the nucleic acid SEQ ID NO. 68727, or a homolog or fragment thereof, or a homolog thereof being depicted in Table I, application no. 17, column 8, in the same line as SEQ ID NO. 68727, preferably the coding region thereof, a homolog or a fragment thereof; which are operable linked.

[92706] In an embodiment thereof the expression cassette comprises in addition c) a nucleic acid molecule encoding a transit peptide, especially a plastidal transit petide in case in Table I, application no. 17, in column 6 in the same line as SEQ ID NO. 68727 is depicted, plastidic is mentioned, or a mitochondrial transit peptide in case in Table I, application no. 17, in column 6 in the same line as SEQ ID NO. 68727 is depicted, mitochondric is mentioned; which is operable linked, too.

[92707] In another embodiment thereof the expression cassette does not comprise an additional transit peptide in case in Table I, application no. 17, in column 6 in the same line as SEQ ID NO. 68727 is depicted, non-targeted is mentioned.

[92708] In an embodiment the present invention relates to an expresssion cassette comprising a) a promoter, preferably a promoter selected from the group consisting of Big35S, PCUbi, Super and USP, in particular p-PcUBI; and b) the nucleic acid SEQ ID NO. 141758, or a homolog or fragment thereof, or a homolog thereof being depicted in Table I, application no. 17, column 8, in the same line as SEQ ID NO. 141758, preferably the coding region thereof, a homolog or a fragment thereof; which are operable linked.

[92709] In an embodiment thereof the expression cassette comprises in addition c) a nucleic acid molecule encoding a transit peptide, especially a plastidal transit petide in case in Table I, application no. 17, in column 6 in the same line as SEQ ID NO. 141758 is depicted, plastidic is mentioned, or a mitochondrial transit peptide in case in Table I, application no. 17, in column 6 in the same line as SEQ ID NO. 141758 is depicted, mitochondric is mentioned; which is operable linked, too.

[92710] In another embodiment thereof the expression cassette does not comprise an additional transit peptide in case in Table I, application no. 17, in column 6 in the same line as SEQ ID NO. 141758 is depicted, non-targeted is mentioned.

[92711] In an embodiment the present invention relates to an expresssion cassette comprising a) a promoter, preferably a promoter selected from the group consisting of Big35S, PCUbi, Super and USP, in particular p-PcUBI; and b) the nucleic acid SEQ ID NO. 2367, or a homolog or fragment thereof, or a homolog thereof being depicted in Table I, application no. 17, column 8, in the same line as SEQ ID NO. 2367, preferably the coding region thereof, a homolog or a fragment thereof; which are operable linked.

[92712] In an embodiment thereof the expression cassette comprises in addition c) a nucleic acid molecule encoding a transit peptide, especially a plastidal transit petide in case in Table I, application no. 17, in column 6 in the same line as SEQ ID NO. 2367 is depicted, plastidic is mentioned, or a mitochondrial transit peptide in case in Table I, application no. 17, in column 6 in the same line as SEQ ID NO. 2367 is depicted, mitochondric is mentioned; which is operable linked, too.

[92713] In another embodiment thereof the expression cassette does not comprise an additional transit peptide in case in Table I, application no. 17, in column 6 in the same line as SEQ ID NO. 2367 is depicted, non-targeted is mentioned.

[92714] In an embodiment the present invention relates to an expresssion cassette comprising a) a promoter, preferably a promoter selected from the group consisting of Big35S, PCUbi, Super and USP, in particular p-PcUBI; and b) the nucleic acid SEQ ID NO. 2573, or a homolog or fragment thereof, or a homolog thereof being depicted in Table I, application no. 17, column 8, in the same line as SEQ ID NO. 2573, preferably the coding region thereof, a homolog or a fragment thereof; which are operable linked.

[92715] In an embodiment thereof the expression cassette comprises in addition c) a nucleic acid molecule encoding a transit peptide, especially a plastidal transit petide in case in Table I, application no. 17, in column 6 in the same line as SEQ ID NO. 2573 is depicted, plastidic is mentioned, or a mitochondrial transit peptide in case in Table I, application no. 17, in column 6 in the same line as SEQ ID NO. 2573 is depicted, mitochondric is mentioned; which is operable linked, too.

[92716] In another embodiment thereof the expression cassette does not comprise an additional transit peptide in case in Table I, application no. 17, in column 6 in the same line as SEQ ID NO. 2573 is depicted, non-targeted is mentioned.

[92717] In an embodiment the present invention relates to an expresssion cassette comprising a) a promoter, preferably a promoter selected from the group consisting of Big35S, PCUbi, Super and USP, in particular p-PcUBI; and b) the nucleic acid SEQ ID NO. 2935, or a homolog or fragment thereof, or a homolog thereof being depicted in Table I, application no. 17, column 8, in the same line as SEQ ID NO. 2935, preferably the coding region thereof, a homolog or a fragment thereof; which are operable linked.

[92718] In an embodiment thereof the expression cassette comprises in addition c) a nucleic acid molecule encoding a transit peptide, especially a plastidal transit petide in case in Table I, application no. 17, in column 6 in the same line as SEQ ID NO. 2935 is depicted, plastidic is mentioned, or a mitochondrial transit peptide in case in Table I, application no. 17, in column 6 in the same line as SEQ ID NO. 2935 is depicted, mitochondric is mentioned; which is operable linked, too.

[92719] In another embodiment thereof the expression cassette does not comprise an additional transit peptide in case in Table I, application no. 17, in column 6 in the same line as SEQ ID NO. 2935 is depicted, non-targeted is mentioned.

[92720] In an embodiment the present invention relates to an expresssion cassette comprising a) a promoter, preferably a promoter selected from the group consisting of Big35S, PCUbi, Super and USP, in particular p-PcUBI; and b) the nucleic acid SEQ ID NO. 109717, or a homolog or fragment thereof, or a homolog thereof being depicted in Table I, application no. 17, column 8, in the same line as SEQ ID NO. 109717, preferably the coding region thereof, a homolog or a fragment thereof; which are operable linked.

[92721] In an embodiment thereof the expression cassette comprises in addition c) a nucleic acid molecule encoding a transit peptide, especially a plastidal transit petide in case in Table I, application no. 17, in column 6 in the same line as SEQ ID NO. 109717 is depicted, plastidic is mentioned, or a mitochondrial transit peptide in case in Table I, application no. 17, in column 6 in the same line as SEQ ID NO. 109717 is depicted, mitochondric is mentioned; which is operable linked, too.

[92722] In another embodiment thereof the expression cassette does not comprise an additional transit peptide in case in Table I, application no. 17, in column 6 in the same line as SEQ ID NO. 109717 is depicted, non-targeted is mentioned. In an embodiment the present invention relates to an expresssion cassette comprising a) a promoter, preferably a promoter selected from the group consisting of Big35S, PCUbi, Super and USP, in particular p-PcUBI; and b) the nucleic acid SEQ ID NO. 23482, or a homolog or fragment thereof, or a homolog thereof being depicted in Table I, application no. 17, column 8, in the same line as SEQ ID NO. 23482, preferably the coding region thereof, a homolog or a fragment thereof; which are operable linked.

[92723] In an embodiment thereof the expression cassette comprises in addition c) a nucleic acid molecule encoding a transit peptide, especially a plastidal transit petide in case in Table I, application no. 17, in column 6 in the same line as SEQ ID NO. 23482 is depicted, plastidic is mentioned, or a mitochondrial transit peptide in case in Table I, application no. 17, in column 6 in the same line as SEQ ID NO. 23482 is depicted, mitochondric is mentioned; which is operable linked, too.

[92724] In another embodiment thereof the expression cassette does not comprise an additional transit peptide in case in Table I, application no. 17, in column 6 in the same line as SEQ ID NO. 23482 is depicted, non-targeted is mentioned.

[92725] In an embodiment the present invention relates to an expresssion cassette comprising a) a promoter, preferably a promoter selected from the group consisting of Big35S, PCUbi, Super and USP, in particular p-PcUBI; and b) the nucleic acid SEQ ID NO. 3279, or a homolog or fragment thereof, or a homolog thereof being depicted in Table I, application no. 17, column 8, in the same line as SEQ ID NO. 3279, preferably the coding region thereof, a homolog or a fragment thereof; which are operable linked.

[92726] In an embodiment thereof the expression cassette comprises in addition c) a nucleic acid molecule encoding a transit peptide, especially a plastidal transit petide in case in Table I, application no. 17, in column 6 in the same line as SEQ ID NO. 3279 is depicted, plastidic is mentioned, or a mitochondrial transit peptide in case in Table I, application no. 17, in column 6 in the same line as SEQ ID NO. 3279 is depicted, mitochondric is mentioned; which is operable linked, too.

[92727] In another embodiment thereof the expression cassette does not comprise an additional transit peptide in case in Table I, application no. 17, in column 6 in the same line as SEQ ID NO. 3279 is depicted, non-targeted is mentioned.

[92728] In an embodiment the present invention relates to an expresssion cassette comprising a) a promoter, preferably a promoter selected from the group consisting of Big35S, PCUbi, Super and USP, in particular p-PcUBI; and b) the nucleic acid SEQ ID NO. 23844, or a homolog or fragment thereof, or a homolog thereof being depicted in Table I, application no. 17, column 8, in the same line as SEQ ID NO. 23844, preferably the coding region thereof, a homolog or a fragment thereof; which are operable linked.

[92729] In an embodiment thereof the expression cassette comprises in addition c) a nucleic acid molecule encoding a transit peptide, especially a plastidal transit petide in case in Table I, application no. 17, in column 6 in the same line as SEQ ID NO. 23844 is depicted, plastidic is mentioned, or a mitochondrial transit peptide in case in Table I, application no. 17, in column 6 in the same line as SEQ ID NO. 23844 is depicted, mitochondric is mentioned; which is operable linked, too.

[92730] In another embodiment thereof the expression cassette does not comprise an additional transit peptide in case in Table I, application no. 17, in column 6 in the same line as SEQ ID NO. 23844 is depicted, non-targeted is mentioned.

[92731] In an embodiment the present invention relates to an expresssion cassette comprising a) a promoter, preferably a promoter selected from the group consisting of Big35S, PCUbi, Super and USP, in particular p-PcUBI; and b) the nucleic acid SEQ ID NO. 3654, or a homolog or fragment thereof, or a homolog thereof being depicted in Table I, application no. 17, column 8, in the same line as SEQ ID NO. 3654, preferably the coding region thereof, a homolog or a fragment thereof; which are operable linked.

[92732] In an embodiment thereof the expression cassette comprises in addition c) a nucleic acid molecule encoding a transit peptide, especially a plastidal transit petide in case in Table I, application no. 17, in column 6 in the same line as SEQ ID NO. 3654 is depicted, plastidic is mentioned, or a mitochondrial transit peptide in case in Table I, application no. 17, in column 6 in the same line as SEQ ID NO. 3654 is depicted, mitochondric is mentioned; which is operable linked, too.

[92733] In another embodiment thereof the expression cassette does not comprise an additional transit peptide in case in Table I, application no. 17, in column 6 in the same line as SEQ ID NO. 3654 is depicted, non-targeted is mentioned.

[92734] In an embodiment the present invention relates to an expresssion cassette comprising a) a promoter, preferably a promoter selected from the group consisting of Big35S, PCUbi, Super and USP, in particular p-PcUBI; and b) the nucleic acid SEQ ID NO. 68849, or a homolog or fragment thereof, or a homolog thereof being depicted in Table I, application no. 17, column 8, in the same line as SEQ ID NO. 68849, preferably the coding region thereof, a homolog or a fragment thereof; which are operable linked.

[92735] In an embodiment thereof the expression cassette comprises in addition c) a nucleic acid molecule encoding a transit peptide, especially a plastidal transit petide in case in Table I, application no. 17, in column 6 in the same line as SEQ ID NO. 68849 is depicted, plastidic is mentioned, or a mitochondrial transit peptide in case in Table I, application no. 17, in column 6 in the same line as SEQ ID NO. 68849 is depicted, mitochondric is mentioned; which is operable linked, too.

[92736] In another embodiment thereof the expression cassette does not comprise an additional transit peptide in case in Table I, application no. 17, in column 6 in the same line as SEQ ID NO. 68849 is depicted, non-targeted is mentioned.

[92737] In an embodiment the present invention relates to an expresssion cassette comprising a) a promoter, preferably a promoter selected from the group consisting of Big35S, PCUbi, Super and USP, in particular p-PcUBI; and b) the nucleic acid SEQ ID NO. 4102, or a homolog or fragment thereof, or a homolog thereof being depicted in Table I, application no. 17, column 8, in the same line as SEQ ID NO. 4102, preferably the coding region thereof, a homolog or a fragment thereof; which are operable linked.

[92738] In an embodiment thereof the expression cassette comprises in addition c) a nucleic acid molecule encoding a transit peptide, especially a plastidal transit petide in case in Table I, application no. 17, in column 6 in the same line as SEQ ID NO. 4102 is depicted, plastidic is mentioned, or a mitochondrial transit peptide in case in Table I, application no. 17, in column 6 in the same line as SEQ ID NO. 4102 is depicted, mitochondric is mentioned; which is operable linked, too.

[92739] In another embodiment thereof the expression cassette does not comprise an additional transit peptide in case in Table I, application no. 17, in column 6 in the same line as SEQ ID NO. 4102 is depicted, non-targeted is mentioned.

[92740] In an embodiment the present invention relates to an expresssion cassette comprising a) a promoter, preferably a promoter selected from the group consisting of Big35S, PCUbi, Super and USP, in particular p-PcUBI; and b) the nucleic acid SEQ ID NO. 24311, or a homolog or fragment thereof, or a homolog thereof being depicted in Table I, application no. 17, column 8, in the same line as SEQ ID NO. 24311, preferably the coding region thereof, a homolog or a fragment thereof; which are operable linked.

[92741] In an embodiment thereof the expression cassette comprises in addition c) a nucleic acid molecule encoding a transit peptide, especially a plastidal transit petide in case in Table I, application no. 17, in column 6 in the same line as SEQ ID NO. 24311 is depicted, plastidic is mentioned, or a mitochondrial transit peptide in case in Table I, application no. 17, in column 6 in the same line as SEQ ID NO. 24311 is depicted, mitochondric is mentioned; which is operable linked, too.

[92742] In another embodiment thereof the expression cassette does not comprise an additional transit peptide in case in Table I, application no. 17, in column 6 in the same line as SEQ ID NO. 24311 is depicted, non-targeted is mentioned.

[92743] In an embodiment the present invention relates to an expresssion cassette comprising a) a promoter, preferably a promoter selected from the group consisting of Big35S, PCUbi, Super and USP, in particular p-PcUBI; and b) the nucleic acid SEQ ID NO. 4348, or a homolog or fragment thereof, or a homolog thereof being depicted in Table I, application no. 17, column 8, in the same line as SEQ ID NO. 4348, preferably the coding region thereof, a homolog or a fragment thereof; which are operable linked.

[92744] In an embodiment thereof the expression cassette comprises in addition c) a nucleic acid molecule encoding a transit peptide, especially a plastidal transit petide in case in Table I, application no. 17, in column 6 in the same line as SEQ ID NO. 4348 is depicted, plastidic is mentioned, or a mitochondrial transit peptide in case in Table I, application no. 17, in column 6 in the same line as SEQ ID NO. 4348 is depicted, mitochondric is mentioned; which is operable linked, too.

[92745] In another embodiment thereof the expression cassette does not comprise an additional transit peptide in case in Table I, application no. 17, in column 6 in the same line as SEQ ID NO. 4348 is depicted, non-targeted is mentioned.

[92746] In an embodiment the present invention relates to an expresssion cassette comprising a) a promoter, preferably a promoter selected from the group consisting of Big35S, PCUbi, Super and USP, in particular p-PcUBI; and b) the nucleic acid SEQ ID NO. 68987, or a homolog or fragment thereof, or a homolog thereof being depicted in Table I, application no. 17, column 8, in the same line as SEQ ID NO. 68987, preferably the coding region thereof, a homolog or a fragment thereof; which are operable linked.

[92747] In an embodiment thereof the expression cassette comprises in addition c) a nucleic acid molecule encoding a transit peptide, especially a plastidal transit petide in case in Table I, application no. 17, in column 6 in the same line as SEQ ID NO. 68987 is depicted, plastidic is mentioned, or a mitochondrial transit peptide in case in Table I, application no. 17, in column 6 in the same line as SEQ ID NO. 68987 is depicted, mitochondric is mentioned; which is operable linked, too.

[92748] In another embodiment thereof the expression cassette does not comprise an additional transit peptide in case in Table I, application no. 17, in column 6 in the same line as SEQ ID NO. 68987 is depicted, non-targeted is mentioned.

[92749] In an embodiment the present invention relates to an expresssion cassette comprising a) a promoter, preferably a promoter selected from the group consisting of Big35S, PCUbi, Super and USP, in particular p-PcUBI; and b) the nucleic acid SEQ ID NO. 24438, or a homolog or fragment thereof, or a homolog thereof being depicted in Table I, application no. 17, column 8, in the same line as SEQ ID NO. 24438, preferably the coding region thereof, a homolog or a fragment thereof; which are operable linked.

[92750] In an embodiment thereof the expression cassette comprises in addition c) a nucleic acid molecule encoding a transit peptide, especially a plastidal transit petide in case in Table I, application no. 17, in column 6 in the same line as SEQ ID NO. 24438 is depicted, plastidic is mentioned, or a mitochondrial transit peptide in case in Table I, application no. 17, in column 6 in the same line as SEQ ID NO. 24438 is depicted, mitochondric is mentioned; which is operable linked, too.

[92751] In another embodiment thereof the expression cassette does not comprise an additional transit peptide in case in Table I, application no. 17, in column 6 in the same line as SEQ ID NO. 24438 is depicted, non-targeted is mentioned.

[92752] In an embodiment the present invention relates to an expresssion cassette comprising a) a promoter, preferably a promoter selected from the group consisting of Big35S, PCUbi, Super and USP, in particular p-PcUBI; and b) the nucleic acid SEQ ID NO. 24492, or a homolog or fragment thereof, or a homolog thereof being depicted in Table I, application no. 17, column 8, in the same line as SEQ ID NO. 24492, preferably the coding region thereof, a homolog or a fragment thereof; which are operable linked.

[92753] In an embodiment thereof the expression cassette comprises in addition c) a nucleic acid molecule encoding a transit peptide, especially a plastidal transit petide in case in Table I, application no. 17, in column 6 in the same line as SEQ ID NO. 24492 is depicted, plastidic is mentioned, or a mitochondrial transit peptide in case in Table I, application no. 17, in column 6 in the same line as SEQ ID NO. 24492 is depicted, mitochondric is mentioned; which is operable linked, too.

[92754] In another embodiment thereof the expression cassette does not comprise an additional transit peptide in case in Table I, application no. 17, in column 6 in the same line as SEQ ID NO. 24492 is depicted, non-targeted is mentioned.

[92755] In an embodiment the present invention relates to an expresssion cassette comprising a) a promoter, preferably a promoter selected from the group consisting of Big35S, PCUbi, Super and USP, in particular p-PcUBI; and b) the nucleic acid SEQ ID NO. 142753, or a homolog or fragment thereof, or a homolog thereof being depicted in Table I, application no. 17, column 8, in the same line as SEQ ID NO. 142753, preferably the coding region thereof, a homolog or a fragment thereof; which are operable linked.

[92756] In an embodiment thereof the expression cassette comprises in addition c) a nucleic acid molecule encoding a transit peptide, especially a plastidal transit petide in case in Table I, application no. 17, in column 6 in the same line as SEQ ID NO. 142753 is depicted, plastidic is mentioned, or a mitochondrial transit peptide in case in Table I, application no. 17, in column 6 in the same line as SEQ ID NO. 142753 is depicted, mitochondric is mentioned; which is operable linked, too.

[92757] In another embodiment thereof the expression cassette does not comprise an additional transit peptide in case in Table I, application no. 17, in column 6 in the same line as SEQ ID NO. 142753 is depicted, non-targeted is mentioned.

[92758] In an embodiment the present invention relates to an expresssion cassette comprising a) a promoter, preferably a promoter selected from the group consisting of Big35S, PCUbi, Super and USP, in particular p-PcUBI; and b) the nucleic acid SEQ ID NO. 69275, or a homolog or fragment thereof, or a homolog thereof being depicted in Table I, application no. 17, column 8, in the same line as SEQ ID NO. 69275, preferably the coding region thereof, a homolog or a fragment thereof; which are operable linked.

[92759] In an embodiment thereof the expression cassette comprises in addition c) a nucleic acid molecule encoding a transit peptide, especially a plastidal transit petide in case in Table I, application no. 17, in column 6 in the same line as SEQ ID NO. 69275 is depicted, plastidic is mentioned, or a mitochondrial transit peptide in case in Table I, application no. 17, in column 6 in the same line as SEQ ID NO. 69275 is depicted, mitochondric is mentioned; which is operable linked, too.

[92760] In another embodiment thereof the expression cassette does not comprise an additional transit peptide in case in Table I, application no. 17, in column 6 in the same line as SEQ ID NO. 69275 is depicted, non-targeted is mentioned.

[92761] In an embodiment the present invention relates to an expresssion cassette comprising a) a promoter, preferably a promoter selected from the group consisting of Big35S, PCUbi, Super and USP, in particular p-PcUBI; and b) the nucleic acid SEQ ID NO. 25283, or a homolog or fragment thereof, or a homolog thereof being depicted in Table I, application no. 17, column 8, in the same line as SEQ ID NO. 25283, preferably the coding region thereof, a homolog or a fragment thereof; which are operable linked.

[92762] In an embodiment thereof the expression cassette comprises in addition c) a nucleic acid molecule encoding a transit peptide, especially a plastidal transit petide in case in Table I, application no. 17, in column 6 in the same line as SEQ ID NO. 25283 is depicted, plastidic is mentioned, or a mitochondrial transit peptide in case in Table I, application no. 17, in column 6 in the same line as SEQ ID NO. 25283 is depicted, mitochondric is mentioned; which is operable linked, too.

[92763] In another embodiment thereof the expression cassette does not comprise an additional transit peptide in case in Table I, application no. 17, in column 6 in the same line as SEQ ID NO. 25283 is depicted, non-targeted is mentioned.

[92764] In an embodiment the present invention relates to an expresssion cassette comprising a) a promoter, preferably a promoter selected from the group consisting of Big35S, PCUbi, Super and USP, in particular p-PcUBI; and b) the nucleic acid SEQ ID NO. 4904, or a homolog or fragment thereof, or a homolog thereof being depicted in Table I, application no. 17, column 8, in the same line as SEQ ID NO. 4904, preferably the coding region thereof, a homolog or a fragment thereof; which are operable linked.

[92765] In an embodiment thereof the expression cassette comprises in addition c) a nucleic acid molecule encoding a transit peptide, especially a plastidal transit petide in case in Table I, application no. 17, in column 6 in the same line as SEQ ID NO. 4904 is depicted, plastidic is mentioned, or a mitochondrial transit peptide in case in Table I, application no. 17, in column 6 in the same line as SEQ ID NO. 4904 is depicted, mitochondric is mentioned; which is operable linked, too.

[92766] In another embodiment thereof the expression cassette does not comprise an additional transit peptide in case in Table I, application no. 17, in column 6 in the same line as SEQ ID NO. 4904 is depicted, non-targeted is mentioned.

[92767] In an embodiment the present invention relates to an expresssion cassette comprising a) a promoter, preferably a promoter selected from the group consisting of Big35S, PCUbi, Super and USP, in particular p-PcUBI; and b) the nucleic acid SEQ ID NO. 25428, or a homolog or fragment thereof, or a homolog thereof being depicted in Table I, application no. 17, column 8, in the same line as SEQ ID NO. 25428, preferably the coding region thereof, a homolog or a fragment thereof; which are operable linked.

[92768] In an embodiment thereof the expression cassette comprises in addition c) a nucleic acid molecule encoding a transit peptide, especially a plastidal transit petide in case in Table I, application no. 17, in column 6 in the same line as SEQ ID NO. 25428 is depicted, plastidic is mentioned, or a mitochondrial transit peptide in case in Table I, application no. 17, in column 6 in the same line as SEQ ID NO. 25428 is depicted, mitochondric is mentioned; which is operable linked, too.

[92769] In another embodiment thereof the expression cassette does not comprise an additional transit peptide in case in Table I, application no. 17, in column 6 in the same line as SEQ ID NO. 25428 is depicted, non-targeted is mentioned.

[92770] In an embodiment the present invention relates to an expresssion cassette comprising a) a promoter, preferably a promoter selected from the group consisting of Big35S, PCUbi, Super and USP, in particular p-PcUBI; and b) the nucleic acid SEQ ID NO. 142929, or a homolog or fragment thereof, or a homolog thereof being depicted in Table I, application no. 17, column 8, in the same line as SEQ ID NO. 142929, preferably the coding region thereof, a homolog or a fragment thereof; which are operable linked.

[92771] In an embodiment thereof the expression cassette comprises in addition c) a nucleic acid molecule encoding a transit peptide, especially a plastidal transit petide in case in Table I, application no. 17, in column 6 in the same line as SEQ ID NO. 142929 is depicted, plastidic is mentioned, or a mitochondrial transit peptide in case in Table I, application no. 17, in column 6 in the same line as SEQ ID NO. 142929 is depicted, mitochondric is mentioned; which is operable linked, too.

[92772] In another embodiment thereof the expression cassette does not comprise an additional transit peptide in case in Table I, application no. 17, in column 6 in the same line as SEQ ID NO. 142929 is depicted, non-targeted is mentioned.

[92773] In an embodiment the present invention relates to an expresssion cassette comprising a) a promoter, preferably a promoter selected from the group consisting of Big35S, PCUbi, Super and USP, in particular p-PcUBI; and b) the nucleic acid SEQ ID NO. 142933, or a homolog or fragment thereof, or a homolog thereof being depicted in Table I, application no. 17, column 8, in the same line as SEQ ID NO. 142933, preferably the coding region thereof, a homolog or a fragment thereof; which are operable linked.

[92774] In an embodiment thereof the expression cassette comprises in addition c) a nucleic acid molecule encoding a transit peptide, especially a plastidal transit petide in case in Table I, application no. 17, in column 6 in the same line as SEQ ID NO. 142933 is depicted, plastidic is mentioned, or a mitochondrial transit peptide in case in Table I, application no. 17, in column 6 in the same line as SEQ ID NO. 142933 is depicted, mitochondric is mentioned; which is operable linked, too.

[92775] In another embodiment thereof the expression cassette does not comprise an additional transit peptide in case in Table I, application no. 17, in column 6 in the same line as SEQ ID NO. 142933 is depicted, non-targeted is mentioned.

[92776] In an embodiment the present invention relates to an expresssion cassette comprising a) a promoter, preferably a promoter selected from the group consisting of Big35S, PCUbi, Super and USP, in particular p-PcUBI; and b) the nucleic acid SEQ ID NO. 5318, or a homolog or fragment thereof, or a homolog thereof being depicted in Table I, application no. 17, column 8, in the same line as SEQ ID NO. 5318, preferably the coding region thereof, a homolog or a fragment thereof; which are operable linked.

[92777] In an embodiment thereof the expression cassette comprises in addition c) a nucleic acid molecule encoding a transit peptide, especially a plastidal transit petide in case in Table I, application no. 17, in column 6 in the same line as SEQ ID NO. 5318 is depicted, plastidic is mentioned, or a mitochondrial transit peptide in case in Table I, application no. 17, in column 6 in the same line as SEQ ID NO. 5318 is depicted, mitochondric is mentioned; which is operable linked, too.

[92778] In another embodiment thereof the expression cassette does not comprise an additional transit peptide in case in Table I, application no. 17, in column 6 in the same line as SEQ ID NO. 5318 is depicted, non-targeted is mentioned.

[92779] In an embodiment the present invention relates to an expresssion cassette comprising a) a promoter, preferably a promoter selected from the group consisting of Big35S, PCUbi, Super and USP, in particular p-PcUBI; and b) the nucleic acid SEQ ID NO. 70006, or a homolog or fragment thereof, or a homolog thereof being depicted in Table I, application no. 17, column 8, in the same line as SEQ ID NO. 70006, preferably the coding region thereof, a homolog or a fragment thereof; which are operable linked.

[92780] In an embodiment thereof the expression cassette comprises in addition c) a nucleic acid molecule encoding a transit peptide, especially a plastidal transit petide in case in Table I, application no. 17, in column 6 in the same line as SEQ ID NO. 70006 is depicted, plastidic is mentioned, or a mitochondrial transit peptide in case in Table I, application no. 17, in column 6 in the same line as SEQ ID NO. 70006 is depicted, mitochondric is mentioned; which is operable linked, too.

[92781] In another embodiment thereof the expression cassette does not comprise an additional transit peptide in case in Table I, application no. 17, in column 6 in the same line as SEQ ID NO. 70006 is depicted, non-targeted is mentioned.

[92782] In an embodiment the present invention relates to an expresssion cassette comprising a) a promoter, preferably a promoter selected from the group consisting of Big35S, PCUbi, Super and USP, in particular p-PcUBI; and b) the nucleic acid SEQ ID NO. 102899, or a homolog or fragment thereof, or a homolog thereof being depicted in Table I, application no. 17, column 8, in the same line as SEQ ID NO. 102899, preferably the coding region thereof, a homolog or a fragment thereof; which are operable linked.

[92783] In an embodiment thereof the expression cassette comprises in addition c) a nucleic acid molecule encoding a transit peptide, especially a plastidal transit petide in case in Table I, application no. 17, in column 6 in the same line as SEQ ID NO. 102899 is depicted, plastidic is mentioned, or a mitochondrial transit peptide in case in Table I, application no. 17, in column 6 in the same line as SEQ ID NO. 102899 is depicted, mitochondric is mentioned; which is operable linked, too.

[92784] In another embodiment thereof the expression cassette does not comprise an additional transit peptide in case in Table I, application no. 17, in column 6 in the same line as SEQ ID NO. 102899 is depicted, non-targeted is mentioned.

[92785] In an embodiment the present invention relates to an expresssion cassette comprising a) a promoter, preferably a promoter selected from the group consisting of Big35S, PCUbi, Super and USP, in particular p-PcUBI; and b) the nucleic acid SEQ ID NO. 122803, or a homolog or fragment thereof, or a homolog thereof being depicted in Table I, application no. 17, column 8, in the same line as SEQ ID NO. 122803, preferably the coding region thereof, a homolog or a fragment thereof; which are operable linked.

[92786] In an embodiment thereof the expression cassette comprises in addition c) a nucleic acid molecule encoding a transit peptide, especially a plastidal transit petide in case in Table I, application no. 17, in column 6 in the same line as SEQ ID NO. 122803 is depicted, plastidic is mentioned, or a mitochondrial transit peptide in case in Table I, application no. 17, in column 6 in the same line as SEQ ID NO. 122803 is depicted, mitochondric is mentioned; which is operable linked, too.

[92787] In another embodiment thereof the expression cassette does not comprise an additional transit peptide in case in Table I, application no. 17, in column 6 in the same line as SEQ ID NO. 122803 is depicted, non-targeted is mentioned.

[92788] In an embodiment the present invention relates to an expresssion cassette comprising a) a promoter, preferably a promoter selected from the group consisting of Big35S, PCUbi, Super and USP, in particular p-PcUBI; and b) the nucleic acid SEQ ID NO. 26120, or a homolog or fragment thereof, or a homolog thereof being depicted in Table I, application no. 17, column 8, in the same line as SEQ ID NO. 26120, preferably the coding region thereof, a homolog or a fragment thereof; which are operable linked.

[92789] In an embodiment thereof the expression cassette comprises in addition c) a nucleic acid molecule encoding a transit peptide, especially a plastidal transit petide in case in Table I, application no. 17, in column 6 in the same line as SEQ ID NO. 26120 is depicted, plastidic is mentioned, or a mitochondrial transit peptide in case in Table I, application no. 17, in column 6 in the same line as SEQ ID NO. 26120 is depicted, mitochondric is mentioned; which is operable linked, too.

[92790] In another embodiment thereof the expression cassette does not comprise an additional transit peptide in case in Table I, application no. 17, in column 6 in the same line as SEQ ID NO. 26120 is depicted, non-targeted is mentioned.

[92791] In an embodiment the present invention relates to an expresssion cassette comprising a) a promoter, preferably a promoter selected from the group consisting of Big35S, PCUbi, Super and USP, in particular p-PcUBI; and b) the nucleic acid SEQ ID NO. 26196, or a homolog or fragment thereof, or a homolog thereof being depicted in Table I, application no. 17, column 8, in the same line as SEQ ID NO. 26196, preferably the coding region thereof, a homolog or a fragment thereof; which are operable linked.

[92792] In an embodiment thereof the expression cassette comprises in addition c) a nucleic acid molecule encoding a transit peptide, especially a plastidal transit petide in case in Table I, application no. 17, in column 6 in the same line as SEQ ID NO. 26196 is depicted, plastidic is mentioned, or a mitochondrial transit peptide in case in Table I, application no. 17, in column 6 in the same line as SEQ ID NO. 26196 is depicted, mitochondric is mentioned; which is operable linked, too.

[92793] In another embodiment thereof the expression cassette does not comprise an additional transit peptide in case in Table I, application no. 17, in column 6 in the same line as SEQ ID NO. 26196 is depicted, non-targeted is mentioned.

[92794] In an embodiment the present invention relates to an expresssion cassette comprising a) a promoter, preferably a promoter selected from the group consisting of Big35S, PCUbi, Super and USP, in particular p-PcUBI; and b) the nucleic acid SEQ ID NO. 6040, or a homolog or fragment thereof, or a homolog thereof being depicted in Table I, application no. 17, column 8, in the same line as SEQ ID NO. 6040, preferably the coding region thereof, a homolog or a fragment thereof; which are operable linked.

[92795] In an embodiment thereof the expression cassette comprises in addition c) a nucleic acid molecule encoding a transit peptide, especially a plastidal transit petide in case in Table I, application no. 17, in column 6 in the same line as SEQ ID NO. 6040 is depicted, plastidic is mentioned, or a mitochondrial transit peptide in case in Table I, application no. 17, in column 6 in the same line as SEQ ID NO. 6040 is depicted, mitochondric is mentioned; which is operable linked, too.

[92796] In another embodiment thereof the expression cassette does not comprise an additional transit peptide in case in Table I, application no. 17, in column 6 in the same line as SEQ ID NO. 6040 is depicted, non-targeted is mentioned.

[92797] In an embodiment the present invention relates to an expresssion cassette comprising a) a promoter, preferably a promoter selected from the group consisting of Big35S, PCUbi, Super and USP, in particular p-PcUBI; and b) the nucleic acid SEQ ID NO. 27021, or a homolog or fragment thereof, or a homolog thereof being depicted in Table I, application no. 17, column 8, in the same line as SEQ ID NO. 27021, preferably the coding region thereof, a homolog or a fragment thereof; which are operable linked.

[92798] In an embodiment thereof the expression cassette comprises in addition c) a nucleic acid molecule encoding a transit peptide, especially a plastidal transit petide in case in Table I, application no. 17, in column 6 in the same line as SEQ ID NO. 27021 is depicted, plastidic is mentioned, or a mitochondrial transit peptide in case in Table I, application no. 17, in column 6 in the same line as SEQ ID NO. 27021 is depicted, mitochondric is mentioned; which is operable linked, too.

[92799] In another embodiment thereof the expression cassette does not comprise an additional transit peptide in case in Table I, application no. 17, in column 6 in the same line as SEQ ID NO. 27021 is depicted, non-targeted is mentioned.

[92800] In an embodiment the present invention relates to an expresssion cassette comprising a) a promoter, preferably a promoter selected from the group consisting of Big35S, PCUbi, Super and USP, in particular p-PcUBI; and b) the nucleic acid SEQ ID NO. 27882, or a homolog or fragment thereof, or a homolog thereof being depicted in Table I, application no. 17, column 8, in the same line as SEQ ID NO. 27882, preferably the coding region thereof, a homolog or a fragment thereof; which are operable linked.

[92801] In an embodiment thereof the expression cassette comprises in addition c) a nucleic acid molecule encoding a transit peptide, especially a plastidal transit petide in case in Table I, application no. 17, in column 6 in the same line as SEQ ID NO. 27882 is depicted, plastidic is mentioned, or a mitochondrial transit peptide in case in Table I, application no. 17, in column 6 in the same line as SEQ ID NO. 27882 is depicted, mitochondric is mentioned; which is operable linked, too.

[92802] In another embodiment thereof the expression cassette does not comprise an additional transit peptide in case in Table I, application no. 17, in column 6 in the same line as SEQ ID NO. 27882 is depicted, non-targeted is mentioned.

[92803] In an embodiment the present invention relates to an expresssion cassette comprising a) a promoter, preferably a promoter selected from the group consisting of Big35S, PCUbi, Super and USP, in particular p-PcUBI; and b) the nucleic acid SEQ ID NO. 28040, or a homolog or fragment thereof, or a homolog thereof being depicted in Table I, application no. 17, column 8, in the same line as SEQ ID NO. 28040, preferably the coding region thereof, a homolog or a fragment thereof; which are operable linked.

[92804] In an embodiment thereof the expression cassette comprises in addition c) a nucleic acid molecule encoding a transit peptide, especially a plastidal transit petide in case in Table I, application no. 17, in column 6 in the same line as SEQ ID NO. 28040 is depicted, plastidic is mentioned, or a mitochondrial transit peptide in case in Table I, application no. 17, in column 6 in the same line as SEQ ID NO. 28040 is depicted, mitochondric is mentioned; which is operable linked, too.

[92805] In another embodiment thereof the expression cassette does not comprise an additional transit peptide in case in Table I, application no. 17, in column 6 in the same line as SEQ ID NO. 28040 is depicted, non-targeted is mentioned.

[92806] In an embodiment the present invention relates to an expresssion cassette comprising a) a promoter, preferably a promoter selected from the group consisting of Big35S, PCUbi, Super and USP, in particular p-PcUBI; and b) the nucleic acid SEQ ID NO. 6075, or a homolog or fragment thereof, or a homolog thereof being depicted in Table I, application no. 17, column 8, in the same line as SEQ ID NO. 6075, preferably the coding region thereof, a homolog or a fragment thereof; which are operable linked.

[92807] In an embodiment thereof the expression cassette comprises in addition c) a nucleic acid molecule encoding a transit peptide, especially a plastidal transit petide in case in Table I, application no. 17, in column 6 in the same line as SEQ ID NO. 6075 is depicted, plastidic is mentioned, or a mitochondrial transit peptide in case in Table I, application no. 17, in column 6 in the same line as SEQ ID NO. 6075 is depicted, mitochondric is mentioned; which is operable linked, too.

[92808] In another embodiment thereof the expression cassette does not comprise an additional transit peptide in case in Table I, application no. 17, in column 6 in the same line as SEQ ID NO. 6075 is depicted, non-targeted is mentioned.

[92809] In an embodiment the present invention relates to an expresssion cassette comprising a) a promoter, preferably a promoter selected from the group consisting of Big35S, PCUbi, Super and USP, in particular p-PcUBI; and b) the nucleic acid SEQ ID NO. 72346, or a homolog or fragment thereof, or a homolog thereof being depicted in Table I, application no. 17, column 8, in the same line as SEQ ID NO. 72346, preferably the coding region thereof, a homolog or a fragment thereof; which are operable linked.

[92810] In an embodiment thereof the expression cassette comprises in addition c) a nucleic acid molecule encoding a transit peptide, especially a plastidal transit petide in case in Table I, application no. 17, in column 6 in the same line as SEQ ID NO. 72346 is depicted, plastidic is mentioned, or a mitochondrial transit peptide in case in Table I, application no. 17, in column 6 in the same line as SEQ ID NO. 72346 is depicted, mitochondric is mentioned; which is operable linked, too.

[92811] In another embodiment thereof the expression cassette does not comprise an additional transit peptide in case in Table I, application no. 17, in column 6 in the same line as SEQ ID NO. 72346 is depicted, non-targeted is mentioned.

[92812] In an embodiment the present invention relates to an expresssion cassette comprising a) a promoter, preferably a promoter selected from the group consisting of Big35S, PCUbi, Super and USP, in particular p-PcUBI; and b) the nucleic acid SEQ ID NO. 29286, or a homolog or fragment thereof, or a homolog thereof being depicted in Table I, application no. 17, column 8, in the same line as SEQ ID NO. 29286, preferably the coding region thereof, a homolog or a fragment thereof; which are operable linked.

[92813] In an embodiment thereof the expression cassette comprises in addition c) a nucleic acid molecule encoding a transit peptide, especially a plastidal transit petide in case in Table I, application no. 17, in column 6 in the same line as SEQ ID NO. 29286 is depicted, plastidic is mentioned, or a mitochondrial transit peptide in case in Table I, application no. 17, in column 6 in the same line as SEQ ID NO. 29286 is depicted, mitochondric is mentioned; which is operable linked, too.

[92814] In another embodiment thereof the expression cassette does not comprise an additional transit peptide in case in Table I, application no. 17, in column 6 in the same line as SEQ ID NO. 29286 is depicted, non-targeted is mentioned.

[92815] In an embodiment the present invention relates to an expresssion cassette comprising a) a promoter, preferably a promoter selected from the group consisting of Big35S, PCUbi, Super and USP, in particular p-PcUBI; and b) the nucleic acid SEQ ID NO. 29500, or a homolog or fragment thereof, or a homolog thereof being depicted in Table I, application no. 17, column 8, in the same line as SEQ ID NO. 29500, preferably the coding region thereof, a homolog or a fragment thereof; which are operable linked.

[92816] In an embodiment thereof the expression cassette comprises in addition c) a nucleic acid molecule encoding a transit peptide, especially a plastidal transit petide in case in Table I, application no. 17, in column 6 in the same line as SEQ ID NO. 29500 is depicted, plastidic is mentioned, or a mitochondrial transit peptide in case in Table I, application no. 17, in column 6 in the same line as SEQ ID NO. 29500 is depicted, mitochondric is mentioned; which is operable linked, too.

[92817] In another embodiment thereof the expression cassette does not comprise an additional transit peptide in case in Table I, application no. 17, in column 6 in the same line as SEQ ID NO. 29500 is depicted, non-targeted is mentioned.

[92818] In an embodiment the present invention relates to an expresssion cassette comprising a) a promoter, preferably a promoter selected from the group consisting of Big35S, PCUbi, Super and USP, in particular p-PcUBI; and b) the nucleic acid SEQ ID NO. 111155, or a homolog or fragment thereof, or a homolog thereof being depicted in Table I, application no. 17, column 8, in the same line as SEQ ID NO. 111155, preferably the coding region thereof, a homolog or a fragment thereof; which are operable linked.

[92819] In an embodiment thereof the expression cassette comprises in addition c) a nucleic acid molecule encoding a transit peptide, especially a plastidal transit petide in case in Table I, application no. 17, in column 6 in the same line as SEQ ID NO. 111155 is depicted, plastidic is mentioned, or a mitochondrial transit peptide in case in Table I, application no. 17, in column 6 in the same line as SEQ ID NO. 111155 is depicted, mitochondric is mentioned; which is operable linked, too.

[92820] In another embodiment thereof the expression cassette does not comprise an additional transit peptide in case in Table I, application no. 17, in column 6 in the same line as SEQ ID NO. 111155 is depicted, non-targeted is mentioned.

[92821] In an embodiment the present invention relates to an expresssion cassette comprising a) a promoter, preferably a promoter selected from the group consisting of Big35S, PCUbi, Super and USP, in particular p-PcUBI; and b) the nucleic acid SEQ ID NO. 31026, or a homolog or fragment thereof, or a homolog thereof being depicted in Table I, application no. 17, column 8, in the same line as SEQ ID NO. 31026, preferably the coding region thereof, a homolog or a fragment thereof; which are operable linked.

[92822] In an embodiment thereof the expression cassette comprises in addition c) a nucleic acid molecule encoding a transit peptide, especially a plastidal transit petide in case in Table I, application no. 17, in column 6 in the same line as SEQ ID NO. 31026 is depicted, plastidic is mentioned, or a mitochondrial transit peptide in case in Table I, application no. 17, in column 6 in the same line as SEQ ID NO. 31026 is depicted, mitochondric is mentioned; which is operable linked, too.

[92823] In another embodiment thereof the expression cassette does not comprise an additional transit peptide in case in Table I, application no. 17, in column 6 in the same line as SEQ ID NO. 31026 is depicted, non-targeted is mentioned.

[92824] In an embodiment the present invention relates to an expresssion cassette comprising a) a promoter, preferably a promoter selected from the group consisting of Big35S, PCUbi, Super and USP, in particular p-PcUBI; and b) the nucleic acid SEQ ID NO. 143121, or a homolog or fragment thereof, or a homolog thereof being depicted in Table I, application no. 17, column 8, in the same line as SEQ ID NO. 143121, preferably the coding region thereof, a homolog or a fragment thereof; which are operable linked.

[92825] In an embodiment thereof the expression cassette comprises in addition c) a nucleic acid molecule encoding a transit peptide, especially a plastidal transit petide in case in Table I, application no. 17, in column 6 in the same line as SEQ ID NO. 143121 is depicted, plastidic is mentioned, or a mitochondrial transit peptide in case in Table I, application no. 17, in column 6 in the same line as SEQ ID NO. 143121 is depicted, mitochondric is mentioned; which is operable linked, too.

[92826] In another embodiment thereof the expression cassette does not comprise an additional transit peptide in case in Table I, application no. 17, in column 6 in the same line as SEQ ID NO. 143121 is depicted, non-targeted is mentioned.

[92827] In an embodiment the present invention relates to an expresssion cassette comprising a) a promoter, preferably a promoter selected from the group consisting of Big35S, PCUbi, Super and USP, in particular p-PcUBI; and b) the nucleic acid SEQ ID NO. 114231, or a homolog or fragment thereof, or a homolog thereof being depicted in Table I, application no. 17, column 8, in the same line as SEQ ID NO. 114231, preferably the coding region thereof, a homolog or a fragment thereof; which are operable linked.

[92828] In an embodiment thereof the expression cassette comprises in addition c) a nucleic acid molecule encoding a transit peptide, especially a plastidal transit petide in case in Table I, application no. 17, in column 6 in the same line as SEQ ID NO. 114231 is depicted, plastidic is mentioned, or a mitochondrial transit peptide in case in Table I, application no. 17, in column 6 in the same line as SEQ ID NO. 114231 is depicted, mitochondric is mentioned; which is operable linked, too.

[92829] In another embodiment thereof the expression cassette does not comprise an additional transit peptide in case in Table I, application no. 17, in column 6 in the same line as SEQ ID NO. 114231 is depicted, non-targeted is mentioned.

[92830] In an embodiment the present invention relates to an expresssion cassette comprising a) a promoter, preferably a promoter selected from the group consisting of Big35S, PCUbi, Super and USP, in particular p-PcUBI; and b) the nucleic acid SEQ ID NO. 143398, or a homolog or fragment thereof, or a homolog thereof being depicted in Table I, application no. 17, column 8, in the same line as SEQ ID NO. 143398, preferably the coding region thereof, a homolog or a fragment thereof; which are operable linked.

[92831] In an embodiment thereof the expression cassette comprises in addition c) a nucleic acid molecule encoding a transit peptide, especially a plastidal transit petide in case in Table I, application no. 17, in column 6 in the same line as SEQ ID NO. 143398 is depicted, plastidic is mentioned, or a mitochondrial transit peptide in case in Table I, application no. 17, in column 6 in the same line as SEQ ID NO. 143398 is depicted, mitochondric is mentioned; which is operable linked, too.

[92832] In another embodiment thereof the expression cassette does not comprise an additional transit peptide in case in Table I, application no. 17, in column 6 in the same line as SEQ ID NO. 143398 is depicted, non-targeted is mentioned.

[92833] In an embodiment the present invention relates to an expresssion cassette comprising a) a promoter, preferably a promoter selected from the group consisting of Big35S, PCUbi, Super and USP, in particular p-PcUBI; and b) the nucleic acid SEQ ID NO. 73038, or a homolog or fragment thereof, or a homolog thereof being depicted in Table I, application no. 17, column 8, in the same line as SEQ ID NO. 73038, preferably the coding region thereof, a homolog or a fragment thereof; which are operable linked.

[92834] In an embodiment thereof the expression cassette comprises in addition c) a nucleic acid molecule encoding a transit peptide, especially a plastidal transit petide in case in Table I, application no. 17, in column 6 in the same line as SEQ ID NO. 73038 is depicted, plastidic is mentioned, or a mitochondrial transit peptide in case in Table I, application no. 17, in column 6 in the same line as SEQ ID NO. 73038 is depicted, mitochondric is mentioned; which is operable linked, too.

[92835] In another embodiment thereof the expression cassette does not comprise an additional transit peptide in case in Table I, application no. 17, in column 6 in the same line as SEQ ID NO. 73038 is depicted, non-targeted is mentioned.

[92836] In an embodiment the present invention relates to an expresssion cassette comprising a) a promoter, preferably a promoter selected from the group consisting of Big35S, PCUbi, Super and USP, in particular p-PcUBI; and b) the nucleic acid SEQ ID NO. 73719, or a homolog or fragment thereof, or a homolog thereof being depicted in Table I, application no. 17, column 8, in the same line as SEQ ID NO. 73719, preferably the coding region thereof, a homolog or a fragment thereof; which are operable linked.

[92837] In an embodiment thereof the expression cassette comprises in addition c) a nucleic acid molecule encoding a transit peptide, especially a plastidal transit petide in case in Table I, application no. 17, in column 6 in the same line as SEQ ID NO. 73719 is depicted, plastidic is mentioned, or a mitochondrial transit peptide in case in Table I, application no. 17, in column 6 in the same line as SEQ ID NO. 73719 is depicted, mitochondric is mentioned; which is operable linked, too.

[92838] In another embodiment thereof the expression cassette does not comprise an additional transit peptide in case in Table I, application no. 17, in column 6 in the same line as SEQ ID NO. 73719 is depicted, non-targeted is mentioned.

[92839] In an embodiment the present invention relates to an expresssion cassette comprising a) a promoter, preferably a promoter selected from the group consisting of Big35S, PCUbi, Super and USP, in particular p-PcUBI; and b) the nucleic acid SEQ ID NO. 102941, or a homolog or fragment thereof, or a homolog thereof being depicted in Table I, application no. 17, column 8, in the same line as SEQ ID NO. 102941, preferably the coding region thereof, a homolog or a fragment thereof; which are operable linked.

[92840] In an embodiment thereof the expression cassette comprises in addition c) a nucleic acid molecule encoding a transit peptide, especially a plastidal transit petide in case in Table I, application no. 17, in column 6 in the same line as SEQ ID NO. 102941 is depicted, plastidic is mentioned, or a mitochondrial transit peptide in case in Table I, application no. 17, in column 6 in the same line as SEQ ID NO. 102941 is depicted, mitochondric is mentioned; which is operable linked, too.

[92841] In another embodiment thereof the expression cassette does not comprise an additional transit peptide in case in Table I, application no. 17, in column 6 in the same line as SEQ ID NO. 102941 is depicted, non-targeted is mentioned.

[92842] In an embodiment the present invention relates to an expresssion cassette comprising a) a promoter, preferably a promoter selected from the group consisting of Big35S, PCUbi, Super and USP, in particular p-PcUBI; and b) the nucleic acid SEQ ID NO. 6510, or a homolog or fragment thereof, or a homolog thereof being depicted in Table I, application no. 17, column 8, in the same line as SEQ ID NO. 6510, preferably the coding region thereof, a homolog or a fragment thereof; which are operable linked.

[92843] In an embodiment thereof the expression cassette comprises in addition c) a nucleic acid molecule encoding a transit peptide, especially a plastidal transit petide in case in Table I, application no. 17, in column 6 in the same line as SEQ ID NO. 6510 is depicted, plastidic is mentioned, or a mitochondrial transit peptide in case in Table I, application no. 17, in column 6 in the same line as SEQ ID NO. 6510 is depicted, mitochondric is mentioned; which is operable linked, too.

[92844] In another embodiment thereof the expression cassette does not comprise an additional transit peptide in case in Table I, application no. 17, in column 6 in the same line as SEQ ID NO. 6510 is depicted, non-targeted is mentioned.

[92845] In an embodiment the present invention relates to an expresssion cassette comprising a) a promoter, preferably a promoter selected from the group consisting of Big35S, PCUbi, Super and USP, in particular p-PcUBI; and b) the nucleic acid SEQ ID NO. 32037, or a homolog or fragment thereof, or a homolog thereof being depicted in Table I, application no. 17, column 8, in the same line as SEQ ID NO. 32037, preferably the coding region thereof, a homolog or a fragment thereof; which are operable linked.

[92846] In an embodiment thereof the expression cassette comprises in addition c) a nucleic acid molecule encoding a transit peptide, especially a plastidal transit petide in case in Table I, application no. 17, in column 6 in the same line as SEQ ID NO. 32037 is depicted, plastidic is mentioned, or a mitochondrial transit peptide in case in Table I, application no. 17, in column 6 in the same line as SEQ ID NO. 32037 is depicted, mitochondric is mentioned; which is operable linked, too.

[92847] In another embodiment thereof the expression cassette does not comprise an additional transit peptide in case in Table I, application no. 17, in column 6 in the same line as SEQ ID NO. 32037 is depicted, non-targeted is mentioned.

[92848] In an embodiment the present invention relates to an expresssion cassette comprising a) a promoter, preferably a promoter selected from the group consisting of Big35S, PCUbi, Super and USP, in particular p-PcUBI; and b) the nucleic acid SEQ ID NO. 32308, or a homolog or fragment thereof, or a homolog thereof being depicted in Table I, application no. 17, column 8, in the same line as SEQ ID NO. 32308, preferably the coding region thereof, a homolog or a fragment thereof; which are operable linked.

[92849] In an embodiment thereof the expression cassette comprises in addition c) a nucleic acid molecule encoding a transit peptide, especially a plastidal transit petide in case in Table I, application no. 17, in column 6 in the same line as SEQ ID NO. 32308 is depicted, plastidic is mentioned, or a mitochondrial transit peptide in case in Table I, application no. 17, in column 6 in the same line as SEQ ID NO. 32308 is depicted, mitochondric is mentioned; which is operable linked, too.

[92850] In another embodiment thereof the expression cassette does not comprise an additional transit peptide in case in Table I, application no. 17, in column 6 in the same line as SEQ ID NO. 32308 is depicted, non-targeted is mentioned.

[92851] In an embodiment the present invention relates to an expresssion cassette comprising a) a promoter, preferably a promoter selected from the group consisting of Big35S, PCUbi, Super and USP, in particular p-PcUBI; and b) the nucleic acid SEQ ID NO. 143495, or a homolog or fragment thereof, or a homolog thereof being depicted in Table I, application no. 17, column 8, in the same line as SEQ ID NO. 143495, preferably the coding region thereof, a homolog or a fragment thereof; which are operable linked.

[92852] In an embodiment thereof the expression cassette comprises in addition c) a nucleic acid molecule encoding a transit peptide, especially a plastidal transit petide in case in Table I, application no. 17, in column 6 in the same line as SEQ ID NO. 143495 is depicted, plastidic is mentioned, or a mitochondrial transit peptide in case in Table I, application no. 17, in column 6 in the same line as SEQ ID NO. 143495 is depicted, mitochondric is mentioned; which is operable linked, too.

[92853] In another embodiment thereof the expression cassette does not comprise an additional transit peptide in case in Table I, application no. 17, in column 6 in the same line as SEQ ID NO. 143495 is depicted, non-targeted is mentioned.

[92854] In an embodiment the present invention relates to an expresssion cassette comprising a) a promoter, preferably a promoter selected from the group consisting of Big35S, PCUbi, Super and USP, in particular p-PcUBI; and b) the nucleic acid SEQ ID NO. 6674, or a homolog or fragment thereof, or a homolog thereof being depicted in Table I, application no. 17, column 8, in the same line as SEQ ID NO. 6674, preferably the coding region thereof, a homolog or a fragment thereof; which are operable linked.

[92855] In an embodiment thereof the expression cassette comprises in addition c) a nucleic acid molecule encoding a transit peptide, especially a plastidal transit petide in case in Table I, application no. 17, in column 6 in the same line as SEQ ID NO. 6674 is depicted, plastidic is mentioned, or a mitochondrial transit peptide in case in Table I, application no. 17, in column 6 in the same line as SEQ ID NO. 6674 is depicted, mitochondric is mentioned; which is operable linked, too.

[92856] In another embodiment thereof the expression cassette does not comprise an additional transit peptide in case in Table I, application no. 17, in column 6 in the same line as SEQ ID NO. 6674 is depicted, non-targeted is mentioned.

[92857] In an embodiment the present invention relates to an expresssion cassette comprising a) a promoter, preferably a promoter selected from the group consisting of Big35S, PCUbi, Super and USP, in particular p-PcUBI; and b) the nucleic acid SEQ ID NO. 143614, or a homolog or fragment thereof, or a homolog thereof being depicted in Table I, application no. 17, column 8, in the same line as SEQ ID NO. 143614, preferably the coding region thereof, a homolog or a fragment thereof; which are operable linked.

[92858] In an embodiment thereof the expression cassette comprises in addition c) a nucleic acid molecule encoding a transit peptide, especially a plastidal transit petide in case in Table I, application no. 17, in column 6 in the same line as SEQ ID NO. 143614 is depicted, plastidic is mentioned, or a mitochondrial transit peptide in case in Table I, application no. 17, in column 6 in the same line as SEQ ID NO. 143614 is depicted, mitochondric is mentioned; which is operable linked, too.

[92859] In another embodiment thereof the expression cassette does not comprise an additional transit peptide in case in Table I, application no. 17, in column 6 in the same line as SEQ ID NO. 143614 is depicted, non-targeted is mentioned.

[92860] In an embodiment the present invention relates to an expresssion cassette comprising a) a promoter, preferably a promoter selected from the group consisting of Big35S, PCUbi, Super and USP, in particular p-PcUBI; and b) the nucleic acid SEQ ID NO. 74729, or a homolog or fragment thereof, or a homolog thereof being depicted in Table I, application no. 17, column 8, in the same line as SEQ ID NO. 74729, preferably the coding region thereof, a homolog or a fragment thereof; which are operable linked.

[92861] In an embodiment thereof the expression cassette comprises in addition c) a nucleic acid molecule encoding a transit peptide, especially a plastidal transit petide in case in Table I, application no. 17, in column 6 in the same line as SEQ ID NO. 74729 is depicted, plastidic is mentioned, or a mitochondrial transit peptide in case in Table I, application no. 17, in column 6 in the same line as SEQ ID NO. 74729 is depicted, mitochondric is mentioned; which is operable linked, too.

[92862] In another embodiment thereof the expression cassette does not comprise an additional transit peptide in case in Table I, application no. 17, in column 6 in the same line as SEQ ID NO. 74729 is depicted, non-targeted is mentioned.

[92863] In an embodiment the present invention relates to an expresssion cassette comprising a) a promoter, preferably a promoter selected from the group consisting of Big35S, PCUbi, Super and USP, in particular p-PcUBI; and b) the nucleic acid SEQ ID NO. 34044, or a homolog or fragment thereof, or a homolog thereof being depicted in Table I, application no. 17, column 8, in the same line as SEQ ID NO. 34044, preferably the coding region thereof, a homolog or a fragment thereof; which are operable linked.

[92864] In an embodiment thereof the expression cassette comprises in addition c) a nucleic acid molecule encoding a transit peptide, especially a plastidal transit petide in case in Table I, application no. 17, in column 6 in the same line as SEQ ID NO. 34044 is depicted, plastidic is mentioned, or a mitochondrial transit peptide in case in Table I, application no. 17, in column 6 in the same line as SEQ ID NO. 34044 is depicted, mitochondric is mentioned; which is operable linked, too.

[92865] In another embodiment thereof the expression cassette does not comprise an additional transit peptide in case in Table I, application no. 17, in column 6 in the same line as SEQ ID NO. 34044 is depicted, non-targeted is mentioned.

[92866] In an embodiment the present invention relates to an expresssion cassette comprising a) a promoter, preferably a promoter selected from the group consisting of Big35S, PCUbi, Super and USP, in particular p-PcUBI; and b) the nucleic acid SEQ ID NO. 34204, or a homolog or fragment thereof, or a homolog thereof being depicted in Table I, application no. 17, column 8, in the same line as SEQ ID NO. 34204, preferably the coding region thereof, a homolog or a fragment thereof; which are operable linked.

[92867] In an embodiment thereof the expression cassette comprises in addition c) a nucleic acid molecule encoding a transit peptide, especially a plastidal transit petide in case in Table I, application no. 17, in column 6 in the same line as SEQ ID NO. 34204 is depicted, plastidic is mentioned, or a mitochondrial transit peptide in case in Table I, application no. 17, in column 6 in the same line as SEQ ID NO. 34204 is depicted, mitochondric is mentioned; which is operable linked, too.

[92868] In another embodiment thereof the expression cassette does not comprise an additional transit peptide in case in Table I, application no. 17, in column 6 in the same line as SEQ ID NO. 34204 is depicted, non-targeted is mentioned.

[92869] In an embodiment the present invention relates to an expresssion cassette comprising a) a promoter, preferably a promoter selected from the group consisting of Big35S, PCUbi, Super and USP, in particular p-PcUBI; and b) the nucleic acid SEQ ID NO. 34301, or a homolog or fragment thereof, or a homolog thereof being depicted in Table I, application no. 17, column 8, in the same line as SEQ ID NO. 34301, preferably the coding region thereof, a homolog or a fragment thereof; which are operable linked.

[92870] In an embodiment thereof the expression cassette comprises in addition c) a nucleic acid molecule encoding a transit peptide, especially a plastidal transit petide in case in Table I, application no. 17, in column 6 in the same line as SEQ ID NO. 34301 is depicted, plastidic is mentioned, or a mitochondrial transit peptide in case in Table I, application no. 17, in column 6 in the same line as SEQ ID NO. 34301 is depicted, mitochondric is mentioned; which is operable linked, too.

[92871] In another embodiment thereof the expression cassette does not comprise an additional transit peptide in case in Table I, application no. 17, in column 6 in the same line as SEQ ID NO. 34301 is depicted, non-targeted is mentioned.

[92872] In an embodiment the present invention relates to an expresssion cassette comprising a) a promoter, preferably a promoter selected from the group consisting of Big35S, PCUbi, Super and USP, in particular p-PcUBI; and b) the nucleic acid SEQ ID NO. 34602, or a homolog or fragment thereof, or a homolog thereof being depicted in Table I, application no. 17, column 8, in the same line as SEQ ID NO. 34602, preferably the coding region thereof, a homolog or a fragment thereof; which are operable linked.

[92873] In an embodiment thereof the expression cassette comprises in addition c) a nucleic acid molecule encoding a transit peptide, especially a plastidal transit petide in case in Table I, application no. 17, in column 6 in the same line as SEQ ID NO. 34602 is depicted, plastidic is mentioned, or a mitochondrial transit peptide in case in Table I, application no. 17, in column 6 in the same line as SEQ ID NO. 34602 is depicted, mitochondric is mentioned; which is operable linked, too.

[92874] In another embodiment thereof the expression cassette does not comprise an additional transit peptide in case in Table I, application no. 17, in column 6 in the same line as SEQ ID NO. 34602 is depicted, non-targeted is mentioned.

[92875] In an embodiment the present invention relates to an expresssion cassette comprising a) a promoter, preferably a promoter selected from the group consisting of Big35S, PCUbi, Super and USP, in particular p-PcUBI; and b) the nucleic acid SEQ ID NO. 103433, or a homolog or fragment thereof, or a homolog thereof being depicted in Table I, application no. 17, column 8, in the same line as SEQ ID NO. 103433, preferably the coding region thereof, a homolog or a fragment thereof; which are operable linked.

[92876] In an embodiment thereof the expression cassette comprises in addition c) a nucleic acid molecule encoding a transit peptide, especially a plastidal transit petide in case in Table I, application no. 17, in column 6 in the same line as SEQ ID NO. 103433 is depicted, plastidic is mentioned, or a mitochondrial transit peptide in case in Table I, application no. 17, in column 6 in the same line as SEQ ID NO. 103433 is depicted, mitochondric is mentioned; which is operable linked, too.

[92877] In another embodiment thereof the expression cassette does not comprise an additional transit peptide in case in Table I, application no. 17, in column 6 in the same line as SEQ ID NO. 103433 is depicted, non-targeted is mentioned.

[92878] In an embodiment the present invention relates to an expresssion cassette comprising a) a promoter, preferably a promoter selected from the group consisting of Big35S, PCUbi, Super and USP, in particular p-Super; and b) the nucleic acid SEQ ID NO. 34889, or a homolog or fragment thereof, or a homolog thereof being depicted in Table I, application no. 17, column 8, in the same line as SEQ ID NO. 34889, preferably the coding region thereof, a homolog or a fragment thereof; which are operable linked.

[92879] In an embodiment thereof the expression cassette comprises in addition c) a nucleic acid molecule encoding a transit peptide, especially a plastidal transit petide in case in Table I, application no. 17, in column 6 in the same line as SEQ ID NO. 34889 is depicted, plastidic is mentioned, or a mitochondrial transit peptide in case in Table I, application no. 17, in column 6 in the same line as SEQ ID NO. 34889 is depicted, mitochondric is mentioned; which is operable linked, too.

[92880] In another embodiment thereof the expression cassette does not comprise an additional transit peptide in case in Table I, application no. 17, in column 6 in the same line as SEQ ID NO. 34889 is depicted, non-targeted is mentioned.

[92881] In an embodiment the present invention relates to an expresssion cassette comprising a) a promoter, preferably a promoter selected from the group consisting of Big35S, PCUbi, Super and USP, in particular p-Super; and b) the nucleic acid SEQ ID NO. 103958, or a homolog or fragment thereof, or a homolog thereof being depicted in Table I, application no. 17, column 8, in the same line as SEQ ID NO. 103958, preferably the coding region thereof, a homolog or a fragment thereof; which are operable linked.

[92882] In an embodiment thereof the expression cassette comprises in addition c) a nucleic acid molecule encoding a transit peptide, especially a plastidal transit petide in case in Table I, application no. 17, in column 6 in the same line as SEQ ID NO. 103958 is depicted, plastidic is mentioned, or a mitochondrial transit peptide in case in Table I, application no. 17, in column 6 in the same line as SEQ ID NO. 103958 is depicted, mitochondric is mentioned; which is operable linked, too.

[92883] In another embodiment thereof the expression cassette does not comprise an additional transit peptide in case in Table I, application no. 17, in column 6 in the same line as SEQ ID NO. 103958 is depicted, non-targeted is mentioned.

[92884] In an embodiment the present invention relates to an expresssion cassette comprising a) a promoter, preferably a promoter selected from the group consisting of Big35S, PCUbi, Super and USP, in particular p-USP; and b) the nucleic acid SEQ ID NO. 35204, or a homolog or fragment thereof, or a homolog thereof being depicted in Table I, application no. 17, column 8, in the same line as SEQ ID NO. 35204, preferably the coding region thereof, a homolog or a fragment thereof; which are operable linked.

[92885] In an embodiment thereof the expression cassette comprises in addition c) a nucleic acid molecule encoding a transit peptide, especially a plastidal transit petide in case in Table I, application no. 17, in column 6 in the same line as SEQ ID NO. 35204 is depicted, plastidic is mentioned, or a mitochondrial transit peptide in case in Table I, application no. 17, in column 6 in the same line as SEQ ID NO. 35204 is depicted, mitochondric is mentioned; which is operable linked, too.

[92886] In another embodiment thereof the expression cassette does not comprise an additional transit peptide in case in Table I, application no. 17, in column 6 in the same line as SEQ ID NO. 35204 is depicted, non-targeted is mentioned.

[92887] In an embodiment the present invention relates to an expresssion cassette comprising a) a promoter, preferably a promoter selected from the group consisting of Big35S, PCUbi, Super and USP, in particular p-Super; and b) the nucleic acid SEQ ID NO. 35482, or a homolog or fragment thereof, or a homolog thereof being depicted in Table I, application no. 17, column 8, in the same line as SEQ ID NO. 35482, preferably the coding region thereof, a homolog or a fragment thereof; which are operable linked.

[92888] In an embodiment thereof the expression cassette comprises in addition c) a nucleic acid molecule encoding a transit peptide, especially a plastidal transit petide in case in Table I, application no. 17, in column 6 in the same line as SEQ ID NO. 35482 is depicted, plastidic is mentioned, or a mitochondrial transit peptide in case in Table I, application no. 17, in column 6 in the same line as SEQ ID NO. 35482 is depicted, mitochondric is mentioned; which is operable linked, too.

[92889] In another embodiment thereof the expression cassette does not comprise an additional transit peptide in case in Table I, application no. 17, in column 6 in the same line as SEQ ID NO. 35482 is depicted, non-targeted is mentioned.

[92890] In an embodiment the present invention relates to an expresssion cassette comprising a) a promoter, preferably a promoter selected from the group consisting of Big35S, PCUbi, Super and USP, in particular p-Super; and b) the nucleic acid SEQ ID NO. 7081, or a homolog or fragment thereof, or a homolog thereof being depicted in Table I, application no. 17, column 8, in the same line as SEQ ID NO. 7081, preferably the coding region thereof, a homolog or a fragment thereof; which are operable linked.

[92891] In an embodiment thereof the expression cassette comprises in addition c) a nucleic acid molecule encoding a transit peptide, especially a plastidal transit petide in case in Table I, application no. 17, in column 6 in the same line as SEQ ID NO. 7081 is depicted, plastidic is mentioned, or a mitochondrial transit peptide in case in Table I, application no. 17, in column 6 in the same line as SEQ ID NO. 7081 is depicted, mitochondric is mentioned; which is operable linked, too.

[92892] In another embodiment thereof the expression cassette does not comprise an additional transit peptide in case in Table I, application no. 17, in column 6 in the same line as SEQ ID NO. 7081 is depicted, non-targeted is mentioned.

[92893] In an embodiment the present invention relates to an expresssion cassette comprising a) a promoter, preferably a promoter selected from the group consisting of Big35S, PCUbi, Super and USP, in particular p-Super; and b) the nucleic acid SEQ ID NO. 35590, or a homolog or fragment thereof, or a homolog thereof being depicted in Table I, application no. 17, column 8, in the same line as SEQ ID NO. 35590, preferably the coding region thereof, a homolog or a fragment thereof; which are operable linked.

[92894] In an embodiment thereof the expression cassette comprises in addition c) a nucleic acid molecule encoding a transit peptide, especially a plastidal transit petide in case in Table I, application no. 17, in column 6 in the same line as SEQ ID NO. 35590 is depicted, plastidic is mentioned, or a mitochondrial transit peptide in case in Table I, application no. 17, in column 6 in the same line as SEQ ID NO. 35590 is depicted, mitochondric is mentioned; which is operable linked, too.

[92895] In another embodiment thereof the expression cassette does not comprise an additional transit peptide in case in Table I, application no. 17, in column 6 in the same line as SEQ ID NO. 35590 is depicted, non-targeted is mentioned.

[92896] In an embodiment the present invention relates to an expresssion cassette comprising a) a promoter, preferably a promoter selected from the group consisting of Big35S, PCUbi, Super and USP, in particular p-Super; and b) the nucleic acid SEQ ID NO. 143742, or a homolog or fragment thereof, or a homolog thereof being depicted in Table I, application no. 17, column 8, in the same line as SEQ ID NO. 143742, preferably the coding region thereof, a homolog or a fragment thereof; which are operable linked.

[92897] In an embodiment thereof the expression cassette comprises in addition c) a nucleic acid molecule encoding a transit peptide, especially a plastidal transit petide in case in Table I, application no. 17, in column 6 in the same line as SEQ ID NO. 143742 is depicted, plastidic is mentioned, or a mitochondrial transit peptide in case in Table I, application no. 17, in column 6 in the same line as SEQ ID NO. 143742 is depicted, mitochondric is mentioned; which is operable linked, too.

[92898] In another embodiment thereof the expression cassette does not comprise an additional transit peptide in case in Table I, application no. 17, in column 6 in the same line as SEQ ID NO. 143742 is depicted, non-targeted is mentioned.

[92899] In an embodiment the present invention relates to an expresssion cassette comprising a) a promoter, preferably a promoter selected from the group consisting of Big35S, PCUbi, Super and USP, in particular p-Super; and b) the nucleic acid SEQ ID NO. 121111, or a homolog or fragment thereof, or a homolog thereof being depicted in Table I, application no. 17, column 8, in the same line as SEQ ID NO. 121111, preferably the coding region thereof, a homolog or a fragment thereof; which are operable linked.

[92900] In an embodiment thereof the expression cassette comprises in addition c) a nucleic acid molecule encoding a transit peptide, especially a plastidal transit petide in case in Table I, application no. 17, in column 6 in the same line as SEQ ID NO. 121111 is depicted, plastidic is mentioned, or a mitochondrial transit peptide in case in Table I, application no. 17, in column 6 in the same line as SEQ ID NO. 121111 is depicted, mitochondric is mentioned; which is operable linked, too.

[92901] In another embodiment thereof the expression cassette does not comprise an additional transit peptide in case in Table I, application no. 17, in column 6 in the same line as SEQ ID NO. 121111 is depicted, non-targeted is mentioned.

[92902] In an embodiment the present invention relates to an expresssion cassette comprising a) a promoter, preferably a promoter selected from the group consisting of Big35S, PCUbi, Super and USP, in particular p-USP; and b) the nucleic acid SEQ ID NO. 35733, or a homolog or fragment thereof, or a homolog thereof being depicted in Table I, application no. 17, column 8, in the same line as SEQ ID NO. 35733, preferably the coding region thereof, a homolog or a fragment thereof; which are operable linked.

[92903] In an embodiment thereof the expression cassette comprises in addition c) a nucleic acid molecule encoding a transit peptide, especially a plastidal transit petide in case in Table I, application no. 17, in column 6 in the same line as SEQ ID NO. 35733 is depicted, plastidic is mentioned, or a mitochondrial transit peptide in case in Table I, application no. 17, in column 6 in the same line as SEQ ID NO. 35733 is depicted, mitochondric is mentioned; which is operable linked, too.

[92904] In another embodiment thereof the expression cassette does not comprise an additional transit peptide in case in Table I, application no. 17, in column 6 in the same line as SEQ ID NO. 35733 is depicted, non-targeted is mentioned.

[92905] In an embodiment the present invention relates to an expresssion cassette comprising a) a promoter, preferably a promoter selected from the group consisting of Big35S, PCUbi, Super and USP, in particular p-Super; and b) the nucleic acid SEQ ID NO. 143761, or a homolog or fragment thereof, or a homolog thereof being depicted in Table I, application no. 17, column 8, in the same line as SEQ ID NO. 143761, preferably the coding region thereof, a homolog or a fragment thereof; which are operable linked.

[92906] In an embodiment thereof the expression cassette comprises in addition c) a nucleic acid molecule encoding a transit peptide, especially a plastidal transit petide in case in Table I, application no. 17, in column 6 in the same line as SEQ ID NO. 143761 is depicted, plastidic is mentioned, or a mitochondrial transit peptide in case in Table I, application no. 17, in column 6 in the same line as SEQ ID NO. 143761 is depicted, mitochondric is mentioned; which is operable linked, too.

[92907] In another embodiment thereof the expression cassette does not comprise an additional transit peptide in case in Table I, application no. 17, in column 6 in the same line as SEQ ID NO. 143761 is depicted, non-targeted is mentioned.

[92908] In an embodiment the present invention relates to an expresssion cassette comprising a) a promoter, preferably a promoter selected from the group consisting of Big35S, PCUbi, Super and USP, in particular p-Super; and b) the nucleic acid SEQ ID NO. 143771, or a homolog or fragment thereof, or a homolog thereof being depicted in Table I, application no. 17, column 8, in the same line as SEQ ID NO. 143771, preferably the coding region thereof, a homolog or a fragment thereof; which are operable linked.

[92909] In an embodiment thereof the expression cassette comprises in addition c) a nucleic acid molecule encoding a transit peptide, especially a plastidal transit petide in case in Table I, application no. 17, in column 6 in the same line as SEQ ID NO. 143771 is depicted, plastidic is mentioned, or a mitochondrial transit peptide in case in Table I, application no. 17, in column 6 in the same line as SEQ ID NO. 143771 is depicted, mitochondric is mentioned; which is operable linked, too.

[92910] In another embodiment thereof the expression cassette does not comprise an additional transit peptide in case in Table I, application no. 17, in column 6 in the same line as SEQ ID NO. 143771 is depicted, non-targeted is mentioned.

[92911] In an embodiment the present invention relates to an expresssion cassette comprising a) a promoter, preferably a promoter selected from the group consisting of Big35S, PCUbi, Super and USP, in particular p-Super; and b) the nucleic acid SEQ ID NO. 7333, or a homolog or fragment thereof, or a homolog thereof being depicted in Table I, application no. 17, column 8, in the same line as SEQ ID NO. 7333, preferably the coding region thereof, a homolog or a fragment thereof; which are operable linked.

[92912] In an embodiment thereof the expression cassette comprises in addition c) a nucleic acid molecule encoding a transit peptide, especially a plastidal transit petide in case in Table I, application no. 17, in column 6 in the same line as SEQ ID NO. 7333 is depicted, plastidic is mentioned, or a mitochondrial transit peptide in case in Table I, application no. 17, in column 6 in the same line as SEQ ID NO. 7333 is depicted, mitochondric is mentioned; which is operable linked, too.

[92913] In another embodiment thereof the expression cassette does not comprise an additional transit peptide in case in Table I, application no. 17, in column 6 in the same line as SEQ ID NO. 7333 is depicted, non-targeted is mentioned.

[92914] In an embodiment the present invention relates to an expresssion cassette comprising a) a promoter, preferably a promoter selected from the group consisting of Big35S, PCUbi, Super and USP, in particular p-Super; and b) the nucleic acid SEQ ID NO. 7686, or a homolog or fragment thereof, or a homolog thereof being depicted in Table I, application no. 17, column 8, in the same line as SEQ ID NO. 7686, preferably the coding region thereof, a homolog or a fragment thereof; which are operable linked.

[92915] In an embodiment thereof the expression cassette comprises in addition c) a nucleic acid molecule encoding a transit peptide, especially a plastidal transit petide in case in Table I, application no. 17, in column 6 in the same line as SEQ ID NO. 7686 is depicted, plastidic is mentioned, or a mitochondrial transit peptide in case in Table I, application no. 17, in column 6 in the same line as SEQ ID NO. 7686 is depicted, mitochondric is mentioned; which is operable linked, too.

[92916] In another embodiment thereof the expression cassette does not comprise an additional transit peptide in case in Table I, application no. 17, in column 6 in the same line as SEQ ID NO. 7686 is depicted, non-targeted is mentioned.

[92917] In an embodiment the present invention relates to an expresssion cassette comprising a) a promoter, preferably a promoter selected from the group consisting of Big35S, PCUbi, Super and USP, in particular p-Super; and b) the nucleic acid SEQ ID NO. 143817, or a homolog or fragment thereof, or a homolog thereof being depicted in Table I, application no. 17, column 8, in the same line as SEQ ID NO. 143817, preferably the coding region thereof, a homolog or a fragment thereof; which are operable linked.

[92918] In an embodiment thereof the expression cassette comprises in addition c) a nucleic acid molecule encoding a transit peptide, especially a plastidal transit petide in case in Table I, application no. 17, in column 6 in the same line as SEQ ID NO. 143817 is depicted, plastidic is mentioned, or a mitochondrial transit peptide in case in Table I, application no. 17, in column 6 in the same line as SEQ ID NO. 143817 is depicted, mitochondric is mentioned; which is operable linked, too.

[92919] In another embodiment thereof the expression cassette does not comprise an additional transit peptide in case in Table I, application no. 17, in column 6 in the same line as SEQ ID NO. 143817 is depicted, non-targeted is mentioned.

[92920] In an embodiment the present invention relates to an expresssion cassette comprising a) a promoter, preferably a promoter selected from the group consisting of Big35S, PCUbi, Super and USP, in particular p-USP; and b) the nucleic acid SEQ ID NO. 134402, or a homolog or fragment thereof, or a homolog thereof being depicted in Table I, application no. 17, column 8, in the same line as SEQ ID NO. 134402, preferably the coding region thereof, a homolog or a fragment thereof; which are operable linked.

[92921] In an embodiment thereof the expression cassette comprises in addition c) a nucleic acid molecule encoding a transit peptide, especially a plastidal transit petide in case in Table I, application no. 17, in column 6 in the same line as SEQ ID NO. 134402 is depicted, plastidic is mentioned, or a mitochondrial transit peptide in case in Table I, application no. 17, in column 6 in the same line as SEQ ID NO. 134402 is depicted, mitochondric is mentioned; which is operable linked, too.

[92922] In another embodiment thereof the expression cassette does not comprise an additional transit peptide in case in Table I, application no. 17, in column 6 in the same line as SEQ ID NO. 134402 is depicted, non-targeted is mentioned.

[92923] In an embodiment the present invention relates to an expresssion cassette comprising a) a promoter, preferably a promoter selected from the group consisting of Big35S, PCUbi, Super and USP, in particular p-Super; and b) the nucleic acid SEQ ID NO. 35967, or a homolog or fragment thereof, or a homolog thereof being depicted in Table I, application no. 17, column 8, in the same line as SEQ ID NO. 35967, preferably the coding region thereof, a homolog or a fragment thereof; which are operable linked.

[92924] In an embodiment thereof the expression cassette comprises in addition c) a nucleic acid molecule encoding a transit peptide, especially a plastidal transit petide in case in Table I, application no. 17, in column 6 in the same line as SEQ ID NO. 35967 is depicted, plastidic is mentioned, or a mitochondrial transit peptide in case in Table I, application no. 17, in column 6 in the same line as SEQ ID NO. 35967 is depicted, mitochondric is mentioned; which is operable linked, too.

[92925] In another embodiment thereof the expression cassette does not comprise an additional transit peptide in case in Table I, application no. 17, in column 6 in the same line as SEQ ID NO. 35967 is depicted, non-targeted is mentioned.

[92926] In an embodiment the present invention relates to an expresssion cassette comprising a) a promoter, preferably a promoter selected from the group consisting of Big35S, PCUbi, Super and USP, in particular p-Super; and b) the nucleic acid SEQ ID NO. 143901, or a homolog or fragment thereof, or a homolog thereof being depicted in Table I, application no. 17, column 8, in the same line as SEQ ID NO. 143901, preferably the coding region thereof, a homolog or a fragment thereof; which are operable linked.

[92927] In an embodiment thereof the expression cassette comprises in addition c) a nucleic acid molecule encoding a transit peptide, especially a plastidal transit petide in case in Table I, application no. 17, in column 6 in the same line as SEQ ID NO. 143901 is depicted, plastidic is mentioned, or a mitochondrial transit peptide in case in Table I, application no. 17, in column 6 in the same line as SEQ ID NO. 143901 is depicted, mitochondric is mentioned; which is operable linked, too.

[92928] In another embodiment thereof the expression cassette does not comprise an additional transit peptide in case in Table I, application no. 17, in column 6 in the same line as SEQ ID NO. 143901 is depicted, non-targeted is mentioned.

[92929] In an embodiment the present invention relates to an expresssion cassette comprising a) a promoter, preferably a promoter selected from the group consisting of Big35S, PCUbi, Super and USP, in particular p-Super; and b) the nucleic acid SEQ ID NO. 143954, or a homolog or fragment thereof, or a homolog thereof being depicted in Table I, application no. 17, column 8, in the same line as SEQ ID NO. 143954, preferably the coding region thereof, a homolog or a fragment thereof; which are operable linked.

[92930] In an embodiment thereof the expression cassette comprises in addition c) a nucleic acid molecule encoding a transit peptide, especially a plastidal transit petide in case in Table I, application no. 17, in column 6 in the same line as SEQ ID NO. 143954 is depicted, plastidic is mentioned, or a mitochondrial transit peptide in case in Table I, application no. 17, in column 6 in the same line as SEQ ID NO. 143954 is depicted, mitochondric is mentioned; which is operable linked, too.

[92931] In another embodiment thereof the expression cassette does not comprise an additional transit peptide in case in Table I, application no. 17, in column 6 in the same line as SEQ ID NO. 143954 is depicted, non-targeted is mentioned.

[92932] In an embodiment the present invention relates to an expresssion cassette comprising a) a promoter, preferably a promoter selected from the group consisting of Big35S, PCUbi, Super and USP, in particular p-USP; and b) the nucleic acid SEQ ID NO. 144207, or a homolog or fragment thereof, or a homolog thereof being depicted in Table I, application no. 17, column 8, in the same line as SEQ ID NO. 144207, preferably the coding region thereof, a homolog or a fragment thereof; which are operable linked.

[92933] In an embodiment thereof the expression cassette comprises in addition c) a nucleic acid molecule encoding a transit peptide, especially a plastidal transit petide in case in Table I, application no. 17, in column 6 in the same line as SEQ ID NO. 144207 is depicted, plastidic is mentioned, or a mitochondrial transit peptide in case in Table I, application no. 17, in column 6 in the same line as SEQ ID NO. 144207 is depicted, mitochondric is mentioned; which is operable linked, too.

[92934] In another embodiment thereof the expression cassette does not comprise an additional transit peptide in case in Table I, application no. 17, in column 6 in the same line as SEQ ID NO. 144207 is depicted, non-targeted is mentioned.

[92935] In an embodiment the present invention relates to an expresssion cassette comprising a) a promoter, preferably a promoter selected from the group consisting of Big35S, PCUbi, Super and USP, in particular p-Super; and b) the nucleic acid SEQ ID NO. 93678, or a homolog or fragment thereof, or a homolog thereof being depicted in Table I, application no. 17, column 8, in the same line as SEQ ID NO. 93678, preferably the coding region thereof, a homolog or a fragment thereof; which are operable linked.

[92936] In an embodiment thereof the expression cassette comprises in addition c) a nucleic acid molecule encoding a transit peptide, especially a plastidal transit petide in case in Table I, application no. 17, in column 6 in the same line as SEQ ID NO. 93678 is depicted, plastidic is mentioned, or a mitochondrial transit peptide in case in Table I, application no. 17, in column 6 in the same line as SEQ ID NO. 93678 is depicted, mitochondric is mentioned; which is operable linked, too.

[92937] In another embodiment thereof the expression cassette does not comprise an additional transit peptide in case in Table I, application no. 17, in column 6 in the same line as SEQ ID NO. 93678 is depicted, non-targeted is mentioned.

[92938] In an embodiment the present invention relates to an expresssion cassette comprising a) a promoter, preferably a promoter selected from the group consisting of Big35S, PCUbi, Super and USP, in particular p-Super; and b) the nucleic acid SEQ ID NO. 93793, or a homolog or fragment thereof, or a homolog thereof being depicted in Table I, application no. 17, column 8, in the same line as SEQ ID NO. 93793, preferably the coding region thereof, a homolog or a fragment thereof; which are operable linked.

[92939] In an embodiment thereof the expression cassette comprises in addition c) a nucleic acid molecule encoding a transit peptide, especially a plastidal transit petide in case in Table I, application no. 17, in column 6 in the same line as SEQ ID NO. 93793 is depicted, plastidic is mentioned, or a mitochondrial transit peptide in case in Table I, application no. 17, in column 6 in the same line as SEQ ID NO. 93793 is depicted, mitochondric is mentioned; which is operable linked, too.

[92940] In another embodiment thereof the expression cassette does not comprise an additional transit peptide in case in Table I, application no. 17, in column 6 in the same line as SEQ ID NO. 93793 is depicted, non-targeted is mentioned.

[92941] In an embodiment the present invention relates to an expresssion cassette comprising a) a promoter, preferably a promoter selected from the group consisting of Big35S, PCUbi, Super and USP, in particular p-Super; and b) the nucleic acid SEQ ID NO. 36114, or a homolog or fragment thereof, or a homolog thereof being depicted in Table I, application no. 17, column 8, in the same line as SEQ ID NO. 36114, preferably the coding region thereof, a homolog or a fragment thereof; which are operable linked.

[92942] In an embodiment thereof the expression cassette comprises in addition c) a nucleic acid molecule encoding a transit peptide, especially a plastidal transit petide in case in Table I, application no. 17, in column 6 in the same line as SEQ ID NO. 36114 is depicted, plastidic is mentioned, or a mitochondrial transit peptide in case in Table I, application no. 17, in column 6 in the same line as SEQ ID NO. 36114 is depicted, mitochondric is mentioned; which is operable linked, too.

[92943] In another embodiment thereof the expression cassette does not comprise an additional transit peptide in case in Table I, application no. 17, in column 6 in the same line as SEQ ID NO. 36114 is depicted, non-targeted is mentioned.

[92944] In an embodiment the present invention relates to an expresssion cassette comprising a) a promoter, preferably a promoter selected from the group consisting of Big35S, PCUbi, Super and USP, in particular p-Super; and b) the nucleic acid SEQ ID NO. 75807, or a homolog or fragment thereof, or a homolog thereof being depicted in Table I, application no. 17, column 8, in the same line as SEQ ID NO. 75807, preferably the coding region thereof, a homolog or a fragment thereof; which are operable linked.

[92945] In an embodiment thereof the expression cassette comprises in addition c) a nucleic acid molecule encoding a transit peptide, especially a plastidal transit petide in case in Table I, application no. 17, in column 6 in the same line as SEQ ID NO. 75807 is depicted, plastidic is mentioned, or a mitochondrial transit peptide in case in Table I, application no. 17, in column 6 in the same line as SEQ ID NO. 75807 is depicted, mitochondric is mentioned; which is operable linked, too.

[92946] In another embodiment thereof the expression cassette does not comprise an additional transit peptide in case in Table I, application no. 17, in column 6 in the same line as SEQ ID NO. 75807 is depicted, non-targeted is mentioned.

[92947] In an embodiment the present invention relates to an expresssion cassette comprising a) a promoter, preferably a promoter selected from the group consisting of Big35S, PCUbi, Super and USP, in particular p-Super; and b) the nucleic acid SEQ ID NO. 131359, or a homolog or fragment thereof, or a homolog thereof being depicted in Table I, application no. 17, column 8, in the same line as SEQ ID NO. 131359, preferably the coding region thereof, a homolog or a fragment thereof; which are operable linked.

[92948] In an embodiment thereof the expression cassette comprises in addition c) a nucleic acid molecule encoding a transit peptide, especially a plastidal transit petide in case in Table I, application no. 17, in column 6 in the same line as SEQ ID NO. 131359 is depicted, plastidic is mentioned, or a mitochondrial transit peptide in case in Table I, application no. 17, in column 6 in the same line as SEQ ID NO. 131359 is depicted, mitochondric is mentioned; which is operable linked, too.

[92949] In another embodiment thereof the expression cassette does not comprise an additional transit peptide in case in Table I, application no. 17, in column 6 in the same line as SEQ ID NO. 131359 is depicted, non-targeted is mentioned.

[92950] In an embodiment the present invention relates to an expresssion cassette comprising a) a promoter, preferably a promoter selected from the group consisting of Big35S, PCUbi, Super and USP, in particular p-Super; and b) the nucleic acid SEQ ID NO. 36489, or a homolog or fragment thereof, or a homolog thereof being depicted in Table I, application no. 17, column 8, in the same line as SEQ ID NO. 36489, preferably the coding region thereof, a homolog or a fragment thereof; which are operable linked.

[92951] In an embodiment thereof the expression cassette comprises in addition c) a nucleic acid molecule encoding a transit peptide, especially a plastidal transit petide in case in Table I, application no. 17, in column 6 in the same line as SEQ ID NO. 36489 is depicted, plastidic is mentioned, or a mitochondrial transit peptide in case in Table I, application no. 17, in column 6 in the same line as SEQ ID NO. 36489 is depicted, mitochondric is mentioned; which is operable linked, too.

[92952] In another embodiment thereof the expression cassette does not comprise an additional transit peptide in case in Table I, application no. 17, in column 6 in the same line as SEQ ID NO. 36489 is depicted, non-targeted is mentioned.

[92953] In an embodiment the present invention relates to an expresssion cassette comprising a) a promoter, preferably a promoter selected from the group consisting of Big35S, PCUbi, Super and USP, in particular p-Super; and b) the nucleic acid SEQ ID NO. 144479, or a homolog or fragment thereof, or a homolog thereof being depicted in Table I, application no. 17, column 8, in the same line as SEQ ID NO. 144479, preferably the coding region thereof, a homolog or a fragment thereof; which are operable linked.

[92954] In an embodiment thereof the expression cassette comprises in addition c) a nucleic acid molecule encoding a transit peptide, especially a plastidal transit petide in case in Table I, application no. 17, in column 6 in the same line as SEQ ID NO. 144479 is depicted, plastidic is mentioned, or a mitochondrial transit peptide in case in Table I, application no. 17, in column 6 in the same line as SEQ ID NO. 144479 is depicted, mitochondric is mentioned; which is operable linked, too.

[92955] In another embodiment thereof the expression cassette does not comprise an additional transit peptide in case in Table I, application no. 17, in column 6 in the same line as SEQ ID NO. 144479 is depicted, non-targeted is mentioned.

[92956] In an embodiment the present invention relates to an expresssion cassette comprising a) a promoter, preferably a promoter selected from the group consisting of Big35S, PCUbi, Super and USP, in particular p-USP; and b) the nucleic acid SEQ ID NO. 36809, or a homolog or fragment thereof, or a homolog thereof being depicted in Table I, application no. 17, column 8, in the same line as SEQ ID NO. 36809, preferably the coding region thereof, a homolog or a fragment thereof; which are operable linked.

[92957] In an embodiment thereof the expression cassette comprises in addition c) a nucleic acid molecule encoding a transit peptide, especially a plastidal transit petide in case in Table I, application no. 17, in column 6 in the same line as SEQ ID NO. 36809 is depicted, plastidic is mentioned, or a mitochondrial transit peptide in case in Table I, application no. 17, in column 6 in the same line as SEQ ID NO. 36809 is depicted, mitochondric is mentioned; which is operable linked, too.

[92958] In another embodiment thereof the expression cassette does not comprise an additional transit peptide in case in Table I, application no. 17, in column 6 in the same line as SEQ ID NO. 36809 is depicted, non-targeted is mentioned.

[92959] In an embodiment the present invention relates to an expresssion cassette comprising a) a promoter, preferably a promoter selected from the group consisting of Big35S, PCUbi, Super and USP, in particular p-Super; and b) the nucleic acid SEQ ID NO. 7941, or a homolog or fragment thereof, or a homolog thereof being depicted in Table I, application no. 17, column 8, in the same line as SEQ ID NO. 7941, preferably the coding region thereof, a homolog or a fragment thereof; which are operable linked.

[92960] In an embodiment thereof the expression cassette comprises in addition c) a nucleic acid molecule encoding a transit peptide, especially a plastidal transit petide in case in Table I, application no. 17, in column 6 in the same line as SEQ ID NO. 7941 is depicted, plastidic is mentioned, or a mitochondrial transit peptide in case in Table I, application no. 17, in column 6 in the same line as SEQ ID NO. 7941 is depicted, mitochondric is mentioned; which is operable linked, too.

[92961] In another embodiment thereof the expression cassette does not comprise an additional transit peptide in case in Table I, application no. 17, in column 6 in the same line as SEQ ID NO. 7941 is depicted, non-targeted is mentioned.

[92962] In an embodiment the present invention relates to an expresssion cassette comprising a) a promoter, preferably a promoter selected from the group consisting of Big35S, PCUbi, Super and USP, in particular p-Super; and b) the nucleic acid SEQ ID NO. 124051, or a homolog or fragment thereof, or a homolog thereof being depicted in Table I, application no. 17, column 8, in the same line as SEQ ID NO. 124051, preferably the coding region thereof, a homolog or a fragment thereof; which are operable linked.

[92963] In an embodiment thereof the expression cassette comprises in addition c) a nucleic acid molecule encoding a transit peptide, especially a plastidal transit petide in case in Table I, application no. 17, in column 6 in the same line as SEQ ID NO. 124051 is depicted, plastidic is mentioned, or a mitochondrial transit peptide in case in Table I, application no. 17, in column 6 in the same line as SEQ ID NO. 124051 is depicted, mitochondric is mentioned; which is operable linked, too.

[92964] In another embodiment thereof the expression cassette does not comprise an additional transit peptide in case in Table I, application no. 17, in column 6 in the same line as SEQ ID NO. 124051 is depicted, non-targeted is mentioned.

[92965] In an embodiment the present invention relates to an expresssion cassette comprising a) a promoter, preferably a promoter selected from the group consisting of Big35S, PCUbi, Super and USP, in particular p-Super; and b) the nucleic acid SEQ ID NO. 76032, or a homolog or fragment thereof, or a homolog thereof being depicted in Table I, application no. 17, column 8, in the same line as SEQ ID NO. 76032, preferably the coding region thereof, a homolog or a fragment thereof; which are operable linked.

[92966] In an embodiment thereof the expression cassette comprises in addition c) a nucleic acid molecule encoding a transit peptide, especially a plastidal transit petide in case in Table I, application no. 17, in column 6 in the same line as SEQ ID NO. 76032 is depicted, plastidic is mentioned, or a mitochondrial transit peptide in case in Table I, application no. 17, in column 6 in the same line as SEQ ID NO. 76032 is depicted, mitochondric is mentioned; which is operable linked, too.

[92967] In another embodiment thereof the expression cassette does not comprise an additional transit peptide in case in Table I, application no. 17, in column 6 in the same line as SEQ ID NO. 76032 is depicted, non-targeted is mentioned.

[92968] In an embodiment the present invention relates to an expresssion cassette comprising a) a promoter, preferably a promoter selected from the group consisting of Big35S, PCUbi, Super and USP, in particular p-Super; and b) the nucleic acid SEQ ID NO. 114979, or a homolog or fragment thereof, or a homolog thereof being depicted in Table I, application no. 17, column 8, in the same line as SEQ ID NO. 114979, preferably the coding region thereof, a homolog or a fragment thereof; which are operable linked.

[92969] In an embodiment thereof the expression cassette comprises in addition c) a nucleic acid molecule encoding a transit peptide, especially a plastidal transit petide in case in Table I, application no. 17, in column 6 in the same line as SEQ ID NO. 114979 is depicted, plastidic is mentioned, or a mitochondrial transit peptide in case in Table I, application no. 17, in column 6 in the same line as SEQ ID NO. 114979 is depicted, mitochondric is mentioned; which is operable linked, too.

[92970] In another embodiment thereof the expression cassette does not comprise an additional transit peptide in case in Table I, application no. 17, in column 6 in the same line as SEQ ID NO. 114979 is depicted, non-targeted is mentioned.

[92971] In an embodiment the present invention relates to an expresssion cassette comprising a) a promoter, preferably a promoter selected from the group consisting of Big35S, PCUbi, Super and USP, in particular p-Super; and b) the nucleic acid SEQ ID NO. 144611, or a homolog or fragment thereof, or a homolog thereof being depicted in Table I, application no. 17, column 8, in the same line as SEQ ID NO. 144611, preferably the coding region thereof, a homolog or a fragment thereof; which are operable linked.

[92972] In an embodiment thereof the expression cassette comprises in addition c) a nucleic acid molecule encoding a transit peptide, especially a plastidal transit petide in case in Table I, application no. 17, in column 6 in the same line as SEQ ID NO. 144611 is depicted, plastidic is mentioned, or a mitochondrial transit peptide in case in Table I, application no. 17, in column 6 in the same line as SEQ ID NO. 144611 is depicted, mitochondric is mentioned; which is operable linked, too.

[92973] In another embodiment thereof the expression cassette does not comprise an additional transit peptide in case in Table I, application no. 17, in column 6 in the same line as SEQ ID NO. 144611 is depicted, non-targeted is mentioned.

[92974] In an embodiment the present invention relates to an expresssion cassette comprising a) a promoter, preferably a promoter selected from the group consisting of Big35S, PCUbi, Super and USP, in particular p-Super; and b) the nucleic acid SEQ ID NO. 36971, or a homolog or fragment thereof, or a homolog thereof being depicted in Table I, application no. 17, column 8, in the same line as SEQ ID NO. 36971, preferably the coding region thereof, a homolog or a fragment thereof; which are operable linked.

[92975] In an embodiment thereof the expression cassette comprises in addition c) a nucleic acid molecule encoding a transit peptide, especially a plastidal transit petide in case in Table I, application no. 17, in column 6 in the same line as SEQ ID NO. 36971 is depicted, plastidic is mentioned, or a mitochondrial transit peptide in case in Table I, application no. 17, in column 6 in the same line as SEQ ID NO. 36971 is depicted, mitochondric is mentioned; which is operable linked, too.

[92976] In another embodiment thereof the expression cassette does not comprise an additional transit peptide in case in Table I, application no. 17, in column 6 in the same line as SEQ ID NO. 36971 is depicted, non-targeted is mentioned.

[92977] In an embodiment the present invention relates to an expresssion cassette comprising a) a promoter, preferably a promoter selected from the group consisting of Big35S, PCUbi, Super and USP, in particular p-Super; and b) the nucleic acid SEQ ID NO. 37390, or a homolog or fragment thereof, or a homolog thereof being depicted in Table I, application no. 17, column 8, in the same line as SEQ ID NO. 37390, preferably the coding region thereof, a homolog or a fragment thereof; which are operable linked.

[92978] In an embodiment thereof the expression cassette comprises in addition c) a nucleic acid molecule encoding a transit peptide, especially a plastidal transit petide in case in Table I, application no. 17, in column 6 in the same line as SEQ ID NO. 37390 is depicted, plastidic is mentioned, or a mitochondrial transit peptide in case in Table I, application no. 17, in column 6 in the same line as SEQ ID NO. 37390 is depicted, mitochondric is mentioned; which is operable linked, too.

[92979] In another embodiment thereof the expression cassette does not comprise an additional transit peptide in case in Table I, application no. 17, in column 6 in the same line as SEQ ID NO. 37390 is depicted, non-targeted is mentioned.

[92980] In an embodiment the present invention relates to an expresssion cassette comprising a) a promoter, preferably a promoter selected from the group consisting of Big35S, PCUbi, Super and USP, in particular p-Super; and b) the nucleic acid SEQ ID NO. 37400, or a homolog or fragment thereof, or a homolog thereof being depicted in Table I, application no. 17, column 8, in the same line as SEQ ID NO. 37400, preferably the coding region thereof, a homolog or a fragment thereof; which are operable linked.

[92981] In an embodiment thereof the expression cassette comprises in addition c) a nucleic acid molecule encoding a transit peptide, especially a plastidal transit petide in case in Table I, application no. 17, in column 6 in the same line as SEQ ID NO. 37400 is depicted, plastidic is mentioned, or a mitochondrial transit peptide in case in Table I, application no. 17, in column 6 in the same line as SEQ ID NO. 37400 is depicted, mitochondric is mentioned; which is operable linked, too.

[92982] In another embodiment thereof the expression cassette does not comprise an additional transit peptide in case in Table I, application no. 17, in column 6 in the same line as SEQ ID NO. 37400 is depicted, non-targeted is mentioned.

[92983] In an embodiment the present invention relates to an expresssion cassette comprising a) a promoter, preferably a promoter selected from the group consisting of Big35S, PCUbi, Super and USP, in particular p-Super; and b) the nucleic acid SEQ ID NO. 144857, or a homolog or fragment thereof, or a homolog thereof being depicted in Table I, application no. 17, column 8, in the same line as SEQ ID NO. 144857, preferably the coding region thereof, a homolog or a fragment thereof; which are operable linked.

[92984] In an embodiment thereof the expression cassette comprises in addition c) a nucleic acid molecule encoding a transit peptide, especially a plastidal transit petide in case in Table I, application no. 17, in column 6 in the same line as SEQ ID NO. 144857 is depicted, plastidic is mentioned, or a mitochondrial transit peptide in case in Table I, application no. 17, in column 6 in the same line as SEQ ID NO. 144857 is depicted, mitochondric is mentioned; which is operable linked, too.

[92985] In another embodiment thereof the expression cassette does not comprise an additional transit peptide in case in Table I, application no. 17, in column 6 in the same line as SEQ ID NO. 144857 is depicted, non-targeted is mentioned.

[92986] In an embodiment the present invention relates to an expresssion cassette comprising a) a promoter, preferably a promoter selected from the group consisting of Big35S, PCUbi, Super and USP, in particular p-Super; and b) the nucleic acid SEQ ID NO. 112072, or a homolog or fragment thereof, or a homolog thereof being depicted in Table I, application no. 17, column 8, in the same line as SEQ ID NO. 112072, preferably the coding region thereof, a homolog or a fragment thereof; which are operable linked.

[92987] In an embodiment thereof the expression cassette comprises in addition c) a nucleic acid molecule encoding a transit peptide, especially a plastidal transit petide in case in Table I, application no. 17, in column 6 in the same line as SEQ ID NO. 112072 is depicted, plastidic is mentioned, or a mitochondrial transit peptide in case in Table I, application no. 17, in column 6 in the same line as SEQ ID NO. 112072 is depicted, mitochondric is mentioned; which is operable linked, too.

[92988] In another embodiment thereof the expression cassette does not comprise an additional transit peptide in case in Table I, application no. 17, in column 6 in the same line as SEQ ID NO. 112072 is depicted, non-targeted is mentioned.

[92989] In an embodiment the present invention relates to an expresssion cassette comprising a) a promoter, preferably a promoter selected from the group consisting of Big35S, PCUbi, Super and USP, in particular p-Super; and b) the nucleic acid SEQ ID NO. 112111, or a homolog or fragment thereof, or a homolog thereof being depicted in Table I, application no. 17, column 8, in the same line as SEQ ID NO. 112111, preferably the coding region thereof, a homolog or a fragment thereof; which are operable linked.

[92990] In an embodiment thereof the expression cassette comprises in addition c) a nucleic acid molecule encoding a transit peptide, especially a plastidal transit petide in case in Table I, application no. 17, in column 6 in the same line as SEQ ID NO. 112111 is depicted, plastidic is mentioned, or a mitochondrial transit peptide in case in Table I, application no. 17, in column 6 in the same line as SEQ ID NO. 112111 is depicted, mitochondric is mentioned; which is operable linked, too.

[92991] In another embodiment thereof the expression cassette does not comprise an additional transit peptide in case in Table I, application no. 17, in column 6 in the same line as SEQ ID NO. 112111 is depicted, non-targeted is mentioned.

[92992] In an embodiment the present invention relates to an expresssion cassette comprising a) a promoter, preferably a promoter selected from the group consisting of Big35S, PCUbi, Super and USP, in particular p-USP; and b) the nucleic acid SEQ ID NO. 98778, or a homolog or fragment thereof, or a homolog thereof being depicted in Table I, application no. 17, column 8, in the same line as SEQ ID NO. 98778, preferably the coding region thereof, a homolog or a fragment thereof; which are operable linked.

[92993] In an embodiment thereof the expression cassette comprises in addition c) a nucleic acid molecule encoding a transit peptide, especially a plastidal transit petide in case in Table I, application no. 17, in column 6 in the same line as SEQ ID NO. 98778 is depicted, plastidic is mentioned, or a mitochondrial transit peptide in case in Table I, application no. 17, in column 6 in the same line as SEQ ID NO. 98778 is depicted, mitochondric is mentioned; which is operable linked, too.

[92994] In another embodiment thereof the expression cassette does not comprise an additional transit peptide in case in Table I, application no. 17, in column 6 in the same line as SEQ ID NO. 98778 is depicted, non-targeted is mentioned.

[92995] In an embodiment the present invention relates to an expresssion cassette comprising a) a promoter, preferably a promoter selected from the group consisting of Big35S, PCUbi, Super and USP, in particular p-Super; and b) the nucleic acid SEQ ID NO. 144894, or a homolog or fragment thereof, or a homolog thereof being depicted in Table I, application no. 17, column 8, in the same line as SEQ ID NO. 144894, preferably the coding region thereof, a homolog or a fragment thereof; which are operable linked.

[92996] In an embodiment thereof the expression cassette comprises in addition c) a nucleic acid molecule encoding a transit peptide, especially a plastidal transit petide in case in Table I, application no. 17, in column 6 in the same line as SEQ ID NO. 144894 is depicted, plastidic is mentioned, or a mitochondrial transit peptide in case in Table I, application no. 17, in column 6 in the same line as SEQ ID NO. 144894 is depicted, mitochondric is mentioned; which is operable linked, too.

[92997] In another embodiment thereof the expression cassette does not comprise an additional transit peptide in case in Table I, application no. 17, in column 6 in the same line as SEQ ID NO. 144894 is depicted, non-targeted is mentioned.

[92998] In an embodiment the present invention relates to an expresssion cassette comprising a) a promoter, preferably a promoter selected from the group consisting of Big35S, PCUbi, Super and USP, in particular p-Super; and b) the nucleic acid SEQ ID NO. 37483, or a homolog or fragment thereof, or a homolog thereof being depicted in Table I, application no. 17, column 8, in the same line as SEQ ID NO. 37483, preferably the coding region thereof, a homolog or a fragment thereof; which are operable linked.

[92999] In an embodiment thereof the expression cassette comprises in addition c) a nucleic acid molecule encoding a transit peptide, especially a plastidal transit petide in case in Table I, application no. 17, in column 6 in the same line as SEQ ID NO. 37483 is depicted, plastidic is mentioned, or a mitochondrial transit peptide in case in Table I, application no. 17, in column 6 in the same line as SEQ ID NO. 37483 is depicted, mitochondric is mentioned; which is operable linked, too.

[93000] In another embodiment thereof the expression cassette does not comprise an additional transit peptide in case in Table I, application no. 17, in column 6 in the same line as SEQ ID NO. 37483 is depicted, non-targeted is mentioned.

[93001] In an embodiment the present invention relates to an expresssion cassette comprising a) a promoter, preferably a promoter selected from the group consisting of Big35S, PCUbi, Super and USP, in particular p-USP; and b) the nucleic acid SEQ ID NO. 76157, or a homolog or fragment thereof, or a homolog thereof being depicted in Table I, application no. 17, column 8, in the same line as SEQ ID NO. 76157, preferably the coding region thereof, a homolog or a fragment thereof; which are operable linked.

[93002] In an embodiment thereof the expression cassette comprises in addition c) a nucleic acid molecule encoding a transit peptide, especially a plastidal transit petide in case in Table I, application no. 17, in column 6 in the same line as SEQ ID NO. 76157 is depicted, plastidic is mentioned, or a mitochondrial transit peptide in case in Table I, application no. 17, in column 6 in the same line as SEQ ID NO. 76157 is depicted, mitochondric is mentioned; which is operable linked, too.

[93003] In another embodiment thereof the expression cassette does not comprise an additional transit peptide in case in Table I, application no. 17, in column 6 in the same line as SEQ ID NO. 76157 is depicted, non-targeted is mentioned.

[93004] In an embodiment the present invention relates to an expresssion cassette comprising a) a promoter, preferably a promoter selected from the group consisting of Big35S, PCUbi, Super and USP, in particular p-Super; and b) the nucleic acid SEQ ID NO. 134655, or a homolog or fragment thereof, or a homolog thereof being depicted in Table I, application no. 17, column 8, in the same line as SEQ ID NO. 134655, preferably the coding region thereof, a homolog or a fragment thereof; which are operable linked.

[93005] In an embodiment thereof the expression cassette comprises in addition c) a nucleic acid molecule encoding a transit peptide, especially a plastidal transit petide in case in Table I, application no. 17, in column 6 in the same line as SEQ ID NO. 134655 is depicted, plastidic is mentioned, or a mitochondrial transit peptide in case in Table I, application no. 17, in column 6 in the same line as SEQ ID NO. 134655 is depicted, mitochondric is mentioned; which is operable linked, too.

[93006] In another embodiment thereof the expression cassette does not comprise an additional transit peptide in case in Table I, application no. 17, in column 6 in the same line as SEQ ID NO. 134655 is depicted, non-targeted is mentioned.

[93007] In an embodiment the present invention relates to an expresssion cassette comprising a) a promoter, preferably a promoter selected from the group consisting of Big35S, PCUbi, Super and USP, in particular p-Super; and b) the nucleic acid SEQ ID NO. 124557, or a homolog or fragment thereof, or a homolog thereof being depicted in Table I, application no. 17, column 8, in the same line as SEQ ID NO. 124557, preferably the coding region thereof, a homolog or a fragment thereof; which are operable linked.

[93008] In an embodiment thereof the expression cassette comprises in addition c) a nucleic acid molecule encoding a transit peptide, especially a plastidal transit petide in case in Table I, application no. 17, in column 6 in the same line as SEQ ID NO. 124557 is depicted, plastidic is mentioned, or a mitochondrial transit peptide in case in Table I, application no. 17, in column 6 in the same line as SEQ ID NO. 124557 is depicted, mitochondric is mentioned; which is operable linked, too.

[93009] In another embodiment thereof the expression cassette does not comprise an additional transit peptide in case in Table I, application no. 17, in column 6 in the same line as SEQ ID NO. 124557 is depicted, non-targeted is mentioned.

[93010] In an embodiment the present invention relates to an expresssion cassette comprising a) a promoter, preferably a promoter selected from the group consisting of Big35S, PCUbi, Super and USP, in particular p-Super; and b) the nucleic acid SEQ ID NO. 145066, or a homolog or fragment thereof, or a homolog thereof being depicted in Table I, application no. 17, column 8, in the same line as SEQ ID NO. 145066, preferably the coding region thereof, a homolog or a fragment thereof; which are operable linked.

[93011] In an embodiment thereof the expression cassette comprises in addition c) a nucleic acid molecule encoding a transit peptide, especially a plastidal transit petide in case in Table I, application no. 17, in column 6 in the same line as SEQ ID NO. 145066 is depicted, plastidic is mentioned, or a mitochondrial transit peptide in case in Table I, application no. 17, in column 6 in the same line as SEQ ID NO. 145066 is depicted, mitochondric is mentioned; which is operable linked, too.

[93012] In another embodiment thereof the expression cassette does not comprise an additional transit peptide in case in Table I, application no. 17, in column 6 in the same line as SEQ ID NO. 145066 is depicted, non-targeted is mentioned.

[93013] In an embodiment the present invention relates to an expresssion cassette comprising a) a promoter, preferably a promoter selected from the group consisting of Big35S, PCUbi, Super and USP, in particular p-Super; and b) the nucleic acid SEQ ID NO. 134697, or a homolog or fragment thereof, or a homolog thereof being depicted in Table I, application no. 17, column 8, in the same line as SEQ ID NO. 134697, preferably the coding region thereof, a homolog or a fragment thereof; which are operable linked.

[93014] In an embodiment thereof the expression cassette comprises in addition c) a nucleic acid molecule encoding a transit peptide, especially a plastidal transit petide in case in Table I, application no. 17, in column 6 in the same line as SEQ ID NO. 134697 is depicted, plastidic is mentioned, or a mitochondrial transit peptide in case in Table I, application no. 17, in column 6 in the same line as SEQ ID NO. 134697 is depicted, mitochondric is mentioned; which is operable linked, too.

[93015] In another embodiment thereof the expression cassette does not comprise an additional transit peptide in case in Table I, application no. 17, in column 6 in the same line as SEQ ID NO. 134697 is depicted, non-targeted is mentioned.

[93016] In an embodiment the present invention relates to an expresssion cassette comprising a) a promoter, preferably a promoter selected from the group consisting of Big35S, PCUbi, Super and USP, in particular p-Super; and b) the nucleic acid SEQ ID NO. 131489, or a homolog or fragment thereof, or a homolog thereof being depicted in Table I, application no. 17, column 8, in the same line as SEQ ID NO. 131489, preferably the coding region thereof, a homolog or a fragment thereof; which are operable linked.

[93017] In an embodiment thereof the expression cassette comprises in addition c) a nucleic acid molecule encoding a transit peptide, especially a plastidal transit petide in case in Table I, application no. 17, in column 6 in the same line as SEQ ID NO. 131489 is depicted, plastidic is mentioned, or a mitochondrial transit peptide in case in Table I, application no. 17, in column 6 in the same line as SEQ ID NO. 131489 is depicted, mitochondric is mentioned; which is operable linked, too.

[93018] In another embodiment thereof the expression cassette does not comprise an additional transit peptide in case in Table I, application no. 17, in column 6 in the same line as SEQ ID NO. 131489 is depicted, non-targeted is mentioned.

[93019] In an embodiment the present invention relates to an expresssion cassette comprising a) a promoter, preferably a promoter selected from the group consisting of Big35S, PCUbi, Super and USP, in particular p-Super; and b) the nucleic acid SEQ ID NO. 145091, or a homolog or fragment thereof, or a homolog thereof being depicted in Table I, application no. 17, column 8, in the same line as SEQ ID NO. 145091, preferably the coding region thereof, a homolog or a fragment thereof; which are operable linked.

[93020] In an embodiment thereof the expression cassette comprises in addition c) a nucleic acid molecule encoding a transit peptide, especially a plastidal transit petide in case in Table I, application no. 17, in column 6 in the same line as SEQ ID NO. 145091 is depicted, plastidic is mentioned, or a mitochondrial transit peptide in case in Table I, application no. 17, in column 6 in the same line as SEQ ID NO. 145091 is depicted, mitochondric is mentioned; which is operable linked, too.

[93021] In another embodiment thereof the expression cassette does not comprise an additional transit peptide in case in Table I, application no. 17, in column 6 in the same line as SEQ ID NO. 145091 is depicted, non-targeted is mentioned.

[93022] In an embodiment the present invention relates to an expresssion cassette comprising a) a promoter, preferably a promoter selected from the group consisting of Big35S, PCUbi, Super and USP, in particular p-Super; and b) the nucleic acid SEQ ID NO. 134756, or a homolog or fragment thereof, or a homolog thereof being depicted in Table I, application no. 17, column 8, in the same line as SEQ ID NO. 134756, preferably the coding region thereof, a homolog or a fragment thereof; which are operable linked.

[93023] In an embodiment thereof the expression cassette comprises in addition c) a nucleic acid molecule encoding a transit peptide, especially a plastidal transit petide in case in Table I, application no. 17, in column 6 in the same line as SEQ ID NO. 134756 is depicted, plastidic is mentioned, or a mitochondrial transit peptide in case in Table I, application no. 17, in column 6 in the same line as SEQ ID NO. 134756 is depicted, mitochondric is mentioned; which is operable linked, too.

[93024] In another embodiment thereof the expression cassette does not comprise an additional transit peptide in case in Table I, application no. 17, in column 6 in the same line as SEQ ID NO. 134756 is depicted, non-targeted is mentioned.

[93025] In an embodiment the present invention relates to an expresssion cassette comprising a) a promoter, preferably a promoter selected from the group consisting of Big35S, PCUbi, Super and USP, in particular p-Super; and b) the nucleic acid SEQ ID NO. 38266, or a homolog or fragment thereof, or a homolog thereof being depicted in Table I, application no. 17, column 8, in the same line as SEQ ID NO. 38266, preferably the coding region thereof, a homolog or a fragment thereof; which are operable linked.

[93026] In an embodiment thereof the expression cassette comprises in addition c) a nucleic acid molecule encoding a transit peptide, especially a plastidal transit petide in case in Table I, application no. 17, in column 6 in the same line as SEQ ID NO. 38266 is depicted, plastidic is mentioned, or a mitochondrial transit peptide in case in Table I, application no. 17, in column 6 in the same line as SEQ ID NO. 38266 is depicted, mitochondric is mentioned; which is operable linked, too.

[93027] In another embodiment thereof the expression cassette does not comprise an additional transit peptide in case in Table I, application no. 17, in column 6 in the same line as SEQ ID NO. 38266 is depicted, non-targeted is mentioned.

[93028] In an embodiment the present invention relates to an expresssion cassette comprising a) a promoter, preferably a promoter selected from the group consisting of Big35S, PCUbi, Super and USP, in particular p-Super; and b) the nucleic acid SEQ ID NO. 38289, or a homolog or fragment thereof, or a homolog thereof being depicted in Table I, application no. 17, column 8, in the same line as SEQ ID NO. 38289, preferably the coding region thereof, a homolog or a fragment thereof; which are operable linked.

[93029] In an embodiment thereof the expression cassette comprises in addition c) a nucleic acid molecule encoding a transit peptide, especially a plastidal transit petide in case in Table I, application no. 17, in column 6 in the same line as SEQ ID NO. 38289 is depicted, plastidic is mentioned, or a mitochondrial transit peptide in case in Table I, application no. 17, in column 6 in the same line as SEQ ID NO. 38289 is depicted, mitochondric is mentioned; which is operable linked, too.

[93030] In another embodiment thereof the expression cassette does not comprise an additional transit peptide in case in Table I, application no. 17, in column 6 in the same line as SEQ ID NO. 38289 is depicted, non-targeted is mentioned.

[93031] In an embodiment the present invention relates to an expresssion cassette comprising a) a promoter, preferably a promoter selected from the group consisting of Big35S, PCUbi, Super and USP, in particular p-Super; and b) the nucleic acid SEQ ID NO. 115056, or a homolog or fragment thereof, or a homolog thereof being depicted in Table I, application no. 17, column 8, in the same line as SEQ ID NO. 115056, preferably the coding region thereof, a homolog or a fragment thereof; which are operable linked.

[93032] In an embodiment thereof the expression cassette comprises in addition c) a nucleic acid molecule encoding a transit peptide, especially a plastidal transit petide in case in Table I, application no. 17, in column 6 in the same line as SEQ ID NO. 115056 is depicted, plastidic is mentioned, or a mitochondrial transit peptide in case in Table I, application no. 17, in column 6 in the same line as SEQ ID NO. 115056 is depicted, mitochondric is mentioned; which is operable linked, too.

[93033] In another embodiment thereof the expression cassette does not comprise an additional transit peptide in case in Table I, application no. 17, in column 6 in the same line as SEQ ID NO. 115056 is depicted, non-targeted is mentioned.

[93034] In an embodiment the present invention relates to an expresssion cassette comprising a) a promoter, preferably a promoter selected from the group consisting of Big35S, PCUbi, Super and USP, in particular p-Super; and b) the nucleic acid SEQ ID NO. 7947, or a homolog or fragment thereof, or a homolog thereof being depicted in Table I, application no. 17, column 8, in the same line as SEQ ID NO. 7947, preferably the coding region thereof, a homolog or a fragment thereof; which are operable linked.

[93035] In an embodiment thereof the expression cassette comprises in addition c) a nucleic acid molecule encoding a transit peptide, especially a plastidal transit petide in case in Table I, application no. 17, in column 6 in the same line as SEQ ID NO. 7947 is depicted, plastidic is mentioned, or a mitochondrial transit peptide in case in Table I, application no. 17, in column 6 in the same line as SEQ ID NO. 7947 is depicted, mitochondric is mentioned; which is operable linked, too.

[93036] In another embodiment thereof the expression cassette does not comprise an additional transit peptide in case in Table I, application no. 17, in column 6 in the same line as SEQ ID NO. 7947 is depicted, non-targeted is mentioned.

[93037] In an embodiment the present invention relates to an expresssion cassette comprising a) a promoter, preferably a promoter selected from the group consisting of Big35S, PCUbi, Super and USP, in particular p-Super; and b) the nucleic acid SEQ ID NO. 145142, or a homolog or fragment thereof, or a homolog thereof being depicted in Table I, application no. 17, column 8, in the same line as SEQ ID NO. 145142, preferably the coding region thereof, a homolog or a fragment thereof; which are operable linked.

[93038] In an embodiment thereof the expression cassette comprises in addition c) a nucleic acid molecule encoding a transit peptide, especially a plastidal transit petide in case in Table I, application no. 17, in column 6 in the same line as SEQ ID NO. 145142 is depicted, plastidic is mentioned, or a mitochondrial transit peptide in case in Table I, application no. 17, in column 6 in the same line as SEQ ID NO. 145142 is depicted, mitochondric is mentioned; which is operable linked, too.

[93039] In another embodiment thereof the expression cassette does not comprise an additional transit peptide in case in Table I, application no. 17, in column 6 in the same line as SEQ ID NO. 145142 is depicted, non-targeted is mentioned.

[93040] In an embodiment the present invention relates to an expresssion cassette comprising a) a promoter, preferably a promoter selected from the group consisting of Big35S, PCUbi, Super and USP, in particular p-Super; and b) the nucleic acid SEQ ID NO. 78138, or a homolog or fragment thereof, or a homolog thereof being depicted in Table I, application no. 17, column 8, in the same line as SEQ ID NO. 78138, preferably the coding region thereof, a homolog or a fragment thereof; which are operable linked.

[93041] In an embodiment thereof the expression cassette comprises in addition c) a nucleic acid molecule encoding a transit peptide, especially a plastidal transit petide in case in Table I, application no. 17, in column 6 in the same line as SEQ ID NO. 78138 is depicted, plastidic is mentioned, or a mitochondrial transit peptide in case in Table I, application no. 17, in column 6 in the same line as SEQ ID NO. 78138 is depicted, mitochondric is mentioned; which is operable linked, too.

[93042] In another embodiment thereof the expression cassette does not comprise an additional transit peptide in case in Table I, application no. 17, in column 6 in the same line as SEQ ID NO. 78138 is depicted, non-targeted is mentioned.

[93043] In an embodiment the present invention relates to an expresssion cassette comprising a) a promoter, preferably a promoter selected from the group consisting of Big35S, PCUbi, Super and USP, in particular p-Super; and b) the nucleic acid SEQ ID NO. 78154, or a homolog or fragment thereof, or a homolog thereof being depicted in Table I, application no. 17, column 8, in the same line as SEQ ID NO. 78154, preferably the coding region thereof, a homolog or a fragment thereof; which are operable linked.

[93044] In an embodiment thereof the expression cassette comprises in addition c) a nucleic acid molecule encoding a transit peptide, especially a plastidal transit petide in case in Table I, application no. 17, in column 6 in the same line as SEQ ID NO. 78154 is depicted, plastidic is mentioned, or a mitochondrial transit peptide in case in Table I, application no. 17, in column 6 in the same line as SEQ ID NO. 78154 is depicted, mitochondric is mentioned; which is operable linked, too.

[93045] In another embodiment thereof the expression cassette does not comprise an additional transit peptide in case in Table I, application no. 17, in column 6 in the same line as SEQ ID NO. 78154 is depicted, non-targeted is mentioned.

[93046] In an embodiment the present invention relates to an expresssion cassette comprising a) a promoter, preferably a promoter selected from the group consisting of Big35S, PCUbi, Super and USP, in particular p-Super; and b) the nucleic acid SEQ ID NO. 38300, or a homolog or fragment thereof, or a homolog thereof being depicted in Table I, application no. 17, column 8, in the same line as SEQ ID NO. 38300, preferably the coding region thereof, a homolog or a fragment thereof; which are operable linked.

[93047] In an embodiment thereof the expression cassette comprises in addition c) a nucleic acid molecule encoding a transit peptide, especially a plastidal transit petide in case in Table I, application no. 17, in column 6 in the same line as SEQ ID NO. 38300 is depicted, plastidic is mentioned, or a mitochondrial transit peptide in case in Table I, application no. 17, in column 6 in the same line as SEQ ID NO. 38300 is depicted, mitochondric is mentioned; which is operable linked, too.

[93048] In another embodiment thereof the expression cassette does not comprise an additional transit peptide in case in Table I, application no. 17, in column 6 in the same line as SEQ ID NO. 38300 is depicted, non-targeted is mentioned.

[93049] In an embodiment the present invention relates to an expresssion cassette comprising a) a promoter, preferably a promoter selected from the group consisting of Big35S, PCUbi, Super and USP, in particular p-Super; and b) the nucleic acid SEQ ID NO. 124571, or a homolog or fragment thereof, or a homolog thereof being depicted in Table I, application no. 17, column 8, in the same line as SEQ ID NO. 124571, preferably the coding region thereof, a homolog or a fragment thereof; which are operable linked.

[93050] In an embodiment thereof the expression cassette comprises in addition c) a nucleic acid molecule encoding a transit peptide, especially a plastidal transit petide in case in Table I, application no. 17, in column 6 in the same line as SEQ ID NO. 124571 is depicted, plastidic is mentioned, or a mitochondrial transit peptide in case in Table I, application no. 17, in column 6 in the same line as SEQ ID NO. 124571 is depicted, mitochondric is mentioned; which is operable linked, too.

[93051] In another embodiment thereof the expression cassette does not comprise an additional transit peptide in case in Table I, application no. 17, in column 6 in the same line as SEQ ID NO. 124571 is depicted, non-targeted is mentioned.

[93052] In an embodiment the present invention relates to an expresssion cassette comprising a) a promoter, preferably a promoter selected from the group consisting of Big35S, PCUbi, Super and USP, in particular p-Super; and b) the nucleic acid SEQ ID NO. 38345, or a homolog or fragment thereof, or a homolog thereof being depicted in Table I, application no. 17, column 8, in the same line as SEQ ID NO. 38345, preferably the coding region thereof, a homolog or a fragment thereof; which are operable linked.

[93053] In an embodiment thereof the expression cassette comprises in addition c) a nucleic acid molecule encoding a transit peptide, especially a plastidal transit petide in case in Table I, application no. 17, in column 6 in the same line as SEQ ID NO. 38345 is depicted, plastidic is mentioned, or a mitochondrial transit peptide in case in Table I, application no. 17, in column 6 in the same line as SEQ ID NO. 38345 is depicted, mitochondric is mentioned; which is operable linked, too.

[93054] In another embodiment thereof the expression cassette does not comprise an additional transit peptide in case in Table I, application no. 17, in column 6 in the same line as SEQ ID NO. 38345 is depicted, non-targeted is mentioned.

[93055] In an embodiment the present invention relates to an expresssion cassette comprising a) a promoter, preferably a promoter selected from the group consisting of Big35S, PCUbi, Super and USP, in particular p-Super; and b) the nucleic acid SEQ ID NO. 78265, or a homolog or fragment thereof, or a homolog thereof being depicted in Table I, application no. 17, column 8, in the same line as SEQ ID NO. 78265, preferably the coding region thereof, a homolog or a fragment thereof; which are operable linked.

[93056] In an embodiment thereof the expression cassette comprises in addition c) a nucleic acid molecule encoding a transit peptide, especially a plastidal transit petide in case in Table I, application no. 17, in column 6 in the same line as SEQ ID NO. 78265 is depicted, plastidic is mentioned, or a mitochondrial transit peptide in case in Table I, application no. 17, in column 6 in the same line as SEQ ID NO. 78265 is depicted, mitochondric is mentioned; which is operable linked, too.

[93057] In another embodiment thereof the expression cassette does not comprise an additional transit peptide in case in Table I, application no. 17, in column 6 in the same line as SEQ ID NO. 78265 is depicted, non-targeted is mentioned.

[93058] In an embodiment the present invention relates to an expresssion cassette comprising a) a promoter, preferably a promoter selected from the group consisting of Big35S, PCUbi, Super and USP, in particular p-Super; and b) the nucleic acid SEQ ID NO. 78753, or a homolog or fragment thereof, or a homolog thereof being depicted in Table I, application no. 17, column 8, in the same line as SEQ ID NO. 78753, preferably the coding region thereof, a homolog or a fragment thereof; which are operable linked.

[93059] In an embodiment thereof the expression cassette comprises in addition c) a nucleic acid molecule encoding a transit peptide, especially a plastidal transit petide in case in Table I, application no. 17, in column 6 in the same line as SEQ ID NO. 78753 is depicted, plastidic is mentioned, or a mitochondrial transit peptide in case in Table I, application no. 17, in column 6 in the same line as SEQ ID NO. 78753 is depicted, mitochondric is mentioned; which is operable linked, too.

[93060] In another embodiment thereof the expression cassette does not comprise an additional transit peptide in case in Table I, application no. 17, in column 6 in the same line as SEQ ID NO. 78753 is depicted, non-targeted is mentioned.

[93061] In an embodiment the present invention relates to an expresssion cassette comprising a) a promoter, preferably a promoter selected from the group consisting of Big35S, PCUbi, Super and USP, in particular p-Super; and b) the nucleic acid SEQ ID NO. 78852, or a homolog or fragment thereof, or a homolog thereof being depicted in Table I, application no. 17, column 8, in the same line as SEQ ID NO. 78852, preferably the coding region thereof, a homolog or a fragment thereof; which are operable linked.

[93062] In an embodiment thereof the expression cassette comprises in addition c) a nucleic acid molecule encoding a transit peptide, especially a plastidal transit petide in case in Table I, application no. 17, in column 6 in the same line as SEQ ID NO. 78852 is depicted, plastidic is mentioned, or a mitochondrial transit peptide in case in Table I, application no. 17, in column 6 in the same line as SEQ ID NO. 78852 is depicted, mitochondric is mentioned; which is operable linked, too.

[93063] In another embodiment thereof the expression cassette does not comprise an additional transit peptide in case in Table I, application no. 17, in column 6 in the same line as SEQ ID NO. 78852 is depicted, non-targeted is mentioned.

[93064] In an embodiment the present invention relates to an expresssion cassette comprising a) a promoter, preferably a promoter selected from the group consisting of Big35S, PCUbi, Super and USP, in particular p-Super; and b) the nucleic acid SEQ ID NO. 78883, or a homolog or fragment thereof, or a homolog thereof being depicted in Table I, application no. 17, column 8, in the same line as SEQ ID NO. 78883, preferably the coding region thereof, a homolog or a fragment thereof; which are operable linked.

[93065] In an embodiment thereof the expression cassette comprises in addition c) a nucleic acid molecule encoding a transit peptide, especially a plastidal transit petide in case in Table I, application no. 17, in column 6 in the same line as SEQ ID NO. 78883 is depicted, plastidic is mentioned, or a mitochondrial transit peptide in case in Table I, application no. 17, in column 6 in the same line as SEQ ID NO. 78883 is depicted, mitochondric is mentioned; which is operable linked, too.

[93066] In another embodiment thereof the expression cassette does not comprise an additional transit peptide in case in Table I, application no. 17, in column 6 in the same line as SEQ ID NO. 78883 is depicted, non-targeted is mentioned.

[93067] In an embodiment the present invention relates to an expresssion cassette comprising a) a promoter, preferably a promoter selected from the group consisting of Big35S, PCUbi, Super and USP, in particular p-Super; and b) the nucleic acid SEQ ID NO. 99196, or a homolog or fragment thereof, or a homolog thereof being depicted in Table I, application no. 17, column 8, in the same line as SEQ ID NO. 99196, preferably the coding region thereof, a homolog or a fragment thereof; which are operable linked.

[93068] In an embodiment thereof the expression cassette comprises in addition c) a nucleic acid molecule encoding a transit peptide, especially a plastidal transit petide in case in Table I, application no. 17, in column 6 in the same line as SEQ ID NO. 99196 is depicted, plastidic is mentioned, or a mitochondrial transit peptide in case in Table I, application no. 17, in column 6 in the same line as SEQ ID NO. 99196 is depicted, mitochondric is mentioned; which is operable linked, too.

[93069] In another embodiment thereof the expression cassette does not comprise an additional transit peptide in case in Table I, application no. 17, in column 6 in the same line as SEQ ID NO. 99196 is depicted, non-targeted is mentioned.

[93070] In an embodiment the present invention relates to an expresssion cassette comprising a) a promoter, preferably a promoter selected from the group consisting of Big35S, PCUbi, Super and USP, in particular p-Super; and b) the nucleic acid SEQ ID NO. 145180, or a homolog or fragment thereof, or a homolog thereof being depicted in Table I, application no. 17, column 8, in the same line as SEQ ID NO. 145180, preferably the coding region thereof, a homolog or a fragment thereof; which are operable linked.

[93071] In an embodiment thereof the expression cassette comprises in addition c) a nucleic acid molecule encoding a transit peptide, especially a plastidal transit petide in case in Table I, application no. 17, in column 6 in the same line as SEQ ID NO. 145180 is depicted, plastidic is mentioned, or a mitochondrial transit peptide in case in Table I, application no. 17, in column 6 in the same line as SEQ ID NO. 145180 is depicted, mitochondric is mentioned; which is operable linked, too.

[93072] In another embodiment thereof the expression cassette does not comprise an additional transit peptide in case in Table I, application no. 17, in column 6 in the same line as SEQ ID NO. 145180 is depicted, non-targeted is mentioned.

[93073] In an embodiment the present invention relates to an expresssion cassette comprising a) a promoter, preferably a promoter selected from the group consisting of Big35S, PCUbi, Super and USP, in particular p-USP; and b) the nucleic acid SEQ ID NO. 8033, or a homolog or fragment thereof, or a homolog thereof being depicted in Table I, application no. 17, column 8, in the same line as SEQ ID NO. 8033, preferably the coding region thereof, a homolog or a fragment thereof; which are operable linked.

[93074] In an embodiment thereof the expression cassette comprises in addition c) a nucleic acid molecule encoding a transit peptide, especially a plastidal transit petide in case in Table I, application no. 17, in column 6 in the same line as SEQ ID NO. 8033 is depicted, plastidic is mentioned, or a mitochondrial transit peptide in case in Table I, application no. 17, in column 6 in the same line as SEQ ID NO. 8033 is depicted, mitochondric is mentioned; which is operable linked, too.

[93075] In another embodiment thereof the expression cassette does not comprise an additional transit peptide in case in Table I, application no. 17, in column 6 in the same line as SEQ ID NO. 8033 is depicted, non-targeted is mentioned.

[93076] In an embodiment the present invention relates to an expresssion cassette comprising a) a promoter, preferably a promoter selected from the group consisting of Big35S, PCUbi, Super and USP, in particular p-Super; and b) the nucleic acid SEQ ID NO. 38573, or a homolog or fragment thereof, or a homolog thereof being depicted in Table I, application no. 17, column 8, in the same line as SEQ ID NO. 38573, preferably the coding region thereof, a homolog or a fragment thereof; which are operable linked.

[93077] In an embodiment thereof the expression cassette comprises in addition c) a nucleic acid molecule encoding a transit peptide, especially a plastidal transit petide in case in Table I, application no. 17, in column 6 in the same line as SEQ ID NO. 38573 is depicted, plastidic is mentioned, or a mitochondrial transit peptide in case in Table I, application no. 17, in column 6 in the same line as SEQ ID NO. 38573 is depicted, mitochondric is mentioned; which is operable linked, too.

[93078] In another embodiment thereof the expression cassette does not comprise an additional transit peptide in case in Table I, application no. 17, in column 6 in the same line as SEQ ID NO. 38573 is depicted, non-targeted is mentioned.

[93079] In an embodiment the present invention relates to an expresssion cassette comprising a) a promoter, preferably a promoter selected from the group consisting of Big35S, PCUbi, Super and USP, in particular p-USP; and b) the nucleic acid SEQ ID NO. 8363, or a homolog or fragment thereof, or a homolog thereof being depicted in Table I, application no. 17, column 8, in the same line as SEQ ID NO. 8363, preferably the coding region thereof, a homolog or a fragment thereof; which are operable linked.

[93080] In an embodiment thereof the expression cassette comprises in addition c) a nucleic acid molecule encoding a transit peptide, especially a plastidal transit petide in case in Table I, application no. 17, in column 6 in the same line as SEQ ID NO. 8363 is depicted, plastidic is mentioned, or a mitochondrial transit peptide in case in Table I, application no. 17, in column 6 in the same line as SEQ ID NO. 8363 is depicted, mitochondric is mentioned; which is operable linked, too.

[93081] In another embodiment thereof the expression cassette does not comprise an additional transit peptide in case in Table I, application no. 17, in column 6 in the same line as SEQ ID NO. 8363 is depicted, non-targeted is mentioned.

[93082] In an embodiment the present invention relates to an expresssion cassette comprising a) a promoter, preferably a promoter selected from the group consisting of Big35S, PCUbi, Super and USP, in particular p-USP; and b) the nucleic acid SEQ ID NO. 134783, or a homolog or fragment thereof, or a homolog thereof being depicted in Table I, application no. 17, column 8, in the same line as SEQ ID NO. 134783, preferably the coding region thereof, a homolog or a fragment thereof; which are operable linked.

[93083] In an embodiment thereof the expression cassette comprises in addition c) a nucleic acid molecule encoding a transit peptide, especially a plastidal transit petide in case in Table I, application no. 17, in column 6 in the same line as SEQ ID NO. 134783 is depicted, plastidic is mentioned, or a mitochondrial transit peptide in case in Table I, application no. 17, in column 6 in the same line as SEQ ID NO. 134783 is depicted, mitochondric is mentioned; which is operable linked, too.

[93084] In another embodiment thereof the expression cassette does not comprise an additional transit peptide in case in Table I, application no. 17, in column 6 in the same line as SEQ ID NO. 134783 is depicted, non-targeted is mentioned.

[93085] In an embodiment the present invention relates to an expresssion cassette comprising a) a promoter, preferably a promoter selected from the group consisting of Big35S, PCUbi, Super and USP, in particular p-Super; and b) the nucleic acid SEQ ID NO. 145411, or a homolog or fragment thereof, or a homolog thereof being depicted in Table I, application no. 17, column 8, in the same line as SEQ ID NO. 145411, preferably the coding region thereof, a homolog or a fragment thereof; which are operable linked.

[93086] In an embodiment thereof the expression cassette comprises in addition c) a nucleic acid molecule encoding a transit peptide, especially a plastidal transit petide in case in Table I, application no. 17, in column 6 in the same line as SEQ ID NO. 145411 is depicted, plastidic is mentioned, or a mitochondrial transit peptide in case in Table I, application no. 17, in column 6 in the same line as SEQ ID NO. 145411 is depicted, mitochondric is mentioned; which is operable linked, too.

[93087] In another embodiment thereof the expression cassette does not comprise an additional transit peptide in case in Table I, application no. 17, in column 6 in the same line as SEQ ID NO. 145411 is depicted, non-targeted is mentioned.

[93088] In an embodiment the present invention relates to an expresssion cassette comprising a) a promoter, preferably a promoter selected from the group consisting of Big35S, PCUbi, Super and USP, in particular p-USP; and b) the nucleic acid SEQ ID NO. 79056, or a homolog or fragment thereof, or a homolog thereof being depicted in Table I, application no. 17, column 8, in the same line as SEQ ID NO. 79056, preferably the coding region thereof, a homolog or a fragment thereof; which are operable linked.

[93089] In an embodiment thereof the expression cassette comprises in addition c) a nucleic acid molecule encoding a transit peptide, especially a plastidal transit petide in case in Table I, application no. 17, in column 6 in the same line as SEQ ID NO. 79056 is depicted, plastidic is mentioned, or a mitochondrial transit peptide in case in Table I, application no. 17, in column 6 in the same line as SEQ ID NO. 79056 is depicted, mitochondric is mentioned; which is operable linked, too.

[93090] In another embodiment thereof the expression cassette does not comprise an additional transit peptide in case in Table I, application no. 17, in column 6 in the same line as SEQ ID NO. 79056 is depicted, non-targeted is mentioned.

[93091] In an embodiment the present invention relates to an expresssion cassette comprising a) a promoter, preferably a promoter selected from the group consisting of Big35S, PCUbi, Super and USP, in particular p-Super; and b) the nucleic acid SEQ ID NO. 79056, or a homolog or fragment thereof, or a homolog thereof being depicted in Table I, application no. 17, column 8, in the same line as SEQ ID NO. 79056, preferably the coding region thereof, a homolog or a fragment thereof; which are operable linked.

[93092] In an embodiment thereof the expression cassette comprises in addition c) a nucleic acid molecule encoding a transit peptide, especially a plastidal transit petide in case in Table I, application no. 17, in column 6 in the same line as SEQ ID NO. 79056 is depicted, plastidic is mentioned, or a mitochondrial transit peptide in case in Table I, application no. 17, in column 6 in the same line as SEQ ID NO. 79056 is depicted, mitochondric is mentioned; which is operable linked, too.

[93093] In another embodiment thereof the expression cassette does not comprise an additional transit peptide in case in Table I, application no. 17, in column 6 in the same line as SEQ ID NO. 79056 is depicted, non-targeted is mentioned.

[93094] In an embodiment the present invention relates to an expresssion cassette comprising a) a promoter, preferably a promoter selected from the group consisting of Big35S, PCUbi, Super and USP, in particular p-Super; and b) the nucleic acid SEQ ID NO. 38767, or a homolog or fragment thereof, or a homolog thereof being depicted in Table I, application no. 17, column 8, in the same line as SEQ ID NO. 38767, preferably the coding region thereof, a homolog or a fragment thereof; which are operable linked.

[93095] In an embodiment thereof the expression cassette comprises in addition c) a nucleic acid molecule encoding a transit peptide, especially a plastidal transit petide in case in Table I, application no. 17, in column 6 in the same line as SEQ ID NO. 38767 is depicted, plastidic is mentioned, or a mitochondrial transit peptide in case in Table I, application no. 17, in column 6 in the same line as SEQ ID NO. 38767 is depicted, mitochondric is mentioned; which is operable linked, too.

[93096] In another embodiment thereof the expression cassette does not comprise an additional transit peptide in case in Table I, application no. 17, in column 6 in the same line as SEQ ID NO. 38767 is depicted, non-targeted is mentioned.

[93097] In an embodiment the present invention relates to an expresssion cassette comprising a) a promoter, preferably a promoter selected from the group consisting of Big35S, PCUbi, Super and USP, in particular p-Super; and b) the nucleic acid SEQ ID NO. 131799, or a homolog or fragment thereof, or a homolog thereof being depicted in Table I, application no. 17, column 8, in the same line as SEQ ID NO. 131799, preferably the coding region thereof, a homolog or a fragment thereof; which are operable linked.

[93098] In an embodiment thereof the expression cassette comprises in addition c) a nucleic acid molecule encoding a transit peptide, especially a plastidal transit petide in case in Table I, application no. 17, in column 6 in the same line as SEQ ID NO. 131799 is depicted, plastidic is mentioned, or a mitochondrial transit peptide in case in Table I, application no. 17, in column 6 in the same line as SEQ ID NO. 131799 is depicted, mitochondric is mentioned; which is operable linked, too.

[93099] In another embodiment thereof the expression cassette does not comprise an additional transit peptide in case in Table I, application no. 17, in column 6 in the same line as SEQ ID NO. 131799 is depicted, non-targeted is mentioned.

[93100] In an embodiment the present invention relates to an expresssion cassette comprising a) a promoter, preferably a promoter selected from the group consisting of Big35S, PCUbi, Super and USP, in particular p-Super; and b) the nucleic acid SEQ ID NO. 134864, or a homolog or fragment thereof, or a homolog thereof being depicted in Table I, application no. 17, column 8, in the same line as SEQ ID NO. 134864, preferably the coding region thereof, a homolog or a fragment thereof; which are operable linked.

[93101] In an embodiment thereof the expression cassette comprises in addition c) a nucleic acid molecule encoding a transit peptide, especially a plastidal transit petide in case in Table I, application no. 17, in column 6 in the same line as SEQ ID NO. 134864 is depicted, plastidic is mentioned, or a mitochondrial transit peptide in case in Table I, application no. 17, in column 6 in the same line as SEQ ID NO. 134864 is depicted, mitochondric is mentioned; which is operable linked, too.

[93102] In another embodiment thereof the expression cassette does not comprise an additional transit peptide in case in Table I, application no. 17, in column 6 in the same line as SEQ ID NO. 134864 is depicted, non-targeted is mentioned.

[93103] In an embodiment the present invention relates to an expresssion cassette comprising a) a promoter, preferably a promoter selected from the group consisting of Big35S, PCUbi, Super and USP, in particular p-Super; and b) the nucleic acid SEQ ID NO. 79217, or a homolog or fragment thereof, or a homolog thereof being depicted in Table I, application no. 17, column 8, in the same line as SEQ ID NO. 79217, preferably the coding region thereof, a homolog or a fragment thereof; which are operable linked.

[93104] In an embodiment thereof the expression cassette comprises in addition c) a nucleic acid molecule encoding a transit peptide, especially a plastidal transit petide in case in Table I, application no. 17, in column 6 in the same line as SEQ ID NO. 79217 is depicted, plastidic is mentioned, or a mitochondrial transit peptide in case in Table I, application no. 17, in column 6 in the same line as SEQ ID NO. 79217 is depicted, mitochondric is mentioned; which is operable linked, too.

[93105] In another embodiment thereof the expression cassette does not comprise an additional transit peptide in case in Table I, application no. 17, in column 6 in the same line as SEQ ID NO. 79217 is depicted, non-targeted is mentioned.

[93106] In an embodiment the present invention relates to an expresssion cassette comprising a) a promoter, preferably a promoter selected from the group consisting of Big35S, PCUbi, Super and USP, in particular p-Super; and b) the nucleic acid SEQ ID NO. 8920, or a homolog or fragment thereof, or a homolog thereof being depicted in Table I, application no. 17, column 8, in the same line as SEQ ID NO. 8920, preferably the coding region thereof, a homolog or a fragment thereof; which are operable linked.

[93107] In an embodiment thereof the expression cassette comprises in addition c) a nucleic acid molecule encoding a transit peptide, especially a plastidal transit petide in case in Table I, application no. 17, in column 6 in the same line as SEQ ID NO. 8920 is depicted, plastidic is mentioned, or a mitochondrial transit peptide in case in Table I, application no. 17, in column 6 in the same line as SEQ ID NO. 8920 is depicted, mitochondric is mentioned; which is operable linked, too.

[93108] In another embodiment thereof the expression cassette does not comprise an additional transit peptide in case in Table I, application no. 17, in column 6 in the same line as SEQ ID NO. 8920 is depicted, non-targeted is mentioned.

[93109] In an embodiment the present invention relates to an expresssion cassette comprising a) a promoter, preferably a promoter selected from the group consisting of Big35S, PCUbi, Super and USP, in particular p-Super; and b) the nucleic acid SEQ ID NO. 112193, or a homolog or fragment thereof, or a homolog thereof being depicted in Table I, application no. 17, column 8, in the same line as SEQ ID NO. 112193, preferably the coding region thereof, a homolog or a fragment thereof; which are operable linked.

[93110] In an embodiment thereof the expression cassette comprises in addition c) a nucleic acid molecule encoding a transit peptide, especially a plastidal transit petide in case in Table I, application no. 17, in column 6 in the same line as SEQ ID NO. 112193 is depicted, plastidic is mentioned, or a mitochondrial transit peptide in case in Table I, application no. 17, in column 6 in the same line as SEQ ID NO. 112193 is depicted, mitochondric is mentioned; which is operable linked, too.

[93111] In another embodiment thereof the expression cassette does not comprise an additional transit peptide in case in Table I, application no. 17, in column 6 in the same line as SEQ ID NO. 112193 is depicted, non-targeted is mentioned.

[93112] In an embodiment the present invention relates to an expresssion cassette comprising a) a promoter, preferably a promoter selected from the group consisting of Big35S, PCUbi, Super and USP, in particular p-Super; and b) the nucleic acid SEQ ID NO. 104277, or a homolog or fragment thereof, or a homolog thereof being depicted in Table I, application no. 17, column 8, in the same line as SEQ ID NO. 104277, preferably the coding region thereof, a homolog or a fragment thereof; which are operable linked.

[93113] In an embodiment thereof the expression cassette comprises in addition c) a nucleic acid molecule encoding a transit peptide, especially a plastidal transit petide in case in Table I, application no. 17, in column 6 in the same line as SEQ ID NO. 104277 is depicted, plastidic is mentioned, or a mitochondrial transit peptide in case in Table I, application no. 17, in column 6 in the same line as SEQ ID NO. 104277 is depicted, mitochondric is mentioned; which is operable linked, too.

[93114] In another embodiment thereof the expression cassette does not comprise an additional transit peptide in case in Table I, application no. 17, in column 6 in the same line as SEQ ID NO. 104277 is depicted, non-targeted is mentioned.

[93115] In an embodiment the present invention relates to an expresssion cassette comprising a) a promoter, preferably a promoter selected from the group consisting of Big35S, PCUbi, Super and USP, in particular p-Super; and b) the nucleic acid SEQ ID NO. 38947, or a homolog or fragment thereof, or a homolog thereof being depicted in Table I, application no. 17, column 8, in the same line as SEQ ID NO. 38947, preferably the coding region thereof, a homolog or a fragment thereof; which are operable linked.

[93116] In an embodiment thereof the expression cassette comprises in addition c) a nucleic acid molecule encoding a transit peptide, especially a plastidal transit petide in case in Table I, application no. 17, in column 6 in the same line as SEQ ID NO. 38947 is depicted, plastidic is mentioned, or a mitochondrial transit peptide in case in Table I, application no. 17, in column 6 in the same line as SEQ ID NO. 38947 is depicted, mitochondric is mentioned; which is operable linked, too.

[93117] In another embodiment thereof the expression cassette does not comprise an additional transit peptide in case in Table I, application no. 17, in column 6 in the same line as SEQ ID NO. 38947 is depicted, non-targeted is mentioned.

[93118] In an embodiment the present invention relates to an expresssion cassette comprising a) a promoter, preferably a promoter selected from the group consisting of Big35S, PCUbi, Super and USP, in particular p-Super; and b) the nucleic acid SEQ ID NO. 39002, or a homolog or fragment thereof, or a homolog thereof being depicted in Table I, application no. 17, column 8, in the same line as SEQ ID NO. 39002, preferably the coding region thereof, a homolog or a fragment thereof; which are operable linked.

[93119] In an embodiment thereof the expression cassette comprises in addition c) a nucleic acid molecule encoding a transit peptide, especially a plastidal transit petide in case in Table I, application no. 17, in column 6 in the same line as SEQ ID NO. 39002 is depicted, plastidic is mentioned, or a mitochondrial transit peptide in case in Table I, application no. 17, in column 6 in the same line as SEQ ID NO. 39002 is depicted, mitochondric is mentioned; which is operable linked, too.

[93120] In another embodiment thereof the expression cassette does not comprise an additional transit peptide in case in Table I, application no. 17, in column 6 in the same line as SEQ ID NO. 39002 is depicted, non-targeted is mentioned.

[93121] In an embodiment the present invention relates to an expresssion cassette comprising a) a promoter, preferably a promoter selected from the group consisting of Big35S, PCUbi, Super and USP, in particular p-Super; and b) the nucleic acid SEQ ID NO. 125085, or a homolog or fragment thereof, or a homolog thereof being depicted in Table I, application no. 17, column 8, in the same line as SEQ ID NO. 125085, preferably the coding region thereof, a homolog or a fragment thereof; which are operable linked.

[93122] In an embodiment thereof the expression cassette comprises in addition c) a nucleic acid molecule encoding a transit peptide, especially a plastidal transit petide in case in Table I, application no. 17, in column 6 in the same line as SEQ ID NO. 125085 is depicted, plastidic is mentioned, or a mitochondrial transit peptide in case in Table I, application no. 17, in column 6 in the same line as SEQ ID NO. 125085 is depicted, mitochondric is mentioned; which is operable linked, too.

[93123] In another embodiment thereof the expression cassette does not comprise an additional transit peptide in case in Table I, application no. 17, in column 6 in the same line as SEQ ID NO. 125085 is depicted, non-targeted is mentioned.

[93124] In an embodiment the present invention relates to an expresssion cassette comprising a) a promoter, preferably a promoter selected from the group consisting of Big35S, PCUbi, Super and USP, in particular p-USP; and b) the nucleic acid SEQ ID NO. 79279, or a homolog or fragment thereof, or a homolog thereof being depicted in Table I, application no. 17, column 8, in the same line as SEQ ID NO. 79279, preferably the coding region thereof, a homolog or a fragment thereof; which are operable linked.

[93125] In an embodiment thereof the expression cassette comprises in addition c) a nucleic acid molecule encoding a transit peptide, especially a plastidal transit petide in case in Table I, application no. 17, in column 6 in the same line as SEQ ID NO. 79279 is depicted, plastidic is mentioned, or a mitochondrial transit peptide in case in Table I, application no. 17, in column 6 in the same line as SEQ ID NO. 79279 is depicted, mitochondric is mentioned; which is operable linked, too.

[93126] In another embodiment thereof the expression cassette does not comprise an additional transit peptide in case in Table I, application no. 17, in column 6 in the same line as SEQ ID NO. 79279 is depicted, non-targeted is mentioned.

[93127] In an embodiment the present invention relates to an expresssion cassette comprising a) a promoter, preferably a promoter selected from the group consisting of Big35S, PCUbi, Super and USP, in particular p-USP; and b) the nucleic acid SEQ ID NO. 99620, or a homolog or fragment thereof, or a homolog thereof being depicted in Table I, application no. 17, column 8, in the same line as SEQ ID NO. 99620, preferably the coding region thereof, a homolog or a fragment thereof; which are operable linked.

[93128] In an embodiment thereof the expression cassette comprises in addition c) a nucleic acid molecule encoding a transit peptide, especially a plastidal transit petide in case in Table I, application no. 17, in column 6 in the same line as SEQ ID NO. 99620 is depicted, plastidic is mentioned, or a mitochondrial transit peptide in case in Table I, application no. 17, in column 6 in the same line as SEQ ID NO. 99620 is depicted, mitochondric is mentioned; which is operable linked, too.

[93129] In another embodiment thereof the expression cassette does not comprise an additional transit peptide in case in Table I, application no. 17, in column 6 in the same line as SEQ ID NO. 99620 is depicted, non-targeted is mentioned.

[93130] In an embodiment the present invention relates to an expresssion cassette comprising a) a promoter, preferably a promoter selected from the group consisting of Big35S, PCUbi, Super and USP, in particular p-USP; and b) the nucleic acid SEQ ID NO. 145692, or a homolog or fragment thereof, or a homolog thereof being depicted in Table I, application no. 17, column 8, in the same line as SEQ ID NO. 145692, preferably the coding region thereof, a homolog or a fragment thereof; which are operable linked.

[93131] In an embodiment thereof the expression cassette comprises in addition c) a nucleic acid molecule encoding a transit peptide, especially a plastidal transit petide in case in Table I, application no. 17, in column 6 in the same line as SEQ ID NO. 145692 is depicted, plastidic is mentioned, or a mitochondrial transit peptide in case in Table I, application no. 17, in column 6 in the same line as SEQ ID NO. 145692 is depicted, mitochondric is mentioned; which is operable linked, too.

[93132] In another embodiment thereof the expression cassette does not comprise an additional transit peptide in case in Table I, application no. 17, in column 6 in the same line as SEQ ID NO. 145692 is depicted, non-targeted is mentioned.

[93133] In an embodiment the present invention relates to an expresssion cassette comprising a) a promoter, preferably a promoter selected from the group consisting of Big35S, PCUbi, Super and USP, in particular p-Super; and b) the nucleic acid SEQ ID NO. 9156, or a homolog or fragment thereof, or a homolog thereof being depicted in Table I, application no. 17, column 8, in the same line as SEQ ID NO. 9156, preferably the coding region thereof, a homolog or a fragment thereof; which are operable linked.

[93134] In an embodiment thereof the expression cassette comprises in addition c) a nucleic acid molecule encoding a transit peptide, especially a plastidal transit petide in case in Table I, application no. 17, in column 6 in the same line as SEQ ID NO. 9156 is depicted, plastidic is mentioned, or a mitochondrial transit peptide in case in Table I, application no. 17, in column 6 in the same line as SEQ ID NO. 9156 is depicted, mitochondric is mentioned; which is operable linked, too.

[93135] In another embodiment thereof the expression cassette does not comprise an additional transit peptide in case in Table I, application no. 17, in column 6 in the same line as SEQ ID NO. 9156 is depicted, non-targeted is mentioned.

[93136] In an embodiment the present invention relates to an expresssion cassette comprising a) a promoter, preferably a promoter selected from the group consisting of Big35S, PCUbi, Super and USP, in particular p-Super; and b) the nucleic acid SEQ ID NO. 39219, or a homolog or fragment thereof, or a homolog thereof being depicted in Table I, application no. 17, column 8, in the same line as SEQ ID NO. 39219, preferably the coding region thereof, a homolog or a fragment thereof; which are operable linked.

[93137] In an embodiment thereof the expression cassette comprises in addition c) a nucleic acid molecule encoding a transit peptide, especially a plastidal transit petide in case in Table I, application no. 17, in column 6 in the same line as SEQ ID NO. 39219 is depicted, plastidic is mentioned, or a mitochondrial transit peptide in case in Table I, application no. 17, in column 6 in the same line as SEQ ID NO. 39219 is depicted, mitochondric is mentioned; which is operable linked, too.

[93138] In another embodiment thereof the expression cassette does not comprise an additional transit peptide in case in Table I, application no. 17, in column 6 in the same line as SEQ ID NO. 39219 is depicted, non-targeted is mentioned.

[93139] In an embodiment the present invention relates to an expresssion cassette comprising a) a promoter, preferably a promoter selected from the group consisting of Big35S, PCUbi, Super and USP, in particular p-Super; and b) the nucleic acid SEQ ID NO. 146204, or a homolog or fragment thereof, or a homolog thereof being depicted in Table I, application no. 17, column 8, in the same line as SEQ ID NO. 146204, preferably the coding region thereof, a homolog or a fragment thereof; which are operable linked.

[93140] In an embodiment thereof the expression cassette comprises in addition c) a nucleic acid molecule encoding a transit peptide, especially a plastidal transit petide in case in Table I, application no. 17, in column 6 in the same line as SEQ ID NO. 146204 is depicted, plastidic is mentioned, or a mitochondrial transit peptide in case in Table I, application no. 17, in column 6 in the same line as SEQ ID NO. 146204 is depicted, mitochondric is mentioned; which is operable linked, too.

[93141] In another embodiment thereof the expression cassette does not comprise an additional transit peptide in case in Table I, application no. 17, in column 6 in the same line as SEQ ID NO. 146204 is depicted, non-targeted is mentioned.

[93142] In an embodiment the present invention relates to an expresssion cassette comprising a) a promoter, preferably a promoter selected from the group consisting of Big35S, PCUbi, Super and USP, in particular p-Super; and b) the nucleic acid SEQ ID NO. 146238, or a homolog or fragment thereof, or a homolog thereof being depicted in Table I, application no. 17, column 8, in the same line as SEQ ID NO. 146238, preferably the coding region thereof, a homolog or a fragment thereof; which are operable linked.

[93143] In an embodiment thereof the expression cassette comprises in addition c) a nucleic acid molecule encoding a transit peptide, especially a plastidal transit petide in case in Table I, application no. 17, in column 6 in the same line as SEQ ID NO. 146238 is depicted, plastidic is mentioned, or a mitochondrial transit peptide in case in Table I, application no. 17, in column 6 in the same line as SEQ ID NO. 146238 is depicted, mitochondric is mentioned; which is operable linked, too.

[93144] In another embodiment thereof the expression cassette does not comprise an additional transit peptide in case in Table I, application no. 17, in column 6 in the same line as SEQ ID NO. 146238 is depicted, non-targeted is mentioned.

[93145] In an embodiment the present invention relates to an expresssion cassette comprising a) a promoter, preferably a promoter selected from the group consisting of Big35S, PCUbi, Super and USP, in particular p-Super; and b) the nucleic acid SEQ ID NO. 39237, or a homolog or fragment thereof, or a homolog thereof being depicted in Table I, application no. 17, column 8, in the same line as SEQ ID NO. 39237, preferably the coding region thereof, a homolog or a fragment thereof; which are operable linked.

[93146] In an embodiment thereof the expression cassette comprises in addition c) a nucleic acid molecule encoding a transit peptide, especially a plastidal transit petide in case in Table I, application no. 17, in column 6 in the same line as SEQ ID NO. 39237 is depicted, plastidic is mentioned, or a mitochondrial transit peptide in case in Table I, application no. 17, in column 6 in the same line as SEQ ID NO. 39237 is depicted, mitochondric is mentioned; which is operable linked, too.

[93147] In another embodiment thereof the expression cassette does not comprise an additional transit peptide in case in Table I, application no. 17, in column 6 in the same line as SEQ ID NO. 39237 is depicted, non-targeted is mentioned.

[93148] In an embodiment the present invention relates to an expresssion cassette comprising a) a promoter, preferably a promoter selected from the group consisting of Big35S, PCUbi, Super and USP, in particular p-Super; and b) the nucleic acid SEQ ID NO. 39255, or a homolog or fragment thereof, or a homolog thereof being depicted in Table I, application no. 17, column 8, in the same line as SEQ ID NO. 39255, preferably the coding region thereof, a homolog or a fragment thereof; which are operable linked.

[93149] In an embodiment thereof the expression cassette comprises in addition c) a nucleic acid molecule encoding a transit peptide, especially a plastidal transit petide in case in Table I, application no. 17, in column 6 in the same line as SEQ ID NO. 39255 is depicted, plastidic is mentioned, or a mitochondrial transit peptide in case in Table I, application no. 17, in column 6 in the same line as SEQ ID NO. 39255 is depicted, mitochondric is mentioned; which is operable linked, too.

[93150] In another embodiment thereof the expression cassette does not comprise an additional transit peptide in case in Table I, application no. 17, in column 6 in the same line as SEQ ID NO. 39255 is depicted, non-targeted is mentioned.

[93151] In an embodiment the present invention relates to an expresssion cassette comprising a) a promoter, preferably a promoter selected from the group consisting of Big35S, PCUbi, Super and USP, in particular p-Super; and b) the nucleic acid SEQ ID NO. 39300, or a homolog or fragment thereof, or a homolog thereof being depicted in Table I, application no. 17, column 8, in the same line as SEQ ID NO. 39300, preferably the coding region thereof, a homolog or a fragment thereof; which are operable linked.

[93152] In an embodiment thereof the expression cassette comprises in addition c) a nucleic acid molecule encoding a transit peptide, especially a plastidal transit petide in case in Table I, application no. 17, in column 6 in the same line as SEQ ID NO. 39300 is depicted, plastidic is mentioned, or a mitochondrial transit peptide in case in Table I, application no. 17, in column 6 in the same line as SEQ ID NO. 39300 is depicted, mitochondric is mentioned; which is operable linked, too.

[93153] In another embodiment thereof the expression cassette does not comprise an additional transit peptide in case in Table I, application no. 17, in column 6 in the same line as SEQ ID NO. 39300 is depicted, non-targeted is mentioned.

[93154] In an embodiment the present invention relates to an expresssion cassette comprising a) a promoter, preferably a promoter selected from the group consisting of Big35S, PCUbi, Super and USP, in particular p-Super; and b) the nucleic acid SEQ ID NO. 146261, or a homolog or fragment thereof, or a homolog thereof being depicted in Table I, application no. 17, column 8, in the same line as SEQ ID NO. 146261, preferably the coding region thereof, a homolog or a fragment thereof; which are operable linked.

[93155] In an embodiment thereof the expression cassette comprises in addition c) a nucleic acid molecule encoding a transit peptide, especially a plastidal transit petide in case in Table I, application no. 17, in column 6 in the same line as SEQ ID NO. 146261 is depicted, plastidic is mentioned, or a mitochondrial transit peptide in case in Table I, application no. 17, in column 6 in the same line as SEQ ID NO. 146261 is depicted, mitochondric is mentioned; which is operable linked, too.

[93156] In another embodiment thereof the expression cassette does not comprise an additional transit peptide in case in Table I, application no. 17, in column 6 in the same line as SEQ ID NO. 146261 is depicted, non-targeted is mentioned.

[93157] In an embodiment the present invention relates to an expresssion cassette comprising a) a promoter, preferably a promoter selected from the group consisting of Big35S, PCUbi, Super and USP, in particular p-Super; and b) the nucleic acid SEQ ID NO. 40329, or a homolog or fragment thereof, or a homolog thereof being depicted in Table I, application no. 17, column 8, in the same line as SEQ ID NO. 40329, preferably the coding region thereof, a homolog or a fragment thereof; which are operable linked.

[93158] In an embodiment thereof the expression cassette comprises in addition c) a nucleic acid molecule encoding a transit peptide, especially a plastidal transit petide in case in Table I, application no. 17, in column 6 in the same line as SEQ ID NO. 40329 is depicted, plastidic is mentioned, or a mitochondrial transit peptide in case in Table I, application no. 17, in column 6 in the same line as SEQ ID NO. 40329 is depicted, mitochondric is mentioned; which is operable linked, too.

[93159] In another embodiment thereof the expression cassette does not comprise an additional transit peptide in case in Table I, application no. 17, in column 6 in the same line as SEQ ID NO. 40329 is depicted, non-targeted is mentioned.

[93160] In an embodiment the present invention relates to an expresssion cassette comprising a) a promoter, preferably a promoter selected from the group consisting of Big35S, PCUbi, Super and USP, in particular p-Super; and b) the nucleic acid SEQ ID NO. 40383, or a homolog or fragment thereof, or a homolog thereof being depicted in Table I, application no. 17, column 8, in the same line as SEQ ID NO. 40383, preferably the coding region thereof, a homolog or a fragment thereof; which are operable linked.

[93161] In an embodiment thereof the expression cassette comprises in addition c) a nucleic acid molecule encoding a transit peptide, especially a plastidal transit petide in case in Table I, application no. 17, in column 6 in the same line as SEQ ID NO. 40383 is depicted, plastidic is mentioned, or a mitochondrial transit peptide in case in Table I, application no. 17, in column 6 in the same line as SEQ ID NO. 40383 is depicted, mitochondric is mentioned; which is operable linked, too.

[93162] In another embodiment thereof the expression cassette does not comprise an additional transit peptide in case in Table I, application no. 17, in column 6 in the same line as SEQ ID NO. 40383 is depicted, non-targeted is mentioned.

[93163] In an embodiment the present invention relates to an expresssion cassette comprising a) a promoter, preferably a promoter selected from the group consisting of Big35S, PCUbi, Super and USP, in particular p-Super; and b) the nucleic acid SEQ ID NO. 99898, or a homolog or fragment thereof, or a homolog thereof being depicted in Table I, application no. 17, column 8, in the same line as SEQ ID NO. 99898, preferably the coding region thereof, a homolog or a fragment thereof; which are operable linked.

[93164] In an embodiment thereof the expression cassette comprises in addition c) a nucleic acid molecule encoding a transit peptide, especially a plastidal transit petide in case in Table I, application no. 17, in column 6 in the same line as SEQ ID NO. 99898 is depicted, plastidic is mentioned, or a mitochondrial transit peptide in case in Table I, application no. 17, in column 6 in the same line as SEQ ID NO. 99898 is depicted, mitochondric is mentioned; which is operable linked, too.

[93165] In another embodiment thereof the expression cassette does not comprise an additional transit peptide in case in Table I, application no. 17, in column 6 in the same line as SEQ ID NO. 99898 is depicted, non-targeted is mentioned.

[93166] In an embodiment the present invention relates to an expresssion cassette comprising a) a promoter, preferably a promoter selected from the group consisting of Big35S, PCUbi, Super and USP, in particular p-Super; and b) the nucleic acid SEQ ID NO. 40665, or a homolog or fragment thereof, or a homolog thereof being depicted in Table I, application no. 17, column 8, in the same line as SEQ ID NO. 40665, preferably the coding region thereof, a homolog or a fragment thereof; which are operable linked.

[93167] In an embodiment thereof the expression cassette comprises in addition c) a nucleic acid molecule encoding a transit peptide, especially a plastidal transit petide in case in Table I, application no. 17, in column 6 in the same line as SEQ ID NO. 40665 is depicted, plastidic is mentioned, or a mitochondrial transit peptide in case in Table I, application no. 17, in column 6 in the same line as SEQ ID NO. 40665 is depicted, mitochondric is mentioned; which is operable linked, too.

[93168] In another embodiment thereof the expression cassette does not comprise an additional transit peptide in case in Table I, application no. 17, in column 6 in the same line as SEQ ID NO. 40665 is depicted, non-targeted is mentioned.

[93169] In an embodiment the present invention relates to an expresssion cassette comprising a) a promoter, preferably a promoter selected from the group consisting of Big35S, PCUbi, Super and USP, in particular p-Super; and b) the nucleic acid SEQ ID NO. 40726, or a homolog or fragment thereof, or a homolog thereof being depicted in Table I, application no. 17, column 8, in the same line as SEQ ID NO. 40726, preferably the coding region thereof, a homolog or a fragment thereof; which are operable linked.

[93170] In an embodiment thereof the expression cassette comprises in addition c) a nucleic acid molecule encoding a transit peptide, especially a plastidal transit petide in case in Table I, application no. 17, in column 6 in the same line as SEQ ID NO. 40726 is depicted, plastidic is mentioned, or a mitochondrial transit peptide in case in Table I, application no. 17, in column 6 in the same line as SEQ ID NO. 40726 is depicted, mitochondric is mentioned; which is operable linked, too.

[93171] In another embodiment thereof the expression cassette does not comprise an additional transit peptide in case in Table I, application no. 17, in column 6 in the same line as SEQ ID NO. 40726 is depicted, non-targeted is mentioned.

[93172] In an embodiment the present invention relates to an expresssion cassette comprising a) a promoter, preferably a promoter selected from the group consisting of Big35S, PCUbi, Super and USP, in particular p-Super; and b) the nucleic acid SEQ ID NO. 146288, or a homolog or fragment thereof, or a homolog thereof being depicted in Table I, application no. 17, column 8, in the same line as SEQ ID NO. 146288, preferably the coding region thereof, a homolog or a fragment thereof; which are operable linked.

[93173] In an embodiment thereof the expression cassette comprises in addition c) a nucleic acid molecule encoding a transit peptide, especially a plastidal transit petide in case in Table I, application no. 17, in column 6 in the same line as SEQ ID NO. 146288 is depicted, plastidic is mentioned, or a mitochondrial transit peptide in case in Table I, application no. 17, in column 6 in the same line as SEQ ID NO. 146288 is depicted, mitochondric is mentioned; which is operable linked, too.

[93174] In another embodiment thereof the expression cassette does not comprise an additional transit peptide in case in Table I, application no. 17, in column 6 in the same line as SEQ ID NO. 146288 is depicted, non-targeted is mentioned.

[93175] In an embodiment the present invention relates to an expresssion cassette comprising a) a promoter, preferably a promoter selected from the group consisting of Big35S, PCUbi, Super and USP, in particular p-Super; and b) the nucleic acid SEQ ID NO. 125226, or a homolog or fragment thereof, or a homolog thereof being depicted in Table I, application no. 17, column 8, in the same line as SEQ ID NO. 125226, preferably the coding region thereof, a homolog or a fragment thereof; which are operable linked.

[93176] In an embodiment thereof the expression cassette comprises in addition c) a nucleic acid molecule encoding a transit peptide, especially a plastidal transit petide in case in Table I, application no. 17, in column 6 in the same line as SEQ ID NO. 125226 is depicted, plastidic is mentioned, or a mitochondrial transit peptide in case in Table I, application no. 17, in column 6 in the same line as SEQ ID NO. 125226 is depicted, mitochondric is mentioned; which is operable linked, too.

[93177] In another embodiment thereof the expression cassette does not comprise an additional transit peptide in case in Table I, application no. 17, in column 6 in the same line as SEQ ID NO. 125226 is depicted, non-targeted is mentioned.

[93178] In an embodiment the present invention relates to an expresssion cassette comprising a) a promoter, preferably a promoter selected from the group consisting of Big35S, PCUbi, Super and USP, in particular p-Super; and b) the nucleic acid SEQ ID NO. 146294, or a homolog or fragment thereof, or a homolog thereof being depicted in Table I, application no. 17, column 8, in the same line as SEQ ID NO. 146294, preferably the coding region thereof, a homolog or a fragment thereof; which are operable linked.

[93179] In an embodiment thereof the expression cassette comprises in addition c) a nucleic acid molecule encoding a transit peptide, especially a plastidal transit petide in case in Table I, application no. 17, in column 6 in the same line as SEQ ID NO. 146294 is depicted, plastidic is mentioned, or a mitochondrial transit peptide in case in Table I, application no. 17, in column 6 in the same line as SEQ ID NO. 146294 is depicted, mitochondric is mentioned; which is operable linked, too.

[93180] In another embodiment thereof the expression cassette does not comprise an additional transit peptide in case in Table I, application no. 17, in column 6 in the same line as SEQ ID NO. 146294 is depicted, non-targeted is mentioned.

[93181] In an embodiment the present invention relates to an expresssion cassette comprising a) a promoter, preferably a promoter selected from the group consisting of Big35S, PCUbi, Super and USP, in particular p-Super; and b) the nucleic acid SEQ ID NO. 9244, or a homolog or fragment thereof, or a homolog thereof being depicted in Table I, application no. 17, column 8, in the same line as SEQ ID NO. 9244, preferably the coding region thereof, a homolog or a fragment thereof; which are operable linked.

[93182] In an embodiment thereof the expression cassette comprises in addition c) a nucleic acid molecule encoding a transit peptide, especially a plastidal transit petide in case in Table I, application no. 17, in column 6 in the same line as SEQ ID NO. 9244 is depicted, plastidic is mentioned, or a mitochondrial transit peptide in case in Table I, application no. 17, in column 6 in the same line as SEQ ID NO. 9244 is depicted, mitochondric is mentioned; which is operable linked, too.

[93183] In another embodiment thereof the expression cassette does not comprise an additional transit peptide in case in Table I, application no. 17, in column 6 in the same line as SEQ ID NO. 9244 is depicted, non-targeted is mentioned.

[93184] In an embodiment the present invention relates to an expresssion cassette comprising a) a promoter, preferably a promoter selected from the group consisting of Big35S, PCUbi, Super and USP, in particular p-Super; and b) the nucleic acid SEQ ID NO. 115655, or a homolog or fragment thereof, or a homolog thereof being depicted in Table I, application no. 17, column 8, in the same line as SEQ ID NO. 115655, preferably the coding region thereof, a homolog or a fragment thereof; which are operable linked.

[93185] In an embodiment thereof the expression cassette comprises in addition c) a nucleic acid molecule encoding a transit peptide, especially a plastidal transit petide in case in Table I, application no. 17, in column 6 in the same line as SEQ ID NO. 115655 is depicted, plastidic is mentioned, or a mitochondrial transit peptide in case in Table I, application no. 17, in column 6 in the same line as SEQ ID NO. 115655 is depicted, mitochondric is mentioned; which is operable linked, too.

[93186] In another embodiment thereof the expression cassette does not comprise an additional transit peptide in case in Table I, application no. 17, in column 6 in the same line as SEQ ID NO. 115655 is depicted, non-targeted is mentioned.

[93187] In an embodiment the present invention relates to an expresssion cassette comprising a) a promoter, preferably a promoter selected from the group consisting of Big35S, PCUbi, Super and USP, in particular p-Super; and b) the nucleic acid SEQ ID NO. 100105, or a homolog or fragment thereof, or a homolog thereof being depicted in Table I, application no. 17, column 8, in the same line as SEQ ID NO. 100105, preferably the coding region thereof, a homolog or a fragment thereof; which are operable linked.

[93188] In an embodiment thereof the expression cassette comprises in addition c) a nucleic acid molecule encoding a transit peptide, especially a plastidal transit petide in case in Table I, application no. 17, in column 6 in the same line as SEQ ID NO. 100105 is depicted, plastidic is mentioned, or a mitochondrial transit peptide in case in Table I, application no. 17, in column 6 in the same line as SEQ ID NO. 100105 is depicted, mitochondric is mentioned; which is operable linked, too.

[93189] In another embodiment thereof the expression cassette does not comprise an additional transit peptide in case in Table I, application no. 17, in column 6 in the same line as SEQ ID NO. 100105 is depicted, non-targeted is mentioned.

[93190] In an embodiment the present invention relates to an expresssion cassette comprising a) a promoter, preferably a promoter selected from the group consisting of Big35S, PCUbi, Super and USP, in particular p-Super; and b) the nucleic acid SEQ ID NO. 80756, or a homolog or fragment thereof, or a homolog thereof being depicted in Table I, application no. 17, column 8, in the same line as SEQ ID NO. 80756, preferably the coding region thereof, a homolog or a fragment thereof; which are operable linked.

[93191] In an embodiment thereof the expression cassette comprises in addition c) a nucleic acid molecule encoding a transit peptide, especially a plastidal transit petide in case in Table I, application no. 17, in column 6 in the same line as SEQ ID NO. 80756 is depicted, plastidic is mentioned, or a mitochondrial transit peptide in case in Table I, application no. 17, in column 6 in the same line as SEQ ID NO. 80756 is depicted, mitochondric is mentioned; which is operable linked, too.

[93192] In another embodiment thereof the expression cassette does not comprise an additional transit peptide in case in Table I, application no. 17, in column 6 in the same line as SEQ ID NO. 80756 is depicted, non-targeted is mentioned.

[93193] In an embodiment the present invention relates to an expresssion cassette comprising a) a promoter, preferably a promoter selected from the group consisting of Big35S, PCUbi, Super and USP, in particular p-Super; and b) the nucleic acid SEQ ID NO. 40741, or a homolog or fragment thereof, or a homolog thereof being depicted in Table I, application no. 17, column 8, in the same line as SEQ ID NO. 40741, preferably the coding region thereof, a homolog or a fragment thereof; which are operable linked.

[93194] In an embodiment thereof the expression cassette comprises in addition c) a nucleic acid molecule encoding a transit peptide, especially a plastidal transit petide in case in Table I, application no. 17, in column 6 in the same line as SEQ ID NO. 40741 is depicted, plastidic is mentioned, or a mitochondrial transit peptide in case in Table I, application no. 17, in column 6 in the same line as SEQ ID NO. 40741 is depicted, mitochondric is mentioned; which is operable linked, too.

[93195] In another embodiment thereof the expression cassette does not comprise an additional transit peptide in case in Table I, application no. 17, in column 6 in the same line as SEQ ID NO. 40741 is depicted, non-targeted is mentioned.

[93196] In an embodiment the present invention relates to an expresssion cassette comprising a) a promoter, preferably a promoter selected from the group consisting of Big35S, PCUbi, Super and USP, in particular p-Super; and b) the nucleic acid SEQ ID NO. 80906, or a homolog or fragment thereof, or a homolog thereof being depicted in Table I, application no. 17, column 8, in the same line as SEQ ID NO. 80906, preferably the coding region thereof, a homolog or a fragment thereof; which are operable linked.

[93197] In an embodiment thereof the expression cassette comprises in addition c) a nucleic acid molecule encoding a transit peptide, especially a plastidal transit petide in case in Table I, application no. 17, in column 6 in the same line as SEQ ID NO. 80906 is depicted, plastidic is mentioned, or a mitochondrial transit peptide in case in Table I, application no. 17, in column 6 in the same line as SEQ ID NO. 80906 is depicted, mitochondric is mentioned; which is operable linked, too.

[93198] In another embodiment thereof the expression cassette does not comprise an additional transit peptide in case in Table I, application no. 17, in column 6 in the same line as SEQ ID NO. 80906 is depicted, non-targeted is mentioned.

[93199] In an embodiment the present invention relates to an expresssion cassette comprising a) a promoter, preferably a promoter selected from the group consisting of Big35S, PCUbi, Super and USP, in particular p-Super; and b) the nucleic acid SEQ ID NO. 81075, or a homolog or fragment thereof, or a homolog thereof being depicted in Table I, application no. 17, column 8, in the same line as SEQ ID NO. 81075, preferably the coding region thereof, a homolog or a fragment thereof; which are operable linked.

[93200] In an embodiment thereof the expression cassette comprises in addition c) a nucleic acid molecule encoding a transit peptide, especially a plastidal transit petide in case in Table I, application no. 17, in column 6 in the same line as SEQ ID NO. 81075 is depicted, plastidic is mentioned, or a mitochondrial transit peptide in case in Table I, application no. 17, in column 6 in the same line as SEQ ID NO. 81075 is depicted, mitochondric is mentioned; which is operable linked, too.

[93201] In another embodiment thereof the expression cassette does not comprise an additional transit peptide in case in Table I, application no. 17, in column 6 in the same line as SEQ ID NO. 81075 is depicted, non-targeted is mentioned.

[93202] In an embodiment the present invention relates to an expresssion cassette comprising a) a promoter, preferably a promoter selected from the group consisting of Big35S, PCUbi, Super and USP, in particular p-Super; and b) the nucleic acid SEQ ID NO. 81451, or a homolog or fragment thereof, or a homolog thereof being depicted in Table I, application no. 17, column 8, in the same line as SEQ ID NO. 81451, preferably the coding region thereof, a homolog or a fragment thereof; which are operable linked.

[93203] In an embodiment thereof the expression cassette comprises in addition c) a nucleic acid molecule encoding a transit peptide, especially a plastidal transit petide in case in Table I, application no. 17, in column 6 in the same line as SEQ ID NO. 81451 is depicted, plastidic is mentioned, or a mitochondrial transit peptide in case in Table I, application no. 17, in column 6 in the same line as SEQ ID NO. 81451 is depicted, mitochondric is mentioned; which is operable linked, too.

[93204] In another embodiment thereof the expression cassette does not comprise an additional transit peptide in case in Table I, application no. 17, in column 6 in the same line as SEQ ID NO. 81451 is depicted, non-targeted is mentioned.

[93205] In an embodiment the present invention relates to an expresssion cassette comprising a) a promoter, preferably a promoter selected from the group consisting of Big35S, PCUbi, Super and USP, in particular p-Super; and b) the nucleic acid SEQ ID NO. 115719, or a homolog or fragment thereof, or a homolog thereof being depicted in Table I, application no. 17, column 8, in the same line as SEQ ID NO. 115719, preferably the coding region thereof, a homolog or a fragment thereof; which are operable linked.

[93206] In an embodiment thereof the expression cassette comprises in addition c) a nucleic acid molecule encoding a transit peptide, especially a plastidal transit petide in case in Table I, application no. 17, in column 6 in the same line as SEQ ID NO. 115719 is depicted, plastidic is mentioned, or a mitochondrial transit peptide in case in Table I, application no. 17, in column 6 in the same line as SEQ ID NO. 115719 is depicted, mitochondric is mentioned; which is operable linked, too.

[93207] In another embodiment thereof the expression cassette does not comprise an additional transit peptide in case in Table I, application no. 17, in column 6 in the same line as SEQ ID NO. 115719 is depicted, non-targeted is mentioned.

[93208] In an embodiment the present invention relates to an expresssion cassette comprising a) a promoter, preferably a promoter selected from the group consisting of Big35S, PCUbi, Super and USP, in particular p-Super; and b) the nucleic acid SEQ ID NO. 81576, or a homolog or fragment thereof, or a homolog thereof being depicted in Table I, application no. 17, column 8, in the same line as SEQ ID NO. 81576, preferably the coding region thereof, a homolog or a fragment thereof; which are operable linked.

[93209] In an embodiment thereof the expression cassette comprises in addition c) a nucleic acid molecule encoding a transit peptide, especially a plastidal transit petide in case in Table I, application no. 17, in column 6 in the same line as SEQ ID NO. 81576 is depicted, plastidic is mentioned, or a mitochondrial transit peptide in case in Table I, application no. 17, in column 6 in the same line as SEQ ID NO. 81576 is depicted, mitochondric is mentioned; which is operable linked, too.

[93210] In another embodiment thereof the expression cassette does not comprise an additional transit peptide in case in Table I, application no. 17, in column 6 in the same line as SEQ ID NO. 81576 is depicted, non-targeted is mentioned.

[93211] In an embodiment the present invention relates to an expresssion cassette comprising a) a promoter, preferably a promoter selected from the group consisting of Big35S, PCUbi, Super and USP, in particular p-Super; and b) the nucleic acid SEQ ID NO. 81935, or a homolog or fragment thereof, or a homolog thereof being depicted in Table I, application no. 17, column 8, in the same line as SEQ ID NO. 81935, preferably the coding region thereof, a homolog or a fragment thereof; which are operable linked.

[93212] In an embodiment thereof the expression cassette comprises in addition c) a nucleic acid molecule encoding a transit peptide, especially a plastidal transit petide in case in Table I, application no. 17, in column 6 in the same line as SEQ ID NO. 81935 is depicted, plastidic is mentioned, or a mitochondrial transit peptide in case in Table I, application no. 17, in column 6 in the same line as SEQ ID NO. 81935 is depicted, mitochondric is mentioned; which is operable linked, too.

[93213] In another embodiment thereof the expression cassette does not comprise an additional transit peptide in case in Table I, application no. 17, in column 6 in the same line as SEQ ID NO. 81935 is depicted, non-targeted is mentioned.

[93214] In an embodiment the present invention relates to an expresssion cassette comprising a) a promoter, preferably a promoter selected from the group consisting of Big35S, PCUbi, Super and USP, in particular p-Super; and b) the nucleic acid SEQ ID NO. 9333, or a homolog or fragment thereof, or a homolog thereof being depicted in Table I, application no. 17, column 8, in the same line as SEQ ID NO. 9333, preferably the coding region thereof, a homolog or a fragment thereof; which are operable linked.

[93215] In an embodiment thereof the expression cassette comprises in addition c) a nucleic acid molecule encoding a transit peptide, especially a plastidal transit petide in case in Table I, application no. 17, in column 6 in the same line as SEQ ID NO. 9333 is depicted, plastidic is mentioned, or a mitochondrial transit peptide in case in Table I, application no. 17, in column 6 in the same line as SEQ ID NO. 9333 is depicted, mitochondric is mentioned; which is operable linked, too.

[93216] In another embodiment thereof the expression cassette does not comprise an additional transit peptide in case in Table I, application no. 17, in column 6 in the same line as SEQ ID NO. 9333 is depicted, non-targeted is mentioned.

[93217] In an embodiment the present invention relates to an expresssion cassette comprising a) a promoter, preferably a promoter selected from the group consisting of Big35S, PCUbi, Super and USP, in particular p-Super; and b) the nucleic acid SEQ ID NO. 146327, or a homolog or fragment thereof, or a homolog thereof being depicted in Table I, application no. 17, column 8, in the same line as SEQ ID NO. 146327, preferably the coding region thereof, a homolog or a fragment thereof; which are operable linked.

[93218] In an embodiment thereof the expression cassette comprises in addition c) a nucleic acid molecule encoding a transit peptide, especially a plastidal transit petide in case in Table I, application no. 17, in column 6 in the same line as SEQ ID NO. 146327 is depicted, plastidic is mentioned, or a mitochondrial transit peptide in case in Table I, application no. 17, in column 6 in the same line as SEQ ID NO. 146327 is depicted, mitochondric is mentioned; which is operable linked, too.

[93219] In another embodiment thereof the expression cassette does not comprise an additional transit peptide in case in Table I, application no. 17, in column 6 in the same line as SEQ ID NO. 146327 is depicted, non-targeted is mentioned.

[93220] In an embodiment the present invention relates to an expresssion cassette comprising a) a promoter, preferably a promoter selected from the group consisting of Big35S, PCUbi, Super and USP, in particular p-USP; and b) the nucleic acid SEQ ID NO. 104660, or a homolog or fragment thereof, or a homolog thereof being depicted in Table I, application no. 17, column 8, in the same line as SEQ ID NO. 104660, preferably the coding region thereof, a homolog or a fragment thereof; which are operable linked.

[93221] In an embodiment thereof the expression cassette comprises in addition c) a nucleic acid molecule encoding a transit peptide, especially a plastidal transit petide in case in Table I, application no. 17, in column 6 in the same line as SEQ ID NO. 104660 is depicted, plastidic is mentioned, or a mitochondrial transit peptide in case in Table I, application no. 17, in column 6 in the same line as SEQ ID NO. 104660 is depicted, mitochondric is mentioned; which is operable linked, too.

[93222] In another embodiment thereof the expression cassette does not comprise an additional transit peptide in case in Table I, application no. 17, in column 6 in the same line as SEQ ID NO. 104660 is depicted, non-targeted is mentioned.

[93223] In an embodiment the present invention relates to an expresssion cassette comprising a) a promoter, preferably a promoter selected from the group consisting of Big35S, PCUbi, Super and USP, in particular p-Super; and b) the nucleic acid SEQ ID NO. 42477, or a homolog or fragment thereof, or a homolog thereof being depicted in Table I, application no. 17, column 8, in the same line as SEQ ID NO. 42477, preferably the coding region thereof, a homolog or a fragment thereof; which are operable linked.

[93224] In an embodiment thereof the expression cassette comprises in addition c) a nucleic acid molecule encoding a transit peptide, especially a plastidal transit petide in case in Table I, application no. 17, in column 6 in the same line as SEQ ID NO. 42477 is depicted, plastidic is mentioned, or a mitochondrial transit peptide in case in Table I, application no. 17, in column 6 in the same line as SEQ ID NO. 42477 is depicted, mitochondric is mentioned; which is operable linked, too.

[93225] In another embodiment thereof the expression cassette does not comprise an additional transit peptide in case in Table I, application no. 17, in column 6 in the same line as SEQ ID NO. 42477 is depicted, non-targeted is mentioned.

[93226] In an embodiment the present invention relates to an expresssion cassette comprising a) a promoter, preferably a promoter selected from the group consisting of Big35S, PCUbi, Super and USP, in particular p-Super; and b) the nucleic acid SEQ ID NO. 82510, or a homolog or fragment thereof, or a homolog thereof being depicted in Table I, application no. 17, column 8, in the same line as SEQ ID NO. 82510, preferably the coding region thereof, a homolog or a fragment thereof; which are operable linked.

[93227] In an embodiment thereof the expression cassette comprises in addition c) a nucleic acid molecule encoding a transit peptide, especially a plastidal transit petide in case in Table I, application no. 17, in column 6 in the same line as SEQ ID NO. 82510 is depicted, plastidic is mentioned, or a mitochondrial transit peptide in case in Table I, application no. 17, in column 6 in the same line as SEQ ID NO. 82510 is depicted, mitochondric is mentioned; which is operable linked, too.

[93228] In another embodiment thereof the expression cassette does not comprise an additional transit peptide in case in Table I, application no. 17, in column 6 in the same line as SEQ ID NO. 82510 is depicted, non-targeted is mentioned.

[93229] In an embodiment the present invention relates to an expresssion cassette comprising a) a promoter, preferably a promoter selected from the group consisting of Big35S, PCUbi, Super and USP, in particular p-Super; and b) the nucleic acid SEQ ID NO. 9470, or a homolog or fragment thereof, or a homolog thereof being depicted in Table I, application no. 17, column 8, in the same line as SEQ ID NO. 9470, preferably the coding region thereof, a homolog or a fragment thereof; which are operable linked.

[93230] In an embodiment thereof the expression cassette comprises in addition c) a nucleic acid molecule encoding a transit peptide, especially a plastidal transit petide in case in Table I, application no. 17, in column 6 in the same line as SEQ ID NO. 9470 is depicted, plastidic is mentioned, or a mitochondrial transit peptide in case in Table I, application no. 17, in column 6 in the same line as SEQ ID NO. 9470 is depicted, mitochondric is mentioned; which is operable linked, too.

[93231] In another embodiment thereof the expression cassette does not comprise an additional transit peptide in case in Table I, application no. 17, in column 6 in the same line as SEQ ID NO. 9470 is depicted, non-targeted is mentioned.

[93232] In an embodiment the present invention relates to an expresssion cassette comprising a) a promoter, preferably a promoter selected from the group consisting of Big35S, PCUbi, Super and USP, in particular p-USP; and b) the nucleic acid SEQ ID NO. 9492, or a homolog or fragment thereof, or a homolog thereof being depicted in Table I, application no. 17, column 8, in the same line as SEQ ID NO. 9492, preferably the coding region thereof, a homolog or a fragment thereof; which are operable linked.

[93233] In an embodiment thereof the expression cassette comprises in addition c) a nucleic acid molecule encoding a transit peptide, especially a plastidal transit petide in case in Table I, application no. 17, in column 6 in the same line as SEQ ID NO. 9492 is depicted, plastidic is mentioned, or a mitochondrial transit peptide in case in Table I, application no. 17, in column 6 in the same line as SEQ ID NO. 9492 is depicted, mitochondric is mentioned; which is operable linked, too.

[93234] In another embodiment thereof the expression cassette does not comprise an additional transit peptide in case in Table I, application no. 17, in column 6 in the same line as SEQ ID NO. 9492 is depicted, non-targeted is mentioned.

[93235] In an embodiment the present invention relates to an expresssion cassette comprising a) a promoter, preferably a promoter selected from the group consisting of Big35S, PCUbi, Super and USP, in particular p-Super; and b) the nucleic acid SEQ ID NO. 42502, or a homolog or fragment thereof, or a homolog thereof being depicted in Table I, application no. 17, column 8, in the same line as SEQ ID NO. 42502, preferably the coding region thereof, a homolog or a fragment thereof; which are operable linked.

[93236] In an embodiment thereof the expression cassette comprises in addition c) a nucleic acid molecule encoding a transit peptide, especially a plastidal transit petide in case in Table I, application no. 17, in column 6 in the same line as SEQ ID NO. 42502 is depicted, plastidic is mentioned, or a mitochondrial transit peptide in case in Table I, application no. 17, in column 6 in the same line as SEQ ID NO. 42502 is depicted, mitochondric is mentioned; which is operable linked, too.

[93237] In another embodiment thereof the expression cassette does not comprise an additional transit peptide in case in Table I, application no. 17, in column 6 in the same line as SEQ ID NO. 42502 is depicted, non-targeted is mentioned.

[93238] In an embodiment the present invention relates to an expresssion cassette comprising a) a promoter, preferably a promoter selected from the group consisting of Big35S, PCUbi, Super and USP, in particular p-Super; and b) the nucleic acid SEQ ID NO. 146364, or a homolog or fragment thereof, or a homolog thereof being depicted in Table I, application no. 17, column 8, in the same line as SEQ ID NO. 146364, preferably the coding region thereof, a homolog or a fragment thereof; which are operable linked.

[93239] In an embodiment thereof the expression cassette comprises in addition c) a nucleic acid molecule encoding a transit peptide, especially a plastidal transit petide in case in Table I, application no. 17, in column 6 in the same line as SEQ ID NO. 146364 is depicted, plastidic is mentioned, or a mitochondrial transit peptide in case in Table I, application no. 17, in column 6 in the same line as SEQ ID NO. 146364 is depicted, mitochondric is mentioned; which is operable linked, too.

[93240] In another embodiment thereof the expression cassette does not comprise an additional transit peptide in case in Table I, application no. 17, in column 6 in the same line as SEQ ID NO. 146364 is depicted, non-targeted is mentioned.

[93241] In an embodiment the present invention relates to an expresssion cassette comprising a) a promoter, preferably a promoter selected from the group consisting of Big35S, PCUbi, Super and USP, in particular p-Super; and b) the nucleic acid SEQ ID NO. 10104, or a homolog or fragment thereof, or a homolog thereof being depicted in Table I, application no. 17, column 8, in the same line as SEQ ID NO. 10104, preferably the coding region thereof, a homolog or a fragment thereof; which are operable linked.

[93242] In an embodiment thereof the expression cassette comprises in addition c) a nucleic acid molecule encoding a transit peptide, especially a plastidal transit petide in case in Table I, application no. 17, in column 6 in the same line as SEQ ID NO. 10104 is depicted, plastidic is mentioned, or a mitochondrial transit peptide in case in Table I, application no. 17, in column 6 in the same line as SEQ ID NO. 10104 is depicted, mitochondric is mentioned; which is operable linked, too.

[93243] In another embodiment thereof the expression cassette does not comprise an additional transit peptide in case in Table I, application no. 17, in column 6 in the same line as SEQ ID NO. 10104 is depicted, non-targeted is mentioned.

[93244] In an embodiment the present invention relates to an expresssion cassette comprising a) a promoter, preferably a promoter selected from the group consisting of Big35S, PCUbi, Super and USP, in particular p-Super; and b) the nucleic acid SEQ ID NO. 82866, or a homolog or fragment thereof, or a homolog thereof being depicted in Table I, application no. 17, column 8, in the same line as SEQ ID NO. 82866, preferably the coding region thereof, a homolog or a fragment thereof; which are operable linked.

[93245] In an embodiment thereof the expression cassette comprises in addition c) a nucleic acid molecule encoding a transit peptide, especially a plastidal transit petide in case in Table I, application no. 17, in column 6 in the same line as SEQ ID NO. 82866 is depicted, plastidic is mentioned, or a mitochondrial transit peptide in case in Table I, application no. 17, in column 6 in the same line as SEQ ID NO. 82866 is depicted, mitochondric is mentioned; which is operable linked, too.

[93246] In another embodiment thereof the expression cassette does not comprise an additional transit peptide in case in Table I, application no. 17, in column 6 in the same line as SEQ ID NO. 82866 is depicted, non-targeted is mentioned.

[93247] In an embodiment the present invention relates to an expresssion cassette comprising a) a promoter, preferably a promoter selected from the group consisting of Big35S, PCUbi, Super and USP, in particular p-Super; and b) the nucleic acid SEQ ID NO. 42579, or a homolog or fragment thereof, or a homolog thereof being depicted in Table I, application no. 17, column 8, in the same line as SEQ ID NO. 42579, preferably the coding region thereof, a homolog or a fragment thereof; which are operable linked.

[93248] In an embodiment thereof the expression cassette comprises in addition c) a nucleic acid molecule encoding a transit peptide, especially a plastidal transit petide in case in Table I, application no. 17, in column 6 in the same line as SEQ ID NO. 42579 is depicted, plastidic is mentioned, or a mitochondrial transit peptide in case in Table I, application no. 17, in column 6 in the same line as SEQ ID NO. 42579 is depicted, mitochondric is mentioned; which is operable linked, too.

[93249] In another embodiment thereof the expression cassette does not comprise an additional transit peptide in case in Table I, application no. 17, in column 6 in the same line as SEQ ID NO. 42579 is depicted, non-targeted is mentioned.

[93250] In an embodiment the present invention relates to an expresssion cassette comprising a) a promoter, preferably a promoter selected from the group consisting of Big35S, PCUbi, Super and USP, in particular p-Super; and b) the nucleic acid SEQ ID NO. 94051, or a homolog or fragment thereof, or a homolog thereof being depicted in Table I, application no. 17, column 8, in the same line as SEQ ID NO. 94051, preferably the coding region thereof, a homolog or a fragment thereof; which are operable linked.

[93251] In an embodiment thereof the expression cassette comprises in addition c) a nucleic acid molecule encoding a transit peptide, especially a plastidal transit petide in case in Table I, application no. 17, in column 6 in the same line as SEQ ID NO. 94051 is depicted, plastidic is mentioned, or a mitochondrial transit peptide in case in Table I, application no. 17, in column 6 in the same line as SEQ ID NO. 94051 is depicted, mitochondric is mentioned; which is operable linked, too.

[93252] In another embodiment thereof the expression cassette does not comprise an additional transit peptide in case in Table I, application no. 17, in column 6 in the same line as SEQ ID NO. 94051 is depicted, non-targeted is mentioned.

[93253] In an embodiment the present invention relates to an expresssion cassette comprising a) a promoter, preferably a promoter selected from the group consisting of Big35S, PCUbi, Super and USP, in particular p-Super; and b) the nucleic acid SEQ ID NO. 94380, or a homolog or fragment thereof, or a homolog thereof being depicted in Table I, application no. 17, column 8, in the same line as SEQ ID NO. 94380, preferably the coding region thereof, a homolog or a fragment thereof; which are operable linked.

[93254] In an embodiment thereof the expression cassette comprises in addition c) a nucleic acid molecule encoding a transit peptide, especially a plastidal transit petide in case in Table I, application no. 17, in column 6 in the same line as SEQ ID NO. 94380 is depicted, plastidic is mentioned, or a mitochondrial transit peptide in case in Table I, application no. 17, in column 6 in the same line as SEQ ID NO. 94380 is depicted, mitochondric is mentioned; which is operable linked, too.

[93255] In another embodiment thereof the expression cassette does not comprise an additional transit peptide in case in Table I, application no. 17, in column 6 in the same line as SEQ ID NO. 94380 is depicted, non-targeted is mentioned.

[93256] In an embodiment the present invention relates to an expresssion cassette comprising a) a promoter, preferably a promoter selected from the group consisting of Big35S, PCUbi, Super and USP, in particular p-Super; and b) the nucleic acid SEQ ID NO. 146440, or a homolog or fragment thereof, or a homolog thereof being depicted in Table I, application no. 17, column 8, in the same line as SEQ ID NO. 146440, preferably the coding region thereof, a homolog or a fragment thereof; which are operable linked.

[93257] In an embodiment thereof the expression cassette comprises in addition c) a nucleic acid molecule encoding a transit peptide, especially a plastidal transit petide in case in Table I, application no. 17, in column 6 in the same line as SEQ ID NO. 146440 is depicted, plastidic is mentioned, or a mitochondrial transit peptide in case in Table I, application no. 17, in column 6 in the same line as SEQ ID NO. 146440 is depicted, mitochondric is mentioned; which is operable linked, too.

[93258] In another embodiment thereof the expression cassette does not comprise an additional transit peptide in case in Table I, application no. 17, in column 6 in the same line as SEQ ID NO. 146440 is depicted, non-targeted is mentioned.

[93259] In an embodiment the present invention relates to an expresssion cassette comprising a) a promoter, preferably a promoter selected from the group consisting of Big35S, PCUbi, Super and USP, in particular p-Super; and b) the nucleic acid SEQ ID NO. 116172, or a homolog or fragment thereof, or a homolog thereof being depicted in Table I, application no. 17, column 8, in the same line as SEQ ID NO. 116172, preferably the coding region thereof, a homolog or a fragment thereof; which are operable linked.

[93260] In an embodiment thereof the expression cassette comprises in addition c) a nucleic acid molecule encoding a transit peptide, especially a plastidal transit petide in case in Table I, application no. 17, in column 6 in the same line as SEQ ID NO. 116172 is depicted, plastidic is mentioned, or a mitochondrial transit peptide in case in Table I, application no. 17, in column 6 in the same line as SEQ ID NO. 116172 is depicted, mitochondric is mentioned; which is operable linked, too.

[93261] In another embodiment thereof the expression cassette does not comprise an additional transit peptide in case in Table I, application no. 17, in column 6 in the same line as SEQ ID NO. 116172 is depicted, non-targeted is mentioned.

[93262] In an embodiment the present invention relates to an expresssion cassette comprising a) a promoter, preferably a promoter selected from the group consisting of Big35S, PCUbi, Super and USP, in particular p-Super; and b) the nucleic acid SEQ ID NO. 146472, or a homolog or fragment thereof, or a homolog thereof being depicted in Table I, application no. 17, column 8, in the same line as SEQ ID NO. 146472, preferably the coding region thereof, a homolog or a fragment thereof; which are operable linked.

[93263] In an embodiment thereof the expression cassette comprises in addition c) a nucleic acid molecule encoding a transit peptide, especially a plastidal transit petide in case in Table I, application no. 17, in column 6 in the same line as SEQ ID NO. 146472 is depicted, plastidic is mentioned, or a mitochondrial transit peptide in case in Table I, application no. 17, in column 6 in the same line as SEQ ID NO. 146472 is depicted, mitochondric is mentioned; which is operable linked, too.

[93264] In another embodiment thereof the expression cassette does not comprise an additional transit peptide in case in Table I, application no. 17, in column 6 in the same line as SEQ ID NO. 146472 is depicted, non-targeted is mentioned.

[93265] In an embodiment the present invention relates to an expresssion cassette comprising a) a promoter, preferably a promoter selected from the group consisting of Big35S, PCUbi, Super and USP, in particular p-USP; and b) the nucleic acid SEQ ID NO. 146646, or a homolog or fragment thereof, or a homolog thereof being depicted in Table I, application no. 17, column 8, in the same line as SEQ ID NO. 146646, preferably the coding region thereof, a homolog or a fragment thereof; which are operable linked.

[93266] In an embodiment thereof the expression cassette comprises in addition c) a nucleic acid molecule encoding a transit peptide, especially a plastidal transit petide in case in Table I, application no. 17, in column 6 in the same line as SEQ ID NO. 146646 is depicted, plastidic is mentioned, or a mitochondrial transit peptide in case in Table I, application no. 17, in column 6 in the same line as SEQ ID NO. 146646 is depicted, mitochondric is mentioned; which is operable linked, too.

[93267] In another embodiment thereof the expression cassette does not comprise an additional transit peptide in case in Table I, application no. 17, in column 6 in the same line as SEQ ID NO. 146646 is depicted, non-targeted is mentioned.

[93268] In an embodiment the present invention relates to an expresssion cassette comprising a) a promoter, preferably a promoter selected from the group consisting of Big35S, PCUbi, Super and USP, in particular p-Super; and b) the nucleic acid SEQ ID NO. 146732, or a homolog or fragment thereof, or a homolog thereof being depicted in Table I, application no. 17, column 8, in the same line as SEQ ID NO. 146732, preferably the coding region thereof, a homolog or a fragment thereof; which are operable linked.

[93269] In an embodiment thereof the expression cassette comprises in addition c) a nucleic acid molecule encoding a transit peptide, especially a plastidal transit petide in case in Table I, application no. 17, in column 6 in the same line as SEQ ID NO. 146732 is depicted, plastidic is mentioned, or a mitochondrial transit peptide in case in Table I, application no. 17, in column 6 in the same line as SEQ ID NO. 146732 is depicted, mitochondric is mentioned; which is operable linked, too.

[93270] In another embodiment thereof the expression cassette does not comprise an additional transit peptide in case in Table I, application no. 17, in column 6 in the same line as SEQ ID NO. 146732 is depicted, non-targeted is mentioned.

[93271] In an embodiment the present invention relates to an expresssion cassette comprising a) a promoter, preferably a promoter selected from the group consisting of Big35S, PCUbi, Super and USP, in particular p-USP; and b) the nucleic acid SEQ ID NO. 94386, or a homolog or fragment thereof, or a homolog thereof being depicted in Table I, application no. 17, column 8, in the same line as SEQ ID NO. 94386, preferably the coding region thereof, a homolog or a fragment thereof; which are operable linked.

[93272] In an embodiment thereof the expression cassette comprises in addition c) a nucleic acid molecule encoding a transit peptide, especially a plastidal transit petide in case in Table I, application no. 17, in column 6 in the same line as SEQ ID NO. 94386 is depicted, plastidic is mentioned, or a mitochondrial transit peptide in case in Table I, application no. 17, in column 6 in the same line as SEQ ID NO. 94386 is depicted, mitochondric is mentioned; which is operable linked, too.

[93273] In another embodiment thereof the expression cassette does not comprise an additional transit peptide in case in Table I, application no. 17, in column 6 in the same line as SEQ ID NO. 94386 is depicted, non-targeted is mentioned.

[93274] In an embodiment the present invention relates to an expresssion cassette comprising a) a promoter, preferably a promoter selected from the group consisting of Big35S, PCUbi, Super and USP, in particular p-Super; and b) the nucleic acid SEQ ID NO. 136098, or a homolog or fragment thereof, or a homolog thereof being depicted in Table I, application no. 17, column 8, in the same line as SEQ ID NO. 136098, preferably the coding region thereof, a homolog or a fragment thereof; which are operable linked.

[93275] In an embodiment thereof the expression cassette comprises in addition c) a nucleic acid molecule encoding a transit peptide, especially a plastidal transit petide in case in Table I, application no. 17, in column 6 in the same line as SEQ ID NO. 136098 is depicted, plastidic is mentioned, or a mitochondrial transit peptide in case in Table I, application no. 17, in column 6 in the same line as SEQ ID NO. 136098 is depicted, mitochondric is mentioned; which is operable linked, too.

[93276] In another embodiment thereof the expression cassette does not comprise an additional transit peptide in case in Table I, application no. 17, in column 6 in the same line as SEQ ID NO. 136098 is depicted, non-targeted is mentioned.

[93277] In an embodiment the present invention relates to an expresssion cassette comprising a) a promoter, preferably a promoter selected from the group consisting of Big35S, PCUbi, Super and USP, in particular p-Super; and b) the nucleic acid SEQ ID NO. 10708, or a homolog or fragment thereof, or a homolog thereof being depicted in Table I, application no. 17, column 8, in the same line as SEQ ID NO. 10708, preferably the coding region thereof, a homolog or a fragment thereof; which are operable linked.

[93278] In an embodiment thereof the expression cassette comprises in addition c) a nucleic acid molecule encoding a transit peptide, especially a plastidal transit petide in case in Table I, application no. 17, in column 6 in the same line as SEQ ID NO. 10708 is depicted, plastidic is mentioned, or a mitochondrial transit peptide in case in Table I, application no. 17, in column 6 in the same line as SEQ ID NO. 10708 is depicted, mitochondric is mentioned; which is operable linked, too.

[93279] In another embodiment thereof the expression cassette does not comprise an additional transit peptide in case in Table I, application no. 17, in column 6 in the same line as SEQ ID NO. 10708 is depicted, non-targeted is mentioned.

[93280] In an embodiment the present invention relates to an expresssion cassette comprising a) a promoter, preferably a promoter selected from the group consisting of Big35S, PCUbi, Super and USP, in particular p-Super; and b) the nucleic acid SEQ ID NO. 146834, or a homolog or fragment thereof, or a homolog thereof being depicted in Table I, application no. 17, column 8, in the same line as SEQ ID NO. 146834, preferably the coding region thereof, a homolog or a fragment thereof; which are operable linked.

[93281] In an embodiment thereof the expression cassette comprises in addition c) a nucleic acid molecule encoding a transit peptide, especially a plastidal transit petide in case in Table I, application no. 17, in column 6 in the same line as SEQ ID NO. 146834 is depicted, plastidic is mentioned, or a mitochondrial transit peptide in case in Table I, application no. 17, in column 6 in the same line as SEQ ID NO. 146834 is depicted, mitochondric is mentioned; which is operable linked, too.

[93282] In another embodiment thereof the expression cassette does not comprise an additional transit peptide in case in Table I, application no. 17, in column 6 in the same line as SEQ ID NO. 146834 is depicted, non-targeted is mentioned.

[93283] In an embodiment the present invention relates to an expresssion cassette comprising a) a promoter, preferably a promoter selected from the group consisting of Big35S, PCUbi, Super and USP, in particular p-Super; and b) the nucleic acid SEQ ID NO. 10726, or a homolog or fragment thereof, or a homolog thereof being depicted in Table I, application no. 17, column 8, in the same line as SEQ ID NO. 10726, preferably the coding region thereof, a homolog or a fragment thereof; which are operable linked.

[93284] In an embodiment thereof the expression cassette comprises in addition c) a nucleic acid molecule encoding a transit peptide, especially a plastidal transit petide in case in Table I, application no. 17, in column 6 in the same line as SEQ ID NO. 10726 is depicted, plastidic is mentioned, or a mitochondrial transit peptide in case in Table I, application no. 17, in column 6 in the same line as SEQ ID NO. 10726 is depicted, mitochondric is mentioned; which is operable linked, too.

[93285] In another embodiment thereof the expression cassette does not comprise an additional transit peptide in case in Table I, application no. 17, in column 6 in the same line as SEQ ID NO. 10726 is depicted, non-targeted is mentioned.

[93286] In an embodiment the present invention relates to an expresssion cassette comprising a) a promoter, preferably a promoter selected from the group consisting of Big35S, PCUbi, Super and USP, in particular p-USP; and b) the nucleic acid SEQ ID NO. 101327, or a homolog or fragment thereof, or a homolog thereof being depicted in Table I, application no. 17, column 8, in the same line as SEQ ID NO. 101327, preferably the coding region thereof, a homolog or a fragment thereof; which are operable linked.

[93287] In an embodiment thereof the expression cassette comprises in addition c) a nucleic acid molecule encoding a transit peptide, especially a plastidal transit petide in case in Table I, application no. 17, in column 6 in the same line as SEQ ID NO. 101327 is depicted, plastidic is mentioned, or a mitochondrial transit peptide in case in Table I, application no. 17, in column 6 in the same line as SEQ ID NO. 101327 is depicted, mitochondric is mentioned; which is operable linked, too.

[93288] In another embodiment thereof the expression cassette does not comprise an additional transit peptide in case in Table I, application no. 17, in column 6 in the same line as SEQ ID NO. 101327 is depicted, non-targeted is mentioned.

[93289] In an embodiment the present invention relates to an expresssion cassette comprising a) a promoter, preferably a promoter selected from the group consisting of Big35S, PCUbi, Super and USP, in particular p-Super; and b) the nucleic acid SEQ ID NO. 83821, or a homolog or fragment thereof, or a homolog thereof being depicted in Table I, application no. 17, column 8, in the same line as SEQ ID NO. 83821, preferably the coding region thereof, a homolog or a fragment thereof; which are operable linked.

[93290] In an embodiment thereof the expression cassette comprises in addition c) a nucleic acid molecule encoding a transit peptide, especially a plastidal transit petide in case in Table I, application no. 17, in column 6 in the same line as SEQ ID NO. 83821 is depicted, plastidic is mentioned, or a mitochondrial transit peptide in case in Table I, application no. 17, in column 6 in the same line as SEQ ID NO. 83821 is depicted, mitochondric is mentioned; which is operable linked, too.

[93291] In another embodiment thereof the expression cassette does not comprise an additional transit peptide in case in Table I, application no. 17, in column 6 in the same line as SEQ ID NO. 83821 is depicted, non-targeted is mentioned.

[93292] In an embodiment the present invention relates to an expresssion cassette comprising a) a promoter, preferably a promoter selected from the group consisting of Big35S, PCUbi, Super and USP, in particular p-Super; and b) the nucleic acid SEQ ID NO. 44372, or a homolog or fragment thereof, or a homolog thereof being depicted in Table I, application no. 17, column 8, in the same line as SEQ ID NO. 44372, preferably the coding region thereof, a homolog or a fragment thereof; which are operable linked.

[93293] In an embodiment thereof the expression cassette comprises in addition c) a nucleic acid molecule encoding a transit peptide, especially a plastidal transit petide in case in Table I, application no. 17, in column 6 in the same line as SEQ ID NO. 44372 is depicted, plastidic is mentioned, or a mitochondrial transit peptide in case in Table I, application no. 17, in column 6 in the same line as SEQ ID NO. 44372 is depicted, mitochondric is mentioned; which is operable linked, too.

[93294] In another embodiment thereof the expression cassette does not comprise an additional transit peptide in case in Table I, application no. 17, in column 6 in the same line as SEQ ID NO. 44372 is depicted, non-targeted is mentioned.

[93295] In an embodiment the present invention relates to an expresssion cassette comprising a) a promoter, preferably a promoter selected from the group consisting of Big35S, PCUbi, Super and USP, in particular p-USP; and b) the nucleic acid SEQ ID NO. 44378, or a homolog or fragment thereof, or a homolog thereof being depicted in Table I, application no. 17, column 8, in the same line as SEQ ID NO. 44378, preferably the coding region thereof, a homolog or a fragment thereof; which are operable linked.

[93296] In an embodiment thereof the expression cassette comprises in addition c) a nucleic acid molecule encoding a transit peptide, especially a plastidal transit petide in case in Table I, application no. 17, in column 6 in the same line as SEQ ID NO. 44378 is depicted, plastidic is mentioned, or a mitochondrial transit peptide in case in Table I, application no. 17, in column 6 in the same line as SEQ ID NO. 44378 is depicted, mitochondric is mentioned; which is operable linked, too.

[93297] In another embodiment thereof the expression cassette does not comprise an additional transit peptide in case in Table I, application no. 17, in column 6 in the same line as SEQ ID NO. 44378 is depicted, non-targeted is mentioned.

[93298] In an embodiment the present invention relates to an expresssion cassette comprising a) a promoter, preferably a promoter selected from the group consisting of Big35S, PCUbi, Super and USP, in particular p-Super; and b) the nucleic acid SEQ ID NO. 10740, or a homolog or fragment thereof, or a homolog thereof being depicted in Table I, application no. 17, column 8, in the same line as SEQ ID NO. 10740, preferably the coding region thereof, a homolog or a fragment thereof; which are operable linked.

[93299] In an embodiment thereof the expression cassette comprises in addition c) a nucleic acid molecule encoding a transit peptide, especially a plastidal transit petide in case in Table I, application no. 17, in column 6 in the same line as SEQ ID NO. 10740 is depicted, plastidic is mentioned, or a mitochondrial transit peptide in case in Table I, application no. 17, in column 6 in the same line as SEQ ID NO. 10740 is depicted, mitochondric is mentioned; which is operable linked, too.

[93300] In another embodiment thereof the expression cassette does not comprise an additional transit peptide in case in Table I, application no. 17, in column 6 in the same line as SEQ ID NO. 10740 is depicted, non-targeted is mentioned.

[93301] In an embodiment the present invention relates to an expresssion cassette comprising a) a promoter, preferably a promoter selected from the group consisting of Big35S, PCUbi, Super and USP, in particular p-Super; and b) the nucleic acid SEQ ID NO. 146848, or a homolog or fragment thereof, or a homolog thereof being depicted in Table I, application no. 17, column 8, in the same line as SEQ ID NO. 146848, preferably the coding region thereof, a homolog or a fragment thereof; which are operable linked.

[93302] In an embodiment thereof the expression cassette comprises in addition c) a nucleic acid molecule encoding a transit peptide, especially a plastidal transit petide in case in Table I, application no. 17, in column 6 in the same line as SEQ ID NO. 146848 is depicted, plastidic is mentioned, or a mitochondrial transit peptide in case in Table I, application no. 17, in column 6 in the same line as SEQ ID NO. 146848 is depicted, mitochondric is mentioned; which is operable linked, too.

[93303] In another embodiment thereof the expression cassette does not comprise an additional transit peptide in case in Table I, application no. 17, in column 6 in the same line as SEQ ID NO. 146848 is depicted, non-targeted is mentioned.

[93304] In an embodiment the present invention relates to an expresssion cassette comprising a) a promoter, preferably a promoter selected from the group consisting of Big35S, PCUbi, Super and USP, in particular p-Super; and b) the nucleic acid SEQ ID NO. 106532, or a homolog or fragment thereof, or a homolog thereof being depicted in Table I, application no. 17, column 8, in the same line as SEQ ID NO. 106532, preferably the coding region thereof, a homolog or a fragment thereof; which are operable linked.

[93305] In an embodiment thereof the expression cassette comprises in addition c) a nucleic acid molecule encoding a transit peptide, especially a plastidal transit petide in case in Table I, application no. 17, in column 6 in the same line as SEQ ID NO. 106532 is depicted, plastidic is mentioned, or a mitochondrial transit peptide in case in Table I, application no. 17, in column 6 in the same line as SEQ ID NO. 106532 is depicted, mitochondric is mentioned; which is operable linked, too.

[93306] In another embodiment thereof the expression cassette does not comprise an additional transit peptide in case in Table I, application no. 17, in column 6 in the same line as SEQ ID NO. 106532 is depicted, non-targeted is mentioned.

[93307] In an embodiment the present invention relates to an expresssion cassette comprising a) a promoter, preferably a promoter selected from the group consisting of Big35S, PCUbi, Super and USP, in particular p-Super; and b) the nucleic acid SEQ ID NO. 94542, or a homolog or fragment thereof, or a homolog thereof being depicted in Table I, application no. 17, column 8, in the same line as SEQ ID NO. 94542, preferably the coding region thereof, a homolog or a fragment thereof; which are operable linked.

[93308] In an embodiment thereof the expression cassette comprises in addition c) a nucleic acid molecule encoding a transit peptide, especially a plastidal transit petide in case in Table I, application no. 17, in column 6 in the same line as SEQ ID NO. 94542 is depicted, plastidic is mentioned, or a mitochondrial transit peptide in case in Table I, application no. 17, in column 6 in the same line as SEQ ID NO. 94542 is depicted, mitochondric is mentioned; which is operable linked, too.

[93309] In another embodiment thereof the expression cassette does not comprise an additional transit peptide in case in Table I, application no. 17, in column 6 in the same line as SEQ ID NO. 94542 is depicted, non-targeted is mentioned.

[93310] In an embodiment the present invention relates to an expresssion cassette comprising a) a promoter, preferably a promoter selected from the group consisting of Big35S, PCUbi, Super and USP, in particular p-USP; and b) the nucleic acid SEQ ID NO. 126421, or a homolog or fragment thereof, or a homolog thereof being depicted in Table I, application no. 17, column 8, in the same line as SEQ ID NO. 126421, preferably the coding region thereof, a homolog or a fragment thereof; which are operable linked.

[93311] In an embodiment thereof the expression cassette comprises in addition c) a nucleic acid molecule encoding a transit peptide, especially a plastidal transit petide in case in Table I, application no. 17, in column 6 in the same line as SEQ ID NO. 126421 is depicted, plastidic is mentioned, or a mitochondrial transit peptide in case in Table I, application no. 17, in column 6 in the same line as SEQ ID NO. 126421 is depicted, mitochondric is mentioned; which is operable linked, too.

[93312] In another embodiment thereof the expression cassette does not comprise an additional transit peptide in case in Table I, application no. 17, in column 6 in the same line as SEQ ID NO. 126421 is depicted, non-targeted is mentioned.

[93313] In an embodiment the present invention relates to an expresssion cassette comprising a) a promoter, preferably a promoter selected from the group consisting of Big35S, PCUbi, Super and USP, in particular p-Super; and b) the nucleic acid SEQ ID NO. 146921, or a homolog or fragment thereof, or a homolog thereof being depicted in Table I, application no. 17, column 8, in the same line as SEQ ID NO. 146921, preferably the coding region thereof, a homolog or a fragment thereof; which are operable linked.

[93314] In an embodiment thereof the expression cassette comprises in addition c) a nucleic acid molecule encoding a transit peptide, especially a plastidal transit petide in case in Table I, application no. 17, in column 6 in the same line as SEQ ID NO. 146921 is depicted, plastidic is mentioned, or a mitochondrial transit peptide in case in Table I, application no. 17, in column 6 in the same line as SEQ ID NO. 146921 is depicted, mitochondric is mentioned; which is operable linked, too.

[93315] In another embodiment thereof the expression cassette does not comprise an additional transit peptide in case in Table I, application no. 17, in column 6 in the same line as SEQ ID NO. 146921 is depicted, non-targeted is mentioned.

[93316] In an embodiment the present invention relates to an expresssion cassette comprising a) a promoter, preferably a promoter selected from the group consisting of Big35S, PCUbi, Super and USP, in particular p-Super; and b) the nucleic acid SEQ ID NO. 94735, or a homolog or fragment thereof, or a homolog thereof being depicted in Table I, application no. 17, column 8, in the same line as SEQ ID NO. 94735, preferably the coding region thereof, a homolog or a fragment thereof; which are operable linked.

[93317] In an embodiment thereof the expression cassette comprises in addition c) a nucleic acid molecule encoding a transit peptide, especially a plastidal transit petide in case in Table I, application no. 17, in column 6 in the same line as SEQ ID NO. 94735 is depicted, plastidic is mentioned, or a mitochondrial transit peptide in case in Table I, application no. 17, in column 6 in the same line as SEQ ID NO. 94735 is depicted, mitochondric is mentioned; which is operable linked, too.

[93318] In another embodiment thereof the expression cassette does not comprise an additional transit peptide in case in Table I, application no. 17, in column 6 in the same line as SEQ ID NO. 94735 is depicted, non-targeted is mentioned.

[93319] In an embodiment the present invention relates to an expresssion cassette comprising a) a promoter, preferably a promoter selected from the group consisting of Big35S, PCUbi, Super and USP, in particular p-Super; and b) the nucleic acid SEQ ID NO. 45321, or a homolog or fragment thereof, or a homolog thereof being depicted in Table I, application no. 17, column 8, in the same line as SEQ ID NO. 45321, preferably the coding region thereof, a homolog or a fragment thereof; which are operable linked.

[93320] In an embodiment thereof the expression cassette comprises in addition c) a nucleic acid molecule encoding a transit peptide, especially a plastidal transit petide in case in Table I, application no. 17, in column 6 in the same line as SEQ ID NO. 45321 is depicted, plastidic is mentioned, or a mitochondrial transit peptide in case in Table I, application no. 17, in column 6 in the same line as SEQ ID NO. 45321 is depicted, mitochondric is mentioned; which is operable linked, too.

[93321] In another embodiment thereof the expression cassette does not comprise an additional transit peptide in case in Table I, application no. 17, in column 6 in the same line as SEQ ID NO. 45321 is depicted, non-targeted is mentioned.

[93322] In an embodiment the present invention relates to an expresssion cassette comprising a) a promoter, preferably a promoter selected from the group consisting of Big35S, PCUbi, Super and USP, in particular p-Super; and b) the nucleic acid SEQ ID NO. 45394, or a homolog or fragment thereof, or a homolog thereof being depicted in Table I, application no. 17, column 8, in the same line as SEQ ID NO. 45394, preferably the coding region thereof, a homolog or a fragment thereof; which are operable linked.

[93323] In an embodiment thereof the expression cassette comprises in addition c) a nucleic acid molecule encoding a transit peptide, especially a plastidal transit petide in case in Table I, application no. 17, in column 6 in the same line as SEQ ID NO. 45394 is depicted, plastidic is mentioned, or a mitochondrial transit peptide in case in Table I, application no. 17, in column 6 in the same line as SEQ ID NO. 45394 is depicted, mitochondric is mentioned; which is operable linked, too.

[93324] In another embodiment thereof the expression cassette does not comprise an additional transit peptide in case in Table I, application no. 17, in column 6 in the same line as SEQ ID NO. 45394 is depicted, non-targeted is mentioned.

[93325] In an embodiment the present invention relates to an expresssion cassette comprising a) a promoter, preferably a promoter selected from the group consisting of Big35S, PCUbi, Super and USP, in particular p-USP; and b) the nucleic acid SEQ ID NO. 45556, or a homolog or fragment thereof, or a homolog thereof being depicted in Table I, application no. 17, column 8, in the same line as SEQ ID NO. 45556, preferably the coding region thereof, a homolog or a fragment thereof; which are operable linked.

[93326] In an embodiment thereof the expression cassette comprises in addition c) a nucleic acid molecule encoding a transit peptide, especially a plastidal transit petide in case in Table I, application no. 17, in column 6 in the same line as SEQ ID NO. 45556 is depicted, plastidic is mentioned, or a mitochondrial transit peptide in case in Table I, application no. 17, in column 6 in the same line as SEQ ID NO. 45556 is depicted, mitochondric is mentioned; which is operable linked, too.

[93327] In another embodiment thereof the expression cassette does not comprise an additional transit peptide in case in Table I, application no. 17, in column 6 in the same line as SEQ ID NO. 45556 is depicted, non-targeted is mentioned.

[93328] In an embodiment the present invention relates to an expresssion cassette comprising a) a promoter, preferably a promoter selected from the group consisting of Big35S, PCUbi, Super and USP, in particular p-PcUBI; and b) the nucleic acid SEQ ID NO. 84079, or a homolog or fragment thereof, or a homolog thereof being depicted in Table I, application no. 17, column 8, in the same line as SEQ ID NO. 84079, preferably the coding region thereof, a homolog or a fragment thereof; which are operable linked.

[93329] In an embodiment thereof the expression cassette comprises in addition c) a nucleic acid molecule encoding a transit peptide, especially a plastidal transit petide in case in Table I, application no. 17, in column 6 in the same line as SEQ ID NO. 84079 is depicted, plastidic is mentioned, or a mitochondrial transit peptide in case in Table I, application no. 17, in column 6 in the same line as SEQ ID NO. 84079 is depicted, mitochondric is mentioned; which is operable linked, too.

[93330] In another embodiment thereof the expression cassette does not comprise an additional transit peptide in case in Table I, application no. 17, in column 6 in the same line as SEQ ID NO. 84079 is depicted, non-targeted is mentioned.

[93331] In an embodiment the present invention relates to an expresssion cassette comprising a) a promoter, preferably a promoter selected from the group consisting of Big35S, PCUbi, Super and USP, in particular p-PcUBI; and b) the nucleic acid SEQ ID NO. 10811, or a homolog or fragment thereof, or a homolog thereof being depicted in Table I, application no. 17, column 8, in the same line as SEQ ID NO. 10811, preferably the coding region thereof, a homolog or a fragment thereof; which are operable linked.

[93332] In an embodiment thereof the expression cassette comprises in addition c) a nucleic acid molecule encoding a transit peptide, especially a plastidal transit petide in case in Table I, application no. 17, in column 6 in the same line as SEQ ID NO. 10811 is depicted, plastidic is mentioned, or a mitochondrial transit peptide in case in Table I, application no. 17, in column 6 in the same line as SEQ ID NO. 10811 is depicted, mitochondric is mentioned; which is operable linked, too.

[93333] In another embodiment thereof the expression cassette does not comprise an additional transit peptide in case in Table I, application no. 17, in column 6 in the same line as SEQ ID NO. 10811 is depicted, non-targeted is mentioned.

[93334] In an embodiment the present invention relates to an expresssion cassette comprising a) a promoter, preferably a promoter selected from the group consisting of Big35S, PCUbi, Super and USP, in particular p-PcUBI; and b) the nucleic acid SEQ ID NO. 46751, or a homolog or fragment thereof, or a homolog thereof being depicted in Table I, application no. 17, column 8, in the same line as SEQ ID NO. 46751, preferably the coding region thereof, a homolog or a fragment thereof; which are operable linked.

[93335] In an embodiment thereof the expression cassette comprises in addition c) a nucleic acid molecule encoding a transit peptide, especially a plastidal transit petide in case in Table I, application no. 17, in column 6 in the same line as SEQ ID NO. 46751 is depicted, plastidic is mentioned, or a mitochondrial transit peptide in case in Table I, application no. 17, in column 6 in the same line as SEQ ID NO. 46751 is depicted, mitochondric is mentioned; which is operable linked, too.

[93336] In another embodiment thereof the expression cassette does not comprise an additional transit peptide in case in Table I, application no. 17, in column 6 in the same line as SEQ ID NO. 46751 is depicted, non-targeted is mentioned.

[93337] In an embodiment the present invention relates to an expresssion cassette comprising a) a promoter, preferably a promoter selected from the group consisting of Big35S, PCUbi, Super and USP, in particular p-PcUBI; and b) the nucleic acid SEQ ID NO. 84198, or a homolog or fragment thereof, or a homolog thereof being depicted in Table I, application no. 17, column 8, in the same line as SEQ ID NO. 84198, preferably the coding region thereof, a homolog or a fragment thereof; which are operable linked.

[93338] In an embodiment thereof the expression cassette comprises in addition c) a nucleic acid molecule encoding a transit peptide, especially a plastidal transit petide in case in Table I, application no. 17, in column 6 in the same line as SEQ ID NO. 84198 is depicted, plastidic is mentioned, or a mitochondrial transit peptide in case in Table I, application no. 17, in column 6 in the same line as SEQ ID NO. 84198 is depicted, mitochondric is mentioned; which is operable linked, too.

[93339] In another embodiment thereof the expression cassette does not comprise an additional transit peptide in case in Table I, application no. 17, in column 6 in the same line as SEQ ID NO. 84198 is depicted, non-targeted is mentioned.

[93340] In an embodiment the present invention relates to an expresssion cassette comprising a) a promoter, preferably a promoter selected from the group consisting of Big35S, PCUbi, Super and USP, in particular p-PcUBI; and b) the nucleic acid SEQ ID NO. 116312, or a homolog or fragment thereof, or a homolog thereof being depicted in Table I, application no. 17, column 8, in the same line as SEQ ID NO. 116312, preferably the coding region thereof, a homolog or a fragment thereof; which are operable linked.

[93341] In an embodiment thereof the expression cassette comprises in addition c) a nucleic acid molecule encoding a transit peptide, especially a plastidal transit petide in case in Table I, application no. 17, in column 6 in the same line as SEQ ID NO. 116312 is depicted, plastidic is mentioned, or a mitochondrial transit peptide in case in Table I, application no. 17, in column 6 in the same line as SEQ ID NO. 116312 is depicted, mitochondric is mentioned; which is operable linked, too.

[93342] In another embodiment thereof the expression cassette does not comprise an additional transit peptide in case in Table I, application no. 17, in column 6 in the same line as SEQ ID NO. 116312 is depicted, non-targeted is mentioned.

[93343] In an embodiment the present invention relates to an expresssion cassette comprising a) a promoter, preferably a promoter selected from the group consisting of Big35S, PCUbi, Super and USP, in particular p-PcUBI; and b) the nucleic acid SEQ ID NO. 46850, or a homolog or fragment thereof, or a homolog thereof being depicted in Table I, application no. 17, column 8, in the same line as SEQ ID NO. 46850, preferably the coding region thereof, a homolog or a fragment thereof; which are operable linked.

[93344] In an embodiment thereof the expression cassette comprises in addition c) a nucleic acid molecule encoding a transit peptide, especially a plastidal transit petide in case in Table I, application no. 17, in column 6 in the same line as SEQ ID NO. 46850 is depicted, plastidic is mentioned, or a mitochondrial transit peptide in case in Table I, application no. 17, in column 6 in the same line as SEQ ID NO. 46850 is depicted, mitochondric is mentioned; which is operable linked, too.

[93345] In another embodiment thereof the expression cassette does not comprise an additional transit peptide in case in Table I, application no. 17, in column 6 in the same line as SEQ ID NO. 46850 is depicted, non-targeted is mentioned.

[93346] In an embodiment the present invention relates to an expresssion cassette comprising a) a promoter, preferably a promoter selected from the group consisting of Big35S, PCUbi, Super and USP, in particular p-PcUBI; and b) the nucleic acid SEQ ID NO. 47026, or a homolog or fragment thereof, or a homolog thereof being depicted in Table I, application no. 17, column 8, in the same line as SEQ ID NO. 47026, preferably the coding region thereof, a homolog or a fragment thereof; which are operable linked.

[93347] In an embodiment thereof the expression cassette comprises in addition c) a nucleic acid molecule encoding a transit peptide, especially a plastidal transit petide in case in Table I, application no. 17, in column 6 in the same line as SEQ ID NO. 47026 is depicted, plastidic is mentioned, or a mitochondrial transit peptide in case in Table I, application no. 17, in column 6 in the same line as SEQ ID NO. 47026 is depicted, mitochondric is mentioned; which is operable linked, too.

[93348] In another embodiment thereof the expression cassette does not comprise an additional transit peptide in case in Table I, application no. 17, in column 6 in the same line as SEQ ID NO. 47026 is depicted, non-targeted is mentioned.

[93349] In an embodiment the present invention relates to an expresssion cassette comprising a) a promoter, preferably a promoter selected from the group consisting of Big35S, PCUbi, Super and USP, in particular p-PcUBI; and b) the nucleic acid SEQ ID NO. 47105, or a homolog or fragment thereof, or a homolog thereof being depicted in Table I, application no. 17, column 8, in the same line as SEQ ID NO. 47105, preferably the coding region thereof, a homolog or a fragment thereof; which are operable linked.

[93350] In an embodiment thereof the expression cassette comprises in addition c) a nucleic acid molecule encoding a transit peptide, especially a plastidal transit petide in case in Table I, application no. 17, in column 6 in the same line as SEQ ID NO. 47105 is depicted, plastidic is mentioned, or a mitochondrial transit peptide in case in Table I, application no. 17, in column 6 in the same line as SEQ ID NO. 47105 is depicted, mitochondric is mentioned; which is operable linked, too.

[93351] In another embodiment thereof the expression cassette does not comprise an additional transit peptide in case in Table I, application no. 17, in column 6 in the same line as SEQ ID NO. 47105 is depicted, non-targeted is mentioned.

[93352] In an embodiment the present invention relates to an expresssion cassette comprising a) a promoter, preferably a promoter selected from the group consisting of Big35S, PCUbi, Super and USP, in particular p-PcUBI; and b) the nucleic acid SEQ ID NO. 146939, or a homolog or fragment thereof, or a homolog thereof being depicted in Table I, application no. 17, column 8, in the same line as SEQ ID NO. 146939, preferably the coding region thereof, a homolog or a fragment thereof; which are operable linked.

[93353] In an embodiment thereof the expression cassette comprises in addition c) a nucleic acid molecule encoding a transit peptide, especially a plastidal transit petide in case in Table I, application no. 17, in column 6 in the same line as SEQ ID NO. 146939 is depicted, plastidic is mentioned, or a mitochondrial transit peptide in case in Table I, application no. 17, in column 6 in the same line as SEQ ID NO. 146939 is depicted, mitochondric is mentioned; which is operable linked, too.

[93354] In another embodiment thereof the expression cassette does not comprise an additional transit peptide in case in Table I, application no. 17, in column 6 in the same line as SEQ ID NO. 146939 is depicted, non-targeted is mentioned.

[93355] In an embodiment the present invention relates to an expresssion cassette comprising a) a promoter, preferably a promoter selected from the group consisting of Big35S, PCUbi, Super and USP, in particular p-PcUBI; and b) the nucleic acid SEQ ID NO. 49143, or a homolog or fragment thereof, or a homolog thereof being depicted in Table I, application no. 17, column 8, in the same line as SEQ ID NO. 49143, preferably the coding region thereof, a homolog or a fragment thereof; which are operable linked.

[93356] In an embodiment thereof the expression cassette comprises in addition c) a nucleic acid molecule encoding a transit peptide, especially a plastidal transit petide in case in Table I, application no. 17, in column 6 in the same line as SEQ ID NO. 49143 is depicted, plastidic is mentioned, or a mitochondrial transit peptide in case in Table I, application no. 17, in column 6 in the same line as SEQ ID NO. 49143 is depicted, mitochondric is mentioned; which is operable linked, too.

[93357] In another embodiment thereof the expression cassette does not comprise an additional transit peptide in case in Table I, application no. 17, in column 6 in the same line as SEQ ID NO. 49143 is depicted, non-targeted is mentioned.

[93358] In an embodiment the present invention relates to an expresssion cassette comprising a) a promoter, preferably a promoter selected from the group consisting of Big35S, PCUbi, Super and USP, in particular p-PcUBI; and b) the nucleic acid SEQ ID NO. 49800, or a homolog or fragment thereof, or a homolog thereof being depicted in Table I, application no. 17, column 8, in the same line as SEQ ID NO. 49800, preferably the coding region thereof, a homolog or a fragment thereof; which are operable linked.

[93359] In an embodiment thereof the expression cassette comprises in addition c) a nucleic acid molecule encoding a transit peptide, especially a plastidal transit petide in case in Table I, application no. 17, in column 6 in the same line as SEQ ID NO. 49800 is depicted, plastidic is mentioned, or a mitochondrial transit peptide in case in Table I, application no. 17, in column 6 in the same line as SEQ ID NO. 49800 is depicted, mitochondric is mentioned; which is operable linked, too.

[93360] In another embodiment thereof the expression cassette does not comprise an additional transit peptide in case in Table I, application no. 17, in column 6 in the same line as SEQ ID NO. 49800 is depicted, non-targeted is mentioned.

[93361] In an embodiment the present invention relates to an expresssion cassette comprising a) a promoter, preferably a promoter selected from the group consisting of Big35S, PCUbi, Super and USP, in particular p-PcUBI; and b) the nucleic acid SEQ ID NO. 84865, or a homolog or fragment thereof, or a homolog thereof being depicted in Table I, application no. 17, column 8, in the same line as SEQ ID NO. 84865, preferably the coding region thereof, a homolog or a fragment thereof; which are operable linked.

[93362] In an embodiment thereof the expression cassette comprises in addition c) a nucleic acid molecule encoding a transit peptide, especially a plastidal transit petide in case in Table I, application no. 17, in column 6 in the same line as SEQ ID NO. 84865 is depicted, plastidic is mentioned, or a mitochondrial transit peptide in case in Table I, application no. 17, in column 6 in the same line as SEQ ID NO. 84865 is depicted, mitochondric is mentioned; which is operable linked, too.

[93363] In another embodiment thereof the expression cassette does not comprise an additional transit peptide in case in Table I, application no. 17, in column 6 in the same line as SEQ ID NO. 84865 is depicted, non-targeted is mentioned.

[93364] In an embodiment the present invention relates to an expresssion cassette comprising a) a promoter, preferably a promoter selected from the group consisting of Big35S, PCUbi, Super and USP, in particular p-PcUBI; and b) the nucleic acid SEQ ID NO. 50070, or a homolog or fragment thereof, or a homolog thereof being depicted in Table I, application no. 17, column 8, in the same line as SEQ ID NO. 50070, preferably the coding region thereof, a homolog or a fragment thereof; which are operable linked.

[93365] In an embodiment thereof the expression cassette comprises in addition c) a nucleic acid molecule encoding a transit peptide, especially a plastidal transit petide in case in Table I, application no. 17, in column 6 in the same line as SEQ ID NO. 50070 is depicted, plastidic is mentioned, or a mitochondrial transit peptide in case in Table I, application no. 17, in column 6 in the same line as SEQ ID NO. 50070 is depicted, mitochondric is mentioned; which is operable linked, too.

[93366] In another embodiment thereof the expression cassette does not comprise an additional transit peptide in case in Table I, application no. 17, in column 6 in the same line as SEQ ID NO. 50070 is depicted, non-targeted is mentioned.

[93367] In an embodiment the present invention relates to an expresssion cassette comprising a) a promoter, preferably a promoter selected from the group consisting of Big35S, PCUbi, Super and USP, in particular p-PcUBI; and b) the nucleic acid SEQ ID NO. 106920, or a homolog or fragment thereof, or a homolog thereof being depicted in Table I, application no. 17, column 8, in the same line as SEQ ID NO. 106920, preferably the coding region thereof, a homolog or a fragment thereof; which are operable linked.

[93368] In an embodiment thereof the expression cassette comprises in addition c) a nucleic acid molecule encoding a transit peptide, especially a plastidal transit petide in case in Table I, application no. 17, in column 6 in the same line as SEQ ID NO. 106920 is depicted, plastidic is mentioned, or a mitochondrial transit peptide in case in Table I, application no. 17, in column 6 in the same line as SEQ ID NO. 106920 is depicted, mitochondric is mentioned; which is operable linked, too.

[93369] In another embodiment thereof the expression cassette does not comprise an additional transit peptide in case in Table I, application no. 17, in column 6 in the same line as SEQ ID NO. 106920 is depicted, non-targeted is mentioned.

[93370] In an embodiment the present invention relates to an expresssion cassette comprising a) a promoter, preferably a promoter selected from the group consisting of Big35S, PCUbi, Super and USP, in particular p-PcUBI; and b) the nucleic acid SEQ ID NO. 94942, or a homolog or fragment thereof, or a homolog thereof being depicted in Table I, application no. 17, column 8, in the same line as SEQ ID NO. 94942, preferably the coding region thereof, a homolog or a fragment thereof; which are operable linked.

[93371] In an embodiment thereof the expression cassette comprises in addition c) a nucleic acid molecule encoding a transit peptide, especially a plastidal transit petide in case in Table I, application no. 17, in column 6 in the same line as SEQ ID NO. 94942 is depicted, plastidic is mentioned, or a mitochondrial transit peptide in case in Table I, application no. 17, in column 6 in the same line as SEQ ID NO. 94942 is depicted, mitochondric is mentioned; which is operable linked, too.

[93372] In another embodiment thereof the expression cassette does not comprise an additional transit peptide in case in Table I, application no. 17, in column 6 in the same line as SEQ ID NO. 94942 is depicted, non-targeted is mentioned.

[93373] In an embodiment the present invention relates to an expresssion cassette comprising a) a promoter, preferably a promoter selected from the group consisting of Big35S, PCUbi, Super and USP, in particular p-PcUBI; and b) the nucleic acid SEQ ID NO. 50104, or a homolog or fragment thereof, or a homolog thereof being depicted in Table I, application no. 17, column 8, in the same line as SEQ ID NO. 50104, preferably the coding region thereof, a homolog or a fragment thereof; which are operable linked.

[93374] In an embodiment thereof the expression cassette comprises in addition c) a nucleic acid molecule encoding a transit peptide, especially a plastidal transit petide in case in Table I, application no. 17, in column 6 in the same line as SEQ ID NO. 50104 is depicted, plastidic is mentioned, or a mitochondrial transit peptide in case in Table I, application no. 17, in column 6 in the same line as SEQ ID NO. 50104 is depicted, mitochondric is mentioned; which is operable linked, too.

[93375] In another embodiment thereof the expression cassette does not comprise an additional transit peptide in case in Table I, application no. 17, in column 6 in the same line as SEQ ID NO. 50104 is depicted, non-targeted is mentioned.

[93376] In an embodiment the present invention relates to an expresssion cassette comprising a) a promoter, preferably a promoter selected from the group consisting of Big35S, PCUbi, Super and USP, in particular p-PcUBI; and b) the nucleic acid SEQ ID NO. 85510, or a homolog or fragment thereof, or a homolog thereof being depicted in Table I, application no. 17, column 8, in the same line as SEQ ID NO. 85510, preferably the coding region thereof, a homolog or a fragment thereof; which are operable linked.

[93377] In an embodiment thereof the expression cassette comprises in addition c) a nucleic acid molecule encoding a transit peptide, especially a plastidal transit petide in case in Table I, application no. 17, in column 6 in the same line as SEQ ID NO. 85510 is depicted, plastidic is mentioned, or a mitochondrial transit peptide in case in Table I, application no. 17, in column 6 in the same line as SEQ ID NO. 85510 is depicted, mitochondric is mentioned; which is operable linked, too.

[93378] In another embodiment thereof the expression cassette does not comprise an additional transit peptide in case in Table I, application no. 17, in column 6 in the same line as SEQ ID NO. 85510 is depicted, non-targeted is mentioned.

[93379] In an embodiment the present invention relates to an expresssion cassette comprising a) a promoter, preferably a promoter selected from the group consisting of Big35S, PCUbi, Super and USP, in particular p-PcUBI; and b) the nucleic acid SEQ ID NO. 146945, or a homolog or fragment thereof, or a homolog thereof being depicted in Table I, application no. 17, column 8, in the same line as SEQ ID NO. 146945, preferably the coding region thereof, a homolog or a fragment thereof; which are operable linked.

[93380] In an embodiment thereof the expression cassette comprises in addition c) a nucleic acid molecule encoding a transit peptide, especially a plastidal transit petide in case in Table I, application no. 17, in column 6 in the same line as SEQ ID NO. 146945 is depicted, plastidic is mentioned, or a mitochondrial transit peptide in case in Table I, application no. 17, in column 6 in the same line as SEQ ID NO. 146945 is depicted, mitochondric is mentioned; which is operable linked, too.

[93381] In another embodiment thereof the expression cassette does not comprise an additional transit peptide in case in Table I, application no. 17, in column 6 in the same line as SEQ ID NO. 146945 is depicted, non-targeted is mentioned.

[93382] In an embodiment the present invention relates to an expresssion cassette comprising a) a promoter, preferably a promoter selected from the group consisting of Big35S, PCUbi, Super and USP, in particular p-PcUBI; and b) the nucleic acid SEQ ID NO. 101707, or a homolog or fragment thereof, or a homolog thereof being depicted in Table I, application no. 17, column 8, in the same line as SEQ ID NO. 101707, preferably the coding region thereof, a homolog or a fragment thereof; which are operable linked.

[93383] In an embodiment thereof the expression cassette comprises in addition c) a nucleic acid molecule encoding a transit peptide, especially a plastidal transit petide in case in Table I, application no. 17, in column 6 in the same line as SEQ ID NO. 101707 is depicted, plastidic is mentioned, or a mitochondrial transit peptide in case in Table I, application no. 17, in column 6 in the same line as SEQ ID NO. 101707 is depicted, mitochondric is mentioned; which is operable linked, too.

[93384] In another embodiment thereof the expression cassette does not comprise an additional transit peptide in case in Table I, application no. 17, in column 6 in the same line as SEQ ID NO. 101707 is depicted, non-targeted is mentioned.

[93385] In an embodiment the present invention relates to an expresssion cassette comprising a) a promoter, preferably a promoter selected from the group consisting of Big35S, PCUbi, Super and USP, in particular p-PcUBI; and b) the nucleic acid SEQ ID NO. 52246, or a homolog or fragment thereof, or a homolog thereof being depicted in Table I, application no. 17, column 8, in the same line as SEQ ID NO. 52246, preferably the coding region thereof, a homolog or a fragment thereof; which are operable linked.

[93386] In an embodiment thereof the expression cassette comprises in addition c) a nucleic acid molecule encoding a transit peptide, especially a plastidal transit petide in case in Table I, application no. 17, in column 6 in the same line as SEQ ID NO. 52246 is depicted, plastidic is mentioned, or a mitochondrial transit peptide in case in Table I, application no. 17, in column 6 in the same line as SEQ ID NO. 52246 is depicted, mitochondric is mentioned; which is operable linked, too.

[93387] In another embodiment thereof the expression cassette does not comprise an additional transit peptide in case in Table I, application no. 17, in column 6 in the same line as SEQ ID NO. 52246 is depicted, non-targeted is mentioned.

[93388] In an embodiment the present invention relates to an expresssion cassette comprising a) a promoter, preferably a promoter selected from the group consisting of Big35S, PCUbi, Super and USP, in particular p-PcUBI; and b) the nucleic acid SEQ ID NO. 52364, or a homolog or fragment thereof, or a homolog thereof being depicted in Table I, application no. 17, column 8, in the same line as SEQ ID NO. 52364, preferably the coding region thereof, a homolog or a fragment thereof; which are operable linked.

[93389] In an embodiment thereof the expression cassette comprises in addition c) a nucleic acid molecule encoding a transit peptide, especially a plastidal transit petide in case in Table I, application no. 17, in column 6 in the same line as SEQ ID NO. 52364 is depicted, plastidic is mentioned, or a mitochondrial transit peptide in case in Table I, application no. 17, in column 6 in the same line as SEQ ID NO. 52364 is depicted, mitochondric is mentioned; which is operable linked, too.

[93390] In another embodiment thereof the expression cassette does not comprise an additional transit peptide in case in Table I, application no. 17, in column 6 in the same line as SEQ ID NO. 52364 is depicted, non-targeted is mentioned.

[93391] In an embodiment the present invention relates to an expresssion cassette comprising a) a promoter, preferably a promoter selected from the group consisting of Big35S, PCUbi, Super and USP, in particular p-PcUBI; and b) the nucleic acid SEQ ID NO. 53189, or a homolog or fragment thereof, or a homolog thereof being depicted in Table I, application no. 17, column 8, in the same line as SEQ ID NO. 53189, preferably the coding region thereof, a homolog or a fragment thereof; which are operable linked.

[93392] In an embodiment thereof the expression cassette comprises in addition c) a nucleic acid molecule encoding a transit peptide, especially a plastidal transit petide in case in Table I, application no. 17, in column 6 in the same line as SEQ ID NO. 53189 is depicted, plastidic is mentioned, or a mitochondrial transit peptide in case in Table I, application no. 17, in column 6 in the same line as SEQ ID NO. 53189 is depicted, mitochondric is mentioned; which is operable linked, too.

[93393] In another embodiment thereof the expression cassette does not comprise an additional transit peptide in case in Table I, application no. 17, in column 6 in the same line as SEQ ID NO. 53189 is depicted, non-targeted is mentioned.

[93394] In an embodiment the present invention relates to an expresssion cassette comprising a) a promoter, preferably a promoter selected from the group consisting of Big35S, PCUbi, Super and USP, in particular p-PcUBI; and b) the nucleic acid SEQ ID NO. 147208, or a homolog or fragment thereof, or a homolog thereof being depicted in Table I, application no. 17, column 8, in the same line as SEQ ID NO. 147208, preferably the coding region thereof, a homolog or a fragment thereof; which are operable linked.

[93395] In an embodiment thereof the expression cassette comprises in addition c) a nucleic acid molecule encoding a transit peptide, especially a plastidal transit petide in case in Table I, application no. 17, in column 6 in the same line as SEQ ID NO. 147208 is depicted, plastidic is mentioned, or a mitochondrial transit peptide in case in Table I, application no. 17, in column 6 in the same line as SEQ ID NO. 147208 is depicted, mitochondric is mentioned; which is operable linked, too.

[93396] In another embodiment thereof the expression cassette does not comprise an additional transit peptide in case in Table I, application no. 17, in column 6 in the same line as SEQ ID NO. 147208 is depicted, non-targeted is mentioned.

[93397] In an embodiment the present invention relates to an expresssion cassette comprising a) a promoter, preferably a promoter selected from the group consisting of Big35S, PCUbi, Super and USP, in particular p-PcUBI; and b) the nucleic acid SEQ ID NO. 53456, or a homolog or fragment thereof, or a homolog thereof being depicted in Table I, application no. 17, column 8, in the same line as SEQ ID NO. 53456, preferably the coding region thereof, a homolog or a fragment thereof; which are operable linked.

[93398] In an embodiment thereof the expression cassette comprises in addition c) a nucleic acid molecule encoding a transit peptide, especially a plastidal transit petide in case in Table I, application no. 17, in column 6 in the same line as SEQ ID NO. 53456 is depicted, plastidic is mentioned, or a mitochondrial transit peptide in case in Table I, application no. 17, in column 6 in the same line as SEQ ID NO. 53456 is depicted, mitochondric is mentioned; which is operable linked, too.

[93399] In another embodiment thereof the expression cassette does not comprise an additional transit peptide in case in Table I, application no. 17, in column 6 in the same line as SEQ ID NO. 53456 is depicted, non-targeted is mentioned.

[93400] In an embodiment the present invention relates to an expresssion cassette comprising a) a promoter, preferably a promoter selected from the group consisting of Big35S, PCUbi, Super and USP, in particular p-PcUBI; and b) the nucleic acid SEQ ID NO. 95047, or a homolog or fragment thereof, or a homolog thereof being depicted in Table I, application no. 17, column 8, in the same line as SEQ ID NO. 95047, preferably the coding region thereof, a homolog or a fragment thereof; which are operable linked.

[93401] In an embodiment thereof the expression cassette comprises in addition c) a nucleic acid molecule encoding a transit peptide, especially a plastidal transit petide in case in Table I, application no. 17, in column 6 in the same line as SEQ ID NO. 95047 is depicted, plastidic is mentioned, or a mitochondrial transit peptide in case in Table I, application no. 17, in column 6 in the same line as SEQ ID NO. 95047 is depicted, mitochondric is mentioned; which is operable linked, too.

[93402] In another embodiment thereof the expression cassette does not comprise an additional transit peptide in case in Table I, application no. 17, in column 6 in the same line as SEQ ID NO. 95047 is depicted, non-targeted is mentioned.

[93403] In an embodiment the present invention relates to an expresssion cassette comprising a) a promoter, preferably a promoter selected from the group consisting of Big35S, PCUbi, Super and USP, in particular p-PcUBI; and b) the nucleic acid SEQ ID NO. 54897, or a homolog or fragment thereof, or a homolog thereof being depicted in Table I, application no. 17, column 8, in the same line as SEQ ID NO. 54897, preferably the coding region thereof, a homolog or a fragment thereof; which are operable linked.

[93404] In an embodiment thereof the expression cassette comprises in addition c) a nucleic acid molecule encoding a transit peptide, especially a plastidal transit petide in case in Table I, application no. 17, in column 6 in the same line as SEQ ID NO. 54897 is depicted, plastidic is mentioned, or a mitochondrial transit peptide in case in Table I, application no. 17, in column 6 in the same line as SEQ ID NO. 54897 is depicted, mitochondric is mentioned; which is operable linked, too.

[93405] In another embodiment thereof the expression cassette does not comprise an additional transit peptide in case in Table I, application no. 17, in column 6 in the same line as SEQ ID NO. 54897 is depicted, non-targeted is mentioned.

[93406] In an embodiment the present invention relates to an expresssion cassette comprising a) a promoter, preferably a promoter selected from the group consisting of Big35S, PCUbi, Super and USP, in particular p-PcUBI; and b) the nucleic acid SEQ ID NO. 55063, or a homolog or fragment thereof, or a homolog thereof being depicted in Table I, application no. 17, column 8, in the same line as SEQ ID NO. 55063, preferably the coding region thereof, a homolog or a fragment thereof; which are operable linked.

[93407] In an embodiment thereof the expression cassette comprises in addition c) a nucleic acid molecule encoding a transit peptide, especially a plastidal transit petide in case in Table I, application no. 17, in column 6 in the same line as SEQ ID NO. 55063 is depicted, plastidic is mentioned, or a mitochondrial transit peptide in case in Table I, application no. 17, in column 6 in the same line as SEQ ID NO. 55063 is depicted, mitochondric is mentioned; which is operable linked, too.

[93408] In another embodiment thereof the expression cassette does not comprise an additional transit peptide in case in Table I, application no. 17, in column 6 in the same line as SEQ ID NO. 55063 is depicted, non-targeted is mentioned.

[93409] In an embodiment the present invention relates to an expresssion cassette comprising a) a promoter, preferably a promoter selected from the group consisting of Big35S, PCUbi, Super and USP, in particular p-PcUBI; and b) the nucleic acid SEQ ID NO. 55379, or a homolog or fragment thereof, or a homolog thereof being depicted in Table I, application no. 17, column 8, in the same line as SEQ ID NO. 55379, preferably the coding region thereof, a homolog or a fragment thereof; which are operable linked.

[93410] In an embodiment thereof the expression cassette comprises in addition c) a nucleic acid molecule encoding a transit peptide, especially a plastidal transit petide in case in Table I, application no. 17, in column 6 in the same line as SEQ ID NO. 55379 is depicted, plastidic is mentioned, or a mitochondrial transit peptide in case in Table I, application no. 17, in column 6 in the same line as SEQ ID NO. 55379 is depicted, mitochondric is mentioned; which is operable linked, too.

[93411] In another embodiment thereof the expression cassette does not comprise an additional transit peptide in case in Table I, application no. 17, in column 6 in the same line as SEQ ID NO. 55379 is depicted, non-targeted is mentioned.

[93412] In an embodiment the present invention relates to an expresssion cassette comprising a) a promoter, preferably a promoter selected from the group consisting of Big35S, PCUbi, Super and USP, in particular p-PcUBI; and b) the nucleic acid SEQ ID NO. 86447, or a homolog or fragment thereof, or a homolog thereof being depicted in Table I, application no. 17, column 8, in the same line as SEQ ID NO. 86447, preferably the coding region thereof, a homolog or a fragment thereof; which are operable linked.

[93413] In an embodiment thereof the expression cassette comprises in addition c) a nucleic acid molecule encoding a transit peptide, especially a plastidal transit petide in case in Table I, application no. 17, in column 6 in the same line as SEQ ID NO. 86447 is depicted, plastidic is mentioned, or a mitochondrial transit peptide in case in Table I, application no. 17, in column 6 in the same line as SEQ ID NO. 86447 is depicted, mitochondric is mentioned; which is operable linked, too.

[93414] In another embodiment thereof the expression cassette does not comprise an additional transit peptide in case in Table I, application no. 17, in column 6 in the same line as SEQ ID NO. 86447 is depicted, non-targeted is mentioned.

[93415] In an embodiment the present invention relates to an expresssion cassette comprising a) a promoter, preferably a promoter selected from the group consisting of Big35S, PCUbi, Super and USP, in particular p-PcUBI; and b) the nucleic acid SEQ ID NO. 55385, or a homolog or fragment thereof, or a homolog thereof being depicted in Table I, application no. 17, column 8, in the same line as SEQ ID NO. 55385, preferably the coding region thereof, a homolog or a fragment thereof; which are operable linked.

[93416] In an embodiment thereof the expression cassette comprises in addition c) a nucleic acid molecule encoding a transit peptide, especially a plastidal transit petide in case in Table I, application no. 17, in column 6 in the same line as SEQ ID NO. 55385 is depicted, plastidic is mentioned, or a mitochondrial transit peptide in case in Table I, application no. 17, in column 6 in the same line as SEQ ID NO. 55385 is depicted, mitochondric is mentioned; which is operable linked, too.

[93417] In another embodiment thereof the expression cassette does not comprise an additional transit peptide in case in Table I, application no. 17, in column 6 in the same line as SEQ ID NO. 55385 is depicted, non-targeted is mentioned.

[93418] In an embodiment the present invention relates to an expresssion cassette comprising a) a promoter, preferably a promoter selected from the group consisting of Big35S, PCUbi, Super and USP, in particular p-PcUBI; and b) the nucleic acid SEQ ID NO. 55771, or a homolog or fragment thereof, or a homolog thereof being depicted in Table I, application no. 17, column 8, in the same line as SEQ ID NO. 55771, preferably the coding region thereof, a homolog or a fragment thereof; which are operable linked.

[93419] In an embodiment thereof the expression cassette comprises in addition c) a nucleic acid molecule encoding a transit peptide, especially a plastidal transit petide in case in Table I, application no. 17, in column 6 in the same line as SEQ ID NO. 55771 is depicted, plastidic is mentioned, or a mitochondrial transit peptide in case in Table I, application no. 17, in column 6 in the same line as SEQ ID NO. 55771 is depicted, mitochondric is mentioned; which is operable linked, too.

[93420] In another embodiment thereof the expression cassette does not comprise an additional transit peptide in case in Table I, application no. 17, in column 6 in the same line as SEQ ID NO. 55771 is depicted, non-targeted is mentioned.

[93421] In an embodiment the present invention relates to an expresssion cassette comprising a) a promoter, preferably a promoter selected from the group consisting of Big35S, PCUbi, Super and USP, in particular p-PcUBI; and b) the nucleic acid SEQ ID NO. 86540, or a homolog or fragment thereof, or a homolog thereof being depicted in Table I, application no. 17, column 8, in the same line as SEQ ID NO. 86540, preferably the coding region thereof, a homolog or a fragment thereof; which are operable linked.

[93422] In an embodiment thereof the expression cassette comprises in addition c) a nucleic acid molecule encoding a transit peptide, especially a plastidal transit petide in case in Table I, application no. 17, in column 6 in the same line as SEQ ID NO. 86540 is depicted, plastidic is mentioned, or a mitochondrial transit peptide in case in Table I, application no. 17, in column 6 in the same line as SEQ ID NO. 86540 is depicted, mitochondric is mentioned; which is operable linked, too.

[93423] In another embodiment thereof the expression cassette does not comprise an additional transit peptide in case in Table I, application no. 17, in column 6 in the same line as SEQ ID NO. 86540 is depicted, non-targeted is mentioned.

[93424] In an embodiment the present invention relates to an expresssion cassette comprising a) a promoter, preferably a promoter selected from the group consisting of Big35S, PCUbi, Super and USP, in particular p-PcUBI; and b) the nucleic acid SEQ ID NO. 11990, or a homolog or fragment thereof, or a homolog thereof being depicted in Table I, application no. 17, column 8, in the same line as SEQ ID NO. 11990, preferably the coding region thereof, a homolog or a fragment thereof; which are operable linked.

[93425] In an embodiment thereof the expression cassette comprises in addition c) a nucleic acid molecule encoding a transit peptide, especially a plastidal transit petide in case in Table I, application no. 17, in column 6 in the same line as SEQ ID NO. 11990 is depicted, plastidic is mentioned, or a mitochondrial transit peptide in case in Table I, application no. 17, in column 6 in the same line as SEQ ID NO. 11990 is depicted, mitochondric is mentioned; which is operable linked, too.

[93426] In another embodiment thereof the expression cassette does not comprise an additional transit peptide in case in Table I, application no. 17, in column 6 in the same line as SEQ ID NO. 11990 is depicted, non-targeted is mentioned.

[93427] In an embodiment the present invention relates to an expresssion cassette comprising a) a promoter, preferably a promoter selected from the group consisting of Big35S, PCUbi, Super and USP, in particular p-PcUBI; and b) the nucleic acid SEQ ID NO. 56514, or a homolog or fragment thereof, or a homolog thereof being depicted in Table I, application no. 17, column 8, in the same line as SEQ ID NO. 56514, preferably the coding region thereof, a homolog or a fragment thereof; which are operable linked.

[93428] In an embodiment thereof the expression cassette comprises in addition c) a nucleic acid molecule encoding a transit peptide, especially a plastidal transit petide in case in Table I, application no. 17, in column 6 in the same line as SEQ ID NO. 56514 is depicted, plastidic is mentioned, or a mitochondrial transit peptide in case in Table I, application no. 17, in column 6 in the same line as SEQ ID NO. 56514 is depicted, mitochondric is mentioned; which is operable linked, too.

[93429] In another embodiment thereof the expression cassette does not comprise an additional transit peptide in case in Table I, application no. 17, in column 6 in the same line as SEQ ID NO. 56514 is depicted, non-targeted is mentioned.

[93430] In an embodiment the present invention relates to an expresssion cassette comprising a) a promoter, preferably a promoter selected from the group consisting of Big35S, PCUbi, Super and USP, in particular p-PcUBI; and b) the nucleic acid SEQ ID NO. 56894, or a homolog or fragment thereof, or a homolog thereof being depicted in Table I, application no. 17, column 8, in the same line as SEQ ID NO. 56894, preferably the coding region thereof, a homolog or a fragment thereof; which are operable linked.

[93431] In an embodiment thereof the expression cassette comprises in addition c) a nucleic acid molecule encoding a transit peptide, especially a plastidal transit petide in case in Table I, application no. 17, in column 6 in the same line as SEQ ID NO. 56894 is depicted, plastidic is mentioned, or a mitochondrial transit peptide in case in Table I, application no. 17, in column 6 in the same line as SEQ ID NO. 56894 is depicted, mitochondric is mentioned; which is operable linked, too.

[93432] In another embodiment thereof the expression cassette does not comprise an additional transit peptide in case in Table I, application no. 17, in column 6 in the same line as SEQ ID NO. 56894 is depicted, non-targeted is mentioned.

[93433] In an embodiment the present invention relates to an expresssion cassette comprising a) a promoter, preferably a promoter selected from the group consisting of Big35S, PCUbi, Super and USP, in particular p-PcUBI; and b) the nucleic acid SEQ ID NO. 87397, or a homolog or fragment thereof, or a homolog thereof being depicted in Table I, application no. 17, column 8, in the same line as SEQ ID NO. 87397, preferably the coding region thereof, a homolog or a fragment thereof; which are operable linked.

[93434] In an embodiment thereof the expression cassette comprises in addition c) a nucleic acid molecule encoding a transit peptide, especially a plastidal transit petide in case in Table I, application no. 17, in column 6 in the same line as SEQ ID NO. 87397 is depicted, plastidic is mentioned, or a mitochondrial transit peptide in case in Table I, application no. 17, in column 6 in the same line as SEQ ID NO. 87397 is depicted, mitochondric is mentioned; which is operable linked, too.

[93435] In another embodiment thereof the expression cassette does not comprise an additional transit peptide in case in Table I, application no. 17, in column 6 in the same line as SEQ ID NO. 87397 is depicted, non-targeted is mentioned.

[93436] In an embodiment the present invention relates to an expresssion cassette comprising a) a promoter, preferably a promoter selected from the group consisting of Big35S, PCUbi, Super and USP, in particular p-PcUBI; and b) the nucleic acid SEQ ID NO. 57235, or a homolog or fragment thereof, or a homolog thereof being depicted in Table I, application no. 17, column 8, in the same line as SEQ ID NO. 57235, preferably the coding region thereof, a homolog or a fragment thereof; which are operable linked.

[93437] In an embodiment thereof the expression cassette comprises in addition c) a nucleic acid molecule encoding a transit peptide, especially a plastidal transit petide in case in Table I, application no. 17, in column 6 in the same line as SEQ ID NO. 57235 is depicted, plastidic is mentioned, or a mitochondrial transit peptide in case in Table I, application no. 17, in column 6 in the same line as SEQ ID NO. 57235 is depicted, mitochondric is mentioned; which is operable linked, too.

[93438] In another embodiment thereof the expression cassette does not comprise an additional transit peptide in case in Table I, application no. 17, in column 6 in the same line as SEQ ID NO. 57235 is depicted, non-targeted is mentioned.

[93439] In an embodiment the present invention relates to an expresssion cassette comprising a) a promoter, preferably a promoter selected from the group consisting of Big35S, PCUbi, Super and USP, in particular p-PcUBI; and b) the nucleic acid SEQ ID NO. 147346, or a homolog or fragment thereof, or a homolog thereof being depicted in Table I, application no. 17, column 8, in the same line as SEQ ID NO. 147346, preferably the coding region thereof, a homolog or a fragment thereof; which are operable linked.

[93440] In an embodiment thereof the expression cassette comprises in addition c) a nucleic acid molecule encoding a transit peptide, especially a plastidal transit petide in case in Table I, application no. 17, in column 6 in the same line as SEQ ID NO. 147346 is depicted, plastidic is mentioned, or a mitochondrial transit peptide in case in Table I, application no. 17, in column 6 in the same line as SEQ ID NO. 147346 is depicted, mitochondric is mentioned; which is operable linked, too.

[93441] In another embodiment thereof the expression cassette does not comprise an additional transit peptide in case in Table I, application no. 17, in column 6 in the same line as SEQ ID NO. 147346 is depicted, non-targeted is mentioned.

[93442] In an embodiment the present invention relates to an expresssion cassette comprising a) a promoter, preferably a promoter selected from the group consisting of Big35S, PCUbi, Super and USP, in particular p-PcUBI; and b) the nucleic acid SEQ ID NO. 57679, or a homolog or fragment thereof, or a homolog thereof being depicted in Table I, application no. 17, column 8, in the same line as SEQ ID NO. 57679, preferably the coding region thereof, a homolog or a fragment thereof; which are operable linked.

[93443] In an embodiment thereof the expression cassette comprises in addition c) a nucleic acid molecule encoding a transit peptide, especially a plastidal transit petide in case in Table I, application no. 17, in column 6 in the same line as SEQ ID NO. 57679 is depicted, plastidic is mentioned, or a mitochondrial transit peptide in case in Table I, application no. 17, in column 6 in the same line as SEQ ID NO. 57679 is depicted, mitochondric is mentioned; which is operable linked, too.

[93444] In another embodiment thereof the expression cassette does not comprise an additional transit peptide in case in Table I, application no. 17, in column 6 in the same line as SEQ ID NO. 57679 is depicted, non-targeted is mentioned.

[93445] In an embodiment the present invention relates to an expresssion cassette comprising a) a promoter, preferably a promoter selected from the group consisting of Big35S, PCUbi, Super and USP, in particular p-PcUBI; and b) the nucleic acid SEQ ID NO. 87610, or a homolog or fragment thereof, or a homolog thereof being depicted in Table I, application no. 17, column 8, in the same line as SEQ ID NO. 87610, preferably the coding region thereof, a homolog or a fragment thereof; which are operable linked.

[93446] In an embodiment thereof the expression cassette comprises in addition c) a nucleic acid molecule encoding a transit peptide, especially a plastidal transit petide in case in Table I, application no. 17, in column 6 in the same line as SEQ ID NO. 87610 is depicted, plastidic is mentioned, or a mitochondrial transit peptide in case in Table I, application no. 17, in column 6 in the same line as SEQ ID NO. 87610 is depicted, mitochondric is mentioned; which is operable linked, too.

[93447] In another embodiment thereof the expression cassette does not comprise an additional transit peptide in case in Table I, application no. 17, in column 6 in the same line as SEQ ID NO. 87610 is depicted, non-targeted is mentioned.

[93448] In an embodiment the present invention relates to an expresssion cassette comprising a) a promoter, preferably a promoter selected from the group consisting of Big35S, PCUbi, Super and USP, in particular p-PcUBI; and b) the nucleic acid SEQ ID NO. 147407, or a homolog or fragment thereof, or a homolog thereof being depicted in Table I, application no. 17, column 8, in the same line as SEQ ID NO. 147407, preferably the coding region thereof, a homolog or a fragment thereof; which are operable linked.

[93449] In an embodiment thereof the expression cassette comprises in addition c) a nucleic acid molecule encoding a transit peptide, especially a plastidal transit petide in case in Table I, application no. 17, in column 6 in the same line as SEQ ID NO. 147407 is depicted, plastidic is mentioned, or a mitochondrial transit peptide in case in Table I, application no. 17, in column 6 in the same line as SEQ ID NO. 147407 is depicted, mitochondric is mentioned; which is operable linked, too.

[93450] In another embodiment thereof the expression cassette does not comprise an additional transit peptide in case in Table I, application no. 17, in column 6 in the same line as SEQ ID NO. 147407 is depicted, non-targeted is mentioned.

[93451] In an embodiment the present invention relates to an expresssion cassette comprising a) a promoter, preferably a promoter selected from the group consisting of Big35S, PCUbi, Super and USP, in particular p-PcUBI; and b) the nucleic acid SEQ ID NO. 119222, or a homolog or fragment thereof, or a homolog thereof being depicted in Table I, application no. 17, column 8, in the same line as SEQ ID NO. 119222, preferably the coding region thereof, a homolog or a fragment thereof; which are operable linked.

[93452] In an embodiment thereof the expression cassette comprises in addition c) a nucleic acid molecule encoding a transit peptide, especially a plastidal transit petide in case in Table I, application no. 17, in column 6 in the same line as SEQ ID NO. 119222 is depicted, plastidic is mentioned, or a mitochondrial transit peptide in case in Table I, application no. 17, in column 6 in the same line as SEQ ID NO. 119222 is depicted, mitochondric is mentioned; which is operable linked, too.

[93453] In another embodiment thereof the expression cassette does not comprise an additional transit peptide in case in Table I, application no. 17, in column 6 in the same line as SEQ ID NO. 119222 is depicted, non-targeted is mentioned.

[93454] In an embodiment the present invention relates to an expresssion cassette comprising a) a promoter, preferably a promoter selected from the group consisting of Big35S, PCUbi, Super and USP, in particular p-PcUBI; and b) the nucleic acid SEQ ID NO. 57734, or a homolog or fragment thereof, or a homolog thereof being depicted in Table I, application no. 17, column 8, in the same line as SEQ ID NO. 57734, preferably the coding region thereof, a homolog or a fragment thereof; which are operable linked.

[93455] In an embodiment thereof the expression cassette comprises in addition c) a nucleic acid molecule encoding a transit peptide, especially a plastidal transit petide in case in Table I, application no. 17, in column 6 in the same line as SEQ ID NO. 57734 is depicted, plastidic is mentioned, or a mitochondrial transit peptide in case in Table I, application no. 17, in column 6 in the same line as SEQ ID NO. 57734 is depicted, mitochondric is mentioned; which is operable linked, too.

[93456] In another embodiment thereof the expression cassette does not comprise an additional transit peptide in case in Table I, application no. 17, in column 6 in the same line as SEQ ID NO. 57734 is depicted, non-targeted is mentioned.

[93457] In an embodiment the present invention relates to an expresssion cassette comprising a) a promoter, preferably a promoter selected from the group consisting of Big35S, PCUbi, Super and USP, in particular p-PcUBI; and b) the nucleic acid SEQ ID NO. 101776, or a homolog or fragment thereof, or a homolog thereof being depicted in Table I, application no. 17, column 8, in the same line as SEQ ID NO. 101776, preferably the coding region thereof, a homolog or a fragment thereof; which are operable linked.

[93458] In an embodiment thereof the expression cassette comprises in addition c) a nucleic acid molecule encoding a transit peptide, especially a plastidal transit petide in case in Table I, application no. 17, in column 6 in the same line as SEQ ID NO. 101776 is depicted, plastidic is mentioned, or a mitochondrial transit peptide in case in Table I, application no. 17, in column 6 in the same line as SEQ ID NO. 101776 is depicted, mitochondric is mentioned; which is operable linked, too.

[93459] In another embodiment thereof the expression cassette does not comprise an additional transit peptide in case in Table I, application no. 17, in column 6 in the same line as SEQ ID NO. 101776 is depicted, non-targeted is mentioned.

[93460] In an embodiment the present invention relates to an expresssion cassette comprising a) a promoter, preferably a promoter selected from the group consisting of Big35S, PCUbi, Super and USP, in particular p-PcUBI; and b) the nucleic acid SEQ ID NO. 116713, or a homolog or fragment thereof, or a homolog thereof being depicted in Table I, application no. 17, column 8, in the same line as SEQ ID NO. 116713, preferably the coding region thereof, a homolog or a fragment thereof; which are operable linked.

[93461] In an embodiment thereof the expression cassette comprises in addition c) a nucleic acid molecule encoding a transit peptide, especially a plastidal transit petide in case in Table I, application no. 17, in column 6 in the same line as SEQ ID NO. 116713 is depicted, plastidic is mentioned, or a mitochondrial transit peptide in case in Table I, application no. 17, in column 6 in the same line as SEQ ID NO. 116713 is depicted, mitochondric is mentioned; which is operable linked, too.

[93462] In another embodiment thereof the expression cassette does not comprise an additional transit peptide in case in Table I, application no. 17, in column 6 in the same line as SEQ ID NO. 116713 is depicted, non-targeted is mentioned.

[93463] In an embodiment the present invention relates to an expresssion cassette comprising a) a promoter, preferably a promoter selected from the group consisting of Big35S, PCUbi, Super and USP, in particular p-PcUBI; and b) the nucleic acid SEQ ID NO. 58472, or a homolog or fragment thereof, or a homolog thereof being depicted in Table I, application no. 17, column 8, in the same line as SEQ ID NO. 58472, preferably the coding region thereof, a homolog or a fragment thereof; which are operable linked.

[93464] In an embodiment thereof the expression cassette comprises in addition c) a nucleic acid molecule encoding a transit peptide, especially a plastidal transit petide in case in Table I, application no. 17, in column 6 in the same line as SEQ ID NO. 58472 is depicted, plastidic is mentioned, or a mitochondrial transit peptide in case in Table I, application no. 17, in column 6 in the same line as SEQ ID NO. 58472 is depicted, mitochondric is mentioned; which is operable linked, too.

[93465] In another embodiment thereof the expression cassette does not comprise an additional transit peptide in case in Table I, application no. 17, in column 6 in the same line as SEQ ID NO. 58472 is depicted, non-targeted is mentioned.

[93466] In an embodiment the present invention relates to an expresssion cassette comprising a) a promoter, preferably a promoter selected from the group consisting of Big35S, PCUbi, Super and USP, in particular p-PcUBI; and b) the nucleic acid SEQ ID NO. 58668, or a homolog or fragment thereof, or a homolog thereof being depicted in Table I, application no. 17, column 8, in the same line as SEQ ID NO. 58668, preferably the coding region thereof, a homolog or a fragment thereof; which are operable linked.

[93467] In an embodiment thereof the expression cassette comprises in addition c) a nucleic acid molecule encoding a transit peptide, especially a plastidal transit petide in case in Table I, application no. 17, in column 6 in the same line as SEQ ID NO. 58668 is depicted, plastidic is mentioned, or a mitochondrial transit peptide in case in Table I, application no. 17, in column 6 in the same line as SEQ ID NO. 58668 is depicted, mitochondric is mentioned; which is operable linked, too.

[93468] In another embodiment thereof the expression cassette does not comprise an additional transit peptide in case in Table I, application no. 17, in column 6 in the same line as SEQ ID NO. 58668 is depicted, non-targeted is mentioned.

[93469] In an embodiment the present invention relates to an expresssion cassette comprising a) a promoter, preferably a promoter selected from the group consisting of Big35S, PCUbi, Super and USP, in particular p-PcUBI; and b) the nucleic acid SEQ ID NO. 12070, or a homolog or fragment thereof, or a homolog thereof being depicted in Table I, application no. 17, column 8, in the same line as SEQ ID NO. 12070, preferably the coding region thereof, a homolog or a fragment thereof; which are operable linked.

[93470] In an embodiment thereof the expression cassette comprises in addition c) a nucleic acid molecule encoding a transit peptide, especially a plastidal transit petide in case in Table I, application no. 17, in column 6 in the same line as SEQ ID NO. 12070 is depicted, plastidic is mentioned, or a mitochondrial transit peptide in case in Table I, application no. 17, in column 6 in the same line as SEQ ID NO. 12070 is depicted, mitochondric is mentioned; which is operable linked, too.

[93471] In another embodiment thereof the expression cassette does not comprise an additional transit peptide in case in Table I, application no. 17, in column 6 in the same line as SEQ ID NO. 12070 is depicted, non-targeted is mentioned.

[93472] In an embodiment the present invention relates to an expresssion cassette comprising a) a promoter, preferably a promoter selected from the group consisting of Big35S, PCUbi, Super and USP, in particular p-PcUBI; and b) the nucleic acid SEQ ID NO. 58731, or a homolog or fragment thereof, or a homolog thereof being depicted in Table I, application no. 17, column 8, in the same line as SEQ ID NO. 58731, preferably the coding region thereof, a homolog or a fragment thereof; which are operable linked.

[93473] In an embodiment thereof the expression cassette comprises in addition c) a nucleic acid molecule encoding a transit peptide, especially a plastidal transit petide in case in Table I, application no. 17, in column 6 in the same line as SEQ ID NO. 58731 is depicted, plastidic is mentioned, or a mitochondrial transit peptide in case in Table I, application no. 17, in column 6 in the same line as SEQ ID NO. 58731 is depicted, mitochondric is mentioned; which is operable linked, too.

[93474] In another embodiment thereof the expression cassette does not comprise an additional transit peptide in case in Table I, application no. 17, in column 6 in the same line as SEQ ID NO. 58731 is depicted, non-targeted is mentioned.

[93475] In an embodiment the present invention relates to an expresssion cassette comprising a) a promoter, preferably a promoter selected from the group consisting of Big35S, PCUbi, Super and USP, in particular p-PcUBI; and b) the nucleic acid SEQ ID NO. 58751, or a homolog or fragment thereof, or a homolog thereof being depicted in Table I, application no. 17, column 8, in the same line as SEQ ID NO. 58751, preferably the coding region thereof, a homolog or a fragment thereof; which are operable linked.

[93476] In an embodiment thereof the expression cassette comprises in addition c) a nucleic acid molecule encoding a transit peptide, especially a plastidal transit petide in case in Table I, application no. 17, in column 6 in the same line as SEQ ID NO. 58751 is depicted, plastidic is mentioned, or a mitochondrial transit peptide in case in Table I, application no. 17, in column 6 in the same line as SEQ ID NO. 58751 is depicted, mitochondric is mentioned; which is operable linked, too.

[93477] In another embodiment thereof the expression cassette does not comprise an additional transit peptide in case in Table I, application no. 17, in column 6 in the same line as SEQ ID NO. 58751 is depicted, non-targeted is mentioned.

[93478] In an embodiment the present invention relates to an expresssion cassette comprising a) a promoter, preferably a promoter selected from the group consisting of Big35S, PCUbi, Super and USP, in particular p-PcUBI; and b) the nucleic acid SEQ ID NO. 147457, or a homolog or fragment thereof, or a homolog thereof being depicted in Table I, application no. 17, column 8, in the same line as SEQ ID NO. 147457, preferably the coding region thereof, a homolog or a fragment thereof; which are operable linked.

[93479] In an embodiment thereof the expression cassette comprises in addition c) a nucleic acid molecule encoding a transit peptide, especially a plastidal transit petide in case in Table I, application no. 17, in column 6 in the same line as SEQ ID NO. 147457 is depicted, plastidic is mentioned, or a mitochondrial transit peptide in case in Table I, application no. 17, in column 6 in the same line as SEQ ID NO. 147457 is depicted, mitochondric is mentioned; which is operable linked, too.

[93480] In another embodiment thereof the expression cassette does not comprise an additional transit peptide in case in Table I, application no. 17, in column 6 in the same line as SEQ ID NO. 147457 is depicted, non-targeted is mentioned.

[93481] In an embodiment the present invention relates to an expresssion cassette comprising a) a promoter, preferably a promoter selected from the group consisting of Big35S, PCUbi, Super and USP, in particular p-PcUBI; and b) the nucleic acid SEQ ID NO. 147637, or a homolog or fragment thereof, or a homolog thereof being depicted in Table I, application no. 17, column 8, in the same line as SEQ ID NO. 147637, preferably the coding region thereof, a homolog or a fragment thereof; which are operable linked.

[93482] In an embodiment thereof the expression cassette comprises in addition c) a nucleic acid molecule encoding a transit peptide, especially a plastidal transit petide in case in Table I, application no. 17, in column 6 in the same line as SEQ ID NO. 147637 is depicted, plastidic is mentioned, or a mitochondrial transit peptide in case in Table I, application no. 17, in column 6 in the same line as SEQ ID NO. 147637 is depicted, mitochondric is mentioned; which is operable linked, too.

[93483] In another embodiment thereof the expression cassette does not comprise an additional transit peptide in case in Table I, application no. 17, in column 6 in the same line as SEQ ID NO. 147637 is depicted, non-targeted is mentioned.

[93484] In an embodiment the present invention relates to an expresssion cassette comprising a) a promoter, preferably a promoter selected from the group consisting of Big35S, PCUbi, Super and USP, in particular p-PcUBI; and b) the nucleic acid SEQ ID NO. 12140, or a homolog or fragment thereof, or a homolog thereof being depicted in Table I, application no. 17, column 8, in the same line as SEQ ID NO. 12140, preferably the coding region thereof, a homolog or a fragment thereof; which are operable linked.

[93485] In an embodiment thereof the expression cassette comprises in addition c) a nucleic acid molecule encoding a transit peptide, especially a plastidal transit petide in case in Table I, application no. 17, in column 6 in the same line as SEQ ID NO. 12140 is depicted, plastidic is mentioned, or a mitochondrial transit peptide in case in Table I, application no. 17, in column 6 in the same line as SEQ ID NO. 12140 is depicted, mitochondric is mentioned; which is operable linked, too.

[93486] In another embodiment thereof the expression cassette does not comprise an additional transit peptide in case in Table I, application no. 17, in column 6 in the same line as SEQ ID NO. 12140 is depicted, non-targeted is mentioned.

[93487] In an embodiment the present invention relates to an expresssion cassette comprising a) a promoter, preferably a promoter selected from the group consisting of Big35S, PCUbi, Super and USP, in particular p-PcUBI; and b) the nucleic acid SEQ ID NO. 12341, or a homolog or fragment thereof, or a homolog thereof being depicted in Table I, application no. 17, column 8, in the same line as SEQ ID NO. 12341, preferably the coding region thereof, a homolog or a fragment thereof; which are operable linked.

[93488] In an embodiment thereof the expression cassette comprises in addition c) a nucleic acid molecule encoding a transit peptide, especially a plastidal transit petide in case in Table I, application no. 17, in column 6 in the same line as SEQ ID NO. 12341 is depicted, plastidic is mentioned, or a mitochondrial transit peptide in case in Table I, application no. 17, in column 6 in the same line as SEQ ID NO. 12341 is depicted, mitochondric is mentioned; which is operable linked, too.

[93489] In another embodiment thereof the expression cassette does not comprise an additional transit peptide in case in Table I, application no. 17, in column 6 in the same line as SEQ ID NO. 12341 is depicted, non-targeted is mentioned.

[93490] In an embodiment the present invention relates to an expresssion cassette comprising a) a promoter, preferably a promoter selected from the group consisting of Big35S, PCUbi, Super and USP, in particular p-PcUBI; and b) the nucleic acid SEQ ID NO. 59370, or a homolog or fragment thereof, or a homolog thereof being depicted in Table I, application no. 17, column 8, in the same line as SEQ ID NO. 59370, preferably the coding region thereof, a homolog or a fragment thereof; which are operable linked.

[93491] In an embodiment thereof the expression cassette comprises in addition c) a nucleic acid molecule encoding a transit peptide, especially a plastidal transit petide in case in Table I, application no. 17, in column 6 in the same line as SEQ ID NO. 59370 is depicted, plastidic is mentioned, or a mitochondrial transit peptide in case in Table I, application no. 17, in column 6 in the same line as SEQ ID NO. 59370 is depicted, mitochondric is mentioned; which is operable linked, too.

[93492] In another embodiment thereof the expression cassette does not comprise an additional transit peptide in case in Table I, application no. 17, in column 6 in the same line as SEQ ID NO. 59370 is depicted, non-targeted is mentioned.

[93493] In an embodiment the present invention relates to an expresssion cassette comprising a) a promoter, preferably a promoter selected from the group consisting of Big35S, PCUbi, Super and USP, in particular p-PcUBI; and b) the nucleic acid SEQ ID NO. 147836, or a homolog or fragment thereof, or a homolog thereof being depicted in Table I, application no. 17, column 8, in the same line as SEQ ID NO. 147836, preferably the coding region thereof, a homolog or a fragment thereof; which are operable linked.

[93494] In an embodiment thereof the expression cassette comprises in addition c) a nucleic acid molecule encoding a transit peptide, especially a plastidal transit petide in case in Table I, application no. 17, in column 6 in the same line as SEQ ID NO. 147836 is depicted, plastidic is mentioned, or a mitochondrial transit peptide in case in Table I, application no. 17, in column 6 in the same line as SEQ ID NO. 147836 is depicted, mitochondric is mentioned; which is operable linked, too.

[93495] In another embodiment thereof the expression cassette does not comprise an additional transit peptide in case in Table I, application no. 17, in column 6 in the same line as SEQ ID NO. 147836 is depicted, non-targeted is mentioned.

[93496] In an embodiment the present invention relates to an expresssion cassette comprising a) a promoter, preferably a promoter selected from the group consisting of Big35S, PCUbi, Super and USP, in particular p-PcUBI; and b) the nucleic acid SEQ ID NO. 136907, or a homolog or fragment thereof, or a homolog thereof being depicted in Table I, application no. 17, column 8, in the same line as SEQ ID NO. 136907, preferably the coding region thereof, a homolog or a fragment thereof; which are operable linked.

[93497] In an embodiment thereof the expression cassette comprises in addition c) a nucleic acid molecule encoding a transit peptide, especially a plastidal transit petide in case in Table I, application no. 17, in column 6 in the same line as SEQ ID NO. 136907 is depicted, plastidic is mentioned, or a mitochondrial transit peptide in case in Table I, application no. 17, in column 6 in the same line as SEQ ID NO. 136907 is depicted, mitochondric is mentioned; which is operable linked, too.

[93498] In another embodiment thereof the expression cassette does not comprise an additional transit peptide in case in Table I, application no. 17, in column 6 in the same line as SEQ ID NO. 136907 is depicted, non-targeted is mentioned.

[93499] In an embodiment the present invention relates to an expresssion cassette comprising a) a promoter, preferably a promoter selected from the group consisting of Big35S, PCUbi, Super and USP, in particular p-PcUBI; and b) the nucleic acid SEQ ID NO. 12698, or a homolog or fragment thereof, or a homolog thereof being depicted in Table I, application no. 17, column 8, in the same line as SEQ ID NO. 12698, preferably the coding region thereof, a homolog or a fragment thereof; which are operable linked.

[93500] In an embodiment thereof the expression cassette comprises in addition c) a nucleic acid molecule encoding a transit peptide, especially a plastidal transit petide in case in Table I, application no. 17, in column 6 in the same line as SEQ ID NO. 12698 is depicted, plastidic is mentioned, or a mitochondrial transit peptide in case in Table I, application no. 17, in column 6 in the same line as SEQ ID NO. 12698 is depicted, mitochondric is mentioned; which is operable linked, too.

[93501] In another embodiment thereof the expression cassette does not comprise an additional transit peptide in case in Table I, application no. 17, in column 6 in the same line as SEQ ID NO. 12698 is depicted, non-targeted is mentioned.

[93502] In an embodiment the present invention relates to an expresssion cassette comprising a) a promoter, preferably a promoter selected from the group consisting of Big35S, PCUbi, Super and USP, in particular p-PcUBI; and b) the nucleic acid SEQ ID NO. 60301, or a homolog or fragment thereof, or a homolog thereof being depicted in Table I, application no. 17, column 8, in the same line as SEQ ID NO. 60301, preferably the coding region thereof, a homolog or a fragment thereof; which are operable linked.

[93503] In an embodiment thereof the expression cassette comprises in addition c) a nucleic acid molecule encoding a transit peptide, especially a plastidal transit petide in case in Table I, application no. 17, in column 6 in the same line as SEQ ID NO. 60301 is depicted, plastidic is mentioned, or a mitochondrial transit peptide in case in Table I, application no. 17, in column 6 in the same line as SEQ ID NO. 60301 is depicted, mitochondric is mentioned; which is operable linked, too.

[93504] In another embodiment thereof the expression cassette does not comprise an additional transit peptide in case in Table I, application no. 17, in column 6 in the same line as SEQ ID NO. 60301 is depicted, non-targeted is mentioned.

[93505] In an embodiment the present invention relates to an expresssion cassette comprising a) a promoter, preferably a promoter selected from the group consisting of Big35S, PCUbi, Super and USP, in particular p-PcUBI; and b) the nucleic acid SEQ ID NO. 60859, or a homolog or fragment thereof, or a homolog thereof being depicted in Table I, application no. 17, column 8, in the same line as SEQ ID NO. 60859, preferably the coding region thereof, a homolog or a fragment thereof; which are operable linked.

[93506] In an embodiment thereof the expression cassette comprises in addition c) a nucleic acid molecule encoding a transit peptide, especially a plastidal transit petide in case in Table I, application no. 17, in column 6 in the same line as SEQ ID NO. 60859 is depicted, plastidic is mentioned, or a mitochondrial transit peptide in case in Table I, application no. 17, in column 6 in the same line as SEQ ID NO. 60859 is depicted, mitochondric is mentioned; which is operable linked, too.

[93507] In another embodiment thereof the expression cassette does not comprise an additional transit peptide in case in Table I, application no. 17, in column 6 in the same line as SEQ ID NO. 60859 is depicted, non-targeted is mentioned.

[93508] In an embodiment the present invention relates to an expresssion cassette comprising a) a promoter, preferably a promoter selected from the group consisting of Big35S, PCUbi, Super and USP, in particular p-PcUBI; and b) the nucleic acid SEQ ID NO. 147944, or a homolog or fragment thereof, or a homolog thereof being depicted in Table I, application no. 17, column 8, in the same line as SEQ ID NO. 147944, preferably the coding region thereof, a homolog or a fragment thereof; which are operable linked.

[93509] In an embodiment thereof the expression cassette comprises in addition c) a nucleic acid molecule encoding a transit peptide, especially a plastidal transit petide in case in Table I, application no. 17, in column 6 in the same line as SEQ ID NO. 147944 is depicted, plastidic is mentioned, or a mitochondrial transit peptide in case in Table I, application no. 17, in column 6 in the same line as SEQ ID NO. 147944 is depicted, mitochondric is mentioned; which is operable linked, too.

[93510] In another embodiment thereof the expression cassette does not comprise an additional transit peptide in case in Table I, application no. 17, in column 6 in the same line as SEQ ID NO. 147944 is depicted, non-targeted is mentioned.

[93511] In an embodiment the present invention relates to an expresssion cassette comprising a) a promoter, preferably a promoter selected from the group consisting of Big35S, PCUbi, Super and USP, in particular p-PcUBI; and b) the nucleic acid SEQ ID NO. 61723, or a homolog or fragment thereof, or a homolog thereof being depicted in Table I, application no. 17, column 8, in the same line as SEQ ID NO. 61723, preferably the coding region thereof, a homolog or a fragment thereof; which are operable linked.

[93512] In an embodiment thereof the expression cassette comprises in addition c) a nucleic acid molecule encoding a transit peptide, especially a plastidal transit petide in case in Table I, application no. 17, in column 6 in the same line as SEQ ID NO. 61723 is depicted, plastidic is mentioned, or a mitochondrial transit peptide in case in Table I, application no. 17, in column 6 in the same line as SEQ ID NO. 61723 is depicted, mitochondric is mentioned; which is operable linked, too.

[93513] In another embodiment thereof the expression cassette does not comprise an additional transit peptide in case in Table I, application no. 17, in column 6 in the same line as SEQ ID NO. 61723 is depicted, non-targeted is mentioned.

[93514] In an embodiment the present invention relates to an expresssion cassette comprising a) a promoter, preferably a promoter selected from the group consisting of Big35S, PCUbi, Super and USP, in particular p-PcUBI; and b) the nucleic acid SEQ ID NO. 62079, or a homolog or fragment thereof, or a homolog thereof being depicted in Table I, application no. 17, column 8, in the same line as SEQ ID NO. 62079, preferably the coding region thereof, a homolog or a fragment thereof; which are operable linked.

[93515] In an embodiment thereof the expression cassette comprises in addition c) a nucleic acid molecule encoding a transit peptide, especially a plastidal transit petide in case in Table I, application no. 17, in column 6 in the same line as SEQ ID NO. 62079 is depicted, plastidic is mentioned, or a mitochondrial transit peptide in case in Table I, application no. 17, in column 6 in the same line as SEQ ID NO. 62079 is depicted, mitochondric is mentioned; which is operable linked, too.

[93516] In another embodiment thereof the expression cassette does not comprise an additional transit peptide in case in Table I, application no. 17, in column 6 in the same line as SEQ ID NO. 62079 is depicted, non-targeted is mentioned.

[93517] In an embodiment the present invention relates to an expresssion cassette comprising a) a promoter, preferably a promoter selected from the group consisting of Big35S, PCUbi, Super and USP, in particular p-PcUBI; and b) the nucleic acid SEQ ID NO. 12974, or a homolog or fragment thereof, or a homolog thereof being depicted in Table I, application no. 17, column 8, in the same line as SEQ ID NO. 12974, preferably the coding region thereof, a homolog or a fragment thereof; which are operable linked.

[93518] In an embodiment thereof the expression cassette comprises in addition c) a nucleic acid molecule encoding a transit peptide, especially a plastidal transit petide in case in Table I, application no. 17, in column 6 in the same line as SEQ ID NO. 12974 is depicted, plastidic is mentioned, or a mitochondrial transit peptide in case in Table I, application no. 17, in column 6 in the same line as SEQ ID NO. 12974 is depicted, mitochondric is mentioned; which is operable linked, too.

[93519] In another embodiment thereof the expression cassette does not comprise an additional transit peptide in case in Table I, application no. 17, in column 6 in the same line as SEQ ID NO. 12974 is depicted, non-targeted is mentioned.

[93520] In an embodiment the present invention relates to an expresssion cassette comprising a) a promoter, preferably a promoter selected from the group consisting of Big35S, PCUbi, Super and USP, in particular p-PcUBI; and b) the nucleic acid SEQ ID NO. 148559, or a homolog or fragment thereof, or a homolog thereof being depicted in Table I, application no. 17, column 8, in the same line as SEQ ID NO. 148559, preferably the coding region thereof, a homolog or a fragment thereof; which are operable linked.

[93521] In an embodiment thereof the expression cassette comprises in addition c) a nucleic acid molecule encoding a transit peptide, especially a plastidal transit petide in case in Table I, application no. 17, in column 6 in the same line as SEQ ID NO. 148559 is depicted, plastidic is mentioned, or a mitochondrial transit peptide in case in Table I, application no. 17, in column 6 in the same line as SEQ ID NO. 148559 is depicted, mitochondric is mentioned; which is operable linked, too.

[93522] In another embodiment thereof the expression cassette does not comprise an additional transit peptide in case in Table I, application no. 17, in column 6 in the same line as SEQ ID NO. 148559 is depicted, non-targeted is mentioned.

[93523] In an embodiment the present invention relates to an expresssion cassette comprising a) a promoter, preferably a promoter selected from the group consisting of Big35S, PCUbi, Super and USP, in particular p-PcUBI; and b) the nucleic acid SEQ ID NO. 62160, or a homolog or fragment thereof, or a homolog thereof being depicted in Table I, application no. 17, column 8, in the same line as SEQ ID NO. 62160, preferably the coding region thereof, a homolog or a fragment thereof; which are operable linked.

[93524] In an embodiment thereof the expression cassette comprises in addition c) a nucleic acid molecule encoding a transit peptide, especially a plastidal transit petide in case in Table I, application no. 17, in column 6 in the same line as SEQ ID NO. 62160 is depicted, plastidic is mentioned, or a mitochondrial transit peptide in case in Table I, application no. 17, in column 6 in the same line as SEQ ID NO. 62160 is depicted, mitochondric is mentioned; which is operable linked, too.

[93525] In another embodiment thereof the expression cassette does not comprise an additional transit peptide in case in Table I, application no. 17, in column 6 in the same line as SEQ ID NO. 62160 is depicted, non-targeted is mentioned.

[93526] In an embodiment the present invention relates to an expresssion cassette comprising a) a promoter, preferably a promoter selected from the group consisting of Big35S, PCUbi, Super and USP, in particular p-PcUBI; and b) the nucleic acid SEQ ID NO. 62244, or a homolog or fragment thereof, or a homolog thereof being depicted in Table I, application no. 17, column 8, in the same line as SEQ ID NO. 62244, preferably the coding region thereof, a homolog or a fragment thereof; which are operable linked.

[93527] In an embodiment thereof the expression cassette comprises in addition c) a nucleic acid molecule encoding a transit peptide, especially a plastidal transit petide in case in Table I, application no. 17, in column 6 in the same line as SEQ ID NO. 62244 is depicted, plastidic is mentioned, or a mitochondrial transit peptide in case in Table I, application no. 17, in column 6 in the same line as SEQ ID NO. 62244 is depicted, mitochondric is mentioned; which is operable linked, too.

[93528] In another embodiment thereof the expression cassette does not comprise an additional transit peptide in case in Table I, application no. 17, in column 6 in the same line as SEQ ID NO. 62244 is depicted, non-targeted is mentioned.

[93529] In an embodiment the present invention relates to an expresssion cassette comprising a) a promoter, preferably a promoter selected from the group consisting of Big35S, PCUbi, Super and USP, in particular Big35S; and b) the nucleic acid SEQ ID NO. 62524, or a homolog or fragment thereof, or a homolog thereof being depicted in Table I, application no. 17, column 8, in the same line as SEQ ID NO. 62524, preferably the coding region thereof, a homolog or a fragment thereof; which are operable linked.

[93530] In an embodiment thereof the expression cassette comprises in addition c) a nucleic acid molecule encoding a transit peptide, especially a plastidal transit petide in case in Table I, application no. 17, in column 6 in the same line as SEQ ID NO. 62524 is depicted, plastidic is mentioned, or a mitochondrial transit peptide in case in Table I, application no. 17, in column 6 in the same line as SEQ ID NO. 62524 is depicted, mitochondric is mentioned; which is operable linked, too.

[93531] In another embodiment thereof the expression cassette does not comprise an additional transit peptide in case in Table I, application no. 17, in column 6 in the same line as SEQ ID NO. 62524 is depicted, non-targeted is mentioned.

[93532] In an embodiment the present invention relates to an expresssion cassette comprising a) a promoter, preferably a promoter selected from the group consisting of Big35S, PCUbi, Super and USP, in particular p-Super; and b) the nucleic acid SEQ ID NO. 88879, or a homolog or fragment thereof, or a homolog thereof being depicted in Table I, application no. 17, column 8, in the same line as SEQ ID NO. 88879, preferably the coding region thereof, a homolog or a fragment thereof; which are operable linked.

[93533] In an embodiment thereof the expression cassette comprises in addition c) a nucleic acid molecule encoding a transit peptide, especially a plastidal transit petide in case in Table I, application no. 17, in column 6 in the same line as SEQ ID NO. 88879 is depicted, plastidic is mentioned, or a mitochondrial transit peptide in case in Table I, application no. 17, in column 6 in the same line as SEQ ID NO. 88879 is depicted, mitochondric is mentioned; which is operable linked, too.

[93534] In another embodiment thereof the expression cassette does not comprise an additional transit peptide in case in Table I, application no. 17, in column 6 in the same line as SEQ ID NO. 88879 is depicted, non-targeted is mentioned.

[93535] In an embodiment the present invention relates to an expresssion cassette comprising a) a promoter, preferably a promoter selected from the group consisting of Big35S, PCUbi, Super and USP, in particular p-PcUBI; and b) the nucleic acid SEQ ID NO. 89317, or a homolog or fragment thereof, or a homolog thereof being depicted in Table I, application no. 17, column 8, in the same line as SEQ ID NO. 89317, preferably the coding region thereof, a homolog or a fragment thereof; which are operable linked.

[93536] In an embodiment thereof the expression cassette comprises in addition c) a nucleic acid molecule encoding a transit peptide, especially a plastidal transit petide in case in Table I, application no. 17, in column 6 in the same line as SEQ ID NO. 89317 is depicted, plastidic is mentioned, or a mitochondrial transit peptide in case in Table I, application no. 17, in column 6 in the same line as SEQ ID NO. 89317 is depicted, mitochondric is mentioned; which is operable linked, too.

[93537] In another embodiment thereof the expression cassette does not comprise an additional transit peptide in case in Table I, application no. 17, in column 6 in the same line as SEQ ID NO. 89317 is depicted, non-targeted is mentioned.

[93538] In an embodiment the present invention relates to an expresssion cassette comprising a) a promoter, preferably a promoter selected from the group consisting of Big35S, PCUbi, Super and USP, in particular p-Super; and b) the nucleic acid SEQ ID NO. 96980, or a homolog or fragment thereof, or a homolog thereof being depicted in Table I, application no. 17, column 8, in the same line as SEQ ID NO. 96980, preferably the coding region thereof, a homolog or a fragment thereof; which are operable linked.

[93539] In an embodiment thereof the expression cassette comprises in addition c) a nucleic acid molecule encoding a transit peptide, especially a plastidal transit petide in case in Table I, application no. 17, in column 6 in the same line as SEQ ID NO. 96980 is depicted, plastidic is mentioned, or a mitochondrial transit peptide in case in Table I, application no. 17, in column 6 in the same line as SEQ ID NO. 96980 is depicted, mitochondric is mentioned; which is operable linked, too.

[93540] In another embodiment thereof the expression cassette does not comprise an additional transit peptide in case in Table I, application no. 17, in column 6 in the same line as SEQ ID NO. 96980 is depicted, non-targeted is mentioned.

[93541] In an embodiment the present invention relates to an expresssion cassette comprising a) a promoter, preferably a promoter selected from the group consisting of Big35S, PCUbi, Super and USP, in particular p-Super; and b) the nucleic acid SEQ ID NO. 89395, or a homolog or fragment thereof, or a homolog thereof being depicted in Table I, application no. 17, column 8, in the same line as SEQ ID NO. 89395, preferably the coding region thereof, a homolog or a fragment thereof; which are operable linked.

[93542] In an embodiment thereof the expression cassette comprises in addition c) a nucleic acid molecule encoding a transit peptide, especially a plastidal transit petide in case in Table I, application no. 17, in column 6 in the same line as SEQ ID NO. 89395 is depicted, plastidic is mentioned, or a mitochondrial transit peptide in case in Table I, application no. 17, in column 6 in the same line as SEQ ID NO. 89395 is depicted, mitochondric is mentioned; which is operable linked, too.

[93543] In another embodiment thereof the expression cassette does not comprise an additional transit peptide in case in Table I, application no. 17, in column 6 in the same line as SEQ ID NO. 89395 is depicted, non-targeted is mentioned.

[93544] In an embodiment the present invention relates to an expresssion cassette comprising a) a promoter, preferably a promoter selected from the group consisting of Big35S, PCUbi, Super and USP, in particular Big35S; and b) the nucleic acid SEQ ID NO. 108113, or a homolog or fragment thereof, or a homolog thereof being depicted in Table I, application no. 17, column 8, in the same line as SEQ ID NO. 108113, preferably the coding region thereof, a homolog or a fragment thereof; which are operable linked.

[93545] In an embodiment thereof the expression cassette comprises in addition c) a nucleic acid molecule encoding a transit peptide, especially a plastidal transit petide in case in Table I, application no. 17, in column 6 in the same line as SEQ ID NO. 108113 is depicted, plastidic is mentioned, or a mitochondrial transit peptide in case in Table I, application no. 17, in column 6 in the same line as SEQ ID NO. 108113 is depicted, mitochondric is mentioned; which is operable linked, too.

[93546] In another embodiment thereof the expression cassette does not comprise an additional transit peptide in case in Table I, application no. 17, in column 6 in the same line as SEQ ID NO. 108113 is depicted, non-targeted is mentioned.

[93547] In an embodiment the present invention relates to an expresssion cassette comprising a) a promoter, preferably a promoter selected from the group consisting of Big35S, PCUbi, Super and USP, in particular Big35S; and b) the nucleic acid SEQ ID NO. 148579, or a homolog or fragment thereof, or a homolog thereof being depicted in Table I, application no. 17, column 8, in the same line as SEQ ID NO. 148579, preferably the coding region thereof, a homolog or a fragment thereof; which are operable linked.

[93548] In an embodiment thereof the expression cassette comprises in addition c) a nucleic acid molecule encoding a transit peptide, especially a plastidal transit petide in case in Table I, application no. 17, in column 6 in the same line as SEQ ID NO. 148579 is depicted, plastidic is mentioned, or a mitochondrial transit peptide in case in Table I, application no. 17, in column 6 in the same line as SEQ ID NO. 148579 is depicted, mitochondric is mentioned; which is operable linked, too.

[93549] In another embodiment thereof the expression cassette does not comprise an additional transit peptide in case in Table I, application no. 17, in column 6 in the same line as SEQ ID NO. 148579 is depicted, non-targeted is mentioned.

[93550] In an embodiment the present invention relates to an expresssion cassette comprising a) a promoter, preferably a promoter selected from the group consisting of Big35S, PCUbi, Super and USP, in particular p-Super; and b) the nucleic acid SEQ ID NO. 63264, or a homolog or fragment thereof, or a homolog thereof being depicted in Table I, application no. 17, column 8, in the same line as SEQ ID NO. 63264, preferably the coding region thereof, a homolog or a fragment thereof; which are operable linked.

[93551] In an embodiment thereof the expression cassette comprises in addition c) a nucleic acid molecule encoding a transit peptide, especially a plastidal transit petide in case in Table I, application no. 17, in column 6 in the same line as SEQ ID NO. 63264 is depicted, plastidic is mentioned, or a mitochondrial transit peptide in case in Table I, application no. 17, in column 6 in the same line as SEQ ID NO. 63264 is depicted, mitochondric is mentioned; which is operable linked, too.

[93552] In another embodiment thereof the expression cassette does not comprise an additional transit peptide in case in Table I, application no. 17, in column 6 in the same line as SEQ ID NO. 63264 is depicted, non-targeted is mentioned.

[93553] In an embodiment the present invention relates to an expresssion cassette comprising a) a promoter, preferably a promoter selected from the group consisting of Big35S, PCUbi, Super and USP, in particular p-PcUBI; and b) the nucleic acid SEQ ID NO. 122228, or a homolog or fragment thereof, or a homolog thereof being depicted in Table I, application no. 17, column 8, in the same line as SEQ ID NO. 122228, preferably the coding region thereof, a homolog or a fragment thereof; which are operable linked.

[93554] In an embodiment thereof the expression cassette comprises in addition c) a nucleic acid molecule encoding a transit peptide, especially a plastidal transit petide in case in Table I, application no. 17, in column 6 in the same line as SEQ ID NO. 122228 is depicted, plastidic is mentioned, or a mitochondrial transit peptide in case in Table I, application no. 17, in column 6 in the same line as SEQ ID NO. 122228 is depicted, mitochondric is mentioned; which is operable linked, too.

[93555] In another embodiment thereof the expression cassette does not comprise an additional transit peptide in case in Table I, application no. 17, in column 6 in the same line as SEQ ID NO. 122228 is depicted, non-targeted is mentioned.

[93556] In an embodiment the present invention relates to an expresssion cassette comprising a) a promoter, preferably a promoter selected from the group consisting of Big35S, PCUbi, Super and USP, in particular Big35S; and b) the nucleic acid SEQ ID NO. 120045, or a homolog or fragment thereof, or a homolog thereof being depicted in Table I, application no. 17, column 8, in the same line as SEQ ID NO. 120045, preferably the coding region thereof, a homolog or a fragment thereof; which are operable linked.

[93557] In an embodiment thereof the expression cassette comprises in addition c) a nucleic acid molecule encoding a transit peptide, especially a plastidal transit petide in case in Table I, application no. 17, in column 6 in the same line as SEQ ID NO. 120045 is depicted, plastidic is mentioned, or a mitochondrial transit peptide in case in Table I, application no. 17, in column 6 in the same line as SEQ ID NO. 120045 is depicted, mitochondric is mentioned; which is operable linked, too.

[93558] In another embodiment thereof the expression cassette does not comprise an additional transit peptide in case in Table I, application no. 17, in column 6 in the same line as SEQ ID NO. 120045 is depicted, non-targeted is mentioned.

[93559] In an embodiment the present invention relates to an expresssion cassette comprising a) a promoter, preferably a promoter selected from the group consisting of Big35S, PCUbi, Super and USP, in particular Big35S; and b) the nucleic acid SEQ ID NO. 14171, or a homolog or fragment thereof, or a homolog thereof being depicted in Table I, application no. 17, column 8, in the same line as SEQ ID NO. 14171, preferably the coding region thereof, a homolog or a fragment thereof; which are operable linked.

[93560] In an embodiment thereof the expression cassette comprises in addition c) a nucleic acid molecule encoding a transit peptide, especially a plastidal transit petide in case in Table I, application no. 17, in column 6 in the same line as SEQ ID NO. 14171 is depicted, plastidic is mentioned, or a mitochondrial transit peptide in case in Table I, application no. 17, in column 6 in the same line as SEQ ID NO. 14171 is depicted, mitochondric is mentioned; which is operable linked, too.

[93561] In another embodiment thereof the expression cassette does not comprise an additional transit peptide in case in Table I, application no. 17, in column 6 in the same line as SEQ ID NO. 14171 is depicted, non-targeted is mentioned.

[93562] In an embodiment the present invention relates to an expresssion cassette comprising a) a promoter, preferably a promoter selected from the group consisting of Big35S, PCUbi, Super and USP, in particular Big35S; and b) the nucleic acid SEQ ID NO. 137498, or a homolog or fragment thereof, or a homolog thereof being depicted in Table I, application no. 17, column 8, in the same line as SEQ ID NO. 137498, preferably the coding region thereof, a homolog or a fragment thereof; which are operable linked.

[93563] In an embodiment thereof the expression cassette comprises in addition c) a nucleic acid molecule encoding a transit peptide, especially a plastidal transit petide in case in Table I, application no. 17, in column 6 in the same line as SEQ ID NO. 137498 is depicted, plastidic is mentioned, or a mitochondrial transit peptide in case in Table I, application no. 17, in column 6 in the same line as SEQ ID NO. 137498 is depicted, mitochondric is mentioned; which is operable linked, too.

[93564] In another embodiment thereof the expression cassette does not comprise an additional transit peptide in case in Table I, application no. 17, in column 6 in the same line as SEQ ID NO. 137498 is depicted, non-targeted is mentioned.

[93565] In an embodiment the present invention relates to an expresssion cassette comprising a) a promoter, preferably a promoter selected from the group consisting of Big35S, PCUbi, Super and USP, in particular p-Super; and b) the nucleic acid SEQ ID NO. 14302, or a homolog or fragment thereof, or a homolog thereof being depicted in Table I, application no. 17, column 8, in the same line as SEQ ID NO. 14302, preferably the coding region thereof, a homolog or a fragment thereof; which are operable linked.

[93566] In an embodiment thereof the expression cassette comprises in addition c) a nucleic acid molecule encoding a transit peptide, especially a plastidal transit petide in case in Table I, application no. 17, in column 6 in the same line as SEQ ID NO. 14302 is depicted, plastidic is mentioned, or a mitochondrial transit peptide in case in Table I, application no. 17, in column 6 in the same line as SEQ ID NO. 14302 is depicted, mitochondric is mentioned; which is operable linked, too.

[93567] In another embodiment thereof the expression cassette does not comprise an additional transit peptide in case in Table I, application no. 17, in column 6 in the same line as SEQ ID NO. 14302 is depicted, non-targeted is mentioned.

[93568] In an embodiment the present invention relates to an expresssion cassette comprising a) a promoter, preferably a promoter selected from the group consisting of Big35S, PCUbi, Super and USP, in particular p-Super; and b) the nucleic acid SEQ ID NO. 89483, or a homolog or fragment thereof, or a homolog thereof being depicted in Table I, application no. 17, column 8, in the same line as SEQ ID NO. 89483, preferably the coding region thereof, a homolog or a fragment thereof; which are operable linked.

[93569] In an embodiment thereof the expression cassette comprises in addition c) a nucleic acid molecule encoding a transit peptide, especially a plastidal transit petide in case in Table I, application no. 17, in column 6 in the same line as SEQ ID NO. 89483 is depicted, plastidic is mentioned, or a mitochondrial transit peptide in case in Table I, application no. 17, in column 6 in the same line as SEQ ID NO. 89483 is depicted, mitochondric is mentioned; which is operable linked, too.

[93570] In another embodiment thereof the expression cassette does not comprise an additional transit peptide in case in Table I, application no. 17, in column 6 in the same line as SEQ ID NO. 89483 is depicted, non-targeted is mentioned.

[93571] In an embodiment the present invention relates to an expresssion cassette comprising a) a promoter, preferably a promoter selected from the group consisting of Big35S, PCUbi, Super and USP, in particular p-Super; and b) the nucleic acid SEQ ID NO. 148583, or a homolog or fragment thereof, or a homolog thereof being depicted in Table I, application no. 17, column 8, in the same line as SEQ ID NO. 148583, preferably the coding region thereof, a homolog or a fragment thereof; which are operable linked.

[93572] In an embodiment thereof the expression cassette comprises in addition c) a nucleic acid molecule encoding a transit peptide, especially a plastidal transit petide in case in Table I, application no. 17, in column 6 in the same line as SEQ ID NO. 148583 is depicted, plastidic is mentioned, or a mitochondrial transit peptide in case in Table I, application no. 17, in column 6 in the same line as SEQ ID NO. 148583 is depicted, mitochondric is mentioned; which is operable linked, too.

[93573] In another embodiment thereof the expression cassette does not comprise an additional transit peptide in case in Table I, application no. 17, in column 6 in the same line as SEQ ID NO. 148583 is depicted, non-targeted is mentioned.

[93574] In an embodiment the present invention relates to an expresssion cassette comprising a) a promoter, preferably a promoter selected from the group consisting of Big35S, PCUbi, Super and USP, in particular p-Super; and b) the nucleic acid SEQ ID NO. 113313, or a homolog or fragment thereof, or a homolog thereof being depicted in Table I, application no. 17, column 8, in the same line as SEQ ID NO. 113313, preferably the coding region thereof, a homolog or a fragment thereof; which are operable linked.

[93575] In an embodiment thereof the expression cassette comprises in addition c) a nucleic acid molecule encoding a transit peptide, especially a plastidal transit petide in case in Table I, application no. 17, in column 6 in the same line as SEQ ID NO. 113313 is depicted, plastidic is mentioned, or a mitochondrial transit peptide in case in Table I, application no. 17, in column 6 in the same line as SEQ ID NO. 113313 is depicted, mitochondric is mentioned; which is operable linked, too.

[93576] In another embodiment thereof the expression cassette does not comprise an additional transit peptide in case in Table I, application no. 17, in column 6 in the same line as SEQ ID NO. 113313 is depicted, non-targeted is mentioned.

[93577] In an embodiment the present invention relates to an expresssion cassette comprising a) a promoter, preferably a promoter selected from the group consisting of Big35S, PCUbi, Super and USP, in particular p-PcUBI; and b) the nucleic acid SEQ ID NO. 63334, or a homolog or fragment thereof, or a homolog thereof being depicted in Table I, application no. 17, column 8, in the same line as SEQ ID NO. 63334, preferably the coding region thereof, a homolog or a fragment thereof; which are operable linked.

[93578] In an embodiment thereof the expression cassette comprises in addition c) a nucleic acid molecule encoding a transit peptide, especially a plastidal transit petide in case in Table I, application no. 17, in column 6 in the same line as SEQ ID NO. 63334 is depicted, plastidic is mentioned, or a mitochondrial transit peptide in case in Table I, application no. 17, in column 6 in the same line as SEQ ID NO. 63334 is depicted, mitochondric is mentioned; which is operable linked, too.

[93579] In another embodiment thereof the expression cassette does not comprise an additional transit peptide in case in Table I, application no. 17, in column 6 in the same line as SEQ ID NO. 63334 is depicted, non-targeted is mentioned.

[93580] In an embodiment the present invention relates to an expresssion cassette comprising a) a promoter, preferably a promoter selected from the group consisting of Big35S, PCUbi, Super and USP, in particular p-Super; and b) the nucleic acid SEQ ID NO. 63544, or a homolog or fragment thereof, or a homolog thereof being depicted in Table I, application no. 17, column 8, in the same line as SEQ ID NO. 63544, preferably the coding region thereof, a homolog or a fragment thereof; which are operable linked.

[93581] In an embodiment thereof the expression cassette comprises in addition c) a nucleic acid molecule encoding a transit peptide, especially a plastidal transit petide in case in Table I, application no. 17, in column 6 in the same line as SEQ ID NO. 63544 is depicted, plastidic is mentioned, or a mitochondrial transit peptide in case in Table I, application no. 17, in column 6 in the same line as SEQ ID NO. 63544 is depicted, mitochondric is mentioned; which is operable linked, too.

[93582] In another embodiment thereof the expression cassette does not comprise an additional transit peptide in case in Table I, application no. 17, in column 6 in the same line as SEQ ID NO. 63544 is depicted, non-targeted is mentioned.

[93583] In an embodiment the present invention relates to an expresssion cassette comprising a) a promoter, preferably a promoter selected from the group consisting of Big35S, PCUbi, Super and USP, in particular p-Super; and b) the nucleic acid SEQ ID NO. 90103, or a homolog or fragment thereof, or a homolog thereof being depicted in Table I, application no. 17, column 8, in the same line as SEQ ID NO. 90103, preferably the coding region thereof, a homolog or a fragment thereof; which are operable linked.

[93584] In an embodiment thereof the expression cassette comprises in addition c) a nucleic acid molecule encoding a transit peptide, especially a plastidal transit petide in case in Table I, application no. 17, in column 6 in the same line as SEQ ID NO. 90103 is depicted, plastidic is mentioned, or a mitochondrial transit peptide in case in Table I, application no. 17, in column 6 in the same line as SEQ ID NO. 90103 is depicted, mitochondric is mentioned; which is operable linked, too.

[93585] In another embodiment thereof the expression cassette does not comprise an additional transit peptide in case in Table I, application no. 17, in column 6 in the same line as SEQ ID NO. 90103 is depicted, non-targeted is mentioned.

[93586] In an embodiment the present invention relates to an expresssion cassette comprising a) a promoter, preferably a promoter selected from the group consisting of Big35S, PCUbi, Super and USP, in particular Big35S; and b) the nucleic acid SEQ ID NO. 90165, or a homolog or fragment thereof, or a homolog thereof being depicted in Table I, application no. 17, column 8, in the same line as SEQ ID NO. 90165, preferably the coding region thereof, a homolog or a fragment thereof; which are operable linked.

[93587] In an embodiment thereof the expression cassette comprises in addition c) a nucleic acid molecule encoding a transit peptide, especially a plastidal transit petide in case in Table I, application no. 17, in column 6 in the same line as SEQ ID NO. 90165 is depicted, plastidic is mentioned, or a mitochondrial transit peptide in case in Table I, application no. 17, in column 6 in the same line as SEQ ID NO. 90165 is depicted, mitochondric is mentioned; which is operable linked, too.

[93588] In another embodiment thereof the expression cassette does not comprise an additional transit peptide in case in Table I, application no. 17, in column 6 in the same line as SEQ ID NO. 90165 is depicted, non-targeted is mentioned.

[93589] In an embodiment the present invention relates to an expresssion cassette comprising a) a promoter, preferably a promoter selected from the group consisting of Big35S, PCUbi, Super and USP, in particular Big35S; and b) the nucleic acid SEQ ID NO. 148614, or a homolog or fragment thereof, or a homolog thereof being depicted in Table I, application no. 17, column 8, in the same line as SEQ ID NO. 148614, preferably the coding region thereof, a homolog or a fragment thereof; which are operable linked.

[93590] In an embodiment thereof the expression cassette comprises in addition c) a nucleic acid molecule encoding a transit peptide, especially a plastidal transit petide in case in Table I, application no. 17, in column 6 in the same line as SEQ ID NO. 148614 is depicted, plastidic is mentioned, or a mitochondrial transit peptide in case in Table I, application no. 17, in column 6 in the same line as SEQ ID NO. 148614 is depicted, mitochondric is mentioned; which is operable linked, too.

[93591] In another embodiment thereof the expression cassette does not comprise an additional transit peptide in case in Table I, application no. 17, in column 6 in the same line as SEQ ID NO. 148614 is depicted, non-targeted is mentioned.

[93592] In an embodiment the present invention relates to an expresssion cassette comprising a) a promoter, preferably a promoter selected from the group consisting of Big35S, PCUbi, Super and USP, in particular Big35S; and b) the nucleic acid SEQ ID NO. 97294, or a homolog or fragment thereof, or a homolog thereof being depicted in Table I, application no. 17, column 8, in the same line as SEQ ID NO. 97294, preferably the coding region thereof, a homolog or a fragment thereof; which are operable linked.

[93593] In an embodiment thereof the expression cassette comprises in addition c) a nucleic acid molecule encoding a transit peptide, especially a plastidal transit petide in case in Table I, application no. 17, in column 6 in the same line as SEQ ID NO. 97294 is depicted, plastidic is mentioned, or a mitochondrial transit peptide in case in Table I, application no. 17, in column 6 in the same line as SEQ ID NO. 97294 is depicted, mitochondric is mentioned; which is operable linked, too.

[93594] In another embodiment thereof the expression cassette does not comprise an additional transit peptide in case in Table I, application no. 17, in column 6 in the same line as SEQ ID NO. 97294 is depicted, non-targeted is mentioned.

[93595] In an embodiment the present invention relates to an expresssion cassette comprising a) a promoter, preferably a promoter selected from the group consisting of Big35S, PCUbi, Super and USP, in particular Big35S; and b) the nucleic acid SEQ ID NO. 128511, or a homolog or fragment thereof, or a homolog thereof being depicted in Table I, application no. 17, column 8, in the same line as SEQ ID NO. 128511, preferably the coding region thereof, a homolog or a fragment thereof; which are operable linked.

[93596] In an embodiment thereof the expression cassette comprises in addition c) a nucleic acid molecule encoding a transit peptide, especially a plastidal transit petide in case in Table I, application no. 17, in column 6 in the same line as SEQ ID NO. 128511 is depicted, plastidic is mentioned, or a mitochondrial transit peptide in case in Table I, application no. 17, in column 6 in the same line as SEQ ID NO. 128511 is depicted, mitochondric is mentioned; which is operable linked, too.

[93597] In another embodiment thereof the expression cassette does not comprise an additional transit peptide in case in Table I, application no. 17, in column 6 in the same line as SEQ ID NO. 128511 is depicted, non-targeted is mentioned.

[93598] In an embodiment the present invention relates to an expresssion cassette comprising a) a promoter, preferably a promoter selected from the group consisting of Big35S, PCUbi, Super and USP, in particular p-Super; and b) the nucleic acid SEQ ID NO. 148811, or a homolog or fragment thereof, or a homolog thereof being depicted in Table I, application no. 17, column 8, in the same line as SEQ ID NO. 148811, preferably the coding region thereof, a homolog or a fragment thereof; which are operable linked.

[93599] In an embodiment thereof the expression cassette comprises in addition c) a nucleic acid molecule encoding a transit peptide, especially a plastidal transit petide in case in Table I, application no. 17, in column 6 in the same line as SEQ ID NO. 148811 is depicted, plastidic is mentioned, or a mitochondrial transit peptide in case in Table I, application no. 17, in column 6 in the same line as SEQ ID NO. 148811 is depicted, mitochondric is mentioned; which is operable linked, too.

[93600] In another embodiment thereof the expression cassette does not comprise an additional transit peptide in case in Table I, application no. 17, in column 6 in the same line as SEQ ID NO. 148811 is depicted, non-targeted is mentioned.

[93601] In an embodiment the present invention relates to an expresssion cassette comprising a) a promoter, preferably a promoter selected from the group consisting of Big35S, PCUbi, Super and USP, in particular p-PcUBI; and b) the nucleic acid SEQ ID NO. 148833, or a homolog or fragment thereof, or a homolog thereof being depicted in Table I, application no. 17, column 8, in the same line as SEQ ID NO. 148833, preferably the coding region thereof, a homolog or a fragment thereof; which are operable linked.

[93602] In an embodiment thereof the expression cassette comprises in addition c) a nucleic acid molecule encoding a transit peptide, especially a plastidal transit petide in case in Table I, application no. 17, in column 6 in the same line as SEQ ID NO. 148833 is depicted, plastidic is mentioned, or a mitochondrial transit peptide in case in Table I, application no. 17, in column 6 in the same line as SEQ ID NO. 148833 is depicted, mitochondric is mentioned; which is operable linked, too.

[93603] In another embodiment thereof the expression cassette does not comprise an additional transit peptide in case in Table I, application no. 17, in column 6 in the same line as SEQ ID NO. 148833 is depicted, non-targeted is mentioned.

[93604] In an embodiment the present invention relates to an expresssion cassette comprising a) a promoter, preferably a promoter selected from the group consisting of Big35S, PCUbi, Super and USP, in particular Big35S; and b) the nucleic acid SEQ ID NO. 64144, or a homolog or fragment thereof, or a homolog thereof being depicted in Table I, application no. 17, column 8, in the same line as SEQ ID NO. 64144, preferably the coding region thereof, a homolog or a fragment thereof; which are operable linked.

[93605] In an embodiment thereof the expression cassette comprises in addition c) a nucleic acid molecule encoding a transit peptide, especially a plastidal transit petide in case in Table I, application no. 17, in column 6 in the same line as SEQ ID NO. 64144 is depicted, plastidic is mentioned, or a mitochondrial transit peptide in case in Table I, application no. 17, in column 6 in the same line as SEQ ID NO. 64144 is depicted, mitochondric is mentioned; which is operable linked, too.

[93606] In another embodiment thereof the expression cassette does not comprise an additional transit peptide in case in Table I, application no. 17, in column 6 in the same line as SEQ ID NO. 64144 is depicted, non-targeted is mentioned.

[93607] In an embodiment the present invention relates to an expresssion cassette comprising a) a promoter, preferably a promoter selected from the group consisting of Big35S, PCUbi, Super and USP, in particular Big35S; and b) the nucleic acid SEQ ID NO. 149219, or a homolog or fragment thereof, or a homolog thereof being depicted in Table I, application no. 17, column 8, in the same line as SEQ ID NO. 149219, preferably the coding region thereof, a homolog or a fragment thereof; which are operable linked.

[93608] In an embodiment thereof the expression cassette comprises in addition c) a nucleic acid molecule encoding a transit peptide, especially a plastidal transit petide in case in Table I, application no. 17, in column 6 in the same line as SEQ ID NO. 149219 is depicted, plastidic is mentioned, or a mitochondrial transit peptide in case in Table I, application no. 17, in column 6 in the same line as SEQ ID NO. 149219 is depicted, mitochondric is mentioned; which is operable linked, too.

[93609] In another embodiment thereof the expression cassette does not comprise an additional transit peptide in case in Table I, application no. 17, in column 6 in the same line as SEQ ID NO. 149219 is depicted, non-targeted is mentioned.

[93610] In an embodiment the present invention relates to an expresssion cassette comprising a) a promoter, preferably a promoter selected from the group consisting of Big35S, PCUbi, Super and USP, in particular p-PcUBI; and b) the nucleic acid SEQ ID NO. 120436, or a homolog or fragment thereof, or a homolog thereof being depicted in Table I, application no. 17, column 8, in the same line as SEQ ID NO. 120436, preferably the coding region thereof, a homolog or a fragment thereof; which are operable linked.

[93611] In an embodiment thereof the expression cassette comprises in addition c) a nucleic acid molecule encoding a transit peptide, especially a plastidal transit petide in case in Table I, application no. 17, in column 6 in the same line as SEQ ID NO. 120436 is depicted, plastidic is mentioned, or a mitochondrial transit peptide in case in Table I, application no. 17, in column 6 in the same line as SEQ ID NO. 120436 is depicted, mitochondric is mentioned; which is operable linked, too.

[93612] In another embodiment thereof the expression cassette does not comprise an additional transit peptide in case in Table I, application no. 17, in column 6 in the same line as SEQ ID NO. 120436 is depicted, non-targeted is mentioned.

[93613] In an embodiment the present invention relates to an expresssion cassette comprising a) a promoter, preferably a promoter selected from the group consisting of Big35S, PCUbi, Super and USP, in particular p-Super; and b) the nucleic acid SEQ ID NO. 90278, or a homolog or fragment thereof, or a homolog thereof being depicted in Table I, application no. 17, column 8, in the same line as SEQ ID NO. 90278, preferably the coding region thereof, a homolog or a fragment thereof; which are operable linked.

[93614] In an embodiment thereof the expression cassette comprises in addition c) a nucleic acid molecule encoding a transit peptide, especially a plastidal transit petide in case in Table I, application no. 17, in column 6 in the same line as SEQ ID NO. 90278 is depicted, plastidic is mentioned, or a mitochondrial transit peptide in case in Table I, application no. 17, in column 6 in the same line as SEQ ID NO. 90278 is depicted, mitochondric is mentioned; which is operable linked, too.

[93615] In another embodiment thereof the expression cassette does not comprise an additional transit peptide in case in Table I, application no. 17, in column 6 in the same line as SEQ ID NO. 90278 is depicted, non-targeted is mentioned.

[93616] In an embodiment the present invention relates to an expresssion cassette comprising a) a promoter, preferably a promoter selected from the group consisting of Big35S, PCUbi, Super and USP, in particular Big35S; and b) the nucleic acid SEQ ID NO. 64177, or a homolog or fragment thereof, or a homolog thereof being depicted in Table I, application no. 17, column 8, in the same line as SEQ ID NO. 64177, preferably the coding region thereof, a homolog or a fragment thereof; which are operable linked.

[93617] In an embodiment thereof the expression cassette comprises in addition c) a nucleic acid molecule encoding a transit peptide, especially a plastidal transit petide in case in Table I, application no. 17, in column 6 in the same line as SEQ ID NO. 64177 is depicted, plastidic is mentioned, or a mitochondrial transit peptide in case in Table I, application no. 17, in column 6 in the same line as SEQ ID NO. 64177 is depicted, mitochondric is mentioned; which is operable linked, too.

[93618] In another embodiment thereof the expression cassette does not comprise an additional transit peptide in case in Table I, application no. 17, in column 6 in the same line as SEQ ID NO. 64177 is depicted, non-targeted is mentioned.

[93619] In an embodiment the present invention relates to an expresssion cassette comprising a) a promoter, preferably a promoter selected from the group consisting of Big35S, PCUbi, Super and USP, in particular p-Super; and b) the nucleic acid SEQ ID NO. 130742, or a homolog or fragment thereof, or a homolog thereof being depicted in Table I, application no. 17, column 8, in the same line as SEQ ID NO. 130742, preferably the coding region thereof, a homolog or a fragment thereof; which are operable linked.

[93620] In an embodiment thereof the expression cassette comprises in addition c) a nucleic acid molecule encoding a transit peptide, especially a plastidal transit petide in case in Table I, application no. 17, in column 6 in the same line as SEQ ID NO. 130742 is depicted, plastidic is mentioned, or a mitochondrial transit peptide in case in Table I, application no. 17, in column 6 in the same line as SEQ ID NO. 130742 is depicted, mitochondric is mentioned; which is operable linked, too.

[93621] In another embodiment thereof the expression cassette does not comprise an additional transit peptide in case in Table I, application no. 17, in column 6 in the same line as SEQ ID NO. 130742 is depicted, non-targeted is mentioned.

[93622] In an embodiment the present invention relates to an expresssion cassette comprising a) a promoter, preferably a promoter selected from the group consisting of Big35S, PCUbi, Super and USP, in particular p-Super; and b) the nucleic acid SEQ ID NO. 14715, or a homolog or fragment thereof, or a homolog thereof being depicted in Table I, application no. 17, column 8, in the same line as SEQ ID NO. 14715, preferably the coding region thereof, a homolog or a fragment thereof; which are operable linked.

[93623] In an embodiment thereof the expression cassette comprises in addition c) a nucleic acid molecule encoding a transit peptide, especially a plastidal transit petide in case in Table I, application no. 17, in column 6 in the same line as SEQ ID NO. 14715 is depicted, plastidic is mentioned, or a mitochondrial transit peptide in case in Table I, application no. 17, in column 6 in the same line as SEQ ID NO. 14715 is depicted, mitochondric is mentioned; which is operable linked, too.

[93624] In another embodiment thereof the expression cassette does not comprise an additional transit peptide in case in Table I, application no. 17, in column 6 in the same line as SEQ ID NO. 14715 is depicted, non-targeted is mentioned.

[93625] In an embodiment the present invention relates to an expresssion cassette comprising a) a promoter, preferably a promoter selected from the group consisting of Big35S, PCUbi, Super and USP, in particular p-Super; and b) the nucleic acid SEQ ID NO. 64563, or a homolog or fragment thereof, or a homolog thereof being depicted in Table I, application no. 17, column 8, in the same line as SEQ ID NO. 64563, preferably the coding region thereof, a homolog or a fragment thereof; which are operable linked.

[93626] In an embodiment thereof the expression cassette comprises in addition c) a nucleic acid molecule encoding a transit peptide, especially a plastidal transit petide in case in Table I, application no. 17, in column 6 in the same line as SEQ ID NO. 64563 is depicted, plastidic is mentioned, or a mitochondrial transit peptide in case in Table I, application no. 17, in column 6 in the same line as SEQ ID NO. 64563 is depicted, mitochondric is mentioned; which is operable linked, too.

[93627] In another embodiment thereof the expression cassette does not comprise an additional transit peptide in case in Table I, application no. 17, in column 6 in the same line as SEQ ID NO. 64563 is depicted, non-targeted is mentioned.

[93628] In an embodiment the present invention relates to an expresssion cassette comprising a) a promoter, preferably a promoter selected from the group consisting of Big35S, PCUbi, Super and USP, in particular p-Super; and b) the nucleic acid SEQ ID NO. 149454, or a homolog or fragment thereof, or a homolog thereof being depicted in Table I, application no. 17, column 8, in the same line as SEQ ID NO. 149454, preferably the coding region thereof, a homolog or a fragment thereof; which are operable linked.

[93629] In an embodiment thereof the expression cassette comprises in addition c) a nucleic acid molecule encoding a transit peptide, especially a plastidal transit petide in case in Table I, application no. 17, in column 6 in the same line as SEQ ID NO. 149454 is depicted, plastidic is mentioned, or a mitochondrial transit peptide in case in Table I, application no. 17, in column 6 in the same line as SEQ ID NO. 149454 is depicted, mitochondric is mentioned; which is operable linked, too.

[93630] In another embodiment thereof the expression cassette does not comprise an additional transit peptide in case in Table I, application no. 17, in column 6 in the same line as SEQ ID NO. 149454 is depicted, non-targeted is mentioned.

[93631] In an embodiment the present invention relates to an expresssion cassette comprising a) a promoter, preferably a promoter selected from the group consisting of Big35S, PCUbi, Super and USP, in particular p-Super; and b) the nucleic acid SEQ ID NO. 64964, or a homolog or fragment thereof, or a homolog thereof being depicted in Table I, application no. 17, column 8, in the same line as SEQ ID NO. 64964, preferably the coding region thereof, a homolog or a fragment thereof; which are operable linked.

[93632] In an embodiment thereof the expression cassette comprises in addition c) a nucleic acid molecule encoding a transit peptide, especially a plastidal transit petide in case in Table I, application no. 17, in column 6 in the same line as SEQ ID NO. 64964 is depicted, plastidic is mentioned, or a mitochondrial transit peptide in case in Table I, application no. 17, in column 6 in the same line as SEQ ID NO. 64964 is depicted, mitochondric is mentioned; which is operable linked, too.

[93633] In another embodiment thereof the expression cassette does not comprise an additional transit peptide in case in Table I, application no. 17, in column 6 in the same line as SEQ ID NO. 64964 is depicted, non-targeted is mentioned.

[93634] In an embodiment the present invention relates to an expresssion cassette comprising a) a promoter, preferably a promoter selected from the group consisting of Big35S, PCUbi, Super and USP, in particular Big35S; and b) the nucleic acid SEQ ID NO. 97631, or a homolog or fragment thereof, or a homolog thereof being depicted in Table I, application no. 17, column 8, in the same line as SEQ ID NO. 97631, preferably the coding region thereof, a homolog or a fragment thereof; which are operable linked.

[93635] In an embodiment thereof the expression cassette comprises in addition c) a nucleic acid molecule encoding a transit peptide, especially a plastidal transit petide in case in Table I, application no. 17, in column 6 in the same line as SEQ ID NO. 97631 is depicted, plastidic is mentioned, or a mitochondrial transit peptide in case in Table I, application no. 17, in column 6 in the same line as SEQ ID NO. 97631 is depicted, mitochondric is mentioned; which is operable linked, too.

[93636] In another embodiment thereof the expression cassette does not comprise an additional transit peptide in case in Table I, application no. 17, in column 6 in the same line as SEQ ID NO. 97631 is depicted, non-targeted is mentioned.

[93637] In an embodiment the present invention relates to an expresssion cassette comprising a) a promoter, preferably a promoter selected from the group consisting of Big35S, PCUbi, Super and USP, in particular p-PcUBI; and b) the nucleic acid SEQ ID NO. 149632, or a homolog or fragment thereof, or a homolog thereof being depicted in Table I, application no. 17, column 8, in the same line as SEQ ID NO. 149632, preferably the coding region thereof, a homolog or a fragment thereof; which are operable linked.

[93638] In an embodiment thereof the expression cassette comprises in addition c) a nucleic acid molecule encoding a transit peptide, especially a plastidal transit petide in case in Table I, application no. 17, in column 6 in the same line as SEQ ID NO. 149632 is depicted, plastidic is mentioned, or a mitochondrial transit peptide in case in Table I, application no. 17, in column 6 in the same line as SEQ ID NO. 149632 is depicted, mitochondric is mentioned; which is operable linked, too.

[93639] In another embodiment thereof the expression cassette does not comprise an additional transit peptide in case in Table I, application no. 17, in column 6 in the same line as SEQ ID NO. 149632 is depicted, non-targeted is mentioned.

[93640] In an embodiment the present invention relates to an expresssion cassette comprising a) a promoter, preferably a promoter selected from the group consisting of Big35S, PCUbi, Super and USP, in particular p-PcUBI; and b) the nucleic acid SEQ ID NO. 97635, or a homolog or fragment thereof, or a homolog thereof being depicted in Table I, application no. 17, column 8, in the same line as SEQ ID NO. 97635, preferably the coding region thereof, a homolog or a fragment thereof; which are operable linked.

[93641] In an embodiment thereof the expression cassette comprises in addition c) a nucleic acid molecule encoding a transit peptide, especially a plastidal transit petide in case in Table I, application no. 17, in column 6 in the same line as SEQ ID NO. 97635 is depicted, plastidic is mentioned, or a mitochondrial transit peptide in case in Table I, application no. 17, in column 6 in the same line as SEQ ID NO. 97635 is depicted, mitochondric is mentioned; which is operable linked, too.

[93642] In another embodiment thereof the expression cassette does not comprise an additional transit peptide in case in Table I, application no. 17, in column 6 in the same line as SEQ ID NO. 97635 is depicted, non-targeted is mentioned.

[93643] In an embodiment the present invention relates to an expresssion cassette comprising a) a promoter, preferably a promoter selected from the group consisting of Big35S, PCUbi, Super and USP, in particular Big35S; and b) the nucleic acid SEQ ID NO. 149801, or a homolog or fragment thereof, or a homolog thereof being depicted in Table I, application no. 17, column 8, in the same line as SEQ ID NO. 149801, preferably the coding region thereof, a homolog or a fragment thereof; which are operable linked.

[93644] In an embodiment thereof the expression cassette comprises in addition c) a nucleic acid molecule encoding a transit peptide, especially a plastidal transit petide in case in Table I, application no. 17, in column 6 in the same line as SEQ ID NO. 149801 is depicted, plastidic is mentioned, or a mitochondrial transit peptide in case in Table I, application no. 17, in column 6 in the same line as SEQ ID NO. 149801 is depicted, mitochondric is mentioned; which is operable linked, too.

[93645] In another embodiment thereof the expression cassette does not comprise an additional transit peptide in case in Table I, application no. 17, in column 6 in the same line as SEQ ID NO. 149801 is depicted, non-targeted is mentioned.

[93646] In an embodiment the present invention relates to an expresssion cassette comprising a) a promoter, preferably a promoter selected from the group consisting of Big35S, PCUbi, Super and USP, in particular Big35S; and b) the nucleic acid SEQ ID NO. 14843, or a homolog or fragment thereof, or a homolog thereof being depicted in Table I, application no. 17, column 8, in the same line as SEQ ID NO. 14843, preferably the coding region thereof, a homolog or a fragment thereof; which are operable linked.

[93647] In an embodiment thereof the expression cassette comprises in addition c) a nucleic acid molecule encoding a transit peptide, especially a plastidal transit petide in case in Table I, application no. 17, in column 6 in the same line as SEQ ID NO. 14843 is depicted, plastidic is mentioned, or a mitochondrial transit peptide in case in Table I, application no. 17, in column 6 in the same line as SEQ ID NO. 14843 is depicted, mitochondric is mentioned; which is operable linked, too.

[93648] In another embodiment thereof the expression cassette does not comprise an additional transit peptide in case in Table I, application no. 17, in column 6 in the same line as SEQ ID NO. 14843 is depicted, non-targeted is mentioned.

[93649] In an embodiment the present invention relates to an expresssion cassette comprising a) a promoter, preferably a promoter selected from the group consisting of Big35S, PCUbi, Super and USP, in particular p-PcUBI; and b) the nucleic acid SEQ ID NO. 149868, or a homolog or fragment thereof, or a homolog thereof being depicted in Table I, application no. 17, column 8, in the same line as SEQ ID NO. 149868, preferably the coding region thereof, a homolog or a fragment thereof; which are operable linked.

[93650] In an embodiment thereof the expression cassette comprises in addition c) a nucleic acid molecule encoding a transit peptide, especially a plastidal transit petide in case in Table I, application no. 17, in column 6 in the same line as SEQ ID NO. 149868 is depicted, plastidic is mentioned, or a mitochondrial transit peptide in case in Table I, application no. 17, in column 6 in the same line as SEQ ID NO. 149868 is depicted, mitochondric is mentioned; which is operable linked, too.

[93651] In another embodiment thereof the expression cassette does not comprise an additional transit peptide in case in Table I, application no. 17, in column 6 in the same line as SEQ ID NO. 149868 is depicted, non-targeted is mentioned.

[93652] In an embodiment the present invention relates to an expresssion cassette comprising a) a promoter, preferably a promoter selected from the group consisting of Big35S, PCUbi, Super and USP, in particular p-PcUBI; and b) the nucleic acid SEQ ID NO. 150063, or a homolog or fragment thereof, or a homolog thereof being depicted in Table I, application no. 17, column 8, in the same line as SEQ ID NO. 150063, preferably the coding region thereof, a homolog or a fragment thereof; which are operable linked.

[93653] In an embodiment thereof the expression cassette comprises in addition c) a nucleic acid molecule encoding a transit peptide, especially a plastidal transit petide in case in Table I, application no. 17, in column 6 in the same line as SEQ ID NO. 150063 is depicted, plastidic is mentioned, or a mitochondrial transit peptide in case in Table I, application no. 17, in column 6 in the same line as SEQ ID NO. 150063 is depicted, mitochondric is mentioned; which is operable linked, too.

[93654] In another embodiment thereof the expression cassette does not comprise an additional transit peptide in case in Table I, application no. 17, in column 6 in the same line as SEQ ID NO. 150063 is depicted, non-targeted is mentioned.

[93655] In an embodiment the present invention relates to an expresssion cassette comprising a) a promoter, preferably a promoter selected from the group consisting of Big35S, PCUbi, Super and USP, in particular Big35S; and b) the nucleic acid SEQ ID NO. 130903, or a homolog or fragment thereof, or a homolog thereof being depicted in Table I, application no. 17, column 8, in the same line as SEQ ID NO. 130903, preferably the coding region thereof, a homolog or a fragment thereof; which are operable linked.

[93656] In an embodiment thereof the expression cassette comprises in addition c) a nucleic acid molecule encoding a transit peptide, especially a plastidal transit petide in case in Table I, application no. 17, in column 6 in the same line as SEQ ID NO. 130903 is depicted, plastidic is mentioned, or a mitochondrial transit peptide in case in Table I, application no. 17, in column 6 in the same line as SEQ ID NO. 130903 is depicted, mitochondric is mentioned; which is operable linked, too.

[93657] In another embodiment thereof the expression cassette does not comprise an additional transit peptide in case in Table I, application no. 17, in column 6 in the same line as SEQ ID NO. 130903 is depicted, non-targeted is mentioned.

[93658] In an embodiment the present invention relates to an expresssion cassette comprising a) a promoter, preferably a promoter selected from the group consisting of Big35S, PCUbi, Super and USP, in particular p-PcUBI; and b) the nucleic acid SEQ ID NO. 98075, or a homolog or fragment thereof, or a homolog thereof being depicted in Table I, application no. 17, column 8, in the same line as SEQ ID NO. 98075, preferably the coding region thereof, a homolog or a fragment thereof; which are operable linked.

[93659] In an embodiment thereof the expression cassette comprises in addition c) a nucleic acid molecule encoding a transit peptide, especially a plastidal transit petide in case in Table I, application no. 17, in column 6 in the same line as SEQ ID NO. 98075 is depicted, plastidic is mentioned, or a mitochondrial transit peptide in case in Table I, application no. 17, in column 6 in the same line as SEQ ID NO. 98075 is depicted, mitochondric is mentioned; which is operable linked, too.

[93660] In another embodiment thereof the expression cassette does not comprise an additional transit peptide in case in Table I, application no. 17, in column 6 in the same line as SEQ ID NO. 98075 is depicted, non-targeted is mentioned.

[93661] In an embodiment the present invention relates to an expresssion cassette comprising a) a promoter, preferably a promoter selected from the group consisting of Big35S, PCUbi, Super and USP, in particular p-Super; and b) the nucleic acid SEQ ID NO. 98075, or a homolog or fragment thereof, or a homolog thereof being depicted in Table I, application no. 17, column 8, in the same line as SEQ ID NO. 98075, preferably the coding region thereof, a homolog or a fragment thereof; which are operable linked.

[93662] In an embodiment thereof the expression cassette comprises in addition c) a nucleic acid molecule encoding a transit peptide, especially a plastidal transit petide in case in Table I, application no. 17, in column 6 in the same line as SEQ ID NO. 98075 is depicted, plastidic is mentioned, or a mitochondrial transit peptide in case in Table I, application no. 17, in column 6 in the same line as SEQ ID NO. 98075 is depicted, mitochondric is mentioned; which is operable linked, too.

[93663] In another embodiment thereof the expression cassette does not comprise an additional transit peptide in case in Table I, application no. 17, in column 6 in the same line as SEQ ID NO. 98075 is depicted, non-targeted is mentioned.

[93664] In an embodiment the present invention relates to an expresssion cassette comprising a) a promoter, preferably a promoter selected from the group consisting of Big35S, PCUbi, Super and USP, in particular Big35S; and b) the nucleic acid SEQ ID NO. 150603, or a homolog or fragment thereof, or a homolog thereof being depicted in Table I, application no. 17, column 8, in the same line as SEQ ID NO. 150603, preferably the coding region thereof, a homolog or a fragment thereof; which are operable linked.

[93665] In an embodiment thereof the expression cassette comprises in addition c) a nucleic acid molecule encoding a transit peptide, especially a plastidal transit petide in case in Table I, application no. 17, in column 6 in the same line as SEQ ID NO. 150603 is depicted, plastidic is mentioned, or a mitochondrial transit peptide in case in Table I, application no. 17, in column 6 in the same line as SEQ ID NO. 150603 is depicted, mitochondric is mentioned; which is operable linked, too.

[93666] In another embodiment thereof the expression cassette does not comprise an additional transit peptide in case in Table I, application no. 17, in column 6 in the same line as SEQ ID NO. 150603 is depicted, non-targeted is mentioned.

[93667] In an embodiment the present invention relates to an expresssion cassette comprising a) a promoter, preferably a promoter selected from the group consisting of Big35S, PCUbi, Super and USP, in particular p-Super; and b) the nucleic acid SEQ ID NO. 91045, or a homolog or fragment thereof, or a homolog thereof being depicted in Table I, application no. 17, column 8, in the same line as SEQ ID NO. 91045, preferably the coding region thereof, a homolog or a fragment thereof; which are operable linked.

[93668] In an embodiment thereof the expression cassette comprises in addition c) a nucleic acid molecule encoding a transit peptide, especially a plastidal transit petide in case in Table I, application no. 17, in column 6 in the same line as SEQ ID NO. 91045 is depicted, plastidic is mentioned, or a mitochondrial transit peptide in case in Table I, application no. 17, in column 6 in the same line as SEQ ID NO. 91045 is depicted, mitochondric is mentioned; which is operable linked, too.

[93669] In another embodiment thereof the expression cassette does not comprise an additional transit peptide in case in Table I, application no. 17, in column 6 in the same line as SEQ ID NO. 91045 is depicted, non-targeted is mentioned.

[93670] In an embodiment the present invention relates to an expresssion cassette comprising a) a promoter, preferably a promoter selected from the group consisting of Big35S, PCUbi, Super and USP, in particular p-PcUBI; and b) the nucleic acid SEQ ID NO. 150682, or a homolog or fragment thereof, or a homolog thereof being depicted in Table I, application no. 17, column 8, in the same line as SEQ ID NO. 150682, preferably the coding region thereof, a homolog or a fragment thereof; which are operable linked.

[93671] In an embodiment thereof the expression cassette comprises in addition c) a nucleic acid molecule encoding a transit peptide, especially a plastidal transit petide in case in Table I, application no. 17, in column 6 in the same line as SEQ ID NO. 150682 is depicted, plastidic is mentioned, or a mitochondrial transit peptide in case in Table I, application no. 17, in column 6 in the same line as SEQ ID NO. 150682 is depicted, mitochondric is mentioned; which is operable linked, too.

[93672] In another embodiment thereof the expression cassette does not comprise an additional transit peptide in case in Table I, application no. 17, in column 6 in the same line as SEQ ID NO. 150682 is depicted, non-targeted is mentioned.

[93673] In an embodiment the present invention relates to an expresssion cassette comprising a) a promoter, preferably a promoter selected from the group consisting of Big35S, PCUbi, Super and USP, in particular p-Super; and b) the nucleic acid SEQ ID NO. 91973, or a homolog or fragment thereof, or a homolog thereof being depicted in Table I, application no. 17, column 8, in the same line as SEQ ID NO. 91973, preferably the coding region thereof, a homolog or a fragment thereof; which are operable linked.

[93674] In an embodiment thereof the expression cassette comprises in addition c) a nucleic acid molecule encoding a transit peptide, especially a plastidal transit petide in case in Table I, application no. 17, in column 6 in the same line as SEQ ID NO. 91973 is depicted, plastidic is mentioned, or a mitochondrial transit peptide in case in Table I, application no. 17, in column 6 in the same line as SEQ ID NO. 91973 is depicted, mitochondric is mentioned; which is operable linked, too.

[93675] In another embodiment thereof the expression cassette does not comprise an additional transit peptide in case in Table I, application no. 17, in column 6 in the same line as SEQ ID NO. 91973 is depicted, non-targeted is mentioned.

[93676] In an embodiment the present invention relates to an expresssion cassette comprising a) a promoter, preferably a promoter selected from the group consisting of Big35S, PCUbi, Super and USP, in particular p-Super; and b) the nucleic acid SEQ ID NO. 130986, or a homolog or fragment thereof, or a homolog thereof being depicted in Table I, application no. 17, column 8, in the same line as SEQ ID NO. 130986, preferably the coding region thereof, a homolog or a fragment thereof; which are operable linked.

[93677] In an embodiment thereof the expression cassette comprises in addition c) a nucleic acid molecule encoding a transit peptide, especially a plastidal transit petide in case in Table I, application no. 17, in column 6 in the same line as SEQ ID NO. 130986 is depicted, plastidic is mentioned, or a mitochondrial transit peptide in case in Table I, application no. 17, in column 6 in the same line as SEQ ID NO. 130986 is depicted, mitochondric is mentioned; which is operable linked, too.

[93678] In another embodiment thereof the expression cassette does not comprise an additional transit peptide in case in Table I, application no. 17, in column 6 in the same line as SEQ ID NO. 130986 is depicted, non-targeted is mentioned.

[93679] In an embodiment the present invention relates to an expresssion cassette comprising a) a promoter, preferably a promoter selected from the group consisting of Big35S, PCUbi, Super and USP, in particular Big35S; and b) the nucleic acid SEQ ID NO. 117495, or a homolog or fragment thereof, or a homolog thereof being depicted in Table I, application no. 17, column 8, in the same line as SEQ ID NO. 117495, preferably the coding region thereof, a homolog or a fragment thereof; which are operable linked.

[93680] In an embodiment thereof the expression cassette comprises in addition c) a nucleic acid molecule encoding a transit peptide, especially a plastidal transit petide in case in Table I, application no. 17, in column 6 in the same line as SEQ ID NO. 117495 is depicted, plastidic is mentioned, or a mitochondrial transit peptide in case in Table I, application no. 17, in column 6 in the same line as SEQ ID NO. 117495 is depicted, mitochondric is mentioned; which is operable linked, too.

[93681] In another embodiment thereof the expression cassette does not comprise an additional transit peptide in case in Table I, application no. 17, in column 6 in the same line as SEQ ID NO. 117495 is depicted, non-targeted is mentioned.

[93682] In an embodiment the present invention relates to an expresssion cassette comprising a) a promoter, preferably a promoter selected from the group consisting of Big35S, PCUbi, Super and USP, in particular p-PcUBI; and b) the nucleic acid SEQ ID NO. 67646, or a homolog or fragment thereof, or a homolog thereof being depicted in Table I, application no. 17, column 8, in the same line as SEQ ID NO. 67646, preferably the coding region thereof, a homolog or a fragment thereof; which are operable linked.

[93683] In an embodiment thereof the expression cassette comprises in addition c) a nucleic acid molecule encoding a transit peptide, especially a plastidal transit petide in case in Table I, application no. 17, in column 6 in the same line as SEQ ID NO. 67646 is depicted, plastidic is mentioned, or a mitochondrial transit peptide in case in Table I, application no. 17, in column 6 in the same line as SEQ ID NO. 67646 is depicted, mitochondric is mentioned; which is operable linked, too.

[93684] In another embodiment thereof the expression cassette does not comprise an additional transit peptide in case in Table I, application no. 17, in column 6 in the same line as SEQ ID NO. 67646 is depicted, non-targeted is mentioned.

[93685] In an embodiment the present invention relates to an expresssion cassette comprising a) a promoter, preferably a promoter selected from the group consisting of Big35S, PCUbi, Super and USP, in particular p-Super; and b) the nucleic acid SEQ ID NO. 15179, or a homolog or fragment thereof, or a homolog thereof being depicted in Table I, application no. 17, column 8, in the same line as SEQ ID NO. 15179, preferably the coding region thereof, a homolog or a fragment thereof; which are operable linked.

[93686] In an embodiment thereof the expression cassette comprises in addition c) a nucleic acid molecule encoding a transit peptide, especially a plastidal transit petide in case in Table I, application no. 17, in column 6 in the same line as SEQ ID NO. 15179 is depicted, plastidic is mentioned, or a mitochondrial transit peptide in case in Table I, application no. 17, in column 6 in the same line as SEQ ID NO. 15179 is depicted, mitochondric is mentioned; which is operable linked, too.

[93687] In another embodiment thereof the expression cassette does not comprise an additional transit peptide in case in Table I, application no. 17, in column 6 in the same line as SEQ ID NO. 15179 is depicted, non-targeted is mentioned.

[93688] In an embodiment the present invention relates to an expresssion cassette comprising a) a promoter, preferably a promoter selected from the group consisting of Big35S, PCUbi, Super and USP, in particular p-Super; and b) the nucleic acid SEQ ID NO. 151862, or a homolog or fragment thereof, or a homolog thereof being depicted in Table I, application no. 17, column 8, in the same line as SEQ ID NO. 151862, preferably the coding region thereof, a homolog or a fragment thereof; which are operable linked.

[93689] In an embodiment thereof the expression cassette comprises in addition c) a nucleic acid molecule encoding a transit peptide, especially a plastidal transit petide in case in Table I, application no. 17, in column 6 in the same line as SEQ ID NO. 151862 is depicted, plastidic is mentioned, or a mitochondrial transit peptide in case in Table I, application no. 17, in column 6 in the same line as SEQ ID NO. 151862 is depicted, mitochondric is mentioned; which is operable linked, too.

[93690] In another embodiment thereof the expression cassette does not comprise an additional transit peptide in case in Table I, application no. 17, in column 6 in the same line as SEQ ID NO. 151862 is depicted, non-targeted is mentioned.

[93691] In an embodiment the present invention relates to an expresssion cassette comprising a) a promoter, preferably a promoter selected from the group consisting of Big35S, PCUbi, Super and USP, in particular p-Super; and b) the nucleic acid SEQ ID NO. 92540, or a homolog or fragment thereof, or a homolog thereof being depicted in Table I, application no. 17, column 8, in the same line as SEQ ID NO. 92540, preferably the coding region thereof, a homolog or a fragment thereof; which are operable linked.

[93692] In an embodiment thereof the expression cassette comprises in addition c) a nucleic acid molecule encoding a transit peptide, especially a plastidal transit petide in case in Table I, application no. 17, in column 6 in the same line as SEQ ID NO. 92540 is depicted, plastidic is mentioned, or a mitochondrial transit peptide in case in Table I, application no. 17, in column 6 in the same line as SEQ ID NO. 92540 is depicted, mitochondric is mentioned; which is operable linked, too.

[93693] In another embodiment thereof the expression cassette does not comprise an additional transit peptide in case in Table I, application no. 17, in column 6 in the same line as SEQ ID NO. 92540 is depicted, non-targeted is mentioned.

[93694] In an embodiment the present invention relates to an expresssion cassette comprising a) a promoter, preferably a promoter selected from the group consisting of Big35S, PCUbi, Super and USP, in particular p-Super; and b) the nucleic acid SEQ ID NO. 151910, or a homolog or fragment thereof, or a homolog thereof being depicted in Table I, application no. 17, column 8, in the same line as SEQ ID NO. 151910, preferably the coding region thereof, a homolog or a fragment thereof; which are operable linked.

[93695] In an embodiment thereof the expression cassette comprises in addition c) a nucleic acid molecule encoding a transit peptide, especially a plastidal transit petide in case in Table I, application no. 17, in column 6 in the same line as SEQ ID NO. 151910 is depicted, plastidic is mentioned, or a mitochondrial transit peptide in case in Table I, application no. 17, in column 6 in the same line as SEQ ID NO. 151910 is depicted, mitochondric is mentioned; which is operable linked, too.

[93696] In another embodiment thereof the expression cassette does not comprise an additional transit peptide in case in Table I, application no. 17, in column 6 in the same line as SEQ ID NO. 151910 is depicted, non-targeted is mentioned.

[93697] In an embodiment the present invention relates to an expresssion cassette comprising a) a promoter, preferably a promoter selected from the group consisting of Big35S, PCUbi, Super and USP, in particular p-Super; and b) the nucleic acid SEQ ID NO. 151927, or a homolog or fragment thereof, or a homolog thereof being depicted in Table I, application no. 17, column 8, in the same line as SEQ ID NO. 151927, preferably the coding region thereof, a homolog or a fragment thereof; which are operable linked.

[93698] In an embodiment thereof the expression cassette comprises in addition c) a nucleic acid molecule encoding a transit peptide, especially a plastidal transit petide in case in Table I, application no. 17, in column 6 in the same line as SEQ ID NO. 151927 is depicted, plastidic is mentioned, or a mitochondrial transit peptide in case in Table I, application no. 17, in column 6 in the same line as SEQ ID NO. 151927 is depicted, mitochondric is mentioned; which is operable linked, too.

[93699] In another embodiment thereof the expression cassette does not comprise an additional transit peptide in case in Table I, application no. 17, in column 6 in the same line as SEQ ID NO. 151927 is depicted, non-targeted is mentioned.

[93700] In an embodiment the present invention relates to an expresssion cassette comprising a) a promoter, preferably a promoter selected from the group consisting of Big35S, PCUbi, Super and USP, in particular p-Super; and b) the nucleic acid SEQ ID NO. 151931, or a homolog or fragment thereof, or a homolog thereof being depicted in Table I, application no. 17, column 8, in the same line as SEQ ID NO. 151931, preferably the coding region thereof, a homolog or a fragment thereof; which are operable linked.

[93701] In an embodiment thereof the expression cassette comprises in addition c) a nucleic acid molecule encoding a transit peptide, especially a plastidal transit petide in case in Table I, application no. 17, in column 6 in the same line as SEQ ID NO. 151931 is depicted, plastidic is mentioned, or a mitochondrial transit peptide in case in Table I, application no. 17, in column 6 in the same line as SEQ ID NO. 151931 is depicted, mitochondric is mentioned; which is operable linked, too.

[93702] In another embodiment thereof the expression cassette does not comprise an additional transit peptide in case in Table I, application no. 17, in column 6 in the same line as SEQ ID NO. 151931 is depicted, non-targeted is mentioned.

[93703] In an embodiment the present invention relates to an expresssion cassette comprising a) a promoter, preferably a promoter selected from the group consisting of Big35S, PCUbi, Super and USP, in particular p-PcUBI; and b) the nucleic acid SEQ ID NO. 151958, or a homolog or fragment thereof, or a homolog thereof being depicted in Table I, application no. 17, column 8, in the same line as SEQ ID NO. 151958, preferably the coding region thereof, a homolog or a fragment thereof; which are operable linked.

[93704] In an embodiment thereof the expression cassette comprises in addition c) a nucleic acid molecule encoding a transit peptide, especially a plastidal transit petide in case in Table I, application no. 17, in column 6 in the same line as SEQ ID NO. 151958 is depicted, plastidic is mentioned, or a mitochondrial transit peptide in case in Table I, application no. 17, in column 6 in the same line as SEQ ID NO. 151958 is depicted, mitochondric is mentioned; which is operable linked, too.

[93705] In another embodiment thereof the expression cassette does not comprise an additional transit peptide in case in Table I, application no. 17, in column 6 in the same line as SEQ ID NO. 151958 is depicted, non-targeted is mentioned.

[93706] In an embodiment the present invention relates to an expresssion cassette comprising a) a promoter, preferably a promoter selected from the group consisting of Big35S, PCUbi, Super and USP, in particular p-PcUBI; and b) the nucleic acid SEQ ID NO. 68413, or a homolog or fragment thereof, or a homolog thereof being depicted in Table I, application no. 17, column 8, in the same line as SEQ ID NO. 68413, preferably the coding region thereof, a homolog or a fragment thereof; which are operable linked.

[93707] In an embodiment thereof the expression cassette comprises in addition c) a nucleic acid molecule encoding a transit peptide, especially a plastidal transit petide in case in Table I, application no. 17, in column 6 in the same line as SEQ ID NO. 68413 is depicted, plastidic is mentioned, or a mitochondrial transit peptide in case in Table I, application no. 17, in column 6 in the same line as SEQ ID NO. 68413 is depicted, mitochondric is mentioned; which is operable linked, too.

[93708] In another embodiment thereof the expression cassette does not comprise an additional transit peptide in case in Table I, application no. 17, in column 6 in the same line as SEQ ID NO. 68413 is depicted, non-targeted is mentioned.

[93709] In an embodiment the present invention relates to an expresssion cassette comprising a) a promoter, preferably a promoter selected from the group consisting of Big35S, PCUbi, Super and USP, in particular p-PcUBI; and b) the nucleic acid SEQ ID NO. 140626, or a homolog or fragment thereof, or a homolog thereof being depicted in Table I, application no. 17, column 8, in the same line as SEQ ID NO. 140626, preferably the coding region thereof, a homolog or a fragment thereof; which are operable linked.

[93710] In an embodiment thereof the expression cassette comprises in addition c) a nucleic acid molecule encoding a transit peptide, especially a plastidal transit petide in case in Table I, application no. 17, in column 6 in the same line as SEQ ID NO. 140626 is depicted, plastidic is mentioned, or a mitochondrial transit peptide in case in Table I, application no. 17, in column 6 in the same line as SEQ ID NO. 140626 is depicted, mitochondric is mentioned; which is operable linked, too.

[93711] In another embodiment thereof the expression cassette does not comprise an additional transit peptide in case in Table I, application no. 17, in column 6 in the same line as SEQ ID NO. 140626 is depicted, non-targeted is mentioned.

[93712] In an embodiment the present invention relates to an expresssion cassette comprising a) a promoter, preferably a promoter selected from the group consisting of Big35S, PCUbi, Super and USP, in particular p-PcUBI; and b) the nucleic acid SEQ ID NO. 15187, or a homolog or fragment thereof, or a homolog thereof being depicted in Table I, application no. 17, column 8, in the same line as SEQ ID NO. 15187, preferably the coding region thereof, a homolog or a fragment thereof; which are operable linked.

[93713] In an embodiment thereof the expression cassette comprises in addition c) a nucleic acid molecule encoding a transit peptide, especially a plastidal transit petide in case in Table I, application no. 17, in column 6 in the same line as SEQ ID NO. 15187 is depicted, plastidic is mentioned, or a mitochondrial transit peptide in case in Table I, application no. 17, in column 6 in the same line as SEQ ID NO. 15187 is depicted, mitochondric is mentioned; which is operable linked, too.

[93714] In another embodiment thereof the expression cassette does not comprise an additional transit peptide in case in Table I, application no. 17, in column 6 in the same line as SEQ ID NO. 15187 is depicted, non-targeted is mentioned.

[93715] In an embodiment the present invention relates to an expresssion cassette comprising a) a promoter, preferably a promoter selected from the group consisting of Big35S, PCUbi, Super and USP, in particular p-PcUBI; and b) the nucleic acid SEQ ID NO. 69, or a homolog or fragment thereof, or a homolog thereof being depicted in Table I, application no. 17, column 8, in the same line as SEQ ID NO. 69, preferably the coding region thereof, a homolog or a fragment thereof; which are operable linked.

[93716] In an embodiment thereof the expression cassette comprises in addition c) a nucleic acid molecule encoding a transit peptide, especially a plastidal transit petide in case in Table I, application no. 17, in column 6 in the same line as SEQ ID NO. 69 is depicted, plastidic is mentioned, or a mitochondrial transit peptide in case in Table I, application no. 17, in column 6 in the same line as SEQ ID NO. 69 is depicted, mitochondric is mentioned; which is operable linked, too.

[93717] In another embodiment thereof the expression cassette does not comprise an additional transit peptide in case in Table I, application no. 17, in column 6 in the same line as SEQ ID NO. 69 is depicted, non-targeted is mentioned.

[93718] In an embodiment the present invention relates to an expresssion cassette comprising a) a promoter, preferably a promoter selected from the group consisting of Big35S, PCUbi, Super and USP, in particular p-PcUBI; and b) the nucleic acid SEQ ID NO. 16883, or a homolog or fragment thereof, or a homolog thereof being depicted in Table I, application no. 17, column 8, in the same line as SEQ ID NO. 16883, preferably the coding region thereof, a homolog or a fragment thereof; which are operable linked.

[93719] In an embodiment thereof the expression cassette comprises in addition c) a nucleic acid molecule encoding a transit peptide, especially a plastidal transit petide in case in Table I, application no. 17, in column 6 in the same line as SEQ ID NO. 16883 is depicted, plastidic is mentioned, or a mitochondrial transit peptide in case in Table I, application no. 17, in column 6 in the same line as SEQ ID NO. 16883 is depicted, mitochondric is mentioned; which is operable linked, too.

[93720] In another embodiment thereof the expression cassette does not comprise an additional transit peptide in case in Table I, application no. 17, in column 6 in the same line as SEQ ID NO. 16883 is depicted, non-targeted is mentioned.

[93721] In an embodiment the present invention relates to an expresssion cassette comprising a) a promoter, preferably a promoter selected from the group consisting of Big35S, PCUbi, Super and USP, in particular Big35S; and b) the nucleic acid SEQ ID NO. 149528, or a homolog or fragment thereof, or a homolog thereof being depicted in Table I, application no. 17, column 8, in the same line as SEQ ID NO. 149528, preferably the coding region thereof, a homolog or a fragment thereof; which are operable linked.

[93722] In an embodiment thereof the expression cassette comprises in addition c) a nucleic acid molecule encoding a transit peptide, especially a plastidal transit petide in case in Table I, application no. 17, in column 6 in the same line as SEQ ID NO. 149528 is depicted, plastidic is mentioned, or a mitochondrial transit peptide in case in Table I, application no. 17, in column 6 in the same line as SEQ ID NO. 149528 is depicted, mitochondric is mentioned; which is operable linked, too.

[93723] In another embodiment thereof the expression cassette does not comprise an additional transit peptide in case in Table I, application no. 17, in column 6 in the same line as SEQ ID NO. 149528 is depicted, non-targeted is mentioned.

[93724] In an embodiment the present invention relates to an expresssion cassette comprising a) a promoter, preferably a promoter selected from the group consisting of Big35S, PCUbi, Super and USP, in particular p-Super; and b) the nucleic acid SEQ ID NO. 150960, or a homolog or fragment thereof, or a homolog thereof being depicted in Table I, application no. 17, column 8, in the same line as SEQ ID NO. 150960, preferably the coding region thereof, a homolog or a fragment thereof; which are operable linked.

[93725] In an embodiment thereof the expression cassette comprises in addition c) a nucleic acid molecule encoding a transit peptide, especially a plastidal transit petide in case in Table I, application no. 17, in column 6 in the same line as SEQ ID NO. 150960 is depicted, plastidic is mentioned, or a mitochondrial transit peptide in case in Table I, application no. 17, in column 6 in the same line as SEQ ID NO. 150960 is depicted, mitochondric is mentioned; which is operable linked, too.

[93726] In another embodiment thereof the expression cassette does not comprise an additional transit peptide in case in Table I, application no. 17, in column 6 in the same line as SEQ ID NO. 150960 is depicted, non-targeted is mentioned.

[93727] [0165.1.7.17] to [0170.1.7.17] for the disclosure of these paragraphs see [0165.1.7.7] to [0170.1.7.7] above

[93728] The invention further provides a vector, comprising a nucleic acid molecule comprising 1) a nucleic acid molecule selected from the group consisting of:
[93729] (a) a nucleic acid molecule encoding a polypeptide shown in Table II, column 5 or 8, application no. 17, preferably shown in Table II A, application no. 17, in column 5, or in Table II A, application no. 17, column 8, or in Table II B, application no. 17, column 8, or a homolog or a fragment thereof;
[93730] (b) a nucleic acid molecule shown in Table I, application no. 17, column 5 or 8, preferably shown in Table I A, application no. 17, in column 5, or in Table I A, application no. 17, column 8, or in Table I B, application no. 17, column 8, preferably the coding region thereof, or a homolog or a fragment thereof;
[93731] (c) a nucleic acid molecule, which, as a result of the degeneracy of the genetic code, can be derived from a polypeptide sequence depicted in column 5 or 8 of Table II, application no. 17, preferably shown in Table II A, application no. 17, in column 5, or in Table II A, application no. 17, column 8, or in Table II B, application no. 17, column 8;
[93732] (d) a nucleic acid molecule having at least 30% identity, preferably at least 40%, 50%, 60%, 70%, 75%, 80%, 85%, 90%, 95%, 96%, 97%, 98%, 99%, 99.5%, with the nucleic acid molecule sequence of a polynucleotide comprising the nucleic acid molecule shown in column 5 or 8 of Table I, application no. 17, preferably shown in Table I A, application no. 17, in column 5, or in Table I A, application no. 17, column 8, or in Table I B, application no. 17, column 8, preferably the coding region thereof;
[93733] (e) a nucleic acid molecule encoding a polypeptide having at least 30% identity, preferably at least 40%, 50% 60%, 70%, 75%, 80%, 85%, 90%, 95%, 96%, 97%, 98%, 99%, 99.5%, identity with the amino acid sequence of the polypeptide encoded by the nucleic acid molecule of (a), (b), (c), or (d);
[93734] (f) a nucleic acid molecule which hybridizes with a nucleic acid molecule of (a), (b), (c), (d), or (e) under stringent hybridization conditions;
[93735] (g) a nucleic acid molecule encoding a polypeptide which can be isolated with the aid of monoclonal or polyclonal antibodies made against a polypeptide encoded by one of the nucleic acid molecules of (a), (b), (c), (d), (e) or (f);
[93736] (h) a nucleic acid molecule encoding a polypeptide comprising the consensus sequence or one or more polypeptide motifs as shown in column 8 of Table IV, application no. 17;
[93737] (i) a nucleic acid molecule encoding a polypeptide having the activity represented by a protein as depicted in column 5 of Table II, application no. 17;
[93738] (j) a nucleic acid molecule comprising a polynucleotide which is obtained by amplifying a cDNA library or a genomic library using the primers in Table III, application no. 17, column 8;
[93739] and
[93740] (k) nucleic acid molecule which is obtainable by screening a suitable nucleic acid library, especially a cDNA library and/or a genomic library, under stringent hybridization conditions with a probe comprising one of the sequences of the nucleic acid molecule of (a), (b), (c), (d), (e), (f), (g), (h), (i) or (j) or with a fragment thereof having at least 15 nt, preferably 20 nt, 30 nt, 50 nt, 100 nt, 200 nt, 500 nt, 1000 nt, 1500 nt, 2000 nt or 3000 nt of the nucleic acid molecule complementary to a nucleic acid sequence characterized in (a), (b), (c), (d), (e), (f), (g), (h), (i) or (j);
[93741] or a nucleic acid molecule comprising a sequence which is complementary thereto.
   (All the references to Tables I to IV are references to the corresponding lines of Tables I to IV.)

[93742] In a preferred embodiment of said vector said nucleic acid molecule according to 1 (a), (b), (c), (d), (e), (f), (g), (h), (i), (j) or (k) encodes a polypeptide which has the activity of the respective polypeptide represented by a protein comprising a polypeptide as depicted in the respective line in column 5 of Table II, application no. 17.

[93743] In another preferred embodiment of said vector said nucleic acid molecule according to 1 (a), (b), (c), (d), (e), (f), (g), (h), (i), (j) or (k) confers a generation or an increase of the respective fine chemical in a non-human organism or a part thereof as compared to a corresponding wild-type non-human organism or part thereof.

[93744] In another preferred embodiment of said vector said nucleic acid molecule according to 1 (a), (b), (c), (d), (e), (f), (g), (h), (i), (j) or (k) encodes a polypeptide which has the activity of the respective polypeptide represented by a protein as depicted in the respective line in column 5 of Table II, application no. 17, and confers a generation or an increase of the respective fine chemical in a non-human organism or a part thereof as compared to a corresponding wild-type non-human organism or part thereof.

[93745] In another embodiment thereof said vector comprises beneath said nucleic acid molecule according to 1 (a), (b), (c), (d), (e), (f), (g), (h), (i), (j) or (k), a promoter, preferably a promoter selected from the group consisting of Big35S, PCUbi, Super and USP, which are operable linked.

[93746] In a preferred embodiment thereof said vector comprises beneath said nucleic acid molecule according to 1 (a), (b), (c), (d), (e), (f), (g), (h), (i), (j) or (k), a promoter, preferably a promoter selected from the group consisting of Big35S, PCUbi, Super and USP, which are operable linked; and said nucleic acid molecule according to 1 (a), (b), (c), (d), (e), (f), (g), (h), (i), (j) or (k) encodes a polypeptide which has the activity of the respective polypeptide represented by a protein comprising a polypeptide as depicted in the respective line in column 5 of Table II, application no. 17.

[93747] In another preferred embodiment thereof said vector comprises beneath said nucleic acid molecule according to 1 (a), (b), (c), (d), (e), (f), (g), (h), (i), (j) or (k), a promoter, preferably a promoter selected from the group consisting of Big35S, PCUbi, Super and USP, which are operable linked; and said nucleic acid molecule according to 1 (a), (b), (c), (d), (e), (f), (g), (h), (i), (j) or (k) confers a generation or an increase of the respective fine chemical in a non-human organism or a part thereof as compared to a corresponding wild-type non-human organism or part thereof.

[93748] In another preferred embodiment thereof said vector comprises beneath said nucleic acid molecule according to 1 (a), (b), (c), (d), (e), (f), (g), (h), (i), (j) or (k), a promoter, preferably a promoter selected from the group consisting of Big35S, PCUbi, Super and USP, which are operable linked; and said nucleic acid molecule according to 1 (a), (b), (c), (d), (e), (f), (g), (h), (i), (j) or (k) encodes a polypeptide which has the activity of the respective polypeptide represented by a protein as depicted in the respective line in column 5 of Table II, application no. 17, and confers a generation or an increase of the respective fine chemical in a non-human organism or a part thereof as compared to a corresponding wild-type non-human organism or part thereof.

[93749] In another embodiment thereof said vector comprises beneath said nucleic acid molecule according to 1 (a), (b), (c), (d), (e), (f), (g), (h), (i), (j) or (k), a nucleic acid molecule encoding a transit peptide, preferably encoding a plastidal transit peptide, especially in case in column 6 of Table I, application no. 17, in the same line as of the respective nucleic acid molecule according to 1) “plastidic” is depicted, or encoding a mitochondrial transit peptide, especially in case in column 6 of Table I, application no. 17, in the same line as of the respective nucleic acid molecule according to 1) “mitochondric” is depicted, which are operable linked.

[93750] In another embodiment thereof said vector does not comprise beneath said nucleic acid molecule according to 1 (a), (b), (c), (d), (e), (f), (g), (h), (i), (j) or (k), a nucleic acid molecule encoding a transit peptide in case in column 6 of Table I, application no. 17, in the same line as of the respective nucleic acid molecule according to 1) “non-targeted” is depicted.

[93751] In another embodiment thereof said vector comprises beneath said nucleic acid molecule according to 1 (a), (b), (c), (d), (e), (f), (g), (h), (i), (j) or (k), and a promoter, preferably a promoter selected from the group consisting of Big35S, PCUbi, Super and USP; a nucleic acid molecule encoding a transit peptide, preferably encoding a plastidal transit peptide, especially in case in column 6 of Table I, application no. 17, in the same line as of the respective nucleic acid molecule according to 1) “plastidic” is depicted, or encoding a mitochondrial transit peptide, especially in case in column 6 of Table I, application no. 17, in the same line as of the respective nucleic acid molecule according to 1) “mitochondric” is depicted, which are operable linked.

[93752] In another embodiment thereof said vector does not comprise beneath said nucleic acid molecule according to 1 (a), (b), (c), (d), (e), (f), (g), (h), (i), (j) or (k), and a promoter, preferably a promoter selected from the group consisting of Big35S, PCUbi, Super and USP, which are operable linked; a nucleic acid molecule encoding a transit peptide, especially in case in column 6 of Table I, application no. 17, in the same line as of the respective nucleic acid molecule according to 1) “non-targeted” is depicted.

[93753] In another embodiment thereof said vector comprises beneath said nucleic acid molecule according to 1 (a), (b), (c), (d), (e), (f), (g), (h), (i), (j) or (k), and a promoter, preferably a promoter selected from the group consisting of Big35S, PCUbi, Super and USP; a nucleic acid molecule encoding a transit peptide, preferably encoding a plastidal transit peptide, especially in case in column 6 of Table I, application no. 17, in the same line as of the respective nucleic acid molecule according to 1) “plastidic” is depicted, or encoding a mitochondrial transit peptide, especially in case in column 6 of Table I, application no. 17, in the same line as of the respective nucleic acid molecule according to 1) “mitochondric” is depicted, which are operable linked; and wherein said nucleic acid molecule according to 1 (a), (b), (c), (d), (e), (f), (g), (h), (i), (j) or (k) encodes a polypeptide which has the activity of the respective polypeptide represented by a protein comprising a polypeptide as depicted in column 5 of Table II, application no. 17 (in the same line).

[93754] In another embodiment thereof said vector does not comprise beneath said nucleic acid molecule according to 1 (a), (b), (c), (d), (e), (f), (g), (h), (i), (j) or (k), and a promoter, preferably a promoter selected from the group consisting of Big35S, PCUbi, Super and USP, which are operatively linked; a nucleic acid molecule encoding a transit peptide, especially in case in column 6 of Table I, application no. 17, in the same line as of the respective nucleic acid molecule according to 1) “non-targeted” is depicted; and wherein said nucleic acid molecule according to 1 (a), (b), (c), (d), (e), (f), (g), (h), (i), (j) or (k) encodes a polypeptide which has the activity of the respective polypeptide represented by a protein comprising a polypeptide as depicted in column 5 of Table II, application no. 17.

[93755] In another embodiment thereof said vector comprises beneath said nucleic acid molecule according to 1 (a), (b), (c), (d), (e), (f), (g), (h), (i), (j) or (k), and a promoter, preferably a promoter selected from the group consisting of Big35S, PCUbi, Super and USP; a nucleic acid molecule encoding a transit peptide, preferably encoding a plastidal transit peptide, especially in case in column 6 of Table I, application no. 17, in the same line as of the respective nucleic acid molecule according to 1) “plastidic” is depicted, or encoding a mitochondrial transit peptide, especially in case in column 6 of Table I, application no. 17, in the same line as of the respective nucleic acid molecule according to 1) “mitochondric” is depicted, which are operable linked; and wherein said nucleic acid molecule according to 1 (a), (b), (c), (d), (e), (f), (g), (h), (i), (j) or (k) confers a generation or an increase of the respective fine chemical in a non-human organism or a part thereof as compared to a corresponding wild-type non-human organism or part thereof.

[93756] In another embodiment thereof said vector does not comprise beneath said nucleic acid molecule according to 1 (a), (b), (c), (d), (e), (f), (g), (h), (i), (j) or (k), and a promoter, preferably a promoter selected from the group consisting of Big35S, PCUbi, Super and USP, which are operatively linked; a nucleic acid molecule encoding a transit peptide, especially in case in column 6 of Table I, application no. 17, in the same line as of the respective nucleic acid molecule according to 1) “non-targeted” is depicted; and wherein said nucleic acid molecule according to 1 (a), (b), (c), (d), (e), (f), (g), (h), (i), (j) or (k) confers a generation or an increase of the respective fine chemical in a non-human organism or a part thereof as compared to a corresponding wild-type non-human organism or part thereof.

[93757] In another embodiment thereof said vector comprises beneath said nucleic acid molecule according to 1 (a), (b), (c), (d), (e), (f), (g), (h), (i), (j) or (k), and a promoter, preferably a promoter selected from the group consisting of Big35S, PCUbi, Super and USP; a nucleic acid molecule encoding a transit peptide, preferably encoding a plastidal transit peptide, especially in case in column 6 of Table I, application no. 17, in the same line as of the respective nucleic acid molecule according to 1) “plastidic” is depicted, or encoding a mitochondrial transit peptide, especially in case in column 6 of Table I, application no. 17, in the same line as of the respective nucleic acid molecule according to 1) “mitochondric” is depicted, which are operable linked; and wherein said nucleic acid molecule according to 1 (a), (b), (c), (d), (e), (f), (g), (h), (i), (j) or (k) encodes a polypeptide which has the activity of the respective polypeptide represented by a protein as depicted in column 5 of Table II application no. 17 and confers a generation or an increase of the respective fine chemical in a non-human organism or a part thereof as compared to a corresponding wild-type non-human organism or part thereof.

[93758] In another embodiment thereof said vector does not comprise beneath said nucleic acid molecule according to 1 (a), (b), (c), (d), (e), (f), (g), (h), (i), (j) or (k), and a promoter, preferably a promoter selected from the group consisting of Big35S, PCUbi, Super and USP, which are operatively linked; a nucleic acid molecule encoding a transit peptide, especially in case in column 6 of Table I, application no. 17, in the same line as of the respective nucleic acid molecule according to 1) “non-targeted” is depicted; and wherein said nucleic acid molecule according to 1 (a), (b), (c), (d), (e), (f), (g), (h), (i), (j) or (k) encodes a polypeptide which has the activity of the respective polypeptide represented by a protein as depicted in column 5 of Table II application no. 17 (in the same line) and confers a generation or an increase of the respective fine chemical in a non-human organism or a part thereof as compared to a corresponding wild-type non-human organism or part thereof.

[93759] In a preferred embodiment of said vector said nucleic acid molecule according to 1 (a), (b), (c), (d), (e), (f), (g), (h), (i), (j) or (k), said promoter and optionally said nucleic acid molecule encoding a transit peptide are encompassed in an expression cassette. Accordingly in an embodiment the invention provides a vector comprising an expression cassette comprising said nucleic acid molecule according to 1 (a), (b), (c), (d), (e), (f), (g), (h), (i), (j) or (k), said promoter and optionally said a nucleic acid molecule encoding a transit peptide, operable linked. Said expression cassette may encompass a terminator, too.

[93760] The invention further provides a vector comprising a nucleic acid molecule comprising 1) a nucleic acid molecule selected from the group consisting of:
[93761] (a) a nucleic acid molecule encoding a polypeptide shown in Table II, column 5 or 8, application no. 17, preferably shown in Table II A, application no. 17, in column 5, or in Table II A, application no. 17, column 8, or in Table II B, application no. 17, column 8, or a homolog or a fragment thereof;
[93762] (b) a nucleic acid molecule shown in Table I, application no. 17, column 5 or 8, preferably shown in Table I A, application no. 17, in column 5, or in Table I A, application no. 17, column 8, or in Table I B, application no. 17, column 8, preferably the coding region thereof, or a homolog or a fragment thereof;
[93763] (c) a nucleic acid molecule, which, as a result of the degeneracy of the genetic code, can be derived from a polypeptide sequence depicted in column 5 or 8 of Table II, application no. 17, preferably shown in Table II A, application no. 17, in column 5, or in Table II A, application no. 17, column 8, or in Table II B, application no. 17, column 8;
[93764] (d) a nucleic acid molecule having at least 30% identity, preferably at least 40%, 50%, 60%, 70%, 75%, 80%, 85%, 90%, 95%, 96%, 97%, 98%, 99%, 99.5%, with the nucleic acid molecule sequence of a polynucleotide comprising the nucleic acid molecule shown in column 5 or 8 of Table I, application no. 17, preferably shown in Table I A, application no. 17, in column 5, or in Table I A, application no. 17, column 8, or in Table I B, application no. 17, column 8, preferably the coding region thereof;
[93765] (e) a nucleic acid molecule encoding a polypeptide having at least 30% identity, preferably at least 40%, 50% 60%, 70%, 75%, 80%, 85%, 90%, 95%, 96%, 97%, 98%, 99%, 99.5%, identity with the amino acid sequence of the polypeptide encoded by the nucleic acid molecule of (a), (b), (c), or (d);
[93766] (f) a nucleic acid molecule which hybridizes with a nucleic acid molecule of (a), (b), (c), (d), or (e) under stringent hybridization conditions;
[93767] (g) a nucleic acid molecule encoding a polypeptide which can be isolated with the aid of monoclonal or polyclonal antibodies made against a polypeptide encoded by one of the nucleic acid molecules of (a), (b), (c), (d), (e) or (f);
[93768] (h) a nucleic acid molecule encoding a polypeptide comprising the consensus sequence or one or more polypeptide motifs as shown in column 8 of Table IV, application no. 17;
[93769] (i) a nucleic acid molecule encoding a polypeptide having the activity represented by a protein as depicted in column 5 of Table II, application no. 17;
[93770] (j) a nucleic acid molecule comprising a polynucleotide which is obtained by amplifying a cDNA library or a genomic library using the primers in Table III, application no. 17, column 8;
[93771] and
[93772] (k) nucleic acid molecule which is obtainable by screening a suitable nucleic acid library, especially a cDNA library and/or a genomic library, under stringent hybridization conditions with a probe comprising one of the sequences of the nucleic acid molecule of (a), (b), (c), (d), (e), (f), (g), (h), (i) or (j) or with a fragment thereof having at least 15 nt, preferably 20 nt, 30 nt, 50 nt, 100 nt, 200 nt, 500 nt, 1000 nt, 1500 nt, 2000 nt or 3000 nt of the nucleic acid molecule complementary to a nucleic acid sequence characterized in (a), (b), (c), (d), (e), (f), (g), (h), (i) or (j);
[93773] or a nucleic acid molecule comprising a sequence which is complementary thereto;
   whereby, preferably, the nucleic acid molecule according to 1 (a), (b), (c), (d), (e), (f), (g), (h), (i), (j) or (k) distinguishes over the sequence depicted in Table I A and/or I B, application no. 17, column 5 or 8, or the coding region thereof, by one or more nucleotides (especially but not exceeding 5%, preferably 4%, 3%, 2%, 1%, 0.5%, 0.2% or 0.1%). In an embodiment, the nucleic acid molecule of the invention does not consist of the sequence shown in Table I A and/or I B, application no. 17, column 5 or 8, or the coding region thereof, respectively. In another embodiment, the nucleic acid molecule of the present invention, preferably the coding region thereof, is 30%, 40%, 50%, 60%, 70%, 80%, 90%, 95% identical but less than 100%, 99.999%, 99.99%, 99.9%, 99%, 98%, 97%, 96% or 95% identical to the sequence shown in Table I A and/or I B, application no. 17, column 5 or 8, or the coding region thereof, respectively. In a further embodiment the nucleic acid molecule does not encode the polypeptide sequence shown in Table II A and/or II B, application no. 17, column 5 or 8 but homologs thereof. Accordingly, in one embodiment, the nucleic acid molecule of the present invention encodes in one embodiment a polypeptide which differs at least in one or more amino acids (especially but not exceeding 5%, preferably 4%, 3%, 2%, 1%, 0.5%, 0.2% or 0.1%) from the polypeptide shown in Table II, application no. 17, column 5 or 8 and does not encode a protein of the sequence shown in Table II A and/or II B, application no. 17, column 5 or 8. Accordingly, in one embodiment, the protein encoded by a sequence of a nucleic acid according to (a), (b), (c), (d), (e), (f), (g), (h), (i), (j) or (k) does not consist of the sequence shown in Table I A and/or I B, application no. 17, column 5 and 8, or the coding region thereof. In a further embodiment, the protein of the present invention is at least 30%,40%, 50%, 60%, 70%, 80%, 90%, 95% identical to protein sequence depicted in Table II A and/or II B, application no. 17, column 5 or 8 but less than 100%, preferably less than 99.999%, 99.99% or 99.9%, more preferably less than 99%, 985, 97%, 96% or 95% identical to the sequence shown in Table II A and/or II B, application no. 17, column 5 or 8.
   (All the references to Tables I to IV are references to the corresponding lines of Tables I to IV.)

[93774] In a preferred embodiment of said vector said nucleic acid molecule according to 1 (a), (b), (c), (d), (e), (f), (g), (h), (i), (j) or (k) encodes a polypeptide which has the activity of the respective polypeptide represented by a protein comprising a polypeptide as depicted in the respective line in column 5 of Table II, application no. 17.

[93775] In another preferred embodiment of said vector said nucleic acid molecule according to 1 (a), (b), (c), (d), (e), (f), (g), (h), (i), (j) or (k) confers a generation or an increase of the respective fine chemical in a non-human organism or a part thereof as compared to a corresponding wild-type non-human organism or part thereof.

[93776] In another preferred embodiment of said vector said nucleic acid molecule according to 1 (a), (b), (c), (d), (e), (f), (g), (h), (i), (j) or (k) encodes a polypeptide which has the activity of the respective polypeptide represented by a protein as depicted in the respective line in column 5 of Table II, application no. 17, and confers a generation or an increase of the respective fine chemical in a non-human organism or a part thereof as compared to a corresponding wild-type non-human organism or part thereof.

[93777] In another embodiment thereof said vector comprises beneath said nucleic acid molecule according to 1 (a), (b), (c), (d), (e), (f), (g), (h), (i), (j) or (k), a promoter, preferably a promoter selected from the group consisting of Big35S, PCUbi, Super and USP, which are operable linked.

[93778] In a preferred embodiment thereof said vector comprises beneath said nucleic acid molecule according to 1 (a), (b), (c), (d), (e), (f), (g), (h), (i), (j) or (k), a promoter, preferably a promoter selected from the group consisting of Big35S, PCUbi, Super and USP, which are operable linked; and said nucleic acid molecule according to 1 (a), (b), (c), (d), (e), (f), (g), (h), (i), (j) or (k) encodes a polypeptide which has the activity of the respective polypeptide represented by a protein comprising a polypeptide as depicted in the respective line in column 5 of Table II, application no. 17.

[93779] In another preferred embodiment thereof said vector comprises beneath said nucleic acid molecule according to 1 (a), (b), (c), (d), (e), (f), (g), (h), (i), (j) or (k), a promoter, preferably a promoter selected from the group consisting of Big35S, PCUbi, Super and USP, which are operable linked; and said nucleic acid molecule according to 1 (a), (b), (c), (d), (e), (f), (g), (h), (i), (j) or (k) confers a generation or an increase of the respective fine chemical in a non-human organism or a part thereof as compared to a corresponding wild-type non-human organism or part thereof.

[93780] In another preferred embodiment thereof said vector comprises beneath said nucleic acid molecule according to 1 (a), (b), (c), (d), (e), (f), (g), (h), (i), (j) or (k), a promoter, preferably a promoter selected from the group consisting of Big35S, PCUbi, Super and USP, which are operable linked; and said nucleic acid molecule according to 1 (a), (b), (c), (d), (e), (f), (g), (h), (i), (j) or (k) encodes a polypeptide which has the activity of the respective polypeptide represented by a protein as depicted in the respective line in column 5 of Table II, application no. 17, and confers a generation or an increase of the respective fine chemical in a non-human organism or a part thereof as compared to a corresponding wild-type non-human organism or part thereof.

[93781] In another embodiment thereof said vector comprises beneath said nucleic acid molecule according to 1 (a), (b), (c), (d), (e), (f), (g), (h), (i), (j) or (k), a nucleic acid molecule encoding a transit peptide, preferably encoding a plastidal transit peptide, especially in case in column 6 of Table I, application no. 17, in the same line as of the respective nucleic acid molecule according to 1) “plastidic” is depicted, or encoding a mitochondrial transit peptide, especially in case in column 6 of Table I, application no. 17, in the same line as of the respective nucleic acid molecule according to 1) “mitochondric” is depicted, which are operable linked.

[93782] In another embodiment thereof said vector does not comprise beneath said nucleic acid molecule according to 1 (a), (b), (c), (d), (e), (f), (g), (h), (i), (j) or (k), a nucleic acid molecule encoding a transit peptide in case in column 6 of Table I, application no. 17, in the same line as of the respective nucleic acid molecule according to 1) “non-targeted” is depicted.

[93783] In another embodiment thereof said vector comprises beneath said nucleic acid molecule according to 1 (a), (b), (c), (d), (e), (f), (g), (h), (i), (j) or (k), and a promoter, preferably a promoter selected from the group consisting of Big35S, PCUbi, Super and USP; a nucleic acid molecule encoding a transit peptide, preferably encoding a plastidal transit peptide, especially in case in column 6 of Table I, application no. 17, in the same line as of the respective nucleic acid molecule according to 1) “plastidic” is depicted, or encoding a mitochondrial transit peptide, especially in case in column 6 of Table I, application no. 17, in the same line as of the respective nucleic acid molecule according to 1) “mitochondric” is depicted, which are operable linked.

[93784] In another embodiment thereof said vector does not comprise beneath said nucleic acid molecule according to 1 (a), (b), (c), (d), (e), (f), (g), (h), (i), (j) or (k), and a promoter, preferably a promoter selected from the group consisting of Big35S, PCUbi, Super and USP, which are operatively linked; a nucleic acid molecule encoding a transit peptide, especially in case in column 6 of Table I, application no. 17, in the same line as of the respective nucleic acid molecule according to 1) “non-targeted” is depicted.

[93785] In another embodiment thereof said vector comprises beneath said nucleic acid molecule according to 1 (a), (b), (c), (d), (e), (f), (g), (h), (i), (j) or (k), and a promoter, preferably a promoter selected from the group consisting of Big35S, PCUbi, Super and USP; a nucleic acid molecule encoding a transit peptide, preferably encoding a plastidal transit peptide, especially in case in column 6 of Table I, application no. 17, in the same line as of the respective nucleic acid molecule according to 1) “plastidic” is depicted, or encoding a mitochondrial transit peptide, especially in case in column 6 of Table I, application no. 17, in the same line as of the respective nucleic acid molecule according to 1) “mitochondric” is depicted, which are operable linked; and wherein said nucleic acid molecule according to 1 (a), (b), (c), (d), (e), (f), (g), (h), (i), (j) or (k) encodes a polypeptide which has the activity of the respective polypeptide represented by a protein comprising a polypeptide as depicted in column 5 of Table II, application no. 17.

[93786] In another embodiment thereof said vector does not comprise beneath said nucleic acid molecule according to 1 (a), (b), (c), (d), (e), (f), (g), (h), (i), (j) or (k), and a promoter, preferably a promoter selected from the group consisting of Big35S, PCUbi, Super and USP, which are operatively linked; a nucleic acid molecule encoding a transit peptide, especially in case in column 6 of Table I, application no. 17, in the same line as of the respective nucleic acid molecule according to 1) “non-targeted” is depicted; and wherein said nucleic acid molecule according to 1 (a), (b), (c), (d), (e), (f), (g), (h), (i), (j) or (k) encodes a polypeptide which has the activity of the respective polypeptide represented by a protein comprising a polypeptide as depicted in column 5 of Table II, application no. 17.

[93787] In another embodiment thereof said vector comprises beneath said nucleic acid molecule according to 1 (a), (b), (c), (d), (e), (f), (g), (h), (i), (j) or (k), and a promoter, preferably a promoter selected from the group consisting of Big35S, PCUbi, Super and USP; a nucleic acid molecule encoding a transit peptide, preferably encoding a plastidal transit peptide, especially in case in column 6 of Table I, application no. 17, in the same line as of the respective nucleic acid molecule according to 1) “plastidic” is depicted, or encoding a mitochondrial transit peptide, especially in case in column 6 of Table I, application no. 17, in the same line as of the respective nucleic acid molecule according to 1) “mitochondric” is depicted, which are operable linked; and wherein said nucleic acid molecule according to 1 (a), (b), (c), (d), (e), (f), (g), (h), (i), (j) or (k) confers a generation or an increase of the respective fine chemical in a non-human organism or a part thereof as compared to a corresponding wild-type non-human organism or part thereof.

[93788] In another embodiment thereof said vector does not comprise beneath said nucleic acid molecule according to 1 (a), (b), (c), (d), (e), (f), (g), (h), (i), (j) or (k), and a promoter, preferably a promoter selected from the group consisting of Big35S, PCUbi, Super and USP, which are operatively linked; a nucleic acid molecule encoding a transit peptide, especially in case in column 6 of Table I, application no. 17, in the same line as of the respective nucleic acid molecule according to 1) “non-targeted” is depicted; and wherein said nucleic acid molecule according to 1 (a), (b), (c), (d), (e), (f), (g), (h), (i), (j) or (k) confers a generation or an increase of the respective fine chemical in a non-human organism or a part thereof as compared to a corresponding wild-type non-human organism or part thereof.

[93789] In another embodiment thereof said vector comprises beneath said nucleic acid molecule according to 1 (a), (b), (c), (d), (e), (f), (g), (h), (i), (j) or (k), and a promoter, preferably a promoter selected from the group consisting of Big35S, PCUbi, Super and USP; a nucleic acid molecule encoding a transit peptide, preferably encoding a plastidal transit peptide, especially in case in column 6 of Table I, application no. 17, in the same line as of the respective nucleic acid molecule according to 1) “plastidic” is depicted, or encoding a mitochondrial transit peptide, especially in case in column 6 of Table I, application no. 17, in the same line as of the respective nucleic acid molecule according to 1) “mitochondric” is depicted, which are operable linked; and wherein said nucleic acid molecule according to 1 (a), (b), (c), (d), (e), (f), (g), (h), (i), (j) or (k) encodes a polypeptide which has the activity of the respective polypeptide represented by a protein as depicted in column 5 of Table II application no. 17 and confers a generation or an increase of the respective fine chemical in a non-human organism or a part thereof as compared to a corresponding wild-type non-human organism or part thereof.

[93790] In another embodiment thereof said vector does not comprise beneath said nucleic acid molecule according to 1 (a), (b), (c), (d), (e), (f), (g), (h), (i), (j) or (k), and a promoter, preferably a promoter selected from the group consisting of Big35S, PCUbi, Super and USP, which are operatively linked; a nucleic acid molecule encoding a transit peptide, especially in case in column 6 of Table I, application no. 17, in the same line as of the respective nucleic acid molecule according to 1) “non-targeted” is depicted; and wherein said nucleic acid molecule according to 1 (a), (b), (c), (d), (e), (f), (g), (h), (i), (j) or (k) encodes a polypeptide which has the activity of the respective polypeptide represented by a protein as depicted in column 5 of Table II application no. 17 and confers a generation or an increase of the respective fine chemical in a non-human organism or a part thereof as compared to a corresponding wild-type non-human organism or part thereof.

[93791] [0181.1.7.17] to [0209.1.7.17] for the disclosure of these paragraphs see [0181.1.7.7] to [0209.1.7.7] above

[93792] The genes of the invention, coding in one embodiment for an activity selected from the group consisting of 1,4-alpha-glucan branching enzyme, 2,3-dihydroxy-2,3-dihydrophenylpropionatedehydrogenase, 2-C-methyl-D-erythritol 4-phosphate cytidylyltransferase, 2-oxoglutarate dehydrogenase E1 subunit, 3-deoxy-7-phosphoheptulonate synthase, 3isopropylmalate dehydratase large subunit, 3-phosphoglycerate dehydrogenase, 47266012-protein, 49747384_SOYBEAN-protein, 4-alpha-glucanotransferase, ABC transporter permease protein, acetyl CoA carboxylase, acetyl CoA synthetase, acetyl-coenzyme A synthetase, acetyltransferase, acid shock protein, acyl carrier protein, acyl transferase, acyl-CoA dehydrogenase, acyl-CoA synthase, adenylosuccinate lyase, alanine dehydrogenase, alcohol dehydrogenase, aldolase, alkaline phosphatase, amine oxidase, amino-acid acetyltransferase, aminotransferase, arginine exporter protein, asparagine synthetase B, At1g19350-protein, At2g45420-protein, At5g16650-protein, At5g43630-protein, ATP synthase subunit E, ATP-binding component of a transport system, auxin response factor, AX653549-protein, AY087308-protein, b0050-protein, b0251-protein, b0362-protein, b0488-protein, B0644-protein, b0801-protein, b0970-protein, b1003-protein, b1046-protein, b1137-protein, b1214-protein, b1219-protein, b1234-protein, b1285-protein, b1357-protein, b1410-protein, b1425-protein, b1445-protein, b1470-protein, b1522-protein, b1556-protein, b1583-protein, b1670-protein, b1796-protein, b1898-protein, b2032-protein, b2107-protein, b2139-protein, b2345-protein, b2360-protein, b2361-protein, b2399-protein, b2466-protein, b2474-protein, b2613-protein, b2653-protein, b2654-protein, b2670-protein, b2673-protein, b2682-protein, b2739-protein, b2932-protein, b3151-protein, b3221-protein, b3246-protein, b3346-protein, B3427-protein, b3442-protein, B3443-protein, b3777-protein, b3817-protein, b3818-protein, b3989-protein, b4029-protein, b4050-protein, b4056-protein, b4250-protein, beta-galactosidase, beta-hydroxylase, betaine aldehyde dehydrogenase, bifunctional protein (phosphoribosyltransferase and regulatory protein), binding-protein-dependent transport systems inner membrane component, branched-chain amino acid ABC transporter permease protein, branched-chain amino acid permease, calcium-dependent protein kinase, carbamoyl-phosphate synthase subunit, cardiolipin synthase, cation-transporting ATPase, CBL-interacting protein kinase, CCAAT-binding transcription factor, CDP-diglyceride synthetase, cell division control protein, cell division protein, chlorophyllase, chorismate lyase, circadian clock protein, colanic acid biosynthesis protein, coproporphyrinogen III oxidase, coproporphyrinogen oxidase, CTP synthase, cullin, cyclin, cyclin D, cystathionine gamma-synthase, cysteine synthase A, dATP pyrophosphohydrolase, dihydrolipoamide dehydrogenase, DNA binding protein, DNA replication complex GINS protein, DnaJ-like chaperone, electron transfer flavoprotein subunit beta, electron transport complex protein, elongation factor Tu, enoyl-CoA hydratase, eukaryotic translation initiation factor, eukaryotic translation initiation factor 5, fatty acid desaturase, ferredoxin, Fe—S subunit of oxidoreductase, flagellar M-ring protein, flavodoxin, fructose biphosphate aldolase, fumarylacetoacetate hydrolase, galactinol synthase, GDP-mannose 4,6-dehydratase, GDP-mannose dehydrogenase, geranylgeranyl pyrophosphate synthase, gibberellin 20-oxidase, Glu/Leu/Phe/Val dehydrogenase, glucokinase, gluconate transport system permease 3, glucose dehydrogenase, glucose-6-phosphate 1-dehydrogenase, glutamate-ammonia-ligase, glutamine amidotransferase, glutamine synthetase, glutaredoxin, glycerate kinase, glycogen (starch) synthase, glycogen synthase, glycosidase, glycosyl transferase, glycosyltransferase, GM02LC38418-protein, GM02LC46-protein, halotolerance protein, heat shock transcription factor, hexokinase, hexose transporter, high-affinity branched-chain amino acid transport protein, histone acetyltransferase, homocitrate synthase, hydrolase, inositol-3-phosphate synthase, integral membrane protein, intracellular septation protein, ion-transport protein, iron(III) dicitrate-binding protein, isochorismate synthase, isocitrate dehydrogenase, isopropylmalate isomerase large subunit, ketol-acid reductoisomerase, kinase, leucyl/phenylalanyl-tRNA-protein transferase, lipoprotein precursor,

[93793] L-ribulose-5-phosphate 4-epimerase, L-serine dehydratase, lysine decarboxylase, MADS box protein transcription factor, MADS-box transcription factor, malate dehydrogenase, mannitol-1-phosphate dehydrogenase, membrane protein, membrane transport protein, methylglyoxalase, methyltransferase, Mg-protoporphyrin IX monomethyl ester oxidative cyclase 66 kD subunit, mitogen-activated protein kinase, molecular chaperone, monothiol glutaredoxin, monthiol glutaredoxin, multidrug resistance protein, multiple antibiotic resistance protein, murein transglycosylase, NAD(P)H dehydrogenase (quinone), NADH dehydrogenase, NADH-quinone oxidoreductase subunit, O-acetyltransferase, O-antigen chain length determinant, outer membrane receptor protein precursor, oxidoreductase, oxidoreductase subunit, para-aminobenzoate synthase component I, penicillin-binding protein, peptidyl-prolyl cis-trans isomerase, permease, permease protein of ABC transporter, phage-related repressor protein, phenylacetic acid degradation protein, phenylalanine ammonia-lyase, phosphate acetyltransferase, phosphate permease, phosphatidylinositol 3- and 4-kinase family protein, phosphoadenosine phosphosulfate reductase, phosphoanhydride phosphorylase, phosphoenolpyruvate carboxykinase, phosphoglycerate kinase, phosphohydrolase, phosphotransferase system component, photosystem I reaction center subunit XI, photosystem I reaction centre subunit, photosystem II protein, polyamine transporter, precorrin methylase, protease, protein kinase, protein phosphatase, protein-L-isoaspartate O-methyltransferase, purine biosynthesis protein, purine nucleoside phosphorylase, purine-nucleoside phosphorylase, putative transport system permease protein, putrescine transport system permease protein, pyridoxal phosphate biosynthetic protein, pyrimidine-specific ribonucleoside hydrolase, pyruvate kinase, recombinase A, RNA-binding protein, sec-independent protein translocase, Sec-independent protein translocase subunit, sensor histidine kinase, serine protease, serine/threonine dehydratase, serine/threonine-protein phosphatase, short chain dehydrogenase, short-chain alcohol dehydrogenase family, sll0254-protein, sll0281-protein, sll0354-protein, sll0418-protein, sll1761-protein, slr0600-protein, slr1107-protein, sn-glycerol-3-phosphate dehydrogenase, sn-glycerol-3-phosphate transport system permease protein, sodium/proton antiporter, sterol O-acyltransferase, subunit of COMPASS-protein complex, succinyl-CoA synthetase beta chain, ThiF family protein, thioredoxin, thioredoxin family protein, threonine dehydratase, threonine efflux protein, threonine synthase, transcription factor, transcriptional regulator, transcriptional regulator protein, transport protein, trehalase, trehalose-6-phosphate synthase, trehalose-phosphatase, tryptophan biosynthesis protein, TTC1386-protein, urease accessory protein, urease subunit, vacuolar sorting protein, XM_{—}473199-protein, ycl027w-protein, YCR047W-A-protein, ycr102c-protein, YDL159W-A-protein, ydl235c-protein, ydr183w-protein, ydr507c-protein, YEL030C-A-protein, yer177w-protein, YFL019C-protein, ygl096w-protein, ygl237c-protein, yhl013c-protein, YIL083C-protein, YJL127W-A-protein, ymr324c-protein, yol160w-protein, ypl144w-protein, ypr098c-protein, zinc transporter, and Zm_{—}4842_BE510522-protein are also called “FCRP genes”.

[93794] [0211.1.7.17] to [0225.1.7.17] for the disclosure of these paragraphs see [0211.1.7.7] to [0225.1.7.7] above

[93795] In addition to the sequence mentioned in Table I, application no. 17, column 5 or 8, preferably the coding region thereof, or its homologs or fragments, it may be advantageous additionally to express and/or mutate further genes in the non-human organisms. Especially advantageously, additionally at least one further gene of the biosynthetic pathway of the fine chemical is expressed in the non-human organisms such as plants or microorganisms. It is also possible that the regulation of the natural genes has been modified advantageously so that the gene and/or its gene product is no longer subject to the regulatory mechanisms which exist in the non-human organisms. This leads to an increased synthesis of the respective saccharide since, for example, feedback regulations no longer exist to the same extent or not at all. In addition it might be advantageously to combine the nucleic acids sequences of the invention containing the sequences shown in the respective line in Table I, application no. 17, column 5 or 8, preferably the coding region thereof, or homologs or fragments thereof, with genes which generally support or enhance the growth or yield of the target non-human organisms, for example genes which lead to faster growth rate of non human organism like microorganisms or plants or genes which produce stress-, pathogen-, or herbicide-resistant plants.

[93796] In a further embodiment of the process of the invention, non-human organisms are grown, in which there is in addition to the expression of the nucleic acid molecule according to the invention simultaneous expression of at least one nucleic acid molecule or one of the genes which code for proteins involved in the carbohydrate metabolism, in particular genes of the sugar or starch metabolism, the glucose metabolism, the saccharide metabolism, the metabolism of glycolysis (gluconeogenesis), citrate cycle, pentose-pathway, of glycolipids and glycoprotein metabolism, or their combinations.

[93797] In a further embodiment of the process for the production of the fine chemical sorbitol, non-human organisms are grown, in which there is in addition to the expression of the nucleic acid molecule according to the invention simultaneous expression of at least one nucleic acid molecule or one of the genes which code for proteins involved in the sorbitol biosynthesis, e.g. aldose-6-phosphate reductase (EC 1.1.1.200), also called sorbitol-6-phosphate dehydrogenase (S6PDH), D-sorbitol-6-phosphatase, sorbitol-6-phosphate phosphatase (E.C. 3.1.3.50), glucose-fructose oxidoreductase and/or a reduction of the activity of sorbitol dehydrogenase (SDH, EC 1.1.1.14).

[93798] In a further embodiment of the process for the production of the fine chemical sucrose, non-human organisms are grown, in which there is in addition to the expression of the nucleic acid molecule according to the invention simultaneous expression of at least one nucleic acid molecule or one of the genes which code for proteins involved in the sucrose biosynthesis, e.g. sucrose-6-phosphate synthase, phosphoglucomutase (EC 5.4.2.2), UDP-glucose pyrophosphorylase (EC 2.7.7.9) and/or sucrose synthase.

[93799] In a further embodiment of the process for the production of the fine chemical raffinose, non-human organisms are grown, in which there is in addition to the expression of the nucleic acid molecule according to the invention simultaneous expression of at least one nucleic acid molecule or one of the genes which code for proteins involved in the raffinose biosynthesis, e.g. raffinose synthase, galactinol synthase and/or galactosy transferase.

[93800] In a further embodiment of the process for the production of the fine chemical myo-inositol, non-human organisms are grown, in which there is in addition to the expression of the nucleic acid molecule according to the invention simultaneous expression of at least one nucleic acid molecule or one of the genes which code for proteins involved in the myo-inositol biosynthesis, e.g. inositol-1-phosphate synthase and/or inositol monophosphatase.

[93801] In a further embodiment of the process for the production of the fine chemical trehalose, non-human organisms are grown, in which there is in addition to the expression of the nucleic acid molecule according to the invention simultaneous expression of at least one nucleic acid molecule or one of the genes which code for proteins involved in the trehalose biosynthesis, e.g. trehalose-6-phosphate synthase (EC 2.4.1.15), trehalose-6-phosphate phophatase and/or trehalose phophatase (EC 3.1.3.12).

[93802] In a further embodiment of the process for the production of the fine chemical sedoheptulose-7-phosphate, non-human organisms are grown, in which there is in addition to the expression of the nucleic acid molecule according to the invention simultaneous expression of at least one nucleic acid molecule or one of the genes which code for proteins involved in the sedoheptulose-7-phosphate biosynthesis, e.g. transaldolase [EC 2.2.1.2], Seduheptulose-1,7 bisphosphats phosphatase [EC 3.1.3.37] and/or transketolase [EC 2.2.1.1.

[93803] In a further embodiment of the process for the production of the fine chemical mannitol, non-human organisms are grown, in which there is in addition to the expression of the nucleic acid molecule according to the invention simultaneous expression of at least one nucleic acid molecule or one of the genes which code for proteins involved in the mannitol biosynthesis, e.g. mannose-1-phosphate phosphatase [EC 3.1.3.22], mannitol-1-phosphate dehydrogenase, phosphomannose isomerase (E.C. 5.3.1.8) and/or mannose-6-phosphate reductase, M6PR (E.C. 1.1.1.224).

[93804] In a further embodiment of the process for the production of the fine chemical glucose, non-human organisms are grown, in which there is in addition to the expression of the nucleic acid molecule according to the invention simultaneous expression of at least one nucleic acid molecule or one of the genes which code for proteins involved in the glucose biosynthesis, e.g. involved in the photosynthesis, involved in the glycogenolysis and/or involved in the gluconeogenesis.

[93805] In a further embodiment of the process for the production of the fine chemical galactitol, non-human organisms are grown, in which there is in addition to the expression of the nucleic acid molecule according to the invention simultaneous expression of at least one nucleic acid molecule or one of the genes which code for proteins involved in the galactitol biosynthesis, e.g. enzyme aldose (aldehyde) reductase.

[93806] In a further embodiment of the process for the production of the fine chemical galactinol, non-human organisms are grown, in which there is in addition to the expression of the nucleic acid molecule according to the invention simultaneous expression of at least one nucleic acid molecule or one of the genes which code for proteins involved in the galactinol biosynthesis, e.g. proteins involved in the biosynthesis of the RFOs.

[93807] In a further embodiment of the process for the production of the fine chemical erythrol, non-human organisms are grown, in which there is in addition to the expression of the nucleic acid molecule according to the invention simultaneous expression of at least one nucleic acid molecule or one of the genes which code for proteins involved in the erythrol biosynthesis, e.g. erythrose reductase genes, being a member of the aldo/keto reductase superfamily and catalysing the NADP(H)-dependent reduction of erythrose to Erythrol.

[93808] In a further embodiment of the process for the production of the fine chemical verbascose, non-human organisms are grown, in which there is in addition to the expression of the nucleic acid molecule according to the invention simultaneous expression of at least one nucleic acid molecule or one of the genes which code for proteins involved in the verbascose biosynthesis, e.g. stachyose galactinol:verbascose galactosyltransferase, verbascose galactinol:ajugose galactosyltransferase, stachyose synthase and/or verbascose synthase.

[93809] [0228.1.7.17] to [0239.1.7.17] for the disclosure of these paragraphs see [0228.1.7.7] to [0239.1.7.7] above

[93810] In an embodiment of the present invention the nucleic acid construct of the present invention comprises a nucleic acid molecule as depicted in the respective line in Table I, application no. 17, column 5 or 8, preferably the coding region thereof, a fragment or a homolog thereof, and a plant promoter, such as the Big 35S promoter, the DC3 promoter, the PC Ubi promoter, the LegB4-promoter, the Super promoter, the USP promoter or the like. In another embodiment the nucleic acid construct of the present invention comprises a nucleic acid molecule as depicted in the respective line in Table I, application no. 17, column 5 or 8, preferably the coding region thereof, a fragment or a homolog thereof, and a plant promoter such as, for example, the USP, the LegB4-, the DC3 promoter or the ubiquitin promoter from parsley or other herein mentioned promoters. In a further embodiment the nucleic acid construct of the present invention comprises a nucleic acid molecule as depicted in the respective line in Table I, application no. 17, column 5 or 8, preferably the coding region thereof, a fragment or a homolog thereof, and a plant promoter, such as the Big 35S promoter, the PC Ubi promoter, the Super promoter, the USP promoter or the like. In addition different terminators may advantageously be used in these nucleic acid constructs; examples for transcriptional termination are polyadenylation signals.

[93811] [0241.1.7.17] to [0245.1.7.17] for the disclosure of these paragraphs see [0241.1.7.7] to [0245.1.7.17] as above mentioned

[93812] Other preferred sequences for use in operable linkage in gene expression constructs are targeting sequences, which are required for targeting the gene product into specific cell compartments (for a review, see Kermode, Crit. Rev. Plant Sci. 15 (4), 285 (1996) and references cited therein), for example into the vacuole, the nucleus, all types of plastids, such as amyloplasts, chloroplasts, chromoplasts, the extracellular space, the mitochondria, the endoplasmic reticulum, elaioplasts, peroxisomes, glycosomes, and other compartments of cells or extracellular; preferred are sequences, which are involved in targeting to plastids as mentioned above. Sequences, which must be mentioned in this context are, in particular, the signal-peptide- or transit-peptide-encoding sequences which are known per se. For example, plastid-transit-peptide-encoding sequences enable the targeting of the expression product into the plastids of a plant cell. Targeting sequences are also known for eukaryotic and to a lower extent for prokaryotic organisms and can advantageously be operable linked with the nucleic acid molecule of the present invention as shown in Table I, application no. 17, columns 5 and 8, preferably the coding region thereof, or homologs or fragments thereof, and described herein to achieve an expression in one of said compartments or extracellular.

[93813] [0247.1.7.17] to [0249.1.7.17] for the disclosure of these paragraphs see [0247.1.7.7] to [0249.1.7.7] above

[93814] Preferred promoters are in particular those which bring about gene expression in tissues and organs, such as leaves, roots, seeds, pollen or xylem. Examples of tissue preferred or organ preferred promoters include, but are not limited to fruit-preferred, ovule-preferred, male tissue-preferred, seed-preferred, pollen-preferred integument-preferred, tuber-preferred, stalk-preferred, pericarp-preferred, leaf-preferred, stigma-preferred, pollen-preferred, anther-preferred, petal-preferred, sepal-preferred, pedicel-preferred, silique-preferred, stem-preferred, root-preferred promoters, and the like. Especially those promoters are preferred which bring about gene expression in tissues and organs in which the biosynthesis of saccharides, e.g.carbohydrates takes place, like in seed cells, such as endosperm cells and cells of the developing embryo. Seed promoters are preferentially expressed during seed development and/or germination. For example, seed preferred promoters can be embryo-preferred, endosperm preferred and seed coat-preferred (see Thompson et al., BioEssays 10, 108 (1989)). Examples of seed preferred promoters include, but are not limited to, cellulose synthase (celA), Cim1, gamma-zein, globulin-1, maize 19 kD zein (cZ19B1), and the like. Other suitable promoters are the oilseed rape napin gene promoter (U.S. Pat. No. 5,608,152), the Vicia faba USP promoter (Baeumlein et al., Mol Gen Genet, 225 (3), 459 (1991)), the Arabidopsis oleosin promoter (WO 98/45461), the Phaseolus vulgaris phaseolin promoter (U.S. Pat. No. 5,504,200), the Brassica Bce4 promoter (WO 91/13980), the bean arcs promoter, the carrot DcG3 promoter, or the Legumin B4 promoter (LeB4) (Baeumlein et al., Plant Journal, 2 (2), 233 (1992)), and promoters which bring about the seed-specific expression in monocotyledonous plants such as maize, barley, wheat, rye, rice and the like. Advantageous seed-specific promoters are the sucrose binding protein promoter (WO 00/26388), the phaseolin promoter and the napin promoter. Suitable promoters which must be considered are the barley Ipt2 or Ipt1 gene promoter (WO 95/15389 and WO 95/23230), and the promoters described in WO 99/16890 (promoters from the barley hordein gene, the rice glutelin gene, the rice oryzin gene, the rice prolamin gene, the wheat gliadin gene, the wheat glutelin gene, the maize zein gene, the oat glutelin gene, the sorghum kasirin gene and the rye secalin gene). Further suitable promoters are Amy32b, Amy 6-6 and Aleurain (U.S. Pat. No. 5,677,474), Bce4 (oilseed rape) (U.S. Pat. No. 5,530,149), glycinin (soya) (EP 571 741], phosphoenolpyruvate carboxylase (soya) (JP 06/62870), ADR12-2 (soya) (WO 98/08962), isocitrate lyase (oilseed rape) (U.S. Pat. No. 5,689,040]) or α-amylase (barley) (EP 781 8499. Other promoters which are available for the expression of genes in plants are leaf-specific promoters such as those described in DE-A 19 644 478 or light-regulated promoters such as, for example, the pea petE promoter.

[93815] [0251.1.7.17] to [0266.1.7.17] for the disclosure of these paragraphs see [0251.1.7.7] to [0266.1.7.7] above

[93816] An embodiment of the invention relates to a vector where the nucleic acid molecule according to the invention is linked operably to regulatory sequences which permit the expression in a prokaryotic or eukaryotic host. A further embodiment of the invention relates to a vector in which a nucleic acid sequence encoding one of the polypeptides shown in the respective line in Table II, application no. 17, columns 5 or 8, or homologs or fragments thereof, is functionally linked to a targeting sequence such as a plastidial or mitochondrial targeting sequence. A further embodiment of the invention relates to a vector in which a nucleic acid sequence encoding one of the polypeptides shown in the respective line in Table II, application no. 17, columns 5 or 8, or homologs or fragments thereof, is functionally linked to (a) regulatory sequence which permit the expression in an organelle, such as plastids or mitochondria, preferably plastids.

[93817] A further embodiment of the invention relates to a vector which comprises a nucleic acid sequence encoding one of the polypeptides shown in the respective line in Table II, application no. 17, columns 5 or 8, or homologs or fragments thereof, but no additional targeting sequence.

[93818] [0268.1.7.17] to [0273.1.7.17] for the disclosure of these paragraphs see [0268.1.7.7] to [0273.1.7.7] above

[93819] A further object of the invention relates to the use of a nucleic acid construct, e.g. an expression cassette, comprising one or more nucleic acid molecules encoding one or more polypeptides as depicted in the respective line(s) in Table II, application no. 17, columns 5 or 8, or homologs or fragments thereof, or comprising one or more nucleic acid molecules as depicted in the respective line(s) in Table I, application no. 17, columns 5 or 8, preferably the coding region thereof, or homologs or fragments thereof, or comprising a nucleic acid molecule hybridizing therewith for the transformation of a microorganism or a plant cell, plant tissues or a part of a plant

[93820] In doing so, depending on the choice of promoter, the nucleic acid molecules shown in the respective line in Table I, application no. 17, column 5 or 8, preferably the coding region thereof, or homologs or fragments thereof, or the nucleic acid molecules encoding a polypeptide as depicted in the respective line in Table II, application no. 17, column 5 or 8, or homologs or fragments thereof, can be expressed in the whole plant or specifically e.g. in the leaves, in the seeds, the nodules, in roots, in the stem or other parts of the plant. Those transgenic plants overproducing sequences, e.g. as depicted in the respective line in Table I, application no. 17, column 5 or 8, preferably the coding region thereof, or homologs or fragments thereof, the plant cell, plant tissues, plants, the reproductive material thereof, or parts thereof are a further object of the present invention.

[93821] Within the framework of the present invention, the production of the 3,4,5-trihydroxypentanoic acid, erythrol, fructose, fucose, galactinol, galactitol, glucose, glucose-1-phosphate, mannitol, melibiose, myo-inositol, raffinose, saccharic acid, sedoheptulose-7-phosphate, sorbitol, sucrose, trehalose, or verbascose is due to the generation or overexpression of one or more polypeptides as depicted in the respective line(s) in Table II, application no. 17, column 5 or 8, or homologs or fragments thereof, or encoded by the corresponding nucleic acid molecules as depicted in the respective line(s) in Table I, application no. 17, column 5 or 8, preferably the coding region thereof, or homologs or fragments thereof, in the non-human organism according to the invention, advantageously in the transgenic microorganism or plant according to the invention, at least for the duration of at least one plant generation.

[93822] A constitutive expression of the polypeptide as depicted in the respective line in Table II, application no. 17, column 5 or 8, or homologs or fragments thereof, or encoded by the respective nucleic acid molecule as depicted in the respective line in Table I, application no. 17, column 5 or 8, preferably the coding region thereof, or homologs or fragments thereof, may be advantageous. On the other hand, an inducible expression may also appear desirable. Expression of the polypeptide sequences of the invention can be either directed to the cytosol or to the organelles, such as plastids or mitochondria, preferably the plastids of the host cells, preferably the plant cells, or non-targeted.

[93823] for the disclosure of this paragraph see [0278.1.7.7] above

[93824] In a further embodiment the invention relates to a transgenic non-human organisms such as transgenic microorganism or transgenic plant comprising a nucleic acid molecule comprising
[93825] [1) a nucleic acid molecule selected from the group consisting of
   [93826] (a) a nucleic acid molecule encoding a polypeptide shown in Table II, application no. 17, column 5 or 8, preferably shown in Table II A, application no. 17, column 5, or in Table II A, application no. 17, column 8, or in Table II B, application no. 17, column 8, or a homolog or a fragment thereof;
   [93827] (b) a nucleic acid molecule shown in Table I, application no. 17, column 5 or 8, preferably shown in Table I A, application no. 17, column 5, or in Table I A, application no. 17, column 8, or in Table I B, application no. 17, column 8, preferably the coding region thereof, or a homolog or a fragment thereof;
   [93828] (c) a nucleic acid molecule, which, as a result of the degeneracy of the genetic code, can be derived from a polypeptide sequence depicted in column 5 or 8 of Table II, application no. 17, preferably shown in Table II A, application no. 17, column 5, or in Table II A, application no. 17, column 8, or in Table II B, application no. 17, column 8;
   [93829] (d) a nucleic acid molecule having at least 30% identity, preferably at least 40%, 50%, 60%, 70%, 75%, 80%, 85%, 90%, 95%, 96%, 97%, 98%, 99%, 99.5%, with the nucleic acid molecule sequence of a polynucleotide comprising the nucleic acid molecule shown in column 5 or 8 of Table I, application no. 17, preferably shown in Table I A, application no. 17, column 5, or in Table I A, application no. 17, column 8, or in Table I B, application no. 17, column 8, preferably the coding region thereof;
   [93830] (e) a nucleic acid molecule encoding a polypeptide having at least 30% identity, preferably at least 40%, 50% 60%, 70%, 75%, 80%, 85%, 90%, 95%, 96%, 97%, 98%, 99%, 99.5%, identity with the amino acid sequence of the polypeptide encoded by the nucleic acid molecule of (a), (b), (c) or (d);
   [93831] (f) a nucleic acid molecule which hybridizes with a nucleic acid molecule of (a), (b), (c), (d) or (e) under stringent hybridization conditions;
   [93832] (g) a nucleic acid molecule encoding a polypeptide which can be isolated with the aid of monoclonal or polyclonal antibodies made against a polypeptide encoded by one of the nucleic acid molecules of (a), (b), (c), (d), (e) or (f);
   [93833] (h) a nucleic acid molecule encoding a polypeptide comprising the consensus sequence or one or more polypeptide motifs as shown in column 8 of Table IV, application no. 17;
   [93834] (i) a nucleic acid molecule encoding a polypeptide having the activity represented by a respective protein as depicted in column 5 of Table II, application no. 17;
   [93835] (j) a nucleic acid molecule comprising a polynucleotide which is obtained by amplifying a cDNA library or a genomic library using the primers in Table III, application no. 17, column 8;
   [93836] and
   [93837] (k) nucleic acid molecule which is obtainable by screening a suitable nucleic acid library, especially a cDNA library and/or a genomic library, under stringent hybridization conditions with a probe comprising one of the sequences of the nucleic acid molecule of (a), (b), (c), (d), (e), (f), (g), (h), (i) or (j) or with a fragment of at least 15 nt, preferably 20 nt, 30 nt, 50 nt, 100 nt, 200 nt,500 nt, 1000 nt, 1500 nt, 2000 nt or 3000 nt of the nucleic acid molecule characterized in (a), (b), (c), (d), (e), (f), (g), (h), (i) or (j);
   [93838] or a nucleic acid molecule comprising a sequence which is complementary thereto;
      and, if desired
[93839] 2) nucleic acid molecule encoding a transit peptide, preferably encoding a plastidal transit peptide or a mitochondrial transit peptide; which are operable linked;]
   or comprising an expression cassette comprising
[93840] [0) a promoter, preferably a promoter selected from the group consisting of Big35S, PCUbi, Super and USP; and
[93841] 1) a nucleic acid molecule selected from the group consisting of
   [93842] (a) a nucleic acid molecule encoding a polypeptide shown in Table II, application no. 17, column 5 or 8, preferably shown in Table II A, application no. 17, column 5, or in Table II A, application no. 17, column 8, or in Table II B, application no. 17, column 8, or a homolog or a fragment thereof;
   [93843] (b) a nucleic acid molecule shown in Table I, application no. 17, column 5 or 8, preferably shown in Table I A, application no. 17, column 5, or in Table I A, application no. 17, column 8, or in Table I B, application no. 17, column 8, preferably the coding region thereof, or a homolog or a fragment thereof;
   [93844] (c) a nucleic acid molecule, which, as a result of the degeneracy of the genetic code, can be derived from a polypeptide sequence depicted in column 5 or 8 of Table II, application no. 17, preferably shown in Table II A, application no. 17, column 5, or in Table II A, application no. 17, column 8, or in Table II B, application no. 17, column 8;
   [93845] (d) a nucleic acid molecule having at least 30% identity, preferably at least 40%, 50%, 60%, 70%, 75%, 80%, 85%, 90%, 95%, 96%, 97%, 98%, 99%, 99.5%, with the nucleic acid molecule sequence of a polynucleotide comprising the nucleic acid molecule shown in column 5 or 8 of Table I, application no. 17, preferably shown in Table I A, application no. 17, column 5, or in Table I A, application no. 17, column 8, or in Table I B, application no. 17, column 8, preferably the coding region thereof;
   [93846] (e) a nucleic acid molecule encoding a polypeptide having at least 30% identity, preferably at least 40%, 50% 60%, 70%, 75%, 80%, 85%, 90%, 95%, 96%, 97%, 98%, 99%, 99.5%, identity with the amino acid sequence of the polypeptide encoded by the nucleic acid molecule of (a), (b), (c) or (d);
   [93847] (f) a nucleic acid molecule which hybridizes with a nucleic acid molecule of (a), (b), (c), (d) or (e) under stringent hybridization conditions;
   [93848] (g) a nucleic acid molecule encoding a polypeptide which can be isolated with the aid of monoclonal or polyclonal antibodies made against a polypeptide encoded by one of the nucleic acid molecules of (a), (b), (c), (d), (e) or (f);
   [93849] (h) a nucleic acid molecule encoding a polypeptide comprising the consensus sequence or one or more polypeptide motifs as shown in column 8 of Table IV, application no. 17;
   [93850] (i) a nucleic acid molecule encoding a polypeptide having the activity represented by a respective protein as depicted in column 5 of Table II, application no. 17;
   [93851] (j) a nucleic acid molecule comprising a polynucleotide which is obtained by amplifying a cDNA library or a genomic library using the primers in Table III, application no. 17, column 8;
   [93852] and
   [93853] (k) nucleic acid molecule which is obtainable by screening a suitable nucleic acid library, especially a cDNA library and/or a genomic library, under stringent hybridization conditions with a probe comprising one of the sequences of the nucleic acid molecule of (a), (b), (c), (d), (e), (f), (g), (h), (i) or (j) or with a fragment of at least 15 nt, preferably 20 nt, 30 nt, 50 nt, 100 nt, 200 nt,500 nt, 1000 nt, 1500 nt, 2000 nt or 3000 nt of the nucleic acid molecule characterized in (a), (b), (c), (d), (e), (f), (g), (h), (i) or (j);
   [93854] or a nucleic acid molecule comprising a sequence which is complementary thereto;
      and, if desired
[93855] 2) nucleic acid molecule encoding a transit peptide, preferably encoding a plastidal transit peptide or a mitochondrial transit peptide; which are operable linked;]
   or comprising or being transformed by a vector comprising
[93856] [1) a nucleic acid molecule selected from the group consisting of
   [93857] (a) a nucleic acid molecule encoding a polypeptide shown in Table II, application no. 17, column 5 or 8, preferably shown in Table II A, application no. 17, column 5, or in Table II A, application no. 17, column 8, or in Table II B, application no. 17, column 8, or a homolog or a fragment thereof;
   [93858] (b) a nucleic acid molecule shown in Table I, application no. 17, column 5 or 8, preferably shown in Table I A, application no. 17, column 5, or in Table I A, application no. 17, column 8, or in Table I B, application no. 17, column 8, preferably the coding region thereof, or a homolog or a fragment thereof;
   [93859] (c) a nucleic acid molecule, which, as a result of the degeneracy of the genetic code, can be derived from a polypeptide sequence depicted in column 5 or 8 of Table II, application no. 17, preferably shown in Table II A, application no. 17, column 5, or in Table II A, application no. 17, column 8, or in Table II B, application no. 17, column 8;
   [93860] (d) a nucleic acid molecule having at least 30% identity, preferably at least 40%, 50%, 60%, 70%, 75%, 80%, 85%, 90%, 95%, 96%, 97%, 98%, 99%, 99.5%, with the nucleic acid molecule sequence of a polynucleotide comprising the nucleic acid molecule shown in column 5 or 8 of Table I, application no. 17, preferably shown in Table I A, application no. 17, column 5, or in Table I A, application no. 17, column 8, or in Table I B, application no. 17, column 8, preferably the coding region thereof;
   [93861] (e) a nucleic acid molecule encoding a polypeptide having at least 30% identity, preferably at least 40%, 50% 60%, 70%, 75%, 80%, 85%, 90%, 95%, 96%, 97%, 98%, 99%, 99.5%, identity with the amino acid sequence of the polypeptide encoded by the nucleic acid molecule of (a), (b), (c) or (d);
   [93862] (f) a nucleic acid molecule which hybridizes with a nucleic acid molecule of (a), (b), (c), (d) or (e) under stringent hybridization conditions;
   [93863] (g) a nucleic acid molecule encoding a polypeptide which can be isolated with the aid of monoclonal or polyclonal antibodies made against a polypeptide encoded by one of the nucleic acid molecules of (a), (b), (c), (d), (e) or (f);
   [93864] (h) a nucleic acid molecule encoding a polypeptide comprising the consensus sequence or one or more polypeptide motifs as shown in column 8 of Table IV, application no. 17;
   [93865] (i) a nucleic acid molecule encoding a polypeptide having the activity represented by a respective protein as depicted in column 5 of Table II, application no. 17;
   [93866] (j) a nucleic acid molecule comprising a polynucleotide which is obtained by amplifying a cDNA library or a genomic library using the primers in Table III, application no. 17, column 8;
   [93867] and
   [93868] (k) nucleic acid molecule which is obtainable by screening a suitable nucleic acid library, especially a cDNA library and/or a genomic library, under stringent hybridization conditions with a probe comprising one of the sequences of the nucleic acid molecule of (a), (b), (c), (d), (e), (f), (g), (h), (i) or (j) or with a fragment of at least 15 nt, preferably 20 nt, 30 nt, 50 nt, 100 nt, 200 nt,500 nt, 1000 nt, 1500 nt, 2000 nt or 3000 nt of the nucleic acid molecule characterized in (a), (b), (c), (d), (e), (f), (g), (h), (i) or (j);
   [93869] or a nucleic acid molecule comprising a sequence which is complementary thereto;]
      as well as respective transgenic cells, tissue, parts of such non-human organism, e.g. plant cells, plant tissue, part of plants, like leaves, roots, stems, blossoms, seeds, fruits, pollen and the like.
      (All the references to Tables I to IV are references to the corresponding lines of Tables I to IV.)

[93870] In a preferred embodiment of said transgenic non-human organism said nucleic acid molecule according to 1 (a), (b), (c), (d), (e), (f), (g), (h), (i), (j) or (k) encodes a polypeptide which has the activity of the respective polypeptide represented by a protein comprising a polypeptide as depicted in the respective line in column 5 of Table II, application no. 17.

[93871] In another preferred embodiment of said transgenic non-human organism said nucleic acid molecule according to 1 (a), (b), (c), (d), (e), (f), (g), (h), (i), (j) or (k) confers a generation or an increase of the respective fine chemical in a non-human organism or a part thereof as compared to a corresponding wild-type non-human organism or part thereof.

[93872] In another preferred embodiment of said transgenic non-human organism said nucleic acid molecule according to 1 (a), (b), (c), (d), (e), (f), (g), (h), (i), (j) or (k) encodes a polypeptide which has the activity of the respective polypeptide represented by a protein as depicted in the respective line in column 5 of Table II application no. 17 and confers a generation or an increase of the respective fine chemical in a non-human organism or a part thereof as compared to a corresponding wild-type non-human organism or part thereof.

[93873] In another embodiment of said transgenic non-human organism the expression cassette comprises 2) a nucleic acid molecule encoding a transit peptide, preferably encoding a plastidal transit peptide, especially in case in column 6 of Table I, application no. 17, in the same line as of the respective nucleic acid molecule according to 1) “plastidic” is depicted, or encoding a mitochondrial transit peptide, especially in case in column 6 of Table I, application no. 17, in the same line as of the respective nucleic acid molecule according to 1) “mitochondric” is depicted.

[93874] In another embodiment of said transgenic non-human organism the expression cassette does not comprise 2) a nucleic acid molecule encoding a transit peptide, especially in case in column 6 of Table I, application no. 17, in the same line as of the respective nucleic acid molecule according to 1) “non-targeted” is depicted.

[93875] In another embodiment of said transgenic non-human organism said vector comprises beneath said nucleic acid molecule according to 1 (a), (b), (c), (d), (e), (f), (g), (h), (i), (j) or (k), a promoter, preferably a promoter selected from the group consisting of Big35S, PCUbi, Super and USP, which are operable linked.

[93876] In a preferred embodiment of said transgenic non-human organism said vector comprises beneath said nucleic acid molecule according to 1 (a), (b), (c), (d), (e), (f), (g), (h), (i), (j) or (k), a promoter, preferably a promoter selected from the group consisting of Big35S, PCUbi, Super and USP, which are operable linked; and said nucleic acid molecule according to 1 (a), (b), (c), (d), (e), (f), (g), (h), (i), (j) or (k) encodes a polypeptide which has the activity of the respective polypeptide represented by a protein comprising a polypeptide as depicted in the respective line in column 5 of Table II, application no. 17.

[93877] In another preferred embodiment of said transgenic non-human organism said vector comprises beneath said nucleic acid molecule according to 1 (a), (b), (c), (d), (e), (f), (g), (h), (i), (j) or (k), a promoter, preferably a promoter selected from the group consisting of Big35S, PCUbi, Super and USP, which are operable linked; and said nucleic acid molecule according to 1 (a), (b), (c), (d), (e), (f), (g), (h), (i), (j) or (k) confers a generation or an increase of the respective fine chemical in a non-human organism or a part thereof as compared to a corresponding wild-type non-human organism or part thereof.

[93878] In another preferred embodiment of said transgenic non-human organism said vector comprises beneath said nucleic acid molecule according to 1 (a), (b), (c), (d), (e), (f), (g), (h), (i), (j) or (k), a promoter, preferably a promoter selected from the group consisting of Big35S, PCUbi, Super and USP, which are operable linked; and said nucleic acid molecule according to 1 (a), (b), (c), (d), (e), (f), (g), (h), (i), (j) or (k) encodes a polypeptide which has the activity of the respective polypeptide represented by a protein as depicted in the respective line in column 5 of Table II, application no. 17, and confers a generation or an increase of the respective fine chemical in a non-human organism or a part thereof as compared to a corresponding wild-type non-human organism or part thereof.

[93879] In another embodiment of said transgenic non-human organism said vector comprises beneath said nucleic acid molecule according to 1 (a), (b), (c), (d), (e), (f), (g), (h), (i), (j) or (k), a nucleic acid molecule encoding a transit peptide, preferably encoding a plastidal transit peptide, especially in case in column 6 of Table I, application no. 17, in the same line as of the respective nucleic acid molecule according to 1) “plastidic” is depicted, or encoding a mitochondrial transit peptide, especially in case in column 6 of Table I, application no. 17, in the same line as of the respective nucleic acid molecule according to 1) “mitochondric” is depicted, which are operable linked.

[93880] In another embodiment of said transgenic non-human organism said vector does not comprise beneath said nucleic acid molecule according to 1 (a), (b), (c), (d), (e), (f), (g), (h), (i), (j) or (k), a nucleic acid molecule encoding a transit peptide in case in column 6 of Table I, application no. 17, in the same line as of the respective nucleic acid molecule according to 1) “non-targeted” is depicted, which are operable linked.

[93881] In another embodiment of said transgenic non-human organism said vector comprises beneath said nucleic acid molecule according to 1 (a), (b), (c), (d), (e), (f), (g), (h), (i), (j) or (k), and a promoter, preferably a promoter selected from the group consisting of Big35S, PCUbi, Super and USP; a nucleic acid molecule encoding a transit peptide, preferably encoding a plastidal transit peptide, especially in case in column 6 of Table I, application no. 17, in the same line as of the respective nucleic acid molecule according to 1) “plastidic” is depicted, or encoding a mitochondrial transit peptide, especially in case in column 6 of Table I, application no. 17, in the same line as of the respective nucleic acid molecule according to 1) “mitochondric” is depicted, which are operable linked.

[93882] In another embodiment of said transgenic non-human organism said vector does not comprise beneath said nucleic acid molecule according to 1 (a), (b), (c), (d), (e), (f), (g), (h), (i), (j) or (k), and a promoter, preferably a promoter selected from the group consisting of Big35S, PCUbi, Super and USP; a nucleic acid molecule encoding a transit peptide, especially in case in column 6 of Table I, application no. 17, in the same line as of the respective nucleic acid molecule according to 1) “non-targeted” is depicted, which are operable linked.

[93883] In another embodiment of said transgenic non-human organism said vector comprises beneath said nucleic acid molecule according to 1 (a), (b), (c), (d), (e), (f), (g), (h), (i), (j) or (k), and a promoter, preferably a promoter selected from the group consisting of Big35S, PCUbi, Super and USP; a nucleic acid molecule encoding a transit peptide, preferably encoding a plastidal transit peptide, especially in case in column 6 of Table I, application no. 17, in the same line as of the respective nucleic acid molecule according to 1) “plastidic” is depicted, or encoding a mitochondrial transit peptide, especially in case in column 6 of Table I, application no. 17, in the same line as of the respective nucleic acid molecule according to 1) “mitochondric” is depicted, which are operable linked; and wherein said nucleic acid molecule according to 1 (a), (b), (c), (d), (e), (f), (g), (h), (i), (j) or (k) encodes a polypeptide which has the activity of the respective polypeptide represented by a protein comprising a polypeptide as depicted in the respective line in column 5 of Table II, application no. 17.

[93884] In another embodiment of said transgenic non-human organism said vector does not comprise beneath said nucleic acid molecule according to 1 (a), (b), (c), (d), (e), (f), (g), (h), (i), (j) or (k), and a promoter, preferably a promoter selected from the group consisting of Big35S, PCUbi, Super and USP; a nucleic acid molecule encoding a transit peptide, especially in case in column 6 of Table I, application no. 17, in the same line as of the respective nucleic acid molecule according to 1) “non-targeted” is depicted, which are operable linked; and wherein said nucleic acid molecule according to 1 (a), (b), (c), (d), (e), (f), (g), (h), (i), (j) or (k) encodes a polypeptide which has the activity of the respective polypeptide represented by a protein comprising a polypeptide as depicted in the respective line in column 5 of Table II, application no. 17.

[93885] In another embodiment of said transgenic non-human organism said vector comprises beneath said nucleic acid molecule according to 1 (a), (b), (c), (d), (e), (f), (g), (h), (i), (j) or (k), and a promoter, preferably a promoter selected from the group consisting of Big35S, PCUbi, Super and USP; a nucleic acid molecule encoding a transit peptide, preferably encoding a plastidal transit peptide, especially in case in column 6 of Table I, application no. 17, in the same line as of the respective nucleic acid molecule according to 1) “plastidic” is depicted, or encoding a mitochondrial transit peptide, especially in case in column 6 of Table I, application no. 17, in the same line as of the respective nucleic acid molecule according to 1) “mitochondric” is depicted, which are operable linked; and wherein said nucleic acid molecule according to 1 (a), (b), (c), (d), (e), (f), (g), (h), (i), (j) or (k) confers a generation or an increase of the respective fine chemical in a non-human organism or a part thereof as compared to a corresponding wild-type non-human organism or part thereof.

[93886] In another embodiment of said transgenic non-human organism said vector does not comprise beneath said nucleic acid molecule according to 1 (a), (b), (c), (d), (e), (f), (g), (h), (i), (j) or (k), and a promoter, preferably a promoter selected from the group consisting of Big35S, PCUbi, Super and USP; a nucleic acid molecule encoding a transit peptide, especially in case in column 6 of Table I, application no. 17, in the same line as of the respective nucleic acid molecule according to 1) “non-targeted” is depicted, which are operable linked; and wherein said nucleic acid molecule according to 1 (a), (b), (c), (d), (e), (f), (g), (h), (i), (j) or (k) confers a generation or an increase of the respective fine chemical in a non-human organism or a part thereof as compared to a corresponding wild-type non-human organism or part thereof.

[93887] In another embodiment of said transgenic non-human organism said vector comprises beneath said nucleic acid molecule according to 1 (a), (b), (c), (d), (e), (f), (g), (h), (i), (j) or (k), and a promoter, preferably a promoter selected from the group consisting of Big35S, PCUbi, Super and USP; a nucleic acid molecule encoding a transit peptide, preferably encoding a plastidal transit peptide, especially in case in column 6 of Table I, application no. 17, in the same line as of the respective nucleic acid molecule according to 1) “plastidic” is depicted, or encoding a mitochondrial transit peptide, especially in case in column 6 of Table I, application no. 17, in the same line as of the respective nucleic acid molecule according to 1) “mitochondric” is depicted, which are operable linked; and wherein said nucleic acid molecule according to 1 (a), (b), (c), (d), (e), (f), (g), (h), (i), (j) or (k) encodes a polypeptide which has the activity of the respective polypeptide represented by a protein as depicted in the respective line in column 5 of Table II application no. 17 and confers a generation or an increase of the respective fine chemical in a non-human organism or a part thereof as compared to a corresponding wild-type non-human organism or part thereof.

[93888] In another embodiment of said transgenic non-human organism said vector does not comprise beneath said nucleic acid molecule according to 1 (a), (b), (c), (d), (e), (f), (g), (h), (i), (j) or (k), and a promoter, preferably a promoter selected from the group consisting of Big35S, PCUbi, Super and USP; a nucleic acid molecule encoding a transit peptide, especially in case in column 6 of Table I, application no. 17, in the same line as of the respective nucleic acid molecule according to 1) “non-targeted” is depicted, which are operable linked; and wherein said nucleic acid molecule according to 1 (a), (b), (c), (d), (e), (f), (g), (h), (i), (j) or (k) encodes a polypeptide which has the activity of the respective polypeptide represented by a protein as depicted in the respective line in column 5 of Table II application no. 17 (in the same line) and confers a generation or an increase of the respective fine chemical in a non-human organism or a part thereof as compared to a corresponding wild-type non-human organism or part thereof.

[93889] In a preferred embodiment of said transgenic non-human organism said nucleic acid molecule according to 1 (a), (b), (c), (d), (e), (f), (g), (h), (i), (j) or (k), said promoter and optionally said nucleic acid molecule encoding a transit peptide are encompassed in an expression cassette in said vector. Accordingly an embodiment the invention provides a non-human organism comprising or being transformed by a vector comprising an expression cassette comprising said nucleic acid molecule according to 1 (a), (b), (c), (d), (e), (f), (g), (h), (i), (j) or (k), said promoter and optionally said a nucleic acid molecule encoding a transit peptide, operable linked. Said expression cassette may encompass a terminator, too.

[93890] In a further embodiment the invention relates to a transgenic non-human organisms such as transgenic microorganism or transgenic plant comprising a nucleic acid molecule comprising
[93891] [1) a nucleic acid molecule selected from the group consisting of
   [93892] (a) a nucleic acid molecule encoding a polypeptide shown in Table II, application no. 17, column 5 or 8, preferably shown in Table II A, application no. 17, column 5, or in Table II A, application no. 17, column 8, or in Table II B, application no. 17, column 8, or a homolog or a fragment thereof;
   [93893] (b) a nucleic acid molecule shown in Table I, application no. 17, column 5 or 8, preferably shown in Table I A, application no. 17, column 5, or in Table I A, application no. 17, column 8, or in Table I B, application no. 17, column 8, preferably the coding region thereof, or a homolog or a fragment thereof;
   [93894] (c) a nucleic acid molecule, which, as a result of the degeneracy of the genetic code, can be derived from a polypeptide sequence depicted in column 5 or 8 of Table II, application no. 17, preferably shown in Table II A, application no. 17, column 5, or in Table II A, application no. 17, column 8, or in Table II B, application no. 17, column 8;
   [93895] (d) a nucleic acid molecule having at least 30% identity, preferably at least 40%, 50%, 60%, 70%, 75%, 80%, 85%, 90%, 95%, 96%, 97%, 98%, 99%, 99.5%, with the nucleic acid molecule sequence of a polynucleotide comprising the nucleic acid molecule shown in column 5 or 8 of Table I, application no. 17, preferably shown in Table I A, application no. 17, column 5, or in Table I A, application no. 17, column 8, or in Table I B, application no. 17, column 8, preferably the coding region thereof;
   [93896] (e) a nucleic acid molecule encoding a polypeptide having at least 30% identity, preferably at least 40%, 50% 60%, 70%, 75%, 80%, 85%, 90%, 95%, 96%, 97%, 98%, 99%, 99.5%, identity with the amino acid sequence of the polypeptide encoded by the nucleic acid molecule of (a), (b), (c) or (d);
   [93897] (f) a nucleic acid molecule which hybridizes with a nucleic acid molecule of (a), (b), (c), (d) or (e) under stringent hybridization conditions;
   [93898] (g) a nucleic acid molecule encoding a polypeptide which can be isolated with the aid of monoclonal or polyclonal antibodies made against a polypeptide encoded by one of the nucleic acid molecules of (a), (b), (c), (d), (e) or (f);
   [93899] (h) a nucleic acid molecule encoding a polypeptide comprising the consensus sequence or one or more polypeptide motifs as shown in column 8 of Table IV, application no. 17;
   [93900] (i) a nucleic acid molecule encoding a polypeptide having the activity represented by a respective protein as depicted in column 5 of Table II, application no. 17;
   [93901] (j) a nucleic acid molecule comprising a polynucleotide which is obtained by amplifying a cDNA library or a genomic library using the primers in Table III, application no. 17, column 8;
   [93902] and
   [93903] (k) nucleic acid molecule which is obtainable by screening a suitable nucleic acid library, especially a cDNA library and/or a genomic library, under stringent hybridization conditions with a probe comprising one of the sequences of the nucleic acid molecule of (a), (b), (c), (d), (e), (f), (g), (h), (i) or (j) or with a fragment of at least 15 nt, preferably 20 nt, 30 nt, 50 nt, 100 nt, 200 nt,500 nt, 1000 nt, 1500 nt, 2000 nt or 3000 nt of the nucleic acid molecule characterized in (a), (b), (c), (d), (e), (f), (g), (h), (i) or (j);
   [93904] or a nucleic acid molecule comprising a sequence which is complementary thereto;
      and, if desired
[93905] 2) nucleic acid molecule encoding a transit peptide, preferably encoding a plastidal transit peptide or a mitochondrial transit peptide;
   which are operable linked;]
   or comprising an expression cassette comprising
[93906] [0) a promoter, preferably a promoter selected from the group consisting of Big35S, PCUbi, Super and USP; and
[93907] 1) a nucleic acid molecule selected from the group consisting of
   [93908] (a) a nucleic acid molecule encoding a polypeptide shown in Table II, application no. 17, column 5 or 8, preferably shown in Table II A, application no. 17, column 5, or in Table II A, application no. 17, column 8, or in Table II B, application no. 17, column 8, or a homolog or a fragment thereof;
   [93909] (b) a nucleic acid molecule shown in Table I, application no. 17, column 5 or 8, preferably shown in Table I A, application no. 17, column 5, or in Table I A, application no. 17, column 8, or in Table I B, application no. 17, column 8, preferably the coding region thereof, or a homolog or a fragment thereof;
   [93910] (c) a nucleic acid molecule, which, as a result of the degeneracy of the genetic code, can be derived from a polypeptide sequence depicted in column 5 or 8 of Table II, application no. 17, preferably shown in Table II A, application no. 17, column 5, or in Table II A, application no. 17, column 8, or in Table II B, application no. 17, column 8;
   [93911] (d) a nucleic acid molecule having at least 30% identity, preferably at least 40%, 50%, 60%, 70%, 75%, 80%, 85%, 90%, 95%, 96%, 97%, 98%, 99%, 99.5%, with the nucleic acid molecule sequence of a polynucleotide comprising the nucleic acid molecule shown in column 5 or 8 of Table I, application no. 17, preferably shown in Table I A, application no. 17, column 5, or in Table I A, application no. 17, column 8, or in Table I B, application no. 17, column 8, preferably the coding region thereof;
   [93912] (e) a nucleic acid molecule encoding a polypeptide having at least 30% identity, preferably at least 40%, 50% 60%, 70%, 75%, 80%, 85%, 90%, 95%, 96%, 97%, 98%, 99%, 99.5%, identity with the amino acid sequence of the polypeptide encoded by the nucleic acid molecule of (a), (b), (c) or (d);
   [93913] (f) a nucleic acid molecule which hybridizes with a nucleic acid molecule of (a), (b), (c), (d) or (e) under stringent hybridization conditions;
   [93914] (g) a nucleic acid molecule encoding a polypeptide which can be isolated with the aid of monoclonal or polyclonal antibodies made against a polypeptide encoded by one of the nucleic acid molecules of (a), (b), (c), (d), (e) or (f);
   [93915] (h) a nucleic acid molecule encoding a polypeptide comprising the consensus sequence or one or more polypeptide motifs as shown in column 8 of Table IV, application no. 17;
   [93916] (i) a nucleic acid molecule encoding a polypeptide having the activity represented by a respective protein as depicted in column 5 of Table II, application no. 17;
   [93917] (j) a nucleic acid molecule comprising a polynucleotide which is obtained by amplifying a cDNA library or a genomic library using the primers in Table III, application no. 17, column 8;
   [93918] and
   [93919] (k) nucleic acid molecule which is obtainable by screening a suitable nucleic acid library, especially a cDNA library and/or a genomic library, under stringent hybridization conditions with a probe comprising one of the sequences of the nucleic acid molecule of (a), (b), (c), (d), (e), (f), (g), (h), (i) or (j) or with a fragment of at least 15 nt, preferably 20 nt, 30 nt, 50 nt, 100 nt, 200 nt,500 nt, 1000 nt, 1500 nt, 2000 nt or 3000 nt of the nucleic acid molecule characterized in (a), (b), (c), (d), (e), (f), (g), (h), (i) or (j);
   [93920] or a nucleic acid molecule comprising a sequence which is complementary thereto;]
      and, if desired
[93921] 2) nucleic acid molecule encoding a transit peptide, preferably encoding a plastidal transit peptide or a mitochondrial transit peptide; which are operable linked;]
   or comprising or being transformed by a vector comprising
   [1) a nucleic acid molecule selected from the group consisting of
   [93922] (a) a nucleic acid molecule encoding a polypeptide shown in Table II, application no. 17, column 5 or 8, preferably shown in Table II A, application no. 17, column 5, or in Table II A, application no. 17, column 8, or in Table II B, application no. 17, column 8, or a homolog or a fragment thereof;
   [93923] (b) a nucleic acid molecule shown in Table I, application no. 17, column 5 or 8, preferably shown in Table I A, application no. 17, column 5, or in Table I A, application no. 17, column 8, or in Table I B, application no. 17, column 8, preferably the coding region thereof, or a homolog or a fragment thereof;
   [93924] (c) a nucleic acid molecule, which, as a result of the degeneracy of the genetic code, can be derived from a polypeptide sequence depicted in column 5 or 8 of Table II, application no. 17, preferably shown in Table II A, application no. 17, column 5, or in Table II A, application no. 17, column 8, or in Table II B, application no. 17, column 8;
   [93925] (d) a nucleic acid molecule having at least 30% identity, preferably at least 40%, 50%, 60%, 70%, 75%, 80%, 85%, 90%, 95%, 96%, 97%, 98%, 99%, 99.5%, with the nucleic acid molecule sequence of a polynucleotide comprising the nucleic acid molecule shown in column 5 or 8 of Table I, application no. 17, preferably shown in Table I A, application no. 17, column 5, or in Table I A, application no. 17, column 8, or in Table I B, application no. 17, column 8, preferably the coding region thereof;
   [93926] (e) a nucleic acid molecule encoding a polypeptide having at least 30% identity, preferably at least 40%, 50% 60%, 70%, 75%, 80%, 85%, 90%, 95%, 96%, 97%, 98%, 99%, 99.5%, identity with the amino acid sequence of the polypeptide encoded by the nucleic acid molecule of (a), (b), (c) or (d);
   [93927] (f) a nucleic acid molecule which hybridizes with a nucleic acid molecule of (a), (b), (c), (d) or (e) under stringent hybridization conditions;
   [93928] (g) a nucleic acid molecule encoding a polypeptide which can be isolated with the aid of monoclonal or polyclonal antibodies made against a polypeptide encoded by one of the nucleic acid molecules of (a), (b), (c), (d), (e) or (f);
   [93929] (h) a nucleic acid molecule encoding a polypeptide comprising the consensus sequence or one or more polypeptide motifs as shown in column 8 of Table IV, application no. 17;
   [93930] (i) a nucleic acid molecule encoding a polypeptide having the activity represented by a respective protein as depicted in column 5 of Table II, application no. 17;
   [93931] (j) a nucleic acid molecule comprising a polynucleotide which is obtained by amplifying a cDNA library or a genomic library using the primers in Table III, application no. 17, column 8;
   [93932] and
   [93933] (k) nucleic acid molecule which is obtainable by screening a suitable nucleic acid library, especially a cDNA library and/or a genomic library, under stringent hybridization conditions with a probe comprising one of the sequences of the nucleic acid molecule of (a), (b), (c), (d), (e), (f), (g), (h), (i) or (j) or with a fragment of at least 15 nt, preferably 20 nt, 30 nt, 50 nt, 100 nt, 200 nt,500 nt, 1000 nt, 1500 nt, 2000 nt or 3000 nt of the nucleic acid molecule characterized in (a), (b), (c), (d), (e), (f), (g), (h), (i) or (j);
   [93934] or a nucleic acid molecule comprising a sequence which is complementary thereto;]
      whereby, preferably, the nucleic acid molecule according to 1 (a), (b), (c), (d), (e), (f), (g), (h), (i), (j) or (k) distinguishes over the sequence depicted in Table I A and/or I B, application no. 17, column 5 or 8, or the coding regions thereof, by one or more nucleotides (especially but not exceeding 5%, preferably 4%, 3%, 2%, 1%, 0.5%, 0.2% or 0.1%). In an embodiment, the nucleic acid molecule of the invention does not consist of the sequence shown in Table I A and/or I B, application no. 17, column 5 or 8, or the coding region thereof. In another embodiment, the nucleic acid molecule of the present invention, preferably the coding region thereof, is at least 30%, 40%, 50%, 60%, 70%, 80%, 90%, 95% identical but less than 100%, 99.999%, 99.99%, 99.9%, 99%, 98%, 97%, 96% or 95% identical to the sequence shown in Table I A and/or I B, application no. 17, column 5 or 8, or the coding region thereof, respectively. In a further embodiment the nucleic acid molecule does not encode the polypeptide sequence shown in Table II A and/or II B, application no. 17, column 5 or 8 but homologs thereof. Accordingly, in one embodiment, the nucleic acid molecule of the present invention encodes in one embodiment a polypeptide which differs at least in one or more amino acids (especially but not exceeding 5%, preferably 4%, 3%, 2%, 1%, 0.5%, 0.2% or 0.1%) from the polypeptide shown in Table II, application no. 17, column 5 or 8 and does not encode a protein of the sequence shown in Table II A and/or II B, application no. 17, column 5 or 8. Accordingly, in one embodiment, the protein encoded by a sequence of a nucleic acid according to 1 (a), (b), (c), (d), (e), (f), (g), (h), (i), (j) or (k) does not consist of the sequence shown in Table I A and/or I B, application no. 17, column 5 or 8, or the coding region thereof. In a further embodiment, the protein of the present invention is at least 30%, 40%, 50%, 60%, 70%, 80%, 90%, 95% identical to protein sequence depicted in Table II A and/or II B, application no. 17, column 5 or 8 but less than 100%, preferably less than 99.999%, 99.99%, 99.9%, 99%, 98%, 97%, 96% or 95% identical to the sequence shown in Table II A and/or II B, application no. 17, column 5 or 8; as well as respective transgenic cells, tissue, parts of such non-human organism, e.g. plant cells, plant tissue, part of plants, like leaves, roots, stems, blossoms, seeds, fruits, pollen and the like.
      (All the references to Tables I to IV are references to the corresponding lines of Tables I to IV.)

[93935] In a preferred embodiment of said transgenic non-human organism said nucleic acid molecule according to 1 (a), (b), (c), (d), (e), (f), (g), (h), (i), (j) or (k) encodes a polypeptide which has the activity of the respective polypeptide represented by a protein comprising a polypeptide as depicted in the respective line in column 5 of Table II, application no. 17.

[93936] In another preferred embodiment of said transgenic non-human organism said nucleic acid molecule according to 1 (a), (b), (c), (d), (e), (f), (g), (h), (i), (j) or (k) confers a generation or an increase of the respective fine chemical in a non-human organism or a part thereof as compared to a corresponding wild-type non-human organism or part thereof.

[93937] In another preferred embodiment of said transgenic non-human organism said nucleic acid molecule according to 1 (a), (b), (c), (d), (e), (f), (g), (h), (i), (j) or (k) encodes a polypeptide which has the activity of the respective polypeptide represented by a protein as depicted in the respective line in column 5 of Table II application no. 17 and confers a generation or an increase of the respective fine chemical in a non-human organism or a part thereof as compared to a corresponding wild-type non-human organism or part thereof.

[93938] In another embodiment of said transgenic non-human organism the expression cassette comprises 2) a nucleic acid molecule encoding a transit peptide, preferably encoding a plastidal transit peptide, especially in case in column 6 of Table I, application no. 17, in the same line as of the respective nucleic acid molecule according to 1) “plastidic” is depicted, or encoding a mitochondrial transit peptide, especially in case in column 6 of Table I, application no. 17, in the same line as of the respective nucleic acid molecule according to 1) “mitochondric” is depicted.

[93939] In another embodiment thereof the expression cassette does not comprise 2) a nucleic acid molecule encoding a transit peptide, especially in case in column 6 of Table I, application no. 17, in the same line as of the respective nucleic acid molecule according to 1) “non-targeted” is depicted.

[93940] In another embodiment of said transgenic non-human organism said vector comprises beneath said nucleic acid molecule according to 1 (a), (b), (c), (d), (e), (f), (g), (h), (i), (j) or (k), a promoter, preferably a promoter selected from the group consisting of Big35S, PCUbi, Super and USP, which are operable linked.

[93941] In a preferred embodiment of said transgenic non-human organism said vector comprises beneath said nucleic acid molecule according to 1 (a), (b), (c), (d), (e), (f), (g), (h), (i), (j) or (k), a promoter, preferably a promoter selected from the group consisting of Big35S, PCUbi, Super and USP, which are operable linked; and said nucleic acid molecule according to 1 (a), (b), (c), (d), (e), (f), (g), (h), (i), (j) or (k) encodes a polypeptide which has the activity of the respective polypeptide represented by a protein comprising a polypeptide as depicted in the respective line in column 5 of Table II, application no. 17.

[93942] In another preferred embodiment of said transgenic non-human organism said vector comprises beneath said nucleic acid molecule according to 1 (a), (b), (c), (d), (e), (f), (g), (h), (i), (j) or (k), a promoter, preferably a promoter selected from the group consisting of Big35S, PCUbi, Super and USP, which are operable linked; and said nucleic acid molecule according to 1 (a), (b), (c), (d), (e), (f), (g), (h), (i), (j) or (k) confers a generation or an increase of the respective fine chemical in a non-human organism or a part thereof as compared to a corresponding wild-type non-human organism or part thereof.

[93943] In another preferred embodiment of said transgenic non-human organism said vector comprises beneath said nucleic acid molecule according to 1 (a), (b), (c), (d), (e), (f), (g), (h), (i), (j) or (k), a promoter, preferably a promoter selected from the group consisting of Big35S, PCUbi, Super and USP, which are operable linked; and said nucleic acid molecule according to 1 (a), (b), (c), (d), (e), (f), (g), (h), (i), (j) or (k) encodes a polypeptide which has the activity of the respective polypeptide represented by a protein as depicted in the same line in column 5 of Table II, application no. 17, and confers a generation or an increase of the respective fine chemical in a non-human organism or a part thereof as compared to a corresponding wild-type non-human organism or part thereof.

[93944] In another embodiment of said transgenic non-human organism said vector comprises beneath said nucleic acid molecule according to 1 (a), (b), (c), (d), (e), (f), (g), (h), (i), (j) or (k), a nucleic acid molecule encoding a transit peptide, preferably encoding a plastidal transit peptide, especially in case in column 6 of Table I, application no. 17, in the same line as of the respective nucleic acid molecule according to 1) “plastidic” is depicted, or encoding a mitochondrial transit peptide, especially in case in column 6 of Table I, application no. 17, in the same line as of the respective nucleic acid molecule according to 1) “mitochondric” is depicted, which are operable linked.

[93945] In another embodiment of said transgenic non-human organism said vector does not comprise beneath said nucleic acid molecule according to 1 (a), (b), (c), (d), (e), (f), (g), (h), (i), (j) or (k), a nucleic acid molecule encoding a transit peptide in case in column 6 of Table I, application no. 17, in the same line as of the respective nucleic acid molecule according to 1) “non-targeted” is depicted, which are operable linked.

[93946] In another embodiment of said transgenic non-human organism said vector comprises beneath said nucleic acid molecule according to 1 (a), (b), (c), (d), (e), (f), (g), (h), (i), (j) or (k), and a promoter, preferably a promoter selected from the group consisting of Big35S, PCUbi, Super and USP; a nucleic acid molecule encoding a transit peptide, preferably encoding a plastidal transit peptide, especially in case in column 6 of Table I, application no. 17, in the same line as of the respective nucleic acid molecule according to 1) “plastidic” is depicted, or encoding a mitochondrial transit peptide, especially in case in column 6 of Table I, application no. 17, in the same line as of the respective nucleic acid molecule according to 1) “mitochondric” is depicted, which are operable linked.

[93947] In another embodiment of said transgenic non-human organism said vector does not comprise beneath said nucleic acid molecule according to 1 (a), (b), (c), (d), (e), (f), (g), (h), (i), (j) or (k), and a promoter, preferably a promoter selected from the group consisting of Big35S, PCUbi, Super and USP; a nucleic acid molecule encoding a transit peptide, especially in case in column 6 of Table I, application no. 17, in the same line as of the respective nucleic acid molecule according to 1) “non-targeted” is depicted, which are operable linked.

[93948] In another embodiment of said transgenic non-human organism said vector comprises beneath said nucleic acid molecule according to 1 (a), (b), (c), (d), (e), (f), (g), (h), (i), (j) or (k), and a promoter, preferably a promoter selected from the group consisting of Big35S, PCUbi, Super and USP; a nucleic acid molecule encoding a transit peptide, preferably encoding a plastidal transit peptide, especially in case in column 6 of Table I, application no. 17, in the same line as of the respective nucleic acid molecule according to 1) “plastidic” is depicted, or encoding a mitochondrial transit peptide, especially in case in column 6 of Table I, application no. 17, in the same line as of the respective nucleic acid molecule according to 1) “mitochondric” is depicted, which are operable linked; and wherein said nucleic acid molecule according to 1 (a), (b), (c), (d), (e), (f), (g), (h), (i), (j) or (k) encodes a polypeptide which has the activity of the respective polypeptide represented by a protein comprising a polypeptide as depicted in the respective line in column 5 of Table II, application no. 17.

[93949] In another embodiment of said transgenic non-human organism said vector does not comprise beneath said nucleic acid molecule according to 1 (a), (b), (c), (d), (e), (f), (g), (h), (i), (j) or (k), and a promoter, preferably a promoter selected from the group consisting of Big35S, PCUbi, Super and USP; a nucleic acid molecule encoding a transit peptide, especially in case in column 6 of Table I, application no. 17, in the same line as of the respective nucleic acid molecule according to 1) “non-targeted” is depicted, which are operable linked; and wherein said nucleic acid molecule according to 1 (a), (b), (c), (d), (e), (f), (g), (h), (i), (j) or (k) encodes a polypeptide which has the activity of the respective polypeptide represented by a protein comprising a polypeptide as depicted in the respective line in column 5 of Table II, application no. 17.

[93950] In another embodiment of said transgenic non-human organism said vector comprises beneath said nucleic acid molecule according to 1 (a), (b), (c), (d), (e), (f), (g), (h), (i), (j) or (k), and a promoter, preferably a promoter selected from the group consisting of Big35S, PCUbi, Super and USP; a nucleic acid molecule encoding a transit peptide, preferably encoding a plastidal transit peptide, especially in case in column 6 of Table I, application no. 17, in the same line as of the respective nucleic acid molecule according to 1) “plastidic” is depicted, or encoding a mitochondrial transit peptide, especially in case in column 6 of Table I, application no. 17, in the same line as of the respective nucleic acid molecule according to 1) “mitochondric” is depicted, which are operable linked; and wherein said nucleic acid molecule according to 1 (a), (b), (c), (d), (e), (f), (g), (h), (i), (j) or (k) confers a generation or an increase of the respective fine chemical in a non-human organism or a part thereof as compared to a corresponding wild-type non-human organism or part thereof.

[93951] In another embodiment of said transgenic non-human organism said vector does not comprise beneath said nucleic acid molecule according to 1 (a), (b), (c), (d), (e), (f), (g), (h), (i), (j) or (k), and a promoter, preferably a promoter selected from the group consisting of Big35S, PCUbi, Super and USP; a nucleic acid molecule encoding a transit peptide, especially in case in column 6 of Table I, application no. 17, in the same line as of the respective nucleic acid molecule according to 1) “non-targeted” is depicted, which are operable linked; and wherein said nucleic acid molecule according to 1 (a), (b), (c), (d), (e), (f), (g), (h), (i), (j) or (k) confers a generation or an increase of the respective fine chemical in a non-human organism or a part thereof as compared to a corresponding wild-type non-human organism or part thereof.

[93952] In another embodiment of said transgenic non-human organism said vector comprises beneath said nucleic acid molecule according to 1 (a), (b), (c), (d), (e), (f), (g), (h), (i), (j) or (k), and a promoter, preferably a promoter selected from the group consisting of Big35S, PCUbi, Super and USP; a nucleic acid molecule encoding a transit peptide, preferably encoding a plastidal transit peptide, especially in case in column 6 of Table I, application no. 17, in the same line as of the respective nucleic acid molecule according to 1) “plastidic” is depicted, or encoding a mitochondrial transit peptide, especially in case in column 6 of Table I, application no. 17, in the same line as of the respective nucleic acid molecule according to 1) “mitochondric” is depicted, which are operable linked; and wherein said nucleic acid molecule according to 1 (a), (b), (c), (d), (e), (f), (g), (h), (i), (j) or (k) encodes a polypeptide which has the activity of the respective polypeptide represented by a protein as depicted in the respective line in column 5 of Table II application no. 17 and confers a generation or an increase of the respective fine chemical in a non-human organism or a part thereof as compared to a corresponding wild-type non-human organism or part thereof.

[93953] In another embodiment of said transgenic non-human organism said vector does not comprise beneath said nucleic acid molecule according to 1 (a), (b), (c), (d), (e), (f), (g), (h), (i), (j) or (k), and a promoter, preferably a promoter selected from the group consisting of Big35S, PCUbi, Super and USP; a nucleic acid molecule encoding a transit peptide, especially in case in column 6 of Table I, application no. 17, in the same line as of the respective nucleic acid molecule according to 1) “non-targeted” is depicted, which are operable linked; and wherein said nucleic acid molecule according to 1 (a), (b), (c), (d), (e), (f), (g), (h), (i), (j) or (k) encodes a polypeptide which has the activity of the respective polypeptide represented by a protein as depicted in the respective line in column 5 of Table II application no. 17 and confers a generation or an increase of the respective fine chemical in a non-human organism or a part thereof as compared to a corresponding wild-type non-human organism or part thereof.

[93954] In a preferred embodiment of said transgenic non-human organism said nucleic acid molecule according to 1 (a), (b), (c), (d), (e), (f), (g), (h), (i), (j) or (k), said promoter and optionally said nucleic acid molecule encoding a transit peptide are encompassed in an expression cassette in said vector. Accordingly an embodiment the invention provides a non-human organism comprising or being transformed by a vector comprising an expression cassette comprising said nucleic acid molecule according to 1 (a), (b), (c), (d), (e), (f), (g), (h), (i), (j) or (k), said promoter and optionally said a nucleic acid molecule encoding a transit peptide, operable linked. Said expression cassette may encompass a terminator, too.

[93955] [0291.1.7.17] to [0299.1.7.17] for the disclosure of these paragraphs see [0291.1.7.7] to [0299.1.7.7] above

[93956] The term “biological active portion” or “biological activity” means a polypeptide as depicted in the respective line in Table II, application no. 17, column 3 or a portion of said polypeptide which still has at least 10% or 20%, preferably 30%, 40%, 50% or 60%, especially preferably 70%, 75%, 80%, 90% or 95% of the enzymatic or biological activity of the natural or starting enzyme or protein.

[93957] [0301.1.7.17] to [0304.1.7.17] for the disclosure of these paragraphs see [0301.1.7.7] to [0304.1.7.7] above

[93958] Synthetic oligonucleotide primers for the amplification, e.g. as shown in the respective line in Table III, application no. 17, column 8, by means of polymerase chain reaction can be generated on the basis of a sequence shown herein, for example the sequence shown in the respective line in Table I, application no. 17, columns 5 or 8, or the sequences derived from Table II, application no. 17, columns 5 or 8, respectively.

[93959] Moreover, it is possible to identify a conserved region of a protein from various organism by carrying out protein sequence alignments with the polypeptide encoded by the nucleic acid molecules of the present invention, in particular with the sequences encoded by the nucleic acid molecule shown in the respective line in column 5 or 8 of Table I, application no. 17, from which conserved regions, and in turn, degenerate primers can be derived. Conserved regions are those, which show a very little variation in the amino acid in one particular position of several homologs from different origin. The consensus sequence and polypeptide motifs shown in the respective line in column 8 of Table IV, application no. 17, are derived from such alignments of homologous proteins.

[93960] In an embodiment of the present invention, in the method of the present invention the activity of a polypeptide comprising or consisting of a consensus sequence or at least one polypeptide motif shown in the respective line in Table IV, application no. 17, column 8, is increased. In another embodiment thereof, the method of the present invention relates to a polypeptide comprising or consisting of a consensus sequence shown in the respective line in Table IV, application no. 17, column 8 or comprising at least one polypeptide motif shown in the respective line in Table IV, application no. 17, column 8, whereby not more than 20, 15, 10, 9, 8, 7, 6, 5 4, 3, 2 or 1, or 0 of the amino acid positions indicated can be replaced by any amino acid. In another embodiment thereof, the method of the present invention relates to a polypeptide comprising or consisting of a consensus sequence shown in the respective line in Table IV, application no. 17, column 8 or comprising at least one polypeptide motif shown in the respective line in Table IV, application no. 17, column 8, whereby not more than 15%, 10%, 5%, 4%, 3%, 2% or 1%, or 0% of the amino acid positions defined as distinct specific amino acids are/is replaced by another amino acid. In another embodiment thereof, the method of the present invention relates to a polypeptide comprising or consisting of a consensus sequence shown in the respective line in Table IV, application no. 17, column 8 or comprising at least one polypeptide motif shown in the respective line in Table IV, application no. 17, column 8, whereby not more than 20, 15, 10, 9, 8, 7, 6, 5, 4, 3, 2 or 1, or 0 amino acids are inserted into a consensus sequence or polypeptide motif.

[93961] In an embodiment of the present invention, in the method of the present invention the activity of a polypeptide comprising or consisting of a consensus sequence or at least one polypeptide motif shown in the respective line in Table IV, application no. 17, column 8, is increased, whereby said polypeptide distinguishes over the sequence depicted in Table II, application no. 17, columns 5 or 8 by one or more amino acids.

[93962] In one embodiment, said polypeptide of the invention distinguishes over the sequence shown in the respective line in Table II, application no. 17, columns 5 and 8 by more than 5, 6, 7, 8 or 9 amino acids, preferably by more than 10, 15, 20, 25 or 30 amino acids, even more preferred are more than 40, 50, or 60 amino acids and, preferably, the sequence of the polypeptide of the invention distinguishes from the sequence shown in the respective line in Table II B, application no. 17, columns 5 and 8 by not more than 80%, 70%, 60%, 50%, 40%, 30%, 20%, 10%, 5%, 4%, 3%, 2%, 1% or 0.5%. In another embodiment, said polypeptide of the invention does not consist of the sequence shown in Table II, application no. 17, columns 5 or 8.

[93963] [0309.1.7.17] to [0321.1.7.17] for the disclosure of this paragraph see [0309.1.7.7] to [0321.1.7.7] above

[93964] Polypeptides having above-mentioned activity, i.e. conferring the production or the increased production of the fine chemical 3,4,5-trihydroxypentanoic acid, erythrol, fructose, fucose, galactinol, galactitol, glucose, glucose-1-phosphate, mannitol, melibiose, myo-inositol, raffinose, saccharic acid, sedoheptulose-7-phosphate, sorbitol, sucrose, trehalose, or verbascose as compared to a corresponding, e.g. non-transformed, wild type non-human organism, like a microorganism or a plant cell, plant or part thereof, can be encoded by other DNA sequences which hybridize to the sequences shown in the respective line in Table I, application no. 17, columns 5 and 8, preferably the coding region thereof, at least under relaxed hybridization conditions and which encode the expression of polypeptides conferring the production or the increased production of the respective fine chemical 3,4,5-trihydroxypentanoic acid, erythrol, fructose, fucose, galactinol, galactitol, glucose, glucose-1-phosphate, mannitol, melibiose, myo-inositol, raffinose, saccharic acid, sedoheptulose-7-phosphate, sorbitol, sucrose, trehalose, or verbascose as compared to a corresponding, e.g. non-transformed, wild type non-human organism, like a microorganism or a plant cell, plant or part thereof.

[93965] [0323.1.7.17] to [0329.1.7.17] for the disclosure of these paragraphs see [0323.1.7.7] to [0329.1.7.7] above

[93966] Further, the nucleic acid molecule of the invention comprises a nucleic acid molecule, which is a complement of one of the nucleotide sequences of above-mentioned nucleic acid molecules or a portion thereof. A nucleic acid molecule or its sequence which is complementary to one of the nucleotide molecules or sequences shown in the respective line in Table I, application no. 17, columns 5 or 8, preferably the coding region thereof, homologs or fragments thereof, is one which is sufficiently complementary to one of the nucleotide molecules or sequences shown in the respective line in Table I, application no. 17, columns 5 or 8, preferably the coding region thereof, homologs or fragments thereof, such that it can hybridize to one of the nucleotide sequences shown in Table I, application no. 17, columns 5 or 8, preferably the coding region thereof, homologs or fragments thereof, thereby forming a stable duplex. Preferably, the hybridization is performed under stringent hybridization conditions. However, a complement of one of the herein disclosed sequences is preferably a sequence complement thereto according to the base pairing of nucleic acid molecules well known to the skilled person.

[93967] For example, the bases A and G undergo base pairing with the bases T and U or C, resp. and visa versa. Modifications of the bases can influence the base-pairing partner.

[93968] The nucleic acid molecule of the invention comprises a nucleotide sequence which is at least about 30%, 35%, 40%, 45%, 50%, 55%, 60%, 65%, 70%, 75%, 80%, 90%, 95%, 96%, 97%, 98%, 99%, 99.5% or more homologous to a nucleotide sequence shown in Table I, application no. 17, columns 5 or 8, preferably the coding region thereof, homologs or fragments thereof, and preferably has above-mentioned activity, in particular conferring the production or the increased production of the fine chemical 3,4,5-trihydroxypentanoic acid, erythrol, fructose, fucose, galactinol, galactitol, glucose, glucose-1-phosphate, mannitol, melibiose, myo-inositol, raffinose, saccharic acid, sedoheptulose-7-phosphate, sorbitol, sucrose, trehalose, or verbascose, respectively, after increasing the activity or an activity of a gene as shown in the respective line in Table I or of a gene product, e.g. as shown in the respective line in Table II, application no. 17, column 5 or 8, by for example in one embodiment expression either in the cytosol or in an organelle such as a plastid or mitochondria or both, preferably in a plastid, or in another embodiment non-targeted or targeted.

[93969] The nucleic acid molecule of the invention comprises a nucleotide sequence or molecule which hybridizes, preferably hybridizes under stringent conditions as defined herein, to one of the nucleic acid molecule shown in the respective line in Table I, preferably Table IB, application no. 17, columns 5 or 8, preferably the coding region thereof, fragments or homologs thereof, and encodes a protein having above-mentioned activity, e.g. conferring the production or the increased production of the respective fine chemical 3,4,5-trihydroxypentanoic acid, erythrol, fructose, fucose, galactinol, galactitol, glucose, glucose-1-phosphate, mannitol, melibiose, myo-inositol, raffinose, saccharic acid, sedoheptulose-7-phosphate, sorbitol, sucrose, trehalose, or verbascose as compared to a corresponding, e.g. non-transformed, wild type non-human organism, like a microorganism or a plant cell, plant or part thereof, by for example in one embodiment expression either in the cytosol or in an organelle such as a plastid or mitochondria or both, preferably in a plastid, or in another embodiment non-targeted or targeted, and optionally, the activity thereof is selected from the group consisting of 1,4-alpha-glucan branching enzyme, 2,3-dihydroxy-2,3-dihydrophenylpropionatedehydrogenase, 2-C-methyl-D-erythritol 4-phosphate cytidylyltransferase, 2-oxoglutarate dehydrogenase E1 subunit, 3-deoxy7-phosphoheptulonate synthase, 3-isopropylmalate dehydratase large subunit, 3-phosphoglycerate dehydrogenase, 47266012-protein, 49747384_SOYBEAN-protein, 4-alpha-glucanotransferase, ABC transporter permease protein, acetyl CoA carboxylase, acetyl CoA synthetase, acetyl-coenzyme A synthetase, acetyltransferase, acid shock protein, acyl carrier protein, acyl transferase, acyl-CoA dehydrogenase, acyl-CoA synthase, adenylosuccinate lyase, alanine dehydrogenase, alcohol dehydrogenase, aldolase, alkaline phosphatase, amine oxidase, amino-acid acetyltransferase, aminotransferase, arginine exporter protein, asparagine synthetase B, At1g19350-protein, At2g45420-protein, At5g16650-protein, At5g43630-protein, ATP synthase subunit E, ATP-binding component of a transport system, auxin response factor, AX653549-protein, AY087308-protein, b0050-protein, b0251-protein, b0362-protein, b0488-protein, B0644-protein, b0801-protein, b0970-protein, b1003-protein, b1046-protein, b1137-protein, b1214-protein, b1219-protein, b1234-protein, b1285-protein, b1357-protein, b1410-protein, b1425-protein, b1445-protein, b1470-protein, b1522-protein, b1556-protein, b1583-protein, b1670-protein, b1796-protein, b1898-protein, b2032-protein, b2107-protein, b2139-protein, b2345-protein, b2360-protein, b2361-protein, b2399-protein, b2466-protein, b2474-protein, b2613-protein, b2653-protein, b2654-protein, b2670-protein, b2673-protein, b2682-protein, b2739-protein, b2932-protein, b3151-protein, b3221-protein, b3246-protein, b3346-protein, B3427-protein, b3442-protein, B3443-protein, b3777-protein, b3817-protein, b3818-protein, b3989-protein, b4029-protein, b4050-protein, b4056-protein, b4250-protein, beta-galactosidase, beta-hydroxylase, betaine aldehyde dehydrogenase, bifunctional protein (phosphoribosyltransferase and regulatory protein), binding-protein-dependent transport systems inner membrane component, branched-chain amino acid ABC transporter permease protein, branched-chain amino acid permease, calcium-dependent protein kinase, carbamoyl-phosphate synthase subunit, cardiolipin synthase, cation-transporting ATPase, CBL-interacting protein kinase, CCAAT-binding transcription factor, CDP-diglyceride synthetase, cell division control protein, cell division protein, chlorophyllase, chorismate lyase, circadian clock protein, colanic acid biosynthesis protein, coproporphyrinogen III oxidase, coproporphyrinogen oxidase, CTP synthase, cullin, cyclin, cyclin D, cystathionine gamma-synthase, cysteine synthase A, dATP pyrophosphohydrolase, dihydrolipoamide dehydrogenase, DNA binding protein, DNA replication complex GINS protein, DnaJ-like chaperone, electron transfer flavoprotein subunit beta, electron transport complex protein, elongation factor Tu, enoyl-CoA hydratase, eukaryotic translation initiation factor, eukaryotic translation initiation factor 5, fatty acid desaturase, ferredoxin, Fe—S subunit of oxidoreductase, flagellar M-ring protein, flavodoxin, fructose biphosphate aldolase, fumarylacetoacetate hydrolase, galactinol synthase, GDP-mannose 4,6-dehydratase, GDP-mannose dehydrogenase, geranylgeranyl pyrophosphate synthase, gibberellin 20-oxidase, Glu/Leu/Phe/Val dehydrogenase , glucokinase, gluconate transport system permease 3, glucose dehydrogenase, glucose-6-phosphate 1-dehydrogenase, glutamate-ammonia-ligase, glutamine amidotransferase, glutamine synthetase, glutaredoxin, glycerate kinase, glycogen (starch) synthase, glycogen synthase, glycosidase, glycosyl transferase, glycosyltransferase, GM02LC38418-protein, GM02LC46-protein, halotolerance protein, heat shock transcription factor, hexokinase, hexose transporter, high-affinity branched-chain amino acid transport protein, histone acetyltransferase, homocitrate synthase, hydrolase, inositol-3-phosphate synthase, integral membrane protein, intracellular septation protein, ion-transport protein, iron(III) dicitrate-binding protein, isochorismate synthase, isocitrate dehydrogenase, isopropylmalate isomerase large subunit, ketol-acid reductoisomerase, kinase, leucyl/phenylalanyl-tRNA-protein transferase, lipoprotein precursor, L-ribulose-5-phosphate 4-epimerase, L-serine dehydratase, lysine decarboxylase, MADS box protein transcription factor, MADS-box transcription factor, malate dehydrogenase, mannitol-1-phosphate dehydrogenase, membrane protein, membrane transport protein, methylglyoxalase, methyltransferase, Mg-protoporphyrin IX monomethyl ester oxidative cyclase 66 kD subunit, mitogen-activated protein kinase, molecular chaperone, monothiol glutaredoxin, monthiol glutaredoxin, multidrug resistance protein, multiple antibiotic resistance protein, murein transglycosylase, NAD(P)H dehydrogenase (quinone), NADH dehydrogenase, NADH-quinone oxidoreductase subunit, O-acetyltransferase, O-antigen chain length determinant, outer membrane receptor protein precursor, oxidoreductase, oxidoreductase subunit, para-aminobenzoate synthase component I, penicillin-binding protein, peptidyl-prolyl cis-trans isomerase, permease, permease protein of ABC transporter, phage-related repressor protein, phenylacetic acid degradation protein, phenylalanine ammonia-lyase, phosphate acetyltransferase, phosphate permease, phosphatidylinositol 3- and 4-kinase family protein, phosphoadenosine phosphosulfate reductase, phosphoanhydride phosphorylase, phosphoenolpyruvate carboxykinase, phosphoglycerate kinase, phosphohydrolase, phosphotransferase system component, photosystem I reaction center subunit XI, photosystem I reaction centre subunit, photosystem IIprotein, polyamine transporter, precorrin methylase, protease, protein kinase, protein phosphatase, protein-L-isoaspartate O-methyltransferase, purine biosynthesis protein, purine nucleoside phosphorylase, purine-nucleoside phosphorylase, putative transport system permease protein, putrescine transport system permease protein, pyridoxal phosphate biosynthetic protein, pyrimidine-specific ribonucleoside hydrolase, pyruvate kinase, recombinase A, RNA-binding protein, sec-independent protein translocase, Sec-independent protein translocase subunit, sensor histidine kinase, serine protease, serine/threonine dehydratase, serine/threonine-protein phosphatase, short chain dehydrogenase, short-chain alcohol dehydrogenase family, sll0254-protein, sll0281-protein, sll0354-protein, sll0418-protein, sll1761-protein, slr0600-protein, slr1107-protein, sn-glycerol-3-phosphate dehydrogenase, sn-glycerol-3-phosphate transport system permease protein, sodium/proton antiporter, sterol O-acyltransferase, subunit of COMPASS-protein complex, succinyl-CoA synthetase beta chain, ThiF family protein, thioredoxin, thioredoxin family protein, threonine dehydratase, threonine efflux protein, threonine synthase, transcription factor, transcriptional regulator, transcriptional regulator protein, transport protein, trehalase, trehalose-6-phosphate synthase, trehalosephosphatase, tryptophan biosynthesis protein, TTC1386-protein, urease accessory protein, urease subunit, vacuolar sorting protein, XM_{—}473199-protein, ycl027w-protein, YCR047W-A-protein, ycr102c-protein, YDL159W-A-protein, ydl235c-protein, ydr183w-protein, ydr507c-protein, YEL030C-A-protein, yer177w-protein, YFL019C-protein, ygl096w-protein, ygl237c-protein, yhl013c-protein, YIL083C-protein, YJL127W-A-protein, ymr324c-protein, yol160w-protein, ypl144w-protein, ypr098c-protein, zinc transporter, and Zm_{—}4842_BE510522-protein, respectively.

[93970] Moreover, the nucleic acid molecule of the invention can comprise only a portion of the coding region of one of the nucleic acid molecules depicted in Table I, application no. 17, columns 5 or 8, for example a fragment which can be used as a probe or primer or a fragment encoding a biologically active portion of the polypeptide of the present invention or of a polypeptide used in the process of the present invention, i.e. having above-mentioned activity, e.g. conferring the production or the increased production of the respective fine chemical 3,4,5-trihydroxypentanoic acid, erythrol, fructose, fucose, galactinol, galactitol, glucose, glucose-1-phosphate, mannitol, melibiose, myo-inositol, raffinose, saccharic acid, sedoheptulose-7-phosphate, sorbitol, sucrose, trehalose, or verbascose as compared to a corresponding, e.g. non-transformed, wild type non-human organism, like a microorganism or a plant cell, plant or part thereof, by for example in one embodiment expression either in the cytosol or in an organelle such as a plastid or mitochondria or both, preferably in a plastid, or in another embodiment non-targeted or targeted. The nucleotide sequences determined from the cloning of the present protein-according-to-the-invention-encoding gene allows for the generation of probes and primers designed for use in identifying and/or cloning its homologues from other cell types and organisms. The probe/primer typically comprises a substantially purified oligonucleotide. The oligonucleotide typically comprises a region of nucleotide sequence that hybridizes under stringent conditions to at least about 12, 15 preferably about 20 or 25, more preferably about 40, 50 or 75 consecutive nucleotides of a sense strand of one of the sequences set forth, e.g., in the respective line in Table I, application no. 17, column 5 or 8, preferably the coding region thereof, or a homolog or a fragment thereof, an anti-sense sequence of one of the sequences, e.g., set forth in the respective line in Table I, application no. 17, columns 5 or 8, preferably the coding region thereof, or a homolog or a fragment thereof or naturally occurring mutants thereof. Primers based on a nucleic acid molecule of invention can be used in PCR reactions to clone homologs of the polypeptide of the invention or of the polypeptide used in the process of the invention, e.g. as the primers described in the examples of the present invention, e.g. as shown in the examples. A PCR with the primers shown in the respective line in Table Ill, column 8 will result in a fragment of the gene product as shown in Table II, application no. 17, column 5.

[93971] Primer sets are interchangeable. The person skilled in the art knows how to design and combine said primers to result in the desired product, e.g. in a full length clone or a partial sequence. Probes based on the sequences of the nucleic acid molecule of the invention or used in the process of the present invention can be used to detect transcripts or genomic sequences encoding the same or homologous proteins. The probe can further comprise a label group attached thereto, e.g. the label group can be a radioisotope, a fluorescent compound, an enzyme, or an enzyme co-factor. Such probes can be used as a part of a genomic marker test kit for identifying cells which express a polypeptide of the invention or used in the process of the present invention, such as by measuring a level of an encoding nucleic acid molecule in a sample of cells, e.g. detecting mRNA levels or determining, whether a genomic gene comprising the sequence of the polynucleotide of the invention or used in the processes of the present invention has been mutated or deleted.

[93972] As the expression of a respective nucleic acids of the invention is related to the synthesis of the respective fine chemical 3,4,5-trihydroxypentanoic acid, erythrol, fructose, fucose, galactinol, galactitol, glucose, glucose-1-phosphate, mannitol, melibiose, myo-inositol, raffinose, saccharic acid, sedoheptulose-7-phosphate, sorbitol, sucrose, trehalose, or verbascose its function as a probe extends to the detection of microorganisms, plant tissues, plants, plant variets, plant ecotypes or plant genera with varying capability or potential for synthesis of the respective fine chemical 3,4,5-trihydroxypentanoic acid, erythrol, fructose, fucose, galactinol, galactitol, glucose, glucose-1-phosphate, mannitol, melibiose, myo-inositol, raffinose, saccharic acid, sedoheptulose-7-phosphate, sorbitol, sucrose, trehalose, or verbascose. Therefore in one embodiment the present invention relates to a method for analyzing the capability or potential of a plant tissue, a plant, a plant variety or plant ecotype to produce the fine chemical 3,4,5-trihydroxypentanoic acid, erythrol, fructose, fucose, galactinol, galactitol, glucose, glucose-1-phosphate, mannitol, melibiose, myo-inositol, raffinose, saccharic acid, sedoheptulose-7-phosphate, sorbitol, sucrose, trehalose, or verbascose by using the nucleic acid of the invention or parts thereof as a probe to detect the amount of the nucleic acid of the invention in the non-human organism or a part thereof in comparison to another non-human organism.

[93973] The nucleic acid molecule of the invention encodes a polypeptide or portion thereof which includes an amino acid sequence which is sufficiently homologous to the amino acid sequence shown in respective line in Table II, application no. 17, columns 5 or 8 such that the protein or portion thereof maintains the ability to confer the production or the increased production of the respective fine chemical 3,4,5-trihydroxypentanoic acid, erythrol, fructose, fucose, galactinol, galactitol, glucose, glucose-1-phosphate, mannitol, melibiose, myo-inositol, raffinose, saccharic acid, sedoheptulose-7-phosphate, sorbitol, sucrose, trehalose, or verbascose as compared to a corresponding, e.g. non-transformed, wild type non-human organism, like a microorganism or a plant cell, plant or part thereof, in particular increasing the activity as mentioned above or as described in the examples in microorganisms or plants.

[93974] As used herein, the language “sufficiently homologous” refers to proteins or portions thereof which have amino acid sequences which include a minimum number of identical or equivalent amino acids (e.g. an amino acid which has a similar side chain as an amino acid in one of the sequences of the polypeptide of the present invention) to an amino acid sequence shown in the respective line in Table II, application no. 17, columns 5 or 8 such that the protein or portion thereof is able to confer the production or the increased production of the respective fine chemical 3,4,5-trihydroxypentanoic acid, erythrol, fructose, fucose, galactinol, galactitol, glucose, glucose-1-phosphate, mannitol, melibiose, myo-inositol, raffinose, saccharic acid, sedoheptulose-7-phosphate, sorbitol, sucrose, trehalose, or verbascose as compared to a corresponding, e.g. non-transformed, wild type non-human organism, like a microorganism or a plant cell, plant or part thereof. For example having the activity of a protein as shown in the respective line in Table II, application no. 17, column 3 and as described herein.

[93975] In an embodiment of the present invention, the nucleic acid molecule of the present invention comprises a nucleic acid molecule that encodes a portion of the protein of the present invention. The protein is at least about 30%, 35%, 40%, 45% 50%, 55%, 60%, 65%, 70%, 75%, 80%, 85%, 90%, 91%, 92%, 93%, 94%, 95%, 96%, 97%, 98%, 99%, 99.5% or more homologous to an entire amino acid sequence shown in the respective line of Table II, application no. 17, column 5 or 8 and has the above-mentioned activity, e.g. conferring the production or the increased production of the respective fine chemical 3,4,5-trihydroxypentanoic acid, erythrol, fructose, fucose, galactinol, galactitol, glucose, glucose-1-phosphate, mannitol, melibiose, myo-inositol, raffinose, saccharic acid, sedoheptulose-7-phosphate, sorbitol, sucrose, trehalose, or verbascose as compared to a corresponding, e.g. non-transformed, wild type non-human organism, like a microorganism or a plant cell, plant or part thereof by, for example in a embodiment expression either in the cytosol or in an organelle such as a plastid or mitochondria or both, preferably in a plastid, or in another embodiment by targeted or non-targeted expression

[93976] for the disclosure of this paragraph see [0338.1.7.7] above

[93977] for the disclosure of this paragraph see [0339.1.7.7] above

[93978] The invention further relates to nucleic acid molecules or methods using said nucleic acid molecules that differ from one of the nucleotide sequences shown in the respective line in Table I, application no. 17, columns 5 or 8, preferably the coding region thereof, or fragments or homologs thereof, due to degeneracy of the genetic code but encode a polypeptide of the present invention, in particular a polypeptide having the above-mentioned activity, e.g. as those polypeptides depicted in the respective line in Table II, application no. 17, columns 5 or 8, fragments or homologs thereof. Advantageously, the nucleic acid molecule of the invention comprises, or in an other embodiment has, a nucleotide sequence encoding a protein comprising, or in an other embodiment having, an amino acid sequence shown in the respective line in Table II, application no. 17, columns 5 or 8, fragments or homologs thereof. In a further embodiment, the nucleic acid molecule of the invention encodes a full length protein which is substantially homologous to an amino acid sequence shown in the respective line in Table II, application no. 17, columns 5 or 8, or homologs thereof. However, in an embodiment, the nucleic acid molecule of the present invention does not consist of the sequence shown in the respective line in Table I, preferably Table IA, application no. 17, columns 5 or 8, preferably the coding region thereof, but the functional homologs thereof.

[93979] [0341.1.7.17] to [0343.1.7.17] for the disclosure of these paragraphs see [0341.1.7.7] to [0343.1.7.7] above

[93980] Accordingly, in another embodiment, a nucleic acid molecule of the invention is at least 15, 20, 25 or 30 nucleotides in length. Preferably, it hybridizes under stringent conditions to a nucleic acid molecule comprising a nucleotide sequence of the nucleic acid molecule of the present invention or used in the process of the present invention, e.g. comprising the sequence shown in the respective line in Table I, application no. 17, columns 5 or 8, preferably the coding region thereof. In another embodiment the nucleic acid molecule is preferably at least 20, 30, 50, 100, 250 or more nucleotides in length.

[93981] for the disclosure of this paragraph see [0345.1.7.7] above

[93982] Preferably, a nucleic acid molecule of the invention that hybridizes under stringent conditions to a sequence shown in the respective line in Table I, application no. 17, columns 5 or 8, preferably the coding region thereof, corresponds to a naturally-occurring nucleic acid molecule of the invention. As used herein, a “naturally-occurring” nucleic acid molecule refers to a RNA or DNA molecule having a nucleotide sequence that occurs in nature (e.g.

[93983] encodes a natural protein). Preferably, the nucleic acid molecule encodes a natural protein having above-mentioned activity, e.g. conferring the production or the increased production of the respective fine chemical 3,4,5-trihydroxypentanoic acid, erythrol, fructose, fucose, galactinol, galactitol, glucose, glucose-1-phosphate, mannitol, melibiose, myo-inositol, raffinose, saccharic acid, sedoheptulose-7-phosphate, sorbitol, sucrose, trehalose, or verbascose as compared to a corresponding, e.g. non-transformed, wild type non-human organism, like a microorganism or a plant cell, plant or part thereof after increasing the expression or activity thereof or the activity of a protein of the invention or used in the process of the invention, in an embodiment for example expression either in the cytosol or in an organelle such as a plastid or mitochondria, preferably in plastids, or, in another embodiment by targeted or non-targeted expression.

[93984] for the disclosure of this paragraph see [0347.1.7.7] above

[93985] For example, nucleotide substitutions leading to amino acid substitutions at “non-essential” amino acid residues can be made in a sequence of the nucleic acid molecule of the invention or used in the process of the invention, e.g. shown in the respective line in Table I, application no. 17, columns 5 or 8, preferably the coding region thereof, or fragments or homologs thereof.

[93986] for the disclosure of this paragraph see [0349.1.7.7] above

[93987] for the disclosure of this paragraph see [0350.1.7.7] above

[93988] Accordingly, the invention relates to nucleic acid molecules encoding a polypeptide having above-mentioned activity, in a non-human organisms or parts thereof by for example expression either in the cytosol or in an organelle such as a plastid or mitochondria or both, preferably in plastids, that contain changes in amino acid residues that are not essential for said activity. Such polypeptides differ in amino acid sequence from a sequence depicted in the respective line in Table II, especially Table IIA, application no. 17, columns 5 or 8, but retain said activity described herein. The nucleic acid molecule can comprise a nucleotide sequence encoding a polypeptide, wherein the polypeptide comprises an amino acid sequence at least about 50% identical to an amino acid sequence shown in the respective line in Table II, application no. 17, columns 5 or 8, and is capable of conferring the production or the increased production of the respective fine chemical 3,4,5-trihydroxypentanoic acid, erythrol, fructose, fucose, galactinol, galactitol, glucose, glucose-1-phosphate, mannitol, melibiose, myo-inositol, raffinose, saccharic acid, sedoheptulose-7-phosphate, sorbitol, sucrose, trehalose, or verbascose as compared to a corresponding, e.g. non-transformed, wild type non-human organism, like a microorganism or a plant cell, plant or part thereof, after increasing its activity for example in an embodiment by expression either in the cytosol or in an organelle such as a plastid or mitochondria or both, preferably in plastids, or, in another embodiment by targeted or non-targeted expression. Preferably, the protein encoded by the nucleic acid molecule is at least about 60%, 70%, 80%, 90%, 95%, 96%, 97%, 98%, 99% or 99.5% identical to the sequence shown in the respective line in Table II, application no. 17, columns 5 or 8.

[93989] [0352.1.7.17] to [0343.1.7.17] for the disclosure of these paragraphs see [0352.1.7.7] to [0343.1.7.7] above

[93990] Functional equivalents of the nucleic acid molecules according to the present invention and/or used in the process according to the present invention represent an embodiment of homologs. Functional equivalents derived from the nucleic acid molecules as shown in the respective line in Table I, application no. 17, columns 5 or 8, preferably the coding region thereof, according to the invention by substitution, insertion or deletion have at least 30%, 35%, 40%, 45%, 50%, 55%, 60%, 65%, 70%, 75%, 80%, 85%, 90%, 91%, 92%, 93%, 94%, 95%, 96%, 97%, 98%, 99% or 99.5% homology with one of the nucleic acid molecules as shown in the respective line in Table I, application no. 17, columns 5 or 8, preferably the coding region thereof, according to the invention and encode polypeptides having essentially the same properties as the polypeptide as shown in the respective line in Table II, application no. 17, columns 5 or 8.

[93991] Functional equivalents derived from one of the polypeptides as shown in the respective line in Table II, application no. 17, columns 5 or 8 according to the invention by substitution, insertion or deletion have at least 30%, 35%, 40%, 45%, 50%, 55%, 60%, 65%, 70%, 75%, 80%, 85%, 90%, 91%, 92%, 93%, 94%, 95%, 96%, 97%, 98%, 99% or 99.5% homology with one of the polypeptides as shown in the respective line in Table II, application no. 17, columns 5 or 8 according to the invention and having essentially the same properties as the polypeptide as shown in the respective line in Table II, application no. 17, columns 5 or 8.

[93992] for the disclosure of this paragraph see [0359.1.7.7] above

[93993] A nucleic acid molecule encoding a homolog to a polypeptide depicted in the respective line in Table II, application no. 17, columns 5 or 8 can be created by introducing one or more nucleotide substitutions, additions or deletions into the nucleic acid molecule of the present invention, in particular of Table I, application no. 17, columns 5 or 8, in the respective line, such that one or more amino acid substitutions, additions or deletions are introduced into the encoded protein. Mutations can be introduced into the nucleic acid molecules as depicted in the respective line in Table I, application no. 17, columns 5 or 8, preferably the coding region thereof, by standard techniques, such as site-directed mutagenesis, PCR-mediated mutagenesis or other methods known to the person skilled in the art.

[93994] [0361.1.7.17] to [0363.1.7.17] for the disclosure of these paragraphs see [0361.1.7.7] to [0363.1.7.7] above

[93995] Homologues of the nucleic acid sequences used, with the sequences shown in the respective line in Table I, application no. 17, columns 5 or 8, preferably the coding region thereof, comprise also allelic variants with at least approximately 30%, 35%, 40%, 45%, 50%, 55%, 60%, 65%, 70%, 75%, 80%, 85%, 90%, 91%, 92%, 93%, 94% 95%. 96%, 97%, 98%, 99%, 99.5% or more % homology with one of the nucleotide sequences shown or the above-mentioned derived nucleic acid sequences or their homologues or derivatives or parts of these. Allelic variants encompass in particular functional variants which can be obtained by deletion, insertion or substitution of nucleotides from the sequences shown in the respective line, preferably in Table I, columns 5 or 8, preferably the coding region thereof, or from the derived nucleic acid sequences, the intention being, however, that the enzymatic activity or the biological activity of the resulting proteins synthesized is advantageously retained or increased.

[93996] In one embodiment of the present invention, the nucleic acid molecule of the invention or used in the process of the invention comprises the sequences shown in the respective line in any of the Table I, application no. 17, columns 5 or 8, preferably the coding region thereof, fragments or homologs thereof. It is preferred that the nucleic acid molecule comprises as little as possible other nucleotides not shown in the respective line in any one of Table I, application no. 17, columns 5 or 8, preferably the coding region thereof, fragments or homologs thereof. In one embodiment, the nucleic acid molecule comprises less than 500, 400, 300, 200, 100, 90, 80, 70, 60, 50 or 40 further nucleotides. In a further embodiment, the nucleic acid molecule comprises less than 30, 20 or 10 further nucleotides. In one embodiment, the nucleic acid molecule used in the process of the invention is identical to the sequences shown in the respective line in Table I, application no. 17, columns 5 or 8, preferably the coding region thereof.

[93997] Also preferred is that the nucleic acid molecule used in the process of the invention encodes a polypeptide comprising the sequence shown in the respective line in Table II, application no. 17, columns 5 or 8, fragments or homologs thereof. In one embodiment, the nucleic acid molecule encodes less than 150, 130, 100, 80, 60, 50, 40 or 30 further amino acids. In a further embodiment, the encoded polypeptide comprises less than 20, 15, 10, 9, 8, 7, 6 or 5 further amino acids. In one embodiment used in the inventive process, the encoded polypeptide is identical to the sequences shown in the respective line in Table II, application no. 17, columns 5 or 8.

[93998] In one embodiment, the nucleic acid molecule of the invention or used in the process encodes a polypeptide comprising the sequence shown in the respective line in Table II, application no. 17, columns 5 or 8, or fragments or homologs thereof, and comprises less than 100 further nucleotides. In a further embodiment, said nucleic acid molecule comprises less than 30 further nucleotides. In one embodiment, the nucleic acid molecule used in the process is identical to a coding sequence of the sequences shown in the respective line in Table I, application no. 17, columns 5 or 8.

[93999] Polypeptides (=proteins), which still have the essential biological or enzymatic activity of the polypeptide of the present invention conferring the production or the increased production of the respective fine chemical 3,4,5-trihydroxypentanoic acid, erythrol, fructose, fucose, galactinol, galactitol, glucose, glucose-1-phosphate, mannitol, melibiose, myo-inositol, raffinose, saccharic acid, sedoheptulose-7-phosphate, sorbitol, sucrose, trehalose, or verbascose as compared to a corresponding, e.g. non-transformed, wild type non-human organism, like a microorganism or a plant cell, plant or part thereof, i.e. whose activity is essentially not reduced, are polypeptides with at least 10%, 20%, 30%, 40%, 50%, 60%, 70%, 80%, 90%, 95% or more of the wild type biological activity or enzymatic activity, advantageously, the activity is essentially not reduced in comparison with the activity of a polypeptide shown in the respective line in Table II, application no. 17, columns 5 or 8 expressed under identical conditions.

[94000] Homologues of nucleic acid molecules shown in the respective line in Table I, application no. 17, columns 5 or 8, preferably the coding region thereof, or fragments thereof, or of the derived sequences shown in the respective line in Table II, application no. 17, columns 5 or 8, or fragments thereof, also mean truncated sequences, cDNA, single-stranded DNA or RNA of the coding and noncoding DNA sequence. Homologues of said sequences are also understood as meaning derivatives, which comprise noncoding regions such as, for example, UTRs, introns, terminators, enhancers or promoter variants. The promoters upstream of the nucleotide sequences stated can be modified by one or more nucleotide substitution(s), insertion(s) and/or deletion(s) without, however, interfering with the functionality or activity either of the promoters, the open reading frame (=ORF) or with the 3′-regulatory region such as terminators or other 3′-regulatory regions, which are far away from the ORF. It is furthermore possible that the activity of the promoters is increased by modification of their sequence, or that they are replaced completely by more active promoters, even promoters from heterologous organisms. Appropriate promoters are known to the person skilled in the art and are mentioned herein below.

[94001] [0370.1.7.17] to [0379.1.7.17] for the disclosure of these paragraphs see [0370.1.7.7] to [0379.1.7.7] above

[94002] Moreover, a native polypeptide conferring the increase of the respective fine chemical 3,4,5-trihydroxypentanoic acid, erythrol, fructose, fucose, galactinol, galactitol, glucose, glucose-1-phosphate, mannitol, melibiose, myo-inositol, raffinose, saccharic acid, sedoheptulose-7-phosphate, sorbitol, sucrose, trehalose, or verbascose in a non-human organism or a part thereof can be isolated from cells (e.g., endothelial cells), for example using the antibody of the present invention as described below, in particular, an antibody against proteins having 1,4-alpha-glucan branching enzyme, 2,3-dihydroxy-2,3-dihydrophenylpropionatedehydrogenase, 2-C-methyl-D-erythritol 4-phosphate cytidylyltransferase, 2-oxoglutarate dehydrogenase E1 subunit, 3-deoxy-7-phosphoheptulonate synthase, 3isopropylmalate dehydratase large subunit, 3-phosphoglycerate dehydrogenase, 47266012-protein, 49747384_SOYBEAN-protein, 4-alpha-glucanotransferase, ABC transporter permease protein, acetyl CoA carboxylase, acetyl CoA synthetase, acetyl-coenzyme A synthetase, acetyltransferase, acid shock protein, acyl carrier protein, acyl transferase, acyl-CoA dehydrogenase, acyl-CoA synthase, adenylosuccinate lyase, alanine dehydrogenase, alcohol dehydrogenase, aldolase, alkaline phosphatase, amine oxidase, amino-acid acetyltransferase, aminotransferase, arginine exporter protein, asparagine synthetase B, AO g19350-protein, At2g45420-protein, At5g16650-protein, At5g43630-protein, ATP synthase subunit E, ATP-binding component of a transport system, auxin response factor, AX653549-protein, AY087308-protein, b0050-protein, b0251-protein, b0362-protein, b0488-protein, B0644-protein, b0801-protein, b0970-protein, b1003-protein, b1046-protein, b1137-protein, b1214-protein, b1219-protein, b1234-protein, b1285-protein, b1357-protein, b1410-protein, b1425-protein, b1445-protein, b1470-protein, b1522-protein, b1556-protein, b1583-protein, b1670-protein, b1796-protein, b1898-protein, b2032-protein, b2107-protein, b2139-protein, b2345-protein, b2360-protein, b2361-protein, b2399-protein, b2466-protein, b2474-protein, b2613-protein, b2653-protein, b2654-protein, b2670-protein, b2673-protein, b2682-protein, b2739-protein, b2932-protein, b3151-protein, b3221-protein, b3246-protein, b3346-protein, B3427-protein, b3442-protein, B3443-protein, b3777-protein, b3817-protein, b3818-protein, b3989-protein, b4029-protein, b4050-protein, b4056-protein, b4250-protein, beta-galactosidase, beta-hydroxylase, betaine aldehyde dehydrogenase, bifunctional protein (phosphoribosyltransferase and regulatory protein), binding-protein-dependent transport systems inner membrane component, branched-chain amino acid ABC transporter permease protein, branched-chain amino acid permease, calcium-dependent protein kinase, carbamoyl-phosphate synthase subunit, cardiolipin synthase, cation-transporting ATPase, CBL-interacting protein kinase, CCAAT-binding transcription factor, CDP-diglyceride synthetase, cell division control protein, cell division protein, chlorophyllase, chorismate lyase, circadian clock protein, colanic acid biosynthesis protein, coproporphyrinogen III oxidase, coproporphyrinogen oxidase, CTP synthase, cullin, cyclin, cyclin D, cystathionine gamma-synthase, cysteine synthase A, dATP pyrophosphohydrolase, dihydrolipoamide dehydrogenase, DNA binding protein, DNA replication complex GINS protein, DnaJ-like chaperone, electron transfer flavoprotein subunit beta, electron transport complex protein, elongation factor Tu, enoyl-CoA hydratase, eukaryotic translation initiation factor, eukaryotic translation initiation factor 5, fatty acid desaturase, ferredoxin, Fe—S subunit of oxidoreductase, flagellar M-ring protein, flavodoxin, fructose biphosphate aldolase, fumarylacetoacetate hydrolase, galactinol synthase, GDP-mannose 4,6-dehydratase, GDP-mannose dehydrogenase, geranylgeranyl pyrophosphate synthase, gibberellin 20-oxidase, Glu/Leu/Phe/Val dehydrogenase, glucokinase, gluconate transport system permease 3, glucose dehydrogenase, glucose-6-phosphate 1-dehydrogenase, glutamate-ammonia-ligase, glutamine amidotransferase, glutamine synthetase, glutaredoxin, glycerate kinase, glycogen (starch) synthase, glycogen synthase, glycosidase, glycosyl transferase, glycosyltransferase, GM02LC38418-protein, GM02LC46-protein, halotolerance protein, heat shock transcription factor, hexokinase, hexose transporter, high-affinity branched-chain amino acid transport protein, histone acetyltransferase, homocitrate synthase, hydrolase, inositol-3-phosphate synthase, integral membrane protein, intracellular septation protein, ion-transport protein, iron(III) dicitrate-binding protein, isochorismate synthase, isocitrate dehydrogenase, isopropylmalate isomerase large subunit, ketol-acid reductoisomerase, kinase, leucyl/phenylalanyl-tRNA-protein transferase, lipoprotein precursor, L-ribulose-5-phosphate 4-epimerase, L-serine dehydratase, lysine decarboxylase, MADS box protein transcription factor, MADS-box transcription factor, malate dehydrogenase, mannitol-1-phosphate dehydrogenase, membrane protein, membrane transport protein, methylglyoxalase, methyltransferase, Mg-protoporphyrin IX monomethyl ester oxidative cyclase 66 kD subunit, mitogen-activated protein kinase, molecular chaperone, monothiol glutaredoxin, monthiol glutaredoxin, multidrug resistance protein, multiple antibiotic resistance protein, murein transglycosylase, NAD(P)H dehydrogenase (quinone), NADH dehydrogenase, NADH-quinone oxidoreductase subunit, O-acetyltransferase, O-antigen chain length determinant, outer membrane receptor protein precursor, oxidoreductase, oxidoreductase subunit, para-aminobenzoate synthase component I, penicillin-binding protein, peptidyl-prolyl cis-trans isomerase, permease, permease protein of ABC transporter, phage-related repressor protein, phenylacetic acid degradation protein, phenylalanine ammonia-lyase, phosphate acetyltransferase, phosphate permease, phosphatidylinositol 3- and 4-kinase family protein, phosphoadenosine phosphosulfate reductase, phosphoanhydride phosphorylase, phosphoenolpyruvate carboxykinase, phosphoglycerate kinase, phosphohydrolase, phosphotransferase system component, photosystem I reaction center subunit XI, photosystem I reaction centre subunit, photosystem II protein, polyamine transporter, precorrin methylase, protease, protein kinase, protein phosphatase, protein-L-isoaspartate O-methyltransferase, purine biosynthesis protein, purine nucleoside phosphorylase, purine-nucleoside phosphorylase, putative transport system permease protein, putrescine transport system permease protein, pyridoxal phosphate biosynthetic protein, pyrimidine-specific ribonucleoside hydrolase, pyruvate kinase, recombinase A, RNA-binding protein, sec-independent protein translocase, Sec-independent protein translocase subunit, sensor histidine kinase, serine protease, serine/threonine dehydratase, serine/threonine-protein phosphatase, short chain dehydrogenase, short-chain alcohol dehydrogenase family, sll0254-protein, sll0281-protein, sll0354-protein, sll0418-protein, sll1761-protein, slr0600-protein, slr1107-protein, sn-glycerol-3-phosphate dehydrogenase, sn-glycerol-3-phosphate transport system permease protein, sodium/proton antiporter, sterol O-acyltransferase, subunit of COMPASS-protein complex, succinyl-CoA synthetase beta chain, ThiF family protein, thioredoxin, thioredoxin family protein, threonine dehydratase, threonine efflux protein, threonine synthase, transcription factor, transcriptional regulator, transcriptional regulator protein, transport protein, trehalase, trehalose-6-phosphate synthase, trehalose-phosphatase, tryptophan biosynthesis protein, TTC1386-protein, urease accessory protein, urease subunit, vacuolar sorting protein, XM_{—}473199-protein, ycl027w-protein, YCR047W-A-protein, ycr102c-protein, YDL159W-A-protein, ydl235c-protein, ydr183w-protein, ydr507c-protein, YEL030C-A-protein, yer177w-protein, YFL019C-protein, ygl096w-protein, ygl237c-protein, yhl013c-protein, YIL083C-protein, YJL127W-A-protein, ymr324c-protein, yol160w-protein, ypl144w-protein, ypr098c-protein, zinc transporter, or Zm_{—}4842_BE510522-protein activity, respectively, or an antibody against poly peptides as shown in the respective line in Table II, application no. 17, columns 5 or 8, or fragments or homologs thereof which can be produced by standard techniques utilizing the polypeptid of the present invention or fragment thereof, i.e., the polypeptide of this invention (FCRP). Preferred are monoclonal antibodies.

[94003] for the disclosure of this paragraph see [0381.1.7.7] above

[94004] In one embodiment, the present invention relates to a polypeptide as depicted in the respective line in Table II, especially in Table IIA or especially in Table IIB, application no. 17, columns 5 or 8, or fragment or homolog thereof or as coded by the nucleic acid molecule shown in the respective line in Table I, especially Table IA or especially Table IB, application no. 17, columns 5 or 8, preferably the coding region thereof, or fragment or homolog thereof.

[94005] In an embodiment, the present invention relates to a polypeptide comprising or consisting of a consensus sequence shown in the respective line in Table IV, application no. 17, column 8 or at least one polypeptide motif shown in the respective line in Table IV, application no. 17, column 8.

[94006] In an embodiment thereof, the present invention relates to a polypeptide comprising or consisting of a consensus sequence shown in the respective line in Table IV, application no. 17, column 8 or comprising at least one polypeptide motif shown in the respective line in Table IV, application no. 17, column 8, whereby not more than 20, 15, 10, 9, 8, 7, 6, 5, 4, 3, 2, or 1, or 0 of the amino acids can be replaced by any amino acid.

[94007] In another embodiment thereof, the present invention relates to a polypeptide comprising or consisting of a consensus sequence shown in the respective line in Table IV, application no. 17, column 8 or comprising at least one polypeptide motif shown in the respective line in Table IV, application no. 17, column 8, whereby not more than 15%, 10%, 5%, 4%, 3%, 2% or1% or 0% of the amino acids defined as distinct specific amino acids are/is replaced by another amino acid.

[94008] In another embodiment thereof, the present invention relates to a polypeptide comprising or consisting of a consensus sequence shown in the respective line in Table IV, application no. 17, column 8 or comprising at least one polypeptide motif shown in the respective line in Table IV, application no. 17, column 8, whereby not more than 20, 15, 10, 9, 8, 7, 6, 5, 4, 3, 2, or 1, or 0 amino acids are inserted into the consensus sequence or polypeptide motif.

[94009] In an embodiment of the present invention, the polypeptide of the present invention comprises or consists of a consensus sequence or at least one polypeptide motif shown in the respective line in Table IV, application no. 17, column 8, whereby said polypeptide distinguishes over the sequence depicted in the respective line in Table II, application no. 17, columns 5 or 8 by one or more amino acids. In one embodiment, said polypeptide of the invention distinguishes over the sequence shown in the respective line in Table II, application no. 17, columns 5 and 8 by more than 5, 6, 7, 8 or 9 amino acids, preferably by more than 10, 15, 20, 25 or 30 amino acids, even more preferred are more than 40, 50, or 60 amino acids and, preferably, the sequence of the polypeptide of the invention distinguishes from the sequence shown in the respective line in Table II, application no. 17, columns 5 and 8 by not more than 80%, 70%, 60%, 50%, 40%, 30%, 20%, 10%, 5%, 4%, 3%, 2%, 1% or 0.5%. In another embodiment, said polypeptide of the invention does not consist of the sequence shown in the respective line in Table II, application no. 17, columns 5 and 8.

[94010] In an embodiment, the invention relates to a polypeptide conferring an increase in the respective fine chemical 3,4,5-trihydroxypentanoic acid, erythrol, fructose, fucose, galactinol, galactitol, glucose, glucose-1-phosphate, mannitol, melibiose, myo-inositol, raffinose, saccharic acid, sedoheptulose-7-phosphate, sorbitol, sucrose, trehalose, or verbascose in a non-human organism, especially a microorganism or a plant, or a part thereof, being encoded by the nucleic acid molecule of the invention or used in the process of the invention and having a sequence which distinguishes over the sequence as shown in the respective line in Table II, application no. 17, columns 5 or 8 by one or more amino acids (but not exceeding 5%, preferably 4%, 3%, 2%, 1%, 0.5%, 0.2% or 0.1%). In an embodiment, said polypeptide of the invention does not comprise or consist of the sequence shown in the respective line in Table II, application no. 17, columns 5 or 8. In an embodiment, said polypeptide of the present invention is less than 100%, 99.999%, 99.99%, 99.9% or 99% identical. In one embodiment, said polypeptide which differs at least in one or more amino acids (but not exceeding 5%, preferably 4%, 3%, 2%, 1%, 0.5%, 0.2% or 0.1%) from the polypeptide shown in the respective line in Table II, application no. 17, columns 5 and 8 does not comprise a protein of the sequence shown in the respective line in Table II A and/or II B, application no. 17, columns 5 or 8.

[94011] In an embodiment, the present invention relates to a polypeptide having the activity of the protein as shown in the respective line in Table II, application no. 17, column 3, which distinguishes over the sequence depicted in the respective line in Table II, application no. 17, columns 5 or 8 by one or more amino acids, preferably by more than 5, 6, 7, 8 or 9 amino acids, preferably by more than 10, 15, 20, 25 or 30 amino acids, even more preferred are more than 40, 50, or 60 amino acids and, preferably, the sequence of the polypeptide of the invention distinguishes from the sequence shown in the respective line in Table II, application no. 17, columns 5 and 8 by not more than 80%, 70%, 60%, 50%, 40%, 30%, 20%, 10%, 5%, 4%, 3%, 2%, 1% or 0.5%. In another embodiment the polypeptide of the invention takes the form of a preprotein consisting of a plastidial or mitochondrial transit peptide joint to a polypeptide having the activity of the protein as shown in Table II, column 3, from which the transit peptide is preferably cleaved off upon transport of the preprotein into the organelle for example into the plastid or mitochondrion.

[94012] In another embodiment the polypeptide of the invention takes not the form of a preprotein.

[94013] for the disclosure of this paragraph see [0390.1.7.7] above

[94014] for the disclosure of this paragraph see [0391.1.7.7] above

[94015] A polypeptide of the invention can participate in the process of the present invention. The polypeptide or a portion thereof comprises preferably an amino acid sequence, which is sufficiently homologous to an amino acid sequence shown in the respective line in Table II A and/or II B, application no. 17, columns 5 or 8.

[94016] Further, the polypeptide can have an amino acid sequence which is encoded by a nucleotide sequence which hybridizes, preferably hybridizes under stringent conditions as described above, to a nucleotide sequence of the nucleic acid molecule of the present invention. Accordingly, the polypeptide has an amino acid sequence which is encoded by a nucleotide sequence that is at least about 35%, 40%, 45%, 50%, 55%, 60%, 65%, 70%, 75%, 80%, 85%, 90%, 91%, 92%, 93%, 94%, 95%, 96%, 97%, 98%, 99%, 99.5% or more homologous to one of the amino acid sequences as shown in the respective line in Table II A and/or II B, application no. 17, columns 5 or 8, or fragments thereof. The preferred polypeptide of the present invention preferably possesses at least one of the activities according to the invention and described herein. A preferred polypeptide of the present invention includes an amino acid sequence encoded by a nucleotide sequence which hybridizes, preferably hybridizes under stringent conditions, to a nucleotide sequence shown in the respective line in Table I A and/or I B, application no. 17, columns 5 or 8, preferably the coding region thereof, or fragments thereto or which is homologous thereto, as defined above

[94017] The polypeptide of the present invention can vary from the sequences shown in the respective line in Table II A and/or II B, application no. 17, columns 5 or 8 in amino acid sequence due to natural variation or mutagenesis, as described in detail herein. Accordingly, the polypeptide comprise an amino acid sequence which is at least about 35%, 40%, 45%, 50%, 55%, 60%, 65%, 70%, 75%, 80%, 85% or 90, 91%, 92%, 93%, 94%, 95%, 96%, 97%, 98%, 99%, 99.5% or more homologous to an entire amino acid sequence shown in the respective line in Table II A and/or II B, application no. 17, columns 5 or 8.

[94018] Biologically active portions of a polypeptide of the present invention include peptides comprising amino acid sequences derived from the amino acid sequence of the polypeptide of the present invention or used in the process of the present invention, e.g., the amino acid sequence shown in the respective line in Table II, application no. 17, columns 5 or 8 or the amino acid sequence of a protein homologous thereto, which include fewer amino acids than a full length polypeptide of the present invention or used in the process of the present invention or the full length protein which is homologous to a polypeptide of the present invention or used in the process of the present invention depicted herein, and exhibit at least one activity of a polypeptide of the present invention or used in the process of the present invention.

[94019] for the disclosure of this paragraph see [0396.1.7.7] above

[94020] Manipulation of the nucleic acid molecule of the invention may result in the production of a protein having differences from the protein as shown in the respective line in Table II, application no. 17, column 5 or 8. Differences shall mean at least one amino acid different from the sequences as shown in the respective line in Table II, application no. 17, column 5 or 8, preferably at least 2, 3, 4, 5, 6, 7, 8, 9 or 10 amino acids (especially but not exceeding 0.1%, preferably 0.2%, 0.5%, 1%, 2%, 3% 4% or 5%), more preferably at least 15, 20, 25, 30, 35, 40, 45 or 50 amino acids (especially but not exceeding 0.5%, preferably 1%, 2%, 3% 4%, 5%, 10% or 25%) different from the sequences as shown in the respective line in Table II, application no. 17, column 5 or 8. These proteins may be improved in efficiency or activity, or may be more stable and therefore present in greater numbers in the cell as compared to the wild-type cell.

[94021] Any mutagenesis strategies for the polypeptide of the present invention or the polypeptide used in the process of the present invention to result in increasing said activity are not meant to be limiting; variations on these strategies will be readily apparent to one skilled in the art. Using such strategies, and incorporating the mechanisms disclosed herein, the nucleic acid molecule and polypeptide of the invention may be utilized to generate algae, ciliates, fungi, other microorganisms like C. glutamicum or plants or parts thereof, expressing proteins as shown in the respective line in Table II, application no. 17, column 5 or 8, or mutated proteins thereof. The nucleic acid molecules and polypeptide molecules of the invention are expressed such that the yield, production, and/or efficiency of production of a desired compound is improved.

[94022] [0399.1.7.17] to [0401.1.7.17] for the disclosure of these paragraphs see [0399.1.7.7] to [0401.1.7.7] above

[94023] In one embodiment, a protein (=polypeptide) as shown in the respective line in Table II, application no. 17, column 5 or 8 refers to a polypeptide having an amino acid sequence corresponding to the polypeptide of the invention, especially to a polypeptide as shown in Table II, application no. 17, columns 5 or 8 or homologs thereof, or used in the process of the invention, whereas a “non-inventive protein or polypeptide” or “other polypeptide” refers to a polypeptide having an amino acid sequence corresponding to a protein which is not substantially homologous to a polypeptide of the invention, preferably which is not substantially homologous to a polypeptide or protein as shown in the respective line in Table II, application no. 17, column 5 or 8 or homologs thereof, e.g., a protein which does not confer the activity described herein and which is derived from the same or a different organism.

[94024] [0403.1.7.17] to [0409.1.7.17] for the disclosure of these paragraphs see [0403.1.7.7] to [0409.1.7.7] above

[94025] As the nucleic acid molecules of the invention and/or the expression thereof is related to the synthesis of the respective fine chemical 3,4,5-trihydroxypentanoic acid, erythrol, fructose, fucose, galactinol, galactitol, glucose, glucose-1-phosphate, mannitol, melibiose, myo-inositol, raffinose, saccharic acid, sedoheptulose-7-phosphate, sorbitol, sucrose, trehalose, or verbascose its function as a probe extends to the detection of microorganisms, plant tissues, plants, plant variets, plant ecotypes or plant genera with varying, advantageously increased, capability or potential for synthesis of the respective fine chemical 3,4,5-trihydroxypentanoic acid, erythrol, fructose, fucose, galactinol, galactitol, glucose, glucose-1-phosphate, mannitol, melibiose, myo-inositol, raffinose, saccharic acid, sedoheptulose-7-phosphate, sorbitol, sucrose, trehalose, or verbascose. Therefore in one embodiment the present invention relates to a method for analyzing the capability or potential of a plant tissue, a plant, a plant variety or ecotype to produce the respective fine chemical 3,4,5-trihydroxypentanoic acid, erythrol, fructose, fucose, galactinol, galactitol, glucose, glucose-1-phosphate, mannitol, melibiose, myo-inositol, raffinose, saccharic acid, sedoheptulose-7-phosphate, sorbitol, sucrose, trehalose, or verbascose by using the respective antibody of the invention as a probe to detect the amount of the polypeptide encoded by said nucleic acid molecule of the invention in a non-human organism in comparison to another organism.

[94026] Therefore in one embodiment the invention relates to a method to probe a non-human organism for its capability for the production of the respective fine chemical comprising the steps of
[94027] a) analyzing the sequence and/or the expression of the respective nucleic acid molecule of the invention in least two non-human organisms which differ in the capability to produce the respective fine chemical;
[94028] b) associate the different sequence and/or expression level of the nucleic acid molecules of the invention with their different capability to produce the respective fine chemical;
[94029] c) analyze the sequence and/or the expression of the nucleic acid molecule of the invention in at least a third non-human organism;
[94030] d) predict the capability of the at least third organism to produce the respective fine chemical based by comparing the sequence and/or expression of the nucleic acid of the invention to the sequences and/or expression levels of the nucleic acid molecule of the invention of the at least two organisms analyzed in step a.

[94031] [0411.1.7.17] to [0430.1.7.17] for the disclosure of these paragraphs see [0411.1.7.7] to [0430.1.7.7] above

[94032] Accordingly the present invention relates to any cell transgenic for any nucleic acid characterized as part of the invention, e.g. conferring the increase of the respective fine chemical 3,4,5-trihydroxypentanoic acid, erythrol, fructose, fucose, galactinol, galactitol, glucose, glucose-1-phosphate, mannitol, melibiose, myo-inositol, raffinose, saccharic acid, sedoheptulose-7-phosphate, sorbitol, sucrose, trehalose, or verbascose in a cell or a non-human organism or a part thereof, e.g. the nucleic acid molecule of the invention, the nucleic acid construct of the invention, the vector of the invention, the expression cassette according to the invention, or a nucleic acid molecule encoding the polypeptide of the invention, e.g. encoding a polypeptide having an activity as the protein as shown in the respective line in Table II, application no. 17, column 3. Due to the above-mentioned activity the respective fine chemical 3,4,5-trihydroxypentanoic acid, erythrol, fructose, fucose, galactinol, galactitol, glucose, glucose-1-phosphate, mannitol, melibiose, myo-inositol, raffinose, saccharic acid, sedoheptulose-7-phosphate, sorbitol, sucrose, trehalose, or verbascose content in a cell or a non-human organism is increased. For example, due to modulation or manipulation, the cellular activity is increased, in a preferred embodiment in organelles such as plastids or mitochondria, e.g. due to an increased expression or specific activity or specific targeting of the subject matters of the invention in a cell or a non-human organism or a part thereof especially in organelles such as plastids or mitochondria, or in another embodiment in the cytosol. Transgenic for a polypeptide having a protein or a protein activity means herein that due to modulation or manipulation of the genome, the activity of protein as shown in the respective line in Table II, application no. 17, column 3 or a protein as shown in the respective line in Table II, application no. 17, column 3like activity is increased in the cell or non-human organism or part thereof, especially in organelles such as plastids or mitochondria, or especially in the cytosol. Examples are described above in context with the process of the invention.

[94033] for the disclosure of this paragraph see [0432.1.7.7] above

[94034] A naturally occurring expression cassette—for example the naturally occurring combination of the promoter of the gene encoding a protein as shown in the respective line in Table II, application no. 17, column 5 or 8, preferably the coding region thereof, or fragments or homologs thereof with the corresponding encoding gene—becomes a transgenic expression cassette when it is modified by non-natural, synthetic “artificial” methods such as, for example, mutagenesis. Such methods have been described (U.S. Pat. No. 5,565,350; WO 00/15815; also see above).

[94035] for the disclosure of this paragraph see [0434.1.7.7] above

[94036] for the disclosure of this paragraph see [0435.1.7.7] above

[94037] Transgenic plants comprising the respective fine chemical(s) synthesized in the process according to the invention can be marketed directly without isolation of the fine chemical synthesized. In the process according to the invention, plants are understood as meaning all plant parts, plant organs such as leaf, stalk, root, tubers or seeds or propagation material or harvested material or the intact plant. In this context, the seed encompasses all parts of the seed such as the seed coats, epidermal cells, seed cells, endosperm or embryonic tissue. The fine chemical produced in the process according to the invention may, however, also be isolated from the plant. In case of 3,4,5-trihydroxypentanoic acid, erythrol, fructose, fucose, galactinol, galactitol, glucose, glucose-1-phosphate, mannitol, melibiose, myo-inositol, raffinose, saccharic acid, sedoheptulose-7-phosphate, sorbitol, sucrose, trehalose, or verbascose this can be in free form or bound to proteins. Fine chemical(s) produced by this process can be harvested by harvesting the non-human organisms either from the culture in which they grow or from the field. For example, this can be done via squeezing, grinding and/or extraction, salt precipitation and/or ion-exchange chromatography of the plant parts, preferably the plant seeds, plant fruits, plant tubers and the like.

[94038] [0437.1.7.17] to [0447.1.7.17] for the disclosure of these paragraphs see [0437.1.7.7] to [0447.1.7.7] above

[94039] The identity and purity of the isolated compound(s) can be determined by prior art techniques. These include high performance liquid chromatography (HPLC), spectroscopic methods, mass spectrometry (MS), staining methods, thin-layer chromatography, NIRS, enzyme assay or microbiological assays. These analytical methods are summarized for example in: Patek et al., Appl. Environ. Microbiol. 60, 133 (1994), Malakhova et al., Biotekhnologiya 11, 27 (1996); Schmidt et al., Bioprocess Engineer. 19, 67 (1998), Ullmann's Encyclopedia of Industrial Chemistry (1996) Vol. A27, VCH, Weinheim, pp. 89-90, pp. 521-540, pp. 540-547, pp. 559566, 575-581 and pp. 581-587, Michal G., “Biochemical Pathways: An Atlas of Biochemistry and

[94040] Molecular Biology”, John Wiley and Sons (1999); Fallon A. et al. “Applications of HPLC in Biochemistry” in “Laboratory Techniques in Biochemistry and Molecular Biology”, Vol. 17 (1987). The fine chemical of the invention can for example be analyzed advantageously via HPLC or GC separation methods and detected by MS or MSMS methods. The unambiguous detection for the presence of the fine chemical containing products can be obtained by analyzing recombinant organisms using analytical standard methods: GC, GC-MS or TLC, as described on several occasions by Christie and the references therein (1997, in: Advances on Lipid Methodology, Fourth Edition: Christie, Oily Press, Dundee, 119-169; 1998, GaschromatographieMassenspektrometrie-Verfahren [Gas chromatography/mass spectrometric methods], Lipide 33:343-353). The material to be analyzed can be disrupted by sonication, grinding in a glass mill, liquid nitrogen and grinding, cooking, or via other applicable methods; see also Biotechnology of Vitamins, Pigments and Growth Factors, Edited by Erik J. Vandamme, London, 1989, p.96 to 103.

[94041] The fine chemical obtained in the process are suitable as starting material for the synthesis of further products of value. For example, in case of vitamins they can be used in combination with each other or alone for the production of pharmaceuticals, foodstuffs, animal feeds or cosmetics.

[94042] Accordingly, the present invention relates to a method for the production of pharmaceuticals, food stuff, animal feeds, nutrients or cosmetics comprising the steps of the process according to the invention, including the isolation of the saccharides composition produced or the produced fine chemical carbohydrate, e.g. monosaccharides, preferably fructose and/or glucose, or other pentoses or hexoses; in free or bound form, preferably glucose-1-phosphate and/or sedoheptulose-7-phosphate; and/or derivates of monosaccharides, preferably (sugar) acids, e.g. saccharic acid, 3,4,5-trihydroxypentanoic acid; and/or sugar alcohols e.g. erythrol, galactitol, sorbitol, mannitol and/or myo-inositol; and/or deoxy-derivates, e.g. fucose; and/or disaccharides, preferably sucrose, melibiose, galactinol and/or trehalose, and/or oligosaccharides, preferably the

[94043] RFOs (raffinose family of oligosaccharides: preferably the trisaccharide raffinose and/or the pentasaccharide verbascose), and/or polysaccharides, preferably starch and/or cellulose if desired and formulating the product with a pharmaceutical or cosmetic acceptable carrier or formulating the product in a form acceptable for an application in agriculture. A further embodiment according to the invention is the use of the sugars, preferably fructose produced in the process or of the transgenic organisms in animal feeds, foodstuffs, medicines, food supplements, cosmetics or pharmaceuticals.

[94044] In one embodiment of the invention erytrhol is used as growth-accelerating factor on plants and microorganisms and/or as component of toothpaste.

[94045] In one embodiment of the invention mannitol and/or sorbitol is used as sugar substitute.

[94046] In one embodiment of the invention D-sedoheptulose-7-phosphate is used synthesis of the more generic family of pyralomycin antibiotics.

[94047] In one embodiment of the invention Saccharic acid can be used as detergent to substitute for phosphates, as corrosion inhibitor and/or as a building block in the synthesis of polymers, such as nylon.

[94048] [0450.1.7.17] to [0452.1.7.17] for the disclosure of these paragraphs see [0450.1.7.7] to [0452.1.7.7] above

[94049] Further in another embodiment, the present invention relates to the use of the nucleic acid molecule of the invention or used in the method of the invention alone or in combination with other genes of the respective fine chemical synthesis for example of the saccharide (carbohydrates) biosynthesis, the polypeptide of the invention or used in the method of the invention, the nucleic acid construct of the invention, the expression cassette of the invention, the vector of the invention, the plant or plant tissue or the host cell of the invention, for the production of plant resistant to a herbicide inhibiting eventually the production of the fine chemical.

[94050] for the disclosure of this paragraph see [0454.1.7.7] above

[94051] In one embodiment, the present invention relates to a method for the identification of a gene product conferring the production of or an increase in the fine chemical production in a non-human cell, comprising the following steps:
[94052] (a) contacting, e.g. hybridizing, a, some or all nucleic acid molecules of a sample, e.g. cells, tissues, plants or microorganisms or a nucleic acid library, which can contain a candidate gene encoding a gene product conferring the production of or an increase in the fine chemical after expression, with the nucleic acid molecule of the present invention as shown in the respective line in column 5 or 8 of Table I A or B of application no. 17, preferably the coding region thereof, or a fragment or homolog thereof;
[94053] (b) identifying the nucleic acid molecules, which hybridize under relaxed stringent conditions with the nucleic acid molecule of the present invention in particular to the nucleic acid molecule sequence shown in the respective line in Table I, application no. 17, columns 5 or 8, preferably the coding region thereof, of a fragment or a homolog thereof, preferably in Table I B, application no. 17, columns 5 or 8, preferably the coding region thereof, of a fragment or a homolog thereof, and, optionally, isolating the full length cDNA clone or complete genomic clone;
[94054] (c) introducing the candidate nucleic acid molecules or a fragment thereof in host cells, preferably in a plant cell or a microorganism, appropriate for producing the fine chemical;
[94055] (d) expressing the identified nucleic acid molecules in the host cells for which the production of or the increased production of the fine chemical is desired;
[94056] (e) assaying the fine chemical level in the non-human host cells; and
[94057] (f) identifying the nucleic acid molecule and/or its gene product which expression confers the production of or an increase in the fine chemical level in the non-human host cell after expression compared to the wild type.

[94058] for the disclosure of this paragraph see [0456.1.7.7] above

[94059] In another embodiment, the present invention relates to a method for the identification of a gene product conferring the production of or an increase in the fine chemical production in a cell, comprising the following steps:
[94060] (a) identifying a nucleic acid molecule of a non-human organism, which is at least 20%, 25%, 30%, 35%, 40%, 50%, 60%, 70%, 80%, 90%, 95%, 96%, 97%, 98%, 99%, 99.5% or more homolog to the nucleic acid molecule encoding a polypeptide comprising the polypeptide molecule as shown in the respective line in column 5 or 8 of Table II, application no. 17, or comprising a consensus sequence or a polypeptide motif as shown in the respective line in column 8 of Table IV, application no. 17, or being encoded by a nucleic acid molecule comprising a polynucleotide as shown in the respective line in column 5 or 8 of Table I, application no. 17, preferably the coding region thereof, or a homologue thereof as described herein, for example via homology search in a data bank;
[94061] (b) introducing the candidate nucleic acid molecule in non-human host cells, preferably in a plant cell or a microorganism, appropriate for producing the fine chemical;
[94062] (c) expressing the identified nucleic acid molecule in the non-human host cells;
[94063] (d) assaying the fine chemical level in the non-human host cells; and
[94064] (e) identifying the nucleic acid molecule and its gene product which expression confers the production of or an increase in the fine chemical level in the non-human host cell after expression compared to the wild type.

[94065] for the disclosure of this paragraph see [0458.1.7.7] above

[94066] Further, the nucleic acid molecules disclosed herein, in particular the nucleic acid molecules shown in the respective line in column 5 or 8 of Table I A or B of application no. 17, may be sufficiently homologous to the sequences of related species such that these nucleic acid molecules may serve as markers for the construction of a genomic map in related organism or for association mapping. Furthermore natural variation in the genomic regions corresponding to nucleic acids disclosed herein, in particular the nucleic acid molecule shown in the respective line in column 5 or 8 of Table I A or B, of application no. 17 or homologous thereof, may lead to variation in the activity of the proteins disclosed herein, in particular the proteins comprising polypeptides as shown in the respective lines in column 5 or 8 of Table II A or B, of application no. 17 or their homologous, or comprising the consensus sequence or the polypeptide motif as shown in the respective line in column 8 of Table IV, and in consequence in a natural variation of an increased fine chemical production.

[94067] In consequence natural variation eventually also exists in form of more active allelic variants leading already to a relative increase in the fine chemical. Different variants of the nucleic acid molecules disclosed herein, in particular the nucleic acid molecules comprising the nucleic acid molecules as shown in the respective line in column 5 or 8 of Table I A or B of application no. 17, preferably the coding region thereof, which corresponds to different levels of increase in fine chemical, e.g. different levels of increase in fine chemical, can be indentified and used for marker assisted breeding for an enhanced production of the fine chemical.

[94068] Natural variation may also exist in the regulatory regions, e.g. the promoters of the natural genes comprising the nucleic acid molecules as shown in the respective line column 5 or 8 of Table I A or B of application no. 17, preferably the coding region thereof, which can similarly correspond to different levels of increase in the fine chemical, e.g. different levels of increase in the fine chemical can be identified and used for marker assisted breeding for an enhanced production of the fine chemical.

[94069] Accordingly, the present invention relates to a method for breeding plants for the production of the fine chemical, comprising
[94070] (a) selecting a first plant variety with an increased production of the fine chemical, e.g. based on an increased expression of a nucleic acid molecule of the invention as disclosed herein, in particular of a nucleic acid molecule comprising a nucleic acid molecule as shown in the respective line in column 5 or 8 of Table I A or B of application no. 17, preferably the coding region thereof, or fragments or homologs thereof, or a polypeptide comprising a polypeptide as shown in the respective line in column 5 or 8 of Table II A or B of application no. 17, or fragments or homologs thereof, or comprising a consensus sequence or a polypeptide motif as shown in the respective line in column 8 of Table IV, or a homolog thereof, as described herein;
[94071] (b) associating the level of increased production of the fine chemical, with the expression level or the genomic structure of a gene encoding said polypeptide or said nucleic acid molecule;
[94072] (c) crossing the first plant variety with a second plant variety, which significantly differs in its level of fine chemical; and
[94073] (d) identifying, which of the offspring varieties has got increased production of the fine chemical by the expression level of said polypeptide or nucleic acid molecule or the genomic structure of the gene(s) encoding said polypeptide or nucleic acid molecule of the invention.

[94074] [0462.1.7.17] to [0479.1.7.17] for the disclosure of these paragraphs see [0462.1.7.7] to [0479.1.7.7] above

[94075] In a further embodiment the nucleic acid molecule of the invention, the polypeptide of the invention, the nucleic acid construct of the invention, the expression cassette of the invention, the non-human organisms, the non-human host cell, the microorganisms, the plant, plant cell, or the part thereof, of the invention, the vector of the invention, the agonist identified with the method of the invention, the nucleic acid molecule identified with the method of the present invention, can be used for the production of the fine chemical saccharides or of the fine chemical sacharides and one or more other saccharides (carbohydrates).

[94076] Accordingly, the nucleic acid molecule of the invention, or the nucleic acid molecule identified with the method of the present invention or the complement sequences thereof, the polypeptide of the invention, the nucleic acid construct of the invention, the expression cassette of the invention, the non-human organism, the non-human host cell, the microorganism, the plant, plant cell, or the part thereof of the invention, the vector of the invention, the agonist identified with the method of the invention, the antibody of the present invention, can be used for the production of or the increase in the fine chemical in a non-human organism or part thereof, e.g. in a cell.

[94077] for the disclosure of this paragraph see [0481.1.7.7] above

[94078] for the disclosure of this paragraph see [0482.1.7.7] above

[94079] A special embodiment of this invention is related to genes which increase or generate the production of the fine chemical fructose, glucose, raffinose and/or trehalose in plant cells, plants or part thereof. Phenotypes thereto are associated with yield of plants (=yield related phenotypes). In accordance with the invention, therefore, the respective genes identified in Table I, wherein in column 7 fructose, glucose, raffinose and/or trehalose are mentioned, especially the coding region thereof, or homologs or fragments thereof,may be employed to enhance any yield-related phenotype. Increased yield may be determined in field trials of transgenic plants and suitable control plants. Alternatively, a transgene's ability to increase yield may be determined in a model plant. An increased yield phenotype may be determined in the field test or in a model plant by measuring any one or any combination of the following phenotypes, in comparison to a control plant: yield of dry harvestable parts of the plant, yield of dry aerial harvestable parts of the plant, yield of underground dry harvestable parts of the plant, yield of fresh weight harvestable parts of the plant, yield of aerial fresh weight harvestable parts of the plant yield of underground fresh weight harvestable parts of the plant, yield of the plant's fruit (both fresh and dried), grain dry weight, yield of seeds (both fresh and dry), and the like. The most basic yield-related phenotype is increased yield associated with the presence of the gene or a homolog or a fragment thereof as a transgene in the plant, i.e., the intrinsic yield of the plant. Intrinsic yield capacity of a plant can be, for example, manifested in a field test or in a model system by demonstrating an improvement of seed yield (e.g. in terms of increased seed/grain size, increased ear number, increased seed number per ear, improvement of seed filling, improvement of seed composition, embryo and/or endosperm improvements, and the like); modification and improvement of inherent growth and development mechanisms of a plant (such as plant height, plant growth rate, pod number, pod position on the plant, number of internodes, incidence of pod shatter, efficiency of nodulation and nitrogen fixation, efficiency of carbon assimilation, improvement of seedling vigour/early vigour, enhanced efficiency of germination (under non-stressed conditions), improvement in plant architecture.

[94080] Increased yield-related phenotypes may also be measured to determine tolerance to abiotic environmental stress. Abiotic stresses include drought, low temperature, salinity, osmotic stress, shade, high plant density, mechanical stresses, and oxidative stress, and yield-related phenotypes are encompassed by tolerance to such abiotic stresses. Additional phenotypes that can be monitored to determine enhanced tolerance to abiotic environmental stress include, without limitation, wilting; leaf browning; loss of turgor, which results in drooping of leaves or needles stems, and flowers; drooping and/or shedding of leaves or needles; the leaves are green but leaf angled slightly toward the ground compared with controls; leaf blades begun to fold (curl) inward; premature senescence of leaves or needles; loss of chlorophyll in leaves or needles and/or yellowing. Any of the yield-related phenotypes described above may be monitored in field tests or in model plants to demonstrate that a transgenic plant has increased tolerance to abiotic environmental stress. In accordance with the invention, the respective genes identified in Table 1, in case in column 7 fructose, glucose, raffinose and/or trehalose is indicated, especially the coding region thereof, or homologs or fragments thereof, may be employed to enhance tolerance to abiotic environmental stress in a plant means that the plant, when confronted with abiotic environmental stress.

[94081] A polypeptide conferring an yield-increasing activity can be encoded by a respective nucleic acid sequence as shown in Table I, column 5 or 8, and/or comprises or consists of a respective polypeptide as depicted in Table II, column 5 and 8, and/or can be amplified with the respective primer set shown in Table III, column 8, in case in column 7 fructose, glucose, raffinose and/or trehalose is indicated.

[94082] “Improved adaptation” to environmental stress like e.g. freezing and/or chilling temperatures refers to an improved plant performance under environmental stress conditions.

[94083] A modification, i.e. an increase, can be caused by endogenous or exogenous factors. For example, an increase in activity in an organism or a part thereof can be caused by adding a gene product or a precursor or an activator or an agonist to the media or nutrition or can be caused by introducing said subjects into an organism, transient or stable. Furthermore such an increase can be reached by the introduction of the respective inventive nucleic acid sequence or the encoded protein in the correct cell compartment for example into the nucleus or cytoplasmic respectively or into plastids either by transformation and/or targeting.

[94084] The term “yield” as used herein generally refers to a measurable produce from a plant, particularly a crop. Yield and yield increase (in comparison to a non-transformed starting or wild-type plant) can be measured in a number of ways, and it is understood that a skilled person will be able to apply the correct meaning in view of the particular embodiments, the particular crop concerned and the specific purpose or application concerned. The terms “improved yield” or “increased yield” can be used interchangeable.

[94085] As used herein, the term “improved yield” or the term “increased yield” means any improvement in the yield of any measured plant product, such as grain, fruit or fiber. In accordance with the invention, changes in different phenotypic traits may improve yield. For example, and without limitation, parameters such as floral organ development, root initiation, root biomass, seed number, seed weight, harvest index, tolerance to abiotic environmental stress, leaf formation, phototropism, apical dominance, and fruit development, are suitable measurements of improved yield. Any increase in yield is an improved yield in accordance with the invention. For example, the improvement in yield can comprise a 0.1%, 0.5%, 1%, 3%, 5%, 10%, 15%, 20%, 30%, 40%, 50%, 60%, 70%, 80%, 90% or greater increase in any measured parameter. For example, an increase in the bushel/acre yield of soybeans or corn derived from a crop comprising plants which are transgenic for the nucleotides and polypeptides of Table I, in case in column 7 fructose, glucose, raffinose and/or trehalose is mentioned, as compared with the bushel/acre yield from untreated soybeans or corn cultivated under the same conditions, is an improved yield in accordance with the invention. The increased or improved yield can be achieved in the absence or presence of stress conditions.

[94086] For example, enhanced or increased “yield” refers to one or more yield parameters selected from the group consisting of biomass yield, dry biomass yield, aerial dry biomass yield, underground dry biomass yield, fresh-weight biomass yield, aerial fresh-weight biomass yield, underground fresh-weight biomass yield; enhanced yield of harvestable parts, either dry or fresh-weight or both, either aerial or underground or both; enhanced yield of crop fruit, either dry or fresh-weight or both, either aerial or underground or both; and preferably enhanced yield of seeds, either dry or fresh-weight or both, either aerial or underground or both. Crop yield is defined herein as the number of bushels of relevant agricultural product (such as grain, forage, or seed) harvested per acre. Crop yield is impacted by abiotic stresses, such as drought, heat, salinity, and cold stress, and by the size (biomass) of the plant. Traditional plant breeding strategies are relatively slow and have in general not been successful in conferring increased tolerance to abiotic stresses. Grain yield improvements by conventional breeding have nearly reached a plateau in maize.

[94087] Accordingly, the yield of a plant can depend on the specific plant/crop of interest as well as its intended application (such as food production, feed production, processed food production, biofuel, biogas or alcohol production, or the like) of interest in each particular case. Thus, in one embodiment, yield is calculated as harvest index (expressed as a ratio of the weight of the respective harvestable parts divided by the total biomass), harvestable parts weight per area (acre, square meter, or the like); and the like. The harvest index, i.e., the ratio of yield biomass to the total cumulative biomass at harvest, in maize has remained essentially unchanged during selective breeding for grain yield over the last hundred years. Accordingly, recent yield improvements that have occurred in maize are the result of the increased total biomass production per unit land area. This increased total biomass has been achieved by increasing planting density, which has led to adaptive phenotypic alterations, such as a reduction in leaf angle, which may reduce shading of lower leaves, and tassel size, which may increase harvest index. Harvest index is relatively stable under many environmental conditions, and so a robust correlation between plant size and grain yield is possible. Plant size and grain yield are intrinsically linked, because the majority of grain biomass is dependent on current or stored photosynthetic productivity by the leaves and stem of the plant. As with abiotic stress tolerance, measurements of plant size in early development, under standardized conditions in a growth chamber or greenhouse, are standard practices to measure potential yield advantages conferred by the presence of a transgene.

[94088] Acccordingly, the yield of a plant can be increased by improving one or more of the yield-related phenotypes.

[94089] Such yield-related phenotypes or traits of a plant the improvement of which results in increased yield comprise, without limitation, the increase of the intrinsic yield capacity of a plant, improved nutrient use efficiency, and/or increased stress tolerance.

[94090] For example, yield refers to biomass yield, e.g. to dry weight biomass yield and/or fresh-weight biomass yield. Biomass yield refers to the aerial or underground parts of a plant, depending on the specific circumstances (test conditions, specific crop of interest, application of interest, and the like). In one embodiment, biomass yield refers to the aerial and underground parts. Biomass yield may be calculated as fresh-weight, dry weight or a moisture adjusted basis. Biomass yield may be calculated on a per plant basis or in relation to a specific area (e.g. biomass yield per acre/square meter/ or the like).

[94091] In other embodiment, “yield” refers to seed yield which can be measured by one or more of the following parameters: number of seeds or number of filled seeds (per plant or per area (acre/square meter/ or the like)); seed filling rate (ratio between number of filled seeds and total number of seeds); number of flowers per plant; seed biomass or total seeds weight (per plant or per area (acre/square meter/ or the like); thousand kernel weight (TKW; extrapolated from the number of filled seeds counted and their total weight; an increase in TKW may be caused by an increased seed size, an increased seed weight, an increased embryo size, and/or an increased endosperm). Other parameters allowing to measure seed yield are also known in the art. Seed yield may be determined on a dry weight or on a fresh weight basis, or typically on a moisture adjusted basis, e.g. at 15.5 percent moisture.

[94092] For example, the term “increased yield” means that the plant, exhibits an increased growth rate, under conditions of abiotic environmental stress, compared to the corresponding wild-type plant.

[94093] An increased growth rate may be reflected inter alia by or confers an increased biomass production of the whole plant, or an increased biomass production of the aerial parts of a plant, or by an increased biomass production of the underground parts of a plant, or by an increased biomass production of parts of a plant, like stems, leaves, blossoms, fruits, and/or seeds.

[94094] Increased yield includes higher fruit yields, higher seed yields, higher fresh matter production, and/or higher dry matter production.

[94095] The term “increased yield” means that the plant, exhibits a prolonged growth under conditions of abiotic environmental stress, as compared to the corresponding, e.g. non-transformed, wild type organism. A prolonged growth comprises survival and/or continued growth of the plant, at the moment when the non-transformed wild type organism shows visual symptoms of deficiency and/or death.

[94096] When the plant of the invention is a corn plant increased yield for corn plants means, for example, increased seed yield, in particular for corn varieties used for feed or food. Increased seed yield of corn refers to an increased kernel size or weight, an increased kernel per ear, or increased ears per plant. Alternatively or in addition the cob yield may be increased, or the length or size of the cob is increased, or the kernel per cob ratio is improved.

[94097] When the plant of the invention is a soy plant, increased yield for soy plants means increased seed yield, in particular for soy varieties used for feed or food. Increased seed yield of soy refers for example to an increased kernel size or weight, an increased kernel per pod, or increased pods per plant.

[94098] When the plant of the invention is an oil seed rape (OSR) plant, increased yield for OSR plants means increased seed yield, in particular for OSR varieties used for feed or food. Increased seed yield of OSR refers to an increased seed size or weight, an increased seed number per silique, or increased siliques per plant.

[94099] When the plant of the invention is a cotton plant, increased yield for cotton plants means increased lint yield. Increased lint yield of cotton refers in one embodiment to an increased length of lint.

[94100] When the plant of the invention is a wheat plant increased yield for wheat plants means, for example, increased seed yield, in particular for wheat varieties used for feed or food. Increased seed yield of wheat refers to an increased kernel size or weight, an increased kernel per ear, or increased ears per plant. Increased seed yield of wheat refers also to an increased grain size or weight, an increased number of grains per spike, or increased number of spikes per plant. Alternatively or in addition increased seed yield of wheat refers also to an increased grain yield, increased length of spikes, increased number of spikelets per spike , increased 1000 grain weight or increased flag leaf area (flag leaf is the leaf directely below the spike).

[94101] Said increased yield can typically be achieved by enhancing or improving, one or more yield-related traits of the plant. Such yield-related traits of a plant comprise, without limitation, the increase of the intrinsic yield capacity of a plant, improved nutrient use efficiency, and/or increased stress tolerance, in particular increased abiotic stress tolerance.

[94102] Intrinsic yield capacity of a plant can be, for example, manifested by improving the specific (intrinsic) seed yield (e.g. in terms of increased seed/ grain size, increased ear number, increased seed number per ear, improvement of seed filling, improvement of seed composition, embryo and/or endosperm improvements, or the like); modification and improvement of inherent growth and development mechanisms of a plant (such as plant height, plant growth rate, pod number, pod position on the plant, number of internodes, incidence of pod shatter, efficiency of nodulation and nitrogen fixation, efficiency of carbon assimilation, improvement of seedling vigour/early vigour, enhanced efficiency of germination (under stressed or non-stressed conditions), improvement in plant architecture, cell cycle modifications, photosynthesis modifications, various signaling pathway modifications, modification of transcriptional regulation, modification of translational regulation, modification of enzyme activities, and the like); and/or the like.

[94103] The improvement or increase of stress tolerance of a plant can for example be manifested by improving or increasing a plant's tolerance against stress, particularly abiotic stress. In the present application, abiotic stress refers generally to abiotic environmental conditions a plant is typically confronted with, including, but not limited to, drought (tolerance to drought may be achieved as a result of improved water use efficiency), heat, low temperatures and cold conditions (such as freezing and chilling conditions), salinity, osmotic stress , shade, high plant density, mechanical stress, oxidative stress, and the like.

[94104] The increased plant yield can also be mediated by increasing the “nutrient use efficiency of a plant”, e.g. by improving the use efficiency of nutrients including, but not limited to, phosphorus, potassium, and nitrogen. Further, higher yields may be obtained with current or standard levels of nitrogen use.

[94105] Generally, the term “increased tolerance to stress” can be defined as survival of plants, and/or higher yield production, under stress conditions as compared to a non-transformed wild type or starting plant: For example, the plant of the invention or produced according to the method of the invention is better adapted to the stress conditions. “Improved adaptation” to environmental stress like e.g. drought, heat, nutrient depletion, freezing and/or chilling temperatures refers herein to an improved plant performance resulting in an increased yield, particularly with regard to one or more of the yield related traits as defined in more detail above.

[94106] During its life-cycle, a plant is generally confronted with a diversity of environmental conditions. Any such conditions, which may, under certain circumstances, have an impact on plant yield, are herein referred to as “stress” condition. Environmental stresses may generally be divided into biotic and abiotic (environmental) stresses. Unfavorable nutrient conditions are sometimes also referred to as “environmental stress”. The present invention does also contemplate solutions for this kind of environmental stress, e.g. referring to increased nutrient use efficiency.

[94107] For the purposes of the description of the present invention, the terms “enhanced tolerance to abiotic stress”, “enhanced resistance to abiotic environmental stress”, “enhanced tolerance to environmental stress”, “improved adaptation to environmental stress” and other variations and expressions similar in its meaning are used interchangeably and refer, without limitation, to an improvement in tolerance to one or more abiotic environmental stress(es) as described herein and as compared to a corresponding origin or wild type plant or a part thereof.

[94108] The term abiotic stress tolerance(s) refers for example low temperature tolerance, drought tolerance or improved water use efficiency (WUE), heat tolerance, salt stress tolerance and others.

[94109] Studies of a plant's response to desiccation, osmotic shock, and temperature extremes are also employed to determine the plant's tolerance or resistance to abiotic stresses. Water use efficiency (WUE) is a parameter often correlated with drought tolerance. In selecting traits for improving crops, a decrease in water use, without a change in growth would have particular merit in an irrigated agricultural system where the water input costs were high. An increase in growth without a corresponding jump in water use would have applicability to all agricultural systems. In many agricultural systems where water supply is not limiting, an increase in growth, even if it came at the expense of an increase in water use also increases yield.

[94110] Drought stress means any environmental stress which leads to a lack of water in plants or reduction of water supply to plants, including a secondary stress by low temperature and/or salt, and/or a primary stress during drought or heat, e.g. desiccation etc.

### Specific Embodiments

[94111] Accordingly, this invention provides respective measures and methods to produce plants with increased yield, e.g. genes conferring an increased yield-related trait, for example enhanced tolerance to abiotic environmental stress, for example an increased drought tolerance and/or low temperature tolerance and/or an increased nutrient use efficiency, intrinsic yield and/or another increased yield-related trait, upon expression or over-expression. Accordingly, the present invention provides such genes in case in column 7 of the respective Table or fructose, glucose, raffinose and/or trehalose is indicated. In particular, such genes are described in column 5 as well as in column 8 of Tables I, especially the coding region thereof, or homologs or fragments thereof, in case fructose, glucose, raffinose and/or trehalose are indicated in column 7 or the respective polypeptides are described in column 5 as well as in column 8 of Table II, or homologs or fragments thereof, in case fructose, glucose, raffinose and/or trehalose are indicated in column 7.

[94112] Accordingly, the present invention provides respective transgenic plants showing one or more improved yield-related traits as compared to the corresponding origin or the wild type plant and methods for producing such transgenic plants with increased yield in case in column 7 of the respective Table “fructose” or “glucose” or “raffinose” or “trehalose” is indicated.

[94113] In one embodiment, one or more of said yield-increasing activities are increased by increasing the amount and/or the specific activity of one or more proteins listed in Table II, column 5 or 8 in a compartment of a cell indicated in Table II, column 6, in case in column 7 of the respective Table “fructose” or “glucose” or “raffinose” or “trehalose” is indicated.

[94114] Accordingly to present invention, the yield of the plant of the invention is increased by improving one or more of the yield-related traits as defined herein. Said increased yield in accordance with the present invention can typically be achieved by enhancing or improving, in comparison to an origin or wild-type plant, one or more yield-related traits of said plant. Such yield-related traits of a plant the improvement of which results in increased yield comprise, without limitation, the increase of the intrinsic yield capacity of a plant, improved nutrient use efficiency, like nitrogen use efficiency, and/or increased stress tolerance.

[94115] In one embodiment, the present invention provides respective transgenic plants showing one or more improved yield-related traits, preferably increased intrinsic yield as compared to the corresponding origin or the wild type plant and methods for producing such transgenic plants with increased yield in case in column 7 of the respective Table “fructose” or “glucose” or “trehalose” is indicated.

[94116] In one embodiment, the present invention provides respective transgenic plants showing one or more improved yield-related traits, preferably increased drought and/or increased cold stress tolerance as compared to the corresponding origin or the wild type plant and methods for producing such transgenic plants with increased yield in case in column 7 of the respective Table “raffinose”.

[94117] In a further embodiment the present invention is characterized by the features as disclosed in the following items:

[94118] Item 1. A process for the production of a fine chemical selected from the group consisting of: 3,4,5-trihydroxypentanoic acid, erythrol, fructose, fucose, galactinol, galactitol, glucose, glucose-1-phosphate, mannitol, melibiose, myo-inositol, raffinose, saccharic acid, sedoheptulose-7-phosphate, sorbitol, sucrose, trehalose, and/or verbascose
[94119] (a) increasing or generating one or more activities selected from the group consisting of 1,4-alpha-glucan branching enzyme, 2,3-dihydroxy-2,3-dihydrophenylpropionatedehydrogenase, 2-C-methyl-D-erythritol 4-phosphate cytidylyltransferase, 2-oxoglutarate dehydrogenase E1 subunit, 3-deoxy-7-phosphoheptulonate synthase, 3-isopropylmalate dehydratase large subunit, 3-phosphoglycerate dehydrogenase, 47266012-protein, 49747384_SOYBEAN-protein, 4-alpha-glucanotransferase, ABC transporter permease protein, acetyl CoA carboxylase, acetyl CoA synthetase, acetyl-coenzyme A synthetase, acetyltransferase, acid shock protein, acyl carrier protein, acyl transferase, acyl-CoA dehydrogenase, acyl-CoA synthase, adenylosuccinate lyase, alanine dehydrogenase, alcohol dehydrogenase, aldolase, alkaline phosphatase, amine oxidase, amino-acid acetyltransferase, aminotransferase, arginine exporter protein, asparagine synthetase B, At1g19350-protein, At2g45420-protein, At5g16650-protein, At5g43630-protein, ATP synthase subunit E, ATP-binding component of a transport system, auxin response factor, AX653549-protein, AY087308-protein, b0050-protein, b0251-protein, b0362-protein, b0488-protein, B0644-protein, b0801-protein, b0970-protein, b1003-protein, b1046-protein, b1137-protein, b1214-protein, b1219-protein, b1234-protein, b1285-protein, b1357-protein, b1410-protein, b1425-protein, b1445-protein, b1470-protein, b1522-protein, b1556-protein, b1583-protein, b1670-protein, b1796-protein, b1898-protein, b2032-protein, b2107-protein, b2139-protein, b2345-protein, b2360-protein, b2361-protein, b2399-protein, b2466-protein, b2474-protein, b2613-protein, b2653-protein, b2654-protein, b2670-protein, b2673-protein, b2682-protein, b2739-protein, b2932-protein, b3151-protein, b3221-protein, b3246-protein, b3346-protein, B3427-protein, b3442-protein, B3443-protein, b3777-protein, b3817-protein, b3818-protein, b3989-protein, b4029-protein, b4050-protein, b4056-protein, b4250-protein, beta-galactosidase, beta-hydroxylase, betaine aldehyde dehydrogenase, bifunctional protein (phosphoribosyltransferase and regulatory protein), binding-protein-dependent transport systems inner membrane component, branched-chain amino acid ABC transporter permease protein, branched-chain amino acid permease, calcium-dependent protein kinase, carbamoyl-phosphate synthase subunit, cardiolipin synthase, cation-transporting ATPase, CBL-interacting protein kinase, CCAAT-binding transcription factor, CDP-diglyceride synthetase, cell division control protein, cell division protein, chlorophyllase, chorismate lyase, circadian clock protein, colanic acid biosynthesis protein, coproporphyrinogen III oxidase, coproporphyrinogen oxidase, CTP synthase, cullin, cyclin, cyclin D, cystathionine gamma-synthase, cysteine synthase A, dATP pyrophosphohydrolase, dihydrolipoamide dehydrogenase, DNA binding-protein, DNA replication complex GINS protein, DnaJ-like chaperone, electron transfer flavoprotein subunit beta, electron transport complex protein, elongation factor Tu, enoyl-CoA hydratase, eukaryotic translation initiation factor, eukaryotic translation initiation factor 5, fatty acid desaturase, ferredoxin, Fe—S subunit of oxidoreductase, flagellar M-ring protein, flavodoxin, fructose biphosphate aldolase, fumarylacetoacetate hydrolase, galactinol synthase, GDP-mannose 4,6-dehydratase, GDP-mannose dehydrogenase, geranylgeranyl pyrophosphate synthase, gibberellin 20-oxidase, Glu/Leu/Phe/Val dehydrogenase , glucokinase, gluconate transport system permease 3, glucose dehydrogenase, glucose-6-phosphate 1-dehydrogenase, glutamate-ammonia-ligase, glutamine amidotransferase, glutamine synthetase, glutaredoxin, glycerate kinase, glycogen (starch) synthase, glycogen synthase, glycosidase, glycosyl transferase, glycosyltransferase, GM02LC38418-protein, GM02LC46-protein, halotolerance protein, heat shock transcription factor, hexokinase, hexose transporter, high-affinity branched-chain amino acid transport protein, histone acetyltransferase, homocitrate synthase, hydrolase, inositol-3-phosphate synthase, integral membrane protein, intracellular septation protein, ion-transport protein, iron(III) dicitrate-binding protein, isochorismate synthase, isocitrate dehydrogenase, isopropylmalate isomerase large subunit, ketol-acid reductoisomerase, kinase, leucyl/phenylalanyl-tRNA-protein transferase, lipoprotein precursor, L-ribulose-5-phosphate 4-epimerase, L-serine dehydratase, lysine decarboxylase, MADS box protein transcription factor, MADS-box transcription factor, malate dehydrogenase, mannitol-1-phosphate dehydrogenase, membrane protein, membrane transport protein, methylglyoxalase, methyltransferase, Mg-protoporphyrin IX monomethyl ester oxidative cyclase 66 kD subunit, mitogen-activated protein kinase, molecular chaperone, monothiol glutaredoxin, monthiol glutaredoxin, multidrug resistance protein, multiple antibiotic resistance protein, murein transglycosylase, NAD(P)H dehydrogenase (quinone), NADH dehydrogenase, NADH-quinone oxidoreductase subunit, O-acetyltransferase, O-antigen chain length determinant, outer membrane receptor protein precursor, oxidoreductase, oxidoreductase subunit, para-aminobenzoate synthase component I, penicillin-binding protein, peptidyl-prolyl cis-trans isomerase, permease, permease protein of ABC transporter, phage-related repressor protein, phenylacetic acid degradation protein, phenylalanine ammonia-lyase, phosphate acetyltransferase, phosphate permease, phosphatidylinositol 3- and 4-kinase family protein, phosphoadenosine phosphosulfate reductase, phosphoanhydride phosphorylase, phosphoenolpyruvate carboxykinase, phosphoglycerate kinase, phosphohydrolase, phosphotransferase system component, photosystem I reaction center subunit XI, photosystem I reaction centre subunit, photosystem II protein, polyamine transporter, precorrin methylase, protease, protein kinase, protein phosphatase, protein-L-isoaspartate O-methyltransferase, purine biosynthesis protein, purine nucleoside phosphorylase, purine-nucleoside phosphorylase, putative transport system permease protein, putrescine transport system permease protein, pyridoxal phosphate biosynthetic protein, pyrimidine-specific ribonucleoside hydrolase, pyruvate kinase, recombinase A, RNA-binding protein, sec-independent protein translocase, Sec-independent protein translocase subunit, sensor histidine kinase, serine protease, serine/threonine dehydratase, serine/threonine-protein phosphatase, short chain dehydrogenase, short-chain alcohol dehydrogenase family, sll0254-protein, sll0281-protein, sll0354-protein, sll0418-protein, sll1761-protein, slr0600-protein, slr1107-protein, sn-glycerol-3-phosphate dehydrogenase, sn-glycerol-3-phosphate transport system permease protein, sodium/proton antiporter, sterol O-acyltransferase, subunit of COMPASS-protein complex, succinyl-CoA synthetase beta chain, ThiF family protein, thioredoxin, thioredoxin family protein, threonine dehydratase, threonine efflux protein, threonine synthase, transcription factor, transcriptional regulator, transcriptional regulator protein, transport protein, trehalase, trehalose-6-phosphate synthase, trehalose-phosphatase, tryptophan biosynthesis protein, TTC1386-protein, urease accessory protein, urease subunit, vacuolar sorting protein, XM_{—}473199-protein, ycl027w-protein, YCR047W-A-protein, ycr102c-protein, YDL159W-A-protein, ydl235c-protein, ydr183w-protein, ydr507c-protein, YEL030C-A-protein, yer177w-protein, YFL019C-protein, ygl096w-protein, ygl237c-protein, yhl013c-protein, YIL083C-protein, YJL127W-A-protein, ymr324c-protein, yol160w-protein, ypl144w-protein, ypr098c-protein, zinc transporter, and Zm_{—}4842_BE510522-protein, in a non-human organism or a part thereof, preferably a microorganism, a plant cell, a plant or a part thereof, as compared to a corresponding non-transformed wild type non-human organism or a part thereof; and
[94120] (b) growing the non-human organism or a part thereof under conditions which permit the production of 3,4,5-trihydroxypentanoic acid, erythrol, fructose, fucose, galactinol, galactitol, glucose, glucose-1-phosphate, mannitol, melibiose, myo-inositol, raffinose, saccharic acid, sedoheptulose-7-phosphate, sorbitol, sucrose, trehalose, and/or verbascose or a composition comprising 3,4,5-trihydroxypentanoic acid, erythrol, fructose, fucose, galactinol, galactitol, glucose, glucose-1-phosphate, mannitol, melibiose, myo-inositol, raffinose, saccharic acid, sedoheptulose-7-phosphate, sorbitol, sucrose, trehalose, and/or verbascose in said non-human organism or in the culture medium surrounding said non-human organism.

[94121] Item 2. A process for the production of a fine chemical selected from the group consisting of: 3,4,5-trihydroxypentanoic acid, erythrol, fructose, fucose, galactinol, galactitol, glucose, glucose-1-phosphate, mannitol, melibiose, myo-inositol, raffinose, saccharic acid, sedoheptulose-7-phosphate, sorbitol, sucrose, trehalose, and/or verbascose, which comprises
[94122] (A)
   [94123] (i) increasing or generating of the expression of; and/or
   [94124] (ii) increasing or generating the expression of an expression product of; and/or
   [94125] (iii) increasing or generating one or more activities of an expression product encoded by;
      at least one respective nucleic acid molecule comprising a nucleic acid molecule selected from the group consisting of:
   [94126] (a) a nucleic acid molecule encoding the polypeptide shown in column 5 or 8 of Table II, preferably Table II B, application no.17, or a homolog or a fragment thereof;
   [94127] (b) a nucleic acid molecule shown in column 5 or 8 of Table I, preferably Table I B, application no.17, or a homolog or a fragment thereof (preferably the coding region thereof);
   [94128] (c) a nucleic acid molecule, which, as a result of the degeneracy of the genetic code, can be derived from a polypeptide sequence depicted in column 5 or 8 of Table II, preferably Table II B, application no.17;
   [94129] (d) a nucleic acid molecule having at least 30%, in particular at least 50%, 60%, 70%, 80%, 85%, 90%, 95%, 97%, 98%, 99% or 99.5% identity with the nucleic acid molecule sequence of a polynucleotide comprising the nucleic acid molecule shown in column 5 or 8 of Table I, preferably Table I B, application no. 17, or the coding region thereof;
   [94130] (e) a nucleic acid molecule encoding a polypeptide having at least 30%, in particular 50%, 60%, 70%, 80%, 85%, 90%, 95%, 97%, 98%, 99% or 99.5% identity with the amino acid sequence of the polypeptide encoded by the nucleic acid molecule of (a), (b), (c) or (d);
   [94131] (f) a nucleic acid molecule which hybridizes with a nucleic acid molecule of (a), (b), (c), (d) or (e) under stringent hybridization conditions;
   [94132] (g) a nucleic acid molecule encoding a polypeptide which can be isolated with the aid of monoclonal or polyclonal antibodies made against a polypeptide encoded by one of the nucleic acid molecules of (a), (b), (c), (d), (e) or (f);
   [94133] (h) a nucleic acid molecule encoding a polypeptide comprising the consensus sequence or one or more polypeptide motifs as shown in column 8 of Table IV, application no.17;
   [94134] (i) a nucleic acid molecule encoding a polypeptide having the activity represented by a respective protein as depicted in column 5 of Table II, application no. 17;
   [94135] (j) a nucleic acid molecule which comprises a polynucleotide, which is obtained by amplifying a cDNA library or a genomic library using the primers as depicted in column 8 of Table III, application no. 17; and
   [94136] (k) a nucleic acid molecule which is obtainable by screening a suitable nucleic acid library, especially a cDNA library and/or a genomic library, under stringent hybridization conditions with a probe comprising a complementary sequence of a nucleic acid molecule of (a), (b), (c), (d), (e), (f), (g), (h), (i) or (j) or with a fragment thereof, having at least 15 nt, preferably 20 nt, 30 nt, 50 nt, 100 nt, 200 nt, 500 nt, 1000 nt, 1500 nt, 2000 nt or 3000 nt of a nucleic acid molecule complementary to a nucleic acid molecule sequence characterized in (a), (b), (c), (d), (e), (f), (g), (h), (i) or (j);
   [94137] or a nucleic acid molecule comprising a sequence which is complementary thereto;
      in a non-human organism or a part thereof, preferably a microorganism, a plant cell, a plant or a part thereof, as compared to a corresponding non-transformed wild type non-human organism or a part thereof; and
[94138] (B) growing the non-human organism or a part thereof under conditions which permit the production of 3,4,5-trihydroxypentanoic acid, erythrol, fructose, fucose, galactinol, galactitol, glucose, glucose-1-phosphate, mannitol, melibiose, myo-inositol, raffinose, saccharic acid, sedoheptulose-7-phosphate, sorbitol, sucrose, trehalose, and/or verbascose or a composition comprising 3,4,5-trihydroxypentanoic acid, erythrol, fructose, fucose, galactinol, galactitol, glucose, glucose-1-phosphate, mannitol, melibiose, myo-inositol, raffinose, saccharic acid, sedoheptulose-7-phosphate, sorbitol, sucrose, trehalose, and/or verbascose in said non-human organism or in the culture medium surrounding said non-human organism.

[94139] Item 3. A process of items 1 or 2, comprising of recovering 3,4,5-trihydroxypentanoic acid, erythrol, fructose, fucose, galactinol, galactitol, glucose, glucose-1-phosphate, mannitol, melibiose, myo-inositol, raffinose, saccharic acid, sedoheptulose-7-phosphate, sorbitol, sucrose, trehalose, and/or verbascose in its free or bound form.

[94140] Item 4. The process of any one of items 1 to 3, comprising the following steps:
[94141] (a) selecting a non-human organism or a part thereof expressing a polypeptide encoded by the nucleic acid molecule characterized in item 2;
[94142] (b) mutagenizing the selected non-human organism or the part thereof;
[94143] (c) comparing the activity or the expression level of said polypeptide in the mutagenized non-human organism or the part thereof with the activity or the expression of said polypeptide of the selected non-human organisms or the part thereof;
[94144] (d) selecting the mutated non-human organisms or parts thereof, which comprise an increased activity or expression level of said polypeptide compared to the selected non-human organism or the part thereof;
[94145] (e) optionally, growing and cultivating the non-human organisms or the parts thereof; and
[94146] (f) recovering, and optionally isolating, the free or bound 3,4,5-trihydroxypentanoic acid, erythrol, fructose, fucose, galactinol, galactitol, glucose, glucose-1-phosphate, mannitol, melibiose, myo-inositol, raffinose, saccharic acid, sedoheptulose-7-phosphate, sorbitol, sucrose, trehalose, and/or verbascose produced by the selected mutated non-human organisms or parts thereof.

[94147] Item 5. The process of any one of items 1 to 4 wherein the activity of said protein or the expression of said nucleic acid molecule is increased or generated transiently or stably.

[94148] Item 6. An isolated nucleic acid molecule comprising a nucleic acid molecule selected from the group consisting of:
[94149] (a) a nucleic acid molecule encoding a polypeptide shown in Table II, application no. 17, column 5 or 8, preferably shown in Table II B, application no. 17, column 8, or a homolog or a fragment thereof;
[94150] (b) a nucleic acid molecule shown in Table I, application no. 17, column 5 or 8, preferably shown in Table I B, application no. 17, column 8, preferably the coding region thereof, or a homolog or a fragment thereof;
[94151] (c) a nucleic acid molecule, which, as a result of the degeneracy of the genetic code, can be derived from a polypeptide sequence depicted in column 5 or 8 of Table II, application no. 17, preferably in column 8 of Table II B, application no. 17;
[94152] (d) a nucleic acid molecule having at least 30% identity, preferably at least 40%, 50%, 60%, 70%, 75%, 80%, 85%, 90%, 95%, 96%, 97%, 98%, 99%, 99.5%, with the nucleic acid molecule sequence of a polynucleotide comprising the nucleic acid molecule shown in column 5 or 8 of Table I, application no. 17, preferably shown in column 8 of Table I B, application no. 17, preferably the coding region thereof;
[94153] (e) a nucleic acid molecule encoding a polypeptide having at least 30% identity, preferably at least 40%, 50% 60%, 70%, 75%, 80%, 85%, 90%, 95%, 96%, 97%, 98%, 99%, 99.5%, identity with the amino acid sequence of the polypeptide encoded by the nucleic acid molecule of (a), (b), (c) or (d);
[94154] (f) a nucleic acid molecule which hybridizes with a nucleic acid molecule of (a), (b), (c), (d) or (e) under stringent hybridisation conditions;
[94155] (g) a nucleic acid molecule encoding a polypeptide which can be isolated with the aid of monoclonal or polyclonal antibodies made against a polypeptide encoded by one of the nucleic acid molecules of (a), (b), (c), (d), (e) or (f);
[94156] (h) a nucleic acid molecule encoding a polypeptide comprising the consensus sequence or one or more polypeptide motifs as shown in column 8 of Table IV, application no. 17;
[94157] (i) a nucleic acid molecule encoding a polypeptide having the activity represented by a respective protein as depicted in column 5 of Table II, application no. 17;
[94158] (j) a nucleic acid molecule comprising a polynucleotide which is obtained by amplifying a cDNA library or a genomic library using the primers in Table III, application no. 17, column 8;
[94159] and
[94160] (k) nucleic acid molecule which is obtainable by screening a suitable nucleic acid library, especially a cDNA library and/or a genomic library, under stringent hybridization conditions with a probe comprising one of the sequences of the nucleic acid molecule of (a), (b), (c), (d), (e), (f), (g), (h), (i) or (j) or with a fragment of at least 15 nt, preferably 20 nt, 30 nt, 50 nt, 100 nt, 200 nt,500 nt, 1000 nt, 1500 nt, 2000 nt or 3000 nt of the nucleic acid molecule characterized in (a), (b), (c), (d), (e), (f), (g), (h), (i) or (j); or a nucleic acid molecule comprising a sequence which is complementary thereto.

[94161] Item 7. A nucleic acid construct which confers the expression of the nucleic acid molecule as defined in item 6, comprising one or more regulatory elements.

[94162] Item 8. An expression cassette comprising
[94163] (a) a promoter, preferably selected from the group consisting of Big35S, PCUbi, Super and USP;
[94164] (b) a nucleic acid molecule as defined in item 6.

[94165] Item 9. A vector comprising the nucleic acid molecule as defined in item 6 or the nucleic acid construct as claimed in item 7 or the expression cassette as claimed in item 8.

[94166] Item 10. A host cell or a plant organelle, which has been transformed with the vector as claimed in item 9 or the nucleic acid molecule as defined in item 6 or the nucleic acid construct as claimed in item 7 or the expression cassette as claimed in item 8.

[94167] Item 11. The host cell of item 10, which is a plant cell or a microorganism.

[94168] Item 12. A process for producing a polypeptide, wherein the polypeptide is expressed in a host cell as claimed in item 10 or 11.

[94169] Item 13. A polypeptide produced by the process as claimed in item 12 or encoded by the nucleic acid molecule as defined in item 6.

[94170] Item 14. An antibody, which binds specifically to the polypeptide as claimed in item 13.

[94171] Item 15. A plant tissue, propagation material, harvested material or a plant comprising the host cell as claimed in item 10 or 11.

[94172] Item 16. A process for the identification of a compound conferring an increase in 3,4,5-trihydroxypentanoic acid, erythrol, fructose, fucose, galactinol, galactitol, glucose, glucose-1-phosphate, mannitol, melibiose, myo-inositol, raffinose, saccharic acid, sedoheptulose-7-phosphate, sorbitol, sucrose, trehalose, and/or verbascose production in a non-human organism, comprising the steps:
[94173] (a) culturing a plant cell or tissue or microorganism or maintaining a plant expressing the polypeptide encoded by the nucleic acid molecule as defined in item 6 conferring an increase in the amount of 3,4,5-trihydroxypentanoic acid, erythrol, fructose, fucose, galactinol, galactitol, glucose, glucose-1-phosphate, mannitol, melibiose, myo-inositol, raffinose, saccharic acid, sedoheptulose-7-phosphate, sorbitol, sucrose, trehalose, and/or verbascose in a non-human organism or a part thereof and a readout system capable of interacting with the polypeptide under suitable conditions which permit the interaction of the polypeptide with said readout system in the presence of a compound or a sample comprising a plurality of compounds and capable of providing a detectable signal in response to the binding of a compound to said polypeptide under conditions which permit the expression of said readout system and of the polypeptide encoded by the nucleic acid molecule of item 6 conferring an increase in the amount of 3,4,5-trihydroxypentanoic acid, erythrol, fructose, fucose, galactinol, galactitol, glucose, glucose-1-phosphate, mannitol, melibiose, myo-inositol, raffinose, saccharic acid, sedoheptulose-7-phosphate, sorbitol, sucrose, trehalose, and/or verbascose in a non-human organism or a part thereof;
[94174] (b) identifying if the compound is an effective agonist by detecting the presence or absence or increase of a signal produced by said readout system.

[94175] Item 17. A method for the production of an agricultural composition comprising the steps of the method of item 16 and formulating the compound identified in item 16 in a form acceptable for an application in agriculture.

[94176] Item 18. A composition comprising the nucleic acid molecule as defined in item 6, the polypeptide as claimed in item 13, the nucleic acid construct as claimed in item 7, the expression cassette as claimed in item 8, the vector as claimed in item 9, the compound as claimed in item 16, the antibody as claimed in item 14, and optionally an agricultural acceptable carrier.

[94177] Item 19. Use of the nucleic acid molecule as defined in item 6 for the identification of a nucleic acid molecule conferring an increase in 3,4,5-trihydroxypentanoic acid, erythrol, fructose, fucose, galactinol, galactitol, glucose, glucose-1-phosphate, mannitol, melibiose, myo-inositol, raffinose, saccharic acid, sedoheptulose-7-phosphate, sorbitol, sucrose, trehalose, and/or verbascose after expression.

[94178] Item 20. Cosmetic, pharmaceutical, food or feed composition comprising the nucleic acid moleculeas defined in item 6, the polypeptide as claimed in item 13, the nucleic acid construct as claimed in item 7, the expression cassette as claimed in item 8, the vector as claimed in item 9, the antibody as claimed in item 14 , the plant or plant tissue as claimed in item 15, the harvested material as claimed in item 15 or the host cell of item as claimed in items 10 or 11.

[94179] Item 21. Use of the nuclei acid molecule as defined in item 6, the polypeptide as claimed in item 13, the nucleic acid construct as claimed in item 7, the expression cassette as claimed in item 8, the vector as claimed in item 9, the plant or plant tissue as claimed in item 15, or the host cell of item 10 to 11 for the production of plant resistant to a herbicide inhibiting the production of 3,4,5-trihydroxypentanoic acid, erythrol, fructose, fucose, galactinol, galactitol, glucose, glucose-1-phosphate, mannitol, melibiose, myo-inositol, raffinose, saccharic acid, sedoheptulose-7-phosphate, sorbitol, sucrose, trehalose, and/or verbascose.

[94180] Item 22. A method for producing a plant with increased yield as compared to a corresponding non-transformed wild type plant, whereby the method comprises
[94181] (i) increasing or generating of the expression of; and/or
[94182] (ii) increasing or generating the expression of an expression product of; and/or
[94183] (iii) increasing or generating one or more activities of an expression product encoded by;
   at least one respective nucleic acid molecule comprising a nucleic acid molecule selected from the group consisting of:
[94184] (a) a nucleic acid molecule encoding the polypeptide shown in column 5 or 8 of Table II, preferably Table II B, application no. 17, or a homolog or a fragment thereof, in case in column fructose, glucose, raffinose and/or trehalose is indicated;
[94185] (b) a nucleic acid molecule shown in column 5 or 8 of Table I, preferably Table I B, application no. 17, or a homolog or a fragment thereof (preferably the coding region thereof) , in case in column fructose, glucose, raffinose and/or trehalose is indicated;
[94186] (c) a nucleic acid molecule, which, as a result of the degeneracy of the genetic code, can be derived from a polypeptide sequence depicted in column 5 or 8 of Table II, preferably Table II B, application no. 17, in case in column fructose, glucose, raffinose and/or trehalose is indicated;
[94187] (d) a nucleic acid molecule having at least 30%, in particular at least 50%, 60%, 70%, 80%, 85%, 90%, 95%, 97%, 98%, 99% or 99.5% identity with the nucleic acid molecule sequence of a polynucleotide comprising the nucleic acid molecule shown in column 5 or 8 of Table I, preferably Table I B, application no. 17, or the coding region thereof, in case in column fructose, glucose, raffinose and/or trehalose is indicated;
[94188] (e) a nucleic acid molecule encoding a polypeptide having at least 30%, in particular 50%, 60%, 70%, 80%, 85%, 90%, 95%, 97%, 98%, 99% or 99.5% identity with the amino acid sequence of the polypeptide encoded by the nucleic acid molecule of (a), (b), (c) or (d);
[94189] (f) a nucleic acid molecule which hybridizes with a nucleic acid molecule of (a), (b), (c), (d) or (e) under stringent hybridization conditions;
[94190] (g) a nucleic acid molecule encoding a polypeptide which can be isolated with the aid of monoclonal or polyclonal antibodies made against a polypeptide encoded by one of the nucleic acid molecules of (a), (b), (c), (d), (e) or (f);
[94191] (h) a nucleic acid molecule encoding a polypeptide comprising the consensus sequence or one or more polypeptide motifs as shown in column 8 of Table IV, application no. 17, in case in column fructose, glucose, raffinose and/or trehalose is indicated;
[94192] (i) a nucleic acid molecule encoding a polypeptide having the activity represented by a respective protein as depicted in column 5 of Table II, application no. 17, in case in column fructose, glucose, raffinose and/or trehalose is indicated;
[94193] (j) a nucleic acid molecule which comprises a polynucleotide, which is obtained by amplifying a cDNA library or a genomic library using the primers as depicted in column 8 of Table III, application no. 17, in case in column fructose, glucose, raffinose and/or trehalose is indicated; and
[94194] (k) a nucleic acid molecule which is obtainable by screening a suitable nucleic acid library, especially a cDNA library and/or a genomic library, under stringent hybridization conditions with a probe comprising a complementary sequence of a nucleic acid molecule of (a), (b), (c), (d), (e), (f), (g), (h), (i) or (j) or with a fragment thereof, having at least 15 nt, preferably 20 nt, 30 nt, 50 nt, 100 nt, 200 nt, 500 nt, 1000 nt, 1500 nt, 2000 nt or 3000 nt of a nucleic acid molecule complementary to a nucleic acid molecule sequence characterized in (a), (b), (c), (d), (e), (f), (g), (h), (i) or (j);
[94195] or a nucleic acid molecule comprising a sequence which is complementary thereto;
   in a plant cell, plant or a part thereof.

[94196] Item 23. A method for producing a plant with increased yield according to item 22, which comprises in addition the regeneration of a plant from such transformed plant cell, plant cell compartment, plant cell nucleus, plant cell or plant tissue with increased yield.

[94197] [0483.1.7.17] to [0492.1.7.17] for the disclosure of these paragraphs see [0483.1.7.7] to [0492.1.7.7] above

### Example 10

[94198] Purification of a fine chemical e.g. saccharides meaning all of the aforementioned carbohydrate, e.g. monosaccharides, preferably fructose and/or glucose, or other pentoses or hexoses; in free or bound form, preferably glucose1-phosphate and/or sedoheptulose-7-phosphate; and/or derivates of monosaccharides, preferably (sugar) acids, e.g. saccharic acid, 3,4,5-trihydroxypentanoic acid; and/or sugar alcohols e.g. erythrol, galactitol, sorbitol, mannitol and/or myo-inositol; and/or deoxy-derivates, e.g. fucose; and/or disaccharides, preferably sucrose, melibiose, galactinol and/or trehalose, and/or oligosaccharides, preferably the RFOs (raffinose family of oligosaccharides: preferably the trisaccharide raffinose and/or the pentasaccharide verbascose), and/or polysaccharides, preferably starch and/or cellulose

[94199] Saccharides (carbohydrates) can for example be detected advantageously via traditional methods of sugar analysis coupled to chromatography use a Refractive Index Detector (RID) due to a lack of a UV-absorbing chromophore on sugar molecules. Other detectors, like Mass Spectrometry (MS) or Pulsed Amperometric Detection (PAD), are used also. Methods of sugar analysis are capillary electrophoresis, GC, HPLC or LC.

[94200] Saccharides (carbohydrates) are detected by GC or LC combined with MS. Traditional methods of sugar analysis coupled to chromatography use a Refractive Index Detector (RID) due to a lack of a UV-absorbing chromophore on sugar molecules. Other detectors, like Mass Spectrometry (MS) or Pulsed Amperometric Detection (PAD), are used also.

[94201] In one embodiment of the invention the fructose can be detected by chromatography, thin layer chromatography, Gaschromatography (GC), liquid-chromatographie (LC), capillary electrophoresis and HPLC. Alternatively fructose can be detected and analized by bio-sensors: a amperometric enzyme electrode for fructose analysis was constructed, by co-immobilization of a pyrrolo quinoline quinone (PQQ) enzyme (Gluconobacter sp. fructose-5-dehydrogenase, FDH, EC-1.1.99.11) with a mediator in a thin polypyrrole (PP) membrane (Anal.Chim.Acta; (1993) 281, 3, 527-33). Two amperometric biosensors for fructose detection were developed by immobilizing d-fructose 5-dehydrogenase by two different immobilization processes (Analytica Chimica Acta, Volume 374, Number 2, 23 November 1998, pp. 201-208(8)). In one embodiment of the invention the glucose can be detected by Fourier transformed nearinfrared (FT-NIR) spectroscopy in diffuse reflectance mode (Liu et al., 2006), by HPLC (siehe z. B. Sánchez-Mata et al., European Food Research and Technology, 2004) or by colourimetric enzyme-assays (Ciantar et al., J Periodontal Res., 2002).

[94202] A further method is the analysis of fluorophore-labeled glycans by high-resolution polyacrylatmide gel electrophoresis (Jacksonet al., Anal. Biochem. 216 (1994) 243-52).

[94203] The sucrose of the invention is detected in one embodiment by traditional methods of sugar analysis coupled to chromatography use a Refractive Index Detector (RID, Koimur et al., Chromatographia 43, 1996, p. 254-260; Callul et al., J. Chromatogr. 590, 1992, p. 215-222.);) due to a lack of a UV-absorbing chromophore on sugar molecules. Other detectors, like Mass Spectrometry (MS) or Pulsed Amperometric Detection (PAD, Weston et al., Food Chem. 64, 1999, p. 33-37; Sigvardson et al., J. Pharm. Biomed. Anal. 15, 1996, p. 227-231) are also used.

[94204] In another embodiment the sucrose is detected by enzyme-linked immunosorbant assay (U.S. Pat. No. 5,9726,31), or by Fourier Transform Infrared Detection in Miniaturized Total Analysis Systems for Sucrose Analysis (Anal. Chem. 1997, 69, 2877-2881).

[94205] for the disclosure of this paragraph see [0494.1.7.7] above

### Example 11a

### PCR Amplification of the Sequences

[94206] Unless otherwise specified, standard methods as described in Sambrook et al., Molecular Cloning:

[94207] A laboratory manual, Cold Spring Harbor 1989, Cold Spring Harbor Laboratory Press are used.

[94208] The inventive sequences as shown in the respective line in Table I, column 5, preferably the coding region thereof, were amplified by PCR as described in the protocol of the Pfu Ultra, Pfu Turbo or Herculase DNA polymerase (Stratagene). The composition for the protocol of the Pfu Ultra, Pfu Turbo or Herculase DNA polymerase was as follows: 1×PCR buffer (Stratagene), 0.2 mM of each dNTP, 100 ng genomic DNA of Saccharomyces cerevisiae (strain S288C; Research Genetics, Inc., now Invitrogen), Escherichia coli (strain MG1655; E. coli Genetic Stock

[94209] Center), Synechocystis sp. (strain PCC6803), Azotobacter vinelandii (strain N.R. Smith,16), Thermus thermophilus (HB8) or 50 ng cDNA from various tissues and development stages of Arabidopsis thaliana (ecotype Columbia), Physcomitrella patens, Glycine max (variety Resnick), Brassica napus, Oryza sativa or Zea mays (variety B73, Mo17, A188), 50 pmol forward primer, 50 pmol reverse primer, with or without 1 M Betaine, 2.5 u Pfu Ultra, Pfu Turbo or Herculase DNA polymerase.

[94210] The amplification cycles were as follows:

[94211] 1 cycle of 2-3 minutes at 94-95° C., then 25-36 cycles with 30-60 seconds at 94-95° C., 30-45 seconds at 50-60° C. and 210-480 seconds at 72° C., followed by 1 cycle of 5-10 minutes at 72° C., then 4-16° C.—preferably for Saccharomyces cerevisiae, Escherichia coli, Synechocystis sp., Azotobacter vinelandii, Thermus thermophilus.

[94212] In case of Arabidopsis thaliana, Brassica napus, Glycine max, Oryza sativa, Physcomitrella patens, Zea mays the amplification cycles were as follows: 1 cycle with 30 seconds at 94° C., 30 seconds at 61° C., 15 minutes at 72° C., then 2 cycles with 30 seconds at 94° C., 30 seconds at 60° C., 15 minutes at 72° C., then 3 cycles with 30 seconds at 94° C., 30 seconds at 59° C., 15 minutes at 72° C., then 4 cycles with 30 seconds at 94° C., 30 seconds at 58° C., 15 minutes at 72° C., then 25 cycles with 30 seconds at 94° C., 30 seconds at 57° C., 15 minutes at 72° C., then 1 cycle with 10 minutes at 72° C., then finally 4-16° C.

[94213] RNAs were generated with the RNeasy Plant Kit according to the standard protocol (Qiagen) and Superscript II Reverse Transkriptase was used to produce double stranded cDNA according to the standard protocol (Invitrogen).

[94214] ORF specific primer pairs for the genes to be expressed are shown in the respective line in Table III, column 8. The following adapter sequences were added to Saccharomyces cerevisiae ORF specific primers (see Table III) for cloning purposes:

SEQ ID NO: 20

| | | |
|---|---|---|
| i) | foward primer: | 5′-GGAATTCCAGCTGACCACC-3′ |

SEQ ID NO: 21

| | | |
|---|---|---|
| ii) | reverse primer: | 5′-GATCCCCGGGAATTGCCATG-3′ |

[94215] These adaptor sequences allow cloning of the ORF into the various vectors containing the Resgen adaptors, see table column E of Table c.

[94216] The following adapter sequences were added to Saccharomyces cerevisiae, Escherichia coli, Synechocystis sp., Azotobacter vinelandii, Thermus thermophilus, Arabidopsis thaliana, Brassica napus, Glycine max, Oryza sativa , Physcomitrella patens, or Zea mays ORF specific primers for cloning purposes:

| SEQ ID NO: 22 | | |
|---|---|---|
| iii) | forward primer: | 5′-TTGCTCTTCC-3′ |
| SEQ ID NO: 23 | | |
| iiii) | reverse primer: | 5′-TTGCTCTTCG-3′ |

[94217] The adaptor sequences allow cloning of the ORF into the various vectors containing the Colic adaptors, see table column E of Table c.

[94218] Therefore for amplification and cloning of Saccharomyces cerevisiae SEQ ID NO: 14171, a primer consisting of the adaptor sequence i) and the ORF specific sequence SEQ ID NO: 14271 and a second primer consisting of the adaptor sequence ii) and the ORF specific sequence SEQ ID NO: 14272 were used.

[94219] For amplification and cloning of Escherichia coli SEQ ID NO: 7081, a primer consisting of the adaptor sequence iii) and the ORF specific sequence SEQ ID NO: 7261 and a second primer consisting of the adaptor sequence iiii) and the ORF specific sequence SEQ ID NO: 7262 were used.

[94220] For amplification and cloning of Synechocystis sp. SEQ ID NO: 11990, a primer consisting of the adaptor sequence iii) and the ORF specific sequence SEQ ID NO: 12064 and a second primer consisting of the adaptor sequence iiii) and the ORF specific sequence SEQ ID NO: 12065 were used.

[94221] For amplification and cloning of Arabidopsis thaliana SEQ ID NO: 1298, a primer consisting of the adaptor sequence iii) and the ORF specific sequence SEQ ID NO: 1616 and a second primer consisting of the adaptor sequence iiii) and the ORF specific sequence SEQ ID NO: 1617 were used.

[94222] For amplification and cloning of Azotobacter vinelandii SEQ ID NO: 6040, a primer consisting of the adaptor sequence iii) and the ORF specific sequence SEQ ID NO: 6070 and a second primer consisting of the adaptor sequence iiii) and the ORF specific sequence SEQ ID NO: 6071 were used.

[94223] For amplification and cloning of Brassica napus SEQ ID NO: 140626, a primer consisting of the adaptor sequence iii) and the ORF specific sequence SEQ ID NO: 140762 and a second primer consisting of the adaptor sequence iiii) and the ORF specific sequence SEQ ID NO: 140763 were used.

[94224] For amplification and cloning of Glycine max SEQ ID NO: 69, a primer consisting of the adaptor sequence iii) and the ORF specific sequence SEQ ID NO: 343 and a second primer consisting of the adaptor sequence iiii) and the ORF specific sequence SEQ ID NO: 344 were used.

[94225] For amplification and cloning of Oryza sativa SEQ ID NO: 34301, a primer consisting of the adaptor sequence iii) and the ORF specific sequence SEQ ID NO: 34595 and a second primer consisting of the adaptor sequence iiii) and the ORF specific sequence SEQ ID NO: 34596 were used.

[94226] For amplification and cloning of Thermus thermophilus SEQ ID NO: 12698, a primer consisting of the adaptor sequence iii) and the ORF specific sequence SEQ ID NO: 12970 and a second primer consisting of the adaptor sequence iiii) and the ORF specific sequence SEQ ID NO: 12971 were used.

[94227] For amplification and cloning of Zea mays SEQ ID NO: 68413, a primer consisting of the adapfor sequence iii) and the ORF specific sequence SEQ ID NO: 68531 and a second primer consisting of the adaptor sequence iiii) and the ORF specific sequence SEQ ID NO: 68532 were used.

[94228] Following these examples every sequence disclosed in Table I, preferably column 5, especially the coding region thereof can be cloned by fusing the adaptor sequences to the respective specific primers sequences as disclosed in Table III, column 8 using the respective vectors shown in Table c.

[94229] [0496.1.7.17] to [0499.1.7.17] for the disclosure of these paragraphs see [0496.1.7.7] to [0499.1.7.7] above

### Example 11e

### Cloning of Inventive Sequences as Shown in Table I, Column 5 in the Different Expression Vectors

[94230] For cloning of for example SEQ ID NO: 7081 from Escherichia coli or any other ORF from Escherichia coli, Synechocystis sp., Azotobacter vinelandii, Thermus thermophilus, Arabidopsis thaliana, Brassica napus, Glycine max, Oryza sativa , or Zea mays the vector DNA was treated with the restriction enzymes Pacl and Ncol following the standard protocol (MBI Fermentas).

[94231] For cloning for example the ORFs of SEQ ID NO: 14171 from Saccharomyces cerevisiae or any other ORF from Saccharomyces cerevisiae into vectors containing the Resgen adaptor sequence the respective vector DNA was treated with the restriction enzyme Ncol. For cloning of for example ORFs SEQ ID NO: 63334 from Saccharomyces cerevisiae or any other ORF from Saccharomyces cerevisiae into vectors containing the Colic adaptor sequence, the respective vector DNA was treated with the restriction enzymes Pacl and Ncol following the standard protocol (MBI Fermentas).

[94232] In all cases the reaction was stopped by inactivation at 70° C. for 20 minutes and purified over QlAquick or NucleoSpin Extract II columns following the standard protocol (Qiagen or Macherey-Nagel).

[94233] Then the PCR-product representing the amplified ORF with the respective adapter sequences and the vector DNA were treated with T4 DNA polymerase according to the standard protocol (MBI Fermentas) to produce single stranded overhangs with the parameters 1 unit T4 DNA polymerase at 37° C. for 2-10 minutes for the vector and 1-2 u T4 DNA polymerase at 15-17° C. for 10-60 minutes for the PCR product representing SEQ ID NO: 7081.

[94234] The reaction was stopped by addition of high-salt buffer and purified over QlAquick or NucleoSpin Extract II columns following the standard protocol (Qiagen or Macherey-Nagel).

[94235] According to this example the skilled person is able to clone all sequences disclosed in Table I, preferably column 5 or column 8, especially the coding region thereof.

[94236] Approximately 30-60 ng of prepared vector and a defined amount of prepared amplificate were mixed and hybridized at 65° C. for 15 minutes followed by 37° C. 0.1° C/1 seconds, followed by 37° C. 10 minutes, followed by 0.1° C/1 seconds, then 4-10 ° C.

[94237] The ligated constructs were transformed in the same reaction vessel by addition of competent E. coli cells (strain DHSalpha) and incubation for 20 minutes at 1° C. followed by a heat shock for 90 seconds at 42° C. and cooling to 1-4° C. Then, complete medium (SOC) was added and the mixture was incubated for 45 minutes at 37° C. The entire mixture was subsequently plated onto an agar plate with 0.05 mg/ml kanamycin and incubated overnight at 37° C.

[94238] The outcome of the cloning step was verified by amplification with the aid of primers which bind upstream and downstream of the integration site, thus allowing the amplification of the insertion.

[94239] The amplifications were carried out as described in the protocol of Taq DNA polymerase (Gibco-BRL).

[94240] The amplification cycles were as follows:

[94241] 1 cycle of 1-5 minutes at 94° C., followed by 35 cycles of in each case 15-60 seconds at 94° C., 15-60 seconds at 50-66° C. and 5-15 minutes at 72° C., followed by 1 cycle of 10 minutes at 72° C., then 4-16° C.

[94242] Several colonies were checked, but only one colony for which a PCR product of the expected size was detected was used in the following steps.

[94243] A portion of this positive colony was transferred into a reaction vessel filled with complete medium (LB) supplemented with kanamycin and incubated overnight at 37° C.

[94244] The plasmid preparation was carried out as specified in the Qiaprep or NucleoSpin Multi-96 Plus standard protocol (Qiagen or Macherey-Nagel).

[94245] [0501.1.7.17] to for the disclosure of these paragraphs see [0501.1.7.7] to [0503.1.7.17] above

[94246] Table d showing results of plant analyses

TABLE d

| SeqID | Target | Locus | Metabolite | Source | Promotor | Method | Min | Max |
|---|---|---|---|---|---|---|---|---|
| 142992 | non-targ | Atgols2 | raffinose | ARA_LEAF | p-Super | LC | 1186 | 8115 |
| 17451 | non-targ | At1g07430 | g-1-p | ARA_LEAF | p-PcUBI | GC | 27 | 90 |
| 17451 | non-targ | At1g07430 | my-inos | ARA_LEAF | p-PcUBI | GC | 25 | 96 |
| 140771 | non-targ | At1g19350 | g-1-p | ARA_LEAF | p-PcUBI | GC | 36 | 66 |
| 140771 | non-targ | At1g19350 | THP | ARA_LEAF | p-PcUBI | GC | 42 | 73 |
| 113651 | non-targ | At1g19670 | my-inos | ARA_LEAF | p-PcUBI | GC | 27 | 54 |
| 17701 | non-targ | At1g26830 | fructose | ARA_LEAF | p-PcUBI | GC | 107 | 121 |
| 17968 | non-targ | At1g36730 | fructose | ARA_LEAF | p-PcUBI | GC | 119 | 725 |
| 17968 | non-targ | At1g36730 | glucose | ARA_LEAF | p-PcUBI | GC | 95 | 312 |
| 17968 | non-targ | At1g36730 | raffinose | ARA_LEAF | p-PcUBI | LC | 57 | 150 |
| 18070 | non-targ | At1g43850 | sucrose | ARA_LEAF | p-PcUBI | GC | 40 | 87 |
| 140841 | non-targ | At1g60470 | raffinose | ARA_LEAF | p-Super | LC | 182 | 2025 |
| 19419 | non-targ | At1g72770 | glucose | ARA_LEAF | p-PcUBI | GC | 69 | 193 |
| 19419 | non-targ | At1g72770 | g-1-p | ARA_LEAF | p-PcUBI | GC | 19 | 102 |
| 19419 | non-targ | At1g72770 | my-inos | ARA_LEAF | p-PcUBI | GC | 49 | 123 |
| 19419 | non-targ | At1g72770 | raffinose | ARA_LEAF | p-PcUBI | LC | 55 | 339 |
| 19419 | non-targ | At1g72770 | sucrose | ARA_LEAF | p-PcUBI | GC | 35 | 82 |
| 141013 | non-targ | At1g78200 | sacch a | ARA_LEAF | p-PcUBI | LC | 49 | 143 |
| 19502 | non-targ | At2g17560 | fructose | ARA_LEAF | p-PcUBI | GC | 77 | 460 |
| 19502 | non-targ | At2g17560 | glucose | ARA_LEAF | p-PcUBI | GC | 67 | 304 |
| 19502 | non-targ | At2g17560 | g-1-p | ARA_LEAF | p-PcUBI | GC | 23 | 32 |
| 1298 | non-targ | At2g25070 | g-1-p | ARA_LEAF | p-PcUBI | GC | 19 | 37 |
| 20346 | non-targ | At2g30540 | sacch a | ARA_LEAF | p-PcUBI | LC | 44 | 162 |
| 20578 | non-targ | At2g34180 | fructose | ARA_LEAF | p-PcUBI | GC | 820 | 7343 |
| 20578 | non-targ | At2g34180 | glucose | ARA_LEAF | p-PcUBI | GC | 339 | 2993 |
| 20578 | non-targ | At2g34180 | sh-7-p | ARA_LEAF | p-PcUBI | GC | 190 | 580 |
| 133042 | non-targ | At2g37040 | g-1-p | ARA_LEAF | p-PcUBI | GC | 34 | 95 |
| 108727 | non-targ | At2g42830 | g-1-p | ARA_LEAF | p-PcUBI | GC | 33 | 85 |
| 1623 | non-targ | At2g45420 | my-inos | ARA_LEAF | p-PcUBI | GC | 28 | 34 |
| 21106 | non-targ | At2g46500 | g-1-p | ARA_LEAF | p-PcUBI | GC | 19 | 26 |
| 141637 | non-targ | At2g47180 | raffinose | ARA_LEAF | p-PcUBI | LC | 569 | 4907 |
| 141637 | non-targ | At2g47180 | raffinose | ARA_LEAF | Big35S | LC | 158 | 11191 |
| 68657 | non-targ | At3g02990 | fructose | ARA_LEAF | p-PcUBI | GC | 426 | 970 |
| 68657 | non-targ | At3g02990 | glucose | ARA_LEAF | p-PcUBI | GC | 58 | 465 |
| 68657 | non-targ | At3g02990 | my-inos | ARA_LEAF | p-PcUBI | GC | 29 | 46 |
| 68657 | non-targ | At3g02990 | raffinose | ARA_LEAF | p-PcUBI | LC | 117 | 1149 |
| 21497 | plastidic | At3g04050 | fructose | ARA_LEAF | p-PcUBI | GC | 192 | 299 |
| 22015 | non-targ | At3g06270 | glucose | ARA_LEAF | p-PcUBI | GC | 85 | 185 |
| 22015 | non-targ | At3g06270 | my-inos | ARA_LEAF | p-PcUBI | GC | 25 | 80 |
| 22249 | non-targ | At3g08710 | fructose | ARA_LEAF | p-PcUBI | GC | 93 | 182 |
| 22249 | non-targ | At3g08710 | glucose | ARA_LEAF | p-PcUBI | GC | 69 | 147 |
| 22249 | non-targ | At3g08710 | my-inos | ARA_LEAF | p-PcUBI | GC | 32 | 123 |
| 22699 | plastidic | At3g14230 | sacch a | ARA_LEAF | p-PcUBI | LC | 57 | 182 |
| 22921 | non-targ | At3g20910 | g-1-p | ARA_LEAF | p-PcUBI | GC | 18 | 45 |
| 22921 | non-targ | At3g20910 | raffinose | ARA_LEAF | p-PcUBI | LC | 55 | 114 |
| 1815 | non-targ | At3g23000 | fructose | ARA_LEAF | p-PcUBI | GC | 123 | 2049 |
| 1815 | non-targ | At3g23000 | glucose | ARA_LEAF | p-PcUBI | GC | 177 | 3162 |
| 1815 | non-targ | At3g23000 | sh-7-p | ARA_LEAF | p-PcUBI | GC | 116 | 571 |
| 68727 | non-targ | At3g26400 | fructose | ARA_LEAF | p-PcUBI | GC | 79 | 583 |
| 68727 | non-targ | At3g26400 | glucose | ARA_LEAF | p-PcUBI | GC | 112 | 264 |
| 68727 | non-targ | At3g26400 | raffinose | ARA_LEAF | p-PcUBI | LC | 89 | 129 |
| 141758 | non-targ | At3g59790 | my-inos | ARA_LEAF | p-PcUBI | GC | 33 | 77 |
| 2367 | non-targ | At3g61830 | sh-7-p | ARA_LEAF | p-PcUBI | GC | 54 | 87 |
| 2573 | non-targ | At3g62930 | fructose | ARA_LEAF | p-PcUBI | GC | 194 | 4745 |
| 2573 | non-targ | At3g62930 | glucose | ARA_LEAF | p-PcUBI | GC | 207 | 4142 |
| 2573 | non-targ | At3g62930 | g-1-p | ARA_LEAF | p-PcUBI | GC | 32 | 176 |
| 2573 | non-targ | At3g62930 | my-inos | ARA_LEAF | p-PcUBI | GC | 36 | 118 |
| 2573 | non-targ | At3g62930 | sh-7-p | ARA_LEAF | p-PcUBI | GC | 85 | 752 |
| 2573 | non-targ | At3g62930 | sucrose | ARA_LEAF | p-PcUBI | GC | 58 | 129 |
| 2935 | non-targ | At3g62950 | fructose | ARA_LEAF | p-PcUBI | GC | 623 | 3749 |
| 2935 | non-targ | At3g62950 | glucose | ARA_LEAF | p-PcUBI | GC | 867 | 3374 |
| 2935 | non-targ | At3g62950 | g-1-p | ARA_LEAF | p-PcUBI | GC | 31 | 141 |
| 2935 | non-targ | At3g62950 | my-inos | ARA_LEAF | p-PcUBI | GC | 46 | 95 |
| 2935 | non-targ | At3g62950 | sh-7-p | ARA_LEAF | p-PcUBI | GC | 167 | 848 |
| 2935 | non-targ | At3g62950 | sucrose | ARA_LEAF | p-PcUBI | GC | 49 | 114 |
| 109717 | non-targ | At4g09960 | g-1-p | ARA_LEAF | p-PcUBI | GC | 18 | 53 |
| 23482 | non-targ | At4g15660 | fructose | ARA_LEAF | p-PcUBI | GC | 321 | 3175 |
| 23482 | non-targ | At4g15660 | glucose | ARA_LEAF | p-PcUBI | GC | 231 | 2124 |
| 23482 | non-targ | At4g15660 | g-1-p | ARA_LEAF | p-PcUBI | GC | 107 | 199 |
| 23482 | non-targ | At4g15660 | my-inos | ARA_LEAF | p-PcUBI | GC | 97 | 241 |
| 23482 | non-targ | At4g15660 | sh-7-p | ARA_LEAF | p-PcUBI | GC | 183 | 692 |
| 23482 | non-targ | At4g15660 | sucrose | ARA_LEAF | p-PcUBI | GC | 41 | 106 |
| 3279 | non-targ | At4g15670 | fructose | ARA_LEAF | p-PcUBI | GC | 624 | 6054 |
| 3279 | non-targ | At4g15670 | glucose | ARA_LEAF | p-PcUBI | GC | 156 | 1091 |
| 3279 | non-targ | At4g15670 | g-1-p | ARA_LEAF | p-PcUBI | GC | 124 | 251 |
| 3279 | non-targ | At4g15670 | my-inos | ARA_LEAF | p-PcUBI | GC | 123 | 337 |
| 3279 | non-targ | At4g15670 | sh-7-p | ARA_LEAF | p-PcUBI | GC | 82 | 1306 |
| 3279 | non-targ | At4g15670 | sucrose | ARA_LEAF | p-PcUBI | GC | 38 | 91 |
| 23844 | non-targ | At4g15690 | fructose | ARA_LEAF | p-PcUBI | GC | 100 | 2161 |
| 23844 | non-targ | At4g15690 | glucose | ARA_LEAF | p-PcUBI | GC | 98 | 1660 |
| 23844 | non-targ | At4g15690 | g-1-p | ARA_LEAF | p-PcUBI | GC | 49 | 103 |
| 23844 | non-targ | At4g15690 | my-inos | ARA_LEAF | p-PcUBI | GC | 50 | 145 |
| 23844 | non-targ | At4g15690 | sucrose | ARA_LEAF | p-PcUBI | GC | 34 | 69 |
| 3654 | non-targ | At4g15700 | fructose | ARA_LEAF | p-PcUBI | GC | 722 | 1818 |
| 3654 | non-targ | At4g15700 | glucose | ARA_LEAF | p-PcUBI | GC | 469 | 1285 |
| 3654 | non-targ | At4g15700 | sh-7-p | ARA_LEAF | p-PcUBI | GC | 254 | 653 |
| 3654 | non-targ | At4g15700 | sucrose | ARA_LEAF | p-PcUBI | GC | 83 | 229 |
| 68849 | non-targ | At4g26080 | my-inos | ARA_LEAF | p-PcUBI | GC | 33 | 138 |
| 4102 | non-targ | At4g33040 | fructose | ARA_LEAF | p-PcUBI | GC | 79 | 387 |
| 4102 | non-targ | At4g33040 | glucose | ARA_LEAF | p-PcUBI | GC | 58 | 294 |
| 4102 | non-targ | At4g33040 | g-1-p | ARA_LEAF | p-PcUBI | GC | 19 | 65 |
| 4102 | non-targ | At4g33040 | my-inos | ARA_LEAF | p-PcUBI | GC | 50 | 110 |
| 4102 | non-targ | At4g33040 | sh-7-p | ARA_LEAF | p-PcUBI | GC | 47 | 108 |
| 4102 | non-targ | At4g33040 | sucrose | ARA_LEAF | p-PcUBI | GC | 28 | 74 |
| 24311 | non-targ | At4g34160 | g-1-p | ARA_LEAF | p-PcUBI | GC | 20 | 47 |
| 24311 | non-targ | At4g34160 | raffinose | ARA_LEAF | p-PcUBI | LC | 131 | 327 |
| 24311 | non-targ | At4g34160 | sucrose | ARA_LEAF | p-PcUBI | GC | 31 | 97 |
| 4348 | non-targ | At4g35310 | fructose | ARA_LEAF | p-PcUBI | GC | 112 | 350 |
| 4348 | non-targ | At4g35310 | g-1-p | ARA_LEAF | p-PcUBI | GC | 32 | 55 |
| 4348 | non-targ | At4g35310 | raffinose | ARA_LEAF | p-PcUBI | LC | 66 | 186 |
| 68987 | non-targ | At5g02760 | my-inos | ARA_LEAF | p-PcUBI | GC | 25 | 104 |
| 24438 | non-targ | At5g03720 | fructose | ARA_LEAF | p-PcUBI | GC | 134 | 1766 |
| 24438 | non-targ | At5g03720 | glucose | ARA_LEAF | p-PcUBI | GC | 106 | 2148 |
| 24438 | non-targ | At5g03720 | g-1-p | ARA_LEAF | p-PcUBI | GC | 28 | 106 |
| 24438 | non-targ | At5g03720 | my-inos | ARA_LEAF | p-PcUBI | GC | 92 | 427 |
| 24438 | non-targ | At5g03720 | raffinose | ARA_LEAF | p-PcUBI | LC | 1744 | 12039 |
| 24438 | non-targ | At5g03720 | sucrose | ARA_LEAF | p-PcUBI | GC | 35 | 100 |
| 24492 | non-targ | At5g07200 | my-inos | ARA_LEAF | p-PcUBI | GC | 24 | 47 |
| 142753 | non-targ | At5g10170 | my-inos | ARA_LEAF | p-PcUBI | GC | 83 | 386 |
| 142753 | non-targ | At5g10170 | raffinose | ARA_LEAF | p-PcUBI | LC | 72 | 155 |
| 69275 | non-targ | At5g14070 | glucose | ARA_LEAF | p-PcUBI | GC | 70 | 248 |
| 25283 | non-targ | At5g16650 | fructose | ARA_LEAF | p-PcUBI | GC | 80 | 153 |
| 4904 | non-targ | At5g18600 | fructose | ARA_LEAF | p-PcUBI | GC | 228 | 2679 |
| 4904 | non-targ | At5g18600 | glucose | ARA_LEAF | p-PcUBI | GC | 187 | 2197 |
| 4904 | non-targ | At5g18600 | my-inos | ARA_LEAF | p-PcUBI | GC | 46 | 76 |
| 4904 | non-targ | At5g18600 | sh-7-p | ARA_LEAF | p-PcUBI | GC | 149 | 336 |
| 4904 | non-targ | At5g18600 | sucrose | ARA_LEAF | p-PcUBI | GC | 40 | 141 |
| 25428 | non-targ | At5g39760 | fructose | ARA_LEAF | p-PcUBI | GC | 114 | 219 |
| 142929 | non-targ | At5g43630 | g-1-p | ARA_LEAF | p-PcUBI | GC | 65 | 74 |
| 142933 | non-targ | At5g54070 | my-inos | ARA_LEAF | p-PcUBI | GC | 30 | 65 |
| 142933 | non-targ | At5g54070 | raffinose | ARA_LEAF | p-PcUBI | LC | 68 | 383 |
| 5318 | non-targ | At5g57050 | g-1-p | ARA_LEAF | p-PcUBI | GC | 37 | 73 |
| 5318 | non-targ | At5g57050 | my-inos | ARA_LEAF | p-PcUBI | GC | 27 | 112 |
| 70006 | non-targ | At5g60110 | fructose | ARA_LEAF | p-PcUBI | GC | 90 | 185 |
| 70006 | non-targ | At5g60110 | glucose | ARA_LEAF | p-PcUBI | GC | 68 | 191 |
| 102899 | non-targ | At5g60440 | fructose | ARA_LEAF | p-PcUBI | GC | 91 | 939 |
| 102899 | non-targ | At5g60440 | raffinose | ARA_LEAF | p-PcUBI | LC | 93 | 149 |
| 102899 | non-targ | At5g60440 | sacch a | ARA_LEAF | p-PcUBI | LC | 43 | 64 |
| 122803 | non-targ | At5g66710 | g-1-p | ARA_LEAF | p-PcUBI | GC | 20 | 49 |
| 26120 | non-targ | Avin- | raffinose | ARA_LEAF | p-PcUBI | LC | 86 | 92 |
| | | DRAFT_1534 | | | | | | |
| 26196 | non-targ | Avin- | sucrose | ARA_LEAF | p-PcUBI | GC | 26 | 41 |
| | | DRAFT_1624 | | | | | | |
| 6040 | non-targ | Avin- | THP | ARA_LEAF | p-PcUBI | GC | 43 | 115 |
| | | DRAFT_2091 | | | | | | |
| 27021 | non-targ | Avin- | fructose | ARA_LEAF | p-PcUBI | GC | 131 | 486 |
| | | DRAFT_2344 | | | | | | |
| 27021 | non-targ | Avin- | glucose | ARA_LEAF | p-PcUBI | GC | 58 | 207 |
| | | DRAFT_2344 | | | | | | |
| 27882 | non-targ | Avin- | fructose | ARA_LEAF | p-PcUBI | GC | 77 | 744 |
| | | DRAFT_2521 | | | | | | |
| 27882 | non-targ | Avin- | sucrose | ARA_LEAF | p-PcUBI | GC | 24 | 95 |
| | | DRAFT_2521 | | | | | | |
| 28040 | non-targ | Avin- | g-1-p | ARA_LEAF | p-PcUBI | GC | 28 | 54 |
| | | DRAFT_2754 | | | | | | |
| 6075 | non-targ | Avin- | glucose | ARA_LEAF | p-PcUBI | GC | 77 | 249 |
| | | DRAFT_3028 | | | | | | |
| 6075 | non-targ | Avin- | g-1-p | ARA_LEAF | p-PcUBI | GC | 19 | 137 |
| | | DRAFT_3028 | | | | | | |
| 6075 | non-targ | Avin- | my-inos | ARA_LEAF | p-PcUBI | GC | 39 | 273 |
| | | DRAFT_3028 | | | | | | |
| 6075 | non-targ | Avin- | raffinose | ARA_LEAF | p-PcUBI | LC | 65 | 493 |
| | | DRAFT_3028 | | | | | | |
| 6075 | non-targ | Avin- | sh-7-p | ARA_LEAF | p-PcUBI | GC | 50 | 123 |
| | | DRAFT_3028 | | | | | | |
| 72346 | non-targ | Avin- | raffinose | ARA_LEAF | p-PcUBI | LC | 427 | 3237 |
| | | DRAFT_3135 | | | | | | |
| 29286 | non-targ | Avin- | fructose | ARA_LEAF | p-PcUBI | GC | 78 | 155 |
| | | DRAFT_3209 | | | | | | |
| 29286 | non-targ | Avin- | glucose | ARA_LEAF | p-PcUBI | GC | 72 | 167 |
| | | DRAFT_3209 | | | | | | |
| 29286 | non-targ | Avin- | g-1-p | ARA_LEAF | p-PcUBI | GC | 20 | 26 |
| | | DRAFT_3209 | | | | | | |
| 29500 | non-targ | Avin- | g-1-p | ARA_LEAF | p-PcUBI | GC | 19 | 61 |
| | | DRAFT_3253 | | | | | | |
| 111155 | non-targ | Avin- | my-inos | ARA_LEAF | p-PcUBI | GC | 27 | 74 |
| | | DRAFT_3577 | | | | | | |
| 31026 | non-targ | Avin- | fructose | ARA_LEAF | p-PcUBI | GC | 170 | 743 |
| | | DRAFT_3605 | | | | | | |
| 31026 | non-targ | Avin- | glucose | ARA_LEAF | p-PcUBI | GC | 67 | 683 |
| | | DRAFT_3605 | | | | | | |
| 31026 | non-targ | Avin- | sucrose | ARA_LEAF | p-PcUBI | GC | 46 | 102 |
| | | DRAFT_3605 | | | | | | |
| 143121 | non-targ | Avin- | raffinose | ARA_LEAF | p-PcUBI | LC | 55 | 99 |
| | | DRAFT_3616 | | | | | | |
| 114231 | non-targ | Avin- | my-inos | ARA_LEAF | p-PcUBI | GC | 44 | 288 |
| | | DRAFT_3629 | | | | | | |
| 114231 | non-targ | Avin- | raffinose | ARA_LEAF | p-PcUBI | LC | 107 | 400 |
| | | DRAFT_3629 | | | | | | |
| 143398 | non-targ | Avin- | my-inos | ARA_LEAF | p-PcUBI | GC | 29 | 72 |
| | | DRAFT_4265 | | | | | | |
| 143398 | non-targ | Avin- | raffinose | ARA_LEAF | p-PcUBI | LC | 62 | 126 |
| | | DRAFT_4265 | | | | | | |
| 73038 | non-targ | Avin- | raffinose | ARA_LEAF | p-PcUBI | LC | 74 | 180 |
| | | DRAFT_4420 | | | | | | |
| 73719 | non-targ | Avin- | fructose | ARA_LEAF | p-PcUBI | GC | 125 | 130 |
| | | DRAFT_4606 | | | | | | |
| 73719 | non-targ | Avin- | g-1-p | ARA_LEAF | p-PcUBI | GC | 24 | 34 |
| | | DRAFT_4606 | | | | | | |
| 73719 | non-targ | Avin- | sucrose | ARA_LEAF | p-PcUBI | GC | 28 | 74 |
| | | DRAFT_4606 | | | | | | |
| 102941 | non-targ | Avin- | THP | ARA_LEAF | p-PcUBI | GC | 44 | 86 |
| | | DRAFT_4847 | | | | | | |
| 6510 | non-targ | Avin- | fructose | ARA_LEAF | p-PcUBI | GC | 83 | 1502 |
| | | DRAFT_5103 | | | | | | |
| 6510 | non-targ | Avin- | glucose | ARA_LEAF | p-PcUBI | GC | 62 | 605 |
| | | DRAFT_5103 | | | | | | |
| 6510 | non-targ | Avin- | sucrose | ARA_LEAF | p-PcUBI | GC | 31 | 48 |
| | | DRAFT_5103 | | | | | | |
| 32037 | non-targ | Avin- | fructose | ARA_LEAF | p-PcUBI | GC | 82 | 370 |
| | | DRAFT_5246 | | | | | | |
| 32037 | non-targ | Avin- | glucose | ARA_LEAF | p-PcUBI | GC | 61 | 200 |
| | | DRAFT_5246 | | | | | | |
| 32037 | non-targ | Avin- | sucrose | ARA_LEAF | p-PcUBI | GC | 27 | 38 |
| | | DRAFT_5246 | | | | | | |
| 32308 | non-targ | Avin- | fructose | ARA_LEAF | p-PcUBI | GC | 186 | 188 |
| | | RAFT_5292 | | | | | | |
| 143495 | non-targ | Avin- | raffinose | ARA_LEAF | p-PcUBI | LC | 1093 | 3766 |
| | | DRAFT_5967 | | | | | | |
| 6674 | non-targ | Avin- | my-inos | ARA_LEAF | p-PcUBI | GC | 31 | 126 |
| | | DRAFT_6075 | | | | | | |
| 143614 | non-targ | AVIN- | THP | ARA_LEAF | p-PcUBI | GC | 33 | 77 |
| | | DRAFT_6261 | | | | | | |
| 74729 | non-targ | Avin- | fructose | ARA_LEAF | p-PcUBI | GC | 117 | 1104 |
| | | DRAFT_6679 | | | | | | |
| 74729 | non-targ | Avin- | glucose | ARA_LEAF | p-PcUBI | GC | 80 | 613 |
| | | DRAFT_6679 | | | | | | |
| 34044 | non-targ | Avin- | g-1-p | ARA_LEAF | p-PcUBI | GC | 53 | 114 |
| | | DRAFT_6700 | | | | | | |
| 34044 | non-targ | Avin- | THP | ARA_LEAF | p-PcUBI | GC | 60 | 108 |
| | | DRAFT_6700 | | | | | | |
| 34204 | non-targ | Avin- | raffinose | ARA_LEAF | p-PcUBI | LC | 62 | 341 |
| | | DRAFT_6864 | | | | | | |
| 34301 | non-targ | AX653549 | g-1-p | ARA_LEAF | p-PcUBI | GC | 28 | 50 |
| 34602 | non-targ | AY087308 | g-1-p | ARA_LEAF | p-PcUBI | GC | 28 | 47 |
| 34602 | non-targ | AY087308 | my-inos | ARA_LEAF | p-PcUBI | GC | 26 | 85 |
| 103433 | non-targ | AY623894 | g-1-p | ARA_LEAF | p-PcUBI | GC | 58 | 113 |
| 103433 | non-targ | AY623894 | THP | ARA_LEAF | p-PcUBI | GC | 33 | 167 |
| 34889 | plastidic | B0004 | glucose | ARA_LEAF | p-Super | GC | 62 | 423 |
| 34889 | plastidic | B0004 | sucrose | ARA_LEAF | p-Super | GC | 25 | 120 |
| 103958 | non-targ | B0050 | THP | ARA_LEAF | p-Super | GC | 33 | 63 |
| 35204 | non-targ | B0061 | raffinose | ARA_SEED_2 | p-USP | LC | 38 | 63 |
| 35482 | non-targ | B0124 | sucrose | ARA_LEAF | p-Super | GC | 27 | 83 |
| 7081 | non-targ | B0161 | g-1-p | ARA_LEAF | p-Super | GC | 24 | 53 |
| 7081 | non-targ | B0161 | my-inos | ARA_LEAF | p-Super | GC | 25 | 62 |
| 35590 | non-targ | B0221 | sucrose | ARA_LEAF | p-Super | GC | 25 | 89 |
| 143742 | non-targ | B0251 | g-1-p | ARA_LEAF | p-Super | GC | 20 | 59 |
| 121111 | non-targ | B0312 | fructose | ARA_LEAF | p-Super | GC | 76 | 386 |
| 35733 | plastidic | B0344 | melibiose | ARA_SEED_2 | p-USP | GC | 65 | 79 |
| 143761 | non-targ | B0362 | g-1-p | ARA_LEAF | p-Super | GC | 18 | 22 |
| 143771 | non-targ | B0376 | g-1-p | ARA_LEAF | p-Super | GC | 27 | 37 |
| 7333 | non-targ | B0449 | fructose | ARA_LEAF | p-Super | GC | 121 | 729 |
| 7333 | non-targ | B0449 | glucose | ARA_LEAF | p-Super | GC | 63 | 243 |
| 7686 | non-targ | B0486 | glucose | ARA_LEAF | p-Super | GC | 61 | 135 |
| 143817 | plastidic | B0488 | sacch a | ARA_LEAF | p-Super | LC | 57 | 74 |
| 134402 | non-targ | B0514 | galactinol | ARA_SEED_2 | p-USP | GC | 42 | 174 |
| 35967 | plastidic | B0593 | fructose | ARA_LEAF | p-Super | GC | 188 | 824 |
| 35967 | plastidic | B0593 | glucose | ARA_LEAF | p-Super | GC | 73 | 258 |
| 35967 | plastidic | B0593 | raffinose | ARA_LEAF | p-Super | LC | 70 | 127 |
| 35967 | plastidic | B0593 | sucrose | ARA_LEAF | p-Super | GC | 25 | 48 |
| 143901 | plastidic | B0644 | THP | ARA_LEAF | p-Super | GC | 40 | 79 |
| 143954 | non-targ | B0651 | sacch a | ARA_LEAF | p-Super | LC | 40 | 46 |
| 144207 | plastidic | B0674 | erythrol | ARA_SEED_2 | p-USP | GC | 239 | 281 |
| 93678 | non-targ | B0695 | my-inos | ARA_LEAF | p-Super | GC | 27 | 58 |
| 93793 | plastidic | B0728 | my-inos | ARA_LEAF | p-Super | GC | 26 | 47 |
| 36114 | non-targ | B0752 | fructose | ARA_LEAF | p-Super | GC | 77 | 258 |
| 36114 | non-targ | B0752 | glucose | ARA_LEAF | p-Super | GC | 76 | 641 |
| 36114 | non-targ | B0752 | g-1-p | ARA_LEAF | p-Super | GC | 30 | 78 |
| 36114 | non-targ | B0752 | raffinose | ARA_LEAF | p-Super | LC | 65 | 646 |
| 75807 | non-targ | B0801 | glucose | ARA_LEAF | p-Super | GC | 108 | 170 |
| 131359 | plastidic | B0856 | sh-7-p | ARA_LEAF | p-Super | GC | 74 | 127 |
| 36489 | non-targ | B0885 | raffinose | ARA_LEAF | p-Super | LC | 67 | 76 |
| 144479 | non-targ | B0970 | g-1-p | ARA_LEAF | p-Super | GC | 22 | 130 |
| 36809 | non-targ | B0980 | my-inos | ARA_SEED_2 | p-USP | GC | 26 | 130 |
| 7941 | non-targ | B1003 | fructose | ARA_LEAF | p-Super | GC | 278 | 1463 |
| 7941 | non-targ | B1003 | glucose | ARA_LEAF | p-Super | GC | 44 | 339 |
| 7941 | non-targ | B1003 | g-1-p | ARA_LEAF | p-Super | GC | 30 | 102 |
| 7941 | non-targ | B1003 | sh-7-p | ARA_LEAF | p-Super | GC | 62 | 799 |
| 7941 | non-targ | B1003 | sucrose | ARA_LEAF | p-Super | GC | 57 | 120 |
| 124051 | plastidic | B1046 | THP | ARA_LEAF | p-Super | GC | 33 | 49 |
| 76032 | plastidic | B1065 | g-1-p | ARA_LEAF | p-Super | GC | 19 | 35 |
| 76032 | plastidic | B1065 | sucrose | ARA_LEAF | p-Super | GC | 32 | 37 |
| 114979 | non-targ | B1102 | fructose | ARA_LEAF | p-Super | GC | 87 | 189 |
| 144611 | plastidic | B1131 | g-1-p | ARA_LEAF | p-Super | GC | 18 | 23 |
| 36971 | plastidic | B1136 | glucose | ARA_LEAF | p-Super | GC | 50 | 104 |
| 37390 | non-targ | B1137 | g-1-p | ARA_LEAF | p-Super | GC | 20 | 65 |
| 37400 | non-targ | B1186 | g-1-p | ARA_LEAF | p-Super | GC | 24 | 126 |
| 144857 | non-targ | B1214 | g-1-p | ARA_LEAF | p-Super | GC | 43 | 71 |
| 144857 | non-targ | B1214 | THP | ARA_LEAF | p-Super | GC | 40 | 58 |
| 112072 | non-targ | B1219 | g-1-p | ARA_LEAF | p-Super | GC | 40 | 58 |
| 112072 | non-targ | B1219 | my-inos | ARA_LEAF | p-Super | GC | 36 | 38 |
| 112072 | non-targ | B1219 | THP | ARA_LEAF | p-Super | GC | 35 | 76 |
| 112111 | non-targ | B1234 | my-inos | ARA_LEAF | p-Super | GC | 26 | 38 |
| 98778 | plastidic | B1249 | galactinol | ARA_SEED_2 | p-USP | GC | 40 | 153 |
| 98778 | plastidic | B1249 | galactitol | ARA_SEED_2 | p-USP | GC | 65 | 272 |
| 98778 | plastidic | B1249 | sorbitol | ARA_SEED_2 | p-USP | GC | 65 | 272 |
| 144894 | non-targ | B1254 | THP | ARA_LEAF | p-Super | GC | 37 | 56 |
| 37483 | non-targ | B1255 | fructose | ARA_LEAF | p-Super | GC | 80 | 727 |
| 37483 | non-targ | B1255 | glucose | ARA_LEAF | p-Super | GC | 66 | 597 |
| 37483 | non-targ | B1255 | raffinose | ARA_LEAF | p-Super | LC | 82 | 369 |
| 37483 | non-targ | B1255 | sucrose | ARA_LEAF | p-Super | GC | 33 | 52 |
| 76157 | plastidic | B1262 | my-inos | ARA_SEED_2 | p-USP | GC | 32 | 577 |
| 134655 | non-targ | B1285 | fructose | ARA_LEAF | p-Super | GC | 71 | 127 |
| 124557 | non-targ | B1356 | g-1-p | ARA_LEAF | p-Super | GC | 19 | 20 |
| 145066 | non-targ | B1357 | g-1-p | ARA_LEAF | p-Super | GC | 20 | 44 |
| 134697 | non-targ | B1390 | glucose | ARA_LEAF | p-Super | GC | 57 | 120 |
| 131489 | non-targ | B1391 | THP | ARA_LEAF | p-Super | GC | 43 | 95 |
| 145091 | plastidic | B1410 | sh-7-p | ARA_LEAF | p-Super | GC | 43 | 112 |
| 134756 | non-targ | B1425 | my-inos | ARA_LEAF | p-Super | GC | 25 | 36 |
| 38266 | plastidic | B1431 | g-1-p | ARA_LEAF | p-Super | GC | 31 | 52 |
| 38266 | plastidic | B1431 | sh-7-p | ARA_LEAF | p-Super | GC | 32 | 52 |
| 38266 | plastidic | B1431 | THP | ARA_LEAF | p-Super | GC | 37 | 89 |
| 38289 | non-targ | B1445 | THP | ARA_LEAF | p-Super | GC | 47 | 50 |
| 115056 | non-targ | B1470 | g-1-p | ARA_LEAF | p-Super | GC | 18 | 44 |
| 7947 | non-targ | B1522 | fructose | ARA_LEAF | p-Super | GC | 83 | 364 |
| 7947 | non-targ | B1522 | g-1-p | ARA_LEAF | p-Super | GC | 20 | 41 |
| 145142 | plastidic | B1556 | g-1-p | ARA_LEAF | p-Super | GC | 35 | 57 |
| 145142 | plastidic | B1556 | sh-7-p | ARA_LEAF | p-Super | GC | 86 | 382 |
| 78138 | non-targ | B1583 | g-1-p | ARA_LEAF | p-Super | GC | 23 | 46 |
| 78154 | non-targ | B1589 | g-1-p | ARA_LEAF | p-Super | GC | 50 | 114 |
| 78154 | non-targ | B1589 | THP | ARA_LEAF | p-Super | GC | 33 | 122 |
| 38300 | non-targ | B1597 | fructose | ARA_LEAF | p-Super | GC | 78 | 250 |
| 38300 | non-targ | B1597 | glucose | ARA_LEAF | p-Super | GC | 86 | 187 |
| 38300 | non-targ | B1597 | g-1-p | ARA_LEAF | p-Super | GC | 47 | 249 |
| 38300 | non-targ | B1597 | my-inos | ARA_LEAF | p-Super | GC | 33 | 81 |
| 38300 | non-targ | B1597 | raffinose | ARA_LEAF | p-Super | LC | 65 | 199 |
| 124571 | non-targ | B1621 | fructose | ARA_LEAF | p-Super | GC | 107 | 424 |
| 124571 | non-targ | B1621 | glucose | ARA_LEAF | p-Super | GC | 77 | 119 |
| 38345 | non-targ | B1627 | glucose | ARA_LEAF | p-Super | GC | 72 | 186 |
| 38345 | non-targ | B1627 | g-1-p | ARA_LEAF | p-Super | GC | 32 | 78 |
| 38345 | non-targ | B1627 | THP | ARA_LEAF | p-Super | GC | 55 | 78 |
| 78265 | non-targ | B1651 | my-inos | ARA_LEAF | p-Super | GC | 25 | 41 |
| 78753 | non-targ | B1670 | my-inos | ARA_LEAF | p-Super | GC | 30 | 45 |
| 78852 | non-targ | B1755 | fructose | ARA_LEAF | p-Super | GC | 83 | 94 |
| 78883 | non-targ | B1791 | my-inos | ARA_LEAF | p-Super | GC | 25 | 344 |
| 99196 | non-targ | B1796 | fructose | ARA_LEAF | p-Super | GC | 85 | 93 |
| 145180 | non-targ | B1812 | my-inos | ARA_LEAF | p-Super | GC | 33 | 49 |
| 8033 | plastidic | B1814 | galactitol | ARA_SEED_2 | p-USP | GC | 55 | 2661 |
| 8033 | plastidic | B1814 | sorbitol | ARA_SEED_2 | p-USP | GC | 55 | 2661 |
| 38573 | non-targ | B1845 | my-inos | ARA_LEAF | p-Super | GC | 26 | 51 |
| 8363 | plastidic | B1854 | erythrol | ARA_SEED_2 | p-USP | GC | 140 | 330 |
| 8363 | plastidic | B1854 | my-inos | ARA_SEED_2 | p-USP | GC | 44 | 81 |
| 8363 | plastidic | B1854 | sorbitol | ARA_SEED_2 | p-USP | LC | 200 | 414 |
| 134783 | non-targ | B1865 | fructose | ARA_SEED_2 | p-USP | GC | 32 | 105 |
| 145411 | non-targ | B1896 | g-1-p | ARA_LEAF | p-Super | GC | 19 | 74 |
| 145411 | non-targ | B1896 | trehalose | ARA_LEAF | p-Super | GC | 294 | 441 |
| 79056 | plastidic | B1897 | erythrol | ARA_SEED_2 | p-USP | GC | 139 | 3201 |
| 79056 | non-targ | B1897 | fructose | ARA_LEAF | p-Super | GC | 202 | 2339 |
| 79056 | non-targ | B1897 | glucose | ARA_LEAF | p-Super | GC | 120 | 1091 |
| 79056 | non-targ | B1897 | sucrose | ARA_LEAF | p-Super | GC | 38 | 103 |
| 38767 | non-targ | B1898 | raffinose | ARA_LEAF | p-Super | LC | 55 | 329 |
| 131799 | non-targ | B1932 | g-1-p | ARA_LEAF | p-Super | GC | 19 | 107 |
| 131799 | non-targ | B1932 | THP | ARA_LEAF | p-Super | GC | 33 | 84 |
| 134864 | non-targ | B1938 | glucose | ARA_LEAF | p-Super | GC | 65 | 201 |
| 134864 | non-targ | B1938 | my-inos | ARA_LEAF | p-Super | GC | 28 | 190 |
| 79217 | non-targ | B2027 | fructose | ARA_LEAF | p-Super | GC | 156 | 232 |
| 8920 | non-targ | B2032 | glucose | ARA_LEAF | p-Super | GC | 61 | 157 |
| 8920 | non-targ | B2032 | my-inos | ARA_LEAF | p-Super | GC | 27 | 212 |
| 112193 | non-targ | B2043 | g-1-p | ARA_LEAF | p-Super | GC | 18 | 35 |
| 104277 | non-targ | B2053 | fucose | ARA_LEAF | p-Super | GC | 1022 | 6264 |
| 38947 | non-targ | B2063 | fructose | ARA_LEAF | p-Super | GC | 78 | 1849 |
| 38947 | non-targ | B2063 | g-1-p | ARA_LEAF | p-Super | GC | 32 | 87 |
| 38947 | non-targ | B2063 | raffinose | ARA_LEAF | p-Super | LC | 59 | 242 |
| 38947 | non-targ | B2063 | sucrose | ARA_LEAF | p-Super | GC | 24 | 87 |
| 38947 | non-targ | B2063 | THP | ARA_LEAF | p-Super | GC | 37 | 111 |
| 39002 | non-targ | B2107 | g-1-p | ARA_LEAF | p-Super | GC | 37 | 71 |
| 39002 | non-targ | B2107 | THP | ARA_LEAF | p-Super | GC | 39 | 94 |
| 125085 | plastidic | B2139 | g-1-p | ARA_LEAF | p-Super | GC | 32 | 44 |
| 79279 | plastidic | B2242 | erythrol | ARA_SEED_2 | p-USP | GC | 244 | 808 |
| 99620 | non-targ | B2285 | fructose | ARA_SEED_2 | p-USP | GC | 26 | 113 |
| 145692 | non-targ | B2290 | galactinol | ARA_SEED_2 | p-USP | GC | 54 | 149 |
| 9156 | non-targ | B2345 | my-inos | ARA_LEAF | p-Super | GC | 25 | 60 |
| 9156 | non-targ | B2345 | THP | ARA_LEAF | p-Super | GC | 41 | 68 |
| 39219 | non-targ | B2360 | verbascose | ARA_LEAF | p-Super | LC | 67 | 1435 |
| 39219 | non-targ | B2360 | THP | ARA_LEAF | p-Super | GC | 38 | 65 |
| 146204 | non-targ | B2361 | g-1-p | ARA_LEAF | p-Super | GC | 31 | 46 |
| 146204 | non-targ | B2361 | THP | ARA_LEAF | p-Super | GC | 33 | 79 |
| 146238 | non-targ | B2389 | sucrose | ARA_LEAF | p-Super | GC | 32 | 83 |
| 39237 | non-targ | B2399 | fructose | ARA_LEAF | p-Super | GC | 147 | 1537 |
| 39237 | non-targ | B2399 | glucose | ARA_LEAF | p-Super | GC | 97 | 2165 |
| 39237 | non-targ | B2399 | g-1-p | ARA_LEAF | p-Super | GC | 68 | 231 |
| 39237 | non-targ | B2399 | my-inos | ARA_LEAF | p-Super | GC | 33 | 1261 |
| 39237 | non-targ | B2399 | raffinose | ARA_LEAF | p-Super | LC | 862 | 3481 |
| 39237 | non-targ | B2399 | sh-7-p | ARA_LEAF | p-Super | GC | 51 | 583 |
| 39237 | non-targ | B2399 | sucrose | ARA_LEAF | p-Super | GC | 26 | 131 |
| 39255 | non-targ | B2405 | fructose | ARA_LEAF | p-Super | GC | 77 | 106 |
| 39255 | non-targ | B2405 | raffinose | ARA_LEAF | p-Super | LC | 58 | 61 |
| 39300 | non-targ | B2414 | my-inos | ARA_LEAF | p-Super | GC | 26 | 55 |
| 39300 | non-targ | B2414 | verbascose | ARA_LEAF | p-Super | LC | 49 | 743 |
| 146261 | non-targ | B2466 | g-1-p | ARA_LEAF | p-Super | GC | 35 | 116 |
| 146261 | non-targ | B2466 | my-inos | ARA_LEAF | p-Super | GC | 33 | 154 |
| 146261 | non-targ | B2466 | THP | ARA_LEAF | p-Super | GC | 37 | 62 |
| 40329 | non-targ | B2474 | g-1-p | ARA_LEAF | p-Super | GC | 23 | 57 |
| 40383 | non-targ | B2541 | raffinose | ARA_LEAF | p-Super | LC | 95 | 173 |
| 99898 | non-targ | B2546 | sucrose | ARA_LEAF | p-Super | GC | 23 | 38 |
| 40665 | non-targ | B2613 | g-1-p | ARA_LEAF | p-Super | GC | 18 | 42 |
| 40665 | non-targ | B2613 | my-inos | ARA_LEAF | p-Super | GC | 26 | 43 |
| 40726 | non-targ | B2634 | fructose | ARA_LEAF | p-Super | GC | 110 | 4796 |
| 40726 | non-targ | B2634 | my-inos | ARA_LEAF | p-Super | GC | 27 | 1006 |
| 40726 | non-targ | B2634 | sucrose | ARA_LEAF | p-Super | GC | 28 | 696 |
| 146288 | non-targ | B2653 | g-1-p | ARA_LEAF | p-Super | GC | 31 | 45 |
| 146288 | non-targ | B2653 | sh-7-p | ARA_LEAF | p-Super | GC | 57 | 70 |
| 146288 | non-targ | B2653 | THP | ARA_LEAF | p-Super | GC | 37 | 69 |
| 125226 | non-targ | B2654 | g-1-p | ARA_LEAF | p-Super | GC | 39 | 54 |
| 125226 | non-targ | B2654 | THP | ARA_LEAF | p-Super | GC | 34 | 70 |
| 146294 | non-targ | B2670 | g-1-p | ARA_LEAF | p-Super | GC | 34 | 97 |
| 9244 | non-targ | B2673 | g-1-p | ARA_LEAF | p-Super | GC | 31 | 60 |
| 9244 | non-targ | B2673 | THP | ARA_LEAF | p-Super | GC | 40 | 56 |
| 115655 | non-targ | B2682 | my-inos | ARA_LEAF | p-Super | GC | 25 | 113 |
| 100105 | non-targ | B2699 | g-1-p | ARA_LEAF | p-Super | GC | 65 | 214 |
| 80756 | non-targ | B2701 | g-1-p | ARA_LEAF | p-Super | GC | 36 | 59 |
| 40741 | non-targ | B2714 | my-inos | ARA_LEAF | p-Super | GC | 29 | 45 |
| 80906 | non-targ | B2739 | fructose | ARA_LEAF | p-Super | GC | 76 | 544 |
| 80906 | non-targ | B2739 | glucose | ARA_LEAF | p-Super | GC | 77 | 212 |
| 81075 | non-targ | B2747 | glucose | ARA_LEAF | p-Super | GC | 81 | 417 |
| 81075 | non-targ | B2747 | my-inos | ARA_LEAF | p-Super | GC | 34 | 238 |
| 81075 | non-targ | B2747 | raffinose | ARA_LEAF | p-Super | LC | 64 | 612 |
| 81451 | non-targ | B2762 | g-1-p | ARA_LEAF | p-Super | GC | 18 | 30 |
| 81451 | non-targ | B2762 | THP | ARA_LEAF | p-Super | GC | 35 | 58 |
| 115719 | non-targ | B2790 | fructose | ARA_LEAF | p-Super | GC | 134 | 138 |
| 115719 | non-targ | B2790 | glucose | ARA_LEAF | p-Super | GC | 60 | 155 |
| 115719 | non-targ | B2790 | g-1-p | ARA_LEAF | p-Super | GC | 32 | 81 |
| 115719 | non-targ | B2790 | my-inos | ARA_LEAF | p-Super | GC | 25 | 116 |
| 115719 | non-targ | B2790 | THP | ARA_LEAF | p-Super | GC | 43 | 90 |
| 81576 | non-targ | B2818 | fructose | ARA_LEAF | p-Super | GC | 89 | 1378 |
| 81576 | non-targ | B2818 | g-1-p | ARA_LEAF | p-Super | GC | 25 | 43 |
| 81576 | non-targ | B2818 | my-inos | ARA_LEAF | p-Super | GC | 25 | 67 |
| 81935 | non-targ | B2839 | raffinose | ARA_LEAF | p-Super | LC | 121 | 159 |
| 9333 | non-targ | B2923 | glucose | ARA_LEAF | p-Super | GC | 77 | 194 |
| 9333 | non-targ | B2923 | my-inos | ARA_LEAF | p-Super | GC | 24 | 107 |
| 146327 | non-targ | B2932 | my-inos | ARA_LEAF | p-Super | GC | 26 | 61 |
| 104660 | plastidic | B3112 | erythrol | ARA_SEED_2 | p-USP | GC | 147 | 413 |
| 42477 | non-targ | B3151 | my-inos | ARA_LEAF | p-Super | GC | 33 | 139 |
| 42477 | non-targ | B3151 | raffinose | ARA_LEAF | p-Super | LC | 65 | 188 |
| 42477 | non-targ | B3151 | sucrose | ARA_LEAF | p-Super | GC | 25 | 64 |
| 82510 | plastidic | B3221 | fructose | ARA_LEAF | p-Super | GC | 40 | 58 |
| 82510 | plastidic | B3221 | glucose | ARA_LEAF | p-Super | GC | 58 | 73 |
| 82510 | plastidic | B3221 | THP | ARA_LEAF | p-Super | GC | 44 | 62 |
| 9470 | non-targ | B3246 | my-inos | ARA_LEAF | p-Super | GC | 311 | 476 |
| 9492 | non-targ | B3256 | my-inos | ARA_SEED_2 | p-USP | GC | 25 | 229 |
| 42502 | non-targ | B3262 | fructose | ARA_LEAF | p-Super | GC | 79 | 736 |
| 42502 | non-targ | B3262 | glucose | ARA_LEAF | p-Super | GC | 58 | 334 |
| 42502 | non-targ | B3262 | g-1-p | ARA_LEAF | p-Super | GC | 43 | 64 |
| 42502 | non-targ | B3262 | raffinose | ARA_LEAF | p-Super | LC | 186 | 930 |
| 42502 | non-targ | B3262 | sucrose | ARA_LEAF | p-Super | GC | 30 | 67 |
| 146364 | plastidic | B3337 | glucose | ARA_LEAF | p-Super | GC | 38 | 48 |
| 10104 | non-targ | B3346 | my-inos | ARA_LEAF | p-Super | GC | 30 | 74 |
| 10104 | non-targ | B3346 | raffinose | ARA_LEAF | p-Super | LC | 73 | 370 |
| 10104 | non-targ | B3346 | THP | ARA_LEAF | p-Super | GC | 34 | 74 |
| 82866 | non-targ | B3403 | fructose | ARA_LEAF | p-Super | GC | 77 | 143 |
| 82866 | non-targ | B3403 | glucose | ARA_LEAF | p-Super | GC | 79 | 87 |
| 42579 | non-targ | B3427 | THP | ARA_LEAF | p-Super | GC | 39 | 125 |
| 94051 | mitochondrial | B3429 | fructose | ARA_LEAF | p-Super | GC | 79 | 211 |
| 94051 | mitochondrial | B3429 | glucose | ARA_LEAF | p-Super | GC | 39 | 65 |
| 94380 | non-targ | B3442 | my-inos | ARA_LEAF | p-Super | GC | 27 | 82 |
| 146440 | plastidic | B3443 | THP | ARA_LEAF | p-Super | GC | 44 | 69 |
| 116172 | plastidic | B3451 | sacch a | ARA_LEAF | p-Super | LC | 53 | 59 |
| 146472 | non-targ | B3457 | g-1-p | ARA_LEAF | p-Super | GC | 28 | 51 |
| 146472 | non-targ | B3457 | my-inos | ARA_LEAF | p-Super | GC | 24 | 54 |
| 146646 | plastidic | B3519 | fructose | ARA_SEED_2 | p-USP | GC | 24 | 71 |
| 146646 | plastidic | B3519 | galactinol | ARA_SEED_2 | p-USP | GC | 40 | 107 |
| 146732 | non-targ | B3600 | fructose | ARA_SEED_2 | p-Super | GC | 69 | 185 |
| 146732 | non-targ | B3600 | mannitol | ARA_LEAF | p-Super | LC | 422 | 16165 |
| 146732 | non-targ | B3600 | sorbitol | ARA_SEED_2 | p-Super | LC | 3140 | 12520 |
| 94386 | non-targ | B3774 | galactinol | ARA_SEED_2 | p-USP | GC | 37 | 119 |
| 136098 | non-targ | B3777 | my-inos | ARA_LEAF | p-Super | GC | 26 | 50 |
| 10708 | non-targ | B3817 | my-inos | ARA_LEAF | p-Super | GC | 38 | 203 |
| 10708 | non-targ | B3817 | raffinose | ARA_LEAF | p-Super | LC | 220 | 467 |
| 146834 | non-targ | B3818 | my-inos | ARA_LEAF | p-Super | GC | 31 | 45 |
| 10726 | non-targ | B3823 | my-inos | ARA_LEAF | p-Super | GC | 29 | 113 |
| 101327 | plastidic | B3870 | my-inos | ARA_SEED_2 | p-USP | GC | 26 | 69 |
| 101327 | plastidic | B3870 | verbascose | ARA_SEED_2 | p-USP | LC | 67 | 181 |
| 83821 | plastidic | B3872 | g-1-p | ARA_LEAF | p-Super | GC | 27 | 59 |
| 44372 | non-targ | B3989 | fructose | ARA_LEAF | p-Super | GC | 105 | 1389 |
| 44372 | non-targ | B3989 | glucose | ARA_LEAF | p-Super | GC | 90 | 370 |
| 44372 | non-targ | B3989 | g-1-p | ARA_LEAF | p-Super | GC | 18 | 43 |
| 44372 | non-targ | B3989 | raffinose | ARA_LEAF | p-Super | LC | 95 | 272 |
| 44372 | non-targ | B3989 | sucrose | ARA_LEAF | p-Super | GC | 37 | 65 |
| 44378 | non-targ | B4012 | galactinol | ARA_SEED_2 | p-USP | GC | 37 | 102 |
| 10740 | non-targ | B4029 | fructose | ARA_LEAF | p-Super | GC | 83 | 2120 |
| 10740 | non-targ | B4029 | glucose | ARA_LEAF | p-Super | GC | 72 | 1072 |
| 10740 | non-targ | B4029 | sh-7-p | ARA_LEAF | p-Super | GC | 46 | 404 |
| 146848 | plastidic | B4039 | g-1-p | ARA_LEAF | p-Super | GC | 20 | 54 |
| 146848 | plastidic | B4039 | THP | ARA_LEAF | p-Super | GC | 33 | 87 |
| 106532 | non-targ | B4050 | fructose | ARA_LEAF | p-Super | GC | 114 | 1402 |
| 106532 | non-targ | B4050 | glucose | ARA_LEAF | p-Super | GC | 102 | 725 |
| 106532 | non-targ | B4050 | my-inos | ARA_LEAF | p-Super | GC | 27 | 309 |
| 94542 | non-targ | B4056 | fructose | ARA_LEAF | p-Super | GC | 140 | 163 |
| 126421 | plastidic | B4069 | galactinol | ARA_SEED_2 | p-USP | GC | 47 | 118 |
| 146921 | non-targ | B4189 | g-1-p | ARA_LEAF | p-Super | GC | 31 | 67 |
| 146921 | non-targ | B4189 | THP | ARA_LEAF | p-Super | GC | 43 | 74 |
| 94735 | non-targ | B4250 | my-inos | ARA_LEAF | p-Super | GC | 31 | 169 |
| 94735 | non-targ | B4250 | raffinose | ARA_LEAF | p-Super | LC | 188 | 278 |
| 45321 | non-targ | B4256 | fructose | ARA_LEAF | p-Super | GC | 219 | 2357 |
| 45321 | non-targ | B4256 | glucose | ARA_LEAF | p-Super | GC | 88 | 504 |
| 45394 | non-targ | B4321 | fructose | ARA_LEAF | p-Super | GC | 104 | 177 |
| 45556 | non-targ | B4384 | galactinol | ARA_SEED_2 | p-USP | GC | 56 | 127 |
| 84079 | plastidic | D90900 | my-inos | ARA_LEAF | p-PcUBI | GC | 37 | 67 |
| 10811 | non-targ | GM02LC12622 | fructose | ARA_LEAF | p-PcUBI | GC | 222 | 4601 |
| 10811 | non-targ | GM02LC12622 | glucose | ARA_LEAF | p-PcUBI | GC | 88 | 366 |
| 10811 | non-targ | GM02LC12622 | g-1-p | ARA_LEAF | p-PcUBI | GC | 26 | 99 |
| 10811 | non-targ | GM02LC12622 | my-inos | ARA_LEAF | p-PcUBI | GC | 25 | 119 |
| 10811 | non-targ | GM02LC12622 | sucrose | ARA_LEAF | p-PcUBI | GC | 30 | 134 |
| 46751 | non-targ | GM02LC19289 | g-1-p | ARA_LEAF | p-PcUBI | GC | 35 | 110 |
| 46751 | non-targ | GM02LC19289 | THP | ARA_LEAF | p-PcUBI | GC | 39 | 119 |
| 84198 | non-targ | GM02LC21368 | fructose | ARA_LEAF | p-PcUBI | GC | 82 | 665 |
| 116312 | non-targ | GM02LC38418 | g-1-p | ARA_LEAF | p-PcUBI | GC | 46 | 57 |
| 46850 | non-targ | GM02LC44512 | g-1-p | ARA_LEAF | p-PcUBI | GC | 47 | 85 |
| 46850 | non-targ | GM02LC44512 | raffinose | ARA_LEAF | p-PcUBI | LC | 60 | 997 |
| 46850 | non-targ | GM02LC44512 | sucrose | ARA_LEAF | p-PcUBI | GC | 28 | 94 |
| 47026 | non-targ | GM02LC46 | THP | ARA_LEAF | p-PcUBI | GC | 35 | 69 |
| 47105 | non-targ | GM02LC6021 | THP | ARA_LEAF | p-PcUBI | GC | 38 | 92 |
| 146939 | plastidic | Sll0222 | my-inos | ARA_LEAF | p-PcUBI | GC | 26 | 48 |
| 49143 | plastidic | Sll0248 | verbascose | ARA_LEAF | p-PcUBI | LC | 88 | 378 |
| 49800 | mitochondrial | Sll0254 | sucrose | ARA_LEAF | p-PcUBI | GC | 25 | 62 |
| 84865 | plastidic | Sll0281 | verbascose | ARA_LEAF | p-PcUBI | LC | 107 | 525 |
| 50070 | non-targ | Sll0354 | my-inos | ARA_LEAF | p-PcUBI | GC | 25 | 38 |
| 106920 | mitochondrial | Sll0368 | my-inos | ARA_LEAF | p-PcUBI | GC | 25 | 77 |
| 94942 | non-targ | Sll0418 | g-1-p | ARA_LEAF | p-PcUBI | GC | 43 | 164 |
| 94942 | mitochondrial | Sll0418 | my-inos | ARA_LEAF | p-PcUBI | GC | 33 | 56 |
| 94942 | non-targ | Sll0418 | my-inos | ARA_LEAF | p-PcUBI | GC | 26 | 38 |
| 94942 | non-targ | Sll0418 | sacch a | ARA_LEAF | p-PcUBI | LC | 51 | 100 |
| 94942 | non-targ | Sll0418 | THP | ARA_LEAF | p-PcUBI | GC | 37 | 157 |
| 50104 | non-targ | Sll0420 | g-1-p | ARA_LEAF | p-PcUBI | GC | 23 | 36 |
| 85510 | plastidic | Sll0593 | g-1-p | ARA_LEAF | p-PcUBI | GC | 35 | 72 |
| 146945 | non-targ | Sll0643 | sacch a | ARA_LEAF | p-PcUBI | LC | 46 | 111 |
| 101707 | non-targ | Sll0833 | g-1-p | ARA_LEAF | p-PcUBI | GC | 33 | 132 |
| 101707 | non-targ | Sll0833 | THP | ARA_LEAF | p-PcUBI | GC | 39 | 122 |
| 52246 | mitochondrial | Sll0934 | g-1-p | ARA_LEAF | p-PcUBI | GC | 39 | 58 |
| 52364 | non-targ | Sll0945 | fructose | ARA_LEAF | p-PcUBI | GC | 94 | 495 |
| 52364 | non-targ | Sll0945 | sucrose | ARA_LEAF | p-PcUBI | GC | 30 | 82 |
| 53189 | non-targ | Sll1185 | g-1-p | ARA_LEAF | p-PcUBI | GC | 32 | 41 |
| 147208 | non-targ | SLL1308 | THP | ARA_LEAF | p-PcUBI | GC | 34 | 69 |
| 53456 | non-targ | Sll1393 | raffinose | ARA_LEAF | p-PcUBI | LC | 71 | 157 |
| 95047 | non-targ | Sll1498 | my-inos | ARA_LEAF | p-PcUBI | GC | 24 | 28 |
| 95047 | non-targ | Sll1498 | THP | ARA_LEAF | p-PcUBI | GC | 38 | 68 |
| 54897 | non-targ | Sll1676 | my-inos | ARA_LEAF | p-PcUBI | GC | 20 | 24 |
| 55063 | plastidic | Sll1682 | THP | ARA_LEAF | p-PcUBI | GC | 33 | 65 |
| 55379 | non-targ | Sll1761 | glucose | ARA_LEAF | p-PcUBI | GC | 62 | 157 |
| 86447 | plastidic | Sll1848 | glucose | ARA_LEAF | p-PcUBI | GC | 115 | 341 |
| 55385 | mitochondrial | Sll1920 | g-1-p | ARA_LEAF | p-PcUBI | GC | 20 | 106 |
| 55385 | non-targ | Sll1920 | g-1-p | ARA_LEAF | p-PcUBI | GC | 20 | 136 |
| 55385 | mitochondrial | Sll1920 | my-inos | ARA_LEAF | p-PcUBI | GC | 25 | 28 |
| 55385 | non-targ | Sll1920 | raffinose | ARA_LEAF | p-PcUBI | LC | 85 | 216 |
| 55771 | non-targ | Slr0237 | g-1-p | ARA_LEAF | p-PcUBI | GC | 31 | 55 |
| 86540 | mitochondrial | Slr0239 | fructose | ARA_LEAF | p-PcUBI | GC | 76 | 426 |
| 86540 | mitochondrial | Slr0239 | glucose | ARA_LEAF | p-PcUBI | GC | 65 | 167 |
| 11990 | non-targ | Slr0338 | g-1-p | ARA_LEAF | p-PcUBI | GC | 18 | 64 |
| 11990 | non-targ | Slr0338 | THP | ARA_LEAF | p-PcUBI | GC | 43 | 133 |
| 56514 | non-targ | Slr0600 | g-1-p | ARA_LEAF | p-PcUBI | GC | 18 | 91 |
| 56894 | mitochondrial | Slr0710 | g-1-p | ARA_LEAF | p-PcUBI | GC | 24 | 37 |
| 87397 | plastidic | Slr0721 | g-1-p | ARA_LEAF | p-PcUBI | GC | 24 | 119 |
| 57235 | plastidic | Slr0739 | sucrose | ARA_LEAF | p-PcUBI | GC | 26 | 34 |
| 147346 | mitochondrial | Slr0757 | fructose | ARA_LEAF | p-PcUBI | GC | 100 | 243 |
| 147346 | mitochondrial | Slr0757 | glucose | ARA_LEAF | p-PcUBI | GC | 72 | 114 |
| 147346 | mitochondrial | Slr0757 | g-1-p | ARA_LEAF | p-PcUBI | GC | 39 | 56 |
| 57679 | mitochondrial | Slr0782 | g-1-p | ARA_LEAF | p-PcUBI | GC | 33 | 68 |
| 87610 | mitochondrial | Slr0862 | fructose | ARA_LEAF | p-PcUBI | GC | 80 | 98 |
| 87610 | mitochondrial | Slr0862 | glucose | ARA_LEAF | p-PcUBI | GC | 54 | 88 |
| 147407 | mitochondrial | Slr0905 | g-1-p | ARA_LEAF | p-PcUBI | GC | 32 | 57 |
| 119222 | mitochondrial | Slr0949 | my-inos | ARA_LEAF | p-PcUBI | GC | 25 | 56 |
| 57734 | non-targ | Slr1096 | g-1-p | ARA_LEAF | p-PcUBI | GC | 31 | 90 |
| 57734 | non-targ | Slr1096 | raffinose | ARA_LEAF | p-PcUBI | LC | 81 | 216 |
| 101776 | plastidic | Slr1107 | my-inos | ARA_LEAF | p-PcUBI | GC | 21 | 26 |
| 116713 | mitochondrial | Slr1350 | g-1-p | ARA_LEAF | p-PcUBI | GC | 26 | 61 |
| 58472 | mitochondrial | Slr1369 | g-1-p | ARA_LEAF | p-PcUBI | GC | 39 | 63 |
| 58472 | mitochondrial | Slr1369 | my-inos | ARA_LEAF | p-PcUBI | GC | 29 | 62 |
| 58668 | mitochondrial | Slr1492 | fructose | ARA_LEAF | p-PcUBI | GC | 82 | 150 |
| 12070 | mitochondrial | Slr1655 | sucrose | ARA_LEAF | p-PcUBI | GC | 26 | 64 |
| 58731 | plastidic | Slr1739 | fructose | ARA_LEAF | p-PcUBI | GC | 84 | 407 |
| 58751 | plastidic | Slr1742 | fructose | ARA_LEAF | p-PcUBI | GC | 76 | 91 |
| 58751 | plastidic | Slr1742 | my-inos | ARA_LEAF | p-PcUBI | GC | 27 | 35 |
| 147457 | plastidic | Slr1743 | g-1-p | ARA_LEAF | p-PcUBI | GC | 28 | 51 |
| 147637 | plastidic | Slr1779 | raffinose | ARA_LEAF | p-PcUBI | LC | 55 | 176 |
| 12140 | plastidic | Slr1791 | g-1-p | ARA_LEAF | p-PcUBI | GC | 21 | 48 |
| 12341 | plastidic | Slr2072 | g-1-p | ARA_LEAF | p-PcUBI | GC | 28 | 82 |
| 12341 | plastidic | Slr2072 | THP | ARA_LEAF | p-PcUBI | GC | 34 | 121 |
| 59370 | plastidic | Slr2124 | fructose | ARA_LEAF | p-PcUBI | GC | 152 | 214 |
| 59370 | plastidic | Slr2124 | glucose | ARA_LEAF | p-PcUBI | GC | 123 | 150 |
| 59370 | plastidic | Slr2124 | g-1-p | ARA_LEAF | p-PcUBI | GC | 31 | 31 |
| 59370 | plastidic | Slr2124 | my-inos | ARA_LEAF | p-PcUBI | GC | 24 | 38 |
| 59370 | plastidic | Slr2124 | sucrose | ARA_LEAF | p-PcUBI | GC | 24 | 45 |
| 147836 | mitochondrial | Slr2132 | raffinose | ARA_LEAF | p-PcUBI | LC | 75 | 205 |
| 136907 | plastidic | Smr0004 | g-1-p | ARA_LEAF | p-PcUBI | GC | 31 | 52 |
| 136907 | plastidic | Smr0004 | raffinose | ARA_LEAF | p-PcUBI | LC | 79 | 166 |
| 136907 | plastidic | Smr0004 | THP | ARA_LEAF | p-PcUBI | GC | 33 | 78 |
| 12698 | non-targ | TTC0019 | fructose | ARA_LEAF | p-PcUBI | GC | 83 | 4740 |
| 12698 | non-targ | TTC0019 | glucose | ARA_LEAF | p-PcUBI | GC | 62 | 1517 |
| 12698 | non-targ | TTC0019 | sh-7-p | ARA_LEAF | p-PcUBI | GC | 57 | 296 |
| 60301 | non-targ | TTC0035 | fructose | ARA_LEAF | p-PcUBI | GC | 77 | 154 |
| 60301 | non-targ | TTC0035 | glucose | ARA_LEAF | p-PcUBI | GC | 51 | 84 |
| 60301 | non-targ | TTC0035 | sucrose | ARA_LEAF | p-PcUBI | GC | 27 | 34 |
| 60859 | non-targ | TTC0216 | g-1-p | ARA_LEAF | p-PcUBI | GC | 32 | 117 |
| 60859 | non-targ | TTC0216 | THP | ARA_LEAF | p-PcUBI | GC | 46 | 95 |
| 147944 | non-targ | TTC0865 | my-inos | ARA_LEAF | p-PcUBI | GC | 30 | 49 |
| 61723 | non-targ | TTC1193 | fructose | ARA_LEAF | p-PcUBI | GC | 88 | 1786 |
| 61723 | non-targ | TTC1193 | glucose | ARA_LEAF | p-PcUBI | GC | 63 | 1072 |
| 61723 | non-targ | TTC1193 | g-1-p | ARA_LEAF | p-PcUBI | GC | 38 | 77 |
| 62079 | non-targ | TTC1386 | fructose | ARA_LEAF | p-PcUBI | GC | 363 | 1435 |
| 62079 | non-targ | TTC1386 | glucose | ARA_LEAF | p-PcUBI | GC | 197 | 296 |
| 12974 | non-targ | TTC1550 | fructose | ARA_LEAF | p-PcUBI | GC | 128 | 915 |
| 12974 | non-targ | TTC1550 | g-1-p | ARA_LEAF | p-PcUBI | GC | 19 | 53 |
| 12974 | non-targ | TTC1550 | sucrose | ARA_LEAF | p-PcUBI | GC | 24 | 83 |
| 148559 | non-targ | TTC1893 | raffinose | ARA_LEAF | p-PcUBI | LC | 66 | 72 |
| 148559 | non-targ | TTC1893 | THP | ARA_LEAF | p-PcUBI | GC | 47 | 62 |
| 62160 | non-targ | TTC1918 | g-1-p | ARA_LEAF | p-PcUBI | GC | 21 | 42 |
| 62244 | non-targ | XM_473199 | g-1-p | ARA_LEAF | p-PcUBI | GC | 18 | 54 |
| 62524 | non-targ | Ybl021c | my-inos | ARA_LEAF | Big35S | GC | 26 | 84 |
| 62524 | non-targ | Ybl021c | sucrose | ARA_LEAF | Big35S | GC | 25 | 53 |
| 88879 | plastidic | Ybr249c | g-1-p | ARA_LEAF | p-Super | GC | 32 | 59 |
| 89317 | non-targ | Ybr296c | g-1-p | ARA_LEAF | p-PcUBI | GC | 35 | 46 |
| 89317 | non-targ | Ybr296c | THP | ARA_LEAF | p-PcUBI | GC | 37 | 53 |
| 96980 | plastidic | Ycl027w | fructose | ARA_LEAF | p-Super | GC | 61 | 266 |
| 96980 | plastidic | Ycl027w | g-1-p | ARA_LEAF | p-Super | GC | 35 | 66 |
| 89395 | plastidic | Ycl064c | my-inos | ARA_LEAF | p-Super | GC | 28 | 48 |
| 89395 | plastidic | Ycl064c | sucrose | ARA_LEAF | p-Super | GC | 37 | 37 |
| 108113 | non-targ | Ycr012w | fructose | ARA_LEAF | Big35S | GC | 83 | 188 |
| 108113 | non-targ | Ycr012w | glucose | ARA_LEAF | Big35S | GC | 81 | 181 |
| 148579 | non-targ | Ycr047w-a | raffinose | ARA_LEAF | Big35S | LC | 69 | 234 |
| 63264 | plastidic | Ycr102c | THP | ARA_LEAF | p-Super | GC | 39 | 87 |
| 122228 | non-targ | Ydl066w | galactinol | ARA_SEED_2 | p-PcUBI | GC | 37 | 61 |
| 120045 | non-targ | Ydl126c | my-inos | ARA_LEAF | Big35S | GC | 24 | 35 |
| 14171 | non-targ | Ydl155w | my-inos | ARA_LEAF | Big35S | GC | 33 | 112 |
| 137498 | non-targ | Ydl159w-a | raffinose | ARA_LEAF | Big35S | LC | 57 | 204 |
| 14302 | plastidic | Ydl168w | g-1-p | ARA_LEAF | p-Super | GC | 34 | 126 |
| 89483 | plastidic | Ydl188c | g-1-p | ARA_LEAF | p-Super | GC | 40 | 58 |
| 148583 | plastidic | YDL222C | THP | ARA_LEAF | p-Super | GC | 36 | 79 |
| 113313 | plastidic | Ydl235c | g-1-p | ARA_LEAF | p-Super | GC | 31 | 88 |
| 113313 | plastidic | Ydl235c | my-inos | ARA_LEAF | p-Super | GC | 30 | 103 |
| 113313 | plastidic | Ydl235c | THP | ARA_LEAF | p-Super | GC | 48 | 88 |
| 63334 | plastidic | Ydr044w | sucrose | ARA_LEAF | p-PcUBI | GC | 31 | 77 |
| 63544 | plastidic | Ydr046c | glucose | ARA_LEAF | p-Super | GC | 36 | 43 |
| 90103 | plastidic | Ydr183w | fructose | ARA_LEAF | p-Super | GC | 158 | 249 |
| 90103 | plastidic | Ydr183w | glucose | ARA_LEAF | p-Super | GC | 60 | 74 |
| 90165 | non-targ | Ydr507c | g-1-p | ARA_LEAF | Big35S | GC | 18 | 88 |
| 148614 | non-targ | Yel011w | fructose | ARA_LEAF | Big35S | GC | 113 | 539 |
| 148614 | non-targ | Yel011w | glucose | ARA_LEAF | Big35S | GC | 71 | 431 |
| 97294 | non-targ | Yel030c-a | THP | ARA_LEAF | Big35S | GC | 33 | 87 |
| 128511 | non-targ | Yel046c | g-1-p | ARA_LEAF | Big35S | GC | 21 | 112 |
| 148811 | plastidic | Yer024w | glucose | ARA_LEAF | p-Super | GC | 47 | 92 |
| 148833 | plastidic | Yer177w | raffinose | ARA_LEAF | p-PcUBI | LC | 112 | 148 |
| 64144 | non-targ | Yfl019c | my-inos | ARA_LEAF | Big35S | GC | 28 | 275 |
| 64144 | non-targ | Yfl019c | sucrose | ARA_LEAF | Big35S | GC | 26 | 126 |
| 149219 | non-targ | Yfr053c | sucrose | ARA_LEAF | Big35S | GC | 27 | 45 |
| 120436 | plastidic | Ygl039w | g-1-p | ARA_LEAF | p-PcUBI | GC | 30 | 57 |
| 120436 | plastidic | Ygl039w | THP | ARA_LEAF | p-PcUBI | GC | 36 | 92 |
| 90278 | plastidic | Ygl096w | g-1-p | ARA_LEAF | p-Super | GC | 18 | 48 |
| 90278 | plastidic | Ygl096w | THP | ARA_LEAF | p-Super | GC | 33 | 86 |
| 64177 | non-targ | Ygl237c | raffinose | ARA_LEAF | Big35S | LC | 68 | 290 |
| 130742 | plastidic | Ygl256w | g-1-p | ARA_LEAF | p-Super | GC | 44 | 105 |
| 130742 | plastidic | Ygl256w | THP | ARA_LEAF | p-Super | GC | 40 | 101 |
| 14715 | plastidic | Yhl013c | glucose | ARA_LEAF | p-Super | GC | 137 | 173 |
| 14715 | plastidic | Yhl013c | g-1-p | ARA_LEAF | p-Super | GC | 18 | 38 |
| 64563 | plastidic | Yil074c | g-1-p | ARA_LEAF | p-Super | GC | 36 | 70 |
| 149454 | plastidic | Yil083c | fructose | ARA_LEAF | p-Super | GC | 89 | 140 |
| 64964 | plastidic | Yjl073w | my-inos | ARA_LEAF | p-Super | GC | 25 | 34 |
| 97631 | non-targ | Yjl127w-a | THP | ARA_LEAF | Big35S | GC | 39 | 102 |
| 149632 | non-targ | Yjl153c | fructose | ARA_SEED_2 | p-PcUBI | GC | 51 | 79 |
| 149632 | non-targ | Yjl153c | galactitol | ARA_SEED_2 | p-PcUBI | GC | 96 | 292 |
| 149632 | non-targ | Yjl153c | my-inos | ARA_SEED_2 | p-PcUBI | GC | 24 | 70 |
| 97635 | non-targ | Yjl219w | sorbitol | ARA_SEED_2 | p-PcUBI | GC | 121 | 350 |
| 149801 | non-targ | Yjr066w | my-inos | ARA_LEAF | Big35S | GC | 26 | 87 |
| 14843 | non-targ | Yjr130c | glucose | ARA_LEAF | Big35S | GC | 45 | 92 |
| 149868 | non-targ | Ykl060c | fructose | ARA_LEAF | p-PcUBI | GC | 82 | 133 |
| 149868 | non-targ | Ykl060c | sh-7-p | ARA_LEAF | p-PcUBI | GC | 43 | 61 |
| 150063 | plastidic | Ykl192c | g-1-p | ARA_LEAF | p-PcUBI | GC | 42 | 49 |
| 130903 | non-targ | Ykr072c | sucrose | ARA_LEAF | Big35S | GC | 23 | 51 |
| 98075 | non-targ | Ykr097w | glucose | ARA_LEAF | p-PcUBI | GC | 62 | 110 |
| 98075 | plastidic | Ykr097w | glucose | ARA_LEAF | p-Super | GC | 70 | 93 |
| 150603 | non-targ | Ylr025w | sucrose | ARA_LEAF | Big35S | GC | 31 | 31 |
| 91045 | plastidic | Ylr043c | g-1-p | ARA_LEAF | p-Super | GC | 19 | 78 |
| 150682 | non-targ | Ylr081w | fructose | ARA_LEAF | p-PcUBI | GC | 68 | 128 |
| 91973 | plastidic | Ymr120c | verbascose | ARA_LEAF | p-Super | LC | 135 | 3405 |
| 130986 | plastidic | Ymr324c | g-1-p | ARA_LEAF | p-Super | GC | 34 | 58 |
| 117495 | non-targ | Ynl064c | my-inos | ARA_LEAF | Big35S | GC | 28 | 50 |
| 117495 | non-targ | Ynl064c | sucrose | ARA_LEAF | Big35S | GC | 25 | 31 |
| 67646 | plastidic | Ynr019w | raffinose | ARA_LEAF | p-PcUBI | LC | 64 | 132 |
| 15179 | plastidic | Yol160w | my-inos | ARA_LEAF | p-Super | GC | 27 | 30 |
| 151862 | plastidic | Yor163w | glucose | ARA_LEAF | p-Super | GC | 42 | 80 |
| 92540 | plastidic | Yor244w | g-1-p | ARA_LEAF | p-Super | GC | 31 | 53 |
| 151910 | plastidic | Ypl138c | THP | ARA_LEAF | p-Super | GC | 32 | 115 |
| 151927 | plastidic | Ypl144w | g-1-p | ARA_LEAF | p-Super | GC | 33 | 71 |
| 151927 | plastidic | Ypl144w | THP | ARA_LEAF | p-Super | GC | 36 | 66 |
| 151931 | plastidic | Ypr098c | g-1-p | ARA_LEAF | p-Super | GC | 47 | 110 |
| 151931 | plastidic | Ypr098c | THP | ARA_LEAF | p-Super | GC | 63 | 122 |
| 151958 | plastidic | Ypr156c | g-1-p | ARA_LEAF | p-PcUBI | GC | 19 | 58 |
| 151958 | plastidic | Ypr156c | my-inos | ARA_LEAF | p-PcUBI | GC | 27 | 92 |
| 68413 | non-targ | Zm_4842_BE510522 | fructose | ARA_LEAF | p-PcUBI | GC | 106 | 493 |
| 68413 | non-targ | Zm_4842_BE510522 | glucose | ARA_LEAF | p-PcUBI | GC | 68 | 257 |
| 140626 | plastidic | 44849766_CANOLA | my-inos | ARA_LEAF | p-PcUBI | GC | 36 | 104 |
| 15187 | non-targ | 47266012_SOYBEAN | fructose | ARA_LEAF | p-PcUBI | GC | 78 | 200 |
| 15187 | non-targ | 47266012_SOYBEAN | glucose | ARA_LEAF | p-PcUBI | GC | 60 | 140 |
| 15187 | non-targ | 47266012_SOYBEAN | g-1-p | ARA_LEAF | p-PcUBI | GC | 21 | 69 |
| 15187 | non-targ | 47266012_SOYBEAN | my-inos | ARA_LEAF | p-PcUBI | GC | 27 | 62 |
| 15187 | non-targ | 47266012_SOYBEAN | sh-7-p | ARA_LEAF | p-PcUBI | GC | 48 | 72 |
| 69 | non-targ | 49747384_SOYBEAN | glucose | ARA_LEAF | p-PcUBI | GC | 101 | 120 |
| 69 | non-targ | 49747384_SOYBEAN | g-1-p | ARA_LEAF | p-PcUBI | GC | 27 | 72 |
| 69 | non-targ | 49747384_SOYBEAN | my-inos | ARA_LEAF | p-PcUBI | GC | 33 | 71 |
| 69 | non-targ | 49747384_SOYBEAN | raffinose | ARA_LEAF | p-PcUBI | LC | 64 | 155 |
| 69 | non-targ | 49747384_SOYBEAN | sh-7-p | ARA_LEAF | p-PcUBI | GC | 46 | 85 |
| 16883 | plastidic | 59582753_SOYBEAN | fructose | ARA_LEAF | p-PcUBI | GC | 77 | 404 |
| 16883 | plastidic | 59582753_SOYBEAN | glucose | ARA_LEAF | p-PcUBI | GC | 98 | 367 |
| 16883 | plastidic | 59582753_SOYBEAN | g-1-p | ARA_LEAF | p-PcUBI | GC | 32 | 101 |
| 16883 | plastidic | 59582753_SOYBEAN | sh-7-p | ARA_LEAF | p-PcUBI | GC | 56 | 350 |
| 16883 | plastidic | 59582753_SOYBEAN | sucrose | ARA_LEAF | p-PcUBI | GC | 30 | 79 |
| 16883 | plastidic | 59582753_SOYBEAN | THP | ARA_LEAF | p-PcUBI | GC | 37 | 139 |
| 149528 | non-targ | YJL072C | fructose | ARA_LEAF | Big35S | GC | 1 | 418 |
| 150960 | plastidic | YLR153C | glucose | ARA_LEAF | p-Super | GC | 12 | 372 |

[94247] Column 1 shows the SEQ ID NO, Column 2 shows the expression type (targeted or non-targeted), Column 3 shows the “gene name” (locus), Column 4 shows the metabolite analyzed, Column 5 indicates the A. thaliana source tissue analyzed, Column 6 indicates the used promoter for expression, Column 7 indicates the analytical method. Columns 8 and 9 show the minimum and the maximum increase of the analyzed metabolite (in percent) in comparison to the wild type (ratio_by _WT, given as percent increase).

[94248] The term “non-targ” in Table d, Column 2 which shows the expression type means “non-targeted”.

[94249] The term “THP” in Table d, Column 4 which shows the metabolite analyzed means “3,4,5-trihydroxypentanoic acid”.

[94250] The term “sh-7-p” in Table d, Column 4 which shows the metabolite analyzed means “sedoheptulose-7-phosphate”.

[94251] The term “g-1-p” in Table d, Column 4 which shows the metabolite analyzed means “glucose-1-phosphate”.

[94252] The term “my-inos” in Table d, Column 4 which shows the metabolite analyzed means “myo-inositol”.

[94253] The term “sacch a” in Table d, Column 4 which shows the metabolite analyzed means “saccharic acid”.

[94254] When the analyses were repeated independently, all results proved to be significant.

[94255] [0505.1.7.17] to [0515.1.7.17] for the disclosure of these paragraphs see [0505.1.7.7] to [0515.1.7.7] above

[94256] In a further embodiment, the present invention relates in paragraphs [0000.1.7.18.] to [0514.1.7.18.] to a further process for the production of the fine chemical cerotic acid, heneicosanoic acid, lignoceric acid, melissic acid and/or montanic acid as defined below and corresponding embodiments as described herein as follows.

[94257] for the disclosure of this paragraph see [0001.1.7.7] above

[94258] Living organisms synthesize many different fatty acids. Most of them are incorporated into complex lipids, which constitute the major structural component of membranes and also the major storage product in plants and animals. Some of these fatty acids are the so called very-long-chain fatty acids (VLCFAs) which are composed of 20 or more carbons in length (i.e. >C18). VLCFAs are involved in many different physiological functions in different organisms.

[94259] In plants VLCFAs are essential for example in plant development and necessary for the synthesis of seed storage triacylglycerols, epicuticular waxes, and sphingolipids.

[94260] In plants, fatty acids up to C18-chains are formed in the plastid (fatty acid de novo synthesis) while those with C>18 are synthesized by so called elongases in the endoplasmic reticulum of the cytosol. The first reaction of elongation involves condensation of malonyl-CoA with a long chain substrate, a CoA-activated acyl substrates (stemming from fatty acid de novo synthesis or previous rounds of elongation) producing a β-ketoacyl-CoA, yielding elongation with a C2-unit. Subsequent reactions are reduction of β-hydroxyacyl-CoA, dehydration to an enoyl-CoA, followed by a second reduction to form the elongated acyl-CoA. The β-ketoacyl-CoA synthase (KCS) catalyzing the condensation reaction plays a key role in determining the chain length of fatty acid products found in seed oils and is the rate-limiting enzyme for seed VLCFA production (Lassner et al., Plant Cell, 8(1996), 281-292). The elongation process can be repeated to yield members that are 20, 22, and 24 carbons long. Plants produce very long chain fatty acids such as heneicosanoic acid (C21:0), lignoceric acid (C24:0), cerotic acid (C26:0), montanic acid (C28:0) and/or melissic acid (C30:0).

[94261] Three different pathways then lead to the transformation of VLCFAs: in the epidermis, (i) through the “acylreduction pathway”, primary alcohols and wax-esters are formed by fatty acyl-coA reductases (FAR) and wax synthases (WS), respectively, (ii) in the “decarbonylation pathway”, VLCFAs are reduced to alkanes, which in stems are oxidised by mid-chain alkane hydroxylase (MAH 1) to form secondary alcohols and ketones (FIG. 1, reviewed in ref. 5). Finally, (iii) in all cells, VLCFAs and long chain bases (LCBs) (generated from C16 and C18 fatty acids) are the precursors for the synthesis of sphingolipids (Rafaele et al., Plant Signal Behay. (2009), 4(2), 94-99).

[94262] Very-long-chain fatty acids (VLCFAs), like are essential components for the vitality of higher plants. The key enzyme of VLCFA biosynthesis, the extraplastidary fatty acid elongase, is shown for to be the primary target site of chloroacetamide herbicides. With an analysis of the fatty acid composition and the metabolism of 140-labelled precursors (sterate, malonate, acetate), the reduction of VLCFAs was determined in vivo. The inhibition of the recombinant protein substantiates the first and rate-limiting step of VLCFA biosynthesis, the condensation of acyl-CoA with malonyl-CoA to β-ketoacyl-CoA, to be the primary target site of chloroacetamides (150=10-100 nM).

[94263] Cerotic acid (26:0) (hexacosanoic acid) is a component of beeswax. Echinacea angustifolia extracts are sold as natural health products comprising the very long chain fatty acid cerotic acid. Cerotic acid is used in cosmetics as a constituent in hairstyling products. Like most long chain fatty acids with an uneven number of carbons, heneicosanoic acid is found rarely and in rather low concentrations in nature. With more than 18 carbon atoms.

[94264] It has been reported that heneicosanoic acid is found in higher concentrations (up to 5% of total fatty acids) in some Basidiomycetes (Armillaria) (K. D. Cox; H. Scherm; M. B. Riley: Characterization of Armillaria spp. from peach orchards in the southeastern United States using fatty acid methyl ester profiling, Mycological Research 110, 414-422, 2006).

[94265] Because of it is rarely encountered in biological samples, heneicosanoic acid is commonly used as internal standard in gas chromatography of fatty acids.

[94266] Lignoceric acid (24:0) (tetracosanoic acid) is a component of rapeseed oil (up to 1%) and peanut oil (1-3%). It is further found in wood tar, various cerebrosides, and in small amounts in most natural fats. The fatty acids of peanut oil contain small amounts of lignoceric acid (1.1%-2.2%). This fatty acid is also a byproduct of lignin production. Reduction of lignoceric acid yields lignoceryl alcohol.

[94267] Montanic acid and it's esters with long chain alcohols (C-24, C-26 and C-28) are part of montan wax. Montan wax, also known as lignite wax or OP wax, is a hard wax obtained by solvent extraction of certain types of lignite or brown coal. Commercially viable deposits exist in only a few locations, including Amsdorf, Germany, and in the lone Basin near lone, California. Montan wax, composed of non-glyceride long-chain (C24-030) carboxylic acid esters (62-68 weight %), free long-chain organic acids (22-26%), long-chain alcohols, ketones, and hydrocarbons (7-15%) and resins, is in effect a fossilized plant wax.

[94268] The frequent used technical montanic acid is a mixture of saturated fatty acids with 24 tp 32 carbons, Esters of montanic acid are known as food additive “E912”. E912 is used to treat the outer surface of citrus fruits.

[94269] Melissic acid (C30:0) (triacontanoic acid) is a component of beeswax.

[94270] Beeswax (cera alba) is obtained from the product excreted by certain glands of the honeybee from which the honeycomb is made. It is freed of solid impurities by melting and centrifugation (cera flava). Finally, it is bleached completely white (cera alba). Beeswax consists of 10-15 percent paraffin carbohydrates, 35-37-percent esters of C16 to C36 fatty acids and about 15 percent cerotic acid, melissic acid and their homologues. Beeswax is used as a thickener and a humectant in the manufacture of ointments, creams, lipsticks and other cosmetics and skincare products as an emulsifier, emollient, moisturizer and film former.

[94271] Beeswax is also used for the production of candles.

[94272] Wax is a general term used to refer to the mixture of long-chain apolar lipids forming a protective coating (cutin in the cuticle) on plant leaves and fruits but also in animals (wax of honeybee, cuticular lipids of insects, spermaceti of the sperm whale, skin lipids, uropygial glands of birds, depot fat of planktonic crustacea), algae, fungi and bacteria.

[94273] Many of the waxes found in nature have commercial uses in the lubricant, food and cosmetic industry. Jojoba oil has long been suggested as a putative resource of wax, since this desert shrub is unusual in its capacity to produce waxes rather than triacylglycerols (TAG) as seed storage lipids. These waxes are esters of very-long-chain-fatty acids and fatty alcohols (Miwa, 1971, J Am Oil Chem Soc 48, 259-264). As the production cost for jojoba wax, which is primarily used for cosmetic applications, is high, there is a need to engineer crop plants to produce high level of wax esters in its seed oil.

[94274] Plant aerial surfaces are covered by epicuticular waxes, complex mixtures of very long (C20-034) fatty acids, alkanes, aldehydes, ketones and esters. In addition to repelling atmospheric water they prevent dessication and are therefore an important determinant of drought resistance (Riederer and Schreiber, 2001, J. Exp. Bot 52, 2023-2032). Beside abiotic stress resistance the wax layer is part of the plant defense against biotic stressor, especially insects as for example described by Marcell and Beattie, 2002, Mol Plant Microbe Interact. 15(12), 1236-44. Furthermore they provide stability to pollen grains, thus influencing fertility and productivity.

[94275] Increased wax production in transgenic plants has for example been reported by Broun et al., 2004, Proc Natl. Acad. Sci, 101, 4706-4711. The authors overexpressed the transcriptional activator WIN1 in Arabidopsis, leading to increased wax load on arial organs. As this resulted in a complex change in the wax profile and the transgenic overexpressors had characteristic alterations in growth and development (Broun et al., 2004, Proc Natl. Acad. Sci, 101, 4706-4711) there is still a need for a more controlled increased production of defined VLCFAs.

[94276] Very long chain fatty alcohols obtained from plant waxes and beeswax have also been reported to lower plasma cholesterol in humans and existing data support the hypothesis that VLCFA exert regulatory roles in cholesterol metabolism in the peroxisome and also alter LDL uptake and metabolism (discussed in Hargrove et al., 2004, Exp Biol Med (Maywood), 229(3): 215-26).

[94277] Due to these interesting physiological roles and the nutritional, cosmetic and agrobiotechnological potential of cerotic acid, heneicosanoic acid, lignoceric acid, melissic acid and/or montanic acid there is a need to identify the genes of enzymes and other proteins involved in VLCFA metabolism, and to generate mutants or transgenic plant lines with which to modify the cerotic acid, heneicosanoic acid, lignoceric acid, melissic acid and/or montanic acid content in plants.

[94278] Economical methods for producing waxes, VLCFAs or derivates thereof, life salts, ethers esters, oxo and/or hydroxy derivates and/or reduced derivates like alcohols and food- and feed-stuffs with increased cerotic acid, heneicosanoic acid, lignoceric acid, melissic acid and/or montanic acid content are therefore very important.

[94279] Particularly economical methods are biotechnological methods utilizing waxes and/or VLCFA-producing organisms which are either natural or optimized by genetic modification.

[94280] There is a constant need for providing novel enzyme activities or direct or indirect regulators and thus alternative methods with advantageous properties for producing waxes and/or VLCFA in organisms, e.g. in transgenic organisms.

[94281] The content of a some VLCFAs in a cell was also increased by increasing or decreasing certain activities as disclosed in WO2006/069610, WO 2007/087815 or WO 2008/034648.

[94282] Improving the quality of foodstuffs and animal feeds is an important task of the food-and-feed industry. Especially advantageous for the quality of foodstuffs and animal feeds is as balanced as possible a fatty acid, waxe and/or lipid profile since a great excess of some fatty acids, waxes and/or lipids above a specific concentration in the food has no further positive effect on the utilization of the food since other fatty acid, waxes and/or lipid suddenly become limiting. A further increase in quality is only possible via addition of further fatty acid, waxe and/or lipid, which are limiting under these conditions. The targeted addition of the limiting fatty acid, waxe and/or lipid in the form of synthetic products must be carried out with extreme caution in order to avoid fatty acid, waxe and/or lipid imbalance.

[94283] To ensure a high quality of foods and animal feeds, it is therefore necessary to add a plurality of fatty acids, waxes and/or lipids in a balanced manner to suit the respective organism. Accordingly, there is still a great demand for new and more suitable genes, which encode enzymes or regulators, which participate in the biosynthesis of fatty acid, waxes and/or lipid, in particular VLCFAs and make it possible to produce certain VLCFAs specifically on an industrial scale without unwanted byproducts being formed. In the selection of genes for biosynthesis or regulation two characteristics above all are particularly important. On the one hand, there is as ever a need for improved processes for obtaining the highest possible contents of fatty acids, waxes and/or lipids like cerotic acid, heneicosanoic acid, lignoceric acid, melissic acid and/or montanic acid and on the other hand as less as possible byproducts should be produced in the production process.

[94284] It is an object of the present invention to develop an inexpensive process for the synthesis of cerotic acid, heneicosanoic acid, lignoceric acid, melissic acid and/or montanic acid

[94285] It is a further object of the present invention to develop an inexpensive process for the synthesis of waxes, e.g. VFCLAs, in particular cerotic acid, heneicosanoic acid, lignoceric acid, melissic acid and/or montanic acid and to assure that the VFCLAs, in particular cerotic acid, heneicosanoic acid, lignoceric acid, melissic acid and/or montanic acid are more accessible and facilely to isolate and recover in an industrial scale from the producing organism, preferably from a plant.

[94286] for the disclosure of this paragraph see [0013.1.7.7] above

[94287] Accordingly, in a first embodiment, the invention relates to a process for the production of at least one fine chemical selected from the group consisting of: cerotic acid, heneicosanoic acid, lignoceric acid, melissic acid and montanic acid, or, in other words, of the “fine chemical” or “fine chemical of the invention”.

[94288] The terms “fine chemical of the invention”, “fine chemical” or “the fine chemical” are used herein equally and relate in context of the paragraphs or sections [0014.1.18.18] to [0514.1.7.18] essentially to the metabolite or the metabolites indicated in column 7, application no. 18 of Tables I, II and IV in the respective line.

[94289] Further, the term “in context of any of the paragraphs [0014.1.18.18] to [0514.1.7.18]” as used herein means that for any of said paragraphs [0014.1.18.18] to [0514.1.7.18] the term “the fine chemical” is understood to follow the definition of paragraphs or sections [0014.1.18.18] and [0015.1.18.18], independently whether it refers to any other paragraph or not and whether the reference recites the term “fine chemical” in an other context.

[94290] Thus, in cases where one or more paragraphs or sections are incorporated by reference into any of the present paragraphs [0014.1.18.18] to [0514.1.7.18], e.g. by usage of the term “see paragraph” or the term “for the disclosure of this paragraph see the disclosure of paragraph” or the term “incorporated by reference” or a corresponding term, the incorporated paragraph, section or term “the fine chemical” is also understood to have the meaning according to the definition of paragraph [0014.1.18.18] and [0015.1.18.18].

[94291] Accordingly, in one embodiment, the term “fine chemical of the invention”, “fine chemical” or “the fine chemical” as used herein (alone or in combination, like in FCRP) means “cerotic acid” in context of the nucleic acid or polypeptide sequences listed in the respective same line of any one of Tables I to IV of application no. 18 and indicating in column 7 the metabolite “cerotic acid”.

[94292] In one embodiment, the term cerotic acid or the term “fine chemical” mean in context of the paragraphs or sections [0014.1.18.18] to [0514.1.7.18] at least one chemical compound with an activity of the above mentioned cerotic acid, respectively.

[94293] Accordingly, in one embodiment, the term “fine chemical of the invention”, “fine chemical” or “the fine chemical” as used herein (alone or in combination, like in FCRP) means “heneicosanoic acid” in context of the nucleic acid or polypeptide sequences listed in the respective same line of any one of Tables I to IV of application no. 18 and indicating in column 7 the metabolite “heneicosanoic acid”.

[94294] In one embodiment, the term heneicosanoic acid or the term “fine chemical” mean in context of the paragraphs or sections [0014.1.18.18] to [0514.1.7.18] at least one chemical compound with an activity of the above mentioned heneicosanoic acid, respectively.

[94295] Accordingly, in one embodiment, the term “fine chemical of the invention”, “fine chemical” or “the fine chemical” as used herein (alone or in combination, like in FCRP) means “lignoceric acid” in context of the nucleic acid or polypeptide sequences listed in the respective same line of any one of Tables I to IV of application no. 18 and indicating in column 7 the metabolite “lignoceric acid”.

[94296] In one embodiment, the term lignoceric acid or the term “fine chemical” mean in context of the paragraphs or sections [0014.1.18.18] to [0514.1.7.18] at least one chemical compound with an activity of the above mentioned lignoceric acid, respectively.

[94297] Accordingly, in one embodiment, the term “fine chemical of the invention”, “fine chemical” or “the fine chemical” as used herein (alone or in combination, like in FCRP) means “melissic acid” in context of the nucleic acid or polypeptide sequences listed in the respective same line of any one of Tables I to IV of application no. 18 and indicating in column 7 the metabolite “melissic acid”.

[94298] In one embodiment, the term melissic acid or the term “fine chemical” mean in context of the paragraphs or sections [0014.1.18.18] to [0514.1.7.18] at least one chemical compound with an activity of the above mentioned melissic acid respectively.

[94299] Accordingly, in one embodiment, the term “fine chemical of the invention”, “fine chemical” or “the fine chemical” as used herein (alone or in combination, like in FCRP) means “montanic acid” in context of the nucleic acid or polypeptide sequences listed in the respective same line of any one of Tables I to IV of application no. 18 and indicating in column 7 the metabolite “montanic acid”.

[94300] In one embodiment, the term montanic acid or the term “fine chemical” mean in context of the paragraphs or sections [0014.1.18.18] to [0514.1.7.18] at least one chemical compound with an activity of the above mentioned montanic acid, respectively.

[94301] Accordingly, in one embodiment, the terms “fine chemical of the invention”, “fine chemical” or “the fine chemical” mean in context of any of the paragraphs [0014.1.18.18] to [0514.1.7.18] cerotic acid, or derivates thereof, life salts, ethers esters, oxo and/or hydroxy derivates and/or reduced derivates like alcohols in free form or bound form. In a preferred embodiment, the term “the fine chemical” means cerotic acid or its salts, ester or ether, in free form or bound form.

[94302] In a preferred embodiment “cerotic acid” means cerotic acid in free form.

[94303] Accordingly, in one embodiment, the terms “fine chemical of the invention”, “fine chemical” or “the fine chemical” mean in context of any of the paragraphs [0014.1.18.18] to [0514.1.7.18] heneicosanoic acid, or derivates thereof, life salts, ethers esters, oxo and/or hydroxy derivates and/or reduced derivates like alcohols in free form or bound form. In a preferred embodiment, the term “the fine chemical” means heneicosanoic acid or its salts, ester or ether, in free form or bound form.

[94304] In a preferred embodiment “heneicosanoic acid” means heneicosanoic acid in free form.

[94305] Accordingly, in one embodiment, the terms “fine chemical of the invention”, “fine chemical” or “the fine chemical” mean in context of any of the paragraphs [0014.1.18.18] to [0514.1.7.18] lignoceric acid, or derivates thereof, life salts, ethers esters, oxo and/or hydroxy derivates and/or reduced derivates like alcohols in free form or bound form. In a preferred embodiment, the term “the fine chemical” means lignoceric acid or its salts, ester or ether, in free form or bound form.

[94306] In a preferred embodiment “lignoceric acid” means lignoceric acid in free form.

[94307] Accordingly, in one embodiment, the terms “fine chemical of the invention”, “fine chemical” or “the fine chemical” mean in context of any of the paragraphs [0014.1.18.18] to [0514.1.7.18] melissic acid or derivates thereof, life salts, ethers esters, oxo and/or hydroxy derivates and/or reduced derivates like alcohols in free form or bound form. In a preferred embodiment, the term “the fine chemical” means melissic acid or its salts, ester or ether, in free form or bound form.

[94308] In a preferred embodiment “melissic acid” means melissic acid in free form.

[94309] Accordingly, in one embodiment, the terms “fine chemical of the invention”, “fine chemical” or “the fine chemical” mean in context of any of the paragraphs [0014.1.18.18] to [0514.1.7.18] montanic acid, or derivates thereof, life salts, ethers esters, oxo and/or hydroxy derivates and/or reduced derivates like alcohols in free form or bound form. In a preferred embodiment, the term “the fine chemical” means montanic acid or its salts, ester or ether, in free form or bound form.

[94310] In a preferred embodiment “montanic acid” means montanic acid in free form.

[94311] Further, the term “in context of any of the paragraphs [0014.1.18.18] to [0514.1.7.18]” as used herein means that for any of said paragraphs [0014.1.18.18] to [0514.1.7.18] the term “the fine chemical” is understood to follow the definition of section [0014.1.18.18] or section [0015.1.18.18], independently whether it refers to any other paragraph or not and whether the reference recites the term “fine chemical” in an other context.

[94312] Thus, in cases where one or more paragraphs or sections are incorporated by reference into any of the present paragraphs [0014.1.18.18] to [0514.1.7.18], e.g. by usage of the term “see paragraph” or the term “for the disclosure of this paragraph see the disclosure of paragraph” or the term “incorporated by reference” or a corresponding term, the incorporated paragraph, section or term “the fine chemical” is also understood to have the meaning according to this definition of this paragraph [0015.1.18.18].

[94313] Further, the term “fine chemicals” as used herein relates to compositions comprising said fine chemical(s), i.e. comprising cerotic acid, heneicosanoic acid, lignoceric acid, melissic acid and/or montanic acid, respectively.

[94314] Accordingly, the present invention relates to a process for the production of lignoceric acid, which comprises
[94315] (a) increasing or generating one or more activities selected from the group consisting of eukaryotic translation initiation factor 5 in a non-human organism or a part thereof, preferably a microorganism, a plant cell, a plant or a part thereof, as compared to a corresponding non-transformed wild type non-human organism or a part thereof; and
[94316] (b) growing the non-human organism or a part thereof under conditions which permit the production of lignoceric acid or a composition comprising lignoceric acid in said non-human organism or in the culture medium surrounding said non-human organism.

[94317] Accordingly, the present invention relates to a process for the production of lignoceric acid, which comprises
[94318] (a) increasing or generating one or more activities selected from the group consisting of protein kinase in a non-human organism or a part thereof, preferably a microorganism, a plant cell, a plant or a part thereof, as compared to a corresponding non-transformed wild type non-human organism or a part thereof; and
[94319] (b) growing the non-human organism or a part thereof under conditions which permit the production of lignoceric acid or a composition comprising lignoceric acid in said non-human organism or in the culture medium surrounding said non-human organism.

[94320] Accordingly, the present invention relates to a process for the production of lignoceric acid, which comprises
[94321] (a) increasing or generating one or more activities selected from the group consisting of thioredoxin family protein in a non-human organism or a part thereof, preferably a microorganism, a plant cell, a plant or a part thereof, as compared to a corresponding non-transformed wild type non-human organism or a part thereof; and
[94322] (b) growing the non-human organism or a part thereof under conditions which permit the production of lignoceric acid or a composition comprising lignoceric acid in said non-human organism or in the culture medium surrounding said non-human organism.

[94323] Accordingly, the present invention relates to a process for the production of lignoceric acid, which comprises
[94324] (a) increasing or generating one or more activities selected from the group consisting of monodehydroascorbate reductase in a non-human organism or a part thereof, preferably a microorganism, a plant cell, a plant or a part thereof, as compared to a corresponding non-transformed wild type non-human organism or a part thereof; and
[94325] (b) growing the non-human organism or a part thereof under conditions which permit the production of lignoceric acid or a composition comprising lignoceric acid in said non-human organism or in the culture medium surrounding said non-human organism.

[94326] Accordingly, the present invention relates to a process for the production of lignoceric acid, which comprises
[94327] (a) increasing or generating one or more activities selected from the group consisting of glycosyl transferase in a non-human organism or a part thereof, preferably a microorganism, a plant cell, a plant or a part thereof, as compared to a corresponding non-transformed wild type non-human organism or a part thereof; and
[94328] (b) growing the non-human organism or a part thereof under conditions which permit the production of lignoceric acid or a composition comprising lignoceric acid in said non-human organism or in the culture medium surrounding said non-human organism.

[94329] Accordingly, the present invention relates to a process for the production of lignoceric acid, which comprises
[94330] (a) increasing or generating one or more activities selected from the group consisting of glutaredoxin in a non-human organism or a part thereof, preferably a microorganism, a plant cell, a plant or a part thereof, as compared to a corresponding non-transformed wild type non-human organism or a part thereof; and
[94331] (b) growing the non-human organism or a part thereof under conditions which permit the production of lignoceric acid or a composition comprising lignoceric acid in said non-human organism or in the culture medium surrounding said non-human organism.

[94332] Accordingly, the present invention relates to a process for the production of lignoceric acid, which comprises
[94333] (a) increasing or generating one or more activities selected from the group consisting of heat shock transcription factor in a non-human organism or a part thereof, preferably a microorganism, a plant cell, a plant or a part thereof, as compared to a corresponding non-transformed wild type non-human organism or a part thereof; and
[94334] (b) growing the non-human organism or a part thereof under conditions which permit the production of lignoceric acid or a composition comprising lignoceric acid in said non-human organism or in the culture medium surrounding said non-human organism.

[94335] Accordingly, the present invention relates to a process for the production of lignoceric acid, which comprises
[94336] (a) increasing or generating one or more activities selected from the group consisting of calcium-dependent protein kinase in a non-human organism or a part thereof, preferably a microorganism, a plant cell, a plant or a part thereof, as compared to a corresponding non-transformed wild type non-human organism or a part thereof; and
[94337] (b) growing the non-human organism or a part thereof under conditions which permit the production of lignoceric acid or a composition comprising lignoceric acid in said non-human organism or in the culture medium surrounding said non-human organism.

[94338] Accordingly, the present invention relates to a process for the production of lignoceric acid, which comprises
[94339] (a) increasing or generating one or more activities selected from the group consisting of gibberellin 20-oxidase in a non-human organism or a part thereof, preferably a microorganism, a plant cell, a plant or a part thereof, as compared to a corresponding non-transformed wild type non-human organism or a part thereof; and
[94340] (b) growing the non-human organism or a part thereof under conditions which permit the production of lignoceric acid or a composition comprising lignoceric acid in said non-human organism or in the culture medium surrounding said non-human organism.

[94341] Accordingly, the present invention relates to a process for the production of lignoceric acid, which comprises
[94342] (a) increasing or generating one or more activities selected from the group consisting of zinc finger protein in a non-human organism or a part thereof, preferably a microorganism, a plant cell, a plant or a part thereof, as compared to a corresponding non-transformed wild type non-human organism or a part thereof; and
[94343] (b) growing the non-human organism or a part thereof under conditions which permit the production of lignoceric acid or a composition comprising lignoceric acid in said non-human organism or in the culture medium surrounding said non-human organism.

[94344] Accordingly, the present invention relates to a process for the production of lignoceric acid, which comprises
[94345] (a) increasing or generating one or more activities selected from the group consisting of aminotransferase in a non-human organism or a part thereof, preferably a microorganism, a plant cell, a plant or a part thereof, as compared to a corresponding non-transformed wild type non-human organism or a part thereof; and
[94346] (b) growing the non-human organism or a part thereof under conditions which permit the production of lignoceric acid or a composition comprising lignoceric acid in said non-human organism or in the culture medium surrounding said non-human organism.

[94347] Accordingly, the present invention relates to a process for the production of lignoceric acid, which comprises
[94348] (a) increasing or generating one or more activities selected from the group consisting of hydrolase in a non-human organism or a part thereof, preferably a microorganism, a plant cell, a plant or a part thereof, as compared to a corresponding non-transformed wild type non-human organism or a part thereof; and
[94349] (b) growing the non-human organism or a part thereof under conditions which permit the production of lignoceric acid or a composition comprising lignoceric acid in said non-human organism or in the culture medium surrounding said non-human organism.

[94350] Accordingly, the present invention relates to a process for the production of lignoceric acid, which comprises
[94351] (a) increasing or generating one or more activities selected from the group consisting of glutamate-ammonia-ligase in a non-human organism or a part thereof, preferably a microorganism, a plant cell, a plant or a part thereof, as compared to a corresponding non-transformed wild type non-human organism or a part thereof; and
[94352] (b) growing the non-human organism or a part thereof under conditions which permit the production of lignoceric acid or a composition comprising lignoceric acid in said non-human organism or in the culture medium surrounding said non-human organism.

[94353] Accordingly, the present invention relates to a process for the production of lignoceric acid, which comprises
[94354] (a) increasing or generating one or more activities selected from the group consisting of oxidoreductase in a non-human organism or a part thereof, preferably a microorganism, a plant cell, a plant or a part thereof, as compared to a corresponding non-transformed wild type non-human organism or a part thereof; and
[94355] (b) growing the non-human organism or a part thereof under conditions which permit the production of lignoceric acid or a composition comprising lignoceric acid in said non-human organism or in the culture medium surrounding said non-human organism.

[94356] Accordingly, the present invention relates to a process for the production of lignoceric acid, which comprises
[94357] (a) increasing or generating one or more activities selected from the group consisting of chaperone protein CIpB in a non-human organism or a part thereof, preferably a microorganism, a plant cell, a plant or a part thereof, as compared to a corresponding non-transformed wild type non-human organism or a part thereof; and
[94358] (b) growing the non-human organism or a part thereof under conditions which permit the production of lignoceric acid or a composition comprising lignoceric acid in said non-human organism or in the culture medium surrounding said non-human organism.

[94359] Accordingly, the present invention relates to a process for the production of lignoceric acid, which comprises
[94360] (a) increasing or generating one or more activities selected from the group consisting of purine nucleoside phosphorylase in a non-human organism or a part thereof, preferably a microorganism, a plant cell, a plant or a part thereof, as compared to a corresponding non-transformed wild type non-human organism or a part thereof; and
[94361] (b) growing the non-human organism or a part thereof under conditions which permit the production of lignoceric acid or a composition comprising lignoceric acid in said non-human organism or in the culture medium surrounding said non-human organism.

[94362] Accordingly, the present invention relates to a process for the production of lignoceric acid, which comprises
[94363] (a) increasing or generating one or more activities selected from the group consisting of threonine synthase in a non-human organism or a part thereof, preferably a microorganism, a plant cell, a plant or a part thereof, as compared to a corresponding non-transformed wild type non-human organism or a part thereof; and
[94364] (b) growing the non-human organism or a part thereof under conditions which permit the production of lignoceric acid or a composition comprising lignoceric acid in said non-human organism or in the culture medium surrounding said non-human organism.

[94365] Accordingly, the present invention relates to a process for the production of lignoceric acid, which comprises
[94366] (a) increasing or generating one or more activities selected from the group consisting of serine protease in a non-human organism or a part thereof, preferably a microorganism, a plant cell, a plant or a part thereof, as compared to a corresponding non-transformed wild type non-human organism or a part thereof; and
[94367] (b) growing the non-human organism or a part thereof under conditions which permit the production of lignoceric acid or a composition comprising lignoceric acid in said non-human organism or in the culture medium surrounding said non-human organism.

[94368] Accordingly, the present invention relates to a process for the production of lignoceric acid, which comprises
[94369] (a) increasing or generating one or more activities selected from the group consisting of ATP-binding component of a transport system in a non-human organism or a part thereof, preferably a microorganism, a plant cell, a plant or a part thereof, as compared to a corresponding non-transformed wild type non-human organism or a part thereof; and
[94370] (b) growing the non-human organism or a part thereof under conditions which permit the production of lignoceric acid or a composition comprising lignoceric acid in said non-human organism or in the culture medium surrounding said non-human organism.

[94371] Accordingly, the present invention relates to a process for the production of lignoceric acid, which comprises
[94372] (a) increasing or generating one or more activities selected from the group consisting of isochorismate synthase in a non-human organism or a part thereof, preferably a microorganism, a plant cell, a plant or a part thereof, as compared to a corresponding non-transformed wild type non-human organism or a part thereof; and
[94373] (b) growing the non-human organism or a part thereof under conditions which permit the production of lignoceric acid or a composition comprising lignoceric acid in said non-human organism or in the culture medium surrounding said non-human organism.

[94374] Accordingly, the present invention relates to a process for the production of lignoceric acid, which comprises
[94375] (a) increasing or generating one or more activities selected from the group consisting of leucyl/phenylalanyl-tRNA-protein transferase in a non-human organism or a part thereof, preferably a microorganism, a plant cell, a plant or a part thereof, as compared to a corresponding non-transformed wild type non-human organism or a part thereof; and
[94376] (b) growing the non-human organism or a part thereof under conditions which permit the production of lignoceric acid or a composition comprising lignoceric acid in said non-human organism or in the culture medium surrounding said non-human organism.

[94377] Accordingly, the present invention relates to a process for the production of lignoceric acid, which comprises
[94378] (a) increasing or generating one or more activities selected from the group consisting of major facilitator superfamily transporter protein in a non-human organism or a part thereof, preferably a microorganism, a plant cell, a plant or a part thereof, as compared to a corresponding non-transformed wild type non-human organism or a part thereof; and
[94379] (b) growing the non-human organism or a part thereof under conditions which permit the production of lignoceric acid or a composition comprising lignoceric acid in said non-human organism or in the culture medium surrounding said non-human organism.

[94380] Accordingly, the present invention relates to a process for the production of cerotic acid, which comprises
[94381] (a) increasing or generating one or more activities selected from the group consisting of multidrug resistance protein in a non-human organism or a part thereof, preferably a microorganism, a plant cell, a plant or a part thereof, as compared to a corresponding non-transformed wild type non-human organism or a part thereof; and
[94382] (b) growing the non-human organism or a part thereof under conditions which permit the production of cerotic acid or a composition comprising cerotic acid in said non-human organism or in the culture medium surrounding said non-human organism.

[94383] Accordingly, the present invention relates to a process for the production of lignoceric acid, which comprises
[94384] (a) increasing or generating one or more activities selected from the group consisting of sodium/proton antiporter in a non-human organism or a part thereof, preferably a microorganism, a plant cell, a plant or a part thereof, as compared to a corresponding non-transformed wild type non-human organism or a part thereof; and
[94385] (b) growing the non-human organism or a part thereof under conditions which permit the production of lignoceric acid or a composition comprising lignoceric acid in said non-human organism or in the culture medium surrounding said non-human organism.

[94386] Accordingly, the present invention relates to a process for the production of lignoceric acid, which comprises
[94387] (a) increasing or generating one or more activities selected from the group consisting of cardiolipin synthase in a non-human organism or a part thereof, preferably a microorganism, a plant cell, a plant or a part thereof, as compared to a corresponding non-transformed wild type non-human organism or a part thereof; and
[94388] (b) growing the non-human organism or a part thereof under conditions which permit the production of lignoceric acid or a composition comprising lignoceric acid in said non-human organism or in the culture medium surrounding said non-human organism.

[94389] Accordingly, the present invention relates to a process for the production of lignoceric acid, which comprises
[94390] (a) increasing or generating one or more activities selected from the group consisting of b1522-protein in a non-human organism or a part thereof, preferably a microorganism, a plant cell, a plant or a part thereof, as compared to a corresponding non-transformed wild type non-human organism or a part thereof; and
[94391] (b) growing the non-human organism or a part thereof under conditions which permit the production of lignoceric acid or a composition comprising lignoceric acid in said non-human organism or in the culture medium surrounding said non-human organism.

[94392] Accordingly, the present invention relates to a process for the production of cerotic acid, which comprises
[94393] (a) increasing or generating one or more activities selected from the group consisting of acid shock protein in a non-human organism or a part thereof, preferably a microorganism, a plant cell, a plant or a part thereof, as compared to a corresponding non-transformed wild type non-human organism or a part thereof; and
[94394] (b) growing the non-human organism or a part thereof under conditions which permit the production of cerotic acid or a composition comprising cerotic acid in said non-human organism or in the culture medium surrounding said non-human organism.

[94395] Accordingly, the present invention relates to a process for the production of lignoceric acid, which comprises
[94396] (a) increasing or generating one or more activities selected from the group consisting of acid shock protein in a non-human organism or a part thereof, preferably a microorganism, a plant cell, a plant or a part thereof, as compared to a corresponding non-transformed wild type non-human organism or a part thereof; and
[94397] (b) growing the non-human organism or a part thereof under conditions which permit the production of lignoceric acid or a composition comprising lignoceric acid in said non-human organism or in the culture medium surrounding said non-human organism.

[94398] Accordingly, the present invention relates to a process for the production of lignoceric acid, which comprises
[94399] (a) increasing or generating one or more activities selected from the group consisting of O-antigen chain length determinant in a non-human organism or a part thereof, preferably a microorganism, a plant cell, a plant or a part thereof, as compared to a corresponding non-transformed wild type non-human organism or a part thereof; and
[94400] (b) growing the non-human organism or a part thereof under conditions which permit the production of lignoceric acid or a composition comprising lignoceric acid in said non-human organism or in the culture medium surrounding said non-human organism.

[94401] Accordingly, the present invention relates to a process for the production of lignoceric acid, which comprises
[94402] (a) increasing or generating one or more activities selected from the group consisting of NADH dehydrogenase subunit N in a non-human organism or a part thereof, preferably a microorganism, a plant cell, a plant or a part thereof, as compared to a corresponding non-transformed wild type non-human organism or a part thereof; and
[94403] (b) growing the non-human organism or a part thereof under conditions which permit the production of lignoceric acid or a composition comprising lignoceric acid in said non-human organism or in the culture medium surrounding said non-human organism.

[94404] Accordingly, the present invention relates to a process for the production of lignoceric acid, which comprises
[94405] (a) increasing or generating one or more activities selected from the group consisting of 2,3-dihydroxy-2,3-dihydrophenylpropionatedehydrogenase in a non-human organism or a part thereof, preferably a microorganism, a plant cell, a plant or a part thereof, as compared to a corresponding non-transformed wild type non-human organism or a part thereof; and
[94406] (b) growing the non-human organism or a part thereof under conditions which permit the production of lignoceric acid or a composition comprising lignoceric acid in said non-human organism or in the culture medium surrounding said non-human organism.

[94407] Accordingly, the present invention relates to a process for the production of lignoceric acid, which comprises
[94408] (a) increasing or generating one or more activities selected from the group consisting of b3083-protein in a non-human organism or a part thereof, preferably a microorganism, a plant cell, a plant or a part thereof, as compared to a corresponding non-transformed wild type non-human organism or a part thereof; and
[94409] (b) growing the non-human organism or a part thereof under conditions which permit the production of lignoceric acid or a composition comprising lignoceric acid in said non-human organism or in the culture medium surrounding said non-human organism.

[94410] Accordingly, the present invention relates to a process for the production of lignoceric acid, which comprises
[94411] (a) increasing or generating one or more activities selected from the group consisting of b3812-protein in a non-human organism or a part thereof, preferably a microorganism, a plant cell, a plant or a part thereof, as compared to a corresponding non-transformed wild type non-human organism or a part thereof; and
[94412] (b) growing the non-human organism or a part thereof under conditions which permit the production of lignoceric acid or a composition comprising lignoceric acid in said non-human organism or in the culture medium surrounding said non-human organism.

[94413] Accordingly, the present invention relates to a process for the production of lignoceric acid, which comprises
[94414] (a) increasing or generating one or more activities selected from the group consisting of b4029-protein in a non-human organism or a part thereof, preferably a microorganism, a plant cell, a plant or a part thereof, as compared to a corresponding non-transformed wild type non-human organism or a part thereof; and
[94415] (b) growing the non-human organism or a part thereof under conditions which permit the production of lignoceric acid or a composition comprising lignoceric acid in said non-human organism or in the culture medium surrounding said non-human organism.

[94416] Accordingly, the present invention relates to a process for the production of lignoceric acid, which comprises
[94417] (a) increasing or generating one or more activities selected from the group consisting of acetyltransferase in a non-human organism or a part thereof, preferably a microorganism, a plant cell, a plant or a part thereof, as compared to a corresponding non-transformed wild type non-human organism or a part thereof; and
[94418] (b) growing the non-human organism or a part thereof under conditions which permit the production of lignoceric acid or a composition comprising lignoceric acid in said non-human organism or in the culture medium surrounding said non-human organism.

[94419] Accordingly, the present invention relates to a process for the production of lignoceric acid, which comprises
[94420] (a) increasing or generating one or more activities selected from the group consisting of glutaredoxin in a non-human organism or a part thereof, preferably a microorganism, a plant cell, a plant or a part thereof, as compared to a corresponding non-transformed wild type non-human organism or a part thereof; and
[94421] (b) growing the non-human organism or a part thereof under conditions which permit the production of lignoceric acid or a composition comprising lignoceric acid in said non-human organism or in the culture medium surrounding said non-human organism.

[94422] Accordingly, the present invention relates to a process for the production of lignoceric acid, which comprises
[94423] (a) increasing or generating one or more activities selected from the group consisting of cyclin D in a non-human organism or a part thereof, preferably a microorganism, a plant cell, a plant or a part thereof, as compared to a corresponding non-transformed wild type non-human organism or a part thereof; and
[94424] (b) growing the non-human organism or a part thereof under conditions which permit the production of lignoceric acid or a composition comprising lignoceric acid in said non-human organism or in the culture medium surrounding said non-human organism.

[94425] Accordingly, the present invention relates to a process for the production of lignoceric acid, which comprises
[94426] (a) increasing or generating one or more activities selected from the group consisting of sll0064-protein in a non-human organism or a part thereof, preferably a microorganism, a plant cell, a plant or a part thereof, as compared to a corresponding non-transformed wild type non-human organism or a part thereof; and
[94427] (b) growing the non-human organism or a part thereof under conditions which permit the production of lignoceric acid or a composition comprising lignoceric acid in said non-human organism or in the culture medium surrounding said non-human organism.

[94428] Accordingly, the present invention relates to a process for the production of lignoceric acid, which comprises
[94429] (a) increasing or generating one or more activities selected from the group consisting of agmatinase in a non-human organism or a part thereof, preferably a microorganism, a plant cell, a plant or a part thereof, as compared to a corresponding non-transformed wild type non-human organism or a part thereof; and
[94430] (b) growing the non-human organism or a part thereof under conditions which permit the production of lignoceric acid or a composition comprising lignoceric acid in said non-human organism or in the culture medium surrounding said non-human organism.

[94431] Accordingly, the present invention relates to a process for the production of lignoceric acid, which comprises
[94432] (a) increasing or generating one or more activities selected from the group consisting of uroporphyrin-III C-methyltransferase in a non-human organism or a part thereof, preferably a microorganism, a plant cell, a plant or a part thereof, as compared to a corresponding non-transformed wild type non-human organism or a part thereof; and
[94433] (b) growing the non-human organism or a part thereof under conditions which permit the production of lignoceric acid or a composition comprising lignoceric acid in said non-human organism or in the culture medium surrounding said non-human organism.

[94434] Accordingly, the present invention relates to a process for the production of lignoceric acid, which comprises
[94435] (a) increasing or generating one or more activities selected from the group consisting of binding-protein-dependent transport systems inner membrane component in a non-human organism or a part thereof, preferably a microorganism, a plant cell, a plant or a part thereof, as compared to a corresponding non-transformed wild type non-human organism or a part thereof; and
[94436] (b) growing the non-human organism or a part thereof under conditions which permit the production of lignoceric acid or a composition comprising lignoceric acid in said non-human organism or in the culture medium surrounding said non-human organism.

[94437] Accordingly, the present invention relates to a process for the production of lignoceric acid, which comprises
[94438] (a) increasing or generating one or more activities selected from the group consisting of malate dehydrogenase in a non-human organism or a part thereof, preferably a microorganism, a plant cell, a plant or a part thereof, as compared to a corresponding non-transformed wild type non-human organism or a part thereof; and
[94439] (b) growing the non-human organism or a part thereof under conditions which permit the production of lignoceric acid or a composition comprising lignoceric acid in said non-human organism or in the culture medium surrounding said non-human organism.

[94440] Accordingly, the present invention relates to a process for the production of lignoceric acid, which comprises
[94441] (a) increasing or generating one or more activities selected from the group consisting of ABC metal ion transporter substrate-binding protein in a non-human organism or a part thereof, preferably a microorganism, a plant cell, a plant or a part thereof, as compared to a corresponding non-transformed wild type non-human organism or a part thereof; and
[94442] (b) growing the non-human organism or a part thereof under conditions which permit the production of lignoceric acid or a composition comprising lignoceric acid in said non-human organism or in the culture medium surrounding said non-human organism.

[94443] Accordingly, the present invention relates to a process for the production of lignoceric acid, which comprises
[94444] (a) increasing or generating one or more activities selected from the group consisting of acyl transferase in a non-human organism or a part thereof, preferably a microorganism, a plant cell, a plant or a part thereof, as compared to a corresponding non-transformed wild type non-human organism or a part thereof; and
[94445] (b) growing the non-human organism or a part thereof under conditions which permit the production of lignoceric acid or a composition comprising lignoceric acid in said non-human organism or in the culture medium surrounding said non-human organism.

[94446] Accordingly, the present invention relates to a process for the production of lignoceric acid, which comprises
[94447] (a) increasing or generating one or more activities selected from the group consisting of slr0383-protein in a non-human organism or a part thereof, preferably a microorganism, a plant cell, a plant or a part thereof, as compared to a corresponding non-transformed wild type non-human organism or a part thereof; and
[94448] (b) growing the non-human organism or a part thereof under conditions which permit the production of lignoceric acid or a composition comprising lignoceric acid in said non-human organism or in the culture medium surrounding said non-human organism.

[94449] Accordingly, the present invention relates to a process for the production of lignoceric acid, which comprises
[94450] (a) increasing or generating one or more activities selected from the group consisting of geranylgeranyl pyrophosphate synthase in a non-human organism or a part thereof, preferably a microorganism, a plant cell, a plant or a part thereof, as compared to a corresponding non-transformed wild type non-human organism or a part thereof; and
[94451] (b) growing the non-human organism or a part thereof under conditions which permit the production of lignoceric acid or a composition comprising lignoceric acid in said non-human organism or in the culture medium surrounding said non-human organism.

[94452] Accordingly, the present invention relates to a process for the production of lignoceric acid, which comprises
[94453] (a) increasing or generating one or more activities selected from the group consisting of tryptophan synthase alpha chain in a non-human organism or a part thereof, preferably a microorganism, a plant cell, a plant or a part thereof, as compared to a corresponding non-transformed wild type non-human organism or a part thereof; and
[94454] (b) growing the non-human organism or a part thereof under conditions which permit the production of lignoceric acid or a composition comprising lignoceric acid in said non-human organism or in the culture medium surrounding said non-human organism.

[94455] Accordingly, the present invention relates to a process for the production of lignoceric acid, which comprises
[94456] (a) increasing or generating one or more activities selected from the group consisting of rubredoxin in a non-human organism or a part thereof, preferably a microorganism, a plant cell, a plant or a part thereof, as compared to a corresponding non-transformed wild type non-human organism or a part thereof; and
[94457] (b) growing the non-human organism or a part thereof under conditions which permit the production of lignoceric acid or a composition comprising lignoceric acid in said non-human organism or in the culture medium surrounding said non-human organism.

[94458] Accordingly, the present invention relates to a process for the production of lignoceric acid, which comprises
[94459] (a) increasing or generating one or more activities selected from the group consisting of Sec-independent protein translocase subunit in a non-human organism or a part thereof, preferably a microorganism, a plant cell, a plant or a part thereof, as compared to a corresponding non-transformed wild type non-human organism or a part thereof; and
[94460] (b) growing the non-human organism or a part thereof under conditions which permit the production of lignoceric acid or a composition comprising lignoceric acid in said non-human organism or in the culture medium surrounding said non-human organism.

[94461] Accordingly, the present invention relates to a process for the production of lignoceric acid, which comprises
[94462] (a) increasing or generating one or more activities selected from the group consisting of TTC0768-protein in a non-human organism or a part thereof, preferably a microorganism, a plant cell, a plant or a part thereof, as compared to a corresponding non-transformed wild type non-human organism or a part thereof; and
[94463] (b) growing the non-human organism or a part thereof under conditions which permit the production of lignoceric acid or a composition comprising lignoceric acid in said non-human organism or in the culture medium surrounding said non-human organism.

[94464] Accordingly, the present invention relates to a process for the production of lignoceric acid, which comprises
[94465] (a) increasing or generating one or more activities selected from the group consisting of TTC1386-protein in a non-human organism or a part thereof, preferably a microorganism, a plant cell, a plant or a part thereof, as compared to a corresponding non-transformed wild type non-human organism or a part thereof; and
[94466] (b) growing the non-human organism or a part thereof under conditions which permit the production of lignoceric acid or a composition comprising lignoceric acid in said non-human organism or in the culture medium surrounding said non-human organism.

[94467] Accordingly, the present invention relates to a process for the production of lignoceric acid, which comprises
[94468] (a) increasing or generating one or more activities selected from the group consisting of acetyl-coenzyme A synthetase in a non-human organism or a part thereof, preferably a microorganism, a plant cell, a plant or a part thereof, as compared to a corresponding non-transformed wild type non-human organism or a part thereof; and
[94469] (b) growing the non-human organism or a part thereof under conditions which permit the production of lignoceric acid or a composition comprising lignoceric acid in said non-human organism or in the culture medium surrounding said non-human organism.

[94470] Accordingly, the present invention relates to a process for the production of lignoceric acid, which comprises
[94471] (a) increasing or generating one or more activities selected from the group consisting of peroxisome assembly protein in a non-human organism or a part thereof, preferably a microorganism, a plant cell, a plant or a part thereof, as compared to a corresponding non-transformed wild type non-human organism or a part thereof; and
[94472] (b) growing the non-human organism or a part thereof under conditions which permit the production of lignoceric acid or a composition comprising lignoceric acid in said non-human organism or in the culture medium surrounding said non-human organism.

[94473] Accordingly, the present invention relates to a process for the production of heneicosanoic acid, which comprises
[94474] (a) increasing or generating one or more activities selected from the group consisting of inositol-3-phosphate synthase in a non-human organism or a part thereof, preferably a microorganism, a plant cell, a plant or a part thereof, as compared to a corresponding non-transformed wild type non-human organism or a part thereof; and
[94475] (b) growing the non-human organism or a part thereof under conditions which permit the production of heneicosanoic acid or a composition comprising heneicosanoic acid in said non-human organism or in the culture medium surrounding said non-human organism.

[94476] Accordingly, the present invention relates to a process for the production of lignoceric acid, which comprises
[94477] (a) increasing or generating one or more activities selected from the group consisting of cystathionine gamma-synthase in a non-human organism or a part thereof, preferably a microorganism, a plant cell, a plant or a part thereof, as compared to a corresponding non-transformed wild type non-human organism or a part thereof; and
[94478] (b) growing the non-human organism or a part thereof under conditions which permit the production of lignoceric acid or a composition comprising lignoceric acid in said non-human organism or in the culture medium surrounding said non-human organism.

[94479] Accordingly, the present invention relates to a process for the production of lignoceric acid, which comprises
[94480] (a) increasing or generating one or more activities selected from the group consisting of potassium transport protein in a non-human organism or a part thereof, preferably a microorganism, a plant cell, a plant or a part thereof, as compared to a corresponding non-transformed wild type non-human organism or a part thereof; and
[94481] (b) growing the non-human organism or a part thereof under conditions which permit the production of lignoceric acid or a composition comprising lignoceric acid in said non-human organism or in the culture medium surrounding said non-human organism.

[94482] Accordingly, the present invention relates to a process for the production of lignoceric acid, which comprises
[94483] (a) increasing or generating one or more activities selected from the group consisting of ylr065c-protein in a non-human organism or a part thereof, preferably a microorganism, a plant cell, a plant or a part thereof, as compared to a corresponding non-transformed wild type non-human organism or a part thereof; and
[94484] (b) growing the non-human organism or a part thereof under conditions which permit the production of lignoceric acid or a composition comprising lignoceric acid in said non-human organism or in the culture medium surrounding said non-human organism.

[94485] Accordingly, the present invention relates to a process for the production of lignoceric acid, which comprises
[94486] (a) increasing or generating one or more activities selected from the group consisting of yml093w-protein in a non-human organism or a part thereof, preferably a microorganism, a plant cell, a plant or a part thereof, as compared to a corresponding non-transformed wild type non-human organism or a part thereof; and
[94487] (b) growing the non-human organism or a part thereof under conditions which permit the production of lignoceric acid or a composition comprising lignoceric acid in said non-human organism or in the culture medium surrounding said non-human organism.

[94488] Accordingly, the present invention relates to a process for the production of lignoceric acid, which comprises
[94489] (a) increasing or generating one or more activities selected from the group consisting of mitochondrial inner membrane protease subunit in a non-human organism or a part thereof, preferably a microorganism, a plant cell, a plant or a part thereof, as compared to a corresponding non-transformed wild type non-human organism or a part thereof; and
[94490] (b) growing the non-human organism or a part thereof under conditions which permit the production of lignoceric acid or a composition comprising lignoceric acid in said non-human organism or in the culture medium surrounding said non-human organism.

[94491] Accordingly, the present invention relates to a process for the production of lignoceric acid, which comprises
[94492] (a) increasing or generating one or more activities selected from the group consisting of mevalonate kinase in a non-human organism or a part thereof, preferably a microorganism, a plant cell, a plant or a part thereof, as compared to a corresponding non-transformed wild type non-human organism or a part thereof; and
[94493] (b) growing the non-human organism or a part thereof under conditions which permit the production of lignoceric acid or a composition comprising lignoceric acid in said non-human organism or in the culture medium surrounding said non-human organism.

[94494] Accordingly, the present invention relates to a process for the production of melissic acid which comprises
[94495] (a) increasing or generating one or more activities selected from the group consisting of yer152c-protein in a non-human organism or a part thereof, preferably a microorganism, a plant cell, a plant or a part thereof, as compared to a corresponding non-transformed wild type non-human organism or a part thereof; and
[94496] (b) growing the non-human organism or a part thereof under conditions which permit the production of melissic acid or a composition comprising melissic acid in said non-human organism or in the culture medium surrounding said non-human organism.

[94497] Accordingly, the present invention relates to a process for the production of montanic acid, which comprises
[94498] (a) increasing or generating one or more activities selected from the group consisting of yen 52c-protein in a non-human organism or a part thereof, preferably a microorganism, a plant cell, a plant or a part thereof, as compared to a corresponding non-transformed wild type non-human organism or a part thereof; and
[94499] (b) growing the non-human organism or a part thereof under conditions which permit the production of montanic acid or a composition comprising montanic acid in said non-human organism or in the culture medium surrounding said non-human organism.

[94500] Accordingly, the present invention relates to a process for the production of melissic acid which comprises
[94501] (a) increasing or generating one or more activities selected from the group consisting of b3644-protein in a non-human organism or a part thereof, preferably a microorganism, a plant cell, a plant or a part thereof, as compared to a corresponding non-transformed wild type non-human organism or a part thereof; and
[94502] (b) growing the non-human organism or a part thereof under conditions which permit the production of melissic acid or a composition comprising melissic acid in said non-human organism or in the culture medium surrounding said non-human organism.

[94503] Accordingly, the present invention relates to a process for the production of montanic acid, which comprises
[94504] (a) increasing or generating one or more activities selected from the group consisting of b3644-protein in a non-human organism or a part thereof, preferably a microorganism, a plant cell, a plant or a part thereof, as compared to a corresponding non-transformed wild type non-human organism or a part thereof; and
[94505] (b) growing the non-human organism or a part thereof under conditions which permit the production of montanic acid or a composition comprising montanic acid in said non-human organism or in the culture medium surrounding said non-human organism.

[94506] An embodiment of the present invention relates to a process for the production of cerotic acid, which comprises
[94507] (a1) increasing or generating the activity of a polypeptide comprising a polypeptide as depicted in a respective line in column 5 or 8 of Table II, application no. 18, or a homolog or a fragment thereof, a consensus sequence or at least one polypeptide motif as depicted in the respective line in column 8 of Table IV, application no. 18, whereby the respective line disclose in column 7 the fine chemical cerotic acid; or
[94508] (a2) increasing or generating the activity of an expression product of one or more nucleic acid molecule(s) comprising a polynucleotide as depicted in the respective line in column 5 or 8 of Table I, application no. 18, preferably the coding region thereof, or a homolog or a fragment thereof, whereby the respective line disclose in column 7 the fine chemical cerotic acid; or
[94509] (a3) increasing or generating the activity of a functional equivalent of (a1) or (a2);
[94510] in a non-human organism or a part thereof; preferably a microorganism, a plant cell, a plant or a part thereof, as compared to a corresponding non-transformed wild type non-human organism or a part thereof; and
[94511] (b) growing the non-human organism under conditions which permit the production of cerotic acid or a composition comprising cerotic acid in said non-human organism or in the culture medium surrounding said non-human organism.

[94512] An embodiment of the present invention relates to a process for the production of heneicosanoic acid, which comprises
[94513] (a1) increasing or generating the activity of a polypeptide comprising a polypeptide as depicted in a respective line in column 5 or 8 of Table II, application no. 18, or a homolog or a fragment thereof, a consensus sequence or at least one polypeptide motif as depicted in the respective line in column 8 of Table IV, application no. 18, whereby the respective line disclose in column 7 the fine chemical heneicosanoic acid; or
[94514] (a2) increasing or generating the activity of an expression product of one or more nucleic acid molecule(s) comprising a polynucleotide as depicted in the respective line in column 5 or 8 of Table I, application no. 18, preferably the coding region thereof, or a homolog or a fragment thereof, whereby the respective line disclose in column 7 the fine chemical heneicosanoic acid; or
[94515] (a3) increasing or generating the activity of a functional equivalent of (a1) or (a2);
[94516] in a non-human organism or a part thereof; preferably a microorganism, a plant cell, a plant or a part thereof, as compared to a corresponding non-transformed wild type non-human organism or a part thereof; and
[94517] (b) growing the non-human organism under conditions which permit the production of heneicosanoic acid or a composition comprising heneicosanoic acid in said non-human organism or in the culture medium surrounding said non-human organism.

[94518] An embodiment of the present invention relates to a process for the production of lignoceric acid, which comprises
[94519] (a1) increasing or generating the activity of a polypeptide comprising a polypeptide as depicted in a respective line in column 5 or 8 of Table II, application no. 18, or a homolog or a fragment thereof, a consensus sequence or at least one polypeptide motif as depicted in the respective line in column 8 of Table IV, application no. 18, whereby the respective line disclose in column 7 the fine chemical lignoceric acid; or
[94520] (a2) increasing or generating the activity of an expression product of one or more nucleic acid molecule(s) comprising a polynucleotide as depicted in the respective line in column 5 or 8 of Table I, application no. 18, preferably the coding region thereof, or a homolog or a fragment thereof, whereby the respective line disclose in column 7 the fine chemical lignoceric acid; or
[94521] (a3) increasing or generating the activity of a functional equivalent of (a1) or (a2);
[94522] in a non-human organism or a part thereof; preferably a microorganism, a plant cell, a plant or a part thereof, as compared to a corresponding non-transformed wild type non-human organism or a part thereof; and
[94523] (b) growing the non-human organism under conditions which permit the production of lignoceric acid or a composition comprising lignoceric acid in said non-human organism or in the culture medium surrounding said non-human organism.

[94524] An embodiment of the present invention relates to a process for the production of melissic acid which comprises
[94525] (a1) increasing or generating the activity of a polypeptide comprising a polypeptide as depicted in a respective line in column 5 or 8 of Table II, application no. 18, or a homolog or a fragment thereof, a consensus sequence or at least one polypeptide motif as depicted in the respective line in column 8 of Table IV, application no. 18, whereby the respective line disclose in column 7 the fine chemical melissic acid; or
[94526] (a2) increasing or generating the activity of an expression product of one or more nucleic acid molecule(s) comprising a polynucleotide as depicted in the respective line in column 5 or 8 of Table I, application no. 18, preferably the coding region thereof, or a homolog or a fragment thereof, whereby the respective line disclose in column 7 the fine chemical melissic acid; or
[94527] (a3) increasing or generating the activity of a functional equivalent of (a1) or (a2);
[94528] in a non-human organism or a part thereof; preferably a microorganism, a plant cell, a plant or a part thereof, as compared to a corresponding non-transformed wild type non-human organism or a part thereof; and
[94529] (b) growing the non-human organism under conditions which permit the production of melissic acid or a composition comprising melissic acid in said non-human organism or in the culture medium surrounding said non-human organism.

[94530] An embodiment of the present invention relates to a process for the production of montanic acid, which comprises
[94531] (a1) increasing or generating the activity of a polypeptide comprising a polypeptide as depicted in a respective line in column 5 or 8 of Table II, application no. 18, or a homolog or a fragment thereof, a consensus sequence or at least one polypeptide motif as depicted in the respective line in column 8 of Table IV, application no. 18, whereby the respective line disclose in column 7 the fine chemical montanic acid; or
[94532] (a2) increasing or generating the activity of an expression product of one or more nucleic acid molecule(s) comprising a polynucleotide as depicted in the respective line in column 5 or 8 of Table I, application no. 18, preferably the coding region thereof, or a homolog or a fragment thereof, whereby the respective line disclose in column 7 the fine chemical montanic acid; or
[94533] (a3) increasing or generating the activity of a functional equivalent of (a1) or (a2);
[94534] in a non-human organism or a part thereof; preferably a microorganism, a plant cell, a plant or a part thereof, as compared to a corresponding non-transformed wild type non-human organism or a part thereof; and
[94535] (b) growing the non-human organism under conditions which permit the production of montanic acid or a composition comprising montanic acid in said non-human organism or in the culture medium surrounding said non-human organism.

[94536] Accordingly, the increase or generation of one or more said activities is for example conferred by one or more expression products of said nucleic acid molecule, e.g. proteins. Accordingly, in the present invention described above, the increase or generation of one or more said activities is for example conferred by one or more protein(s) each comprising a polypeptide selected from the group as depicted in Table II, application no. 18, column 5 and 8, or a homolog or a fragment thereof.

[94537] The process of the invention comprises in one embodiment the following steps:
[94538] (i) increasing or generating of the expression of; and/or
[94539] (ii) increasing or generating the expression of an expression product of; and/or
[94540] (iii) increasing or generating one or more activities of an expression product encoded by; at least one nucleic acid molecule (in the following “Fine Chemical Related Protein (FCRP)”-encoding gene or “FCRP”-gene) comprising a nucleic acid molecule selected from the group consisting of:
[94541] (a) a nucleic acid molecule encoding the polypeptide shown in column 5 or 8 of Table II, preferably Table II B, application no. 18, or a homolog or a fragment thereof;
[94542] (b) a nucleic acid molecule shown in column 5 or 8 of Table I, preferably Table I B, application no. 18, or a homolog or a fragment thereof (preferably the coding region thereof);
[94543] (c) a nucleic acid molecule, which, as a result of the degeneracy of the genetic code, can be derived from a polypeptide sequence depicted in column 5 or 8 of Table II, preferably Table II B, application no. 18;
[94544] (d) a nucleic acid molecule having at least 30%, in particular at least 50%, 60%, 70%, 80%, 85%, 90%, 95%, 97%, 98%, 99% or 99.5% identity with the nucleic acid molecule sequence of a polynucleotide comprising the nucleic acid molecule shown in column 5 or 8 of Table I, preferably Table I B, application no. 18, or the coding region thereof;
[94545] (e) a nucleic acid molecule encoding a polypeptide having at least 30%, in particular 50%, 60%, 70%, 80%, 85%, 90%, 95%, 97%, 98%, 99% or 99.5% identity with the amino acid sequence of the polypeptide encoded by the nucleic acid molecule of (a), (b), (c) or (d),
[94546] (f) a nucleic acid molecule which hybridizes with a nucleic acid molecule of (a), (b), (c), (d) or (e) under stringent hybridization conditions;
[94547] (g) a nucleic acid molecule encoding a polypeptide which can be isolated with the aid of monoclonal or polyclonal antibodies made against a polypeptide encoded by one of the nucleic acid molecules of (a), (b), (c), (d), (e) or (f);
[94548] (h) a nucleic acid molecule encoding a polypeptide comprising the consensus sequence or one or more polypeptide motifs as shown in column 8 of Table IV, application no. 18;
[94549] (i) a nucleic acid molecule encoding a polypeptide having the activity represented by a respective protein as depicted in column 5 of Table II, application no. 18;
[94550] (j) a nucleic acid molecule which comprises a polynucleotide, which is obtained by amplifying a cDNA library or a genomic library using the primers as depicted in column 8 of Table III, application no. 18; and
[94551] (k) a nucleic acid molecule which is obtainable by screening a suitable nucleic acid library, especially a cDNA library and/or a genomic library, under stringent hybridization conditions with a probe comprising a complementary sequence of a nucleic acid molecule of (a), (b), (c), (d), (e), (f), (g), (h), (i) or (j) or with a fragment thereof, having at least 15 nt, preferably 20 nt, 30 nt, 50 nt, 100 nt, 200 nt, 500 nt, 1000 nt, 1500 nt, 2000 nt or 3000 nt of a nucleic acid molecule complementary to a nucleic acid molecule sequence characterized in (a), (b), (c), (d), (e), (f), (g), (h), (i) or (j);
[94552] or a nucleic acid molecule comprising a sequence which is complementary thereto.
   (All the references to Tables I to IV are references to the corresponding lines of Tables I to IV.)

[94553] In a preferred embodiment thereof said nucleic acid molecule encodes a polypeptide which has the activity of the polypeptide represented by a protein comprising a polypeptide as depicted in the corresponding hit in column 5 of Table II, application no. 18.

[94554] In another preferred embodiment thereof said nucleic acid molecule confers a generation or an increase of the respective fine chemical in a non-human organism or a part thereof as compared to a corresponding wild-type non-human organism or part thereof.

[94555] In another preferred embodiment thereof said nucleic acid molecule encodes a polypeptide which has the activity of the polypeptide represented by a protein as depicted in the corresponding hit in column 5 of Table II, application no. 18, and confers a generation or an increase of the respective fine chemical in a non-human organism or a part thereof as compared to a corresponding wild-type non-human organism or part thereof.

[94556] Accordingly, the genes of the present invention or used in accordance with the present invention, which respectively encode a protein having an activity of 2,3-dihydroxy-2,3-dihydrophenylpropionatedehydrogenase, ABC metal ion transporter substrate-binding protein, acetyl-coenzyme A synthetase, acetyltransferase, acid shock protein, acyl transferase, agmatinase, aminotransferase, ATP-binding component of a transport system, b1522-protein, b3083-protein, b3644-protein, b3812-protein, b4029-protein, binding-protein-dependent transport systems inner membrane component, calcium-dependent protein kinase, cardiolipin synthase, chaperone protein CIpB, cyclin D, cystathionine gamma-synthase, eukaryotic translation initiation factor 5, geranylgeranyl pyrophosphate synthase, gibberellin 20-oxidase, glutamate-ammonia-ligase, glutaredoxin, glycosyl transferase, heat shock transcription factor, hydrolase, inositol-3-phosphate synthase, isochorismate synthase, leucyl/phenylalanyl-tRNA-protein transferase, major facilitator superfamily transporter protein, malate dehydrogenase, mevalonate kinase, mitochondrial inner membrane protease subunit, monodehydroascorbate reductase, multidrug resistance protein, NADH dehydrogenase subunit N, O-antigen chain length determinant, oxidoreductase, peroxisome assembly protein, potassium transport protein, protein kinase, purine nucleoside phosphorylase, rubredoxin, Sec-independent protein translocase subunit, serine protease, sll0064-protein, slr0383-protein, sodium/proton antiporter, thioredoxin family protein, threonine synthase, tryptophan synthase alpha chain, TTC0768-protein, TTC1386-protein, uroporphyrin-III C-methyltransferase, yer152c-protein, ylr065c-protein, Yml093w-protein, or zinc finger protein, which respectively encode a protein comprising a polypeptide encoded by a nucleic acid sequence as shown in Table I, application no. 18, column 5 or 8, (preferably the coding region thereof), or a homolog or a fragment thereof, which respectively encode a protein comprising a polypeptide as depicted in Table II, application no. 18, column 5 or 8, or a homolg or a fragment thereof, and/or which respectively can be amplified with the primer set shown in Table III, application no. 18, column 8, are also referred to as “FCRP genes”.

[94557] Proteins or polypeptides encoded by “FCRP-genes” are referred to as “Fine Chemical Related Proteins” or “FCRP”. For the purposes of the description of the present invention, the respective protein having an activity of 2,3-dihydroxy-2,3-dihydrophenylpropionatedehydrogenase, ABC metal ion transporter substrate-binding protein, acetyl-coenzyme A synthetase, acetyltransferase, acid shock protein, acyl transferase, agmatinase, aminotransferase, ATP-binding component of a transport system, b1522-protein, b3083-protein, b3644-protein, b3812-protein, b4029-protein, binding-protein-dependent transport systems inner membrane component, calcium-dependent protein kinase, cardiolipin synthase, chaperone protein CIpB, cyclin D, cystathionine gamma-synthase, eukaryotic translation initiation factor 5, geranylgeranyl pyrophosphate synthase, gibberellin 20-oxidase, glutamate-ammonia-ligase, glutaredoxin, glycosyl transferase, heat shock transcription factor, hydrolase, inositol-3-phosphate synthase, isochorismate synthase, leucyl/phenylalanyl-tRNA-protein transferase, major facilitator superfamily transporter protein, malate dehydrogenase, mevalonate kinase, mitochondrial inner membrane protease subunit, monodehydroascorbate reductase, multidrug resistance protein, NADH dehydrogenase subunit N, O-antigen chain length determinant, oxidoreductase, peroxisome assembly protein, potassium transport protein, protein kinase, purine nucleoside phosphorylase, rubredoxin, Sec-independent protein translocase subunit, serine protease, sll0064-protein, slr0383-protein, sodium/proton antiporter, thioredoxin family protein, threonine synthase, tryptophan synthase alpha chain, TTC0768-protein, TTC1386-protein, uroporphyrin-III C-methyltransferase, yer152c-protein, ylr065c-protein, yml093w-protein, or zinc finger protein, the respective protein comprising a polypeptide encoded by one or more respective nucleic acid sequences as shown in Table I, application no. 18, column 5 or 8, (preferably the coding region thereof), or a homolog or fragment thereof, the respective protein comprising a respective polypeptide as depicted in Table II, application no. 18, column 5 or 8, or a homolog or fragment thereof, the respective protein comprising a sequence corresponding to the consensus sequence as shown in Table IV, application no. 18, column 8, and/or the respective protein comprising at least one polypeptide motif as shown in Table IV, application no. 18, column 8 is also referred to as Fine Chemical Related Protein” or “FCRP”.

[94558] Thus, in one embodiment, the present invention provides a process of the production of cerotic acid, heneicosanoic acid, lignoceric acid, melissic acid and/or montanic acid, by increasing or generating one or more activities, especially selected from the group consisting of 2,3-dihydroxy-2,3-dihydrophenylpropionatedehydrogenase, ABC metal ion transporter substrate-binding protein, acetyl-coenzyme A synthetase, acetyltransferase, acid shock protein, acyl transferase, agmatinase, aminotransferase, ATP-binding component of a transport system, b1522-protein, b3083-protein, b3644-protein, b3812-protein, b4029-protein, binding-protein dependent transport systems inner membrane component, calcium-dependent protein kinase, cardiolipin synthase, chaperone protein CIpB, cyclin D, cystathionine gamma-synthase, eukaryotic translation initiation factor 5, geranylgeranyl pyrophosphate synthase, gibberellin 20-oxidase, glutamate-ammonia-ligase, glutaredoxin, glycosyl transferase, heat shock transcription factor, hydrolase, inositol-3-phosphate synthase, isochorismate synthase, leucyl/phenylalanyl-tRNA-protein transferase, major facilitator superfamily transporter protein, malate dehydrogenase, mevalonate kinase, mitochondrial inner membrane protease subunit, monodehydroascorbate reductase, multidrug resistance protein, NADH dehydrogenase subunit N, O-antigen chain length determinant, oxidoreductase, peroxisome assembly protein, potassium transport protein, protein kinase, purine nucleoside phosphorylase, rubredoxin, Sec-independent protein translocase subunit, serine protease, sll0064-protein, slr0383-protein, sodium/proton antiporter, thioredoxin family protein, threonine synthase, tryptophan synthase alpha chain, TTC0768-protein, TTC1386-protein, uroporphyrin-III C-methyltransferase, yer152c-protein, ylr065c-protein, yml093w-protein, and zinc finger protein, which is conferred by one or more FCRPs or the gene product of one or more FCRP-genes, for example by the gene product of a nucleic acid sequences comprising a polynucleotide selected from the group as shown in Table I, application no. 18, column 5 or 8, (preferably by the coding region thereof), or a homolog or a fragment thereof, e.g. or by one or more proteins each comprising a polypeptide encoded by one or more nucleic acid sequences selected from the group as shown in Table I, application no. 18, column 5 or 8, (preferably by the coding region thereof), or a homolog or a fragment thereof, or by one or more protein(s) each comprising a polypeptide selected from the group as depicted in Table II, application no. 18, column 5 and 8, or a homolog thereof, or a protein comprising a sequence corresponding to the consensus sequence or comprising at least one polypeptide motif as shown in Table IV, application no. 18, column 8.

[94559] for the disclosure of this paragraph see [0025.1.7.7] above

[94560] In an embodiment, the process comprises increasing or generating the activity of one or more polypeptides having said activity, e.g. by generating or increasing the amount and/or specific activity in the cell or a compartment of a cell of one of more FCRP, especially selected from the group consisting of 2,3-dihydroxy-2,3-dihydrophenylpropionatedehydrogenase, ABC metal ion transporter substrate-binding protein, acetyl-coenzyme A synthetase, acetyltransferase, acid shock protein, acyl transferase, agmatinase, aminotransferase, ATP-binding component of a transport system, b1522-protein, b3083-protein, b3644-protein, b3812-protein, b4029-protein, binding-protein-dependent transport systems inner membrane component, calcium-dependent protein kinase, cardiolipin synthase, chaperone protein CIpB, cyclin D, cystathionine gamma-synthase, eukaryotic translation initiation factor 5, geranylgeranyl pyrophosphate synthase, gibberellin 20-oxidase, glutamate-ammonia-ligase, glutaredoxin, glycosyl transferase, heat shock transcription factor, hydrolase, inositol-3-phosphate synthase, isochorismate synthase, leucyl/phenylalanyl-tRNA-protein transferase, major facilitator superfamily transporter protein, malate dehydrogenase, mevalonate kinase, mitochondrial inner membrane protease subunit, monodehydroascorbate reductase, multidrug resistance protein, NADH dehydrogenase subunit N, O-antigen chain length determinant, oxidoreductase, peroxisome assembly protein, potassium transport protein, protein kinase, purine nucleoside phosphorylase, rubredoxin, Sec-independent protein translocase subunit, serine protease, sll0064-protein, slr0383-protein, sodium/proton antiporter, thioredoxin family protein, threonine synthase, tryptophan synthase alpha chain, TTC0768-protein, TTC1386-protein, uroporphyrin-III C-methyltransferase, yer152c-protein, ylr065c-protein, yml093w-protein, and zinc finger protein, for example of the respective polypeptide as depicted in Table II, application no. 18, column 5 and 8, or a homolog or a fragment thereof, or the respective polypeptide comprising a sequence corresponding to the consensus sequences as shown in Table IV, application no. 18, column 8, or the respective polypeptide comprising at least one polypeptide motif as depicted in Table IV, application no. 18, column 8.

[94561] A further embodiment of the present invention relates to a process for the production of lignoceric acid, which comprises
[94562] (a) increasing or generating the activity of a eukaryotic translation initiation factor 5 non-targeted in a non-human organism or a part thereof, preferably a microorganism, a plant cell, a plant or a part thereof, as compared to a corresponding non-transformed wild type non-human organism or a part thereof; and
[94563] (b) growing the non-human organism or a part thereof under conditions which permit the production of lignoceric acid or a composition comprising lignoceric acid in said non-human organism or in the culture medium surrounding said non-human organism.

[94564] A further embodiment of the present invention relates to a process for the production of lignoceric acid, which comprises
[94565] (a) increasing or generating the activity of a protein kinase non-targeted in a non-human organism or a part thereof, preferably a microorganism, a plant cell, a plant or a part thereof, as compared to a corresponding non-transformed wild type non-human organism or a part thereof; and
[94566] (b) growing the non-human organism or a part thereof under conditions which permit the production of lignoceric acid or a composition comprising lignoceric acid in said non-human organism or in the culture medium surrounding said non-human organism.

[94567] A further embodiment of the present invention relates to a process for the production of lignoceric acid, which comprises
[94568] (a) increasing or generating the activity of a thioredoxin family protein non-targeted in a non-human organism or a part thereof, preferably a microorganism, a plant cell, a plant or a part thereof, as compared to a corresponding non-transformed wild type non-human organism or a part thereof; and
[94569] (b) growing the non-human organism or a part thereof under conditions which permit the production of lignoceric acid or a composition comprising lignoceric acid in said non-human organism or in the culture medium surrounding said non-human organism.

[94570] A further embodiment of the present invention relates to a process for the production of lignoceric acid, which comprises
[94571] (a) increasing or generating the activity of a monodehydroascorbate reductase non-targeted in a non-human organism or a part thereof, preferably a microorganism, a plant cell, a plant or a part thereof, as compared to a corresponding non-transformed wild type non-human organism or a part thereof; and
[94572] (b) growing the non-human organism or a part thereof under conditions which permit the production of lignoceric acid or a composition comprising lignoceric acid in said non-human organism or in the culture medium surrounding said non-human organism.

[94573] A further embodiment of the present invention relates to a process for the production of lignoceric acid, which comprises
[94574] (a) increasing or generating the activity of a glycosyl transferase non-targeted in a non-human organism or a part thereof, preferably a microorganism, a plant cell, a plant or a part thereof, as compared to a corresponding non-transformed wild type non-human organism or a part thereof; and
[94575] (b) growing the non-human organism or a part thereof under conditions which permit the production of lignoceric acid or a composition comprising lignoceric acid in said non-human organism or in the culture medium surrounding said non-human organism.

[94576] A further embodiment of the present invention relates to a process for the production of lignoceric acid, which comprises
[94577] (a) increasing or generating the activity of a glutaredoxin non-targeted in a non-human organism or a part thereof, preferably a microorganism, a plant cell, a plant or a part thereof, as compared to a corresponding non-transformed wild type non-human organism or a part thereof; and
[94578] (b) growing the non-human organism or a part thereof under conditions which permit the production of lignoceric acid or a composition comprising lignoceric acid in said non-human organism or in the culture medium surrounding said non-human organism.

[94579] A further embodiment of the present invention relates to a process for the production of lignoceric acid, which comprises
[94580] (a) increasing or generating the activity of a heat shock transcription factor non-targeted in a non-human organism or a part thereof, preferably a microorganism, a plant cell, a plant or a part thereof, as compared to a corresponding non-transformed wild type non-human organism or a part thereof; and
[94581] (b) growing the non-human organism or a part thereof under conditions which permit the production of lignoceric acid or a composition comprising lignoceric acid in said non-human organism or in the culture medium surrounding said non-human organism.

[94582] A further embodiment of the present invention relates to a process for the production of lignoceric acid, which comprises
[94583] (a) increasing or generating the activity of a calcium-dependent protein kinase non-targeted in a non-human organism or a part thereof, preferably a microorganism, a plant cell, a plant or a part thereof, as compared to a corresponding non-transformed wild type non-human organism or a part thereof; and
[94584] (b) growing the non-human organism or a part thereof under conditions which permit the production of lignoceric acid or a composition comprising lignoceric acid in said non-human organism or in the culture medium surrounding said non-human organism.

[94585] A further embodiment of the present invention relates to a process for the production of lignoceric acid, which comprises
[94586] (a) increasing or generating the activity of a gibberellin 20-oxidase non-targeted in a non-human organism or a part thereof, preferably a microorganism, a plant cell, a plant or a part thereof, as compared to a corresponding non-transformed wild type non-human organism or a part thereof; and
[94587] (b) growing the non-human organism or a part thereof under conditions which permit the production of lignoceric acid or a composition comprising lignoceric acid in said non-human organism or in the culture medium surrounding said non-human organism.

[94588] A further embodiment of the present invention relates to a process for the production of lignoceric acid, which comprises
[94589] (a) increasing or generating the activity of a zinc finger protein non-targeted in a non-human organism or a part thereof, preferably a microorganism, a plant cell, a plant or a part thereof, as compared to a corresponding non-transformed wild type non-human organism or a part thereof; and
[94590] (b) growing the non-human organism or a part thereof under conditions which permit the production of lignoceric acid or a composition comprising lignoceric acid in said non-human organism or in the culture medium surrounding said non-human organism.

[94591] A further embodiment of the present invention relates to a process for the production of lignoceric acid, which comprises
[94592] (a) increasing or generating the activity of a aminotransferase non-targeted in a non-human organism or a part thereof, preferably a microorganism, a plant cell, a plant or a part thereof, as compared to a corresponding non-transformed wild type non-human organism or a part thereof; and
[94593] (b) growing the non-human organism or a part thereof under conditions which permit the production of lignoceric acid or a composition comprising lignoceric acid in said non-human organism or in the culture medium surrounding said non-human organism.

[94594] A further embodiment of the present invention relates to a process for the production of lignoceric acid, which comprises
[94595] (a) increasing or generating the activity of a hydrolase non-targeted in a non-human organism or a part thereof, preferably a microorganism, a plant cell, a plant or a part thereof, as compared to a corresponding non-transformed wild type non-human organism or a part thereof; and
[94596] (b) growing the non-human organism or a part thereof under conditions which permit the production of lignoceric acid or a composition comprising lignoceric acid in said non-human organism or in the culture medium surrounding said non-human organism.

[94597] A further embodiment of the present invention relates to a process for the production of lignoceric acid, which comprises
[94598] (a) increasing or generating the activity of a glutamate-ammonia-ligase non-targeted in a non-human organism or a part thereof, preferably a microorganism, a plant cell, a plant or a part thereof, as compared to a corresponding non-transformed wild type non-human organism or a part thereof; and
[94599] (b) growing the non-human organism or a part thereof under conditions which permit the production of lignoceric acid or a composition comprising lignoceric acid in said non-human organism or in the culture medium surrounding said non-human organism.

[94600] A further embodiment of the present invention relates to a process for the production of lignoceric acid, which comprises
[94601] (a) increasing or generating the activity of a oxidoreductase non-targeted in a non-human organism or a part thereof, preferably a microorganism, a plant cell, a plant or a part thereof, as compared to a corresponding non-transformed wild type non-human organism or a part thereof; and
[94602] (b) growing the non-human organism or a part thereof under conditions which permit the production of lignoceric acid or a composition comprising lignoceric acid in said non-human organism or in the culture medium surrounding said non-human organism.

[94603] A further embodiment of the present invention relates to a process for the production of lignoceric acid, which comprises
[94604] (a) increasing or generating the activity of a chaperone protein CIpB non-targeted in a non-human organism or a part thereof, preferably a microorganism, a plant cell, a plant or a part thereof, as compared to a corresponding non-transformed wild type non-human organism or a part thereof; and
[94605] (b) growing the non-human organism or a part thereof under conditions which permit the production of lignoceric acid or a composition comprising lignoceric acid in said non-human organism or in the culture medium surrounding said non-human organism.

[94606] A further embodiment of the present invention relates to a process for the production of lignoceric acid, which comprises
[94607] (a) increasing or generating the activity of a purine nucleoside phosphorylase non-targeted in a non-human organism or a part thereof, preferably a microorganism, a plant cell, a plant or a part thereof, as compared to a corresponding non-transformed wild type non-human organism or a part thereof; and
[94608] (b) growing the non-human organism or a part thereof under conditions which permit the production of lignoceric acid or a composition comprising lignoceric acid in said non-human organism or in the culture medium surrounding said non-human organism.

[94609] A further embodiment of the present invention relates to a process for the production of lignoceric acid, which comprises
[94610] (a) increasing or generating the activity of a threonine synthase non-targeted in a non-human organism or a part thereof, preferably a microorganism, a plant cell, a plant or a part thereof, as compared to a corresponding non-transformed wild type non-human organism or a part thereof; and
[94611] (b) growing the non-human organism or a part thereof under conditions which permit the production of lignoceric acid or a composition comprising lignoceric acid in said non-human organism or in the culture medium surrounding said non-human organism.

[94612] A further embodiment of the present invention relates to a process for the production of lignoceric acid, which comprises
[94613] (a) increasing or generating the activity of a serine protease non-targeted in a non-human organism or a part thereof, preferably a microorganism, a plant cell, a plant or a part thereof, as compared to a corresponding non-transformed wild type non-human organism or a part thereof; and
[94614] (b) growing the non-human organism or a part thereof under conditions which permit the production of lignoceric acid or a composition comprising lignoceric acid in said non-human organism or in the culture medium surrounding said non-human organism.

[94615] A further embodiment of the present invention relates to a process for the production of lignoceric acid, which comprises
[94616] (a) increasing or generating the activity of a ATP-binding component of a transport system non-targeted in a non-human organism or a part thereof, preferably a microorganism, a plant cell, a plant or a part thereof, as compared to a corresponding non-transformed wild type non-human organism or a part thereof; and
[94617] (b) growing the non-human organism or a part thereof under conditions which permit the production of lignoceric acid or a composition comprising lignoceric acid in said non-human organism or in the culture medium surrounding said non-human organism.

[94618] A further embodiment of the present invention relates to a process for the production of lignoceric acid, which comprises
[94619] (a) increasing or generating the activity of a isochorismate synthase non-targeted in a non-human organism or a part thereof, preferably a microorganism, a plant cell, a plant or a part thereof, as compared to a corresponding non-transformed wild type non-human organism or a part thereof; and
[94620] (b) growing the non-human organism or a part thereof under conditions which permit the production of lignoceric acid or a composition comprising lignoceric acid in said non-human organism or in the culture medium surrounding said non-human organism.

[94621] A further embodiment of the present invention relates to a process for the production of lignoceric acid, which comprises
[94622] (a) increasing or generating the activity of a leucyl/phenylalanyl-tRNA-protein transferase non-targeted in a non-human organism or a part thereof, preferably a microorganism, a plant cell, a plant or a part thereof, as compared to a corresponding non-transformed wild type non-human organism or a part thereof; and
[94623] (b) growing the non-human organism or a part thereof under conditions which permit the production of lignoceric acid or a composition comprising lignoceric acid in said non-human organism or in the culture medium surrounding said non-human organism.

[94624] A further embodiment of the present invention relates to a process for the production of lignoceric acid, which comprises
[94625] (a) increasing or generating the activity of a major facilitator superfamily transporter protein non-targeted in a non-human organism or a part thereof, preferably a microorganism, a plant cell, a plant or a part thereof, as compared to a corresponding non-transformed wild type non-human organism or a part thereof; and
[94626] (b) growing the non-human organism or a part thereof under conditions which permit the production of lignoceric acid or a composition comprising lignoceric acid in said non-human organism or in the culture medium surrounding said non-human organism.

[94627] A further embodiment of the present invention relates to a process for the production of cerotic acid, which comprises
[94628] (a) increasing or generating the activity of a multidrug resistance protein non-targeted in a non-human organism or a part thereof, preferably a microorganism, a plant cell, a plant or a part thereof, as compared to a corresponding non-transformed wild type non-human organism or a part thereof; and
[94629] (b) growing the non-human organism or a part thereof under conditions which permit the production of cerotic acid or a composition comprising cerotic acid in said non-human organism or in the culture medium surrounding said non-human organism.

[94630] A further embodiment of the present invention relates to a process for the production of lignoceric acid, which comprises
[94631] (a) increasing or generating the activity of a sodium/proton antiporter non-targeted in a non-human organism or a part thereof, preferably a microorganism, a plant cell, a plant or a part thereof, as compared to a corresponding non-transformed wild type non-human organism or a part thereof; and
[94632] (b) growing the non-human organism or a part thereof under conditions which permit the production of lignoceric acid or a composition comprising lignoceric acid in said non-human organism or in the culture medium surrounding said non-human organism.

[94633] A further embodiment of the present invention relates to a process for the production of lignoceric acid, which comprises
[94634] (a) increasing or generating the activity of a cardiolipin synthase non-targeted in a non-human organism or a part thereof, preferably a microorganism, a plant cell, a plant or a part thereof, as compared to a corresponding non-transformed wild type non-human organism or a part thereof; and
[94635] (b) growing the non-human organism or a part thereof under conditions which permit the production of lignoceric acid or a composition comprising lignoceric acid in said non-human organism or in the culture medium surrounding said non-human organism.

[94636] A further embodiment of the present invention relates to a process for the production of lignoceric acid, which comprises
[94637] (a) increasing or generating the activity of a b1522-protein non-targeted in a non-human organism or a part thereof, preferably a microorganism, a plant cell, a plant or a part thereof, as compared to a corresponding non-transformed wild type non-human organism or a part thereof; and
[94638] (b) growing the non-human organism or a part thereof under conditions which permit the production of lignoceric acid or a composition comprising lignoceric acid in said non-human organism or in the culture medium surrounding said non-human organism.

[94639] A further embodiment of the present invention relates to a process for the production of cerotic acid, which comprises
[94640] (a) increasing or generating the activity of a acid shock protein non-targeted in a non-human organism or a part thereof, preferably a microorganism, a plant cell, a plant or a part thereof, as compared to a corresponding non-transformed wild type non-human organism or a part thereof; and
[94641] (b) growing the non-human organism or a part thereof under conditions which permit the production of cerotic acid or a composition comprising cerotic acid in said non-human organism or in the culture medium surrounding said non-human organism.

[94642] A further embodiment of the present invention relates to a process for the production of lignoceric acid, which comprises
[94643] (a) increasing or generating the activity of a acid shock protein non-targeted in a non-human organism or a part thereof, preferably a microorganism, a plant cell, a plant or a part thereof, as compared to a corresponding non-transformed wild type non-human organism or a part thereof; and
[94644] (b) growing the non-human organism or a part thereof under conditions which permit the production of lignoceric acid or a composition comprising lignoceric acid in said non-human organism or in the culture medium surrounding said non-human organism.

[94645] A further embodiment of the present invention relates to a process for the production of lignoceric acid, which comprises
[94646] (a) increasing or generating the activity of a O-antigen chain length determinant non-targeted in a non-human organism or a part thereof, preferably a microorganism, a plant cell, a plant or a part thereof, as compared to a corresponding non-transformed wild type non-human organism or a part thereof; and
[94647] (b) growing the non-human organism or a part thereof under conditions which permit the production of lignoceric acid or a composition comprising lignoceric acid in said non-human organism or in the culture medium surrounding said non-human organism.

[94648] A further embodiment of the present invention relates to a process for the production of lignoceric acid, which comprises
[94649] (a) increasing or generating the activity of a NADH dehydrogenase subunit N non-targeted in a non-human organism or a part thereof, preferably a microorganism, a plant cell, a plant or a part thereof, as compared to a corresponding non-transformed wild type non-human organism or a part thereof; and
[94650] (b) growing the non-human organism or a part thereof under conditions which permit the production of lignoceric acid or a composition comprising lignoceric acid in said non-human organism or in the culture medium surrounding said non-human organism.

[94651] A further embodiment of the present invention relates to a process for the production of lignoceric acid, which comprises
[94652] (a) increasing or generating the activity of a 2,3-dihydroxy-2,3-dihydrophenylpropionatedehydrogenase non-targeted in a non-human organism or a part thereof, preferably a microorganism, a plant cell, a plant or a part thereof, as compared to a corresponding non-transformed wild type non-human organism or a part thereof; and
[94653] (b) growing the non-human organism or a part thereof under conditions which permit the production of lignoceric acid or a composition comprising lignoceric acid in said non-human organism or in the culture medium surrounding said non-human organism.

[94654] A further embodiment of the present invention relates to a process for the production of lignoceric acid, which comprises
[94655] (a) increasing or generating the activity of a b3083-protein non-targeted in a non-human organism or a part thereof, preferably a microorganism, a plant cell, a plant or a part thereof, as compared to a corresponding non-transformed wild type non-human organism or a part thereof; and
[94656] (b) growing the non-human organism or a part thereof under conditions which permit the production of lignoceric acid or a composition comprising lignoceric acid in said non-human organism or in the culture medium surrounding said non-human organism.

[94657] A further embodiment of the present invention relates to a process for the production of lignoceric acid, which comprises
[94658] (a) increasing or generating the activity of a b3812-protein non-targeted in a non-human organism or a part thereof, preferably a microorganism, a plant cell, a plant or a part thereof, as compared to a corresponding non-transformed wild type non-human organism or a part thereof; and
[94659] (b) growing the non-human organism or a part thereof under conditions which permit the production of lignoceric acid or a composition comprising lignoceric acid in said non-human organism or in the culture medium surrounding said non-human organism.

[94660] A further embodiment of the present invention relates to a process for the production of lignoceric acid, which comprises
[94661] (a) increasing or generating the activity of a b4029-protein non-targeted in a non-human organism or a part thereof, preferably a microorganism, a plant cell, a plant or a part thereof, as compared to a corresponding non-transformed wild type non-human organism or a part thereof; and
[94662] (b) growing the non-human organism or a part thereof under conditions which permit the production of lignoceric acid or a composition comprising lignoceric acid in said non-human organism or in the culture medium surrounding said non-human organism.

[94663] A further embodiment of the present invention relates to a process for the production of lignoceric acid, which comprises
[94664] (a) increasing or generating the activity of a acetyltransferase non-targeted in a non-human organism or a part thereof, preferably a microorganism, a plant cell, a plant or a part thereof, as compared to a corresponding non-transformed wild type non-human organism or a part thereof; and
[94665] (b) growing the non-human organism or a part thereof under conditions which permit the production of lignoceric acid or a composition comprising lignoceric acid in said non-human organism or in the culture medium surrounding said non-human organism.

[94666] A further embodiment of the present invention relates to a process for the production of lignoceric acid, which comprises
[94667] (a) increasing or generating the activity of a glutaredoxin non-targeted in a non-human organism or a part thereof, preferably a microorganism, a plant cell, a plant or a part thereof, as compared to a corresponding non-transformed wild type non-human organism or a part thereof; and
[94668] (b) growing the non-human organism or a part thereof under conditions which permit the production of lignoceric acid or a composition comprising lignoceric acid in said non-human organism or in the culture medium surrounding said non-human organism.

[94669] A further embodiment of the present invention relates to a process for the production of lignoceric acid, which comprises
[94670] (a) increasing or generating the activity of a cyclin D non-targeted in a non-human organism or a part thereof, preferably a microorganism, a plant cell, a plant or a part thereof, as compared to a corresponding non-transformed wild type non-human organism or a part thereof; and
[94671] (b) growing the non-human organism or a part thereof under conditions which permit the production of lignoceric acid or a composition comprising lignoceric acid in said non-human organism or in the culture medium surrounding said non-human organism.

[94672] A further embodiment of the present invention relates to a process for the production of lignoceric acid, which comprises
[94673] (a) increasing or generating the activity of a sll0064-protein non-targeted in a non-human organism or a part thereof, preferably a microorganism, a plant cell, a plant or a part thereof, as compared to a corresponding non-transformed wild type non-human organism or a part thereof; and
[94674] (b) growing the non-human organism or a part thereof under conditions which permit the production of lignoceric acid or a composition comprising lignoceric acid in said non-human organism or in the culture medium surrounding said non-human organism.

[94675] A further embodiment of the present invention relates to a process for the production of lignoceric acid, which comprises
[94676] (a) increasing or generating the activity of a agmatinase non-targeted in a non-human organism or a part thereof, preferably a microorganism, a plant cell, a plant or a part thereof, as compared to a corresponding non-transformed wild type non-human organism or a part thereof; and
[94677] (b) growing the non-human organism or a part thereof under conditions which permit the production of lignoceric acid or a composition comprising lignoceric acid in said non-human organism or in the culture medium surrounding said non-human organism.

[94678] A further embodiment of the present invention relates to a process for the production of lignoceric acid, which comprises
[94679] (a) increasing or generating the activity of a uroporphyrin-III C-methyltransferase non-targeted in a non-human organism or a part thereof, preferably a microorganism, a plant cell, a plant or a part thereof, as compared to a corresponding non-transformed wild type non-human organism or a part thereof; and
[94680] (b) growing the non-human organism or a part thereof under conditions which permit the production of lignoceric acid or a composition comprising lignoceric acid in said non-human organism or in the culture medium surrounding said non-human organism.

[94681] A further embodiment of the present invention relates to a process for the production of lignoceric acid, which comprises
[94682] (a) increasing or generating the activity of a binding-protein-dependent transport systems inner membrane component non-targeted in a non-human organism or a part thereof, preferably a microorganism, a plant cell, a plant or a part thereof, as compared to a corresponding non-transformed wild type non-human organism or a part thereof; and
[94683] (b) growing the non-human organism or a part thereof under conditions which permit the production of lignoceric acid or a composition comprising lignoceric acid in said non-human organism or in the culture medium surrounding said non-human organism.

[94684] A further embodiment of the present invention relates to a process for the production of lignoceric acid, which comprises
[94685] (a) increasing or generating the activity of a malate dehydrogenase non-targeted in a non-human organism or a part thereof, preferably a microorganism, a plant cell, a plant or a part thereof, as compared to a corresponding non-transformed wild type non-human organism or a part thereof; and
[94686] (b) growing the non-human organism or a part thereof under conditions which permit the production of lignoceric acid or a composition comprising lignoceric acid in said non-human organism or in the culture medium surrounding said non-human organism.

[94687] A further embodiment of the present invention relates to a process for the production of lignoceric acid, which comprises
[94688] (a) increasing or generating the activity of a ABC metal ion transporter substrate-binding protein non-targeted in a non-human organism or a part thereof, preferably a microorganism, a plant cell, a plant or a part thereof, as compared to a corresponding non-transformed wild type non-human organism or a part thereof; and
[94689] (b) growing the non-human organism or a part thereof under conditions which permit the production of lignoceric acid or a composition comprising lignoceric acid in said non-human organism or in the culture medium surrounding said non-human organism.

[94690] A further embodiment of the present invention relates to a process for the production of lignoceric acid, which comprises
[94691] (a) increasing or generating the activity of a acyl transferase non-targeted in a non-human organism or a part thereof, preferably a microorganism, a plant cell, a plant or a part thereof, as compared to a corresponding non-transformed wild type non-human organism or a part thereof; and
[94692] (b) growing the non-human organism or a part thereof under conditions which permit the production of lignoceric acid or a composition comprising lignoceric acid in said non-human organism or in the culture medium surrounding said non-human organism.

[94693] A further embodiment of the present invention relates to a process for the production of lignoceric acid, which comprises
[94694] (a) increasing or generating the activity of a slr0383-protein non-targeted in a non-human organism or a part thereof, preferably a microorganism, a plant cell, a plant or a part thereof, as compared to a corresponding non-transformed wild type non-human organism or a part thereof; and
[94695] (b) growing the non-human organism or a part thereof under conditions which permit the production of lignoceric acid or a composition comprising lignoceric acid in said non-human organism or in the culture medium surrounding said non-human organism.

[94696] A further embodiment of the present invention relates to a process for the production of lignoceric acid, which comprises
[94697] (a) increasing or generating the activity of a geranylgeranyl pyrophosphate synthase non-targeted in a non-human organism or a part thereof, preferably a microorganism, a plant cell, a plant or a part thereof, as compared to a corresponding non-transformed wild type non-human organism or a part thereof; and
[94698] (b) growing the non-human organism or a part thereof under conditions which permit the production of lignoceric acid or a composition comprising lignoceric acid in said non-human organism or in the culture medium surrounding said non-human organism.

[94699] A further embodiment of the present invention relates to a process for the production of lignoceric acid, which comprises
[94700] (a) increasing or generating the activity of a tryptophan synthase alpha chain non-targeted in a non-human organism or a part thereof, preferably a microorganism, a plant cell, a plant or a part thereof, as compared to a corresponding non-transformed wild type non-human organism or a part thereof; and
[94701] (b) growing the non-human organism or a part thereof under conditions which permit the production of lignoceric acid or a composition comprising lignoceric acid in said non-human organism or in the culture medium surrounding said non-human organism.

[94702] A further embodiment of the present invention relates to a process for the production of lignoceric acid, which comprises
[94703] (a) increasing or generating the activity of a rubredoxin non-targeted in a non-human organism or a part thereof, preferably a microorganism, a plant cell, a plant or a part thereof, as compared to a corresponding non-transformed wild type non-human organism or a part thereof; and
[94704] (b) growing the non-human organism or a part thereof under conditions which permit the production of lignoceric acid or a composition comprising lignoceric acid in said non-human organism or in the culture medium surrounding said non-human organism.

[94705] A further embodiment of the present invention relates to a process for the production of lignoceric acid, which comprises
[94706] (a) increasing or generating the activity of a Sec-independent protein translocase subunit non-targeted in a non-human organism or a part thereof, preferably a microorganism, a plant cell, a plant or a part thereof, as compared to a corresponding non-transformed wild type non-human organism or a part thereof; and
[94707] (b) growing the non-human organism or a part thereof under conditions which permit the production of lignoceric acid or a composition comprising lignoceric acid in said non-human organism or in the culture medium surrounding said non-human organism.

[94708] A further embodiment of the present invention relates to a process for the production of lignoceric acid, which comprises
[94709] (a) increasing or generating the activity of a TTC0768-protein non-targeted in a non-human organism or a part thereof, preferably a microorganism, a plant cell, a plant or a part thereof, as compared to a corresponding non-transformed wild type non-human organism or a part thereof; and
[94710] (b) growing the non-human organism or a part thereof under conditions which permit the production of lignoceric acid or a composition comprising lignoceric acid in said non-human organism or in the culture medium surrounding said non-human organism.

[94711] A further embodiment of the present invention relates to a process for the production of lignoceric acid, which comprises
[94712] (a) increasing or generating the activity of a TTC1386-protein non-targeted in a non-human organism or a part thereof, preferably a microorganism, a plant cell, a plant or a part thereof, as compared to a corresponding non-transformed wild type non-human organism or a part thereof; and
[94713] (b) growing the non-human organism or a part thereof under conditions which permit the production of lignoceric acid or a composition comprising lignoceric acid in said non-human organism or in the culture medium surrounding said non-human organism.

[94714] A further embodiment of the present invention relates to a process for the production of lignoceric acid, which comprises
[94715] (a) increasing or generating the activity of a acetyl-coenzyme A synthetase non-targeted in a non-human organism or a part thereof, preferably a microorganism, a plant cell, a plant or a part thereof, as compared to a corresponding non-transformed wild type non-human organism or a part thereof; and
[94716] (b) growing the non-human organism or a part thereof under conditions which permit the production of lignoceric acid or a composition comprising lignoceric acid in said non-human organism or in the culture medium surrounding said non-human organism.

[94717] A further embodiment of the present invention relates to a process for the production of lignoceric acid, which comprises
[94718] (a) increasing or generating the activity of a peroxisome assembly protein non-targeted in a non-human organism or a part thereof, preferably a microorganism, a plant cell, a plant or a part thereof, as compared to a corresponding non-transformed wild type non-human organism or a part thereof; and
[94719] (b) growing the non-human organism or a part thereof under conditions which permit the production of lignoceric acid or a composition comprising lignoceric acid in said non-human organism or in the culture medium surrounding said non-human organism.

[94720] A further embodiment of the present invention relates to a process for the production of heneicosanoic acid, which comprises
[94721] (a) increasing or generating the activity of a inositol-3-phosphate synthase non-targeted in a non-human organism or a part thereof, preferably a microorganism, a plant cell, a plant or a part thereof, as compared to a corresponding non-transformed wild type non-human organism or a part thereof; and
[94722] (b) growing the non-human organism or a part thereof under conditions which permit the production of heneicosanoic acid or a composition comprising heneicosanoic acid in said non-human organism or in the culture medium surrounding said non-human organism.

[94723] A further embodiment of the present invention relates to a process for the production of lignoceric acid, which comprises
[94724] (a) increasing or generating the activity of a cystathionine gamma-synthase non-targeted in a non-human organism or a part thereof, preferably a microorganism, a plant cell, a plant or a part thereof, as compared to a corresponding non-transformed wild type non-human organism or a part thereof; and
[94725] (b) growing the non-human organism or a part thereof under conditions which permit the production of lignoceric acid or a composition comprising lignoceric acid in said non-human organism or in the culture medium surrounding said non-human organism.

[94726] A further embodiment of the present invention relates to a process for the production of lignoceric acid, which comprises
[94727] (a) increasing or generating the activity of a potassium transport protein non-targeted in a non-human organism or a part thereof, preferably a microorganism, a plant cell, a plant or a part thereof, as compared to a corresponding non-transformed wild type non-human organism or a part thereof; and
[94728] (b) growing the non-human organism or a part thereof under conditions which permit the production of lignoceric acid or a composition comprising lignoceric acid in said non-human organism or in the culture medium surrounding said non-human organism.

[94729] A further embodiment of the present invention relates to a process for the production of lignoceric acid, which comprises
[94730] (a) increasing or generating the activity of a ylr065c-protein non-targeted in a non-human organism or a part thereof, preferably a microorganism, a plant cell, a plant or a part thereof, as compared to a corresponding non-transformed wild type non-human organism or a part thereof; and
[94731] (b) growing the non-human organism or a part thereof under conditions which permit the production of lignoceric acid or a composition comprising lignoceric acid in said non-human organism or in the culture medium surrounding said non-human organism.

[94732] A further embodiment of the present invention relates to a process for the production of lignoceric acid, which comprises
[94733] (a) increasing or generating the activity of a yml093w-protein non-targeted in a non-human organism or a part thereof, preferably a microorganism, a plant cell, a plant or a part thereof, as compared to a corresponding non-transformed wild type non-human organism or a part thereof; and
[94734] (b) growing the non-human organism or a part thereof under conditions which permit the production of lignoceric acid or a composition comprising lignoceric acid in said non-human organism or in the culture medium surrounding said non-human organism.

[94735] A further embodiment of the present invention relates to a process for the production of lignoceric acid, which comprises
[94736] (a) increasing or generating the activity of a mitochondrial inner membrane protease subunit non-targeted in a non-human organism or a part thereof, preferably a microorganism, a plant cell, a plant or a part thereof, as compared to a corresponding non-transformed wild type non-human organism or a part thereof; and
[94737] (b) growing the non-human organism or a part thereof under conditions which permit the production of lignoceric acid or a composition comprising lignoceric acid in said non-human organism or in the culture medium surrounding said non-human organism.

[94738] A further embodiment of the present invention relates to a process for the production of lignoceric acid, which comprises
[94739] (a) increasing or generating the activity of a mevalonate kinase non-targeted in a non-human organism or a part thereof, preferably a microorganism, a plant cell, a plant or a part thereof, as compared to a corresponding non-transformed wild type non-human organism or a part thereof; and
[94740] (b) growing the non-human organism or a part thereof under conditions which permit the production of lignoceric acid or a composition comprising lignoceric acid in said non-human organism or in the culture medium surrounding said non-human organism.

[94741] A further embodiment of the present invention relates to a process for the production of melissic acid which comprises
[94742] (a) increasing or generating the activity of a yer152c-protein non-targeted in a non-human organism or a part thereof, preferably a microorganism, a plant cell, a plant or a part thereof, as compared to a corresponding non-transformed wild type non-human organism or a part thereof; and
[94743] (b) growing the non-human organism or a part thereof under conditions which permit the production of melissic acid or a composition comprising melissic acid in said non-human organism or in the culture medium surrounding said non-human organism.

[94744] A further embodiment of the present invention relates to a process for the production of montanic acid, which comprises
[94745] (a) increasing or generating the activity of a yer152c-protein non-targeted in a non-human organism or a part thereof, preferably a microorganism, a plant cell, a plant or a part thereof, as compared to a corresponding non-transformed wild type non-human organism or a part thereof; and
[94746] (b) growing the non-human organism or a part thereof under conditions which permit the production of montanic acid or a composition comprising montanic acid in said non-human organism or in the culture medium surrounding said non-human organism.

[94747] A further embodiment of the present invention relates to a process for the production of melissic acid which comprises
[94748] (a) increasing or generating the activity of a b3644-protein non-targeted in a non-human organism or a part thereof, preferably a microorganism, a plant cell, a plant or a part thereof, as compared to a corresponding non-transformed wild type non-human organism or a part thereof; and
[94749] (b) growing the non-human organism or a part thereof under conditions which permit the production of melissic acid or a composition comprising melissic acid in said non-human organism or in the culture medium surrounding said non-human organism.

[94750] A further embodiment of the present invention relates to a process for the production of montanic acid, which comprises
[94751] (a) increasing or generating the activity of a b3644-protein non-targeted in a non-human organism or a part thereof, preferably a microorganism, a plant cell, a plant or a part thereof, as compared to a corresponding non-transformed wild type non-human organism or a part thereof; and
[94752] (b) growing the non-human organism or a part thereof under conditions which permit the production of montanic acid or a composition comprising montanic acid in said non-human organism or in the culture medium surrounding said non-human organism.

[94753] A further embodiment of the present invention relates to a process for the production of cerotic acid, which comprises
[94754] (a) increasing or generating the activity of a polypeptide comprising a polypeptide as depicted in the respective line in column 5 or 8 of Table II, application no. 18, or a homolog or a fragment thereof, a consensus sequence or at least one polypeptide motif as depicted in the respective line in column 8 of Table IV, application no. 18, whereby the respective line disclose in column 7 the fine chemical cerotic acid; or
[94755] increasing or generating the activity of an expression product of one or more nucleic acid molecule(s) comprising a polynucleotide as depicted in the respective line in column 5 or 8 of Table I, application no. 18, preferably the coding region thereof, or a homolog or a fragment thereof, whereby the respective line disclose in column 7 the fine chemical cerotic acid;
[94756] non-targeted in a non-human organism or a part thereof; preferably a microorganism, a plant cell, a plant or a part thereof, as compared to a corresponding non-transformed wild type non-human organism or a part thereof; and
[94757] (b) growing the non-human organism under conditions which permit the production of cerotic acid, or a composition comprising cerotic acid in said non-human organism or in the culture medium surrounding said non-human organism.

[94758] A further embodiment of the present invention relates to a process for the production of heneicosanoic acid, which comprises
[94759] (a) increasing or generating the activity of a polypeptide comprising a polypeptide as depicted in the respective line in column 5 or 8 of Table II, application no. 18, or a homolog or a fragment thereof, a consensus sequence or at least one polypeptide motif as depicted in the respective line in column 8 of Table IV, application no. 18, whereby the respective line disclose in column 7 the fine chemical heneicosanoic acid; or
[94760] increasing or generating the activity of an expression product of one or more nucleic acid molecule(s) comprising a polynucleotide as depicted in the respective line in column 5 or 8 of Table I, application no. 18, preferably the coding region thereof, or a homolog or a fragment thereof, whereby the respective line disclose in column 7 the fine chemical heneicosanoic acid;
[94761] non-targeted in a non-human organism or a part thereof; preferably a microorganism, a plant cell, a plant or a part thereof, as compared to a corresponding non-transformed wild type non-human organism or a part thereof; and
[94762] (b) growing the non-human organism under conditions which permit the production of heneicosanoic acid, or a composition comprising heneicosanoic acid in said non-human organism or in the culture medium surrounding said non-human organism.

[94763] A further embodiment of the present invention relates to a process for the production of lignoceric acid, which comprises
[94764] (a) increasing or generating the activity of a polypeptide comprising a polypeptide as depicted in the respective line in column 5 or 8 of Table II, application no. 18, or a homolog or a fragment thereof, a consensus sequence or at least one polypeptide motif as depicted in the respective line in column 8 of Table IV, application no. 18, whereby the respective line disclose in column 7 the fine chemical lignoceric acid; or
[94765] increasing or generating the activity of an expression product of one or more nucleic acid molecule(s) comprising a polynucleotide as depicted in the respective line in column 5 or 8 of Table I, application no. 18, preferably the coding region thereof, or a homolog or a fragment thereof, whereby the respective line disclose in column 7 the fine chemical lignoceric acid;
[94766] non-targeted in a non-human organism or a part thereof; preferably a microorganism, a plant cell, a plant or a part thereof, as compared to a corresponding non-transformed wild type non-human organism or a part thereof; and
[94767] (b) growing the non-human organism under conditions which permit the production of lignoceric acid, or a composition comprising lignoceric acid in said non-human organism or in the culture medium surrounding said non-human organism.

[94768] A further embodiment of the present invention relates to a process for the production of melissic acid which comprises
[94769] (a) increasing or generating the activity of a polypeptide comprising a polypeptide as depicted in the respective line in column 5 or 8 of Table II, application no. 18, or a homolog or a fragment thereof, a consensus sequence or at least one polypeptide motif as depicted in the respective line in column 8 of Table IV, application no. 18, whereby the respective line disclose in column 7 the fine chemical melissic acid; or
[94770] increasing or generating the activity of an expression product of one or more nucleic acid molecule(s) comprising a polynucleotide as depicted in the respective line in column 5 or 8 of Table I, application no. 18, preferably the coding region thereof, or a homolog or a fragment thereof, whereby the respective line disclose in column 7 the fine chemical melissic acid;
[94771] non-targeted in a non-human organism or a part thereof; preferably a microorganism, a plant cell, a plant or a part thereof, as compared to a corresponding non-transformed wild type non-human organism or a part thereof; and
[94772] (b) growing the non-human organism under conditions which permit the production of melissic acid or a composition comprising melissic acid in said non-human organism or in the culture medium surrounding said non-human organism.

[94773] A further embodiment of the present invention relates to a process for the production of montanic acid, which comprises
[94774] (a) increasing or generating the activity of a polypeptide comprising a polypeptide as depicted in the respective line in column 5 or 8 of Table II, application no. 18, or a homolog or a fragment thereof, a consensus sequence or at least one polypeptide motif as depicted in the respective line in column 8 of Table IV, application no. 18, whereby the respective line disclose in column 7 the fine chemical montanic acid; or
[94775] increasing or generating the activity of an expression product of one or more nucleic acid molecule(s) comprising a polynucleotide as depicted in the respective line in column 5 or 8 of Table I, application no. 18, preferably the coding region thereof, or a homolog or a fragment thereof, whereby the respective line disclose in column 7 the fine chemical montanic acid;
[94776] non-targeted in a non-human organism or a part thereof; preferably a microorganism, a plant cell, a plant or a part thereof, as compared to a corresponding non-transformed wild type non-human organism or a part thereof; and
[94777] (b) growing the non-human organism under conditions which permit the production of montanic acid, or a composition comprising montanic acid in said non-human organism or in the culture medium surrounding said non-human organism.

[94778] A further embodiment of the present invention relates to a process for the production of lignoceric acid, which comprises
[94779] (a) increasing or generating one or more activities selected from the group consisting of eukaryotic translation initiation factor 5 in an organelle, preferably in plastids or mitochondria, especially in plastids, of a non-human organism or a part thereof, preferably a microorganism, a plant cell, a plant or a part thereof, as compared to a corresponding non-transformed wild type non-human organism or a part thereof; and
[94780] (b) growing the non-human organism or a part thereof under conditions which permit the production of lignoceric acid or a composition comprising lignoceric acid in said non-human organism or in the culture medium surrounding said non-human organism.

[94781] A further embodiment of the present invention relates to a process for the production of lignoceric acid, which comprises
[94782] (a) increasing or generating one or more activities selected from the group consisting of protein kinase in an organelle, preferably in plastids or mitochondria, especially in plastids, of a non-human organism or a part thereof, preferably a microorganism, a plant cell, a plant or a part thereof, as compared to a corresponding non-transformed wild type non-human organism or a part thereof; and
[94783] (b) growing the non-human organism or a part thereof under conditions which permit the production of lignoceric acid or a composition comprising lignoceric acid in said non-human organism or in the culture medium surrounding said non-human organism.

[94784] A further embodiment of the present invention relates to a process for the production of lignoceric acid, which comprises
[94785] (a) increasing or generating one or more activities selected from the group consisting of thioredoxin family protein in an organelle, preferably in plastids or mitochondria, especially in plastids, of a non-human organism or a part thereof, preferably a microorganism, a plant cell, a plant or a part thereof, as compared to a corresponding non-transformed wild type non-human organism or a part thereof; and
[94786] (b) growing the non-human organism or a part thereof under conditions which permit the production of lignoceric acid or a composition comprising lignoceric acid in said non-human organism or in the culture medium surrounding said non-human organism.

[94787] A further embodiment of the present invention relates to a process for the production of lignoceric acid, which comprises
[94788] (a) increasing or generating one or more activities selected from the group consisting of monodehydroascorbate reductase in an organelle, preferably in plastids or mitochondria, especially in plastids, of a non-human organism or a part thereof, preferably a microorganism, a plant cell, a plant or a part thereof, as compared to a corresponding non-transformed wild type non-human organism or a part thereof; and
[94789] (b) growing the non-human organism or a part thereof under conditions which permit the production of lignoceric acid or a composition comprising lignoceric acid in said non-human organism or in the culture medium surrounding said non-human organism.

[94790] A further embodiment of the present invention relates to a process for the production of lignoceric acid, which comprises
[94791] (a) increasing or generating one or more activities selected from the group consisting of glycosyl transferase in an organelle, preferably in plastids or mitochondria, especially in plastids, of a non-human organism or a part thereof, preferably a microorganism, a plant cell, a plant or a part thereof, as compared to a corresponding non-transformed wild type non-human organism or a part thereof; and
[94792] (b) growing the non-human organism or a part thereof under conditions which permit the production of lignoceric acid or a composition comprising lignoceric acid in said non-human organism or in the culture medium surrounding said non-human organism.

[94793] A further embodiment of the present invention relates to a process for the production of lignoceric acid, which comprises
[94794] (a) increasing or generating one or more activities selected from the group consisting of glutaredoxin in an organelle, preferably in plastids or mitochondria, especially in plastids, of a non-human organism or a part thereof, preferably a microorganism, a plant cell, a plant or a part thereof, as compared to a corresponding non-transformed wild type non-human organism or a part thereof; and
[94795] (b) growing the non-human organism or a part thereof under conditions which permit the production of lignoceric acid or a composition comprising lignoceric acid in said non-human organism or in the culture medium surrounding said non-human organism.

[94796] A further embodiment of the present invention relates to a process for the production of lignoceric acid, which comprises
[94797] (a) increasing or generating one or more activities selected from the group consisting of heat shock transcription factor in an organelle, preferably in plastids or mitochondria, especially in plastids, of a non-human organism or a part thereof, preferably a microorganism, a plant cell, a plant or a part thereof, as compared to a corresponding non-transformed wild type non-human organism or a part thereof; and
[94798] (b) growing the non-human organism or a part thereof under conditions which permit the production of lignoceric acid or a composition comprising lignoceric acid in said non-human organism or in the culture medium surrounding said non-human organism.

[94799] A further embodiment of the present invention relates to a process for the production of lignoceric acid, which comprises
[94800] (a) increasing or generating one or more activities selected from the group consisting of calcium-dependent protein kinase in an organelle, preferably in plastids or mitochondria, especially in plastids, of a non-human organism or a part thereof, preferably a microorganism, a plant cell, a plant or a part thereof, as compared to a corresponding non-transformed wild type non-human organism or a part thereof; and
[94801] (b) growing the non-human organism or a part thereof under conditions which permit the production of lignoceric acid or a composition comprising lignoceric acid in said non-human organism or in the culture medium surrounding said non-human organism.

[94802] A further embodiment of the present invention relates to a process for the production of lignoceric acid, which comprises
[94803] (a) increasing or generating one or more activities selected from the group consisting of gibberellin 20-oxidase in an organelle, preferably in plastids or mitochondria, especially in plastids, of a non-human organism or a part thereof, preferably a microorganism, a plant cell, a plant or a part thereof, as compared to a corresponding non-transformed wild type non-human organism or a part thereof; and
[94804] (b) growing the non-human organism or a part thereof under conditions which permit the production of lignoceric acid or a composition comprising lignoceric acid in said non-human organism or in the culture medium surrounding said non-human organism.

[94805] A further embodiment of the present invention relates to a process for the production of lignoceric acid, which comprises
[94806] (a) increasing or generating one or more activities selected from the group consisting of zinc finger protein in an organelle, preferably in plastids or mitochondria, especially in plastids, of a non-human organism or a part thereof, preferably a microorganism, a plant cell, a plant or a part thereof, as compared to a corresponding non-transformed wild type non-human organism or a part thereof; and
[94807] (b) growing the non-human organism or a part thereof under conditions which permit the production of lignoceric acid or a composition comprising lignoceric acid in said non-human organism or in the culture medium surrounding said non-human organism.

[94808] A further embodiment of the present invention relates to a process for the production of lignoceric acid, which comprises
[94809] (a) increasing or generating one or more activities selected from the group consisting of aminotransferase in an organelle, preferably in plastids or mitochondria, especially in plastids, of a non-human organism or a part thereof, preferably a microorganism, a plant cell, a plant or a part thereof, as compared to a corresponding non-transformed wild type non-human organism or a part thereof; and
[94810] (b) growing the non-human organism or a part thereof under conditions which permit the production of lignoceric acid or a composition comprising lignoceric acid in said non-human organism or in the culture medium surrounding said non-human organism.

[94811] A further embodiment of the present invention relates to a process for the production of lignoceric acid, which comprises
[94812] (a) increasing or generating one or more activities selected from the group consisting of hydrolase in an organelle, preferably in plastids or mitochondria, especially in plastids, of a non-human organism or a part thereof, preferably a microorganism, a plant cell, a plant or a part thereof, as compared to a corresponding non-transformed wild type non-human organism or a part thereof; and
[94813] (b) growing the non-human organism or a part thereof under conditions which permit the production of lignoceric acid or a composition comprising lignoceric acid in said non-human organism or in the culture medium surrounding said non-human organism.

[94814] A further embodiment of the present invention relates to a process for the production of lignoceric acid, which comprises
[94815] (a) increasing or generating one or more activities selected from the group consisting of glutamate-ammonia-ligase in an organelle, preferably in plastids or mitochondria, especially in plastids, of a non-human organism or a part thereof, preferably a microorganism, a plant cell, a plant or a part thereof, as compared to a corresponding non-transformed wild type non-human organism or a part thereof; and
[94816] (b) growing the non-human organism or a part thereof under conditions which permit the production of lignoceric acid or a composition comprising lignoceric acid in said non-human organism or in the culture medium surrounding said non-human organism.

[94817] A further embodiment of the present invention relates to a process for the production of lignoceric acid, which comprises
[94818] (a) increasing or generating one or more activities selected from the group consisting of oxidoreductase in an organelle, preferably in plastids or mitochondria, especially in plastids, of a non-human organism or a part thereof, preferably a microorganism, a plant cell, a plant or a part thereof, as compared to a corresponding non-transformed wild type non-human organism or a part thereof; and
[94819] (b) growing the non-human organism or a part thereof under conditions which permit the production of lignoceric acid or a composition comprising lignoceric acid in said non-human organism or in the culture medium surrounding said non-human organism.

[94820] A further embodiment of the present invention relates to a process for the production of lignoceric acid, which comprises
[94821] (a) increasing or generating one or more activities selected from the group consisting of chaperone protein CIpB in an organelle, preferably in plastids or mitochondria, especially in plastids, of a non-human organism or a part thereof, preferably a microorganism, a plant cell, a plant or a part thereof, as compared to a corresponding non-transformed wild type non-human organism or a part thereof; and
[94822] (b) growing the non-human organism or a part thereof under conditions which permit the production of lignoceric acid or a composition comprising lignoceric acid in said non-human organism or in the culture medium surrounding said non-human organism.

[94823] A further embodiment of the present invention relates to a process for the production of lignoceric acid, which comprises
[94824] (a) increasing or generating one or more activities selected from the group consisting of purine nucleoside phosphorylase in an organelle, preferably in plastids or mitochondria, especially in plastids, of a non-human organism or a part thereof, preferably a microorganism, a plant cell, a plant or a part thereof, as compared to a corresponding non-transformed wild type non-human organism or a part thereof; and
[94825] (b) growing the non-human organism or a part thereof under conditions which permit the production of lignoceric acid or a composition comprising lignoceric acid in said non-human organism or in the culture medium surrounding said non-human organism.

[94826] A further embodiment of the present invention relates to a process for the production of lignoceric acid, which comprises
[94827] (a) increasing or generating one or more activities selected from the group consisting of threonine synthase in an organelle, preferably in plastids or mitochondria, especially in plastids, of a non-human organism or a part thereof, preferably a microorganism, a plant cell, a plant or a part thereof, as compared to a corresponding non-transformed wild type non-human organism or a part thereof; and
[94828] (b) growing the non-human organism or a part thereof under conditions which permit the production of lignoceric acid or a composition comprising lignoceric acid in said non-human organism or in the culture medium surrounding said non-human organism.

[94829] A further embodiment of the present invention relates to a process for the production of lignoceric acid, which comprises
[94830] (a) increasing or generating one or more activities selected from the group consisting of serine protease in an organelle, preferably in plastids or mitochondria, especially in plastids, of a non-human organism or a part thereof, preferably a microorganism, a plant cell, a plant or a part thereof, as compared to a corresponding non-transformed wild type non-human organism or a part thereof; and
[94831] (b) growing the non-human organism or a part thereof under conditions which permit the production of lignoceric acid or a composition comprising lignoceric acid in said non-human organism or in the culture medium surrounding said non-human organism.

[94832] A further embodiment of the present invention relates to a process for the production of lignoceric acid, which comprises
[94833] (a) increasing or generating one or more activities selected from the group consisting of ATP-binding component of a transport system in an organelle, preferably in plastids or mitochondria, especially in plastids, of a non-human organism or a part thereof, preferably a microorganism, a plant cell, a plant or a part thereof, as compared to a corresponding non-transformed wild type non-human organism or a part thereof; and
[94834] (b) growing the non-human organism or a part thereof under conditions which permit the production of lignoceric acid or a composition comprising lignoceric acid in said non-human organism or in the culture medium surrounding said non-human organism.

[94835] A further embodiment of the present invention relates to a process for the production of lignoceric acid, which comprises
[94836] (a) increasing or generating one or more activities selected from the group consisting of isochorismate synthase in an organelle, preferably in plastids or mitochondria, especially in plastids, of a non-human organism or a part thereof, preferably a microorganism, a plant cell, a plant or a part thereof, as compared to a corresponding non-transformed wild type non-human organism or a part thereof; and
[94837] (b) growing the non-human organism or a part thereof under conditions which permit the production of lignoceric acid or a composition comprising lignoceric acid in said non-human organism or in the culture medium surrounding said non-human organism.

[94838] A further embodiment of the present invention relates to a process for the production of lignoceric acid, which comprises
[94839] (a) increasing or generating one or more activities selected from the group consisting of leucyl/phenylalanyl-tRNA-protein transferase in an organelle, preferably in plastids or mitochondria, especially in plastids, of a non-human organism or a part thereof, preferably a microorganism, a plant cell, a plant or a part thereof, as compared to a corresponding non-transformed wild type non-human organism or a part thereof; and
[94840] (b) growing the non-human organism or a part thereof under conditions which permit the production of lignoceric acid or a composition comprising lignoceric acid in said non-human organism or in the culture medium surrounding said non-human organism.

[94841] A further embodiment of the present invention relates to a process for the production of lignoceric acid, which comprises
[94842] (a) increasing or generating one or more activities selected from the group consisting of major facilitator superfamily transporter protein in an organelle, preferably in plastids or mitochondria, especially in plastids, of a non-human organism or a part thereof, preferably a microorganism, a plant cell, a plant or a part thereof, as compared to a corresponding non-transformed wild type non-human organism or a part thereof; and
[94843] (b) growing the non-human organism or a part thereof under conditions which permit the production of lignoceric acid or a composition comprising lignoceric acid in said non-human organism or in the culture medium surrounding said non-human organism.

[94844] A further embodiment of the present invention relates to a process for the production of cerotic acid, which comprises
[94845] (a) increasing or generating one or more activities selected from the group consisting of multidrug resistance protein in an organelle, preferably in plastids or mitochondria, especially in plastids, of a non-human organism or a part thereof, preferably a microorganism, a plant cell, a plant or a part thereof, as compared to a corresponding non-transformed wild type non-human organism or a part thereof; and
[94846] (b) growing the non-human organism or a part thereof under conditions which permit the production of cerotic acid or a composition comprising cerotic acid in said non-human organism or in the culture medium surrounding said non-human organism.

[94847] A further embodiment of the present invention relates to a process for the production of lignoceric acid, which comprises
[94848] (a) increasing or generating one or more activities selected from the group consisting of sodium/proton antiporter in an organelle, preferably in plastids or mitochondria, especially in plastids, of a non-human organism or a part thereof, preferably a microorganism, a plant cell, a plant or a part thereof, as compared to a corresponding non-transformed wild type non-human organism or a part thereof; and
[94849] (b) growing the non-human organism or a part thereof under conditions which permit the production of lignoceric acid or a composition comprising lignoceric acid in said non-human organism or in the culture medium surrounding said non-human organism.

[94850] A further embodiment of the present invention relates to a process for the production of lignoceric acid, which comprises
[94851] (a) increasing or generating one or more activities selected from the group consisting of cardiolipin synthase in an organelle, preferably in plastids or mitochondria, especially in plastids, of a non-human organism or a part thereof, preferably a microorganism, a plant cell, a plant or a part thereof, as compared to a corresponding non-transformed wild type non-human organism or a part thereof; and
[94852] (b) growing the non-human organism or a part thereof under conditions which permit the production of lignoceric acid or a composition comprising lignoceric acid in said non-human organism or in the culture medium surrounding said non-human organism.

[94853] A further embodiment of the present invention relates to a process for the production of lignoceric acid, which comprises
[94854] (a) increasing or generating one or more activities selected from the group consisting of b1522-protein in an organelle, preferably in plastids or mitochondria, especially in plastids, of a non-human organism or a part thereof, preferably a microorganism, a plant cell, a plant or a part thereof, as compared to a corresponding non-transformed wild type non-human organism or a part thereof; and
[94855] (b) growing the non-human organism or a part thereof under conditions which permit the production of lignoceric acid or a composition comprising lignoceric acid in said non-human organism or in the culture medium surrounding said non-human organism.

[94856] A further embodiment of the present invention relates to a process for the production of cerotic acid, which comprises
[94857] (a) increasing or generating one or more activities selected from the group consisting of acid shock protein in an organelle, preferably in plastids or mitochondria, especially in plastids, of a non-human organism or a part thereof, preferably a microorganism, a plant cell, a plant or a part thereof, as compared to a corresponding non-transformed wild type non-human organism or a part thereof; and
[94858] (b) growing the non-human organism or a part thereof under conditions which permit the production of cerotic acid or a composition comprising cerotic acid in said non-human organism or in the culture medium surrounding said non-human organism.

[94859] A further embodiment of the present invention relates to a process for the production of lignoceric acid, which comprises
[94860] (a) increasing or generating one or more activities selected from the group consisting of acid shock protein in an organelle, preferably in plastids or mitochondria, especially in plastids, of a non-human organism or a part thereof, preferably a microorganism, a plant cell, a plant or a part thereof, as compared to a corresponding non-transformed wild type non-human organism or a part thereof; and
[94861] (b) growing the non-human organism or a part thereof under conditions which permit the production of lignoceric acid or a composition comprising lignoceric acid in said non-human organism or in the culture medium surrounding said non-human organism.

[94862] A further embodiment of the present invention relates to a process for the production of lignoceric acid, which comprises
[94863] (a) increasing or generating one or more activities selected from the group consisting of O-antigen chain length determinant in an organelle, preferably in plastids or mitochondria, especially in plastids, of a non-human organism or a part thereof, preferably a microorganism, a plant cell, a plant or a part thereof, as compared to a corresponding non-transformed wild type non-human organism or a part thereof; and
[94864] (b) growing the non-human organism or a part thereof under conditions which permit the production of lignoceric acid or a composition comprising lignoceric acid in said non-human organism or in the culture medium surrounding said non-human organism.

[94865] A further embodiment of the present invention relates to a process for the production of lignoceric acid, which comprises
[94866] (a) increasing or generating one or more activities selected from the group consisting of NADH dehydrogenase subunit N in an organelle, preferably in plastids or mitochondria, especially in plastids, of a non-human organism or a part thereof, preferably a microorganism, a plant cell, a plant or a part thereof, as compared to a corresponding non-transformed wild type non-human organism or a part thereof; and
[94867] (b) growing the non-human organism or a part thereof under conditions which permit the production of lignoceric acid or a composition comprising lignoceric acid in said non-human organism or in the culture medium surrounding said non-human organism.

[94868] A further embodiment of the present invention relates to a process for the production of lignoceric acid, which comprises
[94869] (a) increasing or generating one or more activities selected from the group consisting of 2,3-dihydroxy-2,3-dihydrophenylpropionatedehydrogenase in an organelle, preferably in plastids or mitochondria, especially in plastids, of a non-human organism or a part thereof, preferably a microorganism, a plant cell, a plant or a part thereof, as compared to a corresponding non-transformed wild type non-human organism or a part thereof; and
[94870] (b) growing the non-human organism or a part thereof under conditions which permit the production of lignoceric acid or a composition comprising lignoceric acid in said non-human organism or in the culture medium surrounding said non-human organism.

[94871] A further embodiment of the present invention relates to a process for the production of lignoceric acid, which comprises
[94872] (a) increasing or generating one or more activities selected from the group consisting of b3083-protein in an organelle, preferably in plastids or mitochondria, especially in plastids, of a non-human organism or a part thereof, preferably a microorganism, a plant cell, a plant or a part thereof, as compared to a corresponding non-transformed wild type non-human organism or a part thereof; and
[94873] (b) growing the non-human organism or a part thereof under conditions which permit the production of lignoceric acid or a composition comprising lignoceric acid in said non-human organism or in the culture medium surrounding said non-human organism.

[94874] A further embodiment of the present invention relates to a process for the production of lignoceric acid, which comprises
[94875] (a) increasing or generating one or more activities selected from the group consisting of b3812-protein in an organelle, preferably in plastids or mitochondria, especially in plastids, of a non-human organism or a part thereof, preferably a microorganism, a plant cell, a plant or a part thereof, as compared to a corresponding non-transformed wild type non-human organism or a part thereof; and
[94876] (b) growing the non-human organism or a part thereof under conditions which permit the production of lignoceric acid or a composition comprising lignoceric acid in said non-human organism or in the culture medium surrounding said non-human organism.

[94877] A further embodiment of the present invention relates to a process for the production of lignoceric acid, which comprises
[94878] (a) increasing or generating one or more activities selected from the group consisting of b4029-protein in an organelle, preferably in plastids or mitochondria, especially in plastids, of a non-human organism or a part thereof, preferably a microorganism, a plant cell, a plant or a part thereof, as compared to a corresponding non-transformed wild type non-human organism or a part thereof; and
[94879] (b) growing the non-human organism or a part thereof under conditions which permit the production of lignoceric acid or a composition comprising lignoceric acid in said non-human organism or in the culture medium surrounding said non-human organism.

[94880] A further embodiment of the present invention relates to a process for the production of lignoceric acid, which comprises
[94881] (a) increasing or generating one or more activities selected from the group consisting of acetyltransferase in an organelle, preferably in plastids or mitochondria, especially in plastids, of a non-human organism or a part thereof, preferably a microorganism, a plant cell, a plant or a part thereof, as compared to a corresponding non-transformed wild type non-human organism or a part thereof; and
[94882] (b) growing the non-human organism or a part thereof under conditions which permit the production of lignoceric acid or a composition comprising lignoceric acid in said non-human organism or in the culture medium surrounding said non-human organism.

[94883] A further embodiment of the present invention relates to a process for the production of lignoceric acid, which comprises
[94884] (a) increasing or generating one or more activities selected from the group consisting of glutaredoxin in an organelle, preferably in plastids or mitochondria, especially in plastids, of a non-human organism or a part thereof, preferably a microorganism, a plant cell, a plant or a part thereof, as compared to a corresponding non-transformed wild type non-human organism or a part thereof; and
[94885] (b) growing the non-human organism or a part thereof under conditions which permit the production of lignoceric acid or a composition comprising lignoceric acid in said non-human organism or in the culture medium surrounding said non-human organism.

[94886] A further embodiment of the present invention relates to a process for the production of lignoceric acid, which comprises
[94887] (a) increasing or generating one or more activities selected from the group consisting of cyclin D in an organelle, preferably in plastids or mitochondria, especially in plastids, of a non-human organism or a part thereof, preferably a microorganism, a plant cell, a plant or a part thereof, as compared to a corresponding non-transformed wild type non-human organism or a part thereof; and
[94888] (b) growing the non-human organism or a part thereof under conditions which permit the production of lignoceric acid or a composition comprising lignoceric acid in said non-human organism or in the culture medium surrounding said non-human organism.

[94889] A further embodiment of the present invention relates to a process for the production of lignoceric acid, which comprises
[94890] (a) increasing or generating one or more activities selected from the group consisting of sll0064-protein in an organelle, preferably in plastids or mitochondria, especially in plastids, of a non-human organism or a part thereof, preferably a microorganism, a plant cell, a plant or a part thereof, as compared to a corresponding non-transformed wild type non-human organism or a part thereof; and
[94891] (b) growing the non-human organism or a part thereof under conditions which permit the production of lignoceric acid or a composition comprising lignoceric acid in said non-human organism or in the culture medium surrounding said non-human organism.

[94892] A further embodiment of the present invention relates to a process for the production of lignoceric acid, which comprises
[94893] (a) increasing or generating one or more activities selected from the group consisting of agmatinase in an organelle, preferably in plastids or mitochondria, especially in plastids, of a non-human organism or a part thereof, preferably a microorganism, a plant cell, a plant or a part thereof, as compared to a corresponding non-transformed wild type non-human organism or a part thereof; and
[94894] (b) growing the non-human organism or a part thereof under conditions which permit the production of lignoceric acid or a composition comprising lignoceric acid in said non-human organism or in the culture medium surrounding said non-human organism.

[94895] A further embodiment of the present invention relates to a process for the production of lignoceric acid, which comprises
[94896] (a) increasing or generating one or more activities selected from the group consisting of uroporphyrin-III C-methyltransferase in an organelle, preferably in plastids or mitochondria, especially in plastids, of a non-human organism or a part thereof, preferably a microorganism, a plant cell, a plant or a part thereof, as compared to a corresponding non-transformed wild type non-human organism or a part thereof; and
[94897] (b) growing the non-human organism or a part thereof under conditions which permit the production of lignoceric acid or a composition comprising lignoceric acid in said non-human organism or in the culture medium surrounding said non-human organism.

[94898] A further embodiment of the present invention relates to a process for the production of lignoceric acid, which comprises
[94899] (a) increasing or generating one or more activities selected from the group consisting of binding-protein-dependent transport systems inner membrane component in an organelle, preferably in plastids or mitochondria, especially in plastids, of a non-human organism or a part thereof, preferably a microorganism, a plant cell, a plant or a part thereof, as compared to a corresponding non-transformed wild type non-human organism or a part thereof; and
[94900] (b) growing the non-human organism or a part thereof under conditions which permit the production of lignoceric acid or a composition comprising lignoceric acid in said non-human organism or in the culture medium surrounding said non-human organism.

[94901] A further embodiment of the present invention relates to a process for the production of lignoceric acid, which comprises
[94902] (a) increasing or generating one or more activities selected from the group consisting of malate dehydrogenase in an organelle, preferably in plastids or mitochondria, especially in plastids, of a non-human organism or a part thereof, preferably a microorganism, a plant cell, a plant or a part thereof, as compared to a corresponding non-transformed wild type non-human organism or a part thereof; and
[94903] (b) growing the non-human organism or a part thereof under conditions which permit the production of lignoceric acid or a composition comprising lignoceric acid in said non-human organism or in the culture medium surrounding said non-human organism.

[94904] A further embodiment of the present invention relates to a process for the production of lignoceric acid, which comprises
[94905] (a) increasing or generating one or more activities selected from the group consisting of ABC metal ion transporter substrate-binding protein in an organelle, preferably in plastids or mitochondria, especially in plastids, of a non-human organism or a part thereof, preferably a microorganism, a plant cell, a plant or a part thereof, as compared to a corresponding non-transformed wild type non-human organism or a part thereof; and
[94906] (b) growing the non-human organism or a part thereof under conditions which permit the production of lignoceric acid or a composition comprising lignoceric acid in said non-human organism or in the culture medium surrounding said non-human organism.

[94907] A further embodiment of the present invention relates to a process for the production of lignoceric acid, which comprises
[94908] (a) increasing or generating one or more activities selected from the group consisting of acyl transferase in an organelle, preferably in plastids or mitochondria, especially in plastids, of a non-human organism or a part thereof, preferably a microorganism, a plant cell, a plant or a part thereof, as compared to a corresponding non-transformed wild type non-human organism or a part thereof; and
[94909] (b) growing the non-human organism or a part thereof under conditions which permit the production of lignoceric acid or a composition comprising lignoceric acid in said non-human organism or in the culture medium surrounding said non-human organism.

[94910] A further embodiment of the present invention relates to a process for the production of lignoceric acid, which comprises
[94911] (a) increasing or generating one or more activities selected from the group consisting of slr0383-protein in an organelle, preferably in plastids or mitochondria, especially in plastids, of a non-human organism or a part thereof, preferably a microorganism, a plant cell, a plant or a part thereof, as compared to a corresponding non-transformed wild type non-human organism or a part thereof; and
[94912] (b) growing the non-human organism or a part thereof under conditions which permit the production of lignoceric acid or a composition comprising lignoceric acid in said non-human organism or in the culture medium surrounding said non-human organism.

[94913] A further embodiment of the present invention relates to a process for the production of lignoceric acid, which comprises
[94914] (a) increasing or generating one or more activities selected from the group consisting of geranylgeranyl pyrophosphate synthase in an organelle, preferably in plastids or mitochondria, especially in plastids, of a non-human organism or a part thereof, preferably a microorganism, a plant cell, a plant or a part thereof, as compared to a corresponding non-transformed wild type non-human organism or a part thereof; and
[94915] (b) growing the non-human organism or a part thereof under conditions which permit the production of lignoceric acid or a composition comprising lignoceric acid in said non-human organism or in the culture medium surrounding said non-human organism.

[94916] A further embodiment of the present invention relates to a process for the production of lignoceric acid, which comprises
[94917] (a) increasing or generating one or more activities selected from the group consisting of tryptophan synthase alpha chain in an organelle, preferably in plastids or mitochondria, especially in plastids, of a non-human organism or a part thereof, preferably a microorganism, a plant cell, a plant or a part thereof, as compared to a corresponding non-transformed wild type non-human organism or a part thereof; and
[94918] (b) growing the non-human organism or a part thereof under conditions which permit the production of lignoceric acid or a composition comprising lignoceric acid in said non-human organism or in the culture medium surrounding said non-human organism.

[94919] A further embodiment of the present invention relates to a process for the production of lignoceric acid, which comprises
[94920] (a) increasing or generating one or more activities selected from the group consisting of rubredoxin in an organelle, preferably in plastids or mitochondria, especially in plastids, of a non-human organism or a part thereof, preferably a microorganism, a plant cell, a plant or a part thereof, as compared to a corresponding non-transformed wild type non-human organism or a part thereof; and
[94921] (b) growing the non-human organism or a part thereof under conditions which permit the production of lignoceric acid or a composition comprising lignoceric acid in said non-human organism or in the culture medium surrounding said non-human organism.

[94922] A further embodiment of the present invention relates to a process for the production of lignoceric acid, which comprises
[94923] (a) increasing or generating one or more activities selected from the group consisting of Sec-independent protein translocase subunit in an organelle, preferably in plastids or mitochondria, especially in plastids, of a non-human organism or a part thereof, preferably a microorganism, a plant cell, a plant or a part thereof, as compared to a corresponding non-transformed wild type non-human organism or a part thereof; and
[94924] (b) growing the non-human organism or a part thereof under conditions which permit the production of lignoceric acid or a composition comprising lignoceric acid in said non-human organism or in the culture medium surrounding said non-human organism.

[94925] A further embodiment of the present invention relates to a process for the production of lignoceric acid, which comprises
[94926] (a) increasing or generating one or more activities selected from the group consisting of TTC0768-protein in an organelle, preferably in plastids or mitochondria, especially in plastids, of a non-human organism or a part thereof, preferably a microorganism, a plant cell, a plant or a part thereof, as compared to a corresponding non-transformed wild type non-human organism or a part thereof; and
[94927] (b) growing the non-human organism or a part thereof under conditions which permit the production of lignoceric acid or a composition comprising lignoceric acid in said non-human organism or in the culture medium surrounding said non-human organism.

[94928] A further embodiment of the present invention relates to a process for the production of lignoceric acid, which comprises
[94929] (a) increasing or generating one or more activities selected from the group consisting of TTC1386-protein in an organelle, preferably in plastids or mitochondria, especially in plastids, of a non-human organism or a part thereof, preferably a microorganism, a plant cell, a plant or a part thereof, as compared to a corresponding non-transformed wild type non-human organism or a part thereof; and
[94930] (b) growing the non-human organism or a part thereof under conditions which permit the production of lignoceric acid or a composition comprising lignoceric acid in said non-human organism or in the culture medium surrounding said non-human organism.

[94931] A further embodiment of the present invention relates to a process for the production of lignoceric acid, which comprises
[94932] (a) increasing or generating one or more activities selected from the group consisting of acetyl-coenzyme A synthetase in an organelle, preferably in plastids or mitochondria, especially in plastids, of a non-human organism or a part thereof, preferably a microorganism, a plant cell, a plant or a part thereof, as compared to a corresponding non-transformed wild type non-human organism or a part thereof; and
[94933] (b) growing the non-human organism or a part thereof under conditions which permit the production of lignoceric acid or a composition comprising lignoceric acid in said non-human organism or in the culture medium surrounding said non-human organism.

[94934] A further embodiment of the present invention relates to a process for the production of lignoceric acid, which comprises
[94935] (a) increasing or generating one or more activities selected from the group consisting of peroxisome assembly protein in an organelle, preferably in plastids or mitochondria, especially in plastids, of a non-human organism or a part thereof, preferably a microorganism, a plant cell, a plant or a part thereof, as compared to a corresponding non-transformed wild type non-human organism or a part thereof; and
[94936] (b) growing the non-human organism or a part thereof under conditions which permit the production of lignoceric acid or a composition comprising lignoceric acid in said non-human organism or in the culture medium surrounding said non-human organism.

[94937] A further embodiment of the present invention relates to a process for the production of heneicosanoic acid, which comprises
[94938] (a) increasing or generating one or more activities selected from the group consisting of inositol-3-phosphate synthase in an organelle, preferably in plastids or mitochondria, especially in plastids, of a non-human organism or a part thereof, preferably a microorganism, a plant cell, a plant or a part thereof, as compared to a corresponding non-transformed wild type non-human organism or a part thereof; and
[94939] (b) growing the non-human organism or a part thereof under conditions which permit the production of heneicosanoic acid or a composition comprising heneicosanoic acid in said non-human organism or in the culture medium surrounding said non-human organism.

[94940] A further embodiment of the present invention relates to a process for the production of lignoceric acid, which comprises
[94941] (a) increasing or generating one or more activities selected from the group consisting of cystathionine gamma-synthase in an organelle, preferably in plastids or mitochondria, especially in plastids, of a non-human organism or a part thereof, preferably a microorganism, a plant cell, a plant or a part thereof, as compared to a corresponding non-transformed wild type non-human organism or a part thereof; and
[94942] (b) growing the non-human organism or a part thereof under conditions which permit the production of lignoceric acid or a composition comprising lignoceric acid in said non-human organism or in the culture medium surrounding said non-human organism.

[94943] A further embodiment of the present invention relates to a process for the production of lignoceric acid, which comprises
[94944] (a) increasing or generating one or more activities selected from the group consisting of potassium transport protein in an organelle, preferably in plastids or mitochondria, especially in plastids, of a non-human organism or a part thereof, preferably a microorganism, a plant cell, a plant or a part thereof, as compared to a corresponding non-transformed wild type non-human organism or a part thereof; and
[94945] (b) growing the non-human organism or a part thereof under conditions which permit the production of lignoceric acid or a composition comprising lignoceric acid in said non-human organism or in the culture medium surrounding said non-human organism.

[94946] A further embodiment of the present invention relates to a process for the production of lignoceric acid, which comprises
[94947] (a) increasing or generating one or more activities selected from the group consisting of ylr065c-protein in an organelle, preferably in plastids or mitochondria, especially in plastids, of a non-human organism or a part thereof, preferably a microorganism, a plant cell, a plant or a part thereof, as compared to a corresponding non-transformed wild type non-human organism or a part thereof; and
[94948] (b) growing the non-human organism or a part thereof under conditions which permit the production of lignoceric acid or a composition comprising lignoceric acid in said non-human organism or in the culture medium surrounding said non-human organism.

[94949] A further embodiment of the present invention relates to a process for the production of lignoceric acid, which comprises
[94950] (a) increasing or generating one or more activities selected from the group consisting of yml093w-protein in an organelle, preferably in plastids or mitochondria, especially in plastids, of a non-human organism or a part thereof, preferably a microorganism, a plant cell, a plant or a part thereof, as compared to a corresponding non-transformed wild type non-human organism or a part thereof; and
[94951] (b) growing the non-human organism or a part thereof under conditions which permit the production of lignoceric acid or a composition comprising lignoceric acid in said non-human organism or in the culture medium surrounding said non-human organism.

[94952] A further embodiment of the present invention relates to a process for the production of lignoceric acid, which comprises
[94953] (a) increasing or generating one or more activities selected from the group consisting of mitochondrial inner membrane protease subunit in an organelle, preferably in plastids or mitochondria, especially in plastids, of a non-human organism or a part thereof, preferably a microorganism, a plant cell, a plant or a part thereof, as compared to a corresponding non-transformed wild type non-human organism or a part thereof; and
[94954] (b) growing the non-human organism or a part thereof under conditions which permit the production of lignoceric acid or a composition comprising lignoceric acid in said non-human organism or in the culture medium surrounding said non-human organism.

[94955] A further embodiment of the present invention relates to a process for the production of lignoceric acid, which comprises
[94956] (a) increasing or generating one or more activities selected from the group consisting of mevalonate kinase in an organelle, preferably in plastids or mitochondria, especially in plastids, of a non-human organism or a part thereof, preferably a microorganism, a plant cell, a plant or a part thereof, as compared to a corresponding non-transformed wild type non-human organism or a part thereof; and
[94957] (b) growing the non-human organism or a part thereof under conditions which permit the production of lignoceric acid or a composition comprising lignoceric acid in said non-human organism or in the culture medium surrounding said non-human organism.

[94958] A further embodiment of the present invention relates to a process for the production of melissic acid which comprises
[94959] (a) increasing or generating one or more activities selected from the group consisting of yer152c-protein in an organelle, preferably in plastids or mitochondria, especially in plastids, of a non-human organism or a part thereof, preferably a microorganism, a plant cell, a plant or a part thereof, as compared to a corresponding non-transformed wild type non-human organism or a part thereof; and
[94960] (b) growing the non-human organism or a part thereof under conditions which permit the production of melissic acid or a composition comprising melissic acid in said non-human organism or in the culture medium surrounding said non-human organism.

[94961] A further embodiment of the present invention relates to a process for the production of montanic acid, which comprises
[94962] (a) increasing or generating one or more activities selected from the group consisting of yer152c-protein in an organelle, preferably in plastids or mitochondria, especially in plastids, of a non-human organism or a part thereof, preferably a microorganism, a plant cell, a plant or a part thereof, as compared to a corresponding non-transformed wild type non-human organism or a part thereof; and
[94963] (b) growing the non-human organism or a part thereof under conditions which permit the production of montanic acid or a composition comprising montanic acid in said non-human organism or in the culture medium surrounding said non-human organism.

[94964] A further embodiment of the present invention relates to a process for the production of melissic acid which comprises
[94965] (a) increasing or generating one or more activities selected from the group consisting of b3644-protein in an organelle, preferably in plastids or mitochondria, especially in plastids, of a non-human organism or a part thereof, preferably a microorganism, a plant cell, a plant or a part thereof, as compared to a corresponding non-transformed wild type non-human organism or a part thereof; and
[94966] (b) growing the non-human organism or a part thereof under conditions which permit the production of melissic acid or a composition comprising melissic acid in said non-human organism or in the culture medium surrounding said non-human organism.

[94967] A further embodiment of the present invention relates to a process for the production of montanic acid, which comprises
[94968] (a) increasing or generating one or more activities selected from the group consisting of b3644-protein in an organelle, preferably in plastids or mitochondria, especially in plastids, of a non-human organism or a part thereof, preferably a microorganism, a plant cell, a plant or a part thereof, as compared to a corresponding non-transformed wild type non-human organism or a part thereof; and
[94969] (b) growing the non-human organism or a part thereof under conditions which permit the production of montanic acid or a composition comprising montanic acid in said non-human organism or in the culture medium surrounding said non-human organism.

[94970] A further embodiment of the present invention relates to a process for the production of cerotic acid, which comprises
[94971] (a1) increasing or generating the activity of a polypeptide comprising a polypeptide as depicted in the respective line in column 5 or 8 of Table II, application no. 18, or a homolog or fragment thereof, a consensus sequence or at least one polypeptide motif as depicted in column 8 of Table IV, application no. 18, whereby the respective line disclose in column 7 the fine chemical cerotic acid; or
[94972] increasing or generating the activity of an expression product of one or more nucleic acid molecule(s) comprising a polynucleotide as depicted in the respective line in column 5 or 8 of Table I, application no. 18, preferably the coding region thereof, or a homolog or a fragment thereof, whereby the respective line disclose in column 7 the fine chemical cerotic acid;
[94973] in an organelle, preferably in plastids or mitochondria, especially in plastids, in a non-human organism or a part thereof; preferably a microorganism, a plant cell, a plant or a part thereof, as compared to a corresponding non-transformed wild type non-human organism or a part thereof; or
[94974] (a2) increasing or generating the activity of a polypeptide comprising a polypeptide as depicted in the respective line in column 5 or 8 of Table II, application no. 18, or a homolog or a fragment thereof, a consensus sequence or at least one polypeptide motif as depicted in the respective line in column 8 of Table IV, application no. 18, which is joined to a transit peptide, whereby the respective line disclose in column 7 the fine chemical cerotic acid; or
[94975] increasing or generating the activity of an expression product of one or more nucleic acid molecule(s) comprising a polynucleotide as depicted in the respective line in column 5 or 8 of Table I, application no. 18, preferably the coding region thereof, or a homolog or a fragment thereof, which is joined to a nucleic acid sequence encoding an organelle localization sequence, preferably a plastid or a mitochondrion localization sequence, especially a plastid localization sequence, whereby the respective line disclose in column 7 the fine chemical cerotic acid;
[94976] in a non-human organism or a part thereof; preferably a microorganism, a plant cell, a plant or a part thereof, as compared to a corresponding non-transformed wild type non-human organism or a part thereof; or
[94977] (a3) increasing or generating the activity of a polypeptide comprising a polypeptide as depicted in the respective line in column 5 or 8 of Table II, application no. 18, or a homolog or a fragment thereof, a consensus sequence or at least one polypeptide motif as depicted in the respective line in column 8 of Table IV, application no. 18, whereby the respective line disclose in column 7 the fine chemical cerotic acid; or
[94978] increasing or generating the activity of an expression product of one or more nucleic acid molecule(s) comprising a polynucleotide as depicted in the respective line in column 5 or 8 of Table I, application no. 18, preferably the coding region thereof, or a homolog or a fragment thereof, whereby the respective line disclose in column 7 the fine chemical cerotic acid;
[94979] in an organelle, preferably in plastids or mitochondria, especially in plastids, in a non-human organism or a part thereof; preferably a microorganism, a plant cell, a plant or a part thereof, through transformation of the organelle, as compared to a corresponding non-transformed wild type non-human organism or a part thereof;
[94980] and
[94981] (b) growing the non-human organism under conditions which permit the production of cerotic acid, or a composition comprising cerotic acid in said non-human organism or in the culture medium surrounding said non-human organism.

[94982] A further embodiment of the present invention relates to a process for the production of heneicosanoic acid, which comprises
[94983] (a1) increasing or generating the activity of a polypeptide comprising a polypeptide as depicted in the respective line in column 5 or 8 of Table II, application no. 18, or a homolog or fragment thereof, a consensus sequence or at least one polypeptide motif as depicted in column 8 of Table IV, application no. 18, whereby the respective line disclose in column 7 the fine chemical heneicosanoic acid; or
[94984] increasing or generating the activity of an expression product of one or more nucleic acid molecule(s) comprising a polynucleotide as depicted in the respective line in column 5 or 8 of Table I, application no. 18, preferably the coding region thereof, or a homolog or a fragment thereof, whereby the respective line disclose in column 7 the fine chemical heneicosanoic acid;
[94985] in an organelle, preferably in plastids or mitochondria, especially in plastids, in a non-human organism or a part thereof; preferably a microorganism, a plant cell, a plant or a part thereof, as compared to a corresponding non-transformed wild type non-human organism or a part thereof; or
[94986] (a2) increasing or generating the activity of a polypeptide comprising a polypeptide as depicted in the respective line in column 5 or 8 of Table II, application no. 18, or a homolog or a fragment thereof, a consensus sequence or at least one polypeptide motif as depicted in the respective line in column 8 of Table IV, application no. 18, which is joined to a transit peptide, whereby the respective line disclose in column 7 the fine chemical heneicosanoic acid; or
[94987] increasing or generating the activity of an expression product of one or more nucleic acid molecule(s) comprising a polynucleotide as depicted in the respective line in column 5 or 8 of Table I, application no. 18, preferably the coding region thereof, or a homolog or a fragment thereof, which is joined to a nucleic acid sequence encoding an organelle localization sequence, preferably a plastid or a mitochondrion localization sequence, especially a plastid localization sequence, whereby the respective line disclose in column 7 the fine chemical heneicosanoic acid;
[94988] in a non-human organism or a part thereof; preferably a microorganism, a plant cell, a plant or a part thereof, as compared to a corresponding non-transformed wild type non-human organism or a part thereof; or
[94989] (a3) increasing or generating the activity of a polypeptide comprising a polypeptide as depicted in the respective line in column 5 or 8 of Table II, application no. 18, or a homolog or a fragment thereof, a consensus sequence or at least one polypeptide motif as depicted in the respective line in column 8 of Table IV, application no. 18, whereby the respective line disclose in column 7 the fine chemical heneicosanoic acid; or
[94990] increasing or generating the activity of an expression product of one or more nucleic acid molecule(s) comprising a polynucleotide as depicted in the respective line in column 5 or 8 of Table I, application no. 18, preferably the coding region thereof, or a homolog or a fragment thereof, whereby the respective line disclose in column 7 the fine chemical heneicosanoic acid;
[94991] in an organelle, preferably in plastids or mitochondria, especially in plastids, in a non-human organism or a part thereof; preferably a microorganism, a plant cell, a plant or a part thereof, through transformation of the organelle, as compared to a corresponding non-transformed wild type non-human organism or a part thereof;
[94992] and
[94993] (b) growing the non-human organism under conditions which permit the production of heneicosanoic acid, or a composition comprising heneicosanoic acid in said non-human organism or in the culture medium surrounding said non-human organism.

[94994] A further embodiment of the present invention relates to a process for the production of lignoceric acid, which comprises
[94995] (a1) increasing or generating the activity of a polypeptide comprising a polypeptide as depicted in the respective line in column 5 or 8 of Table II, application no. 18, or a homolog or fragment thereof, a consensus sequence or at least one polypeptide motif as depicted in column 8 of Table IV, application no. 18, whereby the respective line disclose in column 7 the fine chemical lignoceric acid; or
[94996] increasing or generating the activity of an expression product of one or more nucleic acid molecule(s) comprising a polynucleotide as depicted in the respective line in column 5 or 8 of Table I, application no. 18, preferably the coding region thereof, or a homolog or a fragment thereof, whereby the respective line disclose in column 7 the fine chemical lignoceric acid;
[94997] in an organelle, preferably in plastids or mitochondria, especially in plastids, in a non-human organism or a part thereof; preferably a microorganism, a plant cell, a plant or a part thereof, as compared to a corresponding non-transformed wild type non-human organism or a part thereof; or
[94998] (a2) increasing or generating the activity of a polypeptide comprising a polypeptide as depicted in the respective line in column 5 or 8 of Table II, application no. 18, or a homolog or a fragment thereof, a consensus sequence or at least one polypeptide motif as depicted in the respective line in column 8 of Table IV, application no. 18, which is joined to a transit peptide, whereby the respective line disclose in column 7 the fine chemical lignoceric acid; or
[94999] increasing or generating the activity of an expression product of one or more nucleic acid molecule(s) comprising a polynucleotide as depicted in the respective line in column 5 or 8 of Table I, application no. 18, preferably the coding region thereof, or a homolog or a fragment thereof, which is joined to a nucleic acid sequence encoding an organelle localization sequence, preferably a plastid or a mitochondrion localization sequence, especially a plastid localization sequence, whereby the respective line disclose in column 7 the fine chemical lignoceric acid;
[95000] in a non-human organism or a part thereof; preferably a microorganism, a plant cell, a plant or a part thereof, as compared to a corresponding non-transformed wild type non-human organism or a part thereof; or
[95001] (a3) increasing or generating the activity of a polypeptide comprising a polypeptide as depicted in the respective line in column 5 or 8 of Table II, application no. 18, or a homolog or a fragment thereof, a consensus sequence or at least one polypeptide motif as depicted in the respective line in column 8 of Table IV, application no. 18, whereby the respective line disclose in column 7 the fine chemical lignoceric acid; or
[95002] increasing or generating the activity of an expression product of one or more nucleic acid molecule(s) comprising a polynucleotide as depicted in the respective line in column 5 or 8 of Table I, application no. 18, preferably the coding region thereof, or a homolog or a fragment thereof, whereby the respective line disclose in column 7 the fine chemical lignoceric acid;
[95003] in an organelle, preferably in plastids or mitochondria, especially in plastids, in a non-human organism or a part thereof; preferably a microorganism, a plant cell, a plant or a part thereof, through transformation of the organelle, as compared to a corresponding non-transformed wild type non-human organism or a part thereof;
[95004] and
[95005] (b) growing the non-human organism under conditions which permit the production of lignoceric acid, or a composition comprising lignoceric acid in said non-human organism or in the culture medium surrounding said non-human organism.

[95006] A further embodiment of the present invention relates to a process for the production of melissic acid which comprises
[95007] (a1) increasing or generating the activity of a polypeptide comprising a polypeptide as depicted in the respective line in column 5 or 8 of Table II, application no. 18, or a homolog or fragment thereof, a consensus sequence or at least one polypeptide motif as depicted in column 8 of Table IV, application no. 18, whereby the respective line disclose in column 7 the fine chemical melissic acid; or
[95008] increasing or generating the activity of an expression product of one or more nucleic acid molecule(s) comprising a polynucleotide as depicted in the respective line in column 5 or 8 of Table I, application no. 18, preferably the coding region thereof, or a homolog or a fragment thereof, whereby the respective line disclose in column 7 the fine chemical melissic acid;
[95009] in an organelle, preferably in plastids or mitochondria, especially in plastids, in a non-human organism or a part thereof; preferably a microorganism, a plant cell, a plant or a part thereof, as compared to a corresponding non-transformed wild type non-human organism or a part thereof; or
[95010] (a2) increasing or generating the activity of a polypeptide comprising a polypeptide as depicted in the respective line in column 5 or 8 of Table II, application no. 18, or a homolog or a fragment thereof, a consensus sequence or at least one polypeptide motif as depicted in the respective line in column 8 of Table IV, application no. 18, which is joined to a transit peptide, whereby the respective line disclose in column 7 the fine chemical melissic acid; or
[95011] increasing or generating the activity of an expression product of one or more nucleic acid molecule(s) comprising a polynucleotide as depicted in the respective line in column 5 or 8 of Table I, application no. 18, preferably the coding region thereof, or a homolog or a fragment thereof, which is joined to a nucleic acid sequence encoding an organelle localization sequence, preferably a plastid or a mitochondrion localization sequence, especially a plastid localization sequence, whereby the respective line disclose in column 7 the fine chemical melissic acid;
[95012] in a non-human organism or a part thereof; preferably a microorganism, a plant cell, a plant or a part thereof, as compared to a corresponding non-transformed wild type non-human organism or a part thereof; or
[95013] (a3) increasing or generating the activity of a polypeptide comprising a polypeptide as depicted in the respective line in column 5 or 8 of Table II, application no. 18, or a homolog or a fragment thereof, a consensus sequence or at least one polypeptide motif as depicted in the respective line in column 8 of Table IV, application no. 18, whereby the respective line disclose in column 7 the fine chemical melissic acid; or
[95014] increasing or generating the activity of an expression product of one or more nucleic acid molecule(s) comprising a polynucleotide as depicted in the respective line in column 5 or 8 of Table I, application no. 18, preferably the coding region thereof, or a homolog or a fragment thereof, whereby the respective line disclose in column 7 the fine chemical melissic acid;
[95015] in an organelle, preferably in plastids or mitochondria, especially in plastids, in a non-human organism or a part thereof; preferably a microorganism, a plant cell, a plant or a part thereof, through transformation of the organelle, as compared to a corresponding non-transformed wild type non-human organism or a part thereof;
[95016] and
[95017] (b) growing the non-human organism under conditions which permit the production of melissic acid or a composition comprising melissic acid in said non-human organism or in the culture medium surrounding said non-human organism.

[95018] A further embodiment of the present invention relates to a process for the production of montanic acid, which comprises
[95019] (a1) increasing or generating the activity of a polypeptide comprising a polypeptide as depicted in the respective line in column 5 or 8 of Table II, application no. 18, or a homolog or fragment thereof, a consensus sequence or at least one polypeptide motif as depicted in column 8 of Table IV, application no. 18, whereby the respective line disclose in column 7 the fine chemical montanic acid; or
[95020] increasing or generating the activity of an expression product of one or more nucleic acid molecule(s) comprising a polynucleotide as depicted in the respective line in column 5 or 8 of Table I, application no. 18, preferably the coding region thereof, or a homolog or a fragment thereof, whereby the respective line disclose in column 7 the fine chemical montanic acid;
[95021] in an organelle, preferably in plastids or mitochondria, especially in plastids, in a non-human organism or a part thereof; preferably a microorganism, a plant cell, a plant or a part thereof, as compared to a corresponding non-transformed wild type non-human organism or a part thereof; or
[95022] (a2) increasing or generating the activity of a polypeptide comprising a polypeptide as depicted in the respective line in column 5 or 8 of Table II, application no. 18, or a homolog or a fragment thereof, a consensus sequence or at least one polypeptide motif as depicted in the respective line in column 8 of Table IV, application no. 18, which is joined to a transit peptide, whereby the respective line disclose in column 7 the fine chemical montanic acid; or
[95023] increasing or generating the activity of an expression product of one or more nucleic acid molecule(s) comprising a polynucleotide as depicted in the respective line in column 5 or 8 of Table I, application no. 18, preferably the coding region thereof, or a homolog or a fragment thereof, which is joined to a nucleic acid sequence encoding an organelle localization sequence, preferably a plastid or a mitochondrion localization sequence, especially a plastid localization sequence, whereby the respective line disclose in column 7 the fine chemical montanic acid;
[95024] in a non-human organism or a part thereof; preferably a microorganism, a plant cell, a plant or a part thereof, as compared to a corresponding non-transformed wild type non-human organism or a part thereof; or
[95025] (a3) increasing or generating the activity of a polypeptide comprising a polypeptide as depicted in the respective line in column 5 or 8 of Table II, application no. 18, or a homolog or a fragment thereof, a consensus sequence or at least one polypeptide motif as depicted in the respective line in column 8 of Table IV, application no. 18, whereby the respective line disclose in column 7 the fine chemical montanic acid; or
[95026] increasing or generating the activity of an expression product of one or more nucleic acid molecule(s) comprising a polynucleotide as depicted in the respective line in column 5 or 8 of Table I, application no. 18, preferably the coding region thereof, or a homolog or a fragment thereof, whereby the respective line disclose in column 7 the fine chemical montanic acid;
[95027] in an organelle, preferably in plastids or mitochondria, especially in plastids, in a non-human organism or a part thereof; preferably a microorganism, a plant cell, a plant or a part thereof, through transformation of the organelle, as compared to a corresponding non-transformed wild type non-human organism or a part thereof;
[95028] and
[95029] (b) growing the non-human organism under conditions which permit the production of montanic acid, or a composition comprising montanic acid in said non-human organism or in the culture medium surrounding said non-human organism.

[95030] Accordingly, the present invention relates to a process for the production of lignoceric acid, which comprises
[95031] (a) increasing or generating the activity of a eukaryotic translation initiation factor 5 in the cytosol of a cell of a non-human organism or a part thereof, preferably a microorganism, a plant cell, a plant or a part thereof, as compared to a corresponding non-transformed wild type non-human organism or a part thereof; and
[95032] (b) growing the non-human organism or a part thereof under conditions which permit the production of lignoceric acid or a composition comprising lignoceric acid in said non-human organism or in the culture medium surrounding said non-human organism.

[95033] Accordingly, the present invention relates to a process for the production of lignoceric acid, which comprises
[95034] (a) increasing or generating the activity of a protein kinase in the cytosol of a cell of a non-human organism or a part thereof, preferably a microorganism, a plant cell, a plant or a part thereof, as compared to a corresponding non-transformed wild type non-human organism or a part thereof; and
[95035] (b) growing the non-human organism or a part thereof under conditions which permit the production of lignoceric acid or a composition comprising lignoceric acid in said non-human organism or in the culture medium surrounding said non-human organism.

[95036] Accordingly, the present invention relates to a process for the production of lignoceric acid, which comprises
[95037] (a) increasing or generating the activity of a thioredoxin family protein in the cytosol of a cell of a non-human organism or a part thereof, preferably a microorganism, a plant cell, a plant or a part thereof, as compared to a corresponding non-transformed wild type non-human organism or a part thereof; and
[95038] (b) growing the non-human organism or a part thereof under conditions which permit the production of lignoceric acid or a composition comprising lignoceric acid in said non-human organism or in the culture medium surrounding said non-human organism.

[95039] Accordingly, the present invention relates to a process for the production of lignoceric acid, which comprises
[95040] (a) increasing or generating the activity of a monodehydroascorbate reductase in the cytosol of a cell of a non-human organism or a part thereof, preferably a microorganism, a plant cell, a plant or a part thereof, as compared to a corresponding non-transformed wild type non-human organism or a part thereof; and
[95041] (b) growing the non-human organism or a part thereof under conditions which permit the production of lignoceric acid or a composition comprising lignoceric acid in said non-human organism or in the culture medium surrounding said non-human organism.

[95042] Accordingly, the present invention relates to a process for the production of lignoceric acid, which comprises
[95043] (a) increasing or generating the activity of a glycosyl transferase in the cytosol of a cell of a non-human organism or a part thereof, preferably a microorganism, a plant cell, a plant or a part thereof, as compared to a corresponding non-transformed wild type non-human organism or a part thereof; and
[95044] (b) growing the non-human organism or a part thereof under conditions which permit the production of lignoceric acid or a composition comprising lignoceric acid in said non-human organism or in the culture medium surrounding said non-human organism.

[95045] Accordingly, the present invention relates to a process for the production of lignoceric acid, which comprises
[95046] (a) increasing or generating the activity of a glutaredoxin in the cytosol of a cell of a non-human organism or a part thereof, preferably a microorganism, a plant cell, a plant or a part thereof, as compared to a corresponding non-transformed wild type non-human organism or a part thereof; and
[95047] (b) growing the non-human organism or a part thereof under conditions which permit the production of lignoceric acid or a composition comprising lignoceric acid in said non-human organism or in the culture medium surrounding said non-human organism.

[95048] Accordingly, the present invention relates to a process for the production of lignoceric acid, which comprises
[95049] (a) increasing or generating the activity of a heat shock transcription factor in the cytosol of a cell of a non-human organism or a part thereof, preferably a microorganism, a plant cell, a plant or a part thereof, as compared to a corresponding non-transformed wild type non-human organism or a part thereof; and
[95050] (b) growing the non-human organism or a part thereof under conditions which permit the production of lignoceric acid or a composition comprising lignoceric acid in said non-human organism or in the culture medium surrounding said non-human organism.

[95051] Accordingly, the present invention relates to a process for the production of lignoceric acid, which comprises
[95052] (a) increasing or generating the activity of a calcium-dependent protein kinase in the cytosol of a cell of a non-human organism or a part thereof, preferably a microorganism, a plant cell, a plant or a part thereof, as compared to a corresponding non-transformed wild type non-human organism or a part thereof; and
[95053] (b) growing the non-human organism or a part thereof under conditions which permit the production of lignoceric acid or a composition comprising lignoceric acid in said non-human organism or in the culture medium surrounding said non-human organism.

[95054] Accordingly, the present invention relates to a process for the production of lignoceric acid, which comprises
[95055] (a) increasing or generating the activity of a gibberellin 20-oxidase in the cytosol of a cell of a non-human organism or a part thereof, preferably a microorganism, a plant cell, a plant or a part thereof, as compared to a corresponding non-transformed wild type non-human organism or a part thereof; and
[95056] (b) growing the non-human organism or a part thereof under conditions which permit the production of lignoceric acid or a composition comprising lignoceric acid in said non-human organism or in the culture medium surrounding said non-human organism.

[95057] Accordingly, the present invention relates to a process for the production of lignoceric acid, which comprises
[95058] (a) increasing or generating the activity of a zinc finger protein in the cytosol of a cell of a non-human organism or a part thereof, preferably a microorganism, a plant cell, a plant or a part thereof, as compared to a corresponding non-transformed wild type non-human organism or a part thereof; and
[95059] (b) growing the non-human organism or a part thereof under conditions which permit the production of lignoceric acid or a composition comprising lignoceric acid in said non-human organism or in the culture medium surrounding said non-human organism.

[95060] Accordingly, the present invention relates to a process for the production of lignoceric acid, which comprises
[95061] (a) increasing or generating the activity of a aminotransferase in the cytosol of a cell of a non-human organism or a part thereof, preferably a microorganism, a plant cell, a plant or a part thereof, as compared to a corresponding non-transformed wild type non-human organism or a part thereof; and
[95062] (b) growing the non-human organism or a part thereof under conditions which permit the production of lignoceric acid or a composition comprising lignoceric acid in said non-human organism or in the culture medium surrounding said non-human organism.

[95063] Accordingly, the present invention relates to a process for the production of lignoceric acid, which comprises
[95064] (a) increasing or generating the activity of a hydrolase in the cytosol of a cell of a non-human organism or a part thereof, preferably a microorganism, a plant cell, a plant or a part thereof, as compared to a corresponding non-transformed wild type non-human organism or a part thereof; and
[95065] (b) growing the non-human organism or a part thereof under conditions which permit the production of lignoceric acid or a composition comprising lignoceric acid in said non-human organism or in the culture medium surrounding said non-human organism.

[95066] Accordingly, the present invention relates to a process for the production of lignoceric acid, which comprises
[95067] (a) increasing or generating the activity of a glutamate-ammonia-ligase in the cytosol of a cell of a non-human organism or a part thereof, preferably a microorganism, a plant cell, a plant or a part thereof, as compared to a corresponding non-transformed wild type non-human organism or a part thereof; and
[95068] (b) growing the non-human organism or a part thereof under conditions which permit the production of lignoceric acid or a composition comprising lignoceric acid in said non-human organism or in the culture medium surrounding said non-human organism.

[95069] Accordingly, the present invention relates to a process for the production of lignoceric acid, which comprises
[95070] (a) increasing or generating the activity of a oxidoreductase in the cytosol of a cell of a non-human organism or a part thereof, preferably a microorganism, a plant cell, a plant or a part thereof, as compared to a corresponding non-transformed wild type non-human organism or a part thereof; and
[95071] (b) growing the non-human organism or a part thereof under conditions which permit the production of lignoceric acid or a composition comprising lignoceric acid in said non-human organism or in the culture medium surrounding said non-human organism.

[95072] Accordingly, the present invention relates to a process for the production of lignoceric acid, which comprises
[95073] (a) increasing or generating the activity of a chaperone protein CIpB in the cytosol of a cell of a non-human organism or a part thereof, preferably a microorganism, a plant cell, a plant or a part thereof, as compared to a corresponding non-transformed wild type non-human organism or a part thereof; and
[95074] (b) growing the non-human organism or a part thereof under conditions which permit the production of lignoceric acid or a composition comprising lignoceric acid in said non-human organism or in the culture medium surrounding said non-human organism.

[95075] Accordingly, the present invention relates to a process for the production of lignoceric acid, which comprises
[95076] (a) increasing or generating the activity of a purine nucleoside phosphorylase in the cytosol of a cell of a non-human organism or a part thereof, preferably a microorganism, a plant cell, a plant or a part thereof, as compared to a corresponding non-transformed wild type non-human organism or a part thereof; and
[95077] (b) growing the non-human organism or a part thereof under conditions which permit the production of lignoceric acid or a composition comprising lignoceric acid in said non-human organism or in the culture medium surrounding said non-human organism.

[95078] Accordingly, the present invention relates to a process for the production of lignoceric acid, which comprises
[95079] (a) increasing or generating the activity of a threonine synthase in the cytosol of a cell of a non-human organism or a part thereof, preferably a microorganism, a plant cell, a plant or a part thereof, as compared to a corresponding non-transformed wild type non-human organism or a part thereof; and
[95080] (b) growing the non-human organism or a part thereof under conditions which permit the production of lignoceric acid or a composition comprising lignoceric acid in said non-human organism or in the culture medium surrounding said non-human organism.

[95081] Accordingly, the present invention relates to a process for the production of lignoceric acid, which comprises
[95082] (a) increasing or generating the activity of a serine protease in the cytosol of a cell of a non-human organism or a part thereof, preferably a microorganism, a plant cell, a plant or a part thereof, as compared to a corresponding non-transformed wild type non-human organism or a part thereof; and
[95083] (b) growing the non-human organism or a part thereof under conditions which permit the production of lignoceric acid or a composition comprising lignoceric acid in said non-human organism or in the culture medium surrounding said non-human organism.

[95084] Accordingly, the present invention relates to a process for the production of lignoceric acid, which comprises
[95085] (a) increasing or generating the activity of a ATP-binding component of a transport system in the cytosol of a cell of a non-human organism or a part thereof, preferably a microorganism, a plant cell, a plant or a part thereof, as compared to a corresponding non-transformed wild type non-human organism or a part thereof; and
[95086] (b) growing the non-human organism or a part thereof under conditions which permit the production of lignoceric acid or a composition comprising lignoceric acid in said non-human organism or in the culture medium surrounding said non-human organism.

[95087] Accordingly, the present invention relates to a process for the production of lignoceric acid, which comprises
[95088] (a) increasing or generating the activity of a isochorismate synthase in the cytosol of a cell of a non-human organism or a part thereof, preferably a microorganism, a plant cell, a plant or a part thereof, as compared to a corresponding non-transformed wild type non-human organism or a part thereof; and
[95089] (b) growing the non-human organism or a part thereof under conditions which permit the production of lignoceric acid or a composition comprising lignoceric acid in said non-human organism or in the culture medium surrounding said non-human organism.

[95090] Accordingly, the present invention relates to a process for the production of lignoceric acid, which comprises
[95091] (a) increasing or generating the activity of a leucyl/phenylalanyl-tRNA-protein transferase in the cytosol of a cell of a non-human organism or a part thereof, preferably a microorganism, a plant cell, a plant or a part thereof, as compared to a corresponding non-transformed wild type non-human organism or a part thereof; and
[95092] (b) growing the non-human organism or a part thereof under conditions which permit the production of lignoceric acid or a composition comprising lignoceric acid in said non-human organism or in the culture medium surrounding said non-human organism.

[95093] Accordingly, the present invention relates to a process for the production of lignoceric acid, which comprises
[95094] (a) increasing or generating the activity of a major facilitator superfamily transporter protein in the cytosol of a cell of a non-human organism or a part thereof, preferably a microorganism, a plant cell, a plant or a part thereof, as compared to a corresponding non-transformed wild type non-human organism or a part thereof; and
[95095] (b) growing the non-human organism or a part thereof under conditions which permit the production of lignoceric acid or a composition comprising lignoceric acid in said non-human organism or in the culture medium surrounding said non-human organism.

[95096] Accordingly, the present invention relates to a process for the production of cerotic acid, which comprises
[95097] (a) increasing or generating the activity of a multidrug resistance protein in the cytosol of a cell of a non-human organism or a part thereof, preferably a microorganism, a plant cell, a plant or a part thereof, as compared to a corresponding non-transformed wild type non-human organism or a part thereof; and
[95098] (b) growing the non-human organism or a part thereof under conditions which permit the production of cerotic acid or a composition comprising cerotic acid in said non-human organism or in the culture medium surrounding said non-human organism.

[95099] Accordingly, the present invention relates to a process for the production of lignoceric acid, which comprises
[95100] (a) increasing or generating the activity of a sodium/proton antiporter in the cytosol of a cell of a non-human organism or a part thereof, preferably a microorganism, a plant cell, a plant or a part thereof, as compared to a corresponding non-transformed wild type non-human organism or a part thereof; and
[95101] (b) growing the non-human organism or a part thereof under conditions which permit the production of lignoceric acid or a composition comprising lignoceric acid in said non-human organism or in the culture medium surrounding said non-human organism.

[95102] Accordingly, the present invention relates to a process for the production of lignoceric acid, which comprises
[95103] (a) increasing or generating the activity of a cardiolipin synthase in the cytosol of a cell of a non-human organism or a part thereof, preferably a microorganism, a plant cell, a plant or a part thereof, as compared to a corresponding non-transformed wild type non-human organism or a part thereof; and
[95104] (b) growing the non-human organism or a part thereof under conditions which permit the production of lignoceric acid or a composition comprising lignoceric acid in said non-human organism or in the culture medium surrounding said non-human organism.

[95105] Accordingly, the present invention relates to a process for the production of lignoceric acid, which comprises
[95106] (a) increasing or generating the activity of a b1522-protein in the cytosol of a cell of a non-human organism or a part thereof, preferably a microorganism, a plant cell, a plant or a part thereof, as compared to a corresponding non-transformed wild type non-human organism or a part thereof; and
[95107] (b) growing the non-human organism or a part thereof under conditions which permit the production of lignoceric acid or a composition comprising lignoceric acid in said non-human organism or in the culture medium surrounding said non-human organism.

[95108] Accordingly, the present invention relates to a process for the production of cerotic acid, which comprises
[95109] (a) increasing or generating the activity of a acid shock protein in the cytosol of a cell of a non-human organism or a part thereof, preferably a microorganism, a plant cell, a plant or a part thereof, as compared to a corresponding non-transformed wild type non-human organism or a part thereof; and
[95110] (b) growing the non-human organism or a part thereof under conditions which permit the production of cerotic acid or a composition comprising cerotic acid in said non-human organism or in the culture medium surrounding said non-human organism.

[95111] Accordingly, the present invention relates to a process for the production of lignoceric acid, which comprises
[95112] (a) increasing or generating the activity of a acid shock protein in the cytosol of a cell of a non-human organism or a part thereof, preferably a microorganism, a plant cell, a plant or a part thereof, as compared to a corresponding non-transformed wild type non-human organism or a part thereof; and
[95113] (b) growing the non-human organism or a part thereof under conditions which permit the production of lignoceric acid or a composition comprising lignoceric acid in said non-human organism or in the culture medium surrounding said non-human organism.

[95114] Accordingly, the present invention relates to a process for the production of lignoceric acid, which comprises
[95115] (a) increasing or generating the activity of a O-antigen chain length determinant in the cytosol of a cell of a non-human organism or a part thereof, preferably a microorganism, a plant cell, a plant or a part thereof, as compared to a corresponding non-transformed wild type non-human organism or a part thereof; and
[95116] (b) growing the non-human organism or a part thereof under conditions which permit the production of lignoceric acid or a composition comprising lignoceric acid in said non-human organism or in the culture medium surrounding said non-human organism.

[95117] Accordingly, the present invention relates to a process for the production of lignoceric acid, which comprises
[95118] (a) increasing or generating the activity of a NADH dehydrogenase subunit N in the cytosol of a cell of a non-human organism or a part thereof, preferably a microorganism, a plant cell, a plant or a part thereof, as compared to a corresponding non-transformed wild type non-human organism or a part thereof; and
[95119] (b) growing the non-human organism or a part thereof under conditions which permit the production of lignoceric acid or a composition comprising lignoceric acid in said non-human organism or in the culture medium surrounding said non-human organism.

[95120] Accordingly, the present invention relates to a process for the production of lignoceric acid, which comprises
[95121] (a) increasing or generating the activity of a 2,3-dihydroxy-2,3-dihydrophenylpropionatedehydrogenase in the cytosol of a cell of a non-human organism or a part thereof, preferably a microorganism, a plant cell, a plant or a part thereof, as compared to a corresponding non-transformed wild type non-human organism or a part thereof; and
[95122] (b) growing the non-human organism or a part thereof under conditions which permit the production of lignoceric acid or a composition comprising lignoceric acid in said non-human organism or in the culture medium surrounding said non-human organism.

[95123] Accordingly, the present invention relates to a process for the production of lignoceric acid, which comprises
[95124] (a) increasing or generating the activity of a b3083-protein in the cytosol of a cell of a non-human organism or a part thereof, preferably a microorganism, a plant cell, a plant or a part thereof, as compared to a corresponding non-transformed wild type non-human organism or a part thereof; and
[95125] (b) growing the non-human organism or a part thereof under conditions which permit the production of lignoceric acid or a composition comprising lignoceric acid in said non-human organism or in the culture medium surrounding said non-human organism.

[95126] Accordingly, the present invention relates to a process for the production of lignoceric acid, which comprises
[95127] (a) increasing or generating the activity of a b3812-protein in the cytosol of a cell of a non-human organism or a part thereof, preferably a microorganism, a plant cell, a plant or a part thereof, as compared to a corresponding non-transformed wild type non-human organism or a part thereof; and
[95128] (b) growing the non-human organism or a part thereof under conditions which permit the production of lignoceric acid or a composition comprising lignoceric acid in said non-human organism or in the culture medium surrounding said non-human organism.

[95129] Accordingly, the present invention relates to a process for the production of lignoceric acid, which comprises
[95130] (a) increasing or generating the activity of a b4029-protein in the cytosol of a cell of a non-human organism or a part thereof, preferably a microorganism, a plant cell, a plant or a part thereof, as compared to a corresponding non-transformed wild type non-human organism or a part thereof; and
[95131] (b) growing the non-human organism or a part thereof under conditions which permit the production of lignoceric acid or a composition comprising lignoceric acid in said non-human organism or in the culture medium surrounding said non-human organism.

[95132] Accordingly, the present invention relates to a process for the production of lignoceric acid, which comprises
[95133] (a) increasing or generating the activity of a acetyltransferase in the cytosol of a cell of a non-human organism or a part thereof, preferably a microorganism, a plant cell, a plant or a part thereof, as compared to a corresponding non-transformed wild type non-human organism or a part thereof; and
[95134] (b) growing the non-human organism or a part thereof under conditions which permit the production of lignoceric acid or a composition comprising lignoceric acid in said non-human organism or in the culture medium surrounding said non-human organism.

[95135] Accordingly, the present invention relates to a process for the production of lignoceric acid, which comprises
[95136] (a) increasing or generating the activity of a glutaredoxin in the cytosol of a cell of a non-human organism or a part thereof, preferably a microorganism, a plant cell, a plant or a part thereof, as compared to a corresponding non-transformed wild type non-human organism or a part thereof; and
[95137] (b) growing the non-human organism or a part thereof under conditions which permit the production of lignoceric acid or a composition comprising lignoceric acid in said non-human organism or in the culture medium surrounding said non-human organism.

[95138] Accordingly, the present invention relates to a process for the production of lignoceric acid, which comprises
[95139] (a) increasing or generating the activity of a cyclin D in the cytosol of a cell of a non-human organism or a part thereof, preferably a microorganism, a plant cell, a plant or a part thereof, as compared to a corresponding non-transformed wild type non-human organism or a part thereof; and
[95140] (b) growing the non-human organism or a part thereof under conditions which permit the production of lignoceric acid or a composition comprising lignoceric acid in said non-human organism or in the culture medium surrounding said non-human organism.

[95141] Accordingly, the present invention relates to a process for the production of lignoceric acid, which comprises
[95142] (a) increasing or generating the activity of a sll0064-protein in the cytosol of a cell of a non-human organism or a part thereof, preferably a microorganism, a plant cell, a plant or a part thereof, as compared to a corresponding non-transformed wild type non-human organism or a part thereof; and
[95143] (b) growing the non-human organism or a part thereof under conditions which permit the production of lignoceric acid or a composition comprising lignoceric acid in said non-human organism or in the culture medium surrounding said non-human organism.

[95144] Accordingly, the present invention relates to a process for the production of lignoceric acid, which comprises
[95145] (a) increasing or generating the activity of a agmatinase in the cytosol of a cell of a non-human organism or a part thereof, preferably a microorganism, a plant cell, a plant or a part thereof, as compared to a corresponding non-transformed wild type non-human organism or a part thereof; and
[95146] (b) growing the non-human organism or a part thereof under conditions which permit the production of lignoceric acid or a composition comprising lignoceric acid in said non-human organism or in the culture medium surrounding said non-human organism.

[95147] Accordingly, the present invention relates to a process for the production of lignoceric acid, which comprises
[95148] (a) increasing or generating the activity of a uroporphyrin-III C-methyltransferase in the cytosol of a cell of a non-human organism or a part thereof, preferably a microorganism, a plant cell, a plant or a part thereof, as compared to a corresponding non-transformed wild type non-human organism or a part thereof; and
[95149] (b) growing the non-human organism or a part thereof under conditions which permit the production of lignoceric acid or a composition comprising lignoceric acid in said non-human organism or in the culture medium surrounding said non-human organism.

[95150] Accordingly, the present invention relates to a process for the production of lignoceric acid, which comprises
[95151] (a) increasing or generating the activity of a binding-protein-dependent transport systems inner membrane component in the cytosol of a cell of a non-human organism or a part thereof, preferably a microorganism, a plant cell, a plant or a part thereof, as compared to a corresponding non-transformed wild type non-human organism or a part thereof; and
[95152] (b) growing the non-human organism or a part thereof under conditions which permit the production of lignoceric acid or a composition comprising lignoceric acid in said non-human organism or in the culture medium surrounding said non-human organism.

[95153] Accordingly, the present invention relates to a process for the production of lignoceric acid, which comprises
[95154] (a) increasing or generating the activity of a malate dehydrogenase in the cytosol of a cell of a non-human organism or a part thereof, preferably a microorganism, a plant cell, a plant or a part thereof, as compared to a corresponding non-transformed wild type non-human organism or a part thereof; and
[95155] (b) growing the non-human organism or a part thereof under conditions which permit the production of lignoceric acid or a composition comprising lignoceric acid in said non-human organism or in the culture medium surrounding said non-human organism.

[95156] Accordingly, the present invention relates to a process for the production of lignoceric acid, which comprises
[95157] (a) increasing or generating the activity of a ABC metal ion transporter substrate-binding protein in the cytosol of a cell of a non-human organism or a part thereof, preferably a microorganism, a plant cell, a plant or a part thereof, as compared to a corresponding non-transformed wild type non-human organism or a part thereof; and
[95158] (b) growing the non-human organism or a part thereof under conditions which permit the production of lignoceric acid or a composition comprising lignoceric acid in said non-human organism or in the culture medium surrounding said non-human organism.

[95159] Accordingly, the present invention relates to a process for the production of lignoceric acid, which comprises
[95160] (a) increasing or generating the activity of a acyl transferase in the cytosol of a cell of a non-human organism or a part thereof, preferably a microorganism, a plant cell, a plant or a part thereof, as compared to a corresponding non-transformed wild type non-human organism or a part thereof; and
[95161] (b) growing the non-human organism or a part thereof under conditions which permit the production of lignoceric acid or a composition comprising lignoceric acid in said non-human organism or in the culture medium surrounding said non-human organism.

[95162] Accordingly, the present invention relates to a process for the production of lignoceric acid, which comprises
[95163] (a) increasing or generating the activity of a slr0383-protein in the cytosol of a cell of a non-human organism or a part thereof, preferably a microorganism, a plant cell, a plant or a part thereof, as compared to a corresponding non-transformed wild type non-human organism or a part thereof; and
[95164] (b) growing the non-human organism or a part thereof under conditions which permit the production of lignoceric acid or a composition comprising lignoceric acid in said non-human organism or in the culture medium surrounding said non-human organism.

[95165] Accordingly, the present invention relates to a process for the production of lignoceric acid, which comprises
[95166] (a) increasing or generating the activity of a geranylgeranyl pyrophosphate synthase in the cytosol of a cell of a non-human organism or a part thereof, preferably a microorganism, a plant cell, a plant or a part thereof, as compared to a corresponding non-transformed wild type non-human organism or a part thereof; and
[95167] (b) growing the non-human organism or a part thereof under conditions which permit the production of lignoceric acid or a composition comprising lignoceric acid in said non-human organism or in the culture medium surrounding said non-human organism.

[95168] Accordingly, the present invention relates to a process for the production of lignoceric acid, which comprises
[95169] (a) increasing or generating the activity of a tryptophan synthase alpha chain in the cytosol of a cell of a non-human organism or a part thereof, preferably a microorganism, a plant cell, a plant or a part thereof, as compared to a corresponding non-transformed wild type non-human organism or a part thereof; and
[95170] (b) growing the non-human organism or a part thereof under conditions which permit the production of lignoceric acid or a composition comprising lignoceric acid in said non-human organism or in the culture medium surrounding said non-human organism.

[95171] Accordingly, the present invention relates to a process for the production of lignoceric acid, which comprises
[95172] (a) increasing or generating the activity of a rubredoxin in the cytosol of a cell of a non-human organism or a part thereof, preferably a microorganism, a plant cell, a plant or a part thereof, as compared to a corresponding non-transformed wild type non-human organism or a part thereof; and
[95173] (b) growing the non-human organism or a part thereof under conditions which permit the production of lignoceric acid or a composition comprising lignoceric acid in said non-human organism or in the culture medium surrounding said non-human organism.

[95174] Accordingly, the present invention relates to a process for the production of lignoceric acid, which comprises
[95175] (a) increasing or generating the activity of a Sec-independent protein translocase subunit in the cytosol of a cell of a non-human organism or a part thereof, preferably a microorganism, a plant cell, a plant or a part thereof, as compared to a corresponding non-transformed wild type non-human organism or a part thereof; and
[95176] (b) growing the non-human organism or a part thereof under conditions which permit the production of lignoceric acid or a composition comprising lignoceric acid in said non-human organism or in the culture medium surrounding said non-human organism.

[95177] Accordingly, the present invention relates to a process for the production of lignoceric acid, which comprises
[95178] (a) increasing or generating the activity of a TTC0768-protein in the cytosol of a cell of a non-human organism or a part thereof, preferably a microorganism, a plant cell, a plant or a part thereof, as compared to a corresponding non-transformed wild type non-human organism or a part thereof; and
[95179] (b) growing the non-human organism or a part thereof under conditions which permit the production of lignoceric acid or a composition comprising lignoceric acid in said non-human organism or in the culture medium surrounding said non-human organism.

[95180] Accordingly, the present invention relates to a process for the production of lignoceric acid, which comprises
[95181] (a) increasing or generating the activity of a TTC1386-protein in the cytosol of a cell of a non-human organism or a part thereof, preferably a microorganism, a plant cell, a plant or a part thereof, as compared to a corresponding non-transformed wild type non-human organism or a part thereof; and
[95182] (b) growing the non-human organism or a part thereof under conditions which permit the production of lignoceric acid or a composition comprising lignoceric acid in said non-human organism or in the culture medium surrounding said non-human organism.

[95183] Accordingly, the present invention relates to a process for the production of lignoceric acid, which comprises
[95184] (a) increasing or generating the activity of a acetyl-coenzyme A synthetase in the cytosol of a cell of a non-human organism or a part thereof, preferably a microorganism, a plant cell, a plant or a part thereof, as compared to a corresponding non-transformed wild type non-human organism or a part thereof; and
[95185] (b) growing the non-human organism or a part thereof under conditions which permit the production of lignoceric acid or a composition comprising lignoceric acid in said non-human organism or in the culture medium surrounding said non-human organism.

[95186] Accordingly, the present invention relates to a process for the production of lignoceric acid, which comprises
[95187] (a) increasing or generating the activity of a peroxisome assembly protein in the cytosol of a cell of a non-human organism or a part thereof, preferably a microorganism, a plant cell, a plant or a part thereof, as compared to a corresponding non-transformed wild type non-human organism or a part thereof; and
[95188] (b) growing the non-human organism or a part thereof under conditions which permit the production of lignoceric acid or a composition comprising lignoceric acid in said non-human organism or in the culture medium surrounding said non-human organism.

[95189] Accordingly, the present invention relates to a process for the production of heneicosanoic acid, which comprises
[95190] (a) increasing or generating the activity of a inositol-3-phosphate synthase in the cytosol of a cell of a non-human organism or a part thereof, preferably a microorganism, a plant cell, a plant or a part thereof, as compared to a corresponding non-transformed wild type non-human organism or a part thereof; and
[95191] (b) growing the non-human organism or a part thereof under conditions which permit the production of heneicosanoic acid or a composition comprising heneicosanoic acid in said non-human organism or in the culture medium surrounding said non-human organism.

[95192] Accordingly, the present invention relates to a process for the production of lignoceric acid, which comprises
[95193] (a) increasing or generating the activity of a cystathionine gamma-synthase in the cytosol of a cell of a non-human organism or a part thereof, preferably a microorganism, a plant cell, a plant or a part thereof, as compared to a corresponding non-transformed wild type non-human organism or a part thereof; and
[95194] (b) growing the non-human organism or a part thereof under conditions which permit the production of lignoceric acid or a composition comprising lignoceric acid in said non-human organism or in the culture medium surrounding said non-human organism.

[95195] Accordingly, the present invention relates to a process for the production of lignoceric acid, which comprises
[95196] (a) increasing or generating the activity of a potassium transport protein in the cytosol of a cell of a non-human organism or a part thereof, preferably a microorganism, a plant cell, a plant or a part thereof, as compared to a corresponding non-transformed wild type non-human organism or a part thereof; and
[95197] (b) growing the non-human organism or a part thereof under conditions which permit the production of lignoceric acid or a composition comprising lignoceric acid in said non-human organism or in the culture medium surrounding said non-human organism.

[95198] Accordingly, the present invention relates to a process for the production of lignoceric acid, which comprises
[95199] (a) increasing or generating the activity of a ylr065c-protein in the cytosol of a cell of a non-human organism or a part thereof, preferably a microorganism, a plant cell, a plant or a part thereof, as compared to a corresponding non-transformed wild type non-human organism or a part thereof; and
[95200] (b) growing the non-human organism or a part thereof under conditions which permit the production of lignoceric acid or a composition comprising lignoceric acid in said non-human organism or in the culture medium surrounding said non-human organism.

[95201] Accordingly, the present invention relates to a process for the production of lignoceric acid, which comprises
[95202] (a) increasing or generating the activity of a yml093w-protein in the cytosol of a cell of a non-human organism or a part thereof, preferably a microorganism, a plant cell, a plant or a part thereof, as compared to a corresponding non-transformed wild type non-human organism or a part thereof; and
[95203] (b) growing the non-human organism or a part thereof under conditions which permit the production of lignoceric acid or a composition comprising lignoceric acid in said non-human organism or in the culture medium surrounding said non-human organism.

[95204] Accordingly, the present invention relates to a process for the production of lignoceric acid, which comprises
[95205] (a) increasing or generating the activity of a mitochondrial inner membrane protease subunit in the cytosol of a cell of a non-human organism or a part thereof, preferably a microorganism, a plant cell, a plant or a part thereof, as compared to a corresponding non-transformed wild type non-human organism or a part thereof; and
[95206] (b) growing the non-human organism or a part thereof under conditions which permit the production of lignoceric acid or a composition comprising lignoceric acid in said non-human organism or in the culture medium surrounding said non-human organism.

[95207] Accordingly, the present invention relates to a process for the production of lignoceric acid, which comprises
[95208] (a) increasing or generating the activity of a mevalonate kinase in the cytosol of a cell of a non-human organism or a part thereof, preferably a microorganism, a plant cell, a plant or a part thereof, as compared to a corresponding non-transformed wild type non-human organism or a part thereof; and
[95209] (b) growing the non-human organism or a part thereof under conditions which permit the production of lignoceric acid or a composition comprising lignoceric acid in said non-human organism or in the culture medium surrounding said non-human organism.

[95210] Accordingly, the present invention relates to a process for the production of melissic acid which comprises
[95211] (a) increasing or generating the activity of a yer152c-protein in the cytosol of a cell of a non-human organism or a part thereof, preferably a microorganism, a plant cell, a plant or a part thereof, as compared to a corresponding non-transformed wild type non-human organism or a part thereof; and
[95212] (b) growing the non-human organism or a part thereof under conditions which permit the production of melissic acid or a composition comprising melissic acid in said non-human organism or in the culture medium surrounding said non-human organism.

[95213] Accordingly, the present invention relates to a process for the production of montanic acid, which comprises
[95214] (a) increasing or generating the activity of a yer152c-protein in the cytosol of a cell of a non-human organism or a part thereof, preferably a microorganism, a plant cell, a plant or a part thereof, as compared to a corresponding non-transformed wild type non-human organism or a part thereof; and
[95215] (b) growing the non-human organism or a part thereof under conditions which permit the production of montanic acid or a composition comprising montanic acid in said non-human organism or in the culture medium surrounding said non-human organism.

[95216] Accordingly, the present invention relates to a process for the production of melissic acid which comprises
[95217] (a) increasing or generating the activity of a b3644-protein in the cytosol of a cell of a non-human organism or a part thereof, preferably a microorganism, a plant cell, a plant or a part thereof, as compared to a corresponding non-transformed wild type non-human organism or a part thereof; and
[95218] (b) growing the non-human organism or a part thereof under conditions which permit the production of melissic acid or a composition comprising melissic acid in said non-human organism or in the culture medium surrounding said non-human organism.

[95219] Accordingly, the present invention relates to a process for the production of montanic acid, which comprises
[95220] (a) increasing or generating the activity of a b3644-protein in the cytosol of a cell of a non-human organism or a part thereof, preferably a microorganism, a plant cell, a plant or a part thereof, as compared to a corresponding non-transformed wild type non-human organism or a part thereof; and
[95221] (b) growing the non-human organism or a part thereof under conditions which permit the production of montanic acid or a composition comprising montanic acid in said non-human organism or in the culture medium surrounding said non-human organism.

[95222] Accordingly, the present invention relates to a process for the production of cerotic acid, which comprises
[95223] (a) increasing or generating the activity of a polypeptide comprising a polypeptide as depicted in the respective line in column 5 or 8 of Table II, application no. 18, or a homolog or a fragment thereof, a consensus sequence or at least one polypeptide motif as depicted in the respective line in column 8 of Table IV, application no. 18, whereby the respective line disclose in column 7 the fine chemical cerotic acid; or
[95224] increasing or generating the activity of an expression product of one or more nucleic acid molecule(s) comprising a polynucleotide as depicted in the respective line in column 5 or 8 of Table I, application no. 18, preferably the coding region thereof, or a homolog or a fragment thereof, whereby the respective line disclose in column 7 the fine chemical cerotic acid;
[95225] in the cytosol of a cell of a non-human organism or a part thereof; preferably a microorganism, a plant cell, a plant or a part thereof, as compared to a corresponding non-transformed wild type non-human organism or a part thereof; and
[95226] (b) growing the non-human organism under conditions which permit the production of cerotic acid, or a composition comprising cerotic acid in said non-human organism or in the culture medium surrounding said non-human organism.

[95227] Accordingly, the present invention relates to a process for the production of heneicosanoic acid, which comprises
[95228] (a) increasing or generating the activity of a polypeptide comprising a polypeptide as depicted in the respective line in column 5 or 8 of Table II, application no. 18, or a homolog or a fragment thereof, a consensus sequence or at least one polypeptide motif as depicted in the respective line in column 8 of Table IV, application no. 18, whereby the respective line disclose in column 7 the fine chemical heneicosanoic acid; or
[95229] increasing or generating the activity of an expression product of one or more nucleic acid molecule(s) comprising a polynucleotide as depicted in the respective line in column 5 or 8 of Table I, application no. 18, preferably the coding region thereof, or a homolog or a fragment thereof, whereby the respective line disclose in column 7 the fine chemical heneicosanoic acid;
[95230] in the cytosol of a cell of a non-human organism or a part thereof; preferably a microorganism, a plant cell, a plant or a part thereof, as compared to a corresponding non-transformed wild type non-human organism or a part thereof; and
[95231] (b) growing the non-human organism under conditions which permit the production of heneicosanoic acid, or a composition comprising heneicosanoic acid in said non-human organism or in the culture medium surrounding said non-human organism.

[95232] Accordingly, the present invention relates to a process for the production of lignoceric acid, which comprises
[95233] (a) increasing or generating the activity of a polypeptide comprising a polypeptide as depicted in the respective line in column 5 or 8 of Table II, application no. 18, or a homolog or a fragment thereof, a consensus sequence or at least one polypeptide motif as depicted in the respective line in column 8 of Table IV, application no. 18, whereby the respective line disclose in column 7 the fine chemical lignoceric acid; or
[95234] increasing or generating the activity of an expression product of one or more nucleic acid molecule(s) comprising a polynucleotide as depicted in the respective line in column 5 or 8 of Table I, application no. 18, preferably the coding region thereof, or a homolog or a fragment thereof, whereby the respective line disclose in column 7 the fine chemical lignoceric acid;
[95235] in the cytosol of a cell of a non-human organism or a part thereof; preferably a microorganism, a plant cell, a plant or a part thereof, as compared to a corresponding non-transformed wild type non-human organism or a part thereof; and
[95236] (b) growing the non-human organism under conditions which permit the production of lignoceric acid, or a composition comprising lignoceric acid in said non-human organism or in the culture medium surrounding said non-human organism.

[95237] Accordingly, the present invention relates to a process for the production of melissic acid which comprises
[95238] (a) increasing or generating the activity of a polypeptide comprising a polypeptide as depicted in the respective line in column 5 or 8 of Table II, application no. 18, or a homolog or a fragment thereof, a consensus sequence or at least one polypeptide motif as depicted in the respective line in column 8 of Table IV, application no. 18, whereby the respective line disclose in column 7 the fine chemical melissic acid; or
[95239] increasing or generating the activity of an expression product of one or more nucleic acid molecule(s) comprising a polynucleotide as depicted in the respective line in column 5 or 8 of Table I, application no. 18, preferably the coding region thereof, or a homolog or a fragment thereof, whereby the respective line disclose in column 7 the fine chemical melissic acid;
[95240] in the cytosol of a cell of a non-human organism or a part thereof; preferably a microorganism, a plant cell, a plant or a part thereof, as compared to a corresponding non-transformed wild type non-human organism or a part thereof; and
[95241] (b) growing the non-human organism under conditions which permit the production of melissic acid or a composition comprising melissic acid in said non-human organism or in the culture medium surrounding said non-human organism.

[95242] Accordingly, the present invention relates to a process for the production of montanic acid, which comprises
[95243] (a) increasing or generating the activity of a polypeptide comprising a polypeptide as depicted in the respective line in column 5 or 8 of Table II, application no. 18, or a homolog or a fragment thereof, a consensus sequence or at least one polypeptide motif as depicted in the respective line in column 8 of Table IV, application no. 18, whereby the respective line disclose in column 7 the fine chemical montanic acid; or
[95244] increasing or generating the activity of an expression product of one or more nucleic acid molecule(s) comprising a polynucleotide as depicted in the respective line in column 5 or 8 of Table I, application no. 18, preferably the coding region thereof, or a homolog or a fragment thereof, whereby the respective line disclose in column 7 the fine chemical montanic acid;
[95245] in the cytosol of a cell of a non-human organism or a part thereof; preferably a microorganism, a plant cell, a plant or a part thereof, as compared to a corresponding non-transformed wild type non-human organism or a part thereof; and
[95246] (b) growing the non-human organism under conditions which permit the production of montanic acid, or a composition comprising montanic acid in said non-human organism or in the culture medium surrounding said non-human organism.

[95247] In a further embodiment the activity of the polypeptide comprising a polypeptide as depicted in the respective line in column 5 or 8 of Table II, application no. 18, or a homolog or a fragment thereof, a consensus sequence or at least one polypeptide motif as depicted in the respective line in column 8 of Table IV, application no. 18, is increased or generated non-targeted in the above-mentioned process in a microorganism or plant or a part thereof.

[95248] In a further embodiment said polypeptide has the activity of the respective polypeptide represented by a protein comprising a polypeptide as depicted in the respective line in column 5 of Table II, application no. 18.

[95249] In a further embodiment the activity of the expression product of one or more nucleic acid molecule(s) comprising a polynucleotide as depicted in the respective line in column 5 or 8 of Table I, application no. 18, preferably the coding region thereof, or a homolog or a fragment thereof, is increased or generated non-targeted in the above-mentioned process in a microorganism or plant or a part thereof.

[95250] In a further embodiment the activity of the polypeptide comprising a polypeptide as depicted in the respective line in column 5 or 8 of Table II, application no. 18, or a homolog or a fragment thereof, a consensus sequence or at least one polypeptide motif as depicted in the respective line in column 8 of Table IV, application no. 18, is increased or generated in the above-mentioned process in an organelle preferably in plastids or mitochondria, especially in plastids, of a microorganism or plant.

[95251] In a further embodiment said polypeptide has the activity of the respective polypeptide represented by a protein comprising a polypeptide as depicted in the respective line in column 5 of Table II, application no. 18.

[95252] In a further embodiment the activity of the expression product of one or more nucleic acid molecule(s) comprising a polynucleotide as depicted in the respective line in column 5 or 8 of Table I, application no. 18, preferably the coding region thereof, or a homolog or a fragment thereof, is increased or generated in the above-mentioned process in an organelle, preferably in plasids or mitochondria, especially in plastids, of a microorganism or plant.

[95253] In a further embodiment the activity of the polypeptide comprising a polypeptide as depicted in the respective line in column 5 or 8 of Table II, application no. 18, or a homolog or a fragment thereof, a consensus sequence or at least one polypeptide motif as depicted in the respective line in column 8 of Table IV, application no. 18, is increased or generated in the above-mentioned process in the cyctosol of a cell, of a microorganism or plant.

[95254] In a further embodiment said polypeptide has the activity of the respective polypeptide represented by a protein comprising a polypeptide as depicted in the respective line in column 5 of Table II, application no. 18.

[95255] In a further embodiment the activity of the expression product of one or more nucleic acid molecule(s) comprising a polynucleotide as depicted in the respective line in column 5 or 8 of Table I, application no. 18, preferably the coding region thereof, or a homolog or a fragment thereof, is increased or generated in the above-mentioned process in the cytosol of a cell, of a microorganism or plant.

[95256] [0039.1.7.18] to [0066.1.7.18] for the disclosure of these paragraphs see [0039.1.7.7] to [0066.1.7.7] above

[95257] As mentioned above the nucleic acid sequences coding for the proteins as shown in Table II, application no. 18, column 5 or 8, or homologs or fragments thereof, are joined to a nucleic acid sequence encoding a plastidic transit peptide, e.g, if for the nucleic acid molecule in Table I, column 6 the term “plastidic” is indicated. This nucleic acid sequence encoding a transit peptide ensures transport of the protein to the organelle. The nucleic acid sequence of the gene to be expressed and the nucleic acid sequence encoding the transit peptide are operably linked. Therefore the transit peptide coding sequence is fused in frame to the nucleic acid sequence coding for proteins as shown in Table II, application no. 18, column 5 or 8, or homologs or fragments thereof, e.g., if for the nucleic acid molecule in Table I, column 6 the term “plastidic” is indicated.

[95258] [0068.1.7.18] to [0072.1.7.18] for the disclosure of these paragraphs see [0068.1.7.7] to [0072.1.7.7] above

[95259] As mentioned above the nucleic acid sequences coding for the proteins as shown in the respective line in Table II, application no. 18, column 5 or 8, or homologs or fragments thereof, are joined to a nucleic acid sequence encoding a mitochondric transit peptide, e.g., if for the respective nucleic acid molecule in Table I, column 6 the term “mitochondric” is indicated. This nucleic acid sequence encoding a transit peptide ensures transport of the protein to the organelle. The nucleic acid sequence of the gene to be expressed and the nucleic acid sequence encoding the transit peptide are operably linked. Therefore the transit peptide encoding sequence is fused in frame to the nucleic acid sequence coding for proteins as shown in the respective line in Table II, application no. 18, column 5 or 8, or homologs or fragments thereof, e.g., if for the nucleic acid molecule in the respective line in Table I, column 6 the term “mitochondric” is indicated.

[95260] for the disclosure of this paragraph see [0074.1.7.7] above

[95261] for the disclosure of this paragraph see [0075.1.7.7] above

[95262] Nucleic acid sequences coding for the transit peptides may be chemically synthesized either in part or wholly according to structure of transit peptide sequences disclosed in the prior art. Said natural or chemically synthesized sequences can be directly linked to the sequences encoding the mature protein or via a linker nucleic acid sequence, which may be typically less than 500 base pairs, preferably less than 450, 400, 350, 300, 250 or 200 base pairs, more preferably less than 150, 100, 90, 80, 70, 60, 50, 40 or 30 base pairs and most preferably less than 25, 20, 15, 12, 9, 6 or 3 base pairs in length and are in frame to the coding sequence. Furthermore favorable nucleic acid sequences encoding transit peptides may comprise sequences derived from more than one biological and/or chemical source and may include a nucleic acid sequence derived from the amino-terminal region of the mature protein, which in its native state is linked to the transit peptide. In a preferred embodiment of the invention said amino-terminal region of the mature protein is typically less than 150 amino acids, preferably less than 140, 130, 120, 110, 100 or 90 amino acids, more preferably less than 80, 70, 60, 50, 40, 35, 30, 25 or 20 amino acids and most preferably less than 19, 18, 17, 16, 15, 14, 13, 12, 11 or 10 amino acids in length. But even shorter or longer stretches are also possible. In addition target sequences, which facilitate the transport of proteins to other cell compartments such as the vacuole, endoplasmic reticulum, golgi complex, glyoxysomes, peroxisomes, mitochondria (in case of a plastidal transit peptide) or plastids, especially chloroplasts (in case of a mitochondric transit peptide) may be also part of the inventive nucleic acid sequence. The proteins translated from said inventive nucleic acid sequences are a kind of fusion proteins that means the nucleic acid sequences encoding the plastidal transit peptide for example the ones shown in Table a, preferably the last one of the Table a are joint to the respective nucleic acid sequences shown in Table I, application no. 18, columns 5 or 8, especially the coding region thereof, or homologs or fragments thereof, in case of nucleic acid sequences being expressed in plastids, and that means the nucleic acid sequences encoding the mitochondric transit peptide for example the ones shown in Table b, preferably the last one of the Table b are joint to the respective nucleic acid sequences shown in Table I, application no. 18, columns 5 or 8, especially the coding region thereof, or homologs or fragments thereof, in case of nucleic acid sequences being expressed in mitochondria. The person skilled in the art is able to join said sequences in a functional manner. Advantageously the transit peptide part is cleaved off from the protein part shown in Table II, application no. 18, columns 5 or 8, or a homolog or fragment thereof, during or after the transport into the organelles, preferably into the plastids or mitochondria, respectively.

[95263] All products of the cleavage of the preferred transit peptide shown in the last line of Table a have preferably the N-terminal amino acid sequences QIA CSS or QIA EFQLTT in front of the start methionine of the respective protein mentioned in Table II, application no. 18, column 5 or 8. or homologs or fragments thereof. Other short amino acid sequences of an range of 1 to 20 amino acids preferable 2 to 15 amino acids, more preferable 3 to 10 amino acids most preferably 4 to 8 amino acids are also possible in front of the start methionine of the protein mentioned in Table II, application no. 18, columns 5 or 8, or homologs or fragments thereof. In case of the amino acid sequence QIA CSS the three amino acids in front of the start methionine are stemming from the LIC (=ligatation independent cloning) cassette. Said short amino acid sequence is preferred in the case of the expression of E. coli genes. In case of the amino acid sequence QIA EFQLTT the six amino acids in front of the start methionine are stemming from the LIC cassette. Said short amino acid sequence is preferred in the case of the expression of S. cerevisiae genes. The skilled worker knowns that other short sequences are also useful in the expression of the respective nucleic acid molecule comprising a polynucleotide as depicted in Table I, application no. 18, column 5 or 8, preferably the coding region thereof, or a homolog or a fragment thereof. Furthermore the skilled worker is aware of the fact that there is not a need for such short sequences in the expression of the genes.

[95264] for the disclosure of this paragraph see [0077.1.7.7] above

[95265] for the disclosure of this paragraph see [0078.1.7.7] above

[95266] Alternatively to the targeting of the respective sequences shown in Table II, application no. 18, columns 5 or 8, or homologs or fragments thereof, preferably of sequences in general encoded in the nucleus with the aid of the targeting sequences mentioned for example in Table a alone, Table b alone, or in combination with other targeting sequences preferably into plastids or mitochondria, respectively, the nucleic acids of the invention can directly be introduced into the plastidal or mitochondrial genome. Therefore in a preferred embodiment the respective nucleic acid sequences shown in the respective line in Table I, application no. 18, columns 5 or 8, preferably the coding region thereof, or homologs or fragments thereof, are directly introduced and expressed in plastids e.g., if for the nucleic acid molecule in the respective line in Table I, column 6, the term “plastidic” is indicated, or are directly introduced and expressed in mitochondria e.g., if for the nucleic acid molecule in the respective line in Table I, column 6 the term “mitochondric” is indicated. The term “introduced” in the context of this specification shall mean the insertion of a nucleic acid sequence into the organism by means of a “transfection”, “transduction” or preferably by “transformation”.

[95267] A plastid, such as a chloroplast, or a mitochondrion, has been “transformed” by an exogenous (preferably foreign) nucleic acid sequence if a nucleic acid sequence has been introduced into the plastid or mitochondrion that means that this sequence has crossed the membrane or the membranes of the plastid or of the mitochondrion. The exogenous, preferably foreign, DNA may be integrated (covalently linked) into plastid or mitochondrial DNA making up the genome of the plastid or mitochondrion, or it may remain unintegrated (e.g., by including a chloroplast origin of replication). “Stably” integrated DNA sequences are those, which are inherited through plastid or mitochondrion replication, thereby transferring new plastids or mitochondria, with the features of the integrated DNA sequence to the progeny.

[95268] [0080.1.7.18] to [0083.1.7.18] for the disclosure of these paragraphs see [0080.1.7.7] to [0083.1.7.7] above

[95269] For the process of the present invention it may be of great advantage that by transforming the plastids the intraspecies specific transgene flow is blocked, because a lot of species such as corn, cotton and rice have a strict maternal inheritance of plastids. By placing the respective genes specified in the respective line in Table I, application no. 18, columns 5 or 8, preferably the coding region, or homologs or fragments thereof, e.g. if for the nucleic acid molecule in the respective line in column 6 of Table I the term “plastidic” is indicated, in the plastids of plants, these genes will not be present in the pollen of said plants.

[95270] A further preferred embodiment of the invention relates to the use of so called “chloroplast localization sequences”, in which a first RNA sequence or molecule is capable of transporting or “chaperoning” a second RNA sequence, such as a RNA sequence transcribed from the sequences depicted in the respective line in Table I, application no. 18, columns 5 or 8, preferably the coding region thereof, or a homolog or a fragment thereof, or a sequence encoding a protein, as depicted in the respective line in Table II, application no. 18, columns 5 and 8, or a homolog or a fragment thereof, from an external environment inside a cell or outside a plastid into a chloroplast. In one embodiment the chloroplast localization signal is substantially similar or complementary to a complete or intact viroid sequence. The chloroplast localization signal may be encoded by a DNA sequence, which is transcribed into the chloroplast localization RNA. The term “viroid” refers to a naturally occurring single stranded RNA molecule (Flores, C. R. Acad. Sci. III. 324 (10), 943 (2001)). Viroids usually contain about 200-500 nucleotides and generally exist as circular molecules. Examples of viroids that contain chloroplast localization signals include but are not limited to ASBVd, PLMVd, CChMVd and ELVd. The viroid sequence or a functional part of it can be fused to the sequences depicted in the respective line in Table I, application no. 18, columns 5 or 8, preferably the coding region thereof, or a homolog or a fragment thereof, or a sequence encoding a protein, as depicted in the respective line in Table II, application no. 18, columns 5 or 8, or a homolog or a fragment thereof, in such a manner that the viroid sequence transports a sequence transcribed from a sequence as depicted in the respective line in Table I, application no. 18 columns 5 or 8, preferably the coding region thereof, or a homolog or a fragment thereof, or a sequence encoding a protein as depicted in the respective line in Table II, application no. 18 columns 5 or 8, or a homolog or a fragment thereof, into the chloroplasts, e.g. if for the nucleic acid molecule in column 6 of Table I the term “plastidic” is indicated. A preferred embodiment uses a modified ASBVd (Navarro et al., Virology. 268 (1), 218 (2000)).

[95271] In a further specific embodiment the protein to be expressed in the plastids such as the proteins depicted in the respective line in Table II, application no. 18, columns 5 or 8, or a homolog or a fragment thereof, e.g. if for the nucleic acid molecule in the respective line in column 6 of Table I the term “plastidic” is indicated, are encoded by different nucleic acids. Such a method is disclosed in WO 2004/040973, which shall be incorporated by reference. WO 2004/040973 teaches a method, which relates to the translocation of an RNA corresponding to a gene or gene fragment into the chloroplast by means of a chloroplast localization sequence. The genes, which should be expressed in the plant or plant cells, are split into nucleic acid fragments, which are introduced into different compartments in the plant e.g. the nucleus, the plastids and/or mitochondria. Additionally plant cells are described in which the chloroplast contains a ribozyme fused at one end to an RNA encoding a fragment of a protein used in the inventive process such that the ribozyme can trans-splice the translocated fusion RNA to the RNA encoding the gene fragment to form and as the case may be reunite the nucleic acid fragments to an intact mRNA encoding a functional protein for example as disclosed in the respective line in Table II, application no. 18, columns 5 or 8, or a homolog or a fragment thereof.

[95272] In a preferred embodiment of the invention the nucleic acid sequences as shown in the respective line in Table I, application no. 18, columns 5 or 8, preferably the coding region thereof, or homologs or fragments thereof, e.g. if for the nucleic acid molecule in the respective line in column 6 of Table I the term “plastidic” is indicated, used in the inventive process are transformed into plastids, which are metabolically active. Those plastids should preferably maintain at a high copy number in the plant or plant tissue of interest, most preferably the chloroplasts found in green plant tissues, such as leaves or cotyledons or in seeds.

[95273] For a good expression in the plastids the nucleic acid sequences as shown in the respective line in Table I, application no. 18, columns 5 or 8, preferably the coding region thereof, or homologs or fragments thereof, e.g. if for the nucleic acid molecule in the respective line in column 6 of Table I the term “plastidic” is indicated, are introduced into an expression cassette using preferably a promoter and terminater, which are active in plastids preferably a chloroplast promoter. Examples of such promoters include the psbA promoter from the gene from spinach or pea, the rbcL promoter, and the atpB promoter from corn.

[95274] [0089.1.7.18] to [0092.1.7.18] for the disclosure of these paragraphs see [0089.1.7.7] to [0092.1.7.7] above

[95275] Advantageously the process for the production of the fine chemical cerotic acid, heneicosanoic acid, lignoceric acid, melissic acid and/or montanic acid leads to an enhanced production of the respective fine chemical. The terms “enhanced” or “increase” mean at least a 10%, 20%, 30%, 40% or 50%, preferably at least 60%, 70%, 80%, 90% or 100%, more preferably 150%, 200%, 300%, 400% or 500% higher production of the respective fine chemical cerotic acid, heneicosanoic acid, lignoceric acid, melissic acid and/or montanic acid in comparison to the wild-type as defined above, e.g. that means in comparison to a non-human organism without the aforementioned modification of the activity of a protein as shown in the respective line in Table II, application no. 18, column 5 or 8, or a fragment or a homolog thereof. The modification of the activity of a protein as shown in the respective line in Table II, application no. 18, column 5 or 8, or a homolog or a fragment thereof, or their combination can be achieved by joining the protein to a respective transit peptide, e.g. if for the respective encoding nucleic acid molecule in column 6 of Table I the term “plastidic” or “mitochondric” is indicated.

[95276] Surprisingly it was found, that the transgenic expression of a protein as shown in the respective line in Table II, application no. 18, column 5, especially from the Saccaromyces cerevisiae, E. coli, Arabidopsis thaliana, Azotobacter vinelandii, Brassica napus, Glycine max, Oryza sativa, Physcomitrella patens, Synechocystis sp., Thermus thermophilus, Zea mays in a non-human organism, like a plant or a part thereof, such as Arabidopsis thaliana for example, or a microorganism, conferred a production of or an increase in cerotic acid, heneicosanoic acid, lignoceric acid, melissic acid and/or montanic acid,respectively, to the transgenic non-human organism as compared to a corresponding non-transformed wild type.

[95277] In one embodiment the transgenic expression of a protein as shown in the respective line in Table II, application no. 18, column 5 or 8, or a homolog or a fragment thereof, especially from the Saccaromyces cerevisiae, E. coli, Arabidopsis thaliana, Azotobacter vinelandii, Brassica napus, Glycine max, Oryza sativa, Physcomitrella patens, Synechocystis sp., Thermus thermophilus, Zea mays in a non-human organism, like a plant or a part thereof, such as Arabidopsis thaliana for example, or a microorganism, confers a production of or an increase in cerotic acid, heneicosanoic acid, lignoceric acid, melissic acid and/or montanic acid,respectively, to the transgenic non-human organism as compared to a corresponding non-transformed wild type.

[95278] Accordingly, in one embodiment, an increase of lignoceric acid in a non-human organism, as compared to a corresponding non-transformed wild type non-human organism, is conferred in the process of the invention, if the activity of a polypeptide showing the activity of a eukaryotic translation initiation factor 5, or if the activity of the polypeptide At1g36730, preferably represented by SEQ ID NO. 17969, or a homolog or fragment thereof, or if the activity of a polypeptide encoded by a nucleic acid molecule comprising the nucleic acid SEQ ID NO. 17968, preferably the coding region thereof, or a homolog or fragment thereof, e.g. derived from Arabidopsis thaliana, is increased or generated. For example the activity of a nucleic acid molecule or a polypeptide comprising the nucleic acid, preferably the coding region thereof, or polypeptide or the consensus sequence or the polypeptide motif, as depicted in Table I, II or IV, application No. 18, column 5 or 8 in the respective same line as the nucleic acid molecule SEQ ID NO. 17968 or polypeptide SEQ ID NO. 17969, respectively, or a homolog or a fragment thereof, is increased or generated, or if the activity eukaryotic translation initiation factor 5 is increased or generated in a non-human organism, like a microorganism or a plant cell, plant or part thereof, especially with non-targeted localization, whereby the respective line disclose in column 7 the fine chemical lignoceric acid. For example, an increase of the lignoceric acid of at least 1 percent, particularly in a range of 31 to 65-percent is conferred as compared to a corresponding non-transformed wild type non-human organism.

[95279] Accordingly, in one embodiment, an increase of lignoceric acid in a non-human organism, as compared to a corresponding non-transformed wild type non-human organism, is conferred in the process of the invention, if the activity of a polypeptide showing the activity of a protein kinase, or if the activity of the polypeptide At1g48260, preferably represented by SEQ ID NO. 18236, or a homolog or fragment thereof, or if the activity of a polypeptide encoded by a nucleic acid molecule comprising the nucleic acid SEQ ID NO. 18235, preferably the coding region thereof, or a homolog or fragment thereof, e.g. derived from Arabidopsis thaliana, is increased or generated. For example the activity of a nucleic acid molecule or a polypeptide comprising the nucleic acid, preferably the coding region thereof, or polypeptide or the consensus sequence or the polypeptide motif, as depicted in Table I, II or IV, application No. 18, column 5 or 8 in the respective same line as the nucleic acid molecule SEQ ID NO. 18235 or polypeptide SEQ ID NO. 18236, respectively, or a homolog or a fragment thereof, is increased or generated, or if the activity protein kinase is increased or generated in a non-human organism, like a microorganism or a plant cell, plant or part thereof, especially with non-targeted localization, whereby the respective line disclose in column 7 the fine chemical lignoceric acid. For example, an increase of the lignoceric acid of at least 1 percent, particularly in a range of 33 to 86-percent is conferred as compared to a corresponding non-transformed wild type non-human organism.

[95280] Accordingly, in one embodiment, an increase of lignoceric acid in a non-human organism, as compared to a corresponding non-transformed wild type non-human organism, is conferred in the process of the invention, if the activity of a polypeptide showing the activity of a thioredoxin family protein, or if the activity of the polypeptide At3g08710, preferably represented by SEQ ID NO. 22250, or a homolog or fragment thereof, or if the activity of a polypeptide encoded by a nucleic acid molecule comprising the nucleic acid SEQ ID NO. 22249, preferably the coding region thereof, or a homolog or fragment thereof, e.g. derived from Arabidopsis thaliana, is increased or generated. For example the activity of a nucleic acid molecule or a polypeptide comprising the nucleic acid, preferably the coding region thereof, or polypeptide or the consensus sequence or the polypeptide motif, as depicted in Table I, II or IV, application No. 18, column 5 or 8 in the respective same line as the nucleic acid molecule SEQ ID NO. 22249 or polypeptide SEQ ID NO. 22250, respectively, or a homolog or a fragment thereof, is increased or generated, or if the activity thioredoxin family protein is increased or generated in a non-human organism, like a microorganism or a plant cell, plant or part thereof, especially with non-targeted localization, whereby the respective line disclose in column 7 the fine chemical lignoceric acid. For example, an increase of the lignoceric acid of at least 1 percent, particularly in a range of 31 to 127-percent is conferred as compared to a corresponding non-transformed wild type non-human organism.

[95281] Accordingly, in one embodiment, an increase of lignoceric acid in a non-human organism, as compared to a corresponding non-transformed wild type non-human organism, is conferred in the process of the invention, if the activity of a polypeptide showing the activity of a monodehydroascorbate reductase, or if the activity of the polypeptide At3g09940, preferably represented by SEQ ID NO. 152082, or a homolog or fragment thereof, or if the activity of a polypeptide encoded by a nucleic acid molecule comprising the nucleic acid SEQ ID NO. 152081, preferably the coding region thereof, or a homolog or fragment thereof, e.g. derived from Arabidopsis thaliana, is increased or generated. For example the activity of a nucleic acid molecule or a polypeptide comprising the nucleic acid, preferably the coding region thereof, or polypeptide or the consensus sequence or the polypeptide motif, as depicted in Table I, II or IV, application No. 18, column 5 or 8 in the respective same line as the nucleic acid molecule SEQ ID NO. 152081 or polypeptide SEQ ID NO. 152082, respectively, or a homolog or a fragment thereof, is increased or generated, or if the activity monodehydroascorbate reductase is increased or generated in a non-human organism, like a microorganism or a plant cell, plant or part thereof, especially with non-targeted localization, whereby the respective line disclose in column 7 the fine chemical lignoceric acid. For example, an increase of the lignoceric acid of at least 1 percent, particularly in a range of 28 to 36-percent is conferred as compared to a corresponding non-transformed wild type non-human organism.

[95282] Accordingly, in one embodiment, an increase of lignoceric acid in a non-human organism, as compared to a corresponding non-transformed wild type non-human organism, is conferred in the process of the invention, if the activity of a polypeptide showing the activity of a glycosyl transferase, or if the activity of the polypeptide At3g27540, preferably represented by SEQ ID NO. 68778, or a homolog or fragment thereof, or if the activity of a polypeptide encoded by a nucleic acid molecule comprising the nucleic acid SEQ ID NO. 68777, preferably the coding region thereof, or a homolog or fragment thereof, e.g. derived from Arabidopsis thaliana, is increased or generated. For example the activity of a nucleic acid molecule or a polypeptide comprising the nucleic acid, preferably the coding region thereof, or polypeptide or the consensus sequence or the polypeptide motif, as depicted in Table I, II or IV, application No. 18, column 5 or 8 in the respective same line as the nucleic acid molecule SEQ ID NO. 68777 or polypeptide SEQ ID NO. 68778, respectively, or a homolog or a fragment thereof, is increased or generated, or if the activity glycosyl transferase is increased or generated in a non-human organism, like a microorganism or a plant cell, plant or part thereof, especially with non-targeted localization, whereby the respective line disclose in column 7 the fine chemical lignoceric acid. For example, an increase of the lignoceric acid of at least 1 percent, particularly in a range of 39 to 99-percent is conferred as compared to a corresponding non-transformed wild type non-human organism.

[95283] Accordingly, in one embodiment, an increase of lignoceric acid in a non-human organism, as compared to a corresponding non-transformed wild type non-human organism, is conferred in the process of the invention, if the activity of a polypeptide showing the activity of a glutaredoxin, or if the activity of the polypeptide At3g62950, preferably represented by SEQ ID NO. 2936, or a homolog or fragment thereof, or if the activity of a polypeptide encoded by a nucleic acid molecule comprising the nucleic acid SEQ ID NO. 2935, preferably the coding region thereof, or a homolog or fragment thereof, e.g. derived from Arabidopsis thaliana, is increased or generated. For example the activity of a nucleic acid molecule or a polypeptide comprising the nucleic acid, preferably the coding region thereof, or polypeptide or the consensus sequence or the polypeptide motif, as depicted in Table I, II or IV, application No. 18, column 5 or 8 in the respective same line as the nucleic acid molecule SEQ ID NO. 2935 or polypeptide SEQ ID NO. 2936, respectively, or a homolog or a fragment thereof, is increased or generated, or if the activity glutaredoxin is increased or generated in a non-human organism, like a microorganism or a plant cell, plant or part thereof, especially with non-targeted localization, whereby the respective line disclose in column 7 the fine chemical lignoceric acid. For example, an increase of the lignoceric acid of at least 1 percent, particularly in a range of 30 to 159-percent is conferred as compared to a corresponding non-transformed wild type non-human organism.

[95284] Accordingly, in one embodiment, an increase of lignoceric acid in a non-human organism, as compared to a corresponding non-transformed wild type non-human organism, is conferred in the process of the invention, if the activity of a polypeptide showing the activity of a heat shock transcription factor, or if the activity of the polypeptide At4g18880, preferably represented by SEQ ID NO. 24233, or a homolog or fragment thereof, or if the activity of a polypeptide encoded by a nucleic acid molecule comprising the nucleic acid SEQ ID NO. 24232, preferably the coding region thereof, or a homolog or fragment thereof, e.g. derived from Arabidopsis thaliana, is increased or generated. For example the activity of a nucleic acid molecule or a polypeptide comprising the nucleic acid, preferably the coding region thereof, or polypeptide or the consensus sequence or the polypeptide motif, as depicted in Table I, II or IV, application No. 18, column 5 or 8 in the respective same line as the nucleic acid molecule SEQ ID NO. 24232 or polypeptide SEQ ID NO. 24233, respectively, or a homolog or a fragment thereof, is increased or generated, or if the activity heat shock transcription factor is increased or generated in a non-human organism, like a microorganism or a plant cell, plant or part thereof, especially with non-targeted localization, whereby the respective line disclose in column 7 the fine chemical lignoceric acid. For example, an increase of the lignoceric acid of at least 1 percent, particularly in a range of 27 to 53-percent is conferred as compared to a corresponding non-transformed wild type non-human organism.

[95285] Accordingly, in one embodiment, an increase of lignoceric acid in a non-human organism, as compared to a corresponding non-transformed wild type non-human organism, is conferred in the process of the invention, if the activity of a polypeptide showing the activity of a calcium-dependent protein kinase, or if the activity of the polypeptide At4g35310, preferably represented by SEQ ID NO. 4349, or a homolog or fragment thereof, or if the activity of a polypeptide encoded by a nucleic acid molecule comprising the nucleic acid SEQ ID NO. 4348, preferably the coding region thereof, or a homolog or fragment thereof, e.g. derived from Arabidopsis thaliana, is increased or generated. For example the activity of a nucleic acid molecule or a polypeptide comprising the nucleic acid, preferably the coding region thereof, or polypeptide or the consensus sequence or the polypeptide motif, as depicted in Table I, II or IV, application No. 18, column 5 or 8 in the respective same line as the nucleic acid molecule SEQ ID NO. 4348 or polypeptide SEQ ID NO. 4349, respectively, or a homolog or a fragment thereof, is increased or generated, or if the activity calcium-dependent protein kinase is increased or generated in a non-human organism, like a microorganism or a plant cell, plant or part thereof, especially with non-targeted localization, whereby the respective line disclose in column 7 the fine chemical lignoceric acid. For example, an increase of the lignoceric acid of at least 1 percent, particularly in a range of 38 to 213-percent is conferred as compared to a corresponding non-transformed wild type non-human organism.

[95286] Accordingly, in one embodiment, an increase of lignoceric acid in a non-human organism, as compared to a corresponding non-transformed wild type non-human organism, is conferred in the process of the invention, if the activity of a polypeptide showing the activity of a gibberellin 20-oxidase, or if the activity of the polypeptide At5g07200, preferably represented by SEQ ID NO. 24493, or a homolog or fragment thereof, or if the activity of a polypeptide encoded by a nucleic acid molecule comprising the nucleic acid SEQ ID NO. 24492, preferably the coding region thereof, or a homolog or fragment thereof, e.g. derived from Arabidopsis thaliana, is increased or generated. For example the activity of a nucleic acid molecule or a polypeptide comprising the nucleic acid, preferably the coding region thereof, or polypeptide or the consensus sequence or the polypeptide motif, as depicted in Table I, II or IV, application No. 18, column 5 or 8 in the respective same line as the nucleic acid molecule SEQ ID NO. 24492 or polypeptide SEQ ID NO. 24493, respectively, or a homolog or a fragment thereof, is increased or generated, or if the activity gibberellin 20-oxidase is increased or generated in a non-human organism, like a microorganism or a plant cell, plant or part thereof, especially with non-targeted localization, whereby the respective line disclose in column 7 the fine chemical lignoceric acid. For example, an increase of the lignoceric acid of at least 1 percent, particularly in a range of 28 to 50-percent is conferred as compared to a corresponding non-transformed wild type non-human organism.

[95287] Accordingly, in one embodiment, an increase of lignoceric acid in a non-human organism, as compared to a corresponding non-transformed wild type non-human organism, is conferred in the process of the invention, if the activity of a polypeptide showing the activity of a zinc finger protein, or if the activity of the polypeptide At5g64920, preferably represented by SEQ ID NO. 5494, or a homolog or fragment thereof, or if the activity of a polypeptide encoded by a nucleic acid molecule comprising the nucleic acid SEQ ID NO. 5493, preferably the coding region thereof, or a homolog or fragment thereof, e.g. derived from Arabidopsis thaliana, is increased or generated. For example the activity of a nucleic acid molecule or a polypeptide comprising the nucleic acid, preferably the coding region thereof, or polypeptide or the consensus sequence or the polypeptide motif, as depicted in Table I, II or IV, application No. 18, column 5 or 8 in the respective same line as the nucleic acid molecule SEQ ID NO. 5493 or polypeptide SEQ ID NO. 5494, respectively, or a homolog or a fragment thereof, is increased or generated, or if the activity zinc finger protein is increased or generated in a non-human organism, like a microorganism or a plant cell, plant or part thereof, especially with non-targeted localization, whereby the respective line disclose in column 7 the fine chemical lignoceric acid. For example, an increase of the lignoceric acid of at least 1 percent, particularly in a range of 30 to 57-percent is conferred as compared to a corresponding non-transformed wild type non-human organism.

[95288] Accordingly, in one embodiment, an increase of lignoceric acid in a non-human organism, as compared to a corresponding non-transformed wild type non-human organism, is conferred in the process of the invention, if the activity of a polypeptide showing the activity of a aminotransferase, or if the activity of the polypeptide AvinDRAFT_{—}4562, preferably represented by SEQ ID NO. 31927, or a homolog or fragment thereof, or if the activity of a polypeptide encoded by a nucleic acid molecule comprising the nucleic acid SEQ ID NO. 31926, preferably the coding region thereof, or a homolog or fragment thereof, e.g. derived from Azotobacter vinelandii, is increased or generated. For example the activity of a nucleic acid molecule or a polypeptide comprising the nucleic acid, preferably the coding region thereof, or polypeptide or the consensus sequence or the polypeptide motif, as depicted in Table I, II or IV, application No. 18, column 5 or 8 in the respective same line as the nucleic acid molecule SEQ ID NO. 31926 or polypeptide SEQ ID NO. 31927, respectively, or a homolog or a fragment thereof, is increased or generated, or if the activity aminotransferase is increased or generated in a non-human organism, like a microorganism or a plant cell, plant or part thereof, especially with non-targeted localization, whereby the respective line disclose in column 7 the fine chemical lignoceric acid. For example, an increase of the lignoceric acid of at least 1 percent, particularly in a range of 31 to 40-percent is conferred as compared to a corresponding non-transformed wild type non-human organism.

[95289] Accordingly, in one embodiment, an increase of lignoceric acid in a non-human organism, as compared to a corresponding non-transformed wild type non-human organism, is conferred in the process of the invention, if the activity of a polypeptide showing the activity of a hydrolase, or if the activity of the polypeptide AvinDRAFT_{—}5103, preferably represented by SEQ ID NO. 6511, or a homolog or fragment thereof, or if the activity of a polypeptide encoded by a nucleic acid molecule comprising the nucleic acid SEQ ID NO. 6510, preferably the coding region thereof, or a homolog or fragment thereof, e.g. derived from Azotobacter vinelandii, is increased or generated. For example the activity of a nucleic acid molecule or a polypeptide comprising the nucleic acid, preferably the coding region thereof, or polypeptide or the consensus sequence or the polypeptide motif, as depicted in Table I, II or IV, application No. 18, column 5 or 8 in the respective same line as the nucleic acid molecule SEQ ID NO. 6510 or polypeptide SEQ ID NO. 6511, respectively, or a homolog or a fragment thereof, is increased or generated, or if the activity hydrolase is increased or generated in a non-human organism, like a microorganism or a plant cell, plant or part thereof, especially with non-targeted localization, whereby the respective line disclose in column 7 the fine chemical lignoceric acid. For example, an increase of the lignoceric acid of at least 1 percent, particularly in a range of 35 to 171-percent is conferred as compared to a corresponding non-transformed wild type non-human organism.

[95290] Accordingly, in one embodiment, an increase of lignoceric acid in a non-human organism, as compared to a corresponding non-transformed wild type non-human organism, is conferred in the process of the invention, if the activity of a polypeptide showing the activity of a glutamate-ammonia-ligase, or if the activity of the polypeptide AvinDRAFT_{—}5246, preferably represented by SEQ ID NO. 32038, or a homolog or fragment thereof, or if the activity of a polypeptide encoded by a nucleic acid molecule comprising the nucleic acid SEQ ID NO. 32037, preferably the coding region thereof, or a homolog or fragment thereof, e.g. derived from Azotobacter vinelandii, is increased or generated. For example the activity of a nucleic acid molecule or a polypeptide comprising the nucleic acid, preferably the coding region thereof, or polypeptide or the consensus sequence or the polypeptide motif, as depicted in Table I, II or IV, application No. 18, column 5 or 8 in the respective same line as the nucleic acid molecule SEQ ID NO. 32037 or polypeptide SEQ ID NO. 32038, respectively, or a homolog or a fragment thereof, is increased or generated, or if the activity glutamate-ammonia-ligase is increased or generated in a non-human organism, like a microorganism or a plant cell, plant or part thereof, especially with non-targeted localization, whereby the respective line disclose in column 7 the fine chemical lignoceric acid. For example, an increase of the lignoceric acid of at least 1 percent, particularly in a range of 27 to 137-percent is conferred as compared to a corresponding non-transformed wild type non-human organism.

[95291] Accordingly, in one embodiment, an increase of lignoceric acid in a non-human organism, as compared to a corresponding non-transformed wild type non-human organism, is conferred in the process of the invention, if the activity of a polypeptide showing the activity of a oxidoreductase, or if the activity of the polypeptide AvinDRAFT_{—}5651, preferably represented by SEQ ID NO. 33458, or a homolog or fragment thereof, or if the activity of a polypeptide encoded by a nucleic acid molecule comprising the nucleic acid SEQ ID NO. 33457, preferably the coding region thereof, or a homolog or fragment thereof, e.g. derived from Azotobacter vinelandii, is increased or generated. For example the activity of a nucleic acid molecule or a polypeptide comprising the nucleic acid, preferably the coding region thereof, or polypeptide or the consensus sequence or the polypeptide motif, as depicted in Table I, II or IV, application No. 18, column 5 or 8 in the respective same line as the nucleic acid molecule SEQ ID NO. 33457 or polypeptide SEQ ID NO. 33458, respectively, or a homolog or a fragment thereof, is increased or generated, or if the activity oxidoreductase is increased or generated in a non-human organism, like a microorganism or a plant cell, plant or part thereof, especially with non-targeted localization, whereby the respective line disclose in column 7 the fine chemical lignoceric acid. For example, an increase of the lignoceric acid of at least 1 percent, particularly in a range of 36 to 62-percent is conferred as compared to a corresponding non-transformed wild type non-human organism.

[95292] Accordingly, in one embodiment, an increase of lignoceric acid in a non-human organism, as compared to a corresponding non-transformed wild type non-human organism, is conferred in the process of the invention, if the activity of a polypeptide showing the activity of a chaperone protein CIpB, or if the activity of the polypeptide AvinDRAFT_{—}6093, preferably represented by SEQ ID NO. 33597, or a homolog or fragment thereof, or if the activity of a polypeptide encoded by a nucleic acid molecule comprising the nucleic acid SEQ ID NO. 33596, preferably the coding region thereof, or a homolog or fragment thereof, e.g. derived from Azotobacter vinelandii, is increased or generated. For example the activity of a nucleic acid molecule or a polypeptide comprising the nucleic acid, preferably the coding region thereof, or polypeptide or the consensus sequence or the polypeptide motif, as depicted in Table I, II or IV, application No. 18, column 5 or 8 in the respective same line as the nucleic acid molecule SEQ ID NO. 33596 or polypeptide SEQ ID NO. 33597, respectively, or a homolog or a fragment thereof, is increased or generated, or if the activity chaperone protein CIpB is increased or generated in a non-human organism, like a microorganism or a plant cell, plant or part thereof, especially with non-targeted localization, whereby the respective line disclose in column 7 the fine chemical lignoceric acid. For example, an increase of the lignoceric acid of at least 1 percent, particularly in a range of 32 to 50-percent is conferred as compared to a corresponding non-transformed wild type non-human organism.

[95293] Accordingly, in one embodiment, an increase of lignoceric acid in a non-human organism, as compared to a corresponding non-transformed wild type non-human organism, is conferred in the process of the invention, if the activity of a polypeptide showing the activity of a purine nucleoside phosphorylase, or if the activity of the polypeptide AvinDRAFT_{—}6700, preferably represented by SEQ ID NO. 34045, or a homolog or fragment thereof, or if the activity of a polypeptide encoded by a nucleic acid molecule comprising the nucleic acid SEQ ID NO. 34044, preferably the coding region thereof, or a homolog or fragment thereof, e.g. derived from Azotobacter vinelandii, is increased or generated. For example the activity of a nucleic acid molecule or a polypeptide comprising the nucleic acid, preferably the coding region thereof, or polypeptide or the consensus sequence or the polypeptide motif, as depicted in Table I, II or IV, application No. 18, column 5 or 8 in the respective same line as the nucleic acid molecule SEQ ID NO. 34044 or polypeptide SEQ ID NO. 34045, respectively, or a homolog or a fragment thereof, is increased or generated, or if the activity purine nucleoside phosphorylase is increased or generated in a non-human organism, like a microorganism or a plant cell, plant or part thereof, especially with non-targeted localization, whereby the respective line disclose in column 7 the fine chemical lignoceric acid. For example, an increase of the lignoceric acid of at least 1 percent, particularly in a range of 27 to 99-percent is conferred as compared to a corresponding non-transformed wild type non-human organism.

[95294] Accordingly, in one embodiment, an increase of lignoceric acid in a non-human organism, as compared to a corresponding non-transformed wild type non-human organism, is conferred in the process of the invention, if the activity of a polypeptide showing the activity of a threonine synthase, or if the activity of the polypeptide B0004, preferably represented by SEQ ID NO. 34890, or a homolog or fragment thereof, or if the activity of a polypeptide encoded by a nucleic acid molecule comprising the nucleic acid SEQ ID NO. 34889, preferably the coding region thereof, or a homolog or fragment thereof, e.g. derived from Escherichia coli, is increased or generated. For example the activity of a nucleic acid molecule or a polypeptide comprising the nucleic acid, preferably the coding region thereof, or polypeptide or the consensus sequence or the polypeptide motif, as depicted in Table I, II or IV, application No. 18, column 5 or 8 in the respective same line as the nucleic acid molecule SEQ ID NO. 34889 or polypeptide SEQ ID NO. 34890, respectively, or a homolog or a fragment thereof, is increased or generated, or if the activity threonine synthase is increased or generated in a non-human organism, like a microorganism or a plant cell, plant or part thereof, especially with plastidic localization, whereby the respective line disclose in column 7 the fine chemical lignoceric acid. For example, an increase of the lignoceric acid of at least 1 percent, particularly in a range of 32 to 201-percent is conferred as compared to a corresponding non-transformed wild type non-human organism.

[95295] Accordingly, in one embodiment, an increase of lignoceric acid in a non-human organism, as compared to a corresponding non-transformed wild type non-human organism, is conferred in the process of the invention, if the activity of a polypeptide showing the activity of a serine protease, or if the activity of the polypeptide B0161, preferably represented by SEQ ID NO. 7082, or a homolog or fragment thereof, or if the activity of a polypeptide encoded by a nucleic acid molecule comprising the nucleic acid SEQ ID NO. 7081, preferably the coding region thereof, or a homolog or fragment thereof, e.g. derived from Escherichia coli, is increased or generated. For example the activity of a nucleic acid molecule or a polypeptide comprising the nucleic acid, preferably the coding region thereof, or polypeptide or the consensus sequence or the polypeptide motif, as depicted in Table I, II or IV, application No. 18, column 5 or 8 in the respective same line as the nucleic acid molecule SEQ ID NO. 7081 or polypeptide SEQ ID NO. 7082, respectively, or a homolog or a fragment thereof, is increased or generated, or if the activity serine protease is increased or generated in a non-human organism, like a microorganism or a plant cell, plant or part thereof, especially with non-targeted localization, whereby the respective line disclose in column 7 the fine chemical lignoceric acid. For example, an increase of the lignoceric acid of at least 1 percent, particularly in a range of 43 to 268-percent is conferred as compared to a corresponding non-transformed wild type non-human organism.

[95296] Accordingly, in one embodiment, an increase of lignoceric acid in a non-human organism, as compared to a corresponding non-transformed wild type non-human organism, is conferred in the process of the invention, if the activity of a polypeptide showing the activity of a ATP-binding component of a transport system, or if the activity of the polypeptide B0449, preferably represented by SEQ ID NO. 7334, or a homolog or fragment thereof, or if the activity of a polypeptide encoded by a nucleic acid molecule comprising the nucleic acid SEQ ID NO. 7333, preferably the coding region thereof, or a homolog or fragment thereof, e.g. derived from Escherichia coli, is increased or generated. For example the activity of a nucleic acid molecule or a polypeptide comprising the nucleic acid, preferably the coding region thereof, or polypeptide or the consensus sequence or the polypeptide motif, as depicted in Table I, II or IV, application No. 18, column 5 or 8 in the respective same line as the nucleic acid molecule SEQ ID NO. 7333 or polypeptide SEQ ID NO. 7334, respectively, or a homolog or a fragment thereof, is increased or generated, or if the activity ATP-binding component of a transport system is increased or generated in a non-human organism, like a microorganism or a plant cell, plant or part thereof, especially with non-targeted localization, whereby the respective line disclose in column 7 the fine chemical lignoceric acid. For example, an increase of the lignoceric acid of at least 1 percent, particularly in a range of 34 to 244-percent is conferred as compared to a corresponding non-transformed wild type non-human organism.

[95297] Accordingly, in one embodiment, an increase of lignoceric acid in a non-human organism, as compared to a corresponding non-transformed wild type non-human organism, is conferred in the process of the invention, if the activity of a polypeptide showing the activity of a isochorismate synthase, or if the activity of the polypeptide B0593, preferably represented by SEQ ID NO. 35968, or a homolog or fragment thereof, or if the activity of a polypeptide encoded by a nucleic acid molecule comprising the nucleic acid SEQ ID NO. 35967, preferably the coding region thereof, or a homolog or fragment thereof, e.g. derived from Escherichia coli, is increased or generated. For example the activity of a nucleic acid molecule or a polypeptide comprising the nucleic acid, preferably the coding region thereof, or polypeptide or the consensus sequence or the polypeptide motif, as depicted in Table I, II or IV, application No. 18, column 5 or 8 in the respective same line as the nucleic acid molecule SEQ ID NO. 35967 or polypeptide SEQ ID NO. 35968, respectively, or a homolog or a fragment thereof, is increased or generated, or if the activity isochorismate synthase is increased or generated in a non-human organism, like a microorganism or a plant cell, plant or part thereof, especially with plastidic localization, whereby the respective line disclose in column 7 the fine chemical lignoceric acid. For example, an increase of the lignoceric acid of at least 1 percent, particularly in a range of 30 to 87-percent is conferred as compared to a corresponding non-transformed wild type non-human organism.

[95298] Accordingly, in one embodiment, an increase of lignoceric acid in a non-human organism, as compared to a corresponding non-transformed wild type non-human organism, is conferred in the process of the invention, if the activity of a polypeptide showing the activity of a leucyl/phenylalanyl-tRNA-protein transferase, or if the activity of the polypeptide B0885, preferably represented by SEQ ID NO. 36490, or a homolog or fragment thereof, or if the activity of a polypeptide encoded by a nucleic acid molecule comprising the nucleic acid SEQ ID NO. 36489, preferably the coding region thereof, or a homolog or fragment thereof, e.g. derived from Escherichia coli, is increased or generated. For example the activity of a nucleic acid molecule or a polypeptide comprising the nucleic acid, preferably the coding region thereof, or polypeptide or the consensus sequence or the polypeptide motif, as depicted in Table I, II or IV, application No. 18, column 5 or 8 in the respective same line as the nucleic acid molecule SEQ ID NO. 36489 or polypeptide SEQ ID NO. 36490, respectively, or a homolog or a fragment thereof, is increased or generated, or if the activity leucyl/phenylalanyl-tRNA-protein transferase is increased or generated in a non-human organism, like a microorganism or a plant cell, plant or part thereof, especially with non-targeted localization, whereby the respective line disclose in column 7 the fine chemical lignoceric acid. For example, an increase of the lignoceric acid of at least 1 percent, particularly in a range of 38 to 93-percent is conferred as compared to a corresponding non-transformed wild type non-human organism.

[95299] Accordingly, in one embodiment, an increase of lignoceric acid in a non-human organism, as compared to a corresponding non-transformed wild type non-human organism, is conferred in the process of the invention, if the activity of a polypeptide showing the activity of a major facilitator superfamily transporter protein, or if the activity of the polypeptide B0898, preferably represented by SEQ ID NO. 7918, or a homolog or fragment thereof, or if the activity of a polypeptide encoded by a nucleic acid molecule comprising the nucleic acid SEQ ID NO. 7917, preferably the coding region thereof, or a homolog or fragment thereof, e.g. derived from Escherichia coli, is increased or generated. For example the activity of a nucleic acid molecule or a polypeptide comprising the nucleic acid, preferably the coding region thereof, or polypeptide or the consensus sequence or the polypeptide motif, as depicted in Table I, II or IV, application No. 18, column 5 or 8 in the respective same line as the nucleic acid molecule SEQ ID NO. 7917 or polypeptide SEQ ID NO. 7918, respectively, or a homolog or a fragment thereof, is increased or generated, or if the activity major facilitator superfamily transporter protein is increased or generated in a non-human organism, like a microorganism or a plant cell, plant or part thereof, especially with non-targeted localization, whereby the respective line disclose in column 7 the fine chemical lignoceric acid. For example, an increase of the lignoceric acid of at least 1 percent, particularly in a range of 36 to 337-percent is conferred as compared to a corresponding non-transformed wild type non-human organism.

[95300] Accordingly, in one embodiment, an increase of cerotic acid in a non-human organism, as compared to a corresponding non-transformed wild type non-human organism, is conferred in the process of the invention, if the activity of a polypeptide showing the activity of a multidrug resistance protein, or if the activity of the polypeptide B1065, preferably represented by SEQ ID NO. 76033, or a homolog or fragment thereof, or if the activity of a polypeptide encoded by a nucleic acid molecule comprising the nucleic acid SEQ ID NO. 76032, preferably the coding region thereof, or a homolog or fragment thereof, e.g. derived from Escherichia coli, is increased or generated. For example the activity of a nucleic acid molecule or a polypeptide comprising the nucleic acid, preferably the coding region thereof, or polypeptide or the consensus sequence or the polypeptide motif, as depicted in Table I, II or IV, application No. 18, column 5 or 8 in the respective same line as the nucleic acid molecule SEQ ID NO. 76032 or polypeptide SEQ ID NO. 76033, respectively, or a homolog or a fragment thereof, is increased or generated, or if the activity multidrug resistance protein is increased or generated in a non-human organism, like a microorganism or a plant cell, plant or part thereof, especially with plastidic localization, whereby the respective line disclose in column 7 the fine chemical cerotic acid. For example, an increase of the cerotic acid of at least 1 percent, particularly in a range of 41 to 48-percent is conferred as compared to a corresponding non-transformed wild type non-human organism.

[95301] Accordingly, in one embodiment, an increase of lignoceric acid in a non-human organism, as compared to a corresponding non-transformed wild type non-human organism, is conferred in the process of the invention, if the activity of a polypeptide showing the activity of a sodium/proton antiporter, or if the activity of the polypeptide B1186, preferably represented by SEQ ID NO. 37401, or a homolog or fragment thereof, or if the activity of a polypeptide encoded by a nucleic acid molecule comprising the nucleic acid SEQ ID NO. 37400, preferably the coding region thereof, or a homolog or fragment thereof, e.g. derived from Escherichia coli, is increased or generated. For example the activity of a nucleic acid molecule or a polypeptide comprising the nucleic acid, preferably the coding region thereof, or polypeptide or the consensus sequence or the polypeptide motif, as depicted in Table I, II or IV, application No. 18, column 5 or 8 in the respective same line as the nucleic acid molecule SEQ ID NO. 37400 or polypeptide SEQ ID NO. 37401, respectively, or a homolog or a fragment thereof, is increased or generated, or if the activity sodium/proton antiporter is increased or generated in a non-human organism, like a microorganism or a plant cell, plant or part thereof, especially with non-targeted localization, whereby the respective line disclose in column 7 the fine chemical lignoceric acid. For example, an increase of the lignoceric acid of at least 1 percent, particularly in a range of 35 to 126-percent is conferred as compared to a corresponding non-transformed wild type non-human organism.

[95302] Accordingly, in one embodiment, an increase of lignoceric acid in a non-human organism, as compared to a corresponding non-transformed wild type non-human organism, is conferred in the process of the invention, if the activity of a polypeptide showing the activity of a cardiolipin synthase, or if the activity of the polypeptide B1249, preferably represented by SEQ ID NO. 98779, or a homolog or fragment thereof, or if the activity of a polypeptide encoded by a nucleic acid molecule comprising the nucleic acid SEQ ID NO. 98778, preferably the coding region thereof, or a homolog or fragment thereof, e.g. derived from Escherichia coli, is increased or generated. For example the activity of a nucleic acid molecule or a polypeptide comprising the nucleic acid, preferably the coding region thereof, or polypeptide or the consensus sequence or the polypeptide motif, as depicted in Table I, II or IV, application No. 18, column 5 or 8 in the respective same line as the nucleic acid molecule SEQ ID NO. 98778 or polypeptide SEQ ID NO. 98779, respectively, or a homolog or a fragment thereof, is increased or generated, or if the activity cardiolipin synthase is increased or generated in a non-human organism, like a microorganism or a plant cell, plant or part thereof, especially with non-targeted localization, whereby the respective line disclose in column 7 the fine chemical lignoceric acid. For example, an increase of the lignoceric acid of at least 1 percent, particularly in a range of 33 to 73-percent is conferred as compared to a corresponding non-transformed wild type non-human organism.

[95303] Accordingly, in one embodiment, an increase of lignoceric acid in a non-human organism, as compared to a corresponding non-transformed wild type non-human organism, is conferred in the process of the invention, if the activity of a polypeptide showing the activity of a b1522-protein, or if the activity of the polypeptide B1522, preferably represented by SEQ ID NO. 7948, or a homolog or fragment thereof, or if the activity of a polypeptide encoded by a nucleic acid molecule comprising the nucleic acid SEQ ID NO. 7947, preferably the coding region thereof, or a homolog or fragment thereof, e.g. derived from Escherichia coli, is increased or generated. For example the activity of a nucleic acid molecule or a polypeptide comprising the nucleic acid, preferably the coding region thereof, or polypeptide or the consensus sequence or the polypeptide motif, as depicted in Table I, II or IV, application No. 18, column 5 or 8 in the respective same line as the nucleic acid molecule SEQ ID NO. 7947 or polypeptide SEQ ID NO. 7948, respectively, or a homolog or a fragment thereof, is increased or generated, or if the activity b1522-protein is increased or generated in a non-human organism, like a microorganism or a plant cell, plant or part thereof, especially with non-targeted localization, whereby the respective line disclose in column 7 the fine chemical lignoceric acid. For example, an increase of the lignoceric acid of at least 1 percent, particularly in a range of 28 to 178-percent is conferred as compared to a corresponding non-transformed wild type non-human organism.

[95304] Accordingly, in one embodiment, an increase of cerotic acid in a non-human organism, as compared to a corresponding non-transformed wild type non-human organism, is conferred in the process of the invention, if the activity of a polypeptide showing the activity of a acid shock protein, or if the activity of the polypeptide B1597, preferably represented by SEQ ID NO. 38301, or a homolog or fragment thereof, or if the activity of a polypeptide encoded by a nucleic acid molecule comprising the nucleic acid SEQ ID NO. 38300, preferably the coding region thereof, or a homolog or fragment thereof, e.g. derived from Escherichia coli, is increased or generated.

[95305] For example the activity of a nucleic acid molecule or a polypeptide comprising the nucleic acid, preferably the coding region thereof, or polypeptide or the consensus sequence or the polypeptide motif, as depicted in Table I, II or IV, application No. 18, column 5 or 8 in the respective same line as the nucleic acid molecule SEQ ID NO. 38300 or polypeptide SEQ ID NO. 38301, respectively, or a homolog or a fragment thereof, is increased or generated, or if the activity acid shock protein is increased or generated in a non-human organism, like a microorganism or a plant cell, plant or part thereof, especially with non-targeted localization, whereby the respective line disclose in column 7 the fine chemical cerotic acid. For example, an increase of the cerotic acid of at least 1 percent, particularly in a range of 43 to 164-percent is conferred as compared to a corresponding non-transformed wild type non-human organism.

[95306] Accordingly, in one embodiment, an increase of lignoceric acid in a non-human organism, as compared to a corresponding non-transformed wild type non-human organism, is conferred in the process of the invention, if the activity of a polypeptide showing the activity of a acid shock protein, or if the activity of the polypeptide B1597, preferably represented by SEQ ID NO. 38301, or a homolog or fragment thereof, or if the activity of a polypeptide encoded by a nucleic acid molecule comprising the nucleic acid SEQ ID NO. 38300, preferably the coding region thereof, or a homolog or fragment thereof, e.g. derived from Escherichia coli, is increased or generated. For example the activity of a nucleic acid molecule or a polypeptide comprising the nucleic acid, preferably the coding region thereof, or polypeptide or the consensus sequence or the polypeptide motif, as depicted in Table I, II or IV, application No. 18, column 5 or 8 in the respective same line as the nucleic acid molecule SEQ ID NO. 38300 or polypeptide SEQ ID NO. 38301, respectively, or a homolog or a fragment thereof, is increased or generated, or if the activity acid shock protein is increased or generated in a non-human organism, like a microorganism or a plant cell, plant or part thereof, especially with non-targeted localization, whereby the respective line disclose in column 7 the fine chemical lignoceric acid. For example, an increase of the lignoceric acid of at least 1 percent, particularly in a range of 35 to 214-percent is conferred as compared to a corresponding non-transformed wild type non-human organism.

[95307] Accordingly, in one embodiment, an increase of lignoceric acid in a non-human organism, as compared to a corresponding non-transformed wild type non-human organism, is conferred in the process of the invention, if the activity of a polypeptide showing the activity of a O-antigen chain length determinant, or if the activity of the polypeptide B2027, preferably represented by SEQ ID NO. 79218, or a homolog or fragment thereof, or if the activity of a polypeptide encoded by a nucleic acid molecule comprising the nucleic acid SEQ ID NO. 79217, preferably the coding region thereof, or a homolog or fragment thereof, e.g. derived from Escherichia coli, is increased or generated. For example the activity of a nucleic acid molecule or a polypeptide comprising the nucleic acid, preferably the coding region thereof, or polypeptide or the consensus sequence or the polypeptide motif, as depicted in Table I, II or IV, application No. 18, column 5 or 8 in the respective same line as the nucleic acid molecule SEQ ID NO. 79217 or polypeptide SEQ ID NO. 79218, respectively, or a homolog or a fragment thereof, is increased or generated, or if the activity O-antigen chain length determinant is increased or generated in a non-human organism, like a microorganism or a plant cell, plant or part thereof, especially with non-targeted localization, whereby the respective line disclose in column 7 the fine chemical lignoceric acid. For example, an increase of the lignoceric acid of at least 1 percent, particularly in a range of 29 to 85-percent is conferred as compared to a corresponding non-transformed wild type non-human organism.

[95308] Accordingly, in one embodiment, an increase of lignoceric acid in a non-human organism, as compared to a corresponding non-transformed wild type non-human organism, is conferred in the process of the invention, if the activity of a polypeptide showing the activity of a NADH dehydrogenase subunit N, or if the activity of the polypeptide B2482, preferably represented by SEQ ID NO. 79510, or a homolog or fragment thereof, or if the activity of a polypeptide encoded by a nucleic acid molecule comprising the nucleic acid SEQ ID NO. 79509, preferably the coding region thereof, or a homolog or fragment thereof, e.g. derived from Escherichia coli, is increased or generated. For example the activity of a nucleic acid molecule or a polypeptide comprising the nucleic acid, preferably the coding region thereof, or polypeptide or the consensus sequence or the polypeptide motif, as depicted in Table I, II or IV, application No. 18, column 5 or 8 in the respective same line as the nucleic acid molecule SEQ ID NO. 79509 or polypeptide SEQ ID NO. 79510, respectively, or a homolog or a fragment thereof, is increased or generated, or if the activity NADH dehydrogenase subunit N is increased or generated in a non-human organism, like a microorganism or a plant cell, plant or part thereof, especially with non-targeted localization, whereby the respective line disclose in column 7 the fine chemical lignoceric acid. For example, an increase of the lignoceric acid of at least 1 percent, particularly in a range of 29 to 64-percent is conferred as compared to a corresponding non-transformed wild type non-human organism.

[95309] Accordingly, in one embodiment, an increase of lignoceric acid in a non-human organism, as compared to a corresponding non-transformed wild type non-human organism, is conferred in the process of the invention, if the activity of a polypeptide showing the activity of a 2,3-dihydroxy-2,3-dihydrophenylpropionatedehydrogenase, or if the activity of the polypeptide B2541, preferably represented by SEQ ID NO. 40384, or a homolog or fragment thereof, or if the activity of a polypeptide encoded by a nucleic acid molecule comprising the nucleic acid SEQ ID NO. 40383, preferably the coding region thereof, or a homolog or fragment thereof, e.g. derived from Escherichia coli, is increased or generated. For example the activity of a nucleic acid molecule or a polypeptide comprising the nucleic acid, preferably the coding region thereof, or polypeptide or the consensus sequence or the polypeptide motif, as depicted in Table I, II or IV, application No. 18, column 5 or 8 in the respective same line as the nucleic acid molecule SEQ ID NO. 40383 or polypeptide SEQ ID NO. 40384, respectively, or a homolog or a fragment thereof, is increased or generated, or if the activity 2,3-dihydroxy-2,3-dihydrophenylpropionatedehydrogenase is increased or generated in a non-human organism, like a microorganism or a plant cell, plant or part thereof, especially with non-targeted localization, whereby the respective line disclose in column 7 the fine chemical lignoceric acid. For example, an increase of the lignoceric acid of at least 1 percent, particularly in a range of 40 to 110-percent is conferred as compared to a corresponding non-transformed wild type non-human organism.

[95310] Accordingly, in one embodiment, an increase of lignoceric acid in a non-human organism, as compared to a corresponding non-transformed wild type non-human organism, is conferred in the process of the invention, if the activity of a polypeptide showing the activity of a b3083-protein, or if the activity of the polypeptide B3083, preferably represented by SEQ ID NO. 82425, or a homolog or fragment thereof, or if the activity of a polypeptide encoded by a nucleic acid molecule comprising the nucleic acid SEQ ID NO. 82424, preferably the coding region thereof, or a homolog or fragment thereof, e.g. derived from Escherichia coli, is increased or generated. For example the activity of a nucleic acid molecule or a polypeptide comprising the nucleic acid, preferably the coding region thereof, or polypeptide or the consensus sequence or the polypeptide motif, as depicted in Table I, II or IV, application No. 18, column 5 or 8 in the respective same line as the nucleic acid molecule SEQ ID NO. 82424 or polypeptide SEQ ID NO. 82425, respectively, or a homolog or a fragment thereof, is increased or generated, or if the activity b3083-protein is increased or generated in a non-human organism, like a microorganism or a plant cell, plant or part thereof, especially with non-targeted localization, whereby the respective line disclose in column 7 the fine chemical lignoceric acid. For example, an increase of the lignoceric acid of at least 1 percent, particularly in a range of 31 to 63-percent is conferred as compared to a corresponding non-transformed wild type non-human organism.

[95311] Accordingly, in one embodiment, an increase of lignoceric acid in a non-human organism, as compared to a corresponding non-transformed wild type non-human organism, is conferred in the process of the invention, if the activity of a polypeptide showing the activity of a b3812-protein, or if the activity of the polypeptide B3812, preferably represented by SEQ ID NO. 125488, or a homolog or fragment thereof, or if the activity of a polypeptide encoded by a nucleic acid molecule comprising the nucleic acid SEQ ID NO. 125487, preferably the coding region thereof, or a homolog or fragment thereof, e.g. derived from Escherichia coli, is increased or generated. For example the activity of a nucleic acid molecule or a polypeptide comprising the nucleic acid, preferably the coding region thereof, or polypeptide or the consensus sequence or the polypeptide motif, as depicted in Table I, II or IV, application No. 18, column 5 or 8 in the respective same line as the nucleic acid molecule SEQ ID NO. 125487 or polypeptide SEQ ID NO. 125488, respectively, or a homolog or a fragment thereof, is increased or generated, or if the activity b3812-protein is increased or generated in a non-human organism, like a microorganism or a plant cell, plant or part thereof, especially with non-targeted localization, whereby the respective line disclose in column 7 the fine chemical lignoceric acid. For example, an increase of the lignoceric acid of at least 1 percent, particularly in a range of 35 to 118-percent is conferred as compared to a corresponding non-transformed wild type non-human organism.

[95312] Accordingly, in one embodiment, an increase of lignoceric acid in a non-human organism, as compared to a corresponding non-transformed wild type non-human organism, is conferred in the process of the invention, if the activity of a polypeptide showing the activity of a b4029-protein, or if the activity of the polypeptide B4029, preferably represented by SEQ ID NO. 10741, or a homolog or fragment thereof, or if the activity of a polypeptide encoded by a nucleic acid molecule comprising the nucleic acid SEQ ID NO. 10740, preferably the coding region thereof, or a homolog or fragment thereof, e.g. derived from Escherichia coli, is increased or generated. For example the activity of a nucleic acid molecule or a polypeptide comprising the nucleic acid, preferably the coding region thereof, or polypeptide or the consensus sequence or the polypeptide motif, as depicted in Table I, II or IV, application No. 18, column 5 or 8 in the respective same line as the nucleic acid molecule SEQ ID NO. 10740 or polypeptide SEQ ID NO. 10741, respectively, or a homolog or a fragment thereof, is increased or generated, or if the activity b4029-protein is increased or generated in a non-human organism, like a microorganism or a plant cell, plant or part thereof, especially with non-targeted localization, whereby the respective line disclose in column 7 the fine chemical lignoceric acid. For example, an increase of the lignoceric acid of at least 1 percent, particularly in a range of 31 to 222-percent is conferred as compared to a corresponding non-transformed wild type non-human organism.

[95313] Accordingly, in one embodiment, an increase of lignoceric acid in a non-human organism, as compared to a corresponding non-transformed wild type non-human organism, is conferred in the process of the invention, if the activity of a polypeptide showing the activity of a acetyltransferase, or if the activity of the polypeptide B4256, preferably represented by SEQ ID NO. 45322, or a homolog or fragment thereof, or if the activity of a polypeptide encoded by a nucleic acid molecule comprising the nucleic acid SEQ ID NO. 45321, preferably the coding region thereof, or a homolog or fragment thereof, e.g. derived from Escherichia coli, is increased or generated. For example the activity of a nucleic acid molecule or a polypeptide comprising the nucleic acid, preferably the coding region thereof, or polypeptide or the consensus sequence or the polypeptide motif, as depicted in Table I, II or IV, application No. 18, column 5 or 8 in the respective same line as the nucleic acid molecule SEQ ID NO. 45321 or polypeptide SEQ ID NO. 45322, respectively, or a homolog or a fragment thereof, is increased or generated, or if the activity acetyltransferase is increased or generated in a non-human organism, like a microorganism or a plant cell, plant or part thereof, especially with non-targeted localization, whereby the respective line disclose in column 7 the fine chemical lignoceric acid. For example, an increase of the lignoceric acid of at least 1 percent, particularly in a range of 64 to 185-percent is conferred as compared to a corresponding non-transformed wild type non-human organism.

[95314] Accordingly, in one embodiment, an increase of lignoceric acid in a non-human organism, as compared to a corresponding non-transformed wild type non-human organism, is conferred in the process of the invention, if the activity of a polypeptide showing the activity of a glutaredoxin, or if the activity of the polypeptide GM02LC12622, preferably represented by SEQ ID NO. 10812, or a homolog or fragment thereof, or if the activity of a polypeptide encoded by a nucleic acid molecule comprising the nucleic acid SEQ ID NO. 10811, preferably the coding region thereof, or a homolog or fragment thereof, e.g. derived from Glycine max, is increased or generated. For example the activity of a nucleic acid molecule or a polypeptide comprising the nucleic acid, preferably the coding region thereof, or polypeptide or the consensus sequence or the polypeptide motif, as depicted in Table I, II or IV, application No. 18, column 5 or 8 in the respective same line as the nucleic acid molecule SEQ ID NO. 10811 or polypeptide SEQ ID NO. 10812, respectively, or a homolog or a fragment thereof, is increased or generated, or if the activity glutaredoxin is increased or generated in a non-human organism, like a microorganism or a plant cell, plant or part thereof, especially with non-targeted localization, whereby the respective line disclose in column 7 the fine chemical lignoceric acid. For example, an increase of the lignoceric acid of at least 1 percent, particularly in a range of 28 to 81-percent is conferred as compared to a corresponding non-transformed wild type non-human organism.

[95315] Accordingly, in one embodiment, an increase of lignoceric acid in a non-human organism, as compared to a corresponding non-transformed wild type non-human organism, is conferred in the process of the invention, if the activity of a polypeptide showing the activity of a cyclin D, or if the activity of the polypeptide GM02LC44512, preferably represented by SEQ ID NO. 46851, or a homolog or fragment thereof, or if the activity of a polypeptide encoded by a nucleic acid molecule comprising the nucleic acid SEQ ID NO. 46850, preferably the coding region thereof, or a homolog or fragment thereof, e.g. derived from Glycine max, is increased or generated. For example the activity of a nucleic acid molecule or a polypeptide comprising the nucleic acid, preferably the coding region thereof, or polypeptide or the consensus sequence or the polypeptide motif, as depicted in Table I, II or IV, application No. 18, column 5 or 8 in the respective same line as the nucleic acid molecule SEQ ID NO. 46850 or polypeptide SEQ ID NO. 46851, respectively, or a homolog or a fragment thereof, is increased or generated, or if the activity cyclin D is increased or generated in a non-human organism, like a microorganism or a plant cell, plant or part thereof, especially with non-targeted localization, whereby the respective line disclose in column 7 the fine chemical lignoceric acid. For example, an increase of the lignoceric acid of at least 1 percent, particularly in a range of 30 to 75-percent is conferred as compared to a corresponding non-transformed wild type non-human organism.

[95316] Accordingly, in one embodiment, an increase of lignoceric acid in a non-human organism, as compared to a corresponding non-transformed wild type non-human organism, is conferred in the process of the invention, if the activity of a polypeptide showing the activity of a sll0064-protein, or if the activity of the polypeptide Sll0064, preferably represented by SEQ ID NO. 47527, or a homolog or fragment thereof, or if the activity of a polypeptide encoded by a nucleic acid molecule comprising the nucleic acid SEQ ID NO. 47526, preferably the coding region thereof, or a homolog or fragment thereof, e.g. derived from Synechocystis sp., is increased or generated. For example the activity of a nucleic acid molecule or a polypeptide comprising the nucleic acid, preferably the coding region thereof, or polypeptide or the consensus sequence or the polypeptide motif, as depicted in Table I, II or IV, application No. 18, column 5 or 8 in the respective same line as the nucleic acid molecule SEQ ID NO. 47526 or polypeptide SEQ ID NO. 47527, respectively, or a homolog or a fragment thereof, is increased or generated, or if the activity sll0064-protein is increased or generated in a non-human organism, like a microorganism or a plant cell, plant or part thereof, especially with mitochondrial localization, whereby the respective line disclose in column 7 the fine chemical lignoceric acid. For example, an increase of the lignoceric acid of at least 1 percent, particularly in a range of 29 to 56-percent is conferred as compared to a corresponding non-transformed wild type non-human organism.

[95317] Accordingly, in one embodiment, an increase of lignoceric acid in a non-human organism, as compared to a corresponding non-transformed wild type non-human organism, is conferred in the process of the invention, if the activity of a polypeptide showing the activity of a agmatinase, or if the activity of the polypeptide Sll0228, preferably represented by SEQ ID NO. 84266, or a homolog or fragment thereof, or if the activity of a polypeptide encoded by a nucleic acid molecule comprising the nucleic acid SEQ ID NO. 84265, preferably the coding region thereof, or a homolog or fragment thereof, e.g. derived from Synechocystis sp., is increased or generated. For example the activity of a nucleic acid molecule or a polypeptide comprising the nucleic acid, preferably the coding region thereof, or polypeptide or the consensus sequence or the polypeptide motif, as depicted in Table I, II or IV, application No. 18, column 5 or 8 in the respective same line as the nucleic acid molecule SEQ ID NO. 84265 or polypeptide SEQ ID NO. 84266, respectively, or a homolog or a fragment thereof, is increased or generated, or if the activity agmatinase is increased or generated in a non-human organism, like a microorganism or a plant cell, plant or part thereof, especially with plastidic localization, whereby the respective line disclose in column 7 the fine chemical lignoceric acid. For example, an increase of the lignoceric acid of at least 1 percent, particularly in a range of 36 to 38-percent is conferred as compared to a corresponding non-transformed wild type non-human organism.

[95318] Accordingly, in one embodiment, an increase of lignoceric acid in a non-human organism, as compared to a corresponding non-transformed wild type non-human organism, is conferred in the process of the invention, if the activity of a polypeptide showing the activity of a uroporphyrin-III C-methyltransferase, or if the activity of the polypeptide Sll0378, preferably represented by SEQ ID NO. 84870, or a homolog or fragment thereof, or if the activity of a polypeptide encoded by a nucleic acid molecule comprising the nucleic acid SEQ ID NO. 84869, preferably the coding region thereof, or a homolog or fragment thereof, e.g. derived from Synechocystis sp., is increased or generated. For example the activity of a nucleic acid molecule or a polypeptide comprising the nucleic acid, preferably the coding region thereof, or polypeptide or the consensus sequence or the polypeptide motif, as depicted in Table I, II or IV, application No. 18, column 5 or 8 in the respective same line as the nucleic acid molecule SEQ ID NO. 84869 or polypeptide SEQ ID NO. 84870, respectively, or a homolog or a fragment thereof, is increased or generated, or if the activity uroporphyrin-III C-methyltransferase is increased or generated in a non-human organism, like a microorganism or a plant cell, plant or part thereof, especially with plastidic localization, whereby the respective line disclose in column 7 the fine chemical lignoceric acid. For example, an increase of the lignoceric acid of at least 1 percent, particularly in a range of 32 to 69-percent is conferred as compared to a corresponding non-transformed wild type non-human organism.

[95319] Accordingly, in one embodiment, an increase of lignoceric acid in a non-human organism, as compared to a corresponding non-transformed wild type non-human organism, is conferred in the process of the invention, if the activity of a polypeptide showing the activity of a binding-protein-dependent transport systems inner membrane component, or if the activity of the polypeptide Sll0833, preferably represented by SEQ ID NO. 101708, or a homolog or fragment thereof, or if the activity of a polypeptide encoded by a nucleic acid molecule comprising the nucleic acid SEQ ID NO. 101707, preferably the coding region thereof, or a homolog or fragment thereof, e.g. derived from Synechocystis sp., is increased or generated. For example the activity of a nucleic acid molecule or a polypeptide comprising the nucleic acid, preferably the coding region thereof, or polypeptide or the consensus sequence or the polypeptide motif, as depicted in Table I, II or IV, application No. 18, column 5 or 8 in the respective same line as the nucleic acid molecule SEQ ID NO. 101707 or polypeptide SEQ ID NO. 101708, respectively, or a homolog or a fragment thereof, is increased or generated, or if the activity binding-protein-dependent transport systems inner membrane component is increased or generated in a non-human organism, like a microorganism or a plant cell, plant or part thereof, especially with non-targeted localization, whereby the respective line disclose in column 7 the fine chemical lignoceric acid. For example, an increase of the lignoceric acid of at least 1 percent, particularly in a range of 40 to 112-percent is conferred as compared to a corresponding non-transformed wild type non-human organism.

[95320] Accordingly, in one embodiment, an increase of lignoceric acid in a non-human organism, as compared to a corresponding non-transformed wild type non-human organism, is conferred in the process of the invention, if the activity of a polypeptide showing the activity of a malate dehydrogenase, or if the activity of the polypeptide Sll0891, preferably represented by SEQ ID NO. 51269, or a homolog or fragment thereof, or if the activity of a polypeptide encoded by a nucleic acid molecule comprising the nucleic acid SEQ ID NO. 51268, preferably the coding region thereof, or a homolog or fragment thereof, e.g. derived from Synechocystis sp., is increased or generated. For example the activity of a nucleic acid molecule or a polypeptide comprising the nucleic acid, preferably the coding region thereof, or polypeptide or the consensus sequence or the polypeptide motif, as depicted in Table I, II or IV, application No. 18, column 5 or 8 in the respective same line as the nucleic acid molecule SEQ ID NO. 51268 or polypeptide SEQ ID NO. 51269, respectively, or a homolog or a fragment thereof, is increased or generated, or if the activity malate dehydrogenase is increased or generated in a non-human organism, like a microorganism or a plant cell, plant or part thereof, especially with plastidic localization, whereby the respective line disclose in column 7 the fine chemical lignoceric acid. For example, an increase of the lignoceric acid of at least 1 percent, particularly in a range of 32 to 55-percent is conferred as compared to a corresponding non-transformed wild type non-human organism.

[95321] Accordingly, in one embodiment, an increase of lignoceric acid in a non-human organism, as compared to a corresponding non-transformed wild type non-human organism, is conferred in the process of the invention, if the activity of a polypeptide showing the activity of a ABC metal ion transporter substrate-binding protein, or if the activity of the polypeptide Sll1598, preferably represented by SEQ ID NO. 85744, or a homolog or fragment thereof, or if the activity of a polypeptide encoded by a nucleic acid molecule comprising the nucleic acid SEQ ID NO. 85743, preferably the coding region thereof, or a homolog or fragment thereof, e.g. derived from Synechocystis sp., is increased or generated. For example the activity of a nucleic acid molecule or a polypeptide comprising the nucleic acid, preferably the coding region thereof, or polypeptide or the consensus sequence or the polypeptide motif, as depicted in Table I, II or IV, application No. 18, column 5 or 8 in the respective same line as the nucleic acid molecule SEQ ID NO. 85743 or polypeptide SEQ ID NO. 85744, respectively, or a homolog or a fragment thereof, is increased or generated, or if the activity ABC metal ion transporter substrate-binding protein is increased or generated in a non-human organism, like a microorganism or a plant cell, plant or part thereof, especially with mitochondrial localization, whereby the respective line disclose in column 7 the fine chemical lignoceric acid. For example, an increase of the lignoceric acid of at least 1 percent, particularly in a range of 27 to 51-percent is conferred as compared to a corresponding non-transformed wild type non-human organism.

[95322] Accordingly, in one embodiment, an increase of lignoceric acid in a non-human organism, as compared to a corresponding non-transformed wild type non-human organism, is conferred in the process of the invention, if the activity of a polypeptide showing the activity of a acyl transferase, or if the activity of the polypeptide Sll1848, preferably represented by SEQ ID NO. 86448, or a homolog or fragment thereof, or if the activity of a polypeptide encoded by a nucleic acid molecule comprising the nucleic acid SEQ ID NO. 86447, preferably the coding region thereof, or a homolog or fragment thereof, e.g. derived from Synechocystis sp., is increased or generated. For example the activity of a nucleic acid molecule or a polypeptide comprising the nucleic acid, preferably the coding region thereof, or polypeptide or the consensus sequence or the polypeptide motif, as depicted in Table I, II or IV, application No. 18, column 5 or 8 in the respective same line as the nucleic acid molecule SEQ ID NO. 86447 or polypeptide SEQ ID NO. 86448, respectively, or a homolog or a fragment thereof, is increased or generated, or if the activity acyl transferase is increased or generated in a non-human organism, like a microorganism or a plant cell, plant or part thereof, especially with plastidic localization, whereby the respective line disclose in column 7 the fine chemical lignoceric acid. For example, an increase of the lignoceric acid of at least 1 percent, particularly in a range of 57 to 85-percent is conferred as compared to a corresponding non-transformed wild type non-human organism.

[95323] Accordingly, in one embodiment, an increase of lignoceric acid in a non-human organism, as compared to a corresponding non-transformed wild type non-human organism, is conferred in the process of the invention, if the activity of a polypeptide showing the activity of a slr0383-protein, or if the activity of the polypeptide Slr0383, preferably represented by SEQ ID NO. 95745, or a homolog or fragment thereof, or if the activity of a polypeptide encoded by a nucleic acid molecule comprising the nucleic acid SEQ ID NO. 95744, preferably the coding region thereof, or a homolog or fragment thereof, e.g. derived from Synechocystis sp., is increased or generated. For example the activity of a nucleic acid molecule or a polypeptide comprising the nucleic acid, preferably the coding region thereof, or polypeptide or the consensus sequence or the polypeptide motif, as depicted in Table I, II or IV, application No. 18, column 5 or 8 in the respective same line as the nucleic acid molecule SEQ ID NO. 95744 or polypeptide SEQ ID NO. 95745, respectively, or a homolog or a fragment thereof, is increased or generated, or if the activity slr0383-protein is increased or generated in a non-human organism, like a microorganism or a plant cell, plant or part thereof, especially with non-targeted localization, whereby the respective line disclose in column 7 the fine chemical lignoceric acid. For example, an increase of the lignoceric acid of at least 1 percent, particularly in a range of 32 to 48-percent is conferred as compared to a corresponding non-transformed wild type non-human organism.

[95324] Accordingly, in one embodiment, an increase of lignoceric acid in a non-human organism, as compared to a corresponding non-transformed wild type non-human organism, is conferred in the process of the invention, if the activity of a polypeptide showing the activity of a geranylgeranyl pyrophosphate synthase, or if the activity of the polypeptide Slr0739, preferably represented by SEQ ID NO. 57236, or a homolog or fragment thereof, or if the activity of a polypeptide encoded by a nucleic acid molecule comprising the nucleic acid SEQ ID NO. 57235, preferably the coding region thereof, or a homolog or fragment thereof, e.g. derived from Synechocystis sp., is increased or generated. For example the activity of a nucleic acid molecule or a polypeptide comprising the nucleic acid, preferably the coding region thereof, or polypeptide or the consensus sequence or the polypeptide motif, as depicted in Table I, II or IV, application No. 18, column 5 or 8 in the respective same line as the nucleic acid molecule SEQ ID NO. 57235 or polypeptide SEQ ID NO. 57236, respectively, or a homolog or a fragment thereof, is increased or generated, or if the activity geranylgeranyl pyrophosphate synthase is increased or generated in a non-human organism, like a microorganism or a plant cell, plant or part thereof, especially with plastidic localization, whereby the respective line disclose in column 7 the fine chemical lignoceric acid. For example, an increase of the lignoceric acid of at least 1 percent, particularly in a range of 31 to 87-percent is conferred as compared to a corresponding non-transformed wild type non-human organism.

[95325] Accordingly, in one embodiment, an increase of lignoceric acid in a non-human organism, as compared to a corresponding non-transformed wild type non-human organism, is conferred in the process of the invention, if the activity of a polypeptide showing the activity of a tryptophan synthase alpha chain, or if the activity of the polypeptide Slr0966, preferably represented by SEQ ID NO. 87656, or a homolog or fragment thereof, or if the activity of a polypeptide encoded by a nucleic acid molecule comprising the nucleic acid SEQ ID NO. 87655, preferably the coding region thereof, or a homolog or fragment thereof, e.g. derived from Synechocystis sp., is increased or generated. For example the activity of a nucleic acid molecule or a polypeptide comprising the nucleic acid, preferably the coding region thereof, or polypeptide or the consensus sequence or the polypeptide motif, as depicted in Table I, II or IV, application No. 18, column 5 or 8 in the respective same line as the nucleic acid molecule SEQ ID NO. 87655 or polypeptide SEQ ID NO. 87656, respectively, or a homolog or a fragment thereof, is increased or generated, or if the activity tryptophan synthase alpha chain is increased or generated in a non-human organism, like a microorganism or a plant cell, plant or part thereof, especially with plastidic localization, whereby the respective line disclose in column 7 the fine chemical lignoceric acid. For example, an increase of the lignoceric acid of at least 1 percent, particularly in a range of 32 to 111-percent is conferred as compared to a corresponding non-transformed wild type non-human organism.

[95326] Accordingly, in one embodiment, an increase of lignoceric acid in a non-human organism, as compared to a corresponding non-transformed wild type non-human organism, is conferred in the process of the invention, if the activity of a polypeptide showing the activity of a rubredoxin, or if the activity of the polypeptide Slr2033, preferably represented by SEQ ID NO. 152276, or a homolog or fragment thereof, or if the activity of a polypeptide encoded by a nucleic acid molecule comprising the nucleic acid SEQ ID NO. 152275, preferably the coding region thereof, or a homolog or fragment thereof, e.g. derived from Synechocystis sp., is increased or generated.

[95327] For example the activity of a nucleic acid molecule or a polypeptide comprising the nucleic acid, preferably the coding region thereof, or polypeptide or the consensus sequence or the polypeptide motif, as depicted in Table I, II or IV, application No. 18, column 5 or 8 in the respective same line as the nucleic acid molecule SEQ ID NO. 152275 or polypeptide SEQ ID NO. 152276, respectively, or a homolog or a fragment thereof, is increased or generated, or if the activity rubredoxin is increased or generated in a non-human organism, like a microorganism or a plant cell, plant or part thereof, especially with non-targeted localization, whereby the respective line disclose in column 7 the fine chemical lignoceric acid. For example, an increase of the lignoceric acid of at least 1 percent, particularly in a range of 28 to 105-percent is conferred as compared to a corresponding non-transformed wild type non-human organism.

[95328] Accordingly, in one embodiment, an increase of lignoceric acid in a non-human organism, as compared to a corresponding non-transformed wild type non-human organism, is conferred in the process of the invention, if the activity of a polypeptide showing the activity of a Sec-independent protein translocase subunit, or if the activity of the polypeptide TT00019, preferably represented by SEQ ID NO. 12699, or a homolog or fragment thereof, or if the activity of a polypeptide encoded by a nucleic acid molecule comprising the nucleic acid SEQ ID NO. 12698, preferably the coding region thereof, or a homolog or fragment thereof, e.g. derived from Thermus thermophilus, is increased or generated. For example the activity of a nucleic acid molecule or a polypeptide comprising the nucleic acid, preferably the coding region thereof, or polypeptide or the consensus sequence or the polypeptide motif, as depicted in Table I, II or IV, application No. 18, column 5 or 8 in the respective same line as the nucleic acid molecule SEQ ID NO. 12698 or polypeptide SEQ ID NO. 12699, respectively, or a homolog or a fragment thereof, is increased or generated, or if the activity Sec-independent protein translocase subunit is increased or generated in a non-human organism, like a microorganism or a plant cell, plant or part thereof, especially with non-targeted localization, whereby the respective line disclose in column 7 the fine chemical lignoceric acid. For example, an increase of the lignoceric acid of at least 1 percent, particularly in a range of 44 to 114-percent is conferred as compared to a corresponding non-transformed wild type non-human organism.

[95329] Accordingly, in one embodiment, an increase of lignoceric acid in a non-human organism, as compared to a corresponding non-transformed wild type non-human organism, is conferred in the process of the invention, if the activity of a polypeptide showing the activity of a TT00768-protein, or if the activity of the polypeptide TT00768, preferably represented by SEQ ID NO. 61533, or a homolog or fragment thereof, or if the activity of a polypeptide encoded by a nucleic acid molecule comprising the nucleic acid SEQ ID NO. 61532, preferably the coding region thereof, or a homolog or fragment thereof, e.g. derived from Thermus thermophilus, is increased or generated. For example the activity of a nucleic acid molecule or a polypeptide comprising the nucleic acid, preferably the coding region thereof, or polypeptide or the consensus sequence or the polypeptide motif, as depicted in Table I, II or IV, application No. 18, column 5 or 8 in the respective same line as the nucleic acid molecule SEQ ID NO. 61532 or polypeptide SEQ ID NO. 61533, respectively, or a homolog or a fragment thereof, is increased or generated, or if the activity TT00768-protein is increased or generated in a non-human organism, like a microorganism or a plant cell, plant or part thereof, especially with non-targeted localization, whereby the respective line disclose in column 7 the fine chemical lignoceric acid. For example, an increase of the lignoceric acid of at least 1 percent, particularly in a range of 38 to 110-percent is conferred as compared to a corresponding non-transformed wild type non-human organism.

[95330] Accordingly, in one embodiment, an increase of lignoceric acid in a non-human organism, as compared to a corresponding non-transformed wild type non-human organism, is conferred in the process of the invention, if the activity of a polypeptide showing the activity of a TT01386-protein, or if the activity of the polypeptide TT01386, preferably represented by SEQ ID NO. 62080, or a homolog or fragment thereof, or if the activity of a polypeptide encoded by a nucleic acid molecule comprising the nucleic acid SEQ ID NO. 62079, preferably the coding region thereof, or a homolog or fragment thereof, e.g. derived from Thermus thermophilus, is increased or generated. For example the activity of a nucleic acid molecule or a polypeptide comprising the nucleic acid, preferably the coding region thereof, or polypeptide or the consensus sequence or the polypeptide motif, as depicted in Table I, II or IV, application No. 18, column 5 or 8 in the respective same line as the nucleic acid molecule SEQ ID NO. 62079 or polypeptide SEQ ID NO. 62080, respectively, or a homolog or a fragment thereof, is increased or generated, or if the activity TTC1386-protein is increased or generated in a non-human organism, like a microorganism or a plant cell, plant or part thereof, especially with non-targeted localization, whereby the respective line disclose in column 7 the fine chemical lignoceric acid. For example, an increase of the lignoceric acid of at least 1 percent, particularly in a range of 49 to 106-percent is conferred as compared to a corresponding non-transformed wild type non-human organism.

[95331] Accordingly, in one embodiment, an increase of lignoceric acid in a non-human organism, as compared to a corresponding non-transformed wild type non-human organism, is conferred in the process of the invention, if the activity of a polypeptide showing the activity of a acetylcoenzyme A synthetase, or if the activity of the polypeptide Yal054c, preferably represented by SEQ ID NO. 121909, or a homolog or fragment thereof, or if the activity of a polypeptide encoded by a nucleic acid molecule comprising the nucleic acid SEQ ID NO. 121908, preferably the coding region thereof, or a homolog or fragment thereof, e.g. derived from Saccharomyces cerevisiae, is increased or generated. For example the activity of a nucleic acid molecule or a polypeptide comprising the nucleic acid, preferably the coding region thereof, or polypeptide or the consensus sequence or the polypeptide motif, as depicted in Table I, II or IV, application No. 18, column 5 or 8 in the respective same line as the nucleic acid molecule SEQ ID NO. 121908 or polypeptide SEQ ID NO. 121909, respectively, or a homolog or a fragment thereof, is increased or generated, or if the activity acetyl-coenzyme A synthetase is increased or generated in a non-human organism, like a microorganism or a plant cell, plant or part thereof, especially with non-targeted localization, whereby the respective line disclose in column 7 the fine chemical lignoceric acid. For example, an increase of the lignoceric acid of at least 1 percent, particularly in a range of 52 to 58-percent is conferred as compared to a corresponding non-transformed wild type non-human organism.

[95332] Accordingly, in one embodiment, an increase of lignoceric acid in a non-human organism, as compared to a corresponding non-transformed wild type non-human organism, is conferred in the process of the invention, if the activity of a polypeptide showing the activity of a peroxisome assembly protein, or if the activity of the polypeptide Ydr265w, preferably represented by SEQ ID NO. 63666, or a homolog or fragment thereof, or if the activity of a polypeptide encoded by a nucleic acid molecule comprising the nucleic acid SEQ ID NO. 63665, preferably the coding region thereof, or a homolog or fragment thereof, e.g. derived from Saccharomyces cerevisiae, is increased or generated. For example the activity of a nucleic acid molecule or a polypeptide comprising the nucleic acid, preferably the coding region thereof, or polypeptide or the consensus sequence or the polypeptide motif, as depicted in Table I, II or IV, application No. 18, column 5 or 8 in the respective same line as the nucleic acid molecule SEQ ID NO. 63665 or polypeptide SEQ ID NO. 63666, respectively, or a homolog or a fragment thereof, is increased or generated, or if the activity peroxisome assembly protein is increased or generated in a non-human organism, like a microorganism or a plant cell, plant or part thereof, especially with plastidic localization, whereby the respective line disclose in column 7 the fine chemical lignoceric acid. For example, an increase of the lignoceric acid of at least 1 percent, particularly in a range of 28 to 50-percent is conferred as compared to a corresponding non-transformed wild type non-human organism.

[95333] Accordingly, in one embodiment, an increase of heneicosanoic acid in a non-human organism, as compared to a corresponding non-transformed wild type non-human organism, is conferred in the process of the invention, if the activity of a polypeptide showing the activity of a inositol-3-phosphate synthase, or if the activity of the polypeptide Yjl153c, preferably represented by SEQ ID NO. 149633, or a homolog or fragment thereof, or if the activity of a polypeptide encoded by a nucleic acid molecule comprising the nucleic acid SEQ ID NO. 149632, preferably the coding region thereof, or a homolog or fragment thereof, e.g. derived from Saccharomyces cerevisiae, is increased or generated. For example the activity of a nucleic acid molecule or a polypeptide comprising the nucleic acid, preferably the coding region thereof, or polypeptide or the consensus sequence or the polypeptide motif, as depicted in Table I, II or IV, application No. 18, column 5 or 8 in the respective same line as the nucleic acid molecule SEQ ID NO. 149632 or polypeptide SEQ ID NO. 149633, respectively, or a homolog or a fragment thereof, is increased or generated, or if the activity inositol-3-phosphate synthase is increased or generated in a non-human organism, like a microorganism or a plant cell, plant or part thereof, especially with non-targeted localization, whereby the respective line disclose in column 7 the fine chemical heneicosanoic acid. For example, an increase of the heneicosanoic acid of at least 1 percent, particularly in a range of 10 to 23-percent is conferred as compared to a corresponding non-transformed wild type non-human organism.

[95334] Accordingly, in one embodiment, an increase of lignoceric acid in a non-human organism, as compared to a corresponding non-transformed wild type non-human organism, is conferred in the process of the invention, if the activity of a polypeptide showing the activity of a cystathionine gamma-synthase, or if the activity of the polypeptide Yjr130c, preferably represented by SEQ ID NO. 14844, or a homolog or fragment thereof, or if the activity of a polypeptide encoded by a nucleic acid molecule comprising the nucleic acid SEQ ID NO. 14843, preferably the coding region thereof, or a homolog or fragment thereof, e.g. derived from Saccharomyces cerevisiae, is increased or generated. For example the activity of a nucleic acid molecule or a polypeptide comprising the nucleic acid, preferably the coding region thereof, or polypeptide or the consensus sequence or the polypeptide motif, as depicted in Table I, II or IV, application No. 18, column 5 or 8 in the respective same line as the nucleic acid molecule SEQ ID NO. 14843 or polypeptide SEQ ID NO. 14844, respectively, or a homolog or a fragment thereof, is increased or generated, or if the activity cystathionine gamma-synthase is increased or generated in a non-human organism, like a microorganism or a plant cell, plant or part thereof, especially with non-targeted localization, whereby the respective line disclose in column 7 the fine chemical lignoceric acid. For example, an increase of the lignoceric acid of at least 1 percent, particularly in a range of 31 to 42-percent is conferred as compared to a corresponding non-transformed wild type non-human organism.

[95335] Accordingly, in one embodiment, an increase of lignoceric acid in a non-human organism, as compared to a corresponding non-transformed wild type non-human organism, is conferred in the process of the invention, if the activity of a polypeptide showing the activity of a potassium transport protein, or if the activity of the polypeptide Ykr050w, preferably represented by SEQ ID NO. 152383, or a homolog or fragment thereof, or if the activity of a polypeptide encoded by a nucleic acid molecule comprising the nucleic acid SEQ ID NO. 152382, preferably the coding region thereof, or a homolog or fragment thereof, e.g. derived from Saccharomyces cerevisiae, is increased or generated. For example the activity of a nucleic acid molecule or a polypeptide comprising the nucleic acid, preferably the coding region thereof, or polypeptide or the consensus sequence or the polypeptide motif, as depicted in Table I, II or IV, application No. 18, column 5 or 8 in the respective same line as the nucleic acid molecule SEQ ID NO. 152382 or polypeptide SEQ ID NO. 152383, respectively, or a homolog or a fragment thereof, is increased or generated, or if the activity potassium transport protein is increased or generated in a non-human organism, like a microorganism or a plant cell, plant or part thereof, especially with non-targeted localization, whereby the respective line disclose in column 7 the fine chemical lignoceric acid. For example, an increase of the lignoceric acid of at least 1 percent, particularly in a range of 28 to 96-percent is conferred as compared to a corresponding non-transformed wild type non-human organism.

[95336] Accordingly, in one embodiment, an increase of lignoceric acid in a non-human organism, as compared to a corresponding non-transformed wild type non-human organism, is conferred in the process of the invention, if the activity of a polypeptide showing the activity of a ylr065c-protein, or if the activity of the polypeptide Ylr065c, preferably represented by SEQ ID NO. 66696, or a homolog or fragment thereof, or if the activity of a polypeptide encoded by a nucleic acid molecule comprising the nucleic acid SEQ ID NO. 66695, preferably the coding region thereof, or a homolog or fragment thereof, e.g. derived from Saccharomyces cerevisiae, is increased or generated. For example the activity of a nucleic acid molecule or a polypeptide comprising the nucleic acid, preferably the coding region thereof, or polypeptide or the consensus sequence or the polypeptide motif, as depicted in Table I, II or IV, application No. 18, column 5 or 8 in the respective same line as the nucleic acid molecule SEQ ID NO. 66695 or polypeptide SEQ ID NO. 66696, respectively, or a homolog or a fragment thereof, is increased or generated, or if the activity ylr065c-protein is increased or generated in a non-human organism, like a microorganism or a plant cell, plant or part thereof, especially with plastidic localization, whereby the respective line disclose in column 7 the fine chemical lignoceric acid. For example, an increase of the lignoceric acid of at least 1 percent, particularly in a range of 28 to 66-percent is conferred as compared to a corresponding non-transformed wild type non-human organism.

[95337] Accordingly, in one embodiment, an increase of lignoceric acid in a non-human organism, as compared to a corresponding non-transformed wild type non-human organism, is conferred in the process of the invention, if the activity of a polypeptide showing the activity of a yml093w-protein, or if the activity of the polypeptide Yml093w, preferably represented by SEQ ID NO. 152425, or a homolog or fragment thereof, or if the activity of a polypeptide encoded by a nucleic acid molecule comprising the nucleic acid SEQ ID NO. 152424, preferably the coding region thereof, or a homolog or fragment thereof, e.g. derived from Saccharomyces cerevisiae, is increased or generated. For example the activity of a nucleic acid molecule or a polypeptide comprising the nucleic acid, preferably the coding region thereof, or polypeptide or the consensus sequence or the polypeptide motif, as depicted in Table I, II or IV, application No. 18, column 5 or 8 in the respective same line as the nucleic acid molecule SEQ ID NO. 152424 or polypeptide SEQ ID NO. 152425, respectively, or a homolog or a fragment thereof, is increased or generated, or if the activity yml093w-protein is increased or generated in a non-human organism, like a microorganism or a plant cell, plant or part thereof, especially with plastidic localization, whereby the respective line disclose in column 7 the fine chemical lignoceric acid. For example, an increase of the lignoceric acid of at least 1 percent, particularly in a range of 34 to 69 is conferred as compared to a corresponding non-transformed wild type non-human-percent organism.

[95338] Accordingly, in one embodiment, an increase of lignoceric acid in a non-human organism, as compared to a corresponding non-transformed wild type non-human organism, is conferred in the process of the invention, if the activity of a polypeptide showing the activity of a mitochondrial inner membrane protease subunit, or if the activity of the polypeptide Ymr150c, preferably represented by SEQ ID NO. 92275, or a homolog or fragment thereof, or if the activity of a polypeptide encoded by a nucleic acid molecule comprising the nucleic acid SEQ ID NO. 92274, preferably the coding region thereof, or a homolog or fragment thereof, e.g. derived from Saccharomyces cerevisiae, is increased or generated. For example the activity of a nucleic acid molecule or a polypeptide comprising the nucleic acid, preferably the coding region thereof, or polypeptide or the consensus sequence or the polypeptide motif, as depicted in Table I, II or IV, application No. 18, column 5 or 8 in the respective same line as the nucleic acid molecule SEQ ID NO. 92274 or polypeptide SEQ ID NO. 92275, respectively, or a homolog or a fragment thereof, is increased or generated, or if the activity mitochondrial inner membrane protease subunit is increased or generated in a non-human organism, like a microorganism or a plant cell, plant or part thereof, especially with plastidic localization, whereby the respective line disclose in column 7 the fine chemical lignoceric acid. For example, an increase of the lignoceric acid of at least 1 percent, particularly in a range of 29 to 74-percent is conferred as compared to a corresponding non-transformed wild type non-human organism.

[95339] Accordingly, in one embodiment, an increase of lignoceric acid in a non-human organism, as compared to a corresponding non-transformed wild type non-human organism, is conferred in the process of the invention, if the activity of a polypeptide showing the activity of a mevalonate kinase, or if the activity of the polypeptide Ymr208w, preferably represented by SEQ ID NO. 152461, or a homolog or fragment thereof, or if the activity of a polypeptide encoded by a nucleic acid molecule comprising the nucleic acid SEQ ID NO. 152460, preferably the coding region thereof, or a homolog or fragment thereof, e.g. derived from Saccharomyces cerevisiae, is increased or generated. For example the activity of a nucleic acid molecule or a polypeptide comprising the nucleic acid, preferably the coding region thereof, or polypeptide or the consensus sequence or the polypeptide motif, as depicted in Table I, II or IV, application No. 18, column 5 or 8 in the respective same line as the nucleic acid molecule SEQ ID NO. 152460 or polypeptide SEQ ID NO. 152461, respectively, or a homolog or a fragment thereof, is increased or generated, or if the activity mevalonate kinase is increased or generated in a non-human organism, like a microorganism or a plant cell, plant or part thereof, especially with plastidic localization, whereby the respective line disclose in column 7 the fine chemical lignoceric acid. For example, an increase of the lignoceric acid of at least 1 percent, particularly in a range of 30 to 44-percent is conferred as compared to a corresponding non-transformed wild type non-human organism.

[95340] Accordingly, in one embodiment, an increase of melissic acid in a non-human organism, as compared to a corresponding non-transformed wild type non-human organism, is conferred in the process of the invention, if the activity of a polypeptide showing the activity of a yer152c-protein, or if the activity of the polypeptide Yer152c, preferably represented by SEQ ID NO. 152342, or a homolog or fragment thereof, or if the activity of a polypeptide encoded by a nucleic acid molecule comprising the nucleic acid SEQ ID NO. 152341, preferably the coding region thereof, or a homolog or fragment thereof, e.g. derived from Saccharomyces cerevisiae, is increased or generated. For example the activity of a nucleic acid molecule or a polypeptide comprising the nucleic acid, preferably the coding region thereof, or polypeptide or the consensus sequence or the polypeptide motif, as depicted in Table I, II or IV, application No. 18, column 5 or 8 in the respective same line as the nucleic acid molecule SEQ ID NO. 152341 or polypeptide SEQ ID NO. 152342, respectively, or a homolog or a fragment thereof, is increased or generated, or if the activity yer152c-protein is increased or generated in a non-human organism, like a microorganism or a plant cell, plant or part thereof, especially with non-targeted localization, whereby the respective line disclose in column 7 the fine chemical melissic acid. For example, an increase of the melissic acid of at least 1 percent, particularly in a range of 1 to 69-percent is conferred as compared to a corresponding non-transformed wild type non-human organism.

[95341] Accordingly, in one embodiment, an increase of montanic acid in a non-human organism, as compared to a corresponding non-transformed wild type non-human organism, is conferred in the process of the invention, if the activity of a polypeptide showing the activity of a yer152c-protein, or if the activity of the polypeptide Yer152c, preferably represented by SEQ ID NO. 152342, or a homolog or fragment thereof, or if the activity of a polypeptide encoded by a nucleic acid molecule comprising the nucleic acid SEQ ID NO. 152341, preferably the coding region thereof, or a homolog or fragment thereof, e.g. derived from Saccharomyces cerevisiae, is increased or generated. For example the activity of a nucleic acid molecule or a polypeptide comprising the nucleic acid, preferably the coding region thereof, or polypeptide or the consensus sequence or the polypeptide motif, as depicted in Table I, II or IV, application No. 18, column 5 or 8 in the respective same line as the nucleic acid molecule SEQ ID NO. 152341 or polypeptide SEQ ID NO. 152342, respectively, or a homolog or a fragment thereof, is increased or generated, or if the activity yer152c-protein is increased or generated in a non-human organism, like a microorganism or a plant cell, plant or part thereof, especially with non-targeted localization, whereby the respective line disclose in column 7 the fine chemical montanic acid. For example, an increase of the montanic acid of at least 1 percent, particularly in a range of 3 to 93-percent is conferred as compared to a corresponding non-transformed wild type non-human organism.

[95342] Accordingly, in one embodiment, an increase of melissic acid in a non-human organism, as compared to a corresponding non-transformed wild type non-human organism, is conferred in the process of the invention, if the activity of a polypeptide showing the activity of a b3644-protein, or if the activity of the polypeptide B3644, preferably represented by SEQ ID NO. 125349, or a homolog or fragment thereof, or if the activity of a polypeptide encoded by a nuoleic acid molecule comprising the nucleic acid SEQ ID NO. 125348, preferably the coding region thereof, or a homolog or fragment thereof, e.g. derived from Escherichia coli, is increased or generated. For example the activity of a nucleic acid molecule or a polypeptide comprising the nucleic acid, preferably the coding region thereof, or polypeptide or the consensus sequence or the polypeptide motif, as depicted in Table I, II or IV, application No. 18, column 5 or 8 in the respective same line as the nucleic acid molecule SEQ ID NO. 125348 or polypeptide SEQ ID NO. 125349, respectively, or a homolog or a fragment thereof, is increased or generated, or if the activity b3644-protein is increased or generated in a non-human organism, like a microorganism or a plant cell, plant or part thereof, especially with non-targeted localization, whereby the respective line disclose in column 7 the fine chemical melissic acid. For example, an increase of the melissic acid of at least 1 percent, particularly in a range of 3 to 56-percent is conferred as compared to a corresponding non-transformed wild type non-human organism.

[95343] Accordingly, in one embodiment, an increase of montanic acid in a non-human organism, as compared to a corresponding non-transformed wild type non-human organism, is conferred in the process of the invention, if the activity of a polypeptide showing the activity of a b3644-protein, or if the activity of the polypeptide B3644, preferably represented by SEQ ID NO. 125349, or a homolog or fragment thereof, or if the activity of a polypeptide encoded by a nucleic acid molecule comprising the nucleic acid SEQ ID NO. 125348, preferably the coding region thereof, or a homolog or fragment thereof, e.g. derived from Escherichia coli, is increased or generated. For example the activity of a nucleic acid molecule or a polypeptide comprising the nucleic acid, preferably the coding region thereof, or polypeptide or the consensus sequence or the polypeptide motif, as depicted in Table I, II or IV, application No. 18, column 5 or 8 in the respective same line as the nucleic acid molecule SEQ ID NO. 125348 or polypeptide SEQ ID NO. 125349, respectively, or a homolog or a fragment thereof, is increased or generated, or if the activity b3644-protein is increased or generated in a non-human organism, like a microorganism or a plant cell, plant or part thereof, especially with non-targeted localization, whereby the respective line disclose in column 7 the fine chemical montanic acid. For example, an increase of the montanic acid of at least 1 percent, particularly in a range of 5 to 49-percent is conferred as compared to a corresponding non-transformed wild type non-human organism.

[95344] [0096.1.7.18] to [0103.1.7.18] for the disclosure of these paragraphs see [0096.1.7.7] to [0103.1.7.7] above

[95345] In this paragraph “A” means “Goffeau et al., Science 274 (5287), 546 (1996)”, “B” means “Blattner et al., Science 277 (5331), 1453 (1997)”, “C” means “Nakamura et al., Nucleic Acids Res. 28(1), 72 (2000)”, “D” means “deposition of the sequences to the EMBL/GenBank/DDBJ databases under “Sequencing of the draft genome assembly of Azotobacter vinelandii AvOP”. in June 2005 by Copeland et al.”, “E” means “Henne et al., Nat. Biotechnol. 22 (5), 547 (2004)”, “F” means “Kaul et al., Nature 408 (6814), 796 (2000)”, and “G” means “Matsumoto et al., Nature 436 (7052), 793 (2005)”.

[95346] The nucleic acid sequence of At1g36730 from Arabidopsis thaliana, e.g. as shown in the respective line in column 5 of Table I, application no. 18, has been published in F. And the activity of the gene product thereof is the activity of eukaryotic translation initiation factor 5.

[95347] Accordingly, in one embodiment, the process of the present invention for producing lignoceric acid in a non-human organism, like a microorganism or a plant or a part thereof, comprises increasing or generating the activity of a gene product with the activity of a gene product conferring the activity of “eukaryotic translation initiation factor 5”, especially from Arabidopsis thaliana or its functional equivalent or its homolog, e.g. the increase of
[95348] (a) a gene product of a gene comprising the nucleic acid molecule as shown in the respective line in column 5 of Table I (whereby the respective line disclose in column 7 the fine chemical lignoceric acid), application no. 18, preferably the coding region thereof, or a homolog or a fragment thereof, and being depicted in the same respective line as said At1g36730, or a functional equivalent or a homolog thereof as shown in column 8 of Table I, application no. 18, preferably the coding region thereof, particularly a homolog or functional equivalent as shown in column 8 of Table I B, application no. 18, and being depicted in the same respective line as said At1g36730, and preferably the activity is increased non-targeted, or
[95349] (b) a polypeptide comprising a polypeptide, a consensus sequence or at least a polypeptide motif as shown in the respective line in column 5 of Table II or in column 8 of Table IV, application no. 18, respectively, and being depicted in the same respective line as said At1g36730, or a functional equivalent or a homolog thereof as depicted in column 8 of Table II, application no. 18, preferably a homolog or functional equivalent as depicted in column 8 of Table II B, application no. 18, and being depicted in the same respective line as said At1g36730, and preferably the activity is increased non-targeted, whereby the respective line disclose in column 7 the fine chemical lignoceric acid.

[95350] Accordingly, in one embodiment, the molecule which activity is to be increased in the process of the invention is the gene product with an activity as a “eukaryotic translation initiation factor 5”, preferably it is the molecule of section (a) or (b) of this paragraph.

[95351] In particular, it was observed that in plants, especially in Arabidopsis thaliana, increasing or generating the activity of a gene product non-targeted with the activity of a “eukaryotic translation initiation factor 5”, preferably being encoded by a gene comprising the nucleic acid sequence SEQ ID NO. 17968, preferably the coding region thereof, conferred the production of or the increase in lignoceric acid compared with the wild type control.

[95352] The nucleic acid sequence of At1g48260 from Arabidopsis thaliana, e.g. as shown in the respective line in column 5 of Table I, application no. 18, has been published in F. And the activity of the gene product thereof is the activity of protein kinase.

[95353] Accordingly, in one embodiment, the process of the present invention for producing lignoceric acid in a non-human organism, like a microorganism or a plant or a part thereof, comprises increasing or generating the activity of a gene product with the activity of a gene product conferring the activity of “protein kinase”, especially from Arabidopsis thaliana or its functional equivalent or its homolog, e.g. the increase of
[95354] (a) a gene product of a gene comprising the nucleic acid molecule as shown in the respective line in column 5 of Table I (whereby the respective line disclose in column 7 the fine chemical lignoceric acid), application no. 18, preferably the coding region thereof, or a homolog or a fragment thereof, and being depicted in the same respective line as said At1g48260, or a functional equivalent or a homolog thereof as shown in column 8 of Table I, application no. 18, preferably the coding region thereof, particularly a homolog or functional equivalent as shown in column 8 of Table I B, application no. 18, and being depicted in the same respective line as said At1g48260, and preferably the activity is increased non-targeted, or
[95355] (b) a polypeptide comprising a polypeptide, a consensus sequence or at least a polypeptide motif as shown in the respective line in column 5 of Table II or in column 8 of Table IV, application no. 18, respectively, and being depicted in the same respective line as said At1g48260, or a functional equivalent or a homolog thereof as depicted in column 8 of Table II, application no. 18, preferably a homolog or functional equivalent as depicted in column 8 of Table II B, application no. 18, and being depicted in the same respective line as said At1g48260, and preferably the activity is increased non-targeted, whereby the respective line disclose in column 7 the fine chemical lignoceric acid.

[95356] Accordingly, in one embodiment, the molecule which activity is to be increased in the process of the invention is the gene product with an activity as a “protein kinase”, preferably it is the molecule of section (a) or (b) of this paragraph.

[95357] In particular, it was observed that in plants, especially in Arabidopsis thaliana, increasing or generating the activity of a gene product non-targeted with the activity of a “protein kinase”, preferably being encoded by a gene comprising the nucleic acid sequence SEQ ID NO. 18235, preferably the coding region thereof, conferred the production of or the increase in lignoceric acid compared with the wild type control.

[95358] The nucleic acid sequence of At3g08710 from Arabidopsis thaliana, e.g. as shown in the respective line in column 5 of Table I, application no. 18, has been published in F. And the activity of the gene product thereof is the activity of thioredoxin family protein.

[95359] Accordingly, in one embodiment, the process of the present invention for producing lignoceric acid in a non-human organism, like a microorganism or a plant or a part thereof, comprises increasing or generating the activity of a gene product with the activity of a gene product conferring the activity of “thioredoxin family protein”, especially from Arabidopsis thaliana or its functional equivalent or its homolog, e.g. the increase of
[95360] (a) a gene product of a gene comprising the nucleic acid molecule as shown in the respective line in column 5 of Table I (whereby the respective line disclose in column 7 the fine chemical lignoceric acid), application no. 18, preferably the coding region thereof, or a homolog or a fragment thereof, and being depicted in the same respective line as said At3g08710, or a functional equivalent or a homolog thereof as shown in column 8 of Table I, application no. 18, preferably the coding region thereof, particularly a homolog or functional equivalent as shown in column 8 of Table I B, application no. 18, and being depicted in the same respective line as said At3g08710, and preferably the activity is increased non-targeted, or
[95361] (b) a polypeptide comprising a polypeptide, a consensus sequence or at least a polypeptide motif as shown in the respective line in column 5 of Table II or in column 8 of Table IV, application no. 18, respectively, and being depicted in the same respective line as said At3g08710, or a functional equivalent or a homolog thereof as depicted in column 8 of Table II, application no. 18, preferably a homolog or functional equivalent as depicted in column 8 of Table II B, application no. 18, and being depicted in the same respective line as said At3g08710, and preferably the activity is increased non-targeted, whereby the respective line disclose in column 7 the fine chemical lignoceric acid.

[95362] Accordingly, in one embodiment, the molecule which activity is to be increased in the process of the invention is the gene product with an activity as a “thioredoxin family protein”, preferably it is the molecule of section (a) or (b) of this paragraph.

[95363] In particular, it was observed that in plants, especially in Arabidopsis thaliana, increasing or generating the activity of a gene product non-targeted with the activity of a “thioredoxin family protein”, preferably being encoded by a gene comprising the nucleic acid sequence SEQ ID NO. 22249, preferably the coding region thereof, conferred the production of or the increase in lignoceric acid compared with the wild type control.

[95364] The nucleic acid sequence of At3g09940 from Arabidopsis thaliana, e.g. as shown in the respective line in column 5 of Table I, application no. 18, has been published in F. And the activity of the gene product thereof is the activity of monodehydroascorbate reductase.

[95365] Accordingly, in one embodiment, the process of the present invention for producing lignoceric acid in a non-human organism, like a microorganism or a plant or a part thereof, comprises increasing or generating the activity of a gene product with the activity of a gene product conferring the activity of “monodehydroascorbate reductase”, especially from Arabidopsis thaliana or its functional equivalent or its homolog, e.g. the increase of
[95366] (a) a gene product of a gene comprising the nucleic acid molecule as shown in the respective line in column 5 of Table I (whereby the respective line disclose in column 7 the fine chemical lignoceric acid), application no. 18, preferably the coding region thereof, or a homolog or a fragment thereof, and being depicted in the same respective line as said At3g09940, or a functional equivalent or a homolog thereof as shown in column 8 of Table I, application no. 18, preferably the coding region thereof, particularly a homolog or functional equivalent as shown in column 8 of Table I B, application no. 18, and being depicted in the same respective line as said At3g09940, and preferably the activity is increased non-targeted, or
[95367] (b) a polypeptide comprising a polypeptide, a consensus sequence or at least a polypeptide motif as shown in the respective line in column 5 of Table II or in column 8 of Table IV, application no. 18, respectively, and being depicted in the same respective line as said At3g09940, or a functional equivalent or a homolog thereof as depicted in column 8 of Table II, application no. 18, preferably a homolog or functional equivalent as depicted in column 8 of Table II B, application no. 18, and being depicted in the same respective line as said At3g09940, and preferably the activity is increased non-targeted, whereby the respective line disclose in column 7 the fine chemical lignoceric acid.

[95368] Accordingly, in one embodiment, the molecule which activity is to be increased in the process of the invention is the gene product with an activity as a “monodehydroascorbate reductase”, preferably it is the molecule of section (a) or (b) of this paragraph.

[95369] In particular, it was observed that in plants, especially in Arabidopsis thaliana, increasing or generating the activity of a gene product non-targeted with the activity of a “monodehydroascorbate reductase”, preferably being encoded by a gene comprising the nucleic acid sequence SEQ ID NO. 152081, preferably the coding region thereof, conferred the production of or the increase in lignoceric acid compared with the wild type control.

[95370] The nucleic acid sequence of At3g27540 from Arabidopsis thaliana, e.g. as shown in the respective line in column 5 of Table I, application no. 18, has been published in F. And the activity of the gene product thereof is the activity of glycosyl transferase.

[95371] Accordingly, in one embodiment, the process of the present invention for producing lignoceric acid in a non-human organism, like a microorganism or a plant or a part thereof, comprises increasing or generating the activity of a gene product with the activity of a gene product conferring the activity of “glycosyl transferase”, especially from Arabidopsis thaliana or its functional equivalent or its homolog, e.g. the increase of
[95372] (a) a gene product of a gene comprising the nucleic acid molecule as shown in the respective line in column 5 of Table I (whereby the respective line disclose in column 7 the fine chemical lignoceric acid), application no. 18, preferably the coding region thereof, or a homolog or a fragment thereof, and being depicted in the same respective line as said At3g27540, or a functional equivalent or a homolog thereof as shown in column 8 of Table I, application no. 18, preferably the coding region thereof, particularly a homolog or functional equivalent as shown in column 8 of Table I B, application no. 18, and being depicted in the same respective line as said At3g27540, and preferably the activity is increased non-targeted, or
[95373] (b) a polypeptide comprising a polypeptide, a consensus sequence or at least a polypeptide motif as shown in the respective line in column 5 of Table II or in column 8 of Table IV, application no. 18, respectively, and being depicted in the same respective line as said At3g27540, or a functional equivalent or a homolog thereof as depicted in column 8 of Table II, application no. 18, preferably a homolog or functional equivalent as depicted in column 8 of Table II B, application no. 18, and being depicted in the same respective line as said At3g27540, and preferably the activity is increased non-targeted, whereby the respective line disclose in column 7 the fine chemical lignoceric acid.

[95374] Accordingly, in one embodiment, the molecule which activity is to be increased in the process of the invention is the gene product with an activity as a “glycosyl transferase”, preferably it is the molecule of section (a) or (b) of this paragraph.

[95375] In particular, it was observed that in plants, especially in Arabidopsis thaliana, increasing or generating the activity of a gene product non-targeted with the activity of a “glycosyl transferase”, preferably being encoded by a gene comprising the nucleic acid sequence SEQ ID NO. 68777, preferably the coding region thereof, conferred the production of or the increase in lignoceric acid compared with the wild type control.

[95376] The nucleic acid sequence of At3g62950 from Arabidopsis thaliana, e.g. as shown in the respective line in column 5 of Table I, application no. 18, has been published in F. And the activity of the gene product thereof is the activity of glutaredoxin.

[95377] Accordingly, in one embodiment, the process of the present invention for producing lignoceric acid in a non-human organism, like a microorganism or a plant or a part thereof, comprises increasing or generating the activity of a gene product with the activity of a gene product conferring the activity of “glutaredoxin”, especially from Arabidopsis thaliana or its functional equivalent or its homolog, e.g. the increase of
[95378] (a) a gene product of a gene comprising the nucleic acid molecule as shown in the respective line in column 5 of Table I (whereby the respective line disclose in column 7 the fine chemical lignoceric acid), application no. 18, preferably the coding region thereof, or a homolog or a fragment thereof, and being depicted in the same respective line as said At3g62950, or a functional equivalent or a homolog thereof as shown in column 8 of Table I, application no. 18, preferably the coding region thereof, particularly a homolog or functional equivalent as shown in column 8 of Table I B, application no. 18, and being depicted in the same respective line as said At3g62950, and preferably the activity is increased non-targeted, or
[95379] (b) a polypeptide comprising a polypeptide, a consensus sequence or at least a polypeptide motif as shown in the respective line in column 5 of Table II or in column 8 of Table IV, application no. 18, respectively, and being depicted in the same respective line as said At3g62950, or a functional equivalent or a homolog thereof as depicted in column 8 of Table II, application no. 18, preferably a homolog or functional equivalent as depicted in column 8 of Table II B, application no. 18, and being depicted in the same respective line as said At3g62950, and preferably the activity is increased non-targeted, whereby the respective line disclose in column 7 the fine chemical lignoceric acid.

[95380] Accordingly, in one embodiment, the molecule which activity is to be increased in the process of the invention is the gene product with an activity as a “glutaredoxin”, preferably it is the molecule of section (a) or (b) of this paragraph.

[95381] In particular, it was observed that in plants, especially in Arabidopsis thaliana, increasing or generating the activity of a gene product non-targeted with the activity of a “glutaredoxin”, preferably being encoded by a gene comprising the nucleic acid sequence SEQ ID NO. 2935, preferably the coding region thereof, conferred the production of or the increase in lignoceric acid compared with the wild type control.

[95382] The nucleic acid sequence of At4g18880 from Arabidopsis thaliana, e.g. as shown in the respective line in column 5 of Table I, application no. 18, has been published in F. And the activity of the gene product thereof is the activity of heat shock transcription factor.

[95383] Accordingly, in one embodiment, the process of the present invention for producing lignoceric acid in a non-human organism, like a microorganism or a plant or a part thereof, comprises increasing or generating the activity of a gene product with the activity of a gene product conferring the activity of “heat shock transcription factor”, especially from Arabidopsis thaliana or its functional equivalent or its homolog, e.g. the increase of
[95384] (a) a gene product of a gene comprising the nucleic acid molecule as shown in the respective line in column 5 of Table I (whereby the respective line disclose in column 7 the fine chemical lignoceric acid), application no. 18, preferably the coding region thereof, or a homolog or a fragment thereof, and being depicted in the same respective line as said At4g18880, or a functional equivalent or a homolog thereof as shown in column 8 of Table I, application no. 18, preferably the coding region thereof, particularly a homolog or functional equivalent as shown in column 8 of Table I B, application no. 18, and being depicted in the same respective line as said At4g18880, and preferably the activity is increased non-targeted, or
[95385] (b) a polypeptide comprising a polypeptide, a consensus sequence or at least a polypeptide motif as shown in the respective line in column 5 of Table II or in column 8 of Table IV, application no. 18, respectively, and being depicted in the same respective line as said At4g18880, or a functional equivalent or a homolog thereof as depicted in column 8 of Table II, application no. 18, preferably a homolog or functional equivalent as depicted in column 8 of Table II B, application no. 18, and being depicted in the same respective line as said At4g18880, and preferably the activity is increased non-targeted, whereby the respective line disclose in column 7 the fine chemical lignoceric acid.

[95386] Accordingly, in one embodiment, the molecule which activity is to be increased in the process of the invention is the gene product with an activity as a “heat shock transcription factor”, preferably it is the molecule of section (a) or (b) of this paragraph.

[95387] In particular, it was observed that in plants, especially in Arabidopsis thaliana, increasing or generating the activity of a gene product non-targeted with the activity of a “heat shock transcription factor”, preferably being encoded by a gene comprising the nucleic acid sequence SEQ ID NO. 24232, preferably the coding region thereof, conferred the production of or the increase in lignoceric acid compared with the wild type control.

[95388] The nucleic acid sequence of At4g35310 from Arabidopsis thaliana, e.g. as shown in the respective line in column 5 of Table I, application no. 18, has been published in F. And the activity of the gene product thereof is the activity of calcium-dependent protein kinase.

[95389] Accordingly, in one embodiment, the process of the present invention for producing lignoceric acid in a non-human organism, like a microorganism or a plant or a part thereof, comprises increasing or generating the activity of a gene product with the activity of a gene product conferring the activity of “calcium-dependent protein kinase”, especially from Arabidopsis thaliana or its functional equivalent or its homolog, e.g. the increase of
[95390] (a) a gene product of a gene comprising the nucleic acid molecule as shown in the respective line in column 5 of Table I (whereby the respective line disclose in column 7 the fine chemical lignoceric acid), application no. 18, preferably the coding region thereof, or a homolog or a fragment thereof, and being depicted in the same respective line as said At4g35310, or a functional equivalent or a homolog thereof as shown in column 8 of Table I, application no. 18, preferably the coding region thereof, particularly a homolog or functional equivalent as shown in column 8 of Table I B, application no. 18, and being depicted in the same respective line as said At4g35310, and preferably the activity is increased non-targeted, or
[95391] (b) a polypeptide comprising a polypeptide, a consensus sequence or at least a polypeptide motif as shown in the respective line in column 5 of Table II or in column 8 of Table IV, application no. 18, respectively, and being depicted in the same respective line as said At4g35310, or a functional equivalent or a homolog thereof as depicted in column 8 of Table II, application no. 18, preferably a homolog or functional equivalent as depicted in column 8 of Table II B, application no. 18, and being depicted in the same respective line as said At4g35310, and preferably the activity is increased non-targeted, whereby the respective line disclose in column 7 the fine chemical lignoceric acid.

[95392] Accordingly, in one embodiment, the molecule which activity is to be increased in the process of the invention is the gene product with an activity as a “calcium-dependent protein kinase”, preferably it is the molecule of section (a) or (b) of this paragraph.

[95393] In particular, it was observed that in plants, especially in Arabidopsis thaliana, increasing or generating the activity of a gene product non-targeted with the activity of a “calcium-dependent protein kinase”, preferably being encoded by a gene comprising the nucleic acid sequence SEQ ID NO. 4348, preferably the coding region thereof, conferred the production of or the increase in lignoceric acid compared with the wild type control.

[95394] The nucleic acid sequence of At5g07200 from Arabidopsis thaliana, e.g. as shown in the respective line in column 5 of Table I, application no. 18, has been published in F. And the activity of the gene product thereof is the activity of gibberellin 20-oxidase.

[95395] Accordingly, in one embodiment, the process of the present invention for producing lignoceric acid in a non-human organism, like a microorganism or a plant or a part thereof, comprises increasing or generating the activity of a gene product with the activity of a gene product conferring the activity of “gibberellin 20-oxidase”, especially from Arabidopsis thaliana or its functional equivalent or its homolog, e.g. the increase of
[95396] (a) a gene product of a gene comprising the nucleic acid molecule as shown in the respective line in column 5 of Table I (whereby the respective line disclose in column 7 the fine chemical lignoceric acid), application no. 18, preferably the coding region thereof, or a homolog or a fragment thereof, and being depicted in the same respective line as said At5g07200, or a functional equivalent or a homolog thereof as shown in column 8 of Table I, application no. 18, preferably the coding region thereof, particularly a homolog or functional equivalent as shown in column 8 of Table I B, application no. 18, and being depicted in the same respective line as said At5g07200, and preferably the activity is increased non-targeted, or
[95397] (b) a polypeptide comprising a polypeptide, a consensus sequence or at least a polypeptide motif as shown in the respective line in column 5 of Table II or in column 8 of Table IV, application no. 18, respectively, and being depicted in the same respective line as said At5g07200, or a functional equivalent or a homolog thereof as depicted in column 8 of Table II, application no. 18, preferably a homolog or functional equivalent as depicted in column 8 of Table II B, application no. 18, and being depicted in the same respective line as said At5g07200, and preferably the activity is increased non-targeted, whereby the respective line disclose in column 7 the fine chemical lignoceric acid.

[95398] Accordingly, in one embodiment, the molecule which activity is to be increased in the process of the invention is the gene product with an activity as a “gibberellin 20-oxidase”, preferably it is the molecule of section (a) or (b) of this paragraph.

[95399] In particular, it was observed that in plants, especially in Arabidopsis thaliana, increasing or generating the activity of a gene product non-targeted with the activity of a “gibberellin 20-oxidase”, preferably being encoded by a gene comprising the nucleic acid sequence SEQ ID NO. 24492, preferably the coding region thereof, conferred the production of or the increase in lignoceric acid compared with the wild type control.

[95400] The nucleic acid sequence of At5g64920 from Arabidopsis thaliana, e.g. as shown in the respective line in column 5 of Table I, application no. 18, has been published in F. And the activity of the gene product thereof is the activity of zinc finger protein.

[95401] Accordingly, in one embodiment, the process of the present invention for producing lignoceric acid in a non-human organism, like a microorganism or a plant or a part thereof, comprises increasing or generating the activity of a gene product with the activity of a gene product conferring the activity of “zinc finger protein”, especially from Arabidopsis thaliana or its functional equivalent or its homolog, e.g. the increase of
[95402] (a) a gene product of a gene comprising the nucleic acid molecule as shown in the respective line in column 5 of Table I (whereby the respective line disclose in column 7 the fine chemical lignoceric acid), application no. 18, preferably the coding region thereof, or a homolog or a fragment thereof, and being depicted in the same respective line as said At5g64920, or a functional equivalent or a homolog thereof as shown in column 8 of Table I, application no. 18, preferably the coding region thereof, particularly a homolog or functional equivalent as shown in column 8 of Table I B, application no. 18, and being depicted in the same respective line as said At5g64920, and preferably the activity is increased non-targeted, or
[95403] (b) a polypeptide comprising a polypeptide, a consensus sequence or at least a polypeptide motif as shown in the respective line in column 5 of Table II or in column 8 of Table IV, application no. 18, respectively, and being depicted in the same respective line as said At5g64920, or a functional equivalent or a homolog thereof as depicted in column 8 of Table II, application no. 18, preferably a homolog or functional equivalent as depicted in column 8 of Table II B, application no. 18, and being depicted in the same respective line as said At5g64920, and preferably the activity is increased non-targeted, whereby the respective line disclose in column 7 the fine chemical lignoceric acid.

[95404] Accordingly, in one embodiment, the molecule which activity is to be increased in the process of the invention is the gene product with an activity as a “zinc finger protein”, preferably it is the molecule of section (a) or (b) of this paragraph.

[95405] In particular, it was observed that in plants, especially in Arabidopsis thaliana, increasing or generating the activity of a gene product non-targeted with the activity of a “zinc finger protein”, preferably being encoded by a gene comprising the nucleic acid sequence SEQ ID NO. 5493, preferably the coding region thereof, conferred the production of or the increase in lignoceric acid compared with the wild type control.

[95406] The nucleic acid sequence of AvinDRAFT_{—}4562 from Azotobacter vinelandii, e.g. as shown in the respective line in column 5 of Table I, application no. 18, has been published in D. And the activity of the gene product thereof is the activity of aminotransferase.

[95407] Accordingly, in one embodiment, the process of the present invention for producing lignoceric acid in a non-human organism, like a microorganism or a plant or a part thereof, comprises increasing or generating the activity of a gene product with the activity of a gene product conferring the activity of “aminotransferase”, especially from Azotobacter vinelandii or its functional equivalent or its homolog, e.g. the increase of
[95408] (a) a gene product of a gene comprising the nucleic acid molecule as shown in the respective line in column 5 of Table I (whereby the respective line disclose in column 7 the fine chemical lignoceric acid), application no. 18, preferably the coding region thereof, or a homolog or a fragment thereof, and being depicted in the same respective line as said AvinDRAFT_{—}4562, or a functional equivalent or a homolog thereof as shown in column 8 of Table I, application no. 18, preferably the coding region thereof, particularly a homolog or functional equivalent as shown in column 8 of Table I B, application no. 18, and being depicted in the same respective line as said AvinDRAFT_{—}4562, and preferably the activity is increased non-targeted, or
[95409] (b) a polypeptide comprising a polypeptide, a consensus sequence or at least a polypeptide motif as shown in the respective line in column 5 of Table II or in column 8 of Table IV, application no. 18, respectively, and being depicted in the same respective line as said AvinDRAFT_{—}4562, or a functional equivalent or a homolog thereof as depicted in column 8 of Table II, application no. 18, preferably a homolog or functional equivalent as depicted in column 8 of Table II B, application no. 18, and being depicted in the same respective line as said AvinDRAFT_{—}4562, and preferably the activity is increased non-targeted, whereby the respective line disclose in column 7 the fine chemical lignoceric acid.

[95410] Accordingly, in one embodiment, the molecule which activity is to be increased in the process of the invention is the gene product with an activity as a “aminotransferase”, preferably it is the molecule of section (a) or (b) of this paragraph.

[95411] In particular, it was observed that in plants, especially in Arabidopsis thaliana, increasing or generating the activity of a gene product non-targeted with the activity of a “aminotransferase”, preferably being encoded by a gene comprising the nucleic acid sequence SEQ ID NO. 31926, preferably the coding region thereof, conferred the production of or the increase in lignoceric acid compared with the wild type control.

[95412] The nucleic acid sequence of AvinDRAFT_{—}5103 from Azotobacter vinelandii, e.g. as shown in the respective line in column 5 of Table I, application no. 18, has been published in D. And the activity of the gene product thereof is the activity of hydrolase.

[95413] Accordingly, in one embodiment, the process of the present invention for producing lignoceric acid in a non-human organism, like a microorganism or a plant or a part thereof, comprises increasing or generating the activity of a gene product with the activity of a gene product conferring the activity of “hydrolase”, especially from Azotobacter vinelandii or its functional equivalent or its homolog, e.g. the increase of
[95414] (a) a gene product of a gene comprising the nucleic acid molecule as shown in the respective line in column 5 of Table I (whereby the respective line disclose in column 7 the fine chemical lignoceric acid), application no. 18, preferably the coding region thereof, or a homolog or a fragment thereof, and being depicted in the same respective line as said AvinDRAFT_{—}5103, or a functional equivalent or a homolog thereof as shown in column 8 of Table I, application no. 18, preferably the coding region thereof, particularly a homolog or functional equivalent as shown in column 8 of Table I B, application no. 18, and being depicted in the same respective line as said AvinDRAFT_{—}5103, and preferably the activity is increased non-targeted, or
[95415] (b) a polypeptide comprising a polypeptide, a consensus sequence or at least a polypeptide motif as shown in the respective line in column 5 of Table II or in column 8 of Table IV, application no. 18, respectively, and being depicted in the same respective line as said AvinDRAFT_{—}5103, or a functional equivalent or a homolog thereof as depicted in column 8 of Table II, application no. 18, preferably a homolog or functional equivalent as depicted in column 8 of Table II B, application no. 18, and being depicted in the same respective line as said AvinDRAFT_{—}5103, and preferably the activity is increased non-targeted, whereby the respective line disclose in column 7 the fine chemical lignoceric acid.

[95416] Accordingly, in one embodiment, the molecule which activity is to be increased in the process of the invention is the gene product with an activity as a “hydrolase”, preferably it is the molecule of section (a) or (b) of this paragraph.

[95417] In particular, it was observed that in plants, especially in Arabidopsis thaliana, increasing or generating the activity of a gene product non-targeted with the activity of a “hydrolase”, preferably being encoded by a gene comprising the nucleic acid sequence SEQ ID NO. 6510, preferably the coding region thereof, conferred the production of or the increase in lignoceric acid compared with the wild type control.

[95418] The nucleic acid sequence of AvinDRAFT_{—}5246 from Azotobacter vinelandii, e.g. as shown in the respective line in column 5 of Table I, application no. 18, has been published in D. And the activity of the gene product thereof is the activity of glutamate-ammonia-ligase.

[95419] Accordingly, in one embodiment, the process of the present invention for producing lignoceric acid in a non-human organism, like a microorganism or a plant or a part thereof, comprises increasing or generating the activity of a gene product with the activity of a gene product conferring the activity of “glutamate-ammonia-ligase”, especially from Azotobacter vinelandii or its functional equivalent or its homolog, e.g. the increase of
[95420] (a) a gene product of a gene comprising the nucleic acid molecule as shown in the respective line in column 5 of Table I (whereby the respective line disclose in column 7 the fine chemical lignoceric acid), application no. 18, preferably the coding region thereof, or a homolog or a fragment thereof, and being depicted in the same respective line as said AvinDRAFT_{—}5246, or a functional equivalent or a homolog thereof as shown in column 8 of Table I, application no. 18, preferably the coding region thereof, particularly a homolog or functional equivalent as shown in column 8 of Table I B, application no. 18, and being depicted in the same respective line as said AvinDRAFT_{—}5246, and preferably the activity is increased non-targeted, or
[95421] (b) a polypeptide comprising a polypeptide, a consensus sequence or at least a polypeptide motif as shown in the respective line in column 5 of Table II or in column 8 of Table IV, application no. 18, respectively, and being depicted in the same respective line as said AvinDRAFT_{—}5246, or a functional equivalent or a homolog thereof as depicted in column 8 of Table II, application no. 18, preferably a homolog or functional equivalent as depicted in column 8 of Table II B, application no. 18, and being depicted in the same respective line as said AvinDRAFT_{—}5246, and preferably the activity is increased non-targeted, whereby the respective line disclose in column 7 the fine chemical lignoceric acid.

[95422] Accordingly, in one embodiment, the molecule which activity is to be increased in the process of the invention is the gene product with an activity as a “glutamate-ammonia-ligase”, preferably it is the molecule of section (a) or (b) of this paragraph.

[95423] In particular, it was observed that in plants, especially in Arabidopsis thaliana, increasing or generating the activity of a gene product non-targeted with the activity of a “glutamate-ammonia-ligase”, preferably being encoded by a gene comprising the nucleic acid sequence SEQ ID NO. 32037, preferably the coding region thereof, conferred the production of or the increase in lignoceric acid compared with the wild type control.

[95424] The nucleic acid sequence of AvinDRAFT_{—}5651 from Azotobacter vinelandii, e.g. as shown in the respective line in column 5 of Table I, application no. 18, has been published in D. And the activity of the gene product thereof is the activity of oxidoreductase.

[95425] Accordingly, in one embodiment, the process of the present invention for producing lignoceric acid in a non-human organism, like a microorganism or a plant or a part thereof, comprises increasing or generating the activity of a gene product with the activity of a gene product conferring the activity of “oxidoreductase”, especially from Azotobacter vinelandii or its functional equivalent or its homolog, e.g. the increase of
[95426] (a) a gene product of a gene comprising the nucleic acid molecule as shown in the respective line in column 5 of Table I (whereby the respective line disclose in column 7 the fine chemical lignoceric acid), application no. 18, preferably the coding region thereof, or a homolog or a fragment thereof, and being depicted in the same respective line as said AvinDRAFT_{—}5651, or a functional equivalent or a homolog thereof as shown in column 8 of Table I, application no. 18, preferably the coding region thereof, particularly a homolog or functional equivalent as shown in column 8 of Table I B, application no. 18, and being depicted in the same respective line as said AvinDRAFT_{—}5651, and preferably the activity is increased non-targeted, or
[95427] (b) a polypeptide comprising a polypeptide, a consensus sequence or at least a polypeptide motif as shown in the respective line in column 5 of Table II or in column 8 of Table IV, application no. 18, respectively, and being depicted in the same respective line as said AvinDRAFT_{—}5651, or a functional equivalent or a homolog thereof as depicted in column 8 of Table II, application no. 18, preferably a homolog or functional equivalent as depicted in column 8 of Table II B, application no. 18, and being depicted in the same respective line as said AvinDRAFT_{—}5651, and preferably the activity is increased non-targeted, whereby the respective line disclose in column 7 the fine chemical lignoceric acid.

[95428] Accordingly, in one embodiment, the molecule which activity is to be increased in the process of the invention is the gene product with an activity as a “oxidoreductase”, preferably it is the molecule of section (a) or (b) of this paragraph.

[95429] In particular, it was observed that in plants, especially in Arabidopsis thaliana, increasing or generating the activity of a gene product non-targeted with the activity of a “oxidoreductase”, preferably being encoded by a gene comprising the nucleic acid sequence SEQ ID NO. 33457, preferably the coding region thereof, conferred the production of or the increase in lignoceric acid compared with the wild type control.

[95430] The nucleic acid sequence of AvinDRAFT_{—}6093 from Azotobacter vinelandii, e.g. as shown in the respective line in column 5 of Table I, application no. 18, has been published in D. And the activity of the gene product thereof is the activity of chaperone protein CIpB.

[95431] Accordingly, in one embodiment, the process of the present invention for producing lignoceric acid in a non-human organism, like a microorganism or a plant or a part thereof, comprises increasing or generating the activity of a gene product with the activity of a gene product conferring the activity of “chaperone protein CIpB”, especially from Azotobacter vinelandii or its functional equivalent or its homolog, e.g. the increase of
[95432] (a) a gene product of a gene comprising the nucleic acid molecule as shown in the respective line in column 5 of Table I (whereby the respective line disclose in column 7 the fine chemical lignoceric acid), application no. 18, preferably the coding region thereof, or a homolog or a fragment thereof, and being depicted in the same respective line as said AvinDRAFT_{—}6093, or a functional equivalent or a homolog thereof as shown in column 8 of Table I, application no. 18, preferably the coding region thereof, particularly a homolog or functional equivalent as shown in column 8 of Table I B, application no. 18, and being depicted in the same respective line as said AvinDRAFT_{—}6093, and preferably the activity is increased non-targeted, or
[95433] (b) a polypeptide comprising a polypeptide, a consensus sequence or at least a polypeptide motif as shown in the respective line in column 5 of Table II or in column 8 of Table IV, application no. 18, respectively, and being depicted in the same respective line as said AvinDRAFT_{—}6093, or a functional equivalent or a homolog thereof as depicted in column 8 of Table II, application no. 18, preferably a homolog or functional equivalent as depicted in column 8 of Table II B, application no. 18, and being depicted in the same respective line as said AvinDRAFT_{—}6093, and preferably the activity is increased non-targeted, whereby the respective line disclose in column 7 the fine chemical lignoceric acid.

[95434] Accordingly, in one embodiment, the molecule which activity is to be increased in the process of the invention is the gene product with an activity as a “chaperone protein CIpB”, preferably it is the molecule of section (a) or (b) of this paragraph.

[95435] In particular, it was observed that in plants, especially in Arabidopsis thaliana, increasing or generating the activity of a gene product non-targeted with the activity of a “chaperone protein CIpB”, preferably being encoded by a gene comprising the nucleic acid sequence SEQ ID NO. 33596, preferably the coding region thereof, conferred the production of or the increase in lignoceric acid compared with the wild type control.

[95436] The nucleic acid sequence of AvinDRAFT_{—}6700 from Azotobacter vinelandii, e.g. as shown in the respective line in column 5 of Table I, application no. 18, has been published in D. And the activity of the gene product thereof is the activity of purine nucleoside phosphorylase.

[95437] Accordingly, in one embodiment, the process of the present invention for producing lignoceric acid in a non-human organism, like a microorganism or a plant or a part thereof, comprises increasing or generating the activity of a gene product with the activity of a gene product conferring the activity of “purine nucleoside phosphorylase”, especially from Azotobacter vinelandii or its functional equivalent or its homolog, e.g. the increase of
[95438] (a) a gene product of a gene comprising the nucleic acid molecule as shown in the respective line in column 5 of Table I (whereby the respective line disclose in column 7 the fine chemical lignoceric acid), application no. 18, preferably the coding region thereof, or a homolog or a fragment thereof, and being depicted in the same respective line as said AvinDRAFT_{—}6700, or a functional equivalent or a homolog thereof as shown in column 8 of Table I, application no. 18, preferably the coding region thereof, particularly a homolog or functional equivalent as shown in column 8 of Table I B, application no. 18, and being depicted in the same respective line as said AvinDRAFT_{—}6700, and preferably the activity is increased non-targeted, or
[95439] (b) a polypeptide comprising a polypeptide, a consensus sequence or at least a polypeptide motif as shown in the respective line in column 5 of Table II or in column 8 of Table IV, application no. 18, respectively, and being depicted in the same respective line as said AvinDRAFT_{—}6700, or a functional equivalent or a homolog thereof as depicted in column 8 of Table II, application no. 18, preferably a homolog or functional equivalent as depicted in column 8 of Table II B, application no. 18, and being depicted in the same respective line as said AvinDRAFT_{—}6700, and preferably the activity is increased non-targeted, whereby the respective line disclose in column 7 the fine chemical lignoceric acid.

[95440] Accordingly, in one embodiment, the molecule which activity is to be increased in the process of the invention is the gene product with an activity as a “purine nucleoside phosphorylase”, preferably it is the molecule of section (a) or (b) of this paragraph.

[95441] In particular, it was observed that in plants, especially in Arabidopsis thaliana, increasing or generating the activity of a gene product non-targeted with the activity of a “purine nucleoside phosphorylase”, preferably being encoded by a gene comprising the nucleic acid sequence SEQ ID NO. 34044, preferably the coding region thereof, conferred the production of or the increase in lignoceric acid compared with the wild type control.

[95442] The nucleic acid sequence of B0004 from Escherichia coli, e.g. as shown in the respective line in column 5 of Table I, application no. 18, has been published in B. And the activity of the gene product thereof is the activity of threonine synthase.

[95443] Accordingly, in one embodiment, the process of the present invention for producing lignoceric acid in a non-human organism, like a microorganism or a plant or a part thereof, comprises increasing or generating the activity of a gene product with the activity of a gene product conferring the activity of “threonine synthase”, especially from Escherichia coli or its functional equivalent or its homolog, e.g. the increase of
[95444] (a) a gene product of a gene comprising the nucleic acid molecule as shown in the respective line in column 5 of Table I (whereby the respective line disclose in column 7 the fine chemical lignoceric acid), application no. 18, preferably the coding region thereof, or a homolog or a fragment thereof, and being depicted in the same respective line as said B0004, or a functional equivalent or a homolog thereof as shown in column 8 of Table I, application no. 18, preferably the coding region thereof, particularly a homolog or functional equivalent as shown in column 8 of Table I B, application no. 18, and being depicted in the same respective line as said B0004, and preferably the activity is increased plastidic, or
[95445] (b) a polypeptide comprising a polypeptide, a consensus sequence or at least a polypeptide motif as shown in the respective line in column 5 of Table II or in column 8 of Table IV, application no. 18, respectively, and being depicted in the same respective line as said B0004, or a functional equivalent or a homolog thereof as depicted in column 8 of Table II, application no. 18, preferably a homolog or functional equivalent as depicted in column 8 of Table II B, application no. 18, and being depicted in the same respective line as said B0004, and preferably the activity is increased plastidic, whereby the respective line disclose in column 7 the fine chemical lignoceric acid.

[95446] Accordingly, in one embodiment, the molecule which activity is to be increased in the process of the invention is the gene product with an activity as a “threonine synthase”, preferably it is the molecule of section (a) or (b) of this paragraph.

[95447] In particular, it was observed that in plants, especially in Arabidopsis thaliana, increasing or generating the activity of a gene product plastidic with the activity of a “threonine synthase”, preferably being encoded by a gene comprising the nucleic acid sequence SEQ ID NO. 34889, preferably the coding region thereof, conferred the production of or the increase in lignoceric acid compared with the wild type control.

[95448] The nucleic acid sequence of B0161 from Escherichia coli, e.g. as shown in the respective line in column 5 of Table I, application no. 18, has been published in B. And the activity of the gene product thereof is the activity of serine protease.

[95449] Accordingly, in one embodiment, the process of the present invention for producing lignoceric acid in a non-human organism, like a microorganism or a plant or a part thereof, comprises increasing or generating the activity of a gene product with the activity of a gene product conferring the activity of “serine protease”, especially from Escherichia coli or its functional equivalent or its homolog, e.g. the increase of
[95450] (a) a gene product of a gene comprising the nucleic acid molecule as shown in the respective line in column 5 of Table I (whereby the respective line disclose in column 7 the fine chemical lignoceric acid), application no. 18, preferably the coding region thereof, or a homolog or a fragment thereof, and being depicted in the same respective line as said B0161, or a functional equivalent or a homolog thereof as shown in column 8 of Table I, application no. 18, preferably the coding region thereof, particularly a homolog or functional equivalent as shown in column 8 of Table I B, application no. 18, and being depicted in the same respective line as said B0161, and preferably the activity is increased non-targeted, or
[95451] (b) a polypeptide comprising a polypeptide, a consensus sequence or at least a polypeptide motif as shown in the respective line in column 5 of Table II or in column 8 of Table IV, application no. 18, respectively, and being depicted in the same respective line as said B0161, or a functional equivalent or a homolog thereof as depicted in column 8 of Table II, application no. 18, preferably a homolog or functional equivalent as depicted in column 8 of Table II B, application no. 18, and being depicted in the same respective line as said B0161, and preferably the activity is increased non-targeted, whereby the respective line disclose in column 7 the fine chemical lignoceric acid.

[95452] Accordingly, in one embodiment, the molecule which activity is to be increased in the process of the invention is the gene product with an activity as a “serine protease”, preferably it is the molecule of section (a) or (b) of this paragraph.

[95453] In particular, it was observed that in plants, especially in Arabidopsis thaliana, increasing or generating the activity of a gene product non-targeted with the activity of a “serine protease”, preferably being encoded by a gene comprising the nucleic acid sequence SEQ ID NO. 7081, preferably the coding region thereof, conferred the production of or the increase in lignoceric acid compared with the wild type control.

[95454] The nucleic acid sequence of B0449 from Escherichia coli, e.g. as shown in the respective line in column 5 of Table I, application no. 18, has been published in B. And the activity of the gene product thereof is the activity of ATP-binding component of a transport system.

[95455] Accordingly, in one embodiment, the process of the present invention for producing lignoceric acid in a non-human organism, like a microorganism or a plant or a part thereof, comprises increasing or generating the activity of a gene product with the activity of a gene product conferring the activity of “ATP-binding component of a transport system”, especially from Escherichia coli or its functional equivalent or its homolog, e.g. the increase of
[95456] (a) a gene product of a gene comprising the nucleic acid molecule as shown in the respective line in column 5 of Table I (whereby the respective line disclose in column 7 the fine chemical lignoceric acid), application no. 18, preferably the coding region thereof, or a homolog or a fragment thereof, and being depicted in the same respective line as said B0449, or a functional equivalent or a homolog thereof as shown in column 8 of Table I, application no. 18, preferably the coding region thereof, particularly a homolog or functional equivalent as shown in column 8 of Table I B, application no. 18, and being depicted in the same respective line as said B0449, and preferably the activity is increased non-targeted, or
[95457] (b) a polypeptide comprising a polypeptide, a consensus sequence or at least a polypeptide motif as shown in the respective line in column 5 of Table II or in column 8 of Table IV, application no. 18, respectively, and being depicted in the same respective line as said B0449, or a functional equivalent or a homolog thereof as depicted in column 8 of Table II, application no. 18, preferably a homolog or functional equivalent as depicted in column 8 of Table II B, application no. 18, and being depicted in the same respective line as said B0449, and preferably the activity is increased non-targeted, whereby the respective line disclose in column 7 the fine chemical lignoceric acid.

[95458] Accordingly, in one embodiment, the molecule which activity is to be increased in the process of the invention is the gene product with an activity as a “ATP-binding component of a transport system”, preferably it is the molecule of section (a) or (b) of this paragraph.

[95459] In particular, it was observed that in plants, especially in Arabidopsis thaliana, increasing or generating the activity of a gene product non-targeted with the activity of a “ATP-binding component of a transport system”, preferably being encoded by a gene comprising the nucleic acid sequence SEQ ID NO. 7333, preferably the coding region thereof, conferred the production of or the increase in lignoceric acid compared with the wild type control.

[95460] The nucleic acid sequence of B0593 from Escherichia coli, e.g. as shown in the respective line in column 5 of Table I, application no. 18, has been published in B. And the activity of the gene product thereof is the activity of isochorismate synthase.

[95461] Accordingly, in one embodiment, the process of the present invention for producing lignoceric acid in a non-human organism, like a microorganism or a plant or a part thereof, comprises increasing or generating the activity of a gene product with the activity of a gene product conferring the activity of “isochorismate synthase”, especially from Escherichia coli or its functional equivalent or its homolog, e.g. the increase of
[95462] (a) a gene product of a gene comprising the nucleic acid molecule as shown in the respective line in column 5 of Table I (whereby the respective line disclose in column 7 the fine chemical lignoceric acid), application no. 18, preferably the coding region thereof, or a homolog or a fragment thereof, and being depicted in the same respective line as said B0593, or a functional equivalent or a homolog thereof as shown in column 8 of Table I, application no. 18, preferably the coding region thereof, particularly a homolog or functional equivalent as shown in column 8 of Table I B, application no. 18, and being depicted in the same respective line as said B0593, and preferably the activity is increased plastidic, or
[95463] (b) a polypeptide comprising a polypeptide, a consensus sequence or at least a polypeptide motif as shown in the respective line in column 5 of Table II or in column 8 of Table IV, application no. 18, respectively, and being depicted in the same respective line as said B0593, or a functional equivalent or a homolog thereof as depicted in column 8 of Table II, application no. 18, preferably a homolog or functional equivalent as depicted in column 8 of Table II B, application no. 18, and being depicted in the same respective line as said B0593, and preferably the activity is increased plastidic, whereby the respective line disclose in column 7 the fine chemical lignoceric acid.

[95464] Accordingly, in one embodiment, the molecule which activity is to be increased in the process of the invention is the gene product with an activity as a “isochorismate synthase”, preferably it is the molecule of section (a) or (b) of this paragraph.

[95465] In particular, it was observed that in plants, especially in Arabidopsis thaliana, increasing or generating the activity of a gene product plastidic with the activity of a “isochorismate synthase”, preferably being encoded by a gene comprising the nucleic acid sequence SEQ ID NO. 35967, preferably the coding region thereof, conferred the production of or the increase in lignoceric acid compared with the wild type control.

[95466] The nucleic acid sequence of B0885 from Escherichia coli, e.g. as shown in the respective line in column 5 of Table I, application no. 18, has been published in B. And the activity of the gene product thereof is the activity of leucyl/phenylalanyl-tRNA-protein transferase.

[95467] Accordingly, in one embodiment, the process of the present invention for producing lignoceric acid in a non-human organism, like a microorganism or a plant or a part thereof, comprises increasing or generating the activity of a gene product with the activity of a gene product conferring the activity of “leucyl/phenylalanyl-tRNA-protein transferase”, especially from Escherichia coli or its functional equivalent or its homolog, e.g. the increase of
[95468] (a) a gene product of a gene comprising the nucleic acid molecule as shown in the respective line in column 5 of Table I (whereby the respective line disclose in column 7 the fine chemical lignoceric acid), application no. 18, preferably the coding region thereof, or a homolog or a fragment thereof, and being depicted in the same respective line as said B0885, or a functional equivalent or a homolog thereof as shown in column 8 of Table I, application no. 18, preferably the coding region thereof, particularly a homolog or functional equivalent as shown in column 8 of Table I B, application no. 18, and being depicted in the same respective line as said B0885, and preferably the activity is increased non-targeted, or
[95469] (b) a polypeptide comprising a polypeptide, a consensus sequence or at least a polypeptide motif as shown in the respective line in column 5 of Table II or in column 8 of Table IV, application no. 18, respectively, and being depicted in the same respective line as said B0885, or a functional equivalent or a homolog thereof as depicted in column 8 of Table II, application no. 18, preferably a homolog or functional equivalent as depicted in column 8 of Table II B, application no. 18, and being depicted in the same respective line as said B0885, and preferably the activity is increased non-targeted, whereby the respective line disclose in column 7 the fine chemical lignoceric acid.

[95470] Accordingly, in one embodiment, the molecule which activity is to be increased in the process of the invention is the gene product with an activity as a “leucyl/phenylalanyl-tRNA-protein transferase”, preferably it is the molecule of section (a) or (b) of this paragraph.

[95471] In particular, it was observed that in plants, especially in Arabidopsis thaliana, increasing or generating the activity of a gene product non-targeted with the activity of a “leucyl/phenylalanyltRNA-protein transferase”, preferably being encoded by a gene comprising the nucleic acid sequence SEQ ID NO. 36489, preferably the coding region thereof, conferred the production of or the increase in lignoceric acid compared with the wild type control.

[95472] The nucleic acid sequence of B0898 from Escherichia coli, e.g. as shown in the respective line in column 5 of Table I, application no. 18, has been published in B. And the activity of the gene product thereof is the activity of major facilitator superfamily transporter protein.

[95473] Accordingly, in one embodiment, the process of the present invention for producing lignoceric acid in a non-human organism, like a microorganism or a plant or a part thereof, comprises increasing or generating the activity of a gene product with the activity of a gene product conferring the activity of “major facilitator superfamily transporter protein”, especially from Escherichia coli or its functional equivalent or its homolog, e.g. the increase of
[95474] (a) a gene product of a gene comprising the nucleic acid molecule as shown in the respective line in column 5 of Table I (whereby the respective line disclose in column 7 the fine chemical lignoceric acid), application no. 18, preferably the coding region thereof, or a homolog or a fragment thereof, and being depicted in the same respective line as said B0898, or a functional equivalent or a homolog thereof as shown in column 8 of Table I, application no. 18, preferably the coding region thereof, particularly a homolog or functional equivalent as shown in column 8 of Table I B, application no. 18, and being depicted in the same respective line as said B0898, and preferably the activity is increased non-targeted, or
[95475] (b) a polypeptide comprising a polypeptide, a consensus sequence or at least a polypeptide motif as shown in the respective line in column 5 of Table II or in column 8 of Table IV, application no. 18, respectively, and being depicted in the same respective line as said B0898, or a functional equivalent or a homolog thereof as depicted in column 8 of Table II, application no. 18, preferably a homolog or functional equivalent as depicted in column 8 of Table II B, application no. 18, and being depicted in the same respective line as said B0898, and preferably the activity is increased non-targeted, whereby the respective line disclose in column 7 the fine chemical lignoceric acid.

[95476] Accordingly, in one embodiment, the molecule which activity is to be increased in the process of the invention is the gene product with an activity as a “major facilitator superfamily transporter protein”, preferably it is the molecule of section (a) or (b) of this paragraph.

[95477] In particular, it was observed that in plants, especially in Arabidopsis thaliana, increasing or generating the activity of a gene product non-targeted with the activity of a “major facilitator superfamily transporter protein”, preferably being encoded by a gene comprising the nucleic acid sequence SEQ ID NO. 7917, preferably the coding region thereof, conferred the production of or the increase in lignoceric acid compared with the wild type control.

[95478] The nucleic acid sequence of B1065 from Escherichia coli, e.g. as shown in the respective line in column 5 of Table I, application no. 18, has been published in B. And the activity of the gene product thereof is the activity of multidrug resistance protein.

[95479] Accordingly, in one embodiment, the process of the present invention for producing cerotic acid in a non-human organism, like a microorganism or a plant or a part thereof, comprises increasing or generating the activity of a gene product with the activity of a gene product conferring the activity of “multidrug resistance protein”, especially from Escherichia coli or its functional equivalent or its homolog, e.g. the increase of
[95480] (a) a gene product of a gene comprising the nucleic acid molecule as shown in the respective line in column 5 of Table I (whereby the respective line disclose in column 7 the fine chemical cerotic acid), application no. 18, preferably the coding region thereof, or a homolog or a fragment thereof, and being depicted in the same respective line as said B1065, or a functional equivalent or a homolog thereof as shown in column 8 of Table I, application no. 18, preferably the coding region thereof, particularly a homolog or functional equivalent as shown in column 8 of Table I B, application no. 18, and being depicted in the same respective line as said B1065, and preferably the activity is increased plastidic, or
[95481] (b) a polypeptide comprising a polypeptide, a consensus sequence or at least a polypeptide motif as shown in the respective line in column 5 of Table II or in column 8 of Table IV, application no. 18, respectively, and being depicted in the same respective line as said B1065, or a functional equivalent or a homolog thereof as depicted in column 8 of Table II, application no. 18, preferably a homolog or functional equivalent as depicted in column 8 of Table II B, application no. 18, and being depicted in the same respective line as said B1065, and preferably the activity is increased plastidic, whereby the respective line disclose in column 7 the fine chemical cerotic acid.

[95482] Accordingly, in one embodiment, the molecule which activity is to be increased in the process of the invention is the gene product with an activity as a “multidrug resistance protein”, preferably it is the molecule of section (a) or (b) of this paragraph.

[95483] In particular, it was observed that in plants, especially in Arabidopsis thaliana, increasing or generating the activity of a gene product plastidic with the activity of a “multidrug resistance protein”, preferably being encoded by a gene comprising the nucleic acid sequence SEQ ID NO. 76032, preferably the coding region thereof, conferred the production of or the increase in cerotic acid compared with the wild type control.

[95484] The nucleic acid sequence of B1186 from Escherichia coli, e.g. as shown in the respective line in column 5 of Table I, application no. 18, has been published in B. And the activity of the gene product thereof is the activity of sodium/proton antiporter.

[95485] Accordingly, in one embodiment, the process of the present invention for producing lignoceric acid in a non-human organism, like a microorganism or a plant or a part thereof, comprises increasing or generating the activity of a gene product with the activity of a gene product conferring the activity of “sodium/proton antiporter”, especially from Escherichia coli or its functional equivalent or its homolog, e.g. the increase of
[95486] (a) a gene product of a gene comprising the nucleic acid molecule as shown in the respective line in column 5 of Table I (whereby the respective line disclose in column 7 the fine chemical lignoceric acid), application no. 18, preferably the coding region thereof, or a homolog or a fragment thereof, and being depicted in the same respective line as said B1186, or a functional equivalent or a homolog thereof as shown in column 8 of Table I, application no. 18, preferably the coding region thereof, particularly a homolog or functional equivalent as shown in column 8 of Table I B, application no. 18, and being depicted in the same respective line as said B1186, and preferably the activity is increased non-targeted, or
[95487] (b) a polypeptide comprising a polypeptide, a consensus sequence or at least a polypeptide motif as shown in the respective line in column 5 of Table II or in column 8 of Table IV, application no. 18, respectively, and being depicted in the same respective line as said B1186, or a functional equivalent or a homolog thereof as depicted in column 8 of Table II, application no. 18, preferably a homolog or functional equivalent as depicted in column 8 of Table II B, application no. 18, and being depicted in the same respective line as said B1186, and preferably the activity is increased non-targeted, whereby the respective line disclose in column 7 the fine chemical lignoceric acid.

[95488] Accordingly, in one embodiment, the molecule which activity is to be increased in the process of the invention is the gene product with an activity as a “sodium/proton antiporter”, preferably it is the molecule of section (a) or (b) of this paragraph.

[95489] In particular, it was observed that in plants, especially in Arabidopsis thaliana, increasing or generating the activity of a gene product non-targeted with the activity of a “sodium/proton antiporter”, preferably being encoded by a gene comprising the nucleic acid sequence SEQ ID NO. 37400, preferably the coding region thereof, conferred the production of or the increase in lignoceric acid compared with the wild type control.

[95490] The nucleic acid sequence of B1249 from Escherichia coli, e.g. as shown in the respective line in column 5 of Table I, application no. 18, has been published in B. And the activity of the gene product thereof is the activity of cardiolipin synthase.

[95491] Accordingly, in one embodiment, the process of the present invention for producing lignoceric acid in a non-human organism, like a microorganism or a plant or a part thereof, comprises increasing or generating the activity of a gene product with the activity of a gene product conferring the activity of “cardiolipin synthase”, especially from Escherichia coli or its functional equivalent or its homolog, e.g. the increase of
[95492] (a) a gene product of a gene comprising the nucleic acid molecule as shown in the respective line in column 5 of Table I (whereby the respective line disclose in column 7 the fine chemical lignoceric acid), application no. 18, preferably the coding region thereof, or a homolog or a fragment thereof, and being depicted in the same respective line as said B1249, or a functional equivalent or a homolog thereof as shown in column 8 of Table I, application no. 18, preferably the coding region thereof, particularly a homolog or functional equivalent as shown in column 8 of Table I B, application no. 18, and being depicted in the same respective line as said B1249, and preferably the activity is increased non-targeted, or
[95493] (b) a polypeptide comprising a polypeptide, a consensus sequence or at least a polypeptide motif as shown in the respective line in column 5 of Table II or in column 8 of Table IV, application no. 18, respectively, and being depicted in the same respective line as said B1249, or a functional equivalent or a homolog thereof as depicted in column 8 of Table II, application no. 18, preferably a homolog or functional equivalent as depicted in column 8 of Table II B, application no. 18, and being depicted in the same respective line as said B1249, and preferably the activity is increased non-targeted, whereby the respective line disclose in column 7 the fine chemical lignoceric acid.

[95494] Accordingly, in one embodiment, the molecule which activity is to be increased in the process of the invention is the gene product with an activity as a “cardiolipin synthase”, preferably it is the molecule of section (a) or (b) of this paragraph.

[95495] In particular, it was observed that in plants, especially in Arabidopsis thaliana, increasing or generating the activity of a gene product non-targeted with the activity of a “cardiolipin synthase”, preferably being encoded by a gene comprising the nucleic acid sequence SEQ ID NO. 98778, preferably the coding region thereof, conferred the production of or the increase in lignoceric acid compared with the wild type control.

[95496] The nucleic acid sequence of B1522 from Escherichia coli, e.g. as shown in the respective line in column 5 of Table I, application no. 18, has been published in B. And the activity of the gene product thereof is the activity of b1522-protein.

[95497] Accordingly, in one embodiment, the process of the present invention for producing lignoceric acid in a non-human organism, like a microorganism or a plant or a part thereof, comprises increasing or generating the activity of a gene product with the activity of a gene product conferring the activity of “b1522-protein”, especially from Escherichia coli or its functional equivalent or its homolog, e.g. the increase of
[95498] (a) a gene product of a gene comprising the nucleic acid molecule as shown in the respective line in column 5 of Table I (whereby the respective line disclose in column 7 the fine chemical lignoceric acid), application no. 18, preferably the coding region thereof, or a homolog or a fragment thereof, and being depicted in the same respective line as said B1522, or a functional equivalent or a homolog thereof as shown in column 8 of Table I, application no. 18, preferably the coding region thereof, particularly a homolog or functional equivalent as shown in column 8 of Table I B, application no. 18, and being depicted in the same respective line as said B1522, and preferably the activity is increased non-targeted, or
[95499] (b) a polypeptide comprising a polypeptide, a consensus sequence or at least a polypeptide motif as shown in the respective line in column 5 of Table II or in column 8 of Table IV, application no. 18, respectively, and being depicted in the same respective line as said B1522, or a functional equivalent or a homolog thereof as depicted in column 8 of Table II, application no. 18, preferably a homolog or functional equivalent as depicted in column 8 of Table II B, application no. 18, and being depicted in the same respective line as said B1522, and preferably the activity is increased non-targeted, whereby the respective line disclose in column 7 the fine chemical lignoceric acid.

[95500] Accordingly, in one embodiment, the molecule which activity is to be increased in the process of the invention is the gene product with an activity as a “b1522-protein”, preferably it is the molecule of section (a) or (b) of this paragraph.

[95501] In particular, it was observed that in plants, especially in Arabidopsis thaliana, increasing or generating the activity of a gene product non-targeted with the activity of a “b1522-protein”, preferably being encoded by a gene comprising the nucleic acid sequence SEQ ID NO. 7947, preferably the coding region thereof, conferred the production of or the increase in lignoceric acid compared with the wild type control.

[95502] The nucleic acid sequence of B1597 from Escherichia coli, e.g. as shown in the respective line in column 5 of Table I, application no. 18, has been published in B. And the activity of the gene product thereof is the activity of acid shock protein.

[95503] Accordingly, in one embodiment, the process of the present invention for producing cerotic acid in a non-human organism, like a microorganism or a plant or a part thereof, comprises increasing or generating the activity of a gene product with the activity of a gene product conferring the activity of “acid shock protein”, especially from Escherichia coli or its functional equivalent or its homolog, e.g. the increase of
[95504] (a) a gene product of a gene comprising the nucleic acid molecule as shown in the respective line in column 5 of Table I (whereby the respective line disclose in column 7 the fine chemical cerotic acid), application no. 18, preferably the coding region thereof, or a homolog or a fragment thereof, and being depicted in the same respective line as said B1597, or a functional equivalent or a homolog thereof as shown in column 8 of Table I, application no. 18, preferably the coding region thereof, particularly a homolog or functional equivalent as shown in column 8 of Table I B, application no. 18, and being depicted in the same respective line as said B1597, and preferably the activity is increased non-targeted, or
[95505] (b) a polypeptide comprising a polypeptide, a consensus sequence or at least a polypeptide motif as shown in the respective line in column 5 of Table II or in column 8 of Table IV, application no. 18, respectively, and being depicted in the same respective line as said B1597, or a functional equivalent or a homolog thereof as depicted in column 8 of Table II, application no. 18, preferably a homolog or functional equivalent as depicted in column 8 of Table II B, application no. 18, and being depicted in the same respective line as said B1597, and preferably the activity is increased non-targeted, whereby the respective line disclose in column 7 the fine chemical cerotic acid.

[95506] Accordingly, in one embodiment, the molecule which activity is to be increased in the process of the invention is the gene product with an activity as a “acid shock protein”, preferably it is the molecule of section (a) or (b) of this paragraph.

[95507] In particular, it was observed that in plants, especially in Arabidopsis thaliana, increasing or generating the activity of a gene product non-targeted with the activity of a “acid shock protein”, preferably being encoded by a gene comprising the nucleic acid sequence SEQ ID NO. 38300, preferably the coding region thereof, conferred the production of or the increase in cerotic acid compared with the wild type control.

[95508] The nucleic acid sequence of B1597 from Escherichia coli, e.g. as shown in the respective line in column 5 of Table I, application no. 18, has been published in B. And the activity of the gene product thereof is the activity of acid shock protein.

[95509] Accordingly, in one embodiment, the process of the present invention for producing lignoceric acid in a non-human organism, like a microorganism or a plant or a part thereof, comprises increasing or generating the activity of a gene product with the activity of a gene product conferring the activity of “acid shock protein”, especially from Escherichia coli or its functional equivalent or its homolog, e.g. the increase of
[95510] (a) a gene product of a gene comprising the nucleic acid molecule as shown in the respective line in column 5 of Table I (whereby the respective line disclose in column 7 the fine chemical lignoceric acid), application no. 18, preferably the coding region thereof, or a homolog or a fragment thereof, and being depicted in the same respective line as said B1597, or a functional equivalent or a homolog thereof as shown in column 8 of Table I, application no. 18, preferably the coding region thereof, particularly a homolog or functional equivalent as shown in column 8 of Table I B, application no. 18, and being depicted in the same respective line as said B1597, and preferably the activity is increased non-targeted, or
[95511] (b) a polypeptide comprising a polypeptide, a consensus sequence or at least a polypeptide motif as shown in the respective line in column 5 of Table II or in column 8 of Table IV, application no. 18, respectively, and being depicted in the same respective line as said B1597, or a functional equivalent or a homolog thereof as depicted in column 8 of Table II, application no. 18, preferably a homolog or functional equivalent as depicted in column 8 of Table II B, application no. 18, and being depicted in the same respective line as said B1597, and preferably the activity is increased non-targeted, whereby the respective line disclose in column 7 the fine chemical lignoceric acid.

[95512] Accordingly, in one embodiment, the molecule which activity is to be increased in the process of the invention is the gene product with an activity as a “acid shock protein”, preferably it is the molecule of section (a) or (b) of this paragraph.

[95513] In particular, it was observed that in plants, especially in Arabidopsis thaliana, increasing or generating the activity of a gene product non-targeted with the activity of a “acid shock protein”, preferably being encoded by a gene comprising the nucleic acid sequence SEQ ID NO. 38300, preferably the coding region thereof, conferred the production of or the increase in lignoceric acid compared with the wild type control.

[95514] The nucleic acid sequence of B2027 from Escherichia coli, e.g. as shown in the respective line in column 5 of Table I, application no. 18, has been published in B. And the activity of the gene product thereof is the activity of O-antigen chain length determinant.

[95515] Accordingly, in one embodiment, the process of the present invention for producing lignoceric acid in a non-human organism, like a microorganism or a plant or a part thereof, comprises increasing or generating the activity of a gene product with the activity of a gene product conferring the activity of “O-antigen chain length determinant”, especially from Escherichia coli or its functional equivalent or its homolog, e.g. the increase of
[95516] (a) a gene product of a gene comprising the nucleic acid molecule as shown in the respective line in column 5 of Table I (whereby the respective line disclose in column 7 the fine chemical lignoceric acid), application no. 18, preferably the coding region thereof, or a homolog or a fragment thereof, and being depicted in the same respective line as said B2027, or a functional equivalent or a homolog thereof as shown in column 8 of Table I, application no. 18, preferably the coding region thereof, particularly a homolog or functional equivalent as shown in column 8 of Table I B, application no. 18, and being depicted in the same respective line as said B2027, and preferably the activity is increased non-targeted, or
[95517] (b) a polypeptide comprising a polypeptide, a consensus sequence or at least a polypeptide motif as shown in the respective line in column 5 of Table II or in column 8 of Table IV, application no. 18, respectively, and being depicted in the same respective line as said B2027, or a functional equivalent or a homolog thereof as depicted in column 8 of Table II, application no. 18, preferably a homolog or functional equivalent as depicted in column 8 of Table II B, application no. 18, and being depicted in the same respective line as said B2027, and preferably the activity is increased non-targeted, whereby the respective line disclose in column 7 the fine chemical lignoceric acid.

[95518] Accordingly, in one embodiment, the molecule which activity is to be increased in the process of the invention is the gene product with an activity as a “O-antigen chain length determinant”, preferably it is the molecule of section (a) or (b) of this paragraph.

[95519] In particular, it was observed that in plants, especially in Arabidopsis thaliana, increasing or generating the activity of a gene product non-targeted with the activity of a “O-antigen chain length determinant”, preferably being encoded by a gene comprising the nucleic acid sequence SEQ ID NO. 79217, preferably the coding region thereof, conferred the production of or the increase in lignoceric acid compared with the wild type control.

[95520] The nucleic acid sequence of B2482 from Escherichia coli, e.g. as shown in the respective line in column 5 of Table I, application no. 18, has been published in B. And the activity of the gene product thereof is the activity of NADH dehydrogenase subunit N.

[95521] Accordingly, in one embodiment, the process of the present invention for producing lignoceric acid in a non-human organism, like a microorganism or a plant or a part thereof, comprises increasing or generating the activity of a gene product with the activity of a gene product conferring the activity of “NADH dehydrogenase subunit N”, especially from Escherichia coli or its functional equivalent or its homolog, e.g. the increase of
[95522] (a) a gene product of a gene comprising the nucleic acid molecule as shown in the respective line in column 5 of Table I (whereby the respective line disclose in column 7 the fine chemical lignoceric acid), application no. 18, preferably the coding region thereof, or a homolog or a fragment thereof, and being depicted in the same respective line as said B2482, or a functional equivalent or a homolog thereof as shown in column 8 of Table I, application no. 18, preferably the coding region thereof, particularly a homolog or functional equivalent as shown in column 8 of Table I B, application no. 18, and being depicted in the same respective line as said B2482, and preferably the activity is increased non-targeted, or
[95523] (b) a polypeptide comprising a polypeptide, a consensus sequence or at least a polypeptide motif as shown in the respective line in column 5 of Table II or in column 8 of Table IV, application no. 18, respectively, and being depicted in the same respective line as said B2482, or a functional equivalent or a homolog thereof as depicted in column 8 of Table II, application no. 18, preferably a homolog or functional equivalent as depicted in column 8 of Table II B, application no. 18, and being depicted in the same respective line as said B2482, and preferably the activity is increased non-targeted, whereby the respective line disclose in column 7 the fine chemical lignoceric acid.

[95524] Accordingly, in one embodiment, the molecule which activity is to be increased in the process of the invention is the gene product with an activity as a “NADH dehydrogenase subunit N”, preferably it is the molecule of section (a) or (b) of this paragraph.

[95525] In particular, it was observed that in plants, especially in Arabidopsis thaliana, increasing or generating the activity of a gene product non-targeted with the activity of a “NADH dehydrogenase subunit N”, preferably being encoded by a gene comprising the nucleic acid sequence SEQ ID NO. 79509, preferably the coding region thereof, conferred the production of or the increase in lignoceric acid compared with the wild type control.

[95526] The nucleic acid sequence of B2541 from Escherichia coli, e.g. as shown in the respective line in column 5 of Table I, application no. 18, has been published in B. And the activity of the gene product thereof is the activity of 2,3-dihydroxy-2,3-dihydrophenylpropionatedehydrogenase.

[95527] Accordingly, in one embodiment, the process of the present invention for producing lignoceric acid in a non-human organism, like a microorganism or a plant or a part thereof, comprises increasing or generating the activity of a gene product with the activity of a gene product conferring the activity of “2,3-dihydroxy-2,3-dihydrophenylpropionatedehydrogenase”, especially from Escherichia coli or its functional equivalent or its homolog, e.g. the increase of
[95528] (a) a gene product of a gene comprising the nucleic acid molecule as shown in the respective line in column 5 of Table I (whereby the respective line disclose in column 7 the fine chemical lignoceric acid), application no. 18, preferably the coding region thereof, or a homolog or a fragment thereof, and being depicted in the same respective line as said B2541, or a functional equivalent or a homolog thereof as shown in column 8 of Table I, application no. 18, preferably the coding region thereof, particularly a homolog or functional equivalent as shown in column 8 of Table I B, application no. 18, and being depicted in the same respective line as said B2541, and preferably the activity is increased non-targeted, or
[95529] (b) a polypeptide comprising a polypeptide, a consensus sequence or at least a polypeptide motif as shown in the respective line in column 5 of Table II or in column 8 of Table IV, application no. 18, respectively, and being depicted in the same respective line as said B2541, or a functional equivalent or a homolog thereof as depicted in column 8 of Table II, application no. 18, preferably a homolog or functional equivalent as depicted in column 8 of Table II B, application no. 18, and being depicted in the same respective line as said B2541, and preferably the activity is increased non-targeted, whereby the respective line disclose in column 7 the fine chemical lignoceric acid.

[95530] Accordingly, in one embodiment, the molecule which activity is to be increased in the process of the invention is the gene product with an activity as a “2,3-dihydroxy-2,3-dihydrophenylpropionatedehydrogenase”, preferably it is the molecule of section (a) or (b) of this paragraph.

[95531] In particular, it was observed that in plants, especially in Arabidopsis thaliana, increasing or generating the activity of a gene product non-targeted with the activity of a “2,3-dihydroxy-2,3-dihydrophenylpropionatedehydrogenase”, preferably being encoded by a gene comprising the nucleic acid sequence SEQ ID NO. 40383, preferably the coding region thereof, conferred the production of or the increase in lignoceric acid compared with the wild type control.

[95532] The nucleic acid sequence of B3083 from Escherichia coli, e.g. as shown in the respective line in column 5 of Table I, application no. 18, has been published in B. And the activity of the gene product thereof is the activity of b3083-protein.

[95533] Accordingly, in one embodiment, the process of the present invention for producing lignoceric acid in a non-human organism, like a microorganism or a plant or a part thereof, comprises increasing or generating the activity of a gene product with the activity of a gene product conferring the activity of “b3083-protein”, especially from Escherichia coli or its functional equivalent or its homolog, e.g. the increase of
[95534] (a) a gene product of a gene comprising the nucleic acid molecule as shown in the respective line in column 5 of Table I (whereby the respective line disclose in column 7 the fine chemical lignoceric acid), application no. 18, preferably the coding region thereof, or a homolog or a fragment thereof, and being depicted in the same respective line as said B3083, or a functional equivalent or a homolog thereof as shown in column 8 of Table I, application no. 18, preferably the coding region thereof, particularly a homolog or functional equivalent as shown in column 8 of Table I B, application no. 18, and being depicted in the same respective line as said B3083, and preferably the activity is increased non-targeted, or
[95535] (b) a polypeptide comprising a polypeptide, a consensus sequence or at least a polypeptide motif as shown in the respective line in column 5 of Table II or in column 8 of Table IV, application no. 18, respectively, and being depicted in the same respective line as said B3083, or a functional equivalent or a homolog thereof as depicted in column 8 of Table II, application no. 18, preferably a homolog or functional equivalent as depicted in column 8 of Table II B, application no. 18, and being depicted in the same respective line as said B3083, and preferably the activity is increased non-targeted, whereby the respective line disclose in column 7 the fine chemical lignoceric acid.

[95536] Accordingly, in one embodiment, the molecule which activity is to be increased in the process of the invention is the gene product with an activity as a “b3083-protein”, preferably it is the molecule of section (a) or (b) of this paragraph.

[95537] In particular, it was observed that in plants, especially in Arabidopsis thaliana, increasing or generating the activity of a gene product non-targeted with the activity of a “b3083-protein”, preferably being encoded by a gene comprising the nucleic acid sequence SEQ ID NO. 82424, preferably the coding region thereof, conferred the production of or the increase in lignoceric acid compared with the wild type control.

[95538] The nucleic acid sequence of B3812 from Escherichia coli, e.g. as shown in the respective line in column 5 of Table I, application no. 18, has been published in B. And the activity of the gene product thereof is the activity of b3812-protein.

[95539] Accordingly, in one embodiment, the process of the present invention for producing lignoceric acid in a non-human organism, like a microorganism or a plant or a part thereof, comprises increasing or generating the activity of a gene product with the activity of a gene product conferring the activity of “b3812-protein”, especially from Escherichia coli or its functional equivalent or its homolog, e.g. the increase of
[95540] (a) a gene product of a gene comprising the nucleic acid molecule as shown in the respective line in column 5 of Table I (whereby the respective line disclose in column 7 the fine chemical lignoceric acid), application no. 18, preferably the coding region thereof, or a homolog or a fragment thereof, and being depicted in the same respective line as said B3812, or a functional equivalent or a homolog thereof as shown in column 8 of Table I, application no. 18, preferably the coding region thereof, particularly a homolog or functional equivalent as shown in column 8 of Table I B, application no. 18, and being depicted in the same respective line as said B3812, and preferably the activity is increased non-targeted, or
[95541] (b) a polypeptide comprising a polypeptide, a consensus sequence or at least a polypeptide motif as shown in the respective line in column 5 of Table II or in column 8 of Table IV, application no. 18, respectively, and being depicted in the same respective line as said B3812, or a functional equivalent or a homolog thereof as depicted in column 8 of Table II, application no. 18, preferably a homolog or functional equivalent as depicted in column 8 of Table II B, application no. 18, and being depicted in the same respective line as said B3812, and preferably the activity is increased non-targeted, whereby the respective line disclose in column 7 the fine chemical lignoceric acid.

[95542] Accordingly, in one embodiment, the molecule which activity is to be increased in the process of the invention is the gene product with an activity as a “b3812-protein”, preferably it is the molecule of section (a) or (b) of this paragraph.

[95543] In particular, it was observed that in plants, especially in Arabidopsis thaliana, increasing or generating the activity of a gene product non-targeted with the activity of a “b3812-protein”, preferably being encoded by a gene comprising the nucleic acid sequence SEQ ID NO. 125487, preferably the coding region thereof, conferred the production of or the increase in lignoceric acid compared with the wild type control.

[95544] The nucleic acid sequence of B4029 from Escherichia coli, e.g. as shown in the respective line in column 5 of Table I, application no. 18, has been published in B. And the activity of the gene product thereof is the activity of b4029-protein.

[95545] Accordingly, in one embodiment, the process of the present invention for producing lignoceric acid in a non-human organism, like a microorganism or a plant or a part thereof, comprises increasing or generating the activity of a gene product with the activity of a gene product conferring the activity of “b4029-protein”, especially from Escherichia coli or its functional equivalent or its homolog, e.g. the increase of
[95546] (a) a gene product of a gene comprising the nucleic acid molecule as shown in the respective line in column 5 of Table I (whereby the respective line disclose in column 7 the fine chemical lignoceric acid), application no. 18, preferably the coding region thereof, or a homolog or a fragment thereof, and being depicted in the same respective line as said B4029, or a functional equivalent or a homolog thereof as shown in column 8 of Table I, application no. 18, preferably the coding region thereof, particularly a homolog or functional equivalent as shown in column 8 of Table I B, application no. 18, and being depicted in the same respective line as said B4029, and preferably the activity is increased non-targeted, or
[95547] (b) a polypeptide comprising a polypeptide, a consensus sequence or at least a polypeptide motif as shown in the respective line in column 5 of Table II or in column 8 of Table IV, application no. 18, respectively, and being depicted in the same respective line as said B4029, or a functional equivalent or a homolog thereof as depicted in column 8 of Table II, application no. 18, preferably a homolog or functional equivalent as depicted in column 8 of Table II B, application no. 18, and being depicted in the same respective line as said B4029, and preferably the activity is increased non-targeted, whereby the respective line disclose in column 7 the fine chemical lignoceric acid.

[95548] Accordingly, in one embodiment, the molecule which activity is to be increased in the process of the invention is the gene product with an activity as a “b4029-protein”, preferably it is the molecule of section (a) or (b) of this paragraph.

[95549] In particular, it was observed that in plants, especially in Arabidopsis thaliana, increasing or generating the activity of a gene product non-targeted with the activity of a “b4029-protein”, preferably being encoded by a gene comprising the nucleic acid sequence SEQ ID NO. 10740, preferably the coding region thereof, conferred the production of or the increase in lignoceric acid compared with the wild type control.

[95550] The nucleic acid sequence of B4256 from Escherichia coli, e.g. as shown in the respective line in column 5 of Table I, application no. 18, has been published in B. And the activity of the gene product thereof is the activity of acetyltransferase.

[95551] Accordingly, in one embodiment, the process of the present invention for producing lignoceric acid in a non-human organism, like a microorganism or a plant or a part thereof, comprises increasing or generating the activity of a gene product with the activity of a gene product conferring the activity of “acetyltransferase”, especially from Escherichia coli or its functional equivalent or its homolog, e.g. the increase of
[95552] (a) a gene product of a gene comprising the nucleic acid molecule as shown in the respective line in column 5 of Table I (whereby the respective line disclose in column 7 the fine chemical lignoceric acid), application no. 18, preferably the coding region thereof, or a homolog or a fragment thereof, and being depicted in the same respective line as said B4256, or a functional equivalent or a homolog thereof as shown in column 8 of Table I, application no. 18, preferably the coding region thereof, particularly a homolog or functional equivalent as shown in column 8 of Table I B, application no. 18, and being depicted in the same respective line as said B4256, and preferably the activity is increased non-targeted, or
[95553] (b) a polypeptide comprising a polypeptide, a consensus sequence or at least a polypeptide motif as shown in the respective line in column 5 of Table II or in column 8 of Table IV, application no. 18, respectively, and being depicted in the same respective line as said B4256, or a functional equivalent or a homolog thereof as depicted in column 8 of Table II, application no. 18, preferably a homolog or functional equivalent as depicted in column 8 of Table II B, application no. 18, and being depicted in the same respective line as said B4256, and preferably the activity is increased non-targeted, whereby the respective line disclose in column 7 the fine chemical lignoceric acid.

[95554] Accordingly, in one embodiment, the molecule which activity is to be increased in the process of the invention is the gene product with an activity as a “acetyltransferase”, preferably it is the molecule of section (a) or (b) of this paragraph.

[95555] In particular, it was observed that in plants, especially in Arabidopsis thaliana, increasing or generating the activity of a gene product non-targeted with the activity of a “acetyltransferase”, preferably being encoded by a gene comprising the nucleic acid sequence SEQ ID NO. 45321, preferably the coding region thereof, conferred the production of or the increase in lignoceric acid compared with the wild type control.

[95556] The nucleic acid sequence of GM02LC12622 from Glycine max, e.g. as shown in the respective line in column 5 of Table I, application no. 18, is unpublished. And the activity of the gene product thereof is the activity of glutaredoxin.

[95557] Accordingly, in one embodiment, the process of the present invention for producing lignoceric acid in a non-human organism, like a microorganism or a plant or a part thereof, comprises increasing or generating the activity of a gene product with the activity of a gene product conferring the activity of “glutaredoxin”, especially from Glycine max or its functional equivalent or its homolog, e.g. the increase of
[95558] (a) a gene product of a gene comprising the nucleic acid molecule as shown in the respective line in column 5 of Table I (whereby the respective line disclose in column 7 the fine chemical lignoceric acid), application no. 18, preferably the coding region thereof, or a homolog or a fragment thereof, and being depicted in the same respective line as said GM02LC12622, or a functional equivalent or a homolog thereof as shown in column 8 of Table I, application no. 18, preferably the coding region thereof, particularly a homolog or functional equivalent as shown in column 8 of Table I B, application no. 18, and being depicted in the same respective line as said GM02LC12622, and preferably the activity is increased non-targeted, or
[95559] (b) a polypeptide comprising a polypeptide, a consensus sequence or at least a polypeptide motif as shown in the respective line in column 5 of Table II or in column 8 of Table IV, application no. 18, respectively, and being depicted in the same respective line as said GM02LC12622, or a functional equivalent or a homolog thereof as depicted in column 8 of Table II, application no. 18, preferably a homolog or functional equivalent as depicted in column 8 of Table II B, application no. 18, and being depicted in the same respective line as said GM02LC12622, and preferably the activity is increased non-targeted, whereby the respective line disclose in column 7 the fine chemical lignoceric acid.

[95560] Accordingly, in one embodiment, the molecule which activity is to be increased in the process of the invention is the gene product with an activity as a “glutaredoxin”, preferably it is the molecule of section (a) or (b) of this paragraph.

[95561] In particular, it was observed that in plants, especially in Arabidopsis thaliana, increasing or generating the activity of a gene product non-targeted with the activity of a “glutaredoxin”, preferably being encoded by a gene comprising the nucleic acid sequence SEQ ID NO. 10811, preferably the coding region thereof, conferred the production of or the increase in lignoceric acid compared with the wild type control.

[95562] The nucleic acid sequence of GM02LC44512 from Glycine max, e.g. as shown in the respective line in column 5 of Table I, application no. 18, is unpublished. And the activity of the gene product thereof is the activity of cyclin D.

[95563] Accordingly, in one embodiment, the process of the present invention for producing lignoceric acid in a non-human organism, like a microorganism or a plant or a part thereof, comprises increasing or generating the activity of a gene product with the activity of a gene product conferring the activity of “cyclin D”, especially from Glycine max or its functional equivalent or its homolog, e.g. the increase of
[95564] (a) a gene product of a gene comprising the nucleic acid molecule as shown in the respective line in column 5 of Table I (whereby the respective line disclose in column 7 the fine chemical lignoceric acid), application no. 18, preferably the coding region thereof, or a homolog or a fragment thereof, and being depicted in the same respective line as said GM02LC44512, or a functional equivalent or a homolog thereof as shown in column 8 of Table I, application no. 18, preferably the coding region thereof, particularly a homolog or functional equivalent as shown in column 8 of Table I B, application no. 18, and being depicted in the same respective line as said GM02LC44512, and preferably the activity is increased non-targeted, or
[95565] (b) a polypeptide comprising a polypeptide, a consensus sequence or at least a polypeptide motif as shown in the respective line in column 5 of Table II or in column 8 of Table IV, application no. 18, respectively, and being depicted in the same respective line as said GM02LC44512, or a functional equivalent or a homolog thereof as depicted in column 8 of Table II, application no. 18, preferably a homolog or functional equivalent as depicted in column 8 of Table II B, application no. 18, and being depicted in the same respective line as said GM02LC44512, and preferably the activity is increased non-targeted, whereby the respective line disclose in column 7 the fine chemical lignoceric acid.

[95566] Accordingly, in one embodiment, the molecule which activity is to be increased in the process of the invention is the gene product with an activity as a “cyclin D”, preferably it is the molecule of section (a) or (b) of this paragraph.

[95567] In particular, it was observed that in plants, especially in Arabidopsis thaliana, increasing or generating the activity of a gene product non-targeted with the activity of a “cyclin D”, preferably being encoded by a gene comprising the nucleic acid sequence SEQ ID NO. 46850, preferably the coding region thereof, conferred the production of or the increase in lignoceric acid compared with the wild type control.

[95568] The nucleic acid sequence of Sll0064 from Synechocystis sp., e.g. as shown in the respective line in column 5 of Table I, application no. 18, has been published in C. And the activity of the gene product thereof is the activity of sll0064-protein.

[95569] Accordingly, in one embodiment, the process of the present invention for producing lignoceric acid in a non-human organism, like a microorganism or a plant or a part thereof, comprises increasing or generating the activity of a gene product with the activity of a gene product conferring the activity of “sll0064-protein”, especially from Synechocystis sp. or its functional equivalent or its homolog, e.g. the increase of
[95570] (a) a gene product of a gene comprising the nucleic acid molecule as shown in the respective line in column 5 of Table I (whereby the respective line disclose in column 7 the fine chemical lignoceric acid), application no. 18, preferably the coding region thereof, or a homolog or a fragment thereof, and being depicted in the same respective line as said Sll0064, or a functional equivalent or a homolog thereof as shown in column 8 of Table I, application no. 18, preferably the coding region thereof, particularly a homolog or functional equivalent as shown in column 8 of Table I B, application no. 18, and being depicted in the same respective line as said Sll0064, and preferably the activity is increased mitochondrial, or
[95571] (b) a polypeptide comprising a polypeptide, a consensus sequence or at least a polypeptide motif as shown in the respective line in column 5 of Table II or in column 8 of Table IV, application no. 18, respectively, and being depicted in the same respective line as said Sll0064, or a functional equivalent or a homolog thereof as depicted in column 8 of Table II, application no. 18, preferably a homolog or functional equivalent as depicted in column 8 of Table II B, application no. 18, and being depicted in the same respective line as said Sll0064, and preferably the activity is increased mitochondrial, whereby the respective line disclose in column 7 the fine chemical lignoceric acid.

[95572] Accordingly, in one embodiment, the molecule which activity is to be increased in the process of the invention is the gene product with an activity as a “sll0064-protein”, preferably it is the molecule of section (a) or (b) of this paragraph.

[95573] In particular, it was observed that in plants, especially in Arabidopsis thaliana, increasing or generating the activity of a gene product mitochondrial with the activity of a “sll0064-protein”, preferably being encoded by a gene comprising the nucleic acid sequence SEQ ID NO. 47526, preferably the coding region thereof, conferred the production of or the increase in lignoceric acid compared with the wild type control.

[95574] The nucleic acid sequence of Sll0228 from Synechocystis sp., e.g. as shown in the respective line in column 5 of Table I, application no. 18, has been published in C. And the activity of the gene product thereof is the activity of agmatinase.

[95575] Accordingly, in one embodiment, the process of the present invention for producing lignoceric acid in a non-human organism, like a microorganism or a plant or a part thereof, comprises increasing or generating the activity of a gene product with the activity of a gene product conferring the activity of “agmatinase”, especially from Synechocystis sp. or its functional equivalent or its homolog, e.g. the increase of
[95576] (a) a gene product of a gene comprising the nucleic acid molecule as shown in the respective line in column 5 of Table I (whereby the respective line disclose in column 7 the fine chemical lignoceric acid), application no. 18, preferably the coding region thereof, or a homolog or a fragment thereof, and being depicted in the same respective line as said Sll0228, or a functional equivalent or a homolog thereof as shown in column 8 of Table I, application no. 18, preferably the coding region thereof, particularly a homolog or functional equivalent as shown in column 8 of Table I B, application no. 18, and being depicted in the same respective line as said Sll0228, and preferably the activity is increased plastidic, or
[95577] (b) a polypeptide comprising a polypeptide, a consensus sequence or at least a polypeptide motif as shown in the respective line in column 5 of Table II or in column 8 of Table IV, application no. 18, respectively, and being depicted in the same respective line as said Sll0228, or a functional equivalent or a homolog thereof as depicted in column 8 of Table II, application no. 18, preferably a homolog or functional equivalent as depicted in column 8 of Table II B, application no. 18, and being depicted in the same respective line as said Sll0228, and preferably the activity is increased plastidic, whereby the respective line disclose in column 7 the fine chemical lignoceric acid.

[95578] Accordingly, in one embodiment, the molecule which activity is to be increased in the process of the invention is the gene product with an activity as a “agmatinase”, preferably it is the molecule of section (a) or (b) of this paragraph.

[95579] In particular, it was observed that in plants, especially in Arabidopsis thaliana, increasing or generating the activity of a gene product plastidic with the activity of a “agmatinase”, preferably being encoded by a gene comprising the nucleic acid sequence SEQ ID NO. 84265, preferably the coding region thereof, conferred the production of or the increase in lignoceric acid compared with the wild type control.

[95580] The nucleic acid sequence of Sll0378 from Synechocystis sp., e.g. as shown in the respective line in column 5 of Table I, application no. 18, has been published in C. And the activity of the gene product thereof is the activity of uroporphyrin-III C-methyltransferase.

[95581] Accordingly, in one embodiment, the process of the present invention for producing lignoceric acid in a non-human organism, like a microorganism or a plant or a part thereof, comprises increasing or generating the activity of a gene product with the activity of a gene product conferring the activity of “uroporphyrin-III C-methyltransferase”, especially from Synechocystis sp. or its functional equivalent or its homolog, e.g. the increase of
[95582] (a) a gene product of a gene comprising the nucleic acid molecule as shown in the respective line in column 5 of Table I (whereby the respective line disclose in column 7 the fine chemical lignoceric acid), application no. 18, preferably the coding region thereof, or a homolog or a fragment thereof, and being depicted in the same respective line as said Sll0378, or a functional equivalent or a homolog thereof as shown in column 8 of Table I, application no. 18, preferably the coding region thereof, particularly a homolog or functional equivalent as shown in column 8 of Table I B, application no. 18, and being depicted in the same respective line as said Sll0378, and preferably the activity is increased plastidic, or
[95583] (b) a polypeptide comprising a polypeptide, a consensus sequence or at least a polypeptide motif as shown in the respective line in column 5 of Table II or in column 8 of Table IV, application no. 18, respectively, and being depicted in the same respective line as said Sll0378, or a functional equivalent or a homolog thereof as depicted in column 8 of Table II, application no. 18, preferably a homolog or functional equivalent as depicted in column 8 of Table II B, application no. 18, and being depicted in the same respective line as said Sll0378, and preferably the activity is increased plastidic, whereby the respective line disclose in column 7 the fine chemical lignoceric acid.

[95584] Accordingly, in one embodiment, the molecule which activity is to be increased in the process of the invention is the gene product with an activity as a “uroporphyrin-III C-methyltransferase”, preferably it is the molecule of section (a) or (b) of this paragraph.

[95585] In particular, it was observed that in plants, especially in Arabidopsis thaliana, increasing or generating the activity of a gene product plastidic with the activity of a “uroporphyrin-III C-methyltransferase”, preferably being encoded by a gene comprising the nucleic acid sequence SEQ ID NO. 84869, preferably the coding region thereof, conferred the production of or the increase in lignoceric acid compared with the wild type control.

[95586] The nucleic acid sequence of Sll0833 from Synechocystis sp., e.g. as shown in the respective line in column 5 of Table I, application no. 18, has been published in C. And the activity of the gene product thereof is the activity of binding-protein-dependent transport systems inner membrane component.

[95587] Accordingly, in one embodiment, the process of the present invention for producing lignoceric acid in a non-human organism, like a microorganism or a plant or a part thereof, comprises increasing or generating the activity of a gene product with the activity of a gene product conferring the activity of “binding-protein-dependent transport systems inner membrane component”, especially from Synechocystis sp. or its functional equivalent or its homolog, e.g. the increase of
[95588] (a) a gene product of a gene comprising the nucleic acid molecule as shown in the respective line in column 5 of Table I (whereby the respective line disclose in column 7 the fine chemical lignoceric acid), application no. 18, preferably the coding region thereof, or a homolog or a fragment thereof, and being depicted in the same respective line as said Sll0833, or a functional equivalent or a homolog thereof as shown in column 8 of Table I, application no. 18, preferably the coding region thereof, particularly a homolog or functional equivalent as shown in column 8 of Table I B, application no. 18, and being depicted in the same respective line as said Sll0833, and preferably the activity is increased non-targeted, or
[95589] (b) a polypeptide comprising a polypeptide, a consensus sequence or at least a polypeptide motif as shown in the respective line in column 5 of Table II or in column 8 of Table IV, application no. 18, respectively, and being depicted in the same respective line as said Sll0833, or a functional equivalent or a homolog thereof as depicted in column 8 of Table II, application no. 18, preferably a homolog or functional equivalent as depicted in column 8 of Table II B, application no. 18, and being depicted in the same respective line as said Sll0833, and preferably the activity is increased non-targeted, whereby the respective line disclose in column 7 the fine chemical lignoceric acid.

[95590] Accordingly, in one embodiment, the molecule which activity is to be increased in the process of the invention is the gene product with an activity as a “binding-protein-dependent transport systems inner membrane component”, preferably it is the molecule of section (a) or (b) of this paragraph.

[95591] In particular, it was observed that in plants, especially in Arabidopsis thaliana, increasing or generating the activity of a gene product non-targeted with the activity of a “binding-protein-dependent transport systems inner membrane component”, preferably being encoded by a gene comprising the nucleic acid sequence SEQ ID NO. 101707, preferably the coding region thereof, conferred the production of or the increase in lignoceric acid compared with the wild type control.

[95592] The nucleic acid sequence of Sll0891 from Synechocystis sp., e.g. as shown in the respective line in column 5 of Table I, application no. 18, has been published in C. And the activity of the gene product thereof is the activity of malate dehydrogenase.

[95593] Accordingly, in one embodiment, the process of the present invention for producing lignoceric acid in a non-human organism, like a microorganism or a plant or a part thereof, comprises increasing or generating the activity of a gene product with the activity of a gene product conferring the activity of “malate dehydrogenase”, especially from Synechocystis sp. or its functional equivalent or its homolog, e.g. the increase of
[95594] (a) a gene product of a gene comprising the nucleic acid molecule as shown in the respective line in column 5 of Table I (whereby the respective line disclose in column 7 the fine chemical lignoceric acid), application no. 18, preferably the coding region thereof, or a homolog or a fragment thereof, and being depicted in the same respective line as said Sll0891, or a functional equivalent or a homolog thereof as shown in column 8 of Table I, application no. 18, preferably the coding region thereof, particularly a homolog or functional equivalent as shown in column 8 of Table I B, application no. 18, and being depicted in the same respective line as said Sll0891, and preferably the activity is increased plastidic, or
[95595] (b) a polypeptide comprising a polypeptide, a consensus sequence or at least a polypeptide motif as shown in the respective line in column 5 of Table II or in column 8 of Table IV, application no. 18, respectively, and being depicted in the same respective line as said Sll0891, or a functional equivalent or a homolog thereof as depicted in column 8 of Table II, application no. 18, preferably a homolog or functional equivalent as depicted in column 8 of Table II B, application no. 18, and being depicted in the same respective line as said Sll0891, and preferably the activity is increased plastidic, whereby the respective line disclose in column 7 the fine chemical lignoceric acid.

[95596] Accordingly, in one embodiment, the molecule which activity is to be increased in the process of the invention is the gene product with an activity as a “malate dehydrogenase”, preferably it is the molecule of section (a) or (b) of this paragraph.

[95597] In particular, it was observed that in plants, especially in Arabidopsis thaliana, increasing or generating the activity of a gene product plastidic with the activity of a “malate dehydrogenase”, preferably being encoded by a gene comprising the nucleic acid sequence SEQ ID NO. 51268, preferably the coding region thereof, conferred the production of or the increase in lignoceric acid compared with the wild type control.

[95598] The nucleic acid sequence of Sll1598 from Synechocystis sp., e.g. as shown in the respective line in column 5 of Table I, application no. 18, has been published in C. And the activity of the gene product thereof is the activity of ABC metal ion transporter substrate-binding protein.

[95599] Accordingly, in one embodiment, the process of the present invention for producing lignoceric acid in a non-human organism, like a microorganism or a plant or a part thereof, comprises increasing or generating the activity of a gene product with the activity of a gene product conferring the activity of “ABC metal ion transporter substrate-binding protein”, especially from Synechocystis sp. or its functional equivalent or its homolog, e.g. the increase of
[95600] (a) a gene product of a gene comprising the nucleic acid molecule as shown in the respective line in column 5 of Table I (whereby the respective line disclose in column 7 the fine chemical lignoceric acid), application no. 18, preferably the coding region thereof, or a homolog or a fragment thereof, and being depicted in the same respective line as said Sll1598, or a functional equivalent or a homolog thereof as shown in column 8 of Table I, application no. 18, preferably the coding region thereof, particularly a homolog or functional equivalent as shown in column 8 of Table I B, application no. 18, and being depicted in the same respective line as said Sll1598, and preferably the activity is increased mitochondrial, or
[95601] (b) a polypeptide comprising a polypeptide, a consensus sequence or at least a polypeptide motif as shown in the respective line in column 5 of Table II or in column 8 of Table IV, application no. 18, respectively, and being depicted in the same respective line as said Sll1598, or a functional equivalent or a homolog thereof as depicted in column 8 of Table II, application no. 18, preferably a homolog or functional equivalent as depicted in column 8 of Table II B, application no. 18, and being depicted in the same respective line as said Sll1598, and preferably the activity is increased mitochondrial, whereby the respective line disclose in column 7 the fine chemical lignoceric acid.

[95602] Accordingly, in one embodiment, the molecule which activity is to be increased in the process of the invention is the gene product with an activity as a “ABC metal ion transporter substratebinding protein”, preferably it is the molecule of section (a) or (b) of this paragraph.

[95603] In particular, it was observed that in plants, especially in Arabidopsis thaliana, increasing or generating the activity of a gene product mitochondrial with the activity of a “ABC metal ion transporter substrate-binding protein”, preferably being encoded by a gene comprising the nucleic acid sequence SEQ ID NO. 85743, preferably the coding region thereof, conferred the production of or the increase in lignoceric acid compared with the wild type control.

[95604] The nucleic acid sequence of Sll1848 from Synechocystis sp., e.g. as shown in the respective line in column 5 of Table I, application no. 18, has been published in C. And the activity of the gene product thereof is the activity of acyl transferase.

[95605] Accordingly, in one embodiment, the process of the present invention for producing lignoceric acid in a non-human organism, like a microorganism or a plant or a part thereof, comprises increasing or generating the activity of a gene product with the activity of a gene product conferring the activity of “acyl transferase”, especially from Synechocystis sp. or its functional equivalent or its homolog, e.g. the increase of
[95606] (a) a gene product of a gene comprising the nucleic acid molecule as shown in the respective line in column 5 of Table I (whereby the respective line disclose in column 7 the fine chemical lignoceric acid), application no. 18, preferably the coding region thereof, or a homolog or a fragment thereof, and being depicted in the same respective line as said Sll1848, or a functional equivalent or a homolog thereof as shown in column 8 of Table I, application no. 18, preferably the coding region thereof, particularly a homolog or functional equivalent as shown in column 8 of Table I B, application no. 18, and being depicted in the same respective line as said Sll1848, and preferably the activity is increased plastidic, or
[95607] (b) a polypeptide comprising a polypeptide, a consensus sequence or at least a polypeptide motif as shown in the respective line in column 5 of Table II or in column 8 of Table IV, application no. 18, respectively, and being depicted in the same respective line as said Sll1848, or a functional equivalent or a homolog thereof as depicted in column 8 of Table II, application no. 18, preferably a homolog or functional equivalent as depicted in column 8 of Table II B, application no. 18, and being depicted in the same respective line as said Sll1848, and preferably the activity is increased plastidic, whereby the respective line disclose in column 7 the fine chemical lignoceric acid.

[95608] Accordingly, in one embodiment, the molecule which activity is to be increased in the process of the invention is the gene product with an activity as a “acyl transferase”, preferably it is the molecule of section (a) or (b) of this paragraph.

[95609] In particular, it was observed that in plants, especially in Arabidopsis thaliana, increasing or generating the activity of a gene product plastidic with the activity of a “acyl transferase”, preferably being encoded by a gene comprising the nucleic acid sequence SEQ ID NO. 86447, preferably the coding region thereof, conferred the production of or the increase in lignoceric acid compared with the wild type control.

[95610] The nucleic acid sequence of Slr0383 from Synechocystis sp., e.g. as shown in the respective line in column 5 of Table I, application no. 18, has been published in C. And the activity of the gene product thereof is the activity of slr0383-protein.

[95611] Accordingly, in one embodiment, the process of the present invention for producing lignoceric acid in a non-human organism, like a microorganism or a plant or a part thereof, comprises increasing or generating the activity of a gene product with the activity of a gene product conferring the activity of “slr0383-protein”, especially from Synechocystis sp. or its functional equivalent or its homolog, e.g. the increase of
[95612] (a) a gene product of a gene comprising the nucleic acid molecule as shown in the respective line in column 5 of Table I (whereby the respective line disclose in column 7 the fine chemical lignoceric acid), application no. 18, preferably the coding region thereof, or a homolog or a fragment thereof, and being depicted in the same respective line as said Slr0383, or a functional equivalent or a homolog thereof as shown in column 8 of Table I, application no. 18, preferably the coding region thereof, particularly a homolog or functional equivalent as shown in column 8 of Table I B, application no. 18, and being depicted in the same respective line as said Slr0383, and preferably the activity is increased non-targeted, or
[95613] (b) a polypeptide comprising a polypeptide, a consensus sequence or at least a polypeptide motif as shown in the respective line in column 5 of Table II or in column 8 of Table IV, application no. 18, respectively, and being depicted in the same respective line as said Slr0383, or a functional equivalent or a homolog thereof as depicted in column 8 of Table II, application no. 18, preferably a homolog or functional equivalent as depicted in column 8 of Table II B, application no. 18, and being depicted in the same respective line as said Slr0383, and preferably the activity is increased non-targeted, whereby the respective line disclose in column 7 the fine chemical lignoceric acid.

[95614] Accordingly, in one embodiment, the molecule which activity is to be increased in the process of the invention is the gene product with an activity as a “slr0383-protein”, preferably it is the molecule of section (a) or (b) of this paragraph.

[95615] In particular, it was observed that in plants, especially in Arabidopsis thaliana, increasing or generating the activity of a gene product non-targeted with the activity of a “slr0383-protein”, preferably being encoded by a gene comprising the nucleic acid sequence SEQ ID NO. 95744, preferably the coding region thereof, conferred the production of or the increase in lignoceric acid compared with the wild type control.

[95616] The nucleic acid sequence of Slr0739 from Synechocystis sp., e.g. as shown in the respective line in column 5 of Table I, application no. 18, has been published in C. And the activity of the gene product thereof is the activity of geranylgeranyl pyrophosphate synthase.

[95617] Accordingly, in one embodiment, the process of the present invention for producing lignoceric acid in a non-human organism, like a microorganism or a plant or a part thereof, comprises increasing or generating the activity of a gene product with the activity of a gene product conferring the activity of “geranylgeranyl pyrophosphate synthase”, especially from Synechocystis sp. or its functional equivalent or its homolog, e.g. the increase of
[95618] (a) a gene product of a gene comprising the nucleic acid molecule as shown in the respective line in column 5 of Table I (whereby the respective line disclose in column 7 the fine chemical lignoceric acid), application no. 18, preferably the coding region thereof, or a homolog or a fragment thereof, and being depicted in the same respective line as said Slr0739, or a functional equivalent or a homolog thereof as shown in column 8 of Table I, application no. 18, preferably the coding region thereof, particularly a homolog or functional equivalent as shown in column 8 of Table I B, application no. 18, and being depicted in the same respective line as said Slr0739, and preferably the activity is increased plastidic, or
[95619] (b) a polypeptide comprising a polypeptide, a consensus sequence or at least a polypeptide motif as shown in the respective line in column 5 of Table II or in column 8 of Table IV, application no. 18, respectively, and being depicted in the same respective line as said Slr0739, or a functional equivalent or a homolog thereof as depicted in column 8 of Table II, application no. 18, preferably a homolog or functional equivalent as depicted in column 8 of Table II B, application no. 18, and being depicted in the same respective line as said Slr0739, and preferably the activity is increased plastidic, whereby the respective line disclose in column 7 the fine chemical lignoceric acid.

[95620] Accordingly, in one embodiment, the molecule which activity is to be increased in the process of the invention is the gene product with an activity as a “geranylgeranyl pyrophosphate synthase”, preferably it is the molecule of section (a) or (b) of this paragraph.

[95621] In particular, it was observed that in plants, especially in Arabidopsis thaliana, increasing or generating the activity of a gene product plastidic with the activity of a “geranylgeranyl pyrophosphate synthase”, preferably being encoded by a gene comprising the nucleic acid sequence SEQ ID NO. 57235, preferably the coding region thereof, conferred the production of or the increase in lignoceric acid compared with the wild type control.

[95622] The nucleic acid sequence of Slr0966 from Synechocystis sp., e.g. as shown in the respective line in column 5 of Table I, application no. 18, has been published in C. And the activity of the gene product thereof is the activity of tryptophan synthase alpha chain.

[95623] Accordingly, in one embodiment, the process of the present invention for producing lignoceric acid in a non-human organism, like a microorganism or a plant or a part thereof, comprises increasing or generating the activity of a gene product with the activity of a gene product conferring the activity of “tryptophan synthase alpha chain”, especially from Synechocystis sp. or its functional equivalent or its homolog, e.g. the increase of
[95624] (a) a gene product of a gene comprising the nucleic acid molecule as shown in the respective line in column 5 of Table I (whereby the respective line disclose in column 7 the fine chemical lignoceric acid), application no. 18, preferably the coding region thereof, or a homolog or a fragment thereof, and being depicted in the same respective line as said Slr0966, or a functional equivalent or a homolog thereof as shown in column 8 of Table I, application no. 18, preferably the coding region thereof, particularly a homolog or functional equivalent as shown in column 8 of Table I B, application no. 18, and being depicted in the same respective line as said Slr0966, and preferably the activity is increased plastidic, or
[95625] (b) a polypeptide comprising a polypeptide, a consensus sequence or at least a polypeptide motif as shown in the respective line in column 5 of Table II or in column 8 of Table IV, application no. 18, respectively, and being depicted in the same respective line as said Slr0966, or a functional equivalent or a homolog thereof as depicted in column 8 of Table II, application no. 18, preferably a homolog or functional equivalent as depicted in column 8 of Table II B, application no. 18, and being depicted in the same respective line as said Slr0966, and preferably the activity is increased plastidic, whereby the respective line disclose in column 7 the fine chemical lignoceric acid.

[95626] Accordingly, in one embodiment, the molecule which activity is to be increased in the process of the invention is the gene product with an activity as a “tryptophan synthase alpha chain”, preferably it is the molecule of section (a) or (b) of this paragraph.

[95627] In particular, it was observed that in plants, especially in Arabidopsis thaliana, increasing or generating the activity of a gene product plastidic with the activity of a “tryptophan synthase alpha chain”, preferably being encoded by a gene comprising the nucleic acid sequence SEQ ID NO. 87655, preferably the coding region thereof, conferred the production of or the increase in lignoceric acid compared with the wild type control.

[95628] The nucleic acid sequence of Slr2033 from Synechocystis sp., e.g. as shown in the respective line in column 5 of Table I, application no. 18, has been published in C. And the activity of the gene product thereof is the activity of rubredoxin.

[95629] Accordingly, in one embodiment, the process of the present invention for producing lignoceric acid in a non-human organism, like a microorganism or a plant or a part thereof, comprises increasing or generating the activity of a gene product with the activity of a gene product conferring the activity of “rubredoxin”, especially from Synechocystis sp. or its functional equivalent or its homolog, e.g. the increase of
[95630] (a) a gene product of a gene comprising the nucleic acid molecule as shown in the respective line in column 5 of Table I (whereby the respective line disclose in column 7 the fine chemical lignoceric acid), application no. 18, preferably the coding region thereof, or a homolog or a fragment thereof, and being depicted in the same respective line as said Slr2033, or a functional equivalent or a homolog thereof as shown in column 8 of Table I, application no. 18, preferably the coding region thereof, particularly a homolog or functional equivalent as shown in column 8 of Table I B, application no. 18, and being depicted in the same respective line as said Slr2033, and preferably the activity is increased non-targeted, or
[95631] (b) a polypeptide comprising a polypeptide, a consensus sequence or at least a polypeptide motif as shown in the respective line in column 5 of Table II or in column 8 of Table IV, application no. 18, respectively, and being depicted in the same respective line as said Slr2033, or a functional equivalent or a homolog thereof as depicted in column 8 of Table II, application no. 18, preferably a homolog or functional equivalent as depicted in column 8 of Table II B, application no. 18, and being depicted in the same respective line as said Slr2033, and preferably the activity is increased non-targeted, whereby the respective line disclose in column 7 the fine chemical lignoceric acid.

[95632] Accordingly, in one embodiment, the molecule which activity is to be increased in the process of the invention is the gene product with an activity as a “rubredoxin”, preferably it is the molecule of section (a) or (b) of this paragraph.

[95633] In particular, it was observed that in plants, especially in Arabidopsis thaliana, increasing or generating the activity of a gene product non-targeted with the activity of a “rubredoxin”, preferably being encoded by a gene comprising the nucleic acid sequence SEQ ID NO. 152275, preferably the coding region thereof, conferred the production of or the increase in lignoceric acid compared with the wild type control.

[95634] The nucleic acid sequence of TTC0019 from Thermus thermophilus, e.g. as shown in the respective line in column 5 of Table I, application no. 18, has been published in E. And the activity of the gene product thereof is the activity of Sec-independent protein translocase subunit.

[95635] Accordingly, in one embodiment, the process of the present invention for producing lignoceric acid in a non-human organism, like a microorganism or a plant or a part thereof, comprises increasing or generating the activity of a gene product with the activity of a gene product conferring the activity of “Sec-independent protein translocase subunit”, especially from Thermus thermophilus or its functional equivalent or its homolog, e.g. the increase of
[95636] (a) a gene product of a gene comprising the nucleic acid molecule as shown in the respective line in column 5 of Table I (whereby the respective line disclose in column 7 the fine chemical lignoceric acid), application no. 18, preferably the coding region thereof, or a homolog or a fragment thereof, and being depicted in the same respective line as said TTC0019, or a functional equivalent or a homolog thereof as shown in column 8 of Table I, application no. 18, preferably the coding region thereof, particularly a homolog or functional equivalent as shown in column 8 of Table I B, application no. 18, and being depicted in the same respective line as said TTC0019, and preferably the activity is increased non-targeted, or
[95637] (b) a polypeptide comprising a polypeptide, a consensus sequence or at least a polypeptide motif as shown in the respective line in column 5 of Table II or in column 8 of Table IV, application no. 18, respectively, and being depicted in the same respective line as said TTC0019, or a functional equivalent or a homolog thereof as depicted in column 8 of Table II, application no. 18, preferably a homolog or functional equivalent as depicted in column 8 of Table II B, application no. 18, and being depicted in the same respective line as said TTC0019, and preferably the activity is increased non-targeted, whereby the respective line disclose in column 7 the fine chemical lignoceric acid.

[95638] Accordingly, in one embodiment, the molecule which activity is to be increased in the process of the invention is the gene product with an activity as a “Sec-independent protein translocase subunit”, preferably it is the molecule of section (a) or (b) of this paragraph.

[95639] In particular, it was observed that in plants, especially in Arabidopsis thaliana, increasing or generating the activity of a gene product non-targeted with the activity of a “Sec-independent protein translocase subunit”, preferably being encoded by a gene comprising the nucleic acid sequence SEQ ID NO. 12698, preferably the coding region thereof, conferred the production of or the increase in lignoceric acid compared with the wild type control.

[95640] The nucleic acid sequence of TTC0768 from Thermus thermophilus, e.g. as shown in the respective line in column 5 of Table I, application no. 18, has been published in E. And the activity of the gene product thereof is the activity of TTC0768-protein.

[95641] Accordingly, in one embodiment, the process of the present invention for producing lignoceric acid in a non-human organism, like a microorganism or a plant or a part thereof, comprises increasing or generating the activity of a gene product with the activity of a gene product conferring the activity of “TTC0768-protein”, especially from Thermus thermophilus or its functional equivalent or its homolog, e.g. the increase of
[95642] (a) a gene product of a gene comprising the nucleic acid molecule as shown in the respective line in column 5 of Table I (whereby the respective line disclose in column 7 the fine chemical lignoceric acid), application no. 18, preferably the coding region thereof, or a homolog or a fragment thereof, and being depicted in the same respective line as said TTC0768, or a functional equivalent or a homolog thereof as shown in column 8 of Table I, application no. 18, preferably the coding region thereof, particularly a homolog or functional equivalent as shown in column 8 of Table I B, application no. 18, and being depicted in the same respective line as said TTC0768, and preferably the activity is increased non-targeted, or
[95643] (b) a polypeptide comprising a polypeptide, a consensus sequence or at least a polypeptide motif as shown in the respective line in column 5 of Table II or in column 8 of Table IV, application no. 18, respectively, and being depicted in the same respective line as said TTC0768, or a functional equivalent or a homolog thereof as depicted in column 8 of Table II, application no. 18, preferably a homolog or functional equivalent as depicted in column 8 of Table II B, application no. 18, and being depicted in the same respective line as said TTC0768, and preferably the activity is increased non-targeted, whereby the respective line disclose in column 7 the fine chemical lignoceric acid.

[95644] Accordingly, in one embodiment, the molecule which activity is to be increased in the process of the invention is the gene product with an activity as a “TTC0768-protein”, preferably it is the molecule of section (a) or (b) of this paragraph.

[95645] In particular, it was observed that in plants, especially in Arabidopsis thaliana, increasing or generating the activity of a gene product non-targeted with the activity of a “TTC0768-protein”, preferably being encoded by a gene comprising the nucleic acid sequence SEQ ID NO. 61532, preferably the coding region thereof, conferred the production of or the increase in lignoceric acid compared with the wild type control.

[95646] The nucleic acid sequence of TTC1386 from Thermus thermophilus, e.g. as shown in the respective line in column 5 of Table I, application no. 18, has been published in E. And the activity of the gene product thereof is the activity of TTC1386-protein.

[95647] Accordingly, in one embodiment, the process of the present invention for producing lignoceric acid in a non-human organism, like a microorganism or a plant or a part thereof, comprises increasing or generating the activity of a gene product with the activity of a gene product conferring the activity of “TTC1386-protein”, especially from Thermus thermophilus or its functional equivalent or its homolog, e.g. the increase of
[95648] (a) a gene product of a gene comprising the nucleic acid molecule as shown in the respective line in column 5 of Table I (whereby the respective line disclose in column 7 the fine chemical lignoceric acid), application no. 18, preferably the coding region thereof, or a homolog or a fragment thereof, and being depicted in the same respective line as said TTC1386, or a functional equivalent or a homolog thereof as shown in column 8 of Table I, application no. 18, preferably the coding region thereof, particularly a homolog or functional equivalent as shown in column 8 of Table I B, application no. 18, and being depicted in the same respective line as said TTC1386, and preferably the activity is increased non-targeted, or
[95649] (b) a polypeptide comprising a polypeptide, a consensus sequence or at least a polypeptide motif as shown in the respective line in column 5 of Table II or in column 8 of Table IV, application no. 18, respectively, and being depicted in the same respective line as said TTC1386, or a functional equivalent or a homolog thereof as depicted in column 8 of Table II, application no. 18, preferably a homolog or functional equivalent as depicted in column 8 of Table II B, application no. 18, and being depicted in the same respective line as said TTC1386, and preferably the activity is increased non-targeted, whereby the respective line disclose in column 7 the fine chemical lignoceric acid.

[95650] Accordingly, in one embodiment, the molecule which activity is to be increased in the process of the invention is the gene product with an activity as a “TTC1386-protein”, preferably it is the molecule of section (a) or (b) of this paragraph.

[95651] In particular, it was observed that in plants, especially in Arabidopsis thaliana, increasing or generating the activity of a gene product non-targeted with the activity of a “TTC1386-protein”, preferably being encoded by a gene comprising the nucleic acid sequence SEQ ID NO. 62079, preferably the coding region thereof, conferred the production of or the increase in lignoceric acid compared with the wild type control.

[95652] The nucleic acid sequence of Yal054c from Saccharomyces cerevisiae, e.g. as shown in the respective line in column 5 of Table I, application no. 18, has been published in A. And the activity of the gene product thereof is the activity of acetyl-coenzyme A synthetase.

[95653] Accordingly, in one embodiment, the process of the present invention for producing lignoceric acid in a non-human organism, like a microorganism or a plant or a part thereof, comprises increasing or generating the activity of a gene product with the activity of a gene product conferring the activity of “acetyl-coenzyme A synthetase”, especially from Saccharomyces cerevisiae or its functional equivalent or its homolog, e.g. the increase of
[95654] (a) a gene product of a gene comprising the nucleic acid molecule as shown in the respective line in column 5 of Table I (whereby the respective line disclose in column 7 the fine chemical lignoceric acid), application no. 18, preferably the coding region thereof, or a homolog or a fragment thereof, and being depicted in the same respective line as said Yal054c, or a functional equivalent or a homolog thereof as shown in column 8 of Table I, application no. 18, preferably the coding region thereof, particularly a homolog or functional equivalent as shown in column 8 of Table I B, application no. 18, and being depicted in the same respective line as said Yal054c, and preferably the activity is increased non-targeted, or
[95655] (b) a polypeptide comprising a polypeptide, a consensus sequence or at least a polypeptide motif as shown in the respective line in column 5 of Table II or in column 8 of Table IV, application no. 18, respectively, and being depicted in the same respective line as said Yal054c, or a functional equivalent or a homolog thereof as depicted in column 8 of Table II, application no. 18, preferably a homolog or functional equivalent as depicted in column 8 of Table II B, application no. 18, and being depicted in the same respective line as said Yal054c, and preferably the activity is increased non-targeted, whereby the respective line disclose in column 7 the fine chemical lignoceric acid.

[95656] Accordingly, in one embodiment, the molecule which activity is to be increased in the process of the invention is the gene product with an activity as a “acetyl-coenzyme A synthetase”, preferably it is the molecule of section (a) or (b) of this paragraph.

[95657] In particular, it was observed that in plants, especially in Arabidopsis thaliana, increasing or generating the activity of a gene product non-targeted with the activity of a “acetyl-coenzyme A synthetase”, preferably being encoded by a gene comprising the nucleic acid sequence SEQ ID NO. 121908, preferably the coding region thereof, conferred the production of or the increase in lignoceric acid compared with the wild type control.

[95658] The nucleic acid sequence of Ydr265w from Saccharomyces cerevisiae, e.g. as shown in the respective line in column 5 of Table I, application no. 18, has been published in A. And the activity of the gene product thereof is the activity of peroxisome assembly protein.

[95659] Accordingly, in one embodiment, the process of the present invention for producing lignoceric acid in a non-human organism, like a microorganism or a plant or a part thereof, comprises increasing or generating the activity of a gene product with the activity of a gene product conferring the activity of “peroxisome assembly protein”, especially from Saccharomyces cerevisiae or its functional equivalent or its homolog, e.g. the increase of
[95660] (a) a gene product of a gene comprising the nucleic acid molecule as shown in the respective line in column 5 of Table I (whereby the respective line disclose in column 7 the fine chemical lignoceric acid), application no. 18, preferably the coding region thereof, or a homolog or a fragment thereof, and being depicted in the same respective line as said Ydr265w, or a functional equivalent or a homolog thereof as shown in column 8 of Table I, application no. 18, preferably the coding region thereof, particularly a homolog or functional equivalent as shown in column 8 of Table I B, application no. 18, and being depicted in the same respective line as said Ydr265w, and preferably the activity is increased plastidic, or
[95661] (b) a polypeptide comprising a polypeptide, a consensus sequence or at least a polypeptide motif as shown in the respective line in column 5 of Table II or in column 8 of Table IV, application no. 18, respectively, and being depicted in the same respective line as said Ydr265w, or a functional equivalent or a homolog thereof as depicted in column 8 of Table II, application no. 18, preferably a homolog or functional equivalent as depicted in column 8 of Table II B, application no. 18, and being depicted in the same respective line as said Ydr265w, and preferably the activity is increased plastidic, whereby the respective line disclose in column 7 the fine chemical lignoceric acid.

[95662] Accordingly, in one embodiment, the molecule which activity is to be increased in the process of the invention is the gene product with an activity as a “peroxisome assembly protein”, preferably it is the molecule of section (a) or (b) of this paragraph.

[95663] In particular, it was observed that in plants, especially in Arabidopsis thaliana, increasing or generating the activity of a gene product plastidic with the activity of a “peroxisome assembly protein”, preferably being encoded by a gene comprising the nucleic acid sequence SEQ ID NO. 63665, preferably the coding region thereof, conferred the production of or the increase in lignoceric acid compared with the wild type control.

[95664] The nucleic acid sequence of Yjl153c from Saccharomyces cerevisiae, e.g. as shown in the respective line in column 5 of Table I, application no. 18, has been published in A. And the activity of the gene product thereof is the activity of inositol-3-phosphate synthase.

[95665] Accordingly, in one embodiment, the process of the present invention for producing heneicosanoic acid in a non-human organism, like a microorganism or a plant or a part thereof, comprises increasing or generating the activity of a gene product with the activity of a gene product conferring the activity of “inositol-3-phosphate synthase”, especially from Saccharomyces cerevisiae or its functional equivalent or its homolog, e.g. the increase of
[95666] (a) a gene product of a gene comprising the nucleic acid molecule as shown in the respective line in column 5 of Table I (whereby the respective line disclose in column 7 the fine chemical heneicosanoic acid), application no. 18, preferably the coding region thereof, or a homolog or a fragment thereof, and being depicted in the same respective line as said Yjl153c, or a functional equivalent or a homolog thereof as shown in column 8 of Table I, application no. 18, preferably the coding region thereof, particularly a homolog or functional equivalent as shown in column 8 of Table I B, application no. 18, and being depicted in the same respective line as said Yjl153c, and preferably the activity is increased non-targeted, or
[95667] (b) a polypeptide comprising a polypeptide, a consensus sequence or at least a polypeptide motif as shown in the respective line in column 5 of Table II or in column 8 of Table IV, application no. 18, respectively, and being depicted in the same respective line as said Yjl153c, or a functional equivalent or a homolog thereof as depicted in column 8 of Table II, application no. 18, preferably a homolog or functional equivalent as depicted in column 8 of Table II B, application no. 18, and being depicted in the same respective line as said Yjl153c, and preferably the activity is increased non-targeted, whereby the respective line disclose in column 7 the fine chemical heneicosanoic acid.

[95668] Accordingly, in one embodiment, the molecule which activity is to be increased in the process of the invention is the gene product with an activity as a “inositol-3-phosphate synthase”, preferably it is the molecule of section (a) or (b) of this paragraph.

[95669] In particular, it was observed that in plants, especially in Arabidopsis thaliana, increasing or generating the activity of a gene product non-targeted with the activity of a “inositol-3-phosphate synthase”, preferably being encoded by a gene comprising the nucleic acid sequence SEQ ID NO. 149632, preferably the coding region thereof, conferred the production of or the increase in heneicosanoic acid compared with the wild type control.

[95670] The nucleic acid sequence of Yjr130c from Saccharomyces cerevisiae, e.g. as shown in the respective line in column 5 of Table I, application no. 18, has been published in A. And the activity of the gene product thereof is the activity of cystathionine gamma-synthase.

[95671] Accordingly, in one embodiment, the process of the present invention for producing lignoceric acid in a non-human organism, like a microorganism or a plant or a part thereof, comprises increasing or generating the activity of a gene product with the activity of a gene product conferring the activity of “cystathionine gamma-synthase”, especially from Saccharomyces cerevisiae or its functional equivalent or its homolog, e.g. the increase of
[95672] (a) a gene product of a gene comprising the nucleic acid molecule as shown in the respective line in column 5 of Table I (whereby the respective line disclose in column 7 the fine chemical lignoceric acid), application no. 18, preferably the coding region thereof, or a homolog or a fragment thereof, and being depicted in the same respective line as said Yjr130c, or a functional equivalent or a homolog thereof as shown in column 8 of Table I, application no. 18, preferably the coding region thereof, particularly a homolog or functional equivalent as shown in column 8 of Table I B, application no. 18, and being depicted in the same respective line as said Yjr130c, and preferably the activity is increased non-targeted, or
[95673] (b) a polypeptide comprising a polypeptide, a consensus sequence or at least a polypeptide motif as shown in the respective line in column 5 of Table II or in column 8 of Table IV, application no. 18, respectively, and being depicted in the same respective line as said Yjr130c, or a functional equivalent or a homolog thereof as depicted in column 8 of Table II, application no. 18, preferably a homolog or functional equivalent as depicted in column 8 of Table II B, application no. 18, and being depicted in the same respective line as said Yjr130c, and preferably the activity is increased non-targeted, whereby the respective line disclose in column 7 the fine chemical lignoceric acid.

[95674] Accordingly, in one embodiment, the molecule which activity is to be increased in the process of the invention is the gene product with an activity as a “cystathionine gamma-synthase”, preferably it is the molecule of section (a) or (b) of this paragraph.

[95675] In particular, it was observed that in plants, especially in Arabidopsis thaliana, increasing or generating the activity of a gene product non-targeted with the activity of a “cystathionine gamma-synthase”, preferably being encoded by a gene comprising the nucleic acid sequence SEQ ID NO. 14843, preferably the coding region thereof, conferred the production of or the increase in lignoceric acid compared with the wild type control.

[95676] The nucleic acid sequence of Ykr050w from Saccharomyces cerevisiae, e.g. as shown in the respective line in column 5 of Table I, application no. 18, has been published in A. And the activity of the gene product thereof is the activity of potassium transport protein.

[95677] Accordingly, in one embodiment, the process of the present invention for producing lignoceric acid in a non-human organism, like a microorganism or a plant or a part thereof, comprises increasing or generating the activity of a gene product with the activity of a gene product conferring the activity of “potassium transport protein”, especially from Saccharomyces cerevisiae or its functional equivalent or its homolog, e.g. the increase of
[95678] (a) a gene product of a gene comprising the nucleic acid molecule as shown in the respective line in column 5 of Table I (whereby the respective line disclose in column 7 the fine chemical lignoceric acid), application no. 18, preferably the coding region thereof, or a homolog or a fragment thereof, and being depicted in the same respective line as said Ykr050w, or a functional equivalent or a homolog thereof as shown in column 8 of Table I, application no. 18, preferably the coding region thereof, particularly a homolog or functional equivalent as shown in column 8 of Table I B, application no. 18, and being depicted in the same respective line as said Ykr050w, and preferably the activity is increased non-targeted, or
[95679] (b) a polypeptide comprising a polypeptide, a consensus sequence or at least a polypeptide motif as shown in the respective line in column 5 of Table II or in column 8 of Table IV, application no. 18, respectively, and being depicted in the same respective line as said Ykr050w, or a functional equivalent or a homolog thereof as depicted in column 8 of Table II, application no. 18, preferably a homolog or functional equivalent as depicted in column 8 of Table II B, application no. 18, and being depicted in the same respective line as said Ykr050w, and preferably the activity is increased non-targeted, whereby the respective line disclose in column 7 the fine chemical lignoceric acid.

[95680] Accordingly, in one embodiment, the molecule which activity is to be increased in the process of the invention is the gene product with an activity as a “potassium transport protein”, preferably it is the molecule of section (a) or (b) of this paragraph.

[95681] In particular, it was observed that in plants, especially in Arabidopsis thaliana, increasing or generating the activity of a gene product non-targeted with the activity of a “potassium transport protein”, preferably being encoded by a gene comprising the nucleic acid sequence SEQ ID NO. 152382, preferably the coding region thereof, conferred the production of or the increase in lignoceric acid compared with the wild type control.

[95682] The nucleic acid sequence of Ylr065c from Saccharomyces cerevisiae, e.g. as shown in the respective line in column 5 of Table I, application no. 18, has been published in A. And the activity of the gene product thereof is the activity of ylr065c-protein.

[95683] Accordingly, in one embodiment, the process of the present invention for producing lignoceric acid in a non-human organism, like a microorganism or a plant or a part thereof, comprises increasing or generating the activity of a gene product with the activity of a gene product conferring the activity of “ylr065c-protein”, especially from Saccharomyces cerevisiae or its functional equivalent or its homolog, e.g. the increase of
[95684] (a) a gene product of a gene comprising the nucleic acid molecule as shown in the respective line in column 5 of Table I (whereby the respective line disclose in column 7 the fine chemical lignoceric acid), application no. 18, preferably the coding region thereof, or a homolog or a fragment thereof, and being depicted in the same respective line as said Ylr065c, or a functional equivalent or a homolog thereof as shown in column 8 of Table I, application no. 18, preferably the coding region thereof, particularly a homolog or functional equivalent as shown in column 8 of Table I B, application no. 18, and being depicted in the same respective line as said Ylr065c, and preferably the activity is increased plastidic, or
[95685] (b) a polypeptide comprising a polypeptide, a consensus sequence or at least a polypeptide motif as shown in the respective line in column 5 of Table II or in column 8 of Table IV, application no. 18, respectively, and being depicted in the same respective line as said Ylr065c, or a functional equivalent or a homolog thereof as depicted in column 8 of Table II, application no. 18, preferably a homolog or functional equivalent as depicted in column 8 of Table II B, application no. 18, and being depicted in the same respective line as said Ylr065c, and preferably the activity is increased plastidic, whereby the respective line disclose in column 7 the fine chemical lignoceric acid.

[95686] Accordingly, in one embodiment, the molecule which activity is to be increased in the process of the invention is the gene product with an activity as a “ylr065c-protein”, preferably it is the molecule of section (a) or (b) of this paragraph.

[95687] In particular, it was observed that in plants, especially in Arabidopsis thaliana, increasing or generating the activity of a gene product plastidic with the activity of a “ylr065c-protein”, preferably being encoded by a gene comprising the nucleic acid sequence SEQ ID NO. 66695, preferably the coding region thereof, conferred the production of or the increase in lignoceric acid compared with the wild type control.

[95688] The nucleic acid sequence of Yml093w from Saccharomyces cerevisiae, e.g. as shown in the respective line in column 5 of Table I, application no. 18, has been published in A. And the activity of the gene product thereof is the activity of yml093w-protein.

[95689] Accordingly, in one embodiment, the process of the present invention for producing lignoceric acid in a non-human organism, like a microorganism or a plant or a part thereof, comprises increasing or generating the activity of a gene product with the activity of a gene product conferring the activity of “yml093w-protein”, especially from Saccharomyces cerevisiae or its functional equivalent or its homolog, e.g. the increase of
[95690] (a) a gene product of a gene comprising the nucleic acid molecule as shown in the respective line in column 5 of Table I (whereby the respective line disclose in column 7 the fine chemical lignoceric acid), application no. 18, preferably the coding region thereof, or a homolog or a fragment thereof, and being depicted in the same respective line as said Yml093w, or a functional equivalent or a homolog thereof as shown in column 8 of Table I, application no. 18, preferably the coding region thereof, particularly a homolog or functional equivalent as shown in column 8 of Table I B, application no. 18, and being depicted in the same respective line as said Yml093w, and preferably the activity is increased plastidic, or
[95691] (b) a polypeptide comprising a polypeptide, a consensus sequence or at least a polypeptide motif as shown in the respective line in column 5 of Table II or in column 8 of Table IV, application no. 18, respectively, and being depicted in the same respective line as said Yml093w, or a functional equivalent or a homolog thereof as depicted in column 8 of Table II, application no. 18, preferably a homolog or functional equivalent as depicted in column 8 of Table II B, application no. 18, and being depicted in the same respective line as said Yml093w, and preferably the activity is increased plastidic, whereby the respective line disclose in column 7 the fine chemical lignoceric acid.

[95692] Accordingly, in one embodiment, the molecule which activity is to be increased in the process of the invention is the gene product with an activity as a “yml093w-protein”, preferably it is the molecule of section (a) or (b) of this paragraph.

[95693] In particular, it was observed that in plants, especially in Arabidopsis thaliana, increasing or generating the activity of a gene product plastidic with the activity of a “yml093w-protein”, preferably being encoded by a gene comprising the nucleic acid sequence SEQ ID NO. 152424, preferably the coding region thereof, conferred the production of or the increase in lignoceric acid compared with the wild type control.

[95694] The nucleic acid sequence of Ymr150c from Saccharomyces cerevisiae, e.g. as shown in the respective line in column 5 of Table I, application no. 18, has been published in A. And the activity of the gene product thereof is the activity of mitochondrial inner membrane protease subunit.

[95695] Accordingly, in one embodiment, the process of the present invention for producing lignoceric acid in a non-human organism, like a microorganism or a plant or a part thereof, comprises increasing or generating the activity of a gene product with the activity of a gene product conferring the activity of “mitochondrial inner membrane protease subunit”, especially from Saccharomyces cerevisiae or its functional equivalent or its homolog, e.g. the increase of
[95696] (a) a gene product of a gene comprising the nucleic acid molecule as shown in the respective line in column 5 of Table I (whereby the respective line disclose in column 7 the fine chemical lignoceric acid), application no. 18, preferably the coding region thereof, or a homolog or a fragment thereof, and being depicted in the same respective line as said Ymr150c, or a functional equivalent or a homolog thereof as shown in column 8 of Table I, application no. 18, preferably the coding region thereof, particularly a homolog or functional equivalent as shown in column 8 of Table I B, application no. 18, and being depicted in the same respective line as said Ymr150c, and preferably the activity is increased plastidic, or
[95697] (b) a polypeptide comprising a polypeptide, a consensus sequence or at least a polypeptide motif as shown in the respective line in column 5 of Table II or in column 8 of Table IV, application no. 18, respectively, and being depicted in the same respective line as said Ymr150c, or a functional equivalent or a homolog thereof as depicted in column 8 of Table II, application no. 18, preferably a homolog or functional equivalent as depicted in column 8 of Table II B, application no. 18, and being depicted in the same respective line as said Ymr150c, and preferably the activity is increased plastidic, whereby the respective line disclose in column 7 the fine chemical lignoceric acid.

[95698] Accordingly, in one embodiment, the molecule which activity is to be increased in the process of the invention is the gene product with an activity as a “mitochondrial inner membrane protease subunit”, preferably it is the molecule of section (a) or (b) of this paragraph.

[95699] In particular, it was observed that in plants, especially in Arabidopsis thaliana, increasing or generating the activity of a gene product plastidic with the activity of a “mitochondrial inner membrane protease subunit”, preferably being encoded by a gene comprising the nucleic acid sequence SEQ ID NO. 92274, preferably the coding region thereof, conferred the production of or the increase in lignoceric acid compared with the wild type control.

[95700] The nucleic acid sequence of Ymr208w from Saccharomyces cerevisiae, e.g. as shown in the respective line in column 5 of Table I, application no. 18, has been published in A. And the activity of the gene product thereof is the activity of mevalonate kinase.

[95701] Accordingly, in one embodiment, the process of the present invention for producing lignoceric acid in a non-human organism, like a microorganism or a plant or a part thereof, comprises increasing or generating the activity of a gene product with the activity of a gene product conferring the activity of “mevalonate kinase”, especially from Saccharomyces cerevisiae or its functional equivalent or its homolog, e.g. the increase of
[95702] (a) a gene product of a gene comprising the nucleic acid molecule as shown in the respective line in column 5 of Table I (whereby the respective line disclose in column 7 the fine chemical lignoceric acid), application no. 18, preferably the coding region thereof, or a homolog or a fragment thereof, and being depicted in the same respective line as said Ymr208w, or a functional equivalent or a homolog thereof as shown in column 8 of Table I, application no. 18, preferably the coding region thereof, particularly a homolog or functional equivalent as shown in column 8 of Table I B, application no. 18, and being depicted in the same respective line as said Ymr208w, and preferably the activity is increased plastidic, or
[95703] (b) a polypeptide comprising a polypeptide, a consensus sequence or at least a polypeptide motif as shown in the respective line in column 5 of Table II or in column 8 of Table IV, application no. 18, respectively, and being depicted in the same respective line as said Ymr208w, or a functional equivalent or a homolog thereof as depicted in column 8 of Table II, application no. 18, preferably a homolog or functional equivalent as depicted in column 8 of Table II B, application no. 18, and being depicted in the same respective line as said Ymr208w, and preferably the activity is increased plastidic, whereby the respective line disclose in column 7 the fine chemical lignoceric acid.

[95704] Accordingly, in one embodiment, the molecule which activity is to be increased in the process of the invention is the gene product with an activity as a “mevalonate kinase”, preferably it is the molecule of section (a) or (b) of this paragraph.

[95705] In particular, it was observed that in plants, especially in Arabidopsis thaliana, increasing or generating the activity of a gene product plastidic with the activity of a “mevalonate kinase”, preferably being encoded by a gene comprising the nucleic acid sequence SEQ ID NO. 152460, preferably the coding region thereof, conferred the production of or the increase in lignoceric acid compared with the wild type control.

[95706] The nucleic acid sequence of Yer152c from Saccharomyces cerevisiae, e.g. as shown in the respective line in column 5 of Table I, application no. 18, has been published in A. And the activity of the gene product thereof is the activity of yer152c-protein.

[95707] Accordingly, in one embodiment, the process of the present invention for producing melissic acid in a non-human organism, like a microorganism or a plant or a part thereof, comprises increasing or generating the activity of a gene product with the activity of a gene product conferring the activity of “yer152c-protein”, especially from Saccharomyces cerevisiae or its functional equivalent or its homolog, e.g. the increase of
[95708] (a) a gene product of a gene comprising the nucleic acid molecule as shown in the respective line in column 5 of Table I (whereby the respective line disclose in column 7 the fine chemical melissic acid), application no. 18, preferably the coding region thereof, or a homolog or a fragment thereof, and being depicted in the same respective line as said Yer152c, or a functional equivalent or a homolog thereof as shown in column 8 of Table I, application no. 18, preferably the coding region thereof, particularly a homolog or functional equivalent as shown in column 8 of Table I B, application no. 18, and being depicted in the same respective line as said Yer152c, and preferably the activity is increased non-targeted, or
[95709] (b) a polypeptide comprising a polypeptide, a consensus sequence or at least a polypeptide motif as shown in the respective line in column 5 of Table II or in column 8 of Table IV, application no. 18, respectively, and being depicted in the same respective line as said Yer152c, or a functional equivalent or a homolog thereof as depicted in column 8 of Table II, application no. 18, preferably a homolog or functional equivalent as depicted in column 8 of Table II B, application no. 18, and being depicted in the same respective line as said Yer152c, and preferably the activity is increased non-targeted, whereby the respective line disclose in column 7 the fine chemical melissic acid.

[95710] Accordingly, in one embodiment, the molecule which activity is to be increased in the process of the invention is the gene product with an activity as a “yer152c-protein”, preferably it is the molecule of section (a) or (b) of this paragraph.

[95711] In particular, it was observed that in plants, especially in Arabidopsis thaliana, increasing or generating the activity of a gene product non-targeted with the activity of a “yer152c-protein”, preferably being encoded by a gene comprising the nucleic acid sequence SEQ ID NO. 152341, preferably the coding region thereof, conferred the production of or the increase in melissic acid compared with the wild type control.

[95712] The nucleic acid sequence of Yer152c from Saccharomyces cerevisiae, e.g. as shown in the respective line in column 5 of Table I, application no. 18, has been published in A. And the activity of the gene product thereof is the activity of yer152c-protein.

[95713] Accordingly, in one embodiment, the process of the present invention for producing montanic acid in a non-human organism, like a microorganism or a plant or a part thereof, comprises increasing or generating the activity of a gene product with the activity of a gene product conferring the activity of “yer152c-protein”, especially from Saccharomyces cerevisiae or its functional equivalent or its homolog, e.g. the increase of
[95714] (a) a gene product of a gene comprising the nucleic acid molecule as shown in the respective line in column 5 of Table I (whereby the respective line disclose in column 7 the fine chemical montanic acid), application no. 18, preferably the coding region thereof, or a homolog or a fragment thereof, and being depicted in the same respective line as said Yer152c, or a functional equivalent or a homolog thereof as shown in column 8 of Table I, application no. 18, preferably the coding region thereof, particularly a homolog or functional equivalent as shown in column 8 of Table I B, application no. 18, and being depicted in the same respective line as said Yer152c, and preferably the activity is increased non-targeted, or
[95715] (b) a polypeptide comprising a polypeptide, a consensus sequence or at least a polypeptide motif as shown in the respective line in column 5 of Table II or in column 8 of Table IV, application no. 18, respectively, and being depicted in the same respective line as said Yer152c, or a functional equivalent or a homolog thereof as depicted in column 8 of Table II, application no. 18, preferably a homolog or functional equivalent as depicted in column 8 of Table II B, application no. 18, and being depicted in the same respective line as said Yer152c, and preferably the activity is increased non-targeted, whereby the respective line disclose in column 7 the fine chemical montanic acid.

[95716] Accordingly, in one embodiment, the molecule which activity is to be increased in the process of the invention is the gene product with an activity as a “yer152c-protein”, preferably it is the molecule of section (a) or (b) of this paragraph.

[95717] In particular, it was observed that in plants, especially in Arabidopsis thaliana, increasing or generating the activity of a gene product non-targeted with the activity of a “yer152c-protein”, preferably being encoded by a gene comprising the nucleic acid sequence SEQ ID NO. 152341, preferably the coding region thereof, conferred the production of or the increase in montanic acid compared with the wild type control.

[95718] The nucleic acid sequence of B3644 from Escherichia coli, e.g. as shown in the respective line in column 5 of Table I, application no. 18, has been published in B. And the activity of the gene product thereof is the activity of b3644-protein.

[95719] Accordingly, in one embodiment, the process of the present invention for producing melissic acid in a non-human organism, like a microorganism or a plant or a part thereof, comprises increasing or generating the activity of a gene product with the activity of a gene product conferring the activity of “b3644-protein”, especially from Escherichia coli or its functional equivalent or its homolog, e.g. the increase of
[95720] (a) a gene product of a gene comprising the nucleic acid molecule as shown in the respective line in column 5 of Table I (whereby the respective line disclose in column 7 the fine chemical melissic acid), application no. 18, preferably the coding region thereof, or a homolog or a fragment thereof, and being depicted in the same respective line as said B3644, or a functional equivalent or a homolog thereof as shown in column 8 of Table I, application no. 18, preferably the coding region thereof, particularly a homolog or functional equivalent as shown in column 8 of Table I B, application no. 18, and being depicted in the same respective line as said B3644, and preferably the activity is increased non-targeted, or
[95721] (b) a polypeptide comprising a polypeptide, a consensus sequence or at least a polypeptide motif as shown in the respective line in column 5 of Table II or in column 8 of Table IV, application no. 18, respectively, and being depicted in the same respective line as said B3644, or a functional equivalent or a homolog thereof as depicted in column 8 of Table II, application no. 18, preferably a homolog or functional equivalent as depicted in column 8 of Table II B, application no. 18, and being depicted in the same respective line as said B3644, and preferably the activity is increased non-targeted, whereby the respective line disclose in column 7 the fine chemical melissic acid.

[95722] Accordingly, in one embodiment, the molecule which activity is to be increased in the process of the invention is the gene product with an activity as a “b3644-protein”, preferably it is the molecule of section (a) or (b) of this paragraph.

[95723] In particular, it was observed that in plants, especially in Arabidopsis thaliana, increasing or generating the activity of a gene product non-targeted with the activity of a “b3644-protein”, preferably being encoded by a gene comprising the nucleic acid sequence SEQ ID NO. 125348, preferably the coding region thereof, conferred the production of or the increase in melissic acid compared with the wild type control.

[95724] The nucleic acid sequence of B3644 from Escherichia coli, e.g. as shown in the respective line in column 5 of Table I, application no. 18, has been published in B. And the activity of the gene product thereof is the activity of b3644-protein.

[95725] Accordingly, in one embodiment, the process of the present invention for producing montanic acid in a non-human organism, like a microorganism or a plant or a part thereof, comprises increasing or generating the activity of a gene product with the activity of a gene product conferring the activity of “b3644-protein”, especially from Escherichia coli or its functional equivalent or its homolog, e.g. the increase of
[95726] (a) a gene product of a gene comprising the nucleic acid molecule as shown in the respective line in column 5 of Table I (whereby the respective line disclose in column 7 the fine chemical montanic acid), application no. 18, preferably the coding region thereof, or a homolog or a fragment thereof, and being depicted in the same respective line as said B3644, or a functional equivalent or a homolog thereof as shown in column 8 of Table I, application no. 18, preferably the coding region thereof, particularly a homolog or functional equivalent as shown in column 8 of Table I B, application no. 18, and being depicted in the same respective line as said B3644, and preferably the activity is increased non-targeted, or
[95727] (b) a polypeptide comprising a polypeptide, a consensus sequence or at least a polypeptide motif as shown in the respective line in column 5 of Table II or in column 8 of Table IV, application no. 18, respectively, and being depicted in the same respective line as said B3644, or a functional equivalent or a homolog thereof as depicted in column 8 of Table II, application no. 18, preferably a homolog or functional equivalent as depicted in column 8 of Table II B, application no. 18, and being depicted in the same respective line as said B3644, and preferably the activity is increased non-targeted, whereby the respective line disclose in column 7 the fine chemical montanic acid.

[95728] Accordingly, in one embodiment, the molecule which activity is to be increased in the process of the invention is the gene product with an activity as a “b3644-protein”, preferably it is the molecule of section (a) or (b) of this paragraph.

[95729] In particular, it was observed that in plants, especially in Arabidopsis thaliana, increasing or generating the activity of a gene product non-targeted with the activity of a “b3644-protein”, preferably being encoded by a gene comprising the nucleic acid sequence SEQ ID NO. 125348, preferably the coding region thereof, conferred the production of or the increase in montanic acid compared with the wild type control.

[95730] [0105.1.7.18] to [0107.1.7.18] for the disclosure of these paragraphs see [0105.1.7.7] to [0107.1.7.7] above

[95731] A protein having an activity conferring an increase in the amount or level of the fine chemical cerotic acid, heneicosanoic acid, lignoceric acid, melissic acid or montanic acid, upon targeting to the plastids or mitochondria or upon non-targeting, preferably has the structure of the respective polypeptide described herein, in particular of the polypeptides comprising the consensus sequence or at least one polypeptide motifs as shown in the respective line in Table IV, application no. 18, column 8 or of the polypeptide comprising an amino acid sequence as disclosed in the respective line in Table II, application no. 18, columns 5 or 8, or homologs or fragments thereof as described herein, or is encoded by the nucleic acid molecule characterized herein or the nucleic acid molecule according to the invention, for example by the nucleic acid molecule as shown in the respective line in Table I, application no. 18, columns 5 or 8, preferably the coding region thereof, or homologs or fragments thereof and has the herein mentioned activity.

[95732] for the disclosure of this paragraph see [0109.1.7.7] above

[95733] for the disclosure of this paragraph see [0110.1.7.7] above

[95734] In one embodiment, the process of the present invention comprises one or more of the following steps
[95735] (a) stabilizing a protein conferring the generation or increased expression of a protein encoded by the nucleic acid molecule of the invention or of the polypeptide of the invention, e.g. of a polypeptide having the activity selected from the group consisting of 2,3-dihydroxy-2,3-dihydrophenylpropionatedehydrogenase, ABC metal ion transporter substrate-binding protein, acetyl-coenzyme A synthetase, acetyltransferase, acid shock protein, acyl transferase, agmatinase, aminotransferase, ATP-binding component of a transport system, b1522-protein, b3083-protein, b3644-protein, b3812-protein, b4029-protein, binding-protein-dependent transport systems inner membrane component, calcium-dependent protein kinase, cardiolipin synthase, chaperone protein CIpB, cyclin D, cystathionine gamma-synthase, eukaryotic translation initiation factor 5, geranylgeranyl pyrophosphate synthase, gibberellin 20-oxidase, glutamate-ammonia-ligase, glutaredoxin, glycosyl transferase, heat shock transcription factor, hydrolase, inositol-3-phosphate synthase, isochorismate synthase, leucyl/phenylalanyl-tRNA-protein transferase, major facilitator superfamily transporter protein, malate dehydrogenase, mevalonate kinase, mitochondrial inner membrane protease subunit, monodehydroascorbate reductase, multidrug resistance protein, NADH dehydrogenase subunit N, O-antigen chain length determinant, oxidoreductase, peroxisome assembly protein, potassium transport protein, protein kinase, purine nucleoside phosphorylase, rubredoxin, Sec-independent protein translocase subunit, serine protease, sll0064-protein, slr0383-protein, sodium/proton antiporter, thioredoxin family protein, threonine synthase, tryptophan synthase alpha chain, TTC0768-protein, TTC1386-protein, uroporphyrin-III C-methyltransferase, yer152c-protein, ylr065c-protein, yml093w-protein, and zinc finger protein, or of a polypeptide as indicated in the respective line in Table II, application no. 18, columns 5 or 8, or its homologs or fragments, and conferring the production of or an increase in cerotic acid, heneicosanoic acid, lignoceric acid, melissic acid or montanic acid, respectively; and/or
[95736] (b) stabilizing a mRNA conferring the generation or increased expression of a FCRP, e.g. protein encoded by the nucleic acid molecule of the invention or its homologs or fragments, or of a mRNA encoding the polypeptide of the present invention having the hereinmentioned activity selected from the group consisting of said activities mentioned in (a) and conferring the production of or an increase in cerotic acid, heneicosanoic acid, lignoceric acid, melissic acid or montanic acid, respectively; and/or
[95737] (c) increasing the specific activity of a protein conferring the increased expression of a FCRP, e.g. a protein encoded by the nucleic acid molecule of the invention or of the polypeptide of the present invention having herein-mentioned cerotic acid, heneicosanoic acid, lignoceric acid, melissic acid or montanic acid generating or increasing activity, respectively, e.g. of a polypeptide having the activity of a protein as indicated in the respective line in Table II, application no. 18, columns 5 or 8, or its homologs or fragments, or decreasing the inhibitory regulation of the polypeptide of the invention; and/or
[95738] (d) generating or increasing the expression of an endogenous or artificial transcription factor mediating the expression of a protein conferring the generation or increased expression of a FCRP, e.g. a protein encoded by the nucleic acid molecule of the invention or of the polypeptide of the invention having herein-mentioned activity selected from the group consisting of said activities mentioned in (a) and conferring a cerotic acid, heneicosanoic acid, lignoceric acid, melissic acid or montanic acid increasing activity, respectively, e.g. of a polypeptide having the activity of a protein as indicated in the respective line in Table II, application no. 18, columns 5 or 8 or its homologs; and/or
[95739] (e) stimulating activity of a protein conferring the increased expression of a FCRP, e.g. a protein encoded by the nucleic acid molecule of the present invention or a polypeptide of the present invention having herein-mentioned activity selected from the group consisting of said activities mentioned in (a) and conferring a cerotic acid, heneicosanoic acid, lignoceric acid, melissic acid or montanic acid increasing activity, respectively, e.g. of a polypeptide having the activity of a protein as indicated in the respective line in Table II, application no. 18, columns 5 or 8, or its homologs or fragments, by adding one or more exogenous inducing factors to the non-human organism or parts thereof; and/or
[95740] (f) expressing a transgenic gene encoding a protein conferring the increased expression of a FCRP, e.g. a polypeptide encoded by the nucleic acid molecule of the present invention or a polypeptide of the present invention, having herein-mentioned activity selected from the group consisting of said activities mentioned in (a) and conferring a cerotic acid, heneicosanoic acid, lignoceric acid, melissic acid or montanic acid increasing activity, respectively, e.g. of a polypeptide having the activity of a protein as indicated in the respective line in Table II, application no. 18, columns 5 or 8, or its homologs or fragments, and/or
[95741] (g) increasing the copy number of a gene conferring the increased expression of a nucleic acid molecule encoding a FCRP, e.g. a polypeptide encoded by the nucleic acid molecule of the invention or the polypeptide of the invention having herein-mentioned activity selected from the group consisting of said activities mentioned in (a) and conferring a cerotic acid, heneicosanoic acid, lignoceric acid, melissic acid or montanic acid increasing activity, respectively, e.g. of a polypeptide having the activity of a protein as indicated in the respective line in Table II, application no. 18, columns 5 or 8, or its homologs or fragments; and/or
[95742] (h) increasing the expression of the endogenous gene encoding the FCRP, polypeptide of the invention, e.g. a polypeptide encoded by the nucleic acid molecule of the invention or the polypeptide of the invention having herein-mentioned activity selected from the group consisting of said activities mentioned in (a) and conferring a cerotic acid, heneicosanoic acid, lignoceric acid, melissic acid or montanic acid; increasing activity, respectively, e.g. of a polypeptide having the activity of a protein as indicated in the respective line in Table II, application no. 18, columns 5 or 8, or its homologs or fragments, by adding positive expression or removing negative expression elements, e.g. homologous recombination can be used to either introduce positive regulatory elements like for plants the 35S enhancer into the promoter or to remove repressor elements form regulatory regions. Further gene conversion methods can be used to disrupt repressor elements or to enhance to activity of positive elements. Positive elements can be randomly introduced in plants by T-DNA or transposon mutagenesis and lines can be identified in which the positive elements have be integrated near to a gene of the invention, the expression of which is thereby enhanced; and/or
[95743] (i) modulating growth conditions of the non-human organism in such a manner, that the expression or activity of the gene encoding the FCRP, e.g. a protein of the invention or the protein itself is enhanced, for example microorganisms or plants can be grown for example under a higher temperature regime leading to an enhanced expression of heat shock proteins, which can lead to an enhanced cerotic acid, heneicosanoic acid, lignoceric acid, melissic acid or montanic acid production, respectively; and/or
[95744] (j) selecting of non-human organisms with especially high activity of the proteins of the invention from natural or from mutagenized resources and breeding them into the target organisms, e.g. the elite crops; and/or
[95745] (k) directing a protein encoded by the nucleic acid molecule of the invention or of the polypeptide of the present invention having herein-mentioned activity selected from the group consisting of said activities mentioned in (a) and conferring a cerotic acid, heneicosanoic acid, lignoceric acid, melissic acid or montanic acid increasing activity, respectively, e.g. of a polypeptide having the activity of a protein as indicated in the respective line in Table II, application no. 18, columns 5 or 8, or its homologs or fragments, if for the corresponding nucleic acid molecule in the respective line in column 6 of Table I the term “plastidic” is indicated, to the plastids by the addition of a plastidial targeting sequence or if for the corresponding nucleic acid molecule in the respective line in column 6 of Table I the term “mitochondric” is indicated, to the mitochondria by the addition of a mitochondrial targeting sequence; and/or
[95746] (l) generating the expression of a protein encoded by the nucleic acid molecule of the invention or of the polypeptide of the present invention having herein-mentioned activity selected from the group consisting of said activities mentioned in (a) and conferring a cerotic acid, heneicosanoic acid, lignoceric acid, melissic acid or montanic acid increasing activity, respectively, e.g. of a polypeptide having the activity of a protein as indicated in the respective line in Table II, application no. 18, columns 5 or 8, or its homologs or fragments, if for the corresponding nucleic acid molecule in the respective line in column 6 of Table I the term “plastidic” or “mitochondric” is indicated, in these organelles by the stable or transient transformation, advantageously stable transformation, of organelles, preferably plastids or mitochondria, with an inventive nucleic acid sequence preferably in form of an expression cassette containing said sequence leading to the expression of the nucleic acids or polypeptides of the invention in the respective organelle; and/or
[95747] (m) generating the expression of a protein encoded by the nucleic acid molecule of the invention or of the polypeptide of the present invention having herein-mentioned activity selected from the group consisting of said activities mentioned in (a) and conferring a cerotic acid, heneicosanoic acid, lignoceric acid, melissic acid and/or montanic acid increasing activity, respectively, e.g. of a polypeptide having the activity of a protein as indicated in the respective line in Table II, application no. 18, columns 5 or 8, or its homologs or fragments, if for the corresponding nucleic acid molecule in the respective line in column 6 of Table I the term “plastidic” or “mitochondric” is indicated, in these organelles by integration of a nucleic acid of the invention into the genome of the respective organelle under control of preferable a promoter selective for the respective organelle.

[95748] Preferably, said mRNA is the coding region of the nucleic acid molecule of the present invention and/or the protein conferring the increased expression of a protein encoded by the coding region of the nucleic acid molecule of the present invention alone or linked to a transit nucleic acid sequence or transit peptide encoding nucleic acid sequence or the polypeptide having the herein mentioned activity, e.g. conferring the generation of or increase of cerotic acid, heneicosanoic acid, lignoceric acid, melissic acid or montanic acid, respectively, after increasing the expression or activity of the encoded polypeptide, non-targeted or in organelles such as plastids and/or mitochondria, preferably plastids, or having the activity of a polypeptide having an activity as the protein as shown in the respective line in Table II, application no. 18, column 3, or its homologs. Preferably the increase of cerotic acid, heneicosanoic acid, lignoceric acid, melissic acid or montanic acid, respectively, takes place non-targeted or in plastids and/or mitochondria, preferably non-targeted or in plastids.

[95749] [0113.1.7.18] to [0122.1.7.18] for the disclosure of theses paragraphs see [0113.1.7.7] to [0122.1.7.7] above

[95750] The activation of an endogenous polypeptide having above-mentioned activity, e.g. having the activity of a protein as shown in the respective line in Table II, application no. 18, column 3 or of the polypeptide of the invention, e.g. conferring the increase of the fine chemical cerotic acid, heneicosanoic acid, lignoceric acid, melissic acid or montanic acid, respectively, by increase of expression or activity in the cytoplasm, and/or in the cytosol, and/or in an organelle, such as plastids or mitochondria, can also be increased by introducing a synthetic transcription factor, which binds close to the coding region of the gene encoding the protein as shown in the respective line in Table II, application no. 18, column 5 or 8, or homologs or fragments thereof, and activates its transcription. A chimeric zinc finger protein can be constructed, which comprises a specific DNA-binding domain and an activation domain as e.g. the VP16 domain of Herpes Simplex virus. The specific binding domain can bind to the regulatory region of the gene encoding the protein as shown in the respective line in Table II, application no. 18, column 5 or 8, or homologs or fragments thereof. The expression of the chimeric transcription factor in a non-human organism, in particular in a plant, leads to a specific expression of the protein as shown in the respective line in Table II, application no. 18, column 5 or 8, or homologs or fragments thereof, see e.g. in WO01/52620, Oriz, Proc. Natl. Acad. Sci. USA 99, 13290 (2002), or Guan, Proc. Natl. Acad. Sci. USA 99, 13296 (2002).

[95751] [0124.1.7.18] to [0127.1.7.18] for the disclosure of these paragraphs see [0124.1.7.7] to [0127.1.7.7] above

[95752] Owing to the introduction of a gene or a plurality of genes conferring the expression of the nucleic acid molecule of the invention or the polypeptide of the invention, for example the nucleic acid construct mentioned below, or encoding the protein as shown in the respective line in Table II, application no. 18, column 5 or 8, or homologs or fragments thereof, into a non-human organism alone or in combination with other genes, it is possible not only to increase the biosynthetic flux towards the end product, but also to increase, modify or create de novo an advantageous, preferably novel metabolites composition in the non-human organism, e.g. an advantageous composition comprising a higher content of (from a viewpoint of nutritional physiology limited) cerotic acid, heneicosanoic acid, lignoceric acid, melissic acid or montanic acid and if desired other fatty acids, waxes e.g. VLCFA and/or lipids, and/or other metabolites, in free or bound form.

[95753] for the disclosure of this paragraph see [0129.1.7.7] above

[95754] Accordingly, in one embodiment, the process according to the invention relates to a process, which comprises:
[95755] (a) providing a non-human organism, preferably a microorganism, a plant cell, a plant tissue, a plant or a part thereof, more preferably a microorganism, a plant tissue, a plant or a part thereof;
[95756] (b) increasing the activity of a protein as shown in the respective line in Table II, application no. 18, column 3 or of a polypeptide being encoded by the respective nucleic acid molecule of the present invention and described below, e.g. conferring an increase of the fine chemical cerotic acid, heneicosanoic acid, lignoceric acid, melissic acid or montanic acid, respectively, in the non-human organism, preferably in the microorganism, the plant cell, the plant tissue, the plant or a part thereof, more preferably a microorganism, a plant tissue, a plant or a part thereof, especially cytoplasmic or in an organelle, like plastids or mitochondria,
[95757] (c) growing the non-human organism, preferably the microorganism, the plant cell, the plant tissue, the plant or a part thereof, under conditions which permit the production of said chemical in the non-human organism, preferably the microorganism, the plant cell, the plant tissue, the plant or a part thereof; and
[95758] (d) if desired, recovering, optionally isolating, said fine chemical, in free and/or bound form, and, optionally further free and/or bound fatty acids, waxes, e.g. VLCFAs, and/or other metabolites synthesized by the non-human organism, the microorganism, the plant cell, the plant tissue, the plant or a part thereof.

[95759] [0131.1.7.18] to [0133.1.7.18] for the disclosure of these paragraphs see [0131.1.7.7] to [0133.1.7.7] above

[95760] The non-human organism, in particular the microorganism, plant or part thereof, is advantageously grown in such a way that it is not only possible to recover, if desired to isolate the free or bound fine chemical or the free and bound fine chemical but as option it is also possible to produce, recover and, if desired to isolate, other free or/and bound vitamins and/or other metabolites.

[95761] The organisms are harvested in a manner known per se and appropriate for the particular organism. Microorganisms such as bacteria, mosses, yeasts and fungi or plant cells which are cultured in liquid media by fermentation may be removed, for example, by centrifugation, decanting or filtration. Plants are grown on solid media in a manner known per se and harvested accordingly.

[95762] The organisms, its cells or a part thereof or the recovered, and if desired isolated, waxes, VLCFAs, e.g. cerotic acid, heneicosanoic acid, lignoceric acid, melissic acid and/or montanic acid or derivates thereof, life salts, ethers esters, oxo and/or hydroxy derivates and/or reduced derivates like alcohols can then be processed further directly into foodstuffs or animal feeds or for other applications, for example according to the disclosures made in WO/2005/083093 or WO2005/012316, which are expressly incorporated herein by reference.

[95763] Fatty Acids are isolated from the harvested biomass in a manner known per se, for example by extraction and, where appropriate, further chemical or physical purification processes such as, for example, precipitation methods, crystallography, thermal separation methods such as rectification methods or physical separation methods such as, for example, chromatography.

[95764] Especially extraction methods using plant materials are described by Cahoon et al. (Proc. Natl. Acad. Sci. USA 96 (22), 12935 (1999)) or Browse et al., Analytic Biochemistry 152,141 (1986)).

[95765] [0135.1.7.18] to [0139.1.7.18] for the disclosure of these paragraphs see [0135.1.7.7] to [0139.1.7.7] above

[95766] In another embodiment, the invention relates to a (isolated) nucleic acid molecule, which comprises a nucleic acid molecule selected from the group consisting of:
[95767] (a) a nucleic acid molecule encoding a polypeptide shown in Table II, application no. 18, column 5 or 8, preferably shown in Table II B, application no. 18, column 8, or a homolog or a fragment thereof;
[95768] (b) a nucleic acid molecule shown in Table I, application no. 18, column 5 or 8, preferably shown in Table I B, application no. 18, column 8, preferably the coding region thereof, or a homolog or a fragment thereof;
[95769] (c) a nucleic acid molecule, which, as a result of the degeneracy of the genetic code, can be derived from a polypeptide sequence depicted in column 5 or 8 of Table II, application no. 18, preferably in column 8 of Table II B, application no. 18;
[95770] (d) a nucleic acid molecule having at least 30% identity, preferably at least 40%, 50%, 60%, 70%, 75%, 80%, 85%, 90%, 95%, 96%, 97%, 98%, 99%, 99.5%, with the nucleic acid molecule sequence of a polynucleotide comprising the nucleic acid molecule shown in column 5 or 8 of Table I, application no. 18, preferably shown in column 8 of Table I B, application no. 18, preferably the coding region thereof;
[95771] (e) a nucleic acid molecule encoding a polypeptide having at least 30% identity, preferably at least 40%, 50% 60%, 70%, 75%, 80%, 85%, 90%, 95%, 96%, 97%, 98%, 99%, 99.5%, identity with the amino acid sequence of the polypeptide encoded by the nucleic acid molecule of (a), (b), (c) or (d);
[95772] (f) a nucleic acid molecule which hybridizes with a nucleic acid molecule of (a), (b), (c), (d) or (e) under stringent hybridization conditions;
[95773] (g) a nucleic acid molecule encoding a polypeptide which can be isolated with the aid of monoclonal or polyclonal antibodies made against a polypeptide encoded by one of the nucleic acid molecules of (a), (b), (c), (d), (e) or (f);
[95774] (h) a nucleic acid molecule encoding a polypeptide comprising the consensus sequence or one or more polypeptide motifs as shown in column 8 of Table IV, application no. 18;
[95775] (i) a nucleic acid molecule encoding a polypeptide having the activity represented by a respective protein as depicted in column 5 of Table II, application no. 18;
[95776] (j) a nucleic acid molecule comprising a polynucleotide which is obtained by amplifying a cDNA library or a genomic library using the primers in Table III, application no. 18, column 8;
[95777] and
[95778] (k) nucleic acid molecule which is obtainable by screening a suitable nucleic acid library, especially a cDNA library and/or a genomic library, under stringent hybridization conditions with a probe comprising one of the sequences of the nucleic acid molecule of (a), (b), (c), (d), (e), (f), (g), (h), (i) or (j) or with a fragment of at least 15 nt, preferably 20 nt, 30 nt, 50 nt, 100 nt, 200 nt,500 nt, 1000 nt, 1500 nt, 2000 nt or 3000 nt of the nucleic acid molecule characterized in (a), (b), (c), (d), (e), (f), (g), (h), (i) or (j);
[95779] or a nucleic acid molecule comprising a sequence which is complementary thereto.
   (All the references to Tables I to IV are references to the corresponding lines of Tables I to IV.)

[95780] In a preferred embodiment thereof said nucleic acid molecule according to (a), (b), (c), (d), (e), (f), (g), (h), (i), (j) or (k) encodes a polypeptide which has the activity of the respective polypeptide represented by a protein comprising a polypeptide as depicted in the respective line in column 5 of Table II, application no. 18.

[95781] In another preferred embodiment thereof said nucleic acid molecule according to (a), (b), (c), (d), (e), (f), (g), (h), (i), (j) or (k) confers a generation or an increase of the respective fine chemical in a non-human organism or a part thereof as compared to a corresponding wild-type non-human organism or part thereof.

[95782] In another preferred embodiment thereof said nucleic acid molecule according to (a), (b), (c), (d), (e), (f), (g), (h), (i), (j) or (k) encodes a polypeptide which has the activity of the respective polypeptide represented by a protein as depicted in the respective line in column 5 of Table II application no. 18 and confers a generation or an increase of the respective fine chemical in a non-human organism or a part thereof as compared to a corresponding wild-type non-human organism or part thereof.

[95783] In another embodiment, the invention relates to a (isolated) nucleic acid molecule, which comprises a nucleic acid molecule selected from the group consisting of:
[95784] (a) a nucleic acid molecule encoding a polypeptide shown in Table II, column 5 or 8, application no. 18, preferably shown in Table II A, application no. 18, in column 5 or in Table II A, application no. 18, column 8 or in Table II B, application no. 18, column 8, or a homolog or a fragment thereof;
[95785] (b) a nucleic acid molecule shown in Table I, application no. 18, column 5 or 8, preferably shown in Table I A, application no. 18, in column 5 or in Table I A, application no. 18, column 8 or in Table I B, application no. 18, column 8, preferably the coding region thereof, or a homolog or a fragment thereof;
[95786] (c) a nucleic acid molecule, which, as a result of the degeneracy of the genetic code, can be derived from a polypeptide sequence depicted in column 5 or 8 of Table II, application no. 18, preferably shown in Table II A, application no. 18, in column 5 or in Table II A, application no. 18, column 8 or in Table II B, application no. 18, column 8;
[95787] (d) a nucleic acid molecule having at least 30% identity, preferably at least 40%, 50%, 60%, 70%, 75%, 80%, 85%, 90%, 95%, 96%, 97%, 98%, 99%, 99.5%, with the nucleic acid molecule sequence of a polynucleotide comprising the nucleic acid molecule shown in column 5 or 8 of Table I, application no. 18, preferably shown in Table I A, application no. 18, in column 5 or in Table I A, application no. 18, column 8 or in Table I B column 8, preferably the coding region thereof;
[95788] (e) a nucleic acid molecule encoding a polypeptide having at least 30% identity, preferably at least 40%, 50% 60%, 70%, 75%, 80%, 85%, 90%, 95%, 96%, 97%, 98%, 99%, 99.5%, identity with the amino acid sequence of the polypeptide encoded by the nucleic acid molecule of (a), (b), (c) or (d);
[95789] (f) a nucleic acid molecule which hybridizes with a nucleic acid molecule of (a), (b), (c), (d) or (e) under stringent hybridization conditions;
[95790] (g) a nucleic acid molecule encoding a polypeptide which can be isolated with the aid of monoclonal or polyclonal antibodies made against a polypeptide encoded by one of the nucleic acid molecules of (a), (b), (c), (d), (e) or (f);
[95791] (h) a nucleic acid molecule encoding a polypeptide comprising the consensus sequence or one or more polypeptide motifs as shown in column 8 of Table IV, application no. 18;
[95792] (i) a nucleic acid molecule encoding a polypeptide having the activity represented by a respective protein as depicted in column 5 of Table II, application no. 18;
[95793] (j) a nucleic acid molecule comprising a polynucleotide which is obtained by amplifying a cDNA library or a genomic library using the primers in Table III, application no. 18, column 8;
[95794] and
[95795] (k) nucleic acid molecule which is obtainable by screening a suitable nucleic acid library, especially a cDNA library and/or a genomic library, under stringent hybridization conditions with a probe comprising one of the sequences of the nucleic acid molecule of (a), (b), (c), (d), (e), (f), (g), (h), (i) or (j) or with a fragment thereof having at least 15 nt, preferably 20 nt, 30 nt, 50 nt, 100 nt, 200 nt,500 nt, 1000 nt, 1500 nt, 2000 nt or 3000 nt of the nucleic acid molecule complementary to a nucleic acid sequence characterized in (a), (b), (c), (d), (e), (f), (g), (h), (i) or (j);
[95796] or a nucleic acid molecule comprising a sequence which is complementary thereto;
   whereby, preferably, the nucleic acid molecule according to (a), (b), (c), (d), (e), (f), (g), (h), (i), (j) or (k) distinguishes over the sequence depicted in Table I A and/or I B, application no. 18, column 5 or 8, or the coding regions thereof, by one or more nucleotides (especially but not exceeding 5%, preferably 4%, 3%, 2%, 1%, 0.5%, 0.2% or 0.1%). In an embodiment, the nucleic acid molecule of the invention does not consist of the sequence shown in Table I A and/or I B, application no. 18, column 5 or 8, or the coding region thereof. In another embodiment, the nucleic acid molecule of the present invention, preferably the coding region thereof, is at least 30%, 40%, 50%, 60%, 70%, 80%, 90%, 95% identical but less than 100%, 99.999%, 99.99%, 99.9%, 99%, 98%, 97%, 96% or 95% identical to the sequence shown in Table I A and/or I B, application no. 18, column 5 or 8, or the coding region thereof, respectively. In a further embodiment the nucleic acid molecule does not encode the polypeptide sequence shown in Table II A and/or II B, application no. 18, column 5 or 8 but homologs thereof. Accordingly, in one embodiment, the nucleic acid molecule of the present invention encodes in one embodiment a polypeptide which differs at least in one or more amino acids (especially but not exceeding 5%, preferably 4%, 3%, 2%, 1%, 0.5%, 0.2% or 0.1%) from the polypeptide shown in Table II, application no. 18, column 5 or 8 and does not encode a protein of the sequence shown in Table II A and/or II B, application no. 18, column 5 or 8. Accordingly, in one embodiment, the protein encoded by a sequence of a nucleic acid according to (a), (b), (c), (d), (e), (f), (g), (h), (i), (j) or (k) does not consist of the sequence shown in Table I A and/or I B, application no. 18, column 5 or 8, or the coding region thereof. In a further embodiment, the protein of the present invention is at least 30%, 40%, 50%, 60%, 70%, 80%, 90%, 95% identical to protein sequence depicted in Table II A and/or II B, application no. 18, column 5 or 8 but less than 100%, preferably less than 99.999%, 99.99%, 99.9%, 99%, 98%, 97%, 96% or 95% identical to the sequence shown in Table II A and/or II B, application no. 18, column 5 or 8.
   (All the references to Tables I to IV are references to the corresponding lines of Tables I to IV.)

[95797] In a preferred embodiment thereof said nucleic acid molecule according to (a), (b), (c), (d), (e), (f), (g), (h), (i), (j) or (k) encodes a polypeptide which has the activity of the respective polypeptide represented by a protein comprising a polypeptide as depicted in the respective line in column 5 of Table II, application no. 18.

[95798] In another preferred embodiment thereof said nucleic acid molecule according to (a), (b), (c), (d), (e), (f), (g), (h), (i), (j) or (k) confers a generation or an increase of the respective fine chemical in a non-human organism or a part thereof as compared to a corresponding wild-type non-human organism or part thereof.

[95799] In another preferred embodiment thereof said nucleic acid molecule according to (a), (b), (c), (d), (e), (f), (g), (h), (i), (j) or (k) encodes a polypeptide which has the activity of the respective polypeptide represented by a protein as depicted in the respective line in column 5 of Table II, application no. 18, and confers a generation or an increase of the respective fine chemical in a non-human organism or a part thereof as compared to a corresponding wild-type non-human organism or part thereof.

[95800] [0144.1.7.18] to [0155.1.7.18] for the disclosure of these paragraph see [0144.1.7.7] to [0155.1.7.7] above

[95801] In a preferred embodiment a nucleic acid construct, for example an expression cassette, comprises upstream, i.e. at the 5′ end of the encoding sequence, a promoter and downstream, i.e. at the 3′ end, a polyadenylation signal and optionally other regulatory elements which are operably linked to the intervening encoding sequence with one of the nucleic acids as depicted in the respective line in Table I, application no. 18, column 5 or 8, preferably the coding region thereof, or a homolog or a fragment thereof. By an operable linkage is meant the sequential arrangement of promoter, encoding sequence, terminator, optionally other regulatory elements and optionally targeting sequences in such a way that each of the regulatory elements/targeting sequence can fulfill its function in the expression of the encoding sequence in due manner. In one embodiment the sequences preferred for operable linkage are targeting sequences for ensuring subcellular localization in organelles, like plastids or mitochondria. However, targeting sequences for ensuring subcellular localization in the endoplasmic reticulum (=ER), in the nucleus, in oil corpuscles or other compartments may also be employed as well as translation promoters such as the 5′ lead sequence in tobacco mosaic virus (Gallie et al., Nucl. Acids Res. 15, 8693 (1987)).

[95802] for the disclosure of this paragraph see [0157.1.7.7] above

[95803] In an embodiment, the invention relates to an expression cassette, comprising
[95804] 1) a promoter, preferably a promoter selected from the group consisting of Big35S, PCUbi, Super and USP;
[95805] 2) a nucleic acid molecule selected from the group consisting of
   [95806] (a) a nucleic acid molecule encoding a polypeptide shown in Table II, application no. 18, column 5 or 8, preferably shown in Table II A, application no. 18, column 5, or in Table II A, application no. 18, column 8, or in Table II B, application no. 18, column 8, or a homolog or a fragment thereof;
   [95807] (b) a nucleic acid molecule shown in Table I, application no. 18, column 5 or 8, preferably shown in Table I A, application no. 18, column 5, or in Table I A, application no. 18, column 8, or in Table I B, application no. 18, column 8, preferably the coding region thereof, or a homolog or a fragment thereof;
   [95808] (c) a nucleic acid molecule, which, as a result of the degeneracy of the genetic code, can be derived from a polypeptide sequence depicted in column 5 or 8 of Table II, application no. 18, preferably shown in Table II A, application no. 18, column 5, or in Table II A, application no. 18, column 8, or in Table II B, application no. 18, column 8;
   [95809] (d) a nucleic acid molecule having at least 30% identity, preferably at least 40%, 50%, 60%, 70%, 75%, 80%, 85%, 90%, 95%, 96%, 97%, 98%, 99%, 99.5%, with the nucleic acid molecule sequence of a polynucleotide comprising the nucleic acid molecule shown in column 5 or 8 of Table I, application no. 18, preferably shown in Table I A, application no. 18, column 5, or in Table I A, application no. 18, column 8, or in Table I B, application no. 18, column 8, preferably the coding region thereof;
   [95810] (e) a nucleic acid molecule encoding a polypeptide having at least 30% identity, preferably at least 40%, 50% 60%, 70%, 75%, 80%, 85%, 90%, 95%, 96%, 97%, 98%, 99%, 99.5%, identity with the amino acid sequence of the polypeptide encoded by the nucleic acid molecule of (a), (b), (c) or (d);
   [95811] (f) a nucleic acid molecule which hybridizes with a nucleic acid molecule of (a), (b), (c), (d) or (e) under stringent hybridization conditions;
   [95812] (g) a nucleic acid molecule encoding a polypeptide which can be isolated with the aid of monoclonal or polyclonal antibodies made against a polypeptide encoded by one of the nucleic acid molecules of (a), (b), (c), (d), (e) or (f);
   [95813] (h) a nucleic acid molecule encoding a polypeptide comprising the consensus sequence or one or more polypeptide motifs as shown in column 8 of Table IV, application no. 18;
   [95814] (i) a nucleic acid molecule encoding a polypeptide having the activity represented by a respective protein as depicted in column 5 of Table II, application no. 18;
   [95815] (j) a nucleic acid molecule comprising a polynucleotide which is obtained by amplifying a cDNA library or a genomic library using the primers in Table III, application no. 18, column 8;
   [95816] and
   [95817] (k) nucleic acid molecule which is obtainable by screening a suitable nucleic acid library, especially a cDNA library and/or a genomic library, under stringent hybridization conditions with a probe comprising one of the sequences of the nucleic acid molecule of (a), (b), (c), (d), (e), (f), (g), (h), (i) or (j) or with a fragment of at least 15 nt, preferably 20 nt, 30 nt, 50 nt, 100 nt, 200 nt,500 nt, 1000 nt, 1500 nt, 2000 nt or 3000 nt of the nucleic acid molecule characterized in (a), (b), (c), (d), (e), (f), (g), (h), (i) or (j);
   [95818] or a nucleic acid molecule comprising a sequence which is complementary thereto.
      and, optionally
[95819] 3) nucleic acid molecule encoding a transit peptide, preferably encoding a plastidal transit peptide or a mitochondrial transit peptide;
   which are operable linked.
   (All the references to Tables I to IV are references to the corresponding lines of Tables I to IV.)

[95820] In a preferred embodiment thereof said nucleic acid molecule according to 2 (a), (b), (c), (d), (e), (f), (g), (h), (i), (j) or (k) encodes a polypeptide which has the activity of the respective polypeptide represented by a protein comprising a polypeptide as depicted in the respective line in column 5 of Table II, application no. 18.

[95821] In another preferred embodiment thereof said nucleic acid molecule according to 2 (a), (b), (c), (d), (e), (f), (g), (h), (i), (j) or (k) confers a generation or an increase of the respective fine chemical in a non-human organism or a part thereof as compared to a corresponding wild-type non-human organism or part thereof.

[95822] In another preferred embodiment thereof said nucleic acid molecule according to 2 (a), (b), (c), (d), (e), (f), (g), (h), (i), (j) or (k) encodes a polypeptide which has the activity of the respective polypeptide represented by a protein as depicted in the respective line in column 5 of Table II application no. 18 and confers a generation or an increase of the respective fine chemical in a non-human organism or a part thereof as compared to a corresponding wild-type non-human organism or part thereof.

[95823] In another embodiment thereof the expression cassette comprises 3) a nucleic acid molecule encoding a transit peptide, preferably encoding a plastidal transit peptide, especially in case in column 6 of Table I, application no. 18, in the same line as of the respective nucleic acid molecule according to 2) “plastidic” is depicted, or encoding a mitochondrial transit peptide, especially in case in column 6 of Table I, application no. 18, in the same line as of the respective nucleic acid molecule according to 2) “mitochondric” is depicted.

[95824] In another embodiment thereof the expression cassette does not comprise 3) a nucleic acid molecule encoding a transit peptide, especially in case in column 6 of Table I, application no. 18, in the same line as of the respective nucleic acid molecule according to 2) “non-targeted” is depicted.

[95825] In a further embodiment, the invention relates to an expression cassette, comprising
[95826] 1) a promoter, preferably a promoter selected from the group consisting of Big35S, PCUbi, Super and USP;
[95827] 2) a nucleic acid molecule selected from the group consisting of
   [95828] (a) a nucleic acid molecule encoding a polypeptide shown in Table II, application no. 18, column 5 or 8, preferably shown in Table II A, application no. 18, column 5, or in Table II A, application no. 18, column 8, or in Table II B, application no. 18, column 8, or a homolog or a fragment thereof;
   [95829] (b) a nucleic acid molecule shown in Table I, application no. 18, column 5 or 8, preferably shown in Table I A, application no. 18, column 5, or in Table I A, application no. 18, column 8, or in Table I B, application no. 18, column 8, preferably the coding region thereof, or a homolog or a fragment thereof;
   [95830] (c) a nucleic acid molecule, which, as a result of the degeneracy of the genetic code, can be derived from a polypeptide sequence depicted in column 5 or 8 of Table II, application no. 18, preferably shown in Table II A, application no. 18, column 5, or in Table II A, application no. 18, column 8, or in Table II B, application no. 18, column 8;
   [95831] (d) a nucleic acid molecule having at least 30% identity, preferably at least 40%, 50%, 60%, 70%, 75%, 80%, 85%, 90%, 95%, 96%, 97%, 98%, 99%, 99.5%, with the nucleic acid molecule sequence of a polynucleotide comprising the nucleic acid molecule shown in column 5 or 8 of Table I, application no. 18, preferably shown in Table I A, application no. 18, column 5, or in Table I A, application no. 18, column 8,or in Table I B, application no. 18, column 8, preferably the coding region thereof;
   [95832] (e) a nucleic acid molecule encoding a polypeptide having at least 30% identity, preferably at least 40%, 50% 60%, 70%, 75%, 80%, 85%, 90%, 95%, 96%, 97%, 98%, 99%, 99.5%, identity with the amino acid sequence of the polypeptide encoded by the nucleic acid molecule of (a), (b), (c) or (d);
   [95833] (f) a nucleic acid molecule which hybridizes with a nucleic acid molecule of (a), (b), (c), (d) or (e) under stringent hybridization conditions;
   [95834] (g) a nucleic acid molecule encoding a polypeptide which can be isolated with the aid of monoclonal or polyclonal antibodies made against a polypeptide encoded by one of the nucleic acid molecules of (a), (b), (c), (d), (e) or (f);
   [95835] (h) a nucleic acid molecule encoding a polypeptide comprising the consensus sequence or one or more polypeptide motifs as shown in column 8 of Table IV, application no. 18;
   [95836] (i) a nucleic acid molecule encoding a polypeptide having the activity represented by a respective protein as depicted in column 5 of Table II, application no. 18;
   [95837] (j) a nucleic acid molecule comprising a polynucleotide which is obtained by amplifying a cDNA library or a genomic library using the primers in Table III, application no. 18, column 8;
   [95838] and
   [95839] (k) nucleic acid molecule which is obtainable by screening a suitable nucleic acid library, especially a cDNA library and/or a genomic library, under stringent hybridization conditions with a probe comprising one of the sequences of the nucleic acid molecule of (a), (b), (c), (d), (e), (f), (g), (h), (i) or (j) or with a fragment of at least 15 nt, preferably 20 nt, 30 nt, 50 nt, 100 nt, 200 nt,500 nt, 1000 nt, 1500 nt, 2000 nt or 3000 nt of the nucleic acid molecule characterized in (a), (b), (c), (d), (e), (f), (g), (h), (i) or (j);
   [95840] or a nucleic acid molecule comprising a sequence which is complementary thereto;
      and, optionally
[95841] 3) nucleic acid molecule encoding a transit peptide, preferably encoding a plastidal transit peptide or a mitochondrial transit peptide;
   which are operable linked and
   whereby, preferably, the nucleic acid molecule according to 2 (a), (b), (c), (d), (e), (f), (g), (h), (i), (j) or (k) distinguishes over the sequence depicted in Table I A and/or I B, application no. 18, column 5 or 8, or the coding region thereof, by one or more nucleotides (especially but not exceeding 5%, preferably 4%, 3%, 2%, 1%, 0.5%, 0.2% or 0.1%). In an embodiment, the nucleic acid molecule of the invention according to 2) does not consist of the sequence shown in Table I A and/or I B, application no. 18, column 5 or 8, or the coding region thereof. In another embodiment, the nucleic acid molecule of the present invention, preferably the coding region thereof, is at least 30%, 40%, 50%, 60%, 70%, 80%, 90%, 95% identical but less than 100%, 99.999%, 99.99%, 99.9%, 99%, 98%, 97%, 96% or 95% identical to the sequence shown in Table I A and/or I B, application no. 18, column 5 or 8, or the coding region thereof, respectively. In a further embodiment the nucleic acid molecule does not encode the polypeptide sequence shown in Table II A and/or II B, application no. 18, column 5 or 8 but homologs thereof.

[95842] Accordingly, in one embodiment, the nucleic acid molecule of the present invention encodes in one embodiment a polypeptide which differs at least in one or more amino acids (especially but not exceeding 5%, preferably 4%, 3%, 2%, 1%, 0.5%, 0.2% or 0.1%) from the polypeptide shown in Table II, application no. 18, column 5 or 8 and does not encode a protein of the sequence shown in Table II A and/or II B, application no. 18, column 5 or 8. Accordingly, in one embodiment, the protein encoded by a sequence of a nucleic acid according to 2(a), (b), (c), (d), (e), (f), (g), (h), (i), (j) or (k) does not consist of the sequence shown in Table I A and/or I B, application no. 18, column 5 or 8, or the coding region thereof. In a further embodiment, the protein of the present invention is at least 30%, 40%, 50%, 60%, 70%, 80%, 90%, 95% identical to protein sequence depicted in Table II A and/or II B, application no. 18, column 5 or 8 but less than 100%, 99.999%, 99.99%, 99.9%, 99%, 98%, 97%, 96% or 95% identical to the sequence shown in Table II A and/or II B, application no. 18, column 5 or 8.

(All the references to Tables I to IV are references to the corresponding lines of Tables I to IV.)

[95843] In a preferred embodiment thereof said nucleic acid molecule according to 2 (a), (b), (c), (d), (e), (f), (g), (h), (i), (j) or (k) encodes a polypeptide which has the activity of the respective polypeptide represented by a protein comprising a polypeptide as depicted in the respective line in column 5 of Table II, application no. 18.

[95844] In another preferred embodiment thereof said nucleic acid molecule according to 2 (a), (b), (c), (d), (e), (f), (g), (h), (i), (j) or (k) confers a generation or an increase of the respective fine chemical in a non-human organism or a part thereof as compared to a corresponding wild-type non-human organism or part thereof.

[95845] In another preferred embodiment thereof said nucleic acid molecule according to 2 (a), (b), (c), (d), (e), (f), (g), (h), (i), (j) or (k) encodes a polypeptide which has the activity of the respective polypeptide represented by a protein as depicted in the respective line in column 5 of Table II application no. 18 and confers a generation or an increase of the respective fine chemical in a non-human organism or a part thereof as compared to a corresponding wild-type non-human organism or part thereof.

[95846] In another embodiment thereof the expression cassette comprises 3) a nucleic acid molecule encoding a transit peptide, preferably encoding a plastidal transit peptide, especially in case in column 6 of Table I, application no. 18, in the same line as of the respective nucleic acid molecule according to 2) “plastidic” is depicted, or encoding a mitochondrial transit peptide, especially in case in column 6 of Table I, application no. 18, in the same line as of the respective nucleic acid molecule according to 2) “mitochondric” is depicted.

[95847] In another embodiment thereof the expression cassette does not comprise 3) a nucleic acid molecule encoding a transit peptide, especially in case in column 6 of Table I, application no. 18, in the same line as of the respective nucleic acid molecule according to 2) “non-targeted” is depicted.

[95848] In an embodiment the present invention relates to an expresssion cassette comprising a) a promoter, preferably a promoter selected from the group consisting of Big35S, PCUbi, Super and USP, in particular p-PcUBI; and b) the nucleic acid SEQ ID NO. 17968, or a homolog or fragment thereof, or a homolog thereof being depicted in Table I, application no. 18, column 8, in the same line as SEQ ID NO. 17968, preferably the coding region thereof, a homolog or a fragment thereof; which are operable linked.

[95849] In an embodiment thereof the expression cassette comprises in addition c) a nucleic acid molecule encoding a transit peptide, especially a plastidal transit petide in case in Table I, application no. 18, in column 6 in the same line as SEQ ID NO. 17968 is depicted, plastidic is mentioned, or a mitochondrial transit peptide in case in Table I, application no. 18, in column 6 in the same line as SEQ ID NO. 17968 is depicted, mitochondric is mentioned; which is operable linked, too.

[95850] In another embodiment thereof the expression cassette does not comprise an additional transit peptide in case in Table I, application no. 18, in column 6 in the same line as SEQ ID NO. 17968 is depicted, non-targeted is mentioned.

[95851] In an embodiment the present invention relates to an expresssion cassette comprising a) a promoter, preferably a promoter selected from the group consisting of Big35S, PCUbi, Super and USP, in particular p-PcUBI; and b) the nucleic acid SEQ ID NO. 18235, or a homolog or fragment thereof, or a homolog thereof being depicted in Table I, application no. 18, column 8, in the same line as SEQ ID NO. 18235, preferably the coding region thereof, a homolog or a fragment thereof; which are operable linked.

[95852] In an embodiment thereof the expression cassette comprises in addition c) a nucleic acid molecule encoding a transit peptide, especially a plastidal transit petide in case in Table I, application no. 18, in column 6 in the same line as SEQ ID NO. 18235 is depicted, plastidic is mentioned, or a mitochondrial transit peptide in case in Table I, application no. 18, in column 6 in the same line as SEQ ID NO. 18235 is depicted, mitochondric is mentioned; which is operable linked, too.

[95853] In another embodiment thereof the expression cassette does not comprise an additional transit peptide in case in Table I, application no. 18, in column 6 in the same line as SEQ ID NO. 18235 is depicted, non-targeted is mentioned.

[95854] In an embodiment the present invention relates to an expresssion cassette comprising a) a promoter, preferably a promoter selected from the group consisting of Big35S, PCUbi, Super and USP, in particular p-PcUBI; and b) the nucleic acid SEQ ID NO. 22249, or a homolog or fragment thereof, or a homolog thereof being depicted in Table I, application no. 18, column 8, in the same line as SEQ ID NO. 22249, preferably the coding region thereof, a homolog or a fragment thereof; which are operable linked.

[95855] In an embodiment thereof the expression cassette comprises in addition c) a nucleic acid molecule encoding a transit peptide, especially a plastidal transit petide in case in Table I, application no. 18, in column 6 in the same line as SEQ ID NO. 22249 is depicted, plastidic is mentioned, or a mitochondrial transit peptide in case in Table I, application no. 18, in column 6 in the same line as SEQ ID NO. 22249 is depicted, mitochondric is mentioned; which is operable linked, too.

[95856] In another embodiment thereof the expression cassette does not comprise an additional transit peptide in case in Table I, application no. 18, in column 6 in the same line as SEQ ID NO. 22249 is depicted, non-targeted is mentioned.

[95857] In an embodiment the present invention relates to an expresssion cassette comprising a) a promoter, preferably a promoter selected from the group consisting of Big35S, PCUbi, Super and USP, in particular p-PcUBI; and b) the nucleic acid SEQ ID NO. 152081, or a homolog or fragment thereof, or a homolog thereof being depicted in Table I, application no. 18, column 8, in the same line as SEQ ID NO. 152081, preferably the coding region thereof, a homolog or a fragment thereof; which are operable linked.

[95858] In an embodiment thereof the expression cassette comprises in addition c) a nucleic acid molecule encoding a transit peptide, especially a plastidal transit petide in case in Table I, application no. 18, in column 6 in the same line as SEQ ID NO. 152081 is depicted, plastidic is mentioned, or a mitochondrial transit peptide in case in Table I, application no. 18, in column 6 in the same line as SEQ ID NO. 152081 is depicted, mitochondric is mentioned; which is operable linked, too.

[95859] In another embodiment thereof the expression cassette does not comprise an additional transit peptide in case in Table I, application no. 18, in column 6 in the same line as SEQ ID NO. 152081 is depicted, non-targeted is mentioned.

[95860] In an embodiment the present invention relates to an expresssion cassette comprising a) a promoter, preferably a promoter selected from the group consisting of Big35S, PCUbi, Super and USP, in particular p-PcUBI; and b) the nucleic acid SEQ ID NO. 68777, or a homolog or fragment thereof, or a homolog thereof being depicted in Table I, application no. 18, column 8, in the same line as SEQ ID NO. 68777, preferably the coding region thereof, a homolog or a fragment thereof; which are operable linked.

[95861] In an embodiment thereof the expression cassette comprises in addition c) a nucleic acid molecule encoding a transit peptide, especially a plastidal transit petide in case in Table I, application no. 18, in column 6 in the same line as SEQ ID NO. 68777 is depicted, plastidic is mentioned, or a mitochondrial transit peptide in case in Table I, application no. 18, in column 6 in the same line as SEQ ID NO. 68777 is depicted, mitochondric is mentioned; which is operable linked, too.

[95862] In another embodiment thereof the expression cassette does not comprise an additional transit peptide in case in Table I, application no. 18, in column 6 in the same line as SEQ ID NO. 68777 is depicted, non-targeted is mentioned.

[95863] In an embodiment the present invention relates to an expresssion cassette comprising a) a promoter, preferably a promoter selected from the group consisting of Big35S, PCUbi, Super and USP, in particular p-PcUBI; and b) the nucleic acid SEQ ID NO. 2935, or a homolog or fragment thereof, or a homolog thereof being depicted in Table I, application no. 18, column 8, in the same line as SEQ ID NO. 2935, preferably the coding region thereof, a homolog or a fragment thereof; which are operable linked.

[95864] In an embodiment thereof the expression cassette comprises in addition c) a nucleic acid molecule encoding a transit peptide, especially a plastidal transit petide in case in Table I, application no. 18, in column 6 in the same line as SEQ ID NO. 2935 is depicted, plastidic is mentioned, or a mitochondrial transit peptide in case in Table I, application no. 18, in column 6 in the same line as SEQ ID NO. 2935 is depicted, mitochondric is mentioned; which is operable linked, too.

[95865] In another embodiment thereof the expression cassette does not comprise an additional transit peptide in case in Table I, application no. 18, in column 6 in the same line as SEQ ID NO. 2935 is depicted, non-targeted is mentioned.

[95866] In an embodiment the present invention relates to an expresssion cassette comprising a) a promoter, preferably a promoter selected from the group consisting of Big35S, PCUbi, Super and USP, in particular p-PcUBI; and b) the nucleic acid SEQ ID NO. 24232, or a homolog or fragment thereof, or a homolog thereof being depicted in Table I, application no. 18, column 8, in the same line as SEQ ID NO. 24232, preferably the coding region thereof, a homolog or a fragment thereof; which are operable linked.

[95867] In an embodiment thereof the expression cassette comprises in addition c) a nucleic acid molecule encoding a transit peptide, especially a plastidal transit petide in case in Table I, application no. 18, in column 6 in the same line as SEQ ID NO. 24232 is depicted, plastidic is mentioned, or a mitochondrial transit peptide in case in Table I, application no. 18, in column 6 in the same line as SEQ ID NO. 24232 is depicted, mitochondric is mentioned; which is operable linked, too.

[95868] In another embodiment thereof the expression cassette does not comprise an additional transit peptide in case in Table I, application no. 18, in column 6 in the same line as SEQ ID NO. 24232 is depicted, non-targeted is mentioned.

[95869] In an embodiment the present invention relates to an expresssion cassette comprising a) a promoter, preferably a promoter selected from the group consisting of Big35S, PCUbi, Super and USP, in particular p-PcUBI; and b) the nucleic acid SEQ ID NO. 4348, or a homolog or fragment thereof, or a homolog thereof being depicted in Table I, application no. 18, column 8, in the same line as SEQ ID NO. 4348, preferably the coding region thereof, a homolog or a fragment thereof; which are operable linked.

[95870] In an embodiment thereof the expression cassette comprises in addition c) a nucleic acid molecule encoding a transit peptide, especially a plastidal transit petide in case in Table I, application no. 18, in column 6 in the same line as SEQ ID NO. 4348 is depicted, plastidic is mentioned, or a mitochondrial transit peptide in case in Table I, application no. 18, in column 6 in the same line as SEQ ID NO. 4348 is depicted, mitochondric is mentioned; which is operable linked, too.

[95871] In another embodiment thereof the expression cassette does not comprise an additional transit peptide in case in Table I, application no. 18, in column 6 in the same line as SEQ ID NO. 4348 is depicted, non-targeted is mentioned.

[95872] In an embodiment the present invention relates to an expresssion cassette comprising a) a promoter, preferably a promoter selected from the group consisting of Big35S, PCUbi, Super and USP, in particular p-PcUBI; and b) the nucleic acid SEQ ID NO. 24492, or a homolog or fragment thereof, or a homolog thereof being depicted in Table I, application no. 18, column 8, in the same line as SEQ ID NO. 24492, preferably the coding region thereof, a homolog or a fragment thereof; which are operable linked.

[95873] In an embodiment thereof the expression cassette comprises in addition c) a nucleic acid molecule encoding a transit peptide, especially a plastidal transit petide in case in Table I, application no. 18, in column 6 in the same line as SEQ ID NO. 24492 is depicted, plastidic is mentioned, or a mitochondrial transit peptide in case in Table I, application no. 18, in column 6 in the same line as SEQ ID NO. 24492 is depicted, mitochondric is mentioned; which is operable linked, too.

[95874] In another embodiment thereof the expression cassette does not comprise an additional transit peptide in case in Table I, application no. 18, in column 6 in the same line as SEQ ID NO. 24492 is depicted, non-targeted is mentioned.

[95875] In an embodiment the present invention relates to an expresssion cassette comprising a) a promoter, preferably a promoter selected from the group consisting of Big35S, PCUbi, Super and USP, in particular p-PcUBI; and b) the nucleic acid SEQ ID NO. 5493, or a homolog or fragment thereof, or a homolog thereof being depicted in Table I, application no. 18, column 8, in the same line as SEQ ID NO. 5493, preferably the coding region thereof, a homolog or a fragment thereof; which are operable linked.

[95876] In an embodiment thereof the expression cassette comprises in addition c) a nucleic acid molecule encoding a transit peptide, especially a plastidal transit petide in case in Table I, application no. 18, in column 6 in the same line as SEQ ID NO. 5493 is depicted, plastidic is mentioned, or a mitochondrial transit peptide in case in Table I, application no. 18, in column 6 in the same line as SEQ ID NO. 5493 is depicted, mitochondric is mentioned; which is operable linked, too.

[95877] In another embodiment thereof the expression cassette does not comprise an additional transit peptide in case in Table I, application no. 18, in column 6 in the same line as SEQ ID NO. 5493 is depicted, non-targeted is mentioned.

[95878] In an embodiment the present invention relates to an expresssion cassette comprising a) a promoter, preferably a promoter selected from the group consisting of Big35S, PCUbi, Super and USP, in particular p-PcUBI; and b) the nucleic acid SEQ ID NO. 31926, or a homolog or fragment thereof, or a homolog thereof being depicted in Table I, application no. 18, column 8, in the same line as SEQ ID NO. 31926, preferably the coding region thereof, a homolog or a fragment thereof; which are operable linked.

[95879] In an embodiment thereof the expression cassette comprises in addition c) a nucleic acid molecule encoding a transit peptide, especially a plastidal transit petide in case in Table I, application no. 18, in column 6 in the same line as SEQ ID NO. 31926 is depicted, plastidic is mentioned, or a mitochondrial transit peptide in case in Table I, application no. 18, in column 6 in the same line as SEQ ID NO. 31926 is depicted, mitochondric is mentioned; which is operable linked, too.

[95880] In another embodiment thereof the expression cassette does not comprise an additional transit peptide in case in Table I, application no. 18, in column 6 in the same line as SEQ ID NO. 31926 is depicted, non-targeted is mentioned.

[95881] In an embodiment the present invention relates to an expresssion cassette comprising a) a promoter, preferably a promoter selected from the group consisting of Big35S, PCUbi, Super and USP, in particular p-PcUBI; and b) the nucleic acid SEQ ID NO. 6510, or a homolog or fragment thereof, or a homolog thereof being depicted in Table I, application no. 18, column 8, in the same line as SEQ ID NO. 6510, preferably the coding region thereof, a homolog or a fragment thereof; which are operable linked.

[95882] In an embodiment thereof the expression cassette comprises in addition c) a nucleic acid molecule encoding a transit peptide, especially a plastidal transit petide in case in Table I, application no. 18, in column 6 in the same line as SEQ ID NO. 6510 is depicted, plastidic is mentioned, or a mitochondrial transit peptide in case in Table I, application no. 18, in column 6 in the same line as SEQ ID NO. 6510 is depicted, mitochondric is mentioned; which is operable linked, too.

[95883] In another embodiment thereof the expression cassette does not comprise an additional transit peptide in case in Table I, application no. 18, in column 6 in the same line as SEQ ID NO. 6510 is depicted, non-targeted is mentioned.

[95884] In an embodiment the present invention relates to an expresssion cassette comprising a) a promoter, preferably a promoter selected from the group consisting of Big35S, PCUbi, Super and USP, in particular p-PcUBI; and b) the nucleic acid SEQ ID NO. 32037, or a homolog or fragment thereof, or a homolog thereof being depicted in Table I, application no. 18, column 8, in the same line as SEQ ID NO. 32037, preferably the coding region thereof, a homolog or a fragment thereof; which are operable linked.

[95885] In an embodiment thereof the expression cassette comprises in addition c) a nucleic acid molecule encoding a transit peptide, especially a plastidal transit petide in case in Table I, application no. 18, in column 6 in the same line as SEQ ID NO. 32037 is depicted, plastidic is mentioned, or a mitochondrial transit peptide in case in Table I, application no. 18, in column 6 in the same line as SEQ ID NO. 32037 is depicted, mitochondric is mentioned; which is operable linked, too.

[95886] In another embodiment thereof the expression cassette does not comprise an additional transit peptide in case in Table I, application no. 18, in column 6 in the same line as SEQ ID NO. 32037 is depicted, non-targeted is mentioned.

[95887] In an embodiment the present invention relates to an expresssion cassette comprising a) a promoter, preferably a promoter selected from the group consisting of Big35S, PCUbi, Super and USP, in particular p-PcUBI; and b) the nucleic acid SEQ ID NO. 33457, or a homolog or fragment thereof, or a homolog thereof being depicted in Table I, application no. 18, column 8, in the same line as SEQ ID NO. 33457, preferably the coding region thereof, a homolog or a fragment thereof; which are operable linked.

[95888] In an embodiment thereof the expression cassette comprises in addition c) a nucleic acid molecule encoding a transit peptide, especially a plastidal transit petide in case in Table I, application no. 18, in column 6 in the same line as SEQ ID NO. 33457 is depicted, plastidic is mentioned, or a mitochondrial transit peptide in case in Table I, application no. 18, in column 6 in the same line as SEQ ID NO. 33457 is depicted, mitochondric is mentioned; which is operable linked, too.

[95889] In another embodiment thereof the expression cassette does not comprise an additional transit peptide in case in Table I, application no. 18, in column 6 in the same line as SEQ ID NO. 33457 is depicted, non-targeted is mentioned.

[95890] In an embodiment the present invention relates to an expresssion cassette comprising a) a promoter, preferably a promoter selected from the group consisting of Big35S, PCUbi, Super and USP, in particular p-PcUBI; and b) the nucleic acid SEQ ID NO. 33596, or a homolog or fragment thereof, or a homolog thereof being depicted in Table I, application no. 18, column 8, in the same line as SEQ ID NO. 33596, preferably the coding region thereof, a homolog or a fragment thereof; which are operable linked.

[95891] In an embodiment thereof the expression cassette comprises in addition c) a nucleic acid molecule encoding a transit peptide, especially a plastidal transit petide in case in Table I, application no. 18, in column 6 in the same line as SEQ ID NO. 33596 is depicted, plastidic is mentioned, or a mitochondrial transit peptide in case in Table I, application no. 18, in column 6 in the same line as SEQ ID NO. 33596 is depicted, mitochondric is mentioned; which is operable linked, too.

[95892] In another embodiment thereof the expression cassette does not comprise an additional transit peptide in case in Table I, application no. 18, in column 6 in the same line as SEQ ID NO. 33596 is depicted, non-targeted is mentioned.

[95893] In an embodiment the present invention relates to an expresssion cassette comprising a) a promoter, preferably a promoter selected from the group consisting of Big35S, PCUbi, Super and USP, in particular p-PcUBI; and b) the nucleic acid SEQ ID NO. 34044, or a homolog or fragment thereof, or a homolog thereof being depicted in Table I, application no. 18, column 8, in the same line as SEQ ID NO. 34044, preferably the coding region thereof, a homolog or a fragment thereof; which are operable linked.

[95894] In an embodiment thereof the expression cassette comprises in addition c) a nucleic acid molecule encoding a transit peptide, especially a plastidal transit petide in case in Table I, application no. 18, in column 6 in the same line as SEQ ID NO. 34044 is depicted, plastidic is mentioned, or a mitochondrial transit peptide in case in Table I, application no. 18, in column 6 in the same line as SEQ ID NO. 34044 is depicted, mitochondric is mentioned; which is operable linked, too.

[95895] In another embodiment thereof the expression cassette does not comprise an additional transit peptide in case in Table I, application no. 18, in column 6 in the same line as SEQ ID NO. 34044 is depicted, non-targeted is mentioned.

[95896] In an embodiment the present invention relates to an expresssion cassette comprising a) a promoter, preferably a promoter selected from the group consisting of Big35S, PCUbi, Super and USP, in particular p-Super; and b) the nucleic acid SEQ ID NO. 34889, or a homolog or fragment thereof, or a homolog thereof being depicted in Table I, application no. 18, column 8, in the same line as SEQ ID NO. 34889, preferably the coding region thereof, a homolog or a fragment thereof; which are operable linked.

[95897] In an embodiment thereof the expression cassette comprises in addition c) a nucleic acid molecule encoding a transit peptide, especially a plastidal transit petide in case in Table I, application no. 18, in column 6 in the same line as SEQ ID NO. 34889 is depicted, plastidic is mentioned, or a mitochondrial transit peptide in case in Table I, application no. 18, in column 6 in the same line as SEQ ID NO. 34889 is depicted, mitochondric is mentioned; which is operable linked, too.

[95898] In another embodiment thereof the expression cassette does not comprise an additional transit peptide in case in Table I, application no. 18, in column 6 in the same line as SEQ ID NO. 34889 is depicted, non-targeted is mentioned.

[95899] In an embodiment the present invention relates to an expresssion cassette comprising a) a promoter, preferably a promoter selected from the group consisting of Big35S, PCUbi, Super and USP, in particular p-Super; and b) the nucleic acid SEQ ID NO. 7081, or a homolog or fragment thereof, or a homolog thereof being depicted in Table I, application no. 18, column 8, in the same line as SEQ ID NO. 7081, preferably the coding region thereof, a homolog or a fragment thereof; which are operable linked.

[95900] In an embodiment thereof the expression cassette comprises in addition c) a nucleic acid molecule encoding a transit peptide, especially a plastidal transit petide in case in Table I, application no. 18, in column 6 in the same line as SEQ ID NO. 7081 is depicted, plastidic is mentioned, or a mitochondrial transit peptide in case in Table I, application no. 18, in column 6 in the same line as SEQ ID NO. 7081 is depicted, mitochondric is mentioned; which is operable linked, too.

[95901] In another embodiment thereof the expression cassette does not comprise an additional transit peptide in case in Table I, application no. 18, in column 6 in the same line as SEQ ID NO. 7081 is depicted, non-targeted is mentioned.

[95902] In an embodiment the present invention relates to an expresssion cassette comprising a) a promoter, preferably a promoter selected from the group consisting of Big35S, PCUbi, Super and USP, in particular p-Super; and b) the nucleic acid SEQ ID NO. 7333, or a homolog or fragment thereof, or a homolog thereof being depicted in Table I, application no. 18, column 8, in the same line as SEQ ID NO. 7333, preferably the coding region thereof, a homolog or a fragment thereof; which are operable linked.

[95903] In an embodiment thereof the expression cassette comprises in addition c) a nucleic acid molecule encoding a transit peptide, especially a plastidal transit petide in case in Table I, application no. 18, in column 6 in the same line as SEQ ID NO. 7333 is depicted, plastidic is mentioned, or a mitochondrial transit peptide in case in Table I, application no. 18, in column 6 in the same line as SEQ ID NO. 7333 is depicted, mitochondric is mentioned; which is operable linked, too.

[95904] In another embodiment thereof the expression cassette does not comprise an additional transit peptide in case in Table I, application no. 18, in column 6 in the same line as SEQ ID NO. 7333 is depicted, non-targeted is mentioned.

[95905] In an embodiment the present invention relates to an expresssion cassette comprising a) a promoter, preferably a promoter selected from the group consisting of Big35S, PCUbi, Super and USP, in particular p-Super; and b) the nucleic acid SEQ ID NO. 35967, or a homolog or fragment thereof, or a homolog thereof being depicted in Table I, application no. 18, column 8, in the same line as SEQ ID NO. 35967, preferably the coding region thereof, a homolog or a fragment thereof; which are operable linked.

[95906] In an embodiment thereof the expression cassette comprises in addition c) a nucleic acid molecule encoding a transit peptide, especially a plastidal transit petide in case in Table I, application no. 18, in column 6 in the same line as SEQ ID NO. 35967 is depicted, plastidic is mentioned, or a mitochondrial transit peptide in case in Table I, application no. 18, in column 6 in the same line as SEQ ID NO. 35967 is depicted, mitochondric is mentioned; which is operable linked, too.

[95907] In another embodiment thereof the expression cassette does not comprise an additional transit peptide in case in Table I, application no. 18, in column 6 in the same line as SEQ ID NO. 35967 is depicted, non-targeted is mentioned.

[95908] In an embodiment the present invention relates to an expresssion cassette comprising a) a promoter, preferably a promoter selected from the group consisting of Big35S, PCUbi, Super and USP, in particular p-Super; and b) the nucleic acid SEQ ID NO. 36489, or a homolog or fragment thereof, or a homolog thereof being depicted in Table I, application no. 18, column 8, in the same line as SEQ ID NO. 36489, preferably the coding region thereof, a homolog or a fragment thereof; which are operable linked.

[95909] In an embodiment thereof the expression cassette comprises in addition c) a nucleic acid molecule encoding a transit peptide, especially a plastidal transit petide in case in Table I, application no. 18, in column 6 in the same line as SEQ ID NO. 36489 is depicted, plastidic is mentioned, or a mitochondrial transit peptide in case in Table I, application no. 18, in column 6 in the same line as SEQ ID NO. 36489 is depicted, mitochondric is mentioned; which is operable linked, too.

[95910] In another embodiment thereof the expression cassette does not comprise an additional transit peptide in case in Table I, application no. 18, in column 6 in the same line as SEQ ID NO. 36489 is depicted, non-targeted is mentioned.

[95911] In an embodiment the present invention relates to an expresssion cassette comprising a) a promoter, preferably a promoter selected from the group consisting of Big35S, PCUbi, Super and USP, in particular p-Super; and b) the nucleic acid SEQ ID NO. 7917, or a homolog or fragment thereof, or a homolog thereof being depicted in Table I, application no. 18, column 8, in the same line as SEQ ID NO. 7917, preferably the coding region thereof, a homolog or a fragment thereof; which are operable linked.

[95912] In an embodiment thereof the expression cassette comprises in addition c) a nucleic acid molecule encoding a transit peptide, especially a plastidal transit petide in case in Table I, application no. 18, in column 6 in the same line as SEQ ID NO. 7917 is depicted, plastidic is mentioned, or a mitochondrial transit peptide in case in Table I, application no. 18, in column 6 in the same line as SEQ ID NO. 7917 is depicted, mitochondric is mentioned; which is operable linked, too.

[95913] In another embodiment thereof the expression cassette does not comprise an additional transit peptide in case in Table I, application no. 18, in column 6 in the same line as SEQ ID NO. 7917 is depicted, non-targeted is mentioned.

[95914] In an embodiment the present invention relates to an expresssion cassette comprising a) a promoter, preferably a promoter selected from the group consisting of Big35S, PCUbi, Super and USP, in particular p-Super; and b) the nucleic acid SEQ ID NO. 76032, or a homolog or fragment thereof, or a homolog thereof being depicted in Table I, application no. 18, column 8, in the same line as SEQ ID NO. 76032, preferably the coding region thereof, a homolog or a fragment thereof; which are operable linked.

[95915] In an embodiment thereof the expression cassette comprises in addition c) a nucleic acid molecule encoding a transit peptide, especially a plastidal transit petide in case in Table I, application no. 18, in column 6 in the same line as SEQ ID NO. 76032 is depicted, plastidic is mentioned, or a mitochondrial transit peptide in case in Table I, application no. 18, in column 6 in the same line as SEQ ID NO. 76032 is depicted, mitochondric is mentioned; which is operable linked, too.

[95916] In another embodiment thereof the expression cassette does not comprise an additional transit peptide in case in Table I, application no. 18, in column 6 in the same line as SEQ ID NO. 76032 is depicted, non-targeted is mentioned.

[95917] In an embodiment the present invention relates to an expresssion cassette comprising a) a promoter, preferably a promoter selected from the group consisting of Big35S, PCUbi, Super and USP, in particular p-Super; and b) the nucleic acid SEQ ID NO. 37400, or a homolog or fragment thereof, or a homolog thereof being depicted in Table I, application no. 18, column 8, in the same line as SEQ ID NO. 37400, preferably the coding region thereof, a homolog or a fragment thereof; which are operable linked.

[95918] In an embodiment thereof the expression cassette comprises in addition c) a nucleic acid molecule encoding a transit peptide, especially a plastidal transit petide in case in Table I, application no. 18, in column 6 in the same line as SEQ ID NO. 37400 is depicted, plastidic is mentioned, or a mitochondrial transit peptide in case in Table I, application no. 18, in column 6 in the same line as SEQ ID NO. 37400 is depicted, mitochondric is mentioned; which is operable linked, too.

[95919] In another embodiment thereof the expression cassette does not comprise an additional transit peptide in case in Table I, application no. 18, in column 6 in the same line as SEQ ID NO. 37400 is depicted, non-targeted is mentioned.

[95920] In an embodiment the present invention relates to an expresssion cassette comprising a) a promoter, preferably a promoter selected from the group consisting of Big35S, PCUbi, Super and USP, in particular p-Super; and b) the nucleic acid SEQ ID NO. 98778, or a homolog or fragment thereof, or a homolog thereof being depicted in Table I, application no. 18, column 8, in the same line as SEQ ID NO. 98778, preferably the coding region thereof, a homolog or a fragment thereof; which are operable linked.

[95921] In an embodiment thereof the expression cassette comprises in addition c) a nucleic acid molecule encoding a transit peptide, especially a plastidal transit petide in case in Table I, application no. 18, in column 6 in the same line as SEQ ID NO. 98778 is depicted, plastidic is mentioned, or a mitochondrial transit peptide in case in Table I, application no. 18, in column 6 in the same line as SEQ ID NO. 98778 is depicted, mitochondric is mentioned; which is operable linked, too.

[95922] In another embodiment thereof the expression cassette does not comprise an additional transit peptide in case in Table I, application no. 18, in column 6 in the same line as SEQ ID NO. 98778 is depicted, non-targeted is mentioned.

[95923] In an embodiment the present invention relates to an expresssion cassette comprising a) a promoter, preferably a promoter selected from the group consisting of Big35S, PCUbi, Super and USP, in particular p-Super; and b) the nucleic acid SEQ ID NO. 7947, or a homolog or fragment thereof, or a homolog thereof being depicted in Table I, application no. 18, column 8, in the same line as SEQ ID NO. 7947, preferably the coding region thereof, a homolog or a fragment thereof; which are operable linked.

[95924] In an embodiment thereof the expression cassette comprises in addition c) a nucleic acid molecule encoding a transit peptide, especially a plastidal transit petide in case in Table I, application no. 18, in column 6 in the same line as SEQ ID NO. 7947 is depicted, plastidic is mentioned, or a mitochondrial transit peptide in case in Table I, application no. 18, in column 6 in the same line as SEQ ID NO. 7947 is depicted, mitochondric is mentioned; which is operable linked, too.

[95925] In another embodiment thereof the expression cassette does not comprise an additional transit peptide in case in Table I, application no. 18, in column 6 in the same line as SEQ ID NO. 7947 is depicted, non-targeted is mentioned.

[95926] In an embodiment the present invention relates to an expresssion cassette comprising a) a promoter, preferably a promoter selected from the group consisting of Big35S, PCUbi, Super and USP, in particular p-Super; and b) the nucleic acid SEQ ID NO. 38300, or a homolog or fragment thereof, or a homolog thereof being depicted in Table I, application no. 18, column 8, in the same line as SEQ ID NO. 38300, preferably the coding region thereof, a homolog or a fragment thereof; which are operable linked.

[95927] In an embodiment thereof the expression cassette comprises in addition c) a nucleic acid molecule encoding a transit peptide, especially a plastidal transit petide in case in Table I, application no. 18, in column 6 in the same line as SEQ ID NO. 38300 is depicted, plastidic is mentioned, or a mitochondrial transit peptide in case in Table I, application no. 18, in column 6 in the same line as SEQ ID NO. 38300 is depicted, mitochondric is mentioned; which is operable linked, too.

[95928] In another embodiment thereof the expression cassette does not comprise an additional transit peptide in case in Table I, application no. 18, in column 6 in the same line as SEQ ID NO. 38300 is depicted, non-targeted is mentioned.

[95929] In an embodiment the present invention relates to an expresssion cassette comprising a) a promoter, preferably a promoter selected from the group consisting of Big35S, PCUbi, Super and USP, in particular p-Super; and b) the nucleic acid SEQ ID NO. 79217, or a homolog or fragment thereof, or a homolog thereof being depicted in Table I, application no. 18, column 8, in the same line as SEQ ID NO. 79217, preferably the coding region thereof, a homolog or a fragment thereof; which are operable linked.

[95930] In an embodiment thereof the expression cassette comprises in addition c) a nucleic acid molecule encoding a transit peptide, especially a plastidal transit petide in case in Table I, application no. 18, in column 6 in the same line as SEQ ID NO. 79217 is depicted, plastidic is mentioned, or a mitochondrial transit peptide in case in Table I, application no. 18, in column 6 in the same line as SEQ ID NO. 79217 is depicted, mitochondric is mentioned; which is operable linked, too.

[95931] In another embodiment thereof the expression cassette does not comprise an additional transit peptide in case in Table I, application no. 18, in column 6 in the same line as SEQ ID NO. 79217 is depicted, non-targeted is mentioned.

[95932] In an embodiment the present invention relates to an expresssion cassette comprising a) a promoter, preferably a promoter selected from the group consisting of Big35S, PCUbi, Super and USP, in particular p-Super; and b) the nucleic acid SEQ ID NO. 79509, or a homolog or fragment thereof, or a homolog thereof being depicted in Table I, application no. 18, column 8, in the same line as SEQ ID NO. 79509, preferably the coding region thereof, a homolog or a fragment thereof; which are operable linked.

[95933] In an embodiment thereof the expression cassette comprises in addition c) a nucleic acid molecule encoding a transit peptide, especially a plastidal transit petide in case in Table I, application no. 18, in column 6 in the same line as SEQ ID NO. 79509 is depicted, plastidic is mentioned, or a mitochondrial transit peptide in case in Table I, application no. 18, in column 6 in the same line as SEQ ID NO. 79509 is depicted, mitochondric is mentioned; which is operable linked, too.

[95934] In another embodiment thereof the expression cassette does not comprise an additional transit peptide in case in Table I, application no. 18, in column 6 in the same line as SEQ ID NO. 79509 is depicted, non-targeted is mentioned.

[95935] In an embodiment the present invention relates to an expresssion cassette comprising a) a promoter, preferably a promoter selected from the group consisting of Big35S, PCUbi, Super and USP, in particular p-Super; and b) the nucleic acid SEQ ID NO. 40383, or a homolog or fragment thereof, or a homolog thereof being depicted in Table I, application no. 18, column 8, in the same line as SEQ ID NO. 40383, preferably the coding region thereof, a homolog or a fragment thereof; which are operable linked.

[95936] In an embodiment thereof the expression cassette comprises in addition c) a nucleic acid molecule encoding a transit peptide, especially a plastidal transit petide in case in Table I, application no. 18, in column 6 in the same line as SEQ ID NO. 40383 is depicted, plastidic is mentioned, or a mitochondrial transit peptide in case in Table I, application no. 18, in column 6 in the same line as SEQ ID NO. 40383 is depicted, mitochondric is mentioned; which is operable linked, too.

[95937] In another embodiment thereof the expression cassette does not comprise an additional transit peptide in case in Table I, application no. 18, in column 6 in the same line as SEQ ID NO. 40383 is depicted, non-targeted is mentioned.

[95938] In an embodiment the present invention relates to an expresssion cassette comprising a) a promoter, preferably a promoter selected from the group consisting of Big35S, PCUbi, Super and USP, in particular p-Super; and b) the nucleic acid SEQ ID NO. 82424, or a homolog or fragment thereof, or a homolog thereof being depicted in Table I, application no. 18, column 8, in the same line as SEQ ID NO. 82424, preferably the coding region thereof, a homolog or a fragment thereof; which are operable linked.

[95939] In an embodiment thereof the expression cassette comprises in addition c) a nucleic acid molecule encoding a transit peptide, especially a plastidal transit petide in case in Table I, application no. 18, in column 6 in the same line as SEQ ID NO. 82424 is depicted, plastidic is mentioned, or a mitochondrial transit peptide in case in Table I, application no. 18, in column 6 in the same line as SEQ ID NO. 82424 is depicted, mitochondric is mentioned; which is operable linked, too.

[95940] In another embodiment thereof the expression cassette does not comprise an additional transit peptide in case in Table I, application no. 18, in column 6 in the same line as SEQ ID NO. 82424 is depicted, non-targeted is mentioned.

[95941] In an embodiment the present invention relates to an expresssion cassette comprising a) a promoter, preferably a promoter selected from the group consisting of Big35S, PCUbi, Super and USP, in particular p-Super; and b) the nucleic acid SEQ ID NO. 125487, or a homolog or fragment thereof, or a homolog thereof being depicted in Table I, application no. 18, column 8, in the same line as SEQ ID NO. 125487, preferably the coding region thereof, a homolog or a fragment thereof; which are operable linked.

[95942] In an embodiment thereof the expression cassette comprises in addition c) a nucleic acid molecule encoding a transit peptide, especially a plastidal transit petide in case in Table I, application no. 18, in column 6 in the same line as SEQ ID NO. 125487 is depicted, plastidic is mentioned, or a mitochondrial transit peptide in case in Table I, application no. 18, in column 6 in the same line as SEQ ID NO. 125487 is depicted, mitochondric is mentioned; which is operable linked, too.

[95943] In another embodiment thereof the expression cassette does not comprise an additional transit peptide in case in Table I, application no. 18, in column 6 in the same line as SEQ ID NO. 125487 is depicted, non-targeted is mentioned.

[95944] In an embodiment the present invention relates to an expresssion cassette comprising a) a promoter, preferably a promoter selected from the group consisting of Big35S, PCUbi, Super and USP, in particular p-Super; and b) the nucleic acid SEQ ID NO. 10740, or a homolog or fragment thereof, or a homolog thereof being depicted in Table I, application no. 18, column 8, in the same line as SEQ ID NO. 10740, preferably the coding region thereof, a homolog or a fragment thereof; which are operable linked.

[95945] In an embodiment thereof the expression cassette comprises in addition c) a nucleic acid molecule encoding a transit peptide, especially a plastidal transit petide in case in Table I, application no. 18, in column 6 in the same line as SEQ ID NO. 10740 is depicted, plastidic is mentioned, or a mitochondrial transit peptide in case in Table I, application no. 18, in column 6 in the same line as SEQ ID NO. 10740 is depicted, mitochondric is mentioned; which is operable linked, too.

[95946] In another embodiment thereof the expression cassette does not comprise an additional transit peptide in case in Table I, application no. 18, in column 6 in the same line as SEQ ID NO. 10740 is depicted, non-targeted is mentioned.

[95947] In an embodiment the present invention relates to an expresssion cassette comprising a) a promoter, preferably a promoter selected from the group consisting of Big35S, PCUbi, Super and USP, in particular p-Super; and b) the nucleic acid SEQ ID NO. 45321, or a homolog or fragment thereof, or a homolog thereof being depicted in Table I, application no. 18, column 8, in the same line as SEQ ID NO. 45321, preferably the coding region thereof, a homolog or a fragment thereof; which are operable linked.

[95948] In an embodiment thereof the expression cassette comprises in addition c) a nucleic acid molecule encoding a transit peptide, especially a plastidal transit petide in case in Table I, application no. 18, in column 6 in the same line as SEQ ID NO. 45321 is depicted, plastidic is mentioned, or a mitochondrial transit peptide in case in Table I, application no. 18, in column 6 in the same line as SEQ ID NO. 45321 is depicted, mitochondric is mentioned; which is operable linked, too.

[95949] In another embodiment thereof the expression cassette does not comprise an additional transit peptide in case in Table I, application no. 18, in column 6 in the same line as SEQ ID NO. 45321 is depicted, non-targeted is mentioned.

[95950] In an embodiment the present invention relates to an expresssion cassette comprising a) a promoter, preferably a promoter selected from the group consisting of Big35S, PCUbi, Super and USP, in particular p-PcUBI; and b) the nucleic acid SEQ ID NO. 10811, or a homolog or fragment thereof, or a homolog thereof being depicted in Table I, application no. 18, column 8, in the same line as SEQ ID NO. 10811, preferably the coding region thereof, a homolog or a fragment thereof; which are operable linked.

[95951] In an embodiment thereof the expression cassette comprises in addition c) a nucleic acid molecule encoding a transit peptide, especially a plastidal transit petide in case in Table I, application no. 18, in column 6 in the same line as SEQ ID NO. 10811 is depicted, plastidic is mentioned, or a mitochondrial transit peptide in case in Table I, application no. 18, in column 6 in the same line as SEQ ID NO. 10811 is depicted, mitochondric is mentioned; which is operable linked, too.

[95952] In another embodiment thereof the expression cassette does not comprise an additional transit peptide in case in Table I, application no. 18, in column 6 in the same line as SEQ ID NO. 10811 is depicted, non-targeted is mentioned.

[95953] In an embodiment the present invention relates to an expresssion cassette comprising a) a promoter, preferably a promoter selected from the group consisting of Big35S, PCUbi, Super and USP, in particular p-PcUBI; and b) the nucleic acid SEQ ID NO. 46850, or a homolog or fragment thereof, or a homolog thereof being depicted in Table I, application no. 18, column 8, in the same line as SEQ ID NO. 46850, preferably the coding region thereof, a homolog or a fragment thereof; which are operable linked.

[95954] In an embodiment thereof the expression cassette comprises in addition c) a nucleic acid molecule encoding a transit peptide, especially a plastidal transit petide in case in Table I, application no. 18, in column 6 in the same line as SEQ ID NO. 46850 is depicted, plastidic is mentioned, or a mitochondrial transit peptide in case in Table I, application no. 18, in column 6 in the same line as SEQ ID NO. 46850 is depicted, mitochondric is mentioned; which is operable linked, too.

[95955] In another embodiment thereof the expression cassette does not comprise an additional transit peptide in case in Table I, application no. 18, in column 6 in the same line as SEQ ID NO. 46850 is depicted, non-targeted is mentioned.

[95956] In an embodiment the present invention relates to an expresssion cassette comprising a) a promoter, preferably a promoter selected from the group consisting of Big35S, PCUbi, Super and USP, in particular p-PcUBI; and b) the nucleic acid SEQ ID NO. 47526, or a homolog or fragment thereof, or a homolog thereof being depicted in Table I, application no. 18, column 8, in the same line as SEQ ID NO. 47526, preferably the coding region thereof, a homolog or a fragment thereof; which are operable linked.

[95957] In an embodiment thereof the expression cassette comprises in addition c) a nucleic acid molecule encoding a transit peptide, especially a plastidal transit petide in case in Table I, application no. 18, in column 6 in the same line as SEQ ID NO. 47526 is depicted, plastidic is mentioned, or a mitochondrial transit peptide in case in Table I, application no. 18, in column 6 in the same line as SEQ ID NO. 47526 is depicted, mitochondric is mentioned; which is operable linked, too.

[95958] In another embodiment thereof the expression cassette does not comprise an additional transit peptide in case in Table I, application no. 18, in column 6 in the same line as SEQ ID NO. 47526 is depicted, non-targeted is mentioned.

[95959] In an embodiment the present invention relates to an expresssion cassette comprising a) a promoter, preferably a promoter selected from the group consisting of Big35S, PCUbi, Super and USP, in particular p-PcUBI; and b) the nucleic acid SEQ ID NO. 84265, or a homolog or fragment thereof, or a homolog thereof being depicted in Table I, application no. 18, column 8, in the same line as SEQ ID NO. 84265, preferably the coding region thereof, a homolog or a fragment thereof; which are operable linked.

[95960] In an embodiment thereof the expression cassette comprises in addition c) a nucleic acid molecule encoding a transit peptide, especially a plastidal transit petide in case in Table I, application no. 18, in column 6 in the same line as SEQ ID NO. 84265 is depicted, plastidic is mentioned, or a mitochondrial transit peptide in case in Table I, application no. 18, in column 6 in the same line as SEQ ID NO. 84265 is depicted, mitochondric is mentioned; which is operable linked, too.

[95961] In another embodiment thereof the expression cassette does not comprise an additional transit peptide in case in Table I, application no. 18, in column 6 in the same line as SEQ ID NO. 84265 is depicted, non-targeted is mentioned.

[95962] In an embodiment the present invention relates to an expresssion cassette comprising a) a promoter, preferably a promoter selected from the group consisting of Big35S, PCUbi, Super and USP, in particular p-PcUBI; and b) the nucleic acid SEQ ID NO. 84869, or a homolog or fragment thereof, or a homolog thereof being depicted in Table I, application no. 18, column 8, in the same line as SEQ ID NO. 84869, preferably the coding region thereof, a homolog or a fragment thereof; which are operable linked.

[95963] In an embodiment thereof the expression cassette comprises in addition c) a nucleic acid molecule encoding a transit peptide, especially a plastidal transit petide in case in Table I, application no. 18, in column 6 in the same line as SEQ ID NO. 84869 is depicted, plastidic is mentioned, or a mitochondrial transit peptide in case in Table I, application no. 18, in column 6 in the same line as SEQ ID NO. 84869 is depicted, mitochondric is mentioned; which is operable linked, too.

[95964] In another embodiment thereof the expression cassette does not comprise an additional transit peptide in case in Table I, application no. 18, in column 6 in the same line as SEQ ID NO. 84869 is depicted, non-targeted is mentioned.

[95965] In an embodiment the present invention relates to an expresssion cassette comprising a) a promoter, preferably a promoter selected from the group consisting of Big35S, PCUbi, Super and USP, in particular p-PcUBI; and b) the nucleic acid SEQ ID NO. 101707, or a homolog or fragment thereof, or a homolog thereof being depicted in Table I, application no. 18, column 8, in the same line as SEQ ID NO. 101707, preferably the coding region thereof, a homolog or a fragment thereof; which are operable linked.

[95966] In an embodiment thereof the expression cassette comprises in addition c) a nucleic acid molecule encoding a transit peptide, especially a plastidal transit petide in case in Table I, application no. 18, in column 6 in the same line as SEQ ID NO. 101707 is depicted, plastidic is mentioned, or a mitochondrial transit peptide in case in Table I, application no. 18, in column 6 in the same line as SEQ ID NO. 101707 is depicted, mitochondric is mentioned; which is operable linked, too.

[95967] In another embodiment thereof the expression cassette does not comprise an additional transit peptide in case in Table I, application no. 18, in column 6 in the same line as SEQ ID NO. 101707 is depicted, non-targeted is mentioned.

[95968] In an embodiment the present invention relates to an expresssion cassette comprising a) a promoter, preferably a promoter selected from the group consisting of Big35S, PCUbi, Super and USP, in particular p-PcUBI; and b) the nucleic acid SEQ ID NO. 51268, or a homolog or fragment thereof, or a homolog thereof being depicted in Table I, application no. 18, column 8, in the same line as SEQ ID NO. 51268, preferably the coding region thereof, a homolog or a fragment thereof; which are operable linked.

[95969] In an embodiment thereof the expression cassette comprises in addition c) a nucleic acid molecule encoding a transit peptide, especially a plastidal transit petide in case in Table I, application no. 18, in column 6 in the same line as SEQ ID NO. 51268 is depicted, plastidic is mentioned, or a mitochondrial transit peptide in case in Table I, application no. 18, in column 6 in the same line as SEQ ID NO. 51268 is depicted, mitochondric is mentioned; which is operable linked, too.

[95970] In another embodiment thereof the expression cassette does not comprise an additional transit peptide in case in Table I, application no. 18, in column 6 in the same line as SEQ ID NO. 51268 is depicted, non-targeted is mentioned.

[95971] In an embodiment the present invention relates to an expresssion cassette comprising a) a promoter, preferably a promoter selected from the group consisting of Big35S, PCUbi, Super and USP, in particular p-PcUBI; and b) the nucleic acid SEQ ID NO. 85743, or a homolog or fragment thereof, or a homolog thereof being depicted in Table I, application no. 18, column 8, in the same line as SEQ ID NO. 85743, preferably the coding region thereof, a homolog or a fragment thereof; which are operable linked.

[95972] In an embodiment thereof the expression cassette comprises in addition c) a nucleic acid molecule encoding a transit peptide, especially a plastidal transit petide in case in Table I, application no. 18, in column 6 in the same line as SEQ ID NO. 85743 is depicted, plastidic is mentioned, or a mitochondrial transit peptide in case in Table I, application no. 18, in column 6 in the same line as SEQ ID NO. 85743 is depicted, mitochondric is mentioned; which is operable linked, too.

[95973] In another embodiment thereof the expression cassette does not comprise an additional transit peptide in case in Table I, application no. 18, in column 6 in the same line as SEQ ID NO. 85743 is depicted, non-targeted is mentioned.

[95974] In an embodiment the present invention relates to an expresssion cassette comprising a) a promoter, preferably a promoter selected from the group consisting of Big35S, PCUbi, Super and USP, in particular p-PcUBI; and b) the nucleic acid SEQ ID NO. 86447, or a homolog or fragment thereof, or a homolog thereof being depicted in Table I, application no. 18, column 8, in the same line as SEQ ID NO. 86447, preferably the coding region thereof, a homolog or a fragment thereof; which are operable linked.

[95975] In an embodiment thereof the expression cassette comprises in addition c) a nucleic acid molecule encoding a transit peptide, especially a plastidal transit petide in case in Table I, application no. 18, in column 6 in the same line as SEQ ID NO. 86447 is depicted, plastidic is mentioned, or a mitochondrial transit peptide in case in Table I, application no. 18, in column 6 in the same line as SEQ ID NO. 86447 is depicted, mitochondric is mentioned; which is operable linked, too.

[95976] In another embodiment thereof the expression cassette does not comprise an additional transit peptide in case in Table I, application no. 18, in column 6 in the same line as SEQ ID NO. 86447 is depicted, non-targeted is mentioned.

[95977] In an embodiment the present invention relates to an expresssion cassette comprising a) a promoter, preferably a promoter selected from the group consisting of Big35S, PCUbi, Super and USP, in particular p-PcUBI; and b) the nucleic acid SEQ ID NO. 95744, or a homolog or fragment thereof, or a homolog thereof being depicted in Table I, application no. 18, column 8, in the same line as SEQ ID NO. 95744, preferably the coding region thereof, a homolog or a fragment thereof; which are operable linked.

[95978] In an embodiment thereof the expression cassette comprises in addition c) a nucleic acid molecule encoding a transit peptide, especially a plastidal transit petide in case in Table I, application no. 18, in column 6 in the same line as SEQ ID NO. 95744 is depicted, plastidic is mentioned, or a mitochondrial transit peptide in case in Table I, application no. 18, in column 6 in the same line as SEQ ID NO. 95744 is depicted, mitochondric is mentioned; which is operable linked, too.

[95979] In another embodiment thereof the expression cassette does not comprise an additional transit peptide in case in Table I, application no. 18, in column 6 in the same line as SEQ ID NO. 95744 is depicted, non-targeted is mentioned.

[95980] In an embodiment the present invention relates to an expresssion cassette comprising a) a promoter, preferably a promoter selected from the group consisting of Big35S, PCUbi, Super and USP, in particular p-PcUBI; and b) the nucleic acid SEQ ID NO. 57235, or a homolog or fragment thereof, or a homolog thereof being depicted in Table I, application no. 18, column 8, in the same line as SEQ ID NO. 57235, preferably the coding region thereof, a homolog or a fragment thereof; which are operable linked.

[95981] In an embodiment thereof the expression cassette comprises in addition c) a nucleic acid molecule encoding a transit peptide, especially a plastidal transit petide in case in Table I, application no. 18, in column 6 in the same line as SEQ ID NO. 57235 is depicted, plastidic is mentioned, or a mitochondrial transit peptide in case in Table I, application no. 18, in column 6 in the same line as SEQ ID NO. 57235 is depicted, mitochondric is mentioned; which is operable linked, too.

[95982] In another embodiment thereof the expression cassette does not comprise an additional transit peptide in case in Table I, application no. 18, in column 6 in the same line as SEQ ID NO. 57235 is depicted, non-targeted is mentioned.

[95983] In an embodiment the present invention relates to an expresssion cassette comprising a) a promoter, preferably a promoter selected from the group consisting of Big35S, PCUbi, Super and USP, in particular p-PcUBI; and b) the nucleic acid SEQ ID NO. 87655, or a homolog or fragment thereof, or a homolog thereof being depicted in Table I, application no. 18, column 8, in the same line as SEQ ID NO. 87655, preferably the coding region thereof, a homolog or a fragment thereof; which are operable linked.

[95984] In an embodiment thereof the expression cassette comprises in addition c) a nucleic acid molecule encoding a transit peptide, especially a plastidal transit petide in case in Table I, application no. 18, in column 6 in the same line as SEQ ID NO. 87655 is depicted, plastidic is mentioned, or a mitochondrial transit peptide in case in Table I, application no. 18, in column 6 in the same line as SEQ ID NO. 87655 is depicted, mitochondric is mentioned; which is operable linked, too.

[95985] In another embodiment thereof the expression cassette does not comprise an additional transit peptide in case in Table I, application no. 18, in column 6 in the same line as SEQ ID NO. 87655 is depicted, non-targeted is mentioned.

[95986] In an embodiment the present invention relates to an expresssion cassette comprising a) a promoter, preferably a promoter selected from the group consisting of Big35S, PCUbi, Super and USP, in particular p-PcUBI; and b) the nucleic acid SEQ ID NO. 152275, or a homolog or fragment thereof, or a homolog thereof being depicted in Table I, application no. 18, column 8, in the same line as SEQ ID NO. 152275, preferably the coding region thereof, a homolog or a fragment thereof; which are operable linked.

[95987] In an embodiment thereof the expression cassette comprises in addition c) a nucleic acid molecule encoding a transit peptide, especially a plastidal transit petide in case in Table I, application no. 18, in column 6 in the same line as SEQ ID NO. 152275 is depicted, plastidic is mentioned, or a mitochondrial transit peptide in case in Table I, application no. 18, in column 6 in the same line as SEQ ID NO. 152275 is depicted, mitochondric is mentioned; which is operable linked, too.

[95988] In another embodiment thereof the expression cassette does not comprise an additional transit peptide in case in Table I, application no. 18, in column 6 in the same line as SEQ ID NO. 152275 is depicted, non-targeted is mentioned.

[95989] In an embodiment the present invention relates to an expresssion cassette comprising a) a promoter, preferably a promoter selected from the group consisting of Big35S, PCUbi, Super and USP, in particular p-PcUBI; and b) the nucleic acid SEQ ID NO. 12698, or a homolog or fragment thereof, or a homolog thereof being depicted in Table I, application no. 18, column 8, in the same line as SEQ ID NO. 12698, preferably the coding region thereof, a homolog or a fragment thereof; which are operable linked.

[95990] In an embodiment thereof the expression cassette comprises in addition c) a nucleic acid molecule encoding a transit peptide, especially a plastidal transit petide in case in Table I, application no. 18, in column 6 in the same line as SEQ ID NO. 12698 is depicted, plastidic is mentioned, or a mitochondrial transit peptide in case in Table I, application no. 18, in column 6 in the same line as SEQ ID NO. 12698 is depicted, mitochondric is mentioned; which is operable linked, too.

[95991] In another embodiment thereof the expression cassette does not comprise an additional transit peptide in case in Table I, application no. 18, in column 6 in the same line as SEQ ID NO. 12698 is depicted, non-targeted is mentioned.

[95992] In an embodiment the present invention relates to an expresssion cassette comprising a) a promoter, preferably a promoter selected from the group consisting of Big35S, PCUbi, Super and USP, in particular p-PcUBI; and b) the nucleic acid SEQ ID NO. 61532, or a homolog or fragment thereof, or a homolog thereof being depicted in Table I, application no. 18, column 8, in the same line as SEQ ID NO. 61532, preferably the coding region thereof, a homolog or a fragment thereof; which are operable linked.

[95993] In an embodiment thereof the expression cassette comprises in addition c) a nucleic acid molecule encoding a transit peptide, especially a plastidal transit petide in case in Table I, application no. 18, in column 6 in the same line as SEQ ID NO. 61532 is depicted, plastidic is mentioned, or a mitochondrial transit peptide in case in Table I, application no. 18, in column 6 in the same line as SEQ ID NO. 61532 is depicted, mitochondric is mentioned; which is operable linked, too.

[95994] In another embodiment thereof the expression cassette does not comprise an additional transit peptide in case in Table I, application no. 18, in column 6 in the same line as SEQ ID NO. 61532 is depicted, non-targeted is mentioned.

[95995] In an embodiment the present invention relates to an expresssion cassette comprising a) a promoter, preferably a promoter selected from the group consisting of Big35S, PCUbi, Super and USP, in particular p-PcUBI; and b) the nucleic acid SEQ ID NO. 62079, or a homolog or fragment thereof, or a homolog thereof being depicted in Table I, application no. 18, column 8, in the same line as SEQ ID NO. 62079, preferably the coding region thereof, a homolog or a fragment thereof; which are operable linked.

[95996] In an embodiment thereof the expression cassette comprises in addition c) a nucleic acid molecule encoding a transit peptide, especially a plastidal transit petide in case in Table I, application no. 18, in column 6 in the same line as SEQ ID NO. 62079 is depicted, plastidic is mentioned, or a mitochondrial transit peptide in case in Table I, application no. 18, in column 6 in the same line as SEQ ID NO. 62079 is depicted, mitochondric is mentioned; which is operable linked, too.

[95997] In another embodiment thereof the expression cassette does not comprise an additional transit peptide in case in Table I, application no. 18, in column 6 in the same line as SEQ ID NO. 62079 is depicted, non-targeted is mentioned.

[95998] In an embodiment the present invention relates to an expresssion cassette comprising a) a promoter, preferably a promoter selected from the group consisting of Big35S, PCUbi, Super and USP, in particular p-PcUBI; and b) the nucleic acid SEQ ID NO. 121908, or a homolog or fragment thereof, or a homolog thereof being depicted in Table I, application no. 18, column 8, in the same line as SEQ ID NO. 121908, preferably the coding region thereof, a homolog or a fragment thereof; which are operable linked.

[95999] In an embodiment thereof the expression cassette comprises in addition c) a nucleic acid molecule encoding a transit peptide, especially a plastidal transit petide in case in Table I, application no. 18, in column 6 in the same line as SEQ ID NO. 121908 is depicted, plastidic is mentioned, or a mitochondrial transit peptide in case in Table I, application no. 18, in column 6 in the same line as SEQ ID NO. 121908 is depicted, mitochondric is mentioned; which is operable linked, too.

[96000] In another embodiment thereof the expression cassette does not comprise an additional transit peptide in case in Table I, application no. 18, in column 6 in the same line as SEQ ID NO. 121908 is depicted, non-targeted is mentioned.

[96001] In an embodiment the present invention relates to an expresssion cassette comprising a) a promoter, preferably a promoter selected from the group consisting of Big35S, PCUbi, Super and USP, in particular p-PcUBI; and b) the nucleic acid SEQ ID NO. 63665, or a homolog or fragment thereof, or a homolog thereof being depicted in Table I, application no. 18, column 8, in the same line as SEQ ID NO. 63665, preferably the coding region thereof, a homolog or a fragment thereof; which are operable linked.

[96002] In an embodiment thereof the expression cassette comprises in addition c) a nucleic acid molecule encoding a transit peptide, especially a plastidal transit petide in case in Table I, application no. 18, in column 6 in the same line as SEQ ID NO. 63665 is depicted, plastidic is mentioned, or a mitochondrial transit peptide in case in Table I, application no. 18, in column 6 in the same line as SEQ ID NO. 63665 is depicted, mitochondric is mentioned; which is operable linked, too.

[96003] In another embodiment thereof the expression cassette does not comprise an additional transit peptide in case in Table I, application no. 18, in column 6 in the same line as SEQ ID NO. 63665 is depicted, non-targeted is mentioned.

[96004] In an embodiment the present invention relates to an expresssion cassette comprising a) a promoter, preferably a promoter selected from the group consisting of Big35S, PCUbi, Super and USP, in particular p-PcUBI; and b) the nucleic acid SEQ ID NO. 149632, or a homolog or fragment thereof, or a homolog thereof being depicted in Table I, application no. 18, column 8, in the same line as SEQ ID NO. 149632, preferably the coding region thereof, a homolog or a fragment thereof; which are operable linked.

[96005] In an embodiment thereof the expression cassette comprises in addition c) a nucleic acid molecule encoding a transit peptide, especially a plastidal transit petide in case in Table I, application no. 18, in column 6 in the same line as SEQ ID NO. 149632 is depicted, plastidic is mentioned, or a mitochondrial transit peptide in case in Table I, application no. 18, in column 6 in the same line as SEQ ID NO. 149632 is depicted, mitochondric is mentioned; which is operable linked, too.

[96006] In another embodiment thereof the expression cassette does not comprise an additional transit peptide in case in Table I, application no. 18, in column 6 in the same line as SEQ ID NO. 149632 is depicted, non-targeted is mentioned.

[96007] In an embodiment the present invention relates to an expresssion cassette comprising a) a promoter, preferably a promoter selected from the group consisting of Big35S, PCUbi, Super and USP, in particular Big35S; and b) the nucleic acid SEQ ID NO. 14843, or a homolog or fragment thereof, or a homolog thereof being depicted in Table I, application no. 18, column 8, in the same line as SEQ ID NO. 14843, preferably the coding region thereof, a homolog or a fragment thereof; which are operable linked.

[96008] In an embodiment thereof the expression cassette comprises in addition c) a nucleic acid molecule encoding a transit peptide, especially a plastidal transit petide in case in Table I, application no. 18, in column 6 in the same line as SEQ ID NO. 14843 is depicted, plastidic is mentioned, or a mitochondrial transit peptide in case in Table I, application no. 18, in column 6 in the same line as SEQ ID NO. 14843 is depicted, mitochondric is mentioned; which is operable linked, too.

[96009] In another embodiment thereof the expression cassette does not comprise an additional transit peptide in case in Table I, application no. 18, in column 6 in the same line as SEQ ID NO. 14843 is depicted, non-targeted is mentioned.

[96010] In an embodiment the present invention relates to an expresssion cassette comprising a) a promoter, preferably a promoter selected from the group consisting of Big35S, PCUbi, Super and USP, in particular Big35S; and b) the nucleic acid SEQ ID NO. 152382, or a homolog or fragment thereof, or a homolog thereof being depicted in Table I, application no. 18, column 8, in the same line as SEQ ID NO. 152382, preferably the coding region thereof, a homolog or a fragment thereof; which are operable linked.

[96011] In an embodiment thereof the expression cassette comprises in addition c) a nucleic acid molecule encoding a transit peptide, especially a plastidal transit petide in case in Table I, application no. 18, in column 6 in the same line as SEQ ID NO. 152382 is depicted, plastidic is mentioned, or a mitochondrial transit peptide in case in Table I, application no. 18, in column 6 in the same line as SEQ ID NO. 152382 is depicted, mitochondric is mentioned; which is operable linked, too.

[96012] In another embodiment thereof the expression cassette does not comprise an additional transit peptide in case in Table I, application no. 18, in column 6 in the same line as SEQ ID NO. 152382 is depicted, non-targeted is mentioned.

[96013] In an embodiment the present invention relates to an expresssion cassette comprising a) a promoter, preferably a promoter selected from the group consisting of Big35S, PCUbi, Super and USP, in particular p-Super; and b) the nucleic acid SEQ ID NO. 66695, or a homolog or fragment thereof, or a homolog thereof being depicted in Table I, application no. 18, column 8, in the same line as SEQ ID NO. 66695, preferably the coding region thereof, a homolog or a fragment thereof; which are operable linked.

[96014] In an embodiment thereof the expression cassette comprises in addition c) a nucleic acid molecule encoding a transit peptide, especially a plastidal transit petide in case in Table I, application no. 18, in column 6 in the same line as SEQ ID NO. 66695 is depicted, plastidic is mentioned, or a mitochondrial transit peptide in case in Table I, application no. 18, in column 6 in the same line as SEQ ID NO. 66695 is depicted, mitochondric is mentioned; which is operable linked, too.

[96015] In another embodiment thereof the expression cassette does not comprise an additional transit peptide in case in Table I, application no. 18, in column 6 in the same line as SEQ ID NO. 66695 is depicted, non-targeted is mentioned.

[96016] In an embodiment the present invention relates to an expresssion cassette comprising a) a promoter, preferably a promoter selected from the group consisting of Big35S, PCUbi, Super and USP, in particular p-Super; and b) the nucleic acid SEQ ID NO. 152424, or a homolog or fragment thereof, or a homolog thereof being depicted in Table I, application no. 18, column 8, in the same line as SEQ ID NO. 152424, preferably the coding region thereof, a homolog or a fragment thereof; which are operable linked.

[96017] In an embodiment thereof the expression cassette comprises in addition c) a nucleic acid molecule encoding a transit peptide, especially a plastidal transit petide in case in Table I, application no. 18, in column 6 in the same line as SEQ ID NO. 152424 is depicted, plastidic is mentioned, or a mitochondrial transit peptide in case in Table I, application no. 18, in column 6 in the same line as SEQ ID NO. 152424 is depicted, mitochondric is mentioned; which is operable linked, too.

[96018] In another embodiment thereof the expression cassette does not comprise an additional transit peptide in case in Table I, application no. 18, in column 6 in the same line as SEQ ID NO. 152424 is depicted, non-targeted is mentioned.

[96019] In an embodiment the present invention relates to an expresssion cassette comprising a) a promoter, preferably a promoter selected from the group consisting of Big35S, PCUbi, Super and USP, in particular p-Super; and b) the nucleic acid SEQ ID NO. 92274, or a homolog or fragment thereof, or a homolog thereof being depicted in Table I, application no. 18, column 8, in the same line as SEQ ID NO. 92274, preferably the coding region thereof, a homolog or a fragment thereof; which are operable linked.

[96020] In an embodiment thereof the expression cassette comprises in addition c) a nucleic acid molecule encoding a transit peptide, especially a plastidal transit petide in case in Table I, application no. 18, in column 6 in the same line as SEQ ID NO. 92274 is depicted, plastidic is mentioned, or a mitochondrial transit peptide in case in Table I, application no. 18, in column 6 in the same line as SEQ ID NO. 92274 is depicted, mitochondric is mentioned; which is operable linked, too.

[96021] In another embodiment thereof the expression cassette does not comprise an additional transit peptide in case in Table I, application no. 18, in column 6 in the same line as SEQ ID NO. 92274 is depicted, non-targeted is mentioned.

[96022] In an embodiment the present invention relates to an expresssion cassette comprising a) a promoter, preferably a promoter selected from the group consisting of Big35S, PCUbi, Super and USP, in particular p-Super; and b) the nucleic acid SEQ ID NO. 152460, or a homolog or fragment thereof, or a homolog thereof being depicted in Table I, application no. 18, column 8, in the same line as SEQ ID NO. 152460, preferably the coding region thereof, a homolog or a fragment thereof; which are operable linked.

[96023] In an embodiment thereof the expression cassette comprises in addition c) a nucleic acid molecule encoding a transit peptide, especially a plastidal transit petide in case in Table I, application no. 18, in column 6 in the same line as SEQ ID NO. 152460 is depicted, plastidic is mentioned, or a mitochondrial transit peptide in case in Table I, application no. 18, in column 6 in the same line as SEQ ID NO. 152460 is depicted, mitochondric is mentioned; which is operable linked, too.

[96024] In another embodiment thereof the expression cassette does not comprise an additional transit peptide in case in Table I, application no. 18, in column 6 in the same line as SEQ ID NO. 152460 is depicted, non-targeted is mentioned.

[96025] In an embodiment the present invention relates to an expresssion cassette comprising a) a promoter, preferably a promoter selected from the group consisting of Big35S, PCUbi, Super and USP, in particular Big35S; and b) the nucleic acid SEQ ID NO. 152341, or a homolog or fragment thereof, or a homolog thereof being depicted in Table I, application no. 18, column 8, in the same line as SEQ ID NO. 152341, preferably the coding region thereof, a homolog or a fragment thereof; which are operable linked.

[96026] In an embodiment thereof the expression cassette comprises in addition c) a nucleic acid molecule encoding a transit peptide, especially a plastidal transit petide in case in Table I, application no. 18, in column 6 in the same line as SEQ ID NO. 152341 is depicted, plastidic is mentioned, or a mitochondrial transit peptide in case in Table I, application no. 18, in column 6 in the same line as SEQ ID NO. 152341 is depicted, mitochondric is mentioned; which is operable linked, too.

[96027] In another embodiment thereof the expression cassette does not comprise an additional transit peptide in case in Table I, application no. 18, in column 6 in the same line as SEQ ID NO. 152341 is depicted, non-targeted is mentioned.

[96028] In an embodiment the present invention relates to an expresssion cassette comprising a) a promoter, preferably a promoter selected from the group consisting of Big35S, PCUbi, Super and USP, in particular p-Super; and b) the nucleic acid SEQ ID NO. 125348, or a homolog or fragment thereof, or a homolog thereof being depicted in Table I, application no. 18, column 8, in the same line as SEQ ID NO. 125348, preferably the coding region thereof, a homolog or a fragment thereof; which are operable linked.

[96029] In an embodiment thereof the expression cassette comprises in addition c) a nucleic acid molecule encoding a transit peptide, especially a plastidal transit petide in case in Table I, application no. 18, in column 6 in the same line as SEQ ID NO. 125348 is depicted, plastidic is mentioned, or a mitochondrial transit peptide in case in Table I, application no. 18, in column 6 in the same line as SEQ ID NO. 125348 is depicted, mitochondric is mentioned; which is operable linked, too.

[96030] In another embodiment thereof the expression cassette does not comprise an additional transit peptide in case in Table I, application no. 18, in column 6 in the same line as SEQ ID NO. 125348 is depicted, non-targeted is mentioned.

[96031] [0165.1.7.18] to [0170.1.7.18] for the disclosure of these paragraphs see [0165.1.7.7] to [0170.1.7.7] above

[96032] The invention further provides a vector, comprising a nucleic acid molecule comprising 1) a nucleic acid molecule selected from the group consisting of:
[96033] (a) a nucleic acid molecule encoding a polypeptide shown in Table II, column 5 or 8, application no. 18, preferably shown in Table II A, application no. 18, in column 5, or in Table II A, application no. 18, column 8, or in Table II B, application no. 18, column 8, or a homolog or a fragment thereof;
[96034] (b) a nucleic acid molecule shown in Table I, application no. 18, column 5 or 8, preferably shown in Table I A, application no. 18, in column 5, or in Table I A, application no. 18, column 8, or in Table I B, application no. 18, column 8, preferably the coding region thereof, or a homolog or a fragment thereof;
[96035] (c) a nucleic acid molecule, which, as a result of the degeneracy of the genetic code, can be derived from a polypeptide sequence depicted in column 5 or 8 of Table II, application no. 18, preferably shown in Table II A, application no. 18, in column 5, or in Table II A, application no. 18, column 8, or in Table II B, application no. 18, column 8;
[96036] (d) a nucleic acid molecule having at least 30% identity, preferably at least 40%, 50%, 60%, 70%, 75%, 80%, 85%, 90%, 95%, 96%, 97%, 98%, 99%, 99.5%, with the nucleic acid molecule sequence of a polynucleotide comprising the nucleic acid molecule shown in column 5 or 8 of Table I, application no. 18, preferably shown in Table I A, application no. 18, in column 5, or in Table I A, application no. 18, column 8, or in Table I B, application no. 18, column 8, preferably the coding region thereof;
[96037] (e) a nucleic acid molecule encoding a polypeptide having at least 30% identity, preferably at least 40%, 50% 60%, 70%, 75%, 80%, 85%, 90%, 95%, 96%, 97%, 98%, 99%, 99.5%, identity with the amino acid sequence of the polypeptide encoded by the nucleic acid molecule of (a), (b), (c), or (d);
[96038] (f) a nucleic acid molecule which hybridizes with a nucleic acid molecule of (a), (b), (c), (d), or (e) under stringent hybridization conditions;
[96039] (g) a nucleic acid molecule encoding a polypeptide which can be isolated with the aid of monoclonal or polyclonal antibodies made against a polypeptide encoded by one of the nucleic acid molecules of (a), (b), (c), (d), (e) or (f);
[96040] (h) a nucleic acid molecule encoding a polypeptide comprising the consensus sequence or one or more polypeptide motifs as shown in column 8 of Table IV, application no. 18;
[96041] (i) a nucleic acid molecule encoding a polypeptide having the activity represented by a protein as depicted in column 5 of Table II, application no. 18;
[96042] (j) a nucleic acid molecule comprising a polynucleotide which is obtained by amplifying a cDNA library or a genomic library using the primers in Table III, application no. 18, column 8;
[96043] and
[96044] (k) nucleic acid molecule which is obtainable by screening a suitable nucleic acid library, especially a cDNA library and/or a genomic library, under stringent hybridization conditions with a probe comprising one of the sequences of the nucleic acid molecule of (a), (b), (c), (d), (e), (f), (g), (h), (i) or (j) or with a fragment thereof having at least 15 nt, preferably 20 nt, 30 nt, 50 nt, 100 nt, 200 nt, 500 nt, 1000 nt, 1500 nt, 2000 nt or 3000 nt of the nucleic acid molecule complementary to a nucleic acid sequence characterized in (a), (b), (c), (d), (e), (f), (g), (h), (i) or (j);
[96045] or a nucleic acid molecule comprising a sequence which is complementary thereto.
   (All the references to Tables I to IV are references to the corresponding lines of Tables I to IV.)

[96046] In a preferred embodiment of said vector said nucleic acid molecule according to 1 (a), (b), (c), (d), (e), (f), (g), (h), (i), (j) or (k) encodes a polypeptide which has the activity of the respective polypeptide represented by a protein comprising a polypeptide as depicted in the respective line in column 5 of Table II, application no. 18.

[96047] In another preferred embodiment of said vector said nucleic acid molecule according to 1 (a), (b), (c), (d), (e), (f), (g), (h), (i), (j) or (k) confers a generation or an increase of the respective fine chemical in a non-human organism or a part thereof as compared to a corresponding wild-type non-human organism or part thereof.

[96048] In another preferred embodiment of said vector said nucleic acid molecule according to 1 (a), (b), (c), (d), (e), (f), (g), (h), (i), (j) or (k) encodes a polypeptide which has the activity of the respective polypeptide represented by a protein as depicted in the respective line in column 5 of Table II, application no. 18, and confers a generation or an increase of the respective fine chemical in a non-human organism or a part thereof as compared to a corresponding wild-type non-human organism or part thereof.

[96049] In another embodiment thereof said vector comprises beneath said nucleic acid molecule according to 1 (a), (b), (c), (d), (e), (f), (g), (h), (i), (j) or (k), a promoter, preferably a promoter selected from the group consisting of Big35S, PCUbi, Super and USP, which are operable linked.

[96050] In a preferred embodiment thereof said vector comprises beneath said nucleic acid molecule according to 1 (a), (b), (c), (d), (e), (f), (g), (h), (i), (j) or (k), a promoter, preferably a promoter selected from the group consisting of Big35S, PCUbi, Super and USP, which are operable linked; and said nucleic acid molecule according to 1 (a), (b), (c), (d), (e), (f), (g), (h), (i), (j) or (k) encodes a polypeptide which has the activity of the respective polypeptide represented by a protein comprising a polypeptide as depicted in the respective line in column 5 of Table II, application no. 18.

[96051] In another preferred embodiment thereof said vector comprises beneath said nucleic acid molecule according to 1 (a), (b), (c), (d), (e), (f), (g), (h), (i), (j) or (k), a promoter, preferably a promoter selected from the group consisting of Big35S, PCUbi, Super and USP, which are operable linked; and said nucleic acid molecule according to 1 (a), (b), (c), (d), (e), (f), (g), (h), (i), (j) or (k) confers a generation or an increase of the respective fine chemical in a non-human organism or a part thereof as compared to a corresponding wild-type non-human organism or part thereof.

[96052] In another preferred embodiment thereof said vector comprises beneath said nucleic acid molecule according to 1 (a), (b), (c), (d), (e), (f), (g), (h), (i), (j) or (k), a promoter, preferably a promoter selected from the group consisting of Big35S, PCUbi, Super and USP, which are operable linked; and said nucleic acid molecule according to 1 (a), (b), (c), (d), (e), (f), (g), (h), (i), (j) or (k) encodes a polypeptide which has the activity of the respective polypeptide represented by a protein as depicted in the respective line in column 5 of Table II, application no. 18, and confers a generation or an increase of the respective fine chemical in a non-human organism or a part thereof as compared to a corresponding wild-type non-human organism or part thereof.

[96053] In another embodiment thereof said vector comprises beneath said nucleic acid molecule according to 1 (a), (b), (c), (d), (e), (f), (g), (h), (i), (j) or (k), a nucleic acid molecule encoding a transit peptide, preferably encoding a plastidal transit peptide, especially in case in column 6 of Table I, application no. 18, in the same line as of the respective nucleic acid molecule according to 1) “plastidic” is depicted, or encoding a mitochondrial transit peptide, especially in case in column 6 of Table I, application no. 18, in the same line as of the respective nucleic acid molecule according to 1) “mitochondric” is depicted, which are operable linked.

[96054] In another embodiment thereof said vector does not comprise beneath said nucleic acid molecule according to 1 (a), (b), (c), (d), (e), (f), (g), (h), (i), (j) or (k), a nucleic acid molecule encoding a transit peptide in case in column 6 of Table I, application no. 18, in the same line as of the respective nucleic acid molecule according to 1) “non-targeted” is depicted.

[96055] In another embodiment thereof said vector comprises beneath said nucleic acid molecule according to 1 (a), (b), (c), (d), (e), (f), (g), (h), (i), (j) or (k), and a promoter, preferably a promoter selected from the group consisting of Big35S, PCUbi, Super and USP; a nucleic acid molecule encoding a transit peptide, preferably encoding a plastidal transit peptide, especially in case in column 6 of Table I, application no. 18, in the same line as of the respective nucleic acid molecule according to 1) “plastidic” is depicted, or encoding a mitochondrial transit peptide, especially in case in column 6 of Table I, application no. 18, in the same line as of the respective nucleic acid molecule according to 1) “mitochondric” is depicted, which are operable linked.

[96056] In another embodiment thereof said vector does not comprise beneath said nucleic acid molecule according to 1 (a), (b), (c), (d), (e), (f), (g), (h), (i), (j) or (k), and a promoter, preferably a promoter selected from the group consisting of Big35S, PCUbi, Super and USP, which are operable linked; a nucleic acid molecule encoding a transit peptide, especially in case in column 6 of Table I, application no. 18, in the same line as of the respective nucleic acid molecule according to 1) “non-targeted” is depicted.

[96057] In another embodiment thereof said vector comprises beneath said nucleic acid molecule according to 1 (a), (b), (c), (d), (e), (f), (g), (h), (i), (j) or (k), and a promoter, preferably a promoter selected from the group consisting of Big35S, PCUbi, Super and USP; a nucleic acid molecule encoding a transit peptide, preferably encoding a plastidal transit peptide, especially in case in column 6 of Table I, application no. 18, in the same line as of the respective nucleic acid molecule according to 1) “plastidic” is depicted, or encoding a mitochondrial transit peptide, especially in case in column 6 of Table I, application no. 18, in the same line as of the respective nucleic acid molecule according to 1) “mitochondric” is depicted, which are operable linked; and wherein said nucleic acid molecule according to 1 (a), (b), (c), (d), (e), (f), (g), (h), (i), (j) or (k) encodes a polypeptide which has the activity of the respective polypeptide represented by a protein comprising a polypeptide as depicted in column 5 of Table II, application no. 18 (in the same line).

[96058] In another embodiment thereof said vector does not comprise beneath said nucleic acid molecule according to 1 (a), (b), (c), (d), (e), (f), (g), (h), (i), (j) or (k), and a promoter, preferably a promoter selected from the group consisting of Big35S, PCUbi, Super and USP, which are operatively linked; a nucleic acid molecule encoding a transit peptide, especially in case in column 6 of Table I, application no. 18, in the same line as of the respective nucleic acid molecule according to 1) “non-targeted” is depicted; and wherein said nucleic acid molecule according to 1 (a), (b), (c), (d), (e), (f), (g), (h), (i), (j) or (k) encodes a polypeptide which has the activity of the respective polypeptide represented by a protein comprising a polypeptide as depicted in column 5 of Table II, application no. 18.

[96059] In another embodiment thereof said vector comprises beneath said nucleic acid molecule according to 1 (a), (b), (c), (d), (e), (f), (g), (h), (i), (j) or (k), and a promoter, preferably a promoter selected from the group consisting of Big35S, PCUbi, Super and USP; a nucleic acid molecule encoding a transit peptide, preferably encoding a plastidal transit peptide, especially in case in column 6 of Table I, application no. 18, in the same line as of the respective nucleic acid molecule according to 1) “plastidic” is depicted, or encoding a mitochondrial transit peptide, especially in case in column 6 of Table I, application no. 18, in the same line as of the respective nucleic acid molecule according to 1) “mitochondric” is depicted, which are operable linked; and wherein said nucleic acid molecule according to 1 (a), (b), (c), (d), (e), (f), (g), (h), (i), (j) or (k) confers a generation or an increase of the respective fine chemical in a non-human organism or a part thereof as compared to a corresponding wild-type non-human organism or part thereof.

[96060] In another embodiment thereof said vector does not comprise beneath said nucleic acid molecule according to 1 (a), (b), (c), (d), (e), (f), (g), (h), (i), (j) or (k), and a promoter, preferably a promoter selected from the group consisting of Big35S, PCUbi, Super and USP, which are operatively linked; a nucleic acid molecule encoding a transit peptide, especially in case in column 6 of Table I, application no. 18, in the same line as of the respective nucleic acid molecule according to 1) “non-targeted” is depicted; and wherein said nucleic acid molecule according to 1 (a), (b), (c), (d), (e), (f), (g), (h), (i), (j) or (k) confers a generation or an increase of the respective fine chemical in a non-human organism or a part thereof as compared to a corresponding wild-type non-human organism or part thereof.

[96061] In another embodiment thereof said vector comprises beneath said nucleic acid molecule according to 1 (a), (b), (c), (d), (e), (f), (g), (h), (i), (j) or (k), and a promoter, preferably a promoter selected from the group consisting of Big35S, PCUbi, Super and USP; a nucleic acid molecule encoding a transit peptide, preferably encoding a plastidal transit peptide, especially in case in column 6 of Table I, application no. 18, in the same line as of the respective nucleic acid molecule according to 1) “plastidic” is depicted, or encoding a mitochondrial transit peptide, especially in case in column 6 of Table I, application no. 18, in the same line as of the respective nucleic acid molecule according to 1) “mitochondric” is depicted, which are operable linked; and wherein said nucleic acid molecule according to 1 (a), (b), (c), (d), (e), (f), (g), (h), (i), (j) or (k) encodes a polypeptide which has the activity of the respective polypeptide represented by a protein as depicted in column 5 of Table II application no. 18 and confers a generation or an increase of the respective fine chemical in a non-human organism or a part thereof as compared to a corresponding wild-type non-human organism or part thereof.

[96062] In another embodiment thereof said vector does not comprise beneath said nucleic acid molecule according to 1 (a), (b), (c), (d), (e), (f), (g), (h), (i), (j) or (k), and a promoter, preferably a promoter selected from the group consisting of Big35S, PCUbi, Super and USP, which are operatively linked; a nucleic acid molecule encoding a transit peptide, especially in case in column 6 of Table I, application no. 18, in the same line as of the respective nucleic acid molecule according to 1) “non-targeted” is depicted; and wherein said nucleic acid molecule according to 1 (a), (b), (c), (d), (e), (f), (g), (h), (i), (j) or (k) encodes a polypeptide which has the activity of the respective polypeptide represented by a protein as depicted in column 5 of Table II application no. 18 (in the same line) and confers a generation or an increase of the respective fine chemical in a non-human organism or a part thereof as compared to a corresponding wild-type non-human organism or part thereof.

[96063] In a preferred embodiment of said vector said nucleic acid molecule according to 1 (a), (b), (c), (d), (e), (f), (g), (h), (i), (j) or (k), said promoter and optionally said nucleic acid molecule encoding a transit peptide are encompassed in an expression cassette. Accordingly in an embodiment the invention provides a vector comprising an expression cassette comprising said nucleic acid molecule according to 1 (a), (b), (c), (d), (e), (f), (g), (h), (i), (j) or (k), said promoter and optionally said a nucleic acid molecule encoding a transit peptide, operable linked. Said expression cassette may encompass a terminator, too.

[96064] The invention further provides a vector comprising a nucleic acid molecule comprising 1) a nucleic acid molecule selected from the group consisting of:
[96065] (a) a nucleic acid molecule encoding a polypeptide shown in Table II, column 5 or 8, application no. 18, preferably shown in Table II A, application no. 18, in column 5, or in Table II A, application no. 18, column 8, or in Table II B, application no. 18, column 8, or a homolog or a fragment thereof;
[96066] (b) a nucleic acid molecule shown in Table I, application no. 18, column 5 or 8, preferably shown in Table I A, application no. 18, in column 5, or in Table I A, application no. 18, column 8, or in Table I B, application no. 18, column 8, preferably the coding region thereof, or a homolog or a fragment thereof;
[96067] (c) a nucleic acid molecule, which, as a result of the degeneracy of the genetic code, can be derived from a polypeptide sequence depicted in column 5 or 8 of Table II, application no. 18, preferably shown in Table II A, application no. 18, in column 5, or in Table II A, application no. 18, column 8, or in Table II B, application no. 18, column 8;
[96068] (d) a nucleic acid molecule having at least 30% identity, preferably at least 40%, 50%, 60%, 70%, 75%, 80%, 85%, 90%, 95%, 96%, 97%, 98%, 99%, 99.5%, with the nucleic acid molecule sequence of a polynucleotide comprising the nucleic acid molecule shown in column 5 or 8 of Table I, application no. 18, preferably shown in Table I A, application no. 18, in column 5, or in Table I A, application no. 18, column 8, or in Table I B, application no. 18, column 8, preferably the coding region thereof;
[96069] (e) a nucleic acid molecule encoding a polypeptide having at least 30% identity, preferably at least 40%, 50% 60%, 70%, 75%, 80%, 85%, 90%, 95%, 96%, 97%, 98%, 99%, 99.5%, identity with the amino acid sequence of the polypeptide encoded by the nucleic acid molecule of (a), (b), (c), or (d);
[96070] (f) a nucleic acid molecule which hybridizes with a nucleic acid molecule of (a), (b), (c), (d), or (e) under stringent hybridization conditions;
[96071] (g) a nucleic acid molecule encoding a polypeptide which can be isolated with the aid of monoclonal or polyclonal antibodies made against a polypeptide encoded by one of the nucleic acid molecules of (a), (b), (c), (d), (e) or (f);
[96072] (h) a nucleic acid molecule encoding a polypeptide comprising the consensus sequence or one or more polypeptide motifs as shown in column 8 of Table IV, application no. 18;
[96073] (i) a nucleic acid molecule encoding a polypeptide having the activity represented by a protein as depicted in column 5 of Table II, application no. 18;
[96074] (j) a nucleic acid molecule comprising a polynucleotide which is obtained by amplifying a cDNA library or a genomic library using the primers in Table III, application no. 18, column 8;
[96075] and
[96076] (k) nucleic acid molecule which is obtainable by screening a suitable nucleic acid library, especially a cDNA library and/or a genomic library, under stringent hybridization conditions with a probe comprising one of the sequences of the nucleic acid molecule of (a), (b), (c), (d), (e), (f), (g), (h), (i) or (j) or with a fragment thereof having at least 15 nt, preferably 20 nt, 30 nt, 50 nt, 100 nt, 200 nt, 500 nt, 1000 nt, 1500 nt, 2000 nt or 3000 nt of the nucleic acid molecule complementary to a nucleic acid sequence characterized in (a), (b), (c), (d), (e), (f), (g), (h), (i) or (j);
[96077] or a nucleic acid molecule comprising a sequence which is complementary thereto;
   whereby, preferably, the nucleic acid molecule according to 1 (a), (b), (c), (d), (e), (f), (g), (h), (i), (j) or (k) distinguishes over the sequence depicted in Table I A and/or I B, application no. 18, column 5 or 8, or the coding region thereof, by one or more nucleotides (especially but not exceeding 5%, preferably 4%, 3%, 2%, 1%, 0.5%, 0.2% or 0.1%). In an embodiment, the nucleic acid molecule of the invention does not consist of the sequence shown in Table I A and/or I B, application no. 18, column 5 or 8, or the coding region thereof, respectively. In another embodiment, the nucleic acid molecule of the present invention, preferably the coding region thereof, is 30%, 40%, 50%, 60%, 70%, 80%, 90%, 95% identical but less than 100%, 99.999%, 99.99%, 99.9%, 99%, 98%, 97%, 96% or 95% identical to the sequence shown in Table I A and/or I B, application no. 18, column 5 or 8, or the coding region thereof, respectively. In a further embodiment the nucleic acid molecule does not encode the polypeptide sequence shown in Table II A and/or II B, application no. 18, column 5 or 8 but homologs thereof. Accordingly, in one embodiment, the nucleic acid molecule of the present invention encodes in one embodiment a polypeptide which differs at least in one or more amino acids (especially but not exceeding 5%, preferably 4%, 3%, 2%, 1%, 0.5%, 0.2% or 0.1%) from the polypeptide shown in Table II, application no. 18, column 5 or 8 and does not encode a protein of the sequence shown in Table II A and/or II B, application no. 18, column 5 or 8. Accordingly, in one embodiment, the protein encoded by a sequence of a nucleic acid according to (a), (b), (c), (d), (e), (f), (g), (h), (i), (j) or (k) does not consist of the sequence shown in Table I A and/or I B, application no. 18, column 5 and 8, or the coding region thereof. In a further embodiment, the protein of the present invention is at least 30%,40%, 50%, 60%, 70%, 80%, 90%, 95% identical to protein sequence depicted in Table II A and/or II B, application no. 18, column 5 or 8 but less than 100%, preferably less than 99.999%, 99.99% or 99.9%, more preferably less than 99%, 985, 97%, 96% or 95% identical to the sequence shown in Table II A and/or II B, application no. 18, column 5 or 8.
   (All the references to Tables I to IV are references to the corresponding lines of Tables I to IV.)

[96078] In a preferred embodiment of said vector said nucleic acid molecule according to 1 (a), (b), (c), (d), (e), (f), (g), (h), (i), (j) or (k) encodes a polypeptide which has the activity of the respective polypeptide represented by a protein comprising a polypeptide as depicted in the respective line in column 5 of Table II, application no. 18.

[96079] In another preferred embodiment of said vector said nucleic acid molecule according to 1 (a), (b), (c), (d), (e), (f), (g), (h), (i), (j) or (k) confers a generation or an increase of the respective fine chemical in a non-human organism or a part thereof as compared to a corresponding wild-type non-human organism or part thereof.

[96080] In another preferred embodiment of said vector said nucleic acid molecule according to 1 (a), (b), (c), (d), (e), (f), (g), (h), (i), (j) or (k) encodes a polypeptide which has the activity of the respective polypeptide represented by a protein as depicted in the respective line in column 5 of Table II, application no. 18, and confers a generation or an increase of the respective fine chemical in a non-human organism or a part thereof as compared to a corresponding wild-type non-human organism or part thereof.

[96081] In another embodiment thereof said vector comprises beneath said nucleic acid molecule according to 1 (a), (b), (c), (d), (e), (f), (g), (h), (i), (j) or (k), a promoter, preferably a promoter selected from the group consisting of Big35S, PCUbi, Super and USP, which are operable linked.

[96082] In a preferred embodiment thereof said vector comprises beneath said nucleic acid molecule according to 1 (a), (b), (c), (d), (e), (f), (g), (h), (i), (j) or (k), a promoter, preferably a promoter selected from the group consisting of Big35S, PCUbi, Super and USP, which are operable linked; and said nucleic acid molecule according to 1 (a), (b), (c), (d), (e), (f), (g), (h), (i), (j) or (k) encodes a polypeptide which has the activity of the respective polypeptide represented by a protein comprising a polypeptide as depicted in the respective line in column 5 of Table II, application no. 18.

[96083] In another preferred embodiment thereof said vector comprises beneath said nucleic acid molecule according to 1 (a), (b), (c), (d), (e), (f), (g), (h), (i), (j) or (k), a promoter, preferably a promoter selected from the group consisting of Big35S, PCUbi, Super and USP, which are operable linked; and said nucleic acid molecule according to 1 (a), (b), (c), (d), (e), (f), (g), (h), (i), (j) or (k) confers a generation or an increase of the respective fine chemical in a non-human organism or a part thereof as compared to a corresponding wild-type non-human organism or part thereof.

[96084] In another preferred embodiment thereof said vector comprises beneath said nucleic acid molecule according to 1 (a), (b), (c), (d), (e), (f), (g), (h), (i), (j) or (k), a promoter, preferably a promoter selected from the group consisting of Big35S, PCUbi, Super and USP, which are operable linked; and said nucleic acid molecule according to 1 (a), (b), (c), (d), (e), (f), (g), (h), (i), (j) or (k) encodes a polypeptide which has the activity of the respective polypeptide represented by a protein as depicted in the respective line in column 5 of Table II, application no. 18, and confers a generation or an increase of the respective fine chemical in a non-human organism or a part thereof as compared to a corresponding wild-type non-human organism or part thereof.

[96085] In another embodiment thereof said vector comprises beneath said nucleic acid molecule according to 1 (a), (b), (c), (d), (e), (f), (g), (h), (i), (j) or (k), a nucleic acid molecule encoding a transit peptide, preferably encoding a plastidal transit peptide, especially in case in column 6 of Table I, application no. 18, in the same line as of the respective nucleic acid molecule according to 1) “plastidic” is depicted, or encoding a mitochondrial transit peptide, especially in case in column 6 of Table I, application no. 18, in the same line as of the respective nucleic acid molecule according to 1) “mitochondric” is depicted, which are operable linked.

[96086] In another embodiment thereof said vector does not comprise beneath said nucleic acid molecule according to 1 (a), (b), (c), (d), (e), (f), (g), (h), (i), (j) or (k), a nucleic acid molecule encoding a transit peptide in case in column 6 of Table I, application no. 18, in the same line as of the respective nucleic acid molecule according to 1) “non-targeted” is depicted.

[96087] In another embodiment thereof said vector comprises beneath said nucleic acid molecule according to 1 (a), (b), (c), (d), (e), (f), (g), (h), (i), (j) or (k), and a promoter, preferably a promoter selected from the group consisting of Big35S, PCUbi, Super and USP; a nucleic acid molecule encoding a transit peptide, preferably encoding a plastidal transit peptide, especially in case in column 6 of Table I, application no. 18, in the same line as of the respective nucleic acid molecule according to 1) “plastidic” is depicted, or encoding a mitochondrial transit peptide, especially in case in column 6 of Table I, application no. 18, in the same line as of the respective nucleic acid molecule according to 1) “mitochondric” is depicted, which are operable linked.

[96088] In another embodiment thereof said vector does not comprise beneath said nucleic acid molecule according to 1 (a), (b), (c), (d), (e), (f), (g), (h), (i), (j) or (k), and a promoter, preferably a promoter selected from the group consisting of Big35S, PCUbi, Super and USP, which are operatively linked; a nucleic acid molecule encoding a transit peptide, especially in case in column 6 of Table I, application no. 18, in the same line as of the respective nucleic acid molecule according to 1) “non-targeted” is depicted.

[96089] In another embodiment thereof said vector comprises beneath said nucleic acid molecule according to 1 (a), (b), (c), (d), (e), (f), (g), (h), (i), (j) or (k), and a promoter, preferably a promoter selected from the group consisting of Big35S, PCUbi, Super and USP; a nucleic acid molecule encoding a transit peptide, preferably encoding a plastidal transit peptide, especially in case in column 6 of Table I, application no. 18, in the same line as of the respective nucleic acid molecule according to 1) “plastidic” is depicted, or encoding a mitochondrial transit peptide, especially in case in column 6 of Table I, application no. 18, in the same line as of the respective nucleic acid molecule according to 1) “mitochondric” is depicted, which are operable linked; and wherein said nucleic acid molecule according to 1 (a), (b), (c), (d), (e), (f), (g), (h), (i), (j) or (k) encodes a polypeptide which has the activity of the respective polypeptide represented by a protein comprising a polypeptide as depicted in column 5 of Table II, application no. 18.

[96090] In another embodiment thereof said vector does not comprise beneath said nucleic acid molecule according to 1 (a), (b), (c), (d), (e), (f), (g), (h), (i), (j) or (k), and a promoter, preferably a promoter selected from the group consisting of Big35S, PCUbi, Super and USP, which are operatively linked; a nucleic acid molecule encoding a transit peptide, especially in case in column 6 of Table I, application no. 18, in the same line as of the respective nucleic acid molecule according to 1) “non-targeted” is depicted; and wherein said nucleic acid molecule according to 1 (a), (b), (c), (d), (e), (f), (g), (h), (i), (j) or (k) encodes a polypeptide which has the activity of the respective polypeptide represented by a protein comprising a polypeptide as depicted in column 5 of Table II, application no. 18.

[96091] In another embodiment thereof said vector comprises beneath said nucleic acid molecule according to 1 (a), (b), (c), (d), (e), (f), (g), (h), (i), (j) or (k), and a promoter, preferably a promoter selected from the group consisting of Big35S, PCUbi, Super and USP; a nucleic acid molecule encoding a transit peptide, preferably encoding a plastidal transit peptide, especially in case in column 6 of Table I, application no. 18, in the same line as of the respective nucleic acid molecule according to 1) “plastidic” is depicted, or encoding a mitochondrial transit peptide, especially in case in column 6 of Table I, application no. 18, in the same line as of the respective nucleic acid molecule according to 1) “mitochondric” is depicted, which are operable linked; and wherein said nucleic acid molecule according to 1 (a), (b), (c), (d), (e), (f), (g), (h), (i), (j) or (k) confers a generation or an increase of the respective fine chemical in a non-human organism or a part thereof as compared to a corresponding wild-type non-human organism or part thereof.

[96092] In another embodiment thereof said vector does not comprise beneath said nucleic acid molecule according to 1 (a), (b), (c), (d), (e), (f), (g), (h), (i), (j) or (k), and a promoter, preferably a promoter selected from the group consisting of Big35S, PCUbi, Super and USP, which are operatively linked; a nucleic acid molecule encoding a transit peptide, especially in case in column 6 of Table I, application no. 18, in the same line as of the respective nucleic acid molecule according to 1) “non-targeted” is depicted; and wherein said nucleic acid molecule according to 1 (a), (b), (c), (d), (e), (f), (g), (h), (i), (j) or (k) confers a generation or an increase of the respective fine chemical in a non-human organism or a part thereof as compared to a corresponding wild-type non-human organism or part thereof.

[96093] In another embodiment thereof said vector comprises beneath said nucleic acid molecule according to 1 (a), (b), (c), (d), (e), (f), (g), (h), (i), (j) or (k), and a promoter, preferably a promoter selected from the group consisting of Big35S, PCUbi, Super and USP; a nucleic acid molecule encoding a transit peptide, preferably encoding a plastidal transit peptide, especially in case in column 6 of Table I, application no. 18, in the same line as of the respective nucleic acid molecule according to 1) “plastidic” is depicted, or encoding a mitochondrial transit peptide, especially in case in column 6 of Table I, application no. 18, in the same line as of the respective nucleic acid molecule according to 1) “mitochondric” is depicted, which are operable linked; and wherein said nucleic acid molecule according to 1 (a), (b), (c), (d), (e), (f), (g), (h), (i), (j) or (k) encodes a polypeptide which has the activity of the respective polypeptide represented by a protein as depicted in column 5 of Table II application no. 18 and confers a generation or an increase of the respective fine chemical in a non-human organism or a part thereof as compared to a corresponding wild-type non-human organism or part thereof.

[96094] In another embodiment thereof said vector does not comprise beneath said nucleic acid molecule according to 1 (a), (b), (c), (d), (e), (f), (g), (h), (i), (j) or (k), and a promoter, preferably a promoter selected from the group consisting of Big35S, PCUbi, Super and USP, which are operatively linked; a nucleic acid molecule encoding a transit peptide, especially in case in column 6 of Table I, application no. 18, in the same line as of the respective nucleic acid molecule according to 1) “non-targeted” is depicted; and wherein said nucleic acid molecule according to 1 (a), (b), (c), (d), (e), (f), (g), (h), (i), (j) or (k) encodes a polypeptide which has the activity of the respective polypeptide represented by a protein as depicted in column 5 of Table II application no. 18 and confers a generation or an increase of the respective fine chemical in a non-human organism or a part thereof as compared to a corresponding wild-type non-human organism or part thereof.

[96095] [0181.1.7.18] to [0209.1.7.18] for the disclosure of these paragraphs see [0181.1.7.7] to [0209.1.7.7] above

[96096] The genes of the invention, coding in one embodiment for an activity selected from the group consisting of 2,3-dihydroxy-2,3-dihydrophenylpropionatedehydrogenase, ABC metal ion transporter substrate-binding protein, acetyl-coenzyme A synthetase, acetyltransferase, acid shock protein, acyl transferase, agmatinase, aminotransferase, ATP-binding component of a transport system, b1522-protein, b3083-protein, b3644-protein, b3812-protein, b4029-protein, binding-protein-dependent transport systems inner membrane component, calcium-dependent protein kinase, cardiolipin synthase, chaperone protein CIpB, cyclin D, cystathionine gamma-synthase, eukaryotic translation initiation factor 5, geranylgeranyl pyrophosphate synthase, gibberellin 20-oxidase, glutamate-ammonia-ligase, glutaredoxin, glycosyl transferase, heat shock transcription factor, hydrolase, inositol-3-phosphate synthase, isochorismate synthase, leucyl/phenylalanyl-tRNA-protein transferase, major facilitator superfamily transporter protein, malate dehydrogenase, mevalonate kinase, mitochondrial inner membrane protease subunit, monodehydroascorbate reductase, multidrug resistance protein, NADH dehydrogenase subunit N, O-antigen chain length determinant, oxidoreductase, peroxisome assembly protein, potassium transport protein, protein kinase, purine nucleoside phosphorylase, rubredoxin, Sec-independent protein translocase subunit, serine protease, sll0064-protein, slr0383-protein, sodium/proton antiporter, thioredoxin family protein, threonine synthase, tryptophan synthase alpha chain, TTC0768-protein, TTC1386-protein, uroporphyrin-III C-methyltransferase, yer152c-protein, ylr065c-protein, yml093w-protein, and zinc finger protein are also called “FCRP genes”.

[96097] [0211.1.7.18] to [0225.1.7.18] for the disclosure of these paragraphs see [0211.1.7.7] to [0225.1.7.7] above

[96098] In addition to the sequence mentioned in Table I, application no. 18, column 5 or 8, preferably the coding region thereof, or its homologs or fragments, it may be advantageous additionally to express and/or mutate further genes in the non-human organisms. Especially advantageously, additionally at least one further gene of the biosynthetic pathway of the fine chemical is expressed in the non-human organisms such as plants or microorganisms. It is also possible that the regulation of the natural genes has been modified advantageously so that the gene and/or its gene product is no longer subject to the regulatory mechanisms which exist in the non-human organisms. This leads to an increased synthesis of the respective VLCFA since, for example, feedback regulations no longer exist to the same extent or not at all. In addition it might be advantageously to combine the nucleic acids sequences of the invention containing the sequences shown in the respective line in Table I, application no. 18, column 5 or 8, preferably the coding region thereof, or homologs or fragments thereof, with genes which generally support or enhance the growth or yield of the target non-human organisms, for example genes which lead to faster growth rate of non human organism like microorganisms or plants or genes which produce stress-, pathogen-, or herbicide-resistant plants.

[96099] In a further embodiment of the process of the invention, non-human organisms are grown, in which there is in addition to the expression of the nucleic acid molecule according to the invention simultaneous expression of at least one nucleic acid molecule or one of the genes which code for proteins involved in the fatty acid and/or waxes metabolism, in particular in VLCFA synthesis, especially genes selected from the group coding for polypeptides of the fatty acid pathway, such as acetyl-CoA or malonyl-CoA or a polypeptide having a very long chain fatty acid acyl (VLCFA) CoA synthase activity and/or genes selected from the group coding for Ketoacetyl-synthase (=VLCFA-synthase), e.g. FAE1 (AT4G34520) from A. thaliana, beta-Ketoacyl-CoA-reductase, beta-Hydroxyacyl-CoA-dehydratase, 2-trans-Enoyl-CoA-reductase and/or 3-ketoacyl-CoA synthases involved in VLCFA-biosynthesis and/or having the activity of a annotated gene selected from the group comprising AT1G04220 (KCS2), AT1G07720 (KCS3), AT1G19440 (KCS4), AT1G71160 (KCS7), AT2G15090 (KCS8), AT2G16280 (KCS9), AT2G26640 (KCSll), AT2G28630 (KCS12), AT2G46720 (KSC13), AT3G10280 (KCS14), AT3G52160 (KCS15), AT4G34250 (KCS16), AT4G34510 (KCS17), AT4G34520 (KCS18), AT5G04530 (KCS19), AT5G43760 (KCS20) and AT5G49070 (KCS21).

[96100] [0228.1.7.18] to [0239.1.7.18] for the disclosure of these paragraphs see [0228.1.7.7] to [0239.1.7.7] above

[96101] In an embodiment of the present invention the nucleic acid construct of the present invention comprises a nucleic acid molecule as depicted in the respective line in Table I, application no. 18, column 5 or 8, preferably the coding region thereof, a fragment or a homolog thereof, and a plant promoter, such as the Big 35S promoter, the DC3 promoter, the PC Ubi promoter, the LegB4-promoter, the Super promoter, the USP promoter or the like. In another embodiment the nucleic acid construct of the present invention comprises a nucleic acid molecule as depicted in the respective line in Table I, application no. 18, column 5 or 8, preferably the coding region thereof, a fragment or a homolog thereof, and a plant promoter such as, for example, the USP, the LegB4-, the DC3 promoter or the ubiquitin promoter from parsley or other herein mentioned promoters. In a further embodiment the nucleic acid construct of the present invention comprises a nucleic acid molecule as depicted in the respective line in Table I, application no. 18, column 5 or 8, preferably the coding region thereof, a fragment or a homolog thereof, and a plant promoter, such as the Big 35S promoter, the PC Ubi promoter, the Super promoter, the USP promoter or the like. In addition different terminators may advantageously be used in these nucleic acid constructs; examples for transcriptional termination are polyadenylation signals.

[96102] [0241.1.7.18] to [0245.1.7.18] for the disclosure of these paragraphs see [0241.1.7.7] to [0245.1.7.7] above

[96103] Other preferred sequences for use in operable linkage in gene expression constructs are targeting sequences, which are required for targeting the gene product into specific cell compartments (for a review, see Kermode, Crit. Rev. Plant Sci. 15 (4), 285 (1996) and references cited therein), for example into the vacuole, the nucleus, all types of plastids, such as amyloplasts, chloroplasts, chromoplasts, the extracellular space, the mitochondria, the endoplasmic reticulum, elaioplasts, peroxisomes, glycosomes, and other compartments of cells or extracellular; preferred are sequences, which are involved in targeting to plastids as mentioned above. Sequences, which must be mentioned in this context are, in particular, the signalpeptide-or transit-peptide-encoding sequences which are known per se. For example, plastid-transit-peptide-encoding sequences enable the targeting of the expression product into the plastids of a plant cell. Targeting sequences are also known for eukaryotic and to a lower extent for prokaryotic organisms and can advantageously be operable linked with the nucleic acid molecule of the present invention as shown in Table I, application no. 18, columns 5 and 8, preferably the coding region thereof, or homologs or fragments thereof, and described herein to achieve an expression in one of said compartments or extracellular.

[96104] [0247.1.7.18] to [0249.1.7.18] for the disclosure of these paragraphs see [0247.1.7.7] to [0249.1.7.7] above

[96105] Preferred promoters are in particular those which bring about gene expression in tissues and organs, such as leaves, roots, seeds, pollen or xylem. Examples of tissue preferred or organ preferred promoters include, but are not limited to fruit-preferred, ovule-preferred, male tissue-preferred, seed-preferred, pollen-preferred integument-preferred, tuber-preferred, stalk-preferred, pericarp-preferred, leaf-preferred, stigma-preferred, pollen-preferred, anther-preferred, petal-preferred, sepal-preferred, pedicel-preferred, silique-preferred, stemp-referred, root-preferred promoters, and the like. Especially those promoters are preferred which bring about gene expression in tissues and organs in which the biosynthesis of waxes and/or VLCFAs takes place, like in seed cells, such as endosperm cells and cells of the developing embryo. Seed promoters are preferentially expressed during seed development and/or germination. For example, seed preferred promoters can be embryo-preferred, endosperm preferred and seed coat-preferred (see Thompson et al., BioEssays 10, 108 (1989)). Examples of seed preferred promoters include, but are not limited to, cellulose synthase (celA), Cim1, gamma-zein, globulin-1, maize 19 kD zein (cZ19B1), and the like. Other suitable promoters are the oilseed rape napin gene promoter (U.S. Pat. No. 5,608,152), the Vicia faba USP promoter (Baeumlein et al., Mol Gen Genet, 225 (3), 459 (1991)), the Arabidopsis oleosin promoter (WO 98/45461), the Phaseolus vulgaris phaseolin promoter (U.S. Pat. No. 5,504,200), the Brassica Bce4 promoter (WO 91/13980), the bean arcs promoter, the carrot DcG3 promoter, or the Legumin B4 promoter (LeB4) (Baeumlein et al., Plant Journal, 2 (2), 233 (1992)), and promoters which bring about the seed-specific expression in monocotyledonous plants such as maize, barley, wheat, rye, rice and the like. Advantageous seed-specific promoters are the sucrose binding protein promoter (WO 00/26388), the phaseolin promoter and the napin promoter. Suitable promoters which must be considered are the barley Ipt2 or Ipt1 gene promoter (WO 95/15389 and WO 95/23230), and the promoters described in WO 99/16890 (promoters from the barley hordein gene, the rice glutelin gene, the rice oryzin gene, the rice prolamin gene, the wheat gliadin gene, the wheat glutelin gene, the maize zein gene, the oat glutelin gene, the sorghum kasirin gene and the rye secalin gene). Further suitable promoters are Amy32b, Amy 6-6 and Aleurain (U.S. Pat. No. 5,677,474), Bce4 (oilseed rape) (U.S. Pat. No. 5,530,149), glycinin (soya) (EP 571 741], phosphoenolpyruvate carboxylase (soya) (JP 06/62870), ADR12-2 (soya) (WO 98/08962), isocitrate lyase (oilseed rape) (U.S. Pat. No. 5,689,040]) or α-amylase (barley) (EP 781 8499. Other promoters which are available for the expression of genes in plants are leaf-specific promoters such as those described in DE-A 19 644 478 or light-regulated promoters such as, for example, the pea petE promoter.

[96106] [0251.1.7.18] to [0266.1.7.18] for the disclosure of these paragraphs see [0251.1.7.7] to [0266.1.7.7] above

[96107] An embodiment of the invention relates to a vector where the nucleic acid molecule according to the invention is linked operably to regulatory sequences which permit the expression in a prokaryotic or eukaryotic host. A further embodiment of the invention relates to a vector in which a nucleic acid sequence encoding one of the polypeptides shown in the respective line in Table II, application no. 18, columns 5 or 8, or homologs or fragments thereof, is functionally linked to a targeting sequence such as a plastidial or mitochondrial targeting sequence. A further embodiment of the invention relates to a vector in which a nucleic acid sequence encoding one of the polypeptides shown in the respective line in Table II, application no. 18, columns 5 or 8, or homologs or fragments thereof, is functionally linked to (a) regulatory sequence which permit the expression in an organelle, such as plastids or mitochondria, preferably plastids.

[96108] A further embodiment of the invention relates to a vector which comprises a nucleic acid sequence encoding one of the polypeptides shown in the respective line in Table II, application no. 18, columns 5 or 8, or homologs or fragments thereof, but no additional targeting sequence.

[96109] [0268.1.7.18] to [0273.1.7.18] for the disclosure of these paragraphs see [0268.1.7.7] to [0273.1.7.7] above

[96110] A further object of the invention relates to the use of a nucleic acid construct, e.g. an expression cassette, comprising one or more nucleic acid molecules encoding one or more polypeptides as depicted in the respective line(s) in Table II, application no. 18, columns 5 or 8, or homologs or fragments thereof, or comprising one or more nucleic acid molecules as depicted in the respective line(s) in Table I, application no. 18, columns 5 or 8, preferably the coding region thereof, or homologs or fragments thereof, or comprising a nucleic acid molecule hybridizing therewith for the transformation of a microorganism or a plant cell, plant tissues or a part of a plant

[96111] In doing so, depending on the choice of promoter, the nucleic acid molecules shown in the respective line in Table I, application no. 18, column 5 or 8, preferably the coding region thereof, or homologs or fragments thereof, or the nucleic acid molecules encoding a polypeptide as depicted in the respective line in Table II, application no. 18, column 5 or 8, or homologs or fragments thereof, can be expressed in the whole plant or specifically e.g. in the leaves, in the seeds, the nodules, in roots, in the stem or other parts of the plant. Those transgenic plants overproducing sequences, e.g. as depicted in the respective line in Table I, application no. 18, column 5 or 8, preferably the coding region thereof, or homologs or fragments thereof, the plant cell, plant tissues, plants, the reproductive material thereof, or parts thereof are a further object of the present invention.

[96112] Within the framework of the present invention, the production of the cerotic acid, heneicosanoic acid, lignoceric acid, melissic acid or montanic acid is due to the generation or over-expression of one or more polypeptides as depicted in the respective line(s) in Table II, application no. 18, column 5 or 8, or homologs or fragments thereof, or encoded by the corresponding nucleic acid molecules as depicted in the respective line(s) in Table I, application no. 18, column 5 or 8, preferably the coding region thereof, or homologs or fragments thereof, in the non-human organism according to the invention, advantageously in the transgenic microorganism or plant according to the invention, at least for the duration of at least one plant generation.

[96113] A constitutive expression of the polypeptide as depicted in the respective line in Table II, application no. 18, column 5 or 8, or homologs or fragments thereof, or encoded by the respective nucleic acid molecule as depicted in the respective line in Table I, application no. 18, column 5 or 8, preferably the coding region thereof, or homologs or fragments thereof, may be advantageous. On the other hand, an inducible expression may also appear desirable. Expression of the polypeptide sequences of the invention can be either directed to the cytosol or to the organelles, such as plastids or mitochondria, preferably the plastids of the host cells, preferably the plant cells, or non-targeted.

[96114] for the disclosure of this paragraph see [0278.1.7.7] above

[96115] In a further embodiment the invention relates to a transgenic non-human organisms such as transgenic microorganism or transgenic plant comprising a nucleic acid molecule comprising
[96116] [1) a nucleic acid molecule selected from the group consisting of
   [96117] (a) a nucleic acid molecule encoding a polypeptide shown in Table II, application no. 18, column 5 or 8, preferably shown in Table II A, application no. 18, column 5, or in Table II A, application no. 18, column 8, or in Table II B, application no. 18, column 8, or a homolog or a fragment thereof;
   [96118] (b) a nucleic acid molecule shown in Table I, application no. 18, column 5 or 8, preferably shown in Table I A, application no. 18, column 5, or in Table I A, application no. 18, column 8, or in Table I B, application no. 18, column 8, preferably the coding region thereof, or a homolog or a fragment thereof;
   [96119] (c) a nucleic acid molecule, which, as a result of the degeneracy of the genetic code, can be derived from a polypeptide sequence depicted in column 5 or 8 of Table II, application no. 18, preferably shown in Table II A, application no. 18, column 5, or in Table II A, application no. 18, column 8, or in Table II B, application no. 18, column 8;
   [96120] (d) a nucleic acid molecule having at least 30% identity, preferably at least 40%, 50%, 60%, 70%, 75%, 80%, 85%, 90%, 95%, 96%, 97%, 98%, 99%, 99.5%, with the nucleic acid molecule sequence of a polynucleotide comprising the nucleic acid molecule shown in column 5 or 8 of Table I, application no. 18, preferably shown in Table I A, application no. 18, column 5, or in Table I A, application no. 18, column 8, or in Table I B, application no. 18, column 8, preferably the coding region thereof;
   [96121] (e) a nucleic acid molecule encoding a polypeptide having at least 30% identity, preferably at least 40%, 50% 60%, 70%, 75%, 80%, 85%, 90%, 95%, 96%, 97%, 98%, 99%, 99.5%, identity with the amino acid sequence of the polypeptide encoded by the nucleic acid molecule of (a), (b), (c) or (d);
   [96122] (f) a nucleic acid molecule which hybridizes with a nucleic acid molecule of (a), (b), (c), (d) or (e) under stringent hybridization conditions;
   [96123] (g) a nucleic acid molecule encoding a polypeptide which can be isolated with the aid of monoclonal or polyclonal antibodies made against a polypeptide encoded by one of the nucleic acid molecules of (a), (b), (c), (d), (e) or (f);
   [96124] (h) a nucleic acid molecule encoding a polypeptide comprising the consensus sequence or one or more polypeptide motifs as shown in column 8 of Table IV, application no. 18;
   [96125] (i) a nucleic acid molecule encoding a polypeptide having the activity represented by a respective protein as depicted in column 5 of Table II, application no. 18;
   [96126] (j) a nucleic acid molecule comprising a polynucleotide which is obtained by amplifying a cDNA library or a genomic library using the primers in Table III, application no. 18, column 8;
   [96127] and
   [96128] (k) nucleic acid molecule which is obtainable by screening a suitable nucleic acid library, especially a cDNA library and/or a genomic library, under stringent hybridization conditions with a probe comprising one of the sequences of the nucleic acid molecule of (a), (b), (c), (d), (e), (f), (g), (h), (i) or (j) or with a fragment of at least 15 nt, preferably 20 nt, 30 nt, 50 nt, 100 nt, 200 nt,500 nt, 1000 nt, 1500 nt, 2000 nt or 3000 nt of the nucleic acid molecule characterized in (a), (b), (c), (d), (e), (f), (g), (h), (i) or (j);
   [96129] or a nucleic acid molecule comprising a sequence which is complementary thereto;
      and, if desired
[96130] 2) nucleic acid molecule encoding a transit peptide, preferably encoding a plastidal transit peptide or a mitochondrial transit peptide;
   which are operable linked;]
   or comprising an expression cassette comprising
[96131] [0) a promoter, preferably a promoter selected from the group consisting of Big35S, PCUbi, Super and USP; and 1) a nucleic acid molecule selected from the group consisting of
   [96132] (a) a nucleic acid molecule encoding a polypeptide shown in Table II, application no. 18, column 5 or 8, preferably shown in Table II A, application no. 18, column 5, or in Table II A, application no. 18, column 8, or in Table II B, application no. 18, column 8, or a homolog or a fragment thereof;
   [96133] (b) a nucleic acid molecule shown in Table I, application no. 18, column 5 or 8, preferably shown in Table I A, application no. 18, column 5, or in Table I A, application no. 18, column 8, or in Table I B, application no. 18, column 8, preferably the coding region thereof, or a homolog or a fragment thereof;
   [96134] (c) a nucleic acid molecule, which, as a result of the degeneracy of the genetic code, can be derived from a polypeptide sequence depicted in column 5 or 8 of Table II, application no. 18, preferably shown in Table II A, application no. 18, column 5, or in Table II A, application no. 18, column 8, or in Table II B, application no. 18, column 8;
   [96135] (d) a nucleic acid molecule having at least 30% identity, preferably at least 40%, 50%, 60%, 70%, 75%, 80%, 85%, 90%, 95%, 96%, 97%, 98%, 99%, 99.5%, with the nucleic acid molecule sequence of a polynucleotide comprising the nucleic acid molecule shown in column 5 or 8 of Table I, application no. 18, preferably shown in Table I A, application no. 18, column 5, or in Table I A, application no. 18, column 8, or in Table I B, application no. 18, column 8, preferably the coding region thereof;
   [96136] (e) a nucleic acid molecule encoding a polypeptide having at least 30% identity, preferably at least 40%, 50% 60%, 70%, 75%, 80%, 85%, 90%, 95%, 96%, 97%, 98%, 99%, 99.5%, identity with the amino acid sequence of the polypeptide encoded by the nucleic acid molecule of (a), (b), (c) or (d);
   [96137] (f) a nucleic acid molecule which hybridizes with a nucleic acid molecule of (a), (b), (c), (d) or (e) under stringent hybridization conditions;
   [96138] (g) a nucleic acid molecule encoding a polypeptide which can be isolated with the aid of monoclonal or polyclonal antibodies made against a polypeptide encoded by one of the nucleic acid molecules of (a), (b), (c), (d), (e) or (f);
   [96139] (h) a nucleic acid molecule encoding a polypeptide comprising the consensus sequence or one or more polypeptide motifs as shown in column 8 of Table IV, application no. 18;
   [96140] (i) a nucleic acid molecule encoding a polypeptide having the activity represented by a respective protein as depicted in column 5 of Table II, application no. 18;
   [96141] (j) a nucleic acid molecule comprising a polynucleotide which is obtained by amplifying a cDNA library or a genomic library using the primers in Table III, application no. 18, column 8;
   [96142] and
   [96143] (k) nucleic acid molecule which is obtainable by screening a suitable nucleic acid library, especially a cDNA library and/or a genomic library, under stringent hybridization conditions with a probe comprising one of the sequences of the nucleic acid molecule of (a), (b), (c), (d), (e), (f), (g), (h), (i) or (j) or with a fragment of at least 15 nt, preferably 20 nt, 30 nt, 50 nt, 100 nt, 200 nt,500 nt, 1000 nt, 1500 nt, 2000 nt or 3000 nt of the nucleic acid molecule characterized in (a), (b), (c), (d), (e), (f), (g), (h), (i) or (j);
   [96144] or a nucleic acid molecule comprising a sequence which is complementary thereto;
      and, if desired
[96145] 2) nucleic acid molecule encoding a transit peptide, preferably encoding a plastidal transit peptide or a mitochondrial transit peptide;
   which are operable linked;]
   or comprising or being transformed by a vector comprising
[96146] [1) a nucleic acid molecule selected from the group consisting of
   [96147] (a) a nucleic acid molecule encoding a polypeptide shown in Table II, application no. 18, column 5 or 8, preferably shown in Table II A, application no. 18, column 5, or in Table II A, application no. 18, column 8, or in Table II B, application no. 18, column 8, or a homolog or a fragment thereof;
   [96148] (b) a nucleic acid molecule shown in Table I, application no. 18, column 5 or 8, preferably shown in Table I A, application no. 18, column 5, or in Table I A, application no. 18, column 8, or in Table I B, application no. 18, column 8, preferably the coding region thereof, or a homolog or a fragment thereof;
   [96149] (c) a nucleic acid molecule, which, as a result of the degeneracy of the genetic code, can be derived from a polypeptide sequence depicted in column 5 or 8 of Table II, application no. 18, preferably shown in Table II A, application no. 18, column 5, or in Table II A, application no. 18, column 8, or in Table II B, application no. 18, column 8;
   [96150] (d) a nucleic acid molecule having at least 30% identity, preferably at least 40%, 50%, 60%, 70%, 75%, 80%, 85%, 90%, 95%, 96%, 97%, 98%, 99%, 99.5%, with the nucleic acid molecule sequence of a polynucleotide comprising the nucleic acid molecule shown in column 5 or 8 of Table I, application no. 18, preferably shown in Table I A, application no. 18, column 5, or in Table I A, application no. 18, column 8, or in Table I B, application no. 18, column 8, preferably the coding region thereof;
   [96151] (e) a nucleic acid molecule encoding a polypeptide having at least 30% identity, preferably at least 40%, 50% 60%, 70%, 75%, 80%, 85%, 90%, 95%, 96%, 97%, 98%, 99%, 99.5%, identity with the amino acid sequence of the polypeptide encoded by the nucleic acid molecule of (a), (b), (c) or (d);
   [96152] (f) a nucleic acid molecule which hybridizes with a nucleic acid molecule of (a), (b), (c), (d) or (e) under stringent hybridization conditions;
   [96153] (g) a nucleic acid molecule encoding a polypeptide which can be isolated with the aid of monoclonal or polyclonal antibodies made against a polypeptide encoded by one of the nucleic acid molecules of (a), (b), (c), (d), (e) or (f);
   [96154] (h) a nucleic acid molecule encoding a polypeptide comprising the consensus sequence or one or more polypeptide motifs as shown in column 8 of Table IV, application no. 18;
   [96155] (i) a nucleic acid molecule encoding a polypeptide having the activity represented by a respective protein as depicted in column 5 of Table II, application no. 18;
   [96156] (j) a nucleic acid molecule comprising a polynucleotide which is obtained by amplifying a cDNA library or a genomic library using the primers in Table III, application no. 18, column 8;
   [96157] and
   [96158] (k) nucleic acid molecule which is obtainable by screening a suitable nucleic acid library, especially a cDNA library and/or a genomic library, under stringent hybridization conditions with a probe comprising one of the sequences of the nucleic acid molecule of (a), (b), (c), (d), (e), (f), (g), (h), (i) or (j) or with a fragment of at least 15 nt, preferably 20 nt, 30 nt, 50 nt, 100 nt, 200 nt,500 nt, 1000 nt, 1500 nt, 2000 nt or 3000 nt of the nucleic acid molecule characterized in (a), (b), (c), (d), (e), (f), (g), (h), (i) or (j);
   [96159] or a nucleic acid molecule comprising a sequence which is complementary thereto;]
      as well as respective transgenic cells, tissue, parts of such non-human organism, e.g. plant cells, plant tissue, part of plants, like leaves, roots, stems, blossoms, seeds, fruits, pollen and the like.
      (All the references to Tables I to IV are references to the corresponding lines of Tables I to IV.)

[96160] In a preferred embodiment of said transgenic non-human organism said nucleic acid molecule according to 1 (a), (b), (c), (d), (e), (f), (g), (h), (i), (j) or (k) encodes a polypeptide which has the activity of the respective polypeptide represented by a protein comprising a polypeptide as depicted in the respective line in column 5 of Table II, application no. 18.

[96161] In another preferred embodiment of said transgenic non-human organism said nucleic acid molecule according to 1 (a), (b), (c), (d), (e), (f), (g), (h), (i), (j) or (k) confers a generation or an increase of the respective fine chemical in a non-human organism or a part thereof as compared to a corresponding wild-type non-human organism or part thereof.

[96162] In another preferred embodiment of said transgenic non-human organism said nucleic acid molecule according to 1 (a), (b), (c), (d), (e), (f), (g), (h), (i), (j) or (k) encodes a polypeptide which has the activity of the respective polypeptide represented by a protein as depicted in the respective line in column 5 of Table II application no. 18 and confers a generation or an increase of the respective fine chemical in a non-human organism or a part thereof as compared to a corresponding wild-type non-human organism or part thereof.

[96163] In another embodiment of said transgenic non-human organism the expression cassette comprises 2) a nucleic acid molecule encoding a transit peptide, preferably encoding a plastidal transit peptide, especially in case in column 6 of Table I, application no. 18, in the same line as of the respective nucleic acid molecule according to 1) “plastidic” is depicted, or encoding a mitochondrial transit peptide, especially in case in column 6 of Table I, application no. 18, in the same line as of the respective nucleic acid molecule according to 1) “mitochondric” is depicted.

[96164] In another embodiment of said transgenic non-human organism the expression cassette does not comprise 2) a nucleic acid molecule encoding a transit peptide, especially in case in column 6 of Table I, application no. 18, in the same line as of the respective nucleic acid molecule according to 1) “non-targeted” is depicted.

[96165] In another embodiment of said transgenic non-human organism said vector comprises beneath said nucleic acid molecule according to 1 (a), (b), (c), (d), (e), (f), (g), (h), (i), (j) or (k), a promoter, preferably a promoter selected from the group consisting of Big35S, PCUbi, Super and USP, which are operable linked.

[96166] In a preferred embodiment of said transgenic non-human organism said vector comprises beneath said nucleic acid molecule according to 1 (a), (b), (c), (d), (e), (f), (g), (h), (i), (j) or (k), a promoter, preferably a promoter selected from the group consisting of Big35S, PCUbi, Super and USP, which are operable linked; and said nucleic acid molecule according to 1 (a), (b), (c), (d), (e), (f), (g), (h), (i), (j) or (k) encodes a polypeptide which has the activity of the respective polypeptide represented by a protein comprising a polypeptide as depicted in the respective line in column 5 of Table II, application no. 18.

[96167] In another preferred embodiment of said transgenic non-human organism said vector comprises beneath said nucleic acid molecule according to 1 (a), (b), (c), (d), (e), (f), (g), (h), (i), (j) or (k), a promoter, preferably a promoter selected from the group consisting of Big35S, PCUbi, Super and USP, which are operable linked; and said nucleic acid molecule according to 1 (a), (b), (c), (d), (e), (f), (g), (h), (i), (j) or (k) confers a generation or an increase of the respective fine chemical in a non-human organism or a part thereof as compared to a corresponding wild-type non-human organism or part thereof.

[96168] In another preferred embodiment of said transgenic non-human organism said vector comprises beneath said nucleic acid molecule according to 1 (a), (b), (c), (d), (e), (f), (g), (h), (i), (j) or (k), a promoter, preferably a promoter selected from the group consisting of Big35S, PCUbi, Super and USP, which are operable linked; and said nucleic acid molecule according to 1 (a), (b), (c), (d), (e), (f), (g), (h), (i), (j) or (k) encodes a polypeptide which has the activity of the respective polypeptide represented by a protein as depicted in the respective line in column 5 of Table II, application no. 18, and confers a generation or an increase of the respective fine chemical in a non-human organism or a part thereof as compared to a corresponding wild-type non-human organism or part thereof.

[96169] In another embodiment of said transgenic non-human organism said vector comprises beneath said nucleic acid molecule according to 1 (a), (b), (c), (d), (e), (f), (g), (h), (i), (j) or (k), a nucleic acid molecule encoding a transit peptide, preferably encoding a plastidal transit peptide, especially in case in column 6 of Table I, application no. 18, in the same line as of the respective nucleic acid molecule according to 1) “plastidic” is depicted, or encoding a mitochondrial transit peptide, especially in case in column 6 of Table I, application no. 18, in the same line as of the respective nucleic acid molecule according to 1) “mitochondric” is depicted, which are operable linked.

[96170] In another embodiment of said transgenic non-human organism said vector does not comprise beneath said nucleic acid molecule according to 1 (a), (b), (c), (d), (e), (f), (g), (h), (i), (j) or (k), a nucleic acid molecule encoding a transit peptide in case in column 6 of Table I, application no. 18, in the same line as of the respective nucleic acid molecule according to 1) “non-targeted” is depicted, which are operable linked.

[96171] In another embodiment of said transgenic non-human organism said vector comprises beneath said nucleic acid molecule according to 1 (a), (b), (c), (d), (e), (f), (g), (h), (i), (j) or (k), and a promoter, preferably a promoter selected from the group consisting of Big35S, PCUbi, Super and USP; a nucleic acid molecule encoding a transit peptide, preferably encoding a plastidal transit peptide, especially in case in column 6 of Table I, application no. 18, in the same line as of the respective nucleic acid molecule according to 1) “plastidic” is depicted, or encoding a mitochondrial transit peptide, especially in case in column 6 of Table I, application no. 18, in the same line as of the respective nucleic acid molecule according to 1) “mitochondric” is depicted, which are operable linked.

[96172] In another embodiment of said transgenic non-human organism said vector does not comprise beneath said nucleic acid molecule according to 1 (a), (b), (c), (d), (e), (f), (g), (h), (i), (j) or (k), and a promoter, preferably a promoter selected from the group consisting of Big35S, PCUbi, Super and USP; a nucleic acid molecule encoding a transit peptide, especially in case in column 6 of Table I, application no. 18, in the same line as of the respective nucleic acid molecule according to 1) “non-targeted” is depicted, which are operable linked.

[96173] In another embodiment of said transgenic non-human organism said vector comprises beneath said nucleic acid molecule according to 1 (a), (b), (c), (d), (e), (f), (g), (h), (i), (j) or (k), and a promoter, preferably a promoter selected from the group consisting of Big35S, PCUbi, Super and USP; a nucleic acid molecule encoding a transit peptide, preferably encoding a plastidal transit peptide, especially in case in column 6 of Table I, application no. 18, in the same line as of the respective nucleic acid molecule according to 1) “plastidic” is depicted, or encoding a mitochondrial transit peptide, especially in case in column 6 of Table I, application no. 18, in the same line as of the respective nucleic acid molecule according to 1) “mitochondric” is depicted, which are operable linked; and wherein said nucleic acid molecule according to 1 (a), (b), (c), (d), (e), (f), (g), (h), (i), (j) or (k) encodes a polypeptide which has the activity of the respective polypeptide represented by a protein comprising a polypeptide as depicted in the respective line in column 5 of Table II, application no. 18.

[96174] In another embodiment of said transgenic non-human organism said vector does not comprise beneath said nucleic acid molecule according to 1 (a), (b), (c), (d), (e), (f), (g), (h), (i), (j) or (k), and a promoter, preferably a promoter selected from the group consisting of Big35S, PCUbi, Super and USP; a nucleic acid molecule encoding a transit peptide, especially in case in column 6 of Table I, application no. 18, in the same line as of the respective nucleic acid molecule according to 1) “non-targeted” is depicted, which are operable linked; and wherein said nucleic acid molecule according to 1 (a), (b), (c), (d), (e), (f), (g), (h), (i), (j) or (k) encodes a polypeptide which has the activity of the respective polypeptide represented by a protein comprising a polypeptide as depicted in the respective line in column 5 of Table II, application no. 18.

[96175] In another embodiment of said transgenic non-human organism said vector comprises beneath said nucleic acid molecule according to 1 (a), (b), (c), (d), (e), (f), (g), (h), (i), (j) or (k), and a promoter, preferably a promoter selected from the group consisting of Big35S, PCUbi, Super and USP; a nucleic acid molecule encoding a transit peptide, preferably encoding a plastidal transit peptide, especially in case in column 6 of Table I, application no. 18, in the same line as of the respective nucleic acid molecule according to 1) “plastidic” is depicted, or encoding a mitochondrial transit peptide, especially in case in column 6 of Table I, application no. 18, in the same line as of the respective nucleic acid molecule according to 1) “mitochondric” is depicted, which are operable linked; and wherein said nucleic acid molecule according to 1 (a), (b), (c), (d), (e), (f), (g), (h), (i), (j) or (k) confers a generation or an increase of the respective fine chemical in a non-human organism or a part thereof as compared to a corresponding wild-type non-human organism or part thereof.

[96176] In another embodiment of said transgenic non-human organism said vector does not comprise beneath said nucleic acid molecule according to 1 (a), (b), (c), (d), (e), (f), (g), (h), (i), (j) or (k), and a promoter, preferably a promoter selected from the group consisting of Big35S, PCUbi, Super and USP; a nucleic acid molecule encoding a transit peptide, especially in case in column 6 of Table I, application no. 18, in the same line as of the respective nucleic acid molecule according to 1) “non-targeted” is depicted, which are operable linked; and wherein said nucleic acid molecule according to 1 (a), (b), (c), (d), (e), (f), (g), (h), (i), (j) or (k) confers a generation or an increase of the respective fine chemical in a non-human organism or a part thereof as compared to a corresponding wild-type non-human organism or part thereof.

[96177] In another embodiment of said transgenic non-human organism said vector comprises beneath said nucleic acid molecule according to 1 (a), (b), (c), (d), (e), (f), (g), (h), (i), (j) or (k), and a promoter, preferably a promoter selected from the group consisting of Big35S, PCUbi, Super and USP; a nucleic acid molecule encoding a transit peptide, preferably encoding a plastidal transit peptide, especially in case in column 6 of Table I, application no. 18, in the same line as of the respective nucleic acid molecule according to 1) “plastidic” is depicted, or encoding a mitochondrial transit peptide, especially in case in column 6 of Table I, application no. 18, in the same line as of the respective nucleic acid molecule according to 1) “mitochondric” is depicted, which are operable linked; and wherein said nucleic acid molecule according to 1 (a), (b), (c), (d), (e), (f), (g), (h), (i), (j) or (k) encodes a polypeptide which has the activity of the respective polypeptide represented by a protein as depicted in the respective line in column 5 of Table II application no. 18 and confers a generation or an increase of the respective fine chemical in a non-human organism or a part thereof as compared to a corresponding wild-type non-human organism or part thereof.

[96178] In another embodiment of said transgenic non-human organism said vector does not comprise beneath said nucleic acid molecule according to 1 (a), (b), (c), (d), (e), (f), (g), (h), (i), (j) or (k), and a promoter, preferably a promoter selected from the group consisting of Big35S, PCUbi, Super and USP; a nucleic acid molecule encoding a transit peptide, especially in case in column 6 of Table I, application no. 18, in the same line as of the respective nucleic acid molecule according to 1) “non-targeted” is depicted, which are operable linked; and wherein said nucleic acid molecule according to 1 (a), (b), (c), (d), (e), (f), (g), (h), (i), (j) or (k) encodes a polypeptide which has the activity of the respective polypeptide represented by a protein as depicted in the respective line in column 5 of Table II application no. 18 (in the same line) and confers a generation or an increase of the respective fine chemical in a non-human organism or a part thereof as compared to a corresponding wild-type non-human organism or part thereof.

[96179] In a preferred embodiment of said transgenic non-human organism said nucleic acid molecule according to 1 (a), (b), (c), (d), (e), (f), (g), (h), (i), (j) or (k), said promoter and optionally said nucleic acid molecule encoding a transit peptide are encompassed in an expression cassette in said vector. Accordingly an embodiment the invention provides a non-human organism comprising or being transformed by a vector comprising an expression cassette comprising said nucleic acid molecule according to 1 (a), (b), (c), (d), (e), (f), (g), (h), (i), (j) or (k), said promoter and optionally said a nucleic acid molecule encoding a transit peptide, operable linked. Said expression cassette may encompass a terminator, too.

[96180] In a further embodiment the invention relates to a transgenic non-human organisms such as transgenic microorganism or transgenic plant comprising a nucleic acid molecule comprising
[96181] [1) a nucleic acid molecule selected from the group consisting of
   [96182] (a) a nucleic acid molecule encoding a polypeptide shown in Table II, application no. 18, column 5 or 8, preferably shown in Table II A, application no. 18, column 5, or in Table II A, application no. 18, column 8, or in Table II B, application no. 18, column 8, or a homolog or a fragment thereof;
   [96183] (b) a nucleic acid molecule shown in Table I, application no. 18, column 5 or 8, preferably shown in Table I A, application no. 18, column 5, or in Table I A, application no. 18, column 8, or in Table I B, application no. 18, column 8, preferably the coding region thereof, or a homolog or a fragment thereof;
   [96184] (c) a nucleic acid molecule, which, as a result of the degeneracy of the genetic code, can be derived from a polypeptide sequence depicted in column 5 or 8 of Table II, application no. 18, preferably shown in Table II A, application no. 18, column 5, or in Table II A, application no. 18, column 8, or in Table II B, application no. 18, column 8;
   [96185] (d) a nucleic acid molecule having at least 30% identity, preferably at least 40%, 50%, 60%, 70%, 75%, 80%, 85%, 90%, 95%, 96%, 97%, 98%, 99%, 99.5%, with the nucleic acid molecule sequence of a polynucleotide comprising the nucleic acid molecule shown in column 5 or 8 of Table I, application no. 18, preferably shown in Table I A, application no. 18, column 5, or in Table I A, application no. 18, column 8, or in Table I B, application no. 18, column 8, preferably the coding region thereof;
   [96186] (e) a nucleic acid molecule encoding a polypeptide having at least 30% identity, preferably at least 40%, 50% 60%, 70%, 75%, 80%, 85%, 90%, 95%, 96%, 97%, 98%, 99%, 99.5%, identity with the amino acid sequence of the polypeptide encoded by the nucleic acid molecule of (a), (b), (c) or (d);
   [96187] (f) a nucleic acid molecule which hybridizes with a nucleic acid molecule of (a), (b), (c), (d) or (e) under stringent hybridization conditions;
   [96188] (g) a nucleic acid molecule encoding a polypeptide which can be isolated with the aid of monoclonal or polyclonal antibodies made against a polypeptide encoded by one of the nucleic acid molecules of (a), (b), (c), (d), (e) or (f);
   [96189] (h) a nucleic acid molecule encoding a polypeptide comprising the consensus sequence or one or more polypeptide motifs as shown in column 8 of Table IV, application no. 18;
   [96190] (i) a nucleic acid molecule encoding a polypeptide having the activity represented by a respective protein as depicted in column 5 of Table II, application no. 18;
   [96191] (j) a nucleic acid molecule comprising a polynucleotide which is obtained by amplifying a cDNA library or a genomic library using the primers in Table III, application no. 18, column 8;
   [96192] and
   [96193] (k) nucleic acid molecule which is obtainable by screening a suitable nucleic acid library, especially a cDNA library and/or a genomic library, under stringent hybridization conditions with a probe comprising one of the sequences of the nucleic acid molecule of (a), (b), (c), (d), (e), (f), (g), (h), (i) or (j) or with a fragment of at least 15 nt, preferably 20 nt, 30 nt, 50 nt, 100 nt, 200 nt,500 nt, 1000 nt, 1500 nt, 2000 nt or 3000 nt of the nucleic acid molecule characterized in (a), (b), (c), (d), (e), (f), (g), (h), (i) or (j);
   [96194] or a nucleic acid molecule comprising a sequence which is complementary thereto;
      and, if desired
[96195] 2) nucleic acid molecule encoding a transit peptide, preferably encoding a plastidal transit peptide or a mitochondrial transit peptide;
   which are operable linked;]
   or comprising an expression cassette comprising
[96196] [0) a promoter, preferably a promoter selected from the group consisting of Big35S, PCUbi, Super and USP; and
[96197] 1) a nucleic acid molecule selected from the group consisting of
   [96198] (a) a nucleic acid molecule encoding a polypeptide shown in Table II, application no. 18, column 5 or 8, preferably shown in Table II A, application no. 18, column 5, or in Table II A, application no. 18, column 8, or in Table II B, application no. 18, column 8, or a homolog or a fragment thereof;
   [96199] (b) a nucleic acid molecule shown in Table I, application no. 18, column 5 or 8, preferably shown in Table I A, application no. 18, column 5, or in Table I A, application no. 18, column 8, or in Table I B, application no. 18, column 8, preferably the coding region thereof, or a homolog or a fragment thereof;
   [96200] (c) a nucleic acid molecule, which, as a result of the degeneracy of the genetic code, can be derived from a polypeptide sequence depicted in column 5 or 8 of Table II, application no. 18, preferably shown in Table II A, application no. 18, column 5, or in Table II A, application no. 18, column 8, or in Table II B, application no. 18, column 8;
   [96201] (d) a nucleic acid molecule having at least 30% identity, preferably at least 40%, 50%, 60%, 70%, 75%, 80%, 85%, 90%, 95%, 96%, 97%, 98%, 99%, 99.5%, with the nucleic acid molecule sequence of a polynucleotide comprising the nucleic acid molecule shown in column 5 or 8 of Table I, application no. 18, preferably shown in Table I A, application no. 18, column 5, or in Table I A, application no. 18, column 8, or in Table I B, application no. 18, column 8, preferably the coding region thereof;
   [96202] (e) a nucleic acid molecule encoding a polypeptide having at least 30% identity, preferably at least 40%, 50% 60%, 70%, 75%, 80%, 85%, 90%, 95%, 96%, 97%, 98%, 99%, 99.5%, identity with the amino acid sequence of the polypeptide encoded by the nucleic acid molecule of (a), (b), (c) or (d);
   [96203] (f) a nucleic acid molecule which hybridizes with a nucleic acid molecule of (a), (b), (c), (d) or (e) under stringent hybridization conditions;
   [96204] (g) a nucleic acid molecule encoding a polypeptide which can be isolated with the aid of monoclonal or polyclonal antibodies made against a polypeptide encoded by one of the nucleic acid molecules of (a), (b), (c), (d), (e) or (f);
   [96205] (h) a nucleic acid molecule encoding a polypeptide comprising the consensus sequence or one or more polypeptide motifs as shown in column 8 of Table IV, application no. 18;
   [96206] (i) a nucleic acid molecule encoding a polypeptide having the activity represented by a respective protein as depicted in column 5 of Table II, application no. 18;
   [96207] (j) a nucleic acid molecule comprising a polynucleotide which is obtained by amplifying a cDNA library or a genomic library using the primers in Table III, application no. 18, column 8;
   [96208] and
   [96209] (k) nucleic acid molecule which is obtainable by screening a suitable nucleic acid library, especially a cDNA library and/or a genomic library, under stringent hybridization conditions with a probe comprising one of the sequences of the nucleic acid molecule of (a), (b), (c), (d), (e), (f), (g), (h), (i) or (j) or with a fragment of at least 15 nt, preferably 20 nt, 30 nt, 50 nt, 100 nt, 200 nt,500 nt, 1000 nt, 1500 nt, 2000 nt or 3000 nt of the nucleic acid molecule characterized in (a), (b), (c), (d), (e), (f), (g), (h), (i) or (j);
   [96210] or a nucleic acid molecule comprising a sequence which is complementary thereto;]
      and, if desired
[96211] 2) nucleic acid molecule encoding a transit peptide, preferably encoding a plastidal transit peptide or a mitochondrial transit peptide; which are operable linked;]
   or comprising or being transformed by a vector comprising
[96212] [1) a nucleic acid molecule selected from the group consisting of
   [96213] (a) a nucleic acid molecule encoding a polypeptide shown in Table II, application no. 18, column 5 or 8, preferably shown in Table II A, application no. 18, column 5, or in Table II A, application no. 18, column 8, or in Table II B, application no. 18, column 8, or a homolog or a fragment thereof;
   [96214] (b) a nucleic acid molecule shown in Table I, application no. 18, column 5 or 8, preferably shown in Table I A, application no. 18, column 5, or in Table I A, application no. 18, column 8, or in Table I B, application no. 18, column 8, preferably the coding region thereof, or a homolog or a fragment thereof;
   [96215] (c) a nucleic acid molecule, which, as a result of the degeneracy of the genetic code, can be derived from a polypeptide sequence depicted in column 5 or 8 of Table II, application no. 18, preferably shown in Table II A, application no. 18, column 5, or in Table II A, application no. 18, column 8, or in Table II B, application no. 18, column 8;
   [96216] (d) a nucleic acid molecule having at least 30% identity, preferably at least 40%, 50%, 60%, 70%, 75%, 80%, 85%, 90%, 95%, 96%, 97%, 98%, 99%, 99.5%, with the nucleic acid molecule sequence of a polynucleotide comprising the nucleic acid molecule shown in column 5 or 8 of Table I, application no. 18, preferably shown in Table I A, application no. 18, column 5, or in Table I A, application no. 18, column 8, or in Table I B, application no. 18, column 8, preferably the coding region thereof;
   [96217] (e) a nucleic acid molecule encoding a polypeptide having at least 30% identity, preferably at least 40%, 50% 60%, 70%, 75%, 80%, 85%, 90%, 95%, 96%, 97%, 98%, 99%, 99.5%, identity with the amino acid sequence of the polypeptide encoded by the nucleic acid molecule of (a), (b), (c) or (d);
   [96218] (f) a nucleic acid molecule which hybridizes with a nucleic acid molecule of (a), (b), (c), (d) or (e) under stringent hybridization conditions;
   [96219] (g) a nucleic acid molecule encoding a polypeptide which can be isolated with the aid of monoclonal or polyclonal antibodies made against a polypeptide encoded by one of the nucleic acid molecules of (a), (b), (c), (d), (e) or (f);
   [96220] (h) a nucleic acid molecule encoding a polypeptide comprising the consensus sequence or one or more polypeptide motifs as shown in column 8 of Table IV, application no. 18;
   [96221] (i) a nucleic acid molecule encoding a polypeptide having the activity represented by a respective protein as depicted in column 5 of Table II, application no. 18;
   [96222] (j) a nucleic acid molecule comprising a polynucleotide which is obtained by amplifying a cDNA library or a genomic library using the primers in Table III, application no. 18, column 8;
   [96223] and
   [96224] (k) nucleic acid molecule which is obtainable by screening a suitable nucleic acid library, especially a cDNA library and/or a genomic library, under stringent hybridization conditions with a probe comprising one of the sequences of the nucleic acid molecule of (a), (b), (c), (d), (e), (f), (g), (h), (i) or (j) or with a fragment of at least 15 nt, preferably 20 nt, 30 nt, 50 nt, 100 nt, 200 nt,500 nt, 1000 nt, 1500 nt, 2000 nt or 3000 nt of the nucleic acid molecule characterized in (a), (b), (c), (d), (e), (f), (g), (h), (i) or (j);
   [96225] or a nucleic acid molecule comprising a sequence which is complementary thereto;]
      whereby, preferably, the nucleic acid molecule according to 1 (a), (b), (c), (d), (e), (f), (g), (h), (i), (j) or (k) distinguishes over the sequence depicted in Table I A and/or I B, application no. 18, column 5 or 8, or the coding regions thereof, by one or more nucleotides (especially but not exceeding 5%, preferably 4%, 3%, 2%, 1%, 0.5%, 0.2% or 0.1%). In an embodiment, the nucleic acid molecule of the invention does not consist of the sequence shown in Table I A and/or I B, application no. 18, column 5 or 8, or the coding region thereof. In another embodiment, the nucleic acid molecule of the present invention, preferably the coding region thereof, is at least 30%, 40%, 50%, 60%, 70%, 80%, 90%, 95% identical but less than 100%, 99.999%, 99.99%, 99.9%, 99%, 98%, 97%, 96% or 95% identical to the sequence shown in Table I A and/or I B, application no. 18, column 5 or 8, or the coding region thereof, respectively. In a further embodiment the nucleic acid molecule does not encode the polypeptide sequence shown in Table II A and/or II B, application no. 18, column 5 or 8 but homologs thereof. Accordingly, in one embodiment, the nucleic acid molecule of the present invention encodes in one embodiment a polypeptide which differs at least in one or more amino acids (especially but not exceeding 5%, preferably 4%, 3%, 2%, 1%, 0.5%, 0.2% or 0.1%) from the polypeptide shown in Table II, application no. 18, column 5 or 8 and does not encode a protein of the sequence shown in Table II A and/or II B, application no. 18, column 5 or 8. Accordingly, in one embodiment, the protein encoded by a sequence of a nucleic acid according to 1 (a), (b), (c), (d), (e), (f), (g), (h), (i), (j) or (k) does not consist of the sequence shown in Table I A and/or I B, application no. 18, column 5 or 8, or the coding region thereof. In a further embodiment, the protein of the present invention is at least 30%, 40%, 50%, 60%, 70%, 80%, 90%, 95% identical to protein sequence depicted in Table II A and/or II B, application no. 18, column 5 or 8 but less than 100%, preferably less than 99.999%, 99.99%, 99.9%, 99%, 98%, 97%, 96% or 95% identical to the sequence shown in Table II A and/or II B, application no. 18, column 5 or 8; as well as respective transgenic cells, tissue, parts of such non-human organism, e.g. plant cells, plant tissue, part of plants, like leaves, roots, stems, blossoms, seeds, fruits, pollen and the like.
      (All the references to Tables I to IV are references to the corresponding lines of Tables I to IV.)

[96226] In a preferred embodiment of said transgenic non-human organism said nucleic acid molecule according to 1 (a), (b), (c), (d), (e), (f), (g), (h), (i), (j) or (k) encodes a polypeptide which has the activity of the respective polypeptide represented by a protein comprising a polypeptide as depicted in the respective line in column 5 of Table II, application no. 18.

[96227] In another preferred embodiment of said transgenic non-human organism said nucleic acid molecule according to 1 (a), (b), (c), (d), (e), (f), (g), (h), (i), (j) or (k) confers a generation or an increase of the respective fine chemical in a non-human organism or a part thereof as compared to a corresponding wild-type non-human organism or part thereof.

[96228] In another preferred embodiment of said transgenic non-human organism said nucleic acid molecule according to 1 (a), (b), (c), (d), (e), (f), (g), (h), (i), (j) or (k) encodes a polypeptide which has the activity of the respective polypeptide represented by a protein as depicted in the respective line in column 5 of Table II application no. 18 and confers a generation or an increase of the respective fine chemical in a non-human organism or a part thereof as compared to a corresponding wild-type non-human organism or part thereof.

[96229] In another embodiment of said transgenic non-human organism the expression cassette comprises 2) a nucleic acid molecule encoding a transit peptide, preferably encoding a plastidal transit peptide, especially in case in column 6 of Table I, application no. 18, in the same line as of the respective nucleic acid molecule according to 1) “plastidic” is depicted, or encoding a mitochondrial transit peptide, especially in case in column 6 of Table I, application no. 18, in the same line as of the respective nucleic acid molecule according to 1) “mitochondric” is depicted.

[96230] In another embodiment thereof the expression cassette does not comprise 2) a nucleic acid molecule encoding a transit peptide, especially in case in column 6 of Table I, application no. 18, in the same line as of the respective nucleic acid molecule according to 1) “non-targeted” is depicted.

[96231] In another embodiment of said transgenic non-human organism said vector comprises beneath said nucleic acid molecule according to 1 (a), (b), (c), (d), (e), (f), (g), (h), (i), (j) or (k), a promoter, preferably a promoter selected from the group consisting of Big35S, PCUbi, Super and USP, which are operable linked.

[96232] In a preferred embodiment of said transgenic non-human organism said vector comprises beneath said nucleic acid molecule according to 1 (a), (b), (c), (d), (e), (f), (g), (h), (i), (j) or (k), a promoter, preferably a promoter selected from the group consisting of Big35S, PCUbi, Super and USP, which are operable linked; and said nucleic acid molecule according to 1 (a), (b), (c), (d), (e), (f), (g), (h), (i), (j) or (k) encodes a polypeptide which has the activity of the respective polypeptide represented by a protein comprising a polypeptide as depicted in the respective line in column 5 of Table II, application no. 18.

[96233] In another preferred embodiment of said transgenic non-human organism said vector comprises beneath said nucleic acid molecule according to 1 (a), (b), (c), (d), (e), (f), (g), (h), (i), (j) or (k), a promoter, preferably a promoter selected from the group consisting of Big35S, PCUbi, Super and USP, which are operable linked; and said nucleic acid molecule according to 1 (a), (b), (c), (d), (e), (f), (g), (h), (i), (j) or (k) confers a generation or an increase of the respective fine chemical in a non-human organism or a part thereof as compared to a corresponding wild-type non-human organism or part thereof.

[96234] In another preferred embodiment of said transgenic non-human organism said vector comprises beneath said nucleic acid molecule according to 1 (a), (b), (c), (d), (e), (f), (g), (h), (i), (j) or (k), a promoter, preferably a promoter selected from the group consisting of Big35S, PCUbi, Super and USP, which are operable linked; and said nucleic acid molecule according to 1 (a), (b), (c), (d), (e), (f), (g), (h), (i), (j) or (k) encodes a polypeptide which has the activity of the respective polypeptide represented by a protein as depicted in the same line in column 5 of Table II, application no. 18, and confers a generation or an increase of the respective fine chemical in a non-human organism or a part thereof as compared to a corresponding wild-type non-human organism or part thereof.

[96235] In another embodiment of said transgenic non-human organism said vector comprises beneath said nucleic acid molecule according to 1 (a), (b), (c), (d), (e), (f), (g), (h), (i), (j) or (k), a nucleic acid molecule encoding a transit peptide, preferably encoding a plastidal transit peptide, especially in case in column 6 of Table I, application no. 18, in the same line as of the respective nucleic acid molecule according to 1) “plastidic” is depicted, or encoding a mitochondrial transit peptide, especially in case in column 6 of Table I, application no. 18, in the same line as of the respective nucleic acid molecule according to 1) “mitochondric” is depicted, which are operable linked.

[96236] In another embodiment of said transgenic non-human organism said vector does not comprise beneath said nucleic acid molecule according to 1 (a), (b), (c), (d), (e), (f), (g), (h), (i), (j) or (k), a nucleic acid molecule encoding a transit peptide in case in column 6 of Table I, application no. 18, in the same line as of the respective nucleic acid molecule according to 1) “non-targeted” is depicted, which are operable linked.

[96237] In another embodiment of said transgenic non-human organism said vector comprises beneath said nucleic acid molecule according to 1 (a), (b), (c), (d), (e), (f), (g), (h), (i), (j) or (k), and a promoter, preferably a promoter selected from the group consisting of Big35S, PCUbi, Super and USP; a nucleic acid molecule encoding a transit peptide, preferably encoding a plastidal transit peptide, especially in case in column 6 of Table I, application no. 18, in the same line as of the respective nucleic acid molecule according to 1) “plastidic” is depicted, or encoding a mitochondrial transit peptide, especially in case in column 6 of Table I, application no. 18, in the same line as of the respective nucleic acid molecule according to 1) “mitochondric” is depicted, which are operable linked.

[96238] In another embodiment of said transgenic non-human organism said vector does not comprise beneath said nucleic acid molecule according to 1 (a), (b), (c), (d), (e), (f), (g), (h), (i), (j) or (k), and a promoter, preferably a promoter selected from the group consisting of Big35S, PCUbi, Super and USP; a nucleic acid molecule encoding a transit peptide, especially in case in column 6 of Table I, application no. 18, in the same line as of the respective nucleic acid molecule according to 1) “non-targeted” is depicted, which are operable linked.

[96239] In another embodiment of said transgenic non-human organism said vector comprises beneath said nucleic acid molecule according to 1 (a), (b), (c), (d), (e), (f), (g), (h), (i), (j) or (k), and a promoter, preferably a promoter selected from the group consisting of Big35S, PCUbi, Super and USP; a nucleic acid molecule encoding a transit peptide, preferably encoding a plastidal transit peptide, especially in case in column 6 of Table I, application no. 18, in the same line as of the respective nucleic acid molecule according to 1) “plastidic” is depicted, or encoding a mitochondrial transit peptide, especially in case in column 6 of Table I, application no. 18, in the same line as of the respective nucleic acid molecule according to 1) “mitochondric” is depicted, which are operable linked; and wherein said nucleic acid molecule according to 1 (a), (b), (c), (d), (e), (f), (g), (h), (i), (j) or (k) encodes a polypeptide which has the activity of the respective polypeptide represented by a protein comprising a polypeptide as depicted in the respective line in column 5 of Table II, application no. 18.

[96240] In another embodiment of said transgenic non-human organism said vector does not comprise beneath said nucleic acid molecule according to 1 (a), (b), (c), (d), (e), (f), (g), (h), (i), (j) or (k), and a promoter, preferably a promoter selected from the group consisting of Big35S, PCUbi, Super and USP; a nucleic acid molecule encoding a transit peptide, especially in case in column 6 of Table I, application no. 18, in the same line as of the respective nucleic acid molecule according to 1) “non-targeted” is depicted, which are operable linked; and wherein said nucleic acid molecule according to 1 (a), (b), (c), (d), (e), (f), (g), (h), (i), (j) or (k) encodes a polypeptide which has the activity of the respective polypeptide represented by a protein comprising a polypeptide as depicted in the respective line in column 5 of Table II, application no. 18.

[96241] In another embodiment of said transgenic non-human organism said vector comprises beneath said nucleic acid molecule according to 1 (a), (b), (c), (d), (e), (f), (g), (h), (i), (j) or (k), and a promoter, preferably a promoter selected from the group consisting of Big35S, PCUbi, Super and USP; a nucleic acid molecule encoding a transit peptide, preferably encoding a plastidal transit peptide, especially in case in column 6 of Table I, application no. 18, in the same line as of the respective nucleic acid molecule according to 1) “plastidic” is depicted, or encoding a mitochondrial transit peptide, especially in case in column 6 of Table I, application no. 18, in the same line as of the respective nucleic acid molecule according to 1) “mitochondric” is depicted, which are operable linked; and wherein said nucleic acid molecule according to 1 (a), (b), (c), (d), (e), (f), (g), (h), (i), (j) or (k) confers a generation or an increase of the respective fine chemical in a non-human organism or a part thereof as compared to a corresponding wild-type non-human organism or part thereof.

[96242] In another embodiment of said transgenic non-human organism said vector does not comprise beneath said nucleic acid molecule according to 1 (a), (b), (c), (d), (e), (f), (g), (h), (i), (j) or (k), and a promoter, preferably a promoter selected from the group consisting of Big35S, PCUbi, Super and USP; a nucleic acid molecule encoding a transit peptide, especially in case in column 6 of Table I, application no. 18, in the same line as of the respective nucleic acid molecule according to 1) “non-targeted” is depicted, which are operable linked; and wherein said nucleic acid molecule according to 1 (a), (b), (c), (d), (e), (f), (g), (h), (i), (j) or (k) confers a generation or an increase of the respective fine chemical in a non-human organism or a part thereof as compared to a corresponding wild-type non-human organism or part thereof.

[96243] In another embodiment of said transgenic non-human organism said vector comprises beneath said nucleic acid molecule according to 1 (a), (b), (c), (d), (e), (f), (g), (h), (i), (j) or (k), and a promoter, preferably a promoter selected from the group consisting of Big35S, PCUbi, Super and USP; a nucleic acid molecule encoding a transit peptide, preferably encoding a plastidal transit peptide, especially in case in column 6 of Table I, application no. 18, in the same line as of the respective nucleic acid molecule according to 1) “plastidic” is depicted, or encoding a mitochondrial transit peptide, especially in case in column 6 of Table I, application no. 18, in the same line as of the respective nucleic acid molecule according to 1) “mitochondric” is depicted, which are operable linked; and wherein said nucleic acid molecule according to 1 (a), (b), (c), (d), (e), (f), (g), (h), (i), (j) or (k) encodes a polypeptide which has the activity of the respective polypeptide represented by a protein as depicted in the respective line in column 5 of Table II application no. 18 and confers a generation or an increase of the respective fine chemical in a non-human organism or a part thereof as compared to a corresponding wild-type non-human organism or part thereof.

[96244] In another embodiment of said transgenic non-human organism said vector does not comprise beneath said nucleic acid molecule according to 1 (a), (b), (c), (d), (e), (f), (g), (h), (i), (j) or (k), and a promoter, preferably a promoter selected from the group consisting of Big35S, PCUbi, Super and USP; a nucleic acid molecule encoding a transit peptide, especially in case in column 6 of Table I, application no. 18, in the same line as of the respective nucleic acid molecule according to 1) “non-targeted” is depicted, which are operable linked; and wherein said nucleic acid molecule according to 1 (a), (b), (c), (d), (e), (f), (g), (h), (i), (j) or (k) encodes a polypeptide which has the activity of the respective polypeptide represented by a protein as depicted in the respective line in column 5 of Table II application no. 18 and confers a generation or an increase of the respective fine chemical in a non-human organism or a part thereof as compared to a corresponding wild-type non-human organism or part thereof.

[96245] In a preferred embodiment of said transgenic non-human organism said nucleic acid molecule according to 1 (a), (b), (c), (d), (e), (f), (g), (h), (i), (j) or (k), said promoter and optionally said nucleic acid molecule encoding a transit peptide are encompassed in an expression cassette in said vector. Accordingly an embodiment the invention provides a non-human organism comprising or being transformed by a vector comprising an expression cassette comprising said nucleic acid molecule according to 1 (a), (b), (c), (d), (e), (f), (g), (h), (i), (j) or (k), said promoter and optionally said a nucleic acid molecule encoding a transit peptide, operable linked. Said expression cassette may encompass a terminator, too.

[96246] [0291.1.7.18] to [0299.1.7.18] for the disclosure of these paragraphs see [0291.1.7.7] to [0299.1.7.7] above

[96247] The term “biological active portion” or “biological activity” means a polypeptide as depicted in the respective line in Table II, application no. 18, column 3 or a portion of said polypeptide which still has at least 10% or 20%, preferably 30%, 40%, 50% or 60%, especially preferably 70%, 75%, 80%, 90% or 95% of the enzymatic or biological activity of the natural or starting enzyme or protein.

[96248] [0301.1.7.18] to [0304.1.7.18] for the disclosure of these paragraphs see [0301.1.7.7] to [0304.1.7.7] above

[96249] Synthetic oligonucleotide primers for the amplification, e.g. as shown in the respective line in Table III, application no. 18, column 8, by means of polymerase chain reaction can be generated on the basis of a sequence shown herein, for example the sequence shown in the respective line in Table I, application no. 18, columns 5 or 8, or the sequences derived from Table II, application no. 18, columns 5 or 8, respectively.

[96250] Moreover, it is possible to identify a conserved region of a protein from various organism by carrying out protein sequence alignments with the polypeptide encoded by the nucleic acid molecules of the present invention, in particular with the sequences encoded by the nucleic acid molecule shown in the respective line in column 5 or 8 of Table I, application no. 18, from which conserved regions, and in turn, degenerate primers can be derived. Conserved regions are those, which show a very little variation in the amino acid in one particular position of several homologs from different origin. The consensus sequence and polypeptide motifs shown in the respective line in column 8 of Table IV, application no. 18, are derived from such alignments of homologous proteins.

[96251] In an embodiment of the present invention, in the method of the present invention the activity of a polypeptide comprising or consisting of a consensus sequence or at least one polypeptide motif shown in the respective line in Table IV, application no. 18, column 8, is increased. In another embodiment thereof, the method of the present invention relates to a polypeptide comprising or consisting of a consensus sequence shown in the respective line in Table IV, application no. 18, column 8 or comprising at least one polypeptide motif shown in the respective line in Table IV, application no. 18, column 8, whereby not more than 20, 15, 10, 9, 8, 7, 6, 5 4, 3, 2 or 1, or 0 of the amino acid positions indicated can be replaced by any amino acid. In another embodiment thereof, the method of the present invention relates to a polypeptide comprising or consisting of a consensus sequence shown in the respective line in Table IV, application no. 18, column 8 or comprising at least one polypeptide motif shown in the respective line in Table IV, application no. 18, column 8, whereby not more than 15%, 10%, 5%, 4%, 3%, 2% or 1%, or 0% of the amino acid positions defined as distinct specific amino acids are/is replaced by another amino acid. In another embodiment thereof, the method of the present invention relates to a polypeptide comprising or consisting of a consensus sequence shown in the respective line in Table IV, application no. 18, column 8 or comprising at least one polypeptide motif shown in the respective line in Table IV, application no. 18, column 8, whereby not more than 20, 15, 10, 9, 8, 7, 6, 5, 4, 3, 2 or 1, or 0 amino acids are inserted into a consensus sequence or polypeptide motif.

[96252] In an embodiment of the present invention, in the method of the present invention the activity of a polypeptide comprising or consisting of a consensus sequence or at least one polypeptide motif shown in the respective line in Table IV, application no. 18, column 8, is increased, whereby said polypeptide distinguishes over the sequence depicted in Table II, application no. 18, columns 5 or 8 by one or more amino acids.

[96253] In one embodiment, said polypeptide of the invention distinguishes over the sequence shown in the respective line in Table II, application no. 18, columns 5 and 8 by more than 5, 6, 7, 8 or 9 amino acids, preferably by more than 10, 15, 20, 25 or 30 amino acids, even more preferred are more than 40, 50, or 60 amino acids and, preferably, the sequence of the polypeptide of the invention distinguishes from the sequence shown in the respective line in Table II B, application no. 18, columns 5 and 8 by not more than 80%, 70%, 60%, 50%, 40%, 30%, 20%, 10%, 5%, 4%, 3%, 2%, 1% or 0.5%. In another embodiment, said polypeptide of the invention does not consist of the sequence shown in Table II, application no. 18, columns 5 or 8.

[96254] [0309.1.7.18] to [0321.1.7.18] for the disclosure of these paragraphs see [0309.1.7.7] to [0321.1.7.7] above

[96255] Polypeptides having above-mentioned activity, i.e. conferring the production or the increased production of the fine chemical cerotic acid, heneicosanoic acid, lignoceric acid, melissic acid or montanic acid as compared to a corresponding, e.g. non-transformed, wild type non-human organism, like a microorganism or a plant cell, plant or part thereof, can be encoded by other DNA sequences which hybridize to the sequences shown in the respective line in Table I, application no. 18, columns 5 and 8, preferably the coding region thereof, at least under relaxed hybridization conditions and which encode the expression of polypeptides conferring the production or the increased production of the respective fine chemical cerotic acid, heneicosanoic acid, lignoceric acid, melissic acid or montanic acid as compared to a corresponding, e.g. non-transformed, wild type non-human organism, like a microorganism or a plant cell, plant or part thereof.

[96256] [0323.1.7.18] to [0329.1.7.18] for the disclosure of these paragraphs see [0323.1.7.7] to [0329.1.7.7] above

[96257] Further, the nucleic acid molecule of the invention comprises a nucleic acid molecule, which is a complement of one of the nucleotide sequences of above-mentioned nucleic acid molecules or a portion thereof. A nucleic acid molecule or its sequence which is complementary to one of the nucleotide molecules or sequences shown in the respective line in Table I, application no. 18, columns 5 or 8, preferably the coding region thereof, homologs or fragments thereof, is one which is sufficiently complementary to one of the nucleotide molecules or sequences shown in the respective line in Table I, application no. 18, columns 5 or 8, preferably the coding region thereof, homologs or fragments thereof, such that it can hybridize to one of the nucleotide sequences shown in Table I, application no. 18, columns 5 or 8, preferably the coding region thereof, homologs or fragments thereof, thereby forming a stable duplex. Preferably, the hybridization is performed under stringent hybridization conditions. However, a complement of one of the herein disclosed sequences is preferably a sequence complement thereto according to the base pairing of nucleic acid molecules well known to the skilled person. For example, the bases A and G undergo base pairing with the bases T and U or C, resp. and visa versa. Modifications of the bases can influence the base-pairing partner.

[96258] The nucleic acid molecule of the invention comprises a nucleotide sequence which is at least about 30%, 35%, 40%, 45%, 50%, 55%, 60%, 65%, 70%, 75%, 80%, 90%, 95%, 96%, 97%, 98%, 99%, 99.5% or more homologous to a nucleotide sequence shown in Table I, application no. 18, columns 5 or 8, preferably the coding region thereof, homologs or fragments thereof, and preferably has above-mentioned activity, in particular conferring the production or the increased production of the fine chemical cerotic acid, heneicosanoic acid, lignoceric acid, melissic acid or montanic acid, respectively, after increasing the activity or an activity of a gene as shown in the respective line in Table I or of a gene product, e.g. as shown in the respective line in Table II, application no. 18, column 5 or 8, by for example in one embodiment expression either in the cytosol or in an organelle such as a plastid or mitochondria or both, preferably in a plastid, or in another embodiment non-targeted or targeted.

[96259] The nucleic acid molecule of the invention comprises a nucleotide sequence or molecule which hybridizes, preferably hybridizes under stringent conditions as defined herein, to one of the nucleic acid molecule shown in the respective line in Table I, preferably Table IB, application no. 18, columns 5 or 8, preferably the coding region thereof, fragments or homologs thereof, and encodes a protein having above-mentioned activity, e.g. conferring the production or the increased production of the respective fine chemical cerotic acid, heneicosanoic acid, lignoceric acid, melissic acid or montanic acid as compared to a corresponding, e.g. non-transformed, wild type non-human organism, like a microorganism or a plant cell, plant or part thereof, by for example in one embodiment expression either in the cytosol or in an organelle such as a plastid or mitochondria or both, preferably in a plastid, or in another embodiment non-targeted or targeted, and optionally, the activity thereof is selected from the group consisting of 2,3-dihydroxy-2,3-dihydrophenylpropionatedehydrogenase, ABC metal ion transporter substrate-binding protein, acetyl-coenzyme A synthetase, acetyltransferase, acid shock protein, acyl transferase, agmatinase, aminotransferase, ATP-binding component of a transport system, b1522-protein, b3083-protein, b3644-protein, b3812-protein, b4029-protein, binding-protein-dependent transport systems inner membrane component, calcium-dependent protein kinase, cardiolipin synthase, chaperone protein CIpB, cyclin D, cystathionine gamma-synthase, eukaryotic translation initiation factor 5, geranylgeranyl pyrophosphate synthase, gibberellin 20-oxidase, glutamate-ammonia-ligase, glutaredoxin, glycosyl transferase, heat shock transcription factor, hydrolase, inositol-3-phosphate synthase, isochorismate synthase, leucyl/phenylalanyl-tRNA-protein transferase, major facilitator superfamily transporter protein, malate dehydrogenase, mevalonate kinase, mitochondrial inner membrane protease subunit, monodehydroascorbate reductase, multidrug resistance protein, NADH dehydrogenase subunit N, O-antigen chain length determinant, oxidoreductase, peroxisome assembly protein, potassium transport protein, protein kinase, purine nucleoside phosphorylase, rubredoxin, Sec-independent protein translocase subunit, serine protease, sll0064-protein, slr0383-protein, sodium/proton antiporter, thioredoxin family protein, threonine synthase, tryptophan synthase alpha chain, TTC0768-protein, TTC1386-protein, uroporphyrin-III C-methyltransferase, yer152c-protein, ylr065c-protein, yml093w-protein, and zinc finger protein, respectively.

[96260] Moreover, the nucleic acid molecule of the invention can comprise only a portion of the coding region of one of the nucleic acid molecules depicted in Table I, application no. 18, columns 5 or 8, for example a fragment which can be used as a probe or primer or a fragment encoding a biologically active portion of the polypeptide of the present invention or of a polypeptide used in the process of the present invention, i.e. having above-mentioned activity, e.g. conferring the production or the increased production of the respective fine chemical cerotic acid, heneicosanoic acid, lignoceric acid, melissic acid or montanic acid as compared to a corresponding, e.g. non-transformed, wild type non-human organism, like a microorganism or a plant cell, plant or part thereof, by for example in one embodiment expression either in the cytosol or in an organelle such as a plastid or mitochondria or both, preferably in a plastid, or in another embodiment non-targeted or targeted. The nucleotide sequences determined from the cloning of the present protein-according-to-the-invention-encoding gene allows for the generation of probes and primers designed for use in identifying and/or cloning its homologues from other cell types and organisms. The probe/primer typically comprises a substantially purified oligonucleotide. The oligonucleotide typically comprises a region of nucleotide sequence that hybridizes under stringent conditions to at least about 12, 15 preferably about 20 or 25, more preferably about 40, 50 or 75 consecutive nucleotides of a sense strand of one of the sequences set forth, e.g., in the respective line in Table I, application no. 18, column 5 or 8, preferably the coding region thereof, or a homolog or a fragment thereof, an anti-sense sequence of one of the sequences, e.g., set forth in the respective line in Table I, application no. 18, columns 5 or 8, preferably the coding region thereof, or a homolog or a fragment thereof or naturally occurring mutants thereof. Primers based on a nucleic acid molecule of invention can be used in PCR reactions to clone homologs of the polypeptide of the invention or of the polypeptide used in the process of the invention, e.g. as the primers described in the examples of the present invention, e.g. as shown in the examples. A PCR with the primers shown in the respective line in Table Ill, column 8 will result in a fragment of the gene product as shown in Table II, application no. 18, column 5.

[96261] Primer sets are interchangeable. The person skilled in the art knows how to design and combine said primers to result in the desired product, e.g. in a full length clone or a partial sequence. Probes based on the sequences of the nucleic acid molecule of the invention or used in the process of the present invention can be used to detect transcripts or genomic sequences encoding the same or homologous proteins. The probe can further comprise a label group attached thereto, e.g. the label group can be a radioisotope, a fluorescent compound, an enzyme, or an enzyme co-factor. Such probes can be used as a part of a genomic marker test kit for identifying cells which express a polypeptide of the invention or used in the process of the present invention, such as by measuring a level of an encoding nucleic acid molecule in a sample of cells, e.g. detecting mRNA levels or determining, whether a genomic gene comprising the sequence of the polynucleotide of the invention or used in the processes of the present invention has been mutated or deleted.

[96262] As the expression of a respective nucleic acids of the invention is related to the synthesis of the respective fine chemical cerotic acid, heneicosanoic acid, lignoceric acid, melissic acid or montanic acid its function as a probe extends to the detection of microorganisms, plant tissues, plants, plant variets, plant ecotypes or plant genera with varying capability or potential for synthesis of the respective fine chemical cerotic acid, heneicosanoic acid, lignoceric acid, melissic acid or montanic acid. Therefore in one embodiment the present invention relates to a method for analyzing the capability or potential of a plant tissue, a plant, a plant variety or plant ecotype to produce the fine chemical cerotic acid, heneicosanoic acid, lignoceric acid, melissic acid or montanic acid by using the nucleic acid of the invention or parts thereof as a probe to detect the amount of the nucleic acid of the invention in the non-human organism or a part thereof in comparison to another non-human organism.

[96263] The nucleic acid molecule of the invention encodes a polypeptide or portion thereof which includes an amino acid sequence which is sufficiently homologous to the amino acid sequence shown in respective line in Table II, application no. 18, columns 5 or 8 such that the protein or portion thereof maintains the ability to confer the production or the increased production of the respective fine chemical cerotic acid, heneicosanoic acid, lignoceric acid, melissic acid or montanic acid as compared to a corresponding, e.g. non-transformed, wild type non-human organism, like a microorganism or a plant cell, plant or part thereof, in particular increasing the activity as mentioned above or as described in the examples in microorganisms or plants.

[96264] As used herein, the language “sufficiently homologous” refers to proteins or portions thereof which have amino acid sequences which include a minimum number of identical or equivalent amino acids (e.g. an amino acid which has a similar side chain as an amino acid in one of the sequences of the polypeptide of the present invention) to an amino acid sequence shown in the respective line in Table II, application no. 18, columns 5 or 8 such that the protein or portion thereof is able to confer the production or the increased production of the respective fine chemical cerotic acid, heneicosanoic acid, lignoceric acid, melissic acid or montanic acid as compared to a corresponding, e.g. non-transformed, wild type non-human organism, like a microorganism or a plant cell, plant or part thereof. For example having the activity of a protein as shown in the respective line in Table II, application no. 18, column 3 and as described herein.

[96265] In an embodiment of the present invention, the nucleic acid molecule of the present invention comprises a nucleic acid molecule that encodes a portion of the protein of the present invention. The protein is at least about 30%, 35%, 40%, 45% 50%, 55%, 60%, 65%, 70%, 75%, 80%, 85%, 90%, 91%, 92%, 93%, 94%, 95%, 96%, 97%, 98%, 99%, 99.5% or more homologous to an entire amino acid sequence shown in the respective line of Table II, application no. 18, column 5 or 8 and has the above-mentioned activity, e.g. conferring the production or the increased production of the respective fine chemical cerotic acid, heneicosanoic acid, lignoceric acid, melissic acid or montanic acid as compared to a corresponding, e.g. non-transformed, wild type non-human organism, like a microorganism or a plant cell, plant or part thereof by, for example in a embodiment expression either in the cytosol or in an organelle such as a plastid or mitochondria or both, preferably in a plastid, or in another embodiment by targeted or non-targeted expression.

[96266] for the disclosure of this paragraph see [0338.1.7.7] above

[96267] for the disclosure of this paragraph see [0339.1.7.7] above

[96268] The invention further relates to nucleic acid molecules or methods using said nucleic acid molecules that differ from one of the nucleotide sequences shown in the respective line in Table I, application no. 18, columns 5 or 8, preferably the coding region thereof, or fragments or homologs thereof, due to degeneracy of the genetic code but encode a polypeptide of the present invention, in particular a polypeptide having the above-mentioned activity, e.g. as those polypeptides depicted in the respective line in Table II, application no. 18, columns 5 or 8, fragments or homologs thereof. Advantageously, the nucleic acid molecule of the invention comprises, or in an other embodiment has, a nucleotide sequence encoding a protein comprising, or in an other embodiment having, an amino acid sequence shown in the respective line in Table II, application no. 18, columns 5 or 8, fragments or homologs thereof. In a further embodiment, the nucleic acid molecule of the invention encodes a full length protein which is substantially homologous to an amino acid sequence shown in the respective line in Table II, application no. 18, columns 5 or 8, or homologs thereof. However, in an embodiment, the nucleic acid molecule of the present invention does not consist of the sequence shown in the respective line in Table I, preferably Table IA, application no. 18, columns 5 or 8, preferably the coding region thereof, but the functional homologs thereof.

[96269] [0341.1.7.18] to [0343.1.7.18] for the disclosure of these paragraphs see [0341.1.7.7] to [0343.1.7.7] above

[96270] Accordingly, in another embodiment, a nucleic acid molecule of the invention is at least 15, 20, 25 or 30 nucleotides in length. Preferably, it hybridizes under stringent conditions to a nucleic acid molecule comprising a nucleotide sequence of the nucleic acid molecule of the present invention or used in the process of the present invention, e.g. comprising the sequence shown in the respective line in Table I, application no. 18, columns 5 or 8, preferably the coding region thereof. In another embodiment the nucleic acid molecule is preferably at least 20, 30, 50, 100, 250 or more nucleotides in length.

[96271] for the disclosure of this paragraph see [0345.1.7.7] above

[96272] Preferably, a nucleic acid molecule of the invention that hybridizes under stringent conditions to a sequence shown in the respective line in Table I, application no. 18, columns 5 or 8, preferably the coding region thereof, corresponds to a naturally-occurring nucleic acid molecule of the invention. As used herein, a “naturally-occurring” nucleic acid molecule refers to a RNA or DNA molecule having a nucleotide sequence that occurs in nature (e.g. encodes a natural protein). Preferably, the nucleic acid molecule encodes a natural protein having above-mentioned activity, e.g. conferring the production or the increased production of the respective fine chemical cerotic acid, heneicosanoic acid, lignoceric acid, melissic acid or montanic acid as compared to a corresponding, e.g. non-transformed, wild type non-human organism, like a microorganism or a plant cell, plant or part thereof after increasing the expression or activity thereof or the activity of a protein of the invention or used in the process of the invention, in an embodiment for example expression either in the cytosol or in an organelle such as a plastid or mitochondria, preferably in plastids, or, in another embodiment by targeted or non-targeted expression.

[96273] for the disclosure of this paragraph see [0347.1.7.7] above

[96274] For example, nucleotide substitutions leading to amino acid substitutions at “non-essential” amino acid residues can be made in a sequence of the nucleic acid molecule of the invention or used in the process of the invention, e.g. shown in the respective line in Table I, application no. 18, columns 5 or 8, preferably the coding region thereof, or fragments or homologs thereof.

[96275] for the disclosure of this paragraph see [0349.1.7.7] above

[96276] for the disclosure of this paragraph see [0350.1.7.7] above

[96277] Accordingly, the invention relates to nucleic acid molecules encoding a polypeptide having above-mentioned activity, in a non-human organisms or parts thereof by for example expression either in the cytosol or in an organelle such as a plastid or mitochondria or both, preferably in plastids, that contain changes in amino acid residues that are not essential for said activity. Such polypeptides differ in amino acid sequence from a sequence depicted in the respective line in Table II, especially Table IIA, application no. 18, columns 5 or 8, but retain said activity described herein. The nucleic acid molecule can comprise a nucleotide sequence encoding a polypeptide, wherein the polypeptide comprises an amino acid sequence at least about 50% identical to an amino acid sequence shown in the respective line in Table II, application no. 18, columns 5 or 8, and is capable of conferring the production or the increased production of the respective fine chemical cerotic acid, heneicosanoic acid, lignoceric acid, melissic acid or montanic acid as compared to a corresponding, e.g. non-transformed, wild type non-human organism, like a microorganism or a plant cell, plant or part thereof, after increasing its activity for example in an embodiment by expression either in the cytosol or in an organelle such as a plastid or mitochondria or both, preferably in plastids, or, in another embodiment by targeted or non-targeted expression. Preferably, the protein encoded by the nucleic acid molecule is at least about 60%, 70%, 80%, 90%, 95%, 96%, 97%, 98%, 99% or 99.5% identical to the sequence shown in the respective line in Table II, application no. 18, columns 5 or 8.

[96278] [0352.1.7.18] to [0357.1.7.18] for the disclosure of these paragraphs see [0352.1.7.7] to [0357.1.7.7] above

[96279] Functional equivalents of the nucleic acid molecules according to the present invention and/or used in the process according to the present invention represent an embodiment of homologs. Functional equivalents derived from the nucleic acid molecules as shown in the respective line in Table I, application no. 18, columns 5 or 8, preferably the coding region thereof, according to the invention by substitution, insertion or deletion have at least 30%, 35%, 40%, 45%, 50%, 55%, 60%, 65%, 70%, 75%, 80%, 85%, 90%, 91%, 92%, 93%, 94%, 95%, 96%, 97%, 98%, 99% or 99.5% homology with one of the nucleic acid molecules as shown in the respective line in Table I, application no. 18, columns 5 or 8, preferably the coding region thereof, according to the invention and encode polypeptides having essentially the same properties as the polypeptide as shown in the respective line in Table II, application no. 18, columns 5 or 8.

[96280] Functional equivalents derived from one of the polypeptides as shown in the respective line in Table II, application no. 18, columns 5 or 8 according to the invention by substitution, insertion or deletion have at least 30%, 35%, 40%, 45%, 50%, 55%, 60%, 65%, 70%, 75%, 80%, 85%, 90%, 91%, 92%, 93%, 94%, 95%, 96%, 97%, 98%, 99% or 99.5% homology with one of the polypeptides as shown in the respective line in Table II, application no. 18, columns 5 or 8 according to the invention and having essentially the same properties as the polypeptide as shown in the respective line in Table II, application no. 18, columns 5 or 8.

[96281] for the disclosure of this paragraph see [0359.1.7.7] above

[96282] A nucleic acid molecule encoding a homolog to a polypeptide depicted in the respective line in Table II, application no. 18, columns 5 or 8 can be created by introducing one or more nucleotide substitutions, additions or deletions into the nucleic acid molecule of the present invention, in particular of Table I, application no. 18, columns 5 or 8, in the respective line, such that one or more amino acid substitutions, additions or deletions are introduced into the encoded protein. Mutations can be introduced into the nucleic acid molecules as depicted in the respective line in Table I, application no. 18, columns 5 or 8, preferably the coding region thereof, by standard techniques, such as site-directed mutagenesis, PCR-mediated mutagenesis or other methods known to the person skilled in the art.

[96283] [0361.1.7.18] to [0363.1.7.18] for the disclosure of these paragraphs see [0361.1.7.7] to [0363.1.7.7] above

[96284] Homologues of the nucleic acid sequences used, with the sequences shown in the respective line in Table I, application no. 18, columns 5 or 8, preferably the coding region thereof, comprise also allelic variants with at least approximately 30%, 35%, 40%, 45%, 50%, 55%, 60%, 65%, 70%, 75%, 80%, 85%, 90%, 91%, 92%, 93%, 94% 95%. 96%, 97%, 98%, 99%, 99.5% or more % homology with one of the nucleotide sequences shown or the above-mentioned derived nucleic acid sequences or their homologues or derivatives or parts of these. Allelic variants encompass in particular functional variants which can be obtained by deletion, insertion or substitution of nucleotides from the sequences shown in the respective line, preferably in Table I, columns 5 or 8, preferably the coding region thereof, or from the derived nucleic acid sequences, the intention being, however, that the enzymatic activity or the biological activity of the resulting proteins synthesized is advantageously retained or increased.

[96285] In one embodiment of the present invention, the nucleic acid molecule of the invention or used in the process of the invention comprises the sequences shown in the respective line in any of the Table I, application no. 18, columns 5 or 8, preferably the coding region thereof, fragments or homologs thereof. It is preferred that the nucleic acid molecule comprises as little as possible other nucleotides not shown in the respective line in any one of Table I, application no. 18, columns 5 or 8, preferably the coding region thereof, fragments or homologs thereof. In one embodiment, the nucleic acid molecule comprises less than 500, 400, 300, 200, 100, 90, 80, 70, 60, 50 or 40 further nucleotides. In a further embodiment, the nucleic acid molecule comprises less than 30, 20 or 10 further nucleotides. In one embodiment, the nucleic acid molecule used in the process of the invention is identical to the sequences shown in the respective line in Table I, application no. 18, columns 5 or 8, preferably the coding region thereof.

[96286] Also preferred is that the nucleic acid molecule used in the process of the invention encodes a polypeptide comprising the sequence shown in the respective line in Table II, application no. 18, columns 5 or 8, fragments or homologs thereof. In one embodiment, the nuoleic acid molecule encodes less than 150, 130, 100, 80, 60, 50, 40 or 30 further amino acids.

[96287] In a further embodiment, the encoded polypeptide comprises less than 20, 15, 10, 9, 8, 7, 6 or 5 further amino acids. In one embodiment used in the inventive process, the encoded polypeptide is identical to the sequences shown in the respective line in Table II, application no. 18, columns 5 or 8.

[96288] In one embodiment, the nucleic acid molecule of the invention or used in the process encodes a polypeptide comprising the sequence shown in the respective line in Table II, application no. 18, columns 5 or 8, or fragments or homologs thereof, and comprises less than 100 further nucleotides. In a further embodiment, said nucleic acid molecule comprises less than 30 further nucleotides. In one embodiment, the nucleic acid molecule used in the process is identical to a coding sequence of the sequences shown in the respective line in Table I, application no. 18, columns 5 or 8.

[96289] Polypeptides (=proteins), which still have the essential biological or enzymatic activity of the polypeptide of the present invention conferring the production or the increased production of the respective fine chemical cerotic acid, heneicosanoic acid, lignoceric acid, melissic acid or montanic acid as compared to a corresponding, e.g. non-transformed, wild type non-human organism, like a microorganism or a plant cell, plant or part thereof, i.e. whose activity is essentially not reduced, are polypeptides with at least 10%, 20%, 30%, 40%, 50%, 60%, 70%, 80%, 90%, 95% or more of the wild type biological activity or enzymatic activity, advantageously, the activity is essentially not reduced in comparison with the activity of a polypeptide shown in the respective line in Table II, application no. 18, columns 5 or 8 expressed under identical conditions.

[96290] Homologues of nucleic acid molecules shown in the respective line in Table I, application no. 18, columns 5 or 8, preferably the coding region thereof, or fragments thereof, or of the derived sequences shown in the respective line in Table II, application no. 18, columns 5 or 8, or fragments thereof, also mean truncated sequences, cDNA, single-stranded DNA or RNA of the coding and noncoding DNA sequence. Homologues of said sequences are also understood as meaning derivatives, which comprise noncoding regions such as, for example,

[96291] UTRs, introns, terminators, enhancers or promoter variants. The promoters upstream of the nucleotide sequences stated can be modified by one or more nucleotide substitution(s), insertion(s) and/or deletion(s) without, however, interfering with the functionality or activity either of the promoters, the open reading frame (=ORF) or with the 3′-regulatory region such as terminators or other 3′-regulatory regions, which are far away from the ORF. It is furthermore possible that the activity of the promoters is increased by modification of their sequence, or that they are replaced completely by more active promoters, even promoters from heterologous organisms. Appropriate promoters are known to the person skilled in the art and are mentioned herein below.

[96292] [0370.1.7.18] to [0379.1.7.18] for the disclosure of these paragraphs see [0370.1.7.7] to [0379.1.7.7] above

[96293] Moreover, a native polypeptide conferring the increase of the respective fine chemical cerotic acid, heneicosanoic acid, lignoceric acid, melissic acid or montanic acid in a non-human organism or a part thereof can be isolated from cells (e.g., endothelial cells), for example using the antibody of the present invention as described below, in particular, an antibody against proteins having 2,3-dihydroxy-2,3-dihydrophenylpropionatedehydrogenase, ABC metal ion transporter substrate-binding protein, acetyl-coenzyme A synthetase, acetyltransferase, acid shock protein, acyl transferase, agmatinase, aminotransferase, ATP-binding component of a transport system, b1522-protein, b3083-protein, b3644-protein, b3812-protein, b4029-protein, binding-protein-dependent transport systems inner membrane component, calcium-dependent protein kinase, cardiolipin synthase, chaperone protein CIpB, cyclin D, cystathionine gamma-synthase, eukaryotic translation initiation factor 5, geranylgeranyl pyrophosphate synthase, gibberellin 20-oxidase, glutamate-ammonia-ligase, glutaredoxin, glycosyl transferase, heat shock transcription factor, hydrolase, inositol-3-phosphate synthase, isochorismate synthase, leucyl/phenylalanyl-tRNA-protein transferase, major facilitator superfamily transporter protein, malate dehydrogenase, mevalonate kinase, mitochondrial inner membrane protease subunit, monodehydroascorbate reductase, multidrug resistance protein, NADH dehydrogenase subunit N, O-antigen chain length determinant, oxidoreductase, peroxisome assembly protein, potassium transport protein, protein kinase, purine nucleoside phosphorylase, rubredoxin, Sec-independent protein translocase subunit, serine protease, sll0064-protein, slr0383-protein, sodium/proton antiporter, thioredoxin family protein, threonine synthase, tryptophan synthase alpha chain, TTC0768-protein, TTC1386-protein, uroporphyrin-III C-methyltransferase, yer152c-protein, ylr065c-protein, yml093w-protein, or zinc finger protein activity, respectively, or an antibody against polypeptides as shown in the respective line in Table II, application no. 18, columns 5 or 8, or fragments or homologs thereof which can be produced by standard techniques utilizing the polypeptid of the present invention or fragment thereof, i.e., the polypeptide of this invention (FCRP). Preferred are monoclonal antibodies.

[96294] for the disclosure of this paragraph see [0381.1.7.7] above

[96295] In one embodiment, the present invention relates to a polypeptide as depicted in the respective line in Table II, especially in Table IIA or especially in Table IIB, application no. 18, columns 5 or 8, or fragment or homolog thereof or as coded by the nucleic acid molecule shown in the respective line in Table I, especially Table IA or especially Table IB, application no. 18, columns 5 or 8, preferably the coding region thereof, or fragment or homolog thereof.

[96296] In an embodiment, the present invention relates to a polypeptide comprising or consisting of a consensus sequence shown in the respective line in Table IV, application no. 18, column 8 or at least one polypeptide motif shown in the respective line in Table IV, application no. 18, column 8.

[96297] In an embodiment thereof, the present invention relates to a polypeptide comprising or consisting of a consensus sequence shown in the respective line in Table IV, application no. 18, column 8 or comprising at least one polypeptide motif shown in the respective line in Table IV, application no. 18, column 8, whereby not more than 20, 15, 10, 9, 8, 7, 6, 5, 4, 3, 2, or 1, or 0 of the amino acids can be replaced by any amino acid.

[96298] In another embodiment thereof, the present invention relates to a polypeptide comprising or consisting of a consensus sequence shown in the respective line in Table IV, application no. 18, column 8 or comprising at least one polypeptide motif shown in the respective line in Table IV, application no. 18, column 8, whereby not more than 15%, 10%, 5%, 4%, 3%, 2% orl% or 0% of the amino acids defined as distinct specific amino acids are/is replaced by another amino acid.

[96299] In another embodiment thereof, the present invention relates to a polypeptide comprising or consisting of a consensus sequence shown in the respective line in Table IV, application no. 18, column 8 or comprising at least one polypeptide motif shown in the respective line in Table IV, application no. 18, column 8, whereby not more than 20, 15, 10, 9, 8, 7, 6, 5, 4, 3, 2, or 1, or 0 amino acids are inserted into the consensus sequence or polypeptide motif.

[96300] In an embodiment of the present invention, the polypeptide of the present invention comprises or consists of a consensus sequence or at least one polypeptide motif shown in the respective line in Table IV, application no. 18, column 8, whereby said polypeptide distinguishes over the sequence depicted in the respective line in Table II, application no. 18, columns 5 or 8 by one or more amino acids. In one embodiment, said polypeptide of the invention distinguishes over the sequence shown in the respective line in Table II, application no. 18, columns 5 and 8 by more than 5, 6, 7, 8 or 9 amino acids, preferably by more than 10, 15, 20, 25 or 30 amino acids, even more preferred are more than 40, 50, or 60 amino acids and, preferably, the sequence of the polypeptide of the invention distinguishes from the sequence shown in the respective line in Table II, application no. 18, columns 5 and 8 by not more than 80%, 70%, 60%, 50%, 40%, 30%, 20%, 10%, 5%, 4%, 3%, 2%, 1% or 0.5%. In another embodiment, said polypeptide of the invention does not consist of the sequence shown in the respective line in Table II, application no. 18, columns 5 and 8.

[96301] In an embodiment, the invention relates to a polypeptide conferring an increase in the respective fine chemical cerotic acid, heneicosanoic acid, lignoceric acid, melissic acid or montanic acid in a non-human organism, especially a microorganism or a plant, or a part thereof, being encoded by the nucleic acid molecule of the invention or used in the process of the invention and having a sequence which distinguishes over the sequence as shown in the respective line in Table II, application no. 18, columns 5 or 8 by one or more amino acids (but not exceeding 5%, preferably 4%, 3%, 2%, 1%, 0.5%, 0.2% or 0.1%). In an embodiment, said polypeptide of the invention does not comprise or consist of the sequence shown in the respective line in Table II, application no. 18, columns 5 or 8. In an embodiment, said polypeptide of the present invention is less than 100%, 99.999%, 99.99%, 99.9% or 99% identical. In one embodiment, said polypeptide which differs at least in one or more amino acids (but not exceeding 5%, preferably 4%, 3%, 2%, 1%, 0.5%, 0.2% or 0.1%) from the polypeptide shown in the respective line in Table II, application no. 18, columns 5 and 8 does not comprise a protein of the sequence shown in the respective line in Table II A and/or II B, application no. 18, columns 5 or 8.

[96302] In an embodiment, the present invention relates to a polypeptide having the activity of the protein as shown in the respective line in Table II, application no. 18, column 3, which distinguishes over the sequence depicted in the respective line in Table II, application no. 18, columns 5 or 8 by one or more amino acids, preferably by more than 5, 6, 7, 8 or 9 amino acids, preferably by more than 10, 15, 20, 25 or 30 amino acids, even more preferred are more than 40, 50, or 60 amino acids and, preferably, the sequence of the polypeptide of the invention distinguishes from the sequence shown in the respective line in Table II, application no. 18, columns 5 and 8 by not more than 80%, 70%, 60%, 50%, 40%, 30%, 20%, 10%, 5%, 4%, 3%, 2%, 1% or 0.5%.

[96303] In another embodiment the polypeptide of the invention takes the form of a preprotein consisting of a plastidial or mitochondrial transit peptide joint to a polypeptide having the activity of the protein as shown in Table II, column 3, from which the transit peptide is preferably cleaved off upon transport of the preprotein into the organelle for example into the plastid or mitochondrion.

[96304] In another embodiment the polypeptide of the invention takes not the form of a preprotein.

[96305] for the disclosure of this paragraph see [0390.1.7.7] above

[96306] for the disclosure of this paragraph see [0391.1.7.7] above

[96307] A polypeptide of the invention can participate in the process of the present invention. The polypeptide or a portion thereof comprises preferably an amino acid sequence, which is sufficiently homologous to an amino acid sequence shown in the respective line in Table II A and/or II B, application no. 18, columns 5 or 8.

[96308] Further, the polypeptide can have an amino acid sequence which is encoded by a nucleotide sequence which hybridizes, preferably hybridizes under stringent conditions as described above, to a nucleotide sequence of the nucleic acid molecule of the present invention. Accordingly, the polypeptide has an amino acid sequence which is encoded by a nucleotide sequence that is at least about 35%, 40%, 45%, 50%, 55%, 60%, 65%, 70%, 75%, 80%, 85%, 90%, 91%, 92%, 93%, 94%, 95%, 96%, 97%, 98%, 99%, 99.5% or more homologous to one of the amino acid sequences as shown in the respective line in Table II A and/or II B, application no. 18, columns 5 or 8, or fragments thereof. The preferred polypeptide of the present invention preferably possesses at least one of the activities according to the invention and described herein. A preferred polypeptide of the present invention includes an amino acid sequence encoded by a nucleotide sequence which hybridizes, preferably hybridizes under stringent conditions, to a nucleotide sequence shown in the respective line in Table I A and/or I B, application no. 18, columns 5 or 8, preferably the coding region thereof, or fragments thereto or which is homologous thereto, as defined above

[96309] The polypeptide of the present invention can vary from the sequences shown in the respective line in Table II A and/or II B, application no. 18, columns 5 or 8 in amino acid sequence due to natural variation or mutagenesis, as described in detail herein. Accordingly, the polypeptide comprise an amino acid sequence which is at least about 35%, 40%, 45%, 50%, 55%, 60%, 65%, 70%, 75%, 80%, 85% or 90, 91%, 92%, 93%, 94%, 95%, 96%, 97%, 98%, 99%, 99.5% or more homologous to an entire amino acid sequence shown in the respective line in Table II A and/or II B, application no. 18, columns 5 or 8.

[96310] Biologically active portions of a polypeptide of the present invention include peptides comprising amino acid sequences derived from the amino acid sequence of the polypeptide of the present invention or used in the process of the present invention, e.g., the amino acid sequence shown in the respective line in Table II, application no. 18, columns 5 or 8 or the amino acid sequence of a protein homologous thereto, which include fewer amino acids than a full length polypeptide of the present invention or used in the process of the present invention or the full length protein which is homologous to a polypeptide of the present invention or used in the process of the present invention depicted herein, and exhibit at least one activity of a polypeptide of the present invention or used in the process of the present invention.

[96311] for the disclosure of this paragraph see [0396.1.7.7] above

[96312] Manipulation of the nucleic acid molecule of the invention may result in the production of a protein having differences from the protein as shown in the respective line in Table II, application no. 18, column 5 or 8. Differences shall mean at least one amino acid different from the sequences as shown in the respective line in Table II, application no. 18, column 5 or 8, preferably at least 2, 3, 4, 5, 6, 7, 8, 9 or 10 amino acids (especially but not exceeding 0.1%, preferably 0.2%, 0.5%, 1%, 2%, 3% 4% or 5%), more preferably at least 15, 20, 25, 30, 35, 40, 45 or 50 amino acids (especially but not exceeding 0.5%, preferably 1%, 2%, 3% 4%, 5%, 10% or 25%) different from the sequences as shown in the respective line in Table II, application no. 18, column 5 or 8. These proteins may be improved in efficiency or activity, or may be more stable and therefore present in greater numbers in the cell as compared to the wild-type cell.

[96313] Any mutagenesis strategies for the polypeptide of the present invention or the polypeptide used in the process of the present invention to result in increasing said activity are not meant to be limiting; variations on these strategies will be readily apparent to one skilled in the art. Using such strategies, and incorporating the mechanisms disclosed herein, the nucleic acid molecule and polypeptide of the invention may be utilized to generate algae, ciliates, fungi, other microorganisms like C. glutamicum or plants or parts thereof, expressing proteins as shown in the respective line in Table II, application no. 18, column 5 or 8, or mutated proteins thereof. The nucleic acid molecules and polypeptide molecules of the invention are expressed such that the yield, production, and/or efficiency of production of a desired compound is improved.

[96314] [0399.1.7.18] to [0401.1.7.18] for the disclosure of these paragraphs see [0399.1.7.7] to [0401.1.7.7] above

[96315] In one embodiment, a protein (=polypeptide) as shown in the respective line in Table II, application no. 18, column 5 or 8 refers to a polypeptide having an amino acid sequence corresponding to the polypeptide of the invention, especially to a polypeptide as shown in Table II, application no. 18, columns 5 or 8 or homologs thereof, or used in the process of the invention, whereas a “non- inventive protein or polypeptide” or “other polypeptide” refers to a polypeptide having an amino acid sequence corresponding to a protein which is not substantially homologous to a polypeptide of the invention, preferably which is not substantially homologous to a polypeptide or protein as shown in the respective line in Table II, application no. 18, column 5 or 8 or homologs thereof, e.g., a protein which does not confer the activity described herein and which is derived from the same or a different organism.

[96316] [0403.1.7.18] to [0409.1.7.18] for the disclosure of these paragraphs see [0403.1.7.7] to [0409.1.7.7] above

[96317] As the nucleic acid molecules of the invention and/or the expression thereof is related to the synthesis of the respective fine chemical cerotic acid, heneicosanoic acid, lignoceric acid, melissic acid or montanic acid its function as a probe extends to the detection of microorganisms, plant tissues, plants, plant variets, plant ecotypes or plant genera with varying, advantageously increased, capability or potential for synthesis of the respective fine chemical cerotic acid, heneicosanoic acid, lignoceric acid, melissic acid or montanic acid. Therefore in one embodiment the present invention relates to a method for analyzing the capability or potential of a plant tissue, a plant, a plant variety or ecotype to produce the respective fine chemical cerotic acid, heneicosanoic acid, lignoceric acid, melissic acid or montanic acid by using the respective antibody of the invention as a probe to detect the amount of the polypeptide encoded by said nucleic acid molecule of the invention in a non-human organism in comparison to another organism.

[96318] Therefore in one embodiment the invention relates to a method to probe a non-human organism for its capability for the production of the respective fine chemical comprising the steps of
[96319] a) analyzing the sequence and/or the expression of the respective nucleic acid molecule of the invention in least two non-human organisms which differ in the capability to produce the respective fine chemical;
[96320] b) associate the different sequence and/or expression level of the nucleic acid molecules of the invention with their different capability to produce the respective fine chemical;
[96321] c) analyze the sequence and/or the expression of the nucleic acid molecule of the invention in at least a third non-human organism;
[96322] d) predict the capability of the at least third organism to produce the respective fine chemical based by comparing the sequence and/or expression of the nucleic acid of the invention to the sequences and/or expression levels of the nucleic acid molecule of the invention of the at least two organisms analyzed in step a.

[96323] [0411.1.7.18] to [0430.1.7.18] for the disclosure of these paragraphs see [0411.1.7.7] to [0430.1.7.7] above

[96324] Accordingly the present invention relates to any cell transgenic for any nucleic acid characterized as part of the invention, e.g. conferring the increase of the respective fine chemical cerotic acid, heneicosanoic acid, lignoceric acid, melissic acid or montanic acid in a cell or a non-human organism or a part thereof, e.g. the nucleic acid molecule of the invention, the nucleic acid construct of the invention, the vector of the invention, the expression cassette according to the invention, or a nucleic acid molecule encoding the polypeptide of the invention, e.g. encoding a polypeptide having an activity as the protein as shown in the respective line in Table II, application no. 18, column 3. Due to the above-mentioned activity the respective fine chemical cerotic acid, heneicosanoic acid, lignoceric acid, melissic acid or montanic acid content in a cell or a non-human organism is increased. For example, due to modulation or manipulation, the cellular activity is increased, in a preferred embodiment in organelles such as plastids or mitochondria, e.g. due to an increased expression or specific activity or specific targeting of the subject matters of the invention in a cell or a non-human organism or a part thereof especially in organelles such as plastids or mitochondria, or in another embodiment in the cytosol. Transgenic for a polypeptide having a protein or a protein activity means herein that due to modulation or manipulation of the genome, the activity of protein as shown in the respective line in Table II, application no. 18, column 3 or a protein as shown in the respective line in Table II, application no. 18, column 3-like activity is increased in the cell or non-human organism or part thereof, especially in organelles such as plastids or mitochondria, or especially in the cytosol.

[96325] Examples are described above in context with the process of the invention.

[96326] for the disclosure of this paragraph see [0432.1.7.7] above

[96327] A naturally occurring expression cassette—for example the naturally occurring combination of the promoter of the gene encoding a protein as shown in the respective line in Table II, application no. 18, column 5 or 8, preferably the coding region thereof, or fragments or homologs thereof with the corresponding encoding gene—becomes a transgenic expression cassette when it is modified by non-natural, synthetic “artificial” methods such as, for example, mutagenesis. Such methods have been described (U.S. Pat. No. 5,565,350; WO 00/15815; also see above).

[96328] for the disclosure of this paragraph see [0434.1.7.7] above

[96329] for the disclosure of this paragraph see [0435.1.7.7] above

[96330] Transgenic plants comprising the respective fine chemical(s) synthesized in the process according to the invention can be marketed directly without isolation of the fine chemical synthesized. In the process according to the invention, plants are understood as meaning all plant parts, plant organs such as leaf, stalk, root, tubers or seeds or propagation material or harvested material or the intact plant. In this context, the seed encompasses all parts of the seed such as the seed coats, epidermal cells, seed cells, endosperm or embryonic tissue. The fine chemical produced in the process according to the invention may, however, also be isolated from the plant. In case of cerotic acid, heneicosanoic acid, lignoceric acid, melissic acid or montanic acid this can be in free form or bound to proteins. Fine chemical(s) produced by this process can be harvested by harvesting the non-human organisms either from the culture in which they grow or from the field. For example, this can be done via squeezing, grinding and/or extraction, salt precipitation and/or ion-exchange chromatography of the plant parts, preferably the plant seeds, plant fruits, plant tubers and the like.

[96331] [0437.1.7.18] to [0447.1.7.18] for the disclosure of these paragraphs see [0437.1.7.7] to [0447.1.7.7] above

[96332] The identity and purity of the isolated compound(s) can be determined by prior art techniques. These include high performance liquid chromatography (HPLC), spectroscopic methods, mass spectrometry (MS), staining methods, thin-layer chromatography, NIRS, enzyme assay or microbiological assays. These analytical methods are summarized for example in: Patek et al., Appl. Environ. Microbiol. 60, 133 (1994), Malakhova et al., Biotekhnologiya 11, 27 (1996); Schmidt et al., Bioprocess Engineer. 19, 67 (1998), Ullmann's Encyclopedia of Industrial Chemistry (1996) Vol. A27, VCH, Weinheim, pp. 89-90, pp. 521-540, pp. 540-547, pp. 559-566, 575-581 and pp. 581-587, Michal G., “Biochemical Pathways: An Atlas of Biochemistry and Molecular Biology”, John Wiley and Sons (1999); Fallon A. et al. “Applications of HPLC in Biochemistry” in “Laboratory Techniques in Biochemistry and Molecular Biology”, Vol. 17 (1987).

[96333] The fine chemical obtained in the process are suitable as starting material for the synthesis of further products of value.

[96334] Accordingly, the present invention relates a method for the production of a pharmaceuticals, food stuff, animal feeds, nutrients or cosmetics comprising the steps of the process according to the invention, including the isolation of the fine chemical produced or a composition produced comprising the fine chemical, and, if desired, formulating the product with a pharmaceutical acceptable carrier or formulating the product in a form acceptable for an application in agriculture or formulating the product in a form acceptable for an application as food stuff, animal feed, nutrient or cosmetic. A further embodiment according to the invention is the use of the fine chemical produced in the process or of the transgenic non-human organisms in animal feeds, foodstuffs, medicines, food supplements, cosmetics or pharmaceuticals.

[96335] [0450.1.7.18] to [0452.1.7.18] for the disclosure of these paragraphs see [0450.1.7.7] to [0452.1.7.7] above

[96336] Further in another embodiment, the present invention relates to the use of the nucleic acid molecule of the invention or used in the method of the invention alone or in combination with other genes of the respective fine chemical synthesis for example of the VLCFA biosynthesis, the polypeptide of the invention or used in the method of the invention, the nucleic acid construct of the invention, the expression cassette of the invention, the vector of the invention, the plant or plant tissue or the host cell of the invention, for the production of plant resistant to a herbicide inhibiting eventually the production of the fine chemical.

[96337] for the disclosure of this paragraph see [0454.1.7.7] above

[96338] In one embodiment, the present invention relates to a method for the identification of a gene product conferring the production of or an increase in the fine chemical production in a non-human cell, comprising the following steps:
[96339] (a) contacting, e.g. hybridizing, a, some or all nucleic acid molecules of a sample, e.g. cells, tissues, plants or microorganisms or a nucleic acid library, which can contain a candidate gene encoding a gene product conferring the production of or an increase in the fine chemical after expression, with the nucleic acid molecule of the present invention as shown in the respective line in column 5 or 8 of Table I A or B of application no. 18, preferably the coding region thereof, or a fragment or homolog thereof;
[96340] (b) identifying the nucleic acid molecules, which hybridize under relaxed stringent conditions with the nucleic acid molecule of the present invention in particular to the nucleic acid molecule sequence shown in the respective line in Table I, application no. 18, columns 5 or 8, preferably the coding region thereof, of a fragment or a homolog thereof, preferably in Table I B, application no. 18, columns 5 or 8, preferably the coding region thereof, of a fragment or a homolog thereof, and, optionally, isolating the full length cDNA clone or complete genomic clone;
[96341] (c) introducing the candidate nucleic acid molecules or a fragment thereof in host cells, preferably in a plant cell or a microorganism, appropriate for producing the fine chemical;
[96342] (d) expressing the identified nucleic acid molecules in the host cells for which the production of or the increased production of the fine chemical is desired;
[96343] (e) assaying the fine chemical level in the non-human host cells; and
[96344] (f) identifying the nucleic acid molecule and/or its gene product which expression confers the production of or an increase in the fine chemical level in the non-human host cell after expression compared to the wild type.

[96345] for the disclosure of this paragraph see [0456.1.7.7] above

[96346] In another embodiment, the present invention relates to a method for the identification of a gene product conferring the production of or an increase in the fine chemical production in a cell, comprising the following steps:
[96347] (a) identifying a nucleic acid molecule of a non-human organism, which is at least 20%, 25%, 30%, 35%, 40%, 50%, 60%, 70%, 80%, 90%, 95%, 96%, 97%, 98%, 99%, 99.5% or more homolog to the nucleic acid molecule encoding a polypeptide comprising the polypeptide molecule as shown in the respective line in column 5 or 8 of Table II, application no. 18, or comprising a consensus sequence or a polypeptide motif as shown in the respective line in column 8 of Table IV, application no. 18, or being encoded by a nucleic acid molecule comprising a polynucleotide as shown in the respective line in column 5 or 8 of Table I, application no. 18, preferably the coding region thereof, or a homologue thereof as described herein, for example via homology search in a data bank;
[96348] (b) introducing the candidate nucleic acid molecule in non-human host cells, preferably in a plant cell or a microorganism, appropriate for producing the fine chemical;
[96349] (c) expressing the identified nucleic acid molecule in the non-human host cells;
[96350] (d) assaying the fine chemical level in the non-human host cells; and
[96351] (e) identifying the nucleic acid molecule and its gene product which expression confers the production of or an increase in the fine chemical level in the non-human host cell after expression compared to the wild type.

[96352] for the disclosure of this paragraph see [0458.1.7.7] above

[96353] Further, the nucleic acid molecules disclosed herein, in particular the nucleic acid molecules shown in the respective line in column 5 or 8 of Table I A or B of application no. 18, may be sufficiently homologous to the sequences of related species such that these nucleic acid molecules may serve as markers for the construction of a genomic map in related organism or for association mapping. Furthermore natural variation in the genomic regions corresponding to nucleic acids disclosed herein, in particular the nucleic acid molecule shown in the respective line in column 5 or 8 of Table I A or B, of application no. 18 or homologous thereof, may lead to variation in the activity of the proteins disclosed herein, in particular the proteins comprising polypeptides as shown in the respective lines in column 5 or 8 of Table II A or B, of application no. 18 or their homologous, or comprising the consensus sequence or the polypeptide motif as shown in the respective line in column 8 of Table IV, and in consequence in a natural variation of an increased fine chemical production.

[96354] In consequence natural variation eventually also exists in form of more active allelic variants leading already to a relative increase in the fine chemical. Different variants of the nucleic acid molecules disclosed herein, in particular the nucleic acid molecules comprising the nucleic acid molecules as shown in the respective line in column 5 or 8 of Table I A or B of application no. 18, preferably the coding region thereof, which corresponds to different levels of increase in fine chemical, e.g. different levels of increase in fine chemical, can be indentified and used for marker assisted breeding for an enhanced production of the fine chemical.

[96355] Natural variation may also exist in the regulatory regions, e.g. the promoters of the natural genes comprising the nucleic acid molecules as shown in the respective line column 5 or 8 of Table I A or B of application no. 18, preferably the coding region thereof, which can similarly correspond to different levels of increase in the fine chemical, e.g. different levels of increase in the fine chemical can be identified and used for marker assisted breeding for an enhanced production of the fine chemical.

[96356] Accordingly, the present invention relates to a method for breeding plants for the production of the fine chemical, comprising
[96357] (a) selecting a first plant variety with an increased production of the fine chemical, e.g. based on an increased expression of a nucleic acid molecule of the invention as disclosed herein, in particular of a nucleic acid molecule comprising a nucleic acid molecule as shown in the respective line in column 5 or 8 of Table I A or B of application no. 18, preferably the coding region thereof, or fragments or homologs thereof, or a polypeptide comprising a polypeptide as shown in the respective line in column 5 or 8 of Table II A or B of application no. 18, or fragments or homologs thereof, or comprising a consensus sequence or a polypeptide motif as shown in the respective line in column 8 of Table IV, or a homolog thereof, as described herein;
[96358] (b) associating the level of increased production of the fine chemical, with the expression level or the genomic structure of a gene encoding said polypeptide or said nucleic acid molecule;
[96359] (c) crossing the first plant variety with a second plant variety, which significantly differs in its level of fine chemical; and
[96360] (d) identifying, which of the offspring varieties has got increased production of the fine chemical by the expression level of said polypeptide or nucleic acid molecule or the genomic structure of the gene(s) encoding said polypeptide or nucleic acid molecule of the invention.

[96361] [0462.1.7.18] to [0479.1.7.18] for the disclosure of these paragraphs see [0462.1.7.7] to [0479.1.7.7] above

[96362] In a further embodiment the nucleic acid molecule of the invention, the polypeptide of the invention, the nucleic acid construct of the invention, the expression cassette of the invention, the non-human organisms, the non-human host cell, the microorganisms, the plant, plant cell, or the part thereof, of the invention, the vector of the invention, the agonist identified with the method of the invention, the nucleic acid molecule identified with the method of the present invention, can be used for the production of the fine chemical or of the fine chemical and one or more other waxes and/or VLCFA.

[96363] Accordingly, the nucleic acid molecule of the invention, or the nucleic acid molecule identified with the method of the present invention or the complement sequences thereof, the polypeptide of the invention, the nucleic acid construct of the invention, the expression cassette of the invention, the non-human organism, the non-human host cell, the microorganism, the plant, plant cell, or the part thereof of the invention, the vector of the invention, the agonist identified with the method of the invention, the antibody of the present invention, can be used for the production of or the increase in the fine chemical in a non-human organism or part thereof, e.g. in a cell.

[96364] for the disclosure of this paragraph see [0481.1.7.7] above

[96365] for the disclosure of this paragraph see [0482.1.7.7] above

[96366] A special embodiment of this invention is related to genes which increase or generate the production of the fine chemical cerotic acid, heneicosanoic acid, lignoceric acid, melissic acid and/or montanic acid in plant cells, plants or part thereof. Phenotypes thereto are associated with yield of plants (=yield related phenotypes). In accordance with the invention, therefore, the respective genes identified in Table I, wherein in column 7 cerotic acid, heneicosanoic acid, lignoceric acid, melissic acid and/or montanic acid are mentioned, especially the coding region thereof, or homologs or fragments thereof,may be employed to enhance any yield-related phenotype. Increased yield may be determined in field trials of transgenic plants and suitable control plants. Alternatively, a transgene's ability to increase yield may be determined in a model plant. An increased yield phenotype may be determined in the field test or in a model plant by measuring any one or any combination of the following phenotypes, in comparison to a control plant: yield of dry harvestable parts of the plant, yield of dry aerial harvestable parts of the plant, yield of underground dry harvestable parts of the plant, yield of fresh weight harvestable parts of the plant, yield of aerial fresh weight harvestable parts of the plant yield of underground fresh weight harvestable parts of the plant, yield of the plant's fruit (both fresh and dried), grain dry weight, yield of seeds (both fresh and dry), and the like.

[96367] The most basic yield-related phenotype is increased yield associated with the presence of the gene or a homolog or a fragment thereof as a transgene in the plant, i.e., the intrinsic yield of the plant. Intrinsic yield capacity of a plant can be, for example, manifested in a field test or in a model system by demonstrating an improvement of seed yield (e.g. in terms of increased seed/grain size, increased ear number, increased seed number per ear, improvement of seed filling, improvement of seed composition, embryo and/or endosperm improvements, and the like); modification and improvement of inherent growth and development mechanisms of a plant (such as plant height, plant growth rate, pod number, pod position on the plant, number of internodes, incidence of pod shatter, efficiency of nodulation and nitrogen fixation, efficiency of carbon assimilation, improvement of seedling vigour/early vigour, enhanced efficiency of germination (under non-stressed conditions), improvement in plant architecture.

[96368] Increased yield-related phenotypes may also be measured to determine tolerance to abiotic environmental stress. Abiotic stresses include drought, low temperature, salinity, osmotic stress, shade, high plant density, mechanical stresses, and oxidative stress, and yield-related phenotypes are encompassed by tolerance to such abiotic stresses. Additional phenotypes that can be monitored to determine enhanced tolerance to abiotic environmental stress include, without limitation, wilting; leaf browning; loss of turgor, which results in drooping of leaves or needles stems, and flowers; drooping and/or shedding of leaves or needles; the leaves are green but leaf angled slightly toward the ground compared with controls; leaf blades begun to fold (curl) inward; premature senescence of leaves or needles; loss of chlorophyll in leaves or needles and/or yellowing. Any of the yield-related phenotypes described above may be monitored in field tests or in model plants to demonstrate that a transgenic plant has increased tolerance to abiotic environmental stress. In accordance with the invention, the respective genes identified in Table 1, in case in column 7 cerotic acid, heneicosanoic acid, lignoceric acid, melissic acid and/or montanic acid is indicated, especially the coding region thereof, or homologs or fragments thereof, may be employed to enhance tolerance to abiotic environmental stress in a plant means that the plant, when confronted with abiotic environmental stress.

[96369] A polypeptide conferring an yield-increasing activity can be encoded by a respective nucleic acid sequence as shown in Table I, column 5 or 8, and/or comprises or consists of a respective polypeptide as depicted in Table II, column 5 and 8, and/or can be amplified with the respective primer set shown in Table III, column 8, in case in column 7 cerotic acid, heneicosanoic acid, lignoceric acid, melissic acid and/or montanic acid is indicated.

[96370] “Improved adaptation” to environmental stress like e.g. freezing and/or chilling temperatures refers to an improved plant performance under environmental stress conditions.

[96371] A modification, i.e. an increase, can be caused by endogenous or exogenous factors. For example, an increase in activity in an organism or a part thereof can be caused by adding a gene product or a precursor or an activator or an agonist to the media or nutrition or can be caused by introducing said subjects into an organism, transient or stable. Furthermore such an increase can be reached by the introduction of the respective inventive nucleic acid sequence or the encoded protein in the correct cell compartment for example into the nucleus or cytoplasmic respectively or into plastids either by transformation and/or targeting.

[96372] The term “yield” as used herein generally refers to a measurable produce from a plant, particularly a crop. Yield and yield increase (in comparison to a non-transformed starting or wild-type plant) can be measured in a number of ways, and it is understood that a skilled person will be able to apply the correct meaning in view of the particular embodiments, the particular crop concerned and the specific purpose or application concerned. The terms “improved yield” or “increased yield” can be used interchangeable.

[96373] As used herein, the term “improved yield” or the term “increased yield” means any improvement in the yield of any measured plant product, such as grain, fruit or fiber. In accordance with the invention, changes in different phenotypic traits may improve yield. For example, and without limitation, parameters such as floral organ development, root initiation, root biomass, seed number, seed weight, harvest index, tolerance to abiotic environmental stress, leaf formation, phototropism, apical dominance, and fruit development, are suitable measurements of improved yield. Any increase in yield is an improved yield in accordance with the invention. For example, the improvement in yield can comprise a 0.1%, 0.5%, 1%, 3%, 5%, 10%, 15%, 20%, 30%, 40%, 50%, 60%, 70%, 80%, 90% or greater increase in any measured parameter. For example, an increase in the bushel/acre yield of soybeans or corn derived from a crop comprising plants which are transgenic for the nucleotides and polypeptides of Table I, in case in column 7 cerotic acid, heneicosanoic acid, lignoceric acid, melissic acid and/or montanic acid is mentioned, as compared with the bushel/acre yield from untreated soybeans or corn cultivated under the same conditions, is an improved yield in accordance with the invention. The increased or improved yield can be achieved in the absence or presence of stress conditions.

[96374] For example, enhanced or increased “yield” refers to one or more yield parameters selected from the group consisting of biomass yield, dry biomass yield, aerial dry biomass yield, underground dry biomass yield, fresh-weight biomass yield, aerial fresh-weight biomass yield, underground fresh-weight biomass yield; enhanced yield of harvestable parts, either dry or fresh-weight or both, either aerial or underground or both; enhanced yield of crop fruit, either dry or fresh-weight or both, either aerial or underground or both; and preferably enhanced yield of seeds, either dry or fresh-weight or both, either aerial or underground or both.

[96375] Crop yield is defined herein as the number of bushels of relevant agricultural product (such as grain, forage, or seed) harvested per acre. Crop yield is impacted by abiotic stresses, such as drought, heat, salinity, and cold stress, and by the size (biomass) of the plant. Traditional plant breeding strategies are relatively slow and have in general not been successful in conferring increased tolerance to abiotic stresses. Grain yield improvements by conventional breeding have nearly reached a plateau in maize.

[96376] Accordingly, the yield of a plant can depend on the specific plant/crop of interest as well as its intended application (such as food production, feed production, processed food production, biofuel, biogas or alcohol production, or the like) of interest in each particular case. Thus, in one embodiment, yield is calculated as harvest index (expressed as a ratio of the weight of the respective harvestable parts divided by the total biomass), harvestable parts weight per area (acre, square meter, or the like); and the like. The harvest index, i.e., the ratio of yield biomass to the total cumulative biomass at harvest, in maize has remained essentially unchanged during selective breeding for grain yield over the last hundred years. Accordingly, recent yield improvements that have occurred in maize are the result of the increased total biomass production per unit land area. This increased total biomass has been achieved by increasing planting density, which has led to adaptive phenotypic alterations, such as a reduction in leaf angle, which may reduce shading of lower leaves, and tassel size, which may increase harvest index. Harvest index is relatively stable under many environmental conditions, and so a robust correlation between plant size and grain yield is possible. Plant size and grain yield are intrinsically linked, because the majority of grain biomass is dependent on current or stored photosynthetic productivity by the leaves and stem of the plant. As with abiotic stress tolerance, measurements of plant size in early development, under standardized conditions in a growth chamber or greenhouse, are standard practices to measure potential yield advantages conferred by the presence of a transgene.

[96377] Acccordingly, the yield of a plant can be increased by improving one or more of the yield-related phenotypes.

[96378] Such yield-related phenotypes or traits of a plant the improvement of which results in increased yield comprise, without limitation, the increase of the intrinsic yield capacity of a plant, improved nutrient use efficiency, and/or increased stress tolerance.

[96379] For example, yield refers to biomass yield, e.g. to dry weight biomass yield and/or fresh-weight biomass yield. Biomass yield refers to the aerial or underground parts of a plant, depending on the specific circumstances (test conditions, specific crop of interest, application of interest, and the like). In one embodiment, biomass yield refers to the aerial and underground parts. Biomass yield may be calculated as fresh-weight, dry weight or a moisture adjusted basis. Biomass yield may be calculated on a per plant basis or in relation to a specific area (e.g. biomass yield per acre/square meter/ or the like).

[96380] In other embodiment, “yield” refers to seed yield which can be measured by one or more of the following parameters: number of seeds or number of filled seeds (per plant or per area (acre/square meter/ or the like)); seed filling rate (ratio between number of filled seeds and total number of seeds); number of flowers per plant; seed biomass or total seeds weight (per plant or per area (acre/square meter/ or the like); thousand kernel weight (TKW; extrapolated from the number of filled seeds counted and their total weight; an increase in TKW may be caused by an increased seed size, an increased seed weight, an increased embryo size, and/or an increased endosperm). Other parameters allowing to measure seed yield are also known in the art. Seed yield may be determined on a dry weight or on a fresh weight basis, or typically on a moisture adjusted basis, e.g. at 15.5 percent moisture.

[96381] For example, the term “increased yield” means that the plant, exhibits an increased growth rate, under conditions of abiotic environmental stress, compared to the corresponding wild-type plant.

[96382] An increased growth rate may be reflected inter alia by or confers an increased biomass production of the whole plant, or an increased biomass production of the aerial parts of a plant, or by an increased biomass production of the underground parts of a plant, or by an increased biomass production of parts of a plant, like stems, leaves, blossoms, fruits, and/or seeds.

[96383] Increased yield includes higher fruit yields, higher seed yields, higher fresh matter production, and/or higher dry matter production.

[96384] The term “increased yield” means that the plant, exhibits a prolonged growth under conditions of abiotic environmental stress, as compared to the corresponding, e.g. non-transformed, wild type organism. A prolonged growth comprises survival and/or continued growth of the plant, at the moment when the non-transformed wild type organism shows visual symptoms of deficiency and/or death.

[96385] When the plant of the invention is a corn plant increased yield for corn plants means, for example, increased seed yield, in particular for corn varieties used for feed or food. Increased seed yield of corn refers to an increased kernel size or weight, an increased kernel per ear, or increased ears per plant. Alternatively or in addition the cob yield may be increased, or the length or size of the cob is increased, or the kernel per cob ratio is improved.

[96386] When the plant of the invention is a soy plant, increased yield for soy plants means increased seed yield, in particular for soy varieties used for feed or food. Increased seed yield of soy refers for example to an increased kernel size or weight, an increased kernel per pod, or increased pods per plant.

[96387] When the plant of the invention is an oil seed rape (OSR) plant, increased yield for OSR plants means increased seed yield, in particular for OSR varieties used for feed or food. Increased seed yield of OSR refers to an increased seed size or weight, an increased seed number per silique, or increased siliques per plant.

[96388] When the plant of the invention is a cotton plant, increased yield for cotton plants means increased lint yield. Increased lint yield of cotton refers in one embodiment to an increased length of lint.

[96389] When the plant of the invention is a wheat plant increased yield for wheat plants means, for example, increased seed yield, in particular for wheat varieties used for feed or food. Increased seed yield of wheat refers to an increased kernel size or weight, an increased kernel per ear, or increased ears per plant. Increased seed yield of wheat refers also to an increased grain size or weight, an increased number of grains per spike, or increased number of spikes per plant. Alternatively or in addition increased seed yield of wheat refers also to an increased grain yield, increased length of spikes, increased number of spikelets per spike , increased 1000 grain weight or increased flag leaf area (flag leaf is the leaf directely below the spike).

[96390] Said increased yield can typically be achieved by enhancing or improving, one or more yield-related traits of the plant. Such yield-related traits of a plant comprise, without limitation, the increase of the intrinsic yield capacity of a plant, improved nutrient use efficiency, and/or increased stress tolerance, in particular increased abiotic stress tolerance. Intrinsic yield capacity of a plant can be, for example, manifested by improving the specific (intrinsic) seed yield (e.g. in terms of increased seed/ grain size, increased ear number, increased seed number per ear, improvement of seed filling, improvement of seed composition, embryo and/or endosperm improvements, or the like); modification and improvement of inherent growth and development mechanisms of a plant (such as plant height, plant growth rate, pod number, pod position on the plant, number of internodes, incidence of pod shatter, efficiency of nodulation and nitrogen fixation, efficiency of carbon assimilation, improvement of seedling vigour/early vigour, enhanced efficiency of germination (under stressed or non-stressed conditions), improvement in plant architecture, cell cycle modifications, photosynthesis modifications, various signaling pathway modifications, modification of transcriptional regulation, modification of translational regulation, modification of enzyme activities, and the like); and/or the like.

[96391] The improvement or increase of stress tolerance of a plant can for example be manifested by improving or increasing a plant's tolerance against stress, particularly abiotic stress. In the present application, abiotic stress refers generally to abiotic environmental conditions a plant is typically confronted with, including, but not limited to, drought (tolerance to drought may be achieved as a result of improved water use efficiency), heat, low temperatures and cold conditions (such as freezing and chilling conditions), salinity, osmotic stress , shade, high plant density, mechanical stress, oxidative stress, and the like.

[96392] The increased plant yield can also be mediated by increasing the “nutrient use efficiency of a plant”, e.g. by improving the use efficiency of nutrients including, but not limited to, phosphorus, potassium, and nitrogen. Further, higher yields may be obtained with current or standard levels of nitrogen use.

[96393] Generally, the term “increased tolerance to stress” can be defined as survival of plants, and/or higher yield production, under stress conditions as compared to a non-transformed wild type or starting plant: For example, the plant of the invention or produced according to the method of the invention is better adapted to the stress conditions. “Improved adaptation” to environmental stress like e.g. drought, heat, nutrient depletion, freezing and/or chilling temperatures refers herein to an improved plant performance resulting in an increased yield, particularly with regard to one or more of the yield related traits as defined in more detail above.

[96394] During its life-cycle, a plant is generally confronted with a diversity of environmental conditions. Any such conditions, which may, under certain circumstances, have an impact on plant yield, are herein referred to as “stress” condition. Environmental stresses may generally be divided into biotic and abiotic (environmental) stresses. Unfavorable nutrient conditions are sometimes also referred to as “environmental stress”. The present invention does also contemplate solutions for this kind of environmental stress, e.g. referring to increased nutrient use efficiency.

[96395] For the purposes of the description of the present invention, the terms “enhanced tolerance to abiotic stress”, “enhanced resistance to abiotic environmental stress”, “enhanced tolerance to environmental stress”, “improved adaptation to environmental stress” and other variations and expressions similar in its meaning are used interchangeably and refer, without limitation, to an improvement in tolerance to one or more abiotic environmental stress(es) as described herein and as compared to a corresponding origin or wild type plant or a part thereof.

[96396] The term abiotic stress tolerance(s) refers for example low temperature tolerance, drought tolerance or improved water use efficiency (WUE), heat tolerance, salt stress tolerance and others. Studies of a plant's response to desiccation, osmotic shock, and temperature extremes are also employed to determine the plant's tolerance or resistance to abiotic stresses. Water use efficiency (WUE) is a parameter often correlated with drought tolerance. In selecting traits for improving crops, a decrease in water use, without a change in growth would have particular merit in an irrigated agricultural system where the water input costs were high. An increase in growth without a corresponding jump in water use would have applicability to all agricultural systems. In many agricultural systems where water supply is not limiting, an increase in growth, even if it came at the expense of an increase in water use also increases yield.

[96397] Drought stress means any environmental stress which leads to a lack of water in plants or reduction of water supply to plants, including a secondary stress by low temperature and/or salt, and/or a primary stress during drought or heat, e.g. desiccation etc.

### Specific Embodiments

[96398] Accordingly, this invention provides respective measures and methods to produce plants with increased yield, e.g. genes conferring an increased yield-related trait, for example enhanced tolerance to abiotic environmental stress, for example an increased drought tolerance and/or low temperature tolerance and/or an increased nutrient use efficiency, intrinsic yield and/or another increased yield-related trait, upon expression or over-expression. Accordingly, the present invention provides such genes in case in column 7 of the respective Table or cerotic acid, heneicosanoic acid, lignoceric acid, melissic acid and/or montanic acid is indicated. In particular, such genes are described in column 5 as well as in column 8 of Tables I, especially the coding region thereof, or homologs or fragments thereof, in case cerotic acid, heneicosanoic acid, lignoceric acid, melissic acid and/or montanic acid are indicated in column 7 or the respective polypeptides are described in column 5 as well as in column 8 of Table II, or homologs or fragments thereof, in case cerotic acid, heneicosanoic acid, lignoceric acid, melissic acid and/or montanic acid are indicated in column 7.

[96399] Accordingly, the present invention provides respective transgenic plants showing one or more improved yield-related traits as compared to the corresponding origin or the wild type plant and methods for producing such transgenic plants with increased yield in case in column 7 of the respective Table “cerotic acid” or “heneicosanoic acid” or “lignoceric acidcid” or “melissic acid” or “montanic acid” is indicated.

[96400] In one embodiment, one or more of said yield-increasing activities are increased by increasing the amount and/or the specific activity of one or more proteins listed in Table II, column 5 or 8 in a compartment of a cell indicated in Table II, column 6, in case in column 7 of the respective Table “cerotic acid” or “heneicosanoic acid” or “lignoceric acidcid” or “melissic acid” or “montanic acid” is indicated.

[96401] Accordingly to present invention, the yield of the plant of the invention is increased by improving one or more of the yield-related traits as defined herein. Said increased yield in accordance with the present invention can typically be achieved by enhancing or improving, in comparison to an origin or wild-type plant, one or more yield-related traits of said plant. Such yield-related traits of a plant the improvement of which results in increased yield comprise, without limitation, the increase of the intrinsic yield capacity of a plant, improved nutrient use efficiency, like nitrogen use efficiency, and/or increased stress tolerance.

[96402] In one embodiment, the present invention provides respective transgenic plants showing one or more improved yield-related traits, preferably increased drought tolerance as compared to the corresponding origin or the wild type plant and methods for producing such transgenic plants with increased yield in case in column 7 of the respective Table “cerotic acid” or “heneicosanoic acid” or “lignoceric acidcid” or “melissic acid” or “montanic acid” is indicated.

[96403] In a further embodiment the present invention is characterized by the features as disclosed in the following items:

[96404] Item 1. A process for the production of a fine chemical selected from the group consisting of: cerotic acid, heneicosanoic acid, lignoceric acid, melissic acid and/or montanic acid
[96405] (a) increasing or generating one or more activities selected from the group consisting of 2,3-dihydroxy-2,3-dihydrophenylpropionatedehydrogenase, ABC metal ion transporter substrate-binding protein, acetyl-coenzyme A synthetase, acetyltransferase, acid shock protein, acyl transferase, agmatinase, aminotransferase, ATP-binding component of a transport system, b1522-protein, b3083-protein, b3644-protein, b3812-protein, b4029-protein, binding-protein-dependent transport systems inner membrane component, calcium-dependent protein kinase, cardiolipin synthase, chaperone protein CIpB, cyclin D, cystathionine gamma-synthase, eukaryotic translation initiation factor 5, geranylgeranyl pyrophosphate synthase, gibberellin 20-oxidase, glutamate-ammonia-ligase, glutaredoxin, glycosyl transferase, heat shock transcription factor, hydrolase, inositol-3-phosphate synthase, isochorismate synthase, leucyl/phenylalanyl-tRNA-protein transferase, major facilitator superfamily transporter protein, malate dehydrogenase, mevalonate kinase, mitochondrial inner membrane protease subunit, monodehydroascorbate reductase, multidrug resistance protein, NADH dehydrogenase subunit N, O-antigen chain length determinant, oxidoreductase, peroxisome assembly protein, potassium transport protein, protein kinase, purine nucleoside phosphorylase, rubredoxin, Sec-independent protein translocase subunit, serine protease, sll0064-protein, slr0383-protein, sodium/proton antiporter, thioredoxin family protein, threonine synthase, tryptophan synthase alpha chain, TTC0768-protein, TTC1386-protein, uroporphyrin-III C-methyltransferase, yer152c-protein, ylr065c-protein, yml093w-protein, and zinc finger protein, in a non-human organism or a part thereof, preferably a microorganism, a plant cell, a plant or a part thereof, as compared to a corresponding non-transformed wild type non-human organism or a part thereof; and
[96406] (b) growing the non-human organism or a part thereof under conditions which permit the production of cerotic acid, heneicosanoic acid, lignoceric acid, melissic acid and/or montanic acid or a composition comprising cerotic acid, heneicosanoic acid, lignoceric acid, melissic acid and/or montanic acid in said non-human organism or in the culture medium surrounding said non-human organism.

[96407] Item 2. A process for the production of a a fine chemical selected from the group consisting of: cerotic acid, heneicosanoic acid, lignoceric acid, melissic acid and/or montanic acid, which comprises
[96408] (A)
   [96409] (i) increasing or generating of the expression of; and/or
   [96410] (ii) increasing or generating the expression of an expression product of; and/or
   [96411] (iii) increasing or generating one or more activities of an expression product encoded by;
      at least one respective nucleic acid molecule comprising a nucleic acid molecule selected from the group consisting of:
   [96412] (a) a nucleic acid molecule encoding the polypeptide shown in column 5 or 8 of Table II, preferably Table II B, application no.18, or a homolog or a fragment thereof;
   [96413] (b) a nucleic acid molecule shown in column 5 or 8 of Table I, preferably Table I B, application no.18, or a homolog or a fragment thereof (preferably the coding region thereof);
   [96414] (c) a nucleic acid molecule, which, as a result of the degeneracy of the genetic code, can be derived from a polypeptide sequence depicted in column 5 or 8 of Table II, preferably Table II B, application no.18;
   [96415] (d) a nucleic acid molecule having at least 30%, in particular at least 50%, 60%, 70%, 80%, 85%, 90%, 95%, 97%, 98%, 99% or 99.5% identity with the nucleic acid molecule sequence of a polynucleotide comprising the nucleic acid molecule shown in column 5 or 8 of Table I, preferably Table I B, application no. 18, or the coding region thereof;
   [96416] (e) a nucleic acid molecule encoding a polypeptide having at least 30%, in particular 50%, 60%, 70%, 80%, 85%, 90%, 95%, 97%, 98%, 99% or 99.5% identity with the amino acid sequence of the polypeptide encoded by the nucleic acid molecule of (a), (b), (c) or (d);
   [96417] (f) a nucleic acid molecule which hybridizes with a nucleic acid molecule of (a), (b), (c), (d) or (e) under stringent hybridization conditions;
   [96418] (g) a nucleic acid molecule encoding a polypeptide which can be isolated with the aid of monoclonal or polyclonal antibodies made against a polypeptide encoded by one of the nucleic acid molecules of (a), (b), (c), (d), (e) or (f);
   [96419] (h) a nucleic acid molecule encoding a polypeptide comprising the consensus sequence or one or more polypeptide motifs as shown in column 8 of Table IV, application no.18;
   [96420] (i) a nucleic acid molecule encoding a polypeptide having the activity represented by a respective protein as depicted in column 5 of Table II, application no. 18;
   [96421] (j) a nucleic acid molecule which comprises a polynucleotide, which is obtained by amplifying a cDNA library or a genomic library using the primers as depicted in column 8 of Table III, application no. 18; and
   [96422] (k) a nucleic acid molecule which is obtainable by screening a suitable nucleic acid library, especially a cDNA library and/or a genomic library, under stringent hybridization conditions with a probe comprising a complementary sequence of a nucleic acid molecule of (a), (b), (c), (d), (e), (f), (g), (h), (i) or (j) or with a fragment thereof, having at least 15 nt, preferably 20 nt, 30 nt, 50 nt, 100 nt, 200 nt, 500 nt, 1000 nt, 1500 nt, 2000 nt or 3000 nt of a nucleic acid molecule complementary to a nucleic acid molecule sequence characterized in (a), (b), (c), (d), (e), (f), (g), (h), (i) or (j);
   [96423] or a nucleic acid molecule comprising a sequence which is complementary thereto;
      in a non-human organism or a part thereof, preferably a microorganism, a plant cell, a plant or a part thereof, as compared to a corresponding non-transformed wild type non-human organism or a part thereof; and
[96424] (B) growing the non-human organism or a part thereof under conditions which permit the production of cerotic acid, heneicosanoic acid, lignoceric acid, melissic acid and/or montanic acid or a composition comprising cerotic acid, heneicosanoic acid, lignoceric acid, melissic acid and/or montanic acid in said non-human organism or in the culture medium surrounding said non-human organism.

[96425] Item 3. A process of items 1 or 2, comprising of recovering cerotic acid, heneicosanoic acid, lignoceric acid, melissic acid and/or montanic acid in its free or bound form.

[96426] Item 4. The process of any one of items 1 to 3, comprising the following steps:
[96427] (a) selecting a non-human organism or a part thereof expressing a polypeptide encoded by the nucleic acid molecule characterized in item 2;
[96428] (b) mutagenizing the selected non-human organism or the part thereof;
[96429] (c) comparing the activity or the expression level of said polypeptide in the mutagenized non-human organism or the part thereof with the activity or the expression of said polypeptide of the selected non-human organisms or the part thereof;
[96430] (d) selecting the mutated non-human organisms or parts thereof, which comprise an increased activity or expression level of said polypeptide compared to the selected non-human organism or the part thereof;
[96431] (e) optionally, growing and cultivating the non-human organisms or the parts thereof; and
[96432] (f) recovering, and optionally isolating, the free or bound cerotic acid, heneicosanoic acid, lignoceric acid, melissic acid and/or montanic acid produced by the selected mutated non-human organisms or parts thereof.

[96433] Item 5. The process of any one of items 1 to 4 wherein the activity of said protein or the expression of said nucleic acid molecule is increased or generated transiently or stably.

[96434] Item 6. An isolated nucleic acid molecule comprising a nucleic acid molecule selected from the group consisting of:
[96435] (a) a nucleic acid molecule encoding a polypeptide shown in Table II, application no. 18, column 5 or 8, preferably shown in Table II B, application no. 18, column 8, or a homolog or a fragment thereof;
[96436] (b) a nucleic acid molecule shown in Table I, application no. 18, column 5 or 8, preferably shown in Table I B, application no. 18, column 8, preferably the coding region thereof, or a homolog or a fragment thereof;
[96437] (c) a nucleic acid molecule, which, as a result of the degeneracy of the genetic code, can be derived from a polypeptide sequence depicted in column 5 or 8 of Table II, application no. 18, preferably in column 8 of Table II B, application no. application no.;
[96438] (d) a nucleic acid molecule having at least 30% identity, preferably at least 40%, 50%, 60%, 70%, 75%, 80%, 85%, 90%, 95%, 96%, 97%, 98%, 99%, 99.5%, with the nucleic acid molecule sequence of a polynucleotide comprising the nucleic acid molecule shown in column 5 or 8 of Table I, application no. 3, preferably shown in column 8 of Table I B, application no. 18, preferably the coding region thereof;
[96439] (e) a nucleic acid molecule encoding a polypeptide having at least 30% identity, preferably at least 40%, 50% 60%, 70%, 75%, 80%, 85%, 90%, 95%, 96%, 97%, 98%, 99%, 99.5%, identity with the amino acid sequence of the polypeptide encoded by the nucleic acid molecule of (a), (b), (c) or (d);
[96440] (f) a nucleic acid molecule which hybridizes with a nucleic acid molecule of (a), (b), (c), (d) or (e) under stringent hybridisation conditions;
[96441] (g) a nucleic acid molecule encoding a polypeptide which can be isolated with the aid of monoclonal or polyclonal antibodies made against a polypeptide encoded by one of the nucleic acid molecules of (a), (b), (c), (d), (e) or (f);
[96442] (h) a nucleic acid molecule encoding a polypeptide comprising the consensus sequence or one or more polypeptide motifs as shown in column 8 of Table IV, application no. 18;
[96443] (i) a nucleic acid molecule encoding a polypeptide having the activity represented by a respective protein as depicted in column 5 of Table II, application no. 18;
[96444] (j) a nucleic acid molecule comprising a polynucleotide which is obtained by amplifying a cDNA library or a genomic library using the primers in Table III, application no. 18, column 8;
[96445] and
[96446] (k) nucleic acid molecule which is obtainable by screening a suitable nucleic acid library, especially a cDNA library and/or a genomic library, under stringent hybridization conditions with a probe comprising one of the sequences of the nucleic acid molecule of (a), (b), (c), (d), (e), (f), (g), (h), (i) or (j) or with a fragment of at least 15 nt, preferably 20 nt, 30 nt, 50 nt, 100 nt, 200 nt,500 nt, 1000 nt, 1500 nt, 2000 nt or 3000 nt of the nucleic acid molecule characterized in (a), (b), (c), (d), (e), (f), (g), (h), (i) or (i);
[96447] or a nucleic acid molecule comprising a sequence which is complementary thereto.

[96448] Item 7. A nucleic acid construct which confers the expression of the nucleic acid molecule as defined in item 6, comprising one or more regulatory elements.

[96449] Item 8. An expression cassette comprising
[96450] (a) a promoter, preferably selected from the group consisting of Big35S, PCUbi, Super and USP;
[96451] (b) a nucleic acid molecule as defined in item 6.

[96452] Item 9. A vector comprising the nucleic acid molecule as defined in item 6 or the nucleic acid construct as claimed in item 7 or the expression cassette as claimed in item 8.

[96453] Item 10. A host cell or a plant organelle, which has been transformed with the vector as claimed in item 9 or the nucleic acid molecule as defined in item 6 or the nucleic acid construct as claimed in item 7 or the expression cassette as claimed in item 8.

[96454] Item 11. The host cell of item 10, which is a plant cell or a microorganism.

[96455] Item 12. A process for producing a polypeptide, wherein the polypeptide is expressed in a host cell as claimed in item 10 or 11.

[96456] Item 13. A polypeptide produced by the process as claimed in item 12 or encoded by the nucleic acid molecule as defined in item 6.

[96457] Item 14. An antibody, which binds specifically to the polypeptide as claimed in item 13.

[96458] Item 15. A plant tissue, propagation material, harvested material or a plant comprising the host cell as claimed in item 10 or 11.

[96459] Item 16. A process for the identification of a compound conferring an increase in cerotic acid, heneicosanoic acid, lignoceric acid, melissic acid and/or montanic acid production in a non-human organism, comprising the steps:
[96460] (a) culturing a plant cell or tissue or microorganism or maintaining a plant expressing the polypeptide encoded by the nucleic acid molecule as defined in item 6 conferring an increase in the amount of cerotic acid heneicosanoic acid, lignoceric acid, melissic acid, and/or montanic acid in a non-human organism or a part thereof and a readout system capable of interacting with the polypeptide under suitable conditions which permit the interaction of the polypeptide with said readout system in the presence of a compound or a sample comprising a plurality of compounds and capable of providing a detectable signal in response to the binding of a compound to said polypeptide under conditions which permit the expression of said readout system and of the polypeptide encoded by the nucleic acid molecule of item 6 conferring an increase in the amount of cerotic acid, heneicosanoic acid, lignoceric acid, melissic acid and/or montanic acidin a non-human organism or a part thereof;
[96461] (b) identifying if the compound is an effective agonist by detecting the presence or absence or increase of a signal produced by said readout system.

[96462] Item 17. A method for the production of an agricultural composition comprising the steps of the method of item 16 and formulating the compound identified in item 16 in a form acceptable for an application in agriculture.

[96463] Item 18. A composition comprising the nucleic acid molecule as defined in item 6, the polypeptide as claimed in item 13, the nucleic acid construct as claimed in item 7, the expression cassette as claimed in item 8, the vector as claimed in item 9, the compound as claimed in item 16, the antibody as claimed in item 14, and optionally an agricultural acceptable carrier.

[96464] Item 19. Use of the nucleic acid molecule as defined in item 6 for the identification of a nucleic acid molecule conferring an increase in cerotic acid, heneicosanoic acid, lignoceric acid, melissic acid and/or montanic acid after expression.

[96465] Item 20. Cosmetic, pharmaceutical, food or feed composition comprising the nucleic acid moleculeas defined in item 6, the polypeptide as claimed in item 13, the nucleic acid construct as claimed in item 7, the expression cassette as claimed in item 8, the vector as claimed in item 9, the antibody as claimed in item 14 , the plant or plant tissue as claimed in item 15, the harvested material as claimed in item 15 or the host cell of item as claimed in items 10 or 11.

[96466] Item 21. Use of the nuclei acid molecule as defined in item 6, the polypeptide as claimed in item 13, the nucleic acid construct as claimed in item 7, the expression cassette as claimed in item 8, the vector as claimed in item 9, the plant or plant tissue as claimed in item 15, or the host cell of item 10 to 11 for the production of plant resistant to a herbicide inhibiting the production of cerotic acid, heneicosanoic acid, lignoceric acid, melissic acid and/or montanic acid.

[96467] Item 22. A method for producing a plant with increased yield as compared to a corresponding non-transformed wild type plant, whereby the method comprises
[96468] (i) increasing or generating of the expression of; and/or
[96469] (ii) increasing or generating the expression of an expression product of; and/or
[96470] (iii) increasing or generating one or more activities of an expression product encoded by; at least one respective nucleic acid molecule comprising a nucleic acid molecule selected from the group consisting of:
[96471] (a) a nucleic acid molecule encoding the polypeptide shown in column 5 or 8 of Table II, preferably Table II B, application no. 18, or a homolog or a fragment thereof, in case in column 7 cerotic acid, heneicosanoic acid, lignoceric acid, melissic acid and/or montanic acid is indicated;
[96472] (b) a nucleic acid molecule shown in column 5 or 8 of Table I, preferably Table I B, application no. 18, or a homolog or a fragment thereof (preferably the coding region thereof) , in case in column 7 cerotic acid, heneicosanoic acid, lignoceric acid, melissic acid and/or montanic acid is indicated;
[96473] (c) a nucleic acid molecule, which, as a result of the degeneracy of the genetic code, can be derived from a polypeptide sequence depicted in column 5 or 8 of Table II, preferably Table II B, application no. 18, in case in column 7 cerotic acid, heneicosanoic acid, lignoceric acid, melissic acid and/or montanic acidis indicated;
[96474] (d) a nucleic acid molecule having at least 30%, in particular at least 50%, 60%, 70%, 80%, 85%, 90%, 95%, 97%, 98%, 99% or 99.5% identity with the nucleic acid molecule sequence of a polynucleotide comprising the nucleic acid molecule shown in column 5 or 8 of Table I, preferably Table I B, application no. 18, or the coding region thereof, in case in column 7 cerotic acid, heneicosanoic acid, lignoceric acid, melissic acid and/or montanic acid is indicated;
[96475] (e) a nucleic acid molecule encoding a polypeptide having at least 30%, in particular 50%, 60%, 70%, 80%, 85%, 90%, 95%, 97%, 98%, 99% or 99.5% identity with the amino acid sequence of the polypeptide encoded by the nucleic acid molecule of (a), (b), (c) or (d);
[96476] (f) a nucleic acid molecule which hybridizes with a nucleic acid molecule of (a), (b), (c), (d) or (e) under stringent hybridization conditions;
[96477] (g) a nucleic acid molecule encoding a polypeptide which can be isolated with the aid of monoclonal or polyclonal antibodies made against a polypeptide encoded by one of the nucleic acid molecules of (a), (b), (c), (d), (e) or (f);
[96478] (h) a nucleic acid molecule encoding a polypeptide comprising the consensus sequence or one or more polypeptide motifs as shown in column 8 of Table IV, application no. 18, in case in column 7 cerotic acid, heneicosanoic acid, lignoceric acid, melissic acid and/or montanic acid is indicated;
[96479] (i) a nucleic acid molecule encoding a polypeptide having the activity represented by a respective protein as depicted in column 5 of Table II, application no. 18, in case in column 7 cerotic acid, heneicosanoic acid, lignoceric acid, melissic acid and/or montanic acid is indicated;
[96480] (j) a nucleic acid molecule which comprises a polynucleotide, which is obtained by amplifying a cDNA library or a genomic library using the primers as depicted in column 8 of Table III, application no. 18, in case in column 7 cerotic acid, heneicosanoic acid, lignoceric acid, melissic acid and/or montanic acid is indicated; and
[96481] (k) a nucleic acid molecule which is obtainable by screening a suitable nucleic acid library, especially a cDNA library and/or a genomic library, under stringent hybridization conditions with a probe comprising a complementary sequence of a nucleic acid molecule of (a), (b), (c), (d), (e), (f), (g), (h), (i) or (j) or with a fragment thereof, having at least 15 nt, preferably 20 nt, 30 nt, 50 nt, 100 nt, 200 nt, 500 nt, 1000 nt, 1500 nt, 2000 nt or 3000 nt of a nucleic acid molecule complementary to a nucleic acid molecule sequence characterized in (a), (b), (c), (d), (e), (f), (g), (h), (i) or (j);
[96482] or a nucleic acid molecule comprising a sequence which is complementary thereto; in a plant cell, plant or a part thereof.

[96483] Item 23. A method for producing a plant with increased yield according to item 22, which comprises in addition the regeneration of a plant from such transformed plant cell, plant cell compartment, plant cell nucleus, plant cell or plant tissue with increased yield.

[96484] [0483.1.7.18] to [0492.1.7.18] for the disclosure of these paragraphs see [0483.1.7.7] to [0492.1.7.7] above

### Example 10

### Purification of a Fine Chemical e.g. VLCFA, e.g. Cerotic Acid, Heneicosanoic Acid, Lignoceric Acid, Melissic Acid and/or Montanic Acid

[96485] Long-chain fatty acids, such as cerotic acid, heneicosanoic acid, lignoceric acid, melissic acid and/or montanic acid, can be recovered from cells or from the supernatant of the abovedescribed culture by a variety of methods known in the art. For example, the culture supernatant is recovered first. To this end, the cells are harvested from the culture by slow centrifugation. Cells can generally be disrupted or lysed by standard techniques such as mechanical force or sonication. The cell debris is removed by centrifugation and the supernatant fraction, if appropriate together with the culture supernatant, is used for the further purification of the VLCFA. However, it is also possible to process the supernatant alone if the VLCFA are present in the supernatant in sufficiently high a concentration. In this case, the VLCFA, or the VLCFAs mixture, can be purified further for example via extraction and/or salt precipitation or via ion-exchange chromatography.

[96486] One example is the analysis of fatty acids (abbreviations: FAME, fatty acid methyl ester; GC-MS, gas liquid chromatography/mass spectrometry; TAG, triacylglycerol; TLC, thin-layer chromatography).

[96487] The unambiguous detection for the presence of fatty acid products can be obtained by analyzing recombinant organisms using analytical standard methods: GC, GC-MS or TLC, as described on several occasions by Christie and the references therein (1997, in: Advances on Lipid Methodology, Fourth Edition: Christie, Oily Press, Dundee, 119-169; 1998, Gaschromatographie-Massenspektrometrie-Verfahren [Gas chromatography/mass spectrometric methods], Lipide 33:343-353).

[96488] The total fatty acids produced in the organism for example in yeasts used in the inventive process can be analysed for example according to the following procedure: The material such as yeasts, E. coli or plants to be analyzed can be disrupted by sonication, grinding in a glass mill, liquid nitrogen and grinding or via other applicable methods. After disruption, the material must be centrifuged (1000×g, 10 min., 4° C.) and washed once with 100 mM NaHCO3, pH 8.0 to remove residual medium and fatty acids. For preparation of the fatty acid methyl esters (FAMES) the sediment is resuspended in distilled water, heated for 10 minutes at 100° C., cooled on ice and recentrifuged, followed by extraction for one hour at 90° C. in 0.5 M sulfuric acid in methanol with 2% dimethoxypropane, which leads to hydrolyzed oil and lipid compounds, which give transmethylated lipids.

[96489] The FAMES are then extracted twice with 2 ml petrolether, washed once with 100 mM NaHCO₃, pH 8.0 and once with distilled water and dried with Na₂SO₄. The organic solvent can be evaporated under a stream of Argon and the FAMES were dissolved in 50 μl of petrolether. The samples can be separated on a ZEBRON ZB-Wax capillary column (30 m, 0,32 mm, 0.25 μm; Phenomenex) in a Hewlett Packard 6850 gas chromatograph with a flame ionisation detector. The oven temperature is programmed from 70° C. (1 min. hold) to 200° C. at a rate of 20° C/min., then to 250° C. (5 min. hold) at a rate of 5° C/min and finally to 260° C. at a rate of 5° C/min. Nitrogen is used as carrier gas (4,5 ml/min. at 70° C.). The identity of the resulting fatty acid methyl esters can be identified by comparison with retention times of FAME standards, which are available from commercial sources (i.e. Sigma).

[96490] Plant material is initially homogenized mechanically by comminuting in a pestle and mortar to make it more amenable to extraction.

[96491] This is followed by heating at 100° C. for 10 minutes and, after cooling on ice, by resedimentation. The cell sediment is hydrolyzed for one hour at 90° C. with 1 M methanolic sulfuric acid and 2% dimethoxypropane, and the lipids are transmethylated. The resulting fatty acid methyl esters (FAMEs) are extracted in petroleum ether. The extracted FAMEs are analyzed by gas liquid chromatography using a capillary column (Chrompack, WCOT Fused Silica, CP-Wax-52 CB, 25 m, 0.32 mm) and a temperature gradient of from 170° C. to 240° C. in 20 minutes and 5 minutes at 240° C. The identity of the fatty acid methyl esters is confirmed by comparison with corresponding FAME standards (Sigma). The identity and position of the double bond can be analyzed further by suitable chemical derivatization of the FAME mixtures, for example to give 4,4-dimethoxyoxazoline derivatives (Christie, 1998) by means of GC-MS.

[96492] The methodology is described for example in Napier and Michaelson, 2001, Lipids. 36(8):761-766; Sayanova et al., 2001, Journal of Experimental Botany. 52(360):1581-1585, Sperling et al., 2001, Arch. Biochem. Biophys. 388(2):293-298 and Michaelson et al., 1998, FEBS Letters. 439(3):215-218.

[96493] If required and desired, further chromatography steps with a suitable resin may follow. Advantageously the fatty acids can be further purified with a so-called RTHPLC. As eluent different an acetonitrile/water or chloroform/acetonitrile mixtures are advantageously is used. For example canola oil can be separated said HPLC method using an RP-18-column (ET 250/3 Nucleosil 120-5 018 Macherey and Nagel, Duren, Germany). A chloroform/acetonitrile mixture (v/v 30:70) is used as eluent. The flow rate is beneficial 0.8 ml/min. For the analysis of the fatty acids an ELSD detector (evaporative light-scattering detector) is used. MPLC, dry-flash chromatography or thin layer chromatography are other beneficial chromatography methods for the purification of VLCFAs. If necessary, these chromatography steps may be repeated, using identical or other chromatography resins. The skilled worker is familiar with the selection of suitable chromatography resin and the most effective use for a particular molecule to be purified. In addition depending on the produced fine chemical purification is also possible with cristalisation or destilation. Both methods are well known to a person skilled in the art.

[96494] Identity and purity of the VLCFAs isolated can be determined by standard techniques of the art. They encompass high-performance liquid chromatography (HPLC), spectroscopic methods, mass spectrometry (MS), staining methods, thin-layer chromatography, NIRS, enzyme assay or microbiological assays. These analytical methods are compiled in: Patek et al. (1994) Appl. Environ. Microbiol. 60: 133-140; Malakhova et al. (1996) Biotekhnologiya 11:27-32; and Schmidt et al. (1998) Bioprocess Engineer. 19: 67-70. Ulmann's Encyclopedia of Industrial Chemistry (1996) Vol. A27, VCH: Weinheim, pp. 89-90, pp. 521-540, pp. 540-547, pp. 559-566, 575-581 and pp. 581-587; Michal, G (1999) Biochemical Pathways: An Atlas of Biochemistry and Molecular Biology, John Wiley and Sons; Fallon, A. et al. (1987) Applications of HPLC in Biochemistry in: Laboratory Techniques in Biochemistry and Molecular Biology, Vol. 17.

[96495] for the disclosure of this paragraph see [0494.1.7.7] above

### Example 11a

### PCR amplification of the Sequences

[96496] Unless otherwise specified, standard methods as described in Sambrook et al., Molecular Cloning: A laboratory manual, Cold Spring Harbor 1989, Cold Spring Harbor Laboratory Press are used.

[96497] The inventive sequences as shown in the respective line in Table I, column 5, preferably the coding region thereof, were amplified by PCR as described in the protocol of the Pfu Ultra, Pfu Turbo or Herculase DNA polymerase (Stratagene). The composition for the protocol of the Pfu Ultra, Pfu Turbo or Herculase DNA polymerase was as follows: 1×PCR buffer (Stratagene), 0.2 mM of each dNTP, 100 ng genomic DNA of Saccharomyces cerevisiae (strain S288C; Research Genetics, Inc., now Invitrogen), Escherichia coli (strain MG1655; E. coli Genetic Stock Center), Synechocystis sp. (strain PCC6803), Azotobacter vinelandii (strain N.R. Smith,16), Thermus thermophilus (HB8) or 50 ng cDNA from various tissues and development stages of Arabidopsis thaliana (ecotype Columbia), Physcomitrella patens, Glycine max (variety Resnick), Brassica napus, Oryza sativa or Zea mays (variety B73, Mo17, A188), 50 pmol forward primer, 50 pmol reverse primer, with or without 1 M Betaine, 2.5 u Pfu Ultra, Pfu Turbo or Herculase DNA polymerase.

[96498] The amplification cycles were as follows:

[96499] 1 cycle of 2-3 minutes at 94-95° C., then 25-36 cycles with 30-60 seconds at 94-95° C., 30-45 seconds at 50-60° C. and 210-480 seconds at 72° C., followed by 1 cycle of 5-10 minutes at 72° C., then 4-16° C.—preferably for Saccharomyces cerevisiae, Escherichia coli, Synechocystis sp., Azotobacter vinelandii, Thermus thermophilus.

[96500] In case of Arabidopsis thaliana, Brassica napus, Glycine max, Oryza sativa, Physcomitrella patens, Zea mays the amplification cycles were as follows:

[96501] 1 cycle with 30 seconds at 94° C., 30 seconds at 61° C., 15 minutes at 72° C., then 2 cycles with 30 seconds at 94° C., 30 seconds at 60° C., 15 minutes at 72° C., then 3 cycles with 30 seconds at 94° C., 30 seconds at 59° C., 15 minutes at 72° C., then 4 cycles with 30 seconds at 94° C., 30 seconds at 58° C., 15 minutes at 72° C., then 25 cycles with 30 seconds at 94° C., 30 seconds at 57° C., 15 minutes at 72° C., then 1 cycle with 10 minutes at 72° C., then finally 4-16° C.

[96502] RNAs were generated with the RNeasy Plant Kit according to the standard protocol (Qiagen) and Superscript II Reverse Transkriptase was used to produce double stranded cDNA according to the standard protocol (Invitrogen).

[96503] ORF specific primer pairs for the genes to be expressed are shown in the respective line in Table III, column 8. The following adapter sequences were added to Saccharomyces cerevisiae ORF specific primers (see Table III) for cloning purposes:

SEQ ID NO: 20

| | | |
|---|---|---|
| i) | foward primer: | 5′-GGAATTCCAGCTGACCACC-3′ |

SEQ ID NO: 21

| | | |
|---|---|---|
| ii) | reverse primer: | 5′-GATCCCCGGGAATTGCCATG-3′ |

[96504] These adaptor sequences allow cloning of the ORF into the various vectors containing the Resgen adaptors, see table column E of Table c.

[96505] The following adapter sequences were added to Saccharomyces cerevisiae, Escherichia coli, Synechocystis sp., Azotobacter vinelandii, Thermus thermophilus, Arabidopsis thaliana, Brassica napus, Glycine max, Oryza sativa , Physcomitrella patens, or Zea mays ORF specific primers for cloning purposes:

| SEQ ID NO: 22 | | |
|---|---|---|
| iii) | forward primer: | 5′-TTGCTCTTCC-3′ |
| SEQ ID NO: 23 | | |
| iiii) | reverse primer: | 5′-TTGCTCTTCG-3′ |

[96506] The adaptor sequences allow cloning of the ORF into the various vectors containing the Colic adaptors, see table column E of Table c.

[96507] Therefore for amplification and cloning of Saccharomyces cerevisiae SEQ ID NO: 14843, a primer consisting of the adaptor sequence i) and the ORF specific sequence SEQ ID NO: 14871 and a second primer consisting of the adaptor sequence ii) and the ORF specific sequence SEQ ID NO: 14872 were used.

[96508] For amplification and cloning of Escherichia coli SEQ ID NO: 7081, a primer consisting of the adaptor sequence iii) and the ORF specific sequence SEQ ID NO: 7261 and a second primer consisting of the adaptor sequence iiii) and the ORF specific sequence SEQ ID NO: 7262 were used.

[96509] For amplification and cloning of Synechocystis sp. SEQ ID NO: 47526, a primer consisting of the adaptor sequence iii) and the ORF specific sequence SEQ ID NO: 47562 and a second primer consisting of the adaptor sequence iiii) and the ORF specific sequence SEQ ID NO: 47563 were used.

[96510] For amplification and cloning of Arabidopsis thaliana SEQ ID NO: 2935, a primer consisting of the adaptor sequence iii) and the ORF specific sequence SEQ ID NO: 3275 and a second primer consisting of the adaptor sequence iiii) and the ORF specific sequence SEQ ID NO: 3276 were used.

[96511] For amplification and cloning of Azotobacter vinelandii SEQ ID NO: 6510, a primer consisting of the adaptor sequence iii) and the ORF specific sequence SEQ ID NO: 6670 and a second primer consisting of the adaptor sequence iiii) and the ORF specific sequence SEQ ID NO: 6671 were used.

[96512] For amplification and cloning of Glycine max SEQ ID NO: 10811, a primer consisting of the adaptor sequence iii) and the ORF specific sequence SEQ ID NO: 11207 and a second primer consisting of the adaptor sequence iiii) and the ORF specific sequence SEQ ID NO: 11208 were used.

[96513] For amplification and cloning of Thermus thermophilus SEQ ID NO: 12698, a primer consisting of the adaptor sequence iii) and the ORF specific sequence SEQ ID NO: 12970 and a second primer consisting of the adaptor sequence iiii) and the ORF specific sequence SEQ ID NO: 12971 were used.

[96514] Following these examples every sequence disclosed in Table I, preferably column 5, especially the coding region thereof can be cloned by fusing the adaptor sequences to the respective specific primers sequences as disclosed in Table III, column 8 using the respective vectors shown in Table c.

[96515] [0496.1.7.18] to [0499.1.7.18] for the disclosure of these paragraphs see [0496.1.7.7] to [0499.1.7.7] above

### Example 11e

### Cloning of Inventive Sequences as Shown in Table I, Column 5 in the Different Expression Vectors

[96516] For cloning of for example SEQ ID NO: 7081 from Escherichia coli or any other ORF from Escherichia coli, Synechocystis sp., Azotobacter vinelandii, Thermus thermophilus, Arabidopsis thaliana, or Glycine max the vector DNA was treated with the restriction enzymes Pacl and Ncol following the standard protocol (MBI Fermentas).

[96517] For cloning for example the ORFs of SEQ ID NO: 14843 from Saccharomyces cerevisiae or any other ORF from Saccharomyces cerevisiae into vectors containing the Resgen adaptor sequence the respective vector DNA was treated with the restriction enzyme Ncol.

[96518] For cloning of for example ORFs SEQ ID NO: 63665 from Saccharomyces cerevisiae or any other ORF from Saccharomyces cerevisiae into vectors containing the Colic adaptor sequence, the respective vector DNA was treated with the restriction enzymes Pacl and Ncol following the standard protocol (MBI Fermentas).

[96519] In all cases the reaction was stopped by inactivation at 70° C. for 20 minutes and purified over QlAquick or NucleoSpin Extract II columns following the standard protocol (Qiagen or Macherey-Nagel).

[96520] Then the PCR-product representing the amplified ORF with the respective adapter sequences and the vector DNA were treated with T4 DNA polymerase according to the standard protocol (MBI Fermentas) to produce single stranded overhangs with the parameters 1 unit T4 DNA polymerase at 37° C. for 2-10 minutes for the vector and 1-2 u T4 DNA polymerase at 15-17° C. for 10-60 minutes for the PCR product representing SEQ ID NO: 7081.

[96521] The reaction was stopped by addition of high-salt buffer and purified over QlAquick or NucleoSpin Extract II columns following the standard protocol (Qiagen or Macherey-Nagel).

[96522] According to this example the skilled person is able to clone all sequences disclosed in Table I, preferably column 5 or column 8, especially the coding region thereof.

[96523] Approximately 30-60 ng of prepared vector and a defined amount of prepared amplificate were mixed and hybridized at 65° C. for 15 minutes followed by 37° C. 0.1° C/1 seconds, followed by 37° C. 10 minutes, followed by 0.1° C/1 seconds, then 4-10 ° C.

[96524] The ligated constructs were transformed in the same reaction vessel by addition of competent E. coli cells (strain DHSalpha) and incubation for 20 minutes at 1° C. followed by a heat shock for 90 seconds at 42° C. and cooling to 1-4° C. Then, complete medium (SOC) was added and the mixture was incubated for 45 minutes at 37° C. The entire mixture was subsequently plated onto an agar plate with 0.05 mg/ml kanamycin and incubated overnight at 37° C.

[96525] The outcome of the cloning step was verified by amplification with the aid of primers which bind upstream and downstream of the integration site, thus allowing the amplification of the insertion. The amplifications were carried out as described in the protocol of Taq DNA polymerase (Gibco-BRL).

[96526] The amplification cycles were as follows:

[96527] 1 cycle of 1-5 minutes at 94° C., followed by 35 cycles of in each case 15-60 seconds at 94° C., 15-60 seconds at 50-66° C. and 5-15 minutes at 72° C., followed by 1 cycle of 10 minutes at 72° C., then 4-16° C.

[96528] Several colonies were checked, but only one colony for which a PCR product of the expected size was detected was used in the following steps.

[96529] A portion of this positive colony was transferred into a reaction vessel filled with complete medium (LB) supplemented with kanamycin and incubated overnight at 37° C.

[96530] The plasmid preparation was carried out as specified in the Qiaprep or NucleoSpin Multi-96 Plus standard protocol (Qiagen or Macherey-Nagel).

[96531] [0501.1.7.18] to [0503.1.7.18] for the disclosure of these paragraphs see [0501.1.7.7] to

[96532] Table d showing results of plant analyses

TABLE d

| SeqID | Target | Locus | Metabolite | Source | Promotor | Method | Min | Max |
|---|---|---|---|---|---|---|---|---|
| 17968 | non-targ | At1g36730 | lignoceric acid | ARA_LEAF | p-PcUBI | GC | 31 | 65 |
| 18235 | non-targ | At1g48260 | lignoceric acid | ARA_LEAF | p-PcUBI | GC | 33 | 86 |
| 22249 | non-targ | At3g08710 | lignoceric acid | ARA_LEAF | p-PcUBI | GC | 31 | 127 |
| 152081 | non-targ | At3g09940 | lignoceric acid | ARA_LEAF | p-PcUBI | GC | 28 | 36 |
| 68777 | non-targ | At3g27540 | lignoceric acid | ARA_LEAF | p-PcUBI | GC | 39 | 99 |
| 2935 | non-targ | At3g62950 | lignoceric acid | ARA_LEAF | p-PcUBI | GC | 30 | 159 |
| 24232 | non-targ | At4g18880 | lignoceric acid | ARA_LEAF | p-PcUBI | GC | 27 | 53 |
| 4348 | non-targ | At4g35310 | lignoceric acid | ARA_LEAF | p-PcUBI | GC | 38 | 213 |
| 24492 | non-targ | At5g07200 | lignoceric acid | ARA_LEAF | p-PcUBI | GC | 28 | 50 |
| 5493 | non-targ | At5g64920 | lignoceric acid | ARA_LEAF | p-PcUBI | GC | 30 | 57 |
| 31926 | non-targ | Avin- | lignoceric acid | ARA_LEAF | p-PcUBI | GC | 31 | 40 |
| | | DRAFT_4562 | | | | | | |
| 6510 | non-targ | Avin- | lignoceric acid | ARA_LEAF | p-PcUBI | GC | 35 | 171 |
| | | DRAFT_5103 | | | | | | |
| 32037 | non-targ | Avin- | lignoceric acid | ARA_LEAF | p-PcUBI | GC | 27 | 137 |
| | | DRAFT_5246 | | | | | | |
| 33457 | non-targ | Avin- | lignoceric acid | ARA_LEAF | p-PcUBI | GC | 36 | 62 |
| | | DRAFT_5651 | | | | | | |
| 33596 | non-targ | Avin- | lignoceric acid | ARA_LEAF | p-PcUBI | GC | 32 | 50 |
| | | DRAFT_6093 | | | | | | |
| 34044 | non-targ | Avin- | lignoceric acid | ARA_LEAF | p-PcUBI | GC | 27 | 99 |
| | | DRAFT_6700 | | | | | | |
| 34889 | plastidic | B0004 | lignoceric acid | ARA_LEAF | p-Super | GC | 32 | 201 |
| 7081 | non-targ | B0161 | lignoceric acid | ARA_LEAF | p-Super | GC | 43 | 268 |
| 7333 | non-targ | B0449 | lignoceric acid | ARA_LEAF | p-Super | GC | 34 | 244 |
| 35967 | plastidic | B0593 | lignoceric acid | ARA_LEAF | p-Super | GC | 30 | 87 |
| 36489 | non-targ | B0885 | lignoceric acid | ARA_LEAF | p-Super | GC | 38 | 93 |
| 7917 | non-targ | B0898 | lignoceric acid | ARA_LEAF | p-Super | GC | 36 | 337 |
| 76032 | plastidic | B1065 | cerotic acid | ARA_LEAF | p-Super | GC | 41 | 48 |
| 37400 | non-targ | B1186 | lignoceric acid | ARA_LEAF | p-Super | GC | 35 | 126 |
| 98778 | non-targ | B1249 | lignoceric acid | ARA_LEAF | p-Super | GC | 33 | 73 |
| 7947 | non-targ | B1522 | lignoceric acid | ARA_LEAF | p-Super | GC | 28 | 178 |
| 38300 | non-targ | B1597 | cerotic acid | ARA_LEAF | p-Super | GC | 43 | 164 |
| 38300 | non-targ | B1597 | lignoceric acid | ARA_LEAF | p-Super | GC | 35 | 214 |
| 79217 | non-targ | B2027 | lignoceric acid | ARA_LEAF | p-Super | GC | 29 | 85 |
| 79509 | non-targ | B2482 | lignoceric acid | ARA_LEAF | p-Super | GC | 29 | 64 |
| 40383 | non-targ | B2541 | lignoceric acid | ARA_LEAF | p-Super | GC | 40 | 110 |
| 82424 | non-targ | B3083 | lignoceric acid | ARA_LEAF | p-Super | GC | 31 | 63 |
| 125487 | non-targ | B3812 | lignoceric acid | ARA_LEAF | p-Super | GC | 35 | 118 |
| 10740 | non-targ | B4029 | lignoceric acid | ARA_LEAF | p-Super | GC | 31 | 222 |
| 45321 | non-targ | B4256 | lignoceric acid | ARA_LEAF | p-Super | GC | 64 | 185 |
| 10811 | non-targ | GM02LC12622 | lignoceric acid | ARA_LEAF | p-PcUBI | GC | 28 | 81 |
| 46850 | non-targ | GM02LC44512 | lignoceric acid | ARA_LEAF | p-PcUBI | GC | 30 | 75 |
| 47526 | mito- | SII0064 | lignoceric acid | ARA_LEAF | p-PcUBI | GC | 29 | 56 |
| | chon- | | | | | | | |
| | drial | | | | | | | |
| 84265 | plastidic | SII0228 | lignoceric acid | ARA_LEAF | p-PcUBI | GC | 36 | 38 |
| 84869 | plastidic | SII0378 | lignoceric acid | ARA_LEAF | p-PcUBI | GC | 32 | 69 |
| 101707 | non-targ | SII0833 | lignoceric acid | ARA_LEAF | p-PcUBI | GC | 40 | 112 |
| 51268 | plastidic | SII0891 | lignoceric acid | ARA_LEAF | p-PcUBI | GC | 32 | 55 |
| 85743 | mito- | SII1598 | lignoceric acid | ARA_LEAF | p-PcUBI | GC | 27 | 51 |
| | chon- | | | | | | | |
| | drial | | | | | | | |
| 86447 | plastidic | SII1848 | lignoceric acid | ARA_LEAF | p-PcUBI | GC | 57 | 85 |
| 95744 | non-targ | SIr0383 | lignoceric acid | ARA_LEAF | p-PcUBI | GC | 32 | 48 |
| 57235 | plastidic | SIr0739 | lignoceric acid | ARA_LEAF | p-PcUBI | GC | 31 | 87 |
| 87655 | plastidic | SIr0966 | lignoceric acid | ARA_LEAF | p-PcUBI | GC | 32 | 111 |
| 152275 | non-targ | SIr2033 | lignoceric acid | ARA_LEAF | p-PcUBI | GC | 28 | 105 |
| 12698 | non-targ | TTC0019 | lignoceric acid | ARA_LEAF | p-PcUBI | GC | 44 | 114 |
| 61532 | non-targ | TTC0768 | lignoceric acid | ARA_LEAF | p-PcUBI | GC | 38 | 110 |
| 62079 | non-targ | TTC1386 | lignoceric acid | ARA_LEAF | p-PcUBI | GC | 49 | 106 |
| 121908 | non-targ | YaI054c | lignoceric acid | ARA_LEAF | p-PcUBI | GC | 52 | 58 |
| 63665 | plastidic | Ydr265w | lignoceric acid | ARA_LEAF | p-PcUBI | GC | 28 | 50 |
| 149632 | non-targ | Yjl153c | heneicosanoic | ARA_SEED_2 | p-PcUBI | GC | 10 | 23 |
| | | | acid | | | | | |
| 14843 | non-targ | Yjr130c | lignoceric acid | ARA_LEAF | Big35S | GC | 31 | 42 |
| 152382 | non-targ | Ykr050w | lignoceric acid | ARA_LEAF | Big35S | GC | 28 | 96 |
| 66695 | plastidic | YIr065c | lignoceric acid | ARA_LEAF | p-Super | GC | 28 | 66 |
| 152424 | plastidic | YmI093w | lignoceric acid | ARA_LEAF | p-Super | GC | 34 | 69 |
| 92274 | plastidic | Ymr150c | lignoceric acid | ARA_LEAF | p-Super | GC | 29 | 74 |
| 152460 | plastidic | Ymr208w | lignoceric acid | ARA_LEAF | p-Super | GC | 30 | 44 |
| 152341 | non-targ | Yer152c | melissic acid | ARA_LEAF | Big35S | GC | 1 | 69 |
| 152341 | non-targ | Yer152c | montanic acid | ARA_LEAF | Big35S | GC | 3 | 93 |
| 125348 | non-targ | B3644 | melissic acid | ARA_LEAF | p-Super | GC | 3 | 56 |
| 125348 | non-targ | B3644 | montanic acid | ARA_LEAF | p-Super | GC | 5 | 49 |

[96533] Column 1 shows the SEQ ID NO, Column 2 shows the expression type (targeted or non-targeted), Column 3 shows the “gene name” (locus), Column 4 shows the metabolite analyzed, Column 5 indicates the A. thaliana source tissue analyzed, Column 6 indicates the used promoter for expression, Column 7 indicates the analytical method. Columns 8 and 9 show the minimum and the maximum increase of the analyzed metabolite (in percent) in comparison to the wild type (ratio_by _WT, given as percent increase).

[96534] The term “non-targ” in Table d, Column 2 which shows the expression type means “non-targeted”.

[96535] When the analyses were repeated independently, all results proved to be significant.

[96536] [0505.1.7.18] to [0515.1.7.18] for the disclosure of these paragraphs see [0505.1.7.7] to [0515.1.7.7] above

[96537] In a further embodiment, the present invention relates in paragraphs [0000.1.7.19.] to [0514.1.7.19.] to a further process for the production of the fine chemical bis-glyceryl phosphate (polar fraction), glycerol (lipid fraction), glycerol (polar fraction), glycerol phosphate (lipid fraction), glycerol-3-phosphate (polar fraction), and/or triacylglycerol acid as defined below and corresponding embodiments as described herein as follows.

[96538] for the disclosure of this paragraph see [0001.1.7.7] above

[96539] Plants produce glycerol and glycerol-3-phosphate. Importantly lipids derived from glycerol are the major components of eukaryotic cells. In terms of dry weight they account for anywhere between 10% and 90% of the total mass of the cell. Triglycerol are the major source of store energy in eucaryotic organisms.

[96540] Glycerol is a principal component of all fats and oils, in the form of its esters called glycerides. It is commercially known as glycerin or glycerine. Glycerol (CH2OH.CHOH.CH2OH or propane-1,2,3-triol), in its pure form, is a sweet-tasting, clear, colorless, odorless, viscous liquid. It is completely soluble in water and alcohols, slightly soluble in many common solvents such as ether and dioxane, and is insoluble in hydrocarbons. As a food additive, glycerol is labeled as E number E422.

[96541] Glycerol is widely distributed in all living organisms as a constituent of glycerides. Glycerol is a precursor for synthesis of triacylglycerols and of phospholipids in the liver and adipose tissue. During digestion, glycerol is split from fatty acids and may recombine with them to form stored fat in the body or be used as a body fuel to provide energy. Before glycerol can enter the pathway of glycolysis or gluconeogenesis, it must be converted to their intermediate glyceraldehyde 3-phosphate.

[96542] Glycerol-3-phosphate (G3P, G-3-P) can be synthesized via two different routes in plants. In one route, it is formed from dihydroxyacetone phosphate (DHAP), an intermediate of glycolysis. In the second pathway it is formed by the reduction of dihydroxyacetone phosphate (DHAP).

[96543] In plants, at least two types of GPDH, a cytoplasmatic and a plastidial exist, which also differ in their reducing cosubstrate. The cytsolic GPDH uses NADH as the cosubstrate. The mitochondrial FAD-dependent glycerol-3-phosphate dehydrogenase (FAD-GPDH) of Arabidopsis forms a G-3-P shuttle, as previously established in other eukaryotic organisms, and links cytosolic G-3-P metabolism to carbon source utilization and energy metabolism in plants—also see Shen, W. et al., FEBS Lett. 2003 Feb 11; 536(1-3): 92-6.

[96544] Glycerol-3-phosphate is a primary substrate for triacylglycerol synthesis. Vigeolas and Geigenberger (Planta 219(2004): 827-835) have shown that injection of developing seeds with glycerol leads to increased glycerol-3-phosphate levels. These increased levels of glycerol-3-phosphate were accompanied by an increase in the flux of sucrose into total lipids and triacylglycerol providing evidence that the prevailing levels of glycerol-3-phosphate co-limit triacylglycerol production in developing seeds.

[96545] The direct acylation of glycerol by a glycerol: acyl-CoA acyltransferase to form mono-acyl-glycerol and, subsequently, diacylglycerol and triacylglycerol has been shown in myoblast and hepatocytes (Lee, D. P. et al. J. Lipid res. 42 (2001): 1979-1986). This direct acylation became more prominent when the glycerol-3-phosphate pathway was attenuated or when glycerol levels become elevated.

[96546] The major storage lipids (or oils) of seeds occur in the form of triacylglycerols (TAG), or three fatty acids linked to glycerol by ester bonds. Triacylglycerol synthesis involves diverse cellular compartments, including the cytoplasm, the mitochondria, the plastids, and the endoplasmic reticulum (ER). Glycerol-3-phosphate enters the ER for the final step in triacylglycerol synthesis. The newly formed triacylglycerols accumulate between the two layers of the double membrane of the ER, forming an oil body surrounded by a single (or half) unit membrane. Bis-glyceryl phosphate (glycerophophoryl glycerol, GPG) is a glycerophosphodiester which is formed by deacylation of phospholipids.

[96547] Glycerol was found to possess a wide variety of uses in the manufacture of numerous domestic, industrial, and pharmaceutical products.

[96548] Glycerol-insensitive Arabidopsis mutants: glil seedlings lack glycerol kinase, accumulate glycerol and are more resistant to abiotic stress, see Eastmond P.J. , The Plant Journal, 2004, 37(4), 617-625. These data show that glycerol kinase is required for glycerol catabolism in Arabidopsis and that the accumulation of glycerol can enhance resistance to a variety of abiotic stresses associated with dehydration.

[96549] Glycerol is used together with water and alcohol (ethyl alcohol) in glycerinated water/alcohol plant extracts and phytoaromatic compounds. These products are used as food supplements, providing concentrates of the minerals, trace elements, active ingredients (alkaloids, polyphenols, pigments, etc.) and aromatic substances to be found in plants. Glycerin acts as a carrier for plant extracts. It is found in the end product (the fresh plant extract) in concentrations of up to 24% or 25%.

[96550] Raw glycerol is a by-product of the transesterification process of rape oil to rape methyl ester (RME) and used edible oil to used edible methyl ester (AME), both better known as Biodiesel. Glycerol world production is estimated to be around 750.000 t/year. Around 90% is manufactured on the basis of natural oils and fats.

[96551] Glycerol or glycerol-phosphate, preferably G3P are biosynthetic precusors for the biosynthesis of monoacylglycerols, diacylglycerols, triacylglycerols, phosphatidylglycerols and other glycerolipids (e.g. glycosylglycerides, diphosphatidylglycerols, phosphonolipids, phosphatidylcholines, phosphatidylethanolamines, phosphatidylinositols, phytoglycolipids). Therefore the analysis of the glycerol or glycerol-phosphate content in cells, tissues or plant parts like seeds and leaves after total lipid extraction and lipid hydrolysis directly correlates with the analysis of the total lipid content. For example if the overexpression of a gene participating in the biosynthesis of triacylglycerols in the seed results in an increase in total lipid content in the seed or leaf this seed will also show an increased glycerol content after total lipid extraction and hydrolysis of the lipids.

[96552] Therefore the method as described below which leads to an increase in glycerol or glycerolphosphate in the lipid fraction after cleavage of the ester functions for example with a mixture of methanol and hydrochloric acid clearly represents a method for an increased production of triacylglycerol or total lipids.

[96553] Due to the wide variety of uses of glycerol and/or its derivates like glycerolphosphate, preferably glycerol-3-phosphate and/or GPG and/or monoacylglycerols, diacylglycerols, triacylglycerols, phosphatidylglycerols and/or other glycerolipids an increased production very important.

[96554] Particularly economical methods are biotechnological methods utilizing glycerol-producing organisms which are either natural or optimized by genetic modification.

[96555] There is a constant need for providing novel enzyme activities or direct or indirect regulators and thus alternative methods with advantageous properties for producing glycerol or its derivates in organisms, e.g. in transgenic organi sms.

[96556] The content of glycerol in a cell was also increased by increasing or decreasing certain activities as disclosed in WO 2006/069610, WO2007/087815 or WO2008/034648

[96557] Improving the quality of foodstuffs and animal feeds is an important task of the food-and-feed industry. This is necessary since, for example, glycerol and/or its derivates, which occur in plants are limited with regard to the supply of mammals. Especially advantageous for the quality of foodstuffs and animal feeds is as balanced as possible a glycerol and/or lipidprofile since a great excess of some lipids above a specific concentration in the food has no further positive effect on the utilization of the food since other lipids suddenly become limiting. A further increase in quality is only possible via addition of further lipids, which are limiting under these conditions. The targeted addition of the limiting lipid in the form of synthetic products must be carried out with extreme caution in order to avoid lipid imbalance.

[96558] To ensure a high quality of foods and animal feeds, it is therefore necessary to add a plurality of lipids in a balanced manner to suit the respective organism. Accordingly, there is still a great demand for new and more suitable genes, which encode enzymes or regulators, which participate in the biosynthesis of lipids, in particular glycerol and/or its derivates and make it possible to produce certain lipids specifically on an industrial scale without unwanted byproducts being formed. In the selection of genes for biosynthesis or regulation two characteristics above all are particularly important. On the one hand, there is as ever a need for improved processes for obtaining the highest possible contents of lipids like glycerol and/or its derivates and on the other hand as less as possible byproducts should be produced in the production process.

[96559] It is an object of the present invention to develop an inexpensive process for the synthesis of bis-glyceryl phosphate (polar fraction), glycerol (lipid fraction), glycerol (polar fraction), glycerol phosphate (lipid fraction), glycerol-3-phosphate (polar fraction), and/or triacylglycerol.

[96560] It is a further object of the present invention to develop an inexpensive process for the synthesis of lipids and/or glycerol and derivates, in particular bis-glyceryl phosphate (polar fraction), glycerol (lipid fraction), glycerol (polar fraction), glycerol phosphate (lipid fraction), glycerol-3-phosphate (polar fraction), and/or triacylglycerol and to assure that the lipids and/or glycerol and derivates, in particular bis-glyceryl phosphate (polar fraction), glycerol (lipid fraction), glycerol (polar fraction), glycerol phosphate (lipid fraction), glycerol-3-phosphate (polar fraction), and/or triacylglycerol are more accessible and facilely to isolate and recover in an industrial scale from the producing organism, preferably from a plant.

[96561] for the disclosure of this paragraph see [0013.1.7.7] above

[96562] Accordingly, in a first embodiment, the invention relates to a process for the production of at least one fine chemical selected from the group consisting of: bis-glyceryl phosphate (polar fraction), glycerol (lipid fraction), glycerol (polar fraction), glycerol phosphate (lipid fraction), glycerol-3-phosphate (polar fraction), and triacylglycerol, or, in other words, of the “fine chemical” or “fine chemical of the invention”.

[96563] The terms “fine chemical of the invention”, “fine chemical” or “the fine chemical” are used herein equally and relate in context of the paragraphs or sections [0014.1.19.19] to [0514.1.7.19] essentially to the metabolite or the metabolites indicated in column 7, application no. 19 of Tables I, II and IV in the respective line.

[96564] Further, the term “in context of any of the paragraphs [0014.1.19.19] to [0514.1.7.19]” as used herein means that for any of said paragraphs [0014.1.19.19] to [0514.1.7.19] the term “the fine chemical” is understood to follow the definition of paragraphs or sections [0014.1.19.19] and [0015.1.19.19], independently whether it refers to any other paragraph or not and whether the reference recites the term “fine chemical” in an other context.

[96565] Thus, in cases where one or more paragraphs or sections are incorporated by reference into any of the present paragraphs [0014.1.19.19] to [0514.1.7.19], e.g. by usage of the term “see paragraph” or the term “for the disclosure of this paragraph see the disclosure of paragraph” or the term “incorporated by reference” or a corresponding term, the incorporated paragraph, section or term “the fine chemical” is also understood to have the meaning according to the definition of paragraph [0014.1.19.19] and [0015.1.19.19].

[96566] Accordingly, in one embodiment, the term “fine chemical of the invention”, “fine chemical” or “the fine chemical” as used herein (alone or in combination, like in FCRP) means “bis-glyceryl phosphate (polar fraction)” in context of the nucleic acid or polypeptide sequences listed in the respective same line of any one of Tables Ito IV of application no. 19 and indicating in column 7 the metabolite “bis-glyceryl phosphate (polar fraction)”.

[96567] In one embodiment, the term bis-glyceryl phosphate (polar fraction) or the term “fine chemical” mean in context of the paragraphs or sections [0014.1.19.19] to [0514.1.7.19] at least one chemical compound with an activity of the above mentioned bis-glyceryl phosphate (polar fraction), respectively.

[96568] Accordingly, in one embodiment, the term “fine chemical of the invention”, “fine chemical” or “the fine chemical” as used herein (alone or in combination, like in FCRP) means “glycerol (lipid fraction)” in context of the nucleic acid or polypeptide sequences listed in the respective same line of any one of Tables I to IV of application no. 19 and indicating in column 7 the metabolite “glycerol (lipid fraction)”.

[96569] In one embodiment, the term glycerol (lipid fraction) or the term “fine chemical” mean in context of the paragraphs or sections [0014.1.19.19] to [0514.1.7.19] at least one chemical compound with an activity of the above mentioned glycerol (lipid fraction), respectively.

[96570] Accordingly, in one embodiment, the term “fine chemical of the invention”, “fine chemical” or “the fine chemical” as used herein (alone or in combination, like in FCRP) means “glycerol (polar fraction)” in context of the nucleic acid or polypeptide sequences listed in the respective same line of any one of Tables Ito IV of application no. 19 and indicating in column 7 the metabolite “glycerol (polar fraction)”.

[96571] In one embodiment, the term glycerol (polar fraction) or the term “fine chemical” mean in context of the paragraphs or sections [0014.1.19.19] to [0514.1.7.19] at least one chemical compound with an activity of the above mentioned glycerol (polar fraction), respectively.

[96572] Accordingly, in one embodiment, the term “fine chemical of the invention”, “fine chemical” or “the fine chemical” as used herein (alone or in combination, like in FCRP) means “glycerol phosphate (lipid fraction)” in context of the nucleic acid or polypeptide sequences listed in the respective same line of any one of Tables Ito IV of application no. 19 and indicating in column 7 the metabolite “glycerol phosphate (lipid fraction)”.

[96573] In one embodiment, the term glycerol phosphate (lipid fraction) or the term “fine chemical” mean in context of the paragraphs or sections [0014.1.19.19] to [0514.1.7.19] at least one chemical compound with an activity of the above mentioned glycerol phosphate (lipid fraction), respectively.

[96574] Accordingly, in one embodiment, the term “fine chemical of the invention”, “fine chemical” or “the fine chemical” as used herein (alone or in combination, like in FCRP) means “glycerol-3-phosphate (polar fraction)” in context of the nucleic acid or polypeptide sequences listed in the respective same line of any one of Tables I to IV of application no. 19 and indicating in column 7 the metabolite “glycerol-3-phosphate (polar fraction)”.

[96575] In one embodiment, the term glycerol-3-phosphate (polar fraction) or the term “fine chemical” mean in context of the paragraphs or sections [0014.1.19.19] to [0514.1.7.19] at least one chemical compound with an activity of the above mentioned glycerol-3-phosphate (polar fraction), respectively.

[96576] Accordingly, in one embodiment, the term “fine chemical of the invention”, “fine chemical” or “the fine chemical” as used herein (alone or in combination, like in FCRP) means “triacylglycerols” in context of the nucleic acid or polypeptide sequences listed in the respective same line of any one of Tables I to IV of application no. 19 and indicating in column 7 the metabolite “triacylglycerol”.

[96577] In one embodiment, the term triacylglycerol or the term “fine chemical” mean in context of the paragraphs or sections [0014.1.19.19] to [0514.1.7.19] at least one chemical compound with an activity of the above mentioned triacylglycerol, respectively.

[96578] Accordingly, in one embodiment, the terms “fine chemical of the invention”, “fine chemical” or “the fine chemical” mean in context of any of the paragraphs [0014.1.19.19] to [0514.1.7.19] bis-glyceryl phosphate (polar fraction), its salts, ester or ether in free form or bound form. In a preferred embodiment, the term “the fine chemical” means bis-glyceryl phosphate (polar fraction) or its salts, ester or ether, in free form or bound form.

[96579] In a preferred embodiment “bis-glyceryl phosphate (polar fraction)” means bis-glyceryl phosphate (polar fraction) in free form.

[96580] Accordingly, in one embodiment, the terms “fine chemical of the invention”, “fine chemical” or “the fine chemical” mean in context of any of the paragraphs [0014.1.19.19] to [0514.1.7.19] glycerol (lipid fraction), its salts, ester or ether in free form or bound form. In a preferred embodiment, the term “the fine chemical” means glycerol (lipid fraction) or its salts, ester or ether, in free form or bound form.

[96581] In a preferred embodiment “glycerol (lipid fraction)” means glycerol (lipid fraction) in free form.

[96582] Accordingly, in one embodiment, the terms “fine chemical of the invention”, “fine chemical” or “the fine chemical” mean in context of any of the paragraphs [0014.1.19.19] to [0514.1.7.19] glycerol (polar fraction), its salts, ester or ether in free form or bound form. In a preferred embodiment, the term “the fine chemical” means glycerol (polar fraction) or its salts, ester or ether, in free form or bound form.

[96583] In a preferred embodiment “glycerol (polar fraction)” means glycerol (polar fraction) in free form.

[96584] Accordingly, in one embodiment, the terms “fine chemical of the invention”, “fine chemical” or “the fine chemical” mean in context of any of the paragraphs [0014.1.19.19] to [0514.1.7.19] glycerol phosphate (lipid fraction), its salts, ester or ether in free form or bound form. In a preferred embodiment, the term “the fine chemical” means glycerol phosphate (lipid fraction) or its salts, ester or ether, in free form or bound form.

[96585] In a preferred embodiment “glycerol phosphate (lipid fraction)” means glycerol phosphate (lipid fraction) in free form.

[96586] Accordingly, in one embodiment, the terms “fine chemical of the invention”, “fine chemical” or “the fine chemical” mean in context of any of the paragraphs [0014.1.19.19] to [0514.1.7.19] glycerol-3-phosphate (polar fraction), its salts, ester or ether in free form or bound form. In a preferred embodiment, the term “the fine chemical” means glycerol-3-phosphate (polar fraction) or its salts, ester or ether, in free form or bound form.

[96587] In a preferred embodiment “glycerol-3-phosphate (polar fraction)” means glycerol-3-phosphate (polar fraction) in free form.

[96588] Accordingly, in one embodiment, the terms “fine chemical of the invention”, “fine chemical” or “the fine chemical” mean in context of any of the paragraphs [0014.1.19.19] to [0514.1.7.19] triacylglycerol, its salts, ester or ether in free form or bound form. In a preferred embodiment, the term “the fine chemical” means triacylglycerol or its salts, ester or ether, in free form or bound form.

[96589] In a preferred embodiment “triacylglycerol” means triacylglycerol in free form.

[96590] Accordingly, in a first embodiment, the invention relates to a process for the production of at least one fine chemical selected from the group consisting of: bis-glyceryl phosphate (polar fraction), glycerol (lipid fraction), glycerol (polar fraction), glycerol phosphate (lipid fraction), glycerol-3-phosphate (polar fraction) and/or triacylglycerol, or, in other words, of the “fine chemical” or “fine chemical of the invention”. Accordingly, in the present invention, the term “the fine chemical” as used herein relates to “glycerol and/or glycerolphosphate and/or glycerophosphodiester, preferably G3P and/or GPG and/or derivates”. Further, the term “the fine chemicals” as used herein also relates to fine chemicals comprising glycerol and/or glycerolphosphate and/or glycerolphosphate and/or glycerophosphodiester,and/or glycerides, lipids, oils and/or fats containing glycerol. Further, the term “the fine chemicals” as used herein also relates to fine chemicals comprising glycerol.

[96591] Further, the term “the fine chemicals” as used herein also relates to derivates of glycerol and/or glycerolphosphate and/or glycerophosphodiester, preferably G3P and/or GPG resp. like salts, ester, ethers, thioesters, thioethers mixtures thereof in free form or bound to other compounds such as protein(s) such as enzyme(s), peptide(s), polypeptide(s), membranes or part thereof, or lipids, oils, waxes or fatty acids or mixtures thereof or in compositions with lipids or carbohydrates such as sugars or sugarpolymers, like glucosides or polyols like myo-inositol or mixtures thereof.

[96592] In one embodiment, the term “the fine chemical” means monoacylglycerols, diacylglycerols, triacylglycerols, phosphatidylglycerols and/or other glycerolipids (e.g. but not limited to glycosylglycerides, diphosphatidylglycerols, phosphonolipids, phosphatidylcholines, phosphatidylethanolamines, phosphatidylinositols or phytoglycolipids) and is hereinafter referred to as “total lipids”.

[96593] In one embodiment, the term “glycerol” or “the fine chemical” or “the respective fine chemical” means at least one chemical compound with glycerol activity selected from the group glycerol and/or glycerolphosphate and/or glycerophosphodiester, preferably G3P and/or GPG resp. and/or derivates selected from the group of monoacylglycerols, diacylglycerols, triacylglycerols, phosphatidylglycerols and/or other glycerolipids (e.g. but not limited to glycosylglycerides, diphosphatidylglycerols, phosphonolipids, phosphatidylcholines, phosphatidylethanolamines, phosphatidylinositols or phytoglycolipids). In another embodiment, the term “glycerol” or “the fine chemical” or “the respective fine chemical” means at least one chemical compound with glycerol activity selected from the group glycerol and/or glycerolphosphate, preferably glycerol-3-phosphate and/or monoacylglycerols, diacylglycerols, triacylglycerols, phosphatidylglycerols and/or other glycerolipids (e.g. but not limited to glycosylglycerides, diphosphatidylglycerols, phosphonolipids, phosphatidylcholines, phosphatidylethanolamines, phosphatidylinositols or phytoglycolipids) in free or bound form.

[96594] In one embodiment derivates of glycerol means according to the present invention glycerolphosphate and/or glycerophosphodiester, preferably G3P and/or GPG resp.; salts, ester, ethers, thioesters, thioethers mixtures thereof or monoacylglycerols, diacylglycerols, triacylglycerols, preferably triacylglycerols, phosphatidylglycerols and/or other glycerolipids (e.g. but not limited to glycosylglycerides, diphosphatidylglycerols, phosphonolipids, phosphatidylcholines, phosphatidylethanolamines, phosphatidylinositols or phytoglycolipids) and lipids.

[96595] Further, the term “in context of any of the paragraphs [0014.1.19.19] to [0514.1.7.19]” as used herein means that for any of said paragraphs [0014.1.19.19] to [0514.1.7.19] the term “the fine chemical” is understood to follow the definition of section [0014.1.19.19] or section [0015.1.19.19], independently whether it refers to any other paragraph or not and whether the reference recites the term “fine chemical” in an other context.

[96596] Thus, in cases where one or more paragraphs or sections are incorporated by reference into any of the present paragraphs [0014.1.19.19] to [0514.1.7.19], e.g. by usage of the term “see paragraph” or the term “for the disclosure of this paragraph see the disclosure of paragraph” or the term “incorporated by reference” or a corresponding term, the incorporated paragraph, section or term “the fine chemical” is also understood to have the meaning according to this definition of this paragraph [0015.1.19.19].

[96597] Further, the term “fine chemicals” as used herein relates to compositions comprising said fine chemical(s), i.e. comprising bis-glyceryl phosphate (polar fraction), glycerol (lipid fraction), glycerol (polar fraction), glycerol phosphate (lipid fraction), glycerol-3-phosphate (polar fraction), and/or triacylglycerol, respectively.

[96598] As glycerol or glycerolphosphate, preferably G3P are biosynthetic precusor for the biosynthesis of monoacylglycerols, diacylglycerols, triacylglycerols, phosphatidylglycerols and other glycerolipids (e.g. g lycosylg lycerid es, diphosphatidylglycerols, phosphonolipids, phosphatidylcholines, phosphatidylethanolamines, phosphatidylinositols, phytoglycolipids). Therefore the analysis of the glycerol content in cells, tissues or plant parts like seeds and leaves after total lipid extraction and lipid hydrolysis directly correlates with the analysis of the total lipid content. For example if the overexpression of a gene participating in the biosynthesis of triacylglycerols in the seed results in an increase in total lipid content in the seed or leaf this seed will also show an increased glycerol content after total lipid extraction and hydrolysis of the lipids.

[96599] The same is valid for glycerophosphodiesters, preferably GPG, which are formed by deacylation of phspholipids. Therefore the analysis of the glycerophosphodiesters content in cells, tissues or plant parts like seeds and leaves after total lipid extraction directly correlates with the analysis of the total phospholipid content.

[96600] An increased glycerol, glycerolphosphate, preferably G3P, and/or glycerophosphodiesters, preferably GPG content normally means an increased of the total glycerol, glycerolphosphate, preferably G3P, and/or glycerophosphodiesters, preferably GPG content. However, a increased glycerol, glycerolphosphate, preferably G3P, and/or glycerophosphodiesters, preferably GPG content also means, in particular, a modified content of the above-described derivates of glycerol, glycerolphosphate, preferably G3P, and/or glycerophosphodiesters, preferably GPG containing compounds.

[96601] Accordingly, the present invention relates to a process for the production of glycerol phosphate (lipid fraction), which comprises
[96602] (a) increasing or generating one or more activities selected from the group consisting of protein phosphatase in a non-human organism or a part thereof, preferably a microorganism, a plant cell, a plant or a part thereof, as compared to a corresponding non-transformed wild type non-human organism or a part thereof; and
[96603] (b) growing the non-human organism or a part thereof under conditions which permit the production of glycerol phosphate (lipid fraction) or a composition comprising glycerol phosphate (lipid fraction) in said non-human organism or in the culture medium surrounding said non-human organism.

[96604] Accordingly, the present invention relates to a process for the production of bis-glyceryl phosphate (polar fraction), which comprises
[96605] (a) increasing or generating one or more activities selected from the group consisting of At1g23110-protein in a non-human organism or a part thereof, preferably a microorganism, a plant cell, a plant or a part thereof, as compared to a corresponding non-transformed wild type non-human organism or a part thereof; and
[96606] (b) growing the non-human organism or a part thereof under conditions which permit the production of bis-glyceryl phosphate (polar fraction) or a composition comprising bis-glyceryl phosphate (polar fraction) in said non-human organism or in the culture medium surrounding said non-human organism.

[96607] Accordingly, the present invention relates to a process for the production of bis-glyceryl phosphate (polar fraction), which comprises
[96608] (a) increasing or generating one or more activities selected from the group consisting of eukaryotic translation initiation factor 5 in a non-human organism or a part thereof, preferably a microorganism, a plant cell, a plant or a part thereof, as compared to a corresponding non-transformed wild type non-human organism or a part thereof; and
[96609] (b) growing the non-human organism or a part thereof under conditions which permit the production of bis-glyceryl phosphate (polar fraction) or a composition comprising bis-glyceryl phosphate (polar fraction) in said non-human organism or in the culture medium surrounding said non-human organism.

[96610] Accordingly, the present invention relates to a process for the production of glycerol phosphate (lipid fraction), which comprises
[96611] (a) increasing or generating one or more activities selected from the group consisting of eukaryotic translation initiation factor 5 in a non-human organism or a part thereof, preferably a microorganism, a plant cell, a plant or a part thereof, as compared to a corresponding non-transformed wild type non-human organism or a part thereof; and
[96612] (b) growing the non-human organism or a part thereof under conditions which permit the production of glycerol phosphate (lipid fraction) or a composition comprising glycerol phosphate (lipid fraction) in said non-human organism or in the culture medium surrounding said non-human organism.

[96613] Accordingly, the present invention relates to a process for the production of triacylglycerol, which comprises
[96614] (a) increasing or generating one or more activities selected from the group consisting of At1g67340-protein in a non-human organism or a part thereof, preferably a microorganism, a plant cell, a plant or a part thereof, as compared to a corresponding non-transformed wild type non-human organism or a part thereof; and
[96615] (b) growing the non-human organism or a part thereof under conditions which permit the production of triacylglycerol or a composition comprising triacylglycerol in said non-human organism or in the culture medium surrounding said non-human organism.

[96616] Accordingly, the present invention relates to a process for the production of glycerol (lipid fraction), which comprises
[96617] (a) increasing or generating one or more activities selected from the group consisting of transcription factor in a non-human organism or a part thereof, preferably a microorganism, a plant cell, a plant or a part thereof, as compared to a corresponding non-transformed wild type non-human organism or a part thereof; and
[96618] (b) growing the non-human organism or a part thereof under conditions which permit the production of glycerol (lipid fraction) or a composition comprising glycerol (lipid fraction) in said non-human organism or in the culture medium surrounding said non-human organism.

[96619] Accordingly, the present invention relates to a process for the production of bis-glyceryl phosphate (polar fraction), which comprises
[96620] (a) increasing or generating one or more activities selected from the group consisting of protein phosphatase in a non-human organism or a part thereof, preferably a microorganism, a plant cell, a plant or a part thereof, as compared to a corresponding non-transformed wild type non-human organism or a part thereof; and
[96621] (b) growing the non-human organism or a part thereof under conditions which permit the production of bis-glyceryl phosphate (polar fraction) or a composition comprising bis-glyceryl phosphate (polar fraction) in said non-human organism or in the culture medium surrounding said non-human organism.

[96622] Accordingly, the present invention relates to a process for the production of glycerol (lipid fraction), which comprises
[96623] (a) increasing or generating one or more activities selected from the group consisting of protein phosphatase in a non-human organism or a part thereof, preferably a microorganism, a plant cell, a plant or a part thereof, as compared to a corresponding non-transformed wild type non-human organism or a part thereof; and
[96624] (b) growing the non-human organism or a part thereof under conditions which permit the production of glycerol (lipid fraction) or a composition comprising glycerol (lipid fraction) in said non-human organism or in the culture medium surrounding said non-human organism.

[96625] Accordingly, the present invention relates to a process for the production of glycerol phosphate (lipid fraction), which comprises
[96626] (a) increasing or generating one or more activities selected from the group consisting of protein phosphatase in a non-human organism or a part thereof, preferably a microorganism, a plant cell, a plant or a part thereof, as compared to a corresponding non-transformed wild type non-human organism or a part thereof; and
[96627] (b) growing the non-human organism or a part thereof under conditions which permit the production of glycerol phosphate (lipid fraction) or a composition comprising glycerol phosphate (lipid fraction) in said non-human organism or in the culture medium surrounding said non-human organism.

[96628] Accordingly, the present invention relates to a process for the production of bis-glyceryl phosphate (polar fraction), which comprises
[96629] (a) increasing or generating one or more activities selected from the group consisting of CBL-interacting protein kinase in a non-human organism or a part thereof, preferably a microorganism, a plant cell, a plant or a part thereof, as compared to a corresponding non-transformed wild type non-human organism or a part thereof; and
[96630] (b) growing the non-human organism or a part thereof under conditions which permit the production of bis-glyceryl phosphate (polar fraction) or a composition comprising bis-glyceryl phosphate (polar fraction) in said non-human organism or in the culture medium surrounding said non-human organism.

[96631] Accordingly, the present invention relates to a process for the production of bis-glyceryl phosphate (polar fraction), which comprises
[96632] (a) increasing or generating one or more activities selected from the group consisting of phosphatidylinositol 3- and 4-kinase family protein in a non-human organism or a part thereof, preferably a microorganism, a plant cell, a plant or a part thereof, as compared to a corresponding non-transformed wild type non-human organism or a part thereof; and
[96633] (b) growing the non-human organism or a part thereof under conditions which permit the production of bis-glyceryl phosphate (polar fraction) or a composition comprising bis-glyceryl phosphate (polar fraction) in said non-human organism or in the culture medium surrounding said non-human organism.

[96634] Accordingly, the present invention relates to a process for the production of triacylglycerol, which comprises
[96635] (a) increasing or generating one or more activities selected from the group consisting of heat shock transcription factor in a non-human organism or a part thereof, preferably a microorganism, a plant cell, a plant or a part thereof, as compared to a corresponding non-transformed wild type non-human organism or a part thereof; and
[96636] (b) growing the non-human organism or a part thereof under conditions which permit the production of triacylglycerol or a composition comprising triacylglycerol in said non-human organism or in the culture medium surrounding said non-human organism.

[96637] Accordingly, the present invention relates to a process for the production of glycerol (lipid fraction), which comprises
[96638] (a) increasing or generating one or more activities selected from the group consisting of transcription factor in a non-human organism or a part thereof, preferably a microorganism, a plant cell, a plant or a part thereof, as compared to a corresponding non-transformed wild type non-human organism or a part thereof; and
[96639] (b) growing the non-human organism or a part thereof under conditions which permit the production of glycerol (lipid fraction) or a composition comprising glycerol (lipid fraction) in said non-human organism or in the culture medium surrounding said non-human organism.

[96640] Accordingly, the present invention relates to a process for the production of glycerol (lipid fraction), which comprises
[96641] (a) increasing or generating one or more activities selected from the group consisting of monothiol glutaredoxin in a non-human organism or a part thereof, preferably a microorganism, a plant cell, a plant or a part thereof, as compared to a corresponding non-transformed wild type non-human organism or a part thereof; and
[96642] (b) growing the non-human organism or a part thereof under conditions which permit the production of glycerol (lipid fraction) or a composition comprising glycerol (lipid fraction) in said non-human organism or in the culture medium surrounding said non-human organism.

[96643] Accordingly, the present invention relates to a process for the production of triacylglycerol, which comprises
[96644] (a) increasing or generating one or more activities selected from the group consisting of monothiol glutaredoxin in a non-human organism or a part thereof, preferably a microorganism, a plant cell, a plant or a part thereof, as compared to a corresponding non-transformed wild type non-human organism or a part thereof; and
[96645] (b) growing the non-human organism or a part thereof under conditions which permit the production of triacylglycerol or a composition comprising triacylglycerol in said non-human organism or in the culture medium surrounding said non-human organism.

[96646] Accordingly, the present invention relates to a process for the production of glycerol (lipid fraction), which comprises
[96647] (a) increasing or generating one or more activities selected from the group consisting of monothiol glutaredoxin in a non-human organism or a part thereof, preferably a microorganism, a plant cell, a plant or a part thereof, as compared to a corresponding non-transformed wild type non-human organism or a part thereof; and
[96648] (b) growing the non-human organism or a part thereof under conditions which permit the production of glycerol (lipid fraction) or a composition comprising glycerol (lipid fraction) in said non-human organism or in the culture medium surrounding said non-human organism.

[96649] Accordingly, the present invention relates to a process for the production of triacylglycerol, which comprises
[96650] (a) increasing or generating one or more activities selected from the group consisting of monothiol glutaredoxin in a non-human organism or a part thereof, preferably a microorganism, a plant cell, a plant or a part thereof, as compared to a corresponding non-transformed wild type non-human organism or a part thereof; and
[96651] (b) growing the non-human organism or a part thereof under conditions which permit the production of triacylglycerol or a composition comprising triacylglycerol in said non-human organism or in the culture medium surrounding said non-human organism.

[96652] Accordingly, the present invention relates to a process for the production of glycerol phosphate (lipid fraction), which comprises
[96653] (a) increasing or generating one or more activities selected from the group consisting of protein phosphatase in a non-human organism or a part thereof, preferably a microorganism, a plant cell, a plant or a part thereof, as compared to a corresponding non-transformed wild type non-human organism or a part thereof; and
[96654] (b) growing the non-human organism or a part thereof under conditions which permit the production of glycerol phosphate (lipid fraction) or a composition comprising glycerol phosphate (lipid fraction) in said non-human organism or in the culture medium surrounding said non-human organism.

[96655] Accordingly, the present invention relates to a process for the production of bis-glyceryl phosphate (polar fraction), which comprises
[96656] (a) increasing or generating one or more activities selected from the group consisting of cyclin D in a non-human organism or a part thereof, preferably a microorganism, a plant cell, a plant or a part thereof, as compared to a corresponding non-transformed wild type non-human organism or a part thereof; and
[96657] (b) growing the non-human organism or a part thereof under conditions which permit the production of bis-glyceryl phosphate (polar fraction) or a composition comprising bis-glyceryl phosphate (polar fraction) in said non-human organism or in the culture medium surrounding said non-human organism.

[96658] Accordingly, the present invention relates to a process for the production of bis-glyceryl phosphate (polar fraction), which comprises
[96659] (a) increasing or generating one or more activities selected from the group consisting of calcium-dependent protein kinase in a non-human organism or a part thereof, preferably a microorganism, a plant cell, a plant or a part thereof, as compared to a corresponding non-transformed wild type non-human organism or a part thereof; and
[96660] (b) growing the non-human organism or a part thereof under conditions which permit the production of bis-glyceryl phosphate (polar fraction) or a composition comprising bis-glyceryl phosphate (polar fraction) in said non-human organism or in the culture medium surrounding said non-human organism.

[96661] Accordingly, the present invention relates to a process for the production of glycerol (lipid fraction), which comprises
[96662] (a) increasing or generating one or more activities selected from the group consisting of heat shock transcription factor in a non-human organism or a part thereof, preferably a microorganism, a plant cell, a plant or a part thereof, as compared to a corresponding non-transformed wild type non-human organism or a part thereof; and
[96663] (b) growing the non-human organism or a part thereof under conditions which permit the production of glycerol (lipid fraction) or a composition comprising glycerol (lipid fraction) in said non-human organism or in the culture medium surrounding said non-human organism.

[96664] Accordingly, the present invention relates to a process for the production of triacylglycerol, which comprises
[96665] (a) increasing or generating one or more activities selected from the group consisting of heat shock transcription factor in a non-human organism or a part thereof, preferably a microorganism, a plant cell, a plant or a part thereof, as compared to a corresponding non-transformed wild type non-human organism or a part thereof; and
[96666] (b) growing the non-human organism or a part thereof under conditions which permit the production of triacylglycerol or a composition comprising triacylglycerol in said non-human organism or in the culture medium surrounding said non-human organism.

[96667] Accordingly, the present invention relates to a process for the production of glycerol (lipid fraction), which comprises
[96668] (a) increasing or generating one or more activities selected from the group consisting of monothiol glutaredoxin in a non-human organism or a part thereof, preferably a microorganism, a plant cell, a plant or a part thereof, as compared to a corresponding non-transformed wild type non-human organism or a part thereof; and
[96669] (b) growing the non-human organism or a part thereof under conditions which permit the production of glycerol (lipid fraction) or a composition comprising glycerol (lipid fraction) in said non-human organism or in the culture medium surrounding said non-human organism.

[96670] Accordingly, the present invention relates to a process for the production of glycerol phosphate (lipid fraction), which comprises
[96671] (a) increasing or generating one or more activities selected from the group consisting of protein phosphatase in a non-human organism or a part thereof, preferably a microorganism, a plant cell, a plant or a part thereof, as compared to a corresponding non-transformed wild type non-human organism or a part thereof; and
[96672] (b) growing the non-human organism or a part thereof under conditions which permit the production of glycerol phosphate (lipid fraction) or a composition comprising glycerol phosphate (lipid fraction) in said non-human organism or in the culture medium surrounding said non-human organism.

[96673] Accordingly, the present invention relates to a process for the production of glycerol phosphate (lipid fraction), which comprises
[96674] (a) increasing or generating one or more activities selected from the group consisting of protein phosphatase in a non-human organism or a part thereof, preferably a microorganism, a plant cell, a plant or a part thereof, as compared to a corresponding non-transformed wild type non-human organism or a part thereof; and
[96675] (b) growing the non-human organism or a part thereof under conditions which permit the production of glycerol phosphate (lipid fraction) or a composition comprising glycerol phosphate (lipid fraction) in said non-human organism or in the culture medium surrounding said non-human organism.

[96676] Accordingly, the present invention relates to a process for the production of glycerol phosphate (lipid fraction), which comprises
[96677] (a) increasing or generating one or more activities selected from the group consisting of pyruvate kinase in a non-human organism or a part thereof, preferably a microorganism, a plant cell, a plant or a part thereof, as compared to a corresponding non-transformed wild type non-human organism or a part thereof; and
[96678] (b) growing the non-human organism or a part thereof under conditions which permit the production of glycerol phosphate (lipid fraction) or a composition comprising glycerol phosphate (lipid fraction) in said non-human organism or in the culture medium surrounding said non-human organism.

[96679] Accordingly, the present invention relates to a process for the production of triacylglycerol, which comprises
[96680] (a) increasing or generating one or more activities selected from the group consisting of Glycine cleavage system T aminomethyltransferase in a non-human organism or a part thereof, preferably a microorganism, a plant cell, a plant or a part thereof, as compared to a corresponding non-transformed wild type non-human organism or a part thereof; and
[96681] (b) growing the non-human organism or a part thereof under conditions which permit the production of triacylglycerol or a composition comprising triacylglycerol in said non-human organism or in the culture medium surrounding said non-human organism.

[96682] Accordingly, the present invention relates to a process for the production of glycerol phosphate (lipid fraction), which comprises
[96683] (a) increasing or generating one or more activities selected from the group consisting of sec-independent protein translocase in a non-human organism or a part thereof, preferably a microorganism, a plant cell, a plant or a part thereof, as compared to a corresponding non-transformed wild type non-human organism or a part thereof; and
[96684] (b) growing the non-human organism or a part thereof under conditions which permit the production of glycerol phosphate (lipid fraction) or a composition comprising glycerol phosphate (lipid fraction) in said non-human organism or in the culture medium surrounding said non-human organism.

[96685] Accordingly, the present invention relates to a process for the production of glycerol (lipid fraction), which comprises
[96686] (a) increasing or generating one or more activities selected from the group consisting of oxidoreductase in a non-human organism or a part thereof, preferably a microorganism, a plant cell, a plant or a part thereof, as compared to a corresponding non-transformed wild type non-human organism or a part thereof; and
[96687] (b) growing the non-human organism or a part thereof under conditions which permit the production of glycerol (lipid fraction) or a composition comprising glycerol (lipid fraction) in said non-human organism or in the culture medium surrounding said non-human organism.

[96688] Accordingly, the present invention relates to a process for the production of bis-glyceryl phosphate (polar fraction), which comprises
[96689] (a) increasing or generating one or more activities selected from the group consisting of transcriptional regulator protein in a non-human organism or a part thereof, preferably a microorganism, a plant cell, a plant or a part thereof, as compared to a corresponding non-transformed wild type non-human organism or a part thereof; and
[96690] (b) growing the non-human organism or a part thereof under conditions which permit the production of bis-glyceryl phosphate (polar fraction) or a composition comprising bis-glyceryl phosphate (polar fraction) in said non-human organism or in the culture medium surrounding said non-human organism.

[96691] Accordingly, the present invention relates to a process for the production of bis-glyceryl phosphate (polar fraction), which comprises
[96692] (a) increasing or generating one or more activities selected from the group consisting of beta-hydroxylase in a non-human organism or a part thereof, preferably a microorganism, a plant cell, a plant or a part thereof, as compared to a corresponding non-transformed wild type non-human organism or a part thereof; and
[96693] (b) growing the non-human organism or a part thereof under conditions which permit the production of bis-glyceryl phosphate (polar fraction) or a composition comprising bis-glyceryl phosphate (polar fraction) in said non-human organism or in the culture medium surrounding said non-human organism.

[96694] Accordingly, the present invention relates to a process for the production of triacylglycerol, which comprises
[96695] (a) increasing or generating one or more activities selected from the group consisting of beta-hydroxylase in a non-human organism or a part thereof, preferably a microorganism, a plant cell, a plant or a part thereof, as compared to a corresponding non-transformed wild type non-human organism or a part thereof; and
[96696] (b) growing the non-human organism or a part thereof under conditions which permit the production of triacylglycerol or a composition comprising triacylglycerol in said non-human organism or in the culture medium surrounding said non-human organism.

[96697] Accordingly, the present invention relates to a process for the production of bis-glyceryl phosphate (polar fraction), which comprises
[96698] (a) increasing or generating one or more activities selected from the group consisting of oxidoreductase in a non-human organism or a part thereof, preferably a microorganism, a plant cell, a plant or a part thereof, as compared to a corresponding non-transformed wild type non-human organism or a part thereof; and
[96699] (b) growing the non-human organism or a part thereof under conditions which permit the production of bis-glyceryl phosphate (polar fraction) or a composition comprising bis-glyceryl phosphate (polar fraction) in said non-human organism or in the culture medium surrounding said non-human organism.

[96700] Accordingly, the present invention relates to a process for the production of glycerol phosphate (lipid fraction), which comprises
[96701] (a) increasing or generating one or more activities selected from the group consisting of ThiF family protein in a non-human organism or a part thereof, preferably a microorganism, a plant cell, a plant or a part thereof, as compared to a corresponding non-transformed wild type non-human organism or a part thereof; and
[96702] (b) growing the non-human organism or a part thereof under conditions which permit the production of glycerol phosphate (lipid fraction) or a composition comprising glycerol phosphate (lipid fraction) in said non-human organism or in the culture medium surrounding said non-human organism.

[96703] Accordingly, the present invention relates to a process for the production of glycerol (lipid fraction), which comprises
[96704] (a) increasing or generating one or more activities selected from the group consisting of recombinase A in a non-human organism or a part thereof, preferably a microorganism, a plant cell, a plant or a part thereof, as compared to a corresponding non-transformed wild type non-human organism or a part thereof; and
[96705] (b) growing the non-human organism or a part thereof under conditions which permit the production of glycerol (lipid fraction) or a composition comprising glycerol (lipid fraction) in said non-human organism or in the culture medium surrounding said non-human organism.

[96706] Accordingly, the present invention relates to a process for the production of bis-glyceryl phosphate (polar fraction), which comprises
[96707] (a) increasing or generating one or more activities selected from the group consisting of NADH-quinone oxidoreductase subunit in a non-human organism or a part thereof, preferably a microorganism, a plant cell, a plant or a part thereof, as compared to a corresponding non-transformed wild type non-human organism or a part thereof; and
[96708] (b) growing the non-human organism or a part thereof under conditions which permit the production of bis-glyceryl phosphate (polar fraction) or a composition comprising bis-glyceryl phosphate (polar fraction) in said non-human organism or in the culture medium surrounding said non-human organism.

[96709] Accordingly, the present invention relates to a process for the production of triacylglycerol, which comprises
[96710] (a) increasing or generating one or more activities selected from the group consisting of hydrolase in a non-human organism or a part thereof, preferably a microorganism, a plant cell, a plant or a part thereof, as compared to a corresponding non-transformed wild type non-human organism or a part thereof; and
[96711] (b) growing the non-human organism or a part thereof under conditions which permit the production of triacylglycerol or a composition comprising triacylglycerol in said non-human organism or in the culture medium surrounding said non-human organism.

[96712] Accordingly, the present invention relates to a process for the production of glycerol phosphate (lipid fraction), which comprises
[96713] (a) increasing or generating one or more activities selected from the group consisting of HesB/YadR/YfhF family protein in a non-human organism or a part thereof, preferably a microorganism, a plant cell, a plant or a part thereof, as compared to a corresponding non-transformed wild type non-human organism or a part thereof; and
[96714] (b) growing the non-human organism or a part thereof under conditions which permit the production of glycerol phosphate (lipid fraction) or a composition comprising glycerol phosphate (lipid fraction) in said non-human organism or in the culture medium surrounding said non-human organism.

[96715] Accordingly, the present invention relates to a process for the production of bis-glyceryl phosphate (polar fraction), which comprises
[96716] (a) increasing or generating one or more activities selected from the group consisting of pyruvate kinase in a non-human organism or a part thereof, preferably a microorganism, a plant cell, a plant or a part thereof, as compared to a corresponding non-transformed wild type non-human organism or a part thereof; and
[96717] (b) growing the non-human organism or a part thereof under conditions which permit the production of bis-glyceryl phosphate (polar fraction) or a composition comprising bis-glyceryl phosphate (polar fraction) in said non-human organism or in the culture medium surrounding said non-human organism.

[96718] Accordingly, the present invention relates to a process for the production of triacylglycerol, which comprises
[96719] (a) increasing or generating one or more activities selected from the group consisting of threonine synthase in a non-human organism or a part thereof, preferably a microorganism, a plant cell, a plant or a part thereof, as compared to a corresponding non-transformed wild type non-human organism or a part thereof; and
[96720] (b) growing the non-human organism or a part thereof under conditions which permit the production of triacylglycerol or a composition comprising triacylglycerol in said non-human organism or in the culture medium surrounding said non-human organism.

[96721] Accordingly, the present invention relates to a process for the production of glycerol phosphate (lipid fraction), which comprises
[96722] (a) increasing or generating one or more activities selected from the group consisting of b0050-protein in a non-human organism or a part thereof, preferably a microorganism, a plant cell, a plant or a part thereof, as compared to a corresponding non-transformed wild type non-human organism or a part thereof; and
[96723] (b) growing the non-human organism or a part thereof under conditions which permit the production of glycerol phosphate (lipid fraction) or a composition comprising glycerol phosphate (lipid fraction) in said non-human organism or in the culture medium surrounding said non-human organism.

[96724] Accordingly, the present invention relates to a process for the production of bis-glyceryl phosphate (polar fraction), which comprises
[96725] (a) increasing or generating one or more activities selected from the group consisting of serine protease in a non-human organism or a part thereof, preferably a microorganism, a plant cell, a plant or a part thereof, as compared to a corresponding non-transformed wild type non-human organism or a part thereof; and
[96726] (b) growing the non-human organism or a part thereof under conditions which permit the production of bis-glyceryl phosphate (polar fraction) or a composition comprising bis-glyceryl phosphate (polar fraction) in said non-human organism or in the culture medium surrounding said non-human organism.

[96727] Accordingly, the present invention relates to a process for the production of triacylglycerol, which comprises
[96728] (a) increasing or generating one or more activities selected from the group consisting of serine protease in a non-human organism or a part thereof, preferably a microorganism, a plant cell, a plant or a part thereof, as compared to a corresponding non-transformed wild type non-human organism or a part thereof; and
[96729] (b) growing the non-human organism or a part thereof under conditions which permit the production of triacylglycerol or a composition comprising triacylglycerol in said non-human organism or in the culture medium surrounding said non-human organism.

[96730] Accordingly, the present invention relates to a process for the production of bis-glyceryl phosphate (polar fraction), which comprises
[96731] (a) increasing or generating one or more activities selected from the group consisting of ATP-binding component of a transport system in a non-human organism or a part thereof, preferably a microorganism, a plant cell, a plant or a part thereof, as compared to a corresponding non-transformed wild type non-human organism or a part thereof; and
[96732] (b) growing the non-human organism or a part thereof under conditions which permit the production of bis-glyceryl phosphate (polar fraction) or a composition comprising bis-glyceryl phosphate (polar fraction) in said non-human organism or in the culture medium surrounding said non-human organism.

[96733] Accordingly, the present invention relates to a process for the production of glycerol (lipid fraction), which comprises
[96734] (a) increasing or generating one or more activities selected from the group consisting of b0518-protein in a non-human organism or a part thereof, preferably a microorganism, a plant cell, a plant or a part thereof, as compared to a corresponding non-transformed wild type non-human organism or a part thereof; and
[96735] (b) growing the non-human organism or a part thereof under conditions which permit the production of glycerol (lipid fraction) or a composition comprising glycerol (lipid fraction) in said non-human organism or in the culture medium surrounding said non-human organism.

[96736] Accordingly, the present invention relates to a process for the production of bis-glyceryl phosphate (polar fraction), which comprises
[96737] (a) increasing or generating one or more activities selected from the group consisting of phosphoglyceromutase in a non-human organism or a part thereof, preferably a microorganism, a plant cell, a plant or a part thereof, as compared to a corresponding non-transformed wild type non-human organism or a part thereof; and
[96738] (b) growing the non-human organism or a part thereof under conditions which permit the production of bis-glyceryl phosphate (polar fraction) or a composition comprising bis-glyceryl phosphate (polar fraction) in said non-human organism or in the culture medium surrounding said non-human organism.

[96739] Accordingly, the present invention relates to a process for the production of glycerol (polar fraction), which comprises
[96740] (a) increasing or generating one or more activities selected from the group consisting of putrescine transport system permease protein in a non-human organism or a part thereof, preferably a microorganism, a plant cell, a plant or a part thereof, as compared to a corresponding non-transformed wild type non-human organism or a part thereof; and
[96741] (b) growing the non-human organism or a part thereof under conditions which permit the production of glycerol (polar fraction) or a composition comprising glycerol (polar fraction) in said non-human organism or in the culture medium surrounding said non-human organism.

[96742] Accordingly, the present invention relates to a process for the production of glycerol (lipid fraction), which comprises
[96743] (a) increasing or generating one or more activities selected from the group consisting of methylglyoxal synthase in a non-human organism or a part thereof, preferably a microorganism, a plant cell, a plant or a part thereof, as compared to a corresponding non-transformed wild type non-human organism or a part thereof; and
[96744] (b) growing the non-human organism or a part thereof under conditions which permit the production of glycerol (lipid fraction) or a composition comprising glycerol (lipid fraction) in said non-human organism or in the culture medium surrounding said non-human organism.

[96745] Accordingly, the present invention relates to a process for the production of glycerol (polar fraction), which comprises
[96746] (a) increasing or generating one or more activities selected from the group consisting of methylglyoxal synthase in a non-human organism or a part thereof, preferably a microorganism, a plant cell, a plant or a part thereof, as compared to a corresponding non-transformed wild type non-human organism or a part thereof; and
[96747] (b) growing the non-human organism or a part thereof under conditions which permit the production of glycerol (polar fraction) or a composition comprising glycerol (polar fraction) in said non-human organism or in the culture medium surrounding said non-human organism.

[96748] Accordingly, the present invention relates to a process for the production of bis-glyceryl phosphate (polar fraction), which comprises
[96749] (a) increasing or generating one or more activities selected from the group consisting of b0970-protein in a non-human organism or a part thereof, preferably a microorganism, a plant cell, a plant or a part thereof, as compared to a corresponding non-transformed wild type non-human organism or a part thereof; and
[96750] (b) growing the non-human organism or a part thereof under conditions which permit the production of bis-glyceryl phosphate (polar fraction) or a composition comprising bis-glyceryl phosphate (polar fraction) in said non-human organism or in the culture medium surrounding said non-human organism.

[96751] Accordingly, the present invention relates to a process for the production of bis-glyceryl phosphate (polar fraction), which comprises
[96752] (a) increasing or generating one or more activities selected from the group consisting of b1003-protein in a non-human organism or a part thereof, preferably a microorganism, a plant cell, a plant or a part thereof, as compared to a corresponding non-transformed wild type non-human organism or a part thereof; and
[96753] (b) growing the non-human organism or a part thereof under conditions which permit the production of bis-glyceryl phosphate (polar fraction) or a composition comprising bis-glyceryl phosphate (polar fraction) in said non-human organism or in the culture medium surrounding said non-human organism.

[96754] Accordingly, the present invention relates to a process for the production of bis-glyceryl phosphate (polar fraction), which comprises
[96755] (a) increasing or generating one or more activities selected from the group consisting of 3-oxoacyl-[acyl-carrier-protein] synthase in a non-human organism or a part thereof, preferably a microorganism, a plant cell, a plant or a part thereof, as compared to a corresponding non-transformed wild type non-human organism or a part thereof; and
[96756] (b) growing the non-human organism or a part thereof under conditions which permit the production of bis-glyceryl phosphate (polar fraction) or a composition comprising bis-glyceryl phosphate (polar fraction) in said non-human organism or in the culture medium surrounding said non-human organism.

[96757] Accordingly, the present invention relates to a process for the production of glycerol (lipid fraction), which comprises
[96758] (a) increasing or generating one or more activities selected from the group consisting of sodium/proton antiporter in a non-human organism or a part thereof, preferably a microorganism, a plant cell, a plant or a part thereof, as compared to a corresponding non-transformed wild type non-human organism or a part thereof; and
[96759] (b) growing the non-human organism or a part thereof under conditions which permit the production of glycerol (lipid fraction) or a composition comprising glycerol (lipid fraction) in said non-human organism or in the culture medium surrounding said non-human organism.

[96760] Accordingly, the present invention relates to a process for the production of triacylglycerol, which comprises
[96761] (a) increasing or generating one or more activities selected from the group consisting of b1234-protein in a non-human organism or a part thereof, preferably a microorganism, a plant cell, a plant or a part thereof, as compared to a corresponding non-transformed wild type non-human organism or a part thereof; and
[96762] (b) growing the non-human organism or a part thereof under conditions which permit the production of triacylglycerol or a composition comprising triacylglycerol in said non-human organism or in the culture medium surrounding said non-human organism.

[96763] Accordingly, the present invention relates to a process for the production of glycerol (lipid fraction), which comprises
[96764] (a) increasing or generating one or more activities selected from the group consisting of cardiolipin synthase in a non-human organism or a part thereof, preferably a microorganism, a plant cell, a plant or a part thereof, as compared to a corresponding non-transformed wild type non-human organism or a part thereof; and
[96765] (b) growing the non-human organism or a part thereof under conditions which permit the production of glycerol (lipid fraction) or a composition comprising glycerol (lipid fraction) in said non-human organism or in the culture medium surrounding said non-human organism.

[96766] Accordingly, the present invention relates to a process for the production of glycerol phosphate (lipid fraction), which comprises
[96767] (a) increasing or generating one or more activities selected from the group consisting of b1330-protein in a non-human organism or a part thereof, preferably a microorganism, a plant cell, a plant or a part thereof, as compared to a corresponding non-transformed wild type non-human organism or a part thereof; and
[96768] (b) growing the non-human organism or a part thereof under conditions which permit the production of glycerol phosphate (lipid fraction) or a composition comprising glycerol phosphate (lipid fraction) in said non-human organism or in the culture medium surrounding said non-human organism.

[96769] Accordingly, the present invention relates to a process for the production of bis-glyceryl phosphate (polar fraction), which comprises
[96770] (a) increasing or generating one or more activities selected from the group consisting of ATP-dependent RNA helicase in a non-human organism or a part thereof, preferably a microorganism, a plant cell, a plant or a part thereof, as compared to a corresponding non-transformed wild type non-human organism or a part thereof; and
[96771] (b) growing the non-human organism or a part thereof under conditions which permit the production of bis-glyceryl phosphate (polar fraction) or a composition comprising bis-glyceryl phosphate (polar fraction) in said non-human organism or in the culture medium surrounding said non-human organism.

[96772] Accordingly, the present invention relates to a process for the production of bis-glyceryl phosphate (polar fraction), which comprises
[96773] (a) increasing or generating one or more activities selected from the group consisting of phenylacetic acid degradation protein in a non-human organism or a part thereof, preferably a microorganism, a plant cell, a plant or a part thereof, as compared to a corresponding non-transformed wild type non-human organism or a part thereof; and
[96774] (b) growing the non-human organism or a part thereof under conditions which permit the production of bis-glyceryl phosphate (polar fraction) or a composition comprising bis-glyceryl phosphate (polar fraction) in said non-human organism or in the culture medium surrounding said non-human organism.

[96775] Accordingly, the present invention relates to a process for the production of bis-glyceryl phosphate (polar fraction), which comprises
[96776] (a) increasing or generating one or more activities selected from the group consisting of lipoprotein precursor in a non-human organism or a part thereof, preferably a microorganism, a plant cell, a plant or a part thereof, as compared to a corresponding non-transformed wild type non-human organism or a part thereof; and
[96777] (b) growing the non-human organism or a part thereof under conditions which permit the production of bis-glyceryl phosphate (polar fraction) or a composition comprising bis-glyceryl phosphate (polar fraction) in said non-human organism or in the culture medium surrounding said non-human organism.

[96778] Accordingly, the present invention relates to a process for the production of bis-glyceryl phosphate (polar fraction), which comprises
[96779] (a) increasing or generating one or more activities selected from the group consisting of b1522-protein in a non-human organism or a part thereof, preferably a microorganism, a plant cell, a plant or a part thereof, as compared to a corresponding non-transformed wild type non-human organism or a part thereof; and
[96780] (b) growing the non-human organism or a part thereof under conditions which permit the production of bis-glyceryl phosphate (polar fraction) or a composition comprising bis-glyceryl phosphate (polar fraction) in said non-human organism or in the culture medium surrounding said non-human organism.

[96781] Accordingly, the present invention relates to a process for the production of bis-glyceryl phosphate (polar fraction), which comprises
[96782] (a) increasing or generating one or more activities selected from the group consisting of lysozyme in a non-human organism or a part thereof, preferably a microorganism, a plant cell, a plant or a part thereof, as compared to a corresponding non-transformed wild type non-human organism or a part thereof; and
[96783] (b) growing the non-human organism or a part thereof under conditions which permit the production of bis-glyceryl phosphate (polar fraction) or a composition comprising bis-glyceryl phosphate (polar fraction) in said non-human organism or in the culture medium surrounding said non-human organism.

[96784] Accordingly, the present invention relates to a process for the production of bis-glyceryl phosphate (polar fraction), which comprises
[96785] (a) increasing or generating one or more activities selected from the group consisting of b1556-protein in a non-human organism or a part thereof, preferably a microorganism, a plant cell, a plant or a part thereof, as compared to a corresponding non-transformed wild type non-human organism or a part thereof; and
[96786] (b) growing the non-human organism or a part thereof under conditions which permit the production of bis-glyceryl phosphate (polar fraction) or a composition comprising bis-glyceryl phosphate (polar fraction) in said non-human organism or in the culture medium surrounding said non-human organism.

[96787] Accordingly, the present invention relates to a process for the production of triacylglycerol, which comprises
[96788] (a) increasing or generating one or more activities selected from the group consisting of b1583-protein in a non-human organism or a part thereof, preferably a microorganism, a plant cell, a plant or a part thereof, as compared to a corresponding non-transformed wild type non-human organism or a part thereof; and
[96789] (b) growing the non-human organism or a part thereof under conditions which permit the production of triacylglycerol or a composition comprising triacylglycerol in said non-human organism or in the culture medium surrounding said non-human organism.

[96790] Accordingly, the present invention relates to a process for the production of bis-glyceryl phosphate (polar fraction), which comprises
[96791] (a) increasing or generating one or more activities selected from the group consisting of Fe—S subunit of oxidoreductase in a non-human organism or a part thereof, preferably a microorganism, a plant cell, a plant or a part thereof, as compared to a corresponding non-transformed wild type non-human organism or a part thereof; and
[96792] (b) growing the non-human organism or a part thereof under conditions which permit the production of bis-glyceryl phosphate (polar fraction) or a composition comprising bis-glyceryl phosphate (polar fraction) in said non-human organism or in the culture medium surrounding said non-human organism.

[96793] Accordingly, the present invention relates to a process for the production of glycerol (lipid fraction), which comprises
[96794] (a) increasing or generating one or more activities selected from the group consisting of acid shock protein in a non-human organism or a part thereof, preferably a microorganism, a plant cell, a plant or a part thereof, as compared to a corresponding non-transformed wild type non-human organism or a part thereof; and
[96795] (b) growing the non-human organism or a part thereof under conditions which permit the production of glycerol (lipid fraction) or a composition comprising glycerol (lipid fraction) in said non-human organism or in the culture medium surrounding said non-human organism.

[96796] Accordingly, the present invention relates to a process for the production of bis-glyceryl phosphate (polar fraction), which comprises
[96797] (a) increasing or generating one or more activities selected from the group consisting of b1670-protein in a non-human organism or a part thereof, preferably a microorganism, a plant cell, a plant or a part thereof, as compared to a corresponding non-transformed wild type non-human organism or a part thereof; and
[96798] (b) growing the non-human organism or a part thereof under conditions which permit the production of bis-glyceryl phosphate (polar fraction) or a composition comprising bis-glyceryl phosphate (polar fraction) in said non-human organism or in the culture medium surrounding said non-human organism.

[96799] Accordingly, the present invention relates to a process for the production of bis-glyceryl phosphate (polar fraction), which comprises
[96800] (a) increasing or generating one or more activities selected from the group consisting of b1672-protein in a non-human organism or a part thereof, preferably a microorganism, a plant cell, a plant or a part thereof, as compared to a corresponding non-transformed wild type non-human organism or a part thereof; and
[96801] (b) growing the non-human organism or a part thereof under conditions which permit the production of bis-glyceryl phosphate (polar fraction) or a composition comprising bis-glyceryl phosphate (polar fraction) in said non-human organism or in the culture medium surrounding said non-human organism.

[96802] Accordingly, the present invention relates to a process for the production of triacylglycerol, which comprises
[96803] (a) increasing or generating one or more activities selected from the group consisting of b1703-protein in a non-human organism or a part thereof, preferably a microorganism, a plant cell, a plant or a part thereof, as compared to a corresponding non-transformed wild type non-human organism or a part thereof; and
[96804] (b) growing the non-human organism or a part thereof under conditions which permit the production of triacylglycerol or a composition comprising triacylglycerol in said non-human organism or in the culture medium surrounding said non-human organism.

[96805] Accordingly, the present invention relates to a process for the production of bis-glyceryl phosphate (polar fraction), which comprises
[96806] (a) increasing or generating one or more activities selected from the group consisting of phosphotransferase system component in a non-human organism or a part thereof, preferably a microorganism, a plant cell, a plant or a part thereof, as compared to a corresponding non-transformed wild type non-human organism or a part thereof; and
[96807] (b) growing the non-human organism or a part thereof under conditions which permit the production of bis-glyceryl phosphate (polar fraction) or a composition comprising bis-glyceryl phosphate (polar fraction) in said non-human organism or in the culture medium surrounding said non-human organism.

[96808] Accordingly, the present invention relates to a process for the production of triacylglycerol, which comprises
[96809] (a) increasing or generating one or more activities selected from the group consisting of B1795-protein in a non-human organism or a part thereof, preferably a microorganism, a plant cell, a plant or a part thereof, as compared to a corresponding non-transformed wild type non-human organism or a part thereof; and
[96810] (b) growing the non-human organism or a part thereof under conditions which permit the production of triacylglycerol or a composition comprising triacylglycerol in said non-human organism or in the culture medium surrounding said non-human organism.

[96811] Accordingly, the present invention relates to a process for the production of glycerol-3-phosphate (polar fraction), which comprises
[96812] (a) increasing or generating one or more activities selected from the group consisting of L-serine dehydratase in a non-human organism or a part thereof, preferably a microorganism, a plant cell, a plant or a part thereof, as compared to a corresponding non-transformed wild type non-human organism or a part thereof; and
[96813] (b) growing the non-human organism or a part thereof under conditions which permit the production of glycerol-3-phosphate (polar fraction) or a composition comprising glycerol-3-phosphate (polar fraction) in said non-human organism or in the culture medium surrounding said non-human organism.

[96814] Accordingly, the present invention relates to a process for the production of glycerol phosphate (lipid fraction), which comprises
[96815] (a) increasing or generating one or more activities selected from the group consisting of b1837-protein in a non-human organism or a part thereof, preferably a microorganism, a plant cell, a plant or a part thereof, as compared to a corresponding non-transformed wild type non-human organism or a part thereof; and
[96816] (b) growing the non-human organism or a part thereof under conditions which permit the production of glycerol phosphate (lipid fraction) or a composition comprising glycerol phosphate (lipid fraction) in said non-human organism or in the culture medium surrounding said non-human organism.

[96817] Accordingly, the present invention relates to a process for the production of triacylglycerol, which comprises
[96818] (a) increasing or generating one or more activities selected from the group consisting of trehalose-phosphatase in a non-human organism or a part thereof, preferably a microorganism, a plant cell, a plant or a part thereof, as compared to a corresponding non-transformed wild type non-human organism or a part thereof; and
[96819] (b) growing the non-human organism or a part thereof under conditions which permit the production of triacylglycerol or a composition comprising triacylglycerol in said non-human organism or in the culture medium surrounding said non-human organism.

[96820] Accordingly, the present invention relates to a process for the production of glycerol (lipid fraction), which comprises
[96821] (a) increasing or generating one or more activities selected from the group consisting of imidazole glycerol phosphate synthase subunit in a non-human organism or a part thereof, preferably a microorganism, a plant cell, a plant or a part thereof, as compared to a corresponding non-transformed wild type non-human organism or a part thereof; and
[96822] (b) growing the non-human organism or a part thereof under conditions which permit the production of glycerol (lipid fraction) or a composition comprising glycerol (lipid fraction) in said non-human organism or in the culture medium surrounding said non-human organism.

[96823] Accordingly, the present invention relates to a process for the production of glycerol phosphate (lipid fraction), which comprises
[96824] (a) increasing or generating one or more activities selected from the group consisting of b2032-protein in a non-human organism or a part thereof, preferably a microorganism, a plant cell, a plant or a part thereof, as compared to a corresponding non-transformed wild type non-human organism or a part thereof; and
[96825] (b) growing the non-human organism or a part thereof under conditions which permit the production of glycerol phosphate (lipid fraction) or a composition comprising glycerol phosphate (lipid fraction) in said non-human organism or in the culture medium surrounding said non-human organism.

[96826] Accordingly, the present invention relates to a process for the production of glycerol (lipid fraction), which comprises
[96827] (a) increasing or generating one or more activities selected from the group consisting of b2099-protein in a non-human organism or a part thereof, preferably a microorganism, a plant cell, a plant or a part thereof, as compared to a corresponding non-transformed wild type non-human organism or a part thereof; and
[96828] (b) growing the non-human organism or a part thereof under conditions which permit the production of glycerol (lipid fraction) or a composition comprising glycerol (lipid fraction) in said non-human organism or in the culture medium surrounding said non-human organism.

[96829] Accordingly, the present invention relates to a process for the production of bis-glyceryl phosphate (polar fraction), which comprises
[96830] (a) increasing or generating one or more activities selected from the group consisting of b2139-protein in a non-human organism or a part thereof, preferably a microorganism, a plant cell, a plant or a part thereof, as compared to a corresponding non-transformed wild type non-human organism or a part thereof; and
[96831] (b) growing the non-human organism or a part thereof under conditions which permit the production of bis-glyceryl phosphate (polar fraction) or a composition comprising bis-glyceryl phosphate (polar fraction) in said non-human organism or in the culture medium surrounding said non-human organism.

[96832] Accordingly, the present invention relates to a process for the production of glycerol (lipid fraction), which comprises
[96833] (a) increasing or generating one or more activities selected from the group consisting of ABC transporter permease protein in a non-human organism or a part thereof, preferably a microorganism, a plant cell, a plant or a part thereof, as compared to a corresponding non-transformed wild type non-human organism or a part thereof; and
[96834] (b) growing the non-human organism or a part thereof under conditions which permit the production of glycerol (lipid fraction) or a composition comprising glycerol (lipid fraction) in said non-human organism or in the culture medium surrounding said non-human organism.

[96835] Accordingly, the present invention relates to a process for the production of glycerol phosphate (lipid fraction), which comprises
[96836] (a) increasing or generating one or more activities selected from the group consisting of ion-transport protein in a non-human organism or a part thereof, preferably a microorganism, a plant cell, a plant or a part thereof, as compared to a corresponding non-transformed wild type non-human organism or a part thereof; and
[96837] (b) growing the non-human organism or a part thereof under conditions which permit the production of glycerol phosphate (lipid fraction) or a composition comprising glycerol phosphate (lipid fraction) in said non-human organism or in the culture medium surrounding said non-human organism.

[96838] Accordingly, the present invention relates to a process for the production of bis-glyceryl phosphate (polar fraction), which comprises
[96839] (a) increasing or generating one or more activities selected from the group consisting of b2399-protein in a non-human organism or a part thereof, preferably a microorganism, a plant cell, a plant or a part thereof, as compared to a corresponding non-transformed wild type non-human organism or a part thereof; and
[96840] (b) growing the non-human organism or a part thereof under conditions which permit the production of bis-glyceryl phosphate (polar fraction) or a composition comprising bis-glyceryl phosphate (polar fraction) in said non-human organism or in the culture medium surrounding said non-human organism.

[96841] Accordingly, the present invention relates to a process for the production of glycerol (lipid fraction), which comprises
[96842] (a) increasing or generating one or more activities selected from the group consisting of b2399-protein in a non-human organism or a part thereof, preferably a microorganism, a plant cell, a plant or a part thereof, as compared to a corresponding non-transformed wild type non-human organism or a part thereof; and
[96843] (b) growing the non-human organism or a part thereof under conditions which permit the production of glycerol (lipid fraction) or a composition comprising glycerol (lipid fraction) in said non-human organism or in the culture medium surrounding said non-human organism.

[96844] Accordingly, the present invention relates to a process for the production of glycerol (lipid fraction), which comprises
[96845] (a) increasing or generating one or more activities selected from the group consisting of ethanolamine utilization protein in a non-human organism or a part thereof, preferably a microorganism, a plant cell, a plant or a part thereof, as compared to a corresponding non-transformed wild type non-human organism or a part thereof; and
[96846] (b) growing the non-human organism or a part thereof under conditions which permit the production of glycerol (lipid fraction) or a composition comprising glycerol (lipid fraction) in said non-human organism or in the culture medium surrounding said non-human organism.

[96847] Accordingly, the present invention relates to a process for the production of glycerol phosphate (lipid fraction), which comprises
[96848] (a) increasing or generating one or more activities selected from the group consisting of ethanolamine utilization protein in a non-human organism or a part thereof, preferably a microorganism, a plant cell, a plant or a part thereof, as compared to a corresponding non-transformed wild type non-human organism or a part thereof; and
[96849] (b) growing the non-human organism or a part thereof under conditions which permit the production of glycerol phosphate (lipid fraction) or a composition comprising glycerol phosphate (lipid fraction) in said non-human organism or in the culture medium surrounding said non-human organism.

[96850] Accordingly, the present invention relates to a process for the production of glycerol (lipid fraction), which comprises
[96851] (a) increasing or generating one or more activities selected from the group consisting of ethanolamine utilization protein in a non-human organism or a part thereof, preferably a microorganism, a plant cell, a plant or a part thereof, as compared to a corresponding non-transformed wild type non-human organism or a part thereof; and
[96852] (b) growing the non-human organism or a part thereof under conditions which permit the production of glycerol (lipid fraction) or a composition comprising glycerol (lipid fraction) in said non-human organism or in the culture medium surrounding said non-human organism.

[96853] Accordingly, the present invention relates to a process for the production of bis-glyceryl phosphate (polar fraction), which comprises
[96854] (a) increasing or generating one or more activities selected from the group consisting of b2474-protein in a non-human organism or a part thereof, preferably a microorganism, a plant cell, a plant or a part thereof, as compared to a corresponding non-transformed wild type non-human organism or a part thereof; and
[96855] (b) growing the non-human organism or a part thereof under conditions which permit the production of bis-glyceryl phosphate (polar fraction) or a composition comprising bis-glyceryl phosphate (polar fraction) in said non-human organism or in the culture medium surrounding said non-human organism.

[96856] Accordingly, the present invention relates to a process for the production of glycerol (lipid fraction), which comprises
[96857] (a) increasing or generating one or more activities selected from the group consisting of b2474-protein in a non-human organism or a part thereof, preferably a microorganism, a plant cell, a plant or a part thereof, as compared to a corresponding non-transformed wild type non-human organism or a part thereof; and
[96858] (b) growing the non-human organism or a part thereof under conditions which permit the production of glycerol (lipid fraction) or a composition comprising glycerol (lipid fraction) in said non-human organism or in the culture medium surrounding said non-human organism.

[96859] Accordingly, the present invention relates to a process for the production of glycerol (lipid fraction), which comprises
[96860] (a) increasing or generating one or more activities selected from the group consisting of putative transport system permease protein in a non-human organism or a part thereof, preferably a microorganism, a plant cell, a plant or a part thereof, as compared to a corresponding non-transformed wild type non-human organism or a part thereof; and
[96861] (b) growing the non-human organism or a part thereof under conditions which permit the production of glycerol (lipid fraction) or a composition comprising glycerol (lipid fraction) in said non-human organism or in the culture medium surrounding said non-human organism.

[96862] Accordingly, the present invention relates to a process for the production of glycerol phosphate (lipid fraction), which comprises
[96863] (a) increasing or generating one or more activities selected from the group consisting of putative transport system permease protein in a non-human organism or a part thereof, preferably a microorganism, a plant cell, a plant or a part thereof, as compared to a corresponding non-transformed wild type non-human organism or a part thereof; and
[96864] (b) growing the non-human organism or a part thereof under conditions which permit the production of glycerol phosphate (lipid fraction) or a composition comprising glycerol phosphate (lipid fraction) in said non-human organism or in the culture medium surrounding said non-human organism.

[96865] Accordingly, the present invention relates to a process for the production of bis-glyceryl phosphate (polar fraction), which comprises
[96866] (a) increasing or generating one or more activities selected from the group consisting of b2613-protein in a non-human organism or a part thereof, preferably a microorganism, a plant cell, a plant or a part thereof, as compared to a corresponding non-transformed wild type non-human organism or a part thereof; and
[96867] (b) growing the non-human organism or a part thereof under conditions which permit the production of bis-glyceryl phosphate (polar fraction) or a composition comprising bis-glyceryl phosphate (polar fraction) in said non-human organism or in the culture medium surrounding said non-human organism.

[96868] Accordingly, the present invention relates to a process for the production of glycerol (polar fraction), which comprises
[96869] (a) increasing or generating one or more activities selected from the group consisting of transcriptional regulator in a non-human organism or a part thereof, preferably a microorganism, a plant cell, a plant or a part thereof, as compared to a corresponding non-transformed wild type non-human organism or a part thereof; and
[96870] (b) growing the non-human organism or a part thereof under conditions which permit the production of glycerol (polar fraction) or a composition comprising glycerol (polar fraction) in said non-human organism or in the culture medium surrounding said non-human organism.

[96871] Accordingly, the present invention relates to a process for the production of glycerol (lipid fraction), which comprises
[96872] (a) increasing or generating one or more activities selected from the group consisting of b2673-protein in a non-human organism or a part thereof, preferably a microorganism, a plant cell, a plant or a part thereof, as compared to a corresponding non-transformed wild type non-human organism or a part thereof; and
[96873] (b) growing the non-human organism or a part thereof under conditions which permit the production of glycerol (lipid fraction) or a composition comprising glycerol (lipid fraction) in said non-human organism or in the culture medium surrounding said non-human organism.

[96874] Accordingly, the present invention relates to a process for the production of glycerol phosphate (lipid fraction), which comprises
[96875] (a) increasing or generating one or more activities selected from the group consisting of b2673-protein in a non-human organism or a part thereof, preferably a microorganism, a plant cell, a plant or a part thereof, as compared to a corresponding non-transformed wild type non-human organism or a part thereof; and
[96876] (b) growing the non-human organism or a part thereof under conditions which permit the production of glycerol phosphate (lipid fraction) or a composition comprising glycerol phosphate (lipid fraction) in said non-human organism or in the culture medium surrounding said non-human organism.

[96877] Accordingly, the present invention relates to a process for the production of bis-glyceryl phosphate (polar fraction), which comprises
[96878] (a) increasing or generating one or more activities selected from the group consisting of murein transglycosylase in a non-human organism or a part thereof, preferably a microorganism, a plant cell, a plant or a part thereof, as compared to a corresponding non-transformed wild type non-human organism or a part thereof; and
[96879] (b) growing the non-human organism or a part thereof under conditions which permit the production of bis-glyceryl phosphate (polar fraction) or a composition comprising bis-glyceryl phosphate (polar fraction) in said non-human organism or in the culture medium surrounding said non-human organism.

[96880] Accordingly, the present invention relates to a process for the production of triacylglycerol, which comprises
[96881] (a) increasing or generating one or more activities selected from the group consisting of transcriptional regulator in a non-human organism or a part thereof, preferably a microorganism, a plant cell, a plant or a part thereof, as compared to a corresponding non-transformed wild type non-human organism or a part thereof; and
[96882] (b) growing the non-human organism or a part thereof under conditions which permit the production of triacylglycerol or a composition comprising triacylglycerol in said non-human organism or in the culture medium surrounding said non-human organism.

[96883] Accordingly, the present invention relates to a process for the production of glycerol (lipid fraction), which comprises
[96884] (a) increasing or generating one or more activities selected from the group consisting of 2-C-methyl-D-erythritol 4-phosphate cytidylyltransferase in a non-human organism or a part thereof, preferably a microorganism, a plant cell, a plant or a part thereof, as compared to a corresponding non-transformed wild type non-human organism or a part thereof; and
[96885] (b) growing the non-human organism or a part thereof under conditions which permit the production of glycerol (lipid fraction) or a composition comprising glycerol (lipid fraction) in said non-human organism or in the culture medium surrounding said non-human organism.

[96886] Accordingly, the present invention relates to a process for the production of triacylglycerol, which comprises
[96887] (a) increasing or generating one or more activities selected from the group consisting of amino-acid acetyltransferase in a non-human organism or a part thereof, preferably a microorganism, a plant cell, a plant or a part thereof, as compared to a corresponding non-transformed wild type non-human organism or a part thereof; and
[96888] (b) growing the non-human organism or a part thereof under conditions which permit the production of triacylglycerol or a composition comprising triacylglycerol in said non-human organism or in the culture medium surrounding said non-human organism.

[96889] Accordingly, the present invention relates to a process for the production of bis-glyceryl phosphate (polar fraction), which comprises
[96890] (a) increasing or generating one or more activities selected from the group consisting of b3083-protein in a non-human organism or a part thereof, preferably a microorganism, a plant cell, a plant or a part thereof, as compared to a corresponding non-transformed wild type non-human organism or a part thereof; and
[96891] (b) growing the non-human organism or a part thereof under conditions which permit the production of bis-glyceryl phosphate (polar fraction) or a composition comprising bis-glyceryl phosphate (polar fraction) in said non-human organism or in the culture medium surrounding said non-human organism.

[96892] Accordingly, the present invention relates to a process for the production of bis-glyceryl phosphate (polar fraction), which comprises
[96893] (a) increasing or generating one or more activities selected from the group consisting of threonine/serine transporter in a non-human organism or a part thereof, preferably a microorganism, a plant cell, a plant or a part thereof, as compared to a corresponding non-transformed wild type non-human organism or a part thereof; and
[96894] (b) growing the non-human organism or a part thereof under conditions which permit the production of bis-glyceryl phosphate (polar fraction) or a composition comprising bis-glyceryl phosphate (polar fraction) in said non-human organism or in the culture medium surrounding said non-human organism.

[96895] Accordingly, the present invention relates to a process for the production of bis-glyceryl phosphate (polar fraction), which comprises
[96896] (a) increasing or generating one or more activities selected from the group consisting of b3160-protein in a non-human organism or a part thereof, preferably a microorganism, a plant cell, a plant or a part thereof, as compared to a corresponding non-transformed wild type non-human organism or a part thereof; and
[96897] (b) growing the non-human organism or a part thereof under conditions which permit the production of bis-glyceryl phosphate (polar fraction) or a composition comprising bis-glyceryl phosphate (polar fraction) in said non-human organism or in the culture medium surrounding said non-human organism.

[96898] Accordingly, the present invention relates to a process for the production of bis-glyceryl phosphate (polar fraction), which comprises
[96899] (a) increasing or generating one or more activities selected from the group consisting of argininosuccinate synthetase in a non-human organism or a part thereof, preferably a microorganism, a plant cell, a plant or a part thereof, as compared to a corresponding non-transformed wild type non-human organism or a part thereof; and
[96900] (b) growing the non-human organism or a part thereof under conditions which permit the production of bis-glyceryl phosphate (polar fraction) or a composition comprising bis-glyceryl phosphate (polar fraction) in said non-human organism or in the culture medium surrounding said non-human organism.

[96901] Accordingly, the present invention relates to a process for the production of glycerol-3-phosphate (polar fraction), which comprises
[96902] (a) increasing or generating one or more activities selected from the group consisting of acetyl CoA carboxylase in a non-human organism or a part thereof, preferably a microorganism, a plant cell, a plant or a part thereof, as compared to a corresponding non-transformed wild type non-human organism or a part thereof; and
[96903] (b) growing the non-human organism or a part thereof under conditions which permit the production of glycerol-3-phosphate (polar fraction) or a composition comprising glycerol-3-phosphate (polar fraction) in said non-human organism or in the culture medium surrounding said non-human organism.

[96904] Accordingly, the present invention relates to a process for the production of bis-glyceryl phosphate (polar fraction), which comprises
[96905] (a) increasing or generating one or more activities selected from the group consisting of methyltransferase in a non-human organism or a part thereof, preferably a microorganism, a plant cell, a plant or a part thereof, as compared to a corresponding non-transformed wild type non-human organism or a part thereof; and
[96906] (b) growing the non-human organism or a part thereof under conditions which permit the production of bis-glyceryl phosphate (polar fraction) or a composition comprising bis-glyceryl phosphate (polar fraction) in said non-human organism or in the culture medium surrounding said non-human organism.

[96907] Accordingly, the present invention relates to a process for the production of glycerol (lipid fraction), which comprises
[96908] (a) increasing or generating one or more activities selected from the group consisting of methyltransferase in a non-human organism or a part thereof, preferably a microorganism, a plant cell, a plant or a part thereof, as compared to a corresponding non-transformed wild type non-human organism or a part thereof; and
[96909] (b) growing the non-human organism or a part thereof under conditions which permit the production of glycerol (lipid fraction) or a composition comprising glycerol (lipid fraction) in said non-human organism or in the culture medium surrounding said non-human organism.

[96910] Accordingly, the present invention relates to a process for the production of bis-glyceryl phosphate (polar fraction), which comprises
[96911] (a) increasing or generating one or more activities selected from the group consisting of FKBP-type peptidyl-prolyl cis-trans isomerase (rotamase) in a non-human organism or a part thereof, preferably a microorganism, a plant cell, a plant or a part thereof, as compared to a corresponding non-transformed wild type non-human organism or a part thereof; and
[96912] (b) growing the non-human organism or a part thereof under conditions which permit the production of bis-glyceryl phosphate (polar fraction) or a composition comprising bis-glyceryl phosphate (polar fraction) in said non-human organism or in the culture medium surrounding said non-human organism.

[96913] Accordingly, the present invention relates to a process for the production of bis-glyceryl phosphate (polar fraction), which comprises
[96914] (a) increasing or generating one or more activities selected from the group consisting of high-affinity branched-chain amino acid transport protein in a non-human organism or a part thereof, preferably a microorganism, a plant cell, a plant or a part thereof, as compared to a corresponding non-transformed wild type non-human organism or a part thereof; and
[96915] (b) growing the non-human organism or a part thereof under conditions which permit the production of bis-glyceryl phosphate (polar fraction) or a composition comprising bis-glyceryl phosphate (polar fraction) in said non-human organism or in the culture medium surrounding said non-human organism.

[96916] Accordingly, the present invention relates to a process for the production of bis-glyceryl phosphate (polar fraction), which comprises
[96917] (a) increasing or generating one or more activities selected from the group consisting of b3777-protein in a non-human organism or a part thereof, preferably a microorganism, a plant cell, a plant or a part thereof, as compared to a corresponding non-transformed wild type non-human organism or a part thereof; and
[96918] (b) growing the non-human organism or a part thereof under conditions which permit the production of bis-glyceryl phosphate (polar fraction) or a composition comprising bis-glyceryl phosphate (polar fraction) in said non-human organism or in the culture medium surrounding said non-human organism.

[96919] Accordingly, the present invention relates to a process for the production of bis-glyceryl phosphate (polar fraction), which comprises
[96920] (a) increasing or generating one or more activities selected from the group consisting of b3791-protein in a non-human organism or a part thereof, preferably a microorganism, a plant cell, a plant or a part thereof, as compared to a corresponding non-transformed wild type non-human organism or a part thereof; and
[96921] (b) growing the non-human organism or a part thereof under conditions which permit the production of bis-glyceryl phosphate (polar fraction) or a composition comprising bis-glyceryl phosphate (polar fraction) in said non-human organism or in the culture medium surrounding said non-human organism.

[96922] Accordingly, the present invention relates to a process for the production of bis-glyceryl phosphate (polar fraction), which comprises
[96923] (a) increasing or generating one or more activities selected from the group consisting of enterobacterial common antigen polymerase in a non-human organism or a part thereof, preferably a microorganism, a plant cell, a plant or a part thereof, as compared to a corresponding non-transformed wild type non-human organism or a part thereof; and
[96924] (b) growing the non-human organism or a part thereof under conditions which permit the production of bis-glyceryl phosphate (polar fraction) or a composition comprising bis-glyceryl phosphate (polar fraction) in said non-human organism or in the culture medium surrounding said non-human organism.

[96925] Accordingly, the present invention relates to a process for the production of triacylglycerol, which comprises
[96926] (a) increasing or generating one or more activities selected from the group consisting of b3989-protein in a non-human organism or a part thereof, preferably a microorganism, a plant cell, a plant or a part thereof, as compared to a corresponding non-transformed wild type non-human organism or a part thereof; and
[96927] (b) growing the non-human organism or a part thereof under conditions which permit the production of triacylglycerol or a composition comprising triacylglycerol in said non-human organism or in the culture medium surrounding said non-human organism.

[96928] Accordingly, the present invention relates to a process for the production of bis-glyceryl phosphate (polar fraction), which comprises
[96929] (a) increasing or generating one or more activities selected from the group consisting of b4029-protein in a non-human organism or a part thereof, preferably a microorganism, a plant cell, a plant or a part thereof, as compared to a corresponding non-transformed wild type non-human organism or a part thereof; and
[96930] (b) growing the non-human organism or a part thereof under conditions which permit the production of bis-glyceryl phosphate (polar fraction) or a composition comprising bis-glyceryl phosphate (polar fraction) in said non-human organism or in the culture medium surrounding said non-human organism.

[96931] Accordingly, the present invention relates to a process for the production of triacylglycerol, which comprises
[96932] (a) increasing or generating one or more activities selected from the group consisting of b4050-protein in a non-human organism or a part thereof, preferably a microorganism, a plant cell, a plant or a part thereof, as compared to a corresponding non-transformed wild type non-human organism or a part thereof; and
[96933] (b) growing the non-human organism or a part thereof under conditions which permit the production of triacylglycerol or a composition comprising triacylglycerol in said non-human organism or in the culture medium surrounding said non-human organism.

[96934] Accordingly, the present invention relates to a process for the production of bis-glyceryl phosphate (polar fraction), which comprises
[96935] (a) increasing or generating one or more activities selected from the group consisting of lysyl-tRNA synthetase in a non-human organism or a part thereof, preferably a microorganism, a plant cell, a plant or a part thereof, as compared to a corresponding non-transformed wild type non-human organism or a part thereof; and
[96936] (b) growing the non-human organism or a part thereof under conditions which permit the production of bis-glyceryl phosphate (polar fraction) or a composition comprising bis-glyceryl phosphate (polar fraction) in said non-human organism or in the culture medium surrounding said non-human organism.

[96937] Accordingly, the present invention relates to a process for the production of glycerol-3-phosphate (polar fraction), which comprises
[96938] (a) increasing or generating one or more activities selected from the group consisting of purine-nucleoside phosphorylase in a non-human organism or a part thereof, preferably a microorganism, a plant cell, a plant or a part thereof, as compared to a corresponding non-transformed wild type non-human organism or a part thereof; and
[96939] (b) growing the non-human organism or a part thereof under conditions which permit the production of glycerol-3-phosphate (polar fraction) or a composition comprising glycerol-3-phosphate (polar fraction) in said non-human organism or in the culture medium surrounding said non-human organism.

[96940] Accordingly, the present invention relates to a process for the production of bis-glyceryl phosphate (polar fraction), which comprises
[96941] (a) increasing or generating one or more activities selected from the group consisting of glutaredoxin in a non-human organism or a part thereof, preferably a microorganism, a plant cell, a plant or a part thereof, as compared to a corresponding non-transformed wild type non-human organism or a part thereof; and
[96942] (b) growing the non-human organism or a part thereof under conditions which permit the production of bis-glyceryl phosphate (polar fraction) or a composition comprising bis-glyceryl phosphate (polar fraction) in said non-human organism or in the culture medium surrounding said non-human organism.

[96943] Accordingly, the present invention relates to a process for the production of glycerol phosphate (lipid fraction), which comprises
[96944] (a) increasing or generating one or more activities selected from the group consisting of glutaredoxin in a non-human organism or a part thereof, preferably a microorganism, a plant cell, a plant or a part thereof, as compared to a corresponding non-transformed wild type non-human organism or a part thereof; and
[96945] (b) growing the non-human organism or a part thereof under conditions which permit the production of glycerol phosphate (lipid fraction) or a composition comprising glycerol phosphate (lipid fraction) in said non-human organism or in the culture medium surrounding said non-human organism.

[96946] Accordingly, the present invention relates to a process for the production of bis-glyceryl phosphate (polar fraction), which comprises
[96947] (a) increasing or generating one or more activities selected from the group consisting of GM02LC17485-protein in a non-human organism or a part thereof, preferably a microorganism, a plant cell, a plant or a part thereof, as compared to a corresponding non-transformed wild type non-human organism or a part thereof; and
[96948] (b) growing the non-human organism or a part thereof under conditions which permit the production of bis-glyceryl phosphate (polar fraction) or a composition comprising bis-glyceryl phosphate (polar fraction) in said non-human organism or in the culture medium surrounding said non-human organism.

[96949] Accordingly, the present invention relates to a process for the production of glycerol (lipid fraction), which comprises
[96950] (a) increasing or generating one or more activities selected from the group consisting of transcription factor in a non-human organism or a part thereof, preferably a microorganism, a plant cell, a plant or a part thereof, as compared to a corresponding non-transformed wild type non-human organism or a part thereof; and
[96951] (b) growing the non-human organism or a part thereof under conditions which permit the production of glycerol (lipid fraction) or a composition comprising glycerol (lipid fraction) in said non-human organism or in the culture medium surrounding said non-human organism.

[96952] Accordingly, the present invention relates to a process for the production of glycerol phosphate (lipid fraction), which comprises
[96953] (a) increasing or generating one or more activities selected from the group consisting of transcription factor in a non-human organism or a part thereof, preferably a microorganism, a plant cell, a plant or a part thereof, as compared to a corresponding non-transformed wild type non-human organism or a part thereof; and
[96954] (b) growing the non-human organism or a part thereof under conditions which permit the production of glycerol phosphate (lipid fraction) or a composition comprising glycerol phosphate (lipid fraction) in said non-human organism or in the culture medium surrounding said non-human organism.

[96955] Accordingly, the present invention relates to a process for the production of glycerol (polar fraction), which comprises
[96956] (a) increasing or generating one or more activities selected from the group consisting of transcription factor in a non-human organism or a part thereof, preferably a microorganism, a plant cell, a plant or a part thereof, as compared to a corresponding non-transformed wild type non-human organism or a part thereof; and
[96957] (b) growing the non-human organism or a part thereof under conditions which permit the production of glycerol (polar fraction) or a composition comprising glycerol (polar fraction) in said non-human organism or in the culture medium surrounding said non-human organism.

[96958] Accordingly, the present invention relates to a process for the production of glycerol phosphate (lipid fraction), which comprises
[96959] (a) increasing or generating one or more activities selected from the group consisting of cyclin D in a non-human organism or a part thereof, preferably a microorganism, a plant cell, a plant or a part thereof, as compared to a corresponding non-transformed wild type non-human organism or a part thereof; and
[96960] (b) growing the non-human organism or a part thereof under conditions which permit the production of glycerol phosphate (lipid fraction) or a composition comprising glycerol phosphate (lipid fraction) in said non-human organism or in the culture medium surrounding said non-human organism.

[96961] Accordingly, the present invention relates to a process for the production of bis-glyceryl phosphate (polar fraction), which comprises
[96962] (a) increasing or generating one or more activities selected from the group consisting of nitrate/nitrite transport protein in a non-human organism or a part thereof, preferably a microorganism, a plant cell, a plant or a part thereof, as compared to a corresponding non-transformed wild type non-human organism or a part thereof; and
[96963] (b) growing the non-human organism or a part thereof under conditions which permit the production of bis-glyceryl phosphate (polar fraction) or a composition comprising bis-glyceryl phosphate (polar fraction) in said non-human organism or in the culture medium surrounding said non-human organism.

[96964] Accordingly, the present invention relates to a process for the production of glycerol phosphate (lipid fraction), which comprises
[96965] (a) increasing or generating one or more activities selected from the group consisting of carbamoyl-phosphate synthase subunit in a non-human organism or a part thereof, preferably a microorganism, a plant cell, a plant or a part thereof, as compared to a corresponding non-transformed wild type non-human organism or a part thereof; and
[96966] (b) growing the non-human organism or a part thereof under conditions which permit the production of glycerol phosphate (lipid fraction) or a composition comprising glycerol phosphate (lipid fraction) in said non-human organism or in the culture medium surrounding said non-human organism.

[96967] Accordingly, the present invention relates to a process for the production of glycerol (lipid fraction), which comprises
[96968] (a) increasing or generating one or more activities selected from the group consisting of CDP-diacylglycerol-glycerol-3-phosphate 3-phosphatidyltransferase in a non-human organism or a part thereof, preferably a microorganism, a plant cell, a plant or a part thereof, as compared to a corresponding non-transformed wild type non-human organism or a part thereof; and
[96969] (b) growing the non-human organism or a part thereof under conditions which permit the production of glycerol (lipid fraction) or a composition comprising glycerol (lipid fraction) in said non-human organism or in the culture medium surrounding said non-human organism.

[96970] Accordingly, the present invention relates to a process for the production of bis-glyceryl phosphate (polar fraction), which comprises
[96971] (a) increasing or generating one or more activities selected from the group consisting of adenylate kinase in a non-human organism or a part thereof, preferably a microorganism, a plant cell, a plant or a part thereof, as compared to a corresponding non-transformed wild type non-human organism or a part thereof; and
[96972] (b) growing the non-human organism or a part thereof under conditions which permit the production of bis-glyceryl phosphate (polar fraction) or a composition comprising bis-glyceryl phosphate (polar fraction) in said non-human organism or in the culture medium surrounding said non-human organism.

[96973] Accordingly, the present invention relates to a process for the production of glycerol (lipid fraction), which comprises
[96974] (a) increasing or generating one or more activities selected from the group consisting of acyl transferase in a non-human organism or a part thereof, preferably a microorganism, a plant cell, a plant or a part thereof, as compared to a corresponding non-transformed wild type non-human organism or a part thereof; and
[96975] (b) growing the non-human organism or a part thereof under conditions which permit the production of glycerol (lipid fraction) or a composition comprising glycerol (lipid fraction) in said non-human organism or in the culture medium surrounding said non-human organism.

[96976] Accordingly, the present invention relates to a process for the production of glycerol phosphate (lipid fraction), which comprises
[96977] (a) increasing or generating one or more activities selected from the group consisting of coproporphyrinogen III oxidase in a non-human organism or a part thereof, preferably a microorganism, a plant cell, a plant or a part thereof, as compared to a corresponding non-transformed wild type non-human organism or a part thereof; and
[96978] (b) growing the non-human organism or a part thereof under conditions which permit the production of glycerol phosphate (lipid fraction) or a composition comprising glycerol phosphate (lipid fraction) in said non-human organism or in the culture medium surrounding said non-human organism.

[96979] Accordingly, the present invention relates to a process for the production of glycerol (lipid fraction), which comprises
[96980] (a) increasing or generating one or more activities selected from the group consisting of oxidoreductase in a non-human organism or a part thereof, preferably a microorganism, a plant cell, a plant or a part thereof, as compared to a corresponding non-transformed wild type non-human organism or a part thereof; and
[96981] (b) growing the non-human organism or a part thereof under conditions which permit the production of glycerol (lipid fraction) or a composition comprising glycerol (lipid fraction) in said non-human organism or in the culture medium surrounding said non-human organism.

[96982] Accordingly, the present invention relates to a process for the production of glycerol phosphate (lipid fraction), which comprises
[96983] (a) increasing or generating one or more activities selected from the group consisting of oxidoreductase in a non-human organism or a part thereof, preferably a microorganism, a plant cell, a plant or a part thereof, as compared to a corresponding non-transformed wild type non-human organism or a part thereof; and
[96984] (b) growing the non-human organism or a part thereof under conditions which permit the production of glycerol phosphate (lipid fraction) or a composition comprising glycerol phosphate (lipid fraction) in said non-human organism or in the culture medium surrounding said non-human organism.

[96985] Accordingly, the present invention relates to a process for the production of glycerol (polar fraction), which comprises
[96986] (a) increasing or generating one or more activities selected from the group consisting of Mg-protoporphyrin IX monomethyl ester oxidative cyclase 66 kD subunit in a non-human organism or a part thereof, preferably a microorganism, a plant cell, a plant or a part thereof, as compared to a corresponding non-transformed wild type non-human organism or a part thereof; and
[96987] (b) growing the non-human organism or a part thereof under conditions which permit the production of glycerol (polar fraction) or a composition comprising glycerol (polar fraction) in said non-human organism or in the culture medium surrounding said non-human organism.

[96988] Accordingly, the present invention relates to a process for the production of bis-glyceryl phosphate (polar fraction), which comprises
[96989] (a) increasing or generating one or more activities selected from the group consisting of dihydrolipoamide dehydrogenase in a non-human organism or a part thereof, preferably a microorganism, a plant cell, a plant or a part thereof, as compared to a corresponding non-transformed wild type non-human organism or a part thereof; and
[96990] (b) growing the non-human organism or a part thereof under conditions which permit the production of bis-glyceryl phosphate (polar fraction) or a composition comprising bis-glyceryl phosphate (polar fraction) in said non-human organism or in the culture medium surrounding said non-human organism.

[96991] Accordingly, the present invention relates to a process for the production of glycerol phosphate (lipid fraction), which comprises
[96992] (a) increasing or generating one or more activities selected from the group consisting of aromatic acid decarboxylase in a non-human organism or a part thereof, preferably a microorganism, a plant cell, a plant or a part thereof, as compared to a corresponding non-transformed wild type non-human organism or a part thereof; and
[96993] (b) growing the non-human organism or a part thereof under conditions which permit the production of glycerol phosphate (lipid fraction) or a composition comprising glycerol phosphate (lipid fraction) in said non-human organism or in the culture medium surrounding said non-human organism.

[96994] Accordingly, the present invention relates to a process for the production of glycerol phosphate (lipid fraction), which comprises
[96995] (a) increasing or generating one or more activities selected from the group consisting of phosphate import ATP-binding protein in a non-human organism or a part thereof, preferably a microorganism, a plant cell, a plant or a part thereof, as compared to a corresponding non-transformed wild type non-human organism or a part thereof; and
[96996] (b) growing the non-human organism or a part thereof under conditions which permit the production of glycerol phosphate (lipid fraction) or a composition comprising glycerol phosphate (lipid fraction) in said non-human organism or in the culture medium surrounding said non-human organism.

[96997] Accordingly, the present invention relates to a process for the production of glycerol phosphate (lipid fraction), which comprises
[96998] (a) increasing or generating one or more activities selected from the group consisting of arginine decarboxylase in a non-human organism or a part thereof, preferably a microorganism, a plant cell, a plant or a part thereof, as compared to a corresponding non-transformed wild type non-human organism or a part thereof; and
[96999] (b) growing the non-human organism or a part thereof under conditions which permit the production of glycerol phosphate (lipid fraction) or a composition comprising glycerol phosphate (lipid fraction) in said non-human organism or in the culture medium surrounding said non-human organism.

[97000] Accordingly, the present invention relates to a process for the production of glycerol phosphate (lipid fraction), which comprises
[97001] (a) increasing or generating one or more activities selected from the group consisting of carbohydrate kinase in a non-human organism or a part thereof, preferably a microorganism, a plant cell, a plant or a part thereof, as compared to a corresponding non-transformed wild type non-human organism or a part thereof; and
[97002] (b) growing the non-human organism or a part thereof under conditions which permit the production of glycerol phosphate (lipid fraction) or a composition comprising glycerol phosphate (lipid fraction) in said non-human organism or in the culture medium surrounding said non-human organism.

[97003] Accordingly, the present invention relates to a process for the production of bis-glyceryl phosphate (polar fraction), which comprises
[97004] (a) increasing or generating one or more activities selected from the group consisting of precorrin-8X methylmutase in a non-human organism or a part thereof, preferably a microorganism, a plant cell, a plant or a part thereof, as compared to a corresponding non-transformed wild type non-human organism or a part thereof; and
[97005] (b) growing the non-human organism or a part thereof under conditions which permit the production of bis-glyceryl phosphate (polar fraction) or a composition comprising bis-glyceryl phosphate (polar fraction) in said non-human organism or in the culture medium surrounding said non-human organism.

[97006] Accordingly, the present invention relates to a process for the production of bis-glyceryl phosphate (polar fraction), which comprises
[97007] (a) increasing or generating one or more activities selected from the group consisting of NADH dehydrogenase in a non-human organism or a part thereof, preferably a microorganism, a plant cell, a plant or a part thereof, as compared to a corresponding non-transformed wild type non-human organism or a part thereof; and
[97008] (b) growing the non-human organism or a part thereof under conditions which permit the production of bis-glyceryl phosphate (polar fraction) or a composition comprising bis-glyceryl phosphate (polar fraction) in said non-human organism or in the culture medium surrounding said non-human organism.

[97009] Accordingly, the present invention relates to a process for the production of glycerol (lipid fraction), which comprises
[97010] (a) increasing or generating one or more activities selected from the group consisting of glutamate 5-kinase in a non-human organism or a part thereof, preferably a microorganism, a plant cell, a plant or a part thereof, as compared to a corresponding non-transformed wild type non-human organism or a part thereof; and
[97011] (b) growing the non-human organism or a part thereof under conditions which permit the production of glycerol (lipid fraction) or a composition comprising glycerol (lipid fraction) in said non-human organism or in the culture medium surrounding said non-human organism.

[97012] Accordingly, the present invention relates to a process for the production of glycerol (lipid fraction), which comprises
[97013] (a) increasing or generating one or more activities selected from the group consisting of threonine dehydratase in a non-human organism or a part thereof, preferably a microorganism, a plant cell, a plant or a part thereof, as compared to a corresponding non-transformed wild type non-human organism or a part thereof; and
[97014] (b) growing the non-human organism or a part thereof under conditions which permit the production of glycerol (lipid fraction) or a composition comprising glycerol (lipid fraction) in said non-human organism or in the culture medium surrounding said non-human organism.

[97015] Accordingly, the present invention relates to a process for the production of glycerol phosphate (lipid fraction), which comprises
[97016] (a) increasing or generating one or more activities selected from the group consisting of threonine dehydratase in a non-human organism or a part thereof, preferably a microorganism, a plant cell, a plant or a part thereof, as compared to a corresponding non-transformed wild type non-human organism or a part thereof; and
[97017] (b) growing the non-human organism or a part thereof under conditions which permit the production of glycerol phosphate (lipid fraction) or a composition comprising glycerol phosphate (lipid fraction) in said non-human organism or in the culture medium surrounding said non-human organism.

[97018] Accordingly, the present invention relates to a process for the production of bis-glyceryl phosphate (polar fraction), which comprises
[97019] (a) increasing or generating one or more activities selected from the group consisting of photosystem I reaction centre subunit in a non-human organism or a part thereof, preferably a microorganism, a plant cell, a plant or a part thereof, as compared to a corresponding non-transformed wild type non-human organism or a part thereof; and
[97020] (b) growing the non-human organism or a part thereof under conditions which permit the production of bis-glyceryl phosphate (polar fraction) or a composition comprising bis-glyceryl phosphate (polar fraction) in said non-human organism or in the culture medium surrounding said non-human organism.

[97021] Accordingly, the present invention relates to a process for the production of triacylglycerol, which comprises
[97022] (a) increasing or generating one or more activities selected from the group consisting of cell division protein in a non-human organism or a part thereof, preferably a microorganism, a plant cell, a plant or a part thereof, as compared to a corresponding non-transformed wild type non-human organism or a part thereof; and
[97023] (b) growing the non-human organism or a part thereof under conditions which permit the production of triacylglycerol or a composition comprising triacylglycerol in said non-human organism or in the culture medium surrounding said non-human organism.

[97024] Accordingly, the present invention relates to a process for the production of glycerol phosphate (lipid fraction), which comprises
[97025] (a) increasing or generating one or more activities selected from the group consisting of metal-dependent hydrolase in a non-human organism or a part thereof, preferably a microorganism, a plant cell, a plant or a part thereof, as compared to a corresponding non-transformed wild type non-human organism or a part thereof; and
[97026] (b) growing the non-human organism or a part thereof under conditions which permit the production of glycerol phosphate (lipid fraction) or a composition comprising glycerol phosphate (lipid fraction) in said non-human organism or in the culture medium surrounding said non-human organism.

[97027] Accordingly, the present invention relates to a process for the production of glycerol (lipid fraction), which comprises
[97028] (a) increasing or generating one or more activities selected from the group consisting of TTC1386-protein in a non-human organism or a part thereof, preferably a microorganism, a plant cell, a plant or a part thereof, as compared to a corresponding non-transformed wild type non-human organism or a part thereof; and
[97029] (b) growing the non-human organism or a part thereof under conditions which permit the production of glycerol (lipid fraction) or a composition comprising glycerol (lipid fraction) in said non-human organism or in the culture medium surrounding said non-human organism.

[97030] Accordingly, the present invention relates to a process for the production of glycerol-3-phosphate (polar fraction), which comprises
[97031] (a) increasing or generating one or more activities selected from the group consisting of YAL013W-protein in a non-human organism or a part thereof, preferably a microorganism, a plant cell, a plant or a part thereof, as compared to a corresponding non-transformed wild type non-human organism or a part thereof; and
[97032] (b) growing the non-human organism or a part thereof under conditions which permit the production of glycerol-3-phosphate (polar fraction) or a composition comprising glycerol-3-phosphate (polar fraction) in said non-human organism or in the culture medium surrounding said non-human organism.

[97033] Accordingly, the present invention relates to a process for the production of glycerol (lipid fraction), which comprises
[97034] (a) increasing or generating one or more activities selected from the group consisting of transcription factor in a non-human organism or a part thereof, preferably a microorganism, a plant cell, a plant or a part thereof, as compared to a corresponding non-transformed wild type non-human organism or a part thereof; and
[97035] (b) growing the non-human organism or a part thereof under conditions which permit the production of glycerol (lipid fraction) or a composition comprising glycerol (lipid fraction) in said non-human organism or in the culture medium surrounding said non-human organism.

[97036] Accordingly, the present invention relates to a process for the production of glycerol phosphate (lipid fraction), which comprises
[97037] (a) increasing or generating one or more activities selected from the group consisting of acid phosphatase precursor in a non-human organism or a part thereof, preferably a microorganism, a plant cell, a plant or a part thereof, as compared to a corresponding non-transformed wild type non-human organism or a part thereof; and
[97038] (b) growing the non-human organism or a part thereof under conditions which permit the production of glycerol phosphate (lipid fraction) or a composition comprising glycerol phosphate (lipid fraction) in said non-human organism or in the culture medium surrounding said non-human organism.

[97039] Accordingly, the present invention relates to a process for the production of glycerol (lipid fraction), which comprises
[97040] (a) increasing or generating one or more activities selected from the group consisting of cell division control protein in a non-human organism or a part thereof, preferably a microorganism, a plant cell, a plant or a part thereof, as compared to a corresponding non-transformed wild type non-human organism or a part thereof; and
[97041] (b) growing the non-human organism or a part thereof under conditions which permit the production of glycerol (lipid fraction) or a composition comprising glycerol (lipid fraction) in said non-human organism or in the culture medium surrounding said non-human organism.

[97042] Accordingly, the present invention relates to a process for the production of glycerol (polar fraction), which comprises
[97043] (a) increasing or generating one or more activities selected from the group consisting of cell division control protein in a non-human organism or a part thereof, preferably a microorganism, a plant cell, a plant or a part thereof, as compared to a corresponding non-transformed wild type non-human organism or a part thereof; and
[97044] (b) growing the non-human organism or a part thereof under conditions which permit the production of glycerol (polar fraction) or a composition comprising glycerol (polar fraction) in said non-human organism or in the culture medium surrounding said non-human organism.

[97045] Accordingly, the present invention relates to a process for the production of bis-glyceryl phosphate (polar fraction), which comprises
[97046] (a) increasing or generating one or more activities selected from the group consisting of ycr102c-protein in a non-human organism or a part thereof, preferably a microorganism, a plant cell, a plant or a part thereof, as compared to a corresponding non-transformed wild type non-human organism or a part thereof; and
[97047] (b) growing the non-human organism or a part thereof under conditions which permit the production of bis-glyceryl phosphate (polar fraction) or a composition comprising bis-glyceryl phosphate (polar fraction) in said non-human organism or in the culture medium surrounding said non-human organism.

[97048] Accordingly, the present invention relates to a process for the production of bis-glyceryl phosphate (polar fraction), which comprises
[97049] (a) increasing or generating one or more activities selected from the group consisting of ydr273w-protein in a non-human organism or a part thereof, preferably a microorganism, a plant cell, a plant or a part thereof, as compared to a corresponding non-transformed wild type non-human organism or a part thereof; and
[97050] (b) growing the non-human organism or a part thereof under conditions which permit the production of bis-glyceryl phosphate (polar fraction) or a composition comprising bis-glyceryl phosphate (polar fraction) in said non-human organism or in the culture medium surrounding said non-human organism.

[97051] Accordingly, the present invention relates to a process for the production of glycerol phosphate (lipid fraction), which comprises
[97052] (a) increasing or generating one or more activities selected from the group consisting of molecular chaperone portein in a non-human organism or a part thereof, preferably a microorganism, a plant cell, a plant or a part thereof, as compared to a corresponding non-transformed wild type non-human organism or a part thereof; and
[97053] (b) growing the non-human organism or a part thereof under conditions which permit the production of glycerol phosphate (lipid fraction) or a composition comprising glycerol phosphate (lipid fraction) in said non-human organism or in the culture medium surrounding said non-human organism.

[97054] Accordingly, the present invention relates to a process for the production of triacylglycerol, which comprises
[97055] (a) increasing or generating one or more activities selected from the group consisting of YFL019C-protein in a non-human organism or a part thereof, preferably a microorganism, a plant cell, a plant or a part thereof, as compared to a corresponding non-transformed wild type non-human organism or a part thereof; and
[97056] (b) growing the non-human organism or a part thereof under conditions which permit the production of triacylglycerol or a composition comprising triacylglycerol in said non-human organism or in the culture medium surrounding said non-human organism.

[97057] Accordingly, the present invention relates to a process for the production of bis-glyceryl phosphate (polar fraction), which comprises
[97058] (a) increasing or generating one or more activities selected from the group consisting of alcohol dehydrogenase in a non-human organism or a part thereof, preferably a microorganism, a plant cell, a plant or a part thereof, as compared to a corresponding non-transformed wild type non-human organism or a part thereof; and
[97059] (b) growing the non-human organism or a part thereof under conditions which permit the production of bis-glyceryl phosphate (polar fraction) or a composition comprising bis-glyceryl phosphate (polar fraction) in said non-human organism or in the culture medium surrounding said non-human organism.

[97060] Accordingly, the present invention relates to a process for the production of glycerol (lipid fraction), which comprises
[97061] (a) increasing or generating one or more activities selected from the group consisting of biotin synthase in a non-human organism or a part thereof, preferably a microorganism, a plant cell, a plant or a part thereof, as compared to a corresponding non-transformed wild type non-human organism or a part thereof; and
[97062] (b) growing the non-human organism or a part thereof under conditions which permit the production of glycerol (lipid fraction) or a composition comprising glycerol (lipid fraction) in said non-human organism or in the culture medium surrounding said non-human organism.

[97063] Accordingly, the present invention relates to a process for the production of triacylglycerol, which comprises
[97064] (a) increasing or generating one or more activities selected from the group consisting of mitochondrial processing protease in a non-human organism or a part thereof, preferably a microorganism, a plant cell, a plant or a part thereof, as compared to a corresponding non-transformed wild type non-human organism or a part thereof; and
[97065] (b) growing the non-human organism or a part thereof under conditions which permit the production of triacylglycerol or a composition comprising triacylglycerol in said non-human organism or in the culture medium surrounding said non-human organism.

[97066] Accordingly, the present invention relates to a process for the production of bis-glyceryl phosphate (polar fraction), which comprises
[97067] (a) increasing or generating one or more activities selected from the group consisting of YHR202W-protein in a non-human organism or a part thereof, preferably a microorganism, a plant cell, a plant or a part thereof, as compared to a corresponding non-transformed wild type non-human organism or a part thereof; and
[97068] (b) growing the non-human organism or a part thereof under conditions which permit the production of bis-glyceryl phosphate (polar fraction) or a composition comprising bis-glyceryl phosphate (polar fraction) in said non-human organism or in the culture medium surrounding said non-human organism.

[97069] Accordingly, the present invention relates to a process for the production of glycerol (polar fraction), which comprises
[97070] (a) increasing or generating one or more activities selected from the group consisting of (DL)-glycerol-3-phosphatase in a non-human organism or a part thereof, preferably a microorganism, a plant cell, a plant or a part thereof, as compared to a corresponding non-transformed wild type non-human organism or a part thereof; and
[97071] (b) growing the non-human organism or a part thereof under conditions which permit the production of glycerol (polar fraction) or a composition comprising glycerol (polar fraction) in said non-human organism or in the culture medium surrounding said non-human organism.

[97072] Accordingly, the present invention relates to a process for the production of bis-glyceryl phosphate (polar fraction), which comprises
[97073] (a) increasing or generating one or more activities selected from the group consisting of YIL083C-protein in a non-human organism or a part thereof, preferably a microorganism, a plant cell, a plant or a part thereof, as compared to a corresponding non-transformed wild type non-human organism or a part thereof; and
[97074] (b) growing the non-human organism or a part thereof under conditions which permit the production of bis-glyceryl phosphate (polar fraction) or a composition comprising bis-glyceryl phosphate (polar fraction) in said non-human organism or in the culture medium surrounding said non-human organism.

[97075] Accordingly, the present invention relates to a process for the production of glycerol phosphate (lipid fraction), which comprises
[97076] (a) increasing or generating one or more activities selected from the group consisting of YJL062W-A-protein in a non-human organism or a part thereof, preferably a microorganism, a plant cell, a plant or a part thereof, as compared to a corresponding non-transformed wild type non-human organism or a part thereof; and
[97077] (b) growing the non-human organism or a part thereof under conditions which permit the production of glycerol phosphate (lipid fraction) or a composition comprising glycerol phosphate (lipid fraction) in said non-human organism or in the culture medium surrounding said non-human organism.

[97078] Accordingly, the present invention relates to a process for the production of bis-glyceryl phosphate (polar fraction), which comprises
[97079] (a) increasing or generating one or more activities selected from the group consisting of DnaJ-like chaperone in a non-human organism or a part thereof, preferably a microorganism, a plant cell, a plant or a part thereof, as compared to a corresponding non-transformed wild type non-human organism or a part thereof; and
[97080] (b) growing the non-human organism or a part thereof under conditions which permit the production of bis-glyceryl phosphate (polar fraction) or a composition comprising bis-glyceryl phosphate (polar fraction) in said non-human organism or in the culture medium surrounding said non-human organism.

[97081] Accordingly, the present invention relates to a process for the production of bis-glyceryl phosphate (polar fraction), which comprises
[97082] (a) increasing or generating one or more activities selected from the group consisting of polygalacturonase in a non-human organism or a part thereof, preferably a microorganism, a plant cell, a plant or a part thereof, as compared to a corresponding non-transformed wild type non-human organism or a part thereof; and
[97083] (b) growing the non-human organism or a part thereof under conditions which permit the production of bis-glyceryl phosphate (polar fraction) or a composition comprising bis-glyceryl phosphate (polar fraction) in said non-human organism or in the culture medium surrounding said non-human organism.

[97084] Accordingly, the present invention relates to a process for the production of glycerol (polar fraction), which comprises
[97085] (a) increasing or generating one or more activities selected from the group consisting of vacuolar sorting protein in a non-human organism or a part thereof, preferably a microorganism, a plant cell, a plant or a part thereof, as compared to a corresponding non-transformed wild type non-human organism or a part thereof; and
[97086] (b) growing the non-human organism or a part thereof under conditions which permit the production of glycerol (polar fraction) or a composition comprising glycerol (polar fraction) in said non-human organism or in the culture medium surrounding said non-human organism.

[97087] Accordingly, the present invention relates to a process for the production of bis-glyceryl phosphate (polar fraction), which comprises
[97088] (a) increasing or generating one or more activities selected from the group consisting of YLR099C-protein in a non-human organism or a part thereof, preferably a microorganism, a plant cell, a plant or a part thereof, as compared to a corresponding non-transformed wild type non-human organism or a part thereof; and
[97089] (b) growing the non-human organism or a part thereof under conditions which permit the production of bis-glyceryl phosphate (polar fraction) or a composition comprising bis-glyceryl phosphate (polar fraction) in said non-human organism or in the culture medium surrounding said non-human organism.

[97090] Accordingly, the present invention relates to a process for the production of glycerol (lipid fraction), which comprises
[97091] (a) increasing or generating one or more activities selected from the group consisting of cyclin in a non-human organism or a part thereof, preferably a microorganism, a plant cell, a plant or a part thereof, as compared to a corresponding non-transformed wild type non-human organism or a part thereof; and
[97092] (b) growing the non-human organism or a part thereof under conditions which permit the production of glycerol (lipid fraction) or a composition comprising glycerol (lipid fraction) in said non-human organism or in the culture medium surrounding said non-human organism.

[97093] Accordingly, the present invention relates to a process for the production of glycerol (lipid fraction), which comprises
[97094] (a) increasing or generating one or more activities selected from the group consisting of ylr326w-protein in a non-human organism or a part thereof, preferably a microorganism, a plant cell, a plant or a part thereof, as compared to a corresponding non-transformed wild type non-human organism or a part thereof; and
[97095] (b) growing the non-human organism or a part thereof under conditions which permit the production of glycerol (lipid fraction) or a composition comprising glycerol (lipid fraction) in said non-human organism or in the culture medium surrounding said non-human organism.

[97096] Accordingly, the present invention relates to a process for the production of glycerol phosphate (lipid fraction), which comprises
[97097] (a) increasing or generating one or more activities selected from the group consisting of ylr326w-protein in a non-human organism or a part thereof, preferably a microorganism, a plant cell, a plant or a part thereof, as compared to a corresponding non-transformed wild type non-human organism or a part thereof; and
[97098] (b) growing the non-human organism or a part thereof under conditions which permit the production of glycerol phosphate (lipid fraction) or a composition comprising glycerol phosphate (lipid fraction) in said non-human organism or in the culture medium surrounding said non-human organism.

[97099] Accordingly, the present invention relates to a process for the production of glycerol (lipid fraction), which comprises
[97100] (a) increasing or generating one or more activities selected from the group consisting of heat shock protein Hsp40 in a non-human organism or a part thereof, preferably a microorganism, a plant cell, a plant or a part thereof, as compared to a corresponding non-transformed wild type non-human organism or a part thereof; and
[97101] (b) growing the non-human organism or a part thereof under conditions which permit the production of glycerol (lipid fraction) or a composition comprising glycerol (lipid fraction) in said non-human organism or in the culture medium surrounding said non-human organism.

[97102] Accordingly, the present invention relates to a process for the production of glycerol (lipid fraction), which comprises
[97103] (a) increasing or generating one or more activities selected from the group consisting of phosphotransferase in a non-human organism or a part thereof, preferably a microorganism, a plant cell, a plant or a part thereof, as compared to a corresponding non-transformed wild type non-human organism or a part thereof; and
[97104] (b) growing the non-human organism or a part thereof under conditions which permit the production of glycerol (lipid fraction) or a composition comprising glycerol (lipid fraction) in said non-human organism or in the culture medium surrounding said non-human organism.

[97105] Accordingly, the present invention relates to a process for the production of glycerol (lipid fraction), which comprises
[97106] (a) increasing or generating one or more activities selected from the group consisting of Elongation factor Tu in a non-human organism or a part thereof, preferably a microorganism, a plant cell, a plant or a part thereof, as compared to a corresponding non-transformed wild type non-human organism or a part thereof; and
[97107] (b) growing the non-human organism or a part thereof under conditions which permit the production of glycerol (lipid fraction) or a composition comprising glycerol (lipid fraction) in said non-human organism or in the culture medium surrounding said non-human organism.

[97108] Accordingly, the present invention relates to a process for the production of bis-glyceryl phosphate (polar fraction), which comprises
[97109] (a) increasing or generating one or more activities selected from the group consisting of YPL162C. protein in a non-human organism or a part thereof, preferably a microorganism, a plant cell, a plant or a part thereof, as compared to a corresponding non-transformed wild type non-human organism or a part thereof; and
[97110] (b) growing the non-human organism or a part thereof under conditions which permit the production of bis-glyceryl phosphate (polar fraction) or a composition comprising bis-glyceryl phosphate (polar fraction) in said non-human organism or in the culture medium surrounding said non-human organism.

[97111] Accordingly, the present invention relates to a process for the production of glycerol (lipid fraction), which comprises
[97112] (a) increasing or generating one or more activities selected from the group consisting of mitogen-activated protein kinase in a non-human organism or a part thereof, preferably a microorganism, a plant cell, a plant or a part thereof, as compared to a corresponding non-transformed wild type non-human organism or a part thereof; and
[97113] (b) growing the non-human organism or a part thereof under conditions which permit the production of glycerol (lipid fraction) or a composition comprising glycerol (lipid fraction) in said non-human organism or in the culture medium surrounding said non-human organism.

[97114] Accordingly, the present invention relates to a process for the production of bis-glyceryl phosphate (polar fraction), which comprises
[97115] (a) increasing or generating one or more activities selected from the group consisting of Zm_{—}4842_BE510522-protein in a non-human organism or a part thereof, preferably a microorganism, a plant cell, a plant or a part thereof, as compared to a corresponding non-transformed wild type non-human organism or a part thereof; and
[97116] (b) growing the non-human organism or a part thereof under conditions which permit the production of bis-glyceryl phosphate (polar fraction) or a composition comprising bis-glyceryl phosphate (polar fraction) in said non-human organism or in the culture medium surrounding said non-human organism.

[97117] Accordingly, the present invention relates to a process for the production of bis-glyceryl phosphate (polar fraction), which comprises
[97118] (a) increasing or generating one or more activities selected from the group consisting of 49747384_SOYBEAN-protein in a non-human organism or a part thereof, preferably a microorganism, a plant cell, a plant or a part thereof, as compared to a corresponding non-transformed wild type non-human organism or a part thereof; and
[97119] (b) growing the non-human organism or a part thereof under conditions which permit the production of bis-glyceryl phosphate (polar fraction) or a composition comprising bis-glyceryl phosphate (polar fraction) in said non-human organism or in the culture medium surrounding said non-human organism.

[97120] An embodiment of the present invention relates to a process for the production of bis-glyceryl phosphate (polar fraction), which comprises
[97121] (a1) increasing or generating the activity of a polypeptide comprising a polypeptide as depicted in a respective line in column 5 or 8 of Table II, application no. 19, or a homolog or a fragment thereof, a consensus sequence or at least one polypeptide motif as depicted in the respective line in column 8 of Table IV, application no. 19, whereby the respective line disclose in column 7 the fine chemical bis-glyceryl phosphate (polar fraction); or
[97122] (a2) increasing or generating the activity of an expression product of one or more nucleic acid molecule(s) comprising a polynucleotide as depicted in the respective line in column 5 or 8 of Table I, application no. 19, preferably the coding region thereof, or a homolog or a fragment thereof, whereby the respective line disclose in column 7 the fine chemical bis-glyceryl phosphate (polar fraction); or
[97123] (a3) increasing or generating the activity of a functional equivalent of (a1) or (a2);
[97124] in a non-human organism or a part thereof; preferably a microorganism, a plant cell, a plant or a part thereof, as compared to a corresponding non-transformed wild type non-human organism or a part thereof; and
[97125] (b) growing the non-human organism under conditions which permit the production of bis-glyceryl phosphate (polar fraction) or a composition comprising bis-glyceryl phosphate (polar fraction) in said non-human organism or in the culture medium surrounding said non-human organism.

[97126] An embodiment of the present invention relates to a process for the production of glycerol (lipid fraction), which comprises
[97127] (a1) increasing or generating the activity of a polypeptide comprising a polypeptide as depicted in a respective line in column 5 or 8 of Table II, application no. 19, or a homolog or a fragment thereof, a consensus sequence or at least one polypeptide motif as depicted in the respective line in column 8 of Table IV, application no. 19, whereby the respective line disclose in column 7 the fine chemical glycerol (lipid fraction); or
[97128] (a2) increasing or generating the activity of an expression product of one or more nucleic acid molecule(s) comprising a polynucleotide as depicted in the respective line in column 5 or 8 of Table I, application no. 19, preferably the coding region thereof, or a homolog or a fragment thereof, whereby the respective line disclose in column 7 the fine chemical glycerol (lipid fraction); or
[97129] (a3) increasing or generating the activity of a functional equivalent of (a1) or (a2);
[97130] in a non-human organism or a part thereof; preferably a microorganism, a plant cell, a plant or a part thereof, as compared to a corresponding non-transformed wild type non-human organism or a part thereof; and
[97131] (b) growing the non-human organism under conditions which permit the production of glycerol (lipid fraction) or a composition comprising glycerol (lipid fraction) in said non-human organism or in the culture medium surrounding said non-human organism.

[97132] An embodiment of the present invention relates to a process for the production of glycerol (polar fraction), which comprises
[97133] (a1) increasing or generating the activity of a polypeptide comprising a polypeptide as depicted in a respective line in column 5 or 8 of Table II, application no. 19, or a homolog or a fragment thereof, a consensus sequence or at least one polypeptide motif as depicted in the respective line in column 8 of Table IV, application no. 19, whereby the respective line disclose in column 7 the fine chemical glycerol (polar fraction); or
[97134] (a2) increasing or generating the activity of an expression product of one or more nucleic acid molecule(s) comprising a polynucleotide as depicted in the respective line in column 5 or 8 of Table I, application no. 19, preferably the coding region thereof, or a homolog or a fragment thereof, whereby the respective line disclose in column 7 the fine chemical glycerol (polar fraction); or
[97135] (a3) increasing or generating the activity of a functional equivalent of (a1) or (a2); in a non-human organism or a part thereof; preferably a microorganism, a plant cell, a plant or a part thereof, as compared to a corresponding non-transformed wild type non-human organism or a part thereof; and
[97136] (b) growing the non-human organism under conditions which permit the production of glycerol (polar fraction) or a composition comprising glycerol (polar fraction) in said non-human organism or in the culture medium surrounding said non-human organism.

[97137] An embodiment of the present invention relates to a process for the production of glycerol phosphate (lipid fraction), which comprises
[97138] (a1) increasing or generating the activity of a polypeptide comprising a polypeptide as depicted in a respective line in column 5 or 8 of Table II, application no. 19, or a homolog or a fragment thereof, a consensus sequence or at least one polypeptide motif as depicted in the respective line in column 8 of Table IV, application no. 19, whereby the respective line disclose in column 7 the fine chemical glycerol phosphate (lipid fraction); or
[97139] (a2) increasing or generating the activity of an expression product of one or more nucleic acid molecule(s) comprising a polynucleotide as depicted in the respective line in column 5 or 8 of Table I, application no. 19, preferably the coding region thereof, or a homolog or a fragment thereof, whereby the respective line disclose in column 7 the fine chemical glycerol phosphate (lipid fraction); or
[97140] (a3) increasing or generating the activity of a functional equivalent of (a1) or (a2);
[97141] in a non-human organism or a part thereof; preferably a microorganism, a plant cell, a plant or a part thereof, as compared to a corresponding non-transformed wild type non-human organism or a part thereof; and
[97142] (b) growing the non-human organism under conditions which permit the production of glycerol phosphate (lipid fraction) or a composition comprising glycerol phosphate (lipid fraction) in said non-human organism or in the culture medium surrounding said non-human organism.

[97143] An embodiment of the present invention relates to a process for the production of glycerol-3-phosphate (polar fraction), which comprises
[97144] (a1) increasing or generating the activity of a polypeptide comprising a polypeptide as depicted in a respective line in column 5 or 8 of Table II, application no. 19, or a homolog or a fragment thereof, a consensus sequence or at least one polypeptide motif as depicted in the respective line in column 8 of Table IV, application no. 19, whereby the respective line disclose in column 7 the fine chemical glycerol-3-phosphate (polar fraction); or
[97145] (a2) increasing or generating the activity of an expression product of one or more nucleic acid molecule(s) comprising a polynucleotide as depicted in the respective line in column 5 or 8 of Table I, application no. 19, preferably the coding region thereof, or a homolog or a fragment thereof, whereby the respective line disclose in column 7 the fine chemical glycerol-3-phosphate (polar fraction); or
[97146] (a3) increasing or generating the activity of a functional equivalent of (a1) or (a2);
[97147] in a non-human organism or a part thereof; preferably a microorganism, a plant cell, a plant or a part thereof, as compared to a corresponding non-transformed wild type non-human organism or a part thereof; and
[97148] (b) growing the non-human organism under conditions which permit the production of glycerol-3-phosphate (polar fraction) or a composition comprising glycerol-3-phosphate (polar fraction) in said non-human organism or in the culture medium surrounding said non-human organism

[97149] An embodiment of the present invention relates to a process for the production of triacylglycerol, which comprises
[97150] (a1) increasing or generating the activity of a polypeptide comprising a polypeptide as depicted in a respective line in column 5 or 8 of Table II, application no. 19, or a homolog or a fragment thereof, a consensus sequence or at least one polypeptide motif as depicted in the respective line in column 8 of Table IV, application no. 19, whereby the respective line disclose in column 7 the fine chemical triacylglycerol; or
[97151] (a2) increasing or generating the activity of an expression product of one or more nucleic acid molecule(s) comprising a polynucleotide as depicted in the respective line in column 5 or 8 of Table I, application no. 19, preferably the coding region thereof, or a homolog or a fragment thereof, whereby the respective line disclose in column 7 the fine chemical triacylglycerol; or
[97152] (a3) increasing or generating the activity of a functional equivalent of (a1) or (a2);
[97153] in a non-human organism or a part thereof; preferably a microorganism, a plant cell, a plant or a part thereof, as compared to a corresponding non-transformed wild type non-human organism or a part thereof; and
[97154] (b) growing the non-human organism under conditions which permit the production of triacylglycerol or a composition comprising triacylglycerol in said non-human organism or in the culture medium surrounding said non-human organism.

[97155] Accordingly, the increase or generation of one or more said activities is for example conferred by one or more expression products of said nucleic acid molecule, e.g. proteins. Accordingly, in the present invention described above, the increase or generation of one or more said activities is for example conferred by one or more protein(s) each comprising a polypeptide selected from the group as depicted in Table II, application no. 19, column 5 and 8, or a homolog or a fragment thereof.

[97156] The process of the invention comprises in one embodiment the following steps:
[97157] (i) increasing or generating of the expression of; and/or
[97158] (ii) increasing or generating the expression of an expression product of; and/or
[97159] (iii) increasing or generating one or more activities of an expression product encoded by;
   at least one nucleic acid molecule (in the following “Fine Chemical Related Protein (FCRP)”-encoding gene or “FCRP”-gene) comprising a nucleic acid molecule selected from the group consisting of:
[97160] (a) a nucleic acid molecule encoding the polypeptide shown in column 5 or 8 of Table II, preferably Table II B, application no. 19, or a homolog or a fragment thereof;
[97161] (b) a nucleic acid molecule shown in column 5 or 8 of Table I, preferably Table I B, application no. 19, or a homolog or a fragment thereof (preferably the coding region thereof);
[97162] (c) a nucleic acid molecule, which, as a result of the degeneracy of the genetic code, can be derived from a polypeptide sequence depicted in column 5 or 8 of Table II, preferably Table II B, application no. 19;
[97163] (d) a nucleic acid molecule having at least 30%, in particular at least 50%, 60%, 70%, 80%, 85%, 90%, 95%, 97%, 98%, 99% or 99.5% identity with the nucleic acid molecule sequence of a polynucleotide comprising the nucleic acid molecule shown in column 5 or 8 of Table I, preferably Table I B, application no. 19, or the coding region thereof;
[97164] (e) a nucleic acid molecule encoding a polypeptide having at least 30%, in particular 50%, 60%, 70%, 80%, 85%, 90%, 95%, 97%, 98%, 99% or 99.5% identity with the amino acid sequence of the polypeptide encoded by the nucleic acid molecule of (a), (b), (c) or (d);
[97165] (f) a nucleic acid molecule which hybridizes with a nucleic acid molecule of (a), (b), (c), (d) or (e) under stringent hybridization conditions;
[97166] (g) a nucleic acid molecule encoding a polypeptide which can be isolated with the aid of monoclonal or polyclonal antibodies made against a polypeptide encoded by one of the nucleic acid molecules of (a), (b), (c), (d), (e) or (f);
[97167] (h) a nucleic acid molecule encoding a polypeptide comprising the consensus sequence or one or more polypeptide motifs as shown in column 8 of Table IV, application no. 19;
[97168] (i) a nucleic acid molecule encoding a polypeptide having the activity represented by a respective protein as depicted in column 5 of Table II, application no. 19;
[97169] (j) a nucleic acid molecule which comprises a polynucleotide, which is obtained by amplifying a cDNA library or a genomic library using the primers as depicted in column 8 of Table III, application no. 19; and
[97170] (k) a nucleic acid molecule which is obtainable by screening a suitable nucleic acid library, especially a cDNA library and/or a genomic library, under stringent hybridization conditions with a probe comprising a complementary sequence of a nucleic acid molecule of (a), (b), (c), (d), (e), (f), (g), (h), (i) or (j) or with a fragment thereof, having at least 15 nt, preferably 20 nt, 30 nt, 50 nt, 100 nt, 200 nt, 500 nt, 1000 nt, 1500 nt, 2000 nt or 3000 nt of a nucleic acid molecule complementary to a nucleic acid molecule sequence characterized in (a), (b), (c), (d), (e), (f), (g), (h), (i) or (j);
[97171] or a nucleic acid molecule comprising a sequence which is complementary thereto.
   (All the references to Tables I to IV are references to the corresponding lines of Tables I to IV.)

[97172] In a preferred embodiment thereof said nucleic acid molecule encodes a polypeptide which has the activity of the polypeptide represented by a protein comprising a polypeptide as depicted in the corresponding hit in column 5 of Table II, application no. 19.

[97173] In another preferred embodiment thereof said nucleic acid molecule confers a generation or an increase of the respective fine chemical in a non-human organism or a part thereof as compared to a corresponding wild-type non-human organism or part thereof.

[97174] In another preferred embodiment thereof said nucleic acid molecule encodes a polypeptide which has the activity of the polypeptide represented by a protein as depicted in the corresponding hit in column 5 of Table II, application no. 19, and confers a generation or an increase of the respective fine chemical in a non-human organism or a part thereof as compared to a corresponding wild-type non-human organism or part thereof.

[97175] Accordingly, the genes of the present invention or used in accordance with the present invention, which respectively encode a protein having an activity of (DL)-glycerol-3-phosphatase, 2-C-methyl-D-erythritol 4-phosphate cytidylyltransferase, 3-oxoacyl-[acyl-carrier-protein] synthase, 49747384_SOYBEAN-protein, ABC transporter permease protein, acetyl CoA carboxylase, acid phosphatase precursor, acid shock protein, acyl transferase, adenylate kinase, alcohol dehydrogenase, amino-acid acetyltransferase, arginine decarboxylase, argininosuccinate synthetase, aromatic acid decarboxylase, At1g23110-protein, At1g67340-protein, ATP-binding component of a transport system, ATP-dependent RNA helicase, b0050-protein, b0518-protein, b0970-protein, b1003-protein, b1234-protein, b1330-protein, b1522-protein, b1556-protein, b1583-protein, b1670-protein, b1672-protein, b1703-protein, B1795-protein, b1837-protein, b2032-protein, b2099-protein, b2139-protein, b2399-protein, b2474-protein, b2613-protein, b2673-protein, b3083-protein, b3160-protein, b3777-protein, b3791-protein, b3989-protein, b4029-protein, b4050-protein, beta-hydroxylase, biotin synthase, calcium-dependent protein kinase, carbamoyl-phosphate synthase subunit, carbohydrate kinase, cardiolipin synthase, CBL-interacting protein kinase, CDP-diacylglycerol-glycerol-3-phosphate 3-phosphatidyltransferase, cell division control protein, cell division protein, coproporphyrinogen III oxidase, cyclin, cyclin D , dihydrolipoamide dehydrogenase, DnaJ-like chaperone, Elongation factor Tu, enterobacterial common antigen polymerase, ethanolamine utilization protein, eukaryotic translation initiation factor 5, Fe—S subunit of oxidoreductase, FKBP-type peptidyl-prolyl cis-trans isomerase (rotamase), glutamate 5-kinase, glutaredoxin, Glycine cleavage system T aminomethyltransferase, GM02LC17485-protein, heat shock protein Hsp40, heat shock transcription factor, HesB/YadR/YfhF family protein, high-affinity branched-chain amino acid transport protein, hydrolase, imidazole glycerol phosphate synthase subunit, ion-transport protein, lipoprotein precursor, L-serine dehydratase, lysozyme, lysyl-tRNA synthetase, metal-dependent hydrolase, methylglyoxal synthase, methyltransferase, Mg-protoporphyrin IX monomethyl ester oxidative cyclase 66 kD subunit, mitochondrial processing protease, mitogen-activated protein kinase, molecular chaperone portein, monothiol glutaredoxin, murein transglycosylase, NADH dehydrogenase, NADH-quinone oxidoreductase subunit, nitrate/nitrite transport protein, oxidoreductase, phenylacetic acid degradation protein, phosphate import ATP-binding protein, phosphatidylinositol 3- and 4-kinase family protein, phosphoglyceromutase, phosphotransferase, phosphotransferase system component, photosystem I reaction centre subunit, polygalacturonase, precorrin-8X methylmutase, protein phosphatase, purine-nucleoside phosphorylase, putative transport system permease protein, putrescine transport system permease protein, pyruvate kinase, recombinase A, sec-independent protein translocase, serine protease, sodium/proton antiporter, ThiF family protein, threonine dehydratase, threonine synthase, threonine/serine transporter, transcription factor, transcriptional regulator, transcriptional regulator protein, trehalose-phosphatase, TTC1386-protein, vacuolar sorting protein, YAL013W-protein, ycr102c-protein, ydr273w-protein, YFL019C-protein, YHR202W-protein, YIL083C-protein, YJL062W-A-protein, YLR099C-protein, ylr326w-protein, YPL162C.protein, or Zm_{—}4842_BE510522-protein, which respectively encode a protein comprising a polypeptide encoded by a nucleic acid sequence as shown in Table I, application no. 19, column 5 or 8, (preferably the coding region thereof), or a homolog or a fragment thereof, which respectively encode a protein comprising a polypeptide as depicted in Table II, application no. 19, column 5 or 8, or a homolg or a fragment thereof, and/or which respectively can be amplified with the primer set shown in Table III, application no. 19, column 8, are also referred to as “FCRP genes”.

[97176] Proteins or polypeptides encoded by “FCRP-genes” are referred to as “Fine Chemical Related Proteins” or “FCRP”. For the purposes of the description of the present invention, the respective protein having an activity of (DL)-glycerol-3-phosphatase, 2-C-methyl-D-erythritol 4-phosphate cytidylyltransferase, 3-oxoacyl-[acyl-carrier-protein] synthase, 49747384_SOYBEAN-protein, ABC transporter permease protein, acetyl CoA carboxylase, acid phosphatase precursor, acid shock protein, acyl transferase, adenylate kinase, alcohol dehydrogenase, amino-acid acetyltransferase, arginine decarboxylase, argininosuccinate synthetase, aromatic acid decarboxylase, At1g23110-protein, At1g67340-protein, ATP-binding component of a transport system, ATP-dependent RNA helicase, b0050-protein, b0518-protein, b0970-protein, b1003-protein, b1234-protein, b1330-protein, b1522-protein, b1556-protein, b1583-protein, b1670-protein, b1672-protein, b1703-protein, B1795-protein, b1837-protein, b2032-protein, b2099-protein, b2139-protein, b2399-protein, b2474-protein, b2613-protein, b2673-protein, b3083-protein, b3160-protein, b3777-protein, b3791-protein, b3989-protein, b4029-protein, b4050-protein, beta-hydroxylase, biotin synthase, calcium-dependent protein kinase, carbamoyl-phosphate synthase subunit, carbohydrate kinase, cardiolipin synthase, CBL-interacting protein kinase, CDP-diacylglycerol-glycerol-3-phosphate 3-phosphatidyltransferase, cell division control protein, cell division protein, coproporphyrinogen III oxidase, cyclin, cyclin D , dihydrolipoamide dehydrogenase, DnaJ-like chaperone, Elongation factor Tu, enterobacterial common antigen polymerase, ethanolamine utilization protein, eukaryotic translation initiation factor 5, Fe—S subunit of oxidoreductase, FKBP-type peptidyl-prolyl cis-trans isomerase (rotamase), glutamate 5-kinase, glutaredoxin, Glycine cleavage system T aminomethyltransferase, GM02LC17485-protein, heat shock protein Hsp40, heat shock transcription factor, HesB/YadR/YfhF family protein, high-affinity branched-chain amino acid transport protein, hydrolase, imidazole glycerol phosphate synthase subunit, ion-transport protein, lipoprotein precursor, L-serine dehydratase, lysozyme, lysyl-tRNA synthetase, metal-dependent hydrolase, methylglyoxal synthase, methyltransferase, Mg-protoporphyrin IX monomethyl ester oxidative cyclase 66 kD subunit, mitochondrial processing protease, mitogen-activated protein kinase, molecular chaperone portein, monothiol glutaredoxin, murein transglycosylase, NADH dehydrogenase, NADH-quinone oxidoreductase subunit, nitrate/nitrite transport protein, oxidoreductase, phenylacetic acid degradation protein, phosphate import ATP-binding protein, phosphatidylinositol 3- and 4-kinase family protein, phosphoglyceromutase, phosphotransferase, phosphotransferase system component, photosystem I reaction centre subunit, polygalacturonase, precorrin-8X methylmutase, protein phosphatase, purine-nucleoside phosphorylase, putative transport system permease protein, putrescine transport system permease protein, pyruvate kinase, recombinase A, sec-independent protein translocase, serine protease, sodium/proton antiporter, ThiF family protein, threonine dehydratase, threonine synthase, threonine/serine transporter, transcription factor, transcriptional regulator, transcriptional regulator protein, trehalose-phosphatase, TTC1386-protein, vacuolar sorting protein, YAL013W-protein, ycr102c-protein, ydr273w-protein, YFL0190-protein, YHR202W-protein, YIL083C-protein, YJL062W-A-protein, YLR099C-protein, ylr326w-protein, YPL162C.protein, or Zm_{—}4842_BE510522-protein, the respective protein comprising a polypeptide encoded by one or more respective nucleic acid sequences as shown in Table I, application no. 19, column 5 or 8, (preferably the coding region thereof), or a homolog or fragment thereof, the respective protein comprising a respective polypeptide as depicted in Table II, application no. 19, column 5 or 8, or a homolog or fragment thereof, the respective protein comprising a sequence corresponding to the consensus sequence as shown in Table IV, application no. 19, column 8, and/or the respective protein comprising at least one polypeptide motif as shown in Table IV, application no. 19, column 8 is also referred to as Fine Chemical Related Protein” or “FCRP”.

[97177] Thus, in one embodiment, the present invention provides a process of the production of bis-glyceryl phosphate (polar fraction), glycerol (lipid fraction), glycerol (polar fraction), glycerol phosphate (lipid fraction), glycerol-3-phosphate (polar fraction), and/or triacylglycerol, by increasing or generating one or more activities, especially selected from the group consisting of (DL)-glycerol-3-phosphatase, 2-C-methyl-D-erythritol 4-phosphate cytidylyltransferase, 3-oxoacyl-[acyl-carrier-protein] synthase, 49747384_SOYBEAN-protein, ABC transporter permease protein, acetyl CoA carboxylase, acid phosphatase precursor, acid shock protein, acyl transferase, adenylate kinase, alcohol dehydrogenase, amino-acid acetyltransferase, arginine decarboxylase, argininosuccinate synthetase, aromatic acid decarboxylase, At1g23110-protein, At1g67340-protein, ATP-binding component of a transport system, ATP-dependent RNA helicase, b0050-protein, b0518-protein, b0970-protein, b1003-protein, b1234-protein, b1330-protein, b1522-protein, b1556-protein, b1583-protein, b1670-protein, b1672-protein, b1703-protein, B1795-protein, b1837-protein, b2032-protein, b2099-protein, b2139-protein, b2399-protein, b2474-protein, b2613-protein, b2673-protein, b3083-protein, b3160-protein, b3777-protein, b3791-protein, b3989-protein, b4029-protein, b4050-protein, beta-hydroxylase, biotin synthase, calcium-dependent protein kinase, carbamoyl-phosphate synthase subunit, carbohydrate kinase, cardiolipin synthase, CBL-interacting protein kinase, CDP-diacylglycerol-glycerol-3-phosphate 3-phosphatidyltransferase, cell division control protein, cell division protein, coproporphyrinogen III oxidase, cyclin, cyclin D , dihydrolipoamide dehydrogenase, DnaJ-like chaperone, Elongation factor Tu, enterobacterial common antigen polymerase, ethanolamine utilization protein, eukaryotic translation initiation factor 5, Fe—S subunit of oxidoreductase, FKBP-type peptidyl-prolyl cis-trans isomerase (rotamase), glutamate 5-kinase, glutaredoxin, Glycine cleavage system T aminomethyltransferase, GM02LC17485-protein, heat shock protein Hsp40, heat shock transcription factor, HesB/YadR/YfhF family protein, high-affinity branched-chain amino acid transport protein, hydrolase, imidazole glycerol phosphate synthase subunit, ion-transport protein, lipoprotein precursor, L-serine dehydratase, lysozyme, lysyl-tRNA synthetase, metal-dependent hydrolase, methylglyoxal synthase, methyltransferase, Mg-protoporphyrin IX monomethyl ester oxidative cyclase 66 kD subunit, mitochondrial processing protease, mitogen-activated protein kinase, molecular chaperone portein, monothiol glutaredoxin, murein transglycosylase, NADH dehydrogenase, NADH-quinone oxidoreductase subunit, nitrate/nitrite transport protein, oxidoreductase, phenylacetic acid degradation protein, phosphate import ATP-binding protein, phosphatidylinositol 3- and 4-kinase family protein, phosphoglyceromutase, phosphotransferase, phosphotransferase system component, photosystem I reaction centre subunit, polygalacturonase, precorrin-8X methylmutase, protein phosphatase, purine-nucleoside phosphorylase, putative transport system permease protein, putrescine transport system permease protein, pyruvate kinase, recombinase A, sec-independent protein translocase, serine protease, sodium/proton antiporter, ThiF family protein, threonine dehydratase, threonine synthase, threonine/serine transporter, transcription factor, transcriptional regulator, transcriptional regulator protein, trehalose-phosphatase, TTC1386-protein, vacuolar sorting protein, YAL013W-protein, ycr102c-protein, ydr273w-protein, YFL019C-protein, YHR202W-protein, YIL083C-protein, YJL062W-A-protein, YLR099C-protein, ylr326w-protein, YPL162C.protein, and Zm_{—}4842_BE510522-protein, which is conferred by one or more FCRPs or the gene product of one or more FCRP-genes, for example by the gene product of a nucleic acid sequences comprising a polynucleotide selected from the group as shown in Table I, application no. 19, column 5 or 8, (preferably by the coding region thereof), or a homolog or a fragment thereof, e.g. or by one or more proteins each comprising a polypeptide encoded by one or more nucleic acid sequences selected from the group as shown in Table I, application no. 19, column 5 or 8, (preferably by the coding region thereof), or a homolog or a fragment thereof, or by one or more protein(s) each comprising a polypeptide selected from the group as depicted in Table II, application no. 19, column 5 and 8, or a homolog thereof, or a protein comprising a sequence corresponding to the consensus sequence or comprising at least one polypeptide motif as shown in Table IV, application no. 19, column 8.

[97178] for the disclosure of this paragraph see [0025.1.7.7] above

[97179] In an embodiment, the process comprises increasing or generating the activity of one or more polypeptides having said activity, e.g.

[97180] by generating or increasing the amount and/or specific activity in the cell or a compartment of a cell of one of more FCRP, especially selected from the group consisting of (DL)-glycerol-3-phosphatase, 2-C-methyl-D-erythritol 4-phosphate cytidylyltransferase, 3-oxoacyl-[acyl-carrier-protein] synthase, 49747384_SOYBEAN-protein, ABC transporter permease protein, acetyl CoA carboxylase, acid phosphatase precursor, acid shock protein, acyl transferase, adenylate kinase, alcohol dehydrogenase, amino-acid acetyltransferase, arginine decarboxylase, argininosuccinate synthetase, aromatic acid decarboxylase, At1g23110-protein, At1g67340-protein, ATP-binding component of a transport system, ATP-dependent RNA helicase, b0050-protein, b0518-protein, b0970-protein, b1003-protein, b1234-protein, b1330-protein, b1522-protein, b1556-protein, b1583-protein, b1670-protein, b1672-protein, b1703-protein, B1795-protein, b1837-protein, b2032-protein, b2099-protein, b2139-protein, b2399-protein, b2474-protein, b2613-protein, b2673-protein, b3083-protein, b3160-protein, b3777-protein, b3791-protein, b3989-protein, b4029-protein, b4050-protein, beta-hydroxylase, biotin synthase, calcium-dependent protein kinase, carbamoyl-phosphate synthase subunit, carbohydrate kinase, cardiolipin synthase, CBL-interacting protein kinase, CDP-diacylglycerol-glycerol-3-phosphate 3-phosphatidyltransferase, cell division control protein, cell division protein, coproporphyrinogen III oxidase, cyclin, cyclin D , dihydrolipoamide dehydrogenase, DnaJ-like chaperone, Elongation factor Tu, enterobacterial common antigen polymerase, ethanolamine utilization protein, eukaryotic translation initiation factor 5, Fe—S subunit of oxidoreductase, FKBP-type peptidyl-prolyl cis-trans isomerase (rotamase), glutamate 5-kinase, glutaredoxin, Glycine cleavage system T aminomethyltransferase, GM02LC17485-protein, heat shock protein Hsp40, heat shock transcription factor, HesB/YadR/YfhF family protein, high-affinity branched-chain amino acid transport protein, hydrolase, imidazole glycerol phosphate synthase subunit, ion-transport protein, lipoprotein precursor, L-serine dehydratase, lysozyme, lysyl-tRNA synthetase, metal-dependent hydrolase, methylglyoxal synthase, methyltransferase, Mg-protoporphyrin IX monomethyl ester oxidative cyclase 66 kD subunit, mitochondrial processing protease, mitogen-activated protein kinase, molecular chaperone portein, monothiol glutaredoxin, murein transglycosylase, NADH dehydrogenase, NADH-quinone oxidoreductase subunit, nitrate/nitrite transport protein, oxidoreductase, phenylacetic acid degradation protein, phosphate import ATP-binding protein, phosphatidylinositol 3- and 4-kinase family protein, phosphoglyceromutase, phosphotransferase, phosphotransferase system component, photosystem I reaction centre subunit, polygalacturonase, precorrin-8X methylmutase, protein phosphatase, purine-nucleoside phosphorylase, putative transport system permease protein, putrescine transport system permease protein, pyruvate kinase, recombinase A, sec-independent protein translocase, serine protease, sodium/proton antiporter, ThiF family protein, threonine dehydratase, threonine synthase, threonine/serine transporter, transcription factor, transcriptional regulator, transcriptional regulafor protein, trehalose-phosphatase, TTC1386-protein, vacuolar sorting protein, YAL013W-protein, ycr102c-protein, ydr273w-protein, YFL019C-protein, YHR202W-protein, YIL083C-protein, YJL062W-A-protein, YLR099C-protein, ylr326w-protein, YPL162C.protein, and Zm_{—}4842_BE510522-protein, for example of the respective polypeptide as depicted in Table II, application no. 19, column 5 and 8, or a homolog or a fragment thereof, or the respective polypeptide comprising a sequence corresponding to the consensus sequences as shown in Table IV, application no. 19, column 8, or the respective polypeptide comprising at least one polypeptide motif as depicted in Table IV, application no. 19, column 8.

[97181] A further embodiment of the present invention relates to a process for the production of glycerol phosphate (lipid fraction), which comprises
[97182] (a) increasing or generating the activity of a protein phosphatase non-targeted in a non-human organism or a part thereof, preferably a microorganism, a plant cell, a plant or a part thereof, as compared to a corresponding non-transformed wild type non-human organism or a part thereof; and
[97183] (b) growing the non-human organism or a part thereof under conditions which permit the production of glycerol phosphate (lipid fraction) or a composition comprising glycerol phosphate (lipid fraction) in said non-human organism or in the culture medium surrounding said non-human organism.

[97184] A further embodiment of the present invention relates to a process for the production of bis-glyceryl phosphate (polar fraction), which comprises
[97185] (a) increasing or generating the activity of a At1g23110-protein non-targeted in a non-human organism or a part thereof, preferably a microorganism, a plant cell, a plant or a part thereof, as compared to a corresponding non-transformed wild type non-human organism or a part thereof; and
[97186] (b) growing the non-human organism or a part thereof under conditions which permit the production of bis-glyceryl phosphate (polar fraction) or a composition comprising bis-glyceryl phosphate (polar fraction) in said non-human organism or in the culture medium surrounding said non-human organism.

[97187] A further embodiment of the present invention relates to a process for the production of bis-glyceryl phosphate (polar fraction), which comprises
[97188] (a) increasing or generating the activity of a eukaryotic translation initiation factor 5 non-targeted in a non-human organism or a part thereof, preferably a microorganism, a plant cell, a plant or a part thereof, as compared to a corresponding non-transformed wild type non-human organism or a part thereof; and
[97189] (b) growing the non-human organism or a part thereof under conditions which permit the production of bis-glyceryl phosphate (polar fraction) or a composition comprising bis-glyceryl phosphate (polar fraction) in said non-human organism or in the culture medium surrounding said non-human organism.

[97190] A further embodiment of the present invention relates to a process for the production of glycerol phosphate (lipid fraction), which comprises
[97191] (a) increasing or generating the activity of a eukaryotic translation initiation factor 5 non-targeted in a non-human organism or a part thereof, preferably a microorganism, a plant cell, a plant or a part thereof, as compared to a corresponding non-transformed wild type non-human organism or a part thereof; and
[97192] (b) growing the non-human organism or a part thereof under conditions which permit the production of glycerol phosphate (lipid fraction) or a composition comprising glycerol phosphate (lipid fraction) in said non-human organism or in the culture medium surrounding said non-human organism.

[97193] A further embodiment of the present invention relates to a process for the production of triacylglycerol, which comprises
[97194] (a) increasing or generating the activity of a At1g67340-protein non-targeted in a non-human organism or a part thereof, preferably a microorganism, a plant cell, a plant or a part thereof, as compared to a corresponding non-transformed wild type non-human organism or a part thereof; and
[97195] (b) growing the non-human organism or a part thereof under conditions which permit the production of triacylglycerol or a composition comprising triacylglycerol in said non-human organism or in the culture medium surrounding said non-human organism.

[97196] A further embodiment of the present invention relates to a process for the production of glycerol (lipid fraction), which comprises
[97197] (a) increasing or generating the activity of a transcription factor non-targeted in a non-human organism or a part thereof, preferably a microorganism, a plant cell, a plant or a part thereof, as compared to a corresponding non-transformed wild type non-human organism or a part thereof; and
[97198] (b) growing the non-human organism or a part thereof under conditions which permit the production of glycerol (lipid fraction) or a composition comprising glycerol (lipid fraction) in said non-human organism or in the culture medium surrounding said non-human organism.

[97199] A further embodiment of the present invention relates to a process for the production of bis-glyceryl phosphate (polar fraction), which comprises
[97200] (a) increasing or generating the activity of a protein phosphatase non-targeted in a non-human organism or a part thereof, preferably a microorganism, a plant cell, a plant or a part thereof, as compared to a corresponding non-transformed wild type non-human organism or a part thereof; and
[97201] (b) growing the non-human organism or a part thereof under conditions which permit the production of bis-glyceryl phosphate (polar fraction) or a composition comprising bis-glyceryl phosphate (polar fraction) in said non-human organism or in the culture medium surrounding said non-human organism.

[97202] A further embodiment of the present invention relates to a process for the production of glycerol (lipid fraction), which comprises
[97203] (a) increasing or generating the activity of a protein phosphatase non-targeted in a non-human organism or a part thereof, preferably a microorganism, a plant cell, a plant or a part thereof, as compared to a corresponding non-transformed wild type non-human organism or a part thereof; and
[97204] (b) growing the non-human organism or a part thereof under conditions which permit the production of glycerol (lipid fraction) or a composition comprising glycerol (lipid fraction) in said non-human organism or in the culture medium surrounding said non-human organism.

[97205] A further embodiment of the present invention relates to a process for the production of glycerol phosphate (lipid fraction), which comprises
[97206] (a) increasing or generating the activity of a protein phosphatase non-targeted in a non-human organism or a part thereof, preferably a microorganism, a plant cell, a plant or a part thereof, as compared to a corresponding non-transformed wild type non-human organism or a part thereof; and
[97207] (b) growing the non-human organism or a part thereof under conditions which permit the production of glycerol phosphate (lipid fraction) or a composition comprising glycerol phosphate (lipid fraction) in said non-human organism or in the culture medium surrounding said non-human organism.

[97208] A further embodiment of the present invention relates to a process for the production of bis-glyceryl phosphate (polar fraction), which comprises
[97209] (a) increasing or generating the activity of a CBL-interacting protein kinase non-targeted in a non-human organism or a part thereof, preferably a microorganism, a plant cell, a plant or a part thereof, as compared to a corresponding non-transformed wild type non-human organism or a part thereof; and
[97210] (b) growing the non-human organism or a part thereof under conditions which permit the production of bis-glyceryl phosphate (polar fraction) or a composition comprising bis-glyceryl phosphate (polar fraction) in said non-human organism or in the culture medium surrounding said non-human organism.

[97211] A further embodiment of the present invention relates to a process for the production of bis-glyceryl phosphate (polar fraction), which comprises
[97212] (a) increasing or generating the activity of a phosphatidylinositol 3- and 4-kinase family protein non-targeted in a non-human organism or a part thereof, preferably a microorganism, a plant cell, a plant or a part thereof, as compared to a corresponding non-transformed wild type non-human organism or a part thereof; and
[97213] (b) growing the non-human organism or a part thereof under conditions which permit the production of bis-glyceryl phosphate (polar fraction) or a composition comprising bis-glyceryl phosphate (polar fraction) in said non-human organism or in the culture medium surrounding said non-human organism.

[97214] A further embodiment of the present invention relates to a process for the production of triacylglycerol, which comprises
[97215] (a) increasing or generating the activity of a heat shock transcription factor non-targeted in a non-human organism or a part thereof, preferably a microorganism, a plant cell, a plant or a part thereof, as compared to a corresponding non-transformed wild type non-human organism or a part thereof; and
[97216] (b) growing the non-human organism or a part thereof under conditions which permit the production of triacylglycerol or a composition comprising triacylglycerol in said non-human organism or in the culture medium surrounding said non-human organism.

[97217] A further embodiment of the present invention relates to a process for the production of glycerol (lipid fraction), which comprises
[97218] (a) increasing or generating the activity of a transcription factor non-targeted in a non-human organism or a part thereof, preferably a microorganism, a plant cell, a plant or a part thereof, as compared to a corresponding non-transformed wild type non-human organism or a part thereof; and
[97219] (b) growing the non-human organism or a part thereof under conditions which permit the production of glycerol (lipid fraction) or a composition comprising glycerol (lipid fraction) in said non-human organism or in the culture medium surrounding said non-human organism.

[97220] A further embodiment of the present invention relates to a process for the production of glycerol (lipid fraction), which comprises
[97221] (a) increasing or generating the activity of a monothiol glutaredoxin non-targeted in a non-human organism or a part thereof, preferably a microorganism, a plant cell, a plant or a part thereof, as compared to a corresponding non-transformed wild type non-human organism or a part thereof; and
[97222] (b) growing the non-human organism or a part thereof under conditions which permit the production of glycerol (lipid fraction) or a composition comprising glycerol (lipid fraction) in said non-human organism or in the culture medium surrounding said non-human organism.

[97223] A further embodiment of the present invention relates to a process for the production of triacylglycerol, which comprises
[97224] (a) increasing or generating the activity of a monothiol glutaredoxin non-targeted in a non-human organism or a part thereof, preferably a microorganism, a plant cell, a plant or a part thereof, as compared to a corresponding non-transformed wild type non-human organism or a part thereof; and
[97225] (b) growing the non-human organism or a part thereof under conditions which permit the production of triacylglycerol or a composition comprising triacylglycerol in said non-human organism or in the culture medium surrounding said non-human organism.

[97226] A further embodiment of the present invention relates to a process for the production of glycerol (lipid fraction), which comprises
[97227] (a) increasing or generating the activity of a monothiol glutaredoxin non-targeted in a non-human organism or a part thereof, preferably a microorganism, a plant cell, a plant or a part thereof, as compared to a corresponding non-transformed wild type non-human organism or a part thereof; and
[97228] (b) growing the non-human organism or a part thereof under conditions which permit the production of glycerol (lipid fraction) or a composition comprising glycerol (lipid fraction) in said non-human organism or in the culture medium surrounding said non-human organism.

[97229] A further embodiment of the present invention relates to a process for the production of triacylglycerol, which comprises
[97230] (a) increasing or generating the activity of a monothiol glutaredoxin non-targeted in a non-human organism or a part thereof, preferably a microorganism, a plant cell, a plant or a part thereof, as compared to a corresponding non-transformed wild type non-human organism or a part thereof; and
[97231] (b) growing the non-human organism or a part thereof under conditions which permit the production of triacylglycerol or a composition comprising triacylglycerol in said non-human organism or in the culture medium surrounding said non-human organism.

[97232] A further embodiment of the present invention relates to a process for the production of glycerol phosphate (lipid fraction), which comprises
[97233] (a) increasing or generating the activity of a protein phosphatase non-targeted in a non-human organism or a part thereof, preferably a microorganism, a plant cell, a plant or a part thereof, as compared to a corresponding non-transformed wild type non-human organism or a part thereof; and
[97234] (b) growing the non-human organism or a part thereof under conditions which permit the production of glycerol phosphate (lipid fraction) or a composition comprising glycerol phosphate (lipid fraction) in said non-human organism or in the culture medium surrounding said non-human organism.

[97235] A further embodiment of the present invention relates to a process for the production of bis-glyceryl phosphate (polar fraction), which comprises
[97236] (a) increasing or generating the activity of a cyclin D non-targeted in a non-human organism or a part thereof, preferably a microorganism, a plant cell, a plant or a part thereof, as compared to a corresponding non-transformed wild type non-human organism or a part thereof; and
[97237] (b) growing the non-human organism or a part thereof under conditions which permit the production of bis-glyceryl phosphate (polar fraction) or a composition comprising bis-glyceryl phosphate (polar fraction) in said non-human organism or in the culture medium surrounding said non-human organism.

[97238] A further embodiment of the present invention relates to a process for the production of bis-glyceryl phosphate (polar fraction), which comprises
[97239] (a) increasing or generating the activity of a calcium-dependent protein kinase non-targeted in a non-human organism or a part thereof, preferably a microorganism, a plant cell, a plant or a part thereof, as compared to a corresponding non-transformed wild type non-human organism or a part thereof; and
[97240] (b) growing the non-human organism or a part thereof under conditions which permit the production of bis-glyceryl phosphate (polar fraction) or a composition comprising bis-glyceryl phosphate (polar fraction) in said non-human organism or in the culture medium surrounding said non-human organism.

[97241] A further embodiment of the present invention relates to a process for the production of glycerol (lipid fraction), which comprises
[97242] (a) increasing or generating the activity of a heat shock transcription factor non-targeted in a non-human organism or a part thereof, preferably a microorganism, a plant cell, a plant or a part thereof, as compared to a corresponding non-transformed wild type non-human organism or a part thereof; and
[97243] (b) growing the non-human organism or a part thereof under conditions which permit the production of glycerol (lipid fraction) or a composition comprising glycerol (lipid fraction) in said non-human organism or in the culture medium surrounding said non-human organism.

[97244] A further embodiment of the present invention relates to a process for the production of triacylglycerol, which comprises
[97245] (a) increasing or generating the activity of a heat shock transcription factor non-targeted in a non-human organism or a part thereof, preferably a microorganism, a plant cell, a plant or a part thereof, as compared to a corresponding non-transformed wild type non-human organism or a part thereof; and
[97246] (b) growing the non-human organism or a part thereof under conditions which permit the production of triacylglycerol or a composition comprising triacylglycerol in said non-human organism or in the culture medium surrounding said non-human organism.

[97247] A further embodiment of the present invention relates to a process for the production of glycerol (lipid fraction), which comprises
[97248] (a) increasing or generating the activity of a monothiol glutaredoxin non-targeted in a non-human organism or a part thereof, preferably a microorganism, a plant cell, a plant or a part thereof, as compared to a corresponding non-transformed wild type non-human organism or a part thereof; and
[97249] (b) growing the non-human organism or a part thereof under conditions which permit the production of glycerol (lipid fraction) or a composition comprising glycerol (lipid fraction) in said non-human organism or in the culture medium surrounding said non-human organism.

[97250] A further embodiment of the present invention relates to a process for the production of glycerol phosphate (lipid fraction), which comprises
[97251] (a) increasing or generating the activity of a protein phosphatase non-targeted in a non-human organism or a part thereof, preferably a microorganism, a plant cell, a plant or a part thereof, as compared to a corresponding non-transformed wild type non-human organism or a part thereof; and
[97252] (b) growing the non-human organism or a part thereof under conditions which permit the production of glycerol phosphate (lipid fraction) or a composition comprising glycerol phosphate (lipid fraction) in said non-human organism or in the culture medium surrounding said non-human organism.

[97253] A further embodiment of the present invention relates to a process for the production of glycerol phosphate (lipid fraction), which comprises
[97254] (a) increasing or generating the activity of a protein phosphatase non-targeted in a non-human organism or a part thereof, preferably a microorganism, a plant cell, a plant or a part thereof, as compared to a corresponding non-transformed wild type non-human organism or a part thereof; and
[97255] (b) growing the non-human organism or a part thereof under conditions which permit the production of glycerol phosphate (lipid fraction) or a composition comprising glycerol phosphate (lipid fraction) in said non-human organism or in the culture medium surrounding said non-human organism.

[97256] A further embodiment of the present invention relates to a process for the production of glycerol phosphate (lipid fraction), which comprises
[97257] (a) increasing or generating the activity of a pyruvate kinase non-targeted in a non-human organism or a part thereof, preferably a microorganism, a plant cell, a plant or a part thereof, as compared to a corresponding non-transformed wild type non-human organism or a part thereof; and
[97258] (b) growing the non-human organism or a part thereof under conditions which permit the production of glycerol phosphate (lipid fraction) or a composition comprising glycerol phosphate (lipid fraction) in said non-human organism or in the culture medium surrounding said non-human organism.

[97259] A further embodiment of the present invention relates to a process for the production of triacylglycerol, which comprises
[97260] (a) increasing or generating the activity of a Glycine cleavage system T aminomethyltransferase non-targeted in a non-human organism or a part thereof, preferably a microorganism, a plant cell, a plant or a part thereof, as compared to a corresponding non-transformed wild type non-human organism or a part thereof; and
[97261] (b) growing the non-human organism or a part thereof under conditions which permit the production of triacylglycerol or a composition comprising triacylglycerol in said non-human organism or in the culture medium surrounding said non-human organism.

[97262] A further embodiment of the present invention relates to a process for the production of glycerol phosphate (lipid fraction), which comprises
[97263] (a) increasing or generating the activity of a sec-independent protein translocase non-targeted in a non-human organism or a part thereof, preferably a microorganism, a plant cell, a plant or a part thereof, as compared to a corresponding non-transformed wild type non-human organism or a part thereof; and
[97264] (b) growing the non-human organism or a part thereof under conditions which permit the production of glycerol phosphate (lipid fraction) or a composition comprising glycerol phosphate (lipid fraction) in said non-human organism or in the culture medium surrounding said non-human organism.

[97265] A further embodiment of the present invention relates to a process for the production of glycerol (lipid fraction), which comprises
[97266] (a) increasing or generating the activity of a oxidoreductase non-targeted in a non-human organism or a part thereof, preferably a microorganism, a plant cell, a plant or a part thereof, as compared to a corresponding non-transformed wild type non-human organism or a part thereof; and
[97267] (b) growing the non-human organism or a part thereof under conditions which permit the production of glycerol (lipid fraction) or a composition comprising glycerol (lipid fraction) in said non-human organism or in the culture medium surrounding said non-human organism.

[97268] A further embodiment of the present invention relates to a process for the production of bis-glyceryl phosphate (polar fraction), which comprises
[97269] (a) increasing or generating the activity of a transcriptional regulator protein non-targeted in a non-human organism or a part thereof, preferably a microorganism, a plant cell, a plant or a part thereof, as compared to a corresponding non-transformed wild type non-human organism or a part thereof; and
[97270] (b) growing the non-human organism or a part thereof under conditions which permit the production of bis-glyceryl phosphate (polar fraction) or a composition comprising bis-glyceryl phosphate (polar fraction) in said non-human organism or in the culture medium surrounding said non-human organism.

[97271] A further embodiment of the present invention relates to a process for the production of bis-glyceryl phosphate (polar fraction), which comprises
[97272] (a) increasing or generating the activity of a beta-hydroxylase non-targeted in a non-human organism or a part thereof, preferably a microorganism, a plant cell, a plant or a part thereof, as compared to a corresponding non-transformed wild type non-human organism or a part thereof; and
[97273] (b) growing the non-human organism or a part thereof under conditions which permit the production of bis-glyceryl phosphate (polar fraction) or a composition comprising bis-glyceryl phosphate (polar fraction) in said non-human organism or in the culture medium surrounding said non-human organism.

[97274] A further embodiment of the present invention relates to a process for the production of triacylglycerol, which comprises
[97275] (a) increasing or generating the activity of a beta-hydroxylase non-targeted in a non-human organism or a part thereof, preferably a microorganism, a plant cell, a plant or a part thereof, as compared to a corresponding non-transformed wild type non-human organism or a part thereof; and
[97276] (b) growing the non-human organism or a part thereof under conditions which permit the production of triacylglycerol or a composition comprising triacylglycerol in said non-human organism or in the culture medium surrounding said non-human organism.

[97277] A further embodiment of the present invention relates to a process for the production of bis-glyceryl phosphate (polar fraction), which comprises
[97278] (a) increasing or generating the activity of a oxidoreductase non-targeted in a non-human organism or a part thereof, preferably a microorganism, a plant cell, a plant or a part thereof, as compared to a corresponding non-transformed wild type non-human organism or a part thereof; and
[97279] (b) growing the non-human organism or a part thereof under conditions which permit the production of bis-glyceryl phosphate (polar fraction) or a composition comprising bis-glyceryl phosphate (polar fraction) in said non-human organism or in the culture medium surrounding said non-human organism.

[97280] A further embodiment of the present invention relates to a process for the production of glycerol phosphate (lipid fraction), which comprises
[97281] (a) increasing or generating the activity of a ThiF family protein non-targeted in a non-human organism or a part thereof, preferably a microorganism, a plant cell, a plant or a part thereof, as compared to a corresponding non-transformed wild type non-human organism or a part thereof; and
[97282] (b) growing the non-human organism or a part thereof under conditions which permit the production of glycerol phosphate (lipid fraction) or a composition comprising glycerol phosphate (lipid fraction) in said non-human organism or in the culture medium surrounding said non-human organism.

[97283] A further embodiment of the present invention relates to a process for the production of glycerol (lipid fraction), which comprises
[97284] (a) increasing or generating the activity of a recombinase A non-targeted in a non-human organism or a part thereof, preferably a microorganism, a plant cell, a plant or a part thereof, as compared to a corresponding non-transformed wild type non-human organism or a part thereof; and
[97285] (b) growing the non-human organism or a part thereof under conditions which permit the production of glycerol (lipid fraction) or a composition comprising glycerol (lipid fraction) in said non-human organism or in the culture medium surrounding said non-human organism.

[97286] A further embodiment of the present invention relates to a process for the production of bis-glyceryl phosphate (polar fraction), which comprises
[97287] (a) increasing or generating the activity of a NADH-quinone oxidoreductase subunit non-targeted in a non-human organism or a part thereof, preferably a microorganism, a plant cell, a plant or a part thereof, as compared to a corresponding non-transformed wild type non-human organism or a part thereof; and
[97288] (b) growing the non-human organism or a part thereof under conditions which permit the production of bis-glyceryl phosphate (polar fraction) or a composition comprising bis-glyceryl phosphate (polar fraction) in said non-human organism or in the culture medium surrounding said non-human organism.

[97289] A further embodiment of the present invention relates to a process for the production of triacylglycerol, which comprises
[97290] (a) increasing or generating the activity of a hydrolase non-targeted in a non-human organism or a part thereof, preferably a microorganism, a plant cell, a plant or a part thereof, as compared to a corresponding non-transformed wild type non-human organism or a part thereof; and
[97291] (b) growing the non-human organism or a part thereof under conditions which permit the production of triacylglycerol or a composition comprising triacylglycerol in said non-human organism or in the culture medium surrounding said non-human organism.

[97292] A further embodiment of the present invention relates to a process for the production of glycerol phosphate (lipid fraction), which comprises
[97293] (a) increasing or generating the activity of a HesB/YadR/YfhF family protein non-targeted in a non-human organism or a part thereof, preferably a microorganism, a plant cell, a plant or a part thereof, as compared to a corresponding non-transformed wild type non-human organism or a part thereof; and
[97294] (b) growing the non-human organism or a part thereof under conditions which permit the production of glycerol phosphate (lipid fraction) or a composition comprising glycerol phosphate (lipid fraction) in said non-human organism or in the culture medium surrounding said non-human organism.

[97295] A further embodiment of the present invention relates to a process for the production of bis-glyceryl phosphate (polar fraction), which comprises
[97296] (a) increasing or generating the activity of a pyruvate kinase non-targeted in a non-human organism or a part thereof, preferably a microorganism, a plant cell, a plant or a part thereof, as compared to a corresponding non-transformed wild type non-human organism or a part thereof; and
[97297] (b) growing the non-human organism or a part thereof under conditions which permit the production of bis-glyceryl phosphate (polar fraction) or a composition comprising bis-glyceryl phosphate (polar fraction) in said non-human organism or in the culture medium surrounding said non-human organism.

[97298] A further embodiment of the present invention relates to a process for the production of triacylglycerol, which comprises
[97299] (a) increasing or generating the activity of a threonine synthase non-targeted in a non-human organism or a part thereof, preferably a microorganism, a plant cell, a plant or a part thereof, as compared to a corresponding non-transformed wild type non-human organism or a part thereof; and
[97300] (b) growing the non-human organism or a part thereof under conditions which permit the production of triacylglycerol or a composition comprising triacylglycerol in said non-human organism or in the culture medium surrounding said non-human organism.

[97301] A further embodiment of the present invention relates to a process for the production of glycerol phosphate (lipid fraction), which comprises
[97302] (a) increasing or generating the activity of a b0050-protein non-targeted in a non-human organism or a part thereof, preferably a microorganism, a plant cell, a plant or a part thereof, as compared to a corresponding non-transformed wild type non-human organism or a part thereof; and
[97303] (b) growing the non-human organism or a part thereof under conditions which permit the production of glycerol phosphate (lipid fraction) or a composition comprising glycerol phosphate (lipid fraction) in said non-human organism or in the culture medium surrounding said non-human organism.

[97304] A further embodiment of the present invention relates to a process for the production of bis-glyceryl phosphate (polar fraction), which comprises
[97305] (a) increasing or generating the activity of a serine protease non-targeted in a non-human organism or a part thereof, preferably a microorganism, a plant cell, a plant or a part thereof, as compared to a corresponding non-transformed wild type non-human organism or a part thereof; and
[97306] (b) growing the non-human organism or a part thereof under conditions which permit the production of bis-glyceryl phosphate (polar fraction) or a composition comprising bis-glyceryl phosphate (polar fraction) in said non-human organism or in the culture medium surrounding said non-human organism.

[97307] A further embodiment of the present invention relates to a process for the production of triacylglycerol, which comprises
[97308] (a) increasing or generating the activity of a serine protease non-targeted in a non-human organism or a part thereof, preferably a microorganism, a plant cell, a plant or a part thereof, as compared to a corresponding non-transformed wild type non-human organism or a part thereof; and
[97309] (b) growing the non-human organism or a part thereof under conditions which permit the production of triacylglycerol or a composition comprising triacylglycerol in said non-human organism or in the culture medium surrounding said non-human organism.

[97310] A further embodiment of the present invention relates to a process for the production of bis-glyceryl phosphate (polar fraction), which comprises
[97311] (a) increasing or generating the activity of a ATP-binding component of a transport system non-targeted in a non-human organism or a part thereof, preferably a microorganism, a plant cell, a plant or a part thereof, as compared to a corresponding non-transformed wild type non-human organism or a part thereof; and
[97312] (b) growing the non-human organism or a part thereof under conditions which permit the production of bis-glyceryl phosphate (polar fraction) or a composition comprising bis-glyceryl phosphate (polar fraction) in said non-human organism or in the culture medium surrounding said non-human organism.

[97313] A further embodiment of the present invention relates to a process for the production of glycerol (lipid fraction), which comprises
[97314] (a) increasing or generating the activity of a b0518-protein non-targeted in a non-human organism or a part thereof, preferably a microorganism, a plant cell, a plant or a part thereof, as compared to a corresponding non-transformed wild type non-human organism or a part thereof; and
[97315] (b) growing the non-human organism or a part thereof under conditions which permit the production of glycerol (lipid fraction) or a composition comprising glycerol (lipid fraction) in said non-human organism or in the culture medium surrounding said non-human organism.

[97316] A further embodiment of the present invention relates to a process for the production of bis-glyceryl phosphate (polar fraction), which comprises
[97317] (a) increasing or generating the activity of a phosphoglyceromutase non-targeted in a non-human organism or a part thereof, preferably a microorganism, a plant cell, a plant or a part thereof, as compared to a corresponding non-transformed wild type non-human organism or a part thereof; and
[97318] (b) growing the non-human organism or a part thereof under conditions which permit the production of bis-glyceryl phosphate (polar fraction) or a composition comprising bis-glyceryl phosphate (polar fraction) in said non-human organism or in the culture medium surrounding said non-human organism.

[97319] A further embodiment of the present invention relates to a process for the production of glycerol (polar fraction), which comprises
[97320] (a) increasing or generating the activity of a putrescine transport system permease protein non-targeted in a non-human organism or a part thereof, preferably a microorganism, a plant cell, a plant or a part thereof, as compared to a corresponding non-transformed wild type non-human organism or a part thereof; and
[97321] (b) growing the non-human organism or a part thereof under conditions which permit the production of glycerol (polar fraction) or a composition comprising glycerol (polar fraction) in said non-human organism or in the culture medium surrounding said non-human organism.

[97322] A further embodiment of the present invention relates to a process for the production of glycerol (lipid fraction), which comprises
[97323] (a) increasing or generating the activity of a methylglyoxal synthase non-targeted in a non-human organism or a part thereof, preferably a microorganism, a plant cell, a plant or a part thereof, as compared to a corresponding non-transformed wild type non-human organism or a part thereof; and
[97324] (b) growing the non-human organism or a part thereof under conditions which permit the production of glycerol (lipid fraction) or a composition comprising glycerol (lipid fraction) in said non-human organism or in the culture medium surrounding said non-human organism.

[97325] A further embodiment of the present invention relates to a process for the production of glycerol (polar fraction), which comprises
[97326] (a) increasing or generating the activity of a methylglyoxal synthase non-targeted in a non-human organism or a part thereof, preferably a microorganism, a plant cell, a plant or a part thereof, as compared to a corresponding non-transformed wild type non-human organism or a part thereof; and
[97327] (b) growing the non-human organism or a part thereof under conditions which permit the production of glycerol (polar fraction) or a composition comprising glycerol (polar fraction) in said non-human organism or in the culture medium surrounding said non-human organism.

[97328] A further embodiment of the present invention relates to a process for the production of bis-glyceryl phosphate (polar fraction), which comprises
[97329] (a) increasing or generating the activity of a b0970-protein non-targeted in a non-human organism or a part thereof, preferably a microorganism, a plant cell, a plant or a part thereof, as compared to a corresponding non-transformed wild type non-human organism or a part thereof; and
[97330] (b) growing the non-human organism or a part thereof under conditions which permit the production of bis-glyceryl phosphate (polar fraction) or a composition comprising bis-glyceryl phosphate (polar fraction) in said non-human organism or in the culture medium surrounding said non-human organism.

[97331] A further embodiment of the present invention relates to a process for the production of bis-glyceryl phosphate (polar fraction), which comprises
[97332] (a) increasing or generating the activity of a b1003-protein non-targeted in a non-human organism or a part thereof, preferably a microorganism, a plant cell, a plant or a part thereof, as compared to a corresponding non-transformed wild type non-human organism or a part thereof; and
[97333] (b) growing the non-human organism or a part thereof under conditions which permit the production of bis-glyceryl phosphate (polar fraction) or a composition comprising bis-glyceryl phosphate (polar fraction) in said non-human organism or in the culture medium surrounding said non-human organism.

[97334] A further embodiment of the present invention relates to a process for the production of bis-glyceryl phosphate (polar fraction), which comprises
[97335] (a) increasing or generating the activity of a 3-oxoacyl-[acyl-carrier-protein] synthase non-targeted in a non-human organism or a part thereof, preferably a microorganism, a plant cell, a plant or a part thereof, as compared to a corresponding non-transformed wild type non-human organism or a part thereof; and
[97336] (b) growing the non-human organism or a part thereof under conditions which permit the production of bis-glyceryl phosphate (polar fraction) or a composition comprising bis-glyceryl phosphate (polar fraction) in said non-human organism or in the culture medium surrounding said non-human organism.

[97337] A further embodiment of the present invention relates to a process for the production of glycerol (lipid fraction), which comprises
[97338] (a) increasing or generating the activity of a sodium/proton antiporter non-targeted in a non-human organism or a part thereof, preferably a microorganism, a plant cell, a plant or a part thereof, as compared to a corresponding non-transformed wild type non-human organism or a part thereof; and
[97339] (b) growing the non-human organism or a part thereof under conditions which permit the production of glycerol (lipid fraction) or a composition comprising glycerol (lipid fraction) in said non-human organism or in the culture medium surrounding said non-human organism.

[97340] A further embodiment of the present invention relates to a process for the production of triacylglycerol, which comprises
[97341] (a) increasing or generating the activity of a b1234-protein non-targeted in a non-human organism or a part thereof, preferably a microorganism, a plant cell, a plant or a part thereof, as compared to a corresponding non-transformed wild type non-human organism or a part thereof; and
[97342] (b) growing the non-human organism or a part thereof under conditions which permit the production of triacylglycerol or a composition comprising triacylglycerol in said non-human organism or in the culture medium surrounding said non-human organism.

[97343] A further embodiment of the present invention relates to a process for the production of glycerol (lipid fraction), which comprises
[97344] (a) increasing or generating the activity of a cardiolipin synthase non-targeted in a non-human organism or a part thereof, preferably a microorganism, a plant cell, a plant or a part thereof, as compared to a corresponding non-transformed wild type non-human organism or a part thereof; and
[97345] (b) growing the non-human organism or a part thereof under conditions which permit the production of glycerol (lipid fraction) or a composition comprising glycerol (lipid fraction) in said non-human organism or in the culture medium surrounding said non-human organism.

[97346] A further embodiment of the present invention relates to a process for the production of glycerol phosphate (lipid fraction), which comprises
[97347] (a) increasing or generating the activity of a b1330-protein non-targeted in a non-human organism or a part thereof, preferably a microorganism, a plant cell, a plant or a part thereof, as compared to a corresponding non-transformed wild type non-human organism or a part thereof; and
[97348] (b) growing the non-human organism or a part thereof under conditions which permit the production of glycerol phosphate (lipid fraction) or a composition comprising glycerol phosphate (lipid fraction) in said non-human organism or in the culture medium surrounding said non-human organism.

[97349] A further embodiment of the present invention relates to a process for the production of bis-glyceryl phosphate (polar fraction), which comprises
[97350] (a) increasing or generating the activity of a ATP-dependent RNA helicase non-targeted in a non-human organism or a part thereof, preferably a microorganism, a plant cell, a plant or a part thereof, as compared to a corresponding non-transformed wild type non-human organism or a part thereof; and
[97351] (b) growing the non-human organism or a part thereof under conditions which permit the production of bis-glyceryl phosphate (polar fraction) or a composition comprising bis-glyceryl phosphate (polar fraction) in said non-human organism or in the culture medium surrounding said non-human organism.

[97352] A further embodiment of the present invention relates to a process for the production of bis-glyceryl phosphate (polar fraction), which comprises
[97353] (a) increasing or generating the activity of a phenylacetic acid degradation protein non-targeted in a non-human organism or a part thereof, preferably a microorganism, a plant cell, a plant or a part thereof, as compared to a corresponding non-transformed wild type non-human organism or a part thereof; and
[97354] (b) growing the non-human organism or a part thereof under conditions which permit the production of bis-glyceryl phosphate (polar fraction) or a composition comprising bis-glyceryl phosphate (polar fraction) in said non-human organism or in the culture medium surrounding said non-human organism.

[97355] A further embodiment of the present invention relates to a process for the production of bis-glyceryl phosphate (polar fraction), which comprises
[97356] (a) increasing or generating the activity of a lipoprotein precursor non-targeted in a non-human organism or a part thereof, preferably a microorganism, a plant cell, a plant or a part thereof, as compared to a corresponding non-transformed wild type non-human organism or a part thereof; and
[97357] (b) growing the non-human organism or a part thereof under conditions which permit the production of bis-glyceryl phosphate (polar fraction) or a composition comprising bis-glyceryl phosphate (polar fraction) in said non-human organism or in the culture medium surrounding said non-human organism.

[97358] A further embodiment of the present invention relates to a process for the production of bis-glyceryl phosphate (polar fraction), which comprises
[97359] (a) increasing or generating the activity of a b1522-protein non-targeted in a non-human organism or a part thereof, preferably a microorganism, a plant cell, a plant or a part thereof, as compared to a corresponding non-transformed wild type non-human organism or a part thereof; and
[97360] (b) growing the non-human organism or a part thereof under conditions which permit the production of bis-glyceryl phosphate (polar fraction) or a composition comprising bis-glyceryl phosphate (polar fraction) in said non-human organism or in the culture medium surrounding said non-human organism.

[97361] A further embodiment of the present invention relates to a process for the production of bis-glyceryl phosphate (polar fraction), which comprises
[97362] (a) increasing or generating the activity of a lysozyme non-targeted in a non-human organism or a part thereof, preferably a microorganism, a plant cell, a plant or a part thereof, as compared to a corresponding non-transformed wild type non-human organism or a part thereof; and
[97363] (b) growing the non-human organism or a part thereof under conditions which permit the production of bis-glyceryl phosphate (polar fraction) or a composition comprising bis-glyceryl phosphate (polar fraction) in said non-human organism or in the culture medium surrounding said non-human organism.

[97364] A further embodiment of the present invention relates to a process for the production of bis-glyceryl phosphate (polar fraction), which comprises
[97365] (a) increasing or generating the activity of a b1556-protein non-targeted in a non-human organism or a part thereof, preferably a microorganism, a plant cell, a plant or a part thereof, as compared to a corresponding non-transformed wild type non-human organism or a part thereof; and
[97366] (b) growing the non-human organism or a part thereof under conditions which permit the production of bis-glyceryl phosphate (polar fraction) or a composition comprising bis-glyceryl phosphate (polar fraction) in said non-human organism or in the culture medium surrounding said non-human organism.

[97367] A further embodiment of the present invention relates to a process for the production of triacylglycerol, which comprises
[97368] (a) increasing or generating the activity of a b1583-protein non-targeted in a non-human organism or a part thereof, preferably a microorganism, a plant cell, a plant or a part thereof, as compared to a corresponding non-transformed wild type non-human organism or a part thereof; and
[97369] (b) growing the non-human organism or a part thereof under conditions which permit the production of triacylglycerol or a composition comprising triacylglycerol in said non-human organism or in the culture medium surrounding said non-human organism.

[97370] A further embodiment of the present invention relates to a process for the production of bis-glyceryl phosphate (polar fraction), which comprises
[97371] (a) increasing or generating the activity of a Fe—S subunit of oxidoreductase non-targeted in a non-human organism or a part thereof, preferably a microorganism, a plant cell, a plant or a part thereof, as compared to a corresponding non-transformed wild type non-human organism or a part thereof; and
[97372] (b) growing the non-human organism or a part thereof under conditions which permit the production of bis-glyceryl phosphate (polar fraction) or a composition comprising bis-glyceryl phosphate (polar fraction) in said non-human organism or in the culture medium surrounding said non-human organism.

[97373] A further embodiment of the present invention relates to a process for the production of glycerol (lipid fraction), which comprises
[97374] (a) increasing or generating the activity of a acid shock protein non-targeted in a non-human organism or a part thereof, preferably a microorganism, a plant cell, a plant or a part thereof, as compared to a corresponding non-transformed wild type non-human organism or a part thereof; and
[97375] (b) growing the non-human organism or a part thereof under conditions which permit the production of glycerol (lipid fraction) or a composition comprising glycerol (lipid fraction) in said non-human organism or in the culture medium surrounding said non-human organism.

[97376] A further embodiment of the present invention relates to a process for the production of bis-glyceryl phosphate (polar fraction), which comprises
[97377] (a) increasing or generating the activity of a b1670-protein non-targeted in a non-human organism or a part thereof, preferably a microorganism, a plant cell, a plant or a part thereof, as compared to a corresponding non-transformed wild type non-human organism or a part thereof; and
[97378] (b) growing the non-human organism or a part thereof under conditions which permit the production of bis-glyceryl phosphate (polar fraction) or a composition comprising bis-glyceryl phosphate (polar fraction) in said non-human organism or in the culture medium surrounding said non-human organism.

[97379] A further embodiment of the present invention relates to a process for the production of bis-glyceryl phosphate (polar fraction), which comprises
[97380] (a) increasing or generating the activity of a b1672-protein non-targeted in a non-human organism or a part thereof, preferably a microorganism, a plant cell, a plant or a part thereof, as compared to a corresponding non-transformed wild type non-human organism or a part thereof; and
[97381] (b) growing the non-human organism or a part thereof under conditions which permit the production of bis-glyceryl phosphate (polar fraction) or a composition comprising bis-glyceryl phosphate (polar fraction) in said non-human organism or in the culture medium surrounding said non-human organism.

[97382] A further embodiment of the present invention relates to a process for the production of triacylglycerol, which comprises
[97383] (a) increasing or generating the activity of a b1703-protein non-targeted in a non-human organism or a part thereof, preferably a microorganism, a plant cell, a plant or a part thereof, as compared to a corresponding non-transformed wild type non-human organism or a part thereof; and
[97384] (b) growing the non-human organism or a part thereof under conditions which permit the production of triacylglycerol or a composition comprising triacylglycerol in said non-human organism or in the culture medium surrounding said non-human organism.

[97385] A further embodiment of the present invention relates to a process for the production of bis-glyceryl phosphate (polar fraction), which comprises
[97386] (a) increasing or generating the activity of a phosphotransferase system component non-targeted in a non-human organism or a part thereof, preferably a microorganism, a plant cell, a plant or a part thereof, as compared to a corresponding non-transformed wild type non-human organism or a part thereof; and
[97387] (b) growing the non-human organism or a part thereof under conditions which permit the production of bis-glyceryl phosphate (polar fraction) or a composition comprising bis-glyceryl phosphate (polar fraction) in said non-human organism or in the culture medium surrounding said non-human organism.

[97388] A further embodiment of the present invention relates to a process for the production of triacylglycerol, which comprises
[97389] (a) increasing or generating the activity of a B1795-protein non-targeted in a non-human organism or a part thereof, preferably a microorganism, a plant cell, a plant or a part thereof, as compared to a corresponding non-transformed wild type non-human organism or a part thereof; and
[97390] (b) growing the non-human organism or a part thereof under conditions which permit the production of triacylglycerol or a composition comprising triacylglycerol in said non-human organism or in the culture medium surrounding said non-human organism.

[97391] A further embodiment of the present invention relates to a process for the production of glycerol-3-phosphate (polar fraction), which comprises
[97392] (a) increasing or generating the activity of a L-serine dehydratase non-targeted in a non-human organism or a part thereof, preferably a microorganism, a plant cell, a plant or a part thereof, as compared to a corresponding non-transformed wild type non-human organism or a part thereof; and
[97393] (b) growing the non-human organism or a part thereof under conditions which permit the production of glycerol-3-phosphate (polar fraction) or a composition comprising glycerol-3-phosphate (polar fraction) in said non-human organism or in the culture medium surrounding said non-human organism.

[97394] A further embodiment of the present invention relates to a process for the production of glycerol phosphate (lipid fraction), which comprises
[97395] (a) increasing or generating the activity of a b1837-protein non-targeted in a non-human organism or a part thereof, preferably a microorganism, a plant cell, a plant or a part thereof, as compared to a corresponding non-transformed wild type non-human organism or a part thereof; and
[97396] (b) growing the non-human organism or a part thereof under conditions which permit the production of glycerol phosphate (lipid fraction) or a composition comprising glycerol phosphate (lipid fraction) in said non-human organism or in the culture medium surrounding said non-human organism.

[97397] A further embodiment of the present invention relates to a process for the production of triacylglycerol, which comprises
[97398] (a) increasing or generating the activity of a trehalose-phosphatase non-targeted in a non-human organism or a part thereof, preferably a microorganism, a plant cell, a plant or a part thereof, as compared to a corresponding non-transformed wild type non-human organism or a part thereof; and
[97399] (b) growing the non-human organism or a part thereof under conditions which permit the production of triacylglycerol or a composition comprising triacylglycerol in said non-human organism or in the culture medium surrounding said non-human organism.

[97400] A further embodiment of the present invention relates to a process for the production of glycerol (lipid fraction), which comprises
[97401] (a) increasing or generating the activity of a imidazole glycerol phosphate synthase subunit non-targeted in a non-human organism or a part thereof, preferably a microorganism, a plant cell, a plant or a part thereof, as compared to a corresponding non-transformed wild type non-human organism or a part thereof; and
[97402] (b) growing the non-human organism or a part thereof under conditions which permit the production of glycerol (lipid fraction) or a composition comprising glycerol (lipid fraction) in said non-human organism or in the culture medium surrounding said non-human organism.

[97403] A further embodiment of the present invention relates to a process for the production of glycerol phosphate (lipid fraction), which comprises
[97404] (a) increasing or generating the activity of a b2032-protein non-targeted in a non-human organism or a part thereof, preferably a microorganism, a plant cell, a plant or a part thereof, as compared to a corresponding non-transformed wild type non-human organism or a part thereof; and
[97405] (b) growing the non-human organism or a part thereof under conditions which permit the production of glycerol phosphate (lipid fraction) or a composition comprising glycerol phosphate (lipid fraction) in said non-human organism or in the culture medium surrounding said non-human organism.

[97406] A further embodiment of the present invention relates to a process for the production of glycerol (lipid fraction), which comprises
[97407] (a) increasing or generating the activity of a b2099-protein non-targeted in a non-human organism or a part thereof, preferably a microorganism, a plant cell, a plant or a part thereof, as compared to a corresponding non-transformed wild type non-human organism or a part thereof; and
[97408] (b) growing the non-human organism or a part thereof under conditions which permit the production of glycerol (lipid fraction) or a composition comprising glycerol (lipid fraction) in said non-human organism or in the culture medium surrounding said non-human organism.

[97409] A further embodiment of the present invention relates to a process for the production of bis-glyceryl phosphate (polar fraction), which comprises
[97410] (a) increasing or generating the activity of a b2139-protein non-targeted in a non-human organism or a part thereof, preferably a microorganism, a plant cell, a plant or a part thereof, as compared to a corresponding non-transformed wild type non-human organism or a part thereof; and
[97411] (b) growing the non-human organism or a part thereof under conditions which permit the production of bis-glyceryl phosphate (polar fraction) or a composition comprising bis-glyceryl phosphate (polar fraction) in said non-human organism or in the culture medium surrounding said non-human organism.

[97412] A further embodiment of the present invention relates to a process for the production of glycerol (lipid fraction), which comprises
[97413] (a) increasing or generating the activity of a ABC transporter permease protein non-targeted in a non-human organism or a part thereof, preferably a microorganism, a plant cell, a plant or a part thereof, as compared to a corresponding non-transformed wild type non-human organism or a part thereof; and
[97414] (b) growing the non-human organism or a part thereof under conditions which permit the production of glycerol (lipid fraction) or a composition comprising glycerol (lipid fraction) in said non-human organism or in the culture medium surrounding said non-human organism.

[97415] A further embodiment of the present invention relates to a process for the production of glycerol phosphate (lipid fraction), which comprises
[97416] (a) increasing or generating the activity of a ion-transport protein non-targeted in a non-human organism or a part thereof, preferably a microorganism, a plant cell, a plant or a part thereof, as compared to a corresponding non-transformed wild type non-human organism or a part thereof; and
[97417] (b) growing the non-human organism or a part thereof under conditions which permit the production of glycerol phosphate (lipid fraction) or a composition comprising glycerol phosphate (lipid fraction) in said non-human organism or in the culture medium surrounding said non-human organism.

[97418] A further embodiment of the present invention relates to a process for the production of bis-glyceryl phosphate (polar fraction), which comprises
[97419] (a) increasing or generating the activity of a b2399-protein non-targeted in a non-human organism or a part thereof, preferably a microorganism, a plant cell, a plant or a part thereof, as compared to a corresponding non-transformed wild type non-human organism or a part thereof; and
[97420] (b) growing the non-human organism or a part thereof under conditions which permit the production of bis-glyceryl phosphate (polar fraction) or a composition comprising bis-glyceryl phosphate (polar fraction) in said non-human organism or in the culture medium surrounding said non-human organism.

[97421] A further embodiment of the present invention relates to a process for the production of glycerol (lipid fraction), which comprises
[97422] (a) increasing or generating the activity of a b2399-protein non-targeted in a non-human organism or a part thereof, preferably a microorganism, a plant cell, a plant or a part thereof, as compared to a corresponding non-transformed wild type non-human organism or a part thereof; and
[97423] (b) growing the non-human organism or a part thereof under conditions which permit the production of glycerol (lipid fraction) or a composition comprising glycerol (lipid fraction) in said non-human organism or in the culture medium surrounding said non-human organism.

[97424] A further embodiment of the present invention relates to a process for the production of glycerol (lipid fraction), which comprises
[97425] (a) increasing or generating the activity of a ethanolamine utilization protein non-targeted in a non-human organism or a part thereof, preferably a microorganism, a plant cell, a plant or a part thereof, as compared to a corresponding non-transformed wild type non-human organism or a part thereof; and
[97426] (b) growing the non-human organism or a part thereof under conditions which permit the production of glycerol (lipid fraction) or a composition comprising glycerol (lipid fraction) in said non-human organism or in the culture medium surrounding said non-human organism.

[97427] A further embodiment of the present invention relates to a process for the production of glycerol phosphate (lipid fraction), which comprises
[97428] (a) increasing or generating the activity of a ethanolamine utilization protein non-targeted in a non-human organism or a part thereof, preferably a microorganism, a plant cell, a plant or a part thereof, as compared to a corresponding non-transformed wild type non-human organism or a part thereof; and
[97429] (b) growing the non-human organism or a part thereof under conditions which permit the production of glycerol phosphate (lipid fraction) or a composition comprising glycerol phosphate (lipid fraction) in said non-human organism or in the culture medium surrounding said non-human organism.

[97430] A further embodiment of the present invention relates to a process for the production of glycerol (lipid fraction), which comprises
[97431] (a) increasing or generating the activity of a ethanolamine utilization protein non-targeted in a non-human organism or a part thereof, preferably a microorganism, a plant cell, a plant or a part thereof, as compared to a corresponding non-transformed wild type non-human organism or a part thereof; and
[97432] (b) growing the non-human organism or a part thereof under conditions which permit the production of glycerol (lipid fraction) or a composition comprising glycerol (lipid fraction) in said non-human organism or in the culture medium surrounding said non-human organism.

[97433] A further embodiment of the present invention relates to a process for the production of bis-glyceryl phosphate (polar fraction), which comprises
[97434] (a) increasing or generating the activity of a b2474-protein non-targeted in a non-human organism or a part thereof, preferably a microorganism, a plant cell, a plant or a part thereof, as compared to a corresponding non-transformed wild type non-human organism or a part thereof; and
[97435] (b) growing the non-human organism or a part thereof under conditions which permit the production of bis-glyceryl phosphate (polar fraction) or a composition comprising bis-glyceryl phosphate (polar fraction) in said non-human organism or in the culture medium surrounding said non-human organism.

[97436] A further embodiment of the present invention relates to a process for the production of glycerol (lipid fraction), which comprises
[97437] (a) increasing or generating the activity of a b2474-protein non-targeted in a non-human organism or a part thereof, preferably a microorganism, a plant cell, a plant or a part thereof, as compared to a corresponding non-transformed wild type non-human organism or a part thereof; and
[97438] (b) growing the non-human organism or a part thereof under conditions which permit the production of glycerol (lipid fraction) or a composition comprising glycerol (lipid fraction) in said non-human organism or in the culture medium surrounding said non-human organism.

[97439] A further embodiment of the present invention relates to a process for the production of glycerol (lipid fraction), which comprises
[97440] (a) increasing or generating the activity of a putative transport system permease protein non-targeted in a non-human organism or a part thereof, preferably a microorganism, a plant cell, a plant or a part thereof, as compared to a corresponding non-transformed wild type non-human organism or a part thereof; and
[97441] (b) growing the non-human organism or a part thereof under conditions which permit the production of glycerol (lipid fraction) or a composition comprising glycerol (lipid fraction) in said non-human organism or in the culture medium surrounding said non-human organism.

[97442] A further embodiment of the present invention relates to a process for the production of glycerol phosphate (lipid fraction), which comprises
[97443] (a) increasing or generating the activity of a putative transport system permease protein non-targeted in a non-human organism or a part thereof, preferably a microorganism, a plant cell, a plant or a part thereof, as compared to a corresponding non-transformed wild type non-human organism or a part thereof; and
[97444] (b) growing the non-human organism or a part thereof under conditions which permit the production of glycerol phosphate (lipid fraction) or a composition comprising glycerol phosphate (lipid fraction) in said non-human organism or in the culture medium surrounding said non-human organism.

[97445] A further embodiment of the present invention relates to a process for the production of bis-glyceryl phosphate (polar fraction), which comprises
[97446] (a) increasing or generating the activity of a b2613-protein non-targeted in a non-human organism or a part thereof, preferably a microorganism, a plant cell, a plant or a part thereof, as compared to a corresponding non-transformed wild type non-human organism or a part thereof; and
[97447] (b) growing the non-human organism or a part thereof under conditions which permit the production of bis-glyceryl phosphate (polar fraction) or a composition comprising bis-glyceryl phosphate (polar fraction) in said non-human organism or in the culture medium surrounding said non-human organism.

[97448] A further embodiment of the present invention relates to a process for the production of glycerol (polar fraction), which comprises
[97449] (a) increasing or generating the activity of a transcriptional regulator non-targeted in a non-human organism or a part thereof, preferably a microorganism, a plant cell, a plant or a part thereof, as compared to a corresponding non-transformed wild type non-human organism or a part thereof; and
[97450] (b) growing the non-human organism or a part thereof under conditions which permit the production of glycerol (polar fraction) or a composition comprising glycerol (polar fraction) in said non-human organism or in the culture medium surrounding said non-human organism.

[97451] A further embodiment of the present invention relates to a process for the production of glycerol (lipid fraction), which comprises
[97452] (a) increasing or generating the activity of a b2673-protein non-targeted in a non-human organism or a part thereof, preferably a microorganism, a plant cell, a plant or a part thereof, as compared to a corresponding non-transformed wild type non-human organism or a part thereof; and
[97453] (b) growing the non-human organism or a part thereof under conditions which permit the production of glycerol (lipid fraction) or a composition comprising glycerol (lipid fraction) in said non-human organism or in the culture medium surrounding said non-human organism.

[97454] A further embodiment of the present invention relates to a process for the production of glycerol phosphate (lipid fraction), which comprises
[97455] (a) increasing or generating the activity of a b2673-protein non-targeted in a non-human organism or a part thereof, preferably a microorganism, a plant cell, a plant or a part thereof, as compared to a corresponding non-transformed wild type non-human organism or a part thereof; and
[97456] (b) growing the non-human organism or a part thereof under conditions which permit the production of glycerol phosphate (lipid fraction) or a composition comprising glycerol phosphate (lipid fraction) in said non-human organism or in the culture medium surrounding said non-human organism.

[97457] A further embodiment of the present invention relates to a process for the production of bis-glyceryl phosphate (polar fraction), which comprises
[97458] (a) increasing or generating the activity of a murein transglycosylase non-targeted in a non-human organism or a part thereof, preferably a microorganism, a plant cell, a plant or a part thereof, as compared to a corresponding non-transformed wild type non-human organism or a part thereof; and
[97459] (b) growing the non-human organism or a part thereof under conditions which permit the production of bis-glyceryl phosphate (polar fraction) or a composition comprising bis-glyceryl phosphate (polar fraction) in said non-human organism or in the culture medium surrounding said non-human organism.

[97460] A further embodiment of the present invention relates to a process for the production of triacylglycerol, which comprises
[97461] (a) increasing or generating the activity of a transcriptional regulator non-targeted in a non-human organism or a part thereof, preferably a microorganism, a plant cell, a plant or a part thereof, as compared to a corresponding non-transformed wild type non-human organism or a part thereof; and
[97462] (b) growing the non-human organism or a part thereof under conditions which permit the production of triacylglycerol or a composition comprising triacylglycerol in said non-human organism or in the culture medium surrounding said non-human organism.

[97463] A further embodiment of the present invention relates to a process for the production of glycerol (lipid fraction), which comprises
[97464] (a) increasing or generating the activity of a 2-C-methyl-D-erythritol 4-phosphate cytidylyltransferase non-targeted in a non-human organism or a part thereof, preferably a microorganism, a plant cell, a plant or a part thereof, as compared to a corresponding non-transformed wild type non-human organism or a part thereof; and
[97465] (b) growing the non-human organism or a part thereof under conditions which permit the production of glycerol (lipid fraction) or a composition comprising glycerol (lipid fraction) in said non-human organism or in the culture medium surrounding said non-human organism.

[97466] A further embodiment of the present invention relates to a process for the production of triacylglycerol, which comprises
[97467] (a) increasing or generating the activity of a amino-acid acetyltransferase non-targeted in a non-human organism or a part thereof, preferably a microorganism, a plant cell, a plant or a part thereof, as compared to a corresponding non-transformed wild type non-human organism or a part thereof; and
[97468] (b) growing the non-human organism or a part thereof under conditions which permit the production of triacylglycerol or a composition comprising triacylglycerol in said non-human organism or in the culture medium surrounding said non-human organism.

[97469] A further embodiment of the present invention relates to a process for the production of bis-glyceryl phosphate (polar fraction), which comprises
[97470] (a) increasing or generating the activity of a b3083-protein non-targeted in a non-human organism or a part thereof, preferably a microorganism, a plant cell, a plant or a part thereof, as compared to a corresponding non-transformed wild type non-human organism or a part thereof; and
[97471] (b) growing the non-human organism or a part thereof under conditions which permit the production of bis-glyceryl phosphate (polar fraction) or a composition comprising bis-glyceryl phosphate (polar fraction) in said non-human organism or in the culture medium surrounding said non-human organism.

[97472] A further embodiment of the present invention relates to a process for the production of bis-glyceryl phosphate (polar fraction), which comprises
[97473] (a) increasing or generating the activity of a threonine/serine transporter non-targeted in a non-human organism or a part thereof, preferably a microorganism, a plant cell, a plant or a part thereof, as compared to a corresponding non-transformed wild type non-human organism or a part thereof; and
[97474] (b) growing the non-human organism or a part thereof under conditions which permit the production of bis-glyceryl phosphate (polar fraction) or a composition comprising bis-glyceryl phosphate (polar fraction) in said non-human organism or in the culture medium surrounding said non-human organism.

[97475] A further embodiment of the present invention relates to a process for the production of bis-glyceryl phosphate (polar fraction), which comprises
[97476] (a) increasing or generating the activity of a b3160-protein non-targeted in a non-human organism or a part thereof, preferably a microorganism, a plant cell, a plant or a part thereof, as compared to a corresponding non-transformed wild type non-human organism or a part thereof; and
[97477] (b) growing the non-human organism or a part thereof under conditions which permit the production of bis-glyceryl phosphate (polar fraction) or a composition comprising bis-glyceryl phosphate (polar fraction) in said non-human organism or in the culture medium surrounding said non-human organism.

[97478] A further embodiment of the present invention relates to a process for the production of bis-glyceryl phosphate (polar fraction), which comprises
[97479] (a) increasing or generating the activity of a argininosuccinate synthetase non-targeted in a non-human organism or a part thereof, preferably a microorganism, a plant cell, a plant or a part thereof, as compared to a corresponding non-transformed wild type non-human organism or a part thereof; and
[97480] (b) growing the non-human organism or a part thereof under conditions which permit the production of bis-glyceryl phosphate (polar fraction) or a composition comprising bis-glyceryl phosphate (polar fraction) in said non-human organism or in the culture medium surrounding said non-human organism.

[97481] A further embodiment of the present invention relates to a process for the production of glycerol-3-phosphate (polar fraction), which comprises
[97482] (a) increasing or generating the activity of a acetyl CoA carboxylase non-targeted in a non-human organism or a part thereof, preferably a microorganism, a plant cell, a plant or a part thereof, as compared to a corresponding non-transformed wild type non-human organism or a part thereof; and
[97483] (b) growing the non-human organism or a part thereof under conditions which permit the production of glycerol-3-phosphate (polar fraction) or a composition comprising glycerol-3-phosphate (polar fraction) in said non-human organism or in the culture medium surrounding said non-human organism.

[97484] A further embodiment of the present invention relates to a process for the production of bis-glyceryl phosphate (polar fraction), which comprises
[97485] (a) increasing or generating the activity of a methyltransferase non-targeted in a non-human organism or a part thereof, preferably a microorganism, a plant cell, a plant or a part thereof, as compared to a corresponding non-transformed wild type non-human organism or a part thereof; and
[97486] (b) growing the non-human organism or a part thereof under conditions which permit the production of bis-glyceryl phosphate (polar fraction) or a composition comprising bis-glyceryl phosphate (polar fraction) in said non-human organism or in the culture medium surrounding said non-human organism.

[97487] A further embodiment of the present invention relates to a process for the production of glycerol (lipid fraction), which comprises
[97488] (a) increasing or generating the activity of a methyltransferase non-targeted in a non-human organism or a part thereof, preferably a microorganism, a plant cell, a plant or a part thereof, as compared to a corresponding non-transformed wild type non-human organism or a part thereof; and
[97489] (b) growing the non-human organism or a part thereof under conditions which permit the production of glycerol (lipid fraction) or a composition comprising glycerol (lipid fraction) in said non-human organism or in the culture medium surrounding said non-human organism.

[97490] A further embodiment of the present invention relates to a process for the production of bis-glyceryl phosphate (polar fraction), which comprises
[97491] (a) increasing or generating the activity of a FKBP-type peptidyl-prolyl cis-trans isomerase (rotamase) non-targeted in a non-human organism or a part thereof, preferably a microorganism, a plant cell, a plant or a part thereof, as compared to a corresponding non-transformed wild type non-human organism or a part thereof; and
[97492] (b) growing the non-human organism or a part thereof under conditions which permit the production of bis-glyceryl phosphate (polar fraction) or a composition comprising bis-glyceryl phosphate (polar fraction) in said non-human organism or in the culture medium surrounding said non-human organism.

[97493] A further embodiment of the present invention relates to a process for the production of bis-glyceryl phosphate (polar fraction), which comprises
[97494] (a) increasing or generating the activity of a high-affinity branched-chain amino acid transport protein non-targeted in a non-human organism or a part thereof, preferably a microorganism, a plant cell, a plant or a part thereof, as compared to a corresponding non-transformed wild type non-human organism or a part thereof; and
[97495] (b) growing the non-human organism or a part thereof under conditions which permit the production of bis-glyceryl phosphate (polar fraction) or a composition comprising bis-glyceryl phosphate (polar fraction) in said non-human organism or in the culture medium surrounding said non-human organism.

[97496] A further embodiment of the present invention relates to a process for the production of bis-glyceryl phosphate (polar fraction), which comprises
[97497] (a) increasing or generating the activity of a b3777-protein non-targeted in a non-human organism or a part thereof, preferably a microorganism, a plant cell, a plant or a part thereof, as compared to a corresponding non-transformed wild type non-human organism or a part thereof; and
[97498] (b) growing the non-human organism or a part thereof under conditions which permit the production of bis-glyceryl phosphate (polar fraction) or a composition comprising bis-glyceryl phosphate (polar fraction) in said non-human organism or in the culture medium surrounding said non-human organism.

[97499] A further embodiment of the present invention relates to a process for the production of bis-glyceryl phosphate (polar fraction), which comprises
[97500] (a) increasing or generating the activity of a b3791-protein non-targeted in a non-human organism or a part thereof, preferably a microorganism, a plant cell, a plant or a part thereof, as compared to a corresponding non-transformed wild type non-human organism or a part thereof; and
[97501] (b) growing the non-human organism or a part thereof under conditions which permit the production of bis-glyceryl phosphate (polar fraction) or a composition comprising bis-glyceryl phosphate (polar fraction) in said non-human organism or in the culture medium surrounding said non-human organism.

[97502] A further embodiment of the present invention relates to a process for the production of bis-glyceryl phosphate (polar fraction), which comprises
[97503] (a) increasing or generating the activity of a enterobacterial common antigen polymerase non-targeted in a non-human organism or a part thereof, preferably a microorganism, a plant cell, a plant or a part thereof, as compared to a corresponding non-transformed wild type non-human organism or a part thereof; and
[97504] (b) growing the non-human organism or a part thereof under conditions which permit the production of bis-glyceryl phosphate (polar fraction) or a composition comprising bis-glyceryl phosphate (polar fraction) in said non-human organism or in the culture medium surrounding said non-human organism.

[97505] A further embodiment of the present invention relates to a process for the production of triacylglycerol, which comprises
[97506] (a) increasing or generating the activity of a b3989-protein non-targeted in a non-human organism or a part thereof, preferably a microorganism, a plant cell, a plant or a part thereof, as compared to a corresponding non-transformed wild type non-human organism or a part thereof; and
[97507] (b) growing the non-human organism or a part thereof under conditions which permit the production of triacylglycerol or a composition comprising triacylglycerol in said non-human organism or in the culture medium surrounding said non-human organism.

[97508] A further embodiment of the present invention relates to a process for the production of bis-glyceryl phosphate (polar fraction), which comprises
[97509] (a) increasing or generating the activity of a b4029-protein non-targeted in a non-human organism or a part thereof, preferably a microorganism, a plant cell, a plant or a part thereof, as compared to a corresponding non-transformed wild type non-human organism or a part thereof; and
[97510] (b) growing the non-human organism or a part thereof under conditions which permit the production of bis-glyceryl phosphate (polar fraction) or a composition comprising bis-glyceryl phosphate (polar fraction) in said non-human organism or in the culture medium surrounding said non-human organism.

[97511] A further embodiment of the present invention relates to a process for the production of triacylglycerol, which comprises
[97512] (a) increasing or generating the activity of a b4050-protein non-targeted in a non-human organism or a part thereof, preferably a microorganism, a plant cell, a plant or a part thereof, as compared to a corresponding non-transformed wild type non-human organism or a part thereof; and
[97513] (b) growing the non-human organism or a part thereof under conditions which permit the production of triacylglycerol or a composition comprising triacylglycerol in said non-human organism or in the culture medium surrounding said non-human organism.

[97514] A further embodiment of the present invention relates to a process for the production of bis-glyceryl phosphate (polar fraction), which comprises
[97515] (a) increasing or generating the activity of a lysyl-tRNA synthetase non-targeted in a non-human organism or a part thereof, preferably a microorganism, a plant cell, a plant or a part thereof, as compared to a corresponding non-transformed wild type non-human organism or a part thereof; and
[97516] (b) growing the non-human organism or a part thereof under conditions which permit the production of bis-glyceryl phosphate (polar fraction) or a composition comprising bis-glyceryl phosphate (polar fraction) in said non-human organism or in the culture medium surrounding said non-human organism.

[97517] A further embodiment of the present invention relates to a process for the production of glycerol-3-phosphate (polar fraction), which comprises
[97518] (a) increasing or generating the activity of a purine-nucleoside phosphorylase non-targeted in a non-human organism or a part thereof, preferably a microorganism, a plant cell, a plant or a part thereof, as compared to a corresponding non-transformed wild type non-human organism or a part thereof; and
[97519] (b) growing the non-human organism or a part thereof under conditions which permit the production of glycerol-3-phosphate (polar fraction) or a composition comprising glycerol-3-phosphate (polar fraction) in said non-human organism or in the culture medium surrounding said non-human organism.

[97520] A further embodiment of the present invention relates to a process for the production of bis-glyceryl phosphate (polar fraction), which comprises
[97521] (a) increasing or generating the activity of a glutaredoxin non-targeted in a non-human organism or a part thereof, preferably a microorganism, a plant cell, a plant or a part thereof, as compared to a corresponding non-transformed wild type non-human organism or a part thereof; and
[97522] (b) growing the non-human organism or a part thereof under conditions which permit the production of bis-glyceryl phosphate (polar fraction) or a composition comprising bis-glyceryl phosphate (polar fraction) in said non-human organism or in the culture medium surrounding said non-human organism.

[97523] A further embodiment of the present invention relates to a process for the production of glycerol phosphate (lipid fraction), which comprises
[97524] (a) increasing or generating the activity of a glutaredoxin non-targeted in a non-human organism or a part thereof, preferably a microorganism, a plant cell, a plant or a part thereof, as compared to a corresponding non-transformed wild type non-human organism or a part thereof; and
[97525] (b) growing the non-human organism or a part thereof under conditions which permit the production of glycerol phosphate (lipid fraction) or a composition comprising glycerol phosphate (lipid fraction) in said non-human organism or in the culture medium surrounding said non-human organism.

[97526] A further embodiment of the present invention relates to a process for the production of bis-glyceryl phosphate (polar fraction), which comprises
[97527] (a) increasing or generating the activity of a GM02LC17485-protein non-targeted in a non-human organism or a part thereof, preferably a microorganism, a plant cell, a plant or a part thereof, as compared to a corresponding non-transformed wild type non-human organism or a part thereof; and
[97528] (b) growing the non-human organism or a part thereof under conditions which permit the production of bis-glyceryl phosphate (polar fraction) or a composition comprising bis-glyceryl phosphate (polar fraction) in said non-human organism or in the culture medium surrounding said non-human organism.

[97529] A further embodiment of the present invention relates to a process for the production of glycerol (lipid fraction), which comprises
[97530] (a) increasing or generating the activity of a transcription factor non-targeted in a non-human organism or a part thereof, preferably a microorganism, a plant cell, a plant or a part thereof, as compared to a corresponding non-transformed wild type non-human organism or a part thereof; and
[97531] (b) growing the non-human organism or a part thereof under conditions which permit the production of glycerol (lipid fraction) or a composition comprising glycerol (lipid fraction) in said non-human organism or in the culture medium surrounding said non-human organism.

[97532] A further embodiment of the present invention relates to a process for the production of glycerol phosphate (lipid fraction), which comprises
[97533] (a) increasing or generating the activity of a transcription factor non-targeted in a non-human organism or a part thereof, preferably a microorganism, a plant cell, a plant or a part thereof, as compared to a corresponding non-transformed wild type non-human organism or a part thereof; and
[97534] (b) growing the non-human organism or a part thereof under conditions which permit the production of glycerol phosphate (lipid fraction) or a composition comprising glycerol phosphate (lipid fraction) in said non-human organism or in the culture medium surrounding said non-human organism.

[97535] A further embodiment of the present invention relates to a process for the production of glycerol (polar fraction), which comprises
[97536] (a) increasing or generating the activity of a transcription factor non-targeted in a non-human organism or a part thereof, preferably a microorganism, a plant cell, a plant or a part thereof, as compared to a corresponding non-transformed wild type non-human organism or a part thereof; and
[97537] (b) growing the non-human organism or a part thereof under conditions which permit the production of glycerol (polar fraction) or a composition comprising glycerol (polar fraction) in said non-human organism or in the culture medium surrounding said non-human organism.

[97538] A further embodiment of the present invention relates to a process for the production of glycerol phosphate (lipid fraction), which comprises
[97539] (a) increasing or generating the activity of a cyclin D non-targeted in a non-human organism or a part thereof, preferably a microorganism, a plant cell, a plant or a part thereof, as compared to a corresponding non-transformed wild type non-human organism or a part thereof; and
[97540] (b) growing the non-human organism or a part thereof under conditions which permit the production of glycerol phosphate (lipid fraction) or a composition comprising glycerol phosphate (lipid fraction) in said non-human organism or in the culture medium surrounding said non-human organism.

[97541] A further embodiment of the present invention relates to a process for the production of bis-glyceryl phosphate (polar fraction), which comprises
[97542] (a) increasing or generating the activity of a nitrate/nitrite transport protein non-targeted in a non-human organism or a part thereof, preferably a microorganism, a plant cell, a plant or a part thereof, as compared to a corresponding non-transformed wild type non-human organism or a part thereof; and
[97543] (b) growing the non-human organism or a part thereof under conditions which permit the production of bis-glyceryl phosphate (polar fraction) or a composition comprising bis-glyceryl phosphate (polar fraction) in said non-human organism or in the culture medium surrounding said non-human organism.

[97544] A further embodiment of the present invention relates to a process for the production of glycerol phosphate (lipid fraction), which comprises
[97545] (a) increasing or generating the activity of a carbamoyl-phosphate synthase subunit non-targeted in a non-human organism or a part thereof, preferably a microorganism, a plant cell, a plant or a part thereof, as compared to a corresponding non-transformed wild type non-human organism or a part thereof; and
[97546] (b) growing the non-human organism or a part thereof under conditions which permit the production of glycerol phosphate (lipid fraction) or a composition comprising glycerol phosphate (lipid fraction) in said non-human organism or in the culture medium surrounding said non-human organism.

[97547] A further embodiment of the present invention relates to a process for the production of glycerol (lipid fraction), which comprises
[97548] (a) increasing or generating the activity of a CDP-diacylglycerol-glycerol-3-phosphate 3-phosphatidyltransferase non-targeted in a non-human organism or a part thereof, preferably a microorganism, a plant cell, a plant or a part thereof, as compared to a corresponding non-transformed wild type non-human organism or a part thereof; and
[97549] (b) growing the non-human organism or a part thereof under conditions which permit the production of glycerol (lipid fraction) or a composition comprising glycerol (lipid fraction) in said non-human organism or in the culture medium surrounding said non-human organism.

[97550] A further embodiment of the present invention relates to a process for the production of bis-glyceryl phosphate (polar fraction), which comprises
[97551] (a) increasing or generating the activity of a adenylate kinase non-targeted in a non-human organism or a part thereof, preferably a microorganism, a plant cell, a plant or a part thereof, as compared to a corresponding non-transformed wild type non-human organism or a part thereof; and
[97552] (b) growing the non-human organism or a part thereof under conditions which permit the production of bis-glyceryl phosphate (polar fraction) or a composition comprising bis-glyceryl phosphate (polar fraction) in said non-human organism or in the culture medium surrounding said non-human organism.

[97553] A further embodiment of the present invention relates to a process for the production of glycerol (lipid fraction), which comprises
[97554] (a) increasing or generating the activity of a acyl transferase non-targeted in a non-human organism or a part thereof, preferably a microorganism, a plant cell, a plant or a part thereof, as compared to a corresponding non-transformed wild type non-human organism or a part thereof; and
[97555] (b) growing the non-human organism or a part thereof under conditions which permit the production of glycerol (lipid fraction) or a composition comprising glycerol (lipid fraction) in said non-human organism or in the culture medium surrounding said non-human organism.

[97556] A further embodiment of the present invention relates to a process for the production of glycerol phosphate (lipid fraction), which comprises
[97557] (a) increasing or generating the activity of a coproporphyrinogen III oxidase non-targeted in a non-human organism or a part thereof, preferably a microorganism, a plant cell, a plant or a part thereof, as compared to a corresponding non-transformed wild type non-human organism or a part thereof; and
[97558] (b) growing the non-human organism or a part thereof under conditions which permit the production of glycerol phosphate (lipid fraction) or a composition comprising glycerol phosphate (lipid fraction) in said non-human organism or in the culture medium surrounding said non-human organism.

[97559] A further embodiment of the present invention relates to a process for the production of glycerol (lipid fraction), which comprises
[97560] (a) increasing or generating the activity of a oxidoreductase non-targeted in a non-human organism or a part thereof, preferably a microorganism, a plant cell, a plant or a part thereof, as compared to a corresponding non-transformed wild type non-human organism or a part thereof; and
[97561] (b) growing the non-human organism or a part thereof under conditions which permit the production of glycerol (lipid fraction) or a composition comprising glycerol (lipid fraction) in said non-human organism or in the culture medium surrounding said non-human organism.

[97562] A further embodiment of the present invention relates to a process for the production of glycerol phosphate (lipid fraction), which comprises
[97563] (a) increasing or generating the activity of a oxidoreductase non-targeted in a non-human organism or a part thereof, preferably a microorganism, a plant cell, a plant or a part thereof, as compared to a corresponding non-transformed wild type non-human organism or a part thereof; and
[97564] (b) growing the non-human organism or a part thereof under conditions which permit the production of glycerol phosphate (lipid fraction) or a composition comprising glycerol phosphate (lipid fraction) in said non-human organism or in the culture medium surrounding said non-human organism.

[97565] A further embodiment of the present invention relates to a process for the production of glycerol (polar fraction), which comprises
[97566] (a) increasing or generating the activity of a Mg-protoporphyrin IX monomethyl ester oxidative cyclase 66 kD subunit non-targeted in a non-human organism or a part thereof, preferably a microorganism, a plant cell, a plant or a part thereof, as compared to a corresponding non-transformed wild type non-human organism or a part thereof; and
[97567] (b) growing the non-human organism or a part thereof under conditions which permit the production of glycerol (polar fraction) or a composition comprising glycerol (polar fraction) in said non-human organism or in the culture medium surrounding said non-human organism.

[97568] A further embodiment of the present invention relates to a process for the production of bis-glyceryl phosphate (polar fraction), which comprises
[97569] (a) increasing or generating the activity of a dihydrolipoamide dehydrogenase non-targeted in a non-human organism or a part thereof, preferably a microorganism, a plant cell, a plant or a part thereof, as compared to a corresponding non-transformed wild type non-human organism or a part thereof; and
[97570] (b) growing the non-human organism or a part thereof under conditions which permit the production of bis-glyceryl phosphate (polar fraction) or a composition comprising bis-glyceryl phosphate (polar fraction) in said non-human organism or in the culture medium surrounding said non-human organism.

[97571] A further embodiment of the present invention relates to a process for the production of glycerol phosphate (lipid fraction), which comprises
[97572] (a) increasing or generating the activity of a aromatic acid decarboxylase non-targeted in a non-human organism or a part thereof, preferably a microorganism, a plant cell, a plant or a part thereof, as compared to a corresponding non-transformed wild type non-human organism or a part thereof; and
[97573] (b) growing the non-human organism or a part thereof under conditions which permit the production of glycerol phosphate (lipid fraction) or a composition comprising glycerol phosphate (lipid fraction) in said non-human organism or in the culture medium surrounding said non-human organism.

[97574] A further embodiment of the present invention relates to a process for the production of glycerol phosphate (lipid fraction), which comprises
[97575] (a) increasing or generating the activity of a phosphate import ATP-binding protein non-targeted in a non-human organism or a part thereof, preferably a microorganism, a plant cell, a plant or a part thereof, as compared to a corresponding non-transformed wild type non-human organism or a part thereof; and
[97576] (b) growing the non-human organism or a part thereof under conditions which permit the production of glycerol phosphate (lipid fraction) or a composition comprising glycerol phosphate (lipid fraction) in said non-human organism or in the culture medium surrounding said non-human organism.

[97577] A further embodiment of the present invention relates to a process for the production of glycerol phosphate (lipid fraction), which comprises
[97578] (a) increasing or generating the activity of a arginine decarboxylase non-targeted in a non-human organism or a part thereof, preferably a microorganism, a plant cell, a plant or a part thereof, as compared to a corresponding non-transformed wild type non-human organism or a part thereof; and
[97579] (b) growing the non-human organism or a part thereof under conditions which permit the production of glycerol phosphate (lipid fraction) or a composition comprising glycerol phosphate (lipid fraction) in said non-human organism or in the culture medium surrounding said non-human organism.

[97580] A further embodiment of the present invention relates to a process for the production of glycerol phosphate (lipid fraction), which comprises
[97581] (a) increasing or generating the activity of a carbohydrate kinase non-targeted in a non-human organism or a part thereof, preferably a microorganism, a plant cell, a plant or a part thereof, as compared to a corresponding non-transformed wild type non-human organism or a part thereof; and
[97582] (b) growing the non-human organism or a part thereof under conditions which permit the production of glycerol phosphate (lipid fraction) or a composition comprising glycerol phosphate (lipid fraction) in said non-human organism or in the culture medium surrounding said non-human organism.

[97583] A further embodiment of the present invention relates to a process for the production of bis-glyceryl phosphate (polar fraction), which comprises
[97584] (a) increasing or generating the activity of a precorrin-8X methylmutase non-targeted in a non-human organism or a part thereof, preferably a microorganism, a plant cell, a plant or a part thereof, as compared to a corresponding non-transformed wild type non-human organism or a part thereof; and
[97585] (b) growing the non-human organism or a part thereof under conditions which permit the production of bis-glyceryl phosphate (polar fraction) or a composition comprising bis-glyceryl phosphate (polar fraction) in said non-human organism or in the culture medium surrounding said non-human organism.

[97586] A further embodiment of the present invention relates to a process for the production of bis-glyceryl phosphate (polar fraction), which comprises
[97587] (a) increasing or generating the activity of a NADH dehydrogenase non-targeted in a non-human organism or a part thereof, preferably a microorganism, a plant cell, a plant or a part thereof, as compared to a corresponding non-transformed wild type non-human organism or a part thereof; and
[97588] (b) growing the non-human organism or a part thereof under conditions which permit the production of bis-glyceryl phosphate (polar fraction) or a composition comprising bis-glyceryl phosphate (polar fraction) in said non-human organism or in the culture medium surrounding said non-human organism.

[97589] A further embodiment of the present invention relates to a process for the production of glycerol (lipid fraction), which comprises
[97590] (a) increasing or generating the activity of a glutamate 5-kinase non-targeted in a non-human organism or a part thereof, preferably a microorganism, a plant cell, a plant or a part thereof, as compared to a corresponding non-transformed wild type non-human organism or a part thereof; and
[97591] (b) growing the non-human organism or a part thereof under conditions which permit the production of glycerol (lipid fraction) or a composition comprising glycerol (lipid fraction) in said non-human organism or in the culture medium surrounding said non-human organism.

[97592] A further embodiment of the present invention relates to a process for the production of glycerol (lipid fraction), which comprises
[97593] (a) increasing or generating the activity of a threonine dehydratase non-targeted in a non-human organism or a part thereof, preferably a microorganism, a plant cell, a plant or a part thereof, as compared to a corresponding non-transformed wild type non-human organism or a part thereof; and
[97594] (b) growing the non-human organism or a part thereof under conditions which permit the production of glycerol (lipid fraction) or a composition comprising glycerol (lipid fraction) in said non-human organism or in the culture medium surrounding said non-human organism.

[97595] A further embodiment of the present invention relates to a process for the production of glycerol phosphate (lipid fraction), which comprises
[97596] (a) increasing or generating the activity of a threonine dehydratase non-targeted in a non-human organism or a part thereof, preferably a microorganism, a plant cell, a plant or a part thereof, as compared to a corresponding non-transformed wild type non-human organism or a part thereof; and
[97597] (b) growing the non-human organism or a part thereof under conditions which permit the production of glycerol phosphate (lipid fraction) or a composition comprising glycerol phosphate (lipid fraction) in said non-human organism or in the culture medium surrounding said non-human organism.

[97598] A further embodiment of the present invention relates to a process for the production of bis-glyceryl phosphate (polar fraction), which comprises
[97599] (a) increasing or generating the activity of a photosystem I reaction centre subunit non-targeted in a non-human organism or a part thereof, preferably a microorganism, a plant cell, a plant or a part thereof, as compared to a corresponding non-transformed wild type non-human organism or a part thereof; and
[97600] (b) growing the non-human organism or a part thereof under conditions which permit the production of bis-glyceryl phosphate (polar fraction) or a composition comprising bis-glyceryl phosphate (polar fraction) in said non-human organism or in the culture medium surrounding said non-human organism.

[97601] A further embodiment of the present invention relates to a process for the production of triacylglycerol, which comprises
[97602] (a) increasing or generating the activity of a cell division protein non-targeted in a non-human organism or a part thereof, preferably a microorganism, a plant cell, a plant or a part thereof, as compared to a corresponding non-transformed wild type non-human organism or a part thereof; and
[97603] (b) growing the non-human organism or a part thereof under conditions which permit the production of triacylglycerol or a composition comprising triacylglycerol in said non-human organism or in the culture medium surrounding said non-human organism.

[97604] A further embodiment of the present invention relates to a process for the production of glycerol phosphate (lipid fraction), which comprises
[97605] (a) increasing or generating the activity of a metal-dependent hydrolase non-targeted in a non-human organism or a part thereof, preferably a microorganism, a plant cell, a plant or a part thereof, as compared to a corresponding non-transformed wild type non-human organism or a part thereof; and
[97606] (b) growing the non-human organism or a part thereof under conditions which permit the production of glycerol phosphate (lipid fraction) or a composition comprising glycerol phosphate (lipid fraction) in said non-human organism or in the culture medium surrounding said non-human organism.

[97607] A further embodiment of the present invention relates to a process for the production of glycerol (lipid fraction), which comprises
[97608] (a) increasing or generating the activity of a TTC1386-protein non-targeted in a non-human organism or a part thereof, preferably a microorganism, a plant cell, a plant or a part thereof, as compared to a corresponding non-transformed wild type non-human organism or a part thereof; and
[97609] (b) growing the non-human organism or a part thereof under conditions which permit the production of glycerol (lipid fraction) or a composition comprising glycerol (lipid fraction) in said non-human organism or in the culture medium surrounding said non-human organism.

[97610] A further embodiment of the present invention relates to a process for the production of glycerol-3-phosphate (polar fraction), which comprises
[97611] (a) increasing or generating the activity of a YAL013W-protein non-targeted in a non-human organism or a part thereof, preferably a microorganism, a plant cell, a plant or a part thereof, as compared to a corresponding non-transformed wild type non-human organism or a part thereof; and
[97612] (b) growing the non-human organism or a part thereof under conditions which permit the production of glycerol-3-phosphate (polar fraction) or a composition comprising glycerol-3-phosphate (polar fraction) in said non-human organism or in the culture medium surrounding said non-human organism.

[97613] A further embodiment of the present invention relates to a process for the production of glycerol (lipid fraction), which comprises
[97614] (a) increasing or generating the activity of a transcription factor non-targeted in a non-human organism or a part thereof, preferably a microorganism, a plant cell, a plant or a part thereof, as compared to a corresponding non-transformed wild type non-human organism or a part thereof; and
[97615] (b) growing the non-human organism or a part thereof under conditions which permit the production of glycerol (lipid fraction) or a composition comprising glycerol (lipid fraction) in said non-human organism or in the culture medium surrounding said non-human organism.

[97616] A further embodiment of the present invention relates to a process for the production of glycerol phosphate (lipid fraction), which comprises
[97617] (a) increasing or generating the activity of a acid phosphatase precursor non-targeted in a non-human organism or a part thereof, preferably a microorganism, a plant cell, a plant or a part thereof, as compared to a corresponding non-transformed wild type non-human organism or a part thereof; and
[97618] (b) growing the non-human organism or a part thereof under conditions which permit the production of glycerol phosphate (lipid fraction) or a composition comprising glycerol phosphate (lipid fraction) in said non-human organism or in the culture medium surrounding said non-human organism.

[97619] A further embodiment of the present invention relates to a process for the production of glycerol (lipid fraction), which comprises
[97620] (a) increasing or generating the activity of a cell division control protein non-targeted in a non-human organism or a part thereof, preferably a microorganism, a plant cell, a plant or a part thereof, as compared to a corresponding non-transformed wild type non-human organism or a part thereof; and
[97621] (b) growing the non-human organism or a part thereof under conditions which permit the production of glycerol (lipid fraction) or a composition comprising glycerol (lipid fraction) in said non-human organism or in the culture medium surrounding said non-human organism.

[97622] A further embodiment of the present invention relates to a process for the production of glycerol (polar fraction), which comprises
[97623] (a) increasing or generating the activity of a cell division control protein non-targeted in a non-human organism or a part thereof, preferably a microorganism, a plant cell, a plant or a part thereof, as compared to a corresponding non-transformed wild type non-human organism or a part thereof; and
[97624] (b) growing the non-human organism or a part thereof under conditions which permit the production of glycerol (polar fraction) or a composition comprising glycerol (polar fraction) in said non-human organism or in the culture medium surrounding said non-human organism.

[97625] A further embodiment of the present invention relates to a process for the production of bis-glyceryl phosphate (polar fraction), which comprises
[97626] (a) increasing or generating the activity of a ycr102c-protein non-targeted in a non-human organism or a part thereof, preferably a microorganism, a plant cell, a plant or a part thereof, as compared to a corresponding non-transformed wild type non-human organism or a part thereof; and
[97627] (b) growing the non-human organism or a part thereof under conditions which permit the production of bis-glyceryl phosphate (polar fraction) or a composition comprising bis-glyceryl phosphate (polar fraction) in said non-human organism or in the culture medium surrounding said non-human organism.

[97628] A further embodiment of the present invention relates to a process for the production of bis-glyceryl phosphate (polar fraction), which comprises
[97629] (a) increasing or generating the activity of a ydr273w-protein non-targeted in a non-human organism or a part thereof, preferably a microorganism, a plant cell, a plant or a part thereof, as compared to a corresponding non-transformed wild type non-human organism or a part thereof; and
[97630] (b) growing the non-human organism or a part thereof under conditions which permit the production of bis-glyceryl phosphate (polar fraction) or a composition comprising bis-glyceryl phosphate (polar fraction) in said non-human organism or in the culture medium surrounding said non-human organism.

[97631] A further embodiment of the present invention relates to a process for the production of glycerol phosphate (lipid fraction), which comprises
[97632] (a) increasing or generating the activity of a molecular chaperone portein non-targeted in a non-human organism or a part thereof, preferably a microorganism, a plant cell, a plant or a part thereof, as compared to a corresponding non-transformed wild type non-human organism or a part thereof; and
[97633] (b) growing the non-human organism or a part thereof under conditions which permit the production of glycerol phosphate (lipid fraction) or a composition comprising glycerol phosphate (lipid fraction) in said non-human organism or in the culture medium surrounding said non-human organism.

[97634] A further embodiment of the present invention relates to a process for the production of triacylglycerol, which comprises
[97635] (a) increasing or generating the activity of a YFL019C-protein non-targeted in a non-human organism or a part thereof, preferably a microorganism, a plant cell, a plant or a part thereof, as compared to a corresponding non-transformed wild type non-human organism or a part thereof; and
[97636] (b) growing the non-human organism or a part thereof under conditions which permit the production of triacylglycerol or a composition comprising triacylglycerol in said non-human organism or in the culture medium surrounding said non-human organism.

[97637] A further embodiment of the present invention relates to a process for the production of bis-glyceryl phosphate (polar fraction), which comprises
[97638] (a) increasing or generating the activity of a alcohol dehydrogenase non-targeted in a non-human organism or a part thereof, preferably a microorganism, a plant cell, a plant or a part thereof, as compared to a corresponding non-transformed wild type non-human organism or a part thereof; and
[97639] (b) growing the non-human organism or a part thereof under conditions which permit the production of bis-glyceryl phosphate (polar fraction) or a composition comprising bis-glyceryl phosphate (polar fraction) in said non-human organism or in the culture medium surrounding said non-human organism.

[97640] A further embodiment of the present invention relates to a process for the production of glycerol (lipid fraction), which comprises
[97641] (a) increasing or generating the activity of a biotin synthase non-targeted in a non-human organism or a part thereof, preferably a microorganism, a plant cell, a plant or a part thereof, as compared to a corresponding non-transformed wild type non-human organism or a part thereof; and
[97642] (b) growing the non-human organism or a part thereof under conditions which permit the production of glycerol (lipid fraction) or a composition comprising glycerol (lipid fraction) in said non-human organism or in the culture medium surrounding said non-human organism.

[97643] A further embodiment of the present invention relates to a process for the production of triacylglycerol, which comprises
[97644] (a) increasing or generating the activity of a mitochondrial processing protease non-targeted in a non-human organism or a part thereof, preferably a microorganism, a plant cell, a plant or a part thereof, as compared to a corresponding non-transformed wild type non-human organism or a part thereof; and
[97645] (b) growing the non-human organism or a part thereof under conditions which permit the production of triacylglycerol or a composition comprising triacylglycerol in said non-human organism or in the culture medium surrounding said non-human organism.

[97646] A further embodiment of the present invention relates to a process for the production of bis-glyceryl phosphate (polar fraction), which comprises
[97647] (a) increasing or generating the activity of a YHR202W-protein non-targeted in a non-human organism or a part thereof, preferably a microorganism, a plant cell, a plant or a part thereof, as compared to a corresponding non-transformed wild type non-human organism or a part thereof; and
[97648] (b) growing the non-human organism or a part thereof under conditions which permit the production of bis-glyceryl phosphate (polar fraction) or a composition comprising bis-glyceryl phosphate (polar fraction) in said non-human organism or in the culture medium surrounding said non-human organism.

[97649] A further embodiment of the present invention relates to a process for the production of glycerol (polar fraction), which comprises
[97650] (a) increasing or generating the activity of a (DL)-glycerol-3-phosphatase non-targeted in a non-human organism or a part thereof, preferably a microorganism, a plant cell, a plant or a part thereof, as compared to a corresponding non-transformed wild type non-human organism or a part thereof; and
[97651] (b) growing the non-human organism or a part thereof under conditions which permit the production of glycerol (polar fraction) or a composition comprising glycerol (polar fraction) in said non-human organism or in the culture medium surrounding said non-human organism.

[97652] A further embodiment of the present invention relates to a process for the production of bis-glyceryl phosphate (polar fraction), which comprises
[97653] (a) increasing or generating the activity of a YIL083C-protein non-targeted in a non-human organism or a part thereof, preferably a microorganism, a plant cell, a plant or a part thereof, as compared to a corresponding non-transformed wild type non-human organism or a part thereof; and
[97654] (b) growing the non-human organism or a part thereof under conditions which permit the production of bis-glyceryl phosphate (polar fraction) or a composition comprising bis-glyceryl phosphate (polar fraction) in said non-human organism or in the culture medium surrounding said non-human organism.

[97655] A further embodiment of the present invention relates to a process for the production of glycerol phosphate (lipid fraction), which comprises
[97656] (a) increasing or generating the activity of a YJL062W-A-protein non-targeted in a non-human organism or a part thereof, preferably a microorganism, a plant cell, a plant or a part thereof, as compared to a corresponding non-transformed wild type non-human organism or a part thereof; and
[97657] (b) growing the non-human organism or a part thereof under conditions which permit the production of glycerol phosphate (lipid fraction) or a composition comprising glycerol phosphate (lipid fraction) in said non-human organism or in the culture medium surrounding said non-human organism.

[97658] A further embodiment of the present invention relates to a process for the production of bis-glyceryl phosphate (polar fraction), which comprises
[97659] (a) increasing or generating the activity of a DnaJ-like chaperone non-targeted in a non-human organism or a part thereof, preferably a microorganism, a plant cell, a plant or a part thereof, as compared to a corresponding non-transformed wild type non-human organism or a part thereof; and
[97660] (b) growing the non-human organism or a part thereof under conditions which permit the production of bis-glyceryl phosphate (polar fraction) or a composition comprising bis-glyceryl phosphate (polar fraction) in said non-human organism or in the culture medium surrounding said non-human organism.

[97661] A further embodiment of the present invention relates to a process for the production of bis-glyceryl phosphate (polar fraction), which comprises
[97662] (a) increasing or generating the activity of a polygalacturonase non-targeted in a non-human organism or a part thereof, preferably a microorganism, a plant cell, a plant or a part thereof, as compared to a corresponding non-transformed wild type non-human organism or a part thereof; and
[97663] (b) growing the non-human organism or a part thereof under conditions which permit the production of bis-glyceryl phosphate (polar fraction) or a composition comprising bis-glyceryl phosphate (polar fraction) in said non-human organism or in the culture medium surrounding said non-human organism.

[97664] A further embodiment of the present invention relates to a process for the production of glycerol (polar fraction), which comprises
[97665] (a) increasing or generating the activity of a vacuolar sorting protein non-targeted in a non-human organism or a part thereof, preferably a microorganism, a plant cell, a plant or a part thereof, as compared to a corresponding non-transformed wild type non-human organism or a part thereof; and
[97666] (b) growing the non-human organism or a part thereof under conditions which permit the production of glycerol (polar fraction) or a composition comprising glycerol (polar fraction) in said non-human organism or in the culture medium surrounding said non-human organism.

[97667] A further embodiment of the present invention relates to a process for the production of bis-glyceryl phosphate (polar fraction), which comprises
[97668] (a) increasing or generating the activity of a YLR099C-protein non-targeted in a non-human organism or a part thereof, preferably a microorganism, a plant cell, a plant or a part thereof, as compared to a corresponding non-transformed wild type non-human organism or a part thereof; and
[97669] (b) growing the non-human organism or a part thereof under conditions which permit the production of bis-glyceryl phosphate (polar fraction) or a composition comprising bis-glyceryl phosphate (polar fraction) in said non-human organism or in the culture medium surrounding said non-human organism.

[97670] A further embodiment of the present invention relates to a process for the production of glycerol (lipid fraction), which comprises
[97671] (a) increasing or generating the activity of a cyclin non-targeted in a non-human organism or a part thereof, preferably a microorganism, a plant cell, a plant or a part thereof, as compared to a corresponding non-transformed wild type non-human organism or a part thereof; and
[97672] (b) growing the non-human organism or a part thereof under conditions which permit the production of glycerol (lipid fraction) or a composition comprising glycerol (lipid fraction) in said non-human organism or in the culture medium surrounding said non-human organism.

[97673] A further embodiment of the present invention relates to a process for the production of glycerol (lipid fraction), which comprises
[97674] (a) increasing or generating the activity of a ylr326w-protein non-targeted in a non-human organism or a part thereof, preferably a microorganism, a plant cell, a plant or a part thereof, as compared to a corresponding non-transformed wild type non-human organism or a part thereof; and
[97675] (b) growing the non-human organism or a part thereof under conditions which permit the production of glycerol (lipid fraction) or a composition comprising glycerol (lipid fraction) in said non-human organism or in the culture medium surrounding said non-human organism.

[97676] A further embodiment of the present invention relates to a process for the production of glycerol phosphate (lipid fraction), which comprises
[97677] (a) increasing or generating the activity of a ylr326w-protein non-targeted in a non-human organism or a part thereof, preferably a microorganism, a plant cell, a plant or a part thereof, as compared to a corresponding non-transformed wild type non-human organism or a part thereof; and
[97678] (b) growing the non-human organism or a part thereof under conditions which permit the production of glycerol phosphate (lipid fraction) or a composition comprising glycerol phosphate (lipid fraction) in said non-human organism or in the culture medium surrounding said non-human organism.

[97679] A further embodiment of the present invention relates to a process for the production of glycerol (lipid fraction), which comprises
[97680] (a) increasing or generating the activity of a heat shock protein Hsp40 non-targeted in a non-human organism or a part thereof, preferably a microorganism, a plant cell, a plant or a part thereof, as compared to a corresponding non-transformed wild type non-human organism or a part thereof; and
[97681] (b) growing the non-human organism or a part thereof under conditions which permit the production of glycerol (lipid fraction) or a composition comprising glycerol (lipid fraction) in said non-human organism or in the culture medium surrounding said non-human organism.

[97682] A further embodiment of the present invention relates to a process for the production of glycerol (lipid fraction), which comprises
[97683] (a) increasing or generating the activity of a phosphotransferase non-targeted in a non-human organism or a part thereof, preferably a microorganism, a plant cell, a plant or a part thereof, as compared to a corresponding non-transformed wild type non-human organism or a part thereof; and
[97684] (b) growing the non-human organism or a part thereof under conditions which permit the production of glycerol (lipid fraction) or a composition comprising glycerol (lipid fraction) in said non-human organism or in the culture medium surrounding said non-human organism.

[97685] A further embodiment of the present invention relates to a process for the production of glycerol (lipid fraction), which comprises
[97686] (a) increasing or generating the activity of a Elongation factor Tu non-targeted in a non-human organism or a part thereof, preferably a microorganism, a plant cell, a plant or a part thereof, as compared to a corresponding non-transformed wild type non-human organism or a part thereof; and
[97687] (b) growing the non-human organism or a part thereof under conditions which permit the production of glycerol (lipid fraction) or a composition comprising glycerol (lipid fraction) in said non-human organism or in the culture medium surrounding said non-human organism.

[97688] A further embodiment of the present invention relates to a process for the production of bis-glyceryl phosphate (polar fraction), which comprises
[97689] (a) increasing or generating the activity of a YPL162C.protein non-targeted in a non-human organism or a part thereof, preferably a microorganism, a plant cell, a plant or a part thereof, as compared to a corresponding non-transformed wild type non-human organism or a part thereof; and
[97690] (b) growing the non-human organism or a part thereof under conditions which permit the production of bis-glyceryl phosphate (polar fraction) or a composition comprising bis-glyceryl phosphate (polar fraction) in said non-human organism or in the culture medium surrounding said non-human organism.

[97691] A further embodiment of the present invention relates to a process for the production of glycerol (lipid fraction), which comprises
[97692] (a) increasing or generating the activity of a mitogen-activated protein kinase non-targeted in a non-human organism or a part thereof, preferably a microorganism, a plant cell, a plant or a part thereof, as compared to a corresponding non-transformed wild type non-human organism or a part thereof; and
[97693] (b) growing the non-human organism or a part thereof under conditions which permit the production of glycerol (lipid fraction) or a composition comprising glycerol (lipid fraction) in said non-human organism or in the culture medium surrounding said non-human organism.

[97694] A further embodiment of the present invention relates to a process for the production of bis-glyceryl phosphate (polar fraction), which comprises
[97695] (a) increasing or generating the activity of a Zm_{—}4842_BE510522-protein non-targeted in a non-human organism or a part thereof, preferably a microorganism, a plant cell, a plant or a part thereof, as compared to a corresponding non-transformed wild type non-human organism or a part thereof; and
[97696] (b) growing the non-human organism or a part thereof under conditions which permit the production of bis-glyceryl phosphate (polar fraction) or a composition comprising bis-glyceryl phosphate (polar fraction) in said non-human organism or in the culture medium surrounding said non-human organism.

[97697] A further embodiment of the present invention relates to a process for the production of bis-glyceryl phosphate (polar fraction), which comprises
[97698] (a) increasing or generating the activity of a 49747384_SOYBEAN-protein non-targeted in a non-human organism or a part thereof, preferably a microorganism, a plant cell, a plant or a part thereof, as compared to a corresponding non-transformed wild type non-human organism or a part thereof; and
[97699] (b) growing the non-human organism or a part thereof under conditions which permit the production of bis-glyceryl phosphate (polar fraction) or a composition comprising bis-glyceryl phosphate (polar fraction) in said non-human organism or in the culture medium surrounding said non-human organism.

[97700] A further embodiment of the present invention relates to a process for the production of bis-glyceryl phosphate (polar fraction), which comprises
[97701] (a) increasing or generating the activity of a polypeptide comprising a polypeptide as depicted in the respective line in column 5 or 8 of Table II, application no. 19, or a homolog or a fragment thereof, a consensus sequence or at least one polypeptide motif as depicted in the respective line in column 8 of Table IV, application no. 19, whereby the respective line disclose in column 7 the fine chemical bis-glyceryl phosphate (polar fraction); or
[97702] increasing or generating the activity of an expression product of one or more nucleic acid molecule(s) comprising a polynucleotide as depicted in the respective line in column 5 or 8 of Table I, application no. 19, preferably the coding region thereof, or a homolog or a fragment thereof, whereby the respective line disclose in column 7 the fine chemical bis-glyceryl phosphate (polar fraction);
[97703] non-targeted in a non-human organism or a part thereof; preferably a microorganism, a plant cell, a plant or a part thereof, as compared to a corresponding non-transformed wild type non-human organism or a part thereof; and
[97704] (b) growing the non-human organism under conditions which permit the production of bis-glyceryl phosphate (polar fraction), or a composition comprising bis-glyceryl phosphate (polar fraction) in said non-human organism or in the culture medium surrounding said non-human organism.

[97705] A further embodiment of the present invention relates to a process for the production of glycerol (lipid fraction), which comprises
[97706] (a) increasing or generating the activity of a polypeptide comprising a polypeptide as depicted in the respective line in column 5 or 8 of Table II, application no. 19, or a homolog or a fragment thereof, a consensus sequence or at least one polypeptide motif as depicted in the respective line in column 8 of Table IV, application no. 19, whereby the respective line disclose in column 7 the fine chemical glycerol (lipid fraction); or
[97707] increasing or generating the activity of an expression product of one or more nucleic acid molecule(s) comprising a polynucleotide as depicted in the respective line in column 5 or 8 of Table I, application no. 19, preferably the coding region thereof, or a homolog or a fragment thereof, whereby the respective line disclose in column 7 the fine chemical glycerol (lipid fraction);
[97708] non-targeted in a non-human organism or a part thereof; preferably a microorganism, a plant cell, a plant or a part thereof, as compared to a corresponding non-transformed wild type non-human organism or a part thereof; and
[97709] (b) growing the non-human organism under conditions which permit the production of glycerol (lipid fraction), or a composition comprising glycerol (lipid fraction) in said non-human organism or in the culture medium surrounding said non-human organism.

[97710] A further embodiment of the present invention relates to a process for the production of glycerol (polar fraction), which comprises
[97711] (a) increasing or generating the activity of a polypeptide comprising a polypeptide as depicted in the respective line in column 5 or 8 of Table II, application no. 19, or a homolog or a fragment thereof, a consensus sequence or at least one polypeptide motif as depicted in the respective line in column 8 of Table IV, application no. 19, whereby the respective line disclose in column 7 the fine chemical glycerol (polar fraction); or
[97712] increasing or generating the activity of an expression product of one or more nucleic acid molecule(s) comprising a polynucleotide as depicted in the respective line in column 5 or 8 of Table I, application no. 19, preferably the coding region thereof, or a homolog or a fragment thereof, whereby the respective line disclose in column 7 the fine chemical glycerol (polar fraction);
[97713] non-targeted in a non-human organism or a part thereof; preferably a microorganism, a plant cell, a plant or a part thereof, as compared to a corresponding non-transformed wild type non-human organism or a part thereof; and
[97714] (b) growing the non-human organism under conditions which permit the production of glycerol (polar fraction), or a composition comprising glycerol (polar fraction) in said non-human organism or in the culture medium surrounding said non-human organism.

[97715] A further embodiment of the present invention relates to a process for the production of glycerol phosphate (lipid fraction), which comprises
[97716] (a) increasing or generating the activity of a polypeptide comprising a polypeptide as depicted in the respective line in column 5 or 8 of Table II, application no. 19, or a homolog or a fragment thereof, a consensus sequence or at least one polypeptide motif as depicted in the respective line in column 8 of Table IV, application no. 19, whereby the respective line disclose in column 7 the fine chemical glycerol phosphate (lipid fraction); or
[97717] increasing or generating the activity of an expression product of one or more nucleic acid molecule(s) comprising a polynucleotide as depicted in the respective line in column 5 or 8 of Table I, application no. 19, preferably the coding region thereof, or a homolog or a fragment thereof, whereby the respective line disclose in column 7 the fine chemical glycerol phosphate (lipid fraction);
[97718] non-targeted in a non-human organism or a part thereof; preferably a microorganism, a plant cell, a plant or a part thereof, as compared to a corresponding non-transformed wild type non-human organism or a part thereof; and
[97719] (b) growing the non-human organism under conditions which permit the production of glycerol phosphate (lipid fraction), or a composition comprising glycerol phosphate (lipid fraction) in said non-human organism or in the culture medium surrounding said non-human organism.

[97720] A further embodiment of the present invention relates to a process for the production of glycerol-3-phosphate (polar fraction), which comprises
[97721] (a) increasing or generating the activity of a polypeptide comprising a polypeptide as depicted in the respective line in column 5 or 8 of Table II, application no. 19, or a homolog or a fragment thereof, a consensus sequence or at least one polypeptide motif as depicted in the respective line in column 8 of Table IV, application no. 19, whereby the respective line disclose in column 7 the fine chemical glycerol-3-phosphate (polar fraction); or
[97722] increasing or generating the activity of an expression product of one or more nucleic acid molecule(s) comprising a polynucleotide as depicted in the respective line in column 5 or 8 of Table I, application no. 19, preferably the coding region thereof, or a homolog or a fragment thereof, whereby the respective line disclose in column 7 the fine chemical glycerol-3-phosphate (polar fraction);
[97723] non-targeted in a non-human organism or a part thereof; preferably a microorganism, a plant cell, a plant or a part thereof, as compared to a corresponding non-transformed wild type non-human organism or a part thereof; and
[97724] (b) growing the non-human organism under conditions which permit the production of glycerol-3-phosphate (polar fraction), or a composition comprising glycerol-3-phosphate (polar fraction) in said non-human organism or in the culture medium surrounding said non-human organism

[97725] A further embodiment of the present invention relates to a process for the production of triacylglycerol, which comprises
[97726] (a) increasing or generating the activity of a polypeptide comprising a polypeptide as depicted in the respective line in column 5 or 8 of Table II, application no. 19, or a homolog or a fragment thereof, a consensus sequence or at least one polypeptide motif as depicted in the respective line in column 8 of Table IV, application no. 19, whereby the respective line disclose in column 7 the fine chemical triacylglycerol; or
[97727] increasing or generating the activity of an expression product of one or more nucleic acid molecule(s) comprising a polynucleotide as depicted in the respective line in column 5 or 8 of Table I, application no. 19, preferably the coding region thereof, or a homolog or a fragment thereof, whereby the respective line disclose in column 7 the fine chemical triacylglycerol;
[97728] non-targeted in a non-human organism or a part thereof; preferably a microorganism, a plant cell, a plant or a part thereof, as compared to a corresponding non-transformed wild type non-human organism or a part thereof; and
[97729] (b) growing the non-human organism under conditions which permit the production of triacylglycerol, or a composition comprising triacylglycerol in said non-human organism or in the culture medium surrounding said non-human organism.

[97730] A further embodiment of the present invention relates to a process for the production of glycerol phosphate (lipid fraction), which comprises
[97731] (a) increasing or generating one or more activities selected from the group consisting of protein phosphatase in an organelle, preferably in plastids or mitochondria, especially in plastids, of a non-human organism or a part thereof, preferably a microorganism, a plant cell, a plant or a part thereof, as compared to a corresponding non-transformed wild type non-human organism or a part thereof; and
[97732] (b) growing the non-human organism or a part thereof under conditions which permit the production of glycerol phosphate (lipid fraction) or a composition comprising glycerol phosphate (lipid fraction) in said non-human organism or in the culture medium surrounding said non-human organism.

[97733] A further embodiment of the present invention relates to a process for the production of bis-glyceryl phosphate (polar fraction), which comprises
[97734] (a) increasing or generating one or more activities selected from the group consisting of At1g23110-protein in an organelle, preferably in plastids or mitochondria, especially in plastids, of a non-human organism or a part thereof, preferably a microorganism, a plant cell, a plant or a part thereof, as compared to a corresponding non-transformed wild type non-human organism or a part thereof; and
[97735] (b) growing the non-human organism or a part thereof under conditions which permit the production of bis-glyceryl phosphate (polar fraction) or a composition comprising bis-glyceryl phosphate (polar fraction) in said non-human organism or in the culture medium surrounding said non-human organism.

[97736] A further embodiment of the present invention relates to a process for the production of bis-glyceryl phosphate (polar fraction), which comprises
[97737] (a) increasing or generating one or more activities selected from the group consisting of eukaryotic translation initiation factor 5 in an organelle, preferably in plastids or mitochondria, especially in plastids, of a non-human organism or a part thereof, preferably a microorganism, a plant cell, a plant or a part thereof, as compared to a corresponding non-transformed wild type non-human organism or a part thereof; and
[97738] (b) growing the non-human organism or a part thereof under conditions which permit the production of bis-glyceryl phosphate (polar fraction) or a composition comprising bis-glyceryl phosphate (polar fraction) in said non-human organism or in the culture medium surrounding said non-human organism.

[97739] A further embodiment of the present invention relates to a process for the production of glycerol phosphate (lipid fraction), which comprises
[97740] (a) increasing or generating one or more activities selected from the group consisting of eukaryotic translation initiation factor 5 in an organelle, preferably in plastids or mitochondria, especially in plastids, of a non-human organism or a part thereof, preferably a microorganism, a plant cell, a plant or a part thereof, as compared to a corresponding non-transformed wild type non-human organism or a part thereof; and
[97741] (b) growing the non-human organism or a part thereof under conditions which permit the production of glycerol phosphate (lipid fraction) or a composition comprising glycerol phosphate (lipid fraction) in said non-human organism or in the culture medium surrounding said non-human organism.

[97742] A further embodiment of the present invention relates to a process for the production of triacylglycerol, which comprises
[97743] (a) increasing or generating one or more activities selected from the group consisting of At1g67340-protein in an organelle, preferably in plastids or mitochondria, especially in plastids, of a non-human organism or a part thereof, preferably a microorganism, a plant cell, a plant or a part thereof, as compared to a corresponding non-transformed wild type non-human organism or a part thereof; and
[97744] (b) growing the non-human organism or a part thereof under conditions which permit the production of triacylglycerol or a composition comprising triacylglycerol in said non-human organism or in the culture medium surrounding said non-human organism.

[97745] A further embodiment of the present invention relates to a process for the production of glycerol (lipid fraction), which comprises
[97746] (a) increasing or generating one or more activities selected from the group consisting of transcription factor in an organelle, preferably in plastids or mitochondria, especially in plastids, of a non-human organism or a part thereof, preferably a microorganism, a plant cell, a plant or a part thereof, as compared to a corresponding non-transformed wild type non-human organism or a part thereof; and
[97747] (b) growing the non-human organism or a part thereof under conditions which permit the production of glycerol (lipid fraction) or a composition comprising glycerol (lipid fraction) in said non-human organism or in the culture medium surrounding said non-human organism.

[97748] A further embodiment of the present invention relates to a process for the production of bis-glyceryl phosphate (polar fraction), which comprises
[97749] (a) increasing or generating one or more activities selected from the group consisting of protein phosphatase in an organelle, preferably in plastids or mitochondria, especially in plastids, of a non-human organism or a part thereof, preferably a microorganism, a plant cell, a plant or a part thereof, as compared to a corresponding non-transformed wild type non-human organism or a part thereof; and
[97750] (b) growing the non-human organism or a part thereof under conditions which permit the production of bis-glyceryl phosphate (polar fraction) or a composition comprising bis-glyceryl phosphate (polar fraction) in said non-human organism or in the culture medium surrounding said non-human organism.

[97751] A further embodiment of the present invention relates to a process for the production of glycerol (lipid fraction), which comprises
[97752] (a) increasing or generating one or more activities selected from the group consisting of protein phosphatase in an organelle, preferably in plastids or mitochondria, especially in plastids, of a non-human organism or a part thereof, preferably a microorganism, a plant cell, a plant or a part thereof, as compared to a corresponding non-transformed wild type non-human organism or a part thereof; and
[97753] (b) growing the non-human organism or a part thereof under conditions which permit the production of glycerol (lipid fraction) or a composition comprising glycerol (lipid fraction) in said non-human organism or in the culture medium surrounding said non-human organism.

[97754] A further embodiment of the present invention relates to a process for the production of glycerol phosphate (lipid fraction), which comprises
[97755] (a) increasing or generating one or more activities selected from the group consisting of protein phosphatase in an organelle, preferably in plastids or mitochondria, especially in plastids, of a non-human organism or a part thereof, preferably a microorganism, a plant cell, a plant or a part thereof, as compared to a corresponding non-transformed wild type non-human organism or a part thereof; and
[97756] (b) growing the non-human organism or a part thereof under conditions which permit the production of glycerol phosphate (lipid fraction) or a composition comprising glycerol phosphate (lipid fraction) in said non-human organism or in the culture medium surrounding said non-human organism.

[97757] A further embodiment of the present invention relates to a process for the production of bis-glyceryl phosphate (polar fraction), which comprises
[97758] (a) increasing or generating one or more activities selected from the group consisting of CBL-interacting protein kinase in an organelle, preferably in plastids or mitochondria, especially in plastids, of a non-human organism or a part thereof, preferably a microorganism, a plant cell, a plant or a part thereof, as compared to a corresponding non-transformed wild type non-human organism or a part thereof; and
[97759] (b) growing the non-human organism or a part thereof under conditions which permit the production of bis-glyceryl phosphate (polar fraction) or a composition comprising bis-glyceryl phosphate (polar fraction) in said non-human organism or in the culture medium surrounding said non-human organism.

[97760] A further embodiment of the present invention relates to a process for the production of bis-glyceryl phosphate (polar fraction), which comprises
[97761] (a) increasing or generating one or more activities selected from the group consisting of phosphatidylinositol 3- and 4-kinase family protein in an organelle, preferably in plastids or mitochondria, especially in plastids, of a non-human organism or a part thereof, preferably a microorganism, a plant cell, a plant or a part thereof, as compared to a corresponding non-transformed wild type non-human organism or a part thereof; and
[97762] (b) growing the non-human organism or a part thereof under conditions which permit the production of bis-glyceryl phosphate (polar fraction) or a composition comprising bis-glyceryl phosphate (polar fraction) in said non-human organism or in the culture medium surrounding said non-human organism.

[97763] A further embodiment of the present invention relates to a process for the production of triacylglycerol, which comprises
[97764] (a) increasing or generating one or more activities selected from the group consisting of heat shock transcription factor in an organelle, preferably in plastids or mitochondria, especially in plastids, of a non-human organism or a part thereof, preferably a microorganism, a plant cell, a plant or a part thereof, as compared to a corresponding non-transformed wild type non-human organism or a part thereof; and
[97765] (b) growing the non-human organism or a part thereof under conditions which permit the production of triacylglycerol or a composition comprising triacylglycerol in said non-human organism or in the culture medium surrounding said non-human organism.

[97766] A further embodiment of the present invention relates to a process for the production of glycerol (lipid fraction), which comprises
[97767] (a) increasing or generating one or more activities selected from the group consisting of transcription factor in an organelle, preferably in plastids or mitochondria, especially in plastids, of a non-human organism or a part thereof, preferably a microorganism, a plant cell, a plant or a part thereof, as compared to a corresponding non-transformed wild type non-human organism or a part thereof; and
[97768] (b) growing the non-human organism or a part thereof under conditions which permit the production of glycerol (lipid fraction) or a composition comprising glycerol (lipid fraction) in said non-human organism or in the culture medium surrounding said non-human organism.

[97769] A further embodiment of the present invention relates to a process for the production of glycerol (lipid fraction), which comprises
[97770] (a) increasing or generating one or more activities selected from the group consisting of monothiol glutaredoxin in an organelle, preferably in plastids or mitochondria, especially in plastids, of a non-human organism or a part thereof, preferably a microorganism, a plant cell, a plant or a part thereof, as compared to a corresponding non-transformed wild type non-human organism or a part thereof; and
[97771] (b) growing the non-human organism or a part thereof under conditions which permit the production of glycerol (lipid fraction) or a composition comprising glycerol (lipid fraction) in said non-human organism or in the culture medium surrounding said non-human organism.

[97772] A further embodiment of the present invention relates to a process for the production of triacylglycerol, which comprises
[97773] (a) increasing or generating one or more activities selected from the group consisting of monothiol glutaredoxin in an organelle, preferably in plastids or mitochondria, especially in plastids, of a non-human organism or a part thereof, preferably a microorganism, a plant cell, a plant or a part thereof, as compared to a corresponding non-transformed wild type non-human organism or a part thereof; and
[97774] (b) growing the non-human organism or a part thereof under conditions which permit the production of triacylglycerol or a composition comprising triacylglycerol in said non-human organism or in the culture medium surrounding said non-human organism.

[97775] A further embodiment of the present invention relates to a process for the production of glycerol (lipid fraction), which comprises
[97776] (a) increasing or generating one or more activities selected from the group consisting of monothiol glutaredoxin in an organelle, preferably in plastids or mitochondria, especially in plastids, of a non-human organism or a part thereof, preferably a microorganism, a plant cell, a plant or a part thereof, as compared to a corresponding non-transformed wild type non-human organism or a part thereof; and
[97777] (b) growing the non-human organism or a part thereof under conditions which permit the production of glycerol (lipid fraction) or a composition comprising glycerol (lipid fraction) in said non-human organism or in the culture medium surrounding said non-human organism.

[97778] A further embodiment of the present invention relates to a process for the production of triacylglycerol, which comprises
[97779] (a) increasing or generating one or more activities selected from the group consisting of monothiol glutaredoxin in an organelle, preferably in plastids or mitochondria, especially in plastids, of a non-human organism or a part thereof, preferably a microorganism, a plant cell, a plant or a part thereof, as compared to a corresponding non-transformed wild type non-human organism or a part thereof; and
[97780] (b) growing the non-human organism or a part thereof under conditions which permit the production of triacylglycerol or a composition comprising triacylglycerol in said non-human organism or in the culture medium surrounding said non-human organism.

[97781] A further embodiment of the present invention relates to a process for the production of glycerol phosphate (lipid fraction), which comprises
[97782] (a) increasing or generating one or more activities selected from the group consisting of protein phosphatase in an organelle, preferably in plastids or mitochondria, especially in plastids, of a non-human organism or a part thereof, preferably a microorganism, a plant cell, a plant or a part thereof, as compared to a corresponding non-transformed wild type non-human organism or a part thereof; and
[97783] (b) growing the non-human organism or a part thereof under conditions which permit the production of glycerol phosphate (lipid fraction) or a composition comprising glycerol phosphate (lipid fraction) in said non-human organism or in the culture medium surrounding said non-human organism.

[97784] A further embodiment of the present invention relates to a process for the production of bis-glyceryl phosphate (polar fraction), which comprises
[97785] (a) increasing or generating one or more activities selected from the group consisting of cyclin D in an organelle, preferably in plastids or mitochondria, especially in plastids, of a non-human organism or a part thereof, preferably a microorganism, a plant cell, a plant or a part thereof, as compared to a corresponding non-transformed wild type non-human organism or a part thereof; and
[97786] (b) growing the non-human organism or a part thereof under conditions which permit the production of bis-glyceryl phosphate (polar fraction) or a composition comprising bis-glyceryl phosphate (polar fraction) in said non-human organism or in the culture medium surrounding said non-human organism.

[97787] A further embodiment of the present invention relates to a process for the production of bis-glyceryl phosphate (polar fraction), which comprises
[97788] (a) increasing or generating one or more activities selected from the group consisting of calcium-dependent protein kinase in an organelle, preferably in plastids or mitochondria, especially in plastids, of a non-human organism or a part thereof, preferably a microorganism, a plant cell, a plant or a part thereof, as compared to a corresponding non-transformed wild type non-human organism or a part thereof; and
[97789] (b) growing the non-human organism or a part thereof under conditions which permit the production of bis-glyceryl phosphate (polar fraction) or a composition comprising bis-glyceryl phosphate (polar fraction) in said non-human organism or in the culture medium surrounding said non-human organism.

[97790] A further embodiment of the present invention relates to a process for the production of glycerol (lipid fraction), which comprises
[97791] (a) increasing or generating one or more activities selected from the group consisting of heat shock transcription factor in an organelle, preferably in plastids or mitochondria, especially in plastids, of a non-human organism or a part thereof, preferably a microorganism, a plant cell, a plant or a part thereof, as compared to a corresponding non-transformed wild type non-human organism or a part thereof; and
[97792] (b) growing the non-human organism or a part thereof under conditions which permit the production of glycerol (lipid fraction) or a composition comprising glycerol (lipid fraction) in said non-human organism or in the culture medium surrounding said non-human organism.

[97793] A further embodiment of the present invention relates to a process for the production of triacylglycerol, which comprises
[97794] (a) increasing or generating one or more activities selected from the group consisting of heat shock transcription factor in an organelle, preferably in plastids or mitochondria, especially in plastids, of a non-human organism or a part thereof, preferably a microorganism, a plant cell, a plant or a part thereof, as compared to a corresponding non-transformed wild type non-human organism or a part thereof; and
[97795] (b) growing the non-human organism or a part thereof under conditions which permit the production of triacylglycerol or a composition comprising triacylglycerol in said non-human organism or in the culture medium surrounding said non-human organism.

[97796] A further embodiment of the present invention relates to a process for the production of glycerol (lipid fraction), which comprises
[97797] (a) increasing or generating one or more activities selected from the group consisting of monothiol glutaredoxin in an organelle, preferably in plastids or mitochondria, especially in plastids, of a non-human organism or a part thereof, preferably a microorganism, a plant cell, a plant or a part thereof, as compared to a corresponding non-transformed wild type non-human organism or a part thereof; and
[97798] (b) growing the non-human organism or a part thereof under conditions which permit the production of glycerol (lipid fraction) or a composition comprising glycerol (lipid fraction) in said non-human organism or in the culture medium surrounding said non-human organism.

[97799] A further embodiment of the present invention relates to a process for the production of glycerol phosphate (lipid fraction), which comprises
[97800] (a) increasing or generating one or more activities selected from the group consisting of protein phosphatase in an organelle, preferably in plastids or mitochondria, especially in plastids, of a non-human organism or a part thereof, preferably a microorganism, a plant cell, a plant or a part thereof, as compared to a corresponding non-transformed wild type non-human organism or a part thereof; and
[97801] (b) growing the non-human organism or a part thereof under conditions which permit the production of glycerol phosphate (lipid fraction) or a composition comprising glycerol phosphate (lipid fraction) in said non-human organism or in the culture medium surrounding said non-human organism.

[97802] A further embodiment of the present invention relates to a process for the production of glycerol phosphate (lipid fraction), which comprises
[97803] (a) increasing or generating one or more activities selected from the group consisting of protein phosphatase in an organelle, preferably in plastids or mitochondria, especially in plastids, of a non-human organism or a part thereof, preferably a microorganism, a plant cell, a plant or a part thereof, as compared to a corresponding non-transformed wild type non-human organism or a part thereof; and
[97804] (b) growing the non-human organism or a part thereof under conditions which permit the production of glycerol phosphate (lipid fraction) or a composition comprising glycerol phosphate (lipid fraction) in said non-human organism or in the culture medium surrounding said non-human organism.

[97805] A further embodiment of the present invention relates to a process for the production of glycerol phosphate (lipid fraction), which comprises
[97806] (a) increasing or generating one or more activities selected from the group consisting of pyruvate kinase in an organelle, preferably in plastids or mitochondria, especially in plastids, of a non-human organism or a part thereof, preferably a microorganism, a plant cell, a plant or a part thereof, as compared to a corresponding non-transformed wild type non-human organism or a part thereof; and
[97807] (b) growing the non-human organism or a part thereof under conditions which permit the production of glycerol phosphate (lipid fraction) or a composition comprising glycerol phosphate (lipid fraction) in said non-human organism or in the culture medium surrounding said non-human organism.

[97808] A further embodiment of the present invention relates to a process for the production of triacylglycerol, which comprises
[97809] (a) increasing or generating one or more activities selected from the group consisting of Glycine cleavage system T aminomethyltransferase in an organelle, preferably in plastids or mitochondria, especially in plastids, of a non-human organism or a part thereof, preferably a microorganism, a plant cell, a plant or a part thereof, as compared to a corresponding non-transformed wild type non-human organism or a part thereof; and
[97810] (b) growing the non-human organism or a part thereof under conditions which permit the production of triacylglycerol or a composition comprising triacylglycerol in said non-human organism or in the culture medium surrounding said non-human organism.

[97811] A further embodiment of the present invention relates to a process for the production of glycerol phosphate (lipid fraction), which comprises
[97812] (a) increasing or generating one or more activities selected from the group consisting of sec-independent protein translocase in an organelle, preferably in plastids or mitochondria, especially in plastids, of a non-human organism or a part thereof, preferably a microorganism, a plant cell, a plant or a part thereof, as compared to a corresponding non-transformed wild type non-human organism or a part thereof; and
[97813] (b) growing the non-human organism or a part thereof under conditions which permit the production of glycerol phosphate (lipid fraction) or a composition comprising glycerol phosphate (lipid fraction) in said non-human organism or in the culture medium surrounding said non-human organism.

[97814] A further embodiment of the present invention relates to a process for the production of glycerol (lipid fraction), which comprises
[97815] (a) increasing or generating one or more activities selected from the group consisting of oxidoreductase in an organelle, preferably in plastids or mitochondria, especially in plastids, of a non-human organism or a part thereof, preferably a microorganism, a plant cell, a plant or a part thereof, as compared to a corresponding non-transformed wild type non-human organism or a part thereof; and
[97816] (b) growing the non-human organism or a part thereof under conditions which permit the production of glycerol (lipid fraction) or a composition comprising glycerol (lipid fraction) in said non-human organism or in the culture medium surrounding said non-human organism.

[97817] A further embodiment of the present invention relates to a process for the production of bis-glyceryl phosphate (polar fraction), which comprises
[97818] (a) increasing or generating one or more activities selected from the group consisting of transcriptional regulator protein in an organelle, preferably in plastids or mitochondria, especially in plastids, of a non-human organism or a part thereof, preferably a microorganism, a plant cell, a plant or a part thereof, as compared to a corresponding non-transformed wild type non-human organism or a part thereof; and
[97819] (b) growing the non-human organism or a part thereof under conditions which permit the production of bis-glyceryl phosphate (polar fraction) or a composition comprising bis-glyceryl phosphate (polar fraction) in said non-human organism or in the culture medium surrounding said non-human organism.

[97820] A further embodiment of the present invention relates to a process for the production of bis-glyceryl phosphate (polar fraction), which comprises
[97821] (a) increasing or generating one or more activities selected from the group consisting of beta-hydroxylase in an organelle, preferably in plastids or mitochondria, especially in plastids, of a non-human organism or a part thereof, preferably a microorganism, a plant cell, a plant or a part thereof, as compared to a corresponding non-transformed wild type non-human organism or a part thereof; and
[97822] (b) growing the non-human organism or a part thereof under conditions which permit the production of bis-glyceryl phosphate (polar fraction) or a composition comprising bis-glyceryl phosphate (polar fraction) in said non-human organism or in the culture medium surrounding said non-human organism.

[97823] A further embodiment of the present invention relates to a process for the production of triacylglycerol, which comprises
[97824] (a) increasing or generating one or more activities selected from the group consisting of beta-hydroxylase in an organelle, preferably in plastids or mitochondria, especially in plastids, of a non-human organism or a part thereof, preferably a microorganism, a plant cell, a plant or a part thereof, as compared to a corresponding non-transformed wild type non-human organism or a part thereof; and
[97825] (b) growing the non-human organism or a part thereof under conditions which permit the production of triacylglycerol or a composition comprising triacylglycerol in said non-human organism or in the culture medium surrounding said non-human organism.

[97826] A further embodiment of the present invention relates to a process for the production of bis-glyceryl phosphate (polar fraction), which comprises
[97827] (a) increasing or generating one or more activities selected from the group consisting of oxidoreductase in an organelle, preferably in plastids or mitochondria, especially in plastids, of a non-human organism or a part thereof, preferably a microorganism, a plant cell, a plant or a part thereof, as compared to a corresponding non-transformed wild type non-human organism or a part thereof; and
[97828] (b) growing the non-human organism or a part thereof under conditions which permit the production of bis-glyceryl phosphate (polar fraction) or a composition comprising bis-glyceryl phosphate (polar fraction) in said non-human organism or in the culture medium surrounding said non-human organism.

[97829] A further embodiment of the present invention relates to a process for the production of glycerol phosphate (lipid fraction), which comprises
[97830] (a) increasing or generating one or more activities selected from the group consisting of ThiF family protein in an organelle, preferably in plastids or mitochondria, especially in plastids, of a non-human organism or a part thereof, preferably a microorganism, a plant cell, a plant or a part thereof, as compared to a corresponding non-transformed wild type non-human organism or a part thereof; and
[97831] (b) growing the non-human organism or a part thereof under conditions which permit the production of glycerol phosphate (lipid fraction) or a composition comprising glycerol phosphate (lipid fraction) in said non-human organism or in the culture medium surrounding said non-human organism.

[97832] A further embodiment of the present invention relates to a process for the production of glycerol (lipid fraction), which comprises
[97833] (a) increasing or generating one or more activities selected from the group consisting of recombinase A in an organelle, preferably in plastids or mitochondria, especially in plastids, of a non-human organism or a part thereof, preferably a microorganism, a plant cell, a plant or a part thereof, as compared to a corresponding non-transformed wild type non-human organism or a part thereof; and
[97834] (b) growing the non-human organism or a part thereof under conditions which permit the production of glycerol (lipid fraction) or a composition comprising glycerol (lipid fraction) in said non-human organism or in the culture medium surrounding said non-human organism.

[97835] A further embodiment of the present invention relates to a process for the production of bis-glyceryl phosphate (polar fraction), which comprises
[97836] (a) increasing or generating one or more activities selected from the group consisting of NADH-quinone oxidoreductase subunit in an organelle, preferably in plastids or mitochondria, especially in plastids, of a non-human organism or a part thereof, preferably a microorganism, a plant cell, a plant or a part thereof, as compared to a corresponding non-transformed wild type non-human organism or a part thereof; and
[97837] (b) growing the non-human organism or a part thereof under conditions which permit the production of bis-glyceryl phosphate (polar fraction) or a composition comprising bis-glyceryl phosphate (polar fraction) in said non-human organism or in the culture medium surrounding said non-human organism.

[97838] A further embodiment of the present invention relates to a process for the production of triacylglycerol, which comprises
[97839] (a) increasing or generating one or more activities selected from the group consisting of hydrolase in an organelle, preferably in plastids or mitochondria, especially in plastids, of a non-human organism or a part thereof, preferably a microorganism, a plant cell, a plant or a part thereof, as compared to a corresponding non-transformed wild type non-human organism or a part thereof; and
[97840] (b) growing the non-human organism or a part thereof under conditions which permit the production of triacylglycerol or a composition comprising triacylglycerol in said non-human organism or in the culture medium surrounding said non-human organism.

[97841] A further embodiment of the present invention relates to a process for the production of glycerol phosphate (lipid fraction), which comprises
[97842] (a) increasing or generating one or more activities selected from the group consisting of HesB/YadR/YfhF family protein in an organelle, preferably in plastids or mitochondria, especially in plastids, of a non-human organism or a part thereof, preferably a microorganism, a plant cell, a plant or a part thereof, as compared to a corresponding non-transformed wild type non-human organism or a part thereof; and
[97843] (b) growing the non-human organism or a part thereof under conditions which permit the production of glycerol phosphate (lipid fraction) or a composition comprising glycerol phosphate (lipid fraction) in said non-human organism or in the culture medium surrounding said non-human organism.

[97844] A further embodiment of the present invention relates to a process for the production of bis-glyceryl phosphate (polar fraction), which comprises
[97845] (a) increasing or generating one or more activities selected from the group consisting of pyruvate kinase in an organelle, preferably in plastids or mitochondria, especially in plastids, of a non-human organism or a part thereof, preferably a microorganism, a plant cell, a plant or a part thereof, as compared to a corresponding non-transformed wild type non-human organism or a part thereof; and
[97846] (b) growing the non-human organism or a part thereof under conditions which permit the production of bis-glyceryl phosphate (polar fraction) or a composition comprising bis-glyceryl phosphate (polar fraction) in said non-human organism or in the culture medium surrounding said non-human organism.

[97847] A further embodiment of the present invention relates to a process for the production of triacylglycerol, which comprises
[97848] (a) increasing or generating one or more activities selected from the group consisting of threonine synthase in an organelle, preferably in plastids or mitochondria, especially in plastids, of a non-human organism or a part thereof, preferably a microorganism, a plant cell, a plant or a part thereof, as compared to a corresponding non-transformed wild type non-human organism or a part thereof; and
[97849] (b) growing the non-human organism or a part thereof under conditions which permit the production of triacylglycerol or a composition comprising triacylglycerol in said non-human organism or in the culture medium surrounding said non-human organism.

[97850] A further embodiment of the present invention relates to a process for the production of glycerol phosphate (lipid fraction), which comprises
[97851] (a) increasing or generating one or more activities selected from the group consisting of b0050-protein in an organelle, preferably in plastids or mitochondria, especially in plastids, of a non-human organism or a part thereof, preferably a microorganism, a plant cell, a plant or a part thereof, as compared to a corresponding non-transformed wild type non-human organism or a part thereof; and
[97852] (b) growing the non-human organism or a part thereof under conditions which permit the production of glycerol phosphate (lipid fraction) or a composition comprising glycerol phosphate (lipid fraction) in said non-human organism or in the culture medium surrounding said non-human organism.

[97853] A further embodiment of the present invention relates to a process for the production of bis-glyceryl phosphate (polar fraction), which comprises
[97854] (a) increasing or generating one or more activities selected from the group consisting of serine protease in an organelle, preferably in plastids or mitochondria, especially in plastids, of a non-human organism or a part thereof, preferably a microorganism, a plant cell, a plant or a part thereof, as compared to a corresponding non-transformed wild type non-human organism or a part thereof; and
[97855] (b) growing the non-human organism or a part thereof under conditions which permit the production of bis-glyceryl phosphate (polar fraction) or a composition comprising bis-glyceryl phosphate (polar fraction) in said non-human organism or in the culture medium surrounding said non-human organism.

[97856] A further embodiment of the present invention relates to a process for the production of triacylglycerol, which comprises
[97857] (a) increasing or generating one or more activities selected from the group consisting of serine protease in an organelle, preferably in plastids or mitochondria, especially in plastids, of a non-human organism or a part thereof, preferably a microorganism, a plant cell, a plant or a part thereof, as compared to a corresponding non-transformed wild type non-human organism or a part thereof; and
[97858] (b) growing the non-human organism or a part thereof under conditions which permit the production of triacylglycerol or a composition comprising triacylglycerol in said non-human organism or in the culture medium surrounding said non-human organism.

[97859] A further embodiment of the present invention relates to a process for the production of bis-glyceryl phosphate (polar fraction), which comprises
[97860] (a) increasing or generating one or more activities selected from the group consisting of ATP-binding component of a transport system in an organelle, preferably in plastids or mitochondria, especially in plastids, of a non-human organism or a part thereof, preferably a microorganism, a plant cell, a plant or a part thereof, as compared to a corresponding non-transformed wild type non-human organism or a part thereof; and
[97861] (b) growing the non-human organism or a part thereof under conditions which permit the production of bis-glyceryl phosphate (polar fraction) or a composition comprising bis-glyceryl phosphate (polar fraction) in said non-human organism or in the culture medium surrounding said non-human organism.

[97862] A further embodiment of the present invention relates to a process for the production of glycerol (lipid fraction), which comprises
[97863] (a) increasing or generating one or more activities selected from the group consisting of b0518-protein in an organelle, preferably in plastids or mitochondria, especially in plastids, of a non-human organism or a part thereof, preferably a microorganism, a plant cell, a plant or a part thereof, as compared to a corresponding non-transformed wild type non-human organism or a part thereof; and
[97864] (b) growing the non-human organism or a part thereof under conditions which permit the production of glycerol (lipid fraction) or a composition comprising glycerol (lipid fraction) in said non-human organism or in the culture medium surrounding said non-human organism.

[97865] A further embodiment of the present invention relates to a process for the production of bis-glyceryl phosphate (polar fraction), which comprises
[97866] (a) increasing or generating one or more activities selected from the group consisting of phosphoglyceromutase in an organelle, preferably in plastids or mitochondria, especially in plastids, of a non-human organism or a part thereof, preferably a microorganism, a plant cell, a plant or a part thereof, as compared to a corresponding non-transformed wild type non-human organism or a part thereof; and
[97867] (b) growing the non-human organism or a part thereof under conditions which permit the production of bis-glyceryl phosphate (polar fraction) or a composition comprising bis-glyceryl phosphate (polar fraction) in said non-human organism or in the culture medium surrounding said non-human organism.

[97868] A further embodiment of the present invention relates to a process for the production of glycerol (polar fraction), which comprises
[97869] (a) increasing or generating one or more activities selected from the group consisting of putrescine transport system permease protein in an organelle, preferably in plastids or mitochondria, especially in plastids, of a non-human organism or a part thereof, preferably a microorganism, a plant cell, a plant or a part thereof, as compared to a corresponding non-transformed wild type non-human organism or a part thereof; and
[97870] (b) growing the non-human organism or a part thereof under conditions which permit the production of glycerol (polar fraction) or a composition comprising glycerol (polar fraction) in said non-human organism or in the culture medium surrounding said non-human organism.

[97871] A further embodiment of the present invention relates to a process for the production of glycerol (lipid fraction), which comprises
[97872] (a) increasing or generating one or more activities selected from the group consisting of methylglyoxal synthase in an organelle, preferably in plastids or mitochondria, especially in plastids, of a non-human organism or a part thereof, preferably a microorganism, a plant cell, a plant or a part thereof, as compared to a corresponding non-transformed wild type non-human organism or a part thereof; and
[97873] (b) growing the non-human organism or a part thereof under conditions which permit the production of glycerol (lipid fraction) or a composition comprising glycerol (lipid fraction) in said non-human organism or in the culture medium surrounding said non-human organism.

[97874] A further embodiment of the present invention relates to a process for the production of glycerol (polar fraction), which comprises
[97875] (a) increasing or generating one or more activities selected from the group consisting of methylglyoxal synthase in an organelle, preferably in plastids or mitochondria, especially in plastids, of a non-human organism or a part thereof, preferably a microorganism, a plant cell, a plant or a part thereof, as compared to a corresponding non-transformed wild type non-human organism or a part thereof; and
[97876] (b) growing the non-human organism or a part thereof under conditions which permit the production of glycerol (polar fraction) or a composition comprising glycerol (polar fraction) in said non-human organism or in the culture medium surrounding said non-human organism.

[97877] A further embodiment of the present invention relates to a process for the production of bis-glyceryl phosphate (polar fraction), which comprises
[97878] (a) increasing or generating one or more activities selected from the group consisting of b0970-protein in an organelle, preferably in plastids or mitochondria, especially in plastids, of a non-human organism or a part thereof, preferably a microorganism, a plant cell, a plant or a part thereof, as compared to a corresponding non-transformed wild type non-human organism or a part thereof; and
[97879] (b) growing the non-human organism or a part thereof under conditions which permit the production of bis-glyceryl phosphate (polar fraction) or a composition comprising bis-glyceryl phosphate (polar fraction) in said non-human organism or in the culture medium surrounding said non-human organism.

[97880] A further embodiment of the present invention relates to a process for the production of bis-glyceryl phosphate (polar fraction), which comprises
[97881] (a) increasing or generating one or more activities selected from the group consisting of b1003-protein in an organelle, preferably in plastids or mitochondria, especially in plastids, of a non-human organism or a part thereof, preferably a microorganism, a plant cell, a plant or a part thereof, as compared to a corresponding non-transformed wild type non-human organism or a part thereof; and
[97882] (b) growing the non-human organism or a part thereof under conditions which permit the production of bis-glyceryl phosphate (polar fraction) or a composition comprising bis-glyceryl phosphate (polar fraction) in said non-human organism or in the culture medium surrounding said non-human organism.

[97883] A further embodiment of the present invention relates to a process for the production of bis-glyceryl phosphate (polar fraction), which comprises
[97884] (a) increasing or generating one or more activities selected from the group consisting of 3-oxoacyl-[acyl-carrier-protein] synthase in an organelle, preferably in plastids or mitochondria, especially in plastids, of a non-human organism or a part thereof, preferably a microorganism, a plant cell, a plant or a part thereof, as compared to a corresponding non-transformed wild type non-human organism or a part thereof; and
[97885] (b) growing the non-human organism or a part thereof under conditions which permit the production of bis-glyceryl phosphate (polar fraction) or a composition comprising bis-glyceryl phosphate (polar fraction) in said non-human organism or in the culture medium surrounding said non-human organism.

[97886] A further embodiment of the present invention relates to a process for the production of glycerol (lipid fraction), which comprises
[97887] (a) increasing or generating one or more activities selected from the group consisting of sodium/proton antiporter in an organelle, preferably in plastids or mitochondria, especially in plastids, of a non-human organism or a part thereof, preferably a microorganism, a plant cell, a plant or a part thereof, as compared to a corresponding non-transformed wild type non-human organism or a part thereof; and
[97888] (b) growing the non-human organism or a part thereof under conditions which permit the production of glycerol (lipid fraction) or a composition comprising glycerol (lipid fraction) in said non-human organism or in the culture medium surrounding said non-human organism.

[97889] A further embodiment of the present invention relates to a process for the production of triacylglycerol, which comprises
[97890] (a) increasing or generating one or more activities selected from the group consisting of b1234-protein in an organelle, preferably in plastids or mitochondria, especially in plastids, of a non-human organism or a part thereof, preferably a microorganism, a plant cell, a plant or a part thereof, as compared to a corresponding non-transformed wild type non-human organism or a part thereof; and
[97891] (b) growing the non-human organism or a part thereof under conditions which permit the production of triacylglycerol or a composition comprising triacylglycerol in said non-human organism or in the culture medium surrounding said non-human organism.

[97892] A further embodiment of the present invention relates to a process for the production of glycerol (lipid fraction), which comprises
[97893] (a) increasing or generating one or more activities selected from the group consisting of cardiolipin synthase in an organelle, preferably in plastids or mitochondria, especially in plastids, of a non-human organism or a part thereof, preferably a microorganism, a plant cell, a plant or a part thereof, as compared to a corresponding non-transformed wild type non-human organism or a part thereof; and
[97894] (b) growing the non-human organism or a part thereof under conditions which permit the production of glycerol (lipid fraction) or a composition comprising glycerol (lipid fraction) in said non-human organism or in the culture medium surrounding said non-human organism.

[97895] A further embodiment of the present invention relates to a process for the production of glycerol phosphate (lipid fraction), which comprises
[97896] (a) increasing or generating one or more activities selected from the group consisting of b1330-protein in an organelle, preferably in plastids or mitochondria, especially in plastids, of a non-human organism or a part thereof, preferably a microorganism, a plant cell, a plant or a part thereof, as compared to a corresponding non-transformed wild type non-human organism or a part thereof; and
[97897] (b) growing the non-human organism or a part thereof under conditions which permit the production of glycerol phosphate (lipid fraction) or a composition comprising glycerol phosphate (lipid fraction) in said non-human organism or in the culture medium surrounding said non-human organism.

[97898] A further embodiment of the present invention relates to a process for the production of bis-glyceryl phosphate (polar fraction), which comprises
[97899] (a) increasing or generating one or more activities selected from the group consisting of ATP-dependent RNA helicase in an organelle, preferably in plastids or mitochondria, especially in plastids, of a non-human organism or a part thereof, preferably a microorganism, a plant cell, a plant or a part thereof, as compared to a corresponding non-transformed wild type non-human organism or a part thereof; and
[97900] (b) growing the non-human organism or a part thereof under conditions which permit the production of bis-glyceryl phosphate (polar fraction) or a composition comprising bis-glyceryl phosphate (polar fraction) in said non-human organism or in the culture medium surrounding said non-human organism.

[97901] A further embodiment of the present invention relates to a process for the production of bis-glyceryl phosphate (polar fraction), which comprises
[97902] (a) increasing or generating one or more activities selected from the group consisting of phenylacetic acid degradation protein in an organelle, preferably in plastids or mitochondria, especially in plastids, of a non-human organism or a part thereof, preferably a microorganism, a plant cell, a plant or a part thereof, as compared to a corresponding non-transformed wild type non-human organism or a part thereof; and
[97903] (b) growing the non-human organism or a part thereof under conditions which permit the production of bis-glyceryl phosphate (polar fraction) or a composition comprising bis-glyceryl phosphate (polar fraction) in said non-human organism or in the culture medium surrounding said non-human organism.

[97904] A further embodiment of the present invention relates to a process for the production of bis-glyceryl phosphate (polar fraction), which comprises
[97905] (a) increasing or generating one or more activities selected from the group consisting of lipoprotein precursor in an organelle, preferably in plastids or mitochondria, especially in plastids, of a non-human organism or a part thereof, preferably a microorganism, a plant cell, a plant or a part thereof, as compared to a corresponding non-transformed wild type non-human organism or a part thereof; and
[97906] (b) growing the non-human organism or a part thereof under conditions which permit the production of bis-glyceryl phosphate (polar fraction) or a composition comprising bis-glyceryl phosphate (polar fraction) in said non-human organism or in the culture medium surrounding said non-human organism.

[97907] A further embodiment of the present invention relates to a process for the production of bis-glyceryl phosphate (polar fraction), which comprises
[97908] (a) increasing or generating one or more activities selected from the group consisting of b1522-protein in an organelle, preferably in plastids or mitochondria, especially in plastids, of a non-human organism or a part thereof, preferably a microorganism, a plant cell, a plant or a part thereof, as compared to a corresponding non-transformed wild type non-human organism or a part thereof; and
[97909] (b) growing the non-human organism or a part thereof under conditions which permit the production of bis-glyceryl phosphate (polar fraction) or a composition comprising bis-glyceryl phosphate (polar fraction) in said non-human organism or in the culture medium surrounding said non-human organism.

[97910] A further embodiment of the present invention relates to a process for the production of bis-glyceryl phosphate (polar fraction), which comprises
[97911] (a) increasing or generating one or more activities selected from the group consisting of lysozyme in an organelle, preferably in plastids or mitochondria, especially in plastids, of a non-human organism or a part thereof, preferably a microorganism, a plant cell, a plant or a part thereof, as compared to a corresponding non-transformed wild type non-human organism or a part thereof; and
[97912] (b) growing the non-human organism or a part thereof under conditions which permit the production of bis-glyceryl phosphate (polar fraction) or a composition comprising bis-glyceryl phosphate (polar fraction) in said non-human organism or in the culture medium surrounding said non-human organism.

[97913] A further embodiment of the present invention relates to a process for the production of bis-glyceryl phosphate (polar fraction), which comprises
[97914] (a) increasing or generating one or more activities selected from the group consisting of b1556-protein in an organelle, preferably in plastids or mitochondria, especially in plastids, of a non-human organism or a part thereof, preferably a microorganism, a plant cell, a plant or a part thereof, as compared to a corresponding non-transformed wild type non-human organism or a part thereof; and
[97915] (b) growing the non-human organism or a part thereof under conditions which permit the production of bis-glyceryl phosphate (polar fraction) or a composition comprising bis-glyceryl phosphate (polar fraction) in said non-human organism or in the culture medium surrounding said non-human organism.

[97916] A further embodiment of the present invention relates to a process for the production of triacylglycerol, which comprises
[97917] (a) increasing or generating one or more activities selected from the group consisting of b1583-protein in an organelle, preferably in plastids or mitochondria, especially in plastids, of a non-human organism or a part thereof, preferably a microorganism, a plant cell, a plant or a part thereof, as compared to a corresponding non-transformed wild type non-human organism or a part thereof; and
[97918] (b) growing the non-human organism or a part thereof under conditions which permit the production of triacylglycerol or a composition comprising triacylglycerol in said non-human organism or in the culture medium surrounding said non-human organism.

[97919] A further embodiment of the present invention relates to a process for the production of bis-glyceryl phosphate (polar fraction), which comprises
[97920] (a) increasing or generating one or more activities selected from the group consisting of Fe—S subunit of oxidoreductase in an organelle, preferably in plastids or mitochondria, especially in plastids, of a non-human organism or a part thereof, preferably a microorganism, a plant cell, a plant or a part thereof, as compared to a corresponding non-transformed wild type non-human organism or a part thereof; and
[97921] (b) growing the non-human organism or a part thereof under conditions which permit the production of bis-glyceryl phosphate (polar fraction) or a composition comprising bis-glyceryl phosphate (polar fraction) in said non-human organism or in the culture medium surrounding said non-human organism.

[97922] A further embodiment of the present invention relates to a process for the production of glycerol (lipid fraction), which comprises
[97923] (a) increasing or generating one or more activities selected from the group consisting of acid shock protein in an organelle, preferably in plastids or mitochondria, especially in plastids, of a non-human organism or a part thereof, preferably a microorganism, a plant cell, a plant or a part thereof, as compared to a corresponding non-transformed wild type non-human organism or a part thereof; and
[97924] (b) growing the non-human organism or a part thereof under conditions which permit the production of glycerol (lipid fraction) or a composition comprising glycerol (lipid fraction) in said non-human organism or in the culture medium surrounding said non-human organism.

[97925] A further embodiment of the present invention relates to a process for the production of bis-glyceryl phosphate (polar fraction), which comprises
[97926] (a) increasing or generating one or more activities selected from the group consisting of b1670-protein in an organelle, preferably in plastids or mitochondria, especially in plastids, of a non-human organism or a part thereof, preferably a microorganism, a plant cell, a plant or a part thereof, as compared to a corresponding non-transformed wild type non-human organism or a part thereof; and
[97927] (b) growing the non-human organism or a part thereof under conditions which permit the production of bis-glyceryl phosphate (polar fraction) or a composition comprising bis-glyceryl phosphate (polar fraction) in said non-human organism or in the culture medium surrounding said non-human organism.

[97928] A further embodiment of the present invention relates to a process for the production of bis-glyceryl phosphate (polar fraction), which comprises
[97929] (a) increasing or generating one or more activities selected from the group consisting of b1672-protein in an organelle, preferably in plastids or mitochondria, especially in plastids, of a non-human organism or a part thereof, preferably a microorganism, a plant cell, a plant or a part thereof, as compared to a corresponding non-transformed wild type non-human organism or a part thereof; and
[97930] (b) growing the non-human organism or a part thereof under conditions which permit the production of bis-glyceryl phosphate (polar fraction) or a composition comprising bis-glyceryl phosphate (polar fraction) in said non-human organism or in the culture medium surrounding said non-human organism.

[97931] A further embodiment of the present invention relates to a process for the production of triacylglycerol, which comprises
[97932] (a) increasing or generating one or more activities selected from the group consisting of b1703-protein in an organelle, preferably in plastids or mitochondria, especially in plastids, of a non-human organism or a part thereof, preferably a microorganism, a plant cell, a plant or a part thereof, as compared to a corresponding non-transformed wild type non-human organism or a part thereof; and
[97933] (b) growing the non-human organism or a part thereof under conditions which permit the production of triacylglycerol or a composition comprising triacylglycerol in said non-human organism or in the culture medium surrounding said non-human organism.

[97934] A further embodiment of the present invention relates to a process for the production of bis-glyceryl phosphate (polar fraction), which comprises
[97935] (a) increasing or generating one or more activities selected from the group consisting of phosphotransferase system component in an organelle, preferably in plastids or mitochondria, especially in plastids, of a non-human organism or a part thereof, preferably a microorganism, a plant cell, a plant or a part thereof, as compared to a corresponding non-transformed wild type non-human organism or a part thereof; and
[97936] (b) growing the non-human organism or a part thereof under conditions which permit the production of bis-glyceryl phosphate (polar fraction) or a composition comprising bis-glyceryl phosphate (polar fraction) in said non-human organism or in the culture medium surrounding said non-human organism.

[97937] A further embodiment of the present invention relates to a process for the production of triacylglycerol, which comprises
[97938] (a) increasing or generating one or more activities selected from the group consisting of B1795-protein in an organelle, preferably in plastids or mitochondria, especially in plastids, of a non-human organism or a part thereof, preferably a microorganism, a plant cell, a plant or a part thereof, as compared to a corresponding non-transformed wild type non-human organism or a part thereof; and
[97939] (b) growing the non-human organism or a part thereof under conditions which permit the production of triacylglycerol or a composition comprising triacylglycerol in said non-human organism or in the culture medium surrounding said non-human organism.

[97940] A further embodiment of the present invention relates to a process for the production of glycerol-3-phosphate (polar fraction), which comprises
[97941] (a) increasing or generating one or more activities selected from the group consisting of L-serine dehydratase in an organelle, preferably in plastids or mitochondria, especially in plastids, of a non-human organism or a part thereof, preferably a microorganism, a plant cell, a plant or a part thereof, as compared to a corresponding non-transformed wild type non-human organism or a part thereof; and
[97942] (b) growing the non-human organism or a part thereof under conditions which permit the production of glycerol-3-phosphate (polar fraction) or a composition comprising glycerol-3-phosphate (polar fraction) in said non-human organism or in the culture medium surrounding said non-human organism.

[97943] A further embodiment of the present invention relates to a process for the production of glycerol phosphate (lipid fraction), which comprises
[97944] (a) increasing or generating one or more activities selected from the group consisting of b1837-protein in an organelle, preferably in plastids or mitochondria, especially in plastids, of a non-human organism or a part thereof, preferably a microorganism, a plant cell, a plant or a part thereof, as compared to a corresponding non-transformed wild type non-human organism or a part thereof; and
[97945] (b) growing the non-human organism or a part thereof under conditions which permit the production of glycerol phosphate (lipid fraction) or a composition comprising glycerol phosphate (lipid fraction) in said non-human organism or in the culture medium surrounding said non-human organism.

[97946] A further embodiment of the present invention relates to a process for the production of triacylglycerol, which comprises
[97947] (a) increasing or generating one or more activities selected from the group consisting of trehalose-phosphatase in an organelle, preferably in plastids or mitochondria, especially in plastids, of a non-human organism or a part thereof, preferably a microorganism, a plant cell, a plant or a part thereof, as compared to a corresponding non-transformed wild type non-human organism or a part thereof; and
[97948] (b) growing the non-human organism or a part thereof under conditions which permit the production of triacylglycerol or a composition comprising triacylglycerol in said non-human organism or in the culture medium surrounding said non-human organism.

[97949] A further embodiment of the present invention relates to a process for the production of glycerol (lipid fraction), which comprises
[97950] (a) increasing or generating one or more activities selected from the group consisting of imidazole glycerol phosphate synthase subunit in an organelle, preferably in plastids or mitochondria, especially in plastids, of a non-human organism or a part thereof, preferably a microorganism, a plant cell, a plant or a part thereof, as compared to a corresponding non-transformed wild type non-human organism or a part thereof; and
[97951] (b) growing the non-human organism or a part thereof under conditions which permit the production of glycerol (lipid fraction) or a composition comprising glycerol (lipid fraction) in said non-human organism or in the culture medium surrounding said non-human organism.

[97952] A further embodiment of the present invention relates to a process for the production of glycerol phosphate (lipid fraction), which comprises
[97953] (a) increasing or generating one or more activities selected from the group consisting of b2032-protein in an organelle, preferably in plastids or mitochondria, especially in plastids, of a non-human organism or a part thereof, preferably a microorganism, a plant cell, a plant or a part thereof, as compared to a corresponding non-transformed wild type non-human organism or a part thereof; and
[97954] (b) growing the non-human organism or a part thereof under conditions which permit the production of glycerol phosphate (lipid fraction) or a composition comprising glycerol phosphate (lipid fraction) in said non-human organism or in the culture medium surrounding said non-human organism.

[97955] A further embodiment of the present invention relates to a process for the production of glycerol (lipid fraction), which comprises
[97956] (a) increasing or generating one or more activities selected from the group consisting of b2099-protein in an organelle, preferably in plastids or mitochondria, especially in plastids, of a non-human organism or a part thereof, preferably a microorganism, a plant cell, a plant or a part thereof, as compared to a corresponding non-transformed wild type non-human organism or a part thereof; and
[97957] (b) growing the non-human organism or a part thereof under conditions which permit the production of glycerol (lipid fraction) or a composition comprising glycerol (lipid fraction) in said non-human organism or in the culture medium surrounding said non-human organism.

[97958] A further embodiment of the present invention relates to a process for the production of bis-glyceryl phosphate (polar fraction), which comprises
[97959] (a) increasing or generating one or more activities selected from the group consisting of b2139-protein in an organelle, preferably in plastids or mitochondria, especially in plastids, of a non-human organism or a part thereof, preferably a microorganism, a plant cell, a plant or a part thereof, as compared to a corresponding non-transformed wild type non-human organism or a part thereof; and
[97960] (b) growing the non-human organism or a part thereof under conditions which permit the production of bis-glyceryl phosphate (polar fraction) or a composition comprising bis-glyceryl phosphate (polar fraction) in said non-human organism or in the culture medium surrounding said non-human organism.

[97961] A further embodiment of the present invention relates to a process for the production of glycerol (lipid fraction), which comprises
[97962] (a) increasing or generating one or more activities selected from the group consisting of ABC transporter permease protein in an organelle, preferably in plastids or mitochondria, especially in plastids, of a non-human organism or a part thereof, preferably a microorganism, a plant cell, a plant or a part thereof, as compared to a corresponding non-transformed wild type non-human organism or a part thereof; and
[97963] (b) growing the non-human organism or a part thereof under conditions which permit the production of glycerol (lipid fraction) or a composition comprising glycerol (lipid fraction) in said non-human organism or in the culture medium surrounding said non-human organism.

[97964] A further embodiment of the present invention relates to a process for the production of glycerol phosphate (lipid fraction), which comprises
[97965] (a) increasing or generating one or more activities selected from the group consisting of ion-transport protein in an organelle, preferably in plastids or mitochondria, especially in plastids, of a non-human organism or a part thereof, preferably a microorganism, a plant cell, a plant or a part thereof, as compared to a corresponding non-transformed wild type non-human organism or a part thereof; and
[97966] (b) growing the non-human organism or a part thereof under conditions which permit the production of glycerol phosphate (lipid fraction) or a composition comprising glycerol phosphate (lipid fraction) in said non-human organism or in the culture medium surrounding said non-human organism.

[97967] A further embodiment of the present invention relates to a process for the production of bis-glyceryl phosphate (polar fraction), which comprises
[97968] (a) increasing or generating one or more activities selected from the group consisting of b2399-protein in an organelle, preferably in plastids or mitochondria, especially in plastids, of a non-human organism or a part thereof, preferably a microorganism, a plant cell, a plant or a part thereof, as compared to a corresponding non-transformed wild type non-human organism or a part thereof; and
[97969] (b) growing the non-human organism or a part thereof under conditions which permit the production of bis-glyceryl phosphate (polar fraction) or a composition comprising bis-glyceryl phosphate (polar fraction) in said non-human organism or in the culture medium surrounding said non-human organism.

[97970] A further embodiment of the present invention relates to a process for the production of glycerol (lipid fraction), which comprises
[97971] (a) increasing or generating one or more activities selected from the group consisting of b2399-protein in an organelle, preferably in plastids or mitochondria, especially in plastids, of a non-human organism or a part thereof, preferably a microorganism, a plant cell, a plant or a part thereof, as compared to a corresponding non-transformed wild type non-human organism or a part thereof; and
[97972] (b) growing the non-human organism or a part thereof under conditions which permit the production of glycerol (lipid fraction) or a composition comprising glycerol (lipid fraction) in said non-human organism or in the culture medium surrounding said non-human organism.

[97973] A further embodiment of the present invention relates to a process for the production of glycerol (lipid fraction), which comprises
[97974] (a) increasing or generating one or more activities selected from the group consisting of ethanolamine utilization protein in an organelle, preferably in plastids or mitochondria, especially in plastids, of a non-human organism or a part thereof, preferably a microorganism, a plant cell, a plant or a part thereof, as compared to a corresponding non-transformed wild type non-human organism or a part thereof; and
[97975] (b) growing the non-human organism or a part thereof under conditions which permit the production of glycerol (lipid fraction) or a composition comprising glycerol (lipid fraction) in said non-human organism or in the culture medium surrounding said non-human organism.

[97976] A further embodiment of the present invention relates to a process for the production of glycerol phosphate (lipid fraction), which comprises
[97977] (a) increasing or generating one or more activities selected from the group consisting of ethanolamine utilization protein in an organelle, preferably in plastids or mitochondria, especially in plastids, of a non-human organism or a part thereof, preferably a microorganism, a plant cell, a plant or a part thereof, as compared to a corresponding non-transformed wild type non-human organism or a part thereof; and
[97978] (b) growing the non-human organism or a part thereof under conditions which permit the production of glycerol phosphate (lipid fraction) or a composition comprising glycerol phosphate (lipid fraction) in said non-human organism or in the culture medium surrounding said non-human organism.

[97979] A further embodiment of the present invention relates to a process for the production of glycerol (lipid fraction), which comprises
[97980] (a) increasing or generating one or more activities selected from the group consisting of ethanolamine utilization protein in an organelle, preferably in plastids or mitochondria, especially in plastids, of a non-human organism or a part thereof, preferably a microorganism, a plant cell, a plant or a part thereof, as compared to a corresponding non-transformed wild type non-human organism or a part thereof; and
[97981] (b) growing the non-human organism or a part thereof under conditions which permit the production of glycerol (lipid fraction) or a composition comprising glycerol (lipid fraction) in said non-human organism or in the culture medium surrounding said non-human organism.

[97982] A further embodiment of the present invention relates to a process for the production of bis-glyceryl phosphate (polar fraction), which comprises
[97983] (a) increasing or generating one or more activities selected from the group consisting of b2474-protein in an organelle, preferably in plastids or mitochondria, especially in plastids, of a non-human organism or a part thereof, preferably a microorganism, a plant cell, a plant or a part thereof, as compared to a corresponding non-transformed wild type non-human organism or a part thereof; and
[97984] (b) growing the non-human organism or a part thereof under conditions which permit the production of bis-glyceryl phosphate (polar fraction) or a composition comprising bis-glyceryl phosphate (polar fraction) in said non-human organism or in the culture medium surrounding said non-human organism.

[97985] A further embodiment of the present invention relates to a process for the production of glycerol (lipid fraction), which comprises
[97986] (a) increasing or generating one or more activities selected from the group consisting of b2474-protein in an organelle, preferably in plastids or mitochondria, especially in plastids, of a non-human organism or a part thereof, preferably a microorganism, a plant cell, a plant or a part thereof, as compared to a corresponding non-transformed wild type non-human organism or a part thereof; and
[97987] (b) growing the non-human organism or a part thereof under conditions which permit the production of glycerol (lipid fraction) or a composition comprising glycerol (lipid fraction) in said non-human organism or in the culture medium surrounding said non-human organism.

[97988] A further embodiment of the present invention relates to a process for the production of glycerol (lipid fraction), which comprises
[97989] (a) increasing or generating one or more activities selected from the group consisting of putative transport system permease protein in an organelle, preferably in plastids or mitochondria, especially in plastids, of a non-human organism or a part thereof, preferably a microorganism, a plant cell, a plant or a part thereof, as compared to a corresponding non-transformed wild type non-human organism or a part thereof; and
[97990] (b) growing the non-human organism or a part thereof under conditions which permit the production of glycerol (lipid fraction) or a composition comprising glycerol (lipid fraction) in said non-human organism or in the culture medium surrounding said non-human organism.

[97991] A further embodiment of the present invention relates to a process for the production of glycerol phosphate (lipid fraction), which comprises
[97992] (a) increasing or generating one or more activities selected from the group consisting of putative transport system permease protein in an organelle, preferably in plastids or mitochondria, especially in plastids, of a non-human organism or a part thereof, preferably a microorganism, a plant cell, a plant or a part thereof, as compared to a corresponding non-transformed wild type non-human organism or a part thereof; and
[97993] (b) growing the non-human organism or a part thereof under conditions which permit the production of glycerol phosphate (lipid fraction) or a composition comprising glycerol phosphate (lipid fraction) in said non-human organism or in the culture medium surrounding said non-human organism.

[97994] A further embodiment of the present invention relates to a process for the production of bis-glyceryl phosphate (polar fraction), which comprises
[97995] (a) increasing or generating one or more activities selected from the group consisting of b2613-protein in an organelle, preferably in plastids or mitochondria, especially in plastids, of a non-human organism or a part thereof, preferably a microorganism, a plant cell, a plant or a part thereof, as compared to a corresponding non-transformed wild type non-human organism or a part thereof; and
[97996] (b) growing the non-human organism or a part thereof under conditions which permit the production of bis-glyceryl phosphate (polar fraction) or a composition comprising bis-glyceryl phosphate (polar fraction) in said non-human organism or in the culture medium surrounding said non-human organism.

[97997] A further embodiment of the present invention relates to a process for the production of glycerol (polar fraction), which comprises
[97998] (a) increasing or generating one or more activities selected from the group consisting of transcriptional regulator in an organelle, preferably in plastids or mitochondria, especially in plastids, of a non-human organism or a part thereof, preferably a microorganism, a plant cell, a plant or a part thereof, as compared to a corresponding non-transformed wild type non-human organism or a part thereof; and
[97999] (b) growing the non-human organism or a part thereof under conditions which permit the production of glycerol (polar fraction) or a composition comprising glycerol (polar fraction) in said non-human organism or in the culture medium surrounding said non-human organism.

[98000] A further embodiment of the present invention relates to a process for the production of glycerol (lipid fraction), which comprises
[98001] (a) increasing or generating one or more activities selected from the group consisting of b2673-protein in an organelle, preferably in plastids or mitochondria, especially in plastids, of a non-human organism or a part thereof, preferably a microorganism, a plant cell, a plant or a part thereof, as compared to a corresponding non-transformed wild type non-human organism or a part thereof; and
[98002] (b) growing the non-human organism or a part thereof under conditions which permit the production of glycerol (lipid fraction) or a composition comprising glycerol (lipid fraction) in said non-human organism or in the culture medium surrounding said non-human organism.

[98003] A further embodiment of the present invention relates to a process for the production of glycerol phosphate (lipid fraction), which comprises
[98004] (a) increasing or generating one or more activities selected from the group consisting of b2673-protein in an organelle, preferably in plastids or mitochondria, especially in plastids, of a non-human organism or a part thereof, preferably a microorganism, a plant cell, a plant or a part thereof, as compared to a corresponding non-transformed wild type non-human organism or a part thereof; and
[98005] (b) growing the non-human organism or a part thereof under conditions which permit the production of glycerol phosphate (lipid fraction) or a composition comprising glycerol phosphate (lipid fraction) in said non-human organism or in the culture medium surrounding said non-human organism.

[98006] A further embodiment of the present invention relates to a process for the production of bis-glyceryl phosphate (polar fraction), which comprises
[98007] (a) increasing or generating one or more activities selected from the group consisting of murein transglycosylase in an organelle, preferably in plastids or mitochondria, especially in plastids, of a non-human organism or a part thereof, preferably a microorganism, a plant cell, a plant or a part thereof, as compared to a corresponding non-transformed wild type non-human organism or a part thereof; and
[98008] (b) growing the non-human organism or a part thereof under conditions which permit the production of bis-glyceryl phosphate (polar fraction) or a composition comprising bis-glyceryl phosphate (polar fraction) in said non-human organism or in the culture medium surrounding said non-human organism.

[98009] A further embodiment of the present invention relates to a process for the production of triacylglycerol, which comprises
[98010] (a) increasing or generating one or more activities selected from the group consisting of transcriptional regulator in an organelle, preferably in plastids or mitochondria, especially in plastids, of a non-human organism or a part thereof, preferably a microorganism, a plant cell, a plant or a part thereof, as compared to a corresponding non-transformed wild type non-human organism or a part thereof; and
[98011] (b) growing the non-human organism or a part thereof under conditions which permit the production of triacylglycerol or a composition comprising triacylglycerol in said non-human organism or in the culture medium surrounding said non-human organism.

[98012] A further embodiment of the present invention relates to a process for the production of glycerol (lipid fraction), which comprises
[98013] (a) increasing or generating one or more activities selected from the group consisting of 2-C-methyl-D-erythritol 4-phosphate cytidylyltransferase in an organelle, preferably in plastids or mitochondria, especially in plastids, of a non-human organism or a part thereof, preferably a microorganism, a plant cell, a plant or a part thereof, as compared to a corresponding non-transformed wild type non-human organism or a part thereof; and
[98014] (b) growing the non-human organism or a part thereof under conditions which permit the production of glycerol (lipid fraction) or a composition comprising glycerol (lipid fraction) in said non-human organism or in the culture medium surrounding said non-human organism.

[98015] A further embodiment of the present invention relates to a process for the production of triacylglycerol, which comprises
[98016] (a) increasing or generating one or more activities selected from the group consisting of amino-acid acetyltransferase in an organelle, preferably in plastids or mitochondria, especially in plastids, of a non-human organism or a part thereof, preferably a microorganism, a plant cell, a plant or a part thereof, as compared to a corresponding non-transformed wild type non-human organism or a part thereof; and
[98017] (b) growing the non-human organism or a part thereof under conditions which permit the production of triacylglycerol or a composition comprising triacylglycerol in said non-human organism or in the culture medium surrounding said non-human organism.

[98018] A further embodiment of the present invention relates to a process for the production of bis-glyceryl phosphate (polar fraction), which comprises
[98019] (a) increasing or generating one or more activities selected from the group consisting of b3083-protein in an organelle, preferably in plastids or mitochondria, especially in plastids, of a non-human organism or a part thereof, preferably a microorganism, a plant cell, a plant or a part thereof, as compared to a corresponding non-transformed wild type non-human organism or a part thereof; and
[98020] (b) growing the non-human organism or a part thereof under conditions which permit the production of bis-glyceryl phosphate (polar fraction) or a composition comprising bis-glyceryl phosphate (polar fraction) in said non-human organism or in the culture medium surrounding said non-human organism.

[98021] A further embodiment of the present invention relates to a process for the production of bis-glyceryl phosphate (polar fraction), which comprises
[98022] (a) increasing or generating one or more activities selected from the group consisting of threonine/serine transporter in an organelle, preferably in plastids or mitochondria, especially in plastids, of a non-human organism or a part thereof, preferably a microorganism, a plant cell, a plant or a part thereof, as compared to a corresponding non-transformed wild type non-human organism or a part thereof; and
[98023] (b) growing the non-human organism or a part thereof under conditions which permit the production of bis-glyceryl phosphate (polar fraction) or a composition comprising bis-glyceryl phosphate (polar fraction) in said non-human organism or in the culture medium surrounding said non-human organism.

[98024] A further embodiment of the present invention relates to a process for the production of bis-glyceryl phosphate (polar fraction), which comprises
[98025] (a) increasing or generating one or more activities selected from the group consisting of b3160-protein in an organelle, preferably in plastids or mitochondria, especially in plastids, of a non-human organism or a part thereof, preferably a microorganism, a plant cell, a plant or a part thereof, as compared to a corresponding non-transformed wild type non-human organism or a part thereof; and
[98026] (b) growing the non-human organism or a part thereof under conditions which permit the production of bis-glyceryl phosphate (polar fraction) or a composition comprising bis-glyceryl phosphate (polar fraction) in said non-human organism or in the culture medium surrounding said non-human organism.

[98027] A further embodiment of the present invention relates to a process for the production of bis-glyceryl phosphate (polar fraction), which comprises
[98028] (a) increasing or generating one or more activities selected from the group consisting of argininosuccinate synthetase in an organelle, preferably in plastids or mitochondria, especially in plastids, of a non-human organism or a part thereof, preferably a microorganism, a plant cell, a plant or a part thereof, as compared to a corresponding non-transformed wild type non-human organism or a part thereof; and
[98029] (b) growing the non-human organism or a part thereof under conditions which permit the production of bis-glyceryl phosphate (polar fraction) or a composition comprising bis-glyceryl phosphate (polar fraction) in said non-human organism or in the culture medium surrounding said non-human organism.

[98030] A further embodiment of the present invention relates to a process for the production of glycerol-3-phosphate (polar fraction), which comprises
[98031] (a) increasing or generating one or more activities selected from the group consisting of acetyl CoA carboxylase in an organelle, preferably in plastids or mitochondria, especially in plastids, of a non-human organism or a part thereof, preferably a microorganism, a plant cell, a plant or a part thereof, as compared to a corresponding non-transformed wild type non-human organism or a part thereof; and
[98032] (b) growing the non-human organism or a part thereof under conditions which permit the production of glycerol-3-phosphate (polar fraction) or a composition comprising glycerol-3-phosphate (polar fraction) in said non-human organism or in the culture medium surrounding said non-human organism.

[98033] A further embodiment of the present invention relates to a process for the production of bis-glyceryl phosphate (polar fraction), which comprises
[98034] (a) increasing or generating one or more activities selected from the group consisting of methyltransferase in an organelle, preferably in plastids or mitochondria, especially in plastids, of a non-human organism or a part thereof, preferably a microorganism, a plant cell, a plant or a part thereof, as compared to a corresponding non-transformed wild type non-human organism or a part thereof; and
[98035] (b) growing the non-human organism or a part thereof under conditions which permit the production of bis-glyceryl phosphate (polar fraction) or a composition comprising bis-glyceryl phosphate (polar fraction) in said non-human organism or in the culture medium surrounding said non-human organism.

[98036] A further embodiment of the present invention relates to a process for the production of glycerol (lipid fraction), which comprises
[98037] (a) increasing or generating one or more activities selected from the group consisting of methyltransferase in an organelle, preferably in plastids or mitochondria, especially in plastids, of a non-human organism or a part thereof, preferably a microorganism, a plant cell, a plant or a part thereof, as compared to a corresponding non-transformed wild type non-human organism or a part thereof; and
[98038] (b) growing the non-human organism or a part thereof under conditions which permit the production of glycerol (lipid fraction) or a composition comprising glycerol (lipid fraction) in said non-human organism or in the culture medium surrounding said non-human organism.

[98039] A further embodiment of the present invention relates to a process for the production of bis-glyceryl phosphate (polar fraction), which comprises
[98040] (a) increasing or generating one or more activities selected from the group consisting of FKBP-type peptidyl-prolyl cis-trans isomerase (rotamase) in an organelle, preferably in plastids or mitochondria, especially in plastids, of a non-human organism or a part thereof, preferably a microorganism, a plant cell, a plant or a part thereof, as compared to a corresponding non-transformed wild type non-human organism or a part thereof; and
[98041] (b) growing the non-human organism or a part thereof under conditions which permit the production of bis-glyceryl phosphate (polar fraction) or a composition comprising bis-glyceryl phosphate (polar fraction) in said non-human organism or in the culture medium surrounding said non-human organism.

[98042] A further embodiment of the present invention relates to a process for the production of bis-glyceryl phosphate (polar fraction), which comprises
[98043] (a) increasing or generating one or more activities selected from the group consisting of high-affinity branched-chain amino acid transport protein in an organelle, preferably in plastids or mitochondria, especially in plastids, of a non-human organism or a part thereof, preferably a microorganism, a plant cell, a plant or a part thereof, as compared to a corresponding non-transformed wild type non-human organism or a part thereof; and
[98044] (b) growing the non-human organism or a part thereof under conditions which permit the production of bis-glyceryl phosphate (polar fraction) or a composition comprising bis-glyceryl phosphate (polar fraction) in said non-human organism or in the culture medium surrounding said non-human organism.

[98045] A further embodiment of the present invention relates to a process for the production of bis-glyceryl phosphate (polar fraction), which comprises
[98046] (a) increasing or generating one or more activities selected from the group consisting of b3777-protein in an organelle, preferably in plastids or mitochondria, especially in plastids, of a non-human organism or a part thereof, preferably a microorganism, a plant cell, a plant or a part thereof, as compared to a corresponding non-transformed wild type non-human organism or a part thereof; and
[98047] (b) growing the non-human organism or a part thereof under conditions which permit the production of bis-glyceryl phosphate (polar fraction) or a composition comprising bis-glyceryl phosphate (polar fraction) in said non-human organism or in the culture medium surrounding said non-human organism.

[98048] A further embodiment of the present invention relates to a process for the production of bis-glyceryl phosphate (polar fraction), which comprises
[98049] (a) increasing or generating one or more activities selected from the group consisting of b3791-protein in an organelle, preferably in plastids or mitochondria, especially in plastids, of a non-human organism or a part thereof, preferably a microorganism, a plant cell, a plant or a part thereof, as compared to a corresponding non-transformed wild type non-human organism or a part thereof; and
[98050] (b) growing the non-human organism or a part thereof under conditions which permit the production of bis-glyceryl phosphate (polar fraction) or a composition comprising bis-glyceryl phosphate (polar fraction) in said non-human organism or in the culture medium surrounding said non-human organism.

[98051] A further embodiment of the present invention relates to a process for the production of bis-glyceryl phosphate (polar fraction), which comprises
[98052] (a) increasing or generating one or more activities selected from the group consisting of enterobacterial common antigen polymerase in an organelle, preferably in plastids or mitochondria, especially in plastids, of a non-human organism or a part thereof, preferably a microorganism, a plant cell, a plant or a part thereof, as compared to a corresponding non-transformed wild type non-human organism or a part thereof; and
[98053] (b) growing the non-human organism or a part thereof under conditions which permit the production of bis-glyceryl phosphate (polar fraction) or a composition comprising bis-glyceryl phosphate (polar fraction) in said non-human organism or in the culture medium surrounding said non-human organism.

[98054] A further embodiment of the present invention relates to a process for the production of triacylglycerol, which comprises
[98055] (a) increasing or generating one or more activities selected from the group consisting of b3989-protein in an organelle, preferably in plastids or mitochondria, especially in plastids, of a non-human organism or a part thereof, preferably a microorganism, a plant cell, a plant or a part thereof, as compared to a corresponding non-transformed wild type non-human organism or a part thereof; and
[98056] (b) growing the non-human organism or a part thereof under conditions which permit the production of triacylglycerol or a composition comprising triacylglycerol in said non-human organism or in the culture medium surrounding said non-human organism.

[98057] A further embodiment of the present invention relates to a process for the production of bis-glyceryl phosphate (polar fraction), which comprises
[98058] (a) increasing or generating one or more activities selected from the group consisting of b4029-protein in an organelle, preferably in plastids or mitochondria, especially in plastids, of a non-human organism or a part thereof, preferably a microorganism, a plant cell, a plant or a part thereof, as compared to a corresponding non-transformed wild type non-human organism or a part thereof; and
[98059] (b) growing the non-human organism or a part thereof under conditions which permit the production of bis-glyceryl phosphate (polar fraction) or a composition comprising bis-glyceryl phosphate (polar fraction) in said non-human organism or in the culture medium surrounding said non-human organism.

[98060] A further embodiment of the present invention relates to a process for the production of triacylglycerol, which comprises
[98061] (a) increasing or generating one or more activities selected from the group consisting of b4050-protein in an organelle, preferably in plastids or mitochondria, especially in plastids, of a non-human organism or a part thereof, preferably a microorganism, a plant cell, a plant or a part thereof, as compared to a corresponding non-transformed wild type non-human organism or a part thereof; and
[98062] (b) growing the non-human organism or a part thereof under conditions which permit the production of triacylglycerol or a composition comprising triacylglycerol in said non-human organism or in the culture medium surrounding said non-human organism.

[98063] A further embodiment of the present invention relates to a process for the production of bis-glyceryl phosphate (polar fraction), which comprises
[98064] (a) increasing or generating one or more activities selected from the group consisting of lysyl-tRNA synthetase in an organelle, preferably in plastids or mitochondria, especially in plastids, of a non-human organism or a part thereof, preferably a microorganism, a plant cell, a plant or a part thereof, as compared to a corresponding non-transformed wild type non-human organism or a part thereof; and
[98065] (b) growing the non-human organism or a part thereof under conditions which permit the production of bis-glyceryl phosphate (polar fraction) or a composition comprising bis-glyceryl phosphate (polar fraction) in said non-human organism or in the culture medium surrounding said non-human organism.

[98066] A further embodiment of the present invention relates to a process for the production of glycerol-3-phosphate (polar fraction), which comprises
[98067] (a) increasing or generating one or more activities selected from the group consisting of purine-nucleoside phosphorylase in an organelle, preferably in plastids or mitochondria, especially in plastids, of a non-human organism or a part thereof, preferably a microorganism, a plant cell, a plant or a part thereof, as compared to a corresponding non-transformed wild type non-human organism or a part thereof; and
[98068] (b) growing the non-human organism or a part thereof under conditions which permit the production of glycerol-3-phosphate (polar fraction) or a composition comprising glycerol-3-phosphate (polar fraction) in said non-human organism or in the culture medium surrounding said non-human organism.

[98069] A further embodiment of the present invention relates to a process for the production of bis-glyceryl phosphate (polar fraction), which comprises
[98070] (a) increasing or generating one or more activities selected from the group consisting of glutaredoxin in an organelle, preferably in plastids or mitochondria, especially in plastids, of a non-human organism or a part thereof, preferably a microorganism, a plant cell, a plant or a part thereof, as compared to a corresponding non-transformed wild type non-human organism or a part thereof; and
[98071] (b) growing the non-human organism or a part thereof under conditions which permit the production of bis-glyceryl phosphate (polar fraction) or a composition comprising bis-glyceryl phosphate (polar fraction) in said non-human organism or in the culture medium surrounding said non-human organism.

[98072] A further embodiment of the present invention relates to a process for the production of glycerol phosphate (lipid fraction), which comprises
[98073] (a) increasing or generating one or more activities selected from the group consisting of glutaredoxin in an organelle, preferably in plastids or mitochondria, especially in plastids, of a non-human organism or a part thereof, preferably a microorganism, a plant cell, a plant or a part thereof, as compared to a corresponding non-transformed wild type non-human organism or a part thereof; and
[98074] (b) growing the non-human organism or a part thereof under conditions which permit the production of glycerol phosphate (lipid fraction) or a composition comprising glycerol phosphate (lipid fraction) in said non-human organism or in the culture medium surrounding said non-human organism.

[98075] A further embodiment of the present invention relates to a process for the production of bis-glyceryl phosphate (polar fraction), which comprises
[98076] (a) increasing or generating one or more activities selected from the group consisting of GM02LC17485-protein in an organelle, preferably in plastids or mitochondria, especially in plastids, of a non-human organism or a part thereof, preferably a microorganism, a plant cell, a plant or a part thereof, as compared to a corresponding non-transformed wild type non-human organism or a part thereof; and
[98077] (b) growing the non-human organism or a part thereof under conditions which permit the production of bis-glyceryl phosphate (polar fraction) or a composition comprising bis-glyceryl phosphate (polar fraction) in said non-human organism or in the culture medium surrounding said non-human organism.

[98078] A further embodiment of the present invention relates to a process for the production of glycerol (lipid fraction), which comprises
[98079] (a) increasing or generating one or more activities selected from the group consisting of transcription factor in an organelle, preferably in plastids or mitochondria, especially in plastids, of a non-human organism or a part thereof, preferably a microorganism, a plant cell, a plant or a part thereof, as compared to a corresponding non-transformed wild type non-human organism or a part thereof; and
[98080] (b) growing the non-human organism or a part thereof under conditions which permit the production of glycerol (lipid fraction) or a composition comprising glycerol (lipid fraction) in said non-human organism or in the culture medium surrounding said non-human organism.

[98081] A further embodiment of the present invention relates to a process for the production of glycerol phosphate (lipid fraction), which comprises
[98082] (a) increasing or generating one or more activities selected from the group consisting of transcription factor in an organelle, preferably in plastids or mitochondria, especially in plastids, of a non-human organism or a part thereof, preferably a microorganism, a plant cell, a plant or a part thereof, as compared to a corresponding non-transformed wild type non-human organism or a part thereof; and
[98083] (b) growing the non-human organism or a part thereof under conditions which permit the production of glycerol phosphate (lipid fraction) or a composition comprising glycerol phosphate (lipid fraction) in said non-human organism or in the culture medium surrounding said non-human organism.

[98084] A further embodiment of the present invention relates to a process for the production of glycerol (polar fraction), which comprises
[98085] (a) increasing or generating one or more activities selected from the group consisting of transcription factor in an organelle, preferably in plastids or mitochondria, especially in plastids, of a non-human organism or a part thereof, preferably a microorganism, a plant cell, a plant or a part thereof, as compared to a corresponding non-transformed wild type non-human organism or a part thereof; and
[98086] (b) growing the non-human organism or a part thereof under conditions which permit the production of glycerol (polar fraction) or a composition comprising glycerol (polar fraction) in said non-human organism or in the culture medium surrounding said non-human organism.

[98087] A further embodiment of the present invention relates to a process for the production of glycerol phosphate (lipid fraction), which comprises
[98088] (a) increasing or generating one or more activities selected from the group consisting of cyclin D in an organelle, preferably in plastids or mitochondria, especially in plastids, of a non-human organism or a part thereof, preferably a microorganism, a plant cell, a plant or a part thereof, as compared to a corresponding non-transformed wild type non-human organism or a part thereof; and
[98089] (b) growing the non-human organism or a part thereof under conditions which permit the production of glycerol phosphate (lipid fraction) or a composition comprising glycerol phosphate (lipid fraction) in said non-human organism or in the culture medium surrounding said non-human organism.

[98090] A further embodiment of the present invention relates to a process for the production of bis-glyceryl phosphate (polar fraction), which comprises
[98091] (a) increasing or generating one or more activities selected from the group consisting of nitrate/nitrite transport protein in an organelle, preferably in plastids or mitochondria, especially in plastids, of a non-human organism or a part thereof, preferably a microorganism, a plant cell, a plant or a part thereof, as compared to a corresponding non-transformed wild type non-human organism or a part thereof; and
[98092] (b) growing the non-human organism or a part thereof under conditions which permit the production of bis-glyceryl phosphate (polar fraction) or a composition comprising bis-glyceryl phosphate (polar fraction) in said non-human organism or in the culture medium surrounding said non-human organism.

[98093] A further embodiment of the present invention relates to a process for the production of glycerol phosphate (lipid fraction), which comprises
[98094] (a) increasing or generating one or more activities selected from the group consisting of carbamoyl-phosphate synthase subunit in an organelle, preferably in plastids or mitochondria, especially in plastids, of a non-human organism or a part thereof, preferably a microorganism, a plant cell, a plant or a part thereof, as compared to a corresponding non-transformed wild type non-human organism or a part thereof; and
[98095] (b) growing the non-human organism or a part thereof under conditions which permit the production of glycerol phosphate (lipid fraction) or a composition comprising glycerol phosphate (lipid fraction) in said non-human organism or in the culture medium surrounding said non-human organism.

[98096] A further embodiment of the present invention relates to a process for the production of glycerol (lipid fraction), which comprises
[98097] (a) increasing or generating one or more activities selected from the group consisting of CDP-diacylglycerol-glycerol-3-phosphate 3-phosphatidyltransferase in an organelle, preferably in plastids or mitochondria, especially in plastids, of a non-human organism or a part thereof, preferably a microorganism, a plant cell, a plant or a part thereof, as compared to a corresponding non-transformed wild type non-human organism or a part thereof; and
[98098] (b) growing the non-human organism or a part thereof under conditions which permit the production of glycerol (lipid fraction) or a composition comprising glycerol (lipid fraction) in said non-human organism or in the culture medium surrounding said non-human organism.

[98099] A further embodiment of the present invention relates to a process for the production of bis-glyceryl phosphate (polar fraction), which comprises
[98100] (a) increasing or generating one or more activities selected from the group consisting of adenylate kinase in an organelle, preferably in plastids or mitochondria, especially in plastids, of a non-human organism or a part thereof, preferably a microorganism, a plant cell, a plant or a part thereof, as compared to a corresponding non-transformed wild type non-human organism or a part thereof; and
[98101] (b) growing the non-human organism or a part thereof under conditions which permit the production of bis-glyceryl phosphate (polar fraction) or a composition comprising bis-glyceryl phosphate (polar fraction) in said non-human organism or in the culture medium surrounding said non-human organism.

[98102] A further embodiment of the present invention relates to a process for the production of glycerol (lipid fraction), which comprises
[98103] (a) increasing or generating one or more activities selected from the group consisting of acyl transferase in an organelle, preferably in plastids or mitochondria, especially in plastids, of a non-human organism or a part thereof, preferably a microorganism, a plant cell, a plant or a part thereof, as compared to a corresponding non-transformed wild type non-human organism or a part thereof; and
[98104] (b) growing the non-human organism or a part thereof under conditions which permit the production of glycerol (lipid fraction) or a composition comprising glycerol (lipid fraction) in said non-human organism or in the culture medium surrounding said non-human organism.

[98105] A further embodiment of the present invention relates to a process for the production of glycerol phosphate (lipid fraction), which comprises
[98106] (a) increasing or generating one or more activities selected from the group consisting of coproporphyrinogen III oxidase in an organelle, preferably in plastids or mitochondria, especially in plastids, of a non-human organism or a part thereof, preferably a microorganism, a plant cell, a plant or a part thereof, as compared to a corresponding non-transformed wild type non-human organism or a part thereof; and
[98107] (b) growing the non-human organism or a part thereof under conditions which permit the production of glycerol phosphate (lipid fraction) or a composition comprising glycerol phosphate (lipid fraction) in said non-human organism or in the culture medium surrounding said non-human organism.

[98108] A further embodiment of the present invention relates to a process for the production of glycerol (lipid fraction), which comprises
[98109] (a) increasing or generating one or more activities selected from the group consisting of oxidoreductase in an organelle, preferably in plastids or mitochondria, especially in plastids, of a non-human organism or a part thereof, preferably a microorganism, a plant cell, a plant or a part thereof, as compared to a corresponding non-transformed wild type non-human organism or a part thereof; and
[98110] (b) growing the non-human organism or a part thereof under conditions which permit the production of glycerol (lipid fraction) or a composition comprising glycerol (lipid fraction) in said non-human organism or in the culture medium surrounding said non-human organism.

[98111] A further embodiment of the present invention relates to a process for the production of glycerol phosphate (lipid fraction), which comprises
[98112] (a) increasing or generating one or more activities selected from the group consisting of oxidoreductase in an organelle, preferably in plastids or mitochondria, especially in plastids, of a non-human organism or a part thereof, preferably a microorganism, a plant cell, a plant or a part thereof, as compared to a corresponding non-transformed wild type non-human organism or a part thereof; and
[98113] (b) growing the non-human organism or a part thereof under conditions which permit the production of glycerol phosphate (lipid fraction) or a composition comprising glycerol phosphate (lipid fraction) in said non-human organism or in the culture medium surrounding said non-human organism.

[98114] A further embodiment of the present invention relates to a process for the production of glycerol (polar fraction), which comprises
[98115] (a) increasing or generating one or more activities selected from the group consisting of Mg-protoporphyrin IX monomethyl ester oxidative cyclase 66 kD subunit in an organelle, preferably in plastids or mitochondria, especially in plastids, of a non-human organism or a part thereof, preferably a microorganism, a plant cell, a plant or a part thereof, as compared to a corresponding non-transformed wild type non-human organism or a part thereof; and
[98116] (b) growing the non-human organism or a part thereof under conditions which permit the production of glycerol (polar fraction) or a composition comprising glycerol (polar fraction) in said non-human organism or in the culture medium surrounding said non-human organism.

[98117] A further embodiment of the present invention relates to a process for the production of bis-glyceryl phosphate (polar fraction), which comprises
[98118] (a) increasing or generating one or more activities selected from the group consisting of dihydrolipoamide dehydrogenase in an organelle, preferably in plastids or mitochondria, especially in plastids, of a non-human organism or a part thereof, preferably a microorganism, a plant cell, a plant or a part thereof, as compared to a corresponding non-transformed wild type non-human organism or a part thereof; and
[98119] (b) growing the non-human organism or a part thereof under conditions which permit the production of bis-glyceryl phosphate (polar fraction) or a composition comprising bis-glyceryl phosphate (polar fraction) in said non-human organism or in the culture medium surrounding said non-human organism.

[98120] A further embodiment of the present invention relates to a process for the production of glycerol phosphate (lipid fraction), which comprises
[98121] (a) increasing or generating one or more activities selected from the group consisting of aromatic acid decarboxylase in an organelle, preferably in plastids or mitochondria, especially in plastids, of a non-human organism or a part thereof, preferably a microorganism, a plant cell, a plant or a part thereof, as compared to a corresponding non-transformed wild type non-human organism or a part thereof; and
[98122] (b) growing the non-human organism or a part thereof under conditions which permit the production of glycerol phosphate (lipid fraction) or a composition comprising glycerol phosphate (lipid fraction) in said non-human organism or in the culture medium surrounding said non-human organism.

[98123] A further embodiment of the present invention relates to a process for the production of glycerol phosphate (lipid fraction), which comprises
[98124] (a) increasing or generating one or more activities selected from the group consisting of phosphate import ATP-binding protein in an organelle, preferably in plastids or mitochondria, especially in plastids, of a non-human organism or a part thereof, preferably a microorganism, a plant cell, a plant or a part thereof, as compared to a corresponding non-transformed wild type non-human organism or a part thereof; and
[98125] (b) growing the non-human organism or a part thereof under conditions which permit the production of glycerol phosphate (lipid fraction) or a composition comprising glycerol phosphate (lipid fraction) in said non-human organism or in the culture medium surrounding said non-human organism.

[98126] A further embodiment of the present invention relates to a process for the production of glycerol phosphate (lipid fraction), which comprises
[98127] (a) increasing or generating one or more activities selected from the group consisting of arginine decarboxylase in an organelle, preferably in plastids or mitochondria, especially in plastids, of a non-human organism or a part thereof, preferably a microorganism, a plant cell, a plant or a part thereof, as compared to a corresponding non-transformed wild type non-human organism or a part thereof; and
[98128] (b) growing the non-human organism or a part thereof under conditions which permit the production of glycerol phosphate (lipid fraction) or a composition comprising glycerol phosphate (lipid fraction) in said non-human organism or in the culture medium surrounding said non-human organism.

[98129] A further embodiment of the present invention relates to a process for the production of glycerol phosphate (lipid fraction), which comprises
[98130] (a) increasing or generating one or more activities selected from the group consisting of carbohydrate kinase in an organelle, preferably in plastids or mitochondria, especially in plastids, of a non-human organism or a part thereof, preferably a microorganism, a plant cell, a plant or a part thereof, as compared to a corresponding non-transformed wild type non-human organism or a part thereof; and
[98131] (b) growing the non-human organism or a part thereof under conditions which permit the production of glycerol phosphate (lipid fraction) or a composition comprising glycerol phosphate (lipid fraction) in said non-human organism or in the culture medium surrounding said non-human organism.

[98132] A further embodiment of the present invention relates to a process for the production of bis-glyceryl phosphate (polar fraction), which comprises
[98133] (a) increasing or generating one or more activities selected from the group consisting of precorrin-8X methylmutase in an organelle, preferably in plastids or mitochondria, especially in plastids, of a non-human organism or a part thereof, preferably a microorganism, a plant cell, a plant or a part thereof, as compared to a corresponding non-transformed wild type non-human organism or a part thereof; and
[98134] (b) growing the non-human organism or a part thereof under conditions which permit the production of bis-glyceryl phosphate (polar fraction) or a composition comprising bis-glyceryl phosphate (polar fraction) in said non-human organism or in the culture medium surrounding said non-human organism.

[98135] A further embodiment of the present invention relates to a process for the production of bis-glyceryl phosphate (polar fraction), which comprises
[98136] (a) increasing or generating one or more activities selected from the group consisting of NADH dehydrogenase in an organelle, preferably in plastids or mitochondria, especially in plastids, of a non-human organism or a part thereof, preferably a microorganism, a plant cell, a plant or a part thereof, as compared to a corresponding non-transformed wild type non-human organism or a part thereof; and
[98137] (b) growing the non-human organism or a part thereof under conditions which permit the production of bis-glyceryl phosphate (polar fraction) or a composition comprising bis-glyceryl phosphate (polar fraction) in said non-human organism or in the culture medium surrounding said non-human organism.

[98138] A further embodiment of the present invention relates to a process for the production of glycerol (lipid fraction), which comprises
[98139] (a) increasing or generating one or more activities selected from the group consisting of glutamate 5-kinase in an organelle, preferably in plastids or mitochondria, especially in plastids, of a non-human organism or a part thereof, preferably a microorganism, a plant cell, a plant or a part thereof, as compared to a corresponding non-transformed wild type non-human organism or a part thereof; and
[98140] (b) growing the non-human organism or a part thereof under conditions which permit the production of glycerol (lipid fraction) or a composition comprising glycerol (lipid fraction) in said non-human organism or in the culture medium surrounding said non-human organism.

[98141] A further embodiment of the present invention relates to a process for the production of glycerol (lipid fraction), which comprises
[98142] (a) increasing or generating one or more activities selected from the group consisting of threonine dehydratase in an organelle, preferably in plastids or mitochondria, especially in plastids, of a non-human organism or a part thereof, preferably a microorganism, a plant cell, a plant or a part thereof, as compared to a corresponding non-transformed wild type non-human organism or a part thereof; and
[98143] (b) growing the non-human organism or a part thereof under conditions which permit the production of glycerol (lipid fraction) or a composition comprising glycerol (lipid fraction) in said non-human organism or in the culture medium surrounding said non-human organism.

[98144] A further embodiment of the present invention relates to a process for the production of glycerol phosphate (lipid fraction), which comprises
[98145] (a) increasing or generating one or more activities selected from the group consisting of threonine dehydratase in an organelle, preferably in plastids or mitochondria, especially in plastids, of a non-human organism or a part thereof, preferably a microorganism, a plant cell, a plant or a part thereof, as compared to a corresponding non-transformed wild type non-human organism or a part thereof; and
[98146] (b) growing the non-human organism or a part thereof under conditions which permit the production of glycerol phosphate (lipid fraction) or a composition comprising glycerol phosphate (lipid fraction) in said non-human organism or in the culture medium surrounding said non-human organism.

[98147] A further embodiment of the present invention relates to a process for the production of bis-glyceryl phosphate (polar fraction), which comprises
[98148] (a) increasing or generating one or more activities selected from the group consisting of photosystem I reaction centre subunit in an organelle, preferably in plastids or mitochondria, especially in plastids, of a non-human organism or a part thereof, preferably a microorganism, a plant cell, a plant or a part thereof, as compared to a corresponding non-transformed wild type non-human organism or a part thereof; and
[98149] (b) growing the non-human organism or a part thereof under conditions which permit the production of bis-glyceryl phosphate (polar fraction) or a composition comprising bis-glyceryl phosphate (polar fraction) in said non-human organism or in the culture medium surrounding said non-human organism.

[98150] A further embodiment of the present invention relates to a process for the production of triacylglycerol, which comprises
[98151] (a) increasing or generating one or more activities selected from the group consisting of cell division protein in an organelle, preferably in plastids or mitochondria, especially in plastids, of a non-human organism or a part thereof, preferably a microorganism, a plant cell, a plant or a part thereof, as compared to a corresponding non-transformed wild type non-human organism or a part thereof; and
[98152] (b) growing the non-human organism or a part thereof under conditions which permit the production of triacylglycerol or a composition comprising triacylglycerol in said non-human organism or in the culture medium surrounding said non-human organism.

[98153] A further embodiment of the present invention relates to a process for the production of glycerol phosphate (lipid fraction), which comprises
[98154] (a) increasing or generating one or more activities selected from the group consisting of metal-dependent hydrolase in an organelle, preferably in plastids or mitochondria, especially in plastids, of a non-human organism or a part thereof, preferably a microorganism, a plant cell, a plant or a part thereof, as compared to a corresponding non-transformed wild type non-human organism or a part thereof; and
[98155] (b) growing the non-human organism or a part thereof under conditions which permit the production of glycerol phosphate (lipid fraction) or a composition comprising glycerol phosphate (lipid fraction) in said non-human organism or in the culture medium surrounding said non-human organism.

[98156] A further embodiment of the present invention relates to a process for the production of glycerol (lipid fraction), which comprises
[98157] (a) increasing or generating one or more activities selected from the group consisting of TTC1386-protein in an organelle, preferably in plastids or mitochondria, especially in plastids, of a non-human organism or a part thereof, preferably a microorganism, a plant cell, a plant or a part thereof, as compared to a corresponding non-transformed wild type non-human organism or a part thereof; and
[98158] (b) growing the non-human organism or a part thereof under conditions which permit the production of glycerol (lipid fraction) or a composition comprising glycerol (lipid fraction) in said non-human organism or in the culture medium surrounding said non-human organism.

[98159] A further embodiment of the present invention relates to a process for the production of glycerol-3-phosphate (polar fraction), which comprises
[98160] (a) increasing or generating one or more activities selected from the group consisting of YAL013W-protein in an organelle, preferably in plastids or mitochondria, especially in plastids, of a non-human organism or a part thereof, preferably a microorganism, a plant cell, a plant or a part thereof, as compared to a corresponding non-transformed wild type non-human organism or a part thereof; and
[98161] (b) growing the non-human organism or a part thereof under conditions which permit the production of glycerol-3-phosphate (polar fraction) or a composition comprising glycerol-3-phosphate (polar fraction) in said non-human organism or in the culture medium surrounding said non-human organism.

[98162] A further embodiment of the present invention relates to a process for the production of glycerol (lipid fraction), which comprises
[98163] (a) increasing or generating one or more activities selected from the group consisting of transcription factor in an organelle, preferably in plastids or mitochondria, especially in plastids, of a non-human organism or a part thereof, preferably a microorganism, a plant cell, a plant or a part thereof, as compared to a corresponding non-transformed wild type non-human organism or a part thereof; and
[98164] (b) growing the non-human organism or a part thereof under conditions which permit the production of glycerol (lipid fraction) or a composition comprising glycerol (lipid fraction) in said non-human organism or in the culture medium surrounding said non-human organism.

[98165] A further embodiment of the present invention relates to a process for the production of glycerol phosphate (lipid fraction), which comprises
[98166] (a) increasing or generating one or more activities selected from the group consisting of acid phosphatase precursor in an organelle, preferably in plastids or mitochondria, especially in plastids, of a non-human organism or a part thereof, preferably a microorganism, a plant cell, a plant or a part thereof, as compared to a corresponding non-transformed wild type non-human organism or a part thereof; and
[98167] (b) growing the non-human organism or a part thereof under conditions which permit the production of glycerol phosphate (lipid fraction) or a composition comprising glycerol phosphate (lipid fraction) in said non-human organism or in the culture medium surrounding said non-human organism.

[98168] A further embodiment of the present invention relates to a process for the production of glycerol (lipid fraction), which comprises
[98169] (a) increasing or generating one or more activities selected from the group consisting of cell division control protein in an organelle, preferably in plastids or mitochondria, especially in plastids, of a non-human organism or a part thereof, preferably a microorganism, a plant cell, a plant or a part thereof, as compared to a corresponding non-transformed wild type non-human organism or a part thereof; and
[98170] (b) growing the non-human organism or a part thereof under conditions which permit the production of glycerol (lipid fraction) or a composition comprising glycerol (lipid fraction) in said non-human organism or in the culture medium surrounding said non-human organism.

[98171] A further embodiment of the present invention relates to a process for the production of glycerol (polar fraction), which comprises
[98172] (a) increasing or generating one or more activities selected from the group consisting of cell division control protein in an organelle, preferably in plastids or mitochondria, especially in plastids, of a non-human organism or a part thereof, preferably a microorganism, a plant cell, a plant or a part thereof, as compared to a corresponding non-transformed wild type non-human organism or a part thereof; and
[98173] (b) growing the non-human organism or a part thereof under conditions which permit the production of glycerol (polar fraction) or a composition comprising glycerol (polar fraction) in said non-human organism or in the culture medium surrounding said non-human organism.

[98174] A further embodiment of the present invention relates to a process for the production of bis-glyceryl phosphate (polar fraction), which comprises
[98175] (a) increasing or generating one or more activities selected from the group consisting of ycr102c-protein in an organelle, preferably in plastids or mitochondria, especially in plastids, of a non-human organism or a part thereof, preferably a microorganism, a plant cell, a plant or a part thereof, as compared to a corresponding non-transformed wild type non-human organism or a part thereof; and
[98176] (b) growing the non-human organism or a part thereof under conditions which permit the production of bis-glyceryl phosphate (polar fraction) or a composition comprising bis-glyceryl phosphate (polar fraction) in said non-human organism or in the culture medium surrounding said non-human organism.

[98177] A further embodiment of the present invention relates to a process for the production of bis-glyceryl phosphate (polar fraction), which comprises
[98178] (a) increasing or generating one or more activities selected from the group consisting of ydr273w-protein in an organelle, preferably in plastids or mitochondria, especially in plastids, of a non-human organism or a part thereof, preferably a microorganism, a plant cell, a plant or a part thereof, as compared to a corresponding non-transformed wild type non-human organism or a part thereof; and
[98179] (b) growing the non-human organism or a part thereof under conditions which permit the production of bis-glyceryl phosphate (polar fraction) or a composition comprising bis-glyceryl phosphate (polar fraction) in said non-human organism or in the culture medium surrounding said non-human organism.

[98180] A further embodiment of the present invention relates to a process for the production of glycerol phosphate (lipid fraction), which comprises
[98181] (a) increasing or generating one or more activities selected from the group consisting of molecular chaperone portein in an organelle, preferably in plastids or mitochondria, especially in plastids, of a non-human organism or a part thereof, preferably a microorganism, a plant cell, a plant or a part thereof, as compared to a corresponding non-transformed wild type non-human organism or a part thereof; and
[98182] (b) growing the non-human organism or a part thereof under conditions which permit the production of glycerol phosphate (lipid fraction) or a composition comprising glycerol phosphate (lipid fraction) in said non-human organism or in the culture medium surrounding said non-human organism.

[98183] A further embodiment of the present invention relates to a process for the production of triacylglycerol, which comprises
[98184] (a) increasing or generating one or more activities selected from the group consisting of YFL019C-protein in an organelle, preferably in plastids or mitochondria, especially in plastids, of a non-human organism or a part thereof, preferably a microorganism, a plant cell, a plant or a part thereof, as compared to a corresponding non-transformed wild type non-human organism or a part thereof; and
[98185] (b) growing the non-human organism or a part thereof under conditions which permit the production of triacylglycerol or a composition comprising triacylglycerol in said non-human organism or in the culture medium surrounding said non-human organism.

[98186] A further embodiment of the present invention relates to a process for the production of bis-glyceryl phosphate (polar fraction), which comprises
[98187] (a) increasing or generating one or more activities selected from the group consisting of alcohol dehydrogenase in an organelle, preferably in plastids or mitochondria, especially in plastids, of a non-human organism or a part thereof, preferably a microorganism, a plant cell, a plant or a part thereof, as compared to a corresponding non-transformed wild type non-human organism or a part thereof; and
[98188] (b) growing the non-human organism or a part thereof under conditions which permit the production of bis-glyceryl phosphate (polar fraction) or a composition comprising bis-glyceryl phosphate (polar fraction) in said non-human organism or in the culture medium surrounding said non-human organism.

[98189] A further embodiment of the present invention relates to a process for the production of glycerol (lipid fraction), which comprises
[98190] (a) increasing or generating one or more activities selected from the group consisting of biotin synthase in an organelle, preferably in plastids or mitochondria, especially in plastids, of a non-human organism or a part thereof, preferably a microorganism, a plant cell, a plant or a part thereof, as compared to a corresponding non-transformed wild type non-human organism or a part thereof; and
[98191] (b) growing the non-human organism or a part thereof under conditions which permit the production of glycerol (lipid fraction) or a composition comprising glycerol (lipid fraction) in said non-human organism or in the culture medium surrounding said non-human organism.

[98192] A further embodiment of the present invention relates to a process for the production of triacylglycerol, which comprises
[98193] (a) increasing or generating one or more activities selected from the group consisting of mitochondrial processing protease in an organelle, preferably in plastids or mitochondria, especially in plastids, of a non-human organism or a part thereof, preferably a microorganism, a plant cell, a plant or a part thereof, as compared to a corresponding non-transformed wild type non-human organism or a part thereof; and
[98194] (b) growing the non-human organism or a part thereof under conditions which permit the production of triacylglycerol or a composition comprising triacylglycerol in said non-human organism or in the culture medium surrounding said non-human organism.

[98195] A further embodiment of the present invention relates to a process for the production of bis-glyceryl phosphate (polar fraction), which comprises
[98196] (a) increasing or generating one or more activities selected from the group consisting of YHR202W-protein in an organelle, preferably in plastids or mitochondria, especially in plastids, of a non-human organism or a part thereof, preferably a microorganism, a plant cell, a plant or a part thereof, as compared to a corresponding non-transformed wild type non-human organism or a part thereof; and
[98197] (b) growing the non-human organism or a part thereof under conditions which permit the production of bis-glyceryl phosphate (polar fraction) or a composition comprising bis-glyceryl phosphate (polar fraction) in said non-human organism or in the culture medium surrounding said non-human organism.

[98198] A further embodiment of the present invention relates to a process for the production of glycerol (polar fraction), which comprises
[98199] (a) increasing or generating one or more activities selected from the group consisting of (DL)-glycerol-3-phosphatase in an organelle, preferably in plastids or mitochondria, especially in plastids, of a non-human organism or a part thereof, preferably a microorganism, a plant cell, a plant or a part thereof, as compared to a corresponding non-transformed wild type non-human organism or a part thereof; and
[98200] (b) growing the non-human organism or a part thereof under conditions which permit the production of glycerol (polar fraction) or a composition comprising glycerol (polar fraction) in said non-human organism or in the culture medium surrounding said non-human organism.

[98201] A further embodiment of the present invention relates to a process for the production of bis-glyceryl phosphate (polar fraction), which comprises
[98202] (a) increasing or generating one or more activities selected from the group consisting of YIL083C-protein in an organelle, preferably in plastids or mitochondria, especially in plastids, of a non-human organism or a part thereof, preferably a microorganism, a plant cell, a plant or a part thereof, as compared to a corresponding non-transformed wild type non-human organism or a part thereof; and
[98203] (b) growing the non-human organism or a part thereof under conditions which permit the production of bis-glyceryl phosphate (polar fraction) or a composition comprising bis-glyceryl phosphate (polar fraction) in said non-human organism or in the culture medium surrounding said non-human organism.

[98204] A further embodiment of the present invention relates to a process for the production of glycerol phosphate (lipid fraction), which comprises
[98205] (a) increasing or generating one or more activities selected from the group consisting of YJL062W-A-protein in an organelle, preferably in plastids or mitochondria, especially in plastids, of a non-human organism or a part thereof, preferably a microorganism, a plant cell, a plant or a part thereof, as compared to a corresponding non-transformed wild type non-human organism or a part thereof; and
[98206] (b) growing the non-human organism or a part thereof under conditions which permit the production of glycerol phosphate (lipid fraction) or a composition comprising glycerol phosphate (lipid fraction) in said non-human organism or in the culture medium surrounding said non-human organism.

[98207] A further embodiment of the present invention relates to a process for the production of bis-glyceryl phosphate (polar fraction), which comprises
[98208] (a) increasing or generating one or more activities selected from the group consisting of DnaJ-like chaperone in an organelle, preferably in plastids or mitochondria, especially in plastids, of a non-human organism or a part thereof, preferably a microorganism, a plant cell, a plant or a part thereof, as compared to a corresponding non-transformed wild type non-human organism or a part thereof; and
[98209] (b) growing the non-human organism or a part thereof under conditions which permit the production of bis-glyceryl phosphate (polar fraction) or a composition comprising bis-glyceryl phosphate (polar fraction) in said non-human organism or in the culture medium surrounding said non-human organism.

[98210] A further embodiment of the present invention relates to a process for the production of bis-glyceryl phosphate (polar fraction), which comprises
[98211] (a) increasing or generating one or more activities selected from the group consisting of polygalacturonase in an organelle, preferably in plastids or mitochondria, especially in plastids, of a non-human organism or a part thereof, preferably a microorganism, a plant cell, a plant or a part thereof, as compared to a corresponding non-transformed wild type non-human organism or a part thereof; and
[98212] (b) growing the non-human organism or a part thereof under conditions which permit the production of bis-glyceryl phosphate (polar fraction) or a composition comprising bis-glyceryl phosphate (polar fraction) in said non-human organism or in the culture medium surrounding said non-human organism.

[98213] A further embodiment of the present invention relates to a process for the production of glycerol (polar fraction), which comprises
[98214] (a) increasing or generating one or more activities selected from the group consisting of vacuolar sorting protein in an organelle, preferably in plastids or mitochondria, especially in plastids, of a non-human organism or a part thereof, preferably a microorganism, a plant cell, a plant or a part thereof, as compared to a corresponding non-transformed wild type non-human organism or a part thereof; and
[98215] (b) growing the non-human organism or a part thereof under conditions which permit the production of glycerol (polar fraction) or a composition comprising glycerol (polar fraction) in said non-human organism or in the culture medium surrounding said non-human organism.

[98216] A further embodiment of the present invention relates to a process for the production of bis-glyceryl phosphate (polar fraction), which comprises
[98217] (a) increasing or generating one or more activities selected from the group consisting of YLR099C-protein in an organelle, preferably in plastids or mitochondria, especially in plastids, of a non-human organism or a part thereof, preferably a microorganism, a plant cell, a plant or a part thereof, as compared to a corresponding non-transformed wild type non-human organism or a part thereof; and
[98218] (b) growing the non-human organism or a part thereof under conditions which permit the production of bis-glyceryl phosphate (polar fraction) or a composition comprising bis-glyceryl phosphate (polar fraction) in said non-human organism or in the culture medium surrounding said non-human organism.

[98219] A further embodiment of the present invention relates to a process for the production of glycerol (lipid fraction), which comprises
[98220] (a) increasing or generating one or more activities selected from the group consisting of cyclin in an organelle, preferably in plastids or mitochondria, especially in plastids, of a non-human organism or a part thereof, preferably a microorganism, a plant cell, a plant or a part thereof, as compared to a corresponding non-transformed wild type non-human organism or a part thereof; and
[98221] (b) growing the non-human organism or a part thereof under conditions which permit the production of glycerol (lipid fraction) or a composition comprising glycerol (lipid fraction) in said non-human organism or in the culture medium surrounding said non-human organism.

[98222] A further embodiment of the present invention relates to a process for the production of glycerol (lipid fraction), which comprises
[98223] (a) increasing or generating one or more activities selected from the group consisting of ylr326w-protein in an organelle, preferably in plastids or mitochondria, especially in plastids, of a non-human organism or a part thereof, preferably a microorganism, a plant cell, a plant or a part thereof, as compared to a corresponding non-transformed wild type non-human organism or a part thereof; and
[98224] (b) growing the non-human organism or a part thereof under conditions which permit the production of glycerol (lipid fraction) or a composition comprising glycerol (lipid fraction) in said non-human organism or in the culture medium surrounding said non-human organism.

[98225] A further embodiment of the present invention relates to a process for the production of glycerol phosphate (lipid fraction), which comprises
[98226] (a) increasing or generating one or more activities selected from the group consisting of ylr326w-protein in an organelle, preferably in plastids or mitochondria, especially in plastids, of a non-human organism or a part thereof, preferably a microorganism, a plant cell, a plant or a part thereof, as compared to a corresponding non-transformed wild type non-human organism or a part thereof; and
[98227] (b) growing the non-human organism or a part thereof under conditions which permit the production of glycerol phosphate (lipid fraction) or a composition comprising glycerol phosphate (lipid fraction) in said non-human organism or in the culture medium surrounding said non-human organism.

[98228] A further embodiment of the present invention relates to a process for the production of glycerol (lipid fraction), which comprises
[98229] (a) increasing or generating one or more activities selected from the group consisting of heat shock protein Hsp40 in an organelle, preferably in plastids or mitochondria, especially in plastids, of a non-human organism or a part thereof, preferably a microorganism, a plant cell, a plant or a part thereof, as compared to a corresponding non-transformed wild type non-human organism or a part thereof; and
[98230] (b) growing the non-human organism or a part thereof under conditions which permit the production of glycerol (lipid fraction) or a composition comprising glycerol (lipid fraction) in said non-human organism or in the culture medium surrounding said non-human organism.

[98231] A further embodiment of the present invention relates to a process for the production of glycerol (lipid fraction), which comprises
[98232] (a) increasing or generating one or more activities selected from the group consisting of phosphotransferase in an organelle, preferably in plastids or mitochondria, especially in plastids, of a non-human organism or a part thereof, preferably a microorganism, a plant cell, a plant or a part thereof, as compared to a corresponding non-transformed wild type non-human organism or a part thereof; and
[98233] (b) growing the non-human organism or a part thereof under conditions which permit the production of glycerol (lipid fraction) or a composition comprising glycerol (lipid fraction) in said non-human organism or in the culture medium surrounding said non-human organism.

[98234] A further embodiment of the present invention relates to a process for the production of glycerol (lipid fraction), which comprises
[98235] (a) increasing or generating one or more activities selected from the group consisting of Elongation factor Tu in an organelle, preferably in plastids or mitochondria, especially in plastids, of a non-human organism or a part thereof, preferably a microorganism, a plant cell, a plant or a part thereof, as compared to a corresponding non-transformed wild type non-human organism or a part thereof; and
[98236] (b) growing the non-human organism or a part thereof under conditions which permit the production of glycerol (lipid fraction) or a composition comprising glycerol (lipid fraction) in said non-human organism or in the culture medium surrounding said non-human organism.

[98237] A further embodiment of the present invention relates to a process for the production of bis-glyceryl phosphate (polar fraction), which comprises
[98238] (a) increasing or generating one or more activities selected from the group consisting of YPL162C.protein in an organelle, preferably in plastids or mitochondria, especially in plastids, of a non-human organism or a part thereof, preferably a microorganism, a plant cell, a plant or a part thereof, as compared to a corresponding non-transformed wild type non-human organism or a part thereof; and
[98239] (b) growing the non-human organism or a part thereof under conditions which permit the production of bis-glyceryl phosphate (polar fraction) or a composition comprising bis-glyceryl phosphate (polar fraction) in said non-human organism or in the culture medium surrounding said non-human organism.

[98240] A further embodiment of the present invention relates to a process for the production of glycerol (lipid fraction), which comprises
[98241] (a) increasing or generating one or more activities selected from the group consisting of mitogen-activated protein kinase in an organelle, preferably in plastids or mitochondria, especially in plastids, of a non-human organism or a part thereof, preferably a microorganism, a plant cell, a plant or a part thereof, as compared to a corresponding non-transformed wild type non-human organism or a part thereof; and
[98242] (b) growing the non-human organism or a part thereof under conditions which permit the production of glycerol (lipid fraction) or a composition comprising glycerol (lipid fraction) in said non-human organism or in the culture medium surrounding said non-human organism.

[98243] A further embodiment of the present invention relates to a process for the production of bis-glyceryl phosphate (polar fraction), which comprises
[98244] (a) increasing or generating one or more activities selected from the group consisting of Zm_{—}4842_BE510522-protein in an organelle, preferably in plastids or mitochondria, especially in plastids, of a non-human organism or a part thereof, preferably a microorganism, a plant cell, a plant or a part thereof, as compared to a corresponding non-transformed wild type non-human organism or a part thereof; and
[98245] (b) growing the non-human organism or a part thereof under conditions which permit the production of bis-glyceryl phosphate (polar fraction) or a composition comprising bis-glyceryl phosphate (polar fraction) in said non-human organism or in the culture medium surrounding said non-human organism.

[98246] A further embodiment of the present invention relates to a process for the production of bis-glyceryl phosphate (polar fraction), which comprises
[98247] (a) increasing or generating one or more activities selected from the group consisting of 49747384_SOYBEAN-protein in an organelle, preferably in plastids or mitochondria, especially in plastids, of a non-human organism or a part thereof, preferably a microorganism, a plant cell, a plant or a part thereof, as compared to a corresponding non-transformed wild type non-human organism or a part thereof; and
[98248] (b) growing the non-human organism or a part thereof under conditions which permit the production of bis-glyceryl phosphate (polar fraction) or a composition comprising bis-glyceryl phosphate (polar fraction) in said non-human organism or in the culture medium surrounding said non-human organism.

[98249] A further embodiment of the present invention relates to a process for the production of bis-glyceryl phosphate (polar fraction), which comprises
[98250] (a1) increasing or generating the activity of a polypeptide comprising a polypeptide as depicted in the respective line in column 5 or 8 of Table II, application no. 19, or a homolog or fragment thereof, a consensus sequence or at least one polypeptide motif as depicted in column 8 of Table IV, application no. 19, whereby the respective line disclose in column 7 the fine chemical bis-glyceryl phosphate (polar fraction); or
[98251] increasing or generating the activity of an expression product of one or more nucleic acid molecule(s) comprising a polynucleotide as depicted in the respective line in column 5 or 8 of Table I, application no. 19, preferably the coding region thereof, or a homolog or a fragment thereof, whereby the respective line disclose in column 7 the fine chemical bis-glyceryl phosphate (polar fraction);
[98252] in an organelle, preferably in plastids or mitochondria, especially in plastids, in a non-human organism or a part thereof; preferably a microorganism, a plant cell, a plant or a part thereof, as compared to a corresponding non-transformed wild type non-human organism or a part thereof; or
[98253] (a2) increasing or generating the activity of a polypeptide comprising a polypeptide as depicted in the respective line in column 5 or 8 of Table II, application no. 19, or a homolog or a fragment thereof, a consensus sequence or at least one polypeptide motif as depicted in the respective line in column 8 of Table IV, application no. 19, which is joined to a transit peptide, whereby the respective line disclose in column 7 the fine chemical bis-glyceryl phosphate (polar fraction); or
[98254] increasing or generating the activity of an expression product of one or more nucleic acid molecule(s) comprising a polynucleotide as depicted in the respective line in column 5 or 8 of Table I, application no. 19, preferably the coding region thereof, or a homolog or a fragment thereof, which is joined to a nucleic acid sequence encoding an organelle localization sequence, preferably a plastid or a mitochondrion localization sequence, especially a plastid localization sequence, whereby the respective line disclose in column 7 the fine chemical bis-glyceryl phosphate (polar fraction);
[98255] in a non-human organism or a part thereof; preferably a microorganism, a plant cell, a plant or a part thereof, as compared to a corresponding non-transformed wild type non-human organism or a part thereof; or
[98256] (a3) increasing or generating the activity of a polypeptide comprising a polypeptide as depicted in the respective line in column 5 or 8 of Table II, application no. 19, or a homolog or a fragment thereof, a consensus sequence or at least one polypeptide motif as depicted in the respective line in column 8 of Table IV, application no. 19, whereby the respective line disclose in column 7 the fine chemical bis-glyceryl phosphate (polar fraction); or
[98257] increasing or generating the activity of an expression product of one or more nucleic acid molecule(s) comprising a polynucleotide as depicted in the respective line in column 5 or 8 of Table I, application no. 19, preferably the coding region thereof, or a homolog or a fragment thereof, whereby the respective line disclose in column 7 the fine chemical bis-glyceryl phosphate (polar fraction);
[98258] in an organelle, preferably in plastids or mitochondria, especially in plastids, in a non-human organism or a part thereof; preferably a microorganism, a plant cell, a plant or a part thereof, through transformation of the organelle, as compared to a corresponding non-transformed wild type non-human organism or a part thereof; and
[98259] (b) growing the non-human organism under conditions which permit the production of bis-glyceryl phosphate (polar fraction), or a composition comprising bis-glyceryl phosphate (polar fraction) in said non-human organism or in the culture medium surrounding said non-human organism.

[98260] A further embodiment of the present invention relates to a process for the production of glycerol (lipid fraction), which comprises
[98261] (a1) increasing or generating the activity of a polypeptide comprising a polypeptide as depicted in the respective line in column 5 or 8 of Table II, application no. 19, or a homolog or fragment thereof, a consensus sequence or at least one polypeptide motif as depicted in column 8 of Table IV, application no. 19, whereby the respective line disclose in column 7 the fine chemical glycerol (lipid fraction); or
[98262] increasing or generating the activity of an expression product of one or more nucleic acid molecule(s) comprising a polynucleotide as depicted in the respective line in column 5 or 8 of Table I, application no. 19, preferably the coding region thereof, or a homolog or a fragment thereof, whereby the respective line disclose in column 7 the fine chemical glycerol (lipid fraction);
[98263] in an organelle, preferably in plastids or mitochondria, especially in plastids, in a non-human organism or a part thereof; preferably a microorganism, a plant cell, a plant or a part thereof, as compared to a corresponding non-transformed wild type non-human organism or a part thereof; or
[98264] (a2) increasing or generating the activity of a polypeptide comprising a polypeptide as depicted in the respective line in column 5 or 8 of Table II, application no. 19, or a homolog or a fragment thereof, a consensus sequence or at least one polypeptide motif as depicted in the respective line in column 8 of Table IV, application no. 19, which is joined to a transit peptide, whereby the respective line disclose in column 7 the fine chemical glycerol (lipid fraction); or
[98265] increasing or generating the activity of an expression product of one or more nucleic acid molecule(s) comprising a polynucleotide as depicted in the respective line in column 5 or 8 of Table I, application no. 19, preferably the coding region thereof, or a homolog or a fragment thereof, which is joined to a nucleic acid sequence encoding an organelle localization sequence, preferably a plastid or a mitochondrion localization sequence, especially a plastid localization sequence, whereby the respective line disclose in column 7 the fine chemical glycerol (lipid fraction);
[98266] in a non-human organism or a part thereof; preferably a microorganism, a plant cell, a plant or a part thereof, as compared to a corresponding non-transformed wild type non-human organism or a part thereof; or
[98267] (a3) increasing or generating the activity of a polypeptide comprising a polypeptide as depicted in the respective line in column 5 or 8 of Table II, application no. 19, or a homolog or a fragment thereof, a consensus sequence or at least one polypeptide motif as depicted in the respective line in column 8 of Table IV, application no. 19, whereby the respective line disclose in column 7 the fine chemical glycerol (lipid fraction); or
[98268] increasing or generating the activity of an expression product of one or more nucleic acid molecule(s) comprising a polynucleotide as depicted in the respective line in column 5 or 8 of Table I, application no. 19, preferably the coding region thereof, or a homolog or a fragment thereof, whereby the respective line disclose in column 7 the fine chemical glycerol (lipid fraction);
[98269] in an organelle, preferably in plastids or mitochondria, especially in plastids, in a non-human organism or a part thereof; preferably a microorganism, a plant cell, a plant or a part thereof, through transformation of the organelle, as compared to a corresponding non-transformed wild type non-human organism or a part thereof; and
[98270] (b) growing the non-human organism under conditions which permit the production of glycerol (lipid fraction), or a composition comprising glycerol (lipid fraction) in said non-human organism or in the culture medium surrounding said non-human organism.

[98271] A further embodiment of the present invention relates to a process for the production of glycerol (polar fraction), which comprises
[98272] (a1) increasing or generating the activity of a polypeptide comprising a polypeptide as depicted in the respective line in column 5 or 8 of Table II, application no. 19, or a homolog or fragment thereof, a consensus sequence or at least one polypeptide motif as depicted in column 8 of Table IV, application no. 19, whereby the respective line disclose in column 7 the fine chemical glycerol (polar fraction); or
[98273] increasing or generating the activity of an expression product of one or more nucleic acid molecule(s) comprising a polynucleotide as depicted in the respective line in column 5 or 8 of Table I, application no. 19, preferably the coding region thereof, or a homolog or a fragment thereof, whereby the respective line disclose in column 7 the fine chemical glycerol (polar fraction);
[98274] in an organelle, preferably in plastids or mitochondria, especially in plastids, in a non-human organism or a part thereof; preferably a microorganism, a plant cell, a plant or a part thereof, as compared to a corresponding non-transformed wild type non-human organism or a part thereof; or
[98275] (a2) increasing or generating the activity of a polypeptide comprising a polypeptide as depicted in the respective line in column 5 or 8 of Table II, application no. 19, or a homolog or a fragment thereof, a consensus sequence or at least one polypeptide motif as depicted in the respective line in column 8 of Table IV, application no. 19, which is joined to a transit peptide, whereby the respective line disclose in column 7 the fine chemical glycerol (polar fraction); or
[98276] increasing or generating the activity of an expression product of one or more nucleic acid molecule(s) comprising a polynucleotide as depicted in the respective line in column 5 or 8 of Table I, application no. 19, preferably the coding region thereof, or a homolog or a fragment thereof, which is joined to a nucleic acid sequence encoding an organelle localization sequence, preferably a plastid or a mitochondrion localization sequence, especially a plastid localization sequence, whereby the respective line disclose in column 7 the fine chemical glycerol (polar fraction);
[98277] in a non-human organism or a part thereof; preferably a microorganism, a plant cell, a plant or a part thereof, as compared to a corresponding non-transformed wild type non-human organism or a part thereof; or
[98278] (a3) increasing or generating the activity of a polypeptide comprising a polypeptide as depicted in the respective line in column 5 or 8 of Table II, application no. 19, or a homolog or a fragment thereof, a consensus sequence or at least one polypeptide motif as depicted in the respective line in column 8 of Table IV, application no. 19, whereby the respective line disclose in column 7 the fine chemical glycerol (polar fraction); or
[98279] increasing or generating the activity of an expression product of one or more nucleic acid molecule(s) comprising a polynucleotide as depicted in the respective line in column 5 or 8 of Table I, application no. 19, preferably the coding region thereof, or a homolog or a fragment thereof, whereby the respective line disclose in column 7 the fine chemical glycerol (polar fraction);
[98280] in an organelle, preferably in plastids or mitochondria, especially in plastids, in a non-human organism or a part thereof; preferably a microorganism, a plant cell, a plant or a part thereof, through transformation of the organelle, as compared to a corresponding non-transformed wild type non-human organism or a part thereof; and
[98281] (b) growing the non-human organism under conditions which permit the production of glycerol (polar fraction), or a composition comprising glycerol (polar fraction) in said non-human organism or in the culture medium surrounding said non-human organism.

[98282] A further embodiment of the present invention relates to a process for the production of glycerol phosphate (lipid fraction), which comprises
[98283] (a1) increasing or generating the activity of a polypeptide comprising a polypeptide as depicted in the respective line in column 5 or 8 of Table II, application no. 19, or a homolog or fragment thereof, a consensus sequence or at least one polypeptide motif as depicted in column 8 of Table IV, application no. 19, whereby the respective line disclose in column 7 the fine chemical glycerol phosphate (lipid fraction); or
[98284] increasing or generating the activity of an expression product of one or more nucleic acid molecule(s) comprising a polynucleotide as depicted in the respective line in column 5 or 8 of Table I, application no. 19, preferably the coding region thereof, or a homolog or a fragment thereof, whereby the respective line disclose in column 7 the fine chemical glycerol phosphate (lipid fraction);
[98285] in an organelle, preferably in plastids or mitochondria, especially in plastids, in a non-human organism or a part thereof; preferably a microorganism, a plant cell, a plant or a part thereof, as compared to a corresponding non-transformed wild type non-human organism or a part thereof; or
[98286] (a2) increasing or generating the activity of a polypeptide comprising a polypeptide as depicted in the respective line in column 5 or 8 of Table II, application no. 19, or a homolog or a fragment thereof, a consensus sequence or at least one polypeptide motif as depicted in the respective line in column 8 of Table IV, application no. 19, which is joined to a transit peptide, whereby the respective line disclose in column 7 the fine chemical glycerol phosphate (lipid fraction); or
[98287] increasing or generating the activity of an expression product of one or more nucleic acid molecule(s) comprising a polynucleotide as depicted in the respective line in column 5 or 8 of Table I, application no. 19, preferably the coding region thereof, or a homolog or a fragment thereof, which is joined to a nucleic acid sequence encoding an organelle localization sequence, preferably a plastid or a mitochondrion localization sequence, especially a plastid localization sequence, whereby the respective line disclose in column 7 the fine chemical glycerol phosphate (lipid fraction);
[98288] in a non-human organism or a part thereof; preferably a microorganism, a plant cell, a plant or a part thereof, as compared to a corresponding non-transformed wild type non-human organism or a part thereof; or
[98289] (a3) increasing or generating the activity of a polypeptide comprising a polypeptide as depicted in the respective line in column 5 or 8 of Table II, application no. 19, or a homolog or a fragment thereof, a consensus sequence or at least one polypeptide motif as depicted in the respective line in column 8 of Table IV, application no. 19, whereby the respective line disclose in column 7 the fine chemical glycerol phosphate (lipid fraction); or
[98290] increasing or generating the activity of an expression product of one or more nucleic acid molecule(s) comprising a polynucleotide as depicted in the respective line in column 5 or 8 of Table I, application no. 19, preferably the coding region thereof, or a homolog or a fragment thereof, whereby the respective line disclose in column 7 the fine chemical glycerol phosphate (lipid fraction);
[98291] in an organelle, preferably in plastids or mitochondria, especially in plastids, in a non-human organism or a part thereof; preferably a microorganism, a plant cell, a plant or a part thereof, through transformation of the organelle, as compared to a corresponding non-transformed wild type non-human organism or a part thereof; and
[98292] (b) growing the non-human organism under conditions which permit the production of glycerol phosphate (lipid fraction), or a composition comprising glycerol phosphate (lipid fraction) in said non-human organism or in the culture medium surrounding said non-human organism.

[98293] A further embodiment of the present invention relates to a process for the production of glycerol-3-phosphate (polar fraction), which comprises
[98294] (a1) increasing or generating the activity of a polypeptide comprising a polypeptide as depicted in the respective line in column 5 or 8 of Table II, application no. 19, or a homolog or fragment thereof, a consensus sequence or at least one polypeptide motif as depicted in column 8 of Table IV, application no. 19, whereby the respective line disclose in column 7 the fine chemical glycerol-3-phosphate (polar fraction); or
[98295] increasing or generating the activity of an expression product of one or more nucleic acid molecule(s) comprising a polynucleotide as depicted in the respective line in column 5 or 8 of Table I, application no. 19, preferably the coding region thereof, or a homolog or a fragment thereof, whereby the respective line disclose in column 7 the fine chemical glycerol-3-phosphate (polar fraction);
[98296] in an organelle, preferably in plastids or mitochondria, especially in plastids, in a non-human organism or a part thereof; preferably a microorganism, a plant cell, a plant or a part thereof, as compared to a corresponding non-transformed wild type non-human organism or a part thereof; or
[98297] (a2) increasing or generating the activity of a polypeptide comprising a polypeptide as depicted in the respective line in column 5 or 8 of Table II, application no. 19, or a homolog or a fragment thereof, a consensus sequence or at least one polypeptide motif as depicted in the respective line in column 8 of Table IV, application no. 19, which is joined to a transit peptide, whereby the respective line disclose in column 7 the fine chemical glycerol-3-phosphate (polar fraction); or
[98298] increasing or generating the activity of an expression product of one or more nucleic acid molecule(s) comprising a polynucleotide as depicted in the respective line in column 5 or 8 of Table I, application no. 19, preferably the coding region thereof, or a homolog or a fragment thereof, which is joined to a nucleic acid sequence encoding an organelle localization sequence, preferably a plastid or a mitochondrion localization sequence, especially a plastid localization sequence, whereby the respective line disclose in column 7 the fine chemical glycerol-3-phosphate (polar fraction);
[98299] in a non-human organism or a part thereof; preferably a microorganism, a plant cell, a plant or a part thereof, as compared to a corresponding non-transformed wild type non-human organism or a part thereof; or
[98300] (a3) increasing or generating the activity of a polypeptide comprising a polypeptide as depicted in the respective line in column 5 or 8 of Table II, application no. 19, or a homolog or a fragment thereof, a consensus sequence or at least one polypeptide motif as depicted in the respective line in column 8 of Table IV, application no. 19, whereby the respective line disclose in column 7 the fine chemical glycerol-3-phosphate (polar fraction); or
[98301] increasing or generating the activity of an expression product of one or more nucleic acid molecule(s) comprising a polynucleotide as depicted in the respective line in column 5 or 8 of Table I, application no. 19, preferably the coding region thereof, or a homolog or a fragment thereof, whereby the respective line disclose in column 7 the fine chemical glycerol-3-phosphate (polar fraction);
[98302] in an organelle, preferably in plastids or mitochondria, especially in plastids, in a non-human organism or a part thereof; preferably a microorganism, a plant cell, a plant or a part thereof, through transformation of the organelle, as compared to a corresponding non-transformed wild type non-human organism or a part thereof; and
[98303] (b) growing the non-human organism under conditions which permit the production of glycerol-3-phosphate (polar fraction), or a composition comprising glycerol-3-phosphate (polar fraction) in said non-human organism or in the culture medium surrounding said non-human organism.

[98304] A further embodiment of the present invention relates to a process for the production of triacylglycerol, which comprises
[98305] (a1) increasing or generating the activity of a polypeptide comprising a polypeptide as depicted in the respective line in column 5 or 8 of Table II, application no. 19, or a homolog or fragment thereof, a consensus sequence or at least one polypeptide motif as depicted in column 8 of Table IV, application no. 19, whereby the respective line disclose in column 7 the fine chemical triacylglycerol; or
[98306] increasing or generating the activity of an expression product of one or more nucleic acid molecule(s) comprising a polynucleotide as depicted in the respective line in column 5 or 8 of Table I, application no. 19, preferably the coding region thereof, or a homolog or a fragment thereof, whereby the respective line disclose in column 7 the fine chemical triacylglycerol;
[98307] in an organelle, preferably in plastids or mitochondria, especially in plastids, in a non-human organism or a part thereof; preferably a microorganism, a plant cell, a plant or a part thereof, as compared to a corresponding non-transformed wild type non-human organism or a part thereof; or
[98308] (a2) increasing or generating the activity of a polypeptide comprising a polypeptide as depicted in the respective line in column 5 or 8 of Table II, application no. 19, or a homolog or a fragment thereof, a consensus sequence or at least one polypeptide motif as depicted in the respective line in column 8 of Table IV, application no. 19, which is joined to a transit peptide, whereby the respective line disclose in column 7 the fine chemical triacylglycerol; or
[98309] increasing or generating the activity of an expression product of one or more nucleic acid molecule(s) comprising a polynucleotide as depicted in the respective line in column 5 or 8 of Table I, application no. 19, preferably the coding region thereof, or a homolog or a fragment thereof, which is joined to a nucleic acid sequence encoding an organelle localization sequence, preferably a plastid or a mitochondrion localization sequence, especially a plastid localization sequence, whereby the respective line disclose in column 7 the fine chemical triacylglycerol;
[98310] in a non-human organism or a part thereof; preferably a microorganism, a plant cell, a plant or a part thereof, as compared to a corresponding non-transformed wild type non-human organism or a part thereof; or
[98311] (a3) increasing or generating the activity of a polypeptide comprising a polypeptide as depicted in the respective line in column 5 or 8 of Table II, application no. 19, or a homolog or a fragment thereof, a consensus sequence or at least one polypeptide motif as depicted in the respective line in column 8 of Table IV, application no. 19, whereby the respective line disclose in column 7 the fine chemical triacylglycerol; or
[98312] increasing or generating the activity of an expression product of one or more nucleic acid molecule(s) comprising a polynucleotide as depicted in the respective line in column 5 or 8 of Table I, application no. 19, preferably the coding region thereof, or a homolog or a fragment thereof, whereby the respective line disclose in column 7 the fine chemical triacylglycerol;
[98313] in an organelle, preferably in plastids or mitochondria, especially in plastids, in a non-human organism or a part thereof; preferably a microorganism, a plant cell, a plant or a part thereof, through transformation of the organelle, as compared to a corresponding non-transformed wild type non-human organism or a part thereof; and
[98314] (b) growing the non-human organism under conditions which permit the production of triacylglycerol, or a composition comprising triacylglycerol in said non-human organism or in the culture medium surrounding said non-human organism.

[98315] Accordingly, the present invention relates to a process for the production of glycerol phosphate (lipid fraction), which comprises
[98316] (a) increasing or generating the activity of a protein phosphatase in the cytosol of a cell of a non-human organism or a part thereof, preferably a microorganism, a plant cell, a plant or a part thereof, as compared to a corresponding non-transformed wild type non-human organism or a part thereof; and
[98317] (b) growing the non-human organism or a part thereof under conditions which permit the production of glycerol phosphate (lipid fraction) or a composition comprising glycerol phosphate (lipid fraction) in said non-human organism or in the culture medium surrounding said non-human organism.

[98318] Accordingly, the present invention relates to a process for the production of bis-glyceryl phosphate (polar fraction), which comprises
[98319] (a) increasing or generating the activity of a At1g23110-protein in the cytosol of a cell of a non-human organism or a part thereof, preferably a microorganism, a plant cell, a plant or a part thereof, as compared to a corresponding non-transformed wild type non-human organism or a part thereof; and
[98320] (b) growing the non-human organism or a part thereof under conditions which permit the production of bis-glyceryl phosphate (polar fraction) or a composition comprising bis-glyceryl phosphate (polar fraction) in said non-human organism or in the culture medium surrounding said non-human organism.

[98321] Accordingly, the present invention relates to a process for the production of bis-glyceryl phosphate (polar fraction), which comprises
[98322] (a) increasing or generating the activity of a eukaryotic translation initiation factor 5 in the cytosol of a cell of a non-human organism or a part thereof, preferably a microorganism, a plant cell, a plant or a part thereof, as compared to a corresponding non-transformed wild type non-human organism or a part thereof; and
[98323] (b) growing the non-human organism or a part thereof under conditions which permit the production of bis-glyceryl phosphate (polar fraction) or a composition comprising bis-glyceryl phosphate (polar fraction) in said non-human organism or in the culture medium surrounding said non-human organism.

[98324] Accordingly, the present invention relates to a process for the production of glycerol phosphate (lipid fraction), which comprises
[98325] (a) increasing or generating the activity of a eukaryotic translation initiation factor 5 in the cytosol of a cell of a non-human organism or a part thereof, preferably a microorganism, a plant cell, a plant or a part thereof, as compared to a corresponding non-transformed wild type non-human organism or a part thereof; and
[98326] (b) growing the non-human organism or a part thereof under conditions which permit the production of glycerol phosphate (lipid fraction) or a composition comprising glycerol phosphate (lipid fraction) in said non-human organism or in the culture medium surrounding said non-human organism.

[98327] Accordingly, the present invention relates to a process for the production of triacylglycerol, which comprises
[98328] (a) increasing or generating the activity of a At1g67340-protein in the cytosol of a cell of a non-human organism or a part thereof, preferably a microorganism, a plant cell, a plant or a part thereof, as compared to a corresponding non-transformed wild type non-human organism or a part thereof; and
[98329] (b) growing the non-human organism or a part thereof under conditions which permit the production of triacylglycerol or a composition comprising triacylglycerol in said non-human organism or in the culture medium surrounding said non-human organism.

[98330] Accordingly, the present invention relates to a process for the production of glycerol (lipid fraction), which comprises
[98331] (a) increasing or generating the activity of a transcription factor in the cytosol of a cell of a non-human organism or a part thereof, preferably a microorganism, a plant cell, a plant or a part thereof, as compared to a corresponding non-transformed wild type non-human organism or a part thereof; and
[98332] (b) growing the non-human organism or a part thereof under conditions which permit the production of glycerol (lipid fraction) or a composition comprising glycerol (lipid fraction) in said non-human organism or in the culture medium surrounding said non-human organism.

[98333] Accordingly, the present invention relates to a process for the production of bis-glyceryl phosphate (polar fraction), which comprises
[98334] (a) increasing or generating the activity of a protein phosphatase in the cytosol of a cell of a non-human organism or a part thereof, preferably a microorganism, a plant cell, a plant or a part thereof, as compared to a corresponding non-transformed wild type non-human organism or a part thereof; and
[98335] (b) growing the non-human organism or a part thereof under conditions which permit the production of bis-glyceryl phosphate (polar fraction) or a composition comprising bis-glyceryl phosphate (polar fraction) in said non-human organism or in the culture medium surrounding said non-human organism.

[98336] Accordingly, the present invention relates to a process for the production of glycerol (lipid fraction), which comprises
[98337] (a) increasing or generating the activity of a protein phosphatase in the cytosol of a cell of a non-human organism or a part thereof, preferably a microorganism, a plant cell, a plant or a part thereof, as compared to a corresponding non-transformed wild type non-human organism or a part thereof; and
[98338] (b) growing the non-human organism or a part thereof under conditions which permit the production of glycerol (lipid fraction) or a composition comprising glycerol (lipid fraction) in said non-human organism or in the culture medium surrounding said non-human organism.

[98339] Accordingly, the present invention relates to a process for the production of glycerol phosphate (lipid fraction), which comprises
[98340] (a) increasing or generating the activity of a protein phosphatase in the cytosol of a cell of a non-human organism or a part thereof, preferably a microorganism, a plant cell, a plant or a part thereof, as compared to a corresponding non-transformed wild type non-human organism or a part thereof; and
[98341] (b) growing the non-human organism or a part thereof under conditions which permit the production of glycerol phosphate (lipid fraction) or a composition comprising glycerol phosphate (lipid fraction) in said non-human organism or in the culture medium surrounding said non-human organism.

[98342] Accordingly, the present invention relates to a process for the production of bis-glyceryl phosphate (polar fraction), which comprises
[98343] (a) increasing or generating the activity of a CBL-interacting protein kinase in the cytosol of a cell of a non-human organism or a part thereof, preferably a microorganism, a plant cell, a plant or a part thereof, as compared to a corresponding non-transformed wild type non-human organism or a part thereof; and
[98344] (b) growing the non-human organism or a part thereof under conditions which permit the production of bis-glyceryl phosphate (polar fraction) or a composition comprising bis-glyceryl phosphate (polar fraction) in said non-human organism or in the culture medium surrounding said non-human organism.

[98345] Accordingly, the present invention relates to a process for the production of bis-glyceryl phosphate (polar fraction), which comprises
[98346] (a) increasing or generating the activity of a phosphatidylinositol 3- and 4-kinase family protein in the cytosol of a cell of a non-human organism or a part thereof, preferably a microorganism, a plant cell, a plant or a part thereof, as compared to a corresponding non-transformed wild type non-human organism or a part thereof; and
[98347] (b) growing the non-human organism or a part thereof under conditions which permit the production of bis-glyceryl phosphate (polar fraction) or a composition comprising bis-glyceryl phosphate (polar fraction) in said non-human organism or in the culture medium surrounding said non-human organism.

[98348] Accordingly, the present invention relates to a process for the production of triacylglycerol, which comprises
[98349] (a) increasing or generating the activity of a heat shock transcription factor in the cytosol of a cell of a non-human organism or a part thereof, preferably a microorganism, a plant cell, a plant or a part thereof, as compared to a corresponding non-transformed wild type non-human organism or a part thereof; and
[98350] (b) growing the non-human organism or a part thereof under conditions which permit the production of triacylglycerol or a composition comprising triacylglycerol in said non-human organism or in the culture medium surrounding said non-human organism.

[98351] Accordingly, the present invention relates to a process for the production of glycerol (lipid fraction), which comprises
[98352] (a) increasing or generating the activity of a transcription factor in the cytosol of a cell of a non-human organism or a part thereof, preferably a microorganism, a plant cell, a plant or a part thereof, as compared to a corresponding non-transformed wild type non-human organism or a part thereof; and
[98353] (b) growing the non-human organism or a part thereof under conditions which permit the production of glycerol (lipid fraction) or a composition comprising glycerol (lipid fraction) in said non-human organism or in the culture medium surrounding said non-human organism.

[98354] Accordingly, the present invention relates to a process for the production of glycerol (lipid fraction), which comprises
[98355] (a) increasing or generating the activity of a monothiol glutaredoxin in the cytosol of a cell of a non-human organism or a part thereof, preferably a microorganism, a plant cell, a plant or a part thereof, as compared to a corresponding non-transformed wild type non-human organism or a part thereof; and
[98356] (b) growing the non-human organism or a part thereof under conditions which permit the production of glycerol (lipid fraction) or a composition comprising glycerol (lipid fraction) in said non-human organism or in the culture medium surrounding said non-human organism.

[98357] Accordingly, the present invention relates to a process for the production of triacylglycerol, which comprises
[98358] (a) increasing or generating the activity of a monothiol glutaredoxin in the cytosol of a cell of a non-human organism or a part thereof, preferably a microorganism, a plant cell, a plant or a part thereof, as compared to a corresponding non-transformed wild type non-human organism or a part thereof; and
[98359] (b) growing the non-human organism or a part thereof under conditions which permit the production of triacylglycerol or a composition comprising triacylglycerol in said non-human organism or in the culture medium surrounding said non-human organism.

[98360] Accordingly, the present invention relates to a process for the production of glycerol (lipid fraction), which comprises
[98361] (a) increasing or generating the activity of a monothiol glutaredoxin in the cytosol of a cell of a non-human organism or a part thereof, preferably a microorganism, a plant cell, a plant or a part thereof, as compared to a corresponding non-transformed wild type non-human organism or a part thereof; and
[98362] (b) growing the non-human organism or a part thereof under conditions which permit the production of glycerol (lipid fraction) or a composition comprising glycerol (lipid fraction) in said non-human organism or in the culture medium surrounding said non-human organism.

[98363] Accordingly, the present invention relates to a process for the production of triacylglycerol, which comprises
[98364] (a) increasing or generating the activity of a monothiol glutaredoxin in the cytosol of a cell of a non-human organism or a part thereof, preferably a microorganism, a plant cell, a plant or a part thereof, as compared to a corresponding non-transformed wild type non-human organism or a part thereof; and
[98365] (b) growing the non-human organism or a part thereof under conditions which permit the production of triacylglycerol or a composition comprising triacylglycerol in said non-human organism or in the culture medium surrounding said non-human organism.

[98366] Accordingly, the present invention relates to a process for the production of glycerol phosphate (lipid fraction), which comprises
[98367] (a) increasing or generating the activity of a protein phosphatase in the cytosol of a cell of a non-human organism or a part thereof, preferably a microorganism, a plant cell, a plant or a part thereof, as compared to a corresponding non-transformed wild type non-human organism or a part thereof; and
[98368] (b) growing the non-human organism or a part thereof under conditions which permit the production of glycerol phosphate (lipid fraction) or a composition comprising glycerol phosphate (lipid fraction) in said non-human organism or in the culture medium surrounding said non-human organism.

[98369] Accordingly, the present invention relates to a process for the production of bis-glyceryl phosphate (polar fraction), which comprises
[98370] (a) increasing or generating the activity of a cyclin D in the cytosol of a cell of a non-human organism or a part thereof, preferably a microorganism, a plant cell, a plant or a part thereof, as compared to a corresponding non-transformed wild type non-human organism or a part thereof; and
[98371] (b) growing the non-human organism or a part thereof under conditions which permit the production of bis-glyceryl phosphate (polar fraction) or a composition comprising bis-glyceryl phosphate (polar fraction) in said non-human organism or in the culture medium surrounding said non-human organism.

[98372] Accordingly, the present invention relates to a process for the production of bis-glyceryl phosphate (polar fraction), which comprises
[98373] (a) increasing or generating the activity of a calcium-dependent protein kinase in the cytosol of a cell of a non-human organism or a part thereof, preferably a microorganism, a plant cell, a plant or a part thereof, as compared to a corresponding non-transformed wild type non-human organism or a part thereof; and
[98374] (b) growing the non-human organism or a part thereof under conditions which permit the production of bis-glyceryl phosphate (polar fraction) or a composition comprising bis-glyceryl phosphate (polar fraction) in said non-human organism or in the culture medium surrounding said non-human organism.

[98375] Accordingly, the present invention relates to a process for the production of glycerol (lipid fraction), which comprises
[98376] (a) increasing or generating the activity of a heat shock transcription factor in the cytosol of a cell of a non-human organism or a part thereof, preferably a microorganism, a plant cell, a plant or a part thereof, as compared to a corresponding non-transformed wild type non-human organism or a part thereof; and
[98377] (b) growing the non-human organism or a part thereof under conditions which permit the production of glycerol (lipid fraction) or a composition comprising glycerol (lipid fraction) in said non-human organism or in the culture medium surrounding said non-human organism.

[98378] Accordingly, the present invention relates to a process for the production of triacylglycerol, which comprises
[98379] (a) increasing or generating the activity of a heat shock transcription factor in the cytosol of a cell of a non-human organism or a part thereof, preferably a microorganism, a plant cell, a plant or a part thereof, as compared to a corresponding non-transformed wild type non-human organism or a part thereof; and
[98380] (b) growing the non-human organism or a part thereof under conditions which permit the production of triacylglycerol or a composition comprising triacylglycerol in said non-human organism or in the culture medium surrounding said non-human organism.

[98381] Accordingly, the present invention relates to a process for the production of glycerol (lipid fraction), which comprises
[98382] (a) increasing or generating the activity of a monothiol glutaredoxin in the cytosol of a cell of a non-human organism or a part thereof, preferably a microorganism, a plant cell, a plant or a part thereof, as compared to a corresponding non-transformed wild type non-human organism or a part thereof; and
[98383] (b) growing the non-human organism or a part thereof under conditions which permit the production of glycerol (lipid fraction) or a composition comprising glycerol (lipid fraction) in said non-human organism or in the culture medium surrounding said non-human organism.

[98384] Accordingly, the present invention relates to a process for the production of glycerol phosphate (lipid fraction), which comprises
[98385] (a) increasing or generating the activity of a protein phosphatase in the cytosol of a cell of a non-human organism or a part thereof, preferably a microorganism, a plant cell, a plant or a part thereof, as compared to a corresponding non-transformed wild type non-human organism or a part thereof; and
[98386] (b) growing the non-human organism or a part thereof under conditions which permit the production of glycerol phosphate (lipid fraction) or a composition comprising glycerol phosphate (lipid fraction) in said non-human organism or in the culture medium surrounding said non-human organism.

[98387] Accordingly, the present invention relates to a process for the production of glycerol phosphate (lipid fraction), which comprises
[98388] (a) increasing or generating the activity of a protein phosphatase in the cytosol of a cell of a non-human organism or a part thereof, preferably a microorganism, a plant cell, a plant or a part thereof, as compared to a corresponding non-transformed wild type non-human organism or a part thereof; and
[98389] (b) growing the non-human organism or a part thereof under conditions which permit the production of glycerol phosphate (lipid fraction) or a composition comprising glycerol phosphate (lipid fraction) in said non-human organism or in the culture medium surrounding said non-human organism.

[98390] Accordingly, the present invention relates to a process for the production of glycerol phosphate (lipid fraction), which comprises
[98391] (a) increasing or generating the activity of a pyruvate kinase in the cytosol of a cell of a non-human organism or a part thereof, preferably a microorganism, a plant cell, a plant or a part thereof, as compared to a corresponding non-transformed wild type non-human organism or a part thereof; and
[98392] (b) growing the non-human organism or a part thereof under conditions which permit the production of glycerol phosphate (lipid fraction) or a composition comprising glycerol phosphate (lipid fraction) in said non-human organism or in the culture medium surrounding said non-human organism.

[98393] Accordingly, the present invention relates to a process for the production of triacylglycerol, which comprises
[98394] (a) increasing or generating the activity of a Glycine cleavage system T aminomethyltransferase in the cytosol of a cell of a non-human organism or a part thereof, preferably a microorganism, a plant cell, a plant or a part thereof, as compared to a corresponding non-transformed wild type non-human organism or a part thereof; and
[98395] (b) growing the non-human organism or a part thereof under conditions which permit the production of triacylglycerol or a composition comprising triacylglycerol in said non-human organism or in the culture medium surrounding said non-human organism.

[98396] Accordingly, the present invention relates to a process for the production of glycerol phosphate (lipid fraction), which comprises
[98397] (a) increasing or generating the activity of a sec-independent protein translocase in the cytosol of a cell of a non-human organism or a part thereof, preferably a microorganism, a plant cell, a plant or a part thereof, as compared to a corresponding non-transformed wild type non-human organism or a part thereof; and
[98398] (b) growing the non-human organism or a part thereof under conditions which permit the production of glycerol phosphate (lipid fraction) or a composition comprising glycerol phosphate (lipid fraction) in said non-human organism or in the culture medium surrounding said non-human organism.

[98399] Accordingly, the present invention relates to a process for the production of glycerol (lipid fraction), which comprises
[98400] (a) increasing or generating the activity of a oxidoreductase in the cytosol of a cell of a non-human organism or a part thereof, preferably a microorganism, a plant cell, a plant or a part thereof, as compared to a corresponding non-transformed wild type non-human organism or a part thereof; and
[98401] (b) growing the non-human organism or a part thereof under conditions which permit the production of glycerol (lipid fraction) or a composition comprising glycerol (lipid fraction) in said non-human organism or in the culture medium surrounding said non-human organism.

[98402] Accordingly, the present invention relates to a process for the production of bis-glyceryl phosphate (polar fraction), which comprises
[98403] (a) increasing or generating the activity of a transcriptional regulator protein in the cytosol of a cell of a non-human organism or a part thereof, preferably a microorganism, a plant cell, a plant or a part thereof, as compared to a corresponding non-transformed wild type non-human organism or a part thereof; and
[98404] (b) growing the non-human organism or a part thereof under conditions which permit the production of bis-glyceryl phosphate (polar fraction) or a composition comprising bis-glyceryl phosphate (polar fraction) in said non-human organism or in the culture medium surrounding said non-human organism.

[98405] Accordingly, the present invention relates to a process for the production of bis-glyceryl phosphate (polar fraction), which comprises
[98406] (a) increasing or generating the activity of a beta-hydroxylase in the cytosol of a cell of a non-human organism or a part thereof, preferably a microorganism, a plant cell, a plant or a part thereof, as compared to a corresponding non-transformed wild type non-human organism or a part thereof; and
[98407] (b) growing the non-human organism or a part thereof under conditions which permit the production of bis-glyceryl phosphate (polar fraction) or a composition comprising bis-glyceryl phosphate (polar fraction) in said non-human organism or in the culture medium surrounding said non-human organism.

[98408] Accordingly, the present invention relates to a process for the production of triacylglycerol, which comprises
[98409] (a) increasing or generating the activity of a beta-hydroxylase in the cytosol of a cell of a non-human organism or a part thereof, preferably a microorganism, a plant cell, a plant or a part thereof, as compared to a corresponding non-transformed wild type non-human organism or a part thereof; and
[98410] (b) growing the non-human organism or a part thereof under conditions which permit the production of triacylglycerol or a composition comprising triacylglycerol in said non-human organism or in the culture medium surrounding said non-human organism.

[98411] Accordingly, the present invention relates to a process for the production of bis-glyceryl phosphate (polar fraction), which comprises
[98412] (a) increasing or generating the activity of a oxidoreductase in the cytosol of a cell of a non-human organism or a part thereof, preferably a microorganism, a plant cell, a plant or a part thereof, as compared to a corresponding non-transformed wild type non-human organism or a part thereof; and
[98413] (b) growing the non-human organism or a part thereof under conditions which permit the production of bis-glyceryl phosphate (polar fraction) or a composition comprising bis-glyceryl phosphate (polar fraction) in said non-human organism or in the culture medium surrounding said non-human organism.

[98414] Accordingly, the present invention relates to a process for the production of glycerol phosphate (lipid fraction), which comprises
[98415] (a) increasing or generating the activity of a ThiF family protein in the cytosol of a cell of a non-human organism or a part thereof, preferably a microorganism, a plant cell, a plant or a part thereof, as compared to a corresponding non-transformed wild type non-human organism or a part thereof; and
[98416] (b) growing the non-human organism or a part thereof under conditions which permit the production of glycerol phosphate (lipid fraction) or a composition comprising glycerol phosphate (lipid fraction) in said non-human organism or in the culture medium surrounding said non-human organism.

[98417] Accordingly, the present invention relates to a process for the production of glycerol (lipid fraction), which comprises
[98418] (a) increasing or generating the activity of a recombinase A in the cytosol of a cell of a non-human organism or a part thereof, preferably a microorganism, a plant cell, a plant or a part thereof, as compared to a corresponding non-transformed wild type non-human organism or a part thereof; and
[98419] (b) growing the non-human organism or a part thereof under conditions which permit the production of glycerol (lipid fraction) or a composition comprising glycerol (lipid fraction) in said non-human organism or in the culture medium surrounding said non-human organism.

[98420] Accordingly, the present invention relates to a process for the production of bis-glyceryl phosphate (polar fraction), which comprises
[98421] (a) increasing or generating the activity of a NADH-quinone oxidoreductase subunit in the cytosol of a cell of a non-human organism or a part thereof, preferably a microorganism, a plant cell, a plant or a part thereof, as compared to a corresponding non-transformed wild type non-human organism or a part thereof; and
[98422] (b) growing the non-human organism or a part thereof under conditions which permit the production of bis-glyceryl phosphate (polar fraction) or a composition comprising bis-glyceryl phosphate (polar fraction) in said non-human organism or in the culture medium surrounding said non-human organism.

[98423] Accordingly, the present invention relates to a process for the production of triacylglycerol, which comprises
[98424] (a) increasing or generating the activity of a hydrolase in the cytosol of a cell of a non-human organism or a part thereof, preferably a microorganism, a plant cell, a plant or a part thereof, as compared to a corresponding non-transformed wild type non-human organism or a part thereof; and
[98425] (b) growing the non-human organism or a part thereof under conditions which permit the production of triacylglycerol or a composition comprising triacylglycerol in said non-human organism or in the culture medium surrounding said non-human organism.

[98426] Accordingly, the present invention relates to a process for the production of glycerol phosphate (lipid fraction), which comprises
[98427] (a) increasing or generating the activity of a HesB/YadR/YfhF family protein in the cytosol of a cell of a non-human organism or a part thereof, preferably a microorganism, a plant cell, a plant or a part thereof, as compared to a corresponding non-transformed wild type non-human organism or a part thereof; and
[98428] (b) growing the non-human organism or a part thereof under conditions which permit the production of glycerol phosphate (lipid fraction) or a composition comprising glycerol phosphate (lipid fraction) in said non-human organism or in the culture medium surrounding said non-human organism.

[98429] Accordingly, the present invention relates to a process for the production of bis-glyceryl phosphate (polar fraction), which comprises
[98430] (a) increasing or generating the activity of a pyruvate kinase in the cytosol of a cell of a non-human organism or a part thereof, preferably a microorganism, a plant cell, a plant or a part thereof, as compared to a corresponding non-transformed wild type non-human organism or a part thereof; and
[98431] (b) growing the non-human organism or a part thereof under conditions which permit the production of bis-glyceryl phosphate (polar fraction) or a composition comprising bis-glyceryl phosphate (polar fraction) in said non-human organism or in the culture medium surrounding said non-human organism.

[98432] Accordingly, the present invention relates to a process for the production of triacylglycerol, which comprises
[98433] (a) increasing or generating the activity of a threonine synthase in the cytosol of a cell of a non-human organism or a part thereof, preferably a microorganism, a plant cell, a plant or a part thereof, as compared to a corresponding non-transformed wild type non-human organism or a part thereof; and
[98434] (b) growing the non-human organism or a part thereof under conditions which permit the production of triacylglycerol or a composition comprising triacylglycerol in said non-human organism or in the culture medium surrounding said non-human organism.

[98435] Accordingly, the present invention relates to a process for the production of glycerol phosphate (lipid fraction), which comprises
[98436] (a) increasing or generating the activity of a b0050-protein in the cytosol of a cell of a non-human organism or a part thereof, preferably a microorganism, a plant cell, a plant or a part thereof, as compared to a corresponding non-transformed wild type non-human organism or a part thereof; and
[98437] (b) growing the non-human organism or a part thereof under conditions which permit the production of glycerol phosphate (lipid fraction) or a composition comprising glycerol phosphate (lipid fraction) in said non-human organism or in the culture medium surrounding said non-human organism.

[98438] Accordingly, the present invention relates to a process for the production of bis-glyceryl phosphate (polar fraction), which comprises
[98439] (a) increasing or generating the activity of a serine protease in the cytosol of a cell of a non-human organism or a part thereof, preferably a microorganism, a plant cell, a plant or a part thereof, as compared to a corresponding non-transformed wild type non-human organism or a part thereof; and
[98440] (b) growing the non-human organism or a part thereof under conditions which permit the production of bis-glyceryl phosphate (polar fraction) or a composition comprising bis-glyceryl phosphate (polar fraction) in said non-human organism or in the culture medium surrounding said non-human organism.

[98441] Accordingly, the present invention relates to a process for the production of triacylglycerol, which comprises
[98442] (a) increasing or generating the activity of a serine protease in the cytosol of a cell of a non-human organism or a part thereof, preferably a microorganism, a plant cell, a plant or a part thereof, as compared to a corresponding non-transformed wild type non-human organism or a part thereof; and
[98443] (b) growing the non-human organism or a part thereof under conditions which permit the production of triacylglycerol or a composition comprising triacylglycerol in said non-human organism or in the culture medium surrounding said non-human organism.

[98444] Accordingly, the present invention relates to a process for the production of bis-glyceryl phosphate (polar fraction), which comprises
[98445] (a) increasing or generating the activity of a ATP-binding component of a transport system in the cytosol of a cell of a non-human organism or a part thereof, preferably a microorganism, a plant cell, a plant or a part thereof, as compared to a corresponding non-transformed wild type non-human organism or a part thereof; and
[98446] (b) growing the non-human organism or a part thereof under conditions which permit the production of bis-glyceryl phosphate (polar fraction) or a composition comprising bis-glyceryl phosphate (polar fraction) in said non-human organism or in the culture medium surrounding said non-human organism.

[98447] Accordingly, the present invention relates to a process for the production of glycerol (lipid fraction), which comprises
[98448] (a) increasing or generating the activity of a b0518-protein in the cytosol of a cell of a non-human organism or a part thereof, preferably a microorganism, a plant cell, a plant or a part thereof, as compared to a corresponding non-transformed wild type non-human organism or a part thereof; and
[98449] (b) growing the non-human organism or a part thereof under conditions which permit the production of glycerol (lipid fraction) or a composition comprising glycerol (lipid fraction) in said non-human organism or in the culture medium surrounding said non-human organism.

[98450] Accordingly, the present invention relates to a process for the production of bis-glyceryl phosphate (polar fraction), which comprises
[98451] (a) increasing or generating the activity of a phosphoglyceromutase in the cytosol of a cell of a non-human organism or a part thereof, preferably a microorganism, a plant cell, a plant or a part thereof, as compared to a corresponding non-transformed wild type non-human organism or a part thereof; and
[98452] (b) growing the non-human organism or a part thereof under conditions which permit the production of bis-glyceryl phosphate (polar fraction) or a composition comprising bis-glyceryl phosphate (polar fraction) in said non-human organism or in the culture medium surrounding said non-human organism.

[98453] Accordingly, the present invention relates to a process for the production of glycerol (polar fraction), which comprises
[98454] (a) increasing or generating the activity of a putrescine transport system permease protein in the cytosol of a cell of a non-human organism or a part thereof, preferably a microorganism, a plant cell, a plant or a part thereof, as compared to a corresponding non-transformed wild type non-human organism or a part thereof; and
[98455] (b) growing the non-human organism or a part thereof under conditions which permit the production of glycerol (polar fraction) or a composition comprising glycerol (polar fraction) in said non-human organism or in the culture medium surrounding said non-human organism.

[98456] Accordingly, the present invention relates to a process for the production of glycerol (lipid fraction), which comprises
[98457] (a) increasing or generating the activity of a methylglyoxal synthase in the cytosol of a cell of a non-human organism or a part thereof, preferably a microorganism, a plant cell, a plant or a part thereof, as compared to a corresponding non-transformed wild type non-human organism or a part thereof; and
[98458] (b) growing the non-human organism or a part thereof under conditions which permit the production of glycerol (lipid fraction) or a composition comprising glycerol (lipid fraction) in said non-human organism or in the culture medium surrounding said non-human organism.

[98459] Accordingly, the present invention relates to a process for the production of glycerol (polar fraction), which comprises
[98460] (a) increasing or generating the activity of a methylglyoxal synthase in the cytosol of a cell of a non-human organism or a part thereof, preferably a microorganism, a plant cell, a plant or a part thereof, as compared to a corresponding non-transformed wild type non-human organism or a part thereof; and
[98461] (b) growing the non-human organism or a part thereof under conditions which permit the production of glycerol (polar fraction) or a composition comprising glycerol (polar fraction) in said non-human organism or in the culture medium surrounding said non-human organism.

[98462] Accordingly, the present invention relates to a process for the production of bis-glyceryl phosphate (polar fraction), which comprises
[98463] (a) increasing or generating the activity of a b0970-protein in the cytosol of a cell of a non-human organism or a part thereof, preferably a microorganism, a plant cell, a plant or a part thereof, as compared to a corresponding non-transformed wild type non-human organism or a part thereof; and
[98464] (b) growing the non-human organism or a part thereof under conditions which permit the production of bis-glyceryl phosphate (polar fraction) or a composition comprising bis-glyceryl phosphate (polar fraction) in said non-human organism or in the culture medium surrounding said non-human organism.

[98465] Accordingly, the present invention relates to a process for the production of bis-glyceryl phosphate (polar fraction), which comprises
[98466] (a) increasing or generating the activity of a b1003-protein in the cytosol of a cell of a non-human organism or a part thereof, preferably a microorganism, a plant cell, a plant or a part thereof, as compared to a corresponding non-transformed wild type non-human organism or a part thereof; and
[98467] (b) growing the non-human organism or a part thereof under conditions which permit the production of bis-glyceryl phosphate (polar fraction) or a composition comprising bis-glyceryl phosphate (polar fraction) in said non-human organism or in the culture medium surrounding said non-human organism.

[98468] Accordingly, the present invention relates to a process for the production of bis-glyceryl phosphate (polar fraction), which comprises
[98469] (a) increasing or generating the activity of a 3-oxoacyl-[acyl-carrier-protein] synthase in the cytosol of a cell of a non-human organism or a part thereof, preferably a microorganism, a plant cell, a plant or a part thereof, as compared to a corresponding non-transformed wild type non-human organism or a part thereof; and
[98470] (b) growing the non-human organism or a part thereof under conditions which permit the production of bis-glyceryl phosphate (polar fraction) or a composition comprising bis-glyceryl phosphate (polar fraction) in said non-human organism or in the culture medium surrounding said non-human organism.

[98471] Accordingly, the present invention relates to a process for the production of glycerol (lipid fraction), which comprises
[98472] (a) increasing or generating the activity of a sodium/proton antiporter in the cytosol of a cell of a non-human organism or a part thereof, preferably a microorganism, a plant cell, a plant or a part thereof, as compared to a corresponding non-transformed wild type non-human organism or a part thereof; and
[98473] (b) growing the non-human organism or a part thereof under conditions which permit the production of glycerol (lipid fraction) or a composition comprising glycerol (lipid fraction) in said non-human organism or in the culture medium surrounding said non-human organism.

[98474] Accordingly, the present invention relates to a process for the production of triacylglycerol, which comprises
[98475] (a) increasing or generating the activity of a b1234-protein in the cytosol of a cell of a non-human organism or a part thereof, preferably a microorganism, a plant cell, a plant or a part thereof, as compared to a corresponding non-transformed wild type non-human organism or a part thereof; and
[98476] (b) growing the non-human organism or a part thereof under conditions which permit the production of triacylglycerol or a composition comprising triacylglycerol in said non-human organism or in the culture medium surrounding said non-human organism.

[98477] Accordingly, the present invention relates to a process for the production of glycerol (lipid fraction), which comprises
[98478] (a) increasing or generating the activity of a cardiolipin synthase in the cytosol of a cell of a non-human organism or a part thereof, preferably a microorganism, a plant cell, a plant or a part thereof, as compared to a corresponding non-transformed wild type non-human organism or a part thereof; and
[98479] (b) growing the non-human organism or a part thereof under conditions which permit the production of glycerol (lipid fraction) or a composition comprising glycerol (lipid fraction) in said non-human organism or in the culture medium surrounding said non-human organism.

[98480] Accordingly, the present invention relates to a process for the production of glycerol phosphate (lipid fraction), which comprises
[98481] (a) increasing or generating the activity of a b1330-protein in the cytosol of a cell of a non-human organism or a part thereof, preferably a microorganism, a plant cell, a plant or a part thereof, as compared to a corresponding non-transformed wild type non-human organism or a part thereof; and
[98482] (b) growing the non-human organism or a part thereof under conditions which permit the production of glycerol phosphate (lipid fraction) or a composition comprising glycerol phosphate (lipid fraction) in said non-human organism or in the culture medium surrounding said non-human organism.

[98483] Accordingly, the present invention relates to a process for the production of bis-glyceryl phosphate (polar fraction), which comprises
[98484] (a) increasing or generating the activity of a ATP-dependent RNA helicase in the cytosol of a cell of a non-human organism or a part thereof, preferably a microorganism, a plant cell, a plant or a part thereof, as compared to a corresponding non-transformed wild type non-human organism or a part thereof; and
[98485] (b) growing the non-human organism or a part thereof under conditions which permit the production of bis-glyceryl phosphate (polar fraction) or a composition comprising bis-glyceryl phosphate (polar fraction) in said non-human organism or in the culture medium surrounding said non-human organism.

[98486] Accordingly, the present invention relates to a process for the production of bis-glyceryl phosphate (polar fraction), which comprises
[98487] (a) increasing or generating the activity of a phenylacetic acid degradation protein in the cytosol of a cell of a non-human organism or a part thereof, preferably a microorganism, a plant cell, a plant or a part thereof, as compared to a corresponding non-transformed wild type non-human organism or a part thereof; and
[98488] (b) growing the non-human organism or a part thereof under conditions which permit the production of bis-glyceryl phosphate (polar fraction) or a composition comprising bis-glyceryl phosphate (polar fraction) in said non-human organism or in the culture medium surrounding said non-human organism.

[98489] Accordingly, the present invention relates to a process for the production of bis-glyceryl phosphate (polar fraction), which comprises
[98490] (a) increasing or generating the activity of a lipoprotein precursor in the cytosol of a cell of a non-human organism or a part thereof, preferably a microorganism, a plant cell, a plant or a part thereof, as compared to a corresponding non-transformed wild type non-human organism or a part thereof; and
[98491] (b) growing the non-human organism or a part thereof under conditions which permit the production of bis-glyceryl phosphate (polar fraction) or a composition comprising bis-glyceryl phosphate (polar fraction) in said non-human organism or in the culture medium surrounding said non-human organism.

[98492] Accordingly, the present invention relates to a process for the production of bis-glyceryl phosphate (polar fraction), which comprises
[98493] (a) increasing or generating the activity of a b1522-protein in the cytosol of a cell of a non-human organism or a part thereof, preferably a microorganism, a plant cell, a plant or a part thereof, as compared to a corresponding non-transformed wild type non-human organism or a part thereof; and
[98494] (b) growing the non-human organism or a part thereof under conditions which permit the production of bis-glyceryl phosphate (polar fraction) or a composition comprising bis-glyceryl phosphate (polar fraction) in said non-human organism or in the culture medium surrounding said non-human organism.

[98495] Accordingly, the present invention relates to a process for the production of bis-glyceryl phosphate (polar fraction), which comprises
[98496] (a) increasing or generating the activity of a lysozyme in the cytosol of a cell of a non-human organism or a part thereof, preferably a microorganism, a plant cell, a plant or a part thereof, as compared to a corresponding non-transformed wild type non-human organism or a part thereof; and
[98497] (b) growing the non-human organism or a part thereof under conditions which permit the production of bis-glyceryl phosphate (polar fraction) or a composition comprising bis-glyceryl phosphate (polar fraction) in said non-human organism or in the culture medium surrounding said non-human organism.

[98498] Accordingly, the present invention relates to a process for the production of bis-glyceryl phosphate (polar fraction), which comprises
[98499] (a) increasing or generating the activity of a b1556-protein in the cytosol of a cell of a non-human organism or a part thereof, preferably a microorganism, a plant cell, a plant or a part thereof, as compared to a corresponding non-transformed wild type non-human organism or a part thereof; and
[98500] (b) growing the non-human organism or a part thereof under conditions which permit the production of bis-glyceryl phosphate (polar fraction) or a composition comprising bis-glyceryl phosphate (polar fraction) in said non-human organism or in the culture medium surrounding said non-human organism.

[98501] Accordingly, the present invention relates to a process for the production of triacylglycerol, which comprises
[98502] (a) increasing or generating the activity of a b1583-protein in the cytosol of a cell of a non-human organism or a part thereof, preferably a microorganism, a plant cell, a plant or a part thereof, as compared to a corresponding non-transformed wild type non-human organism or a part thereof; and
[98503] (b) growing the non-human organism or a part thereof under conditions which permit the production of triacylglycerol or a composition comprising triacylglycerol in said non-human organism or in the culture medium surrounding said non-human organism.

[98504] Accordingly, the present invention relates to a process for the production of bis-glyceryl phosphate (polar fraction), which comprises
[98505] (a) increasing or generating the activity of a Fe—S subunit of oxidoreductase in the cytosol of a cell of a non-human organism or a part thereof, preferably a microorganism, a plant cell, a plant or a part thereof, as compared to a corresponding non-transformed wild type non-human organism or a part thereof; and
[98506] (b) growing the non-human organism or a part thereof under conditions which permit the production of bis-glyceryl phosphate (polar fraction) or a composition comprising bis-glyceryl phosphate (polar fraction) in said non-human organism or in the culture medium surrounding said non-human organism.

[98507] Accordingly, the present invention relates to a process for the production of glycerol (lipid fraction), which comprises
[98508] (a) increasing or generating the activity of a acid shock protein in the cytosol of a cell of a non-human organism or a part thereof, preferably a microorganism, a plant cell, a plant or a part thereof, as compared to a corresponding non-transformed wild type non-human organism or a part thereof; and
[98509] (b) growing the non-human organism or a part thereof under conditions which permit the production of glycerol (lipid fraction) or a composition comprising glycerol (lipid fraction) in said non-human organism or in the culture medium surrounding said non-human organism.

[98510] Accordingly, the present invention relates to a process for the production of bis-glyceryl phosphate (polar fraction), which comprises
[98511] (a) increasing or generating the activity of a b1670-protein in the cytosol of a cell of a non-human organism or a part thereof, preferably a microorganism, a plant cell, a plant or a part thereof, as compared to a corresponding non-transformed wild type non-human organism or a part thereof; and
[98512] (b) growing the non-human organism or a part thereof under conditions which permit the production of bis-glyceryl phosphate (polar fraction) or a composition comprising bis-glyceryl phosphate (polar fraction) in said non-human organism or in the culture medium surrounding said non-human organism.

[98513] Accordingly, the present invention relates to a process for the production of bis-glyceryl phosphate (polar fraction), which comprises
[98514] (a) increasing or generating the activity of a b1672-protein in the cytosol of a cell of a non-human organism or a part thereof, preferably a microorganism, a plant cell, a plant or a part thereof, as compared to a corresponding non-transformed wild type non-human organism or a part thereof; and
[98515] (b) growing the non-human organism or a part thereof under conditions which permit the production of bis-glyceryl phosphate (polar fraction) or a composition comprising bis-glyceryl phosphate (polar fraction) in said non-human organism or in the culture medium surrounding said non-human organism.

[98516] Accordingly, the present invention relates to a process for the production of triacylglycerol, which comprises
[98517] (a) increasing or generating the activity of a b1703-protein in the cytosol of a cell of a non-human organism or a part thereof, preferably a microorganism, a plant cell, a plant or a part thereof, as compared to a corresponding non-transformed wild type non-human organism or a part thereof; and
[98518] (b) growing the non-human organism or a part thereof under conditions which permit the production of triacylglycerol or a composition comprising triacylglycerol in said non-human organism or in the culture medium surrounding said non-human organism.

[98519] Accordingly, the present invention relates to a process for the production of bis-glyceryl phosphate (polar fraction), which comprises
[98520] (a) increasing or generating the activity of a phosphotransferase system component in the cytosol of a cell of a non-human organism or a part thereof, preferably a microorganism, a plant cell, a plant or a part thereof, as compared to a corresponding non-transformed wild type non-human organism or a part thereof; and
[98521] (b) growing the non-human organism or a part thereof under conditions which permit the production of bis-glyceryl phosphate (polar fraction) or a composition comprising bis-glyceryl phosphate (polar fraction) in said non-human organism or in the culture medium surrounding said non-human organism.

[98522] Accordingly, the present invention relates to a process for the production of triacylglycerol, which comprises
[98523] (a) increasing or generating the activity of a B1795-protein in the cytosol of a cell of a non-human organism or a part thereof, preferably a microorganism, a plant cell, a plant or a part thereof, as compared to a corresponding non-transformed wild type non-human organism or a part thereof; and
[98524] (b) growing the non-human organism or a part thereof under conditions which permit the production of triacylglycerol or a composition comprising triacylglycerol in said non-human organism or in the culture medium surrounding said non-human organism.

[98525] Accordingly, the present invention relates to a process for the production of glycerol-3-phosphate (polar fraction), which comprises
[98526] (a) increasing or generating the activity of a L-serine dehydratase in the cytosol of a cell of a non-human organism or a part thereof, preferably a microorganism, a plant cell, a plant or a part thereof, as compared to a corresponding non-transformed wild type non-human organism or a part thereof; and
[98527] (b) growing the non-human organism or a part thereof under conditions which permit the production of glycerol-3-phosphate (polar fraction) or a composition comprising glycerol-3-phosphate (polar fraction) in said non-human organism or in the culture medium surrounding said non-human organism.

[98528] Accordingly, the present invention relates to a process for the production of glycerol phosphate (lipid fraction), which comprises
[98529] (a) increasing or generating the activity of a b1837-protein in the cytosol of a cell of a non-human organism or a part thereof, preferably a microorganism, a plant cell, a plant or a part thereof, as compared to a corresponding non-transformed wild type non-human organism or a part thereof; and
[98530] (b) growing the non-human organism or a part thereof under conditions which permit the production of glycerol phosphate (lipid fraction) or a composition comprising glycerol phosphate (lipid fraction) in said non-human organism or in the culture medium surrounding said non-human organism.

[98531] Accordingly, the present invention relates to a process for the production of triacylglycerol, which comprises
[98532] (a) increasing or generating the activity of a trehalose-phosphatase in the cytosol of a cell of a non-human organism or a part thereof, preferably a microorganism, a plant cell, a plant or a part thereof, as compared to a corresponding non-transformed wild type non-human organism or a part thereof; and
[98533] (b) growing the non-human organism or a part thereof under conditions which permit the production of triacylglycerol or a composition comprising triacylglycerol in said non-human organism or in the culture medium surrounding said non-human organism.

[98534] Accordingly, the present invention relates to a process for the production of glycerol (lipid fraction), which comprises
[98535] (a) increasing or generating the activity of a imidazole glycerol phosphate synthase subunit in the cytosol of a cell of a non-human organism or a part thereof, preferably a microorganism, a plant cell, a plant or a part thereof, as compared to a corresponding non-transformed wild type non-human organism or a part thereof; and
[98536] (b) growing the non-human organism or a part thereof under conditions which permit the production of glycerol (lipid fraction) or a composition comprising glycerol (lipid fraction) in said non-human organism or in the culture medium surrounding said non-human organism.

[98537] Accordingly, the present invention relates to a process for the production of glycerol phosphate (lipid fraction), which comprises
[98538] (a) increasing or generating the activity of a b2032-protein in the cytosol of a cell of a non-human organism or a part thereof, preferably a microorganism, a plant cell, a plant or a part thereof, as compared to a corresponding non-transformed wild type non-human organism or a part thereof; and
[98539] (b) growing the non-human organism or a part thereof under conditions which permit the production of glycerol phosphate (lipid fraction) or a composition comprising glycerol phosphate (lipid fraction) in said non-human organism or in the culture medium surrounding said non-human organism.

[98540] Accordingly, the present invention relates to a process for the production of glycerol (lipid fraction), which comprises
[98541] (a) increasing or generating the activity of a b2099-protein in the cytosol of a cell of a non-human organism or a part thereof, preferably a microorganism, a plant cell, a plant or a part thereof, as compared to a corresponding non-transformed wild type non-human organism or a part thereof; and
[98542] (b) growing the non-human organism or a part thereof under conditions which permit the production of glycerol (lipid fraction) or a composition comprising glycerol (lipid fraction) in said non-human organism or in the culture medium surrounding said non-human organism.

[98543] Accordingly, the present invention relates to a process for the production of bis-glyceryl phosphate (polar fraction), which comprises
[98544] (a) increasing or generating the activity of a b2139-protein in the cytosol of a cell of a non-human organism or a part thereof, preferably a microorganism, a plant cell, a plant or a part thereof, as compared to a corresponding non-transformed wild type non-human organism or a part thereof; and
[98545] (b) growing the non-human organism or a part thereof under conditions which permit the production of bis-glyceryl phosphate (polar fraction) or a composition comprising bis-glyceryl phosphate (polar fraction) in said non-human organism or in the culture medium surrounding said non-human organism.

[98546] Accordingly, the present invention relates to a process for the production of glycerol (lipid fraction), which comprises
[98547] (a) increasing or generating the activity of a ABC transporter permease protein in the cytosol of a cell of a non-human organism or a part thereof, preferably a microorganism, a plant cell, a plant or a part thereof, as compared to a corresponding non-transformed wild type non-human organism or a part thereof; and
[98548] (b) growing the non-human organism or a part thereof under conditions which permit the production of glycerol (lipid fraction) or a composition comprising glycerol (lipid fraction) in said non-human organism or in the culture medium surrounding said non-human organism.

[98549] Accordingly, the present invention relates to a process for the production of glycerol phosphate (lipid fraction), which comprises
[98550] (a) increasing or generating the activity of a ion-transport protein in the cytosol of a cell of a non-human organism or a part thereof, preferably a microorganism, a plant cell, a plant or a part thereof, as compared to a corresponding non-transformed wild type non-human organism or a part thereof; and
[98551] (b) growing the non-human organism or a part thereof under conditions which permit the production of glycerol phosphate (lipid fraction) or a composition comprising glycerol phosphate (lipid fraction) in said non-human organism or in the culture medium surrounding said non-human organism.

[98552] Accordingly, the present invention relates to a process for the production of bis-glyceryl phosphate (polar fraction), which comprises
[98553] (a) increasing or generating the activity of a b2399-protein in the cytosol of a cell of a non-human organism or a part thereof, preferably a microorganism, a plant cell, a plant or a part thereof, as compared to a corresponding non-transformed wild type non-human organism or a part thereof; and
[98554] (b) growing the non-human organism or a part thereof under conditions which permit the production of bis-glyceryl phosphate (polar fraction) or a composition comprising bis-glyceryl phosphate (polar fraction) in said non-human organism or in the culture medium surrounding said non-human organism.

[98555] Accordingly, the present invention relates to a process for the production of glycerol (lipid fraction), which comprises
[98556] (a) increasing or generating the activity of a b2399-protein in the cytosol of a cell of a non-human organism or a part thereof, preferably a microorganism, a plant cell, a plant or a part thereof, as compared to a corresponding non-transformed wild type non-human organism or a part thereof; and
[98557] (b) growing the non-human organism or a part thereof under conditions which permit the production of glycerol (lipid fraction) or a composition comprising glycerol (lipid fraction) in said non-human organism or in the culture medium surrounding said non-human organism.

[98558] Accordingly, the present invention relates to a process for the production of glycerol (lipid fraction), which comprises
[98559] (a) increasing or generating the activity of a ethanolamine utilization protein in the cytosol of a cell of a non-human organism or a part thereof, preferably a microorganism, a plant cell, a plant or a part thereof, as compared to a corresponding non-transformed wild type non-human organism or a part thereof; and
[98560] (b) growing the non-human organism or a part thereof under conditions which permit the production of glycerol (lipid fraction) or a composition comprising glycerol (lipid fraction) in said non-human organism or in the culture medium surrounding said non-human organism.

[98561] Accordingly, the present invention relates to a process for the production of glycerol phosphate (lipid fraction), which comprises
[98562] (a) increasing or generating the activity of a ethanolamine utilization protein in the cytosol of a cell of a non-human organism or a part thereof, preferably a microorganism, a plant cell, a plant or a part thereof, as compared to a corresponding non-transformed wild type non-human organism or a part thereof; and
[98563] (b) growing the non-human organism or a part thereof under conditions which permit the production of glycerol phosphate (lipid fraction) or a composition comprising glycerol phosphate (lipid fraction) in said non-human organism or in the culture medium surrounding said non-human organism.

[98564] Accordingly, the present invention relates to a process for the production of glycerol (lipid fraction), which comprises
[98565] (a) increasing or generating the activity of a ethanolamine utilization protein in the cytosol of a cell of a non-human organism or a part thereof, preferably a microorganism, a plant cell, a plant or a part thereof, as compared to a corresponding non-transformed wild type non-human organism or a part thereof; and
[98566] (b) growing the non-human organism or a part thereof under conditions which permit the production of glycerol (lipid fraction) or a composition comprising glycerol (lipid fraction) in said non-human organism or in the culture medium surrounding said non-human organism.

[98567] Accordingly, the present invention relates to a process for the production of bis-glyceryl phosphate (polar fraction), which comprises
[98568] (a) increasing or generating the activity of a b2474-protein in the cytosol of a cell of a non-human organism or a part thereof, preferably a microorganism, a plant cell, a plant or a part thereof, as compared to a corresponding non-transformed wild type non-human organism or a part thereof; and
[98569] (b) growing the non-human organism or a part thereof under conditions which permit the production of bis-glyceryl phosphate (polar fraction) or a composition comprising bis-glyceryl phosphate (polar fraction) in said non-human organism or in the culture medium surrounding said non-human organism.

[98570] Accordingly, the present invention relates to a process for the production of glycerol (lipid fraction), which comprises
[98571] (a) increasing or generating the activity of a b2474-protein in the cytosol of a cell of a non-human organism or a part thereof, preferably a microorganism, a plant cell, a plant or a part thereof, as compared to a corresponding non-transformed wild type non-human organism or a part thereof; and
[98572] (b) growing the non-human organism or a part thereof under conditions which permit the production of glycerol (lipid fraction) or a composition comprising glycerol (lipid fraction) in said non-human organism or in the culture medium surrounding said non-human organism.

[98573] Accordingly, the present invention relates to a process for the production of glycerol (lipid fraction), which comprises
[98574] (a) increasing or generating the activity of a putative transport system permease protein in the cytosol of a cell of a non-human organism or a part thereof, preferably a microorganism, a plant cell, a plant or a part thereof, as compared to a corresponding non-transformed wild type non-human organism or a part thereof; and
[98575] (b) growing the non-human organism or a part thereof under conditions which permit the production of glycerol (lipid fraction) or a composition comprising glycerol (lipid fraction) in said non-human organism or in the culture medium surrounding said non-human organism.

[98576] Accordingly, the present invention relates to a process for the production of glycerol phosphate (lipid fraction), which comprises
[98577] (a) increasing or generating the activity of a putative transport system permease protein in the cytosol of a cell of a non-human organism or a part thereof, preferably a microorganism, a plant cell, a plant or a part thereof, as compared to a corresponding non-transformed wild type non-human organism or a part thereof; and
[98578] (b) growing the non-human organism or a part thereof under conditions which permit the production of glycerol phosphate (lipid fraction) or a composition comprising glycerol phosphate (lipid fraction) in said non-human organism or in the culture medium surrounding said non-human organism.

[98579] Accordingly, the present invention relates to a process for the production of bis-glyceryl phosphate (polar fraction), which comprises
[98580] (a) increasing or generating the activity of a b2613-protein in the cytosol of a cell of a non-human organism or a part thereof, preferably a microorganism, a plant cell, a plant or a part thereof, as compared to a corresponding non-transformed wild type non-human organism or a part thereof; and
[98581] (b) growing the non-human organism or a part thereof under conditions which permit the production of bis-glyceryl phosphate (polar fraction) or a composition comprising bis-glyceryl phosphate (polar fraction) in said non-human organism or in the culture medium surrounding said non-human organism.

[98582] Accordingly, the present invention relates to a process for the production of glycerol (polar fraction), which comprises
[98583] (a) increasing or generating the activity of a transcriptional regulator in the cytosol of a cell of a non-human organism or a part thereof, preferably a microorganism, a plant cell, a plant or a part thereof, as compared to a corresponding non-transformed wild type non-human organism or a part thereof; and
[98584] (b) growing the non-human organism or a part thereof under conditions which permit the production of glycerol (polar fraction) or a composition comprising glycerol (polar fraction) in said non-human organism or in the culture medium surrounding said non-human organism.

[98585] Accordingly, the present invention relates to a process for the production of glycerol (lipid fraction), which comprises
[98586] (a) increasing or generating the activity of a b2673-protein in the cytosol of a cell of a non-human organism or a part thereof, preferably a microorganism, a plant cell, a plant or a part thereof, as compared to a corresponding non-transformed wild type non-human organism or a part thereof; and
[98587] (b) growing the non-human organism or a part thereof under conditions which permit the production of glycerol (lipid fraction) or a composition comprising glycerol (lipid fraction) in said non-human organism or in the culture medium surrounding said non-human organism.

[98588] Accordingly, the present invention relates to a process for the production of glycerol phosphate (lipid fraction), which comprises
[98589] (a) increasing or generating the activity of a b2673-protein in the cytosol of a cell of a non-human organism or a part thereof, preferably a microorganism, a plant cell, a plant or a part thereof, as compared to a corresponding non-transformed wild type non-human organism or a part thereof; and
[98590] (b) growing the non-human organism or a part thereof under conditions which permit the production of glycerol phosphate (lipid fraction) or a composition comprising glycerol phosphate (lipid fraction) in said non-human organism or in the culture medium surrounding said non-human organism.

[98591] Accordingly, the present invention relates to a process for the production of bis-glyceryl phosphate (polar fraction), which comprises
[98592] (a) increasing or generating the activity of a murein transglycosylase in the cytosol of a cell of a non-human organism or a part thereof, preferably a microorganism, a plant cell, a plant or a part thereof, as compared to a corresponding non-transformed wild type non-human organism or a part thereof; and
[98593] (b) growing the non-human organism or a part thereof under conditions which permit the production of bis-glyceryl phosphate (polar fraction) or a composition comprising bis-glyceryl phosphate (polar fraction) in said non-human organism or in the culture medium surrounding said non-human organism.

[98594] Accordingly, the present invention relates to a process for the production of triacylglycerol, which comprises
[98595] (a) increasing or generating the activity of a transcriptional regulator in the cytosol of a cell of a non-human organism or a part thereof, preferably a microorganism, a plant cell, a plant or a part thereof, as compared to a corresponding non-transformed wild type non-human organism or a part thereof; and
[98596] (b) growing the non-human organism or a part thereof under conditions which permit the production of triacylglycerol or a composition comprising triacylglycerol in said non-human organism or in the culture medium surrounding said non-human organism.

[98597] Accordingly, the present invention relates to a process for the production of glycerol (lipid fraction), which comprises
[98598] (a) increasing or generating the activity of a 2-C-methyl-D-erythritol 4-phosphate cytidylyltransferase in the cytosol of a cell of a non-human organism or a part thereof, preferably a microorganism, a plant cell, a plant or a part thereof, as compared to a corresponding non-transformed wild type non-human organism or a part thereof; and
[98599] (b) growing the non-human organism or a part thereof under conditions which permit the production of glycerol (lipid fraction) or a composition comprising glycerol (lipid fraction) in said non-human organism or in the culture medium surrounding said non-human organism.

[98600] Accordingly, the present invention relates to a process for the production of triacylglycerol, which comprises
[98601] (a) increasing or generating the activity of a amino-acid acetyltransferase in the cytosol of a cell of a non-human organism or a part thereof, preferably a microorganism, a plant cell, a plant or a part thereof, as compared to a corresponding non-transformed wild type non-human organism or a part thereof; and
[98602] (b) growing the non-human organism or a part thereof under conditions which permit the production of triacylglycerol or a composition comprising triacylglycerol in said non-human organism or in the culture medium surrounding said non-human organism.

[98603] Accordingly, the present invention relates to a process for the production of bis-glyceryl phosphate (polar fraction), which comprises
[98604] (a) increasing or generating the activity of a b3083-protein in the cytosol of a cell of a non-human organism or a part thereof, preferably a microorganism, a plant cell, a plant or a part thereof, as compared to a corresponding non-transformed wild type non-human organism or a part thereof; and
[98605] (b) growing the non-human organism or a part thereof under conditions which permit the production of bis-glyceryl phosphate (polar fraction) or a composition comprising bis-glyceryl phosphate (polar fraction) in said non-human organism or in the culture medium surrounding said non-human organism.

[98606] Accordingly, the present invention relates to a process for the production of bis-glyceryl phosphate (polar fraction), which comprises
[98607] (a) increasing or generating the activity of a threonine/serine transporter in the cytosol of a cell of a non-human organism or a part thereof, preferably a microorganism, a plant cell, a plant or a part thereof, as compared to a corresponding non-transformed wild type non-human organism or a part thereof; and
[98608] (b) growing the non-human organism or a part thereof under conditions which permit the production of bis-glyceryl phosphate (polar fraction) or a composition comprising bis-glyceryl phosphate (polar fraction) in said non-human organism or in the culture medium surrounding said non-human organism.

[98609] Accordingly, the present invention relates to a process for the production of bis-glyceryl phosphate (polar fraction), which comprises
[98610] (a) increasing or generating the activity of a b3160-protein in the cytosol of a cell of a non-human organism or a part thereof, preferably a microorganism, a plant cell, a plant or a part thereof, as compared to a corresponding non-transformed wild type non-human organism or a part thereof; and
[98611] (b) growing the non-human organism or a part thereof under conditions which permit the production of bis-glyceryl phosphate (polar fraction) or a composition comprising bis-glyceryl phosphate (polar fraction) in said non-human organism or in the culture medium surrounding said non-human organism.

[98612] Accordingly, the present invention relates to a process for the production of bis-glyceryl phosphate (polar fraction), which comprises
[98613] (a) increasing or generating the activity of a argininosuccinate synthetase in the cytosol of a cell of a non-human organism or a part thereof, preferably a microorganism, a plant cell, a plant or a part thereof, as compared to a corresponding non-transformed wild type non-human organism or a part thereof; and
[98614] (b) growing the non-human organism or a part thereof under conditions which permit the production of bis-glyceryl phosphate (polar fraction) or a composition comprising bis-glyceryl phosphate (polar fraction) in said non-human organism or in the culture medium surrounding said non-human organism.

[98615] Accordingly, the present invention relates to a process for the production of glycerol-3-phosphate (polar fraction), which comprises
[98616] (a) increasing or generating the activity of a acetyl CoA carboxylase in the cytosol of a cell of a non-human organism or a part thereof, preferably a microorganism, a plant cell, a plant or a part thereof, as compared to a corresponding non-transformed wild type non-human organism or a part thereof; and
[98617] (b) growing the non-human organism or a part thereof under conditions which permit the production of glycerol-3-phosphate (polar fraction) or a composition comprising glycerol-3-phosphate (polar fraction) in said non-human organism or in the culture medium surrounding said non-human organism.

[98618] Accordingly, the present invention relates to a process for the production of bis-glyceryl phosphate (polar fraction), which comprises
[98619] (a) increasing or generating the activity of a methyltransferase in the cytosol of a cell of a non-human organism or a part thereof, preferably a microorganism, a plant cell, a plant or a part thereof, as compared to a corresponding non-transformed wild type non-human organism or a part thereof; and
[98620] (b) growing the non-human organism or a part thereof under conditions which permit the production of bis-glyceryl phosphate (polar fraction) or a composition comprising bis-glyceryl phosphate (polar fraction) in said non-human organism or in the culture medium surrounding said non-human organism.

[98621] Accordingly, the present invention relates to a process for the production of glycerol (lipid fraction), which comprises
[98622] (a) increasing or generating the activity of a methyltransferase in the cytosol of a cell of a non-human organism or a part thereof, preferably a microorganism, a plant cell, a plant or a part thereof, as compared to a corresponding non-transformed wild type non-human organism or a part thereof; and
[98623] (b) growing the non-human organism or a part thereof under conditions which permit the production of glycerol (lipid fraction) or a composition comprising glycerol (lipid fraction) in said non-human organism or in the culture medium surrounding said non-human organism.

[98624] Accordingly, the present invention relates to a process for the production of bis-glyceryl phosphate (polar fraction), which comprises
[98625] (a) increasing or generating the activity of a FKBP-type peptidyl-prolyl cis-trans isomerase (rotamase) in the cytosol of a cell of a non-human organism or a part thereof, preferably a microorganism, a plant cell, a plant or a part thereof, as compared to a corresponding non-transformed wild type non-human organism or a part thereof; and
[98626] (b) growing the non-human organism or a part thereof under conditions which permit the production of bis-glyceryl phosphate (polar fraction) or a composition comprising bis-glyceryl phosphate (polar fraction) in said non-human organism or in the culture medium surrounding said non-human organism.

[98627] Accordingly, the present invention relates to a process for the production of bis-glyceryl phosphate (polar fraction), which comprises
[98628] (a) increasing or generating the activity of a high-affinity branched-chain amino acid transport protein in the cytosol of a cell of a non-human organism or a part thereof, preferably a microorganism, a plant cell, a plant or a part thereof, as compared to a corresponding non-transformed wild type non-human organism or a part thereof; and
[98629] (b) growing the non-human organism or a part thereof under conditions which permit the production of bis-glyceryl phosphate (polar fraction) or a composition comprising bis-glyceryl phosphate (polar fraction) in said non-human organism or in the culture medium surrounding said non-human organism.

[98630] Accordingly, the present invention relates to a process for the production of bis-glyceryl phosphate (polar fraction), which comprises
[98631] (a) increasing or generating the activity of a b3777-protein in the cytosol of a cell of a non-human organism or a part thereof, preferably a microorganism, a plant cell, a plant or a part thereof, as compared to a corresponding non-transformed wild type non-human organism or a part thereof; and
[98632] (b) growing the non-human organism or a part thereof under conditions which permit the production of bis-glyceryl phosphate (polar fraction) or a composition comprising bis-glyceryl phosphate (polar fraction) in said non-human organism or in the culture medium surrounding said non-human organism.

[98633] Accordingly, the present invention relates to a process for the production of bis-glyceryl phosphate (polar fraction), which comprises
[98634] (a) increasing or generating the activity of a b3791-protein in the cytosol of a cell of a non-human organism or a part thereof, preferably a microorganism, a plant cell, a plant or a part thereof, as compared to a corresponding non-transformed wild type non-human organism or a part thereof; and
[98635] (b) growing the non-human organism or a part thereof under conditions which permit the production of bis-glyceryl phosphate (polar fraction) or a composition comprising bis-glyceryl phosphate (polar fraction) in said non-human organism or in the culture medium surrounding said non-human organism.

[98636] Accordingly, the present invention relates to a process for the production of bis-glyceryl phosphate (polar fraction), which comprises
[98637] (a) increasing or generating the activity of a enterobacterial common antigen polymerase in the cytosol of a cell of a non-human organism or a part thereof, preferably a microorganism, a plant cell, a plant or a part thereof, as compared to a corresponding non-transformed wild type non-human organism or a part thereof; and
[98638] (b) growing the non-human organism or a part thereof under conditions which permit the production of bis-glyceryl phosphate (polar fraction) or a composition comprising bis-glyceryl phosphate (polar fraction) in said non-human organism or in the culture medium surrounding said non-human organism.

[98639] Accordingly, the present invention relates to a process for the production of triacylglycerol, which comprises
[98640] (a) increasing or generating the activity of a b3989-protein in the cytosol of a cell of a non-human organism or a part thereof, preferably a microorganism, a plant cell, a plant or a part thereof, as compared to a corresponding non-transformed wild type non-human organism or a part thereof; and
[98641] (b) growing the non-human organism or a part thereof under conditions which permit the production of triacylglycerol or a composition comprising triacylglycerol in said non-human organism or in the culture medium surrounding said non-human organism.

[98642] Accordingly, the present invention relates to a process for the production of bis-glyceryl phosphate (polar fraction), which comprises
[98643] (a) increasing or generating the activity of a b4029-protein in the cytosol of a cell of a non-human organism or a part thereof, preferably a microorganism, a plant cell, a plant or a part thereof, as compared to a corresponding non-transformed wild type non-human organism or a part thereof; and
[98644] (b) growing the non-human organism or a part thereof under conditions which permit the production of bis-glyceryl phosphate (polar fraction) or a composition comprising bis-glyceryl phosphate (polar fraction) in said non-human organism or in the culture medium surrounding said non-human organism.

[98645] Accordingly, the present invention relates to a process for the production of triacylglycerol, which comprises
[98646] (a) increasing or generating the activity of a b4050-protein in the cytosol of a cell of a non-human organism or a part thereof, preferably a microorganism, a plant cell, a plant or a part thereof, as compared to a corresponding non-transformed wild type non-human organism or a part thereof; and
[98647] (b) growing the non-human organism or a part thereof under conditions which permit the production of triacylglycerol or a composition comprising triacylglycerol in said non-human organism or in the culture medium surrounding said non-human organism.

[98648] Accordingly, the present invention relates to a process for the production of bis-glyceryl phosphate (polar fraction), which comprises
[98649] (a) increasing or generating the activity of a lysyl-tRNA synthetase in the cytosol of a cell of a non-human organism or a part thereof, preferably a microorganism, a plant cell, a plant or a part thereof, as compared to a corresponding non-transformed wild type non-human organism or a part thereof; and
[98650] (b) growing the non-human organism or a part thereof under conditions which permit the production of bis-glyceryl phosphate (polar fraction) or a composition comprising bis-glyceryl phosphate (polar fraction) in said non-human organism or in the culture medium surrounding said non-human organism.

[98651] Accordingly, the present invention relates to a process for the production of glycerol-3-phosphate (polar fraction), which comprises
[98652] (a) increasing or generating the activity of a purine-nucleoside phosphorylase in the cytosol of a cell of a non-human organism or a part thereof, preferably a microorganism, a plant cell, a plant or a part thereof, as compared to a corresponding non-transformed wild type non-human organism or a part thereof; and
[98653] (b) growing the non-human organism or a part thereof under conditions which permit the production of glycerol-3-phosphate (polar fraction) or a composition comprising glycerol-3-phosphate (polar fraction) in said non-human organism or in the culture medium surrounding said non-human organism.

[98654] Accordingly, the present invention relates to a process for the production of bis-glyceryl phosphate (polar fraction), which comprises
[98655] (a) increasing or generating the activity of a glutaredoxin in the cytosol of a cell of a non-human organism or a part thereof, preferably a microorganism, a plant cell, a plant or a part thereof, as compared to a corresponding non-transformed wild type non-human organism or a part thereof; and
[98656] (b) growing the non-human organism or a part thereof under conditions which permit the production of bis-glyceryl phosphate (polar fraction) or a composition comprising bis-glyceryl phosphate (polar fraction) in said non-human organism or in the culture medium surrounding said non-human organism.

[98657] Accordingly, the present invention relates to a process for the production of glycerol phosphate (lipid fraction), which comprises
[98658] (a) increasing or generating the activity of a glutaredoxin in the cytosol of a cell of a non-human organism or a part thereof, preferably a microorganism, a plant cell, a plant or a part thereof, as compared to a corresponding non-transformed wild type non-human organism or a part thereof; and
[98659] (b) growing the non-human organism or a part thereof under conditions which permit the production of glycerol phosphate (lipid fraction) or a composition comprising glycerol phosphate (lipid fraction) in said non-human organism or in the culture medium surrounding said non-human organism.

[98660] Accordingly, the present invention relates to a process for the production of bis-glyceryl phosphate (polar fraction), which comprises
[98661] (a) increasing or generating the activity of a GM02LC17485-protein in the cytosol of a cell of a non-human organism or a part thereof, preferably a microorganism, a plant cell, a plant or a part thereof, as compared to a corresponding non-transformed wild type non-human organism or a part thereof; and
[98662] (b) growing the non-human organism or a part thereof under conditions which permit the production of bis-glyceryl phosphate (polar fraction) or a composition comprising bis-glyceryl phosphate (polar fraction) in said non-human organism or in the culture medium surrounding said non-human organism.

[98663] Accordingly, the present invention relates to a process for the production of glycerol (lipid fraction), which comprises
[98664] (a) increasing or generating the activity of a transcription factor in the cytosol of a cell of a non-human organism or a part thereof, preferably a microorganism, a plant cell, a plant or a part thereof, as compared to a corresponding non-transformed wild type non-human organism or a part thereof; and
[98665] (b) growing the non-human organism or a part thereof under conditions which permit the production of glycerol (lipid fraction) or a composition comprising glycerol (lipid fraction) in said non-human organism or in the culture medium surrounding said non-human organism.

[98666] Accordingly, the present invention relates to a process for the production of glycerol phosphate (lipid fraction), which comprises
[98667] (a) increasing or generating the activity of a transcription factor in the cytosol of a cell of a non-human organism or a part thereof, preferably a microorganism, a plant cell, a plant or a part thereof, as compared to a corresponding non-transformed wild type non-human organism or a part thereof; and
[98668] (b) growing the non-human organism or a part thereof under conditions which permit the production of glycerol phosphate (lipid fraction) or a composition comprising glycerol phosphate (lipid fraction) in said non-human organism or in the culture medium surrounding said non-human organism.

[98669] Accordingly, the present invention relates to a process for the production of glycerol (polar fraction), which comprises
[98670] (a) increasing or generating the activity of a transcription factor in the cytosol of a cell of a non-human organism or a part thereof, preferably a microorganism, a plant cell, a plant or a part thereof, as compared to a corresponding non-transformed wild type non-human organism or a part thereof; and
[98671] (b) growing the non-human organism or a part thereof under conditions which permit the production of glycerol (polar fraction) or a composition comprising glycerol (polar fraction) in said non-human organism or in the culture medium surrounding said non-human organism.

[98672] Accordingly, the present invention relates to a process for the production of glycerol phosphate (lipid fraction), which comprises
[98673] (a) increasing or generating the activity of a cyclin D in the cytosol of a cell of a non-human organism or a part thereof, preferably a microorganism, a plant cell, a plant or a part thereof, as compared to a corresponding non-transformed wild type non-human organism or a part thereof; and
[98674] (b) growing the non-human organism or a part thereof under conditions which permit the production of glycerol phosphate (lipid fraction) or a composition comprising glycerol phosphate (lipid fraction) in said non-human organism or in the culture medium surrounding said non-human organism.

[98675] Accordingly, the present invention relates to a process for the production of bis-glyceryl phosphate (polar fraction), which comprises
[98676] (a) increasing or generating the activity of a nitrate/nitrite transport protein in the cytosol of a cell of a non-human organism or a part thereof, preferably a microorganism, a plant cell, a plant or a part thereof, as compared to a corresponding non-transformed wild type non-human organism or a part thereof; and
[98677] (b) growing the non-human organism or a part thereof under conditions which permit the production of bis-glyceryl phosphate (polar fraction) or a composition comprising bis-glyceryl phosphate (polar fraction) in said non-human organism or in the culture medium surrounding said non-human organism.

[98678] Accordingly, the present invention relates to a process for the production of glycerol phosphate (lipid fraction), which comprises
[98679] (a) increasing or generating the activity of a carbamoyl-phosphate synthase subunit in the cytosol of a cell of a non-human organism or a part thereof, preferably a microorganism, a plant cell, a plant or a part thereof, as compared to a corresponding non-transformed wild type non-human organism or a part thereof; and
[98680] (b) growing the non-human organism or a part thereof under conditions which permit the production of glycerol phosphate (lipid fraction) or a composition comprising glycerol phosphate (lipid fraction) in said non-human organism or in the culture medium surrounding said non-human organism.

[98681] Accordingly, the present invention relates to a process for the production of glycerol (lipid fraction), which comprises
[98682] (a) increasing or generating the activity of a CDP-diacylglycerol-glycerol-3-phosphate 3-phosphatidyltransferase in the cytosol of a cell of a non-human organism or a part thereof, preferably a microorganism, a plant cell, a plant or a part thereof, as compared to a corresponding non-transformed wild type non-human organism or a part thereof; and
[98683] (b) growing the non-human organism or a part thereof under conditions which permit the production of glycerol (lipid fraction) or a composition comprising glycerol (lipid fraction) in said non-human organism or in the culture medium surrounding said non-human organism.

[98684] Accordingly, the present invention relates to a process for the production of bis-glyceryl phosphate (polar fraction), which comprises
[98685] (a) increasing or generating the activity of a adenylate kinase in the cytosol of a cell of a non-human organism or a part thereof, preferably a microorganism, a plant cell, a plant or a part thereof, as compared to a corresponding non-transformed wild type non-human organism or a part thereof; and
[98686] (b) growing the non-human organism or a part thereof under conditions which permit the production of bis-glyceryl phosphate (polar fraction) or a composition comprising bis-glyceryl phosphate (polar fraction) in said non-human organism or in the culture medium surrounding said non-human organism.

[98687] Accordingly, the present invention relates to a process for the production of glycerol (lipid fraction), which comprises
[98688] (a) increasing or generating the activity of a acyl transferase in the cytosol of a cell of a non-human organism or a part thereof, preferably a microorganism, a plant cell, a plant or a part thereof, as compared to a corresponding non-transformed wild type non-human organism or a part thereof; and
[98689] (b) growing the non-human organism or a part thereof under conditions which permit the production of glycerol (lipid fraction) or a composition comprising glycerol (lipid fraction) in said non-human organism or in the culture medium surrounding said non-human organism.

[98690] Accordingly, the present invention relates to a process for the production of glycerol phosphate (lipid fraction), which comprises
[98691] (a) increasing or generating the activity of a coproporphyrinogen III oxidase in the cytosol of a cell of a non-human organism or a part thereof, preferably a microorganism, a plant cell, a plant or a part thereof, as compared to a corresponding non-transformed wild type non-human organism or a part thereof; and
[98692] (b) growing the non-human organism or a part thereof under conditions which permit the production of glycerol phosphate (lipid fraction) or a composition comprising glycerol phosphate (lipid fraction) in said non-human organism or in the culture medium surrounding said non-human organism.

[98693] Accordingly, the present invention relates to a process for the production of glycerol (lipid fraction), which comprises
[98694] (a) increasing or generating the activity of a oxidoreductase in the cytosol of a cell of a non-human organism or a part thereof, preferably a microorganism, a plant cell, a plant or a part thereof, as compared to a corresponding non-transformed wild type non-human organism or a part thereof; and
[98695] (b) growing the non-human organism or a part thereof under conditions which permit the production of glycerol (lipid fraction) or a composition comprising glycerol (lipid fraction) in said non-human organism or in the culture medium surrounding said non-human organism.

[98696] Accordingly, the present invention relates to a process for the production of glycerol phosphate (lipid fraction), which comprises
[98697] (a) increasing or generating the activity of a oxidoreductase in the cytosol of a cell of a non-human organism or a part thereof, preferably a microorganism, a plant cell, a plant or a part thereof, as compared to a corresponding non-transformed wild type non-human organism or a part thereof; and
[98698] (b) growing the non-human organism or a part thereof under conditions which permit the production of glycerol phosphate (lipid fraction) or a composition comprising glycerol phosphate (lipid fraction) in said non-human organism or in the culture medium surrounding said non-human organism.

[98699] Accordingly, the present invention relates to a process for the production of glycerol (polar fraction), which comprises
[98700] (a) increasing or generating the activity of a Mg-protoporphyrin IX monomethyl ester oxidative cyclase 66 kD subunit in the cytosol of a cell of a non-human organism or a part thereof, preferably a microorganism, a plant cell, a plant or a part thereof, as compared to a corresponding non-transformed wild type non-human organism or a part thereof; and
[98701] (b) growing the non-human organism or a part thereof under conditions which permit the production of glycerol (polar fraction) or a composition comprising glycerol (polar fraction) in said non-human organism or in the culture medium surrounding said non-human organism.

[98702] Accordingly, the present invention relates to a process for the production of bis-glyceryl phosphate (polar fraction), which comprises
[98703] (a) increasing or generating the activity of a dihydrolipoamide dehydrogenase in the cytosol of a cell of a non-human organism or a part thereof, preferably a microorganism, a plant cell, a plant or a part thereof, as compared to a corresponding non-transformed wild type non-human organism or a part thereof; and
[98704] (b) growing the non-human organism or a part thereof under conditions which permit the production of bis-glyceryl phosphate (polar fraction) or a composition comprising bis-glyceryl phosphate (polar fraction) in said non-human organism or in the culture medium surrounding said non-human organism.

[98705] Accordingly, the present invention relates to a process for the production of glycerol phosphate (lipid fraction), which comprises
[98706] (a) increasing or generating the activity of a aromatic acid decarboxylase in the cytosol of a cell of a non-human organism or a part thereof, preferably a microorganism, a plant cell, a plant or a part thereof, as compared to a corresponding non-transformed wild type non-human organism or a part thereof; and
[98707] (b) growing the non-human organism or a part thereof under conditions which permit the production of glycerol phosphate (lipid fraction) or a composition comprising glycerol phosphate (lipid fraction) in said non-human organism or in the culture medium surrounding said non-human organism.

[98708] Accordingly, the present invention relates to a process for the production of glycerol phosphate (lipid fraction), which comprises
[98709] (a) increasing or generating the activity of a phosphate import ATP-binding protein in the cytosol of a cell of a non-human organism or a part thereof, preferably a microorganism, a plant cell, a plant or a part thereof, as compared to a corresponding non-transformed wild type non-human organism or a part thereof; and
[98710] (b) growing the non-human organism or a part thereof under conditions which permit the production of glycerol phosphate (lipid fraction) or a composition comprising glycerol phosphate (lipid fraction) in said non-human organism or in the culture medium surrounding said non-human organism.

[98711] Accordingly, the present invention relates to a process for the production of glycerol phosphate (lipid fraction), which comprises
[98712] (a) increasing or generating the activity of a arginine decarboxylase in the cytosol of a cell of a non-human organism or a part thereof, preferably a microorganism, a plant cell, a plant or a part thereof, as compared to a corresponding non-transformed wild type non-human organism or a part thereof; and
[98713] (b) growing the non-human organism or a part thereof under conditions which permit the production of glycerol phosphate (lipid fraction) or a composition comprising glycerol phosphate (lipid fraction) in said non-human organism or in the culture medium surrounding said non-human organism.

[98714] Accordingly, the present invention relates to a process for the production of glycerol phosphate (lipid fraction), which comprises
[98715] (a) increasing or generating the activity of a carbohydrate kinase in the cytosol of a cell of a non-human organism or a part thereof, preferably a microorganism, a plant cell, a plant or a part thereof, as compared to a corresponding non-transformed wild type non-human organism or a part thereof; and
[98716] (b) growing the non-human organism or a part thereof under conditions which permit the production of glycerol phosphate (lipid fraction) or a composition comprising glycerol phosphate (lipid fraction) in said non-human organism or in the culture medium surrounding said non-human organism.

[98717] Accordingly, the present invention relates to a process for the production of bis-glyceryl phosphate (polar fraction), which comprises
[98718] (a) increasing or generating the activity of a precorrin-8X methylmutase in the cytosol of a cell of a non-human organism or a part thereof, preferably a microorganism, a plant cell, a plant or a part thereof, as compared to a corresponding non-transformed wild type non-human organism or a part thereof; and
[98719] (b) growing the non-human organism or a part thereof under conditions which permit the production of bis-glyceryl phosphate (polar fraction) or a composition comprising bis-glyceryl phosphate (polar fraction) in said non-human organism or in the culture medium surrounding said non-human organism.

[98720] Accordingly, the present invention relates to a process for the production of bis-glyceryl phosphate (polar fraction), which comprises
[98721] (a) increasing or generating the activity of a NADH dehydrogenase in the cytosol of a cell of a non-human organism or a part thereof, preferably a microorganism, a plant cell, a plant or a part thereof, as compared to a corresponding non-transformed wild type non-human organism or a part thereof; and
[98722] (b) growing the non-human organism or a part thereof under conditions which permit the production of bis-glyceryl phosphate (polar fraction) or a composition comprising bis-glyceryl phosphate (polar fraction) in said non-human organism or in the culture medium surrounding said non-human organism.

[98723] Accordingly, the present invention relates to a process for the production of glycerol (lipid fraction), which comprises
[98724] (a) increasing or generating the activity of a glutamate 5-kinase in the cytosol of a cell of a non-human organism or a part thereof, preferably a microorganism, a plant cell, a plant or a part thereof, as compared to a corresponding non-transformed wild type non-human organism or a part thereof; and
[98725] (b) growing the non-human organism or a part thereof under conditions which permit the production of glycerol (lipid fraction) or a composition comprising glycerol (lipid fraction) in said non-human organism or in the culture medium surrounding said non-human organism.

[98726] Accordingly, the present invention relates to a process for the production of glycerol (lipid fraction), which comprises
[98727] (a) increasing or generating the activity of a threonine dehydratase in the cytosol of a cell of a non-human organism or a part thereof, preferably a microorganism, a plant cell, a plant or a part thereof, as compared to a corresponding non-transformed wild type non-human organism or a part thereof; and
[98728] (b) growing the non-human organism or a part thereof under conditions which permit the production of glycerol (lipid fraction) or a composition comprising glycerol (lipid fraction) in said non-human organism or in the culture medium surrounding said non-human organism.

[98729] Accordingly, the present invention relates to a process for the production of glycerol phosphate (lipid fraction), which comprises
[98730] (a) increasing or generating the activity of a threonine dehydratase in the cytosol of a cell of a non-human organism or a part thereof, preferably a microorganism, a plant cell, a plant or a part thereof, as compared to a corresponding non-transformed wild type non-human organism or a part thereof; and
[98731] (b) growing the non-human organism or a part thereof under conditions which permit the production of glycerol phosphate (lipid fraction) or a composition comprising glycerol phosphate (lipid fraction) in said non-human organism or in the culture medium surrounding said non-human organism.

[98732] Accordingly, the present invention relates to a process for the production of bis-glyceryl phosphate (polar fraction), which comprises
[98733] (a) increasing or generating the activity of a photosystem I reaction centre subunit in the cytosol of a cell of a non-human organism or a part thereof, preferably a microorganism, a plant cell, a plant or a part thereof, as compared to a corresponding non-transformed wild type non-human organism or a part thereof; and
[98734] (b) growing the non-human organism or a part thereof under conditions which permit the production of bis-glyceryl phosphate (polar fraction) or a composition comprising bis-glyceryl phosphate (polar fraction) in said non-human organism or in the culture medium surrounding said non-human organism.

[98735] Accordingly, the present invention relates to a process for the production of triacylglycerol, which comprises
[98736] (a) increasing or generating the activity of a cell division protein in the cytosol of a cell of a non-human organism or a part thereof, preferably a microorganism, a plant cell, a plant or a part thereof, as compared to a corresponding non-transformed wild type non-human organism or a part thereof; and
[98737] (b) growing the non-human organism or a part thereof under conditions which permit the production of triacylglycerol or a composition comprising triacylglycerol in said non-human organism or in the culture medium surrounding said non-human organism.

[98738] Accordingly, the present invention relates to a process for the production of glycerol phosphate (lipid fraction), which comprises
[98739] (a) increasing or generating the activity of a metal-dependent hydrolase in the cytosol of a cell of a non-human organism or a part thereof, preferably a microorganism, a plant cell, a plant or a part thereof, as compared to a corresponding non-transformed wild type non-human organism or a part thereof; and
[98740] (b) growing the non-human organism or a part thereof under conditions which permit the production of glycerol phosphate (lipid fraction) or a composition comprising glycerol phosphate (lipid fraction) in said non-human organism or in the culture medium surrounding said non-human organism.

[98741] Accordingly, the present invention relates to a process for the production of glycerol (lipid fraction), which comprises
[98742] (a) increasing or generating the activity of a TTC1386-protein in the cytosol of a cell of a non-human organism or a part thereof, preferably a microorganism, a plant cell, a plant or a part thereof, as compared to a corresponding non-transformed wild type non-human organism or a part thereof; and
[98743] (b) growing the non-human organism or a part thereof under conditions which permit the production of glycerol (lipid fraction) or a composition comprising glycerol (lipid fraction) in said non-human organism or in the culture medium surrounding said non-human organism.

[98744] Accordingly, the present invention relates to a process for the production of glycerol-3-phosphate (polar fraction), which comprises
[98745] (a) increasing or generating the activity of a YAL013W-protein in the cytosol of a cell of a non-human organism or a part thereof, preferably a microorganism, a plant cell, a plant or a part thereof, as compared to a corresponding non-transformed wild type non-human organism or a part thereof; and
[98746] (b) growing the non-human organism or a part thereof under conditions which permit the production of glycerol-3-phosphate (polar fraction) or a composition comprising glycerol-3-phosphate (polar fraction) in said non-human organism or in the culture medium surrounding said non-human organism.

[98747] Accordingly, the present invention relates to a process for the production of glycerol (lipid fraction), which comprises
[98748] (a) increasing or generating the activity of a transcription factor in the cytosol of a cell of a non-human organism or a part thereof, preferably a microorganism, a plant cell, a plant or a part thereof, as compared to a corresponding non-transformed wild type non-human organism or a part thereof; and
[98749] (b) growing the non-human organism or a part thereof under conditions which permit the production of glycerol (lipid fraction) or a composition comprising glycerol (lipid fraction) in said non-human organism or in the culture medium surrounding said non-human organism.

[98750] Accordingly, the present invention relates to a process for the production of glycerol phosphate (lipid fraction), which comprises
[98751] (a) increasing or generating the activity of a acid phosphatase precursor in the cytosol of a cell of a non-human organism or a part thereof, preferably a microorganism, a plant cell, a plant or a part thereof, as compared to a corresponding non-transformed wild type non-human organism or a part thereof; and
[98752] (b) growing the non-human organism or a part thereof under conditions which permit the production of glycerol phosphate (lipid fraction) or a composition comprising glycerol phosphate (lipid fraction) in said non-human organism or in the culture medium surrounding said non-human organism.

[98753] Accordingly, the present invention relates to a process for the production of glycerol (lipid fraction), which comprises
[98754] (a) increasing or generating the activity of a cell division control protein in the cytosol of a cell of a non-human organism or a part thereof, preferably a microorganism, a plant cell, a plant or a part thereof, as compared to a corresponding non-transformed wild type non-human organism or a part thereof; and
[98755] (b) growing the non-human organism or a part thereof under conditions which permit the production of glycerol (lipid fraction) or a composition comprising glycerol (lipid fraction) in said non-human organism or in the culture medium surrounding said non-human organism.

[98756] Accordingly, the present invention relates to a process for the production of glycerol (polar fraction), which comprises
[98757] (a) increasing or generating the activity of a cell division control protein in the cytosol of a cell of a non-human organism or a part thereof, preferably a microorganism, a plant cell, a plant or a part thereof, as compared to a corresponding non-transformed wild type non-human organism or a part thereof; and
[98758] (b) growing the non-human organism or a part thereof under conditions which permit the production of glycerol (polar fraction) or a composition comprising glycerol (polar fraction) in said non-human organism or in the culture medium surrounding said non-human organism.

[98759] Accordingly, the present invention relates to a process for the production of bis-glyceryl phosphate (polar fraction), which comprises
[98760] (a) increasing or generating the activity of a ycr102c-protein in the cytosol of a cell of a non-human organism or a part thereof, preferably a microorganism, a plant cell, a plant or a part thereof, as compared to a corresponding non-transformed wild type non-human organism or a part thereof; and
[98761] (b) growing the non-human organism or a part thereof under conditions which permit the production of bis-glyceryl phosphate (polar fraction) or a composition comprising bis-glyceryl phosphate (polar fraction) in said non-human organism or in the culture medium surrounding said non-human organism.

[98762] Accordingly, the present invention relates to a process for the production of bis-glyceryl phosphate (polar fraction), which comprises
[98763] (a) increasing or generating the activity of a ydr273w-protein in the cytosol of a cell of a non-human organism or a part thereof, preferably a microorganism, a plant cell, a plant or a part thereof, as compared to a corresponding non-transformed wild type non-human organism or a part thereof; and
[98764] (b) growing the non-human organism or a part thereof under conditions which permit the production of bis-glyceryl phosphate (polar fraction) or a composition comprising bis-glyceryl phosphate (polar fraction) in said non-human organism or in the culture medium surrounding said non-human organism.

[98765] Accordingly, the present invention relates to a process for the production of glycerol phosphate (lipid fraction), which comprises
[98766] (a) increasing or generating the activity of a molecular chaperone portein in the cytosol of a cell of a non-human organism or a part thereof, preferably a microorganism, a plant cell, a plant or a part thereof, as compared to a corresponding non-transformed wild type non-human organism or a part thereof; and
[98767] (b) growing the non-human organism or a part thereof under conditions which permit the production of glycerol phosphate (lipid fraction) or a composition comprising glycerol phosphate (lipid fraction) in said non-human organism or in the culture medium surrounding said non-human organism.

[98768] Accordingly, the present invention relates to a process for the production of triacylglycerol, which comprises
[98769] (a) increasing or generating the activity of a YFL019C-protein in the cytosol of a cell of a non-human organism or a part thereof, preferably a microorganism, a plant cell, a plant or a part thereof, as compared to a corresponding non-transformed wild type non-human organism or a part thereof; and
[98770] (b) growing the non-human organism or a part thereof under conditions which permit the production of triacylglycerol or a composition comprising triacylglycerol in said non-human organism or in the culture medium surrounding said non-human organism.

[98771] Accordingly, the present invention relates to a process for the production of bis-glyceryl phosphate (polar fraction), which comprises
[98772] (a) increasing or generating the activity of a alcohol dehydrogenase in the cytosol of a cell of a non-human organism or a part thereof, preferably a microorganism, a plant cell, a plant or a part thereof, as compared to a corresponding non-transformed wild type non-human organism or a part thereof; and
[98773] (b) growing the non-human organism or a part thereof under conditions which permit the production of bis-glyceryl phosphate (polar fraction) or a composition comprising bis-glyceryl phosphate (polar fraction) in said non-human organism or in the culture medium surrounding said non-human organism.

[98774] Accordingly, the present invention relates to a process for the production of glycerol (lipid fraction), which comprises
[98775] (a) increasing or generating the activity of a biotin synthase in the cytosol of a cell of a non-human organism or a part thereof, preferably a microorganism, a plant cell, a plant or a part thereof, as compared to a corresponding non-transformed wild type non-human organism or a part thereof; and
[98776] (b) growing the non-human organism or a part thereof under conditions which permit the production of glycerol (lipid fraction) or a composition comprising glycerol (lipid fraction) in said non-human organism or in the culture medium surrounding said non-human organism.

[98777] Accordingly, the present invention relates to a process for the production of triacylglycerol, which comprises
[98778] (a) increasing or generating the activity of a mitochondrial processing protease in the cytosol of a cell of a non-human organism or a part thereof, preferably a microorganism, a plant cell, a plant or a part thereof, as compared to a corresponding non-transformed wild type non-human organism or a part thereof; and
[98779] (b) growing the non-human organism or a part thereof under conditions which permit the production of triacylglycerol or a composition comprising triacylglycerol in said non-human organism or in the culture medium surrounding said non-human organism.

[98780] Accordingly, the present invention relates to a process for the production of bis-glyceryl phosphate (polar fraction), which comprises
[98781] (a) increasing or generating the activity of a YHR202W-protein in the cytosol of a cell of a non-human organism or a part thereof, preferably a microorganism, a plant cell, a plant or a part thereof, as compared to a corresponding non-transformed wild type non-human organism or a part thereof; and
[98782] (b) growing the non-human organism or a part thereof under conditions which permit the production of bis-glyceryl phosphate (polar fraction) or a composition comprising bis-glyceryl phosphate (polar fraction) in said non-human organism or in the culture medium surrounding said non-human organism.

[98783] Accordingly, the present invention relates to a process for the production of glycerol (polar fraction), which comprises
[98784] (a) increasing or generating the activity of a (DL)-glycerol-3-phosphatase in the cytosol of a cell of a non-human organism or a part thereof, preferably a microorganism, a plant cell, a plant or a part thereof, as compared to a corresponding non-transformed wild type non-human organism or a part thereof; and
[98785] (b) growing the non-human organism or a part thereof under conditions which permit the production of glycerol (polar fraction) or a composition comprising glycerol (polar fraction) in said non-human organism or in the culture medium surrounding said non-human organism.

[98786] Accordingly, the present invention relates to a process for the production of bis-glyceryl phosphate (polar fraction), which comprises
[98787] (a) increasing or generating the activity of a YIL083C-protein in the cytosol of a cell of a non-human organism or a part thereof, preferably a microorganism, a plant cell, a plant or a part thereof, as compared to a corresponding non-transformed wild type non-human organism or a part thereof; and
[98788] (b) growing the non-human organism or a part thereof under conditions which permit the production of bis-glyceryl phosphate (polar fraction) or a composition comprising bis-glyceryl phosphate (polar fraction) in said non-human organism or in the culture medium surrounding said non-human organism.

[98789] Accordingly, the present invention relates to a process for the production of glycerol phosphate (lipid fraction), which comprises
[98790] (a) increasing or generating the activity of a YJL062W-A-protein in the cytosol of a cell of a non-human organism or a part thereof, preferably a microorganism, a plant cell, a plant or a part thereof, as compared to a corresponding non-transformed wild type non-human organism or a part thereof; and
[98791] (b) growing the non-human organism or a part thereof under conditions which permit the production of glycerol phosphate (lipid fraction) or a composition comprising glycerol phosphate (lipid fraction) in said non-human organism or in the culture medium surrounding said non-human organism.

[98792] Accordingly, the present invention relates to a process for the production of bis-glyceryl phosphate (polar fraction), which comprises
[98793] (a) increasing or generating the activity of a DnaJ-like chaperone in the cytosol of a cell of a non-human organism or a part thereof, preferably a microorganism, a plant cell, a plant or a part thereof, as compared to a corresponding non-transformed wild type non-human organism or a part thereof; and
[98794] (b) growing the non-human organism or a part thereof under conditions which permit the production of bis-glyceryl phosphate (polar fraction) or a composition comprising bis-glyceryl phosphate (polar fraction) in said non-human organism or in the culture medium surrounding said non-human organism.

[98795] Accordingly, the present invention relates to a process for the production of bis-glyceryl phosphate (polar fraction), which comprises
[98796] (a) increasing or generating the activity of a polygalacturonase in the cytosol of a cell of a non-human organism or a part thereof, preferably a microorganism, a plant cell, a plant or a part thereof, as compared to a corresponding non-transformed wild type non-human organism or a part thereof; and
[98797] (b) growing the non-human organism or a part thereof under conditions which permit the production of bis-glyceryl phosphate (polar fraction) or a composition comprising bis-glyceryl phosphate (polar fraction) in said non-human organism or in the culture medium surrounding said non-human organism.

[98798] Accordingly, the present invention relates to a process for the production of glycerol (polar fraction), which comprises
[98799] (a) increasing or generating the activity of a vacuolar sorting protein in the cytosol of a cell of a non-human organism or a part thereof, preferably a microorganism, a plant cell, a plant or a part thereof, as compared to a corresponding non-transformed wild type non-human organism or a part thereof; and
[98800] (b) growing the non-human organism or a part thereof under conditions which permit the production of glycerol (polar fraction) or a composition comprising glycerol (polar fraction) in said non-human organism or in the culture medium surrounding said non-human organism.

[98801] Accordingly, the present invention relates to a process for the production of bis-glyceryl phosphate (polar fraction), which comprises
[98802] (a) increasing or generating the activity of a YLR099C-protein in the cytosol of a cell of a non-human organism or a part thereof, preferably a microorganism, a plant cell, a plant or a part thereof, as compared to a corresponding non-transformed wild type non-human organism or a part thereof; and
[98803] (b) growing the non-human organism or a part thereof under conditions which permit the production of bis-glyceryl phosphate (polar fraction) or a composition comprising bis-glyceryl phosphate (polar fraction) in said non-human organism or in the culture medium surrounding said non-human organism.

[98804] Accordingly, the present invention relates to a process for the production of glycerol (lipid fraction), which comprises
[98805] (a) increasing or generating the activity of a cyclin in the cytosol of a cell of a non-human organism or a part thereof, preferably a microorganism, a plant cell, a plant or a part thereof, as compared to a corresponding non-transformed wild type non-human organism or a part thereof; and
[98806] (b) growing the non-human organism or a part thereof under conditions which permit the production of glycerol (lipid fraction) or a composition comprising glycerol (lipid fraction) in said non-human organism or in the culture medium surrounding said non-human organism.

[98807] Accordingly, the present invention relates to a process for the production of glycerol (lipid fraction), which comprises
[98808] (a) increasing or generating the activity of a ylr326w-protein in the cytosol of a cell of a non-human organism or a part thereof, preferably a microorganism, a plant cell, a plant or a part thereof, as compared to a corresponding non-transformed wild type non-human organism or a part thereof; and
[98809] (b) growing the non-human organism or a part thereof under conditions which permit the production of glycerol (lipid fraction) or a composition comprising glycerol (lipid fraction) in said non-human organism or in the culture medium surrounding said non-human organism.

[98810] Accordingly, the present invention relates to a process for the production of glycerol phosphate (lipid fraction), which comprises
[98811] (a) increasing or generating the activity of a ylr326w-protein in the cytosol of a cell of a non-human organism or a part thereof, preferably a microorganism, a plant cell, a plant or a part thereof, as compared to a corresponding non-transformed wild type non-human organism or a part thereof; and
[98812] (b) growing the non-human organism or a part thereof under conditions which permit the production of glycerol phosphate (lipid fraction) or a composition comprising glycerol phosphate (lipid fraction) in said non-human organism or in the culture medium surrounding said non-human organism.

[98813] Accordingly, the present invention relates to a process for the production of glycerol (lipid fraction), which comprises
[98814] (a) increasing or generating the activity of a heat shock protein Hsp40 in the cytosol of a cell of a non-human organism or a part thereof, preferably a microorganism, a plant cell, a plant or a part thereof, as compared to a corresponding non-transformed wild type non-human organism or a part thereof; and
[98815] (b) growing the non-human organism or a part thereof under conditions which permit the production of glycerol (lipid fraction) or a composition comprising glycerol (lipid fraction) in said non-human organism or in the culture medium surrounding said non-human organism.

[98816] Accordingly, the present invention relates to a process for the production of glycerol (lipid fraction), which comprises
[98817] (a) increasing or generating the activity of a phosphotransferase in the cytosol of a cell of a non-human organism or a part thereof, preferably a microorganism, a plant cell, a plant or a part thereof, as compared to a corresponding non-transformed wild type non-human organism or a part thereof; and
[98818] (b) growing the non-human organism or a part thereof under conditions which permit the production of glycerol (lipid fraction) or a composition comprising glycerol (lipid fraction) in said non-human organism or in the culture medium surrounding said non-human organism.

[98819] Accordingly, the present invention relates to a process for the production of glycerol (lipid fraction), which comprises
[98820] (a) increasing or generating the activity of a Elongation factor Tu in the cytosol of a cell of a non-human organism or a part thereof, preferably a microorganism, a plant cell, a plant or a part thereof, as compared to a corresponding non-transformed wild type non-human organism or a part thereof; and
[98821] (b) growing the non-human organism or a part thereof under conditions which permit the production of glycerol (lipid fraction) or a composition comprising glycerol (lipid fraction) in said non-human organism or in the culture medium surrounding said non-human organism.

[98822] Accordingly, the present invention relates to a process for the production of bis-glyceryl phosphate (polar fraction), which comprises
[98823] (a) increasing or generating the activity of a YPL162C.protein in the cytosol of a cell of a non-human organism or a part thereof, preferably a microorganism, a plant cell, a plant or a part thereof, as compared to a corresponding non-transformed wild type non-human organism or a part thereof; and
[98824] (b) growing the non-human organism or a part thereof under conditions which permit the production of bis-glyceryl phosphate (polar fraction) or a composition comprising bis-glyceryl phosphate (polar fraction) in said non-human organism or in the culture medium surrounding said non-human organism.

[98825] Accordingly, the present invention relates to a process for the production of glycerol (lipid fraction), which comprises
[98826] (a) increasing or generating the activity of a mitogen-activated protein kinase in the cytosol of a cell of a non-human organism or a part thereof, preferably a microorganism, a plant cell, a plant or a part thereof, as compared to a corresponding non-transformed wild type non-human organism or a part thereof; and
[98827] (b) growing the non-human organism or a part thereof under conditions which permit the production of glycerol (lipid fraction) or a composition comprising glycerol (lipid fraction) in said non-human organism or in the culture medium surrounding said non-human organism.

[98828] Accordingly, the present invention relates to a process for the production of bis-glyceryl phosphate (polar fraction), which comprises
[98829] (a) increasing or generating the activity of a Zm_{—}4842_BE510522-protein in the cytosol of a cell of a non-human organism or a part thereof, preferably a microorganism, a plant cell, a plant or a part thereof, as compared to a corresponding non-transformed wild type non-human organism or a part thereof; and
[98830] (b) growing the non-human organism or a part thereof under conditions which permit the production of bis-glyceryl phosphate (polar fraction) or a composition comprising bis-glyceryl phosphate (polar fraction) in said non-human organism or in the culture medium surrounding said non-human organism.

[98831] Accordingly, the present invention relates to a process for the production of bis-glyceryl phosphate (polar fraction), which comprises
[98832] (a) increasing or generating the activity of a 49747384_SOYBEAN-protein in the cytosol of a cell of a non-human organism or a part thereof, preferably a microorganism, a plant cell, a plant or a part thereof, as compared to a corresponding non-transformed wild type non-human organism or a part thereof; and
[98833] (b) growing the non-human organism or a part thereof under conditions which permit the production of bis-glyceryl phosphate (polar fraction) or a composition comprising bis-glyceryl phosphate (polar fraction) in said non-human organism or in the culture medium surrounding said non-human organism.

[98834] Accordingly, the present invention relates to a process for the production of bis-glyceryl phosphate (polar fraction), which comprises
[98835] (a) increasing or generating the activity of a polypeptide comprising a polypeptide as depicted in the respective line in column 5 or 8 of Table II, application no. 19, or a homolog or a fragment thereof, a consensus sequence or at least one polypeptide motif as depicted in the respective line in column 8 of Table IV, application no. 19, whereby the respective line disclose in column 7 the fine chemical bis-glyceryl phosphate (polar fraction); or
[98836] increasing or generating the activity of an expression product of one or more nucleic acid molecule(s) comprising a polynucleotide as depicted in the respective line in column 5 or 8 of Table I, application no. 19, preferably the coding region thereof, or a homolog or a fragment thereof, whereby the respective line disclose in column 7 the fine chemical bis-glyceryl phosphate (polar fraction);
[98837] in the cytosol of a cell of a non-human organism or a part thereof; preferably a microorganism, a plant cell, a plant or a part thereof, as compared to a corresponding non-transformed wild type non-human organism or a part thereof; and
[98838] (b) growing the non-human organism under conditions which permit the production of bis-glyceryl phosphate (polar fraction), or a composition comprising bis-glyceryl phosphate (polar fraction) in said non-human organism or in the culture medium surrounding said non-human organism.

[98839] Accordingly, the present invention relates to a process for the production of glycerol (lipid fraction), which comprises
[98840] (a) increasing or generating the activity of a polypeptide comprising a polypeptide as depicted in the respective line in column 5 or 8 of Table II, application no. 19, or a homolog or a fragment thereof, a consensus sequence or at least one polypeptide motif as depicted in the respective line in column 8 of Table IV, application no. 19, whereby the respective line disclose in column 7 the fine chemical glycerol (lipid fraction); or
[98841] increasing or generating the activity of an expression product of one or more nucleic acid molecule(s) comprising a polynucleotide as depicted in the respective line in column 5 or 8 of Table I, application no. 19, preferably the coding region thereof, or a homolog or a fragment thereof, whereby the respective line disclose in column 7 the fine chemical glycerol (lipid fraction);
[98842] in the cytosol of a cell of a non-human organism or a part thereof; preferably a microorganism, a plant cell, a plant or a part thereof, as compared to a corresponding non-transformed wild type non-human organism or a part thereof; and
[98843] (b) growing the non-human organism under conditions which permit the production of glycerol (lipid fraction), or a composition comprising glycerol (lipid fraction) in said non-human organism or in the culture medium surrounding said non-human organism.

[98844] Accordingly, the present invention relates to a process for the production of glycerol (polar fraction), which comprises
[98845] (a) increasing or generating the activity of a polypeptide comprising a polypeptide as depicted in the respective line in column 5 or 8 of Table II, application no. 19, or a homolog or a fragment thereof, a consensus sequence or at least one polypeptide motif as depicted in the respective line in column 8 of Table IV, application no. 19, whereby the respective line disclose in column 7 the fine chemical glycerol (polar fraction); or
[98846] increasing or generating the activity of an expression product of one or more nucleic acid molecule(s) comprising a polynucleotide as depicted in the respective line in column 5 or 8 of Table I, application no. 19, preferably the coding region thereof, or a homolog or a fragment thereof, whereby the respective line disclose in column 7 the fine chemical glycerol (polar fraction);
[98847] in the cytosol of a cell of a non-human organism or a part thereof; preferably a microorganism, a plant cell, a plant or a part thereof, as compared to a corresponding non-transformed wild type non-human organism or a part thereof; and
[98848] (b) growing the non-human organism under conditions which permit the production of glycerol (polar fraction), or a composition comprising glycerol (polar fraction) in said non-human organism or in the culture medium surrounding said non-human organism.

[98849] Accordingly, the present invention relates to a process for the production of glycerol phosphate (lipid fraction), which comprises
[98850] (a) increasing or generating the activity of a polypeptide comprising a polypeptide as depicted in the respective line in column 5 or 8 of Table II, application no. 19, or a homolog or a fragment thereof, a consensus sequence or at least one polypeptide motif as depicted in the respective line in column 8 of Table IV, application no. 19, whereby the respective line disclose in column 7 the fine chemical glycerol phosphate (lipid fraction); or
[98851] increasing or generating the activity of an expression product of one or more nucleic acid molecule(s) comprising a polynucleotide as depicted in the respective line in column 5 or 8 of Table I, application no. 19, preferably the coding region thereof, or a homolog or a fragment thereof, whereby the respective line disclose in column 7 the fine chemical glycerol phosphate (lipid fraction);
[98852] in the cytosol of a cell of a non-human organism or a part thereof; preferably a microorganism, a plant cell, a plant or a part thereof, as compared to a corresponding non-transformed wild type non-human organism or a part thereof; and
[98853] (b) growing the non-human organism under conditions which permit the production of glycerol phosphate (lipid fraction), or a composition comprising glycerol phosphate (lipid fraction) in said non-human organism or in the culture medium surrounding said non-human organism.

[98854] Accordingly, the present invention relates to a process for the production of glycerol-3-phosphate (polar fraction), which comprises
[98855] (a) increasing or generating the activity of a polypeptide comprising a polypeptide as depicted in the respective line in column 5 or 8 of Table II, application no. 19, or a homolog or a fragment thereof, a consensus sequence or at least one polypeptide motif as depicted in the respective line in column 8 of Table IV, application no. 19, whereby the respective line disclose in column 7 the fine chemical glycerol-3-phosphate (polar fraction); or
[98856] increasing or generating the activity of an expression product of one or more nucleic acid molecule(s) comprising a polynucleotide as depicted in the respective line in column 5 or 8 of Table I, application no. 19, preferably the coding region thereof, or a homolog or a fragment thereof, whereby the respective line disclose in column 7 the fine chemical glycerol-3-phosphate (polar fraction);
[98857] in the cytosol of a cell of a non-human organism or a part thereof; preferably a microorganism, a plant cell, a plant or a part thereof, as compared to a corresponding non-transformed wild type non-human organism or a part thereof; and
[98858] (b) growing the non-human organism under conditions which permit the production of glycerol-3-phosphate (polar fraction), or a composition comprising glycerol-3-phosphate (polar fraction) in said non-human organism or in the culture medium surrounding said non-human organism

[98859] Accordingly, the present invention relates to a process for the production of triacylglycerol, which comprises
[98860] (a) increasing or generating the activity of a polypeptide comprising a polypeptide as depicted in the respective line in column 5 or 8 of Table II, application no. 19, or a homolog or a fragment thereof, a consensus sequence or at least one polypeptide motif as depicted in the respective line in column 8 of Table IV, application no. 19, whereby the respective line disclose in column 7 the fine chemical triacylglycerol; or
[98861] increasing or generating the activity of an expression product of one or more nucleic acid molecule(s) comprising a polynucleotide as depicted in the respective line in column 5 or 8 of Table I, application no. 19, preferably the coding region thereof, or a homolog or a fragment thereof, whereby the respective line disclose in column 7 the fine chemical triacylglycerol;
[98862] in the cytosol of a cell of a non-human organism or a part thereof; preferably a microorganism, a plant cell, a plant or a part thereof, as compared to a corresponding non-transformed wild type non-human organism or a part thereof; and
[98863] (b) growing the non-human organism under conditions which permit the production of triacylglycerol, or a composition comprising triacylglycerol in said non-human organism or in the culture medium surrounding said non-human organism.

[98864] In a further embodiment the activity of the polypeptide comprising a polypeptide as depicted in the respective line in column 5 or 8 of Table II, application no. 19, or a homolog or a fragment thereof, a consensus sequence or at least one polypeptide motif as depicted in the respective line in column 8 of Table IV, application no. 19, is increased or generated non-targeted in the above-mentioned process in a microorganism or plant or a part thereof.

[98865] In a further embodiment said polypeptide has the activity of the respective polypeptide represented by a protein comprising a polypeptide as depicted in the respective line in column 5 of Table II, application no. 19.

[98866] In a further embodiment the activity of the expression product of one or more nucleic acid molecule(s) comprising a polynucleotide as depicted in the respective line in column 5 or 8 of Table I, application no. 19, preferably the coding region thereof, or a homolog or a fragment thereof, is increased or generated non-targeted in the above-mentioned process in a microorganism or plant or a part thereof.

[98867] In a further embodiment the activity of the polypeptide comprising a polypeptide as depicted in the respective line in column 5 or 8 of Table II, application no. 19, or a homolog or a fragment thereof, a consensus sequence or at least one polypeptide motif as depicted in the respective line in column 8 of Table IV, application no. 19, is increased or generated in the above-mentioned process in an organelle preferably in plastids or mitochondria, especially in plastids, of a microorganism or plant.

[98868] In a further embodiment said polypeptide has the activity of the respective polypeptide represented by a protein comprising a polypeptide as depicted in the respective line in column 5 of Table II, application no. 19.

[98869] In a further embodiment the activity of the expression product of one or more nucleic acid molecule(s) comprising a polynucleotide as depicted in the respective line in column 5 or 8 of Table I, application no. 19, preferably the coding region thereof, or a homolog or a fragment thereof, is increased or generated in the above-mentioned process in an organelle, preferably in plasids or mitochondria, especially in plastids, of a microorganism or plant.

[98870] In a further embodiment the activity of the polypeptide comprising a polypeptide as depicted in the respective line in column 5 or 8 of Table II, application no. 19, or a homolog or a fragment thereof, a consensus sequence or at least one polypeptide motif as depicted in the respective line in column 8 of Table IV, application no. 19, is increased or generated in the above-mentioned process in the cyctosol of a cell, of a microorganism or plant.

[98871] In a further embodiment said polypeptide has the activity of the respective polypeptide represented by a protein comprising a polypeptide as depicted in the respective line in column 5 of Table II, application no. 19.

[98872] In a further embodiment the activity of the expression product of one or more nucleic acid molecule(s) comprising a polynucleotide as depicted in the respective line in column 5 or 8 of Table I, application no. 19, preferably the coding region thereof, or a homolog or a fragment thereof, is increased or generated in the above-mentioned process in the cytosol of a cell, of a microorganism or plant.

[98873] [0039.1.7.19] to [0066.1.7.19] for the disclosure of these paragraphs see [0039.1.7.7] to [0066.1.7.7] above

[98874] As mentioned above the nucleic acid sequences coding for the proteins as shown in Table II, application no. 19, column 5 or 8, or homologs or fragments thereof, are joined to a nucleic acid sequence encoding a plastidic transit peptide, e.g, if for the nucleic acid molecule in Table I, column 6 the term “plastidic” is indicated. This nucleic acid sequence encoding a transit peptide ensures transport of the protein to the organelle. The nucleic acid sequence of the gene to be expressed and the nucleic acid sequence encoding the transit peptide are operably linked. Therefore the transit peptide coding sequence is fused in frame to the nucleic acid sequence coding for proteins as shown in Table II, application no. 19, column 5 or 8, or homologs or fragments thereof, e.g., if for the nucleic acid molecule in Table I, column 6 the term “plastidic” is indicated.

[98875] [0068.1.7.19] to [0072.1.7.19] for the disclosure of these paragraphs see [0068.1.7.7] to [0072.1.7.7] above

[98876] As mentioned above the nucleic acid sequences coding for the proteins as shown in the respective line in Table II, application no. 19, column 5 or 8, or homologs or fragments thereof, are joined to a nucleic acid sequence encoding a mitochondric transit peptide, e.g., if for the respective nucleic acid molecule in Table I, column 6 the term “mitochondric” is indicated. This nucleic acid sequence encoding a transit peptide ensures transport of the protein to the organelle. The nucleic acid sequence of the gene to be expressed and the nucleic acid sequence encoding the transit peptide are operably linked. Therefore the transit peptide encoding sequence is fused in frame to the nucleic acid sequence coding for proteins as shown in the respective line in Table II, application no. 19, column 5 or 8, or homologs or fragments thereof, e.g., if for the nucleic acid molecule in the respective line in Table I, column 6 the term “mitochondric” is indicated.

[98877] for the disclosure of this paragraph see [0074.1.7.7] above

[98878] for the disclosure of this paragraph see [0075.1.7.7] above

[98879] Nucleic acid sequences coding for the transit peptides may be chemically synthesized either in part or wholly according to structure of transit peptide sequences disclosed in the prior art. Said natural or chemically synthesized sequences can be directly linked to the sequences encoding the mature protein or via a linker nucleic acid sequence, which may be typically less than 500 base pairs, preferably less than 450, 400, 350, 300, 250 or 200 base pairs, more preferably less than 150, 100, 90, 80, 70, 60, 50, 40 or 30 base pairs and most preferably less than 25, 20, 15, 12, 9, 6 or 3 base pairs in length and are in frame to the coding sequence. Furthermore favorable nucleic acid sequences encoding transit peptides may comprise sequences derived from more than one biological and/or chemical source and may include a nucleic acid sequence derived from the amino-terminal region of the mature protein, which in its native state is linked to the transit peptide. In a preferred embodiment of the invention said amino-terminal region of the mature protein is typically less than 150 amino acids, preferably less than 140, 130, 120, 110, 100 or 90 amino acids, more preferably less than 80, 70, 60, 50, 40, 35, 30, 25 or 20 amino acids and most preferably less than 19, 18, 17, 16, 15, 14, 13, 12, 11 or 10 amino acids in length. But even shorter or longer stretches are also possible. In addition target sequences, which facilitate the transport of proteins to other cell compartments such as the vacuole, endoplasmic reticulum, golgi complex, glyoxysomes, peroxisomes, mitochondria (in case of a plastidal transit peptide) or plastids, especially chloroplasts (in case of a mitochondric transit peptide) may be also part of the inventive nucleic acid sequence. The proteins translated from said inventive nucleic acid sequences are a kind of fusion proteins that means the nucleic acid sequences encoding the plastidal transit peptide for example the ones shown in Table a, preferably the last one of the Table a are joint to the respective nucleic acid sequences shown in Table I, application no. 19, columns 5 or 8, especially the coding region thereof, or homologs or fragments thereof, in case of nucleic acid sequences being expressed in plastids, and that means the nucleic acid sequences encoding the mitochondric transit peptide for example the ones shown in Table b, preferably the last one of the Table b are joint to the respective nucleic acid sequences shown in Table I, application no. 19, columns 5 or 8, especially the coding region thereof, or homologs or fragments thereof, in case of nucleic acid sequences being expressed in mitochondria. The person skilled in the art is able to join said sequences in a functional manner. Advantageously the transit peptide part is cleaved off from the protein part shown in Table II, application no. 19, columns 5 or 8, or a homolog or fragment thereof, during or after the transport into the organelles, preferably into the plastids or mitochondria, respectively.

[98880] All products of the cleavage of the preferred transit peptide shown in the last line of Table a have preferably the N-terminal amino acid sequences QIA CSS or QIA EFQLTT in front of the start methionine of the respective protein mentioned in Table II, application no. 19, column 5 or 8. or homologs or fragments thereof. Other short amino acid sequences of an range of 1 to 20 amino acids preferable 2 to 15 amino acids, more preferable 3 to 10 amino acids most preferably 4 to 8 amino acids are also possible in front of the start methionine of the protein mentioned in Table II, application no. 19, columns 5 or 8, or homologs or fragments thereof. In case of the amino acid sequence QIA CSS the three amino acids in front of the start methionine are stemming from the LIC (=ligatation independent cloning) cassette. Said short amino acid sequence is preferred in the case of the expression of E. coli genes. In case of the amino acid sequence QIA EFQLTT the six amino acids in front of the start methionine are stemming from the LIC cassette. Said short amino acid sequence is preferred in the case of the expression of S. cerevisiae genes. The skilled worker knowns that other short sequences are also useful in the expression of the respective nucleic acid molecule comprising a polynucleotide as depicted in Table I, application no. 19, column 5 or 8, preferably the coding region thereof, or a homolog or a fragment thereof. Furthermore the skilled worker is aware of the fact that there is not a need for such short sequences in the expression of the genes.

[98881] for the disclosure of this paragraph see [0077.1.7.7] above

[98882] for the disclosure of this paragraph see [0078.1.7.7] above

[98883] Alternatively to the targeting of the respective sequences shown in Table II, application no. 19, columns 5 or 8, or homologs or fragments thereof, preferably of sequences in general encoded in the nucleus with the aid of the targeting sequences mentioned for example in Table a alone, Table b alone, or in combination with other targeting sequences preferably into plastids or mitochondria, respectively, the nucleic acids of the invention can directly be introduced into the plastidal or mitochondrial genome. Therefore in a preferred embodiment the respective nucleic acid sequences shown in the respective line in Table I, application no. 19, columns 5 or 8, preferably the coding region thereof, or homologs or fragments thereof, are directly introduced and expressed in plastids e.g., if for the nucleic acid molecule in the respective line in Table I, column 6, the term “plastidic” is indicated, or are directly introduced and expressed in mitochondria e.g., if for the nucleic acid molecule in the respective line in Table I, column 6 the term “mitochondric” is indicated. The term “introduced” in the context of this specification shall mean the insertion of a nucleic acid sequence into the organism by means of a “transfection”, “transduction” or preferably by “transformation”.

[98884] A plastid, such as a chloroplast, or a mitochondrion, has been “transformed” by an exogenous (preferably foreign) nucleic acid sequence if a nucleic acid sequence has been introduced into the plastid or mitochondrion that means that this sequence has crossed the membrane or the membranes of the plastid or of the mitochondrion. The exogenous, preferably foreign, DNA may be integrated (covalently linked) into plastid or mitochondrial DNA making up the genome of the plastid or mitochondrion, or it may remain unintegrated (e.g., by including a chloroplast origin of replication). “Stably” integrated DNA sequences are those, which are inherited through plastid or mitochondrion replication, thereby transferring new plastids or mitochondria, with the features of the integrated DNA sequence to the progeny.

[98885] [0080.1.7.19] to [0083.1.7.19] for the disclosure of these paragraphs see [0080.1.7.7] to [0083.1.7.7] above

[98886] For the process of the present invention it may be of great advantage that by transforming the plastids the intraspecies specific transgene flow is blocked, because a lot of species such as corn, cotton and rice have a strict maternal inheritance of plastids. By placing the respective genes specified in the respective line in Table I, application no. 19, columns 5 or 8, preferably the coding region, or homologs or fragments thereof, e.g. if for the nucleic acid molecule in the respective line in column 6 of Table I the term “plastidic” is indicated, in the plastids of plants, these genes will not be present in the pollen of said plants.

[98887] A further preferred embodiment of the invention relates to the use of so called “chloroplast localization sequences”, in which a first RNA sequence or molecule is capable of transporting or “chaperoning” a second RNA sequence, such as a RNA sequence transcribed from the sequences depicted in the respective line in Table I, application no. 19, columns 5 or 8, preferably the coding region thereof, or a homolog or a fragment thereof, or a sequence encoding a protein, as depicted in the respective line in Table II, application no. 19, columns 5 and 8, or a homolog or a fragment thereof, from an external environment inside a cell or outside a plastid into a chloroplast. In one embodiment the chloroplast localization signal is substantially similar or complementary to a complete or intact viroid sequence. The chloroplast localization signal may be encoded by a DNA sequence, which is transcribed into the chloroplast localization RNA. The term “viroid” refers to a naturally occurring single stranded RNA molecule (Flores, C. R. Acad. Sci. III. 324 (10), 943 (2001)). Viroids usually contain about 200-500 nucleotides and generally exist as circular molecules. Examples of viroids that contain chloroplast localization signals include but are not limited to ASBVd, PLMVd, CChMVd and ELVd. The viroid sequence or a functional part of it can be fused to the sequences depicted in the respective line in Table I, application no. 19, columns 5 or 8, preferably the coding region thereof, or a homolog or a fragment thereof, or a sequence encoding a protein, as depicted in the respective line in Table II, application no. 19, columns 5 or 8, or a homolog or a fragment thereof, in such a manner that the viroid sequence transports a sequence transcribed from a sequence as depicted in the respective line in Table I, application no. 19 columns 5 or 8, preferably the coding region thereof, or a homolog or a fragment thereof, or a sequence encoding a protein as depicted in the respective line in Table II, application no. 19 columns 5 or 8, or a homolog or a fragment thereof, into the chloroplasts, e.g. if for the nucleic acid molecule in column 6 of Table I the term “plastidic” is indicated. A preferred embodiment uses a modified ASBVd (Navarro et al., Virology. 268 (1), 218 (2000)).

[98888] In a further specific embodiment the protein to be expressed in the plastids such as the proteins depicted in the respective line in Table II, application no. 19, columns 5 or 8, or a homolog or a fragment thereof, e.g. if for the nucleic acid molecule in the respective line in column 6 of Table I the term “plastidic” is indicated, are encoded by different nucleic acids. Such a method is disclosed in WO 2004/040973, which shall be incorporated by reference. WO 2004/040973 teaches a method, which relates to the translocation of an RNA corresponding to a gene or gene fragment into the chloroplast by means of a chloroplast localization sequence. The genes, which should be expressed in the plant or plant cells, are split into nucleic acid fragments, which are introduced into different compartments in the plant e.g. the nucleus, the plastids and/or mitochondria. Additionally plant cells are described in which the chloroplast contains a ribozyme fused at one end to an RNA encoding a fragment of a protein used in the inventive process such that the ribozyme can trans-splice the translocated fusion RNA to the RNA encoding the gene fragment to form and as the case may be reunite the nucleic acid fragments to an intact mRNA encoding a functional protein for example as disclosed in the respective line in Table II, application no. 19, columns 5 or 8, or a homolog or a fragment thereof.

[98889] In a preferred embodiment of the invention the nucleic acid sequences as shown in the respective line in Table I, application no. 19, columns 5 or 8, preferably the coding region thereof, or homologs or fragments thereof, e.g. if for the nucleic acid molecule in the respective line in column 6 of Table I the term “plastidic” is indicated, used in the inventive process are transformed into plastids, which are metabolically active. Those plastids should preferably maintain at a high copy number in the plant or plant tissue of interest, most preferably the chloroplasts found in green plant tissues, such as leaves or cotyledons or in seeds.

[98890] For a good expression in the plastids the nucleic acid sequences as shown in the respective line in Table I, application no. 19, columns 5 or 8, preferably the coding region thereof, or homologs or fragments thereof, e.g. if for the nucleic acid molecule in the respective line in column 6 of Table I the term “plastidic” is indicated, are introduced into an expression cassette using preferably a promoter and terminater, which are active in plastids preferably a chloroplast promoter. Examples of such promoters include the psbA promoter from the gene from spinach or pea, the rbcL promoter, and the atpB promoter from corn.

[98891] [0089.1.7.19] to [0092.1.7.19] for the disclosure of these paragraphs see [0089.1.7.7] to [0092.1.7.7] above

[98892] Advantageously the process for the production of the fine chemical bis-glyceryl phosphate (polar fraction), glycerol (lipid fraction), glycerol (polar fraction), glycerol phosphate (lipid fraction), glycerol-3-phosphate (polar fraction), and/or triacylglycerol leads to an enhanced production of the respective fine chemical. The terms “enhanced” or “increase” mean at least a 10%, 20%, 30%, 40% or 50%, preferably at least 60%, 70%, 80%, 90% or 100%, more preferably 150%, 200%, 300%, 400% or 500% higher production of the respective fine chemical bis-glyceryl phosphate (polar fraction), glycerol (lipid fraction), glycerol (polar fraction), glycerol phosphate (lipid fraction), glycerol-3-phosphate (polar fraction), and/or triacylglycerol in comparison to the wild-type as defined above, e.g. that means in comparison to a non-human organism without the aforementioned modification of the activity of a protein as shown in the respective line in Table II, application no. 19, column 5 or 8, or a fragment or a homolog thereof. The modification of the activity of a protein as shown in the respective line in Table II, application no. 19, column 5 or 8, or a homolog or a fragment thereof, or their combination can be achieved by joining the protein to a respective transit peptide, e.g. if for the respective encoding nucleic acid molecule in column 6 of Table I the term “plastidic” or “mitochondric” is indicated.

[98893] Surprisingly it was found, that the transgenic expression of a protein as shown in the respective line in Table II, application no. 19, column 5, especially from the Saccaromyces cerevisiae, E. coli, Arabidopsis thaliana, Azotobacter vinelandii, Brassica napus, Glycine max, Oryza sativa, Physcomitrella patens, Synechocystis sp., Thermus thermophilus, Zea mays in a non-human organism, like a plant or a part thereof, such as Arabidopsis thaliana for example, or a microorganism, conferred a production of or an increase in bis-glyceryl phosphate (polar fraction), glycerol (lipid fraction), glycerol (polar fraction), glycerol phosphate (lipid fraction), glycerol-3-phosphate (polar fraction), and/or triacylglycerol,respectively, to the transgenic non-human organism as compared to a corresponding non-transformed wild type.

[98894] In one embodiment the transgenic expression of a protein as shown in the respective line in Table II, application no. 19, column 5 or 8, or a homolog or a fragment thereof, especially from the Saccaromyces cerevisiae, E. coli, Arabidopsis thaliana, Azotobacter vinelandii, Brassica napus, Glycine max, Oryza sativa, Physcomitrella patens, Synechocystis sp., Thermus thermophilus, Zea mays in a non-human organism, like a plant or a part thereof, such as Arabidopsis thaliana for example, or a microorganism, confers a production of or an increase in bis-glyceryl phosphate (polar fraction), glycerol (lipid fraction), glycerol (polar fraction), glycerol phosphate (lipid fraction), glycerol-3-phosphate (polar fraction), and/or triacylglycerol, respectively, to the transgenic non-human organism as compared to a corresponding non-transformed wild type.

[98895] Accordingly, in one embodiment, an increase of glycerol phosphate (lipid fraction) in a non-human organism, as compared to a corresponding non-transformed wild type non-human organism, is conferred in the process of the invention, if the activity of a polypeptide showing the activity of a protein phosphatase, or if the activity of the polypeptide At1g07430, preferably represented by SEQ ID NO. 17452, or a homolog or fragment thereof, or if the activity of a polypeptide encoded by a nucleic acid molecule comprising the nucleic acid SEQ ID NO. 17451, preferably the coding region thereof, or a homolog or fragment thereof, e.g. derived from Arabidopsis thaliana, is increased or generated. For example the activity of a nucleic acid molecule or a polypeptide comprising the nucleic acid, preferably the coding region thereof, or polypeptide or the consensus sequence or the polypeptide motif, as depicted in Table I, II or IV, application No. 19, column 5 or 8 in the respective same line as the nucleic acid molecule SEQ ID NO. 17451 or polypeptide SEQ ID NO. 17452, respectively, or a homolog or a fragment thereof, is increased or generated, or if the activity protein phosphatase is increased or generated in a non-human organism, like a microorganism or a plant cell, plant or part thereof, especially with non-targeted localization, whereby the respective line disclose in column 7 the fine chemical glycerol phosphate (lipid fraction). For example, an increase of the glycerol phosphate (lipid fraction) of at least 1 percent, particularly in a range of 21 to 63-percent is conferred as compared to a corresponding non-transformed wild type non-human organism.

[98896] Accordingly, in one embodiment, an increase of bis-glyceryl phosphate (polar fraction) in a non-human organism, as compared to a corresponding non-transformed wild type non-human organism, is conferred in the process of the invention, if the activity of a polypeptide showing the activity of a At1g23110-protein, or if the activity of the polypeptide At1g23110, preferably represented by SEQ ID NO. 102087, or a homolog or fragment thereof, or if the activity of a polypeptide encoded by a nucleic acid molecule comprising the nucleic acid SEQ ID NO. 102086, preferably the coding region thereof, or a homolog or fragment thereof, e.g. derived from Arabidopsis thaliana, is increased or generated. For example the activity of a nucleic acid molecule or a polypeptide comprising the nucleic acid, preferably the coding region thereof, or polypeptide or the consensus sequence or the polypeptide motif, as depicted in Table I, II or IV, application No. 19, column 5 or 8 in the respective same line as the nucleic acid molecule SEQ ID NO. 102086 or polypeptide SEQ ID NO. 102087, respectively, or a homolog or a fragment thereof, is increased or generated, or if the activity At1g23110-protein is increased or generated in a non-human organism, like a microorganism or a plant cell, plant or part thereof, especially with non-targeted localization, whereby the respective line disclose in column 7 the fine chemical bis-glyceryl phosphate (polar fraction). For example, an increase of the bis-glyceryl phosphate (polar fraction) of at least 1 percent, particularly in a range of 264 to 530-percent is conferred as compared to a corresponding non-transformed wild type non-human organism.

[98897] Accordingly, in one embodiment, an increase of bis-glyceryl phosphate (polar fraction) in a non-human organism, as compared to a corresponding non-transformed wild type non-human organism, is conferred in the process of the invention, if the activity of a polypeptide showing the activity of a eukaryotic translation initiation factor 5, or if the activity of the polypeptide At1g36730, preferably represented by SEQ ID NO. 17969, or a homolog or fragment thereof, or if the activity of a polypeptide encoded by a nucleic acid molecule comprising the nucleic acid SEQ ID NO. 17968, preferably the coding region thereof, or a homolog or fragment thereof, e.g. derived from Arabidopsis thaliana, is increased or generated. For example the activity of a nucleic acid molecule or a polypeptide comprising the nucleic acid, preferably the coding region thereof, or polypeptide or the consensus sequence or the polypeptide motif, as depicted in Table I, II or IV, application No. 19, column 5 or 8 in the respective same line as the nucleic acid molecule SEQ ID NO. 17968 or polypeptide SEQ ID NO. 17969, respectively, or a homolog or a fragment thereof, is increased or generated, or if the activity eukaryotic translation initiation factor 5 is increased or generated in a non-human organism, like a microorganism or a plant cell, plant or part thereof, especially with non-targeted localization, whereby the respective line disclose in column 7 the fine chemical bis-glyceryl phosphate (polar fraction). For example, an increase of the bis-glyceryl phosphate (polar fraction) of at least 1 percent, particularly in a range of 38 to 72-percent is conferred as compared to a corresponding non-transformed wild type non-human organism.

[98898] Accordingly, in one embodiment, an increase of glycerol phosphate (lipid fraction) in a non-human organism, as compared to a corresponding non-transformed wild type non-human organism, is conferred in the process of the invention, if the activity of a polypeptide showing the activity of a eukaryotic translation initiation factor 5, or if the activity of the polypeptide At1g36730, preferably represented by SEQ ID NO. 17969, or a homolog or fragment thereof, or if the activity of a polypeptide encoded by a nucleic acid molecule comprising the nucleic acid SEQ ID NO. 17968, preferably the coding region thereof, or a homolog or fragment thereof, e.g. derived from Arabidopsis thaliana, is increased or generated. For example the activity of a nucleic acid molecule or a polypeptide comprising the nucleic acid, preferably the coding region thereof, or polypeptide or the consensus sequence or the polypeptide motif, as depicted in Table I, II or IV, application No. 19, column 5 or 8 in the respective same line as the nucleic acid molecule SEQ ID NO. 17968 or polypeptide SEQ ID NO. 17969, respectively, or a homolog or a fragment thereof, is increased or generated, or if the activity eukaryotic translation initiation factor 5 is increased or generated in a non-human organism, like a microorganism or a plant cell, plant or part thereof, especially with non-targeted localization, whereby the respective line disclose in column 7 the fine chemical glycerol phosphate (lipid fraction). For example, an increase of the glycerol phosphate (lipid fraction) of at least 1 percent, particularly in a range of 24 to 39-percent is conferred as compared to a corresponding non-transformed wild type non-human organism.

[98899] Accordingly, in one embodiment, an increase of triacylglycerol in a non-human organism, as compared to a corresponding non-transformed wild type non-human organism, is conferred in the process of the invention, if the activity of a polypeptide showing the activity of a At1g67340-protein, or if the activity of the polypeptide At1g67340, preferably represented by SEQ ID NO. 19365, or a homolog or fragment thereof, or if the activity of a polypeptide encoded by a nucleic acid molecule comprising the nucleic acid SEQ ID NO. 19364, preferably the coding region thereof, or a homolog or fragment thereof, e.g. derived from Arabidopsis thaliana, is increased or generated. For example the activity of a nucleic acid molecule or a polypeptide comprising the nucleic acid, preferably the coding region thereof, or polypeptide or the consensus sequence or the polypeptide motif, as depicted in Table I, II or IV, application No. 19, column 5 or 8 in the respective same line as the nucleic acid molecule SEQ ID NO. 19364 or polypeptide SEQ ID NO. 19365, respectively, or a homolog or a fragment thereof, is increased or generated, or if the activity At1g67340-protein is increased or generated in a non-human organism, like a microorganism or a plant cell, plant or part thereof, especially with non-targeted localization, whereby the respective line disclose in column 7 the fine chemical triacylglycerol. For example, an increase of the triacylglycerol of at least 1 percent, particularly in a range of 39 to 135-percent is conferred as compared to a corresponding non-transformed wild type non-human organism.

[98900] Accordingly, in one embodiment, an increase of glycerol (lipid fraction) in a non-human organism, as compared to a corresponding non-transformed wild type non-human organism, is conferred in the process of the invention, if the activity of a polypeptide showing the activity of a transcription factor, or if the activity of the polypeptide At1g68320, preferably represented by SEQ ID NO. 1062, or a homolog or fragment thereof, or if the activity of a polypeptide encoded by a nucleic acid molecule comprising the nucleic acid SEQ ID NO. 1061, preferably the coding region thereof, or a homolog or fragment thereof, e.g. derived from Arabidopsis thaliana, is increased or generated. For example the activity of a nucleic acid molecule or a polypeptide comprising the nucleic acid, preferably the coding region thereof, or polypeptide or the consensus sequence or the polypeptide motif, as depicted in Table I, II or IV, application No. 19, column 5 or 8 in the respective same line as the nucleic acid molecule SEQ ID NO. 1061 or polypeptide SEQ ID NO. 1062, respectively, or a homolog or a fragment thereof, is increased or generated, or if the activity transcription factor is increased or generated in a non-human organism, like a microorganism or a plant cell, plant or part thereof, especially with non-targeted localization, whereby the respective line disclose in column 7 the fine chemical glycerol (lipid fraction). For example, an increase of the glycerol (lipid fraction) of at least 1 percent, particularly in a range of 16 to 57-percent is conferred as compared to a corresponding non-transformed wild type non-human organism.

[98901] Accordingly, in one embodiment, an increase of bis-glyceryl phosphate (polar fraction) in a non-human organism, as compared to a corresponding non-transformed wild type non-human organism, is conferred in the process of the invention, if the activity of a polypeptide showing the activity of a protein phosphatase, or if the activity of the polypeptide At1g72770, preferably represented by SEQ ID NO. 19420, or a homolog or fragment thereof, or if the activity of a polypeptide encoded by a nucleic acid molecule comprising the nucleic acid SEQ ID NO. 19419, preferably the coding region thereof, or a homolog or fragment thereof, e.g. derived from Arabidopsis thaliana, is increased or generated. For example the activity of a nucleic acid molecule or a polypeptide comprising the nucleic acid, preferably the coding region thereof, or polypeptide or the consensus sequence or the polypeptide motif, as depicted in Table I, II or IV, application No. 19, column 5 or 8 in the respective same line as the nucleic acid molecule SEQ ID NO. 19419 or polypeptide SEQ ID NO. 19420, respectively, or a homolog or a fragment thereof, is increased or generated, or if the activity protein phosphatase is increased or generated in a non-human organism, like a microorganism or a plant cell, plant or part thereof, especially with non-targeted localization, whereby the respective line disclose in column 7 the fine chemical bis-glyceryl phosphate (polar fraction). For example, an increase of the bis-glyceryl phosphate (polar fraction) of at least 1 percent, particularly in a range of 40 to 78-percent is conferred as compared to a corresponding non-transformed wild type non-human organism.

[98902] Accordingly, in one embodiment, an increase of glycerol (lipid fraction) in a non-human organism, as compared to a corresponding non-transformed wild type non-human organism, is conferred in the process of the invention, if the activity of a polypeptide showing the activity of a protein phosphatase, or if the activity of the polypeptide At1g72770, preferably represented by SEQ ID NO. 19420, or a homolog or fragment thereof, or if the activity of a polypeptide encoded by a nucleic acid molecule comprising the nucleic acid SEQ ID NO. 19419, preferably the coding region thereof, or a homolog or fragment thereof, e.g. derived from Arabidopsis thaliana, is increased or generated. For example the activity of a nucleic acid molecule or a polypeptide comprising the nucleic acid, preferably the coding region thereof, or polypeptide or the consensus sequence or the polypeptide motif, as depicted in Table I, II or IV, application No. 19, column 5 or 8 in the respective same line as the nucleic acid molecule SEQ ID NO. 19419 or polypeptide SEQ ID NO. 19420, respectively, or a homolog or a fragment thereof, is increased or generated, or if the activity protein phosphatase is increased or generated in a non-human organism, like a microorganism or a plant cell, plant or part thereof, especially with non-targeted localization, whereby the respective line disclose in column 7 the fine chemical glycerol (lipid fraction). For example, an increase of the glycerol (lipid fraction) of at least 1 percent, particularly in a range of 23 to 67-percent is conferred as compared to a corresponding non-transformed wild type non-human organism.

[98903] Accordingly, in one embodiment, an increase of glycerol phosphate (lipid fraction) in a non-human organism, as compared to a corresponding non-transformed wild type non-human organism, is conferred in the process of the invention, if the activity of a polypeptide showing the activity of a protein phosphatase, or if the activity of the polypeptide At1g72770, preferably represented by SEQ ID NO. 19420, or a homolog or fragment thereof, or if the activity of a polypeptide encoded by a nucleic acid molecule comprising the nucleic acid SEQ ID NO. 19419, preferably the coding region thereof, or a homolog or fragment thereof, e.g. derived from Arabidopsis thaliana, is increased or generated. For example the activity of a nucleic acid molecule or a polypeptide comprising the nucleic acid, preferably the coding region thereof, or polypeptide or the consensus sequence or the polypeptide motif, as depicted in Table I, II or IV, application No. 19, column 5 or 8 in the respective same line as the nucleic acid molecule SEQ ID NO. 19419 or polypeptide SEQ ID NO. 19420, respectively, or a homolog or a fragment thereof, is increased or generated, or if the activity protein phosphatase is increased or generated in a non-human organism, like a microorganism or a plant cell, plant or part thereof, especially with non-targeted localization, whereby the respective line disclose in column 7 the fine chemical glycerol phosphate (lipid fraction). For example, an increase of the glycerol phosphate (lipid fraction) of at least 1 percent, particularly in a range of 17 to 56-percent is conferred as compared to a corresponding non-transformed wild type non-human organism.

[98904] Accordingly, in one embodiment, an increase of bis-glyceryl phosphate (polar fraction) in a non-human organism, as compared to a corresponding non-transformed wild type non-human organism, is conferred in the process of the invention, if the activity of a polypeptide showing the activity of a CBL-interacting protein kinase, or if the activity of the polypeptide At2g30360, preferably represented by SEQ ID NO. 19920, or a homolog or fragment thereof, or if the activity of a polypeptide encoded by a nucleic acid molecule comprising the nucleic acid SEQ ID NO. 19919, preferably the coding region thereof, or a homolog or fragment thereof, e.g. derived from Arabidopsis thaliana, is increased or generated. For example the activity of a nucleic acid molecule or a polypeptide comprising the nucleic acid, preferably the coding region thereof, or polypeptide or the consensus sequence or the polypeptide motif, as depicted in Table I, II or IV, application No. 19, column 5 or 8 in the respective same line as the nucleic acid molecule SEQ ID NO. 19919 or polypeptide SEQ ID NO. 19920, respectively, or a homolog or a fragment thereof, is increased or generated, or if the activity CBL-interacting protein kinase is increased or generated in a non-human organism, like a microorganism or a plant cell, plant or part thereof, especially with non-targeted localization, whereby the respective line disclose in column 7 the fine chemical bis-glyceryl phosphate (polar fraction). For example, an increase of the bis-glyceryl phosphate (polar fraction) of at least 1 percent, particularly in a range of 39 to 69-percent is conferred as compared to a corresponding non-transformed wild type non-human organism.

[98905] Accordingly, in one embodiment, an increase of bis-glyceryl phosphate (polar fraction) in a non-human organism, as compared to a corresponding non-transformed wild type non-human organism, is conferred in the process of the invention, if the activity of a polypeptide showing the activity of a phosphatidylinositol 3- and 4-kinase family protein, or if the activity of the polypeptide At2g46500, preferably represented by SEQ ID NO. 21107, or a homolog or fragment thereof, or if the activity of a polypeptide encoded by a nucleic acid molecule comprising the nucleic acid SEQ ID NO. 21106, preferably the coding region thereof, or a homolog or fragment thereof, e.g. derived from Arabidopsis thaliana, is increased or generated. For example the activity of a nucleic acid molecule or a polypeptide comprising the nucleic acid, preferably the coding region thereof, or polypeptide or the consensus sequence or the polypeptide motif, as depicted in Table I, II or IV, application No. 19, column 5 or 8 in the respective same line as the nucleic acid molecule SEQ ID NO. 21106 or polypeptide SEQ ID NO. 21107, respectively, or a homolog or a fragment thereof, is increased or generated, or if the activity phosphatidylinositol 3- and 4-kinase family protein is increased or generated in a non-human organism, like a microorganism or a plant cell, plant or part thereof, especially with non-targeted localization, whereby the respective line disclose in column 7 the fine chemical bis-glyceryl phosphate (polar fraction). For example, an increase of the bis-glyceryl phosphate (polar fraction) of at least 1 percent, particularly in a range of 45 to 68-percent is conferred as compared to a corresponding non-transformed wild type non-human organism.

[98906] Accordingly, in one embodiment, an increase of triacylglycerol in a non-human organism, as compared to a corresponding non-transformed wild type non-human organism, is conferred in the process of the invention, if the activity of a polypeptide showing the activity of a heat shock transcription factor, or if the activity of the polypeptide At3g02990, preferably represented by SEQ ID NO. 68658, or a homolog or fragment thereof, or if the activity of a polypeptide encoded by a nucleic acid molecule comprising the nucleic acid SEQ ID NO. 68657, preferably the coding region thereof, or a homolog or fragment thereof, e.g. derived from Arabidopsis thaliana, is increased or generated. For example the activity of a nucleic acid molecule or a polypeptide comprising the nucleic acid, preferably the coding region thereof, or polypeptide or the consensus sequence or the polypeptide motif, as depicted in Table I, II or IV, application No. 19, column 5 or 8 in the respective same line as the nucleic acid molecule SEQ ID NO. 68657 or polypeptide SEQ ID NO. 68658, respectively, or a homolog or a fragment thereof, is increased or generated, or if the activity heat shock transcription factor is increased or generated in a non-human organism, like a microorganism or a plant cell, plant or part thereof, especially with non-targeted localization, whereby the respective line disclose in column 7 the fine chemical triacylglycerol. For example, an increase of the triacylglycerol of at least 1 percent, particularly in a range of 39 to 91-percent is conferred as compared to a corresponding non-transformed wild type non-human organism.

[98907] Accordingly, in one embodiment, an increase of glycerol (lipid fraction) in a non-human organism, as compared to a corresponding non-transformed wild type non-human organism, is conferred in the process of the invention, if the activity of a polypeptide showing the activity of a transcription factor, or if the activity of the polypeptide At4g09960, preferably represented by SEQ ID NO. 109718, or a homolog or fragment thereof, or if the activity of a polypeptide encoded by a nucleic acid molecule comprising the nucleic acid SEQ ID NO. 109717, preferably the coding region thereof, or a homolog or fragment thereof, e.g. derived from Arabidopsis thaliana, is increased or generated. For example the activity of a nucleic acid molecule or a polypeptide comprising the nucleic acid, preferably the coding region thereof, or polypeptide or the consensus sequence or the polypeptide motif, as depicted in Table I, II or IV, application No. 19, column 5 or 8 in the respective same line as the nucleic acid molecule SEQ ID NO. 109717 or polypeptide SEQ ID NO. 109718, respectively, or a homolog or a fragment thereof, is increased or generated, or if the activity transcription factor is increased or generated in a non-human organism, like a microorganism or a plant cell, plant or part thereof, especially with non-targeted localization, whereby the respective line disclose in column 7 the fine chemical glycerol (lipid fraction). For example, an increase of the glycerol (lipid fraction) of at least 1 percent, partitularly in a range of 18 to 25-percent is conferred as compared to a corresponding non-transformed wild type non-human organism.

[98908] Accordingly, in one embodiment, an increase of glycerol (lipid fraction) in a non-human organism, as compared to a corresponding non-transformed wild type non-human organism, is conferred in the process of the invention, if the activity of a polypeptide showing the activity of a monothiol glutaredoxin, or if the activity of the polypeptide At4g15660, preferably represented by SEQ ID NO. 23483, or a homolog or fragment thereof, or if the activity of a polypeptide encoded by a nucleic acid molecule comprising the nucleic acid SEQ ID NO. 23482, preferably the coding region thereof, or a homolog or fragment thereof, e.g. derived from Arabidopsis thaliana, is increased or generated. For example the activity of a nucleic acid molecule or a polypeptide comprising the nucleic acid, preferably the coding region thereof, or polypeptide or the consensus sequence or the polypeptide motif, as depicted in Table I, II or IV, application No. 19, column 5 or 8 in the respective same line as the nucleic acid molecule SEQ ID NO. 23482 or polypeptide SEQ ID NO. 23483, respectively, or a homolog or a fragment thereof, is increased or generated, or if the activity monothiol glutaredoxin is increased or generated in a non-human organism, like a microorganism or a plant cell, plant or part thereof, especially with non-targeted localization, whereby the respective line disclose in column 7 the fine chemical glycerol (lipid fraction). For example, an increase of the glycerol (lipid fraction) of at least 1 percent, particularly in a range of 16 to 85-percent is conferred as compared to a corresponding non-transformed wild type non-human organism.

[98909] Accordingly, in one embodiment, an increase of triacylglycerol in a non-human organism, as compared to a corresponding non-transformed wild type non-human organism, is conferred in the process of the invention, if the activity of a polypeptide showing the activity of a monothiol glutaredoxin, or if the activity of the polypeptide At4g15660, preferably represented by SEQ ID NO. 23483, or a homolog or fragment thereof, or if the activity of a polypeptide encoded by a nucleic acid molecule comprising the nucleic acid SEQ ID NO. 23482, preferably the coding region thereof, or a homolog or fragment thereof, e.g. derived from Arabidopsis thaliana, is increased or generated. For example the activity of a nucleic acid molecule or a polypeptide comprising the nucleic acid, preferably the coding region thereof, or polypeptide or the consensus sequence or the polypeptide motif, as depicted in Table I, II or IV, application No. 19, column 5 or 8 in the respective same line as the nucleic acid molecule SEQ ID NO. 23482 or polypeptide SEQ ID NO. 23483, respectively, or a homolog or a fragment thereof, is increased or generated, or if the activity monothiol glutaredoxin is increased or generated in a non-human organism, like a microorganism or a plant cell, plant or part thereof, especially with non-targeted localization, whereby the respective line disclose in column 7 the fine chemical triacylglycerol. For example, an increase of the triacylglycerol of at least 1 percent, particularly in a range of 33 to 158-percent is conferred as compared to a corresponding non-transformed wild type non-human organism.

[98910] Accordingly, in one embodiment, an increase of glycerol (lipid fraction) in a non-human organism, as compared to a corresponding non-transformed wild type non-human organism, is conferred in the process of the invention, if the activity of a polypeptide showing the activity of a monothiol glutaredoxin, or if the activity of the polypeptide At4g15670, preferably represented by SEQ ID NO. 3280, or a homolog or fragment thereof, or if the activity of a polypeptide encoded by a nucleic acid molecule comprising the nucleic acid SEQ ID NO. 3279, preferably the coding region thereof, or a homolog or fragment thereof, e.g. derived from Arabidopsis thaliana, is increased or generated. For example the activity of a nucleic acid molecule or a polypeptide comprising the nucleic acid, preferably the coding region thereof, or polypeptide or the consensus sequence or the polypeptide motif, as depicted in Table I, II or IV, application No. 19, column 5 or 8 in the respective same line as the nucleic acid molecule SEQ ID NO. 3279 or polypeptide SEQ ID NO. 3280, respectively, or a homolog or a fragment thereof, is increased or generated, or if the activity monothiol glutaredoxin is increased or generated in a non-human organism, like a microorganism or a plant cell, plant or part thereof, especially with non-targeted localization, whereby the respective line disclose in column 7 the fine chemical glycerol (lipid fraction). For example, an increase of the glycerol (lipid fraction) of at least 1 percent, particularly in a range of 53 to 59-percent is conferred as compared to a corresponding non-transformed wild type non-human organism.

[98911] Accordingly, in one embodiment, an increase of triacylglycerol in a non-human organism, as compared to a corresponding non-transformed wild type non-human organism, is conferred in the process of the invention, if the activity of a polypeptide showing the activity of a monothiol glutaredoxin, or if the activity of the polypeptide At4g15670, preferably represented by SEQ ID NO. 3280, or a homolog or fragment thereof, or if the activity of a polypeptide encoded by a nucleic acid molecule comprising the nucleic acid SEQ ID NO. 3279, preferably the coding region thereof, or a homolog or fragment thereof, e.g. derived from Arabidopsis thaliana, is increased or generated. For example the activity of a nucleic acid molecule or a polypeptide comprising the nucleic acid, preferably the coding region thereof, or polypeptide or the consensus sequence or the polypeptide motif, as depicted in Table I, II or IV, application No. 19, column 5 or 8 in the respective same line as the nucleic acid molecule SEQ ID NO. 3279 or polypeptide SEQ ID NO. 3280, respectively, or a homolog or a fragment thereof, is increased or generated, or if the activity monothiol glutaredoxin is increased or generated in a non-human organism, like a microorganism or a plant cell, plant or part thereof, especially with non-targeted localization, whereby the respective line disclose in column 7 the fine chemical triacylglycerol. For example, an increase of the triacylglycerol of at least 1 percent, particularly in a range of 38 to 150-percent is conferred as compared to a corresponding non-transformed wild type non-human organism.

[98912] Accordingly, in one embodiment, an increase of glycerol phosphate (lipid fraction) in a non-human organism, as compared to a corresponding non-transformed wild type non-human organism, is conferred in the process of the invention, if the activity of a polypeptide showing the activity of a protein phosphatase, or if the activity of the polypeptide At4g26080, preferably represented by SEQ ID NO. 68850, or a homolog or fragment thereof, or if the activity of a polypeptide encoded by a nucleic acid molecule comprising the nucleic acid SEQ ID NO. 68849, preferably the coding region thereof, or a homolog or fragment thereof, e.g. derived from Arabidopsis thaliana, is increased or generated. For example the activity of a nucleic acid molecule or a polypeptide comprising the nucleic acid, preferably the coding region thereof, or polypeptide or the consensus sequence or the polypeptide motif, as depicted in Table I, II or IV, application No. 19, column 5 or 8 in the respective same line as the nucleic acid molecule SEQ ID NO. 68849 or polypeptide SEQ ID NO. 68850, respectively, or a homolog or a fragment thereof, is increased or generated, or if the activity protein phosphatase is increased or generated in a non-human organism, like a microorganism or a plant cell, plant or part thereof, especially with non-targeted localization, whereby the respective line disclose in column 7 the fine chemical glycerol phosphate (lipid fraction). For example, an increase of the glycerol phosphate (lipid fraction) of at least 1 percent, particularly in a range of 17 to 35-percent is conferred as compared to a corresponding non-transformed wild type non-human organism.

[98913] Accordingly, in one embodiment, an increase of bis-glyceryl phosphate (polar fraction) in a non-human organism, as compared to a corresponding non-transformed wild type non-human organism, is conferred in the process of the invention, if the activity of a polypeptide showing the activity of a cyclin D , or if the activity of the polypeptide At4g34160, preferably represented by SEQ ID NO. 24312, or a homolog or fragment thereof, or if the activity of a polypeptide encoded by a nucleic acid molecule comprising the nucleic acid SEQ ID NO. 24311, preferably the coding region thereof, or a homolog or fragment thereof, e.g. derived from Arabidopsis thaliana, is increased or generated. For example the activity of a nucleic acid molecule or a polypeptide comprising the nucleic acid, preferably the coding region thereof, or polypeptide or the consensus sequence or the polypeptide motif, as depicted in Table I, II or IV, application No. 19, column 5 or 8 in the respective same line as the nucleic acid molecule SEQ ID NO. 24311 or polypeptide SEQ ID NO. 24312, respectively, or a homolog or a fragment thereof, is increased or generated, or if the activity cyclin D is increased or generated in a non-human organism, like a microorganism or a plant cell, plant or part thereof, especially with non-targeted localization, whereby the respective line disclose in column 7 the fine chemical bis-glyceryl phosphate (polar fraction). For example, an increase of the bis-glyceryl phosphate (polar fraction) of at least 1 percent, particularly in a range of 50 to 76-percent is conferred as compared to a corresponding non-transformed wild type non-human organism.

[98914] Accordingly, in one embodiment, an increase of bis-glyceryl phosphate (polar fraction) in a non-human organism, as compared to a corresponding non-transformed wild type non-human organism, is conferred in the process of the invention, if the activity of a polypeptide showing the activity of a calcium-dependent protein kinase, or if the activity of the polypeptide At4g35310, preferably represented by SEQ ID NO. 4349, or a homolog or fragment thereof, or if the activity of a polypeptide encoded by a nucleic acid molecule comprising the nucleic acid SEQ ID NO. 4348, preferably the coding region thereof, or a homolog or fragment thereof, e.g. derived from Arabidopsis thaliana, is increased or generated. For example the activity of a nucleic acid molecule or a polypeptide comprising the nucleic acid, preferably the coding region thereof, or polypeptide or the consensus sequence or the polypeptide motif, as depicted in Table I, II or IV, application No. 19, column 5 or 8 in the respective same line as the nucleic acid molecule SEQ ID NO. 4348 or polypeptide SEQ ID NO. 4349, respectively, or a homolog or a fragment thereof, is increased or generated, or if the activity calcium-dependent protein kinase is increased or generated in a non-human organism, like a microorganism or a plant cell, plant or part thereof, especially with non-targeted localization, whereby the respective line disclose in column 7 the fine chemical bis-glyceryl phosphate (polar fraction). For example, an increase of the bis-glyceryl phosphate (polar fraction) of at least 1 percent, particularly in a range of 39 to 145-percent is conferred as compared to a corresponding non-transformed wild type non-human organism.

[98915] Accordingly, in one embodiment, an increase of glycerol (lipid fraction) in a non-human organism, as compared to a corresponding non-transformed wild type non-human organism, is conferred in the process of the invention, if the activity of a polypeptide showing the activity of a heat shock transcription factor, or if the activity of the polypeptide At5g03720, preferably represented by SEQ ID NO. 24439, or a homolog or fragment thereof, or if the activity of a polypeptide encoded by a nucleic acid molecule comprising the nucleic acid SEQ ID NO. 24438, preferably the coding region thereof, or a homolog or fragment thereof, e.g. derived from Arabidopsis thaliana, is increased or generated. For example the activity of a nucleic acid molecule or a polypeptide comprising the nucleic acid, preferably the coding region thereof, or polypeptide or the consensus sequence or the polypeptide motif, as depicted in Table I, II or IV, application No. 19, column 5 or 8 in the respective same line as the nucleic acid molecule SEQ ID NO. 24438 or polypeptide SEQ ID NO. 24439, respectively, or a homolog or a fragment thereof, is increased or generated, or if the activity heat shock transcription factor is increased or generated in a non-human organism, like a microorganism or a plant cell, plant or part thereof, especially with non-targeted localization, whereby the respective line disclose in column 7 the fine chemical glycerol (lipid fraction). For example, an increase of the glycerol (lipid fraction) of at least 1 percent, particularly in a range of 20 to 29-percent is conferred as compared to a corresponding non-transformed wild type non-human organism.

[98916] Accordingly, in one embodiment, an increase of triacylglycerol in a non-human organism, as compared to a corresponding non-transformed wild type non-human organism, is conferred in the process of the invention, if the activity of a polypeptide showing the activity of a heat shock transcription factor, or if the activity of the polypeptide At5g03720, preferably represented by SEQ ID NO. 24439, or a homolog or fragment thereof, or if the activity of a polypeptide encoded by a nucleic acid molecule comprising the nucleic acid SEQ ID NO. 24438, preferably the coding region thereof, or a homolog or fragment thereof, e.g. derived from Arabidopsis thaliana, is increased or generated. For example the activity of a nucleic acid molecule or a polypeptide comprising the nucleic acid, preferably the coding region thereof, or polypeptide or the consensus sequence or the polypeptide motif, as depicted in Table I, II or IV, application No. 19, column 5 or 8 in the respective same line as the nucleic acid molecule SEQ ID NO. 24438 or polypeptide SEQ ID NO. 24439, respectively, or a homolog or a fragment thereof, is increased or generated, or if the activity heat shock transcription factor is increased or generated in a non-human organism, like a microorganism or a plant cell, plant or part thereof, especially with non-targeted localization, whereby the respective line disclose in column 7 the fine chemical triacylglycerol. For example, an increase of the triacylglycerol of at least 1 percent, particularly in a range of 37 to 99-percent is conferred as compared to a corresponding non-transformed wild type non-human organism.

[98917] Accordingly, in one embodiment, an increase of glycerol (lipid fraction) in a non-human organism, as compared to a corresponding non-transformed wild type non-human organism, is conferred in the process of the invention, if the activity of a polypeptide showing the activity of a monothiol glutaredoxin, or if the activity of the polypeptide At5g18600, preferably represented by SEQ ID NO. 4905, or a homolog or fragment thereof, or if the activity of a polypeptide encoded by a nucleic acid molecule comprising the nucleic acid SEQ ID NO. 4904, preferably the coding region thereof, or a homolog or fragment thereof, e.g. derived from Arabidopsis thaliana, is increased or generated. For example the activity of a nucleic acid molecule or a polypeptide comprising the nucleic acid, preferably the coding region thereof, or polypeptide or the consensus sequence or the polypeptide motif, as depicted in Table I, II or IV, application No. 19, column 5 or 8 in the respective same line as the nucleic acid molecule SEQ ID NO. 4904 or polypeptide SEQ ID NO. 4905, respectively, or a homolog or a fragment thereof, is increased or generated, or if the activity monothiol glutaredoxin is increased or generated in a non-human organism, like a microorganism or a plant cell, plant or part thereof, especially with non-targeted localization, whereby the respective line disclose in column 7 the fine chemical glycerol (lipid fraction). For example, an increase of the glycerol (lipid fraction) of at least 1 percent, particularly in a range of 17 to 34-percent is conferred as compared to a corresponding non-transformed wild type non-human organism.

[98918] Accordingly, in one embodiment, an increase of glycerol phosphate (lipid fraction) in a non-human organism, as compared to a corresponding non-transformed wild type non-human organism, is conferred in the process of the invention, if the activity of a polypeptide showing the activity of a protein phosphatase, or if the activity of the polypeptide At5g57050, preferably represented by SEQ ID NO. 5319, or a homolog or fragment thereof, or if the activity of a polypeptide encoded by a nucleic acid molecule comprising the nucleic acid SEQ ID NO. 5318, preferably the coding region thereof, or a homolog or fragment thereof, e.g. derived from Arabidopsis thaliana, is increased or generated. For example the activity of a nucleic acid molecule or a polypeptide comprising the nucleic acid, preferably the coding region thereof, or polypeptide or the consensus sequence or the polypeptide motif, as depicted in Table I, II or IV, application No. 19, column 5 or 8 in the respective same line as the nucleic acid molecule SEQ ID NO. 5318 or polypeptide SEQ ID NO. 5319, respectively, or a homolog or a fragment thereof, is increased or generated, or if the activity protein phosphatase is increased or generated in a non-human organism, like a microorganism or a plant cell, plant or part thereof, especially with non-targeted localization, whereby the respective line disclose in column 7 the fine chemical glycerol phosphate (lipid fraction). For example, an increase of the glycerol phosphate (lipid fraction) of at least 1 percent, particularly in a range of 19 to 35-percent is conferred as compared to a corresponding non-transformed wild type non-human organism.

[98919] Accordingly, in one embodiment, an increase of glycerol phosphate (lipid fraction) in a non-human organism, as compared to a corresponding non-transformed wild type non-human organism, is conferred in the process of the invention, if the activity of a polypeptide showing the activity of a protein phosphatase, or if the activity of the polypeptide At5g59220, preferably represented by SEQ ID NO. 25499, or a homolog or fragment thereof, or if the activity of a polypeptide encoded by a nucleic acid molecule comprising the nucleic acid SEQ ID NO. 25498, preferably the coding region thereof, or a homolog or fragment thereof, e.g. derived from Arabidopsis thaliana, is increased or generated. For example the activity of a nucleic acid molecule or a polypeptide comprising the nucleic acid, preferably the coding region thereof, or polypeptide or the consensus sequence or the polypeptide motif, as depicted in Table I, II or IV, application No. 19, column 5 or 8 in the respective same line as the nucleic acid molecule SEQ ID NO. 25498 or polypeptide SEQ ID NO. 25499, respectively, or a homolog or a fragment thereof, is increased or generated, or if the activity protein phosphatase is increased or generated in a non-human organism, like a microorganism or a plant cell, plant or part thereof, especially with non-targeted localization, whereby the respective line disclose in column 7 the fine chemical glycerol phosphate (lipid fraction). For example, an increase of the glycerol phosphate (lipid fraction) of at least 1 percent, particularly in a range of 18 to 39-percent is conferred as compared to a corresponding non-transformed wild type non-human organism.

[98920] Accordingly, in one embodiment, an increase of glycerol phosphate (lipid fraction) in a non-human organism, as compared to a corresponding non-transformed wild type non-human organism, is conferred in the process of the invention, if the activity of a polypeptide showing the activity of a pyruvate kinase, or if the activity of the polypeptide At5g63680, preferably represented by SEQ ID NO. 70039, or a homolog or fragment thereof, or if the activity of a polypeptide encoded by a nucleic acid molecule comprising the nucleic acid SEQ ID NO. 70038, preferably the coding region thereof, or a homolog or fragment thereof, e.g. derived from Arabidopsis thaliana, is increased or generated. For example the activity of a nucleic acid molecule or a polypeptide comprising the nucleic acid, preferably the coding region thereof, or polypeptide or the consensus sequence or the polypeptide motif, as depicted in Table I, II or IV, application No. 19, column 5 or 8 in the respective same line as the nucleic acid molecule SEQ ID NO. 70038 or polypeptide SEQ ID NO. 70039, respectively, or a homolog or a fragment thereof, is increased or generated, or if the activity pyruvate kinase is increased or generated in a non-human organism, like a microorganism or a plant cell, plant or part thereof, especially with plastidic localization, whereby the respective line disclose in column 7 the fine chemical glycerol phosphate (lipid fraction). For example, an increase of the glycerol phosphate (lipid fraction) of at least 1 percent, particularly in a range of 19 to 47-percent is conferred as compared to a corresponding non-transformed wild type non-human organism.

[98921] Accordingly, in one embodiment, an increase of triacylglycerol in a non-human organism, as compared to a corresponding non-transformed wild type non-human organism, is conferred in the process of the invention, if the activity of a polypeptide showing the activity of a Glycine cleavage system T aminomethyltransferase, or if the activity of the polypeptide AVINDRAFT_{—}0539, preferably represented by SEQ ID NO. 70716, or a homolog or fragment thereof, or if the activity of a polypeptide encoded by a nucleic acid molecule comprising the nucleic acid SEQ ID NO. 70715, preferably the coding region thereof, or a homolog or fragment thereof, e.g. derived from Azotobacter vinelandii, is increased or generated. For example the activity of a nucleic acid molecule or a polypeptide comprising the nucleic acid, preferably the coding region thereof, or polypeptide or the consensus sequence or the polypeptide motif, as depicted in Table I, II or IV, application No. 19, column 5 or 8 in the respective same line as the nucleic acid molecule SEQ ID NO. 70715 or polypeptide SEQ ID NO. 70716, respectively, or a homolog or a fragment thereof, is increased or generated, or if the activity Glycine cleavage system T aminomethyltransferase is increased or generated in a non-human organism, like a microorganism or a plant cell, plant or part thereof, especially with non-targeted localization, whereby the respective line disclose in column 7 the fine chemical triacylglycerol. For example, an increase of the triacylglycerol of at least 1 percent, particularly in a range of 35 to 52-percent is conferred as compared to a corresponding non-transformed wild type non-human organism.

[98922] Accordingly, in one embodiment, an increase of glycerol phosphate (lipid fraction) in a non-human organism, as compared to a corresponding non-transformed wild type non-human organism, is conferred in the process of the invention, if the activity of a polypeptide showing the activity of a sec-independent protein translocase, or if the activity of the polypeptide AvinDRAFT_{—}1624, preferably represented by SEQ ID NO. 26197, or a homolog or fragment thereof, or if the activity of a polypeptide encoded by a nucleic acid molecule comprising the nucleic acid SEQ ID NO. 26196, preferably the coding region thereof, or a homolog or fragment thereof, e.g. derived from Azotobacter vinelandii, is increased or generated. For example the activity of a nucleic acid molecule or a polypeptide comprising the nucleic acid, preferably the coding region thereof, or polypeptide or the consensus sequence or the polypeptide motif, as depicted in Table I, II or IV, application No. 19, column 5 or 8 in the respective same line as the nucleic acid molecule SEQ ID NO. 26196 or polypeptide SEQ ID NO. 26197, respectively, or a homolog or a fragment thereof, is increased or generated, or if the activity sec-independent protein translocase is increased or generated in a non-human organism, like a microorganism or a plant cell, plant or part thereof, especially with non-targeted localization, whereby the respective line disclose in column 7 the fine chemical glycerol phosphate (lipid fraction). For example, an increase of the glycerol phosphate (lipid fraction) of at least 1 percent, particularly in a range of 19 to 29-percent is conferred as compared to a corresponding non-transformed wild type non-human organism.

[98923] Accordingly, in one embodiment, an increase of glycerol (lipid fraction) in a non-human organism, as compared to a corresponding non-transformed wild type non-human organism, is conferred in the process of the invention, if the activity of a polypeptide showing the activity of a oxidoreductase, or if the activity of the polypeptide AvinDRAFT_{—}1788, preferably represented by SEQ ID NO. 114084, or a homolog or fragment thereof, or if the activity of a polypeptide encoded by a nucleic acid molecule comprising the nucleic acid SEQ ID NO. 114083, preferably the coding region thereof, or a homolog or fragment thereof, e.g. derived from Azotobacter vinelandii, is increased or generated. For example the activity of a nucleic acid molecule or a polypeptide comprising the nucleic acid, preferably the coding region thereof, or polypeptide or the consensus sequence or the polypeptide motif, as depicted in Table I, II or IV, application No. 19, column 5 or 8 in the respective same line as the nucleic acid molecule SEQ ID NO. 114083 or polypeptide SEQ ID NO. 114084, respectively, or a homolog or a fragment thereof, is increased or generated, or if the activity oxidoreductase is increased or generated in a non-human organism, like a microorganism or a plant cell, plant or part thereof, especially with non-targeted localization, whereby the respective line disclose in column 7 the fine chemical glycerol (lipid fraction). For example, an increase of the glycerol (lipid fraction) of at least 1 percent, particularly in a range of 19 to 29-percent is conferred as compared to a corresponding non-transformed wild type non-human organism.

[98924] Accordingly, in one embodiment, an increase of bis-glyceryl phosphate (polar fraction) in a non-human organism, as compared to a corresponding non-transformed wild type non-human organism, is conferred in the process of the invention, if the activity of a polypeptide showing the activity of a transcriptional regulator protein, or if the activity of the polypeptide AvinDRAFT_{—}2010, preferably represented by SEQ ID NO. 114199, or a homolog or fragment thereof, or if the activity of a polypeptide encoded by a nucleic acid molecule comprising the nucleic acid SEQ ID NO. 114198, preferably the coding region thereof, or a homolog or fragment thereof, e.g. derived from Azotobacter vinelandii, is increased or generated. For example the activity of a nucleic acid molecule or a polypeptide comprising the nucleic acid, preferably the coding region thereof, or polypeptide or the consensus sequence or the polypeptide motif, as depicted in Table I, II or IV, application No. 19, column 5 or 8 in the respective same line as the nucleic acid molecule SEQ ID NO. 114198 or polypeptide SEQ ID NO. 114199, respectively, or a homolog or a fragment thereof, is increased or generated, or if the activity transcriptional regulator protein is increased or generated in a non-human organism, like a microorganism or a plant cell, plant or part thereof, especially with non-targeted localization, whereby the respective line disclose in column 7 the fine chemical bis-glyceryl phosphate (polar fraction). For example, an increase of the bis-glyceryl phosphate (polar fraction) of at least 1 percent, particularly in a range of 38 to 64-percent is conferred as compared to a corresponding non-transformed wild type non-human organism.

[98925] Accordingly, in one embodiment, an increase of bis-glyceryl phosphate (polar fraction) in a non-human organism, as compared to a corresponding non-transformed wild type non-human organism, is conferred in the process of the invention, if the activity of a polypeptide showing the activity of a beta-hydroxylase, or if the activity of the polypeptide AvinDRAFT_{—}2091, preferably represented by SEQ ID NO. 6041, or a homolog or fragment thereof, or if the activity of a polypeptide encoded by a nucleic acid molecule comprising the nucleic acid SEQ ID NO. 6040, preferably the coding region thereof, or a homolog or fragment thereof, e.g. derived from Azotobacter vinelandii, is increased or generated. For example the activity of a nucleic acid molecule or a polypeptide comprising the nucleic acid, preferably the coding region thereof, or polypeptide or the consensus sequence or the polypeptide motif, as depicted in Table I, II or IV, application No. 19, column 5 or 8 in the respective same line as the nucleic acid molecule SEQ ID NO. 6040 or polypeptide SEQ ID NO. 6041, respectively, or a homolog or a fragment thereof, is increased or generated, or if the activity beta-hydroxylase is increased or generated in a non-human organism, like a microorganism or a plant cell, plant or part thereof, especially with non-targeted localization, whereby the respective line disclose in column 7 the fine chemical bis-glyceryl phosphate (polar fraction). For example, an increase of the bis-glyceryl phosphate (polar fraction) of at least 1 percent, particularly in a range of 39 to 71-percent is conferred as compared to a corresponding non-transformed wild type non-human organism.

[98926] Accordingly, in one embodiment, an increase of triacylglycerol in a non-human organism, as compared to a corresponding non-transformed wild type non-human organism, is conferred in the process of the invention, if the activity of a polypeptide showing the activity of a beta-hydroxylase, or if the activity of the polypeptide AvinDRAFT_{—}2091, preferably represented by SEQ ID NO. 6041, or a homolog or fragment thereof, or if the activity of a polypeptide encoded by a nucleic acid molecule comprising the nucleic acid SEQ ID NO. 6040, preferably the coding region thereof, or a homolog or fragment thereof, e.g. derived from Azotobacter vinelandii, is increased or generated. For example the activity of a nucleic acid molecule or a polypeptide comprising the nucleic acid, preferably the coding region thereof, or polypeptide or the consensus sequence or the polypeptide motif, as depicted in Table I, II or IV, application No. 19, column 5 or 8 in the respective same line as the nucleic acid molecule SEQ ID NO. 6040 or polypeptide SEQ ID NO. 6041, respectively, or a homolog or a fragment thereof, is increased or generated, or if the activity beta-hydroxylase is increased or generated in a non-human organism, like a microorganism or a plant cell, plant or part thereof, especially with non-targeted localization, whereby the respective line disclose in column 7 the fine chemical triacylglycerol. For example, an increase of the triacylglycerol of at least 1 percent, particularly in a range of 31 to 40-percent is conferred as compared to a corresponding non-transformed wild type non-human organism.

[98927] Accordingly, in one embodiment, an increase of bis-glyceryl phosphate (polar fraction) in a non-human organism, as compared to a corresponding non-transformed wild type non-human organism, is conferred in the process of the invention, if the activity of a polypeptide showing the activity of a oxidoreductase, or if the activity of the polypeptide AvinDRAFT_{—}3253, preferably represented by SEQ ID NO. 29501, or a homolog or fragment thereof, or if the activity of a polypeptide encoded by a nucleic acid molecule comprising the nucleic acid SEQ ID NO. 29500, preferably the coding region thereof, or a homolog or fragment thereof, e.g. derived from Azotobacter vinelandii, is increased or generated. For example the activity of a nucleic acid molecule or a polypeptide comprising the nucleic acid, preferably the coding region thereof, or polypeptide or the consensus sequence or the polypeptide motif, as depicted in Table I, II or IV, application No. 19, column 5 or 8 in the respective same line as the nucleic acid molecule SEQ ID NO. 29500 or polypeptide SEQ ID NO. 29501, respectively, or a homolog or a fragment thereof, is increased or generated, or if the activity oxidoreductase is increased or generated in a non-human organism, like a microorganism or a plant cell, plant or part thereof, especially with non-targeted localization, whereby the respective line disclose in column 7 the fine chemical bis-glyceryl phosphate (polar fraction). For example, an increase of the bis-glyceryl phosphate (polar fraction) of at least 1 percent, particularly in a range of 38 to 80-percent is conferred as compared to a corresponding non-transformed wild type non-human organism.

[98928] Accordingly, in one embodiment, an increase of glycerol phosphate (lipid fraction) in a non-human organism, as compared to a corresponding non-transformed wild type non-human organism, is conferred in the process of the invention, if the activity of a polypeptide showing the activity of a ThiF family protein, or if the activity of the polypeptide AvinDRAFT_{—}3577, preferably represented by SEQ ID NO. 111156, or a homolog or fragment thereof, or if the activity of a polypeptide encoded by a nucleic acid molecule comprising the nucleic acid SEQ ID NO. 111155, preferably the coding region thereof, or a homolog or fragment thereof, e.g. derived from Azotobacter vinelandii, is increased or generated. For example the activity of a nucleic acid molecule or a polypeptide comprising the nucleic acid, preferably the coding region thereof, or polypeptide or the consensus sequence or the polypeptide motif, as depicted in Table I, II or IV, application No. 19, column 5 or 8 in the respective same line as the nucleic acid molecule SEQ ID NO. 111155 or polypeptide SEQ ID NO. 111156, respectively, or a homolog or a fragment thereof, is increased or generated, or if the activity ThiF family protein is increased or generated in a non-human organism, like a microorganism or a plant cell, plant or part thereof, especially with non-targeted localization, whereby the respective line disclose in column 7 the fine chemical glycerol phosphate (lipid fraction). For example, an increase of the glycerol phosphate (lipid fraction) of at least 1 percent, particularly in a range of 17 to 56-percent is conferred as compared to a corresponding non-transformed wild type non-human organism.

[98929] Accordingly, in one embodiment, an increase of glycerol (lipid fraction) in a non-human organism, as compared to a corresponding non-transformed wild type non-human organism, is conferred in the process of the invention, if the activity of a polypeptide showing the activity of a recombinase A, or if the activity of the polypeptide AvinDRAFT_{—}3629, preferably represented by SEQ ID NO. 114232, or a homolog or fragment thereof, or if the activity of a polypeptide encoded by a nucleic acid molecule comprising the nucleic acid SEQ ID NO. 114231, preferably the coding region thereof, or a homolog or fragment thereof, e.g. derived from Azotobacter vinelandii, is increased or generated. For example the activity of a nucleic acid molecule or a polypeptide comprising the nucleic acid, preferably the coding region thereof, or polypeptide or the consensus sequence or the polypeptide motif, as depicted in Table I, II or IV, application No. 19, column 5 or 8 in the respective same line as the nucleic acid molecule SEQ ID NO. 114231 or polypeptide SEQ ID NO. 114232, respectively, or a homolog or a fragment thereof, is increased or generated, or if the activity recombinase A is increased or generated in a non-human organism, like a microorganism or a plant cell, plant or part thereof, especially with non-targeted localization, whereby the respective line disclose in column 7 the fine chemical glycerol (lipid fraction). For example, an increase of the glycerol (lipid fraction) of at least 1 percent, particularly in a range of 34 to 60-percent is conferred as compared to a corresponding non-transformed wild type non-human organism.

[98930] Accordingly, in one embodiment, an increase of bis-glyceryl phosphate (polar fraction) in a non-human organism, as compared to a corresponding non-transformed wild type non-human organism, is conferred in the process of the invention, if the activity of a polypeptide showing the activity of a NADH-quinone oxidoreductase subunit, or if the activity of the polypeptide AvinDRAFT_{—}4606, preferably represented by SEQ ID NO. 73720, or a homolog or fragment thereof, or if the activity of a polypeptide encoded by a nucleic acid molecule comprising the nucleic acid SEQ ID NO. 73719, preferably the coding region thereof, or a homolog or fragment thereof, e.g. derived from Azotobacter vinelandii, is increased or generated. For example the activity of a nucleic acid molecule or a polypeptide comprising the nucleic acid, preferably the coding region thereof, or polypeptide or the consensus sequence or the polypeptide motif, as depicted in Table I, II or IV, application No. 19, column 5 or 8 in the respective same line as the nucleic acid molecule SEQ ID NO. 73719 or polypeptide SEQ ID NO. 73720, respectively, or a homolog or a fragment thereof, is increased or generated, or if the activity NADH-quinone oxidoreductase subunit is increased or generated in a non-human organism, like a microorganism or a plant cell, plant or part thereof, especially with non-targeted localization, whereby the respective line disclose in column 7 the fine chemical bis-glyceryl phosphate (polar fraction). For example, an increase of the bis-glyceryl phosphate (polar fraction) of at least 1 percent, particularly in a range of 39 to 53-percent is conferred as compared to a corresponding non-transformed wild type non-human organism.

[98931] Accordingly, in one embodiment, an increase of triacylglycerol in a non-human organism, as compared to a corresponding non-transformed wild type non-human organism, is conferred in the process of the invention, if the activity of a polypeptide showing the activity of a hydrolase, or if the activity of the polypeptide AvinDRAFT_{—}5103, preferably represented by SEQ ID NO. 6511, or a homolog or fragment thereof, or if the activity of a polypeptide encoded by a nucleic acid molecule comprising the nucleic acid SEQ ID NO. 6510, preferably the coding region thereof, or a homolog or fragment thereof, e.g. derived from Azotobacter vinelandii, is increased or generated. For example the activity of a nucleic acid molecule or a polypeptide comprising the nucleic acid, preferably the coding region thereof, or polypeptide or the consensus sequence or the polypeptide motif, as depicted in Table I, II or IV, application No. 19, column 5 or 8 in the respective same line as the nucleic acid molecule SEQ ID NO. 6510 or polypeptide SEQ ID NO. 6511, respectively, or a homolog or a fragment thereof, is increased or generated, or if the activity hydrolase is increased or generated in a non-human organism, like a microorganism or a plant cell, plant or part thereof, especially with non-targeted localization, whereby the respective line disclose in column 7 the fine chemical triacylglycerol. For example, an increase of the triacylglycerol of at least 1 percent, particularly in a range of 57 to 69-percent is conferred as compared to a corresponding non-transformed wild type non-human organism.

[98932] Accordingly, in one embodiment, an increase of glycerol phosphate (lipid fraction) in a non-human organism, as compared to a corresponding non-transformed wild type non-human organism, is conferred in the process of the invention, if the activity of a polypeptide showing the activity of a HesB/YadR/YfhF family protein, or if the activity of the polypeptide AvinDRAFT_{—}5467, preferably represented by SEQ ID NO. 32649, or a homolog or fragment thereof, or if the activity of a polypeptide encoded by a nucleic acid molecule comprising the nucleic acid SEQ ID NO. 32648, preferably the coding region thereof, or a homolog or fragment thereof, e.g. derived from Azotobacter vinelandii, is increased or generated. For example the activity of a nucleic acid molecule or a polypeptide comprising the nucleic acid, preferably the coding region thereof, or polypeptide or the consensus sequence or the polypeptide motif, as depicted in Table I, II or IV, application No. 19, column 5 or 8 in the respective same line as the nucleic acid molecule SEQ ID NO. 32648 or polypeptide SEQ ID NO. 32649, respectively, or a homolog or a fragment thereof, is increased or generated, or if the activity HesB/YadR/YfhF family protein is increased or generated in a non-human organism, like a microorganism or a plant cell, plant or part thereof, especially with non-targeted localization, whereby the respective line disclose in column 7 the fine chemical glycerol phosphate (lipid fraction). For example, an increase of the glycerol phosphate (lipid fraction) of at least 1 percent, particularly in a range of 19 to 65-percent is conferred as compared to a corresponding non-transformed wild type non-human organism.

[98933] Accordingly, in one embodiment, an increase of bis-glyceryl phosphate (polar fraction) in a non-human organism, as compared to a corresponding non-transformed wild type non-human organism, is conferred in the process of the invention, if the activity of a polypeptide showing the activity of a pyruvate kinase, or if the activity of the polypeptide AY623894, preferably represented by SEQ ID NO. 103434, or a homolog or fragment thereof, or if the activity of a polypeptide encoded by a nucleic acid molecule comprising the nucleic acid SEQ ID NO. 103433, preferably the coding region thereof, or a homolog or fragment thereof, e.g. derived from Zea mays, is increased or generated. For example the activity of a nucleic acid molecule or a polypeptide comprising the nucleic acid, preferably the coding region thereof, or polypeptide or the consensus sequence or the polypeptide motif, as depicted in Table I, II or IV, application No. 19, column 5 or 8 in the respective same line as the nucleic acid molecule SEQ ID NO. 103433 or polypeptide SEQ ID NO. 103434, respectively, or a homolog or a fragment thereof, is increased or generated, or if the activity pyruvate kinase is increased or generated in a non-human organism, like a microorganism or a plant cell, plant or part thereof, especially with non-targeted localization, whereby the respective line disclose in column 7 the fine chemical bis-glyceryl phosphate (polar fraction). For example, an increase of the bis-glyceryl phosphate (polar fraction) of at least 1 percent, particularly in a range of 37 to 93-percent is conferred as compared to a corresponding non-transformed wild type non-human organism.

[98934] Accordingly, in one embodiment, an increase of triacylglycerol in a non-human organism, as compared to a corresponding non-transformed wild type non-human organism, is conferred in the process of the invention, if the activity of a polypeptide showing the activity of a threonine synthase, or if the activity of the polypeptide B0004, preferably represented by SEQ ID NO. 34890, or a homolog or fragment thereof, or if the activity of a polypeptide encoded by a nucleic acid molecule comprising the nucleic acid SEQ ID NO. 34889, preferably the coding region thereof, or a homolog or fragment thereof, e.g. derived from Escherichia coli, is increased or generated. For example the activity of a nucleic acid molecule or a polypeptide comprising the nucleic acid, preferably the coding region thereof, or polypeptide or the consensus sequence or the polypeptide motif, as depicted in Table I, II or IV, application No. 19, column 5 or 8 in the respective same line as the nucleic acid molecule SEQ ID NO. 34889 or polypeptide SEQ ID NO. 34890, respectively, or a homolog or a fragment thereof, is increased or generated, or if the activity threonine synthase is increased or generated in a non-human organism, like a microorganism or a plant cell, plant or part thereof, especially with plastidic localization, whereby the respective line disclose in column 7 the fine chemical triacylglycerol. For example, an increase of the triacylglycerol of at least 1 percent, particularly in a range of 56 to 127-percent is conferred as compared to a corresponding non-transformed wild type non-human organism.

[98935] Accordingly, in one embodiment, an increase of glycerol phosphate (lipid fraction) in a non-human organism, as compared to a corresponding non-transformed wild type non-human organism, is conferred in the process of the invention, if the activity of a polypeptide showing the activity of a b0050-protein, or if the activity of the polypeptide B0050, preferably represented by SEQ ID NO. 103959, or a homolog or fragment thereof, or if the activity of a polypeptide encoded by a nucleic acid molecule comprising the nucleic acid SEQ ID NO. 103958, preferably the coding region thereof, or a homolog or fragment thereof, e.g. derived from Escherichia coli, is increased or generated. For example the activity of a nucleic acid molecule or a polypeptide comprising the nucleic acid, preferably the coding region thereof, or polypeptide or the consensus sequence or the polypeptide motif, as depicted in Table I, II or IV, application No. 19, column 5 or 8 in the respective same line as the nucleic acid molecule SEQ ID NO. 103958 or polypeptide SEQ ID NO. 103959, respectively, or a homolog or a fragment thereof, is increased or generated, or if the activity b0050-protein is increased or generated in a non-human organism, like a microorganism or a plant cell, plant or part thereof, especially with non-targeted localization, whereby the respective line disclose in column 7 the fine chemical glycerol phosphate (lipid fraction). For example, an increase of the glycerol phosphate (lipid fraction) of at least 1 percent, particularly in a range of 18 to 39-percent is conferred as compared to a corresponding non-transformed wild type non-human organism.

[98936] Accordingly, in one embodiment, an increase of bis-glyceryl phosphate (polar fraction) in a non-human organism, as compared to a corresponding non-transformed wild type non-human organism, is conferred in the process of the invention, if the activity of a polypeptide showing the activity of a serine protease, or if the activity of the polypeptide B0161, preferably represented by SEQ ID NO. 7082, or a homolog or fragment thereof, or if the activity of a polypeptide encoded by a nucleic acid molecule comprising the nucleic acid SEQ ID NO. 7081, preferably the coding region thereof, or a homolog or fragment thereof, e.g. derived from Escherichia coli, is increased or generated. For example the activity of a nucleic acid molecule or a polypeptide comprising the nucleic acid, preferably the coding region thereof, or polypeptide or the consensus sequence or the polypeptide motif, as depicted in Table I, II or IV, application No. 19, column 5 or 8 in the respective same line as the nucleic acid molecule SEQ ID NO. 7081 or polypeptide SEQ ID NO. 7082, respectively, or a homolog or a fragment thereof, is increased or generated, or if the activity serine protease is increased or generated in a non-human organism, like a microorganism or a plant cell, plant or part thereof, especially with non-targeted localization, whereby the respective line disclose in column 7 the fine chemical bis-glyceryl phosphate (polar fraction). For example, an increase of the bis-glyceryl phosphate (polar fraction) of at least 1 percent, particularly in a range of 38 to 78-percent is conferred as compared to a corresponding non-transformed wild type non-human organism.

[98937] Accordingly, in one embodiment, an increase of triacylglycerol in a non-human organism, as compared to a corresponding non-transformed wild type non-human organism, is conferred in the process of the invention, if the activity of a polypeptide showing the activity of a serine protease, or if the activity of the polypeptide B0161, preferably represented by SEQ ID NO. 7082, or a homolog or fragment thereof, or if the activity of a polypeptide encoded by a nucleic acid molecule comprising the nucleic acid SEQ ID NO. 7081, preferably the coding region thereof, or a homolog or fragment thereof, e.g. derived from Escherichia coli, is increased or generated.

[98938] For example the activity of a nucleic acid molecule or a polypeptide comprising the nucleic acid, preferably the coding region thereof, or polypeptide or the consensus sequence or the polypeptide motif, as depicted in Table I, II or IV, application No. 19, column 5 or 8 in the respective same line as the nucleic acid molecule SEQ ID NO. 7081 or polypeptide SEQ ID NO. 7082, respectively, or a homolog or a fragment thereof, is increased or generated, or if the activity serine protease is increased or generated in a non-human organism, like a microorganism or a plant cell, plant or part thereof, especially with non-targeted localization, whereby the respective line disclose in column 7 the fine chemical triacylglycerol. For example, an increase of the triacylglycerol of at least 1 percent, particularly in a range of 47 to 112-percent is conferred as compared to a corresponding non-transformed wild type non-human organism.

[98939] Accordingly, in one embodiment, an increase of bis-glyceryl phosphate (polar fraction) in a non-human organism, as compared to a corresponding non-transformed wild type non-human organism, is conferred in the process of the invention, if the activity of a polypeptide showing the activity of a ATP-binding component of a transport system, or if the activity of the polypeptide B0449, preferably represented by SEQ ID NO. 7334, or a homolog or fragment thereof, or if the activity of a polypeptide encoded by a nucleic acid molecule comprising the nucleic acid SEQ ID NO. 7333, preferably the coding region thereof, or a homolog or fragment thereof, e.g. derived from Escherichia coli, is increased or generated. For example the activity of a nucleic acid molecule or a polypeptide comprising the nucleic acid, preferably the coding region thereof, or polypeptide or the consensus sequence or the polypeptide motif, as depicted in Table I, II or IV, application No. 19, column 5 or 8 in the respective same line as the nucleic acid molecule SEQ ID NO. 7333 or polypeptide SEQ ID NO. 7334, respectively, or a homolog or a fragment thereof, is increased or generated, or if the activity ATP-binding component of a transport system is increased or generated in a non-human organism, like a microorganism or a plant cell, plant or part thereof, especially with non-targeted localization, whereby the respective line disclose in column 7 the fine chemical bis-glyceryl phosphate (polar fraction). For example, an increase of the bis-glyceryl phosphate (polar fraction) of at least 1 percent, particularly in a range of 48 to 187-percent is conferred as compared to a corresponding non-transformed wild type non-human organism.

[98940] Accordingly, in one embodiment, an increase of glycerol (lipid fraction) in a non-human organism, as compared to a corresponding non-transformed wild type non-human organism, is conferred in the process of the invention, if the activity of a polypeptide showing the activity of a b0518-protein, or if the activity of the polypeptide B0518, preferably represented by SEQ ID NO. 35937, or a homolog or fragment thereof, or if the activity of a polypeptide encoded by a nucleic acid molecule comprising the nucleic acid SEQ ID NO. 35936, preferably the coding region thereof, or a homolog or fragment thereof, e.g. derived from Escherichia coli, is increased or generated. For example the activity of a nucleic acid molecule or a polypeptide comprising the nucleic acid, preferably the coding region thereof, or polypeptide or the consensus sequence or the polypeptide motif, as depicted in Table I, II or IV, application No. 19, column 5 or 8 in the respective same line as the nucleic acid molecule SEQ ID NO. 35936 or polypeptide SEQ ID NO. 35937, respectively, or a homolog or a fragment thereof, is increased or generated, or if the activity b0518-protein is increased or generated in a non-human organism, like a microorganism or a plant cell, plant or part thereof, especially with non-targeted localization, whereby the respective line disclose in column 7 the fine chemical glycerol (lipid fraction). For example, an increase of the glycerol (lipid fraction) of at least 1 percent, particularly in a range of 25 to 54-percent is conferred as compared to a corresponding non-transformed wild type non-human organism.

[98941] Accordingly, in one embodiment, an increase of bis-glyceryl phosphate (polar fraction) in a non-human organism, as compared to a corresponding non-transformed wild type non-human organism, is conferred in the process of the invention, if the activity of a polypeptide showing the activity of a phosphoglyceromutase, or if the activity of the polypeptide B0755, preferably represented by SEQ ID NO. 152577, or a homolog or fragment thereof, or if the activity of a polypeptide encoded by a nucleic acid molecule comprising the nucleic acid SEQ ID NO. 152576, preferably the coding region thereof, or a homolog or fragment thereof, e.g. derived from Escherichia coli, is increased or generated. For example the activity of a nucleic acid molecule or a polypeptide comprising the nucleic acid, preferably the coding region thereof, or polypeptide or the consensus sequence or the polypeptide motif, as depicted in Table I, II or IV, application No. 19, column 5 or 8 in the respective same line as the nucleic acid molecule SEQ ID NO. 152576 or polypeptide SEQ ID NO. 152577, respectively, or a homolog or a fragment thereof, is increased or generated, or if the activity phosphoglyceromutase is increased or generated in a non-human organism, like a microorganism or a plant cell, plant or part thereof, especially with plastidic localization, whereby the respective line disclose in column 7 the fine chemical bis-glyceryl phosphate (polar fraction). For example, an increase of the bis-glyceryl phosphate (polar fraction) of at least 1 percent, particularly in a range of 51 to 83-percent is conferred as compared to a corresponding non-transformed wild type non-human organism.

[98942] Accordingly, in one embodiment, an increase of glycerol (polar fraction) in a non-human organism, as compared to a corresponding non-transformed wild type non-human organism, is conferred in the process of the invention, if the activity of a polypeptide showing the activity of a putrescine transport system permease protein, or if the activity of the polypeptide B0856, preferably represented by SEQ ID NO. 131360, or a homolog or fragment thereof, or if the activity of a polypeptide encoded by a nucleic acid molecule comprising the nucleic acid SEQ ID NO. 131359, preferably the coding region thereof, or a homolog or fragment thereof, e.g. derived from Escherichia coli, is increased or generated. For example the activity of a nucleic acid molecule or a polypeptide comprising the nucleic acid, preferably the coding region thereof, or polypeptide or the consensus sequence or the polypeptide motif, as depicted in Table I, II or IV, application No. 19, column 5 or 8 in the respective same line as the nucleic acid molecule SEQ ID NO. 131359 or polypeptide SEQ ID NO. 131360, respectively, or a homolog or a fragment thereof, is increased or generated, or if the activity putrescine transport system permease protein is increased or generated in a non-human organism, like a microorganism or a plant cell, plant or part thereof, especially with plastidic localization, whereby the respective line disclose in column 7 the fine chemical glycerol (polar fraction). For example, an increase of the glycerol (polar fraction) of at least 1 percent, particularly in a range of 39 to 57-percent is conferred as compared to a corresponding non-transformed wild type non-human organism.

[98943] Accordingly, in one embodiment, an increase of glycerol (lipid fraction) in a non-human organism, as compared to a corresponding non-transformed wild type non-human organism, is conferred in the process of the invention, if the activity of a polypeptide showing the activity of a methylglyoxal synthase, or if the activity of the polypeptide B0963, preferably represented by SEQ ID NO. 36671, or a homolog or fragment thereof, or if the activity of a polypeptide encoded by a nucleic acid molecule comprising the nucleic acid SEQ ID NO. 36670, preferably the coding region thereof, or a homolog or fragment thereof, e.g. derived from Escherichia coli, is increased or generated. For example the activity of a nucleic acid molecule or a polypeptide comprising the nucleic acid, preferably the coding region thereof, or polypeptide or the consensus sequence or the polypeptide motif, as depicted in Table I, II or IV, application No. 19, column 5 or 8 in the respective same line as the nucleic acid molecule SEQ ID NO. 36670 or polypeptide SEQ ID NO. 36671, respectively, or a homolog or a fragment thereof, is increased or generated, or if the activity methylglyoxal synthase is increased or generated in a non-human organism, like a microorganism or a plant cell, plant or part thereof, especially with non-targeted localization, whereby the respective line disclose in column 7 the fine chemical glycerol (lipid fraction). For example, an increase of the glycerol (lipid fraction) of at least 1 percent, particularly in a range of 16 to 23-percent is conferred as compared to a corresponding non-transformed wild type non-human organism.

[98944] Accordingly, in one embodiment, an increase of glycerol (polar fraction) in a non-human organism, as compared to a corresponding non-transformed wild type non-human organism, is conferred in the process of the invention, if the activity of a polypeptide showing the activity of a methylglyoxal synthase, or if the activity of the polypeptide B0963, preferably represented by SEQ ID NO. 36671, or a homolog or fragment thereof, or if the activity of a polypeptide encoded by a nucleic acid molecule comprising the nucleic acid SEQ ID NO. 36670, preferably the coding region thereof, or a homolog or fragment thereof, e.g. derived from Escherichia coli, is increased or generated. For example the activity of a nucleic acid molecule or a polypeptide comprising the nucleic acid, preferably the coding region thereof, or polypeptide or the consensus sequence or the polypeptide motif, as depicted in Table I, II or IV, application No. 19, column 5 or 8 in the respective same line as the nucleic acid molecule SEQ ID NO. 36670 or polypeptide SEQ ID NO. 36671, respectively, or a homolog or a fragment thereof, is increased or generated, or if the activity methylglyoxal synthase is increased or generated in a non-human organism, like a microorganism or a plant cell, plant or part thereof, especially with non-targeted localization, whereby the respective line disclose in column 7 the fine chemical glycerol (polar fraction). For example, an increase of the glycerol (polar fraction) of at least 1 percent, particularly in a range of 46 to 105-percent is conferred as compared to a corresponding non-transformed wild type non-human organism.

[98945] Accordingly, in one embodiment, an increase of bis-glyceryl phosphate (polar fraction) in a non-human organism, as compared to a corresponding non-transformed wild type non-human organism, is conferred in the process of the invention, if the activity of a polypeptide showing the activity of a b0970-protein, or if the activity of the polypeptide B0970, preferably represented by SEQ ID NO. 144480, or a homolog or fragment thereof, or if the activity of a polypeptide encoded by a nucleic acid molecule comprising the nucleic acid SEQ ID NO. 144479, preferably the coding region thereof, or a homolog or fragment thereof, e.g. derived from Escherichia coli, is increased or generated. For example the activity of a nucleic acid molecule or a polypeptide comprising the nucleic acid, preferably the coding region thereof, or polypeptide or the consensus sequence or the polypeptide motif, as depicted in Table I, II or IV, application No. 19, column 5 or 8 in the respective same line as the nucleic acid molecule SEQ ID NO. 144479 or polypeptide SEQ ID NO. 144480, respectively, or a homolog or a fragment thereof, is increased or generated, or if the activity b0970-protein is increased or generated in a non-human organism, like a microorganism or a plant cell, plant or part thereof, especially with non-targeted localization, whereby the respective line disclose in column 7 the fine chemical bis-glyceryl phosphate (polar fraction). For example, an increase of the bis-glyceryl phosphate (polar fraction) of at least 1 percent, particularly in a range of 60 to 205-percent is conferred as compared to a corresponding non-transformed wild type non-human organism.

[98946] Accordingly, in one embodiment, an increase of bis-glyceryl phosphate (polar fraction) in a non-human organism, as compared to a corresponding non-transformed wild type non-human organism, is conferred in the process of the invention, if the activity of a polypeptide showing the activity of a b1003-protein, or if the activity of the polypeptide B1003, preferably represented by SEQ ID NO. 7942, or a homolog or fragment thereof, or if the activity of a polypeptide encoded by a nucleic acid molecule comprising the nucleic acid SEQ ID NO. 7941, preferably the coding region thereof, or a homolog or fragment thereof, e.g. derived from Escherichia coli, is increased or generated. For example the activity of a nucleic acid molecule or a polypeptide comprising the nucleic acid, preferably the coding region thereof, or polypeptide or the consensus sequence or the polypeptide motif, as depicted in Table I, II or IV, application No. 19, column 5 or 8 in the respective same line as the nucleic acid molecule SEQ ID NO. 7941 or polypeptide SEQ ID NO. 7942, respectively, or a homolog or a fragment thereof, is increased or generated, or if the activity b1003-protein is increased or generated in a non-human organism, like a microorganism or a plant cell, plant or part thereof, especially with non-targeted localization, whereby the respective line disclose in column 7 the fine chemical bis-glyceryl phosphate (polar fraction). For example, an increase of the bis-glyceryl phosphate (polar fraction) of at least 1 percent, particularly in a range of 52 to 148-percent is conferred as compared to a corresponding non-transformed wild type non-human organism.

[98947] Accordingly, in one embodiment, an increase of bis-glyceryl phosphate (polar fraction) in a non-human organism, as compared to a corresponding non-transformed wild type non-human organism, is conferred in the process of the invention, if the activity of a polypeptide showing the activity of a 3-oxoacyl-[acyl-carrier-protein] synthase, or if the activity of the polypeptide B1095, preferably represented by SEQ ID NO. 114553, or a homolog or fragment thereof, or if the activity of a polypeptide encoded by a nucleic acid molecule comprising the nucleic acid SEQ ID NO. 114552, preferably the coding region thereof, or a homolog or fragment thereof, e.g. derived from Escherichia coli, is increased or generated. For example the activity of a nucleic acid molecule or a polypeptide comprising the nucleic acid, preferably the coding region thereof, or polypeptide or the consensus sequence or the polypeptide motif, as depicted in Table I, II or IV, application No. 19, column 5 or 8 in the respective same line as the nucleic acid molecule SEQ ID NO. 114552 or polypeptide SEQ ID NO. 114553, respectively, or a homolog or a fragment thereof, is increased or generated, or if the activity 3-oxoacyl-[acyl-carrier-protein] synthase is increased or generated in a non-human organism, like a microorganism or a plant cell, plant or part thereof, especially with plastidic localization, whereby the respective line disclose in column 7 the fine chemical bis-glyceryl phosphate (polar fraction). For example, an increase of the bis-glyceryl phosphate (polar fraction) of at least 1 percent, particularly in a range of 53 to 164-percent is conferred as compared to a corresponding non-transformed wild type non-human organism.

[98948] Accordingly, in one embodiment, an increase of glycerol (lipid fraction) in a non-human organism, as compared to a corresponding non-transformed wild type non-human organism, is conferred in the process of the invention, if the activity of a polypeptide showing the activity of a sodium/proton antiporter, or if the activity of the polypeptide B1186, preferably represented by SEQ ID NO. 37401, or a homolog or fragment thereof, or if the activity of a polypeptide encoded by a nucleic acid molecule comprising the nucleic acid SEQ ID NO. 37400, preferably the coding region thereof, or a homolog or fragment thereof, e.g. derived from Escherichia coli, is increased or generated. For example the activity of a nucleic acid molecule or a polypeptide comprising the nucleic acid, preferably the coding region thereof, or polypeptide or the consensus sequence or the polypeptide motif, as depicted in Table I, II or IV, application No. 19, column 5 or 8 in the respective same line as the nucleic acid molecule SEQ ID NO. 37400 or polypeptide SEQ ID NO. 37401, respectively, or a homolog or a fragment thereof, is increased or generated, or if the activity sodium/proton antiporter is increased or generated in a non-human organism, like a microorganism or a plant cell, plant or part thereof, especially with non-targeted localization, whereby the respective line disclose in column 7 the fine chemical glycerol (lipid fraction). For example, an increase of the glycerol (lipid fraction) of at least 1 percent, particularly in a range of 17 to 80-percent is conferred as compared to a corresponding non-transformed wild type non-human organism.

[98949] Accordingly, in one embodiment, an increase of triacylglycerol in a non-human organism, as compared to a corresponding non-transformed wild type non-human organism, is conferred in the process of the invention, if the activity of a polypeptide showing the activity of a b1234-protein, or if the activity of the polypeptide B1234, preferably represented by SEQ ID NO. 112112, or a homolog or fragment thereof, or if the activity of a polypeptide encoded by a nucleic acid molecule comprising the nucleic acid SEQ ID NO. 112111, preferably the coding region thereof, or a homolog or fragment thereof, e.g. derived from Escherichia coli, is increased or generated. For example the activity of a nucleic acid molecule or a polypeptide comprising the nucleic acid, preferably the coding region thereof, or polypeptide or the consensus sequence or the polypeptide motif, as depicted in Table I, II or IV, application No. 19, column 5 or 8 in the respective same line as the nucleic acid molecule SEQ ID NO. 112111 or polypeptide SEQ ID NO. 112112, respectively, or a homolog or a fragment thereof, is increased or generated, or if the activity b1234-protein is increased or generated in a non-human organism, like a microorganism or a plant cell, plant or part thereof, especially with non-targeted localization, whereby the respective line disclose in column 7 the fine chemical triacylglycerol. For example, an increase of the triacylglycerol of at least 1 percent, particularly in a range of 41 to 80-percent is conferred as compared to a corresponding non-transformed wild type non-human organism.

[98950] Accordingly, in one embodiment, an increase of glycerol (lipid fraction) in a non-human organism, as compared to a corresponding non-transformed wild type non-human organism, is conferred in the process of the invention, if the activity of a polypeptide showing the activity of a cardiolipin synthase, or if the activity of the polypeptide B1249, preferably represented by SEQ ID NO. 98779, or a homolog or fragment thereof, or if the activity of a polypeptide encoded by a nucleic acid molecule comprising the nucleic acid SEQ ID NO. 98778, preferably the coding region thereof, or a homolog or fragment thereof, e.g. derived from Escherichia coli, is increased or generated. For example the activity of a nucleic acid molecule or a polypeptide comprising the nucleic acid, preferably the coding region thereof, or polypeptide or the consensus sequence or the polypeptide motif, as depicted in Table I, II or IV, application No. 19, column 5 or 8 in the respective same line as the nucleic acid molecule SEQ ID NO. 98778 or polypeptide SEQ ID NO. 98779, respectively, or a homolog or a fragment thereof, is increased or generated, or if the activity cardiolipin synthase is increased or generated in a non-human organism, like a microorganism or a plant cell, plant or part thereof, especially with plastidic localization, whereby the respective line disclose in column 7 the fine chemical glycerol (lipid fraction). For example, an increase of the glycerol (lipid fraction) of at least 1 percent, particularly in a range of 10 to 22-percent is conferred as compared to a corresponding non-transformed wild type non-human organism.

[98951] Accordingly, in one embodiment, an increase of glycerol phosphate (lipid fraction) in a non-human organism, as compared to a corresponding non-transformed wild type non-human organism, is conferred in the process of the invention, if the activity of a polypeptide showing the activity of a b1330-protein, or if the activity of the polypeptide B1330, preferably represented by SEQ ID NO. 38227, or a homolog or fragment thereof, or if the activity of a polypeptide encoded by a nucleic acid molecule comprising the nucleic acid SEQ ID NO. 38226, preferably the coding region thereof, or a homolog or fragment thereof, e.g. derived from Escherichia coli, is increased or generated. For example the activity of a nucleic acid molecule or a polypeptide comprising the nucleic acid, preferably the coding region thereof, or polypeptide or the consensus sequence or the polypeptide motif, as depicted in Table I, II or IV, application No. 19, column 5 or 8 in the respective same line as the nucleic acid molecule SEQ ID NO. 38226 or polypeptide SEQ ID NO. 38227, respectively, or a homolog or a fragment thereof, is increased or generated, or if the activity b1330-protein is increased or generated in a non-human organism, like a microorganism or a plant cell, plant or part thereof, especially with non-targeted localization, whereby the respective line disclose in column 7 the fine chemical glycerol phosphate (lipid fraction). For example, an increase of the glycerol phosphate (lipid fraction) of at least 1 percent, particularly in a range of 25 to 55-percent is conferred as compared to a corresponding non-transformed wild type non-human organism.

[98952] Accordingly, in one embodiment, an increase of bis-glyceryl phosphate (polar fraction) in a non-human organism, as compared to a corresponding non-transformed wild type non-human organism, is conferred in the process of the invention, if the activity of a polypeptide showing the activity of a ATP-dependent RNA helicase, or if the activity of the polypeptide B1343, preferably represented by SEQ ID NO. 76891, or a homolog or fragment thereof, or if the activity of a polypeptide encoded by a nucleic acid molecule comprising the nucleic acid SEQ ID NO. 76890, preferably the coding region thereof, or a homolog or fragment thereof, e.g. derived from Escherichia coli, is increased or generated. For example the activity of a nucleic acid molecule or a polypeptide comprising the nucleic acid, preferably the coding region thereof, or polypeptide or the consensus sequence or the polypeptide motif, as depicted in Table I, II or IV, application No. 19, column 5 or 8 in the respective same line as the nucleic acid molecule SEQ ID NO. 76890 or polypeptide SEQ ID NO. 76891, respectively, or a homolog or a fragment thereof, is increased or generated, or if the activity ATP-dependent RNA helicase is increased or generated in a non-human organism, like a microorganism or a plant cell, plant or part thereof, especially with non-targeted localization, whereby the respective line disclose in column 7 the fine chemical bis-glyceryl phosphate (polar fraction). For example, an increase of the bis-glyceryl phosphate (polar fraction) of at least 1 percent, particularly in a range of 38 to 51-percent is conferred as compared to a corresponding non-transformed wild type non-human organism.

[98953] Accordingly, in one embodiment, an increase of bis-glyceryl phosphate (polar fraction) in a non-human organism, as compared to a corresponding non-transformed wild type non-human organism, is conferred in the process of the invention, if the activity of a polypeptide showing the activity of a phenylacetic acid degradation protein, or if the activity of the polypeptide B1391, preferably represented by SEQ ID NO. 131490, or a homolog or fragment thereof, or if the activity of a polypeptide encoded by a nucleic acid molecule comprising the nucleic acid SEQ ID NO. 131489, preferably the coding region thereof, or a homolog or fragment thereof, e.g. derived from Escherichia coli, is increased or generated. For example the activity of a nucleic acid molecule or a polypeptide comprising the nucleic acid, preferably the coding region thereof, or polypeptide or the consensus sequence or the polypeptide motif, as depicted in Table I, II or IV, application No. 19, column 5 or 8 in the respective same line as the nucleic acid molecule SEQ ID NO. 131489 or polypeptide SEQ ID NO. 131490, respectively, or a homolog or a fragment thereof, is increased or generated, or if the activity phenylacetic acid degradation protein is increased or generated in a non-human organism, like a microorganism or a plant cell, plant or part thereof, especially with non-targeted localization, whereby the respective line disclose in column 7 the fine chemical bis-glyceryl phosphate (polar fraction). For example, an increase of the bis-glyceryl phosphate (polar fraction) of at least 1 percent, particularly in a range of 44 to 74-percent is conferred as compared to a corresponding non-transformed wild type non-human organism.

[98954] Accordingly, in one embodiment, an increase of bis-glyceryl phosphate (polar fraction) in a non-human organism, as compared to a corresponding non-transformed wild type non-human organism, is conferred in the process of the invention, if the activity of a polypeptide showing the activity of a lipoprotein precursor, or if the activity of the polypeptide B1431, preferably represented by SEQ ID NO. 38267, or a homolog or fragment thereof, or if the activity of a polypeptide encoded by a nucleic acid molecule comprising the nucleic acid SEQ ID NO. 38266, preferably the coding region thereof, or a homolog or fragment thereof, e.g. derived from Escherichia coli, is increased or generated. For example the activity of a nucleic acid molecule or a polypeptide comprising the nucleic acid, preferably the coding region thereof, or polypeptide or the consensus sequence or the polypeptide motif, as depicted in Table I, II or IV, application No. 19, column 5 or 8 in the respective same line as the nucleic acid molecule SEQ ID NO. 38266 or polypeptide SEQ ID NO. 38267, respectively, or a homolog or a fragment thereof, is increased or generated, or if the activity lipoprotein precursor is increased or generated in a non-human organism, like a microorganism or a plant cell, plant or part thereof, especially with plastidic localization, whereby the respective line disclose in column 7 the fine chemical bis-glyceryl phosphate (polar fraction). For example, an increase of the bis-glyceryl phosphate (polar fraction) of at least 1 percent, particularly in a range of 45 to 94-percent is conferred as compared to a corresponding non-transformed wild type non-human organism.

[98955] Accordingly, in one embodiment, an increase of bis-glyceryl phosphate (polar fraction) in a non-human organism, as compared to a corresponding non-transformed wild type non-human organism, is conferred in the process of the invention, if the activity of a polypeptide showing the activity of a b1522-protein, or if the activity of the polypeptide B1522, preferably represented by SEQ ID NO. 7948, or a homolog or fragment thereof, or if the activity of a polypeptide encoded by a nucleic acid molecule comprising the nucleic acid SEQ ID NO. 7947, preferably the coding region thereof, or a homolog or fragment thereof, e.g. derived from Escherichia coli, is increased or generated. For example the activity of a nucleic acid molecule or a polypeptide comprising the nucleic acid, preferably the coding region thereof, or polypeptide or the consensus sequence or the polypeptide motif, as depicted in Table I, II or IV, application No. 19, column 5 or 8 in the respective same line as the nucleic acid molecule SEQ ID NO. 7947 or polypeptide SEQ ID NO. 7948, respectively, or a homolog or a fragment thereof, is increased or generated, or if the activity b1522-protein is increased or generated in a non-human organism, like a microorganism or a plant cell, plant or part thereof, especially with non-targeted localization, whereby the respective line disclose in column 7 the fine chemical bis-glyceryl phosphate (polar fraction). For example, an increase of the bis-glyceryl phosphate (polar fraction) of at least 1 percent, particularly in a range of 64 to 135-percent is conferred as compared to a corresponding non-transformed wild type non-human organism.

[98956] Accordingly, in one embodiment, an increase of bis-glyceryl phosphate (polar fraction) in a non-human organism, as compared to a corresponding non-transformed wild type non-human organism, is conferred in the process of the invention, if the activity of a polypeptide showing the activity of a lysozyme, or if the activity of the polypeptide B1554, preferably represented by SEQ ID NO. 152992, or a homolog or fragment thereof, or if the activity of a polypeptide encoded by a nucleic acid molecule comprising the nucleic acid SEQ ID NO. 152991, preferably the coding region thereof, or a homolog or fragment thereof, e.g. derived from Escherichia coli, is increased or generated. For example the activity of a nucleic acid molecule or a polypeptide comprising the nucleic acid, preferably the coding region thereof, or polypeptide or the consensus sequence or the polypeptide motif, as depicted in Table I, II or IV, application No. 19, column 5 or 8 in the respective same line as the nucleic acid molecule SEQ ID NO. 152991 or polypeptide SEQ ID NO. 152992, respectively, or a homolog or a fragment thereof, is increased or generated, or if the activity lysozyme is increased or generated in a non-human organism, like a microorganism or a plant cell, plant or part thereof, especially with non-targeted localization, whereby the respective line disclose in column 7 the fine chemical bis-glyceryl phosphate (polar fraction). For example, an increase of the bis-glyceryl phosphate (polar fraction) of at least 1 percent, particularly in a range of 39 to 74-percent is conferred as compared to a corresponding non-transformed wild type non-human organism.

[98957] Accordingly, in one embodiment, an increase of bis-glyceryl phosphate (polar fraction) in a non-human organism, as compared to a corresponding non-transformed wild type non-human organism, is conferred in the process of the invention, if the activity of a polypeptide showing the activity of a b1556-protein, or if the activity of the polypeptide B1556, preferably represented by SEQ ID NO. 145143, or a homolog or fragment thereof, or if the activity of a polypeptide encoded by a nucleic acid molecule comprising the nucleic acid SEQ ID NO. 145142, preferably the coding region thereof, or a homolog or fragment thereof, e.g. derived from Escherichia coli, is increased or generated. For example the activity of a nucleic acid molecule or a polypeptide comprising the nucleic acid, preferably the coding region thereof, or polypeptide or the consensus sequence or the polypeptide motif, as depicted in Table I, II or IV, application No. 19, column 5 or 8 in the respective same line as the nucleic acid molecule SEQ ID NO. 145142 or polypeptide SEQ ID NO. 145143, respectively, or a homolog or a fragment thereof, is increased or generated, or if the activity b1556-protein is increased or generated in a non-human organism, like a microorganism or a plant cell, plant or part thereof, especially with plastidic localization, whereby the respective line disclose in column 7 the fine chemical bis-glyceryl phosphate (polar fraction). For example, an increase of the bis-glyceryl phosphate (polar fraction) of at least 1 percent, particularly in a range of 44 to 119-percent is conferred as compared to a corresponding non-transformed wild type non-human organism.

[98958] Accordingly, in one embodiment, an increase of triacylglycerol in a non-human organism, as compared to a corresponding non-transformed wild type non-human organism, is conferred in the process of the invention, if the activity of a polypeptide showing the activity of a b1583-protein, or if the activity of the polypeptide B1583, preferably represented by SEQ ID NO. 78139, or a homolog or fragment thereof, or if the activity of a polypeptide encoded by a nucleic acid molecule comprising the nucleic acid SEQ ID NO. 78138, preferably the coding region thereof, or a homolog or fragment thereof, e.g. derived from Escherichia coli, is increased or generated. For example the activity of a nucleic acid molecule or a polypeptide comprising the nucleic acid, preferably the coding region thereof, or polypeptide or the consensus sequence or the polypeptide motif, as depicted in Table I, II or IV, application No. 19, column 5 or 8 in the respective same line as the nucleic acid molecule SEQ ID NO. 78138 or polypeptide SEQ ID NO. 78139, respectively, or a homolog or a fragment thereof, is increased or generated, or if the activity b1583-protein is increased or generated in a non-human organism, like a microorganism or a plant cell, plant or part thereof, especially with non-targeted localization, whereby the respective line disclose in column 7 the fine chemical triacylglycerol. For example, an increase of the triacylglycerol of at least 1 percent, particularly in a range of 30 to 32-percent is conferred as compared to a corresponding non-transformed wild type non-human organism.

[98959] Accordingly, in one embodiment, an increase of bis-glyceryl phosphate (polar fraction) in a non-human organism, as compared to a corresponding non-transformed wild type non-human organism, is conferred in the process of the invention, if the activity of a polypeptide showing the activity of a Fe—S subunit of oxidoreductase, or if the activity of the polypeptide B1589, preferably represented by SEQ ID NO. 78155, or a homolog or fragment thereof, or if the activity of a polypeptide encoded by a nucleic acid molecule comprising the nucleic acid SEQ ID NO. 78154, preferably the coding region thereof, or a homolog or fragment thereof, e.g. derived from Escherichia coli, is increased or generated. For example the activity of a nucleic acid molecule or a polypeptide comprising the nucleic acid, preferably the coding region thereof, or polypeptide or the consensus sequence or the polypeptide motif, as depicted in Table I, II or IV, application No. 19, column 5 or 8 in the respective same line as the nucleic acid molecule SEQ ID NO. 78154 or polypeptide SEQ ID NO. 78155, respectively, or a homolog or a fragment thereof, is increased or generated, or if the activity Fe—S subunit of oxidoreductase is increased or generated in a non-human organism, like a microorganism or a plant cell, plant or part thereof, especially with non-targeted localization, whereby the respective line disclose in column 7 the fine chemical bis-glyceryl phosphate (polar fraction). For example, an increase of the bis-glyceryl phosphate (polar fraction) of at least 1 percent, particularly in a range of 41 to 94-percent is conferred as compared to a corresponding non-transformed wild type non-human organism.

[98960] Accordingly, in one embodiment, an increase of glycerol (lipid fraction) in a non-human organism, as compared to a corresponding non-transformed wild type non-human organism, is conferred in the process of the invention, if the activity of a polypeptide showing the activity of a acid shock protein, or if the activity of the polypeptide B1597, preferably represented by SEQ ID NO. 38301, or a homolog or fragment thereof, or if the activity of a polypeptide encoded by a nucleic acid molecule comprising the nucleic acid SEQ ID NO. 38300, preferably the coding region thereof, or a homolog or fragment thereof, e.g. derived from Escherichia coli, is increased or generated. For example the activity of a nucleic acid molecule or a polypeptide comprising the nucleic acid, preferably the coding region thereof, or polypeptide or the consensus sequence or the polypeptide motif, as depicted in Table I, II or IV, application No. 19, column 5 or 8 in the respective same line as the nucleic acid molecule SEQ ID NO. 38300 or polypeptide SEQ ID NO. 38301, respectively, or a homolog or a fragment thereof, is increased or generated, or if the activity acid shock protein is increased or generated in a non-human organism, like a microorganism or a plant cell, plant or part thereof, especially with non-targeted localization, whereby the respective line disclose in column 7 the fine chemical glycerol (lipid fraction). For example, an increase of the glycerol (lipid fraction) of at least 1 percent, particularly in a range of 21 to 123-percent is conferred as compared to a corresponding non-transformed wild type non-human organism.

[98961] Accordingly, in one embodiment, an increase of bis-glyceryl phosphate (polar fraction) in a non-human organism, as compared to a corresponding non-transformed wild type non-human organism, is conferred in the process of the invention, if the activity of a polypeptide showing the activity of a b1670-protein, or if the activity of the polypeptide B1670, preferably represented by SEQ ID NO. 78754, or a homolog or fragment thereof, or if the activity of a polypeptide encoded by a nucleic acid molecule comprising the nucleic acid SEQ ID NO. 78753, preferably the coding region thereof, or a homolog or fragment thereof, e.g. derived from Escherichia coli, is increased or generated. For example the activity of a nucleic acid molecule or a polypeptide comprising the nucleic acid, preferably the coding region thereof, or polypeptide or the consensus sequence or the polypeptide motif, as depicted in Table I, II or IV, application No. 19, column 5 or 8 in the respective same line as the nucleic acid molecule SEQ ID NO. 78753 or polypeptide SEQ ID NO. 78754, respectively, or a homolog or a fragment thereof, is increased or generated, or if the activity b1670-protein is increased or generated in a non-human organism, like a microorganism or a plant cell, plant or part thereof, especially with non-targeted localization, whereby the respective line disclose in column 7 the fine chemical bis-glyceryl phosphate (polar fraction). For example, an increase of the bis-glyceryl phosphate (polar fraction) of at least 1 percent, particularly in a range of 53 to 94-percent is conferred as compared to a corresponding non-transformed wild type non-human organism.

[98962] Accordingly, in one embodiment, an increase of bis-glyceryl phosphate (polar fraction) in a non-human organism, as compared to a corresponding non-transformed wild type non-human organism, is conferred in the process of the invention, if the activity of a polypeptide showing the activity of a b1672-protein, or if the activity of the polypeptide B1672, preferably represented by SEQ ID NO. 78772, or a homolog or fragment thereof, or if the activity of a polypeptide encoded by a nucleic acid molecule comprising the nucleic acid SEQ ID NO. 78771, preferably the coding region thereof, or a homolog or fragment thereof, e.g. derived from Escherichia coli, is increased or generated. For example the activity of a nucleic acid molecule or a polypeptide comprising the nucleic acid, preferably the coding region thereof, or polypeptide or the consensus sequence or the polypeptide motif, as depicted in Table I, II or IV, application No. 19, column 5 or 8 in the respective same line as the nucleic acid molecule SEQ ID NO. 78771 or polypeptide SEQ ID NO. 78772, respectively, or a homolog or a fragment thereof, is increased or generated, or if the activity b1672-protein is increased or generated in a non-human organism, like a microorganism or a plant cell, plant or part thereof, especially with non-targeted localization, whereby the respective line disclose in column 7 the fine chemical bis-glyceryl phosphate (polar fraction). For example, an increase of the bis-glyceryl phosphate (polar fraction) of at least 1 percent, particularly in a range of 39 to 72-percent is conferred as compared to a corresponding non-transformed wild type non-human organism.

[98963] Accordingly, in one embodiment, an increase of triacylglycerol in a non-human organism, as compared to a corresponding non-transformed wild type non-human organism, is conferred in the process of the invention, if the activity of a polypeptide showing the activity of a b1703-protein, or if the activity of the polypeptide B1703, preferably represented by SEQ ID NO. 124908, or a homolog or fragment thereof, or if the activity of a polypeptide encoded by a nucleic acid molecule comprising the nucleic acid SEQ ID NO. 124907, preferably the coding region thereof, or a homolog or fragment thereof, e.g. derived from Escherichia coli, is increased or generated. For example the activity of a nucleic acid molecule or a polypeptide comprising the nucleic acid, preferably the coding region thereof, or polypeptide or the consensus sequence or the polypeptide motif, as depicted in Table I, II or IV, application No. 19, column 5 or 8 in the respective same line as the nucleic acid molecule SEQ ID NO. 124907 or polypeptide SEQ ID NO. 124908, respectively, or a homolog or a fragment thereof, is increased or generated, or if the activity b1703-protein is increased or generated in a non-human organism, like a microorganism or a plant cell, plant or part thereof, especially with non-targeted localization, whereby the respective line disclose in column 7 the fine chemical triacylglycerol. For example, an increase of the triacylglycerol of at least 1 percent, particularly in a range of 35 to 49-percent is conferred as compared to a corresponding non-transformed wild type non-human organism.

[98964] Accordingly, in one embodiment, an increase of bis-glyceryl phosphate (polar fraction) in a non-human organism, as compared to a corresponding non-transformed wild type non-human organism, is conferred in the process of the invention, if the activity of a polypeptide showing the activity of a phosphotransferase system component, or if the activity of the polypeptide B1736, preferably represented by SEQ ID NO. 153073, or a homolog or fragment thereof, or if the activity of a polypeptide encoded by a nucleic acid molecule comprising the nucleic acid SEQ ID NO. 153072, preferably the coding region thereof, or a homolog or fragment thereof, e.g. derived from Escherichia coli, is increased or generated. For example the activity of a nucleic acid molecule or a polypeptide comprising the nucleic acid, preferably the coding region thereof, or polypeptide or the consensus sequence or the polypeptide motif, as depicted in Table I, II or IV, application No. 19, column 5 or 8 in the respective same line as the nucleic acid molecule SEQ ID NO. 153072 or polypeptide SEQ ID NO. 153073, respectively, or a homolog or a fragment thereof, is increased or generated, or if the activity phosphotransferase system component is increased or generated in a non-human organism, like a microorganism or a plant cell, plant or part thereof, especially with non-targeted localization, whereby the respective line disclose in column 7 the fine chemical bis-glyceryl phosphate (polar fraction). For example, an increase of the bis-glyceryl phosphate (polar fraction) of at least 1 percent, particularly in a range of 38 to 85-percent is conferred as compared to a corresponding non-transformed wild type non-human organism.

[98965] Accordingly, in one embodiment, an increase of triacylglycerol in a non-human organism, as compared to a corresponding non-transformed wild type non-human organism, is conferred in the process of the invention, if the activity of a polypeptide showing the activity of a B1795-protein, or if the activity of the polypeptide B1795, preferably represented by SEQ ID NO. 131540, or a homolog or fragment thereof, or if the activity of a polypeptide encoded by a nucleic acid molecule comprising the nucleic acid SEQ ID NO. 131539, preferably the coding region thereof, or a homolog or fragment thereof, e.g. derived from Escherichia coli, is increased or generated. For example the activity of a nucleic acid molecule or a polypeptide comprising the nucleic acid, preferably the coding region thereof, or polypeptide or the consensus sequence or the polypeptide motif, as depicted in Table I, II or IV, application No. 19, column 5 or 8 in the respective same line as the nucleic acid molecule SEQ ID NO. 131539 or polypeptide SEQ ID NO. 131540, respectively, or a homolog or a fragment thereof, is increased or generated, or if the activity B1795-protein is increased or generated in a non-human organism, like a microorganism or a plant cell, plant or part thereof, especially with non-targeted localization, whereby the respective line disclose in column 7 the fine chemical triacylglycerol. For example, an increase of the triacylglycerol of at least 1 percent, particularly in a range of 40 to 82-percent is conferred as compared to a corresponding non-transformed wild type non-human organism.

[98966] Accordingly, in one embodiment, an increase of glycerol-3-phosphate (polar fraction) in a non-human organism, as compared to a corresponding non-transformed wild type non-human organism, is conferred in the process of the invention, if the activity of a polypeptide showing the activity of a L-serine dehydratase, or if the activity of the polypeptide B1814, preferably represented by SEQ ID NO. 8034, or a homolog or fragment thereof, or if the activity of a polypeptide encoded by a nucleic acid molecule comprising the nucleic acid SEQ ID NO. 8033, preferably the coding region thereof, or a homolog or fragment thereof, e.g. derived from Escherichia coli, is increased or generated. For example the activity of a nucleic acid molecule or a polypeptide comprising the nucleic acid, preferably the coding region thereof, or polypeptide or the consensus sequence or the polypeptide motif, as depicted in Table I, II or IV, application No. 19, column 5 or 8 in the respective same line as the nucleic acid molecule SEQ ID NO. 8033 or polypeptide SEQ ID NO. 8034, respectively, or a homolog or a fragment thereof, is increased or generated, or if the activity L-serine dehydratase is increased or generated in a non-human organism, like a microorganism or a plant cell, plant or part thereof, especially with plastidic localization, whereby the respective line disclose in column 7 the fine chemical glycerol-3-phosphate (polar fraction). For example, an increase of the glycerol-3-phosphate (polar fraction) of at least 1-percent, particularly in a range of 54 to 199-percent is conferred as compared to a corresponding non-transformed wild type non-human organism.

[98967] Accordingly, in one embodiment, an increase of glycerol phosphate (lipid fraction) in a non-human organism, as compared to a corresponding non-transformed wild type non-human organism, is conferred in the process of the invention, if the activity of a polypeptide showing the activity of a b1837-protein, or if the activity of the polypeptide B1837, preferably represented by SEQ ID NO. 78954, or a homolog or fragment thereof, or if the activity of a polypeptide encoded by a nucleic acid molecule comprising the nucleic acid SEQ ID NO. 78953, preferably the coding region thereof, or a homolog or fragment thereof, e.g. derived from Escherichia coli, is increased or generated. For example the activity of a nucleic acid molecule or a polypeptide comprising the nucleic acid, preferably the coding region thereof, or polypeptide or the consensus sequence or the polypeptide motif, as depicted in Table I, II or IV, application No. 19, column 5 or 8 in the respective same line as the nucleic acid molecule SEQ ID NO. 78953 or polypeptide SEQ ID NO. 78954, respectively, or a homolog or a fragment thereof, is increased or generated, or if the activity b1837-protein is increased or generated in a non-human organism, like a microorganism or a plant cell, plant or part thereof, especially with non-targeted localization, whereby the respective line disclose in column 7 the fine chemical glycerol phosphate (lipid fraction). For example, an increase of the glycerol phosphate (lipid fraction) of at least 1 percent, particularly in a range of 20 to 38-percent is conferred as compared to a corresponding non-transformed wild type non-human organism.

[98968] Accordingly, in one embodiment, an increase of triacylglycerol in a non-human organism, as compared to a corresponding non-transformed wild type non-human organism, is conferred in the process of the invention, if the activity of a polypeptide showing the activity of a trehalosephosphatase, or if the activity of the polypeptide B1897, preferably represented by SEQ ID NO. 79057, or a homolog or fragment thereof, or if the activity of a polypeptide encoded by a nucleic acid molecule comprising the nucleic acid SEQ ID NO. 79056, preferably the coding region thereof, or a homolog or fragment thereof, e.g. derived from Escherichia coli, is increased or generated. For example the activity of a nucleic acid molecule or a polypeptide comprising the nucleic acid, preferably the coding region thereof, or polypeptide or the consensus sequence or the polypeptide motif, as depicted in Table I, II or IV, application No. 19, column 5 or 8 in the respective same line as the nucleic acid molecule SEQ ID NO. 79056 or polypeptide SEQ ID NO. 79057, respectively, or a homolog or a fragment thereof, is increased or generated, or if the activity trehalose-phosphatase is increased or generated in a non-human organism, like a microorganism or a plant cell, plant or part thereof, especially with non-targeted localization, whereby the respective line disclose in column 7 the fine chemical triacylglycerol. For example, an increase of the triacylglycerol of at least 1 percent, particularly in a range of 41 to 60-percent is conferred as compared to a corresponding non-transformed wild type non-human organism.

[98969] Accordingly, in one embodiment, an increase of glycerol (lipid fraction) in a non-human organism, as compared to a corresponding non-transformed wild type non-human organism, is conferred in the process of the invention, if the activity of a polypeptide showing the activity of a imidazole glycerol phosphate synthase subunit, or if the activity of the polypeptide B2023, preferably represented by SEQ ID NO. 99372, or a homolog or fragment thereof, or if the activity of a polypeptide encoded by a nucleic acid molecule comprising the nucleic acid SEQ ID NO. 99371, preferably the coding region thereof, or a homolog or fragment thereof, e.g. derived from Escherichia coli, is increased or generated. For example the activity of a nucleic acid molecule or a polypeptide comprising the nucleic acid, preferably the coding region thereof, or polypeptide or the consensus sequence or the polypeptide motif, as depicted in Table I, II or IV, application No. 19, column 5 or 8 in the respective same line as the nucleic acid molecule SEQ ID NO. 99371 or polypeptide SEQ ID NO. 99372, respectively, or a homolog or a fragment thereof, is increased or generated, or if the activity imidazole glycerol phosphate synthase subunit is increased or generated in a non-human organism, like a microorganism or a plant cell, plant or part thereof, especially with non-targeted localization, whereby the respective line disclose in column 7 the fine chemical glycerol (lipid fraction). For example, an increase of the glycerol (lipid fraction) of at least 1 percent, particularly in a range of 13 to 19-percent is conferred as compared to a corresponding non-transformed wild type non-human organism.

[98970] Accordingly, in one embodiment, an increase of glycerol phosphate (lipid fraction) in a non-human organism, as compared to a corresponding non-transformed wild type non-human organism, is conferred in the process of the invention, if the activity of a polypeptide showing the activity of a b2032-protein, or if the activity of the polypeptide B2032, preferably represented by SEQ ID NO. 8921, or a homolog or fragment thereof, or if the activity of a polypeptide encoded by a nucleic acid molecule comprising the nucleic acid SEQ ID NO. 8920, preferably the coding region thereof, or a homolog or fragment thereof, e.g. derived from Escherichia coli, is increased or generated. For example the activity of a nucleic acid molecule or a polypeptide comprising the nucleic acid, preferably the coding region thereof, or polypeptide or the consensus sequence or the polypeptide motif, as depicted in Table I, II or IV, application No. 19, column 5 or 8 in the respective same line as the nucleic acid molecule SEQ ID NO. 8920 or polypeptide SEQ ID NO. 8921, respectively, or a homolog or a fragment thereof, is increased or generated, or if the activity b2032-protein is increased or generated in a non-human organism, like a microorganism or a plant cell, plant or part thereof, especially with non-targeted localization, whereby the respective line disclose in column 7 the fine chemical glycerol phosphate (lipid fraction). For example, an increase of the glycerol phosphate (lipid fraction) of at least 1 percent, particularly in a range of 22 to 67-percent is conferred as compared to a corresponding non-transformed wild type non-human organism.

[98971] Accordingly, in one embodiment, an increase of glycerol (lipid fraction) in a non-human organism, as compared to a corresponding non-transformed wild type non-human organism, is conferred in the process of the invention, if the activity of a polypeptide showing the activity of a b2099-protein, or if the activity of the polypeptide B2099, preferably represented by SEQ ID NO. 115596, or a homolog or fragment thereof, or if the activity of a polypeptide encoded by a nucleic acid molecule comprising the nucleic acid SEQ ID NO. 115595, preferably the coding region thereof, or a homolog or fragment thereof, e.g. derived from Escherichia coli, is increased or generated. For example the activity of a nucleic acid molecule or a polypeptide comprising the nucleic acid, preferably the coding region thereof, or polypeptide or the consensus sequence or the polypeptide motif, as depicted in Table I, II or IV, application No. 19, column 5 or 8 in the respective same line as the nucleic acid molecule SEQ ID NO. 115595 or polypeptide SEQ ID NO. 115596, respectively, or a homolog or a fragment thereof, is increased or generated, or if the activity b2099-protein is increased or generated in a non-human organism, like a microorganism or a plant cell, plant or part thereof, especially with non-targeted localization, whereby the respective line disclose in column 7 the fine chemical glycerol (lipid fraction). For example, an increase of the glycerol (lipid fraction) of at least 1 percent, particularly in a range of 16 to 25-percent is conferred as compared to a corresponding non-transformed wild type non-human organism.

[98972] Accordingly, in one embodiment, an increase of bis-glyceryl phosphate (polar fraction) in a non-human organism, as compared to a corresponding non-transformed wild type non-human organism, is conferred in the process of the invention, if the activity of a polypeptide showing the activity of a b2139-protein, or if the activity of the polypeptide B2139, preferably represented by SEQ ID NO. 125086, or a homolog or fragment thereof, or if the activity of a polypeptide encoded by a nucleic acid molecule comprising the nucleic acid SEQ ID NO. 125085, preferably the coding region thereof, or a homolog or fragment thereof, e.g. derived from Escherichia coli, is increased or generated. For example the activity of a nucleic acid molecule or a polypeptide comprising the nucleic acid, preferably the coding region thereof, or polypeptide or the consensus sequence or the polypeptide motif, as depicted in Table I, II or IV, application No. 19, column 5 or 8 in the respective same line as the nucleic acid molecule SEQ ID NO. 125085 or polypeptide SEQ ID NO. 125086, respectively, or a homolog or a fragment thereof, is increased or generated, or if the activity b2139-protein is increased or generated in a non-human organism, like a microorganism or a plant cell, plant or part thereof, especially with plastidic localization, whereby the respective line disclose in column 7 the fine chemical bis-glyceryl phosphate (polar fraction). For example, an increase of the bis-glyceryl phosphate (polar fraction) of at least 1 percent, particularly in a range of 42 to 43-percent is conferred as compared to a corresponding non-transformed wild type non-human organism.

[98973] Accordingly, in one embodiment, an increase of glycerol (lipid fraction) in a non-human organism, as compared to a corresponding non-transformed wild type non-human organism, is conferred in the process of the invention, if the activity of a polypeptide showing the activity of a ABC transporter permease protein, or if the activity of the polypeptide B2178, preferably represented by SEQ ID NO. 39041, or a homolog or fragment thereof, or if the activity of a polypeptide encoded by a nucleic acid molecule comprising the nucleic acid SEQ ID NO. 39040, preferably the coding region thereof, or a homolog or fragment thereof, e.g. derived from Escherichia coli, is increased or generated. For example the activity of a nucleic acid molecule or a polypeptide comprising the nucleic acid, preferably the coding region thereof, or polypeptide or the consensus sequence or the polypeptide motif, as depicted in Table I, II or IV, application No. 19, column 5 or 8 in the respective same line as the nucleic acid molecule SEQ ID NO. 39040 or polypeptide SEQ ID NO. 39041, respectively, or a homolog or a fragment thereof, is increased or generated, or if the activity ABC transporter permease protein is increased or generated in a non-human organism, like a microorganism or a plant cell, plant or part thereof, especially with non-targeted localization, whereby the respective line disclose in column 7 the fine chemical glycerol (lipid fraction). For example, an increase of the glycerol (lipid fraction) of at least 1 percent, particularly in a range of 17 to 44-percent is conferred as compared to a corresponding non-transformed wild type non-human organism.

[98974] Accordingly, in one embodiment, an increase of glycerol phosphate (lipid fraction) in a non-human organism, as compared to a corresponding non-transformed wild type non-human organism, is conferred in the process of the invention, if the activity of a polypeptide showing the activity of a ion-transport protein, or if the activity of the polypeptide B2389, preferably represented by SEQ ID NO. 146239, or a homolog or fragment thereof, or if the activity of a polypeptide encoded by a nucleic acid molecule comprising the nucleic acid SEQ ID NO. 146238, preferably the coding region thereof, or a homolog or fragment thereof, e.g. derived from Escherichia coli, is increased or generated. For example the activity of a nucleic acid molecule or a polypeptide comprising the nucleic acid, preferably the coding region thereof, or polypeptide or the consensus sequence or the polypeptide motif, as depicted in Table I, II or IV, application No. 19, column 5 or 8 in the respective same line as the nucleic acid molecule SEQ ID NO. 146238 or polypeptide SEQ ID NO. 146239, respectively, or a homolog or a fragment thereof, is increased or generated, or if the activity ion-transport protein is increased or generated in a non-human organism, like a microorganism or a plant cell, plant or part thereof, especially with non-targeted localization, whereby the respective line disclose in column 7 the fine chemical glycerol phosphate (lipid fraction). For example, an increase of the glycerol phosphate (lipid fraction) of at least 1 percent, particularly in a range of 21 to 34-percent is conferred as compared to a corresponding non-transformed wild type non-human organism.

[98975] Accordingly, in one embodiment, an increase of bis-glyceryl phosphate (polar fraction) in a non-human organism, as compared to a corresponding non-transformed wild type non-human organism, is conferred in the process of the invention, if the activity of a polypeptide showing the activity of a b2399-protein, or if the activity of the polypeptide B2399, preferably represented by SEQ ID NO. 39238, or a homolog or fragment thereof, or if the activity of a polypeptide encoded by a nucleic acid molecule comprising the nucleic acid SEQ ID NO. 39237, preferably the coding region thereof, or a homolog or fragment thereof, e.g. derived from Escherichia coli, is increased or generated. For example the activity of a nucleic acid molecule or a polypeptide comprising the nucleic acid, preferably the coding region thereof, or polypeptide or the consensus sequence or the polypeptide motif, as depicted in Table I, II or IV, application No. 19, column 5 or 8 in the respective same line as the nucleic acid molecule SEQ ID NO. 39237 or polypeptide SEQ ID NO. 39238, respectively, or a homolog or a fragment thereof, is increased or generated, or if the activity b2399-protein is increased or generated in a non-human organism, like a microorganism or a plant cell, plant or part thereof, especially with non-targeted localization, whereby the respective line disclose in column 7 the fine chemical bis-glyceryl phosphate (polar fraction). For example, an increase of the bis-glyceryl phosphate (polar fraction) of at least 1 percent, particularly in a range of 53 to 471-percent is conferred as compared to a corresponding non-transformed wild type non-human organism.

[98976] Accordingly, in one embodiment, an increase of glycerol (lipid fraction) in a non-human organism, as compared to a corresponding non-transformed wild type non-human organism, is conferred in the process of the invention, if the activity of a polypeptide showing the activity of a b2399-protein, or if the activity of the polypeptide B2399, preferably represented by SEQ ID NO. 39238, or a homolog or fragment thereof, or if the activity of a polypeptide encoded by a nucleic acid molecule comprising the nucleic acid SEQ ID NO. 39237, preferably the coding region thereof, or a homolog or fragment thereof, e.g. derived from Escherichia coli, is increased or generated. For example the activity of a nucleic acid molecule or a polypeptide comprising the nucleic acid, preferably the coding region thereof, or polypeptide or the consensus sequence or the polypeptide motif, as depicted in Table I, II or IV, application No. 19, column 5 or 8 in the respective same line as the nucleic acid molecule SEQ ID NO. 39237 or polypeptide SEQ ID NO. 39238, respectively, or a homolog or a fragment thereof, is increased or generated, or if the activity b2399-protein is increased or generated in a non-human organism, like a microorganism or a plant cell, plant or part thereof, especially with non-targeted localization, whereby the respective line disclose in column 7 the fine chemical glycerol (lipid fraction). For example, an increase of the glycerol (lipid fraction) of at least 1 percent, particularly in a range of 20 to 45-percent is conferred as compared to a corresponding non-transformed wild type non-human organism.

[98977] Accordingly, in one embodiment, an increase of glycerol (lipid fraction) in a non-human organism, as compared to a corresponding non-transformed wild type non-human organism, is conferred in the process of the invention, if the activity of a polypeptide showing the activity of a ethanolamine utilization protein, or if the activity of the polypeptide B2439, preferably represented by SEQ ID NO. 115629, or a homolog or fragment thereof, or if the activity of a polypeptide encoded by a nucleic acid molecule comprising the nucleic acid SEQ ID NO. 115628, preferably the coding region thereof, or a homolog or fragment thereof, e.g. derived from Escherichia coli, is increased or generated. For example the activity of a nucleic acid molecule or a polypeptide comprising the nucleic acid, preferably the coding region thereof, or polypeptide or the consensus sequence or the polypeptide motif, as depicted in Table I, II or IV, application No. 19, column 5 or 8 in the respective same line as the nucleic acid molecule SEQ ID NO. 115628 or polypeptide SEQ ID NO. 115629, respectively, or a homolog or a fragment thereof, is increased or generated, or if the activity ethanolamine utilization protein is increased or generated in a non-human organism, like a microorganism or a plant cell, plant or part thereof, especially with non-targeted localization, whereby the respective line disclose in column 7 the fine chemical glycerol (lipid fraction). For example, an increase of the glycerol (lipid fraction) of at least 1 percent, particularly in a range of 17 to 35-percent is conferred as compared to a corresponding non-transformed wild type non-human organism.

[98978] Accordingly, in one embodiment, an increase of glycerol phosphate (lipid fraction) in a non-human organism, as compared to a corresponding non-transformed wild type non-human organism, is conferred in the process of the invention, if the activity of a polypeptide showing the activity of a ethanolamine utilization protein, or if the activity of the polypeptide B2439, preferably represented by SEQ ID NO. 115629, or a homolog or fragment thereof, or if the activity of a polypeptide encoded by a nucleic acid molecule comprising the nucleic acid SEQ ID NO. 115628, preferably the coding region thereof, or a homolog or fragment thereof, e.g. derived from Escherichia coli, is increased or generated. For example the activity of a nucleic acid molecule or a polypeptide comprising the nucleic acid, preferably the coding region thereof, or polypeptide or the consensus sequence or the polypeptide motif, as depicted in Table I, II or IV, application No. 19, column 5 or 8 in the respective same line as the nucleic acid molecule SEQ ID NO. 115628 or polypeptide SEQ ID NO. 115629, respectively, or a homolog or a fragment thereof, is increased or generated, or if the activity ethanolamine utilization protein is increased or generated in a non-human organism, like a microorganism or a plant cell, plant or part thereof, especially with non-targeted localization, whereby the respective line disclose in column 7 the fine chemical glycerol phosphate (lipid fraction). For example, an increase of the glycerol phosphate (lipid fraction) of at least 1 percent, particularly in a range of 21 to 31-percent is conferred as compared to a corresponding non-transformed wild type non-human organism.

[98979] Accordingly, in one embodiment, an increase of glycerol (lipid fraction) in a non-human organism, as compared to a corresponding non-transformed wild type non-human organism, is conferred in the process of the invention, if the activity of a polypeptide showing the activity of a ethanolamine utilization protein, or if the activity of the polypeptide B2461, preferably represented by SEQ ID NO. 40300, or a homolog or fragment thereof, or if the activity of a polypeptide encoded by a nucleic acid molecule comprising the nucleic acid SEQ ID NO. 40299, preferably the coding region thereof, or a homolog or fragment thereof, e.g. derived from Escherichia coli, is increased or generated. For example the activity of a nucleic acid molecule or a polypeptide comprising the nucleic acid, preferably the coding region thereof, or polypeptide or the consensus sequence or the polypeptide motif, as depicted in Table I, II or IV, application No. 19, column 5 or 8 in the respective same line as the nucleic acid molecule SEQ ID NO. 40299 or polypeptide SEQ ID NO. 40300, respectively, or a homolog or a fragment thereof, is increased or generated, or if the activity ethanolamine utilization protein is increased or generated in a non-human organism, like a microorganism or a plant cell, plant or part thereof, especially with non-targeted localization, whereby the respective line disclose in column 7 the fine chemical glycerol (lipid fraction). For example, an increase of the glycerol (lipid fraction) of at least 1 percent, particularly in a range of 20 to 42-percent is conferred as compared to a corresponding non-transformed wild type non-human organism.

[98980] Accordingly, in one embodiment, an increase of bis-glyceryl phosphate (polar fraction) in a non-human organism, as compared to a corresponding non-transformed wild type non-human organism, is conferred in the process of the invention, if the activity of a polypeptide showing the activity of a b2474-protein, or if the activity of the polypeptide B2474, preferably represented by SEQ ID NO. 40330, or a homolog or fragment thereof, or if the activity of a polypeptide encoded by a nucleic acid molecule comprising the nucleic acid SEQ ID NO. 40329, preferably the coding region thereof, or a homolog or fragment thereof, e.g. derived from Escherichia coli, is increased or generated. For example the activity of a nucleic acid molecule or a polypeptide comprising the nucleic acid, preferably the coding region thereof, or polypeptide or the consensus sequence or the polypeptide motif, as depicted in Table I, II or IV, application No. 19, column 5 or 8 in the respective same line as the nucleic acid molecule SEQ ID NO. 40329 or polypeptide SEQ ID NO. 40330, respectively, or a homolog or a fragment thereof, is increased or generated, or if the activity b2474-protein is increased or generated in a non-human organism, like a microorganism or a plant cell, plant or part thereof, especially with non-targeted localization, whereby the respective line disclose in column 7 the fine chemical bis-glyceryl phosphate (polar fraction). For example, an increase of the bis-glyceryl phosphate (polar fraction) of at least 1 percent, particularly in a range of 38 to 83-percent is conferred as compared to a corresponding non-transformed wild type non-human organism.

[98981] Accordingly, in one embodiment, an increase of glycerol (lipid fraction) in a non-human organism, as compared to a corresponding non-transformed wild type non-human organism, is conferred in the process of the invention, if the activity of a polypeptide showing the activity of a b2474-protein, or if the activity of the polypeptide B2474, preferably represented by SEQ ID NO. 40330, or a homolog or fragment thereof, or if the activity of a polypeptide encoded by a nucleic acid molecule comprising the nucleic acid SEQ ID NO. 40329, preferably the coding region thereof, or a homolog or fragment thereof, e.g. derived from Escherichia coli, is increased or generated. For example the activity of a nucleic acid molecule or a polypeptide comprising the nucleic acid, preferably the coding region thereof, or polypeptide or the consensus sequence or the polypeptide motif, as depicted in Table I, II or IV, application No. 19, column 5 or 8 in the respective same line as the nucleic acid molecule SEQ ID NO. 40329 or polypeptide SEQ ID NO. 40330, respectively, or a homolog or a fragment thereof, is increased or generated, or if the activity b2474-protein is increased or generated in a non-human organism, like a microorganism or a plant cell, plant or part thereof, especially with non-targeted localization, whereby the respective line disclose in column 7 the fine chemical glycerol (lipid fraction). For example, an increase of the glycerol (lipid fraction) of at least 1 percent, particularly in a range of 16 to 28-percent is conferred as compared to a corresponding non-transformed wild type non-human organism.

[98982] Accordingly, in one embodiment, an increase of glycerol (lipid fraction) in a non-human organism, as compared to a corresponding non-transformed wild type non-human organism, is conferred in the process of the invention, if the activity of a polypeptide showing the activity of a putative transport system permease protein, or if the activity of the polypeptide B2546, preferably represented by SEQ ID NO. 99899, or a homolog or fragment thereof, or if the activity of a polypeptide encoded by a nucleic acid molecule comprising the nucleic acid SEQ ID NO. 99898, preferably the coding region thereof, or a homolog or fragment thereof, e.g. derived from Escherichia coli, is increased or generated. For example the activity of a nucleic acid molecule or a polypeptide comprising the nucleic acid, preferably the coding region thereof, or polypeptide or the consensus sequence or the polypeptide motif, as depicted in Table I, II or IV, application No. 19, column 5 or 8 in the respective same line as the nucleic acid molecule SEQ ID NO. 99898 or polypeptide SEQ ID NO. 99899, respectively, or a homolog or a fragment thereof, is increased or generated, or if the activity putative transport system permease protein is increased or generated in a non-human organism, like a microorganism or a plant cell, plant or part thereof, especially with non-targeted localization, whereby the respective line disclose in column 7 the fine chemical glycerol (lipid fraction). For example, an increase of the glycerol (lipid fraction) of at least 1 percent, particularly in a range of 22 to 24-percent is conferred as compared to a corresponding non-transformed wild type non-human organism.

[98983] Accordingly, in one embodiment, an increase of glycerol phosphate (lipid fraction) in a non-human organism, as compared to a corresponding non-transformed wild type non-human organism, is conferred in the process of the invention, if the activity of a polypeptide showing the activity of a putative transport system permease protein, or if the activity of the polypeptide B2546, preferably represented by SEQ ID NO. 99899, or a homolog or fragment thereof, or if the activity of a polypeptide encoded by a nucleic acid molecule comprising the nucleic acid SEQ ID NO. 99898, preferably the coding region thereof, or a homolog or fragment thereof, e.g. derived from Escherichia coli, is increased or generated. For example the activity of a nucleic acid molecule or a polypeptide comprising the nucleic acid, preferably the coding region thereof, or polypeptide or the consensus sequence or the polypeptide motif, as depicted in Table I, II or IV, application No. 19, column 5 or 8 in the respective same line as the nucleic acid molecule SEQ ID NO. 99898 or polypeptide SEQ ID NO. 99899, respectively, or a homolog or a fragment thereof, is increased or generated, or if the activity putative transport system permease protein is increased or generated in a non-human organism, like a microorganism or a plant cell, plant or part thereof, especially with non-targeted localization, whereby the respective line disclose in column 7 the fine chemical glycerol phosphate (lipid fraction). For example, an increase of the glycerol phosphate (lipid fraction) of at least 1 percent, particularly in a range of 18 to 52-percent is conferred as compared to a corresponding non-transformed wild type non-human organism.

[98984] Accordingly, in one embodiment, an increase of bis-glyceryl phosphate (polar fraction) in a non-human organism, as compared to a corresponding non-transformed wild type non-human organism, is conferred in the process of the invention, if the activity of a polypeptide showing the activity of a b2613-protein, or if the activity of the polypeptide B2613, preferably represented by SEQ ID NO. 40666, or a homolog or fragment thereof, or if the activity of a polypeptide encoded by a nucleic acid molecule comprising the nucleic acid SEQ ID NO. 40665, preferably the coding region thereof, or a homolog or fragment thereof, e.g. derived from Escherichia coli, is increased or generated. For example the activity of a nucleic acid molecule or a polypeptide comprising the nucleic acid, preferably the coding region thereof, or polypeptide or the consensus sequence or the polypeptide motif, as depicted in Table I, II or IV, application No. 19, column 5 or 8 in the respective same line as the nucleic acid molecule SEQ ID NO. 40665 or polypeptide SEQ ID NO. 40666, respectively, or a homolog or a fragment thereof, is increased or generated, or if the activity b2613-protein is increased or generated in a non-human organism, like a microorganism or a plant cell, plant or part thereof, especially with non-targeted localization, whereby the respective line disclose in column 7 the fine chemical bis-glyceryl phosphate (polar fraction). For example, an increase of the bis-glyceryl phosphate (polar fraction) of at least 1 percent, particularly in a range of 42 to 82-percent is conferred as compared to a corresponding non-transformed wild type non-human organism.

[98985] Accordingly, in one embodiment, an increase of glycerol (polar fraction) in a non-human organism, as compared to a corresponding non-transformed wild type non-human organism, is conferred in the process of the invention, if the activity of a polypeptide showing the activity of a transcriptional regulator, or if the activity of the polypeptide B2634, preferably represented by SEQ ID NO. 40727, or a homolog or fragment thereof, or if the activity of a polypeptide encoded by a nucleic acid molecule comprising the nucleic acid SEQ ID NO. 40726, preferably the coding region thereof, or a homolog or fragment thereof, e.g. derived from Escherichia coli, is increased or generated. For example the activity of a nucleic acid molecule or a polypeptide comprising the nucleic acid, preferably the coding region thereof, or polypeptide or the consensus sequence or the polypeptide motif, as depicted in Table I, II or IV, application No. 19, column 5 or 8 in the respective same line as the nucleic acid molecule SEQ ID NO. 40726 or polypeptide SEQ ID NO. 40727, respectively, or a homolog or a fragment thereof, is increased or generated, or if the activity transcriptional regulator is increased or generated in a non-human organism, like a microorganism or a plant cell, plant or part thereof, especially with non-targeted localization, whereby the respective line disclose in column 7 the fine chemical glycerol (polar fraction). For example, an increase of the glycerol (polar fraction) of at least 1 percent, particularly in a range of 58 to 125-percent is conferred as compared to a corresponding non-transformed wild type non-human organism.

[98986] Accordingly, in one embodiment, an increase of glycerol (lipid fraction) in a non-human organism, as compared to a corresponding non-transformed wild type non-human organism, is conferred in the process of the invention, if the activity of a polypeptide showing the activity of a b2673-protein, or if the activity of the polypeptide B2673, preferably represented by SEQ ID NO. 9245, or a homolog or fragment thereof, or if the activity of a polypeptide encoded by a nucleic acid molecule comprising the nucleic acid SEQ ID NO. 9244, preferably the coding region thereof, or a homolog or fragment thereof, e.g. derived from Escherichia coli, is increased or generated. For example the activity of a nucleic acid molecule or a polypeptide comprising the nucleic acid, preferably the coding region thereof, or polypeptide or the consensus sequence or the polypeptide motif, as depicted in Table I, II or IV, application No. 19, column 5 or 8 in the respective same line as the nucleic acid molecule SEQ ID NO. 9244 or polypeptide SEQ ID NO. 9245, respectively, or a homolog or a fragment thereof, is increased or generated, or if the activity b2673-protein is increased or generated in a non-human organism, like a microorganism or a plant cell, plant or part thereof, especially with non-targeted localization, whereby the respective line disclose in column 7 the fine chemical glycerol (lipid fraction). For example, an increase of the glycerol (lipid fraction) of at least 1 percent, particularly in a range of 17 to 20-percent is conferred as compared to a corresponding non-transformed wild type non-human organism.

[98987] Accordingly, in one embodiment, an increase of glycerol phosphate (lipid fraction) in a non-human organism, as compared to a corresponding non-transformed wild type non-human organism, is conferred in the process of the invention, if the activity of a polypeptide showing the activity of a b2673-protein, or if the activity of the polypeptide B2673, preferably represented by SEQ ID NO. 9245, or a homolog or fragment thereof, or if the activity of a polypeptide encoded by a nucleic acid molecule comprising the nucleic acid SEQ ID NO. 9244, preferably the coding region thereof, or a homolog or fragment thereof, e.g. derived from Escherichia coli, is increased or generated. For example the activity of a nucleic acid molecule or a polypeptide comprising the nucleic acid, preferably the coding region thereof, or polypeptide or the consensus sequence or the polypeptide motif, as depicted in Table I, II or IV, application No. 19, column 5 or 8 in the respective same line as the nucleic acid molecule SEQ ID NO. 9244 or polypeptide SEQ ID NO. 9245, respectively, or a homolog or a fragment thereof, is increased or generated, or if the activity b2673-protein is increased or generated in a non-human organism, like a microorganism or a plant cell, plant or part thereof, especially with non-targeted localization, whereby the respective line disclose in column 7 the fine chemical glycerol phosphate (lipid fraction). For example, an increase of the glycerol phosphate (lipid fraction) of at least 1 percent, particularly in a range of 19 to 47-percent is conferred as compared to a corresponding non-transformed wild type non-human organism.

[98988] Accordingly, in one embodiment, an increase of bis-glyceryl phosphate (polar fraction) in a non-human organism, as compared to a corresponding non-transformed wild type non-human organism, is conferred in the process of the invention, if the activity of a polypeptide showing the activity of a murein transglycosylase, or if the activity of the polypeptide B2701, preferably represented by SEQ ID NO. 80757, or a homolog or fragment thereof, or if the activity of a polypeptide encoded by a nucleic acid molecule comprising the nucleic acid SEQ ID NO. 80756, preferably the coding region thereof, or a homolog or fragment thereof, e.g. derived from Escherichia coli, is increased or generated. For example the activity of a nucleic acid molecule or a polypeptide comprising the nucleic acid, preferably the coding region thereof, or polypeptide or the consensus sequence or the polypeptide motif, as depicted in Table I, II or IV, application No. 19, column 5 or 8 in the respective same line as the nucleic acid molecule SEQ ID NO. 80756 or polypeptide SEQ ID NO. 80757, respectively, or a homolog or a fragment thereof, is increased or generated, or if the activity murein transglycosylase is increased or generated in a non-human organism, like a microorganism or a plant cell, plant or part thereof, especially with non-targeted localization, whereby the respective line disclose in column 7 the fine chemical bis-glyceryl phosphate (polar fraction). For example, an increase of the bis-glyceryl phosphate (polar fraction) of at least 1 percent, particularly in a range of 55 to 98-percent is conferred as compared to a corresponding non-transformed wild type non-human organism.

[98989] Accordingly, in one embodiment, an increase of triacylglycerol in a non-human organism, as compared to a corresponding non-transformed wild type non-human organism, is conferred in the process of the invention, if the activity of a polypeptide showing the activity of a transcriptional regulator, or if the activity of the polypeptide B2714, preferably represented by SEQ ID NO. 40742, or a homolog or fragment thereof, or if the activity of a polypeptide encoded by a nucleic acid molecule comprising the nucleic acid SEQ ID NO. 40741, preferably the coding region thereof, or a homolog or fragment thereof, e.g. derived from Escherichia coli, is increased or generated. For example the activity of a nucleic acid molecule or a polypeptide comprising the nucleic acid, preferably the coding region thereof, or polypeptide or the consensus sequence or the polypeptide motif, as depicted in Table I, II or IV, application No. 19, column 5 or 8 in the respective same line as the nucleic acid molecule SEQ ID NO. 40741 or polypeptide SEQ ID NO. 40742, respectively, or a homolog or a fragment thereof, is increased or generated, or if the activity transcriptional regulator is increased or generated in a non-human organism, like a microorganism or a plant cell, plant or part thereof, especially with non-targeted localization, whereby the respective line disclose in column 7 the fine chemical triacylglycerol. For example, an increase of the triacylglycerol of at least 1 percent, particularly in a range of 38 to 56-percent is conferred as compared to a corresponding non-transformed wild type non-human organism.

[98990] Accordingly, in one embodiment, an increase of glycerol (lipid fraction) in a non-human organism, as compared to a corresponding non-transformed wild type non-human organism, is conferred in the process of the invention, if the activity of a polypeptide showing the activity of a 2-C-methyl-D-erythritol 4-phosphate cytidylyltransferase, or if the activity of the polypeptide B2747, preferably represented by SEQ ID NO. 81076, or a homolog or fragment thereof, or if the activity of a polypeptide encoded by a nucleic acid molecule comprising the nucleic acid SEQ ID NO. 81075, preferably the coding region thereof, or a homolog or fragment thereof, e.g. derived from Escherichia coli, is increased or generated. For example the activity of a nucleic acid molecule or a polypeptide comprising the nucleic acid, preferably the coding region thereof, or polypeptide or the consensus sequence or the polypeptide motif, as depicted in Table I, II or IV, application No. 19, column 5 or 8 in the respective same line as the nucleic acid molecule SEQ ID NO. 81075 or polypeptide SEQ ID NO. 81076, respectively, or a homolog or a fragment thereof, is increased or generated, or if the activity 2-C-methyl-D-erythritol 4-phosphate cytidylyltransferase is increased or generated in a non-human organism, like a microorganism or a plant cell, plant or part thereof, especially with non-targeted localization, whereby the respective line disclose in column 7 the fine chemical glycerol (lipid fraction). For example, an increase of the glycerol (lipid fraction) of at least 1 percent, particularly in a range of 18 to 58-percent is conferred as compared to a corresponding non-transformed wild type non-human organism.

[98991] Accordingly, in one embodiment, an increase of triacylglycerol in a non-human organism, as compared to a corresponding non-transformed wild type non-human organism, is conferred in the process of the invention, if the activity of a polypeptide showing the activity of a amino-acid acetyltransferase, or if the activity of the polypeptide B2818, preferably represented by SEQ ID NO. 81577, or a homolog or fragment thereof, or if the activity of a polypeptide encoded by a nucleic acid molecule comprising the nucleic acid SEQ ID NO. 81576, preferably the coding region thereof, or a homolog or fragment thereof, e.g. derived from Escherichia coli, is increased or generated. For example the activity of a nucleic acid molecule or a polypeptide comprising the nucleic acid, preferably the coding region thereof, or polypeptide or the consensus sequence or the polypeptide motif, as depicted in Table I, II or IV, application No. 19, column 5 or 8 in the respective same line as the nucleic acid molecule SEQ ID NO. 81576 or polypeptide SEQ ID NO. 81577, respectively, or a homolog or a fragment thereof, is increased or generated, or if the activity amino-acid acetyltransferase is increased or generated in a non-human organism, like a microorganism or a plant cell, plant or part thereof, especially with non-targeted localization, whereby the respective line disclose in column 7 the fine chemical triacylglycerol. For example, an increase of the triacylglycerol of at least 1 percent, particularly in a range of 30 to 47-percent is conferred as compared to a corresponding non-transformed wild type non-human organism.

[98992] Accordingly, in one embodiment, an increase of bis-glyceryl phosphate (polar fraction) in a non-human organism, as compared to a corresponding non-transformed wild type non-human organism, is conferred in the process of the invention, if the activity of a polypeptide showing the activity of a b3083-protein, or if the activity of the polypeptide B3083, preferably represented by SEQ ID NO. 82425, or a homolog or fragment thereof, or if the activity of a polypeptide encoded by a nucleic acid molecule comprising the nucleic acid SEQ ID NO. 82424, preferably the coding region thereof, or a homolog or fragment thereof, e.g. derived from Escherichia coli, is increased or generated. For example the activity of a nucleic acid molecule or a polypeptide comprising the nucleic acid, preferably the coding region thereof, or polypeptide or the consensus sequence or the polypeptide motif, as depicted in Table I, II or IV, application No. 19, column 5 or 8 in the respective same line as the nucleic acid molecule SEQ ID NO. 82424 or polypeptide SEQ ID NO. 82425, respectively, or a homolog or a fragment thereof, is increased or generated, or if the activity b3083-protein is increased or generated in a non-human organism, like a microorganism or a plant cell, plant or part thereof, especially with non-targeted localization, whereby the respective line disclose in column 7 the fine chemical bis-glyceryl phosphate (polar fraction).

[98993] For example, an increase of the bis-glyceryl phosphate (polar fraction) of at least 1 percent, particularly in a range of 43 to 60-percent is conferred as compared to a corresponding non-transformed wild type non-human organism.

[98994] Accordingly, in one embodiment, an increase of bis-glyceryl phosphate (polar fraction) in a non-human organism, as compared to a corresponding non-transformed wild type non-human organism, is conferred in the process of the invention, if the activity of a polypeptide showing the activity of a threonine/serine transporter, or if the activity of the polypeptide B3116, preferably represented by SEQ ID NO. 153247, or a homolog or fragment thereof, or if the activity of a polypeptide encoded by a nucleic acid molecule comprising the nucleic acid SEQ ID NO. 153246, preferably the coding region thereof, or a homolog or fragment thereof, e.g. derived from Escherichia coli, is increased or generated. For example the activity of a nucleic acid molecule or a polypeptide comprising the nucleic acid, preferably the coding region thereof, or polypeptide or the consensus sequence or the polypeptide motif, as depicted in Table I, II or IV, application No. 19, column 5 or 8 in the respective same line as the nucleic acid molecule SEQ ID NO. 153246 or polypeptide SEQ ID NO. 153247, respectively, or a homolog or a fragment thereof, is increased or generated, or if the activity threonine/serine transporter is increased or generated in a non-human organism, like a microorganism or a plant cell, plant or part thereof, especially with non-targeted localization, whereby the respective line disclose in column 7 the fine chemical bis-glyceryl phosphate (polar fraction). For example, an increase of the bis-glyceryl phosphate (polar fraction) of at least 1 percent, particularly in a range of 38 to 121-percent is conferred as compared to a corresponding non-transformed wild type non-human organism.

[98995] Accordingly, in one embodiment, an increase of bis-glyceryl phosphate (polar fraction) in a non-human organism, as compared to a corresponding non-transformed wild type non-human organism, is conferred in the process of the invention, if the activity of a polypeptide showing the activity of a b3160-protein, or if the activity of the polypeptide B3160, preferably represented by SEQ ID NO. 153396, or a homolog or fragment thereof, or if the activity of a polypeptide encoded by a nucleic acid molecule comprising the nucleic acid SEQ ID NO. 153395, preferably the coding region thereof, or a homolog or fragment thereof, e.g. derived from Escherichia coli, is increased or generated. For example the activity of a nucleic acid molecule or a polypeptide comprising the nucleic acid, preferably the coding region thereof, or polypeptide or the consensus sequence or the polypeptide motif, as depicted in Table I, II or IV, application No. 19, column 5 or 8 in the respective same line as the nucleic acid molecule SEQ ID NO. 153395 or polypeptide SEQ ID NO. 153396, respectively, or a homolog or a fragment thereof, is increased or generated, or if the activity b3160-protein is increased or generated in a non-human organism, like a microorganism or a plant cell, plant or part thereof, especially with non-targeted localization, whereby the respective line disclose in column 7 the fine chemical bis-glyceryl phosphate (polar fraction). For example, an increase of the bis-glyceryl phosphate (polar fraction) of at least 1 percent, particularly in a range of 47 to 100-percent is conferred as compared to a corresponding non-transformed wild type non-human organism.

[98996] Accordingly, in one embodiment, an increase of bis-glyceryl phosphate (polar fraction) in a non-human organism, as compared to a corresponding non-transformed wild type non-human organism, is conferred in the process of the invention, if the activity of a polypeptide showing the activity of a argininosuccinate synthetase, or if the activity of the polypeptide B3172, preferably represented by SEQ ID NO. 153619, or a homolog or fragment thereof, or if the activity of a polypeptide encoded by a nucleic acid molecule comprising the nucleic acid SEQ ID NO. 153618, preferably the coding region thereof, or a homolog or fragment thereof, e.g. derived from Escherichia coli, is increased or generated. For example the activity of a nucleic acid molecule or a polypeptide comprising the nucleic acid, preferably the coding region thereof, or polypeptide or the consensus sequence or the polypeptide motif, as depicted in Table I, II or IV, application No. 19, column 5 or 8 in the respective same line as the nucleic acid molecule SEQ ID NO. 153618 or polypeptide SEQ ID NO. 153619, respectively, or a homolog or a fragment thereof, is increased or generated, or if the activity argininosuccinate synthetase is increased or generated in a non-human organism, like a microorganism or a plant cell, plant or part thereof, especially with non-targeted localization, whereby the respective line disclose in column 7 the fine chemical bis-glyceryl phosphate (polar fraction). For example, an increase of the bis-glyceryl phosphate (polar fraction) of at least 1 percent, particularly in a range of 47 to 115-percent is conferred as compared to a corresponding non-transformed wild type non-human organism.

[98997] Accordingly, in one embodiment, an increase of glycerol-3-phosphate (polar fraction) in a non-human organism, as compared to a corresponding non-transformed wild type non-human organism, is conferred in the process of the invention, if the activity of a polypeptide showing the activity of a acetyl CoA carboxylase, or if the activity of the polypeptide B3256, preferably represented by SEQ ID NO. 9493, or a homolog or fragment thereof, or if the activity of a polypeptide encoded by a nucleic acid molecule comprising the nucleic acid SEQ ID NO. 9492, preferably the coding region thereof, or a homolog or fragment thereof, e.g. derived from Escherichia coli, is increased or generated. For example the activity of a nucleic acid molecule or a polypeptide comprising the nucleic acid, preferably the coding region thereof, or polypeptide or the consensus sequence or the polypeptide motif, as depicted in Table I, II or IV, application No. 19, column 5 or 8 in the respective same line as the nucleic acid molecule SEQ ID NO. 9492 or polypeptide SEQ ID NO. 9493, respectively, or a homolog or a fragment thereof, is increased or generated, or if the activity acetyl CoA carboxylase is increased or generated in a non-human organism, like a microorganism or a plant cell, plant or part thereof, especially with non-targeted localization, whereby the respective line disclose in column 7 the fine chemical glycerol-3-phosphate (polar fraction). For example, an increase of the glycerol-3-phosphate (polar fraction) of at least 1 percent, particularly in a range of 72 to 110-percent is conferred as compared to a corresponding non-transformed wild type non-human organism.

[98998] Accordingly, in one embodiment, an increase of bis-glyceryl phosphate (polar fraction) in a non-human organism, as compared to a corresponding non-transformed wild type non-human organism, is conferred in the process of the invention, if the activity of a polypeptide showing the activity of a methyltransferase, or if the activity of the polypeptide B3262, preferably represented by SEQ ID NO. 42503, or a homolog or fragment thereof, or if the activity of a polypeptide encoded by a nucleic acid molecule comprising the nucleic acid SEQ ID NO. 42502, preferably the coding region thereof, or a homolog or fragment thereof, e.g. derived from Escherichia coli, is increased or generated. For example the activity of a nucleic acid molecule or a polypeptide comprising the nucleic acid, preferably the coding region thereof, or polypeptide or the consensus sequence or the polypeptide motif, as depicted in Table I, II or IV, application No. 19, column 5 or 8 in the respective same line as the nucleic acid molecule SEQ ID NO. 42502 or polypeptide SEQ ID NO. 42503, respectively, or a homolog or a fragment thereof, is increased or generated, or if the activity methyltransferase is increased or generated in a non-human organism, like a microorganism or a plant cell, plant or part thereof, especially with non-targeted localization, whereby the respective line disclose in column 7 the fine chemical bis-glyceryl phosphate (polar fraction). For example, an increase of the bis-glyceryl phosphate (polar fraction) of at least 1 percent, particularly in a range of 59 to 124-percent is conferred as compared to a corresponding non-transformed wild type non-human organism.

[98999] Accordingly, in one embodiment, an increase of glycerol (lipid fraction) in a non-human organism, as compared to a corresponding non-transformed wild type non-human organism, is conferred in the process of the invention, if the activity of a polypeptide showing the activity of a methyltransferase, or if the activity of the polypeptide B3262, preferably represented by SEQ ID NO. 42503, or a homolog or fragment thereof, or if the activity of a polypeptide encoded by a nucleic acid molecule comprising the nucleic acid SEQ ID NO. 42502, preferably the coding region thereof, or a homolog or fragment thereof, e.g. derived from Escherichia coli, is increased or generated. For example the activity of a nucleic acid molecule or a polypeptide comprising the nucleic acid, preferably the coding region thereof, or polypeptide or the consensus sequence or the polypeptide motif, as depicted in Table I, II or IV, application No. 19, column 5 or 8 in the respective same line as the nucleic acid molecule SEQ ID NO. 42502 or polypeptide SEQ ID NO. 42503, respectively, or a homolog or a fragment thereof, is increased or generated, or if the activity methyltransferase is increased or generated in a non-human organism, like a microorganism or a plant cell, plant or part thereof, especially with non-targeted localization, whereby the respective line disclose in column 7 the fine chemical glycerol (lipid fraction). For example, an increase of the glycerol (lipid fraction) of at least 1 percent, particularly in a range of 16 to 60-percent is conferred as compared to a corresponding non-transformed wild type non-human organism.

[99000] Accordingly, in one embodiment, an increase of bis-glyceryl phosphate (polar fraction) in a non-human organism, as compared to a corresponding non-transformed wild type non-human organism, is conferred in the process of the invention, if the activity of a polypeptide showing the activity of a FKBP-type peptidyl-prolyl cis-trans isomerase (rotamase), or if the activity of the polypeptide B3347, preferably represented by SEQ ID NO. 153814, or a homolog or fragment thereof, or if the activity of a polypeptide encoded by a nucleic acid molecule comprising the nucleic acid SEQ ID NO. 153813, preferably the coding region thereof, or a homolog or fragment thereof, e.g. derived from Escherichia coli, is increased or generated. For example the activity of a nucleic acid molecule or a polypeptide comprising the nucleic acid, preferably the coding region thereof, or polypeptide or the consensus sequence or the polypeptide motif, as depicted in Table I, II or IV, application No. 19, column 5 or 8 in the respective same line as the nucleic acid molecule SEQ ID NO. 153813 or polypeptide SEQ ID NO. 153814, respectively, or a homolog or a fragment thereof, is increased or generated, or if the activity FKBP-type peptidyl-prolyl cis-trans isomerase (rotamase) is increased or generated in a non-human organism, like a microorganism or a plant cell, plant or part thereof, especially with non-targeted localization, whereby the respective line disclose in column 7 the fine chemical bis-glyceryl phosphate (polar fraction). For example, an increase of the bis-glyceryl phosphate (polar fraction) of at least 1 percent, particularly in a range of 60 to 198-percent is conferred as compared to a corresponding non-transformed wild type non-human organism.

[99001] Accordingly, in one embodiment, an increase of bis-glyceryl phosphate (polar fraction) in a non-human organism, as compared to a corresponding non-transformed wild type non-human organism, is conferred in the process of the invention, if the activity of a polypeptide showing the activity of a high-affinity branched-chain amino acid transport protein, or if the activity of the polypeptide B3457, preferably represented by SEQ ID NO. 146473, or a homolog or fragment thereof, or if the activity of a polypeptide encoded by a nucleic acid molecule comprising the nucleic acid SEQ ID NO. 146472, preferably the coding region thereof, or a homolog or fragment thereof, e.g. derived from Escherichia coli, is increased or generated. For example the activity of a nucleic acid molecule or a polypeptide comprising the nucleic acid, preferably the coding region thereof, or polypeptide or the consensus sequence or the polypeptide motif, as depicted in Table I, II or IV, application No. 19, column 5 or 8 in the respective same line as the nucleic acid molecule SEQ ID NO. 146472 or polypeptide SEQ ID NO. 146473, respectively, or a homolog or a fragment thereof, is increased or generated, or if the activity high-affinity branched-chain amino acid transport protein is increased or generated in a non-human organism, like a microorganism or a plant cell, plant or part thereof, especially with non-targeted localization, whereby the respective line disclose in column 7 the fine chemical bis-glyceryl phosphate (polar fraction). For example, an increase of the bis-glyceryl phosphate (polar fraction) of at least 1 percent, particularly in a range of 37 to 71-percent is conferred as compared to a corresponding non-transformed wild type non-human organism.

[99002] Accordingly, in one embodiment, an increase of bis-glyceryl phosphate (polar fraction) in a non-human organism, as compared to a corresponding non-transformed wild type non-human organism, is conferred in the process of the invention, if the activity of a polypeptide showing the activity of a b3777-protein, or if the activity of the polypeptide B3777, preferably represented by SEQ ID NO. 136099, or a homolog or fragment thereof, or if the activity of a polypeptide encoded by a nucleic acid molecule comprising the nucleic acid SEQ ID NO. 136098, preferably the coding region thereof, or a homolog or fragment thereof, e.g. derived from Escherichia coli, is increased or generated. For example the activity of a nucleic acid molecule or a polypeptide comprising the nucleic acid, preferably the coding region thereof, or polypeptide or the consensus sequence or the polypeptide motif, as depicted in Table I, II or IV, application No. 19, column 5 or 8 in the respective same line as the nucleic acid molecule SEQ ID NO. 136098 or polypeptide SEQ ID NO. 136099, respectively, or a homolog or a fragment thereof, is increased or generated, or if the activity b3777-protein is increased or generated in a non-human organism, like a microorganism or a plant cell, plant or part thereof, especially with non-targeted localization, whereby the respective line disclose in column 7 the fine chemical bis-glyceryl phosphate (polar fraction). For example, an increase of the bis-glyceryl phosphate (polar fraction) of at least 1 percent, particularly in a range of 39 to 85-percent is conferred as compared to a corresponding non-transformed wild type non-human organism.

[99003] Accordingly, in one embodiment, an increase of bis-glyceryl phosphate (polar fraction) in a non-human organism, as compared to a corresponding non-transformed wild type non-human organism, is conferred in the process of the invention, if the activity of a polypeptide showing the activity of a b3791-protein, or if the activity of the polypeptide B3791, preferably represented by SEQ ID NO. 83727, or a homolog or fragment thereof, or if the activity of a polypeptide encoded by a nucleic acid molecule comprising the nucleic acid SEQ ID NO. 83726, preferably the coding region thereof, or a homolog or fragment thereof, e.g. derived from Escherichia coli, is increased or generated. For example the activity of a nucleic acid molecule or a polypeptide comprising the nucleic acid, preferably the coding region thereof, or polypeptide or the consensus sequence or the polypeptide motif, as depicted in Table I, II or IV, application No. 19, column 5 or 8 in the respective same line as the nucleic acid molecule SEQ ID NO. 83726 or polypeptide SEQ ID NO. 83727, respectively, or a homolog or a fragment thereof, is increased or generated, or if the activity b3791-protein is increased or generated in a non-human organism, like a microorganism or a plant cell, plant or part thereof, especially with non-targeted localization, whereby the respective line disclose in column 7 the fine chemical bis-glyceryl phosphate (polar fraction). For example, an increase of the bis-glyceryl phosphate (polar fraction) of at least 1 percent, particularly in a range of 40 to 93-percent is conferred as compared to a corresponding non-transformed wild type non-human organism.

[99004] Accordingly, in one embodiment, an increase of bis-glyceryl phosphate (polar fraction) in a non-human organism, as compared to a corresponding non-transformed wild type non-human organism, is conferred in the process of the invention, if the activity of a polypeptide showing the activity of a enterobacterial common antigen polymerase, or if the activity of the polypeptide B3793, preferably represented by SEQ ID NO. 43801, or a homolog or fragment thereof, or if the activity of a polypeptide encoded by a nucleic acid molecule comprising the nucleic acid SEQ ID NO. 43800, preferably the coding region thereof, or a homolog or fragment thereof, e.g. derived from Escherichia coli, is increased or generated. For example the activity of a nucleic acid molecule or a polypeptide comprising the nucleic acid, preferably the coding region thereof, or polypeptide or the consensus sequence or the polypeptide motif, as depicted in Table I, II or IV, application No. 19, column 5 or 8 in the respective same line as the nucleic acid molecule SEQ ID NO. 43800 or polypeptide SEQ ID NO. 43801, respectively, or a homolog or a fragment thereof, is increased or generated, or if the activity enterobacterial common antigen polymerase is increased or generated in a non-human organism, like a microorganism or a plant cell, plant or part thereof, especially with non-targeted localization, whereby the respective line disclose in column 7 the fine chemical bis-glyceryl phosphate (polar fraction). For example, an increase of the bis-glyceryl phosphate (polar fraction) of at least 1 percent, particularly in a range of 38 to 117-percent is conferred as compared to a corresponding non-transformed wild type non-human organism.

[99005] Accordingly, in one embodiment, an increase of triacylglycerol in a non-human organism, as compared to a corresponding non-transformed wild type non-human organism, is conferred in the process of the invention, if the activity of a polypeptide showing the activity of a b3989-protein, or if the activity of the polypeptide B3989, preferably represented by SEQ ID NO. 44373, or a homolog or fragment thereof, or if the activity of a polypeptide encoded by a nucleic acid molecule comprising the nucleic acid SEQ ID NO. 44372, preferably the coding region thereof, or a homolog or fragment thereof, e.g. derived from Escherichia coli, is increased or generated. For example the activity of a nucleic acid molecule or a polypeptide comprising the nucleic acid, preferably the coding region thereof, or polypeptide or the consensus sequence or the polypeptide motif, as depicted in Table I, II or IV, application No. 19, column 5 or 8 in the respective same line as the nucleic acid molecule SEQ ID NO. 44372 or polypeptide SEQ ID NO. 44373, respectively, or a homolog or a fragment thereof, is increased or generated, or if the activity b3989-protein is increased or generated in a non-human organism, like a microorganism or a plant cell, plant or part thereof, especially with non-targeted localization, whereby the respective line disclose in column 7 the fine chemical triacylglycerol. For example, an increase of the triacylglycerol of at least 1 percent, particularly in a range of 33 to 109-percent is conferred as compared to a corresponding non-transformed wild type non-human organism.

[99006] Accordingly, in one embodiment, an increase of bis-glyceryl phosphate (polar fraction) in a non-human organism, as compared to a corresponding non-transformed wild type non-human organism, is conferred in the process of the invention, if the activity of a polypeptide showing the activity of a b4029-protein, or if the activity of the polypeptide B4029, preferably represented by SEQ ID NO. 10741, or a homolog or fragment thereof, or if the activity of a polypeptide encoded by a nucleic acid molecule comprising the nucleic acid SEQ ID NO. 10740, preferably the coding region thereof, or a homolog or fragment thereof, e.g. derived from Escherichia coli, is increased or generated. For example the activity of a nucleic acid molecule or a polypeptide comprising the nucleic acid, preferably the coding region thereof, or polypeptide or the consensus sequence or the polypeptide motif, as depicted in Table I, II or IV, application No. 19, column 5 or 8 in the respective same line as the nucleic acid molecule SEQ ID NO. 10740 or polypeptide SEQ ID NO. 10741, respectively, or a homolog or a fragment thereof, is increased or generated, or if the activity b4029-protein is increased or generated in a non-human organism, like a microorganism or a plant cell, plant or part thereof, especially with non-targeted localization, whereby the respective line disclose in column 7 the fine chemical bis-glyceryl phosphate (polar fraction). For example, an increase of the bis-glyceryl phosphate (polar fraction) of at least 1 percent, particularly in a range of 38 to 220-percent is conferred as compared to a corresponding non-transformed wild type non-human organism.

[99007] Accordingly, in one embodiment, an increase of triacylglycerol in a non-human organism, as compared to a corresponding non-transformed wild type non-human organism, is conferred in the process of the invention, if the activity of a polypeptide showing the activity of a b4050-protein, or if the activity of the polypeptide B4050, preferably represented by SEQ ID NO. 106533, or a homolog or fragment thereof, or if the activity of a polypeptide encoded by a nucleic acid molecule comprising the nucleic acid SEQ ID NO. 106532, preferably the coding region thereof, or a homolog or fragment thereof, e.g. derived from Escherichia coli, is increased or generated. For example the activity of a nucleic acid molecule or a polypeptide comprising the nucleic acid, preferably the coding region thereof, or polypeptide or the consensus sequence or the polypeptide motif, as depicted in Table I, II or IV, application No. 19, column 5 or 8 in the respective same line as the nucleic acid molecule SEQ ID NO. 106532 or polypeptide SEQ ID NO. 106533, respectively, or a homolog or a fragment thereof, is increased or generated, or if the activity b4050-protein is increased or generated in a non-human organism, like a microorganism or a plant cell, plant or part thereof, especially with non-targeted localization, whereby the respective line disclose in column 7 the fine chemical triacylglycerol. For example, an increase of the triacylglycerol of at least 1 percent, particularly in a range of 50 to 173-percent is conferred as compared to a corresponding non-transformed wild type non-human organism.

[99008] Accordingly, in one embodiment, an increase of bis-glyceryl phosphate (polar fraction) in a non-human organism, as compared to a corresponding non-transformed wild type non-human organism, is conferred in the process of the invention, if the activity of a polypeptide showing the activity of a lysyl-tRNA synthetase, or if the activity of the polypeptide B4129, preferably represented by SEQ ID NO. 44663, or a homolog or fragment thereof, or if the activity of a polypeptide encoded by a nucleic acid molecule comprising the nucleic acid SEQ ID NO. 44662, preferably the coding region thereof, or a homolog or fragment thereof, e.g. derived from Escherichia coli, is increased or generated. For example the activity of a nucleic acid molecule or a polypeptide comprising the nucleic acid, preferably the coding region thereof, or polypeptide or the consensus sequence or the polypeptide motif, as depicted in Table I, II or IV, application No. 19, column 5 or 8 in the respective same line as the nucleic acid molecule SEQ ID NO. 44662 or polypeptide SEQ ID NO. 44663, respectively, or a homolog or a fragment thereof, is increased or generated, or if the activity lysyl-tRNA synthetase is increased or generated in a non-human organism, like a microorganism or a plant cell, plant or part thereof, especially with non-targeted localization, whereby the respective line disclose in column 7 the fine chemical bis-glyceryl phosphate (polar fraction). For example, an increase of the bis-glyceryl phosphate (polar fraction) of at least 1 percent, particularly in a range of 39 to 79-percent is conferred as compared to a corresponding non-transformed wild type non-human organism.

[99009] Accordingly, in one embodiment, an increase of glycerol-3-phosphate (polar fraction) in a non-human organism, as compared to a corresponding non-transformed wild type non-human organism, is conferred in the process of the invention, if the activity of a polypeptide showing the activity of a purine-nucleoside phosphorylase, or if the activity of the polypeptide B4384, preferably represented by SEQ ID NO. 45557, or a homolog or fragment thereof, or if the activity of a polypeptide encoded by a nucleic acid molecule comprising the nucleic acid SEQ ID NO. 45556, preferably the coding region thereof, or a homolog or fragment thereof, e.g. derived from Escherichia coli, is increased or generated. For example the activity of a nucleic acid molecule or a polypeptide comprising the nucleic acid, preferably the coding region thereof, or polypeptide or the consensus sequence or the polypeptide motif, as depicted in Table I, II or IV, application No. 19, column 5 or 8 in the respective same line as the nucleic acid molecule SEQ ID NO. 45556 or polypeptide SEQ ID NO. 45557, respectively, or a homolog or a fragment thereof, is increased or generated, or if the activity purine-nucleoside phosphorylase is increased or generated in a non-human organism, like a microorganism or a plant cell, plant or part thereof, especially with non-targeted localization, whereby the respective line disclose in column 7 the fine chemical glycerol-3-phosphate (polar fraction). For example, an increase of the glycerol-3-phosphate (polar fraction) of at least 1 percent, particularly in a range of 45 to 83-percent is conferred as compared to a corresponding non-transformed wild type non-human organism.

[99010] Accordingly, in one embodiment, an increase of bis-glyceryl phosphate (polar fraction) in a non-human organism, as compared to a corresponding non-transformed wild type non-human organism, is conferred in the process of the invention, if the activity of a polypeptide showing the activity of a glutaredoxin, or if the activity of the polypeptide GM02LC12622, preferably represented by SEQ ID NO. 10812, or a homolog or fragment thereof, or if the activity of a polypeptide encoded by a nucleic acid molecule comprising the nucleic acid SEQ ID NO. 10811, preferably the coding region thereof, or a homolog or fragment thereof, e.g. derived from Glycine max, is increased or generated. For example the activity of a nucleic acid molecule or a polypeptide comprising the nucleic acid, preferably the coding region thereof, or polypeptide or the consensus sequence or the polypeptide motif, as depicted in Table I, II or IV, application No. 19, column 5 or 8 in the respective same line as the nucleic acid molecule SEQ ID NO. 10811 or polypeptide SEQ ID NO. 10812, respectively, or a homolog or a fragment thereof, is increased or generated, or if the activity glutaredoxin is increased or generated in a non-human organism, like a microorganism or a plant cell, plant or part thereof, especially with non-targeted localization, whereby the respective line disclose in column 7 the fine chemical bis-glyceryl phosphate (polar fraction). For example, an increase of the bis-glyceryl phosphate (polar fraction) of at least 1 percent, particularly in a range of 41 to 98-percent is conferred as compared to a corresponding non-transformed wild type non-human organism.

[99011] Accordingly, in one embodiment, an increase of glycerol phosphate (lipid fraction) in a non-human organism, as compared to a corresponding non-transformed wild type non-human organism, is conferred in the process of the invention, if the activity of a polypeptide showing the activity of a glutaredoxin, or if the activity of the polypeptide GM02LC12622, preferably represented by SEQ ID NO. 10812, or a homolog or fragment thereof, or if the activity of a polypeptide encoded by a nucleic acid molecule comprising the nucleic acid SEQ ID NO. 10811, preferably the coding region thereof, or a homolog or fragment thereof, e.g. derived from Glycine max, is increased or generated. For example the activity of a nucleic acid molecule or a polypeptide comprising the nucleic acid, preferably the coding region thereof, or polypeptide or the consensus sequence or the polypeptide motif, as depicted in Table I, II or IV, application No. 19, column 5 or 8 in the respective same line as the nucleic acid molecule SEQ ID NO. 10811 or polypeptide SEQ ID NO. 10812, respectively, or a homolog or a fragment thereof, is increased or generated, or if the activity glutaredoxin is increased or generated in a non-human organism, like a microorganism or a plant cell, plant or part thereof, especially with non-targeted localization, whereby the respective line disclose in column 7 the fine chemical glycerol phosphate (lipid fraction). For example, an increase of the glycerol phosphate (lipid fraction) of at least 1 percent, particularly in a range of 18 to 34-percent is conferred as compared to a corresponding non-transformed wild type non-human organism.

[99012] Accordingly, in one embodiment, an increase of bis-glyceryl phosphate (polar fraction) in a non-human organism, as compared to a corresponding non-transformed wild type non-human organism, is conferred in the process of the invention, if the activity of a polypeptide showing the activity of a GM02LC17485-protein, or if the activity of the polypeptide GM02LC17485, preferably represented by SEQ ID NO. 46406, or a homolog or fragment thereof, or if the activity of a polypeptide encoded by a nucleic acid molecule comprising the nucleic acid SEQ ID NO. 46405, preferably the coding region thereof, or a homolog or fragment thereof, e.g. derived from Glycine max, is increased or generated. For example the activity of a nucleic acid molecule or a polypeptide comprising the nucleic acid, preferably the coding region thereof, or polypeptide or the consensus sequence or the polypeptide motif, as depicted in Table I, II or IV, application No. 19, column 5 or 8 in the respective same line as the nucleic acid molecule SEQ ID NO. 46405 or polypeptide SEQ ID NO. 46406, respectively, or a homolog or a fragment thereof, is increased or generated, or if the activity GM02LC17485-protein is increased or generated in a non-human organism, like a microorganism or a plant cell, plant or part thereof, especially with non-targeted localization, whereby the respective line disclose in column 7 the fine chemical bis-glyceryl phosphate (polar fraction). For example, an increase of the bis-glyceryl phosphate (polar fraction) of at least 1 percent, particularly in a range of 69 to 112-percent is conferred as compared to a corresponding non-transformed wild type non-human organism.

[99013] Accordingly, in one embodiment, an increase of glycerol (lipid fraction) in a non-human organism, as compared to a corresponding non-transformed wild type non-human organism, is conferred in the process of the invention, if the activity of a polypeptide showing the activity of a transcription factor, or if the activity of the polypeptide GM02LC19289, preferably represented by SEQ ID NO. 46752, or a homolog or fragment thereof, or if the activity of a polypeptide encoded by a nucleic acid molecule comprising the nucleic acid SEQ ID NO. 46751, preferably the coding region thereof, or a homolog or fragment thereof, e.g. derived from Glycine max, is increased or generated. For example the activity of a nucleic acid molecule or a polypeptide comprising the nucleic acid, preferably the coding region thereof, or polypeptide or the consensus sequence or the polypeptide motif, as depicted in Table I, II or IV, application No. 19, column 5 or 8 in the respective same line as the nucleic acid molecule SEQ ID NO. 46751 or polypeptide SEQ ID NO. 46752, respectively, or a homolog or a fragment thereof, is increased or generated, or if the activity transcription factor is increased or generated in a non-human organism, like a microorganism or a plant cell, plant or part thereof, especially with non-targeted localization, whereby the respective line disclose in column 7 the fine chemical glycerol (lipid fraction). For example, an increase of the glycerol (lipid fraction) of at least 1 percent, particularly in a range of 25 to 59-percent is conferred as compared to a corresponding non-transformed wild type non-human organism.

[99014] Accordingly, in one embodiment, an increase of glycerol phosphate (lipid fraction) in a non-human organism, as compared to a corresponding non-transformed wild type non-human organism, is conferred in the process of the invention, if the activity of a polypeptide showing the activity of a transcription factor, or if the activity of the polypeptide GM02LC19289, preferably represented by SEQ ID NO. 46752, or a homolog or fragment thereof, or if the activity of a polypeptide encoded by a nucleic acid molecule comprising the nucleic acid SEQ ID NO. 46751, preferably the coding region thereof, or a homolog or fragment thereof, e.g. derived from Glycine max, is increased or generated. For example the activity of a nucleic acid molecule or a polypeptide comprising the nucleic acid, preferably the coding region thereof, or polypeptide or the consensus sequence or the polypeptide motif, as depicted in Table I, II or IV, application No. 19, column 5 or 8 in the respective same line as the nucleic acid molecule SEQ ID NO. 46751 or polypeptide SEQ ID NO. 46752, respectively, or a homolog or a fragment thereof, is increased or generated, or if the activity transcription factor is increased or generated in a non-human organism, like a microorganism or a plant cell, plant or part thereof, especially with non-targeted localization, whereby the respective line disclose in column 7 the fine chemical glycerol phosphate (lipid fraction). For example, an increase of the glycerol phosphate (lipid fraction) of at least 1 percent, particularly in a range of 18 to 82-percent is conferred as compared to a corresponding non-transformed wild type non-human organism.

[99015] Accordingly, in one embodiment, an increase of glycerol (polar fraction) in a non-human organism, as compared to a corresponding non-transformed wild type non-human organism, is conferred in the process of the invention, if the activity of a polypeptide showing the activity of a transcription factor, or if the activity of the polypeptide GM02LC21368, preferably represented by SEQ ID NO. 84199, or a homolog or fragment thereof, or if the activity of a polypeptide encoded by a nucleic acid molecule comprising the nucleic acid SEQ ID NO. 84198, preferably the coding region thereof, or a homolog or fragment thereof, e.g. derived from Glycine max, is increased or generated. For example the activity of a nucleic acid molecule or a polypeptide comprising the nucleic acid, preferably the coding region thereof, or polypeptide or the consensus sequence or the polypeptide motif, as depicted in Table I, II or IV, application No. 19, column 5 or 8 in the respective same line as the nucleic acid molecule SEQ ID NO. 84198 or polypeptide SEQ ID NO. 84199, respectively, or a homolog or a fragment thereof, is increased or generated, or if the activity transcription factor is increased or generated in a non-human organism, like a microorganism or a plant cell, plant or part thereof, especially with non-targeted localization, whereby the respective line disclose in column 7 the fine chemical glycerol (polar fraction). For example, an increase of the glycerol (polar fraction) of at least 1 percent, particularly in a range of 75 to 89-percent is conferred as compared to a corresponding non-transformed wild type non-human organism.

[99016] Accordingly, in one embodiment, an increase of glycerol phosphate (lipid fraction) in a non-human organism, as compared to a corresponding non-transformed wild type non-human organism, is conferred in the process of the invention, if the activity of a polypeptide showing the activity of a cyclin D, or if the activity of the polypeptide GM02LC44512, preferably represented by SEQ ID NO. 46851, or a homolog or fragment thereof, or if the activity of a polypeptide encoded by a nucleic acid molecule comprising the nucleic acid SEQ ID NO. 46850, preferably the coding region thereof, or a homolog or fragment thereof, e.g. derived from Glycine max, is increased or generated. For example the activity of a nucleic acid molecule or a polypeptide comprising the nucleic acid, preferably the coding region thereof, or polypeptide or the consensus sequence or the polypeptide motif, as depicted in Table I, II or IV, application No. 19, column 5 or 8 in the respective same line as the nucleic acid molecule SEQ ID NO. 46850 or polypeptide SEQ ID NO. 46851, respectively, or a homolog or a fragment thereof, is increased or generated, or if the activity cyclin D is increased or generated in a non-human organism, like a microorganism or a plant cell, plant or part thereof, especially with non-targeted localization, whereby the respective line disclose in column 7 the fine chemical glycerol phosphate (lipid fraction). For example, an increase of the glycerol phosphate (lipid fraction) of at least 1 percent, particularly in a range of 20 to 30-percent is conferred as compared to a corresponding non-transformed wild type non-human organism.

[99017] Accordingly, in one embodiment, an increase of bis-glyceryl phosphate (polar fraction) in a non-human organism, as compared to a corresponding non-transformed wild type non-human organism, is conferred in the process of the invention, if the activity of a polypeptide showing the activity of a nitrate/nitrite transport protein, or if the activity of the polypeptide Sll1450, preferably represented by SEQ ID NO. 54338, or a homolog or fragment thereof, or if the activity of a polypeptide encoded by a nucleic acid molecule comprising the nucleic acid SEQ ID NO. 54337, preferably the coding region thereof, or a homolog or fragment thereof, e.g. derived from Synechocystis sp., is increased or generated. For example the activity of a nucleic acid molecule or a polypeptide comprising the nucleic acid, preferably the coding region thereof, or polypeptide or the consensus sequence or the polypeptide motif, as depicted in Table I, II or IV, application No. 19, column 5 or 8 in the respective same line as the nucleic acid molecule SEQ ID NO. 54337 or polypeptide SEQ ID NO. 54338, respectively, or a homolog or a fragment thereof, is increased or generated, or if the activity nitrate/nitrite transport protein is increased or generated in a non-human organism, like a microorganism or a plant cell, plant or part thereof, especially with mitochondrial localization, whereby the respective line disclose in column 7 the fine chemical bis-glyceryl phosphate (polar fraction). For example, an increase of the bis-glyceryl phosphate (polar fraction) of at least 1 percent, particularly in a range of 41 to 70-percent is conferred as compared to a corresponding non-transformed wild type non-human organism.

[99018] Accordingly, in one embodiment, an increase of glycerol phosphate (lipid fraction) in a non-human organism, as compared to a corresponding non-transformed wild type non-human organism, is conferred in the process of the invention, if the activity of a polypeptide showing the activity of a carbamoyl-phosphate synthase subunit, or if the activity of the polypeptide Sll1498, preferably represented by SEQ ID NO. 95048, or a homolog or fragment thereof, or if the activity of a polypeptide encoded by a nucleic acid molecule comprising the nucleic acid SEQ ID NO. 95047, preferably the coding region thereof, or a homolog or fragment thereof, e.g. derived from Synechocystis sp., is increased or generated. For example the activity of a nucleic acid molecule or a polypeptide comprising the nucleic acid, preferably the coding region thereof, or polypeptide or the consensus sequence or the polypeptide motif, as depicted in Table I, II or IV, application No. 19, column 5 or 8 in the respective same line as the nucleic acid molecule SEQ ID NO. 95047 or polypeptide SEQ ID NO. 95048, respectively, or a homolog or a fragment thereof, is increased or generated, or if the activity carbamoyl-phosphate synthase subunit is increased or generated in a non-human organism, like a microorganism or a plant cell, plant or part thereof, especially with non-targeted localization, whereby the respective line disclose in column 7 the fine chemical glycerol phosphate (lipid fraction). For example, an increase of the glycerol phosphate (lipid fraction) of at least 1 percent, particularly in a range of 18 to 32-percent is conferred as compared to a corresponding non-transformed wild type non-human organism.

[99019] Accordingly, in one embodiment, an increase of glycerol (lipid fraction) in a non-human organism, as compared to a corresponding non-transformed wild type non-human organism, is conferred in the process of the invention, if the activity of a polypeptide showing the activity of a CDP-diacylglycerol-glycerol-3-phosphate 3-phosphatidyltransferase, or if the activity of the polypeptide Sll1522, preferably represented by SEQ ID NO. 54453, or a homolog or fragment thereof, or if the activity of a polypeptide encoded by a nucleic acid molecule comprising the nucleic acid SEQ ID NO. 54452, preferably the coding region thereof, or a homolog or fragment thereof, e.g. derived from Synechocystis sp., is increased or generated. For example the activity of a nucleic acid molecule or a polypeptide comprising the nucleic acid, preferably the coding region thereof, or polypeptide or the consensus sequence or the polypeptide motif, as depicted in Table I, II or IV, application No. 19, column 5 or 8 in the respective same line as the nucleic acid molecule SEQ ID NO. 54452 or polypeptide SEQ ID NO. 54453, respectively, or a homolog or a fragment thereof, is increased or generated, or if the activity CDP-diacylglycerol-glycerol-3-phosphate 3-phosphatidyltransferase is increased or generated in a non-human organism, like a microorganism or a plant cell, plant or part thereof, especially with plastidic localization, whereby the respective line disclose in column 7 the fine chemical glycerol (lipid fraction). For example, an increase of the glycerol (lipid fraction) of at least 1 percent, particularly in a range of 16 to 49-percent is conferred as compared to a corresponding non-transformed wild type non-human organism.

[99020] Accordingly, in one embodiment, an increase of bis-glyceryl phosphate (polar fraction) in a non-human organism, as compared to a corresponding non-transformed wild type non-human organism, is conferred in the process of the invention, if the activity of a polypeptide showing the activity of a adenylate kinase, or if the activity of the polypeptide Sll1815, preferably represented by SEQ ID NO. 85809, or a homolog or fragment thereof, or if the activity of a polypeptide encoded by a nucleic acid molecule comprising the nucleic acid SEQ ID NO. 85808, preferably the coding region thereof, or a homolog or fragment thereof, e.g. derived from Synechocystis sp., is increased or generated. For example the activity of a nucleic acid molecule or a polypeptide comprising the nucleic acid, preferably the coding region thereof, or polypeptide or the consensus sequence or the polypeptide motif, as depicted in Table I, II or IV, application No. 19, column 5 or 8 in the respective same line as the nucleic acid molecule SEQ ID NO. 85808 or polypeptide SEQ ID NO. 85809, respectively, or a homolog or a fragment thereof, is increased or generated, or if the activity adenylate kinase is increased or generated in a non-human organism, like a microorganism or a plant cell, plant or part thereof, especially with mitochondrial localization, whereby the respective line disclose in column 7 the fine chemical bis-glyceryl phosphate (polar fraction). For example, an increase of the bis-glyceryl phosphate (polar fraction) of at least 1 percent, particularly in a range of 49 to 68-percent is conferred as compared to a corresponding non-transformed wild type non-human organism.

[99021] Accordingly, in one embodiment, an increase of glycerol (lipid fraction) in a non-human organism, as compared to a corresponding non-transformed wild type non-human organism, is conferred in the process of the invention, if the activity of a polypeptide showing the activity of a acyl transferase, or if the activity of the polypeptide Sll1848, preferably represented by SEQ ID NO. 86448, or a homolog or fragment thereof, or if the activity of a polypeptide encoded by a nucleic acid molecule comprising the nucleic acid SEQ ID NO. 86447, preferably the coding region thereof, or a homolog or fragment thereof, e.g. derived from Synechocystis sp., is increased or generated. For example the activity of a nucleic acid molecule or a polypeptide comprising the nucleic acid, preferably the coding region thereof, or polypeptide or the consensus sequence or the polypeptide motif, as depicted in Table I, II or IV, application No. 19, column 5 or 8 in the respective same line as the nucleic acid molecule SEQ ID NO. 86447 or polypeptide SEQ ID NO. 86448, respectively, or a homolog or a fragment thereof, is increased or generated, or if the activity acyl transferase is increased or generated in a non-human organism, like a microorganism or a plant cell, plant or part thereof, especially with plastidic localization, whereby the respective line disclose in column 7 the fine chemical glycerol (lipid fraction). For example, an increase of the glycerol (lipid fraction) of at least 1 percent, particularly in a range of 19 to 55-percent is conferred as compared to a corresponding non-transformed wild type non-human organism.

[99022] Accordingly, in one embodiment, an increase of glycerol phosphate (lipid fraction) in a non-human organism, as compared to a corresponding non-transformed wild type non-human organism, is conferred in the process of the invention, if the activity of a polypeptide showing the activity of a coproporphyrinogen III oxidase, or if the activity of the polypeptide Sll1917, preferably represented by SEQ ID NO. 11472, or a homolog or fragment thereof, or if the activity of a polypeptide encoded by a nucleic acid molecule comprising the nucleic acid SEQ ID NO. 11471, preferably the coding region thereof, or a homolog or fragment thereof, e.g. derived from Synechocystis sp., is increased or generated. For example the activity of a nucleic acid molecule or a polypeptide comprising the nucleic acid, preferably the coding region thereof, or polypeptide or the consensus sequence or the polypeptide motif, as depicted in Table I, II or IV, application No. 19, column 5 or 8 in the respective same line as the nucleic acid molecule SEQ ID NO. 11471 or polypeptide SEQ ID NO. 11472, respectively, or a homolog or a fragment thereof, is increased or generated, or if the activity coproporphyrinogen III oxidase is increased or generated in a non-human organism, like a microorganism or a plant cell, plant or part thereof, especially with mitochondrial localization, whereby the respective line disclose in column 7 the fine chemical glycerol phosphate (lipid fraction). For example, an increase of the glycerol phosphate (lipid fraction) of at least 1 percent, particularly in a range of 17 to 67-percent is conferred as compared to a corresponding non-transformed wild type non-human organism.

[99023] Accordingly, in one embodiment, an increase of glycerol (lipid fraction) in a non-human organism, as compared to a corresponding non-transformed wild type non-human organism, is conferred in the process of the invention, if the activity of a polypeptide showing the activity of a oxidoreductase, or if the activity of the polypeptide Slr0338, preferably represented by SEQ ID NO. 11991, or a homolog or fragment thereof, or if the activity of a polypeptide encoded by a nucleic acid molecule comprising the nucleic acid SEQ ID NO. 11990, preferably the coding region thereof, or a homolog or fragment thereof, e.g. derived from Synechocystis sp., is increased or generated. For example the activity of a nucleic acid molecule or a polypeptide comprising the nucleic acid, preferably the coding region thereof, or polypeptide or the consensus sequence or the polypeptide motif, as depicted in Table I, II or IV, application No. 19, column 5 or 8 in the respective same line as the nucleic acid molecule SEQ ID NO. 11990 or polypeptide SEQ ID NO. 11991, respectively, or a homolog or a fragment thereof, is increased or generated, or if the activity oxidoreductase is increased or generated in a non-human organism, like a microorganism or a plant cell, plant or part thereof, especially with non-targeted localization, whereby the respective line disclose in column 7 the fine chemical glycerol (lipid fraction). For example, an increase of the glycerol (lipid fraction) of at least 1 percent, particularly in a range of 20 to 28-percent is conferred as compared to a corresponding non-transformed wild type non-human organism.

[99024] Accordingly, in one embodiment, an increase of glycerol phosphate (lipid fraction) in a non-human organism, as compared to a corresponding non-transformed wild type non-human organism, is conferred in the process of the invention, if the activity of a polypeptide showing the activity of a oxidoreductase, or if the activity of the polypeptide Slr0338, preferably represented by SEQ ID NO. 11991, or a homolog or fragment thereof, or if the activity of a polypeptide encoded by a nucleic acid molecule comprising the nucleic acid SEQ ID NO. 11990, preferably the coding region thereof, or a homolog or fragment thereof, e.g. derived from Synechocystis sp., is increased or generated. For example the activity of a nucleic acid molecule or a polypeptide comprising the nucleic acid, preferably the coding region thereof, or polypeptide or the consensus sequence or the polypeptide motif, as depicted in Table I, II or IV, application No. 19, column 5 or 8 in the respective same line as the nucleic acid molecule SEQ ID NO. 11990 or polypeptide SEQ ID NO. 11991, respectively, or a homolog or a fragment thereof, is increased or generated, or if the activity oxidoreductase is increased or generated in a non-human organism, like a microorganism or a plant cell, plant or part thereof, especially with plastidic localization, whereby the respective line disclose in column 7 the fine chemical glycerol phosphate (lipid fraction). For example, an increase of the glycerol phosphate (lipid fraction) of at least 1 percent, particularly in a range of 18 to 39-percent is conferred as compared to a corresponding non-transformed wild type non-human organism.

[99025] Accordingly, in one embodiment, an increase of glycerol (polar fraction) in a non-human organism, as compared to a corresponding non-transformed wild type non-human organism, is conferred in the process of the invention, if the activity of a polypeptide showing the activity of a Mg-protoporphyrin IX monomethyl ester oxidative cyclase 66 kD subunit, or if the activity of the polypeptide Slr0905, preferably represented by SEQ ID NO. 147408, or a homolog or fragment thereof, or if the activity of a polypeptide encoded by a nucleic acid molecule comprising the nucleic acid SEQ ID NO. 147407, preferably the coding region thereof, or a homolog or fragment thereof, e.g. derived from Synechocystis sp., is increased or generated. For example the activity of a nucleic acid molecule or a polypeptide comprising the nucleic acid, preferably the coding region thereof, or polypeptide or the consensus sequence or the polypeptide motif, as depicted in Table I, II or IV, application No. 19, column 5 or 8 in the respective same line as the nucleic acid molecule SEQ ID NO. 147407 or polypeptide SEQ ID NO. 147408, respectively, or a homolog or a fragment thereof, is increased or generated, or if the activity Mg-protoporphyrin IX monomethyl ester oxidative cyclase 66 kD subunit is increased or generated in a non-human organism, like a microorganism or a plant cell, plant or part thereof, especially with mitochondrial localization, whereby the respective line disclose in column 7 the fine chemical glycerol (polar fraction). For example, an increase of the glycerol (polar fraction) of at least 1 percent, particularly in a range of 53 to 73-percent is conferred as compared to a corresponding non-transformed wild type non-human organism.

[99026] Accordingly, in one embodiment, an increase of bis-glyceryl phosphate (polar fraction) in a non-human organism, as compared to a corresponding non-transformed wild type non-human organism, is conferred in the process of the invention, if the activity of a polypeptide showing the activity of a dihydrolipoamide dehydrogenase, or if the activity of the polypeptide Slr1096, preferably represented by SEQ ID NO. 57735, or a homolog or fragment thereof, or if the activity of a polypeptide encoded by a nucleic acid molecule comprising the nucleic acid SEQ ID NO. 57734, preferably the coding region thereof, or a homolog or fragment thereof, e.g. derived from Synechocystis sp., is increased or generated. For example the activity of a nucleic acid molecule or a polypeptide comprising the nucleic acid, preferably the coding region thereof, or polypeptide or the consensus sequence or the polypeptide motif, as depicted in Table I, II or IV, application No. 19, column 5 or 8 in the respective same line as the nucleic acid molecule SEQ ID NO. 57734 or polypeptide SEQ ID NO. 57735, respectively, or a homolog or a fragment thereof, is increased or generated, or if the activity dihydrolipoamide dehydrogenase is increased or generated in a non-human organism, like a microorganism or a plant cell, plant or part thereof, especially with non-targeted localization, whereby the respective line disclose in column 7 the fine chemical bis-glyceryl phosphate (polar fraction). For example, an increase of the bis-glyceryl phosphate (polar fraction) of at least 1 percent, particularly in a range of 39 to 68-percent is conferred as compared to a corresponding non-transformed wild type non-human organism.

[99027] Accordingly, in one embodiment, an increase of glycerol phosphate (lipid fraction) in a non-human organism, as compared to a corresponding non-transformed wild type non-human organism, is conferred in the process of the invention, if the activity of a polypeptide showing the activity of a aromatic acid decarboxylase, or if the activity of the polypeptide Slr1099, preferably represented by SEQ ID NO. 116342, or a homolog or fragment thereof, or if the activity of a polypeptide encoded by a nucleic acid molecule comprising the nucleic acid SEQ ID NO. 116341, preferably the coding region thereof, or a homolog or fragment thereof, e.g. derived from Synechocystis sp., is increased or generated. For example the activity of a nucleic acid molecule or a polypeptide comprising the nucleic acid, preferably the coding region thereof, or polypeptide or the consensus sequence or the polypeptide motif, as depicted in Table I, II or IV, application No. 19, column 5 or 8 in the respective same line as the nucleic acid molecule SEQ ID NO. 116341 or polypeptide SEQ ID NO. 116342, respectively, or a homolog or a fragment thereof, is increased or generated, or if the activity aromatic acid decarboxylase is increased or generated in a non-human organism, like a microorganism or a plant cell, plant or part thereof, especially with mitochondrial localization, whereby the respective line disclose in column 7 the fine chemical glycerol phosphate (lipid fraction). For example, an increase of the glycerol phosphate (lipid fraction) of at least 1 percent, particularly in a range of 17 to 29-percent is conferred as compared to a corresponding non-transformed wild type non-human organism.

[99028] Accordingly, in one embodiment, an increase of glycerol phosphate (lipid fraction) in a non-human organism, as compared to a corresponding non-transformed wild type non-human organism, is conferred in the process of the invention, if the activity of a polypeptide showing the activity of a phosphate import ATP-binding protein, or if the activity of the polypeptide Slr1250, preferably represented by SEQ ID NO. 116461, or a homolog or fragment thereof, or if the activity of a polypeptide encoded by a nucleic acid molecule comprising the nucleic acid SEQ ID NO. 116460, preferably the coding region thereof, or a homolog or fragment thereof, e.g. derived from Synechocystis sp., is increased or generated. For example the activity of a nucleic acid molecule or a polypeptide comprising the nucleic acid, preferably the coding region thereof, or polypeptide or the consensus sequence or the polypeptide motif, as depicted in Table I, II or IV, application No. 19, column 5 or 8 in the respective same line as the nucleic acid molecule SEQ ID NO. 116460 or polypeptide SEQ ID NO. 116461, respectively, or a homolog or a fragment thereof, is increased or generated, or if the activity phosphate import ATP-binding protein is increased or generated in a non-human organism, like a microorganism or a plant cell, plant or part thereof, especially with mitochondrial localization, whereby the respective line disclose in column 7 the fine chemical glycerol phosphate (lipid fraction). For example, an increase of the glycerol phosphate (lipid fraction) of at least 1 percent, particularly in a range of 21 to 46-percent is conferred as compared to a corresponding non-transformed wild type non-human organism.

[99029] Accordingly, in one embodiment, an increase of glycerol phosphate (lipid fraction) in a non-human organism, as compared to a corresponding non-transformed wild type non-human organism, is conferred in the process of the invention, if the activity of a polypeptide showing the activity of a arginine decarboxylase, or if the activity of the polypeptide Slr1312, preferably represented by SEQ ID NO. 58325, or a homolog or fragment thereof, or if the activity of a polypeptide encoded by a nucleic acid molecule comprising the nucleic acid SEQ ID NO. 58324, preferably the coding region thereof, or a homolog or fragment thereof, e.g. derived from Synechocystis sp., is increased or generated. For example the activity of a nucleic acid molecule or a polypeptide comprising the nucleic acid, preferably the coding region thereof, or polypeptide or the consensus sequence or the polypeptide motif, as depicted in Table I, II or IV, application No. 19, column 5 or 8 in the respective same line as the nucleic acid molecule SEQ ID NO. 58324 or polypeptide SEQ ID NO. 58325, respectively, or a homolog or a fragment thereof, is increased or generated, or if the activity arginine decarboxylase is increased or generated in a non-human organism, like a microorganism or a plant cell, plant or part thereof, especially with non-targeted localization, whereby the respective line disclose in column 7 the fine chemical glycerol phosphate (lipid fraction). For example, an increase of the glycerol phosphate (lipid fraction) of at least 1 percent, particularly in a range of 24 to 43-percent is conferred as compared to a corresponding non-transformed wild type non-human organism.

[99030] Accordingly, in one embodiment, an increase of glycerol phosphate (lipid fraction) in a non-human organism, as compared to a corresponding non-transformed wild type non-human organism, is conferred in the process of the invention, if the activity of a polypeptide showing the activity of a carbohydrate kinase, or if the activity of the polypeptide Slr1420, preferably represented by SEQ ID NO. 58591, or a homolog or fragment thereof, or if the activity of a polypeptide encoded by a nucleic acid molecule comprising the nucleic acid SEQ ID NO. 58590, preferably the coding region thereof, or a homolog or fragment thereof, e.g. derived from Synechocystis sp., is increased or generated. For example the activity of a nucleic acid molecule or a polypeptide comprising the nucleic acid, preferably the coding region thereof, or polypeptide or the consensus sequence or the polypeptide motif, as depicted in Table I, II or IV, application No. 19, column 5 or 8 in the respective same line as the nucleic acid molecule SEQ ID NO. 58590 or polypeptide SEQ ID NO. 58591, respectively, or a homolog or a fragment thereof, is increased or generated, or if the activity carbohydrate kinase is increased or generated in a non-human organism, like a microorganism or a plant cell, plant or part thereof, especially with non-targeted localization, whereby the respective line disclose in column 7 the fine chemical glycerol phosphate (lipid fraction). For example, an increase of the glycerol phosphate (lipid fraction) of at least 1 percent, particularly in a range of 20 to 35-percent is conferred as compared to a corresponding non-transformed wild type non-human organism.

[99031] Accordingly, in one embodiment, an increase of bis-glyceryl phosphate (polar fraction) in a non-human organism, as compared to a corresponding non-transformed wild type non-human organism, is conferred in the process of the invention, if the activity of a polypeptide showing the activity of a precorrin-8X methylmutase, or if the activity of the polypeptide Slr1467, preferably represented by SEQ ID NO. 154138, or a homolog or fragment thereof, or if the activity of a polypeptide encoded by a nucleic acid molecule comprising the nucleic acid SEQ ID NO. 154137, preferably the coding region thereof, or a homolog or fragment thereof, e.g. derived from Synechocystis sp., is increased or generated. For example the activity of a nucleic acid molecule or a polypeptide comprising the nucleic acid, preferably the coding region thereof, or polypeptide or the consensus sequence or the polypeptide motif, as depicted in Table I, II or IV, application No. 19, column 5 or 8 in the respective same line as the nucleic acid molecule SEQ ID NO. 154137 or polypeptide SEQ ID NO. 154138, respectively, or a homolog or a fragment thereof, is increased or generated, or if the activity precorrin-8X methylmutase is increased or generated in a non-human organism, like a microorganism or a plant cell, plant or part thereof, especially with plastidic localization, whereby the respective line disclose in column 7 the fine chemical bis-glyceryl phosphate (polar fraction). For example, an increase of the bis-glyceryl phosphate (polar fraction) of at least 1 percent, particularly in a range of 57 to 97-percent is conferred as compared to a corresponding non-transformed wild type non-human organism.

[99032] Accordingly, in one embodiment, an increase of bis-glyceryl phosphate (polar fraction) in a non-human organism, as compared to a corresponding non-transformed wild type non-human organism, is conferred in the process of the invention, if the activity of a polypeptide showing the activity of a NADH dehydrogenase, or if the activity of the polypeptide Slr1743, preferably represented by SEQ ID NO. 147458, or a homolog or fragment thereof, or if the activity of a polypeptide encoded by a nucleic acid molecule comprising the nucleic acid SEQ ID NO. 147457, preferably the coding region thereof, or a homolog or fragment thereof, e.g. derived from Synechocystis sp., is increased or generated. For example the activity of a nucleic acid molecule or a polypeptide comprising the nucleic acid, preferably the coding region thereof, or polypeptide or the consensus sequence or the polypeptide motif, as depicted in Table I, II or IV, application No. 19, column 5 or 8 in the respective same line as the nucleic acid molecule SEQ ID NO. 147457 or polypeptide SEQ ID NO. 147458, respectively, or a homolog or a fragment thereof, is increased or generated, or if the activity NADH dehydrogenase is increased or generated in a non-human organism, like a microorganism or a plant cell, plant or part thereof, especially with plastidic localization, whereby the respective line disclose in column 7 the fine chemical bis-glyceryl phosphate (polar fraction). For example, an increase of the bis-glyceryl phosphate (polar fraction) of at least 1 percent, particularly in a range of 42 to 88-percent is conferred as compared to a corresponding non-transformed wild type non-human organism.

[99033] Accordingly, in one embodiment, an increase of glycerol (lipid fraction) in a non-human organism, as compared to a corresponding non-transformed wild type non-human organism, is conferred in the process of the invention, if the activity of a polypeptide showing the activity of a glutamate 5-kinase, or if the activity of the polypeptide Slr2035, preferably represented by SEQ ID NO. 127522, or a homolog or fragment thereof, or if the activity of a polypeptide encoded by a nucleic acid molecule comprising the nucleic acid SEQ ID NO. 127521, preferably the coding region thereof, or a homolog or fragment thereof, e.g. derived from Synechocystis sp., is increased or generated. For example the activity of a nucleic acid molecule or a polypeptide comprising the nucleic acid, preferably the coding region thereof, or polypeptide or the consensus sequence or the polypeptide motif, as depicted in Table I, II or IV, application No. 19, column 5 or 8 in the respective same line as the nucleic acid molecule SEQ ID NO. 127521 or polypeptide SEQ ID NO. 127522, respectively, or a homolog or a fragment thereof, is increased or generated, or if the activity glutamate 5-kinase is increased or generated in a non-human organism, like a microorganism or a plant cell, plant or part thereof, especially with mitochondrial localization, whereby the respective line disclose in column 7 the fine chemical glycerol (lipid fraction). For example, an increase of the glycerol (lipid fraction) of at least 1 percent, particularly in a range of 18 to 22-percent is conferred as compared to a corresponding non-transformed wild type non-human organism.

[99034] Accordingly, in one embodiment, an increase of glycerol (lipid fraction) in a non-human organism, as compared to a corresponding non-transformed wild type non-human organism, is conferred in the process of the invention, if the activity of a polypeptide showing the activity of a threonine dehydratase, or if the activity of the polypeptide Slr2072, preferably represented by SEQ ID NO. 12342, or a homolog or fragment thereof, or if the activity of a polypeptide encoded by a nucleic acid molecule comprising the nucleic acid SEQ ID NO. 12341, preferably the coding region thereof, or a homolog or fragment thereof, e.g. derived from Synechocystis sp., is increased or generated. For example the activity of a nucleic acid molecule or a polypeptide comprising the nucleic acid, preferably the coding region thereof, or polypeptide or the consensus sequence or the polypeptide motif, as depicted in Table I, II or IV, application No. 19, column 5 or 8 in the respective same line as the nucleic acid molecule SEQ ID NO. 12341 or polypeptide SEQ ID NO. 12342, respectively, or a homolog or a fragment thereof, is increased or generated, or if the activity threonine dehydratase is increased or generated in a non-human organism, like a microorganism or a plant cell, plant or part thereof, especially with mitochondrial localization, whereby the respective line disclose in column 7 the fine chemical glycerol (lipid fraction). For example, an increase of the glycerol (lipid fraction) of at least 1 percent, particularly in a range of 18 to 43-percent is conferred as compared to a corresponding non-transformed wild type non-human organism.

[99035] Accordingly, in one embodiment, an increase of glycerol phosphate (lipid fraction) in a non-human organism, as compared to a corresponding non-transformed wild type non-human organism, is conferred in the process of the invention, if the activity of a polypeptide showing the activity of a threonine dehydratase, or if the activity of the polypeptide Slr2072, preferably represented by SEQ ID NO. 12342, or a homolog or fragment thereof, or if the activity of a polypeptide encoded by a nucleic acid molecule comprising the nucleic acid SEQ ID NO. 12341, preferably the coding region thereof, or a homolog or fragment thereof, e.g. derived from Synechocystis sp., is increased or generated. For example the activity of a nucleic acid molecule or a polypeptide comprising the nucleic acid, preferably the coding region thereof, or polypeptide or the consensus sequence or the polypeptide motif, as depicted in Table I, II or IV, application No. 19, column 5 or 8 in the respective same line as the nucleic acid molecule SEQ ID NO. 12341 or polypeptide SEQ ID NO. 12342, respectively, or a homolog or a fragment thereof, is increased or generated, or if the activity threonine dehydratase is increased or generated in a non-human organism, like a microorganism or a plant cell, plant or part thereof, especially with mitochondrial localization, whereby the respective line disclose in column 7 the fine chemical glycerol phosphate (lipid fraction). For example, an increase of the glycerol phosphate (lipid fraction) of at least 1 percent, particularly in a range of 19 to 28-percent is conferred as compared to a corresponding non-transformed wild type non-human organism.

[99036] Accordingly, in one embodiment, an increase of bis-glyceryl phosphate (polar fraction) in a non-human organism, as compared to a corresponding non-transformed wild type non-human organism, is conferred in the process of the invention, if the activity of a polypeptide showing the activity of a photosystem I reaction centre subunit, or if the activity of the polypeptide Smr0004, preferably represented by SEQ ID NO. 136908, or a homolog or fragment thereof, or if the activity of a polypeptide encoded by a nucleic acid molecule comprising the nucleic acid SEQ ID NO. 136907, preferably the coding region thereof, or a homolog or fragment thereof, e.g. derived from Synechocystis sp., is increased or generated. For example the activity of a nucleic acid molecule or a polypeptide comprising the nucleic acid, preferably the coding region thereof, or polypeptide or the consensus sequence or the polypeptide motif, as depicted in Table I, II or IV, application No. 19, column 5 or 8 in the respective same line as the nucleic acid molecule SEQ ID NO. 136907 or polypeptide SEQ ID NO. 136908, respectively, or a homolog or a fragment thereof, is increased or generated, or if the activity photosystem I reaction centre subunit is increased or generated in a non-human organism, like a microorganism or a plant cell, plant or part thereof, especially with plastidic localization, whereby the respective line disclose in column 7 the fine chemical bis-glyceryl phosphate (polar fraction). For example, an increase of the bis-glyceryl phosphate (polar fraction) of at least 1 percent, particularly in a range of 44 to 60-percent is conferred as compared to a corresponding non-transformed wild type non-human organism.

[99037] Accordingly, in one embodiment, an increase of triacylglycerol in a non-human organism, as compared to a corresponding non-transformed wild type non-human organism, is conferred in the process of the invention, if the activity of a polypeptide showing the activity of a cell division protein, or if the activity of the polypeptide TTC0035, preferably represented by SEQ ID NO. 60302, or a homolog or fragment thereof, or if the activity of a polypeptide encoded by a nucleic acid molecule comprising the nucleic acid SEQ ID NO. 60301, preferably the coding region thereof, or a homolog or fragment thereof, e.g. derived from Thermus thermophilus, is increased or generated. For example the activity of a nucleic acid molecule or a polypeptide comprising the nucleic acid, preferably the coding region thereof, or polypeptide or the consensus sequence or the polypeptide motif, as depicted in Table I, II or IV, application No. 19, column 5 or 8 in the respective same line as the nucleic acid molecule SEQ ID NO. 60301 or polypeptide SEQ ID NO. 60302, respectively, or a homolog or a fragment thereof, is increased or generated, or if the activity cell division protein is increased or generated in a non-human organism, like a microorganism or a plant cell, plant or part thereof, especially with non-targeted localization, whereby the respective line disclose in column 7 the fine chemical triacylglycerol. For example, an increase of the triacylglycerol of at least 1 percent, particularly in a range of 73 to 163-percent is conferred as compared to a corresponding non-transformed wild type non-human organism.

[99038] Accordingly, in one embodiment, an increase of glycerol phosphate (lipid fraction) in a non-human organism, as compared to a corresponding non-transformed wild type non-human organism, is conferred in the process of the invention, if the activity of a polypeptide showing the activity of a metal-dependent hydrolase, or if the activity of the polypeptide TTC0917, preferably represented by SEQ ID NO. 61554, or a homolog or fragment thereof, or if the activity of a polypeptide encoded by a nucleic acid molecule comprising the nucleic acid SEQ ID NO. 61553, preferably the coding region thereof, or a homolog or fragment thereof, e.g. derived from Thermus thermophilus, is increased or generated. For example the activity of a nucleic acid molecule or a polypeptide comprising the nucleic acid, preferably the coding region thereof, or polypeptide or the consensus sequence or the polypeptide motif, as depicted in Table I, II or IV, application No. 19, column 5 or 8 in the respective same line as the nucleic acid molecule SEQ ID NO. 61553 or polypeptide SEQ ID NO. 61554, respectively, or a homolog or a fragment thereof, is increased or generated, or if the activity metal-dependent hydrolase is increased or generated in a non-human organism, like a microorganism or a plant cell, plant or part thereof, especially with non-targeted localization, whereby the respective line disclose in column 7 the fine chemical glycerol phosphate (lipid fraction). For example, an increase of the glycerol phosphate (lipid fraction) of at least 1 percent, particularly in a range of 21 to 73-percent is conferred as compared to a corresponding non-transformed wild type non-human organism.

[99039] Accordingly, in one embodiment, an increase of glycerol (lipid fraction) in a non-human organism, as compared to a corresponding non-transformed wild type non-human organism, is conferred in the process of the invention, if the activity of a polypeptide showing the activity of a TTC1386-protein, or if the activity of the polypeptide TTC1386, preferably represented by SEQ ID NO. 62080, or a homolog or fragment thereof, or if the activity of a polypeptide encoded by a nucleic acid molecule comprising the nucleic acid SEQ ID NO. 62079, preferably the coding region thereof, or a homolog or fragment thereof, e.g. derived from Thermus thermophilus, is increased or generated. For example the activity of a nucleic acid molecule or a polypeptide comprising the nucleic acid, preferably the coding region thereof, or polypeptide or the consensus sequence or the polypeptide motif, as depicted in Table I, II or IV, application No. 19, column 5 or 8 in the respective same line as the nucleic acid molecule SEQ ID NO. 62079 or polypeptide SEQ ID NO. 62080, respectively, or a homolog or a fragment thereof, is increased or generated, or if the activity TTC1386-protein is increased or generated in a non-human organism, like a microorganism or a plant cell, plant or part thereof, especially with non-targeted localization, whereby the respective line disclose in column 7 the fine chemical glycerol (lipid fraction). For example, an increase of the glycerol (lipid fraction) of at least 1 percent, particularly in a range of 23 to 34-percent is conferred as compared to a corresponding non-transformed wild type non-human organism.

[99040] Accordingly, in one embodiment, an increase of glycerol-3-phosphate (polar fraction) in a non-human organism, as compared to a corresponding non-transformed wild type non-human organism, is conferred in the process of the invention, if the activity of a polypeptide showing the activity of a YAL013W-protein, or if the activity of the polypeptide Yal013w, preferably represented by SEQ ID NO. 108093, or a homolog or fragment thereof, or if the activity of a polypeptide encoded by a nucleic acid molecule comprising the nucleic acid SEQ ID NO. 108092, preferably the coding region thereof, or a homolog or fragment thereof, e.g. derived from Saccharomyces cerevisiae, is increased or generated. For example the activity of a nucleic acid molecule or a polypeptide comprising the nucleic acid, preferably the coding region thereof, or polypeptide or the consensus sequence or the polypeptide motif, as depicted in Table I, II or IV, application No. 19, column 5 or 8 in the respective same line as the nucleic acid molecule SEQ ID NO. 108092 or polypeptide SEQ ID NO. 108093, respectively, or a homolog or a fragment thereof, is increased or generated, or if the activity YAL013W-protein is increased or generated in a non-human organism, like a microorganism or a plant cell, plant or part thereof, especially with non-targeted localization, whereby the respective line disclose in column 7 the fine chemical glycerol-3-phosphate (polar fraction). For example, an increase of the glycerol-3-phosphate (polar fraction) of at least 1 percent, particularly in a range of 136 to 212-percent is conferred as compared to a corresponding non-transformed wild type non-human organism.

[99041] Accordingly, in one embodiment, an increase of glycerol (lipid fraction) in a non-human organism, as compared to a corresponding non-transformed wild type non-human organism, is conferred in the process of the invention, if the activity of a polypeptide showing the activity of a transcription factor, or if the activity of the polypeptide Ybl021c, preferably represented by SEQ ID NO. 62525, or a homolog or fragment thereof, or if the activity of a polypeptide encoded by a nucleic acid molecule comprising the nucleic acid SEQ ID NO. 62524, preferably the coding region thereof, or a homolog or fragment thereof, e.g. derived from Saccharomyces cerevisiae, is increased or generated. For example the activity of a nucleic acid molecule or a polypeptide comprising the nucleic acid, preferably the coding region thereof, or polypeptide or the consensus sequence or the polypeptide motif, as depicted in Table I, II or IV, application No. 19, column 5 or 8 in the respective same line as the nucleic acid molecule SEQ ID NO. 62524 or polypeptide SEQ ID NO. 62525, respectively, or a homolog or a fragment thereof, is increased or generated, or if the activity transcription factor is increased or generated in a non-human organism, like a microorganism or a plant cell, plant or part thereof, especially with non-targeted localization, whereby the respective line disclose in column 7 the fine chemical glycerol (lipid fraction). For example, an increase of the glycerol (lipid fraction) of at least 1 percent, particularly in a range of 17 to 23-percent is conferred as compared to a corresponding non-transformed wild type non-human organism.

[99042] Accordingly, in one embodiment, an increase of glycerol phosphate (lipid fraction) in a non-human organism, as compared to a corresponding non-transformed wild type non-human organism, is conferred in the process of the invention, if the activity of a polypeptide showing the activity of a acid phosphatase precursor, or if the activity of the polypeptide Ybr092c, preferably represented by SEQ ID NO. 119348, or a homolog or fragment thereof, or if the activity of a polypeptide encoded by a nucleic acid molecule comprising the nucleic acid SEQ ID NO. 119347, preferably the coding region thereof, or a homolog or fragment thereof, e.g. derived from Saccharomyces cerevisiae, is increased or generated. For example the activity of a nucleic acid molecule or a polypeptide comprising the nucleic acid, preferably the coding region thereof, or polypeptide or the consensus sequence or the polypeptide motif, as depicted in Table I, II or IV, application No. 19, column 5 or 8 in the respective same line as the nucleic acid molecule SEQ ID NO. 119347 or polypeptide SEQ ID NO. 119348, respectively, or a homolog or a fragment thereof, is increased or generated, or if the activity acid phosphatase precursor is increased or generated in a non-human organism, like a microorganism or a plant cell, plant or part thereof, especially with plastidic localization, whereby the respective line disclose in column 7 the fine chemical glycerol phosphate (lipid fraction). For example, an increase of the glycerol phosphate (lipid fraction) of at least 1 percent, particularly in a range of 24 to 31-percent is conferred as compared to a corresponding non-transformed wild type non-human organism.

[99043] Accordingly, in one embodiment, an increase of glycerol (lipid fraction) in a non-human organism, as compared to a corresponding non-transformed wild type non-human organism, is conferred in the process of the invention, if the activity of a polypeptide showing the activity of a cell division control protein, or if the activity of the polypeptide Ybr160w, preferably represented by SEQ ID NO. 62718, or a homolog or fragment thereof, or if the activity of a polypeptide encoded by a nucleic acid molecule comprising the nucleic acid SEQ ID NO. 62717, preferably the coding region thereof, or a homolog or fragment thereof, e.g. derived from Saccharomyces cerevisiae, is increased or generated. For example the activity of a nucleic acid molecule or a polypeptide comprising the nucleic acid, preferably the coding region thereof, or polypeptide or the consensus sequence or the polypeptide motif, as depicted in Table I, II or IV, application No. 19, column 5 or 8 in the respective same line as the nucleic acid molecule SEQ ID NO. 62717 or polypeptide SEQ ID NO. 62718, respectively, or a homolog or a fragment thereof, is increased or generated, or if the activity cell division control protein is increased or generated in a non-human organism, like a microorganism or a plant cell, plant or part thereof, especially with non-targeted localization, whereby the respective line disclose in column 7 the fine chemical glycerol (lipid fraction). For example, an increase of the glycerol (lipid fraction) of at least 1 percent, particularly in a range of 17 to 63-percent is conferred as compared to a corresponding non-transformed wild type non-human organism.

[99044] Accordingly, in one embodiment, an increase of glycerol (polar fraction) in a non-human organism, as compared to a corresponding non-transformed wild type non-human organism, is conferred in the process of the invention, if the activity of a polypeptide showing the activity of a cell division control protein, or if the activity of the polypeptide Ybr160w, preferably represented by SEQ ID NO. 62718, or a homolog or fragment thereof, or if the activity of a polypeptide encoded by a nucleic acid molecule comprising the nucleic acid SEQ ID NO. 62717, preferably the coding region thereof, or a homolog or fragment thereof, e.g. derived from Saccharomyces cerevisiae, is increased or generated. For example the activity of a nucleic acid molecule or a polypeptide comprising the nucleic acid, preferably the coding region thereof, or polypeptide or the consensus sequence or the polypeptide motif, as depicted in Table I, II or IV, application No. 19, column 5 or 8 in the respective same line as the nucleic acid molecule SEQ ID NO. 62717 or polypeptide SEQ ID NO. 62718, respectively, or a homolog or a fragment thereof, is increased or generated, or if the activity cell division control protein is increased or generated in a non-human organism, like a microorganism or a plant cell, plant or part thereof, especially with non-targeted localization, whereby the respective line disclose in column 7 the fine chemical glycerol (polar fraction). For example, an increase of the glycerol (polar fraction) of at least 1 percent, particularly in a range of 54 to 85-percent is conferred as compared to a corresponding non-transformed wild type non-human organism.

[99045] Accordingly, in one embodiment, an increase of bis-glyceryl phosphate (polar fraction) in a non-human organism, as compared to a corresponding non-transformed wild type non-human organism, is conferred in the process of the invention, if the activity of a polypeptide showing the activity of a ycr102c-protein, or if the activity of the polypeptide Ycr102c, preferably represented by SEQ ID NO. 63265, or a homolog or fragment thereof, or if the activity of a polypeptide encoded by a nucleic acid molecule comprising the nucleic acid SEQ ID NO. 63264, preferably the coding region thereof, or a homolog or fragment thereof, e.g. derived from Saccharomyces cerevisiae, is increased or generated. For example the activity of a nucleic acid molecule or a polypeptide comprising the nucleic acid, preferably the coding region thereof, or polypeptide or the consensus sequence or the polypeptide motif, as depicted in Table I, II or IV, application No. 19, column 5 or 8 in the respective same line as the nucleic acid molecule SEQ ID NO. 63264 or polypeptide SEQ ID NO. 63265, respectively, or a homolog or a fragment thereof, is increased or generated, or if the activity ycr102c-protein is increased or generated in a non-human organism, like a microorganism or a plant cell, plant or part thereof, especially with plastidic localization, whereby the respective line disclose in column 7 the fine chemical bis-glyceryl phosphate (polar fraction). For example, an increase of the bis-glyceryl phosphate (polar fraction) of at least 1 percent, particularly in a range of 42 to 81-percent is conferred as compared to a corresponding non-transformed wild type non-human organism.

[99046] Accordingly, in one embodiment, an increase of bis-glyceryl phosphate (polar fraction) in a non-human organism, as compared to a corresponding non-transformed wild type non-human organism, is conferred in the process of the invention, if the activity of a polypeptide showing the activity of a ydr273w-protein, or if the activity of the polypeptide Ydr273w, preferably represented by SEQ ID NO. 90160, or a homolog or fragment thereof, or if the activity of a polypeptide encoded by a nucleic acid molecule comprising the nucleic acid SEQ ID NO. 90159, preferably the coding region thereof, or a homolog or fragment thereof, e.g. derived from Saccharomyces cerevisiae, is increased or generated. For example the activity of a nucleic acid molecule or a polypeptide comprising the nucleic acid, preferably the coding region thereof, or polypeptide or the consensus sequence or the polypeptide motif, as depicted in Table I, II or IV, application No. 19, column 5 or 8 in the respective same line as the nucleic acid molecule SEQ ID NO. 90159 or polypeptide SEQ ID NO. 90160, respectively, or a homolog or a fragment thereof, is increased or generated, or if the activity ydr273w-protein is increased or generated in a non-human organism, like a microorganism or a plant cell, plant or part thereof, especially with plastidic localization, whereby the respective line disclose in column 7 the fine chemical bis-glyceryl phosphate (polar fraction). For example, an increase of the bis-glyceryl phosphate (polar fraction) of at least 1 percent, particularly in a range of 41 to 48-percent is conferred as compared to a corresponding non-transformed wild type non-human organism.

[99047] Accordingly, in one embodiment, an increase of glycerol phosphate (lipid fraction) in a non-human organism, as compared to a corresponding non-transformed wild type non-human organism, is conferred in the process of the invention, if the activity of a polypeptide showing the activity of a molecular chaperone portein, or if the activity of the polypeptide Yfl016c, preferably represented by SEQ ID NO. 63808, or a homolog or fragment thereof, or if the activity of a polypeptide encoded by a nucleic acid molecule comprising the nucleic acid SEQ ID NO. 63807, preferably the coding region thereof, or a homolog or fragment thereof, e.g. derived from Saccharomyces cerevisiae, is increased or generated. For example the activity of a nucleic acid molecule or a polypeptide comprising the nucleic acid, preferably the coding region thereof, or polypeptide or the consensus sequence or the polypeptide motif, as depicted in Table I, II or IV, application No. 19, column 5 or 8 in the respective same line as the nucleic acid molecule SEQ ID NO. 63807 or polypeptide SEQ ID NO. 63808, respectively, or a homolog or a fragment thereof, is increased or generated, or if the activity molecular chaperone portein is increased or generated in a non-human organism, like a microorganism or a plant cell, plant or part thereof, especially with non-targeted localization, whereby the respective line disclose in column 7 the fine chemical glycerol phosphate (lipid fraction). For example, an increase of the glycerol phosphate (lipid fraction) of at least 1 percent, particularly in a range of 22 to 31-percent is conferred as compared to a corresponding non-transformed wild type non-human organism.

[99048] Accordingly, in one embodiment, an increase of triacylglycerol in a non-human organism, as compared to a corresponding non-transformed wild type non-human organism, is conferred in the process of the invention, if the activity of a polypeptide showing the activity of a YFL019C-protein, or if the activity of the polypeptide Yfl019c, preferably represented by SEQ ID NO. 64145, or a homolog or fragment thereof, or if the activity of a polypeptide encoded by a nucleic acid molecule comprising the nucleic acid SEQ ID NO. 64144, preferably the coding region thereof, or a homolog or fragment thereof, e.g. derived from Saccharomyces cerevisiae, is increased or generated. For example the activity of a nucleic acid molecule or a polypeptide comprising the nucleic acid, preferably the coding region thereof, or polypeptide or the consensus sequence or the polypeptide motif, as depicted in Table I, II or IV, application No. 19, column 5 or 8 in the respective same line as the nucleic acid molecule SEQ ID NO. 64144 or polypeptide SEQ ID NO. 64145, respectively, or a homolog or a fragment thereof, is increased or generated, or if the activity YFL019C-protein is increased or generated in a non-human organism, like a microorganism or a plant cell, plant or part thereof, especially with non-targeted localization, whereby the respective line disclose in column 7 the fine chemical triacylglycerol. For example, an increase of the triacylglycerol of at least 1 percent, particularly in a range of 36 to 110-percent is conferred as compared to a corresponding non-transformed wild type non-human organism.

[99049] Accordingly, in one embodiment, an increase of bis-glyceryl phosphate (polar fraction) in a non-human organism, as compared to a corresponding non-transformed wild type non-human organism, is conferred in the process of the invention, if the activity of a polypeptide showing the activity of a alcohol dehydrogenase, or if the activity of the polypeptide Ygl256w, preferably represented by SEQ ID NO. 130743, or a homolog or fragment thereof, or if the activity of a polypeptide encoded by a nucleic acid molecule comprising the nucleic acid SEQ ID NO. 130742, preferably the coding region thereof, or a homolog or fragment thereof, e.g. derived from Saccharomyces cerevisiae, is increased or generated. For example the activity of a nucleic acid molecule or a polypeptide comprising the nucleic acid, preferably the coding region thereof, or polypeptide or the consensus sequence or the polypeptide motif, as depicted in Table I, II or IV, application No. 19, column 5 or 8 in the respective same line as the nucleic acid molecule SEQ ID NO. 130742 or polypeptide SEQ ID NO. 130743, respectively, or a homolog or a fragment thereof, is increased or generated, or if the activity alcohol dehydrogenase is increased or generated in a non-human organism, like a microorganism or a plant cell, plant or part thereof, especially with plastidic localization, whereby the respective line disclose in column 7 the fine chemical bis-glyceryl phosphate (polar fraction). For example, an increase of the bis-glyceryl phosphate (polar fraction) of at least 1 percent, particularly in a range of 42 to 93-percent is conferred as compared to a corresponding non-transformed wild type non-human organism.

[99050] Accordingly, in one embodiment, an increase of glycerol (lipid fraction) in a non-human organism, as compared to a corresponding non-transformed wild type non-human organism, is conferred in the process of the invention, if the activity of a polypeptide showing the activity of a biotin synthase, or if the activity of the polypeptide Ygr286c, preferably represented by SEQ ID NO. 128656, or a homolog or fragment thereof, or if the activity of a polypeptide encoded by a nucleic acid molecule comprising the nucleic acid SEQ ID NO. 128655, preferably the coding region thereof, or a homolog or fragment thereof, e.g. derived from Saccharomyces cerevisiae, is increased or generated. For example the activity of a nucleic acid molecule or a polypeptide comprising the nucleic acid, preferably the coding region thereof, or polypeptide or the consensus sequence or the polypeptide motif, as depicted in Table I, II or IV, application No. 19, column 5 or 8 in the respective same line as the nucleic acid molecule SEQ ID NO. 128655 or polypeptide SEQ ID NO. 128656, respectively, or a homolog or a fragment thereof, is increased or generated, or if the activity biotin synthase is increased or generated in a non-human organism, like a microorganism or a plant cell, plant or part thereof, especially with plastidic localization, whereby the respective line disclose in column 7 the fine chemical glycerol (lipid fraction).

[99051] For example, an increase of the glycerol (lipid fraction) of at least 1 percent, particularly in a range of 16 to 43-percent is conferred as compared to a corresponding non-transformed wild type non-human organism.

[99052] Accordingly, in one embodiment, an increase of triacylglycerol in a non-human organism, as compared to a corresponding non-transformed wild type non-human organism, is conferred in the process of the invention, if the activity of a polypeptide showing the activity of a mitochondrial processing protease, or if the activity of the polypeptide Yhr024c, preferably represented by SEQ ID NO. 64337, or a homolog or fragment thereof, or if the activity of a polypeptide encoded by a nucleic acid molecule comprising the nucleic acid SEQ ID NO. 64336, preferably the coding region thereof, or a homolog or fragment thereof, e.g. derived from Saccharomyces cerevisiae, is increased or generated. For example the activity of a nucleic acid molecule or a polypeptide comprising the nucleic acid, preferably the coding region thereof, or polypeptide or the consensus sequence or the polypeptide motif, as depicted in Table I, II or IV, application No. 19, column 5 or 8 in the respective same line as the nucleic acid molecule SEQ ID NO. 64336 or polypeptide SEQ ID NO. 64337, respectively, or a homolog or a fragment thereof, is increased or generated, or if the activity mitochondrial processing protease is increased or generated in a non-human organism, like a microorganism or a plant cell, plant or part thereof, especially with plastidic localization, whereby the respective line disclose in column 7 the fine chemical triacylglycerol. For example, an increase of the triacylglycerol of at least 1 percent, particularly in a range of 52 to 138-percent is conferred as compared to a corresponding non-transformed wild type non-human organism.

[99053] Accordingly, in one embodiment, an increase of bis-glyceryl phosphate (polar fraction) in a non-human organism, as compared to a corresponding non-transformed wild type non-human organism, is conferred in the process of the invention, if the activity of a polypeptide showing the activity of a YHR202W-protein, or if the activity of the polypeptide Yhr202w, preferably represented by SEQ ID NO. 154395, or a homolog or fragment thereof, or if the activity of a polypeptide encoded by a nucleic acid molecule comprising the nucleic acid SEQ ID NO. 154394, preferably the coding region thereof, or a homolog or fragment thereof, e.g. derived from Saccharomyces cerevisiae, is increased or generated. For example the activity of a nucleic acid molecule or a polypeptide comprising the nucleic acid, preferably the coding region thereof, or polypeptide or the consensus sequence or the polypeptide motif, as depicted in Table I, II or IV, application No. 19, column 5 or 8 in the respective same line as the nucleic acid molecule SEQ ID NO. 154394 or polypeptide SEQ ID NO. 154395, respectively, or a homolog or a fragment thereof, is increased or generated, or if the activity YHR202W-protein is increased or generated in a non-human organism, like a microorganism or a plant cell, plant or part thereof, especially with plastidic localization, whereby the respective line disclose in column 7 the fine chemical bis-glyceryl phosphate (polar fraction). For example, an increase of the bis-glyceryl phosphate (polar fraction) of at least 1 percent, particularly in a range of 36 to 46-percent is conferred as compared to a corresponding non-transformed wild type non-human organism.

[99054] Accordingly, in one embodiment, an increase of glycerol (polar fraction) in a non-human organism, as compared to a corresponding non-transformed wild type non-human organism, is conferred in the process of the invention, if the activity of a polypeptide showing the activity of a (DL)-glycerol-3-phosphatase, or if the activity of the polypeptide Yil053w, preferably represented by SEQ ID NO. 14770, or a homolog or fragment thereof, or if the activity of a polypeptide encoded by a nucleic acid molecule comprising the nucleic acid SEQ ID NO. 14769, preferably the coding region thereof, or a homolog or fragment thereof, e.g. derived from Saccharomyces cerevisiae, is increased or generated. For example the activity of a nucleic acid molecule or a polypeptide comprising the nucleic acid, preferably the coding region thereof, or polypeptide or the consensus sequence or the polypeptide motif, as depicted in Table I, II or IV, application No. 19, column 5 or 8 in the respective same line as the nucleic acid molecule SEQ ID NO. 14769 or polypeptide SEQ ID NO. 14770, respectively, or a homolog or a fragment thereof, is increased or generated, or if the activity (DL)-glycerol-3-phosphatase is increased or generated in a non-human organism, like a microorganism or a plant cell, plant or part thereof, especially with non-targeted localization, whereby the respective line disclose in column 7 the fine chemical glycerol (polar fraction). For example, an increase of the glycerol (polar fraction) of at least 1 percent, particularly in a range of 49 to 2038-percent is conferred as compared to a corresponding non-transformed wild type non-human organism.

[99055] Accordingly, in one embodiment, an increase of bis-glyceryl phosphate (polar fraction) in a non-human organism, as compared to a corresponding non-transformed wild type non-human organism, is conferred in the process of the invention, if the activity of a polypeptide showing the activity of a YIL083C-protein, or if the activity of the polypeptide Yil083c, preferably represented by SEQ ID NO. 149455, or a homolog or fragment thereof, or if the activity of a polypeptide encoded by a nucleic acid molecule comprising the nucleic acid SEQ ID NO. 149454, preferably the coding region thereof, or a homolog or fragment thereof, e.g. derived from Saccharomyces cerevisiae, is increased or generated. For example the activity of a nucleic acid molecule or a polypeptide comprising the nucleic acid, preferably the coding region thereof, or polypeptide or the consensus sequence or the polypeptide motif, as depicted in Table I, II or IV, application No. 19, column 5 or 8 in the respective same line as the nucleic acid molecule SEQ ID NO. 149454 or polypeptide SEQ ID NO. 149455, respectively, or a homolog or a fragment thereof, is increased or generated, or if the activity YIL083C-protein is increased or generated in a non-human organism, like a microorganism or a plant cell, plant or part thereof, especially with plastidic localization, whereby the respective line disclose in column 7 the fine chemical bis-glyceryl phosphate (polar fraction). For example, an increase of the bis-glyceryl phosphate (polar fraction) of at least 1 percent, particularly in a range of 48 to 101-percent is conferred as compared to a corresponding non-transformed wild type non-human organism.

[99056] Accordingly, in one embodiment, an increase of glycerol phosphate (lipid fraction) in a non-human organism, as compared to a corresponding non-transformed wild type non-human organism, is conferred in the process of the invention, if the activity of a polypeptide showing the activity of a YJL062W-A-protein, or if the activity of the polypeptide Yjl062w-a, preferably represented by SEQ ID NO. 154438, or a homolog or fragment thereof, or if the activity of a polypeptide encoded by a nucleic acid molecule comprising the nucleic acid SEQ ID NO. 154437, preferably the coding region thereof, or a homolog or fragment thereof, e.g. derived from Saccharomyces cerevisiae, is increased or generated. For example the activity of a nucleic acid molecule or a polypeptide comprising the nucleic acid, preferably the coding region thereof, or polypeptide or the consensus sequence or the polypeptide motif, as depicted in Table I, II or IV, application No. 19, column 5 or 8 in the respective same line as the nucleic acid molecule SEQ ID NO. 154437 or polypeptide SEQ ID NO. 154438, respectively, or a homolog or a fragment thereof, is increased or generated, or if the activity YJL062W-A-protein is increased or generated in a non-human organism, like a microorganism or a plant cell, plant or part thereof, especially with non-targeted localization, whereby the respective line disclose in column 7 the fine chemical glycerol phosphate (lipid fraction). For example, an increase of the glycerol phosphate (lipid fraction) of at least 1 percent, particularly in a range of 18 to 23-percent is conferred as compared to a corresponding non-transformed wild type non-human organism.

[99057] Accordingly, in one embodiment, an increase of bis-glyceryl phosphate (polar fraction) in a non-human organism, as compared to a corresponding non-transformed wild type non-human organism, is conferred in the process of the invention, if the activity of a polypeptide showing the activity of a DnaJ-like chaperone, or if the activity of the polypeptide Yjl073w, preferably represented by SEQ ID NO. 64965, or a homolog or fragment thereof, or if the activity of a polypeptide encoded by a nucleic acid molecule comprising the nucleic acid SEQ ID NO. 64964, preferably the coding region thereof, or a homolog or fragment thereof, e.g. derived from Saccharomyces cerevisiae, is increased or generated. For example the activity of a nucleic acid molecule or a polypeptide comprising the nucleic acid, preferably the coding region thereof, or polypeptide or the consensus sequence or the polypeptide motif, as depicted in Table I, II or IV, application No. 19, column 5 or 8 in the respective same line as the nucleic acid molecule SEQ ID NO. 64964 or polypeptide SEQ ID NO. 64965, respectively, or a homolog or a fragment thereof, is increased or generated, or if the activity DnaJ-like chaperone is increased or generated in a non-human organism, like a microorganism or a plant cell, plant or part thereof, especially with plastidic localization, whereby the respective line disclose in column 7 the fine chemical bis-glyceryl phosphate (polar fraction). For example, an increase of the bis-glyceryl phosphate (polar fraction) of at least 1 percent, particularly in a range of 33 to 36-percent is conferred as compared to a corresponding non-transformed wild type non-human organism.

[99058] Accordingly, in one embodiment, an increase of bis-glyceryl phosphate (polar fraction) in a non-human organism, as compared to a corresponding non-transformed wild type non-human organism, is conferred in the process of the invention, if the activity of a polypeptide showing the activity of a polygalacturonase, or if the activity of the polypeptide Yjr153w, preferably represented by SEQ ID NO. 66275, or a homolog or fragment thereof, or if the activity of a polypeptide encoded by a nucleic acid molecule comprising the nucleic acid SEQ ID NO. 66274, preferably the coding region thereof, or a homolog or fragment thereof, e.g. derived from Saccharomyces cerevisiae, is increased or generated. For example the activity of a nucleic acid molecule or a polypeptide comprising the nucleic acid, preferably the coding region thereof, or polypeptide or the consensus sequence or the polypeptide motif, as depicted in Table I, II or IV, application No. 19, column 5 or 8 in the respective same line as the nucleic acid molecule SEQ ID NO. 66274 or polypeptide SEQ ID NO. 66275, respectively, or a homolog or a fragment thereof, is increased or generated, or if the activity polygalacturonase is increased or generated in a non-human organism, like a microorganism or a plant cell, plant or part thereof, especially with non-targeted localization, whereby the respective line disclose in column 7 the fine chemical bis-glyceryl phosphate (polar fraction). For example, an increase of the bis-glyceryl phosphate (polar fraction) of at least 1 percent, particularly in a range of 45 to 131-percent is conferred as compared to a corresponding non-transformed wild type non-human organism.

[99059] Accordingly, in one embodiment, an increase of glycerol (polar fraction) in a non-human organism, as compared to a corresponding non-transformed wild type non-human organism, is conferred in the process of the invention, if the activity of a polypeptide showing the activity of a vacuolar sorting protein, or if the activity of the polypeptide Ylr025w, preferably represented by SEQ ID NO. 150604, or a homolog or fragment thereof, or if the activity of a polypeptide encoded by a nucleic acid molecule comprising the nucleic acid SEQ ID NO. 150603, preferably the coding region thereof, or a homolog or fragment thereof, e.g. derived from Saccharomyces cerevisiae, is increased or generated. For example the activity of a nucleic acid molecule or a polypeptide comprising the nucleic acid, preferably the coding region thereof, or polypeptide or the consensus sequence or the polypeptide motif, as depicted in Table I, II or IV, application No. 19, column 5 or 8 in the respective same line as the nucleic acid molecule SEQ ID NO. 150603 or polypeptide SEQ ID NO. 150604, respectively, or a homolog or a fragment thereof, is increased or generated, or if the activity vacuolar sorting protein is increased or generated in a non-human organism, like a microorganism or a plant cell, plant or part thereof, especially with non-targeted localization, whereby the respective line disclose in column 7 the fine chemical glycerol (polar fraction). For example, an increase of the glycerol (polar fraction) of at least 1 percent, particularly in a range of 62 to 120-percent is conferred as compared to a corresponding non-transformed wild type non-human organism.

[99060] Accordingly, in one embodiment, an increase of bis-glyceryl phosphate (polar fraction) in a non-human organism, as compared to a corresponding non-transformed wild type non-human organism, is conferred in the process of the invention, if the activity of a polypeptide showing the activity of a YLR099C-protein, or if the activity of the polypeptide Ylr099c, preferably represented by SEQ ID NO. 154455, or a homolog or fragment thereof, or if the activity of a polypeptide encoded by a nucleic acid molecule comprising the nucleic acid SEQ ID NO. 154454, preferably the coding region thereof, or a homolog or fragment thereof, e.g. derived from Saccharomyces cerevisiae, is increased or generated. For example the activity of a nucleic acid molecule or a polypeptide comprising the nucleic acid, preferably the coding region thereof, or polypeptide or the consensus sequence or the polypeptide motif, as depicted in Table I, II or IV, application No. 19, column 5 or 8 in the respective same line as the nucleic acid molecule SEQ ID NO. 154454 or polypeptide SEQ ID NO. 154455, respectively, or a homolog or a fragment thereof, is increased or generated, or if the activity YLR099C-protein is increased or generated in a non-human organism, like a microorganism or a plant cell, plant or part thereof, especially with plastidic localization, whereby the respective line disclose in column 7 the fine chemical bis-glyceryl phosphate (polar fraction). For example, an increase of the bis-glyceryl phosphate (polar fraction) of at least 1 percent, particularly in a range of 297 to 648-percent is conferred as compared to a corresponding non-transformed wild type non-human organism.

[99061] Accordingly, in one embodiment, an increase of glycerol (lipid fraction) in a non-human organism, as compared to a corresponding non-transformed wild type non-human organism, is conferred in the process of the invention, if the activity of a polypeptide showing the activity of a cyclin, or if the activity of the polypeptide Ylr210w, preferably represented by SEQ ID NO. 129066, or a homolog or fragment thereof, or if the activity of a polypeptide encoded by a nucleic acid molecule comprising the nucleic acid SEQ ID NO. 129065, preferably the coding region thereof, or a homolog or fragment thereof, e.g. derived from Saccharomyces cerevisiae, is increased or generated. For example the activity of a nucleic acid molecule or a polypeptide comprising the nucleic acid, preferably the coding region thereof, or polypeptide or the consensus sequence or the polypeptide motif, as depicted in Table I, II or IV, application No. 19, column 5 or 8 in the respective same line as the nucleic acid molecule SEQ ID NO. 129065 or polypeptide SEQ ID NO. 129066, respectively, or a homolog or a fragment thereof, is increased or generated, or if the activity cyclin is increased or generated in a non-human organism, like a microorganism or a plant cell, plant or part thereof, especially with non-targeted localization, whereby the respective line disclose in column 7 the fine chemical glycerol (lipid fraction). For example, an increase of the glycerol (lipid fraction) of at least 1 percent, particularly in a range of 17 to 25-percent is conferred as compared to a corresponding non-transformed wild type non-human organism.

[99062] Accordingly, in one embodiment, an increase of glycerol (lipid fraction) in a non-human organism, as compared to a corresponding non-transformed wild type non-human organism, is conferred in the process of the invention, if the activity of a polypeptide showing the activity of a ylr326w-protein, or if the activity of the polypeptide Ylr326w, preferably represented by SEQ ID NO. 129124, or a homolog or fragment thereof, or if the activity of a polypeptide encoded by a nucleic acid molecule comprising the nucleic acid SEQ ID NO. 129123, preferably the coding region thereof, or a homolog or fragment thereof, e.g. derived from Saccharomyces cerevisiae, is increased or generated. For example the activity of a nucleic acid molecule or a polypeptide comprising the nucleic acid, preferably the coding region thereof, or polypeptide or the consensus sequence or the polypeptide motif, as depicted in Table I, II or IV, application No. 19, column 5 or 8 in the respective same line as the nucleic acid molecule SEQ ID NO. 129123 or polypeptide SEQ ID NO. 129124, respectively, or a homolog or a fragment thereof, is increased or generated, or if the activity ylr326w-protein is increased or generated in a non-human organism, like a microorganism or a plant cell, plant or part thereof, especially with plastidic localization, whereby the respective line disclose in column 7 the fine chemical glycerol (lipid fraction). For example, an increase of the glycerol (lipid fraction) of at least 1 percent, particularly in a range of 17 to 42-percent is conferred as compared to a corresponding non-transformed wild type non-human organism.

[99063] Accordingly, in one embodiment, an increase of glycerol phosphate (lipid fraction) in a non-human organism, as compared to a corresponding non-transformed wild type non-human organism, is conferred in the process of the invention, if the activity of a polypeptide showing the activity of a ylr326w-protein, or if the activity of the polypeptide Ylr326w, preferably represented by SEQ ID NO. 129124, or a homolog or fragment thereof, or if the activity of a polypeptide encoded by a nucleic acid molecule comprising the nucleic acid SEQ ID NO. 129123, preferably the coding region thereof, or a homolog or fragment thereof, e.g. derived from Saccharomyces cerevisiae, is increased or generated. For example the activity of a nucleic acid molecule or a polypeptide comprising the nucleic acid, preferably the coding region thereof, or polypeptide or the consensus sequence or the polypeptide motif, as depicted in Table I, II or IV, application No. 19, column 5 or 8 in the respective same line as the nucleic acid molecule SEQ ID NO. 129123 or polypeptide SEQ ID NO. 129124, respectively, or a homolog or a fragment thereof, is increased or generated, or if the activity ylr326w-protein is increased or generated in a non-human organism, like a microorganism or a plant cell, plant or part thereof, especially with plastidic localization, whereby the respective line disclose in column 7 the fine chemical glycerol phosphate (lipid fraction). For example, an increase of the glycerol phosphate (lipid fraction) of at least 1 percent, particularly in a range of 26 to 46-percent is conferred as compared to a corresponding non-transformed wild type non-human organism.

[99064] Accordingly, in one embodiment, an increase of glycerol (lipid fraction) in a non-human organism, as compared to a corresponding non-transformed wild type non-human organism, is conferred in the process of the invention, if the activity of a polypeptide showing the activity of a heat shock protein Hsp40, or if the activity of the polypeptide Ynl007c, preferably represented by SEQ ID NO. 139174, or a homolog or fragment thereof, or if the activity of a polypeptide encoded by a nucleic acid molecule comprising the nucleic acid SEQ ID NO. 139173, preferably the coding region thereof, or a homolog or fragment thereof, e.g. derived from Saccharomyces cerevisiae, is increased or generated. For example the activity of a nucleic acid molecule or a polypeptide comprising the nucleic acid, preferably the coding region thereof, or polypeptide or the consensus sequence or the polypeptide motif, as depicted in Table I, II or IV, application No. 19, column 5 or 8 in the respective same line as the nucleic acid molecule SEQ ID NO. 139173 or polypeptide SEQ ID NO. 139174, respectively, or a homolog or a fragment thereof, is increased or generated, or if the activity heat shock protein Hsp40 is increased or generated in a non-human organism, like a microorganism or a plant cell, plant or part thereof, especially with non-targeted localization, whereby the respective line disclose in column 7 the fine chemical glycerol (lipid fraction). For example, an increase of the glycerol (lipid fraction) of at least 1 percent, particularly in a range of 17 to 57-percent is conferred as compared to a corresponding non-transformed wild type non-human organism.

[99065] Accordingly, in one embodiment, an increase of glycerol (lipid fraction) in a non-human organism, as compared to a corresponding non-transformed wild type non-human organism, is conferred in the process of the invention, if the activity of a polypeptide showing the activity of a phosphotransferase, or if the activity of the polypeptide Ynl130c, preferably represented by SEQ ID NO. 129471, or a homolog or fragment thereof, or if the activity of a polypeptide encoded by a nucleic acid molecule comprising the nucleic acid SEQ ID NO. 129470, preferably the coding region thereof, or a homolog or fragment thereof, e.g. derived from Saccharomyces cerevisiae, is increased or generated. For example the activity of a nucleic acid molecule or a polypeptide comprising the nucleic acid, preferably the coding region thereof, or polypeptide or the consensus sequence or the polypeptide motif, as depicted in Table I, II or IV, application No. 19, column 5 or 8 in the respective same line as the nucleic acid molecule SEQ ID NO. 129470 or polypeptide SEQ ID NO. 129471, respectively, or a homolog or a fragment thereof, is increased or generated, or if the activity phosphotransferase is increased or generated in a non-human organism, like a microorganism or a plant cell, plant or part thereof, especially with non-targeted localization, whereby the respective line disclose in column 7 the fine chemical glycerol (lipid fraction). For example, an increase of the glycerol (lipid fraction) of at least 1 percent, particularly in a range of 17 to 53-percent is conferred as compared to a corresponding non-transformed wild type non-human organism.

[99066] Accordingly, in one embodiment, an increase of glycerol (lipid fraction) in a non-human organism, as compared to a corresponding non-transformed wild type non-human organism, is conferred in the process of the invention, if the activity of a polypeptide showing the activity of a Elongation factor Tu, or if the activity of the polypeptide Yor187w, preferably represented by SEQ ID NO. 129575, or a homolog or fragment thereof, or if the activity of a polypeptide encoded by a nucleic acid molecule comprising the nucleic acid SEQ ID NO. 129574, preferably the coding region thereof, or a homolog or fragment thereof, e.g. derived from Saccharomyces cerevisiae, is increased or generated. For example the activity of a nucleic acid molecule or a polypeptide comprising the nucleic acid, preferably the coding region thereof, or polypeptide or the consensus sequence or the polypeptide motif, as depicted in Table I, II or IV, application No. 19, column 5 or 8 in the respective same line as the nucleic acid molecule SEQ ID NO. 129574 or polypeptide SEQ ID NO. 129575, respectively, or a homolog or a fragment thereof, is increased or generated, or if the activity Elongation factor Tu is increased or generated in a non-human organism, like a microorganism or a plant cell, plant or part thereof, especially with non-targeted localization, whereby the respective line disclose in column 7 the fine chemical glycerol (lipid fraction). For example, an increase of the glycerol (lipid fraction) of at least 1 percent, partitularly in a range of 18 to 49-percent is conferred as compared to a corresponding non-transformed wild type non-human organism.

[99067] Accordingly, in one embodiment, an increase of bis-glyceryl phosphate (polar fraction) in a non-human organism, as compared to a corresponding non-transformed wild type non-human organism, is conferred in the process of the invention, if the activity of a polypeptide showing the activity of a YPL162C.protein, or if the activity of the polypeptide Ypl162c, preferably represented by SEQ ID NO. 154478, or a homolog or fragment thereof, or if the activity of a polypeptide encoded by a nucleic acid molecule comprising the nucleic acid SEQ ID NO. 154477, preferably the coding region thereof, or a homolog or fragment thereof, e.g. derived from Saccharomyces cerevisiae, is increased or generated. For example the activity of a nucleic acid molecule or a polypeptide comprising the nucleic acid, preferably the coding region thereof, or polypeptide or the consensus sequence or the polypeptide motif, as depicted in Table I, II or IV, application No. 19, column 5 or 8 in the respective same line as the nucleic acid molecule SEQ ID NO. 154477 or polypeptide SEQ ID NO. 154478, respectively, or a homolog or a fragment thereof, is increased or generated, or if the activity YPL162C.protein is increased or generated in a non-human organism, like a microorganism or a plant cell, plant or part thereof, especially with plastidic localization, whereby the respective line disclose in column 7 the fine chemical bis-glyceryl phosphate (polar fraction). For example, an increase of the bis-glyceryl phosphate (polar fraction) of at least 1 percent, particularly in a range of 37 to 52-percent is conferred as compared to a corresponding non-transformed wild type non-human organism.

[99068] Accordingly, in one embodiment, an increase of glycerol (lipid fraction) in a non-human organism, as compared to a corresponding non-transformed wild type non-human organism, is conferred in the process of the invention, if the activity of a polypeptide showing the activity of a mitogen-activated protein kinase, or if the activity of the polypeptide Ypr054w, preferably represented by SEQ ID NO. 140111, or a homolog or fragment thereof, or if the activity of a polypeptide encoded by a nucleic acid molecule comprising the nucleic acid SEQ ID NO. 140110, preferably the coding region thereof, or a homolog or fragment thereof, e.g. derived from Saccharomyces cerevisiae, is increased or generated. For example the activity of a nucleic acid molecule or a polypeptide comprising the nucleic acid, preferably the coding region thereof, or polypeptide or the consensus sequence or the polypeptide motif, as depicted in Table I, II or IV, application No. 19, column 5 or 8 in the respective same line as the nucleic acid molecule SEQ ID NO. 140110 or polypeptide SEQ ID NO. 140111, respectively, or a homolog or a fragment thereof, is increased or generated, or if the activity mitogen-activated protein kinase is increased or generated in a non-human organism, like a microorganism or a plant cell, plant or part thereof, especially with non-targeted localization, whereby the respective line disclose in column 7 the fine chemical glycerol (lipid fraction). For example, an increase of the glycerol (lipid fraction) of at least 1 percent, particularly in a range of 20 to 42-percent is conferred as compared to a corresponding non-transformed wild type non-human organism.

[99069] Accordingly, in one embodiment, an increase of bis-glyceryl phosphate (polar fraction) in a non-human organism, as compared to a corresponding non-transformed wild type non-human organism, is conferred in the process of the invention, if the activity of a polypeptide showing the activity of a Zm_{—}4842_BE510522-protein, or if the activity of the polypeptide Zm_{—}4842_BE510522, preferably represented by SEQ ID NO. 68414, or a homolog or fragment thereof, or if the activity of a polypeptide encoded by a nucleic acid molecule comprising the nucleic acid SEQ ID NO. 68413, preferably the coding region thereof, or a homolog or fragment thereof, e.g. derived from Zea mays, is increased or generated. For example the activity of a nucleic acid molecule or a polypeptide comprising the nucleic acid, preferably the coding region thereof, or polypeptide or the consensus sequence or the polypeptide motif, as depicted in Table I, II or IV, application No. 19, column 5 or 8 in the respective same line as the nucleic acid molecule SEQ ID NO. 68413 or polypeptide SEQ ID NO. 68414, respectively, or a homolog or a fragment thereof, is increased or generated, or if the activity Zm_{—}4842_BE510522-protein is increased or generated in a non-human organism, like a microorganism or a plant cell, plant or part thereof, especially with non-targeted localization, whereby the respective line disclose in column 7 the fine chemical bis-glyceryl phosphate (polar fraction). For example, an increase of the bis-glyceryl phosphate (polar fraction) of at least 1 percent, particularly in a range of 46 to 72-percent is conferred as compared to a corresponding non-transformed wild type non-human organism.

[99070] Accordingly, in one embodiment, an increase of bis-glyceryl phosphate (polar fraction) in a non-human organism, as compared to a corresponding non-transformed wild type non-human organism, is conferred in the process of the invention, if the activity of a polypeptide showing the activity of a 49747384_SOYBEAN-protein, or if the activity of the polypeptide 49747384_SOYBEAN, preferably represented by SEQ ID NO. 70, or a homolog or fragment thereof, or if the activity of a polypeptide encoded by a nucleic acid molecule comprising the nucleic acid SEQ ID NO. 69, preferably the coding region thereof, or a homolog or fragment thereof, e.g. derived from Glycine max, is increased or generated. For example the activity of a nucleic acid molecule or a polypeptide comprising the nucleic acid, preferably the coding region thereof, or polypeptide or the consensus sequence or the polypeptide motif, as depicted in Table I, II or IV, application No. 19, column 5 or 8 in the respective same line as the nucleic acid molecule SEQ ID NO. 69 or polypeptide SEQ ID NO. 70, respectively, or a homolog or a fragment thereof, is increased or generated, or if the activity 49747384_SOYBEAN-protein is increased or generated in a non-human organism, like a microorganism or a plant cell, plant or part thereof, especially with non-targeted localization, whereby the respective line disclose in column 7 the fine chemical bis-glyceryl phosphate (polar fraction). For example, an increase of the bis-glyceryl phosphate (polar fraction) of at least 1 percent, particularly in a range of 47 to 114-percent is conferred as compared to a corresponding non-transformed wild type non-human organism.

[99071] [0096.1.7.19] to [0103.1.7.19] for the disclosure of theses paragraphs see [0096.1.7.7] to [0103.1.7.7] above

[99072] In this paragraph “A” means “Goffeau et al., Science 274 (5287), 546 (1996)”, “B” means “Blattner et al., Science 277 (5331), 1453 (1997)”, “C” means “Nakamura et al., Nucleic Acids Res. 28(1), 72 (2000)”, “D” means “deposition of the sequences to the EMBL/GenBank/DDBJ databases under “Sequencing of the draft genome assembly of Azotobacter vinelandii AvOP”. in June 2005 by Copeland et al.”, “E” means “Henne et al., Nat. Biotechnol. 22 (5), 547 (2004)”, “F” means “Kaul et al., Nature 408 (6814), 796 (2000)”, and “G” means “Matsumoto et al., Nature 436 (7052), 793 (2005)”.

[99073] The nucleic acid sequence of At1g07430 from Arabidopsis thaliana, e.g. as shown in the respective line in column 5 of Table I, application no. 19, has been published in F. And the activity of the gene product thereof is the activity of protein phosphatase.

[99074] Accordingly, in one embodiment, the process of the present invention for producing glycerol phosphate (lipid fraction) in a non-human organism, like a microorganism or a plant or a part thereof, comprises increasing or generating the activity of a gene product with the activity of a gene product conferring the activity of “protein phosphatase”, especially from Arabidopsis thaliana or its functional equivalent or its homolog, e.g. the increase of
[99075] (a) a gene product of a gene comprising the nucleic acid molecule as shown in the respective line in column 5 of Table I (whereby the respective line disclose in column 7 the fine chemical glycerol phosphate (lipid fraction)), application no. 19, preferably the coding region thereof, or a homolog or a fragment thereof, and being depicted in the same respective line as said At1g07430, or a functional equivalent or a homolog thereof as shown in column 8 of Table I, application no. 19, preferably the coding region thereof, particularly a homolog or functional equivalent as shown in column 8 of Table I B, application no. 19, and being depicted in the same respective line as said At1g07430, and preferably the activity is increased non-targeted, or
[99076] (b) a polypeptide comprising a polypeptide, a consensus sequence or at least a polypeptide motif as shown in the respective line in column 5 of Table II or in column 8 of Table IV, application no. 19, respectively, and being depicted in the same respective line as said At1g07430, or a functional equivalent or a homolog thereof as depicted in column 8 of Table II, application no. 19, preferably a homolog or functional equivalent as depicted in column 8 of Table II B, application no. 19, and being depicted in the same respective line as said At1g07430, and preferably the activity is increased non-targeted, whereby the respective line disclose in column 7 the fine chemical glycerol phosphate (lipid fraction).

[99077] Accordingly, in one embodiment, the molecule which activity is to be increased in the process of the invention is the gene product with an activity as a “protein phosphatase”, preferably it is the molecule of section (a) or (b) of this paragraph.

[99078] In particular, it was observed that in plants, especially in Arabidopsis thaliana, increasing or generating the activity of a gene product non-targeted with the activity of a “protein phosphatase”, preferably being encoded by a gene comprising the nucleic acid sequence SEQ ID NO. 17451, preferably the coding region thereof, conferred the production of or the increase in glycerol phosphate (lipid fraction) compared with the wild type control.

[99079] The nucleic acid sequence of At1g23110 from Arabidopsis thaliana, e.g. as shown in the respective line in column 5 of Table I, application no. 19, has been published in F. And the activity of the gene product thereof is the activity of At1g23110-protein.

[99080] Accordingly, in one embodiment, the process of the present invention for producing bis-glyceryl phosphate (polar fraction) in a non-human organism, like a microorganism or a plant or a part thereof, comprises increasing or generating the activity of a gene product with the activity of a gene product conferring the activity of “At1g23110-protein”, especially from Arabidopsis thaliana or its functional equivalent or its homolog, e.g. the increase of
[99081] (a) a gene product of a gene comprising the nucleic acid molecule as shown in the respective line in column 5 of Table I (whereby the respective line disclose in column 7 the fine chemical bis-glyceryl phosphate (polar fraction)), application no. 19, preferably the coding region thereof, or a homolog or a fragment thereof, and being depicted in the same respective line as said At1g23110, or a functional equivalent or a homolog thereof as shown in column 8 of Table I, application no. 19, preferably the coding region thereof, particularly a homolog or functional equivalent as shown in column 8 of Table I B, application no. 19, and being depicted in the same respective line as said At1g23110, and preferably the activity is increased non-targeted, or
[99082] (b) a polypeptide comprising a polypeptide, a consensus sequence or at least a polypeptide motif as shown in the respective line in column 5 of Table II or in column 8 of Table IV, application no. 19, respectively, and being depicted in the same respective line as said At1g23110, or a functional equivalent or a homolog thereof as depicted in column 8 of Table II, application no. 19, preferably a homolog or functional equivalent as depicted in column 8 of Table II B, application no. 19, and being depicted in the same respective line as said At1g23110, and preferably the activity is increased non-targeted, whereby the respective line disclose in column 7 the fine chemical bis-glyceryl phosphate (polar fraction).

[99083] Accordingly, in one embodiment, the molecule which activity is to be increased in the process of the invention is the gene product with an activity as a “At1g23110-protein”, preferably it is the molecule of section (a) or (b) of this paragraph.

[99084] In particular, it was observed that in plants, especially in Arabidopsis thaliana, increasing or generating the activity of a gene product non-targeted with the activity of a “At1g23110-protein”, preferably being encoded by a gene comprising the nucleic acid sequence SEQ ID NO. 102086, preferably the coding region thereof, conferred the production of or the increase in bis-glyceryl phosphate (polar fraction) compared with the wild type control.

[99085] The nucleic acid sequence of At1g36730 from Arabidopsis thaliana, e.g. as shown in the respective line in column 5 of Table I, application no. 19, has been published in F. And the activity of the gene product thereof is the activity of eukaryotic translation initiation factor 5.

[99086] Accordingly, in one embodiment, the process of the present invention for producing bis-glyceryl phosphate (polar fraction) in a non-human organism, like a microorganism or a plant or a part thereof, comprises increasing or generating the activity of a gene product with the activity of a gene product conferring the activity of “eukaryotic translation initiation factor 5”, especially from Arabidopsis thaliana or its functional equivalent or its homolog, e.g. the increase of
[99087] (a) a gene product of a gene comprising the nucleic acid molecule as shown in the respective line in column 5 of Table I (whereby the respective line disclose in column 7 the fine chemical bis-glyceryl phosphate (polar fraction)), application no. 19, preferably the coding region thereof, or a homolog or a fragment thereof, and being depicted in the same respective line as said At1g36730, or a functional equivalent or a homolog thereof as shown in column 8 of Table I, application no. 19, preferably the coding region thereof, particularly a homolog or functional equivalent as shown in column 8 of Table I B, application no. 19, and being depicted in the same respective line as said At1g36730, and preferably the activity is increased non-targeted, or
[99088] (b) a polypeptide comprising a polypeptide, a consensus sequence or at least a polypeptide motif as shown in the respective line in column 5 of Table II or in column 8 of Table IV, application no. 19, respectively, and being depicted in the same respective line as said At1g36730, or a functional equivalent or a homolog thereof as depicted in column 8 of Table II, application no. 19, preferably a homolog or functional equivalent as depicted in column 8 of Table II B, application no. 19, and being depicted in the same respective line as said At1g36730, and preferably the activity is increased non-targeted, whereby the respective line disclose in column 7 the fine chemical bis-glyceryl phosphate (polar fraction).

[99089] Accordingly, in one embodiment, the molecule which activity is to be increased in the process of the invention is the gene product with an activity as a “eukaryotic translation initiation factor 5”, preferably it is the molecule of section (a) or (b) of this paragraph.

[99090] In particular, it was observed that in plants, especially in Arabidopsis thaliana, increasing or generating the activity of a gene product non-targeted with the activity of a “eukaryotic translation initiation factor 5”, preferably being encoded by a gene comprising the nucleic acid sequence SEQ ID NO. 17968, preferably the coding region thereof, conferred the production of or the increase in bis-glyceryl phosphate (polar fraction) compared with the wild type control.

[99091] The nucleic acid sequence of At1g36730 from Arabidopsis thaliana, e.g. as shown in the respective line in column 5 of Table I, application no. 19, has been published in F. And the activity of the gene product thereof is the activity of eukaryotic translation initiation factor 5.

[99092] Accordingly, in one embodiment, the process of the present invention for producing glycerol phosphate (lipid fraction) in a non-human organism, like a microorganism or a plant or a part thereof, comprises increasing or generating the activity of a gene product with the activity of a gene product conferring the activity of “eukaryotic translation initiation factor 5”, especially from Arabidopsis thaliana or its functional equivalent or its homolog, e.g. the increase of
[99093] (a) a gene product of a gene comprising the nucleic acid molecule as shown in the respective line in column 5 of Table I (whereby the respective line disclose in column 7 the fine chemical glycerol phosphate (lipid fraction)), application no. 19, preferably the coding region thereof, or a homolog or a fragment thereof, and being depicted in the same respective line as said At1g36730, or a functional equivalent or a homolog thereof as shown in column 8 of Table I, application no. 19, preferably the coding region thereof, particularly a homolog or functional equivalent as shown in column 8 of Table I B, application no. 19, and being depicted in the same respective line as said At1g36730, and preferably the activity is increased non-targeted, or
[99094] (b) a polypeptide comprising a polypeptide, a consensus sequence or at least a polypeptide motif as shown in the respective line in column 5 of Table II or in column 8 of Table IV, application no. 19, respectively, and being depicted in the same respective line as said At1g36730, or a functional equivalent or a homolog thereof as depicted in column 8 of Table II, application no. 19, preferably a homolog or functional equivalent as depicted in column 8 of Table II B, application no. 19, and being depicted in the same respective line as said At1g36730, and preferably the activity is increased non-targeted, whereby the respective line disclose in column 7 the fine chemical glycerol phosphate (lipid fraction).

[99095] Accordingly, in one embodiment, the molecule which activity is to be increased in the process of the invention is the gene product with an activity as a “eukaryotic translation initiation factor 5”, preferably it is the molecule of section (a) or (b) of this paragraph.

[99096] In particular, it was observed that in plants, especially in Arabidopsis thaliana, increasing or generating the activity of a gene product non-targeted with the activity of a “eukaryotic translation initiation factor 5”, preferably being encoded by a gene comprising the nucleic acid sequence SEQ ID NO. 17968, preferably the coding region thereof, conferred the production of or the increase in glycerol phosphate (lipid fraction) compared with the wild type control.

[99097] The nucleic acid sequence of At1g67340 from Arabidopsis thaliana, e.g. as shown in the respective line in column 5 of Table I, application no. 19, has been published in F. And the activity of the gene product thereof is the activity of At1g67340-protein.

[99098] Accordingly, in one embodiment, the process of the present invention for producing triacylglycerol in a non-human organism, like a microorganism or a plant or a part thereof, comprises increasing or generating the activity of a gene product with the activity of a gene product conferring the activity of “At1g67340-protein”, especially from Arabidopsis thaliana or its functional equivalent or its homolog, e.g. the increase of
[99099] (a) a gene product of a gene comprising the nucleic acid molecule as shown in the respective line in column 5 of Table I (whereby the respective line disclose in column 7 the fine chemical triacylglycerol), application no. 19, preferably the coding region thereof, or a homolog or a fragment thereof, and being depicted in the same respective line as said At1g67340, or a functional equivalent or a homolog thereof as shown in column 8 of Table I, application no. 19, preferably the coding region thereof, particularly a homolog or functional equivalent as shown in column 8 of Table I B, application no. 19, and being depicted in the same respective line as said At1g67340, and preferably the activity is increased non-targeted, or
[99100] (b) a polypeptide comprising a polypeptide, a consensus sequence or at least a polypeptide motif as shown in the respective line in column 5 of Table II or in column 8 of Table IV, application no. 19, respectively, and being depicted in the same respective line as said At1g67340, or a functional equivalent or a homolog thereof as depicted in column 8 of Table II, application no. 19, preferably a homolog or functional equivalent as depicted in column 8 of Table II B, application no. 19, and being depicted in the same respective line as said At1g67340, and preferably the activity is increased non-targeted, whereby the respective line disclose in column 7 the fine chemical triacylglycerol.

[99101] Accordingly, in one embodiment, the molecule which activity is to be increased in the process of the invention is the gene product with an activity as a “At1g67340-protein”, preferably it is the molecule of section (a) or (b) of this paragraph.

[99102] In particular, it was observed that in plants, especially in Arabidopsis thaliana, increasing or generating the activity of a gene product non-targeted with the activity of a “At1g67340-protein”, preferably being encoded by a gene comprising the nucleic acid sequence SEQ ID NO. 19364, preferably the coding region thereof, conferred the production of or the increase in triacylglycerol compared with the wild type control.

[99103] The nucleic acid sequence of At1g68320 from Arabidopsis thaliana, e.g. as shown in the respective line in column 5 of Table I, application no. 19, has been published in F. And the activity of the gene product thereof is the activity of transcription factor.

[99104] Accordingly, in one embodiment, the process of the present invention for producing glycerol (lipid fraction) in a non-human organism, like a microorganism or a plant or a part thereof, comprises increasing or generating the activity of a gene product with the activity of a gene product conferring the activity of “transcription factor”, especially from Arabidopsis thaliana or its functional equivalent or its homolog, e.g. the increase of
[99105] (a) a gene product of a gene comprising the nucleic acid molecule as shown in the respective line in column 5 of Table I (whereby the respective line disclose in column 7 the fine chemical glycerol (lipid fraction)), application no. 19, preferably the coding region thereof, or a homolog or a fragment thereof, and being depicted in the same respective line as said At1g68320, or a functional equivalent or a homolog thereof as shown in column 8 of Table I, application no. 19, preferably the coding region thereof, particularly a homolog or functional equivalent as shown in column 8 of Table I B, application no. 19, and being depicted in the same respective line as said At1g68320, and preferably the activity is increased non-targeted, or
[99106] (b) a polypeptide comprising a polypeptide, a consensus sequence or at least a polypeptide motif as shown in the respective line in column 5 of Table II or in column 8 of Table IV, application no. 19, respectively, and being depicted in the same respective line as said At1g68320, or a functional equivalent or a homolog thereof as depicted in column 8 of Table II, application no. 19, preferably a homolog or functional equivalent as depicted in column 8 of Table II B, application no. 19, and being depicted in the same respective line as said At1g68320, and preferably the activity is increased non-targeted, whereby the respective line disclose in column 7 the fine chemical glycerol (lipid fraction).

[99107] Accordingly, in one embodiment, the molecule which activity is to be increased in the process of the invention is the gene product with an activity as a “transcription factor”, preferably it is the molecule of section (a) or (b) of this paragraph.

[99108] In particular, it was observed that in plants, especially in Arabidopsis thaliana, increasing or generating the activity of a gene product non-targeted with the activity of a “transcription factor”, preferably being encoded by a gene comprising the nucleic acid sequence SEQ ID NO. 1061, preferably the coding region thereof, conferred the production of or the increase in glycerol (lipid fraction) compared with the wild type control.

[99109] The nucleic acid sequence of At1g72770 from Arabidopsis thaliana, e.g. as shown in the respective line in column 5 of Table I, application no. 19, has been published in F. And the activity of the gene product thereof is the activity of protein phosphatase.

[99110] Accordingly, in one embodiment, the process of the present invention for producing bis-glyceryl phosphate (polar fraction) in a non-human organism, like a microorganism or a plant or a part thereof, comprises increasing or generating the activity of a gene product with the activity of a gene product conferring the activity of “protein phosphatase”, especially from Arabidopsis thaliana or its functional equivalent or its homolog, e.g. the increase of
[99111] (a) a gene product of a gene comprising the nucleic acid molecule as shown in the respective line in column 5 of Table I (whereby the respective line disclose in column 7 the fine chemical bis-glyceryl phosphate (polar fraction)), application no. 19, preferably the coding region thereof, or a homolog or a fragment thereof, and being depicted in the same respective line as said At1g72770, or a functional equivalent or a homolog thereof as shown in column 8 of Table I, application no. 19, preferably the coding region thereof, particularly a homolog or functional equivalent as shown in column 8 of Table I B, application no. 19, and being depicted in the same respective line as said At1g72770, and preferably the activity is increased non-targeted, or
[99112] (b) a polypeptide comprising a polypeptide, a consensus sequence or at least a polypeptide motif as shown in the respective line in column 5 of Table II or in column 8 of Table IV, application no. 19, respectively, and being depicted in the same respective line as said At1g72770, or a functional equivalent or a homolog thereof as depicted in column 8 of Table II, application no. 19, preferably a homolog or functional equivalent as depicted in column 8 of Table II B, application no. 19, and being depicted in the same respective line as said At1g72770, and preferably the activity is increased non-targeted, whereby the respective line disclose in column 7 the fine chemical bis-glyceryl phosphate (polar fraction).

[99113] Accordingly, in one embodiment, the molecule which activity is to be increased in the process of the invention is the gene product with an activity as a “protein phosphatase”, preferably it is the molecule of section (a) or (b) of this paragraph.

[99114] In particular, it was observed that in plants, especially in Arabidopsis thaliana, increasing or generating the activity of a gene product non-targeted with the activity of a “protein phosphatase”, preferably being encoded by a gene comprising the nucleic acid sequence SEQ ID NO. 19419, preferably the coding region thereof, conferred the production of or the increase in bis-glyceryl phosphate (polar fraction) compared with the wild type control.

[99115] The nucleic acid sequence of At1g72770 from Arabidopsis thaliana, e.g. as shown in the respective line in column 5 of Table I, application no. 19, has been published in F. And the activity of the gene product thereof is the activity of protein phosphatase.

[99116] Accordingly, in one embodiment, the process of the present invention for producing glycerol (lipid fraction) in a non-human organism, like a microorganism or a plant or a part thereof, comprises increasing or generating the activity of a gene product with the activity of a gene product conferring the activity of “protein phosphatase”, especially from Arabidopsis thaliana or its functional equivalent or its homolog, e.g. the increase of
[99117] (a) a gene product of a gene comprising the nucleic acid molecule as shown in the respective line in column 5 of Table I (whereby the respective line disclose in column 7 the fine chemical glycerol (lipid fraction)), application no. 19, preferably the coding region thereof, or a homolog or a fragment thereof, and being depicted in the same respective line as said At1g72770, or a functional equivalent or a homolog thereof as shown in column 8 of Table I, application no. 19, preferably the coding region thereof, particularly a homolog or functional equivalent as shown in column 8 of Table I B, application no. 19, and being depicted in the same respective line as said At1g72770, and preferably the activity is increased non-targeted, or
[99118] (b) a polypeptide comprising a polypeptide, a consensus sequence or at least a polypeptide motif as shown in the respective line in column 5 of Table II or in column 8 of Table IV, application no. 19, respectively, and being depicted in the same respective line as said At1g72770, or a functional equivalent or a homolog thereof as depicted in column 8 of Table II, application no. 19, preferably a homolog or functional equivalent as depicted in column 8 of Table II B, application no. 19, and being depicted in the same respective line as said At1g72770, and preferably the activity is increased non-targeted, whereby the respective line disclose in column 7 the fine chemical glycerol (lipid fraction).

[99119] Accordingly, in one embodiment, the molecule which activity is to be increased in the process of the invention is the gene product with an activity as a “protein phosphatase”, preferably it is the molecule of section (a) or (b) of this paragraph.

[99120] In particular, it was observed that in plants, especially in Arabidopsis thaliana, increasing or generating the activity of a gene product non-targeted with the activity of a “protein phosphatase”, preferably being encoded by a gene comprising the nucleic acid sequence SEQ ID NO. 19419, preferably the coding region thereof, conferred the production of or the increase in glycerol (lipid fraction) compared with the wild type control.

[99121] The nucleic acid sequence of At1g72770 from Arabidopsis thaliana, e.g. as shown in the respective line in column 5 of Table I, application no. 19, has been published in F. And the activity of the gene product thereof is the activity of protein phosphatase.

[99122] Accordingly, in one embodiment, the process of the present invention for producing glycerol phosphate (lipid fraction) in a non-human organism, like a microorganism or a plant or a part thereof, comprises increasing or generating the activity of a gene product with the activity of a gene product conferring the activity of “protein phosphatase”, especially from Arabidopsis thaliana or its functional equivalent or its homolog, e.g. the increase of
[99123] (a) a gene product of a gene comprising the nucleic acid molecule as shown in the respective line in column 5 of Table I (whereby the respective line disclose in column 7 the fine chemical glycerol phosphate (lipid fraction)), application no. 19, preferably the coding region thereof, or a homolog or a fragment thereof, and being depicted in the same respective line as said At1g72770, or a functional equivalent or a homolog thereof as shown in column 8 of Table I, application no. 19, preferably the coding region thereof, particularly a homolog or functional equivalent as shown in column 8 of Table I B, application no. 19, and being depicted in the same respective line as said At1g72770, and preferably the activity is increased non-targeted, or
[99124] (b) a polypeptide comprising a polypeptide, a consensus sequence or at least a polypeptide motif as shown in the respective line in column 5 of Table II or in column 8 of Table IV, application no. 19, respectively, and being depicted in the same respective line as said At1g72770, or a functional equivalent or a homolog thereof as depicted in column 8 of Table II, application no. 19, preferably a homolog or functional equivalent as depicted in column 8 of Table II B, application no. 19, and being depicted in the same respective line as said At1g72770, and preferably the activity is increased non-targeted, whereby the respective line disclose in column 7 the fine chemical glycerol phosphate (lipid fraction).

[99125] Accordingly, in one embodiment, the molecule which activity is to be increased in the process of the invention is the gene product with an activity as a “protein phosphatase”, preferably it is the molecule of section (a) or (b) of this paragraph.

[99126] In particular, it was observed that in plants, especially in Arabidopsis thaliana, increasing or generating the activity of a gene product non-targeted with the activity of a “protein phosphatase”, preferably being encoded by a gene comprising the nucleic acid sequence SEQ ID NO. 19419, preferably the coding region thereof, conferred the production of or the increase in glycerol phosphate (lipid fraction) compared with the wild type control.

[99127] The nucleic acid sequence of At2g30360 from Arabidopsis thaliana, e.g. as shown in the respective line in column 5 of Table I, application no. 19, has been published in F. And the activity of the gene product thereof is the activity of CBL-interacting protein kinase.

[99128] Accordingly, in one embodiment, the process of the present invention for producing bis-glyceryl phosphate (polar fraction) in a non-human organism, like a microorganism or a plant or a part thereof, comprises increasing or generating the activity of a gene product with the activity of a gene product conferring the activity of “CBL-interacting protein kinase”, especially from Arabidopsis thaliana or its functional equivalent or its homolog, e.g. the increase of
[99129] (a) a gene product of a gene comprising the nucleic acid molecule as shown in the respective line in column 5 of Table I (whereby the respective line disclose in column 7 the fine chemical bis-glyceryl phosphate (polar fraction)), application no. 19, preferably the coding region thereof, or a homolog or a fragment thereof, and being depicted in the same respective line as said At2g30360, or a functional equivalent or a homolog thereof as shown in column 8 of Table I, application no. 19, preferably the coding region thereof, particularly a homolog or functional equivalent as shown in column 8 of Table I B, application no. 19, and being depicted in the same respective line as said At2g30360, and preferably the activity is increased non-targeted, or
[99130] (b) a polypeptide comprising a polypeptide, a consensus sequence or at least a polypeptide motif as shown in the respective line in column 5 of Table II or in column 8 of Table IV, application no. 19, respectively, and being depicted in the same respective line as said At2g30360, or a functional equivalent or a homolog thereof as depicted in column 8 of Table II, application no. 19, preferably a homolog or functional equivalent as depicted in column 8 of Table II B, application no. 19, and being depicted in the same respective line as said At2g30360, and preferably the activity is increased non-targeted, whereby the respective line disclose in column 7 the fine chemical bis-glyceryl phosphate (polar fraction).

[99131] Accordingly, in one embodiment, the molecule which activity is to be increased in the process of the invention is the gene product with an activity as a “CBL-interacting protein kinase”, preferably it is the molecule of section (a) or (b) of this paragraph.

[99132] In particular, it was observed that in plants, especially in Arabidopsis thaliana, increasing or generating the activity of a gene product non-targeted with the activity of a “CBL-interacting protein kinase”, preferably being encoded by a gene comprising the nucleic acid sequence SEQ ID NO. 19919, preferably the coding region thereof, conferred the production of or the increase in bis-glyceryl phosphate (polar fraction) compared with the wild type control.

[99133] The nucleic acid sequence of At2g46500 from Arabidopsis thaliana, e.g. as shown in the respective line in column 5 of Table I, application no. 19, has been published in F. And the activity of the gene product thereof is the activity of phosphatidylinositol 3- and 4-kinase family protein.

[99134] Accordingly, in one embodiment, the process of the present invention for producing bis-glyceryl phosphate (polar fraction) in a non-human organism, like a microorganism or a plant or a part thereof, comprises increasing or generating the activity of a gene product with the activity of a gene product conferring the activity of “phosphatidylinositol 3- and 4-kinase family protein”, especially from Arabidopsis thaliana or its functional equivalent or its homolog, e.g. the increase of
[99135] (a) a gene product of a gene comprising the nucleic acid molecule as shown in the respective line in column 5 of Table I (whereby the respective line disclose in column 7 the fine chemical bis-glyceryl phosphate (polar fraction)), application no. 19, preferably the coding region thereof, or a homolog or a fragment thereof, and being depicted in the same respective line as said At2g46500, or a functional equivalent or a homolog thereof as shown in column 8 of Table I, application no. 19, preferably the coding region thereof, particularly a homolog or functional equivalent as shown in column 8 of Table I B, application no. 19, and being depicted in the same respective line as said At2g46500, and preferably the activity is increased non-targeted, or
[99136] (b) a polypeptide comprising a polypeptide, a consensus sequence or at least a polypeptide motif as shown in the respective line in column 5 of Table II or in column 8 of Table IV, application no. 19, respectively, and being depicted in the same respective line as said At2g46500, or a functional equivalent or a homolog thereof as depicted in column 8 of Table II, application no. 19, preferably a homolog or functional equivalent as depicted in column 8 of Table II B, application no. 19, and being depicted in the same respective line as said At2g46500, and preferably the activity is increased non-targeted, whereby the respective line disclose in column 7 the fine chemical bis-glyceryl phosphate (polar fraction).

[99137] Accordingly, in one embodiment, the molecule which activity is to be increased in the process of the invention is the gene product with an activity as a “phosphatidylinositol 3- and 4-kinase family protein”, preferably it is the molecule of section (a) or (b) of this paragraph.

[99138] In particular, it was observed that in plants, especially in Arabidopsis thaliana, increasing or generating the activity of a gene product non-targeted with the activity of a “phosphatidylinositol 3- and 4-kinase family protein”, preferably being encoded by a gene comprising the nucleic acid sequence SEQ ID NO. 21106, preferably the coding region thereof, conferred the production of or the increase in bis-glyceryl phosphate (polar fraction) compared with the wild type control.

[99139] The nucleic acid sequence of At3g02990 from Arabidopsis thaliana, e.g. as shown in the respective line in column 5 of Table I, application no. 19, has been published in F. And the activity of the gene product thereof is the activity of heat shock transcription factor.

[99140] Accordingly, in one embodiment, the process of the present invention for producing triacylglycerol in a non-human organism, like a microorganism or a plant or a part thereof, comprises increasing or generating the activity of a gene product with the activity of a gene product conferring the activity of “heat shock transcription factor”, especially from Arabidopsis thaliana or its functional equivalent or its homolog, e.g. the increase of
[99141] (a) a gene product of a gene comprising the nucleic acid molecule as shown in the respective line in column 5 of Table I (whereby the respective line disclose in column 7 the fine chemical triacylglycerol), application no. 19, preferably the coding region thereof, or a homolog or a fragment thereof, and being depicted in the same respective line as said At3g02990, or a functional equivalent or a homolog thereof as shown in column 8 of Table I, application no. 19, preferably the coding region thereof, particularly a homolog or functional equivalent as shown in column 8 of Table I B, application no. 19, and being depicted in the same respective line as said At3g02990, and preferably the activity is increased non-targeted, or
[99142] (b) a polypeptide comprising a polypeptide, a consensus sequence or at least a polypeptide motif as shown in the respective line in column 5 of Table II or in column 8 of Table IV, application no. 19, respectively, and being depicted in the same respective line as said At3g02990, or a functional equivalent or a homolog thereof as depicted in column 8 of Table II, application no. 19, preferably a homolog or functional equivalent as depicted in column 8 of Table II B, application no. 19, and being depicted in the same respective line as said At3g02990, and preferably the activity is increased non-targeted, whereby the respective line disclose in column 7 the fine chemical triacylglycerol.

[99143] Accordingly, in one embodiment, the molecule which activity is to be increased in the process of the invention is the gene product with an activity as a “heat shock transcription factor”, preferably it is the molecule of section (a) or (b) of this paragraph.

[99144] In particular, it was observed that in plants, especially in Arabidopsis thaliana, increasing or generating the activity of a gene product non-targeted with the activity of a “heat shock transcription factor”, preferably being encoded by a gene comprising the nucleic acid sequence SEQ ID NO. 68657, preferably the coding region thereof, conferred the production of or the increase in triacylglycerol compared with the wild type control.

[99145] The nucleic acid sequence of At4g09960 from Arabidopsis thaliana, e.g. as shown in the respective line in column 5 of Table I, application no. 19, has been published in F. And the activity of the gene product thereof is the activity of transcription factor.

[99146] Accordingly, in one embodiment, the process of the present invention for producing glycerol (lipid fraction) in a non-human organism, like a microorganism or a plant or a part thereof, comprises increasing or generating the activity of a gene product with the activity of a gene product conferring the activity of “transcription factor”, especially from Arabidopsis thaliana or its functional equivalent or its homolog, e.g. the increase of
[99147] (a) a gene product of a gene comprising the nucleic acid molecule as shown in the respective line in column 5 of Table I (whereby the respective line disclose in column 7 the fine chemical glycerol (lipid fraction)), application no. 19, preferably the coding region thereof, or a homolog or a fragment thereof, and being depicted in the same respective line as said At4g09960, or a functional equivalent or a homolog thereof as shown in column 8 of Table I, application no. 19, preferably the coding region thereof, particularly a homolog or functional equivalent as shown in column 8 of Table I B, application no. 19, and being depicted in the same respective line as said At4g09960, and preferably the activity is increased non-targeted, or
[99148] (b) a polypeptide comprising a polypeptide, a consensus sequence or at least a polypeptide motif as shown in the respective line in column 5 of Table II or in column 8 of Table IV, application no. 19, respectively, and being depicted in the same respective line as said At4g09960, or a functional equivalent or a homolog thereof as depicted in column 8 of Table II, application no. 19, preferably a homolog or functional equivalent as depicted in column 8 of Table II B, application no. 19, and being depicted in the same respective line as said At4g09960, and preferably the activity is increased non-targeted, whereby the respective line disclose in column 7 the fine chemical glycerol (lipid fraction).

[99149] Accordingly, in one embodiment, the molecule which activity is to be increased in the process of the invention is the gene product with an activity as a “transcription factor”, preferably it is the molecule of section (a) or (b) of this paragraph.

[99150] In particular, it was observed that in plants, especially in Arabidopsis thaliana, increasing or generating the activity of a gene product non-targeted with the activity of a “transcription factor”, preferably being encoded by a gene comprising the nucleic acid sequence SEQ ID NO. 109717, preferably the coding region thereof, conferred the production of or the increase in glycerol (lipid fraction) compared with the wild type control.

[99151] The nucleic acid sequence of At4g15660 from Arabidopsis thaliana, e.g. as shown in the respective line in column 5 of Table I, application no. 19, has been published in F. And the activity of the gene product thereof is the activity of monothiol glutaredoxin.

[99152] Accordingly, in one embodiment, the process of the present invention for producing glycerol (lipid fraction) in a non-human organism, like a microorganism or a plant or a part thereof, comprises increasing or generating the activity of a gene product with the activity of a gene product conferring the activity of “monothiol glutaredoxin”, especially from Arabidopsis thaliana or its functional equivalent or its homolog, e.g. the increase of
[99153] (a) a gene product of a gene comprising the nucleic acid molecule as shown in the respective line in column 5 of Table I (whereby the respective line disclose in column 7 the fine chemical glycerol (lipid fraction)), application no. 19, preferably the coding region thereof, or a homolog or a fragment thereof, and being depicted in the same respective line as said At4g15660, or a functional equivalent or a homolog thereof as shown in column 8 of Table I, application no. 19, preferably the coding region thereof, particularly a homolog or functional equivalent as shown in column 8 of Table I B, application no. 19, and being depicted in the same respective line as said At4g15660, and preferably the activity is increased non-targeted, or
[99154] (b) a polypeptide comprising a polypeptide, a consensus sequence or at least a polypeptide motif as shown in the respective line in column 5 of Table II or in column 8 of Table IV, application no. 19, respectively, and being depicted in the same respective line as said At4g15660, or a functional equivalent or a homolog thereof as depicted in column 8 of Table II, application no. 19, preferably a homolog or functional equivalent as depicted in column 8 of Table II B, application no. 19, and being depicted in the same respective line as said At4g15660, and preferably the activity is increased non-targeted, whereby the respective line disclose in column 7 the fine chemical glycerol (lipid fraction).

[99155] Accordingly, in one embodiment, the molecule which activity is to be increased in the process of the invention is the gene product with an activity as a “monothiol glutaredoxin”, preferably it is the molecule of section (a) or (b) of this paragraph.

[99156] In particular, it was observed that in plants, especially in Arabidopsis thaliana, increasing or generating the activity of a gene product non-targeted with the activity of a “monothiol glutaredoxin”, preferably being encoded by a gene comprising the nucleic acid sequence SEQ ID NO. 23482, preferably the coding region thereof, conferred the production of or the increase in glycerol (lipid fraction) compared with the wild type control.

[99157] The nucleic acid sequence of At4g15660 from Arabidopsis thaliana, e.g. as shown in the respective line in column 5 of Table I, application no. 19, has been published in F. And the activity of the gene product thereof is the activity of monothiol glutaredoxin.

[99158] Accordingly, in one embodiment, the process of the present invention for producing triacylglycerol in a non-human organism, like a microorganism or a plant or a part thereof, comprises increasing or generating the activity of a gene product with the activity of a gene product conferring the activity of “monothiol glutaredoxin”, especially from Arabidopsis thaliana or its functional equivalent or its homolog, e.g. the increase of
[99159] (a) a gene product of a gene comprising the nucleic acid molecule as shown in the respective line in column 5 of Table I (whereby the respective line disclose in column 7 the fine chemical triacylglycerol), application no. 19, preferably the coding region thereof, or a homolog or a fragment thereof, and being depicted in the same respective line as said At4g15660, or a functional equivalent or a homolog thereof as shown in column 8 of Table I, application no. 19, preferably the coding region thereof, particularly a homolog or functional equivalent as shown in column 8 of Table I B, application no. 19, and being depicted in the same respective line as said At4g15660, and preferably the activity is increased non-targeted, or
[99160] (b) a polypeptide comprising a polypeptide, a consensus sequence or at least a polypeptide motif as shown in the respective line in column 5 of Table II or in column 8 of Table IV, application no. 19, respectively, and being depicted in the same respective line as said At4g15660, or a functional equivalent or a homolog thereof as depicted in column 8 of Table II, application no. 19, preferably a homolog or functional equivalent as depicted in column 8 of Table II B, application no. 19, and being depicted in the same respective line as said At4g15660, and preferably the activity is increased non-targeted, whereby the respective line disclose in column 7 the fine chemical triacylglycerol.

[99161] Accordingly, in one embodiment, the molecule which activity is to be increased in the process of the invention is the gene product with an activity as a “monothiol glutaredoxin”, preferably it is the molecule of section (a) or (b) of this paragraph.

[99162] In particular, it was observed that in plants, especially in Arabidopsis thaliana, increasing or generating the activity of a gene product non-targeted with the activity of a “monothiol glutaredoxin”, preferably being encoded by a gene comprising the nucleic acid sequence SEQ ID NO. 23482, preferably the coding region thereof, conferred the production of or the increase in triacylglycerol compared with the wild type control.

[99163] The nucleic acid sequence of At4g15670 from Arabidopsis thaliana, e.g. as shown in the respective line in column 5 of Table I, application no. 19, has been published in F. And the activity of the gene product thereof is the activity of monothiol glutaredoxin.

[99164] Accordingly, in one embodiment, the process of the present invention for producing glycerol (lipid fraction) in a non-human organism, like a microorganism or a plant or a part thereof, comprises increasing or generating the activity of a gene product with the activity of a gene product conferring the activity of “monothiol glutaredoxin”, especially from Arabidopsis thaliana or its functional equivalent or its homolog, e.g. the increase of
[99165] (a) a gene product of a gene comprising the nucleic acid molecule as shown in the respective line in column 5 of Table I (whereby the respective line disclose in column 7 the fine chemical glycerol (lipid fraction)), application no. 19, preferably the coding region thereof, or a homolog or a fragment thereof, and being depicted in the same respective line as said At4g15670, or a functional equivalent or a homolog thereof as shown in column 8 of Table I, application no. 19, preferably the coding region thereof, particularly a homolog or functional equivalent as shown in column 8 of Table I B, application no. 19, and being depicted in the same respective line as said At4g15670, and preferably the activity is increased non-targeted, or
[99166] (b) a polypeptide comprising a polypeptide, a consensus sequence or at least a polypeptide motif as shown in the respective line in column 5 of Table II or in column 8 of Table IV, application no. 19, respectively, and being depicted in the same respective line as said At4g15670, or a functional equivalent or a homolog thereof as depicted in column 8 of Table II, application no. 19, preferably a homolog or functional equivalent as depicted in column 8 of Table II B, application no. 19, and being depicted in the same respective line as said At4g15670, and preferably the activity is increased non-targeted, whereby the respective line disclose in column 7 the fine chemical glycerol (lipid fraction).

[99167] Accordingly, in one embodiment, the molecule which activity is to be increased in the process of the invention is the gene product with an activity as a “monothiol glutaredoxin”, preferably it is the molecule of section (a) or (b) of this paragraph.

[99168] In particular, it was observed that in plants, especially in Arabidopsis thaliana, increasing or generating the activity of a gene product non-targeted with the activity of a “monothiol glutaredoxin”, preferably being encoded by a gene comprising the nucleic acid sequence SEQ ID NO. 3279, preferably the coding region thereof, conferred the production of or the increase in glycerol (lipid fraction) compared with the wild type control.

[99169] The nucleic acid sequence of At4g15670 from Arabidopsis thaliana, e.g. as shown in the respective line in column 5 of Table I, application no. 19, has been published in F. And the activity of the gene product thereof is the activity of monothiol glutaredoxin.

[99170] Accordingly, in one embodiment, the process of the present invention for producing triacylglycerol in a non-human organism, like a microorganism or a plant or a part thereof, comprises increasing or generating the activity of a gene product with the activity of a gene product conferring the activity of “monothiol glutaredoxin”, especially from Arabidopsis thaliana or its functional equivalent or its homolog, e.g. the increase of
[99171] (a) a gene product of a gene comprising the nucleic acid molecule as shown in the respective line in column 5 of Table I (whereby the respective line disclose in column 7 the fine chemical triacylglycerol), application no. 19, preferably the coding region thereof, or a homolog or a fragment thereof, and being depicted in the same respective line as said At4g15670, or a functional equivalent or a homolog thereof as shown in column 8 of Table I, application no. 19, preferably the coding region thereof, particularly a homolog or functional equivalent as shown in column 8 of Table I B, application no. 19, and being depicted in the same respective line as said At4g15670, and preferably the activity is increased non-targeted, or
[99172] (b) a polypeptide comprising a polypeptide, a consensus sequence or at least a polypeptide motif as shown in the respective line in column 5 of Table II or in column 8 of Table IV, application no. 19, respectively, and being depicted in the same respective line as said At4g15670, or a functional equivalent or a homolog thereof as depicted in column 8 of Table II, application no. 19, preferably a homolog or functional equivalent as depicted in column 8 of Table II B, application no. 19, and being depicted in the same respective line as said At4g15670, and preferably the activity is increased non-targeted, whereby the respective line disclose in column 7 the fine chemical triacylglycerol.

[99173] Accordingly, in one embodiment, the molecule which activity is to be increased in the process of the invention is the gene product with an activity as a “monothiol glutaredoxin”, preferably it is the molecule of section (a) or (b) of this paragraph.

[99174] In particular, it was observed that in plants, especially in Arabidopsis thaliana, increasing or generating the activity of a gene product non-targeted with the activity of a “monothiol glutaredoxin”, preferably being encoded by a gene comprising the nucleic acid sequence SEQ ID NO. 3279, preferably the coding region thereof, conferred the production of or the increase in triacylglycerol compared with the wild type control.

[99175] The nucleic acid sequence of At4g26080 from Arabidopsis thaliana, e.g. as shown in the respective line in column 5 of Table I, application no. 19, has been published in F. And the activity of the gene product thereof is the activity of protein phosphatase.

[99176] Accordingly, in one embodiment, the process of the present invention for producing glycerol phosphate (lipid fraction) in a non-human organism, like a microorganism or a plant or a part thereof, comprises increasing or generating the activity of a gene product with the activity of a gene product conferring the activity of “protein phosphatase”, especially from Arabidopsis thaliana or its functional equivalent or its homolog, e.g. the increase of
[99177] (a) a gene product of a gene comprising the nucleic acid molecule as shown in the respective line in column 5 of Table I (whereby the respective line disclose in column 7 the fine chemical glycerol phosphate (lipid fraction)), application no. 19, preferably the coding region thereof, or a homolog or a fragment thereof, and being depicted in the same respective line as said At4g26080, or a functional equivalent or a homolog thereof as shown in column 8 of Table I, application no. 19, preferably the coding region thereof, particularly a homolog or functional equivalent as shown in column 8 of Table I B, application no. 19, and being depicted in the same respective line as said At4g26080, and preferably the activity is increased non-targeted, or
[99178] (b) a polypeptide comprising a polypeptide, a consensus sequence or at least a polypeptide motif as shown in the respective line in column 5 of Table II or in column 8 of Table IV, application no. 19, respectively, and being depicted in the same respective line as said At4g26080, or a functional equivalent or a homolog thereof as depicted in column 8 of Table II, application no. 19, preferably a homolog or functional equivalent as depicted in column 8 of Table II B, application no. 19, and being depicted in the same respective line as said At4g26080, and preferably the activity is increased non-targeted, whereby the respective line disclose in column 7 the fine chemical glycerol phosphate (lipid fraction).

[99179] Accordingly, in one embodiment, the molecule which activity is to be increased in the process of the invention is the gene product with an activity as a “protein phosphatase”, preferably it is the molecule of section (a) or (b) of this paragraph.

[99180] In particular, it was observed that in plants, especially in Arabidopsis thaliana, increasing or generating the activity of a gene product non-targeted with the activity of a “protein phosphatase”, preferably being encoded by a gene comprising the nucleic acid sequence SEQ ID NO. 68849, preferably the coding region thereof, conferred the production of or the increase in glycerol phosphate (lipid fraction) compared with the wild type control.

[99181] The nucleic acid sequence of At4g34160 from Arabidopsis thaliana, e.g. as shown in the respective line in column 5 of Table I, application no. 19, has been published in F. And the activity of the gene product thereof is the activity of cyclin D .

[99182] Accordingly, in one embodiment, the process of the present invention for producing bis-glyceryl phosphate (polar fraction) in a non-human organism, like a microorganism or a plant or a part thereof, comprises increasing or generating the activity of a gene product with the activity of a gene product conferring the activity of “cyclin D”, especially from Arabidopsis thaliana or its functional equivalent or its homolog, e.g. the increase of
[99183] (a) a gene product of a gene comprising the nucleic acid molecule as shown in the respective line in column 5 of Table I (whereby the respective line disclose in column 7 the fine chemical bis-glyceryl phosphate (polar fraction)), application no. 19, preferably the coding region thereof, or a homolog or a fragment thereof, and being depicted in the same respective line as said At4g34160, or a functional equivalent or a homolog thereof as shown in column 8 of Table I, application no. 19, preferably the coding region thereof, particularly a homolog or functional equivalent as shown in column 8 of Table I B, application no. 19, and being depicted in the same respective line as said At4g34160, and preferably the activity is increased non-targeted, or
[99184] (b) a polypeptide comprising a polypeptide, a consensus sequence or at least a polypeptide motif as shown in the respective line in column 5 of Table II or in column 8 of Table IV, application no. 19, respectively, and being depicted in the same respective line as said At4g34160, or a functional equivalent or a homolog thereof as depicted in column 8 of Table II, application no. 19, preferably a homolog or functional equivalent as depicted in column 8 of Table II B, application no. 19, and being depicted in the same respective line as said At4g34160, and preferably the activity is increased non-targeted, whereby the respective line disclose in column 7 the fine chemical bis-glyceryl phosphate (polar fraction).

[99185] Accordingly, in one embodiment, the molecule which activity is to be increased in the process of the invention is the gene product with an activity as a “cyclin D”, preferably it is the molecule of section (a) or (b) of this paragraph.

[99186] In particular, it was observed that in plants, especially in Arabidopsis thaliana, increasing or generating the activity of a gene product non-targeted with the activity of a “cyclin D”, preferably being encoded by a gene comprising the nucleic acid sequence SEQ ID NO. 24311, preferably the coding region thereof, conferred the production of or the increase in bis-glyceryl phosphate (polar fraction) compared with the wild type control.

[99187] The nucleic acid sequence of At4g35310 from Arabidopsis thaliana, e.g. as shown in the respective line in column 5 of Table I, application no. 19, has been published in F. And the activity of the gene product thereof is the activity of calcium-dependent protein kinase.

[99188] Accordingly, in one embodiment, the process of the present invention for producing bis-glyceryl phosphate (polar fraction) in a non-human organism, like a microorganism or a plant or a part thereof, comprises increasing or generating the activity of a gene product with the activity of a gene product conferring the activity of “calcium-dependent protein kinase”, especially from Arabidopsis thaliana or its functional equivalent or its homolog, e.g. the increase of
[99189] (a) a gene product of a gene comprising the nucleic acid molecule as shown in the respective line in column 5 of Table I (whereby the respective line disclose in column 7 the fine chemical bis-glyceryl phosphate (polar fraction)), application no. 19, preferably the coding region thereof, or a homolog or a fragment thereof, and being depicted in the same respective line as said At4g35310, or a functional equivalent or a homolog thereof as shown in column 8 of Table I, application no. 19, preferably the coding region thereof, particularly a homolog or functional equivalent as shown in column 8 of Table I B, application no. 19, and being depicted in the same respective line as said At4g35310, and preferably the activity is increased non-targeted, or
[99190] (b) a polypeptide comprising a polypeptide, a consensus sequence or at least a polypeptide motif as shown in the respective line in column 5 of Table II or in column 8 of Table IV, application no. 19, respectively, and being depicted in the same respective line as said At4g35310, or a functional equivalent or a homolog thereof as depicted in column 8 of Table II, application no. 19, preferably a homolog or functional equivalent as depicted in column 8 of Table II B, application no. 19, and being depicted in the same respective line as said At4g35310, and preferably the activity is increased non-targeted, whereby the respective line disclose in column 7 the fine chemical bis-glyceryl phosphate (polar fraction).

[99191] Accordingly, in one embodiment, the molecule which activity is to be increased in the process of the invention is the gene product with an activity as a “calcium-dependent protein kinase”, preferably it is the molecule of section (a) or (b) of this paragraph.

[99192] In particular, it was observed that in plants, especially in Arabidopsis thaliana, increasing or generating the activity of a gene product non-targeted with the activity of a “calcium-dependent protein kinase”, preferably being encoded by a gene comprising the nucleic acid sequence SEQ ID NO. 4348, preferably the coding region thereof, conferred the production of or the increase in bis-glyceryl phosphate (polar fraction) compared with the wild type control.

[99193] The nucleic acid sequence of At5g03720 from Arabidopsis thaliana, e.g. as shown in the respective line in column 5 of Table I, application no. 19, has been published in F. And the activity of the gene product thereof is the activity of heat shock transcription factor.

[99194] Accordingly, in one embodiment, the process of the present invention for producing glycerol (lipid fraction) in a non-human organism, like a microorganism or a plant or a part thereof, comprises increasing or generating the activity of a gene product with the activity of a gene product conferring the activity of “heat shock transcription factor”, especially from Arabidopsis thaliana or its functional equivalent or its homolog, e.g. the increase of
[99195] (a) a gene product of a gene comprising the nucleic acid molecule as shown in the respective line in column 5 of Table I (whereby the respective line disclose in column 7 the fine chemical glycerol (lipid fraction)), application no. 19, preferably the coding region thereof, or a homolog or a fragment thereof, and being depicted in the same respective line as said At5g03720, or a functional equivalent or a homolog thereof as shown in column 8 of Table I, application no. 19, preferably the coding region thereof, particularly a homolog or functional equivalent as shown in column 8 of Table I B, application no. 19, and being depicted in the same respective line as said At5g03720, and preferably the activity is increased non-targeted, or
[99196] (b) a polypeptide comprising a polypeptide, a consensus sequence or at least a polypeptide motif as shown in the respective line in column 5 of Table II or in column 8 of Table IV, application no. 19, respectively, and being depicted in the same respective line as said At5g03720, or a functional equivalent or a homolog thereof as depicted in column 8 of Table II, application no. 19, preferably a homolog or functional equivalent as depicted in column 8 of Table II B, application no. 19, and being depicted in the same respective line as said At5g03720, and preferably the activity is increased non-targeted, whereby the respective line disclose in column 7 the fine chemical glycerol (lipid fraction).

[99197] Accordingly, in one embodiment, the molecule which activity is to be increased in the process of the invention is the gene product with an activity as a “heat shock transcription factor”, preferably it is the molecule of section (a) or (b) of this paragraph.

[99198] In particular, it was observed that in plants, especially in Arabidopsis thaliana, increasing or generating the activity of a gene product non-targeted with the activity of a “heat shock transcription factor”, preferably being encoded by a gene comprising the nucleic acid sequence SEQ ID NO. 24438, preferably the coding region thereof, conferred the production of or the increase in glycerol (lipid fraction) compared with the wild type control.

[99199] The nucleic acid sequence of At5g03720 from Arabidopsis thaliana, e.g. as shown in the respective line in column 5 of Table I, application no. 19, has been published in F. And the activity of the gene product thereof is the activity of heat shock transcription factor.

[99200] Accordingly, in one embodiment, the process of the present invention for producing triacylglycerol in a non-human organism, like a microorganism or a plant or a part thereof, comprises increasing or generating the activity of a gene product with the activity of a gene product conferring the activity of “heat shock transcription factor”, especially from Arabidopsis thaliana or its functional equivalent or its homolog, e.g. the increase of
[99201] (a) a gene product of a gene comprising the nucleic acid molecule as shown in the respective line in column 5 of Table I (whereby the respective line disclose in column 7 the fine chemical triacylglycerol), application no. 19, preferably the coding region thereof, or a homolog or a fragment thereof, and being depicted in the same respective line as said At5g03720, or a functional equivalent or a homolog thereof as shown in column 8 of Table I, application no. 19, preferably the coding region thereof, particularly a homolog or functional equivalent as shown in column 8 of Table I B, application no. 19, and being depicted in the same respective line as said At5g03720, and preferably the activity is increased non-targeted, or
[99202] (b) a polypeptide comprising a polypeptide, a consensus sequence or at least a polypeptide motif as shown in the respective line in column 5 of Table II or in column 8 of Table IV, application no. 19, respectively, and being depicted in the same respective line as said At5g03720, or a functional equivalent or a homolog thereof as depicted in column 8 of Table II, application no. 19, preferably a homolog or functional equivalent as depicted in column 8 of Table II B, application no. 19, and being depicted in the same respective line as said At5g03720, and preferably the activity is increased non-targeted, whereby the respective line disclose in column 7 the fine chemical triacylglycerol.

[99203] Accordingly, in one embodiment, the molecule which activity is to be increased in the process of the invention is the gene product with an activity as a “heat shock transcription factor”, preferably it is the molecule of section (a) or (b) of this paragraph.

[99204] In particular, it was observed that in plants, especially in Arabidopsis thaliana, increasing or generating the activity of a gene product non-targeted with the activity of a “heat shock transcription factor”, preferably being encoded by a gene comprising the nucleic acid sequence SEQ ID NO. 24438, preferably the coding region thereof, conferred the production of or the increase in triacylglycerol compared with the wild type control.

[99205] The nucleic acid sequence of At5g18600 from Arabidopsis thaliana, e.g. as shown in the respective line in column 5 of Table I, application no. 19, has been published in F. And the activity of the gene product thereof is the activity of monothiol glutaredoxin.

[99206] Accordingly, in one embodiment, the process of the present invention for producing glycerol (lipid fraction) in a non-human organism, like a microorganism or a plant or a part thereof, comprises increasing or generating the activity of a gene product with the activity of a gene product conferring the activity of “monothiol glutaredoxin”, especially from Arabidopsis thaliana or its functional equivalent or its homolog, e.g. the increase of
[99207] (a) a gene product of a gene comprising the nucleic acid molecule as shown in the respective line in column 5 of Table I (whereby the respective line disclose in column 7 the fine chemical glycerol (lipid fraction)), application no. 19, preferably the coding region thereof, or a homolog or a fragment thereof, and being depicted in the same respective line as said At5g18600, or a functional equivalent or a homolog thereof as shown in column 8 of Table I, application no. 19, preferably the coding region thereof, particularly a homolog or functional equivalent as shown in column 8 of Table I B, application no. 19, and being depicted in the same respective line as said At5g18600, and preferably the activity is increased non-targeted, or
[99208] (b) a polypeptide comprising a polypeptide, a consensus sequence or at least a polypeptide motif as shown in the respective line in column 5 of Table II or in column 8 of Table IV, application no. 19, respectively, and being depicted in the same respective line as said At5g18600, or a functional equivalent or a homolog thereof as depicted in column 8 of Table II, application no. 19, preferably a homolog or functional equivalent as depicted in column 8 of Table II B, application no. 19, and being depicted in the same respective line as said At5g18600, and preferably the activity is increased non-targeted, whereby the respective line disclose in column 7 the fine chemical glycerol (lipid fraction).

[99209] Accordingly, in one embodiment, the molecule which activity is to be increased in the process of the invention is the gene product with an activity as a “monothiol glutaredoxin”, preferably it is the molecule of section (a) or (b) of this paragraph.

[99210] In particular, it was observed that in plants, especially in Arabidopsis thaliana, increasing or generating the activity of a gene product non-targeted with the activity of a “monothiol glutaredoxin”, preferably being encoded by a gene comprising the nucleic acid sequence SEQ ID NO. 4904, preferably the coding region thereof, conferred the production of or the increase in glycerol (lipid fraction) compared with the wild type control.

[99211] The nucleic acid sequence of At5g57050 from Arabidopsis thaliana, e.g. as shown in the respective line in column 5 of Table I, application no. 19, has been published in F. And the activity of the gene product thereof is the activity of protein phosphatase.

[99212] Accordingly, in one embodiment, the process of the present invention for producing glycerol phosphate (lipid fraction) in a non-human organism, like a microorganism or a plant or a part thereof, comprises increasing or generating the activity of a gene product with the activity of a gene product conferring the activity of “protein phosphatase”, especially from Arabidopsis thaliana or its functional equivalent or its homolog, e.g. the increase of
[99213] (a) a gene product of a gene comprising the nucleic acid molecule as shown in the respective line in column 5 of Table I (whereby the respective line disclose in column 7 the fine chemical glycerol phosphate (lipid fraction)), application no. 19, preferably the coding region thereof, or a homolog or a fragment thereof, and being depicted in the same respective line as said At5g57050, or a functional equivalent or a homolog thereof as shown in column 8 of Table I, application no. 19, preferably the coding region thereof, particularly a homolog or functional equivalent as shown in column 8 of Table I B, application no. 19, and being depicted in the same respective line as said At5g57050, and preferably the activity is increased non-targeted, or
[99214] (b) a polypeptide comprising a polypeptide, a consensus sequence or at least a polypeptide motif as shown in the respective line in column 5 of Table II or in column 8 of Table IV, application no. 19, respectively, and being depicted in the same respective line as said At5g57050, or a functional equivalent or a homolog thereof as depicted in column 8 of Table II, application no. 19, preferably a homolog or functional equivalent as depicted in column 8 of Table II B, application no. 19, and being depicted in the same respective line as said At5g57050, and preferably the activity is increased non-targeted, whereby the respective line disclose in column 7 the fine chemical glycerol phosphate (lipid fraction).

[99215] Accordingly, in one embodiment, the molecule which activity is to be increased in the process of the invention is the gene product with an activity as a “protein phosphatase”, preferably it is the molecule of section (a) or (b) of this paragraph.

[99216] In particular, it was observed that in plants, especially in Arabidopsis thaliana, increasing or generating the activity of a gene product non-targeted with the activity of a “protein phosphatase”, preferably being encoded by a gene comprising the nucleic acid sequence SEQ ID NO. 5318, preferably the coding region thereof, conferred the production of or the increase in glycerol phosphate (lipid fraction) compared with the wild type control.

[99217] The nucleic acid sequence of At5g59220 from Arabidopsis thaliana, e.g. as shown in the respective line in column 5 of Table I, application no. 19, has been published in F. And the activity of the gene product thereof is the activity of protein phosphatase.

[99218] Accordingly, in one embodiment, the process of the present invention for producing glycerol phosphate (lipid fraction) in a non-human organism, like a microorganism or a plant or a part thereof, comprises increasing or generating the activity of a gene product with the activity of a gene product conferring the activity of “protein phosphatase”, especially from Arabidopsis thaliana or its functional equivalent or its homolog, e.g. the increase of
[99219] (a) a gene product of a gene comprising the nucleic acid molecule as shown in the respective line in column 5 of Table I (whereby the respective line disclose in column 7 the fine chemical glycerol phosphate (lipid fraction)), application no. 19, preferably the coding region thereof, or a homolog or a fragment thereof, and being depicted in the same respective line as said At5g59220, or a functional equivalent or a homolog thereof as shown in column 8 of Table I, application no. 19, preferably the coding region thereof, particularly a homolog or functional equivalent as shown in column 8 of Table I B, application no. 19, and being depicted in the same respective line as said At5g59220, and preferably the activity is increased non-targeted, or
[99220] (b) a polypeptide comprising a polypeptide, a consensus sequence or at least a polypeptide motif as shown in the respective line in column 5 of Table II or in column 8 of Table IV, application no. 19, respectively, and being depicted in the same respective line as said At5g59220, or a functional equivalent or a homolog thereof as depicted in column 8 of Table II, application no. 19, preferably a homolog or functional equivalent as depicted in column 8 of Table II B, application no. 19, and being depicted in the same respective line as said At5g59220, and preferably the activity is increased non-targeted, whereby the respective line disclose in column 7 the fine chemical glycerol phosphate (lipid fraction).

[99221] Accordingly, in one embodiment, the molecule which activity is to be increased in the process of the invention is the gene product with an activity as a “protein phosphatase”, preferably it is the molecule of section (a) or (b) of this paragraph.

[99222] In particular, it was observed that in plants, especially in Arabidopsis thaliana, increasing or generating the activity of a gene product non-targeted with the activity of a “protein phosphatase”, preferably being encoded by a gene comprising the nucleic acid sequence SEQ ID NO. 25498, preferably the coding region thereof, conferred the production of or the increase in glycerol phosphate (lipid fraction) compared with the wild type control.

[99223] The nucleic acid sequence of At5g63680 from Arabidopsis thaliana, e.g. as shown in the respective line in column 5 of Table I, application no. 19, has been published in F. And the activity of the gene product thereof is the activity of pyruvate kinase.

[99224] Accordingly, in one embodiment, the process of the present invention for producing glycerol phosphate (lipid fraction) in a non-human organism, like a microorganism or a plant or a part thereof, comprises increasing or generating the activity of a gene product with the activity of a gene product conferring the activity of “pyruvate kinase”, especially from Arabidopsis thaliana or its functional equivalent or its homolog, e.g. the increase of
[99225] (a) a gene product of a gene comprising the nucleic acid molecule as shown in the respective line in column 5 of Table I (whereby the respective line disclose in column 7 the fine chemical glycerol phosphate (lipid fraction)), application no. 19, preferably the coding region thereof, or a homolog or a fragment thereof, and being depicted in the same respective line as said At5g63680, or a functional equivalent or a homolog thereof as shown in column 8 of Table I, application no. 19, preferably the coding region thereof, particularly a homolog or functional equivalent as shown in column 8 of Table I B, application no. 19, and being depicted in the same respective line as said At5g63680, and preferably the activity is increased plastidic, or
[99226] (b) a polypeptide comprising a polypeptide, a consensus sequence or at least a polypeptide motif as shown in the respective line in column 5 of Table II or in column 8 of Table IV, application no. 19, respectively, and being depicted in the same respective line as said At5g63680, or a functional equivalent or a homolog thereof as depicted in column 8 of Table II, application no. 19, preferably a homolog or functional equivalent as depicted in column 8 of Table II B, application no. 19, and being depicted in the same respective line as said At5g63680, and preferably the activity is increased plastidic, whereby the respective line disclose in column 7 the fine chemical glycerol phosphate (lipid fraction).

[99227] Accordingly, in one embodiment, the molecule which activity is to be increased in the process of the invention is the gene product with an activity as a “pyruvate kinase”, preferably it is the molecule of section (a) or (b) of this paragraph.

[99228] In particular, it was observed that in plants, especially in Arabidopsis thaliana, increasing or generating the activity of a gene product plastidic with the activity of a “pyruvate kinase”, preferably being encoded by a gene comprising the nucleic acid sequence SEQ ID NO. 70038, preferably the coding region thereof, conferred the production of or the increase in glycerol phosphate (lipid fraction) compared with the wild type control.

[99229] The nucleic acid sequence of AVINDRAFT_{—}0539 from Azotobacter vinelandii, e.g. as shown in the respective line in column 5 of Table I, application no. 19, has been published in D. And the activity of the gene product thereof is the activity of Glycine cleavage system T aminomethyltransferase.

[99230] Accordingly, in one embodiment, the process of the present invention for producing triacylglycerol in a non-human organism, like a microorganism or a plant or a part thereof, comprises increasing or generating the activity of a gene product with the activity of a gene product conferring the activity of “Glycine cleavage system T aminomethyltransferase”, especially from Azotobacter vinelandii or its functional equivalent or its homolog, e.g. the increase of
[99231] (a) a gene product of a gene comprising the nucleic acid molecule as shown in the respective line in column 5 of Table I (whereby the respective line disclose in column 7 the fine chemical triacylglycerol), application no. 19, preferably the coding region thereof, or a homolog or a fragment thereof, and being depicted in the same respective line as said AVINDRAFT_{—}0539, or a functional equivalent or a homolog thereof as shown in column 8 of Table I, application no. 19, preferably the coding region thereof, particularly a homolog or functional equivalent as shown in column 8 of Table I B, application no. 19, and being depicted in the same respective line as said AVINDRAFT_{—}0539, and preferably the activity is increased non-targeted, or
[99232] (b) a polypeptide comprising a polypeptide, a consensus sequence or at least a polypeptide motif as shown in the respective line in column 5 of Table II or in column 8 of Table IV, application no. 19, respectively, and being depicted in the same respective line as said AVINDRAFT_{—}0539, or a functional equivalent or a homolog thereof as depicted in column 8 of Table II, application no. 19, preferably a homolog or functional equivalent as depicted in column 8 of Table II B, application no. 19, and being depicted in the same respective line as said AVINDRAFT_{—}0539, and preferably the activity is increased non-targeted, whereby the respective line disclose in column 7 the fine chemical triacylglycerol.

[99233] Accordingly, in one embodiment, the molecule which activity is to be increased in the process of the invention is the gene product with an activity as a “Glycine cleavage system T aminomethyltransferase”, preferably it is the molecule of section (a) or (b) of this paragraph.

[99234] In particular, it was observed that in plants, especially in Arabidopsis thaliana, increasing or generating the activity of a gene product non-targeted with the activity of a “Glycine cleavage system T aminomethyltransferase”, preferably being encoded by a gene comprising the nucleic acid sequence SEQ ID NO. 70715, preferably the coding region thereof, conferred the production of or the increase in triacylglycerol compared with the wild type control.

[99235] The nucleic acid sequence of AvinDRAFT_{—}1624 from Azotobacter vinelandii, e.g. as shown in the respective line in column 5 of Table I, application no. 19, has been published in D. And the activity of the gene product thereof is the activity of sec-independent protein translocase.

[99236] Accordingly, in one embodiment, the process of the present invention for producing glycerol phosphate (lipid fraction) in a non-human organism, like a microorganism or a plant or a part thereof, comprises increasing or generating the activity of a gene product with the activity of a gene product conferring the activity of “sec-independent protein translocase”, especially from Azotobacter vinelandii or its functional equivalent or its homolog, e.g. the increase of
[99237] (a) a gene product of a gene comprising the nucleic acid molecule as shown in the respective line in column 5 of Table I (whereby the respective line disclose in column 7 the fine chemical glycerol phosphate (lipid fraction)), application no. 19, preferably the coding region thereof, or a homolog or a fragment thereof, and being depicted in the same respective line as said AvinDRAFT_{—}1624, or a functional equivalent or a homolog thereof as shown in column 8 of Table I, application no. 19, preferably the coding region thereof, particularly a homolog or functional equivalent as shown in column 8 of Table I B, application no. 19, and being depicted in the same respective line as said AvinDRAFT_{—}1624, and preferably the activity is increased non-targeted, or
[99238] (b) a polypeptide comprising a polypeptide, a consensus sequence or at least a polypeptide motif as shown in the respective line in column 5 of Table II or in column 8 of Table IV, application no. 19, respectively, and being depicted in the same respective line as said AvinDRAFT_{—}1624, or a functional equivalent or a homolog thereof as depicted in column 8 of Table II, application no. 19, preferably a homolog or functional equivalent as depicted in column 8 of Table II B, application no. 19, and being depicted in the same respective line as said AvinDRAFT_{—}1624, and preferably the activity is increased non-targeted, whereby the respective line disclose in column 7 the fine chemical glycerol phosphate (lipid fraction).

[99239] Accordingly, in one embodiment, the molecule which activity is to be increased in the process of the invention is the gene product with an activity as a “sec-independent protein translocase”, preferably it is the molecule of section (a) or (b) of this paragraph.

[99240] In particular, it was observed that in plants, especially in Arabidopsis thaliana, increasing or generating the activity of a gene product non-targeted with the activity of a “sec-independent protein translocase”, preferably being encoded by a gene comprising the nucleic acid sequence SEQ ID NO. 26196, preferably the coding region thereof, conferred the production of or the increase in glycerol phosphate (lipid fraction) compared with the wild type control.

[99241] The nucleic acid sequence of AvinDRAFT_{—}1788 from Azotobacter vinelandii, e.g. as shown in the respective line in column 5 of Table I, application no. 19, has been published in D. And the activity of the gene product thereof is the activity of oxidoreductase.

[99242] Accordingly, in one embodiment, the process of the present invention for producing glycerol (lipid fraction) in a non-human organism, like a microorganism or a plant or a part thereof, comprises increasing or generating the activity of a gene product with the activity of a gene product conferring the activity of “oxidoreductase”, especially from Azotobacter vinelandii or its functional equivalent or its homolog, e.g. the increase of
[99243] (a) a gene product of a gene comprising the nucleic acid molecule as shown in the respective line in column 5 of Table I (whereby the respective line disclose in column 7 the fine chemical glycerol (lipid fraction)), application no. 19, preferably the coding region thereof, or a homolog or a fragment thereof, and being depicted in the same respective line as said AvinDRAFT_{—}1788, or a functional equivalent or a homolog thereof as shown in column 8 of Table I, application no. 19, preferably the coding region thereof, particularly a homolog or functional equivalent as shown in column 8 of Table I B, application no. 19, and being depicted in the same respective line as said AvinDRAFT_{—}1788, and preferably the activity is increased non-targeted, or
[99244] (b) a polypeptide comprising a polypeptide, a consensus sequence or at least a polypeptide motif as shown in the respective line in column 5 of Table II or in column 8 of Table IV, application no. 19, respectively, and being depicted in the same respective line as said AvinDRAFT_{—}1788, or a functional equivalent or a homolog thereof as depicted in column 8 of Table II, application no. 19, preferably a homolog or functional equivalent as depicted in column 8 of Table II B, application no. 19, and being depicted in the same respective line as said AvinDRAFT_{—}1788, and preferably the activity is increased non-targeted, whereby the respective line disclose in column 7 the fine chemical glycerol (lipid fraction).

[99245] Accordingly, in one embodiment, the molecule which activity is to be increased in the process of the invention is the gene product with an activity as a “oxidoreductase”, preferably it is the molecule of section (a) or (b) of this paragraph.

[99246] In particular, it was observed that in plants, especially in Arabidopsis thaliana, increasing or generating the activity of a gene product non-targeted with the activity of a “oxidoreductase”, preferably being encoded by a gene comprising the nucleic acid sequence SEQ ID NO. 114083, preferably the coding region thereof, conferred the production of or the increase in glycerol (lipid fraction) compared with the wild type control.

[99247] The nucleic acid sequence of AvinDRAFT_{—}2010 from Azotobacter vinelandii, e.g. as shown in the respective line in column 5 of Table I, application no. 19, has been published in D. And the activity of the gene product thereof is the activity of transcriptional regulator protein.

[99248] Accordingly, in one embodiment, the process of the present invention for producing bis-glyceryl phosphate (polar fraction) in a non-human organism, like a microorganism or a plant or a part thereof, comprises increasing or generating the activity of a gene product with the activity of a gene product conferring the activity of “transcriptional regulator protein”, especially from Azotobacter vinelandii or its functional equivalent or its homolog, e.g. the increase of
[99249] (a) a gene product of a gene comprising the nucleic acid molecule as shown in the respective line in column 5 of Table I (whereby the respective line disclose in column 7 the fine chemical bis-glyceryl phosphate (polar fraction)), application no. 19, preferably the coding region thereof, or a homolog or a fragment thereof, and being depicted in the same respective line as said AvinDRAFT_{—}2010, or a functional equivalent or a homolog thereof as shown in column 8 of Table I, application no. 19, preferably the coding region thereof, particularly a homolog or functional equivalent as shown in column 8 of Table I B, application no. 19, and being depicted in the same respective line as said AvinDRAFT_{—}2010, and preferably the activity is increased non-targeted, or
[99250] (b) a polypeptide comprising a polypeptide, a consensus sequence or at least a polypeptide motif as shown in the respective line in column 5 of Table II or in column 8 of Table IV, application no. 19, respectively, and being depicted in the same respective line as said AvinDRAFT_{—}2010, or a functional equivalent or a homolog thereof as depicted in column 8 of Table II, application no. 19, preferably a homolog or functional equivalent as depicted in column 8 of Table II B, application no. 19, and being depicted in the same respective line as said AvinDRAFT_{—}2010, and preferably the activity is increased non-targeted, whereby the respective line disclose in column 7 the fine chemical bis-glyceryl phosphate (polar fraction).

[99251] Accordingly, in one embodiment, the molecule which activity is to be increased in the process of the invention is the gene product with an activity as a “transcriptional regulator protein”, preferably it is the molecule of section (a) or (b) of this paragraph.

[99252] In particular, it was observed that in plants, especially in Arabidopsis thaliana, increasing or generating the activity of a gene product non-targeted with the activity of a “transcriptional regulator protein”, preferably being encoded by a gene comprising the nucleic acid sequence SEQ ID NO. 114198, preferably the coding region thereof, conferred the production of or the increase in bis-glyceryl phosphate (polar fraction) compared with the wild type control.

[99253] The nucleic acid sequence of AvinDRAFT_{—}2091 from Azotobacter vinelandii, e.g. as shown in the respective line in column 5 of Table I, application no. 19, has been published in D. And the activity of the gene product thereof is the activity of beta-hydroxylase.

[99254] Accordingly, in one embodiment, the process of the present invention for producing bis-glyceryl phosphate (polar fraction) in a non-human organism, like a microorganism or a plant or a part thereof, comprises increasing or generating the activity of a gene product with the activity of a gene product conferring the activity of “beta-hydroxylase”, especially from Azotobacter vinelandii or its functional equivalent or its homolog, e.g. the increase of
[99255] (a) a gene product of a gene comprising the nucleic acid molecule as shown in the respective line in column 5 of Table I (whereby the respective line disclose in column 7 the fine chemical bis-glyceryl phosphate (polar fraction)), application no. 19, preferably the coding region thereof, or a homolog or a fragment thereof, and being depicted in the same respective line as said AvinDRAFT_{—}2091, or a functional equivalent or a homolog thereof as shown in column 8 of Table I, application no. 19, preferably the coding region thereof, particularly a homolog or functional equivalent as shown in column 8 of Table I B, application no. 19, and being depicted in the same respective line as said AvinDRAFT_{—}2091, and preferably the activity is increased non-targeted, or
[99256] (b) a polypeptide comprising a polypeptide, a consensus sequence or at least a polypeptide motif as shown in the respective line in column 5 of Table II or in column 8 of Table IV, application no. 19, respectively, and being depicted in the same respective line as said AvinDRAFT_{—}2091, or a functional equivalent or a homolog thereof as depicted in column 8 of Table II, application no. 19, preferably a homolog or functional equivalent as depicted in column 8 of Table II B, application no. 19, and being depicted in the same respective line as said AvinDRAFT_{—}2091, and preferably the activity is increased non-targeted, whereby the respective line disclose in column 7 the fine chemical bis-glyceryl phosphate (polar fraction).

[99257] Accordingly, in one embodiment, the molecule which activity is to be increased in the process of the invention is the gene product with an activity as a “beta-hydroxylase”, preferably it is the molecule of section (a) or (b) of this paragraph.

[99258] In particular, it was observed that in plants, especially in Arabidopsis thaliana, increasing or generating the activity of a gene product non-targeted with the activity of a “beta-hydroxylase”, preferably being encoded by a gene comprising the nucleic acid sequence SEQ ID NO. 6040, preferably the coding region thereof, conferred the production of or the increase in bis-glyceryl phosphate (polar fraction) compared with the wild type control.

[99259] The nucleic acid sequence of AvinDRAFT_{—}2091 from Azotobacter vinelandii, e.g. as shown in the respective line in column 5 of Table I, application no. 19, has been published in D. And the activity of the gene product thereof is the activity of beta-hydroxylase.

[99260] Accordingly, in one embodiment, the process of the present invention for producing triacylglycerol in a non-human organism, like a microorganism or a plant or a part thereof, comprises increasing or generating the activity of a gene product with the activity of a gene product conferring the activity of “beta-hydroxylase”, especially from Azotobacter vinelandii or its functional equivalent or its homolog, e.g. the increase of
[99261] (a) a gene product of a gene comprising the nucleic acid molecule as shown in the respective line in column 5 of Table I (whereby the respective line disclose in column 7 the fine chemical triacylglycerol), application no. 19, preferably the coding region thereof, or a homolog or a fragment thereof, and being depicted in the same respective line as said AvinDRAFT_{—}2091, or a functional equivalent or a homolog thereof as shown in column 8 of Table I, application no. 19, preferably the coding region thereof, particularly a homolog or functional equivalent as shown in column 8 of Table I B, application no. 19, and being depicted in the same respective line as said AvinDRAFT_{—}2091, and preferably the activity is increased non-targeted, or
[99262] (b) a polypeptide comprising a polypeptide, a consensus sequence or at least a polypeptide motif as shown in the respective line in column 5 of Table II or in column 8 of Table IV, application no. 19, respectively, and being depicted in the same respective line as said AvinDRAFT_{—}2091, or a functional equivalent or a homolog thereof as depicted in column 8 of Table II, application no. 19, preferably a homolog or functional equivalent as depicted in column 8 of Table II B, application no. 19, and being depicted in the same respective line as said AvinDRAFT_{—}2091, and preferably the activity is increased non-targeted, whereby the respective line disclose in column 7 the fine chemical triacylglycerol.

[99263] Accordingly, in one embodiment, the molecule which activity is to be increased in the process of the invention is the gene product with an activity as a “beta-hydroxylase”, preferably it is the molecule of section (a) or (b) of this paragraph.

[99264] In particular, it was observed that in plants, especially in Arabidopsis thaliana, increasing or generating the activity of a gene product non-targeted with the activity of a “beta-hydroxylase”, preferably being encoded by a gene comprising the nucleic acid sequence SEQ ID NO. 6040, preferably the coding region thereof, conferred the production of or the increase in triacylglycerol compared with the wild type control.

[99265] The nucleic acid sequence of AvinDRAFT_{—}3253 from Azotobacter vinelandii, e.g. as shown in the respective line in column 5 of Table I, application no. 19, has been published in D. And the activity of the gene product thereof is the activity of oxidoreductase.

[99266] Accordingly, in one embodiment, the process of the present invention for producing bis-glyceryl phosphate (polar fraction) in a non-human organism, like a microorganism or a plant or a part thereof, comprises increasing or generating the activity of a gene product with the activity of a gene product conferring the activity of “oxidoreductase”, especially from Azotobacter vinelandii or its functional equivalent or its homolog, e.g. the increase of
[99267] (a) a gene product of a gene comprising the nucleic acid molecule as shown in the respective line in column 5 of Table I (whereby the respective line disclose in column 7 the fine chemical bis-glyceryl phosphate (polar fraction)), application no. 19, preferably the coding region thereof, or a homolog or a fragment thereof, and being depicted in the same respective line as said AvinDRAFT_{—}3253, or a functional equivalent or a homolog thereof as shown in column 8 of Table I, application no. 19, preferably the coding region thereof, particularly a homolog or functional equivalent as shown in column 8 of Table I B, application no. 19, and being depicted in the same respective line as said AvinDRAFT_{—}3253, and preferably the activity is increased non-targeted, or
[99268] (b) a polypeptide comprising a polypeptide, a consensus sequence or at least a polypeptide motif as shown in the respective line in column 5 of Table II or in column 8 of Table IV, application no. 19, respectively, and being depicted in the same respective line as said AvinDRAFT_{—}3253, or a functional equivalent or a homolog thereof as depicted in column 8 of Table II, application no. 19, preferably a homolog or functional equivalent as depicted in column 8 of Table II B, application no. 19, and being depicted in the same respective line as said AvinDRAFT_{—}3253, and preferably the activity is increased non-targeted, whereby the respective line disclose in column 7 the fine chemical bis-glyceryl phosphate (polar fraction).

[99269] Accordingly, in one embodiment, the molecule which activity is to be increased in the process of the invention is the gene product with an activity as a “oxidoreductase”, preferably it is the molecule of section (a) or (b) of this paragraph.

[99270] In particular, it was observed that in plants, especially in Arabidopsis thaliana, increasing or generating the activity of a gene product non-targeted with the activity of a “oxidoreductase”, preferably being encoded by a gene comprising the nucleic acid sequence SEQ ID NO. 29500, preferably the coding region thereof, conferred the production of or the increase in bis-glyceryl phosphate (polar fraction) compared with the wild type control.

[99271] The nucleic acid sequence of AvinDRAFT_{—}3577 from Azotobacter vinelandii, e.g. as shown in the respective line in column 5 of Table I, application no. 19, has been published in D. And the activity of the gene product thereof is the activity of ThiF family protein.

[99272] Accordingly, in one embodiment, the process of the present invention for producing glycerol phosphate (lipid fraction) in a non-human organism, like a microorganism or a plant or a part thereof, comprises increasing or generating the activity of a gene product with the activity of a gene product conferring the activity of “ThiF family protein”, especially from Azotobacter vinelandii or its functional equivalent or its homolog, e.g. the increase of
[99273] (a) a gene product of a gene comprising the nucleic acid molecule as shown in the respective line in column 5 of Table I (whereby the respective line disclose in column 7 the fine chemical glycerol phosphate (lipid fraction)), application no. 19, preferably the coding region thereof, or a homolog or a fragment thereof, and being depicted in the same respective line as said AvinDRAFT_{—}3577, or a functional equivalent or a homolog thereof as shown in column 8 of Table I, application no. 19, preferably the coding region thereof, particularly a homolog or functional equivalent as shown in column 8 of Table I B, application no. 19, and being depicted in the same respective line as said AvinDRAFT_{—}3577, and preferably the activity is increased non-targeted, or
[99274] (b) a polypeptide comprising a polypeptide, a consensus sequence or at least a polypeptide motif as shown in the respective line in column 5 of Table II or in column 8 of Table IV, application no. 19, respectively, and being depicted in the same respective line as said AvinDRAFT_{—}3577, or a functional equivalent or a homolog thereof as depicted in column 8 of Table II, application no. 19, preferably a homolog or functional equivalent as depicted in column 8 of Table II B, application no. 19, and being depicted in the same respective line as said AvinDRAFT_{—}3577, and preferably the activity is increased non-targeted, whereby the respective line disclose in column 7 the fine chemical glycerol phosphate (lipid fraction).

[99275] Accordingly, in one embodiment, the molecule which activity is to be increased in the process of the invention is the gene product with an activity as a “ThiF family protein”, preferably it is the molecule of section (a) or (b) of this paragraph.

[99276] In particular, it was observed that in plants, especially in Arabidopsis thaliana, increasing or generating the activity of a gene product non-targeted with the activity of a “ThiF family protein”, preferably being encoded by a gene comprising the nucleic acid sequence SEQ ID NO. 111155, preferably the coding region thereof, conferred the production of or the increase in glycerol phosphate (lipid fraction) compared with the wild type control.

[99277] The nucleic acid sequence of AvinDRAFT_{—}3629 from Azotobacter vinelandii, e.g. as shown in the respective line in column 5 of Table I, application no. 19, has been published in D. And the activity of the gene product thereof is the activity of recombinase A.

[99278] Accordingly, in one embodiment, the process of the present invention for producing glycerol (lipid fraction) in a non-human organism, like a microorganism or a plant or a part thereof, comprises increasing or generating the activity of a gene product with the activity of a gene product conferring the activity of “recombinase A”, especially from Azotobacter vinelandii or its functional equivalent or its homolog, e.g. the increase of
[99279] (a) a gene product of a gene comprising the nucleic acid molecule as shown in the respective line in column 5 of Table I (whereby the respective line disclose in column 7 the fine chemical glycerol (lipid fraction)), application no. 19, preferably the coding region thereof, or a homolog or a fragment thereof, and being depicted in the same respective line as said AvinDRAFT_{—}3629, or a functional equivalent or a homolog thereof as shown in column 8 of Table I, application no. 19, preferably the coding region thereof, particularly a homolog or functional equivalent as shown in column 8 of Table I B, application no. 19, and being depicted in the same respective line as said AvinDRAFT_{—}3629, and preferably the activity is increased non-targeted, or
[99280] (b) a polypeptide comprising a polypeptide, a consensus sequence or at least a polypeptide motif as shown in the respective line in column 5 of Table II or in column 8 of Table IV, application no. 19, respectively, and being depicted in the same respective line as said AvinDRAFT_{—}3629, or a functional equivalent or a homolog thereof as depicted in column 8 of Table II, application no. 19, preferably a homolog or functional equivalent as depicted in column 8 of Table II B, application no. 19, and being depicted in the same respective line as said AvinDRAFT_{—}3629, and preferably the activity is increased non-targeted, whereby the respective line disclose in column 7 the fine chemical glycerol (lipid fraction).

[99281] Accordingly, in one embodiment, the molecule which activity is to be increased in the process of the invention is the gene product with an activity as a “recombinase A”, preferably it is the molecule of section (a) or (b) of this paragraph.

[99282] In particular, it was observed that in plants, especially in Arabidopsis thaliana, increasing or generating the activity of a gene product non-targeted with the activity of a “recombinase A”, preferably being encoded by a gene comprising the nucleic acid sequence SEQ ID NO. 114231, preferably the coding region thereof, conferred the production of or the increase in glycerol (lipid fraction) compared with the wild type control.

[99283] The nucleic acid sequence of AvinDRAFT_{—}4606 from Azotobacter vinelandii, e.g. as shown in the respective line in column 5 of Table I, application no. 19, has been published in D. And the activity of the gene product thereof is the activity of NADH-quinone oxidoreductase subunit.

[99284] Accordingly, in one embodiment, the process of the present invention for producing bis-glyceryl phosphate (polar fraction) in a non-human organism, like a microorganism or a plant or a part thereof, comprises increasing or generating the activity of a gene product with the activity of a gene product conferring the activity of “NADH-quinone oxidoreductase subunit”, especially from Azotobacter vinelandii or its functional equivalent or its homolog, e.g. the increase of
[99285] (a) a gene product of a gene comprising the nucleic acid molecule as shown in the respective line in column 5 of Table I (whereby the respective line disclose in column 7 the fine chemical bis-glyceryl phosphate (polar fraction)), application no. 19, preferably the coding region thereof, or a homolog or a fragment thereof, and being depicted in the same respective line as said AvinDRAFT_{—}4606, or a functional equivalent or a homolog thereof as shown in column 8 of Table I, application no. 19, preferably the coding region thereof, particularly a homolog or functional equivalent as shown in column 8 of Table I B, application no. 19, and being depicted in the same respective line as said AvinDRAFT_{—}4606, and preferably the activity is increased non-targeted, or
[99286] (b) a polypeptide comprising a polypeptide, a consensus sequence or at least a polypeptide motif as shown in the respective line in column 5 of Table II or in column 8 of Table IV, application no. 19, respectively, and being depicted in the same respective line as said AvinDRAFT_{—}4606, or a functional equivalent or a homolog thereof as depicted in column 8 of Table II, application no. 19, preferably a homolog or functional equivalent as depicted in column 8 of Table II B, application no. 19, and being depicted in the same respective line as said AvinDRAFT_{—}4606, and preferably the activity is increased non-targeted, whereby the respective line disclose in column 7 the fine chemical bis-glyceryl phosphate (polar fraction).

[99287] Accordingly, in one embodiment, the molecule which activity is to be increased in the process of the invention is the gene product with an activity as a “NADH-quinone oxidoreductase subunit”, preferably it is the molecule of section (a) or (b) of this paragraph.

[99288] In particular, it was observed that in plants, especially in Arabidopsis thaliana, increasing or generating the activity of a gene product non-targeted with the activity of a “NADH-quinone oxidoreductase subunit”, preferably being encoded by a gene comprising the nucleic acid sequence SEQ ID NO. 73719, preferably the coding region thereof, conferred the production of or the increase in bis-glyceryl phosphate (polar fraction) compared with the wild type control.

[99289] The nucleic acid sequence of AvinDRAFT_{—}5103 from Azotobacter vinelandii, e.g. as shown in the respective line in column 5 of Table I, application no. 19, has been published in D. And the activity of the gene product thereof is the activity of hydrolase.

[99290] Accordingly, in one embodiment, the process of the present invention for producing triacylglycerol in a non-human organism, like a microorganism or a plant or a part thereof, comprises increasing or generating the activity of a gene product with the activity of a gene product conferring the activity of “hydrolase”, especially from Azotobacter vinelandii or its functional equivalent or its homolog, e.g. the increase of
[99291] (a) a gene product of a gene comprising the nucleic acid molecule as shown in the respective line in column 5 of Table I (whereby the respective line disclose in column 7 the fine chemical triacylglycerol), application no. 19, preferably the coding region thereof, or a homolog or a fragment thereof, and being depicted in the same respective line as said AvinDRAFT_{—}5103, or a functional equivalent or a homolog thereof as shown in column 8 of Table I, application no. 19, preferably the coding region thereof, particularly a homolog or functional equivalent as shown in column 8 of Table I B, application no. 19, and being depicted in the same respective line as said AvinDRAFT_{—}5103, and preferably the activity is increased non-targeted, or
[99292] (b) a polypeptide comprising a polypeptide, a consensus sequence or at least a polypeptide motif as shown in the respective line in column 5 of Table II or in column 8 of Table IV, application no. 19, respectively, and being depicted in the same respective line as said AvinDRAFT_{—}5103, or a functional equivalent or a homolog thereof as depicted in column 8 of Table II, application no. 19, preferably a homolog or functional equivalent as depicted in column 8 of Table II B, application no. 19, and being depicted in the same respective line as said AvinDRAFT_{—}5103, and preferably the activity is increased non-targeted, whereby the respective line disclose in column 7 the fine chemical triacylglycerol.

[99293] Accordingly, in one embodiment, the molecule which activity is to be increased in the process of the invention is the gene product with an activity as a “hydrolase”, preferably it is the molecule of section (a) or (b) of this paragraph.

[99294] In particular, it was observed that in plants, especially in Arabidopsis thaliana, increasing or generating the activity of a gene product non-targeted with the activity of a “hydrolase”, preferably being encoded by a gene comprising the nucleic acid sequence SEQ ID NO. 6510, preferably the coding region thereof, conferred the production of or the increase in triacylglycerol compared with the wild type control.

[99295] The nucleic acid sequence of AvinDRAFT_{—}5467 from Azotobacter vinelandii, e.g. as shown in the respective line in column 5 of Table I, application no. 19, has been published in D. And the activity of the gene product thereof is the activity of HesB/YadR/YfhF family protein.

[99296] Accordingly, in one embodiment, the process of the present invention for producing glycerol phosphate (lipid fraction) in a non-human organism, like a microorganism or a plant or a part thereof, comprises increasing or generating the activity of a gene product with the activity of a gene product conferring the activity of “HesB/YadR/YfhF family protein”, especially from Azotobacter vinelandii or its functional equivalent or its homolog, e.g. the increase of
[99297] (a) a gene product of a gene comprising the nucleic acid molecule as shown in the respective line in column 5 of Table I (whereby the respective line disclose in column 7 the fine chemical glycerol phosphate (lipid fraction)), application no. 19, preferably the coding region thereof, or a homolog or a fragment thereof, and being depicted in the same respective line as said AvinDRAFT_{—}5467, or a functional equivalent or a homolog thereof as shown in column 8 of Table I, application no. 19, preferably the coding region thereof, particularly a homolog or functional equivalent as shown in column 8 of Table I B, application no. 19, and being depicted in the same respective line as said AvinDRAFT_{—}5467, and preferably the activity is increased non-targeted, or
[99298] (b) a polypeptide comprising a polypeptide, a consensus sequence or at least a polypeptide motif as shown in the respective line in column 5 of Table II or in column 8 of Table IV, application no. 19, respectively, and being depicted in the same respective line as said AvinDRAFT_{—}5467, or a functional equivalent or a homolog thereof as depicted in column 8 of Table II, application no. 19, preferably a homolog or functional equivalent as depicted in column 8 of Table II B, application no. 19, and being depicted in the same respective line as said AvinDRAFT_{—}5467, and preferably the activity is increased non-targeted, whereby the respective line disclose in column 7 the fine chemical glycerol phosphate (lipid fraction).

[99299] Accordingly, in one embodiment, the molecule which activity is to be increased in the process of the invention is the gene product with an activity as a “HesB/YadR/YfhF family protein”, preferably it is the molecule of section (a) or (b) of this paragraph.

[99300] In particular, it was observed that in plants, especially in Arabidopsis thaliana, increasing or generating the activity of a gene product non-targeted with the activity of a “HesB/YadR/YfhF family protein”, preferably being encoded by a gene comprising the nucleic acid sequence SEQ ID NO. 32648, preferably the coding region thereof, conferred the production of or the increase in glycerol phosphate (lipid fraction) compared with the wild type control.

[99301] The nucleic acid sequence of AY623894 from Zea mays, e.g. as shown in the respective line in column 5 of Table I, application no. 19, is unpublished. And the activity of the gene product thereof is the activity of pyruvate kinase.

[99302] Accordingly, in one embodiment, the process of the present invention for producing bis-glyceryl phosphate (polar fraction) in a non-human organism, like a microorganism or a plant or a part thereof, comprises increasing or generating the activity of a gene product with the activity of a gene product conferring the activity of “pyruvate kinase”, especially from Zea mays or its functional equivalent or its homolog, e.g. the increase of
[99303] (a) a gene product of a gene comprising the nucleic acid molecule as shown in the respective line in column 5 of Table I (whereby the respective line disclose in column 7 the fine chemical bis-glyceryl phosphate (polar fraction)), application no. 19, preferably the coding region thereof, or a homolog or a fragment thereof, and being depicted in the same respective line as said AY623894, or a functional equivalent or a homolog thereof as shown in column 8 of Table I, application no. 19, preferably the coding region thereof, particularly a homolog or functional equivalent as shown in column 8 of Table I B, application no. 19, and being depicted in the same respective line as said AY623894, and preferably the activity is increased non-targeted, or
[99304] (b) a polypeptide comprising a polypeptide, a consensus sequence or at least a polypeptide motif as shown in the respective line in column 5 of Table II or in column 8 of Table IV, application no. 19, respectively, and being depicted in the same respective line as said AY623894, or a functional equivalent or a homolog thereof as depicted in column 8 of Table II, application no. 19, preferably a homolog or functional equivalent as depicted in column 8 of Table II B, application no. 19, and being depicted in the same respective line as said AY623894, and preferably the activity is increased non-targeted, whereby the respective line disclose in column 7 the fine chemical bis-glyceryl phosphate (polar fraction).

[99305] Accordingly, in one embodiment, the molecule which activity is to be increased in the process of the invention is the gene product with an activity as a “pyruvate kinase”, preferably it is the molecule of section (a) or (b) of this paragraph.

[99306] In particular, it was observed that in plants, especially in Arabidopsis thaliana, increasing or generating the activity of a gene product non-targeted with the activity of a “pyruvate kinase”, preferably being encoded by a gene comprising the nucleic acid sequence SEQ ID NO. 103433, preferably the coding region thereof, conferred the production of or the increase in bis-glyceryl phosphate (polar fraction) compared with the wild type control.

[99307] The nucleic acid sequence of B0004 from Escherichia coli, e.g. as shown in the respective line in column 5 of Table I, application no. 19, has been published in B. And the activity of the gene product thereof is the activity of threonine synthase.

[99308] Accordingly, in one embodiment, the process of the present invention for producing triacylglycerol in a non-human organism, like a microorganism or a plant or a part thereof, comprises increasing or generating the activity of a gene product with the activity of a gene product conferring the activity of “threonine synthase”, especially from Escherichia coli or its functional equivalent or its homolog, e.g. the increase of
[99309] (a) a gene product of a gene comprising the nucleic acid molecule as shown in the respective line in column 5 of Table I (whereby the respective line disclose in column 7 the fine chemical triacylglycerol), application no. 19, preferably the coding region thereof, or a homolog or a fragment thereof, and being depicted in the same respective line as said B0004, or a functional equivalent or a homolog thereof as shown in column 8 of Table I, application no. 19, preferably the coding region thereof, particularly a homolog or functional equivalent as shown in column 8 of Table I B, application no. 19, and being depicted in the same respective line as said B0004, and preferably the activity is increased plastidic, or
[99310] (b) a polypeptide comprising a polypeptide, a consensus sequence or at least a polypeptide motif as shown in the respective line in column 5 of Table II or in column 8 of Table IV, application no. 19, respectively, and being depicted in the same respective line as said B0004, or a functional equivalent or a homolog thereof as depicted in column 8 of Table II, application no. 19, preferably a homolog or functional equivalent as depicted in column 8 of Table II B, application no. 19, and being depicted in the same respective line as said B0004, and preferably the activity is increased plastidic, whereby the respective line disclose in column 7 the fine chemical triacylglycerol.

[99311] Accordingly, in one embodiment, the molecule which activity is to be increased in the process of the invention is the gene product with an activity as a “threonine synthase”, preferably it is the molecule of section (a) or (b) of this paragraph.

[99312] In particular, it was observed that in plants, especially in Arabidopsis thaliana, increasing or generating the activity of a gene product plastidic with the activity of a “threonine synthase”, preferably being encoded by a gene comprising the nucleic acid sequence SEQ ID NO. 34889, preferably the coding region thereof, conferred the production of or the increase in triacylglycerol compared with the wild type control.

[99313] The nucleic acid sequence of B0050 from Escherichia coli, e.g. as shown in the respective line in column 5 of Table I, application no. 19, has been published in B. And the activity of the gene product thereof is the activity of b0050-protein.

[99314] Accordingly, in one embodiment, the process of the present invention for producing glycerol phosphate (lipid fraction) in a non-human organism, like a microorganism or a plant or a part thereof, comprises increasing or generating the activity of a gene product with the activity of a gene product conferring the activity of “b0050-protein”, especially from Escherichia coli or its functional equivalent or its homolog, e.g. the increase of
[99315] (a) a gene product of a gene comprising the nucleic acid molecule as shown in the respective line in column 5 of Table I (whereby the respective line disclose in column 7 the fine chemical glycerol phosphate (lipid fraction)), application no. 19, preferably the coding region thereof, or a homolog or a fragment thereof, and being depicted in the same respective line as said B0050, or a functional equivalent or a homolog thereof as shown in column 8 of Table I, application no. 19, preferably the coding region thereof, particularly a homolog or functional equivalent as shown in column 8 of Table I B, application no. 19, and being depicted in the same respective line as said B0050, and preferably the activity is increased non-targeted, or
[99316] (b) a polypeptide comprising a polypeptide, a consensus sequence or at least a polypeptide motif as shown in the respective line in column 5 of Table II or in column 8 of Table IV, application no. 19, respectively, and being depicted in the same respective line as said B0050, or a functional equivalent or a homolog thereof as depicted in column 8 of Table II, application no. 19, preferably a homolog or functional equivalent as depicted in column 8 of Table II B, application no. 19, and being depicted in the same respective line as said B0050, and preferably the activity is increased non-targeted, whereby the respective line disclose in column 7 the fine chemical glycerol phosphate (lipid fraction).

[99317] Accordingly, in one embodiment, the molecule which activity is to be increased in the process of the invention is the gene product with an activity as a “b0050-protein”, preferably it is the molecule of section (a) or (b) of this paragraph.

[99318] In particular, it was observed that in plants, especially in Arabidopsis thaliana, increasing or generating the activity of a gene product non-targeted with the activity of a “b0050-protein”, preferably being encoded by a gene comprising the nucleic acid sequence SEQ ID NO. 103958, preferably the coding region thereof, conferred the production of or the increase in glycerol phosphate (lipid fraction) compared with the wild type control.

[99319] The nucleic acid sequence of B0161 from Escherichia coli, e.g. as shown in the respective line in column 5 of Table I, application no. 19, has been published in B. And the activity of the gene product thereof is the activity of serine protease.

[99320] Accordingly, in one embodiment, the process of the present invention for producing bis-glyceryl phosphate (polar fraction) in a non-human organism, like a microorganism or a plant or a part thereof, comprises increasing or generating the activity of a gene product with the activity of a gene product conferring the activity of “serine protease”, especially from Escherichia coli or its functional equivalent or its homolog, e.g. the increase of
[99321] (a) a gene product of a gene comprising the nucleic acid molecule as shown in the respective line in column 5 of Table I (whereby the respective line disclose in column 7 the fine chemical bis-glyceryl phosphate (polar fraction)), application no. 19, preferably the coding region thereof, or a homolog or a fragment thereof, and being depicted in the same respective line as said B0161, or a functional equivalent or a homolog thereof as shown in column 8 of Table I, application no. 19, preferably the coding region thereof, particularly a homolog or functional equivalent as shown in column 8 of Table I B, application no. 19, and being depicted in the same respective line as said B0161, and preferably the activity is increased non-targeted, or
[99322] (b) a polypeptide comprising a polypeptide, a consensus sequence or at least a polypeptide motif as shown in the respective line in column 5 of Table II or in column 8 of Table IV, application no. 19, respectively, and being depicted in the same respective line as said B0161, or a functional equivalent or a homolog thereof as depicted in column 8 of Table II, application no. 19, preferably a homolog or functional equivalent as depicted in column 8 of Table II B, application no. 19, and being depicted in the same respective line as said B0161, and preferably the activity is increased non-targeted, whereby the respective line disclose in column 7 the fine chemical bis-glyceryl phosphate (polar fraction).

[99323] Accordingly, in one embodiment, the molecule which activity is to be increased in the process of the invention is the gene product with an activity as a “serine protease”, preferably it is the molecule of section (a) or (b) of this paragraph.

[99324] In particular, it was observed that in plants, especially in Arabidopsis thaliana, increasing or generating the activity of a gene product non-targeted with the activity of a “serine protease”, preferably being encoded by a gene comprising the nucleic acid sequence SEQ ID NO. 7081, preferably the coding region thereof, conferred the production of or the increase in bis-glyceryl phosphate (polar fraction) compared with the wild type control.

[99325] The nucleic acid sequence of B0161 from Escherichia coli, e.g. as shown in the respective line in column 5 of Table I, application no. 19, has been published in B. And the activity of the gene product thereof is the activity of serine protease.

[99326] Accordingly, in one embodiment, the process of the present invention for producing triacylglycerol in a non-human organism, like a microorganism or a plant or a part thereof, comprises increasing or generating the activity of a gene product with the activity of a gene product conferring the activity of “serine protease”, especially from Escherichia coli or its functional equivalent or its homolog, e.g. the increase of
[99327] (a) a gene product of a gene comprising the nucleic acid molecule as shown in the respective line in column 5 of Table I (whereby the respective line disclose in column 7 the fine chemical triacylglycerol), application no. 19, preferably the coding region thereof, or a homolog or a fragment thereof, and being depicted in the same respective line as said B0161, or a functional equivalent or a homolog thereof as shown in column 8 of Table I, application no. 19, preferably the coding region thereof, particularly a homolog or functional equivalent as shown in column 8 of Table I B, application no. 19, and being depicted in the same respective line as said B0161, and preferably the activity is increased non-targeted, or
[99328] (b) a polypeptide comprising a polypeptide, a consensus sequence or at least a polypeptide motif as shown in the respective line in column 5 of Table II or in column 8 of Table IV, application no. 19, respectively, and being depicted in the same respective line as said B0161, or a functional equivalent or a homolog thereof as depicted in column 8 of Table II, application no. 19, preferably a homolog or functional equivalent as depicted in column 8 of Table II B, application no. 19, and being depicted in the same respective line as said B0161, and preferably the activity is increased non-targeted, whereby the respective line disclose in column 7 the fine chemical triacylglycerol.

[99329] Accordingly, in one embodiment, the molecule which activity is to be increased in the process of the invention is the gene product with an activity as a “serine protease”, preferably it is the molecule of section (a) or (b) of this paragraph.

[99330] In particular, it was observed that in plants, especially in Arabidopsis thaliana, increasing or generating the activity of a gene product non-targeted with the activity of a “serine protease”, preferably being encoded by a gene comprising the nucleic acid sequence SEQ ID NO. 7081, preferably the coding region thereof, conferred the production of or the increase in triacylglycerol compared with the wild type control.

[99331] The nucleic acid sequence of B0449 from Escherichia coli, e.g. as shown in the respective line in column 5 of Table I, application no. 19, has been published in B. And the activity of the gene product thereof is the activity of ATP-binding component of a transport system.

[99332] Accordingly, in one embodiment, the process of the present invention for producing bis-glyceryl phosphate (polar fraction) in a non-human organism, like a microorganism or a plant or a part thereof, comprises increasing or generating the activity of a gene product with the activity of a gene product conferring the activity of “ATP-binding component of a transport system”, especially from Escherichia coli or its functional equivalent or its homolog, e.g. the increase of
[99333] (a) a gene product of a gene comprising the nucleic acid molecule as shown in the respective line in column 5 of Table I (whereby the respective line disclose in column 7 the fine chemical bis-glyceryl phosphate (polar fraction)), application no. 19, preferably the coding region thereof, or a homolog or a fragment thereof, and being depicted in the same respective line as said B0449, or a functional equivalent or a homolog thereof as shown in column 8 of Table I, application no. 19, preferably the coding region thereof, particularly a homolog or functional equivalent as shown in column 8 of Table I B, application no. 19, and being depicted in the same respective line as said B0449, and preferably the activity is increased non-targeted, or
[99334] (b) a polypeptide comprising a polypeptide, a consensus sequence or at least a polypeptide motif as shown in the respective line in column 5 of Table II or in column 8 of Table IV, application no. 19, respectively, and being depicted in the same respective line as said B0449, or a functional equivalent or a homolog thereof as depicted in column 8 of Table II, application no. 19, preferably a homolog or functional equivalent as depicted in column 8 of Table II B, application no. 19, and being depicted in the same respective line as said B0449, and preferably the activity is increased non-targeted, whereby the respective line disclose in column 7 the fine chemical bis-glyceryl phosphate (polar fraction).

[99335] Accordingly, in one embodiment, the molecule which activity is to be increased in the process of the invention is the gene product with an activity as a “ATP-binding component of a transport system”, preferably it is the molecule of section (a) or (b) of this paragraph.

[99336] In particular, it was observed that in plants, especially in Arabidopsis thaliana, increasing or generating the activity of a gene product non-targeted with the activity of a “ATP-binding component of a transport system”, preferably being encoded by a gene comprising the nucleic acid sequence SEQ ID NO. 7333, preferably the coding region thereof, conferred the production of or the increase in bis-glyceryl phosphate (polar fraction) compared with the wild type control.

[99337] The nucleic acid sequence of B0518 from Escherichia coli, e.g. as shown in the respective line in column 5 of Table I, application no. 19, has been published in B. And the activity of the gene product thereof is the activity of b0518-protein.

[99338] Accordingly, in one embodiment, the process of the present invention for producing glycerol (lipid fraction) in a non-human organism, like a microorganism or a plant or a part thereof, comprises increasing or generating the activity of a gene product with the activity of a gene product conferring the activity of “b0518-protein”, especially from Escherichia coli or its functional equivalent or its homolog, e.g. the increase of
[99339] (a) a gene product of a gene comprising the nucleic acid molecule as shown in the respective line in column 5 of Table I (whereby the respective line disclose in column 7 the fine chemical glycerol (lipid fraction)), application no. 19, preferably the coding region thereof, or a homolog or a fragment thereof, and being depicted in the same respective line as said B0518, or a functional equivalent or a homolog thereof as shown in column 8 of Table I, application no. 19, preferably the coding region thereof, particularly a homolog or functional equivalent as shown in column 8 of Table I B, application no. 19, and being depicted in the same respective line as said B0518, and preferably the activity is increased non-targeted, or
[99340] (b) a polypeptide comprising a polypeptide, a consensus sequence or at least a polypeptide motif as shown in the respective line in column 5 of Table II or in column 8 of Table IV, application no. 19, respectively, and being depicted in the same respective line as said B0518, or a functional equivalent or a homolog thereof as depicted in column 8 of Table II, application no. 19, preferably a homolog or functional equivalent as depicted in column 8 of Table II B, application no. 19, and being depicted in the same respective line as said B0518, and preferably the activity is increased non-targeted, whereby the respective line disclose in column 7 the fine chemical glycerol (lipid fraction).

[99341] Accordingly, in one embodiment, the molecule which activity is to be increased in the process of the invention is the gene product with an activity as a “b0518-protein”, preferably it is the molecule of section (a) or (b) of this paragraph.

[99342] In particular, it was observed that in plants, especially in Arabidopsis thaliana, increasing or generating the activity of a gene product non-targeted with the activity of a “b0518-protein”, preferably being encoded by a gene comprising the nucleic acid sequence SEQ ID NO. 35936, preferably the coding region thereof, conferred the production of or the increase in glycerol (lipid fraction) compared with the wild type control.

[99343] The nucleic acid sequence of B0755 from Escherichia coli, e.g. as shown in the respective line in column 5 of Table I, application no. 19, has been published in B. And the activity of the gene product thereof is the activity of phosphoglyceromutase.

[99344] Accordingly, in one embodiment, the process of the present invention for producing bis-glyceryl phosphate (polar fraction) in a non-human organism, like a microorganism or a plant or a part thereof, comprises increasing or generating the activity of a gene product with the activity of a gene product conferring the activity of “phosphoglyceromutase”, especially from Escherichia coli or its functional equivalent or its homolog, e.g. the increase of
[99345] (a) a gene product of a gene comprising the nucleic acid molecule as shown in the respective line in column 5 of Table I (whereby the respective line disclose in column 7 the fine chemical bis-glyceryl phosphate (polar fraction)), application no. 19, preferably the coding region thereof, or a homolog or a fragment thereof, and being depicted in the same respective line as said B0755, or a functional equivalent or a homolog thereof as shown in column 8 of Table I, application no. 19, preferably the coding region thereof, particularly a homolog or functional equivalent as shown in column 8 of Table I B, application no. 19, and being depicted in the same respective line as said B0755, and preferably the activity is increased plastidic, or
[99346] (b) a polypeptide comprising a polypeptide, a consensus sequence or at least a polypeptide motif as shown in the respective line in column 5 of Table II or in column 8 of Table IV, application no. 19, respectively, and being depicted in the same respective line as said B0755, or a functional equivalent or a homolog thereof as depicted in column 8 of Table II, application no. 19, preferably a homolog or functional equivalent as depicted in column 8 of Table II B, application no. 19, and being depicted in the same respective line as said B0755, and preferably the activity is increased plastidic, whereby the respective line disclose in column 7 the fine chemical bis-glyceryl phosphate (polar fraction).

[99347] Accordingly, in one embodiment, the molecule which activity is to be increased in the process of the invention is the gene product with an activity as a “phosphoglyceromutase”, preferably it is the molecule of section (a) or (b) of this paragraph.

[99348] In particular, it was observed that in plants, especially in Arabidopsis thaliana, increasing or generating the activity of a gene product plastidic with the activity of a “phosphoglyceromutase”, preferably being encoded by a gene comprising the nucleic acid sequence SEQ ID NO. 152576, preferably the coding region thereof, conferred the production of or the increase in bis-glyceryl phosphate (polar fraction) compared with the wild type control.

[99349] The nucleic acid sequence of B0856 from Escherichia coli, e.g. as shown in the respective line in column 5 of Table I, application no. 19, has been published in B. And the activity of the gene product thereof is the activity of putrescine transport system permease protein.

[99350] Accordingly, in one embodiment, the process of the present invention for producing glycerol (polar fraction) in a non-human organism, like a microorganism or a plant or a part thereof, comprises increasing or generating the activity of a gene product with the activity of a gene product conferring the activity of “putrescine transport system permease protein”, especially from Escherichia coli or its functional equivalent or its homolog, e.g. the increase of
[99351] (a) a gene product of a gene comprising the nucleic acid molecule as shown in the respective line in column 5 of Table I (whereby the respective line disclose in column 7 the fine chemical glycerol (polar fraction)), application no. 19, preferably the coding region thereof, or a homolog or a fragment thereof, and being depicted in the same respective line as said B0856, or a functional equivalent or a homolog thereof as shown in column 8 of Table I, application no. 19, preferably the coding region thereof, particularly a homolog or functional equivalent as shown in column 8 of Table I B, application no. 19, and being depicted in the same respective line as said B0856, and preferably the activity is increased plastidic, or
[99352] (b) a polypeptide comprising a polypeptide, a consensus sequence or at least a polypeptide motif as shown in the respective line in column 5 of Table II or in column 8 of Table IV, application no. 19, respectively, and being depicted in the same respective line as said B0856, or a functional equivalent or a homolog thereof as depicted in column 8 of Table II, application no. 19, preferably a homolog or functional equivalent as depicted in column 8 of Table II B, application no. 19, and being depicted in the same respective line as said B0856, and preferably the activity is increased plastidic, whereby the respective line disclose in column 7 the fine chemical glycerol (polar fraction).

[99353] Accordingly, in one embodiment, the molecule which activity is to be increased in the process of the invention is the gene product with an activity as a “putrescine transport system permease protein”, preferably it is the molecule of section (a) or (b) of this paragraph.

[99354] In particular, it was observed that in plants, especially in Arabidopsis thaliana, increasing or generating the activity of a gene product plastidic with the activity of a “putrescine transport system permease protein”, preferably being encoded by a gene comprising the nucleic acid sequence SEQ ID NO. 131359, preferably the coding region thereof, conferred the production of or the increase in glycerol (polar fraction) compared with the wild type control.

[99355] The nucleic acid sequence of B0963 from Escherichia coli, e.g. as shown in the respective line in column 5 of Table I, application no. 19, has been published in B. And the activity of the gene product thereof is the activity of methylglyoxal synthase.

[99356] Accordingly, in one embodiment, the process of the present invention for producing glycerol (lipid fraction) in a non-human organism, like a microorganism or a plant or a part thereof, comprises increasing or generating the activity of a gene product with the activity of a gene product conferring the activity of “methylglyoxal synthase”, especially from Escherichia coli or its functional equivalent or its homolog, e.g. the increase of
[99357] (a) a gene product of a gene comprising the nucleic acid molecule as shown in the respective line in column 5 of Table I (whereby the respective line disclose in column 7 the fine chemical glycerol (lipid fraction)), application no. 19, preferably the coding region thereof, or a homolog or a fragment thereof, and being depicted in the same respective line as said B0963, or a functional equivalent or a homolog thereof as shown in column 8 of Table I, application no. 19, preferably the coding region thereof, particularly a homolog or functional equivalent as shown in column 8 of Table I B, application no. 19, and being depicted in the same respective line as said B0963, and preferably the activity is increased non-targeted, or
[99358] (b) a polypeptide comprising a polypeptide, a consensus sequence or at least a polypeptide motif as shown in the respective line in column 5 of Table II or in column 8 of Table IV, application no. 19, respectively, and being depicted in the same respective line as said B0963, or a functional equivalent or a homolog thereof as depicted in column 8 of Table II, application no. 19, preferably a homolog or functional equivalent as depicted in column 8 of Table II B, application no. 19, and being depicted in the same respective line as said B0963, and preferably the activity is increased non-targeted, whereby the respective line disclose in column 7 the fine chemical glycerol (lipid fraction).

[99359] Accordingly, in one embodiment, the molecule which activity is to be increased in the process of the invention is the gene product with an activity as a “methylglyoxal synthase”, preferably it is the molecule of section (a) or (b) of this paragraph.

[99360] In particular, it was observed that in plants, especially in Arabidopsis thaliana, increasing or generating the activity of a gene product non-targeted with the activity of a “methylglyoxal synthase”, preferably being encoded by a gene comprising the nucleic acid sequence SEQ ID NO. 36670, preferably the coding region thereof, conferred the production of or the increase in glycerol (lipid fraction) compared with the wild type control.

[99361] The nucleic acid sequence of B0963 from Escherichia coli, e.g. as shown in the respective line in column 5 of Table I, application no. 19, has been published in B. And the activity of the gene product thereof is the activity of methylglyoxal synthase.

[99362] Accordingly, in one embodiment, the process of the present invention for producing glycerol (polar fraction) in a non-human organism, like a microorganism or a plant or a part thereof, comprises increasing or generating the activity of a gene product with the activity of a gene product conferring the activity of “methylglyoxal synthase”, especially from Escherichia coli or its functional equivalent or its homolog, e.g. the increase of
[99363] (a) a gene product of a gene comprising the nucleic acid molecule as shown in the respective line in column 5 of Table I (whereby the respective line disclose in column 7 the fine chemical glycerol (polar fraction)), application no. 19, preferably the coding region thereof, or a homolog or a fragment thereof, and being depicted in the same respective line as said B0963, or a functional equivalent or a homolog thereof as shown in column 8 of Table I, application no. 19, preferably the coding region thereof, particularly a homolog or functional equivalent as shown in column 8 of Table I B, application no. 19, and being depicted in the same respective line as said B0963, and preferably the activity is increased non-targeted, or
[99364] (b) a polypeptide comprising a polypeptide, a consensus sequence or at least a polypeptide motif as shown in the respective line in column 5 of Table II or in column 8 of Table IV, application no. 19, respectively, and being depicted in the same respective line as said B0963, or a functional equivalent or a homolog thereof as depicted in column 8 of Table II, application no. 19, preferably a homolog or functional equivalent as depicted in column 8 of Table II B, application no. 19, and being depicted in the same respective line as said B0963, and preferably the activity is increased non-targeted, whereby the respective line disclose in column 7 the fine chemical glycerol (polar fraction).

[99365] Accordingly, in one embodiment, the molecule which activity is to be increased in the process of the invention is the gene product with an activity as a “methylglyoxal synthase”, preferably it is the molecule of section (a) or (b) of this paragraph.

[99366] In particular, it was observed that in plants, especially in Arabidopsis thaliana, increasing or generating the activity of a gene product non-targeted with the activity of a “methylglyoxal synthase”, preferably being encoded by a gene comprising the nucleic acid sequence SEQ ID NO. 36670, preferably the coding region thereof, conferred the production of or the increase in glycerol (polar fraction) compared with the wild type control.

[99367] The nucleic acid sequence of B0970 from Escherichia coli, e.g. as shown in the respective line in column 5 of Table I, application no. 19, has been published in B. And the activity of the gene product thereof is the activity of b0970-protein.

[99368] Accordingly, in one embodiment, the process of the present invention for producing bis-glyceryl phosphate (polar fraction) in a non-human organism, like a microorganism or a plant or a part thereof, comprises increasing or generating the activity of a gene product with the activity of a gene product conferring the activity of “b0970-protein”, especially from Escherichia coli or its functional equivalent or its homolog, e.g. the increase of
[99369] (a) a gene product of a gene comprising the nucleic acid molecule as shown in the respective line in column 5 of Table I (whereby the respective line disclose in column 7 the fine chemical bis-glyceryl phosphate (polar fraction)), application no. 19, preferably the coding region thereof, or a homolog or a fragment thereof, and being depicted in the same respective line as said B0970, or a functional equivalent or a homolog thereof as shown in column 8 of Table I, application no. 19, preferably the coding region thereof, particularly a homolog or functional equivalent as shown in column 8 of Table I B, application no. 19, and being depicted in the same respective line as said B0970, and preferably the activity is increased non-targeted, or
[99370] (b) a polypeptide comprising a polypeptide, a consensus sequence or at least a polypeptide motif as shown in the respective line in column 5 of Table II or in column 8 of Table IV, application no. 19, respectively, and being depicted in the same respective line as said B0970, or a functional equivalent or a homolog thereof as depicted in column 8 of Table II, application no. 19, preferably a homolog or functional equivalent as depicted in column 8 of Table II B, application no. 19, and being depicted in the same respective line as said B0970, and preferably the activity is increased non-targeted, whereby the respective line disclose in column 7 the fine chemical bis-glyceryl phosphate (polar fraction).

[99371] Accordingly, in one embodiment, the molecule which activity is to be increased in the process of the invention is the gene product with an activity as a “b0970-protein”, preferably it is the molecule of section (a) or (b) of this paragraph.

[99372] In particular, it was observed that in plants, especially in Arabidopsis thaliana, increasing or generating the activity of a gene product non-targeted with the activity of a “b0970-protein”, preferably being encoded by a gene comprising the nucleic acid sequence SEQ ID NO. 144479, preferably the coding region thereof, conferred the production of or the increase in bis-glyceryl phosphate (polar fraction) compared with the wild type control.

[99373] The nucleic acid sequence of B1003 from Escherichia coli, e.g. as shown in the respective line in column 5 of Table I, application no. 19, has been published in B. And the activity of the gene product thereof is the activity of b1003-protein.

[99374] Accordingly, in one embodiment, the process of the present invention for producing bis-glyceryl phosphate (polar fraction) in a non-human organism, like a microorganism or a plant or a part thereof, comprises increasing or generating the activity of a gene product with the activity of a gene product conferring the activity of “b1003-protein”, especially from Escherichia coli or its functional equivalent or its homolog, e.g. the increase of
[99375] (a) a gene product of a gene comprising the nucleic acid molecule as shown in the respective line in column 5 of Table I (whereby the respective line disclose in column 7 the fine chemical bis-glyceryl phosphate (polar fraction)), application no. 19, preferably the coding region thereof, or a homolog or a fragment thereof, and being depicted in the same respective line as said B1003, or a functional equivalent or a homolog thereof as shown in column 8 of Table I, application no. 19, preferably the coding region thereof, particularly a homolog or functional equivalent as shown in column 8 of Table I B, application no. 19, and being depicted in the same respective line as said B1003, and preferably the activity is increased non-targeted, or
[99376] (b) a polypeptide comprising a polypeptide, a consensus sequence or at least a polypeptide motif as shown in the respective line in column 5 of Table II or in column 8 of Table IV, application no. 19, respectively, and being depicted in the same respective line as said B1003, or a functional equivalent or a homolog thereof as depicted in column 8 of Table II, application no. 19, preferably a homolog or functional equivalent as depicted in column 8 of Table II B, application no. 19, and being depicted in the same respective line as said B1003, and preferably the activity is increased non-targeted, whereby the respective line disclose in column 7 the fine chemical bis-glyceryl phosphate (polar fraction).

[99377] Accordingly, in one embodiment, the molecule which activity is to be increased in the process of the invention is the gene product with an activity as a “b1003-protein”, preferably it is the molecule of section (a) or (b) of this paragraph.

[99378] In particular, it was observed that in plants, especially in Arabidopsis thaliana, increasing or generating the activity of a gene product non-targeted with the activity of a “b1003-protein”, preferably being encoded by a gene comprising the nucleic acid sequence SEQ ID NO. 7941, preferably the coding region thereof, conferred the production of or the increase in bis-glyceryl phosphate (polar fraction) compared with the wild type control.

[99379] The nucleic acid sequence of B1095 from Escherichia coli, e.g. as shown in the respective line in column 5 of Table I, application no. 19, has been published in B. And the activity of the gene product thereof is the activity of 3-oxoacyl-[acyl-carrier-protein] synthase.

[99380] Accordingly, in one embodiment, the process of the present invention for producing bis-glyceryl phosphate (polar fraction) in a non-human organism, like a microorganism or a plant or a part thereof, comprises increasing or generating the activity of a gene product with the activity of a gene product conferring the activity of “3-oxoacyl-[acyl-carrier-protein] synthase”, especially from Escherichia coli or its functional equivalent or its homolog, e.g. the increase of
[99381] (a) a gene product of a gene comprising the nucleic acid molecule as shown in the respective line in column 5 of Table I (whereby the respective line disclose in column 7 the fine chemical bis-glyceryl phosphate (polar fraction)), application no. 19, preferably the coding region thereof, or a homolog or a fragment thereof, and being depicted in the same respective line as said B1095, or a functional equivalent or a homolog thereof as shown in column 8 of Table I, application no. 19, preferably the coding region thereof, particularly a homolog or functional equivalent as shown in column 8 of Table I B, application no. 19, and being depicted in the same respective line as said B1095, and preferably the activity is increased plastidic, or
[99382] (b) a polypeptide comprising a polypeptide, a consensus sequence or at least a polypeptide motif as shown in the respective line in column 5 of Table II or in column 8 of Table IV, application no. 19, respectively, and being depicted in the same respective line as said B1095, or a functional equivalent or a homolog thereof as depicted in column 8 of Table II, application no. 19, preferably a homolog or functional equivalent as depicted in column 8 of Table II B, application no. 19, and being depicted in the same respective line as said B1095, and preferably the activity is increased plastidic, whereby the respective line disclose in column 7 the fine chemical bis-glyceryl phosphate (polar fraction).

[99383] Accordingly, in one embodiment, the molecule which activity is to be increased in the process of the invention is the gene product with an activity as a “3-oxoacyl-[acyl-carrier-protein] synthase”, preferably it is the molecule of section (a) or (b) of this paragraph.

[99384] In particular, it was observed that in plants, especially in Arabidopsis thaliana, increasing or generating the activity of a gene product plastidic with the activity of a “3-oxoacyl-[acyl-carrier-protein] synthase”, preferably being encoded by a gene comprising the nucleic acid sequence SEQ ID NO. 114552, preferably the coding region thereof, conferred the production of or the increase in bis-glyceryl phosphate (polar fraction) compared with the wild type control.

[99385] The nucleic acid sequence of B1186 from Escherichia coli, e.g. as shown in the respective line in column 5 of Table I, application no. 19, has been published in B. And the activity of the gene product thereof is the activity of sodium/proton antiporter.

[99386] Accordingly, in one embodiment, the process of the present invention for producing glycerol (lipid fraction) in a non-human organism, like a microorganism or a plant or a part thereof, comprises increasing or generating the activity of a gene product with the activity of a gene product conferring the activity of “sodium/proton antiporter”, especially from Escherichia coli or its functional equivalent or its homolog, e.g. the increase of
[99387] (a) a gene product of a gene comprising the nucleic acid molecule as shown in the respective line in column 5 of Table I (whereby the respective line disclose in column 7 the fine chemical glycerol (lipid fraction)), application no. 19, preferably the coding region thereof, or a homolog or a fragment thereof, and being depicted in the same respective line as said B1186, or a functional equivalent or a homolog thereof as shown in column 8 of Table I, application no. 19, preferably the coding region thereof, particularly a homolog or functional equivalent as shown in column 8 of Table I B, application no. 19, and being depicted in the same respective line as said B1186, and preferably the activity is increased non-targeted, or
[99388] (b) a polypeptide comprising a polypeptide, a consensus sequence or at least a polypeptide motif as shown in the respective line in column 5 of Table II or in column 8 of Table IV, application no. 19, respectively, and being depicted in the same respective line as said B1186, or a functional equivalent or a homolog thereof as depicted in column 8 of Table II, application no. 19, preferably a homolog or functional equivalent as depicted in column 8 of Table II B, application no. 19, and being depicted in the same respective line as said B1186, and preferably the activity is increased non-targeted, whereby the respective line disclose in column 7 the fine chemical glycerol (lipid fraction).

[99389] Accordingly, in one embodiment, the molecule which activity is to be increased in the process of the invention is the gene product with an activity as a “sodium/proton antiporter”, preferably it is the molecule of section (a) or (b) of this paragraph.

[99390] In particular, it was observed that in plants, especially in Arabidopsis thaliana, increasing or generating the activity of a gene product non-targeted with the activity of a “sodium/proton antiporter”, preferably being encoded by a gene comprising the nucleic acid sequence SEQ ID NO. 37400, preferably the coding region thereof, conferred the production of or the increase in glycerol (lipid fraction) compared with the wild type control.

[99391] The nucleic acid sequence of B1234 from Escherichia coli, e.g. as shown in the respective line in column 5 of Table I, application no. 19, has been published in B. And the activity of the gene product thereof is the activity of b1234-protein.

[99392] Accordingly, in one embodiment, the process of the present invention for producing triacylglycerol in a non-human organism, like a microorganism or a plant or a part thereof, comprises increasing or generating the activity of a gene product with the activity of a gene product conferring the activity of “b1234-protein”, especially from Escherichia coli or its functional equivalent or its homolog, e.g. the increase of
[99393] (a) a gene product of a gene comprising the nucleic acid molecule as shown in the respective line in column 5 of Table I (whereby the respective line disclose in column 7 the fine chemical triacylglycerol), application no. 19, preferably the coding region thereof, or a homolog or a fragment thereof, and being depicted in the same respective line as said B1234, or a functional equivalent or a homolog thereof as shown in column 8 of Table I, application no. 19, preferably the coding region thereof, particularly a homolog or functional equivalent as shown in column 8 of Table I B, application no. 19, and being depicted in the same respective line as said B1234, and preferably the activity is increased non-targeted, or
[99394] (b) a polypeptide comprising a polypeptide, a consensus sequence or at least a polypeptide motif as shown in the respective line in column 5 of Table II or in column 8 of Table IV, application no. 19, respectively, and being depicted in the same respective line as said B1234, or a functional equivalent or a homolog thereof as depicted in column 8 of Table II, application no. 19, preferably a homolog or functional equivalent as depicted in column 8 of Table II B, application no. 19, and being depicted in the same respective line as said B1234, and preferably the activity is increased non-targeted, whereby the respective line disclose in column 7 the fine chemical triacylglycerol.

[99395] Accordingly, in one embodiment, the molecule which activity is to be increased in the process of the invention is the gene product with an activity as a “b1234-protein”, preferably it is the molecule of section (a) or (b) of this paragraph.

[99396] In particular, it was observed that in plants, especially in Arabidopsis thaliana, increasing or generating the activity of a gene product non-targeted with the activity of a “b1234-protein”, preferably being encoded by a gene comprising the nucleic acid sequence SEQ ID NO. 112111, preferably the coding region thereof, conferred the production of or the increase in triacylglycerol compared with the wild type control.

[99397] The nucleic acid sequence of B1249 from Escherichia coli, e.g. as shown in the respective line in column 5 of Table I, application no. 19, has been published in B. And the activity of the gene product thereof is the activity of cardiolipin synthase.

[99398] Accordingly, in one embodiment, the process of the present invention for producing glycerol (lipid fraction) in a non-human organism, like a microorganism or a plant or a part thereof, comprises increasing or generating the activity of a gene product with the activity of a gene product conferring the activity of “cardiolipin synthase”, especially from Escherichia coli or its functional equivalent or its homolog, e.g. the increase of
[99399] (a) a gene product of a gene comprising the nucleic acid molecule as shown in the respective line in column 5 of Table I (whereby the respective line disclose in column 7 the fine chemical glycerol (lipid fraction)), application no. 19, preferably the coding region thereof, or a homolog or a fragment thereof, and being depicted in the same respective line as said B1249, or a functional equivalent or a homolog thereof as shown in column 8 of Table I, application no. 19, preferably the coding region thereof, particularly a homolog or functional equivalent as shown in column 8 of Table I B, application no. 19, and being depicted in the same respective line as said B1249, and preferably the activity is increased plastidic, or
[99400] (b) a polypeptide comprising a polypeptide, a consensus sequence or at least a polypeptide motif as shown in the respective line in column 5 of Table II or in column 8 of Table IV, application no. 19, respectively, and being depicted in the same respective line as said B1249, or a functional equivalent or a homolog thereof as depicted in column 8 of Table II, application no. 19, preferably a homolog or functional equivalent as depicted in column 8 of Table II B, application no. 19, and being depicted in the same respective line as said B1249, and preferably the activity is increased plastidic, whereby the respective line disclose in column 7 the fine chemical glycerol (lipid fraction).

[99401] Accordingly, in one embodiment, the molecule which activity is to be increased in the process of the invention is the gene product with an activity as a “cardiolipin synthase”, preferably it is the molecule of section (a) or (b) of this paragraph.

[99402] In particular, it was observed that in plants, especially in Arabidopsis thaliana, increasing or generating the activity of a gene product plastidic with the activity of a “cardiolipin synthase”, preferably being encoded by a gene comprising the nucleic acid sequence SEQ ID NO. 98778, preferably the coding region thereof, conferred the production of or the increase in glycerol (lipid fraction) compared with the wild type control.

[99403] The nucleic acid sequence of B1330 from Escherichia coli, e.g. as shown in the respective line in column 5 of Table I, application no. 19, has been published in B. And the activity of the gene product thereof is the activity of b1330-protein.

[99404] Accordingly, in one embodiment, the process of the present invention for producing glycerol phosphate (lipid fraction) in a non-human organism, like a microorganism or a plant or a part thereof, comprises increasing or generating the activity of a gene product with the activity of a gene product conferring the activity of “b1330-protein”, especially from Escherichia coli or its functional equivalent or its homolog, e.g. the increase of
[99405] (a) a gene product of a gene comprising the nucleic acid molecule as shown in the respective line in column 5 of Table I (whereby the respective line disclose in column 7 the fine chemical glycerol phosphate (lipid fraction)), application no. 19, preferably the coding region thereof, or a homolog or a fragment thereof, and being depicted in the same respective line as said B1330, or a functional equivalent or a homolog thereof as shown in column 8 of Table I, application no. 19, preferably the coding region thereof, particularly a homolog or functional equivalent as shown in column 8 of Table I B, application no. 19, and being depicted in the same respective line as said B1330, and preferably the activity is increased non-targeted, or
[99406] (b) a polypeptide comprising a polypeptide, a consensus sequence or at least a polypeptide motif as shown in the respective line in column 5 of Table II or in column 8 of Table IV, application no. 19, respectively, and being depicted in the same respective line as said B1330, or a functional equivalent or a homolog thereof as depicted in column 8 of Table II, application no. 19, preferably a homolog or functional equivalent as depicted in column 8 of Table II B, application no. 19, and being depicted in the same respective line as said B1330, and preferably the activity is increased non-targeted, whereby the respective line disclose in column 7 the fine chemical glycerol phosphate (lipid fraction).

[99407] Accordingly, in one embodiment, the molecule which activity is to be increased in the process of the invention is the gene product with an activity as a “b1330-protein”, preferably it is the molecule of section (a) or (b) of this paragraph.

[99408] In particular, it was observed that in plants, especially in Arabidopsis thaliana, increasing or generating the activity of a gene product non-targeted with the activity of a “b1330-protein”, preferably being encoded by a gene comprising the nucleic acid sequence SEQ ID NO. 38226, preferably the coding region thereof, conferred the production of or the increase in glycerol phosphate (lipid fraction) compared with the wild type control.

[99409] The nucleic acid sequence of B1343 from Escherichia coli, e.g. as shown in the respective line in column 5 of Table I, application no. 19, has been published in B. And the activity of the gene product thereof is the activity of ATP-dependent RNA helicase.

[99410] Accordingly, in one embodiment, the process of the present invention for producing bis-glyceryl phosphate (polar fraction) in a non-human organism, like a microorganism or a plant or a part thereof, comprises increasing or generating the activity of a gene product with the activity of a gene product conferring the activity of “ATP-dependent RNA helicase”, especially from Escherichia coli or its functional equivalent or its homolog, e.g. the increase of
[99411] (a) a gene product of a gene comprising the nucleic acid molecule as shown in the respective line in column 5 of Table I (whereby the respective line disclose in column 7 the fine chemical bis-glyceryl phosphate (polar fraction)), application no. 19, preferably the coding region thereof, or a homolog or a fragment thereof, and being depicted in the same respective line as said B1343, or a functional equivalent or a homolog thereof as shown in column 8 of Table I, application no. 19, preferably the coding region thereof, particularly a homolog or functional equivalent as shown in column 8 of Table I B, application no. 19, and being depicted in the same respective line as said B1343, and preferably the activity is increased non-targeted, or
[99412] (b) a polypeptide comprising a polypeptide, a consensus sequence or at least a polypeptide motif as shown in the respective line in column 5 of Table II or in column 8 of Table IV, application no. 19, respectively, and being depicted in the same respective line as said B1343, or a functional equivalent or a homolog thereof as depicted in column 8 of Table II, application no. 19, preferably a homolog or functional equivalent as depicted in column 8 of Table II B, application no. 19, and being depicted in the same respective line as said B1343, and preferably the activity is increased non-targeted, whereby the respective line disclose in column 7 the fine chemical bis-glyceryl phosphate (polar fraction).

[99413] Accordingly, in one embodiment, the molecule which activity is to be increased in the process of the invention is the gene product with an activity as a “ATP-dependent RNA helicase”, preferably it is the molecule of section (a) or (b) of this paragraph.

[99414] In particular, it was observed that in plants, especially in Arabidopsis thaliana, increasing or generating the activity of a gene product non-targeted with the activity of a “ATP-dependent RNA helicase”, preferably being encoded by a gene comprising the nucleic acid sequence SEQ ID NO. 76890, preferably the coding region thereof, conferred the production of or the increase in bis-glyceryl phosphate (polar fraction) compared with the wild type control.

[99415] The nucleic acid sequence of B1391 from Escherichia coli, e.g. as shown in the respective line in column 5 of Table I, application no. 19, has been published in B. And the activity of the gene product thereof is the activity of phenylacetic acid degradation protein.

[99416] Accordingly, in one embodiment, the process of the present invention for producing bis-glyceryl phosphate (polar fraction) in a non-human organism, like a microorganism or a plant or a part thereof, comprises increasing or generating the activity of a gene product with the activity of a gene product conferring the activity of “phenylacetic acid degradation protein”, especially from Escherichia coli or its functional equivalent or its homolog, e.g. the increase of
[99417] (a) a gene product of a gene comprising the nucleic acid molecule as shown in the respective line in column 5 of Table I (whereby the respective line disclose in column 7 the fine chemical bis-glyceryl phosphate (polar fraction)), application no. 19, preferably the coding region thereof, or a homolog or a fragment thereof, and being depicted in the same respective line as said B1391, or a functional equivalent or a homolog thereof as shown in column 8 of Table I, application no. 19, preferably the coding region thereof, particularly a homolog or functional equivalent as shown in column 8 of Table I B, application no. 19, and being depicted in the same respective line as said B1391, and preferably the activity is increased non-targeted, or
[99418] (b) a polypeptide comprising a polypeptide, a consensus sequence or at least a polypeptide motif as shown in the respective line in column 5 of Table II or in column 8 of Table IV, application no. 19, respectively, and being depicted in the same respective line as said B1391, or a functional equivalent or a homolog thereof as depicted in column 8 of Table II, application no. 19, preferably a homolog or functional equivalent as depicted in column 8 of Table II B, application no. 19, and being depicted in the same respective line as said B1391, and preferably the activity is increased non-targeted, whereby the respective line disclose in column 7 the fine chemical bis-glyceryl phosphate (polar fraction).

[99419] Accordingly, in one embodiment, the molecule which activity is to be increased in the process of the invention is the gene product with an activity as a “phenylacetic acid degradation protein”, preferably it is the molecule of section (a) or (b) of this paragraph.

[99420] In particular, it was observed that in plants, especially in Arabidopsis thaliana, increasing or generating the activity of a gene product non-targeted with the activity of a “phenylacetic acid degradation protein”, preferably being encoded by a gene comprising the nucleic acid sequence SEQ ID NO. 131489, preferably the coding region thereof, conferred the production of or the increase in bis-glyceryl phosphate (polar fraction) compared with the wild type control.

[99421] The nucleic acid sequence of B1431 from Escherichia coli, e.g. as shown in the respective line in column 5 of Table I, application no. 19, has been published in B. And the activity of the gene product thereof is the activity of lipoprotein precursor.

[99422] Accordingly, in one embodiment, the process of the present invention for producing bis-glyceryl phosphate (polar fraction) in a non-human organism, like a microorganism or a plant or a part thereof, comprises increasing or generating the activity of a gene product with the activity of a gene product conferring the activity of “lipoprotein precursor”, especially from Escherichia coli or its functional equivalent or its homolog, e.g. the increase of
[99423] (a) a gene product of a gene comprising the nucleic acid molecule as shown in the respective line in column 5 of Table I (whereby the respective line disclose in column 7 the fine chemical bis-glyceryl phosphate (polar fraction)), application no. 19, preferably the coding region thereof, or a homolog or a fragment thereof, and being depicted in the same respective line as said B1431, or a functional equivalent or a homolog thereof as shown in column 8 of Table I, application no. 19, preferably the coding region thereof, particularly a homolog or functional equivalent as shown in column 8 of Table I B, application no. 19, and being depicted in the same respective line as said B1431, and preferably the activity is increased plastidic, or
[99424] (b) a polypeptide comprising a polypeptide, a consensus sequence or at least a polypeptide motif as shown in the respective line in column 5 of Table II or in column 8 of Table IV, application no. 19, respectively, and being depicted in the same respective line as said B1431, or a functional equivalent or a homolog thereof as depicted in column 8 of Table II, application no. 19, preferably a homolog or functional equivalent as depicted in column 8 of Table II B, application no. 19, and being depicted in the same respective line as said B1431, and preferably the activity is increased plastidic, whereby the respective line disclose in column 7 the fine chemical bis-glyceryl phosphate (polar fraction).

[99425] Accordingly, in one embodiment, the molecule which activity is to be increased in the process of the invention is the gene product with an activity as a “lipoprotein precursor”, preferably it is the molecule of section (a) or (b) of this paragraph.

[99426] In particular, it was observed that in plants, especially in Arabidopsis thaliana, increasing or generating the activity of a gene product plastidic with the activity of a “lipoprotein precursor”, preferably being encoded by a gene comprising the nucleic acid sequence SEQ ID NO. 38266, preferably the coding region thereof, conferred the production of or the increase in bis-glyceryl phosphate (polar fraction) compared with the wild type control.

[99427] The nucleic acid sequence of B1522 from Escherichia coli, e.g. as shown in the respective line in column 5 of Table I, application no. 19, has been published in B. And the activity of the gene product thereof is the activity of b1522-protein.

[99428] Accordingly, in one embodiment, the process of the present invention for producing bis-glyceryl phosphate (polar fraction) in a non-human organism, like a microorganism or a plant or a part thereof, comprises increasing or generating the activity of a gene product with the activity of a gene product conferring the activity of “b1522-protein”, especially from Escherichia coli or its functional equivalent or its homolog, e.g. the increase of
[99429] (a) a gene product of a gene comprising the nucleic acid molecule as shown in the respective line in column 5 of Table I (whereby the respective line disclose in column 7 the fine chemical bis-glyceryl phosphate (polar fraction)), application no. 19, preferably the coding region thereof, or a homolog or a fragment thereof, and being depicted in the same respective line as said B1522, or a functional equivalent or a homolog thereof as shown in column 8 of Table I, application no. 19, preferably the coding region thereof, particularly a homolog or functional equivalent as shown in column 8 of Table I B, application no. 19, and being depicted in the same respective line as said B1522, and preferably the activity is increased non-targeted, or
[99430] (b) a polypeptide comprising a polypeptide, a consensus sequence or at least a polypeptide motif as shown in the respective line in column 5 of Table II or in column 8 of Table IV, application no. 19, respectively, and being depicted in the same respective line as said B1522, or a functional equivalent or a homolog thereof as depicted in column 8 of Table II, application no. 19, preferably a homolog or functional equivalent as depicted in column 8 of Table II B, application no. 19, and being depicted in the same respective line as said B1522, and preferably the activity is increased non-targeted, whereby the respective line disclose in column 7 the fine chemical bis-glyceryl phosphate (polar fraction).

[99431] Accordingly, in one embodiment, the molecule which activity is to be increased in the process of the invention is the gene product with an activity as a “b1522-protein”, preferably it is the molecule of section (a) or (b) of this paragraph.

[99432] In particular, it was observed that in plants, especially in Arabidopsis thaliana, increasing or generating the activity of a gene product non-targeted with the activity of a “b1522-protein”, preferably being encoded by a gene comprising the nucleic acid sequence SEQ ID NO. 7947, preferably the coding region thereof, conferred the production of or the increase in bis-glyceryl phosphate (polar fraction) compared with the wild type control.

[99433] The nucleic acid sequence of B1554 from Escherichia coli, e.g. as shown in the respective line in column 5 of Table I, application no. 19, has been published in B. And the activity of the gene product thereof is the activity of lysozyme.

[99434] Accordingly, in one embodiment, the process of the present invention for producing bis-glyceryl phosphate (polar fraction) in a non-human organism, like a microorganism or a plant or a part thereof, comprises increasing or generating the activity of a gene product with the activity of a gene product conferring the activity of “lysozyme”, especially from Escherichia coli or its functional equivalent or its homolog, e.g. the increase of
[99435] (a) a gene product of a gene comprising the nucleic acid molecule as shown in the respective line in column 5 of Table I (whereby the respective line disclose in column 7 the fine chemical bis-glyceryl phosphate (polar fraction)), application no. 19, preferably the coding region thereof, or a homolog or a fragment thereof, and being depicted in the same respective line as said B1554, or a functional equivalent or a homolog thereof as shown in column 8 of Table I, application no. 19, preferably the coding region thereof, particularly a homolog or functional equivalent as shown in column 8 of Table I B, application no. 19, and being depicted in the same respective line as said B1554, and preferably the activity is increased non-targeted, or
[99436] (b) a polypeptide comprising a polypeptide, a consensus sequence or at least a polypeptide motif as shown in the respective line in column 5 of Table II or in column 8 of Table IV, application no. 19, respectively, and being depicted in the same respective line as said B1554, or a functional equivalent or a homolog thereof as depicted in column 8 of Table II, application no. 19, preferably a homolog or functional equivalent as depicted in column 8 of Table II B, application no. 19, and being depicted in the same respective line as said B1554, and preferably the activity is increased non-targeted, whereby the respective line disclose in column 7 the fine chemical bis-glyceryl phosphate (polar fraction).

[99437] Accordingly, in one embodiment, the molecule which activity is to be increased in the process of the invention is the gene product with an activity as a “lysozyme”, preferably it is the molecule of section (a) or (b) of this paragraph.

[99438] In particular, it was observed that in plants, especially in Arabidopsis thaliana, increasing or generating the activity of a gene product non-targeted with the activity of a “lysozyme”, preferably being encoded by a gene comprising the nucleic acid sequence SEQ ID NO. 152991, preferably the coding region thereof, conferred the production of or the increase in bis-glyceryl phosphate (polar fraction) compared with the wild type control.

[99439] The nucleic acid sequence of B1556 from Escherichia coli, e.g. as shown in the respective line in column 5 of Table I, application no. 19, has been published in B. And the activity of the gene product thereof is the activity of b1556-protein.

[99440] Accordingly, in one embodiment, the process of the present invention for producing bis-glyceryl phosphate (polar fraction) in a non-human organism, like a microorganism or a plant or a part thereof, comprises increasing or generating the activity of a gene product with the activity of a gene product conferring the activity of “b1556-protein”, especially from Escherichia coli or its functional equivalent or its homolog, e.g. the increase of
[99441] (a) a gene product of a gene comprising the nucleic acid molecule as shown in the respective line in column 5 of Table I (whereby the respective line disclose in column 7 the fine chemical bis-glyceryl phosphate (polar fraction)), application no. 19, preferably the coding region thereof, or a homolog or a fragment thereof, and being depicted in the same respective line as said B1556, or a functional equivalent or a homolog thereof as shown in column 8 of Table I, application no. 19, preferably the coding region thereof, particularly a homolog or functional equivalent as shown in column 8 of Table I B, application no. 19, and being depicted in the same respective line as said B1556, and preferably the activity is increased plastidic, or
[99442] (b) a polypeptide comprising a polypeptide, a consensus sequence or at least a polypeptide motif as shown in the respective line in column 5 of Table II or in column 8 of Table IV, application no. 19, respectively, and being depicted in the same respective line as said B1556, or a functional equivalent or a homolog thereof as depicted in column 8 of Table II, application no. 19, preferably a homolog or functional equivalent as depicted in column 8 of Table II B, application no. 19, and being depicted in the same respective line as said B1556, and preferably the activity is increased plastidic, whereby the respective line disclose in column 7 the fine chemical bis-glyceryl phosphate (polar fraction).

[99443] Accordingly, in one embodiment, the molecule which activity is to be increased in the process of the invention is the gene product with an activity as a “b1556-protein”, preferably it is the molecule of section (a) or (b) of this paragraph.

[99444] In particular, it was observed that in plants, especially in Arabidopsis thaliana, increasing or generating the activity of a gene product plastidic with the activity of a “b1556-protein”, preferably being encoded by a gene comprising the nucleic acid sequence SEQ ID NO. 145142, preferably the coding region thereof, conferred the production of or the increase in bis-glyceryl phosphate (polar fraction) compared with the wild type control.

[99445] The nucleic acid sequence of B1583 from Escherichia coli, e.g. as shown in the respective line in column 5 of Table I, application no. 19, has been published in B. And the activity of the gene product thereof is the activity of b1583-protein.

[99446] Accordingly, in one embodiment, the process of the present invention for producing triacylglycerol in a non-human organism, like a microorganism or a plant or a part thereof, comprises increasing or generating the activity of a gene product with the activity of a gene product conferring the activity of “b1583-protein”, especially from Escherichia coli or its functional equivalent or its homolog, e.g. the increase of
[99447] (a) a gene product of a gene comprising the nucleic acid molecule as shown in the respective line in column 5 of Table I (whereby the respective line disclose in column 7 the fine chemical triacylglycerol), application no. 19, preferably the coding region thereof, or a homolog or a fragment thereof, and being depicted in the same respective line as said B1583, or a functional equivalent or a homolog thereof as shown in column 8 of Table I, application no. 19, preferably the coding region thereof, particularly a homolog or functional equivalent as shown in column 8 of Table I B, application no. 19, and being depicted in the same respective line as said B1583, and preferably the activity is increased non-targeted, or
[99448] (b) a polypeptide comprising a polypeptide, a consensus sequence or at least a polypeptide motif as shown in the respective line in column 5 of Table II or in column 8 of Table IV, application no. 19, respectively, and being depicted in the same respective line as said B1583, or a functional equivalent or a homolog thereof as depicted in column 8 of Table II, application no. 19, preferably a homolog or functional equivalent as depicted in column 8 of Table II B, application no. 19, and being depicted in the same respective line as said B1583, and preferably the activity is increased non-targeted, whereby the respective line disclose in column 7 the fine chemical triacylglycerol.

[99449] Accordingly, in one embodiment, the molecule which activity is to be increased in the process of the invention is the gene product with an activity as a “b1583-protein”, preferably it is the molecule of section (a) or (b) of this paragraph.

[99450] In particular, it was observed that in plants, especially in Arabidopsis thaliana, increasing or generating the activity of a gene product non-targeted with the activity of a “b1583-protein”, preferably being encoded by a gene comprising the nucleic acid sequence SEQ ID NO. 78138, preferably the coding region thereof, conferred the production of or the increase in triacylglycerol compared with the wild type control.

[99451] The nucleic acid sequence of B1589 from Escherichia coli, e.g. as shown in the respective line in column 5 of Table I, application no. 19, has been published in B. And the activity of the gene product thereof is the activity of Fe—S subunit of oxidoreductase.

[99452] Accordingly, in one embodiment, the process of the present invention for producing bis-glyceryl phosphate (polar fraction) in a non-human organism, like a microorganism or a plant or a part thereof, comprises increasing or generating the activity of a gene product with the activity of a gene product conferring the activity of “Fe—S subunit of oxidoreductase”, especially from Escherichia coli or its functional equivalent or its homolog, e.g. the increase of
[99453] (a) a gene product of a gene comprising the nucleic acid molecule as shown in the respective line in column 5 of Table I (whereby the respective line disclose in column 7 the fine chemical bis-glyceryl phosphate (polar fraction)), application no. 19, preferably the coding region thereof, or a homolog or a fragment thereof, and being depicted in the same respective line as said B1589, or a functional equivalent or a homolog thereof as shown in column 8 of Table I, application no. 19, preferably the coding region thereof, particularly a homolog or functional equivalent as shown in column 8 of Table I B, application no. 19, and being depicted in the same respective line as said B1589, and preferably the activity is increased non-targeted, or
[99454] (b) a polypeptide comprising a polypeptide, a consensus sequence or at least a polypeptide motif as shown in the respective line in column 5 of Table II or in column 8 of Table IV, application no. 19, respectively, and being depicted in the same respective line as said B1589, or a functional equivalent or a homolog thereof as depicted in column 8 of Table II, application no. 19, preferably a homolog or functional equivalent as depicted in column 8 of Table II B, application no. 19, and being depicted in the same respective line as said B1589, and preferably the activity is increased non-targeted, whereby the respective line disclose in column 7 the fine chemical bis-glyceryl phosphate (polar fraction).

[99455] Accordingly, in one embodiment, the molecule which activity is to be increased in the process of the invention is the gene product with an activity as a “Fe—S subunit of oxidoreductase”, preferably it is the molecule of section (a) or (b) of this paragraph.

[99456] In particular, it was observed that in plants, especially in Arabidopsis thaliana, increasing or generating the activity of a gene product non-targeted with the activity of a “Fe—S subunit of oxidoreductase”, preferably being encoded by a gene comprising the nucleic acid sequence SEQ ID NO. 78154, preferably the coding region thereof, conferred the production of or the increase in bis-glyceryl phosphate (polar fraction) compared with the wild type control.

[99457] The nucleic acid sequence of B1597 from Escherichia coli, e.g. as shown in the respective line in column 5 of Table I, application no. 19, has been published in B. And the activity of the gene product thereof is the activity of acid shock protein.

[99458] Accordingly, in one embodiment, the process of the present invention for producing glycerol (lipid fraction) in a non-human organism, like a microorganism or a plant or a part thereof, comprises increasing or generating the activity of a gene product with the activity of a gene product conferring the activity of “acid shock protein”, especially from Escherichia coli or its functional equivalent or its homolog, e.g. the increase of
[99459] (a) a gene product of a gene comprising the nucleic acid molecule as shown in the respective line in column 5 of Table I (whereby the respective line disclose in column 7 the fine chemical glycerol (lipid fraction)), application no. 19, preferably the coding region thereof, or a homolog or a fragment thereof, and being depicted in the same respective line as said B1597, or a functional equivalent or a homolog thereof as shown in column 8 of Table I, application no. 19, preferably the coding region thereof, particularly a homolog or functional equivalent as shown in column 8 of Table I B, application no. 19, and being depicted in the same respective line as said B1597, and preferably the activity is increased non-targeted, or
[99460] (b) a polypeptide comprising a polypeptide, a consensus sequence or at least a polypeptide motif as shown in the respective line in column 5 of Table II or in column 8 of Table IV, application no. 19, respectively, and being depicted in the same respective line as said B1597, or a functional equivalent or a homolog thereof as depicted in column 8 of Table II, application no. 19, preferably a homolog or functional equivalent as depicted in column 8 of Table II B, application no. 19, and being depicted in the same respective line as said B1597, and preferably the activity is increased non-targeted, whereby the respective line disclose in column 7 the fine chemical glycerol (lipid fraction).

[99461] Accordingly, in one embodiment, the molecule which activity is to be increased in the process of the invention is the gene product with an activity as a “acid shock protein”, preferably it is the molecule of section (a) or (b) of this paragraph.

[99462] In particular, it was observed that in plants, especially in Arabidopsis thaliana, increasing or generating the activity of a gene product non-targeted with the activity of a “acid shock protein”, preferably being encoded by a gene comprising the nucleic acid sequence SEQ ID NO. 38300, preferably the coding region thereof, conferred the production of or the increase in glycerol (lipid fraction) compared with the wild type control.

[99463] The nucleic acid sequence of B1670 from Escherichia coli, e.g. as shown in the respective line in column 5 of Table I, application no. 19, has been published in B. And the activity of the gene product thereof is the activity of b1670-protein.

[99464] Accordingly, in one embodiment, the process of the present invention for producing bis-glyceryl phosphate (polar fraction) in a non-human organism, like a microorganism or a plant or a part thereof, comprises increasing or generating the activity of a gene product with the activity of a gene product conferring the activity of “b1670-protein”, especially from Escherichia coli or its functional equivalent or its homolog, e.g. the increase of
[99465] (a) a gene product of a gene comprising the nucleic acid molecule as shown in the respective line in column 5 of Table I (whereby the respective line disclose in column 7 the fine chemical bis-glyceryl phosphate (polar fraction)), application no. 19, preferably the coding region thereof, or a homolog or a fragment thereof, and being depicted in the same respective line as said B1670, or a functional equivalent or a homolog thereof as shown in column 8 of Table I, application no. 19, preferably the coding region thereof, particularly a homolog or functional equivalent as shown in column 8 of Table I B, application no. 19, and being depicted in the same respective line as said B1670, and preferably the activity is increased non-targeted, or
[99466] (b) a polypeptide comprising a polypeptide, a consensus sequence or at least a polypeptide motif as shown in the respective line in column 5 of Table II or in column 8 of Table IV, application no. 19, respectively, and being depicted in the same respective line as said B1670, or a functional equivalent or a homolog thereof as depicted in column 8 of Table II, application no. 19, preferably a homolog or functional equivalent as depicted in column 8 of Table II B, application no. 19, and being depicted in the same respective line as said B1670, and preferably the activity is increased non-targeted, whereby the respective line disclose in column 7 the fine chemical bis-glyceryl phosphate (polar fraction).

[99467] Accordingly, in one embodiment, the molecule which activity is to be increased in the process of the invention is the gene product with an activity as a “b1670-protein”, preferably it is the molecule of section (a) or (b) of this paragraph.

[99468] In particular, it was observed that in plants, especially in Arabidopsis thaliana, increasing or generating the activity of a gene product non-targeted with the activity of a “b1670-protein”, preferably being encoded by a gene comprising the nucleic acid sequence SEQ ID NO. 78753, preferably the coding region thereof, conferred the production of or the increase in bis-glyceryl phosphate (polar fraction) compared with the wild type control.

[99469] The nucleic acid sequence of B1672 from Escherichia coli, e.g. as shown in the respective line in column 5 of Table I, application no. 19, has been published in B. And the activity of the gene product thereof is the activity of b1672-protein.

[99470] Accordingly, in one embodiment, the process of the present invention for producing bis-glyceryl phosphate (polar fraction) in a non-human organism, like a microorganism or a plant or a part thereof, comprises increasing or generating the activity of a gene product with the activity of a gene product conferring the activity of “b1672-protein”, especially from Escherichia coli or its functional equivalent or its homolog, e.g. the increase of
[99471] (a) a gene product of a gene comprising the nucleic acid molecule as shown in the respective line in column 5 of Table I (whereby the respective line disclose in column 7 the fine chemical bis-glyceryl phosphate (polar fraction)), application no. 19, preferably the coding region thereof, or a homolog or a fragment thereof, and being depicted in the same respective line as said B1672, or a functional equivalent or a homolog thereof as shown in column 8 of Table I, application no. 19, preferably the coding region thereof, particularly a homolog or functional equivalent as shown in column 8 of Table I B, application no. 19, and being depicted in the same respective line as said B1672, and preferably the activity is increased non-targeted, or
[99472] (b) a polypeptide comprising a polypeptide, a consensus sequence or at least a polypeptide motif as shown in the respective line in column 5 of Table II or in column 8 of Table IV, application no. 19, respectively, and being depicted in the same respective line as said B1672, or a functional equivalent or a homolog thereof as depicted in column 8 of Table II, application no. 19, preferably a homolog or functional equivalent as depicted in column 8 of Table II B, application no. 19, and being depicted in the same respective line as said B1672, and preferably the activity is increased non-targeted, whereby the respective line disclose in column 7 the fine chemical bis-glyceryl phosphate (polar fraction).

[99473] Accordingly, in one embodiment, the molecule which activity is to be increased in the process of the invention is the gene product with an activity as a “b1672-protein”, preferably it is the molecule of section (a) or (b) of this paragraph.

[99474] In particular, it was observed that in plants, especially in Arabidopsis thaliana, increasing or generating the activity of a gene product non-targeted with the activity of a “b1672-protein”, preferably being encoded by a gene comprising the nucleic acid sequence SEQ ID NO. 78771, preferably the coding region thereof, conferred the production of or the increase in bis-glyceryl phosphate (polar fraction) compared with the wild type control.

[99475] The nucleic acid sequence of B1703 from Escherichia coli, e.g. as shown in the respective line in column 5 of Table I, application no. 19, has been published in B. And the activity of the gene product thereof is the activity of b1703-protein.

[99476] Accordingly, in one embodiment, the process of the present invention for producing triacylglycerol in a non-human organism, like a microorganism or a plant or a part thereof, comprises increasing or generating the activity of a gene product with the activity of a gene product conferring the activity of “b1703-protein”, especially from Escherichia coli or its functional equivalent or its homolog, e.g. the increase of
[99477] (a) a gene product of a gene comprising the nucleic acid molecule as shown in the respective line in column 5 of Table I (whereby the respective line disclose in column 7 the fine chemical triacylglycerol), application no. 19, preferably the coding region thereof, or a homolog or a fragment thereof, and being depicted in the same respective line as said B1703, or a functional equivalent or a homolog thereof as shown in column 8 of Table I, application no. 19, preferably the coding region thereof, particularly a homolog or functional equivalent as shown in column 8 of Table I B, application no. 19, and being depicted in the same respective line as said B1703, and preferably the activity is increased non-targeted, or
[99478] (b) a polypeptide comprising a polypeptide, a consensus sequence or at least a polypeptide motif as shown in the respective line in column 5 of Table II or in column 8 of Table IV, application no. 19, respectively, and being depicted in the same respective line as said B1703, or a functional equivalent or a homolog thereof as depicted in column 8 of Table II, application no. 19, preferably a homolog or functional equivalent as depicted in column 8 of Table II B, application no. 19, and being depicted in the same respective line as said B1703, and preferably the activity is increased non-targeted, whereby the respective line disclose in column 7 the fine chemical triacylglycerol.

[99479] Accordingly, in one embodiment, the molecule which activity is to be increased in the process of the invention is the gene product with an activity as a “b1703-protein”, preferably it is the molecule of section (a) or (b) of this paragraph.

[99480] In particular, it was observed that in plants, especially in Arabidopsis thaliana, increasing or generating the activity of a gene product non-targeted with the activity of a “b1703-protein”, preferably being encoded by a gene comprising the nucleic acid sequence SEQ ID NO. 124907, preferably the coding region thereof, conferred the production of or the increase in triacylglycerol compared with the wild type control.

[99481] The nucleic acid sequence of B1736 from Escherichia coli, e.g. as shown in the respective line in column 5 of Table I, application no. 19, has been published in B. And the activity of the gene product thereof is the activity of phosphotransferase system component.

[99482] Accordingly, in one embodiment, the process of the present invention for producing bis-glyceryl phosphate (polar fraction) in a non-human organism, like a microorganism or a plant or a part thereof, comprises increasing or generating the activity of a gene product with the activity of a gene product conferring the activity of “phosphotransferase system component”, especially from Escherichia coli or its functional equivalent or its homolog, e.g. the increase of
[99483] (a) a gene product of a gene comprising the nucleic acid molecule as shown in the respective line in column 5 of Table I (whereby the respective line disclose in column 7 the fine chemical bis-glyceryl phosphate (polar fraction)), application no. 19, preferably the coding region thereof, or a homolog or a fragment thereof, and being depicted in the same respective line as said B1736, or a functional equivalent or a homolog thereof as shown in column 8 of Table I, application no. 19, preferably the coding region thereof, particularly a homolog or functional equivalent as shown in column 8 of Table I B, application no. 19, and being depicted in the same respective line as said B1736, and preferably the activity is increased non-targeted, or
[99484] (b) a polypeptide comprising a polypeptide, a consensus sequence or at least a polypeptide motif as shown in the respective line in column 5 of Table II or in column 8 of Table IV, application no. 19, respectively, and being depicted in the same respective line as said B1736, or a functional equivalent or a homolog thereof as depicted in column 8 of Table II, application no. 19, preferably a homolog or functional equivalent as depicted in column 8 of Table II B, application no. 19, and being depicted in the same respective line as said B1736, and preferably the activity is increased non-targeted, whereby the respective line disclose in column 7 the fine chemical bis-glyceryl phosphate (polar fraction).

[99485] Accordingly, in one embodiment, the molecule which activity is to be increased in the process of the invention is the gene product with an activity as a “phosphotransferase system component”, preferably it is the molecule of section (a) or (b) of this paragraph.

[99486] In particular, it was observed that in plants, especially in Arabidopsis thaliana, increasing or generating the activity of a gene product non-targeted with the activity of a “phosphotransferase system component”, preferably being encoded by a gene comprising the nucleic acid sequence SEQ ID NO. 153072, preferably the coding region thereof, conferred the production of or the increase in bis-glyceryl phosphate (polar fraction) compared with the wild type control.

[99487] The nucleic acid sequence of B1795 from Escherichia coli, e.g. as shown in the respective line in column 5 of Table I, application no. 19, has been published in B. And the activity of the gene product thereof is the activity of B1795-protein.

[99488] Accordingly, in one embodiment, the process of the present invention for producing triacylglycerol in a non-human organism, like a microorganism or a plant or a part thereof, comprises increasing or generating the activity of a gene product with the activity of a gene product conferring the activity of “B1795-protein”, especially from Escherichia coli or its functional equivalent or its homolog, e.g. the increase of
[99489] (a) a gene product of a gene comprising the nucleic acid molecule as shown in the respective line in column 5 of Table I (whereby the respective line disclose in column 7 the fine chemical triacylglycerol), application no. 19, preferably the coding region thereof, or a homolog or a fragment thereof, and being depicted in the same respective line as said B1795, or a functional equivalent or a homolog thereof as shown in column 8 of Table I, application no. 19, preferably the coding region thereof, particularly a homolog or functional equivalent as shown in column 8 of Table I B, application no. 19, and being depicted in the same respective line as said B1795, and preferably the activity is increased non-targeted, or
[99490] (b) a polypeptide comprising a polypeptide, a consensus sequence or at least a polypeptide motif as shown in the respective line in column 5 of Table II or in column 8 of Table IV, application no. 19, respectively, and being depicted in the same respective line as said B1795, or a functional equivalent or a homolog thereof as depicted in column 8 of Table II, application no. 19, preferably a homolog or functional equivalent as depicted in column 8 of Table II B, application no. 19, and being depicted in the same respective line as said B1795, and preferably the activity is increased non-targeted, whereby the respective line disclose in column 7 the fine chemical triacylglycerol.

[99491] Accordingly, in one embodiment, the molecule which activity is to be increased in the process of the invention is the gene product with an activity as a “B1795-protein”, preferably it is the molecule of section (a) or (b) of this paragraph.

[99492] In particular, it was observed that in plants, especially in Arabidopsis thaliana, increasing or generating the activity of a gene product non-targeted with the activity of a “B1795-protein”, preferably being encoded by a gene comprising the nucleic acid sequence SEQ ID NO. 131539, preferably the coding region thereof, conferred the production of or the increase in triacylglycerol compared with the wild type control.

[99493] The nucleic acid sequence of B1814 from Escherichia coli, e.g. as shown in the respective line in column 5 of Table I, application no. 19, has been published in B. And the activity of the gene product thereof is the activity of L-serine dehydratase.

[99494] Accordingly, in one embodiment, the process of the present invention for producing glycerol-3-phosphate (polar fraction) in a non-human organism, like a microorganism or a plant or a part thereof, comprises increasing or generating the activity of a gene product with the activity of a gene product conferring the activity of “L-serine dehydratase”, especially from Escherichia coli or its functional equivalent or its homolog, e.g. the increase of
[99495] (a) a gene product of a gene comprising the nucleic acid molecule as shown in the respective line in column 5 of Table I (whereby the respective line disclose in column 7 the fine chemical glycerol-3-phosphate (polar fraction)), application no. 19, preferably the coding region thereof, or a homolog or a fragment thereof, and being depicted in the same respective line as said B1814, or a functional equivalent or a homolog thereof as shown in column 8 of Table I, application no. 19, preferably the coding region thereof, particularly a homolog or functional equivalent as shown in column 8 of Table I B, application no. 19, and being depicted in the same respective line as said B1814, and preferably the activity is increased plastidic, or
[99496] (b) a polypeptide comprising a polypeptide, a consensus sequence or at least a polypeptide motif as shown in the respective line in column 5 of Table II or in column 8 of Table IV, application no. 19, respectively, and being depicted in the same respective line as said B1814, or a functional equivalent or a homolog thereof as depicted in column 8 of Table II, application no. 19, preferably a homolog or functional equivalent as depicted in column 8 of Table II B, application no. 19, and being depicted in the same respective line as said B1814, and preferably the activity is increased plastidic, whereby the respective line disclose in column 7 the fine chemical glycerol-3-phosphate (polar fraction).

[99497] Accordingly, in one embodiment, the molecule which activity is to be increased in the process of the invention is the gene product with an activity as a “L-serine dehydratase”, preferably it is the molecule of section (a) or (b) of this paragraph.

[99498] In particular, it was observed that in plants, especially in Arabidopsis thaliana, increasing or generating the activity of a gene product plastidic with the activity of a “L-serine dehydratase”, preferably being encoded by a gene comprising the nucleic acid sequence SEQ ID NO. 8033, preferably the coding region thereof, conferred the production of or the increase in glycerol-3-phosphate (polar fraction) compared with the wild type control.

[99499] The nucleic acid sequence of B1837 from Escherichia coli, e.g. as shown in the respective line in column 5 of Table I, application no. 19, has been published in B. And the activity of the gene product thereof is the activity of b1837-protein.

[99500] Accordingly, in one embodiment, the process of the present invention for producing glycerol phosphate (lipid fraction) in a non-human organism, like a microorganism or a plant or a part thereof, comprises increasing or generating the activity of a gene product with the activity of a gene product conferring the activity of “b1837-protein”, especially from Escherichia coli or its functional equivalent or its homolog, e.g. the increase of
[99501] (a) a gene product of a gene comprising the nucleic acid molecule as shown in the respective line in column 5 of Table I (whereby the respective line disclose in column 7 the fine chemical glycerol phosphate (lipid fraction)), application no. 19, preferably the coding region thereof, or a homolog or a fragment thereof, and being depicted in the same respective line as said B1837, or a functional equivalent or a homolog thereof as shown in column 8 of Table I, application no. 19, preferably the coding region thereof, particularly a homolog or functional equivalent as shown in column 8 of Table I B, application no. 19, and being depicted in the same respective line as said B1837, and preferably the activity is increased non-targeted, or
[99502] (b) a polypeptide comprising a polypeptide, a consensus sequence or at least a polypeptide motif as shown in the respective line in column 5 of Table II or in column 8 of Table IV, application no. 19, respectively, and being depicted in the same respective line as said B1837, or a functional equivalent or a homolog thereof as depicted in column 8 of Table II, application no. 19, preferably a homolog or functional equivalent as depicted in column 8 of Table II B, application no. 19, and being depicted in the same respective line as said B1837, and preferably the activity is increased non-targeted, whereby the respective line disclose in column 7 the fine chemical glycerol phosphate (lipid fraction).

[99503] Accordingly, in one embodiment, the molecule which activity is to be increased in the process of the invention is the gene product with an activity as a “b1837-protein”, preferably it is the molecule of section (a) or (b) of this paragraph.

[99504] In particular, it was observed that in plants, especially in Arabidopsis thaliana, increasing or generating the activity of a gene product non-targeted with the activity of a “b1837-protein”, preferably being encoded by a gene comprising the nucleic acid sequence SEQ ID NO. 78953, preferably the coding region thereof, conferred the production of or the increase in glycerol phosphate (lipid fraction) compared with the wild type control.

[99505] The nucleic acid sequence of B1897 from Escherichia coli, e.g. as shown in the respective line in column 5 of Table I, application no. 19, has been published in B. And the activity of the gene product thereof is the activity of trehalose-phosphatase.

[99506] Accordingly, in one embodiment, the process of the present invention for producing triacylglycerol in a non-human organism, like a microorganism or a plant or a part thereof, comprises increasing or generating the activity of a gene product with the activity of a gene product conferring the activity of “trehalose-phosphatase”, especially from Escherichia coli or its functional equivalent or its homolog, e.g. the increase of
[99507] (a) a gene product of a gene comprising the nucleic acid molecule as shown in the respective line in column 5 of Table I (whereby the respective line disclose in column 7 the fine chemical triacylglycerol), application no. 19, preferably the coding region thereof, or a homolog or a fragment thereof, and being depicted in the same respective line as said B1897, or a functional equivalent or a homolog thereof as shown in column 8 of Table I, application no. 19, preferably the coding region thereof, particularly a homolog or functional equivalent as shown in column 8 of Table I B, application no. 19, and being depicted in the same respective line as said B1897, and preferably the activity is increased non-targeted, or
[99508] (b) a polypeptide comprising a polypeptide, a consensus sequence or at least a polypeptide motif as shown in the respective line in column 5 of Table II or in column 8 of Table IV, application no. 19, respectively, and being depicted in the same respective line as said B1897, or a functional equivalent or a homolog thereof as depicted in column 8 of Table II, application no. 19, preferably a homolog or functional equivalent as depicted in column 8 of Table II B, application no. 19, and being depicted in the same respective line as said B1897, and preferably the activity is increased non-targeted, whereby the respective line disclose in column 7 the fine chemical triacylglycerol.

[99509] Accordingly, in one embodiment, the molecule which activity is to be increased in the process of the invention is the gene product with an activity as a “trehalose-phosphatase”, preferably it is the molecule of section (a) or (b) of this paragraph.

[99510] In particular, it was observed that in plants, especially in Arabidopsis thaliana, increasing or generating the activity of a gene product non-targeted with the activity of a “trehalosephosphatase”, preferably being encoded by a gene comprising the nucleic acid sequence SEQ ID NO. 79056, preferably the coding region thereof, conferred the production of or the increase in triacylglycerol compared with the wild type control.

[99511] The nucleic acid sequence of B2023 from Escherichia coli, e.g. as shown in the respective line in column 5 of Table I, application no. 19, has been published in B. And the activity of the gene product thereof is the activity of imidazole glycerol phosphate synthase subunit.

[99512] Accordingly, in one embodiment, the process of the present invention for producing glycerol (lipid fraction) in a non-human organism, like a microorganism or a plant or a part thereof, comprises increasing or generating the activity of a gene product with the activity of a gene product conferring the activity of “imidazole glycerol phosphate synthase subunit”, especially from Escherichia coli or its functional equivalent or its homolog, e.g. the increase of
[99513] (a) a gene product of a gene comprising the nucleic acid molecule as shown in the respective line in column 5 of Table I (whereby the respective line disclose in column 7 the fine chemical glycerol (lipid fraction)), application no. 19, preferably the coding region thereof, or a homolog or a fragment thereof, and being depicted in the same respective line as said B2023, or a functional equivalent or a homolog thereof as shown in column 8 of Table I, application no. 19, preferably the coding region thereof, particularly a homolog or functional equivalent as shown in column 8 of Table I B, application no. 19, and being depicted in the same respective line as said B2023, and preferably the activity is increased non-targeted, or
[99514] (b) a polypeptide comprising a polypeptide, a consensus sequence or at least a polypeptide motif as shown in the respective line in column 5 of Table II or in column 8 of Table IV, application no. 19, respectively, and being depicted in the same respective line as said B2023, or a functional equivalent or a homolog thereof as depicted in column 8 of Table II, application no. 19, preferably a homolog or functional equivalent as depicted in column 8 of Table II B, application no. 19, and being depicted in the same respective line as said B2023, and preferably the activity is increased non-targeted, whereby the respective line disclose in column 7 the fine chemical glycerol (lipid fraction).

[99515] Accordingly, in one embodiment, the molecule which activity is to be increased in the process of the invention is the gene product with an activity as a “imidazole glycerol phosphate synthase subunit”, preferably it is the molecule of section (a) or (b) of this paragraph.

[99516] In particular, it was observed that in plants, especially in Arabidopsis thaliana, increasing or generating the activity of a gene product non-targeted with the activity of a “imidazole glycerol phosphate synthase subunit”, preferably being encoded by a gene comprising the nucleic acid sequence SEQ ID NO. 99371, preferably the coding region thereof, conferred the production of or the increase in glycerol (lipid fraction) compared with the wild type control.

[99517] The nucleic acid sequence of B2032 from Escherichia coli, e.g. as shown in the respective line in column 5 of Table I, application no. 19, has been published in B. And the activity of the gene product thereof is the activity of b2032-protein.

[99518] Accordingly, in one embodiment, the process of the present invention for producing glycerol phosphate (lipid fraction) in a non-human organism, like a microorganism or a plant or a part thereof, comprises increasing or generating the activity of a gene product with the activity of a gene product conferring the activity of “b2032-protein”, especially from Escherichia coli or its functional equivalent or its homolog, e.g. the increase of
[99519] (a) a gene product of a gene comprising the nucleic acid molecule as shown in the respective line in column 5 of Table I (whereby the respective line disclose in column 7 the fine chemical glycerol phosphate (lipid fraction)), application no. 19, preferably the coding region thereof, or a homolog or a fragment thereof, and being depicted in the same respective line as said B2032, or a functional equivalent or a homolog thereof as shown in column 8 of Table I, application no. 19, preferably the coding region thereof, particularly a homolog or functional equivalent as shown in column 8 of Table I B, application no. 19, and being depicted in the same respective line as said B2032, and preferably the activity is increased non-targeted, or
[99520] (b) a polypeptide comprising a polypeptide, a consensus sequence or at least a polypeptide motif as shown in the respective line in column 5 of Table II or in column 8 of Table IV, application no. 19, respectively, and being depicted in the same respective line as said B2032, or a functional equivalent or a homolog thereof as depicted in column 8 of Table II, application no. 19, preferably a homolog or functional equivalent as depicted in column 8 of Table II B, application no. 19, and being depicted in the same respective line as said B2032, and preferably the activity is increased non-targeted, whereby the respective line disclose in column 7 the fine chemical glycerol phosphate (lipid fraction).

[99521] Accordingly, in one embodiment, the molecule which activity is to be increased in the process of the invention is the gene product with an activity as a “b2032-protein”, preferably it is the molecule of section (a) or (b) of this paragraph.

[99522] In particular, it was observed that in plants, especially in Arabidopsis thaliana, increasing or generating the activity of a gene product non-targeted with the activity of a “b2032-protein”, preferably being encoded by a gene comprising the nucleic acid sequence SEQ ID NO. 8920, preferably the coding region thereof, conferred the production of or the increase in glycerol phosphate (lipid fraction) compared with the wild type control.

[99523] The nucleic acid sequence of B2099 from Escherichia coli, e.g. as shown in the respective line in column 5 of Table I, application no. 19, has been published in B. And the activity of the gene product thereof is the activity of b2099-protein.

[99524] Accordingly, in one embodiment, the process of the present invention for producing glycerol (lipid fraction) in a non-human organism, like a microorganism or a plant or a part thereof, comprises increasing or generating the activity of a gene product with the activity of a gene product conferring the activity of “b2099-protein”, especially from Escherichia coli or its functional equivalent or its homolog, e.g. the increase of
[99525] (a) a gene product of a gene comprising the nucleic acid molecule as shown in the respective line in column 5 of Table I (whereby the respective line disclose in column 7 the fine chemical glycerol (lipid fraction)), application no. 19, preferably the coding region thereof, or a homolog or a fragment thereof, and being depicted in the same respective line as said B2099, or a functional equivalent or a homolog thereof as shown in column 8 of Table I, application no. 19, preferably the coding region thereof, particularly a homolog or functional equivalent as shown in column 8 of Table I B, application no. 19, and being depicted in the same respective line as said B2099, and preferably the activity is increased non-targeted, or
[99526] (b) a polypeptide comprising a polypeptide, a consensus sequence or at least a polypeptide motif as shown in the respective line in column 5 of Table II or in column 8 of Table IV, application no. 19, respectively, and being depicted in the same respective line as said B2099, or a functional equivalent or a homolog thereof as depicted in column 8 of Table II, application no. 19, preferably a homolog or functional equivalent as depicted in column 8 of Table II B, application no. 19, and being depicted in the same respective line as said B2099, and preferably the activity is increased non-targeted, whereby the respective line disclose in column 7 the fine chemical glycerol (lipid fraction).

[99527] Accordingly, in one embodiment, the molecule which activity is to be increased in the process of the invention is the gene product with an activity as a “b2099-protein”, preferably it is the molecule of section (a) or (b) of this paragraph.

[99528] In particular, it was observed that in plants, especially in Arabidopsis thaliana, increasing or generating the activity of a gene product non-targeted with the activity of a “b2099-protein”, preferably being encoded by a gene comprising the nucleic acid sequence SEQ ID NO. 115595, preferably the coding region thereof, conferred the production of or the increase in glycerol (lipid fraction) compared with the wild type control.

[99529] The nucleic acid sequence of B2139 from Escherichia coli, e.g. as shown in the respective line in column 5 of Table I, application no. 19, has been published in B. And the activity of the gene product thereof is the activity of b2139-protein.

[99530] Accordingly, in one embodiment, the process of the present invention for producing bis-glyceryl phosphate (polar fraction) in a non-human organism, like a microorganism or a plant or a part thereof, comprises increasing or generating the activity of a gene product with the activity of a gene product conferring the activity of “b2139-protein”, especially from Escherichia coli or its functional equivalent or its homolog, e.g. the increase of
[99531] (a) a gene product of a gene comprising the nucleic acid molecule as shown in the respective line in column 5 of Table I (whereby the respective line disclose in column 7 the fine chemical bis-glyceryl phosphate (polar fraction)), application no. 19, preferably the coding region thereof, or a homolog or a fragment thereof, and being depicted in the same respective line as said B2139, or a functional equivalent or a homolog thereof as shown in column 8 of Table I, application no. 19, preferably the coding region thereof, particularly a homolog or functional equivalent as shown in column 8 of Table I B, application no. 19, and being depicted in the same respective line as said B2139, and preferably the activity is increased plastidic, or
[99532] (b) a polypeptide comprising a polypeptide, a consensus sequence or at least a polypeptide motif as shown in the respective line in column 5 of Table II or in column 8 of Table IV, application no. 19, respectively, and being depicted in the same respective line as said B2139, or a functional equivalent or a homolog thereof as depicted in column 8 of Table II, application no. 19, preferably a homolog or functional equivalent as depicted in column 8 of Table II B, application no. 19, and being depicted in the same respective line as said B2139, and preferably the activity is increased plastidic, whereby the respective line disclose in column 7 the fine chemical bis-glyceryl phosphate (polar fraction).

[99533] Accordingly, in one embodiment, the molecule which activity is to be increased in the process of the invention is the gene product with an activity as a “b2139-protein”, preferably it is the molecule of section (a) or (b) of this paragraph.

[99534] In particular, it was observed that in plants, especially in Arabidopsis thaliana, increasing or generating the activity of a gene product plastidic with the activity of a “b2139-protein”, preferably being encoded by a gene comprising the nucleic acid sequence SEQ ID NO. 125085, preferably the coding region thereof, conferred the production of or the increase in bis-glyceryl phosphate (polar fraction) compared with the wild type control.

[99535] The nucleic acid sequence of B2178 from Escherichia coli, e.g. as shown in the respective line in column 5 of Table I, application no. 19, has been published in B. And the activity of the gene product thereof is the activity of ABC transporter permease protein.

[99536] Accordingly, in one embodiment, the process of the present invention for producing glycerol (lipid fraction) in a non-human organism, like a microorganism or a plant or a part thereof, comprises increasing or generating the activity of a gene product with the activity of a gene product conferring the activity of “ABC transporter permease protein”, especially from Escherichia coli or its functional equivalent or its homolog, e.g. the increase of
[99537] (a) a gene product of a gene comprising the nucleic acid molecule as shown in the respective line in column 5 of Table I (whereby the respective line disclose in column 7 the fine chemical glycerol (lipid fraction)), application no. 19, preferably the coding region thereof, or a homolog or a fragment thereof, and being depicted in the same respective line as said B2178, or a functional equivalent or a homolog thereof as shown in column 8 of Table I, application no. 19, preferably the coding region thereof, particularly a homolog or functional equivalent as shown in column 8 of Table I B, application no. 19, and being depicted in the same respective line as said B2178, and preferably the activity is increased non-targeted, or
[99538] (b) a polypeptide comprising a polypeptide, a consensus sequence or at least a polypeptide motif as shown in the respective line in column 5 of Table II or in column 8 of Table IV, application no. 19, respectively, and being depicted in the same respective line as said B2178, or a functional equivalent or a homolog thereof as depicted in column 8 of Table II, application no. 19, preferably a homolog or functional equivalent as depicted in column 8 of Table II B, application no. 19, and being depicted in the same respective line as said B2178, and preferably the activity is increased non-targeted, whereby the respective line disclose in column 7 the fine chemical glycerol (lipid fraction).

[99539] Accordingly, in one embodiment, the molecule which activity is to be increased in the process of the invention is the gene product with an activity as a “ABC transporter permease protein”, preferably it is the molecule of section (a) or (b) of this paragraph.

[99540] In particular, it was observed that in plants, especially in Arabidopsis thaliana, increasing or generating the activity of a gene product non-targeted with the activity of a “ABC transporter permease protein”, preferably being encoded by a gene comprising the nucleic acid sequence SEQ ID NO. 39040, preferably the coding region thereof, conferred the production of or the increase in glycerol (lipid fraction) compared with the wild type control.

[99541] The nucleic acid sequence of B2389 from Escherichia coli, e.g. as shown in the respective line in column 5 of Table I, application no. 19, has been published in B. And the activity of the gene product thereof is the activity of ion-transport protein.

[99542] Accordingly, in one embodiment, the process of the present invention for producing glycerol phosphate (lipid fraction) in a non-human organism, like a microorganism or a plant or a part thereof, comprises increasing or generating the activity of a gene product with the activity of a gene product conferring the activity of “ion-transport protein”, especially from Escherichia coli or its functional equivalent or its homolog, e.g. the increase of
[99543] (a) a gene product of a gene comprising the nucleic acid molecule as shown in the respective line in column 5 of Table I (whereby the respective line disclose in column 7 the fine chemical glycerol phosphate (lipid fraction)), application no. 19, preferably the coding region thereof, or a homolog or a fragment thereof, and being depicted in the same respective line as said B2389, or a functional equivalent or a homolog thereof as shown in column 8 of Table I, application no. 19, preferably the coding region thereof, particularly a homolog or functional equivalent as shown in column 8 of Table I B, application no. 19, and being depicted in the same respective line as said B2389, and preferably the activity is increased non-targeted, or
[99544] (b) a polypeptide comprising a polypeptide, a consensus sequence or at least a polypeptide motif as shown in the respective line in column 5 of Table II or in column 8 of Table IV, application no. 19, respectively, and being depicted in the same respective line as said B2389, or a functional equivalent or a homolog thereof as depicted in column 8 of Table II, application no. 19, preferably a homolog or functional equivalent as depicted in column 8 of Table II B, application no. 19, and being depicted in the same respective line as said B2389, and preferably the activity is increased non-targeted, whereby the respective line disclose in column 7 the fine chemical glycerol phosphate (lipid fraction).

[99545] Accordingly, in one embodiment, the molecule which activity is to be increased in the process of the invention is the gene product with an activity as a “ion-transport protein”, preferably it is the molecule of section (a) or (b) of this paragraph.

[99546] In particular, it was observed that in plants, especially in Arabidopsis thaliana, increasing or generating the activity of a gene product non-targeted with the activity of a “ion-transport protein”, preferably being encoded by a gene comprising the nucleic acid sequence SEQ ID NO. 146238, preferably the coding region thereof, conferred the production of or the increase in glycerol phosphate (lipid fraction) compared with the wild type control.

[99547] The nucleic acid sequence of B2399 from Escherichia coli, e.g. as shown in the respective line in column 5 of Table I, application no. 19, has been published in B. And the activity of the gene product thereof is the activity of b2399-protein.

[99548] Accordingly, in one embodiment, the process of the present invention for producing bis-glyceryl phosphate (polar fraction) in a non-human organism, like a microorganism or a plant or a part thereof, comprises increasing or generating the activity of a gene product with the activity of a gene product conferring the activity of “b2399-protein”, especially from Escherichia coli or its functional equivalent or its homolog, e.g. the increase of
[99549] (a) a gene product of a gene comprising the nucleic acid molecule as shown in the respective line in column 5 of Table I (whereby the respective line disclose in column 7 the fine chemical bis-glyceryl phosphate (polar fraction)), application no. 19, preferably the coding region thereof, or a homolog or a fragment thereof, and being depicted in the same respective line as said B2399, or a functional equivalent or a homolog thereof as shown in column 8 of Table I, application no. 19, preferably the coding region thereof, particularly a homolog or functional equivalent as shown in column 8 of Table I B, application no. 19, and being depicted in the same respective line as said B2399, and preferably the activity is increased non-targeted, or
[99550] (b) a polypeptide comprising a polypeptide, a consensus sequence or at least a polypeptide motif as shown in the respective line in column 5 of Table II or in column 8 of Table IV, application no. 19, respectively, and being depicted in the same respective line as said B2399, or a functional equivalent or a homolog thereof as depicted in column 8 of Table II, application no. 19, preferably a homolog or functional equivalent as depicted in column 8 of Table II B, application no. 19, and being depicted in the same respective line as said B2399, and preferably the activity is increased non-targeted, whereby the respective line disclose in column 7 the fine chemical bis-glyceryl phosphate (polar fraction).

[99551] Accordingly, in one embodiment, the molecule which activity is to be increased in the process of the invention is the gene product with an activity as a “b2399-protein”, preferably it is the molecule of section (a) or (b) of this paragraph.

[99552] In particular, it was observed that in plants, especially in Arabidopsis thaliana, increasing or generating the activity of a gene product non-targeted with the activity of a “b2399-protein”, preferably being encoded by a gene comprising the nucleic acid sequence SEQ ID NO. 39237, preferably the coding region thereof, conferred the production of or the increase in bis-glyceryl phosphate (polar fraction) compared with the wild type control.

[99553] The nucleic acid sequence of B2399 from Escherichia coli, e.g. as shown in the respective line in column 5 of Table I, application no. 19, has been published in B. And the activity of the gene product thereof is the activity of b2399-protein.

[99554] Accordingly, in one embodiment, the process of the present invention for producing glycerol (lipid fraction) in a non-human organism, like a microorganism or a plant or a part thereof, comprises increasing or generating the activity of a gene product with the activity of a gene product conferring the activity of “b2399-protein”, especially from Escherichia coli or its functional equivalent or its homolog, e.g. the increase of
[99555] (a) a gene product of a gene comprising the nucleic acid molecule as shown in the respective line in column 5 of Table I (whereby the respective line disclose in column 7 the fine chemical glycerol (lipid fraction)), application no. 19, preferably the coding region thereof, or a homolog or a fragment thereof, and being depicted in the same respective line as said B2399, or a functional equivalent or a homolog thereof as shown in column 8 of Table I, application no. 19, preferably the coding region thereof, particularly a homolog or functional equivalent as shown in column 8 of Table I B, application no. 19, and being depicted in the same respective line as said B2399, and preferably the activity is increased non-targeted, or
[99556] (b) a polypeptide comprising a polypeptide, a consensus sequence or at least a polypeptide motif as shown in the respective line in column 5 of Table II or in column 8 of Table IV, application no. 19, respectively, and being depicted in the same respective line as said B2399, or a functional equivalent or a homolog thereof as depicted in column 8 of Table II, application no. 19, preferably a homolog or functional equivalent as depicted in column 8 of Table II B, application no. 19, and being depicted in the same respective line as said B2399, and preferably the activity is increased non-targeted, whereby the respective line disclose in column 7 the fine chemical glycerol (lipid fraction).

[99557] Accordingly, in one embodiment, the molecule which activity is to be increased in the process of the invention is the gene product with an activity as a “b2399-protein”, preferably it is the molecule of section (a) or (b) of this paragraph.

[99558] In particular, it was observed that in plants, especially in Arabidopsis thaliana, increasing or generating the activity of a gene product non-targeted with the activity of a “b2399-protein”, preferably being encoded by a gene comprising the nucleic acid sequence SEQ ID NO. 39237, preferably the coding region thereof, conferred the production of or the increase in glycerol (lipid fraction) compared with the wild type control.

[99559] The nucleic acid sequence of B2439 from Escherichia coli, e.g. as shown in the respective line in column 5 of Table I, application no. 19, has been published in B. And the activity of the gene product thereof is the activity of ethanolamine utilization protein.

[99560] Accordingly, in one embodiment, the process of the present invention for producing glycerol (lipid fraction) in a non-human organism, like a microorganism or a plant or a part thereof, comprises increasing or generating the activity of a gene product with the activity of a gene product conferring the activity of “ethanolamine utilization protein”, especially from Escherichia coli or its functional equivalent or its homolog, e.g. the increase of
[99561] (a) a gene product of a gene comprising the nucleic acid molecule as shown in the respective line in column 5 of Table I (whereby the respective line disclose in column 7 the fine chemical glycerol (lipid fraction)), application no. 19, preferably the coding region thereof, or a homolog or a fragment thereof, and being depicted in the same respective line as said B2439, or a functional equivalent or a homolog thereof as shown in column 8 of Table I, application no. 19, preferably the coding region thereof, particularly a homolog or functional equivalent as shown in column 8 of Table I B, application no. 19, and being depicted in the same respective line as said B2439, and preferably the activity is increased non-targeted, or
[99562] (b) a polypeptide comprising a polypeptide, a consensus sequence or at least a polypeptide motif as shown in the respective line in column 5 of Table II or in column 8 of Table IV, application no. 19, respectively, and being depicted in the same respective line as said B2439, or a functional equivalent or a homolog thereof as depicted in column 8 of Table II, application no. 19, preferably a homolog or functional equivalent as depicted in column 8 of Table II B, application no. 19, and being depicted in the same respective line as said B2439, and preferably the activity is increased non-targeted, whereby the respective line disclose in column 7 the fine chemical glycerol (lipid fraction).

[99563] Accordingly, in one embodiment, the molecule which activity is to be increased in the process of the invention is the gene product with an activity as a “ethanolamine utilization protein”, preferably it is the molecule of section (a) or (b) of this paragraph.

[99564] In particular, it was observed that in plants, especially in Arabidopsis thaliana, increasing or generating the activity of a gene product non-targeted with the activity of a “ethanolamine utilization protein”, preferably being encoded by a gene comprising the nucleic acid sequence SEQ ID NO. 115628, preferably the coding region thereof, conferred the production of or the increase in glycerol (lipid fraction) compared with the wild type control.

[99565] The nucleic acid sequence of B2439 from Escherichia coli, e.g. as shown in the respective line in column 5 of Table I, application no. 19, has been published in B. And the activity of the gene product thereof is the activity of ethanolamine utilization protein.

[99566] Accordingly, in one embodiment, the process of the present invention for producing glycerol phosphate (lipid fraction) in a non-human organism, like a microorganism or a plant or a part thereof, comprises increasing or generating the activity of a gene product with the activity of a gene product conferring the activity of “ethanolamine utilization protein”, especially from Escherichia coli or its functional equivalent or its homolog, e.g. the increase of
[99567] (a) a gene product of a gene comprising the nucleic acid molecule as shown in the respective line in column 5 of Table I (whereby the respective line disclose in column 7 the fine chemical glycerol phosphate (lipid fraction)), application no. 19, preferably the coding region thereof, or a homolog or a fragment thereof, and being depicted in the same respective line as said B2439, or a functional equivalent or a homolog thereof as shown in column 8 of Table I, application no. 19, preferably the coding region thereof, particularly a homolog or functional equivalent as shown in column 8 of Table I B, application no. 19, and being depicted in the same respective line as said B2439, and preferably the activity is increased non-targeted, or
[99568] (b) a polypeptide comprising a polypeptide, a consensus sequence or at least a polypeptide motif as shown in the respective line in column 5 of Table II or in column 8 of Table IV, application no. 19, respectively, and being depicted in the same respective line as said B2439, or a functional equivalent or a homolog thereof as depicted in column 8 of Table II, application no. 19, preferably a homolog or functional equivalent as depicted in column 8 of Table II B, application no. 19, and being depicted in the same respective line as said B2439, and preferably the activity is increased non-targeted, whereby the respective line disclose in column 7 the fine chemical glycerol phosphate (lipid fraction).

[99569] Accordingly, in one embodiment, the molecule which activity is to be increased in the process of the invention is the gene product with an activity as a “ethanolamine utilization protein”, preferably it is the molecule of section (a) or (b) of this paragraph.

[99570] In particular, it was observed that in plants, especially in Arabidopsis thaliana, increasing or generating the activity of a gene product non-targeted with the activity of a “ethanolamine utilization protein”, preferably being encoded by a gene comprising the nucleic acid sequence SEQ ID NO. 115628, preferably the coding region thereof, conferred the production of or the increase in glycerol phosphate (lipid fraction) compared with the wild type control.

[99571] The nucleic acid sequence of B2461 from Escherichia coli, e.g. as shown in the respective line in column 5 of Table I, application no. 19, has been published in B. And the activity of the gene product thereof is the activity of ethanolamine utilization protein.

[99572] Accordingly, in one embodiment, the process of the present invention for producing glycerol (lipid fraction) in a non-human organism, like a microorganism or a plant or a part thereof, comprises increasing or generating the activity of a gene product with the activity of a gene product conferring the activity of “ethanolamine utilization protein”, especially from Escherichia coli or its functional equivalent or its homolog, e.g. the increase of
[99573] (a) a gene product of a gene comprising the nucleic acid molecule as shown in the respective line in column 5 of Table I (whereby the respective line disclose in column 7 the fine chemical glycerol (lipid fraction)), application no. 19, preferably the coding region thereof, or a homolog or a fragment thereof, and being depicted in the same respective line as said B2461, or a functional equivalent or a homolog thereof as shown in column 8 of Table I, application no. 19, preferably the coding region thereof, particularly a homolog or functional equivalent as shown in column 8 of Table I B, application no. 19, and being depicted in the same respective line as said B2461, and preferably the activity is increased non-targeted, or
[99574] (b) a polypeptide comprising a polypeptide, a consensus sequence or at least a polypeptide motif as shown in the respective line in column 5 of Table II or in column 8 of Table IV, application no. 19, respectively, and being depicted in the same respective line as said B2461, or a functional equivalent or a homolog thereof as depicted in column 8 of Table II, application no. 19, preferably a homolog or functional equivalent as depicted in column 8 of Table II B, application no. 19, and being depicted in the same respective line as said B2461, and preferably the activity is increased non-targeted, whereby the respective line disclose in column 7 the fine chemical glycerol (lipid fraction).

[99575] Accordingly, in one embodiment, the molecule which activity is to be increased in the process of the invention is the gene product with an activity as a “ethanolamine utilization protein”, preferably it is the molecule of section (a) or (b) of this paragraph.

[99576] In particular, it was observed that in plants, especially in Arabidopsis thaliana, increasing or generating the activity of a gene product non-targeted with the activity of a “ethanolamine utilization protein”, preferably being encoded by a gene comprising the nucleic acid sequence SEQ ID NO. 40299, preferably the coding region thereof, conferred the production of or the increase in glycerol (lipid fraction) compared with the wild type control.

[99577] The nucleic acid sequence of B2474 from Escherichia coli, e.g. as shown in the respective line in column 5 of Table I, application no. 19, has been published in B. And the activity of the gene product thereof is the activity of b2474-protein.

[99578] Accordingly, in one embodiment, the process of the present invention for producing bis-glyceryl phosphate (polar fraction) in a non-human organism, like a microorganism or a plant or a part thereof, comprises increasing or generating the activity of a gene product with the activity of a gene product conferring the activity of “b2474-protein”, especially from Escherichia coli or its functional equivalent or its homolog, e.g. the increase of
[99579] (a) a gene product of a gene comprising the nucleic acid molecule as shown in the respective line in column 5 of Table I (whereby the respective line disclose in column 7 the fine chemical bis-glyceryl phosphate (polar fraction)), application no. 19, preferably the coding region thereof, or a homolog or a fragment thereof, and being depicted in the same respective line as said B2474, or a functional equivalent or a homolog thereof as shown in column 8 of Table I, application no. 19, preferably the coding region thereof, particularly a homolog or functional equivalent as shown in column 8 of Table I B, application no. 19, and being depicted in the same respective line as said B2474, and preferably the activity is increased non-targeted, or
[99580] (b) a polypeptide comprising a polypeptide, a consensus sequence or at least a polypeptide motif as shown in the respective line in column 5 of Table II or in column 8 of Table IV, application no. 19, respectively, and being depicted in the same respective line as said B2474, or a functional equivalent or a homolog thereof as depicted in column 8 of Table II, application no. 19, preferably a homolog or functional equivalent as depicted in column 8 of Table II B, application no. 19, and being depicted in the same respective line as said B2474, and preferably the activity is increased non-targeted, whereby the respective line disclose in column 7 the fine chemical bis-glyceryl phosphate (polar fraction).

[99581] Accordingly, in one embodiment, the molecule which activity is to be increased in the process of the invention is the gene product with an activity as a “b2474-protein”, preferably it is the molecule of section (a) or (b) of this paragraph.

[99582] In particular, it was observed that in plants, especially in Arabidopsis thaliana, increasing or generating the activity of a gene product non-targeted with the activity of a “b2474-protein”, preferably being encoded by a gene comprising the nucleic acid sequence SEQ ID NO. 40329, preferably the coding region thereof, conferred the production of or the increase in bis-glyceryl phosphate (polar fraction) compared with the wild type control.

[99583] The nucleic acid sequence of B2474 from Escherichia coli, e.g. as shown in the respective line in column 5 of Table I, application no. 19, has been published in B. And the activity of the gene product thereof is the activity of b2474-protein.

[99584] Accordingly, in one embodiment, the process of the present invention for producing glycerol (lipid fraction) in a non-human organism, like a microorganism or a plant or a part thereof, comprises increasing or generating the activity of a gene product with the activity of a gene product conferring the activity of “b2474-protein”, especially from Escherichia coli or its functional equivalent or its homolog, e.g. the increase of
[99585] (a) a gene product of a gene comprising the nucleic acid molecule as shown in the respective line in column 5 of Table I (whereby the respective line disclose in column 7 the fine chemical glycerol (lipid fraction)), application no. 19, preferably the coding region thereof, or a homolog or a fragment thereof, and being depicted in the same respective line as said B2474, or a functional equivalent or a homolog thereof as shown in column 8 of Table I, application no. 19, preferably the coding region thereof, particularly a homolog or functional equivalent as shown in column 8 of Table I B, application no. 19, and being depicted in the same respective line as said B2474, and preferably the activity is increased non-targeted, or
[99586] (b) a polypeptide comprising a polypeptide, a consensus sequence or at least a polypeptide motif as shown in the respective line in column 5 of Table II or in column 8 of Table IV, application no. 19, respectively, and being depicted in the same respective line as said B2474, or a functional equivalent or a homolog thereof as depicted in column 8 of Table II, application no. 19, preferably a homolog or functional equivalent as depicted in column 8 of Table II B, application no. 19, and being depicted in the same respective line as said B2474, and preferably the activity is increased non-targeted, whereby the respective line disclose in column 7 the fine chemical glycerol (lipid fraction).

[99587] Accordingly, in one embodiment, the molecule which activity is to be increased in the process of the invention is the gene product with an activity as a “b2474-protein”, preferably it is the molecule of section (a) or (b) of this paragraph.

[99588] In particular, it was observed that in plants, especially in Arabidopsis thaliana, increasing or generating the activity of a gene product non-targeted with the activity of a “b2474-protein”, preferably being encoded by a gene comprising the nucleic acid sequence SEQ ID NO. 40329, preferably the coding region thereof, conferred the production of or the increase in glycerol (lipid fraction) compared with the wild type control.

[99589] The nucleic acid sequence of B2546 from Escherichia coli, e.g. as shown in the respective line in column 5 of Table I, application no. 19, has been published in B. And the activity of the gene product thereof is the activity of putative transport system permease protein.

[99590] Accordingly, in one embodiment, the process of the present invention for producing glycerol (lipid fraction) in a non-human organism, like a microorganism or a plant or a part thereof, comprises increasing or generating the activity of a gene product with the activity of a gene product conferring the activity of “putative transport system permease protein”, especially from Escherichia coli or its functional equivalent or its homolog, e.g. the increase of
[99591] (a) a gene product of a gene comprising the nucleic acid molecule as shown in the respective line in column 5 of Table I (whereby the respective line disclose in column 7 the fine chemical glycerol (lipid fraction)), application no. 19, preferably the coding region thereof, or a homolog or a fragment thereof, and being depicted in the same respective line as said B2546, or a functional equivalent or a homolog thereof as shown in column 8 of Table I, application no. 19, preferably the coding region thereof, particularly a homolog or functional equivalent as shown in column 8 of Table I B, application no. 19, and being depicted in the same respective line as said B2546, and preferably the activity is increased non-targeted, or
[99592] (b) a polypeptide comprising a polypeptide, a consensus sequence or at least a polypeptide motif as shown in the respective line in column 5 of Table II or in column 8 of Table IV, application no. 19, respectively, and being depicted in the same respective line as said B2546, or a functional equivalent or a homolog thereof as depicted in column 8 of Table II, application no. 19, preferably a homolog or functional equivalent as depicted in column 8 of Table II B, application no. 19, and being depicted in the same respective line as said B2546, and preferably the activity is increased non-targeted, whereby the respective line disclose in column 7 the fine chemical glycerol (lipid fraction).

[99593] Accordingly, in one embodiment, the molecule which activity is to be increased in the process of the invention is the gene product with an activity as a “putative transport system permease protein”, preferably it is the molecule of section (a) or (b) of this paragraph.

[99594] In particular, it was observed that in plants, especially in Arabidopsis thaliana, increasing or generating the activity of a gene product non-targeted with the activity of a “putative transport system permease protein”, preferably being encoded by a gene comprising the nucleic acid sequence SEQ ID NO. 99898, preferably the coding region thereof, conferred the production of or the increase in glycerol (lipid fraction) compared with the wild type control.

[99595] The nucleic acid sequence of B2546 from Escherichia coli, e.g. as shown in the respective line in column 5 of Table I, application no. 19, has been published in B. And the activity of the gene product thereof is the activity of putative transport system permease protein.

[99596] Accordingly, in one embodiment, the process of the present invention for producing glycerol phosphate (lipid fraction) in a non-human organism, like a microorganism or a plant or a part thereof, comprises increasing or generating the activity of a gene product with the activity of a gene product conferring the activity of “putative transport system permease protein”, especially from Escherichia coli or its functional equivalent or its homolog, e.g. the increase of
[99597] (a) a gene product of a gene comprising the nucleic acid molecule as shown in the respective line in column 5 of Table I (whereby the respective line disclose in column 7 the fine chemical glycerol phosphate (lipid fraction)), application no. 19, preferably the coding region thereof, or a homolog or a fragment thereof, and being depicted in the same respective line as said B2546, or a functional equivalent or a homolog thereof as shown in column 8 of Table I, application no. 19, preferably the coding region thereof, particularly a homolog or functional equivalent as shown in column 8 of Table I B, application no. 19, and being depicted in the same respective line as said B2546, and preferably the activity is increased non-targeted, or
[99598] (b) a polypeptide comprising a polypeptide, a consensus sequence or at least a polypeptide motif as shown in the respective line in column 5 of Table II or in column 8 of Table IV, application no. 19, respectively, and being depicted in the same respective line as said B2546, or a functional equivalent or a homolog thereof as depicted in column 8 of Table II, application no. 19, preferably a homolog or functional equivalent as depicted in column 8 of Table II B, application no. 19, and being depicted in the same respective line as said B2546, and preferably the activity is increased non-targeted, whereby the respective line disclose in column 7 the fine chemical glycerol phosphate (lipid fraction).

[99599] Accordingly, in one embodiment, the molecule which activity is to be increased in the process of the invention is the gene product with an activity as a “putative transport system permease protein”, preferably it is the molecule of section (a) or (b) of this paragraph.

[99600] In particular, it was observed that in plants, especially in Arabidopsis thaliana, increasing or generating the activity of a gene product non-targeted with the activity of a “putative transport system permease protein”, preferably being encoded by a gene comprising the nucleic acid sequence SEQ ID NO. 99898, preferably the coding region thereof, conferred the production of or the increase in glycerol phosphate (lipid fraction) compared with the wild type control.

[99601] The nucleic acid sequence of B2613 from Escherichia coli, e.g. as shown in the respective line in column 5 of Table I, application no. 19, has been published in B. And the activity of the gene product thereof is the activity of b2613-protein.

[99602] Accordingly, in one embodiment, the process of the present invention for producing bis-glyceryl phosphate (polar fraction) in a non-human organism, like a microorganism or a plant or a part thereof, comprises increasing or generating the activity of a gene product with the activity of a gene product conferring the activity of “b2613-protein”, especially from Escherichia coli or its functional equivalent or its homolog, e.g. the increase of
[99603] (a) a gene product of a gene comprising the nucleic acid molecule as shown in the respective line in column 5 of Table I (whereby the respective line disclose in column 7 the fine chemical bis-glyceryl phosphate (polar fraction)), application no. 19, preferably the coding region thereof, or a homolog or a fragment thereof, and being depicted in the same respective line as said B2613, or a functional equivalent or a homolog thereof as shown in column 8 of Table I, application no. 19, preferably the coding region thereof, particularly a homolog or functional equivalent as shown in column 8 of Table I B, application no. 19, and being depicted in the same respective line as said B2613, and preferably the activity is increased non-targeted, or
[99604] (b) a polypeptide comprising a polypeptide, a consensus sequence or at least a polypeptide motif as shown in the respective line in column 5 of Table II or in column 8 of Table IV, application no. 19, respectively, and being depicted in the same respective line as said B2613, or a functional equivalent or a homolog thereof as depicted in column 8 of Table II, application no. 19, preferably a homolog or functional equivalent as depicted in column 8 of Table II B, application no. 19, and being depicted in the same respective line as said B2613, and preferably the activity is increased non-targeted, whereby the respective line disclose in column 7 the fine chemical bis-glyceryl phosphate (polar fraction).

[99605] Accordingly, in one embodiment, the molecule which activity is to be increased in the process of the invention is the gene product with an activity as a “b2613-protein”, preferably it is the molecule of section (a) or (b) of this paragraph.

[99606] In particular, it was observed that in plants, especially in Arabidopsis thaliana, increasing or generating the activity of a gene product non-targeted with the activity of a “b2613-protein”, preferably being encoded by a gene comprising the nucleic acid sequence SEQ ID NO. 40665, preferably the coding region thereof, conferred the production of or the increase in bis-glyceryl phosphate (polar fraction) compared with the wild type control.

[99607] The nucleic acid sequence of B2634 from Escherichia coli, e.g. as shown in the respective line in column 5 of Table I, application no. 19, has been published in B. And the activity of the gene product thereof is the activity of transcriptional regulator.

[99608] Accordingly, in one embodiment, the process of the present invention for producing glycerol (polar fraction) in a non-human organism, like a microorganism or a plant or a part thereof, comprises increasing or generating the activity of a gene product with the activity of a gene product conferring the activity of “transcriptional regulator”, especially from Escherichia coli or its functional equivalent or its homolog, e.g. the increase of
[99609] (a) a gene product of a gene comprising the nucleic acid molecule as shown in the respective line in column 5 of Table I (whereby the respective line disclose in column 7 the fine chemical glycerol (polar fraction)), application no. 19, preferably the coding region thereof, or a homolog or a fragment thereof, and being depicted in the same respective line as said B2634, or a functional equivalent or a homolog thereof as shown in column 8 of Table I, application no. 19, preferably the coding region thereof, particularly a homolog or functional equivalent as shown in column 8 of Table I B, application no. 19, and being depicted in the same respective line as said B2634, and preferably the activity is increased non-targeted, or
[99610] (b) a polypeptide comprising a polypeptide, a consensus sequence or at least a polypeptide motif as shown in the respective line in column 5 of Table II or in column 8 of Table IV, application no. 19, respectively, and being depicted in the same respective line as said B2634, or a functional equivalent or a homolog thereof as depicted in column 8 of Table II, application no. 19, preferably a homolog or functional equivalent as depicted in column 8 of Table II B, application no. 19, and being depicted in the same respective line as said B2634, and preferably the activity is increased non-targeted, whereby the respective line disclose in column 7 the fine chemical glycerol (polar fraction).

[99611] Accordingly, in one embodiment, the molecule which activity is to be increased in the process of the invention is the gene product with an activity as a “transcriptional regulator”, preferably it is the molecule of section (a) or (b) of this paragraph.

[99612] In particular, it was observed that in plants, especially in Arabidopsis thaliana, increasing or generating the activity of a gene product non-targeted with the activity of a “transcriptional regulator”, preferably being encoded by a gene comprising the nucleic acid sequence SEQ ID NO. 40726, preferably the coding region thereof, conferred the production of or the increase in glycerol (polar fraction) compared with the wild type control.

[99613] The nucleic acid sequence of B2673 from Escherichia coli, e.g. as shown in the respective line in column 5 of Table I, application no. 19, has been published in B. And the activity of the gene product thereof is the activity of b2673-protein.

[99614] Accordingly, in one embodiment, the process of the present invention for producing glycerol (lipid fraction) in a non-human organism, like a microorganism or a plant or a part thereof, comprises increasing or generating the activity of a gene product with the activity of a gene product conferring the activity of “b2673-protein”, especially from Escherichia coli or its functional equivalent or its homolog, e.g. the increase of
[99615] (a) a gene product of a gene comprising the nucleic acid molecule as shown in the respective line in column 5 of Table I (whereby the respective line disclose in column 7 the fine chemical glycerol (lipid fraction)), application no. 19, preferably the coding region thereof, or a homolog or a fragment thereof, and being depicted in the same respective line as said B2673, or a functional equivalent or a homolog thereof as shown in column 8 of Table I, application no. 19, preferably the coding region thereof, particularly a homolog or functional equivalent as shown in column 8 of Table I B, application no. 19, and being depicted in the same respective line as said B2673, and preferably the activity is increased non-targeted, or
[99616] (b) a polypeptide comprising a polypeptide, a consensus sequence or at least a polypeptide motif as shown in the respective line in column 5 of Table II or in column 8 of Table IV, application no. 19, respectively, and being depicted in the same respective line as said B2673, or a functional equivalent or a homolog thereof as depicted in column 8 of Table II, application no. 19, preferably a homolog or functional equivalent as depicted in column 8 of Table II B, application no. 19, and being depicted in the same respective line as said B2673, and preferably the activity is increased non-targeted, whereby the respective line disclose in column 7 the fine chemical glycerol (lipid fraction).

[99617] Accordingly, in one embodiment, the molecule which activity is to be increased in the process of the invention is the gene product with an activity as a “b2673-protein”, preferably it is the molecule of section (a) or (b) of this paragraph.

[99618] In particular, it was observed that in plants, especially in Arabidopsis thaliana, increasing or generating the activity of a gene product non-targeted with the activity of a “b2673-protein”, preferably being encoded by a gene comprising the nucleic acid sequence SEQ ID NO. 9244, preferably the coding region thereof, conferred the production of or the increase in glycerol (lipid fraction) compared with the wild type control.

[99619] The nucleic acid sequence of B2673 from Escherichia coli, e.g. as shown in the respective line in column 5 of Table I, application no. 19, has been published in B. And the activity of the gene product thereof is the activity of b2673-protein.

[99620] Accordingly, in one embodiment, the process of the present invention for producing glycerol phosphate (lipid fraction) in a non-human organism, like a microorganism or a plant or a part thereof, comprises increasing or generating the activity of a gene product with the activity of a gene product conferring the activity of “b2673-protein”, especially from Escherichia coli or its functional equivalent or its homolog, e.g. the increase of
[99621] (a) a gene product of a gene comprising the nucleic acid molecule as shown in the respective line in column 5 of Table I (whereby the respective line disclose in column 7 the fine chemical glycerol phosphate (lipid fraction)), application no. 19, preferably the coding region thereof, or a homolog or a fragment thereof, and being depicted in the same respective line as said B2673, or a functional equivalent or a homolog thereof as shown in column 8 of Table I, application no. 19, preferably the coding region thereof, particularly a homolog or functional equivalent as shown in column 8 of Table I B, application no. 19, and being depicted in the same respective line as said B2673, and preferably the activity is increased non-targeted, or
[99622] (b) a polypeptide comprising a polypeptide, a consensus sequence or at least a polypeptide motif as shown in the respective line in column 5 of Table II or in column 8 of Table IV, application no. 19, respectively, and being depicted in the same respective line as said B2673, or a functional equivalent or a homolog thereof as depicted in column 8 of Table II, application no. 19, preferably a homolog or functional equivalent as depicted in column 8 of Table II B, application no. 19, and being depicted in the same respective line as said B2673, and preferably the activity is increased non-targeted, whereby the respective line disclose in column 7 the fine chemical glycerol phosphate (lipid fraction).

[99623] Accordingly, in one embodiment, the molecule which activity is to be increased in the process of the invention is the gene product with an activity as a “b2673-protein”, preferably it is the molecule of section (a) or (b) of this paragraph.

[99624] In particular, it was observed that in plants, especially in Arabidopsis thaliana, increasing or generating the activity of a gene product non-targeted with the activity of a “b2673-protein”, preferably being encoded by a gene comprising the nucleic acid sequence SEQ ID NO. 9244, preferably the coding region thereof, conferred the production of or the increase in glycerol phosphate (lipid fraction) compared with the wild type control.

[99625] The nucleic acid sequence of B2701 from Escherichia coli, e.g. as shown in the respective line in column 5 of Table I, application no. 19, has been published in B. And the activity of the gene product thereof is the activity of murein transglycosylase.

[99626] Accordingly, in one embodiment, the process of the present invention for producing bis-glyceryl phosphate (polar fraction) in a non-human organism, like a microorganism or a plant or a part thereof, comprises increasing or generating the activity of a gene product with the activity of a gene product conferring the activity of “murein transglycosylase”, especially from Escherichia coli or its functional equivalent or its homolog, e.g. the increase of
[99627] (a) a gene product of a gene comprising the nucleic acid molecule as shown in the respective line in column 5 of Table I (whereby the respective line disclose in column 7 the fine chemical bis-glyceryl phosphate (polar fraction)), application no. 19, preferably the coding region thereof, or a homolog or a fragment thereof, and being depicted in the same respective line as said B2701, or a functional equivalent or a homolog thereof as shown in column 8 of Table I, application no. 19, preferably the coding region thereof, particularly a homolog or functional equivalent as shown in column 8 of Table I B, application no. 19, and being depicted in the same respective line as said B2701, and preferably the activity is increased non-targeted, or
[99628] (b) a polypeptide comprising a polypeptide, a consensus sequence or at least a polypeptide motif as shown in the respective line in column 5 of Table II or in column 8 of Table IV, application no. 19, respectively, and being depicted in the same respective line as said B2701, or a functional equivalent or a homolog thereof as depicted in column 8 of Table II, application no. 19, preferably a homolog or functional equivalent as depicted in column 8 of Table II B, application no. 19, and being depicted in the same respective line as said B2701, and preferably the activity is increased non-targeted, whereby the respective line disclose in column 7 the fine chemical bis-glyceryl phosphate (polar fraction).

[99629] Accordingly, in one embodiment, the molecule which activity is to be increased in the process of the invention is the gene product with an activity as a “murein transglycosylase”, preferably it is the molecule of section (a) or (b) of this paragraph.

[99630] In particular, it was observed that in plants, especially in Arabidopsis thaliana, increasing or generating the activity of a gene product non-targeted with the activity of a “murein transglycosylase”, preferably being encoded by a gene comprising the nucleic acid sequence SEQ ID NO. 80756, preferably the coding region thereof, conferred the production of or the increase in bis-glyceryl phosphate (polar fraction) compared with the wild type control.

[99631] The nucleic acid sequence of B2714 from Escherichia coli, e.g. as shown in the respective line in column 5 of Table I, application no. 19, has been published in B. And the activity of the gene product thereof is the activity of transcriptional regulator.

[99632] Accordingly, in one embodiment, the process of the present invention for producing triacylglycerol in a non-human organism, like a microorganism or a plant or a part thereof, comprises increasing or generating the activity of a gene product with the activity of a gene product conferring the activity of “transcriptional regulator”, especially from Escherichia coli or its functional equivalent or its homolog, e.g. the increase of
[99633] (a) a gene product of a gene comprising the nucleic acid molecule as shown in the respective line in column 5 of Table I (whereby the respective line disclose in column 7 the fine chemical triacylglycerol), application no. 19, preferably the coding region thereof, or a homolog or a fragment thereof, and being depicted in the same respective line as said B2714, or a functional equivalent or a homolog thereof as shown in column 8 of Table I, application no. 19, preferably the coding region thereof, particularly a homolog or functional equivalent as shown in column 8 of Table I B, application no. 19, and being depicted in the same respective line as said B2714, and preferably the activity is increased non-targeted, or
[99634] (b) a polypeptide comprising a polypeptide, a consensus sequence or at least a polypeptide motif as shown in the respective line in column 5 of Table II or in column 8 of Table IV, application no. 19, respectively, and being depicted in the same respective line as said B2714, or a functional equivalent or a homolog thereof as depicted in column 8 of Table II, application no. 19, preferably a homolog or functional equivalent as depicted in column 8 of Table II B, application no. 19, and being depicted in the same respective line as said B2714, and preferably the activity is increased non-targeted, whereby the respective line disclose in column 7 the fine chemical triacylglycerol.

[99635] Accordingly, in one embodiment, the molecule which activity is to be increased in the process of the invention is the gene product with an activity as a “transcriptional regulator”, preferably it is the molecule of section (a) or (b) of this paragraph.

[99636] In particular, it was observed that in plants, especially in Arabidopsis thaliana, increasing or generating the activity of a gene product non-targeted with the activity of a “transcriptional regulator”, preferably being encoded by a gene comprising the nucleic acid sequence SEQ ID NO. 40741, preferably the coding region thereof, conferred the production of or the increase in triacylglycerol compared with the wild type control.

[99637] The nucleic acid sequence of B2747 from Escherichia coli, e.g. as shown in the respective line in column 5 of Table I, application no. 19, has been published in B. And the activity of the gene product thereof is the activity of 2-C-methyl-D-erythritol 4-phosphate cytidylyltransferase.

[99638] Accordingly, in one embodiment, the process of the present invention for producing glycerol (lipid fraction) in a non-human organism, like a microorganism or a plant or a part thereof, comprises increasing or generating the activity of a gene product with the activity of a gene product conferring the activity of “2-C-methyl-D-erythritol 4-phosphate cytidylyltransferase”, especially from Escherichia coli or its functional equivalent or its homolog, e.g. the increase of
[99639] (a) a gene product of a gene comprising the nucleic acid molecule as shown in the respective line in column 5 of Table I (whereby the respective line disclose in column 7 the fine chemical glycerol (lipid fraction)), application no. 19, preferably the coding region thereof, or a homolog or a fragment thereof, and being depicted in the same respective line as said B2747, or a functional equivalent or a homolog thereof as shown in column 8 of Table I, application no. 19, preferably the coding region thereof, particularly a homolog or functional equivalent as shown in column 8 of Table I B, application no. 19, and being depicted in the same respective line as said B2747, and preferably the activity is increased non-targeted, or
[99640] (b) a polypeptide comprising a polypeptide, a consensus sequence or at least a polypeptide motif as shown in the respective line in column 5 of Table II or in column 8 of Table IV, application no. 19, respectively, and being depicted in the same respective line as said B2747, or a functional equivalent or a homolog thereof as depicted in column 8 of Table II, application no. 19, preferably a homolog or functional equivalent as depicted in column 8 of Table II B, application no. 19, and being depicted in the same respective line as said B2747, and preferably the activity is increased non-targeted, whereby the respective line disclose in column 7 the fine chemical glycerol (lipid fraction).

[99641] Accordingly, in one embodiment, the molecule which activity is to be increased in the process of the invention is the gene product with an activity as a “2-C-methyl-D-erythritol 4-phosphate cytidylyltransferase”, preferably it is the molecule of section (a) or (b) of this paragraph.

[99642] In particular, it was observed that in plants, especially in Arabidopsis thaliana, increasing or generating the activity of a gene product non-targeted with the activity of a “2-C-methyl-D-erythritol 4-phosphate cytidylyltransferase”, preferably being encoded by a gene comprising the nucleic acid sequence SEQ ID NO. 81075, preferably the coding region thereof, conferred the production of or the increase in glycerol (lipid fraction) compared with the wild type control.

[99643] The nucleic acid sequence of B2818 from Escherichia coli, e.g. as shown in the respective line in column 5 of Table I, application no. 19, has been published in B. And the activity of the gene product thereof is the activity of amino-acid acetyltransferase.

[99644] Accordingly, in one embodiment, the process of the present invention for producing triacylglycerol in a non-human organism, like a microorganism or a plant or a part thereof, comprises increasing or generating the activity of a gene product with the activity of a gene product conferring the activity of “amino-acid acetyltransferase”, especially from Escherichia coli or its functional equivalent or its homolog, e.g. the increase of
[99645] (a) a gene product of a gene comprising the nucleic acid molecule as shown in the respective line in column 5 of Table I (whereby the respective line disclose in column 7 the fine chemical triacylglycerol), application no. 19, preferably the coding region thereof, or a homolog or a fragment thereof, and being depicted in the same respective line as said B2818, or a functional equivalent or a homolog thereof as shown in column 8 of Table I, application no. 19, preferably the coding region thereof, particularly a homolog or functional equivalent as shown in column 8 of Table I B, application no. 19, and being depicted in the same respective line as said B2818, and preferably the activity is increased non-targeted, or
[99646] (b) a polypeptide comprising a polypeptide, a consensus sequence or at least a polypeptide motif as shown in the respective line in column 5 of Table II or in column 8 of Table IV, application no. 19, respectively, and being depicted in the same respective line as said B2818, or a functional equivalent or a homolog thereof as depicted in column 8 of Table II, application no. 19, preferably a homolog or functional equivalent as depicted in column 8 of Table II B, application no. 19, and being depicted in the same respective line as said B2818, and preferably the activity is increased non-targeted, whereby the respective line disclose in column 7 the fine chemical triacylglycerol.

[99647] Accordingly, in one embodiment, the molecule which activity is to be increased in the process of the invention is the gene product with an activity as a “amino-acid acetyltransferase”, preferably it is the molecule of section (a) or (b) of this paragraph.

[99648] In particular, it was observed that in plants, especially in Arabidopsis thaliana, increasing or generating the activity of a gene product non-targeted with the activity of a “amino-acid acetyltransferase”, preferably being encoded by a gene comprising the nucleic acid sequence SEQ ID NO. 81576, preferably the coding region thereof, conferred the production of or the increase in triacylglycerol compared with the wild type control.

[99649] The nucleic acid sequence of B3083 from Escherichia coli, e.g. as shown in the respective line in column 5 of Table I, application no. 19, has been published in B. And the activity of the gene product thereof is the activity of b3083-protein.

[99650] Accordingly, in one embodiment, the process of the present invention for producing bis-glyceryl phosphate (polar fraction) in a non-human organism, like a microorganism or a plant or a part thereof, comprises increasing or generating the activity of a gene product with the activity of a gene product conferring the activity of “b3083-protein”, especially from Escherichia coli or its functional equivalent or its homolog, e.g. the increase of
[99651] (a) a gene product of a gene comprising the nucleic acid molecule as shown in the respective line in column 5 of Table I (whereby the respective line disclose in column 7 the fine chemical bis-glyceryl phosphate (polar fraction)), application no. 19, preferably the coding region thereof, or a homolog or a fragment thereof, and being depicted in the same respective line as said B3083, or a functional equivalent or a homolog thereof as shown in column 8 of Table I, application no. 19, preferably the coding region thereof, particularly a homolog or functional equivalent as shown in column 8 of Table I B, application no. 19, and being depicted in the same respective line as said B3083, and preferably the activity is increased non-targeted, or
[99652] (b) a polypeptide comprising a polypeptide, a consensus sequence or at least a polypeptide motif as shown in the respective line in column 5 of Table II or in column 8 of Table IV, application no. 19, respectively, and being depicted in the same respective line as said B3083, or a functional equivalent or a homolog thereof as depicted in column 8 of Table II, application no. 19, preferably a homolog or functional equivalent as depicted in column 8 of Table II B, application no. 19, and being depicted in the same respective line as said B3083, and preferably the activity is increased non-targeted, whereby the respective line disclose in column 7 the fine chemical bis-glyceryl phosphate (polar fraction).

[99653] Accordingly, in one embodiment, the molecule which activity is to be increased in the process of the invention is the gene product with an activity as a “b3083-protein”, preferably it is the molecule of section (a) or (b) of this paragraph.

[99654] In particular, it was observed that in plants, especially in Arabidopsis thaliana, increasing or generating the activity of a gene product non-targeted with the activity of a “b3083-protein”, preferably being encoded by a gene comprising the nucleic acid sequence SEQ ID NO. 82424, preferably the coding region thereof, conferred the production of or the increase in bis-glyceryl phosphate (polar fraction) compared with the wild type control.

[99655] The nucleic acid sequence of B3116 from Escherichia coli, e.g. as shown in the respective line in column 5 of Table I, application no. 19, has been published in B. And the activity of the gene product thereof is the activity of threonine/serine transporter.

[99656] Accordingly, in one embodiment, the process of the present invention for producing bis-glyceryl phosphate (polar fraction) in a non-human organism, like a microorganism or a plant or a part thereof, comprises increasing or generating the activity of a gene product with the activity of a gene product conferring the activity of “threonine/serine transporter”, especially from Escherichia coli or its functional equivalent or its homolog, e.g. the increase of
[99657] (a) a gene product of a gene comprising the nucleic acid molecule as shown in the respective line in column 5 of Table I (whereby the respective line disclose in column 7 the fine chemical bis-glyceryl phosphate (polar fraction)), application no. 19, preferably the coding region thereof, or a homolog or a fragment thereof, and being depicted in the same respective line as said B3116, or a functional equivalent or a homolog thereof as shown in column 8 of Table I, application no. 19, preferably the coding region thereof, particularly a homolog or functional equivalent as shown in column 8 of Table I B, application no. 19, and being depicted in the same respective line as said B3116, and preferably the activity is increased non-targeted, or
[99658] (b) a polypeptide comprising a polypeptide, a consensus sequence or at least a polypeptide motif as shown in the respective line in column 5 of Table II or in column 8 of Table IV, application no. 19, respectively, and being depicted in the same respective line as said B3116, or a functional equivalent or a homolog thereof as depicted in column 8 of Table II, application no. 19, preferably a homolog or functional equivalent as depicted in column 8 of Table II B, application no. 19, and being depicted in the same respective line as said B3116, and preferably the activity is increased non-targeted, whereby the respective line disclose in column 7 the fine chemical bis-glyceryl phosphate (polar fraction).

[99659] Accordingly, in one embodiment, the molecule which activity is to be increased in the process of the invention is the gene product with an activity as a “threonine/serine transporter”, preferably it is the molecule of section (a) or (b) of this paragraph.

[99660] In particular, it was observed that in plants, especially in Arabidopsis thaliana, increasing or generating the activity of a gene product non-targeted with the activity of a “threonine/serine transporter”, preferably being encoded by a gene comprising the nucleic acid sequence SEQ ID NO. 153246, preferably the coding region thereof, conferred the production of or the increase in bis-glyceryl phosphate (polar fraction) compared with the wild type control.

[99661] The nucleic acid sequence of B3160 from Escherichia coli, e.g. as shown in the respective line in column 5 of Table I, application no. 19, has been published in B. And the activity of the gene product thereof is the activity of b3160-protein.

[99662] Accordingly, in one embodiment, the process of the present invention for producing bis-glyceryl phosphate (polar fraction) in a non-human organism, like a microorganism or a plant or a part thereof, comprises increasing or generating the activity of a gene product with the activity of a gene product conferring the activity of “b3160-protein”, especially from Escherichia coli or its functional equivalent or its homolog, e.g. the increase of
[99663] (a) a gene product of a gene comprising the nucleic acid molecule as shown in the respective line in column 5 of Table I (whereby the respective line disclose in column 7 the fine chemical bis-glyceryl phosphate (polar fraction)), application no. 19, preferably the coding region thereof, or a homolog or a fragment thereof, and being depicted in the same respective line as said B3160, or a functional equivalent or a homolog thereof as shown in column 8 of Table I, application no. 19, preferably the coding region thereof, particularly a homolog or functional equivalent as shown in column 8 of Table I B, application no. 19, and being depicted in the same respective line as said B3160, and preferably the activity is increased non-targeted, or
[99664] (b) a polypeptide comprising a polypeptide, a consensus sequence or at least a polypeptide motif as shown in the respective line in column 5 of Table II or in column 8 of Table IV, application no. 19, respectively, and being depicted in the same respective line as said B3160, or a functional equivalent or a homolog thereof as depicted in column 8 of Table II, application no. 19, preferably a homolog or functional equivalent as depicted in column 8 of Table II B, application no. 19, and being depicted in the same respective line as said B3160, and preferably the activity is increased non-targeted, whereby the respective line disclose in column 7 the fine chemical bis-glyceryl phosphate (polar fraction).

[99665] Accordingly, in one embodiment, the molecule which activity is to be increased in the process of the invention is the gene product with an activity as a “b3160-protein”, preferably it is the molecule of section (a) or (b) of this paragraph.

[99666] In particular, it was observed that in plants, especially in Arabidopsis thaliana, increasing or generating the activity of a gene product non-targeted with the activity of a “b3160-protein”, preferably being encoded by a gene comprising the nucleic acid sequence SEQ ID NO. 153395, preferably the coding region thereof, conferred the production of or the increase in bis-glyceryl phosphate (polar fraction) compared with the wild type control.

[99667] The nucleic acid sequence of B3172 from Escherichia coli, e.g. as shown in the respective line in column 5 of Table I, application no. 19, has been published in B. And the activity of the gene product thereof is the activity of argininosuccinate synthetase.

[99668] Accordingly, in one embodiment, the process of the present invention for producing bis-glyceryl phosphate (polar fraction) in a non-human organism, like a microorganism or a plant or a part thereof, comprises increasing or generating the activity of a gene product with the activity of a gene product conferring the activity of “argininosuccinate synthetase”, especially from Escherichia coli or its functional equivalent or its homolog, e.g. the increase of
[99669] (a) a gene product of a gene comprising the nucleic acid molecule as shown in the respective line in column 5 of Table I (whereby the respective line disclose in column 7 the fine chemical bis-glyceryl phosphate (polar fraction)), application no. 19, preferably the coding region thereof, or a homolog or a fragment thereof, and being depicted in the same respective line as said B3172, or a functional equivalent or a homolog thereof as shown in column 8 of Table I, application no. 19, preferably the coding region thereof, particularly a homolog or functional equivalent as shown in column 8 of Table I B, application no. 19, and being depicted in the same respective line as said B3172, and preferably the activity is increased non-targeted, or
[99670] (b) a polypeptide comprising a polypeptide, a consensus sequence or at least a polypeptide motif as shown in the respective line in column 5 of Table II or in column 8 of Table IV, application no. 19, respectively, and being depicted in the same respective line as said B3172, or a functional equivalent or a homolog thereof as depicted in column 8 of Table II, application no. 19, preferably a homolog or functional equivalent as depicted in column 8 of Table II B, application no. 19, and being depicted in the same respective line as said B3172, and preferably the activity is increased non-targeted, whereby the respective line disclose in column 7 the fine chemical bis-glyceryl phosphate (polar fraction).

[99671] Accordingly, in one embodiment, the molecule which activity is to be increased in the process of the invention is the gene product with an activity as a “argininosuccinate synthetase”, preferably it is the molecule of section (a) or (b) of this paragraph.

[99672] In particular, it was observed that in plants, especially in Arabidopsis thaliana, increasing or generating the activity of a gene product non-targeted with the activity of a “argininosuccinate synthetase”, preferably being encoded by a gene comprising the nucleic acid sequence SEQ ID NO. 153618, preferably the coding region thereof, conferred the production of or the increase in bis-glyceryl phosphate (polar fraction) compared with the wild type control.

[99673] The nucleic acid sequence of B3256 from Escherichia coli, e.g. as shown in the respective line in column 5 of Table I, application no. 19, has been published in B. And the activity of the gene product thereof is the activity of acetyl CoA carboxylase.

[99674] Accordingly, in one embodiment, the process of the present invention for producing glycerol-3-phosphate (polar fraction) in a non-human organism, like a microorganism or a plant or a part thereof, comprises increasing or generating the activity of a gene product with the activity of a gene product conferring the activity of “acetyl CoA carboxylase”, especially from Escherichia coli or its functional equivalent or its homolog, e.g. the increase of
[99675] (a) a gene product of a gene comprising the nucleic acid molecule as shown in the respective line in column 5 of Table I (whereby the respective line disclose in column 7 the fine chemical glycerol-3-phosphate (polar fraction)), application no. 19, preferably the coding region thereof, or a homolog or a fragment thereof, and being depicted in the same respective line as said B3256, or a functional equivalent or a homolog thereof as shown in column 8 of Table I, application no. 19, preferably the coding region thereof, particularly a homolog or functional equivalent as shown in column 8 of Table I B, application no. 19, and being depicted in the same respective line as said B3256, and preferably the activity is increased non-targeted, or
[99676] (b) a polypeptide comprising a polypeptide, a consensus sequence or at least a polypeptide motif as shown in the respective line in column 5 of Table II or in column 8 of Table IV, application no. 19, respectively, and being depicted in the same respective line as said B3256, or a functional equivalent or a homolog thereof as depicted in column 8 of Table II, application no. 19, preferably a homolog or functional equivalent as depicted in column 8 of Table II B, application no. 19, and being depicted in the same respective line as said B3256, and preferably the activity is increased non-targeted, whereby the respective line disclose in column 7 the fine chemical glycerol-3-phosphate (polar fraction).

[99677] Accordingly, in one embodiment, the molecule which activity is to be increased in the process of the invention is the gene product with an activity as a “acetyl CoA carboxylase”, preferably it is the molecule of section (a) or (b) of this paragraph.

[99678] In particular, it was observed that in plants, especially in Arabidopsis thaliana, increasing or generating the activity of a gene product non-targeted with the activity of a “acetyl CoA carboxylase”, preferably being encoded by a gene comprising the nucleic acid sequence SEQ ID NO. 9492, preferably the coding region thereof, conferred the production of or the increase in glycerol-3-phosphate (polar fraction) compared with the wild type control.

[99679] The nucleic acid sequence of B3262 from Escherichia coli, e.g. as shown in the respective line in column 5 of Table I, application no. 19, has been published in B. And the activity of the gene product thereof is the activity of methyltransferase.

[99680] Accordingly, in one embodiment, the process of the present invention for producing bis-glyceryl phosphate (polar fraction) in a non-human organism, like a microorganism or a plant or a part thereof, comprises increasing or generating the activity of a gene product with the activity of a gene product conferring the activity of “methyltransferase”, especially from Escherichia coli or its functional equivalent or its homolog, e.g. the increase of
[99681] (a) a gene product of a gene comprising the nucleic acid molecule as shown in the respective line in column 5 of Table I (whereby the respective line disclose in column 7 the fine chemical bis-glyceryl phosphate (polar fraction)), application no. 19, preferably the coding region thereof, or a homolog or a fragment thereof, and being depicted in the same respective line as said B3262, or a functional equivalent or a homolog thereof as shown in column 8 of Table I, application no. 19, preferably the coding region thereof, particularly a homolog or functional equivalent as shown in column 8 of Table I B, application no. 19, and being depicted in the same respective line as said B3262, and preferably the activity is increased non-targeted, or
[99682] (b) a polypeptide comprising a polypeptide, a consensus sequence or at least a polypeptide motif as shown in the respective line in column 5 of Table II or in column 8 of Table IV, application no. 19, respectively, and being depicted in the same respective line as said B3262, or a functional equivalent or a homolog thereof as depicted in column 8 of Table II, application no. 19, preferably a homolog or functional equivalent as depicted in column 8 of Table II B, application no. 19, and being depicted in the same respective line as said B3262, and preferably the activity is increased non-targeted, whereby the respective line disclose in column 7 the fine chemical bis-glyceryl phosphate (polar fraction).

[99683] Accordingly, in one embodiment, the molecule which activity is to be increased in the process of the invention is the gene product with an activity as a “methyltransferase”, preferably it is the molecule of section (a) or (b) of this paragraph.

[99684] In particular, it was observed that in plants, especially in Arabidopsis thaliana, increasing or generating the activity of a gene product non-targeted with the activity of a “methyltransferase”, preferably being encoded by a gene comprising the nucleic acid sequence SEQ ID NO. 42502, preferably the coding region thereof, conferred the production of or the increase in bis-glyceryl phosphate (polar fraction) compared with the wild type control.

[99685] The nucleic acid sequence of B3262 from Escherichia coli, e.g. as shown in the respective line in column 5 of Table I, application no. 19, has been published in B. And the activity of the gene product thereof is the activity of methyltransferase.

[99686] Accordingly, in one embodiment, the process of the present invention for producing glycerol (lipid fraction) in a non-human organism, like a microorganism or a plant or a part thereof, comprises increasing or generating the activity of a gene product with the activity of a gene product conferring the activity of “methyltransferase”, especially from Escherichia coli or its functional equivalent or its homolog, e.g. the increase of
[99687] (a) a gene product of a gene comprising the nucleic acid molecule as shown in the respective line in column 5 of Table I (whereby the respective line disclose in column 7 the fine chemical glycerol (lipid fraction)), application no. 19, preferably the coding region thereof, or a homolog or a fragment thereof, and being depicted in the same respective line as said B3262, or a functional equivalent or a homolog thereof as shown in column 8 of Table I, application no. 19, preferably the coding region thereof, particularly a homolog or functional equivalent as shown in column 8 of Table I B, application no. 19, and being depicted in the same respective line as said B3262, and preferably the activity is increased non-targeted, or
[99688] (b) a polypeptide comprising a polypeptide, a consensus sequence or at least a polypeptide motif as shown in the respective line in column 5 of Table II or in column 8 of Table IV, application no. 19, respectively, and being depicted in the same respective line as said B3262, or a functional equivalent or a homolog thereof as depicted in column 8 of Table II, application no. 19, preferably a homolog or functional equivalent as depicted in column 8 of Table II B, application no. 19, and being depicted in the same respective line as said B3262, and preferably the activity is increased non-targeted, whereby the respective line disclose in column 7 the fine chemical glycerol (lipid fraction).

[99689] Accordingly, in one embodiment, the molecule which activity is to be increased in the process of the invention is the gene product with an activity as a “methyltransferase”, preferably it is the molecule of section (a) or (b) of this paragraph.

[99690] In particular, it was observed that in plants, especially in Arabidopsis thaliana, increasing or generating the activity of a gene product non-targeted with the activity of a “methyltransferase”, preferably being encoded by a gene comprising the nucleic acid sequence SEQ ID NO. 42502, preferably the coding region thereof, conferred the production of or the increase in glycerol (lipid fraction) compared with the wild type control.

[99691] The nucleic acid sequence of B3347 from Escherichia coli, e.g. as shown in the respective line in column 5 of Table I, application no. 19, has been published in B. And the activity of the gene product thereof is the activity of FKBP-type peptidyl-prolyl cis-trans isomerase (rotamase).

[99692] Accordingly, in one embodiment, the process of the present invention for producing bis-glyceryl phosphate (polar fraction) in a non-human organism, like a microorganism or a plant or a part thereof, comprises increasing or generating the activity of a gene product with the activity of a gene product conferring the activity of “FKBP-type peptidyl-prolyl cis-trans isomerase (rotamase)”, especially from Escherichia coli or its functional equivalent or its homolog, e.g. the increase of
[99693] (a) a gene product of a gene comprising the nucleic acid molecule as shown in the respective line in column 5 of Table I (whereby the respective line disclose in column 7 the fine chemical bis-glyceryl phosphate (polar fraction)), application no. 19, preferably the coding region thereof, or a homolog or a fragment thereof, and being depicted in the same respective line as said B3347, or a functional equivalent or a homolog thereof as shown in column 8 of Table I, application no. 19, preferably the coding region thereof, particularly a homolog or functional equivalent as shown in column 8 of Table I B, application no. 19, and being depicted in the same respective line as said B3347, and preferably the activity is increased non-targeted, or
[99694] (b) a polypeptide comprising a polypeptide, a consensus sequence or at least a polypeptide motif as shown in the respective line in column 5 of Table II or in column 8 of Table IV, application no. 19, respectively, and being depicted in the same respective line as said B3347, or a functional equivalent or a homolog thereof as depicted in column 8 of Table II, application no. 19, preferably a homolog or functional equivalent as depicted in column 8 of Table II B, application no. 19, and being depicted in the same respective line as said B3347, and preferably the activity is increased non-targeted, whereby the respective line disclose in column 7 the fine chemical bis-glyceryl phosphate (polar fraction).

[99695] Accordingly, in one embodiment, the molecule which activity is to be increased in the process of the invention is the gene product with an activity as a “FKBP-type peptidyl-prolyl cis-trans isomerase (rotamase)”, preferably it is the molecule of section (a) or (b) of this paragraph.

[99696] In particular, it was observed that in plants, especially in Arabidopsis thaliana, increasing or generating the activity of a gene product non-targeted with the activity of a “FKBP-type peptidylprolyl cis-trans isomerase (rotamase)”, preferably being encoded by a gene comprising the nucleic acid sequence SEQ ID NO. 153813, preferably the coding region thereof, conferred the production of or the increase in bis-glyceryl phosphate (polar fraction) compared with the wild type control.

[99697] The nucleic acid sequence of B3457 from Escherichia coli, e.g. as shown in the respective line in column 5 of Table I, application no. 19, has been published in B. And the activity of the gene product thereof is the activity of high-affinity branched-chain amino acid transport protein.

[99698] Accordingly, in one embodiment, the process of the present invention for producing bis-glyceryl phosphate (polar fraction) in a non-human organism, like a microorganism or a plant or a part thereof, comprises increasing or generating the activity of a gene product with the activity of a gene product conferring the activity of “high-affinity branched-chain amino acid transport protein”, especially from Escherichia coli or its functional equivalent or its homolog, e.g. the increase of
[99699] (a) a gene product of a gene comprising the nucleic acid molecule as shown in the respective line in column 5 of Table I (whereby the respective line disclose in column 7 the fine chemical bis-glyceryl phosphate (polar fraction)), application no. 19, preferably the coding region thereof, or a homolog or a fragment thereof, and being depicted in the same respective line as said B3457, or a functional equivalent or a homolog thereof as shown in column 8 of Table I, application no. 19, preferably the coding region thereof, particularly a homolog or functional equivalent as shown in column 8 of Table I B, application no. 19, and being depicted in the same respective line as said B3457, and preferably the activity is increased non-targeted, or
[99700] (b) a polypeptide comprising a polypeptide, a consensus sequence or at least a polypeptide motif as shown in the respective line in column 5 of Table II or in column 8 of Table IV, application no. 19, respectively, and being depicted in the same respective line as said B3457, or a functional equivalent or a homolog thereof as depicted in column 8 of Table II, application no. 19, preferably a homolog or functional equivalent as depicted in column 8 of Table II B, application no. 19, and being depicted in the same respective line as said B3457, and preferably the activity is increased non-targeted, whereby the respective line disclose in column 7 the fine chemical bis-glyceryl phosphate (polar fraction).

[99701] Accordingly, in one embodiment, the molecule which activity is to be increased in the process of the invention is the gene product with an activity as a “high-affinity branched-chain amino acid transport protein”, preferably it is the molecule of section (a) or (b) of this paragraph.

[99702] In particular, it was observed that in plants, especially in Arabidopsis thaliana, increasing or generating the activity of a gene product non-targeted with the activity of a “high-affinity branched-chain amino acid transport protein”, preferably being encoded by a gene comprising the nucleic acid sequence SEQ ID NO. 146472, preferably the coding region thereof, conferred the production of or the increase in bis-glyceryl phosphate (polar fraction) compared with the wild type control.

[99703] The nucleic acid sequence of B3777 from Escherichia coli, e.g. as shown in the respective line in column 5 of Table I, application no. 19, has been published in B. And the activity of the gene product thereof is the activity of b3777-protein.

[99704] Accordingly, in one embodiment, the process of the present invention for producing bis-glyceryl phosphate (polar fraction) in a non-human organism, like a microorganism or a plant or a part thereof, comprises increasing or generating the activity of a gene product with the activity of a gene product conferring the activity of “b3777-protein”, especially from Escherichia coli or its functional equivalent or its homolog, e.g. the increase of
[99705] (a) a gene product of a gene comprising the nucleic acid molecule as shown in the respective line in column 5 of Table I (whereby the respective line disclose in column 7 the fine chemical bis-glyceryl phosphate (polar fraction)), application no. 19, preferably the coding region thereof, or a homolog or a fragment thereof, and being depicted in the same respective line as said B3777, or a functional equivalent or a homolog thereof as shown in column 8 of Table I, application no. 19, preferably the coding region thereof, particularly a homolog or functional equivalent as shown in column 8 of Table I B, application no. 19, and being depicted in the same respective line as said B3777, and preferably the activity is increased non-targeted, or
[99706] (b) a polypeptide comprising a polypeptide, a consensus sequence or at least a polypeptide motif as shown in the respective line in column 5 of Table II or in column 8 of Table IV, application no. 19, respectively, and being depicted in the same respective line as said B3777, or a functional equivalent or a homolog thereof as depicted in column 8 of Table II, application no. 19, preferably a homolog or functional equivalent as depicted in column 8 of Table II B, application no. 19, and being depicted in the same respective line as said B3777, and preferably the activity is increased non-targeted, whereby the respective line disclose in column 7 the fine chemical bis-glyceryl phosphate (polar fraction).

[99707] Accordingly, in one embodiment, the molecule which activity is to be increased in the process of the invention is the gene product with an activity as a “b3777-protein”, preferably it is the molecule of section (a) or (b) of this paragraph.

[99708] In particular, it was observed that in plants, especially in Arabidopsis thaliana, increasing or generating the activity of a gene product non-targeted with the activity of a “b3777-protein”, preferably being encoded by a gene comprising the nucleic acid sequence SEQ ID NO. 136098, preferably the coding region thereof, conferred the production of or the increase in bis-glyceryl phosphate (polar fraction) compared with the wild type control.

[99709] The nucleic acid sequence of B3791 from Escherichia coli, e.g. as shown in the respective line in column 5 of Table I, application no. 19, has been published in B. And the activity of the gene product thereof is the activity of b3791-protein.

[99710] Accordingly, in one embodiment, the process of the present invention for producing bis-glyceryl phosphate (polar fraction) in a non-human organism, like a microorganism or a plant or a part thereof, comprises increasing or generating the activity of a gene product with the activity of a gene product conferring the activity of “b3791-protein”, especially from Escherichia coli or its functional equivalent or its homolog, e.g. the increase of
[99711] (a) a gene product of a gene comprising the nucleic acid molecule as shown in the respective line in column 5 of Table I (whereby the respective line disclose in column 7 the fine chemical bis-glyceryl phosphate (polar fraction)), application no. 19, preferably the coding region thereof, or a homolog or a fragment thereof, and being depicted in the same respective line as said B3791, or a functional equivalent or a homolog thereof as shown in column 8 of Table I, application no. 19, preferably the coding region thereof, particularly a homolog or functional equivalent as shown in column 8 of Table I B, application no. 19, and being depicted in the same respective line as said B3791, and preferably the activity is increased non-targeted, or
[99712] (b) a polypeptide comprising a polypeptide, a consensus sequence or at least a polypeptide motif as shown in the respective line in column 5 of Table II or in column 8 of Table IV, application no. 19, respectively, and being depicted in the same respective line as said B3791, or a functional equivalent or a homolog thereof as depicted in column 8 of Table II, application no. 19, preferably a homolog or functional equivalent as depicted in column 8 of Table II B, application no. 19, and being depicted in the same respective line as said B3791, and preferably the activity is increased non-targeted, whereby the respective line disclose in column 7 the fine chemical bis-glyceryl phosphate (polar fraction).

[99713] Accordingly, in one embodiment, the molecule which activity is to be increased in the process of the invention is the gene product with an activity as a “b3791-protein”, preferably it is the molecule of section (a) or (b) of this paragraph.

[99714] In particular, it was observed that in plants, especially in Arabidopsis thaliana, increasing or generating the activity of a gene product non-targeted with the activity of a “b3791-protein”, preferably being encoded by a gene comprising the nucleic acid sequence SEQ ID NO. 83726, preferably the coding region thereof, conferred the production of or the increase in bis-glyceryl phosphate (polar fraction) compared with the wild type control.

[99715] The nucleic acid sequence of B3793 from Escherichia coli, e.g. as shown in the respective line in column 5 of Table I, application no. 19, has been published in B. And the activity of the gene product thereof is the activity of enterobacterial common antigen polymerase.

[99716] Accordingly, in one embodiment, the process of the present invention for producing bis-glyceryl phosphate (polar fraction) in a non-human organism, like a microorganism or a plant or a part thereof, comprises increasing or generating the activity of a gene product with the activity of a gene product conferring the activity of “enterobacterial common antigen polymerase”, especially from Escherichia coli or its functional equivalent or its homolog, e.g. the increase of
[99717] (a) a gene product of a gene comprising the nucleic acid molecule as shown in the respective line in column 5 of Table I (whereby the respective line disclose in column 7 the fine chemical bis-glyceryl phosphate (polar fraction)), application no. 19, preferably the coding region thereof, or a homolog or a fragment thereof, and being depicted in the same respective line as said B3793, or a functional equivalent or a homolog thereof as shown in column 8 of Table I, application no. 19, preferably the coding region thereof, particularly a homolog or functional equivalent as shown in column 8 of Table I B, application no. 19, and being depicted in the same respective line as said B3793, and preferably the activity is increased non-targeted, or
[99718] (b) a polypeptide comprising a polypeptide, a consensus sequence or at least a polypeptide motif as shown in the respective line in column 5 of Table II or in column 8 of Table IV, application no. 19, respectively, and being depicted in the same respective line as said B3793, or a functional equivalent or a homolog thereof as depicted in column 8 of Table II, application no. 19, preferably a homolog or functional equivalent as depicted in column 8 of Table II B, application no. 19, and being depicted in the same respective line as said B3793, and preferably the activity is increased non-targeted, whereby the respective line disclose in column 7 the fine chemical bis-glyceryl phosphate (polar fraction).

[99719] Accordingly, in one embodiment, the molecule which activity is to be increased in the process of the invention is the gene product with an activity as a “enterobacterial common antigen polymerase”, preferably it is the molecule of section (a) or (b) of this paragraph.

[99720] In particular, it was observed that in plants, especially in Arabidopsis thaliana, increasing or generating the activity of a gene product non-targeted with the activity of a “enterobacterial common antigen polymerase”, preferably being encoded by a gene comprising the nucleic acid sequence SEQ ID NO. 43800, preferably the coding region thereof, conferred the production of or the increase in bis-glyceryl phosphate (polar fraction) compared with the wild type control.

[99721] The nucleic acid sequence of B3989 from Escherichia coli, e.g. as shown in the respective line in column 5 of Table I, application no. 19, has been published in B. And the activity of the gene product thereof is the activity of b3989-protein.

[99722] Accordingly, in one embodiment, the process of the present invention for producing triacylglycerol in a non-human organism, like a microorganism or a plant or a part thereof, comprises increasing or generating the activity of a gene product with the activity of a gene product conferring the activity of “b3989-protein”, especially from Escherichia coli or its functional equivalent or its homolog, e.g. the increase of
[99723] (a) a gene product of a gene comprising the nucleic acid molecule as shown in the respective line in column 5 of Table I (whereby the respective line disclose in column 7 the fine chemical triacylglycerol), application no. 19, preferably the coding region thereof, or a homolog or a fragment thereof, and being depicted in the same respective line as said B3989, or a functional equivalent or a homolog thereof as shown in column 8 of Table I, application no. 19, preferably the coding region thereof, particularly a homolog or functional equivalent as shown in column 8 of Table I B, application no. 19, and being depicted in the same respective line as said B3989, and preferably the activity is increased non-targeted, or
[99724] (b) a polypeptide comprising a polypeptide, a consensus sequence or at least a polypeptide motif as shown in the respective line in column 5 of Table II or in column 8 of Table IV, application no. 19, respectively, and being depicted in the same respective line as said B3989, or a functional equivalent or a homolog thereof as depicted in column 8 of Table II, application no. 19, preferably a homolog or functional equivalent as depicted in column 8 of Table II B, application no. 19, and being depicted in the same respective line as said B3989, and preferably the activity is increased non-targeted, whereby the respective line disclose in column 7 the fine chemical triacylglycerol.

[99725] Accordingly, in one embodiment, the molecule which activity is to be increased in the process of the invention is the gene product with an activity as a “b3989-protein”, preferably it is the molecule of section (a) or (b) of this paragraph.

[99726] In particular, it was observed that in plants, especially in Arabidopsis thaliana, increasing or generating the activity of a gene product non-targeted with the activity of a “b3989-protein”, preferably being encoded by a gene comprising the nucleic acid sequence SEQ ID NO. 44372, preferably the coding region thereof, conferred the production of or the increase in triacylglycerol compared with the wild type control.

[99727] The nucleic acid sequence of B4029 from Escherichia coli, e.g. as shown in the respective line in column 5 of Table I, application no. 19, has been published in B. And the activity of the gene product thereof is the activity of b4029-protein.

[99728] Accordingly, in one embodiment, the process of the present invention for producing bis-glyceryl phosphate (polar fraction) in a non-human organism, like a microorganism or a plant or a part thereof, comprises increasing or generating the activity of a gene product with the activity of a gene product conferring the activity of “b4029-protein”, especially from Escherichia coli or its functional equivalent or its homolog, e.g. the increase of
[99729] (a) a gene product of a gene comprising the nucleic acid molecule as shown in the respective line in column 5 of Table I (whereby the respective line disclose in column 7 the fine chemical bis-glyceryl phosphate (polar fraction)), application no. 19, preferably the coding region thereof, or a homolog or a fragment thereof, and being depicted in the same respective line as said B4029, or a functional equivalent or a homolog thereof as shown in column 8 of Table I, application no. 19, preferably the coding region thereof, particularly a homolog or functional equivalent as shown in column 8 of Table I B, application no. 19, and being depicted in the same respective line as said B4029, and preferably the activity is increased non-targeted, or
[99730] (b) a polypeptide comprising a polypeptide, a consensus sequence or at least a polypeptide motif as shown in the respective line in column 5 of Table II or in column 8 of Table IV, application no. 19, respectively, and being depicted in the same respective line as said B4029, or a functional equivalent or a homolog thereof as depicted in column 8 of Table II, application no. 19, preferably a homolog or functional equivalent as depicted in column 8 of Table II B, application no. 19, and being depicted in the same respective line as said B4029, and preferably the activity is increased non-targeted, whereby the respective line disclose in column 7 the fine chemical bis-glyceryl phosphate (polar fraction).

[99731] Accordingly, in one embodiment, the molecule which activity is to be increased in the process of the invention is the gene product with an activity as a “b4029-protein”, preferably it is the molecule of section (a) or (b) of this paragraph.

[99732] In particular, it was observed that in plants, especially in Arabidopsis thaliana, increasing or generating the activity of a gene product non-targeted with the activity of a “b4029-protein”, preferably being encoded by a gene comprising the nucleic acid sequence SEQ ID NO. 10740, preferably the coding region thereof, conferred the production of or the increase in bis-glyceryl phosphate (polar fraction) compared with the wild type control.

[99733] The nucleic acid sequence of B4050 from Escherichia coli, e.g. as shown in the respective line in column 5 of Table I, application no. 19, has been published in B. And the activity of the gene product thereof is the activity of b4050-protein.

[99734] Accordingly, in one embodiment, the process of the present invention for producing triacylglycerol in a non-human organism, like a microorganism or a plant or a part thereof, comprises increasing or generating the activity of a gene product with the activity of a gene product conferring the activity of “b4050-protein”, especially from Escherichia coli or its functional equivalent or its homolog, e.g. the increase of
[99735] (a) a gene product of a gene comprising the nucleic acid molecule as shown in the respective line in column 5 of Table I (whereby the respective line disclose in column 7 the fine chemical triacylglycerol), application no. 19, preferably the coding region thereof, or a homolog or a fragment thereof, and being depicted in the same respective line as said B4050, or a functional equivalent or a homolog thereof as shown in column 8 of Table I, application no. 19, preferably the coding region thereof, particularly a homolog or functional equivalent as shown in column 8 of Table I B, application no. 19, and being depicted in the same respective line as said B4050, and preferably the activity is increased non-targeted, or
[99736] (b) a polypeptide comprising a polypeptide, a consensus sequence or at least a polypeptide motif as shown in the respective line in column 5 of Table II or in column 8 of Table IV, application no. 19, respectively, and being depicted in the same respective line as said B4050, or a functional equivalent or a homolog thereof as depicted in column 8 of Table II, application no. 19, preferably a homolog or functional equivalent as depicted in column 8 of Table II B, application no. 19, and being depicted in the same respective line as said B4050, and preferably the activity is increased non-targeted, whereby the respective line disclose in column 7 the fine chemical triacylglycerol.

[99737] Accordingly, in one embodiment, the molecule which activity is to be increased in the process of the invention is the gene product with an activity as a “b4050-protein”, preferably it is the molecule of section (a) or (b) of this paragraph.

[99738] In particular, it was observed that in plants, especially in Arabidopsis thaliana, increasing or generating the activity of a gene product non-targeted with the activity of a “b4050-protein”, preferably being encoded by a gene comprising the nucleic acid sequence SEQ ID NO. 106532, preferably the coding region thereof, conferred the production of or the increase in triacylglycerol compared with the wild type control.

[99739] The nucleic acid sequence of B4129 from Escherichia coli, e.g. as shown in the respective line in column 5 of Table I, application no. 19, has been published in B. And the activity of the gene product thereof is the activity of lysyl-tRNA synthetase.

[99740] Accordingly, in one embodiment, the process of the present invention for producing bis-glyceryl phosphate (polar fraction) in a non-human organism, like a microorganism or a plant or a part thereof, comprises increasing or generating the activity of a gene product with the activity of a gene product conferring the activity of “lysyl-tRNA synthetase”, especially from Escherichia coli or its functional equivalent or its homolog, e.g. the increase of
[99741] (a) a gene product of a gene comprising the nucleic acid molecule as shown in the respective line in column 5 of Table I (whereby the respective line disclose in column 7 the fine chemical bis-glyceryl phosphate (polar fraction)), application no. 19, preferably the coding region thereof, or a homolog or a fragment thereof, and being depicted in the same respective line as said B4129, or a functional equivalent or a homolog thereof as shown in column 8 of Table I, application no. 19, preferably the coding region thereof, particularly a homolog or functional equivalent as shown in column 8 of Table I B, application no. 19, and being depicted in the same respective line as said B4129, and preferably the activity is increased non-targeted, or
[99742] (b) a polypeptide comprising a polypeptide, a consensus sequence or at least a polypeptide motif as shown in the respective line in column 5 of Table II or in column 8 of Table IV, application no. 19, respectively, and being depicted in the same respective line as said B4129, or a functional equivalent or a homolog thereof as depicted in column 8 of Table II, application no. 19, preferably a homolog or functional equivalent as depicted in column 8 of Table II B, application no. 19, and being depicted in the same respective line as said B4129, and preferably the activity is increased non-targeted, whereby the respective line disclose in column 7 the fine chemical bis-glyceryl phosphate (polar fraction).

[99743] Accordingly, in one embodiment, the molecule which activity is to be increased in the process of the invention is the gene product with an activity as a “lysyl-tRNA synthetase”, preferably it is the molecule of section (a) or (b) of this paragraph.

[99744] In particular, it was observed that in plants, especially in Arabidopsis thaliana, increasing or generating the activity of a gene product non-targeted with the activity of a “lysyl-tRNA synthetase”, preferably being encoded by a gene comprising the nucleic acid sequence SEQ ID NO. 44662, preferably the coding region thereof, conferred the production of or the increase in bis-glyceryl phosphate (polar fraction) compared with the wild type control.

[99745] The nucleic acid sequence of B4384 from Escherichia coli, e.g. as shown in the respective line in column 5 of Table I, application no. 19, has been published in B. And the activity of the gene product thereof is the activity of purine-nucleoside phosphorylase.

[99746] Accordingly, in one embodiment, the process of the present invention for producing glycerol-3-phosphate (polar fraction) in a non-human organism, like a microorganism or a plant or a part thereof, comprises increasing or generating the activity of a gene product with the activity of a gene product conferring the activity of “purine-nucleoside phosphorylase”, especially from Escherichia coli or its functional equivalent or its homolog, e.g. the increase of
[99747] (a) a gene product of a gene comprising the nucleic acid molecule as shown in the respective line in column 5 of Table I (whereby the respective line disclose in column 7 the fine chemical glycerol-3-phosphate (polar fraction)), application no. 19, preferably the coding region thereof, or a homolog or a fragment thereof, and being depicted in the same respective line as said B4384, or a functional equivalent or a homolog thereof as shown in column 8 of Table I, application no. 19, preferably the coding region thereof, particularly a homolog or functional equivalent as shown in column 8 of Table I B, application no. 19, and being depicted in the same respective line as said B4384, and preferably the activity is increased non-targeted, or
[99748] (b) a polypeptide comprising a polypeptide, a consensus sequence or at least a polypeptide motif as shown in the respective line in column 5 of Table II or in column 8 of Table IV, application no. 19, respectively, and being depicted in the same respective line as said B4384, or a functional equivalent or a homolog thereof as depicted in column 8 of Table II, application no. 19, preferably a homolog or functional equivalent as depicted in column 8 of Table II B, application no. 19, and being depicted in the same respective line as said B4384, and preferably the activity is increased non-targeted, whereby the respective line disclose in column 7 the fine chemical glycerol-3-phosphate (polar fraction).

[99749] Accordingly, in one embodiment, the molecule which activity is to be increased in the process of the invention is the gene product with an activity as a “purine-nucleoside phosphorylase”, preferably it is the molecule of section (a) or (b) of this paragraph.

[99750] In particular, it was observed that in plants, especially in Arabidopsis thaliana, increasing or generating the activity of a gene product non-targeted with the activity of a “purine-nucleoside phosphorylase”, preferably being encoded by a gene comprising the nucleic acid sequence SEQ ID NO. 45556, preferably the coding region thereof, conferred the production of or the increase in glycerol-3-phosphate (polar fraction) compared with the wild type control.

[99751] The nucleic acid sequence of GM02LC12622 from Glycine max, e.g. as shown in the respective line in column 5 of Table I, application no. 19, is unpublished. And the activity of the gene product thereof is the activity of glutaredoxin.

[99752] Accordingly, in one embodiment, the process of the present invention for producing bis-glyceryl phosphate (polar fraction) in a non-human organism, like a microorganism or a plant or a part thereof, comprises increasing or generating the activity of a gene product with the activity of a gene product conferring the activity of “glutaredoxin”, especially from Glycine max or its functional equivalent or its homolog, e.g. the increase of
[99753] (a) a gene product of a gene comprising the nucleic acid molecule as shown in the respective line in column 5 of Table I (whereby the respective line disclose in column 7 the fine chemical bis-glyceryl phosphate (polar fraction)), application no. 19, preferably the coding region thereof, or a homolog or a fragment thereof, and being depicted in the same respective line as said GM02LC12622, or a functional equivalent or a homolog thereof as shown in column 8 of Table I, application no. 19, preferably the coding region thereof, particularly a homolog or functional equivalent as shown in column 8 of Table I B, application no. 19, and being depicted in the same respective line as said GM02LC12622, and preferably the activity is increased non-targeted, or
[99754] (b) a polypeptide comprising a polypeptide, a consensus sequence or at least a polypeptide motif as shown in the respective line in column 5 of Table II or in column 8 of Table IV, application no. 19, respectively, and being depicted in the same respective line as said GM02LC12622, or a functional equivalent or a homolog thereof as depicted in column 8 of Table II, application no. 19, preferably a homolog or functional equivalent as depicted in column 8 of Table II B, application no. 19, and being depicted in the same respective line as said GM02LC12622, and preferably the activity is increased non-targeted, whereby the respective line disclose in column 7 the fine chemical bis-glyceryl phosphate (polar fraction).

[99755] Accordingly, in one embodiment, the molecule which activity is to be increased in the process of the invention is the gene product with an activity as a “glutaredoxin”, preferably it is the molecule of section (a) or (b) of this paragraph.

[99756] In particular, it was observed that in plants, especially in Arabidopsis thaliana, increasing or generating the activity of a gene product non-targeted with the activity of a “glutaredoxin”, preferably being encoded by a gene comprising the nucleic acid sequence SEQ ID NO. 10811, preferably the coding region thereof, conferred the production of or the increase in bis-glyceryl phosphate (polar fraction) compared with the wild type control.

[99757] The nucleic acid sequence of GM02LC12622 from Glycine max, e.g. as shown in the respective line in column 5 of Table I, application no. 19, is unpublished. And the activity of the gene product thereof is the activity of glutaredoxin.

[99758] Accordingly, in one embodiment, the process of the present invention for producing glycerol phosphate (lipid fraction) in a non-human organism, like a microorganism or a plant or a part thereof, comprises increasing or generating the activity of a gene product with the activity of a gene product conferring the activity of “glutaredoxin”, especially from Glycine max or its functional equivalent or its homolog, e.g. the increase of
[99759] (a) a gene product of a gene comprising the nucleic acid molecule as shown in the respective line in column 5 of Table I (whereby the respective line disclose in column 7 the fine chemical glycerol phosphate (lipid fraction)), application no. 19, preferably the coding region thereof, or a homolog or a fragment thereof, and being depicted in the same respective line as said GM02LC12622, or a functional equivalent or a homolog thereof as shown in column 8 of Table I, application no. 19, preferably the coding region thereof, particularly a homolog or functional equivalent as shown in column 8 of Table I B, application no. 19, and being depicted in the same respective line as said GM02LC12622, and preferably the activity is increased non-targeted, or
[99760] (b) a polypeptide comprising a polypeptide, a consensus sequence or at least a polypeptide motif as shown in the respective line in column 5 of Table II or in column 8 of Table IV, application no. 19, respectively, and being depicted in the same respective line as said GM02LC12622, or a functional equivalent or a homolog thereof as depicted in column 8 of Table II, application no. 19, preferably a homolog or functional equivalent as depicted in column 8 of Table II B, application no. 19, and being depicted in the same respective line as said GM02LC12622, and preferably the activity is increased non-targeted, whereby the respective line disclose in column 7 the fine chemical glycerol phosphate (lipid fraction).

[99761] Accordingly, in one embodiment, the molecule which activity is to be increased in the process of the invention is the gene product with an activity as a “glutaredoxin”, preferably it is the molecule of section (a) or (b) of this paragraph.

[99762] In particular, it was observed that in plants, especially in Arabidopsis thaliana, increasing or generating the activity of a gene product non-targeted with the activity of a “glutaredoxin”, preferably being encoded by a gene comprising the nucleic acid sequence SEQ ID NO. 10811, preferably the coding region thereof, conferred the production of or the increase in glycerol phosphate (lipid fraction) compared with the wild type control.

[99763] The nucleic acid sequence of GM02LC17485 from Glycine max, e.g. as shown in the respective line in column 5 of Table I, application no. 19, is unpublished. And the activity of the gene product thereof is the activity of GM02LC17485-protein.

[99764] Accordingly, in one embodiment, the process of the present invention for producing bis-glyceryl phosphate (polar fraction) in a non-human organism, like a microorganism or a plant or a part thereof, comprises increasing or generating the activity of a gene product with the activity of a gene product conferring the activity of “GM02LC17485-protein”, especially from Glycine max or its functional equivalent or its homolog, e.g. the increase of
[99765] (a) a gene product of a gene comprising the nucleic acid molecule as shown in the respective line in column 5 of Table I (whereby the respective line disclose in column 7 the fine chemical bis-glyceryl phosphate (polar fraction)), application no. 19, preferably the coding region thereof, or a homolog or a fragment thereof, and being depicted in the same respective line as said GM02LC17485, or a functional equivalent or a homolog thereof as shown in column 8 of Table I, application no. 19, preferably the coding region thereof, particularly a homolog or functional equivalent as shown in column 8 of Table I B, application no. 19, and being depicted in the same respective line as said GM02LC17485, and preferably the activity is increased non-targeted, or
[99766] (b) a polypeptide comprising a polypeptide, a consensus sequence or at least a polypeptide motif as shown in the respective line in column 5 of Table II or in column 8 of Table IV, application no. 19, respectively, and being depicted in the same respective line as said GM02LC17485, or a functional equivalent or a homolog thereof as depicted in column 8 of Table II, application no. 19, preferably a homolog or functional equivalent as depicted in column 8 of Table II B, application no. 19, and being depicted in the same respective line as said GM02LC17485, and preferably the activity is increased non-targeted, whereby the respective line disclose in column 7 the fine chemical bis-glyceryl phosphate (polar fraction).

[99767] Accordingly, in one embodiment, the molecule which activity is to be increased in the process of the invention is the gene product with an activity as a “GM02LC17485-protein”, preferably it is the molecule of section (a) or (b) of this paragraph.

[99768] In particular, it was observed that in plants, especially in Arabidopsis thaliana, increasing or generating the activity of a gene product non-targeted with the activity of a “GM02LC17485-protein”, preferably being encoded by a gene comprising the nucleic acid sequence SEQ ID NO. 46405, preferably the coding region thereof, conferred the production of or the increase in bis-glyceryl phosphate (polar fraction) compared with the wild type control.

[99769] The nucleic acid sequence of GM02LC19289 from Glycine max, e.g. as shown in the respective line in column 5 of Table I, application no. 19, is unpublished. And the activity of the gene product thereof is the activity of transcription factor.

[99770] Accordingly, in one embodiment, the process of the present invention for producing glycerol (lipid fraction) in a non-human organism, like a microorganism or a plant or a part thereof, comprises increasing or generating the activity of a gene product with the activity of a gene product conferring the activity of “transcription factor”, especially from Glycine max or its functional equivalent or its homolog, e.g. the increase of
[99771] (a) a gene product of a gene comprising the nucleic acid molecule as shown in the respective line in column 5 of Table I (whereby the respective line disclose in column 7 the fine chemical glycerol (lipid fraction)), application no. 19, preferably the coding region thereof, or a homolog or a fragment thereof, and being depicted in the same respective line as said GM02LC19289, or a functional equivalent or a homolog thereof as shown in column 8 of Table I, application no. 19, preferably the coding region thereof, particularly a homolog or functional equivalent as shown in column 8 of Table I B, application no. 19, and being depicted in the same respective line as said GM02LC19289, and preferably the activity is increased non-targeted, or
[99772] (b) a polypeptide comprising a polypeptide, a consensus sequence or at least a polypeptide motif as shown in the respective line in column 5 of Table II or in column 8 of Table IV, application no. 19, respectively, and being depicted in the same respective line as said GM02LC19289, or a functional equivalent or a homolog thereof as depicted in column 8 of Table II, application no. 19, preferably a homolog or functional equivalent as depicted in column 8 of Table II B, application no. 19, and being depicted in the same respective line as said GM02LC19289, and preferably the activity is increased non-targeted, whereby the respective line disclose in column 7 the fine chemical glycerol (lipid fraction).

[99773] Accordingly, in one embodiment, the molecule which activity is to be increased in the process of the invention is the gene product with an activity as a “transcription factor”, preferably it is the molecule of section (a) or (b) of this paragraph.

[99774] In particular, it was observed that in plants, especially in Arabidopsis thaliana, increasing or generating the activity of a gene product non-targeted with the activity of a “transcription factor”, preferably being encoded by a gene comprising the nucleic acid sequence SEQ ID NO. 46751, preferably the coding region thereof, conferred the production of or the increase in glycerol (lipid fraction) compared with the wild type control.

[99775] The nucleic acid sequence of GM02LC19289 from Glycine max, e.g. as shown in the respective line in column 5 of Table I, application no. 19, is unpublished. And the activity of the gene product thereof is the activity of transcription factor.

[99776] Accordingly, in one embodiment, the process of the present invention for producing glycerol phosphate (lipid fraction) in a non-human organism, like a microorganism or a plant or a part thereof, comprises increasing or generating the activity of a gene product with the activity of a gene product conferring the activity of “transcription factor”, especially from Glycine max or its functional equivalent or its homolog, e.g. the increase of
[99777] (a) a gene product of a gene comprising the nucleic acid molecule as shown in the respective line in column 5 of Table I (whereby the respective line disclose in column 7 the fine chemical glycerol phosphate (lipid fraction)), application no. 19, preferably the coding region thereof, or a homolog or a fragment thereof, and being depicted in the same respective line as said GM02LC19289, or a functional equivalent or a homolog thereof as shown in column 8 of Table I, application no. 19, preferably the coding region thereof, particularly a homolog or functional equivalent as shown in column 8 of Table I B, application no. 19, and being depicted in the same respective line as said GM02LC19289, and preferably the activity is increased non-targeted, or
[99778] (b) a polypeptide comprising a polypeptide, a consensus sequence or at least a polypeptide motif as shown in the respective line in column 5 of Table II or in column 8 of Table IV, application no. 19, respectively, and being depicted in the same respective line as said GM02LC19289, or a functional equivalent or a homolog thereof as depicted in column 8 of Table II, application no. 19, preferably a homolog or functional equivalent as depicted in column 8 of Table II B, application no. 19, and being depicted in the same respective line as said GM02LC19289, and preferably the activity is increased non-targeted, whereby the respective line disclose in column 7 the fine chemical glycerol phosphate (lipid fraction).

[99779] Accordingly, in one embodiment, the molecule which activity is to be increased in the process of the invention is the gene product with an activity as a “transcription factor”, preferably it is the molecule of section (a) or (b) of this paragraph.

[99780] In particular, it was observed that in plants, especially in Arabidopsis thaliana, increasing or generating the activity of a gene product non-targeted with the activity of a “transcription factor”, preferably being encoded by a gene comprising the nucleic acid sequence SEQ ID NO. 46751, preferably the coding region thereof, conferred the production of or the increase in glycerol phosphate (lipid fraction) compared with the wild type control.

[99781] The nucleic acid sequence of GM02LC21368 from Glycine max, e.g. as shown in the respective line in column 5 of Table I, application no. 19, is unpublished. And the activity of the gene product thereof is the activity of transcription factor.

[99782] Accordingly, in one embodiment, the process of the present invention for producing glycerol (polar fraction) in a non-human organism, like a microorganism or a plant or a part thereof, comprises increasing or generating the activity of a gene product with the activity of a gene product conferring the activity of “transcription factor”, especially from Glycine max or its functional equivalent or its homolog, e.g. the increase of
[99783] (a) a gene product of a gene comprising the nucleic acid molecule as shown in the respective line in column 5 of Table I (whereby the respective line disclose in column 7 the fine chemical glycerol (polar fraction)), application no. 19, preferably the coding region thereof, or a homolog or a fragment thereof, and being depicted in the same respective line as said GM02LC21368, or a functional equivalent or a homolog thereof as shown in column 8 of Table I, application no. 19, preferably the coding region thereof, particularly a homolog or functional equivalent as shown in column 8 of Table I B, application no. 19, and being depicted in the same respective line as said GM02LC21368, and preferably the activity is increased non-targeted, or
[99784] (b) a polypeptide comprising a polypeptide, a consensus sequence or at least a polypeptide motif as shown in the respective line in column 5 of Table II or in column 8 of Table IV, application no. 19, respectively, and being depicted in the same respective line as said GM02LC21368, or a functional equivalent or a homolog thereof as depicted in column 8 of Table II, application no. 19, preferably a homolog or functional equivalent as depicted in column 8 of Table II B, application no. 19, and being depicted in the same respective line as said GM02LC21368, and preferably the activity is increased non-targeted, whereby the respective line disclose in column 7 the fine chemical glycerol (polar fraction).

[99785] Accordingly, in one embodiment, the molecule which activity is to be increased in the process of the invention is the gene product with an activity as a “transcription factor”, preferably it is the molecule of section (a) or (b) of this paragraph.

[99786] In particular, it was observed that in plants, especially in Arabidopsis thaliana, increasing or generating the activity of a gene product non-targeted with the activity of a “transcription factor”, preferably being encoded by a gene comprising the nucleic acid sequence SEQ ID NO. 84198, preferably the coding region thereof, conferred the production of or the increase in glycerol (polar fraction) compared with the wild type control.

[99787] The nucleic acid sequence of GM02LC44512 from Glycine max, e.g. as shown in the respective line in column 5 of Table I, application no. 19, is unpublished. And the activity of the gene product thereof is the activity of cyclin D.

[99788] Accordingly, in one embodiment, the process of the present invention for producing glycerol phosphate (lipid fraction) in a non-human organism, like a microorganism or a plant or a part thereof, comprises increasing or generating the activity of a gene product with the activity of a gene product conferring the activity of “cyclin D”, especially from Glycine max or its functional equivalent or its homolog, e.g. the increase of
[99789] (a) a gene product of a gene comprising the nucleic acid molecule as shown in the respective line in column 5 of Table I (whereby the respective line disclose in column 7 the fine chemical glycerol phosphate (lipid fraction)), application no. 19, preferably the coding region thereof, or a homolog or a fragment thereof, and being depicted in the same respective line as said GM02LC44512, or a functional equivalent or a homolog thereof as shown in column 8 of Table I, application no. 19, preferably the coding region thereof, particularly a homolog or functional equivalent as shown in column 8 of Table I B, application no. 19, and being depicted in the same respective line as said GM02LC44512, and preferably the activity is increased non-targeted, or
[99790] (b) a polypeptide comprising a polypeptide, a consensus sequence or at least a polypeptide motif as shown in the respective line in column 5 of Table II or in column 8 of Table IV, application no. 19, respectively, and being depicted in the same respective line as said GM02LC44512, or a functional equivalent or a homolog thereof as depicted in column 8 of Table II, application no. 19, preferably a homolog or functional equivalent as depicted in column 8 of Table II B, application no. 19, and being depicted in the same respective line as said GM02LC44512, and preferably the activity is increased non-targeted, whereby the respective line disclose in column 7 the fine chemical glycerol phosphate (lipid fraction).

[99791] Accordingly, in one embodiment, the molecule which activity is to be increased in the process of the invention is the gene product with an activity as a “cyclin D”, preferably it is the molecule of section (a) or (b) of this paragraph.

[99792] In particular, it was observed that in plants, especially in Arabidopsis thaliana, increasing or generating the activity of a gene product non-targeted with the activity of a “cyclin D”, preferably being encoded by a gene comprising the nucleic acid sequence SEQ ID NO. 46850, preferably the coding region thereof, conferred the production of or the increase in glycerol phosphate (lipid fraction) compared with the wild type control.

[99793] The nucleic acid sequence of Sll1450 from Synechocystis sp., e.g. as shown in the respective line in column 5 of Table I, application no. 19, has been published in C. And the activity of the gene product thereof is the activity of nitrate/nitrite transport protein.

[99794] Accordingly, in one embodiment, the process of the present invention for producing bis-glyceryl phosphate (polar fraction) in a non-human organism, like a microorganism or a plant or a part thereof, comprises increasing or generating the activity of a gene product with the activity of a gene product conferring the activity of “nitrate/nitrite transport protein”, especially from Synechocystis sp. or its functional equivalent or its homolog, e.g. the increase of
[99795] (a) a gene product of a gene comprising the nucleic acid molecule as shown in the respective line in column 5 of Table I (whereby the respective line disclose in column 7 the fine chemical bis-glyceryl phosphate (polar fraction)), application no. 19, preferably the coding region thereof, or a homolog or a fragment thereof, and being depicted in the same respective line as said Sll1450, or a functional equivalent or a homolog thereof as shown in column 8 of Table 1, application no. 19, preferably the coding region thereof, particularly a homolog or functional equivalent as shown in column 8 of Table I B, application no. 19, and being depicted in the same respective line as said Sll1450, and preferably the activity is increased mitochondrial, or
[99796] (b) a polypeptide comprising a polypeptide, a consensus sequence or at least a polypeptide motif as shown in the respective line in column 5 of Table II or in column 8 of Table IV, application no. 19, respectively, and being depicted in the same respective line as said Sll1450, or a functional equivalent or a homolog thereof as depicted in column 8 of Table II, application no. 19, preferably a homolog or functional equivalent as depicted in column 8 of Table 11 B, application no. 19, and being depicted in the same respective line as said Sll1450, and preferably the activity is increased mitochondrial, whereby the respective line disclose in column 7 the fine chemical bis-glyceryl phosphate (polar fraction).

[99797] Accordingly, in one embodiment, the molecule which activity is to be increased in the process of the invention is the gene product with an activity as a “nitrate/nitrite transport protein”, preferably it is the molecule of section (a) or (b) of this paragraph.

[99798] In particular, it was observed that in plants, especially in Arabidopsis thaliana, increasing or generating the activity of a gene product mitochondrial with the activity of a “nitrate/nitrite transport protein”, preferably being encoded by a gene comprising the nucleic acid sequence SEQ ID NO. 54337, preferably the coding region thereof, conferred the production of or the increase in bis-glyceryl phosphate (polar fraction) compared with the wild type control.

[99799] The nucleic acid sequence of Sll1498 from Synechocystis sp., e.g. as shown in the respective line in column 5 of Table I, application no. 19, has been published in C. And the activity of the gene product thereof is the activity of carbamoyl-phosphate synthase subunit.

[99800] Accordingly, in one embodiment, the process of the present invention for producing glycerol phosphate (lipid fraction) in a non-human organism, like a microorganism or a plant or a part thereof, comprises increasing or generating the activity of a gene product with the activity of a gene product conferring the activity of “carbamoyl-phosphate synthase subunit”, especially from Synechocystis sp. or its functional equivalent or its homolog, e.g. the increase of
[99801] (a) a gene product of a gene comprising the nucleic acid molecule as shown in the respective line in column 5 of Table I (whereby the respective line disclose in column 7 the fine chemical glycerol phosphate (lipid fraction)), application no. 19, preferably the coding region thereof, or a homolog or a fragment thereof, and being depicted in the same respective line as said Sll1498, or a functional equivalent or a homolog thereof as shown in column 8 of Table I, application no. 19, preferably the coding region thereof, particularly a homolog or functional equivalent as shown in column 8 of Table I B, application no. 19, and being depicted in the same respective line as said Sll1498, and preferably the activity is increased non-targeted, or
[99802] (b) a polypeptide comprising a polypeptide, a consensus sequence or at least a polypeptide motif as shown in the respective line in column 5 of Table II or in column 8 of Table IV, application no. 19, respectively, and being depicted in the same respective line as said Sll1498, or a functional equivalent or a homolog thereof as depicted in column 8 of Table II, application no. 19, preferably a homolog or functional equivalent as depicted in column 8 of Table 11 B, application no. 19, and being depicted in the same respective line as said Sll1498, and preferably the activity is increased non-targeted, whereby the respective line disclose in column 7 the fine chemical glycerol phosphate (lipid fraction).

[99803] Accordingly, in one embodiment, the molecule which activity is to be increased in the process of the invention is the gene product with an activity as a “carbamoyl-phosphate synthase subunit”, preferably it is the molecule of section (a) or (b) of this paragraph.

[99804] In particular, it was observed that in plants, especially in Arabidopsis thaliana, increasing or generating the activity of a gene product non-targeted with the activity of a “carbamoylphosphate synthase subunit”, preferably being encoded by a gene comprising the nucleic acid sequence SEQ ID NO. 95047, preferably the coding region thereof, conferred the production of or the increase in glycerol phosphate (lipid fraction) compared with the wild type control.

[99805] The nucleic acid sequence of Sll1522 from Synechocystis sp., e.g. as shown in the respective line in column 5 of Table I, application no. 19, has been published in C. And the activity of the gene product thereof is the activity of CDP-diacylglycerol-glycerol-3-phosphate 3-phosphatidyltransferase.

[99806] Accordingly, in one embodiment, the process of the present invention for producing glycerol (lipid fraction) in a non-human organism, like a microorganism or a plant or a part thereof, comprises increasing or generating the activity of a gene product with the activity of a gene product conferring the activity of “CDP-diacylglycerol-glycerol-3-phosphate 3-phosphatidyltransferase”, especially from Synechocystis sp. or its functional equivalent or its homolog, e.g. the increase of
[99807] (a) a gene product of a gene comprising the nucleic acid molecule as shown in the respective line in column 5 of Table I (whereby the respective line disclose in column 7 the fine chemical glycerol (lipid fraction)), application no. 19, preferably the coding region thereof, or a homolog or a fragment thereof, and being depicted in the same respective line as said Sll1522, or a functional equivalent or a homolog thereof as shown in column 8 of Table I, application no. 19, preferably the coding region thereof, particularly a homolog or functional equivalent as shown in column 8 of Table I B, application no. 19, and being depicted in the same respective line as said Sll1522, and preferably the activity is increased plastidic, or
[99808] (b) a polypeptide comprising a polypeptide, a consensus sequence or at least a polypeptide motif as shown in the respective line in column 5 of Table II or in column 8 of Table IV, application no. 19, respectively, and being depicted in the same respective line as said Sll1522, or a functional equivalent or a homolog thereof as depicted in column 8 of Table II, application no. 19, preferably a homolog or functional equivalent as depicted in column 8 of Table 11 B, application no. 19, and being depicted in the same respective line as said Sll1522, and preferably the activity is increased plastidic, whereby the respective line disclose in column 7 the fine chemical glycerol (lipid fraction).

[99809] Accordingly, in one embodiment, the molecule which activity is to be increased in the process of the invention is the gene product with an activity as a “CDP-diacylglycerol-glycerol-3-phosphate 3-phosphatidyltransferase”, preferably it is the molecule of section (a) or (b) of this paragraph.

[99810] In particular, it was observed that in plants, especially in Arabidopsis thaliana, increasing or generating the activity of a gene product plastidic with the activity of a “CDP-diacylglycerolglycerol-3-phosphate 3-phosphatidyltransferase”, preferably being encoded by a gene comprising the nucleic acid sequence SEQ ID NO. 54452, preferably the coding region thereof, conferred the production of or the increase in glycerol (lipid fraction) compared with the wild type control.

[99811] The nucleic acid sequence of Sll1815 from Synechocystis sp., e.g. as shown in the respective line in column 5 of Table I, application no. 19, has been published in C. And the activity of the gene product thereof is the activity of adenylate kinase.

[99812] Accordingly, in one embodiment, the process of the present invention for producing bis-glyceryl phosphate (polar fraction) in a non-human organism, like a microorganism or a plant or a part thereof, comprises increasing or generating the activity of a gene product with the activity of a gene product conferring the activity of “adenylate kinase”, especially from Synechocystis sp. or its functional equivalent or its homolog, e.g. the increase of
[99813] (a) a gene product of a gene comprising the nucleic acid molecule as shown in the respective line in column 5 of Table I (whereby the respective line disclose in column 7 the fine chemical bis-glyceryl phosphate (polar fraction)), application no. 19, preferably the coding region thereof, or a homolog or a fragment thereof, and being depicted in the same respective line as said Sll1815, or a functional equivalent or a homolog thereof as shown in column 8 of Table I, application no. 19, preferably the coding region thereof, particularly a homolog or functional equivalent as shown in column 8 of Table I B, application no. 19, and being depicted in the same respective line as said Sll1815, and preferably the activity is increased mitochondrial, or
[99814] (b) a polypeptide comprising a polypeptide, a consensus sequence or at least a polypeptide motif as shown in the respective line in column 5 of Table II or in column 8 of Table IV, application no. 19, respectively, and being depicted in the same respective line as said Sll1815, or a functional equivalent or a homolog thereof as depicted in column 8 of Table II, application no. 19, preferably a homolog or functional equivalent as depicted in column 8 of Table II B, application no. 19, and being depicted in the same respective line as said Sll1815, and preferably the activity is increased mitochondrial, whereby the respective line disclose in column 7 the fine chemical bis-glyceryl phosphate (polar fraction).

[99815] Accordingly, in one embodiment, the molecule which activity is to be increased in the process of the invention is the gene product with an activity as a “adenylate kinase”, preferably it is the molecule of section (a) or (b) of this paragraph.

[99816] In particular, it was observed that in plants, especially in Arabidopsis thaliana, increasing or generating the activity of a gene product mitochondrial with the activity of a “adenylate kinase”, preferably being encoded by a gene comprising the nucleic acid sequence SEQ ID NO. 85808, preferably the coding region thereof, conferred the production of or the increase in bis-glyceryl phosphate (polar fraction) compared with the wild type control.

[99817] The nucleic acid sequence of Sll1848 from Synechocystis sp., e.g. as shown in the respective line in column 5 of Table I, application no. 19, has been published in C. And the activity of the gene product thereof is the activity of acyl transferase.

[99818] Accordingly, in one embodiment, the process of the present invention for producing glycerol (lipid fraction) in a non-human organism, like a microorganism or a plant or a part thereof, comprises increasing or generating the activity of a gene product with the activity of a gene product conferring the activity of “acyl transferase”, especially from Synechocystis sp. or its functional equivalent or its homolog, e.g. the increase of
[99819] (a) a gene product of a gene comprising the nucleic acid molecule as shown in the respective line in column 5 of Table I (whereby the respective line disclose in column 7 the fine chemical glycerol (lipid fraction)), application no. 19, preferably the coding region thereof, or a homolog or a fragment thereof, and being depicted in the same respective line as said Sll1848, or a functional equivalent or a homolog thereof as shown in column 8 of Table I, application no. 19, preferably the coding region thereof, particularly a homolog or functional equivalent as shown in column 8 of Table I B, application no. 19, and being depicted in the same respective line as said Sll1848, and preferably the activity is increased plastidic, or
[99820] (b) a polypeptide comprising a polypeptide, a consensus sequence or at least a polypeptide motif as shown in the respective line in column 5 of Table II or in column 8 of Table IV, application no. 19, respectively, and being depicted in the same respective line as said Sll1848, or a functional equivalent or a homolog thereof as depicted in column 8 of Table II, application no. 19, preferably a homolog or functional equivalent as depicted in column 8 of Table 11 B, application no. 19, and being depicted in the same respective line as said Sll1848, and preferably the activity is increased plastidic, whereby the respective line disclose in column 7 the fine chemical glycerol (lipid fraction).

[99821] Accordingly, in one embodiment, the molecule which activity is to be increased in the process of the invention is the gene product with an activity as a “acyl transferase”, preferably it is the molecule of section (a) or (b) of this paragraph.

[99822] In particular, it was observed that in plants, especially in Arabidopsis thaliana, increasing or generating the activity of a gene product plastidic with the activity of a “acyl transferase”, preferably being encoded by a gene comprising the nucleic acid sequence SEQ ID NO. 86447, preferably the coding region thereof, conferred the production of or the increase in glycerol (lipid fraction) compared with the wild type control.

[99823] The nucleic acid sequence of Sll1917 from Synechocystis sp., e.g. as shown in the respective line in column 5 of Table I, application no. 19, has been published in C. And the activity of the gene product thereof is the activity of coproporphyrinogen III oxidase.

[99824] Accordingly, in one embodiment, the process of the present invention for producing glycerol phosphate (lipid fraction) in a non-human organism, like a microorganism or a plant or a part thereof, comprises increasing or generating the activity of a gene product with the activity of a gene product conferring the activity of “coproporphyrinogen III oxidase”, especially from Synechocystis sp. or its functional equivalent or its homolog, e.g. the increase of
[99825] (a) a gene product of a gene comprising the nucleic acid molecule as shown in the respective line in column 5 of Table I (whereby the respective line disclose in column 7 the fine chemical glycerol phosphate (lipid fraction)), application no. 19, preferably the coding region thereof, or a homolog or a fragment thereof, and being depicted in the same respective line as said Sll1917, or a functional equivalent or a homolog thereof as shown in column 8 of Table I, application no. 19, preferably the coding region thereof, particularly a homolog or functional equivalent as shown in column 8 of Table I B, application no. 19, and being depicted in the same respective line as said Sll1917, and preferably the activity is increased mitochondrial, or
[99826] (b) a polypeptide comprising a polypeptide, a consensus sequence or at least a polypeptide motif as shown in the respective line in column 5 of Table II or in column 8 of Table IV, application no. 19, respectively, and being depicted in the same respective line as said Sll1917, or a functional equivalent or a homolog thereof as depicted in column 8 of Table II, application no. 19, preferably a homolog or functional equivalent as depicted in column 8 of Table II B, application no. 19, and being depicted in the same respective line as said Sll1917, and preferably the activity is increased mitochondrial, whereby the respective line disclose in column 7 the fine chemical glycerol phosphate (lipid fraction).

[99827] Accordingly, in one embodiment, the molecule which activity is to be increased in the process of the invention is the gene product with an activity as a “coproporphyrinogen III oxidase”, preferably it is the molecule of section (a) or (b) of this paragraph.

[99828] In particular, it was observed that in plants, especially in Arabidopsis thaliana, increasing or generating the activity of a gene product mitochondrial with the activity of a “coproporphyrinogen III oxidase”, preferably being encoded by a gene comprising the nucleic acid sequence SEQ ID NO. 11471, preferably the coding region thereof, conferred the production of or the increase in glycerol phosphate (lipid fraction) compared with the wild type control.

[99829] The nucleic acid sequence of Slr0338 from Synechocystis sp., e.g. as shown in the respective line in column 5 of Table I, application no. 19, has been published in C. And the activity of the gene product thereof is the activity of oxidoreductase.

[99830] Accordingly, in one embodiment, the process of the present invention for producing glycerol (lipid fraction) in a non-human organism, like a microorganism or a plant or a part thereof, comprises increasing or generating the activity of a gene product with the activity of a gene product conferring the activity of “oxidoreductase”, especially from Synechocystis sp. or its functional equivalent or its homolog, e.g. the increase of
[99831] (a) a gene product of a gene comprising the nucleic acid molecule as shown in the respective line in column 5 of Table I (whereby the respective line disclose in column 7 the fine chemical glycerol (lipid fraction)), application no. 19, preferably the coding region thereof, or a homolog or a fragment thereof, and being depicted in the same respective line as said Slr0338, or a functional equivalent or a homolog thereof as shown in column 8 of Table I, application no. 19, preferably the coding region thereof, particularly a homolog or functional equivalent as shown in column 8 of Table I B, application no. 19, and being depicted in the same respective line as said Slr0338, and preferably the activity is increased non-targeted, or
[99832] (b) a polypeptide comprising a polypeptide, a consensus sequence or at least a polypeptide motif as shown in the respective line in column 5 of Table II or in column 8 of Table IV, application no. 19, respectively, and being depicted in the same respective line as said Slr0338, or a functional equivalent or a homolog thereof as depicted in column 8 of Table II, application no. 19, preferably a homolog or functional equivalent as depicted in column 8 of Table II B, application no. 19, and being depicted in the same respective line as said Slr0338, and preferably the activity is increased non-targeted, whereby the respective line disclose in column 7 the fine chemical glycerol (lipid fraction).

[99833] Accordingly, in one embodiment, the molecule which activity is to be increased in the process of the invention is the gene product with an activity as a “oxidoreductase”, preferably it is the molecule of section (a) or (b) of this paragraph.

[99834] In particular, it was observed that in plants, especially in Arabidopsis thaliana, increasing or generating the activity of a gene product non-targeted with the activity of a “oxidoreductase”, preferably being encoded by a gene comprising the nucleic acid sequence SEQ ID NO. 11990, preferably the coding region thereof, conferred the production of or the increase in glycerol (lipid fraction) compared with the wild type control.

[99835] The nucleic acid sequence of Slr0338 from Synechocystis sp., e.g. as shown in the respective line in column 5 of Table I, application no. 19, has been published in C. And the activity of the gene product thereof is the activity of oxidoreductase.

[99836] Accordingly, in one embodiment, the process of the present invention for producing glycerol phosphate (lipid fraction) in a non-human organism, like a microorganism or a plant or a part thereof, comprises increasing or generating the activity of a gene product with the activity of a gene product conferring the activity of “oxidoreductase”, especially from Synechocystis sp. or its functional equivalent or its homolog, e.g. the increase of
[99837] (a) a gene product of a gene comprising the nucleic acid molecule as shown in the respective line in column 5 of Table I (whereby the respective line disclose in column 7 the fine chemical glycerol phosphate (lipid fraction)), application no. 19, preferably the coding region thereof, or a homolog or a fragment thereof, and being depicted in the same respective line as said Slr0338, or a functional equivalent or a homolog thereof as shown in column 8 of Table I, application no. 19, preferably the coding region thereof, particularly a homolog or functional equivalent as shown in column 8 of Table I B, application no. 19, and being depicted in the same respective line as said Slr0338, and preferably the activity is increased plastidic, or
[99838] (b) a polypeptide comprising a polypeptide, a consensus sequence or at least a polypeptide motif as shown in the respective line in column 5 of Table II or in column 8 of Table IV, application no. 19, respectively, and being depicted in the same respective line as said Slr0338, or a functional equivalent or a homolog thereof as depicted in column 8 of Table II, application no. 19, preferably a homolog or functional equivalent as depicted in column 8 of Table II B, application no. 19, and being depicted in the same respective line as said Slr0338, and preferably the activity is increased plastidic, whereby the respective line disclose in column 7 the fine chemical glycerol phosphate (lipid fraction).

[99839] Accordingly, in one embodiment, the molecule which activity is to be increased in the process of the invention is the gene product with an activity as a “oxidoreductase”, preferably it is the molecule of section (a) or (b) of this paragraph.

[99840] In particular, it was observed that in plants, especially in Arabidopsis thaliana, increasing or generating the activity of a gene product plastidic with the activity of a “oxidoreductase”, preferably being encoded by a gene comprising the nucleic acid sequence SEQ ID NO. 11990, preferably the coding region thereof, conferred the production of or the increase in glycerol phosphate (lipid fraction) compared with the wild type control.

[99841] The nucleic acid sequence of Slr0905 from Synechocystis sp., e.g. as shown in the respective line in column 5 of Table I, application no. 19, has been published in C. And the activity of the gene product thereof is the activity of Mg-protoporphyrin IX monomethyl ester oxidative cyclase 66 kD subunit.

[99842] Accordingly, in one embodiment, the process of the present invention for producing glycerol (polar fraction) in a non-human organism, like a microorganism or a plant or a part thereof, comprises increasing or generating the activity of a gene product with the activity of a gene product conferring the activity of “Mg-protoporphyrin IX monomethyl ester oxidative cyclase 66 kD subunit”, especially from Synechocystis sp. or its functional equivalent or its homolog, e.g. the increase of
[99843] (a) a gene product of a gene comprising the nucleic acid molecule as shown in the respective line in column 5 of Table I (whereby the respective line disclose in column 7 the fine chemical glycerol (polar fraction)), application no. 19, preferably the coding region thereof, or a homolog or a fragment thereof, and being depicted in the same respective line as said Slr0905, or a functional equivalent or a homolog thereof as shown in column 8 of Table I, application no. 19, preferably the coding region thereof, particularly a homolog or functional equivalent as shown in column 8 of Table I B, application no. 19, and being depicted in the same respective line as said Slr0905, and preferably the activity is increased mitochondrial, or
[99844] (b) a polypeptide comprising a polypeptide, a consensus sequence or at least a polypeptide motif as shown in the respective line in column 5 of Table II or in column 8 of Table IV, application no. 19, respectively, and being depicted in the same respective line as said Slr0905, or a functional equivalent or a homolog thereof as depicted in column 8 of Table II, application no. 19, preferably a homolog or functional equivalent as depicted in column 8 of Table II B, application no. 19, and being depicted in the same respective line as said Slr0905, and preferably the activity is increased mitochondrial, whereby the respective line disclose in column 7 the fine chemical glycerol (polar fraction).

[99845] Accordingly, in one embodiment, the molecule which activity is to be increased in the process of the invention is the gene product with an activity as a “Mg-protoporphyrin IX monomethyl ester oxidative cyclase 66 kD subunit”, preferably it is the molecule of section (a) or (b) of this paragraph.

[99846] In particular, it was observed that in plants, especially in Arabidopsis thaliana, increasing or generating the activity of a gene product mitochondrial with the activity of a “Mg-protoporphyrin IX monomethyl ester oxidative cyclase 66 kD subunit”, preferably being encoded by a gene comprising the nucleic acid sequence SEQ ID NO. 147407, preferably the coding region thereof, conferred the production of or the increase in glycerol (polar fraction) compared with the wild type control.

[99847] The nucleic acid sequence of Slr1096 from Synechocystis sp., e.g. as shown in the respective line in column 5 of Table I, application no. 19, has been published in C. And the activity of the gene product thereof is the activity of dihydrolipoamide dehydrogenase.

[99848] Accordingly, in one embodiment, the process of the present invention for producing bis-glyceryl phosphate (polar fraction) in a non-human organism, like a microorganism or a plant or a part thereof, comprises increasing or generating the activity of a gene product with the activity of a gene product conferring the activity of “dihydrolipoamide dehydrogenase”, especially from Synechocystis sp. or its functional equivalent or its homolog, e.g. the increase of
[99849] (a) a gene product of a gene comprising the nucleic acid molecule as shown in the respective line in column 5 of Table I (whereby the respective line disclose in column 7 the fine chemical bis-glyceryl phosphate (polar fraction)), application no. 19, preferably the coding region thereof, or a homolog or a fragment thereof, and being depicted in the same respective line as said Slr1096, or a functional equivalent or a homolog thereof as shown in column 8 of Table I, application no. 19, preferably the coding region thereof, particularly a homolog or functional equivalent as shown in column 8 of Table I B, application no. 19, and being depicted in the same respective line as said Slr1096, and preferably the activity is increased non-targeted, or
[99850] (b) a polypeptide comprising a polypeptide, a consensus sequence or at least a polypeptide motif as shown in the respective line in column 5 of Table II or in column 8 of Table IV, application no. 19, respectively, and being depicted in the same respective line as said Slr1096, or a functional equivalent or a homolog thereof as depicted in column 8 of Table II, application no. 19, preferably a homolog or functional equivalent as depicted in column 8 of Table II B, application no. 19, and being depicted in the same respective line as said Slr1096, and preferably the activity is increased non-targeted, whereby the respective line disclose in column 7 the fine chemical bis-glyceryl phosphate (polar fraction).

[99851] Accordingly, in one embodiment, the molecule which activity is to be increased in the process of the invention is the gene product with an activity as a “dihydrolipoamide dehydrogenase”, preferably it is the molecule of section (a) or (b) of this paragraph.

[99852] In particular, it was observed that in plants, especially in Arabidopsis thaliana, increasing or generating the activity of a gene product non-targeted with the activity of a “dihydrolipoamide dehydrogenase”, preferably being encoded by a gene comprising the nucleic acid sequence SEQ ID NO. 57734, preferably the coding region thereof, conferred the production of or the increase in bis-glyceryl phosphate (polar fraction) compared with the wild type control.

[99853] The nucleic acid sequence of Slr1099 from Synechocystis sp., e.g. as shown in the respective line in column 5 of Table I, application no. 19, has been published in C. And the activity of the gene product thereof is the activity of aromatic acid decarboxylase.

[99854] Accordingly, in one embodiment, the process of the present invention for producing glycerol phosphate (lipid fraction) in a non-human organism, like a microorganism or a plant or a part thereof, comprises increasing or generating the activity of a gene product with the activity of a gene product conferring the activity of “aromatic acid decarboxylase”, especially from Synechocystis sp. or its functional equivalent or its homolog, e.g. the increase of
[99855] (a) a gene product of a gene comprising the nucleic acid molecule as shown in the respective line in column 5 of Table I (whereby the respective line disclose in column 7 the fine chemical glycerol phosphate (lipid fraction)), application no. 19, preferably the coding region thereof, or a homolog or a fragment thereof, and being depicted in the same respective line as said Slr1099, or a functional equivalent or a homolog thereof as shown in column 8 of Table I, application no. 19, preferably the coding region thereof, particularly a homolog or functional equivalent as shown in column 8 of Table I B, application no. 19, and being depicted in the same respective line as said Slr1099, and preferably the activity is increased mitochondrial, or
[99856] (b) a polypeptide comprising a polypeptide, a consensus sequence or at least a polypeptide motif as shown in the respective line in column 5 of Table II or in column 8 of Table IV, application no. 19, respectively, and being depicted in the same respective line as said Slr1099, or a functional equivalent or a homolog thereof as depicted in column 8 of Table II, application no. 19, preferably a homolog or functional equivalent as depicted in column 8 of Table II B, application no. 19, and being depicted in the same respective line as said Slr1099, and preferably the activity is increased mitochondrial, whereby the respective line disclose in column 7 the fine chemical glycerol phosphate (lipid fraction).

[99857] Accordingly, in one embodiment, the molecule which activity is to be increased in the process of the invention is the gene product with an activity as a “aromatic acid decarboxylase”, preferably it is the molecule of section (a) or (b) of this paragraph.

[99858] In particular, it was observed that in plants, especially in Arabidopsis thaliana, increasing or generating the activity of a gene product mitochondrial with the activity of a “aromatic acid decarboxylase”, preferably being encoded by a gene comprising the nucleic acid sequence SEQ ID NO. 116341, preferably the coding region thereof, conferred the production of or the increase in glycerol phosphate (lipid fraction) compared with the wild type control.

[99859] The nucleic acid sequence of Slr1250 from Synechocystis sp., e.g. as shown in the respective line in column 5 of Table I, application no. 19, has been published in C. And the activity of the gene product thereof is the activity of phosphate import ATP-binding protein.

[99860] Accordingly, in one embodiment, the process of the present invention for producing glycerol phosphate (lipid fraction) in a non-human organism, like a microorganism or a plant or a part thereof, comprises increasing or generating the activity of a gene product with the activity of a gene product conferring the activity of “phosphate import ATP-binding protein”, especially from Synechocystis sp. or its functional equivalent or its homolog, e.g. the increase of
[99861] (a) a gene product of a gene comprising the nucleic acid molecule as shown in the respective line in column 5 of Table I (whereby the respective line disclose in column 7 the fine chemical glycerol phosphate (lipid fraction)), application no. 19, preferably the coding region thereof, or a homolog or a fragment thereof, and being depicted in the same respective line as said Slr1250, or a functional equivalent or a homolog thereof as shown in column 8 of Table I, application no. 19, preferably the coding region thereof, particularly a homolog or functional equivalent as shown in column 8 of Table I B, application no. 19, and being depicted in the same respective line as said Slr1250, and preferably the activity is increased mitochondrial, or
[99862] (b) a polypeptide comprising a polypeptide, a consensus sequence or at least a polypeptide motif as shown in the respective line in column 5 of Table II or in column 8 of Table IV, application no. 19, respectively, and being depicted in the same respective line as said Slr1250, or a functional equivalent or a homolog thereof as depicted in column 8 of Table II, application no. 19, preferably a homolog or functional equivalent as depicted in column 8 of Table II B, application no. 19, and being depicted in the same respective line as said Slr1250, and preferably the activity is increased mitochondrial, whereby the respective line disclose in column 7 the fine chemical glycerol phosphate (lipid fraction).

[99863] Accordingly, in one embodiment, the molecule which activity is to be increased in the process of the invention is the gene product with an activity as a “phosphate import ATP-binding protein”, preferably it is the molecule of section (a) or (b) of this paragraph.

[99864] In particular, it was observed that in plants, especially in Arabidopsis thaliana, increasing or generating the activity of a gene product mitochondrial with the activity of a “phosphate import ATP-binding protein”, preferably being encoded by a gene comprising the nucleic acid sequence SEQ ID NO. 116460, preferably the coding region thereof, conferred the production of or the increase in glycerol phosphate (lipid fraction) compared with the wild type control.

[99865] The nucleic acid sequence of Slr1312 from Synechocystis sp., e.g. as shown in the respective line in column 5 of Table I, application no. 19, has been published in C. And the activity of the gene product thereof is the activity of arginine decarboxylase.

[99866] Accordingly, in one embodiment, the process of the present invention for producing glycerol phosphate (lipid fraction) in a non-human organism, like a microorganism or a plant or a part thereof, comprises increasing or generating the activity of a gene product with the activity of a gene product conferring the activity of “arginine decarboxylase”, especially from Synechocystis sp. or its functional equivalent or its homolog, e.g. the increase of
[99867] (a) a gene product of a gene comprising the nucleic acid molecule as shown in the respective line in column 5 of Table I (whereby the respective line disclose in column 7 the fine chemical glycerol phosphate (lipid fraction)), application no. 19, preferably the coding region thereof, or a homolog or a fragment thereof, and being depicted in the same respective line as said Slr1312, or a functional equivalent or a homolog thereof as shown in column 8 of Table I, application no. 19, preferably the coding region thereof, particularly a homolog or functional equivalent as shown in column 8 of Table I B, application no. 19, and being depicted in the same respective line as said Slr1312, and preferably the activity is increased non-targeted, or
[99868] (b) a polypeptide comprising a polypeptide, a consensus sequence or at least a polypeptide motif as shown in the respective line in column 5 of Table II or in column 8 of Table IV, application no. 19, respectively, and being depicted in the same respective line as said Slr1312, or a functional equivalent or a homolog thereof as depicted in column 8 of Table II, application no. 19, preferably a homolog or functional equivalent as depicted in column 8 of Table II B, application no. 19, and being depicted in the same respective line as said Slr1312, and preferably the activity is increased non-targeted, whereby the respective line disclose in column 7 the fine chemical glycerol phosphate (lipid fraction).

[99869] Accordingly, in one embodiment, the molecule which activity is to be increased in the process of the invention is the gene product with an activity as a “arginine decarboxylase”, preferably it is the molecule of section (a) or (b) of this paragraph.

[99870] In particular, it was observed that in plants, especially in Arabidopsis thaliana, increasing or generating the activity of a gene product non-targeted with the activity of a “arginine decarboxylase”, preferably being encoded by a gene comprising the nucleic acid sequence SEQ ID NO. 58324, preferably the coding region thereof, conferred the production of or the increase in glycerol phosphate (lipid fraction) compared with the wild type control.

[99871] The nucleic acid sequence of Slr1420 from Synechocystis sp., e.g. as shown in the respective line in column 5 of Table I, application no. 19, has been published in C. And the activity of the gene product thereof is the activity of carbohydrate kinase.

[99872] Accordingly, in one embodiment, the process of the present invention for producing glycerol phosphate (lipid fraction) in a non-human organism, like a microorganism or a plant or a part thereof, comprises increasing or generating the activity of a gene product with the activity of a gene product conferring the activity of “carbohydrate kinase”, especially from Synechocystis sp. or its functional equivalent or its homolog, e.g. the increase of
[99873] (a) a gene product of a gene comprising the nucleic acid molecule as shown in the respective line in column 5 of Table I (whereby the respective line disclose in column 7 the fine chemical glycerol phosphate (lipid fraction)), application no. 19, preferably the coding region thereof, or a homolog or a fragment thereof, and being depicted in the same respective line as said Slr1420, or a functional equivalent or a homolog thereof as shown in column 8 of Table I, application no. 19, preferably the coding region thereof, particularly a homolog or functional equivalent as shown in column 8 of Table I B, application no. 19, and being depicted in the same respective line as said Slr1420, and preferably the activity is increased non-targeted, or
[99874] (b) a polypeptide comprising a polypeptide, a consensus sequence or at least a polypeptide motif as shown in the respective line in column 5 of Table II or in column 8 of Table IV, application no. 19, respectively, and being depicted in the same respective line as said Slr1420, or a functional equivalent or a homolog thereof as depicted in column 8 of Table II, application no. 19, preferably a homolog or functional equivalent as depicted in column 8 of Table II B, application no. 19, and being depicted in the same respective line as said Slr1420, and preferably the activity is increased non-targeted, whereby the respective line disclose in column 7 the fine chemical glycerol phosphate (lipid fraction).

[99875] Accordingly, in one embodiment, the molecule which activity is to be increased in the process of the invention is the gene product with an activity as a “carbohydrate kinase”, preferably it is the molecule of section (a) or (b) of this paragraph.

[99876] In particular, it was observed that in plants, especially in Arabidopsis thaliana, increasing or generating the activity of a gene product non-targeted with the activity of a “carbohydrate kinase”, preferably being encoded by a gene comprising the nucleic acid sequence SEQ ID NO. 58590, preferably the coding region thereof, conferred the production of or the increase in glycerol phosphate (lipid fraction) compared with the wild type control.

[99877] The nucleic acid sequence of Slr1467 from Synechocystis sp., e.g. as shown in the respective line in column 5 of Table I, application no. 19, has been published in C. And the activity of the gene product thereof is the activity of precorrin-8X methylmutase.

[99878] Accordingly, in one embodiment, the process of the present invention for producing bis-glyceryl phosphate (polar fraction) in a non-human organism, like a microorganism or a plant or a part thereof, comprises increasing or generating the activity of a gene product with the activity of a gene product conferring the activity of “precorrin-8X methylmutase”, especially from Synechocystis sp. or its functional equivalent or its homolog, e.g. the increase of
[99879] (a) a gene product of a gene comprising the nucleic acid molecule as shown in the respective line in column 5 of Table I (whereby the respective line disclose in column 7 the fine chemical bis-glyceryl phosphate (polar fraction)), application no. 19, preferably the coding region thereof, or a homolog or a fragment thereof, and being depicted in the same respective line as said Slr1467, or a functional equivalent or a homolog thereof as shown in column 8 of Table I, application no. 19, preferably the coding region thereof, particularly a homolog or functional equivalent as shown in column 8 of Table I B, application no. 19, and being depicted in the same respective line as said Slr1467, and preferably the activity is increased plastidic, or
[99880] (b) a polypeptide comprising a polypeptide, a consensus sequence or at least a polypeptide motif as shown in the respective line in column 5 of Table II or in column 8 of Table IV, application no. 19, respectively, and being depicted in the same respective line as said Slr1467, or a functional equivalent or a homolog thereof as depicted in column 8 of Table II, application no. 19, preferably a homolog or functional equivalent as depicted in column 8 of Table II B, application no. 19, and being depicted in the same respective line as said Slr1467, and preferably the activity is increased plastidic, whereby the respective line disclose in column 7 the fine chemical bis-glyceryl phosphate (polar fraction).

[99881] Accordingly, in one embodiment, the molecule which activity is to be increased in the process of the invention is the gene product with an activity as a “precorrin-8X methylmutase”, preferably it is the molecule of section (a) or (b) of this paragraph.

[99882] In particular, it was observed that in plants, especially in Arabidopsis thaliana, increasing or generating the activity of a gene product plastidic with the activity of a “precorrin-8X methylmutase”, preferably being encoded by a gene comprising the nucleic acid sequence SEQ ID NO. 154137, preferably the coding region thereof, conferred the production of or the increase in bis-glyceryl phosphate (polar fraction) compared with the wild type control.

[99883] The nucleic acid sequence of Slr1743 from Synechocystis sp., e.g. as shown in the respective line in column 5 of Table I, application no. 19, has been published in C. And the activity of the gene product thereof is the activity of NADH dehydrogenase.

[99884] Accordingly, in one embodiment, the process of the present invention for producing bis-glyceryl phosphate (polar fraction) in a non-human organism, like a microorganism or a plant or a part thereof, comprises increasing or generating the activity of a gene product with the activity of a gene product conferring the activity of “NADH dehydrogenase”, especially from Synechocystis sp. or its functional equivalent or its homolog, e.g. the increase of
[99885] (a) a gene product of a gene comprising the nucleic acid molecule as shown in the respective line in column 5 of Table I (whereby the respective line disclose in column 7 the fine chemical bis-glyceryl phosphate (polar fraction)), application no. 19, preferably the coding region thereof, or a homolog or a fragment thereof, and being depicted in the same respective line as said Slr1743, or a functional equivalent or a homolog thereof as shown in column 8 of Table I, application no. 19, preferably the coding region thereof, particularly a homolog or functional equivalent as shown in column 8 of Table I B, application no. 19, and being depicted in the same respective line as said Slr1743, and preferably the activity is increased plastidic, or
[99886] (b) a polypeptide comprising a polypeptide, a consensus sequence or at least a polypeptide motif as shown in the respective line in column 5 of Table II or in column 8 of Table IV, application no. 19, respectively, and being depicted in the same respective line as said Slr1743, or a functional equivalent or a homolog thereof as depicted in column 8 of Table II, application no. 19, preferably a homolog or functional equivalent as depicted in column 8 of Table II B, application no. 19, and being depicted in the same respective line as said Slr1743, and preferably the activity is increased plastidic, whereby the respective line disclose in column 7 the fine chemical bis-glyceryl phosphate (polar fraction).

[99887] Accordingly, in one embodiment, the molecule which activity is to be increased in the process of the invention is the gene product with an activity as a “NADH dehydrogenase”, preferably it is the molecule of section (a) or (b) of this paragraph.

[99888] In particular, it was observed that in plants, especially in Arabidopsis thaliana, increasing or generating the activity of a gene product plastidic with the activity of a “NADH dehydrogenase”, preferably being encoded by a gene comprising the nucleic acid sequence SEQ ID NO. 147457, preferably the coding region thereof, conferred the production of or the increase in bis-glyceryl phosphate (polar fraction) compared with the wild type control.

[99889] The nucleic acid sequence of Slr2035 from Synechocystis sp., e.g. as shown in the respective line in column 5 of Table I, application no. 19, has been published in C. And the activity of the gene product thereof is the activity of glutamate 5-kinase.

[99890] Accordingly, in one embodiment, the process of the present invention for producing glycerol (lipid fraction) in a non-human organism, like a microorganism or a plant or a part thereof, comprises increasing or generating the activity of a gene product with the activity of a gene product conferring the activity of “glutamate 5-kinase”, especially from Synechocystis sp. or its functional equivalent or its homolog, e.g. the increase of
[99891] (a) a gene product of a gene comprising the nucleic acid molecule as shown in the respective line in column 5 of Table I (whereby the respective line disclose in column 7 the fine chemical glycerol (lipid fraction)), application no. 19, preferably the coding region thereof, or a homolog or a fragment thereof, and being depicted in the same respective line as said Slr2035, or a functional equivalent or a homolog thereof as shown in column 8 of Table I, application no. 19, preferably the coding region thereof, particularly a homolog or functional equivalent as shown in column 8 of Table I B, application no. 19, and being depicted in the same respective line as said Slr2035, and preferably the activity is increased mitochondrial, or
[99892] (b) a polypeptide comprising a polypeptide, a consensus sequence or at least a polypeptide motif as shown in the respective line in column 5 of Table II or in column 8 of Table IV, application no. 19, respectively, and being depicted in the same respective line as said Slr2035, or a functional equivalent or a homolog thereof as depicted in column 8 of Table II, application no. 19, preferably a homolog or functional equivalent as depicted in column 8 of Table II B, application no. 19, and being depicted in the same respective line as said Slr2035, and preferably the activity is increased mitochondrial, whereby the respective line disclose in column 7 the fine chemical glycerol (lipid fraction).

[99893] Accordingly, in one embodiment, the molecule which activity is to be increased in the process of the invention is the gene product with an activity as a “glutamate 5-kinase”, preferably it is the molecule of section (a) or (b) of this paragraph.

[99894] In particular, it was observed that in plants, especially in Arabidopsis thaliana, increasing or generating the activity of a gene product mitochondrial with the activity of a “glutamate 5-kinase”, preferably being encoded by a gene comprising the nucleic acid sequence SEQ ID NO. 127521, preferably the coding region thereof, conferred the production of or the increase in glycerol (lipid fraction) compared with the wild type control.

[99895] The nucleic acid sequence of Slr2072 from Synechocystis sp., e.g. as shown in the respective line in column 5 of Table I, application no. 19, has been published in C. And the activity of the gene product thereof is the activity of threonine dehydratase.

[99896] Accordingly, in one embodiment, the process of the present invention for producing glycerol (lipid fraction) in a non-human organism, like a microorganism or a plant or a part thereof, comprises increasing or generating the activity of a gene product with the activity of a gene product conferring the activity of “threonine dehydratase”, especially from Synechocystis sp. or its functional equivalent or its homolog, e.g. the increase of
[99897] (a) a gene product of a gene comprising the nucleic acid molecule as shown in the respective line in column 5 of Table I (whereby the respective line disclose in column 7 the fine chemical glycerol (lipid fraction)), application no. 19, preferably the coding region thereof, or a homolog or a fragment thereof, and being depicted in the same respective line as said Slr2072, or a functional equivalent or a homolog thereof as shown in column 8 of Table I, application no. 19, preferably the coding region thereof, particularly a homolog or functional equivalent as shown in column 8 of Table I B, application no. 19, and being depicted in the same respective line as said Slr2072, and preferably the activity is increased mitochondrial, or
[99898] (b) a polypeptide comprising a polypeptide, a consensus sequence or at least a polypeptide motif as shown in the respective line in column 5 of Table II or in column 8 of Table IV, application no. 19, respectively, and being depicted in the same respective line as said Slr2072, or a functional equivalent or a homolog thereof as depicted in column 8 of Table II, application no. 19, preferably a homolog or functional equivalent as depicted in column 8 of Table II B, application no. 19, and being depicted in the same respective line as said Slr2072, and preferably the activity is increased mitochondrial, whereby the respective line disclose in column 7 the fine chemical glycerol (lipid fraction).

[99899] Accordingly, in one embodiment, the molecule which activity is to be increased in the process of the invention is the gene product with an activity as a “threonine dehydratase”, preferably it is the molecule of section (a) or (b) of this paragraph.

[99900] In particular, it was observed that in plants, especially in Arabidopsis thaliana, increasing or generating the activity of a gene product mitochondrial with the activity of a “threonine dehydratase”, preferably being encoded by a gene comprising the nucleic acid sequence SEQ ID NO. 12341, preferably the coding region thereof, conferred the production of or the increase in glycerol (lipid fraction) compared with the wild type control.

[99901] The nucleic acid sequence of Slr2072 from Synechocystis sp., e.g. as shown in the respective line in column 5 of Table I, application no. 19, has been published in C. And the activity of the gene product thereof is the activity of threonine dehydratase.

[99902] Accordingly, in one embodiment, the process of the present invention for producing glycerol phosphate (lipid fraction) in a non-human organism, like a microorganism or a plant or a part thereof, comprises increasing or generating the activity of a gene product with the activity of a gene product conferring the activity of “threonine dehydratase”, especially from Synechocystis sp. or its functional equivalent or its homolog, e.g. the increase of
[99903] (a) a gene product of a gene comprising the nucleic acid molecule as shown in the respective line in column 5 of Table I (whereby the respective line disclose in column 7 the fine chemical glycerol phosphate (lipid fraction)), application no. 19, preferably the coding region thereof, or a homolog or a fragment thereof, and being depicted in the same respective line as said Slr2072, or a functional equivalent or a homolog thereof as shown in column 8 of Table I, application no. 19, preferably the coding region thereof, particularly a homolog or functional equivalent as shown in column 8 of Table I B, application no. 19, and being depicted in the same respective line as said Slr2072, and preferably the activity is increased mitochondrial, or
[99904] (b) a polypeptide comprising a polypeptide, a consensus sequence or at least a polypeptide motif as shown in the respective line in column 5 of Table II or in column 8 of Table IV, application no. 19, respectively, and being depicted in the same respective line as said Slr2072, or a functional equivalent or a homolog thereof as depicted in column 8 of Table II, application no. 19, preferably a homolog or functional equivalent as depicted in column 8 of Table II B, application no. 19, and being depicted in the same respective line as said Slr2072, and preferably the activity is increased mitochondrial, whereby the respective line disclose in column 7 the fine chemical glycerol phosphate (lipid fraction).

[99905] Accordingly, in one embodiment, the molecule which activity is to be increased in the process of the invention is the gene product with an activity as a “threonine dehydratase”, preferably it is the molecule of section (a) or (b) of this paragraph.

[99906] In particular, it was observed that in plants, especially in Arabidopsis thaliana, increasing or generating the activity of a gene product mitochondrial with the activity of a “threonine dehydratase”, preferably being encoded by a gene comprising the nucleic acid sequence SEQ ID NO. 12341, preferably the coding region thereof, conferred the production of or the increase in glycerol phosphate (lipid fraction) compared with the wild type control.

[99907] The nucleic acid sequence of Smr0004 from Synechocystis sp., e.g. as shown in the respective line in column 5 of Table I, application no. 19, has been published in C. And the activity of the gene product thereof is the activity of photosystem I reaction centre subunit.

[99908] Accordingly, in one embodiment, the process of the present invention for producing bis-glyceryl phosphate (polar fraction) in a non-human organism, like a microorganism or a plant or a part thereof, comprises increasing or generating the activity of a gene product with the activity of a gene product conferring the activity of “photosystem I reaction centre subunit”, especially from Synechocystis sp. or its functional equivalent or its homolog, e.g. the increase of
[99909] (a) a gene product of a gene comprising the nucleic acid molecule as shown in the respective line in column 5 of Table I (whereby the respective line disclose in column 7 the fine chemical bis-glyceryl phosphate (polar fraction)), application no. 19, preferably the coding region thereof, or a homolog or a fragment thereof, and being depicted in the same respective line as said Smr0004, or a functional equivalent or a homolog thereof as shown in column 8 of Table I, application no. 19, preferably the coding region thereof, particularly a homolog or functional equivalent as shown in column 8 of Table I B, application no. 19, and being depicted in the same respective line as said Smr0004, and preferably the activity is increased plastidic, or
[99910] (b) a polypeptide comprising a polypeptide, a consensus sequence or at least a polypeptide motif as shown in the respective line in column 5 of Table II or in column 8 of Table IV, application no. 19, respectively, and being depicted in the same respective line as said Smr0004, or a functional equivalent or a homolog thereof as depicted in column 8 of Table II, application no. 19, preferably a homolog or functional equivalent as depicted in column 8 of Table II B, application no. 19, and being depicted in the same respective line as said Smr0004, and preferably the activity is increased plastidic, whereby the respective line disclose in column 7 the fine chemical bis-glyceryl phosphate (polar fraction).

[99911] Accordingly, in one embodiment, the molecule which activity is to be increased in the process of the invention is the gene product with an activity as a “photosystem I reaction centre subunit”, preferably it is the molecule of section (a) or (b) of this paragraph.

[99912] In particular, it was observed that in plants, especially in Arabidopsis thaliana, increasing or generating the activity of a gene product plastidic with the activity of a “photosystem I reaction centre subunit”, preferably being encoded by a gene comprising the nucleic acid sequence SEQ ID NO. 136907, preferably the coding region thereof, conferred the production of or the increase in bis-glyceryl phosphate (polar fraction) compared with the wild type control.

[99913] The nucleic acid sequence of TTC0035 from Thermus thermophilus, e.g. as shown in the respective line in column 5 of Table I, application no. 19, has been published in E. And the activity of the gene product thereof is the activity of cell division protein.

[99914] Accordingly, in one embodiment, the process of the present invention for producing triacylglycerol in a non-human organism, like a microorganism or a plant or a part thereof, comprises increasing or generating the activity of a gene product with the activity of a gene product conferring the activity of “cell division protein”, especially from Thermus thermophilus or its functional equivalent or its homolog, e.g. the increase of
[99915] (a) a gene product of a gene comprising the nucleic acid molecule as shown in the respective line in column 5 of Table I (whereby the respective line disclose in column 7 the fine chemical triacylglycerol), application no. 19, preferably the coding region thereof, or a homolog or a fragment thereof, and being depicted in the same respective line as said TTC0035, or a functional equivalent or a homolog thereof as shown in column 8 of Table I, application no. 19, preferably the coding region thereof, particularly a homolog or functional equivalent as shown in column 8 of Table I B, application no. 19, and being depicted in the same respective line as said TTC0035, and preferably the activity is increased non-targeted, or
[99916] (b) a polypeptide comprising a polypeptide, a consensus sequence or at least a polypeptide motif as shown in the respective line in column 5 of Table II or in column 8 of Table IV, application no. 19, respectively, and being depicted in the same respective line as said TTC0035, or a functional equivalent or a homolog thereof as depicted in column 8 of Table II, application no. 19, preferably a homolog or functional equivalent as depicted in column 8 of Table II B, application no. 19, and being depicted in the same respective line as said TTC0035, and preferably the activity is increased non-targeted, whereby the respective line disclose in column 7 the fine chemical triacylglycerol.

[99917] Accordingly, in one embodiment, the molecule which activity is to be increased in the process of the invention is the gene product with an activity as a “cell division protein”, preferably it is the molecule of section (a) or (b) of this paragraph.

[99918] In particular, it was observed that in plants, especially in Arabidopsis thaliana, increasing or generating the activity of a gene product non-targeted with the activity of a “cell division protein”, preferably being encoded by a gene comprising the nucleic acid sequence SEQ ID NO. 60301, preferably the coding region thereof, conferred the production of or the increase in triacylglycerol compared with the wild type control.

[99919] The nucleic acid sequence of TTC0917 from Thermus thermophilus, e.g. as shown in the respective line in column 5 of Table I, application no. 19, has been published in E. And the activity of the gene product thereof is the activity of metal-dependent hydrolase.

[99920] Accordingly, in one embodiment, the process of the present invention for producing glycerol phosphate (lipid fraction) in a non-human organism, like a microorganism or a plant or a part thereof, comprises increasing or generating the activity of a gene product with the activity of a gene product conferring the activity of “metal-dependent hydrolase”, especially from Thermus thermophilus or its functional equivalent or its homolog, e.g. the increase of
[99921] (a) a gene product of a gene comprising the nucleic acid molecule as shown in the respective line in column 5 of Table I (whereby the respective line disclose in column 7 the fine chemical glycerol phosphate (lipid fraction)), application no. 19, preferably the coding region thereof, or a homolog or a fragment thereof, and being depicted in the same respective line as said TTC0917, or a functional equivalent or a homolog thereof as shown in column 8 of Table I, application no. 19, preferably the coding region thereof, particularly a homolog or functional equivalent as shown in column 8 of Table I B, application no. 19, and being depicted in the same respective line as said TTC0917, and preferably the activity is increased non-targeted, or
[99922] (b) a polypeptide comprising a polypeptide, a consensus sequence or at least a polypeptide motif as shown in the respective line in column 5 of Table II or in column 8 of Table IV, application no. 19, respectively, and being depicted in the same respective line as said TTC0917, or a functional equivalent or a homolog thereof as depicted in column 8 of Table II, application no. 19, preferably a homolog or functional equivalent as depicted in column 8 of Table II B, application no. 19, and being depicted in the same respective line as said TTC0917, and preferably the activity is increased non-targeted, whereby the respective line disclose in column 7 the fine chemical glycerol phosphate (lipid fraction).

[99923] Accordingly, in one embodiment, the molecule which activity is to be increased in the process of the invention is the gene product with an activity as a “metal-dependent hydrolase”, preferably it is the molecule of section (a) or (b) of this paragraph.

[99924] In particular, it was observed that in plants, especially in Arabidopsis thaliana, increasing or generating the activity of a gene product non-targeted with the activity of a “metal-dependent hydrolase”, preferably being encoded by a gene comprising the nucleic acid sequence SEQ ID NO. 61553, preferably the coding region thereof, conferred the production of or the increase in glycerol phosphate (lipid fraction) compared with the wild type control.

[99925] The nucleic acid sequence of TTC1386 from Thermus thermophilus, e.g. as shown in the respective line in column 5 of Table I, application no. 19, has been published in E. And the activity of the gene product thereof is the activity of TTC1386-protein.

[99926] Accordingly, in one embodiment, the process of the present invention for producing glycerol (lipid fraction) in a non-human organism, like a microorganism or a plant or a part thereof, comprises increasing or generating the activity of a gene product with the activity of a gene product conferring the activity of “TTC1386-protein”, especially from Thermus thermophilus or its functional equivalent or its homolog, e.g. the increase of
[99927] (a) a gene product of a gene comprising the nucleic acid molecule as shown in the respective line in column 5 of Table I (whereby the respective line disclose in column 7 the fine chemical glycerol (lipid fraction)), application no. 19, preferably the coding region thereof, or a homolog or a fragment thereof, and being depicted in the same respective line as said TTC1386, or a functional equivalent or a homolog thereof as shown in column 8 of Table I, application no. 19, preferably the coding region thereof, particularly a homolog or functional equivalent as shown in column 8 of Table I B, application no. 19, and being depicted in the same respective line as said TTC1386, and preferably the activity is increased non-targeted, or
[99928] (b) a polypeptide comprising a polypeptide, a consensus sequence or at least a polypeptide motif as shown in the respective line in column 5 of Table II or in column 8 of Table IV, application no. 19, respectively, and being depicted in the same respective line as said TTC1386, or a functional equivalent or a homolog thereof as depicted in column 8 of Table II, application no. 19, preferably a homolog or functional equivalent as depicted in column 8 of Table II B, application no. 19, and being depicted in the same respective line as said TTC1386, and preferably the activity is increased non-targeted, whereby the respective line disclose in column 7 the fine chemical glycerol (lipid fraction).

[99929] Accordingly, in one embodiment, the molecule which activity is to be increased in the process of the invention is the gene product with an activity as a “TTC1386-protein”, preferably it is the molecule of section (a) or (b) of this paragraph.

[99930] In particular, it was observed that in plants, especially in Arabidopsis thaliana, increasing or generating the activity of a gene product non-targeted with the activity of a “TTC1386-protein”, preferably being encoded by a gene comprising the nucleic acid sequence SEQ ID NO. 62079, preferably the coding region thereof, conferred the production of or the increase in glycerol (lipid fraction) compared with the wild type control.

[99931] The nucleic acid sequence of Yal013w from Saccharomyces cerevisiae, e.g. as shown in the respective line in column 5 of Table I, application no. 19, has been published in A. And the activity of the gene product thereof is the activity of YAL013W-protein.

[99932] Accordingly, in one embodiment, the process of the present invention for producing glycerol-3-phosphate (polar fraction) in a non-human organism, like a microorganism or a plant or a part thereof, comprises increasing or generating the activity of a gene product with the activity of a gene product conferring the activity of “YAL013W-protein”, especially from Saccharomyces cerevisiae or its functional equivalent or its homolog, e.g. the increase of
[99933] (a) a gene product of a gene comprising the nucleic acid molecule as shown in the respective line in column 5 of Table I (whereby the respective line disclose in column 7 the fine chemical glycerol-3-phosphate (polar fraction)), application no. 19, preferably the coding region thereof, or a homolog or a fragment thereof, and being depicted in the same respective line as said Yal013w, or a functional equivalent or a homolog thereof as shown in column 8 of Table I, application no. 19, preferably the coding region thereof, particularly a homolog or functional equivalent as shown in column 8 of Table I B, application no. 19, and being depicted in the same respective line as said Yal013w, and preferably the activity is increased non-targeted, or
[99934] (b) a polypeptide comprising a polypeptide, a consensus sequence or at least a polypeptide motif as shown in the respective line in column 5 of Table II or in column 8 of Table IV, application no. 19, respectively, and being depicted in the same respective line as said Yal013w, or a functional equivalent or a homolog thereof as depicted in column 8 of Table II, application no. 19, preferably a homolog or functional equivalent as depicted in column 8 of Table II B, application no. 19, and being depicted in the same respective line as said Yal013w, and preferably the activity is increased non-targeted, whereby the respective line disclose in column 7 the fine chemical glycerol-3-phosphate (polar fraction).

[99935] Accordingly, in one embodiment, the molecule which activity is to be increased in the process of the invention is the gene product with an activity as a “YAL013W-protein”, preferably it is the molecule of section (a) or (b) of this paragraph.

[99936] In particular, it was observed that in plants, especially in Arabidopsis thaliana, increasing or generating the activity of a gene product non-targeted with the activity of a “YAL013W-protein”, preferably being encoded by a gene comprising the nucleic acid sequence SEQ ID NO. 108092, preferably the coding region thereof, conferred the production of or the increase in glycerol-3-phosphate (polar fraction) compared with the wild type control.

[99937] The nucleic acid sequence of Ybl021c from Saccharomyces cerevisiae, e.g. as shown in the respective line in column 5 of Table I, application no. 19, has been published in A. And the activity of the gene product thereof is the activity of transcription factor.

[99938] Accordingly, in one embodiment, the process of the present invention for producing glycerol (lipid fraction) in a non-human organism, like a microorganism or a plant or a part thereof, comprises increasing or generating the activity of a gene product with the activity of a gene product conferring the activity of “transcription factor”, especially from Saccharomyces cerevisiae or its functional equivalent or its homolog, e.g. the increase of
[99939] (a) a gene product of a gene comprising the nucleic acid molecule as shown in the respective line in column 5 of Table I (whereby the respective line disclose in column 7 the fine chemical glycerol (lipid fraction)), application no. 19, preferably the coding region thereof, or a homolog or a fragment thereof, and being depicted in the same respective line as said Ybl021c, or a functional equivalent or a homolog thereof as shown in column 8 of Table I, application no. 19, preferably the coding region thereof, particularly a homolog or functional equivalent as shown in column 8 of Table I B, application no. 19, and being depicted in the same respective line as said Ybl021c, and preferably the activity is increased non-targeted, or
[99940] (b) a polypeptide comprising a polypeptide, a consensus sequence or at least a polypeptide motif as shown in the respective line in column 5 of Table II or in column 8 of Table IV, application no. 19, respectively, and being depicted in the same respective line as said Ybl021c, or a functional equivalent or a homolog thereof as depicted in column 8 of Table II, application no. 19, preferably a homolog or functional equivalent as depicted in column 8 of Table II B, application no. 19, and being depicted in the same respective line as said Ybl021c, and preferably the activity is increased non-targeted, whereby the respective line disclose in column 7 the fine chemical glycerol (lipid fraction).

[99941] Accordingly, in one embodiment, the molecule which activity is to be increased in the process of the invention is the gene product with an activity as a “transcription factor”, preferably it is the molecule of section (a) or (b) of this paragraph.

[99942] In particular, it was observed that in plants, especially in Arabidopsis thaliana, increasing or generating the activity of a gene product non-targeted with the activity of a “transcription factor”, preferably being encoded by a gene comprising the nucleic acid sequence SEQ ID NO. 62524, preferably the coding region thereof, conferred the production of or the increase in glycerol (lipid fraction) compared with the wild type control.

[99943] The nucleic acid sequence of Ybr092c from Saccharomyces cerevisiae, e.g. as shown in the respective line in column 5 of Table I, application no. 19, has been published in A. And the activity of the gene product thereof is the activity of acid phosphatase precursor.

[99944] Accordingly, in one embodiment, the process of the present invention for producing glycerol phosphate (lipid fraction) in a non-human organism, like a microorganism or a plant or a part thereof, comprises increasing or generating the activity of a gene product with the activity of a gene product conferring the activity of “acid phosphatase precursor”, especially from Saccharomyces cerevisiae or its functional equivalent or its homolog, e.g. the increase of
[99945] (a) a gene product of a gene comprising the nucleic acid molecule as shown in the respective line in column 5 of Table I (whereby the respective line disclose in column 7 the fine chemical glycerol phosphate (lipid fraction)), application no. 19, preferably the coding region thereof, or a homolog or a fragment thereof, and being depicted in the same respective line as said Ybr092c, or a functional equivalent or a homolog thereof as shown in column 8 of Table I, application no. 19, preferably the coding region thereof, particularly a homolog or functional equivalent as shown in column 8 of Table I B, application no. 19, and being depicted in the same respective line as said Ybr092c, and preferably the activity is increased plastidic, or
[99946] (b) a polypeptide comprising a polypeptide, a consensus sequence or at least a polypeptide motif as shown in the respective line in column 5 of Table II or in column 8 of Table IV, application no. 19, respectively, and being depicted in the same respective line as said Ybr092c, or a functional equivalent or a homolog thereof as depicted in column 8 of Table II, application no. 19, preferably a homolog or functional equivalent as depicted in column 8 of Table II B, application no. 19, and being depicted in the same respective line as said Ybr092c, and preferably the activity is increased plastidic, whereby the respective line disclose in column 7 the fine chemical glycerol phosphate (lipid fraction).

[99947] Accordingly, in one embodiment, the molecule which activity is to be increased in the process of the invention is the gene product with an activity as a “acid phosphatase precursor”, preferably it is the molecule of section (a) or (b) of this paragraph.

[99948] In particular, it was observed that in plants, especially in Arabidopsis thaliana, increasing or generating the activity of a gene product plastidic with the activity of a “acid phosphatase precursor”, preferably being encoded by a gene comprising the nucleic acid sequence SEQ ID NO. 119347, preferably the coding region thereof, conferred the production of or the increase in glycerol phosphate (lipid fraction) compared with the wild type control.

[99949] The nucleic acid sequence of Ybr160w from Saccharomyces cerevisiae, e.g. as shown in the respective line in column 5 of Table I, application no. 19, has been published in A. And the activity of the gene product thereof is the activity of cell division control protein.

[99950] Accordingly, in one embodiment, the process of the present invention for producing glycerol (lipid fraction) in a non-human organism, like a microorganism or a plant or a part thereof, comprises increasing or generating the activity of a gene product with the activity of a gene product conferring the activity of “cell division control protein”, especially from Saccharomyces cerevisiae or its functional equivalent or its homolog, e.g. the increase of
[99951] (a) a gene product of a gene comprising the nucleic acid molecule as shown in the respective line in column 5 of Table I (whereby the respective line disclose in column 7 the fine chemical glycerol (lipid fraction)), application no. 19, preferably the coding region thereof, or a homolog or a fragment thereof, and being depicted in the same respective line as said Ybr160w, or a functional equivalent or a homolog thereof as shown in column 8 of Table I, application no. 19, preferably the coding region thereof, particularly a homolog or functional equivalent as shown in column 8 of Table I B, application no. 19, and being depicted in the same respective line as said Ybr160w, and preferably the activity is increased non-targeted, or
[99952] (b) a polypeptide comprising a polypeptide, a consensus sequence or at least a polypeptide motif as shown in the respective line in column 5 of Table II or in column 8 of Table IV, application no. 19, respectively, and being depicted in the same respective line as said Ybr160w, or a functional equivalent or a homolog thereof as depicted in column 8 of Table II, application no. 19, preferably a homolog or functional equivalent as depicted in column 8 of Table II B, application no. 19, and being depicted in the same respective line as said Ybr160w, and preferably the activity is increased non-targeted, whereby the respective line disclose in column 7 the fine chemical glycerol (lipid fraction).

[99953] Accordingly, in one embodiment, the molecule which activity is to be increased in the process of the invention is the gene product with an activity as a “cell division control protein”, preferably it is the molecule of section (a) or (b) of this paragraph.

[99954] In particular, it was observed that in plants, especially in Arabidopsis thaliana, increasing or generating the activity of a gene product non-targeted with the activity of a “cell division control protein”, preferably being encoded by a gene comprising the nucleic acid sequence SEQ ID NO. 62717, preferably the coding region thereof, conferred the production of or the increase in glycerol (lipid fraction) compared with the wild type control.

[99955] The nucleic acid sequence of Ybr160w from Saccharomyces cerevisiae, e.g. as shown in the respective line in column 5 of Table I, application no. 19, has been published in A. And the activity of the gene product thereof is the activity of cell division control protein.

[99956] Accordingly, in one embodiment, the process of the present invention for producing glycerol (polar fraction) in a non-human organism, like a microorganism or a plant or a part thereof, comprises increasing or generating the activity of a gene product with the activity of a gene product conferring the activity of “cell division control protein”, especially from Saccharomyces cerevisiae or its functional equivalent or its homolog, e.g. the increase of
[99957] (a) a gene product of a gene comprising the nucleic acid molecule as shown in the respective line in column 5 of Table I (whereby the respective line disclose in column 7 the fine chemical glycerol (polar fraction)), application no. 19, preferably the coding region thereof, or a homolog or a fragment thereof, and being depicted in the same respective line as said Ybr160w, or a functional equivalent or a homolog thereof as shown in column 8 of Table I, application no. 19, preferably the coding region thereof, particularly a homolog or functional equivalent as shown in column 8 of Table I B, application no. 19, and being depicted in the same respective line as said Ybr160w, and preferably the activity is increased non-targeted, or
[99958] (b) a polypeptide comprising a polypeptide, a consensus sequence or at least a polypeptide motif as shown in the respective line in column 5 of Table II or in column 8 of Table IV, application no. 19, respectively, and being depicted in the same respective line as said Ybr160w, or a functional equivalent or a homolog thereof as depicted in column 8 of Table II, application no. 19, preferably a homolog or functional equivalent as depicted in column 8 of Table II B, application no. 19, and being depicted in the same respective line as said Ybr160w, and preferably the activity is increased non-targeted, whereby the respective line disclose in column 7 the fine chemical glycerol (polar fraction).

[99959] Accordingly, in one embodiment, the molecule which activity is to be increased in the process of the invention is the gene product with an activity as a “cell division control protein”, preferably it is the molecule of section (a) or (b) of this paragraph.

[99960] In particular, it was observed that in plants, especially in Arabidopsis thaliana, increasing or generating the activity of a gene product non-targeted with the activity of a “cell division control protein”, preferably being encoded by a gene comprising the nucleic acid sequence SEQ ID NO. 62717, preferably the coding region thereof, conferred the production of or the increase in glycerol (polar fraction) compared with the wild type control.

[99961] The nucleic acid sequence of Ycr102c from Saccharomyces cerevisiae, e.g. as shown in the respective line in column 5 of Table I, application no. 19, has been published in A. And the activity of the gene product thereof is the activity of ycr102c-protein.

[99962] Accordingly, in one embodiment, the process of the present invention for producing bis-glyceryl phosphate (polar fraction) in a non-human organism, like a microorganism or a plant or a part thereof, comprises increasing or generating the activity of a gene product with the activity of a gene product conferring the activity of “ycr102c-protein”, especially from Saccharomyces cerevisiae or its functional equivalent or its homolog, e.g. the increase of
[99963] (a) a gene product of a gene comprising the nucleic acid molecule as shown in the respective line in column 5 of Table I (whereby the respective line disclose in column 7 the fine chemical bis-glyceryl phosphate (polar fraction)), application no. 19, preferably the coding region thereof, or a homolog or a fragment thereof, and being depicted in the same respective line as said Ycr102c, or a functional equivalent or a homolog thereof as shown in column 8 of Table I, application no. 19, preferably the coding region thereof, particularly a homolog or functional equivalent as shown in column 8 of Table I B, application no. 19, and being depicted in the same respective line as said Ycr102c, and preferably the activity is increased plastidic, or
[99964] (b) a polypeptide comprising a polypeptide, a consensus sequence or at least a polypeptide motif as shown in the respective line in column 5 of Table II or in column 8 of Table IV, application no. 19, respectively, and being depicted in the same respective line as said Ycr102c, or a functional equivalent or a homolog thereof as depicted in column 8 of Table II, application no. 19, preferably a homolog or functional equivalent as depicted in column 8 of Table II B, application no. 19, and being depicted in the same respective line as said Ycr102c, and preferably the activity is increased plastidic, whereby the respective line disclose in column 7 the fine chemical bis-glyceryl phosphate (polar fraction).

[99965] Accordingly, in one embodiment, the molecule which activity is to be increased in the process of the invention is the gene product with an activity as a “ycr102c-protein”, preferably it is the molecule of section (a) or (b) of this paragraph.

[99966] In particular, it was observed that in plants, especially in Arabidopsis thaliana, increasing or generating the activity of a gene product plastidic with the activity of a “ycr102c-protein”, preferably being encoded by a gene comprising the nucleic acid sequence SEQ ID NO. 63264, preferably the coding region thereof, conferred the production of or the increase in bis-glyceryl phosphate (polar fraction) compared with the wild type control.

[99967] The nucleic acid sequence of Ydr273w from Saccharomyces cerevisiae, e.g. as shown in the respective line in column 5 of Table I, application no. 19, has been published in A. And the activity of the gene product thereof is the activity of ydr273w-protein.

[99968] Accordingly, in one embodiment, the process of the present invention for producing bis-glyceryl phosphate (polar fraction) in a non-human organism, like a microorganism or a plant or a part thereof, comprises increasing or generating the activity of a gene product with the activity of a gene product conferring the activity of “ydr273w-protein”, especially from Saccharomyces cerevisiae or its functional equivalent or its homolog, e.g. the increase of
[99969] (a) a gene product of a gene comprising the nucleic acid molecule as shown in the respective line in column 5 of Table I (whereby the respective line disclose in column 7 the fine chemical bis-glyceryl phosphate (polar fraction)), application no. 19, preferably the coding region thereof, or a homolog or a fragment thereof, and being depicted in the same respective line as said Ydr273w, or a functional equivalent or a homolog thereof as shown in column 8 of Table I, application no. 19, preferably the coding region thereof, particularly a homolog or functional equivalent as shown in column 8 of Table I B, application no. 19, and being depicted in the same respective line as said Ydr273w, and preferably the activity is increased plastidic, or
[99970] (b) a polypeptide comprising a polypeptide, a consensus sequence or at least a polypeptide motif as shown in the respective line in column 5 of Table II or in column 8 of Table IV, application no. 19, respectively, and being depicted in the same respective line as said Ydr273w, or a functional equivalent or a homolog thereof as depicted in column 8 of Table II, application no. 19, preferably a homolog or functional equivalent as depicted in column 8 of Table II B, application no. 19, and being depicted in the same respective line as said Ydr273w, and preferably the activity is increased plastidic, whereby the respective line disclose in column 7 the fine chemical bis-glyceryl phosphate (polar fraction).

[99971] Accordingly, in one embodiment, the molecule which activity is to be increased in the process of the invention is the gene product with an activity as a “ydr273w-protein”, preferably it is the molecule of section (a) or (b) of this paragraph.

[99972] In particular, it was observed that in plants, especially in Arabidopsis thaliana, increasing or generating the activity of a gene product plastidic with the activity of a “ydr273w-protein”, preferably being encoded by a gene comprising the nucleic acid sequence SEQ ID NO. 90159, preferably the coding region thereof, conferred the production of or the increase in bis-glyceryl phosphate (polar fraction) compared with the wild type control.

[99973] The nucleic acid sequence of Yfl016c from Saccharomyces cerevisiae, e.g. as shown in the respective line in column 5 of Table I, application no. 19, has been published in A. And the activity of the gene product thereof is the activity of molecular chaperone portein.

[99974] Accordingly, in one embodiment, the process of the present invention for producing glycerol phosphate (lipid fraction) in a non-human organism, like a microorganism or a plant or a part thereof, comprises increasing or generating the activity of a gene product with the activity of a gene product conferring the activity of “molecular chaperone portein”, especially from Saccharomyces cerevisiae or its functional equivalent or its homolog, e.g. the increase of
[99975] (a) a gene product of a gene comprising the nucleic acid molecule as shown in the respective line in column 5 of Table I (whereby the respective line disclose in column 7 the fine chemical glycerol phosphate (lipid fraction)), application no. 19, preferably the coding region thereof, or a homolog or a fragment thereof, and being depicted in the same respective line as said Yfl016c, or a functional equivalent or a homolog thereof as shown in column 8 of Table I, application no. 19, preferably the coding region thereof, particularly a homolog or functional equivalent as shown in column 8 of Table I B, application no. 19, and being depicted in the same respective line as said Yfl016c, and preferably the activity is increased non-targeted, or
[99976] (b) a polypeptide comprising a polypeptide, a consensus sequence or at least a polypeptide motif as shown in the respective line in column 5 of Table II or in column 8 of Table IV, application no. 19, respectively, and being depicted in the same respective line as said Yfl016c, or a functional equivalent or a homolog thereof as depicted in column 8 of Table II, application no. 19, preferably a homolog or functional equivalent as depicted in column 8 of Table II B, application no. 19, and being depicted in the same respective line as said Yfl016c, and preferably the activity is increased non-targeted, whereby the respective line disclose in column 7 the fine chemical glycerol phosphate (lipid fraction).

[99977] Accordingly, in one embodiment, the molecule which activity is to be increased in the process of the invention is the gene product with an activity as a “molecular chaperone portein”, preferably it is the molecule of section (a) or (b) of this paragraph.

[99978] In particular, it was observed that in plants, especially in Arabidopsis thaliana, increasing or generating the activity of a gene product non-targeted with the activity of a “molecular chaperone portein”, preferably being encoded by a gene comprising the nucleic acid sequence SEQ ID NO. 63807, preferably the coding region thereof, conferred the production of or the increase in glycerol phosphate (lipid fraction) compared with the wild type control.

[99979] The nucleic acid sequence of Yfl019c from Saccharomyces cerevisiae, e.g. as shown in the respective line in column 5 of Table I, application no. 19, has been published in A. And the activity of the gene product thereof is the activity of YFL019C-protein.

[99980] Accordingly, in one embodiment, the process of the present invention for producing triacylglycerol in a non-human organism, like a microorganism or a plant or a part thereof, comprises increasing or generating the activity of a gene product with the activity of a gene product conferring the activity of “YFL019C-protein”, especially from Saccharomyces cerevisiae or its functional equivalent or its homolog, e.g. the increase of
[99981] (a) a gene product of a gene comprising the nucleic acid molecule as shown in the respective line in column 5 of Table I (whereby the respective line disclose in column 7 the fine chemical triacylglycerol), application no. 19, preferably the coding region thereof, or a homolog or a fragment thereof, and being depicted in the same respective line as said Yfl019c, or a functional equivalent or a homolog thereof as shown in column 8 of Table I, application no. 19, preferably the coding region thereof, particularly a homolog or functional equivalent as shown in column 8 of Table I B, application no. 19, and being depicted in the same respective line as said Yfl019c, and preferably the activity is increased non-targeted, or
[99982] (b) a polypeptide comprising a polypeptide, a consensus sequence or at least a polypeptide motif as shown in the respective line in column 5 of Table II or in column 8 of Table IV, application no. 19, respectively, and being depicted in the same respective line as said Yfl019c, or a functional equivalent or a homolog thereof as depicted in column 8 of Table II, application no. 19, preferably a homolog or functional equivalent as depicted in column 8 of Table 11 B, application no. 19, and being depicted in the same respective line as said Yfl019c, and preferably the activity is increased non-targeted, whereby the respective line disclose in column 7 the fine chemical triacylglycerol.

[99983] Accordingly, in one embodiment, the molecule which activity is to be increased in the process of the invention is the gene product with an activity as a “YFL0190-protein”, preferably it is the molecule of section (a) or (b) of this paragraph.

[99984] In particular, it was observed that in plants, especially in Arabidopsis thaliana, increasing or generating the activity of a gene product non-targeted with the activity of a “YFL019C-protein”, preferably being encoded by a gene comprising the nucleic acid sequence SEQ ID NO. 64144, preferably the coding region thereof, conferred the production of or the increase in triacylglycerol compared with the wild type control.

[99985] The nucleic acid sequence of Ygl256w from Saccharomyces cerevisiae, e.g. as shown in the respective line in column 5 of Table I, application no. 19, has been published in A. And the activity of the gene product thereof is the activity of alcohol dehydrogenase.

[99986] Accordingly, in one embodiment, the process of the present invention for producing bis-glyceryl phosphate (polar fraction) in a non-human organism, like a microorganism or a plant or a part thereof, comprises increasing or generating the activity of a gene product with the activity of a gene product conferring the activity of “alcohol dehydrogenase”, especially from Saccharomyces cerevisiae or its functional equivalent or its homolog, e.g. the increase of
[99987] (a) a gene product of a gene comprising the nucleic acid molecule as shown in the respective line in column 5 of Table I (whereby the respective line disclose in column 7 the fine chemical bis-glyceryl phosphate (polar fraction)), application no. 19, preferably the coding region thereof, or a homolog or a fragment thereof, and being depicted in the same respective line as said Ygl256w, or a functional equivalent or a homolog thereof as shown in column 8 of Table I, application no. 19, preferably the coding region thereof, particularly a homolog or functional equivalent as shown in column 8 of Table I B, application no. 19, and being depicted in the same respective line as said Ygl256w, and preferably the activity is increased plastidic, or
[99988] (b) a polypeptide comprising a polypeptide, a consensus sequence or at least a polypeptide motif as shown in the respective line in column 5 of Table II or in column 8 of Table IV, application no. 19, respectively, and being depicted in the same respective line as said Ygl256w, or a functional equivalent or a homolog thereof as depicted in column 8 of Table II, application no. 19, preferably a homolog or functional equivalent as depicted in column 8 of Table II B, application no. 19, and being depicted in the same respective line as said Ygl256w, and preferably the activity is increased plastidic, whereby the respective line disclose in column 7 the fine chemical bis-glyceryl phosphate (polar fraction).

[99989] Accordingly, in one embodiment, the molecule which activity is to be increased in the process of the invention is the gene product with an activity as a “alcohol dehydrogenase”, preferably it is the molecule of section (a) or (b) of this paragraph.

[99990] In particular, it was observed that in plants, especially in Arabidopsis thaliana, increasing or generating the activity of a gene product plastidic with the activity of a “alcohol dehydrogenase”, preferably being encoded by a gene comprising the nucleic acid sequence SEQ ID NO. 130742, preferably the coding region thereof, conferred the production of or the increase in bis-glyceryl phosphate (polar fraction) compared with the wild type control.

[99991] The nucleic acid sequence of Ygr286c from Saccharomyces cerevisiae, e.g. as shown in the respective line in column 5 of Table I, application no. 19, has been published in A. And the activity of the gene product thereof is the activity of biotin synthase.

[99992] Accordingly, in one embodiment, the process of the present invention for producing glycerol (lipid fraction) in a non-human organism, like a microorganism or a plant or a part thereof, comprises increasing or generating the activity of a gene product with the activity of a gene product conferring the activity of “biotin synthase”, especially from Saccharomyces cerevisiae or its functional equivalent or its homolog, e.g. the increase of
[99993] (a) a gene product of a gene comprising the nucleic acid molecule as shown in the respective line in column 5 of Table I (whereby the respective line disclose in column 7 the fine chemical glycerol (lipid fraction)), application no. 19, preferably the coding region thereof, or a homolog or a fragment thereof, and being depicted in the same respective line as said Ygr286c, or a functional equivalent or a homolog thereof as shown in column 8 of Table I, application no. 19, preferably the coding region thereof, particularly a homolog or functional equivalent as shown in column 8 of Table I B, application no. 19, and being depicted in the same respective line as said Ygr286c, and preferably the activity is increased plastidic, or
[99994] (b) a polypeptide comprising a polypeptide, a consensus sequence or at least a polypeptide motif as shown in the respective line in column 5 of Table II or in column 8 of Table IV, application no. 19, respectively, and being depicted in the same respective line as said Ygr286c, or a functional equivalent or a homolog thereof as depicted in column 8 of Table II, application no. 19, preferably a homolog or functional equivalent as depicted in column 8 of Table II B, application no. 19, and being depicted in the same respective line as said Ygr286c, and preferably the activity is increased plastidic, whereby the respective line disclose in column 7 the fine chemical glycerol (lipid fraction).

[99995] Accordingly, in one embodiment, the molecule which activity is to be increased in the process of the invention is the gene product with an activity as a “biotin synthase”, preferably it is the molecule of section (a) or (b) of this paragraph.

[99996] In particular, it was observed that in plants, especially in Arabidopsis thaliana, increasing or generating the activity of a gene product plastidic with the activity of a “biotin synthase”, preferably being encoded by a gene comprising the nucleic acid sequence SEQ ID NO. 128655, preferably the coding region thereof, conferred the production of or the increase in glycerol (lipid fraction) compared with the wild type control.

[99997] The nucleic acid sequence of Yhr024c from Saccharomyces cerevisiae, e.g. as shown in the respective line in column 5 of Table I, application no. 19, has been published in A. And the activity of the gene product thereof is the activity of mitochondrial processing protease.

[99998] Accordingly, in one embodiment, the process of the present invention for producing triacylglycerol in a non-human organism, like a microorganism or a plant or a part thereof, comprises increasing or generating the activity of a gene product with the activity of a gene product conferring the activity of “mitochondrial processing protease”, especially from Saccharomyces cerevisiae or its functional equivalent or its homolog, e.g. the increase of
[99999] (a) a gene product of a gene comprising the nucleic acid molecule as shown in the respective line in column 5 of Table I (whereby the respective line disclose in column 7 the fine chemical triacylglycerol), application no. 19, preferably the coding region thereof, or a homolog or a fragment thereof, and being depicted in the same respective line as said Yhr024c, or a functional equivalent or a homolog thereof as shown in column 8 of Table I, application no. 19, preferably the coding region thereof, particularly a homolog or functional equivalent as shown in column 8 of Table I B, application no. 19, and being depicted in the same respective line as said Yhr024c, and preferably the activity is increased plastidic, or
[100000] (b) a polypeptide comprising a polypeptide, a consensus sequence or at least a polypeptide motif as shown in the respective line in column 5 of Table II or in column 8 of Table IV, application no. 19, respectively, and being depicted in the same respective line as said Yhr024c, or a functional equivalent or a homolog thereof as depicted in column 8 of Table II, application no. 19, preferably a homolog or functional equivalent as depicted in column 8 of Table II B, application no. 19, and being depicted in the same respective line as said Yhr024c, and preferably the activity is increased plastidic, whereby the respective line disclose in column 7 the fine chemical triacylglycerol.

[100001] Accordingly, in one embodiment, the molecule which activity is to be increased in the process of the invention is the gene product with an activity as a “mitochondrial processing protease”, preferably it is the molecule of section (a) or (b) of this paragraph.

[100002] In particular, it was observed that in plants, especially in Arabidopsis thaliana, increasing or generating the activity of a gene product plastidic with the activity of a “mitochondrial processing protease”, preferably being encoded by a gene comprising the nucleic acid sequence SEQ ID NO. 64336, preferably the coding region thereof, conferred the production of or the increase in triacylglycerol compared with the wild type control.

[100003] The nucleic acid sequence of Yhr202w from Saccharomyces cerevisiae, e.g. as shown in the respective line in column 5 of Table I, application no. 19, has been published in A. And the activity of the gene product thereof is the activity of YHR202W-protein.

[100004] Accordingly, in one embodiment, the process of the present invention for producing bis-glyceryl phosphate (polar fraction) in a non-human organism, like a microorganism or a plant or a part thereof, comprises increasing or generating the activity of a gene product with the activity of a gene product conferring the activity of “YHR202W-protein”, especially from Saccharomyces cerevisiae or its functional equivalent or its homolog, e.g. the increase of
[100005] (a) a gene product of a gene comprising the nucleic acid molecule as shown in the respective line in column 5 of Table I (whereby the respective line disclose in column 7 the fine chemical bis-glyceryl phosphate (polar fraction)), application no. 19, preferably the coding region thereof, or a homolog or a fragment thereof, and being depicted in the same respective line as said Yhr202w, or a functional equivalent or a homolog thereof as shown in column 8 of Table I, application no. 19, preferably the coding region thereof, particularly a homolog or functional equivalent as shown in column 8 of Table I B, application no. 19, and being depicted in the same respective line as said Yhr202w, and preferably the activity is increased plastidic, or
[100006] (b) a polypeptide comprising a polypeptide, a consensus sequence or at least a polypeptide motif as shown in the respective line in column 5 of Table II or in column 8 of Table IV, application no. 19, respectively, and being depicted in the same respective line as said Yhr202w, or a functional equivalent or a homolog thereof as depicted in column 8 of Table II, application no. 19, preferably a homolog or functional equivalent as depicted in column 8 of Table II B, application no. 19, and being depicted in the same respective line as said Yhr202w, and preferably the activity is increased plastidic, whereby the respective line disclose in column 7 the fine chemical bis-glyceryl phosphate (polar fraction).

[100007] Accordingly, in one embodiment, the molecule which activity is to be increased in the process of the invention is the gene product with an activity as a “YHR202W-protein”, preferably it is the molecule of section (a) or (b) of this paragraph.

[100008] In particular, it was observed that in plants, especially in Arabidopsis thaliana, increasing or generating the activity of a gene product plastidic with the activity of a “YHR202W-protein”, preferably being encoded by a gene comprising the nucleic acid sequence SEQ ID NO. 154394, preferably the coding region thereof, conferred the production of or the increase in bis-glyceryl phosphate (polar fraction) compared with the wild type control.

[100009] The nucleic acid sequence of Yil053w from Saccharomyces cerevisiae, e.g. as shown in the respective line in column 5 of Table I, application no. 19, has been published in A. And the activity of the gene product thereof is the activity of (DL)-glycerol-3-phosphatase.

[100010] Accordingly, in one embodiment, the process of the present invention for producing glycerol (polar fraction) in a non-human organism, like a microorganism or a plant or a part thereof, comprises increasing or generating the activity of a gene product with the activity of a gene product conferring the activity of “(DL)-glycerol-3-phosphatase”, especially from Saccharomyces cerevisiae or its functional equivalent or its homolog, e.g. the increase of
[100011] (a) a gene product of a gene comprising the nucleic acid molecule as shown in the respective line in column 5 of Table I (whereby the respective line disclose in column 7 the fine chemical glycerol (polar fraction)), application no. 19, preferably the coding region thereof, or a homolog or a fragment thereof, and being depicted in the same respective line as said Yil053w, or a functional equivalent or a homolog thereof as shown in column 8 of Table I, application no. 19, preferably the coding region thereof, particularly a homolog or functional equivalent as shown in column 8 of Table I B, application no. 19, and being depicted in the same respective line as said Yil053w, and preferably the activity is increased non-targeted, or
[100012] (b) a polypeptide comprising a polypeptide, a consensus sequence or at least a polypeptide motif as shown in the respective line in column 5 of Table II or in column 8 of Table IV, application no. 19, respectively, and being depicted in the same respective line as said Yil053w, or a functional equivalent or a homolog thereof as depicted in column 8 of Table II, application no. 19, preferably a homolog or functional equivalent as depicted in column 8 of Table 11 B, application no. 19, and being depicted in the same respective line as said Yil053w, and preferably the activity is increased non-targeted, whereby the respective line disclose in column 7 the fine chemical glycerol (polar fraction).

[100013] Accordingly, in one embodiment, the molecule which activity is to be increased in the process of the invention is the gene product with an activity as a “(DL)-glycerol-3-phosphatase”, preferably it is the molecule of section (a) or (b) of this paragraph.

[100014] In particular, it was observed that in plants, especially in Arabidopsis thaliana, increasing or generating the activity of a gene product non-targeted with the activity of a “(DL)-glycerol-3-phosphatase”, preferably being encoded by a gene comprising the nucleic acid sequence SEQ ID NO. 14769, preferably the coding region thereof, conferred the production of or the increase in glycerol (polar fraction) compared with the wild type control.

[100015] The nucleic acid sequence of Yil083c from Saccharomyces cerevisiae, e.g. as shown in the respective line in column 5 of Table I, application no. 19, has been published in A. And the activity of the gene product thereof is the activity of YIL083C-protein.

[100016] Accordingly, in one embodiment, the process of the present invention for producing bis-glyceryl phosphate (polar fraction) in a non-human organism, like a microorganism or a plant or a part thereof, comprises increasing or generating the activity of a gene product with the activity of a gene product conferring the activity of “YIL083C-protein”, especially from Saccharomyces cerevisiae or its functional equivalent or its homolog, e.g. the increase of
[100017] (a) a gene product of a gene comprising the nucleic acid molecule as shown in the respective line in column 5 of Table I (whereby the respective line disclose in column 7 the fine chemical bis-glyceryl phosphate (polar fraction)), application no. 19, preferably the coding region thereof, or a homolog or a fragment thereof, and being depicted in the same respective line as said Yil083c, or a functional equivalent or a homolog thereof as shown in column 8 of Table I, application no. 19, preferably the coding region thereof, particularly a homolog or functional equivalent as shown in column 8 of Table I B, application no. 19, and being depicted in the same respective line as said Yil083c, and preferably the activity is increased plastidic, or
[100018] (b) a polypeptide comprising a polypeptide, a consensus sequence or at least a polypeptide motif as shown in the respective line in column 5 of Table II or in column 8 of Table IV, application no. 19, respectively, and being depicted in the same respective line as said Yil083c, or a functional equivalent or a homolog thereof as depicted in column 8 of Table II, application no. 19, preferably a homolog or functional equivalent as depicted in column 8 of Table II B, application no. 19, and being depicted in the same respective line as said Yil083c, and preferably the activity is increased plastidic, whereby the respective line disclose in column 7 the fine chemical bis-glyceryl phosphate (polar fraction).

[100019] Accordingly, in one embodiment, the molecule which activity is to be increased in the process of the invention is the gene product with an activity as a “YIL083C-protein”, preferably it is the molecule of section (a) or (b) of this paragraph.

[100020] In particular, it was observed that in plants, especially in Arabidopsis thaliana, increasing or generating the activity of a gene product plastidic with the activity of a “YIL083C-protein”, preferably being encoded by a gene comprising the nucleic acid sequence SEQ ID NO. 149454, preferably the coding region thereof, conferred the production of or the increase in bis-glyceryl phosphate (polar fraction) compared with the wild type control.

[100021] The nucleic acid sequence of Yjl062w-a from Saccharomyces cerevisiae, e.g. as shown in the respective line in column 5 of Table I, application no. 19, has been published in A. And the activity of the gene product thereof is the activity of YJL062W-A-protein.

[100022] Accordingly, in one embodiment, the process of the present invention for producing glycerol phosphate (lipid fraction) in a non-human organism, like a microorganism or a plant or a part thereof, comprises increasing or generating the activity of a gene product with the activity of a gene product conferring the activity of “YJL062W-A-protein”, especially from Saccharomyces cerevisiae or its functional equivalent or its homolog, e.g. the increase of
[100023] (a) a gene product of a gene comprising the nucleic acid molecule as shown in the respective line in column 5 of Table I (whereby the respective line disclose in column 7 the fine chemical glycerol phosphate (lipid fraction)), application no. 19, preferably the coding region thereof, or a homolog or a fragment thereof, and being depicted in the same respective line as said Yjl062w-a, or a functional equivalent or a homolog thereof as shown in column 8 of Table I, application no. 19, preferably the coding region thereof, particularly a homolog or functional equivalent as shown in column 8 of Table I B, application no. 19, and being depicted in the same respective line as said Yjl062w-a, and preferably the activity is increased non-targeted, or
[100024] (b) a polypeptide comprising a polypeptide, a consensus sequence or at least a polypeptide motif as shown in the respective line in column 5 of Table II or in column 8 of Table IV, application no. 19, respectively, and being depicted in the same respective line as said Yjl062w-a, or a functional equivalent or a homolog thereof as depicted in column 8 of Table II, application no. 19, preferably a homolog or functional equivalent as depicted in column 8 of Table II B, application no. 19, and being depicted in the same respective line as said Yjl062w-a, and preferably the activity is increased non-targeted, whereby the respective line disclose in column 7 the fine chemical glycerol phosphate (lipid fraction).

[100025] Accordingly, in one embodiment, the molecule which activity is to be increased in the process of the invention is the gene product with an activity as a “YJL062W-A-protein”, preferably it is the molecule of section (a) or (b) of this paragraph.

[100026] In particular, it was observed that in plants, especially in Arabidopsis thaliana, increasing or generating the activity of a gene product non-targeted with the activity of a “YJL062W-A-protein”, preferably being encoded by a gene comprising the nucleic acid sequence SEQ ID NO. 154437, preferably the coding region thereof, conferred the production of or the increase in glycerol phosphate (lipid fraction) compared with the wild type control.

[100027] The nucleic acid sequence of Yjl073w from Saccharomyces cerevisiae, e.g. as shown in the respective line in column 5 of Table I, application no. 19, has been published in A. And the activity of the gene product thereof is the activity of DnaJ-like chaperone.

[100028] Accordingly, in one embodiment, the process of the present invention for producing bis-glyceryl phosphate (polar fraction) in a non-human organism, like a microorganism or a plant or a part thereof, comprises increasing or generating the activity of a gene product with the activity of a gene product conferring the activity of “DnaJ-like chaperone”, especially from Saccharomyces cerevisiae or its functional equivalent or its homolog, e.g. the increase of
[100029] (a) a gene product of a gene comprising the nucleic acid molecule as shown in the respective line in column 5 of Table I (whereby the respective line disclose in column 7 the fine chemical bis-glyceryl phosphate (polar fraction)), application no. 19, preferably the coding region thereof, or a homolog or a fragment thereof, and being depicted in the same respective line as said Yjl073w, or a functional equivalent or a homolog thereof as shown in column 8 of Table I, application no. 19, preferably the coding region thereof, particularly a homolog or functional equivalent as shown in column 8 of Table I B, application no. 19, and being depicted in the same respective line as said Yjl073w, and preferably the activity is increased plastidic, or
[100030] (b) a polypeptide comprising a polypeptide, a consensus sequence or at least a polypeptide motif as shown in the respective line in column 5 of Table II or in column 8 of Table IV, application no. 19, respectively, and being depicted in the same respective line as said Yjl073w, or a functional equivalent or a homolog thereof as depicted in column 8 of Table II, application no. 19, preferably a homolog or functional equivalent as depicted in column 8 of Table II B, application no. 19, and being depicted in the same respective line as said Yjl073w, and preferably the activity is increased plastidic, whereby the respective line disclose in column 7 the fine chemical bis-glyceryl phosphate (polar fraction).

[100031] Accordingly, in one embodiment, the molecule which activity is to be increased in the process of the invention is the gene product with an activity as a “DnaJ-like chaperone”, preferably it is the molecule of section (a) or (b) of this paragraph.

[100032] In particular, it was observed that in plants, especially in Arabidopsis thaliana, increasing or generating the activity of a gene product plastidic with the activity of a “DnaJ-like chaperone”, preferably being encoded by a gene comprising the nucleic acid sequence SEQ ID NO. 64964, preferably the coding region thereof, conferred the production of or the increase in bis-glyceryl phosphate (polar fraction) compared with the wild type control.

[100033] The nucleic acid sequence of Yjr153w from Saccharomyces cerevisiae, e.g. as shown in the respective line in column 5 of Table I, application no. 19, has been published in A. And the activity of the gene product thereof is the activity of polygalacturonase.

[100034] Accordingly, in one embodiment, the process of the present invention for producing bis-glyceryl phosphate (polar fraction) in a non-human organism, like a microorganism or a plant or a part thereof, comprises increasing or generating the activity of a gene product with the activity of a gene product conferring the activity of “polygalacturonase”, especially from Saccharomyces cerevisiae or its functional equivalent or its homolog, e.g. the increase of
[100035] (a) a gene product of a gene comprising the nucleic acid molecule as shown in the respective line in column 5 of Table I (whereby the respective line disclose in column 7 the fine chemical bis-glyceryl phosphate (polar fraction)), application no. 19, preferably the coding region thereof, or a homolog or a fragment thereof, and being depicted in the same respective line as said Yjr153w, or a functional equivalent or a homolog thereof as shown in column 8 of Table I, application no. 19, preferably the coding region thereof, particularly a homolog or functional equivalent as shown in column 8 of Table I B, application no. 19, and being depicted in the same respective line as said Yjr153w, and preferably the activity is increased non-targeted, or
[100036] (b) a polypeptide comprising a polypeptide, a consensus sequence or at least a polypeptide motif as shown in the respective line in column 5 of Table II or in column 8 of Table IV, application no. 19, respectively, and being depicted in the same respective line as said Yjr153w, or a functional equivalent or a homolog thereof as depicted in column 8 of Table II, application no. 19, preferably a homolog or functional equivalent as depicted in column 8 of Table II B, application no. 19, and being depicted in the same respective line as said Yjr153w, and preferably the activity is increased non-targeted, whereby the respective line disclose in column 7 the fine chemical bis-glyceryl phosphate (polar fraction).

[100037] Accordingly, in one embodiment, the molecule which activity is to be increased in the process of the invention is the gene product with an activity as a “polygalacturonase”, preferably it is the molecule of section (a) or (b) of this paragraph.

[100038] In particular, it was observed that in plants, especially in Arabidopsis thaliana, increasing or generating the activity of a gene product non-targeted with the activity of a “polygalacturonase”, preferably being encoded by a gene comprising the nucleic acid sequence SEQ ID NO. 66274, preferably the coding region thereof, conferred the production of or the increase in bis-glyceryl phosphate (polar fraction) compared with the wild type control.

[100039] The nucleic acid sequence of Ylr025w from Saccharomyces cerevisiae, e.g. as shown in the respective line in column 5 of Table I, application no. 19, has been published in A. And the activity of the gene product thereof is the activity of vacuolar sorting protein.

[100040] Accordingly, in one embodiment, the process of the present invention for producing glycerol (polar fraction) in a non-human organism, like a microorganism or a plant or a part thereof, comprises increasing or generating the activity of a gene product with the activity of a gene product conferring the activity of “vacuolar sorting protein”, especially from Saccharomyces cerevisiae or its functional equivalent or its homolog, e.g. the increase of
[100041] (a) a gene product of a gene comprising the nucleic acid molecule as shown in the respective line in column 5 of Table I (whereby the respective line disclose in column 7 the fine chemical glycerol (polar fraction)), application no. 19, preferably the coding region thereof, or a homolog or a fragment thereof, and being depicted in the same respective line as said Ylr025w, or a functional equivalent or a homolog thereof as shown in column 8 of Table I, application no. 19, preferably the coding region thereof, particularly a homolog or functional equivalent as shown in column 8 of Table I B, application no. 19, and being depicted in the same respective line as said Ylr025w, and preferably the activity is increased non-targeted, or
[100042] (b) a polypeptide comprising a polypeptide, a consensus sequence or at least a polypeptide motif as shown in the respective line in column 5 of Table II or in column 8 of Table IV, application no. 19, respectively, and being depicted in the same respective line as said Ylr025w, or a functional equivalent or a homolog thereof as depicted in column 8 of Table II, application no. 19, preferably a homolog or functional equivalent as depicted in column 8 of Table II B, application no. 19, and being depicted in the same respective line as said Ylr025w, and preferably the activity is increased non-targeted, whereby the respective line disclose in column 7 the fine chemical glycerol (polar fraction).

[100043] Accordingly, in one embodiment, the molecule which activity is to be increased in the process of the invention is the gene product with an activity as a “vacuolar sorting protein”, preferably it is the molecule of section (a) or (b) of this paragraph.

[100044] In particular, it was observed that in plants, especially in Arabidopsis thaliana, increasing or generating the activity of a gene product non-targeted with the activity of a “vacuolar sorting protein”, preferably being encoded by a gene comprising the nucleic acid sequence SEQ ID NO. 150603, preferably the coding region thereof, conferred the production of or the increase in glycerol (polar fraction) compared with the wild type control.

[100045] The nucleic acid sequence of Ylr099c from Saccharomyces cerevisiae, e.g. as shown in the respective line in column 5 of Table I, application no. 19, has been published in A. And the activity of the gene product thereof is the activity of YLR099C-protein.

[100046] Accordingly, in one embodiment, the process of the present invention for producing bis-glyceryl phosphate (polar fraction) in a non-human organism, like a microorganism or a plant or a part thereof, comprises increasing or generating the activity of a gene product with the activity of a gene product conferring the activity of “YLR099C-protein”, especially from Saccharomyces cerevisiae or its functional equivalent or its homolog, e.g. the increase of
[100047] (a) a gene product of a gene comprising the nucleic acid molecule as shown in the respective line in column 5 of Table I (whereby the respective line disclose in column 7 the fine chemical bis-glyceryl phosphate (polar fraction)), application no. 19, preferably the coding region thereof, or a homolog or a fragment thereof, and being depicted in the same respective line as said Ylr099c, or a functional equivalent or a homolog thereof as shown in column 8 of Table I, application no. 19, preferably the coding region thereof, particularly a homolog or functional equivalent as shown in column 8 of Table I B, application no. 19, and being depicted in the same respective line as said Ylr099c, and preferably the activity is increased plastidic, or
[100048] (b) a polypeptide comprising a polypeptide, a consensus sequence or at least a polypeptide motif as shown in the respective line in column 5 of Table II or in column 8 of Table IV, application no. 19, respectively, and being depicted in the same respective line as said Ylr099c, or a functional equivalent or a homolog thereof as depicted in column 8 of Table II, application no. 19, preferably a homolog or functional equivalent as depicted in column 8 of Table II B, application no. 19, and being depicted in the same respective line as said Ylr099c, and preferably the activity is increased plastidic, whereby the respective line disclose in column 7 the fine chemical bis-glyceryl phosphate (polar fraction).

[100049] Accordingly, in one embodiment, the molecule which activity is to be increased in the process of the invention is the gene product with an activity as a “YLR099C-protein”, preferably it is the molecule of section (a) or (b) of this paragraph.

[100050] In particular, it was observed that in plants, especially in Arabidopsis thaliana, increasing or generating the activity of a gene product plastidic with the activity of a “YLR099C-protein”, preferably being encoded by a gene comprising the nucleic acid sequence SEQ ID NO. 154454, preferably the coding region thereof, conferred the production of or the increase in bis-glyceryl phosphate (polar fraction) compared with the wild type control.

[100051] The nucleic acid sequence of Ylr210w from Saccharomyces cerevisiae, e.g. as shown in the respective line in column 5 of Table I, application no. 19, has been published in A. And the activity of the gene product thereof is the activity of cyclin.

[100052] Accordingly, in one embodiment, the process of the present invention for producing glycerol (lipid fraction) in a non-human organism, like a microorganism or a plant or a part thereof, comprises increasing or generating the activity of a gene product with the activity of a gene product conferring the activity of “cyclin”, especially from Saccharomyces cerevisiae or its functional equivalent or its homolog, e.g. the increase of
[100053] (a) a gene product of a gene comprising the nucleic acid molecule as shown in the respective line in column 5 of Table I (whereby the respective line disclose in column 7 the fine chemical glycerol (lipid fraction)), application no. 19, preferably the coding region thereof, or a homolog or a fragment thereof, and being depicted in the same respective line as said Ylr210w, or a functional equivalent or a homolog thereof as shown in column 8 of Table I, application no. 19, preferably the coding region thereof, particularly a homolog or functional equivalent as shown in column 8 of Table I B, application no. 19, and being depicted in the same respective line as said Ylr210w, and preferably the activity is increased non-targeted, or
[100054] (b) a polypeptide comprising a polypeptide, a consensus sequence or at least a polypeptide motif as shown in the respective line in column 5 of Table II or in column 8 of Table IV, application no. 19, respectively, and being depicted in the same respective line as said Ylr210w, or a functional equivalent or a homolog thereof as depicted in column 8 of Table II, application no. 19, preferably a homolog or functional equivalent as depicted in column 8 of Table II B, application no. 19, and being depicted in the same respective line as said Ylr210w, and preferably the activity is increased non-targeted, whereby the respective line disclose in column 7 the fine chemical glycerol (lipid fraction).

[100055] Accordingly, in one embodiment, the molecule which activity is to be increased in the process of the invention is the gene product with an activity as a “cyclin”, preferably it is the molecule of section (a) or (b) of this paragraph.

[100056] In particular, it was observed that in plants, especially in Arabidopsis thaliana, increasing or generating the activity of a gene product non-targeted with the activity of a “cyclin”, preferably being encoded by a gene comprising the nucleic acid sequence SEQ ID NO. 129065, preferably the coding region thereof, conferred the production of or the increase in glycerol (lipid fraction) compared with the wild type control.

[100057] The nucleic acid sequence of Ylr326w from Saccharomyces cerevisiae, e.g. as shown in the respective line in column 5 of Table I, application no. 19, has been published in A. And the activity of the gene product thereof is the activity of ylr326w-protein.

[100058] Accordingly, in one embodiment, the process of the present invention for producing glycerol (lipid fraction) in a non-human organism, like a microorganism or a plant or a part thereof, comprises increasing or generating the activity of a gene product with the activity of a gene product conferring the activity of “ylr326w-protein”, especially from Saccharomyces cerevisiae or its functional equivalent or its homolog, e.g. the increase of
[100059] (a) a gene product of a gene comprising the nucleic acid molecule as shown in the respective line in column 5 of Table I (whereby the respective line disclose in column 7 the fine chemical glycerol (lipid fraction)), application no. 19, preferably the coding region thereof, or a homolog or a fragment thereof, and being depicted in the same respective line as said Ylr326w, or a functional equivalent or a homolog thereof as shown in column 8 of Table I, application no. 19, preferably the coding region thereof, particularly a homolog or functional equivalent as shown in column 8 of Table I B, application no. 19, and being depicted in the same respective line as said Ylr326w, and preferably the activity is increased plastidic, or
[100060] (b) a polypeptide comprising a polypeptide, a consensus sequence or at least a polypeptide motif as shown in the respective line in column 5 of Table II or in column 8 of Table IV, application no. 19, respectively, and being depicted in the same respective line as said Ylr326w, or a functional equivalent or a homolog thereof as depicted in column 8 of Table II, application no. 19, preferably a homolog or functional equivalent as depicted in column 8 of Table II B, application no. 19, and being depicted in the same respective line as said Ylr326w, and preferably the activity is increased plastidic, whereby the respective line disclose in column 7 the fine chemical glycerol (lipid fraction).

[100061] Accordingly, in one embodiment, the molecule which activity is to be increased in the process of the invention is the gene product with an activity as a “ylr326w-protein”, preferably it is the molecule of section (a) or (b) of this paragraph.

[100062] In particular, it was observed that in plants, especially in Arabidopsis thaliana, increasing or generating the activity of a gene product plastidic with the activity of a “ylr326w-protein”, preferably being encoded by a gene comprising the nucleic acid sequence SEQ ID NO. 129123, preferably the coding region thereof, conferred the production of or the increase in glycerol (lipid fraction) compared with the wild type control.

[100063] The nucleic acid sequence of Ylr326w from Saccharomyces cerevisiae, e.g. as shown in the respective line in column 5 of Table I, application no. 19, has been published in A. And the activity of the gene product thereof is the activity of ylr326w-protein.

[100064] Accordingly, in one embodiment, the process of the present invention for producing glycerol phosphate (lipid fraction) in a non-human organism, like a microorganism or a plant or a part thereof, comprises increasing or generating the activity of a gene product with the activity of a gene product conferring the activity of “ylr326w-protein”, especially from Saccharomyces cerevisiae or its functional equivalent or its homolog, e.g. the increase of
[100065] (a) a gene product of a gene comprising the nucleic acid molecule as shown in the respective line in column 5 of Table I (whereby the respective line disclose in column 7 the fine chemical glycerol phosphate (lipid fraction)), application no. 19, preferably the coding region thereof, or a homolog or a fragment thereof, and being depicted in the same respective line as said Ylr326w, or a functional equivalent or a homolog thereof as shown in column 8 of Table I, application no. 19, preferably the coding region thereof, particularly a homolog or functional equivalent as shown in column 8 of Table I B, application no. 19, and being depicted in the same respective line as said Ylr326w, and preferably the activity is increased plastidic, or
[100066] (b) a polypeptide comprising a polypeptide, a consensus sequence or at least a polypeptide motif as shown in the respective line in column 5 of Table II or in column 8 of Table IV, application no. 19, respectively, and being depicted in the same respective line as said Ylr326w, or a functional equivalent or a homolog thereof as depicted in column 8 of Table II, application no. 19, preferably a homolog or functional equivalent as depicted in column 8 of Table II B, application no. 19, and being depicted in the same respective line as said Ylr326w, and preferably the activity is increased plastidic, whereby the respective line disclose in column 7 the fine chemical glycerol phosphate (lipid fraction).

[100067] Accordingly, in one embodiment, the molecule which activity is to be increased in the process of the invention is the gene product with an activity as a “ylr326w-protein”, preferably it is the molecule of section (a) or (b) of this paragraph.

[100068] In particular, it was observed that in plants, especially in Arabidopsis thaliana, increasing or generating the activity of a gene product plastidic with the activity of a “ylr326w-protein”, preferably being encoded by a gene comprising the nucleic acid sequence SEQ ID NO. 129123, preferably the coding region thereof, conferred the production of or the increase in glycerol phosphate (lipid fraction) compared with the wild type control.

[100069] The nucleic acid sequence of Ynl007c from Saccharomyces cerevisiae, e.g. as shown in the respective line in column 5 of Table I, application no. 19, has been published in A. And the activity of the gene product thereof is the activity of heat shock protein Hsp40.

[100070] Accordingly, in one embodiment, the process of the present invention for producing glycerol (lipid fraction) in a non-human organism, like a microorganism or a plant or a part thereof, comprises increasing or generating the activity of a gene product with the activity of a gene product conferring the activity of “heat shock protein Hsp40”, especially from Saccharomyces cerevisiae or its functional equivalent or its homolog, e.g. the increase of
[100071] (a) a gene product of a gene comprising the nucleic acid molecule as shown in the respective line in column 5 of Table I (whereby the respective line disclose in column 7 the fine chemical glycerol (lipid fraction)), application no. 19, preferably the coding region thereof, or a homolog or a fragment thereof, and being depicted in the same respective line as said Ynl007c, or a functional equivalent or a homolog thereof as shown in column 8 of Table I, application no. 19, preferably the coding region thereof, particularly a homolog or functional equivalent as shown in column 8 of Table I B, application no. 19, and being depicted in the same respective line as said Ynl007c, and preferably the activity is increased non-targeted, or
[100072] (b) a polypeptide comprising a polypeptide, a consensus sequence or at least a polypeptide motif as shown in the respective line in column 5 of Table II or in column 8 of Table IV, application no. 19, respectively, and being depicted in the same respective line as said Ynl007c, or a functional equivalent or a homolog thereof as depicted in column 8 of Table II, application no. 19, preferably a homolog or functional equivalent as depicted in column 8 of Table II B, application no. 19, and being depicted in the same respective line as said Ynl007c, and preferably the activity is increased non-targeted, whereby the respective line disclose in column 7 the fine chemical glycerol (lipid fraction).

[100073] Accordingly, in one embodiment, the molecule which activity is to be increased in the process of the invention is the gene product with an activity as a “heat shock protein Hsp40”, preferably it is the molecule of section (a) or (b) of this paragraph.

[100074] In particular, it was observed that in plants, especially in Arabidopsis thaliana, increasing or generating the activity of a gene product non-targeted with the activity of a “heat shock protein Hsp40”, preferably being encoded by a gene comprising the nucleic acid sequence SEQ ID NO. 139173, preferably the coding region thereof, conferred the production of or the increase in glycerol (lipid fraction) compared with the wild type control.

[100075] The nucleic acid sequence of Ynl130c from Saccharomyces cerevisiae, e.g. as shown in the respective line in column 5 of Table I, application no. 19, has been published in A. And the activity of the gene product thereof is the activity of phosphotransferase.

[100076] Accordingly, in one embodiment, the process of the present invention for producing glycerol (lipid fraction) in a non-human organism, like a microorganism or a plant or a part thereof, comprises increasing or generating the activity of a gene product with the activity of a gene product conferring the activity of “phosphotransferase”, especially from Saccharomyces cerevisiae or its functional equivalent or its homolog, e.g. the increase of
[100077] (a) a gene product of a gene comprising the nucleic acid molecule as shown in the respective line in column 5 of Table I (whereby the respective line disclose in column 7 the fine chemical glycerol (lipid fraction)), application no. 19, preferably the coding region thereof, or a homolog or a fragment thereof, and being depicted in the same respective line as said Ynl130c, or a functional equivalent or a homolog thereof as shown in column 8 of Table I, application no. 19, preferably the coding region thereof, particularly a homolog or functional equivalent as shown in column 8 of Table I B, application no. 19, and being depicted in the same respective line as said Ynl130c, and preferably the activity is increased non-targeted, or
[100078] (b) a polypeptide comprising a polypeptide, a consensus sequence or at least a polypeptide motif as shown in the respective line in column 5 of Table II or in column 8 of Table IV, application no. 19, respectively, and being depicted in the same respective line as said Ynl130c, or a functional equivalent or a homolog thereof as depicted in column 8 of Table II, application no. 19, preferably a homolog or functional equivalent as depicted in column 8 of Table II B, application no. 19, and being depicted in the same respective line as said Ynl130c, and preferably the activity is increased non-targeted, whereby the respective line disclose in column 7 the fine chemical glycerol (lipid fraction).

[100079] Accordingly, in one embodiment, the molecule which activity is to be increased in the process of the invention is the gene product with an activity as a “phosphotransferase”, preferably it is the molecule of section (a) or (b) of this paragraph.

[100080] In particular, it was observed that in plants, especially in Arabidopsis thaliana, increasing or generating the activity of a gene product non-targeted with the activity of a “phosphotransferase”, preferably being encoded by a gene comprising the nucleic acid sequence SEQ ID NO. 129470, preferably the coding region thereof, conferred the production of or the increase in glycerol (lipid fraction) compared with the wild type control.

[100081] The nucleic acid sequence of Yor187w from Saccharomyces cerevisiae, e.g. as shown in the respective line in column 5 of Table I, application no. 19, has been published in A. And the activity of the gene product thereof is the activity of Elongation factor Tu.

[100082] Accordingly, in one embodiment, the process of the present invention for producing glycerol (lipid fraction) in a non-human organism, like a microorganism or a plant or a part thereof, comprises increasing or generating the activity of a gene product with the activity of a gene product conferring the activity of “Elongation factor Tu”, especially from Saccharomyces cerevisiae or its functional equivalent or its homolog, e.g. the increase of
[100083] (a) a gene product of a gene comprising the nucleic acid molecule as shown in the respective line in column 5 of Table I (whereby the respective line disclose in column 7 the fine chemical glycerol (lipid fraction)), application no. 19, preferably the coding region thereof, or a homolog or a fragment thereof, and being depicted in the same respective line as said Yor187w, or a functional equivalent or a homolog thereof as shown in column 8 of Table I, application no. 19, preferably the coding region thereof, particularly a homolog or functional equivalent as shown in column 8 of Table I B, application no. 19, and being depicted in the same respective line as said Yor187w, and preferably the activity is increased non-targeted, or
[100084] (b) a polypeptide comprising a polypeptide, a consensus sequence or at least a polypeptide motif as shown in the respective line in column 5 of Table II or in column 8 of Table IV, application no. 19, respectively, and being depicted in the same respective line as said Yor187w, or a functional equivalent or a homolog thereof as depicted in column 8 of Table II, application no. 19, preferably a homolog or functional equivalent as depicted in column 8 of Table II B, application no. 19, and being depicted in the same respective line as said Yor187w, and preferably the activity is increased non-targeted, whereby the respective line disclose in column 7 the fine chemical glycerol (lipid fraction).

[100085] Accordingly, in one embodiment, the molecule which activity is to be increased in the process of the invention is the gene product with an activity as a “Elongation factor Tu”, preferably it is the molecule of section (a) or (b) of this paragraph.

[100086] In particular, it was observed that in plants, especially in Arabidopsis thaliana, increasing or generating the activity of a gene product non-targeted with the activity of a “Elongation factor Tu”, preferably being encoded by a gene comprising the nucleic acid sequence SEQ ID NO. 129574, preferably the coding region thereof, conferred the production of or the increase in glycerol (lipid fraction) compared with the wild type control.

[100087] The nucleic acid sequence of Ypl162c from Saccharomyces cerevisiae, e.g. as shown in the respective line in column 5 of Table I, application no. 19, has been published in A. And the activity of the gene product thereof is the activity of YPL162C.protein.

[100088] Accordingly, in one embodiment, the process of the present invention for producing bis-glyceryl phosphate (polar fraction) in a non-human organism, like a microorganism or a plant or a part thereof, comprises increasing or generating the activity of a gene product with the activity of a gene product conferring the activity of “YPL162C.protein”, especially from Saccharomyces cerevisiae or its functional equivalent or its homolog, e.g. the increase of
[100089] (a) a gene product of a gene comprising the nucleic acid molecule as shown in the respective line in column 5 of Table I (whereby the respective line disclose in column 7 the fine chemical bis-glyceryl phosphate (polar fraction)), application no. 19, preferably the coding region thereof, or a homolog or a fragment thereof, and being depicted in the same respective line as said Ypl162c, or a functional equivalent or a homolog thereof as shown in column 8 of Table I, application no. 19, preferably the coding region thereof, particularly a homolog or functional equivalent as shown in column 8 of Table I B, application no. 19, and being depicted in the same respective line as said Ypl162c, and preferably the activity is increased plastidic, or
[100090] (b) a polypeptide comprising a polypeptide, a consensus sequence or at least a polypeptide motif as shown in the respective line in column 5 of Table II or in column 8 of Table IV, application no. 19, respectively, and being depicted in the same respective line as said Ypl162c, or a functional equivalent or a homolog thereof as depicted in column 8 of Table II, application no. 19, preferably a homolog or functional equivalent as depicted in column 8 of Table II B, application no. 19, and being depicted in the same respective line as said Ypl162c, and preferably the activity is increased plastidic, whereby the respective line disclose in column 7 the fine chemical bis-glyceryl phosphate (polar fraction).

[100091] Accordingly, in one embodiment, the molecule which activity is to be increased in the process of the invention is the gene product with an activity as a “YPL162C.protein”, preferably it is the molecule of section (a) or (b) of this paragraph.

[100092] In particular, it was observed that in plants, especially in Arabidopsis thaliana, increasing or generating the activity of a gene product plastidic with the activity of a “YPL162C.protein”, preferably being encoded by a gene comprising the nucleic acid sequence SEQ ID NO. 154477, preferably the coding region thereof, conferred the production of or the increase in bis-glyceryl phosphate (polar fraction) compared with the wild type control.

[100093] The nucleic acid sequence of Ypr054w from Saccharomyces cerevisiae, e.g. as shown in the respective line in column 5 of Table I, application no. 19, has been published in A. And the activity of the gene product thereof is the activity of mitogen-activated protein kinase.

[100094] Accordingly, in one embodiment, the process of the present invention for producing glycerol (lipid fraction) in a non-human organism, like a microorganism or a plant or a part thereof, comprises increasing or generating the activity of a gene product with the activity of a gene product conferring the activity of “mitogen-activated protein kinase”, especially from Saccharomyces cerevisiae or its functional equivalent or its homolog, e.g. the increase of
[100095] (a) a gene product of a gene comprising the nucleic acid molecule as shown in the respective line in column 5 of Table I (whereby the respective line disclose in column 7 the fine chemical glycerol (lipid fraction)), application no. 19, preferably the coding region thereof, or a homolog or a fragment thereof, and being depicted in the same respective line as said Ypr054w, or a functional equivalent or a homolog thereof as shown in column 8 of Table I, application no. 19, preferably the coding region thereof, particularly a homolog or functional equivalent as shown in column 8 of Table I B, application no. 19, and being depicted in the same respective line as said Ypr054w, and preferably the activity is increased non-targeted, or
[100096] (b) a polypeptide comprising a polypeptide, a consensus sequence or at least a polypeptide motif as shown in the respective line in column 5 of Table II or in column 8 of Table IV, application no. 19, respectively, and being depicted in the same respective line as said Ypr054w, or a functional equivalent or a homolog thereof as depicted in column 8 of Table II, application no. 19, preferably a homolog or functional equivalent as depicted in column 8 of Table II B, application no. 19, and being depicted in the same respective line as said Ypr054w, and preferably the activity is increased non-targeted, whereby the respective line disclose in column 7 the fine chemical glycerol (lipid fraction).

[100097] Accordingly, in one embodiment, the molecule which activity is to be increased in the process of the invention is the gene product with an activity as a “mitogen-activated protein kinase”, preferably it is the molecule of section (a) or (b) of this paragraph.

[100098] In particular, it was observed that in plants, especially in Arabidopsis thaliana, increasing or generating the activity of a gene product non-targeted with the activity of a “mitogen-activated protein kinase”, preferably being encoded by a gene comprising the nucleic acid sequence SEQ ID NO. 140110, preferably the coding region thereof, conferred the production of or the increase in glycerol (lipid fraction) compared with the wild type control.

[100099] The nucleic acid sequence of Zm_{—}4842_BE510522 from Zea mays, e.g. as shown in the respective line in column 5 of Table I, application no. 19, is unpublished. And the activity of the gene product thereof is the activity of Zm_{—}4842_BE510522-protein.

[100100] Accordingly, in one embodiment, the process of the present invention for producing bis-glyceryl phosphate (polar fraction) in a non-human organism, like a microorganism or a plant or a part thereof, comprises increasing or generating the activity of a gene product with the activity of a gene product conferring the activity of “Zm_{—}4842_BE510522-protein”, especially from Zea mays or its functional equivalent or its homolog, e.g. the increase of
[100101] (a) a gene product of a gene comprising the nucleic acid molecule as shown in the respective line in column 5 of Table I (whereby the respective line disclose in column 7 the fine chemical bis-glyceryl phosphate (polar fraction)), application no. 19, preferably the coding region thereof, or a homolog or a fragment thereof, and being depicted in the same respective line as said Zm_{—}4842_BE510522, or a functional equivalent or a homolog thereof as shown in column 8 of Table I, application no. 19, preferably the coding region thereof, particularly a homolog or functional equivalent as shown in column 8 of Table I B, application no. 19, and being depicted in the same respective line as said Zm_{—}4842_BE510522, and preferably the activity is increased non-targeted, or
[100102] (b) a polypeptide comprising a polypeptide, a consensus sequence or at least a polypeptide motif as shown in the respective line in column 5 of Table II or in column 8 of Table IV, application no. 19, respectively, and being depicted in the same respective line as said Zm_{—}4842_BE510522, or a functional equivalent or a homolog thereof as depicted in column 8 of Table II, application no. 19, preferably a homolog or functional equivalent as depicted in column 8 of Table II B, application no. 19, and being depicted in the same respective line as said Zm_{—}4842_BE510522, and preferably the activity is increased non-targeted, whereby the respective line disclose in column 7 the fine chemical bis-glyceryl phosphate (polar fraction).

[100103] Accordingly, in one embodiment, the molecule which activity is to be increased in the process of the invention is the gene product with an activity as a “Zm_{—}4842_BE510522-protein”, preferably it is the molecule of section (a) or (b) of this paragraph.

[100104] In particular, it was observed that in plants, especially in Arabidopsis thaliana, increasing or generating the activity of a gene product non-targeted with the activity of a “Zm_{—}4842_BE510522-protein”, preferably being encoded by a gene comprising the nucleic acid sequence SEQ ID NO. 68413, preferably the coding region thereof, conferred the production of or the increase in bis-glyceryl phosphate (polar fraction) compared with the wild type control.

[100105] The nucleic acid sequence of 49747384_SOYBEAN from Glycine max, e.g. as shown in the respective line in column 5 of Table I, application no. 19, is unpublished. And the activity of the gene product thereof is the activity of 49747384_SOYBEAN-protein.

[100106] Accordingly, in one embodiment, the process of the present invention for producing bis-glyceryl phosphate (polar fraction) in a non-human organism, like a microorganism or a plant or a part thereof, comprises increasing or generating the activity of a gene product with the activity of a gene product conferring the activity of “49747384_SOYBEAN-protein”, especially from Glycine max or its functional equivalent or its homolog, e.g. the increase of
[100107] (a) a gene product of a gene comprising the nucleic acid molecule as shown in the respective line in column 5 of Table I (whereby the respective line disclose in column 7 the fine chemical bis-glyceryl phosphate (polar fraction)), application no. 19, preferably the coding region thereof, or a homolog or a fragment thereof, and being depicted in the same respective line as said 49747384_SOYBEAN, or a functional equivalent or a homolog thereof as shown in column 8 of Table I, application no. 19, preferably the coding region thereof, particularly a homolog or functional equivalent as shown in column 8 of Table I B, application no. 19, and being depicted in the same respective line as said 49747384_SOYBEAN, and preferably the activity is increased non-targeted, or
[100108] (b) a polypeptide comprising a polypeptide, a consensus sequence or at least a polypeptide motif as shown in the respective line in column 5 of Table II or in column 8 of Table IV, application no. 19, respectively, and being depicted in the same respective line as said 49747384_SOYBEAN, or a functional equivalent or a homolog thereof as depicted in column 8 of Table II, application no. 19, preferably a homolog or functional equivalent as depicted in column 8 of Table II B, application no. 19, and being depicted in the same respective line as said 49747384_SOYBEAN, and preferably the activity is increased non-targeted, whereby the respective line disclose in column 7 the fine chemical bis-glyceryl phosphate (polar fraction).

[100109] Accordingly, in one embodiment, the molecule which activity is to be increased in the process of the invention is the gene product with an activity as a “49747384_SOYBEAN-protein”, preferably it is the molecule of section (a) or (b) of this paragraph.

[100110] In particular, it was observed that in plants, especially in Arabidopsis thaliana, increasing or generating the activity of a gene product non-targeted with the activity of a “49747384_SOYBEAN-protein”, preferably being encoded by a gene comprising the nucleic acid sequence SEQ ID NO. 69, preferably the coding region thereof, conferred the production of or the increase in bis-glyceryl phosphate (polar fraction) compared with the wild type control.

[100111] [0105.1.7.19] to [0107.1.7.19] for the disclosure of these paragraphs see [0105.1.7.7] to [0107.1.7.7] above

[100112] A protein having an activity conferring an increase in the amount or level of the fine chemical bis-glyceryl phosphate (polar fraction), glycerol (lipid fraction), glycerol (polar fraction), glycerol phosphate (lipid fraction), glycerol-3-phosphate (polar fraction), or triacylglycerol, upon targeting to the plastids or mitochondria or upon non-targeting, preferably has the structure of the respective polypeptide described herein, in particular of the polypeptides comprising the consensus sequence or at least one polypeptide motifs as shown in the respective line in Table IV, application no. 19, column 8 or of the polypeptide comprising an amino acid sequence as disclosed in the respective line in Table II, application no. 19, columns 5 or 8, or homologs or fragments thereof as described herein, or is encoded by the nucleic acid molecule characterized herein or the nucleic acid molecule according to the invention, for example by the nucleic acid molecule as shown in the respective line in Table I, application no. 19, columns 5 or 8, preferably the coding region thereof, or homologs or fragments thereof and has the herein mentioned activity.

[100113] for the disclosure of this paragraph see [0109.1.7.7] above

[100114] for the disclosure of this paragraph see [0110.1.7.7] above

[100115] In one embodiment, the process of the present invention comprises one or more of the following steps
[100116] (a) stabilizing a protein conferring the generation or increased expression of a protein encoded by the nucleic acid molecule of the invention or of the polypeptide of the invention, e.g. of a polypeptide having the activity selected from the group consisting of (DL)-glycerol-3-phosphatase, 2-C-methyl-D-erythritol 4-phosphate cytidylyltransferase, 3-oxoacyl-[acyl-carrier-protein] synthase, 49747384_SOYBEAN-protein, ABC transporter permease protein, acetyl CoA carboxylase, acid phosphatase precursor, acid shock protein, acyl transferase, adenylate kinase, alcohol dehydrogenase, amino-acid acetyltransferase, arginine decarboxylase, argininosuccinate synthetase, aromatic acid decarboxylase, At1g23110-protein, At1g67340-protein, ATP-binding component of a transport system, ATP-dependent RNA helicase, b0050-protein, b0518-protein, b0970-protein, b1003-protein, b1234-protein, b1330-protein, b1522-protein, b1556-protein, b1583-protein, b1670-protein, b1672-protein, b1703-protein, B1795-protein, b1837-protein, b2032-protein, b2099-protein, b2139-protein, b2399-protein, b2474-protein, b2613-protein, b2673-protein, b3083-protein, b3160-protein, b3777-protein, b3791-protein, b3989-protein, b4029-protein, b4050-protein, beta-hydroxylase, biotin synthase, calcium-dependent protein kinase, carbamoyl-phosphate synthase subunit, carbohydrate kinase, cardiolipin synthase, CBL-interacting protein kinase, CDP-diacylglycerol-glycerol-3-phosphate 3-phosphatidyltransferase, cell division control protein, cell division protein, coproporphyrinogen III oxidase, cyclin, cyclin D , dihydrolipoamide dehydrogenase, DnaJ-like chaperone, Elongation factor Tu, enterobacterial common antigen polymerase, ethanolamine utilization protein, eukaryotic translation initiation factor 5, Fe—S subunit of oxidoreductase, FKBP-type peptidyl-prolyl cis-trans isomerase (rotamase), glutamate 5-kinase, glutaredoxin, Glycine cleavage system T aminomethyltransferase, GM02LC17485-protein, heat shock protein Hsp40, heat shock transcription factor, HesB/YadR/YfhF family protein, high-affinity branched-chain amino acid transport protein, hydrolase, imidazole glycerol phosphate synthase subunit, ion-transport protein, lipoprotein precursor, L-serine dehydratase, lysozyme, lysyl-tRNA synthetase, metal-dependent hydrolase, methylglyoxal synthase, methyltransferase, Mg-protoporphyrin IX monomethyl ester oxidative cyclase 66 kD subunit, mitochondrial processing protease, mitogen-activated protein kinase, molecular chaperone portein, monothiol glutaredoxin, murein transglycosylase, NADH dehydrogenase, NADH-quinone oxidoreductase subunit, nitrate/nitrite transport protein, oxidoreductase, phenylacetic acid degradation protein, phosphate import ATP-binding protein, phosphatidylinositol 3- and 4-kinase family protein, phosphoglyceromutase, phosphotransferase, phosphotransferase system component, photosystem I reaction centre subunit, polygalacturonase, precorrin-8X methylmutase, protein phosphatase, purine-nucleoside phosphorylase, putative transport system permease protein, putrescine transport system permease protein, pyruvate kinase, recombinase A, sec-independent protein translocase, serine protease, sodium/proton antiporter, ThiF family protein, threonine dehydratase, threonine synthase, threonine/serine transporter, transcription factor, transcriptional regulator, transcriptional regulafor protein, trehalose-phosphatase, TTC1386-protein, vacuolar sorting protein, YAL013W-protein, ycr102c-protein, ydr273w-protein, YFL019C-protein, YHR202W-protein, YIL083C-protein, YJL062W-A-protein, YLR099C-protein, ylr326w-protein, YPL162C.protein, and Zm_{—}4842_BE510522-protein, or of a polypeptide as indicated in the respective line in Table II, application no. 19, columns 5 or 8, or its homologs or fragments, and conferring the production of or an increase in bis-glyceryl phosphate (polar fraction), glycerol (lipid fraction), glycerol (polar fraction), glycerol phosphate (lipid fraction), glycerol-3-phosphate (polar fraction), or triacylglycerol, respectively; and/or
[100117] (b) stabilizing a mRNA conferring the generation or increased expression of a FCRP, e.g. protein encoded by the nucleic acid molecule of the invention or its homologs or fragments, or of a mRNA encoding the polypeptide of the present invention having the hereinmentioned activity selected from the group consisting of said activities mentioned in (a) and conferring the production of or an increase in bis-glyceryl phosphate (polar fraction), glycerol (lipid fraction), glycerol (polar fraction), glycerol phosphate (lipid fraction), glycerol-3-phosphate (polar fraction), or triacylglycerol, respectively; and/or
[100118] (c) increasing the specific activity of a protein conferring the increased expression of a FCRP, e.g. a protein encoded by the nucleic acid molecule of the invention or of the polypeptide of the present invention having herein-mentioned bis-glyceryl phosphate (polar fraction), glycerol (lipid fraction), glycerol (polar fraction), glycerol phosphate (lipid fraction), glycerol-3-phosphate (polar fraction), or triacylglycerol generating or increasing activity, respectively, e.g. of a polypeptide having the activity of a protein as indicated in the respective line in Table II, application no. 19, columns 5 or 8, or its homologs or fragments, or decreasing the inhibitory regulation of the polypeptide of the invention; and/or
[100119] (d) generating or increasing the expression of an endogenous or artificial transcription factor mediating the expression of a protein conferring the generation or increased expression of a FCRP, e.g. a protein encoded by the nucleic acid molecule of the invention or of the polypeptide of the invention having herein-mentioned activity selected from the group consisting of said activities mentioned in (a) and conferring a bis-glyceryl phosphate (polar fraction), glycerol (lipid fraction), glycerol (polar fraction), glycerol phosphate (lipid fraction), glycerol-3-phosphate (polar fraction), or triacylglycerol increasing activity, respectively, e.g. of a polypeptide having the activity of a protein as indicated in the respective line in Table II, application no. 19, columns 5 or 8 or its homologs; and/or
[100120] (e) stimulating activity of a protein conferring the increased expression of a FCRP, e.g. a protein encoded by the nucleic acid molecule of the present invention or a polypeptide of the present invention having herein-mentioned activity selected from the group consisting of said activities mentioned in (a) and conferring a bis-glyceryl phosphate (polar fraction), glycerol (lipid fraction), glycerol (polar fraction), glycerol phosphate (lipid fraction), glycerol-3-phosphate (polar fraction), or triacylglycerol increasing activity, respectively, e.g. of a polypeptide having the activity of a protein as indicated in the respective line in Table II, application no. 19, columns 5 or 8, or its homologs or fragments, by adding one or more exogenous inducing factors to the non-human organism or parts thereof; and/or
[100121] (f) expressing a transgenic gene encoding a protein conferring the increased expression of a FCRP, e.g. a polypeptide encoded by the nucleic acid molecule of the present invention or a polypeptide of the present invention, having herein-mentioned activity selected from the group consisting of said activities mentioned in (a) and conferring a bis-glyceryl phosphate (polar fraction), glycerol (lipid fraction), glycerol (polar fraction), glycerol phosphate (lipid fraction), glycerol-3-phosphate (polar fraction), or triacylglycerol increasing activity, respectively, e.g. of a polypeptide having the activity of a protein as indicated in the respective line in Table II, application no. 19, columns 5 or 8, or its homologs or fragments, and/or
[100122] (g) increasing the copy number of a gene conferring the increased expression of a nucleic acid molecule encoding a FCRP, e.g. a polypeptide encoded by the nucleic acid molecule of the invention or the polypeptide of the invention having herein-mentioned activity selected from the group consisting of said activities mentioned in (a) and conferring a bis-glyceryl phosphate (polar fraction), glycerol (lipid fraction), glycerol (polar fraction), glycerol phosphate (lipid fraction), glycerol-3-phosphate (polar fraction), or triacylglycerol increasing activity, respectively, e.g. of a polypeptide having the activity of a protein as indicated in the respective line in Table II, application no. 19, columns 5 or 8, or its homologs or fragments; and/or
[100123] (h) increasing the expression of the endogenous gene encoding the FCRP, polypeptide of the invention, e.g. a polypeptide encoded by the nucleic acid molecule of the invention or the polypeptide of the invention having herein-mentioned activity selected from the group consisting of said activities mentioned in (a) and conferring a bis-glyceryl phosphate (polar fraction), glycerol (lipid fraction), glycerol (polar fraction), glycerol phosphate (lipid fraction), glycerol-3-phosphate (polar fraction), or triacylglycerol; increasing activity, respectively, e.g. of a polypeptide having the activity of a protein as indicated in the respective line in Table II, application no. 19, columns 5 or 8, or its homologs or fragments, by adding positive expression or removing negative expression elements, e.g. homologous recombination can be used to either introduce positive regulatory elements like for plants the 35S enhancer into the promoter or to remove repressor elements form regulatory regions. Further gene conversion methods can be used to disrupt repressor elements or to enhance to activity of positive elements. Positive elements can be randomly introduced in plants by T-DNA or transposon mutagenesis and lines can be identified in which the positive elements have be integrated near to a gene of the invention, the expression of which is thereby enhanced; and/or
[100124] (i) modulating growth conditions of the non-human organism in such a manner, that the expression or activity of the gene encoding the FCRP, e.g. a protein of the invention or the protein itself is enhanced, for example microorganisms or plants can be grown for example under a higher temperature regime leading to an enhanced expression of heat shock proteins, which can lead to an enhanced bis-glyceryl phosphate (polar fraction), glycerol (lipid fraction), glycerol (polar fraction), glycerol phosphate (lipid fraction), glycerol-3-phosphate (polar fraction), or triacylglycerol production, respectively; and/or
[100125] (j) selecting of non-human organisms with especially high activity of the proteins of the invention from natural or from mutagenized resources and breeding them into the target organisms, e.g. the elite crops; and/or
[100126] (k) directing a protein encoded by the nucleic acid molecule of the invention or of the polypeptide of the present invention having herein-mentioned activity selected from the group consisting of said activities mentioned in (a) and conferring a bis-glyceryl phosphate (polar fraction), glycerol (lipid fraction), glycerol (polar fraction), glycerol phosphate (lipid fraction), glycerol-3-phosphate (polar fraction), or triacylglycerol increasing activity, respectively, e.g. of a polypeptide having the activity of a protein as indicated in the respective line in Table II, application no. 19, columns 5 or 8, or its homologs or fragments, if for the corresponding nucleic acid molecule in the respective line in column 6 of Table I the term “plastidic” is indicated, to the plastids by the addition of a plastidial targeting sequence or if for the corresponding nucleic acid molecule in the respective line in column 6 of Table I the term “mitochondric” is indicated, to the mitochondria by the addition of a mitochondrial targeting sequence; and/or
[100127] (l) generating the expression of a protein encoded by the nucleic acid molecule of the invention or of the polypeptide of the present invention having herein-mentioned activity selected from the group consisting of said activities mentioned in (a) and conferring a bis-glyceryl phosphate (polar fraction), glycerol (lipid fraction), glycerol (polar fraction), glycerol phosphate (lipid fraction), glycerol-3-phosphate (polar fraction), or triacylglycerol increasing activity, respectively, e.g. of a polypeptide having the activity of a protein as indicated in the respective line in Table II, application no. 19, columns 5 or 8, or its homologs or fragments, if for the corresponding nucleic acid molecule in the respective line in column 6 of Table I the term “plastidic” or “mitochondric” is indicated, in these organelles by the stable or transient transformation, advantageously stable transformation, of organelles, preferably plastids or mitochondria, with an inventive nucleic acid sequence preferably in form of an expression cassette containing said sequence leading to the expression of the nucleic acids or polypeptides of the invention in the respective organelle; and/or
[100128] (m) generating the expression of a protein encoded by the nucleic acid molecule of the invention or of the polypeptide of the present invention having herein-mentioned activity selected from the group consisting of said activities mentioned in (a) and conferring a bis-glyceryl phosphate (polar fraction), glycerol (lipid fraction), glycerol (polar fraction), glycerol phosphate (lipid fraction), glycerol-3-phosphate (polar fraction), and/or triacylglycerol increasing activity, respectively, e.g. of a polypeptide having the activity of a protein as indicated in the respective line in Table II, application no. 19, columns 5 or 8, or its homologs or fragments, if for the corresponding nucleic acid molecule in the respective line in column 6 of Table I the term “plastidic” or “mitochondric” is indicated, in these organelles by integration of a nucleic acid of the invention into the genome of the respective organelle under control of preferable a promoter selective for the respective organelle.

[100129] Preferably, said mRNA is the coding region of the nucleic acid molecule of the present invention and/or the protein conferring the increased expression of a protein encoded by the coding region of the nucleic acid molecule of the present invention alone or linked to a transit nucleic acid sequence or transit peptide encoding nucleic acid sequence or the polypeptide having the herein mentioned activity, e.g. conferring the generation of or increase of bis-glyceryl phosphate (polar fraction), glycerol (lipid fraction), glycerol (polar fraction), glycerol phosphate (lipid fraction), glycerol-3-phosphate (polar fraction), or triacylglycerol, respectively, after increasing the expression or activity of the encoded polypeptide, non-targeted or in organelles such as plastids and/or mitochondria, preferably plastids, or having the activity of a polypeptide having an activity as the protein as shown in the respective line in Table II, application no. 19, column 3, or its homologs. Preferably the increase of bis-glyceryl phosphate (polar fraction), glycerol (lipid fraction), glycerol (polar fraction), glycerol phosphate (lipid fraction), glycerol-3-phosphate (polar fraction), or triacylglycerol, respectively, takes place non-targeted or in plastids and/or mitochondria, preferably non-targeted or in plastids.

[100130] [0113.1.7.19] to [0122.1.7.19] for the disclosure of these paragraphs see [0113.1.7.7] to [0122.1.7.7] above

[100131] The activation of an endogenous polypeptide having above-mentioned activity, e.g. having the activity of a protein as shown in the respective line in Table II, application no. 19, column 3 or of the polypeptide of the invention, e.g. conferring the increase of the fine chemical bis-glyceryl phosphate (polar fraction), glycerol (lipid fraction), glycerol (polar fraction), glycerol phosphate (lipid fraction), glycerol-3-phosphate (polar fraction), or triacylglycerol, respectively, by increase of expression or activity in the cytoplasm, and/or in the cytosol, and/or in an organelle, such as plastids or mitochondria, can also be increased by introducing a synthetic transcription factor, which binds close to the coding region of the gene encoding the protein as shown in the respective line in Table II, application no. 19, column 5 or 8, or homologs or fragments thereof, and activates its transcription. A chimeric zinc finger protein can be constructed, which comprises a specific DNA-binding domain and an activation domain as e.g. the VP16 domain of Herpes Simplex virus. The specific binding domain can bind to the regulatory region of the gene encoding the protein as shown in the respective line in Table II, application no. 19, column 5 or 8, or homologs or fragments thereof. The expression of the chimeric transcription factor in a non-human organism, in particular in a plant, leads to a specific expression of the protein as shown in the respective line in Table II, application no. 19, column 5 or 8, or homologs or fragments thereof, see e.g. in WO01/52620, Oriz, Proc. Natl. Acad. Sci. USA 99, 13290 (2002), or Guan, Proc. Natl. Acad. Sci. USA 99, 13296 (2002).

[100132] [0124.1.7.19] to [0127.1.7.19] for the disclosure of these paragraphs see [0124.1.7.7] to [0127.1.7.7] above

[100133] Owing to the introduction of a gene or a plurality of genes conferring the expression of the nucleic acid molecule of the invention or the polypeptide of the invention, for example the nucleic acid construct mentioned below, or encoding the protein as shown in the respective line in Table II, application no. 19, column 5 or 8, or homologs or fragments thereof, into a non-human organism alone or in combination with other genes, it is possible not only to increase the biosynthetic flux towards the end product, but also to increase, modify or create de novo an advantageous, preferably novel metabolites composition in the non-human organism, e.g. an advantageous composition comprising a higher content of (from a viewpoint of nutritional physiology limited) bis-glyceryl phosphate (polar fraction), glycerol (lipid fraction), glycerol (polar fraction), glycerol phosphate (lipid fraction), glycerol-3-phosphate (polar fraction), or triacylglycerol and if desired other lipids, and/or other metabolites, in free or bound form.

[100134] for the disclosure of this paragraph see [0129.1.7.7] above

[100135] Accordingly, in one embodiment, the process according to the invention relates to a process, which comprises:
[100136] (a) providing a non-human organism, preferably a microorganism, a plant cell, a plant tissue, a plant or a part thereof, more preferably a microorganism, a plant tissue, a plant or a part thereof;
[100137] (b) increasing the activity of a protein as shown in the respective line in Table II, application no. 19, column 3 or of a polypeptide being encoded by the respective nucleic acid molecule of the present invention and described below, e.g. conferring an increase of the fine chemical bis-glyceryl phosphate (polar fraction), glycerol (lipid fraction), glycerol (polar fraction), glycerol phosphate (lipid fraction), glycerol-3-phosphate (polar fraction), or triacylglycerol, respectively, in the non-human organism, preferably in the microorganism, the plant cell, the plant tissue, the plant or a part thereof, more preferably a microorganism, a plant tissue, a plant or a part thereof, especially cytoplasmic or in an organelle, like plastids or mitochondria,
[100138] (c) growing the non-human organism, preferably the microorganism, the plant cell, the plant tissue, the plant or a part thereof, under conditions which permit the production of said chemical in the non-human organism, preferably the microorganism, the plant cell, the plant tissue, the plant or a part thereof; and
[100139] (d) if desired, recovering, optionally isolating, said fine chemical, in free and/or bound form, and, optionally further free and/or bound lipids, and/or other metabolites synthesized by the non-human organism, the microorganism, the plant cell, the plant tissue, the plant or a part thereof.

[100140] [0131.1.7.19] to [0133.1.7.19] for the disclosure of these paragraphs see [0131.1.7.7] to [0133.1.7.7] above

[100141] The non-human organism, in particular the microorganism, plant or part thereof, is advantageously grown in such a way that it is not only possible to recover, if desired to isolate the free or bound fine chemical or the free and bound fine chemical but as option it is also possible to produce, recover and, if desired to isolate, other free or/and bound glycerol derivates and/or lipids and/or other metabolites. The organisms are harvested in a manner known per se and appropriate for the particular organism. Microorganisms such as bacteria, mosses, yeasts and fungi or plant cells which are cultured in liquid media by fermentation may be removed, for example, by centrifugation, decanting or filtration. Plants are grown on solid media in a manner known per se and harvested accordingly.

[100142] [0135.1.7.19] to [0139.1.7.19] for the disclosure of these paragraphs see [0135.1.7.7] to [0139.1.7.7] above

[100143] In another embodiment, the invention relates to a (isolated) nucleic acid molecule, which comprises a nucleic acid molecule selected from the group consisting of:
[100144] (a) a nucleic acid molecule encoding a polypeptide shown in Table II, application no. 19, column 5 or 8, preferably shown in Table II B, application no. 19, column 8, or a homolog or a fragment thereof;
[100145] (b) a nucleic acid molecule shown in Table I, application no. 19, column 5 or 8, preferably shown in Table I B, application no. 19, column 8, preferably the coding region thereof, or a homolog or a fragment thereof;
[100146] (c) a nucleic acid molecule, which, as a result of the degeneracy of the genetic code, can be derived from a polypeptide sequence depicted in column 5 or 8 of Table II, application no. 19, preferably in column 8 of Table II B, application no. 19;
[100147] (d) a nucleic acid molecule having at least 30% identity, preferably at least 40%, 50%, 60%, 70%, 75%, 80%, 85%, 90%, 95%, 96%, 97%, 98%, 99%, 99.5%, with the nucleic acid molecule sequence of a polynucleotide comprising the nucleic acid molecule shown in column 5 or 8 of Table I, application no. 19, preferably shown in column 8 of Table I B, application no. 19, preferably the coding region thereof;
[100148] (e) a nucleic acid molecule encoding a polypeptide having at least 30% identity, preferably at least 40%, 50% 60%, 70%, 75%, 80%, 85%, 90%, 95%, 96%, 97%, 98%, 99%, 99.5%, identity with the amino acid sequence of the polypeptide encoded by the nucleic acid molecule of (a), (b), (c) or (d);
[100149] (f) a nucleic acid molecule which hybridizes with a nucleic acid molecule of (a), (b), (c), (d) or (e) under stringent hybridization conditions;
[100150] (g) a nucleic acid molecule encoding a polypeptide which can be isolated with the aid of monoclonal or polyclonal antibodies made against a polypeptide encoded by one of the nucleic acid molecules of (a), (b), (c), (d), (e) or (f);
[100151] (h) a nucleic acid molecule encoding a polypeptide comprising the consensus sequence or one or more polypeptide motifs as shown in column 8 of Table IV, application no. 19;
[100152] (i) a nucleic acid molecule encoding a polypeptide having the activity represented by a respective protein as depicted in column 5 of Table II, application no. 19;
[100153] (j) a nucleic acid molecule comprising a polynucleotide which is obtained by amplifying a cDNA library or a genomic library using the primers in Table III, application no. 19, column 8;
[100154] and
[100155] (k) nucleic acid molecule which is obtainable by screening a suitable nucleic acid library, especially a cDNA library and/or a genomic library, under stringent hybridization conditions with a probe comprising one of the sequences of the nucleic acid molecule of (a), (b), (c), (d), (e), (f), (g), (h), (i) or (j) or with a fragment of at least 15 nt, preferably 20 nt, 30 nt, 50 nt, 100 nt, 200 nt,500 nt, 1000 nt, 1500 nt, 2000 nt or 3000 nt of the nucleic acid molecule characterized in (a), (b), (c), (d), (e), (f), (g), (h), (i) or (j);
[100156] or a nucleic acid molecule comprising a sequence which is complementary thereto.
   (All the references to Tables I to IV are references to the corresponding lines of Tables I to IV.)

[100157] In a preferred embodiment thereof said nucleic acid molecule according to (a), (b), (c), (d), (e), (f), (g), (h), (i), (j) or (k) encodes a polypeptide which has the activity of the respective polypeptide represented by a protein comprising a polypeptide as depicted in the respective line in column 5 of Table II, application no. 19.

[100158] In another preferred embodiment thereof said nucleic acid molecule according to (a), (b), (c), (d), (e), (f), (g), (h), (i), (j) or (k) confers a generation or an increase of the respective fine chemical in a non-human organism or a part thereof as compared to a corresponding wild-type non-human organism or part thereof.

[100159] In another preferred embodiment thereof said nucleic acid molecule according to (a), (b), (c), (d), (e), (f), (g), (h), (i), (j) or (k) encodes a polypeptide which has the activity of the respective polypeptide represented by a protein as depicted in the respective line in column 5 of Table II application no. 19 and confers a generation or an increase of the respective fine chemical in a non-human organism or a part thereof as compared to a corresponding wild-type non-human organism or part thereof.

[100160] In another embodiment, the invention relates to a (isolated) nucleic acid molecule, which comprises a nucleic acid molecule selected from the group consisting of:
[100161] (a) a nucleic acid molecule encoding a polypeptide shown in Table II, column 5 or 8, application no. 19, preferably shown in Table II A, application no. 19, in column 5 or in Table II A, application no. 19, column 8 or in Table II B, application no. 19, column 8, or a homolog or a fragment thereof;
[100162] (b) a nucleic acid molecule shown in Table I, application no. 19, column 5 or 8, preferably shown in Table I A, application no. 19, in column 5 or in Table I A, application no. 19, column 8 or in Table I B, application no. 19, column 8, preferably the coding region thereof, or a homolog or a fragment thereof;
[100163] (c) a nucleic acid molecule, which, as a result of the degeneracy of the genetic code, can be derived from a polypeptide sequence depicted in column 5 or 8 of Table II, application no. 19, preferably shown in Table II A, application no. 19, in column 5 or in Table II A, application no. 19, column 8 or in Table II B, application no. 19, column 8;
[100164] (d) a nucleic acid molecule having at least 30% identity, preferably at least 40%, 50%, 60%, 70%, 75%, 80%, 85%, 90%, 95%, 96%, 97%, 98%, 99%, 99.5%, with the nucleic acid molecule sequence of a polynucleotide comprising the nucleic acid molecule shown in column 5 or 8 of Table I, application no. 19, preferably shown in Table I A, application no. 19, in column 5 or in Table I A, application no. 19, column 8 or in Table I B column 8, preferably the coding region thereof;
[100165] (e) a nucleic acid molecule encoding a polypeptide having at least 30% identity, preferably at least 40%, 50% 60%, 70%, 75%, 80%, 85%, 90%, 95%, 96%, 97%, 98%, 99%, 99.5%, identity with the amino acid sequence of the polypeptide encoded by the nucleic acid molecule of (a), (b), (c) or (d);
[100166] (f) a nucleic acid molecule which hybridizes with a nucleic acid molecule of (a), (b), (c), (d) or (e) under stringent hybridization conditions;
[100167] (g) a nucleic acid molecule encoding a polypeptide which can be isolated with the aid of monoclonal or polyclonal antibodies made against a polypeptide encoded by one of the nucleic acid molecules of (a), (b), (c), (d), (e) or (f);
[100168] (h) a nucleic acid molecule encoding a polypeptide comprising the consensus sequence or one or more polypeptide motifs as shown in column 8 of Table IV, application no. 19;
[100169] (i) a nucleic acid molecule encoding a polypeptide having the activity represented by a respective protein as depicted in column 5 of Table II, application no. 19;
[100170] (j) a nucleic acid molecule comprising a polynucleotide which is obtained by amplifying a cDNA library or a genomic library using the primers in Table III, application no. 19, column 8;
[100171] and
[100172] (k) nucleic acid molecule which is obtainable by screening a suitable nucleic acid library, especially a cDNA library and/or a genomic library, under stringent hybridization conditions with a probe comprising one of the sequences of the nucleic acid molecule of (a), (b), (c), (d), (e), (f), (g), (h), (i) or (j) or with a fragment thereof having at least 15 nt, preferably 20 nt, 30 nt, 50 nt, 100 nt, 200 nt,500 nt, 1000 nt, 1500 nt, 2000 nt or 3000 nt of the nucleic acid molecule complementary to a nucleic acid sequence characterized in (a), (b), (c), (d), (e), (f), (g), (h), (i) or (j);
[100173] or a nucleic acid molecule comprising a sequence which is complementary thereto; whereby, preferably, the nucleic acid molecule according to (a), (b), (c), (d), (e), (f), (g), (h), (i), (j) or (k) distinguishes over the sequence depicted in Table I A and/or I B, application no. 19, column 5 or 8, or the coding regions thereof, by one or more nucleotides (especially but not exceeding 5%, preferably 4%, 3%, 2%, 1%, 0.5%, 0.2% or 0.1%). In an embodiment, the nucleic acid molecule of the invention does not consist of the sequence shown in Table I A and/or I B, application no. 19, column 5 or 8, or the coding region thereof. In another embodiment, the nucleic acid molecule of the present invention, preferably the coding region thereof, is at least 30%, 40%, 50%, 60%, 70%, 80%, 90%, 95% identical but less than 100%, 99.999%, 99.99%, 99.9%, 99%, 98%, 97%, 96% or 95% identical to the sequence shown in Table I A and/or I B, application no. 19, column 5 or 8, or the coding region thereof, respectively. In a further embodiment the nucleic acid molecule does not encode the polypeptide sequence shown in Table II A and/or II B, application no. 19, column 5 or 8 but homologs thereof. Accordingly, in one embodiment, the nucleic acid molecule of the present invention encodes in one embodiment a polypeptide which differs at least in one or more amino acids (especially but not exceeding 5%, preferably 4%, 3%, 2%, 1%, 0.5%, 0.2% or 0.1%) from the polypeptide shown in Table II, application no. 19, column 5 or 8 and does not encode a protein of the sequence shown in Table II A and/or II B, application no. 19, column 5 or 8. Accordingly, in one embodiment, the protein encoded by a sequence of a nucleic acid according to (a), (b), (c), (d), (e), (f), (g), (h), (i), (j) or (k) does not consist of the sequence shown in Table I A and/or I B, application no. 19, column 5 or 8, or the coding region thereof. In a further embodiment, the protein of the present invention is at least 30%, 40%, 50%, 60%, 70%, 80%, 90%, 95% identical to protein sequence depicted in Table II A and/or II B, application no. 19, column 5 or 8 but less than 100%, preferably less than 99.999%, 99.99%, 99.9%, 99%, 98%, 97%, 96% or 95% identical to the sequence shown in Table II A and/or II B, application no. 19, column 5 or 8.
   (All the references to Tables I to IV are references to the corresponding lines of Tables I to IV.)

[100174] In a preferred embodiment thereof said nucleic acid molecule according to (a), (b), (c), (d), (e), (f), (g), (h), (i), (j) or (k) encodes a polypeptide which has the activity of the respective polypeptide represented by a protein comprising a polypeptide as depicted in the respective line in column 5 of Table II, application no. 19.

[100175] In another preferred embodiment thereof said nucleic acid molecule according to (a), (b), (c), (d), (e), (f), (g), (h), (i), (j) or (k) confers a generation or an increase of the respective fine chemical in a non-human organism or a part thereof as compared to a corresponding wild-type non-human organism or part thereof.

[100176] In another preferred embodiment thereof said nucleic acid molecule according to (a), (b), (c), (d), (e), (f), (g), (h), (i), (j) or (k) encodes a polypeptide which has the activity of the respective polypeptide represented by a protein as depicted in the respective line in column 5 of Table II, application no. 19, and confers a generation or an increase of the respective fine chemical in a non-human organism or a part thereof as compared to a corresponding wild-type non-human organism or part thereof.

[100177] [0144.1.7.19] to [0155.1.7.19] for the disclosure of theses paragraphs see [0144.1.7.7] to [0155.1.7.7] above

[100178] In a preferred embodiment a nucleic acid construct, for example an expression cassette, comprises upstream, i.e. at the 5′ end of the encoding sequence, a promoter and downstream, i.e. at the 3′ end, a polyadenylation signal and optionally other regulatory elements which are operably linked to the intervening encoding sequence with one of the nucleic acids as depicted in the respective line in Table I, application no. 19, column 5 or 8, preferably the coding region thereof, or a homolog or a fragment thereof. By an operable linkage is meant the sequential arrangement of promoter, encoding sequence, terminator, optionally other regulatory elements and optionally targeting sequences in such a way that each of the regulatory elements/targeting sequence can fulfill its function in the expression of the encoding sequence in due manner. In one embodiment the sequences preferred for operable linkage are targeting sequences for ensuring subcellular localization in organelles, like plastids or mitochondria. However, targeting sequences for ensuring subcellular localization in the endoplasmic reticulum (=ER), in the nucleus, in oil corpuscles or other compartments may also be employed as well as translation promoters such as the 5′ lead sequence in tobacco mosaic virus (Gallie et al., Nucl. Acids Res. 15, 8693 (1987)).

[100179] for the disclosure of this paragraph see [0157.1.7.7] above

[100180] In an embodiment, the invention relates to an expression cassette, comprising
[100181] 1) a promoter, preferably a promoter selected from the group consisting of Big35S, PCUbi, Super and USP;
[100182] 2) a nucleic acid molecule selected from the group consisting of
   [100183] (a) a nucleic acid molecule encoding a polypeptide shown in Table II, application no. 19, column 5 or 8, preferably shown in Table II A, application no. 19, column 5, or in Table II A, application no. 19, column 8, or in Table II B, application no. 19, column 8, or a homolog or a fragment thereof;
   [100184] (b) a nucleic acid molecule shown in Table I, application no. 19, column 5 or 8, preferably shown in Table I A, application no. 19, column 5, or in Table I A, application no. 19, column 8, or in Table I B, application no. 19, column 8, preferably the coding region thereof, or a homolog or a fragment thereof;
   [100185] (c) a nucleic acid molecule, which, as a result of the degeneracy of the genetic code, can be derived from a polypeptide sequence depicted in column 5 or 8 of Table II, application no. 19, preferably shown in Table II A, application no. 19, column 5, or in Table II A, application no. 19, column 8, or in Table II B, application no. 19, column 8;
   [100186] (d) a nucleic acid molecule having at least 30% identity, preferably at least 40%, 50%, 60%, 70%, 75%, 80%, 85%, 90%, 95%, 96%, 97%, 98%, 99%, 99.5%, with the nucleic acid molecule sequence of a polynucleotide comprising the nucleic acid molecule shown in column 5 or 8 of Table I, application no. 19, preferably shown in Table I A, application no. 19, column 5, or in Table I A, application no. 19, column 8, or in Table I B, application no. 19, column 8, preferably the coding region thereof;
   [100187] (e) a nucleic acid molecule encoding a polypeptide having at least 30% identity, preferably at least 40%, 50% 60%, 70%, 75%, 80%, 85%, 90%, 95%, 96%, 97%, 98%, 99%, 99.5%, identity with the amino acid sequence of the polypeptide encoded by the nucleic acid molecule of (a), (b), (c) or (d);
   [100188] (f) a nucleic acid molecule which hybridizes with a nucleic acid molecule of (a), (b), (c), (d) or (e) under stringent hybridization conditions;
   [100189] (g) a nucleic acid molecule encoding a polypeptide which can be isolated with the aid of monoclonal or polyclonal antibodies made against a polypeptide encoded by one of the nucleic acid molecules of (a), (b), (c), (d), (e) or (f);
   [100190] (h) a nucleic acid molecule encoding a polypeptide comprising the consensus sequence or one or more polypeptide motifs as shown in column 8 of Table IV, application no. 19;
   [100191] (i) a nucleic acid molecule encoding a polypeptide having the activity represented by a respective protein as depicted in column 5 of Table II, application no. 19;
   [100192] (j) a nucleic acid molecule comprising a polynucleotide which is obtained by amplifying a cDNA library or a genomic library using the primers in Table III, application no. 19, column 8;
   [100193] and
   [100194] nucleic acid molecule which is obtainable by screening a suitable nucleic acid library, especially a cDNA library and/or a genomic library, under stringent hybridization conditions with a probe comprising one of the sequences of the nucleic acid molecule of (a), (b), (c), (d), (e), (f), (g), (h), (i) or (j) or with a fragment of at least 15 nt, preferably 20 nt, 30 nt, 50 nt, 100 nt, 200 nt,500 nt, 1000 nt, 1500 nt, 2000 nt or 3000 nt of the nucleic acid molecule characterized in (a), (b), (c), (d), (e), (f), (g), (h), (i) or (j);
   [100195] or a nucleic acid molecule comprising a sequence which is complementary thereto. and, optionally
[100196] 3) nucleic acid molecule encoding a transit peptide, preferably encoding a plastidal transit peptide or a mitochondrial transit peptide;
   which are operable linked.
   (All the references to Tables I to IV are references to the corresponding lines of Tables I to IV.)

[100197] In a preferred embodiment thereof said nucleic acid molecule according to 2 (a), (b), (c), (d), (e), (f), (g), (h), (i), (j) or (k) encodes a polypeptide which has the activity of the respective polypeptide represented by a protein comprising a polypeptide as depicted in the respective line in column 5 of Table II, application no. 19.

[100198] In another preferred embodiment thereof said nucleic acid molecule according to 2 (a), (b), (c), (d), (e), (f), (g), (h), (i), (j) or (k) confers a generation or an increase of the respective fine chemical in a non-human organism or a part thereof as compared to a corresponding wild-type non-human organism or part thereof.

[100199] In another preferred embodiment thereof said nucleic acid molecule according to 2 (a), (b), (c), (d), (e), (f), (g), (h), (i), (j) or (k) encodes a polypeptide which has the activity of the respective polypeptide represented by a protein as depicted in the respective line in column 5 of Table II application no. 19 and confers a generation or an increase of the respective fine chemical in a non-human organism or a part thereof as compared to a corresponding wild-type non-human organism or part thereof.

[100200] In another embodiment thereof the expression cassette comprises 3) a nucleic acid molecule encoding a transit peptide, preferably encoding a plastidal transit peptide, especially in case in column 6 of Table I, application no. 19, in the same line as of the respective nucleic acid molecule according to 2) “plastidic” is depicted, or encoding a mitochondrial transit peptide, especially in case in column 6 of Table I, application no. 19, in the same line as of the respective nucleic acid molecule according to 2) “mitochondric” is depicted.

[100201] In another embodiment thereof the expression cassette does not comprise 3) a nucleic acid molecule encoding a transit peptide, especially in case in column 6 of Table I, application no. 19, in the same line as of the respective nucleic acid molecule according to 2) “non-targeted” is depicted.

[100202] In a further embodiment, the invention relates to an expression cassette, comprising
[100203] 1) a promoter, preferably a promoter selected from the group consisting of Big35S, PCUbi, Super and USP;
[100204] 2) a nucleic acid molecule selected from the group consisting of
   [100205] (a) a nucleic acid molecule encoding a polypeptide shown in Table II, application no. 19, column 5 or 8, preferably shown in Table II A, application no. 19, column 5, or in Table II A, application no. 19, column 8, or in Table II B, application no. 19, column 8, or a homolog or a fragment thereof;
   [100206] (b) a nucleic acid molecule shown in Table I, application no. 19, column 5 or 8, preferably shown in Table I A, application no. 19, column 5, or in Table I A, application no. 19, column 8, or in Table I B, application no. 19, column 8, preferably the coding region thereof, or a homolog or a fragment thereof;
   [100207] (c) a nucleic acid molecule, which, as a result of the degeneracy of the genetic code, can be derived from a polypeptide sequence depicted in column 5 or 8 of Table II, application no. 19, preferably shown in Table II A, application no. 19, column 5, or in Table II A, application no. 19, column 8, or in Table II B, application no. 19, column 8;
   [100208] (d) a nucleic acid molecule having at least 30% identity, preferably at least 40%, 50%, 60%, 70%, 75%, 80%, 85%, 90%, 95%, 96%, 97%, 98%, 99%, 99.5%, with the nucleic acid molecule sequence of a polynucleotide comprising the nucleic acid molecule shown in column 5 or 8 of Table I, application no. 19, preferably shown in Table I A, application no. 19, column 5, or in Table I A, application no. 19, column 8,or in Table I B, application no. 19, column 8, preferably the coding region thereof;
   [100209] (e) a nucleic acid molecule encoding a polypeptide having at least 30% identity, preferably at least 40%, 50% 60%, 70%, 75%, 80%, 85%, 90%, 95%, 96%, 97%, 98%, 99%, 99.5%, identity with the amino acid sequence of the polypeptide encoded by the nucleic acid molecule of (a), (b), (c) or (d);
   [100210] (f) a nucleic acid molecule which hybridizes with a nucleic acid molecule of (a), (b), (c), (d) or (e) under stringent hybridization conditions;
   [100211] (g) a nucleic acid molecule encoding a polypeptide which can be isolated with the aid of monoclonal or polyclonal antibodies made against a polypeptide encoded by one of the nucleic acid molecules of (a), (b), (c), (d), (e) or (f);
   [100212] (h) a nucleic acid molecule encoding a polypeptide comprising the consensus sequence or one or more polypeptide motifs as shown in column 8 of Table IV, application no. 19;
   [100213] (i) a nucleic acid molecule encoding a polypeptide having the activity represented by a respective protein as depicted in column 5 of Table II, application no. 19;
   [100214] (j) a nucleic acid molecule comprising a polynucleotide which is obtained by amplifying a cDNA library or a genomic library using the primers in Table III, application no. 19, column 8;
   [100215] and
   [100216] (k) nucleic acid molecule which is obtainable by screening a suitable nucleic acid library, especially a cDNA library and/or a genomic library, under stringent hybridization conditions with a probe comprising one of the sequences of the nucleic acid molecule of (a), (b), (c), (d), (e), (f), (g), (h), (i) or (j) or with a fragment of at least 15 nt, preferably 20 nt, 30 nt, 50 nt, 100 nt, 200 nt,500 nt, 1000 nt, 1500 nt, 2000 nt or 3000 nt of the nucleic acid molecule characterized in (a), (b), (c), (d), (e), (f), (g), (h), (i) or (j);
   [100217] or a nucleic acid molecule comprising a sequence which is complementary thereto; and, optionally
[100218] 3) nucleic acid molecule encoding a transit peptide, preferably encoding a plastidal transit peptide or a mitochondrial transit peptide;
   which are operable linked and
   whereby, preferably, the nucleic acid molecule according to 2 (a), (b), (c), (d), (e), (f), (g), (h), (i), (j) or (k) distinguishes over the sequence depicted in Table I A and/or I B, application no. 19, column 5 or 8, or the coding region thereof, by one or more nucleotides (especially but not exceeding 5%, preferably 4%, 3%, 2%, 1%, 0.5%, 0.2% or 0.1%). In an embodiment, the nucleic acid molecule of the invention according to 2) does not consist of the sequence shown in Table I A and/or I B, application no. 19, column 5 or 8, or the coding region thereof. In another embodiment, the nucleic acid molecule of the present invention, preferably the coding region thereof, is at least 30%, 40%, 50%, 60%, 70%, 80%, 90%, 95% identical but less than 100%, 99.999%, 99.99%, 99.9%, 99%, 98%, 97%, 96% or 95% identical to the sequence shown in Table I A and/or I B, application no. 19, column 5 or 8, or the coding region thereof, respectively. In a further embodiment the nucleic acid molecule does not encode the polypeptide sequence shown in Table II A and/or II B, application no. 19, column 5 or 8 but homologs thereof. Accordingly, in one embodiment, the nucleic acid molecule of the present invention encodes in one embodiment a polypeptide which differs at least in one or more amino acids (especially but not exceeding 5%, preferably 4%, 3%, 2%, 1%, 0.5%, 0.2% or 0.1%) from the polypeptide shown in Table II, application no. 19, column 5 or 8 and does not encode a protein of the sequence shown in Table II A and/or II B, application no. 19, column 5 or 8. Accordingly, in one embodiment, the protein encoded by a sequence of a nucleic acid according to 2(a), (b), (c), (d), (e), (f), (g), (h), (i), (j) or (k) does not consist of the sequence shown in Table I A and/or I B, application no. 19, column 5 or 8, or the coding region thereof. In a further embodiment, the protein of the present invention is at least 30%, 40%, 50%, 60%, 70%, 80%, 90%, 95% identical to protein sequence depicted in Table II A and/or II B, application no. 19, column 5 or 8 but less than 100%, 99.999%, 99.99%, 99.9%, 99%, 98%, 97%, 96% or 95% identical to the sequence shown in Table II A and/or II B, application no. 19, column 5 or 8.
   (All the references to Tables I to IV are references to the corresponding lines of Tables I to IV.)

[100219] In a preferred embodiment thereof said nucleic acid molecule according to 2 (a), (b), (c), (d), (e), (f), (g), (h), (i), (j) or (k) encodes a polypeptide which has the activity of the respective polypeptide represented by a protein comprising a polypeptide as depicted in the respective line in column 5 of Table II, application no. 19.

[100220] In another preferred embodiment thereof said nucleic acid molecule according to 2 (a), (b), (c), (d), (e), (f), (g), (h), (i), (j) or (k) confers a generation or an increase of the respective fine chemical in a non-human organism or a part thereof as compared to a corresponding wild-type non-human organism or part thereof.

[100221] In another preferred embodiment thereof said nucleic acid molecule according to 2 (a), (b), (c), (d), (e), (f), (g), (h), (i), (j) or (k) encodes a polypeptide which has the activity of the respective polypeptide represented by a protein as depicted in the respective line in column 5 of Table II application no. 19 and confers a generation or an increase of the respective fine chemical in a non-human organism or a part thereof as compared to a corresponding wild-type non-human organism or part thereof.

[100222] In another embodiment thereof the expression cassette comprises 3) a nucleic acid molecule encoding a transit peptide, preferably encoding a plastidal transit peptide, especially in case in column 6 of Table I, application no. 19, in the same line as of the respective nucleic acid molecule according to 2) “plastidic” is depicted, or encoding a mitochondrial transit peptide, especially in case in column 6 of Table I, application no. 19, in the same line as of the respective nucleic acid molecule according to 2) “mitochondric” is depicted.

[100223] In another embodiment thereof the expression cassette does not comprise 3) a nucleic acid molecule encoding a transit peptide, especially in case in column 6 of Table I, application no. 19, in the same line as of the respective nucleic acid molecule according to 2) “non-targeted” is depicted.

[100224] In an embodiment the present invention relates to an expresssion cassette comprising a) a promoter, preferably a promoter selected from the group consisting of Big35S, PCUbi, Super and USP, in particular p-PcUBI; and b) the nucleic acid SEQ ID NO. 17451, or a homolog or fragment thereof, or a homolog thereof being depicted in Table I, application no. 19, column 8, in the same line as SEQ ID NO. 17451, preferably the coding region thereof, a homolog or a fragment thereof; which are operable linked.

[100225] In an embodiment thereof the expression cassette comprises in addition c) a nucleic acid molecule encoding a transit peptide, especially a plastidal transit petide in case in Table I, application no. 19, in column 6 in the same line as SEQ ID NO. 17451 is depicted, plastidic is mentioned, or a mitochondrial transit peptide in case in Table I, application no. 19, in column 6 in the same line as SEQ ID NO. 17451 is depicted, mitochondric is mentioned; which is operable linked, too.

[100226] In another embodiment thereof the expression cassette does not comprise an additional transit peptide in case in Table I, application no. 19, in column 6 in the same line as SEQ ID NO. 17451 is depicted, non-targeted is mentioned.

[100227] In an embodiment the present invention relates to an expresssion cassette comprising a) a promoter, preferably a promoter selected from the group consisting of Big35S, PCUbi, Super and USP, in particular p-PcUBI; and b) the nucleic acid SEQ ID NO. 102086, or a homolog or fragment thereof, or a homolog thereof being depicted in Table I, application no. 19, column 8, in the same line as SEQ ID NO. 102086, preferably the coding region thereof, a homolog or a fragment thereof; which are operable linked.

[100228] In an embodiment thereof the expression cassette comprises in addition c) a nucleic acid molecule encoding a transit peptide, especially a plastidal transit petide in case in Table I, application no. 19, in column 6 in the same line as SEQ ID NO. 102086 is depicted, plastidic is mentioned, or a mitochondrial transit peptide in case in Table I, application no. 19, in column 6 in the same line as SEQ ID NO. 102086 is depicted, mitochondric is mentioned; which is operable linked, too.

[100229] In another embodiment thereof the expression cassette does not comprise an additional transit peptide in case in Table I, application no. 19, in column 6 in the same line as SEQ ID NO. 102086 is depicted, non-targeted is mentioned.

[100230] In an embodiment the present invention relates to an expresssion cassette comprising a) a promoter, preferably a promoter selected from the group consisting of Big35S, PCUbi, Super and USP, in particular p-PcUBI; and b) the nucleic acid SEQ ID NO. 17968, or a homolog or fragment thereof, or a homolog thereof being depicted in Table I, application no. 19, column 8, in the same line as SEQ ID NO. 17968, preferably the coding region thereof, a homolog or a fragment thereof; which are operable linked.

[100231] In an embodiment thereof the expression cassette comprises in addition c) a nucleic acid molecule encoding a transit peptide, especially a plastidal transit petide in case in Table I, application no. 19, in column 6 in the same line as SEQ ID NO. 17968 is depicted, plastidic is mentioned, or a mitochondrial transit peptide in case in Table I, application no. 19, in column 6 in the same line as SEQ ID NO. 17968 is depicted, mitochondric is mentioned; which is operable linked, too.

[100232] In another embodiment thereof the expression cassette does not comprise an additional transit peptide in case in Table I, application no. 19, in column 6 in the same line as SEQ ID NO. 17968 is depicted, non-targeted is mentioned.

[100233] In an embodiment the present invention relates to an expresssion cassette comprising a) a promoter, preferably a promoter selected from the group consisting of Big35S, PCUbi, Super and USP, in particular p-PcUBI; and b) the nucleic acid SEQ ID NO. 19364, or a homolog or fragment thereof, or a homolog thereof being depicted in Table I, application no. 19, column 8, in the same line as SEQ ID NO. 19364, preferably the coding region thereof, a homolog or a fragment thereof; which are operable linked.

[100234] In an embodiment thereof the expression cassette comprises in addition c) a nucleic acid molecule encoding a transit peptide, especially a plastidal transit petide in case in Table I, application no. 19, in column 6 in the same line as SEQ ID NO. 19364 is depicted, plastidic is mentioned, or a mitochondrial transit peptide in case in Table I, application no. 19, in column 6 in the same line as SEQ ID NO. 19364 is depicted, mitochondric is mentioned; which is operable linked, too.

[100235] In another embodiment thereof the expression cassette does not comprise an additional transit peptide in case in Table I, application no. 19, in column 6 in the same line as SEQ ID NO. 19364 is depicted, non-targeted is mentioned.

[100236] In an embodiment the present invention relates to an expresssion cassette comprising a) a promoter, preferably a promoter selected from the group consisting of Big35S, PCUbi, Super and USP, in particular p-PcUBI; and b) the nucleic acid SEQ ID NO. 1061, or a homolog or fragment thereof, or a homolog thereof being depicted in Table I, application no. 19, column 8, in the same line as SEQ ID NO. 1061, preferably the coding region thereof, a homolog or a fragment thereof; which are operable linked.

[100237] In an embodiment thereof the expression cassette comprises in addition c) a nucleic acid molecule encoding a transit peptide, especially a plastidal transit petide in case in Table I, application no. 19, in column 6 in the same line as SEQ ID NO. 1061 is depicted, plastidic is mentioned, or a mitochondrial transit peptide in case in Table I, application no. 19, in column 6 in the same line as SEQ ID NO. 1061 is depicted, mitochondric is mentioned; which is operable linked, too.

[100238] In another embodiment thereof the expression cassette does not comprise an additional transit peptide in case in Table I, application no. 19, in column 6 in the same line as SEQ ID NO. 1061 is depicted, non-targeted is mentioned.

[100239] In an embodiment the present invention relates to an expresssion cassette comprising a) a promoter, preferably a promoter selected from the group consisting of Big35S, PCUbi, Super and USP, in particular p-PcUBI; and b) the nucleic acid SEQ ID NO. 19419, or a homolog or fragment thereof, or a homolog thereof being depicted in Table I, application no. 19, column 8, in the same line as SEQ ID NO. 19419, preferably the coding region thereof, a homolog or a fragment thereof; which are operable linked.

[100240] In an embodiment thereof the expression cassette comprises in addition c) a nucleic acid molecule encoding a transit peptide, especially a plastidal transit petide in case in Table I, application no. 19, in column 6 in the same line as SEQ ID NO. 19419 is depicted, plastidic is mentioned, or a mitochondrial transit peptide in case in Table I, application no. 19, in column 6 in the same line as SEQ ID NO. 19419 is depicted, mitochondric is mentioned; which is operable linked, too.

[100241] In another embodiment thereof the expression cassette does not comprise an additional transit peptide in case in Table I, application no. 19, in column 6 in the same line as SEQ ID NO. 19419 is depicted, non-targeted is mentioned.

[100242] In an embodiment the present invention relates to an expresssion cassette comprising a) a promoter, preferably a promoter selected from the group consisting of Big35S, PCUbi, Super and USP, in particular p-PcUBI; and b) the nucleic acid SEQ ID NO. 19919, or a homolog or fragment thereof, or a homolog thereof being depicted in Table I, application no. 19, column 8, in the same line as SEQ ID NO. 19919, preferably the coding region thereof, a homolog or a fragment thereof; which are operable linked.

[100243] In an embodiment thereof the expression cassette comprises in addition c) a nucleic acid molecule encoding a transit peptide, especially a plastidal transit petide in case in Table I, application no. 19, in column 6 in the same line as SEQ ID NO. 19919 is depicted, plastidic is mentioned, or a mitochondrial transit peptide in case in Table I, application no. 19, in column 6 in the same line as SEQ ID NO. 19919 is depicted, mitochondric is mentioned; which is operable linked, too.

[100244] In another embodiment thereof the expression cassette does not comprise an additional transit peptide in case in Table I, application no. 19, in column 6 in the same line as SEQ ID NO. 19919 is depicted, non-targeted is mentioned.

[100245] In an embodiment the present invention relates to an expresssion cassette comprising a) a promoter, preferably a promoter selected from the group consisting of Big35S, PCUbi, Super and USP, in particular p-PcUBI; and b) the nucleic acid SEQ ID NO. 21106, or a homolog or fragment thereof, or a homolog thereof being depicted in Table I, application no. 19, column 8, in the same line as SEQ ID NO. 21106, preferably the coding region thereof, a homolog or a fragment thereof; which are operable linked.

[100246] In an embodiment thereof the expression cassette comprises in addition c) a nucleic acid molecule encoding a transit peptide, especially a plastidal transit petide in case in Table I, application no. 19, in column 6 in the same line as SEQ ID NO. 21106 is depicted, plastidic is mentioned, or a mitochondrial transit peptide in case in Table I, application no. 19, in column 6 in the same line as SEQ ID NO. 21106 is depicted, mitochondric is mentioned; which is operable linked, too.

[100247] In another embodiment thereof the expression cassette does not comprise an additional transit peptide in case in Table I, application no. 19, in column 6 in the same line as SEQ ID NO. 21106 is depicted, non-targeted is mentioned.

[100248] In an embodiment the present invention relates to an expresssion cassette comprising a) a promoter, preferably a promoter selected from the group consisting of Big35S, PCUbi, Super and USP, in particular p-PcUBI; and b) the nucleic acid SEQ ID NO. 68657, or a homolog or fragment thereof, or a homolog thereof being depicted in Table I, application no. 19, column 8, in the same line as SEQ ID NO. 68657, preferably the coding region thereof, a homolog or a fragment thereof; which are operable linked.

[100249] In an embodiment thereof the expression cassette comprises in addition c) a nucleic acid molecule encoding a transit peptide, especially a plastidal transit petide in case in Table I, application no. 19, in column 6 in the same line as SEQ ID NO. 68657 is depicted, plastidic is mentioned, or a mitochondrial transit peptide in case in Table I, application no. 19, in column 6 in the same line as SEQ ID NO. 68657 is depicted, mitochondric is mentioned; which is operable linked, too.

[100250] In another embodiment thereof the expression cassette does not comprise an additional transit peptide in case in Table I, application no. 19, in column 6 in the same line as SEQ ID NO. 68657 is depicted, non-targeted is mentioned.

[100251] In an embodiment the present invention relates to an expresssion cassette comprising a) a promoter, preferably a promoter selected from the group consisting of Big35S, PCUbi, Super and USP, in particular p-PcUBI; and b) the nucleic acid SEQ ID NO. 109717, or a homolog or fragment thereof, or a homolog thereof being depicted in Table I, application no. 19, column 8, in the same line as SEQ ID NO. 109717, preferably the coding region thereof, a homolog or a fragment thereof; which are operable linked.

[100252] In an embodiment thereof the expression cassette comprises in addition c) a nucleic acid molecule encoding a transit peptide, especially a plastidal transit petide in case in Table I, application no. 19, in column 6 in the same line as SEQ ID NO. 109717 is depicted, plastidic is mentioned, or a mitochondrial transit peptide in case in Table I, application no. 19, in column 6 in the same line as SEQ ID NO. 109717 is depicted, mitochondric is mentioned; which is operable linked, too.

[100253] In another embodiment thereof the expression cassette does not comprise an additional transit peptide in case in Table I, application no. 19, in column 6 in the same line as SEQ ID NO. 109717 is depicted, non-targeted is mentioned.

[100254] In an embodiment the present invention relates to an expresssion cassette comprising a) a promoter, preferably a promoter selected from the group consisting of Big35S, PCUbi, Super and USP, in particular p-PcUBI; and b) the nucleic acid SEQ ID NO. 23482, or a homolog or fragment thereof, or a homolog thereof being depicted in Table I, application no. 19, column 8, in the same line as SEQ ID NO. 23482, preferably the coding region thereof, a homolog or a fragment thereof; which are operable linked.

[100255] In an embodiment thereof the expression cassette comprises in addition c) a nucleic acid molecule encoding a transit peptide, especially a plastidal transit petide in case in Table I, application no. 19, in column 6 in the same line as SEQ ID NO. 23482 is depicted, plastidic is mentioned, or a mitochondrial transit peptide in case in Table I, application no. 19, in column 6 in the same line as SEQ ID NO. 23482 is depicted, mitochondric is mentioned; which is operable linked, too.

[100256] In another embodiment thereof the expression cassette does not comprise an additional transit peptide in case in Table I, application no. 19, in column 6 in the same line as SEQ ID NO. 23482 is depicted, non-targeted is mentioned.

[100257] In an embodiment the present invention relates to an expresssion cassette comprising a) a promoter, preferably a promoter selected from the group consisting of Big35S, PCUbi, Super and USP, in particular p-PcUBI; and b) the nucleic acid SEQ ID NO. 3279, or a homolog or fragment thereof, or a homolog thereof being depicted in Table I, application no. 19, column 8, in the same line as SEQ ID NO. 3279, preferably the coding region thereof, a homolog or a fragment thereof; which are operable linked.

[100258] In an embodiment thereof the expression cassette comprises in addition c) a nucleic acid molecule encoding a transit peptide, especially a plastidal transit petide in case in Table I, application no. 19, in column 6 in the same line as SEQ ID NO. 3279 is depicted, plastidic is mentioned, or a mitochondrial transit peptide in case in Table I, application no. 19, in column 6 in the same line as SEQ ID NO. 3279 is depicted, mitochondric is mentioned; which is operable linked, too.

[100259] In another embodiment thereof the expression cassette does not comprise an additional transit peptide in case in Table I, application no. 19, in column 6 in the same line as SEQ ID NO. 3279 is depicted, non-targeted is mentioned.

[100260] In an embodiment the present invention relates to an expresssion cassette comprising a) a promoter, preferably a promoter selected from the group consisting of Big35S, PCUbi, Super and USP, in particular p-PcUBI; and b) the nucleic acid SEQ ID NO. 68849, or a homolog or fragment thereof, or a homolog thereof being depicted in Table I, application no. 19, column 8, in the same line as SEQ ID NO. 68849, preferably the coding region thereof, a homolog or a fragment thereof; which are operable linked.

[100261] In an embodiment thereof the expression cassette comprises in addition c) a nucleic acid molecule encoding a transit peptide, especially a plastidal transit petide in case in Table I, application no. 19, in column 6 in the same line as SEQ ID NO. 68849 is depicted, plastidic is mentioned, or a mitochondrial transit peptide in case in Table I, application no. 19, in column 6 in the same line as SEQ ID NO. 68849 is depicted, mitochondric is mentioned; which is operable linked, too.

[100262] In another embodiment thereof the expression cassette does not comprise an additional transit peptide in case in Table I, application no. 19, in column 6 in the same line as SEQ ID NO. 68849 is depicted, non-targeted is mentioned.

[100263] In an embodiment the present invention relates to an expresssion cassette comprising a) a promoter, preferably a promoter selected from the group consisting of Big35S, PCUbi, Super and USP, in particular p-PcUBI; and b) the nucleic acid SEQ ID NO. 24311, or a homolog or fragment thereof, or a homolog thereof being depicted in Table I, application no. 19, column 8, in the same line as SEQ ID NO. 24311, preferably the coding region thereof, a homolog or a fragment thereof; which are operable linked.

[100264] In an embodiment thereof the expression cassette comprises in addition c) a nucleic acid molecule encoding a transit peptide, especially a plastidal transit petide in case in Table I, application no. 19, in column 6 in the same line as SEQ ID NO. 24311 is depicted, plastidic is mentioned, or a mitochondrial transit peptide in case in Table I, application no. 19, in column 6 in the same line as SEQ ID NO. 24311 is depicted, mitochondric is mentioned; which is operable linked, too.

[100265] In another embodiment thereof the expression cassette does not comprise an additional transit peptide in case in Table I, application no. 19, in column 6 in the same line as SEQ ID NO. 24311 is depicted, non-targeted is mentioned.

[100266] In an embodiment the present invention relates to an expresssion cassette comprising a) a promoter, preferably a promoter selected from the group consisting of Big35S, PCUbi, Super and USP, in particular p-PcUBI; and b) the nucleic acid SEQ ID NO. 4348, or a homolog or fragment thereof, or a homolog thereof being depicted in Table I, application no. 19, column 8, in the same line as SEQ ID NO. 4348, preferably the coding region thereof, a homolog or a fragment thereof; which are operable linked.

[100267] In an embodiment thereof the expression cassette comprises in addition c) a nucleic acid molecule encoding a transit peptide, especially a plastidal transit petide in case in Table I, application no. 19, in column 6 in the same line as SEQ ID NO. 4348 is depicted, plastidic is mentioned, or a mitochondrial transit peptide in case in Table I, application no. 19, in column 6 in the same line as SEQ ID NO. 4348 is depicted, mitochondric is mentioned; which is operable linked, too.

[100268] In another embodiment thereof the expression cassette does not comprise an additional transit peptide in case in Table I, application no. 19, in column 6 in the same line as SEQ ID NO. 4348 is depicted, non-targeted is mentioned.

[100269] In an embodiment the present invention relates to an expresssion cassette comprising a) a promoter, preferably a promoter selected from the group consisting of Big35S, PCUbi, Super and USP, in particular p-PcUBI; and b) the nucleic acid SEQ ID NO. 24438, or a homolog or fragment thereof, or a homolog thereof being depicted in Table I, application no. 19, column 8, in the same line as SEQ ID NO. 24438, preferably the coding region thereof, a homolog or a fragment thereof; which are operable linked.

[100270] In an embodiment thereof the expression cassette comprises in addition c) a nucleic acid molecule encoding a transit peptide, especially a plastidal transit petide in case in Table I, application no. 19, in column 6 in the same line as SEQ ID NO. 24438 is depicted, plastidic is mentioned, or a mitochondrial transit peptide in case in Table I, application no. 19, in column 6 in the same line as SEQ ID NO. 24438 is depicted, mitochondric is mentioned; which is operable linked, too.

[100271] In another embodiment thereof the expression cassette does not comprise an additional transit peptide in case in Table I, application no. 19, in column 6 in the same line as SEQ ID NO. 24438 is depicted, non-targeted is mentioned.

[100272] In an embodiment the present invention relates to an expresssion cassette comprising a) a promoter, preferably a promoter selected from the group consisting of Big35S, PCUbi, Super and USP, in particular p-PcUBI; and b) the nucleic acid SEQ ID NO. 4904, or a homolog or fragment thereof, or a homolog thereof being depicted in Table I, application no. 19, column 8, in the same line as SEQ ID NO. 4904, preferably the coding region thereof, a homolog or a fragment thereof; which are operable linked.

[100273] In an embodiment thereof the expression cassette comprises in addition c) a nucleic acid molecule encoding a transit peptide, especially a plastidal transit petide in case in Table I, application no. 19, in column 6 in the same line as SEQ ID NO. 4904 is depicted, plastidic is mentioned, or a mitochondrial transit peptide in case in Table I, application no. 19, in column 6 in the same line as SEQ ID NO. 4904 is depicted, mitochondric is mentioned; which is operable linked, too.

[100274] In another embodiment thereof the expression cassette does not comprise an additional transit peptide in case in Table I, application no. 19, in column 6 in the same line as SEQ ID NO. 4904 is depicted, non-targeted is mentioned.

[100275] In an embodiment the present invention relates to an expresssion cassette comprising a) a promoter, preferably a promoter selected from the group consisting of Big35S, PCUbi, Super and USP, in particular p-PcUBI; and b) the nucleic acid SEQ ID NO. 5318, or a homolog or fragment thereof, or a homolog thereof being depicted in Table I, application no. 19, column 8, in the same line as SEQ ID NO. 5318, preferably the coding region thereof, a homolog or a fragment thereof; which are operable linked.

[100276] In an embodiment thereof the expression cassette comprises in addition c) a nucleic acid molecule encoding a transit peptide, especially a plastidal transit petide in case in Table I, application no. 19, in column 6 in the same line as SEQ ID NO. 5318 is depicted, plastidic is mentioned, or a mitochondrial transit peptide in case in Table I, application no. 19, in column 6 in the same line as SEQ ID NO. 5318 is depicted, mitochondric is mentioned; which is operable linked, too.

[100277] In another embodiment thereof the expression cassette does not comprise an additional transit peptide in case in Table I, application no. 19, in column 6 in the same line as SEQ ID NO. 5318 is depicted, non-targeted is mentioned.

[100278] In an embodiment the present invention relates to an expresssion cassette comprising a) a promoter, preferably a promoter selected from the group consisting of Big35S, PCUbi, Super and USP, in particular p-PcUBI; and b) the nucleic acid SEQ ID NO. 25498, or a homolog or fragment thereof, or a homolog thereof being depicted in Table I, application no. 19, column 8, in the same line as SEQ ID NO. 25498, preferably the coding region thereof, a homolog or a fragment thereof; which are operable linked.

[100279] In an embodiment thereof the expression cassette comprises in addition c) a nucleic acid molecule encoding a transit peptide, especially a plastidal transit petide in case in Table I, application no. 19, in column 6 in the same line as SEQ ID NO. 25498 is depicted, plastidic is mentioned, or a mitochondrial transit peptide in case in Table I, application no. 19, in column 6 in the same line as SEQ ID NO. 25498 is depicted, mitochondric is mentioned; which is operable linked, too.

[100280] In another embodiment thereof the expression cassette does not comprise an additional transit peptide in case in Table I, application no. 19, in column 6 in the same line as SEQ ID NO. 25498 is depicted, non-targeted is mentioned.

[100281] In an embodiment the present invention relates to an expresssion cassette comprising a) a promoter, preferably a promoter selected from the group consisting of Big35S, PCUbi, Super and USP, in particular p-PcUBI; and b) the nucleic acid SEQ ID NO. 70038, or a homolog or fragment thereof, or a homolog thereof being depicted in Table I, application no. 19, column 8, in the same line as SEQ ID NO. 70038, preferably the coding region thereof, a homolog or a fragment thereof; which are operable linked.

[100282] In an embodiment thereof the expression cassette comprises in addition c) a nucleic acid molecule encoding a transit peptide, especially a plastidal transit petide in case in Table I, application no. 19, in column 6 in the same line as SEQ ID NO. 70038 is depicted, plastidic is mentioned, or a mitochondrial transit peptide in case in Table I, application no. 19, in column 6 in the same line as SEQ ID NO. 70038 is depicted, mitochondric is mentioned; which is operable linked, too.

[100283] In another embodiment thereof the expression cassette does not comprise an additional transit peptide in case in Table I, application no. 19, in column 6 in the same line as SEQ ID NO. 70038 is depicted, non-targeted is mentioned.

[100284] In an embodiment the present invention relates to an expresssion cassette comprising a) a promoter, preferably a promoter selected from the group consisting of Big35S, PCUbi, Super and USP, in particular p-PcUBI; and b) the nucleic acid SEQ ID NO. 70715, or a homolog or fragment thereof, or a homolog thereof being depicted in Table I, application no. 19, column 8, in the same line as SEQ ID NO. 70715, preferably the coding region thereof, a homolog or a fragment thereof; which are operable linked.

[100285] In an embodiment thereof the expression cassette comprises in addition c) a nucleic acid molecule encoding a transit peptide, especially a plastidal transit petide in case in Table I, application no. 19, in column 6 in the same line as SEQ ID NO. 70715 is depicted, plastidic is mentioned, or a mitochondrial transit peptide in case in Table I, application no. 19, in column 6 in the same line as SEQ ID NO. 70715 is depicted, mitochondric is mentioned; which is operable linked, too.

[100286] In another embodiment thereof the expression cassette does not comprise an additional transit peptide in case in Table I, application no. 19, in column 6 in the same line as SEQ ID NO. 70715 is depicted, non-targeted is mentioned.

[100287] In an embodiment the present invention relates to an expresssion cassette comprising a) a promoter, preferably a promoter selected from the group consisting of Big35S, PCUbi, Super and USP, in particular p-PcUBI; and b) the nucleic acid SEQ ID NO. 26196, or a homolog or fragment thereof, or a homolog thereof being depicted in Table I, application no. 19, column 8, in the same line as SEQ ID NO. 26196, preferably the coding region thereof, a homolog or a fragment thereof; which are operable linked.

[100288] In an embodiment thereof the expression cassette comprises in addition c) a nucleic acid molecule encoding a transit peptide, especially a plastidal transit petide in case in Table I, application no. 19, in column 6 in the same line as SEQ ID NO. 26196 is depicted, plastidic is mentioned, or a mitochondrial transit peptide in case in Table I, application no. 19, in column 6 in the same line as SEQ ID NO. 26196 is depicted, mitochondric is mentioned; which is operable linked, too.

[100289] In another embodiment thereof the expression cassette does not comprise an additional transit peptide in case in Table I, application no. 19, in column 6 in the same line as SEQ ID NO. 26196 is depicted, non-targeted is mentioned.

[100290] In an embodiment the present invention relates to an expresssion cassette comprising a) a promoter, preferably a promoter selected from the group consisting of Big35S, PCUbi, Super and USP, in particular p-PcUBI; and b) the nucleic acid SEQ ID NO. 114083, or a homolog or fragment thereof, or a homolog thereof being depicted in Table I, application no. 19, column 8, in the same line as SEQ ID NO. 114083, preferably the coding region thereof, a homolog or a fragment thereof; which are operable linked.

[100291] In an embodiment thereof the expression cassette comprises in addition c) a nucleic acid molecule encoding a transit peptide, especially a plastidal transit petide in case in Table I, application no. 19, in column 6 in the same line as SEQ ID NO. 114083 is depicted, plastidic is mentioned, or a mitochondrial transit peptide in case in Table I, application no. 19, in column 6 in the same line as SEQ ID NO. 114083 is depicted, mitochondric is mentioned; which is operable linked, too.

[100292] In another embodiment thereof the expression cassette does not comprise an additional transit peptide in case in Table I, application no. 19, in column 6 in the same line as SEQ ID NO. 114083 is depicted, non-targeted is mentioned.

[100293] In an embodiment the present invention relates to an expresssion cassette comprising a) a promoter, preferably a promoter selected from the group consisting of Big35S, PCUbi, Super and USP, in particular p-PcUBI; and b) the nucleic acid SEQ ID NO. 114198, or a homolog or fragment thereof, or a homolog thereof being depicted in Table I, application no. 19, column 8, in the same line as SEQ ID NO. 114198, preferably the coding region thereof, a homolog or a fragment thereof; which are operable linked.

[100294] In an embodiment thereof the expression cassette comprises in addition c) a nucleic acid molecule encoding a transit peptide, especially a plastidal transit petide in case in Table I, application no. 19, in column 6 in the same line as SEQ ID NO. 114198 is depicted, plastidic is mentioned, or a mitochondrial transit peptide in case in Table I, application no. 19, in column 6 in the same line as SEQ ID NO. 114198 is depicted, mitochondric is mentioned; which is operable linked, too.

[100295] In another embodiment thereof the expression cassette does not comprise an additional transit peptide in case in Table I, application no. 19, in column 6 in the same line as SEQ ID NO. 114198 is depicted, non-targeted is mentioned.

[100296] In an embodiment the present invention relates to an expresssion cassette comprising a) a promoter, preferably a promoter selected from the group consisting of Big35S, PCUbi, Super and USP, in particular p-PcUBI; and b) the nucleic acid SEQ ID NO. 6040, or a homolog or fragment thereof, or a homolog thereof being depicted in Table I, application no. 19, column 8, in the same line as SEQ ID NO. 6040, preferably the coding region thereof, a homolog or a fragment thereof; which are operable linked.

[100297] In an embodiment thereof the expression cassette comprises in addition c) a nucleic acid molecule encoding a transit peptide, especially a plastidal transit petide in case in Table I, application no. 19, in column 6 in the same line as SEQ ID NO. 6040 is depicted, plastidic is mentioned, or a mitochondrial transit peptide in case in Table I, application no. 19, in column 6 in the same line as SEQ ID NO. 6040 is depicted, mitochondric is mentioned; which is operable linked, too.

[100298] In another embodiment thereof the expression cassette does not comprise an additional transit peptide in case in Table I, application no. 19, in column 6 in the same line as SEQ ID NO. 6040 is depicted, non-targeted is mentioned.

[100299] In an embodiment the present invention relates to an expresssion cassette comprising a) a promoter, preferably a promoter selected from the group consisting of Big35S, PCUbi, Super and USP, in particular p-PcUBI; and b) the nucleic acid SEQ ID NO. 29500, or a homolog or fragment thereof, or a homolog thereof being depicted in Table I, application no. 19, column 8, in the same line as SEQ ID NO. 29500, preferably the coding region thereof, a homolog or a fragment thereof; which are operable linked.

[100300] In an embodiment thereof the expression cassette comprises in addition c) a nucleic acid molecule encoding a transit peptide, especially a plastidal transit petide in case in Table I, application no. 19, in column 6 in the same line as SEQ ID NO. 29500 is depicted, plastidic is mentioned, or a mitochondrial transit peptide in case in Table I, application no. 19, in column 6 in the same line as SEQ ID NO. 29500 is depicted, mitochondric is mentioned; which is operable linked, too.

[100301] In another embodiment thereof the expression cassette does not comprise an additional transit peptide in case in Table I, application no. 19, in column 6 in the same line as SEQ ID NO. 29500 is depicted, non-targeted is mentioned.

[100302] In an embodiment the present invention relates to an expresssion cassette comprising a) a promoter, preferably a promoter selected from the group consisting of Big35S, PCUbi, Super and USP, in particular p-PcUBI; and b) the nucleic acid SEQ ID NO. 111155, or a homolog or fragment thereof, or a homolog thereof being depicted in Table I, application no. 19, column 8, in the same line as SEQ ID NO. 111155, preferably the coding region thereof, a homolog or a fragment thereof; which are operable linked.

[100303] In an embodiment thereof the expression cassette comprises in addition c) a nucleic acid molecule encoding a transit peptide, especially a plastidal transit petide in case in Table I, application no. 19, in column 6 in the same line as SEQ ID NO. 111155 is depicted, plastidic is mentioned, or a mitochondrial transit peptide in case in Table I, application no. 19, in column 6 in the same line as SEQ ID NO. 111155 is depicted, mitochondric is mentioned; which is operable linked, too.

[100304] In another embodiment thereof the expression cassette does not comprise an additional transit peptide in case in Table I, application no. 19, in column 6 in the same line as SEQ ID NO. 111155 is depicted, non-targeted is mentioned.

[100305] In an embodiment the present invention relates to an expresssion cassette comprising a) a promoter, preferably a promoter selected from the group consisting of Big35S, PCUbi, Super and USP, in particular p-PcUBI; and b) the nucleic acid SEQ ID NO. 114231, or a homolog or fragment thereof, or a homolog thereof being depicted in Table I, application no. 19, column 8, in the same line as SEQ ID NO. 114231, preferably the coding region thereof, a homolog or a fragment thereof; which are operable linked.

[100306] In an embodiment thereof the expression cassette comprises in addition c) a nucleic acid molecule encoding a transit peptide, especially a plastidal transit petide in case in Table I, application no. 19, in column 6 in the same line as SEQ ID NO. 114231 is depicted, plastidic is mentioned, or a mitochondrial transit peptide in case in Table I, application no. 19, in column 6 in the same line as SEQ ID NO. 114231 is depicted, mitochondric is mentioned; which is operable linked, too.

[100307] In another embodiment thereof the expression cassette does not comprise an additional transit peptide in case in Table I, application no. 19, in column 6 in the same line as SEQ ID NO. 114231 is depicted, non-targeted is mentioned.

[100308] In an embodiment the present invention relates to an expresssion cassette comprising a) a promoter, preferably a promoter selected from the group consisting of Big35S, PCUbi, Super and USP, in particular p-PcUBI; and b) the nucleic acid SEQ ID NO. 73719, or a homolog or fragment thereof, or a homolog thereof being depicted in Table I, application no. 19, column 8, in the same line as SEQ ID NO. 73719, preferably the coding region thereof, a homolog or a fragment thereof; which are operable linked.

[100309] In an embodiment thereof the expression cassette comprises in addition c) a nucleic acid molecule encoding a transit peptide, especially a plastidal transit petide in case in Table I, application no. 19, in column 6 in the same line as SEQ ID NO. 73719 is depicted, plastidic is mentioned, or a mitochondrial transit peptide in case in Table I, application no. 19, in column 6 in the same line as SEQ ID NO. 73719 is depicted, mitochondric is mentioned; which is operable linked, too.

[100310] In another embodiment thereof the expression cassette does not comprise an additional transit peptide in case in Table I, application no. 19, in column 6 in the same line as SEQ ID NO. 73719 is depicted, non-targeted is mentioned.

[100311] In an embodiment the present invention relates to an expresssion cassette comprising a) a promoter, preferably a promoter selected from the group consisting of Big35S, PCUbi, Super and USP, in particular p-PcUBI; and b) the nucleic acid SEQ ID NO. 6510, or a homolog or fragment thereof, or a homolog thereof being depicted in Table I, application no. 19, column 8, in the same line as SEQ ID NO. 6510, preferably the coding region thereof, a homolog or a fragment thereof; which are operable linked.

[100312] In an embodiment thereof the expression cassette comprises in addition c) a nucleic acid molecule encoding a transit peptide, especially a plastidal transit petide in case in Table I, application no. 19, in column 6 in the same line as SEQ ID NO. 6510 is depicted, plastidic is mentioned, or a mitochondrial transit peptide in case in Table I, application no. 19, in column 6 in the same line as SEQ ID NO. 6510 is depicted, mitochondric is mentioned; which is operable linked, too.

[100313] In another embodiment thereof the expression cassette does not comprise an additional transit peptide in case in Table I, application no. 19, in column 6 in the same line as SEQ ID NO. 6510 is depicted, non-targeted is mentioned.

[100314] In an embodiment the present invention relates to an expresssion cassette comprising a) a promoter, preferably a promoter selected from the group consisting of Big35S, PCUbi, Super and USP, in particular p-PcUBI; and b) the nucleic acid SEQ ID NO. 32648, or a homolog or fragment thereof, or a homolog thereof being depicted in Table I, application no. 19, column 8, in the same line as SEQ ID NO. 32648, preferably the coding region thereof, a homolog or a fragment thereof; which are operable linked.

[100315] In an embodiment thereof the expression cassette comprises in addition c) a nucleic acid molecule encoding a transit peptide, especially a plastidal transit petide in case in Table I, application no. 19, in column 6 in the same line as SEQ ID NO. 32648 is depicted, plastidic is mentioned, or a mitochondrial transit peptide in case in Table I, application no. 19, in column 6 in the same line as SEQ ID NO. 32648 is depicted, mitochondric is mentioned; which is operable linked, too.

[100316] In another embodiment thereof the expression cassette does not comprise an additional transit peptide in case in Table I, application no. 19, in column 6 in the same line as SEQ ID NO. 32648 is depicted, non-targeted is mentioned.

[100317] In an embodiment the present invention relates to an expresssion cassette comprising a) a promoter, preferably a promoter selected from the group consisting of Big35S, PCUbi, Super and USP, in particular p-PcUBI; and b) the nucleic acid SEQ ID NO. 103433, or a homolog or fragment thereof, or a homolog thereof being depicted in Table I, application no. 19, column 8, in the same line as SEQ ID NO. 103433, preferably the coding region thereof, a homolog or a fragment thereof; which are operable linked.

[100318] In an embodiment thereof the expression cassette comprises in addition c) a nucleic acid molecule encoding a transit peptide, especially a plastidal transit petide in case in Table I, application no. 19, in column 6 in the same line as SEQ ID NO. 103433 is depicted, plastidic is mentioned, or a mitochondrial transit peptide in case in Table I, application no. 19, in column 6 in the same line as SEQ ID NO. 103433 is depicted, mitochondric is mentioned; which is operable linked, too.

[100319] In another embodiment thereof the expression cassette does not comprise an additional transit peptide in case in Table I, application no. 19, in column 6 in the same line as SEQ ID NO. 103433 is depicted, non-targeted is mentioned.

[100320] In an embodiment the present invention relates to an expresssion cassette comprising a) a promoter, preferably a promoter selected from the group consisting of Big35S, PCUbi, Super and USP, in particular p-Super; and b) the nucleic acid SEQ ID NO. 34889, or a homolog or fragment thereof, or a homolog thereof being depicted in Table I, application no. 19, column 8, in the same line as SEQ ID NO. 34889, preferably the coding region thereof, a homolog or a fragment thereof; which are operable linked.

[100321] In an embodiment thereof the expression cassette comprises in addition c) a nucleic acid molecule encoding a transit peptide, especially a plastidal transit petide in case in Table I, application no. 19, in column 6 in the same line as SEQ ID NO. 34889 is depicted, plastidic is mentioned, or a mitochondrial transit peptide in case in Table I, application no. 19, in column 6 in the same line as SEQ ID NO. 34889 is depicted, mitochondric is mentioned; which is operable linked, too.

[100322] In another embodiment thereof the expression cassette does not comprise an additional transit peptide in case in Table I, application no. 19, in column 6 in the same line as SEQ ID NO. 34889 is depicted, non-targeted is mentioned.

[100323] In an embodiment the present invention relates to an expresssion cassette comprising a) a promoter, preferably a promoter selected from the group consisting of Big35S, PCUbi, Super and USP, in particular p-Super; and b) the nucleic acid SEQ ID NO. 103958, or a homolog or fragment thereof, or a homolog thereof being depicted in Table I, application no. 19, column 8, in the same line as SEQ ID NO. 103958, preferably the coding region thereof, a homolog or a fragment thereof; which are operable linked.

[100324] In an embodiment thereof the expression cassette comprises in addition c) a nucleic acid molecule encoding a transit peptide, especially a plastidal transit petide in case in Table I, application no. 19, in column 6 in the same line as SEQ ID NO. 103958 is depicted, plastidic is mentioned, or a mitochondrial transit peptide in case in Table I, application no. 19, in column 6 in the same line as SEQ ID NO. 103958 is depicted, mitochondric is mentioned; which is operable linked, too.

[100325] In another embodiment thereof the expression cassette does not comprise an additional transit peptide in case in Table I, application no. 19, in column 6 in the same line as SEQ ID NO. 103958 is depicted, non-targeted is mentioned.

[100326] In an embodiment the present invention relates to an expresssion cassette comprising a) a promoter, preferably a promoter selected from the group consisting of Big35S, PCUbi, Super and USP, in particular p-Super; and b) the nucleic acid SEQ ID NO. 7081, or a homolog or fragment thereof, or a homolog thereof being depicted in Table I, application no. 19, column 8, in the same line as SEQ ID NO. 7081, preferably the coding region thereof, a homolog or a fragment thereof; which are operable linked.

[100327] In an embodiment thereof the expression cassette comprises in addition c) a nucleic acid molecule encoding a transit peptide, especially a plastidal transit petide in case in Table I, application no. 19, in column 6 in the same line as SEQ ID NO. 7081 is depicted, plastidic is mentioned, or a mitochondrial transit peptide in case in Table I, application no. 19, in column 6 in the same line as SEQ ID NO. 7081 is depicted, mitochondric is mentioned; which is operable linked, too.

[100328] In another embodiment thereof the expression cassette does not comprise an additional transit peptide in case in Table I, application no. 19, in column 6 in the same line as SEQ ID NO. 7081 is depicted, non-targeted is mentioned.

[100329] In an embodiment the present invention relates to an expresssion cassette comprising a) a promoter, preferably a promoter selected from the group consisting of Big35S, PCUbi, Super and USP, in particular p-Super; and b) the nucleic acid SEQ ID NO. 7333, or a homolog or fragment thereof, or a homolog thereof being depicted in Table I, application no. 19, column 8, in the same line as SEQ ID NO. 7333, preferably the coding region thereof, a homolog or a fragment thereof; which are operable linked.

[100330] In an embodiment thereof the expression cassette comprises in addition c) a nucleic acid molecule encoding a transit peptide, especially a plastidal transit petide in case in Table I, application no. 19, in column 6 in the same line as SEQ ID NO. 7333 is depicted, plastidic is mentioned, or a mitochondrial transit peptide in case in Table I, application no. 19, in column 6 in the same line as SEQ ID NO. 7333 is depicted, mitochondric is mentioned; which is operable linked, too.

[100331] In another embodiment thereof the expression cassette does not comprise an additional transit peptide in case in Table I, application no. 19, in column 6 in the same line as SEQ ID NO. 7333 is depicted, non-targeted is mentioned.

[100332] In an embodiment the present invention relates to an expresssion cassette comprising a) a promoter, preferably a promoter selected from the group consisting of Big35S, PCUbi, Super and USP, in particular p-Super; and b) the nucleic acid SEQ ID NO. 35936, or a homolog or fragment thereof, or a homolog thereof being depicted in Table I, application no. 19, column 8, in the same line as SEQ ID NO. 35936, preferably the coding region thereof, a homolog or a fragment thereof; which are operable linked.

[100333] In an embodiment thereof the expression cassette comprises in addition c) a nucleic acid molecule encoding a transit peptide, especially a plastidal transit petide in case in Table I, application no. 19, in column 6 in the same line as SEQ ID NO. 35936 is depicted, plastidic is mentioned, or a mitochondrial transit peptide in case in Table I, application no. 19, in column 6 in the same line as SEQ ID NO. 35936 is depicted, mitochondric is mentioned; which is operable linked, too.

[100334] In another embodiment thereof the expression cassette does not comprise an additional transit peptide in case in Table I, application no. 19, in column 6 in the same line as SEQ ID NO. 35936 is depicted, non-targeted is mentioned.

[100335] In an embodiment the present invention relates to an expresssion cassette comprising a) a promoter, preferably a promoter selected from the group consisting of Big35S, PCUbi, Super and USP, in particular p-Super; and b) the nucleic acid SEQ ID NO. 152576, or a homolog or fragment thereof, or a homolog thereof being depicted in Table I, application no. 19, column 8, in the same line as SEQ ID NO. 152576, preferably the coding region thereof, a homolog or a fragment thereof; which are operable linked.

[100336] In an embodiment thereof the expression cassette comprises in addition c) a nucleic acid molecule encoding a transit peptide, especially a plastidal transit petide in case in Table I, application no. 19, in column 6 in the same line as SEQ ID NO. 152576 is depicted, plastidic is mentioned, or a mitochondrial transit peptide in case in Table I, application no. 19, in column 6 in the same line as SEQ ID NO. 152576 is depicted, mitochondric is mentioned; which is operable linked, too.

[100337] In another embodiment thereof the expression cassette does not comprise an additional transit peptide in case in Table I, application no. 19, in column 6 in the same line as SEQ ID NO. 152576 is depicted, non-targeted is mentioned.

[100338] In an embodiment the present invention relates to an expresssion cassette comprising a) a promoter, preferably a promoter selected from the group consisting of Big35S, PCUbi, Super and USP, in particular p-Super; and b) the nucleic acid SEQ ID NO. 131359, or a homolog or fragment thereof, or a homolog thereof being depicted in Table I, application no. 19, column 8, in the same line as SEQ ID NO. 131359, preferably the coding region thereof, a homolog or a fragment thereof; which are operable linked.

[100339] In an embodiment thereof the expression cassette comprises in addition c) a nucleic acid molecule encoding a transit peptide, especially a plastidal transit petide in case in Table I, application no. 19, in column 6 in the same line as SEQ ID NO. 131359 is depicted, plastidic is mentioned, or a mitochondrial transit peptide in case in Table I, application no. 19, in column 6 in the same line as SEQ ID NO. 131359 is depicted, mitochondric is mentioned; which is operable linked, too.

[100340] In another embodiment thereof the expression cassette does not comprise an additional transit peptide in case in Table I, application no. 19, in column 6 in the same line as SEQ ID NO. 131359 is depicted, non-targeted is mentioned.

[100341] In an embodiment the present invention relates to an expresssion cassette comprising a) a promoter, preferably a promoter selected from the group consisting of Big35S, PCUbi, Super and USP, in particular p-Super; and b) the nucleic acid SEQ ID NO. 36670, or a homolog or fragment thereof, or a homolog thereof being depicted in Table I, application no. 19, column 8, in the same line as SEQ ID NO. 36670, preferably the coding region thereof, a homolog or a fragment thereof; which are operable linked.

[100342] In an embodiment thereof the expression cassette comprises in addition c) a nucleic acid molecule encoding a transit peptide, especially a plastidal transit petide in case in Table I, application no. 19, in column 6 in the same line as SEQ ID NO. 36670 is depicted, plastidic is mentioned, or a mitochondrial transit peptide in case in Table I, application no. 19, in column 6 in the same line as SEQ ID NO. 36670 is depicted, mitochondric is mentioned; which is operable linked, too.

[100343] In another embodiment thereof the expression cassette does not comprise an additional transit peptide in case in Table I, application no. 19, in column 6 in the same line as SEQ ID NO. 36670 is depicted, non-targeted is mentioned.

[100344] In an embodiment the present invention relates to an expresssion cassette comprising a) a promoter, preferably a promoter selected from the group consisting of Big35S, PCUbi, Super and USP, in particular p-Super; and b) the nucleic acid SEQ ID NO. 144479, or a homolog or fragment thereof, or a homolog thereof being depicted in Table I, application no. 19, column 8, in the same line as SEQ ID NO. 144479, preferably the coding region thereof, a homolog or a fragment thereof; which are operable linked.

[100345] In an embodiment thereof the expression cassette comprises in addition c) a nucleic acid molecule encoding a transit peptide, especially a plastidal transit petide in case in Table I, application no. 19, in column 6 in the same line as SEQ ID NO. 144479 is depicted, plastidic is mentioned, or a mitochondrial transit peptide in case in Table I, application no. 19, in column 6 in the same line as SEQ ID NO. 144479 is depicted, mitochondric is mentioned; which is operable linked, too.

[100346] In another embodiment thereof the expression cassette does not comprise an additional transit peptide in case in Table I, application no. 19, in column 6 in the same line as SEQ ID NO. 144479 is depicted, non-targeted is mentioned.

[100347] In an embodiment the present invention relates to an expresssion cassette comprising a) a promoter, preferably a promoter selected from the group consisting of Big35S, PCUbi, Super and USP, in particular p-Super; and b) the nucleic acid SEQ ID NO. 7941, or a homolog or fragment thereof, or a homolog thereof being depicted in Table I, application no. 19, column 8, in the same line as SEQ ID NO. 7941, preferably the coding region thereof, a homolog or a fragment thereof; which are operable linked.

[100348] In an embodiment thereof the expression cassette comprises in addition c) a nucleic acid molecule encoding a transit peptide, especially a plastidal transit petide in case in Table I, application no. 19, in column 6 in the same line as SEQ ID NO. 7941 is depicted, plastidic is mentioned, or a mitochondrial transit peptide in case in Table I, application no. 19, in column 6 in the same line as SEQ ID NO. 7941 is depicted, mitochondric is mentioned; which is operable linked, too.

[100349] In another embodiment thereof the expression cassette does not comprise an additional transit peptide in case in Table I, application no. 19, in column 6 in the same line as SEQ ID NO. 7941 is depicted, non-targeted is mentioned.

[100350] In an embodiment the present invention relates to an expresssion cassette comprising a) a promoter, preferably a promoter selected from the group consisting of Big35S, PCUbi, Super and USP, in particular p-Super; and b) the nucleic acid SEQ ID NO. 114552, or a homolog or fragment thereof, or a homolog thereof being depicted in Table I, application no. 19, column 8, in the same line as SEQ ID NO. 114552, preferably the coding region thereof, a homolog or a fragment thereof; which are operable linked.

[100351] In an embodiment thereof the expression cassette comprises in addition c) a nucleic acid molecule encoding a transit peptide, especially a plastidal transit petide in case in Table I, application no. 19, in column 6 in the same line as SEQ ID NO. 114552 is depicted, plastidic is mentioned, or a mitochondrial transit peptide in case in Table I, application no. 19, in column 6 in the same line as SEQ ID NO. 114552 is depicted, mitochondric is mentioned; which is operable linked, too.

[100352] In another embodiment thereof the expression cassette does not comprise an additional transit peptide in case in Table I, application no. 19, in column 6 in the same line as SEQ ID NO. 114552 is depicted, non-targeted is mentioned.

[100353] In an embodiment the present invention relates to an expresssion cassette comprising a) a promoter, preferably a promoter selected from the group consisting of Big35S, PCUbi, Super and USP, in particular p-Super; and b) the nucleic acid SEQ ID NO. 37400, or a homolog or fragment thereof, or a homolog thereof being depicted in Table I, application no. 19, column 8, in the same line as SEQ ID NO. 37400, preferably the coding region thereof, a homolog or a fragment thereof; which are operable linked.

[100354] In an embodiment thereof the expression cassette comprises in addition c) a nucleic acid molecule encoding a transit peptide, especially a plastidal transit petide in case in Table I, application no. 19, in column 6 in the same line as SEQ ID NO. 37400 is depicted, plastidic is mentioned, or a mitochondrial transit peptide in case in Table I, application no. 19, in column 6 in the same line as SEQ ID NO. 37400 is depicted, mitochondric is mentioned; which is operable linked, too.

[100355] In another embodiment thereof the expression cassette does not comprise an additional transit peptide in case in Table I, application no. 19, in column 6 in the same line as SEQ ID NO. 37400 is depicted, non-targeted is mentioned.

[100356] In an embodiment the present invention relates to an expresssion cassette comprising a) a promoter, preferably a promoter selected from the group consisting of Big35S, PCUbi, Super and USP, in particular p-Super; and b) the nucleic acid SEQ ID NO. 112111, or a homolog or fragment thereof, or a homolog thereof being depicted in Table I, application no. 19, column 8, in the same line as SEQ ID NO. 112111, preferably the coding region thereof, a homolog or a fragment thereof; which are operable linked.

[100357] In an embodiment thereof the expression cassette comprises in addition c) a nucleic acid molecule encoding a transit peptide, especially a plastidal transit petide in case in Table I, application no. 19, in column 6 in the same line as SEQ ID NO. 112111 is depicted, plastidic is mentioned, or a mitochondrial transit peptide in case in Table I, application no. 19, in column 6 in the same line as SEQ ID NO. 112111 is depicted, mitochondric is mentioned; which is operable linked, too.

[100358] In another embodiment thereof the expression cassette does not comprise an additional transit peptide in case in Table I, application no. 19, in column 6 in the same line as SEQ ID NO. 112111 is depicted, non-targeted is mentioned.

[100359] In an embodiment the present invention relates to an expresssion cassette comprising a) a promoter, preferably a promoter selected from the group consisting of Big35S, PCUbi, Super and USP, in particular p-USP; and b) the nucleic acid SEQ ID NO. 98778, or a homolog or fragment thereof, or a homolog thereof being depicted in Table I, application no. 19, column 8, in the same line as SEQ ID NO. 98778, preferably the coding region thereof, a homolog or a fragment thereof; which are operable linked.

[100360] In an embodiment thereof the expression cassette comprises in addition c) a nucleic acid molecule encoding a transit peptide, especially a plastidal transit petide in case in Table I, application no. 19, in column 6 in the same line as SEQ ID NO. 98778 is depicted, plastidic is mentioned, or a mitochondrial transit peptide in case in Table I, application no. 19, in column 6 in the same line as SEQ ID NO. 98778 is depicted, mitochondric is mentioned; which is operable linked, too.

[100361] In another embodiment thereof the expression cassette does not comprise an additional transit peptide in case in Table I, application no. 19, in column 6 in the same line as SEQ ID NO. 98778 is depicted, non-targeted is mentioned.

[100362] In an embodiment the present invention relates to an expresssion cassette comprising a) a promoter, preferably a promoter selected from the group consisting of Big35S, PCUbi, Super and USP, in particular p-Super; and b) the nucleic acid SEQ ID NO. 38226, or a homolog or fragment thereof, or a homolog thereof being depicted in Table I, application no. 19, column 8, in the same line as SEQ ID NO. 38226, preferably the coding region thereof, a homolog or a fragment thereof; which are operable linked.

[100363] In an embodiment thereof the expression cassette comprises in addition c) a nucleic acid molecule encoding a transit peptide, especially a plastidal transit petide in case in Table I, application no. 19, in column 6 in the same line as SEQ ID NO. 38226 is depicted, plastidic is mentioned, or a mitochondrial transit peptide in case in Table I, application no. 19, in column 6 in the same line as SEQ ID NO. 38226 is depicted, mitochondric is mentioned; which is operable linked, too.

[100364] In another embodiment thereof the expression cassette does not comprise an additional transit peptide in case in Table I, application no. 19, in column 6 in the same line as SEQ ID NO. 38226 is depicted, non-targeted is mentioned.

[100365] In an embodiment the present invention relates to an expresssion cassette comprising a) a promoter, preferably a promoter selected from the group consisting of Big35S, PCUbi, Super and USP, in particular p-Super; and b) the nucleic acid SEQ ID NO. 76890, or a homolog or fragment thereof, or a homolog thereof being depicted in Table I, application no. 19, column 8, in the same line as SEQ ID NO. 76890, preferably the coding region thereof, a homolog or a fragment thereof; which are operable linked.

[100366] In an embodiment thereof the expression cassette comprises in addition c) a nucleic acid molecule encoding a transit peptide, especially a plastidal transit petide in case in Table I, application no. 19, in column 6 in the same line as SEQ ID NO. 76890 is depicted, plastidic is mentioned, or a mitochondrial transit peptide in case in Table I, application no. 19, in column 6 in the same line as SEQ ID NO. 76890 is depicted, mitochondric is mentioned; which is operable linked, too.

[100367] In another embodiment thereof the expression cassette does not comprise an additional transit peptide in case in Table I, application no. 19, in column 6 in the same line as SEQ ID NO. 76890 is depicted, non-targeted is mentioned.

[100368] In an embodiment the present invention relates to an expresssion cassette comprising a) a promoter, preferably a promoter selected from the group consisting of Big35S, PCUbi, Super and USP, in particular p-Super; and b) the nucleic acid SEQ ID NO. 131489, or a homolog or fragment thereof, or a homolog thereof being depicted in Table I, application no. 19, column 8, in the same line as SEQ ID NO. 131489, preferably the coding region thereof, a homolog or a fragment thereof; which are operable linked.

[100369] In an embodiment thereof the expression cassette comprises in addition c) a nucleic acid molecule encoding a transit peptide, especially a plastidal transit petide in case in Table I, application no. 19, in column 6 in the same line as SEQ ID NO. 131489 is depicted, plastidic is mentioned, or a mitochondrial transit peptide in case in Table I, application no. 19, in column 6 in the same line as SEQ ID NO. 131489 is depicted, mitochondric is mentioned; which is operable linked, too.

[100370] In another embodiment thereof the expression cassette does not comprise an additional transit peptide in case in Table I, application no. 19, in column 6 in the same line as SEQ ID NO. 131489 is depicted, non-targeted is mentioned.

[100371] In an embodiment the present invention relates to an expresssion cassette comprising a) a promoter, preferably a promoter selected from the group consisting of Big35S, PCUbi, Super and USP, in particular p-Super; and b) the nucleic acid SEQ ID NO. 38266, or a homolog or fragment thereof, or a homolog thereof being depicted in Table I, application no. 19, column 8, in the same line as SEQ ID NO. 38266, preferably the coding region thereof, a homolog or a fragment thereof; which are operable linked.

[100372] In an embodiment thereof the expression cassette comprises in addition c) a nucleic acid molecule encoding a transit peptide, especially a plastidal transit petide in case in Table I, application no. 19, in column 6 in the same line as SEQ ID NO. 38266 is depicted, plastidic is mentioned, or a mitochondrial transit peptide in case in Table I, application no. 19, in column 6 in the same line as SEQ ID NO. 38266 is depicted, mitochondric is mentioned; which is operable linked, too.

[100373] In another embodiment thereof the expression cassette does not comprise an additional transit peptide in case in Table I, application no. 19, in column 6 in the same line as SEQ ID NO. 38266 is depicted, non-targeted is mentioned.

[100374] In an embodiment the present invention relates to an expresssion cassette comprising a) a promoter, preferably a promoter selected from the group consisting of Big35S, PCUbi, Super and USP, in particular p-Super; and b) the nucleic acid SEQ ID NO. 7947, or a homolog or fragment thereof, or a homolog thereof being depicted in Table I, application no. 19, column 8, in the same line as SEQ ID NO. 7947, preferably the coding region thereof, a homolog or a fragment thereof; which are operable linked.

[100375] In an embodiment thereof the expression cassette comprises in addition c) a nucleic acid molecule encoding a transit peptide, especially a plastidal transit petide in case in Table I, application no. 19, in column 6 in the same line as SEQ ID NO. 7947 is depicted, plastidic is mentioned, or a mitochondrial transit peptide in case in Table I, application no. 19, in column 6 in the same line as SEQ ID NO. 7947 is depicted, mitochondric is mentioned; which is operable linked, too.

[100376] In another embodiment thereof the expression cassette does not comprise an additional transit peptide in case in Table I, application no. 19, in column 6 in the same line as SEQ ID NO. 7947 is depicted, non-targeted is mentioned.

[100377] In an embodiment the present invention relates to an expresssion cassette comprising a) a promoter, preferably a promoter selected from the group consisting of Big35S, PCUbi, Super and USP, in particular p-Super; and b) the nucleic acid SEQ ID NO. 152991, or a homolog or fragment thereof, or a homolog thereof being depicted in Table I, application no. 19, column 8, in the same line as SEQ ID NO. 152991, preferably the coding region thereof, a homolog or a fragment thereof; which are operable linked.

[100378] In an embodiment thereof the expression cassette comprises in addition c) a nucleic acid molecule encoding a transit peptide, especially a plastidal transit petide in case in Table I, application no. 19, in column 6 in the same line as SEQ ID NO. 152991 is depicted, plastidic is mentioned, or a mitochondrial transit peptide in case in Table I, application no. 19, in column 6 in the same line as SEQ ID NO. 152991 is depicted, mitochondric is mentioned; which is operable linked, too.

[100379] In another embodiment thereof the expression cassette does not comprise an additional transit peptide in case in Table I, application no. 19, in column 6 in the same line as SEQ ID NO. 152991 is depicted, non-targeted is mentioned.

[100380] In an embodiment the present invention relates to an expresssion cassette comprising a) a promoter, preferably a promoter selected from the group consisting of Big35S, PCUbi, Super and USP, in particular p-Super; and b) the nucleic acid SEQ ID NO. 145142, or a homolog or fragment thereof, or a homolog thereof being depicted in Table I, application no. 19, column 8, in the same line as SEQ ID NO. 145142, preferably the coding region thereof, a homolog or a fragment thereof; which are operable linked.

[100381] In an embodiment thereof the expression cassette comprises in addition c) a nucleic acid molecule encoding a transit peptide, especially a plastidal transit petide in case in Table I, application no. 19, in column 6 in the same line as SEQ ID NO. 145142 is depicted, plastidic is mentioned, or a mitochondrial transit peptide in case in Table I, application no. 19, in column 6 in the same line as SEQ ID NO. 145142 is depicted, mitochondric is mentioned; which is operable linked, too.

[100382] In another embodiment thereof the expression cassette does not comprise an additional transit peptide in case in Table I, application no. 19, in column 6 in the same line as SEQ ID NO. 145142 is depicted, non-targeted is mentioned.

[100383] In an embodiment the present invention relates to an expresssion cassette comprising a) a promoter, preferably a promoter selected from the group consisting of Big35S, PCUbi, Super and USP, in particular p-Super; and b) the nucleic acid SEQ ID NO. 78138, or a homolog or fragment thereof, or a homolog thereof being depicted in Table I, application no. 19, column 8, in the same line as SEQ ID NO. 78138, preferably the coding region thereof, a homolog or a fragment thereof; which are operable linked.

[100384] In an embodiment thereof the expression cassette comprises in addition c) a nucleic acid molecule encoding a transit peptide, especially a plastidal transit petide in case in Table I, application no. 19, in column 6 in the same line as SEQ ID NO. 78138 is depicted, plastidic is mentioned, or a mitochondrial transit peptide in case in Table I, application no. 19, in column 6 in the same line as SEQ ID NO. 78138 is depicted, mitochondric is mentioned; which is operable linked, too.

[100385] In another embodiment thereof the expression cassette does not comprise an additional transit peptide in case in Table I, application no. 19, in column 6 in the same line as SEQ ID NO. 78138 is depicted, non-targeted is mentioned.

[100386] In an embodiment the present invention relates to an expresssion cassette comprising a) a promoter, preferably a promoter selected from the group consisting of Big35S, PCUbi, Super and USP, in particular p-Super; and b) the nucleic acid SEQ ID NO. 78154, or a homolog or fragment thereof, or a homolog thereof being depicted in Table I, application no. 19, column 8, in the same line as SEQ ID NO. 78154, preferably the coding region thereof, a homolog or a fragment thereof; which are operable linked.

[100387] In an embodiment thereof the expression cassette comprises in addition c) a nucleic acid molecule encoding a transit peptide, especially a plastidal transit petide in case in Table I, application no. 19, in column 6 in the same line as SEQ ID NO. 78154 is depicted, plastidic is mentioned, or a mitochondrial transit peptide in case in Table I, application no. 19, in column 6 in the same line as SEQ ID NO. 78154 is depicted, mitochondric is mentioned; which is operable linked, too.

[100388] In another embodiment thereof the expression cassette does not comprise an additional transit peptide in case in Table I, application no. 19, in column 6 in the same line as SEQ ID NO. 78154 is depicted, non-targeted is mentioned.

[100389] In an embodiment the present invention relates to an expresssion cassette comprising a) a promoter, preferably a promoter selected from the group consisting of Big35S, PCUbi, Super and USP, in particular p-Super; and b) the nucleic acid SEQ ID NO. 38300, or a homolog or fragment thereof, or a homolog thereof being depicted in Table I, application no. 19, column 8, in the same line as SEQ ID NO. 38300, preferably the coding region thereof, a homolog or a fragment thereof; which are operable linked.

[100390] In an embodiment thereof the expression cassette comprises in addition c) a nucleic acid molecule encoding a transit peptide, especially a plastidal transit petide in case in Table I, application no. 19, in column 6 in the same line as SEQ ID NO. 38300 is depicted, plastidic is mentioned, or a mitochondrial transit peptide in case in Table I, application no. 19, in column 6 in the same line as SEQ ID NO. 38300 is depicted, mitochondric is mentioned; which is operable linked, too.

[100391] In another embodiment thereof the expression cassette does not comprise an additional transit peptide in case in Table I, application no. 19, in column 6 in the same line as SEQ ID NO. 38300 is depicted, non-targeted is mentioned.

[100392] In an embodiment the present invention relates to an expresssion cassette comprising a) a promoter, preferably a promoter selected from the group consisting of Big35S, PCUbi, Super and USP, in particular p-Super; and b) the nucleic acid SEQ ID NO. 78753, or a homolog or fragment thereof, or a homolog thereof being depicted in Table I, application no. 19, column 8, in the same line as SEQ ID NO. 78753, preferably the coding region thereof, a homolog or a fragment thereof; which are operable linked.

[100393] In an embodiment thereof the expression cassette comprises in addition c) a nucleic acid molecule encoding a transit peptide, especially a plastidal transit petide in case in Table I, application no. 19, in column 6 in the same line as SEQ ID NO. 78753 is depicted, plastidic is mentioned, or a mitochondrial transit peptide in case in Table I, application no. 19, in column 6 in the same line as SEQ ID NO. 78753 is depicted, mitochondric is mentioned; which is operable linked, too.

[100394] In another embodiment thereof the expression cassette does not comprise an additional transit peptide in case in Table I, application no. 19, in column 6 in the same line as SEQ ID NO. 78753 is depicted, non-targeted is mentioned.

[100395] In an embodiment the present invention relates to an expresssion cassette comprising a) a promoter, preferably a promoter selected from the group consisting of Big35S, PCUbi, Super and USP, in particular p-Super; and b) the nucleic acid SEQ ID NO. 78771, or a homolog or fragment thereof, or a homolog thereof being depicted in Table I, application no. 19, column 8, in the same line as SEQ ID NO. 78771, preferably the coding region thereof, a homolog or a fragment thereof; which are operable linked.

[100396] In an embodiment thereof the expression cassette comprises in addition c) a nucleic acid molecule encoding a transit peptide, especially a plastidal transit petide in case in Table I, application no. 19, in column 6 in the same line as SEQ ID NO. 78771 is depicted, plastidic is mentioned, or a mitochondrial transit peptide in case in Table I, application no. 19, in column 6 in the same line as SEQ ID NO. 78771 is depicted, mitochondric is mentioned; which is operable linked, too.

[100397] In another embodiment thereof the expression cassette does not comprise an additional transit peptide in case in Table I, application no. 19, in column 6 in the same line as SEQ ID NO. 78771 is depicted, non-targeted is mentioned.

[100398] In an embodiment the present invention relates to an expresssion cassette comprising a) a promoter, preferably a promoter selected from the group consisting of Big35S, PCUbi, Super and USP, in particular p-Super; and b) the nucleic acid SEQ ID NO. 124907, or a homolog or fragment thereof, or a homolog thereof being depicted in Table I, application no. 19, column 8, in the same line as SEQ ID NO. 124907, preferably the coding region thereof, a homolog or a fragment thereof; which are operable linked.

[100399] In an embodiment thereof the expression cassette comprises in addition c) a nucleic acid molecule encoding a transit peptide, especially a plastidal transit petide in case in Table I, application no. 19, in column 6 in the same line as SEQ ID NO. 124907 is depicted, plastidic is mentioned, or a mitochondrial transit peptide in case in Table I, application no. 19, in column 6 in the same line as SEQ ID NO. 124907 is depicted, mitochondric is mentioned; which is operable linked, too.

[100400] In another embodiment thereof the expression cassette does not comprise an additional transit peptide in case in Table I, application no. 19, in column 6 in the same line as SEQ ID NO. 124907 is depicted, non-targeted is mentioned.

[100401] In an embodiment the present invention relates to an expresssion cassette comprising a) a promoter, preferably a promoter selected from the group consisting of Big35S, PCUbi, Super and USP, in particular p-Super; and b) the nucleic acid SEQ ID NO. 153072, or a homolog or fragment thereof, or a homolog thereof being depicted in Table I, application no. 19, column 8, in the same line as SEQ ID NO. 153072, preferably the coding region thereof, a homolog or a fragment thereof; which are operable linked.

[100402] In an embodiment thereof the expression cassette comprises in addition c) a nucleic acid molecule encoding a transit peptide, especially a plastidal transit petide in case in Table I, application no. 19, in column 6 in the same line as SEQ ID NO. 153072 is depicted, plastidic is mentioned, or a mitochondrial transit peptide in case in Table I, application no. 19, in column 6 in the same line as SEQ ID NO. 153072 is depicted, mitochondric is mentioned; which is operable linked, too.

[100403] In another embodiment thereof the expression cassette does not comprise an additional transit peptide in case in Table I, application no. 19, in column 6 in the same line as SEQ ID NO. 153072 is depicted, non-targeted is mentioned.

[100404] In an embodiment the present invention relates to an expresssion cassette comprising a) a promoter, preferably a promoter selected from the group consisting of Big35S, PCUbi, Super and USP, in particular p-Super; and b) the nucleic acid SEQ ID NO. 131539, or a homolog or fragment thereof, or a homolog thereof being depicted in Table I, application no. 19, column 8, in the same line as SEQ ID NO. 131539, preferably the coding region thereof, a homolog or a fragment thereof; which are operable linked.

[100405] In an embodiment thereof the expression cassette comprises in addition c) a nucleic acid molecule encoding a transit peptide, especially a plastidal transit petide in case in Table I, application no. 19, in column 6 in the same line as SEQ ID NO. 131539 is depicted, plastidic is mentioned, or a mitochondrial transit peptide in case in Table I, application no. 19, in column 6 in the same line as SEQ ID NO. 131539 is depicted, mitochondric is mentioned; which is operable linked, too.

[100406] In another embodiment thereof the expression cassette does not comprise an additional transit peptide in case in Table I, application no. 19, in column 6 in the same line as SEQ ID NO. 131539 is depicted, non-targeted is mentioned.

[100407] In an embodiment the present invention relates to an expresssion cassette comprising a) a promoter, preferably a promoter selected from the group consisting of Big35S, PCUbi, Super and USP, in particular p-USP; and b) the nucleic acid SEQ ID NO. 8033, or a homolog or fragment thereof, or a homolog thereof being depicted in Table I, application no. 19, column 8, in the same line as SEQ ID NO. 8033, preferably the coding region thereof, a homolog or a fragment thereof; which are operable linked.

[100408] In an embodiment thereof the expression cassette comprises in addition c) a nucleic acid molecule encoding a transit peptide, especially a plastidal transit petide in case in Table I, application no. 19, in column 6 in the same line as SEQ ID NO. 8033 is depicted, plastidic is mentioned, or a mitochondrial transit peptide in case in Table I, application no. 19, in column 6 in the same line as SEQ ID NO. 8033 is depicted, mitochondric is mentioned; which is operable linked, too.

[100409] In another embodiment thereof the expression cassette does not comprise an additional transit peptide in case in Table I, application no. 19, in column 6 in the same line as SEQ ID NO. 8033 is depicted, non-targeted is mentioned.

[100410] In an embodiment the present invention relates to an expresssion cassette comprising a) a promoter, preferably a promoter selected from the group consisting of Big35S, PCUbi, Super and USP, in particular p-Super; and b) the nucleic acid SEQ ID NO. 78953, or a homolog or fragment thereof, or a homolog thereof being depicted in Table I, application no. 19, column 8, in the same line as SEQ ID NO. 78953, preferably the coding region thereof, a homolog or a fragment thereof; which are operable linked.

[100411] In an embodiment thereof the expression cassette comprises in addition c) a nucleic acid molecule encoding a transit peptide, especially a plastidal transit petide in case in Table I, application no. 19, in column 6 in the same line as SEQ ID NO. 78953 is depicted, plastidic is mentioned, or a mitochondrial transit peptide in case in Table I, application no. 19, in column 6 in the same line as SEQ ID NO. 78953 is depicted, mitochondric is mentioned; which is operable linked, too.

[100412] In another embodiment thereof the expression cassette does not comprise an additional transit peptide in case in Table I, application no. 19, in column 6 in the same line as SEQ ID NO. 78953 is depicted, non-targeted is mentioned.

[100413] In an embodiment the present invention relates to an expresssion cassette comprising a) a promoter, preferably a promoter selected from the group consisting of Big35S, PCUbi, Super and USP, in particular p-Super; and b) the nucleic acid SEQ ID NO. 79056, or a homolog or fragment thereof, or a homolog thereof being depicted in Table I, application no. 19, column 8, in the same line as SEQ ID NO. 79056, preferably the coding region thereof, a homolog or a fragment thereof; which are operable linked.

[100414] In an embodiment thereof the expression cassette comprises in addition c) a nucleic acid molecule encoding a transit peptide, especially a plastidal transit petide in case in Table I, application no. 19, in column 6 in the same line as SEQ ID NO. 79056 is depicted, plastidic is mentioned, or a mitochondrial transit peptide in case in Table I, application no. 19, in column 6 in the same line as SEQ ID NO. 79056 is depicted, mitochondric is mentioned; which is operable linked, too.

[100415] In another embodiment thereof the expression cassette does not comprise an additional transit peptide in case in Table I, application no. 19, in column 6 in the same line as SEQ ID NO. 79056 is depicted, non-targeted is mentioned.

[100416] In an embodiment the present invention relates to an expresssion cassette comprising a) a promoter, preferably a promoter selected from the group consisting of Big35S, PCUbi, Super and USP, in particular p-USP; and b) the nucleic acid SEQ ID NO. 99371, or a homolog or fragment thereof, or a homolog thereof being depicted in Table I, application no. 19, column 8, in the same line as SEQ ID NO. 99371, preferably the coding region thereof, a homolog or a fragment thereof; which are operable linked.

[100417] In an embodiment thereof the expression cassette comprises in addition c) a nucleic acid molecule encoding a transit peptide, especially a plastidal transit petide in case in Table I, application no. 19, in column 6 in the same line as SEQ ID NO. 99371 is depicted, plastidic is mentioned, or a mitochondrial transit peptide in case in Table I, application no. 19, in column 6 in the same line as SEQ ID NO. 99371 is depicted, mitochondric is mentioned; which is operable linked, too.

[100418] In another embodiment thereof the expression cassette does not comprise an additional transit peptide in case in Table I, application no. 19, in column 6 in the same line as SEQ ID NO. 99371 is depicted, non-targeted is mentioned.

[100419] In an embodiment the present invention relates to an expresssion cassette comprising a) a promoter, preferably a promoter selected from the group consisting of Big35S, PCUbi, Super and USP, in particular p-Super; and b) the nucleic acid SEQ ID NO. 8920, or a homolog or fragment thereof, or a homolog thereof being depicted in Table I, application no. 19, column 8, in the same line as SEQ ID NO. 8920, preferably the coding region thereof, a homolog or a fragment thereof; which are operable linked.

[100420] In an embodiment thereof the expression cassette comprises in addition c) a nucleic acid molecule encoding a transit peptide, especially a plastidal transit petide in case in Table I, application no. 19, in column 6 in the same line as SEQ ID NO. 8920 is depicted, plastidic is mentioned, or a mitochondrial transit peptide in case in Table I, application no. 19, in column 6 in the same line as SEQ ID NO. 8920 is depicted, mitochondric is mentioned; which is operable linked, too.

[100421] In another embodiment thereof the expression cassette does not comprise an additional transit peptide in case in Table I, application no. 19, in column 6 in the same line as SEQ ID NO. 8920 is depicted, non-targeted is mentioned.

[100422] In an embodiment the present invention relates to an expresssion cassette comprising a) a promoter, preferably a promoter selected from the group consisting of Big35S, PCUbi, Super and USP, in particular p-Super; and b) the nucleic acid SEQ ID NO. 115595, or a homolog or fragment thereof, or a homolog thereof being depicted in Table I, application no. 19, column 8, in the same line as SEQ ID NO. 115595, preferably the coding region thereof, a homolog or a fragment thereof; which are operable linked.

[100423] In an embodiment thereof the expression cassette comprises in addition c) a nucleic acid molecule encoding a transit peptide, especially a plastidal transit petide in case in Table I, application no. 19, in column 6 in the same line as SEQ ID NO. 115595 is depicted, plastidic is mentioned, or a mitochondrial transit peptide in case in Table I, application no. 19, in column 6 in the same line as SEQ ID NO. 115595 is depicted, mitochondric is mentioned; which is operable linked, too.

[100424] In another embodiment thereof the expression cassette does not comprise an additional transit peptide in case in Table I, application no. 19, in column 6 in the same line as SEQ ID NO. 115595 is depicted, non-targeted is mentioned.

[100425] In an embodiment the present invention relates to an expresssion cassette comprising a) a promoter, preferably a promoter selected from the group consisting of Big35S, PCUbi, Super and USP, in particular p-Super; and b) the nucleic acid SEQ ID NO. 125085, or a homolog or fragment thereof, or a homolog thereof being depicted in Table I, application no. 19, column 8, in the same line as SEQ ID NO. 125085, preferably the coding region thereof, a homolog or a fragment thereof; which are operable linked.

[100426] In an embodiment thereof the expression cassette comprises in addition c) a nucleic acid molecule encoding a transit peptide, especially a plastidal transit petide in case in Table I, application no. 19, in column 6 in the same line as SEQ ID NO. 125085 is depicted, plastidic is mentioned, or a mitochondrial transit peptide in case in Table I, application no. 19, in column 6 in the same line as SEQ ID NO. 125085 is depicted, mitochondric is mentioned; which is operable linked, too.

[100427] In another embodiment thereof the expression cassette does not comprise an additional transit peptide in case in Table I, application no. 19, in column 6 in the same line as SEQ ID NO. 125085 is depicted, non-targeted is mentioned.

[100428] In an embodiment the present invention relates to an expresssion cassette comprising a) a promoter, preferably a promoter selected from the group consisting of Big35S, PCUbi, Super and USP, in particular p-Super; and b) the nucleic acid SEQ ID NO. 39040, or a homolog or fragment thereof, or a homolog thereof being depicted in Table I, application no. 19, column 8, in the same line as SEQ ID NO. 39040, preferably the coding region thereof, a homolog or a fragment thereof; which are operable linked.

[100429] In an embodiment thereof the expression cassette comprises in addition c) a nucleic acid molecule encoding a transit peptide, especially a plastidal transit petide in case in Table I, application no. 19, in column 6 in the same line as SEQ ID NO. 39040 is depicted, plastidic is mentioned, or a mitochondrial transit peptide in case in Table I, application no. 19, in column 6 in the same line as SEQ ID NO. 39040 is depicted, mitochondric is mentioned; which is operable linked, too.

[100430] In another embodiment thereof the expression cassette does not comprise an additional transit peptide in case in Table I, application no. 19, in column 6 in the same line as SEQ ID NO. 39040 is depicted, non-targeted is mentioned.

[100431] In an embodiment the present invention relates to an expresssion cassette comprising a) a promoter, preferably a promoter selected from the group consisting of Big35S, PCUbi, Super and USP, in particular p-Super; and b) the nucleic acid SEQ ID NO. 146238, or a homolog or fragment thereof, or a homolog thereof being depicted in Table I, application no. 19, column 8, in the same line as SEQ ID NO. 146238, preferably the coding region thereof, a homolog or a fragment thereof; which are operable linked.

[100432] In an embodiment thereof the expression cassette comprises in addition c) a nucleic acid molecule encoding a transit peptide, especially a plastidal transit petide in case in Table I, application no. 19, in column 6 in the same line as SEQ ID NO. 146238 is depicted, plastidic is mentioned, or a mitochondrial transit peptide in case in Table I, application no. 19, in column 6 in the same line as SEQ ID NO. 146238 is depicted, mitochondric is mentioned; which is operable linked, too.

[100433] In another embodiment thereof the expression cassette does not comprise an additional transit peptide in case in Table I, application no. 19, in column 6 in the same line as SEQ ID NO. 146238 is depicted, non-targeted is mentioned.

[100434] In an embodiment the present invention relates to an expresssion cassette comprising a) a promoter, preferably a promoter selected from the group consisting of Big35S, PCUbi, Super and USP, in particular p-Super; and b) the nucleic acid SEQ ID NO. 39237, or a homolog or fragment thereof, or a homolog thereof being depicted in Table I, application no. 19, column 8, in the same line as SEQ ID NO. 39237, preferably the coding region thereof, a homolog or a fragment thereof; which are operable linked.

[100435] In an embodiment thereof the expression cassette comprises in addition c) a nucleic acid molecule encoding a transit peptide, especially a plastidal transit petide in case in Table I, application no. 19, in column 6 in the same line as SEQ ID NO. 39237 is depicted, plastidic is mentioned, or a mitochondrial transit peptide in case in Table I, application no. 19, in column 6 in the same line as SEQ ID NO. 39237 is depicted, mitochondric is mentioned; which is operable linked, too.

[100436] In another embodiment thereof the expression cassette does not comprise an additional transit peptide in case in Table I, application no. 19, in column 6 in the same line as SEQ ID NO. 39237 is depicted, non-targeted is mentioned.

[100437] In an embodiment the present invention relates to an expresssion cassette comprising a) a promoter, preferably a promoter selected from the group consisting of Big35S, PCUbi, Super and USP, in particular p-Super; and b) the nucleic acid SEQ ID NO. 115628, or a homolog or fragment thereof, or a homolog thereof being depicted in Table I, application no. 19, column 8, in the same line as SEQ ID NO. 115628, preferably the coding region thereof, a homolog or a fragment thereof; which are operable linked.

[100438] In an embodiment thereof the expression cassette comprises in addition c) a nucleic acid molecule encoding a transit peptide, especially a plastidal transit petide in case in Table I, application no. 19, in column 6 in the same line as SEQ ID NO. 115628 is depicted, plastidic is mentioned, or a mitochondrial transit peptide in case in Table I, application no. 19, in column 6 in the same line as SEQ ID NO. 115628 is depicted, mitochondric is mentioned; which is operable linked, too.

[100439] In another embodiment thereof the expression cassette does not comprise an additional transit peptide in case in Table I, application no. 19, in column 6 in the same line as SEQ ID NO. 115628 is depicted, non-targeted is mentioned.

[100440] In an embodiment the present invention relates to an expresssion cassette comprising a) a promoter, preferably a promoter selected from the group consisting of Big35S, PCUbi, Super and USP, in particular p-Super; and b) the nucleic acid SEQ ID NO. 40299, or a homolog or fragment thereof, or a homolog thereof being depicted in Table I, application no. 19, column 8, in the same line as SEQ ID NO. 40299, preferably the coding region thereof, a homolog or a fragment thereof; which are operable linked.

[100441] In an embodiment thereof the expression cassette comprises in addition c) a nucleic acid molecule encoding a transit peptide, especially a plastidal transit petide in case in Table I, application no. 19, in column 6 in the same line as SEQ ID NO. 40299 is depicted, plastidic is mentioned, or a mitochondrial transit peptide in case in Table I, application no. 19, in column 6 in the same line as SEQ ID NO. 40299 is depicted, mitochondric is mentioned; which is operable linked, too.

[100442] In another embodiment thereof the expression cassette does not comprise an additional transit peptide in case in Table I, application no. 19, in column 6 in the same line as SEQ ID NO. 40299 is depicted, non-targeted is mentioned.

[100443] In an embodiment the present invention relates to an expresssion cassette comprising a) a promoter, preferably a promoter selected from the group consisting of Big35S, PCUbi, Super and USP, in particular p-Super; and b) the nucleic acid SEQ ID NO. 40329, or a homolog or fragment thereof, or a homolog thereof being depicted in Table I, application no. 19, column 8, in the same line as SEQ ID NO. 40329, preferably the coding region thereof, a homolog or a fragment thereof; which are operable linked.

[100444] In an embodiment thereof the expression cassette comprises in addition c) a nucleic acid molecule encoding a transit peptide, especially a plastidal transit petide in case in Table I, application no. 19, in column 6 in the same line as SEQ ID NO. 40329 is depicted, plastidic is mentioned, or a mitochondrial transit peptide in case in Table I, application no. 19, in column 6 in the same line as SEQ ID NO. 40329 is depicted, mitochondric is mentioned; which is operable linked, too.

[100445] In another embodiment thereof the expression cassette does not comprise an additional transit peptide in case in Table I, application no. 19, in column 6 in the same line as SEQ ID NO. 40329 is depicted, non-targeted is mentioned.

[100446] In an embodiment the present invention relates to an expresssion cassette comprising a) a promoter, preferably a promoter selected from the group consisting of Big35S, PCUbi, Super and USP, in particular p-Super; and b) the nucleic acid SEQ ID NO. 99898, or a homolog or fragment thereof, or a homolog thereof being depicted in Table I, application no. 19, column 8, in the same line as SEQ ID NO. 99898, preferably the coding region thereof, a homolog or a fragment thereof; which are operable linked.

[100447] In an embodiment thereof the expression cassette comprises in addition c) a nucleic acid molecule encoding a transit peptide, especially a plastidal transit petide in case in Table I, application no. 19, in column 6 in the same line as SEQ ID NO. 99898 is depicted, plastidic is mentioned, or a mitochondrial transit peptide in case in Table I, application no. 19, in column 6 in the same line as SEQ ID NO. 99898 is depicted, mitochondric is mentioned; which is operable linked, too.

[100448] In another embodiment thereof the expression cassette does not comprise an additional transit peptide in case in Table I, application no. 19, in column 6 in the same line as SEQ ID NO. 99898 is depicted, non-targeted is mentioned.

[100449] In an embodiment the present invention relates to an expresssion cassette comprising a) a promoter, preferably a promoter selected from the group consisting of Big35S, PCUbi, Super and USP, in particular p-Super; and b) the nucleic acid SEQ ID NO. 40665, or a homolog or fragment thereof, or a homolog thereof being depicted in Table I, application no. 19, column 8, in the same line as SEQ ID NO. 40665, preferably the coding region thereof, a homolog or a fragment thereof; which are operable linked.

[100450] In an embodiment thereof the expression cassette comprises in addition c) a nucleic acid molecule encoding a transit peptide, especially a plastidal transit petide in case in Table I, application no. 19, in column 6 in the same line as SEQ ID NO. 40665 is depicted, plastidic is mentioned, or a mitochondrial transit peptide in case in Table I, application no. 19, in column 6 in the same line as SEQ ID NO. 40665 is depicted, mitochondric is mentioned; which is operable linked, too.

[100451] In another embodiment thereof the expression cassette does not comprise an additional transit peptide in case in Table I, application no. 19, in column 6 in the same line as SEQ ID NO. 40665 is depicted, non-targeted is mentioned.

[100452] In an embodiment the present invention relates to an expresssion cassette comprising a) a promoter, preferably a promoter selected from the group consisting of Big35S, PCUbi, Super and USP, in particular p-Super; and b) the nucleic acid SEQ ID NO. 40726, or a homolog or fragment thereof, or a homolog thereof being depicted in Table I, application no. 19, column 8, in the same line as SEQ ID NO. 40726, preferably the coding region thereof, a homolog or a fragment thereof; which are operable linked.

[100453] In an embodiment thereof the expression cassette comprises in addition c) a nucleic acid molecule encoding a transit peptide, especially a plastidal transit petide in case in Table I, application no. 19, in column 6 in the same line as SEQ ID NO. 40726 is depicted, plastidic is mentioned, or a mitochondrial transit peptide in case in Table I, application no. 19, in column 6 in the same line as SEQ ID NO. 40726 is depicted, mitochondric is mentioned; which is operable linked, too.

[100454] In another embodiment thereof the expression cassette does not comprise an additional transit peptide in case in Table I, application no. 19, in column 6 in the same line as SEQ ID NO. 40726 is depicted, non-targeted is mentioned.

[100455] In an embodiment the present invention relates to an expresssion cassette comprising a) a promoter, preferably a promoter selected from the group consisting of Big35S, PCUbi, Super and USP, in particular p-Super; and b) the nucleic acid SEQ ID NO. 9244, or a homolog or fragment thereof, or a homolog thereof being depicted in Table I, application no. 19, column 8, in the same line as SEQ ID NO. 9244, preferably the coding region thereof, a homolog or a fragment thereof; which are operable linked.

[100456] In an embodiment thereof the expression cassette comprises in addition c) a nucleic acid molecule encoding a transit peptide, especially a plastidal transit petide in case in Table I, application no. 19, in column 6 in the same line as SEQ ID NO. 9244 is depicted, plastidic is mentioned, or a mitochondrial transit peptide in case in Table I, application no. 19, in column 6 in the same line as SEQ ID NO. 9244 is depicted, mitochondric is mentioned; which is operable linked, too.

[100457] In another embodiment thereof the expression cassette does not comprise an additional transit peptide in case in Table I, application no. 19, in column 6 in the same line as SEQ ID NO. 9244 is depicted, non-targeted is mentioned.

[100458] In an embodiment the present invention relates to an expresssion cassette comprising a) a promoter, preferably a promoter selected from the group consisting of Big35S, PCUbi, Super and USP, in particular p-Super; and b) the nucleic acid SEQ ID NO. 80756, or a homolog or fragment thereof, or a homolog thereof being depicted in Table I, application no. 19, column 8, in the same line as SEQ ID NO. 80756, preferably the coding region thereof, a homolog or a fragment thereof; which are operable linked.

[100459] In an embodiment thereof the expression cassette comprises in addition c) a nucleic acid molecule encoding a transit peptide, especially a plastidal transit petide in case in Table I, application no. 19, in column 6 in the same line as SEQ ID NO. 80756 is depicted, plastidic is mentioned, or a mitochondrial transit peptide in case in Table I, application no. 19, in column 6 in the same line as SEQ ID NO. 80756 is depicted, mitochondric is mentioned; which is operable linked, too.

[100460] In another embodiment thereof the expression cassette does not comprise an additional transit peptide in case in Table I, application no. 19, in column 6 in the same line as SEQ ID NO. 80756 is depicted, non-targeted is mentioned.

[100461] In an embodiment the present invention relates to an expresssion cassette comprising a) a promoter, preferably a promoter selected from the group consisting of Big35S, PCUbi, Super and USP, in particular p-Super; and b) the nucleic acid SEQ ID NO. 40741, or a homolog or fragment thereof, or a homolog thereof being depicted in Table I, application no. 19, column 8, in the same line as SEQ ID NO. 40741, preferably the coding region thereof, a homolog or a fragment thereof; which are operable linked.

[100462] In an embodiment thereof the expression cassette comprises in addition c) a nucleic acid molecule encoding a transit peptide, especially a plastidal transit petide in case in Table I, application no. 19, in column 6 in the same line as SEQ ID NO. 40741 is depicted, plastidic is mentioned, or a mitochondrial transit peptide in case in Table I, application no. 19, in column 6 in the same line as SEQ ID NO. 40741 is depicted, mitochondric is mentioned; which is operable linked, too.

[100463] In another embodiment thereof the expression cassette does not comprise an additional transit peptide in case in Table I, application no. 19, in column 6 in the same line as SEQ ID NO. 40741 is depicted, non-targeted is mentioned.

[100464] In an embodiment the present invention relates to an expresssion cassette comprising a) a promoter, preferably a promoter selected from the group consisting of Big35S, PCUbi, Super and USP, in particular p-Super; and b) the nucleic acid SEQ ID NO. 81075, or a homolog or fragment thereof, or a homolog thereof being depicted in Table I, application no. 19, column 8, in the same line as SEQ ID NO. 81075, preferably the coding region thereof, a homolog or a fragment thereof; which are operable linked.

[100465] In an embodiment thereof the expression cassette comprises in addition c) a nucleic acid molecule encoding a transit peptide, especially a plastidal transit petide in case in Table I, application no. 19, in column 6 in the same line as SEQ ID NO. 81075 is depicted, plastidic is mentioned, or a mitochondrial transit peptide in case in Table I, application no. 19, in column 6 in the same line as SEQ ID NO. 81075 is depicted, mitochondric is mentioned; which is operable linked, too.

[100466] In another embodiment thereof the expression cassette does not comprise an additional transit peptide in case in Table I, application no. 19, in column 6 in the same line as SEQ ID NO. 81075 is depicted, non-targeted is mentioned.

[100467] In an embodiment the present invention relates to an expresssion cassette comprising a) a promoter, preferably a promoter selected from the group consisting of Big35S, PCUbi, Super and USP, in particular p-Super; and b) the nucleic acid SEQ ID NO. 81576, or a homolog or fragment thereof, or a homolog thereof being depicted in Table I, application no. 19, column 8, in the same line as SEQ ID NO. 81576, preferably the coding region thereof, a homolog or a fragment thereof; which are operable linked.

[100468] In an embodiment thereof the expression cassette comprises in addition c) a nucleic acid molecule encoding a transit peptide, especially a plastidal transit petide in case in Table I, application no. 19, in column 6 in the same line as SEQ ID NO. 81576 is depicted, plastidic is mentioned, or a mitochondrial transit peptide in case in Table I, application no. 19, in column 6 in the same line as SEQ ID NO. 81576 is depicted, mitochondric is mentioned; which is operable linked, too.

[100469] In another embodiment thereof the expression cassette does not comprise an additional transit peptide in case in Table I, application no. 19, in column 6 in the same line as SEQ ID NO. 81576 is depicted, non-targeted is mentioned.

[100470] In an embodiment the present invention relates to an expresssion cassette comprising a) a promoter, preferably a promoter selected from the group consisting of Big35S, PCUbi, Super and USP, in particular p-Super; and b) the nucleic acid SEQ ID NO. 82424, or a homolog or fragment thereof, or a homolog thereof being depicted in Table I, application no. 19, column 8, in the same line as SEQ ID NO. 82424, preferably the coding region thereof, a homolog or a fragment thereof; which are operable linked.

[100471] In an embodiment thereof the expression cassette comprises in addition c) a nucleic acid molecule encoding a transit peptide, especially a plastidal transit petide in case in Table I, application no. 19, in column 6 in the same line as SEQ ID NO. 82424 is depicted, plastidic is mentioned, or a mitochondrial transit peptide in case in Table I, application no. 19, in column 6 in the same line as SEQ ID NO. 82424 is depicted, mitochondric is mentioned; which is operable linked, too.

[100472] In another embodiment thereof the expression cassette does not comprise an additional transit peptide in case in Table I, application no. 19, in column 6 in the same line as SEQ ID NO. 82424 is depicted, non-targeted is mentioned.

[100473] In an embodiment the present invention relates to an expresssion cassette comprising a) a promoter, preferably a promoter selected from the group consisting of Big35S, PCUbi, Super and USP, in particular p-Super; and b) the nucleic acid SEQ ID NO. 153246, or a homolog or fragment thereof, or a homolog thereof being depicted in Table I, application no. 19, column 8, in the same line as SEQ ID NO. 153246, preferably the coding region thereof, a homolog or a fragment thereof; which are operable linked.

[100474] In an embodiment thereof the expression cassette comprises in addition c) a nucleic acid molecule encoding a transit peptide, especially a plastidal transit petide in case in Table I, application no. 19, in column 6 in the same line as SEQ ID NO. 153246 is depicted, plastidic is mentioned, or a mitochondrial transit peptide in case in Table I, application no. 19, in column 6 in the same line as SEQ ID NO. 153246 is depicted, mitochondric is mentioned; which is operable linked, too.

[100475] In another embodiment thereof the expression cassette does not comprise an additional transit peptide in case in Table I, application no. 19, in column 6 in the same line as SEQ ID NO. 153246 is depicted, non-targeted is mentioned.

[100476] In an embodiment the present invention relates to an expresssion cassette comprising a) a promoter, preferably a promoter selected from the group consisting of Big35S, PCUbi, Super and USP, in particular p-Super; and b) the nucleic acid SEQ ID NO. 153395, or a homolog or fragment thereof, or a homolog thereof being depicted in Table I, application no. 19, column 8, in the same line as SEQ ID NO. 153395, preferably the coding region thereof, a homolog or a fragment thereof; which are operable linked.

[100477] In an embodiment thereof the expression cassette comprises in addition c) a nucleic acid molecule encoding a transit peptide, especially a plastidal transit petide in case in Table I, application no. 19, in column 6 in the same line as SEQ ID NO. 153395 is depicted, plastidic is mentioned, or a mitochondrial transit peptide in case in Table I, application no. 19, in column 6 in the same line as SEQ ID NO. 153395 is depicted, mitochondric is mentioned; which is operable linked, too.

[100478] In another embodiment thereof the expression cassette does not comprise an additional transit peptide in case in Table I, application no. 19, in column 6 in the same line as SEQ ID NO. 153395 is depicted, non-targeted is mentioned.

[100479] In an embodiment the present invention relates to an expresssion cassette comprising a) a promoter, preferably a promoter selected from the group consisting of Big35S, PCUbi, Super and USP, in particular p-Super; and b) the nucleic acid SEQ ID NO. 153618, or a homolog or fragment thereof, or a homolog thereof being depicted in Table I, application no. 19, column 8, in the same line as SEQ ID NO. 153618, preferably the coding region thereof, a homolog or a fragment thereof; which are operable linked.

[100480] In an embodiment thereof the expression cassette comprises in addition c) a nucleic acid molecule encoding a transit peptide, especially a plastidal transit petide in case in Table I, application no. 19, in column 6 in the same line as SEQ ID NO. 153618 is depicted, plastidic is mentioned, or a mitochondrial transit peptide in case in Table I, application no. 19, in column 6 in the same line as SEQ ID NO. 153618 is depicted, mitochondric is mentioned; which is operable linked, too.

[100481] In another embodiment thereof the expression cassette does not comprise an additional transit peptide in case in Table I, application no. 19, in column 6 in the same line as SEQ ID NO. 153618 is depicted, non-targeted is mentioned.

[100482] In an embodiment the present invention relates to an expresssion cassette comprising a) a promoter, preferably a promoter selected from the group consisting of Big35S, PCUbi, Super and USP, in particular p-USP; and b) the nucleic acid SEQ ID NO. 9492, or a homolog or fragment thereof, or a homolog thereof being depicted in Table I, application no. 19, column 8, in the same line as SEQ ID NO. 9492, preferably the coding region thereof, a homolog or a fragment thereof; which are operable linked.

[100483] In an embodiment thereof the expression cassette comprises in addition c) a nucleic acid molecule encoding a transit peptide, especially a plastidal transit petide in case in Table I, application no. 19, in column 6 in the same line as SEQ ID NO. 9492 is depicted, plastidic is mentioned, or a mitochondrial transit peptide in case in Table I, application no. 19, in column 6 in the same line as SEQ ID NO. 9492 is depicted, mitochondric is mentioned; which is operable linked, too.

[100484] In another embodiment thereof the expression cassette does not comprise an additional transit peptide in case in Table I, application no. 19, in column 6 in the same line as SEQ ID NO. 9492 is depicted, non-targeted is mentioned.

[100485] In an embodiment the present invention relates to an expresssion cassette comprising a) a promoter, preferably a promoter selected from the group consisting of Big35S, PCUbi, Super and USP, in particular p-Super; and b) the nucleic acid SEQ ID NO. 42502, or a homolog or fragment thereof, or a homolog thereof being depicted in Table I, application no. 19, column 8, in the same line as SEQ ID NO. 42502, preferably the coding region thereof, a homolog or a fragment thereof; which are operable linked.

[100486] In an embodiment thereof the expression cassette comprises in addition c) a nucleic acid molecule encoding a transit peptide, especially a plastidal transit petide in case in Table I, application no. 19, in column 6 in the same line as SEQ ID NO. 42502 is depicted, plastidic is mentioned, or a mitochondrial transit peptide in case in Table I, application no. 19, in column 6 in the same line as SEQ ID NO. 42502 is depicted, mitochondric is mentioned; which is operable linked, too.

[100487] In another embodiment thereof the expression cassette does not comprise an additional transit peptide in case in Table I, application no. 19, in column 6 in the same line as SEQ ID NO. 42502 is depicted, non-targeted is mentioned.

[100488] In an embodiment the present invention relates to an expresssion cassette comprising a) a promoter, preferably a promoter selected from the group consisting of Big35S, PCUbi, Super and USP, in particular p-Super; and b) the nucleic acid SEQ ID NO. 153813, or a homolog or fragment thereof, or a homolog thereof being depicted in Table I, application no. 19, column 8, in the same line as SEQ ID NO. 153813, preferably the coding region thereof, a homolog or a fragment thereof; which are operable linked.

[100489] In an embodiment thereof the expression cassette comprises in addition c) a nucleic acid molecule encoding a transit peptide, especially a plastidal transit petide in case in Table I, application no. 19, in column 6 in the same line as SEQ ID NO. 153813 is depicted, plastidic is mentioned, or a mitochondrial transit peptide in case in Table I, application no. 19, in column 6 in the same line as SEQ ID NO. 153813 is depicted, mitochondric is mentioned; which is operable linked, too.

[100490] In another embodiment thereof the expression cassette does not comprise an additional transit peptide in case in Table I, application no. 19, in column 6 in the same line as SEQ ID NO. 153813 is depicted, non-targeted is mentioned.

[100491] In an embodiment the present invention relates to an expresssion cassette comprising a) a promoter, preferably a promoter selected from the group consisting of Big35S, PCUbi, Super and USP, in particular p-Super; and b) the nucleic acid SEQ ID NO. 146472, or a homolog or fragment thereof, or a homolog thereof being depicted in Table I, application no. 19, column 8, in the same line as SEQ ID NO. 146472, preferably the coding region thereof, a homolog or a fragment thereof; which are operable linked.

[100492] In an embodiment thereof the expression cassette comprises in addition c) a nucleic acid molecule encoding a transit peptide, especially a plastidal transit petide in case in Table I, application no. 19, in column 6 in the same line as SEQ ID NO. 146472 is depicted, plastidic is mentioned, or a mitochondrial transit peptide in case in Table I, application no. 19, in column 6 in the same line as SEQ ID NO. 146472 is depicted, mitochondric is mentioned; which is operable linked, too.

[100493] In another embodiment thereof the expression cassette does not comprise an additional transit peptide in case in Table I, application no. 19, in column 6 in the same line as SEQ ID NO. 146472 is depicted, non-targeted is mentioned.

[100494] In an embodiment the present invention relates to an expresssion cassette comprising a) a promoter, preferably a promoter selected from the group consisting of Big35S, PCUbi, Super and USP, in particular p-Super; and b) the nucleic acid SEQ ID NO. 136098, or a homolog or fragment thereof, or a homolog thereof being depicted in Table I, application no. 19, column 8, in the same line as SEQ ID NO. 136098, preferably the coding region thereof, a homolog or a fragment thereof; which are operable linked.

[100495] In an embodiment thereof the expression cassette comprises in addition c) a nucleic acid molecule encoding a transit peptide, especially a plastidal transit petide in case in Table I, application no. 19, in column 6 in the same line as SEQ ID NO. 136098 is depicted, plastidic is mentioned, or a mitochondrial transit peptide in case in Table I, application no. 19, in column 6 in the same line as SEQ ID NO. 136098 is depicted, mitochondric is mentioned; which is operable linked, too.

[100496] In another embodiment thereof the expression cassette does not comprise an additional transit peptide in case in Table I, application no. 19, in column 6 in the same line as SEQ ID NO. 136098 is depicted, non-targeted is mentioned.

[100497] In an embodiment the present invention relates to an expresssion cassette comprising a) a promoter, preferably a promoter selected from the group consisting of Big35S, PCUbi, Super and USP, in particular p-Super; and b) the nucleic acid SEQ ID NO. 83726, or a homolog or fragment thereof, or a homolog thereof being depicted in Table I, application no. 19, column 8, in the same line as SEQ ID NO. 83726, preferably the coding region thereof, a homolog or a fragment thereof; which are operable linked.

[100498] In an embodiment thereof the expression cassette comprises in addition c) a nucleic acid molecule encoding a transit peptide, especially a plastidal transit petide in case in Table I, application no. 19, in column 6 in the same line as SEQ ID NO. 83726 is depicted, plastidic is mentioned, or a mitochondrial transit peptide in case in Table I, application no. 19, in column 6 in the same line as SEQ ID NO. 83726 is depicted, mitochondric is mentioned; which is operable linked, too.

[100499] In another embodiment thereof the expression cassette does not comprise an additional transit peptide in case in Table I, application no. 19, in column 6 in the same line as SEQ ID NO. 83726 is depicted, non-targeted is mentioned.

[100500] In an embodiment the present invention relates to an expresssion cassette comprising a) a promoter, preferably a promoter selected from the group consisting of Big35S, PCUbi, Super and USP, in particular p-Super; and b) the nucleic acid SEQ ID NO. 43800, or a homolog or fragment thereof, or a homolog thereof being depicted in Table I, application no. 19, column 8, in the same line as SEQ ID NO. 43800, preferably the coding region thereof, a homolog or a fragment thereof; which are operable linked.

[100501] In an embodiment thereof the expression cassette comprises in addition c) a nucleic acid molecule encoding a transit peptide, especially a plastidal transit petide in case in Table I, application no. 19, in column 6 in the same line as SEQ ID NO. 43800 is depicted, plastidic is mentioned, or a mitochondrial transit peptide in case in Table I, application no. 19, in column 6 in the same line as SEQ ID NO. 43800 is depicted, mitochondric is mentioned; which is operable linked, too.

[100502] In another embodiment thereof the expression cassette does not comprise an additional transit peptide in case in Table I, application no. 19, in column 6 in the same line as SEQ ID NO. 43800 is depicted, non-targeted is mentioned.

[100503] In an embodiment the present invention relates to an expresssion cassette comprising a) a promoter, preferably a promoter selected from the group consisting of Big35S, PCUbi, Super and USP, in particular p-Super; and b) the nucleic acid SEQ ID NO. 44372, or a homolog or fragment thereof, or a homolog thereof being depicted in Table I, application no. 19, column 8, in the same line as SEQ ID NO. 44372, preferably the coding region thereof, a homolog or a fragment thereof; which are operable linked.

[100504] In an embodiment thereof the expression cassette comprises in addition c) a nucleic acid molecule encoding a transit peptide, especially a plastidal transit petide in case in Table I, application no. 19, in column 6 in the same line as SEQ ID NO. 44372 is depicted, plastidic is mentioned, or a mitochondrial transit peptide in case in Table I, application no. 19, in column 6 in the same line as SEQ ID NO. 44372 is depicted, mitochondric is mentioned; which is operable linked, too.

[100505] In another embodiment thereof the expression cassette does not comprise an additional transit peptide in case in Table I, application no. 19, in column 6 in the same line as SEQ ID NO. 44372 is depicted, non-targeted is mentioned.

[100506] In an embodiment the present invention relates to an expresssion cassette comprising a) a promoter, preferably a promoter selected from the group consisting of Big35S, PCUbi, Super and USP, in particular p-Super; and b) the nucleic acid SEQ ID NO. 10740, or a homolog or fragment thereof, or a homolog thereof being depicted in Table I, application no. 19, column 8, in the same line as SEQ ID NO. 10740, preferably the coding region thereof, a homolog or a fragment thereof; which are operable linked.

[100507] In an embodiment thereof the expression cassette comprises in addition c) a nucleic acid molecule encoding a transit peptide, especially a plastidal transit petide in case in Table I, application no. 19, in column 6 in the same line as SEQ ID NO. 10740 is depicted, plastidic is mentioned, or a mitochondrial transit peptide in case in Table I, application no. 19, in column 6 in the same line as SEQ ID NO. 10740 is depicted, mitochondric is mentioned; which is operable linked, too.

[100508] In another embodiment thereof the expression cassette does not comprise an additional transit peptide in case in Table I, application no. 19, in column 6 in the same line as SEQ ID NO. 10740 is depicted, non-targeted is mentioned.

[100509] In an embodiment the present invention relates to an expresssion cassette comprising a) a promoter, preferably a promoter selected from the group consisting of Big35S, PCUbi, Super and USP, in particular p-Super; and b) the nucleic acid SEQ ID NO. 106532, or a homolog or fragment thereof, or a homolog thereof being depicted in Table I, application no. 19, column 8, in the same line as SEQ ID NO. 106532, preferably the coding region thereof, a homolog or a fragment thereof; which are operable linked.

[100510] In an embodiment thereof the expression cassette comprises in addition c) a nucleic acid molecule encoding a transit peptide, especially a plastidal transit petide in case in Table I, application no. 19, in column 6 in the same line as SEQ ID NO. 106532 is depicted, plastidic is mentioned, or a mitochondrial transit peptide in case in Table I, application no. 19, in column 6 in the same line as SEQ ID NO. 106532 is depicted, mitochondric is mentioned; which is operable linked, too.

[100511] In another embodiment thereof the expression cassette does not comprise an additional transit peptide in case in Table I, application no. 19, in column 6 in the same line as SEQ ID NO. 106532 is depicted, non-targeted is mentioned.

[100512] In an embodiment the present invention relates to an expresssion cassette comprising a) a promoter, preferably a promoter selected from the group consisting of Big35S, PCUbi, Super and USP, in particular p-Super; and b) the nucleic acid SEQ ID NO. 44662, or a homolog or fragment thereof, or a homolog thereof being depicted in Table I, application no. 19, column 8, in the same line as SEQ ID NO. 44662, preferably the coding region thereof, a homolog or a fragment thereof; which are operable linked.

[100513] In an embodiment thereof the expression cassette comprises in addition c) a nucleic acid molecule encoding a transit peptide, especially a plastidal transit petide in case in Table I, application no. 19, in column 6 in the same line as SEQ ID NO. 44662 is depicted, plastidic is mentioned, or a mitochondrial transit peptide in case in Table I, application no. 19, in column 6 in the same line as SEQ ID NO. 44662 is depicted, mitochondric is mentioned; which is operable linked, too.

[100514] In another embodiment thereof the expression cassette does not comprise an additional transit peptide in case in Table I, application no. 19, in column 6 in the same line as SEQ ID NO. 44662 is depicted, non-targeted is mentioned.

[100515] In an embodiment the present invention relates to an expresssion cassette comprising a) a promoter, preferably a promoter selected from the group consisting of Big35S, PCUbi, Super and USP, in particular p-USP; and b) the nucleic acid SEQ ID NO. 45556, or a homolog or fragment thereof, or a homolog thereof being depicted in Table I, application no. 19, column 8, in the same line as SEQ ID NO. 45556, preferably the coding region thereof, a homolog or a fragment thereof; which are operable linked.

[100516] In an embodiment thereof the expression cassette comprises in addition c) a nucleic acid molecule encoding a transit peptide, especially a plastidal transit petide in case in Table I, application no. 19, in column 6 in the same line as SEQ ID NO. 45556 is depicted, plastidic is mentioned, or a mitochondrial transit peptide in case in Table I, application no. 19, in column 6 in the same line as SEQ ID NO. 45556 is depicted, mitochondric is mentioned; which is operable linked, too.

[100517] In another embodiment thereof the expression cassette does not comprise an additional transit peptide in case in Table I, application no. 19, in column 6 in the same line as SEQ ID NO. 45556 is depicted, non-targeted is mentioned.

[100518] In an embodiment the present invention relates to an expresssion cassette comprising a) a promoter, preferably a promoter selected from the group consisting of Big35S, PCUbi, Super and USP, in particular p-PcUBI; and b) the nucleic acid SEQ ID NO. 10811, or a homolog or fragment thereof, or a homolog thereof being depicted in Table I, application no. 19, column 8, in the same line as SEQ ID NO. 10811, preferably the coding region thereof, a homolog or a fragment thereof; which are operable linked.

[100519] In an embodiment thereof the expression cassette comprises in addition c) a nucleic acid molecule encoding a transit peptide, especially a plastidal transit petide in case in Table I, application no. 19, in column 6 in the same line as SEQ ID NO. 10811 is depicted, plastidic is mentioned, or a mitochondrial transit peptide in case in Table I, application no. 19, in column 6 in the same line as SEQ ID NO. 10811 is depicted, mitochondric is mentioned; which is operable linked, too.

[100520] In another embodiment thereof the expression cassette does not comprise an additional transit peptide in case in Table I, application no. 19, in column 6 in the same line as SEQ ID NO. 10811 is depicted, non-targeted is mentioned.

[100521] In an embodiment the present invention relates to an expresssion cassette comprising a) a promoter, preferably a promoter selected from the group consisting of Big35S, PCUbi, Super and USP, in particular p-PcUBI; and b) the nucleic acid SEQ ID NO. 46405, or a homolog or fragment thereof, or a homolog thereof being depicted in Table I, application no. 19, column 8, in the same line as SEQ ID NO. 46405, preferably the coding region thereof, a homolog or a fragment thereof; which are operable linked.

[100522] In an embodiment thereof the expression cassette comprises in addition c) a nucleic acid molecule encoding a transit peptide, especially a plastidal transit petide in case in Table I, application no. 19, in column 6 in the same line as SEQ ID NO. 46405 is depicted, plastidic is mentioned, or a mitochondrial transit peptide in case in Table I, application no. 19, in column 6 in the same line as SEQ ID NO. 46405 is depicted, mitochondric is mentioned; which is operable linked, too.

[100523] In another embodiment thereof the expression cassette does not comprise an additional transit peptide in case in Table I, application no. 19, in column 6 in the same line as SEQ ID NO. 46405 is depicted, non-targeted is mentioned.

[100524] In an embodiment the present invention relates to an expresssion cassette comprising a) a promoter, preferably a promoter selected from the group consisting of Big35S, PCUbi, Super and USP, in particular p-PcUBI; and b) the nucleic acid SEQ ID NO. 46751, or a homolog or fragment thereof, or a homolog thereof being depicted in Table I, application no. 19, column 8, in the same line as SEQ ID NO. 46751, preferably the coding region thereof, a homolog or a fragment thereof; which are operable linked.

[100525] In an embodiment thereof the expression cassette comprises in addition c) a nucleic acid molecule encoding a transit peptide, especially a plastidal transit petide in case in Table I, application no. 19, in column 6 in the same line as SEQ ID NO. 46751 is depicted, plastidic is mentioned, or a mitochondrial transit peptide in case in Table I, application no. 19, in column 6 in the same line as SEQ ID NO. 46751 is depicted, mitochondric is mentioned; which is operable linked, too.

[100526] In another embodiment thereof the expression cassette does not comprise an additional transit peptide in case in Table I, application no. 19, in column 6 in the same line as SEQ ID NO. 46751 is depicted, non-targeted is mentioned.

[100527] In an embodiment the present invention relates to an expresssion cassette comprising a) a promoter, preferably a promoter selected from the group consisting of Big35S, PCUbi, Super and USP, in particular p-PcUBI; and b) the nucleic acid SEQ ID NO. 84198, or a homolog or fragment thereof, or a homolog thereof being depicted in Table I, application no. 19, column 8, in the same line as SEQ ID NO. 84198, preferably the coding region thereof, a homolog or a fragment thereof; which are operable linked.

[100528] In an embodiment thereof the expression cassette comprises in addition c) a nucleic acid molecule encoding a transit peptide, especially a plastidal transit petide in case in Table I, application no. 19, in column 6 in the same line as SEQ ID NO. 84198 is depicted, plastidic is mentioned, or a mitochondrial transit peptide in case in Table I, application no. 19, in column 6 in the same line as SEQ ID NO. 84198 is depicted, mitochondric is mentioned; which is operable linked, too.

[100529] In another embodiment thereof the expression cassette does not comprise an additional transit peptide in case in Table I, application no. 19, in column 6 in the same line as SEQ ID NO. 84198 is depicted, non-targeted is mentioned.

[100530] In an embodiment the present invention relates to an expresssion cassette comprising a) a promoter, preferably a promoter selected from the group consisting of Big35S, PCUbi, Super and USP, in particular p-PcUBI; and b) the nucleic acid SEQ ID NO. 46850, or a homolog or fragment thereof, or a homolog thereof being depicted in Table I, application no. 19, column 8, in the same line as SEQ ID NO. 46850, preferably the coding region thereof, a homolog or a fragment thereof; which are operable linked.

[100531] In an embodiment thereof the expression cassette comprises in addition c) a nucleic acid molecule encoding a transit peptide, especially a plastidal transit petide in case in Table I, application no. 19, in column 6 in the same line as SEQ ID NO. 46850 is depicted, plastidic is mentioned, or a mitochondrial transit peptide in case in Table I, application no. 19, in column 6 in the same line as SEQ ID NO. 46850 is depicted, mitochondric is mentioned; which is operable linked, too.

[100532] In another embodiment thereof the expression cassette does not comprise an additional transit peptide in case in Table I, application no. 19, in column 6 in the same line as SEQ ID NO. 46850 is depicted, non-targeted is mentioned.

[100533] In an embodiment the present invention relates to an expresssion cassette comprising a) a promoter, preferably a promoter selected from the group consisting of Big35S, PCUbi, Super and USP, in particular p-PcUBI; and b) the nucleic acid SEQ ID NO. 54337, or a homolog or fragment thereof, or a homolog thereof being depicted in Table I, application no. 19, column 8, in the same line as SEQ ID NO. 54337, preferably the coding region thereof, a homolog or a fragment thereof; which are operable linked.

[100534] In an embodiment thereof the expression cassette comprises in addition c) a nucleic acid molecule encoding a transit peptide, especially a plastidal transit petide in case in Table I, application no. 19, in column 6 in the same line as SEQ ID NO. 54337 is depicted, plastidic is mentioned, or a mitochondrial transit peptide in case in Table I, application no. 19, in column 6 in the same line as SEQ ID NO. 54337 is depicted, mitochondric is mentioned; which is operable linked, too.

[100535] In another embodiment thereof the expression cassette does not comprise an additional transit peptide in case in Table I, application no. 19, in column 6 in the same line as SEQ ID NO. 54337 is depicted, non-targeted is mentioned.

[100536] In an embodiment the present invention relates to an expresssion cassette comprising a) a promoter, preferably a promoter selected from the group consisting of Big35S, PCUbi, Super and USP, in particular p-PcUBI; and b) the nucleic acid SEQ ID NO. 95047, or a homolog or fragment thereof, or a homolog thereof being depicted in Table I, application no. 19, column 8, in the same line as SEQ ID NO. 95047, preferably the coding region thereof, a homolog or a fragment thereof; which are operable linked.

[100537] In an embodiment thereof the expression cassette comprises in addition c) a nucleic acid molecule encoding a transit peptide, especially a plastidal transit petide in case in Table I, application no. 19, in column 6 in the same line as SEQ ID NO. 95047 is depicted, plastidic is mentioned, or a mitochondrial transit peptide in case in Table I, application no. 19, in column 6 in the same line as SEQ ID NO. 95047 is depicted, mitochondric is mentioned; which is operable linked, too.

[100538] In another embodiment thereof the expression cassette does not comprise an additional transit peptide in case in Table I, application no. 19, in column 6 in the same line as SEQ ID NO. 95047 is depicted, non-targeted is mentioned.

[100539] In an embodiment the present invention relates to an expresssion cassette comprising a) a promoter, preferably a promoter selected from the group consisting of Big35S, PCUbi, Super and USP, in particular p-PcUBI; and b) the nucleic acid SEQ ID NO. 54452, or a homolog or fragment thereof, or a homolog thereof being depicted in Table I, application no. 19, column 8, in the same line as SEQ ID NO. 54452, preferably the coding region thereof, a homolog or a fragment thereof; which are operable linked.

[100540] In an embodiment thereof the expression cassette comprises in addition c) a nucleic acid molecule encoding a transit peptide, especially a plastidal transit petide in case in Table I, application no. 19, in column 6 in the same line as SEQ ID NO. 54452 is depicted, plastidic is mentioned, or a mitochondrial transit peptide in case in Table I, application no. 19, in column 6 in the same line as SEQ ID NO. 54452 is depicted, mitochondric is mentioned; which is operable linked, too.

[100541] In another embodiment thereof the expression cassette does not comprise an additional transit peptide in case in Table I, application no. 19, in column 6 in the same line as SEQ ID NO. 54452 is depicted, non-targeted is mentioned.

[100542] In an embodiment the present invention relates to an expresssion cassette comprising a) a promoter, preferably a promoter selected from the group consisting of Big35S, PCUbi, Super and USP, in particular p-PcUBI; and b) the nucleic acid SEQ ID NO. 85808, or a homolog or fragment thereof, or a homolog thereof being depicted in Table I, application no. 19, column 8, in the same line as SEQ ID NO. 85808, preferably the coding region thereof, a homolog or a fragment thereof; which are operable linked.

[100543] In an embodiment thereof the expression cassette comprises in addition c) a nucleic acid molecule encoding a transit peptide, especially a plastidal transit petide in case in Table I, application no. 19, in column 6 in the same line as SEQ ID NO. 85808 is depicted, plastidic is mentioned, or a mitochondrial transit peptide in case in Table I, application no. 19, in column 6 in the same line as SEQ ID NO. 85808 is depicted, mitochondric is mentioned; which is operable linked, too.

[100544] In another embodiment thereof the expression cassette does not comprise an additional transit peptide in case in Table I, application no. 19, in column 6 in the same line as SEQ ID NO. 85808 is depicted, non-targeted is mentioned.

[100545] In an embodiment the present invention relates to an expresssion cassette comprising a) a promoter, preferably a promoter selected from the group consisting of Big35S, PCUbi, Super and USP, in particular p-PcUBI; and b) the nucleic acid SEQ ID NO. 86447, or a homolog or fragment thereof, or a homolog thereof being depicted in Table I, application no. 19, column 8, in the same line as SEQ ID NO. 86447, preferably the coding region thereof, a homolog or a fragment thereof; which are operable linked.

[100546] In an embodiment thereof the expression cassette comprises in addition c) a nucleic acid molecule encoding a transit peptide, especially a plastidal transit petide in case in Table I, application no. 19, in column 6 in the same line as SEQ ID NO. 86447 is depicted, plastidic is mentioned, or a mitochondrial transit peptide in case in Table I, application no. 19, in column 6 in the same line as SEQ ID NO. 86447 is depicted, mitochondric is mentioned; which is operable linked, too.

[100547] In another embodiment thereof the expression cassette does not comprise an additional transit peptide in case in Table I, application no. 19, in column 6 in the same line as SEQ ID NO. 86447 is depicted, non-targeted is mentioned.

[100548] In an embodiment the present invention relates to an expresssion cassette comprising a) a promoter, preferably a promoter selected from the group consisting of Big35S, PCUbi, Super and USP, in particular p-PcUBI; and b) the nucleic acid SEQ ID NO. 11471, or a homolog or fragment thereof, or a homolog thereof being depicted in Table I, application no. 19, column 8, in the same line as SEQ ID NO. 11471, preferably the coding region thereof, a homolog or a fragment thereof; which are operable linked.

[100549] In an embodiment thereof the expression cassette comprises in addition c) a nucleic acid molecule encoding a transit peptide, especially a plastidal transit petide in case in Table I, application no. 19, in column 6 in the same line as SEQ ID NO. 11471 is depicted, plastidic is mentioned, or a mitochondrial transit peptide in case in Table I, application no. 19, in column 6 in the same line as SEQ ID NO. 11471 is depicted, mitochondric is mentioned; which is operable linked, too.

[100550] In another embodiment thereof the expression cassette does not comprise an additional transit peptide in case in Table I, application no. 19, in column 6 in the same line as SEQ ID NO. 11471 is depicted, non-targeted is mentioned.

[100551] In an embodiment the present invention relates to an expresssion cassette comprising a) a promoter, preferably a promoter selected from the group consisting of Big35S, PCUbi, Super and USP, in particular p-PcUBI; and b) the nucleic acid SEQ ID NO. 11990, or a homolog or fragment thereof, or a homolog thereof being depicted in Table I, application no. 19, column 8, in the same line as SEQ ID NO. 11990, preferably the coding region thereof, a homolog or a fragment thereof; which are operable linked.

[100552] In an embodiment thereof the expression cassette comprises in addition c) a nucleic acid molecule encoding a transit peptide, especially a plastidal transit petide in case in Table I, application no. 19, in column 6 in the same line as SEQ ID NO. 11990 is depicted, plastidic is mentioned, or a mitochondrial transit peptide in case in Table I, application no. 19, in column 6 in the same line as SEQ ID NO. 11990 is depicted, mitochondric is mentioned; which is operable linked, too.

[100553] In another embodiment thereof the expression cassette does not comprise an additional transit peptide in case in Table I, application no. 19, in column 6 in the same line as SEQ ID NO. 11990 is depicted, non-targeted is mentioned.

[100554] In an embodiment the present invention relates to an expresssion cassette comprising a) a promoter, preferably a promoter selected from the group consisting of Big35S, PCUbi, Super and USP, in particular p-PcUBI; and b) the nucleic acid SEQ ID NO. 147407, or a homolog or fragment thereof, or a homolog thereof being depicted in Table I, application no. 19, column 8, in the same line as SEQ ID NO. 147407, preferably the coding region thereof, a homolog or a fragment thereof; which are operable linked.

[100555] In an embodiment thereof the expression cassette comprises in addition c) a nucleic acid molecule encoding a transit peptide, especially a plastidal transit petide in case in Table I, application no. 19, in column 6 in the same line as SEQ ID NO. 147407 is depicted, plastidic is mentioned, or a mitochondrial transit peptide in case in Table I, application no. 19, in column 6 in the same line as SEQ ID NO. 147407 is depicted, mitochondric is mentioned; which is operable linked, too.

[100556] In another embodiment thereof the expression cassette does not comprise an additional transit peptide in case in Table I, application no. 19, in column 6 in the same line as SEQ ID NO. 147407 is depicted, non-targeted is mentioned.

[100557] In an embodiment the present invention relates to an expresssion cassette comprising a) a promoter, preferably a promoter selected from the group consisting of Big35S, PCUbi, Super and USP, in particular p-PcUBI; and b) the nucleic acid SEQ ID NO. 57734, or a homolog or fragment thereof, or a homolog thereof being depicted in Table I, application no. 19, column 8, in the same line as SEQ ID NO. 57734, preferably the coding region thereof, a homolog or a fragment thereof; which are operable linked.

[100558] In an embodiment thereof the expression cassette comprises in addition c) a nucleic acid molecule encoding a transit peptide, especially a plastidal transit petide in case in Table I, application no. 19, in column 6 in the same line as SEQ ID NO. 57734 is depicted, plastidic is mentioned, or a mitochondrial transit peptide in case in Table I, application no. 19, in column 6 in the same line as SEQ ID NO. 57734 is depicted, mitochondric is mentioned; which is operable linked, too.

[100559] In another embodiment thereof the expression cassette does not comprise an additional transit peptide in case in Table I, application no. 19, in column 6 in the same line as SEQ ID NO. 57734 is depicted, non-targeted is mentioned.

[100560] In an embodiment the present invention relates to an expresssion cassette comprising a) a promoter, preferably a promoter selected from the group consisting of Big35S, PCUbi, Super and USP, in particular p-PcUBI; and b) the nucleic acid SEQ ID NO. 116341, or a homolog or fragment thereof, or a homolog thereof being depicted in Table I, application no. 19, column 8, in the same line as SEQ ID NO. 116341, preferably the coding region thereof, a homolog or a fragment thereof; which are operable linked.

[100561] In an embodiment thereof the expression cassette comprises in addition c) a nucleic acid molecule encoding a transit peptide, especially a plastidal transit petide in case in Table I, application no. 19, in column 6 in the same line as SEQ ID NO. 116341 is depicted, plastidic is mentioned, or a mitochondrial transit peptide in case in Table I, application no. 19, in column 6 in the same line as SEQ ID NO. 116341 is depicted, mitochondric is mentioned; which is operable linked, too.

[100562] In another embodiment thereof the expression cassette does not comprise an additional transit peptide in case in Table I, application no. 19, in column 6 in the same line as SEQ ID NO. 116341 is depicted, non-targeted is mentioned.

[100563] In an embodiment the present invention relates to an expresssion cassette comprising a) a promoter, preferably a promoter selected from the group consisting of Big35S, PCUbi, Super and USP, in particular p-PcUBI; and b) the nucleic acid SEQ ID NO. 116460, or a homolog or fragment thereof, or a homolog thereof being depicted in Table I, application no. 19, column 8, in the same line as SEQ ID NO. 116460, preferably the coding region thereof, a homolog or a fragment thereof; which are operable linked.

[100564] In an embodiment thereof the expression cassette comprises in addition c) a nucleic acid molecule encoding a transit peptide, especially a plastidal transit petide in case in Table I, application no. 19, in column 6 in the same line as SEQ ID NO. 116460 is depicted, plastidic is mentioned, or a mitochondrial transit peptide in case in Table I, application no. 19, in column 6 in the same line as SEQ ID NO. 116460 is depicted, mitochondric is mentioned; which is operable linked, too.

[100565] In another embodiment thereof the expression cassette does not comprise an additional transit peptide in case in Table I, application no. 19, in column 6 in the same line as SEQ ID NO. 116460 is depicted, non-targeted is mentioned.

[100566] In an embodiment the present invention relates to an expresssion cassette comprising a) a promoter, preferably a promoter selected from the group consisting of Big35S, PCUbi, Super and USP, in particular p-PcUBI; and b) the nucleic acid SEQ ID NO. 58324, or a homolog or fragment thereof, or a homolog thereof being depicted in Table I, application no. 19, column 8, in the same line as SEQ ID NO. 58324, preferably the coding region thereof, a homolog or a fragment thereof; which are operable linked.

[100567] In an embodiment thereof the expression cassette comprises in addition c) a nucleic acid molecule encoding a transit peptide, especially a plastidal transit petide in case in Table I, application no. 19, in column 6 in the same line as SEQ ID NO. 58324 is depicted, plastidic is mentioned, or a mitochondrial transit peptide in case in Table I, application no. 19, in column 6 in the same line as SEQ ID NO. 58324 is depicted, mitochondric is mentioned; which is operable linked, too.

[100568] In another embodiment thereof the expression cassette does not comprise an additional transit peptide in case in Table I, application no. 19, in column 6 in the same line as SEQ ID NO. 58324 is depicted, non-targeted is mentioned.

[100569] In an embodiment the present invention relates to an expresssion cassette comprising a) a promoter, preferably a promoter selected from the group consisting of Big35S, PCUbi, Super and USP, in particular p-PcUBI; and b) the nucleic acid SEQ ID NO. 58590, or a homolog or fragment thereof, or a homolog thereof being depicted in Table I, application no. 19, column 8, in the same line as SEQ ID NO. 58590, preferably the coding region thereof, a homolog or a fragment thereof; which are operable linked.

[100570] In an embodiment thereof the expression cassette comprises in addition c) a nucleic acid molecule encoding a transit peptide, especially a plastidal transit petide in case in Table I, application no. 19, in column 6 in the same line as SEQ ID NO. 58590 is depicted, plastidic is mentioned, or a mitochondrial transit peptide in case in Table I, application no. 19, in column 6 in the same line as SEQ ID NO. 58590 is depicted, mitochondric is mentioned; which is operable linked, too.

[100571] In another embodiment thereof the expression cassette does not comprise an additional transit peptide in case in Table I, application no. 19, in column 6 in the same line as SEQ ID NO. 58590 is depicted, non-targeted is mentioned.

[100572] In an embodiment the present invention relates to an expresssion cassette comprising a) a promoter, preferably a promoter selected from the group consisting of Big35S, PCUbi, Super and USP, in particular p-PcUBI; and b) the nucleic acid SEQ ID NO. 154137, or a homolog or fragment thereof, or a homolog thereof being depicted in Table I, application no. 19, column 8, in the same line as SEQ ID NO. 154137, preferably the coding region thereof, a homolog or a fragment thereof; which are operable linked.

[100573] In an embodiment thereof the expression cassette comprises in addition c) a nucleic acid molecule encoding a transit peptide, especially a plastidal transit petide in case in Table I, application no. 19, in column 6 in the same line as SEQ ID NO. 154137 is depicted, plastidic is mentioned, or a mitochondrial transit peptide in case in Table I, application no. 19, in column 6 in the same line as SEQ ID NO. 154137 is depicted, mitochondric is mentioned; which is operable linked, too.

[100574] In another embodiment thereof the expression cassette does not comprise an additional transit peptide in case in Table I, application no. 19, in column 6 in the same line as SEQ ID NO. 154137 is depicted, non-targeted is mentioned.

[100575] In an embodiment the present invention relates to an expresssion cassette comprising a) a promoter, preferably a promoter selected from the group consisting of Big35S, PCUbi, Super and USP, in particular p-PcUBI; and b) the nucleic acid SEQ ID NO. 147457, or a homolog or fragment thereof, or a homolog thereof being depicted in Table I, application no. 19, column 8, in the same line as SEQ ID NO. 147457, preferably the coding region thereof, a homolog or a fragment thereof; which are operable linked.

[100576] In an embodiment thereof the expression cassette comprises in addition c) a nucleic acid molecule encoding a transit peptide, especially a plastidal transit petide in case in Table I, application no. 19, in column 6 in the same line as SEQ ID NO. 147457 is depicted, plastidic is mentioned, or a mitochondrial transit peptide in case in Table I, application no. 19, in column 6 in the same line as SEQ ID NO. 147457 is depicted, mitochondric is mentioned; which is operable linked, too.

[100577] In another embodiment thereof the expression cassette does not comprise an additional transit peptide in case in Table I, application no. 19, in column 6 in the same line as SEQ ID NO. 147457 is depicted, non-targeted is mentioned.

[100578] In an embodiment the present invention relates to an expresssion cassette comprising a) a promoter, preferably a promoter selected from the group consisting of Big35S, PCUbi, Super and USP, in particular p-PcUBI; and b) the nucleic acid SEQ ID NO. 127521, or a homolog or fragment thereof, or a homolog thereof being depicted in Table I, application no. 19, column 8, in the same line as SEQ ID NO. 127521, preferably the coding region thereof, a homolog or a fragment thereof; which are operable linked.

[100579] In an embodiment thereof the expression cassette comprises in addition c) a nucleic acid molecule encoding a transit peptide, especially a plastidal transit petide in case in Table I, application no. 19, in column 6 in the same line as SEQ ID NO. 127521 is depicted, plastidic is mentioned, or a mitochondrial transit peptide in case in Table I, application no. 19, in column 6 in the same line as SEQ ID NO. 127521 is depicted, mitochondric is mentioned; which is operable linked, too.

[100580] In another embodiment thereof the expression cassette does not comprise an additional transit peptide in case in Table I, application no. 19, in column 6 in the same line as SEQ ID NO. 127521 is depicted, non-targeted is mentioned.

[100581] In an embodiment the present invention relates to an expresssion cassette comprising a) a promoter, preferably a promoter selected from the group consisting of Big35S, PCUbi, Super and USP, in particular p-PcUBI; and b) the nucleic acid SEQ ID NO. 12341, or a homolog or fragment thereof, or a homolog thereof being depicted in Table I, application no. 19, column 8, in the same line as SEQ ID NO. 12341, preferably the coding region thereof, a homolog or a fragment thereof; which are operable linked.

[100582] In an embodiment thereof the expression cassette comprises in addition c) a nucleic acid molecule encoding a transit peptide, especially a plastidal transit petide in case in Table I, application no. 19, in column 6 in the same line as SEQ ID NO. 12341 is depicted, plastidic is mentioned, or a mitochondrial transit peptide in case in Table I, application no. 19, in column 6 in the same line as SEQ ID NO. 12341 is depicted, mitochondric is mentioned; which is operable linked, too.

[100583] In another embodiment thereof the expression cassette does not comprise an additional transit peptide in case in Table I, application no. 19, in column 6 in the same line as SEQ ID NO. 12341 is depicted, non-targeted is mentioned.

[100584] In an embodiment the present invention relates to an expresssion cassette comprising a) a promoter, preferably a promoter selected from the group consisting of Big35S, PCUbi, Super and USP, in particular p-PcUBI; and b) the nucleic acid SEQ ID NO. 136907, or a homolog or fragment thereof, or a homolog thereof being depicted in Table I, application no. 19, column 8, in the same line as SEQ ID NO. 136907, preferably the coding region thereof, a homolog or a fragment thereof; which are operable linked.

[100585] In an embodiment thereof the expression cassette comprises in addition c) a nucleic acid molecule encoding a transit peptide, especially a plastidal transit petide in case in Table I, application no. 19, in column 6 in the same line as SEQ ID NO. 136907 is depicted, plastidic is mentioned, or a mitochondrial transit peptide in case in Table I, application no. 19, in column 6 in the same line as SEQ ID NO. 136907 is depicted, mitochondric is mentioned; which is operable linked, too.

[100586] In another embodiment thereof the expression cassette does not comprise an additional transit peptide in case in Table I, application no. 19, in column 6 in the same line as SEQ ID NO. 136907 is depicted, non-targeted is mentioned.

[100587] In an embodiment the present invention relates to an expresssion cassette comprising a) a promoter, preferably a promoter selected from the group consisting of Big35S, PCUbi, Super and USP, in particular p-PcUBI; and b) the nucleic acid SEQ ID NO. 60301, or a homolog or fragment thereof, or a homolog thereof being depicted in Table I, application no. 19, column 8, in the same line as SEQ ID NO. 60301, preferably the coding region thereof, a homolog or a fragment thereof; which are operable linked.

[100588] In an embodiment thereof the expression cassette comprises in addition c) a nucleic acid molecule encoding a transit peptide, especially a plastidal transit petide in case in Table I, application no. 19, in column 6 in the same line as SEQ ID NO. 60301 is depicted, plastidic is mentioned, or a mitochondrial transit peptide in case in Table I, application no. 19, in column 6 in the same line as SEQ ID NO. 60301 is depicted, mitochondric is mentioned; which is operable linked, too.

[100589] In another embodiment thereof the expression cassette does not comprise an additional transit peptide in case in Table I, application no. 19, in column 6 in the same line as SEQ ID NO. 60301 is depicted, non-targeted is mentioned.

[100590] In an embodiment the present invention relates to an expresssion cassette comprising a) a promoter, preferably a promoter selected from the group consisting of Big35S, PCUbi, Super and USP, in particular p-PcUBI; and b) the nucleic acid SEQ ID NO. 61553, or a homolog or fragment thereof, or a homolog thereof being depicted in Table I, application no. 19, column 8, in the same line as SEQ ID NO. 61553, preferably the coding region thereof, a homolog or a fragment thereof; which are operable linked.

[100591] In an embodiment thereof the expression cassette comprises in addition c) a nucleic acid molecule encoding a transit peptide, especially a plastidal transit petide in case in Table I, application no. 19, in column 6 in the same line as SEQ ID NO. 61553 is depicted, plastidic is mentioned, or a mitochondrial transit peptide in case in Table I, application no. 19, in column 6 in the same line as SEQ ID NO. 61553 is depicted, mitochondric is mentioned; which is operable linked, too.

[100592] In another embodiment thereof the expression cassette does not comprise an additional transit peptide in case in Table I, application no. 19, in column 6 in the same line as SEQ ID NO. 61553 is depicted, non-targeted is mentioned.

[100593] In an embodiment the present invention relates to an expresssion cassette comprising a) a promoter, preferably a promoter selected from the group consisting of Big35S, PCUbi, Super and USP, in particular p-PcUBI; and b) the nucleic acid SEQ ID NO. 62079, or a homolog or fragment thereof, or a homolog thereof being depicted in Table I, application no. 19, column 8, in the same line as SEQ ID NO. 62079, preferably the coding region thereof, a homolog or a fragment thereof; which are operable linked.

[100594] In an embodiment thereof the expression cassette comprises in addition c) a nucleic acid molecule encoding a transit peptide, especially a plastidal transit petide in case in Table I, application no. 19, in column 6 in the same line as SEQ ID NO. 62079 is depicted, plastidic is mentioned, or a mitochondrial transit peptide in case in Table I, application no. 19, in column 6 in the same line as SEQ ID NO. 62079 is depicted, mitochondric is mentioned; which is operable linked, too.

[100595] In another embodiment thereof the expression cassette does not comprise an additional transit peptide in case in Table I, application no. 19, in column 6 in the same line as SEQ ID NO. 62079 is depicted, non-targeted is mentioned.

[100596] In an embodiment the present invention relates to an expresssion cassette comprising a) a promoter, preferably a promoter selected from the group consisting of Big35S, PCUbi, Super and USP, in particular p-PcUBI; and b) the nucleic acid SEQ ID NO. 108092, or a homolog or fragment thereof, or a homolog thereof being depicted in Table I, application no. 19, column 8, in the same line as SEQ ID NO. 108092, preferably the coding region thereof, a homolog or a fragment thereof; which are operable linked.

[100597] In an embodiment thereof the expression cassette comprises in addition c) a nucleic acid molecule encoding a transit peptide, especially a plastidal transit petide in case in Table I, application no. 19, in column 6 in the same line as SEQ ID NO. 108092 is depicted, plastidic is mentioned, or a mitochondrial transit peptide in case in Table I, application no. 19, in column 6 in the same line as SEQ ID NO. 108092 is depicted, mitochondric is mentioned; which is operable linked, too.

[100598] In another embodiment thereof the expression cassette does not comprise an additional transit peptide in case in Table I, application no. 19, in column 6 in the same line as SEQ ID NO. 108092 is depicted, non-targeted is mentioned.

[100599] In an embodiment the present invention relates to an expresssion cassette comprising a) a promoter, preferably a promoter selected from the group consisting of Big35S, PCUbi, Super and USP, in particular Big35S; and b) the nucleic acid SEQ ID NO. 62524, or a homolog or fragment thereof, or a homolog thereof being depicted in Table I, application no. 19, column 8, in the same line as SEQ ID NO. 62524, preferably the coding region thereof, a homolog or a fragment thereof; which are operable linked.

[100600] In an embodiment thereof the expression cassette comprises in addition c) a nucleic acid molecule encoding a transit peptide, especially a plastidal transit petide in case in Table I, application no. 19, in column 6 in the same line as SEQ ID NO. 62524 is depicted, plastidic is mentioned, or a mitochondrial transit peptide in case in Table I, application no. 19, in column 6 in the same line as SEQ ID NO. 62524 is depicted, mitochondric is mentioned; which is operable linked, too.

[100601] In another embodiment thereof the expression cassette does not comprise an additional transit peptide in case in Table I, application no. 19, in column 6 in the same line as SEQ ID NO. 62524 is depicted, non-targeted is mentioned.

[100602] In an embodiment the present invention relates to an expresssion cassette comprising a) a promoter, preferably a promoter selected from the group consisting of Big35S, PCUbi, Super and USP, in particular p-Super; and b) the nucleic acid SEQ ID NO. 119347, or a homolog or fragment thereof, or a homolog thereof being depicted in Table I, application no. 19, column 8, in the same line as SEQ ID NO. 119347, preferably the coding region thereof, a homolog or a fragment thereof; which are operable linked.

[100603] In an embodiment thereof the expression cassette comprises in addition c) a nucleic acid molecule encoding a transit peptide, especially a plastidal transit petide in case in Table I, application no. 19, in column 6 in the same line as SEQ ID NO. 119347 is depicted, plastidic is mentioned, or a mitochondrial transit peptide in case in Table I, application no. 19, in column 6 in the same line as SEQ ID NO. 119347 is depicted, mitochondric is mentioned; which is operable linked, too.

[100604] In another embodiment thereof the expression cassette does not comprise an additional transit peptide in case in Table I, application no. 19, in column 6 in the same line as SEQ ID NO. 119347 is depicted, non-targeted is mentioned.

[100605] In an embodiment the present invention relates to an expresssion cassette comprising a) a promoter, preferably a promoter selected from the group consisting of Big35S, PCUbi, Super and USP, in particular Big35S; and b) the nucleic acid SEQ ID NO. 62717, or a homolog or fragment thereof, or a homolog thereof being depicted in Table I, application no. 19, column 8, in the same line as SEQ ID NO. 62717, preferably the coding region thereof, a homolog or a fragment thereof; which are operable linked.

[100606] In an embodiment thereof the expression cassette comprises in addition c) a nucleic acid molecule encoding a transit peptide, especially a plastidal transit petide in case in Table I, application no. 19, in column 6 in the same line as SEQ ID NO. 62717 is depicted, plastidic is mentioned, or a mitochondrial transit peptide in case in Table I, application no. 19, in column 6 in the same line as SEQ ID NO. 62717 is depicted, mitochondric is mentioned; which is operable linked, too.

[100607] In another embodiment thereof the expression cassette does not comprise an additional transit peptide in case in Table I, application no. 19, in column 6 in the same line as SEQ ID NO. 62717 is depicted, non-targeted is mentioned.

[100608] In an embodiment the present invention relates to an expresssion cassette comprising a) a promoter, preferably a promoter selected from the group consisting of Big35S, PCUbi, Super and USP, in particular p-Super; and b) the nucleic acid SEQ ID NO. 63264, or a homolog or fragment thereof, or a homolog thereof being depicted in Table I, application no. 19, column 8, in the same line as SEQ ID NO. 63264, preferably the coding region thereof, a homolog or a fragment thereof; which are operable linked.

[100609] In an embodiment thereof the expression cassette comprises in addition c) a nucleic acid molecule encoding a transit peptide, especially a plastidal transit petide in case in Table I, application no. 19, in column 6 in the same line as SEQ ID NO. 63264 is depicted, plastidic is mentioned, or a mitochondrial transit peptide in case in Table I, application no. 19, in column 6 in the same line as SEQ ID NO. 63264 is depicted, mitochondric is mentioned; which is operable linked, too.

[100610] In another embodiment thereof the expression cassette does not comprise an additional transit peptide in case in Table I, application no. 19, in column 6 in the same line as SEQ ID NO. 63264 is depicted, non-targeted is mentioned.

[100611] In an embodiment the present invention relates to an expresssion cassette comprising a) a promoter, preferably a promoter selected from the group consisting of Big35S, PCUbi, Super and USP, in particular p-Super; and b) the nucleic acid SEQ ID NO. 90159, or a homolog or fragment thereof, or a homolog thereof being depicted in Table I, application no. 19, column 8, in the same line as SEQ ID NO. 90159, preferably the coding region thereof, a homolog or a fragment thereof; which are operable linked.

[100612] In an embodiment thereof the expression cassette comprises in addition c) a nucleic acid molecule encoding a transit peptide, especially a plastidal transit petide in case in Table I, application no. 19, in column 6 in the same line as SEQ ID NO. 90159 is depicted, plastidic is mentioned, or a mitochondrial transit peptide in case in Table I, application no. 19, in column 6 in the same line as SEQ ID NO. 90159 is depicted, mitochondric is mentioned; which is operable linked, too.

[100613] In another embodiment thereof the expression cassette does not comprise an additional transit peptide in case in Table I, application no. 19, in column 6 in the same line as SEQ ID NO. 90159 is depicted, non-targeted is mentioned.

[100614] In an embodiment the present invention relates to an expresssion cassette comprising a) a promoter, preferably a promoter selected from the group consisting of Big35S, PCUbi, Super and USP, in particular Big35S; and b) the nucleic acid SEQ ID NO. 63807, or a homolog or fragment thereof, or a homolog thereof being depicted in Table I, application no. 19, column 8, in the same line as SEQ ID NO. 63807, preferably the coding region thereof, a homolog or a fragment thereof; which are operable linked.

[100615] In an embodiment thereof the expression cassette comprises in addition c) a nucleic acid molecule encoding a transit peptide, especially a plastidal transit petide in case in Table I, application no. 19, in column 6 in the same line as SEQ ID NO. 63807 is depicted, plastidic is mentioned, or a mitochondrial transit peptide in case in Table I, application no. 19, in column 6 in the same line as SEQ ID NO. 63807 is depicted, mitochondric is mentioned; which is operable linked, too.

[100616] In another embodiment thereof the expression cassette does not comprise an additional transit peptide in case in Table I, application no. 19, in column 6 in the same line as SEQ ID NO. 63807 is depicted, non-targeted is mentioned.

[100617] In an embodiment the present invention relates to an expresssion cassette comprising a) a promoter, preferably a promoter selected from the group consisting of Big35S, PCUbi, Super and USP, in particular Big35S; and b) the nucleic acid SEQ ID NO. 64144, or a homolog or fragment thereof, or a homolog thereof being depicted in Table I, application no. 19, column 8, in the same line as SEQ ID NO. 64144, preferably the coding region thereof, a homolog or a fragment thereof; which are operable linked.

[100618] In an embodiment thereof the expression cassette comprises in addition c) a nucleic acid molecule encoding a transit peptide, especially a plastidal transit petide in case in Table I, application no. 19, in column 6 in the same line as SEQ ID NO. 64144 is depicted, plastidic is mentioned, or a mitochondrial transit peptide in case in Table I, application no. 19, in column 6 in the same line as SEQ ID NO. 64144 is depicted, mitochondric is mentioned; which is operable linked, too.

[100619] In another embodiment thereof the expression cassette does not comprise an additional transit peptide in case in Table I, application no. 19, in column 6 in the same line as SEQ ID NO. 64144 is depicted, non-targeted is mentioned.

[100620] In an embodiment the present invention relates to an expresssion cassette comprising a) a promoter, preferably a promoter selected from the group consisting of Big35S, PCUbi, Super and USP, in particular p-Super; and b) the nucleic acid SEQ ID NO. 130742, or a homolog or fragment thereof, or a homolog thereof being depicted in Table I, application no. 19, column 8, in the same line as SEQ ID NO. 130742, preferably the coding region thereof, a homolog or a fragment thereof; which are operable linked.

[100621] In an embodiment thereof the expression cassette comprises in addition c) a nucleic acid molecule encoding a transit peptide, especially a plastidal transit petide in case in Table I, application no. 19, in column 6 in the same line as SEQ ID NO. 130742 is depicted, plastidic is mentioned, or a mitochondrial transit peptide in case in Table I, application no. 19, in column 6 in the same line as SEQ ID NO. 130742 is depicted, mitochondric is mentioned; which is operable linked, too.

[100622] In another embodiment thereof the expression cassette does not comprise an additional transit peptide in case in Table I, application no. 19, in column 6 in the same line as SEQ ID NO. 130742 is depicted, non-targeted is mentioned.

[100623] In an embodiment the present invention relates to an expresssion cassette comprising a) a promoter, preferably a promoter selected from the group consisting of Big35S, PCUbi, Super and USP, in particular p-Super; and b) the nucleic acid SEQ ID NO. 128655, or a homolog or fragment thereof, or a homolog thereof being depicted in Table I, application no. 19, column 8, in the same line as SEQ ID NO. 128655, preferably the coding region thereof, a homolog or a fragment thereof; which are operable linked.

[100624] In an embodiment thereof the expression cassette comprises in addition c) a nucleic acid molecule encoding a transit peptide, especially a plastidal transit petide in case in Table I, application no. 19, in column 6 in the same line as SEQ ID NO. 128655 is depicted, plastidic is mentioned, or a mitochondrial transit peptide in case in Table I, application no. 19, in column 6 in the same line as SEQ ID NO. 128655 is depicted, mitochondric is mentioned; which is operable linked, too.

[100625] In another embodiment thereof the expression cassette does not comprise an additional transit peptide in case in Table I, application no. 19, in column 6 in the same line as SEQ ID NO. 128655 is depicted, non-targeted is mentioned.

[100626] In an embodiment the present invention relates to an expresssion cassette comprising a) a promoter, preferably a promoter selected from the group consisting of Big35S, PCUbi, Super and USP, in particular p-Super; and b) the nucleic acid SEQ ID NO. 64336, or a homolog or fragment thereof, or a homolog thereof being depicted in Table I, application no. 19, column 8, in the same line as SEQ ID NO. 64336, preferably the coding region thereof, a homolog or a fragment thereof; which are operable linked.

[100627] In an embodiment thereof the expression cassette comprises in addition c) a nucleic acid molecule encoding a transit peptide, especially a plastidal transit petide in case in Table I, application no. 19, in column 6 in the same line as SEQ ID NO. 64336 is depicted, plastidic is mentioned, or a mitochondrial transit peptide in case in Table I, application no. 19, in column 6 in the same line as SEQ ID NO. 64336 is depicted, mitochondric is mentioned; which is operable linked, too.

[100628] In another embodiment thereof the expression cassette does not comprise an additional transit peptide in case in Table I, application no. 19, in column 6 in the same line as SEQ ID NO. 64336 is depicted, non-targeted is mentioned.

[100629] In an embodiment the present invention relates to an expresssion cassette comprising a) a promoter, preferably a promoter selected from the group consisting of Big35S, PCUbi, Super and USP, in particular p-Super; and b) the nucleic acid SEQ ID NO. 154394, or a homolog or fragment thereof, or a homolog thereof being depicted in Table I, application no. 19, column 8, in the same line as SEQ ID NO. 154394, preferably the coding region thereof, a homolog or a fragment thereof; which are operable linked.

[100630] In an embodiment thereof the expression cassette comprises in addition c) a nucleic acid molecule encoding a transit peptide, especially a plastidal transit petide in case in Table I, application no. 19, in column 6 in the same line as SEQ ID NO. 154394 is depicted, plastidic is mentioned, or a mitochondrial transit peptide in case in Table I, application no. 19, in column 6 in the same line as SEQ ID NO. 154394 is depicted, mitochondric is mentioned; which is operable linked, too.

[100631] In another embodiment thereof the expression cassette does not comprise an additional transit peptide in case in Table I, application no. 19, in column 6 in the same line as SEQ ID NO. 154394 is depicted, non-targeted is mentioned.

[100632] In an embodiment the present invention relates to an expresssion cassette comprising a) a promoter, preferably a promoter selected from the group consisting of Big35S, PCUbi, Super and USP, in particular Big35S; and b) the nucleic acid SEQ ID NO. 14769, or a homolog or fragment thereof, or a homolog thereof being depicted in Table I, application no. 19, column 8, in the same line as SEQ ID NO. 14769, preferably the coding region thereof, a homolog or a fragment thereof; which are operable linked.

[100633] In an embodiment thereof the expression cassette comprises in addition c) a nucleic acid molecule encoding a transit peptide, especially a plastidal transit petide in case in Table I, application no. 19, in column 6 in the same line as SEQ ID NO. 14769 is depicted, plastidic is mentioned, or a mitochondrial transit peptide in case in Table I, application no. 19, in column 6 in the same line as SEQ ID NO. 14769 is depicted, mitochondric is mentioned; which is operable linked, too.

[100634] In another embodiment thereof the expression cassette does not comprise an additional transit peptide in case in Table I, application no. 19, in column 6 in the same line as SEQ ID NO. 14769 is depicted, non-targeted is mentioned.

[100635] In an embodiment the present invention relates to an expresssion cassette comprising a) a promoter, preferably a promoter selected from the group consisting of Big35S, PCUbi, Super and USP, in particular p-Super; and b) the nucleic acid SEQ ID NO. 149454, or a homolog or fragment thereof, or a homolog thereof being depicted in Table I, application no. 19, column 8, in the same line as SEQ ID NO. 149454, preferably the coding region thereof, a homolog or a fragment thereof; which are operable linked.

[100636] In an embodiment thereof the expression cassette comprises in addition c) a nucleic acid molecule encoding a transit peptide, especially a plastidal transit petide in case in Table I, application no. 19, in column 6 in the same line as SEQ ID NO. 149454 is depicted, plastidic is mentioned, or a mitochondrial transit peptide in case in Table I, application no. 19, in column 6 in the same line as SEQ ID NO. 149454 is depicted, mitochondric is mentioned; which is operable linked, too.

[100637] In another embodiment thereof the expression cassette does not comprise an additional transit peptide in case in Table I, application no. 19, in column 6 in the same line as SEQ ID NO. 149454 is depicted, non-targeted is mentioned.

[100638] In an embodiment the present invention relates to an expresssion cassette comprising a) a promoter, preferably a promoter selected from the group consisting of Big35S, PCUbi, Super and USP, in particular Big35S; and b) the nucleic acid SEQ ID NO. 154437, or a homolog or fragment thereof, or a homolog thereof being depicted in Table I, application no. 19, column 8, in the same line as SEQ ID NO. 154437, preferably the coding region thereof, a homolog or a fragment thereof; which are operable linked.

[100639] In an embodiment thereof the expression cassette comprises in addition c) a nucleic acid molecule encoding a transit peptide, especially a plastidal transit petide in case in Table I, application no. 19, in column 6 in the same line as SEQ ID NO. 154437 is depicted, plastidic is mentioned, or a mitochondrial transit peptide in case in Table I, application no. 19, in column 6 in the same line as SEQ ID NO. 154437 is depicted, mitochondric is mentioned; which is operable linked, too.

[100640] In another embodiment thereof the expression cassette does not comprise an additional transit peptide in case in Table I, application no. 19, in column 6 in the same line as SEQ ID NO. 154437 is depicted, non-targeted is mentioned.

[100641] In an embodiment the present invention relates to an expresssion cassette comprising a) a promoter, preferably a promoter selected from the group consisting of Big35S, PCUbi, Super and USP, in particular p-Super; and b) the nucleic acid SEQ ID NO. 64964, or a homolog or fragment thereof, or a homolog thereof being depicted in Table I, application no. 19, column 8, in the same line as SEQ ID NO. 64964, preferably the coding region thereof, a homolog or a fragment thereof; which are operable linked.

[100642] In an embodiment thereof the expression cassette comprises in addition c) a nucleic acid molecule encoding a transit peptide, especially a plastidal transit petide in case in Table I, application no. 19, in column 6 in the same line as SEQ ID NO. 64964 is depicted, plastidic is mentioned, or a mitochondrial transit peptide in case in Table I, application no. 19, in column 6 in the same line as SEQ ID NO. 64964 is depicted, mitochondric is mentioned; which is operable linked, too.

[100643] In another embodiment thereof the expression cassette does not comprise an additional transit peptide in case in Table I, application no. 19, in column 6 in the same line as SEQ ID NO. 64964 is depicted, non-targeted is mentioned.

[100644] In an embodiment the present invention relates to an expresssion cassette comprising a) a promoter, preferably a promoter selected from the group consisting of Big35S, PCUbi, Super and USP, in particular p-PcUBI; and b) the nucleic acid SEQ ID NO. 66274, or a homolog or fragment thereof, or a homolog thereof being depicted in Table I, application no. 19, column 8, in the same line as SEQ ID NO. 66274, preferably the coding region thereof, a homolog or a fragment thereof; which are operable linked.

[100645] In an embodiment thereof the expression cassette comprises in addition c) a nucleic acid molecule encoding a transit peptide, especially a plastidal transit petide in case in Table I, application no. 19, in column 6 in the same line as SEQ ID NO. 66274 is depicted, plastidic is mentioned, or a mitochondrial transit peptide in case in Table I, application no. 19, in column 6 in the same line as SEQ ID NO. 66274 is depicted, mitochondric is mentioned; which is operable linked, too.

[100646] In another embodiment thereof the expression cassette does not comprise an additional transit peptide in case in Table I, application no. 19, in column 6 in the same line as SEQ ID NO. 66274 is depicted, non-targeted is mentioned.

[100647] In an embodiment the present invention relates to an expresssion cassette comprising a) a promoter, preferably a promoter selected from the group consisting of Big35S, PCUbi, Super and USP, in particular Big35S; and b) the nucleic acid SEQ ID NO. 150603, or a homolog or fragment thereof, or a homolog thereof being depicted in Table I, application no. 19, column 8, in the same line as SEQ ID NO. 150603, preferably the coding region thereof, a homolog or a fragment thereof; which are operable linked.

[100648] In an embodiment thereof the expression cassette comprises in addition c) a nucleic acid molecule encoding a transit peptide, especially a plastidal transit petide in case in Table I, application no. 19, in column 6 in the same line as SEQ ID NO. 150603 is depicted, plastidic is mentioned, or a mitochondrial transit peptide in case in Table I, application no. 19, in column 6 in the same line as SEQ ID NO. 150603 is depicted, mitochondric is mentioned; which is operable linked, too.

[100649] In another embodiment thereof the expression cassette does not comprise an additional transit peptide in case in Table I, application no. 19, in column 6 in the same line as SEQ ID NO. 150603 is depicted, non-targeted is mentioned.

[100650] In an embodiment the present invention relates to an expresssion cassette comprising a) a promoter, preferably a promoter selected from the group consisting of Big35S, PCUbi, Super and USP, in particular p-Super; and b) the nucleic acid SEQ ID NO. 154454, or a homolog or fragment thereof, or a homolog thereof being depicted in Table I, application no. 19, column 8, in the same line as SEQ ID NO. 154454, preferably the coding region thereof, a homolog or a fragment thereof; which are operable linked.

[100651] In an embodiment thereof the expression cassette comprises in addition c) a nucleic acid molecule encoding a transit peptide, especially a plastidal transit petide in case in Table I, application no. 19, in column 6 in the same line as SEQ ID NO. 154454 is depicted, plastidic is mentioned, or a mitochondrial transit peptide in case in Table I, application no. 19, in column 6 in the same line as SEQ ID NO. 154454 is depicted, mitochondric is mentioned; which is operable linked, too.

[100652] In another embodiment thereof the expression cassette does not comprise an additional transit peptide in case in Table I, application no. 19, in column 6 in the same line as SEQ ID NO. 154454 is depicted, non-targeted is mentioned.

[100653] In an embodiment the present invention relates to an expresssion cassette comprising a) a promoter, preferably a promoter selected from the group consisting of Big35S, PCUbi, Super and USP, in particular Big35S; and b) the nucleic acid SEQ ID NO. 129065, or a homolog or fragment thereof, or a homolog thereof being depicted in Table I, application no. 19, column 8, in the same line as SEQ ID NO. 129065, preferably the coding region thereof, a homolog or a fragment thereof; which are operable linked.

[100654] In an embodiment thereof the expression cassette comprises in addition c) a nucleic acid molecule encoding a transit peptide, especially a plastidal transit petide in case in Table I, application no. 19, in column 6 in the same line as SEQ ID NO. 129065 is depicted, plastidic is mentioned, or a mitochondrial transit peptide in case in Table I, application no. 19, in column 6 in the same line as SEQ ID NO. 129065 is depicted, mitochondric is mentioned; which is operable linked, too.

[100655] In another embodiment thereof the expression cassette does not comprise an additional transit peptide in case in Table I, application no. 19, in column 6 in the same line as SEQ ID NO. 129065 is depicted, non-targeted is mentioned.

[100656] In an embodiment the present invention relates to an expresssion cassette comprising a) a promoter, preferably a promoter selected from the group consisting of Big35S, PCUbi, Super and USP, in particular p-Super; and b) the nucleic acid SEQ ID NO. 129123, or a homolog or fragment thereof, or a homolog thereof being depicted in Table I, application no. 19, column 8, in the same line as SEQ ID NO. 129123, preferably the coding region thereof, a homolog or a fragment thereof; which are operable linked.

[100657] In an embodiment thereof the expression cassette comprises in addition c) a nucleic acid molecule encoding a transit peptide, especially a plastidal transit petide in case in Table I, application no. 19, in column 6 in the same line as SEQ ID NO. 129123 is depicted, plastidic is mentioned, or a mitochondrial transit peptide in case in Table I, application no. 19, in column 6 in the same line as SEQ ID NO. 129123 is depicted, mitochondric is mentioned; which is operable linked, too.

[100658] In another embodiment thereof the expression cassette does not comprise an additional transit peptide in case in Table I, application no. 19, in column 6 in the same line as SEQ ID NO. 129123 is depicted, non-targeted is mentioned.

[100659] In an embodiment the present invention relates to an expresssion cassette comprising a) a promoter, preferably a promoter selected from the group consisting of Big35S, PCUbi, Super and USP, in particular Big35S; and b) the nucleic acid SEQ ID NO. 139173, or a homolog or fragment thereof, or a homolog thereof being depicted in Table I, application no. 19, column 8, in the same line as SEQ ID NO. 139173, preferably the coding region thereof, a homolog or a fragment thereof; which are operable linked.

[100660] In an embodiment thereof the expression cassette comprises in addition c) a nucleic acid molecule encoding a transit peptide, especially a plastidal transit petide in case in Table I, application no. 19, in column 6 in the same line as SEQ ID NO. 139173 is depicted, plastidic is mentioned, or a mitochondrial transit peptide in case in Table I, application no. 19, in column 6 in the same line as SEQ ID NO. 139173 is depicted, mitochondric is mentioned; which is operable linked, too.

[100661] In another embodiment thereof the expression cassette does not comprise an additional transit peptide in case in Table I, application no. 19, in column 6 in the same line as SEQ ID NO. 139173 is depicted, non-targeted is mentioned.

[100662] In an embodiment the present invention relates to an expresssion cassette comprising a) a promoter, preferably a promoter selected from the group consisting of Big35S, PCUbi, Super and USP, in particular Big35S; and b) the nucleic acid SEQ ID NO. 129470, or a homolog or fragment thereof, or a homolog thereof being depicted in Table I, application no. 19, column 8, in the same line as SEQ ID NO. 129470, preferably the coding region thereof, a homolog or a fragment thereof; which are operable linked.

[100663] In an embodiment thereof the expression cassette comprises in addition c) a nucleic acid molecule encoding a transit peptide, especially a plastidal transit petide in case in Table I, application no. 19, in column 6 in the same line as SEQ ID NO. 129470 is depicted, plastidic is mentioned, or a mitochondrial transit peptide in case in Table I, application no. 19, in column 6 in the same line as SEQ ID NO. 129470 is depicted, mitochondric is mentioned; which is operable linked, too.

[100664] In another embodiment thereof the expression cassette does not comprise an additional transit peptide in case in Table I, application no. 19, in column 6 in the same line as SEQ ID NO. 129470 is depicted, non-targeted is mentioned.

[100665] In an embodiment the present invention relates to an expresssion cassette comprising a) a promoter, preferably a promoter selected from the group consisting of Big35S, PCUbi, Super and USP, in particular Big35S; and b) the nucleic acid SEQ ID NO. 129574, or a homolog or fragment thereof, or a homolog thereof being depicted in Table I, application no. 19, column 8, in the same line as SEQ ID NO. 129574, preferably the coding region thereof, a homolog or a fragment thereof; which are operable linked.

[100666] In an embodiment thereof the expression cassette comprises in addition c) a nucleic acid molecule encoding a transit peptide, especially a plastidal transit petide in case in Table I, application no. 19, in column 6 in the same line as SEQ ID NO. 129574 is depicted, plastidic is mentioned, or a mitochondrial transit peptide in case in Table I, application no. 19, in column 6 in the same line as SEQ ID NO. 129574 is depicted, mitochondric is mentioned; which is operable linked, too.

[100667] In another embodiment thereof the expression cassette does not comprise an additional transit peptide in case in Table I, application no. 19, in column 6 in the same line as SEQ ID NO. 129574 is depicted, non-targeted is mentioned.

[100668] In an embodiment the present invention relates to an expresssion cassette comprising a) a promoter, preferably a promoter selected from the group consisting of Big35S, PCUbi, Super and USP, in particular p-Super; and b) the nucleic acid SEQ ID NO. 154477, or a homolog or fragment thereof, or a homolog thereof being depicted in Table I, application no. 19, column 8, in the same line as SEQ ID NO. 154477, preferably the coding region thereof, a homolog or a fragment thereof; which are operable linked.

[100669] In an embodiment thereof the expression cassette comprises in addition c) a nucleic acid molecule encoding a transit peptide, especially a plastidal transit petide in case in Table I, application no. 19, in column 6 in the same line as SEQ ID NO. 154477 is depicted, plastidic is mentioned, or a mitochondrial transit peptide in case in Table I, application no. 19, in column 6 in the same line as SEQ ID NO. 154477 is depicted, mitochondric is mentioned; which is operable linked, too.

[100670] In another embodiment thereof the expression cassette does not comprise an additional transit peptide in case in Table I, application no. 19, in column 6 in the same line as SEQ ID NO. 154477 is depicted, non-targeted is mentioned.

[100671] In an embodiment the present invention relates to an expresssion cassette comprising a) a promoter, preferably a promoter selected from the group consisting of Big35S, PCUbi, Super and USP, in particular Big35S; and b) the nucleic acid SEQ ID NO. 140110, or a homolog or fragment thereof, or a homolog thereof being depicted in Table I, application no. 19, column 8, in the same line as SEQ ID NO. 140110, preferably the coding region thereof, a homolog or a fragment thereof; which are operable linked.

[100672] In an embodiment thereof the expression cassette comprises in addition c) a nucleic acid molecule encoding a transit peptide, especially a plastidal transit petide in case in Table I, application no. 19, in column 6 in the same line as SEQ ID NO. 140110 is depicted, plastidic is mentioned, or a mitochondrial transit peptide in case in Table I, application no. 19, in column 6 in the same line as SEQ ID NO. 140110 is depicted, mitochondric is mentioned; which is operable linked, too.

[100673] In another embodiment thereof the expression cassette does not comprise an additional transit peptide in case in Table I, application no. 19, in column 6 in the same line as SEQ ID NO. 140110 is depicted, non-targeted is mentioned.

[100674] In an embodiment the present invention relates to an expresssion cassette comprising a) a promoter, preferably a promoter selected from the group consisting of Big35S, PCUbi, Super and USP, in particular p-PcUBI; and b) the nucleic acid SEQ ID NO. 68413, or a homolog or fragment thereof, or a homolog thereof being depicted in Table I, application no. 19, column 8, in the same line as SEQ ID NO. 68413, preferably the coding region thereof, a homolog or a fragment thereof; which are operable linked.

[100675] In an embodiment thereof the expression cassette comprises in addition c) a nucleic acid molecule encoding a transit peptide, especially a plastidal transit petide in case in Table I, application no. 19, in column 6 in the same line as SEQ ID NO. 68413 is depicted, plastidic is mentioned, or a mitochondrial transit peptide in case in Table I, application no. 19, in column 6 in the same line as SEQ ID NO. 68413 is depicted, mitochondric is mentioned; which is operable linked, too.

[100676] In another embodiment thereof the expression cassette does not comprise an additional transit peptide in case in Table I, application no. 19, in column 6 in the same line as SEQ ID NO. 68413 is depicted, non-targeted is mentioned.

[100677] In an embodiment the present invention relates to an expresssion cassette comprising a) a promoter, preferably a promoter selected from the group consisting of Big35S, PCUbi, Super and USP, in particular p-PcUBI; and b) the nucleic acid SEQ ID NO. 69, or a homolog or fragment thereof, or a homolog thereof being depicted in Table I, application no. 19, column 8, in the same line as SEQ ID NO. 69, preferably the coding region thereof, a homolog or a fragment thereof; which are operable linked.

[100678] In an embodiment thereof the expression cassette comprises in addition c) a nucleic acid molecule encoding a transit peptide, especially a plastidal transit petide in case in Table I, application no. 19, in column 6 in the same line as SEQ ID NO. 69 is depicted, plastidic is mentioned, or a mitochondrial transit peptide in case in Table I, application no. 19, in column 6 in the same line as SEQ ID NO. 69 is depicted, mitochondric is mentioned; which is operable linked, too.

[100679] In another embodiment thereof the expression cassette does not comprise an additional transit peptide in case in Table I, application no. 19, in column 6 in the same line as SEQ ID NO. 69 is depicted, non-targeted is mentioned.

[100680] [0165.1.7.19] to [0170.1.7.19] for the disclosure of these paragraphs see [0165.1.7.7] to [0170.1.7.7] above

[100681] The invention further provides a vector, comprising a nucleic acid molecule comprising 1) a nucleic acid molecule selected from the group consisting of:
[100682] (a) a nucleic acid molecule encoding a polypeptide shown in Table II, column 5 or 8, application no. 19, preferably shown in Table II A, application no. 19, in column 5, or in Table II

[100683] A, application no. 19, column 8, or in Table II B, application no. 19, column 8, or a homolog or a fragment thereof;
[100684] (b) a nucleic acid molecule shown in Table I, application no. 19, column 5 or 8, preferably shown in Table I A, application no. 19, in column 5, or in Table I A, application no. 19, column 8, or in Table I B, application no. 19, column 8, preferably the coding region thereof, or a homolog or a fragment thereof;
[100685] (c) a nucleic acid molecule, which, as a result of the degeneracy of the genetic code, can be derived from a polypeptide sequence depicted in column 5 or 8 of Table II, application no. 19, preferably shown in Table II A, application no. 19, in column 5, or in Table II A, application no. 19, column 8, or in Table II B, application no. 19, column 8;
[100686] (d) a nucleic acid molecule having at least 30% identity, preferably at least 40%, 50%, 60%, 70%, 75%, 80%, 85%, 90%, 95%, 96%, 97%, 98%, 99%, 99.5%, with the nucleic acid molecule sequence of a polynucleotide comprising the nucleic acid molecule shown in column 5 or 8 of Table I, application no. 19, preferably shown in Table I A, application no. 19, in column 5, or in Table I A, application no. 19, column 8, or in Table I B, application no. 19, column 8, preferably the coding region thereof;
[100687] (e) a nucleic acid molecule encoding a polypeptide having at least 30% identity, preferably at least 40%, 50% 60%, 70%, 75%, 80%, 85%, 90%, 95%, 96%, 97%, 98%, 99%, 99.5%, identity with the amino acid sequence of the polypeptide encoded by the nucleic acid molecule of (a), (b), (c), or (d);
[100688] (f) a nucleic acid molecule which hybridizes with a nucleic acid molecule of (a), (b), (c), (d), or (e) under stringent hybridization conditions;
[100689] (g) a nucleic acid molecule encoding a polypeptide which can be isolated with the aid of monoclonal or polyclonal antibodies made against a polypeptide encoded by one of the nucleic acid molecules of (a), (b), (c), (d), (e) or (f);
[100690] (h) a nucleic acid molecule encoding a polypeptide comprising the consensus sequence or one or more polypeptide motifs as shown in column 8 of Table IV, application no. 19;
[100691] (i) a nucleic acid molecule encoding a polypeptide having the activity represented by a protein as depicted in column 5 of Table II, application no. 19;
[100692] (j) a nucleic acid molecule comprising a polynucleotide which is obtained by amplifying a cDNA library or a genomic library using the primers in Table III, application no. 19, column 8;
[100693] and
[100694] (k) nucleic acid molecule which is obtainable by screening a suitable nucleic acid library, especially a cDNA library and/or a genomic library, under stringent hybridization conditions with a probe comprising one of the sequences of the nucleic acid molecule of (a), (b), (c), (d), (e), (f), (g), (h), (i) or (j) or with a fragment thereof having at least 15 nt, preferably 20 nt, 30 nt, 50 nt, 100 nt, 200 nt, 500 nt, 1000 nt, 1500 nt, 2000 nt or 3000 nt of the nucleic acid molecule complementary to a nucleic acid sequence characterized in (a), (b), (c), (d), (e), (f), (g), (h), (i) or (j);
[100695] or a nucleic acid molecule comprising a sequence which is complementary thereto.
   (All the references to Tables I to IV are references to the corresponding lines of Tables I to IV.)

[100696] In a preferred embodiment of said vector said nucleic acid molecule according to 1 (a), (b), (c), (d), (e), (f), (g), (h), (i), (j) or (k) encodes a polypeptide which has the activity of the respective polypeptide represented by a protein comprising a polypeptide as depicted in the respective line in column 5 of Table II, application no. 19.

[100697] In another preferred embodiment of said vector said nucleic acid molecule according to 1 (a), (b), (c), (d), (e), (f), (g), (h), (i), (j) or (k) confers a generation or an increase of the respective fine chemical in a non-human organism or a part thereof as compared to a corresponding wildtype non-human organism or part thereof.

[100698] In another preferred embodiment of said vector said nucleic acid molecule according to 1 (a), (b), (c), (d), (e), (f), (g), (h), (i), (j) or (k) encodes a polypeptide which has the activity of the respective polypeptide represented by a protein as depicted in the respective line in column 5 of Table II, application no. 19, and confers a generation or an increase of the respective fine chemical in a non-human organism or a part thereof as compared to a corresponding wild-type non-human organism or part thereof.

[100699] In another embodiment thereof said vector comprises beneath said nucleic acid molecule according to 1 (a), (b), (c), (d), (e), (f), (g), (h), (i), (j) or (k), a promoter, preferably a promoter selected from the group consisting of Big35S, PCUbi, Super and USP, which are operable linked.

[100700] In a preferred embodiment thereof said vector comprises beneath said nucleic acid molecule according to 1 (a), (b), (c), (d), (e), (f), (g), (h), (i), (j) or (k), a promoter, preferably a promoter selected from the group consisting of Big35S, PCUbi, Super and USP, which are operable linked; and said nucleic acid molecule according to 1 (a), (b), (c), (d), (e), (f), (g), (h), (i), (j) or (k) encodes a polypeptide which has the activity of the respective polypeptide represented by a protein comprising a polypeptide as depicted in the respective line in column 5 of Table II, application no. 19.

[100701] In another preferred embodiment thereof said vector comprises beneath said nucleic acid molecule according to 1 (a), (b), (c), (d), (e), (f), (g), (h), (i), (j) or (k), a promoter, preferably a promoter selected from the group consisting of Big35S, PCUbi, Super and USP, which are operable linked; and said nucleic acid molecule according to 1 (a), (b), (c), (d), (e), (f), (g), (h), (i), (j) or (k) confers a generation or an increase of the respective fine chemical in a non-human organism or a part thereof as compared to a corresponding wild-type non-human organism or part thereof.

[100702] In another preferred embodiment thereof said vector comprises beneath said nucleic acid molecule according to 1 (a), (b), (c), (d), (e), (f), (g), (h), (i), (j) or (k), a promoter, preferably a promoter selected from the group consisting of Big35S, PCUbi, Super and USP, which are operable linked; and said nucleic acid molecule according to 1 (a), (b), (c), (d), (e), (f), (g), (h), (i), (j) or (k) encodes a polypeptide which has the activity of the respective polypeptide represented by a protein as depicted in the respective line in column 5 of Table II, application no. 19, and confers a generation or an increase of the respective fine chemical in a non-human organism or a part thereof as compared to a corresponding wild-type non-human organism or part thereof.

[100703] In another embodiment thereof said vector comprises beneath said nucleic acid molecule according to 1 (a), (b), (c), (d), (e), (f), (g), (h), (i), (j) or (k), a nucleic acid molecule encoding a transit peptide, preferably encoding a plastidal transit peptide, especially in case in column 6 of Table I, application no. 19, in the same line as of the respective nucleic acid molecule according to 1) “plastidic” is depicted, or encoding a mitochondrial transit peptide, especially in case in column 6 of Table I, application no. 19, in the same line as of the respective nucleic acid molecule according to 1) “mitochondric” is depicted, which are operable linked.

[100704] In another embodiment thereof said vector does not comprise beneath said nucleic acid molecule according to 1 (a), (b), (c), (d), (e), (f), (g), (h), (i), (j) or (k), a nucleic acid molecule encoding a transit peptide in case in column 6 of Table I, application no. 19, in the same line as of the respective nucleic acid molecule according to 1) “non-targeted” is depicted.

[100705] In another embodiment thereof said vector comprises beneath said nucleic acid molecule according to 1 (a), (b), (c), (d), (e), (f), (g), (h), (i), (j) or (k), and a promoter, preferably a promoter selected from the group consisting of Big35S, PCUbi, Super and USP; a nucleic acid molecule encoding a transit peptide, preferably encoding a plastidal transit peptide, especially in case in column 6 of Table I, application no. 19, in the same line as of the respective nucleic acid molecule according to 1) “plastidic” is depicted, or encoding a mitochondrial transit peptide, especially in case in column 6 of Table I, application no. 19, in the same line as of the respective nucleic acid molecule according to 1) “mitochondric” is depicted, which are operable linked.

[100706] In another embodiment thereof said vector does not comprise beneath said nucleic acid molecule according to 1 (a), (b), (c), (d), (e), (f), (g), (h), (i), (j) or (k), and a promoter, preferably a promoter selected from the group consisting of Big35S, PCUbi, Super and USP, which are operable linked; a nucleic acid molecule encoding a transit peptide, especially in case in column 6 of Table I, application no. 19, in the same line as of the respective nucleic acid molecule according to 1) “non-targeted” is depicted.

[100707] In another embodiment thereof said vector comprises beneath said nucleic acid molecule according to 1 (a), (b), (c), (d), (e), (f), (g), (h), (i), (j) or (k), and a promoter, preferably a promoter selected from the group consisting of Big35S, PCUbi, Super and USP; a nucleic acid molecule encoding a transit peptide, preferably encoding a plastidal transit peptide, especially in case in column 6 of Table I, application no. 19, in the same line as of the respective nucleic acid molecule according to 1) “plastidic” is depicted, or encoding a mitochondrial transit peptide, especially in case in column 6 of Table I, application no. 19, in the same line as of the respective nucleic acid molecule according to 1) “mitochondric” is depicted, which are operable linked; and wherein said nucleic acid molecule according to 1 (a), (b), (c), (d), (e), (f), (g), (h), (i), (j) or (k) encodes a polypeptide which has the activity of the respective polypeptide represented by a protein comprising a polypeptide as depicted in column 5 of Table II, application no. 19 (in the same line).

[100708] In another embodiment thereof said vector does not comprise beneath said nucleic acid molecule according to 1 (a), (b), (c), (d), (e), (f), (g), (h), (i), (j) or (k), and a promoter, preferably a promoter selected from the group consisting of Big35S, PCUbi, Super and USP, which are operatively linked; a nucleic acid molecule encoding a transit peptide, especially in case in column 6 of Table I, application no. 19, in the same line as of the respective nucleic acid molecule according to 1) “non-targeted” is depicted; and wherein said nucleic acid molecule according to 1 (a), (b), (c), (d), (e), (f), (g), (h), (i), (j) or (k) encodes a polypeptide which has the activity of the respective polypeptide represented by a protein comprising a polypeptide as depicted in column 5 of Table II, application no. 19.

[100709] In another embodiment thereof said vector comprises beneath said nucleic acid molecule according to 1 (a), (b), (c), (d), (e), (f), (g), (h), (i), (j) or (k), and a promoter, preferably a promoter selected from the group consisting of Big35S, PCUbi, Super and USP; a nucleic acid molecule encoding a transit peptide, preferably encoding a plastidal transit peptide, especially in case in column 6 of Table I, application no. 19, in the same line as of the respective nucleic acid molecule according to 1) “plastidic” is depicted, or encoding a mitochondrial transit peptide, especially in case in column 6 of Table I, application no. 19, in the same line as of the respective nucleic acid molecule according to 1) “mitochondric” is depicted, which are operable linked; and wherein said nucleic acid molecule according to 1 (a), (b), (c), (d), (e), (f), (g), (h), (i), (j) or (k) confers a generation or an increase of the respective fine chemical in a non-human organism or a part thereof as compared to a corresponding wild-type non-human organism or part thereof.

[100710] In another embodiment thereof said vector does not comprise beneath said nucleic acid molecule according to 1 (a), (b), (c), (d), (e), (f), (g), (h), (i), (j) or (k), and a promoter, preferably a promoter selected from the group consisting of Big35S, PCUbi, Super and USP, which are operatively linked; a nucleic acid molecule encoding a transit peptide, especially in case in column 6 of Table I, application no. 19, in the same line as of the respective nucleic acid molecule according to 1) “non-targeted” is depicted; and wherein said nucleic acid molecule according to 1 (a), (b), (c), (d), (e), (f), (g), (h), (i), (j) or (k) confers a generation or an increase of the respective fine chemical in a non-human organism or a part thereof as compared to a corresponding wild-type non-human organism or part thereof.

[100711] In another embodiment thereof said vector comprises beneath said nucleic acid molecule according to 1 (a), (b), (c), (d), (e), (f), (g), (h), (i), (j) or (k), and a promoter, preferably a promoter selected from the group consisting of Big35S, PCUbi, Super and USP; a nucleic acid molecule encoding a transit peptide, preferably encoding a plastidal transit peptide, especially in case in column 6 of Table I, application no. 19, in the same line as of the respective nucleic acid molecule according to 1) “plastidic” is depicted, or encoding a mitochondrial transit peptide, especially in case in column 6 of Table I, application no. 19, in the same line as of the respective nucleic acid molecule according to 1) “mitochondric” is depicted, which are operable linked; and wherein said nucleic acid molecule according to 1 (a), (b), (c), (d), (e), (f), (g), (h), (i), (j) or (k) encodes a polypeptide which has the activity of the respective polypeptide represented by a protein as depicted in column 5 of Table II application no. 19 and confers a generation or an increase of the respective fine chemical in a non-human organism or a part thereof as compared to a corresponding wild-type non-human organism or part thereof.

[100712] In another embodiment thereof said vector does not comprise beneath said nucleic acid molecule according to 1 (a), (b), (c), (d), (e), (f), (g), (h), (i), (j) or (k), and a promoter, preferably a promoter selected from the group consisting of Big35S, PCUbi, Super and USP, which are operatively linked; a nucleic acid molecule encoding a transit peptide, especially in case in column 6 of Table I, application no. 19, in the same line as of the respective nucleic acid molecule according to 1) “non-targeted” is depicted; and wherein said nucleic acid molecule according to 1 (a), (b), (c), (d), (e), (f), (g), (h), (i), (j) or (k) encodes a polypeptide which has the activity of the respective polypeptide represented by a protein as depicted in column 5 of Table II application no. 19 (in the same line) and confers a generation or an increase of the respective fine chemical in a non-human organism or a part thereof as compared to a corresponding wild-type non-human organism or part thereof.

[100713] In a preferred embodiment of said vector said nucleic acid molecule according to 1 (a), (b), (c), (d), (e), (f), (g), (h), (i), (j) or (k), said promoter and optionally said nucleic acid molecule encoding a transit peptide are encompassed in an expression cassette. Accordingly in an embodiment the invention provides a vector comprising an expression cassette comprising said nucleic acid molecule according to 1 (a), (b), (c), (d), (e), (f), (g), (h), (i), (j) or (k), said promoter and optionally said a nucleic acid molecule encoding a transit peptide, operable linked. Said expression cassette may encompass a terminator, too.

[100714] The invention further provides a vector comprising a nucleic acid molecule comprising 1) a nucleic acid molecule selected from the group consisting of:
[100715] (a) a nucleic acid molecule encoding a polypeptide shown in Table II, column 5 or 8, application no. 19, preferably shown in Table II A, application no. 19, in column 5, or in Table II A, application no. 19, column 8, or in Table II B, application no. 19, column 8, or a homolog or a fragment thereof;
[100716] (b) a nucleic acid molecule shown in Table I, application no. 19, column 5 or 8, preferably shown in Table I A, application no. 19, in column 5, or in Table I A, application no. 19, column 8, or in Table I B, application no. 19, column 8, preferably the coding region thereof, or a homolog or a fragment thereof;
[100717] (c) a nucleic acid molecule, which, as a result of the degeneracy of the genetic code, can be derived from a polypeptide sequence depicted in column 5 or 8 of Table II, application no. 19, preferably shown in Table II A, application no. 19, in column 5, or in Table II A, application no. 19, column 8, or in Table II B, application no. 19, column 8;
[100718] (d) a nucleic acid molecule having at least 30% identity, preferably at least 40%, 50%, 60%, 70%, 75%, 80%, 85%, 90%, 95%, 96%, 97%, 98%, 99%, 99.5%, with the nucleic acid molecule sequence of a polynucleotide comprising the nucleic acid molecule shown in column 5 or 8 of Table I, application no. 19, preferably shown in Table I A, application no. 19, in column 5, or in Table I A, application no. 19, column 8, or in Table I B, application no. 19, column 8, preferably the coding region thereof;
[100719] (e) a nucleic acid molecule encoding a polypeptide having at least 30% identity, preferably at least 40%, 50% 60%, 70%, 75%, 80%, 85%, 90%, 95%, 96%, 97%, 98%, 99%, 99.5%, identity with the amino acid sequence of the polypeptide encoded by the nucleic acid molecule of (a), (b), (c), or (d);
[100720] (f) a nucleic acid molecule which hybridizes with a nucleic acid molecule of (a), (b), (c), (d), or (e) under stringent hybridization conditions;
[100721] (g) a nucleic acid molecule encoding a polypeptide which can be isolated with the aid of monoclonal or polyclonal antibodies made against a polypeptide encoded by one of the nucleic acid molecules of (a), (b), (c), (d), (e) or (f);
[100722] (h) a nucleic acid molecule encoding a polypeptide comprising the consensus sequence or one or more polypeptide motifs as shown in column 8 of Table IV, application no. 19;
[100723] (i) a nucleic acid molecule encoding a polypeptide having the activity represented by a protein as depicted in column 5 of Table II, application no. 19;
[100724] (j) a nucleic acid molecule comprising a polynucleotide which is obtained by amplifying a cDNA library or a genomic library using the primers in Table III, application no. 19, column 8;
[100725] and
[100726] (k) nucleic acid molecule which is obtainable by screening a suitable nucleic acid library, especially a cDNA library and/or a genomic library, under stringent hybridization conditions with a probe comprising one of the sequences of the nucleic acid molecule of (a), (b), (c), (d), (e), (f), (g), (h), (i) or (j) or with a fragment thereof having at least 15 nt, preferably 20 nt, 30 nt, 50 nt, 100 nt, 200 nt, 500 nt, 1000 nt, 1500 nt, 2000 nt or 3000 nt of the nucleic acid molecule complementary to a nucleic acid sequence characterized in (a), (b), (c), (d), (e), (f), (g), (h), (i) or (j);
[100727] or a nucleic acid molecule comprising a sequence which is complementary thereto;
   whereby, preferably, the nucleic acid molecule according to 1 (a), (b), (c), (d), (e), (f), (g), (h), (i), (j) or (k) distinguishes over the sequence depicted in Table I A and/or I B, application no. 19, column 5 or 8, or the coding region thereof, by one or more nucleotides (especially but not exceeding 5%, preferably 4%, 3%, 2%, 1%, 0.5%, 0.2% or 0.1%). In an embodiment, the nucleic acid molecule of the invention does not consist of the sequence shown in Table I A and/or I B, application no. 19, column 5 or 8, or the coding region thereof, respectively. In another embodiment, the nucleic acid molecule of the present invention, preferably the coding region thereof, is 30%, 40%, 50%, 60%, 70%, 80%, 90%, 95% identical but less than 100%, 99.999%, 99.99%, 99.9%, 99%, 98%, 97%, 96% or 95% identical to the sequence shown in Table I A and/or I B, application no. 19, column 5 or 8, or the coding region thereof, respectively. In a further embodiment the nucleic acid molecule does not encode the polypeptide sequence shown in Table II A and/or II B, application no. 19, column 5 or 8 but homologs thereof. Accordingly, in one embodiment, the nucleic acid molecule of the present invention encodes in one embodiment a polypeptide which differs at least in one or more amino acids (especially but not exceeding 5%, preferably 4%, 3%, 2%, 1%, 0.5%, 0.2% or 0.1%) from the polypeptide shown in Table II, application no. 19, column 5 or 8 and does not encode a protein of the sequence shown in Table II A and/or II B, application no. 19, column 5 or 8. Accordingly, in one embodiment, the protein encoded by a sequence of a nucleic acid according to (a), (b), (c), (d), (e), (f), (g), (h), (i), (j) or (k) does not consist of the sequence shown in Table I A and/or I B, application no. 19, column 5 and 8, or the coding region thereof. In a further embodiment, the protein of the present invention is at least 30%,40%, 50%, 60%, 70%, 80%, 90%, 95% identical to protein sequence depicted in Table II A and/or II B, application no. 19, column 5 or 8 but less than 100%, preferably less than 99.999%, 99.99% or 99.9%, more preferably less than 99%, 985, 97%, 96% or 95% identical to the sequence shown in Table II A and/or II B, application no. 19, column 5 or 8.
   (All the references to Tables I to IV are references to the corresponding lines of Tables I to IV.)

[100728] In a preferred embodiment of said vector said nucleic acid molecule according to 1 (a), (b), (c), (d), (e), (f), (g), (h), (i), (j) or (k) encodes a polypeptide which has the activity of the respective polypeptide represented by a protein comprising a polypeptide as depicted in the respective line in column 5 of Table II, application no. 19.

[100729] In another preferred embodiment of said vector said nucleic acid molecule according to 1 (a), (b), (c), (d), (e), (f), (g), (h), (i), (j) or (k) confers a generation or an increase of the respective fine chemical in a non-human organism or a part thereof as compared to a corresponding wildtype non-human organism or part thereof.

[100730] In another preferred embodiment of said vector said nucleic acid molecule according to 1 (a), (b), (c), (d), (e), (f), (g), (h), (i), (j) or (k) encodes a polypeptide which has the activity of the respective polypeptide represented by a protein as depicted in the respective line in column 5 of Table II, application no. 19, and confers a generation or an increase of the respective fine chemical in a non-human organism or a part thereof as compared to a corresponding wild-type non-human organism or part thereof.

[100731] In another embodiment thereof said vector comprises beneath said nucleic acid molecule according to 1 (a), (b), (c), (d), (e), (f), (g), (h), (i), (j) or (k), a promoter, preferably a promoter selected from the group consisting of Big35S, PCUbi, Super and USP, which are operable linked.

[100732] In a preferred embodiment thereof said vector comprises beneath said nucleic acid molecule according to 1 (a), (b), (c), (d), (e), (f), (g), (h), (i), (j) or (k), a promoter, preferably a promoter selected from the group consisting of Big35S, PCUbi, Super and USP, which are operable linked; and said nucleic acid molecule according to 1 (a), (b), (c), (d), (e), (f), (g), (h), (i), (j) or (k) encodes a polypeptide which has the activity of the respective polypeptide represented by a protein comprising a polypeptide as depicted in the respective line in column 5 of Table II, application no. 19.

[100733] In another preferred embodiment thereof said vector comprises beneath said nucleic acid molecule according to 1 (a), (b), (c), (d), (e), (f), (g), (h), (i), (j) or (k), a promoter, preferably a promoter selected from the group consisting of Big35S, PCUbi, Super and USP, which are operable linked; and said nucleic acid molecule according to 1 (a), (b), (c), (d), (e), (f), (g), (h), (i), (j) or (k) confers a generation or an increase of the respective fine chemical in a non-human organism or a part thereof as compared to a corresponding wild-type non-human organism or part thereof.

[100734] In another preferred embodiment thereof said vector comprises beneath said nucleic acid molecule according to 1 (a), (b), (c), (d), (e), (f), (g), (h), (i), (j) or (k), a promoter, preferably a promoter selected from the group consisting of Big35S, PCUbi, Super and USP, which are operable linked; and said nucleic acid molecule according to 1 (a), (b), (c), (d), (e), (f), (g), (h), (i), (j) or (k) encodes a polypeptide which has the activity of the respective polypeptide represented by a protein as depicted in the respective line in column 5 of Table II, application no. 19, and confers a generation or an increase of the respective fine chemical in a non-human organism or a part thereof as compared to a corresponding wild-type non-human organism or part thereof.

[100735] In another embodiment thereof said vector comprises beneath said nucleic acid molecule according to 1 (a), (b), (c), (d), (e), (f), (g), (h), (i), (j) or (k), a nucleic acid molecule encoding a transit peptide, preferably encoding a plastidal transit peptide, especially in case in column 6 of Table I, application no. 19, in the same line as of the respective nucleic acid molecule according to 1) “plastidic” is depicted, or encoding a mitochondrial transit peptide, especially in case in column 6 of Table I, application no. 19, in the same line as of the respective nucleic acid molecule according to 1) “mitochondric” is depicted, which are operable linked.

[100736] In another embodiment thereof said vector does not comprise beneath said nucleic acid molecule according to 1 (a), (b), (c), (d), (e), (f), (g), (h), (i), (j) or (k), a nucleic acid molecule encoding a transit peptide in case in column 6 of Table I, application no. 19, in the same line as of the respective nucleic acid molecule according to 1) “non-targeted” is depicted.

[100737] In another embodiment thereof said vector comprises beneath said nucleic acid molecule according to 1 (a), (b), (c), (d), (e), (f), (g), (h), (i), (j) or (k), and a promoter, preferably a promoter selected from the group consisting of Big35S, PCUbi, Super and USP; a nucleic acid molecule encoding a transit peptide, preferably encoding a plastidal transit peptide, especially in case in column 6 of Table I, application no. 19, in the same line as of the respective nucleic acid molecule according to 1) “plastidic” is depicted, or encoding a mitochondrial transit peptide, especially in case in column 6 of Table I, application no. 19, in the same line as of the respective nucleic acid molecule according to 1) “mitochondric” is depicted, which are operable linked.

[100738] In another embodiment thereof said vector does not comprise beneath said nucleic acid molecule according to 1 (a), (b), (c), (d), (e), (f), (g), (h), (i), (j) or (k), and a promoter, preferably a promoter selected from the group consisting of Big35S, PCUbi, Super and USP, which are operatively linked; a nucleic acid molecule encoding a transit peptide, especially in case in column 6 of Table I, application no. 19, in the same line as of the respective nucleic acid molecule according to 1) “non-targeted” is depicted.

[100739] In another embodiment thereof said vector comprises beneath said nucleic acid molecule according to 1 (a), (b), (c), (d), (e), (f), (g), (h), (i), (j) or (k), and a promoter, preferably a promoter selected from the group consisting of Big35S, PCUbi, Super and USP; a nucleic acid molecule encoding a transit peptide, preferably encoding a plastidal transit peptide, especially in case in column 6 of Table I, application no. 19, in the same line as of the respective nucleic acid molecule according to 1) “plastidic” is depicted, or encoding a mitochondrial transit peptide, especially in case in column 6 of Table I, application no. 19, in the same line as of the respective nucleic acid molecule according to 1) “mitochondric” is depicted, which are operable linked; and wherein said nucleic acid molecule according to 1 (a), (b), (c), (d), (e), (f), (g), (h), (i), (j) or (k) encodes a polypeptide which has the activity of the respective polypeptide represented by a protein comprising a polypeptide as depicted in column 5 of Table II, application no. 19.

[100740] In another embodiment thereof said vector does not comprise beneath said nucleic acid molecule according to 1 (a), (b), (c), (d), (e), (f), (g), (h), (i), (j) or (k), and a promoter, preferably a promoter selected from the group consisting of Big35S, PCUbi, Super and USP, which are operatively linked; a nucleic acid molecule encoding a transit peptide, especially in case in column 6 of Table I, application no. 19, in the same line as of the respective nucleic acid molecule according to 1) “non-targeted” is depicted; and wherein said nucleic acid molecule according to 1 (a), (b), (c), (d), (e), (f), (g), (h), (i), (j) or (k) encodes a polypeptide which has the activity of the respective polypeptide represented by a protein comprising a polypeptide as depicted in column 5 of Table II, application no. 19.

[100741] In another embodiment thereof said vector comprises beneath said nucleic acid molecule according to 1 (a), (b), (c), (d), (e), (f), (g), (h), (i), (j) or (k), and a promoter, preferably a promoter selected from the group consisting of Big35S, PCUbi, Super and USP; a nucleic acid molecule encoding a transit peptide, preferably encoding a plastidal transit peptide, especially in case in column 6 of Table I, application no. 19, in the same line as of the respective nucleic acid molecule according to 1) “plastidic” is depicted, or encoding a mitochondrial transit peptide, especially in case in column 6 of Table I, application no. 19, in the same line as of the respective nucleic acid molecule according to 1) “mitochondric” is depicted, which are operable linked; and wherein said nucleic acid molecule according to 1 (a), (b), (c), (d), (e), (f), (g), (h), (i), (j) or (k) confers a generation or an increase of the respective fine chemical in a non-human organism or a part thereof as compared to a corresponding wild-type non-human organism or part thereof.

[100742] In another embodiment thereof said vector does not comprise beneath said nucleic acid molecule according to 1 (a), (b), (c), (d), (e), (f), (g), (h), (i), (j) or (k), and a promoter, preferably a promoter selected from the group consisting of Big35S, PCUbi, Super and USP, which are operatively linked; a nucleic acid molecule encoding a transit peptide, especially in case in column 6 of Table I, application no. 19, in the same line as of the respective nucleic acid molecule according to 1) “non-targeted” is depicted; and wherein said nucleic acid molecule according to 1 (a), (b), (c), (d), (e), (f), (g), (h), (i), (j) or (k) confers a generation or an increase of the respective fine chemical in a non-human organism or a part thereof as compared to a corresponding wild-type non-human organism or part thereof.

[100743] In another embodiment thereof said vector comprises beneath said nucleic acid molecule according to 1 (a), (b), (c), (d), (e), (f), (g), (h), (i), (j) or (k), and a promoter, preferably a promoter selected from the group consisting of Big35S, PCUbi, Super and USP; a nucleic acid molecule encoding a transit peptide, preferably encoding a plastidal transit peptide, especially in case in column 6 of Table I, application no. 19, in the same line as of the respective nucleic acid molecule according to 1) “plastidic” is depicted, or encoding a mitochondrial transit peptide, especially in case in column 6 of Table I, application no. 19, in the same line as of the respective nucleic acid molecule according to 1) “mitochondric” is depicted, which are operable linked; and wherein said nucleic acid molecule according to 1 (a), (b), (c), (d), (e), (f), (g), (h), (i), (j) or (k) encodes a polypeptide which has the activity of the respective polypeptide represented by a protein as depicted in column 5 of Table II application no. 19 and confers a generation or an increase of the respective fine chemical in a non-human organism or a part thereof as compared to a corresponding wild-type non-human organism or part thereof.

[100744] In another embodiment thereof said vector does not comprise beneath said nucleic acid molecule according to 1 (a), (b), (c), (d), (e), (f), (g), (h), (i), (j) or (k), and a promoter, preferably a promoter selected from the group consisting of Big35S, PCUbi, Super and USP, which are operatively linked; a nucleic acid molecule encoding a transit peptide, especially in case in column 6 of Table I, application no. 19, in the same line as of the respective nucleic acid molecule according to 1) “non-targeted” is depicted; and wherein said nucleic acid molecule according to 1 (a), (b), (c), (d), (e), (f), (g), (h), (i), (j) or (k) encodes a polypeptide which has the activity of the respective polypeptide represented by a protein as depicted in column 5 of Table II application no. 19 and confers a generation or an increase of the respective fine chemical in a non-human organism or a part thereof as compared to a corresponding wild-type non-human organism or part thereof.

[100745] [0181.1.7.19] to [0209.1.7.19] for the disclosure of these paragraphs see [0181.1.7.7] to [0209.1.7.7] above

[100746] The genes of the invention, coding in one embodiment for an activity selected from the group consisting of (DL)-glycerol-3-phosphatase, 2-C-methyl-D-erythritol 4-phosphate cytidylyltransferase, 3-oxoacyl-[acyl-carrier-protein] synthase, 49747384_SOYBEAN-protein, ABC transporter permease protein, acetyl CoA carboxylase, acid phosphatase precursor, acid shock protein, acyl transferase, adenylate kinase, alcohol dehydrogenase, amino-acid acetyltransferase, arginine decarboxylase, argininosuccinate synthetase, aromatic acid decarboxylase, At1g23110-protein, At1g67340-protein, ATP-binding component of a transport system, ATP-dependent RNA helicase, b0050-protein, b0518-protein, b0970-protein, b1003-protein, b1234-protein, b1330-protein, b1522-protein, b1556-protein, b1583-protein, b1670-protein, b1672-protein, b1703-protein, B1795-protein, b1837-protein, b2032-protein, b2099-protein, b2139-protein, b2399-protein, b2474-protein, b2613-protein, b2673-protein, b3083-protein, b3160-protein, b3777-protein, b3791-protein, b3989-protein, b4029-protein, b4050-protein, beta-hydroxylase, biotin synthase, calcium-dependent protein kinase, carbamoyl-phosphate synthase subunit, carbohydrate kinase, cardiolipin synthase, CBL-interacting protein kinase, CDP-diacylglycerol-glycerol-3-phosphate 3-phosphatidyltransferase, cell division control protein, cell division protein, coproporphyrinogen III oxidase, cyclin, cyclin D , dihydrolipoamide dehydrogenase, DnaJ-like chaperone, Elongation factor Tu, enterobacterial common antigen polymerase, ethanolamine utilization protein, eukaryotic translation initiation factor 5, Fe—S subunit of oxidoreductase, FKBP-type peptidyl-prolyl cis-trans isomerase (rotamase), glutamate 5-kinase, glutaredoxin, Glycine cleavage system T aminomethyltransferase, GM02LC17485-protein, heat shock protein Hsp40, heat shock transcription factor, HesB/YadR/YfhF family protein, high-affinity branched-chain amino acid transport protein, hydrolase, imidazole glycerol phosphate synthase subunit, ion-transport protein, lipoprotein precursor, L-serine dehydratase, lysozyme, lysyl-tRNA synthetase, metal-dependent hydrolase, methylglyoxal synthase, methyltransferase, Mg-protoporphyrin IX monomethyl ester oxidative cyclase 66 kD subunit, mitochondrial processing protease, mitogen-activated protein kinase, molecular chaperone portein, monothiol glutaredoxin, murein transglycosylase, NADH dehydrogenase, NADH-quinone oxidoreductase subunit, nitrate/nitrite transport protein, oxidoreductase, phenylacetic acid degradation protein, phosphate import ATP-binding protein, phosphatidylinositol 3- and 4-kinase family protein, phosphoglyceromutase, phosphotransferase, phosphotransferase system component, photosystem I reaction centre subunit, polygalacturonase, precorrin-8X methylmutase, protein phosphatase, purine-nucleoside phosphorylase, putative transport system permease protein, putrescine transport system permease protein, pyruvate kinase, recombinase A, secindependent protein translocase, serine protease, sodium/proton antiporter, ThiF family protein, threonine dehydratase, threonine synthase, threonine/serine transporter, transcription factor, transcriptional regulator, transcriptional regulator protein, trehalose-phosphatase, TTC1386-protein, vacuolar sorting protein, YAL013W-protein, ycr102c-protein, ydr273w-protein, YFL019C-protein, YHR202W-protein, YIL083C-protein, YJL062W-A-protein, YLR099C-protein, ylr326w-protein, YPL162C.protein, and Zm_{—}4842_BE510522-protein are also called “FCRP genes”.

[100747] [0211.1.7.19] to [0225.1.7.19] for the disclosure of these paragraphs see [0211.1.7.7] to [0225.1.7.7] above

[100748] In addition to the sequence mentioned in Table I, application no. 19, column 5 or 8, preferably the coding region thereof, or its homologs or fragments, it may be advantageous additionally to express and/or mutate further genes in the non-human organisms. Especially advantageously, additionally at least one further gene of the biosynthetic pathway of the fine chemical is expressed in the non-human organisms such as plants or microorganisms. It is also possible that the regulation of the natural genes has been modified advantageously so that the gene and/or its gene product is no longer subject to the regulatory mechanisms which exist in the non-human organisms. This leads to an increased synthesis of the respective fine chemical glycerol and/or derivates since, for example, feedback regulations no longer exist to the same extent or not at all. In addition it might be advantageously to combine the nucleic acids sequences of the invention containing the sequences shown in the respective line in Table I, application no. 19, column 5 or 8, preferably the coding region thereof, or homologs or fragments thereof, with genes which generally support or enhance the growth or yield of the target non-human organisms, for example genes which lead to faster growth rate of non human organism like microorganisms or plants or genes which produce stress-, pathogen-, or herbicide-resistant plants.

[100749] In a further embodiment of the process of the invention, non-human organisms are grown, in which there is in addition to the expression of the nucleic acid molecule according to the invention simultaneous expression of at least one nucleic acid molecule or one of the genes which code for proteins involved in the of the glycerol synthesis pathway such as glycerol biosynthesis chain such as hexokinase, glucose-3-P-dehydrogenase, phosphofructokinase, aldolase, glycerol-3-P-dehydrogenase etc.

[100750] [0228.1.7.19] to [0239.1.7.19] for the disclosure of these paragraphs see [0228.1.7.7] to [0239.1.7.7] above

[100751] In an embodiment of the present invention the nucleic acid construct of the present invention comprises a nucleic acid molecule as depicted in the respective line in Table I, application no. 19, column 5 or 8, preferably the coding region thereof, a fragment or a homolog thereof, and a plant promoter, such as the Big 35S promoter, the DC3 promoter, the PC Ubi promoter, the LegB4-promoter, the Super promoter, the USP promoter or the like. In another embodiment the nucleic acid construct of the present invention comprises a nucleic acid molecule as depicted in the respective line in Table I, application no. 19, column 5 or 8, preferably the coding region thereof, a fragment or a homolog thereof, and a plant promoter such as, for example, the USP, the LegB4-, the DC3 promoter or the ubiquitin promoter from parsley or other herein mentioned promoters. In a further embodiment the nucleic acid construct of the present invention comprises a nucleic acid molecule as depicted in the respective line in Table I, application no. 19, column 5 or 8, preferably the coding region thereof, a fragment or a homolog thereof, and a plant promoter, such as the Big 35S promoter, the PC Ubi promoter, the Super promoter, the USP promoter or the like. In addition different terminators may advantageously be used in these nucleic acid constructs; examples for transcriptional termination are polyadenylation signals.

[100752] [0241.1.7.19] to [0245.1.7.19] for the disclosure of these paragraphs see [0241.1.7.7] to [0245.1.7.7] above

[100753] Other preferred sequences for use in operable linkage in gene expression constructs are targeting sequences, which are required for targeting the gene product into specific cell compartments (for a review, see Kermode, Crit. Rev. Plant Sci. 15 (4), 285 (1996) and references cited therein), for example into the vacuole, the nucleus, all types of plastids, such as amyloplasts, chloroplasts, chromoplasts, the extracellular space, the mitochondria, the endoplasmic reticulum, elaioplasts, peroxisomes, glycosomes, and other compartments of cells or extracellular; preferred are sequences, which are involved in targeting to plastids as mentioned above. Sequences, which must be mentioned in this context are, in particular, the signalpeptideor transit-peptide-encoding sequences which are known per se. For example, plastid-transit-peptide-encoding sequences enable the targeting of the expression product into the plastids of a plant cell. Targeting sequences are also known for eukaryotic and to a lower extent for prokaryotic organisms and can advantageously be operable linked with the nucleic acid molecule of the present invention as shown in Table I, application no. 19, columns 5 and 8, preferably the coding region thereof, or homologs or fragments thereof, and described herein to achieve an expression in one of said compartments or extracellular.

[100754] [0247.1.7.19] to [0249.1.7.19] for the disclosure of these paragraphs see [0247.1.7.7] to [0249.1.7.7] above

[100755] Preferred promoters are in particular those which bring about gene expression in tissues and organs, such as leaves, roots, seeds, pollen or xylem. Examples of tissue preferred or organ preferred promoters include, but are not limited to fruit-preferred, ovule-preferred, male tissue-preferred, seed-preferred, pollen-preferred integument-preferred, tuber-preferred, stalk-preferred, pericarp-preferred, leaf-preferred, stigma-preferred, pollen-preferred, anther-preferred, petal-preferred, sepal-preferred, pedicel-preferred, silique-preferred, stem-preferred, root-preferred promoters, and the like. Especially those promoters are preferred which bring about gene expression in tissues and organs in which the biosynthesis of glycerol and/or derivates and/or lipids takes place, like in seed cells, such as endosperm cells and cells of the developing embryo. Seed promoters are preferentially expressed during seed development and/or germination. For example, seed preferred promoters can be embryo-preferred, endosperm preferred and seed coat-preferred (see Thompson et al., BioEssays 10, 108 (1989)). Examples of seed preferred promoters include, but are not limited to, cellulose synthase (celA), Cim1, gamma-zein, globulin-1, maize 19 kD zein (cZ19B1), and the like. Other suitable promoters are the oilseed rape napin gene promoter (U.S. Pat. No. 5,608,152), the Vicia faba USP promoter (Baeumlein et al., Mol Gen Genet, 225 (3), 459 (1991)), the Arabidopsis oleosin promoter (WO 98/45461), the Phaseolus vulgaris phaseolin promoter (U.S. Pat. No. 5,504,200), the Brassica Bce4 promoter (WO 91/13980), the bean arcs promoter, the carrot DcG3 promoter, or the Legumin B4 promoter (LeB4) (Baeumlein et al., Plant Journal, 2 (2), 233 (1992)), and promoters which bring about the seed-specific expression in monocotyledonous plants such as maize, barley, wheat, rye, rice and the like. Advantageous seed-specific promoters are the sucrose binding protein promoter (WO 00/26388), the phaseolin promoter and the napin promoter. Suitable promoters which must be considered are the barley Ipt2 or Ipt1 gene promoter (WO 95/15389 and WO 95/23230), and the promoters described in WO 99/16890 (promoters from the barley hordein gene, the rice glutelin gene, the rice oryzin gene, the rice prolamin gene, the wheat gliadin gene, the wheat glutelin gene, the maize zein gene, the oat glutelin gene, the sorghum kasirin gene and the rye secalin gene). Further suitable promoters are Amy32b, Amy 6-6 and Aleurain (U.S. Pat. No. 5,677,474), Bce4 (oilseed rape) (U.S. Pat. No. 5,530,149), glycinin (soya) (EP 571 741], phosphoenolpyruvate carboxylase (soya) (JP 06/62870), ADR12-2 (soya) (WO 98/08962), isocitrate lyase (oilseed rape) (U.S. Pat. No. 5,689,040]) or α-amylase (barley) (EP 781 8499. Other promoters which are available for the expression of genes in plants are leaf-specific promoters such as those described in DE-A 19 644 478 or light-regulated promoters such as, for example, the pea petE promoter.

[100756] [0251.1.7.19] to [0266.1.7.19] for the disclosure of these paragraphs see [0251.1.7.7] to [0266.1.7.7] above

[100757] An embodiment of the invention relates to a vector where the nucleic acid molecule according to the invention is linked operably to regulatory sequences which permit the expression in a prokaryotic or eukaryotic host. A further embodiment of the invention relates to a vector in which a nucleic acid sequence encoding one of the polypeptides shown in the respective line in Table II, application no. 19, columns 5 or 8, or homologs or fragments thereof, is functionally linked to a targeting sequence such as a plastidial or mitochondrial targeting sequence. A further embodiment of the invention relates to a vector in which a nucleic acid sequence encoding one of the polypeptides shown in the respective line in Table II, application no. 19, columns 5 or 8, or homologs or fragments thereof, is functionally linked to (a) regulatory sequence which permit the expression in an organelle, such as plastids or mitochondria, preferably plastids.

[100758] A further embodiment of the invention relates to a vector which comprises a nucleic acid sequence encoding one of the polypeptides shown in the respective line in Table II, application no. 19, columns 5 or 8, or homologs or fragments thereof, but no additional targeting sequence.

[100759] [0268.1.7.19] to [0273.1.7.19] for the disclosure of these paragraphs see [0268.1.7.7] to [0273.1.7.7] above

[100760] A further object of the invention relates to the use of a nucleic acid construct, e.g. an expression cassette, comprising one or more nucleic acid molecules encoding one or more polypeptides as depicted in the respective line(s) in Table II, application no. 19, columns 5 or 8, or homologs or fragments thereof, or comprising one or more nucleic acid molecules as depicted in the respective line(s) in Table I, application no. 19, columns 5 or 8, preferably the coding region thereof, or homologs or fragments thereof, or comprising a nucleic acid molecule hybridizing therewith for the transformation of a microorganism or a plant cell, plant tissues or a part of a plant

[100761] In doing so, depending on the choice of promoter, the nucleic acid molecules shown in the respective line in Table I, application no. 19, column 5 or 8, preferably the coding region thereof, or homologs or fragments thereof, or the nucleic acid molecules encoding a polypeptide as depicted in the respective line in Table II, application no. 19, column 5 or 8, or homologs or fragments thereof, can be expressed in the whole plant or specifically e.g. in the leaves, in the seeds, the nodules, in roots, in the stem or other parts of the plant. Those transgenic plants overproducing sequences, e.g. as depicted in the respective line in Table I, application no. 19, column 5 or 8, preferably the coding region thereof, or homologs or fragments thereof, the plant cell, plant tissues, plants, the reproductive material thereof, or parts thereof are a further object of the present invention.

[100762] Within the framework of the present invention, the production of the bis-glyceryl phosphate (polar fraction), glycerol (lipid fraction), glycerol (polar fraction), glycerol phosphate (lipid fraction), glycerol-3-phosphate (polar fraction), or triacylglycerol is due to the generation or over-expression of one or more polypeptides as depicted in the respective line(s) in Table II, application no. 19, column 5 or 8, or homologs or fragments thereof, or encoded by the corresponding nucleic acid molecules as depicted in the respective line(s) in Table I, application no. 19, column 5 or 8, preferably the coding region thereof, or homologs or fragments thereof, in the non-human organism according to the invention, advantageously in the transgenic microorganism or plant according to the invention, at least for the duration of at least one plant generation.

[100763] A constitutive expression of the polypeptide as depicted in the respective line in Table II, application no. 19, column 5 or 8, or homologs or fragments thereof, or encoded by the respective nucleic acid molecule as depicted in the respective line in Table I, application no. 19, column 5 or 8, preferably the coding region thereof, or homologs or fragments thereof, may be advantageous. On the other hand, an inducible expression may also appear desirable. Expression of the polypeptide sequences of the invention can be either directed to the cytosol or to the organelles, such as plastids or mitochondria, preferably the plastids of the host cells, preferably the plant cells, or non-targeted.

[100764] for the disclosure of this paragraph see [0278.1.7.7] above

[100765] In a further embodiment the invention relates to a transgenic non-human organisms such as transgenic microorganism or transgenic plant comprising a nucleic acid molecule comprising
[100766] [1) a nucleic acid molecule selected from the group consisting of
   [100767] (a) a nucleic acid molecule encoding a polypeptide shown in Table II, application no. 19, column 5 or 8, preferably shown in Table II A, application no. 19, column 5, or in Table II A, application no. 19, column 8, or in Table II B, application no. 19, column 8, or a homolog or a fragment thereof;
   [100768] (b) a nucleic acid molecule shown in Table I, application no. 19, column 5 or 8, preferably shown in Table I A, application no. 19, column 5, or in Table I A, application no. 19, column 8, or in Table I B, application no. 19, column 8, preferably the coding region thereof, or a homolog or a fragment thereof;
   [100769] (c) a nucleic acid molecule, which, as a result of the degeneracy of the genetic code, can be derived from a polypeptide sequence depicted in column 5 or 8 of Table II, application no. 19, preferably shown in Table II A, application no. 19, column 5, or in Table II A, application no. 19, column 8, or in Table II B, application no. 19, column 8;
   [100770] (d) a nucleic acid molecule having at least 30% identity, preferably at least 40%, 50%, 60%, 70%, 75%, 80%, 85%, 90%, 95%, 96%, 97%, 98%, 99%, 99.5%, with the nucleic acid molecule sequence of a polynucleotide comprising the nucleic acid molecule shown in column 5 or 8 of Table I, application no. 19, preferably shown in Table I A, application no. 19, column 5, or in Table I A, application no. 19, column 8, or in Table I B, application no. 19, column 8, preferably the coding region thereof;
   [100771] (e) a nucleic acid molecule encoding a polypeptide having at least 30% identity, preferably at least 40%, 50% 60%, 70%, 75%, 80%, 85%, 90%, 95%, 96%, 97%, 98%, 99%, 99.5%, identity with the amino acid sequence of the polypeptide encoded by the nucleic acid molecule of (a), (b), (c) or (d);
   [100772] (f) a nucleic acid molecule which hybridizes with a nucleic acid molecule of (a), (b), (c), (d) or (e) under stringent hybridization conditions;
   [100773] (g) a nucleic acid molecule encoding a polypeptide which can be isolated with the aid of monoclonal or polyclonal antibodies made against a polypeptide encoded by one of the nucleic acid molecules of (a), (b), (c), (d), (e) or (f);
   [100774] (h) a nucleic acid molecule encoding a polypeptide comprising the consensus sequence or one or more polypeptide motifs as shown in column 8 of Table IV, application no. 19;
   [100775] (i) a nucleic acid molecule encoding a polypeptide having the activity represented by a respective protein as depicted in column 5 of Table II, application no. 19;
   [100776] (j) a nucleic acid molecule comprising a polynucleotide which is obtained by amplifying a cDNA library or a genomic library using the primers in Table III, application no. 19, column 8;
   [100777] and
   [100778] (k) nucleic acid molecule which is obtainable by screening a suitable nucleic acid library, especially a cDNA library and/or a genomic library, under stringent hybridization conditions with a probe comprising one of the sequences of the nucleic acid molecule of (a), (b), (c), (d), (e), (f), (g), (h), (i) or (j) or with a fragment of at least 15 nt, preferably 20 nt, 30 nt, 50 nt, 100 nt, 200 nt,500 nt, 1000 nt, 1500 nt, 2000 nt or 3000 nt of the nucleic acid molecule characterized in (a), (b), (c), (d), (e), (f), (g), (h), (i) or (j);
   [100779] or a nucleic acid molecule comprising a sequence which is complementary thereto; and, if desired
[100780] 2) nucleic acid molecule encoding a transit peptide, preferably encoding a plastidal transit peptide or a mitochondrial transit peptide;
   which are operable linked;]
   or comprising an expression cassette comprising
[100781] [0) a promoter, preferably a promoter selected from the group consisting of Big35S, PCUbi, Super and USP; and
[100782] 1) a nucleic acid molecule selected from the group consisting of
   [100783] (a) a nucleic acid molecule encoding a polypeptide shown in Table II, application no. 19, column 5 or 8, preferably shown in Table II A, application no. 19, column 5, or in Table II A, application no. 19, column 8, or in Table II B, application no. 19, column 8, or a homolog or a fragment thereof;
   [100784] (b) a nucleic acid molecule shown in Table I, application no. 19, column 5 or 8, preferably shown in Table I A, application no. 19, column 5, or in Table I A, application no. 19, column 8, or in Table I B, application no. 19, column 8, preferably the coding region thereof, or a homolog or a fragment thereof;
   [100785] (c) a nucleic acid molecule, which, as a result of the degeneracy of the genetic code, can be derived from a polypeptide sequence depicted in column 5 or 8 of Table II, application no. 19, preferably shown in Table II A, application no. 19, column 5, or in Table II A, application no. 19, column 8, or in Table II B, application no. 19, column 8;
   [100786] (d) a nucleic acid molecule having at least 30% identity, preferably at least 40%, 50%, 60%, 70%, 75%, 80%, 85%, 90%, 95%, 96%, 97%, 98%, 99%, 99.5%, with the nucleic acid molecule sequence of a polynucleotide comprising the nucleic acid molecule shown in column 5 or 8 of Table I, application no. 19, preferably shown in Table I A, application no. 19, column 5, or in Table I A, application no. 19, column 8, or in Table I B, application no. 19, column 8, preferably the coding region thereof;
   [100787] (e) a nucleic acid molecule encoding a polypeptide having at least 30% identity, preferably at least 40%, 50% 60%, 70%, 75%, 80%, 85%, 90%, 95%, 96%, 97%, 98%, 99%, 99.5%, identity with the amino acid sequence of the polypeptide encoded by the nucleic acid molecule of (a), (b), (c) or (d);
   [100788] (f) a nucleic acid molecule which hybridizes with a nucleic acid molecule of (a), (b), (c), (d) or (e) under stringent hybridization conditions;
   [100789] (g) a nucleic acid molecule encoding a polypeptide which can be isolated with the aid of monoclonal or polyclonal antibodies made against a polypeptide encoded by one of the nucleic acid molecules of (a), (b), (c), (d), (e) or (f);
   [100790] (h) a nucleic acid molecule encoding a polypeptide comprising the consensus sequence or one or more polypeptide motifs as shown in column 8 of Table IV, application no. 19;
   [100791] (i) a nucleic acid molecule encoding a polypeptide having the activity represented by a respective protein as depicted in column 5 of Table II, application no. 19;
   [100792] (j) a nucleic acid molecule comprising a polynucleotide which is obtained by amplifying a cDNA library or a genomic library using the primers in Table III, application no. 19, column 8;
   [100793] and
   [100794] (k) nucleic acid molecule which is obtainable by screening a suitable nucleic acid library, especially a cDNA library and/or a genomic library, under stringent hybridization conditions with a probe comprising one of the sequences of the nucleic acid molecule of (a), (b), (c), (d), (e), (f), (g), (h), (i) or (j) or with a fragment of at least 15 nt, preferably 20 nt, 30 nt, 50 nt, 100 nt, 200 nt,500 nt, 1000 nt, 1500 nt, 2000 nt or 3000 nt of the nucleic acid molecule characterized in (a), (b), (c), (d), (e), (f), (g), (h), (i) or (j);
   [100795] or a nucleic acid molecule comprising a sequence which is complementary thereto;
      and, if desired
[100796] 2) nucleic acid molecule encoding a transit peptide, preferably encoding a plastidal transit peptide or a mitochondrial transit peptide;
   which are operable linked;]
   or comprising or being transformed by a vector comprising
[100797] [1) a nucleic acid molecule selected from the group consisting of
   [100798] (a) a nucleic acid molecule encoding a polypeptide shown in Table II, application no. 19, column 5 or 8, preferably shown in Table II A, application no. 19, column 5, or in Table II A, application no. 19, column 8, or in Table II B, application no. 19, column 8, or a homolog or a fragment thereof;
   [100799] (b) a nucleic acid molecule shown in Table I, application no. 19, column 5 or 8, preferably shown in Table I A, application no. 19, column 5, or in Table I A, application no. 19, column 8, or in Table I B, application no. 19, column 8, preferably the coding region thereof, or a homolog or a fragment thereof;
   [100800] (c) a nucleic acid molecule, which, as a result of the degeneracy of the genetic code, can be derived from a polypeptide sequence depicted in column 5 or 8 of Table II, application no. 19, preferably shown in Table II A, application no. 19, column 5, or in Table II A, application no. 19, column 8, or in Table II B, application no. 19, column 8;
   [100801] (d) a nucleic acid molecule having at least 30% identity, preferably at least 40%, 50%, 60%, 70%, 75%, 80%, 85%, 90%, 95%, 96%, 97%, 98%, 99%, 99.5%, with the nucleic acid molecule sequence of a polynucleotide comprising the nucleic acid molecule shown in column 5 or 8 of Table I, application no. 19, preferably shown in Table I A, application no. 19, column 5, or in Table I A, application no. 19, column 8, or in Table I B, application no. 19, column 8, preferably the coding region thereof;
   [100802] (e) a nucleic acid molecule encoding a polypeptide having at least 30% identity, preferably at least 40%, 50% 60%, 70%, 75%, 80%, 85%, 90%, 95%, 96%, 97%, 98%, 99%, 99.5%, identity with the amino acid sequence of the polypeptide encoded by the nucleic acid molecule of (a), (b), (c) or (d);
   [100803] (f) a nucleic acid molecule which hybridizes with a nucleic acid molecule of (a), (b), (c), (d) or (e) under stringent hybridization conditions;
   [100804] (g) a nucleic acid molecule encoding a polypeptide which can be isolated with the aid of monoclonal or polyclonal antibodies made against a polypeptide encoded by one of the nucleic acid molecules of (a), (b), (c), (d), (e) or (f);
   [100805] (h) a nucleic acid molecule encoding a polypeptide comprising the consensus sequence or one or more polypeptide motifs as shown in column 8 of Table IV, application no. 19;
   [100806] (i) a nucleic acid molecule encoding a polypeptide having the activity represented by a respective protein as depicted in column 5 of Table II, application no. 19;
   [100807] (j) a nucleic acid molecule comprising a polynucleotide which is obtained by amplifying a cDNA library or a genomic library using the primers in Table III, application no. 19, column 8;
   [100808] and
   [100809] (k) nucleic acid molecule which is obtainable by screening a suitable nucleic acid library, especially a cDNA library and/or a genomic library, under stringent hybridization conditions with a probe comprising one of the sequences of the nucleic acid molecule of (a), (b), (c), (d), (e), (f), (g), (h), (i) or (j) or with a fragment of at least 15 nt, preferably 20 nt, 30 nt, 50 nt, 100 nt, 200 nt,500 nt, 1000 nt, 1500 nt, 2000 nt or 3000 nt of the nucleic acid molecule characterized in (a), (b), (c), (d), (e), (f), (g), (h), (i) or (j);
   [100810] or a nucleic acid molecule comprising a sequence which is complementary thereto;]
      as well as respective transgenic cells, tissue, parts of such non-human organism, e.g. plant cells, plant tissue, part of plants, like leaves, roots, stems, blossoms, seeds, fruits, pollen and the like.
      (All the references to Tables I to IV are references to the corresponding lines of Tables I to IV.)

[100811] In a preferred embodiment of said transgenic non-human organism said nucleic acid molecule according to 1 (a), (b), (c), (d), (e), (f), (g), (h), (i), (j) or (k) encodes a polypeptide which has the activity of the respective polypeptide represented by a protein comprising a polypeptide as depicted in the respective line in column 5 of Table II, application no. 19.

[100812] In another preferred embodiment of said transgenic non-human organism said nucleic acid molecule according to 1 (a), (b), (c), (d), (e), (f), (g), (h), (i), (j) or (k) confers a generation or an increase of the respective fine chemical in a non-human organism or a part thereof as compared to a corresponding wild-type non-human organism or part thereof.

[100813] In another preferred embodiment of said transgenic non-human organism said nucleic acid molecule according to 1 (a), (b), (c), (d), (e), (f), (g), (h), (i), (j) or (k) encodes a polypeptide which has the activity of the respective polypeptide represented by a protein as depicted in the respective line in column 5 of Table II application no. 19 and confers a generation or an increase of the respective fine chemical in a non-human organism or a part thereof as compared to a corresponding wild-type non-human organism or part thereof.

[100814] In another embodiment of said transgenic non-human organism the expression cassette comprises 2) a nucleic acid molecule encoding a transit peptide, preferably encoding a plastidal transit peptide, especially in case in column 6 of Table I, application no. 19, in the same line as of the respective nucleic acid molecule according to 1) “plastidic” is depicted, or encoding a mitochondrial transit peptide, especially in case in column 6 of Table I, application no. 19, in the same line as of the respective nucleic acid molecule according to 1) “mitochondric” is depicted.

[100815] In another embodiment of said transgenic non-human organism the expression cassette does not comprise 2) a nucleic acid molecule encoding a transit peptide, especially in case in column 6 of Table I, application no. 19, in the same line as of the respective nucleic acid molecule according to 1) “non-targeted” is depicted.

[100816] In another embodiment of said transgenic non-human organism said vector comprises beneath said nucleic acid molecule according to 1 (a), (b), (c), (d), (e), (f), (g), (h), (i), (j) or (k), a promoter, preferably a promoter selected from the group consisting of Big35S, PCUbi, Super and USP, which are operable linked.

[100817] In a preferred embodiment of said transgenic non-human organism said vector comprises beneath said nucleic acid molecule according to 1 (a), (b), (c), (d), (e), (f), (g), (h), (i), (j) or (k), a promoter, preferably a promoter selected from the group consisting of Big35S, PCUbi, Super and USP, which are operable linked; and said nucleic acid molecule according to 1 (a), (b), (c), (d), (e), (f), (g), (h), (i), (j) or (k) encodes a polypeptide which has the activity of the respective polypeptide represented by a protein comprising a polypeptide as depicted in the respective line in column 5 of Table II, application no. 19.

[100818] In another preferred embodiment of said transgenic non-human organism said vector comprises beneath said nucleic acid molecule according to 1 (a), (b), (c), (d), (e), (f), (g), (h), (i), (j) or (k), a promoter, preferably a promoter selected from the group consisting of Big35S, PCUbi, Super and USP, which are operable linked; and said nucleic acid molecule according to 1 (a), (b), (c), (d), (e), (f), (g), (h), (i), (j) or (k) confers a generation or an increase of the respective fine chemical in a non-human organism or a part thereof as compared to a corresponding wild-type non-human organism or part thereof.

[100819] In another preferred embodiment of said transgenic non-human organism said vector comprises beneath said nucleic acid molecule according to 1 (a), (b), (c), (d), (e), (f), (g), (h), (i), (j) or (k), a promoter, preferably a promoter selected from the group consisting of Big35S, PCUbi, Super and USP, which are operable linked; and said nucleic acid molecule according to 1 (a), (b), (c), (d), (e), (f), (g), (h), (i), (j) or (k) encodes a polypeptide which has the activity of the respective polypeptide represented by a protein as depicted in the respective line in column 5 of Table II, application no. 19, and confers a generation or an increase of the respective fine chemical in a non-human organism or a part thereof as compared to a corresponding wild-type non-human organism or part thereof.

[100820] In another embodiment of said transgenic non-human organism said vector comprises beneath said nucleic acid molecule according to 1 (a), (b), (c), (d), (e), (f), (g), (h), (i), (j) or (k), a nucleic acid molecule encoding a transit peptide, preferably encoding a plastidal transit peptide, especially in case in column 6 of Table I, application no. 19, in the same line as of the respective nucleic acid molecule according to 1) “plastidic” is depicted, or encoding a mitochondrial transit peptide, especially in case in column 6 of Table I, application no. 19, in the same line as of the respective nucleic acid molecule according to 1) “mitochondric” is depicted, which are operable linked.

[100821] In another embodiment of said transgenic non-human organism said vector does not comprise beneath said nucleic acid molecule according to 1 (a), (b), (c), (d), (e), (f), (g), (h), (i), (j) or (k), a nucleic acid molecule encoding a transit peptide in case in column 6 of Table I, application no. 19, in the same line as of the respective nucleic acid molecule according to 1) “non-targeted” is depicted, which are operable linked.

[100822] In another embodiment of said transgenic non-human organism said vector comprises beneath said nucleic acid molecule according to 1 (a), (b), (c), (d), (e), (f), (g), (h), (i), (j) or (k), and a promoter, preferably a promoter selected from the group consisting of Big35S, PCUbi, Super and USP; a nucleic acid molecule encoding a transit peptide, preferably encoding a plastidal transit peptide, especially in case in column 6 of Table I, application no. 19, in the same line as of the respective nucleic acid molecule according to 1) “plastidic” is depicted, or encoding a mitochondrial transit peptide, especially in case in column 6 of Table I, application no. 19, in the same line as of the respective nucleic acid molecule according to 1) “mitochondric” is depicted, which are operable linked.

[100823] In another embodiment of said transgenic non-human organism said vector does not comprise beneath said nucleic acid molecule according to 1 (a), (b), (c), (d), (e), (f), (g), (h), (i), (j) or (k), and a promoter, preferably a promoter selected from the group consisting of Big35S, PCUbi, Super and USP; a nucleic acid molecule encoding a transit peptide, especially in case in column 6 of Table I, application no. 19, in the same line as of the respective nucleic acid molecule according to 1) “non-targeted” is depicted, which are operable linked.

[100824] In another embodiment of said transgenic non-human organism said vector comprises beneath said nucleic acid molecule according to 1 (a), (b), (c), (d), (e), (f), (g), (h), (i), (j) or (k), and a promoter, preferably a promoter selected from the group consisting of Big35S, PCUbi, Super and USP; a nucleic acid molecule encoding a transit peptide, preferably encoding a plastidal transit peptide, especially in case in column 6 of Table I, application no. 19, in the same line as of the respective nucleic acid molecule according to 1) “plastidic” is depicted, or encoding a mitochondrial transit peptide, especially in case in column 6 of Table I, application no. 19, in the same line as of the respective nucleic acid molecule according to 1) “mitochondric” is depicted, which are operable linked; and wherein said nucleic acid molecule according to 1 (a), (b), (c), (d), (e), (f), (g), (h), (i), (j) or (k) encodes a polypeptide which has the activity of the respective polypeptide represented by a protein comprising a polypeptide as depicted in the respective line in column 5 of Table II, application no. 19.

[100825] In another embodiment of said transgenic non-human organism said vector does not comprise beneath said nucleic acid molecule according to 1 (a), (b), (c), (d), (e), (f), (g), (h), (i), (j) or (k), and a promoter, preferably a promoter selected from the group consisting of Big35S, PCUbi, Super and USP; a nucleic acid molecule encoding a transit peptide, especially in case in column 6 of Table I, application no. 19, in the same line as of the respective nucleic acid molecule according to 1) “non-targeted” is depicted, which are operable linked; and wherein said nucleic acid molecule according to 1 (a), (b), (c), (d), (e), (f), (g), (h), (i), (j) or (k) encodes a polypeptide which has the activity of the respective polypeptide represented by a protein comprising a polypeptide as depicted in the respective line in column 5 of Table II, application no. 19.

[100826] In another embodiment of said transgenic non-human organism said vector comprises beneath said nucleic acid molecule according to 1 (a), (b), (c), (d), (e), (f), (g), (h), (i), (j) or (k), and a promoter, preferably a promoter selected from the group consisting of Big35S, PCUbi, Super and USP; a nucleic acid molecule encoding a transit peptide, preferably encoding a plastidal transit peptide, especially in case in column 6 of Table I, application no. 19, in the same line as of the respective nucleic acid molecule according to 1) “plastidic” is depicted, or encoding a mitochondrial transit peptide, especially in case in column 6 of Table I, application no. 19, in the same line as of the respective nucleic acid molecule according to 1) “mitochondric” is depicted, which are operable linked; and wherein said nucleic acid molecule according to 1 (a), (b), (c), (d), (e), (f), (g), (h), (i), (j) or (k) confers a generation or an increase of the respective fine chemical in a non-human organism or a part thereof as compared to a corresponding wild-type non-human organism or part thereof.

[100827] In another embodiment of said transgenic non-human organism said vector does not comprise beneath said nucleic acid molecule according to 1 (a), (b), (c), (d), (e), (f), (g), (h), (i), (j) or (k), and a promoter, preferably a promoter selected from the group consisting of Big35S, PCUbi, Super and USP; a nucleic acid molecule encoding a transit peptide, especially in case in column 6 of Table I, application no. 19, in the same line as of the respective nucleic acid molecule according to 1) “non-targeted” is depicted, which are operable linked; and wherein said nucleic acid molecule according to 1 (a), (b), (c), (d), (e), (f), (g), (h), (i), (j) or (k) confers a generation or an increase of the respective fine chemical in a non-human organism or a part thereof as compared to a corresponding wild-type non-human organism or part thereof.

[100828] In another embodiment of said transgenic non-human organism said vector comprises beneath said nucleic acid molecule according to 1 (a), (b), (c), (d), (e), (f), (g), (h), (i), (j) or (k), and a promoter, preferably a promoter selected from the group consisting of Big35S, PCUbi, Super and USP; a nucleic acid molecule encoding a transit peptide, preferably encoding a plastidal transit peptide, especially in case in column 6 of Table I, application no. 19, in the same line as of the respective nucleic acid molecule according to 1) “plastidic” is depicted, or encoding a mitochondrial transit peptide, especially in case in column 6 of Table I, application no. 19, in the same line as of the respective nucleic acid molecule according to 1) “mitochondric” is depicted, which are operable linked; and wherein said nucleic acid molecule according to 1 (a), (b), (c), (d), (e), (f), (g), (h), (i), (j) or (k) encodes a polypeptide which has the activity of the respective polypeptide represented by a protein as depicted in the respective line in column 5 of Table II application no. 19 and confers a generation or an increase of the respective fine chemical in a non-human organism or a part thereof as compared to a corresponding wild-type non-human organism or part thereof.

[100829] In another embodiment of said transgenic non-human organism said vector does not comprise beneath said nucleic acid molecule according to 1 (a), (b), (c), (d), (e), (f), (g), (h), (i), (j) or (k), and a promoter, preferably a promoter selected from the group consisting of Big35S, PCUbi, Super and USP; a nucleic acid molecule encoding a transit peptide, especially in case in column 6 of Table I, application no. 19, in the same line as of the respective nucleic acid molecule according to 1) “non-targeted” is depicted, which are operable linked; and wherein said nucleic acid molecule according to 1 (a), (b), (c), (d), (e), (f), (g), (h), (i), (j) or (k) encodes a polypeptide which has the activity of the respective polypeptide represented by a protein as depicted in the respective line in column 5 of Table II application no. 19 (in the same line) and confers a generation or an increase of the respective fine chemical in a non-human organism or a part thereof as compared to a corresponding wild-type non-human organism or part thereof.

[100830] In a preferred embodiment of said transgenic non-human organism said nucleic acid molecule according to 1 (a), (b), (c), (d), (e), (f), (g), (h), (i), (j) or (k), said promoter and optionally said nucleic acid molecule encoding a transit peptide are encompassed in an expression cassette in said vector. Accordingly an embodiment the invention provides a non-human organism comprising or being transformed by a vector comprising an expression cassette comprising said nucleic acid molecule according to 1 (a), (b), (c), (d), (e), (f), (g), (h), (i), (j) or (k), said promoter and optionally said a nucleic acid molecule encoding a transit peptide, operable linked. Said expression cassette may encompass a terminator, too.

[100831] In a further embodiment the invention relates to a transgenic non-human organisms such as transgenic microorganism or transgenic plant comprising a nucleic acid molecule comprising
[100832] [1) a nucleic acid molecule selected from the group consisting of
   [100833] (a) a nucleic acid molecule encoding a polypeptide shown in Table II, application no. 19, column 5 or 8, preferably shown in Table II A, application no. 19, column 5, or in Table II A, application no. 19, column 8, or in Table II B, application no. 19, column 8, or a homolog or a fragment thereof;
   [100834] (b) a nucleic acid molecule shown in Table I, application no. 19, column 5 or 8, preferably shown in Table I A, application no. 19, column 5, or in Table I A, application no. 19, column 8, or in Table I B, application no. 19, column 8, preferably the coding region thereof, or a homolog or a fragment thereof;
   [100835] (c) a nucleic acid molecule, which, as a result of the degeneracy of the genetic code, can be derived from a polypeptide sequence depicted in column 5 or 8 of Table II, application no. 19, preferably shown in Table II A, application no. 19, column 5, or in Table II A, application no. 19, column 8, or in Table II B, application no. 19, column 8;
   [100836] (d) a nucleic acid molecule having at least 30% identity, preferably at least 40%, 50%, 60%, 70%, 75%, 80%, 85%, 90%, 95%, 96%, 97%, 98%, 99%, 99.5%, with the nucleic acid molecule sequence of a polynucleotide comprising the nucleic acid molecule shown in column 5 or 8 of Table I, application no. 19, preferably shown in Table I A, application no. 19, column 5, or in Table I A, application no. 19, column 8, or in Table I B, application no. 19, column 8, preferably the coding region thereof;
   [100837] (e) a nucleic acid molecule encoding a polypeptide having at least 30% identity, preferably at least 40%, 50% 60%, 70%, 75%, 80%, 85%, 90%, 95%, 96%, 97%, 98%, 99%, 99.5%, identity with the amino acid sequence of the polypeptide encoded by the nucleic acid molecule of (a), (b), (c) or (d);
   [100838] (f) a nucleic acid molecule which hybridizes with a nucleic acid molecule of (a), (b), (c), (d) or (e) under stringent hybridization conditions;
   [100839] (g) a nucleic acid molecule encoding a polypeptide which can be isolated with the aid of monoclonal or polyclonal antibodies made against a polypeptide encoded by one of the nucleic acid molecules of (a), (b), (c), (d), (e) or (f);
   [100840] (h) a nucleic acid molecule encoding a polypeptide comprising the consensus sequence or one or more polypeptide motifs as shown in column 8 of Table IV, application no. 19;
   [100841] (i) a nucleic acid molecule encoding a polypeptide having the activity represented by a respective protein as depicted in column 5 of Table II, application no. 19;
   [100842] (j) a nucleic acid molecule comprising a polynucleotide which is obtained by amplifying a cDNA library or a genomic library using the primers in Table III, application no. 19, column 8;
   [100843] and
   [100844] (k) nucleic acid molecule which is obtainable by screening a suitable nucleic acid library, especially a cDNA library and/or a genomic library, under stringent hybridization conditions with a probe comprising one of the sequences of the nucleic acid molecule of (a), (b), (c), (d), (e), (f), (g), (h), (i) or (j) or with a fragment of at least 15 nt, preferably 20 nt, 30 nt, 50 nt, 100 nt, 200 nt,500 nt, 1000 nt, 1500 nt, 2000 nt or 3000 nt of the nucleic acid molecule characterized in (a), (b), (c), (d), (e), (f), (g), (h), (i) or (j);
   [100845] or a nucleic acid molecule comprising a sequence which is complementary thereto;
      and, if desired
[100846] 2) nucleic acid molecule encoding a transit peptide, preferably encoding a plastidal transit peptide or a mitochondrial transit peptide;
   which are operable linked;]
   or comprising an expression cassette comprising
[100847] [0) a promoter, preferably a promoter selected from the group consisting of Big35S, PCUbi, Super and USP; and
[100848] 1) a nucleic acid molecule selected from the group consisting of
   [100849] (a) a nucleic acid molecule encoding a polypeptide shown in Table II, application no. 19, column 5 or 8, preferably shown in Table II A, application no. 19, column 5, or in Table II A, application no. 19, column 8, or in Table II B, application no. 19, column 8, or a homolog or a fragment thereof;
   [100850] (b) a nucleic acid molecule shown in Table I, application no. 19, column 5 or 8, preferably shown in Table I A, application no. 19, column 5, or in Table I A, application no. 19, column 8, or in Table I B, application no. 19, column 8, preferably the coding region thereof, or a homolog or a fragment thereof;
   [100851] (c) a nucleic acid molecule, which, as a result of the degeneracy of the genetic code, can be derived from a polypeptide sequence depicted in column 5 or 8 of Table II, application no. 19, preferably shown in Table II A, application no. 19, column 5, or in Table II A, application no. 19, column 8, or in Table II B, application no. 19, column 8;
   [100852] (d) a nucleic acid molecule having at least 30% identity, preferably at least 40%, 50%, 60%, 70%, 75%, 80%, 85%, 90%, 95%, 96%, 97%, 98%, 99%, 99.5%, with the nucleic acid molecule sequence of a polynucleotide comprising the nucleic acid molecule shown in column 5 or 8 of Table I, application no. 19, preferably shown in Table I A, application no. 19, column 5, or in Table I A, application no. 19, column 8, or in Table I B, application no. 19, column 8, preferably the coding region thereof;
   [100853] (e) a nucleic acid molecule encoding a polypeptide having at least 30% identity, preferably at least 40%, 50% 60%, 70%, 75%, 80%, 85%, 90%, 95%, 96%, 97%, 98%, 99%, 99.5%, identity with the amino acid sequence of the polypeptide encoded by the nucleic acid molecule of (a), (b), (c) or (d);
   [100854] (f) a nucleic acid molecule which hybridizes with a nucleic acid molecule of (a), (b), (c), (d) or (e) under stringent hybridization conditions;
   [100855] (g) a nucleic acid molecule encoding a polypeptide which can be isolated with the aid of monoclonal or polyclonal antibodies made against a polypeptide encoded by one of the nucleic acid molecules of (a), (b), (c), (d), (e) or (f);
   [100856] (h) a nucleic acid molecule encoding a polypeptide comprising the consensus sequence or one or more polypeptide motifs as shown in column 8 of Table IV, application no. 19;
   [100857] (i) a nucleic acid molecule encoding a polypeptide having the activity represented by a respective protein as depicted in column 5 of Table II, application no. 19;
   [100858] (j) a nucleic acid molecule comprising a polynucleotide which is obtained by amplifying a cDNA library or a genomic library using the primers in Table III, application no. 19, column 8;
   [100859] and
   [100860] (k) nucleic acid molecule which is obtainable by screening a suitable nucleic acid library, especially a cDNA library and/or a genomic library, under stringent hybridization conditions with a probe comprising one of the sequences of the nucleic acid molecule of (a), (b), (c), (d), (e), (f), (g), (h), (i) or (j) or with a fragment of at least 15 nt, preferably 20 nt, 30 nt, 50 nt, 100 nt, 200 nt,500 nt, 1000 nt, 1500 nt, 2000 nt or 3000 nt of the nucleic acid molecule characterized in (a), (b), (c), (d), (e), (f), (g), (h), (i) or (j);
   [100861] or a nucleic acid molecule comprising a sequence which is complementary thereto;]
      and, if desired
[100862] 2) nucleic acid molecule encoding a transit peptide, preferably encoding a plastidal transit peptide or a mitochondrial transit peptide;
   which are operable linked;]
   or comprising or being transformed by a vector comprising
[100863] [1) a nucleic acid molecule selected from the group consisting of
   [100864] (a) a nucleic acid molecule encoding a polypeptide shown in Table II, application no. 19, column 5 or 8, preferably shown in Table II A, application no. 19, column 5, or in Table II A, application no. 19, column 8, or in Table II B, application no. 19, column 8, or a homolog or a fragment thereof;
   [100865] (b) a nucleic acid molecule shown in Table I, application no. 19, column 5 or 8, preferably shown in Table I A, application no. 19, column 5, or in Table I A, application no. 19, column 8, or in Table I B, application no. 19, column 8, preferably the coding region thereof, or a homolog or a fragment thereof;
   [100866] (c) a nucleic acid molecule, which, as a result of the degeneracy of the genetic code, can be derived from a polypeptide sequence depicted in column 5 or 8 of Table II, application no. 19, preferably shown in Table II A, application no. 19, column 5, or in Table II A, application no. 19, column 8, or in Table II B, application no. 19, column 8;
   [100867] (d) a nucleic acid molecule having at least 30% identity, preferably at least 40%, 50%, 60%, 70%, 75%, 80%, 85%, 90%, 95%, 96%, 97%, 98%, 99%, 99.5%, with the nucleic acid molecule sequence of a polynucleotide comprising the nucleic acid molecule shown in column 5 or 8 of Table I, application no. 19, preferably shown in Table I A, application no. 19, column 5, or in Table I A, application no. 19, column 8, or in Table I B, application no. 19, column 8, preferably the coding region thereof;
   [100868] (e) a nucleic acid molecule encoding a polypeptide having at least 30% identity, preferably at least 40%, 50% 60%, 70%, 75%, 80%, 85%, 90%, 95%, 96%, 97%, 98%, 99%, 99.5%, identity with the amino acid sequence of the polypeptide encoded by the nucleic acid molecule of (a), (b), (c) or (d);
   [100869] (f) a nucleic acid molecule which hybridizes with a nucleic acid molecule of (a), (b), (c), (d) or (e) under stringent hybridization conditions;
   [100870] (g) a nucleic acid molecule encoding a polypeptide which can be isolated with the aid of monoclonal or polyclonal antibodies made against a polypeptide encoded by one of the nucleic acid molecules of (a), (b), (c), (d), (e) or (f);
   [100871] (h) a nucleic acid molecule encoding a polypeptide comprising the consensus sequence or one or more polypeptide motifs as shown in column 8 of Table IV, application no. 19;
   [100872] (i) a nucleic acid molecule encoding a polypeptide having the activity represented by a respective protein as depicted in column 5 of Table II, application no. 19;
   [100873] (k) a nucleic acid molecule comprising a polynucleotide which is obtained by amplifying a cDNA library or a genomic library using the primers in Table III, application no. 19, column 8;
   [100874] and
   [100875] (k) nucleic acid molecule which is obtainable by screening a suitable nucleic acid library, especially a cDNA library and/or a genomic library, under stringent hybridization conditions with a probe comprising one of the sequences of the nucleic acid molecule of (a), (b), (c), (d), (e), (f), (g), (h), (i) or (j) or with a fragment of at least 15 nt, preferably 20 nt, 30 nt, 50 nt, 100 nt, 200 nt,500 nt, 1000 nt, 1500 nt, 2000 nt or 3000 nt of the nucleic acid molecule characterized in (a), (b), (c), (d), (e), (f), (g), (h), (i) or (j);
   [100876] or a nucleic acid molecule comprising a sequence which is complementary thereto;]
      whereby, preferably, the nucleic acid molecule according to 1 (a), (b), (c), (d), (e), (f), (g), (h), (i), (j) or (k) distinguishes over the sequence depicted in Table I A and/or I B, application no. 19, column 5 or 8, or the coding regions thereof, by one or more nucleotides (especially but not exceeding 5%, preferably 4%, 3%, 2%, 1%, 0.5%, 0.2% or 0.1%). In an embodiment, the nucleic acid molecule of the invention does not consist of the sequence shown in Table I A and/or I B, application no. 19, column 5 or 8, or the coding region thereof. In another embodiment, the nucleic acid molecule of the present invention, preferably the coding region thereof, is at least 30%, 40%, 50%, 60%, 70%, 80%, 90%, 95% identical but less than 100%, 99.999%, 99.99%, 99.9%, 99%, 98%, 97%, 96% or 95% identical to the sequence shown in Table I A and/or I B, application no. 19, column 5 or 8, or the coding region thereof, respectively. In a further embodiment the nucleic acid molecule does not encode the polypeptide sequence shown in Table II A and/or II B, application no. 19, column 5 or 8 but homologs thereof. Accordingly, in one embodiment, the nucleic acid molecule of the present invention encodes in one embodiment a polypeptide which differs at least in one or more amino acids (especially but not exceeding 5%, preferably 4%, 3%, 2%, 1%, 0.5%, 0.2% or 0.1%) from the polypeptide shown in Table II, application no. 19, column 5 or 8 and does not encode a protein of the sequence shown in Table II A and/or II B, application no. 19, column 5 or 8. Accordingly, in one embodiment, the protein encoded by a sequence of a nucleic acid according to 1 (a), (b), (c), (d), (e), (f), (g), (h), (i), (j) or (k) does not consist of the sequence shown in Table I A and/or I B, application no. 19, column 5 or 8, or the coding region thereof. In a further embodiment, the protein of the present invention is at least 30%, 40%, 50%, 60%, 70%, 80%, 90%, 95% identical to protein sequence depicted in Table II A and/or II B, application no. 19, column 5 or 8 but less than 100%, preferably less than 99.999%, 99.99%, 99.9%, 99%, 98%, 97%, 96% or 95% identical to the sequence shown in Table II A and/or II B, application no. 19, column 5 or 8;
      as well as respective transgenic cells, tissue, parts of such non-human organism, e.g. plant cells, plant tissue, part of plants, like leaves, roots, stems, blossoms, seeds, fruits, pollen and the like.
      (All the references to Tables I to IV are references to the corresponding lines of Tables I to IV.)

[100877] In a preferred embodiment of said transgenic non-human organism said nucleic acid molecule according to 1 (a), (b), (c), (d), (e), (f), (g), (h), (i), (j) or (k) encodes a polypeptide which has the activity of the respective polypeptide represented by a protein comprising a polypeptide as depicted in the respective line in column 5 of Table II, application no. 19.

[100878] In another preferred embodiment of said transgenic non-human organism said nucleic acid molecule according to 1 (a), (b), (c), (d), (e), (f), (g), (h), (i), (j) or (k) confers a generation or an increase of the respective fine chemical in a non-human organism or a part thereof as compared to a corresponding wild-type non-human organism or part thereof.

[100879] In another preferred embodiment of said transgenic non-human organism said nucleic acid molecule according to 1 (a), (b), (c), (d), (e), (f), (g), (h), (i), (j) or (k) encodes a polypeptide which has the activity of the respective polypeptide represented by a protein as depicted in the respective line in column 5 of Table II application no. 19 and confers a generation or an increase of the respective fine chemical in a non-human organism or a part thereof as compared to a corresponding wild-type non-human organism or part thereof.

[100880] In another embodiment of said transgenic non-human organism the expression cassette comprises 2) a nucleic acid molecule encoding a transit peptide, preferably encoding a plastidal transit peptide, especially in case in column 6 of Table I, application no. 19, in the same line as of the respective nucleic acid molecule according to 1) “plastidic” is depicted, or encoding a mitochondrial transit peptide, especially in case in column 6 of Table I, application no. 19, in the same line as of the respective nucleic acid molecule according to 1) “mitochondric” is depicted.

[100881] In another embodiment thereof the expression cassette does not comprise 2) a nucleic acid molecule encoding a transit peptide, especially in case in column 6 of Table I, application no. 19, in the same line as of the respective nucleic acid molecule according to 1) “non-targeted” is depicted.

[100882] In another embodiment of said transgenic non-human organism said vector comprises beneath said nucleic acid molecule according to 1 (a), (b), (c), (d), (e), (f), (g), (h), (i), (j) or (k), a promoter, preferably a promoter selected from the group consisting of Big35S, PCUbi, Super and USP, which are operable linked.

[100883] In a preferred embodiment of said transgenic non-human organism said vector comprises beneath said nucleic acid molecule according to 1 (a), (b), (c), (d), (e), (f), (g), (h), (i), (j) or (k), a promoter, preferably a promoter selected from the group consisting of Big35S, PCUbi, Super and USP, which are operable linked; and said nucleic acid molecule according to 1 (a), (b), (c), (d), (e), (f), (g), (h), (i), (j) or (k) encodes a polypeptide which has the activity of the respective polypeptide represented by a protein comprising a polypeptide as depicted in the respective line in column 5 of Table II, application no. 19.

[100884] In another preferred embodiment of said transgenic non-human organism said vector comprises beneath said nucleic acid molecule according to 1 (a), (b), (c), (d), (e), (f), (g), (h), (i), (j) or (k), a promoter, preferably a promoter selected from the group consisting of Big35S, PCUbi, Super and USP, which are operable linked; and said nucleic acid molecule according to 1 (a), (b), (c), (d), (e), (f), (g), (h), (i), (j) or (k) confers a generation or an increase of the respective fine chemical in a non-human organism or a part thereof as compared to a corresponding wild-type non-human organism or part thereof.

[100885] In another preferred embodiment of said transgenic non-human organism said vector comprises beneath said nucleic acid molecule according to 1 (a), (b), (c), (d), (e), (f), (g), (h), (i), (j) or (k), a promoter, preferably a promoter selected from the group consisting of Big35S, PCUbi, Super and USP, which are operable linked; and said nucleic acid molecule according to 1 (a), (b), (c), (d), (e), (f), (g), (h), (i), (j) or (k) encodes a polypeptide which has the activity of the respective polypeptide represented by a protein as depicted in the same line in column 5 of Table II, application no. 19, and confers a generation or an increase of the respective fine chemical in a non-human organism or a part thereof as compared to a corresponding wild-type non-human organism or part thereof.

[100886] In another embodiment of said transgenic non-human organism said vector comprises beneath said nucleic acid molecule according to 1 (a), (b), (c), (d), (e), (f), (g), (h), (i), (j) or (k), a nucleic acid molecule encoding a transit peptide, preferably encoding a plastidal transit peptide, especially in case in column 6 of Table I, application no. 19, in the same line as of the respective nucleic acid molecule according to 1) “plastidic” is depicted, or encoding a mitochondrial transit peptide, especially in case in column 6 of Table I, application no. 19, in the same line as of the respective nucleic acid molecule according to 1) “mitochondric” is depicted, which are operable linked.

[100887] In another embodiment of said transgenic non-human organism said vector does not comprise beneath said nucleic acid molecule according to 1 (a), (b), (c), (d), (e), (f), (g), (h), (i), (j) or (k), a nucleic acid molecule encoding a transit peptide in case in column 6 of Table I, application no. 19, in the same line as of the respective nucleic acid molecule according to 1) “non-targeted” is depicted, which are operable linked.

[100888] In another embodiment of said transgenic non-human organism said vector comprises beneath said nucleic acid molecule according to 1 (a), (b), (c), (d), (e), (f), (g), (h), (i), (j) or (k), and a promoter, preferably a promoter selected from the group consisting of Big35S, PCUbi, Super and USP; a nucleic acid molecule encoding a transit peptide, preferably encoding a plastidal transit peptide, especially in case in column 6 of Table I, application no. 19, in the same line as of the respective nucleic acid molecule according to 1) “plastidic” is depicted, or encoding a mitochondrial transit peptide, especially in case in column 6 of Table I, application no. 19, in the same line as of the respective nucleic acid molecule according to 1) “mitochondric” is depicted, which are operable linked.

[100889] In another embodiment of said transgenic non-human organism said vector does not comprise beneath said nucleic acid molecule according to 1 (a), (b), (c), (d), (e), (f), (g), (h), (i), (j) or (k), and a promoter, preferably a promoter selected from the group consisting of Big35S, PCUbi, Super and USP; a nucleic acid molecule encoding a transit peptide, especially in case in column 6 of Table I, application no. 19, in the same line as of the respective nucleic acid molecule according to 1) “non-targeted” is depicted, which are operable linked.

[100890] In another embodiment of said transgenic non-human organism said vector comprises beneath said nucleic acid molecule according to 1 (a), (b), (c), (d), (e), (f), (g), (h), (i), (j) or (k), and a promoter, preferably a promoter selected from the group consisting of Big35S, PCUbi, Super and USP; a nucleic acid molecule encoding a transit peptide, preferably encoding a plastidal transit peptide, especially in case in column 6 of Table I, application no. 19, in the same line as of the respective nucleic acid molecule according to 1) “plastidic” is depicted, or encoding a mitochondrial transit peptide, especially in case in column 6 of Table I, application no. 19, in the same line as of the respective nucleic acid molecule according to 1) “mitochondric” is depicted, which are operable linked; and wherein said nucleic acid molecule according to 1 (a), (b), (c), (d), (e), (f), (g), (h), (i), (j) or (k) encodes a polypeptide which has the activity of the respective polypeptide represented by a protein comprising a polypeptide as depicted in the respective line in column 5 of Table II, application no. 19.

[100891] In another embodiment of said transgenic non-human organism said vector does not comprise beneath said nucleic acid molecule according to 1 (a), (b), (c), (d), (e), (f), (g), (h), (i), (j) or (k), and a promoter, preferably a promoter selected from the group consisting of Big35S, PCUbi, Super and USP; a nucleic acid molecule encoding a transit peptide, especially in case in column 6 of Table I, application no. 19, in the same line as of the respective nucleic acid molecule according to 1) “non-targeted” is depicted, which are operable linked; and wherein said nucleic acid molecule according to 1 (a), (b), (c), (d), (e), (f), (g), (h), (i), (j) or (k) encodes a polypeptide which has the activity of the respective polypeptide represented by a protein comprising a polypeptide as depicted in the respective line in column 5 of Table II, application no. 19.

[100892] In another embodiment of said transgenic non-human organism said vector comprises beneath said nucleic acid molecule according to 1 (a), (b), (c), (d), (e), (f), (g), (h), (i), (j) or (k), and a promoter, preferably a promoter selected from the group consisting of Big35S, PCUbi, Super and USP; a nucleic acid molecule encoding a transit peptide, preferably encoding a plastidal transit peptide, especially in case in column 6 of Table I, application no. 19, in the same line as of the respective nucleic acid molecule according to 1) “plastidic” is depicted, or encoding a mitochondrial transit peptide, especially in case in column 6 of Table I, application no. 19, in the same line as of the respective nucleic acid molecule according to 1) “mitochondric” is depicted, which are operable linked; and wherein said nucleic acid molecule according to 1 (a), (b), (c), (d), (e), (f), (g), (h), (i), (j) or (k) confers a generation or an increase of the respective fine chemical in a non-human organism or a part thereof as compared to a corresponding wild-type non-human organism or part thereof.

[100893] In another embodiment of said transgenic non-human organism said vector does not comprise beneath said nucleic acid molecule according to 1 (a), (b), (c), (d), (e), (f), (g), (h), (i), (j) or (k), and a promoter, preferably a promoter selected from the group consisting of Big35S, PCUbi, Super and USP; a nucleic acid molecule encoding a transit peptide, especially in case in column 6 of Table I, application no. 19, in the same line as of the respective nucleic acid molecule according to 1) “non-targeted” is depicted, which are operable linked; and wherein said nucleic acid molecule according to 1 (a), (b), (c), (d), (e), (f), (g), (h), (i), (j) or (k) confers a generation or an increase of the respective fine chemical in a non-human organism or a part thereof as compared to a corresponding wild-type non-human organism or part thereof.

[100894] In another embodiment of said transgenic non-human organism said vector comprises beneath said nucleic acid molecule according to 1 (a), (b), (c), (d), (e), (f), (g), (h), (i), (j) or (k), and a promoter, preferably a promoter selected from the group consisting of Big35S, PCUbi, Super and USP; a nucleic acid molecule encoding a transit peptide, preferably encoding a plastidal transit peptide, especially in case in column 6 of Table I, application no. 19, in the same line as of the respective nucleic acid molecule according to 1) “plastidic” is depicted, or encoding a mitochondrial transit peptide, especially in case in column 6 of Table I, application no. 19, in the same line as of the respective nucleic acid molecule according to 1) “mitochondric” is depicted, which are operable linked; and wherein said nucleic acid molecule according to 1 (a), (b), (c), (d), (e), (f), (g), (h), (i), (j) or (k) encodes a polypeptide which has the activity of the respective polypeptide represented by a protein as depicted in the respective line in column 5 of Table II application no. 19 and confers a generation or an increase of the respective fine chemical in a non-human organism or a part thereof as compared to a corresponding wild-type non-human organism or part thereof.

[100895] In another embodiment of said transgenic non-human organism said vector does not comprise beneath said nucleic acid molecule according to 1 (a), (b), (c), (d), (e), (f), (g), (h), (i), (j) or (k), and a promoter, preferably a promoter selected from the group consisting of Big35S, PCUbi, Super and USP; a nucleic acid molecule encoding a transit peptide, especially in case in column 6 of Table I, application no. 19, in the same line as of the respective nucleic acid molecule according to 1) “non-targeted” is depicted, which are operable linked; and wherein said nucleic acid molecule according to 1 (a), (b), (c), (d), (e), (f), (g), (h), (i), (j) or (k) encodes a polypeptide which has the activity of the respective polypeptide represented by a protein as depicted in the respective line in column 5 of Table II application no. 19 and confers a generation or an increase of the respective fine chemical in a non-human organism or a part thereof as compared to a corresponding wild-type non-human organism or part thereof.

[100896] In a preferred embodiment of said transgenic non-human organism said nucleic acid molecule according to 1 (a), (b), (c), (d), (e), (f), (g), (h), (i), (j) or (k), said promoter and optionally said nucleic acid molecule encoding a transit peptide are encompassed in an expression cassette in said vector. Accordingly an embodiment the invention provides a non-human organism comprising or being transformed by a vector comprising an expression cassette comprising said nucleic acid molecule according to 1 (a), (b), (c), (d), (e), (f), (g), (h), (i), (j) or (k), said promoter and optionally said a nucleic acid molecule encoding a transit peptide, operable linked. Said expression cassette may encompass a terminator, too.

[100897] [0291.1.7.19] to [0299.1.7.19] for the disclosure of these paragraphs see [0291.1.7.7] to [0299.1.7.7] above

[100898] The term “biological active portion” or “biological activity” means a polypeptide as depicted in the respective line in Table II, application no. 19, column 3 or a portion of said polypeptide which still has at least 10% or 20%, preferably 30%, 40%, 50% or 60%, especially preferably 70%, 75%, 80%, 90% or 95% of the enzymatic or biological activity of the natural or starting enzyme or protein.

[100899] [0301.1.7.19] to [0304.1.7.19] for the disclosure of these paragraphs see [0301.1.7.7] to [0304.1.7.7] above

[100900] Synthetic oligonucleotide primers for the amplification, e.g. as shown in the respective line in Table III, application no. 19, column 8, by means of polymerase chain reaction can be generated on the basis of a sequence shown herein, for example the sequence shown in the respective line in Table I, application no. 19, columns 5 or 8, or the sequences derived from Table II, application no. 19, columns 5 or 8, respectively.

[100901] Moreover, it is possible to identify a conserved region of a protein from various organism by carrying out protein sequence alignments with the polypeptide encoded by the nucleic acid molecules of the present invention, in particular with the sequences encoded by the nucleic acid molecule shown in the respective line in column 5 or 8 of Table I, application no. 19, from which conserved regions, and in turn, degenerate primers can be derived. Conserved regions are those, which show a very little variation in the amino acid in one particular position of several homologs from different origin. The consensus sequence and polypeptide motifs shown in the respective line in column 8 of Table IV, application no. 19, are derived from such alignments of homologous proteins.

[100902] In an embodiment of the present invention, in the method of the present invention the activity of a polypeptide comprising or consisting of a consensus sequence or at least one polypeptide motif shown in the respective line in Table IV, application no. 19, column 8, is increased. In another embodiment thereof, the method of the present invention relates to a polypeptide comprising or consisting of a consensus sequence shown in the respective line in Table IV, application no. 19, column 8 or comprising at least one polypeptide motif shown in the respective line in Table IV, application no. 19, column 8, whereby not more than 20, 15, 10, 9, 8, 7, 6, 5 4, 3, 2 or 1, or 0 of the amino acid positions indicated can be replaced by any amino acid. In another embodiment thereof, the method of the present invention relates to a polypeptide comprising or consisting of a consensus sequence shown in the respective line in Table IV, application no. 19, column 8 or comprising at least one polypeptide motif shown in the respective line in Table IV, application no. 19, column 8, whereby not more than 15%, 10%, 5%, 4%, 3%, 2% or 1%, or 0% of the amino acid positions defined as distinct specific amino acids are/is replaced by another amino acid. In another embodiment thereof, the method of the present invention relates to a polypeptide comprising or consisting of a consensus sequence shown in the respective line in Table IV, application no. 19, column 8 or comprising at least one polypeptide motif shown in the respective line in Table IV, application no. 19, column 8, whereby not more than 20, 15, 10, 9, 8, 7, 6, 5, 4, 3, 2 or 1, or 0 amino acids are inserted into a consensus sequence or polypeptide motif.

[100903] In an embodiment of the present invention, in the method of the present invention the activity of a polypeptide comprising or consisting of a consensus sequence or at least one polypeptide motif shown in the respective line in Table IV, application no. 19, column 8, is increased, whereby said polypeptide distinguishes over the sequence depicted in Table II, application no. 19, columns 5 or 8 by one or more amino acids.

[100904] In one embodiment, said polypeptide of the invention distinguishes over the sequence shown in the respective line in Table II, application no. 19, columns 5 and 8 by more than 5, 6, 7, 8 or 9 amino acids, preferably by more than 10, 15, 20, 25 or 30 amino acids, even more preferred are more than 40, 50, or 60 amino acids and, preferably, the sequence of the polypeptide of the invention distinguishes from the sequence shown in the respective line in Table II B, application no. 19, columns 5 and 8 by not more than 80%, 70%, 60%, 50%, 40%, 30%, 20%, 10%, 5%, 4%, 3%, 2%, 1% or 0.5%. In another embodiment, said polypeptide of the invention does not consist of the sequence shown in Table II, application no. 19, columns 5 or 8.

[100905] [0309.1.7.19] to [0321.1.7.19] for the disclosure of these paragraphs see [0309.1.7.7] to [0321.1.7.7] above

[100906] Polypeptides having above-mentioned activity, i.e. conferring the production or the increased production of the fine chemical bis-glyceryl phosphate (polar fraction), glycerol (lipid fraction), glycerol (polar fraction), glycerol phosphate (lipid fraction), glycerol-3-phosphate (polar fraction), or triacylglycerol as compared to a corresponding, e.g. non-transformed, wild type non-human organism, like a microorganism or a plant cell, plant or part thereof, can be encoded by other DNA sequences which hybridize to the sequences shown in the respective line in Table I, application no. 19, columns 5 and 8, preferably the coding region thereof, at least under relaxed hybridization conditions and which encode the expression of polypeptides conferring the production or the increased production of the respective fine chemical bis-glyceryl phosphate (polar fraction), glycerol (lipid fraction), glycerol (polar fraction), glycerol phosphate (lipid fraction), glycerol-3-phosphate (polar fraction), or triacylglycerol as compared to a corresponding, e.g. non-transformed, wild type non-human organism, like a microorganism or a plant cell, plant or part thereof.

[100907] [0323.1.7.19] to [0329.1.7.19] for the disclosure of these paragraphs see [0323.1.7.7] to [0329.1.7.7] above

[100908] Further, the nucleic acid molecule of the invention comprises a nucleic acid molecule, which is a complement of one of the nucleotide sequences of above-mentioned nucleic acid molecules or a portion thereof. A nucleic acid molecule or its sequence which is complementary to one of the nucleotide molecules or sequences shown in the respective line in Table I, application no. 19, columns 5 or 8, preferably the coding region thereof, homologs or fragments thereof, is one which is sufficiently complementary to one of the nucleotide molecules or sequences shown in the respective line in Table I, application no. 19, columns 5 or 8, preferably the coding region thereof, homologs or fragments thereof, such that it can hybridize to one of the nucleotide sequences shown in Table I, application no. 19, columns 5 or 8, preferably the coding region thereof, homologs or fragments thereof, thereby forming a stable duplex. Preferably, the hybridization is performed under stringent hybridization conditions. However, a complement of one of the herein disclosed sequences is preferably a sequence complement thereto according to the base pairing of nucleic acid molecules well known to the skilled person. For example, the bases A and G undergo base pairing with the bases T and U or C, resp. and visa versa. Modifications of the bases can influence the base-pairing partner.

[100909] The nucleic acid molecule of the invention comprises a nucleotide sequence which is at least about 30%, 35%, 40%, 45%, 50%, 55%, 60%, 65%, 70%, 75%, 80%, 90%, 95%, 96%, 97%, 98%, 99%, 99.5% or more homologous to a nucleotide sequence shown in Table I, application no. 19, columns 5 or 8, preferably the coding region thereof, homologs or fragments thereof, and preferably has above-mentioned activity, in particular conferring the production or the increased production of the fine chemical bis-glyceryl phosphate (polar fraction), glycerol (lipid fraction), glycerol (polar fraction), glycerol phosphate (lipid fraction), glycerol-3-phosphate (polar fraction), or triacylglycerol, respectively, after increasing the activity or an activity of a gene as shown in the respective line in Table I or of a gene product, e.g. as shown in the respective line in Table II, application no. 19, column 5 or 8, by for example in one embodiment expression either in the cytosol or in an organelle such as a plastid or mitochondria or both, preferably in a plastid, or in another embodiment non-targeted or targeted.

[100910] The nucleic acid molecule of the invention comprises a nucleotide sequence or molecule which hybridizes, preferably hybridizes under stringent conditions as defined herein, to one of the nucleic acid molecule shown in the respective line in Table I, preferably Table IB, application no. 19, columns 5 or 8, preferably the coding region thereof, fragments or homologs thereof, and encodes a protein having above-mentioned activity, e.g. conferring the production or the increased production of the respective fine chemical bis-glyceryl phosphate (polar fraction), glycerol (lipid fraction), glycerol (polar fraction), glycerol phosphate (lipid fraction), glycerol-3-phosphate (polar fraction), or triacylglycerol as compared to a corresponding, e.g. non-transformed, wild type non-human organism, like a microorganism or a plant cell, plant or part thereof, by for example in one embodiment expression either in the cytosol or in an organelle such as a plastid or mitochondria or both, preferably in a plastid, or in another embodiment non-targeted or targeted, and optionally, the activity thereof is selected from the group consisting of (DL)-glycerol-3-phosphatase, 2-C-methyl-D-erythritol 4-phosphate cytidylyltransferase, 3oxoacyl-[acyl-carrier-protein] synthase, 49747384_SOYBEAN-protein, ABC transporter permease protein, acetyl CoA carboxylase, acid phosphatase precursor, acid shock protein, acyl transferase, adenylate kinase, alcohol dehydrogenase, amino-acid acetyltransferase, arginine decarboxylase, argininosuccinate synthetase, aromatic acid decarboxylase, At1g23110-protein, At1g67340-protein, ATP-binding component of a transport system, ATP-dependent RNA helicase, b0050-protein, b0518-protein, b0970-protein, b1003-protein, b1234-protein, b1330-protein, b1522-protein, b1556-protein, b1583-protein, b1670-protein, b1672-protein, b1703-protein, B1795-protein, b1837-protein, b2032-protein, b2099-protein, b2139-protein, b2399-protein, b2474-protein, b2613-protein, b2673-protein, b3083-protein, b3160-protein, b3777-protein, b3791-protein, b3989-protein, b4029-protein, b4050-protein, beta-hydroxylase, biotin synthase, calcium-dependent protein kinase, carbamoyl-phosphate synthase subunit, carbohydrate kinase, cardiolipin synthase, CBL-interacting protein kinase, CDP-diacylglycerol-glycerol-3-phosphate 3-phosphatidyltransferase, cell division control protein, cell division protein, coproporphyrinogen III oxidase, cyclin, cyclin D , dihydrolipoamide dehydrogenase, DnaJ-like chaperone, Elongation factor Tu, enterobacterial common antigen polymerase, ethanolamine utilization protein, eukaryotic translation initiation factor 5, Fe—S subunit of oxidoreductase, FKBP-type peptidyl-prolyl cis-trans isomerase (rotamase), glutamate 5-kinase, glutaredoxin, Glycine cleavage system T aminomethyltransferase, GM02LC17485-protein, heat shock protein Hsp40, heat shock transcription factor, HesB/YadR/YfhF family protein, high-affinity branched-chain amino acid transport protein, hydrolase, imidazole glycerol phosphate synthase subunit, ion-transport protein, lipoprotein precursor, L-serine dehydratase, lysozyme, lysyl-tRNA synthetase, metal-dependent hydrolase, methylglyoxal synthase, methyltransferase, Mg-protoporphyrin IX monomethyl ester oxidative cyclase 66 kD subunit, mitochondrial processing protease, mitogen-activated protein kinase, molecular chaperone portein, monothiol glutaredoxin, murein transglycosylase, NADH dehydrogenase, NADH-quinone oxidoreductase subunit, nitrate/nitrite transport protein, oxidoreductase, phenylacetic acid degradation protein, phosphate import ATP-binding protein, phosphatidylinositol 3- and 4-kinase family protein, phosphoglyceromutase, phosphotransferase, phosphotransferase system component, photosystem I reaction centre subunit, polygalacturonase, precorrin-8X methylmutase, protein phosphatase, purine-nucleoside phosphorylase, putative transport system permease protein, putrescine transport system permease protein, pyruvate kinase, recombinase A, sec-independent protein translocase, serine protease, sodium/proton antiporter, ThiF family protein, threonine dehydratase, threonine synthase, threonine/serine transporter, transcription factor, transcriptional regulator, transcriptional regulator protein, trehalose-phosphatase, TTC1386-protein, vacuolar sorting protein, YAL013W-protein, ycr102c-protein, ydr273w-protein, YFL019C-protein, YHR202W-protein, YIL083C-protein, YJL062W-A-protein, YLR099C-protein, ylr326w-protein, YPL162C.protein, and Zm_{—}4842_BE510522-protein, respectively.

[100911] Moreover, the nucleic acid molecule of the invention can comprise only a portion of the coding region of one of the nucleic acid molecules depicted in Table I, application no. 19, columns 5 or 8, for example a fragment which can be used as a probe or primer or a fragment encoding a biologically active portion of the polypeptide of the present invention or of a polypeptide used in the process of the present invention, i.e. having above-mentioned activity, e.g. conferring the production or the increased production of the respective fine chemical bis-glyceryl phosphate (polar fraction), glycerol (lipid fraction), glycerol (polar fraction), glycerol phosphate (lipid fraction), glycerol-3-phosphate (polar fraction), or triacylglycerol as compared to a corresponding, e.g. non-transformed, wild type non-human organism, like a microorganism or a plant cell, plant or part thereof, by for example in one embodiment expression either in the cytosol or in an organelle such as a plastid or mitochondria or both, preferably in a plastid, or in another embodiment non-targeted or targeted. The nucleotide sequences determined from the cloning of the present protein-according-to-the-invention-encoding gene allows for the generation of probes and primers designed for use in identifying and/or cloning its homologues from other cell types and organisms. The probe/primer typically comprises a substantially purified oligonucleotide. The oligonucleotide typically comprises a region of nucleotide sequence that hybridizes under stringent conditions to at least about 12, 15 preferably about 20 or 25, more preferably about 40, 50 or 75 consecutive nucleotides of a sense strand of one of the sequences set forth, e.g., in the respective line in Table I, application no. 19, column 5 or 8, preferably the coding region thereof, or a homolog or a fragment thereof, an anti-sense sequence of one of the sequences, e.g., set forth in the respective line in Table I, application no. 19, columns 5 or 8, preferably the coding region thereof, or a homolog or a fragment thereof or naturally occurring mutants thereof. Primers based on a nucleic acid molecule of invention can be used in PCR reactions to clone homologs of the polypeptide of the invention or of the polypeptide used in the process of the invention, e.g. as the primers described in the examples of the present invention, e.g. as shown in the examples. A PCR with the primers shown in the respective line in Table III, column 8 will result in a fragment of the gene product as shown in Table II, application no. 19, column 5.

[100912] Primer sets are interchangeable. The person skilled in the art knows how to design and combine said primers to result in the desired product, e.g. in a full length clone or a partial sequence. Probes based on the sequences of the nucleic acid molecule of the invention or used in the process of the present invention can be used to detect transcripts or genomic sequences encoding the same or homologous proteins. The probe can further comprise a label group attached thereto, e.g. the label group can be a radioisotope, a fluorescent compound, an enzyme, or an enzyme co-factor. Such probes can be used as a part of a genomic marker test kit for identifying cells which express a polypeptide of the invention or used in the process of the present invention, such as by measuring a level of an encoding nucleic acid molecule in a sample of cells, e.g. detecting mRNA levels or determining, whether a genomic gene comprising the sequence of the polynucleotide of the invention or used in the processes of the present invention has been mutated or deleted.

[100913] As the expression of a respective nucleic acids of the invention is related to the synthesis of the respective fine chemical bis-glyceryl phosphate (polar fraction), glycerol (lipid fraction), glycerol (polar fraction), glycerol phosphate (lipid fraction), glycerol-3-phosphate (polar fraction), or triacylglycerol its function as a probe extends to the detection of microorganisms, plant tissues, plants, plant variets, plant ecotypes or plant genera with varying capability or potential for synthesis of the respective fine chemical bis-glyceryl phosphate (polar fraction), glycerol (lipid fraction), glycerol (polar fraction), glycerol phosphate (lipid fraction), glycerol-3-phosphate (polar fraction), or triacylglycerol. Therefore in one embodiment the present invention relates to a method for analyzing the capability or potential of a plant tissue, a plant, a plant variety or plant ecotype to produce the fine chemical bis-glyceryl phosphate (polar fraction), glycerol (lipid fraction), glycerol (polar fraction), glycerol phosphate (lipid fraction), glycerol-3-phosphate (polar fraction), or triacylglycerol by using the nucleic acid of the invention or parts thereof as a probe to detect the amount of the nucleic acid of the invention in the non-human organism or a part thereof in comparison to another non-human organism.

[100914] The nucleic acid molecule of the invention encodes a polypeptide or portion thereof which includes an amino acid sequence which is sufficiently homologous to the amino acid sequence shown in respective line in Table II, application no. 19, columns 5 or 8 such that the protein or portion thereof maintains the ability to confer the production or the increased production of the respective fine chemical bis-glyceryl phosphate (polar fraction), glycerol (lipid fraction), glycerol (polar fraction), glycerol phosphate (lipid fraction), glycerol-3-phosphate (polar fraction), or triacylglycerol as compared to a corresponding, e.g. non-transformed, wild type non-human organism, like a microorganism or a plant cell, plant or part thereof, in particular increasing the activity as mentioned above or as described in the examples in microorganisms or plants.

[100915] As used herein, the language “sufficiently homologous” refers to proteins or portions thereof which have amino acid sequences which include a minimum number of identical or equivalent amino acids (e.g. an amino acid which has a similar side chain as an amino acid in one of the sequences of the polypeptide of the present invention) to an amino acid sequence shown in the respective line in Table II, application no. 19, columns 5 or 8 such that the protein or portion thereof is able to confer the production or the increased production of the respective fine chemical bis-glyceryl phosphate (polar fraction), glycerol (lipid fraction), glycerol (polar fraction), glycerol phosphate (lipid fraction), glycerol-3-phosphate (polar fraction), or triacylglycerol as compared to a corresponding, e.g. non-transformed, wild type non-human organism, like a microorganism or a plant cell, plant or part thereof. For example having the activity of a protein as shown in the respective line in Table II, application no. 19, column 3 and as described herein.

[100916] In an embodiment of the present invention, the nucleic acid molecule of the present invention comprises a nucleic acid molecule that encodes a portion of the protein of the present invention. The protein is at least about 30%, 35%, 40%, 45% 50%, 55%, 60%, 65%, 70%, 75%, 80%, 85%, 90%, 91%, 92%, 93%, 94%, 95%, 96%, 97%, 98%, 99%, 99.5% or more homologous to an entire amino acid sequence shown in the respective line of Table II, application no. 19, column 5 or 8 and has the above-mentioned activity, e.g. conferring the production or the increased production of the respective fine chemical bis-glyceryl phosphate (polar fraction), glycerol (lipid fraction), glycerol (polar fraction), glycerol phosphate (lipid fraction), glycerol-3-phosphate (polar fraction), or triacylglycerol as compared to a corresponding, e.g. non-transformed, wild type non-human organism, like a microorganism or a plant cell, plant or part thereof by, for example in a embodiment expression either in the cytosol or in an organelle such as a plastid or mitochondria or both, preferably in a plastid, or in another embodiment by targeted or non-targeted expression.

[100917] for the disclosure of this paragraph see [0338.1.7.7] above

[100918] for the disclosure of this paragraph see [0339.1.7.7] above

[100919] The invention further relates to nucleic acid molecules or methods using said nucleic acid molecules that differ from one of the nucleotide sequences shown in the respective line in Table I, application no. 19, columns 5 or 8, preferably the coding region thereof, or fragments or homologs thereof, due to degeneracy of the genetic code but encode a polypeptide of the present invention, in particular a polypeptide having the above-mentioned activity, e.g. as those polypeptides depicted in the respective line in Table II, application no. 19, columns 5 or 8, fragments or homologs thereof. Advantageously, the nucleic acid molecule of the invention comprises, or in an other embodiment has, a nucleotide sequence encoding a protein comprising, or in an other embodiment having, an amino acid sequence shown in the respective line in Table II, application no. 19, columns 5 or 8, fragments or homologs thereof. In a further embodiment, the nucleic acid molecule of the invention encodes a full length protein which is substantially homologous to an amino acid sequence shown in the respective line in Table II, application no. 19, columns 5 or 8, or homologs thereof. However, in an embodiment, the nucleic acid molecule of the present invention does not consist of the sequence shown in the respective line in Table I, preferably Table IA, application no. 19, columns 5 or 8, preferably the coding region thereof, but the functional homologs thereof.

[100920] [0341.1.7.19] to [0343.1.7.19] for the disclosure of these paragraphs see [0341.1.7.7] to [0343.1.7.7] above

[100921] Accordingly, in another embodiment, a nucleic acid molecule of the invention is at least 15, 20, 25 or 30 nucleotides in length. Preferably, it hybridizes under stringent conditions to a nucleic acid molecule comprising a nucleotide sequence of the nucleic acid molecule of the present invention or used in the process of the present invention, e.g. comprising the sequence shown in the respective line in Table I, application no. 19, columns 5 or 8, preferably the coding region thereof. In another embodiment the nucleic acid molecule is preferably at least 20, 30, 50, 100, 250 or more nucleotides in length.

[100922] for the disclosure of this paragraph see [0345.1.7.7] above

[100923] Preferably, a nucleic acid molecule of the invention that hybridizes under stringent conditions to a sequence shown in the respective line in Table I, application no. 19, columns 5 or 8, preferably the coding region thereof, corresponds to a naturally-occurring nucleic acid molecule of the invention. As used herein, a “naturally-occurring” nucleic acid molecule refers to a RNA or DNA molecule having a nucleotide sequence that occurs in nature (e.g. encodes a natural protein). Preferably, the nucleic acid molecule encodes a natural protein having above-mentioned activity, e.g. conferring the production or the increased production of the respective fine chemical bis-glyceryl phosphate (polar fraction), glycerol (lipid fraction), glycerol (polar fraction), glycerol phosphate (lipid fraction), glycerol-3-phosphate (polar fraction), or triacylglycerol as compared to a corresponding, e.g. non-transformed, wild type non-human organism, like a microorganism or a plant cell, plant or part thereof after increasing the expression or activity thereof or the activity of a protein of the invention or used in the process of the invention, in an embodiment for example expression either in the cytosol or in an organelle such as a plastid or mitochondria, preferably in plastids, or, in another embodiment by targeted or non-targeted expression.

[100924] for the disclosure of this paragraph see [0347.1.7.7] above

[100925] For example, nucleotide substitutions leading to amino acid substitutions at “non-essential” amino acid residues can be made in a sequence of the nucleic acid molecule of the invention or used in the process of the invention, e.g. shown in the respective line in Table I, application no. 19, columns 5 or 8, preferably the coding region thereof, or fragments or homologs thereof.

[100926] for the disclosure of this paragraph see [0349.1.7.7] above

[100927] for the disclosure of this paragraph see [0350.1.7.7] above

[100928] Accordingly, the invention relates to nucleic acid molecules encoding a polypeptide having above-mentioned activity, in a non-human organisms or parts thereof by for example expression either in the cytosol or in an organelle such as a plastid or mitochondria or both, preferably in plastids, that contain changes in amino acid residues that are not essential for said activity. Such polypeptides differ in amino acid sequence from a sequence depicted in the respective line in Table II, especially Table IIA, application no. 19, columns 5 or 8, but retain said activity described herein. The nucleic acid molecule can comprise a nucleotide sequence encoding a polypeptide, wherein the polypeptide comprises an amino acid sequence at least about 50% identical to an amino acid sequence shown in the respective line in Table II, application no. 19, columns 5 or 8, and is capable of conferring the production or the increased production of the respective fine chemical bis-glyceryl phosphate (polar fraction), glycerol (lipid fraction), glycerol (polar fraction), glycerol phosphate (lipid fraction), glycerol-3-phosphate (polar fraction), or triacylglycerol as compared to a corresponding, e.g. non-transformed, wild type non-human organism, like a microorganism or a plant cell, plant or part thereof, after increasing its activity for example in an embodiment by expression either in the cytosol or in an organelle such as a plastid or mitochondria or both, preferably in plastids, or, in another embodiment by targeted or non-targeted expression. Preferably, the protein encoded by the nucleic acid molecule is at least about 60%, 70%, 80%, 90%, 95%, 96%, 97%, 98%, 99% or 99.5% identical to the sequence shown in the respective line in Table II, application no. 19, columns 5 or 8.

[100929] [0352.1.7.19] to [0357.1.7.19] for the disclosure of these paragraphs see [0352.1.7.7] to [0357.1.7.7] above

[100930] Functional equivalents of the nucleic acid molecules according to the present invention and/or used in the process according to the present invention represent an embodiment of homologs. Functional equivalents derived from the nucleic acid molecules as shown in the respective line in Table I, application no. 19, columns 5 or 8, preferably the coding region thereof, according to the invention by substitution, insertion or deletion have at least 30%, 35%, 40%, 45%, 50%, 55%, 60%, 65%, 70%, 75%, 80%, 85%, 90%, 91%, 92%, 93%, 94%, 95%, 96%, 97%, 98%, 99% or 99.5% homology with one of the nucleic acid molecules as shown in the respective line in Table I, application no. 19, columns 5 or 8, preferably the coding region thereof, according to the invention and encode polypeptides having essentially the same properties as the polypeptide as shown in the respective line in Table II, application no. 19, columns 5 or 8.

[100931] Functional equivalents derived from one of the polypeptides as shown in the respective line in Table II, application no. 19, columns 5 or 8 according to the invention by substitution, insertion or deletion have at least 30%, 35%, 40%, 45%, 50%, 55%, 60%, 65%, 70%, 75%, 80%, 85%, 90%, 91%, 92%, 93%, 94%, 95%, 96%, 97%, 98%, 99% or 99.5% homology with one of the polypeptides as shown in the respective line in Table II, application no. 19, columns 5 or 8 according to the invention and having essentially the same properties as the polypeptide as shown in the respective line in Table II, application no. 19, columns 5 or 8.

[100932] for the disclosure of this paragraph see [0359.1.7.7] above

[100933] A nucleic acid molecule encoding a homolog to a polypeptide depicted in the respective line in Table II, application no. 19, columns 5 or 8 can be created by introducing one or more nucleotide substitutions, additions or deletions into the nucleic acid molecule of the present invention, in particular of Table I, application no. 19, columns 5 or 8, in the respective line, such that one or more amino acid substitutions, additions or deletions are introduced into the encoded protein. Mutations can be introduced into the nucleic acid molecules as depicted in the respective line in Table I, application no. 19, columns 5 or 8, preferably the coding region thereof, by standard techniques, such as site-directed mutagenesis, PCR-mediated mutagenesis or other methods known to the person skilled in the art.

[100934] [0361.1.7.19] to [0363.1.7.19] for the disclosure of these paragraphs see [0361.1.7.7] to [0363.1.7.7] above

[100935] Homologues of the nucleic acid sequences used, with the sequences shown in the respective line in Table I, application no. 19, columns 5 or 8, preferably the coding region thereof, comprise also allelic variants with at least approximately 30%, 35%, 40%, 45%, 50%, 55%, 60%, 65%, 70%, 75%, 80%, 85%, 90%, 91%, 92%, 93%, 94% 95%. 96%, 97%, 98%, 99%, 99.5% or more % homology with one of the nucleotide sequences shown or the above-mentioned derived nucleic acid sequences or their homologues or derivatives or parts of these. Allelic variants encompass in particular functional variants which can be obtained by deletion, insertion or substitution of nucleotides from the sequences shown in the respective line, preferably in Table I, columns 5 or 8, preferably the coding region thereof, or from the derived nucleic acid sequences, the intention being, however, that the enzymatic activity or the biological activity of the resulting proteins synthesized is advantageously retained or increased.

[100936] In one embodiment of the present invention, the nucleic acid molecule of the invention or used in the process of the invention comprises the sequences shown in the respective line in any of the Table I, application no. 19, columns 5 or 8, preferably the coding region thereof, fragments or homologs thereof. It is preferred that the nucleic acid molecule comprises as little as possible other nucleotides not shown in the respective line in any one of Table I, application no. 19, columns 5 or 8, preferably the coding region thereof, fragments or homologs thereof. In one embodiment, the nucleic acid molecule comprises less than 500, 400, 300, 200, 100, 90, 80, 70, 60, 50 or 40 further nucleotides. In a further embodiment, the nucleic acid molecule comprises less than 30, 20 or 10 further nucleotides. In one embodiment, the nucleic acid molecule used in the process of the invention is identical to the sequences shown in the respective line in Table I, application no. 19, columns 5 or 8, preferably the coding region thereof.

[100937] [0366.1.19.19] Also preferred is that the nucleic acid molecule used in the process of the invention encodes a polypeptide comprising the sequence shown in the respective line in Table II, application no. 19, columns 5 or 8, fragments or homologs thereof. In one embodiment, the nucleic acid molecule encodes less than 150, 130, 100, 80, 60, 50, 40 or 30 further amino acids. In a further embodiment, the encoded polypeptide comprises less than 20, 15, 10, 9, 8, 7, 6 or 5 further amino acids. In one embodiment used in the inventive process, the encoded polypeptide is identical to the sequences shown in the respective line in Table II, application no. 19, columns 5 or 8.

[100938] In one embodiment, the nucleic acid molecule of the invention or used in the process encodes a polypeptide comprising the sequence shown in the respective line in Table II, application no. 19, columns 5 or 8, or fragments or homologs thereof, and comprises less than 100 further nucleotides. In a further embodiment, said nucleic acid molecule comprises less than 30 further nucleotides. In one embodiment, the nucleic acid molecule used in the process is identical to a coding sequence of the sequences shown in the respective line in Table I, application no. 19, columns 5 or 8.

[100939] Polypeptides (=proteins), which still have the essential biological or enzymatic activity of the polypeptide of the present invention conferring the production or the increased production of the respective fine chemical bis-glyceryl phosphate (polar fraction), glycerol (lipid fraction), glycerol (polar fraction), glycerol phosphate (lipid fraction), glycerol-3-phosphate (polar fraction), or triacylglycerol as compared to a corresponding, e.g. non-transformed, wild type non-human organism, like a microorganism or a plant cell, plant or part thereof, i.e. whose activity is essentially not reduced, are polypeptides with at least 10%, 20%, 30%, 40%, 50%, 60%, 70%, 80%, 90%, 95% or more of the wild type biological activity or enzymatic activity, advantageously, the activity is essentially not reduced in comparison with the activity of a polypeptide shown in the respective line in Table II, application no. 19, columns 5 or 8 expressed under identical conditions.

[100940] [0369.1.19.19] Homologues of nucleic acid molecules shown in the respective line in Table I, application no. 19, columns 5 or 8, preferably the coding region thereof, or fragments thereof, or of the derived sequences shown in the respective line in Table II, application no. 19, columns 5 or 8, or fragments thereof, also mean truncated sequences, cDNA, single-stranded DNA or RNA of the coding and noncoding DNA sequence. Homologues of said sequences are also understood as meaning derivatives, which comprise noncoding regions such as, for example, UTRs, introns, terminators, enhancers or promoter variants. The promoters upstream of the nucleotide sequences stated can be modified by one or more nucleotide substitution(s), insertion(s) and/or deletion(s) without, however, interfering with the functionality or activity either of the promoters, the open reading frame (=ORF) or with the 3′-regulatory region such as terminators or other 3′-regulatory regions, which are far away from the ORF. It is furthermore possible that the activity of the promoters is increased by modification of their sequence, or that they are replaced completely by more active promoters, even promoters from heterologous organisms.

[100941] Appropriate promoters are known to the person skilled in the art and are mentioned herein below.

[100942] [0370.1.7.19] to [0379.1.7.19] for the disclosure of these paragraphs see [0370.1.7.7] to [0379.1.7.7] above

[100943] Moreover, a native polypeptide conferring the increase of the respective fine chemical bis-glyceryl phosphate (polar fraction), glycerol (lipid fraction), glycerol (polar fraction), glycerol phosphate (lipid fraction), glycerol-3-phosphate (polar fraction), or triacylglycerol in a non-human organism or a part thereof can be isolated from cells (e.g., endothelial cells), for example using the antibody of the present invention as described below, in particular, an antibody against proteins having (DL)-glycerol-3-phosphatase, 2-C-methyl-D-erythritol 4-phosphate cytidylyltransferase, 3-oxoacyl-[acyl-carrier-protein] synthase, 49747384_SOYBEAN-protein, ABC transporter permease protein, acetyl CoA carboxylase, acid phosphatase precursor, acid shock protein, acyl transferase, adenylate kinase, alcohol dehydrogenase, amino-acid acetyltransferase, arginine decarboxylase, argininosuccinate synthetase, aromatic acid decarboxylase, At1g23110-protein, At1g67340-protein, ATP-binding component of a transport system, ATP-dependent RNA helicase, b0050-protein, b0518-protein, b0970-protein, b1003-protein, b1234-protein, b1330-protein, b1522-protein, b1556-protein, b1583-protein, b1670-protein, b1672-protein, b1703-protein, B1795-protein, b1837-protein, b2032-protein, b2099-protein, b2139-protein, b2399-protein, b2474-protein, b2613-protein, b2673-protein, b3083-protein, b3160-protein, b3777-protein, b3791-protein, b3989-protein, b4029-protein, b4050-protein, beta-hydroxylase, biotin synthase, calcium-dependent protein kinase, carbamoyl-phosphate synthase subunit, carbohydrate kinase, cardiolipin synthase, CBL-interacting protein kinase, CDP-diacylglycerol-glycerol-3-phosphate 3-phosphatidyltransferase, cell division control protein, cell division protein, coproporphyrinogen III oxidase, cyclin, cyclin D , dihydrolipoamide dehydrogenase, DnaJ-like chaperone, Elongation factor Tu, enterobacterial common antigen polymerase, ethanolamine utilization protein, eukaryotic translation initiation factor 5, Fe—S subunit of oxidoreductase, FKBP-type peptidyl-prolyl cis-trans isomerase (rotamase), glutamate 5-kinase, glutaredoxin, Glycine cleavage system T aminomethyltransferase, GM02LC17485-protein, heat shock protein Hsp40, heat shock transcription factor, HesB/YadR/YfhF family protein, high-affinity branched-chain amino acid transport protein, hydrolase, imidazole glycerol phosphate synthase subunit, ion-transport protein, lipoprotein precursor, L-serine dehydratase, lysozyme, lysyl-tRNA synthetase, metal-dependent hydrolase, methylglyoxal synthase, methyltransferase, Mg-protoporphyrin IX monomethyl ester oxidative cyclase 66 kD subunit, mitochondrial processing protease, mitogen-activated protein kinase, molecular chaperone portein, monothiol glutaredoxin, murein transglycosylase, NADH dehydrogenase, NADH-quinone oxidoreductase subunit, nitrate/nitrite transport protein, oxidoreductase, phenylacetic acid degradation protein, phosphate import ATP-binding protein, phosphatidylinositol 3- and 4-kinase family protein, phosphoglyceromutase, phosphotransferase, phosphotransferase system component, photosystem I reaction centre subunit, polygalacturonase, precorrin-8X methylmutase, protein phosphatase, purine-nucleoside phosphorylase, putative transport system permease protein, putrescine transport system permease protein, pyruvate kinase, recombinase A, secindependent protein translocase, serine protease, sodium/proton antiporter, ThiF family protein, threonine dehydratase, threonine synthase, threonine/serine transporter, transcription factor, transcriptional regulator, transcriptional regulator protein, trehalose-phosphatase, TTC1386-protein, vacuolar sorting protein, YAL013W-protein, ycr102c-protein, ydr273w-protein, YFL019C-protein, YHR202W-protein, YIL083C-protein, YJL062W-A-protein, YLR099C-protein, ylr326w-protein, YPL162C.protein, or Zm_{—}4842_BE510522-protein activity, respectively, or an antibody against polypeptides as shown in the respective line in Table II, application no. 19, columns 5 or 8, or fragments or homologs thereof which can be produced by standard techniques utilizing the polypeptid of the present invention or fragment thereof, i.e., the polypeptide of this invention (FCRP). Preferred are monoclonal antibodies.

[100944] for the disclosure of this paragraph see [0381.1.7.7] above

[100945] In one embodiment, the present invention relates to a polypeptide as depicted in the respective line in Table II, especially in Table IIA or especially in Table IIB, application no. 19, columns 5 or 8, or fragment or homolog thereof or as coded by the nucleic acid molecule shown in the respective line in Table I, especially Table IA or especially Table IB, application no. 19, columns 5 or 8, preferably the coding region thereof, or fragment or homolog thereof.

[100946] In an embodiment, the present invention relates to a polypeptide comprising or consisting of a consensus sequence shown in the respective line in Table IV, application no. 19, column 8 or at least one polypeptide motif shown in the respective line in Table IV, application no. 19, column 8.

[100947] In an embodiment thereof, the present invention relates to a polypeptide comprising or consisting of a consensus sequence shown in the respective line in Table IV, application no. 19, column 8 or comprising at least one polypeptide motif shown in the respective line in Table IV, application no. 19, column 8, whereby not more than 20, 15, 10, 9, 8, 7, 6, 5, 4, 3, 2, or 1, or 0 of the amino acids can be replaced by any amino acid.

[100948] In another embodiment thereof, the present invention relates to a polypeptide comprising or consisting of a consensus sequence shown in the respective line in Table IV, application no. 19, column 8 or comprising at least one polypeptide motif shown in the respective line in Table IV, application no. 19, column 8, whereby not more than 15%, 10%, 5%, 4%, 3%, 2% or1% or 0% of the amino acids defined as distinct specific amino acids are/is replaced by another amino acid.

[100949] In another embodiment thereof, the present invention relates to a polypeptide comprising or consisting of a consensus sequence shown in the respective line in Table IV, application no. 19, column 8 or comprising at least one polypeptide motif shown in the respective line in Table IV, application no. 19, column 8, whereby not more than 20, 15, 10, 9, 8, 7, 6, 5, 4, 3, 2, or 1, or 0 amino acids are inserted into the consensus sequence or polypeptide motif.

[100950] In an embodiment of the present invention, the polypeptide of the present invention comprises or consists of a consensus sequence or at least one polypeptide motif shown in the respective line in Table IV, application no. 19, column 8, whereby said polypeptide distinguishes over the sequence depicted in the respective line in Table II, application no. 19, columns 5 or 8 by one or more amino acids. In one embodiment, said polypeptide of the invention distinguishes over the sequence shown in the respective line in Table II, application no. 19, columns 5 and 8 by more than 5, 6, 7, 8 or 9 amino acids, preferably by more than 10, 15, 20, 25 or 30 amino acids, even more preferred are more than 40, 50, or 60 amino acids and, preferably, the sequence of the polypeptide of the invention distinguishes from the sequence shown in the respective line in Table II, application no. 19, columns 5 and 8 by not more than 80%, 70%, 60%, 50%, 40%, 30%, 20%, 10%, 5%, 4%, 3%, 2%, 1% or 0.5%. In another embodiment, said polypeptide of the invention does not consist of the sequence shown in the respective line in Table II, application no. 19, columns 5 and 8.

[100951] In an embodiment, the invention relates to a polypeptide conferring an increase in the respective fine chemical bis-glyceryl phosphate (polar fraction), glycerol (lipid fraction), glycerol (polar fraction), glycerol phosphate (lipid fraction), glycerol-3-phosphate (polar fraction), or triacylglycerol in a non-human organism, especially a microorganism or a plant, or a part thereof, being encoded by the nucleic acid molecule of the invention or used in the process of the invention and having a sequence which distinguishes over the sequence as shown in the respective line in Table II, application no. 19, columns 5 or 8 by one or more amino acids (but not exceeding 5%, preferably 4%, 3%, 2%, 1%, 0.5%, 0.2% or 0.1%). In an embodiment, said polypeptide of the invention does not comprise or consist of the sequence shown in the respective line in Table II, application no. 19, columns 5 or 8. In an embodiment, said polypeptide of the present invention is less than 100%, 99.999%, 99.99%, 99.9% or 99% identical. In one embodiment, said polypeptide which differs at least in one or more amino acids (but not exceeding 5%, preferably 4%, 3%, 2%, 1%, 0.5%, 0.2% or 0.1%) from the polypeptide shown in the respective line in Table II, application no. 19, columns 5 and 8 does not comprise a protein of the sequence shown in the respective line in Table II A and/or II B, application no. 19, columns 5 or 8.

[100952] In an embodiment, the present invention relates to a polypeptide having the activity of the protein as shown in the respective line in Table II, application no. 19, column 3, which distinguishes over the sequence depicted in the respective line in Table II, application no. 19, columns 5 or 8 by one or more amino acids, preferably by more than 5, 6, 7, 8 or 9 amino acids, preferably by more than 10, 15, 20, 25 or 30 amino acids, even more preferred are more than 40, 50, or 60 amino acids and, preferably, the sequence of the polypeptide of the invention distinguishes from the sequence shown in the respective line in Table II, application no. 19, columns 5 and 8 by not more than 80%, 70%, 60%, 50%, 40%, 30%, 20%, 10%, 5%, 4%, 3%, 2%, 1% or 0.5%. In another embodiment the polypeptide of the invention takes the form of a preprotein consisting of a plastidial or mitochondrial transit peptide joint to a polypeptide having the activity of the protein as shown in Table II, column 3, from which the transit peptide is preferably cleaved off upon transport of the preprotein into the organelle for example into the plastid or mitochondrion. In another embodiment the polypeptide of the invention takes not the form of a preprotein.

[100953] for the disclosure of this paragraph see [0390.1.7.7] above

[100954] for the disclosure of this paragraph see [0391.1.7.7] above

[100955] A polypeptide of the invention can participate in the process of the present invention. The polypeptide or a portion thereof comprises preferably an amino acid sequence, which is sufficiently homologous to an amino acid sequence shown in the respective line in Table II A and/or II B, application no. 19, columns 5 or 8.

[100956] Further, the polypeptide can have an amino acid sequence which is encoded by a nucleotide sequence which hybridizes, preferably hybridizes under stringent conditions as described above, to a nucleotide sequence of the nucleic acid molecule of the present invention. Accordingly, the polypeptide has an amino acid sequence which is encoded by a nucleotide sequence that is at least about 35%, 40%, 45%, 50%, 55%, 60%, 65%, 70%, 75%, 80%, 85%, 90%, 91%, 92%, 93%, 94%, 95%, 96%, 97%, 98%, 99%, 99.5% or more homologous to one of the amino acid sequences as shown in the respective line in Table II A and/or II B, application no. 19, columns 5 or 8, or fragments thereof. The preferred polypeptide of the present invention preferably possesses at least one of the activities according to the invention and described herein. A preferred polypeptide of the present invention includes an amino acid sequence encoded by a nucleotide sequence which hybridizes, preferably hybridizes under stringent conditions, to a nucleotide sequence shown in the respective line in Table I A and/or I B, application no. 19, columns 5 or 8, preferably the coding region thereof, or fragments thereto or which is homologous thereto, as defined above

[100957] The polypeptide of the present invention can vary from the sequences shown in the respective line in Table II A and/or II B, application no. 19, columns 5 or 8 in amino acid sequence due to natural variation or mutagenesis, as described in detail herein. Accordingly, the polypeptide comprise an amino acid sequence which is at least about 35%, 40%, 45%, 50%, 55%, 60%, 65%, 70%, 75%, 80%, 85% or 90, 91%, 92%, 93%, 94%, 95%, 96%, 97%, 98%, 99%, 99.5% or more homologous to an entire amino acid sequence shown in the respective line in Table II A and/or II B, application no. 19, columns 5 or 8.

[100958] Biologically active portions of a polypeptide of the present invention include peptides comprising amino acid sequences derived from the amino acid sequence of the polypeptide of the present invention or used in the process of the present invention, e.g., the amino acid sequence shown in the respective line in Table II, application no. 19, columns 5 or 8 or the amino acid sequence of a protein homologous thereto, which include fewer amino acids than a full length polypeptide of the present invention or used in the process of the present invention or the full length protein which is homologous to a polypeptide of the present invention or used in the process of the present invention depicted herein, and exhibit at least one activity of a polypeptide of the present invention or used in the process of the present invention.

[100959] for the disclosure of this paragraph see [0396.1.7.7] above

[100960] Manipulation of the nucleic acid molecule of the invention may result in the production of a protein having differences from the protein as shown in the respective line in Table II, application no. 19, column 5 or 8. Differences shall mean at least one amino acid different from the sequences as shown in the respective line in Table II, application no. 19, column 5 or 8, preferably at least 2, 3, 4, 5, 6, 7, 8, 9 or 10 amino acids (especially but not exceeding 0.1%, preferably 0.2%, 0.5%, 1%, 2%, 3% 4% or 5%), more preferably at least 15, 20, 25, 30, 35, 40, 45 or 50 amino acids (especially but not exceeding 0.5%, preferably 1%, 2%, 3% 4%, 5%, 10% or 25%) different from the sequences as shown in the respective line in Table II, application no. 19, column 5 or 8. These proteins may be improved in efficiency or activity, or may be more stable and therefore present in greater numbers in the cell as compared to the wild-type cell.

[100961] Any mutagenesis strategies for the polypeptide of the present invention or the polypeptide used in the process of the present invention to result in increasing said activity are not meant to be limiting; variations on these strategies will be readily apparent to one skilled in the art. Using such strategies, and incorporating the mechanisms disclosed herein, the nucleic acid molecule and polypeptide of the invention may be utilized to generate algae, ciliates, fungi, other microorganisms like C. glutamicum or plants or parts thereof, expressing proteins as shown in the respective line in Table II, application no. 19, column 5 or 8, or mutated proteins thereof. The nucleic acid molecules and polypeptide molecules of the invention are expressed such that the yield, production, and/or efficiency of production of a desired compound is improved.

[100962] [0399.1.7.19] to [0401.1.7.19] for the disclosure of these paragraphs see [0399.1.7.7] to [0401.1.7.7] above

[100963] In one embodiment, a protein (=polypeptide) as shown in the respective line in Table II, application no. 19, column 5 or 8 refers to a polypeptide having an amino acid sequence corresponding to the polypeptide of the invention, especially to a polypeptide as shown in Table II, application no. 19, columns 5 or 8 or homologs thereof, or used in the process of the invention, whereas a “non- inventive protein or polypeptide” or “other polypeptide” refers to a polypeptide having an amino acid sequence corresponding to a protein which is not substantially homologous to a polypeptide of the invention, preferably which is not substantially homologous to a polypeptide or protein as shown in the respective line in Table II, application no. 19, column 5 or 8 or homologs thereof, e.g., a protein which does not confer the activity described herein and which is derived from the same or a different organism.

[100964] [0403.1.7.19] to [0409.1.7.19] for the disclosure of these paragraphs see [0403.1.7.7] to [0409.1.7.7] above

[100965] As the nucleic acid molecules of the invention and/or the expression thereof is related to the synthesis of the respective fine chemical bis-glyceryl phosphate (polar fraction), glycerol (lipid fraction), glycerol (polar fraction), glycerol phosphate (lipid fraction), glycerol-3-phosphate (polar fraction), or triacylglycerol its function as a probe extends to the detection of microorganisms, plant tissues, plants, plant variets, plant ecotypes or plant genera with varying, advantageously increased, capability or potential for synthesis of the respective fine chemical bis-glyceryl phosphate (polar fraction), glycerol (lipid fraction), glycerol (polar fraction), glycerol phosphate (lipid fraction), glycerol-3-phosphate (polar fraction), or triacylglycerol. Therefore in one embodiment the present invention relates to a method for analyzing the capability or potential of a plant tissue, a plant, a plant variety or ecotype to produce the respective fine chemical bis-glyceryl phosphate (polar fraction), glycerol (lipid fraction), glycerol (polar fraction), glycerol phosphate (lipid fraction), glycerol-3-phosphate (polar fraction), or triacylglycerol by using the respective antibody of the invention as a probe to detect the amount of the polypeptide encoded by said nucleic acid molecule of the invention in a non-human organism in comparison to another organism.

[100966] Therefore in one embodiment the invention relates to a method to probe a non-human organism for its capability for the production of the respective fine chemical comprising the steps of
[100967] a) analyzing the sequence and/or the expression of the respective nucleic acid molecule of the invention in least two non-human organisms which differ in the capability to produce the respective fine chemical;
[100968] b) associate the different sequence and/or expression level of the nucleic acid molecules of the invention with their different capability to produce the respective fine chemical;
[100969] c) analyze the sequence and/or the expression of the nucleic acid molecule of the invention in at least a third non-human organism;
[100970] d) predict the capability of the at least third organism to produce the respective fine chemical based by comparing the sequence and/or expression of the nucleic acid of the invention to the sequences and/or expression levels of the nucleic acid molecule of the invention of the at least two organisms analyzed in step a.

[100971] [0411.1.7.19] to [0430.1.7.19] for the disclosure of these paragraphs see [0411.1.7.7] to [0430.1.7.7] above

[100972] Accordingly the present invention relates to any cell transgenic for any nucleic acid characterized as part of the invention, e.g. conferring the increase of the respective fine chemical bis-glyceryl phosphate (polar fraction), glycerol (lipid fraction), glycerol (polar fraction), glycerol phosphate (lipid fraction), glycerol-3-phosphate (polar fraction), or triacylglycerol in a cell or a non-human organism or a part thereof, e.g. the nucleic acid molecule of the invention, the nucleic acid construct of the invention, the vector of the invention, the expression cassette according to the invention, or a nucleic acid molecule encoding the polypeptide of the invention, e.g. encoding a polypeptide having an activity as the protein as shown in the respective line in Table II, application no. 19, column 3. Due to the above-mentioned activity the respective fine chemical bis-glyceryl phosphate (polar fraction), glycerol (lipid fraction), glycerol (polar fraction), glycerol phosphate (lipid fraction), glycerol-3-phosphate (polar fraction), or triacylglycerol content in a cell or a non-human organism is increased. For example, due to modulation or manipulation, the cellular activity is increased, in a preferred embodiment in organelles such as plastids or mitochondria, e.g. due to an increased expression or specific activity or specific targeting of the subject matters of the invention in a cell or a non-human organism or a part thereof especially in organelles such as plastids or mitochondria, or in another embodiment in the cytosol. Transgenic for a polypeptide having a protein or a protein activity means herein that due to modulation or manipulation of the genome, the activity of protein as shown in the respective line in Table II, application no. 19, column 3 or a protein as shown in the respective line in Table II, application no. 19, column 3-like activity is increased in the cell or non-human organism or part thereof, especially in organelles such as plastids or mitochondria, or especially in the cytosol. Examples are described above in context with the process of the invention.

[100973] for the disclosure of this paragraph see [0432.1.7.7] above

[100974] A naturally occurring expression cassette—for example the naturally occurring combination of the promoter of the gene encoding a protein as shown in the respective line in Table II, application no. 19, column 5 or 8, preferably the coding region thereof, or fragments or homologs thereof with the corresponding encoding gene—becomes a transgenic expression cassette when it is modified by non-natural, synthetic “artificial” methods such as, for example, mutagenesis. Such methods have been described (U.S. Pat. No. 5,565,350; WO 00/15815; also see above).

[100975] for the disclosure of this paragraph see [0434.1.7.7] above

[100976] for the disclosure of this paragraph see [0435.1.7.7] above

[100977] Transgenic plants comprising the respective fine chemical(s) synthesized in the process according to the invention can be marketed directly without isolation of the fine chemical synthesized. In the process according to the invention, plants are understood as meaning all plant parts, plant organs such as leaf, stalk, root, tubers or seeds or propagation material or harvested material or the intact plant. In this context, the seed encompasses all parts of the seed such as the seed coats, epidermal cells, seed cells, endosperm or embryonic tissue. The fine chemical produced in the process according to the invention may, however, also be isolated from the plant. In case of bis-glyceryl phosphate (polar fraction), glycerol (lipid fraction), glycerol (polar fraction), glycerol phosphate (lipid fraction), glycerol-3-phosphate (polar fraction), or triacylglycerol this can be in free form or bound to proteins. Fine chemical(s) produced by this process can be harvested by harvesting the non-human organisms either from the culture in which they grow or from the field. For example, this can be done via squeezing, grinding and/or extraction, salt precipitation and/or ion-exchange chromatography of the plant parts, preferably the plant seeds, plant fruits, plant tubers and the like.

[100978] [0437.1.7.19] to [0447.1.7.19] for the disclosure of theses paragraphs see [0437.1.7.7] to [0447.1.7.7] above

[100979] The identity and purity of the isolated compound(s) can be determined by prior art techniques. These include high performance liquid chromatography (HPLC), spectroscopic methods, mass spectrometry (MS), staining methods, thin-layer chromatography, NIRS, enzyme assay or microbiological assays. These analytical methods are summarized for example in: Patek et al., Appl. Environ. Microbiol. 60, 133 (1994), Malakhova et al., Biotekhnologiya 11, 27 (1996); Schmidt et al., Bioprocess Engineer. 19, 67 (1998), Ullmann's Encyclopedia of Industrial Chemistry (1996) Vol. A27, VCH, Weinheim, pp. 89-90, pp. 521-540, pp. 540-547, pp. 559-566, 575-581 and pp. 581-587, Michal G., “Biochemical Pathways: An Atlas of Biochemistry and Molecular Biology”, John Wiley and Sons (1999); Fallon A. et al. “Applications of HPLC in Biochemistry” in “Laboratory Techniques in Biochemistry and Molecular Biology”, Vol. 17 (1987).

[100980] The fine chemical of the invention can for example be analyzed advantageously via HPLC or GC separation methods and detected by MS or MSMS methods. The unambiguous detection for the presence of the fine chemical containing products can be obtained by analyzing recombinant organisms using analytical standard methods: GC, GC-MS or TLC, as described on several occasions by Christie and the references therein (1997, in: Advances on Lipid Methodology, Fourth Edition: Christie, Oily Press, Dundee, 119-169; 1998, GaschromatographieMassenspektrometrie-Verfahren [Gas chromatography/mass spectrometric methods], Lipide 33:343-353). The material to be analyzed can be disrupted by sonication, grinding in a glass mill, liquid nitrogen and grinding, cooking, or via other applicable methods; see also Biotechnology of Vitamins, Pigments and Growth Factors, Edited by Erik J. Vandamme, London, 1989, p.96 to 103. Glycerolipids can be separated by two-dimensional t.l.c., and the fatty acids are analysed by gas chromatography as described by Douce & Joyar (Methods Enzymol. 69, 290-301, 1980).

[100981] Glycerolipids may further be analized according to vanderest et al.(Plant Physiology, September 2002, Vol. 130, pp. 244-255).

[100982] The fine chemical obtained in the process are suitable as starting material for the synthesis of further products of value.

[100983] Accordingly, the present invention relates a method for the production of a pharmaceuticals, food stuff, animal feeds, nutrients or cosmetics comprising the steps of the process according to the invention, including the isolation of the fine chemical glycerol and/or derivates produced or a composition produced comprising the fine chemical, and, if desired, formulating the product with a pharmaceutical acceptable carrier or formulating the product in a form acceptable for an application in agriculture or formulating the product in a form acceptable for an application as food stuff, animal feed, nutrient or cosmetic. A further embodiment according to the invention is the use of the fine chemical produced in the process or of the transgenic non-human organisms in animal feeds, foodstuffs, medicines, food supplements, cosmetics or pharmaceuticals.

[100984] [0450.1.7.19] to [0452.1.7.19] for the disclosure of these paragraphs see [0450.1.7.7] to [0452.1.7.7] above

[100985] Further in another embodiment, the present invention relates to the use of the nucleic acid molecule of the invention or used in the method of the invention alone or in combination with other genes of the respective fine chemical synthesis for example of the glycerol and/or derivates and/or lipid biosynthesis, the polypeptide of the invention or used in the method of the invention, the nucleic acid construct of the invention, the expression cassette of the invention, the vector of the invention, the plant or plant tissue or the host cell of the invention, for the production of plant resistant to a herbicide inhibiting eventually the production of the fine chemical.

[100986] for the disclosure of this paragraph see [0454.1.7.7] above

[100987] In one embodiment, the present invention relates to a method for the identification of a gene product conferring the production of or an increase in the fine chemical production in a non-human cell, comprising the following steps:
[100988] (a) contacting, e.g. hybridizing, a, some or all nucleic acid molecules of a sample, e.g. cells, tissues, plants or microorganisms or a nucleic acid library, which can contain a candidate gene encoding a gene product conferring the production of or an increase in the fine chemical after expression, with the nucleic acid molecule of the present invention as shown in the respective line in column 5 or 8 of Table I A or B of application no. 19, preferably the coding region thereof, or a fragment or homolog thereof;
[100989] (b) identifying the nucleic acid molecules, which hybridize under relaxed stringent conditions with the nucleic acid molecule of the present invention in particular to the nucleic acid molecule sequence shown in the respective line in Table I, application no. 19, columns 5 or 8, preferably the coding region thereof, of a fragment or a homolog thereof, preferably in Table I B, application no. 19, columns 5 or 8, preferably the coding region thereof, of a fragment or a homolog thereof, and, optionally, isolating the full length cDNA clone or complete genomic clone;
[100990] (c) introducing the candidate nucleic acid molecules or a fragment thereof in host cells, preferably in a plant cell or a microorganism, appropriate for producing the fine chemical;
[100991] (d) expressing the identified nucleic acid molecules in the host cells for which the production of or the increased production of the fine chemical is desired;
[100992] (e) assaying the fine chemical level in the non-human host cells; and
[100993] (f) identifying the nucleic acid molecule and/or its gene product which expression confers the production of or an increase in the fine chemical level in the non-human host cell after expression compared to the wild type.

[100994] for the disclosure of this paragraph see [0456.1.7.7] above

[100995] In another embodiment, the present invention relates to a method for the identification of a gene product conferring the production of or an increase in the fine chemical production in a cell, comprising the following steps:
[100996] (a) identifying a nucleic acid molecule of a non-human organism, which is at least 20%, 25%, 30%, 35%, 40%, 50%, 60%, 70%, 80%, 90%, 95%, 96%, 97%, 98%, 99%, 99.5% or more homolog to the nucleic acid molecule encoding a polypeptide comprising the polypeptide molecule as shown in the respective line in column 5 or 8 of Table II, application no. 19, or comprising a consensus sequence or a polypeptide motif as shown in the respective line in column 8 of Table IV, application no. 19, or being encoded by a nucleic acid molecule comprising a polynucleotide as shown in the respective line in column 5 or 8 of Table I, application no. 19, preferably the coding region thereof, or a homologue thereof as described herein, for example via homology search in a data bank;
[100997] (b) introducing the candidate nucleic acid molecule in non-human host cells, preferably in a plant cell or a microorganism, appropriate for producing the fine chemical;
[100998] (c) expressing the identified nucleic acid molecule in the non-human host cells;
[100999] (d) assaying the fine chemical level in the non-human host cells; and
[101000] (e) identifying the nucleic acid molecule and its gene product which expression confers the production of or an increase in the fine chemical level in the non-human host cell after expression compared to the wild type.

[101001] for the disclosure of this paragraph see [0458.1.7.7] above

[101002] Further, the nucleic acid molecules disclosed herein, in particular the nucleic acid molecules shown in the respective line in column 5 or 8 of Table I A or B of application no. 19, may be sufficiently homologous to the sequences of related species such that these nucleic acid molecules may serve as markers for the construction of a genomic map in related organism or for association mapping. Furthermore natural variation in the genomic regions corresponding to nucleic acids disclosed herein, in particular the nucleic acid molecule shown in the respective line in column 5 or 8 of Table I A or B, of application no. 19 or homologous thereof, may lead to variation in the activity of the proteins disclosed herein, in particular the proteins comprising polypeptides as shown in the respective lines in column 5 or 8 of Table II A or B, of application no. 19 or their homologous, or comprising the consensus sequence or the polypeptide motif as shown in the respective line in column 8 of Table IV, and in consequence in a natural variation of an increased fine chemical production.

[101003] In consequence natural variation eventually also exists in form of more active allelic variants leading already to a relative increase in the fine chemical. Different variants of the nucleic acid molecules disclosed herein, in particular the nucleic acid molecules comprising the nucleic acid molecules as shown in the respective line in column 5 or 8 of Table I A or B of application no. 19, preferably the coding region thereof, which corresponds to different levels of increase in fine chemical, e.g. different levels of increase in fine chemical, can be indentified and used for marker assisted breeding for an enhanced production of the fine chemical.

[101004] Natural variation may also exist in the regulatory regions, e.g. the promoters of the natural genes comprising the nucleic acid molecules as shown in the respective line column 5 or 8 of Table I A or B of application no. 19, preferably the coding region thereof, which can similarly correspond to different levels of increase in the fine chemical, e.g. different levels of increase in the fine chemical can be identified and used for marker assisted breeding for an enhanced production of the fine chemical.

[101005] Accordingly, the present invention relates to a method for breeding plants for the production of the fine chemical, comprising
[101006] (a) selecting a first plant variety with an increased production of the fine chemical, e.g. based on an increased expression of a nucleic acid molecule of the invention as disclosed herein, in particular of a nucleic acid molecule comprising a nucleic acid molecule as shown in the respective line in column 5 or 8 of Table I A or B of application no. 19, preferably the coding region thereof, or fragments or homologs thereof, or a polypeptide comprising a polypeptide as shown in the respective line in column 5 or 8 of Table II A or B of application no. 19, or fragments or homologs thereof, or comprising a consensus sequence or a polypeptide motif as shown in the respective line in column 8 of Table IV, or a homolog thereof, as described herein;
[101007] (b) associating the level of increased production of the fine chemical, with the expression level or the genomic structure of a gene encoding said polypeptide or said nucleic acid molecule;
[101008] (c) crossing the first plant variety with a second plant variety, which significantly differs in its level of fine chemical; and
[101009] (d) identifying, which of the offspring varieties has got increased production of the fine chemical by the expression level of said polypeptide or nucleic acid molecule or the genomic structure of the gene(s) encoding said polypeptide or nucleic acid molecule of the invention.

[101010] [0462.1.7.19] to [0479.1.7.19] for the disclosure of these paragraphs see [0462.1.7.7] to [0479.1.7.7] above

[101011] In a further embodiment the nucleic acid molecule of the invention, the polypeptide of the invention, the nucleic acid construct of the invention, the expression cassette of the invention, the non-human organisms, the non-human host cell, the microorganisms, the plant, plant cell, or the part thereof, of the invention, the vector of the invention, the agonist identified with the method of the invention, the nucleic acid molecule identified with the method of the present invention, can be used for the production of the fine chemical or of the fine chemical and one or more other derivates of glycerol and/or lipids.

[101012] Accordingly, the nucleic acid molecule of the invention, or the nucleic acid molecule identified with the method of the present invention or the complement sequences thereof, the polypeptide of the invention, the nucleic acid construct of the invention, the expression cassette of the invention, the non-human organism, the non-human host cell, the microorganism, the plant, plant cell, or the part thereof of the invention, the vector of the invention, the agonist identified with the method of the invention, the antibody of the present invention, can be used for the production of or the increase in the fine chemical in a non-human organism or part thereof, e.g. in a cell.

[101013] for the disclosure of this paragraph see [0481.1.7.7] above

[101014] for the disclosure of this paragraph see [0482.1.7.7] above

[101015] #

[101016] In a further embodiment the present invention is characterized by the features as disclosed in the following items:

[101017] Item 1. A process for the production of a fine chemical selected from the group consisting of: bis-glyceryl phosphate (polar fraction), glycerol (lipid fraction), glycerol (polar fraction), glycerol phosphate (lipid fraction), glycerol-3-phosphate (polar fraction) and/or triacylglycerol
[101018] (a) increasing or generating one or more activities selected from the group consisting of (DL)-glycerol-3-phosphatase, 2-C-methyl-D-erythritol 4-phosphate cytidylyltransferase, 3-oxoacyl-[acyl-carrier-protein] synthase, 49747384_SOYBEAN-protein, ABC transporter permease protein, acetyl CoA carboxylase, acid phosphatase precursor, acid shock protein, acyl transferase, adenylate kinase, alcohol dehydrogenase, amino-acid acetyltransferase, arginine decarboxylase, argininosuccinate synthetase, aromatic acid decarboxylase, At1g23110-protein, At1g67340-protein, ATP-binding component of a transport system, ATP-dependent RNA helicase, b0050-protein, b0518-protein, b0970-protein, b1003-protein, b1234-protein, b1330-protein, b1522-protein, b1556-protein, b1583-protein, b1670-protein, b1672-protein, b1703-protein, B1795-protein, b1837-protein, b2032-protein, b2099-protein, b2139-protein, b2399-protein, b2474-protein, b2613-protein, b2673-protein, b3083-protein, b3160-protein, b3777-protein, b3791-protein, b3989-protein, b4029-protein, b4050-protein, beta-hydroxylase, biotin synthase, calcium-dependent protein kinase, carbamoylphosphate synthase subunit, carbohydrate kinase, cardiolipin synthase, CBL-interacting protein kinase, CDP-diacylglycerol-glycerol-3-phosphate 3-phosphatidyltransferase, cell division control protein, cell division protein, coproporphyrinogen III oxidase, cyclin, cyclin D , dihydrolipoamide dehydrogenase, DnaJ-like chaperone, Elongation factor Tu, enterobacterial common antigen polymerase, ethanolamine utilization protein, eukaryotic translation initiation factor 5, Fe—S subunit of oxidoreductase, FKBP-type peptidyl-prolyl cis-trans isomerase (rotamase), glutamate 5-kinase, glutaredoxin, Glycine cleavage system T aminomethyltransferase, GM02LC17485-protein, heat shock protein Hsp40, heat shock transcription factor, HesB/YadR/YfhF family protein, high-affinity branched-chain amino acid transport protein, hydrolase, imidazole glycerol phosphate synthase subunit, ion-transport protein, lipoprotein precursor, L-serine dehydratase, lysozyme, lysyl-tRNA synthetase, metal-dependent hydrolase, methylglyoxal synthase, methyltransferase, Mg-protoporphyrin IX monomethyl ester oxidative cyclase 66 kD subunit, mitochondrial processing protease, mitogen-activated protein kinase, molecular chaperone portein, monothiol glutaredoxin, murein transglycosylase, NADH dehydrogenase, NADH-quinone oxidoreductase subunit, nitrate/nitrite transport protein, oxidoreductase, phenylacetic acid degradation protein, phosphate import ATP-binding protein, phosphatidylinositol 3- and 4-kinase family protein, phosphoglyceromutase, phosphotransferase, phosphotransferase system component, photosystem I reaction centre subunit, polygalacturonase, precorrin-8X methylmutase, protein phosphatase, purine-nucleoside phosphorylase, putative transport system permease protein, putrescine transport system permease protein, pyruvate kinase, recombinase A, secindependent protein translocase, serine protease, sodium/proton antiporter, ThiF family protein, threonine dehydratase, threonine synthase, threonine/serine transporter, transcription factor, transcriptional regulator, transcriptional regulator protein, trehalose-phosphatase, TTC1386-protein, vacuolar sorting protein, YAL013W-protein, ycr102c-protein, ydr273w-protein, YFL019C-protein, YHR202W-protein, YIL083C-protein, YJL062W-A-protein, YLR099C-protein, ylr326w-protein, YPL162C.protein, and Zm_{—}4842_BE510522-protein in a non-human organism or a part thereof, preferably a microorganism, a plant cell, a plant or a part thereof, as compared to a corresponding non-transformed wild type non-human organism or a part thereof; and
[101019] (b) growing the non-human organism or a part thereof under conditions which permit the production of bis-glyceryl phosphate (polar fraction), glycerol (lipid fraction), glycerol (polar fraction), glycerol phosphate (lipid fraction), glycerol-3-phosphate (polar fraction), and/or triacylglycerol or a composition comprising bis-glyceryl phosphate (polar fraction), glycerol (lipid fraction), glycerol (polar fraction), glycerol phosphate (lipid fraction), glycerol-3-phosphate (polar fraction), and/or triacylglycerol in said non-human organism or in the culture medium surrounding said non-human organism.

[101020] Item 2. A process for the production of a fine chemical selected from the group consisting of: bis-glyceryl phosphate (polar fraction), glycerol (lipid fraction), glycerol (polar fraction), glycerol phosphate (lipid fraction), glycerol-3-phosphate (polar fraction) and/or triacylglycerol, which comprises
[101021] (A)
   [101022] (i) increasing or generating of the expression of; and/or
   [101023] (ii) increasing or generating the expression of an expression product of; and/or
   [101024] (iii) increasing or generating one or more activities of an expression product encoded by;
   [101025] at least one respective nucleic acid molecule comprising a nucleic acid molecule selected from the group consisting of:
   [101026] (a) a nucleic acid molecule encoding the polypeptide shown in column 5 or 8 of Table II, preferably Table II B, application no.19, or a homolog or a fragment thereof;
   [101027] (b) a nucleic acid molecule shown in column 5 or 8 of Table I, preferably Table I B, application no.19, or a homolog or a fragment thereof (preferably the coding region thereof);
   [101028] (c) a nucleic acid molecule, which, as a result of the degeneracy of the genetic code, can be derived from a polypeptide sequence depicted in column 5 or 8 of Table II, preferably Table II B, application no.19;
   [101029] (d) a nucleic acid molecule having at least 30%, in particular at least 50%, 60%, 70%, 80%, 85%, 90%, 95%, 97%, 98%, 99% or 99.5% identity with the nucleic acid molecule sequence of a polynucleotide comprising the nucleic acid molecule shown in column 5 or 8 of Table I, preferably Table I B, application no. 19, or the coding region thereof;
   [101030] (e) a nucleic acid molecule encoding a polypeptide having at least 30%, in particular 50%, 60%, 70%, 80%, 85%, 90%, 95%, 97%, 98%, 99% or 99.5% identity with the amino acid sequence of the polypeptide encoded by the nucleic acid molecule of (a), (b), (c) or (d);
   [101031] (f) a nucleic acid molecule which hybridizes with a nucleic acid molecule of (a), (b), (c), (d) or (e) under stringent hybridization conditions;
   [101032] (g) a nucleic acid molecule encoding a polypeptide which can be isolated with the aid of monoclonal or polyclonal antibodies made against a polypeptide encoded by one of the nucleic acid molecules of (a), (b), (c), (d), (e) or (f);
   [101033] (h) a nucleic acid molecule encoding a polypeptide comprising the consensus sequence or one or more polypeptide motifs as shown in column 8 of Table IV, application no.19;
   [101034] (i) a nucleic acid molecule encoding a polypeptide having the activity represented by a respective protein as depicted in column 5 of Table II, application no. 19;
   [101035] (j) a nucleic acid molecule which comprises a polynucleotide, which is obtained by amplifying a cDNA library or a genomic library using the primers as depicted in column 8 of Table III, application no. 19; and
   [101036] (k) a nucleic acid molecule which is obtainable by screening a suitable nucleic acid library, especially a cDNA library and/or a genomic library, under stringent hybridization conditions with a probe comprising a complementary sequence of a nucleic acid molecule of (a), (b), (c), (d), (e), (f), (g), (h), (i) or (j) or with a fragment thereof, having at least 15 nt, preferably 20 nt, 30 nt, 50 nt, 100 nt, 200 nt, 500 nt, 1000 nt, 1500 nt, 2000 nt or 3000 nt of a nucleic acid molecule complementary to a nucleic acid molecule sequence characterized in (a), (b), (c), (d), (e), (f), (g), (h), (i) or (j);
   [101037] or a nucleic acid molecule comprising a sequence which is complementary thereto;
      in a non-human organism or a part thereof, preferably a microorganism, a plant cell, a plant or a part thereof, as compared to a corresponding non-transformed wild type non-human organism or a part thereof; and
[101038] (B) growing the non-human organism or a part thereof under conditions which permit the production of bis-glyceryl phosphate (polar fraction), glycerol (lipid fraction), glycerol (polar fraction), glycerol phosphate (lipid fraction), glycerol-3-phosphate (polar fraction) and/or triacylglycerol or a composition comprising bis-glyceryl phosphate (polar fraction), glycerol (lipid fraction), glycerol (polar fraction), glycerol phosphate (lipid fraction), glycerol-3-phosphate (polar fraction) and/or triacylglycerol in said non-human organism or in the culture medium surrounding said non-human organism.

[101039] Item 3. A process of items 1 or 2, comprising of recovering bis-glyceryl phosphate (polar fraction), glycerol (lipid fraction), glycerol (polar fraction), glycerol phosphate (lipid fraction), glycerol-3-phosphate (polar fraction) and/or triacylglycerol in its free or bound form.

[101040] Item 4. The process of any one of items 1 to 3, comprising the following steps:
[101041] (a) selecting a non-human organism or a part thereof expressing a polypeptide encoded by the nucleic acid molecule characterized in item 2;
[101042] (b) mutagenizing the selected non-human organism or the part thereof;
[101043] (c) comparing the activity or the expression level of said polypeptide in the mutagenized non-human organism or the part thereof with the activity or the expression of said polypeptide of the selected non-human organisms or the part thereof;
[101044] (d) selecting the mutated non-human organisms or parts thereof, which comprise an increased activity or expression level of said polypeptide compared to the selected non-human organism or the part thereof;
[101045] (e) optionally, growing and cultivating the non-human organisms or the parts thereof; and
[101046] (f) recovering, and optionally isolating, the free or bound bis-glyceryl phosphate (polar fraction), glycerol (lipid fraction), glycerol (polar fraction), glycerol phosphate (lipid fraction), glycerol-3-phosphate (polar fraction) and/or triacylglycerol produced by the selected mutated non-human organisms or parts thereof.

[101047] Item 5. The process of any one of items 1 to 4 wherein the activity of said protein or the expression of said nucleic acid molecule is increased or generated transiently or stably.

[101048] Item 6. An isolated nucleic acid molecule comprising a nucleic acid molecule selected from the group consisting of:
[101049] (a) a nucleic acid molecule encoding a polypeptide shown in Table II, application no. 19, column 5 or 8, preferably shown in Table II B, application no. 19, column 8, or a homolog or a fragment thereof;
[101050] (b) a nucleic acid molecule shown in Table I, application no. 19, column 5 or 8, preferably shown in Table I B, application no. 19, column 8, preferably the coding region thereof, or a homolog or a fragment thereof;
[101051] (c) a nucleic acid molecule, which, as a result of the degeneracy of the genetic code, can be derived from a polypeptide sequence depicted in column 5 or 8 of Table II, application no. 19, preferably in column 8 of Table II B, application no. 19;
[101052] (d) a nucleic acid molecule having at least 30% identity, preferably at least 40%, 50%, 60%, 70%, 75%, 80%, 85%, 90%, 95%, 96%, 97%, 98%, 99%, 99.5%, with the nucleic acid molecule sequence of a polynucleotide comprising the nucleic acid molecule shown in column 5 or 8 of Table I, application no. 19, preferably shown in column 8 of Table I B, application no. 19, preferably the coding region thereof;
[101053] (e) a nucleic acid molecule encoding a polypeptide having at least 30% identity, preferably at least 40%, 50% 60%, 70%, 75%, 80%, 85%, 90%, 95%, 96%, 97%, 98%, 99%, 99.5%, identity with the amino acid sequence of the polypeptide encoded by the nucleic acid molecule of (a), (b), (c) or (d);
[101054] (f) a nucleic acid molecule which hybridizes with a nucleic acid molecule of (a), (b), (c), (d) or (e) under stringent hybridisation conditions;
[101055] (g) a nucleic acid molecule encoding a polypeptide which can be isolated with the aid of monoclonal or polyclonal antibodies made against a polypeptide encoded by one of the nucleic acid molecules of (a), (b), (c), (d), (e) or (f);
[101056] (h) a nucleic acid molecule encoding a polypeptide comprising the consensus sequence or one or more polypeptide motifs as shown in column 8 of Table IV, application no. 19;
[101057] (i) a nucleic acid molecule encoding a polypeptide having the activity represented by a respective protein as depicted in column 5 of Table II, application no. 19;
[101058] (j) a nucleic acid molecule comprising a polynucleotide which is obtained by amplifying a cDNA library or a genomic library using the primers in Table III, application no. 19, column 8;
[101059] and
[101060] (k) nucleic acid molecule which is obtainable by screening a suitable nucleic acid library, especially a cDNA library and/or a genomic library, under stringent hybridization conditions with a probe comprising one of the sequences of the nucleic acid molecule of (a), (b), (c), (d), (e), (f), (g), (h), (i) or (j) or with a fragment of at least 15 nt, preferably 20 nt, 30 nt, 50 nt, 100 nt, 200 nt,500 nt, 1000 nt, 1500 nt, 2000 nt or 3000 nt of the nucleic acid molecule characterized in (a), (b), (c), (d), (e), (f), (g), (h), (i) or (i);
[101061] or a nucleic acid molecule comprising a sequence which is complementary thereto.

[101062] Item 7. A nucleic acid construct which confers the expression of the nucleic acid molecule as defined in item 6, comprising one or more regulatory elements.

[101063] Item 8. An expression cassette comprising
[101064] (a) a promoter, preferably selected from the group consisting of Big35S, PCUbi, Super and USP;
[101065] (b) a nucleic acid molecule as defined in item 6.

[101066] Item 9. A vector comprising the nucleic acid molecule as defined in item 6 or the nucleic acid construct as claimed in item 7 or the expression cassette as claimed in item 8.

[101067] Item 10. A host cell or a plant organelle, which has been transformed with the vector as claimed in item 9 or the nucleic acid molecule as defined in item 6 or the nucleic acid construct as claimed in item 7 or the expression cassette as claimed in item 8.

[101068] Item 11. The host cell of item 10, which is a plant cell or a microorganism.

[101069] Item 12. A process for producing a polypeptide, wherein the polypeptide is expressed in a host cell as claimed in item 10 or 11.

[101070] Item 13. A polypeptide produced by the process as claimed in item 12 or encoded by the nucleic acid molecule as defined in item 6.

[101071] Item 14. An antibody, which binds specifically to the polypeptide as claimed in item 13.

[101072] Item 15. A plant tissue, propagation material, harvested material or a plant comprising the host cell as claimed in item 10 or 11.

[101073] Item 16. A process for the identification of a compound conferring an increase in bis-glyceryl phosphate (polar fraction), glycerol (lipid fraction), glycerol (polar fraction), glycerol phosphate (lipid fraction), glycerol-3-phosphate (polar fraction) and/or triacylglycerol production in a non-human organism, comprising the steps:
[101074] (a) culturing a plant cell or tissue or microorganism or maintaining a plant expressing the polypeptide encoded by the nucleic acid molecule as defined in item 6 conferring an increase in the amount of bis-glyceryl phosphate (polar fraction), glycerol (lipid fraction), glycerol (polar fraction), glycerol phosphate (lipid fraction), glycerol-3-phosphate (polar fraction) and/or triacylglycerol in a non-human organism or a part thereof and a readout system capable of interacting with the polypeptide under suitable conditions which permit the interaction of the polypeptide with said readout system in the presence of a compound or a sample comprising a plurality of compounds and capable of providing a detectable signal in response to the binding of a compound to said polypeptide under conditions which permit the expression of said readout system and of the polypeptide encoded by the nucleic acid molecule of item 6 conferring an increase in the amount of bis-glyceryl phosphate (polar fraction), glycerol (lipid fraction), glycerol (polar fraction), glycerol phosphate (lipid fraction), glycerol-3-phosphate (polar fraction) and/or triacylglycerols in a non-human organism or a part thereof;
[101075] (b) identifying if the compound is an effective agonist by detecting the presence or absence or increase of a signal produced by said readout system.

[101076] Item 17. A method for the production of an agricultural composition comprising the steps of the method of item 16 and formulating the compound identified in item 16 in a form acceptable for an application in agriculture.

[101077] Item 18. A composition comprising the nucleic acid molecule as defined in item 6, the polypeptide as claimed in item 13, the nucleic acid construct as claimed in item 7, the expression cassette as claimed in item 8, the vector as claimed in item 9, the compound as claimed in item 16, the antibody as claimed in item 14, and optionally an agricultural acceptable carrier.

[101078] Item 19. Use of the nucleic acid molecule as defined in item 6 for the identification of a nucleic acid molecule conferring an increase in bis-glyceryl phosphate (polar fraction), glycerol (lipid fraction), glycerol (polar fraction), glycerol phosphate (lipid fraction), glycerol-3-phosphate (polar fraction) and/or triacylglycerol after expression.

[101079] Item 20. Cosmetic, pharmaceutical, food or feed composition comprising the nucleic acid moleculeas defined in item 6, the polypeptide as claimed in item 13, the nucleic acid construct as claimed in item 7, the expression cassette as claimed in item 8, the vector as claimed in item 9, the antibody as claimed in item 14 , the plant or plant tissue as claimed in item 15, the harvested material as claimed in item 15 or the host cell of item as claimed in item s 10 or 11.

[101080] Item 21. Use of the nuclei acid molecule as defined in item 6, the polypeptide as claimed in item 13, the nucleic acid construct as claimed in item 7, the expression cassette as claimed in item 8, the vector as claimed in item 9, the plant or plant tissue as claimed in item 15, or the host cell of item 10 to 11 for the production of plant resistant to a herbicide inhibiting the production of bis-glyceryl phosphate (polar fraction), glycerol (lipid fraction), glycerol (polar fraction), glycerol phosphate (lipid fraction), glycerol-3-phosphate (polar fraction) and/or triacylglycerol.

[101081] [0483.1.7.19] to [0492.1.7.19] for the disclosure of these paragraphs see [0483.1.7.7] to [0492.1.7.7] above

### Example 10

### Purification of a Fine Chemical Glycerol and/or Derivatel e.g. Bis-Glyceryl Phosphate (Polar Fraction), Glycerol (Lipid Fraction), Glycerol (Polar Fraction), Glycerol Phosphate (Lipid Fraction), Glycerol-3-Phosphate (Polar Fraction) and/or Triacylglycerol

[101082] The fine chemical can be recovered from cells or from the supernatant of the above-described culture by a variety of methods known in the art. For example, the culture supernatant is recovered first. To this end, the cells are harvested from the culture by slow centrifugation. Cells can generally be disrupted or lysed by standard techniques such as mechanical force or sonication. The cell debris is removed by centrifugation and the supernatant fraction, if appropriate together with the culture supernatant, is used for the further purification of the polyalcohols. However, it is also possible to process the supernatant alone if the polyalcohols are present in the supernatant in sufficiently high a concentration. In this case, the fine chemical or mixture thereof, can be purified further for example via extraction and/or salt precipitation or via ion-exchange chromatography or as described above.

[101083] Identity and purity of the fine chemical isolated can be determined by standard techniques of the art. They encompass old techniques such as photometric methods and new techniques such as high-performance liquid chromatography (HPLC), gas chromatography (GC), spectroscopic methods, mass spectrometry (MS), staining methods, thin-layer chromatography, NIRS, enzyme assay or microbiological assays.

[101084] [0494.1.7.19] for the disclosure of this paragraph see [0494.1.7.7] above

### Example 11a

### PCR Amplification of the Sequences

[101085] Unless otherwise specified, standard methods as described in Sambrook et al., Molecular Cloning: A laboratory manual, Cold Spring Harbor 1989, Cold Spring Harbor Laboratory Press are used.

[101086] The inventive sequences as shown in the respective line in Table I, column 5, preferably the coding region thereof, were amplified by PCR as described in the protocol of the Pfu Ultra, Pfu Turbo or Herculase DNA polymerase (Stratagene). The composition for the protocol of the Pfu Ultra, Pfu Turbo or Herculase DNA polymerase was as follows: 1×PCR buffer (Stratagene), 0.2 mM of each dNTP, 100 ng genomic DNA of Saccharomyces cerevisiae (strain S288C; Research Genetics, Inc., now Invitrogen), Escherichia coli (strain MG1655; E. coli Genetic Stock Center), Synechocystis sp. (strain PCC6803), Azotobacter vinelandii (strain N.R. Smith,16), Thermus thermophilus (HB8) or 50 ng cDNA from various tissues and development stages of Arabidopsis thaliana (ecotype Columbia), Physcomitrella patens, Glycine max (variety Resnick), Brassica napus, Oryza sativa or Zea mays (variety B73, Mo17, A188), 50 pmol forward primer, 50 pmol reverse primer, with or without 1 M Betaine, 2.5 u Pfu Ultra, Pfu Turbo or Herculase DNA polymerase.

[101087] The amplification cycles were as follows:

[101088] 1 cycle of 2-3 minutes at 94-95° C., then 25-36 cycles with 30-60 seconds at 94-95° C., 30-45 seconds at 50-60° C. and 210-480 seconds at 72° C., followed by 1 cycle of 5-10 minutes at 72° C., then 4-16° C.—preferably for Saccharomyces cerevisiae, Escherichia coli, Synechocystis sp., Azotobacter vinelandii, Thermus thermophilus.

[101089] In case of Arabidopsis thaliana, Brassica napus, Glycine max, Oryza sativa, Physcomitrella patens, Zea mays the amplification cycles were as follows:

[101090] 1 cycle with 30 seconds at 94° C., 30 seconds at 61° C., 15 minutes at 72° C., then 2 cycles with 30 seconds at 94° C., 30 seconds at 60° C., 15 minutes at 72° C., then 3 cycles with 30 seconds at 94° C., 30 seconds at 59° C., 15 minutes at 72° C., then 4 cycles with 30 seconds at 94° C., 30 seconds at 58° C., 15 minutes at 72° C., then 25 cycles with 30 seconds at 94° C., 30 seconds at 57° C., 15 minutes at 72° C., then 1 cycle with 10 minutes at 72° C., then finally 4-16° C.

[101091] RNAs were generated with the RNeasy Plant Kit according to the standard protocol (Qiagen) and Superscript II Reverse Transkriptase was used to produce double stranded cDNA according to the standard protocol (Invitrogen).

[101092] ORF specific primer pairs for the genes to be expressed are shown in the respective line in Table III, column 8. The following adapter sequences were added to Saccharomyces cerevisiae ORF specific primers (see Table III) for cloning purposes:

SEQ ID NO: 20

| | | |
|---|---|---|
| i) | foward primer: | 5′-GGAATTCCAGCTGACCACC-3′ |

SEQ ID NO: 21

| | | |
|---|---|---|
| ii) | reverse primer: | 5′-GATCCCCGGGAATTGCCATG-3′ |

[101093] These adaptor sequences allow cloning of the ORF into the various vectors containing the Resgen adaptors, see table column E of Table c.

[101094] The following adapter sequences were added to Saccharomyces cerevisiae, Escherichia coli, Synechocystis sp., Azotobacter vinelandii, Thermus thermophilus, Arabidopsis thaliana, Brassica napus, Glycine max, Oryza sativa , Physcomitrella patens, or Zea mays ORF specific primers for cloning purposes:

| SEQ ID NO: 22 | | |
|---|---|---|
| iii) | forward primer: | 5′-TTGCTCTTCC-3′ |
| SEQ ID NO: 23 | | |
| iiii) | reverse primer: | 5′-TTGCTCTTCG-3′ |

[101095] The adaptor sequences allow cloning of the ORF into the various vectors containing the Colic adaptors, see table column E of Table c.

[101096] Therefore for amplification and cloning of Saccharomyces cerevisiae SEQ ID NO: 14769, a primer consisting of the adaptor sequence i) and the ORF specific sequence SEQ ID NO: 14815 and a second primer consisting of the adaptor sequence ii) and the ORF specific sequence SEQ ID NO: 14816 were used.

[101097] For amplification and cloning of Escherichia coli SEQ ID NO: 7081, a primer consisting of the adaptor sequence iii) and the ORF specific sequence SEQ ID NO: 7261 and a second primer consisting of the adaptor sequence iiii) and the ORF specific sequence SEQ ID NO: 7262 were used.

[101098] For amplification and cloning of Synechocystis sp. SEQ ID NO: 11471, a primer consisting of the adaptor sequence iii) and the ORF specific sequence SEQ ID NO: 11983 and a second primer consisting of the adaptor sequence iiii) and the ORF specific sequence SEQ ID NO: 11984 were used.

[101099] For amplification and cloning of Arabidopsis thaliana SEQ ID NO: 1061, a primer consisting of the adaptor sequence iii) and the ORF specific sequence SEQ ID NO: 1293 and a second primer consisting of the adaptor sequence iiii) and the ORF specific sequence SEQ ID NO: 1294 were used.

[101100] For amplification and cloning of Azotobacter vinelandii SEQ ID NO: 6040, a primer consisting of the adaptor sequence iii) and the ORF specific sequence SEQ ID NO: 6070 and a second primer consisting of the adaptor sequence iiii) and the ORF specific sequence SEQ ID NO: 6071 were used.

[101101] For amplification and cloning of Glycine max SEQ ID NO: 69, a primer consisting of the adaptor sequence iii) and the ORF specific sequence SEQ ID NO: 343 and a second primer consisting of the adaptor sequence iiii) and the ORF specific sequence SEQ ID NO: 344 were used.

[101102] For amplification and cloning of Thermus thermophilus SEQ ID NO: 60301, a primer consisting of the adaptor sequence iii) and the ORF specific sequence SEQ ID NO: 60849 and a second primer consisting of the adaptor sequence iiii) and the ORF specific sequence SEQ ID NO: 60850 were used.

[101103] For amplification and cloning of Zea mays SEQ ID NO: 68413, a primer consisting of the adapfor sequence iii) and the ORF specific sequence SEQ ID NO: 68531 and a second primer consisting of the adaptor sequence iiii) and the ORF specific sequence SEQ ID NO: 68532 were used.

[101104] Following these examples every sequence disclosed in Table I, preferably column 5, especially the coding region thereof can be cloned by fusing the adaptor sequences to the respective specific primers sequences as disclosed in Table III, column 8 using the respective vectors shown in Table c.

[101105] [0496.1.7.19] to [0499.1.7.19] for the disclosure of these paragraphs see [0496.1.7.7] to [0499.1.7.7] above

### Example 11e

### Cloning of Inventive Sequences as shown in Table I, Column 5 in the Different Expression Vectors

[101106] For cloning of for example SEQ ID NO: 7081 from Escherichia coli or any other ORF from Escherichia coli, Synechocystis sp., Azotobacter vinelandii, Thermus thermophilus, Arabidopsis thaliana, Glycine max, or Zea mays the vector DNA was treated with the restriction enzymes Pacl and Ncol following the standard protocol (MBI Fermentas).

[101107] For cloning for example the ORFs of SEQ ID NO: 14769 from Saccharomyces cerevisiae or any other ORF from Saccharomyces cerevisiae into vectors containing the Resgen adaptor sequence the respective vector DNA was treated with the restriction enzyme Ncol.

[101108] For cloning of for example ORFs SEQ ID NO: 66274 from Saccharomyces cerevisiae or any other ORF from Saccharomyces cerevisiae into vectors containing the Colic adaptor sequence, the respective vector DNA was treated with the restriction enzymes Pacl and Ncol following the standard protocol (MBI Fermentas).

[101109] In all cases the reaction was stopped by inactivation at 70° C. for 20 minutes and purified over QlAquick or NucleoSpin Extract II columns following the standard protocol (Qiagen or Macherey-Nagel). Then the PCR-product representing the amplified ORF with the respective adapter sequences and the vector DNA were treated with T4 DNA polymerase according to the standard protocol (MBI Fermentas) to produce single stranded overhangs with the parameters 1 unit T4 DNA polymerase at 37° C. for 2-10 minutes for the vector and 1-2 u T4 DNA polymerase at 15-17° C. for 10-60 minutes for the PCR product representing SEQ ID NO: 7081.

[101110] The reaction was stopped by addition of high-salt buffer and purified over QlAquick or NucleoSpin Extract II columns following the standard protocol (Qiagen or Macherey-Nagel).

[101111] According to this example the skilled person is able to clone all sequences disclosed in Table I, preferably column 5 or column 8, especially the coding region thereof. Approximately 30-60 ng of prepared vector and a defined amount of prepared amplificate were mixed and hybridized at 65° C. for 15 minutes followed by 37° C. 0.1° C/1 seconds, followed by 37° C. 10 minutes, followed by 0.1° C/1 seconds, then 4-10 ° C.

[101112] The ligated constructs were transformed in the same reaction vessel by addition of competent E. coli cells (strain DH5alpha) and incubation for 20 minutes at 1° C. followed by a heat shock for 90 seconds at 42° C. and cooling to 1-4° C. Then, complete medium (SOC) was added and the mixture was incubated for 45 minutes at 37° C. The entire mixture was subsequently plated onto an agar plate with 0.05 mg/ml kanamycin and incubated overnight at 37° C.

[101113] The outcome of the cloning step was verified by amplification with the aid of primers which bind upstream and downstream of the integration site, thus allowing the amplification of the insertion. The amplifications were carried out as described in the protocol of Taq DNA polymerase (Gibco-BRL).

[101114] The amplification cycles were as follows: 1 cycle of 1-5 minutes at 94° C., followed by 35 cycles of in each case 15-60 seconds at 94° C., 15-60 seconds at 50-66° C. and 5-15 minutes at 72° C., followed by 1 cycle of 10 minutes at 72° C., then 4-16° C.

[101115] Several colonies were checked, but only one colony for which a PCR product of the expected size was detected was used in the following steps.

[101116] A portion of this positive colony was transferred into a reaction vessel filled with complete medium (LB) supplemented with kanamycin and incubated overnight at 37° C.

[101117] The plasmid preparation was carried out as specified in the Qiaprep or NucleoSpin Multi-96 Plus standard protocol (Qiagen or Macherey-Nagel).

[101118] [0501.1.7.19] to [0503.1.7.19] for the disclosure of these paragraphs see [0501.1.7.7] to [0503.1.7.7] above

[101119] Table d showing results of plant analyses

TABLE d

| SeqID | Target | Locus | Metabolite | Source | Promotor | Method | Min | Max |
|---|---|---|---|---|---|---|---|---|
| 17451 | non-targ | At1g07430 | glycerol phosphate | ARA_LEAF | p-PcUBI | GC | 21 | 63 |
| | | | (lf) | | | | | |
| 102086 | non-targ | At1g23110 | bis-glyceryl phos- | ARA_LEAF | p-PcUBI | GC | 264 | 530 |
| | | | phate (pf) | | | | | |
| 17968 | non-targ | At1g36730 | bis-glyceryl phos- | ARA_LEAF | p-PcUBI | GC | 38 | 72 |
| | | | phate (pf) | | | | | |
| 17968 | non-targ | At1g36730 | glycerol phosphate | ARA_LEAF | p-PcUBI | GC | 24 | 39 |
| | | | (lf) | | | | | |
| 19364 | non-targ | At1g67340 | triacylglycerol | ARA_LEAF | p-PcUBI | LC | 39 | 135 |
| 1061 | non-targ | At1g68320 | glycerol (If) | ARA_LEAF | p-PcUBI | GC | 16 | 57 |
| 19419 | non-targ | At1g72770 | bis-glyceryl phos- | ARA_LEAF | p-PcUBI | GC | 40 | 78 |
| | | | phate (pf) | | | | | |
| 19419 | non-targ | At1g72770 | glycerol (lf) | ARA_LEAF | p-PcUBI | GC | 23 | 67 |
| 19419 | non-targ | At1g72770 | glycerol phosphate | ARA_LEAF | p-PcUBI | GC | 17 | 56 |
| | | | (lf) | | | | | |
| 19919 | non-targ | At2g30360 | bis-glyceryl phos- | ARA_LEAF | p-PcUBI | GC | 39 | 69 |
| | | | phate (pf) | | | | | |
| 21106 | non-targ | At2g46500 | bis-glyceryl phos- | ARA_LEAF | p-PcUBI | GC | 45 | 68 |
| | | | phate (pf) | | | | | |
| 68657 | non-targ | At3g02990 | triacylglycerol | ARA_LEAF | p-PcUBI | LC | 39 | 91 |
| 109717 | non-targ | At4g09960 | glycerol (lf) | ARA_LEAF | p-PcUBI | GC | 18 | 25 |
| 23482 | non-targ | At4g15660 | glycerol (lf) | ARA_LEAF | p-PcUBI | GC | 16 | 85 |
| 23482 | non-targ | At4g15660 | triacylglycerol | ARA_LEAF | p-PcUBI | LC | 33 | 158 |
| 3279 | non-targ | At4g15670 | glycerol (lf) | ARA_LEAF | p-PcUBI | GC | 53 | 59 |
| 3279 | non-targ | At4g15670 | triacylglycerol | ARA_LEAF | p-PcUBI | LC | 38 | 150 |
| 68849 | non-targ | At4g26080 | glycerol phosphate | ARA_LEAF | p-PcUBI | GC | 17 | 35 |
| | | | (lf) | | | | | |
| 24311 | non-targ | At4g34160 | bis-glyceryl phos- | ARA_LEAF | p-PcUBI | GC | 50 | 76 |
| | | | phate (pf) | | | | | |
| 4348 | non-targ | At4g35310 | bis-glyceryl phos- | ARA_LEAF | p-PcUBI | GC | 39 | 145 |
| | | | phate (pf) | | | | | |
| 24438 | non-targ | At5g03720 | glycerol (lf) | ARA_LEAF | p-PcUBI | GC | 20 | 29 |
| 24438 | non-targ | At5g03720 | triacylglycerol | ARA_LEAF | p-PcUBI | LC | 37 | 99 |
| 4904 | non-targ | At5g18600 | glycerol (lf) | ARA_LEAF | p-PcUBI | GC | 17 | 34 |
| 5318 | non-targ | At5g57050 | glycerol phosphate | ARA_LEAF | p-PcUBI | GC | 19 | 35 |
| | | | (lf) | | | | | |
| 25498 | non-targ | At5g59220 | glycerol phosphate | ARA_LEAF | p-PcUBI | GC | 18 | 39 |
| | | | (lf) | | | | | |
| 70038 | plastidic | At5g63680 | glycerol phosphate | ARA_LEAF | p-PcUBI | GC | 19 | 47 |
| | | | (lf) | | | | | |
| 70715 | non-targ | AVIN- | triacylglycerol | ARA_LEAF | p-PcUBI | LC | 35 | 52 |
| | | DRAFT_0539 | | | | | | |
| 26196 | non-targ | Avin- | glycerol phosphate | ARA_LEAF | p-PcUBI | GC | 19 | 29 |
| | | DRAFT_1624 | (lf) | | | | | |
| 114083 | non-targ | Avin- | glycerol (lf) | ARA_LEAF | p-PcUBI | GC | 19 | 29 |
| | | DRAFT_1788 | | | | | | |
| 114198 | non-targ | Avin- | bis-glyceryl phos- | ARA_LEAF | p-PcUBI | GC | 38 | 64 |
| | | DRAFT_2010 | phate (pf) | | | | | |
| 6040 | non-targ | Avin- | bis-glyceryl phos- | ARA_LEAF | p-PcUBI | GC | 39 | 71 |
| | | DRAFT_2091 | phate (pf) | | | | | |
| 6040 | non-targ | Avin- | triacylglycerol | ARA_LEAF | p-PcUBI | LC | 31 | 40 |
| | | DRAFT_2091 | | | | | | |
| 29500 | non-targ | Avin- | bis-glyceryl phos- | ARA_LEAF | p-PcUBI | GC | 38 | 80 |
| | | DRAFT_3253 | phate (pf) | | | | | |
| 111155 | non-targ | Avin- | glycerol phosphate | ARA_LEAF | p-PcUBI | GC | 17 | 56 |
| | | DRAFT_3577 | (lf) | | | | | |
| 114231 | non-targ | Avin- | glycerol (lf) | ARA_LEAF | p-PcUBI | GC | 34 | 60 |
| | | DRAFT_3629 | | | | | | |
| 73719 | non-targ | Avin- | bis-glyceryl phos- | ARA_LEAF | p-PcUBI | GC | 39 | 53 |
| | | DRAFT_4606 | phate (pf) | | | | | |
| 6510 | non-targ | Avin- | triacylglycerol | ARA_LEAF | p-PcUBI | LC | 57 | 69 |
| | | DRAFT_5103 | | | | | | |
| 32648 | non-targ | Avin- | glycerol phosphate | ARA_LEAF | p-PcUBI | GC | 19 | 65 |
| | | DRAFT_5467 | (lf) | | | | | |
| 103433 | non-targ | AY623894 | bis-glyceryl phos- | ARA_LEAF | p-PcUBI | GC | 37 | 93 |
| | | | phate (pf) | | | | | |
| 34889 | plastidic | B0004 | triacylglycerol | ARA_LEAF | p-Super | LC | 56 | 127 |
| 103958 | non-targ | B0050 | glycerol phosphate | ARA_LEAF | p-Super | GC | 18 | 39 |
| | | | (lf) | | | | | |
| 7081 | non-targ | B0161 | bis-glyceryl phos- | ARA_LEAF | p-Super | GC | 38 | 78 |
| | | | phate (pf) | | | | | |
| 7081 | non-targ | B0161 | triacylglycerol | ARA_LEAF | p-Super | LC | 47 | 112 |
| 7333 | non-targ | B0449 | bis-glyceryl phos- | ARA_LEAF | p-Super | GC | 48 | 187 |
| | | | phate (pf) | | | | | |
| 35936 | non-targ | B0518 | glycerol (lf) | ARA_LEAF | p-Super | GC | 25 | 54 |
| 152576 | plastidic | B0755 | bis-glyceryl phos- | ARA_LEAF | p-Super | GC | 51 | 83 |
| | | | phate (pf) | | | | | |
| 131359 | plastidic | B0856 | glycerol (pf) | ARA_LEAF | p-Super | GC | 39 | 57 |
| 36670 | non-targ | B0963 | glycerol (lf) | ARA_LEAF | p-Super | GC | 16 | 23 |
| 36670 | non-targ | B0963 | glycerol (pf) | ARA_LEAF | p-Super | GC | 46 | 105 |
| 144479 | non-targ | B0970 | bis-glyceryl phos- | ARA_LEAF | p-Super | GC | 60 | 205 |
| | | | phate (pf) | | | | | |
| 7941 | non-targ | B1003 | bis-glyceryl phos- | ARA_LEAF | p-Super | GC | 52 | 148 |
| | | | phate (pf) | | | | | |
| 114552 | plastidic | B1095 | bis-glyceryl phos- | ARA_LEAF | p-Super | GC | 53 | 164 |
| | | | phate (pf) | | | | | |
| 37400 | non-targ | B1186 | glycerol (lf) | ARA_LEAF | p-Super | GC | 17 | 80 |
| 112111 | non-targ | B1234 | triacylglycerol | ARA_LEAF | p-Super | LC | 41 | 80 |
| 98778 | plastidic | B1249 | glycerol (lf) | ARA_SEED_2 | p-USP | GC | 10 | 22 |
| 38226 | non-targ | B1330 | glycerol phosphate | ARA_LEAF | p-Super | GC | 25 | 55 |
| | | | (lf) | | | | | |
| 76890 | non-targ | B1343 | bis-glyceryl phos- | ARA_LEAF | p-Super | GC | 38 | 51 |
| | | | phate (pf) | | | | | |
| 131489 | non-targ | B1391 | bis-glyceryl phos- | ARA_LEAF | p-Super | GC | 44 | 74 |
| | | | phate (pf) | | | | | |
| 38266 | plastidic | B1431 | bis-glyceryl phos- | ARA_LEAF | p-Super | GC | 45 | 94 |
| | | | phate (pf) | | | | | |
| 7947 | non-targ | B1522 | bis-glyceryl phos- | ARA_LEAF | p-Super | GC | 64 | 135 |
| | | | phate (pf) | | | | | |
| 152991 | non-targ | B1554 | bis-glyceryl phos- | ARA_LEAF | p-Super | GC | 39 | 74 |
| | | | phate (pf) | | | | | |
| 145142 | plastidic | B1556 | bis-glyceryl phos- | ARA_LEAF | p-Super | GC | 44 | 119 |
| | | | phate (pf) | | | | | |
| 78138 | non-targ | B1583 | triacylglycerol | ARA_LEAF | p-Super | LC | 30 | 32 |
| 78154 | non-targ | B1589 | bis-glyceryl phos- | ARA_LEAF | p-Super | GC | 41 | 94 |
| | | | phate (pf) | | | | | |
| 38300 | non-targ | B1597 | glycerol (lf) | ARA_LEAF | p-Super | GC | 21 | 123 |
| 78753 | non-targ | B1670 | bis-glyceryl phos- | ARA_LEAF | p-Super | GC | 53 | 94 |
| | | | phate (pf) | | | | | |
| 78771 | non-targ | B1672 | bis-glyceryl phos- | ARA_LEAF | p-Super | GC | 39 | 72 |
| | | | phate (pf) | | | | | |
| 124907 | non-targ | B1703 | triacylglycerol | ARA_LEAF | p-Super | LC | 35 | 49 |
| 153072 | non-targ | B1736 | bis-glyceryl phos- | ARA_LEAF | p-Super | GC | 38 | 85 |
| | | | phate (pf) | | | | | |
| 131539 | non-targ | B1795 | triacylglycerol | ARA_LEAF | p-Super | LC | 40 | 82 |
| 8033 | plastidic | B1814 | glycerol-3- | ARA_SEED_2 | p-USP | LC | 54 | 199 |
| | | | phosphate (pf) | | | | | |
| 78953 | non-targ | B1837 | glycerol phosphate | ARA_LEAF | p-Super | GC | 20 | 38 |
| | | | (lf) | | | | | |
| 79056 | non-targ | B1897 | triacylglycerol | ARA_LEAF | p-Super | LC | 41 | 60 |
| 99371 | non-targ | B2023 | glycerol (lf) | ARA_SEED_2 | p-USP | GC | 13 | 19 |
| 8920 | non-targ | B2032 | glycerol phosphate | ARA_LEAF | p-Super | GC | 22 | 67 |
| | | | (lf) | | | | | |
| 115595 | non-targ | B2099 | glycerol (lf) | ARA_LEAF | p-Super | GC | 16 | 25 |
| 125085 | plastidic | B2139 | bis-glyceryl phos- | ARA_LEAF | p-Super | GC | 42 | 43 |
| | | | phate (pf) | | | | | |
| 39040 | non-targ | B2178 | glycerol (lf) | ARA_LEAF | p-Super | GC | 17 | 44 |
| 146238 | non-targ | B2389 | glycerol phosphate | ARA_LEAF | p-Super | GC | 21 | 34 |
| | | | (lf) | | | | | |
| 39237 | non-targ | B2399 | bis-glyceryl phos- | ARA_LEAF | p-Super | GC | 53 | 471 |
| | | | phate (pf) | | | | | |
| 39237 | non-targ | B2399 | glycerol (lf) | ARA_LEAF | p-Super | GC | 20 | 45 |
| 115628 | non-targ | B2439 | glycerol (lf) | ARA_LEAF | p-Super | GC | 17 | 35 |
| 115628 | non-targ | B2439 | glycerol phosphate | ARA_LEAF | p-Super | GC | 21 | 31 |
| | | | (lf) | | | | | |
| 40299 | non-targ | B2461 | glycerol (lf) | ARA_LEAF | p-Super | GC | 20 | 42 |
| 40329 | non-targ | B2474 | bis-glyceryl phos- | ARA_LEAF | p-Super | GC | 38 | 83 |
| | | | phate (pf) | | | | | |
| 40329 | non-targ | B2474 | glycerol (lf) | ARA_LEAF | p-Super | GC | 16 | 28 |
| 99898 | non-targ | B2546 | glycerol (lf) | ARA_LEAF | p-Super | GC | 22 | 24 |
| 99898 | non-targ | B2546 | glycerol phosphate | ARA_LEAF | p-Super | GC | 18 | 52 |
| | | | (lf) | | | | | |
| 40665 | non-targ | B2613 | bis-glyceryl phos- | ARA_LEAF | p-Super | GC | 42 | 82 |
| | | | phate (pf) | | | | | |
| 40726 | non-targ | B2634 | glycerol (pf) | ARA_LEAF | p-Super | GC | 58 | 125 |
| 9244 | non-targ | B2673 | glycerol (lf) | ARA_LEAF | p-Super | GC | 17 | 20 |
| 9244 | non-targ | B2673 | glycerol phosphate | ARA_LEAF | p-Super | GC | 19 | 47 |
| | | | (lf) | | | | | |
| 80756 | non-targ | B2701 | bis-glyceryl phos- | ARA_LEAF | p-Super | GC | 55 | 98 |
| | | | phate (pf) | | | | | |
| 40741 | non-targ | B2714 | triacylglycerol | ARA_LEAF | p-Super | LC | 38 | 56 |
| 81075 | non-targ | B2747 | glycerol (lf) | ARA_LEAF | p-Super | GC | 18 | 58 |
| 81576 | non-targ | B2818 | triacylglycerol | ARA_LEAF | p-Super | LC | 30 | 47 |
| 82424 | non-targ | B3083 | bis-glyceryl phos- | ARA_LEAF | p-Super | GC | 43 | 60 |
| | | | phate (pf) | | | | | |
| 153246 | non-targ | B3116 | bis-glyceryl phos- | ARA_LEAF | p-Super | GC | 38 | 121 |
| | | | phate (pf) | | | | | |
| 153395 | non-targ | B3160 | bis-glyceryl phos- | ARA_LEAF | p-Super | GC | 47 | 100 |
| | | | phate (pf) | | | | | |
| 153618 | non-targ | B3172 | bis-glyceryl phos- | ARA_LEAF | p-Super | GC | 47 | 115 |
| | | | phate (pf) | | | | | |
| 9492 | non-targ | B3256 | glycerol-3- | ARA_SEED_2 | p-USP | LC | 72 | 110 |
| | | | phosphate (pf) | | | | | |
| 42502 | non-targ | B3262 | bis-glyceryl phos- | ARA_LEAF | p-Super | GC | 59 | 124 |
| | | | phate (pf) | | | | | |
| 42502 | non-targ | B3262 | glycerol (lf) | ARA_LEAF | p-Super | GC | 16 | 60 |
| 153813 | non-targ | B3347 | bis-glyceryl phos- | ARA_LEAF | p-Super | GC | 60 | 198 |
| | | | phate (pf) | | | | | |
| 146472 | non-targ | B3457 | bis-glyceryl phos- | ARA_LEAF | p-Super | GC | 37 | 71 |
| | | | phate (pf) | | | | | |
| 136098 | non-targ | B3777 | bis-glyceryl phos- | ARA_LEAF | p-Super | GC | 39 | 85 |
| | | | phate (pf) | | | | | |
| 83726 | non-targ | B3791 | bis-glyceryl phos- | ARA_LEAF | p-Super | GC | 40 | 93 |
| | | | phate (pf) | | | | | |
| 43800 | non-targ | B3793 | bis-glyceryl phos- | ARA_LEAF | p-Super | GC | 38 | 117 |
| | | | phate (pf) | | | | | |
| 44372 | non-targ | B3989 | triacylglycerol | ARA_LEAF | p-Super | LC | 33 | 109 |
| 10740 | non-targ | B4029 | bis-glyceryl phos- | ARA_LEAF | p-Super | GC | 38 | 220 |
| | | | phate (pf) | | | | | |
| 106532 | non-targ | B4050 | triacylglycerol | ARA_LEAF | p-Super | LC | 50 | 173 |
| 44662 | non-targ | B4129 | bis-glyceryl phos- | ARA_LEAF | p-Super | GC | 39 | 79 |
| | | | phate (pf) | | | | | |
| 45556 | non-targ | B4384 | glycerol-3- | ARA_SEED_2 | p-USP | LC | 45 | 83 |
| | | | phosphate (pf) | | | | | |
| 10811 | non-targ | GM02LC12622 | bis-glyceryl phos- | ARA_LEAF | p-PcUBI | GC | 41 | 98 |
| | | | phate (pf) | | | | | |
| 10811 | non-targ | GM02LC12622 | glycerol phosphate | ARA_LEAF | p-PcUBI | GC | 18 | 34 |
| | | | (lf) | | | | | |
| 46405 | non-targ | GM02LC17485 | bis-glyceryl phos- | ARA_LEAF | p-PcUBI | GC | 69 | 112 |
| | | | phate (pf) | | | | | |
| 46751 | non-targ | GM02LC19289 | glycerol (lf) | ARA_LEAF | p-PcUBI | GC | 25 | 59 |
| 46751 | non-targ | GM02LC19289 | glycerol phosphate | ARA_LEAF | p-PcUBI | GC | 18 | 82 |
| | | | (lf) | | | | | |
| 84198 | non-targ | GM02LC21368 | glycerol (pf) | ARA_LEAF | p-PcUBI | GC | 75 | 89 |
| 46850 | non-targ | GM02LC44512 | glycerol phosphate | ARA_LEAF | p-PcUBI | GC | 20 | 30 |
| | | | (lf) | | | | | |
| 54337 | mitoch | SII1450 | bis-glyceryl phos- | ARA_LEAF | p-PcUBI | GC | 41 | 70 |
| | | | phate (pf) | | | | | |
| 95047 | non-targ | SII1498 | glycerol phosphate | ARA_LEAF | p-PcUBI | GC | 18 | 32 |
| | | | (lf) | | | | | |
| 54452 | plastidic | SII1522 | glycerol (lf) | ARA_LEAF | p-PcUBI | GC | 16 | 49 |
| 85808 | mitoch | SII1815 | bis-glyceryl phos- | ARA_LEAF | p-PcUBI | GC | 49 | 68 |
| | | | phate (pf) | | | | | |
| 86447 | plastidic | SII1848 | glycerol (lf) | ARA_LEAF | p-PcUBI | GC | 19 | 55 |
| 11471 | mitoch | SII1917 | glycerol phosphate | ARA_LEAF | p-PcUBI | GC | 17 | 67 |
| | | | (lf) | | | | | |
| 11990 | non-targ | Slr0338 | glycerol (lf) | ARA_LEAF | p-PcUBI | GC | 20 | 28 |
| 11990 | plastidic | Slr0338 | glycerol phosphate | ARA_LEAF | p-PcUBI | GC | 18 | 39 |
| | | | (lf) | | | | | |
| 147407 | mitoch | Slr0905 | glycerol (pf) | ARA_LEAF | p-PcUBI | GC | 53 | 73 |
| 57734 | non-targ | Slr1096 | bis-glyceryl phos- | ARA_LEAF | p-PcUBI | GC | 39 | 68 |
| | | | phate (pf) | | | | | |
| 116341 | mitoch | Slr1099 | glycerol phosphate | ARA_LEAF | p-PcUBI | GC | 17 | 29 |
| | | | (lf) | | | | | |
| 116460 | mitoch | Slr1250 | glycerol phosphate | ARA_LEAF | p-PcUBI | GC | 21 | 46 |
| | | | (lf) | | | | | |
| 58324 | non-targ | Slr1312 | glycerol phosphate | ARA_LEAF | p-PcUBI | GC | 24 | 43 |
| | | | (lf) | | | | | |
| 58590 | non-targ | Slr1420 | glycerol phosphate | ARA_LEAF | p-PcUBI | GC | 20 | 35 |
| | | | (lf) | | | | | |
| 154137 | plastidic | Slr1467 | bis-glyceryl phos- | ARA_LEAF | p-PcUBI | GC | 57 | 97 |
| | | | phate (pf) | | | | | |
| 147457 | plastidic | Slr1743 | bis-glyceryl phos- | ARA_LEAF | p-PcUBI | GC | 42 | 88 |
| | | | phate (pf) | | | | | |
| 127521 | mitoch | Slr2035 | glycerol (lf) | ARA_LEAF | p-PcUBI | GC | 18 | 22 |
| 12341 | mitoch | Slr2072 | glycerol (lf) | ARA_LEAF | p-PcUBI | GC | 18 | 43 |
| 12341 | mitoch | Slr2072 | glycerol phosphate | ARA_LEAF | p-PcUBI | GC | 19 | 28 |
| | | | (lf) | ARA_LEAF | | | | |
| 136907 | plastidic | Smr0004 | bis-glyceryl phos- | | p-PcUBI | GC | 44 | 60 |
| | | | phate (pf) | | | | | |
| 60301 | non-targ | TTC0035 | triacylglycerol | ARA_LEAF | p-PcUBI | LC | 73 | 163 |
| 61553 | non-targ | TTC0917 | glycerol phosphate | ARA_LEAF | p-PcUBI | GC | 21 | 73 |
| | | | (lf) | | | | | |
| 62079 | non-targ | TTC1386 | glycerol (lf) | ARA_LEAF | p-PcUBI | GC | 23 | 34 |
| 108092 | non-targ | Yal013w | glycerol-3- | ARA_SEED_2 | p-PcUBI | LC | 136 | 212 |
| | | | phosphate (pf) | | | | | |
| 62524 | non-targ | Ybl021c | glycerol (lf) | ARA_LEAF | Big35S | GC | 17 | 23 |
| 119347 | plastidic | Ybr092c | glycerol phosphate | ARA_LEAF | p-Super | GC | 24 | 31 |
| | | | (lf) | | | | | |
| 62717 | non-targ | Ybr160w | glycerol (lf) | ARA_LEAF | Big35S | GC | 17 | 63 |
| 62717 | non-targ | Ybr160w | glycerol (pf) | ARA_LEAF | Big35S | GC | 54 | 85 |
| 63264 | plastidic | Ycr102c | bis-glyceryl phos- | ARA_LEAF | p-Super | GC | 42 | 81 |
| | | | phate (pf) | | | | | |
| 90159 | plastidic | Ydr273w | bis-glyceryl phos- | ARA_LEAF | p-Super | GC | 41 | 48 |
| | | | phate (pf) | | | | | |
| 63807 | non-targ | Yfl016c | glycerol phosphate | ARA_LEAF | Big35S | GC | 22 | 31 |
| | | | (lf) | | | | | |
| 64144 | non-targ | Yfl019c | triacylglycerol | ARA_LEAF | Big35S | LC | 36 | 110 |
| 130742 | plastidic | Ygl256w | bis-glyceryl phos- | ARA_LEAF | p-Super | GC | 42 | 93 |
| | | | phate (pf) | | | | | |
| 128655 | plastidic | Ygr286c | glycerol (lf) | ARA_LEAF | p-Super | GC | 16 | 43 |
| 64336 | plastidic | Yhr024c | triacylglycerol | ARA_LEAF | p-Super | LC | 52 | 138 |
| 154394 | plastidic | Yhr202w | bis-glyceryl phos- | ARA_LEAF | p-Super | GC | 36 | 46 |
| | | | phate (pf) | | | | | |
| 14769 | non-targ | Yil053w | glycerol (pf) | ARA_LEAF | Big35S | GC | 49 | 2038 |
| 149454 | plastidic | Yil083c | bis-glyceryl phos- | ARA_LEAF | p-Super | GC | 48 | 101 |
| | | | phate (pf) | | | | | |
| 154437 | non-targ | Yjl062w-a | glycerol phosphate | ARA_LEAF | Big35S | GC | 18 | 23 |
| | | | (lf) | | | | | |
| 64964 | plastidic | Yjl073w | bis-glyceryl phos- | ARA_LEAF | p-Super | GC | 33 | 36 |
| | | | phate (pf) | | | | | |
| 66274 | non-targ | Yjr153w | bis-glyceryl phos- | ARA_LEAF | p-PcUBI | GC | 45 | 131 |
| | | | phate (pf) | | | | | |
| 150603 | non-targ | Ylr025w | glycerol (pf) | ARA_LEAF | Big35S | GC | 62 | 120 |
| 154454 | plastidic | Ylr099c | bis-glyceryl phos- | ARA_LEAF | p-Super | GC | 297 | 648 |
| | | | phate (pf) | | | | | |
| 129065 | non-targ | Ylr210w | glycerol (lf) | ARA_LEAF | Big35S | GC | 17 | 25 |
| 129123 | plastidic | Ylr326w | glycerol (lf) | ARA_LEAF | p-Super | GC | 17 | 42 |
| 129123 | plastidic | Ylr326w | glycerol phosphate | ARA_LEAF | p-Super | GC | 26 | 46 |
| | | | (lf) | | | | | |
| 139173 | non-targ | Ynl007c | glycerol (lf) | ARA_LEAF | Big35S | GC | 17 | 57 |
| 129470 | non-targ | Ynl130c | glycerol (lf) | ARA_LEAF | Big35S | GC | 17 | 53 |
| 129574 | non-targ | Yor187w | glycerol (lf) | ARA_LEAF | Big35S | GC | 18 | 49 |
| 154477 | plastidic | Ypl162c | bis-glyceryl phos- | ARA_LEAF | p-Super | GC | 37 | 52 |
| | | | phate (pf) | | | | | |
| 140110 | non-targ | Ypr054w | glycerol (lf) | ARA_LEAF | Big35S | GC | 20 | 42 |
| 68413 | non-targ | Zm_4842_BE510522 | bis-glyceryl phos- | ARA_LEAF | p-PcUBI | GC | 46 | 72 |
| | | | phate (pf) | | | | | |
| 69 | non-targ | 49747384_SOYBEAN | bis-glyceryl phos- | ARA_LEAF | p-PcUBI | GC | 47 | 114 |
| | | | phate (pf) | | | | | |

[101120] Column 1 shows the SEQ ID NO, Column 2 shows the expression type (targeted or non-targeted), Column 3 shows the “gene name” (locus), Column 4 shows the metabolite analyzed, Column 5 indicates the A. thaliana source tissue analyzed, Column 6 indicates the used promoter for expression, Column 7 indicates the analytical method. Columns 8 and 9 show the minimum and the maximum increase of the analyzed metabolite (in percent) in comparison to the wild type (ratio_by _WT, given as percent increase).

[101121] The term “non-targ” in Table d, Column 2 which shows the expression type means “non-targeted”.

[101122] The term “mitoch” in Table d, Column 2 which shows the expression type means “mitochondrial”.

[101123] The term “pf ” in Table d, Column 4 which shows the metabolite means “polar fraction”.

[101124] The term “lf ” in Table d, Column 4 which shows the metabolite means “lipid fraction”.

[101125] When the analyses were repeated independently, all results proved to be significant.

[101126] [0505.1.7.19] to [0515.1.7.19] for the disclosure of theses paragraphs see [0505.1.7.7] to [0515.1.7.7] above

[101127] In a further embodiment, the present invention relates in paragraphs [0000.1.7.20.] to [0514.1.7.20.] to a further process for the production of the fine chemical hentriacontane as defined below and corresponding embodiments as described herein as follows.

[101128] for the disclosure of this paragraph see [0001.1.7.7] above

[101129] Waxes are organic compounds that are plastic near ambient temperatures, when melting, they give a low viscosity liquid. Waxes are insoluble in water but soluble in petroleum based solvent.

[101130] Waxes characteristically consist of a long alkyl chains. They tend to contain wax esters as major components, i.e. esters of long-chain fatty alcohols with long-chain fatty acids. The nature of the other lipid constituents can vary greatly with the source of the waxy material, but they include hydrocarbons, saturated, e.g. n-alkanes and unsaturated, sterol esters, aliphatic aldehydes, primary and secondary alcohols, diols, ketones, 6-diketones, triacylglycerols, and many more.

[101131] Waxes are biosynthesized by many plants or animals.

[101132] The best known animal wax is beeswax, but other insects secrete waxes. A major component of beeswax is the ester myricyl palmitate substance and used in constructing their honeycombs. Lanolin for example is a wax obtained from wool, consisting of esters of sterols.

[101133] Plants secrete especially in warm climates, waxes as a way to control evaporation and hydration. Plant leaf surfaces are coated with a thin layer of waxy material that forms the outer boundary of the cuticular membrane; it is the interface between the plant and the atmosphere. Plant cuticular waxes serve as a protective barrier against water loss, UV light, pathogens and insects and helps the plants to resist drought.

[101134] Waxes differ widely among plant species and among the organs and tissues of a single plant, attesting to the genetic diversity and developmental influences In addition, wax content and composition are affected by environmental conditions. Relatively high-humidity conditions, such as in tissue culture, suppress wax production and the photoperiod affects the chain length of wax components.

[101135] Cuticular waxes of plants are complex mixtures of primarily very long chain fatty acids (VLCFAs, >018), hydrocarbons like long-chain aliphatic hydrocarbons, containing alkanes, alcohols, aldehydes, ketones, esters, triterpenes, sterols, and flavonoids, the proportions of the major classes vary among plant species. Hydrocarbons are e.g. a prominent part in leaves of cuticular waxes of peas' and cabbages' leaves.

[101136] As plants cover much of the earth's surface, it seems likely that plant waxes are the most abundant of all natural lipids.

[101137] Although most natural waxes are esters, paraffin waxes are hydrocarbons, mixtures of alkanes of different chain lengths. These materials represent a significant fraction of petroleum. They are refined by vacuum distillation. Paraffin waxes are mixtures of saturated of n- and isoalkanes, naphthenes, and alkyl- and naphthene-substituted aromatic compounds. They are used in adhesives, in foods (such as chewing gum and cheese wrapping), in cosmetics, and as coatings.

[101138] Montan wax is a fossilized wax extracted from coal and lignite. It is very hard, reflecting the high concentration of saturated fatty acids and alcohols, not esters that characterize softer waxes.

[101139] Although dark brown and smelly, they can be purified and bleached to give commercially useful products.

[101140] All the aliphatic components of plant waxes are synthesised in the epidermal cells from saturated very-long-chain fatty acids (commonly C20 to C34). 16:0 and 18:0 fatty acids are first synthesised in the stroma of plastids by the soluble enzymes forming the fatty acid synthase complex. The second stage involves multiple elongation steps and is catalysed by membrane-associated multi-enzyme complexes, known as fatty acid elongases outwith the plastids. As in fatty acid synthesis de novo, each two-carbon extension of the chain involves four reactions: condensation between a CoA-esterified fatty acyl substrate and malonyl-CoA, followed by a β-keto reduction, dehydration and an enoyl reduction to produce saturated verylong-chain fatty acids with 24 to 36 carbon atoms. The enzymes that catalyze these reactions of elongation of long-chain fatty acids are collectively referred to as elongases. Many different forms of the elongases have been identified, and these must interact in some manner to produce the chain-length specificity observed.

[101141] There are then two main pathways for biosynthesis of wax components: an acyl reduction pathway, which yields primary alcohols and wax esters, and a decarbonylation pathway that results in synthesis of aldehydes, alkanes, secondary alcohols and ketones. In the reductive pathway, acyl-CoA esters produced by chain elongation are reduced in a two-step process via a transient aldehyde intermediate, catalysed by a single enzyme, an acyl-CoA reductase (though it was once thought that two distinct enzymes were involved).

[101142] In the decarbonylation pathway for the synthesis of wax constituents, the first step is again believed to be the reduction of acyl-CoA ester to an aldehyde by means of an acyl-CoA reductase. Removal of the carbonyl group by an aldehyde decarbonylase yields an alkane, with one fewer carbon atom than the fatty acid precursor.

[101143] Hentriacontane, H₃C—(CH₂)₂₉—CH₃, is a typical member of the group of C₂₀-C₃₄ straight-chain aliphatics found in plant wax.

[101144] Waxes have long been use to make candles. Today, waxes are mainly consumed industrially as components of complex formulations, like coatings, formulation for plastics or paints. They are employed as release agents. They are also used as slip agents, e.g. in furniture, and corrosion resistance.

[101145] Waxes are used for impregnating and coating paper and card to waterproof but also leather and fabric. Waxes are also used in shoe polishes, wood polishes, and automotive polishes. In another context, waxes are used in cosmetics, like lipstick and mascara which are blends of various fats and waxes colored with pigments.

[101146] Due to the wide variety of uses of waxes or components thereof, specially long chain n-alkanes (C20 to C40), preferably C25 to C35, more preferably hentriacontane, an increased production very important.

[101147] Particularly economical methods are biotechnological methods utilizing long chain n-alkanes, preferably hentriacontane-producing organisms which are either natural or optimized by genetic modification.

[101148] There is a constant need for providing novel enzyme activities or direct or indirect regulators and thus alternative methods with advantageous properties for producing long chain n-alkanes (C20 to C40) or derivates like alcohols and acid of alkanes, optionally unsaturated as well as break down and/or cracking products of long chain alkanes, preferably long chain alkanes of C25 to C35, more preferably hentriacontane or waxes or components thereof in organisms, e.g. in transgenic organisms.

[101149] The content of waxes or components thereof in a cell was also increased by increasing or decreasing certain activities as disclosed in WO2006/069610, WO2007/087815 or WO2008/034648

[101150] Improving the quality of foodstuffs and animal feeds is an important task of the food-and-feed industry. For this purpose a great number of derivates of, long chain n-alkanes, which occur in plants are limited with regard to the supply of mammals. Such derivates are alcohols and acid of alkanes, optionally unsaturated as well as break down and/or cracking products of long chain alkanes. Especially advantageous for the quality of foodstuffs and animal feeds is as balanced as possible a profile of the componenets, since a great excess of some component above a specific concentration in the food has no further positive effect on the utilization of the food since others suddenly become limiting. A further increase in quality is only possible via addition of further components, which are limiting under these conditions. The targeted addition of the limiting component in the form of synthetic products must be carried out with extreme caution in order to avoid imbalance. To ensure a high quality of foods and animal feeds, it is therefore necessary to add a plurality of components in a balanced manner to suit the respective organism.

[101151] Accordingly, there is still a great demand for new and more suitable genes, which encode enzymes or regulators, which participate in the biosynthesis of long chain n-alkanes (C20 to C40) or derivates like alcohols and acid of alkanes, optionally unsaturated as well as break down and/or cracking products of long chain alkanes, preferably long chain alkanea of C25 to C35, more preferably hentriacontane or waxes or components thereof and make it possible to produce certain long chain n-alkanes (C20 to C40) or derivates like alcohols and acid of alkanes, optionally unsaturated as well as break down and/or cracking products of long chain alkanes, preferably long chain alkanes of C25 to C35, more preferably hentriacontane or waxes or components thereof specifically on an industrial scale without unwanted byproducts being formed. In the selection of genes for biosynthesis or regulation two characteristics above all are particularly important. On the one hand, there is as ever a need for improved processes for obtaining the highest possible contents of long chain n-alkanes (C20 to C40) or derivates like alcohols and acid of alkanes, optionally unsaturated as well as break down and/or cracking products of long chain alkanes, preferably long chain alkanes of C25 to C35, more preferably hentriacontane or waxes or components thereof and on the other hand as less as possible byproducts should be produced in the production process.

[101152] Very long chain alkanes, as found amongst plant wax compounds, can be generated by chemical synthesis and extracted from fossil sources with sufficient chemical diversity and at very low cost. Biotechnical approaches for hentriacontane production would therefore have to face strong competition. On the other hand, with ongoing depletion of fossil sources of hydrocarbons, plants with increased hydrocarbon (e.g. hentriacontane) content might become desirable as renewable hydrocarbon sources.

[101153] It is an object of the present invention to develop an inexpensive process for the synthesis of hentriacontane.

[101154] It is a further object of the present invention to develop an inexpensive process for the synthesis of waxes or components thereof like long chain n-alkanes (C20 to C40) or derivates like alcohols and acid of these alkanes, optionally unsaturated as well as break down and/or cracking products of long chain alkanes, preferably long chain alkanes of C25 to C35, more preferably hentriacontane and to assure that the waxes or components thereof like long chain n-alkanes are more accessible and facilely to isolate and recover in an industrial scale from the producing organism, preferably from a plant.

[101155] for the disclosure of this paragraph see [0013.1.7.7] above

[101156] Accordingly, in a first embodiment, the invention relates to a process for the production of at least one fine chemical selected from the group consisting of: hentriacontane, or, in other words, of the “fine chemical” or “fine chemical of the invention”.

[101157] The terms “fine chemical of the invention”, “fine chemical” or “the fine chemical” are used herein equally and relate in context of the paragraphs or sections [0014.1.20.20] to [0514.1.7.20] essentially to the metabolite or the metabolites indicated in column 7, application no. 20 of Tables I, II and IV in the respective line.

[101158] Further, the term “in context of any of the paragraphs [0014.1.20.20] to [0514.1.7.20]” as used herein means that for any of said paragraphs [0014.1.20.20] to [0514.1.7.20] the term “the fine chemical” is understood to follow the definition of paragraphs or sections [0014.1.20.20] and [0015.1.20.20], independently whether it refers to any other paragraph or not and whether the reference recites the term “fine chemical” in an other context. Thus, in cases where one or more paragraphs or sections are incorporated by reference into any of the present paragraphs [0014.1.20.20] to [0514.1.7.20], e.g. by usage of the term “see paragraph” or the term “for the disclosure of this paragraph see the disclosure of paragraph” or the term “incorporated by reference” or a corresponding term, the incorporated paragraph, section or term “the fine chemical” is also understood to have the meaning according to the definition of paragraph [0014.1.20.20] and [0015.1.20.20].

[101159] Accordingly, in one embodiment, the term “fine chemical of the invention”, “fine chemical” or “the fine chemical” as used herein (alone or in combination, like in FCRP) means “hentriacontane” in context of the nucleic acid or polypeptide sequences listed in the respective same line of any one of Tables I to IV of application no. 20 and indicating in column 7 the metabolite “hentriacontane”.

[101160] In one embodiment, the term hentriacontane or the term “fine chemical” mean in context of the paragraphs or sections [0014.1.20.20] to [0514.1.7.20] at least one chemical compound with an activity of the above mentioned hentriacontane, respectively.

[101161] Accordingly, in one embodiment, the terms “fine chemical of the invention”, “fine chemical” or “the fine chemical” mean in context of any of the paragraphs [0014.1.20.20] to [0514.1.7.20] hentriacontane, its derivates like alcohols and acid of these alkanes, optionally unsaturated as well as break down and/or cracking products in free form or bound form. In a preferred embodiment, the term “the fine chemical” means hentriacontane or its derivates like alcohols and acid of these alkanes, optionally unsaturated as well as break down and/or cracking products, in free form or bound form.

[101162] In a preferred embodiment “hentriacontane” means hentriacontane in free form.

[101163] Further, the term “in context of any of the paragraphs [0014.1.20.20] to [0514.1.7.20]” as used herein means that for any of said paragraphs [0014.1.20.20] to [0514.1.7.20] the term “the fine chemical” is understood to follow the definition of section [0014.1.20.20] or section [0015.1.20.20], independently whether it refers to any other paragraph or not and whether the reference recites the term “fine chemical” in an other context.

[101164] Thus, in cases where one or more paragraphs or sections are incorporated by reference into any of the present paragraphs [0014.1.20.20] to [0514.1.7.20], e.g. by usage of the term “see paragraph” or the term “for the disclosure of this paragraph see the disclosure of paragraph” or the term “incorporated by reference” or a corresponding term, the incorporated paragraph, section or term “the fine chemical” is also understood to have the meaning according to this definition of this paragraph [0015.1.20.20].

[101165] Further, the term “fine chemicals” as used herein relates to compositions comprising said fine chemical(s), i.e. comprising hentriacontane, respectively.

[101166] Further, the term “fine chemicals” as used herein relates in one embodiment to waxes or components thereof like long chain n-alkanes (C20 to C40) or derivates like alcohols and acid of these alkanes, optionally unsaturated as well as break down and/or cracking products of long chain alkanes, preferably long chain alkanes of C25 to C35 (C₂₅ Pentacosane, C₂₆ Hexacosane, C₂₇ Heptacosane, C₂₈ Octacosane, C₂₉ Nonacosane, C30 Triacontane, C₃₁ Hentriacontane, C₃₂ Dotriacontane, C₃₃ Tritriacontane, C₃₄ Tetratriacontane, C₃₅ Pentatriacontane), more preferably hentriacontane.

[101167] Accordingly, the present invention relates to a process for the production of hentriacontane, which comprises
[101168] (a) increasing or generating one or more activities selected from the group consisting of pyruvate kinase in a non-human organism or a part thereof, preferably a microorganism, a plant cell, a plant or a part thereof, as compared to a corresponding non-transformed wild type non-human organism or a part thereof; and
[101169] (b) growing the non-human organism or a part thereof under conditions which permit the production of hentriacontane or a composition comprising hentriacontane in said non-human organism or in the culture medium surrounding said non-human organism.

[101170] Accordingly, the present invention relates to a process for the production of hentriacontane, which comprises
[101171] (a) increasing or generating one or more activities selected from the group consisting of MADS box protein transcription factor in a non-human organism or a part thereof, preferably a microorganism, a plant cell, a plant or a part thereof, as compared to a corresponding non-transformed wild type non-human organism or a part thereof; and
[101172] (b) growing the non-human organism or a part thereof under conditions which permit the production of hentriacontane or a composition comprising hentriacontane in said non-human organism or in the culture medium surrounding said non-human organism.

[101173] Accordingly, the present invention relates to a process for the production of hentriacontane, which comprises
[101174] (a) increasing or generating one or more activities selected from the group consisting of At2g45420-protein in a non-human organism or a part thereof, preferably a microorganism, a plant cell, a plant or a part thereof, as compared to a corresponding non-transformed wild type non-human organism or a part thereof; and
[101175] (b) growing the non-human organism or a part thereof under conditions which permit the production of hentriacontane or a composition comprising hentriacontane in said non-human organism or in the culture medium surrounding said non-human organism.

[101176] Accordingly, the present invention relates to a process for the production of hentriacontane, which comprises
[101177] (a) increasing or generating one or more activities selected from the group consisting of transcription factor in a non-human organism or a part thereof, preferably a microorganism, a plant cell, a plant or a part thereof, as compared to a corresponding non-transformed wild type non-human organism or a part thereof; and
[101178] (b) growing the non-human organism or a part thereof under conditions which permit the production of hentriacontane or a composition comprising hentriacontane in said non-human organism or in the culture medium surrounding said non-human organism.

[101179] Accordingly, the present invention relates to a process for the production of hentriacontane, which comprises
[101180] (a) increasing or generating one or more activities selected from the group consisting of At5g43630-protein in a non-human organism or a part thereof, preferably a microorganism, a plant cell, a plant or a part thereof, as compared to a corresponding non-transformed wild type non-human organism or a part thereof; and
[101181] (b) growing the non-human organism or a part thereof under conditions which permit the production of hentriacontane or a composition comprising hentriacontane in said non-human organism or in the culture medium surrounding said non-human organism.

[101182] Accordingly, the present invention relates to a process for the production of hentriacontane, which comprises
[101183] (a) increasing or generating one or more activities selected from the group consisting of RNA-binding protein in a non-human organism or a part thereof, preferably a microorganism, a plant cell, a plant or a part thereof, as compared to a corresponding non-transformed wild type non-human organism or a part thereof; and
[101184] (b) growing the non-human organism or a part thereof under conditions which permit the production of hentriacontane or a composition comprising hentriacontane in said non-human organism or in the culture medium surrounding said non-human organism.

[101185] Accordingly, the present invention relates to a process for the production of hentriacontane, which comprises
[101186] (a) increasing or generating one or more activities selected from the group consisting of transcriptional regulator in a non-human organism or a part thereof, preferably a microorganism, a plant cell, a plant or a part thereof, as compared to a corresponding non-transformed wild type non-human organism or a part thereof; and
[101187] (b) growing the non-human organism or a part thereof under conditions which permit the production of hentriacontane or a composition comprising hentriacontane in said non-human organism or in the culture medium surrounding said non-human organism.

[101188] Accordingly, the present invention relates to a process for the production of hentriacontane, which comprises
[101189] (a) increasing or generating one or more activities selected from the group consisting of fumarylacetoacetate hydrolase in a non-human organism or a part thereof, preferably a microorganism, a plant cell, a plant or a part thereof, as compared to a corresponding non-transformed wild type non-human organism or a part thereof; and
[101190] (b) growing the non-human organism or a part thereof under conditions which permit the production of hentriacontane or a composition comprising hentriacontane in said non-human organism or in the culture medium surrounding said non-human organism.

[101191] Accordingly, the present invention relates to a process for the production of hentriacontane, which comprises
[101192] (a) increasing or generating one or more activities selected from the group consisting of spermidine synthase in a non-human organism or a part thereof, preferably a microorganism, a plant cell, a plant or a part thereof, as compared to a corresponding non-transformed wild type non-human organism or a part thereof; and
[101193] (b) growing the non-human organism or a part thereof under conditions which permit the production of hentriacontane or a composition comprising hentriacontane in said non-human organism or in the culture medium surrounding said non-human organism.

[101194] Accordingly, the present invention relates to a process for the production of hentriacontane, which comprises
[101195] (a) increasing or generating one or more activities selected from the group consisting of serine protease in a non-human organism or a part thereof, preferably a microorganism, a plant cell, a plant or a part thereof, as compared to a corresponding non-transformed wild type non-human organism or a part thereof; and
[101196] (b) growing the non-human organism or a part thereof under conditions which permit the production of hentriacontane or a composition comprising hentriacontane in said non-human organism or in the culture medium surrounding said non-human organism.

[101197] Accordingly, the present invention relates to a process for the production of hentriacontane, which comprises
[101198] (a) increasing or generating one or more activities selected from the group consisting of peptide chain release factor in a non-human organism or a part thereof, preferably a microorganism, a plant cell, a plant or a part thereof, as compared to a corresponding non-transformed wild type non-human organism or a part thereof; and
[101199] (b) growing the non-human organism or a part thereof under conditions which permit the production of hentriacontane or a composition comprising hentriacontane in said non-human organism or in the culture medium surrounding said non-human organism.

[101200] Accordingly, the present invention relates to a process for the production of hentriacontane, which comprises
[101201] (a) increasing or generating one or more activities selected from the group consisting of mechanosensitive ion channel in a non-human organism or a part thereof, preferably a microorganism, a plant cell, a plant or a part thereof, as compared to a corresponding non-transformed wild type non-human organism or a part thereof; and
[101202] (b) growing the non-human organism or a part thereof under conditions which permit the production of hentriacontane or a composition comprising hentriacontane in said non-human organism or in the culture medium surrounding said non-human organism.

[101203] Accordingly, the present invention relates to a process for the production of hentriacontane, which comprises
[101204] (a) increasing or generating one or more activities selected from the group consisting of pyrimidine-specific ribonucleoside hydrolase in a non-human organism or a part thereof, preferably a microorganism, a plant cell, a plant or a part thereof, as compared to a corresponding non-transformed wild type non-human organism or a part thereof; and
[101205] (b) growing the non-human organism or a part thereof under conditions which permit the production of hentriacontane or a composition comprising hentriacontane in said non-human organism or in the culture medium surrounding said non-human organism.

[101206] Accordingly, the present invention relates to a process for the production of hentriacontane, which comprises
[101207] (a) increasing or generating one or more activities selected from the group consisting of inner membrane protein in a non-human organism or a part thereof, preferably a microorganism, a plant cell, a plant or a part thereof, as compared to a corresponding non-transformed wild type non-human organism or a part thereof; and
[101208] (b) growing the non-human organism or a part thereof under conditions which permit the production of hentriacontane or a composition comprising hentriacontane in said non-human organism or in the culture medium surrounding said non-human organism.

[101209] Accordingly, the present invention relates to a process for the production of hentriacontane, which comprises
[101210] (a) increasing or generating one or more activities selected from the group consisting of b0833-protein in a non-human organism or a part thereof, preferably a microorganism, a plant cell, a plant or a part thereof, as compared to a corresponding non-transformed wild type non-human organism or a part thereof; and
[101211] (b) growing the non-human organism or a part thereof under conditions which permit the production of hentriacontane or a composition comprising hentriacontane in said non-human organism or in the culture medium surrounding said non-human organism.

[101212] Accordingly, the present invention relates to a process for the production of hentriacontane, which comprises
[101213] (a) increasing or generating one or more activities selected from the group consisting of S-adenosyl-L-methionine-dependent methyltransferase in a non-human organism or a part thereof, preferably a microorganism, a plant cell, a plant or a part thereof, as compared to a corresponding non-transformed wild type non-human organism or a part thereof; and
[101214] (b) growing the non-human organism or a part thereof under conditions which permit the production of hentriacontane or a composition comprising hentriacontane in said non-human organism or in the culture medium surrounding said non-human organism.

[101215] Accordingly, the present invention relates to a process for the production of hentriacontane, which comprises
[101216] (a) increasing or generating one or more activities selected from the group consisting of b1259-protein in a non-human organism or a part thereof, preferably a microorganism, a plant cell, a plant or a part thereof, as compared to a corresponding non-transformed wild type non-human organism or a part thereof; and
[101217] (b) growing the non-human organism or a part thereof under conditions which permit the production of hentriacontane or a composition comprising hentriacontane in said non-human organism or in the culture medium surrounding said non-human organism.

[101218] Accordingly, the present invention relates to a process for the production of hentriacontane, which comprises
[101219] (a) increasing or generating one or more activities selected from the group consisting of orotidine-5′-phosphate decarboxylase in a non-human organism or a part thereof, preferably a microorganism, a plant cell, a plant or a part thereof, as compared to a corresponding non-transformed wild type non-human organism or a part thereof; and
[101220] (b) growing the non-human organism or a part thereof under conditions which permit the production of hentriacontane or a composition comprising hentriacontane in said non-human organism or in the culture medium surrounding said non-human organism.

[101221] Accordingly, the present invention relates to a process for the production of hentriacontane, which comprises
[101222] (a) increasing or generating one or more activities selected from the group consisting of ATP-dependent RNA helicase in a non-human organism or a part thereof, preferably a microorganism, a plant cell, a plant or a part thereof, as compared to a corresponding non-transformed wild type non-human organism or a part thereof; and
[101223] (b) growing the non-human organism or a part thereof under conditions which permit the production of hentriacontane or a composition comprising hentriacontane in said non-human organism or in the culture medium surrounding said non-human organism.

[101224] Accordingly, the present invention relates to a process for the production of hentriacontane, which comprises
[101225] (a) increasing or generating one or more activities selected from the group consisting of b1445-protein in a non-human organism or a part thereof, preferably a microorganism, a plant cell, a plant or a part thereof, as compared to a corresponding non-transformed wild type non-human organism or a part thereof; and
[101226] (b) growing the non-human organism or a part thereof under conditions which permit the production of hentriacontane or a composition comprising hentriacontane in said non-human organism or in the culture medium surrounding said non-human organism.

[101227] Accordingly, the present invention relates to a process for the production of hentriacontane, which comprises
[101228] (a) increasing or generating one or more activities selected from the group consisting of acid shock protein in a non-human organism or a part thereof, preferably a microorganism, a plant cell, a plant or a part thereof, as compared to a corresponding non-transformed wild type non-human organism or a part thereof; and
[101229] (b) growing the non-human organism or a part thereof under conditions which permit the production of hentriacontane or a composition comprising hentriacontane in said non-human organism or in the culture medium surrounding said non-human organism.

[101230] Accordingly, the present invention relates to a process for the production of hentriacontane, which comprises
[101231] (a) increasing or generating one or more activities selected from the group consisting of electron transport complex protein in a non-human organism or a part thereof, preferably a microorganism, a plant cell, a plant or a part thereof, as compared to a corresponding non-transformed wild type non-human organism or a part thereof; and
[101232] (b) growing the non-human organism or a part thereof under conditions which permit the production of hentriacontane or a composition comprising hentriacontane in said non-human organism or in the culture medium surrounding said non-human organism.

[101233] Accordingly, the present invention relates to a process for the production of hentriacontane, which comprises
[101234] (a) increasing or generating one or more activities selected from the group consisting of transcriptional regulator in a non-human organism or a part thereof, preferably a microorganism, a plant cell, a plant or a part thereof, as compared to a corresponding non-transformed wild type non-human organism or a part thereof; and
[101235] (b) growing the non-human organism or a part thereof under conditions which permit the production of hentriacontane or a composition comprising hentriacontane in said non-human organism or in the culture medium surrounding said non-human organism.

[101236] Accordingly, the present invention relates to a process for the production of hentriacontane, which comprises
[101237] (a) increasing or generating one or more activities selected from the group consisting of b1670-protein in a non-human organism or a part thereof, preferably a microorganism, a plant cell, a plant or a part thereof, as compared to a corresponding non-transformed wild type non-human organism or a part thereof; and
[101238] (b) growing the non-human organism or a part thereof under conditions which permit the production of hentriacontane or a composition comprising hentriacontane in said non-human organism or in the culture medium surrounding said non-human organism.

[101239] Accordingly, the present invention relates to a process for the production of hentriacontane, which comprises
[101240] (a) increasing or generating one or more activities selected from the group consisting of phospho-2-dehydro-3-deoxyheptonate aldolase in a non-human organism or a part thereof, preferably a microorganism, a plant cell, a plant or a part thereof, as compared to a corresponding non-transformed wild type non-human organism or a part thereof; and
[101241] (b) growing the non-human organism or a part thereof under conditions which permit the production of hentriacontane or a composition comprising hentriacontane in said non-human organism or in the culture medium surrounding said non-human organism.

[101242] Accordingly, the present invention relates to a process for the production of hentriacontane, which comprises
[101243] (a) increasing or generating one or more activities selected from the group consisting of b1930-protein in a non-human organism or a part thereof, preferably a microorganism, a plant cell, a plant or a part thereof, as compared to a corresponding non-transformed wild type non-human organism or a part thereof; and
[101244] (b) growing the non-human organism or a part thereof under conditions which permit the production of hentriacontane or a composition comprising hentriacontane in said non-human organism or in the culture medium surrounding said non-human organism.

[101245] Accordingly, the present invention relates to a process for the production of hentriacontane, which comprises
[101246] (a) increasing or generating one or more activities selected from the group consisting of O-antigen chain length determinant in a non-human organism or a part thereof, preferably a microorganism, a plant cell, a plant or a part thereof, as compared to a corresponding non-transformed wild type non-human organism or a part thereof; and
[101247] (b) growing the non-human organism or a part thereof under conditions which permit the production of hentriacontane or a composition comprising hentriacontane in said non-human organism or in the culture medium surrounding said non-human organism.

[101248] Accordingly, the present invention relates to a process for the production of hentriacontane, which comprises
[101249] (a) increasing or generating one or more activities selected from the group consisting of GDP-mannose 4,6-dehydratase in a non-human organism or a part thereof, preferably a microorganism, a plant cell, a plant or a part thereof, as compared to a corresponding non-transformed wild type non-human organism or a part thereof; and
[101250] (b) growing the non-human organism or a part thereof under conditions which permit the production of hentriacontane or a composition comprising hentriacontane in said non-human organism or in the culture medium surrounding said non-human organism.

[101251] Accordingly, the present invention relates to a process for the production of hentriacontane, which comprises
[101252] (a) increasing or generating one or more activities selected from the group consisting of assembly protein for periplasmic nitrate reductase in a non-human organism or a part thereof, preferably a microorganism, a plant cell, a plant or a part thereof, as compared to a corresponding non-transformed wild type non-human organism or a part thereof; and
[101253] (b) growing the non-human organism or a part thereof under conditions which permit the production of hentriacontane or a composition comprising hentriacontane in said non-human organism or in the culture medium surrounding said non-human organism.

[101254] Accordingly, the present invention relates to a process for the production of hentriacontane, which comprises
[101255] (a) increasing or generating one or more activities selected from the group consisting of ion-transport protein in a non-human organism or a part thereof, preferably a microorganism, a plant cell, a plant or a part thereof, as compared to a corresponding non-transformed wild type non-human organism or a part thereof; and
[101256] (b) growing the non-human organism or a part thereof under conditions which permit the production of hentriacontane or a composition comprising hentriacontane in said non-human organism or in the culture medium surrounding said non-human organism.

[101257] Accordingly, the present invention relates to a process for the production of hentriacontane, which comprises
[101258] (a) increasing or generating one or more activities selected from the group consisting of b2399-protein in a non-human organism or a part thereof, preferably a microorganism, a plant cell, a plant or a part thereof, as compared to a corresponding non-transformed wild type non-human organism or a part thereof; and
[101259] (b) growing the non-human organism or a part thereof under conditions which permit the production of hentriacontane or a composition comprising hentriacontane in said non-human organism or in the culture medium surrounding said non-human organism.

[101260] Accordingly, the present invention relates to a process for the production of hentriacontane, which comprises
[101261] (a) increasing or generating one or more activities selected from the group consisting of cysteine synthase A in a non-human organism or a part thereof, preferably a microorganism, a plant cell, a plant or a part thereof, as compared to a corresponding non-transformed wild type non-human organism or a part thereof; and
[101262] (b) growing the non-human organism or a part thereof under conditions which permit the production of hentriacontane or a composition comprising hentriacontane in said non-human organism or in the culture medium surrounding said non-human organism.

[101263] Accordingly, the present invention relates to a process for the production of hentriacontane, which comprises
[101264] (a) increasing or generating one or more activities selected from the group consisting of ethanolamine utilization protein in a non-human organism or a part thereof, preferably a microorganism, a plant cell, a plant or a part thereof, as compared to a corresponding non-transformed wild type non-human organism or a part thereof; and
[101265] (b) growing the non-human organism or a part thereof under conditions which permit the production of hentriacontane or a composition comprising hentriacontane in said non-human organism or in the culture medium surrounding said non-human organism.

[101266] Accordingly, the present invention relates to a process for the production of hentriacontane, which comprises
[101267] (a) increasing or generating one or more activities selected from the group consisting of sigma-54 dependent response regulator in a non-human organism or a part thereof, preferably a microorganism, a plant cell, a plant or a part thereof, as compared to a corresponding non-transformed wild type non-human organism or a part thereof; and
[101268] (b) growing the non-human organism or a part thereof under conditions which permit the production of hentriacontane or a composition comprising hentriacontane in said non-human organism or in the culture medium surrounding said non-human organism.

[101269] Accordingly, the present invention relates to a process for the production of hentriacontane, which comprises
[101270] (a) increasing or generating one or more activities selected from the group consisting of b2653-protein in a non-human organism or a part thereof, preferably a microorganism, a plant cell, a plant or a part thereof, as compared to a corresponding non-transformed wild type non-human organism or a part thereof; and
[101271] (b) growing the non-human organism or a part thereof under conditions which permit the production of hentriacontane or a composition comprising hentriacontane in said non-human organism or in the culture medium surrounding said non-human organism.

[101272] Accordingly, the present invention relates to a process for the production of hentriacontane, which comprises
[101273] (a) increasing or generating one or more activities selected from the group consisting of phosphoadenosine phosphosulfate reductase in a non-human organism or a part thereof, preferably a microorganism, a plant cell, a plant or a part thereof, as compared to a corresponding non-transformed wild type non-human organism or a part thereof; and
[101274] (b) growing the non-human organism or a part thereof under conditions which permit the production of hentriacontane or a composition comprising hentriacontane in said non-human organism or in the culture medium surrounding said non-human organism.

[101275] Accordingly, the present invention relates to a process for the production of hentriacontane, which comprises
[101276] (a) increasing or generating one or more activities selected from the group consisting of amino-acid acetyltransferase in a non-human organism or a part thereof, preferably a microorganism, a plant cell, a plant or a part thereof, as compared to a corresponding non-transformed wild type non-human organism or a part thereof; and
[101277] (b) growing the non-human organism or a part thereof under conditions which permit the production of hentriacontane or a composition comprising hentriacontane in said non-human organism or in the culture medium surrounding said non-human organism.

[101278] Accordingly, the present invention relates to a process for the production of hentriacontane, which comprises
[101279] (a) increasing or generating one or more activities selected from the group consisting of exonuclease subunit in a non-human organism or a part thereof, preferably a microorganism, a plant cell, a plant or a part thereof, as compared to a corresponding non-transformed wild type non-human organism or a part thereof; and
[101280] (b) growing the non-human organism or a part thereof under conditions which permit the production of hentriacontane or a composition comprising hentriacontane in said non-human organism or in the culture medium surrounding said non-human organism.

[101281] Accordingly, the present invention relates to a process for the production of hentriacontane, which comprises
[101282] (a) increasing or generating one or more activities selected from the group consisting of L-asparaginase in a non-human organism or a part thereof, preferably a microorganism, a plant cell, a plant or a part thereof, as compared to a corresponding non-transformed wild type non-human organism or a part thereof; and
[101283] (b) growing the non-human organism or a part thereof under conditions which permit the production of hentriacontane or a composition comprising hentriacontane in said non-human organism or in the culture medium surrounding said non-human organism.

[101284] Accordingly, the present invention relates to a process for the production of hentriacontane, which comprises
[101285] (a) increasing or generating one or more activities selected from the group consisting of ornithine decarboxylase in a non-human organism or a part thereof, preferably a microorganism, a plant cell, a plant or a part thereof, as compared to a corresponding non-transformed wild type non-human organism or a part thereof; and
[101286] (b) growing the non-human organism or a part thereof under conditions which permit the production of hentriacontane or a composition comprising hentriacontane in said non-human organism or in the culture medium surrounding said non-human organism.

[101287] Accordingly, the present invention relates to a process for the production of hentriacontane, which comprises
[101288] (a) increasing or generating one or more activities selected from the group consisting of phosphoglycolate phosphatase in a non-human organism or a part thereof, preferably a microorganism, a plant cell, a plant or a part thereof, as compared to a corresponding non-transformed wild type non-human organism or a part thereof; and
[101289] (b) growing the non-human organism or a part thereof under conditions which permit the production of hentriacontane or a composition comprising hentriacontane in said non-human organism or in the culture medium surrounding said non-human organism.

[101290] Accordingly, the present invention relates to a process for the production of hentriacontane, which comprises
[101291] (a) increasing or generating one or more activities selected from the group consisting of sugar transport system permease protein in a non-human organism or a part thereof, preferably a microorganism, a plant cell, a plant or a part thereof, as compared to a corresponding non-transformed wild type non-human organism or a part thereof; and
[101292] (b) growing the non-human organism or a part thereof under conditions which permit the production of hentriacontane or a composition comprising hentriacontane in said non-human organism or in the culture medium surrounding said non-human organism.

[101293] Accordingly, the present invention relates to a process for the production of hentriacontane, which comprises
[101294] (a) increasing or generating one or more activities selected from the group consisting of cyclin D in a non-human organism or a part thereof, preferably a microorganism, a plant cell, a plant or a part thereof, as compared to a corresponding non-transformed wild type non-human organism or a part thereof; and
[101295] (b) growing the non-human organism or a part thereof under conditions which permit the production of hentriacontane or a composition comprising hentriacontane in said non-human organism or in the culture medium surrounding said non-human organism.

[101296] Accordingly, the present invention relates to a process for the production of hentriacontane, which comprises
[101297] (a) increasing or generating one or more activities selected from the group consisting of short-chain alcohol dehydrogenase family in a non-human organism or a part thereof, preferably a microorganism, a plant cell, a plant or a part thereof, as compared to a corresponding non-transformed wild type non-human organism or a part thereof; and
[101298] (b) growing the non-human organism or a part thereof under conditions which permit the production of hentriacontane or a composition comprising hentriacontane in said non-human organism or in the culture medium surrounding said non-human organism.

[101299] Accordingly, the present invention relates to a process for the production of hentriacontane, which comprises
[101300] (a) increasing or generating one or more activities selected from the group consisting of cell division protein in a non-human organism or a part thereof, preferably a microorganism, a plant cell, a plant or a part thereof, as compared to a corresponding non-transformed wild type non-human organism or a part thereof; and
[101301] (b) growing the non-human organism or a part thereof under conditions which permit the production of hentriacontane or a composition comprising hentriacontane in said non-human organism or in the culture medium surrounding said non-human organism.

[101302] Accordingly, the present invention relates to a process for the production of hentriacontane, which comprises
[101303] (a) increasing or generating one or more activities selected from the group consisting of metal-dependent hydrolase in a non-human organism or a part thereof, preferably a microorganism, a plant cell, a plant or a part thereof, as compared to a corresponding non-transformed wild type non-human organism or a part thereof; and
[101304] (b) growing the non-human organism or a part thereof under conditions which permit the production of hentriacontane or a composition comprising hentriacontane in said non-human organism or in the culture medium surrounding said non-human organism.

[101305] Accordingly, the present invention relates to a process for the production of hentriacontane, which comprises
[101306] (a) increasing or generating one or more activities selected from the group consisting of 3-deoxy-7-phosphoheptulonate synthase in a non-human organism or a part thereof, preferably a microorganism, a plant cell, a plant or a part thereof, as compared to a corresponding non-transformed wild type non-human organism or a part thereof; and
[101307] (b) growing the non-human organism or a part thereof under conditions which permit the production of hentriacontane or a composition comprising hentriacontane in said non-human organism or in the culture medium surrounding said non-human organism.

[101308] Accordingly, the present invention relates to a process for the production of hentriacontane, which comprises
[101309] (a) increasing or generating one or more activities selected from the group consisting of YFL019C-protein in a non-human organism or a part thereof, preferably a microorganism, a plant cell, a plant or a part thereof, as compared to a corresponding non-transformed wild type non-human organism or a part thereof; and
[101310] (b) growing the non-human organism or a part thereof under conditions which permit the production of hentriacontane or a composition comprising hentriacontane in said non-human organism or in the culture medium surrounding said non-human organism.

[101311] Accordingly, the present invention relates to a process for the production of hentriacontane, which comprises
[101312] (a) increasing or generating one or more activities selected from the group consisting of dihydroxyacetone kinase in a non-human organism or a part thereof, preferably a microorganism, a plant cell, a plant or a part thereof, as compared to a corresponding non-transformed wild type non-human organism or a part thereof; and
[101313] (b) growing the non-human organism or a part thereof under conditions which permit the production of hentriacontane or a composition comprising hentriacontane in said non-human organism or in the culture medium surrounding said non-human organism.

[101314] Accordingly, the present invention relates to a process for the production of hentriacontane, which comprises
[101315] (a) increasing or generating one or more activities selected from the group consisting of methionine permease in a non-human organism or a part thereof, preferably a microorganism, a plant cell, a plant or a part thereof, as compared to a corresponding non-transformed wild type non-human organism or a part thereof; and
[101316] (b) growing the non-human organism or a part thereof under conditions which permit the production of hentriacontane or a composition comprising hentriacontane in said non-human organism or in the culture medium surrounding said non-human organism.

[101317] Accordingly, the present invention relates to a process for the production of hentriacontane, which comprises
[101318] (a) increasing or generating one or more activities selected from the group consisting of YHL039W-protein in a non-human organism or a part thereof, preferably a microorganism, a plant cell, a plant or a part thereof, as compared to a corresponding non-transformed wild type non-human organism or a part thereof; and
[101319] (b) growing the non-human organism or a part thereof under conditions which permit the production of hentriacontane or a composition comprising hentriacontane in said non-human organism or in the culture medium surrounding said non-human organism.

[101320] Accordingly, the present invention relates to a process for the production of hentriacontane, which comprises
[101321] (a) increasing or generating one or more activities selected from the group consisting of YHR022C-A-protein in a non-human organism or a part thereof, preferably a microorganism, a plant cell, a plant or a part thereof, as compared to a corresponding non-transformed wild type non-human organism or a part thereof; and
[101322] (b) growing the non-human organism or a part thereof under conditions which permit the production of hentriacontane or a composition comprising hentriacontane in said non-human organism or in the culture medium surrounding said non-human organism.

[101323] Accordingly, the present invention relates to a process for the production of hentriacontane, which comprises
[101324] (a) increasing or generating one or more activities selected from the group consisting of YJL127W-A-protein in a non-human organism or a part thereof, preferably a microorganism, a plant cell, a plant or a part thereof, as compared to a corresponding non-transformed wild type non-human organism or a part thereof; and
[101325] (b) growing the non-human organism or a part thereof under conditions which permit the production of hentriacontane or a composition comprising hentriacontane in said non-human organism or in the culture medium surrounding said non-human organism.

[101326] Accordingly, the present invention relates to a process for the production of hentriacontane, which comprises
[101327] (a) increasing or generating one or more activities selected from the group consisting of ylr157c-protein in a non-human organism or a part thereof, preferably a microorganism, a plant cell, a plant or a part thereof, as compared to a corresponding non-transformed wild type non-human organism or a part thereof; and
[101328] (b) growing the non-human organism or a part thereof under conditions which permit the production of hentriacontane or a composition comprising hentriacontane in said non-human organism or in the culture medium surrounding said non-human organism.

[101329] Accordingly, the present invention relates to a process for the production of hentriacontane, which comprises
[101330] (a) increasing or generating one or more activities selected from the group consisting of ynl321w-protein in a non-human organism or a part thereof, preferably a microorganism, a plant cell, a plant or a part thereof, as compared to a corresponding non-transformed wild type non-human organism or a part thereof; and
[101331] (b) growing the non-human organism or a part thereof under conditions which permit the production of hentriacontane or a composition comprising hentriacontane in said non-human organism or in the culture medium surrounding said non-human organism.

[101332] Accordingly, the present invention relates to a process for the production of hentriacontane, which comprises
[101333] (a) increasing or generating one or more activities selected from the group consisting of ypr170c-protein in a non-human organism or a part thereof, preferably a microorganism, a plant cell, a plant or a part thereof, as compared to a corresponding non-transformed wild type non-human organism or a part thereof; and
[101334] (b) growing the non-human organism or a part thereof under conditions which permit the production of hentriacontane or a composition comprising hentriacontane in said non-human organism or in the culture medium surrounding said non-human organism.

[101335] Accordingly, the present invention relates to a process for the production of hentriacontane, which comprises
[101336] (a) increasing or generating one or more activities selected from the group consisting of YPR172W-protein in a non-human organism or a part thereof, preferably a microorganism, a plant cell, a plant or a part thereof, as compared to a corresponding non-transformed wild type non-human organism or a part thereof; and
[101337] (b) growing the non-human organism or a part thereof under conditions which permit the production of hentriacontane or a composition comprising hentriacontane in said non-human organism or in the culture medium surrounding said non-human organism.

[101338] Accordingly, the present invention relates to a process for the production of hentriacontane, which comprises
[101339] (a) increasing or generating one or more activities selected from the group consisting of b3644-protein in a non-human organism or a part thereof, preferably a microorganism, a plant cell, a plant or a part thereof, as compared to a corresponding non-transformed wild type non-human organism or a part thereof; and
[101340] (b) growing the non-human organism or a part thereof under conditions which permit the production of hentriacontane or a composition comprising hentriacontane in said non-human organism or in the culture medium surrounding said non-human organism.

[101341] An embodiment of the present invention relates to a process for the production of hentriacontane, which comprises
[101342] (a1) increasing or generating the activity of a polypeptide comprising a polypeptide as depicted in a respective line in column 5 or 8 of Table II, application no. 20, or a homolog or a fragment thereof, a consensus sequence or at least one polypeptide motif as depicted in the respective line in column 8 of Table IV, application no. 20, whereby the respective line disclose in column 7 the fine chemical hentriacontane; or
[101343] (a2) increasing or generating the activity of an expression product of one or more nucleic acid molecule(s) comprising a polynucleotide as depicted in the respective line in column 5 or 8 of Table I, application no. 20, preferably the coding region thereof, or a homolog or a fragment thereof, whereby the respective line disclose in column 7 the fine chemical hentriacontane; or
[101344] (a3) increasing or generating the activity of a functional equivalent of (a1) or (a2);
[101345] in a non-human organism or a part thereof; preferably a microorganism, a plant cell, a plant or a part thereof, as compared to a corresponding non-transformed wild type non-human organism or a part thereof; and
[101346] (b) growing the non-human organism under conditions which permit the production of hentriacontane or a composition comprising hentriacontane in said non-human organism or in the culture medium surrounding said non-human organism.

[101347] Accordingly, the increase or generation of one or more said activities is for example conferred by one or more expression products of said nucleic acid molecule, e.g. proteins. Accordingly, in the present invention described above, the increase or generation of one or more said activities is for example conferred by one or more protein(s) each comprising a polypeptide selected from the group as depicted in Table II, application no. 20, column 5 and 8, or a homolog or a fragment thereof.

[101348] The process of the invention comprises in one embodiment the following steps:
[101349] (i) increasing or generating of the expression of; and/or
[101350] (ii) increasing or generating the expression of an expression product of; and/or
[101351] (iii) increasing or generating one or more activities of an expression product encoded by;
   at least one nucleic acid molecule (in the following “Fine Chemical Related Protein (FCRP)”-encoding gene or “FCRP”-gene) comprising a nucleic acid molecule selected from the group consisting of:
[101352] (a) a nucleic acid molecule encoding the polypeptide shown in column 5 or 8 of Table II, preferably Table II B, application no. 20, or a homolog or a fragment thereof;
[101353] (b) a nucleic acid molecule shown in column 5 or 8 of Table I, preferably Table I B, application no. 20, or a homolog or a fragment thereof (preferably the coding region thereof);
[101354] (c) a nucleic acid molecule, which, as a result of the degeneracy of the genetic code, can be derived from a polypeptide sequence depicted in column 5 or 8 of Table II, preferably Table II B, application no. 20;
[101355] (d) a nucleic acid molecule having at least 30%, in particular at least 50%, 60%, 70%, 80%, 85%, 90%, 95%, 97%, 98%, 99% or 99.5% identity with the nucleic acid molecule sequence of a polynucleotide comprising the nucleic acid molecule shown in column 5 or 8 of Table I, preferably Table I B, application no. 20, or the coding region thereof;
[101356] (e) a nucleic acid molecule encoding a polypeptide having at least 30%, in particular 50%, 60%, 70%, 80%, 85%, 90%, 95%, 97%, 98%, 99% or 99.5% identity with the amino acid sequence of the polypeptide encoded by the nucleic acid molecule of (a), (b), (c) or (d);
[101357] (f) a nucleic acid molecule which hybridizes with a nucleic acid molecule of (a), (b), (c), (d) or (e) under stringent hybridization conditions;
[101358] (g) a nucleic acid molecule encoding a polypeptide which can be isolated with the aid of monoclonal or polyclonal antibodies made against a polypeptide encoded by one of the nucleic acid molecules of (a), (b), (c), (d), (e) or (f);
[101359] (h) a nucleic acid molecule encoding a polypeptide comprising the consensus sequence or one or more polypeptide motifs as shown in column 8 of Table IV, application no. 20;
[101360] (i) a nucleic acid molecule encoding a polypeptide having the activity represented by a respective protein as depicted in column 5 of Table II, application no. 20;
[101361] (j) a nucleic acid molecule which comprises a polynucleotide, which is obtained by amplifying a cDNA library or a genomic library using the primers as depicted in column 8 of Table III, application no. 20; and
[101362] (k) a nucleic acid molecule which is obtainable by screening a suitable nucleic acid library, especially a cDNA library and/or a genomic library, under stringent hybridization conditions with a probe comprising a complementary sequence of a nucleic acid molecule of (a), (b), (c), (d), (e), (f), (g), (h), (i) or (j) or with a fragment thereof, having at least 15 nt, preferably 20 nt, 30 nt, 50 nt, 100 nt, 200 nt, 500 nt, 1000 nt, 1500 nt, 2000 nt or 3000 nt of a nucleic acid molecule complementary to a nucleic acid molecule sequence characterized in (a), (b), (c), (d), (e), (f), (g), (h), (i) or (j);
[101363] or a nucleic acid molecule comprising a sequence which is complementary thereto.
   (All the references to Tables I to IV are references to the corresponding lines of Tables I to IV.)

[101364] In a preferred embodiment thereof said nucleic acid molecule encodes a polypeptide which has the activity of the polypeptide represented by a protein comprising a polypeptide as depicted in the corresponding hit in column 5 of Table II, application no. 20.

[101365] In another preferred embodiment thereof said nucleic acid molecule confers a generation or an increase of the respective fine chemical in a non-human organism or a part thereof as compared to a corresponding wild-type non-human organism or part thereof.

[101366] In another preferred embodiment thereof said nucleic acid molecule encodes a polypeptide which has the activity of the polypeptide represented by a protein as depicted in the corresponding hit in column 5 of Table II, application no. 20, and confers a generation or an increase of the respective fine chemical in a non-human organism or a part thereof as compared to a corresponding wild-type non-human organism or part thereof.

[101367] Accordingly, the genes of the present invention or used in accordance with the present invention, which respectively encode a protein having an activity of 3-deoxy-7-phosphoheptulonate synthase, acid shock protein, amino-acid acetyltransferase, assembly protein for periplasmic nitrate reductase, At2g45420-protein, At5g43630-protein, ATP-dependent RNA helicase, b0833-protein, b1259-protein, b1445-protein, b1670-protein, b1930-protein, b2399-protein, b2653-protein, b3644-protein, cell division protein, cyclin D, cysteine synthase A, dihydroxyacetone kinase, electron transport complex protein, ethanolamine utilization protein, exonuclease subunit, fumarylacetoacetate hydrolase, GDP-mannose 4,6-dehydratase, inner membrane protein, ion-transport protein, L-asparaginase, MADS box protein transcription factor, mechanosensitive ion channel, metal-dependent hydrolase, methionine permease, O-antigen chain length determinant, ornithine decarboxylase, orotidine-5′-phosphate decarboxylase, peptide chain release factor, phospho-2-dehydro-3-deoxyheptonate aldolase, phosphoadenosine phosphosulfate reductase, phosphoglycolate phosphatase, pyrimidine-specific ribonucleoside hydrolase, pyruvate kinase, RNA-binding protein, S-adenosyl-L-methionine-dependent methyltransferase, serine protease, short-chain alcohol dehydrogenase family, sigma-54 dependent response regulator, spermidine synthase, sugar transport system permease protein, transcription factor, transcriptional regulator, YFL019C-protein, YHL039W-protein, YHR022C-A-protein, YJL127W-A-protein, ylr157c-protein, ynl321w-protein, ypr170c-protein, or YPR172W-protein, which respectively encode a protein comprising a polypeptide encoded by a nucleic acid sequence as shown in Table I, application no. 20, column 5 or 8, (preferably the coding region thereof), or a homolog or a fragment thereof, which respectively encode a protein comprising a polypeptide as depicted in Table II, application no. 20, column 5 or 8, or a homolg or a fragment thereof, and/or which respectively can be amplified with the primer set shown in Table III, application no. 20, column 8, are also referred to as “FCRP genes”.

[101368] Proteins or polypeptides encoded by “FCRP-genes” are referred to as “Fine Chemical Related Proteins” or “FCRP”. For the purposes of the description of the present invention, the respective protein having an activity of 3-deoxy-7-phosphoheptulonate synthase, acid shock protein, amino-acid acetyltransferase, assembly protein for periplasmic nitrate reductase, At2g45420-protein, At5g43630-protein, ATP-dependent RNA helicase, b0833-protein, b1259-protein, b1445-protein, b1670-protein, b1930-protein, b2399-protein, b2653-protein, b3644-protein, cell division protein, cyclin D, cysteine synthase A, dihydroxyacetone kinase, electron transport complex protein, ethanolamine utilization protein, exonuclease subunit, fumarylacetoacetate hydrolase, GDP-mannose 4,6-dehydratase, inner membrane protein, ion-transport protein, L-asparaginase, MADS box protein transcription factor, mechanosensitive ion channel, metal-dependent hydrolase, methionine permease, O-antigen chain length determinant, ornithine decarboxylase, orotidine-5′-phosphate decarboxylase, peptide chain release factor, phospho-2-dehydro-3-deoxyheptonate aldolase, phosphoadenosine phosphosulfate reductase, phosphoglycolate phosphatase, pyrimidine-specific ribonucleoside hydrolase, pyruvate kinase, RNA-binding protein, S-adenosyl-L-methionine-dependent methyltransferase, serine protease, short-chain alcohol dehydrogenase family, sigma-54 dependent response regulator, spermidine synthase, sugar transport system permease protein, transcription factor, transcriptional regulator, YFL019C-protein, YHL039W-protein, YHR022C-A-protein, YJL127W-A-protein, ylr157c-protein, ynl321w-protein, ypr170c-protein, or YPR172W-protein, the respective protein comprising a polypeptide encoded by one or more respective nucleic acid sequences as shown in Table I, application no. 20, column 5 or 8, (preferably the coding region thereof), or a homolog or fragment thereof, the respective protein comprising a respective polypeptide as depicted in Table II, application no. 20, column 5 or 8, or a homolog or fragment thereof, the respective protein comprising a sequence corresponding to the consensus sequence as shown in Table IV, application no. 20, column 8, and/or the respective protein comprising at least one polypeptide motif as shown in Table IV, application no. 20, column 8 is also referred to as Fine Chemical Related Protein” or “FCRP”.

[101369] Thus, in one embodiment, the present invention provides a process of the production of hentriacontane, by increasing or generating one or more activities, especially selected from the group consisting of 3-deoxy-7-phosphoheptulonate synthase, acid shock protein, amino-acid acetyltransferase, assembly protein for periplasmic nitrate reductase, At2g45420-protein, At5g43630-protein, ATP-dependent RNA helicase, b0833-protein, b1259-protein, b1445-protein, b1670-protein, b1930-protein, b2399-protein, b2653-protein, b3644-protein, cell division protein, cyclin D, cysteine synthase A, dihydroxyacetone kinase, electron transport complex protein, ethanolamine utilization protein, exonuclease subunit, fumarylacetoacetate hydrolase, GDP-mannose 4,6-dehydratase, inner membrane protein, ion-transport protein, L-asparaginase, MADS box protein transcription factor, mechanosensitive ion channel, metal-dependent hydrolase, methionine permease, O-antigen chain length determinant, ornithine decarboxylase, orotidine-5′-phosphate decarboxylase, peptide chain release factor, phospho-2-dehydro-3-deoxyheptonate aldolase, phosphoadenosine phosphosulfate reductase, phosphoglycolate phosphatase, pyrimidine-specific ribonucleoside hydrolase, pyruvate kinase, RNA-binding protein, S-adenosyl-L-methionine-dependent methyltransferase, serine protease, short-chain alcohol dehydrogenase family, sigma-54 dependent response regulator, spermidine synthase, sugar transport system permease protein, transcription factor, transcriptional regulator, YFL019C-protein, YHL039W-protein, YHR022C-A-protein, YJL127W-A-protein, ylr157c-protein, ynl321w-protein, ypr170c-protein, and YPR172W-protein, which is conferred by one or more FCRPs or the gene product of one or more FCRP-genes, for example by the gene product of a nucleic acid sequences comprising a polynucleotide selected from the group as shown in Table I, application no. 20, column 5 or 8, (preferably by the coding region thereof), or a homolog or a fragment thereof, e.g. or by one or more proteins each comprising a polypeptide encoded by one or more nucleic acid sequences selected from the group as shown in Table I, application no. 20, column 5 or 8, (preferably by the coding region thereof), or a homolog or a fragment thereof, or by one or more protein(s) each comprising a polypeptide selected from the group as depicted in Table II, application no. 20, column 5 and 8, or a homolog thereof, or a protein comprising a sequence corresponding to the consensus sequence or comprising at least one polypeptide motif as shown in Table IV, application no. 20, column 8.

[101370] for the disclosure of this paragraph see [0025.1.7.7] above

[101371] In an embodiment, the process comprises increasing or generating the activity of one or more polypeptides having said activity, e.g. by generating or increasing the amount and/or specific activity in the cell or a compartment of a cell of one of more FCRP, especially selected from the group consisting of 3-deoxy-7-phosphoheptulonate synthase, acid shock protein, amino-acid acetyltransferase, assembly protein for periplasmic nitrate reductase, At2g45420-protein, At5g43630-protein, ATP-dependent RNA helicase, b0833-protein, b1259-protein, b1445-protein, b1670-protein, b1930-protein, b2399-protein, b2653-protein, b3644-protein, cell division protein, cyclin D, cysteine synthase A, dihydroxyacetone kinase, electron transport complex protein, ethanolamine utilization protein, exonuclease subunit, fumarylacetoacetate hydrolase, GDP-mannose 4,6-dehydratase, inner membrane protein, ion-transport protein, L-asparaginase, MADS box protein transcription factor, mechanosensitive ion channel, metal-dependent hydrolase, methionine permease, O-antigen chain length determinant, ornithine decarboxylase, orotidine-5′-phosphate decarboxylase, peptide chain release factor, phospho-2-dehydro-3-deoxyheptonate aldolase, phosphoadenosine phosphosulfate reductase, phosphoglycolate phosphatase, pyrimidine-specific ribonucleoside hydrolase, pyruvate kinase, RNA-binding protein, S-adenosyl-L-methionine-dependent methyltransferase, serine protease, short-chain alcohol dehydrogenase family, sigma-54 dependent response regulator, spermidine synthase, sugar transport system permease protein, transcription factor, transcriptional regulator, YFL019C-protein, YHL039W-protein, YHR022C-A-protein, YJL127W-A-protein, ylr157c-protein, ynl321w-protein, ypr170c-protein, and YPR172W-protein, for example of the respective polypeptide as depicted in Table II, application no. 20, column 5 and 8, or a homolog or a fragment thereof, or the respective polypeptide comprising a sequence corresponding to the consensus sequences as shown in Table IV, application no. 20, column 8, or the respective polypeptide comprising at least one polypeptide motif as depicted in Table IV, application no. 20, column 8.

[101372] A further embodiment of the present invention relates to a process for the production of hentriacontane, which comprises
[101373] (a) increasing or generating the activity of a pyruvate kinase non-targeted in a non-human organism or a part thereof, preferably a microorganism, a plant cell, a plant or a part thereof, as compared to a corresponding non-transformed wild type non-human organism or a part thereof; and
[101374] (b) growing the non-human organism or a part thereof under conditions which permit the production of hentriacontane or a composition comprising hentriacontane in said non-human organism or in the culture medium surrounding said non-human organism.

[101375] A further embodiment of the present invention relates to a process for the production of hentriacontane, which comprises
[101376] (a) increasing or generating the activity of a MADS box protein transcription factor non-targeted in a non-human organism or a part thereof, preferably a microorganism, a plant cell, a plant or a part thereof, as compared to a corresponding non-transformed wild type non-human organism or a part thereof; and
[101377] (b) growing the non-human organism or a part thereof under conditions which permit the production of hentriacontane or a composition comprising hentriacontane in said non-human organism or in the culture medium surrounding said non-human organism.

[101378] A further embodiment of the present invention relates to a process for the production of hentriacontane, which comprises
[101379] (a) increasing or generating the activity of a At2g45420-protein non-targeted in a non-human organism or a part thereof, preferably a microorganism, a plant cell, a plant or a part thereof, as compared to a corresponding non-transformed wild type non-human organism or a part thereof; and
[101380] (b) growing the non-human organism or a part thereof under conditions which permit the production of hentriacontane or a composition comprising hentriacontane in said non-human organism or in the culture medium surrounding said non-human organism.

[101381] A further embodiment of the present invention relates to a process for the production of hentriacontane, which comprises
[101382] (a) increasing or generating the activity of a transcription factor non-targeted in a non-human organism or a part thereof, preferably a microorganism, a plant cell, a plant or a part thereof, as compared to a corresponding non-transformed wild type non-human organism or a part thereof; and
[101383] (b) growing the non-human organism or a part thereof under conditions which permit the production of hentriacontane or a composition comprising hentriacontane in said non-human organism or in the culture medium surrounding said non-human organism.

[101384] A further embodiment of the present invention relates to a process for the production of hentriacontane, which comprises
[101385] (a) increasing or generating the activity of a At5g43630-protein non-targeted in a non-human organism or a part thereof, preferably a microorganism, a plant cell, a plant or a part thereof, as compared to a corresponding non-transformed wild type non-human organism or a part thereof; and
[101386] (b) growing the non-human organism or a part thereof under conditions which permit the production of hentriacontane or a composition comprising hentriacontane in said non-human organism or in the culture medium surrounding said non-human organism.

[101387] A further embodiment of the present invention relates to a process for the production of hentriacontane, which comprises
[101388] (a) increasing or generating the activity of a RNA-binding protein non-targeted in a non-human organism or a part thereof, preferably a microorganism, a plant cell, a plant or a part thereof, as compared to a corresponding non-transformed wild type non-human organism or a part thereof; and
[101389] (b) growing the non-human organism or a part thereof under conditions which permit the production of hentriacontane or a composition comprising hentriacontane in said non-human organism or in the culture medium surrounding said non-human organism.

[101390] A further embodiment of the present invention relates to a process for the production of hentriacontane, which comprises
[101391] (a) increasing or generating the activity of a transcriptional regulator non-targeted in a non-human organism or a part thereof, preferably a microorganism, a plant cell, a plant or a part thereof, as compared to a corresponding non-transformed wild type non-human organism or a part thereof; and
[101392] (b) growing the non-human organism or a part thereof under conditions which permit the production of hentriacontane or a composition comprising hentriacontane in said non-human organism or in the culture medium surrounding said non-human organism.

[101393] A further embodiment of the present invention relates to a process for the production of hentriacontane, which comprises
[101394] (a) increasing or generating the activity of a fumarylacetoacetate hydrolase non-targeted in a non-human organism or a part thereof, preferably a microorganism, a plant cell, a plant or a part thereof, as compared to a corresponding non-transformed wild type non-human organism or a part thereof; and
[101395] (b) growing the non-human organism or a part thereof under conditions which permit the production of hentriacontane or a composition comprising hentriacontane in said non-human organism or in the culture medium surrounding said non-human organism.

[101396] A further embodiment of the present invention relates to a process for the production of hentriacontane, which comprises
[101397] (a) increasing or generating the activity of a spermidine synthase non-targeted in a non-human organism or a part thereof, preferably a microorganism, a plant cell, a plant or a part thereof, as compared to a corresponding non-transformed wild type non-human organism or a part thereof; and
[101398] (b) growing the non-human organism or a part thereof under conditions which permit the production of hentriacontane or a composition comprising hentriacontane in said non-human organism or in the culture medium surrounding said non-human organism.

[101399] A further embodiment of the present invention relates to a process for the production of hentriacontane, which comprises
[101400] (a) increasing or generating the activity of a serine protease non-targeted in a non-human organism or a part thereof, preferably a microorganism, a plant cell, a plant or a part thereof, as compared to a corresponding non-transformed wild type non-human organism or a part thereof; and
[101401] (b) growing the non-human organism or a part thereof under conditions which permit the production of hentriacontane or a composition comprising hentriacontane in said non-human organism or in the culture medium surrounding said non-human organism.

[101402] A further embodiment of the present invention relates to a process for the production of hentriacontane, which comprises
[101403] (a) increasing or generating the activity of a peptide chain release factor non-targeted in a non-human organism or a part thereof, preferably a microorganism, a plant cell, a plant or a part thereof, as compared to a corresponding non-transformed wild type non-human organism or a part thereof; and
[101404] (b) growing the non-human organism or a part thereof under conditions which permit the production of hentriacontane or a composition comprising hentriacontane in said non-human organism or in the culture medium surrounding said non-human organism.

[101405] A further embodiment of the present invention relates to a process for the production of hentriacontane, which comprises
[101406] (a) increasing or generating the activity of a mechanosensitive ion channel non-targeted in a non-human organism or a part thereof, preferably a microorganism, a plant cell, a plant or a part thereof, as compared to a corresponding non-transformed wild type non-human organism or a part thereof; and
[101407] (b) growing the non-human organism or a part thereof under conditions which permit the production of hentriacontane or a composition comprising hentriacontane in said non-human organism or in the culture medium surrounding said non-human organism.

[101408] A further embodiment of the present invention relates to a process for the production of hentriacontane, which comprises
[101409] (a) increasing or generating the activity of a pyrimidine-specific ribonucleoside hydrolase non-targeted in a non-human organism or a part thereof, preferably a microorganism, a plant cell, a plant or a part thereof, as compared to a corresponding non-transformed wild type non-human organism or a part thereof; and
[101410] (b) growing the non-human organism or a part thereof under conditions which permit the production of hentriacontane or a composition comprising hentriacontane in said non-human organism or in the culture medium surrounding said non-human organism.

[101411] A further embodiment of the present invention relates to a process for the production of hentriacontane, which comprises
[101412] (a) increasing or generating the activity of a inner membrane protein non-targeted in a non-human organism or a part thereof, preferably a microorganism, a plant cell, a plant or a part thereof, as compared to a corresponding non-transformed wild type non-human organism or a part thereof; and
[101413] (b) growing the non-human organism or a part thereof under conditions which permit the production of hentriacontane or a composition comprising hentriacontane in said non-human organism or in the culture medium surrounding said non-human organism.

[101414] A further embodiment of the present invention relates to a process for the production of hentriacontane, which comprises
[101415] (a) increasing or generating the activity of a b0833-protein non-targeted in a non-human organism or a part thereof, preferably a microorganism, a plant cell, a plant or a part thereof, as compared to a corresponding non-transformed wild type non-human organism or a part thereof; and
[101416] (b) growing the non-human organism or a part thereof under conditions which permit the production of hentriacontane or a composition comprising hentriacontane in said non-human organism or in the culture medium surrounding said non-human organism.

[101417] A further embodiment of the present invention relates to a process for the production of hentriacontane, which comprises
[101418] (a) increasing or generating the activity of a S-adenosyl-L-methionine-dependent methyltransferase non-targeted in a non-human organism or a part thereof, preferably a microorganism, a plant cell, a plant or a part thereof, as compared to a corresponding non-transformed wild type non-human organism or a part thereof; and
[101419] (b) growing the non-human organism or a part thereof under conditions which permit the production of hentriacontane or a composition comprising hentriacontane in said non-human organism or in the culture medium surrounding said non-human organism.

[101420] A further embodiment of the present invention relates to a process for the production of hentriacontane, which comprises
[101421] (a) increasing or generating the activity of a b1259-protein non-targeted in a non-human organism or a part thereof, preferably a microorganism, a plant cell, a plant or a part thereof, as compared to a corresponding non-transformed wild type non-human organism or a part thereof; and
[101422] (b) growing the non-human organism or a part thereof under conditions which permit the production of hentriacontane or a composition comprising hentriacontane in said non-human organism or in the culture medium surrounding said non-human organism.

[101423] A further embodiment of the present invention relates to a process for the production of hentriacontane, which comprises
[101424] (a) increasing or generating the activity of a orotidine-5′-phosphate decarboxylase non-targeted in a non-human organism or a part thereof, preferably a microorganism, a plant cell, a plant or a part thereof, as compared to a corresponding non-transformed wild type non-human organism or a part thereof; and
[101425] (b) growing the non-human organism or a part thereof under conditions which permit the production of hentriacontane or a composition comprising hentriacontane in said non-human organism or in the culture medium surrounding said non-human organism.

[101426] A further embodiment of the present invention relates to a process for the production of hentriacontane, which comprises
[101427] (a) increasing or generating the activity of a ATP-dependent RNA helicase non-targeted in a non-human organism or a part thereof, preferably a microorganism, a plant cell, a plant or a part thereof, as compared to a corresponding non-transformed wild type non-human organism or a part thereof; and
[101428] (b) growing the non-human organism or a part thereof under conditions which permit the production of hentriacontane or a composition comprising hentriacontane in said non-human organism or in the culture medium surrounding said non-human organism.

[101429] A further embodiment of the present invention relates to a process for the production of hentriacontane, which comprises
[101430] (a) increasing or generating the activity of a b1445-protein non-targeted in a non-human organism or a part thereof, preferably a microorganism, a plant cell, a plant or a part thereof, as compared to a corresponding non-transformed wild type non-human organism or a part thereof; and
[101431] (b) growing the non-human organism or a part thereof under conditions which permit the production of hentriacontane or a composition comprising hentriacontane in said non-human organism or in the culture medium surrounding said non-human organism.

[101432] A further embodiment of the present invention relates to a process for the production of hentriacontane, which comprises
[101433] (a) increasing or generating the activity of a acid shock protein non-targeted in a non-human organism or a part thereof, preferably a microorganism, a plant cell, a plant or a part thereof, as compared to a corresponding non-transformed wild type non-human organism or a part thereof; and
[101434] (b) growing the non-human organism or a part thereof under conditions which permit the production of hentriacontane or a composition comprising hentriacontane in said non-human organism or in the culture medium surrounding said non-human organism.

[101435] A further embodiment of the present invention relates to a process for the production of hentriacontane, which comprises
[101436] (a) increasing or generating the activity of a electron transport complex protein non-targeted in a non-human organism or a part thereof, preferably a microorganism, a plant cell, a plant or a part thereof, as compared to a corresponding non-transformed wild type non-human organism or a part thereof; and
[101437] (b) growing the non-human organism or a part thereof under conditions which permit the production of hentriacontane or a composition comprising hentriacontane in said non-human organism or in the culture medium surrounding said non-human organism.

[101438] A further embodiment of the present invention relates to a process for the production of hentriacontane, which comprises
[101439] (a) increasing or generating the activity of a transcriptional regulator non-targeted in a non-human organism or a part thereof, preferably a microorganism, a plant cell, a plant or a part thereof, as compared to a corresponding non-transformed wild type non-human organism or a part thereof; and
[101440] (b) growing the non-human organism or a part thereof under conditions which permit the production of hentriacontane or a composition comprising hentriacontane in said non-human organism or in the culture medium surrounding said non-human organism.

[101441] A further embodiment of the present invention relates to a process for the production of hentriacontane, which comprises
[101442] (a) increasing or generating the activity of a b1670-protein non-targeted in a non-human organism or a part thereof, preferably a microorganism, a plant cell, a plant or a part thereof, as compared to a corresponding non-transformed wild type non-human organism or a part thereof; and
[101443] (b) growing the non-human organism or a part thereof under conditions which permit the production of hentriacontane or a composition comprising hentriacontane in said non-human organism or in the culture medium surrounding said non-human organism.

[101444] A further embodiment of the present invention relates to a process for the production of hentriacontane, which comprises
[101445] (a) increasing or generating the activity of a phospho-2-dehydro-3-deoxyheptonate aldolase non-targeted in a non-human organism or a part thereof, preferably a microorganism, a plant cell, a plant or a part thereof, as compared to a corresponding non-transformed wild type non-human organism or a part thereof; and
[101446] (b) growing the non-human organism or a part thereof under conditions which permit the production of hentriacontane or a composition comprising hentriacontane in said non-human organism or in the culture medium surrounding said non-human organism.

[101447] A further embodiment of the present invention relates to a process for the production of hentriacontane, which comprises
[101448] (a) increasing or generating the activity of a b1930-protein non-targeted in a non-human organism or a part thereof, preferably a microorganism, a plant cell, a plant or a part thereof, as compared to a corresponding non-transformed wild type non-human organism or a part thereof; and
[101449] (b) growing the non-human organism or a part thereof under conditions which permit the production of hentriacontane or a composition comprising hentriacontane in said non-human organism or in the culture medium surrounding said non-human organism.

[101450] A further embodiment of the present invention relates to a process for the production of hentriacontane, which comprises
[101451] (a) increasing or generating the activity of a O-antigen chain length determinant non-targeted in a non-human organism or a part thereof, preferably a microorganism, a plant cell, a plant or a part thereof, as compared to a corresponding non-transformed wild type non-human organism or a part thereof; and
[101452] (b) growing the non-human organism or a part thereof under conditions which permit the production of hentriacontane or a composition comprising hentriacontane in said non-human organism or in the culture medium surrounding said non-human organism.

[101453] A further embodiment of the present invention relates to a process for the production of hentriacontane, which comprises
[101454] (a) increasing or generating the activity of a GDP-mannose 4,6-dehydratase non-targeted in a non-human organism or a part thereof, preferably a microorganism, a plant cell, a plant or a part thereof, as compared to a corresponding non-transformed wild type non-human organism or a part thereof; and
[101455] (b) growing the non-human organism or a part thereof under conditions which permit the production of hentriacontane or a composition comprising hentriacontane in said non-human organism or in the culture medium surrounding said non-human organism.

[101456] A further embodiment of the present invention relates to a process for the production of hentriacontane, which comprises
[101457] (a) increasing or generating the activity of a assembly protein for periplasmic nitrate reductase non-targeted in a non-human organism or a part thereof, preferably a microorganism, a plant cell, a plant or a part thereof, as compared to a corresponding non-transformed wild type non-human organism or a part thereof; and
[101458] (b) growing the non-human organism or a part thereof under conditions which permit the production of hentriacontane or a composition comprising hentriacontane in said non-human organism or in the culture medium surrounding said non-human organism.

[101459] A further embodiment of the present invention relates to a process for the production of hentriacontane, which comprises
[101460] (a) increasing or generating the activity of a ion-transport protein non-targeted in a non-human organism or a part thereof, preferably a microorganism, a plant cell, a plant or a part thereof, as compared to a corresponding non-transformed wild type non-human organism or a part thereof; and
[101461] (b) growing the non-human organism or a part thereof under conditions which permit the production of hentriacontane or a composition comprising hentriacontane in said non-human organism or in the culture medium surrounding said non-human organism.

[101462] A further embodiment of the present invention relates to a process for the production of hentriacontane, which comprises
[101463] (a) increasing or generating the activity of a b2399-protein non-targeted in a non-human organism or a part thereof, preferably a microorganism, a plant cell, a plant or a part thereof, as compared to a corresponding non-transformed wild type non-human organism or a part thereof; and
[101464] (b) growing the non-human organism or a part thereof under conditions which permit the production of hentriacontane or a composition comprising hentriacontane in said non-human organism or in the culture medium surrounding said non-human organism.

[101465] A further embodiment of the present invention relates to a process for the production of hentriacontane, which comprises
[101466] (a) increasing or generating the activity of a cysteine synthase A non-targeted in a non-human organism or a part thereof, preferably a microorganism, a plant cell, a plant or a part thereof, as compared to a corresponding non-transformed wild type non-human organism or a part thereof; and
[101467] (b) growing the non-human organism or a part thereof under conditions which permit the production of hentriacontane or a composition comprising hentriacontane in said non-human organism or in the culture medium surrounding said non-human organism.

[101468] A further embodiment of the present invention relates to a process for the production of hentriacontane, which comprises
[101469] (a) increasing or generating the activity of a ethanolamine utilization protein non-targeted in a non-human organism or a part thereof, preferably a microorganism, a plant cell, a plant or a part thereof, as compared to a corresponding non-transformed wild type non-human organism or a part thereof; and
[101470] (b) growing the non-human organism or a part thereof under conditions which permit the production of hentriacontane or a composition comprising hentriacontane in said non-human organism or in the culture medium surrounding said non-human organism.

[101471] A further embodiment of the present invention relates to a process for the production of hentriacontane, which comprises
[101472] (a) increasing or generating the activity of a sigma-54 dependent response regulator non-targeted in a non-human organism or a part thereof, preferably a microorganism, a plant cell, a plant or a part thereof, as compared to a corresponding non-transformed wild type non-human organism or a part thereof; and
[101473] (b) growing the non-human organism or a part thereof under conditions which permit the production of hentriacontane or a composition comprising hentriacontane in said non-human organism or in the culture medium surrounding said non-human organism.

[101474] A further embodiment of the present invention relates to a process for the production of hentriacontane, which comprises
[101475] (a) increasing or generating the activity of a b2653-protein non-targeted in a non-human organism or a part thereof, preferably a microorganism, a plant cell, a plant or a part thereof, as compared to a corresponding non-transformed wild type non-human organism or a part thereof; and
[101476] (b) growing the non-human organism or a part thereof under conditions which permit the production of hentriacontane or a composition comprising hentriacontane in said non-human organism or in the culture medium surrounding said non-human organism.

[101477] A further embodiment of the present invention relates to a process for the production of hentriacontane, which comprises
[101478] (a) increasing or generating the activity of a phosphoadenosine phosphosulfate reductase non-targeted in a non-human organism or a part thereof, preferably a microorganism, a plant cell, a plant or a part thereof, as compared to a corresponding non-transformed wild type non-human organism or a part thereof; and
[101479] (b) growing the non-human organism or a part thereof under conditions which permit the production of hentriacontane or a composition comprising hentriacontane in said non-human organism or in the culture medium surrounding said non-human organism.

[101480] A further embodiment of the present invention relates to a process for the production of hentriacontane, which comprises
[101481] (a) increasing or generating the activity of a amino-acid acetyltransferase non-targeted in a non-human organism or a part thereof, preferably a microorganism, a plant cell, a plant or a part thereof, as compared to a corresponding non-transformed wild type non-human organism or a part thereof; and
[101482] (b) growing the non-human organism or a part thereof under conditions which permit the production of hentriacontane or a composition comprising hentriacontane in said non-human organism or in the culture medium surrounding said non-human organism.

[101483] A further embodiment of the present invention relates to a process for the production of hentriacontane, which comprises
[101484] (a) increasing or generating the activity of a exonuclease subunit non-targeted in a non-human organism or a part thereof, preferably a microorganism, a plant cell, a plant or a part thereof, as compared to a corresponding non-transformed wild type non-human organism or a part thereof; and
[101485] (b) growing the non-human organism or a part thereof under conditions which permit the production of hentriacontane or a composition comprising hentriacontane in said non-human organism or in the culture medium surrounding said non-human organism.

[101486] A further embodiment of the present invention relates to a process for the production of hentriacontane, which comprises
[101487] (a) increasing or generating the activity of a L-asparaginase non-targeted in a non-human organism or a part thereof, preferably a microorganism, a plant cell, a plant or a part thereof, as compared to a corresponding non-transformed wild type non-human organism or a part thereof; and
[101488] (b) growing the non-human organism or a part thereof under conditions which permit the production of hentriacontane or a composition comprising hentriacontane in said non-human organism or in the culture medium surrounding said non-human organism.

[101489] A further embodiment of the present invention relates to a process for the production of hentriacontane, which comprises
[101490] (a) increasing or generating the activity of a ornithine decarboxylase non-targeted in a non-human organism or a part thereof, preferably a microorganism, a plant cell, a plant or a part thereof, as compared to a corresponding non-transformed wild type non-human organism or a part thereof; and
[101491] (b) growing the non-human organism or a part thereof under conditions which permit the production of hentriacontane or a composition comprising hentriacontane in said non-human organism or in the culture medium surrounding said non-human organism.

[101492] A further embodiment of the present invention relates to a process for the production of hentriacontane, which comprises
[101493] (a) increasing or generating the activity of a phosphoglycolate phosphatase non-targeted in a non-human organism or a part thereof, preferably a microorganism, a plant cell, a plant or a part thereof, as compared to a corresponding non-transformed wild type non-human organism or a part thereof; and
[101494] (b) growing the non-human organism or a part thereof under conditions which permit the production of hentriacontane or a composition comprising hentriacontane in said non-human organism or in the culture medium surrounding said non-human organism.

[101495] A further embodiment of the present invention relates to a process for the production of hentriacontane, which comprises
[101496] (a) increasing or generating the activity of a sugar transport system permease protein non-targeted in a non-human organism or a part thereof, preferably a microorganism, a plant cell, a plant or a part thereof, as compared to a corresponding non-transformed wild type non-human organism or a part thereof; and
[101497] (b) growing the non-human organism or a part thereof under conditions which permit the production of hentriacontane or a composition comprising hentriacontane in said non-human organism or in the culture medium surrounding said non-human organism.

[101498] A further embodiment of the present invention relates to a process for the production of hentriacontane, which comprises
[101499] (a) increasing or generating the activity of a cyclin D non-targeted in a non-human organism or a part thereof, preferably a microorganism, a plant cell, a plant or a part thereof, as compared to a corresponding non-transformed wild type non-human organism or a part thereof; and
[101500] (b) growing the non-human organism or a part thereof under conditions which permit the production of hentriacontane or a composition comprising hentriacontane in said non-human organism or in the culture medium surrounding said non-human organism.

[101501] A further embodiment of the present invention relates to a process for the production of hentriacontane, which comprises
[101502] (a) increasing or generating the activity of a short-chain alcohol dehydrogenase family non-targeted in a non-human organism or a part thereof, preferably a microorganism, a plant cell, a plant or a part thereof, as compared to a corresponding non-transformed wild type non-human organism or a part thereof; and
[101503] (b) growing the non-human organism or a part thereof under conditions which permit the production of hentriacontane or a composition comprising hentriacontane in said non-human organism or in the culture medium surrounding said non-human organism.

[101504] A further embodiment of the present invention relates to a process for the production of hentriacontane, which comprises
[101505] (a) increasing or generating the activity of a cell division protein non-targeted in a non-human organism or a part thereof, preferably a microorganism, a plant cell, a plant or a part thereof, as compared to a corresponding non-transformed wild type non-human organism or a part thereof; and
[101506] (b) growing the non-human organism or a part thereof under conditions which permit the production of hentriacontane or a composition comprising hentriacontane in said non-human organism or in the culture medium surrounding said non-human organism.

[101507] A further embodiment of the present invention relates to a process for the production of hentriacontane, which comprises
[101508] (a) increasing or generating the activity of a metal-dependent hydrolase non-targeted in a non-human organism or a part thereof, preferably a microorganism, a plant cell, a plant or a part thereof, as compared to a corresponding non-transformed wild type non-human organism or a part thereof; and
[101509] (b) growing the non-human organism or a part thereof under conditions which permit the production of hentriacontane or a composition comprising hentriacontane in said non-human organism or in the culture medium surrounding said non-human organism.

[101510] A further embodiment of the present invention relates to a process for the production of hentriacontane, which comprises
[101511] (a) increasing or generating the activity of a 3-deoxy-7-phosphoheptulonate synthase non-targeted in a non-human organism or a part thereof, preferably a microorganism, a plant cell, a plant or a part thereof, as compared to a corresponding non-transformed wild type non-human organism or a part thereof; and
[101512] (b) growing the non-human organism or a part thereof under conditions which permit the production of hentriacontane or a composition comprising hentriacontane in said non-human organism or in the culture medium surrounding said non-human organism.

[101513] A further embodiment of the present invention relates to a process for the production of hentriacontane, which comprises
[101514] (a) increasing or generating the activity of a YFL019C-protein non-targeted in a non-human organism or a part thereof, preferably a microorganism, a plant cell, a plant or a part thereof, as compared to a corresponding non-transformed wild type non-human organism or a part thereof; and
[101515] (b) growing the non-human organism or a part thereof under conditions which permit the production of hentriacontane or a composition comprising hentriacontane in said non-human organism or in the culture medium surrounding said non-human organism.

[101516] A further embodiment of the present invention relates to a process for the production of hentriacontane, which comprises
[101517] (a) increasing or generating the activity of a dihydroxyacetone kinase non-targeted in a non-human organism or a part thereof, preferably a microorganism, a plant cell, a plant or a part thereof, as compared to a corresponding non-transformed wild type non-human organism or a part thereof; and
[101518] (b) growing the non-human organism or a part thereof under conditions which permit the production of hentriacontane or a composition comprising hentriacontane in said non-human organism or in the culture medium surrounding said non-human organism.

[101519] A further embodiment of the present invention relates to a process for the production of hentriacontane, which comprises
[101520] (a) increasing or generating the activity of a methionine permease non-targeted in a non-human organism or a part thereof, preferably a microorganism, a plant cell, a plant or a part thereof, as compared to a corresponding non-transformed wild type non-human organism or a part thereof; and
[101521] (b) growing the non-human organism or a part thereof under conditions which permit the production of hentriacontane or a composition comprising hentriacontane in said non-human organism or in the culture medium surrounding said non-human organism.

[101522] A further embodiment of the present invention relates to a process for the production of hentriacontane, which comprises
[101523] (a) increasing or generating the activity of a YHL039W-protein non-targeted in a non-human organism or a part thereof, preferably a microorganism, a plant cell, a plant or a part thereof, as compared to a corresponding non-transformed wild type non-human organism or a part thereof; and
[101524] (b) growing the non-human organism or a part thereof under conditions which permit the production of hentriacontane or a composition comprising hentriacontane in said non-human organism or in the culture medium surrounding said non-human organism.

[101525] A further embodiment of the present invention relates to a process for the production of hentriacontane, which comprises
[101526] (a) increasing or generating the activity of a YHR022C-A-protein non-targeted in a non-human organism or a part thereof, preferably a microorganism, a plant cell, a plant or a part thereof, as compared to a corresponding non-transformed wild type non-human organism or a part thereof; and
[101527] (b) growing the non-human organism or a part thereof under conditions which permit the production of hentriacontane or a composition comprising hentriacontane in said non-human organism or in the culture medium surrounding said non-human organism.

[101528] A further embodiment of the present invention relates to a process for the production of hentriacontane, which comprises
[101529] (a) increasing or generating the activity of a YJL127W-A-protein non-targeted in a non-human organism or a part thereof, preferably a microorganism, a plant cell, a plant or a part thereof, as compared to a corresponding non-transformed wild type non-human organism or a part thereof; and
[101530] (b) growing the non-human organism or a part thereof under conditions which permit the production of hentriacontane or a composition comprising hentriacontane in said non-human organism or in the culture medium surrounding said non-human organism.

[101531] A further embodiment of the present invention relates to a process for the production of hentriacontane, which comprises
[101532] (a) increasing or generating the activity of a ylr157c-protein non-targeted in a non-human organism or a part thereof, preferably a microorganism, a plant cell, a plant or a part thereof, as compared to a corresponding non-transformed wild type non-human organism or a part thereof; and
[101533] (b) growing the non-human organism or a part thereof under conditions which permit the production of hentriacontane or a composition comprising hentriacontane in said non-human organism or in the culture medium surrounding said non-human organism.

[101534] A further embodiment of the present invention relates to a process for the production of hentriacontane, which comprises
[101535] (a) increasing or generating the activity of a ynl321w-protein non-targeted in a non-human organism or a part thereof, preferably a microorganism, a plant cell, a plant or a part thereof, as compared to a corresponding non-transformed wild type non-human organism or a part thereof; and
[101536] (b) growing the non-human organism or a part thereof under conditions which permit the production of hentriacontane or a composition comprising hentriacontane in said non-human organism or in the culture medium surrounding said non-human organism.

[101537] A further embodiment of the present invention relates to a process for the production of hentriacontane, which comprises
[101538] (a) increasing or generating the activity of a ypr170c-protein non-targeted in a non-human organism or a part thereof, preferably a microorganism, a plant cell, a plant or a part thereof, as compared to a corresponding non-transformed wild type non-human organism or a part thereof; and
[101539] (b) growing the non-human organism or a part thereof under conditions which permit the production of hentriacontane or a composition comprising hentriacontane in said non-human organism or in the culture medium surrounding said non-human organism.

[101540] A further embodiment of the present invention relates to a process for the production of hentriacontane, which comprises
[101541] (a) increasing or generating the activity of a YPR172W-protein non-targeted in a non-human organism or a part thereof, preferably a microorganism, a plant cell, a plant or a part thereof, as compared to a corresponding non-transformed wild type non-human organism or a part thereof; and
[101542] (b) growing the non-human organism or a part thereof under conditions which permit the production of hentriacontane or a composition comprising hentriacontane in said non-human organism or in the culture medium surrounding said non-human organism.

[101543] A further embodiment of the present invention relates to a process for the production of hentriacontane, which comprises
[101544] (a) increasing or generating the activity of a b3644-protein non-targeted in a non-human organism or a part thereof, preferably a microorganism, a plant cell, a plant or a part thereof, as compared to a corresponding non-transformed wild type non-human organism or a part thereof; and
[101545] (b) growing the non-human organism or a part thereof under conditions which permit the production of hentriacontane or a composition comprising hentriacontane in said non-human organism or in the culture medium surrounding said non-human organism.

[101546] A further embodiment of the present invention relates to a process for the production of hentriacontane, which comprises
[101547] (a) increasing or generating the activity of a polypeptide comprising a polypeptide as depicted in the respective line in column 5 or 8 of Table II, application no. 20, or a homolog or a fragment thereof, a consensus sequence or at least one polypeptide motif as depicted in the respective line in column 8 of Table IV, application no. 20, whereby the respective line disclose in column 7 the fine chemical hentriacontane; or
[101548] increasing or generating the activity of an expression product of one or more nucleic acid molecule(s) comprising a polynucleotide as depicted in the respective line in column 5 or 8 of Table I, application no. 20, preferably the coding region thereof, or a homolog or a fragment thereof, whereby the respective line disclose in column 7 the fine chemical hentriacontane;
[101549] non-targeted in a non-human organism or a part thereof; preferably a microorganism, a plant cell, a plant or a part thereof, as compared to a corresponding non-transformed wild type non-human organism or a part thereof; and
[101550] (b) growing the non-human organism under conditions which permit the production of hentriacontane, or a composition comprising hentriacontane in said non-human organism or in the culture medium surrounding said non-human organism.

[101551] A further embodiment of the present invention relates to a process for the production of hentriacontane, which comprises
[101552] (a) increasing or generating one or more activities selected from the group consisting of pyruvate kinase in an organelle, preferably in plastids or mitochondria, especially in plastids, of a non-human organism or a part thereof, preferably a microorganism, a plant cell, a plant or a part thereof, as compared to a corresponding non-transformed wild type non-human organism or a part thereof; and
[101553] (b) growing the non-human organism or a part thereof under conditions which permit the production of hentriacontane or a composition comprising hentriacontane in said non-human organism or in the culture medium surrounding said non-human organism.

[101554] A further embodiment of the present invention relates to a process for the production of hentriacontane, which comprises
[101555] (a) increasing or generating one or more activities selected from the group consisting of MADS box protein transcription factor in an organelle, preferably in plastids or mitochondria, especially in plastids, of a non-human organism or a part thereof, preferably a microorganism, a plant cell, a plant or a part thereof, as compared to a corresponding non-transformed wild type non-human organism or a part thereof; and
[101556] (b) growing the non-human organism or a part thereof under conditions which permit the production of hentriacontane or a composition comprising hentriacontane in said non-human organism or in the culture medium surrounding said non-human organism.

[101557] A further embodiment of the present invention relates to a process for the production of hentriacontane, which comprises
[101558] (a) increasing or generating one or more activities selected from the group consisting of At2g45420-protein in an organelle, preferably in plastids or mitochondria, especially in plastids, of a non-human organism or a part thereof, preferably a microorganism, a plant cell, a plant or a part thereof, as compared to a corresponding non-transformed wild type non-human organism or a part thereof; and
[101559] (b) growing the non-human organism or a part thereof under conditions which permit the production of hentriacontane or a composition comprising hentriacontane in said non-human organism or in the culture medium surrounding said non-human organism.

[101560] A further embodiment of the present invention relates to a process for the production of hentriacontane, which comprises
[101561] (a) increasing or generating one or more activities selected from the group consisting of transcription factor in an organelle, preferably in plastids or mitochondria, especially in plastids, of a non-human organism or a part thereof, preferably a microorganism, a plant cell, a plant or a part thereof, as compared to a corresponding non-transformed wild type non-human organism or a part thereof; and
[101562] (b) growing the non-human organism or a part thereof under conditions which permit the production of hentriacontane or a composition comprising hentriacontane in said non-human organism or in the culture medium surrounding said non-human organism.

[101563] A further embodiment of the present invention relates to a process for the production of hentriacontane, which comprises
[101564] (a) increasing or generating one or more activities selected from the group consisting of At5g43630-protein in an organelle, preferably in plastids or mitochondria, especially in plastids, of a non-human organism or a part thereof, preferably a microorganism, a plant cell, a plant or a part thereof, as compared to a corresponding non-transformed wild type non-human organism or a part thereof; and
[101565] (b) growing the non-human organism or a part thereof under conditions which permit the production of hentriacontane or a composition comprising hentriacontane in said non-human organism or in the culture medium surrounding said non-human organism.

[101566] A further embodiment of the present invention relates to a process for the production of hentriacontane, which comprises
[101567] (a) increasing or generating one or more activities selected from the group consisting of RNA-binding protein in an organelle, preferably in plastids or mitochondria, especially in plastids, of a non-human organism or a part thereof, preferably a microorganism, a plant cell, a plant or a part thereof, as compared to a corresponding non-transformed wild type non-human organism or a part thereof; and
[101568] (b) growing the non-human organism or a part thereof under conditions which permit the production of hentriacontane or a composition comprising hentriacontane in said non-human organism or in the culture medium surrounding said non-human organism.

[101569] A further embodiment of the present invention relates to a process for the production of hentriacontane, which comprises
[101570] (a) increasing or generating one or more activities selected from the group consisting of transcriptional regulator in an organelle, preferably in plastids or mitochondria, especially in plastids, of a non-human organism or a part thereof, preferably a microorganism, a plant cell, a plant or a part thereof, as compared to a corresponding non-transformed wild type non-human organism or a part thereof; and
[101571] (b) growing the non-human organism or a part thereof under conditions which permit the production of hentriacontane or a composition comprising hentriacontane in said non-human organism or in the culture medium surrounding said non-human organism.

[101572] A further embodiment of the present invention relates to a process for the production of hentriacontane, which comprises
[101573] (a) increasing or generating one or more activities selected from the group consisting of fumarylacetoacetate hydrolase in an organelle, preferably in plastids or mitochondria, especially in plastids, of a non-human organism or a part thereof, preferably a microorganism, a plant cell, a plant or a part thereof, as compared to a corresponding non-transformed wild type non-human organism or a part thereof; and
[101574] (b) growing the non-human organism or a part thereof under conditions which permit the production of hentriacontane or a composition comprising hentriacontane in said non-human organism or in the culture medium surrounding said non-human organism.

[101575] A further embodiment of the present invention relates to a process for the production of hentriacontane, which comprises
[101576] (a) increasing or generating one or more activities selected from the group consisting of spermidine synthase in an organelle, preferably in plastids or mitochondria, especially in plastids, of a non-human organism or a part thereof, preferably a microorganism, a plant cell, a plant or a part thereof, as compared to a corresponding non-transformed wild type non-human organism or a part thereof; and
[101577] (b) growing the non-human organism or a part thereof under conditions which permit the production of hentriacontane or a composition comprising hentriacontane in said non-human organism or in the culture medium surrounding said non-human organism.

[101578] A further embodiment of the present invention relates to a process for the production of hentriacontane, which comprises
[101579] (a) increasing or generating one or more activities selected from the group consisting of serine protease in an organelle, preferably in plastids or mitochondria, especially in plastids, of a non-human organism or a part thereof, preferably a microorganism, a plant cell, a plant or a part thereof, as compared to a corresponding non-transformed wild type non-human organism or a part thereof; and
[101580] (b) growing the non-human organism or a part thereof under conditions which permit the production of hentriacontane or a composition comprising hentriacontane in said non-human organism or in the culture medium surrounding said non-human organism.

[101581] A further embodiment of the present invention relates to a process for the production of hentriacontane, which comprises
[101582] (a) increasing or generating one or more activities selected from the group consisting of peptide chain release factor in an organelle, preferably in plastids or mitochondria, especially in plastids, of a non-human organism or a part thereof, preferably a microorganism, a plant cell, a plant or a part thereof, as compared to a corresponding non-transformed wild type non-human organism or a part thereof; and
[101583] (b) growing the non-human organism or a part thereof under conditions which permit the production of hentriacontane or a composition comprising hentriacontane in said non-human organism or in the culture medium surrounding said non-human organism.

[101584] A further embodiment of the present invention relates to a process for the production of hentriacontane, which comprises
[101585] (a) increasing or generating one or more activities selected from the group consisting of mechanosensitive ion channel in an organelle, preferably in plastids or mitochondria, especially in plastids, of a non-human organism or a part thereof, preferably a microorganism, a plant cell, a plant or a part thereof, as compared to a corresponding non-transformed wild type non-human organism or a part thereof; and
[101586] (b) growing the non-human organism or a part thereof under conditions which permit the production of hentriacontane or a composition comprising hentriacontane in said non-human organism or in the culture medium surrounding said non-human organism.

[101587] A further embodiment of the present invention relates to a process for the production of hentriacontane, which comprises
[101588] (a) increasing or generating one or more activities selected from the group consisting of pyrimidine-specific ribonucleoside hydrolase in an organelle, preferably in plastids or mitochondria, especially in plastids, of a non-human organism or a part thereof, preferably a microorganism, a plant cell, a plant or a part thereof, as compared to a corresponding non-transformed wild type non-human organism or a part thereof; and
[101589] (b) growing the non-human organism or a part thereof under conditions which permit the production of hentriacontane or a composition comprising hentriacontane in said non-human organism or in the culture medium surrounding said non-human organism.

[101590] A further embodiment of the present invention relates to a process for the production of hentriacontane, which comprises
[101591] (a) increasing or generating one or more activities selected from the group consisting of inner membrane protein in an organelle, preferably in plastids or mitochondria, especially in plastids, of a non-human organism or a part thereof, preferably a microorganism, a plant cell, a plant or a part thereof, as compared to a corresponding non-transformed wild type non-human organism or a part thereof; and
[101592] (b) growing the non-human organism or a part thereof under conditions which permit the production of hentriacontane or a composition comprising hentriacontane in said non-human organism or in the culture medium surrounding said non-human organism.

[101593] A further embodiment of the present invention relates to a process for the production of hentriacontane, which comprises
[101594] (a) increasing or generating one or more activities selected from the group consisting of b0833-protein in an organelle, preferably in plastids or mitochondria, especially in plastids, of a non-human organism or a part thereof, preferably a microorganism, a plant cell, a plant or a part thereof, as compared to a corresponding non-transformed wild type non-human organism or a part thereof; and
[101595] (b) growing the non-human organism or a part thereof under conditions which permit the production of hentriacontane or a composition comprising hentriacontane in said non-human organism or in the culture medium surrounding said non-human organism.

[101596] A further embodiment of the present invention relates to a process for the production of hentriacontane, which comprises
[101597] (a) increasing or generating one or more activities selected from the group consisting of S-adenosyl-L-methionine-dependent methyltransferase in an organelle, preferably in plastids or mitochondria, especially in plastids, of a non-human organism or a part thereof, preferably a microorganism, a plant cell, a plant or a part thereof, as compared to a corresponding non-transformed wild type non-human organism or a part thereof; and
[101598] (b) growing the non-human organism or a part thereof under conditions which permit the production of hentriacontane or a composition comprising hentriacontane in said non-human organism or in the culture medium surrounding said non-human organism.

[101599] A further embodiment of the present invention relates to a process for the production of hentriacontane, which comprises
[101600] (a) increasing or generating one or more activities selected from the group consisting of b1259-protein in an organelle, preferably in plastids or mitochondria, especially in plastids, of a non-human organism or a part thereof, preferably a microorganism, a plant cell, a plant or a part thereof, as compared to a corresponding non-transformed wild type non-human organism or a part thereof; and
[101601] (b) growing the non-human organism or a part thereof under conditions which permit the production of hentriacontane or a composition comprising hentriacontane in said non-human organism or in the culture medium surrounding said non-human organism.

[101602] A further embodiment of the present invention relates to a process for the production of hentriacontane, which comprises
[101603] (a) increasing or generating one or more activities selected from the group consisting of orotidine-5′-phosphate decarboxylase in an organelle, preferably in plastids or mitochondria, especially in plastids, of a non-human organism or a part thereof, preferably a microorganism, a plant cell, a plant or a part thereof, as compared to a corresponding non-transformed wild type non-human organism or a part thereof; and
[101604] (b) growing the non-human organism or a part thereof under conditions which permit the production of hentriacontane or a composition comprising hentriacontane in said non-human organism or in the culture medium surrounding said non-human organism.

[101605] A further embodiment of the present invention relates to a process for the production of hentriacontane, which comprises
[101606] (a) increasing or generating one or more activities selected from the group consisting of ATP-dependent RNA helicase in an organelle, preferably in plastids or mitochondria, especially in plastids, of a non-human organism or a part thereof, preferably a microorganism, a plant cell, a plant or a part thereof, as compared to a corresponding non-transformed wild type non-human organism or a part thereof; and
[101607] (b) growing the non-human organism or a part thereof under conditions which permit the production of hentriacontane or a composition comprising hentriacontane in said non-human organism or in the culture medium surrounding said non-human organism.

[101608] A further embodiment of the present invention relates to a process for the production of hentriacontane, which comprises
[101609] (a) increasing or generating one or more activities selected from the group consisting of b1445-protein in an organelle, preferably in plastids or mitochondria, especially in plastids, of a non-human organism or a part thereof, preferably a microorganism, a plant cell, a plant or a part thereof, as compared to a corresponding non-transformed wild type non-human organism or a part thereof; and
[101610] (b) growing the non-human organism or a part thereof under conditions which permit the production of hentriacontane or a composition comprising hentriacontane in said non-human organism or in the culture medium surrounding said non-human organism.

[101611] A further embodiment of the present invention relates to a process for the production of hentriacontane, which comprises
[101612] (a) increasing or generating one or more activities selected from the group consisting of acid shock protein in an organelle, preferably in plastids or mitochondria, especially in plastids, of a non-human organism or a part thereof, preferably a microorganism, a plant cell, a plant or a part thereof, as compared to a corresponding non-transformed wild type non-human organism or a part thereof; and
[101613] (b) growing the non-human organism or a part thereof under conditions which permit the production of hentriacontane or a composition comprising hentriacontane in said non-human organism or in the culture medium surrounding said non-human organism.

[101614] A further embodiment of the present invention relates to a process for the production of hentriacontane, which comprises
[101615] (a) increasing or generating one or more activities selected from the group consisting of electron transport complex protein in an organelle, preferably in plastids or mitochondria, especially in plastids, of a non-human organism or a part thereof, preferably a microorganism, a plant cell, a plant or a part thereof, as compared to a corresponding non-transformed wild type non-human organism or a part thereof; and
[101616] (b) growing the non-human organism or a part thereof under conditions which permit the production of hentriacontane or a composition comprising hentriacontane in said non-human organism or in the culture medium surrounding said non-human organism.

[101617] A further embodiment of the present invention relates to a process for the production of hentriacontane, which comprises
[101618] (a) increasing or generating one or more activities selected from the group consisting of transcriptional regulator in an organelle, preferably in plastids or mitochondria, especially in plastids, of a non-human organism or a part thereof, preferably a microorganism, a plant cell, a plant or a part thereof, as compared to a corresponding non-transformed wild type non-human organism or a part thereof; and
[101619] (b) growing the non-human organism or a part thereof under conditions which permit the production of hentriacontane or a composition comprising hentriacontane in said non-human organism or in the culture medium surrounding said non-human organism.

[101620] A further embodiment of the present invention relates to a process for the production of hentriacontane, which comprises
[101621] (a) increasing or generating one or more activities selected from the group consisting of b1670-protein in an organelle, preferably in plastids or mitochondria, especially in plastids, of a non-human organism or a part thereof, preferably a microorganism, a plant cell, a plant or a part thereof, as compared to a corresponding non-transformed wild type non-human organism or a part thereof; and
[101622] (b) growing the non-human organism or a part thereof under conditions which permit the production of hentriacontane or a composition comprising hentriacontane in said non-human organism or in the culture medium surrounding said non-human organism.

[101623] A further embodiment of the present invention relates to a process for the production of hentriacontane, which comprises
[101624] (a) increasing or generating one or more activities selected from the group consisting of phospho-2-dehydro-3-deoxyheptonate aldolase in an organelle, preferably in plastids or mitochondria, especially in plastids, of a non-human organism or a part thereof, preferably a microorganism, a plant cell, a plant or a part thereof, as compared to a corresponding non-transformed wild type non-human organism or a part thereof; and
[101625] (b) growing the non-human organism or a part thereof under conditions which permit the production of hentriacontane or a composition comprising hentriacontane in said non-human organism or in the culture medium surrounding said non-human organism.

[101626] A further embodiment of the present invention relates to a process for the production of hentriacontane, which comprises
[101627] (a) increasing or generating one or more activities selected from the group consisting of b1930-protein in an organelle, preferably in plastids or mitochondria, especially in plastids, of a non-human organism or a part thereof, preferably a microorganism, a plant cell, a plant or a part thereof, as compared to a corresponding non-transformed wild type non-human organism or a part thereof; and
[101628] (b) growing the non-human organism or a part thereof under conditions which permit the production of hentriacontane or a composition comprising hentriacontane in said non-human organism or in the culture medium surrounding said non-human organism.

[101629] A further embodiment of the present invention relates to a process for the production of hentriacontane, which comprises
[101630] (a) increasing or generating one or more activities selected from the group consisting of O-antigen chain length determinant in an organelle, preferably in plastids or mitochondria, especially in plastids, of a non-human organism or a part thereof, preferably a microorganism, a plant cell, a plant or a part thereof, as compared to a corresponding non-transformed wild type non-human organism or a part thereof; and
[101631] (b) growing the non-human organism or a part thereof under conditions which permit the production of hentriacontane or a composition comprising hentriacontane in said non-human organism or in the culture medium surrounding said non-human organism.

[101632] A further embodiment of the present invention relates to a process for the production of hentriacontane, which comprises
[101633] (a) increasing or generating one or more activities selected from the group consisting of GDP-mannose 4,6-dehydratase in an organelle, preferably in plastids or mitochondria, especially in plastids, of a non-human organism or a part thereof, preferably a microorganism, a plant cell, a plant or a part thereof, as compared to a corresponding non-transformed wild type non-human organism or a part thereof; and
[101634] (b) growing the non-human organism or a part thereof under conditions which permit the production of hentriacontane or a composition comprising hentriacontane in said non-human organism or in the culture medium surrounding said non-human organism.

[101635] A further embodiment of the present invention relates to a process for the production of hentriacontane, which comprises
[101636] (a) increasing or generating one or more activities selected from the group consisting of assembly protein for periplasmic nitrate reductase in an organelle, preferably in plastids or mitochondria, especially in plastids, of a non-human organism or a part thereof, preferably a microorganism, a plant cell, a plant or a part thereof, as compared to a corresponding non-transformed wild type non-human organism or a part thereof; and
[101637] (b) growing the non-human organism or a part thereof under conditions which permit the production of hentriacontane or a composition comprising hentriacontane in said non-human organism or in the culture medium surrounding said non-human organism.

[101638] A further embodiment of the present invention relates to a process for the production of hentriacontane, which comprises
[101639] (a) increasing or generating one or more activities selected from the group consisting of ion-transport protein in an organelle, preferably in plastids or mitochondria, especially in plastids, of a non-human organism or a part thereof, preferably a microorganism, a plant cell, a plant or a part thereof, as compared to a corresponding non-transformed wild type non-human organism or a part thereof; and
[101640] (b) growing the non-human organism or a part thereof under conditions which permit the production of hentriacontane or a composition comprising hentriacontane in said non-human organism or in the culture medium surrounding said non-human organism.

[101641] A further embodiment of the present invention relates to a process for the production of hentriacontane, which comprises
[101642] (a) increasing or generating one or more activities selected from the group consisting of b2399-protein in an organelle, preferably in plastids or mitochondria, especially in plastids, of a non-human organism or a part thereof, preferably a microorganism, a plant cell, a plant or a part thereof, as compared to a corresponding non-transformed wild type non-human organism or a part thereof; and
[101643] (b) growing the non-human organism or a part thereof under conditions which permit the production of hentriacontane or a composition comprising hentriacontane in said non-human organism or in the culture medium surrounding said non-human organism.

[101644] A further embodiment of the present invention relates to a process for the production of hentriacontane, which comprises
[101645] (a) increasing or generating one or more activities selected from the group consisting of cysteine synthase A in an organelle, preferably in plastids or mitochondria, especially in plastids, of a non-human organism or a part thereof, preferably a microorganism, a plant cell, a plant or a part thereof, as compared to a corresponding non-transformed wild type non-human organism or a part thereof; and
[101646] (b) growing the non-human organism or a part thereof under conditions which permit the production of hentriacontane or a composition comprising hentriacontane in said non-human organism or in the culture medium surrounding said non-human organism.

[101647] A further embodiment of the present invention relates to a process for the production of hentriacontane, which comprises
[101648] (a) increasing or generating one or more activities selected from the group consisting of ethanolamine utilization protein in an organelle, preferably in plastids or mitochondria, especially in plastids, of a non-human organism or a part thereof, preferably a microorganism, a plant cell, a plant or a part thereof, as compared to a corresponding non-transformed wild type non-human organism or a part thereof; and
[101649] (b) growing the non-human organism or a part thereof under conditions which permit the production of hentriacontane or a composition comprising hentriacontane in said non-human organism or in the culture medium surrounding said non-human organism.

[101650] A further embodiment of the present invention relates to a process for the production of hentriacontane, which comprises
[101651] (a) increasing or generating one or more activities selected from the group consisting of sigma-54 dependent response regulator in an organelle, preferably in plastids or mitochondria, especially in plastids, of a non-human organism or a part thereof, preferably a microorganism, a plant cell, a plant or a part thereof, as compared to a corresponding non-transformed wild type non-human organism or a part thereof; and
[101652] (b) growing the non-human organism or a part thereof under conditions which permit the production of hentriacontane or a composition comprising hentriacontane in said non-human organism or in the culture medium surrounding said non-human organism.

[101653] A further embodiment of the present invention relates to a process for the production of hentriacontane, which comprises
[101654] (a) increasing or generating one or more activities selected from the group consisting of b2653-protein in an organelle, preferably in plastids or mitochondria, especially in plastids, of a non-human organism or a part thereof, preferably a microorganism, a plant cell, a plant or a part thereof, as compared to a corresponding non-transformed wild type non-human organism or a part thereof; and
[101655] (b) growing the non-human organism or a part thereof under conditions which permit the production of hentriacontane or a composition comprising hentriacontane in said non-human organism or in the culture medium surrounding said non-human organism.

[101656] A further embodiment of the present invention relates to a process for the production of hentriacontane, which comprises
[101657] (a) increasing or generating one or more activities selected from the group consisting of phosphoadenosine phosphosulfate reductase in an organelle, preferably in plastids or mitochondria, especially in plastids, of a non-human organism or a part thereof, preferably a microorganism, a plant cell, a plant or a part thereof, as compared to a corresponding non-transformed wild type non-human organism or a part thereof; and
[101658] (b) growing the non-human organism or a part thereof under conditions which permit the production of hentriacontane or a composition comprising hentriacontane in said non-human organism or in the culture medium surrounding said non-human organism.

[101659] A further embodiment of the present invention relates to a process for the production of hentriacontane, which comprises
[101660] (a) increasing or generating one or more activities selected from the group consisting of amino-acid acetyltransferase in an organelle, preferably in plastids or mitochondria, especially in plastids, of a non-human organism or a part thereof, preferably a microorganism, a plant cell, a plant or a part thereof, as compared to a corresponding non-transformed wild type non-human organism or a part thereof; and
[101661] (b) growing the non-human organism or a part thereof under conditions which permit the production of hentriacontane or a composition comprising hentriacontane in said non-human organism or in the culture medium surrounding said non-human organism.

[101662] A further embodiment of the present invention relates to a process for the production of hentriacontane, which comprises
[101663] (a) increasing or generating one or more activities selected from the group consisting of exonuclease subunit in an organelle, preferably in plastids or mitochondria, especially in plastids, of a non-human organism or a part thereof, preferably a microorganism, a plant cell, a plant or a part thereof, as compared to a corresponding non-transformed wild type non-human organism or a part thereof; and
[101664] (b) growing the non-human organism or a part thereof under conditions which permit the production of hentriacontane or a composition comprising hentriacontane in said non-human organism or in the culture medium surrounding said non-human organism.

[101665] A further embodiment of the present invention relates to a process for the production of hentriacontane, which comprises
[101666] (a) increasing or generating one or more activities selected from the group consisting of L-asparaginase in an organelle, preferably in plastids or mitochondria, especially in plastids, of a non-human organism or a part thereof, preferably a microorganism, a plant cell, a plant or a part thereof, as compared to a corresponding non-transformed wild type non-human organism or a part thereof; and
[101667] (b) growing the non-human organism or a part thereof under conditions which permit the production of hentriacontane or a composition comprising hentriacontane in said non-human organism or in the culture medium surrounding said non-human organism.

[101668] A further embodiment of the present invention relates to a process for the production of hentriacontane, which comprises
[101669] (a) increasing or generating one or more activities selected from the group consisting of ornithine decarboxylase in an organelle, preferably in plastids or mitochondria, especially in plastids, of a non-human organism or a part thereof, preferably a microorganism, a plant cell, a plant or a part thereof, as compared to a corresponding non-transformed wild type non-human organism or a part thereof; and
[101670] (b) growing the non-human organism or a part thereof under conditions which permit the production of hentriacontane or a composition comprising hentriacontane in said non-human organism or in the culture medium surrounding said non-human organism.

[101671] A further embodiment of the present invention relates to a process for the production of hentriacontane, which comprises
[101672] (a) increasing or generating one or more activities selected from the group consisting of phosphoglycolate phosphatase in an organelle, preferably in plastids or mitochondria, especially in plastids, of a non-human organism or a part thereof, preferably a microorganism, a plant cell, a plant or a part thereof, as compared to a corresponding non-transformed wild type non-human organism or a part thereof; and
[101673] (b) growing the non-human organism or a part thereof under conditions which permit the production of hentriacontane or a composition comprising hentriacontane in said non-human organism or in the culture medium surrounding said non-human organism.

[101674] A further embodiment of the present invention relates to a process for the production of hentriacontane, which comprises
[101675] (a) increasing or generating one or more activities selected from the group consisting of sugar transport system permease protein in an organelle, preferably in plastids or mitochondria, especially in plastids, of a non-human organism or a part thereof, preferably a microorganism, a plant cell, a plant or a part thereof, as compared to a corresponding non-transformed wild type non-human organism or a part thereof; and
[101676] (b) growing the non-human organism or a part thereof under conditions which permit the production of hentriacontane or a composition comprising hentriacontane in said non-human organism or in the culture medium surrounding said non-human organism.

[101677] A further embodiment of the present invention relates to a process for the production of hentriacontane, which comprises
[101678] (a) increasing or generating one or more activities selected from the group consisting of cyclin D in an organelle, preferably in plastids or mitochondria, especially in plastids, of a non-human organism or a part thereof, preferably a microorganism, a plant cell, a plant or a part thereof, as compared to a corresponding non-transformed wild type non-human organism or a part thereof; and
[101679] (b) growing the non-human organism or a part thereof under conditions which permit the production of hentriacontane or a composition comprising hentriacontane in said non-human organism or in the culture medium surrounding said non-human organism.

[101680] A further embodiment of the present invention relates to a process for the production of hentriacontane, which comprises
[101681] (a) increasing or generating one or more activities selected from the group consisting of short-chain alcohol dehydrogenase family in an organelle, preferably in plastids or mitochondria, especially in plastids, of a non-human organism or a part thereof, preferably a microorganism, a plant cell, a plant or a part thereof, as compared to a corresponding non-transformed wild type non-human organism or a part thereof; and
[101682] (b) growing the non-human organism or a part thereof under conditions which permit the production of hentriacontane or a composition comprising hentriacontane in said non-human organism or in the culture medium surrounding said non-human organism.

[101683] A further embodiment of the present invention relates to a process for the production of hentriacontane, which comprises
[101684] (a) increasing or generating one or more activities selected from the group consisting of cell division protein in an organelle, preferably in plastids or mitochondria, especially in plastids, of a non-human organism or a part thereof, preferably a microorganism, a plant cell, a plant or a part thereof, as compared to a corresponding non-transformed wild type non-human organism or a part thereof; and
[101685] (b) growing the non-human organism or a part thereof under conditions which permit the production of hentriacontane or a composition comprising hentriacontane in said non-human organism or in the culture medium surrounding said non-human organism.

[101686] A further embodiment of the present invention relates to a process for the production of hentriacontane, which comprises
[101687] (a) increasing or generating one or more activities selected from the group consisting of metal-dependent hydrolase in an organelle, preferably in plastids or mitochondria, especially in plastids, of a non-human organism or a part thereof, preferably a microorganism, a plant cell, a plant or a part thereof, as compared to a corresponding non-transformed wild type non-human organism or a part thereof; and
[101688] (b) growing the non-human organism or a part thereof under conditions which permit the production of hentriacontane or a composition comprising hentriacontane in said non-human organism or in the culture medium surrounding said non-human organism.

[101689] A further embodiment of the present invention relates to a process for the production of hentriacontane, which comprises
[101690] (a) increasing or generating one or more activities selected from the group consisting of 3-deoxy-7-phosphoheptulonate synthase in an organelle, preferably in plastids or mitochondria, especially in plastids, of a non-human organism or a part thereof, preferably a microorganism, a plant cell, a plant or a part thereof, as compared to a corresponding non-transformed wild type non-human organism or a part thereof; and
[101691] (b) growing the non-human organism or a part thereof under conditions which permit the production of hentriacontane or a composition comprising hentriacontane in said non-human organism or in the culture medium surrounding said non-human organism.

[101692] A further embodiment of the present invention relates to a process for the production of hentriacontane, which comprises
[101693] (a) increasing or generating one or more activities selected from the group consisting of YFL019C-protein in an organelle, preferably in plastids or mitochondria, especially in plastids, of a non-human organism or a part thereof, preferably a microorganism, a plant cell, a plant or a part thereof, as compared to a corresponding non-transformed wild type non-human organism or a part thereof; and
[101694] (b) growing the non-human organism or a part thereof under conditions which permit the production of hentriacontane or a composition comprising hentriacontane in said non-human organism or in the culture medium surrounding said non-human organism.

[101695] A further embodiment of the present invention relates to a process for the production of hentriacontane, which comprises
[101696] (a) increasing or generating one or more activities selected from the group consisting of dihydroxyacetone kinase in an organelle, preferably in plastids or mitochondria, especially in plastids, of a non-human organism or a part thereof, preferably a microorganism, a plant cell, a plant or a part thereof, as compared to a corresponding non-transformed wild type non-human organism or a part thereof; and
[101697] (b) growing the non-human organism or a part thereof under conditions which permit the production of hentriacontane or a composition comprising hentriacontane in said non-human organism or in the culture medium surrounding said non-human organism.

[101698] A further embodiment of the present invention relates to a process for the production of hentriacontane, which comprises
[101699] (a) increasing or generating one or more activities selected from the group consisting of methionine permease in an organelle, preferably in plastids or mitochondria, especially in plastids, of a non-human organism or a part thereof, preferably a microorganism, a plant cell, a plant or a part thereof, as compared to a corresponding non-transformed wild type non-human organism or a part thereof; and
[101700] (b) growing the non-human organism or a part thereof under conditions which permit the production of hentriacontane or a composition comprising hentriacontane in said non-human organism or in the culture medium surrounding said non-human organism.

[101701] A further embodiment of the present invention relates to a process for the production of hentriacontane, which comprises
[101702] (a) increasing or generating one or more activities selected from the group consisting of YHL039W-protein in an organelle, preferably in plastids or mitochondria, especially in plastids, of a non-human organism or a part thereof, preferably a microorganism, a plant cell, a plant or a part thereof, as compared to a corresponding non-transformed wild type non-human organism or a part thereof; and
[101703] (b) growing the non-human organism or a part thereof under conditions which permit the production of hentriacontane or a composition comprising hentriacontane in said non-human organism or in the culture medium surrounding said non-human organism.

[101704] A further embodiment of the present invention relates to a process for the production of hentriacontane, which comprises
[101705] (a) increasing or generating one or more activities selected from the group consisting of YHR022C-A-protein in an organelle, preferably in plastids or mitochondria, especially in plastids, of a non-human organism or a part thereof, preferably a microorganism, a plant cell, a plant or a part thereof, as compared to a corresponding non-transformed wild type non-human organism or a part thereof; and
[101706] (b) growing the non-human organism or a part thereof under conditions which permit the production of hentriacontane or a composition comprising hentriacontane in said non-human organism or in the culture medium surrounding said non-human organism.

[101707] A further embodiment of the present invention relates to a process for the production of hentriacontane, which comprises
[101708] (a) increasing or generating one or more activities selected from the group consisting of YJL127W-A-protein in an organelle, preferably in plastids or mitochondria, especially in plastids, of a non-human organism or a part thereof, preferably a microorganism, a plant cell, a plant or a part thereof, as compared to a corresponding non-transformed wild type non-human organism or a part thereof; and
[101709] (b) growing the non-human organism or a part thereof under conditions which permit the production of hentriacontane or a composition comprising hentriacontane in said non-human organism or in the culture medium surrounding said non-human organism.

[101710] A further embodiment of the present invention relates to a process for the production of hentriacontane, which comprises
[101711] (a) increasing or generating one or more activities selected from the group consisting of ylr157c-protein in an organelle, preferably in plastids or mitochondria, especially in plastids, of a non-human organism or a part thereof, preferably a microorganism, a plant cell, a plant or a part thereof, as compared to a corresponding non-transformed wild type non-human organism or a part thereof; and
[101712] (b) growing the non-human organism or a part thereof under conditions which permit the production of hentriacontane or a composition comprising hentriacontane in said non-human organism or in the culture medium surrounding said non-human organism.

[101713] A further embodiment of the present invention relates to a process for the production of hentriacontane, which comprises
[101714] (a) increasing or generating one or more activities selected from the group consisting of ynl321w-protein in an organelle, preferably in plastids or mitochondria, especially in plastids, of a non-human organism or a part thereof, preferably a microorganism, a plant cell, a plant or a part thereof, as compared to a corresponding non-transformed wild type non-human organism or a part thereof; and
[101715] (b) growing the non-human organism or a part thereof under conditions which permit the production of hentriacontane or a composition comprising hentriacontane in said non-human organism or in the culture medium surrounding said non-human organism.

[101716] A further embodiment of the present invention relates to a process for the production of hentriacontane, which comprises
[101717] (a) increasing or generating one or more activities selected from the group consisting of ypr170c-protein in an organelle, preferably in plastids or mitochondria, especially in plastids, of a non-human organism or a part thereof, preferably a microorganism, a plant cell, a plant or a part thereof, as compared to a corresponding non-transformed wild type non-human organism or a part thereof; and
[101718] (b) growing the non-human organism or a part thereof under conditions which permit the production of hentriacontane or a composition comprising hentriacontane in said non-human organism or in the culture medium surrounding said non-human organism.

[101719] A further embodiment of the present invention relates to a process for the production of hentriacontane, which comprises
[101720] (a) increasing or generating one or more activities selected from the group consisting of YPR172W-protein in an organelle, preferably in plastids or mitochondria, especially in plastids, of a non-human organism or a part thereof, preferably a microorganism, a plant cell, a plant or a part thereof, as compared to a corresponding non-transformed wild type non-human organism or a part thereof; and
[101721] (b) growing the non-human organism or a part thereof under conditions which permit the production of hentriacontane or a composition comprising hentriacontane in said non-human organism or in the culture medium surrounding said non-human organism.

[101722] A further embodiment of the present invention relates to a process for the production of hentriacontane, which comprises
[101723] (a) increasing or generating one or more activities selected from the group consisting of b3644-protein in an organelle, preferably in plastids or mitochondria, especially in plastids, of a non-human organism or a part thereof, preferably a microorganism, a plant cell, a plant or a part thereof, as compared to a corresponding non-transformed wild type non-human organism or a part thereof; and
[101724] (b) growing the non-human organism or a part thereof under conditions which permit the production of hentriacontane or a composition comprising hentriacontane in said non-human organism or in the culture medium surrounding said non-human organism.

[101725] A further embodiment of the present invention relates to a process for the production of hentriacontane, which comprises
[101726] (a1) increasing or generating the activity of a polypeptide comprising a polypeptide as depicted in the respective line in column 5 or 8 of Table II, application no. 20, or a homolog or fragment thereof, a consensus sequence or at least one polypeptide motif as depicted in column 8 of Table IV, application no. 20, whereby the respective line disclose in column 7 the fine chemical hentriacontane; or
[101727] increasing or generating the activity of an expression product of one or more nucleic acid molecule(s) comprising a polynucleotide as depicted in the respective line in column 5 or 8 of Table I, application no. 20, preferably the coding region thereof, or a homolog or a fragment thereof, whereby the respective line disclose in column 7 the fine chemical hentriacontane;
[101728] in an organelle, preferably in plastids or mitochondria, especially in plastids, in a non-human organism or a part thereof; preferably a microorganism, a plant cell, a plant or a part thereof, as compared to a corresponding non-transformed wild type non-human organism or a part thereof; or
[101729] (a2) increasing or generating the activity of a polypeptide comprising a polypeptide as depicted in the respective line in column 5 or 8 of Table II, application no. 20, or a homolog or a fragment thereof, a consensus sequence or at least one polypeptide motif as depicted in the respective line in column 8 of Table IV, application no. 20, which is joined to a transit peptide, whereby the respective line disclose in column 7 the fine chemical hentriacontane; or
[101730] increasing or generating the activity of an expression product of one or more nucleic acid molecule(s) comprising a polynucleotide as depicted in the respective line in column 5 or 8 of Table I, application no. 20, preferably the coding region thereof, or a homolog or a fragment thereof, which is joined to a nucleic acid sequence encoding an organelle localization sequence, preferably a plastid or a mitochondrion localization sequence, especially a plastid localization sequence, whereby the respective line disclose in column 7 the fine chemical hentriacontane;
[101731] in a non-human organism or a part thereof; preferably a microorganism, a plant cell, a plant or a part thereof, as compared to a corresponding non-transformed wild type non-human organism or a part thereof; or
[101732] (a3) increasing or generating the activity of a polypeptide comprising a polypeptide as depicted
[101733] in the respective line in column 5 or 8 of Table II, application no. 20, or a homolog or a fragment thereof, a consensus sequence or at least one polypeptide motif as depicted in the respective line in column 8 of Table IV, application no. 20, whereby the respective line disclose in column 7 the fine chemical hentriacontane; or increasing or generating the activity of an expression product of one or more nucleic acid molecule(s) comprising a polynucleotide as depicted in the respective line in column 5 or 8 of Table I, application no. 20, preferably the coding region thereof, or a homolog or a fragment thereof, whereby the respective line disclose in column 7 the fine chemical hentriacontane;
[101734] in an organelle, preferably in plastids or mitochondria, especially in plastids, in a non-human organism or a part thereof; preferably a microorganism, a plant cell, a plant or a part thereof, through transformation of the organelle, as compared to a corresponding non-transformed wild type non-human organism or a part thereof;
[101735] and
[101736] (b) growing the non-human organism under conditions which permit the production of hentriacontane, or a composition comprising hentriacontane in said non-human organism or in the culture medium surrounding said non-human organism.

[101737] Accordingly, the present invention relates to a process for the production of hentriacontane, which comprises
[101738] (a) increasing or generating the activity of a pyruvate kinase in the cytosol of a cell of a non-human organism or a part thereof, preferably a microorganism, a plant cell, a plant or a part thereof, as compared to a corresponding non-transformed wild type non-human organism or a part thereof; and
[101739] (b) growing the non-human organism or a part thereof under conditions which permit the production of hentriacontane or a composition comprising hentriacontane in said non-human organism or in the culture medium surrounding said non-human organism.

[101740] Accordingly, the present invention relates to a process for the production of hentriacontane, which comprises
[101741] (a) increasing or generating the activity of a MADS box protein transcription factor in the cytosol of a cell of a non-human organism or a part thereof, preferably a microorganism, a plant cell, a plant or a part thereof, as compared to a corresponding non-transformed wild type non-human organism or a part thereof; and
[101742] (b) growing the non-human organism or a part thereof under conditions which permit the production of hentriacontane or a composition comprising hentriacontane in said non-human organism or in the culture medium surrounding said non-human organism.

[101743] Accordingly, the present invention relates to a process for the production of hentriacontane, which comprises
[101744] (a) increasing or generating the activity of a At2g45420-protein in the cytosol of a cell of a non-human organism or a part thereof, preferably a microorganism, a plant cell, a plant or a part thereof, as compared to a corresponding non-transformed wild type non-human organism or a part thereof; and
[101745] (b) growing the non-human organism or a part thereof under conditions which permit the production of hentriacontane or a composition comprising hentriacontane in said non-human organism or in the culture medium surrounding said non-human organism.

[101746] Accordingly, the present invention relates to a process for the production of hentriacontane, which comprises
[101747] (a) increasing or generating the activity of a transcription factor in the cytosol of a cell of a non-human organism or a part thereof, preferably a microorganism, a plant cell, a plant or a part thereof, as compared to a corresponding non-transformed wild type non-human organism or a part thereof; and
[101748] (b) growing the non-human organism or a part thereof under conditions which permit the production of hentriacontane or a composition comprising hentriacontane in said non-human organism or in the culture medium surrounding said non-human organism.

[101749] Accordingly, the present invention relates to a process for the production of hentriacontane, which comprises
[101750] (a) increasing or generating the activity of a At5g43630-protein in the cytosol of a cell of a non-human organism or a part thereof, preferably a microorganism, a plant cell, a plant or a part thereof, as compared to a corresponding non-transformed wild type non-human organism or a part thereof; and
[101751] (b) growing the non-human organism or a part thereof under conditions which permit the production of hentriacontane or a composition comprising hentriacontane in said non-human organism or in the culture medium surrounding said non-human organism.

[101752] Accordingly, the present invention relates to a process for the production of hentriacontane, which comprises
[101753] (a) increasing or generating the activity of a RNA-binding protein in the cytosol of a cell of a non-human organism or a part thereof, preferably a microorganism, a plant cell, a plant or a part thereof, as compared to a corresponding non-transformed wild type non-human organism or a part thereof; and
[101754] (b) growing the non-human organism or a part thereof under conditions which permit the production of hentriacontane or a composition comprising hentriacontane in said non-human organism or in the culture medium surrounding said non-human organism.

[101755] Accordingly, the present invention relates to a process for the production of hentriacontane, which comprises
[101756] (a) increasing or generating the activity of a transcriptional regulator in the cytosol of a cell of a non-human organism or a part thereof, preferably a microorganism, a plant cell, a plant or a part thereof, as compared to a corresponding non-transformed wild type non-human organism or a part thereof; and
[101757] (b) growing the non-human organism or a part thereof under conditions which permit the production of hentriacontane or a composition comprising hentriacontane in said non-human organism or in the culture medium surrounding said non-human organism.

[101758] Accordingly, the present invention relates to a process for the production of hentriacontane, which comprises
[101759] (a) increasing or generating the activity of a fumarylacetoacetate hydrolase in the cytosol of a cell of a non-human organism or a part thereof, preferably a microorganism, a plant cell, a plant or a part thereof, as compared to a corresponding non-transformed wild type non-human organism or a part thereof; and
[101760] (b) growing the non-human organism or a part thereof under conditions which permit the production of hentriacontane or a composition comprising hentriacontane in said non-human organism or in the culture medium surrounding said non-human organism.

[101761] Accordingly, the present invention relates to a process for the production of hentriacontane, which comprises
[101762] (a) increasing or generating the activity of a spermidine synthase in the cytosol of a cell of a non-human organism or a part thereof, preferably a microorganism, a plant cell, a plant or a part thereof, as compared to a corresponding non-transformed wild type non-human organism or a part thereof; and
[101763] (b) growing the non-human organism or a part thereof under conditions which permit the production of hentriacontane or a composition comprising hentriacontane in said non-human organism or in the culture medium surrounding said non-human organism.

[101764] Accordingly, the present invention relates to a process for the production of hentriacontane, which comprises
[101765] (a) increasing or generating the activity of a serine protease in the cytosol of a cell of a non-human organism or a part thereof, preferably a microorganism, a plant cell, a plant or a part thereof, as compared to a corresponding non-transformed wild type non-human organism or a part thereof; and
[101766] (b) growing the non-human organism or a part thereof under conditions which permit the production of hentriacontane or a composition comprising hentriacontane in said non-human organism or in the culture medium surrounding said non-human organism.

[101767] Accordingly, the present invention relates to a process for the production of hentriacontane, which comprises
[101768] (a) increasing or generating the activity of a peptide chain release factor in the cytosol of a cell of a non-human organism or a part thereof, preferably a microorganism, a plant cell, a plant or a part thereof, as compared to a corresponding non-transformed wild type non-human organism or a part thereof; and
[101769] (b) growing the non-human organism or a part thereof under conditions which permit the production of hentriacontane or a composition comprising hentriacontane in said non-human organism or in the culture medium surrounding said non-human organism.

[101770] Accordingly, the present invention relates to a process for the production of hentriacontane, which comprises
[101771] (a) increasing or generating the activity of a mechanosensitive ion channel in the cytosol of a cell of a non-human organism or a part thereof, preferably a microorganism, a plant cell, a plant or a part thereof, as compared to a corresponding non-transformed wild type non-human organism or a part thereof; and
[101772] (b) growing the non-human organism or a part thereof under conditions which permit the production of hentriacontane or a composition comprising hentriacontane in said non-human organism or in the culture medium surrounding said non-human organism.

[101773] Accordingly, the present invention relates to a process for the production of hentriacontane, which comprises
[101774] (a) increasing or generating the activity of a pyrimidine-specific ribonucleoside hydrolase in the cytosol of a cell of a non-human organism or a part thereof, preferably a microorganism, a plant cell, a plant or a part thereof, as compared to a corresponding non-transformed wild type non-human organism or a part thereof; and
[101775] (b) growing the non-human organism or a part thereof under conditions which permit the production of hentriacontane or a composition comprising hentriacontane in said non-human organism or in the culture medium surrounding said non-human organism.

[101776] Accordingly, the present invention relates to a process for the production of hentriacontane, which comprises
[101777] (a) increasing or generating the activity of a inner membrane protein in the cytosol of a cell of a non-human organism or a part thereof, preferably a microorganism, a plant cell, a plant or a part thereof, as compared to a corresponding non-transformed wild type non-human organism or a part thereof; and
[101778] (b) growing the non-human organism or a part thereof under conditions which permit the production of hentriacontane or a composition comprising hentriacontane in said non-human organism or in the culture medium surrounding said non-human organism.

[101779] Accordingly, the present invention relates to a process for the production of hentriacontane, which comprises
[101780] (a) increasing or generating the activity of a b0833-protein in the cytosol of a cell of a non-human organism or a part thereof, preferably a microorganism, a plant cell, a plant or a part thereof, as compared to a corresponding non-transformed wild type non-human organism or a part thereof; and
[101781] (b) growing the non-human organism or a part thereof under conditions which permit the production of hentriacontane or a composition comprising hentriacontane in said non-human organism or in the culture medium surrounding said non-human organism.

[101782] Accordingly, the present invention relates to a process for the production of hentriacontane, which comprises
[101783] (a) increasing or generating the activity of a S-adenosyl-L-methionine-dependent methyltransferase in the cytosol of a cell of a non-human organism or a part thereof, preferably a microorganism, a plant cell, a plant or a part thereof, as compared to a corresponding non-transformed wild type non-human organism or a part thereof; and
[101784] (b) growing the non-human organism or a part thereof under conditions which permit the production of hentriacontane or a composition comprising hentriacontane in said non-human organism or in the culture medium surrounding said non-human organism.

[101785] Accordingly, the present invention relates to a process for the production of hentriacontane, which comprises
[101786] (a) increasing or generating the activity of a b1259-protein in the cytosol of a cell of a non-human organism or a part thereof, preferably a microorganism, a plant cell, a plant or a part thereof, as compared to a corresponding non-transformed wild type non-human organism or a part thereof; and
[101787] (b) growing the non-human organism or a part thereof under conditions which permit the production of hentriacontane or a composition comprising hentriacontane in said non-human organism or in the culture medium surrounding said non-human organism.

[101788] Accordingly, the present invention relates to a process for the production of hentriacontane, which comprises
[101789] (a) increasing or generating the activity of a orotidine-5′-phosphate decarboxylase in the cytosol of a cell of a non-human organism or a part thereof, preferably a microorganism, a plant cell, a plant or a part thereof, as compared to a corresponding non-transformed wild type non-human organism or a part thereof; and
[101790] (b) growing the non-human organism or a part thereof under conditions which permit the production of hentriacontane or a composition comprising hentriacontane in said non-human organism or in the culture medium surrounding said non-human organism.

[101791] Accordingly, the present invention relates to a process for the production of hentriacontane, which comprises
[101792] (a) increasing or generating the activity of a ATP-dependent RNA helicase in the cytosol of a cell of a non-human organism or a part thereof, preferably a microorganism, a plant cell, a plant or a part thereof, as compared to a corresponding non-transformed wild type non-human organism or a part thereof; and
[101793] (b) growing the non-human organism or a part thereof under conditions which permit the production of hentriacontane or a composition comprising hentriacontane in said non-human organism or in the culture medium surrounding said non-human organism.

[101794] Accordingly, the present invention relates to a process for the production of hentriacontane, which comprises
[101795] (a) increasing or generating the activity of a b1445-protein in the cytosol of a cell of a non-human organism or a part thereof, preferably a microorganism, a plant cell, a plant or a part thereof, as compared to a corresponding non-transformed wild type non-human organism or a part thereof; and
[101796] (b) growing the non-human organism or a part thereof under conditions which permit the production of hentriacontane or a composition comprising hentriacontane in said non-human organism or in the culture medium surrounding said non-human organism.

[101797] Accordingly, the present invention relates to a process for the production of hentriacontane, which comprises
[101798] (a) increasing or generating the activity of a acid shock protein in the cytosol of a cell of a non-human organism or a part thereof, preferably a microorganism, a plant cell, a plant or a part thereof, as compared to a corresponding non-transformed wild type non-human organism or a part thereof; and
[101799] (b) growing the non-human organism or a part thereof under conditions which permit the production of hentriacontane or a composition comprising hentriacontane in said non-human organism or in the culture medium surrounding said non-human organism.

[101800] Accordingly, the present invention relates to a process for the production of hentriacontane, which comprises
[101801] (a) increasing or generating the activity of a electron transport complex protein in the cytosol of a cell of a non-human organism or a part thereof, preferably a microorganism, a plant cell, a plant or a part thereof, as compared to a corresponding non-transformed wild type non-human organism or a part thereof; and
[101802] (b) growing the non-human organism or a part thereof under conditions which permit the production of hentriacontane or a composition comprising hentriacontane in said non-human organism or in the culture medium surrounding said non-human organism.

[101803] Accordingly, the present invention relates to a process for the production of hentriacontane, which comprises
[101804] (a) increasing or generating the activity of a transcriptional regulator in the cytosol of a cell of a non-human organism or a part thereof, preferably a microorganism, a plant cell, a plant or a part thereof, as compared to a corresponding non-transformed wild type non-human organism or a part thereof; and
[101805] (b) growing the non-human organism or a part thereof under conditions which permit the production of hentriacontane or a composition comprising hentriacontane in said non-human organism or in the culture medium surrounding said non-human organism.

[101806] Accordingly, the present invention relates to a process for the production of hentriacontane, which comprises
[101807] (a) increasing or generating the activity of a b1670-protein in the cytosol of a cell of a non-human organism or a part thereof, preferably a microorganism, a plant cell, a plant or a part thereof, as compared to a corresponding non-transformed wild type non-human organism or a part thereof; and
[101808] (b) growing the non-human organism or a part thereof under conditions which permit the production of hentriacontane or a composition comprising hentriacontane in said non-human organism or in the culture medium surrounding said non-human organism.

[101809] Accordingly, the present invention relates to a process for the production of hentriacontane, which comprises
[101810] (a) increasing or generating the activity of a phospho-2-dehydro-3-deoxyheptonate aldolase in the cytosol of a cell of a non-human organism or a part thereof, preferably a microorganism, a plant cell, a plant or a part thereof, as compared to a corresponding non-transformed wild type non-human organism or a part thereof; and
[101811] (b) growing the non-human organism or a part thereof under conditions which permit the production of hentriacontane or a composition comprising hentriacontane in said non-human organism or in the culture medium surrounding said non-human organism.

[101812] Accordingly, the present invention relates to a process for the production of hentriacontane, which comprises
[101813] (a) increasing or generating the activity of a b1930-protein in the cytosol of a cell of a non-human organism or a part thereof, preferably a microorganism, a plant cell, a plant or a part thereof, as compared to a corresponding non-transformed wild type non-human organism or a part thereof; and
[101814] (b) growing the non-human organism or a part thereof under conditions which permit the production of hentriacontane or a composition comprising hentriacontane in said non-human organism or in the culture medium surrounding said non-human organism.

[101815] Accordingly, the present invention relates to a process for the production of hentriacontane, which comprises
[101816] (a) increasing or generating the activity of a O-antigen chain length determinant in the cytosol of a cell of a non-human organism or a part thereof, preferably a microorganism, a plant cell, a plant or a part thereof, as compared to a corresponding non-transformed wild type non-human organism or a part thereof; and
[101817] (b) growing the non-human organism or a part thereof under conditions which permit the production of hentriacontane or a composition comprising hentriacontane in said non-human organism or in the culture medium surrounding said non-human organism.

[101818] Accordingly, the present invention relates to a process for the production of hentriacontane, which comprises
[101819] (a) increasing or generating the activity of a GDP-mannose 4,6-dehydratase in the cytosol of a cell of a non-human organism or a part thereof, preferably a microorganism, a plant cell, a plant or a part thereof, as compared to a corresponding non-transformed wild type non-human organism or a part thereof; and
[101820] (b) growing the non-human organism or a part thereof under conditions which permit the production of hentriacontane or a composition comprising hentriacontane in said non-human organism or in the culture medium surrounding said non-human organism.

[101821] Accordingly, the present invention relates to a process for the production of hentriacontane, which comprises
[101822] (a) increasing or generating the activity of a assembly protein for periplasmic nitrate reductase in the cytosol of a cell of a non-human organism or a part thereof, preferably a microorganism, a plant cell, a plant or a part thereof, as compared to a corresponding non-transformed wild type non-human organism or a part thereof; and
[101823] (b) growing the non-human organism or a part thereof under conditions which permit the production of hentriacontane or a composition comprising hentriacontane in said non-human organism or in the culture medium surrounding said non-human organism.

[101824] Accordingly, the present invention relates to a process for the production of hentriacontane, which comprises
[101825] (a) increasing or generating the activity of a ion-transport protein in the cytosol of a cell of a non-human organism or a part thereof, preferably a microorganism, a plant cell, a plant or a part thereof, as compared to a corresponding non-transformed wild type non-human organism or a part thereof; and
[101826] (b) growing the non-human organism or a part thereof under conditions which permit the production of hentriacontane or a composition comprising hentriacontane in said non-human organism or in the culture medium surrounding said non-human organism.

[101827] Accordingly, the present invention relates to a process for the production of hentriacontane, which comprises
[101828] (a) increasing or generating the activity of a b2399-protein in the cytosol of a cell of a non-human organism or a part thereof, preferably a microorganism, a plant cell, a plant or a part thereof, as compared to a corresponding non-transformed wild type non-human organism or a part thereof; and
[101829] (b) growing the non-human organism or a part thereof under conditions which permit the production of hentriacontane or a composition comprising hentriacontane in said non-human organism or in the culture medium surrounding said non-human organism.

[101830] Accordingly, the present invention relates to a process for the production of hentriacontane, which comprises
[101831] (a) increasing or generating the activity of a cysteine synthase A in the cytosol of a cell of a non-human organism or a part thereof, preferably a microorganism, a plant cell, a plant or a part thereof, as compared to a corresponding non-transformed wild type non-human organism or a part thereof; and
[101832] (b) growing the non-human organism or a part thereof under conditions which permit the production of hentriacontane or a composition comprising hentriacontane in said non-human organism or in the culture medium surrounding said non-human organism.

[101833] Accordingly, the present invention relates to a process for the production of hentriacontane, which comprises
[101834] (a) increasing or generating the activity of a ethanolamine utilization protein in the cytosol of a cell of a non-human organism or a part thereof, preferably a microorganism, a plant cell, a plant or a part thereof, as compared to a corresponding non-transformed wild type non-human organism or a part thereof; and
[101835] (b) growing the non-human organism or a part thereof under conditions which permit the production of hentriacontane or a composition comprising hentriacontane in said non-human organism or in the culture medium surrounding said non-human organism.

[101836] Accordingly, the present invention relates to a process for the production of hentriacontane, which comprises
[101837] (a) increasing or generating the activity of a sigma-54 dependent response regulator in the cytosol of a cell of a non-human organism or a part thereof, preferably a microorganism, a plant cell, a plant or a part thereof, as compared to a corresponding non-transformed wild type non-human organism or a part thereof; and
[101838] (b) growing the non-human organism or a part thereof under conditions which permit the production of hentriacontane or a composition comprising hentriacontane in said non-human organism or in the culture medium surrounding said non-human organism.

[101839] Accordingly, the present invention relates to a process for the production of hentriacontane, which comprises
[101840] (a) increasing or generating the activity of a b2653-protein in the cytosol of a cell of a non-human organism or a part thereof, preferably a microorganism, a plant cell, a plant or a part thereof, as compared to a corresponding non-transformed wild type non-human organism or a part thereof; and
[101841] (b) growing the non-human organism or a part thereof under conditions which permit the production of hentriacontane or a composition comprising hentriacontane in said non-human organism or in the culture medium surrounding said non-human organism.

[101842] Accordingly, the present invention relates to a process for the production of hentriacontane, which comprises
[101843] (a) increasing or generating the activity of a phosphoadenosine phosphosulfate reductase in the cytosol of a cell of a non-human organism or a part thereof, preferably a microorganism, a plant cell, a plant or a part thereof, as compared to a corresponding non-transformed wild type non-human organism or a part thereof; and
[101844] (b) growing the non-human organism or a part thereof under conditions which permit the production of hentriacontane or a composition comprising hentriacontane in said non-human organism or in the culture medium surrounding said non-human organism.

[101845] Accordingly, the present invention relates to a process for the production of hentriacontane, which comprises
[101846] (a) increasing or generating the activity of a amino-acid acetyltransferase in the cytosol of a cell of a non-human organism or a part thereof, preferably a microorganism, a plant cell, a plant or a part thereof, as compared to a corresponding non-transformed wild type non-human organism or a part thereof; and
[101847] (b) growing the non-human organism or a part thereof under conditions which permit the production of hentriacontane or a composition comprising hentriacontane in said non-human organism or in the culture medium surrounding said non-human organism.

[101848] Accordingly, the present invention relates to a process for the production of hentriacontane, which comprises
[101849] (a) increasing or generating the activity of a exonuclease subunit in the cytosol of a cell of a non-human organism or a part thereof, preferably a microorganism, a plant cell, a plant or a part thereof, as compared to a corresponding non-transformed wild type non-human organism or a part thereof; and
[101850] (b) growing the non-human organism or a part thereof under conditions which permit the production of hentriacontane or a composition comprising hentriacontane in said non-human organism or in the culture medium surrounding said non-human organism.

[101851] Accordingly, the present invention relates to a process for the production of hentriacontane, which comprises
[101852] (a) increasing or generating the activity of a L-asparaginase in the cytosol of a cell of a non-human organism or a part thereof, preferably a microorganism, a plant cell, a plant or a part thereof, as compared to a corresponding non-transformed wild type non-human organism or a part thereof; and
[101853] (b) growing the non-human organism or a part thereof under conditions which permit the production of hentriacontane or a composition comprising hentriacontane in said non-human organism or in the culture medium surrounding said non-human organism.

[101854] Accordingly, the present invention relates to a process for the production of hentriacontane, which comprises
[101855] (a) increasing or generating the activity of a ornithine decarboxylase in the cytosol of a cell of a non-human organism or a part thereof, preferably a microorganism, a plant cell, a plant or a part thereof, as compared to a corresponding non-transformed wild type non-human organism or a part thereof; and
[101856] (b) growing the non-human organism or a part thereof under conditions which permit the production of hentriacontane or a composition comprising hentriacontane in said non-human organism or in the culture medium surrounding said non-human organism.

[101857] Accordingly, the present invention relates to a process for the production of hentriacontane, which comprises
[101858] (a) increasing or generating the activity of a phosphoglycolate phosphatase in the cytosol of a cell of a non-human organism or a part thereof, preferably a microorganism, a plant cell, a plant or a part thereof, as compared to a corresponding non-transformed wild type non-human organism or a part thereof; and
[101859] (b) growing the non-human organism or a part thereof under conditions which permit the production of hentriacontane or a composition comprising hentriacontane in said non-human organism or in the culture medium surrounding said non-human organism.

[101860] Accordingly, the present invention relates to a process for the production of hentriacontane, which comprises
[101861] (a) increasing or generating the activity of a sugar transport system permease protein in the cytosol of a cell of a non-human organism or a part thereof, preferably a microorganism, a plant cell, a plant or a part thereof, as compared to a corresponding non-transformed wild type non-human organism or a part thereof; and
[101862] (b) growing the non-human organism or a part thereof under conditions which permit the production of hentriacontane or a composition comprising hentriacontane in said non-human organism or in the culture medium surrounding said non-human organism.

[101863] Accordingly, the present invention relates to a process for the production of hentriacontane, which comprises
[101864] (a) increasing or generating the activity of a cyclin D in the cytosol of a cell of a non-human organism or a part thereof, preferably a microorganism, a plant cell, a plant or a part thereof, as compared to a corresponding non-transformed wild type non-human organism or a part thereof; and
[101865] (b) growing the non-human organism or a part thereof under conditions which permit the production of hentriacontane or a composition comprising hentriacontane in said non-human organism or in the culture medium surrounding said non-human organism.

[101866] Accordingly, the present invention relates to a process for the production of hentriacontane, which comprises
[101867] (a) increasing or generating the activity of a short-chain alcohol dehydrogenase family in the cytosol of a cell of a non-human organism or a part thereof, preferably a microorganism, a plant cell, a plant or a part thereof, as compared to a corresponding non-transformed wild type non-human organism or a part thereof; and
[101868] (b) growing the non-human organism or a part thereof under conditions which permit the production of hentriacontane or a composition comprising hentriacontane in said non-human organism or in the culture medium surrounding said non-human organism.

[101869] Accordingly, the present invention relates to a process for the production of hentriacontane, which comprises
[101870] (a) increasing or generating the activity of a cell division protein in the cytosol of a cell of a non-human organism or a part thereof, preferably a microorganism, a plant cell, a plant or a part thereof, as compared to a corresponding non-transformed wild type non-human organism or a part thereof; and
[101871] (b) growing the non-human organism or a part thereof under conditions which permit the production of hentriacontane or a composition comprising hentriacontane in said non-human organism or in the culture medium surrounding said non-human organism.

[101872] Accordingly, the present invention relates to a process for the production of hentriacontane, which comprises
[101873] (a) increasing or generating the activity of a metal-dependent hydrolase in the cytosol of a cell of a non-human organism or a part thereof, preferably a microorganism, a plant cell, a plant or a part thereof, as compared to a corresponding non-transformed wild type non-human organism or a part thereof; and
[101874] (b) growing the non-human organism or a part thereof under conditions which permit the production of hentriacontane or a composition comprising hentriacontane in said non-human organism or in the culture medium surrounding said non-human organism.

[101875] Accordingly, the present invention relates to a process for the production of hentriacontane, which comprises
[101876] (a) increasing or generating the activity of a 3-deoxy-7-phosphoheptulonate synthase in the cytosol of a cell of a non-human organism or a part thereof, preferably a microorganism, a plant cell, a plant or a part thereof, as compared to a corresponding non-transformed wild type non-human organism or a part thereof; and
[101877] (b) growing the non-human organism or a part thereof under conditions which permit the production of hentriacontane or a composition comprising hentriacontane in said non-human organism or in the culture medium surrounding said non-human organism.

[101878] Accordingly, the present invention relates to a process for the production of hentriacontane, which comprises
[101879] (a) increasing or generating the activity of a YFL019C-protein in the cytosol of a cell of a non-human organism or a part thereof, preferably a microorganism, a plant cell, a plant or a part thereof, as compared to a corresponding non-transformed wild type non-human organism or a part thereof; and
[101880] (b) growing the non-human organism or a part thereof under conditions which permit the production of hentriacontane or a composition comprising hentriacontane in said non-human organism or in the culture medium surrounding said non-human organism.

[101881] Accordingly, the present invention relates to a process for the production of hentriacontane, which comprises
[101882] (a) increasing or generating the activity of a dihydroxyacetone kinase in the cytosol of a cell of a non-human organism or a part thereof, preferably a microorganism, a plant cell, a plant or a part thereof, as compared to a corresponding non-transformed wild type non-human organism or a part thereof; and
[101883] (b) growing the non-human organism or a part thereof under conditions which permit the production of hentriacontane or a composition comprising hentriacontane in said non-human organism or in the culture medium surrounding said non-human organism.

[101884] Accordingly, the present invention relates to a process for the production of hentriacontane, which comprises
[101885] (a) increasing or generating the activity of a methionine permease in the cytosol of a cell of a non-human organism or a part thereof, preferably a microorganism, a plant cell, a plant or a part thereof, as compared to a corresponding non-transformed wild type non-human organism or a part thereof; and
[101886] (b) growing the non-human organism or a part thereof under conditions which permit the production of hentriacontane or a composition comprising hentriacontane in said non-human organism or in the culture medium surrounding said non-human organism.

[101887] Accordingly, the present invention relates to a process for the production of hentriacontane, which comprises
[101888] (a) increasing or generating the activity of a YHL039W-protein in the cytosol of a cell of a non-human organism or a part thereof, preferably a microorganism, a plant cell, a plant or a part thereof, as compared to a corresponding non-transformed wild type non-human organism or a part thereof; and
[101889] (b) growing the non-human organism or a part thereof under conditions which permit the production of hentriacontane or a composition comprising hentriacontane in said non-human organism or in the culture medium surrounding said non-human organism.

[101890] Accordingly, the present invention relates to a process for the production of hentriacontane, which comprises
[101891] (a) increasing or generating the activity of a YHR022C-A-protein in the cytosol of a cell of a non-human organism or a part thereof, preferably a microorganism, a plant cell, a plant or a part thereof, as compared to a corresponding non-transformed wild type non-human organism or a part thereof; and
[101892] (b) growing the non-human organism or a part thereof under conditions which permit the production of hentriacontane or a composition comprising hentriacontane in said non-human organism or in the culture medium surrounding said non-human organism.

[101893] Accordingly, the present invention relates to a process for the production of hentriacontane, which comprises
[101894] (a) increasing or generating the activity of a YJL127W-A-protein in the cytosol of a cell of a non-human organism or a part thereof, preferably a microorganism, a plant cell, a plant or a part thereof, as compared to a corresponding non-transformed wild type non-human organism or a part thereof; and
[101895] (b) growing the non-human organism or a part thereof under conditions which permit the production of hentriacontane or a composition comprising hentriacontane in said non-human organism or in the culture medium surrounding said non-human organism.

[101896] Accordingly, the present invention relates to a process for the production of hentriacontane, which comprises
[101897] (a) increasing or generating the activity of a ylr157c-protein in the cytosol of a cell of a non-human organism or a part thereof, preferably a microorganism, a plant cell, a plant or a part thereof, as compared to a corresponding non-transformed wild type non-human organism or a part thereof; and
[101898] (b) growing the non-human organism or a part thereof under conditions which permit the production of hentriacontane or a composition comprising hentriacontane in said non-human organism or in the culture medium surrounding said non-human organism.

[101899] Accordingly, the present invention relates to a process for the production of hentriacontane, which comprises
[101900] (a) increasing or generating the activity of a ynl321w-protein in the cytosol of a cell of a non-human organism or a part thereof, preferably a microorganism, a plant cell, a plant or a part thereof, as compared to a corresponding non-transformed wild type non-human organism or a part thereof; and
[101901] (b) growing the non-human organism or a part thereof under conditions which permit the production of hentriacontane or a composition comprising hentriacontane in said non-human organism or in the culture medium surrounding said non-human organism.

[101902] Accordingly, the present invention relates to a process for the production of hentriacontane, which comprises
[101903] (a) increasing or generating the activity of a ypr170c-protein in the cytosol of a cell of a non-human organism or a part thereof, preferably a microorganism, a plant cell, a plant or a part thereof, as compared to a corresponding non-transformed wild type non-human organism or a part thereof; and
[101904] (b) growing the non-human organism or a part thereof under conditions which permit the production of hentriacontane or a composition comprising hentriacontane in said non-human organism or in the culture medium surrounding said non-human organism.

[101905] Accordingly, the present invention relates to a process for the production of hentriacontane, which comprises
[101906] (a) increasing or generating the activity of a YPR172W-protein in the cytosol of a cell of a non-human organism or a part thereof, preferably a microorganism, a plant cell, a plant or a part thereof, as compared to a corresponding non-transformed wild type non-human organism or a part thereof; and
[101907] (b) growing the non-human organism or a part thereof under conditions which permit the production of hentriacontane or a composition comprising hentriacontane in said non-human organism or in the culture medium surrounding said non-human organism.

[101908] Accordingly, the present invention relates to a process for the production of hentriacontane, which comprises
[101909] (a) increasing or generating the activity of a b3644-protein in the cytosol of a cell of a non-human organism or a part thereof, preferably a microorganism, a plant cell, a plant or a part thereof, as compared to a corresponding non-transformed wild type non-human organism or a part thereof; and
[101910] (b) growing the non-human organism or a part thereof under conditions which permit the production of hentriacontane or a composition comprising hentriacontane in said non-human organism or in the culture medium surrounding said non-human organism.

[101911] Accordingly, the present invention relates to a process for the production of hentriacontane, which comprises
[101912] (a) increasing or generating the activity of a polypeptide comprising a polypeptide as depicted in the respective line in column 5 or 8 of Table II, application no. 20, or a homolog or a fragment thereof, a consensus sequence or at least one polypeptide motif as depicted in the respective line in column 8 of Table IV, application no. 20, whereby the respective line disclose in column 7 the fine chemical hentriacontane; or
[101913] increasing or generating the activity of an expression product of one or more nucleic acid molecule(s) comprising a polynucleotide as depicted in the respective line in column 5 or 8 of Table I, application no. 20, preferably the coding region thereof, or a homolog or a fragment thereof, whereby the respective line disclose in column 7 the fine chemical hentriacontane;
[101914] in the cytosol of a cell of a non-human organism or a part thereof; preferably a microorganism, a plant cell, a plant or a part thereof, as compared to a corresponding non-transformed wild type non-human organism or a part thereof; and
[101915] (b) growing the non-human organism under conditions which permit the production of hentriacontane, or a composition comprising hentriacontane in said non-human organism or in the culture medium surrounding said non-human organism.

[101916] In a further embodiment the activity of the polypeptide comprising a polypeptide as depicted in the respective line in column 5 or 8 of Table II, application no. 20, or a homolog or a fragment thereof, a consensus sequence or at least one polypeptide motif as depicted in the respective line in column 8 of Table IV, application no. 20, is increased or generated non-targeted in the above-mentioned process in a microorganism or plant or a part thereof.

[101917] In a further embodiment said polypeptide has the activity of the respective polypeptide represented by a protein comprising a polypeptide as depicted in the respective line in column 5 of Table II, application no. 20.

[101918] In a further embodiment the activity of the expression product of one or more nucleic acid molecule(s) comprising a polynucleotide as depicted in the respective line in column 5 or 8 of Table I, application no. 20, preferably the coding region thereof, or a homolog or a fragment thereof, is increased or generated non-targeted in the above-mentioned process in a microorganism or plant or a part thereof.

[101919] In a further embodiment the activity of the polypeptide comprising a polypeptide as depicted in the respective line in column 5 or 8 of Table II, application no. 20, or a homolog or a fragment thereof, a consensus sequence or at least one polypeptide motif as depicted in the respective line in column 8 of Table IV, application no. 20, is increased or generated in the above-mentioned process in an organelle preferably in plastids or mitochondria, especially in plastids, of a microorganism or plant.

[101920] In a further embodiment said polypeptide has the activity of the respective polypeptide represented by a protein comprising a polypeptide as depicted in the respective line in column 5 of Table II, application no. 20.

[101921] In a further embodiment the activity of the expression product of one or more nucleic acid molecule(s) comprising a polynucleotide as depicted in the respective line in column 5 or 8 of Table I, application no. 20, preferably the coding region thereof, or a homolog or a fragment thereof, is increased or generated in the above-mentioned process in an organelle, preferably in plasids or mitochondria, especially in plastids, of a microorganism or plant.

[101922] In a further embodiment the activity of the polypeptide comprising a polypeptide as depicted in the respective line in column 5 or 8 of Table II, application no. 20, or a homolog or a fragment thereof, a consensus sequence or at least one polypeptide motif as depicted in the respective line in column 8 of Table IV, application no. 20, is increased or generated in the above-mentioned process in the cyctosol of a cell, of a microorganism or plant.

[101923] In a further embodiment said polypeptide has the activity of the respective polypeptide represented by a protein comprising a polypeptide as depicted in the respective line in column 5 of Table II, application no. 20.

[101924] In a further embodiment the activity of the expression product of one or more nucleic acid molecule(s) comprising a polynucleotide as depicted in the respective line in column 5 or 8 of Table I, application no. 20, preferably the coding region thereof, or a homolog or a fragment thereof, is increased or generated in the above-mentioned process in the cytosol of a cell, of a microorganism or plant.

[101925] [0039.1.7.20] to [0066.1.7.20] for the disclosure of these paragraphs see [0039.1.7.7] to [0066.1.7.7] above

[101926] As mentioned above the nucleic acid sequences coding for the proteins as shown in Table II, application no. 20, column 5 or 8, or homologs or fragments thereof, are joined to a nucleic acid sequence encoding a plastidic transit peptide, e.g, if for the nucleic acid molecule in Table I, column 6 the term “plastidic” is indicated. This nucleic acid sequence encoding a transit peptide ensures transport of the protein to the organelle. The nucleic acid sequence of the gene to be expressed and the nucleic acid sequence encoding the transit peptide are operably linked. Therefore the transit peptide coding sequence is fused in frame to the nucleic acid sequence coding for proteins as shown in Table II, application no. 20, column 5 or 8, or homologs or fragments thereof, e.g., if for the nucleic acid molecule in Table I, column 6 the term “plastidic” is indicated.

[101927] [0068.1.7.20] to [0072.1.7.20] for the disclosure of these paragraphs see [0068.1.7.7] to [0072.1.7.7] above

[101928] As mentioned above the nucleic acid sequences coding for the proteins as shown in the respective line in Table II, application no. 20, column 5 or 8, or homologs or fragments thereof, are joined to a nucleic acid sequence encoding a mitochondric transit peptide, e.g., if for the respective nucleic acid molecule in Table I, column 6 the term “mitochondric” is indicated. This nucleic acid sequence encoding a transit peptide ensures transport of the protein to the organelle. The nucleic acid sequence of the gene to be expressed and the nucleic acid sequence encoding the transit peptide are operably linked. Therefore the transit peptide encoding sequence is fused in frame to the nucleic acid sequence coding for proteins as shown in the respective line in Table II, application no. 20, column 5 or 8, or homologs or fragments thereof, e.g., if for the nucleic acid molecule in the respective line in Table I, column 6 the term “mitochondric” is indicated.

[101929] for the disclosure of this paragraph see [0074.1.7.7] above

[101930] for the disclosure of this paragraph see [0075.1.7.7] above

[101931] Nucleic acid sequences coding for the transit peptides may be chemically synthesized either in part or wholly according to structure of transit peptide sequences disclosed in the prior art. Said natural or chemically synthesized sequences can be directly linked to the sequences encoding the mature protein or via a linker nucleic acid sequence, which may be typically less than 500 base pairs, preferably less than 450, 400, 350, 300, 250 or 200 base pairs, more preferably less than 150, 100, 90, 80, 70, 60, 50, 40 or 30 base pairs and most preferably less than 25, 20, 15, 12, 9, 6 or 3 base pairs in length and are in frame to the coding sequence.

[101932] Furthermore favorable nucleic acid sequences encoding transit peptides may comprise sequences derived from more than one biological and/or chemical source and may include a nucleic acid sequence derived from the amino-terminal region of the mature protein, which in its native state is linked to the transit peptide. In a preferred embodiment of the invention said amino-terminal region of the mature protein is typically less than 150 amino acids, preferably less than 140, 130, 120, 110, 100 or 90 amino acids, more preferably less than 80, 70, 60, 50, 40, 35, 30, 25 or 20 amino acids and most preferably less than 19, 18, 17, 16, 15, 14, 13, 12, 11 or 10 amino acids in length. But even shorter or longer stretches are also possible. In addition target sequences, which facilitate the transport of proteins to other cell compartments such as the vacuole, endoplasmic reticulum, golgi complex, glyoxysomes, peroxisomes, mitochondria (in case of a plastidal transit peptide) or plastids, especially chloroplasts (in case of a mitochondric transit peptide) may be also part of the inventive nucleic acid sequence. The proteins translated from said inventive nucleic acid sequences are a kind of fusion proteins that means the nucleic acid sequences encoding the plastidal transit peptide for example the ones shown in Table a, preferably the last one of the Table a are joint to the respective nucleic acid sequences shown in Table I, application no. 20, columns 5 or 8, especially the coding region thereof, or homologs or fragments thereof, in case of nucleic acid sequences being expressed in plastids, and that means the nucleic acid sequences encoding the mitochondric transit peptide for example the ones shown in Table b, preferably the last one of the Table b are joint to the respective nucleic acid sequences shown in Table I, application no. 20, columns 5 or 8, especially the coding region thereof, or homologs or fragments thereof, in case of nucleic acid sequences being expressed in mitochondria. The person skilled in the art is able to join said sequences in a functional manner. Advantageously the transit peptide part is cleaved off from the protein part shown in Table II, application no. 20, columns 5 or 8, or a homolog or fragment thereof, during or after the transport into the organelles, preferably into the plastids or mitochondria, respectively.

[101933] All products of the cleavage of the preferred transit peptide shown in the last line of Table a have preferably the N-terminal amino acid sequences QIA CSS or QIA EFQLTT in front of the start methionine of the respective protein mentioned in Table II, application no. 20, column 5 or 8. or homologs or fragments thereof. Other short amino acid sequences of an range of 1 to 20 amino acids preferable 2 to 15 amino acids, more preferable 3 to 10 amino acids most preferably 4 to 8 amino acids are also possible in front of the start methionine of the protein mentioned in Table II, application no. 20, columns 5 or 8, or homologs or fragments thereof. In case of the amino acid sequence QIA CSS the three amino acids in front of the start methionine are stemming from the LIC (=ligatation independent cloning) cassette. Said short amino acid sequence is preferred in the case of the expression of E. coli genes. In case of the amino acid sequence QIA EFQLTT the six amino acids in front of the start methionine are stemming from the LIC cassette. Said short amino acid sequence is preferred in the case of the expression of S. cerevisiae genes. The skilled worker knowns that other short sequences are also useful in the expression of the respective nucleic acid molecule comprising a polynucleotide as depicted in Table I, application no. 20, column 5 or 8, preferably the coding region thereof, or a homolog or a fragment thereof. Furthermore the skilled worker is aware of the fact that there is not a need for such short sequences in the expression of the genes.

[101934] for the disclosure of this paragraph see [0077.1.7.7] above

[101935] for the disclosure of this paragraph see [0078.1.7.7] above

[101936] Alternatively to the targeting of the respective sequences shown in Table II, application no. 20, columns 5 or 8, or homologs or fragments thereof, preferably of sequences in general encoded in the nucleus with the aid of the targeting sequences mentioned for example in Table a alone, Table b alone, or in combination with other targeting sequences preferably into plastids or mitochondria, respectively, the nucleic acids of the invention can directly be introduced into the plastidal or mitochondrial genome. Therefore in a preferred embodiment the respective nucleic acid sequences shown in the respective line in Table I, application no. 20, columns 5 or 8, preferably the coding region thereof, or homologs or fragments thereof, are directly introduced and expressed in plastids e.g., if for the nucleic acid molecule in the respective line in Table I, column 6, the term “plastidic” is indicated, or are directly introduced and expressed in mitochondria e.g., if for the nucleic acid molecule in the respective line in Table I, column 6 the term “mitochondric” is indicated.

[101937] The term “introduced” in the context of this specification shall mean the insertion of a nucleic acid sequence into the organism by means of a “transfection”, “transduction” or preferably by “transformation”.

[101938] A plastid, such as a chloroplast, or a mitochondrion, has been “transformed” by an exogenous (preferably foreign) nucleic acid sequence if a nucleic acid sequence has been introduced into the plastid or mitochondrion that means that this sequence has crossed the membrane or the membranes of the plastid or of the mitochondrion. The exogenous, preferably foreign, DNA may be integrated (covalently linked) into plastid or mitochondrial DNA making up the genome of the plastid or mitochondrion, or it may remain unintegrated (e.g., by including a chloroplast origin of replication). “Stably” integrated DNA sequences are those, which are inherited through plastid or mitochondrion replication, thereby transferring new plastids or mitochondria, with the features of the integrated DNA sequence to the progeny.

[101939] [0080.1.7.20] to [0083.1.7.20] for the disclosure of these paragraphs see [0080.1.7.7] to [0083.1.7.7] above

[101940] For the process of the present invention it may be of great advantage that by transforming the plastids the intraspecies specific transgene flow is blocked, because a lot of species such as corn, cotton and rice have a strict maternal inheritance of plastids. By placing the respective genes specified in the respective line in Table I, application no. 20, columns 5 or 8, preferably the coding region, or homologs or fragments thereof, e.g. if for the nucleic acid molecule in the respective line in column 6 of Table I the term “plastidic” is indicated, in the plastids of plants, these genes will not be present in the pollen of said plants.

[101941] A further preferred embodiment of the invention relates to the use of so called “chloroplast localization sequences”, in which a first RNA sequence or molecule is capable of transporting or “chaperoning” a second RNA sequence, such as a RNA sequence transcribed from the sequences depicted in the respective line in Table I, application no. 20, columns 5 or 8, preferably the coding region thereof, or a homolog or a fragment thereof, or a sequence encoding a protein, as depicted in the respective line in Table II, application no. 20, columns 5 and 8, or a homolog or a fragment thereof, from an external environment inside a cell or outside a plastid into a chloroplast. In one embodiment the chloroplast localization signal is substantially similar or complementary to a complete or intact viroid sequence. The chloroplast localization signal may be encoded by a DNA sequence, which is transcribed into the chloroplast localization RNA.

[101942] The term “viroid” refers to a naturally occurring single stranded RNA molecule (Flores, C. R. Acad. Sci. III. 324 (10), 943 (2001)). Viroids usually contain about 200-500 nucleotides and generally exist as circular molecules. Examples of viroids that contain chloroplast localization signals include but are not limited to ASBVd, PLMVd, CChMVd and ELVd. The viroid sequence or a functional part of it can be fused to the sequences depicted in the respective line in Table I, application no. 20, columns 5 or 8, preferably the coding region thereof, or a homolog or a fragment thereof, or a sequence encoding a protein, as depicted in the respective line in Table II, application no. 20, columns 5 or 8, or a homolog or a fragment thereof, in such a manner that the viroid sequence transports a sequence transcribed from a sequence as depicted in the respective line in Table I, application no. 20 columns 5 or 8, preferably the coding region thereof, or a homolog or a fragment thereof, or a sequence encoding a protein as depicted in the respective line in Table II, application no. 20 columns 5 or 8, or a homolog or a fragment thereof, into the chloroplasts, e.g. if for the nucleic acid molecule in column 6 of Table I the term “plastidic” is indicated. A preferred embodiment uses a modified ASBVd (Navarro et al., Virology. 268 (1), 218 (2000)).

[101943] In a further specific embodiment the protein to be expressed in the plastids such as the proteins depicted in the respective line in Table II, application no. 20, columns 5 or 8, or a homolog or a fragment thereof, e.g. if for the nucleic acid molecule in the respective line in column 6 of Table I the term “plastidic” is indicated, are encoded by different nucleic acids. Such a method is disclosed in WO 2004/040973, which shall be incorporated by reference. WO 2004/040973 teaches a method, which relates to the translocation of an RNA corresponding to a gene or gene fragment into the chloroplast by means of a chloroplast localization sequence.

[101944] The genes, which should be expressed in the plant or plant cells, are split into nucleic acid fragments, which are introduced into different compartments in the plant e.g. the nucleus, the plastids and/or mitochondria. Additionally plant cells are described in which the chloroplast contains a ribozyme fused at one end to an RNA encoding a fragment of a protein used in the inventive process such that the ribozyme can trans-splice the translocated fusion RNA to the RNA encoding the gene fragment to form and as the case may be reunite the nucleic acid fragments to an intact mRNA encoding a functional protein for example as disclosed in the respective line in Table II, application no. 20, columns 5 or 8, or a homolog or a fragment thereof.

[101945] In a preferred embodiment of the invention the nucleic acid sequences as shown in the respective line in Table I, application no. 20, columns 5 or 8, preferably the coding region thereof, or homologs or fragments thereof, e.g. if for the nucleic acid molecule in the respective line in column 6 of Table I the term “plastidic” is indicated, used in the inventive process are transformed into plastids, which are metabolically active. Those plastids should preferably maintain at a high copy number in the plant or plant tissue of interest, most preferably the chloroplasts found in green plant tissues, such as leaves or cotyledons or in seeds.

[101946] For a good expression in the plastids the nucleic acid sequences as shown in the respective line in Table I, application no. 20, columns 5 or 8, preferably the coding region thereof, or homologs or fragments thereof, e.g. if for the nucleic acid molecule in the respective line in column 6 of Table I the term “plastidic” is indicated, are introduced into an expression cassette using preferably a promoter and terminater, which are active in plastids preferably a chloroplast promoter. Examples of such promoters include the psbA promoter from the gene from spinach or pea, the rbcL promoter, and the atpB promoter from corn.

[101947] [0089.1.7.20] to [0092.1.7.20] for the disclosure of these paragraphs see [0089.1.7.7] to [0092.1.7.7] above

[101948] Advantageously the process for the production of the fine chemical hentriacontane leads to an enhanced production of the respective fine chemical. The terms “enhanced” or “increase” mean at least a 10%, 20%, 30%, 40% or 50%, preferably at least 60%, 70%, 80%, 90% or 100%, more preferably 150%, 200%, 300%, 400% or 500% higher production of the respective fine chemical hentriacontane in comparison to the wild-type as defined above, e.g. that means in comparison to a non-human organism without the aforementioned modification of the activity of a protein as shown in the respective line in Table II, application no. 20, column 5 or 8, or a fragment or a homolog thereof. The modification of the activity of a protein as shown in the respective line in Table II, application no. 20, column 5 or 8, or a homolog or a fragment thereof, or their combination can be achieved by joining the protein to a respective transit peptide, e.g. if for the respective encoding nucleic acid molecule in column 6 of Table I the term “plastidic” or “mitochondric” is indicated.

[101949] Surprisingly it was found, that the transgenic expression of a protein as shown in the respective line in Table II, application no. 20, column 5, especially from the Saccaromyces cerevisiae, E. coli, Arabidopsis thaliana, Azotobacter vinelandii, Brassica napus, Glycine max, Oryza sativa, Physcomitrella patens, Synechocystis sp., Thermus thermophilus, Zea mays in a non-human organism, like a plant or a part thereof, such as Arabidopsis thaliana for example, or a microorganism, conferred a production of or an increase in hentriacontane,respectively, to the transgenic non-human organism as compared to a corresponding non-transformed wild type.

[101950] In one embodiment the transgenic expression of a protein as shown in the respective line in Table II, application no. 20, column 5 or 8, or a homolog or a fragment thereof, especially from the Saccaromyces cerevisiae, E. coli, Arabidopsis thaliana, Azotobacter vinelandii, Brassica napus, Glycine max, Oryza sativa, Physcomitrella patens, Synechocystis sp., Thermus thermophilus, Zea mays in a non-human organism, like a plant or a part thereof, such as Arabidopsis thaliana for example, or a microorganism, confers a production of or an increase in hentriacontane,respectively, to the transgenic non-human organism as compared to a corresponding non-transformed wild type.

[101951] Accordingly, in one embodiment, an increase of hentriacontane in a non-human organism, as compared to a corresponding non-transformed wild type non-human organism, is conferred in the process of the invention, if the activity of a polypeptide showing the activity of a pyruvate kinase, or if the activity of the polypeptide At2g36580, preferably represented by SEQ ID NO. 113715, or a homolog or fragment thereof, or if the activity of a polypeptide encoded by a nucleic acid molecule comprising the nucleic acid SEQ ID NO. 113714, preferably the coding region thereof, or a homolog or fragment thereof, e.g. derived from Arabidopsis thaliana, is increased or generated. For example the activity of a nucleic acid molecule or a polypeptide comprising the nucleic acid, preferably the coding region thereof, or polypeptide or the consensus sequence or the polypeptide motif, as depicted in Table I, II or IV, application No. 20, column 5 or 8 in the respective same line as the nucleic acid molecule SEQ ID NO. 113714 or polypeptide SEQ ID NO. 113715, respectively, or a homolog or a fragment thereof, is increased or generated, or if the activity pyruvate kinase is increased or generated in a non-human organism, like a microorganism or a plant cell, plant or part thereof, especially with plastidic localization, whereby the respective line disclose in column 7 the fine chemical hentriacontane. For example, an increase of the hentriacontane of at least 1 percent, particularly in a range of 28 to 48-percent is conferred as compared to a corresponding non-transformed wild type non-human organism.

[101952] Accordingly, in one embodiment, an increase of hentriacontane in a non-human organism, as compared to a corresponding non-transformed wild type non-human organism, is conferred in the process of the invention, if the activity of a polypeptide showing the activity of a MADS box protein transcription factor, or if the activity of the polypeptide At2g42830, preferably represented by SEQ ID NO. 108728, or a homolog or fragment thereof, or if the activity of a polypeptide encoded by a nucleic acid molecule comprising the nucleic acid SEQ ID NO. 108727, preferably the coding region thereof, or a homolog or fragment thereof, e.g. derived from Arabidopsis thaliana, is increased or generated. For example the activity of a nucleic acid molecule or a polypeptide comprising the nucleic acid, preferably the coding region thereof, or polypeptide or the consensus sequence or the polypeptide motif, as depicted in Table I, II or IV, application No. 20, column 5 or 8 in the respective same line as the nucleic acid molecule SEQ ID NO. 108727 or polypeptide SEQ ID NO. 108728, respectively, or a homolog or a fragment thereof, is increased or generated, or if the activity MADS box protein transcription factor is increased or generated in a non-human organism, like a microorganism or a plant cell, plant or part thereof, especially with non-targeted localization, whereby the respective line disclose in column 7 the fine chemical hentriacontane. For example, an increase of the hentriacontane of at least 1 percent, particularly in a range of 49 to 90-percent is conferred as compared to a corresponding non-transformed wild type non-human organism.

[101953] Accordingly, in one embodiment, an increase of hentriacontane in a non-human organism, as compared to a corresponding non-transformed wild type non-human organism, is conferred in the process of the invention, if the activity of a polypeptide showing the activity of a At2g45420-protein, or if the activity of the polypeptide At2g45420, preferably represented by SEQ ID NO. 1624, or a homolog or fragment thereof, or if the activity of a polypeptide encoded by a nucleic acid molecule comprising the nucleic acid SEQ ID NO. 1623, preferably the coding region thereof, or a homolog or fragment thereof, e.g. derived from Arabidopsis thaliana, is increased or generated. For example the activity of a nucleic acid molecule or a polypeptide comprising the nucleic acid, preferably the coding region thereof, or polypeptide or the consensus sequence or the polypeptide motif, as depicted in Table I, II or IV, application No. 20, column 5 or 8 in the respective same line as the nucleic acid molecule SEQ ID NO. 1623 or polypeptide SEQ ID NO. 1624, respectively, or a homolog or a fragment thereof, is increased or generated, or if the activity At2g45420-protein is increased or generated in a non-human organism, like a microorganism or a plant cell, plant or part thereof, especially with non-targeted localization, whereby the respective line disclose in column 7 the fine chemical hentriacontane. For example, an increase of the hentriacontane of at least 1 percent, particularly in a range of 34 to 100-percent is conferred as compared to a corresponding non-transformed wild type non-human organism.

[101954] Accordingly, in one embodiment, an increase of hentriacontane in a non-human organism, as compared to a corresponding non-transformed wild type non-human organism, is conferred in the process of the invention, if the activity of a polypeptide showing the activity of a transcription factor, or if the activity of the polypeptide At4g09960, preferably represented by SEQ ID NO. 109718, or a homolog or fragment thereof, or if the activity of a polypeptide encoded by a nucleic acid molecule comprising the nucleic acid SEQ ID NO. 109717, preferably the coding region thereof, or a homolog or fragment thereof, e.g. derived from Arabidopsis thaliana, is increased or generated. For example the activity of a nucleic acid molecule or a polypeptide comprising the nucleic acid, preferably the coding region thereof, or polypeptide or the consensus sequence or the polypeptide motif, as depicted in Table I, II or IV, application No. 20, column 5 or 8 in the respective same line as the nucleic acid molecule SEQ ID NO. 109717 or polypeptide SEQ ID NO. 109718, respectively, or a homolog or a fragment thereof, is increased or generated, or if the activity transcription factor is increased or generated in a non-human organism, like a microorganism or a plant cell, plant or part thereof, especially with non-targeted localization, whereby the respective line disclose in column 7 the fine chemical hentriacontane. For example, an increase of the hentriacontane of at least 1 percent, particularly in a range of 27 to 231-percent is conferred as compared to a corresponding non-transformed wild type non-human organism.

[101955] Accordingly, in one embodiment, an increase of hentriacontane in a non-human organism, as compared to a corresponding non-transformed wild type non-human organism, is conferred in the process of the invention, if the activity of a polypeptide showing the activity of a At5g43630-protein, or if the activity of the polypeptide At5g43630, preferably represented by SEQ ID NO. 142930, or a homolog or fragment thereof, or if the activity of a polypeptide encoded by a nucleic acid molecule comprising the nucleic acid SEQ ID NO. 142929, preferably the coding region thereof, or a homolog or fragment thereof, e.g. derived from Arabidopsis thaliana, is increased or generated. For example the activity of a nucleic acid molecule or a polypeptide comprising the nucleic acid, preferably the coding region thereof, or polypeptide or the consensus sequence or the polypeptide motif, as depicted in Table I, II or IV, application No. 20, column 5 or 8 in the respective same line as the nucleic acid molecule SEQ ID NO. 142929 or polypeptide SEQ ID NO. 142930, respectively, or a homolog or a fragment thereof, is increased or generated, or if the activity At5g43630-protein is increased or generated in a non-human organism, like a microorganism or a plant cell, plant or part thereof, especially with non-targeted localization, whereby the respective line disclose in column 7 the fine chemical hentriacontane. For example, an increase of the hentriacontane of at least 1 percent, particularly in a range of 26 to 37-percent is conferred as compared to a corresponding non-transformed wild type non-human organism.

[101956] Accordingly, in one embodiment, an increase of hentriacontane in a non-human organism, as compared to a corresponding non-transformed wild type non-human organism, is conferred in the process of the invention, if the activity of a polypeptide showing the activity of a RNA-binding protein, or if the activity of the polypeptide At5g60110, preferably represented by SEQ ID NO. 70007, or a homolog or fragment thereof, or if the activity of a polypeptide encoded by a nucleic acid molecule comprising the nucleic acid SEQ ID NO. 70006, preferably the coding region thereof, or a homolog or fragment thereof, e.g. derived from Arabidopsis thaliana, is increased or generated. For example the activity of a nucleic acid molecule or a polypeptide comprising the nucleic acid, preferably the coding region thereof, or polypeptide or the consensus sequence or the polypeptide motif, as depicted in Table I, II or IV, application No. 20, column 5 or 8 in the respective same line as the nucleic acid molecule SEQ ID NO. 70006 or polypeptide SEQ ID NO. 70007, respectively, or a homolog or a fragment thereof, is increased or generated, or if the activity RNA-binding protein is increased or generated in a non-human organism, like a microorganism or a plant cell, plant or part thereof, especially with non-targeted localization, whereby the respective line disclose in column 7 the fine chemical hentriacontane. For example, an increase of the hentriacontane of at least 1 percent, particularly in a range of 28 to 97-percent is conferred as compared to a corresponding non-transformed wild type non-human organism.

[101957] Accordingly, in one embodiment, an increase of hentriacontane in a non-human organism, as compared to a corresponding non-transformed wild type non-human organism, is conferred in the process of the invention, if the activity of a polypeptide showing the activity of a transcriptional regulator, or if the activity of the polypeptide AvinDRAFT_{—}3209, preferably represented by SEQ ID NO. 29287, or a homolog or fragment thereof, or if the activity of a polypeptide encoded by a nucleic acid molecule comprising the nucleic acid SEQ ID NO. 29286, preferably the coding region thereof, or a homolog or fragment thereof, e.g. derived from Azotobacter vinelandii, is increased or generated. For example the activity of a nucleic acid molecule or a polypeptide comprising the nucleic acid, preferably the coding region thereof, or polypeptide or the consensus sequence or the polypeptide motif, as depicted in Table I, II or IV, application No. 20, column 5 or 8 in the respective same line as the nucleic acid molecule SEQ ID NO. 29286 or polypeptide SEQ ID NO. 29287, respectively, or a homolog or a fragment thereof, is increased or generated, or if the activity transcriptional regulator is increased or generated in a non-human organism, like a microorganism or a plant cell, plant or part thereof, especially with non-targeted localization, whereby the respective line disclose in column 7 the fine chemical hentriacontane.

[101958] For example, an increase of the hentriacontane of at least 1 percent, particularly in a range of 55 to 116-percent is conferred as compared to a corresponding non-transformed wild type non-human organism.

[101959] Accordingly, in one embodiment, an increase of hentriacontane in a non-human organism, as compared to a corresponding non-transformed wild type non-human organism, is conferred in the process of the invention, if the activity of a polypeptide showing the activity of a fumarylacetoacetate hydrolase, or if the activity of the polypeptide AvinDRAFT_{—}5292, preferably represented by SEQ ID NO. 32309, or a homolog or fragment thereof, or if the activity of a polypeptide encoded by a nucleic acid molecule comprising the nucleic acid SEQ ID NO. 32308, preferably the coding region thereof, or a homolog or fragment thereof, e.g. derived from Azotobacter vinelandii, is increased or generated. For example the activity of a nucleic acid molecule or a polypeptide comprising the nucleic acid, preferably the coding region thereof, or polypeptide or the consensus sequence or the polypeptide motif, as depicted in Table I, II or IV, application No. 20, column 5 or 8 in the respective same line as the nucleic acid molecule SEQ ID NO. 32308 or polypeptide SEQ ID NO. 32309, respectively, or a homolog or a fragment thereof, is increased or generated, or if the activity fumarylacetoacetate hydrolase is increased or generated in a non-human organism, like a microorganism or a plant cell, plant or part thereof, especially with non-targeted localization, whereby the respective line disclose in column 7 the fine chemical hentriacontane. For example, an increase of the hentriacontane of at least 1 percent, partitularly in a range of 26 to 53-percent is conferred as compared to a corresponding non-transformed wild type non-human organism.

[101960] Accordingly, in one embodiment, an increase of hentriacontane in a non-human organism, as compared to a corresponding non-transformed wild type non-human organism, is conferred in the process of the invention, if the activity of a polypeptide showing the activity of a spermidine synthase, or if the activity of the polypeptide B0121, preferably represented by SEQ ID NO. 154510, or a homolog or fragment thereof, or if the activity of a polypeptide encoded by a nucleic acid molecule comprising the nucleic acid SEQ ID NO. 154509, preferably the coding region thereof, or a homolog or fragment thereof, e.g. derived from Escherichia coli, is increased or generated. For example the activity of a nucleic acid molecule or a polypeptide comprising the nucleic acid, preferably the coding region thereof, or polypeptide or the consensus sequence or the polypeptide motif, as depicted in Table I, II or IV, application No. 20, column 5 or 8 in the respective same line as the nucleic acid molecule SEQ ID NO. 154509 or polypeptide SEQ ID NO. 154510, respectively, or a homolog or a fragment thereof, is increased or generated, or if the activity spermidine synthase is increased or generated in a non-human organism, like a microorganism or a plant cell, plant or part thereof, especially with plastidic localization, whereby the respective line disclose in column 7 the fine chemical hentriacontane. For example, an increase of the hentriacontane of at least 1 percent, particularly in a range of 25 to 50-percent is conferred as compared to a corresponding non-transformed wild type non-human organism.

[101961] Accordingly, in one embodiment, an increase of hentriacontane in a non-human organism, as compared to a corresponding non-transformed wild type non-human organism, is conferred in the process of the invention, if the activity of a polypeptide showing the activity of a serine protease, or if the activity of the polypeptide B0161, preferably represented by SEQ ID NO. 7082, or a homolog or fragment thereof, or if the activity of a polypeptide encoded by a nucleic acid molecule comprising the nucleic acid SEQ ID NO. 7081, preferably the coding region thereof, or a homolog or fragment thereof, e.g. derived from Escherichia coli, is increased or generated. For example the activity of a nucleic acid molecule or a polypeptide comprising the nucleic acid, preferably the coding region thereof, or polypeptide or the consensus sequence or the polypeptide motif, as depicted in Table I, II or IV, application No. 20, column 5 or 8 in the respective same line as the nucleic acid molecule SEQ ID NO. 7081 or polypeptide SEQ ID NO. 7082, respectively, or a homolog or a fragment thereof, is increased or generated, or if the activity serine protease is increased or generated in a non-human organism, like a microorganism or a plant cell, plant or part thereof, especially with non-targeted localization, whereby the respective line disclose in column 7 the fine chemical hentriacontane. For example, an increase of the hentriacontane of at least 1 percent, particularly in a range of 26 to 69-percent is conferred as compared to a corresponding non-transformed wild type non-human organism.

[101962] Accordingly, in one embodiment, an increase of hentriacontane in a non-human organism, as compared to a corresponding non-transformed wild type non-human organism, is conferred in the process of the invention, if the activity of a polypeptide showing the activity of a peptide chain release factor, or if the activity of the polypeptide B0236, preferably represented by SEQ ID NO. 155231, or a homolog or fragment thereof, or if the activity of a polypeptide encoded by a nucleic acid molecule comprising the nucleic acid SEQ ID NO. 155230, preferably the coding region thereof, or a homolog or fragment thereof, e.g. derived from Escherichia coli, is increased or generated. For example the activity of a nucleic acid molecule or a polypeptide comprising the nucleic acid, preferably the coding region thereof, or polypeptide or the consensus sequence or the polypeptide motif, as depicted in Table I, II or IV, application No. 20, column 5 or 8 in the respective same line as the nucleic acid molecule SEQ ID NO. 155230 or polypeptide SEQ ID NO. 155231, respectively, or a homolog or a fragment thereof, is increased or generated, or if the activity peptide chain release factor is increased or generated in a non-human organism, like a microorganism or a plant cell, plant or part thereof, especially with non-targeted localization, whereby the respective line disclose in column 7 the fine chemical hentriacontane. For example, an increase of the hentriacontane of at least 1 percent, particularly in a range of 28 to 59-percent is conferred as compared to a corresponding non-transformed wild type non-human organism.

[101963] Accordingly, in one embodiment, an increase of hentriacontane in a non-human organism, as compared to a corresponding non-transformed wild type non-human organism, is conferred in the process of the invention, if the activity of a polypeptide showing the activity of a mechanosensitive ion channel, or if the activity of the polypeptide B0577, preferably represented by SEQ ID NO. 155371, or a homolog or fragment thereof, or if the activity of a polypeptide encoded by a nucleic acid molecule comprising the nucleic acid SEQ ID NO. 155370, preferably the coding region thereof, or a homolog or fragment thereof, e.g. derived from Escherichia coli, is increased or generated. For example the activity of a nucleic acid molecule or a polypeptide comprising the nucleic acid, preferably the coding region thereof, or polypeptide or the consensus sequence or the polypeptide motif, as depicted in Table I, II or IV, application No. 20, column 5 or 8 in the respective same line as the nucleic acid molecule SEQ ID NO. 155370 or polypeptide SEQ ID NO. 155371, respectively, or a homolog or a fragment thereof, is increased or generated, or if the activity mechanosensitive ion channel is increased or generated in a non-human organism, like a microorganism or a plant cell, plant or part thereof, especially with non-targeted localization, whereby the respective line disclose in column 7 the fine chemical hentriacontane. For example, an increase of the hentriacontane of at least 1 percent, particularly in a range of 26 to 65-percent is conferred as compared to a corresponding non-transformed wild type non-human organism.

[101964] Accordingly, in one embodiment, an increase of hentriacontane in a non-human organism, as compared to a corresponding non-transformed wild type non-human organism, is conferred in the process of the invention, if the activity of a polypeptide showing the activity of a pyrimidinespecific ribonucleoside hydrolase, or if the activity of the polypeptide B0651, preferably represented by SEQ ID NO. 143955, or a homolog or fragment thereof, or if the activity of a polypeptide encoded by a nucleic acid molecule comprising the nucleic acid SEQ ID NO. 143954, preferably the coding region thereof, or a homolog or fragment thereof, e.g. derived from Escherichia coli, is increased or generated. For example the activity of a nucleic acid molecule or a polypeptide comprising the nucleic acid, preferably the coding region thereof, or polypeptide or the consensus sequence or the polypeptide motif, as depicted in Table I, II or IV, application No. 20, column 5 or 8 in the respective same line as the nucleic acid molecule SEQ ID NO. 143954 or polypeptide SEQ ID NO. 143955, respectively, or a homolog or a fragment thereof, is increased or generated, or if the activity pyrimidine-specific ribonucleoside hydrolase is increased or generated in a non-human organism, like a microorganism or a plant cell, plant or part thereof, especially with non-targeted localization, whereby the respective line disclose in column 7 the fine chemical hentriacontane. For example, an increase of the hentriacontane of at least 1 percent, particularly in a range of 26 to 49-percent is conferred as compared to a corresponding non-transformed wild type non-human organism.

[101965] Accordingly, in one embodiment, an increase of hentriacontane in a non-human organism, as compared to a corresponding non-transformed wild type non-human organism, is conferred in the process of the invention, if the activity of a polypeptide showing the activity of a inner membrane protein, or if the activity of the polypeptide B0787, preferably represented by SEQ ID NO. 155614, or a homolog or fragment thereof, or if the activity of a polypeptide encoded by a nucleic acid molecule comprising the nucleic acid SEQ ID NO. 155613, preferably the coding region thereof, or a homolog or fragment thereof, e.g. derived from Escherichia coli, is increased or generated. For example the activity of a nucleic acid molecule or a polypeptide comprising the nucleic acid, preferably the coding region thereof, or polypeptide or the consensus sequence or the polypeptide motif, as depicted in Table I, II or IV, application No. 20, column 5 or 8 in the respective same line as the nucleic acid molecule SEQ ID NO. 155613 or polypeptide SEQ ID NO. 155614, respectively, or a homolog or a fragment thereof, is increased or generated, or if the activity inner membrane protein is increased or generated in a non-human organism, like a microorganism or a plant cell, plant or part thereof, especially with non-targeted localization, whereby the respective line disclose in column 7 the fine chemical hentriacontane. For example, an increase of the hentriacontane of at least 1 percent, particularly in a range of 24 to 107-percent is conferred as compared to a corresponding non-transformed wild type non-human organism.

[101966] Accordingly, in one embodiment, an increase of hentriacontane in a non-human organism, as compared to a corresponding non-transformed wild type non-human organism, is conferred in the process of the invention, if the activity of a polypeptide showing the activity of a b0833-protein, or if the activity of the polypeptide B0833, preferably represented by SEQ ID NO. 155658, or a homolog or fragment thereof, or if the activity of a polypeptide encoded by a nucleic acid molecule comprising the nucleic acid SEQ ID NO. 155657, preferably the coding region thereof, or a homolog or fragment thereof, e.g. derived from Escherichia coli, is increased or generated. For example the activity of a nucleic acid molecule or a polypeptide comprising the nucleic acid, preferably the coding region thereof, or polypeptide or the consensus sequence or the polypeptide motif, as depicted in Table I, II or IV, application No. 20, column 5 or 8 in the respective same line as the nucleic acid molecule SEQ ID NO. 155657 or polypeptide SEQ ID NO. 155658, respectively, or a homolog or a fragment thereof, is increased or generated, or if the activity b0833-protein is increased or generated in a non-human organism, like a microorganism or a plant cell, plant or part thereof, especially with non-targeted localization, whereby the respective line disclose in column 7 the fine chemical hentriacontane. For example, an increase of the hentriacontane of at least 1 percent, particularly in a range of 24 to 48-percent is conferred as compared to a corresponding non-transformed wild type non-human organism.

[101967] Accordingly, in one embodiment, an increase of hentriacontane in a non-human organism, as compared to a corresponding non-transformed wild type non-human organism, is conferred in the process of the invention, if the activity of a polypeptide showing the activity of a S-adenosyl-L-methionine-dependent methyltransferase, or if the activity of the polypeptide B0921, preferably represented by SEQ ID NO. 155666, or a homolog or fragment thereof, or if the activity of a polypeptide encoded by a nucleic acid molecule comprising the nucleic acid SEQ ID NO. 155665, preferably the coding region thereof, or a homolog or fragment thereof, e.g. derived from Escherichia coli, is increased or generated. For example the activity of a nucleic acid molecule or a polypeptide comprising the nucleic acid, preferably the coding region thereof, or polypeptide or the consensus sequence or the polypeptide motif, as depicted in Table I, II or IV, application No. 20, column 5 or 8 in the respective same line as the nucleic acid molecule SEQ ID NO. 155665 or polypeptide SEQ ID NO. 155666, respectively, or a homolog or a fragment thereof, is increased or generated, or if the activity S-adenosyl-L-methionine-dependent methyltransferase is increased or generated in a non-human organism, like a microorganism or a plant cell, plant or part thereof, especially with plastidic localization, whereby the respective line disclose in column 7 the fine chemical hentriacontane. For example, an increase of the hentriacontane of at least 1 percent, particularly in a range of 27 to 30-percent is conferred as compared to a corresponding non-transformed wild type non-human organism.

[101968] Accordingly, in one embodiment, an increase of hentriacontane in a non-human organism, as compared to a corresponding non-transformed wild type non-human organism, is conferred in the process of the invention, if the activity of a polypeptide showing the activity of a b1259-protein, or if the activity of the polypeptide B1259, preferably represented by SEQ ID NO. 37504, or a homolog or fragment thereof, or if the activity of a polypeptide encoded by a nucleic acid molecule comprising the nucleic acid SEQ ID NO. 37503, preferably the coding region thereof, or a homolog or fragment thereof, e.g. derived from Escherichia coli, is increased or generated. For example the activity of a nucleic acid molecule or a polypeptide comprising the nucleic acid, preferably the coding region thereof, or polypeptide or the consensus sequence or the polypeptide motif, as depicted in Table I, II or IV, application No. 20, column 5 or 8 in the respective same line as the nucleic acid molecule SEQ ID NO. 37503 or polypeptide SEQ ID NO. 37504, respectively, or a homolog or a fragment thereof, is increased or generated, or if the activity b1259-protein is increased or generated in a non-human organism, like a microorganism or a plant cell, plant or part thereof, especially with non-targeted localization, whereby the respective line disclose in column 7 the fine chemical hentriacontane. For example, an increase of the hentriacontane of at least 1 percent, particularly in a range of 27 to 72-percent is conferred as compared to a corresponding non-transformed wild type non-human organism.

[101969] Accordingly, in one embodiment, an increase of hentriacontane in a non-human organism, as compared to a corresponding non-transformed wild type non-human organism, is conferred in the process of the invention, if the activity of a polypeptide showing the activity of a orotidine-5′-phosphate decarboxylase, or if the activity of the polypeptide B1281, preferably represented by SEQ ID NO. 155891, or a homolog or fragment thereof, or if the activity of a polypeptide encoded by a nucleic acid molecule comprising the nucleic acid SEQ ID NO. 155890, preferably the coding region thereof, or a homolog or fragment thereof, e.g. derived from Escherichia coli, is increased or generated. For example the activity of a nucleic acid molecule or a polypeptide comprising the nucleic acid, preferably the coding region thereof, or polypeptide or the consensus sequence or the polypeptide motif, as depicted in Table I, II or IV, application No. 20, column 5 or 8 in the respective same line as the nucleic acid molecule SEQ ID NO. 155890 or polypeptide SEQ ID NO. 155891, respectively, or a homolog or a fragment thereof, is increased or generated, or if the activity orotidine-5′-phosphate decarboxylase is increased or generated in a non-human organism, like a microorganism or a plant cell, plant or part thereof, especially with plastidic localization, whereby the respective line disclose in column 7 the fine chemical hentriacontane. For example, an increase of the hentriacontane of at least 1 percent, particularly in a range of 41 to 48-percent is conferred as compared to a corresponding non-transformed wild type non-human organism.

[101970] Accordingly, in one embodiment, an increase of hentriacontane in a non-human organism, as compared to a corresponding non-transformed wild type non-human organism, is conferred in the process of the invention, if the activity of a polypeptide showing the activity of a ATP-dependent RNA helicase, or if the activity of the polypeptide B1343, preferably represented by SEQ ID NO. 76891, or a homolog or fragment thereof, or if the activity of a polypeptide encoded by a nucleic acid molecule comprising the nucleic acid SEQ ID NO. 76890, preferably the coding region thereof, or a homolog or fragment thereof, e.g. derived from Escherichia coli, is increased or generated. For example the activity of a nucleic acid molecule or a polypeptide comprising the nucleic acid, preferably the coding region thereof, or polypeptide or the consensus sequence or the polypeptide motif, as depicted in Table I, II or IV, application No. 20, column 5 or 8 in the respective same line as the nucleic acid molecule SEQ ID NO. 76890 or polypeptide SEQ ID NO. 76891, respectively, or a homolog or a fragment thereof, is increased or generated, or if the activity ATP-dependent RNA helicase is increased or generated in a non-human organism, like a microorganism or a plant cell, plant or part thereof, especially with non-targeted localization, whereby the respective line disclose in column 7 the fine chemical hentriacontane. For example, an increase of the hentriacontane of at least 1 percent, particularly in a range of 24 to 52-percent is conferred as compared to a corresponding non-transformed wild type non-human organism.

[101971] Accordingly, in one embodiment, an increase of hentriacontane in a non-human organism, as compared to a corresponding non-transformed wild type non-human organism, is conferred in the process of the invention, if the activity of a polypeptide showing the activity of a b1445-protein, or if the activity of the polypeptide B1445, preferably represented by SEQ ID NO. 38290, or a homolog or fragment thereof, or if the activity of a polypeptide encoded by a nucleic acid molecule comprising the nucleic acid SEQ ID NO. 38289, preferably the coding region thereof, or a homolog or fragment thereof, e.g. derived from Escherichia coli, is increased or generated. For example the activity of a nucleic acid molecule or a polypeptide comprising the nucleic acid, preferably the coding region thereof, or polypeptide or the consensus sequence or the polypeptide motif, as depicted in Table I, II or IV, application No. 20, column 5 or 8 in the respective same line as the nucleic acid molecule SEQ ID NO. 38289 or polypeptide SEQ ID NO. 38290, respectively, or a homolog or a fragment thereof, is increased or generated, or if the activity b1445-protein is increased or generated in a non-human organism, like a microorganism or a plant cell, plant or part thereof, especially with plastidic localization, whereby the respective line disclose in column 7 the fine chemical hentriacontane. For example, an increase of the hentriacontane of at least 1 percent, particularly in a range of 27 to 47-percent is conferred as compared to a corresponding non-transformed wild type non-human organism.

[101972] Accordingly, in one embodiment, an increase of hentriacontane in a non-human organism, as compared to a corresponding non-transformed wild type non-human organism, is conferred in the process of the invention, if the activity of a polypeptide showing the activity of a acid shock protein, or if the activity of the polypeptide B1597, preferably represented by SEQ ID NO. 38301, or a homolog or fragment thereof, or if the activity of a polypeptide encoded by a nucleic acid molecule comprising the nucleic acid SEQ ID NO. 38300, preferably the coding region thereof, or a homolog or fragment thereof, e.g. derived from Escherichia coli, is increased or generated. For example the activity of a nucleic acid molecule or a polypeptide comprising the nucleic acid, preferably the coding region thereof, or polypeptide or the consensus sequence or the polypeptide motif, as depicted in Table I, II or IV, application No. 20, column 5 or 8 in the respective same line as the nucleic acid molecule SEQ ID NO. 38300 or polypeptide SEQ ID NO. 38301, respectively, or a homolog or a fragment thereof, is increased or generated, or if the activity acid shock protein is increased or generated in a non-human organism, like a microorganism or a plant cell, plant or part thereof, especially with non-targeted localization, whereby the respective line disclose in column 7 the fine chemical hentriacontane. For example, an increase of the hentriacontane of at least 1 percent, particularly in a range of 38 to 96-percent is conferred as compared to a corresponding non-transformed wild type non-human organism.

[101973] Accordingly, in one embodiment, an increase of hentriacontane in a non-human organism, as compared to a corresponding non-transformed wild type non-human organism, is conferred in the process of the invention, if the activity of a polypeptide showing the activity of a electron transport complex protein, or if the activity of the polypeptide B1627, preferably represented by SEQ ID NO. 38346, or a homolog or fragment thereof, or if the activity of a polypeptide encoded by a nucleic acid molecule comprising the nucleic acid SEQ ID NO. 38345, preferably the coding region thereof, or a homolog or fragment thereof, e.g. derived from Escherichia coli, is increased or generated. For example the activity of a nucleic acid molecule or a polypeptide comprising the nucleic acid, preferably the coding region thereof, or polypeptide or the consensus sequence or the polypeptide motif, as depicted in Table I, II or IV, application No. 20, column 5 or 8 in the respective same line as the nucleic acid molecule SEQ ID NO. 38345 or polypeptide SEQ ID NO. 38346, respectively, or a homolog or a fragment thereof, is increased or generated, or if the activity electron transport complex protein is increased or generated in a non-human organism, like a microorganism or a plant cell, plant or part thereof, especially with plastidic localization, whereby the respective line disclose in column 7 the fine chemical hentriacontane. For example, an increase of the hentriacontane of at least 1 percent, particularly in a range of 29 to 40-percent is conferred as compared to a corresponding non-transformed wild type non-human organism.

[101974] Accordingly, in one embodiment, an increase of hentriacontane in a non-human organism, as compared to a corresponding non-transformed wild type non-human organism, is conferred in the process of the invention, if the activity of a polypeptide showing the activity of a transcriptional regulator, or if the activity of the polypeptide B1649, preferably represented by SEQ ID NO. 156393, or a homolog or fragment thereof, or if the activity of a polypeptide encoded by a nucleic acid molecule comprising the nucleic acid SEQ ID NO. 156392, preferably the coding region thereof, or a homolog or fragment thereof, e.g. derived from Escherichia coli, is increased or generated. For example the activity of a nucleic acid molecule or a polypeptide comprising the nucleic acid, preferably the coding region thereof, or polypeptide or the consensus sequence or the polypeptide motif, as depicted in Table I, II or IV, application No. 20, column 5 or 8 in the respective same line as the nucleic acid molecule SEQ ID NO. 156392 or polypeptide SEQ ID NO. 156393, respectively, or a homolog or a fragment thereof, is increased or generated, or if the activity transcriptional regulator is increased or generated in a non-human organism, like a microorganism or a plant cell, plant or part thereof, especially with plastidic localization, whereby the respective line disclose in column 7 the fine chemical hentriacontane. For example, an increase of the hentriacontane of at least 1 percent, particularly in a range of 28 to 48-percent is conferred as compared to a corresponding non-transformed wild type non-human organism.

[101975] Accordingly, in one embodiment, an increase of hentriacontane in a non-human organism, as compared to a corresponding non-transformed wild type non-human organism, is conferred in the process of the invention, if the activity of a polypeptide showing the activity of a b1670-protein, or if the activity of the polypeptide B1670, preferably represented by SEQ ID NO. 78754, or a homolog or fragment thereof, or if the activity of a polypeptide encoded by a nucleic acid molecule comprising the nucleic acid SEQ ID NO. 78753, preferably the coding region thereof, or a homolog or fragment thereof, e.g. derived from Escherichia coli, is increased or generated. For example the activity of a nucleic acid molecule or a polypeptide comprising the nucleic acid, preferably the coding region thereof, or polypeptide or the consensus sequence or the polypeptide motif, as depicted in Table I, II or IV, application No. 20, column 5 or 8 in the respective same line as the nucleic acid molecule SEQ ID NO. 78753 or polypeptide SEQ ID NO. 78754, respectively, or a homolog or a fragment thereof, is increased or generated, or if the activity b1670-protein is increased or generated in a non-human organism, like a microorganism or a plant cell, plant or part thereof, especially with non-targeted localization, whereby the respective line disclose in column 7 the fine chemical hentriacontane. For example, an increase of the hentriacontane of at least 1 percent, particularly in a range of 30 to 48-percent is conferred as compared to a corresponding non-transformed wild type non-human organism.

[101976] Accordingly, in one embodiment, an increase of hentriacontane in a non-human organism, as compared to a corresponding non-transformed wild type non-human organism, is conferred in the process of the invention, if the activity of a polypeptide showing the activity of a phospho-2-dehydro-3-deoxyheptonate aldolase, or if the activity of the polypeptide B1704, preferably represented by SEQ ID NO. 156543, or a homolog or fragment thereof, or if the activity of a polypeptide encoded by a nucleic acid molecule comprising the nucleic acid SEQ ID NO. 156542, preferably the coding region thereof, or a homolog or fragment thereof, e.g. derived from Escherichia coli, is increased or generated. For example the activity of a nucleic acid molecule or a polypeptide comprising the nucleic acid, preferably the coding region thereof, or polypeptide or the consensus sequence or the polypeptide motif, as depicted in Table I, II or IV, application No. 20, column 5 or 8 in the respective same line as the nucleic acid molecule SEQ ID NO. 156542 or polypeptide SEQ ID NO. 156543, respectively, or a homolog or a fragment thereof, is increased or generated, or if the activity phospho-2-dehydro-3-deoxyheptonate aldolase is increased or generated in a non-human organism, like a microorganism or a plant cell, plant or part thereof, especially with plastidic localization, whereby the respective line disclose in column 7 the fine chemical hentriacontane. For example, an increase of the hentriacontane of at least 1 percent, particularly in a range of 25 to 83-percent is conferred as compared to a corresponding non-transformed wild type non-human organism.

[101977] Accordingly, in one embodiment, an increase of hentriacontane in a non-human organism, as compared to a corresponding non-transformed wild type non-human organism, is conferred in the process of the invention, if the activity of a polypeptide showing the activity of a b1930-protein, or if the activity of the polypeptide B1930, preferably represented by SEQ ID NO. 79182, or a homolog or fragment thereof, or if the activity of a polypeptide encoded by a nucleic acid molecule comprising the nucleic acid SEQ ID NO. 79181, preferably the coding region thereof, or a homolog or fragment thereof, e.g. derived from Escherichia coli, is increased or generated. For example the activity of a nucleic acid molecule or a polypeptide comprising the nucleic acid, preferably the coding region thereof, or polypeptide or the consensus sequence or the polypeptide motif, as depicted in Table I, II or IV, application No. 20, column 5 or 8 in the respective same line as the nucleic acid molecule SEQ ID NO. 79181 or polypeptide SEQ ID NO. 79182, respectively, or a homolog or a fragment thereof, is increased or generated, or if the activity b1930-protein is increased or generated in a non-human organism, like a microorganism or a plant cell, plant or part thereof, especially with non-targeted localization, whereby the respective line disclose in column 7 the fine chemical hentriacontane. For example, an increase of the hentriacontane of at least 1 percent, particularly in a range of 30 to 52-percent is conferred as compared to a corresponding non-transformed wild type non-human organism.

[101978] Accordingly, in one embodiment, an increase of hentriacontane in a non-human organism, as compared to a corresponding non-transformed wild type non-human organism, is conferred in the process of the invention, if the activity of a polypeptide showing the activity of a O-antigen chain length determinant, or if the activity of the polypeptide B2027, preferably represented by SEQ ID NO. 79218, or a homolog or fragment thereof, or if the activity of a polypeptide encoded by a nucleic acid molecule comprising the nucleic acid SEQ ID NO. 79217, preferably the coding region thereof, or a homolog or fragment thereof, e.g. derived from Escherichia coli, is increased or generated. For example the activity of a nucleic acid molecule or a polypeptide comprising the nucleic acid, preferably the coding region thereof, or polypeptide or the consensus sequence or the polypeptide motif, as depicted in Table I, II or IV, application No. 20, column 5 or 8 in the respective same line as the nucleic acid molecule SEQ ID NO. 79217 or polypeptide SEQ ID NO. 79218, respectively, or a homolog or a fragment thereof, is increased or generated, or if the activity O-antigen chain length determinant is increased or generated in a non-human organism, like a microorganism or a plant cell, plant or part thereof, especially with non-targeted localization, whereby the respective line disclose in column 7 the fine chemical hentriacontane. For example, an increase of the hentriacontane of at least 1 percent, particularly in a range of 26 to 43-percent is conferred as compared to a corresponding non-transformed wild type non-human organism.

[101979] Accordingly, in one embodiment, an increase of hentriacontane in a non-human organism, as compared to a corresponding non-transformed wild type non-human organism, is conferred in the process of the invention, if the activity of a polypeptide showing the activity of a GDP-mannose 4,6-dehydratase, or if the activity of the polypeptide B2053, preferably represented by SEQ ID NO. 104278, or a homolog or fragment thereof, or if the activity of a polypeptide encoded by a nucleic acid molecule comprising the nucleic acid SEQ ID NO. 104277, preferably the coding region thereof, or a homolog or fragment thereof, e.g. derived from Escherichia coli, is increased or generated. For example the activity of a nucleic acid molecule or a polypeptide comprising the nucleic acid, preferably the coding region thereof, or polypeptide or the consensus sequence or the polypeptide motif, as depicted in Table I, II or IV, application No. 20, column 5 or 8 in the respective same line as the nucleic acid molecule SEQ ID NO. 104277 or polypeptide SEQ ID NO. 104278, respectively, or a homolog or a fragment thereof, is increased or generated, or if the activity GDP-mannose 4,6-dehydratase is increased or generated in a non-human organism, like a microorganism or a plant cell, plant or part thereof, especially with non-targeted localization, whereby the respective line disclose in column 7 the fine chemical hentriacontane. For example, an increase of the hentriacontane of at least 1 percent, particularly in a range of 24 to 41-percent is conferred as compared to a corresponding non-transformed wild type non-human organism.

[101980] Accordingly, in one embodiment, an increase of hentriacontane in a non-human organism, as compared to a corresponding non-transformed wild type non-human organism, is conferred in the process of the invention, if the activity of a polypeptide showing the activity of a assembly protein for periplasmic nitrate reductase, or if the activity of the polypeptide B2207, preferably represented by SEQ ID NO. 156811, or a homolog or fragment thereof, or if the activity of a polypeptide encoded by a nucleic acid molecule comprising the nucleic acid SEQ ID NO. 156810, preferably the coding region thereof, or a homolog or fragment thereof, e.g. derived from Escherichia coli, is increased or generated. For example the activity of a nucleic acid molecule or a polypeptide comprising the nucleic acid, preferably the coding region thereof, or polypeptide or the consensus sequence or the polypeptide motif, as depicted in Table I, II or IV, application No. 20, column 5 or 8 in the respective same line as the nucleic acid molecule SEQ ID NO. 156810 or polypeptide SEQ ID NO. 156811, respectively, or a homolog or a fragment thereof, is increased or generated, or if the activity assembly protein for periplasmic nitrate reductase is increased or generated in a non-human organism, like a microorganism or a plant cell, plant or part thereof, especially with plastidic localization, whereby the respective line disclose in column 7 the fine chemical hentriacontane. For example, an increase of the hentriacontane of at least 1 percent, particularly in a range of 32 to 43-percent is conferred as compared to a corresponding non-transformed wild type non-human organism.

[101981] Accordingly, in one embodiment, an increase of hentriacontane in a non-human organism, as compared to a corresponding non-transformed wild type non-human organism, is conferred in the process of the invention, if the activity of a polypeptide showing the activity of a ion-transport protein, or if the activity of the polypeptide B2389, preferably represented by SEQ ID NO. 146239, or a homolog or fragment thereof, or if the activity of a polypeptide encoded by a nucleic acid molecule comprising the nucleic acid SEQ ID NO. 146238, preferably the coding region thereof, or a homolog or fragment thereof, e.g. derived from Escherichia coli, is increased or generated. For example the activity of a nucleic acid molecule or a polypeptide comprising the nucleic acid, preferably the coding region thereof, or polypeptide or the consensus sequence or the polypeptide motif, as depicted in Table I, II or IV, application No. 20, column 5 or 8 in the respective same line as the nucleic acid molecule SEQ ID NO. 146238 or polypeptide SEQ ID NO. 146239, respectively, or a homolog or a fragment thereof, is increased or generated, or if the activity ion-transport protein is increased or generated in a non-human organism, like a microorganism or a plant cell, plant or part thereof, especially with non-targeted localization, whereby the respective line disclose in column 7 the fine chemical hentriacontane. For example, an increase of the hentriacontane of at least 1 percent, particularly in a range of 26 to 47-percent is conferred as compared to a corresponding non-transformed wild type non-human organism.

[101982] Accordingly, in one embodiment, an increase of hentriacontane in a non-human organism, as compared to a corresponding non-transformed wild type non-human organism, is conferred in the process of the invention, if the activity of a polypeptide showing the activity of a b2399-protein, or if the activity of the polypeptide B2399, preferably represented by SEQ ID NO. 39238, or a homolog or fragment thereof, or if the activity of a polypeptide encoded by a nucleic acid molecule comprising the nucleic acid SEQ ID NO. 39237, preferably the coding region thereof, or a homolog or fragment thereof, e.g. derived from Escherichia coli, is increased or generated. For example the activity of a nucleic acid molecule or a polypeptide comprising the nucleic acid, preferably the coding region thereof, or polypeptide or the consensus sequence or the polypeptide motif, as depicted in Table I, II or IV, application No. 20, column 5 or 8 in the respective same line as the nucleic acid molecule SEQ ID NO. 39237 or polypeptide SEQ ID NO. 39238, respectively, or a homolog or a fragment thereof, is increased or generated, or if the activity b2399-protein is increased or generated in a non-human organism, like a microorganism or a plant cell, plant or part thereof, especially with non-targeted localization, whereby the respective line disclose in column 7 the fine chemical hentriacontane. For example, an increase of the hentriacontane of at least 1 percent, particularly in a range of 97 to 168-percent is conferred as compared to a corresponding non-transformed wild type non-human organism.

[101983] Accordingly, in one embodiment, an increase of hentriacontane in a non-human organism, as compared to a corresponding non-transformed wild type non-human organism, is conferred in the process of the invention, if the activity of a polypeptide showing the activity of a cysteine synthase A, or if the activity of the polypeptide B2414, preferably represented by SEQ ID NO. 39301, or a homolog or fragment thereof, or if the activity of a polypeptide encoded by a nucleic acid molecule comprising the nucleic acid SEQ ID NO. 39300, preferably the coding region thereof, or a homolog or fragment thereof, e.g. derived from Escherichia coli, is increased or generated. For example the activity of a nucleic acid molecule or a polypeptide comprising the nucleic acid, preferably the coding region thereof, or polypeptide or the consensus sequence or the polypeptide motif, as depicted in Table I, II or IV, application No. 20, column 5 or 8 in the respective same line as the nucleic acid molecule SEQ ID NO. 39300 or polypeptide SEQ ID NO. 39301, respectively, or a homolog or a fragment thereof, is increased or generated, or if the activity cysteine synthase A is increased or generated in a non-human organism, like a microorganism or a plant cell, plant or part thereof, especially with non-targeted localization, whereby the respective line disclose in column 7 the fine chemical hentriacontane. For example, an increase of the hentriacontane of at least 1 percent, particularly in a range of 31 to 77-percent is conferred as compared to a corresponding non-transformed wild type non-human organism.

[101984] Accordingly, in one embodiment, an increase of hentriacontane in a non-human organism, as compared to a corresponding non-transformed wild type non-human organism, is conferred in the process of the invention, if the activity of a polypeptide showing the activity of a ethanolamine utilization protein, or if the activity of the polypeptide B2439, preferably represented by SEQ ID NO. 115629, or a homolog or fragment thereof, or if the activity of a polypeptide encoded by a nucleic acid molecule comprising the nucleic acid SEQ ID NO. 115628, preferably the coding region thereof, or a homolog or fragment thereof, e.g. derived from Escherichia coli, is increased or generated. For example the activity of a nucleic acid molecule or a polypeptide comprising the nucleic acid, preferably the coding region thereof, or polypeptide or the consensus sequence or the polypeptide motif, as depicted in Table I, II or IV, application No. 20, column 5 or 8 in the respective same line as the nucleic acid molecule SEQ ID NO. 115628 or polypeptide SEQ ID NO. 115629, respectively, or a homolog or a fragment thereof, is increased or generated, or if the activity ethanolamine utilization protein is increased or generated in a non-human organism, like a microorganism or a plant cell, plant or part thereof, especially with non-targeted localization, whereby the respective line disclose in column 7 the fine chemical hentriacontane. For example, an increase of the hentriacontane of at least 1 percent, particularly in a range of 28 to 49-percent is conferred as compared to a corresponding non-transformed wild type non-human organism.

[101985] Accordingly, in one embodiment, an increase of hentriacontane in a non-human organism, as compared to a corresponding non-transformed wild type non-human organism, is conferred in the process of the invention, if the activity of a polypeptide showing the activity of a sigma-54 dependent response regulator, or if the activity of the polypeptide B2554, preferably represented by SEQ ID NO. 156911, or a homolog or fragment thereof, or if the activity of a polypeptide encoded by a nucleic acid molecule comprising the nucleic acid SEQ ID NO. 156910, preferably the coding region thereof, or a homolog or fragment thereof, e.g. derived from Escherichia coli, is increased or generated. For example the activity of a nucleic acid molecule or a polypeptide comprising the nucleic acid, preferably the coding region thereof, or polypeptide or the consensus sequence or the polypeptide motif, as depicted in Table I, II or IV, application No. 20, column 5 or 8 in the respective same line as the nucleic acid molecule SEQ ID NO. 156910 or polypeptide SEQ ID NO. 156911, respectively, or a homolog or a fragment thereof, is increased or generated, or if the activity sigma-54 dependent response regulator is increased or generated in a non-human organism, like a microorganism or a plant cell, plant or part thereof, especially with plastidic localization, whereby the respective line disclose in column 7 the fine chemical hentriacontane. For example, an increase of the hentriacontane of at least 1 percent, particularly in a range of 28 to 97-percent is conferred as compared to a corresponding non-transformed wild type non-human organism.

[101986] Accordingly, in one embodiment, an increase of hentriacontane in a non-human organism, as compared to a corresponding non-transformed wild type non-human organism, is conferred in the process of the invention, if the activity of a polypeptide showing the activity of a b2653-protein, or if the activity of the polypeptide B2653, preferably represented by SEQ ID NO. 146289, or a homolog or fragment thereof, or if the activity of a polypeptide encoded by a nucleic acid molecule comprising the nucleic acid SEQ ID NO. 146288, preferably the coding region thereof, or a homolog or fragment thereof, e.g. derived from Escherichia coli, is increased or generated. For example the activity of a nucleic acid molecule or a polypeptide comprising the nucleic acid, preferably the coding region thereof, or polypeptide or the consensus sequence or the polypeptide motif, as depicted in Table I, II or IV, application No. 20, column 5 or 8 in the respective same line as the nucleic acid molecule SEQ ID NO. 146288 or polypeptide SEQ ID NO. 146289, respectively, or a homolog or a fragment thereof, is increased or generated, or if the activity b2653-protein is increased or generated in a non-human organism, like a microorganism or a plant cell, plant or part thereof, especially with non-targeted localization, whereby the respective line disclose in column 7 the fine chemical hentriacontane. For example, an increase of the hentriacontane of at least 1 percent, particularly in a range of 28 to 43-percent is conferred as compared to a corresponding non-transformed wild type non-human organism.

[101987] Accordingly, in one embodiment, an increase of hentriacontane in a non-human organism, as compared to a corresponding non-transformed wild type non-human organism, is conferred in the process of the invention, if the activity of a polypeptide showing the activity of a phosphoadenosine phosphosulfate reductase, or if the activity of the polypeptide B2762, preferably represented by SEQ ID NO. 81452, or a homolog or fragment thereof, or if the activity of a polypeptide encoded by a nucleic acid molecule comprising the nucleic acid SEQ ID NO. 81451, preferably the coding region thereof, or a homolog or fragment thereof, e.g. derived from Escherichia coli, is increased or generated. For example the activity of a nucleic acid molecule or a polypeptide comprising the nucleic acid, preferably the coding region thereof, or polypeptide or the consensus sequence or the polypeptide motif, as depicted in Table I, II or IV, application No. 20, column 5 or 8 in the respective same line as the nucleic acid molecule SEQ ID NO. 81451 or polypeptide SEQ ID NO. 81452, respectively, or a homolog or a fragment thereof, is increased or generated, or if the activity phosphoadenosine phosphosulfate reductase is increased or generated in a non-human organism, like a microorganism or a plant cell, plant or part thereof, especially with non-targeted localization, whereby the respective line disclose in column 7 the fine chemical hentriacontane. For example, an increase of the hentriacontane of at least 1 percent, particularly in a range of 31 to 39-percent is conferred as compared to a corresponding non-transformed wild type non-human organism.

[101988] Accordingly, in one embodiment, an increase of hentriacontane in a non-human organism, as compared to a corresponding non-transformed wild type non-human organism, is conferred in the process of the invention, if the activity of a polypeptide showing the activity of a amino-acid acetyltransferase, or if the activity of the polypeptide B2818, preferably represented by SEQ ID NO. 81577, or a homolog or fragment thereof, or if the activity of a polypeptide encoded by a nucleic acid molecule comprising the nucleic acid SEQ ID NO. 81576, preferably the coding region thereof, or a homolog or fragment thereof, e.g. derived from Escherichia coli, is increased or generated. For example the activity of a nucleic acid molecule or a polypeptide comprising the nucleic acid, preferably the coding region thereof, or polypeptide or the consensus sequence or the polypeptide motif, as depicted in Table I, II or IV, application No. 20, column 5 or 8 in the respective same line as the nucleic acid molecule SEQ ID NO. 81576 or polypeptide SEQ ID NO. 81577, respectively, or a homolog or a fragment thereof, is increased or generated, or if the activity amino-acid acetyltransferase is increased or generated in a non-human organism, like a microorganism or a plant cell, plant or part thereof, especially with non-targeted localization, whereby the respective line disclose in column 7 the fine chemical hentriacontane. For example, an increase of the hentriacontane of at least 1 percent, particularly in a range of 24 to 125-percent is conferred as compared to a corresponding non-transformed wild type non-human organism.

[101989] Accordingly, in one embodiment, an increase of hentriacontane in a non-human organism, as compared to a corresponding non-transformed wild type non-human organism, is conferred in the process of the invention, if the activity of a polypeptide showing the activity of a exonuclease subunit, or if the activity of the polypeptide B2822, preferably represented by SEQ ID NO. 157129, or a homolog or fragment thereof, or if the activity of a polypeptide encoded by a nucleic acid molecule comprising the nucleic acid SEQ ID NO. 157128, preferably the coding region thereof, or a homolog or fragment thereof, e.g. derived from Escherichia coli, is increased or generated. For example the activity of a nucleic acid molecule or a polypeptide comprising the nucleic acid, preferably the coding region thereof, or polypeptide or the consensus sequence or the polypeptide motif, as depicted in Table I, II or IV, application No. 20, column 5 or 8 in the respective same line as the nucleic acid molecule SEQ ID NO. 157128 or polypeptide SEQ ID NO. 157129, respectively, or a homolog or a fragment thereof, is increased or generated, or if the activity exonuclease subunit is increased or generated in a non-human organism, like a microorganism or a plant cell, plant or part thereof, especially with non-targeted localization, whereby the respective line disclose in column 7 the fine chemical hentriacontane. For example, an increase of the hentriacontane of at least 1 percent, particularly in a range of 27 to 47 -percent is conferred as compared to a corresponding non-transformed wild type non-human organism.

[101990] Accordingly, in one embodiment, an increase of hentriacontane in a non-human organism, as compared to a corresponding non-transformed wild type non-human organism, is conferred in the process of the invention, if the activity of a polypeptide showing the activity of a L-asparaginase, or if the activity of the polypeptide B2957, preferably represented by SEQ ID NO. 41500, or a homolog or fragment thereof, or if the activity of a polypeptide encoded by a nucleic acid molecule comprising the nucleic acid SEQ ID NO. 41499, preferably the coding region thereof, or a homolog or fragment thereof, e.g. derived from Escherichia coli, is increased or generated. For example the activity of a nucleic acid molecule or a polypeptide comprising the nucleic acid, preferably the coding region thereof, or polypeptide or the consensus sequence or the polypeptide motif, as depicted in Table I, II or IV, application No. 20, column 5 or 8 in the respective same line as the nucleic acid molecule SEQ ID NO. 41499 or polypeptide SEQ ID NO. 41500, respectively, or a homolog or a fragment thereof, is increased or generated, or if the activity L-asparaginase is increased or generated in a non-human organism, like a microorganism or a plant cell, plant or part thereof, especially with non-targeted localization, whereby the respective line disclose in column 7 the fine chemical hentriacontane. For example, an increase of the hentriacontane of at least 1 percent, particularly in a range of 38 to 65-percent is conferred as compared to a corresponding non-transformed wild type non-human organism.

[101991] Accordingly, in one embodiment, an increase of hentriacontane in a non-human organism, as compared to a corresponding non-transformed wild type non-human organism, is conferred in the process of the invention, if the activity of a polypeptide showing the activity of a ornithine decarboxylase, or if the activity of the polypeptide B2965, preferably represented by SEQ ID NO. 157322, or a homolog or fragment thereof, or if the activity of a polypeptide encoded by a nucleic acid molecule comprising the nucleic acid SEQ ID NO. 157321, preferably the coding region thereof, or a homolog or fragment thereof, e.g. derived from Escherichia coli, is increased or generated. For example the activity of a nucleic acid molecule or a polypeptide comprising the nucleic acid, preferably the coding region thereof, or polypeptide or the consensus sequence or the polypeptide motif, as depicted in Table I, II or IV, application No. 20, column 5 or 8 in the respective same line as the nucleic acid molecule SEQ ID NO. 157321 or polypeptide SEQ ID NO. 157322, respectively, or a homolog or a fragment thereof, is increased or generated, or if the activity ornithine decarboxylase is increased or generated in a non-human organism, like a microorganism or a plant cell, plant or part thereof, especially with plastidic localization, whereby the respective line disclose in column 7 the fine chemical hentriacontane. For example, an increase of the hentriacontane of at least 1 percent, particularly in a range of 37 to 114-percent is conferred as compared to a corresponding non-transformed wild type non-human organism.

[101992] Accordingly, in one embodiment, an increase of hentriacontane in a non-human organism, as compared to a corresponding non-transformed wild type non-human organism, is conferred in the process of the invention, if the activity of a polypeptide showing the activity of a phosphoglycolate phosphatase, or if the activity of the polypeptide B3385, preferably represented by SEQ ID NO. 157451, or a homolog or fragment thereof, or if the activity of a polypeptide encoded by a nucleic acid molecule comprising the nucleic acid SEQ ID NO. 157450, preferably the coding region thereof, or a homolog or fragment thereof, e.g. derived from Escherichia coli, is increased or generated. For example the activity of a nucleic acid molecule or a polypeptide comprising the nucleic acid, preferably the coding region thereof, or polypeptide or the consensus sequence or the polypeptide motif, as depicted in Table I, II or IV, application No. 20, column 5 or 8 in the respective same line as the nucleic acid molecule SEQ ID NO. 157450 or polypeptide SEQ ID NO. 157451, respectively, or a homolog or a fragment thereof, is increased or generated, or if the activity phosphoglycolate phosphatase is increased or generated in a non-human organism, like a microorganism or a plant cell, plant or part thereof, especially with plastidic localization, whereby the respective line disclose in column 7 the fine chemical hentriacontane. For example, an increase of the hentriacontane of at least 1 percent, particularly in a range of 35 to 97-percent is conferred as compared to a corresponding non-transformed wild type non-human organism.

[101993] Accordingly, in one embodiment, an increase of hentriacontane in a non-human organism, as compared to a corresponding non-transformed wild type non-human organism, is conferred in the process of the invention, if the activity of a polypeptide showing the activity of a sugar transport system permease protein, or if the activity of the polypeptide B3568, preferably represented by SEQ ID NO. 125265, or a homolog or fragment thereof, or if the activity of a polypeptide encoded by a nucleic acid molecule comprising the nucleic acid SEQ ID NO. 125264, preferably the coding region thereof, or a homolog or fragment thereof, e.g. derived from Escherichia coli, is increased or generated. For example the activity of a nucleic acid molecule or a polypeptide comprising the nucleic acid, preferably the coding region thereof, or polypeptide or the consensus sequence or the polypeptide motif, as depicted in Table I, II or IV, application No. 20, column 5 or 8 in the respective same line as the nucleic acid molecule SEQ ID NO. 125264 or polypeptide SEQ ID NO. 125265, respectively, or a homolog or a fragment thereof, is increased or generated, or if the activity sugar transport system permease protein is increased or generated in a non-human organism, like a microorganism or a plant cell, plant or part thereof, especially with plastidic localization, whereby the respective line disclose in column 7 the fine chemical hentriacontane. For example, an increase of the hentriacontane of at least 1 percent, particularly in a range of 27 to 47-percent is conferred as compared to a corresponding non-transformed wild type non-human organism.

[101994] Accordingly, in one embodiment, an increase of hentriacontane in a non-human organism, as compared to a corresponding non-transformed wild type non-human organism, is conferred in the process of the invention, if the activity of a polypeptide showing the activity of a cyclin D, or if the activity of the polypeptide GM02LC44512, preferably represented by SEQ ID NO. 46851, or a homolog or fragment thereof, or if the activity of a polypeptide encoded by a nucleic acid molecule comprising the nucleic acid SEQ ID NO. 46850, preferably the coding region thereof, or a homolog or fragment thereof, e.g. derived from Glycine max, is increased or generated. For example the activity of a nucleic acid molecule or a polypeptide comprising the nucleic acid, preferably the coding region thereof, or polypeptide or the consensus sequence or the polypeptide motif, as depicted in Table I, II or IV, application No. 20, column 5 or 8 in the respective same line as the nucleic acid molecule SEQ ID NO. 46850 or polypeptide SEQ ID NO. 46851, respectively, or a homolog or a fragment thereof, is increased or generated, or if the activity cyclin D is increased or generated in a non-human organism, like a microorganism or a plant cell, plant or part thereof, especially with non-targeted localization, whereby the respective line disclose in column 7 the fine chemical hentriacontane. For example, an increase of the hentriacontane of at least 1 percent, particularly in a range of 31 to 89-percent is conferred as compared to a corresponding non-transformed wild type non-human organism.

[101995] Accordingly, in one embodiment, an increase of hentriacontane in a non-human organism, as compared to a corresponding non-transformed wild type non-human organism, is conferred in the process of the invention, if the activity of a polypeptide showing the activity of a short-chain alcohol dehydrogenase family, or if the activity of the polypeptide Slr2124, preferably represented by SEQ ID NO. 59371, or a homolog or fragment thereof, or if the activity of a polypeptide encoded by a nucleic acid molecule comprising the nucleic acid SEQ ID NO. 59370, preferably the coding region thereof, or a homolog or fragment thereof, e.g. derived from Synechocystis sp., is increased or generated. For example the activity of a nucleic acid molecule or a polypeptide comprising the nucleic acid, preferably the coding region thereof, or polypeptide or the consensus sequence or the polypeptide motif, as depicted in Table I, II or IV, application No. 20, column 5 or 8 in the respective same line as the nucleic acid molecule SEQ ID NO. 59370 or polypeptide SEQ ID NO. 59371, respectively, or a homolog or a fragment thereof, is increased or generated, or if the activity short-chain alcohol dehydrogenase family is increased or generated in a non-human organism, like a microorganism or a plant cell, plant or part thereof, especially with plastidic localization, whereby the respective line disclose in column 7 the fine chemical hentriacontane. For example, an increase of the hentriacontane of at least 1 percent, particularly in a range of 25 to 42-percent is conferred as compared to a corresponding non-transformed wild type non-human organism.

[101996] Accordingly, in one embodiment, an increase of hentriacontane in a non-human organism, as compared to a corresponding non-transformed wild type non-human organism, is conferred in the process of the invention, if the activity of a polypeptide showing the activity of a cell division protein, or if the activity of the polypeptide TTC0035, preferably represented by SEQ ID NO. 60302, or a homolog or fragment thereof, or if the activity of a polypeptide encoded by a nucleic acid molecule comprising the nucleic acid SEQ ID NO. 60301, preferably the coding region thereof, or a homolog or fragment thereof, e.g. derived from Thermus thermophilus, is increased or generated. For example the activity of a nucleic acid molecule or a polypeptide comprising the nucleic acid, preferably the coding region thereof, or polypeptide or the consensus sequence or the polypeptide motif, as depicted in Table I, II or IV, application No. 20, column 5 or 8 in the respective same line as the nucleic acid molecule SEQ ID NO. 60301 or polypeptide SEQ ID NO. 60302, respectively, or a homolog or a fragment thereof, is increased or generated, or if the activity cell division protein is increased or generated in a non-human organism, like a microorganism or a plant cell, plant or part thereof, especially with non-targeted localization, whereby the respective line disclose in column 7 the fine chemical hentriacontane. For example, an increase of the hentriacontane of at least 1 percent, particularly in a range of 52 to 117-percent is conferred as compared to a corresponding non-transformed wild type non-human organism.

[101997] Accordingly, in one embodiment, an increase of hentriacontane in a non-human organism, as compared to a corresponding non-transformed wild type non-human organism, is conferred in the process of the invention, if the activity of a polypeptide showing the activity of a metal-dependent hydrolase, or if the activity of the polypeptide TTC0917, preferably represented by SEQ ID NO. 61554, or a homolog or fragment thereof, or if the activity of a polypeptide encoded by a nucleic acid molecule comprising the nucleic acid SEQ ID NO. 61553, preferably the coding region thereof, or a homolog or fragment thereof, e.g. derived from Thermus thermophilus, is increased or generated. For example the activity of a nucleic acid molecule or a polypeptide comprising the nucleic acid, preferably the coding region thereof, or polypeptide or the consensus sequence or the polypeptide motif, as depicted in Table I, II or IV, application No. 20, column 5 or 8 in the respective same line as the nucleic acid molecule SEQ ID NO. 61553 or polypeptide SEQ ID NO. 61554, respectively, or a homolog or a fragment thereof, is increased or generated, or if the activity metal-dependent hydrolase is increased or generated in a non-human organism, like a microorganism or a plant cell, plant or part thereof, especially with non-targeted localization, whereby the respective line disclose in column 7 the fine chemical hentriacontane. For example, an increase of the hentriacontane of at least 1 percent, particularly in a range of 25 to 93-percent is conferred as compared to a corresponding non-transformed wild type non-human organism.

[101998] Accordingly, in one embodiment, an increase of hentriacontane in a non-human organism, as compared to a corresponding non-transformed wild type non-human organism, is conferred in the process of the invention, if the activity of a polypeptide showing the activity of a 3-deoxy-7-phosphoheptulonate synthase, or if the activity of the polypeptide Ybr249c, preferably represented by SEQ ID NO. 88880, or a homolog or fragment thereof, or if the activity of a polypeptide encoded by a nucleic acid molecule comprising the nucleic acid SEQ ID NO. 88879, preferably the coding region thereof, or a homolog or fragment thereof, e.g. derived from Saccharomyces cerevisiae, is increased or generated. For example the activity of a nucleic acid molecule or a polypeptide comprising the nucleic acid, preferably the coding region thereof, or polypeptide or the consensus sequence or the polypeptide motif, as depicted in Table I, II or IV, application No. 20, column 5 or 8 in the respective same line as the nucleic acid molecule SEQ ID NO. 88879 or polypeptide SEQ ID NO. 88880, respectively, or a homolog or a fragment thereof, is increased or generated, or if the activity 3-deoxy-7-phosphoheptulonate synthase is increased or generated in a non-human organism, like a microorganism or a plant cell, plant or part thereof, especially with plastidic localization, whereby the respective line disclose in column 7 the fine chemical hentriacontane. For example, an increase of the hentriacontane of at least 1 percent, particularly in a range of 31 to 88-percent is conferred as compared to a corresponding non-transformed wild type non-human organism.

[101999] Accordingly, in one embodiment, an increase of hentriacontane in a non-human organism, as compared to a corresponding non-transformed wild type non-human organism, is conferred in the process of the invention, if the activity of a polypeptide showing the activity of a YFL019C-protein, or if the activity of the polypeptide Yfl019c, preferably represented by SEQ ID NO. 64145, or a homolog or fragment thereof, or if the activity of a polypeptide encoded by a nucleic acid molecule comprising the nucleic acid SEQ ID NO. 64144, preferably the coding region thereof, or a homolog or fragment thereof, e.g. derived from Saccharomyces cerevisiae, is increased or generated. For example the activity of a nucleic acid molecule or a polypeptide comprising the nucleic acid, preferably the coding region thereof, or polypeptide or the consensus sequence or the polypeptide motif, as depicted in Table I, II or IV, application No. 20, column 5 or 8 in the respective same line as the nucleic acid molecule SEQ ID NO. 64144 or polypeptide SEQ ID NO. 64145, respectively, or a homolog or a fragment thereof, is increased or generated, or if the activity YFL019C-protein is increased or generated in a non-human organism, like a microorganism or a plant cell, plant or part thereof, especially with non-targeted localization, whereby the respective line disclose in column 7 the fine chemical hentriacontane. For example, an increase of the hentriacontane of at least 1 percent, particularly in a range of 40 to 1100-percent is conferred as compared to a corresponding non-transformed wild type non-human organism.

[102000] Accordingly, in one embodiment, an increase of hentriacontane in a non-human organism, as compared to a corresponding non-transformed wild type non-human organism, is conferred in the process of the invention, if the activity of a polypeptide showing the activity of a dihydroxyacetone kinase, or if the activity of the polypeptide Yfl053w, preferably represented by SEQ ID NO. 120310, or a homolog or fragment thereof, or if the activity of a polypeptide encoded by a nucleic acid molecule comprising the nucleic acid SEQ ID NO. 120309, preferably the coding region thereof, or a homolog or fragment thereof, e.g. derived from Saccharomyces cerevisiae, is increased or generated. For example the activity of a nucleic acid molecule or a polypeptide comprising the nucleic acid, preferably the coding region thereof, or polypeptide or the consensus sequence or the polypeptide motif, as depicted in Table I, II or IV, application No. 20, column 5 or 8 in the respective same line as the nucleic acid molecule SEQ ID NO. 120309 or polypeptide SEQ ID NO. 120310, respectively, or a homolog or a fragment thereof, is increased or generated, or if the activity dihydroxyacetone kinase is increased or generated in a non-human organism, like a microorganism or a plant cell, plant or part thereof, especially with non-targeted localization, whereby the respective line disclose in column 7 the fine chemical hentriacontane. For example, an increase of the hentriacontane of at least 1 percent, particularly in a range of 25 to 56-percent is conferred as compared to a corresponding non-transformed wild type non-human organism.

[102001] Accordingly, in one embodiment, an increase of hentriacontane in a non-human organism, as compared to a corresponding non-transformed wild type non-human organism, is conferred in the process of the invention, if the activity of a polypeptide showing the activity of a methionine permease, or if the activity of the polypeptide YGRO55W, preferably represented by SEQ ID NO. 157718, or a homolog or fragment thereof, or if the activity of a polypeptide encoded by a nucleic acid molecule comprising the nucleic acid SEQ ID NO. 157717, preferably the coding region thereof, or a homolog or fragment thereof, e.g. derived from Saccharomyces cerevisiae, is increased or generated. For example the activity of a nucleic acid molecule or a polypeptide comprising the nucleic acid, preferably the coding region thereof, or polypeptide or the consensus sequence or the polypeptide motif, as depicted in Table I, II or IV, application No. 20, column 5 or 8 in the respective same line as the nucleic acid molecule SEQ ID NO. 157717 or polypeptide SEQ ID NO. 157718, respectively, or a homolog or a fragment thereof, is increased or generated, or if the activity methionine permease is increased or generated in a non-human organism, like a microorganism or a plant cell, plant or part thereof, especially with plastidic localization, whereby the respective line disclose in column 7 the fine chemical hentriacontane. For example, an increase of the hentriacontane of at least 1 percent, particularly in a range of 26 to 41-percent is conferred as compared to a corresponding non-transformed wild type non-human organism.

[102002] Accordingly, in one embodiment, an increase of hentriacontane in a non-human organism, as compared to a corresponding non-transformed wild type non-human organism, is conferred in the process of the invention, if the activity of a polypeptide showing the activity of a YHL039W-protein, or if the activity of the polypeptide YHL039W, preferably represented by SEQ ID NO. 157833, or a homolog or fragment thereof, or if the activity of a polypeptide encoded by a nucleic acid molecule comprising the nucleic acid SEQ ID NO. 157832, preferably the coding region thereof, or a homolog or fragment thereof, e.g. derived from Saccharomyces cerevisiae, is increased or generated. For example the activity of a nucleic acid molecule or a polypeptide comprising the nucleic acid, preferably the coding region thereof, or polypeptide or the consensus sequence or the polypeptide motif, as depicted in Table I, II or IV, application No. 20, column 5 or 8 in the respective same line as the nucleic acid molecule SEQ ID NO. 157832 or polypeptide SEQ ID NO. 157833, respectively, or a homolog or a fragment thereof, is increased or generated, or if the activity YHL039W-protein is increased or generated in a non-human organism, like a microorganism or a plant cell, plant or part thereof, especially with plastidic localization, whereby the respective line disclose in column 7 the fine chemical hentriacontane. For example, an increase of the hentriacontane of at least 1 percent, particularly in a range of 25 to 53-percent is conferred as compared to a corresponding non-transformed wild type non-human organism.

[102003] Accordingly, in one embodiment, an increase of hentriacontane in a non-human organism, as compared to a corresponding non-transformed wild type non-human organism, is conferred in the process of the invention, if the activity of a polypeptide showing the activity of a YHR022C-A-protein, or if the activity of the polypeptide Yhr022c-a, preferably represented by SEQ ID NO. 157859, or a homolog or fragment thereof, or if the activity of a polypeptide encoded by a nucleic acid molecule comprising the nucleic acid SEQ ID NO. 157858, preferably the coding region thereof, or a homolog or fragment thereof, e.g. derived from Saccharomyces cerevisiae, is increased or generated. For example the activity of a nucleic acid molecule or a polypeptide comprising the nucleic acid, preferably the coding region thereof, or polypeptide or the consensus sequence or the polypeptide motif, as depicted in Table I, II or IV, application No. 20, column 5 or 8 in the respective same line as the nucleic acid molecule SEQ ID NO. 157858 or polypeptide SEQ ID NO. 157859, respectively, or a homolog or a fragment thereof, is increased or generated, or if the activity YHR022C-A-protein is increased or generated in a non-human organism, like a microorganism or a plant cell, plant or part thereof, especially with non-targeted localization, whereby the respective line disclose in column 7 the fine chemical hentriacontane. For example, an increase of the hentriacontane of at least 1 percent, particularly in a range of 25 to 111-percent is conferred as compared to a corresponding non-transformed wild type non-human organism.

[102004] Accordingly, in one embodiment, an increase of hentriacontane in a non-human organism, as compared to a corresponding non-transformed wild type non-human organism, is conferred in the process of the invention, if the activity of a polypeptide showing the activity of a YJL127W-A-protein, or if the activity of the polypeptide Yjl127w-a, preferably represented by SEQ ID NO. 97632, or a homolog or fragment thereof, or if the activity of a polypeptide encoded by a nucleic acid molecule comprising the nucleic acid SEQ ID NO. 97631, preferably the coding region thereof, or a homolog or fragment thereof, e.g. derived from Saccharomyces cerevisiae, is increased or generated. For example the activity of a nucleic acid molecule or a polypeptide comprising the nucleic acid, preferably the coding region thereof, or polypeptide or the consensus sequence or the polypeptide motif, as depicted in Table I, II or IV, application No. 20, column 5 or 8 in the respective same line as the nucleic acid molecule SEQ ID NO. 97631 or polypeptide SEQ ID NO. 97632, respectively, or a homolog or a fragment thereof, is increased or generated, or if the activity YJL127W-A-protein is increased or generated in a non-human organism, like a microorganism or a plant cell, plant or part thereof, especially with non-targeted localization, whereby the respective line disclose in column 7 the fine chemical hentriacontane. For example, an increase of the hentriacontane of at least 1 percent, particularly in a range of 36 to 78-percent is conferred as compared to a corresponding non-transformed wild type non-human organism.

[102005] Accordingly, in one embodiment, an increase of hentriacontane in a non-human organism, as compared to a corresponding non-transformed wild type non-human organism, is conferred in the process of the invention, if the activity of a polypeptide showing the activity of a ylr157c-protein, or if the activity of the polypeptide Ylr157c, preferably represented by SEQ ID NO. 157863, or a homolog or fragment thereof, or if the activity of a polypeptide encoded by a nucleic acid molecule comprising the nucleic acid SEQ ID NO. 157862, preferably the coding region thereof, or a homolog or fragment thereof, e.g. derived from Saccharomyces cerevisiae, is increased or generated. For example the activity of a nucleic acid molecule or a polypeptide comprising the nucleic acid, preferably the coding region thereof, or polypeptide or the consensus sequence or the polypeptide motif, as depicted in Table I, II or IV, application No. 20, column 5 or 8 in the respective same line as the nucleic acid molecule SEQ ID NO. 157862 or polypeptide SEQ ID NO. 157863, respectively, or a homolog or a fragment thereof, is increased or generated, or if the activity ylr157c-protein is increased or generated in a non-human organism, like a microorganism or a plant cell, plant or part thereof, especially with plastidic localization, whereby the respective line disclose in column 7 the fine chemical hentriacontane. For example, an increase of the hentriacontane of at least 1 percent, particularly in a range of 26 to 45-percent is conferred as compared to a corresponding non-transformed wild type non-human organism.

[102006] Accordingly, in one embodiment, an increase of hentriacontane in a non-human organism, as compared to a corresponding non-transformed wild type non-human organism, is conferred in the process of the invention, if the activity of a polypeptide showing the activity of a ynl321w-protein, or if the activity of the polypeptide Ynl321w, preferably represented by SEQ ID NO. 129547, or a homolog or fragment thereof, or if the activity of a polypeptide encoded by a nucleic acid molecule comprising the nucleic acid SEQ ID NO. 129546, preferably the coding region thereof, or a homolog or fragment thereof, e.g. derived from Saccharomyces cerevisiae, is increased or generated. For example the activity of a nucleic acid molecule or a polypeptide comprising the nucleic acid, preferably the coding region thereof, or polypeptide or the consensus sequence or the polypeptide motif, as depicted in Table I, II or IV, application No. 20, column 5 or 8 in the respective same line as the nucleic acid molecule SEQ ID NO. 129546 or polypeptide SEQ ID NO. 129547, respectively, or a homolog or a fragment thereof, is increased or generated, or if the activity ynl321w-protein is increased or generated in a non-human organism, like a microorganism or a plant cell, plant or part thereof, especially with plastidic localization, whereby the respective line disclose in column 7 the fine chemical hentriacontane. For example, an increase of the hentriacontane of at least 1 percent, particularly in a range of 25 to 57-percent is conferred as compared to a corresponding non-transformed wild type non-human organism.

[102007] Accordingly, in one embodiment, an increase of hentriacontane in a non-human organism, as compared to a corresponding non-transformed wild type non-human organism, is conferred in the process of the invention, if the activity of a polypeptide showing the activity of a ypr170c-protein, or if the activity of the polypeptide Ypr170c, preferably represented by SEQ ID NO. 113648, or a homolog or fragment thereof, or if the activity of a polypeptide encoded by a nucleic acid molecule comprising the nucleic acid SEQ ID NO. 113647, preferably the coding region thereof, or a homolog or fragment thereof, e.g. derived from Saccharomyces cerevisiae, is increased or generated. For example the activity of a nucleic acid molecule or a polypeptide comprising the nucleic acid, preferably the coding region thereof, or polypeptide or the consensus sequence or the polypeptide motif, as depicted in Table I, II or IV, application No. 20, column 5 or 8 in the respective same line as the nucleic acid molecule SEQ ID NO. 113647 or polypeptide SEQ ID NO. 113648, respectively, or a homolog or a fragment thereof, is increased or generated, or if the activity ypr170c-protein is increased or generated in a non-human organism, like a microorganism or a plant cell, plant or part thereof, especially with plastidic localization, whereby the respective line disclose in column 7 the fine chemical hentriacontane. For example, an increase of the hentriacontane of at least 1 percent, particularly in a range of 32 to 72-percent is conferred as compared to a corresponding non-transformed wild type non-human organism.

[102008] Accordingly, in one embodiment, an increase of hentriacontane in a non-human organism, as compared to a corresponding non-transformed wild type non-human organism, is conferred in the process of the invention, if the activity of a polypeptide showing the activity of a YPR172W-protein, or if the activity of the polypeptide YPR172W, preferably represented by SEQ ID NO. 158034, or a homolog or fragment thereof, or if the activity of a polypeptide encoded by a nucleic acid molecule comprising the nucleic acid SEQ ID NO. 158033, preferably the coding region thereof, or a homolog or fragment thereof, e.g. derived from Saccharomyces cerevisiae, is increased or generated. For example the activity of a nucleic acid molecule or a polypeptide comprising the nucleic acid, preferably the coding region thereof, or polypeptide or the consensus sequence or the polypeptide motif, as depicted in Table I, II or IV, application No. 20, column 5 or 8 in the respective same line as the nucleic acid molecule SEQ ID NO. 158033 or polypeptide SEQ ID NO. 158034, respectively, or a homolog or a fragment thereof, is increased or generated, or if the activity YPR172W-protein is increased or generated in a non-human organism, like a microorganism or a plant cell, plant or part thereof, especially with non-targeted localization, whereby the respective line disclose in column 7 the fine chemical hentriacontane. For example, an increase of the hentriacontane of at least 1 percent, particularly in a range of 26 to 72-percent is conferred as compared to a corresponding non-transformed wild type non-human organism.

[102009] Accordingly, in one embodiment, an increase of hentriacontane in a non-human organism, as compared to a corresponding non-transformed wild type non-human organism, is conferred in the process of the invention, if the activity of a polypeptide showing the activity of a b3644-protein, or if the activity of the polypeptide B3644, preferably represented by SEQ ID NO. 125349, or a homolog or fragment thereof, or if the activity of a polypeptide encoded by a nucleic acid molecule comprising the nucleic acid SEQ ID NO. 125348, preferably the coding region thereof, or a homolog or fragment thereof, e.g. derived from Escherichia coli, is increased or generated. For example the activity of a nucleic acid molecule or a polypeptide comprising the nucleic acid, preferably the coding region thereof, or polypeptide or the consensus sequence or the polypeptide motif, as depicted in Table I, II or IV, application No. 20, column 5 or 8 in the respective same line as the nucleic acid molecule SEQ ID NO. 125348 or polypeptide SEQ ID NO. 125349, respectively, or a homolog or a fragment thereof, is increased or generated, or if the activity b3644-protein is increased or generated in a non-human organism, like a microorganism or a plant cell, plant or part thereof, especially with non-targeted localization, whereby the respective line disclose in column 7 the fine chemical hentriacontane. For example, an increase of the hentriacontane of at least 1 percent, particularly in a range of 8 to 450-percent is conferred as compared to a corresponding non-transformed wild type non-human organism.

[102010] [0096.1.7.20] to [0103.1.7.20] for the disclosure of these paragraphs see [0096.1.7.7] to [0103.1.7.7] above

[102011] In this paragraph “A” means “Goffeau et al., Science 274 (5287), 546 (1996)”, “B” means “Blattner et al., Science 277 (5331), 1453 (1997)”, “C” means “Nakamura et al., Nucleic Acids Res. 28(1), 72 (2000)”, “D” means “deposition of the sequences to the EMBL/GenBank/DDBJ databases under “Sequencing of the draft genome assembly of Azotobacter vinelandii AvOP”. in June 2005 by Copeland et al.”, “E” means “Henne et al., Nat. Biotechnol. 22 (5), 547 (2004)”, “F” means “Kaul et al., Nature 408 (6814), 796 (2000)”, and “G” means “Matsumoto et al., Nature 436 (7052), 793 (2005)”.

[102012] The nucleic acid sequence of At2g36580 from Arabidopsis thaliana, e.g. as shown in the respective line in column 5 of Table I, application no. 20, has been published in F. And the activity of the gene product thereof is the activity of pyruvate kinase.

[102013] Accordingly, in one embodiment, the process of the present invention for producing hentriacontane in a non-human organism, like a microorganism or a plant or a part thereof, comprises increasing or generating the activity of a gene product with the activity of a gene product conferring the activity of “pyruvate kinase”, especially from Arabidopsis thaliana or its functional equivalent or its homolog, e.g. the increase of
[102014] (a) a gene product of a gene comprising the nucleic acid molecule as shown in the respective line in column 5 of Table I (whereby the respective line disclose in column 7 the fine chemical hentriacontane), application no. 20, preferably the coding region thereof, or a homolog or a fragment thereof, and being depicted in the same respective line as said At2g36580, or a functional equivalent or a homolog thereof as shown in column 8 of Table I, application no. 20, preferably the coding region thereof, particularly a homolog or functional equivalent as shown in column 8 of Table I B, application no. 20, and being depicted in the same respective line as said At2g36580, and preferably the activity is increased plastidic, or
[102015] (b) a polypeptide comprising a polypeptide, a consensus sequence or at least a polypeptide motif as shown in the respective line in column 5 of Table II or in column 8 of Table IV, application no. 20, respectively, and being depicted in the same respective line as said At2g36580, or a functional equivalent or a homolog thereof as depicted in column 8 of Table II, application no. 20, preferably a homolog or functional equivalent as depicted in column 8 of Table II B, application no. 20, and being depicted in the same respective line as said At2g36580, and preferably the activity is increased plastidic, whereby the respective line disclose in column 7 the fine chemical hentriacontane.

[102016] Accordingly, in one embodiment, the molecule which activity is to be increased in the process of the invention is the gene product with an activity as a “pyruvate kinase”, preferably it is the molecule of section (a) or (b) of this paragraph.

[102017] In particular, it was observed that in plants, especially in Arabidopsis thaliana, increasing or generating the activity of a gene product plastidic with the activity of a “pyruvate kinase”, preferably being encoded by a gene comprising the nucleic acid sequence SEQ ID NO. 113714, preferably the coding region thereof, conferred the production of or the increase in hentriacontane compared with the wild type control.

[102018] The nucleic acid sequence of At2g42830 from Arabidopsis thaliana, e.g. as shown in the respective line in column 5 of Table I, application no. 20, has been published in F. And the activity of the gene product thereof is the activity of MADS box protein transcription factor.

[102019] Accordingly, in one embodiment, the process of the present invention for producing hentriacontane in a non-human organism, like a microorganism or a plant or a part thereof, comprises increasing or generating the activity of a gene product with the activity of a gene product conferring the activity of “MADS box protein transcription factor”, especially from Arabidopsis thaliana or its functional equivalent or its homolog, e.g. the increase of
[102020] (a) a gene product of a gene comprising the nucleic acid molecule as shown in the respective line in column 5 of Table I (whereby the respective line disclose in column 7 the fine chemical hentriacontane), application no. 20, preferably the coding region thereof, or a homolog or a fragment thereof, and being depicted in the same respective line as said At2g42830, or a functional equivalent or a homolog thereof as shown in column 8 of Table I, application no. 20, preferably the coding region thereof, particularly a homolog or functional equivalent as shown in column 8 of Table I B, application no. 20, and being depicted in the same respective line as said At2g42830, and preferably the activity is increased non-targeted, or
[102021] (b) a polypeptide comprising a polypeptide, a consensus sequence or at least a polypeptide motif as shown in the respective line in column 5 of Table II or in column 8 of Table IV, application no. 20, respectively, and being depicted in the same respective line as said At2g42830, or a functional equivalent or a homolog thereof as depicted in column 8 of Table II, application no. 20, preferably a homolog or functional equivalent as depicted in column 8 of Table II B, application no. 20, and being depicted in the same respective line as said At2g42830, and preferably the activity is increased non-targeted, whereby the respective line disclose in column 7 the fine chemical hentriacontane.

[102022] Accordingly, in one embodiment, the molecule which activity is to be increased in the process of the invention is the gene product with an activity as a “MADS box protein transcription factor”, preferably it is the molecule of section (a) or (b) of this paragraph.

[102023] In particular, it was observed that in plants, especially in Arabidopsis thaliana, increasing or generating the activity of a gene product non-targeted with the activity of a “MADS box protein transcription factor”, preferably being encoded by a gene comprising the nucleic acid sequence SEQ ID NO. 108727, preferably the coding region thereof, conferred the production of or the increase in hentriacontane compared with the wild type control.

[102024] The nucleic acid sequence of At2g45420 from Arabidopsis thaliana, e.g. as shown in the respective line in column 5 of Table I, application no. 20, has been published in F. And the activity of the gene product thereof is the activity of At2g45420-protein.

[102025] Accordingly, in one embodiment, the process of the present invention for producing hentriacontane in a non-human organism, like a microorganism or a plant or a part thereof, comprises increasing or generating the activity of a gene product with the activity of a gene product conferring the activity of “At2g45420-protein”, especially from Arabidopsis thaliana or its functional equivalent or its homolog, e.g. the increase of
[102026] (a) a gene product of a gene comprising the nucleic acid molecule as shown in the respective line in column 5 of Table I (whereby the respective line disclose in column 7 the fine chemical hentriacontane), application no. 20, preferably the coding region thereof, or a homolog or a fragment thereof, and being depicted in the same respective line as said At2g45420, or a functional equivalent or a homolog thereof as shown in column 8 of Table I, application no. 20, preferably the coding region thereof, particularly a homolog or functional equivalent as shown in column 8 of Table I B, application no. 20, and being depicted in the same respective line as said At2g45420, and preferably the activity is increased non-targeted, or
[102027] (b) a polypeptide comprising a polypeptide, a consensus sequence or at least a polypeptide motif as shown in the respective line in column 5 of Table II or in column 8 of Table IV, application no. 20, respectively, and being depicted in the same respective line as said At2g45420, or a functional equivalent or a homolog thereof as depicted in column 8 of Table II, application no. 20, preferably a homolog or functional equivalent as depicted in column 8 of Table II B, application no. 20, and being depicted in the same respective line as said At2g45420, and preferably the activity is increased non-targeted, whereby the respective line disclose in column 7 the fine chemical hentriacontane.

[102028] Accordingly, in one embodiment, the molecule which activity is to be increased in the process of the invention is the gene product with an activity as a “At2g45420-protein”, preferably it is the molecule of section (a) or (b) of this paragraph.

[102029] In particular, it was observed that in plants, especially in Arabidopsis thaliana, increasing or generating the activity of a gene product non-targeted with the activity of a “At2g45420-protein”, preferably being encoded by a gene comprising the nucleic acid sequence SEQ ID NO. 1623, preferably the coding region thereof, conferred the production of or the increase in hentriacontane compared with the wild type control.

[102030] The nucleic acid sequence of At4g09960 from Arabidopsis thaliana, e.g. as shown in the respective line in column 5 of Table I, application no. 20, has been published in F. And the activity of the gene product thereof is the activity of transcription factor.

[102031] Accordingly, in one embodiment, the process of the present invention for producing hentriacontane in a non-human organism, like a microorganism or a plant or a part thereof, comprises increasing or generating the activity of a gene product with the activity of a gene product conferring the activity of “transcription factor”, especially from Arabidopsis thaliana or its functional equivalent or its homolog, e.g. the increase of
[102032] (a) a gene product of a gene comprising the nucleic acid molecule as shown in the respective line in column 5 of Table I (whereby the respective line disclose in column 7 the fine chemical hentriacontane), application no. 20, preferably the coding region thereof, or a homolog or a fragment thereof, and being depicted in the same respective line as said At4g09960, or a functional equivalent or a homolog thereof as shown in column 8 of Table I, application no. 20, preferably the coding region thereof, particularly a homolog or functional equivalent as shown in column 8 of Table I B, application no. 20, and being depicted in the same respective line as said At4g09960, and preferably the activity is increased non-targeted, or
[102033] (b) a polypeptide comprising a polypeptide, a consensus sequence or at least a polypeptide motif as shown in the respective line in column 5 of Table II or in column 8 of Table IV, application no. 20, respectively, and being depicted in the same respective line as said At4g09960, or a functional equivalent or a homolog thereof as depicted in column 8 of Table II, application no. 20, preferably a homolog or functional equivalent as depicted in column 8 of Table II B, application no. 20, and being depicted in the same respective line as said At4g09960, and preferably the activity is increased non-targeted, whereby the respective line disclose in column 7 the fine chemical hentriacontane.

[102034] Accordingly, in one embodiment, the molecule which activity is to be increased in the process of the invention is the gene product with an activity as a “transcription factor”, preferably it is the molecule of section (a) or (b) of this paragraph.

[102035] In particular, it was observed that in plants, especially in Arabidopsis thaliana, increasing or generating the activity of a gene product non-targeted with the activity of a “transcription factor”, preferably being encoded by a gene comprising the nucleic acid sequence SEQ ID NO. 109717, preferably the coding region thereof, conferred the production of or the increase in hentriacontane compared with the wild type control.

[102036] The nucleic acid sequence of At5g43630 from Arabidopsis thaliana, e.g. as shown in the respective line in column 5 of Table I, application no. 20, has been published in F. And the activity of the gene product thereof is the activity of At5g43630-protein.

[102037] Accordingly, in one embodiment, the process of the present invention for producing hentriacontane in a non-human organism, like a microorganism or a plant or a part thereof, comprises increasing or generating the activity of a gene product with the activity of a gene product conferring the activity of “At5g43630-protein”, especially from Arabidopsis thaliana or its functional equivalent or its homolog, e.g. the increase of
[102038] (a) a gene product of a gene comprising the nucleic acid molecule as shown in the respective line in column 5 of Table I (whereby the respective line disclose in column 7 the fine chemical hentriacontane), application no. 20, preferably the coding region thereof, or a homolog or a fragment thereof, and being depicted in the same respective line as said At5g43630, or a functional equivalent or a homolog thereof as shown in column 8 of Table I, application no. 20, preferably the coding region thereof, particularly a homolog or functional equivalent as shown in column 8 of Table I B, application no. 20, and being depicted in the same respective line as said At5g43630, and preferably the activity is increased non-targeted, or
[102039] (b) a polypeptide comprising a polypeptide, a consensus sequence or at least a polypeptide motif as shown in the respective line in column 5 of Table II or in column 8 of Table IV, application no. 20, respectively, and being depicted in the same respective line as said At5g43630, or a functional equivalent or a homolog thereof as depicted in column 8 of Table II, application no. 20, preferably a homolog or functional equivalent as depicted in column 8 of Table II B, application no. 20, and being depicted in the same respective line as said At5g43630, and preferably the activity is increased non-targeted, whereby the respective line disclose in column 7 the fine chemical hentriacontane.

[102040] Accordingly, in one embodiment, the molecule which activity is to be increased in the process of the invention is the gene product with an activity as a “At5g43630-protein”, preferably it is the molecule of section (a) or (b) of this paragraph.

[102041] In particular, it was observed that in plants, especially in Arabidopsis thaliana, increasing or generating the activity of a gene product non-targeted with the activity of a “At5g43630-protein”, preferably being encoded by a gene comprising the nucleic acid sequence SEQ ID NO. 142929, preferably the coding region thereof, conferred the production of or the increase in hentriacontane compared with the wild type control.

[102042] The nucleic acid sequence of At5g60110 from Arabidopsis thaliana, e.g. as shown in the respective line in column 5 of Table I, application no. 20, has been published in F. And the activity of the gene product thereof is the activity of RNA-binding protein.

[102043] Accordingly, in one embodiment, the process of the present invention for producing hentriacontane in a non-human organism, like a microorganism or a plant or a part thereof, comprises increasing or generating the activity of a gene product with the activity of a gene product conferring the activity of “RNA-binding protein”, especially from Arabidopsis thaliana or its functional equivalent or its homolog, e.g. the increase of
[102044] (a) a gene product of a gene comprising the nucleic acid molecule as shown in the respective line in column 5 of Table I (whereby the respective line disclose in column 7 the fine chemical hentriacontane), application no. 20, preferably the coding region thereof, or a homolog or a fragment thereof, and being depicted in the same respective line as said At5g60110, or a functional equivalent or a homolog thereof as shown in column 8 of Table I, application no. 20, preferably the coding region thereof, particularly a homolog or functional equivalent as shown in column 8 of Table I B, application no. 20, and being depicted in the same respective line as said At5g60110, and preferably the activity is increased non-targeted, or
[102045] (b) a polypeptide comprising a polypeptide, a consensus sequence or at least a polypeptide motif as shown in the respective line in column 5 of Table II or in column 8 of Table IV, application no. 20, respectively, and being depicted in the same respective line as said At5g60110, or a functional equivalent or a homolog thereof as depicted in column 8 of Table II, application no. 20, preferably a homolog or functional equivalent as depicted in column 8 of Table II B, application no. 20, and being depicted in the same respective line as said At5g60110, and preferably the activity is increased non-targeted, whereby the respective line disclose in column 7 the fine chemical hentriacontane.

[102046] Accordingly, in one embodiment, the molecule which activity is to be increased in the process of the invention is the gene product with an activity as a “RNA-binding protein”, preferably it is the molecule of section (a) or (b) of this paragraph.

[102047] In particular, it was observed that in plants, especially in Arabidopsis thaliana, increasing or generating the activity of a gene product non-targeted with the activity of a “RNA-binding protein”, preferably being encoded by a gene comprising the nucleic acid sequence SEQ ID NO. 70006, preferably the coding region thereof, conferred the production of or the increase in hentriacontane compared with the wild type control.

[102048] The nucleic acid sequence of AvinDRAFT_{—}3209 from Azotobacter vinelandii, e.g. as shown in the respective line in column 5 of Table I, application no. 20, has been published in D. And the activity of the gene product thereof is the activity of transcriptional regulator.

[102049] Accordingly, in one embodiment, the process of the present invention for producing hentriacontane in a non-human organism, like a microorganism or a plant or a part thereof, comprises increasing or generating the activity of a gene product with the activity of a gene product conferring the activity of “transcriptional regulator”, especially from Azotobacter vinelandii or its functional equivalent or its homolog, e.g. the increase of
[102050] (a) a gene product of a gene comprising the nucleic acid molecule as shown in the respective line in column 5 of Table I (whereby the respective line disclose in column 7 the fine chemical hentriacontane), application no. 20, preferably the coding region thereof, or a homolog or a fragment thereof, and being depicted in the same respective line as said AvinDRAFT_{—}3209, or a functional equivalent or a homolog thereof as shown in column 8 of Table I, application no. 20, preferably the coding region thereof, particularly a homolog or functional equivalent as shown in column 8 of Table I B, application no. 20, and being depicted in the same respective line as said AvinDRAFT_{—}3209, and preferably the activity is increased non-targeted, or
[102051] (b) a polypeptide comprising a polypeptide, a consensus sequence or at least a polypeptide motif as shown in the respective line in column 5 of Table II or in column 8 of Table IV, application no. 20, respectively, and being depicted in the same respective line as said AvinDRAFT_{—}3209, or a functional equivalent or a homolog thereof as depicted in column 8 of Table II, application no. 20, preferably a homolog or functional equivalent as depicted in column 8 of Table II B, application no. 20, and being depicted in the same respective line as said AvinDRAFT_{—}3209, and preferably the activity is increased non-targeted, whereby the respective line disclose in column 7 the fine chemical hentriacontane.

[102052] Accordingly, in one embodiment, the molecule which activity is to be increased in the process of the invention is the gene product with an activity as a “transcriptional regulator”, preferably it is the molecule of section (a) or (b) of this paragraph.

[102053] In particular, it was observed that in plants, especially in Arabidopsis thaliana, increasing or generating the activity of a gene product non-targeted with the activity of a “transcriptional regulator”, preferably being encoded by a gene comprising the nucleic acid sequence SEQ ID NO. 29286, preferably the coding region thereof, conferred the production of or the increase in hentriacontane compared with the wild type control.

[102054] The nucleic acid sequence of AvinDRAFT_{—}5292 from Azotobacter vinelandii, e.g. as shown in the respective line in column 5 of Table I, application no. 20, has been published in D. And the activity of the gene product thereof is the activity of fumarylacetoacetate hydrolase.

[102055] Accordingly, in one embodiment, the process of the present invention for producing hentriacontane in a non-human organism, like a microorganism or a plant or a part thereof, comprises increasing or generating the activity of a gene product with the activity of a gene product conferring the activity of “fumarylacetoacetate hydrolase”, especially from Azotobacter vinelandii or its functional equivalent or its homolog, e.g. the increase of
[102056] (a) a gene product of a gene comprising the nucleic acid molecule as shown in the respective line in column 5 of Table I (whereby the respective line disclose in column 7 the fine chemical hentriacontane), application no. 20, preferably the coding region thereof, or a homolog or a fragment thereof, and being depicted in the same respective line as said AvinDRAFT_{—}5292, or a functional equivalent or a homolog thereof as shown in column 8 of Table I, application no. 20, preferably the coding region thereof, particularly a homolog or functional equivalent as shown in column 8 of Table I B, application no. 20, and being depicted in the same respective line as said AvinDRAFT_{—}5292, and preferably the activity is increased non-targeted, or
[102057] (b) a polypeptide comprising a polypeptide, a consensus sequence or at least a polypeptide motif as shown in the respective line in column 5 of Table II or in column 8 of Table IV, application no. 20, respectively, and being depicted in the same respective line as said AvinDRAFT_{—}5292, or a functional equivalent or a homolog thereof as depicted in column 8 of Table II, application no. 20, preferably a homolog or functional equivalent as depicted in column 8 of Table II B, application no. 20, and being depicted in the same respective line as said AvinDRAFT_{—}5292, and preferably the activity is increased non-targeted, whereby the respective line disclose in column 7 the fine chemical hentriacontane.

[102058] Accordingly, in one embodiment, the molecule which activity is to be increased in the process of the invention is the gene product with an activity as a “fumarylacetoacetate hydrolase”, preferably it is the molecule of section (a) or (b) of this paragraph.

[102059] In particular, it was observed that in plants, especially in Arabidopsis thaliana, increasing or generating the activity of a gene product non-targeted with the activity of a “fumarylacetoacetate hydrolase”, preferably being encoded by a gene comprising the nucleic acid sequence SEQ ID NO. 32308, preferably the coding region thereof, conferred the production of or the increase in hentriacontane compared with the wild type control.

[102060] The nucleic acid sequence of B0121 from Escherichia coli, e.g. as shown in the respective line in column 5 of Table I, application no. 20, has been published in B. And the activity of the gene product thereof is the activity of spermidine synthase.

[102061] Accordingly, in one embodiment, the process of the present invention for producing hentriacontane in a non-human organism, like a microorganism or a plant or a part thereof, comprises increasing or generating the activity of a gene product with the activity of a gene product conferring the activity of “spermidine synthase”, especially from Escherichia coli or its functional equivalent or its homolog, e.g. the increase of
[102062] (a) a gene product of a gene comprising the nucleic acid molecule as shown in the respective line in column 5 of Table I (whereby the respective line disclose in column 7 the fine chemical hentriacontane), application no. 20, preferably the coding region thereof, or a homolog or a fragment thereof, and being depicted in the same respective line as said B0121, or a functional equivalent or a homolog thereof as shown in column 8 of Table I, application no. 20, preferably the coding region thereof, particularly a homolog or functional equivalent as shown in column 8 of Table I B, application no. 20, and being depicted in the same respective line as said B0121, and preferably the activity is increased plastidic, or
[102063] (b) a polypeptide comprising a polypeptide, a consensus sequence or at least a polypeptide motif as shown in the respective line in column 5 of Table II or in column 8 of Table IV, application no. 20, respectively, and being depicted in the same respective line as said B0121, or a functional equivalent or a homolog thereof as depicted in column 8 of Table II, application no. 20, preferably a homolog or functional equivalent as depicted in column 8 of Table II B, application no. 20, and being depicted in the same respective line as said B0121, and preferably the activity is increased plastidic, whereby the respective line disclose in column 7 the fine chemical hentriacontane.

[102064] Accordingly, in one embodiment, the molecule which activity is to be increased in the process of the invention is the gene product with an activity as a “spermidine synthase”, preferably it is the molecule of section (a) or (b) of this paragraph.

[102065] In particular, it was observed that in plants, especially in Arabidopsis thaliana, increasing or generating the activity of a gene product plastidic with the activity of a “spermidine synthase”, preferably being encoded by a gene comprising the nucleic acid sequence SEQ ID NO. 154509, preferably the coding region thereof, conferred the production of or the increase in hentriacontane compared with the wild type control.

[102066] The nucleic acid sequence of B0161 from Escherichia coli, e.g. as shown in the respective line in column 5 of Table I, application no. 20, has been published in B. And the activity of the gene product thereof is the activity of serine protease.

[102067] Accordingly, in one embodiment, the process of the present invention for producing hentriacontane in a non-human organism, like a microorganism or a plant or a part thereof, comprises increasing or generating the activity of a gene product with the activity of a gene product conferring the activity of “serine protease”, especially from Escherichia coli or its functional equivalent or its homolog, e.g. the increase of
[102068] (a) a gene product of a gene comprising the nucleic acid molecule as shown in the respective line in column 5 of Table I (whereby the respective line disclose in column 7 the fine chemical hentriacontane), application no. 20, preferably the coding region thereof, or a homolog or a fragment thereof, and being depicted in the same respective line as said B0161, or a functional equivalent or a homolog thereof as shown in column 8 of Table I, application no. 20, preferably the coding region thereof, particularly a homolog or functional equivalent as shown in column 8 of Table I B, application no. 20, and being depicted in the same respective line as said B0161, and preferably the activity is increased non-targeted, or
[102069] (b) a polypeptide comprising a polypeptide, a consensus sequence or at least a polypeptide motif as shown in the respective line in column 5 of Table II or in column 8 of Table IV, application no. 20, respectively, and being depicted in the same respective line as said B0161, or a functional equivalent or a homolog thereof as depicted in column 8 of Table II, application no. 20, preferably a homolog or functional equivalent as depicted in column 8 of Table II B, application no. 20, and being depicted in the same respective line as said B0161, and preferably the activity is increased non-targeted, whereby the respective line disclose in column 7 the fine chemical hentriacontane.

[102070] Accordingly, in one embodiment, the molecule which activity is to be increased in the process of the invention is the gene product with an activity as a “serine protease”, preferably it is the molecule of section (a) or (b) of this paragraph.

[102071] In particular, it was observed that in plants, especially in Arabidopsis thaliana, increasing or generating the activity of a gene product non-targeted with the activity of a “serine protease”, preferably being encoded by a gene comprising the nucleic acid sequence SEQ ID NO. 7081, preferably the coding region thereof, conferred the production of or the increase in hentriacontane compared with the wild type control.

[102072] The nucleic acid sequence of B0236 from Escherichia coli, e.g. as shown in the respective line in column 5 of Table I, application no. 20, has been published in B. And the activity of the gene product thereof is the activity of peptide chain release factor.

[102073] Accordingly, in one embodiment, the process of the present invention for producing hentriacontane in a non-human organism, like a microorganism or a plant or a part thereof, comprises increasing or generating the activity of a gene product with the activity of a gene product conferring the activity of “peptide chain release factor”, especially from Escherichia coli or its functional equivalent or its homolog, e.g. the increase of
[102074] (a) a gene product of a gene comprising the nucleic acid molecule as shown in the respective line in column 5 of Table I (whereby the respective line disclose in column 7 the fine chemical hentriacontane), application no. 20, preferably the coding region thereof, or a homolog or a fragment thereof, and being depicted in the same respective line as said B0236, or a functional equivalent or a homolog thereof as shown in column 8 of Table I, application no. 20, preferably the coding region thereof, particularly a homolog or functional equivalent as shown in column 8 of Table I B, application no. 20, and being depicted in the same respective line as said B0236, and preferably the activity is increased non-targeted, or
[102075] (b) a polypeptide comprising a polypeptide, a consensus sequence or at least a polypeptide motif as shown in the respective line in column 5 of Table II or in column 8 of Table IV, application no. 20, respectively, and being depicted in the same respective line as said B0236, or a functional equivalent or a homolog thereof as depicted in column 8 of Table II, application no. 20, preferably a homolog or functional equivalent as depicted in column 8 of Table II B, application no. 20, and being depicted in the same respective line as said B0236, and preferably the activity is increased non-targeted, whereby the respective line disclose in column 7 the fine chemical hentriacontane.

[102076] Accordingly, in one embodiment, the molecule which activity is to be increased in the process of the invention is the gene product with an activity as a “peptide chain release factor”, preferably it is the molecule of section (a) or (b) of this paragraph.

[102077] In particular, it was observed that in plants, especially in Arabidopsis thaliana, increasing or generating the activity of a gene product non-targeted with the activity of a “peptide chain release factor”, preferably being encoded by a gene comprising the nucleic acid sequence SEQ ID NO. 155230, preferably the coding region thereof, conferred the production of or the increase in hentriacontane compared with the wild type control.

[102078] The nucleic acid sequence of B0577 from Escherichia coli, e.g. as shown in the respective line in column 5 of Table I, application no. 20, has been published in B. And the activity of the gene product thereof is the activity of mechanosensitive ion channel.

[102079] Accordingly, in one embodiment, the process of the present invention for producing hentriacontane in a non-human organism, like a microorganism or a plant or a part thereof, comprises increasing or generating the activity of a gene product with the activity of a gene product conferring the activity of “mechanosensitive ion channel”, especially from Escherichia coli or its functional equivalent or its homolog, e.g. the increase of
[102080] (a) a gene product of a gene comprising the nucleic acid molecule as shown in the respective line in column 5 of Table I (whereby the respective line disclose in column 7 the fine chemical hentriacontane), application no. 20, preferably the coding region thereof, or a homolog or a fragment thereof, and being depicted in the same respective line as said B0577, or a functional equivalent or a homolog thereof as shown in column 8 of Table I, application no. 20, preferably the coding region thereof, particularly a homolog or functional equivalent as shown in column 8 of Table I B, application no. 20, and being depicted in the same respective line as said B0577, and preferably the activity is increased non-targeted, or
[102081] (b) a polypeptide comprising a polypeptide, a consensus sequence or at least a polypeptide motif as shown in the respective line in column 5 of Table II or in column 8 of Table IV, application no. 20, respectively, and being depicted in the same respective line as said B0577, or a functional equivalent or a homolog thereof as depicted in column 8 of Table II, application no. 20, preferably a homolog or functional equivalent as depicted in column 8 of Table II B, application no. 20, and being depicted in the same respective line as said B0577, and preferably the activity is increased non-targeted, whereby the respective line disclose in column 7 the fine chemical hentriacontane.

[102082] Accordingly, in one embodiment, the molecule which activity is to be increased in the process of the invention is the gene product with an activity as a “mechanosensitive ion channel”, preferably it is the molecule of section (a) or (b) of this paragraph.

[102083] In particular, it was observed that in plants, especially in Arabidopsis thaliana, increasing or generating the activity of a gene product non-targeted with the activity of a “mechanosensitive ion channel”, preferably being encoded by a gene comprising the nucleic acid sequence SEQ ID NO. 155370, preferably the coding region thereof, conferred the production of or the increase in hentriacontane compared with the wild type control.

[102084] The nucleic acid sequence of B0651 from Escherichia coli, e.g. as shown in the respective line in column 5 of Table I, application no. 20, has been published in B. And the activity of the gene product thereof is the activity of pyrimidine-specific ribonucleoside hydrolase.

[102085] Accordingly, in one embodiment, the process of the present invention for producing hentriacontane in a non-human organism, like a microorganism or a plant or a part thereof, comprises increasing or generating the activity of a gene product with the activity of a gene product conferring the activity of “pyrimidine-specific ribonucleoside hydrolase”, especially from Escherichia coli or its functional equivalent or its homolog, e.g. the increase of
[102086] (a) a gene product of a gene comprising the nucleic acid molecule as shown in the respective line in column 5 of Table I (whereby the respective line disclose in column 7 the fine chemical hentriacontane), application no. 20, preferably the coding region thereof, or a homolog or a fragment thereof, and being depicted in the same respective line as said B0651, or a functional equivalent or a homolog thereof as shown in column 8 of Table I, application no. 20, preferably the coding region thereof, particularly a homolog or functional equivalent as shown in column 8 of Table I B, application no. 20, and being depicted in the same respective line as said B0651, and preferably the activity is increased non-targeted, or
[102087] (b) a polypeptide comprising a polypeptide, a consensus sequence or at least a polypeptide motif as shown in the respective line in column 5 of Table II or in column 8 of Table IV, application no. 20, respectively, and being depicted in the same respective line as said B0651, or a functional equivalent or a homolog thereof as depicted in column 8 of Table II, application no. 20, preferably a homolog or functional equivalent as depicted in column 8 of Table II B, application no. 20, and being depicted in the same respective line as said B0651, and preferably the activity is increased non-targeted, whereby the respective line disclose in column 7 the fine chemical hentriacontane.

[102088] Accordingly, in one embodiment, the molecule which activity is to be increased in the process of the invention is the gene product with an activity as a “pyrimidine-specific ribonucleoside hydrolase”, preferably it is the molecule of section (a) or (b) of this paragraph.

[102089] In particular, it was observed that in plants, especially in Arabidopsis thaliana, increasing or generating the activity of a gene product non-targeted with the activity of a “pyrimidine-specific ribonucleoside hydrolase”, preferably being encoded by a gene comprising the nucleic acid sequence SEQ ID NO. 143954, preferably the coding region thereof, conferred the production of or the increase in hentriacontane compared with the wild type control.

[102090] The nucleic acid sequence of B0787 from Escherichia coli, e.g. as shown in the respective line in column 5 of Table I, application no. 20, has been published in B. And the activity of the gene product thereof is the activity of inner membrane protein.

[102091] Accordingly, in one embodiment, the process of the present invention for producing hentriacontane in a non-human organism, like a microorganism or a plant or a part thereof, comprises increasing or generating the activity of a gene product with the activity of a gene product conferring the activity of “inner membrane protein”, especially from Escherichia coli or its functional equivalent or its homolog, e.g. the increase of
[102092] (a) a gene product of a gene comprising the nucleic acid molecule as shown in the respective line in column 5 of Table I (whereby the respective line disclose in column 7 the fine chemical hentriacontane), application no. 20, preferably the coding region thereof, or a homolog or a fragment thereof, and being depicted in the same respective line as said B0787, or a functional equivalent or a homolog thereof as shown in column 8 of Table I, application no. 20, preferably the coding region thereof, particularly a homolog or functional equivalent as shown in column 8 of Table I B, application no. 20, and being depicted in the same respective line as said B0787, and preferably the activity is increased non-targeted, or
[102093] (b) a polypeptide comprising a polypeptide, a consensus sequence or at least a polypeptide motif as shown in the respective line in column 5 of Table II or in column 8 of Table IV, application no. 20, respectively, and being depicted in the same respective line as said B0787, or a functional equivalent or a homolog thereof as depicted in column 8 of Table II, application no. 20, preferably a homolog or functional equivalent as depicted in column 8 of Table II B, application no. 20, and being depicted in the same respective line as said B0787, and preferably the activity is increased non-targeted, whereby the respective line disclose in column 7 the fine chemical hentriacontane.

[102094] Accordingly, in one embodiment, the molecule which activity is to be increased in the process of the invention is the gene product with an activity as a “inner membrane protein”, preferably it is the molecule of section (a) or (b) of this paragraph.

[102095] In particular, it was observed that in plants, especially in Arabidopsis thaliana, increasing or generating the activity of a gene product non-targeted with the activity of a “inner membrane protein”, preferably being encoded by a gene comprising the nucleic acid sequence SEQ ID NO. 155613, preferably the coding region thereof, conferred the production of or the increase in hentriacontane compared with the wild type control.

[102096] The nucleic acid sequence of B0833 from Escherichia coli, e.g. as shown in the respective line in column 5 of Table I, application no. 20, has been published in B. And the activity of the gene product thereof is the activity of b0833-protein.

[102097] Accordingly, in one embodiment, the process of the present invention for producing hentriacontane in a non-human organism, like a microorganism or a plant or a part thereof, comprises increasing or generating the activity of a gene product with the activity of a gene product conferring the activity of “b0833-protein”, especially from Escherichia coli or its functional equivalent or its homolog, e.g. the increase of
[102098] (a) a gene product of a gene comprising the nucleic acid molecule as shown in the respective line in column 5 of Table I (whereby the respective line disclose in column 7 the fine chemical hentriacontane), application no. 20, preferably the coding region thereof, or a homolog or a fragment thereof, and being depicted in the same respective line as said B0833, or a functional equivalent or a homolog thereof as shown in column 8 of Table I, application no. 20, preferably the coding region thereof, particularly a homolog or functional equivalent as shown in column 8 of Table I B, application no. 20, and being depicted in the same respective line as said B0833, and preferably the activity is increased non-targeted, or
[102099] (b) a polypeptide comprising a polypeptide, a consensus sequence or at least a polypeptide motif as shown in the respective line in column 5 of Table II or in column 8 of Table IV, application no. 20, respectively, and being depicted in the same respective line as said B0833, or a functional equivalent or a homolog thereof as depicted in column 8 of Table II, application no. 20, preferably a homolog or functional equivalent as depicted in column 8 of Table II B, application no. 20, and being depicted in the same respective line as said B0833, and preferably the activity is increased non-targeted, whereby the respective line disclose in column 7 the fine chemical hentriacontane.

[102100] Accordingly, in one embodiment, the molecule which activity is to be increased in the process of the invention is the gene product with an activity as a “b0833-protein”, preferably it is the molecule of section (a) or (b) of this paragraph.

[102101] In particular, it was observed that in plants, especially in Arabidopsis thaliana, increasing or generating the activity of a gene product non-targeted with the activity of a “b0833-protein”, preferably being encoded by a gene comprising the nucleic acid sequence SEQ ID NO. 155657, preferably the coding region thereof, conferred the production of or the increase in hentriacontane compared with the wild type control.

[102102] The nucleic acid sequence of B0921 from Escherichia coli, e.g. as shown in the respective line in column 5 of Table I, application no. 20, has been published in B. And the activity of the gene product thereof is the activity of S-adenosyl-L-methionine-dependent methyltransferase.

[102103] Accordingly, in one embodiment, the process of the present invention for producing hentriacontane in a non-human organism, like a microorganism or a plant or a part thereof, comprises increasing or generating the activity of a gene product with the activity of a gene product conferring the activity of “S-adenosyl-L-methionine-dependent methyltransferase”, especially from Escherichia coli or its functional equivalent or its homolog, e.g. the increase of
[102104] (a) a gene product of a gene comprising the nucleic acid molecule as shown in the respective line in column 5 of Table I (whereby the respective line disclose in column 7 the fine chemical hentriacontane), application no. 20, preferably the coding region thereof, or a homolog or a fragment thereof, and being depicted in the same respective line as said B0921, or a functional equivalent or a homolog thereof as shown in column 8 of Table I, application no. 20, preferably the coding region thereof, particularly a homolog or functional equivalent as shown in column 8 of Table I B, application no. 20, and being depicted in the same respective line as said B0921, and preferably the activity is increased plastidic, or
[102105] (b) a polypeptide comprising a polypeptide, a consensus sequence or at least a polypeptide motif as shown in the respective line in column 5 of Table II or in column 8 of Table IV, application no. 20, respectively, and being depicted in the same respective line as said B0921, or a functional equivalent or a homolog thereof as depicted in column 8 of Table II, application no. 20, preferably a homolog or functional equivalent as depicted in column 8 of Table II B, application no. 20, and being depicted in the same respective line as said B0921, and preferably the activity is increased plastidic, whereby the respective line disclose in column 7 the fine chemical hentriacontane.

[102106] Accordingly, in one embodiment, the molecule which activity is to be increased in the process of the invention is the gene product with an activity as a “S-adenosyl-L-methionine-dependent methyltransferase”, preferably it is the molecule of section (a) or (b) of this paragraph.

[102107] In particular, it was observed that in plants, especially in Arabidopsis thaliana, increasing or generating the activity of a gene product plastidic with the activity of a “S-adenosyl-L-methionine-dependent methyltransferase”, preferably being encoded by a gene comprising the nucleic acid sequence SEQ ID NO. 155665, preferably the coding region thereof, conferred the production of or the increase in hentriacontane compared with the wild type control.

[102108] The nucleic acid sequence of B1259 from Escherichia coli, e.g. as shown in the respective line in column 5 of Table I, application no. 20, has been published in B. And the activity of the gene product thereof is the activity of b1259-protein.

[102109] Accordingly, in one embodiment, the process of the present invention for producing hentriacontane in a non-human organism, like a microorganism or a plant or a part thereof, comprises increasing or generating the activity of a gene product with the activity of a gene product conferring the activity of “b1259-protein”, especially from Escherichia coli or its functional equivalent or its homolog, e.g. the increase of
[102110] (a) a gene product of a gene comprising the nucleic acid molecule as shown in the respective line in column 5 of Table I (whereby the respective line disclose in column 7 the fine chemical hentriacontane), application no. 20, preferably the coding region thereof, or a homolog or a fragment thereof, and being depicted in the same respective line as said B1259, or a functional equivalent or a homolog thereof as shown in column 8 of Table I, application no. 20, preferably the coding region thereof, particularly a homolog or functional equivalent as shown in column 8 of Table I B, application no. 20, and being depicted in the same respective line as said B1259, and preferably the activity is increased non-targeted, or
[102111] (b) a polypeptide comprising a polypeptide, a consensus sequence or at least a polypeptide motif as shown in the respective line in column 5 of Table II or in column 8 of Table IV, application no. 20, respectively, and being depicted in the same respective line as said B1259, or a functional equivalent or a homolog thereof as depicted in column 8 of Table II, application no. 20, preferably a homolog or functional equivalent as depicted in column 8 of Table II B, application no. 20, and being depicted in the same respective line as said B1259, and preferably the activity is increased non-targeted, whereby the respective line disclose in column 7 the fine chemical hentriacontane.

[102112] Accordingly, in one embodiment, the molecule which activity is to be increased in the process of the invention is the gene product with an activity as a “b1259-protein”, preferably it is the molecule of section (a) or (b) of this paragraph.

[102113] In particular, it was observed that in plants, especially in Arabidopsis thaliana, increasing or generating the activity of a gene product non-targeted with the activity of a “b1259-protein”, preferably being encoded by a gene comprising the nucleic acid sequence SEQ ID NO. 37503, preferably the coding region thereof, conferred the production of or the increase in hentriacontane compared with the wild type control.

[102114] The nucleic acid sequence of B1281 from Escherichia coli, e.g. as shown in the respective line in column 5 of Table I, application no. 20, has been published in B. And the activity of the gene product thereof is the activity of orotidine-5′-phosphate decarboxylase.

[102115] Accordingly, in one embodiment, the process of the present invention for producing hentriacontane in a non-human organism, like a microorganism or a plant or a part thereof, comprises increasing or generating the activity of a gene product with the activity of a gene product conferring the activity of “orotidine-5′-phosphate decarboxylase”, especially from Escherichia coli or its functional equivalent or its homolog, e.g. the increase of
[102116] (a) a gene product of a gene comprising the nucleic acid molecule as shown in the respective line in column 5 of Table I (whereby the respective line disclose in column 7 the fine chemical hentriacontane), application no. 20, preferably the coding region thereof, or a homolog or a fragment thereof, and being depicted in the same respective line as said B1281, or a functional equivalent or a homolog thereof as shown in column 8 of Table I, application no. 20, preferably the coding region thereof, particularly a homolog or functional equivalent as shown in column 8 of Table I B, application no. 20, and being depicted in the same respective line as said B1281, and preferably the activity is increased plastidic, or
[102117] (b) a polypeptide comprising a polypeptide, a consensus sequence or at least a polypeptide motif as shown in the respective line in column 5 of Table II or in column 8 of Table IV, application no. 20, respectively, and being depicted in the same respective line as said B1281, or a functional equivalent or a homolog thereof as depicted in column 8 of Table II, application no. 20, preferably a homolog or functional equivalent as depicted in column 8 of Table II B, application no. 20, and being depicted in the same respective line as said B1281, and preferably the activity is increased plastidic, whereby the respective line disclose in column 7 the fine chemical hentriacontane.

[102118] Accordingly, in one embodiment, the molecule which activity is to be increased in the process of the invention is the gene product with an activity as a “orotidine-5′-phosphate decarboxylase”, preferably it is the molecule of section (a) or (b) of this paragraph.

[102119] In particular, it was observed that in plants, especially in Arabidopsis thaliana, increasing or generating the activity of a gene product plastidic with the activity of a “orotidine-5′-phosphate decarboxylase”, preferably being encoded by a gene comprising the nucleic acid sequence SEQ ID NO. 155890, preferably the coding region thereof, conferred the production of or the increase in hentriacontane compared with the wild type control.

[102120] The nucleic acid sequence of B1343 from Escherichia coli, e.g. as shown in the respective line in column 5 of Table I, application no. 20, has been published in B. And the activity of the gene product thereof is the activity of ATP-dependent RNA helicase.

[102121] Accordingly, in one embodiment, the process of the present invention for producing hentriacontane in a non-human organism, like a microorganism or a plant or a part thereof, comprises increasing or generating the activity of a gene product with the activity of a gene product conferring the activity of “ATP-dependent RNA helicase”, especially from Escherichia coli or its functional equivalent or its homolog, e.g. the increase of
[102122] (a) a gene product of a gene comprising the nucleic acid molecule as shown in the respective line in column 5 of Table I (whereby the respective line disclose in column 7 the fine chemical hentriacontane), application no. 20, preferably the coding region thereof, or a homolog or a fragment thereof, and being depicted in the same respective line as said B1343, or a functional equivalent or a homolog thereof as shown in column 8 of Table I, application no. 20, preferably the coding region thereof, particularly a homolog or functional equivalent as shown in column 8 of Table I B, application no. 20, and being depicted in the same respective line as said B1343, and preferably the activity is increased non-targeted, or
[102123] (b) a polypeptide comprising a polypeptide, a consensus sequence or at least a polypeptide motif as shown in the respective line in column 5 of Table II or in column 8 of Table IV, application no. 20, respectively, and being depicted in the same respective line as said B1343, or a functional equivalent or a homolog thereof as depicted in column 8 of Table II, application no. 20, preferably a homolog or functional equivalent as depicted in column 8 of Table II B, application no. 20, and being depicted in the same respective line as said B1343, and preferably the activity is increased non-targeted, whereby the respective line disclose in column 7 the fine chemical hentriacontane.

[102124] Accordingly, in one embodiment, the molecule which activity is to be increased in the process of the invention is the gene product with an activity as a “ATP-dependent RNA helicase”, preferably it is the molecule of section (a) or (b) of this paragraph.

[102125] In particular, it was observed that in plants, especially in Arabidopsis thaliana, increasing or generating the activity of a gene product non-targeted with the activity of a “ATP-dependent RNA helicase”, preferably being encoded by a gene comprising the nucleic acid sequence SEQ ID NO. 76890, preferably the coding region thereof, conferred the production of or the increase in hentriacontane compared with the wild type control.

[102126] The nucleic acid sequence of B1445 from Escherichia coli, e.g. as shown in the respective line in column 5 of Table I, application no. 20, has been published in B. And the activity of the gene product thereof is the activity of b1445-protein.

[102127] Accordingly, in one embodiment, the process of the present invention for producing hentriacontane in a non-human organism, like a microorganism or a plant or a part thereof, comprises increasing or generating the activity of a gene product with the activity of a gene product conferring the activity of “b1445-protein”, especially from Escherichia coli or its functional equivalent or its homolog, e.g. the increase of
[102128] (a) a gene product of a gene comprising the nucleic acid molecule as shown in the respective line in column 5 of Table I (whereby the respective line disclose in column 7 the fine chemical hentriacontane), application no. 20, preferably the coding region thereof, or a homolog or a fragment thereof, and being depicted in the same respective line as said B1445, or a functional equivalent or a homolog thereof as shown in column 8 of Table I, application no. 20, preferably the coding region thereof, particularly a homolog or functional equivalent as shown in column 8 of Table I B, application no. 20, and being depicted in the same respective line as said B1445, and preferably the activity is increased plastidic, or
[102129] (b) a polypeptide comprising a polypeptide, a consensus sequence or at least a polypeptide motif as shown in the respective line in column 5 of Table II or in column 8 of Table IV, application no. 20, respectively, and being depicted in the same respective line as said B1445, or a functional equivalent or a homolog thereof as depicted in column 8 of Table II, application no. 20, preferably a homolog or functional equivalent as depicted in column 8 of Table II B, application no. 20, and being depicted in the same respective line as said B1445, and preferably the activity is increased plastidic, whereby the respective line disclose in column 7 the fine chemical hentriacontane.

[102130] Accordingly, in one embodiment, the molecule which activity is to be increased in the process of the invention is the gene product with an activity as a “b1445-protein”, preferably it is the molecule of section (a) or (b) of this paragraph.

[102131] In particular, it was observed that in plants, especially in Arabidopsis thaliana, increasing or generating the activity of a gene product plastidic with the activity of a “b1445-protein”, preferably being encoded by a gene comprising the nucleic acid sequence SEQ ID NO. 38289, preferably the coding region thereof, conferred the production of or the increase in hentriacontane compared with the wild type control.

[102132] The nucleic acid sequence of B1597 from Escherichia coli, e.g. as shown in the respective line in column 5 of Table I, application no. 20, has been published in B. And the activity of the gene product thereof is the activity of acid shock protein.

[102133] Accordingly, in one embodiment, the process of the present invention for producing hentriacontane in a non-human organism, like a microorganism or a plant or a part thereof, comprises increasing or generating the activity of a gene product with the activity of a gene product conferring the activity of “acid shock protein”, especially from Escherichia coli or its functional equivalent or its homolog, e.g. the increase of
[102134] (a) a gene product of a gene comprising the nucleic acid molecule as shown in the respective line in column 5 of Table I (whereby the respective line disclose in column 7 the fine chemical hentriacontane), application no. 20, preferably the coding region thereof, or a homolog or a fragment thereof, and being depicted in the same respective line as said B1597, or a functional equivalent or a homolog thereof as shown in column 8 of Table I, application no. 20, preferably the coding region thereof, particularly a homolog or functional equivalent as shown in column 8 of Table I B, application no. 20, and being depicted in the same respective line as said B1597, and preferably the activity is increased non-targeted, or
[102135] (b) a polypeptide comprising a polypeptide, a consensus sequence or at least a polypeptide motif as shown in the respective line in column 5 of Table II or in column 8 of Table IV, application no. 20, respectively, and being depicted in the same respective line as said B1597, or a functional equivalent or a homolog thereof as depicted in column 8 of Table II, application no. 20, preferably a homolog or functional equivalent as depicted in column 8 of Table II B, application no. 20, and being depicted in the same respective line as said B1597, and preferably the activity is increased non-targeted, whereby the respective line disclose in column 7 the fine chemical hentriacontane.

[102136] Accordingly, in one embodiment, the molecule which activity is to be increased in the process of the invention is the gene product with an activity as a “acid shock protein”, preferably it is the molecule of section (a) or (b) of this paragraph.

[102137] In particular, it was observed that in plants, especially in Arabidopsis thaliana, increasing or generating the activity of a gene product non-targeted with the activity of a “acid shock protein”, preferably being encoded by a gene comprising the nucleic acid sequence SEQ ID NO. 38300, preferably the coding region thereof, conferred the production of or the increase in hentriacontane compared with the wild type control.

[102138] The nucleic acid sequence of B1627 from Escherichia coli, e.g. as shown in the respective line in column 5 of Table I, application no. 20, has been published in B. And the activity of the gene product thereof is the activity of electron transport complex protein.

[102139] Accordingly, in one embodiment, the process of the present invention for producing hentriacontane in a non-human organism, like a microorganism or a plant or a part thereof, comprises increasing or generating the activity of a gene product with the activity of a gene product conferring the activity of “electron transport complex protein”, especially from Escherichia coli or its functional equivalent or its homolog, e.g. the increase of
[102140] (a) a gene product of a gene comprising the nucleic acid molecule as shown in the respective line in column 5 of Table I (whereby the respective line disclose in column 7 the fine chemical hentriacontane), application no. 20, preferably the coding region thereof, or a homolog or a fragment thereof, and being depicted in the same respective line as said B1627, or a functional equivalent or a homolog thereof as shown in column 8 of Table I, application no. 20, preferably the coding region thereof, particularly a homolog or functional equivalent as shown in column 8 of Table I B, application no. 20, and being depicted in the same respective line as said B1627, and preferably the activity is increased plastidic, or
[102141] (b) a polypeptide comprising a polypeptide, a consensus sequence or at least a polypeptide motif as shown in the respective line in column 5 of Table II or in column 8 of Table IV, application no. 20, respectively, and being depicted in the same respective line as said B1627, or a functional equivalent or a homolog thereof as depicted in column 8 of Table II, application no. 20, preferably a homolog or functional equivalent as depicted in column 8 of Table II B, application no. 20, and being depicted in the same respective line as said B1627, and preferably the activity is increased plastidic, whereby the respective line disclose in column 7 the fine chemical hentriacontane.

[102142] Accordingly, in one embodiment, the molecule which activity is to be increased in the process of the invention is the gene product with an activity as a “electron transport complex protein”, preferably it is the molecule of section (a) or (b) of this paragraph.

[102143] In particular, it was observed that in plants, especially in Arabidopsis thaliana, increasing or generating the activity of a gene product plastidic with the activity of a “electron transport complex protein”, preferably being encoded by a gene comprising the nucleic acid sequence SEQ ID NO. 38345, preferably the coding region thereof, conferred the production of or the increase in hentriacontane compared with the wild type control.

[102144] The nucleic acid sequence of B1649 from Escherichia coli, e.g. as shown in the respective line in column 5 of Table I, application no. 20, has been published in B. And the activity of the gene product thereof is the activity of transcriptional regulator.

[102145] Accordingly, in one embodiment, the process of the present invention for producing hentriacontane in a non-human organism, like a microorganism or a plant or a part thereof, comprises increasing or generating the activity of a gene product with the activity of a gene product conferring the activity of “transcriptional regulator”, especially from Escherichia coli or its functional equivalent or its homolog, e.g. the increase of
[102146] (a) a gene product of a gene comprising the nucleic acid molecule as shown in the respective line in column 5 of Table I (whereby the respective line disclose in column 7 the fine chemical hentriacontane), application no. 20, preferably the coding region thereof, or a homolog or a fragment thereof, and being depicted in the same respective line as said B1649, or a functional equivalent or a homolog thereof as shown in column 8 of Table I, application no. 20, preferably the coding region thereof, particularly a homolog or functional equivalent as shown in column 8 of Table I B, application no. 20, and being depicted in the same respective line as said B1649, and preferably the activity is increased plastidic, or
[102147] (b) a polypeptide comprising a polypeptide, a consensus sequence or at least a polypeptide motif as shown in the respective line in column 5 of Table II or in column 8 of Table IV, application no. 20, respectively, and being depicted in the same respective line as said B1649, or a functional equivalent or a homolog thereof as depicted in column 8 of Table II, application no. 20, preferably a homolog or functional equivalent as depicted in column 8 of Table II B, application no. 20, and being depicted in the same respective line as said B1649, and preferably the activity is increased plastidic, whereby the respective line disclose in column 7 the fine chemical hentriacontane.

[102148] Accordingly, in one embodiment, the molecule which activity is to be increased in the process of the invention is the gene product with an activity as a “transcriptional regulator”, preferably it is the molecule of section (a) or (b) of this paragraph.

[102149] In particular, it was observed that in plants, especially in Arabidopsis thaliana, increasing or generating the activity of a gene product plastidic with the activity of a “transcriptional regulator”, preferably being encoded by a gene comprising the nucleic acid sequence SEQ ID NO. 156392, preferably the coding region thereof, conferred the production of or the increase in hentriacontane compared with the wild type control.

[102150] The nucleic acid sequence of B1670 from Escherichia coli, e.g. as shown in the respective line in column 5 of Table I, application no. 20, has been published in B. And the activity of the gene product thereof is the activity of b1670-protein.

[102151] Accordingly, in one embodiment, the process of the present invention for producing hentriacontane in a non-human organism, like a microorganism or a plant or a part thereof, comprises increasing or generating the activity of a gene product with the activity of a gene product conferring the activity of “b1670-protein”, especially from Escherichia coli or its functional equivalent or its homolog, e.g. the increase of
[102152] (a) a gene product of a gene comprising the nucleic acid molecule as shown in the respective line in column 5 of Table I (whereby the respective line disclose in column 7 the fine chemical hentriacontane), application no. 20, preferably the coding region thereof, or a homolog or a fragment thereof, and being depicted in the same respective line as said B1670, or a functional equivalent or a homolog thereof as shown in column 8 of Table I, application no. 20, preferably the coding region thereof, particularly a homolog or functional equivalent as shown in column 8 of Table I B, application no. 20, and being depicted in the same respective line as said B1670, and preferably the activity is increased non-targeted, or
[102153] (b) a polypeptide comprising a polypeptide, a consensus sequence or at least a polypeptide motif as shown in the respective line in column 5 of Table II or in column 8 of Table IV, application no. 20, respectively, and being depicted in the same respective line as said B1670, or a functional equivalent or a homolog thereof as depicted in column 8 of Table II, application no. 20, preferably a homolog or functional equivalent as depicted in column 8 of Table II B, application no. 20, and being depicted in the same respective line as said B1670, and preferably the activity is increased non-targeted, whereby the respective line disclose in column 7 the fine chemical hentriacontane.

[102154] Accordingly, in one embodiment, the molecule which activity is to be increased in the process of the invention is the gene product with an activity as a “b1670-protein”, preferably it is the molecule of section (a) or (b) of this paragraph.

[102155] In particular, it was observed that in plants, especially in Arabidopsis thaliana, increasing or generating the activity of a gene product non-targeted with the activity of a “b1670-protein”, preferably being encoded by a gene comprising the nucleic acid sequence SEQ ID NO. 78753, preferably the coding region thereof, conferred the production of or the increase in hentriacontane compared with the wild type control.

[102156] The nucleic acid sequence of B1704 from Escherichia coli, e.g. as shown in the respective line in column 5 of Table I, application no. 20, has been published in B. And the activity of the gene product thereof is the activity of phospho-2-dehydro-3-deoxyheptonate aldolase.

[102157] Accordingly, in one embodiment, the process of the present invention for producing hentriacontane in a non-human organism, like a microorganism or a plant or a part thereof, comprises increasing or generating the activity of a gene product with the activity of a gene product conferring the activity of “phospho-2-dehydro-3-deoxyheptonate aldolase”, especially from Escherichia coli or its functional equivalent or its homolog, e.g. the increase of
[102158] (a) a gene product of a gene comprising the nucleic acid molecule as shown in the respective line in column 5 of Table I (whereby the respective line disclose in column 7 the fine chemical hentriacontane), application no. 20, preferably the coding region thereof, or a homolog or a fragment thereof, and being depicted in the same respective line as said B1704, or a functional equivalent or a homolog thereof as shown in column 8 of Table I, application no. 20, preferably the coding region thereof, particularly a homolog or functional equivalent as shown in column 8 of Table I B, application no. 20, and being depicted in the same respective line as said B1704, and preferably the activity is increased plastidic, or
[102159] (b) a polypeptide comprising a polypeptide, a consensus sequence or at least a polypeptide motif as shown in the respective line in column 5 of Table II or in column 8 of Table IV, application no. 20, respectively, and being depicted in the same respective line as said B1704, or a functional equivalent or a homolog thereof as depicted in column 8 of Table II, application no. 20, preferably a homolog or functional equivalent as depicted in column 8 of Table II B, application no. 20, and being depicted in the same respective line as said B1704, and preferably the activity is increased plastidic, whereby the respective line disclose in column 7 the fine chemical hentriacontane.

[102160] Accordingly, in one embodiment, the molecule which activity is to be increased in the process of the invention is the gene product with an activity as a “phospho-2-dehydro-3-deoxyheptonate aldolase”, preferably it is the molecule of section (a) or (b) of this paragraph.

[102161] In particular, it was observed that in plants, especially in Arabidopsis thaliana, increasing or generating the activity of a gene product plastidic with the activity of a “phospho-2-dehydro-3-deoxyheptonate aldolase”, preferably being encoded by a gene comprising the nucleic acid sequence SEQ ID NO. 156542, preferably the coding region thereof, conferred the production of or the increase in hentriacontane compared with the wild type control.

[102162] The nucleic acid sequence of B1930 from Escherichia coli, e.g. as shown in the respective line in column 5 of Table I, application no. 20, has been published in B. And the activity of the gene product thereof is the activity of b1930-protein.

[102163] Accordingly, in one embodiment, the process of the present invention for producing hentriacontane in a non-human organism, like a microorganism or a plant or a part thereof, comprises increasing or generating the activity of a gene product with the activity of a gene product conferring the activity of “b1930-protein”, especially from Escherichia coli or its functional equivalent or its homolog, e.g. the increase of
[102164] (a) a gene product of a gene comprising the nucleic acid molecule as shown in the respective line in column 5 of Table I (whereby the respective line disclose in column 7 the fine chemical hentriacontane), application no. 20, preferably the coding region thereof, or a homolog or a fragment thereof, and being depicted in the same respective line as said B1930, or a functional equivalent or a homolog thereof as shown in column 8 of Table I, application no. 20, preferably the coding region thereof, particularly a homolog or functional equivalent as shown in column 8 of Table I B, application no. 20, and being depicted in the same respective line as said B1930, and preferably the activity is increased non-targeted, or
[102165] (b) a polypeptide comprising a polypeptide, a consensus sequence or at least a polypeptide motif as shown in the respective line in column 5 of Table II or in column 8 of Table IV, application no. 20, respectively, and being depicted in the same respective line as said B1930, or a functional equivalent or a homolog thereof as depicted in column 8 of Table II, application no. 20, preferably a homolog or functional equivalent as depicted in column 8 of Table II B, application no. 20, and being depicted in the same respective line as said B1930, and preferably the activity is increased non-targeted, whereby the respective line disclose in column 7 the fine chemical hentriacontane.

[102166] Accordingly, in one embodiment, the molecule which activity is to be increased in the process of the invention is the gene product with an activity as a “b1930-protein”, preferably it is the molecule of section (a) or (b) of this paragraph.

[102167] In particular, it was observed that in plants, especially in Arabidopsis thaliana, increasing or generating the activity of a gene product non-targeted with the activity of a “b1930-protein”, preferably being encoded by a gene comprising the nucleic acid sequence SEQ ID NO. 79181, preferably the coding region thereof, conferred the production of or the increase in hentriacontane compared with the wild type control.

[102168] The nucleic acid sequence of B2027 from Escherichia coli, e.g. as shown in the respective line in column 5 of Table I, application no. 20, has been published in B. And the activity of the gene product thereof is the activity of O-antigen chain length determinant.

[102169] Accordingly, in one embodiment, the process of the present invention for producing hentriacontane in a non-human organism, like a microorganism or a plant or a part thereof, comprises increasing or generating the activity of a gene product with the activity of a gene product conferring the activity of “O-antigen chain length determinant”, especially from Escherichia coli or its functional equivalent or its homolog, e.g. the increase of
[102170] (a) a gene product of a gene comprising the nucleic acid molecule as shown in the respective line in column 5 of Table I (whereby the respective line disclose in column 7 the fine chemical hentriacontane), application no. 20, preferably the coding region thereof, or a homolog or a fragment thereof, and being depicted in the same respective line as said B2027, or a functional equivalent or a homolog thereof as shown in column 8 of Table I, application no. 20, preferably the coding region thereof, particularly a homolog or functional equivalent as shown in column 8 of Table I B, application no. 20, and being depicted in the same respective line as said B2027, and preferably the activity is increased non-targeted, or
[102171] (b) a polypeptide comprising a polypeptide, a consensus sequence or at least a polypeptide motif as shown in the respective line in column 5 of Table II or in column 8 of Table IV, application no. 20, respectively, and being depicted in the same respective line as said B2027, or a functional equivalent or a homolog thereof as depicted in column 8 of Table II, application no. 20, preferably a homolog or functional equivalent as depicted in column 8 of Table II B, application no. 20, and being depicted in the same respective line as said B2027, and preferably the activity is increased non-targeted, whereby the respective line disclose in column 7 the fine chemical hentriacontane.

[102172] Accordingly, in one embodiment, the molecule which activity is to be increased in the process of the invention is the gene product with an activity as a “O-antigen chain length determinant”, preferably it is the molecule of section (a) or (b) of this paragraph.

[102173] In particular, it was observed that in plants, especially in Arabidopsis thaliana, increasing or generating the activity of a gene product non-targeted with the activity of a “O-antigen chain length determinant”, preferably being encoded by a gene comprising the nucleic acid sequence SEQ ID NO. 79217, preferably the coding region thereof, conferred the production of or the increase in hentriacontane compared with the wild type control.

[102174] The nucleic acid sequence of B2053 from Escherichia coli, e.g. as shown in the respective line in column 5 of Table I, application no. 20, has been published in B. And the activity of the gene product thereof is the activity of GDP-mannose 4,6-dehydratase.

[102175] Accordingly, in one embodiment, the process of the present invention for producing hentriacontane in a non-human organism, like a microorganism or a plant or a part thereof, comprises increasing or generating the activity of a gene product with the activity of a gene product conferring the activity of “GDP-mannose 4,6-dehydratase”, especially from Escherichia coli or its functional equivalent or its homolog, e.g. the increase of
[102176] (a) a gene product of a gene comprising the nucleic acid molecule as shown in the respective line in column 5 of Table I (whereby the respective line disclose in column 7 the fine chemical hentriacontane), application no. 20, preferably the coding region thereof, or a homolog or a fragment thereof, and being depicted in the same respective line as said B2053, or a functional equivalent or a homolog thereof as shown in column 8 of Table I, application no. 20, preferably the coding region thereof, particularly a homolog or functional equivalent as shown in column 8 of Table I B, application no. 20, and being depicted in the same respective line as said B2053, and preferably the activity is increased non-targeted, or
[102177] (b) a polypeptide comprising a polypeptide, a consensus sequence or at least a polypeptide motif as shown in the respective line in column 5 of Table II or in column 8 of Table IV, application no. 20, respectively, and being depicted in the same respective line as said B2053, or a functional equivalent or a homolog thereof as depicted in column 8 of Table II, application no. 20, preferably a homolog or functional equivalent as depicted in column 8 of Table II B, application no. 20, and being depicted in the same respective line as said B2053, and preferably the activity is increased non-targeted, whereby the respective line disclose in column 7 the fine chemical hentriacontane.

[102178] Accordingly, in one embodiment, the molecule which activity is to be increased in the process of the invention is the gene product with an activity as a “GDP-mannose 4,6-dehydratase”, preferably it is the molecule of section (a) or (b) of this paragraph.

[102179] In particular, it was observed that in plants, especially in Arabidopsis thaliana, increasing or generating the activity of a gene product non-targeted with the activity of a “GDP-mannose 4,6-dehydratase”, preferably being encoded by a gene comprising the nucleic acid sequence SEQ ID NO. 104277, preferably the coding region thereof, conferred the production of or the increase in hentriacontane compared with the wild type control.

[102180] The nucleic acid sequence of B2207 from Escherichia coli, e.g. as shown in the respective line in column 5 of Table I, application no. 20, has been published in B. And the activity of the gene product thereof is the activity of assembly protein for periplasmic nitrate reductase.

[102181] Accordingly, in one embodiment, the process of the present invention for producing hentriacontane in a non-human organism, like a microorganism or a plant or a part thereof, comprises increasing or generating the activity of a gene product with the activity of a gene product conferring the activity of “assembly protein for periplasmic nitrate reductase”, especially from Escherichia coli or its functional equivalent or its homolog, e.g. the increase of
[102182] (a) a gene product of a gene comprising the nucleic acid molecule as shown in the respective line in column 5 of Table I (whereby the respective line disclose in column 7 the fine chemical hentriacontane), application no. 20, preferably the coding region thereof, or a homolog or a fragment thereof, and being depicted in the same respective line as said B2207, or a functional equivalent or a homolog thereof as shown in column 8 of Table I, application no. 20, preferably the coding region thereof, particularly a homolog or functional equivalent as shown in column 8 of Table I B, application no. 20, and being depicted in the same respective line as said B2207, and preferably the activity is increased plastidic, or
[102183] (b) a polypeptide comprising a polypeptide, a consensus sequence or at least a polypeptide motif as shown in the respective line in column 5 of Table II or in column 8 of Table IV, application no. 20, respectively, and being depicted in the same respective line as said B2207, or a functional equivalent or a homolog thereof as depicted in column 8 of Table II, application no. 20, preferably a homolog or functional equivalent as depicted in column 8 of Table II B, application no. 20, and being depicted in the same respective line as said B2207, and preferably the activity is increased plastidic, whereby the respective line disclose in column 7 the fine chemical hentriacontane.

[102184] Accordingly, in one embodiment, the molecule which activity is to be increased in the process of the invention is the gene product with an activity as a “assembly protein for periplasmic nitrate reductase”, preferably it is the molecule of section (a) or (b) of this paragraph.

[102185] In particular, it was observed that in plants, especially in Arabidopsis thaliana, increasing or generating the activity of a gene product plastidic with the activity of a “assembly protein for periplasmic nitrate reductase”, preferably being encoded by a gene comprising the nucleic acid sequence SEQ ID NO. 156810, preferably the coding region thereof, conferred the production of or the increase in hentriacontane compared with the wild type control.

[102186] The nucleic acid sequence of B2389 from Escherichia coli, e.g. as shown in the respective line in column 5 of Table I, application no. 20, has been published in B. And the activity of the gene product thereof is the activity of ion-transport protein.

[102187] Accordingly, in one embodiment, the process of the present invention for producing hentriacontane in a non-human organism, like a microorganism or a plant or a part thereof, comprises increasing or generating the activity of a gene product with the activity of a gene product conferring the activity of “ion-transport protein”, especially from Escherichia coli or its functional equivalent or its homolog, e.g. the increase of
[102188] (a) a gene product of a gene comprising the nucleic acid molecule as shown in the respective line in column 5 of Table I (whereby the respective line disclose in column 7 the fine chemical hentriacontane), application no. 20, preferably the coding region thereof, or a homolog or a fragment thereof, and being depicted in the same respective line as said B2389, or a functional equivalent or a homolog thereof as shown in column 8 of Table I, application no. 20, preferably the coding region thereof, particularly a homolog or functional equivalent as shown in column 8 of Table I B, application no. 20, and being depicted in the same respective line as said B2389, and preferably the activity is increased non-targeted, or
[102189] (b) a polypeptide comprising a polypeptide, a consensus sequence or at least a polypeptide motif as shown in the respective line in column 5 of Table II or in column 8 of Table IV, application no. 20, respectively, and being depicted in the same respective line as said B2389, or a functional equivalent or a homolog thereof as depicted in column 8 of Table II, application no. 20, preferably a homolog or functional equivalent as depicted in column 8 of Table II B, application no. 20, and being depicted in the same respective line as said B2389, and preferably the activity is increased non-targeted, whereby the respective line disclose in column 7 the fine chemical hentriacontane.

[102190] Accordingly, in one embodiment, the molecule which activity is to be increased in the process of the invention is the gene product with an activity as a “ion-transport protein”, preferably it is the molecule of section (a) or (b) of this paragraph.

[102191] In particular, it was observed that in plants, especially in Arabidopsis thaliana, increasing or generating the activity of a gene product non-targeted with the activity of a “ion-transport protein”, preferably being encoded by a gene comprising the nucleic acid sequence SEQ ID NO. 146238, preferably the coding region thereof, conferred the production of or the increase in hentriacontane compared with the wild type control.

[102192] The nucleic acid sequence of B2399 from Escherichia coli, e.g. as shown in the respective line in column 5 of Table I, application no. 20, has been published in B. And the activity of the gene product thereof is the activity of b2399-protein.

[102193] Accordingly, in one embodiment, the process of the present invention for producing hentriacontane in a non-human organism, like a microorganism or a plant or a part thereof, comprises increasing or generating the activity of a gene product with the activity of a gene product conferring the activity of “b2399-protein”, especially from Escherichia coli or its functional equivalent or its homolog, e.g. the increase of
[102194] (a) a gene product of a gene comprising the nucleic acid molecule as shown in the respective line in column 5 of Table I (whereby the respective line disclose in column 7 the fine chemical hentriacontane), application no. 20, preferably the coding region thereof, or a homolog or a fragment thereof, and being depicted in the same respective line as said B2399, or a functional equivalent or a homolog thereof as shown in column 8 of Table I, application no. 20, preferably the coding region thereof, particularly a homolog or functional equivalent as shown in column 8 of Table I B, application no. 20, and being depicted in the same respective line as said B2399, and preferably the activity is increased non-targeted, or
[102195] (b) a polypeptide comprising a polypeptide, a consensus sequence or at least a polypeptide motif as shown in the respective line in column 5 of Table II or in column 8 of Table IV, application no. 20, respectively, and being depicted in the same respective line as said B2399, or a functional equivalent or a homolog thereof as depicted in column 8 of Table II, application no. 20, preferably a homolog or functional equivalent as depicted in column 8 of Table II B, application no. 20, and being depicted in the same respective line as said B2399, and preferably the activity is increased non-targeted, whereby the respective line disclose in column 7 the fine chemical hentriacontane.

[102196] Accordingly, in one embodiment, the molecule which activity is to be increased in the process of the invention is the gene product with an activity as a “b2399-protein”, preferably it is the molecule of section (a) or (b) of this paragraph.

[102197] In particular, it was observed that in plants, especially in Arabidopsis thaliana, increasing or generating the activity of a gene product non-targeted with the activity of a “b2399-protein”, preferably being encoded by a gene comprising the nucleic acid sequence SEQ ID NO. 39237, preferably the coding region thereof, conferred the production of or the increase in hentriacontane compared with the wild type control.

[102198] The nucleic acid sequence of B2414 from Escherichia coli, e.g. as shown in the respective line in column 5 of Table I, application no. 20, has been published in B. And the activity of the gene product thereof is the activity of cysteine synthase A.

[102199] Accordingly, in one embodiment, the process of the present invention for producing hentriacontane in a non-human organism, like a microorganism or a plant or a part thereof, comprises increasing or generating the activity of a gene product with the activity of a gene product conferring the activity of “cysteine synthase A”, especially from Escherichia coli or its functional equivalent or its homolog, e.g. the increase of
[102200] (a) a gene product of a gene comprising the nucleic acid molecule as shown in the respective line in column 5 of Table I (whereby the respective line disclose in column 7 the fine chemical hentriacontane), application no. 20, preferably the coding region thereof, or a homolog or a fragment thereof, and being depicted in the same respective line as said B2414, or a functional equivalent or a homolog thereof as shown in column 8 of Table I, application no. 20, preferably the coding region thereof, particularly a homolog or functional equivalent as shown in column 8 of Table I B, application no. 20, and being depicted in the same respective line as said B2414, and preferably the activity is increased non-targeted, or
[102201] (b) a polypeptide comprising a polypeptide, a consensus sequence or at least a polypeptide motif as shown in the respective line in column 5 of Table II or in column 8 of Table IV, application no. 20, respectively, and being depicted in the same respective line as said B2414, or a functional equivalent or a homolog thereof as depicted in column 8 of Table II, application no. 20, preferably a homolog or functional equivalent as depicted in column 8 of Table II B, application no. 20, and being depicted in the same respective line as said B2414, and preferably the activity is increased non-targeted, whereby the respective line disclose in column 7 the fine chemical hentriacontane.

[102202] Accordingly, in one embodiment, the molecule which activity is to be increased in the process of the invention is the gene product with an activity as a “cysteine synthase A”, preferably it is the molecule of section (a) or (b) of this paragraph.

[102203] In particular, it was observed that in plants, especially in Arabidopsis thaliana, increasing or generating the activity of a gene product non-targeted with the activity of a “cysteine synthase A”, preferably being encoded by a gene comprising the nucleic acid sequence SEQ ID NO. 39300, preferably the coding region thereof, conferred the production of or the increase in hentriacontane compared with the wild type control.

[102204] The nucleic acid sequence of B2439 from Escherichia coli, e.g. as shown in the respective line in column 5 of Table I, application no. 20, has been published in B. And the activity of the gene product thereof is the activity of ethanolamine utilization protein.

[102205] Accordingly, in one embodiment, the process of the present invention for producing hentriacontane in a non-human organism, like a microorganism or a plant or a part thereof, comprises increasing or generating the activity of a gene product with the activity of a gene product conferring the activity of “ethanolamine utilization protein”, especially from Escherichia coli or its functional equivalent or its homolog, e.g. the increase of
[102206] (a) a gene product of a gene comprising the nucleic acid molecule as shown in the respective line in column 5 of Table I (whereby the respective line disclose in column 7 the fine chemical hentriacontane), application no. 20, preferably the coding region thereof, or a homolog or a fragment thereof, and being depicted in the same respective line as said B2439, or a functional equivalent or a homolog thereof as shown in column 8 of Table I, application no. 20, preferably the coding region thereof, particularly a homolog or functional equivalent as shown in column 8 of Table I B, application no. 20, and being depicted in the same respective line as said B2439, and preferably the activity is increased non-targeted, or
[102207] (b) a polypeptide comprising a polypeptide, a consensus sequence or at least a polypeptide motif as shown in the respective line in column 5 of Table II or in column 8 of Table IV, application no. 20, respectively, and being depicted in the same respective line as said B2439, or a functional equivalent or a homolog thereof as depicted in column 8 of Table II, application no. 20, preferably a homolog or functional equivalent as depicted in column 8 of Table II B, application no. 20, and being depicted in the same respective line as said B2439, and preferably the activity is increased non-targeted, whereby the respective line disclose in column 7 the fine chemical hentriacontane.

[102208] Accordingly, in one embodiment, the molecule which activity is to be increased in the process of the invention is the gene product with an activity as a “ethanolamine utilization protein”, preferably it is the molecule of section (a) or (b) of this paragraph.

[102209] In particular, it was observed that in plants, especially in Arabidopsis thaliana, increasing or generating the activity of a gene product non-targeted with the activity of a “ethanolamine utilization protein”, preferably being encoded by a gene comprising the nucleic acid sequence SEQ ID NO. 115628, preferably the coding region thereof, conferred the production of or the increase in hentriacontane compared with the wild type control.

[102210] The nucleic acid sequence of B2554 from Escherichia coli, e.g. as shown in the respective line in column 5 of Table I, application no. 20, has been published in B. And the activity of the gene product thereof is the activity of sigma-54 dependent response regulator.

[102211] Accordingly, in one embodiment, the process of the present invention for producing hentriacontane in a non-human organism, like a microorganism or a plant or a part thereof, comprises increasing or generating the activity of a gene product with the activity of a gene product conferring the activity of “sigma-54 dependent response regulator”, especially from Escherichia coli or its functional equivalent or its homolog, e.g. the increase of
[102212] (a) a gene product of a gene comprising the nucleic acid molecule as shown in the respective line in column 5 of Table I (whereby the respective line disclose in column 7 the fine chemical hentriacontane), application no. 20, preferably the coding region thereof, or a homolog or a fragment thereof, and being depicted in the same respective line as said B2554, or a functional equivalent or a homolog thereof as shown in column 8 of Table I, application no. 20, preferably the coding region thereof, particularly a homolog or functional equivalent as shown in column 8 of Table I B, application no. 20, and being depicted in the same respective line as said B2554, and preferably the activity is increased plastidic, or
[102213] (b) a polypeptide comprising a polypeptide, a consensus sequence or at least a polypeptide motif as shown in the respective line in column 5 of Table II or in column 8 of Table IV, application no. 20, respectively, and being depicted in the same respective line as said B2554, or a functional equivalent or a homolog thereof as depicted in column 8 of Table II, application no. 20, preferably a homolog or functional equivalent as depicted in column 8 of Table II B, application no. 20, and being depicted in the same respective line as said B2554, and preferably the activity is increased plastidic, whereby the respective line disclose in column 7 the fine chemical hentriacontane.

[102214] Accordingly, in one embodiment, the molecule which activity is to be increased in the process of the invention is the gene product with an activity as a “sigma-54 dependent response regulator”, preferably it is the molecule of section (a) or (b) of this paragraph.

[102215] In particular, it was observed that in plants, especially in Arabidopsis thaliana, increasing or generating the activity of a gene product plastidic with the activity of a “sigma-54 dependent response regulator”, preferably being encoded by a gene comprising the nucleic acid sequence SEQ ID NO. 156910, preferably the coding region thereof, conferred the production of or the increase in hentriacontane compared with the wild type control.

[102216] The nucleic acid sequence of B2653 from Escherichia coli, e.g. as shown in the respective line in column 5 of Table I, application no. 20, has been published in B. And the activity of the gene product thereof is the activity of b2653-protein.

[102217] Accordingly, in one embodiment, the process of the present invention for producing hentriacontane in a non-human organism, like a microorganism or a plant or a part thereof, comprises increasing or generating the activity of a gene product with the activity of a gene product conferring the activity of “b2653-protein”, especially from Escherichia coli or its functional equivalent or its homolog, e.g. the increase of
[102218] (a) a gene product of a gene comprising the nucleic acid molecule as shown in the respective line in column 5 of Table I (whereby the respective line disclose in column 7 the fine chemical hentriacontane), application no. 20, preferably the coding region thereof, or a homolog or a fragment thereof, and being depicted in the same respective line as said B2653, or a functional equivalent or a homolog thereof as shown in column 8 of Table I, application no. 20, preferably the coding region thereof, particularly a homolog or functional equivalent as shown in column 8 of Table I B, application no. 20, and being depicted in the same respective line as said B2653, and preferably the activity is increased non-targeted, or
[102219] (b) a polypeptide comprising a polypeptide, a consensus sequence or at least a polypeptide motif as shown in the respective line in column 5 of Table II or in column 8 of Table IV, application no. 20, respectively, and being depicted in the same respective line as said B2653, or a functional equivalent or a homolog thereof as depicted in column 8 of Table II, application no. 20, preferably a homolog or functional equivalent as depicted in column 8 of Table II B, application no. 20, and being depicted in the same respective line as said B2653, and preferably the activity is increased non-targeted, whereby the respective line disclose in column 7 the fine chemical hentriacontane.

[102220] Accordingly, in one embodiment, the molecule which activity is to be increased in the process of the invention is the gene product with an activity as a “b2653-protein”, preferably it is the molecule of section (a) or (b) of this paragraph.

[102221] In particular, it was observed that in plants, especially in Arabidopsis thaliana, increasing or generating the activity of a gene product non-targeted with the activity of a “b2653-protein”, preferably being encoded by a gene comprising the nucleic acid sequence SEQ ID NO. 146288, preferably the coding region thereof, conferred the production of or the increase in hentriacontane compared with the wild type control.

[102222] The nucleic acid sequence of B2762 from Escherichia coli, e.g. as shown in the respective line in column 5 of Table I, application no. 20, has been published in B. And the activity of the gene product thereof is the activity of phosphoadenosine phosphosulfate reductase.

[102223] Accordingly, in one embodiment, the process of the present invention for producing hentriacontane in a non-human organism, like a microorganism or a plant or a part thereof, comprises increasing or generating the activity of a gene product with the activity of a gene product conferring the activity of “phosphoadenosine phosphosulfate reductase”, especially from Escherichia coli or its functional equivalent or its homolog, e.g. the increase of
[102224] (a) a gene product of a gene comprising the nucleic acid molecule as shown in the respective line in column 5 of Table I (whereby the respective line disclose in column 7 the fine chemical hentriacontane), application no. 20, preferably the coding region thereof, or a homolog or a fragment thereof, and being depicted in the same respective line as said B2762, or a functional equivalent or a homolog thereof as shown in column 8 of Table I, application no. 20, preferably the coding region thereof, particularly a homolog or functional equivalent as shown in column 8 of Table I B, application no. 20, and being depicted in the same respective line as said B2762, and preferably the activity is increased non-targeted, or
[102225] (b) a polypeptide comprising a polypeptide, a consensus sequence or at least a polypeptide motif as shown in the respective line in column 5 of Table II or in column 8 of Table IV, application no. 20, respectively, and being depicted in the same respective line as said B2762, or a functional equivalent or a homolog thereof as depicted in column 8 of Table II, application no. 20, preferably a homolog or functional equivalent as depicted in column 8 of Table II B, application no. 20, and being depicted in the same respective line as said B2762, and preferably the activity is increased non-targeted, whereby the respective line disclose in column 7 the fine chemical hentriacontane.

[102226] Accordingly, in one embodiment, the molecule which activity is to be increased in the process of the invention is the gene product with an activity as a “phosphoadenosine phosphosulfate reductase”, preferably it is the molecule of section (a) or (b) of this paragraph.

[102227] In particular, it was observed that in plants, especially in Arabidopsis thaliana, increasing or generating the activity of a gene product non-targeted with the activity of a “phosphoadenosine phosphosulfate reductase”, preferably being encoded by a gene comprising the nucleic acid sequence SEQ ID NO. 81451, preferably the coding region thereof, conferred the production of or the increase in hentriacontane compared with the wild type control.

[102228] The nucleic acid sequence of B2818 from Escherichia coli, e.g. as shown in the respective line in column 5 of Table I, application no. 20, has been published in B. And the activity of the gene product thereof is the activity of amino-acid acetyltransferase.

[102229] Accordingly, in one embodiment, the process of the present invention for producing hentriacontane in a non-human organism, like a microorganism or a plant or a part thereof, comprises increasing or generating the activity of a gene product with the activity of a gene product conferring the activity of “amino-acid acetyltransferase”, especially from Escherichia coli or its functional equivalent or its homolog, e.g. the increase of
[102230] (a) a gene product of a gene comprising the nucleic acid molecule as shown in the respective line in column 5 of Table I (whereby the respective line disclose in column 7 the fine chemical hentriacontane), application no. 20, preferably the coding region thereof, or a homolog or a fragment thereof, and being depicted in the same respective line as said B2818, or a functional equivalent or a homolog thereof as shown in column 8 of Table I, application no. 20, preferably the coding region thereof, particularly a homolog or functional equivalent as shown in column 8 of Table I B, application no. 20, and being depicted in the same respective line as said B2818, and preferably the activity is increased non-targeted, or
[102231] (b) a polypeptide comprising a polypeptide, a consensus sequence or at least a polypeptide motif as shown in the respective line in column 5 of Table II or in column 8 of Table IV, application no. 20, respectively, and being depicted in the same respective line as said B2818, or a functional equivalent or a homolog thereof as depicted in column 8 of Table II, application no. 20, preferably a homolog or functional equivalent as depicted in column 8 of Table II B, application no. 20, and being depicted in the same respective line as said B2818, and preferably the activity is increased non-targeted, whereby the respective line disclose in column 7 the fine chemical hentriacontane.

[102232] Accordingly, in one embodiment, the molecule which activity is to be increased in the process of the invention is the gene product with an activity as a “amino-acid acetyltransferase”, preferably it is the molecule of section (a) or (b) of this paragraph.

[102233] In particular, it was observed that in plants, especially in Arabidopsis thaliana, increasing or generating the activity of a gene product non-targeted with the activity of a “amino-acid acetyltransferase”, preferably being encoded by a gene comprising the nucleic acid sequence SEQ ID NO. 81576, preferably the coding region thereof, conferred the production of or the increase in hentriacontane compared with the wild type control.

[102234] The nucleic acid sequence of B2822 from Escherichia coli, e.g. as shown in the respective line in column 5 of Table I, application no. 20, has been published in B. And the activity of the gene product thereof is the activity of exonuclease subunit.

[102235] Accordingly, in one embodiment, the process of the present invention for producing hentriacontane in a non-human organism, like a microorganism or a plant or a part thereof, comprises increasing or generating the activity of a gene product with the activity of a gene product conferring the activity of “exonuclease subunit”, especially from Escherichia coli or its functional equivalent or its homolog, e.g. the increase of
[102236] (a) a gene product of a gene comprising the nucleic acid molecule as shown in the respective line in column 5 of Table I (whereby the respective line disclose in column 7 the fine chemical hentriacontane), application no. 20, preferably the coding region thereof, or a homolog or a fragment thereof, and being depicted in the same respective line as said B2822, or a functional equivalent or a homolog thereof as shown in column 8 of Table I, application no. 20, preferably the coding region thereof, particularly a homolog or functional equivalent as shown in column 8 of Table I B, application no. 20, and being depicted in the same respective line as said B2822, and preferably the activity is increased non-targeted, or
[102237] (b) a polypeptide comprising a polypeptide, a consensus sequence or at least a polypeptide motif as shown in the respective line in column 5 of Table II or in column 8 of Table IV, application no. 20, respectively, and being depicted in the same respective line as said B2822, or a functional equivalent or a homolog thereof as depicted in column 8 of Table II, application no. 20, preferably a homolog or functional equivalent as depicted in column 8 of Table II B, application no. 20, and being depicted in the same respective line as said B2822, and preferably the activity is increased non-targeted, whereby the respective line disclose in column 7 the fine chemical hentriacontane.

[102238] Accordingly, in one embodiment, the molecule which activity is to be increased in the process of the invention is the gene product with an activity as a “exonuclease subunit”, preferably it is the molecule of section (a) or (b) of this paragraph.

[102239] In particular, it was observed that in plants, especially in Arabidopsis thaliana, increasing or generating the activity of a gene product non-targeted with the activity of a “exonuclease subunit”, preferably being encoded by a gene comprising the nucleic acid sequence SEQ ID NO. 157128, preferably the coding region thereof, conferred the production of or the increase in hentriacontane compared with the wild type control.

[102240] The nucleic acid sequence of B2957 from Escherichia coli, e.g. as shown in the respective line in column 5 of Table I, application no. 20, has been published in B. And the activity of the gene product thereof is the activity of L-asparaginase.

[102241] Accordingly, in one embodiment, the process of the present invention for producing hentriacontane in a non-human organism, like a microorganism or a plant or a part thereof, comprises increasing or generating the activity of a gene product with the activity of a gene product conferring the activity of “L-asparaginase”, especially from Escherichia coli or its functional equivalent or its homolog, e.g. the increase of
[102242] (a) a gene product of a gene comprising the nucleic acid molecule as shown in the respective line in column 5 of Table I (whereby the respective line disclose in column 7 the fine chemical hentriacontane), application no. 20, preferably the coding region thereof, or a homolog or a fragment thereof, and being depicted in the same respective line as said B2957, or a functional equivalent or a homolog thereof as shown in column 8 of Table I, application no. 20, preferably the coding region thereof, particularly a homolog or functional equivalent as shown in column 8 of Table I B, application no. 20, and being depicted in the same respective line as said B2957, and preferably the activity is increased non-targeted, or
[102243] (b) a polypeptide comprising a polypeptide, a consensus sequence or at least a polypeptide motif as shown in the respective line in column 5 of Table II or in column 8 of Table IV, application no. 20, respectively, and being depicted in the same respective line as said B2957, or a functional equivalent or a homolog thereof as depicted in column 8 of Table II, application no. 20, preferably a homolog or functional equivalent as depicted in column 8 of Table II B, application no. 20, and being depicted in the same respective line as said B2957, and preferably the activity is increased non-targeted, whereby the respective line disclose in column 7 the fine chemical hentriacontane.

[102244] Accordingly, in one embodiment, the molecule which activity is to be increased in the process of the invention is the gene product with an activity as a “L-asparaginase”, preferably it is the molecule of section (a) or (b) of this paragraph.

[102245] In particular, it was observed that in plants, especially in Arabidopsis thaliana, increasing or generating the activity of a gene product non-targeted with the activity of a “L-asparaginase”, preferably being encoded by a gene comprising the nucleic acid sequence SEQ ID NO. 41499, preferably the coding region thereof, conferred the production of or the increase in hentriacontane compared with the wild type control.

[102246] The nucleic acid sequence of B2965 from Escherichia coli, e.g. as shown in the respective line in column 5 of Table I, application no. 20, has been published in B. And the activity of the gene product thereof is the activity of ornithine decarboxylase.

[102247] Accordingly, in one embodiment, the process of the present invention for producing hentriacontane in a non-human organism, like a microorganism or a plant or a part thereof, comprises increasing or generating the activity of a gene product with the activity of a gene product conferring the activity of “ornithine decarboxylase”, especially from Escherichia coli or its functional equivalent or its homolog, e.g. the increase of
[102248] (a) a gene product of a gene comprising the nucleic acid molecule as shown in the respective line in column 5 of Table I (whereby the respective line disclose in column 7 the fine chemical hentriacontane), application no. 20, preferably the coding region thereof, or a homolog or a fragment thereof, and being depicted in the same respective line as said B2965, or a functional equivalent or a homolog thereof as shown in column 8 of Table I, application no. 20, preferably the coding region thereof, particularly a homolog or functional equivalent as shown in column 8 of Table I B, application no. 20, and being depicted in the same respective line as said B2965, and preferably the activity is increased plastidic, or
[102249] (b) a polypeptide comprising a polypeptide, a consensus sequence or at least a polypeptide motif as shown in the respective line in column 5 of Table II or in column 8 of Table IV, application no. 20, respectively, and being depicted in the same respective line as said B2965, or a functional equivalent or a homolog thereof as depicted in column 8 of Table II, application no. 20, preferably a homolog or functional equivalent as depicted in column 8 of Table II B, application no. 20, and being depicted in the same respective line as said B2965, and preferably the activity is increased plastidic, whereby the respective line disclose in column 7 the fine chemical hentriacontane.

[102250] Accordingly, in one embodiment, the molecule which activity is to be increased in the process of the invention is the gene product with an activity as a “ornithine decarboxylase”, preferably it is the molecule of section (a) or (b) of this paragraph.

[102251] In particular, it was observed that in plants, especially in Arabidopsis thaliana, increasing or generating the activity of a gene product plastidic with the activity of a “ornithine decarboxylase”, preferably being encoded by a gene comprising the nucleic acid sequence SEQ ID NO. 157321, preferably the coding region thereof, conferred the production of or the increase in hentriacontane compared with the wild type control.

[102252] The nucleic acid sequence of B3385 from Escherichia coli, e.g. as shown in the respective line in column 5 of Table I, application no. 20, has been published in B. And the activity of the gene product thereof is the activity of phosphoglycolate phosphatase.

[102253] Accordingly, in one embodiment, the process of the present invention for producing hentriacontane in a non-human organism, like a microorganism or a plant or a part thereof, comprises increasing or generating the activity of a gene product with the activity of a gene product conferring the activity of “phosphoglycolate phosphatase”, especially from Escherichia coli or its functional equivalent or its homolog, e.g. the increase of
[102254] (a) a gene product of a gene comprising the nucleic acid molecule as shown in the respective line in column 5 of Table I (whereby the respective line disclose in column 7 the fine chemical hentriacontane), application no. 20, preferably the coding region thereof, or a homolog or a fragment thereof, and being depicted in the same respective line as said B3385, or a functional equivalent or a homolog thereof as shown in column 8 of Table I, application no. 20, preferably the coding region thereof, particularly a homolog or functional equivalent as shown in column 8 of Table I B, application no. 20, and being depicted in the same respective line as said B3385, and preferably the activity is increased plastidic, or
[102255] (b) a polypeptide comprising a polypeptide, a consensus sequence or at least a polypeptide motif as shown in the respective line in column 5 of Table II or in column 8 of Table IV, application no. 20, respectively, and being depicted in the same respective line as said B3385, or a functional equivalent or a homolog thereof as depicted in column 8 of Table II, application no. 20, preferably a homolog or functional equivalent as depicted in column 8 of Table II B, application no. 20, and being depicted in the same respective line as said B3385, and preferably the activity is increased plastidic, whereby the respective line disclose in column 7 the fine chemical hentriacontane.

[102256] Accordingly, in one embodiment, the molecule which activity is to be increased in the process of the invention is the gene product with an activity as a “phosphoglycolate phosphatase”, preferably it is the molecule of section (a) or (b) of this paragraph.

[102257] In particular, it was observed that in plants, especially in Arabidopsis thaliana, increasing or generating the activity of a gene product plastidic with the activity of a “phosphoglycolate phosphatase”, preferably being encoded by a gene comprising the nucleic acid sequence SEQ ID NO. 157450, preferably the coding region thereof, conferred the production of or the increase in hentriacontane compared with the wild type control.

[102258] The nucleic acid sequence of B3568 from Escherichia coli, e.g. as shown in the respective line in column 5 of Table I, application no. 20, has been published in B. And the activity of the gene product thereof is the activity of sugar transport system permease protein.

[102259] Accordingly, in one embodiment, the process of the present invention for producing hentriacontane in a non-human organism, like a microorganism or a plant or a part thereof, comprises increasing or generating the activity of a gene product with the activity of a gene product conferring the activity of “sugar transport system permease protein”, especially from Escherichia coli or its functional equivalent or its homolog, e.g. the increase of
[102260] (a) a gene product of a gene comprising the nucleic acid molecule as shown in the respective line in column 5 of Table I (whereby the respective line disclose in column 7 the fine chemical hentriacontane), application no. 20, preferably the coding region thereof, or a homolog or a fragment thereof, and being depicted in the same respective line as said B3568, or a functional equivalent or a homolog thereof as shown in column 8 of Table I, application no. 20, preferably the coding region thereof, particularly a homolog or functional equivalent as shown in column 8 of Table I B, application no. 20, and being depicted in the same respective line as said B3568, and preferably the activity is increased plastidic, or
[102261] (b) a polypeptide comprising a polypeptide, a consensus sequence or at least a polypeptide motif as shown in the respective line in column 5 of Table II or in column 8 of Table IV, application no. 20, respectively, and being depicted in the same respective line as said B3568, or a functional equivalent or a homolog thereof as depicted in column 8 of Table II, application no. 20, preferably a homolog or functional equivalent as depicted in column 8 of Table II B, application no. 20, and being depicted in the same respective line as said B3568, and preferably the activity is increased plastidic, whereby the respective line disclose in column 7 the fine chemical hentriacontane.

[102262] Accordingly, in one embodiment, the molecule which activity is to be increased in the process of the invention is the gene product with an activity as a “sugar transport system permease protein”, preferably it is the molecule of section (a) or (b) of this paragraph.

[102263] In particular, it was observed that in plants, especially in Arabidopsis thaliana, increasing or generating the activity of a gene product plastidic with the activity of a “sugar transport system permease protein”, preferably being encoded by a gene comprising the nucleic acid sequence SEQ ID NO. 125264, preferably the coding region thereof, conferred the production of or the increase in hentriacontane compared with the wild type control.

[102264] The nucleic acid sequence of GM02LC44512 from Glycine max, e.g. as shown in the respective line in column 5 of Table I, application no. 20, is unpublished. And the activity of the gene product thereof is the activity of cyclin D.

[102265] Accordingly, in one embodiment, the process of the present invention for producing hentriacontane in a non-human organism, like a microorganism or a plant or a part thereof, comprises increasing or generating the activity of a gene product with the activity of a gene product conferring the activity of “cyclin D”, especially from Glycine max or its functional equivalent or its homolog, e.g. the increase of
[102266] (a) a gene product of a gene comprising the nucleic acid molecule as shown in the respective line in column 5 of Table I (whereby the respective line disclose in column 7 the fine chemical hentriacontane), application no. 20, preferably the coding region thereof, or a homolog or a fragment thereof, and being depicted in the same respective line as said GM02LC44512, or a functional equivalent or a homolog thereof as shown in column 8 of Table I, application no. 20, preferably the coding region thereof, particularly a homolog or functional equivalent as shown in column 8 of Table I B, application no. 20, and being depicted in the same respective line as said GM02LC44512, and preferably the activity is increased non-targeted, or
[102267] (b) a polypeptide comprising a polypeptide, a consensus sequence or at least a polypeptide motif as shown in the respective line in column 5 of Table II or in column 8 of Table IV, application no. 20, respectively, and being depicted in the same respective line as said GM02LC44512, or a functional equivalent or a homolog thereof as depicted in column 8 of Table II, application no. 20, preferably a homolog or functional equivalent as depicted in column 8 of Table II B, application no. 20, and being depicted in the same respective line as said GM02LC44512, and preferably the activity is increased non-targeted, whereby the respective line disclose in column 7 the fine chemical hentriacontane.

[102268] Accordingly, in one embodiment, the molecule which activity is to be increased in the process of the invention is the gene product with an activity as a “cyclin D”, preferably it is the molecule of section (a) or (b) of this paragraph.

[102269] In particular, it was observed that in plants, especially in Arabidopsis thaliana, increasing or generating the activity of a gene product non-targeted with the activity of a “cyclin D”, preferably being encoded by a gene comprising the nucleic acid sequence SEQ ID NO. 46850, preferably the coding region thereof, conferred the production of or the increase in hentriacontane compared with the wild type control.

[102270] The nucleic acid sequence of Slr2124 from Synechocystis sp., e.g. as shown in the respective line in column 5 of Table I, application no. 20, has been published in C. And the activity of the gene product thereof is the activity of short-chain alcohol dehydrogenase family.

[102271] Accordingly, in one embodiment, the process of the present invention for producing hentriacontane in a non-human organism, like a microorganism or a plant or a part thereof, comprises increasing or generating the activity of a gene product with the activity of a gene product conferring the activity of “short-chain alcohol dehydrogenase family”, especially from Synechocystis sp. or its functional equivalent or its homolog, e.g. the increase of
[102272] (a) a gene product of a gene comprising the nucleic acid molecule as shown in the respective line in column 5 of Table I (whereby the respective line disclose in column 7 the fine chemical hentriacontane), application no. 20, preferably the coding region thereof, or a homolog or a fragment thereof, and being depicted in the same respective line as said Slr2124, or a functional equivalent or a homolog thereof as shown in column 8 of Table I, application no. 20, preferably the coding region thereof, particularly a homolog or functional equivalent as shown in column 8 of Table I B, application no. 20, and being depicted in the same respective line as said Slr2124, and preferably the activity is increased plastidic, or
[102273] (b) a polypeptide comprising a polypeptide, a consensus sequence or at least a polypeptide motif as shown in the respective line in column 5 of Table II or in column 8 of Table IV, application no. 20, respectively, and being depicted in the same respective line as said Slr2124, or a functional equivalent or a homolog thereof as depicted in column 8 of Table II, application no. 20, preferably a homolog or functional equivalent as depicted in column 8 of Table II B, application no. 20, and being depicted in the same respective line as said Slr2124, and preferably the activity is increased plastidic, whereby the respective line disclose in column 7 the fine chemical hentriacontane.

[102274] Accordingly, in one embodiment, the molecule which activity is to be increased in the process of the invention is the gene product with an activity as a “short-chain alcohol dehydrogenase family”, preferably it is the molecule of section (a) or (b) of this paragraph.

[102275] In particular, it was observed that in plants, especially in Arabidopsis thaliana, increasing or generating the activity of a gene product plastidic with the activity of a “short-chain alcohol dehydrogenase family”, preferably being encoded by a gene comprising the nucleic acid sequence SEQ ID NO. 59370, preferably the coding region thereof, conferred the production of or the increase in hentriacontane compared with the wild type control.

[102276] The nucleic acid sequence of TTC0035 from Thermus thermophilus, e.g. as shown in the respective line in column 5 of Table I, application no. 20, has been published in E. And the activity of the gene product thereof is the activity of cell division protein.

[102277] Accordingly, in one embodiment, the process of the present invention for producing hentriacontane in a non-human organism, like a microorganism or a plant or a part thereof, comprises increasing or generating the activity of a gene product with the activity of a gene product conferring the activity of “cell division protein”, especially from Thermus thermophilus or its functional equivalent or its homolog, e.g. the increase of
[102278] (a) a gene product of a gene comprising the nucleic acid molecule as shown in the respective line in column 5 of Table I (whereby the respective line disclose in column 7 the fine chemical hentriacontane), application no. 20, preferably the coding region thereof, or a homolog or a fragment thereof, and being depicted in the same respective line as said TTC0035, or a functional equivalent or a homolog thereof as shown in column 8 of Table I, application no. 20, preferably the coding region thereof, particularly a homolog or functional equivalent as shown in column 8 of Table I B, application no. 20, and being depicted in the same respective line as said TTC0035, and preferably the activity is increased non-targeted, or
[102279] (b) a polypeptide comprising a polypeptide, a consensus sequence or at least a polypeptide motif as shown in the respective line in column 5 of Table II or in column 8 of Table IV, application no. 20, respectively, and being depicted in the same respective line as said TTC0035, or a functional equivalent or a homolog thereof as depicted in column 8 of Table II, application no. 20, preferably a homolog or functional equivalent as depicted in column 8 of Table II B, application no. 20, and being depicted in the same respective line as said TTC0035, and preferably the activity is increased non-targeted, whereby the respective line disclose in column 7 the fine chemical hentriacontane.

[102280] Accordingly, in one embodiment, the molecule which activity is to be increased in the process of the invention is the gene product with an activity as a “cell division protein”, preferably it is the molecule of section (a) or (b) of this paragraph.

[102281] In particular, it was observed that in plants, especially in Arabidopsis thaliana, increasing or generating the activity of a gene product non-targeted with the activity of a “cell division protein”, preferably being encoded by a gene comprising the nucleic acid sequence SEQ ID NO. 60301, preferably the coding region thereof, conferred the production of or the increase in hentriacontane compared with the wild type control.

[102282] The nucleic acid sequence of TTC0917 from Thermus thermophilus, e.g. as shown in the respective line in column 5 of Table I, application no. 20, has been published in E. And the activity of the gene product thereof is the activity of metal-dependent hydrolase.

[102283] Accordingly, in one embodiment, the process of the present invention for producing hentriacontane in a non-human organism, like a microorganism or a plant or a part thereof, comprises increasing or generating the activity of a gene product with the activity of a gene product conferring the activity of “metal-dependent hydrolase”, especially from Thermus thermophilus or its functional equivalent or its homolog, e.g. the increase of
[102284] (a) a gene product of a gene comprising the nucleic acid molecule as shown in the respective line in column 5 of Table I (whereby the respective line disclose in column 7 the fine chemical hentriacontane), application no. 20, preferably the coding region thereof, or a homolog or a fragment thereof, and being depicted in the same respective line as said TTC0917, or a functional equivalent or a homolog thereof as shown in column 8 of Table I, application no. 20, preferably the coding region thereof, particularly a homolog or functional equivalent as shown in column 8 of Table I B, application no. 20, and being depicted in the same respective line as said TTC0917, and preferably the activity is increased non-targeted, or
[102285] (b) a polypeptide comprising a polypeptide, a consensus sequence or at least a polypeptide motif as shown in the respective line in column 5 of Table II or in column 8 of Table IV, application no. 20, respectively, and being depicted in the same respective line as said TTC0917, or a functional equivalent or a homolog thereof as depicted in column 8 of Table II, application no. 20, preferably a homolog or functional equivalent as depicted in column 8 of Table II B, application no. 20, and being depicted in the same respective line as said TTC0917, and preferably the activity is increased non-targeted, whereby the respective line disclose in column 7 the fine chemical hentriacontane.

[102286] Accordingly, in one embodiment, the molecule which activity is to be increased in the process of the invention is the gene product with an activity as a “metal-dependent hydrolase”, preferably it is the molecule of section (a) or (b) of this paragraph.

[102287] In particular, it was observed that in plants, especially in Arabidopsis thaliana, increasing or generating the activity of a gene product non-targeted with the activity of a “metal-dependent hydrolase”, preferably being encoded by a gene comprising the nucleic acid sequence SEQ ID NO. 61553, preferably the coding region thereof, conferred the production of or the increase in hentriacontane compared with the wild type control.

[102288] The nucleic acid sequence of Ybr249c from Saccharomyces cerevisiae, e.g. as shown in the respective line in column 5 of Table I, application no. 20, has been published in A. And the activity of the gene product thereof is the activity of 3-deoxy-7-phosphoheptulonate synthase.

[102289] Accordingly, in one embodiment, the process of the present invention for producing hentriacontane in a non-human organism, like a microorganism or a plant or a part thereof, comprises increasing or generating the activity of a gene product with the activity of a gene product conferring the activity of “3-deoxy-7-phosphoheptulonate synthase”, especially from Saccharomyces cerevisiae or its functional equivalent or its homolog, e.g. the increase of
[102290] (a) a gene product of a gene comprising the nucleic acid molecule as shown in the respective line in column 5 of Table I (whereby the respective line disclose in column 7 the fine chemical hentriacontane), application no. 20, preferably the coding region thereof, or a homolog or a fragment thereof, and being depicted in the same respective line as said Ybr249c, or a functional equivalent or a homolog thereof as shown in column 8 of Table I, application no. 20, preferably the coding region thereof, particularly a homolog or functional equivalent as shown in column 8 of Table I B, application no. 20, and being depicted in the same respective line as said Ybr249c, and preferably the activity is increased plastidic, or
[102291] (b) a polypeptide comprising a polypeptide, a consensus sequence or at least a polypeptide motif as shown in the respective line in column 5 of Table II or in column 8 of Table IV, application no. 20, respectively, and being depicted in the same respective line as said Ybr249c, or a functional equivalent or a homolog thereof as depicted in column 8 of Table II, application no. 20, preferably a homolog or functional equivalent as depicted in column 8 of Table II B, application no. 20, and being depicted in the same respective line as said Ybr249c, and preferably the activity is increased plastidic, whereby the respective line disclose in column 7 the fine chemical hentriacontane.

[102292] Accordingly, in one embodiment, the molecule which activity is to be increased in the process of the invention is the gene product with an activity as a “3-deoxy-7-phosphoheptulonate synthase”, preferably it is the molecule of section (a) or (b) of this paragraph.

[102293] In particular, it was observed that in plants, especially in Arabidopsis thaliana, increasing or generating the activity of a gene product plastidic with the activity of a “3-deoxy-7-phosphoheptulonate synthase”, preferably being encoded by a gene comprising the nucleic acid sequence SEQ ID NO. 88879, preferably the coding region thereof, conferred the production of or the increase in hentriacontane compared with the wild type control.

[102294] The nucleic acid sequence of Yfl019c from Saccharomyces cerevisiae, e.g. as shown in the respective line in column 5 of Table I, application no. 20, has been published in A. And the activity of the gene product thereof is the activity of YFL019C-protein.

[102295] Accordingly, in one embodiment, the process of the present invention for producing hentriacontane in a non-human organism, like a microorganism or a plant or a part thereof, comprises increasing or generating the activity of a gene product with the activity of a gene product conferring the activity of “YFL019C-protein”, especially from Saccharomyces cerevisiae or its functional equivalent or its homolog, e.g. the increase of
[102296] (a) a gene product of a gene comprising the nucleic acid molecule as shown in the respective line in column 5 of Table I (whereby the respective line disclose in column 7 the fine chemical hentriacontane), application no. 20, preferably the coding region thereof, or a homolog or a fragment thereof, and being depicted in the same respective line as said Yfl019c, or a functional equivalent or a homolog thereof as shown in column 8 of Table I, application no. 20, preferably the coding region thereof, particularly a homolog or functional equivalent as shown in column 8 of Table I B, application no. 20, and being depicted in the same respective line as said Yfl019c, and preferably the activity is increased non-targeted, or
[102297] (b) a polypeptide comprising a polypeptide, a consensus sequence or at least a polypeptide motif as shown in the respective line in column 5 of Table II or in column 8 of Table IV, application no. 20, respectively, and being depicted in the same respective line as said Yfl019c, or a functional equivalent or a homolog thereof as depicted in column 8 of Table II, application no. 20, preferably a homolog or functional equivalent as depicted in column 8 of Table II B, application no. 20, and being depicted in the same respective line as said Yfl019c, and preferably the activity is increased non-targeted, whereby the respective line disclose in column 7 the fine chemical hentriacontane.

[102298] Accordingly, in one embodiment, the molecule which activity is to be increased in the process of the invention is the gene product with an activity as a “YFL0190-protein”, preferably it is the molecule of section (a) or (b) of this paragraph.

[102299] In particular, it was observed that in plants, especially in Arabidopsis thaliana, increasing or generating the activity of a gene product non-targeted with the activity of a “YFL019C-protein”, preferably being encoded by a gene comprising the nucleic acid sequence SEQ ID NO. 64144, preferably the coding region thereof, conferred the production of or the increase in hentriacontane compared with the wild type control.

[102300] The nucleic acid sequence of Yfl053w from Saccharomyces cerevisiae, e.g. as shown in the respective line in column 5 of Table I, application no. 20, has been published in A. And the activity of the gene product thereof is the activity of dihydroxyacetone kinase.

[102301] Accordingly, in one embodiment, the process of the present invention for producing hentriacontane in a non-human organism, like a microorganism or a plant or a part thereof, comprises increasing or generating the activity of a gene product with the activity of a gene product conferring the activity of “dihydroxyacetone kinase”, especially from Saccharomyces cerevisiae or its functional equivalent or its homolog, e.g. the increase of
[102302] (a) a gene product of a gene comprising the nucleic acid molecule as shown in the respective line in column 5 of Table I (whereby the respective line disclose in column 7 the fine chemical hentriacontane), application no. 20, preferably the coding region thereof, or a homolog or a fragment thereof, and being depicted in the same respective line as said Yfl053w, or a functional equivalent or a homolog thereof as shown in column 8 of Table I, application no. 20, preferably the coding region thereof, particularly a homolog or functional equivalent as shown in column 8 of Table I B, application no. 20, and being depicted in the same respective line as said Yfl053w, and preferably the activity is increased non-targeted, or
[102303] (b) a polypeptide comprising a polypeptide, a consensus sequence or at least a polypeptide motif as shown in the respective line in column 5 of Table II or in column 8 of Table IV, application no. 20, respectively, and being depicted in the same respective line as said Yfl053w, or a functional equivalent or a homolog thereof as depicted in column 8 of Table II, application no. 20, preferably a homolog or functional equivalent as depicted in column 8 of Table II B, application no. 20, and being depicted in the same respective line as said Yfl053w, and preferably the activity is increased non-targeted, whereby the respective line disclose in column 7 the fine chemical hentriacontane.

[102304] Accordingly, in one embodiment, the molecule which activity is to be increased in the process of the invention is the gene product with an activity as a “dihydroxyacetone kinase”, preferably it is the molecule of section (a) or (b) of this paragraph.

[102305] In particular, it was observed that in plants, especially in Arabidopsis thaliana, increasing or generating the activity of a gene product non-targeted with the activity of a “dihydroxyacetone kinase”, preferably being encoded by a gene comprising the nucleic acid sequence SEQ ID NO. 120309, preferably the coding region thereof, conferred the production of or the increase in hentriacontane compared with the wild type control.

[102306] The nucleic acid sequence of YGRO55W from Saccharomyces cerevisiae, e.g. as shown in the respective line in column 5 of Table I, application no. 20, has been published in A. And the activity of the gene product thereof is the activity of methionine permease.

[102307] Accordingly, in one embodiment, the process of the present invention for producing hentriacontane in a non-human organism, like a microorganism or a plant or a part thereof, comprises increasing or generating the activity of a gene product with the activity of a gene product conferring the activity of “methionine permease”, especially from Saccharomyces cerevisiae or its functional equivalent or its homolog, e.g. the increase of
[102308] (a) a gene product of a gene comprising the nucleic acid molecule as shown in the respective line in column 5 of Table I (whereby the respective line disclose in column 7 the fine chemical hentriacontane), application no. 20, preferably the coding region thereof, or a homolog or a fragment thereof, and being depicted in the same respective line as said YGRO55W, or a functional equivalent or a homolog thereof as shown in column 8 of Table I, application no. 20, preferably the coding region thereof, particularly a homolog or functional equivalent as shown in column 8 of Table I B, application no. 20, and being depicted in the same respective line as said YGRO55W, and preferably the activity is increased plastidic, or
[102309] (b) a polypeptide comprising a polypeptide, a consensus sequence or at least a polypeptide motif as shown in the respective line in column 5 of Table II or in column 8 of Table IV, application no. 20, respectively, and being depicted in the same respective line as said YGRO55W, or a functional equivalent or a homolog thereof as depicted in column 8 of Table II, application no. 20, preferably a homolog or functional equivalent as depicted in column 8 of Table II B, application no. 20, and being depicted in the same respective line as said YGRO55W, and preferably the activity is increased plastidic, whereby the respective line disclose in column 7 the fine chemical hentriacontane.

[102310] Accordingly, in one embodiment, the molecule which activity is to be increased in the process of the invention is the gene product with an activity as a “methionine permease”, preferably it is the molecule of section (a) or (b) of this paragraph.

[102311] In particular, it was observed that in plants, especially in Arabidopsis thaliana, increasing or generating the activity of a gene product plastidic with the activity of a “methionine permease”, preferably being encoded by a gene comprising the nucleic acid sequence SEQ ID NO. 157717, preferably the coding region thereof, conferred the production of or the increase in hentriacontane compared with the wild type control.

[102312] The nucleic acid sequence of YHL039W from Saccharomyces cerevisiae, e.g. as shown in the respective line in column 5 of Table I, application no. 20, has been published in A. And the activity of the gene product thereof is the activity of YHL039W-protein.

[102313] Accordingly, in one embodiment, the process of the present invention for producing hentriacontane in a non-human organism, like a microorganism or a plant or a part thereof, comprises increasing or generating the activity of a gene product with the activity of a gene product conferring the activity of “YHL039W-protein”, especially from Saccharomyces cerevisiae or its functional equivalent or its homolog, e.g. the increase of
[102314] (a) a gene product of a gene comprising the nucleic acid molecule as shown in the respective line in column 5 of Table I (whereby the respective line disclose in column 7 the fine chemical hentriacontane), application no. 20, preferably the coding region thereof, or a homolog or a fragment thereof, and being depicted in the same respective line as said YHL039W, or a functional equivalent or a homolog thereof as shown in column 8 of Table I, application no. 20, preferably the coding region thereof, particularly a homolog or functional equivalent as shown in column 8 of Table I B, application no. 20, and being depicted in the same respective line as said YHL039W, and preferably the activity is increased plastidic, or
[102315] (b) a polypeptide comprising a polypeptide, a consensus sequence or at least a polypeptide motif as shown in the respective line in column 5 of Table II or in column 8 of Table IV, application no. 20, respectively, and being depicted in the same respective line as said YHL039W, or a functional equivalent or a homolog thereof as depicted in column 8 of Table II, application no. 20, preferably a homolog or functional equivalent as depicted in column 8 of Table II B, application no. 20, and being depicted in the same respective line as said YHL039W, and preferably the activity is increased plastidic, whereby the respective line disclose in column 7 the fine chemical hentriacontane.

[102316] Accordingly, in one embodiment, the molecule which activity is to be increased in the process of the invention is the gene product with an activity as a “YHL039W-protein”, preferably it is the molecule of section (a) or (b) of this paragraph.

[102317] In particular, it was observed that in plants, especially in Arabidopsis thaliana, increasing or generating the activity of a gene product plastidic with the activity of a “YHL039W-protein”, preferably being encoded by a gene comprising the nucleic acid sequence SEQ ID NO. 157832, preferably the coding region thereof, conferred the production of or the increase in hentriacontane compared with the wild type control.

[102318] The nucleic acid sequence of Yhr022c-a from Saccharomyces cerevisiae, e.g. as shown in the respective line in column 5 of Table I, application no. 20, has been published in A. And the activity of the gene product thereof is the activity of YHR022C-A-protein.

[102319] Accordingly, in one embodiment, the process of the present invention for producing hentriacontane in a non-human organism, like a microorganism or a plant or a part thereof, comprises increasing or generating the activity of a gene product with the activity of a gene product conferring the activity of “YHR022C-A-protein”, especially from Saccharomyces cerevisiae or its functional equivalent or its homolog, e.g. the increase of
[102320] (a) a gene product of a gene comprising the nucleic acid molecule as shown in the respective line in column 5 of Table I (whereby the respective line disclose in column 7 the fine chemical hentriacontane), application no. 20, preferably the coding region thereof, or a homolog or a fragment thereof, and being depicted in the same respective line as said Yhr022c-a, or a functional equivalent or a homolog thereof as shown in column 8 of Table I, application no. 20, preferably the coding region thereof, particularly a homolog or functional equivalent as shown in column 8 of Table I B, application no. 20, and being depicted in the same respective line as said Yhr022c-a, and preferably the activity is increased non-targeted, or
[102321] (b) a polypeptide comprising a polypeptide, a consensus sequence or at least a polypeptide motif as shown in the respective line in column 5 of Table II or in column 8 of Table IV, application no. 20, respectively, and being depicted in the same respective line as said Yhr022c-a, or a functional equivalent or a homolog thereof as depicted in column 8 of Table II, application no. 20, preferably a homolog or functional equivalent as depicted in column 8 of Table II B, application no. 20, and being depicted in the same respective line as said Yhr022c-a, and preferably the activity is increased non-targeted, whereby the respective line disclose in column 7 the fine chemical hentriacontane.

[102322] Accordingly, in one embodiment, the molecule which activity is to be increased in the process of the invention is the gene product with an activity as a “YHR022C-A-protein”, preferably it is the molecule of section (a) or (b) of this paragraph.

[102323] In particular, it was observed that in plants, especially in Arabidopsis thaliana, increasing or generating the activity of a gene product non-targeted with the activity of a “YHR022C-A-protein”, preferably being encoded by a gene comprising the nucleic acid sequence SEQ ID NO. 157858, preferably the coding region thereof, conferred the production of or the increase in hentriacontane compared with the wild type control.

[102324] The nucleic acid sequence of Yjl127w-a from Saccharomyces cerevisiae, e.g. as shown in the respective line in column 5 of Table I, application no. 20, has been published in A. And the activity of the gene product thereof is the activity of YJL127W-A-protein.

[102325] Accordingly, in one embodiment, the process of the present invention for producing hentriacontane in a non-human organism, like a microorganism or a plant or a part thereof, comprises increasing or generating the activity of a gene product with the activity of a gene product conferring the activity of “YJL127W-A-protein”, especially from Saccharomyces cerevisiae or its functional equivalent or its homolog, e.g. the increase of
[102326] (a) a gene product of a gene comprising the nucleic acid molecule as shown in the respective line in column 5 of Table I (whereby the respective line disclose in column 7 the fine chemical hentriacontane), application no. 20, preferably the coding region thereof, or a homolog or a fragment thereof, and being depicted in the same respective line as said Yjl127w-a, or a functional equivalent or a homolog thereof as shown in column 8 of Table I, application no. 20, preferably the coding region thereof, particularly a homolog or functional equivalent as shown in column 8 of Table I B, application no. 20, and being depicted in the same respective line as said Yjl127w-a, and preferably the activity is increased non-targeted, or
[102327] (b) a polypeptide comprising a polypeptide, a consensus sequence or at least a polypeptide motif as shown in the respective line in column 5 of Table II or in column 8 of Table IV, application no. 20, respectively, and being depicted in the same respective line as said Yjl127w-a, or a functional equivalent or a homolog thereof as depicted in column 8 of Table II, application no. 20, preferably a homolog or functional equivalent as depicted in column 8 of Table II B, application no. 20, and being depicted in the same respective line as said Yjl127w-a, and preferably the activity is increased non-targeted, whereby the respective line disclose in column 7 the fine chemical hentriacontane.

[102328] Accordingly, in one embodiment, the molecule which activity is to be increased in the process of the invention is the gene product with an activity as a “YJL127W-A-protein”, preferably it is the molecule of section (a) or (b) of this paragraph.

[102329] In particular, it was observed that in plants, especially in Arabidopsis thaliana, increasing or generating the activity of a gene product non-targeted with the activity of a “YJL127W-A-protein”, preferably being encoded by a gene comprising the nucleic acid sequence SEQ ID NO. 97631, preferably the coding region thereof, conferred the production of or the increase in hentriacontane compared with the wild type control.

[102330] The nucleic acid sequence of Ylr157c from Saccharomyces cerevisiae, e.g. as shown in the respective line in column 5 of Table I, application no. 20, has been published in A. And the activity of the gene product thereof is the activity of ylr157c-protein.

[102331] Accordingly, in one embodiment, the process of the present invention for producing hentriacontane in a non-human organism, like a microorganism or a plant or a part thereof, comprises increasing or generating the activity of a gene product with the activity of a gene product conferring the activity of “yid 57c-protein”, especially from Saccharomyces cerevisiae or its functional equivalent or its homolog, e.g. the increase of
[102332] (a) a gene product of a gene comprising the nucleic acid molecule as shown in the respective line in column 5 of Table I (whereby the respective line disclose in column 7 the fine chemical hentriacontane), application no. 20, preferably the coding region thereof, or a homolog or a fragment thereof, and being depicted in the same respective line as said Ylr157c, or a functional equivalent or a homolog thereof as shown in column 8 of Table I, application no. 20, preferably the coding region thereof, particularly a homolog or functional equivalent as shown in column 8 of Table I B, application no. 20, and being depicted in the same respective line as said Ylr157c, and preferably the activity is increased plastidic, or
[102333] (b) a polypeptide comprising a polypeptide, a consensus sequence or at least a polypeptide motif as shown in the respective line in column 5 of Table II or in column 8 of Table IV, application no. 20, respectively, and being depicted in the same respective line as said Ylr157c, or a functional equivalent or a homolog thereof as depicted in column 8 of Table II, application no. 20, preferably a homolog or functional equivalent as depicted in column 8 of Table II B, application no. 20, and being depicted in the same respective line as said Ylr157c, and preferably the activity is increased plastidic, whereby the respective line disclose in column 7 the fine chemical hentriacontane.

[102334] Accordingly, in one embodiment, the molecule which activity is to be increased in the process of the invention is the gene product with an activity as a “ylr157c-protein”, preferably it is the molecule of section (a) or (b) of this paragraph.

[102335] In particular, it was observed that in plants, especially in Arabidopsis thaliana, increasing or generating the activity of a gene product plastidic with the activity of a “yid 57c-protein”, preferably being encoded by a gene comprising the nucleic acid sequence SEQ ID NO. 157862, preferably the coding region thereof, conferred the production of or the increase in hentriacontane compared with the wild type control.

[102336] The nucleic acid sequence of Ynl321w from Saccharomyces cerevisiae, e.g. as shown in the respective line in column 5 of Table I, application no. 20, has been published in A. And the activity of the gene product thereof is the activity of ynl321w-protein.

[102337] Accordingly, in one embodiment, the process of the present invention for producing hentriacontane in a non-human organism, like a microorganism or a plant or a part thereof, comprises increasing or generating the activity of a gene product with the activity of a gene product conferring the activity of “ynl321w-protein”, especially from Saccharomyces cerevisiae or its functional equivalent or its homolog, e.g. the increase of
[102338] (a) a gene product of a gene comprising the nucleic acid molecule as shown in the respective line in column 5 of Table I (whereby the respective line disclose in column 7 the fine chemical hentriacontane), application no. 20, preferably the coding region thereof, or a homolog or a fragment thereof, and being depicted in the same respective line as said Ynl321w, or a functional equivalent or a homolog thereof as shown in column 8 of Table I, application no. 20, preferably the coding region thereof, particularly a homolog or functional equivalent as shown in column 8 of Table I B, application no. 20, and being depicted in the same respective line as said Ynl321w, and preferably the activity is increased plastidic, or
[102339] (b) a polypeptide comprising a polypeptide, a consensus sequence or at least a polypeptide motif as shown in the respective line in column 5 of Table II or in column 8 of Table IV, application no. 20, respectively, and being depicted in the same respective line as said Ynl321w, or a functional equivalent or a homolog thereof as depicted in column 8 of Table II, application no. 20, preferably a homolog or functional equivalent as depicted in column 8 of Table II B, application no. 20, and being depicted in the same respective line as said Ynl321w, and preferably the activity is increased plastidic, whereby the respective line disclose in column 7 the fine chemical hentriacontane.

[102340] Accordingly, in one embodiment, the molecule which activity is to be increased in the process of the invention is the gene product with an activity as a “ynl321w-protein”, preferably it is the molecule of section (a) or (b) of this paragraph.

[102341] In particular, it was observed that in plants, especially in Arabidopsis thaliana, increasing or generating the activity of a gene product plastidic with the activity of a “ynl321w-protein”, preferably being encoded by a gene comprising the nucleic acid sequence SEQ ID NO. 129546, preferably the coding region thereof, conferred the production of or the increase in hentriacontane compared with the wild type control.

[102342] The nucleic acid sequence of Ypr170c from Saccharomyces cerevisiae, e.g. as shown in the respective line in column 5 of Table I, application no. 20, has been published in A. And the activity of the gene product thereof is the activity of ypr170c-protein.

[102343] Accordingly, in one embodiment, the process of the present invention for producing hentriacontane in a non-human organism, like a microorganism or a plant or a part thereof, comprises increasing or generating the activity of a gene product with the activity of a gene product conferring the activity of “ypr170c-protein”, especially from Saccharomyces cerevisiae or its functional equivalent or its homolog, e.g. the increase of
[102344] (a) a gene product of a gene comprising the nucleic acid molecule as shown in the respective line in column 5 of Table I (whereby the respective line disclose in column 7 the fine chemical hentriacontane), application no. 20, preferably the coding region thereof, or a homolog or a fragment thereof, and being depicted in the same respective line as said Ypr170c, or a functional equivalent or a homolog thereof as shown in column 8 of Table I, application no. 20, preferably the coding region thereof, particularly a homolog or functional equivalent as shown in column 8 of Table I B, application no. 20, and being depicted in the same respective line as said Ypr170c, and preferably the activity is increased plastidic, or
[102345] (b) a polypeptide comprising a polypeptide, a consensus sequence or at least a polypeptide motif as shown in the respective line in column 5 of Table II or in column 8 of Table IV, application no. 20, respectively, and being depicted in the same respective line as said Ypr170c, or a functional equivalent or a homolog thereof as depicted in column 8 of Table II, application no. 20, preferably a homolog or functional equivalent as depicted in column 8 of Table II B, application no. 20, and being depicted in the same respective line as said Ypr170c, and preferably the activity is increased plastidic, whereby the respective line disclose in column 7 the fine chemical hentriacontane.

[102346] Accordingly, in one embodiment, the molecule which activity is to be increased in the process of the invention is the gene product with an activity as a “ypr170c-protein”, preferably it is the molecule of section (a) or (b) of this paragraph.

[102347] In particular, it was observed that in plants, especially in Arabidopsis thaliana, increasing or generating the activity of a gene product plastidic with the activity of a “ypr170c-protein”, preferably being encoded by a gene comprising the nucleic acid sequence SEQ ID NO. 113647, preferably the coding region thereof, conferred the production of or the increase in hentriacontane compared with the wild type control.

[102348] The nucleic acid sequence of YPR172W from Saccharomyces cerevisiae, e.g. as shown in the respective line in column 5 of Table I, application no. 20, has been published in A. And the activity of the gene product thereof is the activity of YPR172W-protein.

[102349] Accordingly, in one embodiment, the process of the present invention for producing hentriacontane in a non-human organism, like a microorganism or a plant or a part thereof, comprises increasing or generating the activity of a gene product with the activity of a gene product conferring the activity of “YPR172W-protein”, especially from Saccharomyces cerevisiae or its functional equivalent or its homolog, e.g. the increase of
[102350] (a) a gene product of a gene comprising the nucleic acid molecule as shown in the respective line in column 5 of Table I (whereby the respective line disclose in column 7 the fine chemical hentriacontane), application no. 20, preferably the coding region thereof, or a homolog or a fragment thereof, and being depicted in the same respective line as said YPR172W, or a functional equivalent or a homolog thereof as shown in column 8 of Table I, application no. 20, preferably the coding region thereof, particularly a homolog or functional equivalent as shown in column 8 of Table I B, application no. 20, and being depicted in the same respective line as said YPR172W, and preferably the activity is increased non-targeted, or
[102351] (b) a polypeptide comprising a polypeptide, a consensus sequence or at least a polypeptide motif as shown in the respective line in column 5 of Table II or in column 8 of Table IV, application no. 20, respectively, and being depicted in the same respective line as said YPR172W, or a functional equivalent or a homolog thereof as depicted in column 8 of Table II, application no. 20, preferably a homolog or functional equivalent as depicted in column 8 of Table II B, application no. 20, and being depicted in the same respective line as said YPR172W, and preferably the activity is increased non-targeted, whereby the respective line disclose in column 7 the fine chemical hentriacontane.

[102352] Accordingly, in one embodiment, the molecule which activity is to be increased in the process of the invention is the gene product with an activity as a “YPR172W-protein”, preferably it is the molecule of section (a) or (b) of this paragraph.

[102353] In particular, it was observed that in plants, especially in Arabidopsis thaliana, increasing or generating the activity of a gene product non-targeted with the activity of a “YPR172W-protein”, preferably being encoded by a gene comprising the nucleic acid sequence SEQ ID NO. 158033, preferably the coding region thereof, conferred the production of or the increase in hentriacontane compared with the wild type control.

[102354] The nucleic acid sequence of B3644 from Escherichia coli, e.g. as shown in the respective line in column 5 of Table I, application no. 20, has been published in B. And the activity of the gene product thereof is the activity of b3644-protein.

[102355] Accordingly, in one embodiment, the process of the present invention for producing hentriacontane in a non-human organism, like a microorganism or a plant or a part thereof, comprises increasing or generating the activity of a gene product with the activity of a gene product conferring the activity of “b3644-protein”, especially from Escherichia coli or its functional equivalent or its homolog, e.g. the increase of
[102356] (a) a gene product of a gene comprising the nucleic acid molecule as shown in the respective line in column 5 of Table I (whereby the respective line disclose in column 7 the fine chemical hentriacontane), application no. 20, preferably the coding region thereof, or a homolog or a fragment thereof, and being depicted in the same respective line as said B3644, or a functional equivalent or a homolog thereof as shown in column 8 of Table I, application no. 20, preferably the coding region thereof, particularly a homolog or functional equivalent as shown in column 8 of Table I B, application no. 20, and being depicted in the same respective line as said B3644, and preferably the activity is increased non-targeted, or
[102357] (b) a polypeptide comprising a polypeptide, a consensus sequence or at least a polypeptide motif as shown in the respective line in column 5 of Table II or in column 8 of Table IV, application no. 20, respectively, and being depicted in the same respective line as said B3644, or a functional equivalent or a homolog thereof as depicted in column 8 of Table II, application no. 20, preferably a homolog or functional equivalent as depicted in column 8 of Table II B, application no. 20, and being depicted in the same respective line as said B3644, and preferably the activity is increased non-targeted, whereby the respective line disclose in column 7 the fine chemical hentriacontane.

[102358] Accordingly, in one embodiment, the molecule which activity is to be increased in the process of the invention is the gene product with an activity as a “b3644-protein”, preferably it is the molecule of section (a) or (b) of this paragraph.

[102359] In particular, it was observed that in plants, especially in Arabidopsis thaliana, increasing or generating the activity of a gene product non-targeted with the activity of a “b3644-protein”, preferably being encoded by a gene comprising the nucleic acid sequence SEQ ID NO. 125348, preferably the coding region thereof, conferred the production of or the increase in hentriacontane compared with the wild type control.

[102360] for the disclosure of this paragraph see [0105.1.7.7] above

[102361] for the disclosure of this paragraph see [0106.1.7.7] above

[102362] for the disclosure of this paragraph see [0107.1.7.7] above

[102363] A protein having an activity conferring an increase in the amount or level of the fine chemical hentriacontane, upon targeting to the plastids or mitochondria or upon non-targeting, preferably has the structure of the respective polypeptide described herein, in particular of the polypeptides comprising the consensus sequence or at least one polypeptide motifs as shown in the respective line in Table IV, application no. 20, column 8 or of the polypeptide comprising an amino acid sequence as disclosed in the respective line in Table II, application no. 20, columns 5 or 8, or homologs or fragments thereof as described herein, or is encoded by the nucleic acid molecule characterized herein or the nucleic acid molecule according to the invention, for example by the nucleic acid molecule as shown in the respective line in Table I, application no. 20, columns 5 or 8, preferably the coding region thereof, or homologs or fragments thereof and has the herein mentioned activity.

[102364] for the disclosure of this paragraph see [0109.1.7.7] above

[102365] for the disclosure of this paragraph see [0110.1.7.7] above

[102366] In one embodiment, the process of the present invention comprises one or more of the following steps
[102367] (a) stabilizing a protein conferring the generation or increased expression of a protein encoded by the nucleic acid molecule of the invention or of the polypeptide of the invention, e.g. of a polypeptide having the activity selected from the group consisting of 3-deoxy-7-phosphoheptulonate synthase, acid shock protein, amino-acid acetyltransferase, assembly protein for periplasmic nitrate reductase, At2g45420-protein, At5g43630-protein, ATP-dependent RNA helicase, b0833-protein, b1259-protein, b1445-protein, b1670-protein, b1930-protein, b2399-protein, b2653-protein, b3644-protein, cell division protein, cyclin D, cysteine synthase A, dihydroxyacetone kinase, electron transport complex protein, ethanolamine utilization protein, exonuclease subunit, fumarylacetoacetate hydrolase, GDP-mannose 4,6-dehydratase, inner membrane protein, ion-transport protein, L-asparaginase, MADS box protein transcription factor, mechanosensitive ion channel, metal-dependent hydrolase, methionine permease, O-antigen chain length determinant, ornithine decarboxylase, orotidine-5′-phosphate decarboxylase, peptide chain release factor, phospho-2-dehydro-3-deoxyheptonate aldolase, phosphoadenosine phosphosulfate reductase, phosphoglycolate phosphatase, pyrimidine-specific ribonucleoside hydrolase, pyruvate kinase, RNA-binding protein, S-adenosyl-L-methionine-dependent methyltransferase, serine protease, short-chain alcohol dehydrogenase family, sigma-54 dependent response regulator, spermidine synthase, sugar transport system permease protein, transcription factor, transcriptional regulator, YFL019C-protein, YHL039W-protein, YHR022C-A-protein, YJL127W-A-protein, ylr157c-protein, ynl321w-protein, ypr170c-protein, and YPR172W-protein, or of a polypeptide as indicated in the respective line in Table II, application no. 20, columns 5 or 8, or its homologs or fragments, and conferring the production of or an increase in hentriacontane, respectively; and/or
[102368] (b) stabilizing a mRNA conferring the generation or increased expression of a FCRP, e.g. protein encoded by the nucleic acid molecule of the invention or its homologs or fragments, or of a mRNA encoding the polypeptide of the present invention having the hereinmentioned activity selected from the group consisting of said activities mentioned in (a) and conferring the production of or an increase in hentriacontane, respectively; and/or
[102369] (c) increasing the specific activity of a protein conferring the increased expression of a FCRP, e.g. a protein encoded by the nucleic acid molecule of the invention or of the polypeptide of the present invention having herein-mentioned hentriacontane generating or increasing activity, respectively, e.g. of a polypeptide having the activity of a protein as indicated in the respective line in Table II, application no. 20, columns 5 or 8, or its homologs or fragments, or decreasing the inhibitory regulation of the polypeptide of the invention; and/or
[102370] (d) generating or increasing the expression of an endogenous or artificial transcription factor mediating the expression of a protein conferring the generation or increased expression of a FCRP, e.g. a protein encoded by the nucleic acid molecule of the invention or of the polypeptide of the invention having herein-mentioned activity selected from the group consisting of said activities mentioned in (a) and conferring a hentriacontane increasing activity, respectively, e.g. of a polypeptide having the activity of a protein as indicated in the respective line in Table II, application no. 20, columns 5 or 8 or its homologs; and/or
[102371] (e) stimulating activity of a protein conferring the increased expression of a FCRP, e.g. a protein encoded by the nucleic acid molecule of the present invention or a polypeptide of the present invention having herein-mentioned activity selected from the group consisting of said activities mentioned in (a) and conferring a hentriacontane increasing activity, respectively, e.g. of a polypeptide having the activity of a protein as indicated in the respective line in Table II, application no. 20, columns 5 or 8, or its homologs or fragments, by adding one or more exogenous inducing factors to the non-human organism or parts thereof; and/or
[102372] (f) expressing a transgenic gene encoding a protein conferring the increased expression of a FCRP, e.g. a polypeptide encoded by the nucleic acid molecule of the present invention or a polypeptide of the present invention, having herein-mentioned activity selected from the group consisting of said activities mentioned in (a) and conferring a hentriacontane increasing activity, respectively, e.g. of a polypeptide having the activity of a protein as indicated in the respective line in Table II, application no. 20, columns 5 or 8, or its homologs or fragments, and/or
[102373] (g) increasing the copy number of a gene conferring the increased expression of a nucleic acid molecule encoding a FCRP, e.g. a polypeptide encoded by the nucleic acid molecule of the invention or the polypeptide of the invention having herein-mentioned activity selected from the group consisting of said activities mentioned in (a) and conferring a hentriacontane increasing activity, respectively, e.g. of a polypeptide having the activity of a protein as indicated in the respective line in Table II, application no. 20, columns 5 or 8, or its homologs or fragments; and/or
[102374] (h) increasing the expression of the endogenous gene encoding the FCRP, polypeptide of the invention, e.g. a polypeptide encoded by the nucleic acid molecule of the invention or the polypeptide of the invention having herein-mentioned activity selected from the group consisting of said activities mentioned in (a) and conferring a hentriacontane; increasing activity, respectively, e.g. of a polypeptide having the activity of a protein as indicated in the respective line in Table II, application no. 20, columns 5 or 8, or its homologs or fragments, by adding positive expression or removing negative expression elements, e.g. homologous recombination can be used to either introduce positive regulatory elements like for plants the 35S enhancer into the promoter or to remove repressor elements form regulatory regions. Further gene conversion methods can be used to disrupt repressor elements or to enhance to activity of positive elements. Positive elements can be randomly introduced in plants by T-DNA or transposon mutagenesis and lines can be identifled in which the positive elements have be integrated near to a gene of the invention, the expression of which is thereby enhanced; and/or
[102375] (i) modulating growth conditions of the non-human organism in such a manner, that the expression or activity of the gene encoding the FCRP, e.g. a protein of the invention or the protein itself is enhanced, for example microorganisms or plants can be grown for example under a higher temperature regime leading to an enhanced expression of heat shock proteins, which can lead to an enhanced hentriacontane production, respectively; and/or
[102376] (j) selecting of non-human organisms with especially high activity of the proteins of the invention from natural or from mutagenized resources and breeding them into the target organisms, e.g. the elite crops; and/or
[102377] (k) directing a protein encoded by the nucleic acid molecule of the invention or of the polypeptide of the present invention having herein-mentioned activity selected from the group consisting of said activities mentioned in (a) and conferring a hentriacontane increasing activity, respectively, e.g. of a polypeptide having the activity of a protein as indicated in the respective line in Table II, application no. 20, columns 5 or 8, or its homologs or fragments, if for the corresponding nucleic acid molecule in the respective line in column 6 of Table I the term “plastidic” is indicated, to the plastids by the addition of a plastidial targeting sequence or if for the corresponding nucleic acid molecule in the respective line in column 6 of Table I the term “mitochondric” is indicated, to the mitochondria by the addition of a mitochondrial targeting sequence; and/or
[102378] (l) generating the expression of a protein encoded by the nucleic acid molecule of the invention or of the polypeptide of the present invention having herein-mentioned activity selected from the group consisting of said activities mentioned in (a) and conferring a hentriacontane increasing activity, respectively, e.g. of a polypeptide having the activity of a protein as indicated in the respective line in Table II, application no. 20, columns 5 or 8, or its homologs or fragments, if for the corresponding nucleic acid molecule in the respective line in column 6 of Table I the term “plastidic” or “mitochondric” is indicated, in these organelles by the stable or transient transformation, advantageously stable transformation, of organelles, preferably plastids or mitochondria, with an inventive nucleic acid sequence preferably in form of an expression cassette containing said sequence leading to the expression of the nucleic acids or polypeptides of the invention in the respective organelle; and/or
[102379] (m) generating the expression of a protein encoded by the nucleic acid molecule of the invention or of the polypeptide of the present invention having herein-mentioned activity selected from the group consisting of said activities mentioned in (a) and conferring a hentriacontane increasing activity, respectively, e.g. of a polypeptide having the activity of a protein as indicated in the respective line in Table II, application no. 20, columns 5 or 8, or its homologs or fragments, if for the corresponding nucleic acid molecule in the respective line in column 6 of Table I the term “plastidic” or “mitochondric” is indicated, in these organelles by integration of a nucleic acid of the invention into the genome of the respective organelle under control of preferable a promoter selective for the respective organelle.

[102380] Preferably, said mRNA is the coding region of the nucleic acid molecule of the present invention and/or the protein conferring the increased expression of a protein encoded by the coding region of the nucleic acid molecule of the present invention alone or linked to a transit nucleic acid sequence or transit peptide encoding nucleic acid sequence or the polypeptide having the herein mentioned activity, e.g. conferring the generation of or increase of hentriacontane, respectively, after increasing the expression or activity of the encoded polypeptide, non-targeted or in organelles such as plastids and/or mitochondria, preferably plastids, or having the activity of a polypeptide having an activity as the protein as shown in the respective line in Table II, application no. 20, column 3, or its homologs. Preferably the increase of hentriacontane, respectively, takes place non-targeted or in plastids and/or mitochondria, preferably non-targeted or in plastids.

[102381] [0113.1.7.20] to [0122.1.7.20] for the disclosure of these paragraphs see [0113.1.7.7] to [0122.1.7.7] above

[102382] The activation of an endogenous polypeptide having above-mentioned activity, e.g. having the activity of a protein as shown in the respective line in Table II, application no. 20, column 3 or of the polypeptide of the invention, e.g. conferring the increase of the fine chemical hentriacontane, respectively, by increase of expression or activity in the cytoplasm, and/or in the cytosol, and/or in an organelle, such as plastids or mitochondria, can also be increased by introducing a synthetic transcription factor, which binds close to the coding region of the gene encoding the protein as shown in the respective line in Table II, application no. 20, column 5 or 8, or homologs or fragments thereof, and activates its transcription. A chimeric zinc finger protein can be constructed, which comprises a specific DNA-binding domain and an activation domain as e.g. the VP16 domain of Herpes Simplex virus. The specific binding domain can bind to the regulatory region of the gene encoding the protein as shown in the respective line in Table II, application no. 20, column 5 or 8, or homologs or fragments thereof. The expression of the chimeric transcription factor in a non-human organism, in particular in a plant, leads to a specific expression of the protein as shown in the respective line in Table II, application no. 20, column 5 or 8, or homologs or fragments thereof, see e.g. in WO01/52620, Oriz, Proc. Natl. Acad. Sci. USA 99, 13290 (2002), or Guan, Proc. Natl. Acad. Sci. USA 99, 13296 (2002).

[102383] [0124.1.7.20] to [0127.1.7.20] for the disclosure of these paragraphs see [0124.1.7.7] to [0127.1.7.7] above

[102384] Owing to the introduction of a gene or a plurality of genes conferring the expression of the nucleic acid molecule of the invention or the polypeptide of the invention, for example the nucleic acid construct mentioned below, or encoding the protein as shown in the respective line in Table II, application no. 20, column 5 or 8, or homologs or fragments thereof, into a non-human organism alone or in combination with other genes, it is possible not only to increase the biosynthetic flux towards the end product, but also to increase, modify or create de novo an advantageous, preferably novel metabolites composition in the non-human organism, e.g. an advantageous composition comprising a higher content of (from a viewpoint of nutritional physiology limited) hentriacontane and if desired other long chain n-alkanes (C20 to C40) or derivates like alcohols and acid of alkanes, optionally unsaturated as well as break down and/or cracking products of long chain alkanes, or waxes or components thereof, and/or other metabolites, in free or bound form.

[102385] for the disclosure of this paragraph see [0129.1.7.7] above

[102386] Accordingly, in one embodiment, the process according to the invention relates to a process, which comprises:
[102387] (a) providing a non-human organism, preferably a microorganism, a plant cell, a plant tissue, a plant or a part thereof, more preferably a microorganism, a plant tissue, a plant or a part thereof;
[102388] (b) increasing the activity of a protein as shown in the respective line in Table II, application no. 20, column 3 or of a polypeptide being encoded by the respective nucleic acid molecule of the present invention and described below, e.g. conferring an increase of the fine chemical hentriacontane, respectively, in the non-human organism, preferably in the microorganism, the plant cell, the plant tissue, the plant or a part thereof, more preferably a microorganism, a plant tissue, a plant or a part thereof, especially cytoplasmic or in an organelle, like plastids or mitochondria,
[102389] (c) growing the non-human organism, preferably the microorganism, the plant cell, the plant tissue, the plant or a part thereof, under conditions which permit the production of said chemical in the non-human organism, preferably the microorganism, the plant cell, the plant tissue, the plant or a part thereof; and
[102390] (d) if desired, recovering, optionally isolating, said fine chemical, in free and/or bound form, and, optionally further free and/or bound long chain n-alkanes (C20 to C40) or derivates like alcohols and acid of alkanes, optionally unsaturated as well as break down and/or cracking products of long chain alkanes or waxes or components thereof, and/or other metabolites synthesized by the non-human organism, the microorganism, the plant cell, the plant tissue, the plant or a part thereof.

[102391] [0131.1.7.20] to [0133.1.7.20] for the disclosure of these paragraphs see [0131.1.7.7] to [0133.1.7.7] above

[102392] The non-human organism, in particular the microorganism, plant or part thereof, is advantageously grown in such a way that it is not only possible to recover, if desired to isolate the free or bound fine chemical or the free and bound fine chemical but as option it is also possible to produce, recover and, if desired to isolate, other free or/and bound long chain n-alkanes (C20 to C40) or derivates like alcohols and acid of alkanes, optionally unsaturated as well as break down and/or cracking products of long chain alkanes or waxes or components thereof and/or other metabolites.

[102393] The organisms are harvested in a manner known per se and appropriate for the particular organism. Microorganisms such as bacteria, mosses, yeasts and fungi or plant cells which are cultured in liquid media by fermentation may be removed, for example, by centrifugation, decanting or filtration. Plants are grown on solid media in a manner known per se and harvested accordingly.

[102394] [0135.1.7.20] to [0139.1.7.20] for the disclosure of these paragraphs see [0135.1.7.7] to [0139.1.7.7] above

[102395] In another embodiment, the invention relates to a (isolated) nucleic acid molecule, which comprises a nucleic acid molecule selected from the group consisting of:
[102396] (a) a nucleic acid molecule encoding a polypeptide shown in Table II, application no. 20, column 5 or 8, preferably shown in Table II B, application no. 20, column 8, or a homolog or a fragment thereof;
[102397] (b) a nucleic acid molecule shown in Table I, application no. 20, column 5 or 8, preferably shown in Table I B, application no. 20, column 8, preferably the coding region thereof, or a homolog or a fragment thereof;
[102398] (c) a nucleic acid molecule, which, as a result of the degeneracy of the genetic code, can be derived from a polypeptide sequence depicted in column 5 or 8 of Table II, application no. 20, preferably in column 8 of Table II B, application no. 20;
[102399] (d) a nucleic acid molecule having at least 30% identity, preferably at least 40%, 50%, 60%, 70%, 75%, 80%, 85%, 90%, 95%, 96%, 97%, 98%, 99%, 99.5%, with the nucleic acid molecule sequence of a polynucleotide comprising the nucleic acid molecule shown in column 5 or 8 of Table I, application no. 20, preferably shown in column 8 of Table I B, application no. 20, preferably the coding region thereof;
[102400] (e) a nucleic acid molecule encoding a polypeptide having at least 30% identity, preferably at least 40%, 50% 60%, 70%, 75%, 80%, 85%, 90%, 95%, 96%, 97%, 98%, 99%, 99.5%, identity with the amino acid sequence of the polypeptide encoded by the nucleic acid molecule of (a), (b), (c) or (d);
[102401] (f) a nucleic acid molecule which hybridizes with a nucleic acid molecule of (a), (b), (c), (d) or (e) under stringent hybridization conditions;
[102402] (g) a nucleic acid molecule encoding a polypeptide which can be isolated with the aid of monoclonal or polyclonal antibodies made against a polypeptide encoded by one of the nucleic acid molecules of (a), (b), (c), (d), (e) or (f);
[102403] (h) a nucleic acid molecule encoding a polypeptide comprising the consensus sequence or one or more polypeptide motifs as shown in column 8 of Table IV, application no. 20;
[102404] (i) a nucleic acid molecule encoding a polypeptide having the activity represented by a respective protein as depicted in column 5 of Table II, application no. 20;
[102405] (j) a nucleic acid molecule comprising a polynucleotide which is obtained by amplifying a cDNA library or a genomic library using the primers in Table III, application no. 20, column 8;
[102406] and
[102407] (k) nucleic acid molecule which is obtainable by screening a suitable nucleic acid library, especially a cDNA library and/or a genomic library, under stringent hybridization conditions with a probe comprising one of the sequences of the nucleic acid molecule of (a), (b), (c), (d), (e), (f), (g), (h), (i) or (j) or with a fragment of at least 15 nt, preferably 20 nt, 30 nt, 50 nt, 100 nt, 200 nt,500 nt, 1000 nt, 1500 nt, 2000 nt or 3000 nt of the nucleic acid molecule characterized in (a), (b), (c), (d), (e), (f), (g), (h), (i) or (j);
[102408] or a nucleic acid molecule comprising a sequence which is complementary thereto.
   (All the references to Tables I to IV are references to the corresponding lines of Tables I to IV.)

[102409] In a preferred embodiment thereof said nucleic acid molecule according to (a), (b), (c), (d), (e), (f), (g), (h), (i), (j) or (k) encodes a polypeptide which has the activity of the respective polypeptide represented by a protein comprising a polypeptide as depicted in the respective line in column 5 of Table II, application no. 20.

[102410] In another preferred embodiment thereof said nucleic acid molecule according to (a), (b), (c), (d), (e), (f), (g), (h), (i), (j) or (k) confers a generation or an increase of the respective fine chemical in a non-human organism or a part thereof as compared to a corresponding wild-type non-human organism or part thereof.

[102411] In another preferred embodiment thereof said nucleic acid molecule according to (a), (b), (c), (d), (e), (f), (g), (h), (i), (j) or (k) encodes a polypeptide which has the activity of the respective polypeptide represented by a protein as depicted in the respective line in column 5 of Table II application no. 20 and confers a generation or an increase of the respective fine chemical in a non-human organism or a part thereof as compared to a corresponding wild-type non-human organism or part thereof.

[102412] In another embodiment, the invention relates to a (isolated) nucleic acid molecule, which comprises a nucleic acid molecule selected from the group consisting of:
[102413] (a) a nucleic acid molecule encoding a polypeptide shown in Table II, column 5 or 8, application no. 20, preferably shown in Table II A, application no. 20, in column 5 or in Table II A, application no. 20, column 8 or in Table II B, application no. 20, column 8, or a homolog or a fragment thereof;
[102414] (b) a nucleic acid molecule shown in Table I, application no. 20, column 5 or 8, preferably shown in Table I A, application no. 20, in column 5 or in Table I A, application no. 20, column 8 or in Table I B, application no. 20, column 8, preferably the coding region thereof, or a homolog or a fragment thereof;
[102415] (c) a nucleic acid molecule, which, as a result of the degeneracy of the genetic code, can be derived from a polypeptide sequence depicted in column 5 or 8 of Table II, application no. 20, preferably shown in Table II A, application no. 20, in column 5 or in Table II A, application no. 20, column 8 or in Table II B, application no. 20, column 8;
[102416] (d) a nucleic acid molecule having at least 30% identity, preferably at least 40%, 50%, 60%, 70%, 75%, 80%, 85%, 90%, 95%, 96%, 97%, 98%, 99%, 99.5%, with the nucleic acid molecule sequence of a polynucleotide comprising the nucleic acid molecule shown in column 5 or 8 of Table I, application no. 20, preferably shown in Table I A, application no. 20, in column 5 or in Table I A, application no. 20, column 8 or in Table I B column 8, preferably the coding region thereof;
[102417] (e) a nucleic acid molecule encoding a polypeptide having at least 30% identity, preferably at least 40%, 50% 60%, 70%, 75%, 80%, 85%, 90%, 95%, 96%, 97%, 98%, 99%, 99.5%, identity with the amino acid sequence of the polypeptide encoded by the nucleic acid molecule of (a), (b), (c) or (d);
[102418] (f) a nucleic acid molecule which hybridizes with a nucleic acid molecule of (a), (b), (c), (d) or (e) under stringent hybridization conditions;
[102419] (g) a nucleic acid molecule encoding a polypeptide which can be isolated with the aid of monoclonal or polyclonal antibodies made against a polypeptide encoded by one of the nucleic acid molecules of (a), (b), (c), (d), (e) or (f);
[102420] (h) a nucleic acid molecule encoding a polypeptide comprising the consensus sequence or one or more polypeptide motifs as shown in column 8 of Table IV, application no. 20;
[102421] (i) a nucleic acid molecule encoding a polypeptide having the activity represented by a respective protein as depicted in column 5 of Table II, application no. 20;
[102422] (j) a nucleic acid molecule comprising a polynucleotide which is obtained by amplifying a cDNA library or a genomic library using the primers in Table III, application no. 20, column 8;
[102423] and
[102424] (k) nucleic acid molecule which is obtainable by screening a suitable nucleic acid library, especially a cDNA library and/or a genomic library, under stringent hybridization conditions with a probe comprising one of the sequences of the nucleic acid molecule of (a), (b), (c), (d), (e), (f), (g), (h), (i) or (j) or with a fragment thereof having at least 15 nt, preferably 20 nt, 30 nt, 50 nt, 100 nt, 200 nt,500 nt, 1000 nt, 1500 nt, 2000 nt or 3000 nt of the nucleic acid molecule complementary to a nucleic acid sequence characterized in (a), (b), (c), (d), (e), (f), (g), (h), (i) or (j);
[102425] or a nucleic acid molecule comprising a sequence which is complementary thereto;
   whereby, preferably, the nucleic acid molecule according to (a), (b), (c), (d), (e), (f), (g), (h), (i), (j) or (k) distinguishes over the sequence depicted in Table I A and/or I B, application no. 20, column 5 or 8, or the coding regions thereof, by one or more nucleotides (especially but not exceeding 5%, preferably 4%, 3%, 2%, 1%, 0.5%, 0.2% or 0.1%). In an embodiment, the nucleic acid molecule of the invention does not consist of the sequence shown in Table I A and/or I B, application no. 20, column 5 or 8, or the coding region thereof. In another embodiment, the nucleic acid molecule of the present invention, preferably the coding region thereof, is at least 30%, 40%, 50%, 60%, 70%, 80%, 90%, 95% identical but less than 100%, 99.999%, 99.99%, 99.9%, 99%, 98%, 97%, 96% or 95% identical to the sequence shown in Table I A and/or I B, application no. 20, column 5 or 8, or the coding region thereof, respectively. In a further embodiment the nucleic acid molecule does not encode the polypeptide sequence shown in Table II A and/or II B, application no. 20, column 5 or 8 but homologs thereof. Accordingly, in one embodiment, the nucleic acid molecule of the present invention encodes in one embodiment a polypeptide which differs at least in one or more amino acids (especially but not exceeding 5%, preferably 4%, 3%, 2%, 1%, 0.5%, 0.2% or 0.1%) from the polypeptide shown in Table II, application no. 20, column 5 or 8 and does not encode a protein of the sequence shown in Table II A and/or II B, application no. 20, column 5 or 8. Accordingly, in one embodiment, the protein encoded by a sequence of a nucleic acid according to (a), (b), (c), (d), (e), (f), (g), (h), (i), (j) or (k) does not consist of the sequence shown in Table I A and/or I B, application no. 20, column 5 or 8, or the coding region thereof. In a further embodiment, the protein of the present invention is at least 30%, 40%, 50%, 60%, 70%, 80%, 90%, 95% identical to protein sequence depicted in Table II A and/or II B, application no. 20, column 5 or 8 but less than 100%, preferably less than 99.999%, 99.99%, 99.9%, 99%, 98%, 97%, 96% or 95% identical to the sequence shown in Table II A and/or II B, application no. 20, column 5 or 8.
   (All the references to Tables I to IV are references to the corresponding lines of Tables I to IV.)

[102426] In a preferred embodiment thereof said nucleic acid molecule according to (a), (b), (c), (d), (e), (f), (g), (h), (i), (j) or (k) encodes a polypeptide which has the activity of the respective polypeptide represented by a protein comprising a polypeptide as depicted in the respective line in column 5 of Table II, application no. 20.

[102427] In another preferred embodiment thereof said nucleic acid molecule according to (a), (b), (c), (d), (e), (f), (g), (h), (i), (j) or (k) confers a generation or an increase of the respective fine chemical in a non-human organism or a part thereof as compared to a corresponding wild-type non-human organism or part thereof.

[102428] In another preferred embodiment thereof said nucleic acid molecule according to (a), (b), (c), (d), (e), (f), (g), (h), (i), (j) or (k) encodes a polypeptide which has the activity of the respective polypeptide represented by a protein as depicted in the respective line in column 5 of Table II, application no. 20, and confers a generation or an increase of the respective fine chemical in a non-human organism or a part thereof as compared to a corresponding wild-type non-human organism or part thereof.

[102429] [0144.1.7.20] to [0155.1.7.20] for the disclosure of these paragraphs see [0144.1.7.7] to [0155.1.7.7] above

[102430] In a preferred embodiment a nucleic acid construct, for example an expression cassette, comprises upstream, i.e. at the 5′ end of the encoding sequence, a promoter and downstream, i.e. at the 3′ end, a polyadenylation signal and optionally other regulatory elements which are operably linked to the intervening encoding sequence with one of the nucleic acids as depicted in the respective line in Table I, application no. 20, column 5 or 8, preferably the coding region thereof, or a homolog or a fragment thereof. By an operable linkage is meant the sequential arrangement of promoter, encoding sequence, terminator, optionally other regulatory elements and optionally targeting sequences in such a way that each of the regulatory elements/targeting sequence can fulfill its function in the expression of the encoding sequence in due manner. In one embodiment the sequences preferred for operable linkage are targeting sequences for ensuring subcellular localization in organelles, like plastids or mitochondria. However, targeting sequences for ensuring subcellular localization in the endoplasmic reticulum (=ER), in the nucleus, in oil corpuscles or other compartments may also be employed as well as translation promoters such as the 5′ lead sequence in tobacco mosaic virus (Gallie et al., Nucl. Acids Res. 15, 8693 (1987)).

[102431] for the disclosure of this paragraph see [0157.1.7.7] above

[102432] In an embodiment, the invention relates to an expression cassette, comprising
[102433] 1) a promoter, preferably a promoter selected from the group consisting of Big35S, PCUbi, Super and USP;
[102434] 2) a nucleic acid molecule selected from the group consisting of
   [102435] (a) a nucleic acid molecule encoding a polypeptide shown in Table II, application no. 20, column 5 or 8, preferably shown in Table II A, application no. 20, column 5, or in Table II A, application no. 20, column 8, or in Table II B, application no. 20, column 8, or a homolog or a fragment thereof;
   [102436] (b) a nucleic acid molecule shown in Table I, application no. 20, column 5 or 8, preferably shown in Table I A, application no. 20, column 5, or in Table I A, application no. 20, column 8, or in Table I B, application no. 20, column 8, preferably the coding region thereof, or a homolog or a fragment thereof;
   [102437] (c) a nucleic acid molecule, which, as a result of the degeneracy of the genetic code, can be derived from a polypeptide sequence depicted in column 5 or 8 of Table II, application no. 20, preferably shown in Table II A, application no. 20, column 5, or in Table II A, application no. 20, column 8, or in Table II B, application no. 20, column 8;
   [102438] (d) a nucleic acid molecule having at least 30% identity, preferably at least 40%, 50%, 60%, 70%, 75%, 80%, 85%, 90%, 95%, 96%, 97%, 98%, 99%, 99.5%, with the nucleic acid molecule sequence of a polynucleotide comprising the nucleic acid molecule shown in column 5 or 8 of Table I, application no. 20, preferably shown in Table I A, application no. 20, column 5, or in Table I A, application no. 20, column 8, or in Table I B, application no. 20, column 8, preferably the coding region thereof;
   [102439] (e) a nucleic acid molecule encoding a polypeptide having at least 30% identity, preferably at least 40%, 50% 60%, 70%, 75%, 80%, 85%, 90%, 95%, 96%, 97%, 98%, 99%, 99.5%, identity with the amino acid sequence of the polypeptide encoded by the nucleic acid molecule of (a), (b), (c) or (d);
   [102440] (f) a nucleic acid molecule which hybridizes with a nucleic acid molecule of (a), (b), (c), (d) or (e) under stringent hybridization conditions;
   [102441] (g) a nucleic acid molecule encoding a polypeptide which can be isolated with the aid of monoclonal or polyclonal antibodies made against a polypeptide encoded by one of the nucleic acid molecules of (a), (b), (c), (d), (e) or (f);
   [102442] (h) a nucleic acid molecule encoding a polypeptide comprising the consensus sequence or one or more polypeptide motifs as shown in column 8 of Table IV, application no. 20;
   [102443] (i) a nucleic acid molecule encoding a polypeptide having the activity represented by a respective protein as depicted in column 5 of Table II, application no. 20;
   [102444] (j) a nucleic acid molecule comprising a polynucleotide which is obtained by amplifying a cDNA library or a genomic library using the primers in Table III, application no. 20, column 8;
   [102445] and
   [102446] (k) nucleic acid molecule which is obtainable by screening a suitable nucleic acid library, especially a cDNA library and/or a genomic library, under stringent hybridization conditions with a probe comprising one of the sequences of the nucleic acid molecule of (a), (b), (c), (d), (e), (f), (g), (h), (i) or (j) or with a fragment of at least 15 nt, preferably 20 nt, 30 nt, 50 nt, 100 nt, 200 nt,500 nt, 1000 nt, 1500 nt, 2000 nt or 3000 nt of the nucleic acid molecule characterized in (a), (b), (c), (d), (e), (f), (g), (h), (i) or (j);
   [102447] or a nucleic acid molecule comprising a sequence which is complementary thereto.
      and, optionally
[102448] 3) nucleic acid molecule encoding a transit peptide, preferably encoding a plastidal transit peptide or a mitochondrial transit peptide;
   which are operable linked.
   (All the references to Tables I to IV are references to the corresponding lines of Tables I to IV.)

[102449] In a preferred embodiment thereof said nucleic acid molecule according to 2 (a), (b), (c), (d), (e), (f), (g), (h), (i), (j) or (k) encodes a polypeptide which has the activity of the respective polypeptide represented by a protein comprising a polypeptide as depicted in the respective line in column 5 of Table II, application no. 20.

[102450] In another preferred embodiment thereof said nucleic acid molecule according to 2 (a), (b), (c), (d), (e), (f), (g), (h), (i), (j) or (k) confers a generation or an increase of the respective fine chemical in a non-human organism or a part thereof as compared to a corresponding wild-type non-human organism or part thereof.

[102451] In another preferred embodiment thereof said nucleic acid molecule according to 2 (a), (b), (c), (d), (e), (f), (g), (h), (i), (j) or (k) encodes a polypeptide which has the activity of the respective polypeptide represented by a protein as depicted in the respective line in column 5 of Table II application no. 20 and confers a generation or an increase of the respective fine chemical in a non-human organism or a part thereof as compared to a corresponding wild-type non-human organism or part thereof.

[102452] In another embodiment thereof the expression cassette comprises 3) a nucleic acid molecule encoding a transit peptide, preferably encoding a plastidal transit peptide, especially in case in column 6 of Table I, application no. 20, in the same line as of the respective nucleic acid molecule according to 2) “plastidic” is depicted, or encoding a mitochondrial transit peptide, especially in case in column 6 of Table I, application no. 20, in the same line as of the respective nucleic acid molecule according to 2) “mitochondric” is depicted.

[102453] In another embodiment thereof the expression cassette does not comprise 3) a nucleic acid molecule encoding a transit peptide, especially in case in column 6 of Table I, application no. 20, in the same line as of the respective nucleic acid molecule according to 2) “non-targeted” is depicted.

[102454] In a further embodiment, the invention relates to an expression cassette, comprising
[102455] 1) a promoter, preferably a promoter selected from the group consisting of Big35S, PCUbi, Super and USP;
[102456] 2) a nucleic acid molecule selected from the group consisting of
   [102457] (a) a nucleic acid molecule encoding a polypeptide shown in Table II, application no. 20, column 5 or 8, preferably shown in Table II A, application no. 20, column 5, or in Table II A, application no. 20, column 8, or in Table II B, application no. 20, column 8, or a homolog or a fragment thereof;
   [102458] (b) a nucleic acid molecule shown in Table I, application no. 20, column 5 or 8, preferably shown in Table I A, application no. 20, column 5, or in Table I A, application no. 20, column 8, or in Table I B, application no. 20, column 8, preferably the coding region thereof, or a homolog or a fragment thereof;
   [102459] (c) a nucleic acid molecule, which, as a result of the degeneracy of the genetic code, can be derived from a polypeptide sequence depicted in column 5 or 8 of Table II, application no. 20, preferably shown in Table II A, application no. 20, column 5, or in Table II A, application no. 20, column 8, or in Table II B, application no. 20, column 8;
   [102460] (d) a nucleic acid molecule having at least 30% identity, preferably at least 40%, 50%, 60%, 70%, 75%, 80%, 85%, 90%, 95%, 96%, 97%, 98%, 99%, 99.5%, with the nucleic acid molecule sequence of a polynucleotide comprising the nucleic acid molecule shown in column 5 or 8 of Table I, application no. 20, preferably shown in Table I A, application no. 20, column 5, or in Table I A, application no. 20, column 8,or in Table I B, application no. 20, column 8, preferably the coding region thereof;
   [102461] (e) a nucleic acid molecule encoding a polypeptide having at least 30% identity, preferably at least 40%, 50% 60%, 70%, 75%, 80%, 85%, 90%, 95%, 96%, 97%, 98%, 99%, 99.5%, identity with the amino acid sequence of the polypeptide encoded by the nucleic acid molecule of (a), (b), (c) or (d);
   [102462] (f) a nucleic acid molecule which hybridizes with a nucleic acid molecule of (a), (b), (c), (d) or (e) under stringent hybridization conditions;
   [102463] (g) a nucleic acid molecule encoding a polypeptide which can be isolated with the aid of monoclonal or polyclonal antibodies made against a polypeptide encoded by one of the nucleic acid molecules of (a), (b), (c), (d), (e) or (f);
   [102464] (h) a nucleic acid molecule encoding a polypeptide comprising the consensus sequence or one or more polypeptide motifs as shown in column 8 of Table IV, application no. 20;
   [102465] (i) a nucleic acid molecule encoding a polypeptide having the activity represented by a respective protein as depicted in column 5 of Table II, application no. 20;
   [102466] (j) a nucleic acid molecule comprising a polynucleotide which is obtained by amplifying a cDNA library or a genomic library using the primers in Table III, application no. 20, column 8;
   [102467] and
   [102468] (k) nucleic acid molecule which is obtainable by screening a suitable nucleic acid library, especially a cDNA library and/or a genomic library, under stringent hybridization conditions with a probe comprising one of the sequences of the nucleic acid molecule of (a), (b), (c), (d), (e), (f), (g), (h), (i) or (j) or with a fragment of at least 15 nt, preferably 20 nt, 30 nt, 50 nt, 100 nt, 200 nt,500 nt, 1000 nt, 1500 nt, 2000 nt or 3000 nt of the nucleic acid molecule characterized in (a), (b), (c), (d), (e), (f), (g), (h), (i) or (j);
   [102469] or a nucleic acid molecule comprising a sequence which is complementary thereto;
      and, optionally
[102470] 3) nucleic acid molecule encoding a transit peptide, preferably encoding a plastidal transit peptide or a mitochondrial transit peptide;
   which are operable linked and
   whereby, preferably, the nucleic acid molecule according to 2 (a), (b), (c), (d), (e), (f), (g), (h), (i), (j) or (k) distinguishes over the sequence depicted in Table I A and/or I B, application no. 20, column 5 or 8, or the coding region thereof, by one or more nucleotides (especially but not exceeding 5%, preferably 4%, 3%, 2%, 1%, 0.5%, 0.2% or 0.1%). In an embodiment, the nucleic acid molecule of the invention according to 2) does not consist of the sequence shown in Table I A and/or I B, application no. 20, column 5 or 8, or the coding region thereof. In another embodiment, the nucleic acid molecule of the present invention, preferably the coding region thereof, is at least 30%, 40%, 50%, 60%, 70%, 80%, 90%, 95% identical but less than 100%, 99.999%, 99.99%, 99.9%, 99%, 98%, 97%, 96% or 95% identical to the sequence shown in Table I A and/or I B, application no. 20, column 5 or 8, or the coding region thereof, respectively. In a further embodiment the nucleic acid molecule does not encode the polypeptide sequence shown in Table II A and/or II B, application no. 20, column 5 or 8 but homologs thereof. Accordingly, in one embodiment, the nucleic acid molecule of the present invention encodes in one embodiment a polypeptide which differs at least in one or more amino acids (especially but not exceeding 5%, preferably 4%, 3%, 2%, 1%, 0.5%, 0.2% or 0.1%) from the polypeptide shown in Table II, application no. 20, column 5 or 8 and does not encode a protein of the sequence shown in Table II A and/or II B, application no. 20, column 5 or 8. Accordingly, in one embodiment, the protein encoded by a sequence of a nucleic acid according to 2(a), (b), (c), (d), (e), (f), (g), (h), (i), (j) or (k) does not consist of the sequence shown in Table I A and/or I B, application no. 20, column 5 or 8, or the coding region thereof. In a further embodiment, the protein of the present invention is at least 30%, 40%, 50%, 60%, 70%, 80%, 90%, 95% identical to protein sequence depicted in Table II A and/or II B, application no. 20, column 5 or 8 but less than 100%, 99.999%, 99.99%, 99.9%, 99%, 98%, 97%, 96% or 95% identical to the sequence shown in Table II A and/or II B, application no. 20, column 5 or 8.
   (All the references to Tables I to IV are references to the corresponding lines of Tables I to IV.)

[102471] In a preferred embodiment thereof said nucleic acid molecule according to 2 (a), (b), (c), (d), (e), (f), (g), (h), (i), (j) or (k) encodes a polypeptide which has the activity of the respective polypeptide represented by a protein comprising a polypeptide as depicted in the respective line in column 5 of Table II, application no. 20.

[102472] In another preferred embodiment thereof said nucleic acid molecule according to 2 (a), (b), (c), (d), (e), (f), (g), (h), (i), (j) or (k) confers a generation or an increase of the respective fine chemical in a non-human organism or a part thereof as compared to a corresponding wild-type non-human organism or part thereof.

[102473] In another preferred embodiment thereof said nucleic acid molecule according to 2 (a), (b), (c), (d), (e), (f), (g), (h), (i), (j) or (k) encodes a polypeptide which has the activity of the respective polypeptide represented by a protein as depicted in the respective line in column 5 of Table II application no. 20 and confers a generation or an increase of the respective fine chemical in a non-human organism or a part thereof as compared to a corresponding wild-type non-human organism or part thereof.

[102474] In another embodiment thereof the expression cassette comprises 3) a nucleic acid molecule encoding a transit peptide, preferably encoding a plastidal transit peptide, especially in case in column 6 of Table I, application no. 20, in the same line as of the respective nucleic acid molecule according to 2) “plastidic” is depicted, or encoding a mitochondrial transit peptide, especially in case in column 6 of Table I, application no. 20, in the same line as of the respective nucleic acid molecule according to 2) “mitochondric” is depicted.

[102475] In another embodiment thereof the expression cassette does not comprise 3) a nucleic acid molecule encoding a transit peptide, especially in case in column 6 of Table I, application no. 20, in the same line as of the respective nucleic acid molecule according to 2) “non-targeted” is depicted.

[102476] In an embodiment the present invention relates to an expresssion cassette comprising a) a promoter, preferably a promoter selected from the group consisting of Big35S, PCUbi, Super and USP, in particular p-PcUBI; and b) the nucleic acid SEQ ID NO. 113714, or a homolog or fragment thereof, or a homolog thereof being depicted in Table I, application no. 20, column 8, in the same line as SEQ ID NO. 113714, preferably the coding region thereof, a homolog or a fragment thereof; which are operable linked.

[102477] In an embodiment thereof the expression cassette comprises in addition c) a nucleic acid molecule encoding a transit peptide, especially a plastidal transit petide in case in Table I, application no. 20, in column 6 in the same line as SEQ ID NO. 113714 is depicted, plastidic is mentioned, or a mitochondrial transit peptide in case in Table I, application no. 20, in column 6 in the same line as SEQ ID NO. 113714 is depicted, mitochondric is mentioned; which is operable linked, too.

[102478] In another embodiment thereof the expression cassette does not comprise an additional transit peptide in case in Table I, application no. 20, in column 6 in the same line as SEQ ID NO. 113714 is depicted, non-targeted is mentioned.

[102479] In an embodiment the present invention relates to an expresssion cassette comprising a) a promoter, preferably a promoter selected from the group consisting of Big35S, PCUbi, Super and USP, in particular p-PcUBI; and b) the nucleic acid SEQ ID NO. 108727, or a homolog or fragment thereof, or a homolog thereof being depicted in Table I, application no. 20, column 8, in the same line as SEQ ID NO. 108727, preferably the coding region thereof, a homolog or a fragment thereof; which are operable linked.

[102480] In an embodiment thereof the expression cassette comprises in addition c) a nucleic acid molecule encoding a transit peptide, especially a plastidal transit petide in case in Table I, application no. 20, in column 6 in the same line as SEQ ID NO. 108727 is depicted, plastidic is mentioned, or a mitochondrial transit peptide in case in Table I, application no. 20, in column 6 in the same line as SEQ ID NO. 108727 is depicted, mitochondric is mentioned; which is operable linked, too.

[102481] In another embodiment thereof the expression cassette does not comprise an additional transit peptide in case in Table I, application no. 20, in column 6 in the same line as SEQ ID NO. 108727 is depicted, non-targeted is mentioned.

[102482] In an embodiment the present invention relates to an expresssion cassette comprising a) a promoter, preferably a promoter selected from the group consisting of Big35S, PCUbi, Super and USP, in particular p-PcUBI; and b) the nucleic acid SEQ ID NO. 1623, or a homolog or fragment thereof, or a homolog thereof being depicted in Table I, application no. 20, column 8, in the same line as SEQ ID NO. 1623, preferably the coding region thereof, a homolog or a fragment thereof; which are operable linked.

[102483] In an embodiment thereof the expression cassette comprises in addition c) a nucleic acid molecule encoding a transit peptide, especially a plastidal transit petide in case in Table I, application no. 20, in column 6 in the same line as SEQ ID NO. 1623 is depicted, plastidic is mentioned, or a mitochondrial transit peptide in case in Table I, application no. 20, in column 6 in the same line as SEQ ID NO. 1623 is depicted, mitochondric is mentioned; which is operable linked, too.

[102484] In another embodiment thereof the expression cassette does not comprise an additional transit peptide in case in Table I, application no. 20, in column 6 in the same line as SEQ ID NO. 1623 is depicted, non-targeted is mentioned.

[102485] In an embodiment the present invention relates to an expresssion cassette comprising a) a promoter, preferably a promoter selected from the group consisting of Big35S, PCUbi, Super and USP, in particular p-PcUBI; and b) the nucleic acid SEQ ID NO. 109717, or a homolog or fragment thereof, or a homolog thereof being depicted in Table I, application no. 20, column 8, in the same line as SEQ ID NO. 109717, preferably the coding region thereof, a homolog or a fragment thereof; which are operable linked.

[102486] In an embodiment thereof the expression cassette comprises in addition c) a nucleic acid molecule encoding a transit peptide, especially a plastidal transit petide in case in Table I, application no. 20, in column 6 in the same line as SEQ ID NO. 109717 is depicted, plastidic is mentioned, or a mitochondrial transit peptide in case in Table I, application no. 20, in column 6 in the same line as SEQ ID NO. 109717 is depicted, mitochondric is mentioned; which is operable linked, too.

[102487] In another embodiment thereof the expression cassette does not comprise an additional transit peptide in case in Table I, application no. 20, in column 6 in the same line as SEQ ID NO. 109717 is depicted, non-targeted is mentioned.

[102488] In an embodiment the present invention relates to an expresssion cassette comprising a) a promoter, preferably a promoter selected from the group consisting of Big35S, PCUbi, Super and USP, in particular p-PcUBI; and b) the nucleic acid SEQ ID NO. 142929, or a homolog or fragment thereof, or a homolog thereof being depicted in Table I, application no. 20, column 8, in the same line as SEQ ID NO. 142929, preferably the coding region thereof, a homolog or a fragment thereof; which are operable linked.

[102489] In an embodiment thereof the expression cassette comprises in addition c) a nucleic acid molecule encoding a transit peptide, especially a plastidal transit petide in case in Table I, application no. 20, in column 6 in the same line as SEQ ID NO. 142929 is depicted, plastidic is mentioned, or a mitochondrial transit peptide in case in Table I, application no. 20, in column 6 in the same line as SEQ ID NO. 142929 is depicted, mitochondric is mentioned; which is operable linked, too.

[102490] In another embodiment thereof the expression cassette does not comprise an additional transit peptide in case in Table I, application no. 20, in column 6 in the same line as SEQ ID NO. 142929 is depicted, non-targeted is mentioned.

[102491] In an embodiment the present invention relates to an expresssion cassette comprising a) a promoter, preferably a promoter selected from the group consisting of Big35S, PCUbi, Super and USP, in particular p-PcUBI; and b) the nucleic acid SEQ ID NO. 70006, or a homolog or fragment thereof, or a homolog thereof being depicted in Table I, application no. 20, column 8, in the same line as SEQ ID NO. 70006, preferably the coding region thereof, a homolog or a fragment thereof; which are operable linked.

[102492] In an embodiment thereof the expression cassette comprises in addition c) a nucleic acid molecule encoding a transit peptide, especially a plastidal transit petide in case in Table I, application no. 20, in column 6 in the same line as SEQ ID NO. 70006 is depicted, plastidic is mentioned, or a mitochondrial transit peptide in case in Table I, application no. 20, in column 6 in the same line as SEQ ID NO. 70006 is depicted, mitochondric is mentioned; which is operable linked, too.

[102493] In another embodiment thereof the expression cassette does not comprise an additional transit peptide in case in Table I, application no. 20, in column 6 in the same line as SEQ ID NO. 70006 is depicted, non-targeted is mentioned.

[102494] In an embodiment the present invention relates to an expresssion cassette comprising a) a promoter, preferably a promoter selected from the group consisting of Big35S, PCUbi, Super and USP, in particular p-PcUBI; and b) the nucleic acid SEQ ID NO. 29286, or a homolog or fragment thereof, or a homolog thereof being depicted in Table I, application no. 20, column 8, in the same line as SEQ ID NO. 29286, preferably the coding region thereof, a homolog or a fragment thereof; which are operable linked.

[102495] In an embodiment thereof the expression cassette comprises in addition c) a nucleic acid molecule encoding a transit peptide, especially a plastidal transit petide in case in Table I, application no. 20, in column 6 in the same line as SEQ ID NO. 29286 is depicted, plastidic is mentioned, or a mitochondrial transit peptide in case in Table I, application no. 20, in column 6 in the same line as SEQ ID NO. 29286 is depicted, mitochondric is mentioned; which is operable linked, too.

[102496] In another embodiment thereof the expression cassette does not comprise an additional transit peptide in case in Table I, application no. 20, in column 6 in the same line as SEQ ID NO. 29286 is depicted, non-targeted is mentioned.

[102497] In an embodiment the present invention relates to an expresssion cassette comprising a) a promoter, preferably a promoter selected from the group consisting of Big35S, PCUbi, Super and USP, in particular p-PcUBI; and b) the nucleic acid SEQ ID NO. 32308, or a homolog or fragment thereof, or a homolog thereof being depicted in Table I, application no. 20, column 8, in the same line as SEQ ID NO. 32308, preferably the coding region thereof, a homolog or a fragment thereof; which are operable linked.

[102498] In an embodiment thereof the expression cassette comprises in addition c) a nucleic acid molecule encoding a transit peptide, especially a plastidal transit petide in case in Table I, application no. 20, in column 6 in the same line as SEQ ID NO. 32308 is depicted, plastidic is mentioned, or a mitochondrial transit peptide in case in Table I, application no. 20, in column 6 in the same line as SEQ ID NO. 32308 is depicted, mitochondric is mentioned; which is operable linked, too.

[102499] In another embodiment thereof the expression cassette does not comprise an additional transit peptide in case in Table I, application no. 20, in column 6 in the same line as SEQ ID NO. 32308 is depicted, non-targeted is mentioned.

[102500] In an embodiment the present invention relates to an expresssion cassette comprising a) a promoter, preferably a promoter selected from the group consisting of Big35S, PCUbi, Super and USP, in particular p-Super; and b) the nucleic acid SEQ ID NO. 154509, or a homolog or fragment thereof, or a homolog thereof being depicted in Table I, application no. 20, column 8, in the same line as SEQ ID NO. 154509, preferably the coding region thereof, a homolog or a fragment thereof; which are operable linked.

[102501] In an embodiment thereof the expression cassette comprises in addition c) a nucleic acid molecule encoding a transit peptide, especially a plastidal transit petide in case in Table I, application no. 20, in column 6 in the same line as SEQ ID NO. 154509 is depicted, plastidic is mentioned, or a mitochondrial transit peptide in case in Table I, application no. 20, in column 6 in the same line as SEQ ID NO. 154509 is depicted, mitochondric is mentioned; which is operable linked, too.

[102502] In another embodiment thereof the expression cassette does not comprise an additional transit peptide in case in Table I, application no. 20, in column 6 in the same line as SEQ ID NO. 154509 is depicted, non-targeted is mentioned.

[102503] In an embodiment the present invention relates to an expresssion cassette comprising a) a promoter, preferably a promoter selected from the group consisting of Big35S, PCUbi, Super and USP, in particular p-Super; and b) the nucleic acid SEQ ID NO. 7081, or a homolog or fragment thereof, or a homolog thereof being depicted in Table I, application no. 20, column 8, in the same line as SEQ ID NO. 7081, preferably the coding region thereof, a homolog or a fragment thereof; which are operable linked.

[102504] In an embodiment thereof the expression cassette comprises in addition c) a nucleic acid molecule encoding a transit peptide, especially a plastidal transit petide in case in Table I, application no. 20, in column 6 in the same line as SEQ ID NO. 7081 is depicted, plastidic is mentioned, or a mitochondrial transit peptide in case in Table I, application no. 20, in column 6 in the same line as SEQ ID NO. 7081 is depicted, mitochondric is mentioned; which is operable linked, too.

[102505] In another embodiment thereof the expression cassette does not comprise an additional transit peptide in case in Table I, application no. 20, in column 6 in the same line as SEQ ID NO. 7081 is depicted, non-targeted is mentioned.

[102506] In an embodiment the present invention relates to an expresssion cassette comprising a) a promoter, preferably a promoter selected from the group consisting of Big35S, PCUbi, Super and USP, in particular p-Super; and b) the nucleic acid SEQ ID NO. 155230, or a homolog or fragment thereof, or a homolog thereof being depicted in Table I, application no. 20, column 8, in the same line as SEQ ID NO. 155230, preferably the coding region thereof, a homolog or a fragment thereof; which are operable linked.

[102507] In an embodiment thereof the expression cassette comprises in addition c) a nucleic acid molecule encoding a transit peptide, especially a plastidal transit petide in case in Table I, application no. 20, in column 6 in the same line as SEQ ID NO. 155230 is depicted, plastidic is mentioned, or a mitochondrial transit peptide in case in Table I, application no. 20, in column 6 in the same line as SEQ ID NO. 155230 is depicted, mitochondric is mentioned; which is operable linked, too.

[102508] In another embodiment thereof the expression cassette does not comprise an additional transit peptide in case in Table I, application no. 20, in column 6 in the same line as SEQ ID NO. 155230 is depicted, non-targeted is mentioned.

[102509] In an embodiment the present invention relates to an expresssion cassette comprising a) a promoter, preferably a promoter selected from the group consisting of Big35S, PCUbi, Super and USP, in particular p-Super; and b) the nucleic acid SEQ ID NO. 155370, or a homolog or fragment thereof, or a homolog thereof being depicted in Table I, application no. 20, column 8, in the same line as SEQ ID NO. 155370, preferably the coding region thereof, a homolog or a fragment thereof; which are operable linked.

[102510] In an embodiment thereof the expression cassette comprises in addition c) a nucleic acid molecule encoding a transit peptide, especially a plastidal transit petide in case in Table I, application no. 20, in column 6 in the same line as SEQ ID NO. 155370 is depicted, plastidic is mentioned, or a mitochondrial transit peptide in case in Table I, application no. 20, in column 6 in the same line as SEQ ID NO. 155370 is depicted, mitochondric is mentioned; which is operable linked, too.

[102511] In another embodiment thereof the expression cassette does not comprise an additional transit peptide in case in Table I, application no. 20, in column 6 in the same line as SEQ ID NO. 155370 is depicted, non-targeted is mentioned.

[102512] In an embodiment the present invention relates to an expresssion cassette comprising a) a promoter, preferably a promoter selected from the group consisting of Big35S, PCUbi, Super and USP, in particular p-Super; and b) the nucleic acid SEQ ID NO. 143954, or a homolog or fragment thereof, or a homolog thereof being depicted in Table I, application no. 20, column 8, in the same line as SEQ ID NO. 143954, preferably the coding region thereof, a homolog or a fragment thereof; which are operable linked.

[102513] In an embodiment thereof the expression cassette comprises in addition c) a nucleic acid molecule encoding a transit peptide, especially a plastidal transit petide in case in Table I, application no. 20, in column 6 in the same line as SEQ ID NO. 143954 is depicted, plastidic is mentioned, or a mitochondrial transit peptide in case in Table I, application no. 20, in column 6 in the same line as SEQ ID NO. 143954 is depicted, mitochondric is mentioned; which is operable linked, too.

[102514] In another embodiment thereof the expression cassette does not comprise an additional transit peptide in case in Table I, application no. 20, in column 6 in the same line as SEQ ID NO. 143954 is depicted, non-targeted is mentioned.

[102515] In an embodiment the present invention relates to an expresssion cassette comprising a) a promoter, preferably a promoter selected from the group consisting of Big35S, PCUbi, Super and USP, in particular p-Super; and b) the nucleic acid SEQ ID NO. 155613, or a homolog or fragment thereof, or a homolog thereof being depicted in Table I, application no. 20, column 8, in the same line as SEQ ID NO. 155613, preferably the coding region thereof, a homolog or a fragment thereof; which are operable linked.

[102516] In an embodiment thereof the expression cassette comprises in addition c) a nucleic acid molecule encoding a transit peptide, especially a plastidal transit petide in case in Table I, application no. 20, in column 6 in the same line as SEQ ID NO. 155613 is depicted, plastidic is mentioned, or a mitochondrial transit peptide in case in Table I, application no. 20, in column 6 in the same line as SEQ ID NO. 155613 is depicted, mitochondric is mentioned; which is operable linked, too.

[102517] In another embodiment thereof the expression cassette does not comprise an additional transit peptide in case in Table I, application no. 20, in column 6 in the same line as SEQ ID NO. 155613 is depicted, non-targeted is mentioned.

[102518] In an embodiment the present invention relates to an expresssion cassette comprising a) a promoter, preferably a promoter selected from the group consisting of Big35S, PCUbi, Super and USP, in particular p-Super; and b) the nucleic acid SEQ ID NO. 155657, or a homolog or fragment thereof, or a homolog thereof being depicted in Table I, application no. 20, column 8, in the same line as SEQ ID NO. 155657, preferably the coding region thereof, a homolog or a fragment thereof; which are operable linked.

[102519] In an embodiment thereof the expression cassette comprises in addition c) a nucleic acid molecule encoding a transit peptide, especially a plastidal transit petide in case in Table I, application no. 20, in column 6 in the same line as SEQ ID NO. 155657 is depicted, plastidic is mentioned, or a mitochondrial transit peptide in case in Table I, application no. 20, in column 6 in the same line as SEQ ID NO. 155657 is depicted, mitochondric is mentioned; which is operable linked, too.

[102520] In another embodiment thereof the expression cassette does not comprise an additional transit peptide in case in Table I, application no. 20, in column 6 in the same line as SEQ ID NO. 155657 is depicted, non-targeted is mentioned.

[102521] In an embodiment the present invention relates to an expresssion cassette comprising a) a promoter, preferably a promoter selected from the group consisting of Big35S, PCUbi, Super and USP, in particular p-Super; and b) the nucleic acid SEQ ID NO. 155665, or a homolog or fragment thereof, or a homolog thereof being depicted in Table I, application no. 20, column 8, in the same line as SEQ ID NO. 155665, preferably the coding region thereof, a homolog or a fragment thereof; which are operable linked.

[102522] In an embodiment thereof the expression cassette comprises in addition c) a nucleic acid molecule encoding a transit peptide, especially a plastidal transit petide in case in Table I, application no. 20, in column 6 in the same line as SEQ ID NO. 155665 is depicted, plastidic is mentioned, or a mitochondrial transit peptide in case in Table I, application no. 20, in column 6 in the same line as SEQ ID NO. 155665 is depicted, mitochondric is mentioned; which is operable linked, too.

[102523] In another embodiment thereof the expression cassette does not comprise an additional transit peptide in case in Table I, application no. 20, in column 6 in the same line as SEQ ID NO. 155665 is depicted, non-targeted is mentioned.

[102524] In an embodiment the present invention relates to an expresssion cassette comprising a) a promoter, preferably a promoter selected from the group consisting of Big35S, PCUbi, Super and USP, in particular p-Super; and b) the nucleic acid SEQ ID NO. 37503, or a homolog or fragment thereof, or a homolog thereof being depicted in Table I, application no. 20, column 8, in the same line as SEQ ID NO. 37503, preferably the coding region thereof, a homolog or a fragment thereof; which are operable linked.

[102525] In an embodiment thereof the expression cassette comprises in addition c) a nucleic acid molecule encoding a transit peptide, especially a plastidal transit petide in case in Table I, application no. 20, in column 6 in the same line as SEQ ID NO. 37503 is depicted, plastidic is mentioned, or a mitochondrial transit peptide in case in Table I, application no. 20, in column 6 in the same line as SEQ ID NO. 37503 is depicted, mitochondric is mentioned; which is operable linked, too.

[102526] In another embodiment thereof the expression cassette does not comprise an additional transit peptide in case in Table I, application no. 20, in column 6 in the same line as SEQ ID NO. 37503 is depicted, non-targeted is mentioned.

[102527] In an embodiment the present invention relates to an expresssion cassette comprising a) a promoter, preferably a promoter selected from the group consisting of Big35S, PCUbi, Super and USP, in particular p-Super; and b) the nucleic acid SEQ ID NO. 155890, or a homolog or fragment thereof, or a homolog thereof being depicted in Table I, application no. 20, column 8, in the same line as SEQ ID NO. 155890, preferably the coding region thereof, a homolog or a fragment thereof; which are operable linked.

[102528] In an embodiment thereof the expression cassette comprises in addition c) a nucleic acid molecule encoding a transit peptide, especially a plastidal transit petide in case in Table I, application no. 20, in column 6 in the same line as SEQ ID NO. 155890 is depicted, plastidic is mentioned, or a mitochondrial transit peptide in case in Table I, application no. 20, in column 6 in the same line as SEQ ID NO. 155890 is depicted, mitochondric is mentioned; which is operable linked, too.

[102529] In another embodiment thereof the expression cassette does not comprise an additional transit peptide in case in Table I, application no. 20, in column 6 in the same line as SEQ ID NO. 155890 is depicted, non-targeted is mentioned.

[102530] In an embodiment the present invention relates to an expresssion cassette comprising a) a promoter, preferably a promoter selected from the group consisting of Big35S, PCUbi, Super and USP, in particular p-Super; and b) the nucleic acid SEQ ID NO. 76890, or a homolog or fragment thereof, or a homolog thereof being depicted in Table I, application no. 20, column 8, in the same line as SEQ ID NO. 76890, preferably the coding region thereof, a homolog or a fragment thereof; which are operable linked.

[102531] In an embodiment thereof the expression cassette comprises in addition c) a nucleic acid molecule encoding a transit peptide, especially a plastidal transit petide in case in Table I, application no. 20, in column 6 in the same line as SEQ ID NO. 76890 is depicted, plastidic is mentioned, or a mitochondrial transit peptide in case in Table I, application no. 20, in column 6 in the same line as SEQ ID NO. 76890 is depicted, mitochondric is mentioned; which is operable linked, too.

[102532] In another embodiment thereof the expression cassette does not comprise an additional transit peptide in case in Table I, application no. 20, in column 6 in the same line as SEQ ID NO. 76890 is depicted, non-targeted is mentioned.

[102533] In an embodiment the present invention relates to an expresssion cassette comprising a) a promoter, preferably a promoter selected from the group consisting of Big35S, PCUbi, Super and USP, in particular p-Super; and b) the nucleic acid SEQ ID NO. 38289, or a homolog or fragment thereof, or a homolog thereof being depicted in Table I, application no. 20, column 8, in the same line as SEQ ID NO. 38289, preferably the coding region thereof, a homolog or a fragment thereof; which are operable linked.

[102534] In an embodiment thereof the expression cassette comprises in addition c) a nucleic acid molecule encoding a transit peptide, especially a plastidal transit petide in case in Table I, application no. 20, in column 6 in the same line as SEQ ID NO. 38289 is depicted, plastidic is mentioned, or a mitochondrial transit peptide in case in Table I, application no. 20, in column 6 in the same line as SEQ ID NO. 38289 is depicted, mitochondric is mentioned; which is operable linked, too.

[102535] In another embodiment thereof the expression cassette does not comprise an additional transit peptide in case in Table I, application no. 20, in column 6 in the same line as SEQ ID NO. 38289 is depicted, non-targeted is mentioned.

[102536] In an embodiment the present invention relates to an expresssion cassette comprising a) a promoter, preferably a promoter selected from the group consisting of Big35S, PCUbi, Super and USP, in particular p-Super; and b) the nucleic acid SEQ ID NO. 38300, or a homolog or fragment thereof, or a homolog thereof being depicted in Table I, application no. 20, column 8, in the same line as SEQ ID NO. 38300, preferably the coding region thereof, a homolog or a fragment thereof; which are operable linked.

[102537] In an embodiment thereof the expression cassette comprises in addition c) a nucleic acid molecule encoding a transit peptide, especially a plastidal transit petide in case in Table I, application no. 20, in column 6 in the same line as SEQ ID NO. 38300 is depicted, plastidic is mentioned, or a mitochondrial transit peptide in case in Table I, application no. 20, in column 6 in the same line as SEQ ID NO. 38300 is depicted, mitochondric is mentioned; which is operable linked, too.

[102538] In another embodiment thereof the expression cassette does not comprise an additional transit peptide in case in Table I, application no. 20, in column 6 in the same line as SEQ ID NO. 38300 is depicted, non-targeted is mentioned.

[102539] In an embodiment the present invention relates to an expresssion cassette comprising a) a promoter, preferably a promoter selected from the group consisting of Big35S, PCUbi, Super and USP, in particular p-Super; and b) the nucleic acid SEQ ID NO. 38345, or a homolog or fragment thereof, or a homolog thereof being depicted in Table I, application no. 20, column 8, in the same line as SEQ ID NO. 38345, preferably the coding region thereof, a homolog or a fragment thereof; which are operable linked.

[102540] In an embodiment thereof the expression cassette comprises in addition c) a nucleic acid molecule encoding a transit peptide, especially a plastidal transit petide in case in Table I, application no. 20, in column 6 in the same line as SEQ ID NO. 38345 is depicted, plastidic is mentioned, or a mitochondrial transit peptide in case in Table I, application no. 20, in column 6 in the same line as SEQ ID NO. 38345 is depicted, mitochondric is mentioned; which is operable linked, too.

[102541] In another embodiment thereof the expression cassette does not comprise an additional transit peptide in case in Table I, application no. 20, in column 6 in the same line as SEQ ID NO. 38345 is depicted, non-targeted is mentioned.

[102542] In an embodiment the present invention relates to an expresssion cassette comprising a) a promoter, preferably a promoter selected from the group consisting of Big35S, PCUbi, Super and USP, in particular p-Super; and b) the nucleic acid SEQ ID NO. 156392, or a homolog or fragment thereof, or a homolog thereof being depicted in Table I, application no. 20, column 8, in the same line as SEQ ID NO. 156392, preferably the coding region thereof, a homolog or a fragment thereof; which are operable linked.

[102543] In an embodiment thereof the expression cassette comprises in addition c) a nucleic acid molecule encoding a transit peptide, especially a plastidal transit petide in case in Table I, application no. 20, in column 6 in the same line as SEQ ID NO. 156392 is depicted, plastidic is mentioned, or a mitochondrial transit peptide in case in Table I, application no. 20, in column 6 in the same line as SEQ ID NO. 156392 is depicted, mitochondric is mentioned; which is operable linked, too.

[102544] In another embodiment thereof the expression cassette does not comprise an additional transit peptide in case in Table I, application no. 20, in column 6 in the same line as SEQ ID NO. 156392 is depicted, non-targeted is mentioned.

[102545] In an embodiment the present invention relates to an expresssion cassette comprising a) a promoter, preferably a promoter selected from the group consisting of Big35S, PCUbi, Super and USP, in particular p-Super; and b) the nucleic acid SEQ ID NO. 78753, or a homolog or fragment thereof, or a homolog thereof being depicted in Table I, application no. 20, column 8, in the same line as SEQ ID NO. 78753, preferably the coding region thereof, a homolog or a fragment thereof; which are operable linked.

[102546] In an embodiment thereof the expression cassette comprises in addition c) a nucleic acid molecule encoding a transit peptide, especially a plastidal transit petide in case in Table I, application no. 20, in column 6 in the same line as SEQ ID NO. 78753 is depicted, plastidic is mentioned, or a mitochondrial transit peptide in case in Table I, application no. 20, in column 6 in the same line as SEQ ID NO. 78753 is depicted, mitochondric is mentioned; which is operable linked, too.

[102547] In another embodiment thereof the expression cassette does not comprise an additional transit peptide in case in Table I, application no. 20, in column 6 in the same line as SEQ ID NO. 78753 is depicted, non-targeted is mentioned.

[102548] In an embodiment the present invention relates to an expresssion cassette comprising a) a promoter, preferably a promoter selected from the group consisting of Big35S, PCUbi, Super and USP, in particular p-Super; and b) the nucleic acid SEQ ID NO. 156542, or a homolog or fragment thereof, or a homolog thereof being depicted in Table I, application no. 20, column 8, in the same line as SEQ ID NO. 156542, preferably the coding region thereof, a homolog or a fragment thereof; which are operable linked.

[102549] In an embodiment thereof the expression cassette comprises in addition c) a nucleic acid molecule encoding a transit peptide, especially a plastidal transit petide in case in Table I, application no. 20, in column 6 in the same line as SEQ ID NO. 156542 is depicted, plastidic is mentioned, or a mitochondrial transit peptide in case in Table I, application no. 20, in column 6 in the same line as SEQ ID NO. 156542 is depicted, mitochondric is mentioned; which is operable linked, too.

[102550] In another embodiment thereof the expression cassette does not comprise an additional transit peptide in case in Table I, application no. 20, in column 6 in the same line as SEQ ID NO. 156542 is depicted, non-targeted is mentioned.

[102551] In an embodiment the present invention relates to an expresssion cassette comprising a) a promoter, preferably a promoter selected from the group consisting of Big35S, PCUbi, Super and USP, in particular p-Super; and b) the nucleic acid SEQ ID NO. 79181, or a homolog or fragment thereof, or a homolog thereof being depicted in Table I, application no. 20, column 8, in the same line as SEQ ID NO. 79181, preferably the coding region thereof, a homolog or a fragment thereof; which are operable linked.

[102552] In an embodiment thereof the expression cassette comprises in addition c) a nucleic acid molecule encoding a transit peptide, especially a plastidal transit petide in case in Table I, application no. 20, in column 6 in the same line as SEQ ID NO. 79181 is depicted, plastidic is mentioned, or a mitochondrial transit peptide in case in Table I, application no. 20, in column 6 in the same line as SEQ ID NO. 79181 is depicted, mitochondric is mentioned; which is operable linked, too.

[102553] In another embodiment thereof the expression cassette does not comprise an additional transit peptide in case in Table I, application no. 20, in column 6 in the same line as SEQ ID NO. 79181 is depicted, non-targeted is mentioned.

[102554] In an embodiment the present invention relates to an expresssion cassette comprising a) a promoter, preferably a promoter selected from the group consisting of Big35S, PCUbi, Super and USP, in particular p-Super; and b) the nucleic acid SEQ ID NO. 79217, or a homolog or fragment thereof, or a homolog thereof being depicted in Table I, application no. 20, column 8, in the same line as SEQ ID NO. 79217, preferably the coding region thereof, a homolog or a fragment thereof; which are operable linked.

[102555] In an embodiment thereof the expression cassette comprises in addition c) a nucleic acid molecule encoding a transit peptide, especially a plastidal transit petide in case in Table I, application no. 20, in column 6 in the same line as SEQ ID NO. 79217 is depicted, plastidic is mentioned, or a mitochondrial transit peptide in case in Table I, application no. 20, in column 6 in the same line as SEQ ID NO. 79217 is depicted, mitochondric is mentioned; which is operable linked, too.

[102556] In another embodiment thereof the expression cassette does not comprise an additional transit peptide in case in Table I, application no. 20, in column 6 in the same line as SEQ ID NO. 79217 is depicted, non-targeted is mentioned.

[102557] In an embodiment the present invention relates to an expresssion cassette comprising a) a promoter, preferably a promoter selected from the group consisting of Big35S, PCUbi, Super and USP, in particular p-Super; and b) the nucleic acid SEQ ID NO. 104277, or a homolog or fragment thereof, or a homolog thereof being depicted in Table I, application no. 20, column 8, in the same line as SEQ ID NO. 104277, preferably the coding region thereof, a homolog or a fragment thereof; which are operable linked.

[102558] In an embodiment thereof the expression cassette comprises in addition c) a nucleic acid molecule encoding a transit peptide, especially a plastidal transit petide in case in Table I, application no. 20, in column 6 in the same line as SEQ ID NO. 104277 is depicted, plastidic is mentioned, or a mitochondrial transit peptide in case in Table I, application no. 20, in column 6 in the same line as SEQ ID NO. 104277 is depicted, mitochondric is mentioned; which is operable linked, too.

[102559] In another embodiment thereof the expression cassette does not comprise an additional transit peptide in case in Table I, application no. 20, in column 6 in the same line as SEQ ID NO. 104277 is depicted, non-targeted is mentioned.

[102560] In an embodiment the present invention relates to an expresssion cassette comprising a) a promoter, preferably a promoter selected from the group consisting of Big35S, PCUbi, Super and USP, in particular p-Super; and b) the nucleic acid SEQ ID NO. 156810, or a homolog or fragment thereof, or a homolog thereof being depicted in Table I, application no. 20, column 8, in the same line as SEQ ID NO. 156810, preferably the coding region thereof, a homolog or a fragment thereof; which are operable linked.

[102561] In an embodiment thereof the expression cassette comprises in addition c) a nucleic acid molecule encoding a transit peptide, especially a plastidal transit petide in case in Table I, application no. 20, in column 6 in the same line as SEQ ID NO. 156810 is depicted, plastidic is mentioned, or a mitochondrial transit peptide in case in Table I, application no. 20, in column 6 in the same line as SEQ ID NO. 156810 is depicted, mitochondric is mentioned; which is operable linked, too.

[102562] In another embodiment thereof the expression cassette does not comprise an additional transit peptide in case in Table I, application no. 20, in column 6 in the same line as SEQ ID NO. 156810 is depicted, non-targeted is mentioned.

[102563] In an embodiment the present invention relates to an expresssion cassette comprising a) a promoter, preferably a promoter selected from the group consisting of Big35S, PCUbi, Super and USP, in particular p-Super; and b) the nucleic acid SEQ ID NO. 146238, or a homolog or fragment thereof, or a homolog thereof being depicted in Table I, application no. 20, column 8, in the same line as SEQ ID NO. 146238, preferably the coding region thereof, a homolog or a fragment thereof; which are operable linked.

[102564] In an embodiment thereof the expression cassette comprises in addition c) a nucleic acid molecule encoding a transit peptide, especially a plastidal transit petide in case in Table I, application no. 20, in column 6 in the same line as SEQ ID NO. 146238 is depicted, plastidic is mentioned, or a mitochondrial transit peptide in case in Table I, application no. 20, in column 6 in the same line as SEQ ID NO. 146238 is depicted, mitochondric is mentioned; which is operable linked, too.

[102565] In another embodiment thereof the expression cassette does not comprise an additional transit peptide in case in Table I, application no. 20, in column 6 in the same line as SEQ ID NO. 146238 is depicted, non-targeted is mentioned.

[102566] In an embodiment the present invention relates to an expresssion cassette comprising a) a promoter, preferably a promoter selected from the group consisting of Big35S, PCUbi, Super and USP, in particular p-Super; and b) the nucleic acid SEQ ID NO. 39237, or a homolog or fragment thereof, or a homolog thereof being depicted in Table I, application no. 20, column 8, in the same line as SEQ ID NO. 39237, preferably the coding region thereof, a homolog or a fragment thereof; which are operable linked.

[102567] In an embodiment thereof the expression cassette comprises in addition c) a nucleic acid molecule encoding a transit peptide, especially a plastidal transit petide in case in Table I, application no. 20, in column 6 in the same line as SEQ ID NO. 39237 is depicted, plastidic is mentioned, or a mitochondrial transit peptide in case in Table I, application no. 20, in column 6 in the same line as SEQ ID NO. 39237 is depicted, mitochondric is mentioned; which is operable linked, too.

[102568] In another embodiment thereof the expression cassette does not comprise an additional transit peptide in case in Table I, application no. 20, in column 6 in the same line as SEQ ID NO. 39237 is depicted, non-targeted is mentioned.

[102569] In an embodiment the present invention relates to an expresssion cassette comprising a) a promoter, preferably a promoter selected from the group consisting of Big35S, PCUbi, Super and USP, in particular p-Super; and b) the nucleic acid SEQ ID NO. 39300, or a homolog or fragment thereof, or a homolog thereof being depicted in Table I, application no. 20, column 8, in the same line as SEQ ID NO. 39300, preferably the coding region thereof, a homolog or a fragment thereof; which are operable linked.

[102570] In an embodiment thereof the expression cassette comprises in addition c) a nucleic acid molecule encoding a transit peptide, especially a plastidal transit petide in case in Table I, application no. 20, in column 6 in the same line as SEQ ID NO. 39300 is depicted, plastidic is mentioned, or a mitochondrial transit peptide in case in Table I, application no. 20, in column 6 in the same line as SEQ ID NO. 39300 is depicted, mitochondric is mentioned; which is operable linked, too.

[102571] In another embodiment thereof the expression cassette does not comprise an additional transit peptide in case in Table I, application no. 20, in column 6 in the same line as SEQ ID NO. 39300 is depicted, non-targeted is mentioned.

[102572] In an embodiment the present invention relates to an expresssion cassette comprising a) a promoter, preferably a promoter selected from the group consisting of Big35S, PCUbi, Super and USP, in particular p-Super; and b) the nucleic acid SEQ ID NO. 115628, or a homolog or fragment thereof, or a homolog thereof being depicted in Table I, application no. 20, column 8, in the same line as SEQ ID NO. 115628, preferably the coding region thereof, a homolog or a fragment thereof; which are operable linked.

[102573] In an embodiment thereof the expression cassette comprises in addition c) a nucleic acid molecule encoding a transit peptide, especially a plastidal transit petide in case in Table I, application no. 20, in column 6 in the same line as SEQ ID NO. 115628 is depicted, plastidic is mentioned, or a mitochondrial transit peptide in case in Table I, application no. 20, in column 6 in the same line as SEQ ID NO. 115628 is depicted, mitochondric is mentioned; which is operable linked, too.

[102574] In another embodiment thereof the expression cassette does not comprise an additional transit peptide in case in Table I, application no. 20, in column 6 in the same line as SEQ ID NO. 115628 is depicted, non-targeted is mentioned.

[102575] In an embodiment the present invention relates to an expresssion cassette comprising a) a promoter, preferably a promoter selected from the group consisting of Big35S, PCUbi, Super and USP, in particular p-Super; and b) the nucleic acid SEQ ID NO. 156910, or a homolog or fragment thereof, or a homolog thereof being depicted in Table I, application no. 20, column 8, in the same line as SEQ ID NO. 156910, preferably the coding region thereof, a homolog or a fragment thereof; which are operable linked.

[102576] In an embodiment thereof the expression cassette comprises in addition c) a nucleic acid molecule encoding a transit peptide, especially a plastidal transit petide in case in Table I, application no. 20, in column 6 in the same line as SEQ ID NO. 156910 is depicted, plastidic is mentioned, or a mitochondrial transit peptide in case in Table I, application no. 20, in column 6 in the same line as SEQ ID NO. 156910 is depicted, mitochondric is mentioned; which is operable linked, too.

[102577] In another embodiment thereof the expression cassette does not comprise an additional transit peptide in case in Table I, application no. 20, in column 6 in the same line as SEQ ID NO. 156910 is depicted, non-targeted is mentioned.

[102578] In an embodiment the present invention relates to an expresssion cassette comprising a) a promoter, preferably a promoter selected from the group consisting of Big35S, PCUbi, Super and USP, in particular p-Super; and b) the nucleic acid SEQ ID NO. 146288, or a homolog or fragment thereof, or a homolog thereof being depicted in Table I, application no. 20, column 8, in the same line as SEQ ID NO. 146288, preferably the coding region thereof, a homolog or a fragment thereof; which are operable linked.

[102579] In an embodiment thereof the expression cassette comprises in addition c) a nucleic acid molecule encoding a transit peptide, especially a plastidal transit petide in case in Table I, application no. 20, in column 6 in the same line as SEQ ID NO. 146288 is depicted, plastidic is mentioned, or a mitochondrial transit peptide in case in Table I, application no. 20, in column 6 in the same line as SEQ ID NO. 146288 is depicted, mitochondric is mentioned; which is operable linked, too.

[102580] In another embodiment thereof the expression cassette does not comprise an additional transit peptide in case in Table I, application no. 20, in column 6 in the same line as SEQ ID NO. 146288 is depicted, non-targeted is mentioned.

[102581] In an embodiment the present invention relates to an expresssion cassette comprising a) a promoter, preferably a promoter selected from the group consisting of Big35S, PCUbi, Super and USP, in particular p-Super; and b) the nucleic acid SEQ ID NO. 81451, or a homolog or fragment thereof, or a homolog thereof being depicted in Table I, application no. 20, column 8, in the same line as SEQ ID NO. 81451, preferably the coding region thereof, a homolog or a fragment thereof; which are operable linked.

[102582] In an embodiment thereof the expression cassette comprises in addition c) a nucleic acid molecule encoding a transit peptide, especially a plastidal transit petide in case in Table I, application no. 20, in column 6 in the same line as SEQ ID NO. 81451 is depicted, plastidic is mentioned, or a mitochondrial transit peptide in case in Table I, application no. 20, in column 6 in the same line as SEQ ID NO. 81451 is depicted, mitochondric is mentioned; which is operable linked, too.

[102583] In another embodiment thereof the expression cassette does not comprise an additional transit peptide in case in Table I, application no. 20, in column 6 in the same line as SEQ ID NO. 81451 is depicted, non-targeted is mentioned.

[102584] In an embodiment the present invention relates to an expresssion cassette comprising a) a promoter, preferably a promoter selected from the group consisting of Big35S, PCUbi, Super and USP, in particular p-Super; and b) the nucleic acid SEQ ID NO. 81576, or a homolog or fragment thereof, or a homolog thereof being depicted in Table I, application no. 20, column 8, in the same line as SEQ ID NO. 81576, preferably the coding region thereof, a homolog or a fragment thereof; which are operable linked.

[102585] In an embodiment thereof the expression cassette comprises in addition c) a nucleic acid molecule encoding a transit peptide, especially a plastidal transit petide in case in Table I, application no. 20, in column 6 in the same line as SEQ ID NO. 81576 is depicted, plastidic is mentioned, or a mitochondrial transit peptide in case in Table I, application no. 20, in column 6 in the same line as SEQ ID NO. 81576 is depicted, mitochondric is mentioned; which is operable linked, too.

[102586] In another embodiment thereof the expression cassette does not comprise an additional transit peptide in case in Table I, application no. 20, in column 6 in the same line as SEQ ID NO. 81576 is depicted, non-targeted is mentioned.

[102587] In an embodiment the present invention relates to an expresssion cassette comprising a) a promoter, preferably a promoter selected from the group consisting of Big35S, PCUbi, Super and USP, in particular p-Super; and b) the nucleic acid SEQ ID NO. 157128, or a homolog or fragment thereof, or a homolog thereof being depicted in Table I, application no. 20, column 8, in the same line as SEQ ID NO. 157128, preferably the coding region thereof, a homolog or a fragment thereof; which are operable linked.

[102588] In an embodiment thereof the expression cassette comprises in addition c) a nucleic acid molecule encoding a transit peptide, especially a plastidal transit petide in case in Table I, application no. 20, in column 6 in the same line as SEQ ID NO. 157128 is depicted, plastidic is mentioned, or a mitochondrial transit peptide in case in Table I, application no. 20, in column 6 in the same line as SEQ ID NO. 157128 is depicted, mitochondric is mentioned; which is operable linked, too.

[102589] In another embodiment thereof the expression cassette does not comprise an additional transit peptide in case in Table I, application no. 20, in column 6 in the same line as SEQ ID NO. 157128 is depicted, non-targeted is mentioned.

[102590] In an embodiment the present invention relates to an expresssion cassette comprising a) a promoter, preferably a promoter selected from the group consisting of Big35S, PCUbi, Super and USP, in particular p-Super; and b) the nucleic acid SEQ ID NO. 41499, or a homolog or fragment thereof, or a homolog thereof being depicted in Table I, application no. 20, column 8, in the same line as SEQ ID NO. 41499, preferably the coding region thereof, a homolog or a fragment thereof; which are operable linked.

[102591] In an embodiment thereof the expression cassette comprises in addition c) a nucleic acid molecule encoding a transit peptide, especially a plastidal transit petide in case in Table I, application no. 20, in column 6 in the same line as SEQ ID NO. 41499 is depicted, plastidic is mentioned, or a mitochondrial transit peptide in case in Table I, application no. 20, in column 6 in the same line as SEQ ID NO. 41499 is depicted, mitochondric is mentioned; which is operable linked, too.

[102592] In another embodiment thereof the expression cassette does not comprise an additional transit peptide in case in Table I, application no. 20, in column 6 in the same line as SEQ ID NO. 41499 is depicted, non-targeted is mentioned.

[102593] In an embodiment the present invention relates to an expresssion cassette comprising a) a promoter, preferably a promoter selected from the group consisting of Big35S, PCUbi, Super and USP, in particular p-Super; and b) the nucleic acid SEQ ID NO. 157321, or a homolog or fragment thereof, or a homolog thereof being depicted in Table I, application no. 20, column 8, in the same line as SEQ ID NO. 157321, preferably the coding region thereof, a homolog or a fragment thereof; which are operable linked.

[102594] In an embodiment thereof the expression cassette comprises in addition c) a nucleic acid molecule encoding a transit peptide, especially a plastidal transit petide in case in Table I, application no. 20, in column 6 in the same line as SEQ ID NO. 157321 is depicted, plastidic is mentioned, or a mitochondrial transit peptide in case in Table I, application no. 20, in column 6 in the same line as SEQ ID NO. 157321 is depicted, mitochondric is mentioned; which is operable linked, too.

[102595] In another embodiment thereof the expression cassette does not comprise an additional transit peptide in case in Table I, application no. 20, in column 6 in the same line as SEQ ID NO. 157321 is depicted, non-targeted is mentioned.

[102596] In an embodiment the present invention relates to an expresssion cassette comprising a) a promoter, preferably a promoter selected from the group consisting of Big35S, PCUbi, Super and USP, in particular p-Super; and b) the nucleic acid SEQ ID NO. 157450, or a homolog or fragment thereof, or a homolog thereof being depicted in Table I, application no. 20, column 8, in the same line as SEQ ID NO. 157450, preferably the coding region thereof, a homolog or a fragment thereof; which are operable linked.

[102597] In an embodiment thereof the expression cassette comprises in addition c) a nucleic acid molecule encoding a transit peptide, especially a plastidal transit petide in case in Table I, application no. 20, in column 6 in the same line as SEQ ID NO. 157450 is depicted, plastidic is mentioned, or a mitochondrial transit peptide in case in Table I, application no. 20, in column 6 in the same line as SEQ ID NO. 157450 is depicted, mitochondric is mentioned; which is operable linked, too.

[102598] In another embodiment thereof the expression cassette does not comprise an additional transit peptide in case in Table I, application no. 20, in column 6 in the same line as SEQ ID NO. 157450 is depicted, non-targeted is mentioned.

[102599] In an embodiment the present invention relates to an expresssion cassette comprising a) a promoter, preferably a promoter selected from the group consisting of Big35S, PCUbi, Super and USP, in particular p-Super; and b) the nucleic acid SEQ ID NO. 125264, or a homolog or fragment thereof, or a homolog thereof being depicted in Table I, application no. 20, column 8, in the same line as SEQ ID NO. 125264, preferably the coding region thereof, a homolog or a fragment thereof; which are operable linked.

[102600] In an embodiment thereof the expression cassette comprises in addition c) a nucleic acid molecule encoding a transit peptide, especially a plastidal transit petide in case in Table I, application no. 20, in column 6 in the same line as SEQ ID NO. 125264 is depicted, plastidic is mentioned, or a mitochondrial transit peptide in case in Table I, application no. 20, in column 6 in the same line as SEQ ID NO. 125264 is depicted, mitochondric is mentioned; which is operable linked, too.

[102601] In another embodiment thereof the expression cassette does not comprise an additional transit peptide in case in Table I, application no. 20, in column 6 in the same line as SEQ ID NO. 125264 is depicted, non-targeted is mentioned.

[102602] In an embodiment the present invention relates to an expresssion cassette comprising a) a promoter, preferably a promoter selected from the group consisting of Big35S, PCUbi, Super and USP, in particular p-PcUBI; and b) the nucleic acid SEQ ID NO. 46850, or a homolog or fragment thereof, or a homolog thereof being depicted in Table I, application no. 20, column 8, in the same line as SEQ ID NO. 46850, preferably the coding region thereof, a homolog or a fragment thereof; which are operable linked.

[102603] In an embodiment thereof the expression cassette comprises in addition c) a nucleic acid molecule encoding a transit peptide, especially a plastidal transit petide in case in Table I, application no. 20, in column 6 in the same line as SEQ ID NO. 46850 is depicted, plastidic is mentioned, or a mitochondrial transit peptide in case in Table I, application no. 20, in column 6 in the same line as SEQ ID NO. 46850 is depicted, mitochondric is mentioned; which is operable linked, too.

[102604] In another embodiment thereof the expression cassette does not comprise an additional transit peptide in case in Table I, application no. 20, in column 6 in the same line as SEQ ID NO. 46850 is depicted, non-targeted is mentioned.

[102605] In an embodiment the present invention relates to an expresssion cassette comprising a) a promoter, preferably a promoter selected from the group consisting of Big35S, PCUbi, Super and USP, in particular p-PcUBI; and b) the nucleic acid SEQ ID NO. 59370, or a homolog or fragment thereof, or a homolog thereof being depicted in Table I, application no. 20, column 8, in the same line as SEQ ID NO. 59370, preferably the coding region thereof, a homolog or a fragment thereof; which are operable linked.

[102606] In an embodiment thereof the expression cassette comprises in addition c) a nucleic acid molecule encoding a transit peptide, especially a plastidal transit petide in case in Table I, application no. 20, in column 6 in the same line as SEQ ID NO. 59370 is depicted, plastidic is mentioned, or a mitochondrial transit peptide in case in Table I, application no. 20, in column 6 in the same line as SEQ ID NO. 59370 is depicted, mitochondric is mentioned; which is operable linked, too.

[102607] In another embodiment thereof the expression cassette does not comprise an additional transit peptide in case in Table I, application no. 20, in column 6 in the same line as SEQ ID NO. 59370 is depicted, non-targeted is mentioned.

[102608] In an embodiment the present invention relates to an expresssion cassette comprising a) a promoter, preferably a promoter selected from the group consisting of Big35S, PCUbi, Super and USP, in particular p-PcUBI; and b) the nucleic acid SEQ ID NO. 60301, or a homolog or fragment thereof, or a homolog thereof being depicted in Table I, application no. 20, column 8, in the same line as SEQ ID NO. 60301, preferably the coding region thereof, a homolog or a fragment thereof; which are operable linked.

[102609] In an embodiment thereof the expression cassette comprises in addition c) a nucleic acid molecule encoding a transit peptide, especially a plastidal transit petide in case in Table I, application no. 20, in column 6 in the same line as SEQ ID NO. 60301 is depicted, plastidic is mentioned, or a mitochondrial transit peptide in case in Table I, application no. 20, in column 6 in the same line as SEQ ID NO. 60301 is depicted, mitochondric is mentioned; which is operable linked, too.

[102610] In another embodiment thereof the expression cassette does not comprise an additional transit peptide in case in Table I, application no. 20, in column 6 in the same line as SEQ ID NO. 60301 is depicted, non-targeted is mentioned.

[102611] In an embodiment the present invention relates to an expresssion cassette comprising a) a promoter, preferably a promoter selected from the group consisting of Big35S, PCUbi, Super and USP, in particular p-PcUBI; and b) the nucleic acid SEQ ID NO. 61553, or a homolog or fragment thereof, or a homolog thereof being depicted in Table I, application no. 20, column 8, in the same line as SEQ ID NO. 61553, preferably the coding region thereof, a homolog or a fragment thereof; which are operable linked.

[102612] In an embodiment thereof the expression cassette comprises in addition c) a nucleic acid molecule encoding a transit peptide, especially a plastidal transit petide in case in Table I, application no. 20, in column 6 in the same line as SEQ ID NO. 61553 is depicted, plastidic is mentioned, or a mitochondrial transit peptide in case in Table I, application no. 20, in column 6 in the same line as SEQ ID NO. 61553 is depicted, mitochondric is mentioned; which is operable linked, too.

[102613] In another embodiment thereof the expression cassette does not comprise an additional transit peptide in case in Table I, application no. 20, in column 6 in the same line as SEQ ID NO. 61553 is depicted, non-targeted is mentioned.

[102614] In an embodiment the present invention relates to an expresssion cassette comprising a) a promoter, preferably a promoter selected from the group consisting of Big35S, PCUbi, Super and USP, in particular p-Super; and b) the nucleic acid SEQ ID NO. 88879, or a homolog or fragment thereof, or a homolog thereof being depicted in Table I, application no. 20, column 8, in the same line as SEQ ID NO. 88879, preferably the coding region thereof, a homolog or a fragment thereof; which are operable linked.

[102615] In an embodiment thereof the expression cassette comprises in addition c) a nucleic acid molecule encoding a transit peptide, especially a plastidal transit petide in case in Table I, application no. 20, in column 6 in the same line as SEQ ID NO. 88879 is depicted, plastidic is mentioned, or a mitochondrial transit peptide in case in Table I, application no. 20, in column 6 in the same line as SEQ ID NO. 88879 is depicted, mitochondric is mentioned; which is operable linked, too.

[102616] In another embodiment thereof the expression cassette does not comprise an additional transit peptide in case in Table I, application no. 20, in column 6 in the same line as SEQ ID NO. 88879 is depicted, non-targeted is mentioned.

[102617] In an embodiment the present invention relates to an expresssion cassette comprising a) a promoter, preferably a promoter selected from the group consisting of Big35S, PCUbi, Super and USP, in particular Big35S; and b) the nucleic acid SEQ ID NO. 64144, or a homolog or fragment thereof, or a homolog thereof being depicted in Table I, application no. 20, column 8, in the same line as SEQ ID NO. 64144, preferably the coding region thereof, a homolog or a fragment thereof; which are operable linked.

[102618] In an embodiment thereof the expression cassette comprises in addition c) a nucleic acid molecule encoding a transit peptide, especially a plastidal transit petide in case in Table I, application no. 20, in column 6 in the same line as SEQ ID NO. 64144 is depicted, plastidic is mentioned, or a mitochondrial transit peptide in case in Table I, application no. 20, in column 6 in the same line as SEQ ID NO. 64144 is depicted, mitochondric is mentioned; which is operable linked, too.

[102619] In another embodiment thereof the expression cassette does not comprise an additional transit peptide in case in Table I, application no. 20, in column 6 in the same line as SEQ ID NO. 64144 is depicted, non-targeted is mentioned.

[102620] In an embodiment the present invention relates to an expresssion cassette comprising a) a promoter, preferably a promoter selected from the group consisting of Big35S, PCUbi, Super and USP, in particular Big35S; and b) the nucleic acid SEQ ID NO. 120309, or a homolog or fragment thereof, or a homolog thereof being depicted in Table I, application no. 20, column 8, in the same line as SEQ ID NO. 120309, preferably the coding region thereof, a homolog or a fragment thereof; which are operable linked.

[102621] In an embodiment thereof the expression cassette comprises in addition c) a nucleic acid molecule encoding a transit peptide, especially a plastidal transit petide in case in Table I, application no. 20, in column 6 in the same line as SEQ ID NO. 120309 is depicted, plastidic is mentioned, or a mitochondrial transit peptide in case in Table I, application no. 20, in column 6 in the same line as SEQ ID NO. 120309 is depicted, mitochondric is mentioned; which is operable linked, too.

[102622] In another embodiment thereof the expression cassette does not comprise an additional transit peptide in case in Table I, application no. 20, in column 6 in the same line as SEQ ID NO. 120309 is depicted, non-targeted is mentioned.

[102623] In an embodiment the present invention relates to an expresssion cassette comprising a) a promoter, preferably a promoter selected from the group consisting of Big35S, PCUbi, Super and USP, in particular p-Super; and b) the nucleic acid SEQ ID NO. 157717, or a homolog or fragment thereof, or a homolog thereof being depicted in Table I, application no. 20, column 8, in the same line as SEQ ID NO. 157717, preferably the coding region thereof, a homolog or a fragment thereof; which are operable linked.

[102624] In an embodiment thereof the expression cassette comprises in addition c) a nucleic acid molecule encoding a transit peptide, especially a plastidal transit petide in case in Table I, application no. 20, in column 6 in the same line as SEQ ID NO. 157717 is depicted, plastidic is mentioned, or a mitochondrial transit peptide in case in Table I, application no. 20, in column 6 in the same line as SEQ ID NO. 157717 is depicted, mitochondric is mentioned; which is operable linked, too.

[102625] In another embodiment thereof the expression cassette does not comprise an additional transit peptide in case in Table I, application no. 20, in column 6 in the same line as SEQ ID NO. 157717 is depicted, non-targeted is mentioned.

[102626] In an embodiment the present invention relates to an expresssion cassette comprising a) a promoter, preferably a promoter selected from the group consisting of Big35S, PCUbi, Super and USP, in particular p-Super; and b) the nucleic acid SEQ ID NO. 157832, or a homolog or fragment thereof, or a homolog thereof being depicted in Table I, application no. 20, column 8, in the same line as SEQ ID NO. 157832, preferably the coding region thereof, a homolog or a fragment thereof; which are operable linked.

[102627] In an embodiment thereof the expression cassette comprises in addition c) a nucleic acid molecule encoding a transit peptide, especially a plastidal transit petide in case in Table I, application no. 20, in column 6 in the same line as SEQ ID NO. 157832 is depicted, plastidic is mentioned, or a mitochondrial transit peptide in case in Table I, application no. 20, in column 6 in the same line as SEQ ID NO. 157832 is depicted, mitochondric is mentioned; which is operable linked, too.

[102628] In another embodiment thereof the expression cassette does not comprise an additional transit peptide in case in Table I, application no. 20, in column 6 in the same line as SEQ ID NO. 157832 is depicted, non-targeted is mentioned.

[102629] In an embodiment the present invention relates to an expresssion cassette comprising a) a promoter, preferably a promoter selected from the group consisting of Big35S, PCUbi, Super and USP, in particular Big35S; and b) the nucleic acid SEQ ID NO. 157858, or a homolog or fragment thereof, or a homolog thereof being depicted in Table I, application no. 20, column 8, in the same line as SEQ ID NO. 157858, preferably the coding region thereof, a homolog or a fragment thereof; which are operable linked.

[102630] In an embodiment thereof the expression cassette comprises in addition c) a nucleic acid molecule encoding a transit peptide, especially a plastidal transit petide in case in Table I, application no. 20, in column 6 in the same line as SEQ ID NO. 157858 is depicted, plastidic is mentioned, or a mitochondrial transit peptide in case in Table I, application no. 20, in column 6 in the same line as SEQ ID NO. 157858 is depicted, mitochondric is mentioned; which is operable linked, too.

[102631] In another embodiment thereof the expression cassette does not comprise an additional transit peptide in case in Table I, application no. 20, in column 6 in the same line as SEQ ID NO. 157858 is depicted, non-targeted is mentioned.

[102632] In an embodiment the present invention relates to an expresssion cassette comprising a) a promoter, preferably a promoter selected from the group consisting of Big35S, PCUbi, Super and USP, in particular Big35S; and b) the nucleic acid SEQ ID NO. 97631, or a homolog or fragment thereof, or a homolog thereof being depicted in Table I, application no. 20, column 8, in the same line as SEQ ID NO. 97631, preferably the coding region thereof, a homolog or a fragment thereof; which are operable linked.

[102633] In an embodiment thereof the expression cassette comprises in addition c) a nucleic acid molecule encoding a transit peptide, especially a plastidal transit petide in case in Table I, application no. 20, in column 6 in the same line as SEQ ID NO. 97631 is depicted, plastidic is mentioned, or a mitochondrial transit peptide in case in Table I, application no. 20, in column 6 in the same line as SEQ ID NO. 97631 is depicted, mitochondric is mentioned; which is operable linked, too.

[102634] In another embodiment thereof the expression cassette does not comprise an additional transit peptide in case in Table I, application no. 20, in column 6 in the same line as SEQ ID NO. 97631 is depicted, non-targeted is mentioned.

[102635] In an embodiment the present invention relates to an expresssion cassette comprising a) a promoter, preferably a promoter selected from the group consisting of Big35S, PCUbi, Super and USP, in particular p-Super; and b) the nucleic acid SEQ ID NO. 157862, or a homolog or fragment thereof, or a homolog thereof being depicted in Table I, application no. 20, column 8, in the same line as SEQ ID NO. 157862, preferably the coding region thereof, a homolog or a fragment thereof; which are operable linked.

[102636] In an embodiment thereof the expression cassette comprises in addition c) a nucleic acid molecule encoding a transit peptide, especially a plastidal transit petide in case in Table I, application no. 20, in column 6 in the same line as SEQ ID NO. 157862 is depicted, plastidic is mentioned, or a mitochondrial transit peptide in case in Table I, application no. 20, in column 6 in the same line as SEQ ID NO. 157862 is depicted, mitochondric is mentioned; which is operable linked, too.

[102637] In another embodiment thereof the expression cassette does not comprise an additional transit peptide in case in Table I, application no. 20, in column 6 in the same line as SEQ ID NO. 157862 is depicted, non-targeted is mentioned.

[102638] In an embodiment the present invention relates to an expresssion cassette comprising a) a promoter, preferably a promoter selected from the group consisting of Big35S, PCUbi, Super and USP, in particular p-Super; and b) the nucleic acid SEQ ID NO. 129546, or a homolog or fragment thereof, or a homolog thereof being depicted in Table I, application no. 20, column 8, in the same line as SEQ ID NO. 129546, preferably the coding region thereof, a homolog or a fragment thereof; which are operable linked.

[102639] In an embodiment thereof the expression cassette comprises in addition c) a nucleic acid molecule encoding a transit peptide, especially a plastidal transit petide in case in Table I, application no. 20, in column 6 in the same line as SEQ ID NO. 129546 is depicted, plastidic is mentioned, or a mitochondrial transit peptide in case in Table I, application no. 20, in column 6 in the same line as SEQ ID NO. 129546 is depicted, mitochondric is mentioned; which is operable linked, too.

[102640] In another embodiment thereof the expression cassette does not comprise an additional transit peptide in case in Table I, application no. 20, in column 6 in the same line as SEQ ID NO. 129546 is depicted, non-targeted is mentioned.

[102641] In an embodiment the present invention relates to an expresssion cassette comprising a) a promoter, preferably a promoter selected from the group consisting of Big35S, PCUbi, Super and USP, in particular p-Super; and b) the nucleic acid SEQ ID NO. 113647, or a homolog or fragment thereof, or a homolog thereof being depicted in Table I, application no. 20, column 8, in the same line as SEQ ID NO. 113647, preferably the coding region thereof, a homolog or a fragment thereof; which are operable linked.

[102642] In an embodiment thereof the expression cassette comprises in addition c) a nucleic acid molecule encoding a transit peptide, especially a plastidal transit petide in case in Table I, application no. 20, in column 6 in the same line as SEQ ID NO. 113647 is depicted, plastidic is mentioned, or a mitochondrial transit peptide in case in Table I, application no. 20, in column 6 in the same line as SEQ ID NO. 113647 is depicted, mitochondric is mentioned; which is operable linked, too.

[102643] In another embodiment thereof the expression cassette does not comprise an additional transit peptide in case in Table I, application no. 20, in column 6 in the same line as SEQ ID NO. 113647 is depicted, non-targeted is mentioned.

[102644] In an embodiment the present invention relates to an expresssion cassette comprising a) a promoter, preferably a promoter selected from the group consisting of Big35S, PCUbi, Super and USP, in particular Big35S; and b) the nucleic acid SEQ ID NO. 158033, or a homolog or fragment thereof, or a homolog thereof being depicted in Table I, application no. 20, column 8, in the same line as SEQ ID NO. 158033, preferably the coding region thereof, a homolog or a fragment thereof; which are operable linked.

[102645] In an embodiment thereof the expression cassette comprises in addition c) a nucleic acid molecule encoding a transit peptide, especially a plastidal transit petide in case in Table I, application no. 20, in column 6 in the same line as SEQ ID NO. 158033 is depicted, plastidic is mentioned, or a mitochondrial transit peptide in case in Table I, application no. 20, in column 6 in the same line as SEQ ID NO. 158033 is depicted, mitochondric is mentioned; which is operable linked, too.

[102646] In another embodiment thereof the expression cassette does not comprise an additional transit peptide in case in Table I, application no. 20, in column 6 in the same line as SEQ ID NO. 158033 is depicted, non-targeted is mentioned.

[102647] In an embodiment the present invention relates to an expresssion cassette comprising a) a promoter, preferably a promoter selected from the group consisting of Big35S, PCUbi, Super and USP, in particular p-Super; and b) the nucleic acid SEQ ID NO. 125348, or a homolog or fragment thereof, or a homolog thereof being depicted in Table I, application no. 20, column 8, in the same line as SEQ ID NO. 125348, preferably the coding region thereof, a homolog or a fragment thereof; which are operable linked.

[102648] In an embodiment thereof the expression cassette comprises in addition c) a nucleic acid molecule encoding a transit peptide, especially a plastidal transit petide in case in Table I, application no. 20, in column 6 in the same line as SEQ ID NO. 125348 is depicted, plastidic is mentioned, or a mitochondrial transit peptide in case in Table I, application no. 20, in column 6 in the same line as SEQ ID NO. 125348 is depicted, mitochondric is mentioned; which is operable linked, too.

[102649] In another embodiment thereof the expression cassette does not comprise an additional transit peptide in case in Table I, application no. 20, in column 6 in the same line as SEQ ID NO. 125348 is depicted, non-targeted is mentioned.

[102650] [0165.1.7.20] to [0170.1.7.20] for the disclosure of these paragraphs see [0165.1.7.7] to [0170.1.7.7] above

[102651] The invention further provides a vector, comprising a nucleic acid molecule comprising 1) a nucleic acid molecule selected from the group consisting of:
[102652] (a) a nucleic acid molecule encoding a polypeptide shown in Table II, column 5 or 8, application no. 20, preferably shown in Table II A, application no. 20, in column 5, or in Table II A, application no. 20, column 8, or in Table II B, application no. 20, column 8, or a homolog or a fragment thereof;
[102653] (b) a nucleic acid molecule shown in Table I, application no. 20, column 5 or 8, preferably shown in Table I A, application no. 20, in column 5, or in Table I A, application no. 20, column 8, or in Table I B, application no. 20, column 8, preferably the coding region thereof, or a homolog or a fragment thereof;
[102654] (c) a nucleic acid molecule, which, as a result of the degeneracy of the genetic code, can be derived from a polypeptide sequence depicted in column 5 or 8 of Table II, application no. 20, preferably shown in Table II A, application no. 20, in column 5, or in Table II A, application no. 20, column 8, or in Table II B, application no. 20, column 8;
[102655] (d) a nucleic acid molecule having at least 30% identity, preferably at least 40%, 50%, 60%, 70%, 75%, 80%, 85%, 90%, 95%, 96%, 97%, 98%, 99%, 99.5%, with the nucleic acid molecule sequence of a polynucleotide comprising the nucleic acid molecule shown in column 5 or 8 of Table I, application no. 20, preferably shown in Table I A, application no. 20, in column 5, or in Table I A, application no. 20, column 8, or in Table I B, application no. 20, column 8, preferably the coding region thereof;
[102656] (e) a nucleic acid molecule encoding a polypeptide having at least 30% identity, preferably at least 40%, 50% 60%, 70%, 75%, 80%, 85%, 90%, 95%, 96%, 97%, 98%, 99%, 99.5%, identity with the amino acid sequence of the polypeptide encoded by the nucleic acid molecule of (a), (b), (c), or (d);
[102657] (f) a nucleic acid molecule which hybridizes with a nucleic acid molecule of (a), (b), (c), (d), or (e) under stringent hybridization conditions;
[102658] (g) a nucleic acid molecule encoding a polypeptide which can be isolated with the aid of monoclonal or polyclonal antibodies made against a polypeptide encoded by one of the nucleic acid molecules of (a), (b), (c), (d), (e) or (f);
[102659] (h) a nucleic acid molecule encoding a polypeptide comprising the consensus sequence or one or more polypeptide motifs as shown in column 8 of Table IV, application no. 20;
[102660] (i) a nucleic acid molecule encoding a polypeptide having the activity represented by a protein as depicted in column 5 of Table II, application no. 20;
[102661] (j) a nucleic acid molecule comprising a polynucleotide which is obtained by amplifying a cDNA library or a genomic library using the primers in Table III, application no. 20, column 8;
[102662] and
[102663] (k) nucleic acid molecule which is obtainable by screening a suitable nucleic acid library, especially a cDNA library and/or a genomic library, under stringent hybridization conditions with a probe comprising one of the sequences of the nucleic acid molecule of (a), (b), (c), (d), (e), (f), (g), (h), (i) or (j) or with a fragment thereof having at least 15 nt, preferably 20 nt, 30 nt, 50 nt, 100 nt, 200 nt, 500 nt, 1000 nt, 1500 nt, 2000 nt or 3000 nt of the nucleic acid molecule complementary to a nucleic acid sequence characterized in (a), (b), (c), (d), (e), (f), (g), (h), (i) or (j);
[102664] or a nucleic acid molecule comprising a sequence which is complementary thereto.
   (All the references to Tables I to IV are references to the corresponding lines of Tables I to IV.)

[102665] In a preferred embodiment of said vector said nucleic acid molecule according to 1 (a), (b), (c), (d), (e), (f), (g), (h), (i), (j) or (k) encodes a polypeptide which has the activity of the respective polypeptide represented by a protein comprising a polypeptide as depicted in the respective line in column 5 of Table II, application no. 20.

[102666] In another preferred embodiment of said vector said nucleic acid molecule according to 1 (a), (b), (c), (d), (e), (f), (g), (h), (i), (j) or (k) confers a generation or an increase of the respective fine chemical in a non-human organism or a part thereof as compared to a corresponding wildtype non-human organism or part thereof.

[102667] In another preferred embodiment of said vector said nucleic acid molecule according to 1 (a), (b), (c), (d), (e), (f), (g), (h), (i), (j) or (k) encodes a polypeptide which has the activity of the respective polypeptide represented by a protein as depicted in the respective line in column 5 of Table II, application no. 20, and confers a generation or an increase of the respective fine chemical in a non-human organism or a part thereof as compared to a corresponding wild-type non-human organism or part thereof.

[102668] In another embodiment thereof said vector comprises beneath said nucleic acid molecule according to 1 (a), (b), (c), (d), (e), (f), (g), (h), (i), (j) or (k), a promoter, preferably a promoter selected from the group consisting of Big35S, PCUbi, Super and USP, which are operable linked.

[102669] In a preferred embodiment thereof said vector comprises beneath said nucleic acid molecule according to 1 (a), (b), (c), (d), (e), (f), (g), (h), (i), (j) or (k), a promoter, preferably a promoter selected from the group consisting of Big35S, PCUbi, Super and USP, which are operable linked; and said nucleic acid molecule according to 1 (a), (b), (c), (d), (e), (f), (g), (h), (i), (j) or (k) encodes a polypeptide which has the activity of the respective polypeptide represented by a protein comprising a polypeptide as depicted in the respective line in column 5 of Table II, application no. 20.

[102670] In another preferred embodiment thereof said vector comprises beneath said nucleic acid molecule according to 1 (a), (b), (c), (d), (e), (f), (g), (h), (i), (j) or (k), a promoter, preferably a promoter selected from the group consisting of Big35S, PCUbi, Super and USP, which are operable linked; and said nucleic acid molecule according to 1 (a), (b), (c), (d), (e), (f), (g), (h), (i), (j) or (k) confers a generation or an increase of the respective fine chemical in a non-human organism or a part thereof as compared to a corresponding wild-type non-human organism or part thereof.

[102671] In another preferred embodiment thereof said vector comprises beneath said nucleic acid molecule according to 1 (a), (b), (c), (d), (e), (f), (g), (h), (i), (j) or (k), a promoter, preferably a promoter selected from the group consisting of Big35S, PCUbi, Super and USP, which are operable linked; and said nucleic acid molecule according to 1 (a), (b), (c), (d), (e), (f), (g), (h), (i), (j) or (k) encodes a polypeptide which has the activity of the respective polypeptide represented by a protein as depicted in the respective line in column 5 of Table II, application no. 20, and confers a generation or an increase of the respective fine chemical in a non-human organism or a part thereof as compared to a corresponding wild-type non-human organism or part thereof.

[102672] In another embodiment thereof said vector comprises beneath said nucleic acid molecule according to 1 (a), (b), (c), (d), (e), (f), (g), (h), (i), (j) or (k), a nucleic acid molecule encoding a transit peptide, preferably encoding a plastidal transit peptide, especially in case in column 6 of Table I, application no. 20, in the same line as of the respective nucleic acid molecule according to 1) “plastidic” is depicted, or encoding a mitochondrial transit peptide, especially in case in column 6 of Table I, application no. 20, in the same line as of the respective nucleic acid molecule according to 1) “mitochondric” is depicted, which are operable linked.

[102673] In another embodiment thereof said vector does not comprise beneath said nucleic acid molecule according to 1 (a), (b), (c), (d), (e), (f), (g), (h), (i), (j) or (k), a nucleic acid molecule encoding a transit peptide in case in column 6 of Table I, application no. 20, in the same line as of the respective nucleic acid molecule according to 1) “non-targeted” is depicted.

[102674] In another embodiment thereof said vector comprises beneath said nucleic acid molecule according to 1 (a), (b), (c), (d), (e), (f), (g), (h), (i), (j) or (k), and a promoter, preferably a promoter selected from the group consisting of Big35S, PCUbi, Super and USP; a nucleic acid molecule encoding a transit peptide, preferably encoding a plastidal transit peptide, especially in case in column 6 of Table I, application no. 20, in the same line as of the respective nucleic acid molecule according to 1) “plastidic” is depicted, or encoding a mitochondrial transit peptide, especially in case in column 6 of Table I, application no. 20, in the same line as of the respective nucleic acid molecule according to 1) “mitochondric” is depicted, which are operable linked.

[102675] In another embodiment thereof said vector does not comprise beneath said nucleic acid molecule according to 1 (a), (b), (c), (d), (e), (f), (g), (h), (i), (j) or (k), and a promoter, preferably a promoter selected from the group consisting of Big35S, PCUbi, Super and USP, which are operable linked; a nucleic acid molecule encoding a transit peptide, especially in case in column 6 of Table I, application no. 20, in the same line as of the respective nucleic acid molecule according to 1) “non-targeted” is depicted.

[102676] In another embodiment thereof said vector comprises beneath said nucleic acid molecule according to 1 (a), (b), (c), (d), (e), (f), (g), (h), (i), (j) or (k), and a promoter, preferably a promoter selected from the group consisting of Big35S, PCUbi, Super and USP; a nucleic acid molecule encoding a transit peptide, preferably encoding a plastidal transit peptide, especially in case in column 6 of Table I, application no. 20, in the same line as of the respective nucleic acid molecule according to 1) “plastidic” is depicted, or encoding a mitochondrial transit peptide, especially in case in column 6 of Table I, application no. 20, in the same line as of the respective nucleic acid molecule according to 1) “mitochondric” is depicted, which are operable linked; and wherein said nucleic acid molecule according to 1 (a), (b), (c), (d), (e), (f), (g), (h), (i), (j) or (k) encodes a polypeptide which has the activity of the respective polypeptide represented by a protein comprising a polypeptide as depicted in column 5 of Table II, application no. 20 (in the same line).

[102677] In another embodiment thereof said vector does not comprise beneath said nucleic acid molecule according to 1 (a), (b), (c), (d), (e), (f), (g), (h), (i), (j) or (k), and a promoter, preferably a promoter selected from the group consisting of Big35S, PCUbi, Super and USP, which are operatively linked; a nucleic acid molecule encoding a transit peptide, especially in case in column 6 of Table I, application no. 20, in the same line as of the respective nucleic acid molecule according to 1) “non-targeted” is depicted; and wherein said nucleic acid molecule according to 1 (a), (b), (c), (d), (e), (f), (g), (h), (i), (j) or (k) encodes a polypeptide which has the activity of the respective polypeptide represented by a protein comprising a polypeptide as depicted in column 5 of Table II, application no. 20.

[102678] In another embodiment thereof said vector comprises beneath said nucleic acid molecule according to 1 (a), (b), (c), (d), (e), (f), (g), (h), (i), (j) or (k), and a promoter, preferably a promoter selected from the group consisting of Big35S, PCUbi, Super and USP; a nucleic acid molecule encoding a transit peptide, preferably encoding a plastidal transit peptide, especially in case in column 6 of Table I, application no. 20, in the same line as of the respective nucleic acid molecule according to 1) “plastidic” is depicted, or encoding a mitochondrial transit peptide, especially in case in column 6 of Table I, application no. 20, in the same line as of the respective nucleic acid molecule according to 1) “mitochondric” is depicted, which are operable linked; and wherein said nucleic acid molecule according to 1 (a), (b), (c), (d), (e), (f), (g), (h), (i), (j) or (k) confers a generation or an increase of the respective fine chemical in a non-human organism or a part thereof as compared to a corresponding wild-type non-human organism or part thereof.

[102679] In another embodiment thereof said vector does not comprise beneath said nucleic acid molecule according to 1 (a), (b), (c), (d), (e), (f), (g), (h), (i), (j) or (k), and a promoter, preferably a promoter selected from the group consisting of Big35S, PCUbi, Super and USP, which are operatively linked; a nucleic acid molecule encoding a transit peptide, especially in case in column 6 of Table I, application no. 20, in the same line as of the respective nucleic acid molecule according to 1) “non-targeted” is depicted; and wherein said nucleic acid molecule according to 1 (a), (b), (c), (d), (e), (f), (g), (h), (i), (j) or (k) confers a generation or an increase of the respective fine chemical in a non-human organism or a part thereof as compared to a corresponding wild-type non-human organism or part thereof.

[102680] In another embodiment thereof said vector comprises beneath said nucleic acid molecule according to 1 (a), (b), (c), (d), (e), (f), (g), (h), (i), (j) or (k), and a promoter, preferably a promoter selected from the group consisting of Big35S, PCUbi, Super and USP; a nucleic acid molecule encoding a transit peptide, preferably encoding a plastidal transit peptide, especially in case in column 6 of Table I, application no. 20, in the same line as of the respective nucleic acid molecule according to 1) “plastidic” is depicted, or encoding a mitochondrial transit peptide, especially in case in column 6 of Table I, application no. 20, in the same line as of the respective nucleic acid molecule according to 1) “mitochondric” is depicted, which are operable linked; and wherein said nucleic acid molecule according to 1 (a), (b), (c), (d), (e), (f), (g), (h), (i), (j) or (k) encodes a polypeptide which has the activity of the respective polypeptide represented by a protein as depicted in column 5 of Table II application no. 20 and confers a generation or an increase of the respective fine chemical in a non-human organism or a part thereof as compared to a corresponding wild-type non-human organism or part thereof.

[102681] In another embodiment thereof said vector does not comprise beneath said nucleic acid molecule according to 1 (a), (b), (c), (d), (e), (f), (g), (h), (i), (j) or (k), and a promoter, preferably a promoter selected from the group consisting of Big35S, PCUbi, Super and USP, which are operatively linked; a nucleic acid molecule encoding a transit peptide, especially in case in column 6 of Table I, application no. 20, in the same line as of the respective nucleic acid molecule according to 1) “non-targeted” is depicted; and wherein said nucleic acid molecule according to 1 (a), (b), (c), (d), (e), (f), (g), (h), (i), (j) or (k) encodes a polypeptide which has the activity of the respective polypeptide represented by a protein as depicted in column 5 of Table II application no. 20 (in the same line) and confers a generation or an increase of the respective fine chemical in a non-human organism or a part thereof as compared to a corresponding wild-type non-human organism or part thereof.

[102682] In a preferred embodiment of said vector said nucleic acid molecule according to 1 (a), (b), (c), (d), (e), (f), (g), (h), (i), (j) or (k), said promoter and optionally said nucleic acid molecule encoding a transit peptide are encompassed in an expression cassette. Accordingly in an embodiment the invention provides a vector comprising an expression cassette comprising said nucleic acid molecule according to 1 (a), (b), (c), (d), (e), (f), (g), (h), (i), (j) or (k), said promoter and optionally said a nucleic acid molecule encoding a transit peptide, operable linked. Said expression cassette may encompass a terminator, too.

[102683] The invention further provides a vector comprising a nucleic acid molecule comprising 1) a nucleic acid molecule selected from the group consisting of:
[102684] (a) a nucleic acid molecule encoding a polypeptide shown in Table II, column 5 or 8, application no. 20, preferably shown in Table II A, application no. 20, in column 5, or in Table II A, application no. 20, column 8, or in Table II B, application no. 20, column 8, or a homolog or a fragment thereof;
[102685] (b) a nucleic acid molecule shown in Table I, application no. 20, column 5 or 8, preferably shown in Table I A, application no. 20, in column 5, or in Table I A, application no. 20, column 8, or in Table I B, application no. 20, column 8, preferably the coding region thereof, or a homolog or a fragment thereof;
[102686] (c) a nucleic acid molecule, which, as a result of the degeneracy of the genetic code, can be derived from a polypeptide sequence depicted in column 5 or 8 of Table II, application no. 20, preferably shown in Table II A, application no. 20, in column 5, or in Table II A, application no. 20, column 8, or in Table II B, application no. 20, column 8;
[102687] (d) a nucleic acid molecule having at least 30% identity, preferably at least 40%, 50%, 60%, 70%, 75%, 80%, 85%, 90%, 95%, 96%, 97%, 98%, 99%, 99.5%, with the nucleic acid molecule sequence of a polynucleotide comprising the nucleic acid molecule shown in column 5 or 8 of Table I, application no. 20, preferably shown in Table I A, application no. 20, in column 5, or in Table I A, application no. 20, column 8, or in Table I B, application no. 20, column 8, preferably the coding region thereof;
[102688] (e) a nucleic acid molecule encoding a polypeptide having at least 30% identity, preferably at least 40%, 50% 60%, 70%, 75%, 80%, 85%, 90%, 95%, 96%, 97%, 98%, 99%, 99.5%, identity with the amino acid sequence of the polypeptide encoded by the nucleic acid molecule of (a), (b), (c), or (d);
[102689] (f) a nucleic acid molecule which hybridizes with a nucleic acid molecule of (a), (b), (c), (d), or (e) under stringent hybridization conditions;
[102690] (g) a nucleic acid molecule encoding a polypeptide which can be isolated with the aid of monoclonal or polyclonal antibodies made against a polypeptide encoded by one of the nucleic acid molecules of (a), (b), (c), (d), (e) or (f);
[102691] (h) a nucleic acid molecule encoding a polypeptide comprising the consensus sequence or one or more polypeptide motifs as shown in column 8 of Table IV, application no. 20;
[102692] (i) a nucleic acid molecule encoding a polypeptide having the activity represented by a protein as depicted in column 5 of Table II, application no. 20;
[102693] (j) a nucleic acid molecule comprising a polynucleotide which is obtained by amplifying a cDNA library or a genomic library using the primers in Table III, application no. 20, column 8;
[102694] and
[102695] (k) nucleic acid molecule which is obtainable by screening a suitable nucleic acid library, especially a cDNA library and/or a genomic library, under stringent hybridization conditions with a probe comprising one of the sequences of the nucleic acid molecule of (a), (b), (c), (d), (e), (f), (g), (h), (i) or (j) or with a fragment thereof having at least 15 nt, preferably 20 nt, 30 nt, 50 nt, 100 nt, 200 nt, 500 nt, 1000 nt, 1500 nt, 2000 nt or 3000 nt of the nucleic acid molecule complementary to a nucleic acid sequence characterized in (a), (b), (c), (d), (e), (f), (g), (h), (i) or (j);
[102696] or a nucleic acid molecule comprising a sequence which is complementary thereto;
   whereby, preferably, the nucleic acid molecule according to 1 (a), (b), (c), (d), (e), (f), (g), (h), (i), (j) or (k) distinguishes over the sequence depicted in Table I A and/or I B, application no. 20, column 5 or 8, or the coding region thereof, by one or more nucleotides (especially but not exceeding 5%, preferably 4%, 3%, 2%, 1%, 0.5%, 0.2% or 0.1%). In an embodiment, the nucleic acid molecule of the invention does not consist of the sequence shown in Table I A and/or I B, application no. 20, column 5 or 8, or the coding region thereof, respectively. In another embodiment, the nucleic acid molecule of the present invention, preferably the coding region thereof, is 30%, 40%, 50%, 60%, 70%, 80%, 90%, 95% identical but less than 100%, 99.999%, 99.99%, 99.9%, 99%, 98%, 97%, 96% or 95% identical to the sequence shown in Table I A and/or I B, application no. 20, column 5 or 8, or the coding region thereof, respectively. In a further embodiment the nucleic acid molecule does not encode the polypeptide sequence shown in Table II A and/or II B, application no. 20, column 5 or 8 but homologs thereof. Accordingly, in one embodiment, the nucleic acid molecule of the present invention encodes in one embodiment a polypeptide which differs at least in one or more amino acids (especially but not exceeding 5%, preferably 4%, 3%, 2%, 1%, 0.5%, 0.2% or 0.1%) from the polypeptide shown in Table II, application no. 20, column 5 or 8 and does not encode a protein of the sequence shown in Table II A and/or II B, application no. 20, column 5 or 8. Accordingly, in one embodiment, the protein encoded by a sequence of a nucleic acid according to (a), (b), (c), (d), (e), (f), (g), (h), (i), (j) or (k) does not consist of the sequence shown in Table I A and/or I B, application no. 20, column 5 and 8, or the coding region thereof. In a further embodiment, the protein of the present invention is at least 30%,40%, 50%, 60%, 70%, 80%, 90%, 95% identical to protein sequence depicted in Table II A and/or II B, application no. 20, column 5 or 8 but less than 100%, preferably less than 99.999%, 99.99% or 99.9%, more preferably less than 99%, 985, 97%, 96% or 95% identical to the sequence shown in Table II A and/or II B, application no. 20, column 5 or 8.
   (All the references to Tables I to IV are references to the corresponding lines of Tables I to IV.)

[102697] In a preferred embodiment of said vector said nucleic acid molecule according to 1 (a), (b), (c), (d), (e), (f), (g), (h), (i), (j) or (k) encodes a polypeptide which has the activity of the respective polypeptide represented by a protein comprising a polypeptide as depicted in the respective line in column 5 of Table II, application no. 20.

[102698] In another preferred embodiment of said vector said nucleic acid molecule according to 1 (a), (b), (c), (d), (e), (f), (g), (h), (i), (j) or (k) confers a generation or an increase of the respective fine chemical in a non-human organism or a part thereof as compared to a corresponding wildtype non-human organism or part thereof.

[102699] In another preferred embodiment of said vector said nucleic acid molecule according to 1 (a), (b), (c), (d), (e), (f), (g), (h), (i), (j) or (k) encodes a polypeptide which has the activity of the respective polypeptide represented by a protein as depicted in the respective line in column 5 of Table II, application no. 20, and confers a generation or an increase of the respective fine chemical in a non-human organism or a part thereof as compared to a corresponding wild-type non-human organism or part thereof.

[102700] In another embodiment thereof said vector comprises beneath said nucleic acid molecule according to 1 (a), (b), (c), (d), (e), (f), (g), (h), (i), (j) or (k), a promoter, preferably a promoter selected from the group consisting of Big35S, PCUbi, Super and USP, which are operable linked.

[102701] In a preferred embodiment thereof said vector comprises beneath said nucleic acid molecule according to 1 (a), (b), (c), (d), (e), (f), (g), (h), (i), (j) or (k), a promoter, preferably a promoter selected from the group consisting of Big35S, PCUbi, Super and USP, which are operable linked; and said nucleic acid molecule according to 1 (a), (b), (c), (d), (e), (f), (g), (h), (i), (j) or (k) encodes a polypeptide which has the activity of the respective polypeptide represented by a protein comprising a polypeptide as depicted in the respective line in column 5 of Table II, application no. 20.

[102702] In another preferred embodiment thereof said vector comprises beneath said nucleic acid molecule according to 1 (a), (b), (c), (d), (e), (f), (g), (h), (i), (j) or (k), a promoter, preferably a promoter selected from the group consisting of Big35S, PCUbi, Super and USP, which are operable linked; and said nucleic acid molecule according to 1 (a), (b), (c), (d), (e), (f), (g), (h), (i), (j) or (k) confers a generation or an increase of the respective fine chemical in a non-human organism or a part thereof as compared to a corresponding wild-type non-human organism or part thereof.

[102703] In another preferred embodiment thereof said vector comprises beneath said nucleic acid molecule according to 1 (a), (b), (c), (d), (e), (f), (g), (h), (i), (j) or (k), a promoter, preferably a promoter selected from the group consisting of Big35S, PCUbi, Super and USP, which are operable linked; and said nucleic acid molecule according to 1 (a), (b), (c), (d), (e), (f), (g), (h), (i), (j) or (k) encodes a polypeptide which has the activity of the respective polypeptide represented by a protein as depicted in the respective line in column 5 of Table II, application no. 20, and confers a generation or an increase of the respective fine chemical in a non-human organism or a part thereof as compared to a corresponding wild-type non-human organism or part thereof.

[102704] In another embodiment thereof said vector comprises beneath said nucleic acid molecule according to 1 (a), (b), (c), (d), (e), (f), (g), (h), (i), (j) or (k), a nucleic acid molecule encoding a transit peptide, preferably encoding a plastidal transit peptide, especially in case in column 6 of Table I, application no. 20, in the same line as of the respective nucleic acid molecule according to 1) “plastidic” is depicted, or encoding a mitochondrial transit peptide, especially in case in column 6 of Table I, application no. 20, in the same line as of the respective nucleic acid molecule according to 1) “mitochondric” is depicted, which are operable linked.

[102705] In another embodiment thereof said vector does not comprise beneath said nucleic acid molecule according to 1 (a), (b), (c), (d), (e), (f), (g), (h), (i), (j) or (k), a nucleic acid molecule encoding a transit peptide in case in column 6 of Table I, application no. 20, in the same line as of the respective nucleic acid molecule according to 1) “non-targeted” is depicted.

[102706] In another embodiment thereof said vector comprises beneath said nucleic acid molecule according to 1 (a), (b), (c), (d), (e), (f), (g), (h), (i), (j) or (k), and a promoter, preferably a promoter selected from the group consisting of Big35S, PCUbi, Super and USP; a nucleic acid molecule encoding a transit peptide, preferably encoding a plastidal transit peptide, especially in case in column 6 of Table I, application no. 20, in the same line as of the respective nucleic acid molecule according to 1) “plastidic” is depicted, or encoding a mitochondrial transit peptide, especially in case in column 6 of Table I, application no. 20, in the same line as of the respective nucleic acid molecule according to 1) “mitochondric” is depicted, which are operable linked.

[102707] In another embodiment thereof said vector does not comprise beneath said nucleic acid molecule according to 1 (a), (b), (c), (d), (e), (f), (g), (h), (i), (j) or (k), and a promoter, preferably a promoter selected from the group consisting of Big35S, PCUbi, Super and USP, which are operatively linked; a nucleic acid molecule encoding a transit peptide, especially in case in column 6 of Table I, application no. 20, in the same line as of the respective nucleic acid molecule according to 1) “non-targeted” is depicted.

[102708] In another embodiment thereof said vector comprises beneath said nucleic acid molecule according to 1 (a), (b), (c), (d), (e), (f), (g), (h), (i), (j) or (k), and a promoter, preferably a promoter selected from the group consisting of Big35S, PCUbi, Super and USP; a nucleic acid molecule encoding a transit peptide, preferably encoding a plastidal transit peptide, especially in case in column 6 of Table I, application no. 20, in the same line as of the respective nucleic acid molecule according to 1) “plastidic” is depicted, or encoding a mitochondrial transit peptide, especially in case in column 6 of Table I, application no. 20, in the same line as of the respective nucleic acid molecule according to 1) “mitochondric” is depicted, which are operable linked; and wherein said nucleic acid molecule according to 1 (a), (b), (c), (d), (e), (f), (g), (h), (i), (j) or (k) encodes a polypeptide which has the activity of the respective polypeptide represented by a protein comprising a polypeptide as depicted in column 5 of Table II, application no. 20.

[102709] In another embodiment thereof said vector does not comprise beneath said nucleic acid molecule according to 1 (a), (b), (c), (d), (e), (f), (g), (h), (i), (j) or (k), and a promoter, preferably a promoter selected from the group consisting of Big35S, PCUbi, Super and USP, which are operatively linked; a nucleic acid molecule encoding a transit peptide, especially in case in column 6 of Table I, application no. 20, in the same line as of the respective nucleic acid molecule according to 1) “non-targeted” is depicted; and wherein said nucleic acid molecule according to 1 (a), (b), (c), (d), (e), (f), (g), (h), (i), (j) or (k) encodes a polypeptide which has the activity of the respective polypeptide represented by a protein comprising a polypeptide as depicted in column 5 of Table II, application no. 20.

[102710] In another embodiment thereof said vector comprises beneath said nucleic acid molecule according to 1 (a), (b), (c), (d), (e), (f), (g), (h), (i), (j) or (k), and a promoter, preferably a promoter selected from the group consisting of Big35S, PCUbi, Super and USP; a nucleic acid molecule encoding a transit peptide, preferably encoding a plastidal transit peptide, especially in case in column 6 of Table I, application no. 20, in the same line as of the respective nucleic acid molecule according to 1) “plastidic” is depicted, or encoding a mitochondrial transit peptide, especially in case in column 6 of Table I, application no. 20, in the same line as of the respective nucleic acid molecule according to 1) “mitochondric” is depicted, which are operable linked; and wherein said nucleic acid molecule according to 1 (a), (b), (c), (d), (e), (f), (g), (h), (i), (j) or (k) confers a generation or an increase of the respective fine chemical in a non-human organism or a part thereof as compared to a corresponding wild-type non-human organism or part thereof.

[102711] In another embodiment thereof said vector does not comprise beneath said nucleic acid molecule according to 1 (a), (b), (c), (d), (e), (f), (g), (h), (i), (j) or (k), and a promoter, preferably a promoter selected from the group consisting of Big35S, PCUbi, Super and USP, which are operatively linked; a nucleic acid molecule encoding a transit peptide, especially in case in column 6 of Table I, application no. 20, in the same line as of the respective nucleic acid molecule according to 1) “non-targeted” is depicted; and wherein said nucleic acid molecule according to 1 (a), (b), (c), (d), (e), (f), (g), (h), (i), (j) or (k) confers a generation or an increase of the respective fine chemical in a non-human organism or a part thereof as compared to a corresponding wild-type non-human organism or part thereof.

[102712] In another embodiment thereof said vector comprises beneath said nucleic acid molecule according to 1 (a), (b), (c), (d), (e), (f), (g), (h), (i), (j) or (k), and a promoter, preferably a promoter selected from the group consisting of Big35S, PCUbi, Super and USP; a nucleic acid molecule encoding a transit peptide, preferably encoding a plastidal transit peptide, especially in case in column 6 of Table I, application no. 20, in the same line as of the respective nucleic acid molecule according to 1) “plastidic” is depicted, or encoding a mitochondrial transit peptide, especially in case in column 6 of Table I, application no. 20, in the same line as of the respective nucleic acid molecule according to 1) “mitochondric” is depicted, which are operable linked; and wherein said nucleic acid molecule according to 1 (a), (b), (c), (d), (e), (f), (g), (h), (i), (j) or (k) encodes a polypeptide which has the activity of the respective polypeptide represented by a protein as depicted in column 5 of Table II application no. 20 and confers a generation or an increase of the respective fine chemical in a non-human organism or a part thereof as compared to a corresponding wild-type non-human organism or part thereof.

[102713] In another embodiment thereof said vector does not comprise beneath said nucleic acid molecule according to 1 (a), (b), (c), (d), (e), (f), (g), (h), (i), (j) or (k), and a promoter, preferably a promoter selected from the group consisting of Big35S, PCUbi, Super and USP, which are operatively linked; a nucleic acid molecule encoding a transit peptide, especially in case in column 6 of Table I, application no. 20, in the same line as of the respective nucleic acid molecule according to 1) “non-targeted” is depicted; and wherein said nucleic acid molecule according to 1 (a), (b), (c), (d), (e), (f), (g), (h), (i), (j) or (k) encodes a polypeptide which has the activity of the respective polypeptide represented by a protein as depicted in column 5 of Table II application no. 20 and confers a generation or an increase of the respective fine chemical in a non-human organism or a part thereof as compared to a corresponding wild-type non-human organism or part thereof.

[102714] [0181.1.7.20] to [0209.1.7.20] for the disclosure of these paragraphs see [0181.1.7.7] to [0209.1.7.7] above

[102715] The genes of the invention, coding for an activity selected from the group consisting of 3-deoxy-7-phosphoheptulonate synthase, acid shock protein, amino-acid acetyltransferase, assembly protein for periplasmic nitrate reductase, At2g45420-protein, At5g43630-protein, ATP-dependent RNA helicase, b0833-protein, b1259-protein, b1445-protein, b1670-protein, b1930-protein, b2399-protein, b2653-protein, b3644-protein, cell division protein, cyclin D, cysteine synthase A, dihydroxyacetone kinase, electron transport complex protein, ethanolamine utilization protein, exonuclease subunit, fumarylacetoacetate hydrolase, GDP-mannose 4,6-dehydratase, inner membrane protein, ion-transport protein, L-asparaginase, MADS box protein transcription factor, mechanosensitive ion channel, metal-dependent hydrolase, methionine permease, O-antigen chain length determinant, ornithine decarboxylase, orotidine-5′-phosphate decarboxylase, peptide chain release factor, phospho-2-dehydro-3-deoxyheptonate aldolase, phosphoadenosine phosphosulfate reductase, phosphoglycolate phosphatase, pyrimidine-specific ribonucleoside hydrolase, pyruvate kinase, RNA-binding protein, S-adenosyl-L-methionine-dependent methyltransferase, serine protease, short-chain alcohol dehydrogenase family, sigma-54 dependent response regulator, spermidine synthase, sugar transport system permease protein, transcription factor, transcriptional regulator, YFL019C-protein, YHL039W-protein, YHR022C-A-protein, YJL127W-A-protein, ylr157c-protein, ynl321w-protein, ypr170c-protein, and YPR172W-protein are also called “FCRP genes”.

[102716] [0211.1.7.20] to [0225.1.7.20] for the disclosure of these paragraphs see [0211.1.7.7] [0225.1.7.7] above

[102717] In addition to the sequence mentioned in Table I, application no. 20, column 5 or 8, preferably the coding region thereof, or its homologs or fragments, it may be advantageous additionally to express and/or mutate further genes in the non-human organisms. Especially advantageously, additionally at least one further gene of the biosynthetic pathway of the fine chemical is expressed in the non-human organisms such as plants or microorganisms. It is also possible that the regulation of the natural genes has been modified advantageously so that the gene and/or its gene product is no longer subject to the regulatory mechanisms which exist in the non-human organisms. This leads to an increased synthesis of the respective fine chemical since, for example, feedback regulations no longer exist to the same extent or not at all. In addition it might be advantageously to combine the nucleic acids sequences of the invention containing the sequences shown in the respective line in Table I, application no. 20, column 5 or 8, preferably the coding region thereof, or homologs or fragments thereof, with genes which generally support or enhance the growth or yield of the target non-human organisms, for example genes which lead to faster growth rate of non human organism like microorganisms or plants or genes which produce stress-, pathogen-, or herbicide-resistant plants.

[102718] In a further embodiment of the process of the invention, non-human organisms are grown, in which there is in addition to the expression of the nucleic acid molecule according to the invention simultaneous expression of at least one nucleic acid molecule or one of the genes which code for proteins involved in the waxes metabolism, in particular in long chain alkanes and/or VLCFAs synthesis, especially genes selected from the group coding for fatty acid elongasen, or a polypeptide having a very long chain fatty acid acyl (VLCFA) CoA synthase activity and/or genes selected from the group coding for Ketoacetyl-synthase (=VLCFA-synthase), e.g. FAE1 (AT4G34520) from A. thaliana, beta-Ketoacyl-CoA-reductase, beta-Hydroxyacyl-CoA-dehydratase, 2-trans-Enoyl-CoA-reductase and/or 3-ketoacyl-CoA synthases involved in VLCFA-biosynthesis and/or having the activity of a annotated gene selected from the group comprising AT1G04220 (KCS2), AT1G07720 (KCS3), AT1G19440 (KCS4), AT1G71160 (KCS7), AT2G15090 (KCS8), AT2G16280 (KCS9), AT2G26640 (KCSll), AT2G28630 (KCS12), AT2G46720 (KSC13), AT3G10280 (KCS14), AT3G52160 (KCS15), AT4G34250 (KCS16), AT4G34510 (KCS17), AT4G34520 (KCS18), AT5G04530 (KCS19), AT5G43760 (KCS20) and AT5G49070 (KCS21).

[102719] [0228.1.7.20] to [0239.1.7.20] for the disclosure of these paragraphs see [0228.1.7.7] to [0239.1.7.7] above

[102720] In an embodiment of the present invention the nucleic acid construct of the present invention comprises a nucleic acid molecule as depicted in the respective line in Table I, application no. 20, column 5 or 8, preferably the coding region thereof, a fragment or a homolog thereof, and a plant promoter, such as the Big 35S promoter, the DC3 promoter, the PC Ubi promoter, the LegB4-promoter, the Super promoter, the USP promoter or the like. In another embodiment the nucleic acid construct of the present invention comprises a nucleic acid molecule as depicted in the respective line in Table I, application no. 20, column 5 or 8, preferably the coding region thereof, a fragment or a homolog thereof, and a plant promoter such as, for example, the USP, the LegB4-, the DC3 promoter or the ubiquitin promoter from parsley or other herein mentioned promoters. In a further embodiment the nucleic acid construct of the present invention comprises a nucleic acid molecule as depicted in the respective line in Table I, application no. 20, column 5 or 8, preferably the coding region thereof, a fragment or a homolog thereof, and a plant promoter, such as the Big 35S promoter, the PC Ubi promoter, the Super promoter, the USP promoter or the like. In addition different terminators may advantageously be used in these nucleic acid constructs; examples for transcriptional termination are polyadenylation signals.

[102721] [0241.1.7.20] to [0245.1.7.20] for the disclosure of these paragraphs see [0241.1.7.7] to [0245.1.7.7] above

[102722] Other preferred sequences for use in operable linkage in gene expression constructs are targeting sequences, which are required for targeting the gene product into specific cell compartments (for a review, see Kermode, Crit. Rev. Plant Sci. 15 (4), 285 (1996) and references cited therein), for example into the vacuole, the nucleus, all types of plastids, such as amyloplasts, chloroplasts, chromoplasts, the extracellular space, the mitochondria, the endoplasmic reticulum, elaioplasts, peroxisomes, glycosomes, and other compartments of cells or extracellular; preferred are sequences, which are involved in targeting to plastids as mentioned above. Sequences, which must be mentioned in this context are, in particular, the signal-peptide- or transit-peptide-encoding sequences which are known per se. For example, plastid transit-peptide-encoding sequences enable the targeting of the expression product into the plastids of a plant cell. Targeting sequences are also known for eukaryotic and to a lower extent for prokaryotic organisms and can advantageously be operable linked with the nucleic acid molecule of the present invention as shown in Table I, application no. 20, columns 5 and 8, preferably the coding region thereof, or homologs or fragments thereof, and described herein to achieve an expression in one of said compartments or extracellular.

[102723] [0247.1.7.20] to [0249.1.7.20] for the disclosure of these paragraphs see [0247.1.7.7] to [0249.1.7.7] above

[102724] Preferred promoters are in particular those which bring about gene expression in tissues and organs, such as leaves, roots, seeds, pollen or xylem. Examples of tissue preferred or organ preferred promoters include, but are not limited to fruit-preferred, ovule-preferred, male tissue-preferred, seed-preferred, pollen-preferred integument-preferred, tuber-preferred, stalk-preferred, pericarp-preferred, leaf-preferred, stigma-preferred, pollen-preferred, anther-preferred, petal-preferred, sepal-preferred, pedicel-preferred, silique-preferred, stem-preferred, root-preferred promoters, and the like. Especially those promoters are preferred which bring about gene expression in tissues and organs in which the biosynthesis of waxes and/or long chain alkanes takes place, like in seed cells, such as endosperm cells and cells of the developing embryo. Seed promoters are preferentially expressed during seed development and/or germination. For example, seed preferred promoters can be embryo-preferred, endosperm preferred and seed coat-preferred (see Thompson et al., BioEssays 10, 108 (1989)).

[102725] Examples of seed preferred promoters include, but are not limited to, cellulose synthase (celA), Cim1, gamma-zein, globulin-1, maize 19 kD zein (cZ19B1), and the like. Other suitable promoters are the oilseed rape napin gene promoter (U.S. Pat. No. 5,608,152), the Vicia faba USP promoter (Baeumlein et al., Mol Gen Genet, 225 (3), 459 (1991)), the Arabidopsis oleosin promoter (WO 98/45461), the Phaseolus vulgaris phaseolin promoter (U.S. Pat. No. 5,504,200), the Brassica Bce4 promoter (WO 91/13980), the bean arcs promoter, the carrot DcG3 promoter, or the Legumin B4 promoter (LeB4) (Baeumlein et al., Plant Journal, 2 (2), 233 (1992)), and promoters which bring about the seed-specific expression in monocotyledonous plants such as maize, barley, wheat, rye, rice and the like. Advantageous seed-specific promoters are the sucrose binding protein promoter (WO 00/26388), the phaseolin promoter and the napin promoter. Suitable promoters which must be considered are the barley Ipt2 or Ipt1 gene promoter (WO 95/15389 and WO 95/23230), and the promoters described in WO 99/16890 (promoters from the barley hordein gene, the rice glutelin gene, the rice oryzin gene, the rice prolamin gene, the wheat gliadin gene, the wheat glutelin gene, the maize zein gene, the oat glutelin gene, the sorghum kasirin gene and the rye secalin gene). Further suitable promoters are Amy32b, Amy 6-6 and Aleurain (U.S. Pat. No. 5,677,474), Bce4 (oilseed rape) (U.S. Pat. No. 5,530,149), glycinin (soya) (EP 571 741], phosphoenolpyruvate carboxylase (soya) (JP 06/62870), ADR12-2 (soya) (WO 98/08962), isocitrate lyase (oilseed rape) (U.S. Pat. No. 5,689,040]) or α-amylase (barley) (EP 781 8499. Other promoters which are available for the expression of genes in plants are leaf-specific promoters such as those described in DE-A 19 644 478 or light-regulated promoters such as, for example, the pea petE promoter.

[102726] [0251.1.7.20] to [0266.1.7.20] for the disclosure of this paragraph see [0251.1.7.7] to [0266.1.7.7] above

[102727] An embodiment of the invention relates to a vector where the nucleic acid molecule according to the invention is linked operably to regulatory sequences which permit the expression in a prokaryotic or eukaryotic host. A further embodiment of the invention relates to a vector in which a nucleic acid sequence encoding one of the polypeptides shown in the respective line in Table II, application no. 20, columns 5 or 8, or homologs or fragments thereof, is functionally linked to a targeting sequence such as a plastidial or mitochondrial targeting sequence. A further embodiment of the invention relates to a vector in which a nucleic acid sequence encoding one of the polypeptides shown in the respective line in Table II, application no. 20, columns 5 or 8, or homologs or fragments thereof, is functionally linked to (a) regulatory sequence which permit the expression in an organelle, such as plastids or mitochondria, preferably plastids.

[102728] A further embodiment of the invention relates to a vector which comprises a nucleic acid sequence encoding one of the polypeptides shown in the respective line in Table II, application no. 20, columns 5 or 8, or homologs or fragments thereof, but no additional targeting sequence.

[102729] [0268.1.7.20] to [0273.1.7.20] for the disclosure of these paragraphs see [0268.1.7.7] to [0273.1.7.20] above

[102730] A further object of the invention relates to the use of a nucleic acid construct, e.g. an expression cassette, comprising one or more nucleic acid molecules encoding one or more polypeptides as depicted in the respective line(s) in Table II, application no. 20, columns 5 or 8, or homologs or fragments thereof, or comprising one or more nucleic acid molecules as depicted in the respective line(s) in Table I, application no. 20, columns 5 or 8, preferably the coding region thereof, or homologs or fragments thereof, or comprising a nucleic acid molecule hybridizing therewith for the transformation of a microorganism or a plant cell, plant tissues or a part of a plant

[102731] In doing so, depending on the choice of promoter, the nucleic acid molecules shown in the respective line in Table I, application no. 20, column 5 or 8, preferably the coding region thereof, or homologs or fragments thereof, or the nucleic acid molecules encoding a polypeptide as depicted in the respective line in Table II, application no. 20, column 5 or 8, or homologs or fragments thereof, can be expressed in the whole plant or specifically e.g. in the leaves, in the seeds, the nodules, in roots, in the stem or other parts of the plant. Those transgenic plants overproducing sequences, e.g. as depicted in the respective line in Table I, application no. 20, column 5 or 8, preferably the coding region thereof, or homologs or fragments thereof, the plant cell, plant tissues, plants, the reproductive material thereof, or parts thereof are a further object of the present invention.

[102732] Within the framework of the present invention, the production of the hentriacontane is due to the generation or over-expression of one or more polypeptides as depicted in the respective line(s) in Table II, application no. 20, column 5 or 8, or homologs or fragments thereof, or encoded by the corresponding nucleic acid molecules as depicted in the respective line(s) in Table I, application no. 20, column 5 or 8, preferably the coding region thereof, or homologs or fragments thereof, in the non-human organism according to the invention, advantageously in the transgenic microorganism or plant according to the invention, at least for the duration of at least one plant generation.

[102733] A constitutive expression of the polypeptide as depicted in the respective line in Table II, application no. 20, column 5 or 8, or homologs or fragments thereof, or encoded by the respective nucleic acid molecule as depicted in the respective line in Table I, application no. 20, column 5 or 8, preferably the coding region thereof, or homologs or fragments thereof, may be advantageous. On the other hand, an inducible expression may also appear desirable. Expression of the polypeptide sequences of the invention can be either directed to the cytosol or to the organelles, such as plastids or mitochondria, preferably the plastids of the host cells, preferably the plant cells, or non-targeted.

[102734] for the disclosure of this paragraph see [0278.1.7.7] above

[102735] In a further embodiment the invention relates to a transgenic non-human organisms such as transgenic microorganism or transgenic plant comprising a nucleic acid molecule comprising
[102736] [1) a nucleic acid molecule selected from the group consisting of
   [102737] (a) a nucleic acid molecule encoding a polypeptide shown in Table II, application no. 20, column 5 or 8, preferably shown in Table II A, application no. 20, column 5, or in Table II A, application no. 20, column 8, or in Table II B, application no. 20, column 8, or a homolog or a fragment thereof;
   [102738] (b) a nucleic acid molecule shown in Table I, application no. 20, column 5 or 8, preferably shown in Table I A, application no. 20, column 5, or in Table I A, application no. 20, column 8, or in Table I B, application no. 20, column 8, preferably the coding region thereof, or a homolog or a fragment thereof;
   [102739] (c) a nucleic acid molecule, which, as a result of the degeneracy of the genetic code, can be derived from a polypeptide sequence depicted in column 5 or 8 of Table II, application no. 20, preferably shown in Table II A, application no. 20, column 5, or in Table II A, application no. 20, column 8, or in Table II B, application no. 20, column 8;
   [102740] (d) a nucleic acid molecule having at least 30% identity, preferably at least 40%, 50%, 60%, 70%, 75%, 80%, 85%, 90%, 95%, 96%, 97%, 98%, 99%, 99.5%, with the nucleic acid molecule sequence of a polynucleotide comprising the nucleic acid molecule shown in column 5 or 8 of Table I, application no. 20, preferably shown in Table I A, application no. 20, column 5, or in Table I A, application no. 20, column 8, or in Table I B, application no. 20, column 8, preferably the coding region thereof;
   [102741] (e) a nucleic acid molecule encoding a polypeptide having at least 30% identity, preferably at least 40%, 50% 60%, 70%, 75%, 80%, 85%, 90%, 95%, 96%, 97%, 98%, 99%, 99.5%, identity with the amino acid sequence of the polypeptide encoded by the nucleic acid molecule of (a), (b), (c) or (d);
   [102742] (f) a nucleic acid molecule which hybridizes with a nucleic acid molecule of (a), (b), (c), (d) or (e) under stringent hybridization conditions;
   [102743] (g) a nucleic acid molecule encoding a polypeptide which can be isolated with the aid of monoclonal or polyclonal antibodies made against a polypeptide encoded by one of the nucleic acid molecules of (a), (b), (c), (d), (e) or (f);
   [102744] (h) a nucleic acid molecule encoding a polypeptide comprising the consensus sequence or one or more polypeptide motifs as shown in column 8 of Table IV, application no. 20;
   [102745] (i) a nucleic acid molecule encoding a polypeptide having the activity represented by a respective protein as depicted in column 5 of Table II, application no. 20;
   [102746] (j) a nucleic acid molecule comprising a polynucleotide which is obtained by amplifying a cDNA library or a genomic library using the primers in Table III, application no. 20, column 8;
   [102747] and
   [102748] (k) nucleic acid molecule which is obtainable by screening a suitable nucleic acid library, especially a cDNA library and/or a genomic library, under stringent hybridization conditions with a probe comprising one of the sequences of the nucleic acid molecule of (a), (b), (c), (d), (e), (f), (g), (h), (i) or (j) or with a fragment of at least 15 nt, preferably 20 nt, 30 nt, 50 nt, 100 nt, 200 nt,500 nt, 1000 nt, 1500 nt, 2000 nt or 3000 nt of the nucleic acid molecule characterized in (a), (b), (c), (d), (e), (f), (g), (h), (i) or (j);
   [102749] or a nucleic acid molecule comprising a sequence which is complementary thereto;
      and, if desired
[102750] 2) nucleic acid molecule encoding a transit peptide, preferably encoding a plastidal transit peptide or a mitochondrial transit peptide;
   which are operable linked;]
   or comprising an expression cassette comprising
[102751] [0) a promoter, preferably a promoter selected from the group consisting of Big35S, PCUbi, Super and USP; and
[102752] 1) a nucleic acid molecule selected from the group consisting of
   [102753] (a) a nucleic acid molecule encoding a polypeptide shown in Table II, application no. 20, column 5 or 8, preferably shown in Table II A, application no. 20, column 5, or in Table II A, application no. 20, column 8, or in Table II B, application no. 20, column 8, or a homolog or a fragment thereof;
   [102754] (b) a nucleic acid molecule shown in Table I, application no. 20, column 5 or 8, preferably shown in Table I A, application no. 20, column 5, or in Table I A, application no. 20, column 8, or in Table I B, application no. 20, column 8, preferably the coding region thereof, or a homolog or a fragment thereof;
   [102755] (c) a nucleic acid molecule, which, as a result of the degeneracy of the genetic code, can be derived from a polypeptide sequence depicted in column 5 or 8 of Table II, application no. 20, preferably shown in Table II A, application no. 20, column 5, or in Table II A, application no. 20, column 8, or in Table II B, application no. 20, column 8;
   [102756] (d) a nucleic acid molecule having at least 30% identity, preferably at least 40%, 50%, 60%, 70%, 75%, 80%, 85%, 90%, 95%, 96%, 97%, 98%, 99%, 99.5%, with the nucleic acid molecule sequence of a polynucleotide comprising the nucleic acid molecule shown in column 5 or 8 of Table I, application no. 20, preferably shown in Table I A, application no. 20, column 5, or in Table I A, application no. 20, column 8, or in Table I B, application no. 20, column 8, preferably the coding region thereof;
   [102757] (e) a nucleic acid molecule encoding a polypeptide having at least 30% identity, preferably at least 40%, 50% 60%, 70%, 75%, 80%, 85%, 90%, 95%, 96%, 97%, 98%, 99%, 99.5%, identity with the amino acid sequence of the polypeptide encoded by the nucleic acid molecule of (a), (b), (c) or (d);
   [102758] (f) a nucleic acid molecule which hybridizes with a nucleic acid molecule of (a), (b), (c), (d) or (e) under stringent hybridization conditions;
   [102759] (g) a nucleic acid molecule encoding a polypeptide which can be isolated with the aid of monoclonal or polyclonal antibodies made against a polypeptide encoded by one of the nucleic acid molecules of (a), (b), (c), (d), (e) or (f);
   [102760] (h) a nucleic acid molecule encoding a polypeptide comprising the consensus sequence or one or more polypeptide motifs as shown in column 8 of Table IV, application no. 20;
   [102761] (i) a nucleic acid molecule encoding a polypeptide having the activity represented by a respective protein as depicted in column 5 of Table II, application no. 20;
   [102762] (j) a nucleic acid molecule comprising a polynucleotide which is obtained by amplifying a cDNA library or a genomic library using the primers in Table III, application no. 20, column 8;
   [102763] and
   [102764] (k) nucleic acid molecule which is obtainable by screening a suitable nucleic acid library, especially a cDNA library and/or a genomic library, under stringent hybridization conditions with a probe comprising one of the sequences of the nucleic acid molecule of (a), (b), (c), (d), (e), (f), (g), (h), (i) or (j) or with a fragment of at least 15 nt, preferably 20 nt, 30 nt, 50 nt, 100 nt, 200 nt,500 nt, 1000 nt, 1500 nt, 2000 nt or 3000 nt of the nucleic acid molecule characterized in (a), (b), (c), (d), (e), (f), (g), (h), (i) or (j);
   [102765] or a nucleic acid molecule comprising a sequence which is complementary thereto;
      and, if desired
[102766] 2) nucleic acid molecule encoding a transit peptide, preferably encoding a plastidal transit peptide or a mitochondrial transit peptide;
   which are operable linked;]
   or comprising or being transformed by a vector comprising
[102767] [1) a nucleic acid molecule selected from the group consisting of
   [102768] (a) a nucleic acid molecule encoding a polypeptide shown in Table II, application no. 20, column 5 or 8, preferably shown in Table II A, application no. 20, column 5, or in Table II A, application no. 20, column 8, or in Table II B, application no. 20, column 8, or a homolog or a fragment thereof;
   [102769] (b) a nucleic acid molecule shown in Table I, application no. 20, column 5 or 8, preferably shown in Table I A, application no. 20, column 5, or in Table I A, application no. 20, column 8, or in Table I B, application no. 20, column 8, preferably the coding region thereof, or a homolog or a fragment thereof;
   [102770] (c) a nucleic acid molecule, which, as a result of the degeneracy of the genetic code, can be derived from a polypeptide sequence depicted in column 5 or 8 of Table II, application no. 20, preferably shown in Table II A, application no. 20, column 5, or in Table II A, application no. 20, column 8, or in Table II B, application no. 20, column 8;
   [102771] (d) a nucleic acid molecule having at least 30% identity, preferably at least 40%, 50%, 60%, 70%, 75%, 80%, 85%, 90%, 95%, 96%, 97%, 98%, 99%, 99.5%, with the nucleic acid molecule sequence of a polynucleotide comprising the nucleic acid molecule shown in column 5 or 8 of Table I, application no. 20, preferably shown in Table I A, application no. 20, column 5, or in Table I A, application no. 20, column 8, or in Table I B, application no. 20, column 8, preferably the coding region thereof;
   [102772] (e) a nucleic acid molecule encoding a polypeptide having at least 30% identity, preferably at least 40%, 50% 60%, 70%, 75%, 80%, 85%, 90%, 95%, 96%, 97%, 98%, 99%, 99.5%, identity with the amino acid sequence of the polypeptide encoded by the nucleic acid molecule of (a), (b), (c) or (d);
   [102773] (f) a nucleic acid molecule which hybridizes with a nucleic acid molecule of (a), (b), (c), (d) or (e) under stringent hybridization conditions;
   [102774] (g) a nucleic acid molecule encoding a polypeptide which can be isolated with the aid of monoclonal or polyclonal antibodies made against a polypeptide encoded by one of the nucleic acid molecules of (a), (b), (c), (d), (e) or (f);
   [102775] (h) a nucleic acid molecule encoding a polypeptide comprising the consensus sequence or one or more polypeptide motifs as shown in column 8 of Table IV, application no. 20;
   [102776] (i) a nucleic acid molecule encoding a polypeptide having the activity represented by a respective protein as depicted in column 5 of Table II, application no. 20;
   [102777] (j) a nucleic acid molecule comprising a polynucleotide which is obtained by amplifying a cDNA library or a genomic library using the primers in Table III, application no. 20, column 8;
   [102778] and
   [102779] (k) nucleic acid molecule which is obtainable by screening a suitable nucleic acid library, especially a cDNA library and/or a genomic library, under stringent hybridization conditions with a probe comprising one of the sequences of the nucleic acid molecule of (a), (b), (c), (d), (e), (f), (g), (h), (i) or (j) or with a fragment of at least 15 nt, preferably 20 nt, 30 nt, 50 nt, 100 nt, 200 nt,500 nt, 1000 nt, 1500 nt, 2000 nt or 3000 nt of the nucleic acid molecule characterized in (a), (b), (c), (d), (e), (f), (g), (h), (i) or (j);
   [102780] or a nucleic acid molecule comprising a sequence which is complementary thereto;]
      as well as respective transgenic cells, tissue, parts of such non-human organism, e.g. plant cells, plant tissue, part of plants, like leaves, roots, stems, blossoms, seeds, fruits, pollen and the like.
      (All the references to Tables I to IV are references to the corresponding lines of Tables I to IV.)

[102781] In a preferred embodiment of said transgenic non-human organism said nucleic acid molecule according to 1 (a), (b), (c), (d), (e), (f), (g), (h), (i), (j) or (k) encodes a polypeptide which has the activity of the respective polypeptide represented by a protein comprising a polypeptide as depicted in the respective line in column 5 of Table II, application no. 20.

[102782] In another preferred embodiment of said transgenic non-human organism said nucleic acid molecule according to 1 (a), (b), (c), (d), (e), (f), (g), (h), (i), (j) or (k) confers a generation or an increase of the respective fine chemical in a non-human organism or a part thereof as compared to a corresponding wild-type non-human organism or part thereof.

[102783] In another preferred embodiment of said transgenic non-human organism said nucleic acid molecule according to 1 (a), (b), (c), (d), (e), (f), (g), (h), (i), (j) or (k) encodes a polypeptide which has the activity of the respective polypeptide represented by a protein as depicted in the respective line in column 5 of Table II application no. 20 and confers a generation or an increase of the respective fine chemical in a non-human organism or a part thereof as compared to a corresponding wild-type non-human organism or part thereof.

[102784] In another embodiment of said transgenic non-human organism the expression cassette comprises 2) a nucleic acid molecule encoding a transit peptide, preferably encoding a plastidal transit peptide, especially in case in column 6 of Table I, application no. 20, in the same line as of the respective nucleic acid molecule according to 1) “plastidic” is depicted, or encoding a mitochondrial transit peptide, especially in case in column 6 of Table I, application no. 20, in the same line as of the respective nucleic acid molecule according to 1) “mitochondric” is depicted.

[102785] In another embodiment of said transgenic non-human organism the expression cassette does not comprise 2) a nucleic acid molecule encoding a transit peptide, especially in case in column 6 of Table I, application no. 20, in the same line as of the respective nucleic acid molecule according to 1) “non-targeted” is depicted.

[102786] In another embodiment of said transgenic non-human organism said vector comprises beneath said nucleic acid molecule according to 1 (a), (b), (c), (d), (e), (f), (g), (h), (i), (j) or (k), a promoter, preferably a promoter selected from the group consisting of Big35S, PCUbi, Super and USP, which are operable linked.

[102787] In a preferred embodiment of said transgenic non-human organism said vector comprises beneath said nucleic acid molecule according to 1 (a), (b), (c), (d), (e), (f), (g), (h), (i), (j) or (k), a promoter, preferably a promoter selected from the group consisting of Big35S, PCUbi, Super and USP, which are operable linked; and said nucleic acid molecule according to 1 (a), (b), (c), (d), (e), (f), (g), (h), (i), (j) or (k) encodes a polypeptide which has the activity of the respective polypeptide represented by a protein comprising a polypeptide as depicted in the respective line in column 5 of Table II, application no. 20.

[102788] In another preferred embodiment of said transgenic non-human organism said vector comprises beneath said nucleic acid molecule according to 1 (a), (b), (c), (d), (e), (f), (g), (h), (i), (j) or (k), a promoter, preferably a promoter selected from the group consisting of Big35S, PCUbi, Super and USP, which are operable linked; and said nucleic acid molecule according to 1 (a), (b), (c), (d), (e), (f), (g), (h), (i), (j) or (k) confers a generation or an increase of the respective fine chemical in a non-human organism or a part thereof as compared to a corresponding wild-type non-human organism or part thereof.

[102789] In another preferred embodiment of said transgenic non-human organism said vector comprises beneath said nucleic acid molecule according to 1 (a), (b), (c), (d), (e), (f), (g), (h), (i), (j) or (k), a promoter, preferably a promoter selected from the group consisting of Big35S, PCUbi, Super and USP, which are operable linked; and said nucleic acid molecule according to 1 (a), (b), (c), (d), (e), (f), (g), (h), (i), (j) or (k) encodes a polypeptide which has the activity of the respective polypeptide represented by a protein as depicted in the respective line in column 5 of Table II, application no. 20, and confers a generation or an increase of the respective fine chemical in a non-human organism or a part thereof as compared to a corresponding wild-type non-human organism or part thereof.

[102790] In another embodiment of said transgenic non-human organism said vector comprises beneath said nucleic acid molecule according to 1 (a), (b), (c), (d), (e), (f), (g), (h), (i), (j) or (k), a nucleic acid molecule encoding a transit peptide, preferably encoding a plastidal transit peptide, especially in case in column 6 of Table I, application no. 20, in the same line as of the respective nucleic acid molecule according to 1) “plastidic” is depicted, or encoding a mitochondrial transit peptide, especially in case in column 6 of Table I, application no. 20, in the same line as of the respective nucleic acid molecule according to 1) “mitochondric” is depicted, which are operable linked.

[102791] In another embodiment of said transgenic non-human organism said vector does not comprise beneath said nucleic acid molecule according to 1 (a), (b), (c), (d), (e), (f), (g), (h), (i), (j) or (k), a nucleic acid molecule encoding a transit peptide in case in column 6 of Table I, application no. 20, in the same line as of the respective nucleic acid molecule according to 1) “non-targeted” is depicted, which are operable linked.

[102792] In another embodiment of said transgenic non-human organism said vector comprises beneath said nucleic acid molecule according to 1 (a), (b), (c), (d), (e), (f), (g), (h), (i), (j) or (k), and a promoter, preferably a promoter selected from the group consisting of Big35S, PCUbi, Super and USP; a nucleic acid molecule encoding a transit peptide, preferably encoding a plastidal transit peptide, especially in case in column 6 of Table I, application no. 20, in the same line as of the respective nucleic acid molecule according to 1) “plastidic” is depicted, or encoding a mitochondrial transit peptide, especially in case in column 6 of Table I, application no. 20, in the same line as of the respective nucleic acid molecule according to 1) “mitochondric” is depicted, which are operable linked.

[102793] In another embodiment of said transgenic non-human organism said vector does not comprise beneath said nucleic acid molecule according to 1 (a), (b), (c), (d), (e), (f), (g), (h), (i), (j) or (k), and a promoter, preferably a promoter selected from the group consisting of Big35S, PCUbi, Super and USP; a nucleic acid molecule encoding a transit peptide, especially in case in column 6 of Table I, application no. 20, in the same line as of the respective nucleic acid molecule according to 1) “non-targeted” is depicted, which are operable linked.

[102794] In another embodiment of said transgenic non-human organism said vector comprises beneath said nucleic acid molecule according to 1 (a), (b), (c), (d), (e), (f), (g), (h), (i), (j) or (k), and a promoter, preferably a promoter selected from the group consisting of Big35S, PCUbi, Super and USP; a nucleic acid molecule encoding a transit peptide, preferably encoding a plastidal transit peptide, especially in case in column 6 of Table I, application no. 20, in the same line as of the respective nucleic acid molecule according to 1) “plastidic” is depicted, or encoding a mitochondrial transit peptide, especially in case in column 6 of Table I, application no. 20, in the same line as of the respective nucleic acid molecule according to 1) “mitochondric” is depicted, which are operable linked; and wherein said nucleic acid molecule according to 1 (a), (b), (c), (d), (e), (f), (g), (h), (i), (j) or (k) encodes a polypeptide which has the activity of the respective polypeptide represented by a protein comprising a polypeptide as depicted in the respective line in column 5 of Table II, application no. 20.

[102795] In another embodiment of said transgenic non-human organism said vector does not comprise beneath said nucleic acid molecule according to 1 (a), (b), (c), (d), (e), (f), (g), (h), (i), (j) or (k), and a promoter, preferably a promoter selected from the group consisting of Big35S, PCUbi, Super and USP; a nucleic acid molecule encoding a transit peptide, especially in case in column 6 of Table I, application no. 20, in the same line as of the respective nucleic acid molecule according to 1) “non-targeted” is depicted, which are operable linked; and wherein said nucleic acid molecule according to 1 (a), (b), (c), (d), (e), (f), (g), (h), (i), (j) or (k) encodes a polypeptide which has the activity of the respective polypeptide represented by a protein comprising a polypeptide as depicted in the respective line in column 5 of Table II, application no. 20.

[102796] In another embodiment of said transgenic non-human organism said vector comprises beneath said nucleic acid molecule according to 1 (a), (b), (c), (d), (e), (f), (g), (h), (i), (j) or (k), and a promoter, preferably a promoter selected from the group consisting of Big35S, PCUbi, Super and USP; a nucleic acid molecule encoding a transit peptide, preferably encoding a plastidal transit peptide, especially in case in column 6 of Table I, application no. 20, in the same line as of the respective nucleic acid molecule according to 1) “plastidic” is depicted, or encoding a mitochondrial transit peptide, especially in case in column 6 of Table I, application no. 20, in the same line as of the respective nucleic acid molecule according to 1) “mitochondric” is depicted, which are operable linked; and wherein said nucleic acid molecule according to 1 (a), (b), (c), (d), (e), (f), (g), (h), (i), (j) or (k) confers a generation or an increase of the respective fine chemical in a non-human organism or a part thereof as compared to a corresponding wild-type non-human organism or part thereof.

[102797] In another embodiment of said transgenic non-human organism said vector does not comprise beneath said nucleic acid molecule according to 1 (a), (b), (c), (d), (e), (f), (g), (h), (i), (j) or (k), and a promoter, preferably a promoter selected from the group consisting of Big35S, PCUbi, Super and USP; a nucleic acid molecule encoding a transit peptide, especially in case in column 6 of Table I, application no. 20, in the same line as of the respective nucleic acid molecule according to 1) “non-targeted” is depicted, which are operable linked; and wherein said nucleic acid molecule according to 1 (a), (b), (c), (d), (e), (f), (g), (h), (i), (j) or (k) confers a generation or an increase of the respective fine chemical in a non-human organism or a part thereof as compared to a corresponding wild-type non-human organism or part thereof.

[102798] In another embodiment of said transgenic non-human organism said vector comprises beneath said nucleic acid molecule according to 1 (a), (b), (c), (d), (e), (f), (g), (h), (i), (j) or (k), and a promoter, preferably a promoter selected from the group consisting of Big35S, PCUbi, Super and USP; a nucleic acid molecule encoding a transit peptide, preferably encoding a plastidal transit peptide, especially in case in column 6 of Table I, application no. 20, in the same line as of the respective nucleic acid molecule according to 1) “plastidic” is depicted, or encoding a mitochondrial transit peptide, especially in case in column 6 of Table I, application no. 20, in the same line as of the respective nucleic acid molecule according to 1) “mitochondric” is depicted, which are operable linked; and wherein said nucleic acid molecule according to 1 (a), (b), (c), (d), (e), (f), (g), (h), (i), (j) or (k) encodes a polypeptide which has the activity of the respective polypeptide represented by a protein as depicted in the respective line in column 5 of Table II application no. 20 and confers a generation or an increase of the respective fine chemical in a non-human organism or a part thereof as compared to a corresponding wild-type non-human organism or part thereof.

[102799] In another embodiment of said transgenic non-human organism said vector does not comprise beneath said nucleic acid molecule according to 1 (a), (b), (c), (d), (e), (f), (g), (h), (i), (j) or (k), and a promoter, preferably a promoter selected from the group consisting of Big35S, PCUbi, Super and USP; a nucleic acid molecule encoding a transit peptide, especially in case in column 6 of Table I, application no. 20, in the same line as of the respective nucleic acid molecule according to 1) “non-targeted” is depicted, which are operable linked; and wherein said nucleic acid molecule according to 1 (a), (b), (c), (d), (e), (f), (g), (h), (i), (j) or (k) encodes a polypeptide which has the activity of the respective polypeptide represented by a protein as depicted in the respective line in column 5 of Table II application no. 20 (in the same line) and confers a generation or an increase of the respective fine chemical in a non-human organism or a part thereof as compared to a corresponding wild-type non-human organism or part thereof.

[102800] In a preferred embodiment of said transgenic non-human organism said nucleic acid molecule according to 1 (a), (b), (c), (d), (e), (f), (g), (h), (i), (j) or (k), said promoter and optionally said nucleic acid molecule encoding a transit peptide are encompassed in an expression cassette in said vector. Accordingly an embodiment the invention provides a non-human organism comprising or being transformed by a vector comprising an expression cassette comprising said nucleic acid molecule according to 1 (a), (b), (c), (d), (e), (f), (g), (h), (i), (j) or (k), said promoter and optionally said a nucleic acid molecule encoding a transit peptide, operable linked. Said expression cassette may encompass a terminator, too.

[102801] In a further embodiment the invention relates to a transgenic non-human organisms such as transgenic microorganism or transgenic plant comprising a nucleic acid molecule comprising
[102802] [1) a nucleic acid molecule selected from the group consisting of
   [102803] (a) a nucleic acid molecule encoding a polypeptide shown in Table II, application no. 20, column 5 or 8, preferably shown in Table II A, application no. 20, column 5, or in Table II A, application no. 20, column 8, or in Table II B, application no. 20, column 8, or a homolog or a fragment thereof;
   [102804] (b) a nucleic acid molecule shown in Table I, application no. 20, column 5 or 8, preferably shown in Table I A, application no. 20, column 5, or in Table I A, application no. 20, column 8, or in Table I B, application no. 20, column 8, preferably the coding region thereof, or a homolog or a fragment thereof;
   [102805] (c) a nucleic acid molecule, which, as a result of the degeneracy of the genetic code, can be derived from a polypeptide sequence depicted in column 5 or 8 of Table II, application no. 20, preferably shown in Table II A, application no. 20, column 5, or in Table II A, application no. 20, column 8, or in Table II B, application no. 20, column 8;
   [102806] (d) a nucleic acid molecule having at least 30% identity, preferably at least 40%, 50%, 60%, 70%, 75%, 80%, 85%, 90%, 95%, 96%, 97%, 98%, 99%, 99.5%, with the nucleic acid molecule sequence of a polynucleotide comprising the nucleic acid molecule shown in column 5 or 8 of Table I, application no. 20, preferably shown in Table I A, application no. 20, column 5, or in Table I A, application no. 20, column 8, or in Table I B, application no. 20, column 8, preferably the coding region thereof;
   [102807] (e) a nucleic acid molecule encoding a polypeptide having at least 30% identity, preferably at least 40%, 50% 60%, 70%, 75%, 80%, 85%, 90%, 95%, 96%, 97%, 98%, 99%, 99.5%, identity with the amino acid sequence of the polypeptide encoded by the nucleic acid molecule of (a), (b), (c) or (d);
   [102808] (f) a nucleic acid molecule which hybridizes with a nucleic acid molecule of (a), (b), (c), (d) or (e) under stringent hybridization conditions;
   [102809] (g) a nucleic acid molecule encoding a polypeptide which can be isolated with the aid of monoclonal or polyclonal antibodies made against a polypeptide encoded by one of the nucleic acid molecules of (a), (b), (c), (d), (e) or (f);
   [102810] (h) a nucleic acid molecule encoding a polypeptide comprising the consensus sequence or one or more polypeptide motifs as shown in column 8 of Table IV, application no. 20;
   [102811] (i) a nucleic acid molecule encoding a polypeptide having the activity represented by a respective protein as depicted in column 5 of Table II, application no. 20;
   [102812] (j) a nucleic acid molecule comprising a polynucleotide which is obtained by amplifying a cDNA library or a genomic library using the primers in Table III, application no. 20, column 8;
   [102813] and
   [102814] (k) nucleic acid molecule which is obtainable by screening a suitable nucleic acid library, especially a cDNA library and/or a genomic library, under stringent hybridization conditions with a probe comprising one of the sequences of the nucleic acid molecule of (a), (b), (c), (d), (e), (f), (g), (h), (i) or (j) or with a fragment of at least 15 nt, preferably 20 nt, 30 nt, 50 nt, 100 nt, 200 nt,500 nt, 1000 nt, 1500 nt, 2000 nt or 3000 nt of the nucleic acid molecule characterized in (a), (b), (c), (d), (e), (f), (g), (h), (i) or (j);
   [102815] or a nucleic acid molecule comprising a sequence which is complementary thereto;
      and, if desired
[102816] 2) nucleic acid molecule encoding a transit peptide, preferably encoding a plastidal transit peptide or a mitochondrial transit peptide;
   which are operable linked;]
   or comprising an expression cassette comprising
[102817] [0) a promoter, preferably a promoter selected from the group consisting of Big35S, PCUbi, Super and USP; and
[102818] 1) a nucleic acid molecule selected from the group consisting of
   [102819] (a) a nucleic acid molecule encoding a polypeptide shown in Table II, application no. 20, column 5 or 8, preferably shown in Table II A, application no. 20, column 5, or in Table II A, application no. 20, column 8, or in Table II B, application no. 20, column 8, or a homolog or a fragment thereof;
   [102820] (b) a nucleic acid molecule shown in Table I, application no. 20, column 5 or 8, preferably shown in Table I A, application no. 20, column 5, or in Table I A, application no. 20, column 8, or in Table I B, application no. 20, column 8, preferably the coding region thereof, or a homolog or a fragment thereof;
   [102821] (c) a nucleic acid molecule, which, as a result of the degeneracy of the genetic code, can be derived from a polypeptide sequence depicted in column 5 or 8 of Table II, application no. 20, preferably shown in Table II A, application no. 20, column 5, or in Table II A, application no. 20, column 8, or in Table II B, application no. 20, column 8;
   [102822] (d) a nucleic acid molecule having at least 30% identity, preferably at least 40%, 50%, 60%, 70%, 75%, 80%, 85%, 90%, 95%, 96%, 97%, 98%, 99%, 99.5%, with the nucleic acid molecule sequence of a polynucleotide comprising the nucleic acid molecule shown in column 5 or 8 of Table I, application no. 20, preferably shown in Table I A, application no. 20, column 5, or in Table I A, application no. 20, column 8, or in Table I B, application no. 20, column 8, preferably the coding region thereof;
   [102823] (e) a nucleic acid molecule encoding a polypeptide having at least 30% identity, preferably at least 40%, 50% 60%, 70%, 75%, 80%, 85%, 90%, 95%, 96%, 97%, 98%, 99%, 99.5%, identity with the amino acid sequence of the polypeptide encoded by the nucleic acid molecule of (a), (b), (c) or (d);
   [102824] (f) a nucleic acid molecule which hybridizes with a nucleic acid molecule of (a), (b), (c), (d) or (e) under stringent hybridization conditions;
   [102825] (g) a nucleic acid molecule encoding a polypeptide which can be isolated with the aid of monoclonal or polyclonal antibodies made against a polypeptide encoded by one of the nucleic acid molecules of (a), (b), (c), (d), (e) or (f);
   [102826] (h) a nucleic acid molecule encoding a polypeptide comprising the consensus sequence or one or more polypeptide motifs as shown in column 8 of Table IV, application no. 20;
   [102827] (i) a nucleic acid molecule encoding a polypeptide having the activity represented by a respective protein as depicted in column 5 of Table II, application no. 20;
   [102828] (j) a nucleic acid molecule comprising a polynucleotide which is obtained by amplifying a cDNA library or a genomic library using the primers in Table III, application no. 20, column 8;
   [102829] and
   [102830] (k) nucleic acid molecule which is obtainable by screening a suitable nucleic acid library, especially a cDNA library and/or a genomic library, under stringent hybridization conditions with a probe comprising one of the sequences of the nucleic acid molecule of (a), (b), (c), (d), (e), (f), (g), (h), (i) or (j) or with a fragment of at least 15 nt, preferably 20 nt, 30 nt, 50 nt, 100 nt, 200 nt,500 nt, 1000 nt, 1500 nt, 2000 nt or 3000 nt of the nucleic acid molecule characterized in (a), (b), (c), (d), (e), (f), (g), (h), (i) or (j);
   [102831] or a nucleic acid molecule comprising a sequence which is complementary thereto;]
      and, if desired
[102832] 2) nucleic acid molecule encoding a transit peptide, preferably encoding a plastidal transit peptide or a mitochondrial transit peptide;
   which are operable linked;]
   or comprising or being transformed by a vector comprising
[102833] [1) a nucleic acid molecule selected from the group consisting of
   [102834] (a) a nucleic acid molecule encoding a polypeptide shown in Table II, application no. 20, column 5 or 8, preferably shown in Table II A, application no. 20, column 5, or in Table II A, application no. 20, column 8, or in Table II B, application no. 20, column 8, or a homolog or a fragment thereof;
   [102835] (b) a nucleic acid molecule shown in Table I, application no. 20, column 5 or 8, preferably shown in Table I A, application no. 20, column 5, or in Table I A, application no. 20, column 8, or in Table I B, application no. 20, column 8, preferably the coding region thereof, or a homolog or a fragment thereof;
   [102836] (c) a nucleic acid molecule, which, as a result of the degeneracy of the genetic code, can be derived from a polypeptide sequence depicted in column 5 or 8 of Table II, application no. 20, preferably shown in Table II A, application no. 20, column 5, or in Table II A, application no. 20, column 8, or in Table II B, application no. 20, column 8;
   [102837] (d) a nucleic acid molecule having at least 30% identity, preferably at least 40%, 50%, 60%, 70%, 75%, 80%, 85%, 90%, 95%, 96%, 97%, 98%, 99%, 99.5%, with the nucleic acid molecule sequence of a polynucleotide comprising the nucleic acid molecule shown in column 5 or 8 of Table I, application no. 20, preferably shown in Table I A, application no. 20, column 5, or in Table I A, application no. 20, column 8, or in Table I B, application no. 20, column 8, preferably the coding region thereof;
   [102838] (e) a nucleic acid molecule encoding a polypeptide having at least 30% identity, preferably at least 40%, 50% 60%, 70%, 75%, 80%, 85%, 90%, 95%, 96%, 97%, 98%, 99%, 99.5%, identity with the amino acid sequence of the polypeptide encoded by the nucleic acid molecule of (a), (b), (c) or (d);
   [102839] (f) a nucleic acid molecule which hybridizes with a nucleic acid molecule of (a), (b), (c), (d) or (e) under stringent hybridization conditions;
   [102840] (g) a nucleic acid molecule encoding a polypeptide which can be isolated with the aid of monoclonal or polyclonal antibodies made against a polypeptide encoded by one of the nucleic acid molecules of (a), (b), (c), (d), (e) or (f);
   [102841] (h) a nucleic acid molecule encoding a polypeptide comprising the consensus sequence or one or more polypeptide motifs as shown in column 8 of Table IV, application no. 20;
   [102842] (i) a nucleic acid molecule encoding a polypeptide having the activity represented by a respective protein as depicted in column 5 of Table II, application no. 20;
   [102843] (j) a nucleic acid molecule comprising a polynucleotide which is obtained by amplifying a cDNA library or a genomic library using the primers in Table III, application no. 20, column 8;
   [102844] and
   [102845] (k) nucleic acid molecule which is obtainable by screening a suitable nucleic acid library, especially a cDNA library and/or a genomic library, under stringent hybridization conditions with a probe comprising one of the sequences of the nucleic acid molecule of (a), (b), (c), (d), (e), (f), (g), (h), (i) or (j) or with a fragment of at least 15 nt, preferably 20 nt, 30 nt, 50 nt, 100 nt, 200 nt,500 nt, 1000 nt, 1500 nt, 2000 nt or 3000 nt of the nucleic acid molecule characterized in (a), (b), (c), (d), (e), (f), (g), (h), (i) or (j);
   [102846] or a nucleic acid molecule comprising a sequence which is complementary thereto;]
      whereby, preferably, the nucleic acid molecule according to 1 (a), (b), (c), (d), (e), (f), (g), (h), (i), (j) or (k) distinguishes over the sequence depicted in Table I A and/or I B, application no. 20, column 5 or 8, or the coding regions thereof, by one or more nucleotides (especially but not exceeding 5%, preferably 4%, 3%, 2%, 1%, 0.5%, 0.2% or 0.1%). In an embodiment, the nucleic acid molecule of the invention does not consist of the sequence shown in Table I A and/or I B, application no. 20, column 5 or 8, or the coding region thereof. In another embodiment, the nucleic acid molecule of the present invention, preferably the coding region thereof, is at least 30%, 40%, 50%, 60%, 70%, 80%, 90%, 95% identical but less than 100%, 99.999%, 99.99%, 99.9%, 99%, 98%, 97%, 96% or 95% identical to the sequence shown in Table I A and/or I B, application no. 20, column 5 or 8, or the coding region thereof, respectively. In a further embodiment the nucleic acid molecule does not encode the polypeptide sequence shown in Table II A and/or II B, application no. 20, column 5 or 8 but homologs thereof. Accordingly, in one embodiment, the nucleic acid molecule of the present invention encodes in one embodiment a polypeptide which differs at least in one or more amino acids (especially but not exceeding 5%, preferably 4%, 3%, 2%, 1%, 0.5%, 0.2% or 0.1%) from the polypeptide shown in Table II, application no. 20, column 5 or 8 and does not encode a protein of the sequence shown in Table II A and/or II B, application no. 20, column 5 or 8. Accordingly, in one embodiment, the protein encoded by a sequence of a nucleic acid according to 1 (a), (b), (c), (d), (e), (f), (g), (h), (i), (j) or (k) does not consist of the sequence shown in Table I A and/or I B, application no. 20, column 5 or 8, or the coding region thereof. In a further embodiment, the protein of the present invention is at least 30%, 40%, 50%, 60%, 70%, 80%, 90%, 95% identical to protein sequence depicted in Table II A and/or II B, application no. 20, column 5 or 8 but less than 100%, preferably less than 99.999%, 99.99%, 99.9%, 99%, 98%, 97%, 96% or 95% identical to the sequence shown in Table II A and/or II B, application no. 20, column 5 or 8; as well as respective transgenic cells, tissue, parts of such non-human organism, e.g. plant cells, plant tissue, part of plants, like leaves, roots, stems, blossoms, seeds, fruits, pollen and the like.
      (All the references to Tables I to IV are references to the corresponding lines of Tables I to IV.)

[102847] In a preferred embodiment of said transgenic non-human organism said nucleic acid molecule according to 1 (a), (b), (c), (d), (e), (f), (g), (h), (i), (j) or (k) encodes a polypeptide which has the activity of the respective polypeptide represented by a protein comprising a polypeptide as depicted in the respective line in column 5 of Table II, application no. 20.

[102848] In another preferred embodiment of said transgenic non-human organism said nucleic acid molecule according to 1 (a), (b), (c), (d), (e), (f), (g), (h), (i), (j) or (k) confers a generation or an increase of the respective fine chemical in a non-human organism or a part thereof as compared to a corresponding wild-type non-human organism or part thereof.

[102849] In another preferred embodiment of said transgenic non-human organism said nucleic acid molecule according to 1 (a), (b), (c), (d), (e), (f), (g), (h), (i), (j) or (k) encodes a polypeptide which has the activity of the respective polypeptide represented by a protein as depicted in the respective line in column 5 of Table II application no. 20 and confers a generation or an increase of the respective fine chemical in a non-human organism or a part thereof as compared to a corresponding wild-type non-human organism or part thereof.

[102850] In another embodiment of said transgenic non-human organism the expression cassette comprises 2) a nucleic acid molecule encoding a transit peptide, preferably encoding a plastidal transit peptide, especially in case in column 6 of Table I, application no. 20, in the same line as of the respective nucleic acid molecule according to 1) “plastidic” is depicted, or encoding a mitochondrial transit peptide, especially in case in column 6 of Table I, application no. 20, in the same line as of the respective nucleic acid molecule according to 1) “mitochondric” is depicted.

[102851] In another embodiment thereof the expression cassette does not comprise 2) a nucleic acid molecule encoding a transit peptide, especially in case in column 6 of Table I, application no. 20, in the same line as of the respective nucleic acid molecule according to 1) “non-targeted” is depicted.

[102852] In another embodiment of said transgenic non-human organism said vector comprises beneath said nucleic acid molecule according to 1 (a), (b), (c), (d), (e), (f), (g), (h), (i), (j) or (k), a promoter, preferably a promoter selected from the group consisting of Big35S, PCUbi, Super and USP, which are operable linked.

[102853] In a preferred embodiment of said transgenic non-human organism said vector comprises beneath said nucleic acid molecule according to 1 (a), (b), (c), (d), (e), (f), (g), (h), (i), (j) or (k), a promoter, preferably a promoter selected from the group consisting of Big35S, PCUbi, Super and USP, which are operable linked; and said nucleic acid molecule according to 1 (a), (b), (c), (d), (e), (f), (g), (h), (i), (j) or (k) encodes a polypeptide which has the activity of the respective polypeptide represented by a protein comprising a polypeptide as depicted in the respective line in column 5 of Table II, application no. 20.

[102854] In another preferred embodiment of said transgenic non-human organism said vector comprises beneath said nucleic acid molecule according to 1 (a), (b), (c), (d), (e), (f), (g), (h), (i), (j) or (k), a promoter, preferably a promoter selected from the group consisting of Big35S, PCUbi, Super and USP, which are operable linked; and said nucleic acid molecule according to 1 (a), (b), (c), (d), (e), (f), (g), (h), (i), (j) or (k) confers a generation or an increase of the respective fine chemical in a non-human organism or a part thereof as compared to a corresponding wild-type non-human organism or part thereof.

[102855] In another preferred embodiment of said transgenic non-human organism said vector comprises beneath said nucleic acid molecule according to 1 (a), (b), (c), (d), (e), (f), (g), (h), (i), (j) or (k), a promoter, preferably a promoter selected from the group consisting of Big35S, PCUbi, Super and USP, which are operable linked; and said nucleic acid molecule according to 1 (a), (b), (c), (d), (e), (f), (g), (h), (i), (j) or (k) encodes a polypeptide which has the activity of the respective polypeptide represented by a protein as depicted in the same line in column 5 of Table II, application no. 20, and confers a generation or an increase of the respective fine chemical in a non-human organism or a part thereof as compared to a corresponding wild-type non-human organism or part thereof.

[102856] In another embodiment of said transgenic non-human organism said vector comprises beneath said nucleic acid molecule according to 1 (a), (b), (c), (d), (e), (f), (g), (h), (i), (j) or (k), a nucleic acid molecule encoding a transit peptide, preferably encoding a plastidal transit peptide, especially in case in column 6 of Table I, application no. 20, in the same line as of the respective nucleic acid molecule according to 1) “plastidic” is depicted, or encoding a mitochondrial transit peptide, especially in case in column 6 of Table I, application no. 20, in the same line as of the respective nucleic acid molecule according to 1) “mitochondric” is depicted, which are operable linked.

[102857] In another embodiment of said transgenic non-human organism said vector does not comprise beneath said nucleic acid molecule according to 1 (a), (b), (c), (d), (e), (f), (g), (h), (i), (j) or (k), a nucleic acid molecule encoding a transit peptide in case in column 6 of Table I, application no. 20, in the same line as of the respective nucleic acid molecule according to 1) “non-targeted” is depicted, which are operable linked.

[102858] In another embodiment of said transgenic non-human organism said vector comprises beneath said nucleic acid molecule according to 1 (a), (b), (c), (d), (e), (f), (g), (h), (i), (j) or (k), and a promoter, preferably a promoter selected from the group consisting of Big35S, PCUbi, Super and USP; a nucleic acid molecule encoding a transit peptide, preferably encoding a plastidal transit peptide, especially in case in column 6 of Table I, application no. 20, in the same line as of the respective nucleic acid molecule according to 1) “plastidic” is depicted, or encoding a mitochondrial transit peptide, especially in case in column 6 of Table I, application no. 20, in the same line as of the respective nucleic acid molecule according to 1) “mitochondric” is depicted, which are operable linked.

[102859] In another embodiment of said transgenic non-human organism said vector does not comprise beneath said nucleic acid molecule according to 1 (a), (b), (c), (d), (e), (f), (g), (h), (i), (j) or (k), and a promoter, preferably a promoter selected from the group consisting of Big35S, PCUbi, Super and USP; a nucleic acid molecule encoding a transit peptide, especially in case in column 6 of Table I, application no. 20, in the same line as of the respective nucleic acid molecule according to 1) “non-targeted” is depicted, which are operable linked.

[102860] In another embodiment of said transgenic non-human organism said vector comprises beneath said nucleic acid molecule according to 1 (a), (b), (c), (d), (e), (f), (g), (h), (i), (j) or (k), and a promoter, preferably a promoter selected from the group consisting of Big35S, PCUbi, Super and USP; a nucleic acid molecule encoding a transit peptide, preferably encoding a plastidal transit peptide, especially in case in column 6 of Table I, application no. 20, in the same line as of the respective nucleic acid molecule according to 1) “plastidic” is depicted, or encoding a mitochondrial transit peptide, especially in case in column 6 of Table I, application no. 20, in the same line as of the respective nucleic acid molecule according to 1) “mitochondric” is depicted, which are operable linked; and wherein said nucleic acid molecule according to 1 (a), (b), (c), (d), (e), (f), (g), (h), (i), (j) or (k) encodes a polypeptide which has the activity of the respective polypeptide represented by a protein comprising a polypeptide as depicted in the respective line in column 5 of Table II, application no. 20.

[102861] In another embodiment of said transgenic non-human organism said vector does not comprise beneath said nucleic acid molecule according to 1 (a), (b), (c), (d), (e), (f), (g), (h), (i), (j) or (k), and a promoter, preferably a promoter selected from the group consisting of Big35S, PCUbi, Super and USP; a nucleic acid molecule encoding a transit peptide, especially in case in column 6 of Table I, application no. 20, in the same line as of the respective nucleic acid molecule according to 1) “non-targeted” is depicted, which are operable linked; and wherein said nucleic acid molecule according to 1 (a), (b), (c), (d), (e), (f), (g), (h), (i), (j) or (k) encodes a polypeptide which has the activity of the respective polypeptide represented by a protein comprising a polypeptide as depicted in the respective line in column 5 of Table II, application no. 20.

[102862] In another embodiment of said transgenic non-human organism said vector comprises beneath said nucleic acid molecule according to 1 (a), (b), (c), (d), (e), (f), (g), (h), (i), (j) or (k), and a promoter, preferably a promoter selected from the group consisting of Big35S, PCUbi, Super and USP; a nucleic acid molecule encoding a transit peptide, preferably encoding a plastidal transit peptide, especially in case in column 6 of Table I, application no. 20, in the same line as of the respective nucleic acid molecule according to 1) “plastidic” is depicted, or encoding a mitochondrial transit peptide, especially in case in column 6 of Table I, application no. 20, in the same line as of the respective nucleic acid molecule according to 1) “mitochondric” is depicted, which are operable linked; and wherein said nucleic acid molecule according to 1 (a), (b), (c), (d), (e), (f), (g), (h), (i), (j) or (k) confers a generation or an increase of the respective fine chemical in a non-human organism or a part thereof as compared to a corresponding wild-type non-human organism or part thereof.

[102863] In another embodiment of said transgenic non-human organism said vector does not comprise beneath said nucleic acid molecule according to 1 (a), (b), (c), (d), (e), (f), (g), (h), (i), (j) or (k), and a promoter, preferably a promoter selected from the group consisting of Big35S, PCUbi, Super and USP; a nucleic acid molecule encoding a transit peptide, especially in case in column 6 of Table I, application no. 20, in the same line as of the respective nucleic acid molecule according to 1) “non-targeted” is depicted, which are operable linked; and wherein said nucleic acid molecule according to 1 (a), (b), (c), (d), (e), (f), (g), (h), (i), (j) or (k) confers a generation or an increase of the respective fine chemical in a non-human organism or a part thereof as compared to a corresponding wild-type non-human organism or part thereof.

[102864] In another embodiment of said transgenic non-human organism said vector comprises beneath said nucleic acid molecule according to 1 (a), (b), (c), (d), (e), (f), (g), (h), (i), (j) or (k), and a promoter, preferably a promoter selected from the group consisting of Big35S, PCUbi, Super and USP; a nucleic acid molecule encoding a transit peptide, preferably encoding a plastidal transit peptide, especially in case in column 6 of Table I, application no. 20, in the same line as of the respective nucleic acid molecule according to 1) “plastidic” is depicted, or encoding a mitochondrial transit peptide, especially in case in column 6 of Table I, application no. 20, in the same line as of the respective nucleic acid molecule according to 1) “mitochondric” is depicted, which are operable linked; and wherein said nucleic acid molecule according to 1 (a), (b), (c), (d), (e), (f), (g), (h), (i), (j) or (k) encodes a polypeptide which has the activity of the respective polypeptide represented by a protein as depicted in the respective line in column 5 of Table II application no. 20 and confers a generation or an increase of the respective fine chemical in a non-human organism or a part thereof as compared to a corresponding wild-type non-human organism or part thereof.

[102865] In another embodiment of said transgenic non-human organism said vector does not comprise beneath said nucleic acid molecule according to 1 (a), (b), (c), (d), (e), (f), (g), (h), (i), (j) or (k), and a promoter, preferably a promoter selected from the group consisting of Big35S, PCUbi, Super and USP; a nucleic acid molecule encoding a transit peptide, especially in case in column 6 of Table I, application no. 20, in the same line as of the respective nucleic acid molecule according to 1) “non-targeted” is depicted, which are operable linked; and wherein said nucleic acid molecule according to 1 (a), (b), (c), (d), (e), (f), (g), (h), (i), (j) or (k) encodes a polypeptide which has the activity of the respective polypeptide represented by a protein as depicted in the respective line in column 5 of Table II application no. 20 and confers a generation or an increase of the respective fine chemical in a non-human organism or a part thereof as compared to a corresponding wild-type non-human organism or part thereof.

[102866] In a preferred embodiment of said transgenic non-human organism said nucleic acid molecule according to 1 (a), (b), (c), (d), (e), (f), (g), (h), (i), (j) or (k), said promoter and optionally said nucleic acid molecule encoding a transit peptide are encompassed in an expression cassette in said vector. Accordingly an embodiment the invention provides a non-human organism comprising or being transformed by a vector comprising an expression cassette comprising said nucleic acid molecule according to 1 (a), (b), (c), (d), (e), (f), (g), (h), (i), (j) or (k), said promoter and optionally said a nucleic acid molecule encoding a transit peptide, operable linked. Said expression cassette may encompass a terminator, too.

[102867] [0291.1.7.20] to [0299.1.7.20] for the disclosure of these paragraphs see [0291.1.7.7] to [0299.1.7.7] above

[102868] The term “biological active portion” or “biological activity” means a polypeptide as depicted in the respective line in Table II, application no. 20, column 3 or a portion of said polypeptide which still has at least 10% or 20%, preferably 30%, 40%, 50% or 60%, especially preferably 70%, 75%, 80%, 90% or 95% of the enzymatic or biological activity of the natural or starting enzyme or protein.

[102869] [0301.1.7.20] to [0304.1.7.20] for the disclosure of these paragraphs see [0301.1.7.7] to [0304.1.7.7] above

[102870] Synthetic oligonucleotide primers for the amplification, e.g. as shown in the respective line in Table III, application no. 20, column 8, by means of polymerase chain reaction can be generated on the basis of a sequence shown herein, for example the sequence shown in the respective line in Table I, application no. 20, columns 5 or 8, or the sequences derived from Table II, application no. 20, columns 5 or 8, respectively.

[102871] Moreover, it is possible to identify a conserved region of a protein from various organism by carrying out protein sequence alignments with the polypeptide encoded by the nucleic acid molecules of the present invention, in particular with the sequences encoded by the nucleic acid molecule shown in the respective line in column 5 or 8 of Table I, application no. 20, from which conserved regions, and in turn, degenerate primers can be derived. Conserved regions are those, which show a very little variation in the amino acid in one particular position of several homologs from different origin. The consensus sequence and polypeptide motifs shown in the respective line in column 8 of Table IV, application no. 20, are derived from such alignments of homologous proteins.

[102872] In an embodiment of the present invention, in the method of the present invention the activity of a polypeptide comprising or consisting of a consensus sequence or at least one polypeptide motif shown in the respective line in Table IV, application no. 20, column 8, is increased. In another embodiment thereof, the method of the present invention relates to a polypeptide comprising or consisting of a consensus sequence shown in the respective line in Table IV, application no. 20, column 8 or comprising at least one polypeptide motif shown in the respective line in Table IV, application no. 20, column 8, whereby not more than 20, 15, 10, 9, 8, 7, 6, 5 4, 3, 2 or 1, or 0 of the amino acid positions indicated can be replaced by any amino acid. In another embodiment thereof, the method of the present invention relates to a polypeptide comprising or consisting of a consensus sequence shown in the respective line in Table IV, application no. 20, column 8 or comprising at least one polypeptide motif shown in the respective line in Table IV, application no. 20, column 8, whereby not more than 15%, 10%, 5%, 4%, 3%, 2% or 1%, or 0% of the amino acid positions defined as distinct specific amino acids are/is replaced by another amino acid. In another embodiment thereof, the method of the present invention relates to a polypeptide comprising or consisting of a consensus sequence shown in the respective line in Table IV, application no. 20, column 8 or comprising at least one polypeptide motif shown in the respective line in Table IV, application no. 20, column 8, whereby not more than 20, 15, 10, 9, 8, 7, 6, 5, 4, 3, 2 or 1, or 0 amino acids are inserted into a consensus sequence or polypeptide motif.

[102873] In an embodiment of the present invention, in the method of the present invention the activity of a polypeptide comprising or consisting of a consensus sequence or at least one polypeptide motif shown in the respective line in Table IV, application no. 20, column 8, is increased, whereby said polypeptide distinguishes over the sequence depicted in Table II, application no. 20, columns 5 or 8 by one or more amino acids.

[102874] In one embodiment, said polypeptide of the invention distinguishes over the sequence shown in the respective line in Table II, application no. 20, columns 5 and 8 by more than 5, 6, 7, 8 or 9 amino acids, preferably by more than 10, 15, 20, 25 or 30 amino acids, even more preferred are more than 40, 50, or 60 amino acids and, preferably, the sequence of the polypeptide of the invention distinguishes from the sequence shown in the respective line in Table II B, application no. 20, columns 5 and 8 by not more than 80%, 70%, 60%, 50%, 40%, 30%, 20%, 10%, 5%, 4%, 3%, 2%, 1% or 0.5%. In another embodiment, said polypeptide of the invention does not consist of the sequence shown in Table II, application no. 20, columns 5 or 8.

[102875] [0309.1.7.20] to [0321.1.7.20] for the disclosure of these paragraphs see [0309.1.7.7] to [0321.1.7.7] above

[102876] Polypeptides having above-mentioned activity, i.e. conferring the production or the increased production of the fine chemical hentriacontane as compared to a corresponding, e.g. non-transformed, wild type non-human organism, like a microorganism or a plant cell, plant or part thereof, can be encoded by other DNA sequences which hybridize to the sequences shown in the respective line in Table I, application no. 20, columns 5 and 8, preferably the coding region thereof, at least under relaxed hybridization conditions and which encode the expression of polypeptides conferring the production or the increased production of the respective fine chemical hentriacontane as compared to a corresponding, e.g. non-transformed, wild type non-human organism, like a microorganism or a plant cell, plant or part thereof.

[102877] [0323.1.7.20] to [0329.1.7.20] for the disclosure of these paragraphs see [0323.1.7.7] to [0329.1.7.7] above

[102878] Further, the nucleic acid molecule of the invention comprises a nucleic acid molecule, which is a complement of one of the nucleotide sequences of above-mentioned nucleic acid molecules or a portion thereof. A nucleic acid molecule or its sequence which is complementary to one of the nucleotide molecules or sequences shown in the respective line in Table I, application no. 20, columns 5 or 8, preferably the coding region thereof, homologs or fragments thereof, is one which is sufficiently complementary to one of the nucleotide molecules or sequences shown in the respective line in Table I, application no. 20, columns 5 or 8, preferably the coding region thereof, homologs or fragments thereof, such that it can hybridize to one of the nucleotide sequences shown in Table I, application no. 20, columns 5 or 8, preferably the coding region thereof, homologs or fragments thereof, thereby forming a stable duplex. Preferably, the hybridization is performed under stringent hybridization conditions. However, a complement of one of the herein disclosed sequences is preferably a sequence complement thereto according to the base pairing of nucleic acid molecules well known to the skilled person. For example, the bases A and G undergo base pairing with the bases T and U or C, resp. and visa versa. Modifications of the bases can influence the base-pairing partner.

[102879] The nucleic acid molecule of the invention comprises a nucleotide sequence which is at least about 30%, 35%, 40%, 45%, 50%, 55%, 60%, 65%, 70%, 75%, 80%, 90%, 95%, 96%, 97%, 98%, 99%, 99.5% or more homologous to a nucleotide sequence shown in Table I, application no. 20, columns 5 or 8, preferably the coding region thereof, homologs or fragments thereof, and preferably has above-mentioned activity, in particular conferring the production or the increased production of the fine chemical hentriacontane, respectively, after increasing the activity or an activity of a gene as shown in the respective line in Table I or of a gene product, e.g. as shown in the respective line in Table II, application no. 20, column 5 or 8, by for example in one embodiment expression either in the cytosol or in an organelle such as a plastid or mitochondria or both, preferably in a plastid, or in another embodiment non-targeted or targeted.

[102880] The nucleic acid molecule of the invention comprises a nucleotide sequence or molecule which hybridizes, preferably hybridizes under stringent conditions as defined herein, to one of the nucleic acid molecule shown in the respective line in Table I, preferably Table IB, application no. 20, columns 5 or 8, preferably the coding region thereof, fragments or homologs thereof, and encodes a protein having above-mentioned activity, e.g. conferring the production or the increased production of the respective fine chemical hentriacontane as compared to a corresponding, e.g. non-transformed, wild type non-human organism, like a microorganism or a plant cell, plant or part thereof, by for example in one embodiment expression either in the cytosol or in an organelle such as a plastid or mitochondria or both, preferably in a plastid, or in another embodiment non-targeted or targeted, and optionally, the activity thereof is selected from the group consisting of 3-deoxy-7-phosphoheptulonate synthase, acid shock protein, amino-acid acetyltransferase, assembly protein for periplasmic nitrate reductase, At2g45420-protein, At5g43630-protein, ATP-dependent RNA helicase, b0833-protein, b1259-protein, b1445-protein, b1670-protein, b1930-protein, b2399-protein, b2653-protein, b3644-protein, cell division protein, cyclin D, cysteine synthase A, dihydroxyacetone kinase, electron transport complex protein, ethanolamine utilization protein, exonuclease subunit, fumarylacetoacetate hydrolase, GDP-mannose 4,6-dehydratase, inner membrane protein, ion-transport protein, L-asparaginase, MADS box protein transcription factor, mechanosensitive ion channel, metal-dependent hydrolase, methionine permease, O-antigen chain length determinant, ornithine decarboxylase, orotidine-5′-phosphate decarboxylase, peptide chain release factor, phospho-2-dehydro-3-deoxyheptonate aldolase, phosphoadenosine phosphosulfate reductase, phosphoglycolate phosphatase, pyrimidine-specific ribonucleoside hydrolase, pyruvate kinase, RNA-binding protein, S-adenosyl-L-methionine-dependent methyltransferase, serine protease, short-chain alcohol dehydrogenase family, sigma-54 dependent response regulator, spermidine synthase, sugar transport system permease protein, transcription factor, transcriptional regulator, YFL019C-protein, YHL039W-protein, YHR022C-A-protein, YJL127W-A-protein, ylr157c-protein, ynl321w-protein, ypr170c-protein, and YPR172W-protein, respectively.

[102881] Moreover, the nucleic acid molecule of the invention can comprise only a portion of the coding region of one of the nucleic acid molecules depicted in Table I, application no. 20, columns 5 or 8, for example a fragment which can be used as a probe or primer or a fragment encoding a biologically active portion of the polypeptide of the present invention or of a polypeptide used in the process of the present invention, i.e. having above-mentioned activity, e.g. conferring the production or the increased production of the respective fine chemical hentriacontane as compared to a corresponding, e.g. non-transformed, wild type non-human organism, like a microorganism or a plant cell, plant or part thereof, by for example in one embodiment expression either in the cytosol or in an organelle such as a plastid or mitochondria or both, preferably in a plastid, or in another embodiment non-targeted or targeted. The nucleotide sequences determined from the cloning of the present protein-according-to-the-invention-encoding gene allows for the generation of probes and primers designed for use in identifying and/or cloning its homologues from other cell types and organisms. The probe/primer typically comprises a substantially purified oligonucleotide. The oligonucleotide typically comprises a region of nucleotide sequence that hybridizes under stringent conditions to at least about 12, 15 preferably about 20 or 25, more preferably about 40, 50 or 75 consecutive nucleotides of a sense strand of one of the sequences set forth, e.g., in the respective line in Table I, application no. 20, column 5 or 8, preferably the coding region thereof, or a homolog or a fragment thereof, an anti-sense sequence of one of the sequences, e.g., set forth in the respective line in Table I, application no. 20, columns 5 or 8, preferably the coding region thereof, or a homolog or a fragment thereof or naturally occurring mutants thereof. Primers based on a nucleic acid molecule of invention can be used in PCR reactions to clone homologs of the polypeptide of the invention or of the polypeptide used in the process of the invention, e.g. as the primers described in the examples of the present invention, e.g. as shown in the examples. A PCR with the primers shown in the respective line in Table III, column 8 will result in a fragment of the gene product as shown in Table II, application no. 20, column 5.

[102882] Primer sets are interchangeable. The person skilled in the art knows how to design and combine said primers to result in the desired product, e.g. in a full length clone or a partial sequence. Probes based on the sequences of the nucleic acid molecule of the invention or used in the process of the present invention can be used to detect transcripts or genomic sequences encoding the same or homologous proteins. The probe can further comprise a label group attached thereto, e.g. the label group can be a radioisotope, a fluorescent compound, an enzyme, or an enzyme co-factor. Such probes can be used as a part of a genomic marker test kit for identifying cells which express a polypeptide of the invention or used in the process of the present invention, such as by measuring a level of an encoding nucleic acid molecule in a sample of cells, e.g. detecting mRNA levels or determining, whether a genomic gene comprising the sequence of the polynucleotide of the invention or used in the processes of the present invention has been mutated or deleted.

[102883] As the expression of a respective nucleic acids of the invention is related to the synthesis of the respective fine chemical hentriacontane its function as a probe extends to the detection of microorganisms, plant tissues, plants, plant variets, plant ecotypes or plant genera with varying capability or potential for synthesis of the respective fine chemical hentriacontane. Therefore in one embodiment the present invention relates to a method for analyzing the capability or potential of a plant tissue, a plant, a plant variety or plant ecotype to produce the fine chemical hentriacontane by using the nucleic acid of the invention or parts thereof as a probe to detect the amount of the nucleic acid of the invention in the non-human organism or a part thereof in comparison to another non-human organism.

[102884] The nucleic acid molecule of the invention encodes a polypeptide or portion thereof which includes an amino acid sequence which is sufficiently homologous to the amino acid sequence shown in respective line in Table II, application no. 20, columns 5 or 8 such that the protein or portion thereof maintains the ability to confer the production or the increased production of the respective fine chemical hentriacontane as compared to a corresponding, e.g. non-transformed, wild type non-human organism, like a microorganism or a plant cell, plant or part thereof, in particular increasing the activity as mentioned above or as described in the examples in microorganisms or plants.

[102885] As used herein, the language “sufficiently homologous” refers to proteins or portions thereof which have amino acid sequences which include a minimum number of identical or equivalent amino acids (e.g. an amino acid which has a similar side chain as an amino acid in one of the sequences of the polypeptide of the present invention) to an amino acid sequence shown in the respective line in Table II, application no. 20, columns 5 or 8 such that the protein or portion thereof is able to confer the production or the increased production of the respective fine chemical hentriacontane as compared to a corresponding, e.g. non-transformed, wild type non-human organism, like a microorganism or a plant cell, plant or part thereof. For example having the activity of a protein as shown in the respective line in Table II, application no. 20, column 3 and as described herein.

[102886] In an embodiment of the present invention, the nucleic acid molecule of the present invention comprises a nucleic acid molecule that encodes a portion of the protein of the present invention. The protein is at least about 30%, 35%, 40%, 45% 50%, 55%, 60%, 65%, 70%, 75%, 80%, 85%, 90%, 91%, 92%, 93%, 94%, 95%, 96%, 97%, 98%, 99%, 99.5% or more homologous to an entire amino acid sequence shown in the respective line of Table II, application no. 20, column 5 or 8 and has the above-mentioned activity, e.g. conferring the production or the increased production of the respective fine chemical hentriacontane as compared to a corresponding, e.g. non-transformed, wild type non-human organism, like a microorganism or a plant cell, plant or part thereof by, for example in a embodiment expression either in the cytosol or in an organelle such as a plastid or mitochondria or both, preferably in a plastid, or in another embodiment by targeted or non-targeted expression.

[102887] for the disclosure of this paragraph see [0338.1.7.7] above

[102888] for the disclosure of this paragraph see [0339.1.7.7] above

[102889] The invention further relates to nucleic acid molecules or methods using said nucleic acid molecules that differ from one of the nucleotide sequences shown in the respective line in Table I, application no. 20, columns 5 or 8, preferably the coding region thereof, or fragments or homologs thereof, due to degeneracy of the genetic code but encode a polypeptide of the present invention, in particular a polypeptide having the above-mentioned activity, e.g. as those polypeptides depicted in the respective line in Table II, application no. 20, columns 5 or 8, fragments or homologs thereof. Advantageously, the nucleic acid molecule of the invention comprises, or in an other embodiment has, a nucleotide sequence encoding a protein comprising, or in an other embodiment having, an amino acid sequence shown in the respective line in Table II, application no. 20, columns 5 or 8, fragments or homologs thereof. In a further embodiment, the nucleic acid molecule of the invention encodes a full length protein which is substantially homologous to an amino acid sequence shown in the respective line in Table II, application no. 20, columns 5 or 8, or homologs thereof. However, in an embodiment, the nucleic acid molecule of the present invention does not consist of the sequence shown in the respective line in Table I, preferably Table IA, application no. 20, columns 5 or 8, preferably the coding region thereof, but the functional homologs thereof.

[102890] [0341.1.7.20] to [0343.1.7.20] for the disclosure of these paragraphs see [0341.1.7.7] to [0343.1.7.7] above

[102891] Accordingly, in another embodiment, a nucleic acid molecule of the invention is at least 15, 20, 25 or 30 nucleotides in length. Preferably, it hybridizes under stringent conditions to a nucleic acid molecule comprising a nucleotide sequence of the nucleic acid molecule of the present invention or used in the process of the present invention, e.g. comprising the sequence shown in the respective line in Table I, application no. 20, columns 5 or 8, preferably the coding region thereof. In another embodiment the nucleic acid molecule is preferably at least 20, 30, 50, 100, 250 or more nucleotides in length.

[102892] for the disclosure of this paragraph see [0345.1.7.7] above

[102893] Preferably, a nucleic acid molecule of the invention that hybridizes under stringent conditions to a sequence shown in the respective line in Table I, application no. 20, columns 5 or 8, preferably the coding region thereof, corresponds to a naturally-occurring nucleic acid molecule of the invention. As used herein, a “naturally-occurring” nucleic acid molecule refers to a RNA or DNA molecule having a nucleotide sequence that occurs in nature (e.g. encodes a natural protein). Preferably, the nucleic acid molecule encodes a natural protein having above-mentioned activity, e.g. conferring the production or the increased production of the respective fine chemical hentriacontane as compared to a corresponding, e.g. non-transformed, wild type non-human organism, like a microorganism or a plant cell, plant or part thereof after increasing the expression or activity thereof or the activity of a protein of the invention or used in the process of the invention, in an embodiment for example expression either in the cytosol or in an organelle such as a plastid or mitochondria, preferably in plastids, or, in another embodiment by targeted or non-targeted expression.

[102894] for the disclosure of this paragraph see [0347.1.7.7] above

[102895] For example, nucleotide substitutions leading to amino acid substitutions at “non-essential” amino acid residues can be made in a sequence of the nucleic acid molecule of the invention or used in the process of the invention, e.g. shown in the respective line in Table I, application no. 20, columns 5 or 8, preferably the coding region thereof, or fragments or homologs thereof.

[102896] for the disclosure of this paragraph see [0349.1.7.7] above

[102897] for the disclosure of this paragraph see [0350.1.7.7] above

[102898] Accordingly, the invention relates to nucleic acid molecules encoding a polypeptide having above-mentioned activity, in a non-human organisms or parts thereof by for example expression either in the cytosol or in an organelle such as a plastid or mitochondria or both, preferably in plastids, that contain changes in amino acid residues that are not essential for said activity. Such polypeptides differ in amino acid sequence from a sequence depicted in the respective line in Table II, especially Table IIA, application no. 20, columns 5 or 8, but retain said activity described herein. The nucleic acid molecule can comprise a nucleotide sequence encoding a polypeptide, wherein the polypeptide comprises an amino acid sequence at least about 50% identical to an amino acid sequence shown in the respective line in Table II, application no. 20, columns 5 or 8, and is capable of conferring the production or the increased production of the respective fine chemical hentriacontane as compared to a corresponding, e.g. non-transformed, wild type non-human organism, like a microorganism or a plant cell, plant or part thereof, after increasing its activity for example in an embodiment by expression either in the cytosol or in an organelle such as a plastid or mitochondria or both, preferably in plastids, or, in another embodiment by targeted or non-targeted expression. Preferably, the protein encoded by the nucleic acid molecule is at least about 60%, 70%, 80%, 90%, 95%, 96%, 97%, 98%, 99% or 99.5% identical to the sequence shown in the respective line in Table II, application no. 20, columns 5 or 8.

[102899] [0352.1.7.20] to [0357.1.7.20] for the disclosure of these paragraphs see [0352.1.7.7] to [0357.1.7.7] above

[102900] Functional equivalents of the nucleic acid molecules according to the present invention and/or used in the process according to the present invention represent an embodiment of homologs. Functional equivalents derived from the nucleic acid molecules as shown in the respective line in Table I, application no. 20, columns 5 or 8, preferably the coding region thereof, according to the invention by substitution, insertion or deletion have at least 30%, 35%, 40%, 45%, 50%, 55%, 60%, 65%, 70%, 75%, 80%, 85%, 90%, 91%, 92%, 93%, 94%, 95%, 96%, 97%, 98%, 99% or 99.5% homology with one of the nucleic acid molecules as shown in the respective line in Table I, application no. 20, columns 5 or 8, preferably the coding region thereof, according to the invention and encode polypeptides having essentially the same properties as the polypeptide as shown in the respective line in Table II, application no. 20, columns 5 or 8.

[102901] Functional equivalents derived from one of the polypeptides as shown in the respective line in Table II, application no. 20, columns 5 or 8 according to the invention by substitution, insertion or deletion have at least 30%, 35%, 40%, 45%, 50%, 55%, 60%, 65%, 70%, 75%, 80%, 85%, 90%, 91%, 92%, 93%, 94%, 95%, 96%, 97%, 98%, 99% or 99.5% homology with one of the polypeptides as shown in the respective line in Table II, application no. 20, columns 5 or 8 according to the invention and having essentially the same properties as the polypeptide as shown in the respective line in Table II, application no. 20, columns 5 or 8.

[102902] for the disclosure of this paragraph see [0359.1.7.7] above

[102903] A nucleic acid molecule encoding a homolog to a polypeptide depicted in the respective line in Table II, application no. 20, columns 5 or 8 can be created by introducing one or more nucleotide substitutions, additions or deletions into the nucleic acid molecule of the present invention, in particular of Table I, application no. 20, columns 5 or 8, in the respective line, such that one or more amino acid substitutions, additions or deletions are introduced into the encoded protein. Mutations can be introduced into the nucleic acid molecules as depicted in the respective line in Table I, application no. 20, columns 5 or 8, preferably the coding region thereof, by standard techniques, such as site-directed mutagenesis, PCR-mediated mutagenesis or other methods known to the person skilled in the art.

[102904] [0361.1.7.20] to [0363.1.7.20] for the disclosure of these paragraphs see [0361.1.7.7] to [0363.1.7.7] above

[102905] Homologues of the nucleic acid sequences used, with the sequences shown in the respective line in Table I, application no. 20, columns 5 or 8, preferably the coding region thereof, comprise also allelic variants with at least approximately 30%, 35%, 40%, 45%, 50%, 55%, 60%, 65%, 70%, 75%, 80%, 85%, 90%, 91%, 92%, 93%, 94% 95%. 96%, 97%, 98%, 99%, 99.5% or more % homology with one of the nucleotide sequences shown or the above-mentioned derived nucleic acid sequences or their homologues or derivatives or parts of these. Allelic variants encompass in particular functional variants which can be obtained by deletion, insertion or substitution of nucleotides from the sequences shown in the respective line, preferably in Table I, columns 5 or 8, preferably the coding region thereof, or from the derived nucleic acid sequences, the intention being, however, that the enzymatic activity or the biological activity of the resulting proteins synthesized is advantageously retained or increased.

[102906] In one embodiment of the present invention, the nucleic acid molecule of the invention or used in the process of the invention comprises the sequences shown in the respective line in any of the Table I, application no. 20, columns 5 or 8, preferably the coding region thereof, fragments or homologs thereof. It is preferred that the nucleic acid molecule comprises as little as possible other nucleotides not shown in the respective line in any one of Table I, application no. 20, columns 5 or 8, preferably the coding region thereof, fragments or homologs thereof. In one embodiment, the nucleic acid molecule comprises less than 500, 400, 300, 200, 100, 90, 80, 70, 60, 50 or 40 further nucleotides. In a further embodiment, the nucleic acid molecule comprises less than 30, 20 or 10 further nucleotides. In one embodiment, the nucleic acid molecule used in the process of the invention is identical to the sequences shown in the respective line in Table I, application no. 20, columns 5 or 8, preferably the coding region thereof.

[102907] Also preferred is that the nucleic acid molecule used in the process of the invention encodes a polypeptide comprising the sequence shown in the respective line in Table II, application no. 20, columns 5 or 8, fragments or homologs thereof. In one embodiment, the nucleic acid molecule encodes less than 150, 130, 100, 80, 60, 50, 40 or 30 further amino acids. In a further embodiment, the encoded polypeptide comprises less than 20, 15, 10, 9, 8, 7, 6 or 5 further amino acids. In one embodiment used in the inventive process, the encoded polypeptide is identical to the sequences shown in the respective line in Table II, application no. 20, columns 5 or 8.

[102908] In one embodiment, the nucleic acid molecule of the invention or used in the process encodes a polypeptide comprising the sequence shown in the respective line in Table II, application no. 20, columns 5 or 8, or fragments or homologs thereof, and comprises less than 100 further nucleotides. In a further embodiment, said nucleic acid molecule comprises less than 30 further nucleotides. In one embodiment, the nucleic acid molecule used in the process is identical to a coding sequence of the sequences shown in the respective line in Table I, application no. 20, columns 5 or 8.

[102909] Polypeptides (=proteins), which still have the essential biological or enzymatic activity of the polypeptide of the present invention conferring the production or the increased production of the respective fine chemical hentriacontane as compared to a corresponding, e.g. non-transformed, wild type non-human organism, like a microorganism or a plant cell, plant or part thereof, i.e. whose activity is essentially not reduced, are polypeptides with at least 10%, 20%, 30%, 40%, 50%, 60%, 70%, 80%, 90%, 95% or more of the wild type biological activity or enzymatic activity, advantageously, the activity is essentially not reduced in comparison with the activity of a polypeptide shown in the respective line in Table II, application no. 20, columns 5 or 8 expressed under identical conditions.

[102910] Homologues of nucleic acid molecules shown in the respective line in Table I, application no. 20, columns 5 or 8, preferably the coding region thereof, or fragments thereof, or of the derived sequences shown in the respective line in Table II, application no. 20, columns 5 or 8, or fragments thereof, also mean truncated sequences, cDNA, single-stranded DNA or RNA of the coding and noncoding DNA sequence. Homologues of said sequences are also understood as meaning derivatives, which comprise noncoding regions such as, for example, UTRs, introns, terminators, enhancers or promoter variants. The promoters upstream of the nucleotide sequences stated can be modified by one or more nucleotide substitution(s), insertion(s) and/or deletion(s) without, however, interfering with the functionality or activity either of the promoters, the open reading frame (=ORF) or with the 3′-regulatory region such as terminators or other 3′-regulatory regions, which are far away from the ORF. It is furthermore possible that the activity of the promoters is increased by modification of their sequence, or that they are replaced completely by more active promoters, even promoters from heterologous organisms.

[102911] Appropriate promoters are known to the person skilled in the art and are mentioned herein below.

[102912] [0370.1.7.20] to [0379.1.7.20] for the disclosure of these paragraphs see [0370.1.7.7] to [0379.1.7.7] above

[102913] Moreover, a native polypeptide conferring the increase of the respective fine chemical hentriacontane in a non-human organism or a part thereof can be isolated from cells (e.g., endothelial cells), for example using the antibody of the present invention as described below, in particular, an antibody against proteins having 3-deoxy-7-phosphoheptulonate synthase, acid shock protein, amino-acid acetyltransferase, assembly protein for periplasmic nitrate reductase, At2g45420-protein, At5g43630-protein, ATP-dependent RNA helicase, b0833-protein, b1259-protein, b1445-protein, b1670-protein, b1930-protein, b2399-protein, b2653-protein, b3644-protein, cell division protein, cyclin D, cysteine synthase A, dihydroxyacetone kinase, electron transport complex protein, ethanolamine utilization protein, exonuclease subunit, fumarylacetoacetate hydrolase, GDP-mannose 4,6-dehydratase, inner membrane protein, ion-transport protein, L-asparaginase, MADS box protein transcription factor, mechanosensitive ion channel, metal-dependent hydrolase, methionine permease, O-antigen chain length determinant, ornithine decarboxylase, orotidine-5′-phosphate decarboxylase, peptide chain release factor, phospho-2-dehydro-3-deoxyheptonate aldolase, phosphoadenosine phosphosulfate reductase, phosphoglycolate phosphatase, pyrimidine-specific ribonucleoside hydrolase, pyruvate kinase, RNA-binding protein, S-adenosyl-L-methionine-dependent methyltransferase, serine protease, short-chain alcohol dehydrogenase family, sigma-54 dependent response regulator, spermidine synthase, sugar transport system permease protein, transcription factor, transcriptional regulator, YFL0190-protein, YHL039W-protein, YHR022C-A-protein, YJL127W-A-protein, ylr157c-protein, ynl321w-protein, ypr170c-protein, or YPR172W-protein activity, respectively, or an antibody against polypeptides as shown in the respective line in Table II, application no. 20, columns 5 or 8, or fragments or homologs thereof which can be produced by standard techniques utilizing the polypeptid of the present invention or fragment thereof, i.e., the polypeptide of this invention (FCRP). Preferred are monoclonal antibodies.

[102914] for the disclosure of this paragraph see [0381.1.7.7] above

[102915] In one embodiment, the present invention relates to a polypeptide as depicted in the respective line in Table II, especially in Table IIA or especially in Table IIB, application no. 20, columns 5 or 8, or fragment or homolog thereof or as coded by the nucleic acid molecule shown in the respective line in Table I, especially Table IA or especially Table IB, application no. 20, columns 5 or 8, preferably the coding region thereof, or fragment or homolog thereof.

[102916] In an embodiment, the present invention relates to a polypeptide comprising or consisting of a consensus sequence shown in the respective line in Table IV, application no. 20, column 8 or at least one polypeptide motif shown in the respective line in Table IV, application no. 20, column 8.

[102917] In an embodiment thereof, the present invention relates to a polypeptide comprising or consisting of a consensus sequence shown in the respective line in Table IV, application no. 20, column 8 or comprising at least one polypeptide motif shown in the respective line in Table IV, application no. 20, column 8, whereby not more than 20, 15, 10, 9, 8, 7, 6, 5, 4, 3, 2, or 1, or 0 of the amino acids can be replaced by any amino acid.

[102918] In another embodiment thereof, the present invention relates to a polypeptide comprising or consisting of a consensus sequence shown in the respective line in Table IV, application no. 20, column 8 or comprising at least one polypeptide motif shown in the respective line in Table IV, application no. 20, column 8, whereby not more than 15%, 10%, 5%, 4%, 3%, 2% or1% or 0% of the amino acids defined as distinct specific amino acids are/is replaced by another amino acid.

[102919] In another embodiment thereof, the present invention relates to a polypeptide comprising or consisting of a consensus sequence shown in the respective line in Table IV, application no. 20, column 8 or comprising at least one polypeptide motif shown in the respective line in Table IV, application no. 20, column 8, whereby not more than 20, 15, 10, 9, 8, 7, 6, 5, 4, 3, 2, or 1, or 0 amino acids are inserted into the consensus sequence or polypeptide motif.

[102920] In an embodiment of the present invention, the polypeptide of the present invention comprises or consists of a consensus sequence or at least one polypeptide motif shown in the respective line in Table IV, application no. 20, column 8, whereby said polypeptide distinguishes over the sequence depicted in the respective line in Table II, application no. 20, columns 5 or 8 by one or more amino acids. In one embodiment, said polypeptide of the invention distinguishes over the sequence shown in the respective line in Table II, application no. 20, columns 5 and 8 by more than 5, 6, 7, 8 or 9 amino acids, preferably by more than 10, 15, 20, 25 or 30 amino acids, even more preferred are more than 40, 50, or 60 amino acids and, preferably, the sequence of the polypeptide of the invention distinguishes from the sequence shown in the respective line in Table II, application no. 20, columns 5 and 8 by not more than 80%, 70%, 60%, 50%, 40%, 30%, 20%, 10%, 5%, 4%, 3%, 2%, 1% or 0.5%. In another embodiment, said polypeptide of the invention does not consist of the sequence shown in the respective line in Table II, application no. 20, columns 5 and 8.

[102921] In an embodiment, the invention relates to a polypeptide conferring an increase in the respective fine chemical hentriacontane in a non-human organism, especially a microorganism or a plant, or a part thereof, being encoded by the nucleic acid molecule of the invention or used in the process of the invention and having a sequence which distinguishes over the sequence as shown in the respective line in Table II, application no. 20, columns 5 or 8 by one or more amino acids (but not exceeding 5%, preferably 4%, 3%, 2%, 1%, 0.5%, 0.2% or 0.1%). In an embodiment, said polypeptide of the invention does not comprise or consist of the sequence shown in the respective line in Table II, application no. 20, columns 5 or 8. In an embodiment, said polypeptide of the present invention is less than 100%, 99.999%, 99.99%, 99.9% or 99% identical. In one embodiment, said polypeptide which differs at least in one or more amino acids (but not exceeding 5%, preferably 4%, 3%, 2%, 1%, 0.5%, 0.2% or 0.1%) from the polypeptide shown in the respective line in Table II, application no. 20, columns 5 and 8 does not comprise a protein of the sequence shown in the respective line in Table II A and/or II B, application no. 20, columns 5 or 8.

[102922] In an embodiment, the present invention relates to a polypeptide having the activity of the protein as shown in the respective line in Table II, application no. 20, column 3, which distinguishes over the sequence depicted in the respective line in Table II, application no. 20, columns 5 or 8 by one or more amino acids, preferably by more than 5, 6, 7, 8 or 9 amino acids, preferably by more than 10, 15, 20, 25 or 30 amino acids, even more preferred are more than 40, 50, or 60 amino acids and, preferably, the sequence of the polypeptide of the invention distinguishes from the sequence shown in the respective line in Table II, application no. 20, columns 5 and 8 by not more than 80%, 70%, 60%, 50%, 40%, 30%, 20%, 10%, 5%, 4%, 3%, 2%, 1% or 0.5%.

[102923] In another embodiment the polypeptide of the invention takes the form of a preprotein consisting of a plastidial or mitochondrial transit peptide joint to a polypeptide having the activity of the protein as shown in Table II, column 3, from which the transit peptide is preferably cleaved off upon transport of the preprotein into the organelle for example into the plastid or mitochondrion. In another embodiment the polypeptide of the invention takes not the form of a preprotein.

[102924] for the disclosure of this paragraph see [0390.1.7.7] above

[102925] for the disclosure of this paragraph see [0391.1.7.7] above

[102926] A polypeptide of the invention can participate in the process of the present invention. The polypeptide or a portion thereof comprises preferably an amino acid sequence, which is sufficiently homologous to an amino acid sequence shown in the respective line in Table II A and/or II B, application no. 20, columns 5 or 8.

[102927] Further, the polypeptide can have an amino acid sequence which is encoded by a nucleotide sequence which hybridizes, preferably hybridizes under stringent conditions as described above, to a nucleotide sequence of the nucleic acid molecule of the present invention. Accordingly, the polypeptide has an amino acid sequence which is encoded by a nucleotide sequence that is at least about 35%, 40%, 45%, 50%, 55%, 60%, 65%, 70%, 75%, 80%, 85%, 90%, 91%, 92%, 93%, 94%, 95%, 96%, 97%, 98%, 99%, 99.5% or more homologous to one of the amino acid sequences as shown in the respective line in Table II A and/or II B, application no. 20, columns 5 or 8, or fragments thereof. The preferred polypeptide of the present invention preferably possesses at least one of the activities according to the invention and described herein. A preferred polypeptide of the present invention includes an amino acid sequence encoded by a nucleotide sequence which hybridizes, preferably hybridizes under stringent conditions, to a nucleotide sequence shown in the respective line in Table I A and/or I B, application no. 20, columns 5 or 8, preferably the coding region thereof, or fragments thereto or which is homologous thereto, as defined above

[102928] The polypeptide of the present invention can vary from the sequences shown in the respective line in Table II A and/or II B, application no. 20, columns 5 or 8 in amino acid sequence due to natural variation or mutagenesis, as described in detail herein. Accordingly, the polypeptide comprise an amino acid sequence which is at least about 35%, 40%, 45%, 50%, 55%, 60%, 65%, 70%, 75%, 80%, 85% or 90, 91%, 92%, 93%, 94%, 95%, 96%, 97%, 98%, 99%, 99.5% or more homologous to an entire amino acid sequence shown in the respective line in Table II A and/or II B, application no. 20, columns 5 or 8.

[102929] Biologically active portions of a polypeptide of the present invention include peptides comprising amino acid sequences derived from the amino acid sequence of the polypeptide of the present invention or used in the process of the present invention, e.g., the amino acid sequence shown in the respective line in Table II, application no. 20, columns 5 or 8 or the amino acid sequence of a protein homologous thereto, which include fewer amino acids than a full length polypeptide of the present invention or used in the process of the present invention or the full length protein which is homologous to a polypeptide of the present invention or used in the process of the present invention depicted herein, and exhibit at least one activity of a polypeptide of the present invention or used in the process of the present invention.

[102930] for the disclosure of this paragraph see [0396.1.7.7] above

[102931] Manipulation of the nucleic acid molecule of the invention may result in the production of a protein having differences from the protein as shown in the respective line in Table II, application no. 20, column 5 or 8. Differences shall mean at least one amino acid different from the sequences as shown in the respective line in Table II, application no. 20, column 5 or 8, preferably at least 2, 3, 4, 5, 6, 7, 8, 9 or 10 amino acids (especially but not exceeding 0.1%, preferably 0.2%, 0.5%, 1%, 2%, 3% 4% or 5%), more preferably at least 15, 20, 25, 30, 35, 40, 45 or 50 amino acids (especially but not exceeding 0.5%, preferably 1%, 2%, 3% 4%, 5%, 10% or 25%) different from the sequences as shown in the respective line in Table II, application no. 20, column 5 or 8. These proteins may be improved in efficiency or activity, or may be more stable and therefore present in greater numbers in the cell as compared to the wild-type cell.

[102932] Any mutagenesis strategies for the polypeptide of the present invention or the polypeptide used in the process of the present invention to result in increasing said activity are not meant to be limiting; variations on these strategies will be readily apparent to one skilled in the art. Using such strategies, and incorporating the mechanisms disclosed herein, the nucleic acid molecule and polypeptide of the invention may be utilized to generate algae, ciliates, fungi, other microorganisms like C. glutamicum or plants or parts thereof, expressing proteins as shown in the respective line in Table II, application no. 20, column 5 or 8, or mutated proteins thereof. The nucleic acid molecules and polypeptide molecules of the invention are expressed such that the yield, production, and/or efficiency of production of a desired compound is improved.

[102933] [0399.1.7.20] to [0401.1.7.20] for the disclosure of these paragraphs see [0399.1.7.7] to [0401.1.7.7] above

[102934] In one embodiment, a protein (=polypeptide) as shown in the respective line in Table II, application no. 20, column 5 or 8 refers to a polypeptide having an amino acid sequence corresponding to the polypeptide of the invention, especially to a polypeptide as shown in Table II, application no. 20, columns 5 or 8 or homologs thereof, or used in the process of the invention, whereas a “non- inventive protein or polypeptide” or “other polypeptide” refers to a polypeptide having an amino acid sequence corresponding to a protein which is not substantially homologous to a polypeptide of the invention, preferably which is not substantially homologous to a polypeptide or protein as shown in the respective line in Table II, application no. 20, column 5 or 8 or homologs thereof, e.g., a protein which does not confer the activity described herein and which is derived from the same or a different organism.

[102935] [0403.1.7.20] to [0409.1.7.20] for the disclosure of these paragraphs see [0403.1.7.7] to [0409.1.7.7] above

[102936] As the nucleic acid molecules of the invention and/or the expression thereof is related to the synthesis of the respective fine chemical hentriacontane its function as a probe extends to the detection of microorganisms, plant tissues, plants, plant variets, plant ecotypes or plant genera with varying, advantageously increased, capability or potential for synthesis of the respective fine chemical hentriacontane. Therefore in one embodiment the present invention relates to a method for analyzing the capability or potential of a plant tissue, a plant, a plant variety or ecotype to produce the respective fine chemical hentriacontane by using the respective antibody of the invention as a probe to detect the amount of the polypeptide encoded by said nucleic acid molecule of the invention in a non-human organism in comparison to another organism.

[102937] Therefore in one embodiment the invention relates to a method to probe a non-human organism for its capability for the production of the respective fine chemical comprising the steps of
[102938] a) analyzing the sequence and/or the expression of the respective nucleic acid molecule of the invention in least two non-human organisms which differ in the capability to produce the respective fine chemical;
[102939] b) associate the different sequence and/or expression level of the nucleic acid molecules of the invention with their different capability to produce the respective fine chemical;
[102940] c) analyze the sequence and/or the expression of the nucleic acid molecule of the invention in at least a third non-human organism;
[102941] d) predict the capability of the at least third organism to produce the respective fine chemical based by comparing the sequence and/or expression of the nucleic acid of the invention to the sequences and/or expression levels of the nucleic acid molecule of the invention of the at least two organisms analyzed in step a.

[102942] [0411.1.7.20] to [0430.1.7.20] for the disclosure of these paragraphs see [0411.1.7.7] to [0430.1.7.7] above

[102943] Accordingly the present invention relates to any cell transgenic for any nucleic acid characterized as part of the invention, e.g. conferring the increase of the respective fine chemical hentriacontane in a cell or a non-human organism or a part thereof, e.g. the nucleic acid molecule of the invention, the nucleic acid construct of the invention, the vector of the invention, the expression cassette according to the invention, or a nucleic acid molecule encoding the polypeptide of the invention, e.g. encoding a polypeptide having an activity as the protein as shown in the respective line in Table II, application no. 20, column 3. Due to the above-mentioned activity the respective fine chemical hentriacontane content in a cell or a non-human organism is increased. For example, due to modulation or manipulation, the cellular activity is increased, in a preferred embodiment in organelles such as plastids or mitochondria, e.g. due to an increased expression or specific activity or specific targeting of the subject matters of the invention in a cell or a non-human organism or a part thereof especially in organelles such as plastids or mitochondria, or in another embodiment in the cytosol. Transgenic for a polypeptide having a protein or a protein activity means herein that due to modulation or manipulation of the genome, the activity of protein as shown in the respective line in Table II, application no. 20, column 3 or a protein as shown in the respective line in Table II, application no. 20, column alike activity is increased in the cell or non-human organism or part thereof, especially in organelles such as plastids or mitochondria, or especially in the cytosol. Examples are described above in context with the process of the invention.

[102944] for the disclosure of this paragraph see [0432.1.7.7] above

[102945] A naturally occurring expression cassette—for example the naturally occurring combination of the promoter of the gene encoding a protein as shown in the respective line in Table II, application no. 20, column 5 or 8, preferably the coding region thereof, or fragments or homologs thereof with the corresponding encoding gene—becomes a transgenic expression cassette when it is modified by non-natural, synthetic “artificial” methods such as, for example, mutagenesis. Such methods have been described (U.S. Pat. No. 5,565,350; WO 00/15815; also see above).

[102946] for the disclosure of this paragraph see [0434.1.7.7] above

[102947] for the disclosure of this paragraph see [0435.1.7.7] above

[102948] Transgenic plants comprising the respective fine chemical(s) synthesized in the process according to the invention can be marketed directly without isolation of the fine chemical synthesized. In the process according to the invention, plants are understood as meaning all plant parts, plant organs such as leaf, stalk, root, tubers or seeds or propagation material or harvested material or the intact plant. In this context, the seed encompasses all parts of the seed such as the seed coats, epidermal cells, seed cells, endosperm or embryonic tissue. The fine chemical produced in the process according to the invention may, however, also be isolated from the plant. In case of hentriacontane this can be in free form or bound to proteins. Fine chemical(s) produced by this process can be harvested by harvesting the non-human organisms either from the culture in which they grow or from the field. For example, this can be done via squeezing, grinding and/or extraction, salt precipitation and/or ion-exchange chromatography of the plant parts, preferably the plant seeds, plant fruits, plant tubers and the like.

[102949] [0437.1.7.20] to [0447.1.7.20] for the disclosure of these paragraphs see [0437.1.7.7] to [0447.1.7.7] above

[102950] The identity and purity of the isolated compound(s) can be determined by prior art techniques. These include high performance liquid chromatography (HPLC), spectroscopic methods, mass spectrometry (MS), staining methods, thin-layer chromatography, NIRS, enzyme assay or microbiological assays. These analytical methods are summarized for example in: Patek et al., Appl. Environ. Microbiol. 60, 133 (1994), Malakhova et al., Biotekhnologiya 11, 27 (1996); Schmidt et al., Bioprocess Engineer. 19, 67 (1998), Ullmann's Encyclopedia of Industrial Chemistry (1996) Vol. A27, VCH, Weinheim, pp. 89-90, pp. 521-540, pp. 540-547, pp. 559566, 575-581 and pp. 581-587, Michal G., “Biochemical Pathways: An Atlas of Biochemistry and Molecular Biology”, John Wiley and Sons (1999); Fallon A. et al. “Applications of HPLC in Biochemistry” in “Laboratory Techniques in Biochemistry and Molecular Biology”, Vol. 17 (1987).

[102951] The fine chemical obtained in the process are suitable as starting material for the synthesis of further products of value.

[102952] Accordingly, the present invention relates a method for the production of a pharmaceuticals, food stuff, animal feeds, nutrients or cosmetics comprising the steps of the process according to the invention, including the isolation of the fine chemical produced or a composition produced comprising the fine chemical, and, if desired, formulating the product with a pharmaceutical acceptable carrier or formulating the product in a form acceptable for an application in agriculture or formulating the product in a form acceptable for an application as food stuff, animal feed, nutrient or cosmetic. A further embodiment according to the invention is the use of the fine chemical produced in the process or of the transgenic non-human organisms in animal feeds, foodstuffs, medicines, food supplements, cosmetics or pharmaceuticals.

[102953] A further embodiment according to the invention is the use of the fine chemical long chain nalkanes (C20 to C40) or derivates like alcohols and acid of alkanes, optionally unsaturated as well as break down and/or cracking products of long chain alkanes, preferably long chain alkanes of C25 to C35, more preferably hentriacontane or waxes or components thereof produced in the process or of the transgenic non-human organisms as replacement for hydrocarbons from fossil sources.

[102954] [0450.1.7.20] to [0452.1.7.20] for the disclosure of these paragraphs see [0450.1.7.7] to [0452.1.7.7] above

[102955] Further in another embodiment, the present invention relates to the use of the nucleic acid molecule of the invention or used in the method of the invention alone or in combination with other genes of the respective fine chemical synthesis for example of the waxes and/or long chain alkanes biosynthesis, the polypeptide of the invention or used in the method of the invention, the nucleic acid construct of the invention, the expression cassette of the invention, the vector of the invention, the plant or plant tissue or the host cell of the invention, for the production of plant resistant to a herbicide inhibiting eventually the production of the fine chemical.

[102956] for the disclosure of this paragraph see [0454.1.7.7] above

[102957] In one embodiment, the present invention relates to a method for the identification of a gene product conferring the production of or an increase in the fine chemical production in a non-human cell, comprising the following steps:
[102958] (a) contacting, e.g. hybridizing, a, some or all nucleic acid molecules of a sample, e.g. cells, tissues, plants or microorganisms or a nucleic acid library, which can contain a candidate gene encoding a gene product conferring the production of or an increase in the fine chemical after expression, with the nucleic acid molecule of the present invention as shown in the respective line in column 5 or 8 of Table I A or B of application no. 20, preferably the coding region thereof, or a fragment or homolog thereof;
[102959] (b) identifying the nucleic acid molecules, which hybridize under relaxed stringent conditions with the nucleic acid molecule of the present invention in particular to the nucleic acid molecule sequence shown in the respective line in Table I, application no. 20, columns 5 or 8, preferably the coding region thereof, of a fragment or a homolog thereof, preferably in Table I B, application no. 20, columns 5 or 8, preferably the coding region thereof, of a fragment or a homolog thereof, and, optionally, isolating the full length cDNA clone or complete genomic clone;
[102960] (c) introducing the candidate nucleic acid molecules or a fragment thereof in host cells, preferably in a plant cell or a microorganism, appropriate for producing the fine chemical;
[102961] (d) expressing the identified nucleic acid molecules in the host cells for which the production of or the increased production of the fine chemical is desired;
[102962] (e) assaying the fine chemical level in the non-human host cells; and
[102963] (f) identifying the nucleic acid molecule and/or its gene product which expression confers the production of or an increase in the fine chemical level in the non-human host cell after expression compared to the wild type.

[102964] for the disclosure of this paragraph see [0456.1.7.7] above

[102965] In another embodiment, the present invention relates to a method for the identification of a gene product conferring the production of or an increase in the fine chemical production in a cell, comprising the following steps:
[102966] (a) identifying a nucleic acid molecule of a non-human organism, which is at least 20%, 25%, 30%, 35%, 40%, 50%, 60%, 70%, 80%, 90%, 95%, 96%, 97%, 98%, 99%, 99.5% or more homolog to the nucleic acid molecule encoding a polypeptide comprising the polypeptide molecule as shown in the respective line in column 5 or 8 of Table II, application no. 20, or comprising a consensus sequence or a polypeptide motif as shown in the respective line in column 8 of Table IV, application no. 20, or being encoded by a nucleic acid molecule comprising a polynucleotide as shown in the respective line in column 5 or 8 of Table I, application no. 20, preferably the coding region thereof, or a homologue thereof as described herein, for example via homology search in a data bank;
[102967] (b) introducing the candidate nucleic acid molecule in non-human host cells, preferably in a plant cell or a microorganism, appropriate for producing the fine chemical;
[102968] (c) expressing the identified nucleic acid molecule in the non-human host cells;
[102969] (d) assaying the fine chemical level in the non-human host cells; and
[102970] (e) identifying the nucleic acid molecule and its gene product which expression confers the production of or an increase in the fine chemical level in the non-human host cell after expression compared to the wild type.

[102971] for the disclosure of this paragraph see [0458.1.7.7] above

[102972] Further, the nucleic acid molecules disclosed herein, in particular the nucleic acid molecules shown in the respective line in column 5 or 8 of Table I A or B of application no. 20, may be sufficiently homologous to the sequences of related species such that these nucleic acid molecules may serve as markers for the construction of a genomic map in related organism or for association mapping. Furthermore natural variation in the genomic regions corresponding to nucleic acids disclosed herein, in particular the nucleic acid molecule shown in the respective line in column 5 or 8 of Table I A or B, of application no. 20 or homologous thereof, may lead to variation in the activity of the proteins disclosed herein, in particular the proteins comprising polypeptides as shown in the respective lines in column 5 or 8 of Table II A or B, of application no. 20 or their homologous, or comprising the consensus sequence or the polypeptide motif as shown in the respective line in column 8 of Table IV, and in consequence in a natural variation of an increased fine chemical production.

[102973] In consequence natural variation eventually also exists in form of more active allelic variants leading already to a relative increase in the fine chemical. Different variants of the nucleic acid molecules disclosed herein, in particular the nucleic acid molecules comprising the nucleic acid molecules as shown in the respective line in column 5 or 8 of Table I A or B of application no. 20, preferably the coding region thereof, which corresponds to different levels of increase in fine chemical, e.g. different levels of increase in fine chemical, can be indentified and used for marker assisted breeding for an enhanced production of the fine chemical.

[102974] Natural variation may also exist in the regulatory regions, e.g. the promoters of the natural genes comprising the nucleic acid molecules as shown in the respective line column 5 or 8 of Table I A or B of application no. 20, preferably the coding region thereof, which can similarly correspond to different levels of increase in the fine chemical, e.g. different levels of increase in the fine chemical can be identified and used for marker assisted breeding for an enhanced production of the fine chemical.

[102975] Accordingly, the present invention relates to a method for breeding plants for the production of the fine chemical, comprising
[102976] (a) selecting a first plant variety with an increased production of the fine chemical, e.g. based on an increased expression of a nucleic acid molecule of the invention as disclosed herein, in particular of a nucleic acid molecule comprising a nucleic acid molecule as shown in the respective line in column 5 or 8 of Table I A or B of application no. 20, preferably the coding region thereof, or fragments or homologs thereof, or a polypeptide comprising a polypeptide as shown in the respective line in column 5 or 8 of Table II A or B of application no. 20, or fragments or homologs thereof, or comprising a consensus sequence or a polypeptide motif as shown in the respective line in column 8 of Table IV, or a homolog thereof, as described herein;
[102977] (b) associating the level of increased production of the fine chemical, with the expression level or the genomic structure of a gene encoding said polypeptide or said nucleic acid molecule;
[102978] (c) crossing the first plant variety with a second plant variety, which significantly differs in its level of fine chemical; and
[102979] (d) identifying, which of the offspring varieties has got increased production of the fine chemical by the expression level of said polypeptide or nucleic acid molecule or the genomic structure of the gene(s) encoding said polypeptide or nucleic acid molecule of the invention.

[102980] [0462.1.7.20] to [0479.1.7.20] for the disclosure of these paragraphs see [0462.1.7.7] to [0479.1.7.7] above

[102981] In a further embodiment the nucleic acid molecule of the invention, the polypeptide of the invention, the nucleic acid construct of the invention, the expression cassette of the invention, the non-human organisms, the non-human host cell, the microorganisms, the plant, plant cell, or the part thereof, of the invention, the vector of the invention, the agonist identified with the method of the invention, the nucleic acid molecule identified with the method of the present invention, can be used for the production of the fine chemical or of the fine chemical and one or more other waxes and/or long chain alkanes.

[102982] Accordingly, the nucleic acid molecule of the invention, or the nucleic acid molecule identified with the method of the present invention or the complement sequences thereof, the polypeptide of the invention, the nucleic acid construct of the invention, the expression cassette of the invention, the non-human organism, the non-human host cell, the microorganism, the plant, plant cell, or the part thereof of the invention, the vector of the invention, the agonist identified with the method of the invention, the antibody of the present invention, can be used for the production of or the increase in the fine chemical in a non-human organism or part thereof, e.g. in a cell.

[102983] for the disclosure of this paragraph see [0481.1.7.7] above

[102984] for the disclosure of this paragraph see [0482.1.7.7] above

[102985] A special embodiment of this invention is related to genes which increase or generate the production of the fine chemical hentriacontane in plant cells, plants or part thereof. Phenotypes thereto are associated with yield of plants (=yield related phenotypes). In accordance with the invention, therefore, the respective genes identified in Table I, wherein in column 7 hentriacontane are mentioned, especially the coding region thereof, or homologs or fragments thereof,may be employed to enhance any yield-related phenotype. Increased yield may be determined in field trials of transgenic plants and suitable control plants. Alternatively, a transgene's ability to increase yield may be determined in a model plant. An increased yield phenotype may be determined in the field test or in a model plant by measuring any one or any combination of the following phenotypes, in comparison to a control plant: yield of dry harvestable parts of the plant, yield of dry aerial harvestable parts of the plant, yield of underground dry harvestable parts of the plant, yield of fresh weight harvestable parts of the plant, yield of aerial fresh weight harvestable parts of the plant yield of underground fresh weight harvestable parts of the plant, yield of the plant's fruit (both fresh and dried), grain dry weight, yield of seeds (both fresh and dry), and the like.

[102986] The most basic yield-related phenotype is increased yield associated with the presence of the gene or a homolog or a fragment thereof as a transgene in the plant, i.e., the intrinsic yield of the plant. Intrinsic yield capacity of a plant can be, for example, manifested in a field test or in a model system by demonstrating an improvement of seed yield (e.g. in terms of increased seed/grain size, increased ear number, increased seed number per ear, improvement of seed filling, improvement of seed composition, embryo and/or endosperm improvements, and the like); modification and improvement of inherent growth and development mechanisms of a plant (such as plant height, plant growth rate, pod number, pod position on the plant, number of internodes, incidence of pod shatter, efficiency of nodulation and nitrogen fixation, efficiency of carbon assimilation, improvement of seedling vigour/early vigour, enhanced efficiency of germination (under non-stressed conditions), improvement in plant architecture. Increased yield-related phenotypes may also be measured to determine tolerance to abiotic environmental stress. Abiotic stresses include drought, low temperature, salinity, osmotic stress, shade, high plant density, mechanical stresses, and oxidative stress, and yield-related phenotypes are encompassed by tolerance to such abiotic stresses. Additional phenotypes that can be monitored to determine enhanced tolerance to abiotic environmental stress include, without limitation, wilting; leaf browning; loss of turgor, which results in drooping of leaves or needles stems, and flowers; drooping and/or shedding of leaves or needles; the leaves are green but leaf angled slightly toward the ground compared with controls; leaf blades begun to fold (curl) inward; premature senescence of leaves or needles; loss of chlorophyll in leaves or needles and/or yellowing. Any of the yield-related phenotypes described above may be monitored in field tests or in model plants to demonstrate that a transgenic plant has increased tolerance to abiotic environmental stress. In accordance with the invention, the respective genes identified in Table 1, in case in column 7 hentriacontane is indicated, especially the coding region thereof, or homologs or fragments thereof, may be employed to enhance tolerance to abiotic environmental stress in a plant means that the plant, when confronted with abiotic environmental stress.

[102987] A polypeptide conferring an yield-increasing activity can be encoded by a respective nucleic acid sequence as shown in Table I, column 5 or 8, and/or comprises or consists of a respective polypeptide as depicted in Table II, column 5 and 8, and/or can be amplified with the respective primer set shown in Table III, column 8, in case in column 7 hentriacontane is indicated.

[102988] “Improved adaptation” to environmental stress like e.g. freezing and/or chilling temperatures refers to an improved plant performance under environmental stress conditions.

[102989] A modification, i.e. an increase, can be caused by endogenous or exogenous factors. For example, an increase in activity in an organism or a part thereof can be caused by adding a gene product or a precursor or an activator or an agonist to the media or nutrition or can be caused by introducing said subjects into an organism, transient or stable. Furthermore such an increase can be reached by the introduction of the respective inventive nucleic acid sequence or the encoded protein in the correct cell compartment for example into the nucleus or cytoplasmic respectively or into plastids either by transformation and/or targeting.

[102990] The term “yield” as used herein generally refers to a measurable produce from a plant, particularly a crop. Yield and yield increase (in comparison to a non-transformed starting or wild-type plant) can be measured in a number of ways, and it is understood that a skilled person will be able to apply the correct meaning in view of the particular embodiments, the particular crop concerned and the specific purpose or application concerned. The terms “improved yield” or “increased yield” can be used interchangeable.

[102991] As used herein, the term “improved yield” or the term “increased yield” means any improvement in the yield of any measured plant product, such as grain, fruit or fiber. In accordance with the invention, changes in different phenotypic traits may improve yield. For example, and without limitation, parameters such as floral organ development, root initiation, root biomass, seed number, seed weight, harvest index, tolerance to abiotic environmental stress, leaf formation, phototropism, apical dominance, and fruit development, are suitable measurements of improved yield. Any increase in yield is an improved yield in accordance with the invention. For example, the improvement in yield can comprise a 0.1%, 0.5%, 1%, 3%, 5%, 10%, 15%, 20%, 30%, 40%, 50%, 60%, 70%, 80%, 90% or greater increase in any measured parameter. For example, an increase in the bushel/acre yield of soybeans or corn derived from a crop comprising plants which are transgenic for the nucleotides and polypeptides of Table I, in case in column 7 hentriacontane is mentioned, as compared with the bushel/acre yield from untreated soybeans or corn cultivated under the same conditions, is an improved yield in accordance with the invention. The increased or improved yield can be achieved in the absence or presence of stress conditions.

[102992] For example, enhanced or increased “yield” refers to one or more yield parameters selected from the group consisting of biomass yield, dry biomass yield, aerial dry biomass yield, underground dry biomass yield, fresh-weight biomass yield, aerial fresh-weight biomass yield, underground fresh-weight biomass yield; enhanced yield of harvestable parts, either dry or fresh-weight or both, either aerial or underground or both; enhanced yield of crop fruit, either dry or fresh-weight or both, either aerial or underground or both; and preferably enhanced yield of seeds, either dry or fresh-weight or both, either aerial or underground or both.

[102993] Crop yield is defined herein as the number of bushels of relevant agricultural product (such as grain, forage, or seed) harvested per acre. Crop yield is impacted by abiotic stresses, such as drought, heat, salinity, and cold stress, and by the size (biomass) of the plant. Traditional plant breeding strategies are relatively slow and have in general not been successful in conferring increased tolerance to abiotic stresses. Grain yield improvements by conventional breeding have nearly reached a plateau in maize.

[102994] Accordingly, the yield of a plant can depend on the specific plant/crop of interest as well as its intended application (such as food production, feed production, processed food production, biofuel, biogas or alcohol production, or the like) of interest in each particular case. Thus, in one embodiment, yield is calculated as harvest index (expressed as a ratio of the weight of the respective harvestable parts divided by the total biomass), harvestable parts weight per area (acre, square meter, or the like); and the like. The harvest index, i.e., the ratio of yield biomass to the total cumulative biomass at harvest, in maize has remained essentially unchanged during selective breeding for grain yield over the last hundred years. Accordingly, recent yield improvements that have occurred in maize are the result of the increased total biomass production per unit land area. This increased total biomass has been achieved by increasing planting density, which has led to adaptive phenotypic alterations, such as a reduction in leaf angle, which may reduce shading of lower leaves, and tassel size, which may increase harvest index. Harvest index is relatively stable under many environmental conditions, and so a robust correlation between plant size and grain yield is possible. Plant size and grain yield are intrinsically linked, because the majority of grain biomass is dependent on current or stored photosynthetic productivity by the leaves and stem of the plant. As with abiotic stress tolerance, measurements of plant size in early development, under standardized conditions in a growth chamber or greenhouse, are standard practices to measure potential yield advantages conferred by the presence of a transgene.

[102995] Acccordingly, the yield of a plant can be increased by improving one or more of the yield-related phenotypes.

[102996] Such yield-related phenotypes or traits of a plant the improvement of which results in increased yield comprise, without limitation, the increase of the intrinsic yield capacity of a plant, improved nutrient use efficiency, and/or increased stress tolerance.

[102997] For example, yield refers to biomass yield, e.g. to dry weight biomass yield and/or fresh-weight biomass yield. Biomass yield refers to the aerial or underground parts of a plant, depending on the specific circumstances (test conditions, specific crop of interest, application of interest, and the like). In one embodiment, biomass yield refers to the aerial and underground parts. Biomass yield may be calculated as fresh-weight, dry weight or a moisture adjusted basis. Biomass yield may be calculated on a per plant basis or in relation to a specific area (e.g. biomass yield per acre/ square meter/ or the like).

[102998] In other embodiment, “yield” refers to seed yield which can be measured by one or more of the following parameters: number of seeds or number of filled seeds (per plant or per area (acre/square meter/ or the like)); seed filling rate (ratio between number of filled seeds and total number of seeds); number of flowers per plant; seed biomass or total seeds weight (per plant or per area (acre/square meter/ or the like); thousand kernel weight (TKW; extrapolated from the number of filled seeds counted and their total weight; an increase in TKW may be caused by an increased seed size, an increased seed weight, an increased embryo size, and/or an increased endosperm). Other parameters allowing to measure seed yield are also known in the art. Seed yield may be determined on a dry weight or on a fresh weight basis, or typically on a moisture adjusted basis, e.g. at 15.5 percent moisture.

[102999] For example, the term “increased yield” means that the plant, exhibits an increased growth rate, under conditions of abiotic environmental stress, compared to the corresponding wild-type plant.

[103000] An increased growth rate may be reflected inter alia by or confers an increased biomass production of the whole plant, or an increased biomass production of the aerial parts of a plant, or by an increased biomass production of the underground parts of a plant, or by an increased biomass production of parts of a plant, like stems, leaves, blossoms, fruits, and/or seeds.

[103001] Increased yield includes higher fruit yields, higher seed yields, higher fresh matter production, and/or higher dry matter production.

[103002] The term “increased yield” means that the plant, exhibits a prolonged growth under conditions of abiotic environmental stress, as compared to the corresponding, e.g. non-transformed, wild type organism. A prolonged growth comprises survival and/or continued growth of the plant, at the moment when the non-transformed wild type organism shows visual symptoms of deficiency and/or death.

[103003] When the plant of the invention is a corn plant increased yield for corn plants means, for example, increased seed yield, in particular for corn varieties used for feed or food. Increased seed yield of corn refers to an increased kernel size or weight, an increased kernel per ear, or increased ears per plant. Alternatively or in addition the cob yield may be increased, or the length or size of the cob is increased, or the kernel per cob ratio is improved.

[103004] When the plant of the invention is a soy plant, increased yield for soy plants means increased seed yield, in particular for soy varieties used for feed or food. Increased seed yield of soy refers for example to an increased kernel size or weight, an increased kernel per pod, or increased pods per plant.

[103005] When the plant of the invention is an oil seed rape (OSR) plant, increased yield for OSR plants means increased seed yield, in particular for OSR varieties used for feed or food. Increased seed yield of OSR refers to an increased seed size or weight, an increased seed number per silique, or increased siliques per plant.

[103006] When the plant of the invention is a cotton plant, increased yield for cotton plants means increased lint yield. Increased lint yield of cotton refers in one embodiment to an increased length of lint.

[103007] When the plant of the invention is a wheat plant increased yield for wheat plants means, for example, increased seed yield, in particular for wheat varieties used for feed or food. Increased seed yield of wheat refers to an increased kernel size or weight, an increased kernel per ear, or increased ears per plant. Increased seed yield of wheat refers also to an increased grain size or weight, an increased number of grains per spike, or increased number of spikes per plant. Alternatively or in addition increased seed yield of wheat refers also to an increased grain yield, increased length of spikes, increased number of spikelets per spike , increased 1000 grain weight or increased flag leaf area (flag leaf is the leaf directely below the spike).

[103008] Said increased yield can typically be achieved by enhancing or improving, one or more yield-related traits of the plant. Such yield-related traits of a plant comprise, without limitation, the increase of the intrinsic yield capacity of a plant, improved nutrient use efficiency, and/or increased stress tolerance, in particular increased abiotic stress tolerance.

[103009] Intrinsic yield capacity of a plant can be, for example, manifested by improving the specific (intrinsic) seed yield (e.g. in terms of increased seed/ grain size, increased ear number, increased seed number per ear, improvement of seed filling, improvement of seed composition, embryo and/or endosperm improvements, or the like); modification and improvement of inherent growth and development mechanisms of a plant (such as plant height, plant growth rate, pod number, pod position on the plant, number of internodes, incidence of pod shatter, efficiency of nodulation and nitrogen fixation, efficiency of carbon assimilation, improvement of seedling vigour/early vigour, enhanced efficiency of germination (under stressed or non-stressed conditions), improvement in plant architecture, cell cycle modifications, photosynthesis modifications, various signaling pathway modifications, modification of transcriptional regulation, modification of translational regulation, modification of enzyme activities, and the like); and/or the like.

[103010] The improvement or increase of stress tolerance of a plant can for example be manifested by improving or increasing a plant's tolerance against stress, particularly abiotic stress. In the present application, abiotic stress refers generally to abiotic environmental conditions a plant is typically confronted with, including, but not limited to, drought (tolerance to drought may be achieved as a result of improved water use efficiency), heat, low temperatures and cold conditions (such as freezing and chilling conditions), salinity, osmotic stress , shade, high plant density, mechanical stress, oxidative stress, and the like.

[103011] The increased plant yield can also be mediated by increasing the “nutrient use efficiency of a plant”, e.g. by improving the use efficiency of nutrients including, but not limited to, phosphorus, potassium, and nitrogen. Further, higher yields may be obtained with current or standard levels of nitrogen use.

[103012] Generally, the term “increased tolerance to stress” can be defined as survival of plants, and/or higher yield production, under stress conditions as compared to a non-transformed wild type or starting plant: For example, the plant of the invention or produced according to the method of the invention is better adapted to the stress conditions. “Improved adaptation” to environmental stress like e.g. drought, heat, nutrient depletion, freezing and/or chilling temperatures refers herein to an improved plant performance resulting in an increased yield, particularly with regard to one or more of the yield related traits as defined in more detail above.

[103013] During its life-cycle, a plant is generally confronted with a diversity of environmental conditions. Any such conditions, which may, under certain circumstances, have an impact on plant yield, are herein referred to as “stress” condition. Environmental stresses may generally be divided into biotic and abiotic (environmental) stresses. Unfavorable nutrient conditions are sometimes also referred to as “environmental stress”. The present invention does also contemplate solutions for this kind of environmental stress, e.g. referring to increased nutrient use efficiency.

[103014] For the purposes of the description of the present invention, the terms “enhanced tolerance to abiotic stress”, “enhanced resistance to abiotic environmental stress”, “enhanced tolerance to environmental stress”, “improved adaptation to environmental stress” and other variations and expressions similar in its meaning are used interchangeably and refer, without limitation, to an improvement in tolerance to one or more abiotic environmental stress(es) as described herein and as compared to a corresponding origin or wild type plant or a part thereof.

[103015] The term abiotic stress tolerance(s) refers for example low temperature tolerance, drought tolerance or improved water use efficiency (WUE), heat tolerance, salt stress tolerance and others. Studies of a plant's response to desiccation, osmotic shock, and temperature extremes are also employed to determine the plant's tolerance or resistance to abiotic stresses. Water use efficiency (WUE) is a parameter often correlated with drought tolerance. In selecting traits for improving crops, a decrease in water use, without a change in growth would have particular merit in an irrigated agricultural system where the water input costs were high. An increase in growth without a corresponding jump in water use would have applicability to all agricultural systems. In many agricultural systems where water supply is not limiting, an increase in growth, even if it came at the expense of an increase in water use also increases yield.

[103016] Drought stress means any environmental stress which leads to a lack of water in plants or reduction of water supply to plants, including a secondary stress by low temperature and/or salt, and/or a primary stress during drought or heat, e.g. desiccation etc.

### Specific Embodiments

[103017] Accordingly, this invention provides respective measures and methods to produce plants with increased yield, e.g. genes conferring an increased yield-related trait, for example enhanced tolerance to abiotic environmental stress, for example an increased drought tolerance and/or low temperature tolerance and/or an increased nutrient use efficiency, intrinsic yield and/or another increased yield-related trait, upon expression or over-expression. Accordingly, the present invention provides such genes in case in column 7 of the respective Table or hentriacontane is indicated. In particular, such genes are described in column 5 as well as in column 8 of Tables I, especially the coding region thereof, or homologs or fragments thereof, in case hentriacontane are indicated in column 7 or the respective polypeptides are described in column 5 as well as in column 8 of Table II, or homologs or fragments thereof, in case hentriacontane are indicated in column 7.

[103018] Accordingly, the present invention provides respective transgenic plants showing one or more improved yield-related traits as compared to the corresponding origin or the wild type plant and methods for producing such transgenic plants with increased yield in case in column 7 of the respective Table “hentriacontane” is indicated.

[103019] In one embodiment, one or more of said yield-increasing activities are increased by increasing the amount and/or the specific activity of one or more proteins listed in Table II, column 5 or 8 in a compartment of a cell indicated in Table II, column 6, in case in column 7 of the respective Table “hentriacontane” is indicated.

[103020] Accordingly to present invention, the yield of the plant of the invention is increased by improving one or more of the yield-related traits as defined herein. Said increased yield in accordance with the present invention can typically be achieved by enhancing or improving, in comparison to an origin or wild-type plant, one or more yield-related traits of said plant. Such yield-related traits of a plant the improvement of which results in increased yield comprise, without limitation, the increase of the intrinsic yield capacity of a plant, improved nutrient use efficiency, like nitrogen use efficiency, and/or increased stress tolerance.

[103021] In one embodiment, the present invention provides respective transgenic plants showing one or more improved yield-related traits, preferably increased drought tolerance as compared to the corresponding origin or the wild type plant and methods for producing such transgenic plants with increased yield in case in column 7 of the respective Table “hentriacontane” is indicated.

[103022] In a further embodiment the present invention is characterized by the features as disclosed in the following items:

[103023] Item 1. A process for the production of a fine chemical selected from the group consisting of:

[103024] hentriacontane
[103025] (a) increasing or generating one or more activities selected from the group consisting of 3-deoxy-7-phosphoheptulonate synthase, acid shock protein, amino-acid acetyltransferase, assembly protein for periplasmic nitrate reductase, At2g45420-protein, At5g43630-protein, ATP-dependent RNA helicase, b0833-protein, b1259-protein, b1445-protein, b1670-protein, b1930-protein, b2399-protein, b2653-protein, b3644-protein, cell division protein, cyclin D, cysteine synthase A, dihydroxyacetone kinase, electron transport complex protein, ethanolamine utilization protein, exonuclease subunit, fumarylacetoacetate hydrolase, GDP-mannose 4,6-dehydratase, inner membrane protein, ion-transport protein, L-asparaginase, MADS box protein transcription factor, mechanosensitive ion channel, metal-dependent hydrolase, methionine permease, O-antigen chain length determinant, ornithine decarboxylase, orotidine-5′-phosphate decarboxylase, peptide chain release factor, phospho-2-dehydro-3-deoxyheptonate aldolase, phosphoadenosine phosphosulfate reductase, phosphoglycolate phosphatase, pyrimidine-specific ribonucleoside hydrolase, pyruvate kinase, RNA-binding protein, S-adenosyl-L-methionine-dependent methyltransferase, serine protease, short-chain alcohol dehydrogenase family, sigma-54 dependent response regulator, spermidine synthase, sugar transport system permease protein, transcription factor, transcriptional regulator, YFL019C-protein, YHL039W-protein, YHR022C-A-protein, YJL127W-A-protein, ylr157c-protein, ynl321w-protein, ypr170c-protein, and YPR172W-protein, in a non-human organism or a part thereof, preferably a microorganism, a plant cell, a plant or a part thereof, as compared to a corresponding non-transformed wild type non-human organism or a part thereof; and
[103026] (b) growing the non-human organism or a part thereof under conditions which permit the production of hentriacontane or a composition comprising hentriacontane in said non-human organism or in the culture medium surrounding said non-human organism.

[103027] Item 2. A process for the production of a fine chemical selected from the group consisting of: hentriacontane, which comprises
[103028] (A)
   [103029] (i) increasing or generating of the expression of; and/or
   [103030] (ii) increasing or generating the expression of an expression product of; and/or
   [103031] (iii) increasing or generating one or more activities of an expression product encoded by;
      at least one respective nucleic acid molecule comprising a nucleic acid molecule selected from the group consisting of:
   [103032] (a) a nucleic acid molecule encoding the polypeptide shown in column 5 or 8 of Table II, preferably Table II B, application no.20, or a homolog or a fragment thereof;
   [103033] (b) a nucleic acid molecule shown in column 5 or 8 of Table I, preferably Table I B, application no.20, or a homolog or a fragment thereof (preferably the coding region thereof);
   [103034] (c) a nucleic acid molecule, which, as a result of the degeneracy of the genetic code, can be derived from a polypeptide sequence depicted in column 5 or 8 of Table II, preferably Table II B, application no.20;
   [103035] (d) a nucleic acid molecule having at least 30%, in particular at least 50%, 60%, 70%, 80%, 85%, 90%, 95%, 97%, 98%, 99% or 99.5% identity with the nucleic acid molecule sequence of a polynucleotide comprising the nucleic acid molecule shown in column 5 or 8 of Table I, preferably Table I B, application no. 20, or the coding region thereof;
   [103036] (e) a nucleic acid molecule encoding a polypeptide having at least 30%, in particular 50%, 60%, 70%, 80%, 85%, 90%, 95%, 97%, 98%, 99% or 99.5% identity with the amino acid sequence of the polypeptide encoded by the nucleic acid molecule of (a), (b), (c) or (d);
   [103037] (f) a nucleic acid molecule which hybridizes with a nucleic acid molecule of (a), (b), (c), (d) or (e) under stringent hybridization conditions;
   [103038] (g) a nucleic acid molecule encoding a polypeptide which can be isolated with the aid of monoclonal or polyclonal antibodies made against a polypeptide encoded by one of the nucleic acid molecules of (a), (b), (c), (d), (e) or (f);
   [103039] (h) a nucleic acid molecule encoding a polypeptide comprising the consensus sequence or one or more polypeptide motifs as shown in column 8 of Table IV, application no.20;
   [103040] (i) a nucleic acid molecule encoding a polypeptide having the activity represented by a respective protein as depicted in column 5 of Table II, application no. 20;
   [103041] (j) a nucleic acid molecule which comprises a polynucleotide, which is obtained by amplifying a cDNA library or a genomic library using the primers as depicted in column 8 of Table III, application no. 20; and
   [103042] (k) a nucleic acid molecule which is obtainable by screening a suitable nucleic acid library, especially a cDNA library and/or a genomic library, under stringent hybridization conditions with a probe comprising a complementary sequence of a nucleic acid molecule of (a), (b), (c), (d), (e), (f), (g), (h), (i) or (j) or with a fragment thereof, having at least 15 nt, preferably 20 nt, 30 nt, 50 nt, 100 nt, 200 nt, 500 nt, 1000 nt, 1500 nt, 2000 nt or 3000 nt of a nucleic acid molecule complementary to a nucleic acid molecule sequence characterized in (a), (b), (c), (d), (e), (f), (g), (h), (i) or (j);
   [103043] or a nucleic acid molecule comprising a sequence which is complementary thereto;
      in a non-human organism or a part thereof, preferably a microorganism, a plant cell, a plant or a part thereof, as compared to a corresponding non-transformed wild type non-human organism or a part thereof; and
[103044] (B) growing the non-human organism or a part thereof under conditions which permit the production of hentriacontane or a composition comprising hentriacontane in said non-human organism or in the culture medium surrounding said non-human organism.

[103045] Item 3. A process of items 1 or 2, comprising of recovering hentriacontane in its free or bound form.

[103046] Item 4. The process of any one of items 1 to 3, comprising the following steps:
[103047] (a) selecting a non-human organism or a part thereof expressing a polypeptide encoded by the nucleic acid molecule characterized in item 2;
[103048] (b) mutagenizing the selected non-human organism or the part thereof;
[103049] (c) comparing the activity or the expression level of said polypeptide in the mutagenized non-human organism or the part thereof with the activity or the expression of said polypeptide of the selected non-human organisms or the part thereof;
[103050] (d) selecting the mutated non-human organisms or parts thereof, which comprise an increased activity or expression level of said polypeptide compared to the selected non-human organism or the part thereof;
[103051] (e) optionally, growing and cultivating the non-human organisms or the parts thereof; and
[103052] (f) recovering, and optionally isolating, the free or bound hentriacontane produced by the selected mutated non-human organisms or parts thereof.

[103053] Item 5. The process of any one of items 1 to 4 wherein the activity of said protein or the expression of said nucleic acid molecule is increased or generated transiently or stably.

[103054] Item 6. An isolated nucleic acid molecule comprising a nucleic acid molecule selected from the group consisting of:
[103055] (a) a nucleic acid molecule encoding a polypeptide shown in Table II, application no. 20, column 5 or 8, preferably shown in Table II B, application no. 20, column 8, or a homolog or a fragment thereof;
[103056] (b) a nucleic acid molecule shown in Table I, application no. 20, column 5 or 8, preferably shown in Table I B, application no. 20, column 8, preferably the coding region thereof, or a homolog or a fragment thereof;
[103057] (c) a nucleic acid molecule, which, as a result of the degeneracy of the genetic code, can be derived from a polypeptide sequence depicted in column 5 or 8 of Table II, application no. 20, preferably in column 8 of Table II B, application no. application no.;
[103058] (d) a nucleic acid molecule having at least 30% identity, preferably at least 40%, 50%, 60%, 70%, 75%, 80%, 85%, 90%, 95%, 96%, 97%, 98%, 99%, 99.5%, with the nucleic acid molecule sequence of a polynucleotide comprising the nucleic acid molecule shown in column 5 or 8 of Table I, application no. 3, preferably shown in column 8 of Table I B, application no. 20, preferably the coding region thereof;
[103059] (e) a nucleic acid molecule encoding a polypeptide having at least 30% identity, preferably at least 40%, 50% 60%, 70%, 75%, 80%, 85%, 90%, 95%, 96%, 97%, 98%, 99%, 99.5%, identity with the amino acid sequence of the polypeptide encoded by the nucleic acid molecule of (a), (b), (c) or (d);
[103060] (f) a nucleic acid molecule which hybridizes with a nucleic acid molecule of (a), (b), (c), (d) or (e) under stringent hybridisation conditions;
[103061] (g) a nucleic acid molecule encoding a polypeptide which can be isolated with the aid of monoclonal or polyclonal antibodies made against a polypeptide encoded by one of the nucleic acid molecules of (a), (b), (c), (d), (e) or (f);
[103062] (h) a nucleic acid molecule encoding a polypeptide comprising the consensus sequence or one or more polypeptide motifs as shown in column 8 of Table IV, application no. 20;
[103063] (i) a nucleic acid molecule encoding a polypeptide having the activity represented by a respective protein as depicted in column 5 of Table II, application no. 20;
[103064] (j) a nucleic acid molecule comprising a polynucleotide which is obtained by amplifying a cDNA library or a genomic library using the primers in Table III, application no. 20, column 8;
[103065] and
[103066] (k) nucleic acid molecule which is obtainable by screening a suitable nucleic acid library, especially a cDNA library and/or a genomic library, under stringent hybridization conditions with a probe comprising one of the sequences of the nucleic acid molecule of (a), (b), (c), (d), (e), (f), (g), (h), (i) or (j) or with a fragment of at least 15 nt, preferably 20 nt, 30 nt, 50 nt, 100 nt, 200 nt,500 nt, 1000 nt, 1500 nt, 2000 nt or 3000 nt of the nucleic acid molecule characterized in (a), (b), (c), (d), (e), (f), (g), (h), (i) or (j);
[103067] or a nucleic acid molecule comprising a sequence which is complementary thereto.

[103068] Item 7. A nucleic acid construct which confers the expression of the nucleic acid molecule as defined in item 6, comprising one or more regulatory elements.

[103069] Item 8. An expression cassette comprising
[103070] (a) a promoter, preferably selected from the group consisting of Big35S, PCUbi, Super and USP;
[103071] (b) a nucleic acid molecule as defined in item 6.

[103072] Item 9. A vector comprising the nucleic acid molecule as defined in item 6 or the nucleic acid construct as claimed in item 7 or the expression cassette as claimed in item 8.

[103073] Item 10. A host cell or a plant organelle, which has been transformed with the vector as claimed in item 9 or the nucleic acid molecule as defined in item 6 or the nucleic acid construct as claimed in item 7 or the expression cassette as claimed in item 8.

[103074] Item 11. The host cell of item 10, which is a plant cell or a microorganism.

[103075] Item 12. A process for producing a polypeptide, wherein the polypeptide is expressed in a host cell as claimed in item 10 or 11.

[103076] Item 13. A polypeptide produced by the process as claimed in item 12 or encoded by the nucleic acid molecule as defined in item 6.

[103077] Item 14. An antibody, which binds specifically to the polypeptide as claimed in item 13.

[103078] Item 15. A plant tissue, propagation material, harvested material or a plant comprising the host cell as claimed in item 10 or 11.

[103079] Item 16. A process for the identification of a compound conferring an increase in hentriacontane production in a non-human organism, comprising the steps:
[103080] (a) culturing a plant cell or tissue or microorganism or maintaining a plant expressing the polypeptide encoded by the nucleic acid molecule as defined in item 6 conferring an increase in the amount of hentriacontane in a non-human organism or a part thereof and a readout system capable of interacting with the polypeptide under suitable conditions which permit the interaction of the polypeptide with said readout system in the presence of a compound or a sample comprising a plurality of compounds and capable of providing a detectable signal in response to the binding of a compound to said polypeptide under conditions which permit the expression of said readout system and of the polypeptide encoded by the nucleic acid molecule of item 6 conferring an increase in the amount of hentriacontane in a non-human organism or a part thereof;
[103081] (b) identifying if the compound is an effective agonist by detecting the presence or absence or increase of a signal produced by said readout system.

[103082] Item 17. A method for the production of an agricultural composition comprising the steps of the method of item 16 and formulating the compound identified in item 16 in a form acceptable for an application in agriculture.

[103083] Item 18. A composition comprising the nucleic acid molecule as defined in item 6, the polypeptide as claimed in item 13, the nucleic acid construct as claimed in item 7, the expression cassette as claimed in item 8, the vector as claimed in item 9, the compound as claimed in item 16, the antibody as claimed in item 14, and optionally an agricultural acceptable carrier.

[103084] Item 19. Use of the nucleic acid molecule as defined in item 6 for the identification of a nucleic acid molecule conferring an increase in hentriacontane after expression.

[103085] Item 20. Cosmetic, pharmaceutical, food or feed composition comprising the nucleic acid moleculeas defined in item 6, the polypeptide as claimed in item 13, the nucleic acid construct as claimed in item 7, the expression cassette as claimed in item 8, the vector as claimed in item 9, the antibody as claimed in item 14 , the plant or plant tissue as claimed in item 15, the harvested material as claimed in item 15 or the host cell of item as claimed in items 10 or 11.

[103086] Item 21. Use of the nuclei acid molecule as defined in item 6, the polypeptide as claimed in item 13, the nucleic acid construct as claimed in item 7, the expression cassette as claimed in item 8, the vector as claimed in item 9, the plant or plant tissue as claimed in item 15, or the host cell of item 10 to 11 for the production of plant resistant to a herbicide inhibiting the production of hentriacontane.

[103087] Item 22. A method for producing a plant with increased yield as compared to a corresponding non-transformed wild type plant, whereby the method comprises
[103088] (i) increasing or generating of the expression of; and/or
[103089] (ii) increasing or generating the expression of an expression product of; and/or
[103090] (iii) increasing or generating one or more activities of an expression product encoded by;
   at least one respective nucleic acid molecule comprising a nucleic acid molecule selected from the group consisting of:
[103091] (a) a nucleic acid molecule encoding the polypeptide shown in column 5 or 8 of Table II, preferably Table II B, application no. 20, or a homolog or a fragment thereof, in case in column 7 hentriacontane is indicated;
[103092] (b) a nucleic acid molecule shown in column 5 or 8 of Table I, preferably Table I B, application no. 20, or a homolog or a fragment thereof (preferably the coding region thereof) , in case in column 7 hentriacontane is indicated;
[103093] (c) a nucleic acid molecule, which, as a result of the degeneracy of the genetic code, can be derived from a polypeptide sequence depicted in column 5 or 8 of Table II, preferably Table II B, application no. 20, in case in column 7 hentriacontane is indicated;
[103094] (d) a nucleic acid molecule having at least 30%, in particular at least 50%, 60%, 70%, 80%, 85%, 90%, 95%, 97%, 98%, 99% or 99.5% identity with the nucleic acid molecule sequence of a polynucleotide comprising the nucleic acid molecule shown in column 5 or 8 of Table I, preferably Table I B, application no. 20, or the coding region thereof, in case in column 7 hentriacontane is indicated;
[103095] (e) a nucleic acid molecule encoding a polypeptide having at least 30%, in particular 50% , 60%, 70%, 80%, 85%, 90%, 95%, 97%, 98%, 99% or 99.5% identity with the amino acid sequence of the polypeptide encoded by the nucleic acid molecule of (a), (b), (c) or (d);
[103096] (f) a nucleic acid molecule which hybridizes with a nucleic acid molecule of (a), (b), (c), (d) or (e) under stringent hybridization conditions;
[103097] (g) a nucleic acid molecule encoding a polypeptide which can be isolated with the aid of monoclonal or polyclonal antibodies made against a polypeptide encoded by one of the nucleic acid molecules of (a), (b), (c), (d), (e) or (f);
[103098] (h) a nucleic acid molecule encoding a polypeptide comprising the consensus sequence or one or more polypeptide motifs as shown in column 8 of Table IV, application no. 20, in case in column 7 hentriacontane is indicated;
[103099] (i) a nucleic acid molecule encoding a polypeptide having the activity represented by a respective protein as depicted in column 5 of Table II, application no. 20, in case in column 7 hentriacontane is indicated;
[103100] (j) a nucleic acid molecule which comprises a polynucleotide, which is obtained by amplifying a cDNA library or a genomic library using the primers as depicted in column 8 of Table III, application no. 20, in case in column 7 hentriacontane is indicated; and
[103101] (k) a nucleic acid molecule which is obtainable by screening a suitable nucleic acid library, especially a cDNA library and/or a genomic library, under stringent hybridization conditions with a probe comprising a complementary sequence of a nucleic acid molecule of (a), (b), (c), (d), (e), (f), (g), (h), (i) or (j) or with a fragment thereof, having at least 15 nt, preferably 20 nt, 30 nt, 50 nt, 100 nt, 200 nt, 500 nt, 1000 nt, 1500 nt, 2000 nt or 3000 nt of a nucleic acid molecule complementary to a nucleic acid molecule sequence characterized in (a), (b), (c), (d), (e), (f), (g), (h), (i) or (j);
[103102] or a nucleic acid molecule comprising a sequence which is complementary thereto;
   in a plant cell, plant or a part thereof.

[103103] Item 23. A method for producing a plant with increased yield according to item 22, which comprises in addition the regeneration of a plant from such transformed plant cell, plant cell compartment, plant cell nucleus, plant cell or plant tissue with increased yield.

[103104] [0483.1.7.20] to [0492.1.7.20] for the disclosure of these paragraphs see [0483.1.7.7] to [0492.1.7.7] above

### Example 10

### Purification of a Fine Chemical e.g. Waxes and/or Long Chain Alkanes, e.g. Hentriacontane

[103105] The material, such as microorganism s or plants, can be disrupted by sonication, grinding in a glass mill, liquid nitrogen and grinding, cooking, or via other applicable methods. After disruption centrifugation may follow. The waxes and/or long chain alkanes are extracted with petroleum ether and the solvent is evaporated lateron.

[103106] Identity and purity of the waxes and/or long chain alkanes isolated can be determined by standard techniques of the art. They encompass high-performance liquid chromatography (HPLC), spectroscopic methods, mass spectrometry (MS), staining methods, thin-layer chromatography, NIRS, enzyme assay or microbiological assays. These analytical methods are compiled in: Patek et al. (1994) Appl. Environ. Microbiol. 60: 133-140; Malakhova et al. (1996) Biotekhnologiya 11: 27-32; and Schmidt et al. (1998) Bioprocess Engineer. 19: 67-70. Ulmann's Encyclopedia of Industrial Chemistry (1996) Vol. A27, VCH: Weinheim, pp. 89-90, pp. 521-540, pp. 540547, pp. 559-566, 575-581 and pp. 581-587; Michal, G (1999) Biochemical Pathways: An Atlas of Biochemistry and Molecular Biology, John Wiley and Sons; Fallon, A. et al. (1987) Applications of HPLC in Biochemistry in: Laboratory Techniques in Biochemistry and Molecular Biology, Vol. 17.

[103107] for the disclosure of this paragraph see [0494.1.7.7] above

### Example 11a

### PCR Amplification of the Sequences

[103108] Unless otherwise specified, standard methods as described in Sambrook et al., Molecular Cloning: A laboratory manual, Cold Spring Harbor 1989, Cold Spring Harbor Laboratory Press are used.

[103109] The inventive sequences as shown in the respective line in Table I, column 5, preferably the coding region thereof, were amplified by PCR as described in the protocol of the Pfu Ultra, Pfu Turbo or Herculase DNA polymerase (Stratagene). The composition for the protocol of the Pfu Ultra, Pfu Turbo or Herculase DNA polymerase was as follows: 1×PCR buffer (Stratagene), 0.2 mM of each dNTP, 100 ng genomic DNA of Saccharomyces cerevisiae (strain S288C; Research Genetics, Inc., now Invitrogen), Escherichia coli (strain MG1655; E. coli Genetic Stock Center), Synechocystis sp. (strain PCC6803), Azotobacter vinelandii (strain N.R. Smith,16), Thermus thermophilus (HB8) or 50 ng cDNA from various tissues and development stages of Arabidopsis thaliana (ecotype Columbia), Physcomitrella patens, Glycine max (variety Resnick), Brassica napus, Oryza sativa or Zea mays (variety B73, Mo17, A188), 50 pmol forward primer, 50 pmol reverse primer, with or without 1 M Betaine, 2.5 u Pfu Ultra, Pfu Turbo or Herculase DNA polymerase.

[103110] The amplification cycles were as follows:

[103111] 1 cycle of 2-3 minutes at 94-95° C., then 25-36 cycles with 30-60 seconds at 94-95° C., 30-45 seconds at 50-60° C. and 210-480 seconds at 72° C., followed by 1 cycle of 5-10 minutes at 72° C., then 4-16° C.—preferably for Saccharomyces cerevisiae, Escherichia coli, Synechocystis sp., Azotobacter vinelandii, Thermus thermophilus.

[103112] In case of Arabidopsis thaliana, Brassica napus, Glycine max, Oryza sativa, Physcomitrella patens, Zea mays the amplification cycles were as follows: 1 cycle with 30 seconds at 94° C., 30 seconds at 61° C., 15 minutes at 72° C., then 2 cycles with 30 seconds at 94° C., 30 seconds at 60° C., 15 minutes at 72° C., then 3 cycles with 30 seconds at 94° C., 30 seconds at 59° C., 15 minutes at 72° C., then 4 cycles with 30 seconds at 94° C., 30 seconds at 58° C., 15 minutes at 72° C., then 25 cycles with 30 seconds at 94° C., 30 seconds at 57° C., 15 minutes at 72° C., then 1 cycle with 10 minutes at 72° C., then finally 4-16° C.

[103113] RNAs were generated with the RNeasy Plant Kit according to the standard protocol (Qiagen) and Superscript II Reverse Transkriptase was used to produce double stranded cDNA according to the standard protocol (Invitrogen).

[103114] ORF specific primer pairs for the genes to be expressed are shown in the respective line in Table III, column 8. The following adapter sequences were added to Saccharomyces cerevisiae ORF specific primers (see Table III) for cloning purposes:

SEQ ID NO: 20

| | | |
|---|---|---|
| i) | foward primer: | 5′-GGAATTCCAGCTGACCACC-3′ |

SEQ ID NO: 21

| | | |
|---|---|---|
| ii) | reverse primer: | 5′-GATCCCCGGGAATTGCCATG-3′ |

[103115] These adaptor sequences allow cloning of the ORF into the various vectors containing the Resgen adaptors, see table column E of Table c.

[103116] The following adapter sequences were added to Saccharomyces cerevisiae, Escherichia coli, Synechocystis sp., Azotobacter vinelandii, Thermus thermophilus, Arabidopsis thaliana, Brassica napus, Glycine max, Oryza sativa , Physcomitrella patens, or Zea mays ORF specific primers for cloning purposes:

| SEQ ID NO: 22 | | |
|---|---|---|
| iii) | forward primer: | 5′-TTGCTCTTCC-3′ |
| SEQ ID NO: 23 | | |
| iiii) | reverse primer: | 5′-TTGCTCTTCG-3′ |

[103117] The adaptor sequences allow cloning of the ORF into the various vectors containing the Colic adaptors, see table column E of Table c.

[103118] Therefore for amplification and cloning of Saccharomyces cerevisiae SEQ ID NO: 64144, a primer consisting of the adaptor sequence i) and the ORF specific sequence SEQ ID NO: 64146 and a second primer consisting of the adaptor sequence ii) and the ORF specific sequence SEQ ID NO: 64147 were used.

[103119] For amplification and cloning of Escherichia coli SEQ ID NO: 7081, a primer consisting of the adaptor sequence iii) and the ORF specific sequence SEQ ID NO: 7261 and a second primer consisting of the adaptor sequence iiii) and the ORF specific sequence SEQ ID NO: 7262 were used.

[103120] For amplification and cloning of Synechocystis sp. SEQ ID NO: 59370, a primer consisting of the adaptor sequence iii) and the ORF specific sequence SEQ ID NO: 59846 and a second primer consisting of the adaptor sequence iiii) and the ORF specific sequence SEQ ID NO: 59847 were used.

[103121] For amplification and cloning of Arabidopsis thaliana SEQ ID NO: 1623, a primer consisting of the adaptor sequence iii) and the ORF specific sequence SEQ ID NO: 1691 and a second primer consisting of the adaptor sequence iiii) and the ORF specific sequence SEQ ID NO: 1692 were used.

[103122] For amplification and cloning of Azotobacter vinelandii SEQ ID NO: 29286, a primer consisting of the adaptor sequence iii) and the ORF specific sequence SEQ ID NO: 29394 and a second primer consisting of the adaptor sequence iiii) and the ORF specific sequence SEQ ID NO: 29395 were used.

[103123] For amplification and cloning of Glycine max SEQ ID NO: 46850, a primer consisting of the adaptor sequence iii) and the ORF specific sequence SEQ ID NO: 47020 and a second primer consisting of the adaptor sequence iiii) and the ORF specific sequence SEQ ID NO: 47021 were used.

[103124] For amplification and cloning of Thermus thermophilus SEQ ID NO: 60301, a primer consisting of the adaptor sequence iii) and the ORF specific sequence SEQ ID NO: 60849 and a second primer consisting of the adaptor sequence iiii) and the ORF specific sequence SEQ ID NO: 60850 were used.

[103125] Following these examples every sequence disclosed in Table I, preferably column 5, especially the coding region thereof can be cloned by fusing the adaptor sequences to the respective specific primers sequences as disclosed in Table III, column 8 using the respective vectors shown in Table c.

[103126] [0496.1.7.20] to [0499.1.7.20] for the disclosure of these paragraphs see [0496.1.7.7] to [0499.1.7.7] above

### Example 11e

### Cloning of Inventive Sequences as Shown in Table I, Column 5 in the Different Expression Vectors

[103127] For cloning of for example SEQ ID NO: 7081 from Escherichia coli or any other ORF from Escherichia coli, Synechocystis sp., Azotobacter vinelandii, Thermus thermophilus, Arabidopsis thaliana, or Glycine max the vector DNA was treated with the restriction enzymes Pacl and Ncol following the standard protocol (MBI Fermentas).

[103128] For cloning for example the ORFs of SEQ ID NO: 64144 from Saccharomyces cerevisiae or any other ORF from Saccharomyces cerevisiae into vectors containing the Resgen adaptor sequence the respective vector DNA was treated with the restriction enzyme Ncol.

[103129] In all cases the reaction was stopped by inactivation at 70° C. for 20 minutes and purified over QlAquick or NucleoSpin Extract II columns following the standard protocol (Qiagen or Macherey-Nagel).

[103130] Then the PCR-product representing the amplified ORF with the respective adapter sequences and the vector DNA were treated with T4 DNA polymerase according to the standard protocol (MBI Fermentas) to produce single stranded overhangs with the parameters 1 unit T4 DNA polymerase at 37° C. for 2-10 minutes for the vector and 1-2 u T4 DNA polymerase at 15-17° C. for 10-60 minutes for the PCR product representing SEQ ID NO: 7081.

[103131] The reaction was stopped by addition of high-salt buffer and purified over QlAquick or NucleoSpin Extract II columns following the standard protocol (Qiagen or Macherey-Nagel).

[103132] According to this example the skilled person is able to clone all sequences disclosed in Table I, preferably column 5 or column 8, especially the coding region thereof.

[103133] Approximately 30-60 ng of prepared vector and a defined amount of prepared amplificate were mixed and hybridized at 65° C. for 15 minutes followed by 37° C. 0.1° C/1 seconds, followed by 37° C. 10 minutes, followed by 0.1° C/1 seconds, then 4-10 ° C.

[103134] The ligated constructs were transformed in the same reaction vessel by addition of competent E. coli cells (strain DH5alpha) and incubation for 20 minutes at 1° C. followed by a heat shock for 90 seconds at 42° C. and cooling to 1-4° C. Then, complete medium (SOC) was added and the mixture was incubated for 45 minutes at 37° C. The entire mixture was subsequently plated onto an agar plate with 0.05 mg/ml kanamycin and incubated overnight at 37° C.

[103135] The outcome of the cloning step was verified by amplification with the aid of primers which bind upstream and downstream of the integration site, thus allowing the amplification of the insertion.

[103136] The amplifications were carried out as described in the protocol of Taq DNA polymerase (Gibco-BRL).

[103137] The amplification cycles were as follows:

[103138] 1 cycle of 1-5 minutes at 94° C., followed by 35 cycles of in each case 15-60 seconds at 94° C., 15-60 seconds at 50-66° C. and 5-15 minutes at 72° C., followed by 1 cycle of 10 minutes at 72° C., then 4-16° C.

[103139] Several colonies were checked, but only one colony for which a PCR product of the expected size was detected was used in the following steps.

[103140] A portion of this positive colony was transferred into a reaction vessel filled with complete medium (LB) supplemented with kanamycin and incubated overnight at 37° C.

[103141] The plasmid preparation was carried out as specified in the Qiaprep or NucleoSpin Multi-96 Plus standard protocol (Qiagen or Macherey-Nagel).

[103142] [0501.1.7.20] to [0503.1.7.20] for the disclosure of these paragraphs see [0501.1.7.7] to [0503.1.7.7] above

[103143] Table d showing results of plant analyses

TABLE d

| SeqID | Target | Locus | Metabolite | Source | Promotor | Method | Min | Max |
|---|---|---|---|---|---|---|---|---|
| 113714 | plastidic | At2g36580 | hentriacontane | ARA_LEAF | p-PcUBI | GC | 28 | 48 |
| 108727 | non-targ | At2g42830 | hentriacontane | ARA_LEAF | p-PcUBI | GC | 49 | 90 |
| 1623 | non-targ | At2g45420 | hentriacontane | ARA_LEAF | p-PcUBI | GC | 34 | 100 |
| 109717 | non-targ | At4g09960 | hentriacontane | ARA_LEAF | p-PcUBI | GC | 27 | 231 |
| 142929 | non-targ | At5g43630 | hentriacontane | ARA_LEAF | p-PcUBI | GC | 26 | 37 |
| 70006 | non-targ | At5g60110 | hentriacontane | ARA_LEAF | p-PcUBI | GC | 28 | 97 |
| 29286 | non-targ | Avin- | hentriacontane | ARA_LEAF | p-PcUBI | GC | 55 | 116 |
| | | DRAFT_3209 | | | | | | |
| 32308 | non-targ | Avin- | hentriacontane | ARA_LEAF | p-PcUBI | GC | 26 | 53 |
| | | DRAFT_5292 | | | | | | |
| 154509 | plastidic | B0121 | hentriacontane | ARA_LEAF | p-Super | GC | 25 | 50 |
| 7081 | non-targ | B0161 | hentriacontane | ARA_LEAF | p-Super | GC | 26 | 69 |
| 155230 | non-targ | B0236 | hentriacontane | ARA_LEAF | p-Super | GC | 28 | 59 |
| 155370 | non-targ | B0577 | hentriacontane | ARA_LEAF | p-Super | GC | 26 | 65 |
| 143954 | non-targ | B0651 | hentriacontane | ARA_LEAF | p-Super | GC | 26 | 49 |
| 155613 | non-targ | B0787 | hentriacontane | ARA_LEAF | p-Super | GC | 24 | 107 |
| 155657 | non-targ | B0833 | hentriacontane | ARA_LEAF | p-Super | GC | 24 | 48 |
| 155665 | plastidic | B0921 | hentriacontane | ARA_LEAF | p-Super | GC | 27 | 30 |
| 37503 | non-targ | B1259 | hentriacontane | ARA_LEAF | p-Super | GC | 27 | 72 |
| 155890 | plastidic | B1281 | hentriacontane | ARA_LEAF | p-Super | GC | 41 | 48 |
| 76890 | non-targ | B1343 | hentriacontane | ARA_LEAF | p-Super | GC | 24 | 52 |
| 38289 | plastidic | B1445 | hentriacontane | ARA_LEAF | p-Super | GC | 27 | 47 |
| 38300 | non-targ | B1597 | hentriacontane | ARA_LEAF | p-Super | GC | 38 | 96 |
| 38345 | plastidic | B1627 | hentriacontane | ARA_LEAF | p-Super | GC | 29 | 40 |
| 156392 | plastidic | B1649 | hentriacontane | ARA_LEAF | p-Super | GC | 28 | 48 |
| 78753 | non-targ | B1670 | hentriacontane | ARA_LEAF | p-Super | GC | 30 | 48 |
| 156542 | plastidic | B1704 | hentriacontane | ARA_LEAF | p-Super | GC | 25 | 83 |
| 79181 | non-targ | B1930 | hentriacontane | ARA_LEAF | p-Super | GC | 30 | 52 |
| 79217 | non-targ | B2027 | hentriacontane | ARA_LEAF | p-Super | GC | 26 | 43 |
| 104277 | non-targ | B2053 | hentriacontane | ARA_LEAF | p-Super | GC | 24 | 41 |
| 156810 | plastidic | B2207 | hentriacontane | ARA_LEAF | p-Super | GC | 32 | 43 |
| 146238 | non-targ | B2389 | hentriacontane | ARA_LEAF | p-Super | GC | 26 | 47 |
| 39237 | non-targ | B2399 | hentriacontane | ARA_LEAF | p-Super | GC | 97 | 168 |
| 39300 | non-targ | B2414 | hentriacontane | ARA_LEAF | p-Super | GC | 31 | 77 |
| 115628 | non-targ | B2439 | hentriacontane | ARA_LEAF | p-Super | GC | 28 | 49 |
| 156910 | plastidic | B2554 | hentriacontane | ARA_LEAF | p-Super | GC | 28 | 97 |
| 146288 | non-targ | B2653 | hentriacontane | ARA_LEAF | p-Super | GC | 28 | 43 |
| 81451 | non-targ | B2762 | hentriacontane | ARA_LEAF | p-Super | GC | 31 | 39 |
| 81576 | non-targ | B2818 | hentriacontane | ARA_LEAF | p-Super | GC | 24 | 125 |
| 157128 | non-targ | B2822 | hentriacontane | ARA_LEAF | p-Super | GC | 27 | 47 |
| 41499 | non-targ | B2957 | hentriacontane | ARA_LEAF | p-Super | GC | 38 | 65 |
| 157321 | plastidic | B2965 | hentriacontane | ARA_LEAF | p-Super | GC | 37 | 114 |
| 157450 | plastidic | B3385 | hentriacontane | ARA_LEAF | p-Super | GC | 35 | 97 |
| 125264 | plastidic | B3568 | hentriacontane | ARA_LEAF | p-Super | GC | 27 | 47 |
| 46850 | non-targ | GM02LC44512 | hentriacontane | ARA_LEAF | p-PcUBI | GC | 31 | 89 |
| 59370 | plastidic | Slr2124 | hentriacontane | ARA_LEAF | p-PcUBI | GC | 25 | 42 |
| 60301 | non-targ | TTC0035 | hentriacontane | ARA_LEAF | p-PcUBI | GC | 52 | 117 |
| 61553 | non-targ | TTC0917 | hentriacontane | ARA_LEAF | p-PcUBI | GC | 25 | 93 |
| 88879 | plastidic | Ybr249c | hentriacontane | ARA_LEAF | p-Super | GC | 31 | 88 |
| 64144 | non-targ | Yfl019c | hentriacontane | ARA_LEAF | Big35S | GC | 40 | 1100 |
| 120309 | non-targ | Yfl053w | hentriacontane | ARA_LEAF | Big35S | GC | 25 | 56 |
| 157717 | plastidic | YGRO55W | hentriacontane | ARA_LEAF | p-Super | GC | 26 | 41 |
| 157832 | plastidic | YHL039W | hentriacontane | ARA_LEAF | p-Super | GC | 25 | 53 |
| 157858 | non-targ | Yhr022c-a | hentriacontane | ARA_LEAF | Big35S | GC | 25 | 111 |
| 97631 | non-targ | Yjl127w-a | hentriacontane | ARA_LEAF | Big35S | GC | 36 | 78 |
| 157862 | plastidic | Ylr157c | hentriacontane | ARA_LEAF | p-Super | GC | 26 | 45 |
| 129546 | plastidic | Ynl321w | hentriacontane | ARA_LEAF | p-Super | GC | 25 | 57 |
| 113647 | plastidic | Ypr170c | hentriacontane | ARA_LEAF | p-Super | GC | 32 | 72 |
| 158033 | non-targ | YPR172W | hentriacontane | ARA_LEAF | Big35S | GC | 26 | 72 |
| 125348 | non-targ | B3644 | hentriacontane | ARA_LEAF | p-Super | GC | 8 | 450 |

[103144] Column 1 shows the SEQ ID NO, Column 2 shows the expression type (targeted or non-targeted), Column 3 shows the “gene name” (locus), Column 4 shows the metabolite analyzed, Column 5 indicates the A. thaliana source tissue analyzed, Column 6 indicates the used promoter for expression, Column 7 indicates the analytical method. Columns 8 and 9 show the minimum and the maximum increase of the analyzed metabolite (in percent) in comparison to the wild type (ratio_by_WT, given as percent increase).

[103145] The term “non-targ” in Table d, Column 2 which shows the expression type means “non-targeted”.

[103146] When the analyses were repeated independently, all results proved to be significant.

[103147] [0505.1.7.20] to [0515.1.7.20] for the disclosure of these paragraphs see [0505.1.7.7] to [0515.1.7.7] above

Lengthy table referenced here
US20140259212A1-20140911-T00001
Please refer to the end of the specification for access instructions.

Lengthy table referenced here
US20140259212A1-20140911-T00002
Please refer to the end of the specification for access instructions.

Lengthy table referenced here
US20140259212A1-20140911-T00003
Please refer to the end of the specification for access instructions.

Lengthy table referenced here
US20140259212A1-20140911-T00004
Please refer to the end of the specification for access instructions.

Lengthy table referenced here
US20140259212A1-20140911-T00005
Please refer to the end of the specification for access instructions.

Lengthy table referenced here
US20140259212A1-20140911-T00006
Please refer to the end of the specification for access instructions.

LENGTHY TABLES
The patent application contains a lengthy table section. A copy of the table is available in electronic form from the USPTO web site (http://seqdata.uspto.gov/?pageRequest=docDetail&DocID=US20140259212A1). An electronic copy of the table will also be available from the USPTO upon request and payment of the fee set forth in 37 CFR 1.19(b)(3).

The application's sequence listing, which the Patent Office published only in electronic form, follows.

SEQUENCE LISTING (158060 sequences)

SEQ ID NO: 1 - protein, 62 aa, Acetabularia mediterranea
MASIMMNKSVVLSKECAKPLATPKVTLNKRGFATTIATKNREMMVWQPFNNKMFETFSFLPP

SEQ ID NO: 2 - protein, 90 aa, Arabidopsis thaliana
MAASLQSTATFLQSAKIATAPSRGSSHLRSTQAVGKSFGLETSSARLTCSFQSDFKDFTGKCSDAVKIAGFALATSALVVSGASAEGAPK

SEQ ID NO: 3 - protein, 96 aa, Arabidopsis thaliana
MAQVSRICNGVQNPSLICNLSKSSQRKSPLSVSLKTQQHPRAYPISSSWGLKKSGMTLIGSELRPLKVMSSVSTAEKASEIVLQPIREISGLIKLP

SEQ ID NO: 4 - protein, 100 aa, Arabidopsis thaliana
MAAATTTTTTSSSISFSTKPSPSSSKSPLPISRFSLPFSLNPNKSSSSSRRRGIKSSSPSSISAVLNTTTNVTTTPSPTKPTKPETFISRFAPDQPRKGA

SEQ ID NO: 5 - protein, 46 aa, Arabidopsis thaliana
MITSSLTCSLQALKLSSPFAHGSTPLSSLSKPNSFPNHRMPALVPV

SEQ ID NO: 6 - protein, 93 aa, Arabidopsis thaliana
MASLLGTSSSAIWASPSLSSPSSKPSSSPICFRPGKLFGSKLNAGIQIRPKKNRSRYHVSVMNVATEINSTEQVVGKFDSKKSARPVYPFAAI

SEQ ID NO: 7 - protein, 52 aa, Arabidopsis thaliana
MASTALSSAIVGTSFIRRSPAPISLRSLPSANTQSLFGLKSGTARGGRVVAM

SEQ ID NO: 8 - protein, 39 aa, Arabidopsis thaliana
MAASTMALSSPAFAGKAVNLSPAASEVLGSGRVTNRKTV

SEQ ID NO: 9 - protein, 92 aa, Arabidopsis thaliana
MAAITSATVTIPSFTGLKLAVSSKPKTLSTISRSSSATRAPPKLALKSSLKDFGVIAVATAASIVLAGNAMAMEVLLGSDDGSLAFVPSEFT

SEQ ID NO: 10 - protein, 85 aa, Arabidopsis thaliana
MAAAVSTVGAINRAPLSLNGSGSGAVSAPASTFLGKKVVTVSRFAQSNKKSNGSFKVLAVKEDKQTDGDRWRGLAYDTSDDQIDI

SEQ ID NO: 11 - protein, 54 aa, Arabidopsis thaliana
MKSSMLSSTAWTSPAQATMVAPFTGLKSSASFPVTRKANNDITSITSNGGRVSC

SEQ ID NO: 12 - protein, 91 aa, Arabidopsis thaliana
MAASGTSATFRASVSSAPSSSSQLTHLKSPFKAVKYTPLPSSRSKSSSFSVSCTIAKDPPVLMAAGSDPALWQRPDSFGRFGKFGGKYVPE

SEQ ID NO: 13 - protein, 80 aa, Brassica campestris
MSTTFCSSVCMQATSLAATTRISFQKPALVSTTNLSFNLRRSIPTRFSISCAAKPETVEKVSKIVKKQLSLKDDQKVVAE

SEQ ID NO: 14 - protein, 51 aa, Brassica napus
MATTFSASVSMQATSLATTTRISFQKPVLVSNHGRTNLSFNLSRTRLSISC

SEQ ID NO: 15 - protein, 44 aa, Chlamydomonas reinhardtii
MQALSSRVNIAAKPQRAQRLVVRAEEVKAAPKKEVGPKRGSLVK

SEQ ID NO: 16 - protein, 51 aa, Cucurbita moschata
MAELIQDKESAQSAATAAAASSGYERRNEPAHSRKFLEVRSEEELLSCIKK

SEQ ID NO: 17 - protein, 62 aa, Spinacea oleracea
MSTINGCLTSISPSRTQLKNTSTLRPTFIANSRVNPSSSVPPSLIRNQPVFAAPAPIITPTL

SEQ ID NO: 18 - protein, 75 aa, Spinacea oleracea
MTTAVTAAVSFPSTKTTSLSARCSSVISPDKISYKKVPLYYRNVSATGKMGPIRAQIASDVEAPPPAPAKVEKMS

SEQ ID NO: 19 - protein, 55 aa, Spinacea oleracea
MTTAVTAAVSFPSTKTTSLSARSSSVISPDKISYKKVPLYYRNVSATGKMGPIRA

SEQ ID NO: 20 - DNA, 19 bp, Artificial sequence
  adapter sequence added to gene specific primers for cloning purposes
ggaattccagctgaccacc

SEQ ID NO: 21 - DNA, 20 bp, Artificial sequence
  adapter sequence added to gene specific primers for cloning purposes
gatccccgggaattgccatg

SEQ ID NO: 22 - DNA, 10 bp, Artificial sequence
  adapter sequence added to gene specific primers for cloning purposes
ttgctcttcc

SEQ ID NO: 23 - DNA, 10 bp, Artificial sequence
  adapter sequence added to gene specific primers for cloning purposes
ttgctcttcg

SEQ ID NO: 24 - DNA, 34 bp, Artificial sequence
  Amplification of the targeting sequence of the gene FNR from Spinacia oleracea to generate the S.cerevisiae plastidic targeting vector VC-MME354-1
atagaattcgcataaacttatcttcatagttgcc

SEQ ID NO: 25 - DNA, 27 bp, Artificial sequence
  Amplification of the targeting sequence of the gene FNR from Spinacia oleracea to generate the S.cerevisiae plastidic targeting vector VC-MME354-1
atagaattcagaggcgatctgggccct

SEQ ID NO: 26 - DNA, 36 bp, Artificial sequence
  Amplification of the targeting sequence of the gene FNR from Spinacia oleracea to generate the E.coli plastidic targeting vector VC-MME432-1
atagtttaaacgcataaacttatcttcatagttgcc

SEQ ID NO: 27 - DNA, 34 bp, Artificial sequence
  Amplification of the targeting sequence of the gene FNR from Spinacia oleracea to generate the E.coli plastidic targeting vector VC-MME432-1
ataccatggaagagcaagaggcgatctgggccct

SEQ ID NO: 28 - DNA, 419 bp, Spinacia oleracea
  5'UTR (1)..(168)
  CDS (166)..(273)
  CDS (351)..(419)
gcataaacttatcttcatagttgccactccaatttgctccttgaatctcctccacccaatacataatccactcctccatcacccacttcactactaaatcaaacttaactctgtttttctctctcctcctttcatttcttattcttccaatcatcgtactccgccatgaccaccgctgtcaccgccgctgtttctttcccctctaccaaaaccacctctctctccgcccgaagctcctccgtcatttcccctgacaaaatcagctacaaaaaggtgattcccaatttcactgtgttttttattaataatttgttattttgatgatgagatgattaatttgggtgctgcaggttcctttgtactacaggaatgtatctgcaactgggaaaatgggacccatcagggcccagatcgcctct

SEQ ID NO: 29 - protein, 59 aa, Spinacia oleracea
MTTAVTAAVSFPSTKTTSLSARSSSVISPDKISYKKVPLYYRNVSATGKMGPIRAQIAS

SEQ ID NO: 30 - DNA, 9041 bp, Artificial sequence
  pMTX0270p
gctttgggcggatccggacaatcagtaaattgaacggagaatattattcataaaaatacgatagtaacgggtgatatattcattagaatgaaccgaaaccggcggtaaggatctgagctacacatgctcaggttttttacaacgtgcacaacagaattgaaagcaaatatcatgcgatcataggcgtctcgcatatctcattaaagcagggcatgccggtcgagtcaaatctcggtgacgggcaggaccggacggggcggtaccggcaggctgaagtccagctgccagaaacccacgtcatgccagttcccgtgcttgaagccggccgcccgcagcatgccgcggggggcatatccgagcgcctcgtgcatgcgcacgctcgggtcgttgggcagcccgatgacagcgaccacgctcttgaagccctgtgcctccagggacttcagcaggtgggtgtagagcgtggagcccagtcccgtccgctggtggcggggggagacgtacacggtcgactcggccgtccagtcgtaggcgttgcgtgccttccaggggcccgcgtaggcgatgccggcgacctcgccgtccacctcggcgacgagccagggatagcgctcccgcagacggacgaggtcgtccgtccactcctgcggttcctgcggctcggtacggaagttgaccgtgcttgtctcgatgtagtggttgacgatggtgcagaccgccggcatgtccgcctcggtggcacggcggatgtcggccgggcgtcgttctgggctcatggtagactcgacggatccacgtgtggaagatatgaatttttttgagaaactagataagattaatgaatatcggtgttttggttttttcttgtggccgtctttgtttatattgagatttttcaaatcagtgcgcaagacgtgacgtaagtatccgagtcagtttttatttttctactaatttggtcgaatctagattcgacggtatcgataagctcgcggatccctgaaagcgacgttggatgttaacatctacaaattgccttttcttatcgaccatgtacgtaagcgcttacgtttttggtggacccttgaggaaactggtagctgttgtgggcctgtggtctcaagatggatcattaatttccaccttcacctacgatggggggcatcgcaccggtgagtaatattgtacggctaagagcgaatttggcctgtaggatccctgaaagcgacgttggatgttaacatctacaaattgccttttcttatcgaccatgtacgtaagcgcttacgtttttggtggacccttgaggaaactggtagctgttgtgggcctgtggtctcaagatggatcattaatttccaccttcacctacgatggggggcatcgcaccggtgagtaatattgtacggctaagagcgaatttggcctgtaggatccctgaaagcgacgttggatgttaacatctacaaattgccttttcttatcgaccatgtacgtaagcgcttacgtttttggtggacccttgaggaaactggtagctgttgtgggcctgtggtctcaagatggatcattaatttccaccttcacctacgatggggggcatcgcaccggtgagtaatattgtacggctaagagcgaatttggcctgtaggatccgcgagctggtcaatcccattgcttttgaagcagctcaacattgatctctttctcgatcgagggagatttttcaaatcagtgcgcaagacgtgacgtaagtatccgagtcagtttttatttttctactaatttggtcgtttatttcggcgtgtaggacatggcaaccgggcctgaatttcgcgggtattctgtttctattccaactttttcttgatccgcagccattaacgacttttgaatagatacgctgacacgccaagcctcgctagtcaaaagtgtaccaaacaacgctttacagcaagaacggaatgcgcgtgacgctcgcggtgacgccatttcgccttttcagaaatggataaatagccttgcttcctattatatcttcccaaattaccaatacattacactagcatctgaatttcataaccaatctcgatacaccaaatcgaagatctcccgggttgctcttccatggcaatgattaattaacgaagagcaagagctcgaatttccccgatcgttcaaacatttggcaataaagtttcttaagattgaatcctgttgccggtcttgcgatgattatcatataatttctgttgaattacgttaagcatgtaataattaacatgtaatgcatgacgttatttatgagatgggtttttatgattagagtcccgcaattatacatttaatacgcgatagaaaacaaaatatagcgcgcaaactaggataaattatcgcgcgcggtgtcatctatgttactagatcgggaattggcatgcaagcttggcactggccgtcgttttacaacgtcgtgactgggaaaaccctggcgttacccaacttaatcgccttgcagcacatccccctttcgccagctggcgtaatagcgaagaggcccgcaccgatcgcccttcccaacagttgcgcagcctgaatggcgaatgctagagcagcttgagcttggatcagattgtcgtttcccgccttcagtttaaactatcagtgtttgacaggatatattggcgggtaaacctaagagaaaagagcgtttattagaataatcggatatttaaaagggcgtgaaaaggtttatccgttcgtccatttgtatgtgcatgccaaccacagggttcccctcgggatcaaagtactttgatccaacccctccgctgctatagtgcagtcggcttctgacgttcagtgcagccgtcttctgaaaacgacatgtcgcacaagtcctaagttacgcgacaggctgccgccctgcccttttcctggcgttttcttgtcgcgtgttttagtcgcataaagtagaatacttgcgactagaaccggagacattacgccatgaacaagagcgccgccgctggcctgctgggctatgcccgcgtcagcaccgacgaccaggacttgaccaaccaacgggccgaactgcacgcggccggctgcaccaagctgttttccgagaagatcaccggcaccaggcgcgaccgcccggagctggccaggatgcttgaccacctacgccctggcgacgttgtgacagtgaccaggctagaccgcctggcccgcagcacccgcgacctactggacattgccgagcgcatccaggaggccggcgcgggcctgcgtagcctggcagagccgtgggccgacaccaccacgccggccggccgcatggtgttgaccgtgttcgccggcattgccgagttcgagcgttccctaatcatcgaccgcacccggagcgggcgcgaggccgccaaggcccgaggcgtgaagtttggcccccgccctaccctcaccccggcacagatcgcgcacgcccgcgagctgatcgaccaggaaggccgcaccgtgaaagaggcggctgcactgcttggcgtgcatcgctcgaccctgtaccgcgcacttgagcgcagcgaggaagtgacgcccaccgaggccaggcggcgcggtgccttccgtgaggacgcattgaccgaggccgacgccctggcggccgccgagaatgaacgccaagaggaacaagcatgaaaccgcaccaggacggccaggacgaaccgtttttcattaccgaagagatcgaggcggagatgatcgcggccgggtacgtgttcgagccgcccgcgcacgtctcaaccgtgcggctgcatgaaatcctggccggtttgtctgatgccaagctggcggcctggccggccagcttggccgctgaagaaaccgagcgccgccgtctaaaaaggtgatgtgtatttgagtaaaacagcttgcgtcatgcggtcgctgcgtatatgatgcgatgagtaaataaacaaatacgcaaggggaacgcatgaaggttatcgctgtacttaaccagaaaggcgggtcaggcaagacgaccatcgcaacccatctagcccgcgccctgcaactcgccggggccgatgttctgttagtcgattccgatccccagggcagtgcccgcgattgggcggccgtgcgggaagatcaaccgctaaccgttgtcggcatcgaccgcccgacgattgaccgcgacgtgaaggccatcggccggcgcgacttcgtagtgatcgacggagcgccccaggcggcggacttggctgtgtccgcgatcaaggcagccgacttcgtgctgattccggtgcagccaagcccttacgacatatgggccaccgccgacctggtggagctggttaagcagcgcattgaggtcacggatggaaggctacaagcggcctttgtcgtgtcgcgggcgatcaaaggcacgcgcatcggcggtgaggttgccgaggcgctggccgggtacgagctgcccattcttgagtcccgtatcacgcagcgcgtgagctacccaggcactgccgccgccggcacaaccgttcttgaatcagaacccgagggcgacgctgcccgcgaggtccaggcgctggccgctgaaattaaatcaaaactcatttgagttaatgaggtaaagagaaaatgagcaaaagcacaaacacgctaagtgccggccgtccgagcgcacgcagcagcaaggctgcaacgttggccagcctggcagacacgccagccatgaagcgggtcaactttcagttgccggcggaggatcacaccaagctgaagatgtacgcggtacgccaaggcaagaccattaccgagctgctatctgaatacatcgcgcagctaccagagtaaatgagcaaatgaataaatgagtagatgaattttagcggctaaaggaggcggcatggaaaatcaagaacaaccaggcaccgacgccgtggaatgccccatgtgtggaggaacgggcggttggccaggcgtaagcggctgggttgcctgccggccctgcaatggcactggaacccccaagcccgaggaatcggcgtgagcggtcgcaaaccatccggcccggtacaaatcggcgcggcgctgggtgatgacctggtggagaagttgaaggccgcgcaggccgcccagcggcaacgcatcgaggcagaagcacgccccggtgaatcgtggcaagcggccgctgatcgaatccgcaaagaatcccggcaaccgccggcagccggtgcgccgtcgattaggaagccgcccaagggcgacgagcaaccagattttttcgttccgatgctctatgacgtgggcacccgcgatagtcgcagcatcatggacgtggccgttttccgtctgtcgaagcgtgaccgacgagctggcgaggtgatccgctacgagcttccagacgggcacgtagaggtttccgcagggccggccggcatggccagtgtgtgggattacgacctggtactgatggcggtttcccatctaaccgaatccatgaaccgataccgggaagggaagggagacaagcccggccgcgtgttccgtccacacgttgcggacgtactcaagttctgccggcgagccgatggcggaaagcagaaagacgacctggtagaaacctgcattcggttaaacaccacgcacgttgccatgcagcgtacgaagaaggccaagaacggccgcctggtgacggtatccgagggtgaagccttgattagccgctacaagatcgtaaagagcgaaaccgggcggccggagtacatcgagatcgagctagctgattggatgtaccgcgagatcacagaaggcaagaacccggacgtgctgacggttcaccccgattactttttgatcgatcccggcatcggccgttttctctaccgcctggcacgccgcgccgcaggcaaggcagaagccagatggttgttcaagacgatctacgaacgcagtggcagcgccggagagttcaagaagttctgtttcaccgtgcgcaagctgatcgggtcaaatgacctgccggagtacgatttgaaggaggaggcggggcaggctggcccgatcctagtcatgcgctaccgcaacctgatcgagggcgaagcatccgccggttcctaatgtacggagcagatgctagggcaaattgccctagcaggggaaaaaggtcgaaaaggtctctttcctgtggatagcacgtacattgggaacccaaagccgtacattgggaaccggaacccgtacattgggaacccaaagccgtacattgggaaccggtcacacatgtaagtgactgatataaaagagaaaaaaggcgatttttccgcctaaaactctttaaaacttattaaaactcttaaaacccgcctggcctgtgcataactgtctggccagcgcacagccgaagagctgcaaaaagcgcctacccttcggtcgctgcgctccctacgccccgccgcttcgcgtcggcctatcgcggccgctggccgctcaaaaatggctggcctacggccaggcaatctaccagggcgcggacaagccgcgccgtcgccactcgaccgccggcgcccacatcaaggcaccctgcctcgcgcgtttcggtgatgacggtgaaaacctctgacacatgcagctcccggagacggtcacagcttgtctgtaagcggatgccgggagcagacaagcccgtcagggcgcgtcagcgggtgttggcgggtgtcggggcgcagccatgacccagtcacgtagcgatagcggagtgtatactggcttaactatgcggcatcagagcagattgtactgagagtgcaccatatgcggtgtgaaataccgcacagatgcgtaaggagaaaataccgcatcaggcgctcttccgcttcctcgctcactgactcgctgcgctcggtcgttcggctgcggcgagcggtatcagctcactcaaaggcggtaatacggttatccacagaatcaggggataacgcaggaaagaacatgtgagcaaaaggccagcaaaaggccaggaaccgtaaaaaggccgcgttgctggcgtttttccataggctccgcccccctgacgagcatcacaaaaatcgacgctcaagtcagaggtggcgaaacccgacaggactataaagataccaggcgtttccccctggaagctccctcgtgcgctctcctgttccgaccctgccgcttaccggatacctgtccgcctttctcccttcgggaagcgtggcgctttctcatagctcacgctgtaggtatctcagttcggtgtaggtcgttcgctccaagctgggctgtgtgcacgaaccccccgttcagcccgaccgctgcgccttatccggtaactatcgtcttgagtccaacccggtaagacacgacttatcgccactggcagcagccactggtaacaggattagcagagcgaggtatgtaggcggtgctacagagttcttgaagtggtggcctaactacggctacactagaaggacagtatttggtatctgcgctctgctgaagccagttaccttcggaaaaagagttggtagctcttgatccggcaaacaaaccaccgctggtagcggtggtttttttgtttgcaagcagcagattacgcgcagaaaaaaaggatctcaagaagatcctttgatcttttctacggggtctgacgctcagtggaacgaaaactcacgttaagggattttggtcatgcattctaggtactaaaacaattcatccagtaaaatataatattttattttctcccaatcaggcttgatccccagtaagtcaaaaaatagctcgacatactgttcttccccgatatcctccctgatcgaccggacgcagaaggcaatgtcataccacttgtccgccctgccgcttctcccaagatcaataaagccacttactttgccatctttcacaaagatgttgctgtctcccaggtcgccgtgggaaaagacaagttcctcttcgggcttttccgtctttaaaaaatcatacagctcgcgcggatctttaaatggagtgtcttcttcccagttttcgcaatccacatcggccagatcgttattcagtaagtaatccaattcggctaagcggctgtctaagctattcgtatagggacaatccgatatgtcgatggagtgaaagagcctgatgcactccgcatacagctcgataatcttttcagggctttgttcatcttcatactcttccgagcaaaggacgccatcggcctcactcatgagcagattgctccagccatcatgccgttcaaagtgcaggacctttggaacaggcagctttccttccagccatagcatcatgtccttttcccgttccacatcataggtggtccctttataccggctgtccgtcatttttaaatataggttttcattttctcccaccagcttatataccttagcaggagacattccttccgtatcttttacgcagcggtatttttcgatcagttttttcaattccggtgatattctcattttagccatttattatttccttcctcttttctacagtatttaaagataccccaagaagctaattataacaagacgaactccaattcactgttccttgcattctaaaaccttaaataccagaaaacagctttttcaaagttgttttcaaagttggcgtataacatagtatcgacggagccgattttgaaaccgcggtgatcacaggcagcaacgctctgtcatcgttacaatcaacatgctaccctccgcgagatcatccgtgtttcaaacccggcagcttagttgccgttcttccgaatagcatcggtaacatgagcaaagtctgccgccttacaacggctctcccgctgacgccgtcccggactgatgggctgcctgtatcgagtggtgattttgtgccgagctgccggtcggggagctgttggctggctggtggcaggatatattgtggtgtaaacaaattgacgcttagacaacttaataacacattgcggacgtttttaatgtactgaattaacgccgaattaa

SEQ ID NO: 31 - DNA, 8659 bp, Artificial sequence
  plasmid pMTX155
agcttggacaatcagtaaattgaacggagaatattattcataaaaatacgatagtaacgggtgatatattcattagaatgaaccgaaaccggcggtaaggatctgagctacacatgctcaggttttttacaacgtgcacaacagaattgaaagcaaatatcatgcgatcataggcgtctcgcatatctcattaaagcagggcatgccggtcgagtcaaatctcggtgacgggcaggaccggacggggcggtaccggcaggctgaagtccagctgccagaaacccacgtcatgccagttcccgtgcttgaagccggccgcccgcagcatgccgcggggggcatatccgagcgcctcgtgcatgcgcacgctcgggtcgttgggcagcccgatgacagcgaccacgctcttgaagccctgtgcctccagggacttcagcaggtgggtgtagagcgtggagcccagtcccgtccgctggtggcggggggagacgtacacggtcgactcggccgtccagtcgtaggcgttgcgtgccttccaggggcccgcgtaggcgatgccggcgacctcgccgtccacctcggcgacgagccagggatagcgctcccgcagacggacgaggtcgtccgtccactcctgcggttcctgcggctcggtacggaagttgaccgtgcttgtctcgatgtagtggttgacgatggtgcagaccgccggcatgtccgcctcggtggcacggcggatgtcggccgggcgtcgttctgggctcatggtagactcgacggatccacgtgtggaagatatgaatttttttgagaaactagataagattaatgaatatcggtgttttggttttttcttgtggccgtctttgtttatattgagatttttcaaatcagtgcgcaagacgtgacgtaagtatccgagtcagtttttatttttctactaatttggtcgaagctttgggcggatcctctagagcagcttgccaacatggtggagcacgacactctcgtctactccaagaatatcaaagatacagtctcagaagaccaaagggctattgagacttttcaacaaagggtaatatcgggaaacctcctcggattccattgcccagctatctgtcacttcatcaaaaggacagtagaaaaggaaggtggcacctacaaatgccatcattgcgataaaggaaaggctatcgttcaagatgcctctgccgacagtggtcccaaagatggacccccacccacgaggagcatcgtggaaaaagaagacgttccaaccacgtcttcaaagcaagtggattgatgtgaacatggtggagcacgacactctcgtctactccaagaatatcaaagatacagtctcagaagaccaaagggctattgagacttttcaacaaagggtaatatcgggaaacctcctcggattccattgcccagctatctgtcacttcatcaaaaggacagtagaaaaggaaggtggcacctacaaatgccatcattgcgataaaggaaaggctatcgttcaagatgcctctgccgacagtggtcccaaagatggacccccacccacgaggagcatcgtggaaaaagaagacgttccaaccacgtcttcaaagcaagtggattgatgtgatatctccactgacgtaagggatgacgcacaatcccactatccttcgcaagacccttcctctatataaggaagttcatttcatttggagaggacagggtaccctggaattccagctgaccaccatggcaattcccggggatcagctcgaatttccccgatcgttcaaacatttggcaataaagtttcttaagattgaatcctgttgccggtcttgcgatgattatcatataatttctgttgaattacgttaagcatgtaataattaacatgtaatgcatgacgttatttatgagatgggtttttatgattagagtcccgcaattatacatttaatacgcgatagaaaacaaaatatagcgcgcaaactaggataaattatcgcgcgcggtgtcatctatgttactagatcgggaattggcatgcaagcttggcactggccgtcgttttacaacgtcgtgactgggaaaaccctggcgttacccaacttaatcgccttgcagcacatccccctttcgccagctggcgtaatagcgaagaggcccgcaccgatcgcccttcccaacagttgcgcagcctgaatggcgaatgctagagcagcttgagcttggatcagattgtcgtttcccgccttcagtttaaactatcagtgtttgacaggatatattggcgggtaaacctaagagaaaagagcgtttattagaataacggatatttaaaagggcgtgaaaaggtttatccgttcgtccatttgtatgtgcatgccaaccacagggttcccctcgggatcaaagtactttgatccaacccctccgctgctatagtgcagtcggcttctgacgttcagtgcagccgtcttctgaaaacgacatgtcgcacaagtcctaagttacgcgacaggctgccgccctgcccttttcctggcgttttcttgtcgcgtgttttagtcgcataaagtagaatacttgcgactagaaccggagacattacgccatgaacaagagcgccgccgctggcctgctgggctatgcccgcgtcagcaccgacgaccaggacttgaccaaccaacgggccgaactgcacgcggccggctgcaccaagctgttttccgagaagatcaccggcaccaggcgcgaccgcccggagctggccaggatgcttgaccacctacgccctggcgacgttgtgacagtgaccaggctagaccgcctggcccgcagcacccgcgacctactggacattgccgagcgcatccaggaggccggcgcgggcctgcgtagcctggcagagccgtgggccgacaccaccacgccggccggccgcatggtgttgaccgtgttcgccggcattgccgagttcgagcgttccctaatcatcgaccgcacccggagcgggcgcgaggccgccaaggcccgaggcgtgaagtttggcccccgccctaccctcaccccggcacagatcgcgcacgcccgcgagctgatcgaccaggaaggccgcaccgtgaaagaggcggctgcactgcttggcgtgcatcgctcgaccctgtaccgcgcacttgagcgcagcgaggaagtgacgcccaccgaggccaggcggcgcggtgccttccgtgaggacgcattgaccgaggccgacgccctggcggccgccgagaatgaacgccaagaggaacaagcatgaaaccgcaccaggacggccaggacgaaccgtttttcattaccgaagagatcgaggcggagatgatcgcggccgggtacgtgttcgagccgcccgcgcacgtctcaaccgtgcggctgcatgaaatcctggccggtttgtctgatgccaagctggcggcctggccggccagcttggccgctgaagaaaccgagcgccgccgtctaaaaaggtgatgtgtatttgagtaaaacagcttgcgtcatgcggtcgctgcgtatatgatgcgatgagtaaataaacaaatacgcaaggggaacgcatgaaggttatcgctgtacttaaccagaaaggcgggtcaggcaagacgaccatcgcaacccatctagcccgcgccctgcaactcgccggggccgatgttctgttagtcgattccgatccccagggcagtgcccgcgattgggcggccgtgcgggaagatcaaccgctaaccgttgtcggcatcgaccgcccgacgattgaccgcgacgtgaaggccatcggccggcgcgacttcgtagtgatcgacggagcgccccaggcggcggacttggctgtgtccgcgatcaaggcagccgacttcgtgctgattccggtgcagccaagcccttacgacatatgggccaccgccgacctggtggagctggttaagcagcgcattgaggtcacggatggaaggctacaagcggcctttgtcgtgtcgcgggcgatcaaaggcacgcgcatcggcggtgaggttgccgaggcgctggccgggtacgagctgcccattcttgagtcccgtatcacgcagcgcgtgagctacccaggcactgccgccgccggcacaaccgttcttgaatcagaacccgagggcgacgctgcccgcgaggtccaggcgctggccgctgaaattaaatcaaaactcatttgagttaatgaggtaaagagaaaatgagcaaaagcacaaacacgctaagtgccggccgtccgagcgcacgcagcagcaaggctgcaacgttggccagcctggcagacacgccagccatgaagcgggtcaactttcagttgccggcggaggatcacaccaagctgaagatgtacgcggtacgccaaggcaagaccattaccgagctgctatctgaatacatcgcgcagctaccagagtaaatgagcaaatgaataaatgagtagatgaattttagcggctaaaggaggcggcatggaaaatcaagaacaaccaggcaccgacgccgtggaatgccccatgtgtggaggaacgggcggttggccaggcgtaagcggctgggttgtctgccggccctgcaatggcactggaacccccaagcccgaggaatcggcgtgacggtcgcaaaccatccggcccggtacaaatcggcgcggcgctgggtgatgacctggtggagaagttgaaggccgcgcaggccgcccagcggcaacgcatcgaggcagaagcacgccccggtgaatcgtggcaagcggccgctgatcgaatccgcaaagaatcccggcaaccgccggcagccggtgcgccgtcgattaggaagccgcccaagggcgacgagcaaccagattttttcgttccgatgctctatgacgtgggcacccgcgatagtcgcagcatcatggacgtggccgttttccgtctgtcgaagcgtgaccgacgagctggcgaggtgatccgctacgagcttccagacgggcacgtagaggtttccgcagggccggccggcatggccagtgtgtgggattacgacctggtactgatggcggtttcccatctaaccgaatccatgaaccgataccgggaagggaagggagacaagcccggccgcgtgttccgtccacacgttgcggacgtactcaagttctgccggcgagccgatggcggaaagcagaaagacgacctggtagaaacctgcattcggttaaacaccacgcacgttgccatgcagcgtacgaagaaggccaagaacggccgcctggtgacggtatccgagggtgaagccttgattagccgctacaagatcgtaaagagcgaaaccgggcggccggagtacatcgagatcgagctagctgattggatgtaccgcgagatcacagaaggcaagaacccggacgtgctgacggttcaccccgattactttttgatcgatcccggcatcggccgttttctctaccgcctggcacgccgcgccgcaggcaaggcagaagccagatggttgttcaagacgatctacgaacgcagtggcagcgccggagagttcaagaagttctgtttcaccgtgcgcaagctgatcgggtcaaatgacctgccggagtacgatttgaaggaggaggcggggcaggctggcccgatcctagtcatgcgctaccgcaacctgatcgagggcgaagcatccgccggttcctaatgtacggagcagatgctagggcaaattgccctagcaggggaaaaaggtcgaaaaggtctctttcctgtggatagcacgtacattgggaacccaaagccgtacattgggaaccggaacccgtacattgggaacccaaagccgtacattgggaaccggtcacacatgtaagtgactgatataaaagagaaaaaaggcgatttttccgcctaaaactctttaaaacttattaaaactcttaaaacccgcctggcctgtgcataactgtctggccagcgcacagccgaagagctgcaaaaagcgcctacccttcggtcgctgcgctccctacgccccgccgcttcgcgtcggcctatcgcggccgctggccgctcaaaaatggctggcctacggccaggcaatctaccagggcgcggacaagccgcgccgtcgccactcgaccgccggcgcccacatcaaggcaccctgcctcgcgcgtttcggtgatgacggtgaaaacctctgacacatgcagctcccggagacggtcacagcttgtctgtaagcggatgccgggagcagacaagcccgtcagggcgcgtcagcgggtgttggcgggtgtcggggcgcagccatgacccagtcacgtagcgatagcggagtgtatactggcttaactatgcggcatcagagcagattgtactgagagtgcaccatatgcggtgtgaaataccgcacagatgcgtaaggagaaaataccgcatcaggcgctcttccgcttcctcgctcactgactcgctgcgctcggtcgttcggctgcggcgagcggtatcagctcactcaaaggcggtaatacggttatccacagaatcaggggataacgcaggaaagaacatgtgagcaaaaggccagcaaaaggccaggaaccgtaaaaaggccgcgttgctggcgtttttccataggctccgcccccctgacgagcatcacaaaaatcgacgctcaagtcagaggtggcgaaacccgacaggactataaagataccaggcgtttccccctggaagctccctcgtgcgctctcctgttccgaccctgccgcttaccggatacctgtccgcctttctcccttcgggaagcgtggcgctttctcatagctcacgctgtaggtatctcagttcggtgtaggtcgttcgctccaagctgggctgtgtgcacgaaccccccgttcagcccgaccgctgcgccttatccggtaactatcgtcttgagtccaacccggtaagacacgacttatcgccactggcagcagccactggtaacaggattagcagagcgaggtatgtaggcggtgctacagagttcttgaagtggtggcctaactacggctacactagaaggacagtatttggtatctgcgctctgctgaagccagttaccttcggaaaaagagttggtagctcttgatccggcaaacaaaccaccgctggtagcggtggtttttttgtttgcaagcagcagattacgcgcagaaaaaaaggatctcaagaagatcctttgatcttttctacggggtctgacgctcagtggaacgaaaactcacgttaagggattttggtcatgcattctaggtactaaaacaattcatccagtaaaatataatattttattttctcccaatcaggcttgatccccagtaagtcaaaaaatagctcgacatactgttcttccccgatatcctccctgatcgaccggacgcagaaggcaatgtcataccacttgtccgccctgccgcttctcccaagatcaataaagccacttactttgccatctttcacaaagatgttgctgtctcccaggtcgccgtgggaaaagacaagttcctcttcgggcttttccgtctttaaaaaatcatacagctcgcgcggatctttaaatggagtgtcttcttcccagttttcgcaatccacatcggccagatcgttattcagtaagtaatccaattcggctaagcggctgtctaagctattcgtatagggacaatccgatatgtcgatggagtgaaagagcctgatgcactccgcatacagctcgataatcttttcagggctttgttcatcttcatactcttccgagcaaaggacgccatcggcctcactcatgagcagattgctccagccatcatgccgttcaaagtgcaggacctttggaacaggcagctttccttccagccatagcatcatgtccttttcccgttccacatcataggtggtccctttataccggctgtccgtcatttttaaatataggttttcattttctcccaccagcttatataccttagcaggagacattccttccgtatcttttacgcagcggtatttttcgatcagttttttcaattccggtgatattctcattttagccatttattatttccttcctcttttctacagtatttaaagataccccaagaagctaattataacaagacgaactccaattcactgttccttgcattctaaaaccttaaataccagaaaacagctttttcaaagttgttttcaaagttggcgtataacatagtatcgacggagccgattttgaaaccgcggtgatcacaggcagcaacgctctgtcatcgttacaatcaacatgctaccctccgcgagatcatccgtgtttcaaacccggcagcttagttgccgttcttccgaatagcatcggtaacatgagcaaagtctgccgccttacaacggctctcccgctgacgccgtcccggactgatgggctgcctgtatcgagtggtgattttgtgccgagctgccggtcggggagctgttggctggctggtggcaggatatattgtggtgtaaacaaattgacgcttagacaacttaataacacattgcggacgtttttaatgtactgaattaacgccgaatta

SEQ ID NO: 32 - DNA, 9469 bp, Artificial sequence
  plasmid VC-MME354-1QCZ
  5'UTR (2130)..(2294)
  transit_peptide (2295)..(2402)
  CDS (2295)..(2402)
  transit_peptide (2480)..(2548)
  CDS (2480)..(2548)
  CDS (2549)..(2566): adapter
agctttgggcggatcctctagaggacaatcagtaaattgaacggagaatattattcataaaaatacgatagtaacgggtgatatattcattagaatgaaccgaaaccggcggtaaggatctgagctacacatgctcaggttttttacaacgtgcacaacagaattgaaagcaaatatcatgcgatcataggcgtctcgcatatctcattaaagcagggcatgccggtcgagtcaaatctcggtgacgggcaggaccggacggggcggtaccggcaggctgaagtccagctgccagaaacccacgtcatgccagttcccgtgcttgaagccggccgcccgcagcatgccgcggggggcatatccgagcgcctcgtgcatgcgcacgctcgggtcgttgggcagcccgatgacagcgaccacgctcttgaagccctgtgcctccagggacttcagcaggtgggtgtagagcgtggagcccagtcccgtccgctggtggcggggggagacgtacacggtcgactcggccgtccagtcgtaggcgttgcgtgccttccaggggcccgcgtaggcgatgccggcgacctcgccgtccacctcggcgacgagccagggatagcgctcccgcagacggacgaggtcgtccgtccactcctgcggttcctgcggctcggtacggaagttgaccgtgcttgtctcgatgtagtggttgacgatggtgcagaccgccggcatgtccgcctcggtggcacggcggatgtcggccgggcgtcgttctgggctcatggtagactcgacggatccacgtgtggaagatatgaatttttttgagaaactagataagattaatgaatatcggtgttttggttttttcttgtggccgtctttgtttatattgagatttttcaaatcagtgcgcaagacgtgacgtaagtatccgagtcagtttttatttttctactaatttggtcgaatctagattcgacggtatcgataagctcgcggatccctgaaagcgacgttggatgttaacatctacaaattgccttttcttatcgaccatgtacgtaagcgcttacgtttttggtggacccttgaggaaactggtagctgttgtgggcctgtggtctcaagatggatcattaatttccaccttcacctacgatggggggcatcgcaccggtgagtaatattgtacggctaagagcgaatttggcctgtaggatccctgaaagcgacgttggatgttaacatctacaaattgccttttcttatcgaccatgtacgtaagcgcttacgtttttggtggacccttgaggaaactggtagctgttgtgggcctgtggtctcaagatggatcattaatttccaccttcacctacgatggggggcatcgcaccggtgagtaatattgtacggctaagagcgaatttggcctgtaggatccctgaaagcgacgttggatgttaacatctacaaattgccttttcttatcgaccatgtacgtaagcgcttacgtttttggtggacccttgaggaaactggtagctgttgtgggcctgtggtctcaagatggatcattaatttccaccttcacctacgatggggggcatcgcaccggtgagtaatattgtacggctaagagcgaatttggcctgtaggatccgcgagctggtcaatcccattgcttttgaagcagctcaacattgatctctttctcgatcgagggagatttttcaaatcagtgcgcaagacgtgacgtaagtatccgagtcagtttttatttttctactaatttggtcgtttatttcggcgtgtaggacatggcaaccgggcctgaatttcgcgggtattctgtttctattccaactttttcttgatccgcagccattaacgacttttgaatagatacgctgacacgccaagcctcgctagtcaaaagtgtaccaaacaacgctttacagcaagaacggaatgcgcgtgacgctcgcggtgacgccatttcgccttttcagaaatggataaatagccttgcttcctattatatcttcccaaattaccaatacattacactagcatctgaatttcataaccaatctcgatacaccaaatcgaagatctccctggaattcgcataaacttatcttcatagttgccactccaatttgctccttgaatctcctccacccaatacataatccactcctccatcacccacttcactactaaatcaaacttaactctgtttttctctctcctcctttcatttcttattcttccaatcatcgtactccgccatgaccaccgctgtcaccgccgctgtttctttcccctctaccaaaaccacctctctctccgcccgaagctcctccgtcatttcccctgacaaaatcagctacaaaaaggtgattcccaatttcactgtgttttttattaataatttgttattttgatgatgagatgattaatttgggtgctgcaggttcctttgtactacaggaatgtatctgcaactgggaaaatgggacccatcagggcccagatcgcctctgaattccagctgaccaccatggcaattcccggggatcagctcgaatttccccgatcgttcaaacatttggcaataaagtttcttaagattgaatcctgttgccggtcttgcgatgattatcatataatttctgttgaattacgttaagcatgtaataattaacatgtaatgcatgacgttatttatgagatgggtttttatgattagagtcccgcaattatacatttaatacgcgatagaaaacaaaatatagcgcgcaaactaggataaattatcgcgcgcggtgtcatctatgttactagatcgggaattggcatgcaagcttggcactggccgtcgttttacaacgtcgtgactgggaaaaccctggcgttacccaacttaatcgccttgcagcacatccccctttcgccagctggcgtaatagcgaagaggcccgcaccgatcgcccttcccaacagttgcgcagcctgaatggcgaatgctagagcagcttgagcttggatcagattgtcgtttcccgccttcagtttaaactatcagtgtttgacaggatatattggcgggtaaacctaagagaaaagagcgtttattagaataatcggatatttaaaagggcgtgaaaaggtttatccgttcgtccatttgtatgtgcatgccaaccacagggttcccctcgggatcaaagtactttgatccaacccctccgctgctatagtgcagtcggcttctgacgttcagtgcagccgtcttctgaaaacgacatgtcgcacaagtcctaagttacgcgacaggctgccgccctgcccttttcctggcgttttcttgtcgcgtgttttagtcgcataaagtagaatacttgcgactagaaccggagacattacgccatgaacaagagcgccgccgctggcctgctgggctatgcccgcgtcagcaccgacgaccaggacttgaccaaccaacgggccgaactgcacgcggccggctgcaccaagctgttttccgagaagatcaccggcaccaggcgcgaccgcccggagctggccaggatgcttgaccacctacgccctggcgacgttgtgacagtgaccaggctagaccgcctggcccgcagcacccgcgacctactggacattgccgagcgcatccaggaggccggcgcgggcctgcgtagcctggcagagccgtgggccgacaccaccacgccggccggccgcatggtgttgaccgtgttcgccggcattgccgagttcgagcgttccctaatcatcgaccgcacccggagcgggcgcgaggccgccaaggcccgaggcgtgaagtttggcccccgccctaccctcaccccggcacagatcgcgcacgcccgcgagctgatcgaccaggaaggccgcaccgtgaaagaggcggctgcactgcttggcgtgcatcgctcgaccctgtaccgcgcacttgagcgcagcgaggaagtgacgcccaccgaggccaggcggcgcggtgccttccgtgaggacgcattgaccgaggccgacgccctggcggccgccgagaatgaacgccaagaggaacaagcatgaaaccgcaccaggacggccaggacgaaccgtttttcattaccgaagagatcgaggcggagatgatcgcggccgggtacgtgttcgagccgcccgcgcacgtctcaaccgtgcggctgcatgaaatcctggccggtttgtctgatgccaagctggcggcctggccggccagcttggccgctgaagaaaccgagcgccgccgtctaaaaaggtgatgtgtatttgagtaaaacagcttgcgtcatgcggtcgctgcgtatatgatgcgatgagtaaataaacaaatacgcaaggggaacgcatgaaggttatcgctgtacttaaccagaaaggcgggtcaggcaagacgaccatcgcaacccatctagcccgcgccctgcaactcgccggggccgatgttctgttagtcgattccgatccccagggcagtgcccgcgattgggcggccgtgcgggaagatcaaccgctaaccgttgtcggcatcgaccgcccgacgattgaccgcgacgtgaaggccatcggccggcgcgacttcgtagtgatcgacggagcgccccaggcggcggacttggctgtgtccgcgatcaaggcagccgacttcgtgctgattccggtgcagccaagcccttacgacatatgggccaccgccgacctggtggagctggttaagcagcgcattgaggtcacggatggaaggctacaagcggcctttgtcgtgtcgcgggcgatcaaaggcacgcgcatcggcggtgaggttgccgaggcgctggccgggtacgagctgcccattcttgagtcccgtatcacgcagcgcgtgagctacccaggcactgccgccgccggcacaaccgttcttgaatcagaacccgagggcgacgctgcccgcgaggtccaggcgctggccgctgaaattaaatcaaaactcatttgagttaatgaggtaaagagaaaatgagcaaaagcacaaacacgctaagtgccggccgtccgagcgcacgcagcagcaaggctgcaacgttggccagcctggcagacacgccagccatgaagcgggtcaactttcagttgccggcggaggatcacaccaagctgaagatgtacgcggtacgccaaggcaagaccattaccgagctgctatctgaatacatcgcgcagctaccagagtaaatgagcaaatgaataaatgagtagatgaattttagcggctaaaggaggcggcatggaaaatcaagaacaaccaggcaccgacgccgtggaatgccccatgtgtggaggaacgggcggttggccaggcgtaagcggctgggttgcctgccggccctgcaatggcactggaacccccaagcccgaggaatcggcgtgagcggtcgcaaaccatccggcccggtacaaatcggcgcggcgctgggtgatgacctggtggagaagttgaaggccgcgcaggccgcccagcggcaacgcatcgaggcagaagcacgccccggtgaatcgtggcaagcggccgctgatcgaatccgcaaagaatcccggcaaccgccggcagccggtgcgccgtcgattaggaagccgcccaagggcgacgagcaaccagattttttcgttccgatgctctatgacgtgggcacccgcgatagtcgcagcatcatggacgtggccgttttccgtctgtcgaagcgtgaccgacgagctggcgaggtgatccgctacgagcttccagacgggcacgtagaggtttccgcagggccggccggcatggccagtgtgtgggattacgacctggtactgatggcggtttcccatctaaccgaatccatgaaccgataccgggaagggaagggagacaagcccggccgcgtgttccgtccacacgttgcggacgtactcaagttctgccggcgagccgatggcggaaagcagaaagacgacctggtagaaacctgcattcggttaaacaccacgcacgttgccatgcagcgtacgaagaaggccaagaacggccgcctggtgacggtatccgagggtgaagccttgattagccgctacaagatcgtaaagagcgaaaccgggcggccggagtacatcgagatcgagctagctgattggatgtaccgcgagatcacagaaggcaagaacccggacgtgctgacggttcaccccgattactttttgatcgatcccggcatcggccgttttctctaccgcctggcacgccgcgccgcaggcaaggcagaagccagatggttgttcaagacgatctacgaacgcagtggcagcgccggagagttcaagaagttctgtttcaccgtgcgcaagctgatcgggtcaaatgacctgccggagtacgatttgaaggaggaggcggggcaggctggcccgatcctagtcatgcgctaccgcaacctgatcgagggcgaagcatccgccggttcctaatgtacggagcagatgctagggcaaattgccctagcaggggaaaaaggtcgaaaaggtctctttcctgtggatagcacgtacattgggaacccaaagccgtacattgggaaccggaacccgtacattgggaacccaaagccgtacattgggaaccggtcacacatgtaagtgactgatataaaagagaaaaaaggcgatttttccgcctaaaactctttaaaacttattaaaactcttaaaacccgcctggcctgtgcataactgtctggccagcgcacagccgaagagctgcaaaaagcgcctacccttcggtcgctgcgctccctacgccccgccgcttcgcgtcggcctatcgcggccgctggccgctcaaaaatggctggcctacggccaggcaatctaccagggcgcggacaagccgcgccgtcgccactcgaccgccggcgcccacatcaaggcaccctgcctcgcgcgtttcggtgatgacggtgaaaacctctgacacatgcagctcccggagacggtcacagcttgtctgtaagcggatgccgggagcagacaagcccgtcagggcgcgtcagcgggtgttggcgggtgtcggggcgcagccatgacccagtcacgtagcgatagcggagtgtatactggcttaactatgcggcatcagagcagattgtactgagagtgcaccatatgcggtgtgaaataccgcacagatgcgtaaggagaaaataccgcatcaggcgctcttccgcttcctcgctcactgactcgctgcgctcggtcgttcggctgcggcgagcggtatcagctcactcaaaggcggtaatacggttatccacagaatcaggggataacgcaggaaagaacatgtgagcaaaaggccagcaaaaggccaggaaccgtaaaaaggccgcgttgctggcgtttttccataggctccgcccccctgacgagcatcacaaaaatcgacgctcaagtcagaggtggcgaaacccgacaggactataaagataccaggcgtttccccctggaagctccctcgtgcgctctcctgttccgaccctgccgcttaccggatacctgtccgcctttctcccttcgggaagcgtggcgctttctcatagctcacgctgtaggtatctcagttcggtgtaggtcgttcgctccaagctgggctgtgtgcacgaaccccccgttcagcccgaccgctgcgccttatccggtaactatcgtcttgagtccaacccggtaagacacgacttatcgccactggcagcagccactggtaacaggattagcagagcgaggtatgtaggcggtgctacagagttcttgaagtggtggcctaactacggctacactagaaggacagtatttggtatctgcgctctgctgaagccagttaccttcggaaaaagagttggtagctcttgatccggcaaacaaaccaccgctggtagcggtggtttttttgtttgcaagcagcagattacgcgcagaaaaaaaggatctcaagaagatcctttgatcttttctacggggtctgacgctcagtggaacgaaaactcacgttaagggattttggtcatgcattctaggtactaaaacaattcatccagtaaaatataatattttattttctcccaatcaggcttgatccccagtaagtcaaaaaatagctcgacatactgttcttccccgatatcctccctgatcgaccggacgcagaaggcaatgtcataccacttgtccgccctgccgcttctcccaagatcaataaagccacttactttgccatctttcacaaagatgttgctgtctcccaggtcgccgtgggaaaagacaagttcctcttcgggcttttccgtctttaaaaaatcatacagctcgcgcggatctttaaatggagtgtcttcttcccagttttcgcaatccacatcggccagatcgttattcagtaagtaatccaattcggctaagcggctgtctaagctattcgtatagggacaatccgatatgtcgatggagtgaaagagcctgatgcactccgcatacagctcgataatcttttcagggctttgttcatcttcatactcttccgagcaaaggacgccatcggcctcactcatgagcagattgctccagccatcatgccgttcaaagtgcaggacctttggaacaggcagctttccttccagccatagcatcatgtccttttcccgttccacatcataggtggtccctttataccggctgtccgtcatttttaaatataggttttcattttctcccaccagcttatataccttagcaggagacattccttccgtatcttttacgcagcggtatttttcgatcagttttttcaattccggtgatattctcattttagccatttattatttccttcctcttttctacagtatttaaagataccccaagaagctaattataacaagacgaactccaattcactgttccttgcattctaaaaccttaaataccagaaaacagctttttcaaagttgttttcaaagttggcgtataacatagtatcgacggagccgattttgaaaccgcggtgatcacaggcagcaacgctctgtcatcgttacaatcaacatgctaccctccgcgagatcatccgtgtttcaaacccggcagcttagttgccgttcttccgaatagcatcggtaacatgagcaaagtctgccgccttacaacggctctcccgctgacgccgtcccggactgatgggctgcctgtatcgagtggtgattttgtgccgagctgccggtcggggagctgttggctggctggtggcaggatatattgtggtgtaaacaaattgacgcttagacaacttaataacacattgcggacgtttttaatgtactgaattaacgccgaatta

SEQ ID NO: 33 - protein, 65 aa, Artificial sequence
  Synthetic Construct
MTTAVTAAVSFPSTKTTSLSARSSSVISPDKISYKKVPLYYRNVSATGKMGPIRAQIASEFQLTT

SEQ ID NO: 34 - DNA, 9129 bp, Artificial sequence
  plasmid VC-MME356-1QCZ
  transit_peptide (2128)..(2208)
  CDS (2128)..(2208)
  CDS (2209)..(2226): adapter
agcttggacaatcagtaaattgaacggagaatattattcataaaaatacgatagtaacgggtgatatattcattagaatgaaccgaaaccggcggtaaggatctgagctacacatgctcaggttttttacaacgtgcacaacagaattgaaagcaaatatcatgcgatcataggcgtctcgcatatctcattaaagcagggcatgccggtcgagtcaaatctcggtgacgggcaggaccggacggggcggtaccggcaggctgaagtccagctgccagaaacccacgtcatgccagttcccgtgcttgaagccggccgcccgcagcatgccgcggggggcatatccgagcgcctcgtgcatgcgcacgctcgggtcgttgggcagcccgatgacagcgaccacgctcttgaagccctgtgcctccagggacttcagcaggtgggtgtagagcgtggagcccagtcccgtccgctggtggcggggggagacgtacacggtcgactcggccgtccagtcgtaggcgttgcgtgccttccaggggcccgcgtaggcgatgccggcgacctcgccgtccacctcggcgacgagccagggatagcgctcccgcagacggacgaggtcgtccgtccactcctgcggttcctgcggctcggtacggaagttgaccgtgcttgtctcgatgtagtggttgacgatggtgcagaccgccggcatgtccgcctcggtggcacggcggatgtcggccgggcgtcgttctgggctcatggtagactcgacggatccacgtgtggaagatatgaatttttttgagaaactagataagattaatgaatatcggtgttttggttttttcttgtggccgtctttgtttatattgagatttttcaaatcagtgcgcaagacgtgacgtaagtatccgagtcagtttttatttttctactaatttggtcgaagctttgggcggatcctctagattcgacggtatcgataagctcgcggatccctgaaagcgacgttggatgttaacatctacaaattgccttttcttatcgaccatgtacgtaagcgcttacgtttttggtggacccttgaggaaactggtagctgttgtgggcctgtggtctcaagatggatcattaatttccaccttcacctacgatggggggcatcgcaccggtgagtaatattgtacggctaagagcgaatttggcctgtaggatccctgaaagcgacgttggatgttaacatctacaaattgccttttcttatcgaccatgtacgtaagcgcttacgtttttggtggacccttgaggaaactggtagctgttgtgggcctgtggtctcaagatggatcattaatttccaccttcacctacgatggggggcatcgcaccggtgagtaatattgtacggctaagagcgaatttggcctgtaggatccctgaaagcgacgttggatgttaacatctacaaattgccttttcttatcgaccatgtacgtaagcgcttacgtttttggtggacccttgaggaaactggtagctgttgtgggcctgtggtctcaagatggatcattaatttccaccttcacctacgatggggggcatcgcaccggtgagtaatattgtacggctaagagcgaatttggcctgtaggatccgcgagctggtcaatcccattgcttttgaagcagctcaacattgatctctttctcgatcgagggagatttttcaaatcagtgcgcaagacgtgacgtaagtatccgagtcagtttttatttttctactaatttggtcgtttatttcggcgtgtaggacatggcaaccgggcctgaatttcgcgggtattctgtttctattccaactttttcttgatccgcagccattaacgacttttgaatagatacgctgacacgccaagcctcgctagtcaaaagtgtaccaaacaacgctttacagcaagaacggaatgcgcgtgacgctcgcggtgacgccatttcgccttttcagaaatggataaatagccttgcttcctattatatcttcccaaattaccaatacattacactagcatctgaatttcataaccaatctcgatacaccaaatcgaagatctccctggaattcatgcagaggtttttctccgccagatcgattctcggttacgccgtcaagacgcggaggaggtctttctcttctcgttcttcggaattccagctgaccaccatggcaattcccggggatcagctcgaatttccccgatcgttcaaacatttggcaataaagtttcttaagattgaatcctgttgccggtcttgcgatgattatcatataatttctgttgaattacgttaagcatgtaataattaacatgtaatgcatgacgttatttatgagatgggtttttatgattagagtcccgcaattatacatttaatacgcgatagaaaacaaaatatagcgcgcaaactaggataaattatcgcgcgcggtgtcatctatgttactagatcgggaattggcatgcaagcttggcactggccgtcgttttacaacgtcgtgactgggaaaaccctggcgttacccaacttaatcgccttgcagcacatccccctttcgccagctggcgtaatagcgaagaggcccgcaccgatcgcccttcccaacagttgcgcagcctgaatggcgaatgctagagcagcttgagcttggatcagattgtcgtttcccgccttcagtttaaactatcagtgtttgacaggatatattggcgggtaaacctaagagaaaagagcgtttattagaataatcggatatttaaaagggcgtgaaaaggtttatccgttcgtccatttgtatgtgcatgccaaccacagggttcccctcgggatcaaagtactttgatccaacccctccgctgctatagtgcagtcggcttctgacgttcagtgcagccgtcttctgaaaacgacatgtcgcacaagtcctaagttacgcgacaggctgccgccctgcccttttcctggcgttttcttgtcgcgtgttttagtcgcataaagtagaatacttgcgactagaaccggagacattacgccatgaacaagagcgccgccgctggcctgctgggctatgcccgcgtcagcaccgacgaccaggacttgaccaaccaacgggccgaactgcacgcggccggctgcaccaagctgttttccgagaagatcaccggcaccaggcgcgaccgcccggagctggccaggatgcttgaccacctacgccctggcgacgttgtgacagtgaccaggctagaccgcctggcccgcagcacccgcgacctactggacattgccgagcgcatccaggaggccggcgcgggcctgcgtagcctggcagagccgtgggccgacaccaccacgccggccggccgcatggtgttgaccgtgttcgccggcattgccgagttcgagcgttccctaatcatcgaccgcacccggagcgggcgcgaggccgccaaggcccgaggcgtgaagtttggcccccgccctaccctcaccccggcacagatcgcgcacgcccgcgagctgatcgaccaggaaggccgcaccgtgaaagaggcggctgcactgcttggcgtgcatcgctcgaccctgtaccgcgcacttgagcgcagcgaggaagtgacgcccaccgaggccaggcggcgcggtgccttccgtgaggacgcattgaccgaggccgacgccctggcggccgccgagaatgaacgccaagaggaacaagcatgaaaccgcaccaggacggccaggacgaaccgtttttcattaccgaagagatcgaggcggagatgatcgcggccgggtacgtgttcgagccgcccgcgcacgtctcaaccgtgcggctgcatgaaatcctggccggtttgtctgatgccaagctggcggcctggccggccagcttggccgctgaagaaaccgagcgccgccgtctaaaaaggtgatgtgtatttgagtaaaacagcttgcgtcatgcggtcgctgcgtatatgatgcgatgagtaaataaacaaatacgcaaggggaacgcatgaaggttatcgctgtacttaaccagaaaggcgggtcaggcaagacgaccatcgcaacccatctagcccgcgccctgcaactcgccggggccgatgttctgttagtcgattccgatccccagggcagtgcccgcgattgggcggccgtgcgggaagatcaaccgctaaccgttgtcggcatcgaccgcccgacgattgaccgcgacgtgaaggccatcggccggcgcgacttcgtagtgatcgacggagcgccccaggcggcggacttggctgtgtccgcgatcaaggcagccgacttcgtgctgattccggtgcagccaagcccttacgacatatgggccaccgccgacctggtggagctggttaagcagcgcattgaggtcacggatggaaggctacaagcggcctttgtcgtgtcgcgggcgatcaaaggcacgcgcatcggcggtgaggttgccgaggcgctggccgggtacgagctgcccattcttgagtcccgtatcacgcagcgcgtgagctacccaggcactgccgccgccggcacaaccgttcttgaatcagaacccgagggcgacgctgcccgcgaggtccaggcgctggccgctgaaattaaatcaaaactcatttgagttaatgaggtaaagagaaaatgagcaaaagcacaaacacgctaagtgccggccgtccgagcgcacgcagcagcaaggctgcaacgttggccagcctggcagacacgccagccatgaagcgggtcaactttcagttgccggcggaggatcacaccaagctgaagatgtacgcggtacgccaaggcaagaccattaccgagctgctatctgaatacatcgcgcagctaccagagtaaatgagcaaatgaataaatgagtagatgaattttagcggctaaaggaggcggcatggaaaatcaagaacaaccaggcaccgacgccgtggaatgccccatgtgtggaggaacgggcggttggccaggcgtaagcggctgggttgcctgccggccctgcaatggcactggaacccccaagcccgaggaatcggcgtgagcggtcgcaaaccatccggcccggtacaaatcggcgcggcgctgggtgatgacctggtggagaagttgaaggccgcgcaggccgcccagcggcaacgcatcgaggcagaagcacgccccggtgaatcgtggcaagcggccgctgatcgaatccgcaaagaatcccggcaaccgccggcagccggtgcgccgtcgattaggaagccgcccaagggcgacgagcaaccagattttttcgttccgatgctctatgacgtgggcacccgcgatagtcgcagcatcatggacgtggccgttttccgtctgtcgaagcgtgaccgacgagctggcgaggtgatccgctacgagcttccagacgggcacgtagaggtttccgcagggccggccggcatggccagtgtgtgggattacgacctggtactgatggcggtttcccatctaaccgaatccatgaaccgataccgggaagggaagggagacaagcccggccgcgtgttccgtccacacgttgcggacgtactcaagttctgccggcgagccgatggcggaaagcagaaagacgacctggtagaaacctgcattcggttaaacaccacgcacgttgccatgcagcgtacgaagaaggccaagaacggccgcctggtgacggtatccgagggtgaagccttgattagccgctacaagatcgtaaagagcgaaaccgggcggccggagtacatcgagatcgagctagctgattggatgtaccgcgagatcacagaaggcaagaacccggacgtgctgacggttcaccccgattactttttgatcgatcccggcatcggccgttttctctaccgcctggcacgccgcgccgcaggcaaggcagaagccagatggttgttcaagacgatctacgaacgcagtggcagcgccggagagttcaagaagttctgtttcaccgtgcgcaagctgatcgggtcaaatgacctgccggagtacgatttgaaggaggaggcggggcaggctggcccgatcctagtcatgcgctaccgcaacctgatcgagggcgaagcatccgccggttcctaatgtacggagcagatgctagggcaaattgccctagcaggggaaaaaggtcgaaaaggtctctttcctgtggatagcacgtacattgggaacccaaagccgtacattgggaaccggaacccgtacattgggaacccaaagccgtacattgggaaccggtcacacatgtaagtgactgatataaaagagaaaaaaggcgatttttccgcctaaaactctttaaaacttattaaaactcttaaaacccgcctggcctgtgcataactgtctggccagcgcacagccgaagagctgcaaaaagcgcctacccttcggtcgctgcgctccctacgccccgccgcttcgcgtcggcctatcgcggccgctggccgctcaaaaatggctggcctacggccaggcaatctaccagggcgcggacaagccgcgccgtcgccactcgaccgccggcgcccacatcaaggcaccctgcctcgcgcgtttcggtgatgacggtgaaaacctctgacacatgcagctcccggagacggtcacagcttgtctgtaagcggatgccgggagcagacaagcccgtcagggcgcgtcagcgggtgttggcgggtgtcggggcgcagccatgacccagtcacgtagcgatagcggagtgtatactggcttaactatgcggcatcagagcagattgtactgagagtgcaccatatgcggtgtgaaataccgcacagatgcgtaaggagaaaataccgcatcaggcgctcttccgcttcctcgctcactgactcgctgcgctcggtcgttcggctgcggcgagcggtatcagctcactcaaaggcggtaatacggttatccacagaatcaggggataacgcaggaaagaacatgtgagcaaaaggccagcaaaaggccaggaaccgtaaaaaggccgcgttgctggcgtttttccataggctccgcccccctgacgagcatcacaaaaatcgacgctcaagtcagaggtggcgaaacccgacaggactataaagataccaggcgtttccccctggaagctccctcgtgcgctctcctgttccgaccctgccgcttaccggatacctgtccgcctttctcccttcgggaagcgtggcgctttctcatagctcacgctgtaggtatctcagttcggtgtaggtcgttcgctccaagctgggctgtgtgcacgaaccccccgttcagcccgaccgctgcgccttatccggtaactatcgtcttgagtccaacccggtaagacacgacttatcgccactggcagcagccactggtaacaggattagcagagcgaggtatgtaggcggtgctacagagttcttgaagtggtggcctaactacggctacactagaaggacagtatttggtatctgcgctctgctgaagccagttaccttcggaaaaagagttggtagctcttgatccggcaaacaaaccaccgctggtagcggtggtttttttgtttgcaagcagcagattacgcgcagaaaaaaaggatctcaagaagatcctttgatcttttctacggggtctgacgctcagtggaacgaaaactcacgttaagggattttggtcatgcattctaggtactaaaacaattcatccagtaaaatataatattttattttctcccaatcaggcttgatccccagtaagtcaaaaaatagctcgacatactgttcttccccgatatcctccctgatcgaccggacgcagaaggcaatgtcataccacttgtccgccctgccgcttctcccaagatcaataaagccacttactttgccatctttcacaaagatgttgctgtctcccaggtcgccgtgggaaaagacaagttcctcttcgggcttttccgtctttaaaaaatcatacagctcgcgcggatctttaaatggagtgtcttcttcccagttttcgcaatccacatcggccagatcgttattcagtaagtaatccaattcggctaagcggctgtctaagctattcgtatagggacaatccgatatgtcgatggagtgaaagagcctgatgcactccgcatacagctcgataatcttttcagggctttgttcatcttcatactcttccgagcaaaggacgccatcggcctcactcatgagcagattgctccagccatcatgccgttcaaagtgcaggacctttggaacaggcagctttccttccagccatagcatcatgtccttttcccgttccacatcataggtggtccctttataccggctgtccgtcatttttaaatataggttttcattttctcccaccagcttatataccttagcaggagacattccttccgtatcttttacgcagcggtatttttcgatcagttttttcaattccggtgatattctcattttagccatttattatttccttcctcttttctacagtatttaaagataccccaagaagctaattataacaagacgaactccaattcactgttccttgcattctaaaaccttaaataccagaaaacagctttttcaaagttgttttcaaagttggcgtataacatagtatcgacggagccgattttgaaaccgcggtgatcacaggcagcaacgctctgtcatcgttacaatcaacatgctaccctccgcgagatcatccgtgtttcaaacccggcagcttagttgccgttcttccgaatagcatcggtaacatgagcaaagtctgccgccttacaacggctctcccgctgacgccgtcccggactgatgggctgcctgtatcgagtggtgattttgtgccgagctgccggtcggggagctgttggctggctggtggcaggatatattgtggtgtaaacaaattgacgcttagacaacttaataacacattgcggacgtttttaatgtactgaattaacgccgaatta

SEQ ID NO: 35 - protein, 33 aa, Artificial sequence
  Synthetic Construct
MQRFFSARSILGYAVKTRRRSFSSRSSEFQLTT

SEQ ID NO: 36 - DNA, 8585 bp, Artificial sequence
  plasmid VC-MME301-1QCZ
agcttggacaatcagtaaattgaacggagaatattattcataaaaatacgatagtaacgggtgatatattcattagaatgaaccgaaaccggcggtaaggatctgagctacacatgctcaggttttttacaacgtgcacaacagaattgaaagcaaatatcatgcgatcataggcgtctcgcatatctcattaaagcagggcatgccggtcgagtcaaatctcggtgacgggcaggaccggacggggcggtaccggcaggctgaagtccagctgccagaaacccacgtcatgccagttcccgtgcttgaagccggccgcccgcagcatgccgcggggggcatatccgagcgcctcgtgcatgcgcacgctcgggtcgttgggcagcccgatgacagcgaccacgctcttgaagccctgtgcctccagggacttcagcaggtgggtgtagagcgtggagcccagtcccgtccgctggtggcggggggagacgtacacggtcgactcggccgtccagtcgtaggcgttgcgtgccttccaggggcccgcgtaggcgatgccggcgacctcgccgtccacctcggcgacgagccagggatagcgctcccgcagacggacgaggtcgtccgtccactcctgcggttcctgcggctcggtacggaagttgaccgtgcttgtctcgatgtagtggttgacgatggtgcagaccgccggcatgtccgcctcggtggcacggcggatgtcggccgggcgtcgttctgggctcatggtagactcgacggatccacgtgtggaagatatgaatttttttgagaaactagataagattaatgaatatcggtgttttggttttttcttgtggccgtctttgtttatattgagatttttcaaatcagtgcgcaagacgtgacgtaagtatccgagtcagtttttatttttctactaatttggtcgaagctttgggcggatcctctagactgcagcaaatttacacattgccactaaacgtctaaacccttgtaatttgtttttgttttactatgtgtgttatgtatttgatttgcgataaatttttatatttggtactaaatttataacaccttttatgctaacgtttgccaacacttagcaatttgcaagttgattaattgattctaaattatttttgtcttctaaatacatatactaatcaactggaaatgtaaatatttgctaatatttctactataggagaattaaagtgagtgaatatggtaccacaaggtttggagatttaattgttgcaatgctgcatggatggcatatacaccaaacattcaataattcttgaggataataatggtaccacacaagatttgaggtgcatgaacgtcacgtggacaaaaggtttagtaatttttcaagacaacaatgttaccacacacaagttttgaggtgcatgcatggatgccctgtggaaagtttaaaaatattttggaaatgatttgcatggaagccatgtgtaaaaccatgacatccacttggaggatgcaataatgaagaaaactacaaatttacatgcaactagttatgcatgtagtctatataatgaggattttgcaatactttcattcatacacactcactaagttttacacgattataatttcttcataccattaattaagaattccagctgaccaccatggcaattcccggggatcagctcgaatttccccgatcgttcaaacatttggcaataaagtttcttaagattgaatcctgttgccggtcttgcgatgattatcatataatttctgttgaattacgttaagcatgtaataattaacatgtaatgcatgacgttatttatgagatgggtttttatgattagagtcccgcaattatacatttaatacgcgatagaaaacaaaatatagcgcgcaaactaggataaattatcgcgcgcggtgtcatctatgttactagatcgggaattggcatgcaagcttggcactggccgtcgttttacaacgtcgtgactgggaaaaccctggcgttacccaacttaatcgccttgcagcacatccccctttcgccagctggcgtaatagcgaagaggcccgcaccgatcgcccttcccaacagttgcgcagcctgaatggcgaatgctagagcagcttgagcttggatcagattgtcgtttcccgccttcagtttaaactatcagtgtttgacaggatatattggcgggtaaacctaagagaaaagagcgtttattagaataatcggatatttaaaagggcgtgaaaaggtttatccgttcgtccatttgtatgtgcatgccaaccacagggttcccctcgggatcaaagtactttgatccaacccctccgctgctatagtgcagtcggcttctgacgttcagtgcagccgtcttctgaaaacgacatgtcgcacaagtcctaagttacgcgacaggctgccgccctgcccttttcctggcgttttcttgtcgcgtgttttagtcgcataaagtagaatacttgcgactagaaccggagacattacgccatgaacaagagcgccgccgctggcctgctgggctatgcccgcgtcagcaccgacgaccaggacttgaccaaccaacgggccgaactgcacgcggccggctgcaccaagctgttttccgagaagatcaccggcaccaggcgcgaccgcccggagctggccaggatgcttgaccacctacgccctggcgacgttgtgacagtgaccaggctagaccgcctggcccgcagcacccgcgacctactggacattgccgagcgcatccaggaggccggcgcgggcctgcgtagcctggcagagccgtgggccgacaccaccacgccggccggccgcatggtgttgaccgtgttcgccggcattgccgagttcgagcgttccctaatcatcgaccgcacccggagcgggcgcgaggccgccaaggcccgaggcgtgaagtttggcccccgccctaccctcaccccggcacagatcgcgcacgcccgcgagctgatcgaccaggaaggccgcaccgtgaaagaggcggctgcactgcttggcgtgcatcgctcgaccctgtaccgcgcacttgagcgcagcgaggaagtgacgcccaccgaggccaggcggcgcggtgccttccgtgaggacgcattgaccgaggccgacgccctggcggccgccgagaatgaacgccaagaggaacaagcatgaaaccgcaccaggacggccaggacgaaccgtttttcattaccgaagagatcgaggcggagatgatcgcggccgggtacgtgttcgagccgcccgcgcacgtctcaaccgtgcggctgcatgaaatcctggccggtttgtctgatgccaagctggcggcctggccggccagcttggccgctgaagaaaccgagcgccgccgtctaaaaaggtgatgtgtatttgagtaaaacagcttgcgtcatgcggtcgctgcgtatatgatgcgatgagtaaataaacaaatacgcaaggggaacgcatgaaggttatcgctgtacttaaccagaaaggcgggtcaggcaagacgaccatcgcaacccatctagcccgcgccctgcaactcgccggggccgatgttctgttagtcgattccgatccccagggcagtgcccgcgattgggcggccgtgcgggaagatcaaccgctaaccgttgtcggcatcgaccgcccgacgattgaccgcgacgtgaaggccatcggccggcgcgacttcgtagtgatcgacggagcgccccaggcggcggacttggctgtgtccgcgatcaaggcagccgacttcgtgctgattccggtgcagccaagcccttacgacatatgggccaccgccgacctggtggagctggttaagcagcgcattgaggtcacggatggaaggctacaagcggcctttgtcgtgtcgcgggcgatcaaaggcacgcgcatcggcggtgaggttgccgaggcgctggccgggtacgagctgcccattcttgagtcccgtatcacgcagcgcgtgagctacccaggcactgccgccgccggcacaaccgttcttgaatcagaacccgagggcgacgctgcccgcgaggtccaggcgctggccgctgaaattaaatcaaaactcatttgagttaatgaggtaaagagaaaatgagcaaaagcacaaacacgctaagtgccggccgtccgagcgcacgcagcagcaaggctgcaacgttggccagcctggcagacacgccagccatgaagcgggtcaactttcagttgccggcggaggatcacaccaagctgaagatgtacgcggtacgccaaggcaagaccattaccgagctgctatctgaatacatcgcgcagctaccagagtaaatgagcaaatgaataaatgagtagatgaattttagcggctaaaggaggcggcatggaaaatcaagaacaaccaggcaccgacgccgtggaatgccccatgtgtggaggaacgggcggttggccaggcgtaagcggctgggttgcctgccggccctgcaatggcactggaacccccaagcccgaggaatcggcgtgagcggtcgcaaaccatccggcccggtacaaatcggcgcggcgctgggtgatgacctggtggagaagttgaaggccgcgcaggccgcccagcggcaacgcatcgaggcagaagcacgccccggtgaatcgtggcaagcggccgctgatcgaatccgcaaagaatcccggcaaccgccggcagccggtgcgccgtcgattaggaagccgcccaagggcgacgagcaaccagattttttcgttccgatgctctatgacgtgggcacccgcgatagtcgcagcatcatggacgtggccgttttccgtctgtcgaagcgtgaccgacgagctggcgaggtgatccgctacgagcttccagacgggcacgtagaggtttccgcagggccggccggcatggccagtgtgtgggattacgacctggtactgatggcggtttcccatctaaccgaatccatgaaccgataccgggaagggaagggagacaagcccggccgcgtgttccgtccacacgttgcggacgtactcaagttctgccggcgagccgatggcggaaagcagaaagacgacctggtagaaacctgcattcggttaaacaccacgcacgttgccatgcagcgtacgaagaaggccaagaacggccgcctggtgacggtatccgagggtgaagccttgattagccgctacaagatcgtaaagagcgaaaccgggcggccggagtacatcgagatcgagctagctgattggatgtaccgcgagatcacagaaggcaagaacccggacgtgctgacggttcaccccgattactttttgatcgatcccggcatcggccgttttctctaccgcctggcacgccgcgccgcaggcaaggcagaagccagatggttgttcaagacgatctacgaacgcagtggcagcgccggagagttcaagaagttctgtttcaccgtgcgcaagctgatcgggtcaaatgacctgccggagtacgatttgaaggaggaggcggggcaggctggcccgatcctagtcatgcgctaccgcaacctgatcgagggcgaagcatccgccggttcctaatgtacggagcagatgctagggcaaattgccctagcaggggaaaaaggtcgaaaaggtctctttcctgtggatagcacgtacattgggaacccaaagccgtacattgggaaccggaacccgtacattgggaacccaaagccgtacattgggaaccggtcacacatgtaagtgactgatataaaagagaaaaaaggcgatttttccgcctaaaactctttaaaacttattaaaactcttaaaacccgcctggcctgtgcataactgtctggccagcgcacagccgaagagctgcaaaaagcgcctacccttcggtcgctgcgctccctacgccccgccgcttcgcgtcggcctatcgcggccgctggccgctcaaaaatggctggcctacggccaggcaatctaccagggcgcggacaagccgcgccgtcgccactcgaccgccggcgcccacatcaaggcaccctgcctcgcgcgtttcggtgatgacggtgaaaacctctgacacatgcagctcccggagacggtcacagcttgtctgtaagcggatgccgggagcagacaagcccgtcagggcgcgtcagcgggtgttggcgggtgtcggggcgcagccatgacccagtcacgtagcgatagcggagtgtatactggcttaactatgcggcatcagagcagattgtactgagagtgcaccatatgcggtgtgaaataccgcacagatgcgtaaggagaaaataccgcatcaggcgctcttccgcttcctcgctcactgactcgctgcgctcggtcgttcggctgcggcgagcggtatcagctcactcaaaggcggtaatacggttatccacagaatcaggggataacgcaggaaagaacatgtgagcaaaaggccagcaaaaggccaggaaccgtaaaaaggccgcgttgctggcgtttttccataggctccgcccccctgacgagcatcacaaaaatcgacgctcaagtcagaggtggcgaaacccgacaggactataaagataccaggcgtttccccctggaagctccctcgtgcgctctcctgttccgaccctgccgcttaccggatacctgtccgcctttctcccttcgggaagcgtggcgctttctcatagctcacgctgtaggtatctcagttcggtgtaggtcgttcgctccaagctgggctgtgtgcacgaaccccccgttcagcccgaccgctgcgccttatccggtaactatcgtcttgagtccaacccggtaagacacgacttatcgccactggcagcagccactggtaacaggattagcagagcgaggtatgtaggcggtgctacagagttcttgaagtggtggcctaactacggctacactagaaggacagtatttggtatctgcgctctgctgaagccagttaccttcggaaaaagagttggtagctcttgatccggcaaacaaaccaccgctggtagcggtggtttttttgtttgcaagcagcagattacgcgcagaaaaaaaggatctcaagaagatcctttgatcttttctacggggtctgacgctcagtggaacgaaaactcacgttaagggattttggtcatgcattctaggtactaaaacaattcatccagtaaaatataatattttattttctcccaatcaggcttgatccccagtaagtcaaaaaatagctcgacatactgttcttccccgatatcctccctgatcgaccggacgcagaaggcaatgtcataccacttgtccgccctgccgcttctcccaagatcaataaagccacttactttgccatctttcacaaagatgttgctgtctcccaggtcgccgtgggaaaagacaagttcctcttcgggcttttccgtctttaaaaaatcatacagctcgcgcggatctttaaatggagtgtcttcttcccagttttcgcaatccacatcggccagatcgttattcagtaagtaatccaattcggctaagcggctgtctaagctattcgtatagggacaatccgatatgtcgatggagtgaaagagcctgatgcactccgcatacagctcgataatcttttcagggctttgttcatcttcatactcttccgagcaaaggacgccatcggcctcactcatgagcagattgctccagccatcatgccgttcaaagtgcaggacctttggaacaggcagctttccttccagccatagcatcatgtccttttcccgttccacatcataggtggtccctttataccggctgtccgtcatttttaaatataggttttcattttctcccaccagcttatataccttagcaggagacattccttccgtatcttttacgcagcggtatttttcgatcagttttttcaattccggtgatattctcattttagccatttattatttccttcctcttttctacagtatttaaagataccccaagaagctaattataacaagacgaactccaattcactgttccttgcattctaaaaccttaaataccagaaaacagctttttcaaagttgttttcaaagttggcgtataacatagtatcgacggagccgattttgaaaccgcggtgatcacaggcagcaacgctctgtcatcgttacaatcaacatgctaccctccgcgagatcatccgtgtttcaaacccggcagcttagttgccgttcttccgaatagcatcggtaacatgagcaaagtctgccgccttacaacggctctcccgctgacgccgtcccggactgatgggctgcctgtatcgagtggtgattttgtgccgagctgccggtcggggagctgttggctggctggtggcaggatatattgtggtgtaaacaaattgacgcttagacaacttaataacacattgcggacgtttttaatgtactgaattaacgccgaatta

SEQ ID NO: 37 - DNA, 9010 bp, Artificial sequence
  plasmid pMTX461korrp
  5'UTR (1673)..(1837)
  transit_peptide (1838)..(1945)
  CDS (1838)..(1945)
  transit_peptide (2023)..(2091)
  CDS (2023)..(2091)
  CDS (2092)..(2109): adapter
agctttgggcggatcctctagaggacaatcagtaaattgaacggagaatattattcataaaaatacgatagtaacgggtgatatattcattagaatgaaccgaaaccggcggtaaggatctgagctacacatgctcaggttttttacaacgtgcacaacagaattgaaagcaaatatcatgcgatcataggcgtctcgcatatctcattaaagcagggcatgccggtcgagtcaaatctcggtgacgggcaggaccggacggggcggtaccggcaggctgaagtccagctgccagaaacccacgtcatgccagttcccgtgcttgaagccggccgcccgcagcatgccgcggggggcatatccgagcgcctcgtgcatgcgcacgctcgggtcgttgggcagcccgatgacagcgaccacgctcttgaagccctgtgcctccagggacttcagcaggtgggtgtagagcgtggagcccagtcccgtccgctggtggcggggggagacgtacacggtcgactcggccgtccagtcgtaggcgttgcgtgccttccaggggcccgcgtaggcgatgccggcgacctcgccgtccacctcggcgacgagccagggatagcgctcccgcagacggacgaggtcgtccgtccactcctgcggttcctgcggctcggtacggaagttgaccgtgcttgtctcgatgtagtggttgacgatggtgcagaccgccggcatgtccgcctcggtggcacggcggatgtcggccgggcgtcgttctgggctcatggtagactcgacggatccacgtgtggaagatatgaatttttttgagaaactagataagattaatgaatatcggtgttttggttttttcttgtggccgtctttgtttatattgagatttttcaaatcagtgcgcaagacgtgacgtaagtatccgagtcagtttttatttttctactaatttggtcgaatctagactgcagcaaatttacacattgccactaaacgtctaaacccttgtaatttgtttttgttttactatgtgtgttatgtatttgatttgcgataaatttttatatttggtactaaatttataacaccttttatgctaacgtttgccaacacttagcaatttgcaagttgattaattgattctaaattatttttgtcttctaaatacatatactaatcaactggaaatgtaaatatttgctaatatttctactataggagaattaaagtgagtgaatatggtaccacaaggtttggagatttaattgttgcaatgctgcatggatggcatatacaccaaacattcaataattcttgaggataataatggtaccacacaagatttgaggtgcatgaacgtcacgtggacaaaaggtttagtaatttttcaagacaacaatgttaccacacacaagttttgaggtgcatgcatggatgccctgtggaaagtttaaaaatattttggaaatgatttgcatggaagccatgtgtaaaaccatgacatccacttggaggatgcaataatgaagaaaactacaaatttacatgcaactagttatgcatgtagtctatataatgaggattttgcaatactttcattcatacacactcactaagttttacacgattataatttcttcataccattaattaagaattcgcataaacttatcttcatagttgccactccaatttgctccttgaatctcctccacccaatacataatccactcctccatcacccacttcactactaaatcaaacttaactctgtttttctctctcctcctttcatttcttattcttccaatcatcgtactccgccatgaccaccgctgtcaccgccgctgtttctttcccctctaccaaaaccacctctctctccgcccgaagctcctccgtcatttcccctgacaaaatcagctacaaaaaggtgattcccaatttcactgtgttttttattaataatttgttattttgatgatgagatgattaatttgggtgctgcaggttcctttgtactacaggaatgtatctgcaactgggaaaatgggacccatcagggcccagatcgcctctgaattccagctgaccaccatggcaattcccggggatcagctcgaatttccccgatcgttcaaacatttggcaataaagtttcttaagattgaatcctgttgccggtcttgcgatgattatcatataatttctgttgaattacgttaagcatgtaataattaacatgtaatgcatgacgttatttatgagatgggtttttatgattagagtcccgcaattatacatttaatacgcgatagaaaacaaaatatagcgcgcaaactaggataaattatcgcgcgcggtgtcatctatgttactagatcgggaattggcatgcaagcttggcactggccgtcgttttacaacgtcgtgactgggaaaaccctggcgttacccaacttaatcgccttgcagcacatccccctttcgccagctggcgtaatagcgaagaggcccgcaccgatcgcccttcccaacagttgcgcagcctgaatggcgaatgctagagcagcttgagcttggatcagattgtcgtttcccgccttcagtttaaactatcagtgtttgacaggatatattggcgggtaaacctaagagaaaagagcgtttattagaataacggatatttaaaagggcgtgaaaaggtttatccgttcgtccatttgtatgtgcatgccaaccacagggttcccctcgggatcaaagtactttgatccaacccctccgctgctatagtgcagtcggcttctgacgttcagtgcagccgtcttctgaaaacgacatgtcgcacaagtcctaagttacgcgacaggctgccgccctgcccttttcctggcgttttcttgtcgcgtgttttagtcgcataaagtagaatacttgcgactagaaccggagacattacgccatgaacaagagcgccgccgctggcctgctgggctatgcccgcgtcagcaccgacgaccaggacttgaccaaccaacgggccgaactgcacgcggccggctgcaccaagctgttttccgagaagatcaccggcaccaggcgcgaccgcccggagctggccaggatgcttgaccacctacgccctggcgacgttgtgacagtgaccaggctagaccgcctggcccgcagcacccgcgacctactggacattgccgagcgcatccaggaggccggcgcgggcctgcgtagcctggcagagccgtgggccgacaccaccacgccggccggccgcatggtgttgaccgtgttcgccggcattgccgagttcgagcgttccctaatcatcgaccgcacccggagcgggcgcgaggccgccaaggcccgaggcgtgaagtttggcccccgccctaccctcaccccggcacagatcgcgcacgcccgcgagctgatcgaccaggaaggccgcaccgtgaaagaggcggctgcactgcttggcgtgcatcgctcgaccctgtaccgcgcacttgagcgcagcgaggaagtgacgcccaccgaggccaggcggcgcggtgccttccgtgaggacgcattgaccgaggccgacgccctggcggccgccgagaatgaacgccaagaggaacaagcatgaaaccgcaccaggacggccaggacgaaccgtttttcattaccgaagagatcgaggcggagatgatcgcggccgggtacgtgttcgagccgcccgcgcacgtctcaaccgtgcggctgcatgaaatcctggccggtttgtctgatgccaagctggcggcctggccggccagcttggccgctgaagaaaccgagcgccgccgtctaaaaaggtgatgtgtatttgagtaaaacagcttgcgtcatgcggtcgctgcgtatatgatgcgatgagtaaataaacaaatacgcaaggggaacgcatgaaggttatcgctgtacttaaccagaaaggcgggtcaggcaagacgaccatcgcaacccatctagcccgcgccctgcaactcgccggggccgatgttctgttagtcgattccgatccccagggcagtgcccgcgattgggcggccgtgcgggaagatcaaccgctaaccgttgtcggcatcgaccgcccgacgattgaccgcgacgtgaaggccatcggccggcgcgacttcgtagtgatcgacggagcgccccaggcggcggacttggctgtgtccgcgatcaaggcagccgacttcgtgctgattccggtgcagccaagcccttacgacatatgggccaccgccgacctggtggagctggttaagcagcgcattgaggtcacggatggaaggctacaagcggcctttgtcgtgtcgcgggcgatcaaaggcacgcgcatcggcggtgaggttgccgaggcgctggccgggtacgagctgcccattcttgagtcccgtatcacgcagcgcgtgagctacccaggcactgccgccgccggcacaaccgttcttgaatcagaacccgagggcgacgctgcccgcgaggtccaggcgctggccgctgaaattaaatcaaaactcatttgagttaatgaggtaaagagaaaatgagcaaaagcacaaacacgctaagtgccggccgtccgagcgcacgcagcagcaaggctgcaacgttggccagcctggcagacacgccagccatgaagcgggtcaactttcagttgccggcggaggatcacaccaagctgaagatgtacgcggtacgccaaggcaagaccattaccgagctgctatctgaatacatcgcgcagctaccagagtaaatgagcaaatgaataaatgagtagatgaattttagcggctaaaggaggcggcatggaaaatcaagaacaaccaggcaccgacgccgtggaatgccccatgtgtggaggaacgggcggttggccaggcgtaagcggctgggttgtctgccggccctgcaatggcactggaacccccaagcccgaggaatcggcgtgacggtcgcaaaccatccggcccggtacaaatcggcgcggcgctgggtgatgacctggtggagaagttgaaggccgcgcaggccgcccagcggcaacgcatcgaggcagaagcacgccccggtgaatcgtggcaagcggccgctgatcgaatccgcaaagaatcccggcaaccgccggcagccggtgcgccgtcgattaggaagccgcccaagggcgacgagcaaccagattttttcgttccgatgctctatgacgtgggcacccgcgatagtcgcagcatcatggacgtggccgttttccgtctgtcgaagcgtgaccgacgagctggcgaggtgatccgctacgagcttccagacgggcacgtagaggtttccgcagggccggccggcatggccagtgtgtgggattacgacctggtactgatggcggtttcccatctaaccgaatccatgaaccgataccgggaagggaagggagacaagcccggccgcgtgttccgtccacacgttgcggacgtactcaagttctgccggcgagccgatggcggaaagcagaaagacgacctggtagaaacctgcattcggttaaacaccacgcacgttgccatgcagcgtacgaagaaggccaagaacggccgcctggtgacggtatccgagggtgaagccttgattagccgctacaagatcgtaaagagcgaaaccgggcggccggagtacatcgagatcgagctagctgattggatgtaccgcgagatcacagaaggcaagaacccggacgtgctgacggttcaccccgattactttttgatcgatcccggcatcggccgttttctctaccgcctggcacgccgcgccgcaggcaaggcagaagccagatggttgttcaagacgatctacgaacgcagtggcagcgccggagagttcaagaagttctgtttcaccgtgcgcaagctgatcgggtcaaatgacctgccggagtacgatttgaaggaggaggcggggcaggctggcccgatcctagtcatgcgctaccgcaacctgatcgagggcgaagcatccgccggttcctaatgtacggagcagatgctagggcaaattgccctagcaggggaaaaaggtcgaaaaggtctctttcctgtggatagcacgtacattgggaacccaaagccgtacattgggaaccggaacccgtacattgggaacccaaagccgtacattgggaaccggtcacacatgtaagtgactgatataaaagagaaaaaaggcgatttttccgcctaaaactctttaaaacttattaaaactcttaaaacccgcctggcctgtgcataactgtctggccagcgcacagccgaagagctgcaaaaagcgcctacccttcggtcgctgcgctccctacgccccgccgcttcgcgtcggcctatcgcggccgctggccgctcaaaaatggctggcctacggccaggcaatctaccagggcgcggacaagccgcgccgtcgccactcgaccgccggcgcccacatcaaggcaccctgcctcgcgcgtttcggtgatgacggtgaaaacctctgacacatgcagctcccggagacggtcacagcttgtctgtaagcggatgccgggagcagacaagcccgtcagggcgcgtcagcgggtgttggcgggtgtcggggcgcagccatgacccagtcacgtagcgatagcggagtgtatactggcttaactatgcggcatcagagcagattgtactgagagtgcaccatatgcggtgtgaaataccgcacagatgcgtaaggagaaaataccgcatcaggcgctcttccgcttcctcgctcactgactcgctgcgctcggtcgttcggctgcggcgagcggtatcagctcactcaaaggcggtaatacggttatccacagaatcaggggataacgcaggaaagaacatgtgagcaaaaggccagcaaaaggccaggaaccgtaaaaaggccgcgttgctggcgtttttccataggctccgcccccctgacgagcatcacaaaaatcgacgctcaagtcagaggtggcgaaacccgacaggactataaagataccaggcgtttccccctggaagctccctcgtgcgctctcctgttccgaccctgccgcttaccggatacctgtccgcctttctcccttcgggaagcgtggcgctttctcatagctcacgctgtaggtatctcagttcggtgtaggtcgttcgctccaagctgggctgtgtgcacgaaccccccgttcagcccgaccgctgcgccttatccggtaactatcgtcttgagtccaacccggtaagacacgacttatcgccactggcagcagccactggtaacaggattagcagagcgaggtatgtaggcggtgctacagagttcttgaagtggtggcctaactacggctacactagaaggacagtatttggtatctgcgctctgctgaagccagttaccttcggaaaaagagttggtagctcttgatccggcaaacaaaccaccgctggtagcggtggtttttttgtttgcaagcagcagattacgcgcagaaaaaaaggatctcaagaagatcctttgatcttttctacggggtctgacgctcagtggaacgaaaactcacgttaagggattttggtcatgcattctaggtactaaaacaattcatccagtaaaatataatattttattttctcccaatcaggcttgatccccagtaagtcaaaaaatagctcgacatactgttcttccccgatatcctccctgatcgaccggacgcagaaggcaatgtcataccacttgtccgccctgccgcttctcccaagatcaataaagccacttactttgccatctttcacaaagatgttgctgtctcccaggtcgccgtgggaaaagacaagttcctcttcgggcttttccgtctttaaaaaatcatacagctcgcgcggatctttaaatggagtgtcttcttcccagttttcgcaatccacatcggccagatcgttattcagtaagtaatccaattcggctaagcggctgtctaagctattcgtatagggacaatccgatatgtcgatggagtgaaagagcctgatgcactccgcatacagctcgataatcttttcagggctttgttcatcttcatactcttccgagcaaaggacgccatcggcctcactcatgagcagattgctccagccatcatgccgttcaaagtgcaggacctttggaacaggcagctttccttccagccatagcatcatgtccttttcccgttccacatcataggtggtccctttataccggctgtccgtcatttttaaatataggttttcattttctcccaccagcttatataccttagcaggagacattccttccgtatcttttacgcagcggtatttttcgatcagttttttcaattccggtgatattctcattttagccatttattatttccttcctcttttctacagtatttaaagataccccaagaagctaattataacaagacgaactccaattcactgttccttgcattctaaaaccttaaataccagaaaacagctttttcaaagttgttttcaaagttggcgtataacatagtatcgacggagccgattttgaaaccgcggtgatcacaggcagcaacgctctgtcatcgttacaatcaacatgctaccctccgcgagatcatccgtgtttcaaacccggcagcttagttgccgttcttccgaatagcatcggtaacatgagcaaagtctgccgccttacaacggctctcccgctgacgccgtcccggactgatgggctgcctgtatcgagtggtgattttgtgccgagctgccggtcggggagctgttggctggctggtggcaggatatattgtggtgtaaacaaattgacgcttagacaacttaataacacattgcggacgtttttaatgtactgaattaacgccgaatta

SEQ ID NO: 38 - protein, 65 aa, Artificial sequence; identical to SEQ ID NO: 33
  Synthetic Construct

SEQ ID NO: 39 - DNA, 8674 bp, Artificial sequence
  plasmid VC-MME462-1QCZ
  transit_peptide (1673)..(1753)
  CDS (1673)..(1753)
  CDS (1754)..(1771): adapter
agctttgggcggatcctctagaggacaatcagtaaattgaacggagaatattattcataaaaatacgatagtaacgggtgatatattcattagaatgaaccgaaaccggcggtaaggatctgagctacacatgctcaggttttttacaacgtgcacaacagaattgaaagcaaatatcatgcgatcataggcgtctcgcatatctcattaaagcagggcatgccggtcgagtcaaatctcggtgacgggcaggaccggacggggcggtaccggcaggctgaagtccagctgccagaaacccacgtcatgccagttcccgtgcttgaagccggccgcccgcagcatgccgcggggggcatatccgagcgcctcgtgcatgcgcacgctcgggtcgttgggcagcccgatgacagcgaccacgctcttgaagccctgtgcctccagggacttcagcaggtgggtgtagagcgtggagcccagtcccgtccgctggtggcggggggagacgtacacggtcgactcggccgtccagtcgtaggcgttgcgtgccttccaggggcccgcgtaggcgatgccggcgacctcgccgtccacctcggcgacgagccagggatagcgctcccgcagacggacgaggtcgtccgtccactcctgcggttcctgcggctcggtacggaagttgaccgtgcttgtctcgatgtagtggttgacgatggtgcagaccgccggcatgtccgcctcggtggcacggcggatgtcggccgggcgtcgttctgggctcatggtagactcgacggatccacgtgtggaagatatgaatttttttgagaaactagataagattaatgaatatcggtgttttggttttttcttgtggccgtctttgtttatattgagatttttcaaatcagtgcgcaagacgtgacgtaagtatccgagtcagtttttatttttctactaatttggtcgaatctagactgcagcaaatttacacattgccactaaacgtctaaacccttgtaatttgtttttgttttactatgtgtgttatgtatttgatttgcgataaatttttatatttggtactaaatttataacaccttttatgctaacgtttgccaacacttagcaatttgcaagttgattaattgattctaaattatttttgtcttctaaatacatatactaatcaactggaaatgtaaatatttgctaatatttctactataggagaattaaagtgagtgaatatggtaccacaaggtttggagatttaattgttgcaatgctgcatggatggcatatacaccaaacattcaataattcttgaggataataatggtaccacacaagatttgaggtgcatgaacgtcacgtggacaaaaggtttagtaatttttcaagacaacaatgttaccacacacaagttttgaggtgcatgcatggatgccctgtggaaagtttaaaaatattttggaaatgatttgcatggaagccatgtgtaaaaccatgacatccacttggaggatgcaataatgaagaaaactacaaatttacatgcaactagttatgcatgtagtctatataatgaggattttgcaatactttcattcatacacactcactaagttttacacgattataatttcttcataccattaattaagaattcatgcagaggtttttctccgccagatcgattctcggttacgccgtcaagacgcggaggaggtctttctcttctcgttcttcggaattccagctgaccaccatggcaattcccggggatcagctcgaatttccccgatcgttcaaacatttggcaataaagtttcttaagattgaatcctgttgccggtcttgcgatgattatcatataatttctgttgaattacgttaagcatgtaataattaacatgtaatgcatgacgttatttatgagatgggtttttatgattagagtcccgcaattatacatttaatacgcgatagaaaacaaaatatagcgcgcaaactaggataaattatcgcgcgcggtgtcatctatgttactagatcgggaattggcatgcaagcttggcactggccgtcgttttacaacgtcgtgactgggaaaaccctggcgttacccaacttaatcgccttgcagcacatccccctttcgccagctggcgtaatagcgaagaggcccgcaccgatcgcccttcccaacagttgcgcagcctgaatggcgaatgctagagcagcttgagcttggatcagattgtcgtttcccgccttcagtttaaactatcagtgtttgacaggatatattggcgggtaaacctaagagaaaagagcgtttattagaataatcggatatttaaaagggcgtgaaaaggtttatccgttcgtccatttgtatgtgcatgccaaccacagggttcccctcgggatcaaagtactttgatccaacccctccgctgctatagtgcagtcggcttctgacgttcagtgcagccgtcttctgaaaacgacatgtcgcacaagtcctaagttacgcgacaggctgccgccctgcccttttcctggcgttttcttgtcgcgtgttttagtcgcataaagtagaatacttgcgactagaaccggagacattacgccatgaacaagagcgccgccgctggcctgctgggctatgcccgcgtcagcaccgacgaccaggacttgaccaaccaacgggccgaactgcacgcggccggctgcaccaagctgttttccgagaagatcaccggcaccaggcgcgaccgcccggagctggccaggatgcttgaccacctacgccctggcgacgttgtgacagtgaccaggctagaccgcctggcccgcagcacccgcgacctactggacattgccgagcgcatccaggaggccggcgcgggcctgcgtagcctggcagagccgtgggccgacaccaccacgccggccggccgcatggtgttgaccgtgttcgccggcattgccgagttcgagcgttccctaatcatcgaccgcacccggagcgggcgcgaggccgccaaggcccgaggcgtgaagtttggcccccgccctaccctcaccccggcacagatcgcgcacgcccgcgagctgatcgaccaggaaggccgcaccgtgaaagaggcggctgcactgcttggcgtgcatcgctcgaccctgtaccgcgcacttgagcgcagcgaggaagtgacgcccaccgaggccaggcggcgcggtgccttccgtgaggacgcattgaccgaggccgacgccctggcggccgccgagaatgaacgccaagaggaacaagcatgaaaccgcaccaggacggccaggacgaaccgtttttcattaccgaagagatcgaggcggagatgatcgcggccgggtacgtgttcgagccgcccgcgcacgtctcaaccgtgcggctgcatgaaatcctggccggtttgtctgatgccaagctggcggcctggccggccagcttggccgctgaagaaaccgagcgccgccgtctaaaaaggtgatgtgtatttgagtaaaacagcttgcgtcatgcggtcgctgcgtatatgatgcgatgagtaaataaacaaatacgcaaggggaacgcatgaaggttatcgctgtacttaaccagaaaggcgggtcaggcaagacgaccatcgcaacccatctagcccgcgccctgcaactcgccggggccgatgttctgttagtcgattccgatccccagggcagtgcccgcgattgggcggccgtgcgggaagatcaaccgctaaccgttgtcggcatcgaccgcccgacgattgaccgcgacgtgaaggccatcggccggcgcgacttcgtagtgatcgacggagcgccccaggcggcggacttggctgtgtccgcgatcaaggcagccgacttcgtgctgattccggtgcagccaagcccttacgacatatgggccaccgccgacctggtggagctggttaagcagcgcattgaggtcacggatggaaggctacaagcggcctttgtcgtgtcgcgggcgatcaaaggcacgcgcatcggcggtgaggttgccgaggcgctggccgggtacgagctgcccattcttgagtcccgtatcacgcagcgcgtgagctacccaggcactgccgccgccggcacaaccgttcttgaatcagaacccgagggcgacgctgcccgcgaggtccaggcgctggccgctgaaattaaatcaaaactcatttgagttaatgaggtaaagagaaaatgagcaaaagcacaaacacgctaagtgccggccgtccgagcgcacgcagcagcaaggctgcaacgttggccagcctggcagacacgccagccatgaagcgggtcaactttcagttgccggcggaggatcacaccaagctgaagatgtacgcggtacgccaaggcaagaccattaccgagctgctatctgaatacatcgcgcagctaccagagtaaatgagcaaatgaataaatgagtagatgaattttagcggctaaaggaggcggcatggaaaatcaagaacaaccaggcaccgacgccgtggaatgccccatgtgtggaggaacgggcggttggccaggcgtaagcggctgggttgcctgccggccctgcaatggcactggaacccccaagcccgaggaatcggcgtgagcggtcgcaaaccatccggcccggtacaaatcggcgcggcgctgggtgatgacctggtggagaagttgaaggccgcgcaggccgcccagcggcaacgcatcgaggcagaagcacgccccggtgaatcgtggcaagcggccgctgatcgaatccgcaaagaatcccggcaaccgccggcagccggtgcgccgtcgattaggaagccgcccaagggcgacgagcaaccagattttttcgttccgatgctctatgacgtgggcacccgcgatagtcgcagcatcatggacgtggccgttttccgtctgtcgaagcgtgaccgacgagctggcgaggtgatccgctacgagcttccagacgggcacgtagaggtttccgcagggccggccggcatggccagtgtgtgggattacgacctggtactgatggcggtttcccatctaaccgaatccatgaaccgataccgggaagggaagggagacaagcccggccgcgtgttccgtccacacgttgcggacgtactcaagttctgccggcgagccgatggcggaaagcagaaagacgacctggtagaaacctgcattcggttaaacaccacgcacgttgccatgcagcgtacgaagaaggccaagaacggccgcctggtgacggtatccgagggtgaagccttgattagccgctacaagatcgtaaagagcgaaaccgggcggccggagtacatcgagatcgagctagctgattggatgtaccgcgagatcacagaaggcaagaacccggacgtgctgacggttcaccccgattactttttgatcgatcccggcatcggccgttttctctaccgcctggcacgccgcgccgcaggcaaggcagaagccagatggttgttcaagacgatctacgaacgcagtggcagcgccggagagttcaagaagttctgtttcaccgtgcgcaagctgatcgggtcaaatgacctgccggagtacgatttgaaggaggaggcggggcaggctggcccgatcctagtcatgcgctaccgcaacctgatcgagggcgaagcatccgccggttcctaatgtacggagcagatgctagggcaaattgccctagcaggggaaaaaggtcgaaaaggtctctttcctgtggatagcacgtacattgggaacccaaagccgtacattgggaaccggaacccgtacattgggaacccaaagccgtacattgggaaccggtcacacatgtaagtgactgatataaaagagaaaaaaggcgatttttccgcctaaaactctttaaaacttattaaaactcttaaaacccgcctggcctgtgcataactgtctggccagcgcacagccgaagagctgcaaaaagcgcctacccttcggtcgctgcgctccctacgccccgccgcttcgcgtcggcctatcgcggccgctggccgctcaaaaatggctggcctacggccaggcaatctaccagggcgcggacaagccgcgccgtcgccactcgaccgccggcgcccacatcaaggcaccctgcctcgcgcgtttcggtgatgacggtgaaaacctctgacacatgcagctcccggagacggtcacagcttgtctgtaagcggatgccgggagcagacaagcccgtcagggcgcgtcagcgggtgttggcgggtgtcggggcgcagccatgacccagtcacgtagcgatagcggagtgtatactggcttaactatgcggcatcagagcagattgtactgagagtgcaccatatgcggtgtgaaataccgcacagatgcgtaaggagaaaataccgcatcaggcgctcttccgcttcctcgctcactgactcgctgcgctcggtcgttcggctgcggcgagcggtatcagctcactcaaaggcggtaatacggttatccacagaatcaggggataacgcaggaaagaacatgtgagcaaaaggccagcaaaaggccaggaaccgtaaaaaggccgcgttgctggcgtttttccataggctccgcccccctgacgagcatcacaaaaatcgacgctcaagtcagaggtggcgaaacccgacaggactataaagataccaggcgtttccccctggaagctccctcgtgcgctctcctgttccgaccctgccgcttaccggatacctgtccgcctttctcccttcgggaagcgtggcgctttctcatagctcacgctgtaggtatctcagttcggtgtaggtcgttcgctccaagctgggctgtgtgcacgaaccccccgttcagcccgaccgctgcgccttatccggtaactatcgtcttgagtccaacccggtaagacacgacttatcgccactggcagcagccactggtaacaggattagcagagcgaggtatgtaggcggtgctacagagttcttgaagtggtggcctaactacggctacactagaaggacagtatttggtatctgcgctctgctgaagccagttaccttcggaaaaagagttggtagctcttgatccggcaaacaaaccaccgctggtagcggtggtttttttgtttgcaagcagcagattacgcgcagaaaaaaaggatctcaagaagatcctttgatcttttctacggggtctgacgctcagtggaacgaaaactcacgttaagggattttggtcatgcattctaggtactaaaacaattcatccagtaaaatataatattttattttctcccaatcaggcttgatccccagtaagtcaaaaaatagctcgacatactgttcttccccgatatcctccctgatcgaccggacgcagaaggcaatgtcataccacttgtccgccctgccgcttctcccaagatcaataaagccacttactttgccatctttcacaaagatgttgctgtctcccaggtcgccgtgggaaaagacaagttcctcttcgggcttttccgtctttaaaaaatcatacagctcgcgcggatctttaaatggagtgtcttcttcccagttttcgcaatccacatcggccagatcgttattcagtaagtaatccaattcggctaagcggctgtctaagctattcgtatagggacaatccgatatgtcgatggagtgaaagagcctgatgcactccgcatacagctcgataatcttttcagggctttgttcatcttcatactcttccgagcaaaggacgccatcggcctcactcatgagcagattgctccagccatcatgccgttcaaagtgcaggacctttggaacaggcagctttccttccagccatagcatcatgtccttttcccgttccacatcataggtggtccctttataccggctgtccgtcatttttaaatataggttttcattttctcccaccagcttatataccttagcaggagacattccttccgtatcttttacgcagcggtatttttcgatcagttttttcaattccggtgatattctcattttagccatttattatttccttcctcttttctacagtatttaaagataccccaagaagctaattataacaagacgaactccaattcactgttccttgcattctaaaaccttaaataccagaaaacagctttttcaaagttgttttcaaagttggcgtataacatagtatcgacggagccgattttgaaaccgcggtgatcacaggcagcaacgctctgtcatcgttacaatcaacatgctaccctccgcgagatcatccgtgtttcaaacccggcagcttagttgccgttcttccgaatagcatcggtaacatgagcaaagtctgccgccttacaacggctctcccgctgacgccgtcccggactgatgggctgcctgtatcgagtggtgattttgtgccgagctgccggtcggggagctgttggctggctggtggcaggatatattgtggtgtaaacaaattgacgcttagacaacttaataacacattgcggacgtttttaatgtactgaattaacgccgaatta

SEQ ID NO: 40 - protein, 33 aa, Artificial sequence; identical to SEQ ID NO: 35
  Synthetic Construct

SEQ ID NO: 41 - DNA, 9045 bp, Artificial sequence
  plasmid VC-MME220-1qcz
agcttggacaatcagtaaattgaacggagaatattattcataaaaatacgatagtaacgggtgatatattcattagaatgaaccgaaaccggcggtaaggatctgagctacacatgctcaggttttttacaacgtgcacaacagaattgaaagcaaatatcatgcgatcataggcgtctcgcatatctcattaaagcagggcatgccggtcgagtcaaatctcggtgacgggcaggaccggacggggcggtaccggcaggctgaagtccagctgccagaaacccacgtcatgccagttcccgtgcttgaagccggccgcccgcagcatgccgcggggggcatatccgagcgcctcgtgcatgcgcacgctcgggtcgttgggcagcccgatgacagcgaccacgctcttgaagccctgtgcctccagggacttcagcaggtgggtgtagagcgtggagcccagtcccgtccgctggtggcggggggagacgtacacggtcgactcggccgtccagtcgtaggcgttgcgtgccttccaggggcccgcgtaggcgatgccggcgacctcgccgtccacctcggcgacgagccagggatagcgctcccgcagacggacgaggtcgtccgtccactcctgcggttcctgcggctcggtacggaagttgaccgtgcttgtctcgatgtagtggttgacgatggtgcagaccgccggcatgtccgcctcggtggcacggcggatgtcggccgggcgtcgttctgggctcatggtagactcgacggatccacgtgtggaagatatgaatttttttgagaaactagataagattaatgaatatcggtgttttggttttttcttgtggccgtctttgtttatattgagatttttcaaatcagtgcgcaagacgtgacgtaagtatccgagtcagtttttatttttctactaatttggtcgaagctttgggcggatcctctagattcgacggtatcgataagctcgcggatccctgaaagcgacgttggatgttaacatctacaaattgccttttcttatcgaccatgtacgtaagcgcttacgtttttggtggacccttgaggaaactggtagctgttgtgggcctgtggtctcaagatggatcattaatttccaccttcacctacgatggggggcatcgcaccggtgagtaatattgtacggctaagagcgaatttggcctgtaggatccctgaaagcgacgttggatgttaacatctacaaattgccttttcttatcgaccatgtacgtaagcgcttacgtttttggtggacccttgaggaaactggtagctgttgtgggcctgtggtctcaagatggatcattaatttccaccttcacctacgatggggggcatcgcaccggtgagtaatattgtacggctaagagcgaatttggcctgtaggatccctgaaagcgacgttggatgttaacatctacaaattgccttttcttatcgaccatgtacgtaagcgcttacgtttttggtggacccttgaggaaactggtagctgttgtgggcctgtggtctcaagatggatcattaatttccaccttcacctacgatggggggcatcgcaccggtgagtaatattgtacggctaagagcgaatttggcctgtaggatccgcgagctggtcaatcccattgcttttgaagcagctcaacattgatctctttctcgatcgagggagatttttcaaatcagtgcgcaagacgtgacgtaagtatccgagtcagtttttatttttctactaatttggtcgtttatttcggcgtgtaggacatggcaaccgggcctgaatttcgcgggtattctgtttctattccaactttttcttgatccgcagccattaacgacttttgaatagatacgctgacacgccaagcctcgctagtcaaaagtgtaccaaacaacgctttacagcaagaacggaatgcgcgtgacgctcgcggtgacgccatttcgccttttcagaaatggataaatagccttgcttcctattatatcttcccaaattaccaatacattacactagcatctgaatttcataaccaatctcgatacaccaaatcgaagatctcccgggttgctcttccatggcaatgattaattaacgaagagcaagagctcgaatttccccgatcgttcaaacatttggcaataaagtttcttaagattgaatcctgttgccggtcttgcgatgattatcatataatttctgttgaattacgttaagcatgtaataattaacatgtaatgcatgacgttatttatgagatgggtttttatgattagagtcccgcaattatacatttaatacgcgatagaaaacaaaatatagcgcgcaaactaggataaattatcgcgcgcggtgtcatctatgttactagatcgggaattggcatgcaagcttggcactggccgtcgttttacaacgtcgtgactgggaaaaccctggcgttacccaacttaatcgccttgcagcacatccccctttcgccagctggcgtaatagcgaagaggcccgcaccgatcgcccttcccaacagttgcgcagcctgaatggcgaatgctagagcagcttgagcttggatcagattgtcgtttcccgccttcagtttaaactatcagtgtttgacaggatatattggcgggtaaacctaagagaaaagagcgtttattagaataatcggatatttaaaagggcgtgaaaaggtttatccgttcgtccatttgtatgtgcatgccaaccacagggttcccctcgggatcaaagtactttgatccaacccctccgctgctatagtgcagtcggcttctgacgttcagtgcagccgtcttctgaaaacgacatgtcgcacaagtcctaagttacgcgacaggctgccgccctgcccttttcctggcgttttcttgtcgcgtgttttagtcgcataaagtagaatacttgcgactagaaccggagacattacgccatgaacaagagcgccgccgctggcctgctgggctatgcccgcgtcagcaccgacgaccaggacttgaccaaccaacgggccgaactgcacgcggccggctgcaccaagctgttttccgagaagatcaccggcaccaggcgcgaccgcccggagctggccaggatgcttgaccacctacgccctggcgacgttgtgacagtgaccaggctagaccgcctggcccgcagcacccgcgacctactggacattgccgagcgcatccaggaggccggcgcgggcctgcgtagcctggcagagccgtgggccgacaccaccacgccggccggccgcatggtgttgaccgtgttcgccggcattgccgagttcgagcgttccctaatcatcgaccgcacccggagcgggcgcgaggccgccaaggcccgaggcgtgaagtttggcccccgccctaccctcaccccggcacagatcgcgcacgcccgcgagctgatcgaccaggaaggccgcaccgtgaaagaggcggctgcactgcttggcgtgcatcgctcgaccctgtaccgcgcacttgagcgcagcgaggaagtgacgcccaccgaggccaggcggcgcggtgccttccgtgaggacgcattgaccgaggccgacgccctggcggccgccgagaatgaacgccaagaggaacaagcatgaaaccgcaccaggacggccaggacgaaccgtttttcattaccgaagagatcgaggcggagatgatcgcggccgggtacgtgttcgagccgcccgcgcacgtctcaaccgtgcggctgcatgaaatcctggccggtttgtctgatgccaagctggcggcctggccggccagcttggccgctgaagaaaccgagcgccgccgtctaaaaaggtgatgtgtatttgagtaaaacagcttgcgtcatgcggtcgctgcgtatatgatgcgatgagtaaataaacaaatacgcaaggggaacgcatgaaggttatcgctgtacttaaccagaaaggcgggtcaggcaagacgaccatcgcaacccatctagcccgcgccctgcaactcgccggggccgatgttctgttagtcgattccgatccccagggcagtgcccgcgattgggcggccgtgcgggaagatcaaccgctaaccgttgtcggcatcgaccgcccgacgattgaccgcgacgtgaaggccatcggccggcgcgacttcgtagtgatcgacggagcgccccaggcggcggacttggctgtgtccgcgatcaaggcagccgacttcgtgctgattccggtgcagccaagcccttacgacatatgggccaccgccgacctggtggagctggttaagcagcgcattgaggtcacggatggaaggctacaagcggcctttgtcgtgtcgcgggcgatcaaaggcacgcgcatcggcggtgaggttgccgaggcgctggccgggtacgagctgcccattcttgagtcccgtatcacgcagcgcgtgagctacccaggcactgccgccgccggcacaaccgttcttgaatcagaacccgagggcgacgctgcccgcgaggtccaggcgctggccgctgaaattaaatcaaaactcatttgagttaatgaggtaaagagaaaatgagcaaaagcacaaacacgctaagtgccggccgtccgagcgcacgcagcagcaaggctgcaacgttggccagcctggcagacacgccagccatgaagcgggtcaactttcagttgccggcggaggatcacaccaagctgaagatgtacgcggtacgccaaggcaagaccattaccgagctgctatctgaatacatcgcgcagctaccagagtaaatgagcaaatgaataaatgagtagatgaattttagcggctaaaggaggcggcatggaaaatcaagaacaaccaggcaccgacgccgtggaatgccccatgtgtggaggaacgggcggttggccaggcgtaagcggctgggttgcctgccggccctgcaatggcactggaacccccaagcccgaggaatcggcgtgagcggtcgcaaaccatccggcccggtacaaatcggcgcggcgctgggtgatgacctggtggagaagttgaaggccgcgcaggccgcccagcggcaacgcatcgaggcagaagcacgccccggtgaatcgtggcaagcggccgctgatcgaatccgcaaagaatcccggcaaccgccggcagccggtgcgccgtcgattaggaagccgcccaagggcgacgagcaaccagattttttcgttccgatgctctatgacgtgggcacccgcgatagtcgcagcatcatggacgtggccgttttccgtctgtcgaagcgtgaccgacgagctggcgaggtgatccgctacgagcttccagacgggcacgtagaggtttccgcagggccggccggcatggccagtgtgtgggattacgacctggtactgatggcggtttcccatctaaccgaatccatgaaccgataccgggaagggaagggagacaagcccggccgcgtgttccgtccacacgttgcggacgtactcaagttctgccggcgagccgatggcggaaagcagaaagacgacctggtagaaacctgcattcggttaaacaccacgcacgttgccatgcagcgtacgaagaaggccaagaacggccgcctggtgacggtatccgagggtgaagccttgattagccgctacaagatcgtaaagagcgaaaccgggcggccggagtacatcgagatcgagctagctgattggatgtaccgcgagatcacagaaggcaagaacccggacgtgctgacggttcaccccgattactttttgatcgatcccggcatcggccgttttctctaccgcctggcacgccgcgccgcaggcaaggcagaagccagatggttgttcaagacgatctacgaacgcagtggcagcgccggagagttcaagaagttctgtttcaccgtgcgcaagctgatcgggtcaaatgacctgccggagtacgatttgaaggaggaggcggggcaggctggcccgatcctagtcatgcgctaccgcaacctgatcgagggcgaagcatccgccggttcctaatgtacggagcagatgctagggcaaattgccctagcaggggaaaaaggtcgaaaaggtctctttcctgtggatagcacgtacattgggaacccaaagccgtacattgggaaccggaacccgtacattgggaacccaaagccgtacattgggaaccggtcacacatgtaagtgactgatataaaagagaaaaaaggcgatttttccgcctaaaactctttaaaacttattaaaactcttaaaacccgcctggcctgtgcataactgtctggccagcgcacagccgaagagctgcaaaaagcgcctacccttcggtcgctgcgctccctacgccccgccgcttcgcgtcggcctatcgcggccgctggccgctcaaaaatggctggcctacggccaggcaatctaccagggcgcggacaagccgcgccgtcgccactcgaccgccggcgcccacatcaaggcaccctgcctcgcgcgtttcggtgatgacggtgaaaacctctgacacatgcagctcccggagacggtcacagcttgtctgtaagcggatgccgggagcagacaagcccgtcagggcgcgtcagcgggtgttggcgggtgtcggggcgcagccatgacccagtcacgtagcgatagcggagtgtatactggcttaactatgcggcatcagagcagattgtactgagagtgcaccatatgcggtgtgaaataccgcacagatgcgtaaggagaaaataccgcatcaggcgctcttccgcttcctcgctcactgactcgctgcgctcggtcgttcggctgcggcgagcggtatcagctcactcaaaggcggtaatacggttatccacagaatcaggggataacgcaggaaagaacatgtgagcaaaaggccagcaaaaggccaggaaccgtaaaaaggccgcgttgctggcgtttttccataggctccgcccccctgacgagcatcacaaaaatcgacgctcaagtcagaggtggcgaaacccgacaggactataaagataccaggcgtttccccctggaagctccctcgtgcgctctcctgttccgaccctgccgcttaccggatacctgtccgcctttctcccttcgggaagcgtggcgctttctcatagctcacgctgtaggtatctcagttcggtgtaggtcgttcgctccaagctgggctgtgtgcacgaaccccccgttcagcccgaccgctgcgccttatccggtaactatcgtcttgagtccaacccggtaagacacgacttatcgccactggcagcagccactggtaacaggattagcagagcgaggtatgtaggcggtgctacagagttcttgaagtggtggcctaactacggctacactagaaggacagtatttggtatctgcgctctgctgaagccagttaccttcggaaaaagagttggtagctcttgatccggcaaacaaaccaccgctggtagcggtggtttttttgtttgcaagcagcagattacgcgcagaaaaaaaggatctcaagaagatcctttgatcttttctacggggtctgacgctcagtggaacgaaaactcacgttaagggattttggtcatgcattctaggtactaaaacaattcatccagtaaaatataatattttattttctcccaatcaggcttgatccccagtaagtcaaaaaatagctcgacatactgttcttccccgatatcctccctgatcgaccggacgcagaaggcaatgtcataccacttgtccgccctgccgcttctcccaagatcaataaagccacttactttgccatctttcacaaagatgttgctgtctcccaggtcgccgtgggaaaagacaagttcctcttcgggcttttccgtctttaaaaaatcatacagctcgcgcggatctttaaatggagtgtcttcttcccagttttcgcaatccacatcggccagatcgttattcagtaagtaatccaattcggctaagcggctgtctaagctattcgtatagggacaatccgatatgtcgatggagtgaaagagcctgatgcactccgcatacagctcgataatcttttcagggctttgttcatcttcatactcttccgagcaaaggacgccatcggcctcactcatgagcagattgctccagccatcatgccgttcaaagtgcaggacctttggaacaggcagctttccttccagccatagcatcatgtccttttcccgttccacatcataggtggtccctttataccggctgtccgtcatttttaaatataggttttcattttctcccaccagcttatataccttagcaggagacattccttccgtatcttttacgcagcggtatttttcgatcagttttttcaattccggtgatattctcattttagccatttattatttccttcctcttttctacagtatttaaagataccccaagaagctaattataacaagacgaactccaattcactgttccttgcattctaaaaccttaaataccagaaaacagctttttcaaagttgttttcaaagttggcgtataacatagtatcgacggagccgattttgaaaccgcggtgatcacaggcagcaacgctctgtcatcgttacaatcaacatgctaccctccgcgagatcatccgtgtttcaaacccggcagcttagttgccgttcttccgaatagcatcggtaacatgagcaaagtctgccgccttacaacggctctcccgctgacgccgtcccggactgatgggctgcctgtatcgagtggtgattttgtgccgagctgccggtcggggagctgttggctggctggtggcaggatatattgtggtgtaaacaaattgacgcttagacaacttaataacacattgcggacgtttttaatgtactgaattaacgccgaatta

SEQ ID NO: 42 - DNA, 9466 bp, Artificial sequence
  plasmid VC-MME432-1qcz
  5'UTR (2125)..(2289)
  transit_peptide (2290)..(2397)
  CDS (2290)..(2397)
  transit_peptide (2475)..(2543)
  CDS (2475)..(2543)
  CDS (2544)..(2552): adapter
gctttgggcggatcctctagaggacaatcagtaaattgaacggagaatattattcataaaaatacgatagtaacgggtgatatattcattagaatgaaccgaaaccggcggtaaggatctgagctacacatgctcaggttttttacaacgtgcacaacagaattgaaagcaaatatcatgcgatcataggcgtctcgcatatctcattaaagcagggcatgccggtcgagtcaaatctcggtgacgggcaggaccggacggggcggtaccggcaggctgaagtccagctgccagaaacccacgtcatgccagttcccgtgcttgaagccggccgcccgcagcatgccgcggggggcatatccgagcgcctcgtgcatgcgcacgctcgggtcgttgggcagcccgatgacagcgaccacgctcttgaagccctgtgcctccagggacttcagcaggtgggtgtagagcgtggagcccagtcccgtccgctggtggcggggggagacgtacacggtcgactcggccgtccagtcgtaggcgttgcgtgccttccaggggcccgcgtaggcgatgccggcgacctcgccgtccacctcggcgacgagccagggatagcgctcccgcagacggacgaggtcgtccgtccactcctgcggttcctgcggctcggtacggaagttgaccgtgcttgtctcgatgtagtggttgacgatggtgcagaccgccggcatgtccgcctcggtggcacggcggatgtcggccgggcgtcgttctgggctcatggtagactcgacggatccacgtgtggaagatatgaatttttttgagaaactagataagattaatgaatatcggtgttttggttttttcttgtggccgtctttgtttatattgagatttttcaaatcagtgcgcaagacgtgacgtaagtatccgagtcagtttttatttttctactaatttggtcgaatctagattcgacggtatcgataagctcgcggatccctgaaagcgacgttggatgttaacatctacaaattgccttttcttatcgaccatgtacgtaagcgcttacgtttttggtggacccttgaggaaactggtagctgttgtgggcctgtggtctcaagatggatcattaatttccaccttcacctacgatggggggcatcgcaccggtgagtaatattgtacggctaagagcgaatttggcctgtaggatccctgaaagcgacgttggatgttaacatctacaaattgccttttcttatcgaccatgtacgtaagcgcttacgtttttggtggacccttgaggaaactggtagctgttgtgggcctgtggtctcaagatggatcattaatttccaccttcacctacgatggggggcatcgcaccggtgagtaatattgtacggctaagagcgaatttggcctgtaggatccctgaaagcgacgttggatgttaacatctacaaattgccttttcttatcgaccatgtacgtaagcgcttacgtttttggtggacccttgaggaaactggtagctgttgtgggcctgtggtctcaagatggatcattaatttccaccttcacctacgatggggggcatcgcaccggtgagtaatattgtacggctaagagcgaatttggcctgtaggatccgcgagctggtcaatcccattgcttttgaagcagctcaacattgatctctttctcgatcgagggagatttttcaaatcagtgcgcaagacgtgacgtaagtatccgagtcagtttttatttttctactaatttggtcgtttatttcggcgtgtaggacatggcaaccgggcctgaatttcgcgggtattctgtttctattccaactttttcttgatccgcagccattaacgacttttgaatagatacgctgacacgccaagcctcgctagtcaaaagtgtaccaaacaacgctttacagcaagaacggaatgcgcgtgacgctcgcggtgacgccatttcgccttttcagaaatggataaatagccttgcttcctattatatcttcccaaattaccaatacattacactagcatctgaatttcataaccaatctcgatacaccaaatcgaagatctcccaaacgcataaacttatcttcatagttgccactccaatttgctccttgaatctcctccacccaatacataatccactcctccatcacccacttcactactaaatcaaacttaactctgtttttctctctcctcctttcatttcttattcttccaatcatcgtactccgccatgaccaccgctgtcaccgccgctgtttctttcccctctaccaaaaccacctctctctccgcccgaagctcctccgtcatttcccctgacaaaatcagctacaaaaaggtgattcccaatttcactgtgttttttattaataatttgttattttgatgatgagatgattaatttgggtgctgcaggttcctttgtactacaggaatgtatctgcaactgggaaaatgggacccatcagggcccagatcgcctcttgctcttccatggcaatgattaattaacgaagagcaagagctcgaatttccccgatcgttcaaacatttggcaataaagtttcttaagattgaatcctgttgccggtcttgcgatgattatcatataatttctgttgaattacgttaagcatgtaataattaacatgtaatgcatgacgttatttatgagatgggtttttatgattagagtcccgcaattatacatttaatacgcgatagaaaacaaaatatagcgcgcaaactaggataaattatcgcgcgcggtgtcatctatgttactagatcgggaattggcatgcaagcttggcactggccgtcgttttacaacgtcgtgactgggaaaaccctggcgttacccaacttaatcgccttgcagcacatccccctttcgccagctggcgtaatagcgaagaggcccgcaccgatcgcccttcccaacagttgcgcagcctgaatggcgaatgctagagcagcttgagcttggatcagattgtcgtttcccgccttcagtttaaactatcagtgtttgacaggatatattggcgggtaaacctaagagaaaagagcgtttattagaataatcggatatttaaaagggcgtgaaaaggtttatccgttcgtccatttgtatgtgcatgccaaccacagggttcccctcgggatcaaagtactttgatccaacccctccgctgctatagtgcagtcggcttctgacgttcagtgcagccgtcttctgaaaacgacatgtcgcacaagtcctaagttacgcgacaggctgccgccctgcccttttcctggcgttttcttgtcgcgtgttttagtcgcataaagtagaatacttgcgactagaaccggagacattacgccatgaacaagagcgccgccgctggcctgctgggctatgcccgcgtcagcaccgacgaccaggacttgaccaaccaacgggccgaactgcacgcggccggctgcaccaagctgttttccgagaagatcaccggcaccaggcgcgaccgcccggagctggccaggatgcttgaccacctacgccctggcgacgttgtgacagtgaccaggctagaccgcctggcccgcagcacccgcgacctactggacattgccgagcgcatccaggaggccggcgcgggcctgcgtagcctggcagagccgtgggccgacaccaccacgccggccggccgcatggtgttgaccgtgttcgccggcattgccgagttcgagcgttccctaatcatcgaccgcacccggagcgggcgcgaggccgccaaggcccgaggcgtgaagtttggcccccgccctaccctcaccccggcacagatcgcgcacgcccgcgagctgatcgaccaggaaggccgcaccgtgaaagaggcggctgcactgcttggcgtgcatcgctcgaccctgtaccgcgcacttgagcgcagcgaggaagtgacgcccaccgaggccaggcggcgcggtgccttccgtgaggacgcattgaccgaggccgacgccctggcggccgccgagaatgaacgccaagaggaacaagcatgaaaccgcaccaggacggccaggacgaaccgtttttcattaccgaagagatcgaggcggagatgatcgcggccgggtacgtgttcgagccgcccgcgcacgtctcaaccgtgcggctgcatgaaatcctggccggtttgtctgatgccaagctggcggcctggccggccagcttggccgctgaagaaaccgagcgccgccgtctaaaaaggtgatgtgtatttgagtaaaacagcttgcgtcatgcggtcgctgcgtatatgatgcgatgagtaaataaacaaatacgcaaggggaacgcatgaaggttatcgctgtacttaaccagaaaggcgggtcaggcaagacgaccatcgcaacccatctagcccgcgccctgcaactcgccggggccgatgttctgttagtcgattccgatccccagggcagtgcccgcgattgggcggccgtgcgggaagatcaaccgctaaccgttgtcggcatcgaccgcccgacgattgaccgcgacgtgaaggccatcggccggcgcgacttcgtagtgatcgacggagcgccccaggcggcggacttggctgtgtccgcgatcaaggcagccgacttcgtgctgattccggtgcagccaagcccttacgacatatgggccaccgccgacctggtggagctggttaagcagcgcattgaggtcacggatggaaggctacaagcggcctttgtcgtgtcgcgggcgatcaaaggcacgcgcatcggcggtgaggttgccgaggcgctggccgggtacgagctgcccattcttgagtcccgtatcacgcagcgcgtgagctacccaggcactgccgccgccggcacaaccgttcttgaatcagaacccgagggcgacgctgcccgcgaggtccaggcgctggccgctgaaattaaatcaaaactcatttgagttaatgaggtaaagagaaaatgagcaaaagcacaaacacgctaagtgccggccgtccgagcgcacgcagcagcaaggctgcaacgttggccagcctggcagacacgccagccatgaagcgggtcaactttcagttgccggcggaggatcacaccaagctgaagatgtacgcggtacgccaaggcaagaccattaccgagctgctatctgaatacatcgcgcagctaccagagtaaatgagcaaatgaataaatgagtagatgaattttagcggctaaaggaggcggcatggaaaatcaagaacaaccaggcaccgacgccgtggaatgccccatgtgtggaggaacgggcggttggccaggcgtaagcggctgggttgcctgccggccctgcaatggcactggaacccccaagcccgaggaatcggcgtgagcggtcgcaaaccatccggcccggtacaaatcggcgcggcgctgggtgatgacctggtggagaagttgaaggccgcgcaggccgcccagcggcaacgcatcgaggcagaagcacgccccggtgaatcgtggcaagcggccgctgatcgaatccgcaaagaatcccggcaaccgccggcagccggtgcgccgtcgattaggaagccgcccaagggcgacgagcaaccagattttttcgttccgatgctctatgacgtgggcacccgcgatagtcgcagcatcatggacgtggccgttttccgtctgtcgaagcgtgaccgacgagctggcgaggtgatccgctacgagcttccagacgggcacgtagaggtttccgcagggccggccggcatggccagtgtgtgggattacgacctggtactgatggcggtttcccatctaaccgaatccatgaaccgataccgggaagggaagggagacaagcccggccgcgtgttccgtccacacgttgcggacgtactcaagttctgccggcgagccgatggcggaaagcagaaagacgacctggtagaaacctgcattcggttaaacaccacgcacgttgccatgcagcgtacgaagaaggccaagaacggccgcctggtgacggtatccgagggtgaagccttgattagccgctacaagatcgtaaagagcgaaaccgggcggccggagtacatcgagatcgagctagctgattggatgtaccgcgagatcacagaaggcaagaacccggacgtgctgacggttcaccccgattactttttgatcgatcccggcatcggccgttttctctaccgcctggcacgccgcgccgcaggcaaggcagaagccagatggttgttcaagacgatctacgaacgcagtggcagcgccggagagttcaagaagttctgtttcaccgtgcgcaagctgatcgggtcaaatgacctgccggagtacgatttgaaggaggaggcggggcaggctggcccgatcctagtcatgcgctaccgcaacctgatcgagggcgaagcatccgccggttcctaatgtacggagcagatgctagggcaaattgccctagcaggggaaaaaggtcgaaaaggtctctttcctgtggatagcacgtacattgggaacccaaagccgtacattgggaaccggaacccgtacattgggaacccaaagccgtacattgggaaccggtcacacatgtaagtgactgatataaaagagaaaaaaggcgatttttccgcctaaaactctttaaaacttattaaaactcttaaaacccgcctggcctgtgcataactgtctggccagcgcacagccgaagagctgcaaaaagcgcctacccttcggtcgctgcgctccctacgccccgccgcttcgcgtcggcctatcgcggccgctggccgctcaaaaatggctggcctacggccaggcaatctaccagggcgcggacaagccgcgccgtcgccactcgaccgccggcgcccacatcaaggcaccctgcctcgcgcgtttcggtgatgacggtgaaaacctctgacacatgcagctcccggagacggtcacagcttgtctgtaagcggatgccgggagcagacaagcccgtcagggcgcgtcagcgggtgttggcgggtgtcggggcgcagccatgacccagtcacgtagcgatagcggagtgtatactggcttaactatgcggcatcagagcagattgtactgagagtgcaccatatgcggtgtgaaataccgcacagatgcgtaaggagaaaataccgcatcaggcgctcttccgcttcctcgctcactgactcgctgcgctcggtcgttcggctgcggcgagcggtatcagctcactcaaaggcggtaatacggttatccacagaatcaggggataacgcaggaaagaacatgtgagcaaaaggccagcaaaaggccaggaaccgtaaaaaggccgcgttgctggcgtttttccataggctccgcccccctgacgagcatcacaaaaatcgacgctcaagtcagaggtggcgaaacccgacaggactataaagataccaggcgtttccccctggaagctccctcgtgcgctctcctgttccgaccctgccgcttaccggatacctgtccgcctttctcccttcgggaagcgtggcgctttctcatagctcacgctgtaggtatctcagttcggtgtaggtcgttcgctccaagctgggctgtgtgcacgaaccccccgttcagcccgaccgctgcgccttatccggtaactatcgtcttgagtccaacccggtaagacacgacttatcgccactggcagcagccactggtaacaggattagcagagcgaggtatgtaggcggtgctacagagttcttgaagtggtggcctaactacggctacactagaaggacagtatttggtatctgcgctctgctgaagccagttaccttcggaaaaagagttggtagctcttgatccggcaaacaaaccaccgctggtagcggtggtttttttgtttgcaagcagcagattacgcgcagaaaaaaaggatctcaagaagatcctttgatcttttctacggggtctgacgctcagtggaacgaaaactcacgttaagggattttggtcatgcattctaggtactaaaacaattcatccagtaaaatataatattttattttctcccaatcaggcttgatccccagtaagtcaaaaaatagctcgacatactgttcttccccgatatcctccctgatcgaccggacgcagaaggcaatgtcataccacttgtccgccctgccgcttctcccaagatcaataaagccacttactttgccatctttcacaaagatgttgctgtctcccaggtcgccgtgggaaaagacaagttcctcttcgggcttttccgtctttaaaaaatcatacagctcgcgcggatctttaaatggagtgtcttcttcccagttttcgcaatccacatcggccagatcgttattcagtaagtaatccaattcggctaagcggctgtctaagctattcgtatagggacaatccgatatgtcgatggagtgaaagagcctgatgcactccgcatacagctcgataatcttttcagggctttgttcatcttcatactcttccgagcaaaggacgccatcggcctcactcatgagcagattgctccagccatcatgccgttcaaagtgcaggacctttggaacaggcagctttccttccagccatagcatcatgtccttttcccgttccacatcataggtggtccctttataccggctgtccgtcatttttaaatataggttttcattttctcccaccagcttatataccttagcaggagacattccttccgtatcttttacgcagcggtatttttcgatcagttttttcaattccggtgatattctcattttagccatttattatttccttcctcttttctacagtatttaaagataccccaagaagctaattataacaagacgaactccaattcactgttccttgcattctaaaaccttaaataccagaaaacagctttttcaaagttgttttcaaagttggcgtataacatagtatcgacggagccgattttgaaaccgcggtgatcacaggcagcaacgctctgtcatcgttacaatcaacatgctaccctccgcgagatcatccgtgtttcaaacccggcagcttagttgccgttcttccgaatagcatcggtaacatgagcaaagtctgccgccttacaacggctctcccgctgacgccgtcccggactgatgggctgcctgtatcgagtggtgattttgtgccgagctgccggtcggggagctgttggctggctggtggcaggatatattgtggtgtaaacaaattgacgcttagacaacttaataacacattgcggacgtttttaatgtactgaattaacgccgaattaa

SEQ ID NO: 43 - protein, 62 aa, Artificial sequence
  Synthetic Construct
MTTAVTAAVSFPSTKTTSLSARSSSVISPDKISYKKVPLYYRNVSATGKMGPIRAQIASCSS

SEQ ID NO: 44 - DNA, 9137 bp, Artificial sequence
  plasmid VC-MME431-1qcz
  transit_peptide (2125)..(2214)
  CDS (2125)..(2214)
  CDS (2215)..(2223): adapter
gctttgggcggatcctctagaggacaatcagtaaattgaacggagaatattattcataaaaatacgatagtaacgggtgatatattcattagaatgaaccgaaaccggcggtaaggatctgagctacacatgctcaggttttttacaacgtgcacaacagaattgaaagcaaatatcatgcgatcataggcgtctcgcatatctcattaaagcagggcatgccggtcgagtcaaatctcggtgacgggcaggaccggacggggcggtaccggcaggctgaagtccagctgccagaaacccacgtcatgccagttcccgtgcttgaagccggccgcccgcagcatgccgcggggggcatatccgagcgcctcgtgcatgcgcacgctcgggtcgttgggcagcccgatgacagcgaccacgctcttgaagccctgtgcctccagggacttcagcaggtgggtgtagagcgtggagcccagtcccgtccgctggtggcggggggagacgtacacggtcgactcggccgtccagtcgtaggcgttgcgtgccttccaggggcccgcgtaggcgatgccggcgacctcgccgtccacctcggcgacgagccagggatagcgctcccgcagacggacgaggtcgtccgtccactcctgcggttcctgcggctcggtacggaagttgaccgtgcttgtctcgatgtagtggttgacgatggtgcagaccgccggcatgtccgcctcggtggcacggcggatgtcggccgggcgtcgttctgggctcatggtagactcgacggatccacgtgtggaagatatgaatttttttgagaaactagataagattaatgaatatcggtgttttggttttttcttgtggccgtctttgtttatattgagatttttcaaatcagtgcgcaagacgtgacgtaagtatccgagtcagtttttatttttctactaatttggtcgaatctagattcgacggtatcgataagctcgcggatccctgaaagcgacgttggatgttaacatctacaaattgccttttcttatcgaccatgtacgtaagcgcttacgtttttggtggacccttgaggaaactggtagctgttgtgggcctgtggtctcaagatggatcattaatttccaccttcacctacgatggggggcatcgcaccggtgagtaatattgtacggctaagagcgaatttggcctgtaggatccctgaaagcgacgttggatgttaacatctacaaattgccttttcttatcgaccatgtacgtaagcgcttacgtttttggtggacccttgaggaaactggtagctgttgtgggcctgtggtctcaagatggatcattaatttccaccttcacctacgatggggggcatcgcaccggtgagtaatattgtacggctaagagcgaatttggcctgtaggatccctgaaagcgacgttggatgttaacatctacaaattgccttttcttatcgaccatgtacgtaagcgcttacgtttttggtggacccttgaggaaactggtagctgttgtgggcctgtggtctcaagatggatcattaatttccaccttcacctacgatggggggcatcgcaccggtgagtaatattgtacggctaagagcgaatttggcctgtaggatccgcgagctggtcaatcccattgcttttgaagcagctcaacattgatctctttctcgatcgagggagatttttcaaatcagtgcgcaagacgtgacgtaagtatccgagtcagtttttatttttctactaatttggtcgtttatttcggcgtgtaggacatggcaaccgggcctgaatttcgcgggtattctgtttctattccaactttttcttgatccgcagccattaacgacttttgaatagatacgctgacacgccaagcctcgctagtcaaaagtgtaccaaacaacgctttacagcaagaacggaatgcgcgtgacgctcgcggtgacgccatttcgccttttcagaaatggataaatagccttgcttcctattatatcttcccaaattaccaatacattacactagcatctgaatttcataaccaatctcgatacaccaaatcgaagatctcccaaacatgcagaggtttttctccgccagatcgattctcggttacgccgtcaagacgcggaggaggtctttctcttctcgttcttcgtctctcctttgctcttccatggcaatgattaattaacgaagagcaagagctcgaatttccccgatcgttcaaacatttggcaataaagtttcttaagattgaatcctgttgccggtcttgcgatgattatcatataatttctgttgaattacgttaagcatgtaataattaacatgtaatgcatgacgttatttatgagatgggtttttatgattagagtcccgcaattatacatttaatacgcgatagaaaacaaaatatagcgcgcaaactaggataaattatcgcgcgcggtgtcatctatgttactagatcgggaattggcatgcaagcttggcactggccgtcgttttacaacgtcgtgactgggaaaaccctggcgttacccaacttaatcgccttgcagcacatccccctttcgccagctggcgtaatagcgaagaggcccgcaccgatcgcccttcccaacagttgcgcagcctgaatggcgaatgctagagcagcttgagcttggatcagattgtcgtttcccgccttcagtttaaactatcagtgtttgacaggatatattggcgggtaaacctaagagaaaagagcgtttattagaataatcggatatttaaaagggcgtgaaaaggtttatccgttcgtccatttgtatgtgcatgccaaccacagggttcccctcgggatcaaagtactttgatccaacccctccgctgctatagtgcagtcggcttctgacgttcagtgcagccgtcttctgaaaacgacatgtcgcacaagtcctaagttacgcgacaggctgccgccctgcccttttcctggcgttttcttgtcgcgtgttttagtcgcataaagtagaatacttgcgactagaaccggagacattacgccatgaacaagagcgccgccgctggcctgctgggctatgcccgcgtcagcaccgacgaccaggacttgaccaaccaacgggccgaactgcacgcggccggctgcaccaagctgttttccgagaagatcaccggcaccaggcgcgaccgcccggagctggccaggatgcttgaccacctacgccctggcgacgttgtgacagtgaccaggctagaccgcctggcccgcagcacccgcgacctactggacattgccgagcgcatccaggaggccggcgcgggcctgcgtagcctggcagagccgtgggccgacaccaccacgccggccggccgcatggtgttgaccgtgttcgccggcattgccgagttcgagcgttccctaatcatcgaccgcacccggagcgggcgcgaggccgccaaggcccgaggcgtgaagtttggcccccgccctaccctcaccccggcacagatcgcgcacgcccgcgagctgatcgaccaggaaggccgcaccgtgaaagaggcggctgcactgcttggcgtgcatcgctcgaccctgtaccgcgcacttgagcgcagcgaggaagtgacgcccaccgaggccaggcggcgcggtgccttccgtgaggacgcattgaccgaggccgacgccctggcggccgccgagaatgaacgccaagaggaacaagcatgaaaccgcaccaggacggccaggacgaaccgtttttcattaccgaagagatcgaggcggagatgatcgcggccgggtacgtgttcgagccgcccgcgcacgtctcaaccgtgcggctgcatgaaatcctggccggtttgtctgatgccaagctggcggcctggccggccagcttggccgctgaagaaaccgagcgccgccgtctaaaaaggtgatgtgtatttgagtaaaacagcttgcgtcatgcggtcgctgcgtatatgatgcgatgagtaaataaacaaatacgcaaggggaacgcatgaaggttatcgctgtacttaaccagaaaggcgggtcaggcaagacgaccatcgcaacccatctagcccgcgccctgcaactcgccggggccgatgttctgttagtcgattccgatccccagggcagtgcccgcgattgggcggccgtgcgggaagatcaaccgctaaccgttgtcggcatcgaccgcccgacgattgaccgcgacgtgaaggccatcggccggcgcgacttcgtagtgatcgacggagcgccccaggcggcggacttggctgtgtccgcgatcaaggcagccgacttcgtgctgattccggtgcagccaagcccttacgacatatgggccaccgccgacctggtggagctggttaagcagcgcattgaggtcacggatggaaggctacaagcggcctttgtcgtgtcgcgggcgatcaaaggcacgcgcatcggcggtgaggttgccgaggcgctggccgggtacgagctgcccattcttgagtcccgtatcacgcagcgcgtgagctacccaggcactgccgccgccggcacaaccgttcttgaatcagaacccgagggcgacgctgcccgcgaggtccaggcgctggccgctgaaattaaatcaaaactcatttgagttaatgaggtaaagagaaaatgagcaaaagcacaaacacgctaagtgccggccgtccgagcgcacgcagcagcaaggctgcaacgttggccagcctggcagacacgccagccatgaagcgggtcaactttcagttgccggcggaggatcacaccaagctgaagatgtacgcggtacgccaaggcaagaccattaccgagctgctatctgaatacatcgcgcagctaccagagtaaatgagcaaatgaataaatgagtagatgaattttagcggctaaaggaggcggcatggaaaatcaagaacaaccaggcaccgacgccgtggaatgccccatgtgtggaggaacgggcggttggccaggcgtaagcggctgggttgcctgccggccctgcaatggcactggaacccccaagcccgaggaatcggcgtgagcggtcgcaaaccatccggcccggtacaaatcggcgcggcgctgggtgatgacctggtggagaagttgaaggccgcgcaggccgcccagcggcaacgcatcgaggcagaagcacgccccggtgaatcgtggcaagcggccgctgatcgaatccgcaaagaatcccggcaaccgccggcagccggtgcgccgtcgattaggaagccgcccaagggcgacgagcaaccagattttttcgttccgatgctctatgacgtgggcacccgcgatagtcgcagcatcatggacgtggccgttttccgtctgtcgaagcgtgaccgacgagctggcgaggtgatccgctacgagcttccagacgggcacgtagaggtttccgcagggccggccggcatggccagtgtgtgggattacgacctggtactgatggcggtttcccatctaaccgaatccatgaaccgataccgggaagggaagggagacaagcccggccgcgtgttccgtccacacgttgcggacgtactcaagttctgccggcgagccgatggcggaaagcagaaagacgacctggtagaaacctgcattcggttaaacaccacgcacgttgccatgcagcgtacgaagaaggccaagaacggccgcctggtgacggtatccgagggtgaagccttgattagccgctacaagatcgtaaagagcgaaaccgggcggccggagtacatcgagatcgagctagctgattggatgtaccgcgagatcacagaaggcaagaacccggacgtgctgacggttcaccccgattactttttgatcgatcccggcatcggccgttttctctaccgcctggcacgccgcgccgcaggcaaggcagaagccagatggttgttcaagacgatctacgaacgcagtggcagcgccggagagttcaagaagttctgtttcaccgtgcgcaagctgatcgggtcaaatgacctgccggagtacgatttgaaggaggaggcggggcaggctggcccgatcctagtcatgcgctaccgcaacctgatcgagggcgaagcatccgccggttcctaatgtacggagcagatgctagggcaaattgccctagcaggggaaaaaggtcgaaaaggtctctttcctgtggatagcacgtacattgggaacccaaagccgtacattgggaaccggaacccgtacattgggaacccaaagccgtacattgggaaccggtcacacatgtaagtgactgatataaaagagaaaaaaggcgatttttccgcctaaaactctttaaaacttattaaaactcttaaaacccgcctggcctgtgcataactgtctggccagcgcacagccgaagagctgcaaaaagcgcctacccttcggtcgctgcgctccctacgccccgccgcttcgcgtcggcctatcgcggccgctggccgctcaaaaatggctggcctacggccaggcaatctaccagggcgcggacaagccgcgccgtcgccactcgaccgccggcgcccacatcaaggcaccctgcctcgcgcgtttcggtgatgacggtgaaaacctctgacacatgcagctcccggagacggtcacagcttgtctgtaagcggatgccgggagcagacaagcccgtcagggcgcgtcagcgggtgttggcgggtgtcggggcgcagccatgacccagtcacgtagcgatagcggagtgtatactggcttaactatgcggcatcagagcagattgtactgagagtgcaccatatgcggtgtgaaataccgcacagatgcgtaaggagaaaataccgcatcaggcgctcttccgcttcctcgctcactgactcgctgcgctcggtcgttcggctgcggcgagcggtatcagctcactcaaaggcggtaatacggttatccacagaatcaggggataacgcaggaaagaacatgtgagcaaaaggccagcaaaaggccaggaaccgtaaaaaggccgcgttgctggcgtttttccataggctccgcccccctgacgagcatcacaaaaatcgacgctcaagtcagaggtggcgaaacccgacaggactataaagataccaggcgtttccccctggaagctccctcgtgcgctctcctgttccgaccctgccgcttaccggatacctgtccgcctttctcccttcgggaagcgtggcgctttctcatagctcacgctgtaggtatctcagttcggtgtaggtcgttcgctccaagctgggctgtgtgcacgaaccccccgttcagcccgaccgctgcgccttatccggtaactatcgtcttgagtccaacccggtaagacacgacttatcgccactggcagcagccactggtaacaggattagcagagcgaggtatgtaggcggtgctacagagttcttgaagtggtggcctaactacggctacactagaaggacagtatttggtatctgcgctctgctgaagccagttaccttcggaaaaagagttggtagctcttgatccggcaaacaaaccaccgctggtagcggtggtttttttgtttgcaagcagcagattacgcgcagaaaaaaaggatctcaagaagatcctttgatcttttctacggggtctgacgctcagtggaacgaaaactcacgttaagggattttggtcatgcattctaggtactaaaacaattcatccagtaaaatataatattttattttctcccaatcaggcttgatccccagtaagtcaaaaaatagctcgacatactgttcttccccgatatcctccctgatcgaccggacgcagaaggcaatgtcataccacttgtccgccctgccgcttctcccaagatcaataaagccacttactttgccatctttcacaaagatgttgctgtctcccaggtcgccgtgggaaaagacaagttcctcttcgggcttttccgtctttaaaaaatcatacagctcgcgcggatctttaaatggagtgtcttcttcccagttttcgcaatccacatcggccagatcgttattcagtaagtaatccaattcggctaagcggctgtctaagctattcgtatagggacaatccgatatgtcgatggagtgaaagagcctgatgcactccgcatacagctcgataatcttttcagggctttgttcatcttcatactcttccgagcaaaggacgccatcggcctcactcatgagcagattgctccagccatcatgccgttcaaagtgcaggacctttggaacaggcagctttccttccagccatagcatcatgtccttttcccgttccacatcataggtggtccctttataccggctgtccgtcatttttaaatataggttttcattttctcccaccagcttatataccttagcaggagacattccttccgtatcttttacgcagcggtatttttcgatcagttttttcaattccggtgatattctcattttagccatttattatttccttcctcttttctacagtatttaaagataccccaagaagctaattataacaagacgaactccaattcactgttccttgcattctaaaaccttaaataccagaaaacagctttttcaaagttgttttcaaagttggcgtataacatagtatcgacggagccgattttgaaaccgcggtgatcacaggcagcaacgctctgtcatcgttacaatcaacatgctaccctccgcgagatcatccgtgtttcaaacccggcagcttagttgccgttcttccgaatagcatcggtaacatgagcaaagtctgccgccttacaacggctctcccgctgacgccgtcccggactgatgggctgcctgtatcgagtggtgattttgtgccgagctgccggtcggggagctgttggctggctggtggcaggatatattgtggtgtaaacaaattgacgcttagacaacttaataacacattgcggacgtttttaatgtactgaattaacgccgaattaa

SEQ ID NO: 45 - protein, 33 aa, Artificial sequence
  Synthetic Construct
MQRFFSARSILGYAVKTRRRSFSSRSSSLLCSS

SEQ ID NO: 46 - DNA, 8885 bp, Artificial sequence
  plasmid VC-MME221-1qcz
agcttggacaatcagtaaattgaacggagaatattattcataaaaatacgatagtaacgggtgatatattcattagaatgaaccgaaaccggcggtaaggatctgagctacacatgctcaggttttttacaacgtgcacaacagaattgaaagcaaatatcatgcgatcataggcgtctcgcatatctcattaaagcagggcatgccggtcgagtcaaatctcggtgacgggcaggaccggacggggcggtaccggcaggctgaagtccagctgccagaaacccacgtcatgccagttcccgtgcttgaagccggccgcccgcagcatgccgcggggggcatatccgagcgcctcgtgcatgcgcacgctcgggtcgttgggcagcccgatgacagcgaccacgctcttgaagccctgtgcctccagggacttcagcaggtgggtgtagagcgtggagcccagtcccgtccgctggtggcggggggagacgtacacggtcgactcggccgtccagtcgtaggcgttgcgtgccttccaggggcccgcgtaggcgatgccggcgacctcgccgtccacctcggcgacgagccagggatagcgctcccgcagacggacgaggtcgtccgtccactcctgcggttcctgcggctcggtacggaagttgaccgtgcttgtctcgatgtagtggttgacgatggtgcagaccgccggcatgtccgcctcggtggcacggcggatgtcggccgggcgtcgttctgggctcatggtagactcgacggatccacgtgtggaagatatgaatttttttgagaaactagataagattaatgaatatcggtgttttggttttttcttgtggccgtctttgtttatattgagatttttcaaatcagtgcgcaagacgtgacgtaagtatccgagtcagtttttatttttctactaatttggtcgaagctttgggcggatcctctagaattcgaatccaaaaattacggatatgaatataggcatatccgtatccgaattatccgtttgacagctagcaacgattgtacaattgcttctttaaaaaaggaagaaagaaagaaagaaaagaatcaacatcagcgttaacaaacggccccgttacggcccaaacggtcatatagagtaacggcgttaagcgttgaaagactcctatcgaaatacgtaaccgcaaacgtgtcatagtcagatcccctcttccttcaccgcctcaaacacaaaaataatcttctacagcctatatatacaacccccccttctatctctcctttctcacaattcatcatctttctttctctacccccaattttaagaaatcctctcttctcctcttcattttcaaggtaaatctctctctctctctctctctctgttattccttgttttaattaggtatgtattattgctagtttgttaatctgcttatcttatgtatgccttatgtgaatatctttatcttgttcatctcatccgtttagaagctataaatttgttgatttgactgtgtatctacacgtggttatgtttatatctaatcagatatgaatttcttcatattgttgcgtttgtgtgtaccaatccgaaatcgttgatttttttcatttaatcgtgtagctaattgtacgtatacatatggatctacgtatcaattgttcatctgtttgtgtttgtatgtatacagatctgaaaacatcacttctctcatctgattgtgttgttacatacatagatatagatctgttatatcattttttttattaattgtgtatatatatatgtgcatagatctggattacatgattgtgattatttacatgattttgttatttacgtatgtatatatgtagatctggactttttggagttgttgacttgattgtatttgtgtgtgtatatgtgtgttctgatcttgatatgttatgtatgtgcagcccgggttgctcttccatggcaatgattaattaacgaagagcaagagctcgaatttccccgatcgttcaaacatttggcaataaagtttcttaagattgaatcctgttgccggtcttgcgatgattatcatataatttctgttgaattacgttaagcatgtaataattaacatgtaatgcatgacgttatttatgagatgggtttttatgattagagtcccgcaattatacatttaatacgcgatagaaaacaaaatatagcgcgcaaactaggataaattatcgcgcgcggtgtcatctatgttactagatcgggaattggcatgcaagcttggcactggccgtcgttttacaacgtcgtgactgggaaaaccctggcgttacccaacttaatcgccttgcagcacatccccctttcgccagctggcgtaatagcgaagaggcccgcaccgatcgcccttcccaacagttgcgcagcctgaatggcgaatgctagagcagcttgagcttggatcagattgtcgtttcccgccttcagtttaaactatcagtgtttgacaggatatattggcgggtaaacctaagagaaaagagcgtttattagaataatcggatatttaaaagggcgtgaaaaggtttatccgttcgtccatttgtatgtgcatgccaaccacagggttcccctcgggatcaaagtactttgatccaacccctccgctgctatagtgcagtcggcttctgacgttcagtgcagccgtcttctgaaaacgacatgtcgcacaagtcctaagttacgcgacaggctgccgccctgcccttttcctggcgttttcttgtcgcgtgttttagtcgcataaagtagaatacttgcgactagaaccggagacattacgccatgaacaagagcgccgccgctggcctgctgggctatgcccgcgtcagcaccgacgaccaggacttgaccaaccaacgggccgaactgcacgcggccggctgcaccaagctgttttccgagaagatcaccggcaccaggcgcgaccgcccggagctggccaggatgcttgaccacctacgccctggcgacgttgtgacagtgaccaggctagaccgcctggcccgcagcacccgcgacctactggacattgccgagcgcatccaggaggccggcgcgggcctgcgtagcctggcagagccgtgggccgacaccaccacgccggccggccgcatggtgttgaccgtgttcgccggcattgccgagttcgagcgttccctaatcatcgaccgcacccggagcgggcgcgaggccgccaaggcccgaggcgtgaagtttggcccccgccctaccctcaccccggcacagatcgcgcacgcccgcgagctgatcgaccaggaaggccgcaccgtgaaagaggcggctgcactgcttggcgtgcatcgctcgaccctgtaccgcgcacttgagcgcagcgaggaagtgacgcccaccgaggccaggcggcgcggtgccttccgtgaggacgcattgaccgaggccgacgccctggcggccgccgagaatgaacgccaagaggaacaagcatgaaaccgcaccaggacggccaggacgaaccgtttttcattaccgaagagatcgaggcggagatgatcgcggccgggtacgtgttcgagccgcccgcgcacgtctcaaccgtgcggctgcatgaaatcctggccggtttgtctgatgccaagctggcggcctggccggccagcttggccgctgaagaaaccgagcgccgccgtctaaaaaggtgatgtgtatttgagtaaaacagcttgcgtcatgcggtcgctgcgtatatgatgcgatgagtaaataaacaaatacgcaaggggaacgcatgaaggttatcgctgtacttaaccagaaaggcgggtcaggcaagacgaccatcgcaacccatctagcccgcgccctgcaactcgccggggccgatgttctgttagtcgattccgatccccagggcagtgcccgcgattgggcggccgtgcgggaagatcaaccgctaaccgttgtcggcatcgaccgcccgacgattgaccgcgacgtgaaggccatcggccggcgcgacttcgtagtgatcgacggagcgccccaggcggcggacttggctgtgtccgcgatcaaggcagccgacttcgtgctgattccggtgcagccaagcccttacgacatatgggccaccgccgacctggtggagctggttaagcagcgcattgaggtcacggatggaaggctacaagcggcctttgtcgtgtcgcgggcgatcaaaggcacgcgcatcggcggtgaggttgccgaggcgctggccgggtacgagctgcccattcttgagtcccgtatcacgcagcgcgtgagctacccaggcactgccgccgccggcacaaccgttcttgaatcagaacccgagggcgacgctgcccgcgaggtccaggcgctggccgctgaaattaaatcaaaactcatttgagttaatgaggtaaagagaaaatgagcaaaagcacaaacacgctaagtgccggccgtccgagcgcacgcagcagcaaggctgcaacgttggccagcctggcagacacgccagccatgaagcgggtcaactttcagttgccggcggaggatcacaccaagctgaagatgtacgcggtacgccaaggcaagaccattaccgagctgctatctgaatacatcgcgcagctaccagagtaaatgagcaaatgaataaatgagtagatgaattttagcggctaaaggaggcggcatggaaaatcaagaacaaccaggcaccgacgccgtggaatgccccatgtgtggaggaacgggcggttggccaggcgtaagcggctgggttgcctgccggccctgcaatggcactggaacccccaagcccgaggaatcggcgtgagcggtcgcaaaccatccggcccggtacaaatcggcgcggcgctgggtgatgacctggtggagaagttgaaggccgcgcaggccgcccagcggcaacgcatcgaggcagaagcacgccccggtgaatcgtggcaagcggccgctgatcgaatccgcaaagaatcccggcaaccgccggcagccggtgcgccgtcgattaggaagccgcccaagggcgacgagcaaccagattttttcgttccgatgctctatgacgtgggcacccgcgatagtcgcagcatcatggacgtggccgttttccgtctgtcgaagcgtgaccgacgagctggcgaggtgatccgctacgagcttccagacgggcacgtagaggtttccgcagggccggccggcatggccagtgtgtgggattacgacctggtactgatggcggtttcccatctaaccgaatccatgaaccgataccgggaagggaagggagacaagcccggccgcgtgttccgtccacacgttgcggacgtactcaagttctgccggcgagccgatggcggaaagcagaaagacgacctggtagaaacctgcattcggttaaacaccacgcacgttgccatgcagcgtacgaagaaggccaagaacggccgcctggtgacggtatccgagggtgaagccttgattagccgctacaagatcgtaaagagcgaaaccgggcggccggagtacatcgagatcgagctagctgattggatgtaccgcgagatcacagaaggcaagaacccggacgtgctgacggttcaccccgattactttttgatcgatcccggcatcggccgttttctctaccgcctggcacgccgcgccgcaggcaaggcagaagccagatggttgttcaagacgatctacgaacgcagtggcagcgccggagagttcaagaagttctgtttcaccgtgcgcaagctgatcgggtcaaatgacctgccggagtacgatttgaaggaggaggcggggcaggctggcccgatcctagtcatgcgctaccgcaacctgatcgagggcgaagcatccgccggttcctaatgtacggagcagatgctagggcaaattgccctagcaggggaaaaaggtcgaaaaggtctctttcctgtggatagcacgtacattgggaacccaaagccgtacattgggaaccggaacccgtacattgggaacccaaagccgtacattgggaaccggtcacacatgtaagtgactgatataaaagagaaaaaaggcgatttttccgcctaaaactctttaaaacttattaaaactcttaaaacccgcctggcctgtgcataactgtctggccagcgcacagccgaagagctgcaaaaagcgcctacccttcggtcgctgcgctccctacgccccgccgcttcgcgtcggcctatcgcggccgctggccgctcaaaaatggctggcctacggccaggcaatctaccagggcgcggacaagccgcgccgtcgccactcgaccgccggcgcccacatcaaggcaccctgcctcgcgcgtttcggtgatgacggtgaaaacctctgacacatgcagctcccggagacggtcacagcttgtctgtaagcggatgccgggagcagacaagcccgtcagggcgcgtcagcgggtgttggcgggtgtcggggcgcagccatgacccagtcacgtagcgatagcggagtgtatactggcttaactatgcggcatcagagcagattgtactgagagtgcaccatatgcggtgtgaaataccgcacagatgcgtaaggagaaaataccgcatcaggcgctcttccgcttcctcgctcactgactcgctgcgctcggtcgttcggctgcggcgagcggtatcagctcactcaaaggcggtaatacggttatccacagaatcaggggataacgcaggaaagaacatgtgagcaaaaggccagcaaaaggccaggaaccgtaaaaaggccgcgttgctggcgtttttccataggctccgcccccctgacgagcatcacaaaaatcgacgctcaagtcagaggtggcgaaacccgacaggactataaagataccaggcgtttccccctggaagctccctcgtgcgctctcctgttccgaccctgccgcttaccggatacctgtccgcctttctcccttcgggaagcgtggcgctttctcatagctcacgctgtaggtatctcagttcggtgtaggtcgttcgctccaagctgggctgtgtgcacgaaccccccgttcagcccgaccgctgcgccttatccggtaactatcgtcttgagtccaacccggtaagacacgacttatcgccactggcagcagccactggtaacaggattagcagagcgaggtatgtaggcggtgctacagagttcttgaagtggtggcctaactacggctacactagaaggacagtatttggtatctgcgctctgctgaagccagttaccttcggaaaaagagttggtagctcttgatccggcaaacaaaccaccgctggtagcggtggtttttttgtttgcaagcagcagattacgcgcagaaaaaaaggatctcaagaagatcctttgatcttttctacggggtctgacgctcagtggaacgaaaactcacgttaagggattttggtcatgcattctaggtactaaaacaattcatccagtaaaatataatattttattttctcccaatcaggcttgatccccagtaagtcaaaaaatagctcgacatactgttcttccccgatatcctccctgatcgaccggacgcagaaggcaatgtcataccacttgtccgccctgccgcttctcccaagatcaataaagccacttactttgccatctttcacaaagatgttgctgtctcccaggtcgccgtgggaaaagacaagttcctcttcgggcttttccgtctttaaaaaatcatacagctcgcgcggatctttaaatggagtgtcttcttcccagttttcgcaatccacatcggccagatcgttattcagtaagtaatccaattcggctaagcggctgtctaagctattcgtatagggacaatccgatatgtcgatggagtgaaagagcctgatgcactccgcatacagctcgataatcttttcagggctttgttcatcttcatactcttccgagcaaaggacgccatcggcctcactcatgagcagattgctccagccatcatgccgttcaaagtgcaggacctttggaacaggcagctttccttccagccatagcatcatgtccttttcccgttccacatcataggtggtccctttataccggctgtccgtcatttttaaatataggttttcattttctcccaccagcttatataccttagcaggagacattccttccgtatcttttacgcagcggtatttttcgatcagttttttcaattccggtgatattctcattttagccatttattatttccttcctcttttctacagtatttaaagataccccaagaagctaattataacaagacgaactccaattcactgttccttgcattctaaaaccttaaataccagaaaacagctttttcaaagttgttttcaaagttggcgtataacatagtatcgacggagccgattttgaaaccgcggtgatcacaggcagcaacgctctgtcatcgttacaatcaacatgctaccctccgcgagatcatccgtgtttcaaacccggcagcttagttgccgttcttccgaatagcatcggtaacatgagcaaagtctgccgccttacaacggctctcccgctgacgccgtcccggactgatgggctgcctgtatcgagtggtgattttgtgccgagctgccggtcggggagctgttggctggctggtggcaggatatattgtggtgtaaacaaattgacgcttagacaacttaataacacattgcggacgtttttaatgtactgaattaacgccgaatta

SEQ ID NO: 47 - DNA, 9303 bp, Artificial sequence
  plasmid pMTX447korr
  5'UTR (1964)..(2128)
  transit_peptide (2129)..(2236)
  CDS (2129)..(2236)
  transit_peptide (2314)..(2382)
  CDS (2314)..(2382)
  CDS (2383)..(2391): adapter
agcttggacaatcagtaaattgaacggagaatattattcataaaaatacgatagtaacgggtgatatattcattagaatgaaccgaaaccggcggtaaggatctgagctacacatgctcaggttttttacaacgtgcacaacagaattgaaagcaaatatcatgcgatcataggcgtctcgcatatctcattaaagcagggcatgccggtcgagtcaaatctcggtgacgggcaggaccggacggggcggtaccggcaggctgaagtccagctgccagaaacccacgtcatgccagttcccgtgcttgaagccggccgcccgcagcatgccgcggggggcatatccgagcgcctcgtgcatgcgcacgctcgggtcgttgggcagcccgatgacagcgaccacgctcttgaagccctgtgcctccagggacttcagcaggtgggtgtagagcgtggagcccagtcccgtccgctggtggcggggggagacgtacacggtcgactcggccgtccagtcgtaggcgttgcgtgccttccaggggcccgcgtaggcgatgccggcgacctcgccgtccacctcggcgacgagccagggatagcgctcccgcagacggacgaggtcgtccgtccactcctgcggttcctgcggctcggtacggaagttgaccgtgcttgtctcgatgtagtggttgacgatggtgcagaccgccggcatgtccgcctcggtggcacggcggatgtcggccgggcgtcgttctgggctcatggtagactcgacggatccacgtgtggaagatatgaatttttttgagaaactagataagattaatgaatatcggtgttttggttttttcttgtggccgtctttgtttatattgagatttttcaaatcagtgcgcaagacgtgacgtaagtatccgagtcagtttttatttttctactaatttggtcgaagctttgggcggatcctctagaattcgaatccaaaaattacggatatgaatataggcatatccgtatccgaattatccgtttgacagctagcaacgattgtacaattgcttctttaaaaaaggaagaaagaaagaaagaaaagaatcaacatcagcgttaacaaacggccccgttacggcccaaacggtcatatagagtaacggcgttaagcgttgaaagactcctatcgaaatacgtaaccgcaaacgtgtcatagtcagatcccctcttccttcaccgcctcaaacacaaaaataatcttctacagcctatatatacaacccccccttctatctctcctttctcacaattcatcatctttctttctctacccccaattttaagaaatcctctcttctcctcttcattttcaaggtaaatctctctctctctctctctctctgttattccttgttttaattaggtatgtattattgctagtttgttaatctgcttatcttatgtatgccttatgtgaatatctttatcttgttcatctcatccgtttagaagctataaatttgttgatttgactgtgtatctacacgtggttatgtttatatctaatcagatatgaatttcttcatattgttgcgtttgtgtgtaccaatccgaaatcgttgatttttttcatttaatcgtgtagctaattgtacgtatacatatggatctacgtatcaattgttcatctgtttgtgtttgtatgtatacagatctgaaaacatcacttctctcatctgattgtgttgttacatacatagatatagatctgttatatcattttttttattaattgtgtatatatatatgtgcatagatctggattacatgattgtgattatttacatgattttgttatttacgtatgtatatatgtagatctggactttttggagttgttgacttgattgtatttgtgtgtgtatatgtgtgttctgatcttgatatgttatgtatgtgcagcccaaacgcataaacttatcttcatagttgccactccaatttgctccttgaatctcctccacccaatacataatccactcctccatcacccacttcactactaaatcaaacttaactctgtttttctctctcctcctttcatttcttattcttccaatcatcgtactccgccatgaccaccgctgtcaccgccgctgtttctttcccctctaccaaaaccacctctctctccgcccgaagctcctccgtcatttcccctgacaaaatcagctacaaaaaggtgattcccaatttcactgtgttttttattaataatttgttattttgatgatgagatgattaatttgggtgctgcaggttcctttgtactacaggaatgtatctgcaactgggaaaatgggacccatcagggcccagatcgcctcttgctcttccatggcaatgattaattaacgaagagcaagagctcgaatttccccgatcgttcaaacatttggcaataaagtttcttaagattgaatcctgttgccggtcttgcgatgattatcatataatttctgttgaattacgttaagcatgtaataattaacatgtaatgcatgacgttatttatgagatgggtttttatgattagagtcccgcaattatacatttaatacgcgatagaaaacaaaatatagcgcgcaaactaggataaattatcgcgcgcggtgtcatctatgttactagatcgggaattggcatgcaagcttggcactggccgtcgttttacaacgtcgtgactgggaaaaccctggcgttacccaacttaatcgccttgcagcacatccccctttcgccagctggcgtaatagcgaagaggcccgcaccgatcgcccttcccaacagttgcgcagcctgaatggcgaatgctagagcagcttgagcttggatcagattgtcgtttcccgccttcagtttaaactatcagtgtttgacaggatatattggcgggtaaacctaagagaaaagagcgtttattagaataatcggatatttaaaagggcgtgaaaaggtttatccgttcgtccatttgtatgtgcatgccaaccacagggttcccctcgggatcaaagtactttgatccaacccctccgctgctatagtgcagtcggcttctgacgttcagtgcagccgtcttctgaaaacgacatgtcgcacaagtcctaagttacgcgacaggctgccgccctgcccttttcctggcgttttcttgtcgcgtgttttagtcgcataaagtagaatacttgcgactagaaccggagacattacgccatgaacaagagcgccgccgctggcctgctgggctatgcccgcgtcagcaccgacgaccaggacttgaccaaccaacgggccgaactgcacgcggccggctgcaccaagctgttttccgagaagatcaccggcaccaggcgcgaccgcccggagctggccaggatgcttgaccacctacgccctggcgacgttgtgacagtgaccaggctagaccgcctggcccgcagcacccgcgacctactggacattgccgagcgcatccaggaggccggcgcgggcctgcgtagcctggcagagccgtgggccgacaccaccacgccggccggccgcatggtgttgaccgtgttcgccggcattgccgagttcgagcgttccctaatcatcgaccgcacccggagcgggcgcgaggccgccaaggcccgaggcgtgaagtttggcccccgccctaccctcaccccggcacagatcgcgcacgcccgcgagctgatcgaccaggaaggccgcaccgtgaaagaggcggctgcactgcttggcgtgcatcgctcgaccctgtaccgcgcacttgagcgcagcgaggaagtgacgcccaccgaggccaggcggcgcggtgccttccgtgaggacgcattgaccgaggccgacgccctggcggccgccgagaatgaacgccaagaggaacaagcatgaaaccgcaccaggacggccaggacgaaccgtttttcattaccgaagagatcgaggcggagatgatcgcggccgggtacgtgttcgagccgcccgcgcacgtctcaaccgtgcggctgcatgaaatcctggccggtttgtctgatgccaagctggcggcctggccggccagcttggccgctgaagaaaccgagcgccgccgtctaaaaaggtgatgtgtatttgagtaaaacagcttgcgtcatgcggtcgctgcgtatatgatgcgatgagtaaataaacaaatacgcaaggggaacgcatgaaggttatcgctgtacttaaccagaaaggcgggtcaggcaagacgaccatcgcaacccatctagcccgcgccctgcaactcgccggggccgatgttctgttagtcgattccgatccccagggcagtgcccgcgattgggcggccgtgcgggaagatcaaccgctaaccgttgtcggcatcgaccgcccgacgattgaccgcgacgtgaaggccatcggccggcgcgacttcgtagtgatcgacggagcgccccaggcggcggacttggctgtgtccgcgatcaaggcagccgacttcgtgctgattccggtgcagccaagcccttacgacatatgggccaccgccgacctggtggagctggttaagcagcgcattgaggtcacggatggaaggctacaagcggcctttgtcgtgtcgcgggcgatcaaaggcacgcgcatcggcggtgaggttgccgaggcgctggccgggtacgagctgcccattcttgagtcccgtatcacgcagcgcgtgagctacccaggcactgccgccgccggcacaaccgttcttgaatcagaacccgagggcgacgctgcccgcgaggtccaggcgctggccgctgaaattaaatcaaaactcatttgagttaatgaggtaaagagaaaatgagcaaaagcacaaacacgctaagtgccggccgtccgagcgcacgcagcagcaaggctgcaacgttggccagcctggcagacacgccagccatgaagcgggtcaactttcagttgccggcggaggatcacaccaagctgaagatgtacgcggtacgccaaggcaagaccattaccgagctgctatctgaatacatcgcgcagctaccagagtaaatgagcaaatgaataaatgagtagatgaattttagcggctaaaggaggcggcatggaaaatcaagaacaaccaggcaccgacgccgtggaatgccccatgtgtggaggaacgggcggttggccaggcgtaagcggctgggttgtctgccggccctgcaatggcactggaacccccaagcccgaggaatcggcgtgacggtcgcaaaccatccggcccggtacaaatcggcgcggcgctgggtgatgacctggtggagaagttgaaggccgcgcaggccgcccagcggcaacgcatcgaggcagaagcacgccccggtgaatcgtggcaagcggccgctgatcgaatccgcaaagaatcccggcaaccgccggcagccggtgcgccgtcgattaggaagccgcccaagggcgacgagcaaccagattttttcgttccgatgctctatgacgtgggcacccgcgatagtcgcagcatcatggacgtggccgttttccgtctgtcgaagcgtgaccgacgagctggcgaggtgatccgctacgagcttccagacgggcacgtagaggtttccgcagggccggccggcatggccagtgtgtgggattacgacctggtactgatggcggtttcccatctaaccgaatccatgaaccgataccgggaagggaagggagacaagcccggccgcgtgttccgtccacacgttgcggacgtactcaagttctgccggcgagccgatggcggaaagcagaaagacgacctggtagaaacctgcattcggttaaacaccacgcacgttgccatgcagcgtacgaagaaggccaagaacggccgcctggtgacggtatccgagggtgaagccttgattagccgctacaagatcgtaaagagcgaaaccgggcggccggagtacatcgagatcgagctagctgattggatgtaccgcgagatcacagaaggcaagaacccggacgtgctgacggttcaccccgattactttttgatcgatcccggcatcggccgttttctctaccgcctggcacgccgcgccgcaggcaaggcagaagccagatggttgttcaagacgatctacgaacgcagtggcagcgccggagagttcaagaagttctgtttcaccgtgcgcaagctgatcgggtcaaatgacctgccggagtacgatttgaaggaggaggcggggcaggctggcccgatcctagtcatgcgctaccgcaacctgatcgagggcgaagcatccgccggttcctaatgtacggagcagatgctagggcaaattgccctagcaggggaaaaaggtcgaaaaggtctctttcctgtggatagcacgtacattgggaacccaaagccgtacattgggaaccggaacccgtacattgggaacccaaagccgtacattgggaaccggtcacacatgtaagtgactgatataaaagagaaaaaaggcgatttttccgcctaaaactctttaaaacttattaaaactcttaaaacccgcctggcctgtgcataactgtctggccagcgcacagccgaagagctgcaaaaagcgcctacccttcggtcgctgcgctccctacgccccgccgcttcgcgtcggcctatcgcggccgctggccgctcaaaaatggctggcctacggccaggcaatctaccagggcgcggacaagccgcgccgtcgccactcgaccgccggcgcccacatcaaggcaccctgcctcgcgcgtttcggtgatgacggtgaaaacctctgacacatgcagctcccggagacggtcacagcttgtctgtaagcggatgccgggagcagacaagcccgtcagggcgcgtcagcgggtgttggcgggtgtcggggcgcagccatgacccagtcacgtagcgatagcggagtgtatactggcttaactatgcggcatcagagcagattgtactgagagtgcaccatatgcggtgtgaaataccgcacagatgcgtaaggagaaaataccgcatcaggcgctcttccgcttcctcgctcactgactcgctgcgctcggtcgttcggctgcggcgagcggtatcagctcactcaaaggcggtaatacggttatccacagaatcaggggataacgcaggaaagaacatgtgagcaaaaggccagcaaaaggccaggaaccgtaaaaaggccgcgttgctggcgtttttccataggctccgcccccctgacgagcatcacaaaaatcgacgctcaagtcagaggtggcgaaacccgacaggactataaagataccaggcgtttccccctggaagctccctcgtgcgctctcctgttccgaccctgccgcttaccggatacctgtccgcctttctcccttcgggaagcgtggcgctttctcatagctcacgctgtaggtatctcagttcggtgtaggtcgttcgctccaagctgggctgtgtgcacgaaccccccgttcagcccgaccgctgcgccttatccggtaactatcgtcttgagtccaacccggtaagacacgacttatcgccactggcagcagccactggtaacaggattagcagagcgaggtatgtaggcggtgctacagagttcttgaagtggtggcctaactacggctacactagaaggacagtatttggtatctgcgctctgctgaagccagttaccttcggaaaaagagttggtagctcttgatccggcaaacaaaccaccgctggtagcggtggtttttttgtttgcaagcagcagattacgcgcagaaaaaaaggatctcaagaagatcctttgatcttttctacggggtctgacgctcagtggaacgaaaactcacgttaagggattttggtcatgcattctaggtactaaaacaattcatccagtaaaatataatattttattttctcccaatcaggcttgatccccagtaagtcaaaaaatagctcgacatactgttcttccccgatatcctccctgatcgaccggacgcagaaggcaatgtcataccacttgtccgccctgccgcttctcccaagatcaataaagccacttactttgccatctttcacaaagatgttgctgtctcccaggtcgccgtgggaaaagacaagttcctcttcgggcttttccgtctttaaaaaatcatacagctcgcgcggatctttaaatggagtgtcttcttcccagttttcgcaatccacatcggccagatcgttattcagtaagtaatccaattcggctaagcggctgtctaagctattcgtatagggacaatccgatatgtcgatggagtgaaagagcctgatgcactccgcatacagctcgataatcttttcagggctttgttcatcttcatactcttccgagcaaaggacgccatcggcctcactcatgagcagattgctccagccatcatgccgttcaaagtgcaggacctttggaacaggcagctttccttccagccatagcatcatgtccttttcccgttccacatcataggtggtccctttataccggctgtccgtcatttttaaatataggttttcattttctcccaccagcttatataccttagcaggagacattccttccgtatcttttacgcagcggtatttttcgatcagttttttcaattccggtgatattctcattttagccatttattatttccttcctcttttctacagtatttaaagataccccaagaagctaattataacaagacgaactccaattcactgttccttgcattctaaaaccttaaataccagaaaacagctttttcaaagttgttttcaaagttggcgtataacatagtatcgacggagccgattttgaaaccgcggtgatcacaggcagcaacgctctgtcatcgttacaatcaacatgctaccctccgcgagatcatccgtgtttcaaacccggcagcttagttgccgttcttccgaatagcatcggtaacatgagcaaagtctgccgccttacaacggctctcccgctgacgccgtcccggactgatgggctgcctgtatcgagtggtgattttgtgccgagctgccggtcggggagctgttggctggctggtggcaggatatattgtggtgtaaacaaattgacgcttagacaacttaataacacattgcggacgtttttaatgtactgaattaacgccgaatta

SEQ ID NO: 48 - protein, 62 aa, Artificial sequence; identical to SEQ ID NO: 43
  Synthetic Construct

SEQ ID NO: 49 - DNA, 8975 bp, Artificial sequence
  plasmid VC-MME445-1qcz
  transit_peptide (1964)..(2053)
  CDS (1964)..(2053)
  CDS (2054)..(2062): adapter
agcttggacaatcagtaaattgaacggagaatattattcataaaaatacgatagtaacgggtgatatattcattagaatgaaccgaaaccggcggtaaggatctgagctacacatgctcaggttttttacaacgtgcacaacagaattgaaagcaaatatcatgcgatcataggcgtctcgcatatctcattaaagcagggcatgccggtcgagtcaaatctcggtgacgggcaggaccggacggggcggtaccggcaggctgaagtccagctgccagaaacccacgtcatgccagttcccgtgcttgaagccggccgcccgcagcatgccgcggggggcatatccgagcgcctcgtgcatgcgcacgctcgggtcgttgggcagcccgatgacagcgaccacgctcttgaagccctgtgcctccagggacttcagcaggtgggtgtagagcgtggagcccagtcccgtccgctggtggcggggggagacgtacacggtcgactcggccgtccagtcgtaggcgttgcgtgccttccaggggcccgcgtaggcgatgccggcgacctcgccgtccacctcggcgacgagccagggatagcgctcccgcagacggacgaggtcgtccgtccactcctgcggttcctgcggctcggtacggaagttgaccgtgcttgtctcgatgtagtggttgacgatggtgcagaccgccggcatgtccgcctcggtggcacggcggatgtcggccgggcgtcgttctgggctcatggtagactcgacggatccacgtgtggaagatatgaatttttttgagaaactagataagattaatgaatatcggtgttttggttttttcttgtggccgtctttgtttatattgagatttttcaaatcagtgcgcaagacgtgacgtaagtatccgagtcagtttttatttttctactaatttggtcgaagctttgggcggatcctctagaattcgaatccaaaaattacggatatgaatataggcatatccgtatccgaattatccgtttgacagctagcaacgattgtacaattgcttctttaaaaaaggaagaaagaaagaaagaaaagaatcaacatcagcgttaacaaacggccccgttacggcccaaacggtcatatagagtaacggcgttaagcgttgaaagactcctatcgaaatacgtaaccgcaaacgtgtcatagtcagatcccctcttccttcaccgcctcaaacacaaaaataatcttctacagcctatatatacaacccccccttctatctctcctttctcacaattcatcatctttctttctctacccccaattttaagaaatcctctcttctcctcttcattttcaaggtaaatctctctctctctctctctctctgttattccttgttttaattaggtatgtattattgctagtttgttaatctgcttatcttatgtatgccttatgtgaatatctttatcttgttcatctcatccgtttagaagctataaatttgttgatttgactgtgtatctacacgtggttatgtttatatctaatcagatatgaatttcttcatattgttgcgtttgtgtgtaccaatccgaaatcgttgatttttttcatttaatcgtgtagctaattgtacgtatacatatggatctacgtatcaattgttcatctgtttgtgtttgtatgtatacagatctgaaaacatcacttctctcatctgattgtgttgttacatacatagatatagatctgttatatcattttttttattaattgtgtatatatatatgtgcatagatctggattacatgattgtgattatttacatgattttgttatttacgtatgtatatatgtagatctggactttttggagttgttgacttgattgtatttgtgtgtgtatatgtgtgttctgatcttgatatgttatgtatgtgcagcccaaacatgcagaggtttttctccgccagatcgattctcggttacgccgtcaagacgcggaggaggtctttctcttctcgttcttcgtctctcctttgctcttccatggcaatgattaattaacgaagagcaagagctcgaatttccccgatcgttcaaacatttggcaataaagtttcttaagattgaatcctgttgccggtcttgcgatgattatcatataatttctgttgaattacgttaagcatgtaataattaacatgtaatgcatgacgttatttatgagatgggtttttatgattagagtcccgcaattatacatttaatacgcgatagaaaacaaaatatagcgcgcaaactaggataaattatcgcgcgcggtgtcatctatgttactagatcgggaattggcatgcaagcttggcactggccgtcgttttacaacgtcgtgactgggaaaaccctggcgttacccaacttaatcgccttgcagcacatccccctttcgccagctggcgtaatagcgaagaggcccgcaccgatcgcccttcccaacagttgcgcagcctgaatggcgaatgctagagcagcttgagcttggatcagattgtcgtttcccgccttcagtttaaactatcagtgtttgacaggatatattggcgggtaaacctaagagaaaagagcgtttattagaataatcggatatttaaaagggcgtgaaaaggtttatccgttcgtccatttgtatgtgcatgccaaccacagggttcccctcgggatcaaagtactttgatccaacccctccgctgctatagtgcagtcggcttctgacgttcagtgcagccgtcttctgaaaacgacatgtcgcacaagtcctaagttacgcgacaggctgccgccctgcccttttcctggcgttttcttgtcgcgtgttttagtcgcataaagtagaatacttgcgactagaaccggagacattacgccatgaacaagagcgccgccgctggcctgctgggctatgcccgcgtcagcaccgacgaccaggacttgaccaaccaacgggccgaactgcacgcggccggctgcaccaagctgttttccgagaagatcaccggcaccaggcgcgaccgcccggagctggccaggatgcttgaccacctacgccctggcgacgttgtgacagtgaccaggctagaccgcctggcccgcagcacccgcgacctactggacattgccgagcgcatccaggaggccggcgcgggcctgcgtagcctggcagagccgtgggccgacaccaccacgccggccggccgcatggtgttgaccgtgttcgccggcattgccgagttcgagcgttccctaatcatcgaccgcacccggagcgggcgcgaggccgccaaggcccgaggcgtgaagtttggcccccgccctaccctcaccccggcacagatcgcgcacgcccgcgagctgatcgaccaggaaggccgcaccgtgaaagaggcggctgcactgcttggcgtgcatcgctcgaccctgtaccgcgcacttgagcgcagcgaggaagtgacgcccaccgaggccaggcggcgcggtgccttccgtgaggacgcattgaccgaggccgacgccctggcggccgccgagaatgaacgccaagaggaacaagcatgaaaccgcaccaggacggccaggacgaaccgtttttcattaccgaagagatcgaggcggagatgatcgcggccgggtacgtgttcgagccgcccgcgcacgtctcaaccgtgcggctgcatgaaatcctggccggtttgtctgatgccaagctggcggcctggccggccagcttggccgctgaagaaaccgagcgccgccgtctaaaaaggtgatgtgtatttgagtaaaacagcttgcgtcatgcggtcgctgcgtatatgatgcgatgagtaaataaacaaatacgcaaggggaacgcatgaaggttatcgctgtacttaaccagaaaggcgggtcaggcaagacgaccatcgcaacccatctagcccgcgccctgcaactcgccggggccgatgttctgttagtcgattccgatccccagggcagtgcccgcgattgggcggccgtgcgggaagatcaaccgctaaccgttgtcggcatcgaccgcccgacgattgaccgcgacgtgaaggccatcggccggcgcgacttcgtagtgatcgacggagcgccccaggcggcggacttggctgtgtccgcgatcaaggcagccgacttcgtgctgattccggtgcagccaagcccttacgacatatgggccaccgccgacctggtggagctggttaagcagcgcattgaggtcacggatggaaggctacaagcggcctttgtcgtgtcgcgggcgatcaaaggcacgcgcatcggcggtgaggttgccgaggcgctggccgggtacgagctgcccattcttgagtcccgtatcacgcagcgcgtgagctacccaggcactgccgccgccggcacaaccgttcttgaatcagaacccgagggcgacgctgcccgcgaggtccaggcgctggccgctgaaattaaatcaaaactcatttgagttaatgaggtaaagagaaaatgagcaaaagcacaaacacgctaagtgccggccgtccgagcgcacgcagcagcaaggctgcaacgttggccagcctggcagacacgccagccatgaagcgggtcaactttcagttgccggcggaggatcacaccaagctgaagatgtacgcggtacgccaaggcaagaccattaccgagctgctatctgaatacatcgcgcagctaccagagtaaatgagcaaatgaataaatgagtagatgaattttagcggctaaaggaggcggcatggaaaatcaagaacaaccaggcaccgacgccgtggaatgccccatgtgtggaggaacgggcggttggccaggcgtaagcggctgggttgcctgccggccctgcaatggcactggaacccccaagcccgaggaatcggcgtgagcggtcgcaaaccatccggcccggtacaaatcggcgcggcgctgggtgatgacctggtggagaagttgaaggccgcgcaggccgcccagcggcaacgcatcgaggcagaagcacgccccggtgaatcgtggcaagcggccgctgatcgaatccgcaaagaatcccggcaaccgccggcagccggtgcgccgtcgattaggaagccgcccaagggcgacgagcaaccagattttttcgttccgatgctctatgacgtgggcacccgcgatagtcgcagcatcatggacgtggccgttttccgtctgtcgaagcgtgaccgacgagctggcgaggtgatccgctacgagcttccagacgggcacgtagaggtttccgcagggccggccggcatggccagtgtgtgggattacgacctggtactgatggcggtttcccatctaaccgaatccatgaaccgataccgggaagggaagggagacaagcccggccgcgtgttccgtccacacgttgcggacgtactcaagttctgccggcgagccgatggcggaaagcagaaagacgacctggtagaaacctgcattcggttaaacaccacgcacgttgccatgcagcgtacgaagaaggccaagaacggccgcctggtgacggtatccgagggtgaagccttgattagccgctacaagatcgtaaagagcgaaaccgggcggccggagtacatcgagatcgagctagctgattggatgtaccgcgagatcacagaaggcaagaacccggacgtgctgacggttcaccccgattactttttgatcgatcccggcatcggccgttttctctaccgcctggcacgccgcgccgcaggcaaggcagaagccagatggttgttcaagacgatctacgaacgcagtggcagcgccggagagttcaagaagttctgtttcaccgtgcgcaagctgatcgggtcaaatgacctgccggagtacgatttgaaggaggaggcggggcaggctggcccgatcctagtcatgcgctaccgcaacctgatcgagggcgaagcatccgccggttcctaatgtacggagcagatgctagggcaaattgccctagcaggggaaaaaggtcgaaaaggtctctttcctgtggatagcacgtacattgggaacccaaagccgtacattgggaaccggaacccgtacattgggaacccaaagccgtacattgggaaccggtcacacatgtaagtgactgatataaaagagaaaaaaggcgatttttccgcctaaaactctttaaaacttattaaaactcttaaaacccgcctggcctgtgcataactgtctggccagcgcacagccgaagagctgcaaaaagcgcctacccttcggtcgctgcgctccctacgccccgccgcttcgcgtcggcctatcgcggccgctggccgctcaaaaatggctggcctacggccaggcaatctaccagggcgcggacaagccgcgccgtcgccactcgaccgccggcgcccacatcaaggcaccctgcctcgcgcgtttcggtgatgacggtgaaaacctctgacacatgcagctcccggagacggtcacagcttgtctgtaagcggatgccgggagcagacaagcccgtcagggcgcgtcagcgggtgttggcgggtgtcggggcgcagccatgacccagtcacgtagcgatagcggagtgtatactggcttaactatgcggcatcagagcagattgtactgagagtgcaccatatgcggtgtgaaataccgcacagatgcgtaaggagaaaataccgcatcaggcgctcttccgcttcctcgctcactgactcgctgcgctcggtcgttcggctgcggcgagcggtatcagctcactcaaaggcggtaatacggttatccacagaatcaggggataacgcaggaaagaacatgtgagcaaaaggccagcaaaaggccaggaaccgtaaaaaggccgcgttgctggcgtttttccataggctccgcccccctgacgagcatcacaaaaatcgacgctcaagtcagaggtggcgaaacccgacaggactataaagataccaggcgtttccccctggaagctccctcgtgcgctctcctgttccgaccctgccgcttaccggatacctgtccgcctttctcccttcgggaagcgtggcgctttctcatagctcacgctgtaggtatctcagttcggtgtaggtcgttcgctccaagctgggctgtgtgcacgaaccccccgttcagcccgaccgctgcgccttatccggtaactatcgtcttgagtccaacccggtaagacacgacttatcgccactggcagcagccactggtaacaggattagcagagcgaggtatgtaggcggtgctacagagttcttgaagtggtggcctaactacggctacactagaaggacagtatttggtatctgcgctctgctgaagccagttaccttcggaaaaagagttggtagctcttgatccggcaaacaaaccaccgctggtagcggtggtttttttgtttgcaagcagcagattacgcgcagaaaaaaaggatctcaagaagatcctttgatcttttctacggggtctgacgctcagtggaacgaaaactcacgttaagggattttggtcatgcattctaggtactaaaacaattcatccagtaaaatataatattttattttctcccaatcaggcttgatccccagtaagtcaaaaaatagctcgacatactgttcttccccgatatcctccctgatcgaccggacgcagaaggcaatgtcataccacttgtccgccctgccgcttctcccaagatcaataaagccacttactttgccatctttcacaaagatgttgctgtctcccaggtcgccgtgggaaaagacaagttcctcttcgggcttttccgtctttaaaaaatcatacagctcgcgcggatctttaaatggagtgtcttcttcccagttttcgcaatccacatcggccagatcgttattcagtaagtaatccaattcggctaagcggctgtctaagctattcgtatagggacaatccgatatgtcgatggagtgaaagagcctgatgcactccgcatacagctcgataatcttttcagggctttgttcatcttcatactcttccgagcaaaggacgccatcggcctcactcatgagcagattgctccagccatcatgccgttcaaagtgcaggacctttggaacaggcagctttccttccagccatagcatcatgtccttttcccgttccacatcataggtggtccctttataccggctgtccgtcatttttaaatataggttttcattttctcccaccagcttatataccttagcaggagacattccttccgtatcttttacgcagcggtatttttcgatcagttttttcaattccggtgatattctcattttagccatttattatttccttcctcttttctacagtatttaaagataccccaagaagctaattataacaagacgaactccaattcactgttccttgcattctaaaaccttaaataccagaaaacagctttttcaaagttgttttcaaagttggcgtataacatagtatcgacggagccgattttgaaaccgcggtgatcacaggcagcaacgctctgtcatcgttacaatcaacatgctaccctccgcgagatcatccgtgtttcaaacccggcagcttagttgccgttcttccgaatagcatcggtaacatgagcaaagtctgccgccttacaacggctctcccgctgacgccgtcccggactgatgggctgcctgtatcgagtggtgattttgtgccgagctgccggtcggggagctgttggctggctggtggcaggatatattgtggtgtaaacaaattgacgcttagacaacttaataacacattgcggacgtttttaatgtactgaattaacgccgaatta

SEQ ID NO: 50 - protein, 33 aa, Artificial sequence; identical to SEQ ID NO: 45
  Synthetic Construct

SEQ ID NO: 51 - DNA, 8588 bp, Artificial sequence
  plasmid VC-MME289-1qcz
gctttgggcggatcctctagaggacaatcagtaaattgaacggagaatattattcataaaaatacgatagtaacgggtgatatattcattagaatgaaccgaaaccggcggtaaggatctgagctacacatgctcaggttttttacaacgtgcacaacagaattgaaagcaaatatcatgcgatcataggcgtctcgcatatctcattaaagcagggcatgccggtcgagtcaaatctcggtgacgggcaggaccggacggggcggtaccggcaggctgaagtccagctgccagaaacccacgtcatgccagttcccgtgcttgaagccggccgcccgcagcatgccgcggggggcatatccgagcgcctcgtgcatgcgcacgctcgggtcgttgggcagcccgatgacagcgaccacgctcttgaagccctgtgcctccagggacttcagcaggtgggtgtagagcgtggagcccagtcccgtccgctggtggcggggggagacgtacacggtcgactcggccgtccagtcgtaggcgttgcgtgccttccaggggcccgcgtaggcgatgccggcgacctcgccgtccacctcggcgacgagccagggatagcgctcccgcagacggacgaggtcgtccgtccactcctgcggttcctgcggctcggtacggaagttgaccgtgcttgtctcgatgtagtggttgacgatggtgcagaccgccggcatgtccgcctcggtggcacggcggatgtcggccgggcgtcgttctgggctcatggtagactcgacggatccacgtgtggaagatatgaatttttttgagaaactagataagattaatgaatatcggtgttttggttttttcttgtggccgtctttgtttatattgagatttttcaaatcagtgcgcaagacgtgacgtaagtatccgagtcagtttttatttttctactaatttggtcgaatctagactgcagcaaatttacacattgccactaaacgtctaaacccttgtaatttgtttttgttttactatgtgtgttatgtatttgatttgcgataaatttttatatttggtactaaatttataacaccttttatgctaacgtttgccaacacttagcaatttgcaagttgattaattgattctaaattatttttgtcttctaaatacatatactaatcaactggaaatgtaaatatttgctaatatttctactataggagaattaaagtgagtgaatatggtaccacaaggtttggagatttaattgttgcaatgctgcatggatggcatatacaccaaacattcaataattcttgaggataataatggtaccacacaagatttgaggtgcatgaacgtcacgtggacaaaaggtttagtaatttttcaagacaacaatgttaccacacacaagttttgaggtgcatgcatggatgccctgtggaaagtttaaaaatattttggaaatgatttgcatggaagccatgtgtaaaaccatgacatccacttggaggatgcaataatgaagaaaactacaaatttacatgcaactagttatgcatgtagtctatataatgaggattttgcaatactttcattcatacacactcactaagttttacacgattataatttcttcatagccacccgggttgctcttccatggcaatgattaattaacgaagagcaagagctcgaatttccccgatcgttcaaacatttggcaataaagtttcttaagattgaatcctgttgccggtcttgcgatgattatcatataatttctgttgaattacgttaagcatgtaataattaacatgtaatgcatgacgttatttatgagatgggtttttatgattagagtcccgcaattatacatttaatacgcgatagaaaacaaaatatagcgcgcaaactaggataaattatcgcgcgcggtgtcatctatgttactagatcgggaattggcatgcaagcttggcactggccgtcgttttacaacgtcgtgactgggaaaaccctggcgttacccaacttaatcgccttgcagcacatccccctttcgccagctggcgtaatagcgaagaggcccgcaccgatcgcccttcccaacagttgcgcagcctgaatggcgaatgctagagcagcttgagcttggatcagattgtcgtttcccgccttcagtttaaactatcagtgtttgacaggatatattggcgggtaaacctaagagaaaagagcgtttattagaataatcggatatttaaaagggcgtgaaaaggtttatccgttcgtccatttgtatgtgcatgccaaccacagggttcccctcgggatcaaagtactttgatccaacccctccgctgctatagtgcagtcggcttctgacgttcagtgcagccgtcttctgaaaacgacatgtcgcacaagtcctaagttacgcgacaggctgccgccctgcccttttcctggcgttttcttgtcgcgtgttttagtcgcataaagtagaatacttgcgactagaaccggagacattacgccatgaacaagagcgccgccgctggcctgctgggctatgcccgcgtcagcaccgacgaccaggacttgaccaaccaacgggccgaactgcacgcggccggctgcaccaagctgttttccgagaagatcaccggcaccaggcgcgaccgcccggagctggccaggatgcttgaccacctacgccctggcgacgttgtgacagtgaccaggctagaccgcctggcccgcagcacccgcgacctactggacattgccgagcgcatccaggaggccggcgcgggcctgcgtagcctggcagagccgtgggccgacaccaccacgccggccggccgcatggtgttgaccgtgttcgccggcattgccgagttcgagcgttccctaatcatcgaccgcacccggagcgggcgcgaggccgccaaggcccgaggcgtgaagtttggcccccgccctaccctcaccccggcacagatcgcgcacgcccgcgagctgatcgaccaggaaggccgcaccgtgaaagaggcggctgcactgcttggcgtgcatcgctcgaccctgtaccgcgcacttgagcgcagcgaggaagtgacgcccaccgaggccaggcggcgcggtgccttccgtgaggacgcattgaccgaggccgacgccctggcggccgccgagaatgaacgccaagaggaacaagcatgaaaccgcaccaggacggccaggacgaaccgtttttcattaccgaagagatcgaggcggagatgatcgcggccgggtacgtgttcgagccgcccgcgcacgtctcaaccgtgcggctgcatgaaatcctggccggtttgtctgatgccaagctggcggcctggccggccagcttggccgctgaagaaaccgagcgccgccgtctaaaaaggtgatgtgtatttgagtaaaacagcttgcgtcatgcggtcgctgcgtatatgatgcgatgagtaaataaacaaatacgcaaggggaacgcatgaaggttatcgctgtacttaaccagaaaggcgggtcaggcaagacgaccatcgcaacccatctagcccgcgccctgcaactcgccggggccgatgttctgttagtcgattccgatccccagggcagtgcccgcgattgggcggccgtgcgggaagatcaaccgctaaccgttgtcggcatcgaccgcccgacgattgaccgcgacgtgaaggccatcggccggcgcgacttcgtagtgatcgacggagcgccccaggcggcggacttggctgtgtccgcgatcaaggcagccgacttcgtgctgattccggtgcagccaagcccttacgacatatgggccaccgccgacctggtggagctggttaagcagcgcattgaggtcacggatggaaggctacaagcggcctttgtcgtgtcgcgggcgatcaaaggcacgcgcatcggcggtgaggttgccgaggcgctggccgggtacgagctgcccattcttgagtcccgtatcacgcagcgcgtgagctacccaggcactgccgccgccggcacaaccgttcttgaatcagaacccgagggcgacgctgcccgcgaggtccaggcgctggccgctgaaattaaatcaaaactcatttgagttaatgaggtaaagagaaaatgagcaaaagcacaaacacgctaagtgccggccgtccgagcgcacgcagcagcaaggctgcaacgttggccagcctggcagacacgccagccatgaagcgggtcaactttcagttgccggcggaggatcacaccaagctgaagatgtacgcggtacgccaaggcaagaccattaccgagctgctatctgaatacatcgcgcagctaccagagtaaatgagcaaatgaataaatgagtagatgaattttagcggctaaaggaggcggcatggaaaatcaagaacaaccaggcaccgacgccgtggaatgccccatgtgtggaggaacgggcggttggccaggcgtaagcggctgggttgcctgccggccctgcaatggcactggaacccccaagcccgaggaatcggcgtgagcggtcgcaaaccatccggcccggtacaaatcggcgcggcgctgggtgatgacctggtggagaagttgaaggccgcgcaggccgcccagcggcaacgcatcgaggcagaagcacgccccggtgaatcgtggcaagcggccgctgatcgaatccgcaaagaatcccggcaaccgccggcagccggtgcgccgtcgattaggaagccgcccaagggcgacgagcaaccagattttttcgttccgatgctctatgacgtgggcacccgcgatagtcgcagcatcatggacgtggccgttttccgtctgtcgaagcgtgaccgacgagctggcgaggtgatccgctacgagcttccagacgggcacgtagaggtttccgcagggccggccggcatggccagtgtgtgggattacgacctggtactgatggcggtttcccatctaaccgaatccatgaaccgataccgggaagggaagggagacaagcccggccgcgtgttccgtccacacgttgcggacgtactcaagttctgccggcgagccgatggcggaaagcagaaagacgacctggtagaaacctgcattcggttaaacaccacgcacgttgccatgcagcgtacgaagaaggccaagaacggccgcctggtgacggtatccgagggtgaagccttgattagccgctacaagatcgtaaagagcgaaaccgggcggccggagtacatcgagatcgagctagctgattggatgtaccgcgagatcacagaaggcaagaacccggacgtgctgacggttcaccccgattactttttgatcgatcccggcatcggccgttttctctaccgcctggcacgccgcgccgcaggcaaggcagaagccagatggttgttcaagacgatctacgaacgcagtggcagcgccggagagttcaagaagttctgtttcaccgtgcgcaagctgatcgggtcaaatgacctgccggagtacgatttgaaggaggaggcggggcaggctggcccgatcctagtcatgcgctaccgcaacctgatcgagggcgaagcatccgccggttcctaatgtacggagcagatgctagggcaaattgccctagcaggggaaaaaggtcgaaaaggtctctttcctgtggatagcacgtacattgggaacccaaagccgtacattgggaaccggaacccgtacattgggaacccaaagccgtacattgggaaccggtcacacatgtaagtgactgatataaaagagaaaaaaggcgatttttccgcctaaaactctttaaaacttattaaaactcttaaaacccgcctggcctgtgcataactgtctggccagcgcacagccgaagagctgcaaaaagcgcctacccttcggtcgctgcgctccctacgccccgccgcttcgcgtcggcctatcgcggccgctggccgctcaaaaatggctggcctacggccaggcaatctaccagggcgcggacaagccgcgccgtcgccactcgaccgccggcgcccacatcaaggcaccctgcctcgcgcgtttcggtgatgacggtgaaaacctctgacacatgcagctcccggagacggtcacagcttgtctgtaagcggatgccgggagcagacaagcccgtcagggcgcgtcagcgggtgttggcgggtgtcggggcgcagccatgacccagtcacgtagcgatagcggagtgtatactggcttaactatgcggcatcagagcagattgtactgagagtgcaccatatgcggtgtgaaataccgcacagatgcgtaaggagaaaataccgcatcaggcgctcttccgcttcctcgctcactgactcgctgcgctcggtcgttcggctgcggcgagcggtatcagctcactcaaaggcggtaatacggttatccacagaatcaggggataacgcaggaaagaacatgtgagcaaaaggccagcaaaaggccaggaaccgtaaaaaggccgcgttgctggcgtttttccataggctccgcccccctgacgagcatcacaaaaatcgacgctcaagtcagaggtggcgaaacccgacaggactataaagataccaggcgtttccccctggaagctccctcgtgcgctctcctgttccgaccctgccgcttaccggatacctgtccgcctttctcccttcgggaagcgtggcgctttctcatagctcacgctgtaggtatctcagttcggtgtaggtcgttcgctccaagctgggctgtgtgcacgaaccccccgttcagcccgaccgctgcgccttatccggtaactatcgtcttgagtccaacccggtaagacacgacttatcgccactggcagcagccactggtaacaggattagcagagcgaggtatgtaggcggtgctacagagttcttgaagtggtggcctaactacggctacactagaaggacagtatttggtatctgcgctctgctgaagccagttaccttcggaaaaagagttggtagctcttgatccggcaaacaaaccaccgctggtagcggtggtttttttgtttgcaagcagcagattacgcgcagaaaaaaaggatctcaagaagatcctttgatcttttctacggggtctgacgctcagtggaacgaaaactcacgttaagggattttggtcatgcattctaggtactaaaacaattcatccagtaaaatataatattttattttctcccaatcaggcttgatccccagtaagtcaaaaaatagctcgacatactgttcttccccgatatcctccctgatcgaccggacgcagaaggcaatgtcataccacttgtccgccctgccgcttctcccaagatcaataaagccacttactttgccatctttcacaaagatgttgctgtctcccaggtcgccgtgggaaaagacaagttcctcttcgggcttttccgtctttaaaaaatcatacagctcgcgcggatctttaaatggagtgtcttcttcccagttttcgcaatccacatcggccagatcgttattcagtaagtaatccaattcggctaagcggctgtctaagctattcgtatagggacaatccgatatgtcgatggagtgaaagagcctgatgcactccgcatacagctcgataatcttttcagggctttgttcatcttcatactcttccgagcaaaggacgccatcggcctcactcatgagcagattgctccagccatcatgccgttcaaagtgcaggacctttggaacaggcagctttccttccagccatagcatcatgtccttttcccgttccacatcataggtggtccctttataccggctgtccgtcatttttaaatataggttttcattttctcccaccagcttatataccttagcaggagacattccttccgtatcttttacgcagcggtatttttcgatcagttttttcaattccggtgatattctcattttagccatttattatttccttcctcttttctacagtatttaaagataccccaagaagctaattataacaagacgaactccaattcactgttccttgcattctaaaaccttaaataccagaaaacagctttttcaaagttgttttcaaagttggcgtataacatagtatcgacggagccgattttgaaaccgcggtgatcacaggcagcaacgctctgtcatcgttacaatcaacatgctaccctccgcgagatcatccgtgtttcaaacccggcagcttagttgccgttcttccgaatagcatcggtaacatgagcaaagtctgccgccttacaacggctctcccgctgacgccgtcccggactgatgggctgcctgtatcgagtggtgattttgtgccgagctgccggtcggggagctgttggctggctggtggcaggatatattgtggtgtaaacaaattgacgcttagacaacttaataacacattgcggacgtttttaatgtactgaattaacgccgaattaa

SEQ ID NO: 52 - DNA, 9007 bp, Artificial sequence
  plasmid VC-MME464-1qcz
  5'UTR (1666)..(1830)
  transit_peptide (1831)..(1938)
  CDS (1831)..(1938)
  transit_peptide (2016)..(2084)
  CDS (2016)..(2084)
  CDS (2085)..(2093): adapter
gctttgggcggatcctctagaggacaatcagtaaattgaacggagaatattattcataaaaatacgatagtaacgggtgatatattcattagaatgaaccgaaaccggcggtaaggatctgagctacacatgctcaggttttttacaacgtgcacaacagaattgaaagcaaatatcatgcgatcataggcgtctcgcatatctcattaaagcagggcatgccggtcgagtcaaatctcggtgacgggcaggaccggacggggcggtaccggcaggctgaagtccagctgccagaaacccacgtcatgccagttcccgtgcttgaagccggccgcccgcagcatgccgcggggggcatatccgagcgcctcgtgcatgcgcacgctcgggtcgttgggcagcccgatgacagcgaccacgctcttgaagccctgtgcctccagggacttcagcaggtgggtgtagagcgtggagcccagtcccgtccgctggtggcggggggagacgtacacggtcgactcggccgtccagtcgtaggcgttgcgtgccttccaggggcccgcgtaggcgatgccggcgacctcgccgtccacctcggcgacgagccagggatagcgctcccgcagacggacgaggtcgtccgtccactcctgcggttcctgcggctcggtacggaagttgaccgtgcttgtctcgatgtagtggttgacgatggtgcagaccgccggcatgtccgcctcggtggcacggcggatgtcggccgggcgtcgttctgggctcatggtagactcgacggatccacgtgtggaagatatgaatttttttgagaaactagataagattaatgaatatcggtgttttggttttttcttgtggccgtctttgtttatattgagatttttcaaatcagtgcgcaagacgtgacgtaagtatccgagtcagtttttatttttctactaatttggtcgaatctagactgcagcaaatttacacattgccactaaacgtctaaacccttgtaatttgtttttgttttactatgtgtgttatgtatttgatttgcgataaatttttatatttggtactaaatttataacaccttttatgctaacgtttgccaacacttagcaatttgcaagttgattaattgattctaaattatttttgtcttctaaatacatatactaatcaactggaaatgtaaatatttgctaatatttctactataggagaattaaagtgagtgaatatggtaccacaaggtttggagatttaattgttgcaatgctgcatggatggcatatacaccaaacattcaataattcttgaggataataatggtaccacacaagatttgaggtgcatgaacgtcacgtggacaaaaggtttagtaatttttcaagacaacaatgttaccacacacaagttttgaggtgcatgcatggatgccctgtggaaagtttaaaaatattttggaaatgatttgcatggaagccatgtgtaaaaccatgacatccacttggaggatgcaataatgaagaaaactacaaatttacatgcaactagttatgcatgtagtctatataatgaggattttgcaatactttcattcatacacactcactaagttttacacgattataatttcttcatagccacccaaacgcataaacttatcttcatagttgccactccaatttgctccttgaatctcctccacccaatacataatccactcctccatcacccacttcactactaaatcaaacttaactctgtttttctctctcctcctttcatttcttattcttccaatcatcgtactccgccatgaccaccgctgtcaccgccgctgtttctttcccctctaccaaaaccacctctctctccgcccgaagctcctccgtcatttcccctgacaaaatcagctacaaaaaggtgattcccaatttcactgtgttttttattaataatttgttattttgatgatgagatgattaatttgggtgctgcaggttcctttgtactacaggaatgtatctgcaactgggaaaatgggacccatcagggcccagatcgcctcttgctcttccatggcaatgattaattaacgaagagcaagagctcgaatttccccgatcgttcaaacatttggcaataaagtttcttaagattgaatcctgttgccggtcttgcgatgattatcatataatttctgttgaattacgttaagcatgtaataattaacatgtaatgcatgacgttatttatgagatgggtttttatgattagagtcccgcaattatacatttaatacgcgatagaaaacaaaatatagcgcgcaaactaggataaattatcgcgcgcggtgtcatctatgttactagatcgggaattggcatgcaagcttggcactggccgtcgttttacaacgtcgtgactgggaaaaccctggcgttacccaacttaatcgccttgcagcacatccccctttcgccagctggcgtaatagcgaagaggcccgcaccgatcgcccttcccaacagttgcgcagcctgaatggcgaatgctagagcagcttgagcttggatcagattgtcgtttcccgccttcagtttaaactatcagtgtttgacaggatatattggcgggtaaacctaagagaaaagagcgtttattagaataatcggatatttaaaagggcgtgaaaaggtttatccgttcgtccatttgtatgtgcatgccaaccacagggttcccctcgggatcaaagtactttgatccaacccctccgctgctatagtgcagtcggcttctgacgttcagtgcagccgtcttctgaaaacgacatgtcgcacaagtcctaagttacgcgacaggctgccgccctgcccttttcctggcgttttcttgtcgcgtgttttagtcgcataaagtagaatacttgcgactagaaccggagacattacgccatgaacaagagcgccgccgctggcctgctgggctatgcccgcgtcagcaccgacgaccaggacttgaccaaccaacgggccgaactgcacgcggccggctgcaccaagctgttttccgagaagatcaccggcaccaggcgcgaccgcccggagctggccaggatgcttgaccacctacgccctggcgacgttgtgacagtgaccaggctagaccgcctggcccgcagcacccgcgacctactggacattgccgagcgcatccaggaggccggcgcgggcctgcgtagcctggcagagccgtgggccgacaccaccacgccggccggccgcatggtgttgaccgtgttcgccggcattgccgagttcgagcgttccctaatcatcgaccgcacccggagcgggcgcgaggccgccaaggcccgaggcgtgaagtttggcccccgccctaccctcaccccggcacagatcgcgcacgcccgcgagctgatcgaccaggaaggccgcaccgtgaaagaggcggctgcactgcttggcgtgcatcgctcgaccctgtaccgcgcacttgagcgcagcgaggaagtgacgcccaccgaggccaggcggcgcggtgccttccgtgaggacgcattgaccgaggccgacgccctggcggccgccgagaatgaacgccaagaggaacaagcatgaaaccgcaccaggacggccaggacgaaccgtttttcattaccgaagagatcgaggcggagatgatcgcggccgggtacgtgttcgagccgcccgcgcacgtctcaaccgtgcggctgcatgaaatcctggccggtttgtctgatgccaagctggcggcctggccggccagcttggccgctgaagaaaccgagcgccgccgtctaaaaaggtgatgtgtatttgagtaaaacagcttgcgtcatgcggtcgctgcgtatatgatgcgatgagtaaataaacaaatacgcaaggggaacgcatgaaggttatcgctgtacttaaccagaaaggcgggtcaggcaagacgaccatcgcaacccatctagcccgcgccctgcaactcgccggggccgatgttctgttagtcgattccgatccccagggcagtgcccgcgattgggcggccgtgcgggaagatcaaccgctaaccgttgtcggcatcgaccgcccgacgattgaccgcgacgtgaaggccatcggccggcgcgacttcgtagtgatcgacggagcgccccaggcggcggacttggctgtgtccgcgatcaaggcagccgacttcgtgctgattccggtgcagccaagcccttacgacatatgggccaccgccgacctggtggagctggttaagcagcgcattgaggtcacggatggaaggctacaagcggcctttgtcgtgtcgcgggcgatcaaaggcacgcgcatcggcggtgaggttgccgaggcgctggccgggtacgagctgcccattcttgagtcccgtatcacgcagcgcgtgagctacccaggcactgccgccgccggcacaaccgttcttgaatcagaacccgagggcgacgctgcccgcgaggtccaggcgctggccgctgaaattaaatcaaaactcatttgagttaatgaggtaaagagaaaatgagcaaaagcacaaacacgctaagtgccggccgtccgagcgcacgcagcagcaaggctgcaacgttggccagcctggcagacacgccagccatgaagcgggtcaactttcagttgccggcggaggatcacaccaagctgaagatgtacgcggtacgccaaggcaagaccattaccgagctgctatctgaatacatcgcgcagctaccagagtaaatgagcaaatgaataaatgagtagatgaattttagcggctaaaggaggcggcatggaaaatcaagaacaaccaggcaccgacgccgtggaatgccccatgtgtggaggaacgggcggttggccaggcgtaagcggctgggttgcctgccggccctgcaatggcactggaacccccaagcccgaggaatcggcgtgagcggtcgcaaaccatccggcccggtacaaatcggcgcggcgctgggtgatgacctggtggagaagttgaaggccgcgcaggccgcccagcggcaacgcatcgaggcagaagcacgccccggtgaatcgtggcaagcggccgctgatcgaatccgcaaagaatcccggcaaccgccggcagccggtgcgccgtcgattaggaagccgcccaagggcgacgagcaaccagattttttcgttccgatgctctatgacgtgggcacccgcgatagtcgcagcatcatggacgtggccgttttccgtctgtcgaagcgtgaccgacgagctggcgaggtgatccgctacgagcttccagacgggcacgtagaggtttccgcagggccggccggcatggccagtgtgtgggattacgacctggtactgatggcggtttcccatctaaccgaatccatgaaccgataccgggaagggaagggagacaagcccggccgcgtgttccgtccacacgttgcggacgtactcaagttctgccggcgagccgatggcggaaagcagaaagacgacctggtagaaacctgcattcggttaaacaccacgcacgttgccatgcagcgtacgaagaaggccaagaacggccgcctggtgacggtatccgagggtgaagccttgattagccgctacaagatcgtaaagagcgaaaccgggcggccggagtacatcgagatcgagctagctgattggatgtaccgcgagatcacagaaggcaagaacccggacgtgctgacggttcaccccgattactttttgatcgatcccggcatcggccgttttctctaccgcctggcacgccgcgccgcaggcaaggcagaagccagatggttgttcaagacgatctacgaacgcagtggcagcgccggagagttcaagaagttctgtttcaccgtgcgcaagctgatcgggtcaaatgacctgccggagtacgatttgaaggaggaggcggggcaggctggcccgatcctagtcatgcgctaccgcaacctgatcgagggcgaagcatccgccggttcctaatgtacggagcagatgctagggcaaattgccctagcaggggaaaaaggtcgaaaaggtctctttcctgtggatagcacgtacattgggaacccaaagccgtacattgggaaccggaacccgtacattgggaacccaaagccgtacattgggaaccggtcacacatgtaagtgactgatataaaagagaaaaaaggcgatttttccgcctaaaactctttaaaacttattaaaactcttaaaacccgcctggcctgtgcataactgtctggccagcgcacagccgaagagctgcaaaaagcgcctacccttcggtcgctgcgctccctacgccccgccgcttcgcgtcggcctatcgcggccgctggccgctcaaaaatggctggcctacggccaggcaatctaccagggcgcggacaagccgcgccgtcgccactcgaccgccggcgcccacatcaaggcaccctgcctcgcgcgtttcggtgatgacggtgaaaacctctgacacatgcagctcccggagacggtcacagcttgtctgtaagcggatgccgggagcagacaagcccgtcagggcgcgtcagcgggtgttggcgggtgtcggggcgcagccatgacccagtcacgtagcgatagcggagtgtatactggcttaactatgcggcatcagagcagattgtactgagagtgcaccatatgcggtgtgaaataccgcacagatgcgtaaggagaaaataccgcatcaggcgctcttccgcttcctcgctcactgactcgctgcgctcggtcgttcggctgcggcgagcggtatcagctcactcaaaggcggtaatacggttatccacagaatcaggggataacgcaggaaagaacatgtgagcaaaaggccagcaaaaggccaggaaccgtaaaaaggccgcgttgctggcgtttttccataggctccgcccccctgacgagcatcacaaaaatcgacgctcaagtcagaggtggcgaaacccgacaggactataaagataccaggcgtttccccctggaagctccctcgtgcgctctcctgttccgaccctgccgcttaccggatacctgtccgcctttctcccttcgggaagcgtggcgctttctcatagctcacgctgtaggtatctcagttcggtgtaggtcgttcgctccaagctgggctgtgtgcacgaaccccccgttcagcccgaccgctgcgccttatccggtaactatcgtcttgagtccaacccggtaagacacgacttatcgccactggcagcagccactggtaacaggattagcagagcgaggtatgtaggcggtgctacagagttcttgaagtggtggcctaactacggctacactagaaggacagtatttggtatctgcgctctgctgaagccagttaccttcggaaaaagagttggtagctcttgatccggcaaacaaaccaccgctggtagcggtggtttttttgtttgcaagcagcagattacgcgcagaaaaaaaggatctcaagaagatcctttgatcttttctacggggtctgacgctcagtggaacgaaaactcacgttaagggattttggtcatgcattctaggtactaaaacaattcatccagtaaaatataatattttattttctcccaatcaggcttgatccccagtaagtcaaaaaatagctcgacatactgttcttccccgatatcctccctgatcgaccggacgcagaaggcaatgtcataccacttgtccgccctgccgcttctcccaagatcaataaagccacttactttgccatctttcacaaagatgttgctgtctcccaggtcgccgtgggaaaagacaagttcctcttcgggcttttccgtctttaaaaaatcatacagctcgcgcggatctttaaatggagtgtcttcttcccagttttcgcaatccacatcggccagatcgttattcagtaagtaatccaattcggctaagcggctgtctaagctattcgtatagggacaatccgatatgtcgatggagtgaaagagcctgatgcactccgcatacagctcgataatcttttcagggctttgttcatcttcatactcttccgagcaaaggacgccatcggcctcactcatgagcagattgctccagccatcatgccgttcaaagtgcaggacctttggaacaggcagctttccttccagccatagcatcatgtccttttcccgttccacatcataggtggtccctttataccggctgtccgtcatttttaaatataggttttcattttctcccaccagcttatataccttagcaggagacattccttccgtatcttttacgcagcggtatttttcgatcagttttttcaattccggtgatattctcattttagccatttattatttccttcctcttttctacagtatttaaagataccccaagaagctaattataacaagacgaactccaattcactgttccttgcattctaaaaccttaaataccagaaaacagctttttcaaagttgttttcaaagttggcgtataacatagtatcgacggagccgattttgaaaccgcggtgatcacaggcagcaacgctctgtcatcgttacaatcaacatgctaccctccgcgagatcatccgtgtttcaaacccggcagcttagttgccgttcttccgaatagcatcggtaacatgagcaaagtctgccgccttacaacggctctcccgctgacgccgtcccggactgatgggctgcctgtatcgagtggtgattttgtgccgagctgccggtcggggagctgttggctggctggtggcaggatatattgtggtgtaaacaaattgacgcttagacaacttaataacacattgcggacgtttttaatgtactgaattaacgccgaattaa

SEQ ID NO: 53 - protein, 62 aa, Artificial sequence; identical to SEQ ID NO: 43
  Synthetic Construct

SEQ ID NO: 54 - DNA, 8678 bp, Artificial sequence
  plasmid VC-MME465-1qcz
  transit_peptide (1666)..(1755)
  CDS (1666)..(1755)
  CDS (1756)..(1764): adapter
gctttgggcggatcctctagaggacaatcagtaaattgaacggagaatattattcataaaaatacgatagtaacgggtgatatattcattagaatgaaccgaaaccggcggtaaggatctgagctacacatgctcaggttttttacaacgtgcacaacagaattgaaagcaaatatcatgcgatcataggcgtctcgcatatctcattaaagcagggcatgccggtcgagtcaaatctcggtgacgggcaggaccggacggggcggtaccggcaggctgaagtccagctgccagaaacccacgtcatgccagttcccgtgcttgaagccggccgcccgcagcatgccgcggggggcatatccgagcgcctcgtgcatgcgcacgctcgggtcgttgggcagcccgatgacagcgaccacgctcttgaagccctgtgcctccagggacttcagcaggtgggtgtagagcgtggagcccagtcccgtccgctggtggcggggggagacgtacacggtcgactcggccgtccagtcgtaggcgttgcgtgccttccaggggcccgcgtaggcgatgccggcgacctcgccgtccacctcggcgacgagccagggatagcgctcccgcagacggacgaggtcgtccgtccactcctgcggttcctgcggctcggtacggaagttgaccgtgcttgtctcgatgtagtggttgacgatggtgcagaccgccggcatgtccgcctcggtggcacggcggatgtcggccgggcgtcgttctgggctcatggtagactcgacggatccacgtgtggaagatatgaatttttttgagaaactagataagattaatgaatatcggtgttttggttttttcttgtggccgtctttgtttatattgagatttttcaaatcagtgcgcaagacgtgacgtaagtatccgagtcagtttttatttttctactaatttggtcgaatctagactgcagcaaatttacacattgccactaaacgtctaaacccttgtaatttgtttttgttttactatgtgtgttatgtatttgatttgcgataaatttttatatttggtactaaatttataacaccttttatgctaacgtttgccaacacttagcaatttgcaagttgattaattgattctaaattatttttgtcttctaaatacatatactaatcaactggaaatgtaaatatttgctaatatttctactataggagaattaaagtgagtgaatatggtaccacaaggtttggagatttaattgttgcaatgctgcatggatggcatatacaccaaacattcaataattcttgaggataataatggtaccacacaagatttgaggtgcatgaacgtcacgtggacaaaaggtttagtaatttttcaagacaacaatgttaccacacacaagttttgaggtgcatgcatggatgccctgtggaaagtttaaaaatattttggaaatgatttgcatggaagccatgtgtaaaaccatgacatccacttggaggatgcaataatgaagaaaactacaaatttacatgcaactagttatgcatgtagtctatataatgaggattttgcaatactttcattcatacacactcactaagttttacacgattataatttcttcatagccacccaaacatgcagaggtttttctccgccagatcgattctcggttacgccgtcaagacgcggaggaggtctttctcttctcgttcttcgtctctcctttgctcttccatggcaatgattaattaacgaagagcaagagctcgaatttccccgatcgttcaaacatttggcaataaagtttcttaagattgaatcctgttgccggtcttgcgatgattatcatataatttctgttgaattacgttaagcatgtaataattaacatgtaatgcatgacgttatttatgagatgggtttttatgattagagtcccgcaattatacatttaatacgcgatagaaaacaaaatatagcgcgcaaactaggataaattatcgcgcgcggtgtcatctatgttactagatcgggaattggcatgcaagcttggcactggccgtcgttttacaacgtcgtgactgggaaaaccctggcgttacccaacttaatcgccttgcagcacatccccctttcgccagctggcgtaatagcgaagaggcccgcaccgatcgcccttcccaacagttgcgcagcctgaatggcgaatgctagagcagcttgagcttggatcagattgtcgtttcccgccttcagtttaaactatcagtgtttgacaggatatattggcgggtaaacctaagagaaaagagcgtttattagaataatcggatatttaaaagggcgtgaaaaggtttatccgttcgtccatttgtatgtgcatgccaaccacagggttcccctcgggatcaaagtactttgatccaacccctccgctgctatagtgcagtcggcttctgacgttcagtgcagccgtcttctgaaaacgacatgtcgcacaagtcctaagttacgcgacaggctgccgccctgcccttttcctggcgttttcttgtcgcgtgttttagtcgcataaagtagaatacttgcgactagaaccggagacattacgccatgaacaagagcgccgccgctggcctgctgggctatgcccgcgtcagcaccgacgaccaggacttgaccaaccaacgggccgaactgcacgcggccggctgcaccaagctgttttccgagaagatcaccggcaccaggcgcgaccgcccggagctggccaggatgcttgaccacctacgccctggcgacgttgtgacagtgaccaggctagaccgcctggcccgcagcacccgcgacctactggacattgccgagcgcatccaggaggccggcgcgggcctgcgtagcctggcagagccgtgggccgacaccaccacgccggccggccgcatggtgttgaccgtgttcgccggcattgccgagttcgagcgttccctaatcatcgaccgcacccggagcgggcgcgaggccgccaaggcccgaggcgtgaagtttggcccccgccctaccctcaccccggcacagatcgcgcacgcccgcgagctgatcgaccaggaaggccgcaccgtgaaagaggcggctgcactgcttggcgtgcatcgctcgaccctgtaccgcgcacttgagcgcagcgaggaagtgacgcccaccgaggccaggcggcgcggtgccttccgtgaggacgcattgaccgaggccgacgccctggcggccgccgagaatgaacgccaagaggaacaagcatgaaaccgcaccaggacggccaggacgaaccgtttttcattaccgaagagatcgaggcggagatgatcgcggccgggtacgtgttcgagccgcccgcgcacgtctcaaccgtgcggctgcatgaaatcctggccggtttgtctgatgccaagctggcggcctggccggccagcttggccgctgaagaaaccgagcgccgccgtctaaaaaggtgatgtgtatttgagtaaaacagcttgcgtcatgcggtcgctgcgtatatgatgcgatgagtaaataaacaaatacgcaaggggaacgcatgaaggttatcgctgtacttaaccagaaaggcgggtcaggcaagacgaccatcgcaacccatctagcccgcgccctgcaactcgccggggccgatgttctgttagtcgattccgatccccagggcagtgcccgcgattgggcggccgtgcgggaagatcaaccgctaaccgttgtcggcatcgaccgcccgacgattgaccgcgacgtgaaggccatcggccggcgcgacttcgtagtgatcgacggagcgccccaggcggcggacttggctgtgtccgcgatcaaggcagccgacttcgtgctgattccggtgcagccaagcccttacgacatatgggccaccgccgacctggtggagctggttaagcagcgcattgaggtcacggatggaaggctacaagcggcctttgtcgtgtcgcgggcgatcaaaggcacgcgcatcggcggtgaggttgccgaggcgctggccgggtacgagctgcccattcttgagtcccgtatcacgcagcgcgtgagctacccaggcactgccgccgccggcacaaccgttcttgaatcagaacccgagggcgacgctgcccgcgaggtccaggcgctggccgctgaaattaaatcaaaactcatttgagttaatgaggtaaagagaaaatgagcaaaagcacaaacacgctaagtgccggccgtccgagcgcacgcagcagcaaggctgcaacgttggccagcctggcagacacgccagccatgaagcgggtcaactttcagttgccggcggaggatcacaccaagctgaagatgtacgcggtacgccaaggcaagaccattaccgagctgctatctgaatacatcgcgcagctaccagagtaaatgagcaaatgaataaatgagtagatgaattttagcggctaaaggaggcggcatggaaaatcaagaacaaccaggcaccgacgccgtggaatgccccatgtgtggaggaacgggcggttggccaggcgtaagcggctgggttgcctgccggccctgcaatggcactggaacccccaagcccgaggaatcggcgtgagcggtcgcaaaccatccggcccggtacaaatcggcgcggcgctgggtgatgacctggtggagaagttgaaggccgcgcaggccgcccagcggcaacgcatcgaggcagaagcacgccccggtgaatcgtggcaagcggccgctgatcgaatccgcaaagaatcccggcaaccgccggcagccggtgcgccgtcgattaggaagccgcccaagggcgacgagcaaccagattttttcgttccgatgctctatgacgtgggcacccgcgatagtcgcagcatcatggacgtggccgttttccgtctgtcgaagcgtgaccgacgagctggcgaggtgatccgctacgagcttccagacgggcacgtagaggtttccgcagggccggccggcatggccagtgtgtgggattacgacctggtactgatggcggtttcccatctaaccgaatccatgaaccgataccgggaagggaagggagacaagcccggccgcgtgttccgtccacacgttgcggacgtactcaagttctgccggcgagccgatggcggaaagcagaaagacgacctggtagaaacctgcattcggttaaacaccacgcacgttgccatgcagcgtacgaagaaggccaagaacggccgcctggtgacggtatccgagggtgaagccttgattagccgctacaagatcgtaaagagcgaaaccgggcggccggagtacatcgagatcgagctagctgattggatgtaccgcgagatcacagaaggcaagaacccggacgtgctgacggttcaccccgattactttttgatcgatcccggcatcggccgttttctctaccgcctggcacgccgcgccgcaggcaaggcagaagccagatggttgttcaagacgatctacgaacgcagtggcagcgccggagagttcaagaagttctgtttcaccgtgcgcaagctgatcgggtcaaatgacctgccggagtacgatttgaaggaggaggcggggcaggctggcccgatcctagtcatgcgctaccgcaacctgatcgagggcgaagcatccgccggttcctaatgtacggagcagatgctagggcaaattgccctagcaggggaaaaaggtcgaaaaggtctctttcctgtggatagcacgtacattgggaacccaaagccgtacattgggaaccggaacccgtacattgggaacccaaagccgtacattgggaaccggtcacacatgtaagtgactgatataaaagagaaaaaaggcgatttttccgcctaaaactctttaaaacttattaaaactcttaaaacccgcctggcctgtgcataactgtctggccagcgcacagccgaagagctgcaaaaagcgcctacccttcggtcgctgcgctccctacgccccgccgcttcgcgtcggcctatcgcggccgctggccgctcaaaaatggctggcctacggccaggcaatctaccagggcgcggacaagccgcgccgtcgccactcgaccgccggcgcccacatcaaggcaccctgcctcgcgcgtttcggtgatgacggtgaaaacctctgacacatgcagctcccggagacggtcacagcttgtctgtaagcggatgccgggagcagacaagcccgtcagggcgcgtcagcgggtgttggcgggtgtcggggcgcagccatgacccagtcacgtagcgatagcggagtgtatactggcttaactatgcggcatcagagcagattgtactgagagtgcaccatatgcggtgtgaaataccgcacagatgcgtaaggagaaaataccgcatcaggcgctcttccgcttcctcgctcactgactcgctgcgctcggtcgttcggctgcggcgagcggtatcagctcactcaaaggcggtaatacggttatccacagaatcaggggataacgcaggaaagaacatgtgagcaaaaggccagcaaaaggccaggaaccgtaaaaaggccgcgttgctggcgtttttccataggctccgcccccctgacgagcatcacaaaaatcgacgctcaagtcagaggtggcgaaacccgacaggactataaagataccaggcgtttccccctggaagctccctcgtgcgctctcctgttccgaccctgccgcttaccggatacctgtccgcctttctcccttcgggaagcgtggcgctttctcatagctcacgctgtaggtatctcagttcggtgtaggtcgttcgctccaagctgggctgtgtgcacgaaccccccgttcagcccgaccgctgcgccttatccggtaactatcgtcttgagtccaacccggtaagacacgacttatcgccactggcagcagccactggtaacaggattagcagagcgaggtatgtaggcggtgctacagagttcttgaagtggtggcctaactacggctacactagaaggacagtatttggtatctgcgctctgctgaagccagttaccttcggaaaaagagttggtagctcttgatccggcaaacaaaccaccgctggtagcggtggtttttttgtttgcaagcagcagattacgcgcagaaaaaaaggatctcaagaagatcctttgatcttttctacggggtctgacgctcagtggaacgaaaactcacgttaagggattttggtcatgcattctaggtactaaaacaattcatccagtaaaatataatattttattttctcccaatcaggcttgatccccagtaagtcaaaaaatagctcgacatactgttcttccccgatatcctccctgatcgaccggacgcagaaggcaatgtcataccacttgtccgccctgccgcttctcccaagatcaataaagccacttactttgccatctttcacaaagatgttgctgtctcccaggtcgccgtgggaaaagacaagttcctcttcgggcttttccgtctttaaaaaatcatacagctcgcgcggatctttaaatggagtgtcttcttcccagttttcgcaatccacatcggccagatcgttattcagtaagtaatccaattcggctaagcggctgtctaagctattcgtatagggacaatccgatatgtcgatggagtgaaagagcctgatgcactccgcatacagctcgataatcttttcagggctttgttcatcttcatactcttccgagcaaaggacgccatcggcctcactcatgagcagattgctccagccatcatgccgttcaaagtgcaggacctttggaacaggcagctttccttccagccatagcatcatgtccttttcccgttccacatcataggtggtccctttataccggctgtccgtcatttttaaatataggttttcattttctcccaccagcttatataccttagcaggagacattccttccgtatcttttacgcagcggtatttttcgatcagttttttcaattccggtgatattctcattttagccatttattatttccttcctcttttctacagtatttaaagataccccaagaagctaattataacaagacgaactccaattcactgttccttgcattctaaaaccttaaataccagaaaacagctttttcaaagttgttttcaaagttggcgtataacatagtatcgacggagccgattttgaaaccgcggtgatcacaggcagcaacgctctgtcatcgttacaatcaacatgctaccctccgcgagatcatccgtgtttcaaacccggcagcttagttgccgttcttccgaatagcatcggtaacatgagcaaagtctgccgccttacaacggctctcccgctgacgccgtcccggactgatgggctgcctgtatcgagtggtgattttgtgccgagctgccggtcggggagctgttggctggctggtggcaggatatattgtggtgtaaacaaattgacgcttagacaacttaataacacattgcggacgtttttaatgtactgaattaacgccgaattaa

SEQ ID NO: 55 - protein, 33 aa, Artificial sequence; identical to SEQ ID NO: 45
  Synthetic Construct

SEQ ID NO: 56 - DNA, 9043 bp, Artificial sequence
  plasmid VC-MME489-1QCZ
agctttgggcggatcctctagaggacaatcagtaaattgaacggagaatattattcataaaaatacgatagtaacgggtgatatattcattagaatgaaccgaaaccggcggtaaggatctgagctacacatgctcaggttttttacaacgtgcacaacagaattgaaagcaaatatcatgcgatcataggcgtctcgcatatctcattaaagcagggcatgccggtcgagtcaaatctcggtgacgggcaggaccggacggggcggtaccggcaggctgaagtccagctgccagaaacccacgtcatgccagttcccgtgcttgaagccggccgcccgcagcatgccgcggggggcatatccgagcgcctcgtgcatgcgcacgctcgggtcgttgggcagcccgatgacagcgaccacgctcttgaagccctgtgcctccagggacttcagcaggtgggtgtagagcgtggagcccagtcccgtccgctggtggcggggggagacgtacacggtcgactcggccgtccagtcgtaggcgttgcgtgccttccaggggcccgcgtaggcgatgccggcgacctcgccgtccacctcggcgacgagccagggatagcgctcccgcagacggacgaggtcgtccgtccactcctgcggttcctgcggctcggtacggaagttgaccgtgcttgtctcgatgtagtggttgacgatggtgcagaccgccggcatgtccgcctcggtggcacggcggatgtcggccgggcgtcgttctgggctcatggtagactcgacggatccacgtgtggaagatatgaatttttttgagaaactagataagattaatgaatatcggtgttttggttttttcttgtggccgtctttgtttatattgagatttttcaaatcagtgcgcaagacgtgacgtaagtatccgagtcagtttttatttttctactaatttggtcgaatctagattcgacggtatcgataagctcgcggatccctgaaagcgacgttggatgttaacatctacaaattgccttttcttatcgaccatgtacgtaagcgcttacgtttttggtggacccttgaggaaactggtagctgttgtgggcctgtggtctcaagatggatcattaatttccaccttcacctacgatggggggcatcgcaccggtgagtaatattgtacggctaagagcgaatttggcctgtaggatccctgaaagcgacgttggatgttaacatctacaaattgccttttcttatcgaccatgtacgtaagcgcttacgtttttggtggacccttgaggaaactggtagctgttgtgggcctgtggtctcaagatggatcattaatttccaccttcacctacgatggggggcatcgcaccggtgagtaatattgtacggctaagagcgaatttggcctgtaggatccctgaaagcgacgttggatgttaacatctacaaattgccttttcttatcgaccatgtacgtaagcgcttacgtttttggtggacccttgaggaaactggtagctgttgtgggcctgtggtctcaagatggatcattaatttccaccttcacctacgatggggggcatcgcaccggtgagtaatattgtacggctaagagcgaatttggcctgtaggatccgcgagctggtcaatcccattgcttttgaagcagctcaacattgatctctttctcgatcgagggagatttttcaaatcagtgcgcaagacgtgacgtaagtatccgagtcagtttttatttttctactaatttggtcgtttatttcggcgtgtaggacatggcaaccgggcctgaatttcgcgggtattctgtttctattccaactttttcttgatccgcagccattaacgacttttgaatagatacgctgacacgccaagcctcgctagtcaaaagtgtaccaaacaacgctttacagcaagaacggaatgcgcgtgacgctcgcggtgacgccatttcgccttttcagaaatggataaatagccttgcttcctattatatcttcccaaattaccaatacattacactagcatctgaatttcataaccaatctcgatacaccaaatcgaagatctccctggaattccagctgaccaccatggcaattcccggggatcagctcgaatttccccgatcgttcaaacatttggcaataaagtttcttaagattgaatcctgttgccggtcttgcgatgattatcatataatttctgttgaattacgttaagcatgtaataattaacatgtaatgcatgacgttatttatgagatgggtttttatgattagagtcccgcaattatacatttaatacgcgatagaaaacaaaatatagcgcgcaaactaggataaattatcgcgcgcggtgtcatctatgttactagatcgggaattggcatgcaagcttggcactggccgtcgttttacaacgtcgtgactgggaaaaccctggcgttacccaacttaatcgccttgcagcacatccccctttcgccagctggcgtaatagcgaagaggcccgcaccgatcgcccttcccaacagttgcgcagcctgaatggcgaatgctagagcagcttgagcttggatcagattgtcgtttcccgccttcagtttaaactatcagtgtttgacaggatatattggcgggtaaacctaagagaaaagagcgtttattagaataatcggatatttaaaagggcgtgaaaaggtttatccgttcgtccatttgtatgtgcatgccaaccacagggttcccctcgggatcaaagtactttgatccaacccctccgctgctatagtgcagtcggcttctgacgttcagtgcagccgtcttctgaaaacgacatgtcgcacaagtcctaagttacgcgacaggctgccgccctgcccttttcctggcgttttcttgtcgcgtgttttagtcgcataaagtagaatacttgcgactagaaccggagacattacgccatgaacaagagcgccgccgctggcctgctgggctatgcccgcgtcagcaccgacgaccaggacttgaccaaccaacgggccgaactgcacgcggccggctgcaccaagctgttttccgagaagatcaccggcaccaggcgcgaccgcccggagctggccaggatgcttgaccacctacgccctggcgacgttgtgacagtgaccaggctagaccgcctggcccgcagcacccgcgacctactggacattgccgagcgcatccaggaggccggcgcgggcctgcgtagcctggcagagccgtgggccgacaccaccacgccggccggccgcatggtgttgaccgtgttcgccggcattgccgagttcgagcgttccctaatcatcgaccgcacccggagcgggcgcgaggccgccaaggcccgaggcgtgaagtttggcccccgccctaccctcaccccggcacagatcgcgcacgcccgcgagctgatcgaccaggaaggccgcaccgtgaaagaggcggctgcactgcttggcgtgcatcgctcgaccctgtaccgcgcacttgagcgcagcgaggaagtgacgcccaccgaggccaggcggcgcggtgccttccgtgaggacgcattgaccgaggccgacgccctggcggccgccgagaatgaacgccaagaggaacaagcatgaaaccgcaccaggacggccaggacgaaccgtttttcattaccgaagagatcgaggcggagatgatcgcggccgggtacgtgttcgagccgcccgcgcacgtctcaaccgtgcggctgcatgaaatcctggccggtttgtctgatgccaagctggcggcctggccggccagcttggccgctgaagaaaccgagcgccgccgtctaaaaaggtgatgtgtatttgagtaaaacagcttgcgtcatgcggtcgctgcgtatatgatgcgatgagtaaataaacaaatacgcaaggggaacgcatgaaggttatcgctgtacttaaccagaaaggcgggtcaggcaagacgaccatcgcaacccatctagcccgcgccctgcaactcgccggggccgatgttctgttagtcgattccgatccccagggcagtgcccgcgattgggcggccgtgcgggaagatcaaccgctaaccgttgtcggcatcgaccgcccgacgattgaccgcgacgtgaaggccatcggccggcgcgacttcgtagtgatcgacggagcgccccaggcggcggacttggctgtgtccgcgatcaaggcagccgacttcgtgctgattccggtgcagccaagcccttacgacatatgggccaccgccgacctggtggagctggttaagcagcgcattgaggtcacggatggaaggctacaagcggcctttgtcgtgtcgcgggcgatcaaaggcacgcgcatcggcggtgaggttgccgaggcgctggccgggtacgagctgcccattcttgagtcccgtatcacgcagcgcgtgagctacccaggcactgccgccgccggcacaaccgttcttgaatcagaacccgagggcgacgctgcccgcgaggtccaggcgctggccgctgaaattaaatcaaaactcatttgagttaatgaggtaaagagaaaatgagcaaaagcacaaacacgctaagtgccggccgtccgagcgcacgcagcagcaaggctgcaacgttggccagcctggcagacacgccagccatgaagcgggtcaactttcagttgccggcggaggatcacaccaagctgaagatgtacgcggtacgccaaggcaagaccattaccgagctgctatctgaatacatcgcgcagctaccagagtaaatgagcaaatgaataaatgagtagatgaattttagcggctaaaggaggcggcatggaaaatcaagaacaaccaggcaccgacgccgtggaatgccccatgtgtggaggaacgggcggttggccaggcgtaagcggctgggttgtctgccggccctgcaatggcactggaacccccaagcccgaggaatcggcgtgacggtcgcaaaccatccggcccggtacaaatcggcgcggcgctgggtgatgacctggtggagaagttgaaggccgcgcaggccgcccagcggcaacgcatcgaggcagaagcacgccccggtgaatcgtggcaagcggccgctgatcgaatccgcaaagaatcccggcaaccgccggcagccggtgcgccgtcgattaggaagccgcccaagggcgacgagcaaccagattttttcgttccgatgctctatgacgtgggcacccgcgatagtcgcagcatcatggacgtggccgttttccgtctgtcgaagcgtgaccgacgagctggcgaggtgatccgctacgagcttccagacgggcacgtagaggtttccgcagggccggccggcatggccagtgtgtgggattacgacctggtactgatggcggtttcccatctaaccgaatccatgaaccgataccgggaagggaagggagacaagcccggccgcgtgttccgtccacacgttgcggacgtactcaagttctgccggcgagccgatggcggaaagcagaaagacgacctggtagaaacctgcattcggttaaacaccacgcacgttgccatgcagcgtacgaagaaggccaagaacggccgcctggtgacggtatccgagggtgaagccttgattagccgctacaagatcgtaaagagcgaaaccgggcggccggagtacatcgagatcgagctagctgattggatgtaccgcgagatcacagaaggcaagaacccggacgtgctgacggttcaccccgattactttttgatcgatcccggcatcggccgttttctctaccgcctggcacgccgcgccgcaggcaaggcagaagccagatggttgttcaagacgatctacgaacgcagtggcagcgccggagagttcaagaagttctgtttcaccgtgcgcaagctgatcgggtcaaatgacctgccggagtacgatttgaaggaggaggcggggcaggctggcccgatcctagtcatgcgctaccgcaacctgatcgagggcgaagcatccgccggttcctaatgtacggagcagatgctagggcaaattgccctagcaggggaaaaaggtcgaaaaggtctctttcctgtggatagcacgtacattgggaacccaaagccgtacattgggaaccggaacccgtacattgggaacccaaagccgtacattgggaaccggtcacacatgtaagtgactgatataaaagagaaaaaaggcgatttttccgcctaaaactctttaaaacttattaaaactcttaaaacccgcctggcctgtgcataactgtctggccagcgcacagccgaagagctgcaaaaagcgcctacccttcggtcgctgcgctccctacgccccgccgcttcgcgtcggcctatcgcggccgctggccgctcaaaaatggctggcctacggccaggcaatctaccagggcgcggacaagccgcgccgtcgccactcgaccgccggcgcccacatcaaggcaccctgcctcgcgcgtttcggtgatgacggtgaaaacctctgacacatgcagctcccggagacggtcacagcttgtctgtaagcggatgccgggagcagacaagcccgtcagggcgcgtcagcgggtgttggcgggtgtcggggcgcagccatgacccagtcacgtagcgatagcggagtgtatactggcttaactatgcggcatcagagcagattgtactgagagtgcaccatatgcggtgtgaaataccgcacagatgcgtaaggagaaaataccgcatcaggcgctcttccgcttcctcgctcactgactcgctgcgctcggtcgttcggctgcggcgagcggtatcagctcactcaaaggcggtaatacggttatccacagaatcaggggataacgcaggaaagaacatgtgagcaaaaggccagcaaaaggccaggaaccgtaaaaaggccgcgttgctggcgtttttccataggctccgcccccctgacgagcatcacaaaaatcgacgctcaagtcagaggtggcgaaacccgacaggactataaagataccaggcgtttccccctggaagctccctcgtgcgctctcctgttccgaccctgccgcttaccggatacctgtccgcctttctcccttcgggaagcgtggcgctttctcatagctcacgctgtaggtatctcagttcggtgtaggtcgttcgctccaagctgggctgtgtgcacgaaccccccgttcagcccgaccgctgcgccttatccggtaactatcgtcttgagtccaacccggtaagacacgacttatcgccactggcagcagccactggtaacaggattagcagagcgaggtatgtaggcggtgctacagagttcttgaagtggtggcctaactacggctacactagaaggacagtatttggtatctgcgctctgctgaagccagttaccttcggaaaaagagttggtagctcttgatccggcaaacaaaccaccgctggtagcggtggtttttttgtttgcaagcagcagattacgcgcagaaaaaaaggatctcaagaagatcctttgatcttttctacggggtctgacgctcagtggaacgaaaactcacgttaagggattttggtcatgcattctaggtactaaaacaattcatccagtaaaatataatattttattttctcccaatcaggcttgatccccagtaagtcaaaaaatagctcgacatactgttcttccccgatatcctccctgatcgaccggacgcagaaggcaatgtcataccacttgtccgccctgccgcttctcccaagatcaataaagccacttactttgccatctttcacaaagatgttgctgtctcccaggtcgccgtgggaaaagacaagttcctcttcgggcttttccgtctttaaaaaatcatacagctcgcgcggatctttaaatggagtgtcttcttcccagttttcgcaatccacatcggccagatcgttattcagtaagtaatccaattcggctaagcggctgtctaagctattcgtatagggacaatccgatatgtcgatggagtgaaagagcctgatgcactccgcatacagctcgataatcttttcagggctttgttcatcttcatactcttccgagcaaaggacgccatcggcctcactcatgagcagattgctccagccatcatgccgttcaaagtgcaggacctttggaacaggcagctttccttccagccatagcatcatgtccttttcccgttccacatcataggtggtccctttataccggctgtccgtcatttttaaatataggttttcattttctcccaccagcttatataccttagcaggagacattccttccgtatcttttacgcagcggtatttttcgatcagttttttcaattccggtgatattctcattttagccatttattatttccttcctcttttctacagtatttaaagataccccaagaagctaattataacaagacgaactccaattcactgttccttgcattctaaaaccttaaataccagaaaacagctttttcaaagttgttttcaaagttggcgtataacatagtatcgacggagccgattttgaaaccgcggtgatcacaggcagcaacgctctgtcatcgttacaatcaacatgctaccctccgcgagatcatccgtgtttcaaacccggcagcttagttgccgttcttccgaatagcatcggtaacatgagcaaagtctgccgccttacaacggctctcccgctgacgccgtcccggactgatgggctgcctgtatcgagtggtgattttgtgccgagctgccggtcggggagctgttggctggctggtggcaggatatattgtggtgtaaacaaattgacgcttagacaacttaataacacattgcggacgtttttaatgtactgaattaacgccgaatta

SEQ ID NO: 57 - DNA, 29 bp, Artificial sequence
  amplification of the targeting sequence of the gene IVD from Arabidopsis thaliana to generate targeting vectors
atagaattcatgcagaggtttttctccgc

SEQ ID NO: 58 - DNA, 29 bp, Artificial sequence
  amplification of the targeting sequence of the gene IVD from Arabidopsis thaliana to generate targeting vectors
atagaattccgaagaacgagaagagaaag

SEQ ID NO: 59 - DNA, 31 bp, Artificial sequence
  amplification of the targeting sequence of the gene IVD from Arabidopsis thaliana to generate targeting vectors
atagtttaaacatgcagaggtttttctccgc

SEQ ID NO: 60 - DNA, 36 bp, Artificial sequence
  amplification of the targeting sequence of the gene IVD from Arabidopsis thaliana to generate targeting vectors
ataccatggaagagcaaaggagagacgaagaacgag

SEQ ID NO: 61 - DNA, 81 bp, Arabidopsis thaliana
atgcagaggtttttctccgccagatcgattctcggttacgccgtcaagacgcggaggaggtctttctcttctcgttcttcg

SEQ ID NO: 62 - DNA, 89 bp, Arabidopsis thaliana
atgcagaggtttttctccgccagatcgattctcggttacgccgtcaagacgcggaggaggtctttctcttctcgttcttcgtctctcct

SEQ ID NO: 63 - protein, 32 aa, Zea mays
MALRTLASKKVLSFPFGGAGRPLAAAASARGV

SEQ ID NO: 64 - protein, 24 aa, Oryza sativa
MGKAAAVGTAVVVAAAVGVAVVLA

SEQ ID NO: 65 - protein, 28 aa, Oryza sativa
MGKGTVVGTAVVVCAAAAAAVGVAVVVS

SEQ ID NO: 66 - protein, 39 aa, Arabidopsis thaliana
MIITTHKRDINLLVLQLGAALAVSFAGFLFARFRKNTKR

SEQ ID NO: 67 - protein, 160 aa, Oryza sativa
MAAAAISHLRRGAPRHARALLYLSTRRFSSSSAAGVAPLAAVAASARRLLSTSVDSGASSTGESYKPPLFDPFRAASLASSAPPLESPPIEELPDDATPPPEEEPGLPAPEKDPVATACQHELEGLKAWVETVRSRKESTEEKEAWSLLGRSVVSYCGTA

SEQ ID NO: 68 - protein, 48 aa, Arabidopsis thaliana
MSVSCCCRNLGKTIKKAIPSHHLHLRSLGGSLYRRRIQSSSMETDLKS

SEQ ID NO: 69 - DNA, 702 bp, Glycine max
  CDS (1)..(702)
atgatagagaagaagacacagtgtgagaaaaaggaaaaaatggaaggtgaagaaactgagatgaaacaacaatccaggttcaaaaggatttgtgtgttctgtggcagcagccctgggaacaagagtagctataaggacgctgctattgagcttgggaaagagttggtgtcaagaaatattgatctggtttatggaggaggaagcattggtttgatggggttggtttcccaggctgtttatgaaggaggtcgccatgtaattggagttattcccaagacactgatgccaagagagattactggagagacagtgggggaagtgatggcagtagcagacatgcatcaaagaaaagcagagatggctaagcactctgatgcctttattgccttgcccggtggctatgggactcttgaggagcttctagaggtgataacttgggctcagcttggcatccatgataaaccggtggggttgctgaatgtagatggatactacaattccttgttgtgtttcattgacaaagctgtggaagaaggcttcattagccccaaagctcgccacataattgtatctgccccatcaacaaaagagcttgtcaaaaagatggaggaatattttccacaacatgaaagagttgcctctaagctaagctgggaaactgagcagatagattactcctcaaattgtggcatgtctaggtga

SEQ ID NO: 70 - protein, 233 aa, Glycine max
MIEKKTQCEKKEKMEGEETEMKQQSRFKRICVFCGSSPGNKSSYKDAAIELGKELVSRNIDLVYGGGSIGLMGLVSQAVYEGGRHVIGVIPKTLMPREITGETVGEVMAVADMHQRKAEMAKHSDAFIALPGGYGTLEELLEVITWAQLGIHDKPVGLLNVDGYYNSLLCFIDKAVEEGFISPKARHIIVSAPSTKELVKKMEEYFPQHERVASKLSWETEQIDYSSNCGMSR

SEQ ID NO: 71 - DNA, 1006 bp, Oryza sativa
  CDS (84)..(719)
ggaaacacaaagagagcaaaacttaagctagctctgggtgctgcattgtctgcagtttacaaaggtagatcaattagaggagaatgaggcagcagcagcagcagcagcaggagagcaggttcaagaggacctgcgtgttctgcggcagtagccagggcaacaagaccacctaccgcgatgccgccgtcgacctcgccaaagagctggtcgcgaggggcattgaccttgtgtacggcggcggcagcattggcctcatgggcctcgtctcccaggccgtctacgacgttggcagacatgtcattggggtcatccccaagactctcatgacccccgagataatcggagagacagtaggggaggtgaggccagtgtccgacatgcaccagaggaaggctgagatggcgaggcagtctgatgcattcatagccctgcccggaggatacggaacactggaagagctgcttgaagtcatcacatgggcgcaattaggcatccatcataaaccggttgggctgctgaacgttgatgggtactacaactccctgctcacattcatcgaccaagccgtggaagaaggcttcatcagccccagtgctcgccgcatcatcgtgtcggctccaacggcacaagaactcatggacaagcttgaggaatacgtcccttaccatgatagggttgcgtctgggctgaactgggagactggtcatctagggttctaagctgttgcagcgagcttaattaagcttaaatgaattgaagaaaggcgaaccatcgagcagccatcaacattaagcattgcttgttaattgtgctcgatctatgtagtagtagtagcagcttgttaaccagtctagattgtcttttttttttctcctacgaagcatggagtttgtcatctcagtttgggtaagaaaaactagtagcacctaatcagccatatatcgatgttcaagatccagtaactgagaattaattgacactaaaccaagtgtcaaagattgacccg

SEQ ID NO: 72 - protein, 211 aa, Oryza sativa
MRQQQQQQQESRFKRTCVFCGSSQGNKTTYRDAAVDLAKELVARGIDLVYGGGSIGLMGLVSQAVYDVGRHVIGVIPKTLMTPEIIGETVGEVRPVSDMHQRKAEMARQSDAFIALPGGYGTLEELLEVITWAQLGIHHKPVGLLNVDGYYNSLLTFIDQAVEEGFISPSARRIIVSAPTAQELMDKLEEYVPYHDRVASGLNWETGHLGF

SEQ ID NO: 73 - DNA, 1109 bp, Glycine max
  CDS (194)..(853)
gtcttctcttctcttctcttctctaggagtgtaattttgttgttgtggttagtgcttccgtgacactcacttgtttgtaacaagtggaggggagtgttataggaacataatttggagggagacatttcagtttcagaaacgttacaaaatatctgttgtgtgtgtgactgtgaaagttaatataactaacaaaatggatacacgaagtgaaatgaggcattcaaagttcaagaggatttgtgtgttctgtgggagtagccccggcaagaagagtacctaccaagatgctgccattgaacttggcaacgaattggtctcaaggaacatcgatctggtgtatggagggggaagcattggtctaatgggtttagtttcacaagctgttcatgatggcggtcgccatgtcatcggagttattcccaagaccctcatgcctcgagagctaactggtgaaacagtgggagaagtaaaagctgttgctgatatgcaccaaaggaaggcagagatggccaagcattcagacgcctttattgccttaccaggtggatatgggactctagaggagcttcttgaagtcataacctgggcacaacttggtattcatgacaagccggtgggattagtaaatgttgatggatactttaattccttgctgtcatttattgacaaagctgtggaagagggatttatcagtccaaatgctcgccacataattgtatcagcacccacagcaaaagagttggtgaagaaattggaggattacgttccctgtcatgagggtgttgcttccaagttgagctggcagatagaacagcagcttgcttaccctcaagattatgacatgtcaaggtagttgggttacttcacatgcacggaacatgagaccatatagaattttggagctggaacgaagttatattttcgactatcgcactattctgcttttatccttttaatttcttgtgtaaattaccaggattgaccttaattaatatgtgatactactttattagttattaccttgtgaaactttgatgctcttgaatttgtaagtaccccccgcttctgaacttactattatcattcaatgccaattaatttttaagtat

SEQ ID NO: 74 - protein, 219 aa, Glycine max
MDTRSEMRHSKFKRICVFCGSSPGKKSTYQDAAIELGNELVSRNIDLVYGGGSIGLMGLVSQAVHDGGRHVIGVIPKTLMPRELTGETVGEVKAVADMHQRKAEMAKHSDAFIALPGGYGTLEELLEVITWAQLGIHDKPVGLVNVDGYFNSLLSFIDKAVEEGFISPNARHIIVSAPTAKELVKKLEDYVPCHEGVASKLSWQIEQQLAYPQDYDMSR

SEQ ID NO: 75 - DNA, 1385 bp, Sorghum bicolor
  CDS (250)..(957)
ctcgcccccccctctgaaacaccggtggatccatcaacaactcctggttccgcggggacacggccggcccggcggaccccggcccaaaagcgtacgcgcgcgccttttatatccgcgcgccggccaatcgatcggccacagcaccaccgcgccgcaccacaccttagaccacacgcagacgcagcagcttcttgttgccttatgctatactaggtgctgctacgtgctagcgaggcatcgaggccgacgatggaagcggaaggggcggcggcggcggcggagaacggcggcgcgggcaaagggtccgactccggcagcaggttcaggcgggtgtgcgtgttctgcgggagcagctccggcaagcggagcagctaccgggacgccgccgtcgagctcggcaaggagctggtggcgaggaaggtggatttggtgtacggagggggcagcctggggctcatgggggaggtctccgaggccgtgcacaagggcggcggccatgtcattggcgtcataccgaccactctcatgggcaaggagatcaccggggagaccgtgggcgaggtgcgggccgtggccgggatgcaccagcgcaaggcggagatggcgcgcaactccgacgccttcatcgcgctaccaggcgggtacgggacgctggacgagctcctggaggtgatcgcgtgggcgcagctcggcatccacagcaagccggtgggcctgctgaacgtggacgggtactacgacttcctgctggcgttcatcgacaaggcggtggacgacggcttcatcaagccctcccagcgccacatcttcgtcagcgcccccgacgccagcgaactcgtccagaagctcgaggagtacgaggcggtgcaggatgaggacccggcgacgcccaagctgtgttgggagatcgaacaggtcggctacaacgcctcgctcctggccgagatcgctcgctgatccatcgcccggtctccacccatatcgtcgtctgctggccacaccgccaccacctatatctacccatcgatgcgatgatatatatgtatttctctccttaggtagcctaggcatgcaacaagcaagtttgcccgccaaaatgtacgaggcgccgccgagcaaaacgagggaaaggacttggttttgtggtgtgtgcgttctgctcttagtcctagcttagcagcggcttggttgtctgttctgctgctacatgtattctgctccaagccacgtattcgtactagtcatattcctaagctacgtaccctgatcacttgttgtttactacctagtagcaactttagttgtagttagttgtctcctcgatcagtagagaagtcattggtaatctggtaatgtaattgaccaccggctagttgcaagattat

SEQ ID NO: 76 - protein, 235 aa, Sorghum bicolor
MEAEGAAAAAENGGAGKGSDSGSRFRRVCVFCGSSSGKRSSYRDAAVELGKELVARKVDLVYGGGSLGLMGEVSEAVHKGGGHVIGVIPTTLMGKEITGETVGEVRAVAGMHQRKAEMARNSDAFIALPGGYGTLDELLEVIAWAQLGIHSKPVGLLNVDGYYDFLLAFIDKAVDDGFIKPSQRHIFVSAPDASELVQKLEEYEAVQDEDPATPKLCWEIEQVGYNASLLAEIAR

SEQ ID NO: 77 - DNA, 1172 bp, Zea mays
  CDS (221)..(847)
cgaccctcccccgcctctatataggccatgggtggcgcactcggggccgagcatcagctgcgctgctcaccaggaaggccatctcatccatccttcattgtattgtagtggcatcaccaggaacagcccagccgcaagaagacagacgacagcagcgagtggggatcggaagaaagaggaagcggagacgaaggtgagagagagaggcaaaagggcagccatgacgatgaagcagtcgaggttcaagaggatctgcgtcttctgtggcagcagccaggggaagaaggcgagctaccatgacgccgccgttgagctcggcaaccagctggttgcccggagcatcgacctggtgtacggcggcggcagcatcgggctcatgggcctcgtctcccaggccgtctacggcggcggacggcacgtcatcggggtcattcccaagacgctcatgacaccagagataagcggcgagacagtcggggaggtgcgggcggtggccgacatgcaccagaggaaggcggagatggcgcggcagtccgacgcattcgtcgccctgcctggagggtatggcacgctggaggagctgctggaggtcatcacgtgggcgcagctgggcatccaccacaagccggtcgggctgctgaacgtggacggctactacaactcgctgctgaccttcatcgacaaggccgtggaggagggcttcatcaaccccagcgcccgccgcatcatcgtgctcgcgcccaccgcgcaggagctcatggacaagctcgaggagtacgagccttaccacgacagggtggcgtccacgctcaactgggagaccaccatggaccacctggcctactgacgcccacgccgccagagccgccagcagacaactgggacatctctgatccatcggtggcattcaggaaacatgcttttagcttgccgtcagattgggacttttgtttcgtttttaactgcatgcagatcggtttaatttggagtgccggagggagagaaaaaaaaaacaggttgattattcggttcgcgtagcaggagtacgtagtacgtgcttgttttgtgtatatggtgccttgtgtttgcttcccgccaacggggatgattgatggcttgcagtgttgtctctgtaccagttcaaaaaaaaaaaaacccgaccggtttcccct

SEQ ID NO: 78 - protein, 208 aa, Zea mays
MTMKQSRFKRICVFCGSSQGKKASYHDAAVELGNQLVARSIDLVYGGGSIGLMGLVSQAVYGGGRHVIGVIPKTLMTPEISGETVGEVRAVADMHQRKAEMARQSDAFVALPGGYGTLEELLEVITWAQLGIHHKPVGLLNVDGYYNSLLTFIDKAVEEGFINPSARRIIVLAPTAQELMDKLEEYEPYHDRVASTLNWETTMDHLAY

SEQ ID NO: 79 - DNA, 1333 bp, Zea mays
  CDS (131)..(829)
cattgggtacctcgaggccggccgggacacagcgccacgccacacgcaacgcaagcagctgcttctctctttccgctccgcaggccgcagcgcccatcaagagcgagaagccctgtcgcgcgcggagacgatggaagggccggcggcggcggaggcggagaacggcggcgcgggcaaggggtccggcagcaggttcaggcgggtgtgcgtgttctgcgggagcagctccggcaagcgcagcagctaccgggacgccgccgtcgagctcggcaaggagctggtgtcgaggaaggtggatttggtgtacggcggaggcagcctggggctcatgggggaggtctccgaggccgtgcacaggggcggcggccatgtcattggcatcataccgaccagtctcatgggaaaggagatcaccggggagacggtgggcgaggtgcgggccgtggcggggatgcaccagcgcaaggcggagatggcgcgcaactccgatgccttcatcgcgctcccgggcgggtacgggacgctggacgagctcctggaggtgatcgcgtgggcgcagctgggcatccacagcaagccggtgggcctgctgaacgtggacgggtactacgacttcctgctggcgttcatcgacaaggcggtggacgacgggttcatcaagccctcccagcgccacatcttcgtcagcgcccccgacgccagggaactcgtccagaagctggaggggtacgaggccgtgcaggacgaggacccggcgacgcccaagctgcggtgggagatcgagcaggtcggctacaacgcctcgctcctggccgagatcgcccgctgatcggccgcgcgacgatcgctgctgctgcgggagctctggtggctccagtccacgcatcgtctgccggccaggccactggcctccacctgctgctatctaccctacccctactaccccatcgatgatcgatgcgatgatcctgcgtatcagatcaacagaagcacgcattcatatgtgtgtgtttctcaagtgtgaccgcagaaacggggcaccggtgagcaagacgcacgcgaggacttgttttttttaggggtgtgcgttctgctcctagtcctagcagctagcagcggcttgatcgtcctgccgcatgtactctgctcctagccacgtactcgtactcatattcctgatcgacgatcacgtgtttgtttactacccagcagcagctagtactaatgtactaagttaatcgtcgtcctctggtaatgtaactgacctccagctccagctagctagctgcgacattattctgtataaaaaaaaaaaaaaaaggcccctagggcc

SEQ ID NO: 80 - protein, 232 aa, Zea mays
MEGPAAAEAENGGAGKGSGSRFRRVCVFCGSSSGKRSSYRDAAVELGKELVSRKVDLVYGGGSLGLMGEVSEAVHRGGGHVIGIIPTSLMGKEITGETVGEVRAVAGMHQRKAEMARNSDAFIALPGGYGTLDELLEVIAWAQLGIHSKPVGLLNVDGYYDFLLAFIDKAVDDGFIKPSQRHIFVSAPDARELVQKLEGYEAVQDEDPATPKLRWEIEQVGYNASLLAEIAR

SEQ ID NO: 81 - DNA, 957 bp, Brassica napus
  CDS (68)..(742)
cttctgagaagaaattattttcttcaaataaaaaatccacaagagaaataaaaaacaaaaaaaaacaatgcaaactgctatggataagagaatagaaacagtgaagtcgagattcaagagggtttgtgttttctgtggaagcagcagcggaaacaaagactgttacagagatgctgccattgatctagctcaagagctgattgagaggaaactgaatcttgtgtatggaggaggaagcattggtctcatgggtctggtctcacaagctgttcatgaagctggaggtcatgtgctagggatcataccaagaactcttatggacaaagagatcaccggagaaacatttggtgaggtaagagctgtggctgatatgcatcaacggaaagccgaaatggcaagccactccgattgtttcattgcactaccaggtgggtatggaacattggaggagttattggaagtaataacatgggcacaacttggaatccacgacaagcctgtgggattgttaaatgtggatggttattacaatgacctcctcactttcattaataaagccgttgatgatggctttatcaagccatctcagcgtcacatctttgtctctgctcctaatgccaaagagcttgtccaaaaacttgaggcatatgagcctgtgattgatggagtcatatcaaaatcaaagtgggaggttgagaagaaagtgcaacatccacaaacaacaagttgtgttctgtcctaacacaagcattcctactgagattgctctttagacttctagagtgtctttatgtatcctacccgtattatgtttatcatccaaaaatgcttaataactgaatctatagtctattcactcccttgttcatatcttcaagtgaatgtttttggttgtattattttttactgtttcttcacttttatcatagtaatacattttcagaaaaaaaaaaaaaa

SEQ ID NO: 82 - protein, 224 aa, Brassica napus
MQTAMDKRIETVKSRFKRVCVFCGSSSGNKDCYRDAAIDLAQELIERKLNLVYGGGSIGLMGLVSQAVHEAGGHVLGIIPRTLMDKEITGETFGEVRAVADMHQRKAEMASHSDCFIALPGGYGTLEELLEVITWAQLGIHDKPVGLLNVDGYYNDLLTFINKAVDDGFIKPSQRHIFVSAPNAKELVQKLEAYEPVIDGVISKSKWEVEKKVQHPQTTSCVLS

SEQ ID NO: 83 - DNA, 969 bp, Brassica napus
  CDS (49)..(696)
ttaagctcgagagggagagagagaacaaagaaaaaaaaaagagaagagatggaagagacaaaatcaagattcaataggatctgtgtcttctgtggaagcagttccggcaaaaaaccttcttaccaagaagctgccattgaattgggtaacgagctggtggaaagaaggattgatttggtatatggaggtggcagcgtggggcttatgggtctcgtctctcaggctgttcatcatggtggtcggcatgttctaggggtcatcccaaaaaccttgatgccaagagagataaccggtgagaccatcggggaagtgaaagccgtcgctgatatgcatcaaaggaaagctgaaatggctcgacaagccgacgccttcattgctcttcctggtggatatggtacgttggaagaattgctggaagtcattacatgggctcaactcggaatccaccgtaagccggtgggtcttcttaacgtggatggttactacaactcgctgttaacgtttatcgacaaggccgtggacgaaggatttatatccccaatggctcgtagaatcatcgtctctgcaccaaacgctaaagagttggttcgacaactcgaggaatatgaacctgagttcgatgagataacgtcaaaattggtttgggatgaagtggaccggctcagttatgtaccgggttcggaggttactacgtgagcaatttaaccacattatgggggaagtttttcttgggtaaaatcagtcggtgtacagcggaattgaaactttcataacgtcagaaggaaaggtcgggaaggagacaaaagtattggggtcgtttaagtagcattattttgtaaggggggcttaatgtgtgaagtggataaaccacgtgggtaactactaaccgcgtatataccaaaccccatcttccccatttgtcttttgtacattttggttaatgccatggttaaggaaaaaaaaaaaaaa

SEQ ID NO: 84 - protein, 215 aa, Brassica napus
MEETKSRFNRICVFCGSSSGKKPSYQEAAIELGNELVERRIDLVYGGGSVGLMGLVSQAVHHGGRHVLGVIPKTLMPREITGETIGEVKAVADMHQRKAEMARQADAFIALPGGYGTLEELLEVITWAQLGIHRKPVGLLNVDGYYNSLLTFIDKAVDEGFISPMARRIIVSAPNAKELVRQLEEYEPEFDEITSKLVWDEVDRLSYVPGSEVTT

SEQ ID NO: 85 - DNA, 891 bp, Brassica napus
  CDS (78)..(728)
tgttttgtttgttctctcattcgatcacgtccctcccgtcgtatataatctcatcacacaaaagattgtatccattgatggaggagaaccagagaagcaggtttaaaaaagtttgcgtcttttgcggaagccactctggtaatagagaagtcttcagcgatgctgccatcgaactcggcaatgaactcgtgaagaggaagatagacttggtttatggaggaggaagtgttgggctgatgggtcttatctccaggagagtctatgaaggtggtttccatgtactcgggatcattcccaaagctttgatgccaattgagatatctggtgagactgttggagaagtaagggttgttgctgacatgcacgaacgcaaagctgcaatggcacaagaatctgaggccttcattgctctccctggaggttatggaacaatggaggagctgctggagatgataacatggtcacaactcggtatccataagaaaacggttggtatattgaatactgatggctactataacaatttgcttgcgttatttgacactggcgtccaagaaggttttatcaaaccaggggcacgtaatattgtggtttctgcaccaacagccaaagagcttatggagaagatggaggaatatactccttcacacaagcatgttgcatcccacgaaagctggaatgttgaggagcttggagcttaccctggacaacaaagcaatcatcaataaagaacaaggaaaaaaaacattcttattgattagcatatgctgctacttccatttcaagttttagtttgatttatttgcagattccacaacaatgtgtataagaaaactcaaaatcttgttgcaatttgaaacatcacattggggtcccgaaaaaaaaaaaaaa

SEQ ID NO: 86 - protein, 216 aa, Brassica napus
MEENQRSRFKKVCVFCGSHSGNREVFSDAAIELGNELVKRKIDLVYGGGSVGLMGLISRRVYEGGFHVLGIIPKALMPIEISGETVGEVRVVADMHERKAAMAQESEAFIALPGGYGTMEELLEMITWSQLGIHKKTVGILNTDGYYNNLLALFDTGVQEGFIKPGARNIVVSAPTAKELMEKMEEYTPSHKHVASHESWNVEELGAYPGQQSNHQ

SEQ ID NO: 87 - DNA, 1042 bp, Glycine max
  CDS (60)..(725)
gttctcctatcctagctacttactctctcttccttcaattcctcaactctctagctcttatggaaactcaacaccaacaacccaccatcaagtctaggttcagacgcatctgtgtctactgtggtagcagccctggcaaaaaccccagctaccagctcgctgctattcaactcggaaaacaactggtggagaggaacattgacttggtttatggaggaggaagcatagggttgatgggtctaatctcacaagttgtgtatgatggtggacgccacgtgttaggggtgattccagagacacttaatgcaagagagataactggagagagtgttggagaagtgagagctgtatcgggcatgcaccaacgcaaagccgaaatggcccgacaagccgatgcatttattgcactgccaggtggatatggcacccttgaagaactactggaaattatcacctgggctcaactaggcatccatgataaaccggtggggttgttgaacgtggatgggtactacaactcgctgctggcattcatggacaaagctgtggacgaaggtttcgtaacaccagctgcccgtcacattattgtttctgcccacactgcccaagaactcatgtgcaaacttgaggaatatgtccccgagcactgtggcgtggcccccaagctaagttgggagatggagcaacagttagttaacactgcaaagtcagatatttcccgttgactaataactaaataattaatcttctacaagctcactaatgcaccatcaaagaccctagatttagtgtataagtataaagtataatataacctcaaccccatgatgtagttgtaagctccacagaatagggcgaccacagtcgtttttagtttagctgtggatctaatcatttgtaatttctatggttcaagttcaagatattcaccatgtaatttctttaattttctttcttgattggctttcatggctgagactatgtattttaattatttcttagttaccaactaattgtgcattagaattaaaaaaaaaaaaaa

SEQ ID NO: 88 - protein, 221 aa, Glycine max
METQHQQPTIKSRFRRICVYCGSSPGKNPSYQLAAIQLGKQLVERNIDLVYGGGSIGLMGLISQVVYDGGRHVLGVIPETLNAREITGESVGEVRAVSGMHQRKAEMARQADAFIALPGGYGTLEELLEIITWAQLGIHDKPVGLLNVDGYYNSLLAFMDKAVDEGFVTPAARHIIVSAHTAQELMCKLEEYVPEHCGVAPKLSWEMEQQLVNTAKSDISR

SEQ ID NO: 89 - DNA, 849 bp, Brassica napus
  CDS (64)..(705)
agattcttctttctatttcttaaaaataaaactctgtgttgggaaataagaggagagagagggatggagattgaaccaaagttcaagagaatatgtgtgttttgtggaagtagtgctggtaataaaaccagttacagagatgctgctatcgaactcggagccgaactggtatccagaaatatcgatcttgtctatggcggagggagcataggtttaatgggtttgatttctcaagctgtttacaatggaggtcgccatgtcatcggggttatccccaagacactaatgccaaaagagataacaggagagacagtgggagaagtgaaggcagtagcagacatgcaccaaaggaaagctgagatggctaagcactctgatgcctttatcgctttacctggtgggtatgggacacttgaagagcttcttgaagtaatcacttgggcacagcttggaatccatgataaaccagtgggattactgaatgtggaaggatactacaattcattgttatcattcatagataacgcagttgaagaaggtttcatttcaccaactgctcgtcatatcattgtctctgctccttctgcgaaagaccttgtcaagaaacttgaggaatatgtaccaaggcacgagaaggtagcctcaaagaaaagctgggagatagaacaaattgggctgagtcccacttgtgaaatctcaagataaaaatgataaaagcccaattgtatgttttttctaaattggggttccttgttgcaaaacacaaattgactttatttgtgtagttgattctgttgttttaatgtattttaggatttcatttcggaaaagaactaaaaaaaaaaaaaa

SEQ ID NO: 90 - protein, 213 aa, Brassica napus
MEIEPKFKRICVFCGSSAGNKTSYRDAAIELGAELVSRNIDLVYGGGSIGLMGLISQAVYNGGRHVIGVIPKTLMPKEITGETVGEVKAVADMHQRKAEMAKHSDAFIALPGGYGTLEELLEVITWAQLGIHDKPVGLLNVEGYYNSLLSFIDNAVEEGFISPTARHIIVSAPSAKDLVKKLEEYVPRHEKVASKKSWEIEQIGLSPTCEISR

SEQ ID NO: 91 - DNA, 1176 bp, Glycine max
  CDS (106)..(747)
gaattcccgggtcgacttcgcttcgacgatttcgttctcattctcaaccctcttttctttgctccctctctctcggttgtagccgagacctcacaccaacgacaaatggaagagaccaattccagattcaagaggatttgcgtcttctgtgggagcagttcagggaagaaacctacctatcaggaagctgctgttcaacttggcagggaactggtggaaagaaggattgatttggtctatggaggtggtagcgtggggctgatgggtctcgtttctcaggcagttcatgatggtgggcgccatgttctaggggttatcccaacaagtcttatgccaagagagataacaggtgatcctattggggaagtgagagccgtatctagtatgcaccaaaggaaagccgagatggcccgtcaagccgatgcttttattgccctccccggaggatatggaacccttgaagaattgctggaagtcattacatgggcgcagcttgggatccacagcaaacccgtgggcctgttgaatgtggatggattttacaattccttgttgtcgttcattgacaaagccgttgatgaaggctttatatcccctaaggcacgtcgcattatcgtgtcagcacccacagccaaacaattgatgctagagctagaggaacatgttcccgagcaagatgagtttgcgtccaagttggtgtgggaagaaagactgaattacgtgactgaatcagaagttgccatgtgaccaatcctctttgtggacgattcaatgatccacggttttttaggtttttacatttatagcatattctgggtacataggattaggactcatccatcatatacgggcataggaaccgtgcagtagaagtcaatactttttttttttgccaacctttttggtaaagcccctagtatacggaaacgagcgttgttcaaaatttggaaaatcctaattaaaatttatgtttccattgcctcggcaaatggcaatgaagatccgaatcattcacggcaacatttgtccttcaggaatttttttttcctgttagttcagtgttgtctctttgaaccaaccgttacttttagataaattctttaataacaacttggtcaaaattgccagttgaaaaacactagagaatatgtactctttaatcaaaaaaaaaaaaaa

SEQ ID NO: 92 - protein, 213 aa, Glycine max
MEETNSRFKRICVFCGSSSGKKPTYQEAAVQLGRELVERRIDLVYGGGSVGLMGLVSQAVHDGGRHVLGVIPTSLMPREITGDPIGEVRAVSSMHQRKAEMARQADAFIALPGGYGTLEELLEVITWAQLGIHSKPVGLLNVDGFYNSLLSFIDKAVDEGFISPKARRIIVSAPTAKQLMLELEEHVPEQDEFASKLVWEERLNYVTESEVAM

SEQ ID NO: 93 - DNA, 799 bp, Triticum aestivum
  CDS (31)..(735)
gaattcccgggtcgaccgacggatcaggcgatggctgttgaggccacggcagagaagaacaccggcgccgctgccccggagagcggggacaggcgctcccgcttcaggcggatctgcgtctactgcggcagcgccaagggccggaaggccagctaccaggacgccgccgtcgagctcggcaaggagctggtggagaggggcatcgacctggtctacggaggaggctccattgggctcatgggcctcgtctcccacgcagtccatgatggaggacgccatgtgattggggtcatccccaagtccttgatgcccagagaggtcactggagagcctgttggggaagtcagagccgtctccggcatgcacgagaggaaggccgagatggttcgctctgctgatgccttcattgccttacccggtggctacgggactctggatgagctgctcgaggtcctcacgtgggcccaacttgggatccacaagaagccgatcgggttgctgaacgtggatgggttctacaatttcttcctgtccttcatcgacatggctgtgagcgaaggattcatacaggaggacgcgaggcacctcgtcatctcagctccaaccgccaaggagctagttctcaagctcgaggagtatgttccggactacgagatcgggctggtgtgggaggatcagggccagatcacgcacggcttcgtgccggagctggagcccggcattgcgtcgtcatgatacgattcatcgtggaagcgtttctgaactaagtaacatctgaccgtgcaaaaaaaaaaaaaaa

SEQ ID NO: 94 - protein, 234 aa, Triticum aestivum
MAVEATAEKNTGAAAPESGDRRSRFRRICVYCGSAKGRKASYQDAAVELGKELVERGIDLVYGGGSIGLMGLVSHAVHDGGRHVIGVIPKSLMPREVTGEPVGEVRAVSGMHERKAEMVRSADAFIALPGGYGTLDELLEVLTWAQLGIHKKPIGLLNVDGFYNFFLSFIDMAVSEGFIQEDARHLVISAPTAKELVLKLEEYVPDYEIGLVWEDQGQITHGFVPELEPGIASS

SEQ ID NO: 95 - DNA, 873 bp, Triticum aestivum
  CDS (25)..(645)
gggaaggagaggccaaggagaaggatgaggcagcaggcgagcaggttcaagaggatgtgcgtcttctgcggcagcagccagggcaacaagagcagctaccacgacgccgccatcgacctcgccaaccagctcgtgggcgggggcatcgacctggtgtacggcggcggcagcatcgggctgatggggctcgtctcgcaggccgtctaccacggcggcaggcacgtcatcggggtcattcccaagactctgatgacccccgagatcgtcggggagatggtgggggaggtgaggccggtgggcgacatgcaccagcgcaaggcccagatggccagcctctccgacgccttcatagccctgcccggtgggtacgggacgctggaggagctgctggaggtgatcacctgggcgcagctagggatccatcacaagccggtgggtctgctgaatgtggaggggtactacgactcgctgctgaccttcatcgaccaggccgtggaggaaggattcatcagccccgccgcccgccgcatcatcgtctccgcccccaccgcccaccaactcatggagaaactcgaggagtacgtcccttactacgaaatggtcgcgtccgggctggactgggagacggatcgcctagacttctgatcatcgagcaggcattcgccatttctgtcatcgtgatgcatgcgcgcggatcgagcgaacaatgtgttgaagattagcgtaaaataatactagctagttcagttgtactcgatcgtcttctgtaagggtgcgctcaatatgaactttcggcaggtagctagctagcgcccaacctttatatatctcattaattcagtcactagtattagttccaaaaaaaaaaaaaaa

SEQ ID NO: 96 - protein, 206 aa, Triticum aestivum
MRQQASRFKRMCVFCGSSQGNKSSYHDAAIDLANQLVGGGIDLVYGGGSIGLMGLVSQAVYHGGRHVIGVIPKTLMTPEIVGEMVGEVRPVGDMHQRKAQMASLSDAFIALPGGYGTLEELLEVITWAQLGIHHKPVGLLNVEGYYDSLLTFIDQAVEEGFISPAARRIIVSAPTAHQLMEKLEEYVPYYEMVASGLDWETDRLDF

SEQ ID NO: 97 - DNA, 930 bp, Hordeum vulgare
  CDS (34)..(708)
gcgcccgagcccgcgaggagacaagccaaagccatgggcgacaccaccgcgccctcgccgccgaggaggttcggcaggatctgcgtcttctgcggcagcaactccggcaaccgcgccgtgttcggcgacgccgcgctcgagctcggccagggcctggtgacgaggggggtcgatctggtctacggcggcggcagcatcgggctgatgggcctgatcgcgcagacggttctcgacggcggctgccgcgtcctcggggtgattccaagagcactcatgcccctcgagatatccggtgcaagtgttggagaagtaaagattgtctccgacatgcatgagaggaaagctgagatggcgcgacaagccgatgcattcattgctcttccgggtgggtatggaacaatggaagagctgttagagatgatcacttggtcgcagcttggaatccatgacaaaccggtcgggttgctaaacgtcgatgggtactatgatccgttactcgcgctgttcgacaagggcgcggcggaagggtttattaaggccgattgcaggcagataatcgtgtcggcaccaactgcccacgaactgctgacaaaaatggagcaatacacccgttcacaccgggaggtggcctcgcggacgagctgggagatgaccgagatgggctacgggaaagcaccggagccggaggaggaggcggcggcatcgtagcaatgcctcgccgatgcgtgtcgttgtcatcgtcatcgatatcccttggtgctcaactggccgctgggattgcaattgcaataatcttacgtagtgctctcttgtgatttcttcgttgttggttgcctttcatgtaaccccgtagtacgttggattgtgactttgatctggcgaagaagcctaaggtattgtgtgcctagttattataaaaaaaaaaaaaaa

SEQ ID NO: 98 - protein, 224 aa, Hordeum vulgare
MGDTTAPSPPRRFGRICVFCGSNSGNRAVFGDAALELGQGLVTRGVDLVYGGGSIGLMGLIAQTVLDGGCRVLGVIPRALMPLEISGASVGEVKIVSDMHERKAEMARQADAFIALPGGYGTMEELLEMITWSQLGIHDKPVGLLNVDGYYDPLLALFDKGAAEGFIKADCRQIIVSAPTAHELLTKMEQYTRSHREVASRTSWEMTEMGYGKAPEPEEEAAAS

SEQ ID NO: 99 - DNA, 570 bp, Glycine max
  CDS (1)..(570)
atggaaataagggtttcaaagttcaagaggatttgtgtcttctgtgggagtagccctggcaaaaagagaagctaccaagatgctgccattgaacttggcaatgaattggtctcaaggaacattgatctggtgtatggagggggaagcattggtctaatgggtttagtttcacaagctgttcatgatggcggtcggcatgtcatcggagttattcccaagaccctcatgcctcgagagctaactggtgaaacagtgggagaagtaaaagctgttgctgatatgcaccaaaggaaggcagagatggccaagcattcagacgcctttattgccttaccaggtggatatgggactctagaggagcttcttgaagtcataacctgggcacaacttgggattcatgacaagccggtgggattagtaaatgttgatggatactttaattccttgctgtcatttattgacaaagctgtggaagagggatttatcagtccaaatgctcgccacataattgtatcagcacccacagcaaaagagttggtgaagaaattggaggattacgttccctgttaa

SEQ ID NO: 100 - protein, 189 aa, Glycine max
MEIRVSKFKRICVFCGSSPGKKRSYQDAAIELGNELVSRNIDLVYGGGSIGLMGLVSQAVHDGGRHVIGVIPKTLMPRELTGETVGEVKAVADMHQRKAEMAKHSDAFIALPGGYGTLEELLEVITWAQLGIHDKPVGLVNVDGYFNSLLSFIDKAVEEGFISPNARHIIVSAPTAKELVKKLEDYVPC

SEQ ID NO: 101 - DNA, 675 bp, Hordeum vulgare
  CDS (1)..(675)
atgggcgacaccaccgcgccctcgccgccgaggaggttcggcaggatctgcgtcttctgcggcaggaactccggcaaccgcgccgtgttcggcgacgccgcgctcgagctcggccagggcctggtgacgaggggggtcgatctggtctacggcggcggcagtatcgggctgatgggcctgatcgcgcagacggttctcgacggcggctgccgcgtcctcggggtgattccaagagcactcatgcccctcgagatatccggtgcaagtgttggagaagtaaagattgtctccgacatgcatgagaggaaagctgagatggcgcgacaagccgatgcattcattgctcttccgggtgggtatggaacaatggaagagctggtagagatgatcacttggtcgcagcttggaatccatgacaaaccggtcgggttgctaaacgtcgatgggtactatgatccgttactcgcgctgttcgacaagggcgcgggggaagggttttttaaggccgattgcaggccgataatcgtgtcggcaccaactgcccacgaactgctgacaaaaatggagcaatacacccgttcaccccgggaggtggcctcgcggacgagctgggagatgaccgagatgggctccgggaaagcaccggagccggaggaggaggcggcggcatcgtaa

SEQ ID NO: 102 - protein, 224 aa, Hordeum vulgare
MGDTTAPSPPRRFGRICVFCGRNSGNRAVFGDAALELGQGLVTRGVDLVYGGGSIGLMGLIAQTVLDGGCRVLGVIPRALMPLEISGASVGEVKIVSDMHERKAEMARQADAFIALPGGYGTMEELVEMITWSQLGIHDKPVGLLNVDGYYDPLLALFDKGAGEGFFKADCRPIIVSAPTAHELLTKMEQYTRSPREVASRTSWEMTEMGSGKAPEPEEEAAAS

SEQ ID NO: 103 - DNA, 717 bp, Zea mays
  CDS (1)..(717)
atggaggagaatcaagagaagtttgctccggagagcagcggcggcgacggtggtggctcggtgagaacgatctgcgtcttctgcggcagcaggccggggaaccggccgtccttcagcgctgcggcgctcgacctggggaagcagctggtcgagaggcagatgaacctggtgtacggcggcggcagcggcgggctgatgggcctggtgtccaaggccgtctacgaaggcggccgccacgtcctcggggtcatccctaccgccctcctacctgaagaggtgtcaggggagacattgggagaggtgaaagtggtcagggacatgcatcagcgcaaggcggaaatggcgaaacatgccgacgctttcatcgccctgccaggtggttacgggacaatcgaagaactgctggagatcatagcgtgggcgcagctgggcatccacagcaaaccggtggggttgctcaacgtggacggctactacaacagcctgctctcgctgttcgacaaggctgtcgaggagggcttcatcgacaccaaggcacggaacatcttcgtcctcgctgacaccgccgccgacctgctgactaggctcaccatgatggcgcgcctggcagccgacgacgacgatgctactactacccccagaggagacggagacggagacggagacgaacacaagggggccaccaccgctgcaggcgtcaaaaggaaaaggggctaa

SEQ ID NO: 104 - protein, 238 aa, Zea mays
MEENQEKFAPESSGGDGGGSVRTICVFCGSRPGNRPSFSAAALDLGKQLVERQMNLVYGGGSGGLMGLVSKAVYEGGRHVLGVIPTALLPEEVSGETLGEVKVVRDMHQRKAEMAKHADAFIALPGGYGTIEELLEIIAWAQLGIHSKPVGLLNVDGYYNSLLSLFDKAVEEGFIDTKARNIFVLADTAADLLTRLTMMARLAADDDDATTTPRGDGDGDGDEHKGATTAAGVKRKRG

SEQ ID NO: 105 - DNA, 579 bp, Klebsiella pneumoniae subsp. pneumoniae MGH 78578
  CDS (1)..(579): transl_table=11
atgaaatcgattggtattttctgcggttcttcagctggcgaacatccgctgtacctcgaaaccgcccgtctggttggacgtacgctggcgcagcaggggttggcgcttgtctatggcggcggcaaagttggtctgatgggggcggtcgccgatgcggcgctggaggccggtggcgtggtgatcggcgtgatgccgcgcggcctggtggagcgggaaattgcccaccgcggcttgacggagctgcatgtggtcgaggatatgcacgagcggaaaaccaaaatggcggcgctggcggatggctttattgccctgccgggcggggcggggacgctcgaggagattttcgaacaatggacctgggcgcagctggggatccatgagaaaccgtgcgcgttcctgaatattaaggggtattacgatccgcttcaggcgatggtcgataacatggtacgggaagggtttatgcacccgcgctacgcggagatgctgccgttcgctacctcggcagacgagattatcgccggttttcgcgactatacgccgccggcccgtaaatgggttcagcagccagctatttaa

SEQ ID NO: 106 - protein, 192 aa, Klebsiella pneumoniae subsp. pneumoniae MGH 78578
MKSIGIFCGSSAGEHPLYLETARLVGRTLAQQGLALVYGGGKVGLMGAVADAALEAGGVVIGVMPRGLVEREIAHRGLTELHVVEDMHERKTKMAALADGFIALPGGAGTLEEIFEQWTWAQLGIHEKPCAFLNIKGYYDPLQAMVDNMVREGFMHPRYAEMLPFATSADEIIAGFRDYTPPARKWVQQPAI

SEQ ID NO: 107 - DNA, 693 bp, Oryza sativa (japonica cultivar-group)
  CDS (1)..(693)
atggatgctaaccacgacaaggttgtggagagcggcagccgcgggggccggggaccggtgcggacgatctgcgtcttctgcggcagcaggcggggaaaccggccgtccttcagcgctgccgctctcgacctcggaaagcagctggtcgagagggagctcgatctggtctacggcggcggcagcggcggcctgatgggcctcgtctccaagaccgtccacgacggcggccgccacgtcctcggggtcatccctagtgctctcctacctgaagaggtgtcaggggagacgttgggagaggcgaaagtggtcagggacatgcatgagcgcaagtcagaaatggcgaaacacgccgacgctttcatcgccctgccaggtggttacgggacaatcgaagaactgttggagatcatagcgtgggcgcagctggggatccacaacaaaccggtggggctgctcaatgtggacggctactacaacaacttactctcgctgttcgacaagggcgtcgaggaagggttcatcgacgccgcggcgcggaacatcttcgtcctcgccgacaacgccggcgaactactgaccaagctgacggaggcggcggcagcggcagcggcggcggttgagggcggcgacggggatcaggtcgacggcgaggccacggccgcggcggctggcttgaagaggaaaagaagctag

SEQ ID NO: 108 - protein, 230 aa, Oryza sativa (japonica cultivar-group)
MDANHDKVVESGSRGGRGPVRTICVFCGSRRGNRPSFSAAALDLGKQLVERELDLVYGGGSGGLMGLVSKTVHDGGRHVLGVIPSALLPEEVSGETLGEAKVVRDMHERKSEMAKHADAFIALPGGYGTIEELLEIIAWAQLGIHNKPVGLLNVDGYYNNLLSLFDKGVEEGFIDAAARNIFVLADNAGELLTKLTEAAAAAAAAVEGGDGDQVDGEATAAAAGLKRKRS

SEQ ID NO: 109 - DNA, 1062 bp, Oryza sativa (japonica cultivar-group)
  CDS (1)..(1062)
atgcgagaatccaccgttgggctgcagaaaggacgctgcagggggcgaaaacaaaaagaagaagaggggaaaaaaaagaaaagggcggaagcaagcgcgtcctccgaaggaaggaagaaaggcttggtagggcccaccagcacggccacgcctataaatgcgcgacacggaaagacggacggatttgtcctccgatccccccacacatcggacaccggcacgccactgcacccttgccttgggaggaagacgcgcgccaccatgaccctagcggccgcggcggaggcgccggcgccgacccatgcgttcgcgatcgcggcagaggaggtggcaatggagccgctgtcgacggcgacggctccggcggccatggaggaggagtccagtagtagtggcggcggcggcggggtaggggagcgacggtcgcggttccgccggatctgcgtctactgcggcagcgccaaggggaagaagcccagctaccaggacgccgccgtcgacctcggcaaggagctggtggagaggggcatagacctggtctacgggggtggatccatcggactcatgggcctggtctcgcatgcagttcatgctggaggtcgccatgtcattgggatcattccaaaatctctgatgcccagagaggtaactggagaacctgtaggggaagttagagccgtttctggtatgcacgagaggaaggccgagatggctcggtttgctgatgcttttattgctctaccaggtggctatggaaccttggaggagttgcttgaggtcattacttgggcacaacttggaatccataagaagccggttggtcttttgaatgttgacggattctacaaccctcttctatcgtttatcgacttggctgttaatgaaggcttcatcaccgaggaggctaggcgcatcatcatctccgctccaacagccaaggagctagttatgaaattggaggactatgtccccgagtatagcattggcttggtttgggaggaccagaaccagaagcaaaataacttggtccctgagctggactccgggatcacatcatcctga

SEQ ID NO: 110 - protein, 353 aa, Oryza sativa (japonica cultivar-group)
MRESTVGLQKGRCRGRKQKEEEGKKKKRAEASASSEGRKKGLVGPTSTATPINARHGKTDGFVLRSPHTSDTGTPLHPCLGRKTRATMTLAAAAEAPAPTHAFAIAAEEVAMEPLSTATAPAAMEEESSSSGGGGGVGERRSRFRRICVYCGSAKGKKPSYQDAAVDLGKELVERGIDLVYGGGSIGLMGLVSHAVHAGGRHVIGIIPKSLMPREVTGEPVGEVRAVSGMHERKAEMARFADAFIALPGGYGTLEELLEVITWAQLGIHKKPVGLLNVDGFYNPLLSFIDLAVNEGFITEEARRIIISAPTAKELVMKLEDYVPEYSIGLVWEDQNQKQNNLVPELDSGITSS

SEQ ID NO: 111 - DNA, 642 bp, Arabidopsis thaliana
  CDS (1)..(642)
atggaagagacaaaatcaagattcaggaggatctgtgtcttctgcggaagcagttccggcaacaaaaccacttatcacgacgctgctctccaactcgcccaccaactggtggagagaaacatcgatttggtgtatggaggaggaagcgtggggctaatgggtctcatttctcaagctgttcatgatggtggtcgtcatgttcttgggatcattccgaagtctctagcaccaagagagataaccggtgaatcaataggagaagttataacagtatcgactatgcaccaaaggaaggctgaaatgggtcgccaagcggatgccttcatcgcacttcctggtggatatgggacatttgaagagttgttggaagtcatcacctggtctcagcttgggattcacactaaaccggtgggactattgaacgtggatggattctacgattcactattgacgtttatagataaggcagtggacgaaggcttcgtctcctccaccgctcgccgtatcattgtctcggctccaaacgctcctcaattacttcaacttcttgaggagtatgttccaaaacacgacgattttgtatccaaaatggtgtgggacaataccacggatgctttcactttggaaggcgactcgttttag

SEQ ID NO: 112 - protein, 213 aa, Arabidopsis thaliana
MEETKSRFRRICVFCGSSSGNKTTYHDAALQLAHQLVERNIDLVYGGGSVGLMGLISQAVHDGGRHVLGIIPKSLAPREITGESIGEVITVSTMHQRKAEMGRQADAFIALPGGYGTFEELLEVITWSQLGIHTKPVGLLNVDGFYDSLLTFIDKAVDEGFVSSTARRIIVSAPNAPQLLQLLEEYVPKHDDFVSKMVWDNTTDAFTLEGDSF

SEQ ID NO: 113 - DNA, 648 bp, Arabidopsis thaliana
  CDS (1)..(648)
atggaaatcaaaggtgaatcgatgcaaaagtcaaagttcagaagaatctgtgtcttctgtggaagcagccaaggcaagaagagcagttaccaagatgctgctgttgacctcggcaacgaactggtttcaaggaatattgatctagtctatggaggtgggagcataggattgatgggtttggtttcacaagctgttcatgatggtggtcgtcatgttattggaatcattcccaagaccctcatgcctagagagttgactggtgaaacagtaggagaagtaagagcagttgcagatatgcaccaaaggaaagctgagatggctaagcactctgatgcttttattgccttaccaggtggttatggaacacttgaagaattgcttgaagtcataacttgggctcagcttggtatacatgacaagccggtgggtttgctcaatgttgatggatactacaactctctgctctcattcattgacaaagcagtcgaagaaggatttattagcccgactgctcgtgagatcatcgtctccgcacctactgctaaagagctggtgaaaaagctagaggaatatgcaccttgccatgaaagggttgcaacgaagctttgttgggagatggaacggattggttactcctctgaagagtga

SEQ ID NO: 114 - protein, 215 aa, Arabidopsis thaliana
MEIKGESMQKSKFRRICVFCGSSQGKKSSYQDAAVDLGNELVSRNIDLVYGGGSIGLMGLVSQAVHDGGRHVIGIIPKTLMPRELTGETVGEVRAVADMHQRKAEMAKHSDAFIALPGGYGTLEELLEVITWAQLGIHDKPVGLLNVDGYYNSLLSFIDKAVEEGFISPTAREIIVSAPTAKELVKKLEEYAPCHERVATKLCWEMERIGYSSEE

SEQ ID NO: 115 - DNA, 648 bp, Arabidopsis thaliana
  CDS (1)..(648)
atggaggtcaacaatgaaaccatgcaaaagtcaaagtttggaagaatctgtgtgttttgtggaagcagccaaggcaagaagagtagttaccaagatgctgctgtggatctaggcaacgaattggttttaaggaacattgatctagtctatggaggtggaagcataggtttgatgggtttggtttcgcaagctgttcatgatggtggtcgccatgttattggagttattcccaagacactcatgcctagagagttgaccggtgaaacagtaggagaagtaagagcagttgcagatatgcatcaaagaaaagcagagatggctagacactctgatgcttttattgctttaccaggtggatatggaacacttgaagagcttttggaggtcataacatgggctcagcttggaatacatgataaaccggtgggtttgctcaatgttgatggatactacaactctttgctctctttcattgataaagccgttgaagaaggcttcatcagtacaaacgcacgccagatcataatttctgcacctactgccaaggagcttgtaaagaagctggaggaatattcgccttgccatgaaagtgttgcgactaagctttgttgggagatagagcggattgactactcttctgaagactga

SEQ ID NO: 116 - protein, 215 aa, Arabidopsis thaliana
MEVNNETMQKSKFGRICVFCGSSQGKKSSYQDAAVDLGNELVLRNIDLVYGGGSIGLMGLVSQAVHDGGRHVIGVIPKTLMPRELTGETVGEVRAVADMHQRKAEMARHSDAFIALPGGYGTLEELLEVITWAQLGIHDKPVGLLNVDGYYNSLLSFIDKAVEEGFISTNARQIIISAPTAKELVKKLEEYSPCHESVATKLCWEIERIDYSSED

SEQ ID NO: 117 - DNA, 654 bp, Arabidopsis thaliana
  CDS (1)..(654)
atggaagagacaaaatcgagattcaagaggatctgtgtcttctgtggaagcagttccggcaaaaaaccttcataccaagaagctgccattcaattgggtaacgagttggtggagagaaggattgatttggtatacggaggtggtagcgtggggcttatgggtctcgtctctcaagctgttcatcatggtggtcgccatgttctaggggtcattccaaaaaccttgatgccaagagagataactggtgagaccatcggagaagttaaagccgtggccgatatgcatcaaaggaaagctgaaatggctcgccaagccgacgcattcattgcccttcctggtgggtatggtacgttagaagaattgctggaagtcattacatgggctcaactcggtatccaccgtaagccggtgggtcttcttaacgtggatggttactacaactcgctgttaacgtttattgataaggctgtggacgaaggatttatatccccaatggctcgtcgaatcatcgtctcagctccaaacgctaaagagttggttcgacaactcgaggaatatgaaccggagtttgatgagataacatcaaaattggtttgggatgaagtggaccggataagttatgtaccgggttcggaggtagctaccgctacgtaa

SEQ ID NO: 118 - protein, 217 aa, Arabidopsis thaliana
MEETKSRFKRICVFCGSSSGKKPSYQEAAIQLGNELVERRIDLVYGGGSVGLMGLVSQAVHHGGRHVLGVIPKTLMPREITGETIGEVKAVADMHQRKAEMARQADAFIALPGGYGTLEELLEVITWAQLGIHRKPVGLLNVDGYYNSLLTFIDKAVDEGFISPMARRIIVSAPNAKELVRQLEEYEPEFDEITSKLVWDEVDRISYVPGSEVATAT

SEQ ID NO: 119 - DNA, 564 bp, Bacillus halodurans C-125
  CDS (1)..(564): transl_table=11
atgaaaatcgccgtcttttgcggatcaagcaatggagcttctgacgtctataaggaaggggctcgacagcttggaaaggaattagctagaagaggaattaccctagtgtatggaggagctagtgtaggaatcatgggggctgttgcagattctgtccttgaagccggtggagaagtaatcggtgtcatgccacgtttccttgaagaaccggaaatttcacatcctcatttaaccaaacttattgtagttgagacgatgcacgagcggaaagcgaaaatggcagaactagcagacggatttcttgctttgcctggtggacctgggacgttagaagagttttttgagattttcacttgggctcaaattggattgcatcaaaaaccatgtggccttttaaatatcaatcattacttcgatccacttgttactttattacatcacatgtcgaatgaacaatttttgcatgagaagtaccgttccatggcgcttgttcatacagaccctatcttgctactagatcaattttcaacttatgagccaccgacagtcaaagcgtactcataa

SEQ ID NO: 120 - protein, 187 aa, Bacillus halodurans C-125
MKIAVFCGSSNGASDVYKEGARQLGKELARRGITLVYGGASVGIMGAVADSVLEAGGEVIGVMPRFLEEPEISHPHLTKLIVVETMHERKAKMAELADGFLALPGGPGTLEEFFEIFTWAQIGLHQKPCGLLNINHYFDPLVTLLHHMSNEQFLHEKYRSMALVHTDPILLLDQFSTYEPPTVKAYS

SEQ ID NO: 121 - DNA, 651 bp, Agrobacterium tumefaciens str. C58
  CDS (1)..(651): transl_table=11
gtgccgcatcgcacattgttccttccctccatgacggacaaaaatacagcgattcgatccatctgcgtttattgcggctcccagcccggacgtgacccggctcatatggaagcaggccgcgcgcttgggaaatccatagccgaaaacggcattcgcctcgtctacggcggcggcaccaagggcatcatgggcgcggttgccagcggcgttctctccaatggcggcgaagtgaccggcatcataccggaatttctggtcgatatggaggcaacacgccattctctcggacaattgaacgagcttgtcatcaccaaggacatgcatgagcgcaaacatatgatgttcgagcgctcggatgccttcgtgaccctgcccggcggcgtcggcacgctggaagagatcgtcgagatcatgacctgggcgcagctcggccgccatgccaagccgatggtcttcgccaatatcaacggtttctggaaccccatgctggaactggtgcagcacatgcgcgaccagggtttcatccaccgcgcccatcttctgaacccgctcatcgtcgacgaggtgaaggacatcgtgcccgccatcatcgaccgggcgctggcgcagcagaaccccgaaggcgatccttcggtaatttcccggctctag

SEQ ID NO: 122 - protein, 216 aa, Agrobacterium tumefaciens str. C58
MPHRTLFLPSMTDKNTAIRSICVYCGSQPGRDPAHMEAGRALGKSIAENGIRLVYGGGTKGIMGAVASGVLSNGGEVTGIIPEFLVDMEATRHSLGQLNELVITKDMHERKHMMFERSDAFVTLPGGVGTLEEIVEIMTWAQLGRHAKPMVFANINGFWNPMLELVQHMRDQGFIHRAHLLNPLIVDEVKDIVPAIIDRALAQQNPEGDPSVISRL

SEQ ID NO: 123 - DNA, 585 bp, Ralstonia solanacearum GMI1000
  CDS (1)..(585): transl_table=11
atgaaatcgatctgcgtctattgcggctccagcccgggcgagcgcccggaatacaaggccggcgccatcgcgctgggcaacgagatggtcgggcgcgggctcacgctggtctacggcggcggcaacatcggcctgatgggcatcgtggccgatgccgtgctgcggggcggcaacccggtcatcggcatcatccccaagtcgctggtgcgcaaggaggtcggccacaaagacgtgaccgagctgcacatcgtcgacagcatgcaccagcgcaagcagatgatggcggaccgcgccgacgccttcatcgccatgccgggcggcatcggcacctatgaagagctgttcgagaccttcacctggctgcagctcggctatcacggcaagccgatcggcctgctcaacgtggcgggcttctacgacaagctgctcgccttcatcgaccacgcggtggaggaaggcttcctcaagcggcaccatgccgacctgctgcacgtcagcgccgatcccgccgagctgatcgaccggctcgagcgcgcgccgcgccatccggtcgacaaatgggcggaacggcgcgagcgcacgtaa

SEQ ID NO: 124 - protein, 194 aa, Ralstonia solanacearum GMI1000
MKSICVYCGSSPGERPEYKAGAIALGNEMVGRGLTLVYGGGNIGLMGIVADAVLRGGNPVIGIIPKSLVRKEVGHKDVTELHIVDSMHQRKQMMADRADAFIAMPGGIGTYEELFETFTWLQLGYHGKPIGLLNVAGFYDKLLAFIDHAVEEGFLKRHHADLLHVSADPAELIDRLERAPRHPVDKWAERRERT

SEQ ID NO: 125 - DNA, 600 bp, Agrobacterium tumefaciens str. C58
  CDS (1)..(600): transl_table=11
attcgatccatctgcgtttattgcggctcccagcccggacgtgacccggctcatatggaagcaggccgcgcgcttgggaaatccatagccgaaaacggcattcgcctcgtctacggcggcggcaccaagggcatcatgggcgcggttgccagcggcgttctctccaatggcggcgaagtgaccggcatcataccggaatttctggtcgatatggaggcaacacgccattctctcggacaattgaacgagcttgtcatcaccaaggacatgcatgagcgcaaacatatgatgttcgagcgctcggatgccttcgtgaccctgcccggcggcgtcggcacgctggaagagatcgtcgagatcatgacctgggcgcagctcggccgccatgccaagccgatggtcttcgccaatatcaacggtttctggaaccccatgctggaactggtgcagcacatgcgcgaccagggtttcatccaccgcgcccatcttctgaacccgctcatcgtcgacgaggtgaaggacatcgtgcccgccatcatcgaccgggcgctggcgcagcagaaccccgaaggcgatccttcggtaatttcccggctctag

SEQ ID NO: 126 - protein, 199 aa, Agrobacterium tumefaciens str. C58
MRSICVYCGSQPGRDPAHMEAGRALGKSIAENGIRLVYGGGTKGIMGAVASGVLSNGGEVTGIIPEFLVDMEATRHSLGQLNELVITKDMHERKHMMFERSDAFVTLPGGVGTLEEIVEIMTWAQLGRHAKPMVFANINGFWNPMLELVQHMRDQGFIHRAHLLNPLIVDEVKDIVPAIIDRALAQQNPEGDPSVISRL

SEQ ID NO: 127 - DNA, 642 bp, Arabidopsis thaliana
  CDS (1)..(642)
atggagatagaatcaaagttcaagagaatatgtgtgttttgtggaagtagtgctggtaataaagtcagttacaaagatgctgctatcgaactcggaaccgaactggtatcgagaaatatcgatcttgtctatggtggagggagcattggtttaatgggtttgatttctcaagctgttttcaatggaggtcgccatgtcattggggttatccccaagacactaatgccaagagagataacaggagagacagtgggagaagtgaaggcagtagcagacatgcaccaaaggaaagctgaaatggctaagcactctgatgcttttatcgctttacctggtgggtatgggacacttgaagagcttcttgaagttatcacttgggcacagctaggcatccatgataaaccagtgggactgttgaatgtggaaggatactacaattcattgttatcattcatagacaaagcagtggaagaaggtttcatttcaccaactgctcgtcatatcattgtatctgctccttctgctaaagaacttgtcaagaaacttgaggattatgtaccaaggcatgagaaggtagcctcaaagaaaagctgggagatggagcaaatagggctaagtcccacttgtgaaatctcaagatga

SEQ ID NO: 128 - protein, 213 aa, Arabidopsis thaliana
MEIESKFKRICVFCGSSAGNKVSYKDAAIELGTELVSRNIDLVYGGGSIGLMGLISQAVFNGGRHVIGVIPKTLMPREITGETVGEVKAVADMHQRKAEMAKHSDAFIALPGGYGTLEELLEVITWAQLGIHDKPVGLLNVEGYYNSLLSFIDKAVEEGFISPTARHIIVSAPSAKELVKKLEDYVPRHEKVASKKSWEMEQIGLSPTCEISR

SEQ ID NO: 129 - DNA, 687 bp, Arabidopsis thaliana
  CDS (1)..(687)
atggaaatagtgaagtcgaggttcaagagggtttgtgtgttctgtggtagcagcagcggaaagagagagtgctacagtgatgccgccactgatctagctcaagagctggtgacgaggagattgaatcttgtgtatggaggaggaagcattggtctcatgggtttggtctcacaagctgttcatgaagctggaggacatgtactagggatcataccaaggactcttatggacaaagagataaccggagaaacatatggtgaggtaatagctgtggcggatatgcatgaaagaaaagccgaaatggcacgccactcggattgtttcattgctttaccaggtgggtatggaacactggaggagttattggaagtaatagcatgggcacaacttggaattcacgacaagcctgtgggtttgttaaatgtggatggttattacaattacctcctcactttcattgataaagccgttgatgatggctttatcaaaccatctcagcgtcacatctttgtctcagcccccaatgccaaagagcttgtccaaaaacttgaggcatacaagccagtgaatgatggagtcatagctaaatctaggtgggaggttgagaagaaagtgcaacagccgcaacaacagcaacaagtagtgttctgttctaacacaagcatgcagactgagattgccctttag

SEQ ID NO: 130 - protein, 228 aa, Arabidopsis thaliana
MEIVKSRFKRVCVFCGSSSGKRECYSDAATDLAQELVTRRLNLVYGGGSIGLMGLVSQAVHEAGGHVLGIIPRTLMDKEITGETYGEVIAVADMHERKAEMARHSDCFIALPGGYGTLEELLEVIAWAQLGIHDKPVGLLNVDGYYNYLLTFIDKAVDDGFIKPSQRHIFVSAPNAKELVQKLEAYKPVNDGVIAKSRWEVEKKVQQPQQQQQVVFCSNTSMQTEIAL

SEQ ID NO: 131 - DNA, 588 bp, Corynebacterium glutamicum ATCC 13032
  CDS (1)..(588): transl_table=11
atgacttcgcttttcgacgccccaaccctccaacgcgtcaccgttttcacgggctcggcgctcggcagttcctcgctgtacacgcaagcggctcaaaccttggcgaaaaccgcggtagaccgcggcatcgacttggtttacggtggcggaaaagtggggctcatgggtatcgtcgcggatgcgttcctggaatcaggtggcgaagcctttggcgtcatcacggaatcacttatgaagggtgagcttgggcatgaaaagctcaccgaacttgaaatcgttcctgatatgcacatccgcaagcgtcgcatggcagaacttggcgatggttttatcgccatgcccggtggcgccggcaccttggaagaacttttcgaggtctggacctggcaacagctgggcattcatcaaaagcccgtcgcactttatgatgtcgatggtttttggcagcccctgctggaaatgcttgagcagatgacccagcgtggatttatcaagcgagacttctttgagtgcctcatcgtggaatccgacccgcatgccctgctaaaggcaatgcagacctggactccaccagcaccaaaatggtaa

SEQ ID NO: 132 - protein, 195 aa, Corynebacterium glutamicum ATCC 13032
MTSLFDAPTLQRVTVFTGSALGSSSLYTQAAQTLAKTAVDRGIDLVYGGGKVGLMGIVADAFLESGGEAFGVITESLMKGELGHEKLTELEIVPDMHIRKRRMAELGDGFIAMPGGAGTLEELFEVWTWQQLGIHQKPVALYDVDGFWQPLLEMLEQMTQRGFIKRDFFECLIVESDPHALLKAMQTWTPPAPKW

SEQ ID NO: 133 - DNA, 687 bp, Xanthomonas campestris pv. campestris str. ATCC 33913
  CDS (1)..(687): transl_table=11
atgctgacgccggacctaggtccggcgtcatgcgttccggcttttgtttctgcttttacccattcccaattccctactcccgattctcatcccatgaaaagcatctgcgtctactgtggttccaatgccggcaacaagcctgcctatgccgagcgcgctatcgccctgggtgaccgcatcgccaaacaggggctgcgcctggtgtatggcggtggcaatgtcggcctgatgggcacggtggccaacgcggtgctggccgcaggtggcgaagtgaccggcgtgattccgcagcagctggccgattgggaagtggcgcatcgcgggctgaccacgctggaaatcgttggctccatgcatgagcgcaagatgcgcatgttcgagctgtcggatgcgttcgtcgccctgcccggtggctttggcaccatggaggagatcttcgagatgctgacctggcggcagctgggcatcggcaacaagccgtgcgcgttcctggacatcgaaggcttctacgcgccgctgatcggcatgatcgatcgcatggtcgaggaacgcttcctgcatccggatcagcgcagcgacctgtggtacggcgccgacatcgagcagatgctggagtggatgcagcactacacgccggcacaggcatcgaagtggatcgacgagaagcgccgctccaccctggtgtga

SEQ ID NO: 134 - protein, 228 aa, Xanthomonas campestris pv. campestris str. ATCC 33913
MLTPDLGPASCVPAFVSAFTHSQFPTPDSHPMKSICVYCGSNAGNKPAYAERAIALGDRIAKQGLRLVYGGGNVGLMGTVANAVLAAGGEVTGVIPQQLADWEVAHRGLTTLEIVGSMHERKMRMFELSDAFVALPGGFGTMEEIFEMLTWRQLGIGNKPCAFLDIEGFYAPLIGMIDRMVEERFLHPDQRSDLWYGADIEQMLEWMQHYTPAQASKWIDEKRRSTLV

SEQ ID NO: 135 - DNA, 594 bp, Xanthomonas axonopodis pv. citri str. 306
  CDS (1)..(594): transl_table=11
atgaaaagcatctgcgtctactgcggctccaatgccggcaacaaacccgcctatgtcgagcgcgcgattgcgttgggcgatcgcatcgccaagcagggcctgcgcctggtgtacggcggcggcaacgttggcttgatgggcaccgtggccaatgcagtgctggcggccggcggtgaagtgaccggggtgatcccgcagcaactggccgattgggaagtggcgcaccgcgggttgaccacgctggaaatcgtcggctccatgcatgagcgcaagatgcgcatgttcgagctgtccgatgcgttcgtggccctgcccggcggcttcggtaccatggaagagatcttcgagatgctgacctggcgccagctcggcatcggcaacaagccgtgcgcctttctggacatcgaaggtttctacgcaccgctgattggcatgatcgaccgcatggtcgaagagcgcttcctgcatccagaccagcgcgccgacctgtggtacggcgccgatatcgagcagatgctcgaatggatgcagcactacactccggcgcaggcgtcgaagtggatcgacgagaagcgtcgctccaccctggtgtaa

SEQ ID NO: 136 - protein, 197 aa, Xanthomonas axonopodis pv. citri str. 306
MKSICVYCGSNAGNKPAYVERAIALGDRIAKQGLRLVYGGGNVGLMGTVANAVLAAGGEVTGVIPQQLADWEVAHRGLTTLEIVGSMHERKMRMFELSDAFVALPGGFGTMEEIFEMLTWRQLGIGNKPCAFLDIEGFYAPLIGMIDRMVEERFLHPDQRADLWYGADIEQMLEWMQHYTPAQASKWIDEKRRSTLV

SEQ ID NO: 137 - DNA, 570 bp, Oceanobacillus iheyensis HTE831
  CDS (1)..(570): transl_table=11
atgaatttaaataatattgctatcttttgtgggtcaagtaatggaaccaatgagcggtatttaaaagcagccaatgacatgggaaaatacttggcagcaacgaatcgaaaactaatttatggcggtgcaaaagtaggatgcatgggggaattagcgaatgcgtctcttagtcatcacggatacgtcattggcgtgattcctcaaaaacttgttgatgttgaaattgctcatgaggatataactgaattacatactgttgctgatatgcatgaacgaaaagcaaaaatggcagaactcgcagatggttttattgcattacccggaggagccggaactctcgaggaatggtttgaagtctttacttggctacaattaggctaccacaaaaagccttgtggatttctaaatgtaaatgggttttatgatcctttaataagcatgttgaaaaacacggtcaaagaaggatttatgaaagaatcatacttagaattaattattagcgaccaagaccctaaaactttaattgaaaaaatggaagcttttgaaatgagttctacttcaaaatggtag

SEQ ID NO: 138 - protein, 189 aa, Oceanobacillus iheyensis HTE831
MNLNNIAIFCGSSNGTNERYLKAANDMGKYLAATNRKLIYGGAKVGCMGELANASLSHHGYVIGVIPQKLVDVEIAHEDITELHTVADMHERKAKMAELADGFIALPGGAGTLEEWFEVFTWLQLGYHKKPCGFLNVNGFYDPLISMLKNTVKEGFMKESYLELIISDQDPKTLIEKMEAFEMSSTSKW

SEQ ID NO: 139 - DNA, 588 bp, Pseudomonas putida KT2440
  CDS (1)..(588): transl_table=11
atgcccgtacgttccgtttgtgtgttctgcggcgccagcatgggcgccaaccctgcctaccgtgaagcagccgtcgcgctgggccaggccattgcccgccgcggcttgaccctggtgtatggcggtggcgcggtcggcttgatgggtgtggtggccgacgcggccatggcggccggtggcgaagtggtcgggatcatcccgcagagcctgctggacgctgaagtcggccacaagggcctgacccgcctggaagtggtggatggcatgcatgcgcgcaaggcccgcatggccgagctgagcgatgcattcattgccttgccgggtgggctgggtacgctggaggaactgttcgaagtgtggacctgggggcagctgggctatcacgccaagccgctcgggctactggatgtgaacggtttctacgacaagctgggcgggttcctcgaccatatcgtcgaagaaggtttcgtgcgcccgcaacaccgggcgatgttgctgctggggcagcagccggacgagctgctggaagggatggacagctttgtggcgccggtcgcgcctaagtgggtcgacaagcagcctgactga

SEQ ID NO: 140 - protein, 195 aa, Pseudomonas putida KT2440
MPVRSVCVFCGASMGANPAYREAAVALGQAIARRGLTLVYGGGAVGLMGVVADAAMAAGGEVVGIIPQSLLDAEVGHKGLTRLEVVDGMHARKARMAELSDAFIALPGGLGTLEELFEVWTWGQLGYHAKPLGLLDVNGFYDKLGGFLDHIVEEGFVRPQHRAMLLLGQQPDELLEGMDSFVAPVAPKWVDKQPD

SEQ ID NO: 141 - DNA, 615 bp, Bradyrhizobium japonicum USDA 110
  CDS (1)..(615): transl_table=11
atggcaccaatgagcacgatcaaaaccgtctgtgtctattgcggctccggccccggaaccaatccccgcttcaccgaaggcgccaaggcgttcggcaaggcgctcgccgagaacaacatccgcctggtctatggcggcggctcgctcggcctgatgggctcggtcgcaacctccgtcctcgataatggcggcaccgtcaccggcatcattcccgaattcctccggatgcgcgagaacgcgctgacgcgggtgcaggagatgatcgtcacccccgacatgcatgagcgcaagcggctgatgttcgagcgctccgacgccttcgtggcgctgccgggcggcgtcggcacgctggaggagctggtcgagcagttgacctggaagcaactcggccgtcacgccaagcccgtgctgctcgccaatatcgacaatttctgggagccgctgttctcgctgctgtcgcacatgcgccagaccgagttcatccgtgccggcctctcggtcgacatcctcaaggccgatcgggtcgaggagatcctgccgaagctgaaggccgccgtggcacagctcgccgaggcggaaaaagagctcgctccggaagtcgcgcgcaagctgtaa

SEQ ID NO: 142 - protein, 204 aa, Bradyrhizobium japonicum USDA 110
MAPMSTIKTVCVYCGSGPGTNPRFTEGAKAFGKALAENNIRLVYGGGSLGLMGSVATSVLDNGGTVTGIIPEFLRMRENALTRVQEMIVTPDMHERKRLMFERSDAFVALPGGVGTLEELVEQLTWKQLGRHAKPVLLANIDNFWEPLFSLLSHMRQTEFIRAGLSVDILKADRVEEILPKLKAAVAQLAEAEKELAPEVARKL

SEQ ID NO: 143 - DNA, 579 bp, Bacillus cereus ATCC 14579
  CDS (1)..(579): transl_table=11
atgagaaagatttgtgtgtttgcaggttctaatttaggggagagaccagaattcaaagagcaggcaattcagttaggtaaaatgtttgttgagaacgagtatgagcttgtatacggtggttcatgtgttggattaatgggagaagtagcaaacgaagttcttcgtttaggtggacgtgtaacaggtgttatgccgcgcggtctattccgaggagaaattgtgcatacaggattaacagaattaattgaagtagagacgatgcatgaacgtaaagcgaaaatggcagagcttgcggatgcttttattgcgcttccaggcggatacggaacgtttgaagaactatttgaagttgtatgttggtcacaaattggtatacataataagccggttggtttattaaacataaaaggtttttacggaccaattttgcaaatggttgaacgtgcagcagaagaaggatttatgaattcatcaaataaagaattgatcgtttcagctgagacagcagataaactaattcatgcaatccaaaattatgagcgtcctgttttgggaacgaagtggaagcaactatcatag

SEQ ID NO: 144 - protein, 192 aa, Bacillus cereus ATCC 14579
MRKICVFAGSNLGERPEFKEQAIQLGKMFVENEYELVYGGSCVGLMGEVANEVLRLGGRVTGVMPRGLFRGEIVHTGLTELIEVETMHERKAKMAELADAFIALPGGYGTFEELFEVVCWSQIGIHNKPVGLLNIKGFYGPILQMVERAAEEGFMNSSNKELIVSAETADKLIHAIQNYERPVLGTKWKQLS

SEQ ID NO: 145 - DNA, 639 bp, Chromobacterium violaceum ATCC 12472
  CDS (1)..(639): transl_table=11
atgacccggggccggaagattccggcccttgtttttttgagagaaacggaaaagaaaatgaaatcgatttgcctgttttgcggttccaacaaaggcggcaagccggagtacgaggaagctgcccgggtattcggccgcaccttggccgagcaaggcatcaccctggtgtacggcgcgggcaaggtgggcctgatgggcttggccgccgacgccgcgctggaagccgggggcaaggtgatcggcgtgatcccggaattcctcaaggccaaggaagtggcgcacctgggcctgaccgagctgcacatcaccgaaaccatgcatcagcgcaaggccatgatggcgcagctgtccgacggcttcatcgccttgccgggcggtttcggcactttcgacgagctgttcgagatcctgacctgggcgcagctgtcggtgcacaacaagccggtgggcgtgctggatgccggcggattctatcagcccttgcgggcgctggtggaacacgcggtcagcgaaggcttcgtccccaagggcaatcaggacctgttccgcatcgagcgcgatctgccggcgctgttgagctggatgcggcaataccagcccagccacgtcgccaagtggctggatctggcgcgtacttga

SEQ ID NO: 146 - protein, 212 aa, Chromobacterium violaceum ATCC 12472
MTRGRKIPALVFLRETEKKMKSICLFCGSNKGGKPEYEEAARVFGRTLAEQGITLVYGAGKVGLMGLAADAALEAGGKVIGVIPEFLKAKEVAHLGLTELHITETMHQRKAMMAQLSDGFIALPGGFGTFDELFEILTWAQLSVHNKPVGVLDAGGFYQPLRALVEHAVSEGFVPKGNQDLFRIERDLPALLSWMRQYQPSHVAKWLDLART

SEQ ID NO: 147 - DNA, 564 bp, Photorhabdus luminescens subsp. laumondii TTO1
  CDS (1)..(564): transl_table=11
atgaaaagtattgctgtttattgtggttcaagtctgggtatatctgaaatctataaagaaaatgtcattatcttcgcaaaggaattggttaaacgtaatcttacgctcatttatggtggcgcaagtgtgggcattatgggaactgttgctaatacggttttggcagagggtgggaaagtcattggtgttattccaacattattggagtcgcgggaaatatcacataaaaatctgacagaattatacgttgttgaaactatgcatcagcgtaaaaacaaaatgattgagttagctgatggttttgttgctttgcctgggggttttggcacattggaagagttcagtgaggtatttacctggagtcagattgggttacatacgaaaccttgcggtattcttaatattaataacttttatgatccgttaattgcgatgattaataaaatggctgatgaacaattcttacatgaaaaatatcgtcatatggcaataattgagcaagatcctgctatcttactcgatcgttttaatacttatcggtcgccatctataaaaacatattaa

SEQ ID NO: 148 - protein, 187 aa, Photorhabdus luminescens subsp. laumondii TTO1
MKSIAVYCGSSLGISEIYKENVIIFAKELVKRNLTLIYGGASVGIMGTVANTVLAEGGKVIGVIPTLLESREISHKNLTELYVVETMHQRKNKMIELADGFVALPGGFGTLEEFSEVFTWSQIGLHTKPCGILNINNFYDPLIAMINKMADEQFLHEKYRHMAIIEQDPAILLDRFNTYRSPSIKTY

SEQ ID NO: 149 - DNA, 636 bp, Rhodopseudomonas palustris CGA009
  CDS (1)..(636): transl_table=11
ttgacgctgtcatcccgcggtgccacatccgccaccatgagcaagatcaagaccgtctgcgtctattgcggctccggccccggcagcaatccccgatttctcgaagcagcgacagccttcggcaaggaactcgccgagcacggcgtcgggctggtgtacggcggcggcgcgatcgggctgatgggtgcggtcgctaacgcagtgctcgatcacggcggcgcggttaccggcatcattccaggctttctcagcgccaaggagattgcgctcggtcgcgtcagtgagctgatcgtcactgaagacatgcacgagcggaagcggctgatgttcgagcgatccgacgccttcgtagctttaccaggcggcatcggcacgctcgaagaactcgtcgagcagatgacctggcagcagcttggccgtcacaccaagccgatcctgatcgccgacatcgacggtttctggcagccgctactcgaactcttggcacacatgcgcagcaccgccttcatccgtcccaacctcgcggtcgaggttctgaaagcggacaaggtcgaagacatcctgccgaagctgcaagctgccgcagcgccgcagccgacgcgtgagatgccgccggggattgcggaacggctatag

SEQ ID NO: 150 - protein, 211 aa, Rhodopseudomonas palustris CGA009
MTLSSRGATSATMSKIKTVCVYCGSGPGSNPRFLEAATAFGKELAEHGVGLVYGGGAIGLMGAVANAVLDHGGAVTGIIPGFLSAKEIALGRVSELIVTEDMHERKRLMFERSDAFVALPGGIGTLEELVEQMTWQQLGRHTKPILIADIDGFWQPLLELLAHMRSTAFIRPNLAVEVLKADKVEDILPKLQAAAAPQPTREMPPGIAERL

SEQ ID NO: 151 - DNA, 591 bp, Geobacter sulfurreducens PCA
  CDS (1)..(591): transl_table=11
atgaaacgcatctgcgtgttttgcggttccagccccggcgcgcggccggcttatgccggggcggcgcgggagctcgggcggctgctggcggcaacgggaatcgatctggtctacggcggggcgagcgtcggcctgatggggattctggcccggaccgtgctcgatggcggcggccgggtgaccggcgtcatcccccggatgctggaggagaaggagatcgccctgaccaggctgagcgatctccgggtggtggagtccatgcatgagcgcaaggccctcatggcggagctgtcggacggattcatcgccctgcccggcgggatcggcactatcgaggagttcgttgaggtgctcacgtggctgcagttgggcatccacggcaagccgtgcggcctgctgaacagcgacggctattacgaccgcctgctggactttttcgaccacatggccgcggaagggttcatccggccggaatgccgcgaagccgtgctggtggaccgggacccggcggcgttgctgaagaagatgagtctctaccgcgcgcccgtcccggacaaggtggagtgggcgctgaagatggataacgcgtga

SEQ ID NO: 152 - protein, 196 aa, Geobacter sulfurreducens PCA
MKRICVFCGSSPGARPAYAGAARELGRLLAATGIDLVYGGASVGLMGILARTVLDGGGRVTGVIPRMLEEKEIALTRLSDLRVVESMHERKALMAELSDGFIALPGGIGTIEEFVEVLTWLQLGIHGKPCGLLNSDGYYDRLLDFFDHMAAEGFIRPECREAVLVDRDPAALLKKMSLYRAPVPDKVEWALKMDNA

SEQ ID NO: 153 - DNA, 579 bp, Bacillus cereus ATCC 10987
  CDS (1)..(579): transl_table=11
atgagaaagatttgtgtgtttgcaggttccaacttaggggagagaccagaatttaaagagcaggcaatagcgttagggaaaatgtttgttgagaacgattatgagcttgtatacggtggttcttgcgttggattaatgggagaagtagcaaatgaagtacttcgtttaggcgggcgtgtaacaggtgttatgccgcgcggtctattccgaggagaaatcgttcatacagggttaacagaattaattgaagtagaaacgatgcatgaacgtaaagcgaaaatggcagagctttcggatgctttcatcgcactgccggggggatacggaacgtttgaagagctatttgaagtagtatgttggtcacaaattggtatacataataagccagttggtttattgaacataaaagatttttatggaccaattttgcaaatggttgaacgcgcagcggaagaagggtttatgaatccgtcaaataaagagttaatcgtttcagctgagacagccgataaattaattcatgaaatacaaaattacgagcgtcctgttttaggaacgaagtggaagcagttatcataa

SEQ ID NO: 154 - protein, 192 aa, Bacillus cereus ATCC 10987
MRKICVFAGSNLGERPEFKEQAIALGKMFVENDYELVYGGSCVGLMGEVANEVLRLGGRVTGVMPRGLFRGEIVHTGLTELIEVETMHERKAKMAELSDAFIALPGGYGTFEELFEVVCWSQIGIHNKPVGLLNIKDFYGPILQMVERAAEEGFMNPSNKELIVSAETADKLIHEIQNYERPVLGTKWKQLS

SEQ ID NO: 155 - DNA, 798 bp, Magnaporthe grisea 70-15
  CDS (1)..(798)
atgacctctggcgacagcacatcattgcctggcactaccgccaacggcacagcaaatggtaccaatggaaccaacgggacaaataggcccaacggtaccaacggtaccaatggcaccaatggcaccaacggcgtgaagaagaccaaaatctgcgtctactgtggttcatcccccgggtttcacccagcacacatggaggctgcccgtgagcttgcccgggccatggccaggaacaacattggtttagtgtatggtggtggtacgattggtctcatgggagaagtggccaaaactttggtgtctctttcgggcccggaagccgtacatggcatcattcccgaagcgttgatcaagcacgagcgggacccgacatatacgtccacctgggggtcagatgagggagggctcgcgatacccgaagagaagacgtacggcatgaccacagtcgtcaaggacatgcacacgcggaagcaaatgatggcccaagaggttattgccggcggacccggaagcggtttcatcgccctacccggcggctacggcaccatggaggagctgctcgagacttgcacctggaaccagcttgggatccacgacaagggcgtctgcgtcctcaacgtcaacggcttctacgatggtctcatccagtggatcgccaagagccaggaggagggtttcatccgcaagggccagaccgagatcctcgtgtctgctgacaacgctgacgatgccatcaaggctttgagggattacagggtctcggagagcgtcctgaagctcagctggggcaaccaatga

SEQ ID NO: 156 - protein, 265 aa, Magnaporthe grisea 70-15
MTSGDSTSLPGTTANGTANGTNGTNGTNRPNGTNGTNGTNGTNGVKKTKICVYCGSSPGFHPAHMEAARELARAMARNNIGLVYGGGTIGLMGEVAKTLVSLSGPEAVHGIIPEALIKHERDPTYTSTWGSDEGGLAIPEEKTYGMTTVVKDMHTRKQMMAQEVIAGGPGSGFIALPGGYGTMEELLETCTWNQLGIHDKGVCVLNVNGFYDGLIQWIAKSQEEGFIRKGQTEILVSADNADDAIKALRDYRVSESVLKLSWGNQ

SEQ ID NO: 157 - DNA, 723 bp, Gibberella zeae PH-1
  CDS (1)..(723)
atgactgccgatagcacaattccatcgcaggctgccgttgcctcgcaaacaaacacatcaaacggccaacctagaaccaagatttgcgtctactgcggttctgccccaggcgcgagtcctgctcatattgaagctgctcgcgcacttggaaaggccatggccgagaacaacattgacttagtttacggaggtggaaccgtcggactcatgggcgaggtggcgaagagcctttgcgccatcaatggccctgactctgttcatggcatcatccctgaggctctggtcaagtatgagcgagacggcacttatggaactgtcaacgagcacaaccacattgtgcctgaggagtctgtctacggccacacaacggtcgtcaaggacatgcacactcgaaagaagctcatggccgaggaggttttcgctggtggtcccggcagcggcttcatcggattgagcggtgggtttggtaccatggaggagattttcgagacaaccacttggaaccagctcggaatccacaaccgtggcattgttctactcaacattgaaggttattgggacggcatcgttcagtggatggatcgtgctgctgagcagggctttgttaagcctgccaacaaggacattctggtgaatgccgatacccctgaaggtgcaatccaggctcttcgtgactacaaggtttcggatgccatctaccaactccaatggggtagtcagtga

SEQ ID NO: 158 - protein, 240 aa, Gibberella zeae PH-1
MTADSTIPSQAAVASQTNTSNGQPRTKICVYCGSAPGASPAHIEAARALGKAMAENNIDLVYGGGTVGLMGEVAKSLCAINGPDSVHGIIPEALVKYERDGTYGTVNEHNHIVPEESVYGHTTVVKDMHTRKKLMAEEVFAGGPGSGFIGLSGGFGTMEEIFETTTWNQLGIHNRGIVLLNIEGYWDGIVQWMDRAAEQGFVKPANKDILVNADTPEGAIQALRDYKVSDAIYQLQWGSQ

SEQ ID NO: 159 - DNA, 669 bp, Candida glabrata CBS 138
  CDS (1)..(669)
atgaagagcgtttgtgtttattgcggttcggctagcggggacaagagcttcgtagctgctgcggaggagctgggcgcgctgatccacgcgagacggtggtcgctggtgtacggcgggggcaccactgggctgatgggcggggtggcccgcggtgccatgggccccagcaaggacggctcggtgcatgggatcatcccggatgcgctggtggccaaggaacgtagcgatggtggtggcgctgggcaagagcaggagcaggagcaggaggagtacagcgagcctgtcaatggtaccacggtggtgtcgagcgactacggtgagaccacggtggtgccggacatgcacaccaggaagcggctgatggcgtctatgagcgatgcgttcgtggcgctgcccggcgggttcggcacgctggaggagctgctggagtgcgtcacttggtcgcagctggggatccacaacaagccggtggtggtgctgaacaccaacggctacttcgacgcgctgctgcggttcttccgggacgccatcgcggcggggttcatcagcgaggccaacggcagcatcttgcaagtggcctccacgccgcaggaggctatcgacctcatcgtcaactacaaagtcccagaagggcggttcaacttgaagtggtccgacgaagggttgtaa

SEQ ID NO: 160 - protein, 222 aa, Candida glabrata CBS 138
MKSVCVYCGSASGDKSFVAAAEELGALIHARRWSLVYGGGTTGLMGGVARGAMGPSKDGSVHGIIPDALVAKERSDGGGAGQEQEQEQEEYSEPVNGTTVVSSDYGETTVVPDMHTRKRLMASMSDAFVALPGGFGTLEELLECVTWSQLGIHNKPVVVLNTNGYFDALLRFFRDAIAAGFISEANGSILQVASTPQEAIDLIVNYKVPEGRFNLKWSDEGL

SEQ ID NO: 161 - DNA, 696 bp, Debaryomyces hansenii CBS767
  CDS (1)..(696)
atgacttcagactcgacaaaaacaactataaaaccagaaaagactgtatgcgtcttttgcggatcaagttttggaagcaaacccaagtttgctgaagatgcggccaagttgggaaaggtcttagctgataaaaactggggattggtttacggaggaggatctactggtctcatgggagcggttgctgaaggatgtgctactaatggaggatacgtacatggagttattccggaagcattgatttctagagaaagaaccaaggagacaagcgaagaagtgaacgataagttaaaatcttctattgataaccacaacggatcaactccaatcccagactcagaaaaatatggacacactactttagttaaagacatgcatactagaaaaagattaatgggtaaagaagcagacgcatttgttgcgcttcccggtggatacggaactttagaggagttgatggagatggttacgtggttccaattaaacatccataacaagcctattgttgtgtataacatggatggtttctacgataactttttgacgtttatccaggactccattgattcgcagtttgtatctgttaagaatggcgaaatcatgaaggtggccaccaccgccgacgaagtcgtggaagcgattgagaactacgtgattcctgagggtagattcgatttgaagtgggaagatatttag

SEQ ID NO: 162 - protein, 231 aa, Debaryomyces hansenii CBS767
MTSDSTKTTIKPEKTVCVFCGSSFGSKPKFAEDAAKLGKVLADKNWGLVYGGGSTGLMGAVAEGCATNGGYVHGVIPEALISRERTKETSEEVNDKLKSSIDNHNGSTPIPDSEKYGHTTLVKDMHTRKRLMGKEADAFVALPGGYGTLEELMEMVTWFQLNIHNKPIVVYNMDGFYDNFLTFIQDSIDSQFVSVKNGEIMKVATTADEVVEAIENYVIPEGRFDLKWEDI

SEQ ID NO: 163 - DNA, 636 bp, Yarrowia lipolytica CLIB122
  CDS (1)..(636)
atgaccattccacacaccaaaaccatttgcgtcttttgcggctcttcttcgggcaaagatgagtttgtgaccaaggctgccgacaagctcggaaagctgtttgttgaaaaccaatggggactcgtctacggcggaggaacgacgggaatcatgggatctgtggcccgagctgtcgctacccgaggtggctacgtcaacggtatcattcccgaggcgctgatccacaaggaacaaaacaaaatcaatcctcccaccgtggaggagtacggacagacaactgtggtgcaggacatgcatactcgaaagcggctcatgggccaggaggctgatgcgtttgtagcccttcccggtggctacggaaccgcagaggagctgtttgaggtcattacctggaaccagctgggaatccactcctgtcccatcgtgctgttcaacatcaacggtttctacgatggcctcattgaatggatcaacaaggccgtggaacaggggttcattggcaacggcgctcgagacattgttgttgtaggtgagacggccgaggaggtcattgagaagatcaaggagtacaaggtcgccgagggacggttcaccctcgactggggagaccagggccctaaaaagtgtgaccattag

SEQ ID NO: 164 - protein, 211 aa, Yarrowia lipolytica CLIB122
MTIPHTKTICVFCGSSSGKDEFVTKAADKLGKLFVENQWGLVYGGGTTGIMGSVARAVATRGGYVNGIIPEALIHKEQNKINPPTVEEYGQTTVVQDMHTRKRLMGQEADAFVALPGGYGTAEELFEVITWNQLGIHSCPIVLFNINGFYDGLIEWINKAVEQGFIGNGARDIVVVGETAEEVIEKIKEYKVAEGRFTLDWGDQGPKKCDH

SEQ ID NO: 165 - DNA, 744 bp, Aspergillus nidulans FGSC A4
  CDS (1)..(744)
atgggaattgccgagaccaaacggcccgtcgtctgtgtcttctgtggctccgtcgagggcataaaccccgcacacatggaaaccgctcgacgcctggctcagattttccacgaaaataatatacaactcgtctatggcggtggtacaaaaggcctgatgggcgagattgcacgcacgttagtttccctctcgggacccgaatctgtgcacggcatcattccccgcgccctagtaagcatcgaaccggggtataaacagaacggtaatggtactaccggtacaccctcgacgtcctccgcatccgctggtggcgcggggaaagtagccgagcgcgttgttggtgaggcgcagagcggtaacgtcccgtcgtcggagtacggcgtcaccacgatcgtggcagacatgcacacgcggaaacggcttatggcggaaaaggtgcgcgaaggaggaccaggaagtggctttgttgcacttgccggcgggtttggaactatcgaggaggtgatggagatgacgacatggaatcagttggggattcatcatttgggggttgtgctgttgaatgttgctgggtattgggatggcttgttggagtgggtgaggaactcagtgagggagggatatgtgtctaaggagaatgggagcatcctcgtggaggccaagacggttgaggaagtttggccgaagctggtgcagtatcaggttagcgagggaagatatcagttgaaatgggaggatgagtaa

SEQ ID NO: 166 - protein, 247 aa, Aspergillus nidulans FGSC A4
MGIAETKRPVVCVFCGSVEGINPAHMETARRLAQIFHENNIQLVYGGGTKGLMGEIARTLVSLSGPESVHGIIPRALVSIEPGYKQNGNGTTGTPSTSSASAGGAGKVAERVVGEAQSGNVPSSEYGVTTIVADMHTRKRLMAEKVREGGPGSGFVALAGGFGTIEEVMEMTTWNQLGIHHLGVVLLNVAGYWDGLLEWVRNSVREGYVSKENGSILVEAKTVEEVWPKLVQYQVSEGRYQLKWEDE

SEQ ID NO: 167 - DNA, 711 bp, Aspergillus nidulans FGSC A4
  CDS (1)..(711)
atggcctcgtcaaaacaagctgttgtctgtgtcttctgcggggcaacatctggcaaagatgctgcccacctcgaagccgcgcgagcgctggcgtatgaatttcacaagaacaatgtccagcttgtctacggtggtggaacgacaggactcatgggcgaggtcgcaaagacacttgtggccctctcagggccaaaatctgttcacggggtgattccccgtgcgctcgtgcaggtgtcagggaagcgtgagggggcggaagtgaacgggggcgccaaagctgctgagcgtgtcctcgctgcgggaactcacattgacgagaaggattgtattcccgagagcgagtacggggtcacgacgatcgtgcccgatatgcatacgcgtaagaggctcatggcgacaaaggtcatggaggggggacccgggtcgggatttgtttcactcgcgggtgggtttggtactatcgaagagctgatggagatgacgacgtggaatcagttggggatccatcatgtgggtgtggtcttgttgaatgtgaatgggtattgggacggcgtggtggcttggttgcaccatgcggtcagccagggattcatcagtgctgagaatgggaggatcctggccgagacgagcaatcccacagaggtcttgcccatgttgatgcggtaccagggcagctcggatcggatgctgctgaactggggggatgagtga

SEQ ID NO: 168 - protein, 236 aa, Aspergillus nidulans FGSC A4
MASSKQAVVCVFCGATSGKDAAHLEAARALAYEFHKNNVQLVYGGGTTGLMGEVAKTLVALSGPKSVHGVIPRALVQVSGKREGAEVNGGAKAAERVLAAGTHIDEKDCIPESEYGVTTIVPDMHTRKRLMATKVMEGGPGSGFVSLAGGFGTIEELMEMTTWNQLGIHHVGVVLLNVNGYWDGVVAWLHHAVSQGFISAENGRILAETSNPTEVLPMLMRYQGSSDRMLLNWGDE

SEQ ID NO: 169 - DNA, 669 bp, Candida albicans SC5314
  CDS (1)..(669): transl_table=12
atgactcaaaaatccattaaagtttgtgttttctgtggatcttcatttggtaacaaacctgtatacgctgaggaagccagtaaattcggtaaggcattagctgataagaaatgggggctagtttatggtggtgggtccaccggattaatgggagccgtggctagtggatgtgccactaatggtggatacgttcatggaatcatccctgaagcattaatcagtagagaaagaactgttgatgaagaagcattcaatgctaaattgaaatcatcaattgataatcatgatggctcaactccaattcctgattctaaacaatatggcaaaacaacactagttaaagatatgcatactcgtaaaagattaatggctcaagaagccgatgcatttgtggcattaccaggtgggattggactgattgatgaattggcagaaataactacttggtgtcaattaaatatccatggtaagccaattgtggtttataatgtcgatggttattatgataatttttttaaaatgattcaaggttttgttgattgtggatttttaagtgaaaaaaatggtcaaattattaaagttgctaattcagtggaagaggttcttgaaatcattgaaaattatgaaatcccagaaggtagattcaatttgaaatgggaaactacttag

SEQ ID NO: 170 - protein, 222 aa, Candida albicans SC5314
MTQKSIKVCVFCGSSFGNKPVYAEEASKFGKALADKKWGLVYGGGSTGLMGAVASGCATNGGYVHGIIPEALISRERTVDEEAFNAKLKSSIDNHDGSTPIPDSKQYGKTTLVKDMHTRKRLMAQEADAFVALPGGIGSIDELAEITTWCQLNIHGKPIVVYNVDGYYDNFFKMIQGFVDCGFLSEKNGQIIKVANSVEEVLEIIENYEIPEGRFNLKWETT

SEQ ID NO: 171 - DNA, 597 bp, Herminiimonas arsenicoxydans
  CDS (1)..(597): transl_table=11
atgaaatccctttgcgtctattgcggctcctccttcggggccaaacccgtttatgccgatgcagctcgcacactggctggagaaatggtcaggcaagatatagccctggtctacggcggcggcaacgtcggcctgatgggcgtcattgcaaatgaagtactgcgtttgggcggcacagcaaccggtgtaatcccgcaagccttgctggataaggaggtaggccacacgcaattgactcacttgcatgtcgtcaaggacatgcatgagcgcaaagccatgatggcggagttatcggatggattcattgccatgccgggcggcatcggcacactggaagaattatttgaagtgctgacctggtcacaactcggctttcatgaaaagccggttggggtattgaatgtcgatggcttctacgacggcctgatcgcttttttgcaaaaccaggtagcgcaaggttttgtaaaggccaatcaggctgcattgatgatgcatgaaaagagtgcatctgagctgctgcacagactgcagacgtttattcctcaaccaagcaccaaagtactggatgcgcttgctgctaaaacgctgctactctga

SEQ ID NO: 172 - protein, 198 aa, Herminiimonas arsenicoxydans
MKSLCVYCGSSFGAKPVYADAARTLAGEMVRQDIALVYGGGNVGLMGVIANEVLRLGGTATGVIPQALLDKEVGHTQLTHLHVVKDMHERKAMMAELSDGFIAMPGGIGTLEELFEVLTWSQLGFHEKPVGVLNVDGFYDGLIAFLQNQVAQGFVKANQAALMMHEKSASELLHRLQTFIPQPSTKVLDALAAKTLLL

SEQ ID NO: 173 - DNA, 582 bp, Burkholderia vietnamiensis G4
  CDS (1)..(582): transl_table=11
atgaaggcagtctgcgtgtattgcggctcgtcgtccggcgtgcggcccgtctatgcggacgccgcgcgcgcgttcggccgtgcgctcgtcgcggcggacctcacgctcgtctacggcggcgggcgcgtcggcctgatgggcacgatcgccgacgaagtgatggcggccggcggccgtgcggtcggcgtgattcccgaactgctggtcgacaaggaagtcggccatacggggctgtccgagctgcacgtcgtcccggacatgcaccaccggaagaagatgatggccgacctcgccgacgcattcgtcgcgatgcccggcggcgccggcacgctcgaggagatgttcgaggtctacacctgggcgcaactcggctatcaccgcaagccggtcgcgctgtacaacatcgattcgttctacgacccgctgatcgcgatgctgcgccatacggtcgacgaaggcttcatgcggccgacctatttcgacaccctgtgcatcggcgccgaaccggtcgcgctgatcgagcagctacgccgctaccagccgcccgcgcgcgacaagtgggcgcccgacgccgccaaataa

SEQ ID NO: 174 - protein, 193 aa, Burkholderia vietnamiensis G4
MKAVCVYCGSSSGVRPVYADAARAFGRALVAADLTLVYGGGRVGLMGTIADEVMAAGGRAVGVIPELLVDKEVGHTGLSELHVVPDMHHRKKMMADLADAFVAMPGGAGTLEEMFEVYTWAQLGYHRKPVALYNIDSFYDPLIAMLRHTVDEGFMRPTYFDTLCIGAEPVALIEQLRRYQPPARDKWAPDAAK

SEQ ID NO: 175 - DNA, 579 bp, Bacillus anthracis str. Sterne
  CDS (1)..(579): transl_table=11
atgagaaagatttgtgtgtttgcaggttccaacttaggggagagaccagagttcaaagagcaggcgatagcgttaggaaaaatgtttgttgagaacgagtacgagcttgtatacggtggttcttgcgtcggattaatgggagaagtagcaaatgaagttcttcgtttaggtggtcgtgtaacaggtgttatgccgcgcgatctattccgaggagagatcgttcatacagggttaacagaattaattgaagtagaaacgatgcatgaacgtaaagcgaaaatggcagagcttgcggatgctttcattgcactgccaggcggatatggaacgtttgaagagctatttgaagcagtatgttggtcacaaattggtatacataataagccagttggtttattgaacataaaagatttctacggaccaattctgcaaatggttgaacgtgcagcagaagaaggattcatgaatccatcgaataaagagttaatcgttgccgctgaaacggcagatgcactcattcataagatacaaaattacgagcgtcctgttttaggaacgaagtggaagcaactatcataa

SEQ ID NO: 176 - protein, 192 aa, Bacillus anthracis str. Sterne
MRKICVFAGSNLGERPEFKEQAIALGKMFVENEYELVYGGSCVGLMGEVANEVLRLGGRVTGVMPRDLFRGEIVHTGLTELIEVETMHERKAKMAELADAFIALPGGYGTFEELFEAVCWSQIGIHNKPVGLLNIKDFYGPILQMVERAAEEGFMNPSNKELIVAAETADALIHKIQNYERPVLGTKWKQLS

SEQ ID NO: 177 - DNA, 579 bp, Bacillus thuringiensis serovar konkukian str. 97-27
  CDS (1)..(579): transl_table=11
atgagaaagatttgtgtgtttgcaggttccaatttaggggagagaccagagttcaaagagcaggcaatagcgttaggaaaaatgtttgttgagaatgattatgagcttgtatacggtggttcttgcgtcggattaatgggagaagtagcaaacgaagttcttcgtttaggcgggcatgtaacaggtgttatgccgcgcggtctatttcgaggagaaatcgttcatacagggttaacagaattaattgaagtagaaacgatgcatgaacgtaaagcgaaaatggcagagcttgcggatgctttcattgcactgccaggcggatatggaacgtttgaagagctatttgaagcagtatgttggtcacaaattggtatacataataagccagttggtttattgaacataaaagatttctacggaccaattctgcaaatggttgaacgtgcagcagaagaaggattcatgaatccatcgaataaagagttaatcgttgccgctgaaacggcagatgcactcattcataagatacaaaattacgagcgtcctgttttaggaacgaagtggaagcaactatcataa

SEQ ID NO: 178 - protein, 192 aa, Bacillus thuringiensis serovar konkukian str. 97-27
MRKICVFAGSNLGERPEFKEQAIALGKMFVENDYELVYGGSCVGLMGEVANEVLRLGGHVTGVMPRGLFRGEIVHTGLTELIEVETMHERKAKMAELADAFIALPGGYGTFEELFEAVCWSQIGIHNKPVGLLNIKDFYGPILQMVERAAEEGFMNPSNKELIVAAETADALIHKIQNYERPVLGTKWKQLS

SEQ ID NO: 179 - DNA, 618 bp, Acinetobacter sp. ADP1
  CDS (1)..(618): transl_table=11
atgaatagcgtagttaaaatgaccttagagttgaatagtaaagacaaaacaacccaacctttgattgccttatattgtggatcacgcgccggaaataaacctatttatcgagaaaaagccattgaactggcacaaggtattgccgaacagggctttggtatcgtctacggtggagccagtattggcctgatgggacaagtggcagatacagtcctcgaaaacgctggtgaagtagttggtgtcattcccgagttcatgctcgattatgaagtcgctcactccaaactgacagaattacacgtcgtacaaaccatgcatgaacgtaaagccatgatggcagatcgcgccaatgcatttattgcattacctggtggcctgggcacctttgaggaaatcttggaaattgccacttgggggcaattaaatcagcatcaaaaacccatgattttatataatgttaatggattttatgaagcgctgattgctcagcttgaccatgccgttgaggaaggattcttgccaccccaacatcgcgccaagctgatcgtttgtcaaagtcttgaagagatctataccgctattaagaatctcaatgttccgagtggctttatggcctaa

SEQ ID NO: 180 - protein, 205 aa, Acinetobacter sp. ADP1
MNSVVKMTLELNSKDKTTQPLIALYCGSRAGNKPIYREKAIELAQGIAEQGFGIVYGGASIGLMGQVADTVLENAGEVVGVIPEFMLDYEVAHSKLTELHVVQTMHERKAMMADRANAFIALPGGLGTFEEILEIATWGQLNQHQKPMILYNVNGFYEALIAQLDHAVEEGFLPPQHRAKLIVCQSLEEIYTAIKNLNVPSGFMA

SEQ ID NO: 181 - DNA, 600 bp, Acinetobacter sp. ADP1
  CDS (1)..(600): transl_table=11
atggtaaaaaaatttatgaattctgtttgtattttctgtggttctgctgttggtacagatccggtctttattcaggctgctcaaagtactggaaaacgcattgccgaacaaggtaaaacactggtgtatggtggtgggcgttctggcttgatgggtgttgttgcagacagtgctttgcaggcaggtgggcatgtgattggtgtgataccaacagcgctggttgatcgtgagttggctcatccacatctgaccgaattgcatgtcgtaaaaaatatgcacgaacgtaaaaccaaaatggcagaactctcggacgggtttattgctttacctggtggcgctgggactttggaagaaatttttgagcagtggacatgggcacagctgggtattcaccaaaaaccatgtggatttttgaatatcaaagggttctacgatgatttactgaaaatgattcaagggactgtcgactacggttttacccaatcacgttttgcagaaaagctgatcgcctctgatgatattgaaattattctgaatcagtttgagcattatctggcgcctacaccaaaatggggggatcatgccaaagttcatccttga

SEQ ID NO: 182 - protein, 199 aa, Acinetobacter sp. ADP1
MVKKFMNSVCIFCGSAVGTDPVFIQAAQSTGKRIAEQGKTLVYGGGRSGLMGVVADSALQAGGHVIGVIPTALVDRELAHPHLTELHVVKNMHERKTKMAELSDGFIALPGGAGTLEEIFEQWTWAQLGIHQKPCGFLNIKGFYDDLLKMIQGTVDYGFTQSRFAEKLIASDDIEIILNQFEHYLAPTPKWGDHAKVHP

SEQ ID NO: 183 - DNA, 576 bp, Bacillus licheniformis ATCC 14580
  CDS (1)..(576): transl_table=11
gtgaaaacggtatgcgtatattcaggatcaaatatgggggcggacccggagtacaagaagaaagctgcagagcttggcgtttatattgccgagaaggggcttcgccttgtttacggaggatcgagaatgggattgatgggcgtgattgcggataccgtattggaaaacggcggggaagtcgtcggcgttatgccgaaaggcctttttacaggggaaatcgttcatcagcagttgacggagctgatcgaagtgagcggcatgcatgagcgcaaagcgaaaatgagtgaattagctgacggctttatcgcgatgcccggaggcttcggcacgtttgaagagctgtttgaagtgctctgctgggcgcagatcggcatccatcaaaagccgatcggactttacaatgtgaacggctattttgaaccccttcttaaaatgctcgaatacagcgttcaagaaggcttttcgaacaaatcgcaccttgagctgattcatgcttcggcaagccctgcggagttgatcgggaacatgaatgattatcgctaccctgtcctcgagaaaaagtggaaggatttatag

SEQ ID NO: 184 - protein, 191 aa, Bacillus licheniformis ATCC 14580
MKTVCVYSGSNMGADPEYKKKAAELGVYIAEKGLRLVYGGSRMGLMGVIADTVLENGGEVVGVMPKGLFTGEIVHQQLTELIEVSGMHERKAKMSELADGFIAMPGGFGTFEELFEVLCWAQIGIHQKPIGLYNVNGYFEPLLKMLEYSVQEGFSNKSHLELIHASASPAELIGNMNDYRYPVLEKKWKDL

SEQ ID NO: 185 - DNA, 588 bp, Methylococcus capsulatus str. Bath
  CDS (1)..(588): transl_table=11
gtggaactgaaaagcgtctgtgtctattgcggctcgagtgtcggggagcggccggaatacctcggcgaggcccgcaggttcgggcggctgctggcggagcgcggtatccgcctggtttatggcggagccagtgtggggttgatgggcgcagtcgccgacgcggctctcgccgccggcggggaagtgatcggcgtgatcccccaggcgctggtcgccaaggaaatcgctcattccggactgacggaactgcgggtgaccgcctccatgcacgaacgcaaggcccggatggccgagctgtcggatggcttcgttgccctgcccggtggcatcggcactttcgaggaactgttcgaggcctggacctgggctcagctcggtatacaccacaagccctgcgccttgctgaacgtcgccggctactacgaccggctggtggcgttcctggagcacgcggcggccgagggtttcatgcggcgcctgcaccgttccatgctgctggtggcgcggcagccggaagagttgctcgaggtcttcgcggcctatcgtccgcccgaggtggaaacctgggtgcgggccgatgagtcttga

SEQ ID NO: 186 - protein, 195 aa, Methylococcus capsulatus str. Bath
MELKSVCVYCGSSVGERPEYLGEARRFGRLLAERGIRLVYGGASVGLMGAVADAALAAGGEVIGVIPQALVAKEIAHSGLTELRVTASMHERKARMAELSDGFVALPGGIGTFEELFEAWTWAQLGIHHKPCALLNVAGYYDRLVAFLEHAAAEGFMRRLHRSMLLVARQPEELLEVFAAYRPPEVETWVRADES

SEQ ID NO: 187 - DNA, 582 bp, Bacillus clausii KSM-K16
  CDS (1)..(582): transl_table=11
ttggaaatacaatcgttagcggtgttttgtgggtctagtgctggcaaagatccagtttatatcgaacaggcgacagcctttggcaaactcctcgccgaaaatgaaataacccttgtttatgggggagcccaagtaggttgtatgggggccgttgccaatgcttgcttgcaagcagggggacgtgtcataggtgtaattcccaaaaaactacaaaatgtagagattgcacatgacaaattgtctgagctatatgttgtcgatacgatgcacgagcggaaagcgcttatggctgagcatgcagatgcctttgttgccttgccaggaggagcgggaacgcttgaagaatggtttgaagtgtttacttggatccagctagattaccatcaaaagccatgcagtttgttaaacgtagccgatttctttaatccgcttttggccatgcttgatcatacgattgaacaagggtttatggctgaagcgtatcgagatttgtttatcgtcgagaaagaaccgcaagcgttattggaacggttaaaagggtatcgtcacaagcatgtatcaaaatggacagagaatggatga

SEQ ID NO: 188 - protein, 193 aa, Bacillus clausii KSM-K16
MEIQSLAVFCGSSAGKDPVYIEQATAFGKLLAENEITLVYGGAQVGCMGAVANACLQAGGRVIGVIPKKLQNVEIAHDKLSELYVVDTMHERKALMAEHADAFVALPGGAGTLEEWFEVFTWIQLDYHQKPCSLLNVADFFNPLLAMLDHTIEQGFMAEAYRDLFIVEKEPQALLERLKGYRHKHVSKWTENG

SEQ ID NO: 189 - DNA, 600 bp, Dechloromonas aromatica RCB
  CDS (1)..(600): transl_table=11
atgaaacgaatctgcgtcttctgtggctccaacgccggccacaacccgctctaccgtaccgaggcggaaaagctcggccgcttgctggccgcgcgcggcatcgaactggtctatggcgccggcaacatcggcctgatgggcgcggtggcggatgcctgcctggaagccggcggcacggtcatcggcatcattccggaagccctgatgggcaaggaagtggccgggcgcgctgtcgatcaccgggcgctgacgcggatcgaagtcgtcgattcgatgcacacgcgcaaggcccggatggccgagttgtccgatggcttcatcgccctgcccggcggcttcggcaccttcgaggaattctgcgaaatcctgacctggggccagctcggcttccacgtcaagccgatgggcctgctcaacgtcaatggcttctacgacccgctgctcggcctgttcgaccacgcggtgcaggaaggcttcctgcgcgcccagaaccgggcgatggcgttggccgataccgatatcgaacacctgctcgacgcgatggccgcctaccagccggagccagtcagcaaatggctcaaagaggaaaagcagttgtag

SEQ ID NO: 190 - protein, 199 aa, Dechloromonas aromatica RCB
MKRICVFCGSNAGHNPLYRTEAEKLGRLLAARGIELVYGAGNIGLMGAVADACLEAGGTVIGIIPEALMGKEVAGRAVDHRALTRIEVVDSMHTRKARMAELSDGFIALPGGFGTFEEFCEILTWGQLGFHVKPMGLLNVNGFYDPLLGLFDHAVQEGFLRAQNRAMALADTDIEHLLDAMAAYQPEPVSKWLKEEKQL

SEQ ID NO: 191 - DNA, 585 bp, Ralstonia eutropha JMP134
  CDS (1)..(585): transl_table=11
gtgaaatccgtttgcgtgtattgcggttccagccccggcaaccgccccgaatatgccgacgccgcatgtgcgctcggcaaggctctcgtcgaaaacggcatgtcgctggtctacggtggcggcaaggtcggcttgatgggcatcgttgccgatgccgtgctcgagcatggcggcagcgccatcggcatcattcccgacgcgctgatgcagaaggaagtcggccatcgcggcctgaccgagttgcatgtcgtgcgcaatatgcacgagcgcaagcagatgatggccgaccgcgccgatgccttcatcgccatgcccggcggcgtcggcaccttcgaggaactgttcgagaccttcacatggctgcagctgggctaccacgccaagccggtcggcctgctcaatgtggcgggcttctatgacggcatgctcggcttcatgtcgcatgccgtgcaggaaggcttcctcaagcaggtgcatgccgacctgctgcgcgtggccgacacgccggccgcgctgctggcaaagctggccgacgcgccgcgcgtgcgcgtcgacaagtggcaggaacaccgcgacgagacctga

SEQ ID NO: 192 - protein, 194 aa, Ralstonia eutropha JMP134
MKSVCVYCGSSPGNRPEYADAACALGKALVENGMSLVYGGGKVGLMGIVADAVLEHGGSAIGIIPDALMQKEVGHRGLTELHVVRNMHERKQMMADRADAFIAMPGGVGTFEELFETFTWLQLGYHAKPVGLLNVAGFYDGMLGFMSHAVQEGFLKQVHADLLRVADTPAALLAKLADAPRVRVDKWQEHRDET

SEQ ID NO: 193 - DNA, 588 bp, Pseudomonas fluorescens PfO-1
  CDS (1)..(588): transl_table=11
atgtctctcacatccgtttgtgtattttgcggtgccaacgctggcaccatcccggcgtacaccgaagccgcgatcgccctcggcacggctatcgccgagcgtaagctgacgctggtctacggcggtggcgccgtcggcctgatggggattatcgctgacgccgcgctggcggccggtggcgaggtgatcggcatcatcccgcagagcctgatggacaaggaaatcggtcacaagagcctgacgcgtctggaagtggtcgacggcatgcacgcgcgcaaggcgaggatggccgaactcagcgatgcgttcatcgccctgcccggtggcctcggcaccctggaagagttgttcgaagtctggacctggggccagctcggctaccacggcaagccgctcggcctgctcgaggtgaacggtttctacagcaaactcactgcatttctcgatcacatcgtcggcgaaggcttcgttcgcgcgccacaccgtgacatgctgcaagtgagcgaatcgccgcaaacgctgctcgaagccctcgatcaatggcagccgaccgtcacgccaaagtgggtcgaccagaaacccggttaa

SEQ ID NO: 194 - protein, 195 aa, Pseudomonas fluorescens PfO-1
MSLTSVCVFCGANAGTIPAYTEAAIALGTAIAERKLTLVYGGGAVGLMGIIADAALAAGGEVIGIIPQSLMDKEIGHKSLTRLEVVDGMHARKARMAELSDAFIALPGGLGTLEELFEVWTWGQLGYHGKPLGLLEVNGFYSKLTAFLDHIVGEGFVRAPHRDMLQVSESPQTLLEALDQWQPTVTPKWVDQKPG

SEQ ID NO: 195 - DNA, 582 bp, Burkholderia sp. 383
  CDS (1)..(582): transl_table=11
atgaaggcagtgtgtgtttactgcggctcgtcgtccggcgtgcggcccgtctatgccgacgccgcgcgcgcattcggccgcgcgctcgtggatgcgggcctcacgctcgtctacggcggcggccgggtcggcctgatgggcgtgatcgccgacgaagtgatggcggccggcggccgtgcggtcggcgtgatccccgaactgctcgtcgacaaggaagtcggccatacggggctgtcggaactgcacgtcgtgcccgacatgcaccaccgcaagaaaatgatggccgacctctccgacgcgttcgtcgcgatgcccggcggcgccggcacgctcgaggagctcttcgaggtctacacgtgggcgcagctcggctatcaccgcaagcccgtcgcgctctacaacatcgattcgttctacgatccgctgatcgcgctgctgcgccatacggtcgacgagggcttcatgcgtccggcctatttcgacgcactgtgcgtcgaatcggaacccgtcgaactgatcgagcgactgcgtcgctaccagccgcccgttcacgacaagtgggcgcccgacgcagccaagtaa

SEQ ID NO: 196 - protein, 193 aa, Burkholderia sp. 383
MKAVCVYCGSSSGVRPVYADAARAFGRALVDAGLTLVYGGGRVGLMGVIADEVMAAGGRAVGVIPELLVDKEVGHTGLSELHVVPDMHHRKKMMADLSDAFVAMPGGAGTLEELFEVYTWAQLGYHRKPVALYNIDSFYDPLIALLRHTVDEGFMRPAYFDALCVESEPVELIERLRRYQPPVHDKWAPDAAK

SEQ ID NO: 197 - DNA, 579 bp, Synechococcus sp. CC9605
  CDS (1)..(579): transl_table=11
atgaggggatcacggccaggcgccatgaatcggatcgctgtgtattgcggctcctcgagcggcgactcgagcggcgactcgagcctgttcaaacgtgctgccactgagctgggtgcactgattgcctcccagggcatggccctggtttacggcggtgctcgcattggcctaatgggcgctgttgctgatgcagctttggcctctggagggaaggtgatcggggtgattcccgaggcgctaacgcaggatgaagtggtgcacaccggtttgacccatctcgaggttgtggcatcgatgcacgagcgcaaagcgcggatgctcgatctggccgatgcagccgttgccatgcccggaggcctggggaccctcgacgagttgtttgaagctttgacctgggctcagcttcgttttcatgccaagccgatcggcatgctcaacatcgatggctacttcgatgcgctgcttggctttctggatcacagcgttgcgacgggatttctttcggagcggaatcgcgagctcctcctggatgcaacaacgccagaattgctcatctatcgactcctcaacgcgtcctga

SEQ ID NO: 198 - protein, 192 aa, Synechococcus sp. CC9605
MRGSRPGAMNRIAVYCGSSSGDSSGDSSLFKRAATELGALIASQGMALVYGGARIGLMGAVADAALASGGKVIGVIPEALTQDEVVHTGLTHLEVVASMHERKARMLDLADAAVAMPGGLGTLDELFEALTWAQLRFHAKPIGMLNIDGYFDALLGFLDHSVATGFLSERNRELLLDATTPELLIYRLLNAS

SEQ ID NO: 199 - DNA, 582 bp, Geobacter metallireducens GS-15
  CDS (1)..(582): transl_table=11
atgaaacgtatctgcgtcttctgcggttccagccccggcaggaaccccgtctatcgcgccgccgccgaggcgatgggccggcttctggcccgggaggggatcggcctcgtctacggcgggtcgagtatcggcctcatgacggccgcggccgacgcggccctggcagccggcggcgaggtgatcggcgtcatcccccgctgcctggaggccaaggagatcgcccaccccgggctctcggccctccacgtggtggagaccatgcatgagcgcaaggccctcatggccgggctggccgacggctttgtcgcccttcccggcggcatggggactttcgacgagtttttcgaagtggtcacctgggcacagctcggcatccacgccaagccgtacggcctcttgaacgtggcggggtactacgaccggctgaccgcgtttctcgatcacaccgtggccgagggattcgtcaagaaggagctccgggagatgatcgtcgtggaagaacgccccgatgcgctgctagagcgcttccgcgcctaccggccgccggtggcggaaaagtggctcgatctgggaagggtgtga

SEQ ID NO: 200 - protein, 193 aa, Geobacter metallireducens GS-15
MKRICVFCGSSPGRNPVYRAAAEAMGRLLAREGIGLVYGGSSIGLMTAAADAALAAGGEVIGVIPRCLEAKEIAHPGLSALHVVETMHERKALMAGLADGFVALPGGMGTFDEFFEVVTWAQLGIHAKPYGLLNVAGYYDRLTAFLDHTVAEGFVKKELREMIVVEERPDALLERFRAYRPPVAEKWLDLGRV

SEQ ID NO: 201 - DNA, 594 bp, Desulfovibrio desulfuricans G20
  CDS (1)..(594): transl_table=11
atgcacaccattaacagcgtatgtgtttactgcggttccaatccgggactgcgtacggaatatatggatacggcgcggcaactgggcaaaactcttgccatgcgccggatgacactggtgtacggcggctccgccaccggtctgatgggagccgtggcagacggcgtgctggaacacggcggcagggccgtaggcgtcattcccgcacgcatcgccggacgcatcgggcacagcggccttaccgaacgccacgtggtggaaaccatgcatgaacgcaaacagcgcatgtgcgatctggctgacgccttcatcgccctgccggggggcatcggcacgctggaagaagttttcgagatgctcacgtgggcacagctgggctttcaccacaaacccgtaggcctgctgaatgtgcagggctattacgacgggcttgtacagttcacccgccatatgcaggacgaacgctttataaaacaggaccaccgcgacatgctgctggtggcacaaaacgccgcagcgctgctggaccgcatggcagcatggcagcccgtatgcagccccaaatggtttgacgaggcgctggcaaaaagctga

SEQ ID NO: 202 - protein, 197 aa, Desulfovibrio desulfuricans G20
MHTINSVCVYCGSNPGLRTEYMDTARQLGKTLAMRRMTLVYGGSATGLMGAVADGVLEHGGRAVGVIPARIAGRIGHSGLTERHVVETMHERKQRMCDLADAFIALPGGIGTLEEVFEMLTWAQLGFHHKPVGLLNVQGYYDGLVQFTRHMQDERFIKQDHRDMLLVAQNAAALLDRMAAWQPVCSPKWFDEALAKS

SEQ ID NO: 203 - DNA, 582 bp, Novosphingobium aromaticivorans DSM 12444
  CDS (1)..(582): transl_table=11
gtgaaacgcctcgccgtctattgcggctccgcttcgcccgccgatggccgttacgtgacgcttgcgcgcgaagtgggccaggaactggcccggcggggcatcggcgtggtctacggcggcgggcggctgggcctgatgggagcggtggcctatggcgcgctcgacgcgggcggcgaagtgatcgggataattcccgaagcgctggtcaacagcgaggtcgcgaaccacgactgtaccgaacttcacgtcgtatccggcatgcacgaacgcaagaagcggttcaccgacctgtcggacggcttcctgacgatcccgggcggtgtcggcacgatggacgagctgtgggaggcgatgagctgggcgcagctcggctatcacgcaaagccggtgggcctgctcaacgccttcggcttctacgaccacctgctggctttcaaccgccacatgatcgaggtcggcttcgtccgcgaggcccatgccggcatccttcttgccgaacccagcctcgacctgctgctggcacgcatggcggcgcacgagccgcacacgccgatcttcgcaatgaaggccgacgacctgtga

SEQ ID NO: 204 - protein, 193 aa, Novosphingobium aromaticivorans DSM 12444
MKRLAVYCGSASPADGRYVTLAREVGQELARRGIGVVYGGGRLGLMGAVAYGALDAGGEVIGIIPEALVNSEVANHDCTELHVVSGMHERKKRFTDLSDGFLTIPGGVGTMDELWEAMSWAQLGYHAKPVGLLNAFGFYDHLLAFNRHMIEVGFVREAHAGILLAEPSLDLLLARMAAHEPHTPIFAMKADDL

SEQ ID NO: 205 - DNA, 585 bp, Burkholderia xenovorans LB400
  CDS (1)..(585): transl_table=11
atgaagtcggtgtgtgtgtattgcggctcctccaacggggccaaaccgttgtacgcggaagccgcgcgcgcttttggccgcgcgctggtgcaagccggtctcgcgctggtctacggcggcggcaaggtcggcctgatgggtgtgatcgccgatacggtgatggccgaaggcggccgtgcgatcggtgtgattcccgagttgctggtcaacaaggaagtcggccacgacggcctgaccgaactgcacgtggtgcccgacatgcatcatcgcaagaagatgatggccgacctgtccgacgcgttcgtcgcgatgccgggcggcgcgggcacgctcgaagaactgttcgaagtctacacatgggcgcaactcggctaccaccagaaagcggtggcactgctgaatatcgacggcttctacgatccgctgatcaagctgttgcagcacaccgtcgaagaaggtttcatgcgccagacctatttcgacatcctgcagatcgaggccgatcccgccgcgctgatcggcaagctgcaacgctatcagccgcccgccagcgacaagtgggcaatcagccgcaacgcggtctga

SEQ ID NO: 206 - protein, 194 aa, Burkholderia xenovorans LB400
MKSVCVYCGSSNGAKPLYAEAARAFGRALVQAGLALVYGGGKVGLMGVIADTVMAEGGRAIGVIPELLVNKEVGHDGLTELHVVPDMHHRKKMMADLSDAFVAMPGGAGTLEELFEVYTWAQLGYHQKAVALLNIDGFYDPLIKLLQHTVEEGFMRQTYFDILQIEADPAALIGKLQRYQPPASDKWAISRNAV

SEQ ID NO: 207 - DNA, 585 bp, Ralstonia metallidurans CH34
  CDS (1)..(585): transl_table=11
gtgaagtcggtttgtgtttattgcgggtcgagcccaggttttcgacccgagtacgcggaagcagcgcgagcgcttgggcaagccatggcggagcggggtctggccctggtctatggcgggggcaatgtgggcctgatgggcatcgtggccgatagcgttatggcgcacggcggtgccgccatcggcatcattccagaagcgctgatgcagaaggaggtcggccatcgaggcctgaccgagcttcacatcgtgcgcaacatgcacgagcgcaagcagatgatggcggatcgcgccgatgcgttcatcgccatgcccggcggcgtgggcacgttcgaagagctgtttgaaacgttcacgtgggcgcagctcggctaccacgacaagcctgttggcctgctcaacgtggcggggttctacgacggcatgctcgggtttctgaatcacgccgtaagcgagggcttcctgaagcaggttcatgcggacatgctgcacgtgtccaccgagccggaggatatgctcgcccgcctggcggcggcgccgcgtgtgcacgtcgacaagtggcaggaaggccgcgagaaggcctga

SEQ ID NO: 208 - protein, 194 aa, Ralstonia metallidurans CH34
MKSVCVYCGSSPGFRPEYAEAARALGQAMAERGLALVYGGGNVGLMGIVADSVMAHGGAAIGIIPEALMQKEVGHRGLTELHIVRNMHERKQMMADRADAFIAMPGGVGTFEELFETFTWAQLGYHDKPVGLLNVAGFYDGMLGFLNHAVSEGFLKQVHADMLHVSTEPEDMLARLAAAPRVHVDKWQEGREKA

SEQ ID NO: 209 - DNA, 594 bp, Myxococcus xanthus DK 1622
  CDS (1)..(594): transl_table=11
atggaagtgcgaagtgtctgtgtgttctgcggctcccggcccggcgcgcgtccggagtacatggacgccgccacacgcatgggcgccgagttggcgcggcgaggactgacgctcgtctacggcggcgcaagcgtggggctcatgggcgcggtggcggacggcgcgctggccgctggtggcaacgtcgtgggcgtgctgcctggcttccttggcgccaaggaactggcccaccggggcctcacggagctgcactccgtcggctccatgcacgagcgcaaggcgctgatggcggagcgctcggatgcgttcatcgccctgcccggaggctttggaacgctggacgagctcttcgaaatcgtgacctgggcccagctcggcctgcaccgcaagcccatgggactgctggacacgcgcggcttcttccagccattgctggccatggcgcggcatcacgcggaggaaggcttcgtccccctggagcaggccgtgcccttcgccgtgagcgcgtcgcccacggccctggtggaccggctgctggcgggcccgacgatgccccccgccgagaagtggctgaagcgctctagccagacgtga

SEQ ID NO: 210 - protein, 197 aa, Myxococcus xanthus DK 1622
MEVRSVCVFCGSRPGARPEYMDAATRMGAELARRGLTLVYGGASVGLMGAVADGALAAGGNVVGVLPGFLGAKELAHRGLTELHSVGSMHERKALMAERSDAFIALPGGFGTLDELFEIVTWAQLGLHRKPMGLLDTRGFFQPLLAMARHHAEEGFVPLEQAVPFAVSASPTALVDRLLAGPTMPPAEKWLKRSSQT

SEQ ID NO: 211 - DNA, 588 bp, Pseudomonas aeruginosa UCBPP-PA14
  CDS (1)..(588): transl_table=11
atgaccttgcgttccgtctgcgtattctgtggcgccagccccggcgcttccccggtctaccaggaagccgccgtggccctcggccggcacctggccgatcgcggcctgaccctggtctacggtggcggcgcggtcggtctgatgggcaccgtggcggacgccgcattggccgccggcggcgaagtgatcgggatcatcccgcagagcctgcaggaggccgagatcggccacaagggcctgacccgcctggaagtggtagacggcatgcacgcgcgcaaggcgcgcatggccgagctggccgacgccttcgtcgccctgcccggcgggctcggcaccctggaagagctgttcgaggtctggacctggggccaactgggctaccacgccaagccgctgggcctgctcgaagtgaacggtttctacgatccgctgctgaccttcctcgaccacctggtcgacgaacgcttcgtccgcgccgaacaccgcggcatgctgcagcgcggtgccagcccggaggcgctgctcgatgccctcgccgcctggacgccaagcgtggcgccgaagtgggtcgaccgcaccccgcagtga

SEQ ID NO: 212 - protein, 195 aa, Pseudomonas aeruginosa UCBPP-PA14
MTLRSVCVFCGASPGASPVYQEAAVALGRHLADRGLTLVYGGGAVGLMGTVADAALAAGGEVIGIIPQSLQEAEIGHKGLTRLEVVDGMHARKARMAELADAFVALPGGLGTLEELFEVWTWGQLGYHAKPLGLLEVNGFYDPLLTFLDHLVDERFVRAEHRGMLQRGASPEALLDALAAWTPSVAPKWVDRTPQ

SEQ ID NO: 213 - DNA, 588 bp, Pseudomonas putida GB-1
  CDS (1)..(588): transl_table=11
atgcccgtacgttccgtttgtgtgttctgcggcgccagcatcggcgccaaccccgcctaccgtgaagcggccgtcgcgcttggccaggccattgcgcgtcgtgggctgacgctggtgtatggcggcggcgccgttggcctgatgggtgtggtggctgacgctgccatggcagcaggtggcgaagtggtgggaatcatcccgcagagcctgctggacgctgaagtcggccacaagggcctgactcgcctggaagtggttgatggcatgcacgcgcgcaaggcccgcatggccgagctgagcgatgccttcattgccttgccgggcgggctcggtacgctggaggagttgttcgaagtgtggacctgggggcagctgggctatcacgccaagccgctggggctgctcgatgtgaatggcttctacgacaagctgggcggcttcctcgaccatatcgtcgaagaaggctttgtgcggccgcagcaccgggcgatgttgctgctggcgcagcagccagatgagctgctaaatgacatggacagcttcgtagcgccggtggcgccgaagtgggtcgacaagaagcctgattga

SEQ ID NO: 214 - protein, 195 aa, Pseudomonas putida GB-1
MPVRSVCVFCGASIGANPAYREAAVALGQAIARRGLTLVYGGGAVGLMGVVADAAMAAGGEVVGIIPQSLLDAEVGHKGLTRLEVVDGMHARKARMAELSDAFIALPGGLGTLEELFEVWTWGQLGYHAKPLGLLDVNGFYDKLGGFLDHIVEEGFVRPQHRAMLLLAQQPDELLNDMDSFVAPVAPKWVDKKPD

SEQ ID NO: 215 - DNA, 591 bp, unidentified eubacterium SCB49
  CDS (1)..(591): transl_table=11
atgagtaagttaaaaagaatatgtgttttctgcggaagtagtgatggtaatgataacgaaataactaatgcggcagttgaacttgggactgcgtttgtgaaacatgaaatagagctggtttatggcgctgcaaaaataggggtgatgggtacaatagctcaaactatgcttgataatggagggaaagttgtagggattattccaggatttctaaaggtgaaagaagtggtttatgaagatttaaccgaattgtatgtcacagaaaatatgcacgagcgtaaattaatgatgcaagaaaaaagtgatggttttataacgttgccaggaggttttggcaccctagaagaactttttgaggtgattacttggcagcaattaggtttgcatgctaaacccattggactccttaattgtaatggattttatgatgagcttattgcgatgctaaagaccatggtttctaaaggttttttgagtgaggaaaattatcgattactgattgtagatgcaacagtttcaggcttattggataaaatggagcagtttaaagcgccaaagaagcctttgtggttgaagccaggaagggtttaa

SEQ ID NO: 216 - protein, 196 aa, unidentified eubacterium SCB49
MSKLKRICVFCGSSDGNDNEITNAAVELGTAFVKHEIELVYGAAKIGVMGTIAQTMLDNGGKVVGIIPGFLKVKEVVYEDLTELYVTENMHERKLMMQEKSDGFITLPGGFGTLEELFEVITWQQLGLHAKPIGLLNCNGFYDELIAMLKTMVSKGFLSEENYRLLIVDATVSGLLDKMEQFKAPKKPLWLKPGRV

SEQ ID NO: 217 - DNA, 690 bp, Oryza sativa subsp
  CDS (1)..(690)
atgaggagcaggttcaagaggacctgcgtgttctgcggcagtagccagggcaacaagaccacctaccgcgatgccgccgtcgacctcgccaaagagctggacgggggaaaagtatgcactgctaatcaagagactattgtggcaacgtgttcgaacaatatccagttcggtggtacagtcgcgaggggcattgaccttgtgtacggcggcggcagcattggcctcatgggcctcgtctcccaggccgtctacgacggtggcagacatgtcattggggtcatccccaagactctcatgacccccgagataatcggagagacagtaggggaggtgaggccagtgtccgacatgcaccagaggaaggctgagatggcgaggcagtctgatgcattcatagccctgcccggaggatacggaacactggaagagctgcttgaagtcatcacatgggcgcaattaggcatccatcataaaccggttgggctgctgaacgttgatgggtactacaactccctgctcacattcatcgaccaagccgtggaagaaggcttcatcagccccagtgctcgccgcatcatcgtgtcggctccgacggcacaagaactcatggacaagctcgaggaatacgtcccttaccatgatagggttgcgtctgggctgaactgggagactggtcatctagggttctaa

SEQ ID NO: 218 - protein, 229 aa, Oryza sativa subsp
MRSRFKRTCVFCGSSQGNKTTYRDAAVDLAKELDGGKVCTANQETIVATCSNNIQFGGTVARGIDLVYGGGSIGLMGLVSQAVYDGGRHVIGVIPKTLMTPEIIGETVGEVRPVSDMHQRKAEMARQSDAFIALPGGYGTLEELLEVITWAQLGIHHKPVGLLNVDGYYNSLLTFIDQAVEEGFISPSARRIIVSAPTAQELMDKLEEYVPYHDRVASGLNWETGHLGF

SEQ ID NO: 219 - DNA, 606 bp, Vitis vinifera
  CDS (1)..(606)
  misc_feature (21)..(21): r is g or a
atgggaaagttcaaaagggtrtgtgtgtactgtggaagcaattcagggaacagaaagatattcagtgatgcagctcttgatcttggaagagaaatggttgagaggaggatggatctcatctatggaggagggagtgttgggctaatgggtttggtttctcagaaggtctatgatggtggctgccatgttcttggagtgattccaagggctctggttccaatagagatatcagggcatgcggttgggcaagtggtgattgtttctgacatgcatgaaagaaaggcagaaatggcttctagggctgatgccttcattgcacttcctgcaatggaggaactccttgaggtgatagcatgggctcagcttgggatccatgataagccagtgggtctcctaaatgtagatggctactatgattgcttgcttgggttatttgacaaaggtgtagaagagggattcattaagccatcagctagaagcattgtagtctctgcaaaaactgctagagagctgatacagaagatggaggattacataccttttcatgatcaagtggcaccaactcaaagctggaatgcaggagaacccaacgccacgaactcatag

SEQ ID NO: 220 - protein, 201 aa, Vitis vinifera
MGKFKRVCVYCGSNSGNRKIFSDAALDLGREMVERRMDLIYGGGSVGLMGLVSQKVYDGGCHVLGVIPRALVPIEISGHAVGQVVIVSDMHERKAEMASRADAFIALPAMEELLEVIAWAQLGIHDKPVGLLNVDGYYDCLLGLFDKGVEEGFIKPSARSIVVSAKTARELIQKMEDYIPFHDQVAPTQSWNAGEPNATNS

SEQ ID NO: 221 - DNA, 651 bp, Vitis vinifera
  CDS (1)..(651)
atggaggacaccaggtctaggttcaagaggatttgtgtgttttgtgggagtagttctgggaagaaagctagctaccaggaggctgcggttgagttggggaaggaactggtggagagaaggattgatttggtctatggaggtgggagcgtgggactgatgggtcttgtttctcaggctgttcatgatggtgggcgccatgttctaggggttattccaaggactctaatgcctagagagattactggagagactgttggagaagtgagggctgtatcccatatgcacgaaaggaaagctgagatggcccgtcaagctgatgccttcattgccctcccaggtgggtatgggacccttgaagagctgcttgaagtcattacatgggcacaacttggaatccacaaaaaaccagtgggtctgttgaatgtggatggatactacaattccttgttgtctttcattgacaaggctgtcgatgaaggctttgtttcaccaactgctcgccgcattatagtgtccgcaccaacagccaaagaattggtcagagaacttgaggaatacgttccggagcatgatgaagtgacatctaagctgatctgggaagaggtggaaataataagttacgcgtcagagaagcctggtgtggccacatga

SEQ ID NO: 222 - protein, 216 aa, Vitis vinifera
MEDTRSRFKRICVFCGSSSGKKASYQEAAVELGKELVERRIDLVYGGGSVGLMGLVSQAVHDGGRHVLGVIPRTLMPREITGETVGEVRAVSHMHERKAEMARQADAFIALPGGYGTLEELLEVITWAQLGIHKKPVGLLNVDGYYNSLLSFIDKAVDEGFVSPTARRIIVSAPTAKELVRELEEYVPEHDEVTSKLIWEEVEIISYASEKPGVAT

SEQ ID NO: 223 - DNA, 645 bp, Vitis vinifera
  CDS (1)..(645)
atggtgaagtcaaggttcaaaagggtatgcgtattctgtggaagcagcactgggaagagaaactgctacagagacgctgctattgaattggctcaagaactggtctcgaggaggttggatcttgtttatggcggaggaagtgttgggttaatgggtttggtttctcaggaagttcatcgtggcggtggacatgtacttggaatcatccccaaaactctgatgtgcaaagagataactggggaaacagtaggagaggttcgacccgtagccgacatgcaccaaaggaaagctgagatggcccgccattcagattgttttatcgccttaccaggtggctatggaacactggaggagttattggaagtcatcacatgggcccagcttggaatccatgacaagcctgtgggtttgctgaatgtggatggctactacaactacctccttacattcatcgacaaagccgtggatgatggcttcatcaagccctctcagcgtcacatcatcgtctctgccccaaacgcaagagaactcgttcagaaactcgaggaatacgtgcctgtgcatgatggggttgtggctaaagctcggtgggaggccgaacaactggagctcaatgcatctttgcagatagacatcgctcgctag

SEQ ID NO: 224 - protein, 214 aa, Vitis vinifera
MVKSRFKRVCVFCGSSTGKRNCYRDAAIELAQELVSRRLDLVYGGGSVGLMGLVSQEVHRGGGHVLGIIPKTLMCKEITGETVGEVRPVADMHQRKAEMARHSDCFIALPGGYGTLEELLEVITWAQLGIHDKPVGLLNVDGYYNYLLTFIDKAVDDGFIKPSQRHIIVSAPNARELVQKLEEYVPVHDGVVAKARWEAEQLELNASLQIDIAR

SEQ ID NO: 225 - DNA, 801 bp, Vitis vinifera
  CDS (1)..(801)
atggaggagaaggttgtgtattccagattcaagagtgtctgtgtcttctgtggaagcagcactggcaagagaaactgttacagagatgccgccgttgaattagggcaagagctggtggcgaggaggctggaccttgtgtatggaggtgggagtattggcttgatgggtctggtttctcaagctgttcatcgtggtggaggacatgttcttgggatcattcccagaactctgatgtgcaaagaggtgataaaactcatctgggtttcttctgcttctgatattttctgcattgtagggtcttttagcttcgacatctctcaaaatgtttgttttgtggagccacagataacaggagagacggttggagaggtcaggcctgtggccgacatgcaccaaagaaaagcagaaatggcccgccattctgattgcttcattgccttaccaggtgggtatggaactctagaggaattgctggaagtcatcacctgggcacagctcggaatccatgacaagccagtgggtttgctcaatgtggatggctactacaactacctgctcaccttcattgacaaagcagtggatgatggcttcatcaagccttcacagcgccatatcattgtgtcagctccaaacgccaaagagctagtccaaaagcttgaggagtacgtgcctgtgcatgatggggtcattgcaaaggcgaggtgggaggttgaacaacagcagcatcagcagcatcagcagcagcagcaacagcaggtggggttcaatgccactactttgcagactgaggtagctctataa

SEQ ID NO: 226 - protein, 266 aa, Vitis vinifera
MEEKVVYSRFKSVCVFCGSSTGKRNCYRDAAVELGQELVARRLDLVYGGGSIGLMGLVSQAVHRGGGHVLGIIPRTLMCKEVIKLIWVSSASDIFCIVGSFSFDISQNVCFVEPQITGETVGEVRPVADMHQRKAEMARHSDCFIALPGGYGTLEELLEVITWAQLGIHDKPVGLLNVDGYYNYLLTFIDKAVDDGFIKPSQRHIIVSAPNAKELVQKLEEYVPVHDGVIAKARWEVEQQQHQQHQQQQQQQVGFNATTLQTEVAL

SEQ ID NO: 227 - DNA, 654 bp, Vitis vinifera
  CDS (1)..(654)
atggaagaaaaaagcaacacaagaagcaaattcaagagggtttgtgtgttctgtgggagcaactctggtaataggaaagttttcagtgatgctgctctggaattgggaaatgaactggtaaagagaaagataaacttagtctatggagggggaagtgttggattaatgggtttgatttcccagacggtgtatgatggagattgccatgttcttggtgtcattccaagagccctcatgcctcttgagatatctggccaaactgttggagaagtaagaattgtgtcggacatgcatgagcggaaagctgaaatggctcaagaagctgatgcttttattgctcttcctggaggatatggaaccatggaagagctgctggagatgattacatggtcgcaactgggaattcataaaaaaccagttggtctgctaaatgttgatgggtactacaactttttgcttgcattatttgacaacggtgtcaaagaaggcttcatcaagccaggtgctcggcatatagttgtctctgctccaacagccaaagaacttctagtaaagatggagcaatacactccggcccatgagcatgttgcttctcatgaaagctggcagatggagcaacagggcgagtatccaaagtcgcaaaatccacagtga

SEQ ID NO: 228 - protein, 217 aa, Vitis vinifera
MEEKSNTRSKFKRVCVFCGSNSGNRKVFSDAALELGNELVKRKINLVYGGGSVGLMGLISQTVYDGDCHVLGVIPRALMPLEISGQTVGEVRIVSDMHERKAEMAQEADAFIALPGGYGTMEELLEMITWSQLGIHKKPVGLLNVDGYYNFLLALFDNGVKEGFIKPGARHIVVSAPTAKELLVKMEQYTPAHEHVASHESWQMEQQGEYPKSQNPQ

SEQ ID NO: 229 - DNA, 678 bp, Pichia guilliermondii
  CDS (1)..(678)
atgacctctgctaaaccatcaactatagtatgtgttttttgcggatcttcgtttggtaataaacctggttatgccaatgatgccaccgaattgggacaaaagttggcccataaaggctggggagtcgtctacggaggcggaactaccggtgtcatgggtgcagtggcccgtggatgcgccactaatggaggatatgttcatggaataattcccgaggcattgatttcgagagaaagaaccgaagaaagtgccgaggatctcaatcaaaaactcaaggagtcaattgacaatcacgatggcagtacacctttacctgactcgaaggaatacggaaaaaccacgttggtgaaagacatgcatactcggaaacggatgatgggagaagaagccaatgcatttgtagcacttcctggtggatatggcactttagaagagcttatggaggtggttacatggtcacagcttaatattcataacaagcctattgtattgtacaatttggatggattttatgacaactttctcaaattcattaatgacgcaatcgaatctggattcgtttcgaaaaagaacggagagatcatcaaggtggcatccaccgtagacgaattgataaaagcgatagaggagtacgaggcgcccgagggaaaatttaatttaaagtgggataccacctaa

SEQ ID NO: 230 - protein, 225 aa, Pichia guilliermondii
MTSAKPSTIVCVFCGSSFGNKPGYANDATELGQKLAHKGWGVVYGGGTTGVMGAVARGCATNGGYVHGIIPEALISRERTEESAEDLNQKLKESIDNHDGSTPLPDSKEYGKTTLVKDMHTRKRMMGEEANAFVALPGGYGTLEELMEVVTWSQLNIHNKPIVLYNLDGFYDNFLKFINDAIESGFVSKKNGEIIKVASTVDELIKAIEEYEAPEGKFNLKWDTT

SEQ ID NO: 231 - DNA, 591 bp, Ostreococcus tauri
  CDS (1)..(591)
atgtctgtgcagcggctggattgtgtttgtgtttactgcggttcttcctccggcttgaaagcgtcgtacgcagtcgctgctcgggacttaggtctagaactagcgaaaaggcagatttccctggtgtacggaggcggctcagtcggtctgatggggataatagcagaaactgtcgactctagcggtggatgcgttacaggagtcatacctaagtcgcttgcgcctgaacatataagtggtaagactccgggacgtgtcatcctgacggagactatgcacgagaggaagatgcgaatggcatcacgcgcaaacgcgttcatagctttgcctggtggtattggcacccttgaagagctatttgaaatagctacctggagacaacttggacatcaccggaaaccgatcggcatactcaacgtgcaaaactattttgacccgctacttgagttcttagacggcgctgttgcagatggttttgtttccagcactacacggtcaatatttgttgtggggacaagtgcttcggaattgctgaataaactcggctgcggtcttagttcagtcgctgtgccagatttgtgtagtaggtaa

SEQ ID NO: 232 - protein, 196 aa, Ostreococcus tauri
MSVQRLDCVCVYCGSSSGLKASYAVAARDLGLELAKRQISLVYGGGSVGLMGIIAETVDSSGGCVTGVIPKSLAPEHISGKTPGRVILTETMHERKMRMASRANAFIALPGGIGTLEELFEIATWRQLGHHRKPIGILNVQNYFDPLLEFLDGAVADGFVSSTTRSIFVVGTSASELLNKLGCGLSSVAVPDLCSR

SEQ ID NO: 233 - DNA, 690 bp, Phaeosphaeria nodorum
  CDS (1)..(690)
atgtctactaccgccatccccgccgaaaatggcgaacccaagaagcagcccgtcgtctgtgtattctgcggcgcctccgaaggcacatcgccagtgcacatggccgccgcgcgcgccctcgcaaccgccctgcacaaggcgggcatcaacctcgtctacggcggcggcacagtcgggctaatgggcgaagtagcccgcacgctcgtttccctctccggcccctcgagcgtccacggcatcatcccgcgcgccctgaccgcgctcgagcaatccccgtctttcgacccttcgaaccccgcttcgcacatcgatgcctccgtctacggccgcacgaccgtcgtgccggatatgcacacacgcaagcagatgatggcgcgcgaggtcattgctggcgggccgggcggtggcttcgttgcgttgtcgggtgggtacgggacgtttgaagaattgatggaggttacgacgtggaatcagctggggattcactcgatgcctgtggtggttatgaatgtggatgggtactggacggggttgattgagtgggttaagaatgctgtgggaagtgggttcataagtccggggaatgcgggcatcttggtggaggcattggatgcggaggaggtgatcaagtgtctgggagagtatcagaatgcgccgggacggttcaatttgacctgggacgagcagtga

SEQ ID NO: 234 - protein, 229 aa, Phaeosphaeria nodorum
MSTTAIPAENGEPKKQPVVCVFCGASEGTSPVHMAAARALATALHKAGINLVYGGGTVGLMGEVARTLVSLSGPSSVHGIIPRALTALEQSPSFDPSNPASHIDASVYGRTTVVPDMHTRKQMMAREVIAGGPGGGFVALSGGYGTFEELMEVTTWNQLGIHSMPVVVMNVDGYWTGLIEWVKNAVGSGFISPGNAGILVEALDAEEVIKCLGEYQNAPGRFNLTWDEQ

SEQ ID NO: 235 - DNA, 645 bp, Medicago truncatula
  CDS (1)..(645)
atggaggaaggaagcagaaagttcaaaagggtatgtgtcttctgcggcagcaactccggcaaccgccaagttttcagtgacgccgccattcagttagcagatgaacttgttaagaggaacatagatttggtttatggtggtggaagtgttggattgatgggtttgatatctcaaaaaatgtataatggtggttgtcatgttctcggggttattccaaaagctctcatgccccatgagatatctggtgaagcagtaggtgaagtaaggattgtttcagatatgcatgagagaaaagctgcaatggctcaagaagctgaggcatttattgcactccctggaggatatggaactatggaagagcttctggagatgataacttgggctcaacttgggattcataaaaaaccggttggcctactgaatgttgatggttactataactctttgcttgcattatttgacaatggtgttgaagaagggttcattaagcccagcgctcggagtatagttgtctcagcttcatcagccaaagaacttatgttgaagatggagagttactctccttcccatgagcatgtagcccctcatgagagctggcagatgaagcagttaggtaattatccaggacaagagaatgcagaatga

SEQ ID NO: 236 - protein, 214 aa, Medicago truncatula
MEEGSRKFKRVCVFCGSNSGNRQVFSDAAIQLADELVKRNIDLVYGGGSVGLMGLISQKMYNGGCHVLGVIPKALMPHEISGEAVGEVRIVSDMHERKAAMAQEAEAFIALPGGYGTMEELLEMITWAQLGIHKKPVGLLNVDGYYNSLLALFDNGVEEGFIKPSARSIVVSASSAKELMLKMESYSPSHEHVAPHESWQMKQLGNYPGQENAE

SEQ ID NO: 237 - DNA, 660 bp, Medicago truncatula
  CDS (1)..(660)
atggagacaaatggtgagataagagtgtcaaagttcaagagggtttgtgtcttttgtggaagtagtcctggcaagaaaagtagttatcaagatgctgccattgaacttggaaatgaattggtgtcaagaaatattgatctagtttatggaggaggaagcattggtctaatgggtttggtttcacaagctgttcatgatggtggaagacatgtcataggagttattcccaagacactcatgcctagagagctaactggtgaaacggtgggagaagtaaaagctgtagcagatatgcatcaaaggaaggcagagatggctaagcattcagatgcttttattgccttaccaggtggttatgggactctagaggagcttcttgaagtcataacctgggctcaacttgggattcacgacaaaccggtgggattagtaaatgttgatggatactttaattcgttactttcattcatcgacaaagctgtggaagagggatttatcagtccaaatgcgcgccacataattgtatcagcacctacatcaaaagagttggtgaagaaattggaggactatgttccttgtcatgaaggcgttgcttcgaagttgagctggcagatggaacaagagctagcctatcctgaagagtataacatctcaaggtag

SEQ ID NO: 238 - protein, 219 aa, Medicago truncatula
METNGEIRVSKFKRVCVFCGSSPGKKSSYQDAAIELGNELVSRNIDLVYGGGSIGLMGLVSQAVHDGGRHVIGVIPKTLMPRELTGETVGEVKAVADMHQRKAEMAKHSDAFIALPGGYGTLEELLEVITWAQLGIHDKPVGLVNVDGYFNSLLSFIDKAVEEGFISPNARHIIVSAPTSKELVKKLEDYVPCHEGVASKLSWQMEQELAYPEEYNISR

SEQ ID NO: 239 - DNA, 783 bp, Medicago truncatula
  CDS (1)..(783)
atggactcacgcaatggtgagataaagctttcaaagttcaaaagaatttgtgttttctgtggaagtagtcctggtaaaaaaactacctaccaagatgctgccatgaaccttggcaatgaattggtttcaaggaacattgatcttgtgtatggaggaggaagcattggtctcatgggtttagtttctcaagctgttcatgatggtggtcgccatgtcattggagttattcccaagacactcatgcctcgagagctaactggtgaaacagtaggagaagttaaggctgttgctgatatgcatcaaaggaaagctgagatggccaaacattcagatgcttttattgccttaccagggggatatggaactctggaggaacttcttgaagtcataacatgggctcaacttggaattcatgacaagccggttggattagtaaatgttgatggatactttaactccttgttgtcattcattgacaaagctgtggaagaagggtttattagtccaaatgctcgtcacataattgtatcagcaccaactgcaaaagagttggtcaagaaattggaggagtatgttccatgtcatgagggtgttgcttccaagttgagctggcagatggaacagcagctagcataccctcaagattatgacatctcaagtaaattgttgccaatttccgttgttgcgatgacaattacaacttacaaacgcaatgtactttttttttctcttaaccttctagctctcaaggatgagtgttctggtaatttagagttcggttga

SEQ ID NO: 240 - protein, 260 aa, Medicago truncatula
MDSRNGEIKLSKFKRICVFCGSSPGKKTTYQDAAMNLGNELVSRNIDLVYGGGSIGLMGLVSQAVHDGGRHVIGVIPKTLMPRELTGETVGEVKAVADMHQRKAEMAKHSDAFIALPGGYGTLEELLEVITWAQLGIHDKPVGLVNVDGYFNSLLSFIDKAVEEGFISPNARHIIVSAPTAKELVKKLEEYVPCHEGVASKLSWQMEQQLAYPQDYDISSKLLPISVVAMTITTYKRNVLFFSLNLLALKDECSGNLEFG

SEQ ID NO: 241 - DNA, 732 bp, Aspergillus oryzae
  CDS (1)..(732)
atggcgagtgttcagcaagacaagcctgcagttgtctgtgtattctgcggctcagtctccggtaacaactccgttcacctggaaacagctagagctcttgcacatgagtttcacaggaacaatatccaacttgtttatggcggtggcacagcgggcctcatgggcgaattggctcgcaccctcgtttccctttctggaccccaagcagtgcacgggattatccctcgcgccctggtcaaagtcgagcccggctatgacaacgcacaagaggagaggaacccttctacagttgtaagcgggaaagaagccgagcgggtcgtcaaggagcccatgggtaagatcgggacgcttaaagagtcagagtacgggtataccaccatcgtcccagatatgcacacgcgcaagcgtatgatggccgagaaggtccgagagggcggcccggggtcgggctttgtggcgctggcgggcgggttcggaacgatcgaggaggtcatggaaatgactacctggaatcagttgggaatccataagcttggcatggtgttgcttaatgccaatgggtactgggatggtgtgttagcgtgggtgaagaactcagtccaagaaggctttgtcagtcctgagaacggtgagatcttggttgaggccaaggatgtcagagaggtttggcccaagctggttggttacaagattagcaatgggaggatgcagttgaactggggagaggagtag

SEQ ID NO: 242 - protein, 243 aa, Aspergillus oryzae
MASVQQDKPAVVCVFCGSVSGNNSVHLETARALAHEFHRNNIQLVYGGGTAGLMGELARTLVSLSGPQAVHGIIPRALVKVEPGYDNAQEERNPSTVVSGKEAERVVKEPMGKIGTLKESEYGYTTIVPDMHTRKRMMAEKVREGGPGSGFVALAGGFGTIEEVMEMTTWNQLGIHKLGMVLLNANGYWDGVLAWVKNSVQEGFVSPENGEILVEAKDVREVWPKLVGYKISNGRMQLNWGEE

SEQ ID NO: 243 - DNA, 711 bp, Aspergillus oryzae
  CDS (1)..(711)
atgactcaagataaaccagccgtcgtctgcgtcttctgcggcgcaacagcaggaaaagacccagtccacctcgaagcagcccgagctctggcctacgaattccacaaaaataatgtccaactcgtatatggcggcggcacctcaggcctaatgggcgagatcgcaaagacactagtttccctatccggcccaaaagccgtgcacggtataatcccgcgtgcacttgtcaaagtatccgcgaagaacagcaacgggaaggcttccataacggcgatgggaggcaagacagccgagcgagtcgtctccgaatccttggacggagatgagatccccgagtcggagtatggggttacgacaatcgtgcaggatatgcatacgcgtaagcggctgatggcgacgaaggtcatggagggcgggcctgggtctgggtttgtcacgctggctggtgggtttgggacgatcgaggaggttatggagatgacgacgtggaatcagttggggattcatcgtgttggggttgtattgttgaatattaatgggtactgggatgggttgctggcgtgggtgcgcaatgcggttaaggaggggtttatcagtgccgagaatgggtcgattctagctgaggcgtctgatgtaaaggaggtgtggcctaagctgttggagtatcggtgtagccaggatcggtttcagttgaattggggtgaggagtga

SEQ ID NO: 244 - protein, 236 aa, Aspergillus oryzae
MTQDKPAVVCVFCGATAGKDPVHLEAARALAYEFHKNNVQLVYGGGTSGLMGEIAKTLVSLSGPKAVHGIIPRALVKVSAKNSNGKASITAMGGKTAERVVSESLDGDEIPESEYGVTTIVQDMHTRKRLMATKVMEGGPGSGFVTLAGGFGTIEEVMEMTTWNQLGIHRVGVVLLNINGYWDGLLAWVRNAVKEGFISAENGSILAEASDVKEVWPKLLEYRCSQDRFQLNWGEE

SEQ ID NO: 245 - DNA, 576 bp, Streptomyces turgidiscabies
  CDS (1)..(576): transl_table=11
ttgaagtgcgtcaccgtcttctgcggagcgacacccggccttgccggcatccatacgcgggcagccgccgaactgggcagcgccatcgcgcgaaacggcctccgccttgtctacggcggtgccacggtaggactcatgggcaccctcgccgacgcggcgctgggggcgggtggcgtcgtcgtcggagtcattccgcagtacctgagcgtcgtccccgaagcagcacacccggggctgacggaactacacgtcgtgcccgacatgcaccggcgcaaagccatgatggccgaactcggcgacgccttcgtcgccctccccggcggcgtgggcaccgcggaggagttcttcgaagttctcacctggtcccacctacgcctgcacgacaagccctgcgtactcctcgacatccacggctactaccgtcctctgctcgcgttcatcgagcatgccgtccgtgaaggcttcatcgactccgacaccgctcgccgcgtcatcgtctgcgaacgggtcgagcaggtcttcgaagtgctccggcatgtcggcatcccgggcggaattgacaccgcggacgcgtga

SEQ ID NO: 246 - protein, 191 aa, Streptomyces turgidiscabies
MKCVTVFCGATPGLAGIHTRAAAELGSAIARNGLRLVYGGATVGLMGTLADAALGAGGVVVGVIPQYLSVVPEAAHPGLTELHVVPDMHRRKAMMAELGDAFVALPGGVGTAEEFFEVLTWSHLRLHDKPCVLLDIHGYYRPLLAFIEHAVREGFIDSDTARRVIVCERVEQVFEVLRHVGIPGGIDTADA

SEQ ID NO: 247 - DNA, 603 bp, Oryza sativa subsp
  CDS (1)..(603)
atggaagaggcggcggcggcagcggacatgaacggcggcgtgcatcagtcccggttccggcgggtttgcgtgttctgcgggagcagctccggcaagcggcgcagctaccgcgacgccgccgtcgagctcggcaaggagctggtggcgaggaaggtggatttggtgtacggaggaggcagcctgggtctcatgggggaggtcgccgaggccgtgcgcaacggcggcggccacgtcattggcgtcatacctaccactctgatgggcaaggaggtaacgggagagacggtgggggaggtgcgggaggtggggagcatgcacgagaggaaggcggagatggcgaggaggtcggacgcgttcgtggcgctgccgggagggtacgggacgctggaggaggtggtggaggtgatcgcgtgggcgcagctgggcatccacgccaagcccgtcggcctcctcaacgtcgacggctactacgacttcctcctcgccttcgtcgacaaggccgtcgccgacggcttcatccccccttcccaccgccacctcttcgtctccgcccccgacgccccctccctcgtccacaagctcgaggagtacgtgccggtgtag

SEQ ID NO: 248 - protein, 200 aa, Oryza sativa subsp
MEEAAAAADMNGGVHQSRFRRVCVFCGSSSGKRRSYRDAAVELGKELVARKVDLVYGGGSLGLMGEVAEAVRNGGGHVIGVIPTTLMGKEVTGETVGEVREVGSMHERKAEMARRSDAFVALPGGYGTLEEVVEVIAWAQLGIHAKPVGLLNVDGYYDFLLAFVDKAVADGFIPPSHRHLFVSAPDAPSLVHKLEEYVPV

SEQ ID NO: 249 - DNA, 642 bp, Arabidopsis thaliana
  CDS (1)..(642)
  misc_feature (467)..(467): y is t or c
atggaagagacaaaatcaagattcaggaggatctgtgtcttctgcggaagcagttccggcaacaaaaccacttatcacgacgctgctctccaactcgcccaccaactggtggagagaaacatcgatttggtgtatggaggaggaagcgtggggctaatgggtctcatttctcaagctgttcatgatggtggtcgtcatgttcttgggatcattccgaagtctctagcaccaagagagataaccggtgaatcaataggagaagttataacagtatcgactatgcaccaaaggaaggctgaaatgggtcgccaagcggatgccttcatcgcacttcctggtggatatgggacatttgaagagttgttggaagtcatcacctggtctcagcttgggattcacactaaaccggtgggactattgaacgtggatggattctacgattcactattgacgtttatagataaggyagtggacgaaggcttcgtctcctccaccgctcgccgtatcattgtctcggctccaaacgctcctcaattacttcaacttcttgaggagtatgttccaaaacacgacgattttgtatccaaaatggtgtgggacaataccacggatgctttcactttggaaggcgactcgttttag

SEQ ID NO: 250 - protein, 213 aa, Arabidopsis thaliana
  misc_feature (156)..(156): The Xaa at location 156 stands for Ala, or Val.
MEETKSRFRRICVFCGSSSGNKTTYHDAALQLAHQLVERNIDLVYGGGSVGLMGLISQAVHDGGRHVLGIIPKSLAPREITGESIGEVITVSTMHQRKAEMGRQADAFIALPGGYGTFEELLEVITWSQLGIHTKPVGLLNVDGFYDSLLTFIDKXVDEGFVSSTARRIIVSAPNAPQLLQLLEEYVPKHDDFVSKMVWDNTTDAFTLEGDSF

SEQ ID NO: 251 - DNA, 696 bp, Oryza sativa subsp
  CDS (1)..(696)
atggctctactccagtctcggttcaggaggatatgcgtcttctgcgggagcagccagggcaagaagaagagctaccaggacgcagccgttgagcttggcaaggagctggtagcaaggaacattgatctagtgtatggtggaggaagtgtggggctcatgggcctggtctctcaagctgtctacaatggagggaggcatgttattggggtgattcccaagactcttatgcctagagagattacgggtgagacagtaggggaggtgaaagcagtggcagatatgcatcagaggaaggctgagatggccaggcaatctgatgcgttcatagcactgcctggtgggtatggaacacttgaagagctcctggaagtaattgcctgggctcagctcggcattcacgacaagccggttggcctgctaaatgtggacggctactacaactctctgctgtcgttcatcgataaagctgtggaggaagagttcatcagcccctctgcgcgccatatcatcgtgttagctccaacaccaaaagaacttctcgagaagctagaggcgtactcccctcggcatgacaaggtcgtgccgaagatgcagtgggagatggagaagatgagctactgcaagagctgcgagatccctggcctgaaagaaggcaacaaggcgaccatccaagcacagcgaggaagcatgctctga

SEQ ID NO: 252 - protein, 231 aa, Oryza sativa subsp
MALLQSRFRRICVFCGSSQGKKKSYQDAAVELGKELVARNIDLVYGGGSVGLMGLVSQAVYNGGRHVIGVIPKTLMPREITGETVGEVKAVADMHQRKAEMARQSDAFIALPGGYGTLEELLEVIAWAQLGIHDKPVGLLNVDGYYNSLLSFIDKAVEEEFISPSARHIIVLAPTPKELLEKLEAYSPRHDKVVPKMQWEMEKMSYCKSCEIPGLKEGNKATIQAQRGSML

SEQ ID NO: 253 - DNA, 642 bp, Arabidopsis thaliana
  CDS (1)..(642)
atggagatagaatcaaagttcaagagaatatgtgtgttttgtggaagtagtgctggtaataaagtcagttacaaagatgctgctatcgaactcggaaccgaactggtatcgagaaatatcgatcttgtctatggtggagggagcattggtttaatgggtttgatttctcaagctgttttcaatggaggtcgccatgtcattggggttatccccaagacactaatgccaagagagataacaggagagacagtgggagaagtgaaggcagtagcagacatgcaccaaaggaaagctgaaatggctaagcactctgatgcttttatcgctttacctggtgggtatgggacacttgaagagcttcttgaagttatcacttgggcacagctaggcatccataataaaccagtgggactgttgaatgtggaaggatactacaattcattgttatcattcatagacaaagcagtggaagaaggtttcatttcaccaactgctcgtcatatcattgtatctgctccttctgctaaagaacttgtcaagaaacttgaggattatgtaccaaggcatgagaaggtagcctcaaagaaaagctgggagatggagcaaatagggctaagtcccacttgtgaaatctcaagatga

SEQ ID NO: 254 - protein, 213 aa, Arabidopsis thaliana
MEIESKFKRICVFCGSSAGNKVSYKDAAIELGTELVSRNIDLVYGGGSIGLMGLISQAVFNGGRHVIGVIPKTLMPREITGETVGEVKAVADMHQRKAEMAKHSDAFIALPGGYGTLEELLEVITWAQLGIHNKPVGLLNVEGYYNSLLSFIDKAVEEGFISPTARHIIVSAPSAKELVKKLEDYVPRHEKVASKKSWEMEQIGLSPTCEISR

SEQ ID NO: 255 - DNA, 807 bp, Arabidopsis thaliana
  CDS (1)..(807)
atggaaatagtgaagtcgaggttcaagagggtttgtgtgttctgtggtagcagcagcggaaagagagagtgctacagtgatgccgccactgatctagctcaagagctggttcggttatgcttaaatcttaatgagagtcttgaaaacctgaaatgggtgacgaggagattgaatcttgtgtatggaggaggaagcattggtctcatgggtttggtctcacaagctgttcatgaagctggaggacatgtactagggtatgctcaaatctatgacctcttcactttaataaccggagaaacatatggtgaggtaatagctgtggcggatatgcatgaaagaaaagccgaaatggcacgccactcggattgtttcattgctttaccaggtgggtatggaacactggaggagttattggaagtaatagcatgggcacaacttggaattcacgacaagcctgtgggtttgttaaatgtggatggttattacaattacctcctcactttcattgataaagccgttgatgatggctttatcaaaccatctcagcgtcacatctttgtctcagcccccaatgccaaagagcttgtccaaaaacttgagattctgatgaagataaacaaagacaaaaagtttgattcggcaattgatcttttgttttttgatattcctcaggcatacaagccagtgaatgatggagtcatagctaaatctaggtgggaggttgagaagaaagtgcaacagccgcaacaacagcaacaagtagtgttctgttctaacacaagcatgcagactgagattgccctttag

SEQ ID NO: 256 - protein, 268 aa, Arabidopsis thaliana
MEIVKSRFKRVCVFCGSSSGKRECYSDAATDLAQELVRLCLNLNESLENLKWVTRRLNLVYGGGSIGLMGLVSQAVHEAGGHVLGYAQIYDLFTLITGETYGEVIAVADMHERKAEMARHSDCFIALPGGYGTLEELLEVIAWAQLGIHDKPVGLLNVDGYYNYLLTFIDKAVDDGFIKPSQRHIFVSAPNAKELVQKLEILMKINKDKKFDSAIDLLFFDIPQAYKPVNDGVIAKSRWEVEKKVQQPQQQQQVVFCSNTSMQTEIAL

SEQ ID NO: 257 - DNA, 609 bp, Arabidopsis thaliana
  CDS (1)..(609)
atggaaatcaaaggtgaatcgatgcaaaagtcaaagttcagaagaatctgtgtcttctgtggaagcagccaaggcaagaagagcagttaccaagatgctgctgttgacctcggcaacgaactggtttcaaggaatattgatctagtctatggaggtgggagcataggattgatgggtttggtttcacaagctgttcatgatggtggtcgtcatttgactggtgaaacagtaggagaagtaagagcagttgcagatatgcaccaaaggaaagctgagatggctaagcactctgatgcttttattgccttaccaggtggttatggaacacttgaagaattgcttgaagtcataacttgggctcagcttggtatacatgacaagccggtgggtttgctcaatgttgatggatactacaactctctgctctcattcattgacaaagcagtcgaagaaggatttattagcccgactgctcgtgagatcatcgtctccgcacctactgctaaagagctggtgaaaaagctagaggaatatgcaccttgccatgaaagggttgcaacgaagctttgttgggagatggaacggattggttactcctctgaagagtga

SEQ ID NO: 258 - protein, 202 aa, Arabidopsis thaliana
MEIKGESMQKSKFRRICVFCGSSQGKKSSYQDAAVDLGNELVSRNIDLVYGGGSIGLMGLVSQAVHDGGRHLTGETVGEVRAVADMHQRKAEMAKHSDAFIALPGGYGTLEELLEVITWAQLGIHDKPVGLLNVDGYYNSLLSFIDKAVEEGFISPTAREIIVSAPTAKELVKKLEEYAPCHERVATKLCWEMERIGYSSEE

SEQ ID NO: 259 - DNA, 588 bp, Pseudomonas aeruginosa
  CDS (1)..(588): transl_table=11
atgaccttgcgttccgtctgcgtattctgtggcgccagccccggcgcttccccggtctaccaggaagccgccgtggccctcggccggcacctggccgagcgcggcctgaccctggtctacggtggcggcgcggtcggtctgatgggcaccgtggcggacgccgcattggccgccggcggcgaagtgatcgggatcatcccgcagagcctgcaggaggccgagatcggccacaagggcctgacccgcctggaagtggtagacggcatgcacgcgcgcaaggcacgcatggccgaactggccgacgccttcatcgccctgcctggcgggctcggcaccctggaagagctgttcgaggtctggacctggggccaactgggctaccacgccaagccgctgggcctgctcgaagtgaacggtttctacgacccgctgctgactttcctcgaccacctggtcgacgaacgtttcgtccgcgccgaacaccgcggcatgctgcagcgcggcgccagcccggaggcgctgctcgatgccctcgccgcctggacgccgagcgtggcgccgaagtgggtcgaccgcaccccgcagtga

SEQ ID NO: 260 - protein, 195 aa, Pseudomonas aeruginosa
MTLRSVCVFCGASPGASPVYQEAAVALGRHLAERGLTLVYGGGAVGLMGTVADAALAAGGEVIGIIPQSLQEAEIGHKGLTRLEVVDGMHARKARMAELADAFIALPGGLGTLEELFEVWTWGQLGYHAKPLGLLEVNGFYDPLLTFLDHLVDERFVRAEHRGMLQRGASPEALLDALAAWTPSVAPKWVDRTPQ

SEQ ID NO: 261 - DNA, 651 bp, Arabidopsis thaliana
  CDS (1)..(651)
atggaagataatcagcgaagcagattcagaaaaatctgtgtcttttgcggaagccactctggtcacagagaagttttcagtgatgctgccatcgaactcggcaatgaactcgtgaagaggaagatagatttggtttatggaggaggaagtgttggattgatgggtttgatatccaggagagtctatgaaggtggtttacatgtacttggaatcattcccaaagctttgatgccaattgagatatctggtgagactgtgggagatgtaagagttgttgcagacatgcatgagcgaaaggctgcaatggcacaggaagctgaggccttcattgcactccctggaggttatggaacaatggaggagctgttggagatgataacatggtcacaacttggtatccataagaagacggttggtctattgaatgttgatgggtactataacaatttgcttgctttatttgataccggtgtcgaagaaggttttatcaagccaggtgcacgtaacattgtggtttctgctccaacagccaaagagcttatggagaagatggaggaatatactccttcacacatgcatgttgcatcgcacgaaagctggaaagttgaagaactcggagattacccgggacaagaaaacaagccgcaataa

SEQ ID NO: 262 - protein, 216 aa, Arabidopsis thaliana
MEDNQRSRFRKICVFCGSHSGHREVFSDAAIELGNELVKRKIDLVYGGGSVGLMGLISRRVYEGGLHVLGIIPKALMPIEISGETVGDVRVVADMHERKAAMAQEAEAFIALPGGYGTMEELLEMITWSQLGIHKKTVGLLNVDGYYNNLLALFDTGVEEGFIKPGARNIVVSAPTAKELMEKMEEYTPSHMHVASHESWKVEELGDYPGQENKPQ

SEQ ID NO: 263 - DNA, 738 bp, Saccharomyces cerevisiae
  CDS (1)..(738)
atgacaatggaaaaaaatggaggtaatagcagccgtggtggccaagtaggcggcaagtctgtgtgtgtttactgcgggtcttcatttggcgctaaggcgctatactcagaaagtgcagaagaattaggagcccttttccataagctgggatggaaattggtatacggtggaggcactactggtttgatgggcaagatagcaaggtctacgatgggacctgatttaagcggacaggttcacggtatcattccaaatgcacttgtgtctaaggaaaggacagacgaggataaagaagatgttaataaagcattgttggagtctgtagaaaatcataagggcgccactcctatttctgaagagtatggggaaacaacgattgtaccagatatgcatacgagaaaaagaatgatggcaaatttgagtgacgcgtttgttgctatgcctggtggatacgggacttttgaagaaatcatggaatgtatcacgtggtcgcaactggggattcataataaaccaattatcttgttcaatatcgatgggttctatgacaaattattggagttcctcaaacactctattcaagaacggttcatcagtgtgaagaatggtgaaatcattcaagttgcctccactccgcaggaagttgttgataaaatagagaagtacgtcgttccagagggccgtttcaatttgaattggagcgacgaaggtcacgctcacgaggattgtgctaaataa

SEQ ID NO: 264 - protein, 245 aa, Saccharomyces cerevisiae
MTMEKNGGNSSRGGQVGGKSVCVYCGSSFGAKALYSESAEELGALFHKLGWKLVYGGGTTGLMGKIARSTMGPDLSGQVHGIIPNALVSKERTDEDKEDVNKALLESVENHKGATPISEEYGETTIVPDMHTRKRMMANLSDAFVAMPGGYGTFEEIMECITWSQLGIHNKPIILFNIDGFYDKLLEFLKHSIQERFISVKNGEIIQVASTPQEVVDKIEKYVVPEGRFNLNWSDEGHAHEDCAK

SEQ ID NO: 265 - DNA, 729 bp, Oryza sativa
  CDS (1)..(729)
atggcaatggaggctgcggcggagaggagcgccggagcaggggcggcggcgacggcggcgccggagagcggtggcggtggtgcaggggagaggcggtcgcggttcaggcggatctgcgtgtactgcggcagcgccaaggggaggaaggccagctaccaggacgccgccgtcgagctcggcaaggaactggtcgagaggggcatagacctggtctacggcggtggctccatcggcctcatgggcctcgtctcccacgctgttcacgacggtggtcgccatgtcattggggtcatcccgaaatccttgatgcccagagaggtcactggtgagcctgttggtgaagttagagcggtctctggcatgcacgagaggaaggctgaaatggcccggtttgctgatgcgttcattgcactgcctggcggctacgggactcttgaggagttgcttgaggtcatcacctgggcccaactaggaatccacaagaagccggttggccttctgaatgtcgacgggttttatgatccttttctatccttcattgacatggctgtcagcgaaggattcatagcggaggatgcgcggcgcattatcatctcggctccaactgccagggagctagttctgaagcttgaggagtatgttcccgagtacgaggtcggcttggtttgggacgatcagatgccgcacagcttcgcgcctgacctcgagaccaggatcacctcatcctga

SEQ ID NO: 266 - protein, 242 aa, Oryza sativa
MAMEAAAERSAGAGAAATAAPESGGGGAGERRSRFRRICVYCGSAKGRKASYQDAAVELGKELVERGIDLVYGGGSIGLMGLVSHAVHDGGRHVIGVIPKSLMPREVTGEPVGEVRAVSGMHERKAEMARFADAFIALPGGYGTLEELLEVITWAQLGIHKKPVGLLNVDGFYDPFLSFIDMAVSEGFIAEDARRIIISAPTARELVLKLEEYVPEYEVGLVWDDQMPHSFAPDLETRITSS

SEQ ID NO: 267 - DNA, 672 bp, Oryza sativa
  CDS (1)..(672)
atgggcgacaacagcgccgccgcggcggccgtggccgcgccgcgcggcaggttcggcaggatctgcgtcttctgcggcagcaacgccggcaaccgcgcggtgttcggcgacgcggcgctccagctcgggcaggagctggtgtcgagagggatcgagttggtctacggtggcggcagcgtcgggttgatgggcttgatcgcgcagacggttcttgatggcggctgcggtgttctcggggtgattccaaaagcactcatgcccaccgagatatcaggtgcaagtgttggagaagtgaaaattgtgtctgacatgcatgagaggaaagctgagatggcacgccaatccgatgccttcatcgctcttcctggagggtatggaacaatggaggagttgttagagatgataacttggtcacaacttggaattcatgacaaaccagttgggttgctgaatgtggacggttactatgatccgttgcttgcgctatttgataagggtgcggcagaaggatttattaaggccgattgcagacaaataattgtttcggcaccgactgcgcatgagctgctgagaaagatggagcaatacactcgttcacaccaggaggtagcgccacgtacaagctgggagatgtcagagcttggttatggaaagacaccagaggaatcgtag

SEQ ID NO: 268 - protein, 223 aa, Oryza sativa
MGDNSAAAAAVAAPRGRFGRICVFCGSNAGNRAVFGDAALQLGQELVSRGIELVYGGGSVGLMGLIAQTVLDGGCGVLGVIPKALMPTEISGASVGEVKIVSDMHERKAEMARQSDAFIALPGGYGTMEELLEMITWSQLGIHDKPVGLLNVDGYYDPLLALFDKGAAEGFIKADCRQIIVSAPTAHELLRKMEQYTRSHQEVAPRTSWEMSELGYGKTPEES

SEQ ID NO: 269 - DNA, 870 bp, Oryza sativa
  CDS (1)..(870)
atggaaatcaaggacgaggagacaacggcagaggtggccatggtggtgcagtcgcggttcagaagggtatgcgtgttctgtgggagcagccatggcaagaagaagatctaccaggatgctgccattgaacttgggaaggagctggtggcaagaaacattgacctagtatatggaggagggagtgtagggttgatgggtttggtttctcaagcagtacacaatggaggaaggcatgtcattggggtcattcccaagactctcatgcctagagagatatcaggtgagacagtgggggaggtgaaagcagtgtccgatatgcaccagaggaaggctgagatggccaggcagtctgatgcctttatagcattgcctggggggtatggaacacttgaagagctactagaagtaattgcatgggctcaacttggaattcatgacaaaccggttgggctgctcaatgtggatggctactacaatccgttgctgtctttcatcgacaaagctgtggaggaagggttcatcagacctagtgcccgccatatcatcgtcttggccccaacgcctaaagaactcattgaaaagctagaggagtactctccccagcacgagaaagtcgtgtcaaagatgaaatgggagatggaacagatgagctaccctcagaactacgatatccccaggccaaaggagggaaagatgatcatagaagcacaacggggaagcaggctatggataagtgatccaaagagaatggaatctgaaccagttccagacttccagtctgaagaaacagtgaacagtgagatttcagcaagggagaatgccagtttgggcctccacaaccacaaggatcaagggacctcctcgctgtag

SEQ ID NO: 270 - protein, 289 aa, Oryza sativa
MEIKDEETTAEVAMVVQSRFRRVCVFCGSSHGKKKIYQDAAIELGKELVARNIDLVYGGGSVGLMGLVSQAVHNGGRHVIGVIPKTLMPREISGETVGEVKAVSDMHQRKAEMARQSDAFIALPGGYGTLEELLEVIAWAQLGIHDKPVGLLNVDGYYNPLLSFIDKAVEEGFIRPSARHIIVLAPTPKELIEKLEEYSPQHEKVVSKMKWEMEQMSYPQNYDIPRPKEGKMIIEAQRGSRLWISDPKRMESEPVPDFQSEETVNSEISARENASLGLHNHKDQGTSSL

SEQ ID NO: 271 - DNA, 636 bp, Oryza sativa
  CDS (1)..(636)
atgaggcagcagcagcagcagcagcaggagagcaggttcaagaggacctgcgtgttctgcggcagtagccagggcaacaagaccacctaccgcgatgccgccgtcgacctcgccaaagagctggtcgcgaggggcattgaccttgtgtacggcggcggcagcattggcctcatgggcctcgtctcccaggccgtctacgacggtggcagacatgtcattggggtcatccccaagactctcatgacccccgagataatcggagagacagtaggggaggtgaggccagtgtccgacatgcaccagaggaaggctgagatggcgaggcagtctgatgcattcatagccctgcccggaggatacggaacactggaagagctgcttgaagtcatcacatgggcgcaattaggcatccatcataaaccggttgggctgctgaacgttgatgggtactacaactccctgctcacattcatcgaccaagccgtggaagaaggcttcatcagccccagtgctcgccgcatcatcgtgtcggctccaacggcacaagaactcatggacaagcttgaggaatacgtcccttaccatgatagggttgcgtctgggctgaactgggagactggtcatctagggttctaa

SEQ ID NO: 272 - protein, 211 aa, Oryza sativa
MRQQQQQQQESRFKRTCVFCGSSQGNKTTYRDAAVDLAKELVARGIDLVYGGGSIGLMGLVSQAVYDGGRHVIGVIPKTLMTPEIIGETVGEVRPVSDMHQRKAEMARQSDAFIALPGGYGTLEELLEVITWAQLGIHHKPVGLLNVDGYYNSLLTFIDQAVEEGFISPSARRIIVSAPTAQELMDKLEEYVPYHDRVASGLNWETGHLGF

SEQ ID NO: 273 - DNA, 1032 bp, Oryza sativa
  CDS (1)..(1032)
atggatgctaaccacgacaaggttgtggagagcggcagccgcgggggccggggaccggtgcggacgatctgcgtcttctgcggcagcaggcggggaaaccggccgtccttcagcgctgccgctctcgacctcggaaagcagctggtcgagagggagctcgatctggtctacggcggcggcagcggcggcctgatgggcctcgtctccaagaccgtccacgacggcggccgccacgtcctcggggtcatccctagtgctctcctacctgaagaggtgtcaggggagacgttgggagaggcgaaagtggtcagggacatgcatgagcgcaagtcagaaatggcgaaacacgccgacgctttcatcgccctgccaggtggttacgggacaatcgaagaactgttggagatcatagcgtgggcgcagctggggatccacaacaaaccggtggggctgctcaatgtggacggctactacaacaacttactctcgctgttcgacaagggcgtcgaggaagggttcatcgacgccgcggcgcggaacatcttcgtcctcgccgacaacgccggcgaactactgaccaagctgacggaggcggcggcagcggcagcggcggcggttgagggcggcgacggggatcaggtatccatcacattcacagctggcttggcagtagctagcagtggaagcatatcactgcacgcaggtaagaaaaacattgagaggggggtgttggtcaaggtagaacatatcatcaaaaactttctggatcacaaggtgggaaggtttgagcaggatggagatgatagaagagagtgtaaaattgattttgaatgtttatatggaagtggcgtcgtaaatatagtccgtctcttttttaaggggtggggtgaattgagggaagagatggcattgacgcacccaaatttagtggagcaatgtgatccttcggaatatccaaatgcaagcctccatatcttcatttcatatggagggtcatccaaagattccccgctatatttcttgacactgtag

SEQ ID NO: 274 - protein, 343 aa, Oryza sativa
MDANHDKVVESGSRGGRGPVRTICVFCGSRRGNRPSFSAAALDLGKQLVERELDLVYGGGSGGLMGLVSKTVHDGGRHVLGVIPSALLPEEVSGETLGEAKVVRDMHERKSEMAKHADAFIALPGGYGTIEELLEIIAWAQLGIHNKPVGLLNVDGYYNNLLSLFDKGVEEGFIDAAARNIFVLADNAGELLTKLTEAAAAAAAAVEGGDGDQVSITFTAGLAVASSGSISLHAGKKNIERGVLVKVEHIIKNFLDHKVGRFEQDGDDRRECKIDFECLYGSGVVNIVRLFFKGWGELREEMALTHPNLVEQCDPSEYPNASLHIFISYGGSSKDSPLYFLTL

SEQ ID NO: 275 - DNA, 741 bp, Oryza sativa
  CDS (1)..(741)
atgatgatggagaatagcagggagcagcagccggagtcgtcgccggcgaacaacaatagcaagaagaagaagaagaagaagacggcgtcgcggttccggcgtgtgtgcgtgttctgcggcagcagccccgggaagaaggcgtcgtaccaggtggccgccgtgcagctggggcagcagctggtggagcgcggcatcgacctggtgtacggcggcggcagcgttgggctgatggggctggtgtcccgcgccgtccacggaggcggcgggcacgtggtgggcgtggtgcccaatggcgtgctgccacgcgagctgatcggcgagacgctgggggaggtgagggcggtgggaagcatgcaccagcggaaggcggagatggcgcgggagtcggacgccttcatcgccctccccggcggctacggcacgctggaggagctcctcgaggtcatcacctgggctcagctccgcatccaccacaagcccgtcggcctcctcaacgtcgacggctactacgactccctgctcgccttcatcgacaaggccgtccacgaaggcttcgtctcgccgcccgcccgccgcatcatcgtcgccgcacccaccgcctccgacctgctctgcaagctcgaggaatacgtgccgccgccgcacgacgccaccgccctgaagctcacctgggagatgtccaccgtatcggagcagcacgccggaagcatctactcccccaagcccgacatggcacgctag

SEQ ID NO: 276 - protein, 246 aa, Oryza sativa
MMMENSREQQPESSPANNNSKKKKKKKTASRFRRVCVFCGSSPGKKASYQVAAVQLGQQLVERGIDLVYGGGSVGLMGLVSRAVHGGGGHVVGVVPNGVLPRELIGETLGEVRAVGSMHQRKAEMARESDAFIALPGGYGTLEELLEVITWAQLRIHHKPVGLLNVDGYYDSLLAFIDKAVHEGFVSPPARRIIVAAPTASDLLCKLEEYVPPPHDATALKLTWEMSTVSEQHAGSIYSPKPDMAR

SEQ ID NO: 277 - DNA, 753 bp, Oryza sativa
  CDS (1)..(753)
atgatggatacagatcacactgagataattaaggagggagaggcagtagtggaagccatggctctactccagtctcggttcaggaggatatgcgtcttctgcgggagcagccagggcaagaagaagagctaccaggacgcagccgttgagcttggcaaggagctggtagcaaggaacattgatctagtgtatggtggaggaagtgtggggctcatgggcctggtctctcaagctgtctacaatggagggaggcatgttattggggtgattcccaagactcttatgcctagagagattacgggtgagacagtaggggaggtgaaagcagtggcagatatgcatcagaggaaggctgagatggccaggcaatctgatgcgttcatagcactgcctggtgggtatggaacacttgaagagctcctggaagtaattgcctgggctcagctcggcattcacgacaagccggttggcctgctaaatgtggacggctactacaactctctgctgtcgttcatcgataaagctgtggaggaagagttcatcagcccctctgcgcgccatatcatcgtgttagctccaacaccaaaagaacttctcgagaagctagaggcgtactcccctcggcatgacaaggtcgtgccgaagatgcagtgggagatggagaagatgagctactgcaagagctgcgagatccctggcctgaaagaaggcaacaaggcgaccatccaagcacagcgaggaagcatgctctga

SEQ ID NO: 278 - protein, 250 aa, Oryza sativa
MMDTDHTEIIKEGEAVVEAMALLQSRFRRICVFCGSSQGKKKSYQDAAVELGKELVARNIDLVYGGGSVGLMGLVSQAVYNGGRHVIGVIPKTLMPREITGETVGEVKAVADMHQRKAEMARQSDAFIALPGGYGTLEELLEVIAWAQLGIHDKPVGLLNVDGYYNSLLSFIDKAVEEEFISPSARHIIVLAPTPKELLEKLEAYSPRHDKVVPKMQWEMEKMSYCKSCEIPGLKEGNKATIQAQRGSML

SEQ ID NO: 279 - DNA, 672 bp, Oryza sativa
  CDS (1)..(672)
atgggagacggagcggaggcggcgggggcgaccgcggcgagcaggttcgggacgatctgcgtcttctgcggcagcaacgcggggcgccgcagggtgttcggcgacgcggcgctcgacctcggccacgagctggtgaggcggggcgtcgatctggtctacggcggcggcagcatcgggctgatgggcttgatcgcgcgtacggttctcgacggcggccgccgtgtcgtcggggtgattcctagagctctcatggctgtcgagatatcaggtgagagtgtgggagaagtaatagttgtacaggacatgcatgagcggaaagcggagatggctcggcgatccaaagcgttcattgctcttcctgggggctatggaacaatggaggagctgttagagatgataacatggtgccaacttggaattcatgacaagccagttggattgctaaatgttgacggttactacgatccactgctcgcgttgttcgacaaaggcgaggcggagggcttcatcaactctgattgtagacaaatatttgtatctgcaccaactgcaagtgaattgctgacaaagatggagcaatacactcggttgcaccaggaggtggcccctgcaacaagctgggagatctcagagcttggctatggaagaacaccgggcgctgatcaatcctag

SEQ ID NO: 280 - protein, 223 aa, Oryza sativa
MGDGAEAAGATAASRFGTICVFCGSNAGRRRVFGDAALDLGHELVRRGVDLVYGGGSIGLMGLIARTVLDGGRRVVGVIPRALMAVEISGESVGEVIVVQDMHERKAEMARRSKAFIALPGGYGTMEELLEMITWCQLGIHDKPVGLLNVDGYYDPLLALFDKGEAEGFINSDCRQIFVSAPTASELLTKMEQYTRLHQEVAPATSWEISELGYGRTPGADQS

SEQ ID NO: 281 - DNA, 651 bp, Oryza sativa
  CDS (1)..(651)
atgggagacggagcggaggcggcgggggcgaccgcggcgagcaggttcgggacgatctgcgtcttctgcggcagcaacgcggggcgccgcagggtgttcggcgacgcggcgctcgacctcggccacgagctggtgaggcggggcgtcgatctggtctacggcggcggcagcatcgggctgatgggcttgatcgcgcgtacggttctcgacggcggccgccgtgtcgtcggggtgattcctagagctctcatggctgtcgagatatcaggtgagagtgtgggagaagtaatagttgtacaggacatgcatgagcggaaagcggagatggctcggcgatccaaagcgttcattgctcttcctgggggctatggaacaatggaggagctgttagagatgataacatggtgccaacttggaattcatgacaagccagttggattgctaaatgttgacggttactacgatccactgctcgcgttgttcgacaaaggcgaggcggagggcttcatcaactctgattgtagacaaatatttgtatctgcaccaactgcaagtgaattgctgacaaagatggaggaggtggcccctgcaacaagctgggagatctcagagcttggctatggaagaacaccgggcgctgatcaatcctag

SEQ ID NO: 282 - protein, 216 aa, Oryza sativa
MGDGAEAAGATAASRFGTICVFCGSNAGRRRVFGDAALDLGHELVRRGVDLVYGGGSIGLMGLIARTVLDGGRRVVGVIPRALMAVEISGESVGEVIVVQDMHERKAEMARRSKAFIALPGGYGTMEELLEMITWCQLGIHDKPVGLLNVDGYYDPLLALFDKGEAEGFINSDCRQIFVSAPTASELLTKMEEVAPATSWEISELGYGRTPGADQS

SEQ ID NO: 283 - DNA, 567 bp, Oryza sativa
  CDS (1)..(567)
atgcggaagcgcatttctcaggtggagaggggcatagacctggtctacgggggtggatccatcggactcatgggcctggtctcgcatgcagttcatgctggaggtcgccatgtcattgggatcattccaaaatctctgatgcccagagaggtaactggagaacctgtaggggaagttagagccgtttctggtatgcacgagaggaaggccgagatggctcggtttgctgatgcttttattgctctaccaggtggctatggaaccttggaggagttgcttgaggtcattacttgggcacaacttggaatccataagaagccggttggtcttttgaatgttgacggattctacaaccctcttctatcgtttatcgacttggctgttaatgaaggcttcatcaccgaggaggctaggcgcatcatcatctccgctccaacagccaaggagctagttatgaaattggaggactatgtccccgagtatagcattggcttggtttgggaggaccagaaccagaagcaaaataacttggtccctgagctggactccgggatcacatcatcctga

SEQ ID NO: 284 - protein, 188 aa, Oryza sativa
MRKRISQVERGIDLVYGGGSIGLMGLVSHAVHAGGRHVIGIIPKSLMPREVTGEPVGEVRAVSGMHERKAEMARFADAFIALPGGYGTLEELLEVITWAQLGIHKKPVGLLNVDGFYNPLLSFIDLAVNEGFITEEARRIIISAPTAKELVMKLEDYVPEYSIGLVWEDQNQKQNNLVPELDSGITSS

SEQ ID NO: 285 - DNA, 684 bp, Oryza sativa
  CDS (1)..(684)
atgtacatctcctctccacacacttcacacttcacctcgatcgatcgatcgcccgcagtagttagcgagagtgatcgatcgatggaagaggcggcggcggcagcggacatgaacggcggcgtgcatcagtcccggttccggcgggtttgcgtgttctgcgggagcagctccggcaagcggcgcagctaccgcgacgccgccgtcgagctcggcaaggagctggtggcgaggaaggtggatttggtgtacggaggaggcagcctgggtctcatgggggaggtcgccgaggccgtgcgcaacggcggcggccacgtcattggcgtcatacctaccactctgatgggcaaggaggtaacgggagagacggtgggggaggtgcgggaggtggggagcatgcacgagaggaaggcggagatggcgaggaggtcggacgcgttcgtggcgctgccgggagggtacgggacgctggaggaggtggtggaggtgatcgcgtgggcgcagctgggcatccacgccaagcccgtcggcctcctcaacgtcgacggctactacgacttcctcctcgccttcgtcgacaaggccgtcgccgacggcttcatccccccttcccaccgccacctcttcgtctccgcccccgacgccccctccctcgtccacaagctcgaggagtacgtgccggtgtag

SEQ ID NO: 286 - protein, 227 aa, Oryza sativa
MYISSPHTSHFTSIDRSPAVVSESDRSMEEAAAAADMNGGVHQSRFRRVCVFCGSSSGKRRSYRDAAVELGKELVARKVDLVYGGGSLGLMGEVAEAVRNGGGHVIGVIPTTLMGKEVTGETVGEVREVGSMHERKAEMARRSDAFVALPGGYGTLEEVVEVIAWAQLGIHAKPVGLLNVDGYYDFLLAFVDKAVADGFIPPSHRHLFVSAPDAPSLVHKLEEYVPV

SEQ ID NO: 287 - DNA, 615 bp, Oryza sativa
  CDS (1)..(615)
atgaggcagtcgaggttcaagaggatctgcgtcttctgcggcagcagccaggggaagaagaggagctaccatgacgccgccattgagctcggcaacgagctggtggcgaggagcatagacctggtgtacggcggcggcagcatcggcctcatggggctcgtctctcaggcggtcttcgacggcggccgccacgtcatcggggtcattcccaagactctcatgacgccagagataagtggtgagacagtgggggaggtgaggccagttgctgatatgcaccaaaggaaggcagagatggcaaggcagtctgatgccttcatagccctacctggagggtacgggactctggaggagctgctcgaggtgattacatgggcacagcttggcatccatcataagccggttgggctgctcaacgtcgacgggtactacaactcgctgctgacgttcatcgacaaggcggtggaggaagggttcatcaacaccagcgcgcggcggatcatcgtcatggcgccgacggcggaggagctgatggacaagctagaggagtacgtgccttaccacgacagggtggcatcgaagctgaactgggagatgggccacctaggttactga

SEQ ID NO: 288 - protein, 204 aa, Oryza sativa
MRQSRFKRICVFCGSSQGKKRSYHDAAIELGNELVARSIDLVYGGGSIGLMGLVSQAVFDGGRHVIGVIPKTLMTPEISGETVGEVRPVADMHQRKAEMARQSDAFIALPGGYGTLEELLEVITWAQLGIHHKPVGLLNVDGYYNSLLTFIDKAVEEGFINTSARRIIVMAPTAEELMDKLEEYVPYHDRVASKLNWEMGHLGY

SEQ ID NO: 289 - DNA, 735 bp, Oryza sativa
  CDS (1)..(735)
atggaaatcaaggacgaggagacaacggcagaggtggccatggtggtgcagtcgcggttcagaagggtatgcgtgttctgtgggagcagccatggcaagaagaagatctaccaggatgctgccattgaacttgggaaggagctggtggcaagaaacattgacctagtatatggaggagggagtgtagggttgatgggtttggtttctcaagcagtacacaatggaggaaggcatgtcattggggtcattcccaagactctcatgcctagagagatatcaggtgagacagtgggggaggtgaaagcagtgtccgatatgcaccagaggaaggctgagatggccaggcagtctgatgcctttatagcattgcctggggggtatggaacacttgaagagctactagaagtaattgcatgggctcaacttggaattcatgacaaaccggttgggctgctcaatgtggatggctactacaatccgttgctgtctttcatcgacaaagctgtggaggaagggttcatcagacctagtgcccgccatatcatcgtcttggccccaacgcctaaagaactcattgaaaagctagaggagtactctccccagcacgagaaagtcgtgtcaaagatgaaatgggagatggaacagatgagctaccctcagaactacgatatccccaggccaaaggagggaaagatgatcatagaagcacaacggggaagcaggctatggatgtaa

SEQ ID NO: 290 - protein, 244 aa, Oryza sativa
MEIKDEETTAEVAMVVQSRFRRVCVFCGSSHGKKKIYQDAAIELGKELVARNIDLVYGGGSVGLMGLVSQAVHNGGRHVIGVIPKTLMPREISGETVGEVKAVSDMHQRKAEMARQSDAFIALPGGYGTLEELLEVIAWAQLGIHDKPVGLLNVDGYYNPLLSFIDKAVEEGFIRPSARHIIVLAPTPKELIEKLEEYSPQHEKVVSKMKWEMEQMSYPQNYDIPRPKEGKMIIEAQRGSRLWM

SEQ ID NO: 291 - DNA, 678 bp, Glycine max
  CDS (1)..(678)
atggaggaagggtaccccagaagcaagttcaagaccgtgtgtgtcttctgtggcagcaacagtggcaaccgacaagtcttcggtgacgctgcgattcaattgggcaatgaactggttaagaggaacatagacttggtgtatggtgggggcagtgttgggctgatgggcttaatatctcagagagtgtatgatggaggctgccatgtcctagggatcattccaaaagctctcatgcctctcgagatatctggtgaaacagtaggtgaagtgaggattgtttcagatatgcacgagcgtaaggctgcaatggcacaagaagctgatgcatttgttgctctccctggaggatatggaaccatggaagagctgttggagatgataacttgggcccaacttggaatccataaaaaaccggttggtctactgaatgttgacggttactataactgtttgcttgcattatttgacaatggtgttaaagaaggtttcattaagccttgtgcacggaatatagttgtctctgctacgtcagccaaagaacttatgatgaaaatggagcactacactccttcgcacgaacatgttgcccctcatcagagctggcagatgaaacaattaggtaatatccagatgcagagtgagactgttattgatggaaggtttttctccgaaaattga

SEQ ID NO: 292 - protein, 225 aa, Glycine max
MEEGYPRSKFKTVCVFCGSNSGNRQVFGDAAIQLGNELVKRNIDLVYGGGSVGLMGLISQRVYDGGCHVLGIIPKALMPLEISGETVGEVRIVSDMHERKAAMAQEADAFVALPGGYGTMEELLEMITWAQLGIHKKPVGLLNVDGYYNCLLALFDNGVKEGFIKPCARNIVVSATSAKELMMKMEHYTPSHEHVAPHQSWQMKQLGNIQMQSETVIDGRFFSEN

SEQ ID NO: 293 - DNA, 630 bp, Glycine max
  CDS (1)..(630)
atggagaaagaaacagagatgaagcaatccaagttcaagaggatttgtgtcttctgtggcagtagtccagggaacaaaactagttataaggacgctgctattgagcttggaagagaattggtgtcaagaaatattgatctagtgtatggagggggcagcattggtttgatggggttgatttctcaggctgtttacgagggtggtcgccatgtaactggagttattcccaagacacttatgccaagagagctcactggagaaacagtgggggaagtgaaggcagtagcaaacatgcaccaaaggaaagctgagatggctaagcgctctgatgccttcattgccttacccggtggctatgggacacttgaagaactccttgaggtgataacatgggctcaacttggcatccatgataaaccggtgggattgctgaatgttgatggatactacaatacctttttgtcttttattgacaaagcggtggaggaaggcttcatcagccccactgctcgccatataattgtatctgccccaacaccaaaagagcttgtcaaagagatggaggaatatttcccacaacatgaaagagttgtctctaagctaagctgggaaagtgaacagctacattag

SEQ ID NO: 294 - protein, 209 aa, Glycine max
MEKETEMKQSKFKRICVFCGSSPGNKTSYKDAAIELGRELVSRNIDLVYGGGSIGLMGLISQAVYEGGRHVTGVIPKTLMPRELTGETVGEVKAVANMHQRKAEMAKRSDAFIALPGGYGTLEELLEVITWAQLGIHDKPVGLLNVDGYYNTFLSFIDKAVEEGFISPTARHIIVSAPTPKELVKEMEEYFPQHERVVSKLSWESEQLH

SEQ ID NO: 295 - DNA, 627 bp, Triticum aestivum
  CDS (1)..(627)
atgaggcagtcgaggttcaagaggatctgcgtcttctgcggcagtagccagggcaagaagaggagctaccatgacgccgccattgagctcggcaacgagctggtggcgaggggcgtggacctggtgtacggcggcggaagcatcgggctcatgggcatggtgtctcaggcggtgcacgacggcggcaggcacgtcataggtgtcattcccaagaccctcatgaccccagagataagcggtgagacggtgggggaggtgagggcagtggcggacatgcatcagaggaaggcagagatggcaaggcactctgacgcattcatagccctgcctggaggatatggtacactggaggagctgctcgaagtgattacatgggcgcagcttggcatccatcacaagccggttgggctgctgaacgtggacgggtactacaactcgctgctgactttcatcgacaaggccgtggaggaagggttcatcaacaccagcgcgcgccgcatcatcgtgctcgcccccacggcggaggagctcatggagaagctcgaggactacgtgccttaccacgacagggtggcgtcgaagctcaactgggatatagcggcggagatagggcacctagggtactga

SEQ ID NO: 296 - protein, 208 aa, Triticum aestivum
MRQSRFKRICVFCGSSQGKKRSYHDAAIELGNELVARGVDLVYGGGSIGLMGMVSQAVHDGGRHVIGVIPKTLMTPEISGETVGEVRAVADMHQRKAEMARHSDAFIALPGGYGTLEELLEVITWAQLGIHHKPVGLLNVDGYYNSLLTFIDKAVEEGFINTSARRIIVLAPTAEELMEKLEDYVPYHDRVASKLNWDIAAEIGHLGY

SEQ ID NO: 297 - DNA, 627 bp, Triticum aestivum
  CDS (1)..(627)
atgaggcagtcgaggttcaagaggatctgcgtcttctgcggcagtagccagggcaagaagaggagctaccatgacgccgccattgagctcggcaacgagctggtggcgaggggcgtggacctggtgtacggcggggggagcatcgggctcatgggcatggtgtcccaggcggtgcacgacggcggcaggcacgtcataggtgtcattcccaagaccctcatgaccccagagataagcggtgagacggtgggggaggtgagggcagtggcggacatgcatcagaggaaggcagagatggcaaggcactctgacgccttcatagccctgcctggaggatatggtacgctggaggagctactcgaagtgattacatgggcgcagctcggcatccatcacaagccggttgggctgctgaacgtggacgggtactacaactcgctgctgaccttcatcgacaaggccgtggaggaagggttcatcaacaccagcgcgcgccgcatcatcgtgctcgcccccacggccgaggagctcatggagaagctcgagaactacgtgccttaccacgacagggtggcgtcgaagctcaactgggacatagcggcggagatagggcacctagggtactga

SEQ ID NO: 298 - protein, 208 aa, Triticum aestivum
MRQSRFKRICVFCGSSQGKKRSYHDAAIELGNELVARGVDLVYGGGSIGLMGMVSQAVHDGGRHVIGVIPKTLMTPEISGETVGEVRAVADMHQRKAEMARHSDAFIALPGGYGTLEELLEVITWAQLGIHHKPVGLLNVDGYYNSLLTFIDKAVEEGFINTSARRIIVLAPTAEELMEKLENYVPYHDRVASKLNWDIAAEIGHLGY

SEQ ID NO: 299 - DNA, 720 bp, Triticum aestivum
  CDS (1)..(720)
atggcagtggaggccatggcagagaagaacaccggcgccggcgcggctggcggagtagccccggagagcggggacaggcgctcccgcttcaggcggatctgcgtctactgcggcagcgccaagggccgaaaggccagctaccaggacgccgccgtcgagctcggcaaggagctggtggagaggggcatcgacctggtctacggaggaggctccattgggctcatgggcctggtatcccacgcagtccatgatggaggacgccatgtgattggggtcatccccaagtccttgatgcccagagaggtcactggagagcctgttggggaagtgagagccgtctctggcatgcacgagaggaaggccgagatggttcgctctgctgatgctttcattgccttacccggtggctatgggactctggatgagctgctcgaggtcctcacctgggcccaacttgggatccacaagaagccgatcgggctgctcaacgtggatgggttctacaacttcttcctgtccttcatagacatggccgtgagcgaaggattcatacaggaggacgcgaggcacctcgtcatctcagctcctaccgccaaggagctagttctcaagctcgaggagtatgttccggactacgagatcgggctggtgtgggaggatcagggccagatcacgcacgggttcgcgccggagctggagcccggcattgcgtcgtcatga

SEQ ID NO: 300 - protein, 239 aa, Triticum aestivum
MAVEAMAEKNTGAGAAGGVAPESGDRRSRFRRICVYCGSAKGRKASYQDAAVELGKELVERGIDLVYGGGSIGLMGLVSHAVHDGGRHVIGVIPKSLMPREVTGEPVGEVRAVSGMHERKAEMVRSADAFIALPGGYGTLDELLEVLTWAQLGIHKKPIGLLNVDGFYNFFLSFIDMAVSEGFIQEDARHLVISAPTAKELVLKLEEYVPDYEIGLVWEDQGQITHGFAPELEPGIASS

SEQ ID NO: 301 - DNA, 651 bp, Linum usitatissimum
  CDS (1)..(651)
atggaagaaggcaagggtagtagccaatttaagagaatatgtgtcttctgtggaagcaactctggcaatagagaaatattcagtgaagccgctgttcaattgggggatgaactggtgaagagaaagatagacttggtatatggtggaggaagtgttgggctaatgggtttgatatcccagaaggtccacgatgggggctgtcatgttcttggtgtcattcccaaagctctgatgcctattgagatctctggtgaaatggttggagaagtaagaatagttgcagatatgcacgagcgtaaagctgcaatggccaaagaagctgatgcctttattgctttacctggcggatatgggaccatggaagaattattggagatgattacatggtcgcaacttggtatccataagaaaccggtgggactgctaaatgttgagggatattatgatagtttattatcattatttgacaaaggcgtactagaaggtttcatcaagcctggtgctcgcggcattgttgtctctgcaccaacagctagacaacttatggaaaacatggagctatatacaccatcccatcaacacatagctcctcacgagagctggaatatggagcaattgggcaactacccaacacatcagaagagcatatag

SEQ ID NO: 302 - protein, 216 aa, Linum usitatissimum
MEEGKGSSQFKRICVFCGSNSGNREIFSEAAVQLGDELVKRKIDLVYGGGSVGLMGLISQKVHDGGCHVLGVIPKALMPIEISGEMVGEVRIVADMHERKAAMAKEADAFIALPGGYGTMEELLEMITWSQLGIHKKPVGLLNVEGYYDSLLSLFDKGVLEGFIKPGARGIVVSAPTARQLMENMELYTPSHQHIAPHESWNMEQLGNYPTHQKSI

SEQ ID NO: 303 - DNA, 786 bp, Zea mays
  CDS (1)..(786)
atggcaatggacgcggccgtggccgtgaagagcggcggcggcggcgccgccgccgccgctggatcgaccggggtcaccgcggcggcctcgcagtcgccacaggcggcgactaacggcggcgagcggcggtcccggttccagcgcatctgcgtgtactgcggcagcgccaagggccggaagcctagctaccaggacgccgccgtcgagctgggcaaggagctggtggagaggggcatagacctggtctacgggggcggttccatcggcctcatggggctggtctcgcatgcagttcatgacggagggcgccatgtgattggggtcatcccgagatccttgatgcccagagaggtcactggtgagcctgttggggaagtaagggccgtctccggcatgcacgagaggaaggccgagatggcccgcttcgccgatgccttcatagcgttacctggtggctacgggactctggaagagctgctggaggtcatcacctgggcgcaactaggaatccataagaagccggtcgggcttctgaacgtggacgggttctacgacccgctgctgtccttcatcgacatggccgtcaacgaagggttcatcaaggaggacgcccgccgcatcgtcatctcggctcccacggccaaggagctggtcctcaagcttgaggagtacgttccggagtacgaggtcggcttggtgtgggaggaccagatgccgccgtccgccgccgccgcgcacggtttcgccccggagctggtggagcccgggatcacctcctcgtcctga

SEQ ID NO: 304 - protein, 261 aa, Zea mays
MAMDAAVAVKSGGGGAAAAAGSTGVTAAASQSPQAATNGGERRSRFQRICVYCGSAKGRKPSYQDAAVELGKELVERGIDLVYGGGSIGLMGLVSHAVHDGGRHVIGVIPRSLMPREVTGEPVGEVRAVSGMHERKAEMARFADAFIALPGGYGTLEELLEVITWAQLGIHKKPVGLLNVDGFYDPLLSFIDMAVNEGFIKEDARRIVISAPTAKELVLKLEEYVPEYEVGLVWEDQMPPSAAAAHGFAPELVEPGITSSS

SEQ ID NO: 305 - DNA, 627 bp, Zea mays
  CDS (1)..(627)
atgacgatgaggcagtcgaggttcaagaggatctgcgtgttctgcggcagcagccaggggaagaagcggagctaccatgacgccgccattgagctcggcaacgagctggtggcccggagcgtcgacctggtgtacggcggcggcagcatcgggctcatgggcctcgtctcccaggccgtctacgacggcggccggcacgtcatcggggtcattcccaagacgctcatgacaccagagataagcggcgagacggtcggggaggtgcgggcggtggccgacatgcaccagaggaaggcggagatggcgcggcagtccgacgcattcatcgccctgcctggagggtatggcacgctggaggagctgctggaggtcatcacgtgggcgcagctgggcatccaccacaagccggtcgggctgctgaacgtggacggctactacaactcgctgctgaccttcatcgacaaggccgtggaggagggcttcatcaaccccagcgcccgccgcatcatcgtcctcgcgcccaccgcgcaggagctcatggacaagctcgaggagtacgagccttaccacgacagggtggcgtccacgctcaactgggagatgggcaacctgcagcaggggtactga

SEQ ID NO: 306 - protein, 208 aa, Zea mays
MTMRQSRFKRICVFCGSSQGKKRSYHDAAIELGNELVARSVDLVYGGGSIGLMGLVSQAVYDGGRHVIGVIPKTLMTPEISGETVGEVRAVADMHQRKAEMARQSDAFIALPGGYGTLEELLEVITWAQLGIHHKPVGLLNVDGYYNSLLTFIDKAVEEGFINPSARRIIVLAPTAQELMDKLEEYEPYHDRVASTLNWEMGNLQQGY

SEQ ID NO: 307 - DNA, 660 bp, Brassica napus
  CDS (1)..(660)
atggaggaagacaacaacaagcagagaagtagattcaaaaaaatctgtgtcttttgcggaagccactctggtaacagagaagtcttcagccatgctgccatcgaactcggcaatgaactcgtgaagaggaagatagacttggtttatggaggaggaagtgttgggctaatgggtcttatctccaggagagtctatgaaggtggtttccatgtactcgggatcattcccaaagctctgatgccaattgagatatctggtgagactgttggagaagtaagagttgttgcagacatgcacgaacgcaaagctgcaatggcacaagaagctgaggccttcattgccctccctggaggttatggaacaatggaggaactgctggagatgataacatggtcacaactcggtatccataagaaaacggttggtatattgaatactgatgggtactataacaatttgcttgctttgtttgacactggcgttgaagaaggttttatcaaaccaggcgcacgtaatattgtggtttctgccccaacagccaaagagcttatggagaagatggaggaatatactccttcacacaagcacattgcatcccaccaaagctggaaagttgaggagcttggagcttaccctggacaacaaagcaatcatcaataa

SEQ ID NO: 308 - protein, 219 aa, Brassica napus
MEEDNNKQRSRFKKICVFCGSHSGNREVFSHAAIELGNELVKRKIDLVYGGGSVGLMGLISRRVYEGGFHVLGIIPKALMPIEISGETVGEVRVVADMHERKAAMAQEAEAFIALPGGYGTMEELLEMITWSQLGIHKKTVGILNTDGYYNNLLALFDTGVEEGFIKPGARNIVVSAPTAKELMEKMEEYTPSHKHIASHQSWKVEELGAYPGQQSNHQ

SEQ ID NO: 309 - DNA, 711 bp, Brassica napus
  CDS (1)..(711)
atgcaaactgctatggataagagaatagaaacagtgaagtcgagattcaagagggtttgtgttttctgtggaagcagcagcggaaacaaagactgttacagagatgctgccattgatctagctcaagagctgattgagaggaaactgaatcttgtgtatggaggaggaagcattggtctcatgggtctggtctcacaagctgttcatgaagctggaggtcatgtgctagggatcataccaagaactcttatggacaaagagatcaccggagaaacatttggtgaggtaagagctgtggctgatatgcatcaacggaaagccgaaatggcaagccactccgattgtttcatcgcactaccaggtgggtatggaacactggaggagttattggaagtaataacatgggcacaacttggaatccacgacaagcctgtgggattgttaaatgtggatggttattacaatgacctcctcactttcattaataaagccgttgatgatggctttatcaagccatctcagcgtcacatctttgtctctgcccctaatgccaaagaacttgtccaaaaacttgaggcatatgagcctgtgagtgatggaaccatagcaaaatcaaagtgggaagctgagaagaaagtgcaacagccacaacaacaacaacaagtagtgttctgtcctaacacaagcatccagactgagattgctctttag

SEQ ID NO: 310 - protein, 236 aa, Brassica napus
MQTAMDKRIETVKSRFKRVCVFCGSSSGNKDCYRDAAIDLAQELIERKLNLVYGGGSIGLMGLVSQAVHEAGGHVLGIIPRTLMDKEITGETFGEVRAVADMHQRKAEMASHSDCFIALPGGYGTLEELLEVITWAQLGIHDKPVGLLNVDGYYNDLLTFINKAVDDGFIKPSQRHIFVSAPNAKELVQKLEAYEPVSDGTIAKSKWEAEKKVQQPQQQQQVVFCPNTSIQTEIAL

SEQ ID NO: 311 - DNA, 642 bp, Brassica napus
  CDS (1)..(642)
atggagattgaaccaaagttcaagagaatatgtgtgtttggtggaagtagtgctggtaataaaaccagttacagagatgctgctatcgaactcggagccgaactggtatccaaaaatatcgatcttgtctatggcggagggagcattggtttaatgggtttgatttctcaagctgtttacaatggaggtcgccatgtcatcggggttatccccaagacactaatgccaaaagagataacaggagagacagtgggagaagtgaaggcagtagcagacatgcaccaaaggaaagctgaaatggctaagcactctgatgcctttatcgctttacctggtgggtatgggacacttgaagagcttcttgaagtaatcacttgggcacagcttggaatccatgataaaccagtgggattactgaatgtggaaggatactacaattcattgttatcattcatagataacgcagttgaagaaggtttcatttcaccaactgctcgtcatatcattgtctctgctccttctgcgaaagaccttgtcaagaaacttgaggaatatgtaccaaggcacgagaaggtagcctcaaagaaaagctgggagatagaacaaattgggctgagtcccacttgtgaaatctcaagatga

SEQ ID NO: 312 - protein, 213 aa, Brassica napus
MEIEPKFKRICVFGGSSAGNKTSYRDAAIELGAELVSKNIDLVYGGGSIGLMGLISQAVYNGGRHVIGVIPKTLMPKEITGETVGEVKAVADMHQRKAEMAKHSDAFIALPGGYGTLEELLEVITWAQLGIHDKPVGLLNVEGYYNSLLSFIDNAVEEGFISPTARHIIVSAPSAKDLVKKLEEYVPRHEKVASKKSWEIEQIGLSPTCEISR

SEQ ID NO: 313 - DNA, 642 bp, Brassica napus
  CDS (1)..(642)
atggagattgaaccaaagttcaagagaatatgtgtgttttgtggaagtagtgctggtaataaaaccagttacagagatgctgctatcgaactcggagccgaactggtatccaaaaatatcgatcttgtctatggcggagggagcattggtttaatgggtttgatttctcaagctgtttacaatggaggtcgccatgtcatcggggttatccccaagacactaatgccaaaagagataacaggagagacagtgggagaagtgaaggcagtagcagacatgcaccaaaggaaagctgaaatggctaagcactctgatgcctttatcgctttacctggtgggtatgggacacttgaagagcttcttgaagtaatcacttgggcacagcttggaatccatgataaaccagtgggattactgaatgtggaaggatactacaattcattgttatcattcatagataacgcagttgaagaaggtttcatttcaccaactgctcgtcatatcattgtctctgctccttctgcgaaagaccttgtcaagaaacttgaggaatatgtaccaaggcacgagaaggtagcctcaaagaaaagctgggagatagaacaaattgggctgagtcccacttgtgaaatctcaagatga

SEQ ID NO: 314 - protein, 213 aa, Brassica napus
MEIEPKFKRICVFCGSSAGNKTSYRDAAIELGAELVSKNIDLVYGGGSIGLMGLISQAVYNGGRHVIGVIPKTLMPKEITGETVGEVKAVADMHQRKAEMAKHSDAFIALPGGYGTLEELLEVITWAQLGIHDKPVGLLNVEGYYNSLLSFIDNAVEEGFISPTARHIIVSAPSAKDLVKKLEEYVPRHEKVASKKSWEIEQIGLSPTCEISR

SEQ ID NO: 315 - DNA, 651 bp, Brassica napus
  CDS (1)..(651)
atggaggagaaccagagaagcaggtttaaaaaagtttgtgtcttttgcggaagccactctggtaatagagaagtcttcagcgatgctgccatcgaactcggcaatgaactcgtgaagaggaagatagacttggtttatggaggaggaagtgttgggctgatgggtcttatctccaggagagtctatgaaggtggtttccatgtactcgggatcattcccaaagctttgatgccaattgagatatctggtgagactgttggagaagtaagggttgttgctgacatgcacgaacgcaaagctgcaatggcacaagaatctgaggccttcattgctctccctggaggttatggaacaatggaggagctgctggagatgataacatggtcacaactcggtatccataagaaaacggttggtatattgaatactgatgggtactataacagtttgcttgctttgtttgacactggcgttgaagaaggttttatcaaaccaggcgcacgtaatattgtggtttctgccccaacagccaaagaacttatggagaagatggaggaatacactccttcacacaagcatgttgcatcccacgaaagctggaaagttgaggagcttggagcttaccctggacaacaaagcaatcatcaataa

SEQ ID NO: 316 - protein, 216 aa, Brassica napus
MEENQRSRFKKVCVFCGSHSGNREVFSDAAIELGNELVKRKIDLVYGGGSVGLMGLISRRVYEGGFHVLGIIPKALMPIEISGETVGEVRVVADMHERKAAMAQESEAFIALPGGYGTMEELLEMITWSQLGIHKKTVGILNTDGYYNSLLALFDTGVEEGFIKPGARNIVVSAPTAKELMEKMEEYTPSHKHVASHESWKVEELGAYPGQQSNHQ

SEQ ID NO: 317 - DNA, 630 bp, Glycine max
  CDS (1)..(630)
atggagaaagaaacagagatgaagcaatccaagttcaagaggatttgtgtcttctgtggcagtagtccagggaacaaaactagttataatgacgctgctattgagcttggaagagaattggtgtcaagaaatattgatctagtgtatggagggggcagcattggtttgatggggttgatttctcaggctgtttacgagggtggtcgccatgtaactggagttattcccaagacacttatgccaagagagctcactggagaaacagtgggggaagtgaaggcagtagcaaacatgcaccaaaggaaagctgagatggctaagcgctctgatgccttcattgccttacccggtggctatgggacacttgaagaactccttgaggtgataacatgggctcaacttggcatccatgataaaccggtgggattgctgaatgttgatggatactacaatacctttttgtcttttattgacaaagcggtggaggaaggcttcatcagccccactgctcgccatataattgtatctgccccaacaccaaaagagcttgtcaaagagatggaggaatatttcccacaacatgaaagagttgtctctaagctaagctgggaaagtgaacagctacattag

SEQ ID NO: 318 - protein, 209 aa, Glycine max
MEKETEMKQSKFKRICVFCGSSPGNKTSYNDAAIELGRELVSRNIDLVYGGGSIGLMGLISQAVYEGGRHVTGVIPKTLMPRELTGETVGEVKAVANMHQRKAEMAKRSDAFIALPGGYGTLEELLEVITWAQLGIHDKPVGLLNVDGYYNTFLSFIDKAVEEGFISPTARHIIVSAPTPKELVKEMEEYFPQHERVVSKLSWESEQLH

SEQ ID NO: 319 - DNA, 660 bp, Glycine max
  CDS (1)..(660)
atggagacacacgctgagataagggtgtcaaagttcaagagggtttgtgtcttctgtgggagtagccctggcaaaaagagaagctaccaagatgctgccattgaacttggcaatgaattggtctcaaggaacattgatctggtctatggaggaggaagcattggtttaatgggtttggtttcccaagctgttcatgatggtggtcggcatgtcataggagttattcccaagacactcatgcctcgagagctaactggtgaaacagtgggagaagtaaaagctgtagctgatatgcaccaaaggaaggcagagatggccaagcattcagacgcctttattgccttaccaggtggatatgggactctagaggagcttcttgaagtcataacctgggcacaacttggtattcatgacaagccggtgggattagtaaatgttgatggatactttaattccttgctgtcatttattgacaaagctgtggaagagggatttatcagtccaaatgctcgccacataattgtatcagcacccacagcaaaagagttggtgaagaaattggaggattacgttccctgtcatgagggtgttgcttccaagttgagctggcagatagaacagcagcttgcttaccctcaagattatgacatgtcaaggtag

SEQ ID NO: 320 - protein, 219 aa, Glycine max
METHAEIRVSKFKRVCVFCGSSPGKKRSYQDAAIELGNELVSRNIDLVYGGGSIGLMGLVSQAVHDGGRHVIGVIPKTLMPRELTGETVGEVKAVADMHQRKAEMAKHSDAFIALPGGYGTLEELLEVITWAQLGIHDKPVGLVNVDGYFNSLLSFIDKAVEEGFISPNARHIIVSAPTAKELVKKLEDYVPCHEGVASKLSWQIEQQLAYPQDYDMSR

SEQ ID NO: 321 - DNA, 648 bp, Glycine max
  CDS (1)..(648)
atggaaattgaagagcaaacgatgaaaatgatgatgaagtcgtcgtctaggttcagacgtatctgtgttttctgtggcaccagccctggcaagaaccccagctaccaactcgctgccatccaactcgccaaacaacttgtggagaggaacatcgacttggtttatggaggagggagcattgggttgatgggtttaatctcacaagttgtgtttgatggtggacgccacgtgttaggggtgattccaacaactcttatgccaagagagataacgggggaaagtgtcggagaagtgagagcagtgtcaggcatgcaccaacgcaaggcagaaatggcgagacaagccgatgcatttattgcgctgccaggtggatatggcaccctggaagaactacttgaagtgatcacctgggctcaactaggaatccacgataaacccgtggggttgttgaacgtggatgggtactacaactcgttgctgtcattcatggacaatgctgtagacgaaggtttcattacacccgctgcccgtcacattattgtctctgcccaaactgcccaagatctcatgtgcaagcttgaggaatatgtcccgaagcactgtggcgtggcaccaaagcaaagttgggagatgaaccaacagttataa

SEQ ID NO: 322 - protein, 215 aa, Glycine max
MEIEEQTMKMMMKSSSRFRRICVFCGTSPGKNPSYQLAAIQLAKQLVERNIDLVYGGGSIGLMGLISQVVFDGGRHVLGVIPTTLMPREITGESVGEVRAVSGMHQRKAEMARQADAFIALPGGYGTLEELLEVITWAQLGIHDKPVGLLNVDGYYNSLLSFMDNAVDEGFITPAARHIIVSAQTAQDLMCKLEEYVPKHCGVAPKQSWEMNQQL

SEQ ID NO: 323 - DNA, 645 bp, Glycine max
  CDS (1)..(645)
atggaagagaccaaatccaagttcaagaggatttgtgtgtactgtggaagcagttctggtaacaaagccagttaccaagaagctgctgtggaacttggcaaggagatggttgagagaagaattgatttggtctatggaggtggtagcgtgggcttgatgggtctagtttctcaggcggttcatgatggtgggcgccatgttctgggcgttatcccaaaaagcctcatgccaagagagataactggtgatcctattggggaagtgagagcagtatctgatatgcatcaaaggaaagctgagatggctcgtcaagctgatgcattcattgcccttcctgggggatatggaacactcgaagaattgctggaaatcattacatgggctcagcttgggatccacagcaaaccggtgggcctattgaatgtggaaggattttacaattccttgttgtctttcattgacaaggccgttgatgaaggctttatttcaccaaaagcacgtcgcattatcgtgtcagcacccacagccaaagatttggttagagagctagaggaacatgtacctgagagagatgaagttgtatccaagttggtgtgggaagacaggctaaattatgtggtgcctgaatcagaagttgccatgtga

SEQ ID NO: 324 - protein, 214 aa, Glycine max
MEETKSKFKRICVYCGSSSGNKASYQEAAVELGKEMVERRIDLVYGGGSVGLMGLVSQAVHDGGRHVLGVIPKSLMPREITGDPIGEVRAVSDMHQRKAEMARQADAFIALPGGYGTLEELLEIITWAQLGIHSKPVGLLNVEGFYNSLLSFIDKAVDEGFISPKARRIIVSAPTAKDLVRELEEHVPERDEVVSKLVWEDRLNYVVPESEVAM

SEQ ID NO: 325 - DNA, 678 bp, Glycine max
  CDS (1)..(678)
atggaaattgaagagcaaacgatgaaaatgatgatgaagtcgtcgtctaggttcagacgcatctgtgtctactgtggtagcagccctggcaaaaaccccagctaccagctcgctgctattcaactcggaaaacaactggtggagaggaacattgacttggtttatggaggaggaagcatagggttgatgggtctaatctcacaagttgtgtatgatggtggacgccacgtgttaggggtgattccagagacacttaatgcaagagagataactggagagagtgttggagaagtgagagctgtatcgggcatgcaccaacgcaaagccgaaatggcccgacaagccgatgcatttattgcactgccaggtggatatggcacccttgaagaactactggaaattatcacctgggctcaactaggcatccatgataaaccggtggggttgttgaacgtggatgggtactacaactcgctgctggcattcatggacaaagctgtggacgaaggtttcgtaacaccagctgcccgtcacattattgtttctgcccacactgcccaagaactcatgtgcaaacttgaggaatatgtccccgagcactgtggcgtggcccccaagctaagttgggagatggagcaacagttagttaacactgcaaagtcagatatttcccgttga

SEQ ID NO: 326 - protein, 225 aa, Glycine max
MEIEEQTMKMMMKSSSRFRRICVYCGSSPGKNPSYQLAAIQLGKQLVERNIDLVYGGGSIGLMGLISQVVYDGGRHVLGVIPETLNAREITGESVGEVRAVSGMHQRKAEMARQADAFIALPGGYGTLEELLEIITWAQLGIHDKPVGLLNVDGYYNSLLAFMDKAVDEGFVTPAARHIIVSAHTAQELMCKLEEYVPEHCGVAPKLSWEMEQQLVNTAKSDISR

SEQ ID NO: 327 - DNA, 648 bp, Brassica napus
  CDS (1)..(648)
atggaagagacaaaatcaagattcaataggatctgtgtcttctgtggaagcagttccggcaaaaaaccttcttaccaagaagctgccattgaattgggtaacgagctggtggaaagaaggattgatttggtatatggaggtggcagcgtggggcttatgggtctcgtctctcaggctgttcatcatggtggtcggcatgttctaggggtcatcccaaaaacattgatgccaagagagataaccggtgaaaccatcggggaagttaaagccgtcgctgatatgcatcaaagaaaagccgaaatggctcgtcaagccaatgccttcattgctcttcctggtgggtatggtacgttggaagaattgctggaagtcattacatgggctcaactcggaatccaccgtaagccggtgggtcttcttaacgtggatggttactacaactcgctgttaacgtttatcgacaaggccgtggacgaaggattcatatccccaatggctcgtagaatcatcgtctctgcaccaaacgctaaagagttggttcgacaactcgaggaatatgaaccggagttcgatgagataacgtcaaaattggtttgggatgaagtggaccggctcagttatgtaccgggttcggaggttactacgtga

SEQ ID NO: 328 - protein, 215 aa, Brassica napus
MEETKSRFNRICVFCGSSSGKKPSYQEAAIELGNELVERRIDLVYGGGSVGLMGLVSQAVHHGGRHVLGVIPKTLMPREITGETIGEVKAVADMHQRKAEMARQANAFIALPGGYGTLEELLEVITWAQLGIHRKPVGLLNVDGYYNSLLTFIDKAVDEGFISPMARRIIVSAPNAKELVRQLEEYEPEFDEITSKLVWDEVDRLSYVPGSEVTT

SEQ ID NO: 329 - DNA, 657 bp, Zea mays
  CDS (1)..(657)
atgggcgattccgcggcgggcgcgccggagccgagcaggttcggcaggatctgcgtcttctgcggcagcaaccccggcaatcgcgccgtctacggggacgcagcgctcgacctcggcaaagagctggtggcgaaggggatcgatttggtctacggcggcgggagcgtcgggctcatgggcctgatcgcgcagacggtccttggtggcggctgcagtgtcctcggagtgattccgagagcactcatgccgcttgagatatctggtgctagcgttggagaagttaaggttgtctccgacatgcacgagaggaaagctgagatggcacggcaagctgatgccttcatagctcttcctggagggtacggaacaatggaagaactgttagagatgataacgtggtcacagcttgggattcatgacaaaccagtcggtttgctgaacgttgatggctactacgacccgctgctcatgctgtttgatagaggggcaacggaaggctttatcaagctagattgcagagatataattgtttcagcgccaactgcccatgagttactgaagaagatggagcactacactcggtcgcaccaggaggtcgccccacggacgagctgggagatgtcagagctgggctatggaaaagcgtcggagtcatag

SEQ ID NO: 330 - protein, 218 aa, Zea mays
MGDSAAGAPEPSRFGRICVFCGSNPGNRAVYGDAALDLGKELVAKGIDLVYGGGSVGLMGLIAQTVLGGGCSVLGVIPRALMPLEISGASVGEVKVVSDMHERKAEMARQADAFIALPGGYGTMEELLEMITWSQLGIHDKPVGLLNVDGYYDPLLMLFDRGATEGFIKLDCRDIIVSAPTAHELLKKMEHYTRSHQEVAPRTSWEMSELGYGKASES

SEQ ID NO: 331 - DNA, 711 bp, Zea mays
  CDS (1)..(711)
atgggcgacggcgaggcggcggtgccgagcaggttccgcacggtctgcgtcttctgcggcagcaacgccggccgccgcaaggtgtacgccgacgccgccctcgagctcggccacgagctggtgcggaggggcatcaacctcgtctatggcggcggcagcatcggtctgatgggcgtgattgctcggacggttcgtcacggcggctgccatgtcctcggggtgattcctaaagcgctcatgcctattgagatatcaggtgaaagcgtgggagaggtgagggtcgtggacgacatgcaccagaggaaagccgagatggctcgtcagtcccaagccttcatcgctctcccaggggggtacgggacgatggaggagctgctggagatgatcacctggtgccagctcgggatccatgacaaaccagttgggttgctgaacgtggacggctactacgaccccctgctcgccctgttcgagaaaggcgccgccgagggtttcatcagcaccgactgcagccagatattcgtctcggcgccaaccgcgagcgagctgctcacaaagatggagcaatacacgcgggtgcaccaggaggtagccccagcgacgagctgggagatctcggagctcggctacggcagaggaggagacgccggcgccgccacgccgccagcagcagcagcaggaggagcagaagagggaaaaggcggctcgtag

SEQ ID NO: 332 - protein, 236 aa, Zea mays
MGDGEAAVPSRFRTVCVFCGSNAGRRKVYADAALELGHELVRRGINLVYGGGSIGLMGVIARTVRHGGCHVLGVIPKALMPIEISGESVGEVRVVDDMHQRKAEMARQSQAFIALPGGYGTMEELLEMITWCQLGIHDKPVGLLNVDGYYDPLLALFEKGAAEGFISTDCSQIFVSAPTASELLTKMEQYTRVHQEVAPATSWEISELGYGRGGDAGAATPPAAAAGGAEEGKGGS

SEQ ID NO: 333 - DNA, 798 bp, Zea mays
  CDS (1)..(798)
atgaccccagccacggcggttgccgtcgcgtccgaggcgtgcgtcctctcggactccacggtggcgtcgtcgtcgtccacggccgagaccgccgcggcgcgcgcggaggttccggcggccggcagcaccgatgagacgggcagcggcggcggtggggcggcggagcgccggtcccgcttccgtcggatctgcgtctactgcggcagcgccaaggggaagaaggccagctaccaggatgccgccatcgacctcgggaaccagctggtggagcggggcatagacctggtctacggcgggggctccatcggtctcatgggattggtctcccacgcagttcacgccggaggtcgccatgtcatggggatcattccaaaatcactgatgcccatagaggtaaccggagagcctgttggggaggttagagccgtctctggcatgcatgagaggaaggctgagatggcccggtttgctgatgcttttgttgcattgccaggtggctatggaactctggaggagttgcttgagatcattacttgggcacaactggggatccacaagaagccggttgggcttttgaacgttgatggattctacgacccgcttctgtctttcatcgacttggctgtcagagaaggtttcgtatcggaggcggcaaggcgcatcatcatctcagccccaacagccaaggagctagttatgaagctggaggactacgtcccggagtatgacgtcggcttggtctgggaggagcagaagcccaacagcttggtcccagctgctgggatcacctcatcctga

SEQ ID NO: 334 - protein, 265 aa, Zea mays
MTPATAVAVASEACVLSDSTVASSSSTAETAAARAEVPAAGSTDETGSGGGGAAERRSRFRRICVYCGSAKGKKASYQDAAIDLGNQLVERGIDLVYGGGSIGLMGLVSHAVHAGGRHVMGIIPKSLMPIEVTGEPVGEVRAVSGMHERKAEMARFADAFVALPGGYGTLEELLEIITWAQLGIHKKPVGLLNVDGFYDPLLSFIDLAVREGFVSEAARRIIISAPTAKELVMKLEDYVPEYDVGLVWEEQKPNSLVPAAGITSS

SEQ ID NO: 335 - DNA, 672 bp, Zea mays
  CDS (1)..(672)
atgggcgacggcgaggcggcggtgccgagcaggttccgcacggtctgcgtcttctgcggcagcaacgccggccgccgcaaggtgcggaggggcatcaacctcgtctatggcggcggcagcatcggtctgatgggcgtgattgctcggacggttcgtcacggcggctgccatgtcctcggggtgattcctaaagcgctcatgcctattgagatatcaggtgaaagcgtgggagaggtgagggtcgtggacgacatgcaccagaggaaagccgagatggctcgtcagtcccaagccttcatcgctctcccaggggggtacgggacgatggaggagctgctggagatgatcacctggtgccagctcgggatccatgacaaaccagttgggttgctgaacgtggacggctactacgaccccctgctcgccctgttcgagaaaggcgccgccgagggtttcatcagcaccgactgcagccagatattcgtctcggcgccaaccgcgagcgagctgctcacaaagatggagcaatacacgcgggtgcaccaggaggtagccccagcgacgagctgggagatctcggagctcggctacggcagaggaggagacgccggcgccgccacgccgccagcagcagcagcaggaggagcagaagagggaaaaggcggctcgtag

SEQ ID NO: 336 - protein, 223 aa, Zea mays
MGDGEAAVPSRFRTVCVFCGSNAGRRKVRRGINLVYGGGSIGLMGVIARTVRHGGCHVLGVIPKALMPIEISGESVGEVRVVDDMHQRKAEMARQSQAFIALPGGYGTMEELLEMITWCQLGIHDKPVGLLNVDGYYDPLLALFEKGAAEGFISTDCSQIFVSAPTASELLTKMEQYTRVHQEVAPATSWEISELGYGRGGDAGAATPPAAAAGGAEEGKGGS

SEQ ID NO: 337 - DNA, 768 bp, Zea mays
  CDS (1)..(768)
atggcaatggacgcggctgtggccgagaagaccggcggaggcggagcggccggggtcgcggcgggcgcgcaggtggggctgaacggcggcggcgtcggcggcggcgagaggcgttcccggttccatcgcatctgcgtgtactgcggcagcgccaagggccggaagcccagctaccaggacgccgccgtcgagctcggcaaggagttggtggagaggggcatcgacctggtctacgggggaggttccatcggcctcatggggctggtctctcatgcagttcatgatggaggtcgccatgtgattggggtcataccgaggtccttgatgcccagagaggtaactggcgaacctgttggagaagtgagggcggtctctggcatgcacgagaggaaggcggagatggcccgttttgctgacgccttcatagcgctacctggcggctacggaactctggaagaggtgcttgaggtcatcacctgggcgcaactaggaatccataggaagccggttgggcttgtgaacgtggatgggttctacgacccgttgctgtccttcatcgacatggccgtgaacgaagggttcatcaaggaggacgctcggcgcatcgtcgtctcagctcccacggcgaaggagcttgttctcaagcttgaggagtatgttccggaatacgaggtcggtttggtgtgggaggatcagatgccggcggcggagctggagagcccgggatcgcctcctcctcgtctctggacgtcggctgcccttttctga

SEQ ID NO: 338 - protein, 255 aa, Zea mays
MAMDAAVAEKTGGGGAAGVAAGAQVGLNGGGVGGGERRSRFHRICVYCGSAKGRKPSYQDAAVELGKELVERGIDLVYGGGSIGLMGLVSHAVHDGGRHVIGVIPRSLMPREVTGEPVGEVRAVSGMHERKAEMARFADAFIALPGGYGTLEEVLEVITWAQLGIHRKPVGLVNVDGFYDPLLSFIDMAVNEGFIKEDARRIVVSAPTAKELVLKLEEYVPEYEVGLVWEDQMPAAELESPGSPPPRLWTSAALF

SEQ ID NO: 339 - DNA, 627 bp, Zea mays
  CDS (1)..(627)
atgacgatgaggcagtcgaggttcaagaggatctgcgtgttctgcggcagcagccaggggaagaagcggagctaccatgacgccgccattgagctcggcaacgagctggttgcccggagcatcgacctggtgtacggcggcggcagcatcgggctcatgggcctcgtctcccaggccgtctacggcggcggacggcacgtcatcggggtcattcccaagacgctcatgacaccagagataagcggcgagacagtcggggaggtgcgggcggtggccgacatgcaccagaggaaggcggagatggcgcggcagtccgacgcattcgtcgccctgcctggagggtatggcacgctggaggagctgctggaggtcatcacgtgggcgcagctgggcatccaccacaagccggtcgggctgctgaacgtggacggctactacaactcgctgctgaccttcatcgacaaggccgtggaggagggcttcatcaaccccagcgcccgccgcatcatcgtgctcgcgcccaccgcgcaggagctcatggacaagctcgaggagtacgagccttaccacgacagggtggcgtccacgctcaactgggagaccaccatggaccacctggcctactga

SEQ ID NO: 340 - protein, 208 aa, Zea mays
MTMRQSRFKRICVFCGSSQGKKRSYHDAAIELGNELVARSIDLVYGGGSIGLMGLVSQAVYGGGRHVIGVIPKTLMTPEISGETVGEVRAVADMHQRKAEMARQSDAFVALPGGYGTLEELLEVITWAQLGIHHKPVGLLNVDGYYNSLLTFIDKAVEEGFINPSARRIIVLAPTAQELMDKLEEYEPYHDRVASTLNWETTMDHLAY

SEQ ID NO: 341 - DNA, 774 bp, Zea mays
  CDS (1)..(774)
atggcaatggacgcggccgtggccgtgaagagcggcggtggcggcgccggatcgaccggggtcaccgcggcggcctcgcagtccccgcaggcggcgactaacggcggcgagcggcggtcccggttccagcgcatctgcgtgtactgcggcagcgccaagggccggaagcctagctaccaggacgccgccgtcgagctgggcaaggagctggtggagaggggcatagacctggtctacgggggcggttccatcggcctcatggggctggtctcgcatgcagttcatgacggagggcgccatgtgattggggtcatcccgagatccttgatgcccagagaggtcactggcgagcctgttggggaagtaagggccgtctccggcatgcacgagaggaaggccgagatggcccgcttcgccgatgccttcatagcgttacctggtggctatggaactctggaagagctgctggaggtcatcacctgggcgcaactagggatccataagaagccggtcgggcttctgaacgtggacgggttctacgacccgctgctgtccttcatcgacatggccgtcaacgaagggttcatcaaggaggacgcccgccgcatcgtcatctcggctcccacggccaaggagctggtcctcaagcttgaggagtacgttccggagtacgaggtaggcctggtgtgggaggaccagatgccaccgtccgccgccgccgcgcacgggttcgccccggagcttgtggagcccgggatcacctcctcgtcctga

SEQ ID NO: 342 - protein, 257 aa, Zea mays
MAMDAAVAVKSGGGGAGSTGVTAAASQSPQAATNGGERRSRFQRICVYCGSAKGRKPSYQDAAVELGKELVERGIDLVYGGGSIGLMGLVSHAVHDGGRHVIGVIPRSLMPREVTGEPVGEVRAVSGMHERKAEMARFADAFIALPGGYGTLEELLEVITWAQLGIHKKPVGLLNVDGFYDPLLSFIDMAVNEGFIKEDARRIVISAPTAKELVLKLEEYVPEYEVGLVWEDQMPPSAAAAHGFAPELVEPGITSSS

SEQ ID NO: 343 - DNA, 21 bp, Artificial sequence
  primer
atgatagagaagaagacacag

SEQ ID NO: 344 - DNA, 23 bp, Artificial sequence
  primer
tcacctagacatgccacaatttg

SEQ ID NO: 345 - protein, 245 aa, Artificial sequence
  consensus sequence
  Variant (3)..(3): Xaa in position 3 is any amino acid
  Variant (7)..(8): Xaa in position 7 to 8 is any amino acid
  Variant (9)..(12): Xaa in position 9 to 12 is any or no amino acid
  Variant (14)..(16): Xaa in position 14 to 16 is any amino acid
  Variant (17)..(20): Xaa in position 17 to 20 is any or no amino acid
  Variant (23)..(24): Xaa in position 23 to 24 is any amino acid
  Variant (27)..(32): Xaa in position 27 to 32 is any amino acid
  Variant (33)..(61): Xaa in position 33 to 61 is any or no amino acid
  Variant (68)..(69): Xaa in position 68 to 69 is any amino acid
  Variant (74)..(82): Xaa in position 74 to 82 is any amino acid
  Variant (83)..(84): Xaa in position 83 to 84 is any or no amino acid
  Variant (86)..(87): Xaa in position 86 to 87 is any amino acid
  Variant (89)..(89): Xaa in position 89 is any amino acid
  Variant (91)..(91): Xaa in position 91 is any amino acid
  Variant (94)..(95): Xaa in position 94 to 95 is any amino acid
  Variant (97)..(103): Xaa in position 97 to 103 is any amino acid
  Variant (104)..(146): Xaa in position 104 to 146 is any or no amino acid
  Variant (148)..(150): Xaa in position 148 to 150 is any amino acid
  Variant (152)..(153): Xaa in position 152 to 153 is any amino acid
  Variant (156)..(156): Xaa in position 156 is any amino acid
  Variant (159)..(160): Xaa in position 159 to 160 is any amino acid
  Variant (163)..(165): Xaa in position 163 to 165 is any amino acid
  Variant (166)..(171): Xaa in position 166 to 171 is any or no amino acid
  Variant (173)..(173): Xaa in position 173 is any amino acid
  Variant (175)..(175): Xaa in position 175 is any amino acid
  Variant (181)..(181): Xaa in position 181 is any amino acid
  Variant (184)..(184): Xaa in position 184 is any amino acid
  Variant (188)..(188): Xaa in position 188 is any amino acid
  Variant (190)..(191): Xaa in position 190 to 191 is any amino acid
  Variant (194)..(194): Xaa in position 194 is any amino acid
  Variant (198)..(198): Xaa in position 198 is any amino acid
  Variant (200)..(200): Xaa in position 200 is any amino acid
  Variant (203)..(204): Xaa in position 203 to 204 is any amino acid
  Variant (208)..(209): Xaa in position 208 to 209 is any amino acid
  Variant (211)..(211): Xaa in position 211 is any amino acid
  Variant (213)..(214): Xaa in position 213 to 214 is any amino acid
  Variant (217)..(225): Xaa in position 217 to 225 is any amino acid
  Variant (228)..(244): Xaa in position 228 to 244 is any amino acid
CVXCGSXXXXXXGXXXXXXXAAXXLGXXXXXXXXXXXXXXXXXXXXXXXXXXXXXXXXXXXLVYGGGXXGLMGXXXXXXXXXXXGXXVXGXIPXXLXXXXXXXXXXXXXXXXXXXXXXXXXXXXXXXXXXXXXXXXXXXXXXXXXXEXXXVXXMHXRKXXMAXXXXXXXXXDXFXALPGGXGTXEELXEXXTWXQLGXHXKPXXLLNXXGXYXXLLXXXXXXXXXGFXXXXXXXXXXXXXXXXXL

SEQ ID NO: 346 - protein, 31 aa, Artificial sequence
  protein pattern
  Variant (2)..(3): Xaa in position 2 to 3 is any amino acid
  Variant (4)..(4): Xaa in position 4 is any or no amino acid
  Variant (6)..(7): Xaa in position 6 to 7 is any amino acid
  Variant (10)..(10): Xaa in position 10 is any amino acid
  Variant (13)..(13): Xaa in position 13 is Asp, Gly, Asn or Ser
  Variant (14)..(14): Xaa in position 14 is any amino acid
  Variant (16)..(17): Xaa in position 16 to 17 is any amino acid
  Variant (18)..(18): Xaa in position 18 is Ala, Gly, Pro or Thr
  Variant (19)..(20): Xaa in position 19 to 20 is any amino acid
  Variant (21)..(21): Xaa in position 21 is Phe, Ile, Leu or Val
  Variant (22)..(22): Xaa in position 22 is any amino acid
  Variant (23)..(23): Xaa in position 23 is Asp, Glu or Asn
  Variant (24)..(25): Xaa in position 24 to 25 is any amino acid
  Variant (26)..(26): Xaa in position 26 is Asp, Gly, Asn or Ser
  Variant (27)..(27): Xaa in position 27 is Phe or Tyr
  Variant (28)..(28): Xaa in position 28 is Phe, Trp or Tyr
  Variant (29)..(29): Xaa in position 29 is Asp, Glu, Asn, Gln, Ser or Thr
  Variant (30)..(30): Xaa in position 30 is any amino acid
  Variant (31)..(31): Xaa in position 31 is Phe, Ile, Leu, Met or Val
EXXXEXXTWXQLXXHXXXXXXXXXXXXXXXX

SEQ ID NO: 347 - protein, 12 aa, Artificial sequence
  protein pattern
  Variant (7)..(8): Xaa in position 7 to 8 is any amino acid
  Variant (10)..(10): Xaa in position 10 is Ile or Leu
LVYGGGXXGXMG

SEQ ID NO: 348 - protein, 10 aa, Artificial sequence
  protein pattern
  Variant (2)..(2): Xaa in position 2 is Ile or Val
  Variant (8)..(8): Xaa in position 8 is any amino acid
FXALPGGXGT

SEQ ID NO: 349 - protein, 19 aa, Artificial sequence
  protein pattern
  Variant (2)..(2): Xaa in position 2 is any amino acid
  Variant (3)..(4): Xaa in position 3 to 4 is any or no amino acid
  Variant (6)..(6): Xaa in position 6 is any amino acid
  Variant (7)..(7): Xaa in position 7 is Asp, Gly, Asn, Ser or Thr
  Variant (10)..(10): Xaa in position 10 is any amino acid
  Variant (13)..(14): Xaa in position 13 to 14 is any amino acid
  Variant (16)..(18): Xaa in position 16 to 18 is any amino acid
  Variant (19)..(19): Xaa in position 19 is Ala, Gly or Ser
EXXXVXXMHXRKXXMXXXX

SEQ ID NO: 350 - protein, 23 aa, Artificial sequence
  protein pattern
  Variant (3)..(3): Xaa in position 3 is Phe or Tyr
  Variant (6)..(6): Xaa in position 6 is any or no amino acid
  Variant (8)..(8): Xaa in position 8 is any amino acid
  Variant (9)..(9): Xaa in position 9 is any or no amino acid
  Variant (11)..(17): Xaa in position 11 to 17 is any amino acid
  Variant (18)..(18): Xaa in position 18 is any or no amino acid
  Variant (20)..(22): Xaa in position 20 to 22 is any amino acid
  Variant (23)..(23): Xaa in position 23 is Gly or Leu
CVXCGXSXXGXXXXXXXXAXXXX

SEQ ID NO: 351 - protein, 13 aa, Artificial sequence
  protein pattern
  Variant (3)..(3): Xaa in position 3 is any amino acid
  Variant (4)..(4): Xaa in position 4 is any or no amino acid
  Variant (6)..(6): Xaa in position 6 is any amino acid
  Variant (8)..(8): Xaa in position 8 is Ile or Val
  Variant (9)..(9): Xaa in position 9 is Ile or Met
  Variant (11)..(12): Xaa in position 11 to 12 is any amino acid
GGXXVXGXXPXXL

SEQ ID NO: 352 - DNA, 1824 bp, Arabidopsis thaliana
  CDS (1)..(1824)
atgttcagaatcgaaattctaagatgcacactctctcaatctcacccacagagattctctcgtgcatcattcctcttgtcaacatggtactctcaagaatctgtctccgcggcagacaacgacgatgacccagttcttgttaaactctcagttgccatcagagattcttacaaggatccgccgttggagttctcttcgttcactgactgcccctctatcagaaaggtcctgccttcgctcagcgttcatcatgtggttgatctcatcaaccataaccctctctccctcccacaacgttctatcttcgctttcttcaaattcatctcatctcagcctggatttcgttttaccgttgagacttacttcgtcttggctcgttttcttgctgttcacgaaatgttcaccgaagcacagtcacttatcgagctcgtcgtctctcgtaaaggcaaaaactcagcttcttcagttttcatttctttggtagaaatgagagtaacacctatgtgtggtttccttgttgatgctttgatgatcacgtacacggatctaggtttcatacccgatgctattcaatgttttaggctatctcggaagcataggtttgatgttccaattcgtggctgtggcaatttgcttgatcggatgatgaagctgaatccaactgggactatttggggattctatatggagattttggatgctgggtttcccttgaatgtgtacgttttcaatattttgatgaacaaattctgtaaagaaggcaatatatctgatgcacagaaggtgttcgacgaaattactaaaaggagtttgcagcctacagtggttagtttcaacactttgataaatgggtattgtaaagtaggaaacttggatgaagggtttaggctcaaacatcagatggagaaaagcagaacacgcccagatgttttcacctatagtgccttgattaatgcattgtgtaaagagaacaaaatggatggagcacatggcctgtttgatgagatgtgtaagagagggttgatcccaaatgatgttattttcactactttgattcatggtcatagtaggaatggagagattgacttgatgaaagaaagttatcagaagatgttaagtaagggtctgcagcctgatattgttttatataatactttagtaaatggcttttgtaagaacggggatttggtggctgcaaggaatatagttgatggaatgattcgtagaggtctgaggcccgacaaaattacatacacaactcttatagatggattttgtagaggaggagatgtagaaacagctttggagataaggaaggagatggatcagaatgggatagaactcgatagggtgggtttctcagcccttgtttgtggaatgtgcaaagaaggaagagtcattgatgctgaaagagctttaagagagatgctgcgagctggtattaaaccggatgatgtaacctatacaatgatgatggatgcattctgtaagaaaggtgatgctcagaccggtttcaaattgctcaaggaaatgcagagcgatgggcatgttcctagtgttgtgacgtataatgttctgctgaatggtctatgcaaattgggacagatgaagaatgctgatatgttgctagatgccatgcttaatataggggttgttccagatgacatcacatacaacactctattggaaggtcaccatagacatgcaaattcatcgaagcgttatatacagaaaccggagataggtattgtagctgacttggcttcttacaaatcaatagtcaatgagctagatagagcttcaaaagatcaccggaacagataa

SEQ ID NO: 353 - protein, 607 aa, Arabidopsis thaliana
MFRIEILRCTLSQSHPQRFSRASFLLSTWYSQESVSAADNDDDPVLVKLSVAIRDSYKDPPLEFSSFTDCPSIRKVLPSLSVHHVVDLINHNPLSLPQRSIFAFFKFISSQPGFRFTVETYFVLARFLAVHEMFTEAQSLIELVVSRKGKNSASSVFISLVEMRVTPMCGFLVDALMITYTDLGFIPDAIQCFRLSRKHRFDVPIRGCGNLLDRMMKLNPTGTIWGFYMEILDAGFPLNVYVFNILMNKFCKEGNISDAQKVFDEITKRSLQPTVVSFNTLINGYCKVGNLDEGFRLKHQMEKSRTRPDVFTYSALINALCKENKMDGAHGLFDEMCKRGLIPNDVIFTTLIHGHSRNGEIDLMKESYQKMLSKGLQPDIVLYNTLVNGFCKNGDLVAARNIVDGMIRRGLRPDKITYTTLIDGFCRGGDVETALEIRKEMDQNGIELDRVGFSALVCGMCKEGRVIDAERALREMLRAGIKPDDVTYTMMMDAFCKKGDAQTGFKLLKEMQSDGHVPSVVTYNVLLNGLCKLGQMKNADMLLDAMLNIGVVPDDITYNTLLEGHHRHANSSKRYIQKPEIGIVADLASYKSIVNELDRASKDHRNR

SEQ ID NO: 354 - DNA, 1974 bp, Arabidopsis thaliana
  CDS (1)..(1974)
atgttcggtcacgttttctccagaagaacgagcttcctggtacgttgctttcacgttgctaagaaattctcgaatcctgagccggaagatattctctttagtgctctctgtttgaatttaagacagagaagatggaacactcttcatcaattctcctcgagtctcacaaatccgttgataagtcgagttcttcgcgagtttcgaagctcgccgaagttagctctagagttctacaattgggttttaaggagtaacactgtggctaagtctgagaatcgattcgaagcctcttgtgtgatgattcatttgctggttggttcgagaagatttgatgatgctttatcaataatggcgaatttgatgtctgtagaaggtgaaaagttgagtcctttacatgttttgtcgggtttgattcgaagttaccaagcttgtggttcgagtcctgatgtgtttgattcattggttagagcttgtacacagaatggtgatgcgcaaggagcttatgaagtgattgagcagacgagagcagaaggtttttgtgtttctgttcatgcgttgaataattttatgggttgtttattgaatgtgaatgagattgataggttttggaaggtttacaaggaaatggattctttagggtatgttgagaatgtgaatacatttaatctggttatatattcgttttgtaaggagagtaagttgtttgaagcgttatctgtgttttaccggatgttgaaatgtggggtttggcctaatgttgttagctttaatatgatgattgatggagcttgtaagacgggtgatatgagatttgccttgcagcttttagggaagatgggaatgatgtctggaaactttgtttcacctaatgctgtgacgtacaattctgttatcaacgggttttgcaaggccgggagattggatttggcggaaagaatccgtggtgacatggtcaaatcaggtgttgattgcaatgaaagaacctatggagctttggtggatgcgtatggtagagctggaagctcagatgaagccttaaggttgtgtgatgagatgacgagtaagggacttgtggtaaatacagttatctataactctattgtttattggctgtttatggaaggtgacatagaaggagctatgtctgtgttgcgtgatatgaatagtaaaaatatgcaaattgatcgatttactcaagccattgttgtcagaggtctatgcagaaacggatatgtaaaggaagctgttgagtttcagagacagatttcagagaagaagctcgtggaagatatagtttgtcacaacacgcttatgcaccattttgtaagggataaaaagctggcgtgtgctgatcagattctagggagtatgttggttcaaggtttgagtctcgatgcgatttcgtttggtactttgattgatggatacctaaaggaaggtaagttggaaagagctctcgagatatatgatggtatgatcaagatgaataaaacatcgaatcttgtgatttacaattcaattgtgaatggattaagtaaaagaggaatggctggtgcagctgaagcagttgtgaacgctatggaaatcaaggacattgtaacttacaacacgctgttgaacgagtctctcaaaaccgggaatgtcgaagaagctgacgatatcttatctaaaatgcagaaacaggacggtgagaaatcggttagtcttgtgactttcaacattatgatcaatcacttatgcaagtttggttcttatgagaaagcgaaggaagttttgaagtttatggttgaaagaggtgttgttccggattctataacatatggaactttgattacatcgtttagtaagcatcgcagtcaagaaaaagtcgttgagcttcatgattacttgattcttcaaggagttacacctcatgaacatatatatctatctatagttcgtcctcttcttgatagagaaaatggaaggccttag

SEQ ID NO: 355 - protein, 657 aa, Arabidopsis thaliana
MFGHVFSRRTSFLVRCFHVAKKFSNPEPEDILFSALCLNLRQRRWNTLHQFSSSLTNPLISRVLREFRSSPKLALEFYNWVLRSNTVAKSENRFEASCVMIHLLVGSRRFDDALSIMANLMSVEGEKLSPLHVLSGLIRSYQACGSSPDVFDSLVRACTQNGDAQGAYEVIEQTRAEGFCVSVHALNNFMGCLLNVNEIDRFWKVYKEMDSLGYVENVNTFNLVIYSFCKESKLFEALSVFYRMLKCGVWPNVVSFNMMIDGACKTGDMRFALQLLGKMGMMSGNFVSPNAVTYNSVINGFCKAGRLDLAERIRGDMVKSGVDCNERTYGALVDAYGRAGSSDEALRLCDEMTSKGLVVNTVIYNSIVYWLFMEGDIEGAMSVLRDMNSKNMQIDRFTQAIVVRGLCRNGYVKEAVEFQRQISEKKLVEDIVCHNTLMHHFVRDKKLACADQILGSMLVQGLSLDAISFGTLIDGYLKEGKLERALEIYDGMIKMNKTSNLVIYNSIVNGLSKRGMAGAAEAVVNAMEIKDIVTYNTLLNESLKTGNVEEADDILSKMQKQDGEKSVSLVTFNIMINHLCKFGSYEKAKEVLKFMVERGVVPDSITYGTLITSFSKHRSQEKVVELHDYLILQGVTPHEHIYLSIVRPLLDRENGRP

SEQ ID NO: 356 - DNA, 1458 bp, Oryza sativa subsp
  CDS (1)..(1458)
atggcgtgccacctcctccgccaccgccttccgcacctggctcatccgctcctacgcctcctcgcctcccgtctcggccgctcctccccgccgcgcgtcctccctctcctcctctccgccgccgccgccgcccccggcgacccggcgtctcttttgtctgcactctcctcggcctacgccgaggagggcctcctccccgacgcgtgcaccctcgtcctcctcgccctccgccgtggcatccgcctcgagcccacctcgtgtactggtctcatgagccggttccccactgctcccgaagcctgcgccttctatctgcaactgcttgacgcgggcctgcccccggaggccaagctgttcaacgttctgatgcgtgaccttgtcagattgggtgagcttgcaagtgcacagaacgtgttcgacgaaatgcagagcaggggcgtgcggcggacggttgtcagctttaacaccatgatttcggggatgtgcagggctggtgatctggacggtgcggaaactctgcacagaaggatgtcggaggcaggtgtcacgccggatgtgtacacttatggtgctttgatacagggattgtgcagggtggggaggatagaagatgcaagaggggtgtttgagaaaatgtgcgggagaggtatgaagcccaatgcagttgtgttcacgattttgatagacgcacattgcaagaagggtgatgcagagactatgctggagctgcaccgggagatgagagaaaggggtgtgaggccagatgcggtaacgtacaatgcaatagtcaatgggctctgccgggcaagagatttgaagtctgctagtggaattgtggtggagatgaggagtgctggtctcaggccagacacggttacttatactaccctcattgatggttattgcaaggaagaagagttagacatggcgatggagattaaacagaatatggtggctgaaggggttggattggatgaggtgacatatacagcactcatatcagggctgagcaaggcagggcgatcagctgatgccgagagagttctgggtgagatgatggaggctggtttggagcctgataacacgacctacacaatggtgattgatgctttctgtaggaaaggggacgtgaagacaggccttagactcctgaaggaaatgcagaataagggtagaaaaccaggagttgtgacatataatgttattatgaatggtttctgcaagctggggcagatgaagaatgcagacatgcttcttaatgcaatgattaatataggtgtatctccagatgatatcacatacaacattctcttggatgggcattgcaagcatggaaaagttacagatattgaagaactgaagagtgcaaaaggaacagtgccagatttgggtgtctatacttctatagtcggtgaaattgtcaagaagaaaacaactaagacttaccatgacagataa

SEQ ID NO: 357 - protein, 485 aa, Oryza sativa subsp
MACHLLRHRLPHLAHPLLRLLASRLGRSSPPRVLPLLLSAAAAAPGDPASLLSALSSAYAEEGLLPDACTLVLLALRRGIRLEPTSCTGLMSRFPTAPEACAFYLQLLDAGLPPEAKLFNVLMRDLVRLGELASAQNVFDEMQSRGVRRTVVSFNTMISGMCRAGDLDGAETLHRRMSEAGVTPDVYTYGALIQGLCRVGRIEDARGVFEKMCGRGMKPNAVVFTILIDAHCKKGDAETMLELHREMRERGVRPDAVTYNAIVNGLCRARDLKSASGIVVEMRSAGLRPDTVTYTTLIDGYCKEEELDMAMEIKQNMVAEGVGLDEVTYTALISGLSKAGRSADAERVLGEMMEAGLEPDNTTYTMVIDAFCRKGDVKTGLRLLKEMQNKGRKPGVVTYNVIMNGFCKLGQMKNADMLLNAMINIGVSPDDITYNILLDGHCKHGKVTDIEELKSAKGTVPDLGVYTSIVGEIVKKKTTKTYHDR

SEQ ID NO: 358 - DNA, 2349 bp, Oryza sativa subsp
  CDS (1)..(2349)
atggcggagcaccacccgcctcgcctcccgccgtccgccgccggcgccgcggcgacgtcgtggccggagctcctcacgcctttcgacctctcccgcctccgcgccacgctcgcctcccgcccgctcaccccgcgccgcctcggccgcctcctcgcgctcccgctctccccggccacctccctcctcctcctcacctggtacgcctcctcccacccggcactctcctccctcccgctccgccctctcctcgccggcggcgaccccgaccgcgccctctccctcctcgactccctcccgcccggcttcctcccactccgcgagtccctcctcctcccgctgctccgatctttgcctcccggtcgcgccctccacctgctcgaccaattgccccgccgcttcggtgttcagccgtcgttccgctcctacaacgtcgtcctgtcagtgctcgccagggcggactgccacgccgacgcgctcgcgctctaccgccggatggtccacagggaccgcgtcccgcccaccaccttcacgttcggcgtcgccgcgcgggcgctctgccgcctcggccgcgccaacgaggcgctcgcgctgctccgcgggatggcgcggcacgggtgcgtccccgacgccgtgctctaccagacggtgatccacgcgctgtgcgatcagggaggggtcaccgaggccgccacgctgctcaacgagatgctcctcatgggttgcgccgcggacgtgaacacgttcgacgatgtcgtgcgtgggatgtgcggcctcgggcgggtacgcgaggcggcgaggctggttgacaggatgatgacgaaaggctgcatgcccggcgtgatgacgtatggtttcctcctgcagggactgtgcagggtgaggcaggctgatgaggcacgggcaatgctcgggagggtgccggagctgaatgtcgtgttgtttaacacggtgattggcggctgtctcgcagaggggaagctagcagaggctacagagctgtatgagacaatgggtttgaagggctgccaaccagacgcgcacacctacagtatattgatgcatggtctttgcaagcttggaaggatcagttccgctgtgcgattgcttagagaaatggagaagaagggatttgctccgaatgtagtcacctacacgatcgtgctacattccttttgcaagaatggcatgtgggatgacacaagagcattgctggaggagatgtcagcaaagggcttgactttgaattcacaagggtacaatggaatgatatatgcactatgcaaggatggcaggatggacgaggcgatggggctcattcaagagatgagaagtcaagggtgtaaccctgatatttgctcatataatacaataatttatcacttgtgcaacaatgaacagatggaggaagcagaacatatgtttgaaaacttacttgaggagggtgttgttgcaaatggtataacttacaatacaatcattcatgcactgctgcgtgatggaaggtggcaggatgctgtgagacttgcgaaggaaatgatacttcatggttgctcacttgatgttgttagctacaacgggctgataaaagccatgtgcaaagatgggaatgttgatcggagccttgtgcttcttgaagaaatggcagaaaagggtattaagccaaataatgtttcatacaacattctgatcagtgagctttgtaaggagagaagggtacgtgatgctctagagctctcaaagcagatgttgaatcaagggcttgctcctgacattgtcacttacaatacactcataaatggattatgcaaaatgggatggatgcacgccgctctcaatctcctagagaagctacacaatgaaaatgtgcatcctgatattattacatacaatattctcattagttggcactgcaaagtcagattgcttgatgatgctgctatgcttctaaacagggcaatggcagctgtatgtccagtgggtgatcgtagaataatgcagattcttcctgacaagaatttcaagttgtacttacatacaaaaggagatgatttccaacactcgctcggctgtgtgaagccatcatgtcctgctgggaaggatcgatgtgaaagaaagactgggcggtgctggcgtgctgctagccgccggccaggacaggggggcgaacagggaaatgtgggaacactagaagatgaaaatgcctctcatcagaattacagtcttagcagagaattgtattgtattgtattggttgcacgctaccaattcatcagggccaaagattgtgataacctcatgacagcatacacatgtggttgcgagctttcaaataaatgtgcatatccatag

SEQ ID NO: 359 - protein, 782 aa, Oryza sativa subsp
MAEHHPPRLPPSAAGAAATSWPELLTPFDLSRLRATLASRPLTPRRLGRLLALPLSPATSLLLLTWYASSHPALSSLPLRPLLAGGDPDRALSLLDSLPPGFLPLRESLLLPLLRSLPPGRALHLLDQLPRRFGVQPSFRSYNVVLSVLARADCHADALALYRRMVHRDRVPPTTFTFGVAARALCRLGRANEALALLRGMARHGCVPDAVLYQTVIHALCDQGGVTEAATLLNEMLLMGCAADVNTFDDVVRGMCGLGRVREAARLVDRMMTKGCMPGVMTYGFLLQGLCRVRQADEARAMLGRVPELNVVLFNTVIGGCLAEGKLAEATELYETMGLKGCQPDAHTYSILMHGLCKLGRISSAVRLLREMEKKGFAPNVVTYTIVLHSFCKNGMWDDTRALLEEMSAKGLTLNSQGYNGMIYALCKDGRMDEAMGLIQEMRSQGCNPDICSYNTIIYHLCNNEQMEEAEHMFENLLEEGVVANGITYNTIIHALLRDGRWQDAVRLAKEMILHGCSLDVVSYNGLIKAMCKDGNVDRSLVLLEEMAEKGIKPNNVSYNILISELCKERRVRDALELSKQMLNQGLAPDIVTYNTLINGLCKMGWMHAALNLLEKLHNENVHPDIITYNILISWHCKVRLLDDAAMLLNRAMAAVCPVGDRRIMQILPDKNFKLYLHTKGDDFQHSLGCVKPSCPAGKDRCERKTGRCWRAASRRPGQGGEQGNVGTLEDENASHQNYSLSRELYCIVLVARYQFIRAKDCDNLMTAYTCGCELSNKCAYP

SEQ ID NO: 360 - DNA, 3300 bp, Vitis vinifera
  CDS (1)..(3300)
atgagaaaatccgcggccattatcaaaccaggtgagtaccttcttattcttctcaaaccctactcctcaatcgcttctctccctcaaatactatccctcgattccgaaccagtggatctctctgcccaactcctctctattctctctcgcccaaattggcagaaacacccttctctcagaaagcttctgccttctctaaccccatctcatgtctcctctctcttcgccttcaatctcgatccccaaacggccctgagcttcttcaattggatcgccctgcgacctggattcaaacacaatgttcattcctattcctccatgttaaacattcttattcgagctcgattgctcggtgtggctgaaaagattcggatttcaatgatcaaatcctgctgttctattgaggatgtactatttgtattggaagtctttcggaaaatgaatgctgatggtgaattcaaatttaaaccaactcttagatgttataataccattttgatgtctttgtcaaagtttcttttgattgatgaaatgaagactgtttatttggagttattgaataaccagatttcgcctaatatatatacgtttaacgcaatggttaatgggtattgcaagattggaaatgtggttgaggcagaattatacgcaagtaagatagtgcaagcgggtttacaccccgacacatttacatatacttctttgatattggggcactgtaggaataaaggtgtagataatgcttatgaggtgtttttgattatgccgcaaaagggttgtcaaaggaatgaggtttcctatactaatcttattcatgggctttgtgaagctggaaggattaatgaagctcttaagttgtttgctgatatgactgaggataattgttgtccaactgtgcggacatatacagttctaatatacgcattgagtggatcaggtaggaaagtagaggcattaaatttgtttaatgagatgaaggagaaaggctgtgaaccaaatgttcacacttacactgtcctcattgatggtctatgtaaagaaaataagatggatgaagcaagaaaaatgctaagtgagatgtcagagaaaggattgattcccagtgtggtaacatacaatgctttgattgatgggtattgcaaggagggaatgattgatgatgcctttgaaattttggatttgatggaatcaaatagctgtggtccaaacactcgcacatacaatgagttgatatgtgggctttgtaagaaaagaaaggtgcacaaggcaatggcgctactcaataagatgcttgagcgcaagctgtcaccaagcctgatcacgtataactctttgattcatgggcaatgtaaagtcaatgatttagagagtgcttataggttacttagtttgatgaatgaaaatggtttggttcctgaccaatggacttattctgtcttcatagataccctatgtaaagaagggagggttgaagaagctggtaccctatttgattctgtcaaggcgaaaggcgtaaaagcaaatgaagtgatatatactgctctaatcgatggctattgcaaagtggggaaaatcgatgttgcctattctttgcttgagagaatgctgaatgatgcatgcttacctaactcgtacacttacaacgtgttgatagaagggctgtgcaaggagaagaagatgaaagaagcgtcatcattagtggcaaagatgttaacaatgggtgtgaagcccacagttgttacttatacaattctcattggagaaatgttgaaagatggtgcttttgaccatgctcttaaagttttcaaccacatggtctccttgggttatcagcctgatgtttgtacatacacagcatttcttcatgcatatttcagtcaagggatgctagaagaagtggatgatgtgattgccaaaatgaatgaagagggcattctgccagatctggtgacttacactgtattaattgatgggtatgctcgtttgggtttgacacatcgtgcttttgattttctcaaatgcatggtcgatactggatgcaagccctccctttatattgtttccattttaatcaagaatctttcacatgaaaatcggatgaaagaaacaagatctgaaataggtattgattctgtttcaaatgtcaattctgttgatattgctgatgtatggaagacattggaatatgaaattgctctaaagctctttgagaaaatggttgagcatggttgcacaatagatgtcagtatatatggagcactaattgcaggattttgccaacaggagcgattggaagaagctcaggggttagttcatcacatgaaagaaagaggaatgtcccccagtgaagatatttataactctcttcttgactgttgctgcaagttgggggtgtatgctgaggcagtgaggctggtggatgctatggtagaaaatggtcttttaccacttttagagtcctataagttgcttgtttgtggtttgtacatagaaggcagcaatgaaaaagccaaagcagttttccatggtctgctttcttgtgggtataactatgatgaagtagcttggaaggttcttattgatggcttgcttaagagggaccttgttgacgaatgctctgaactgatagacattatggaggaaaaggatgctactgcacaagcagacattgcttgtgcagctcttatgaggttagctgctgcaaattcaacgaagggagcattagaggatcatgagttaagaggactatctgtcaatcatggagagttgacacaactgagtggtctagtaaataacttgatctcagttggcctgggatgtgtagcgacatttgcagctgtagttttggaagacaatgtgcttatggagaaggcatggcaggatattggcatactccgtgcccatgcttggaacaaaattctgcagaaggggattgagcatactccctcggataaaatagatgctgcagctgcattcctggattccttaaaggaacctgaacttccaagtttggcagaatctgagaagaaaccaccaattgaaactcttcctcctggaagggtgtctctatctgctcccatttctgttcagaggaaacatgttcctgccacacagcaacaacctggcaagctgttgctatcggaagaacgtcagttagtgctacaccaccaccagaatcgagtgaagccactgcagatgagaacaatccaagttcatcagttatcagtcctggccctgatccagttgctctatcatccaaaagtcgtccagttttacctgagggcatcccaaggaacctga

SEQ ID NO: 361 - protein, 1099 aa, Vitis vinifera
MRKSAAIIKPGEYLLILLKPYSSIASLPQILSLDSEPVDLSAQLLSILSRPNWQKHPSLRKLLPSLTPSHVSSLFAFNLDPQTALSFFNWIALRPGFKHNVHSYSSMLNILIRARLLGVAEKIRISMIKSCCSIEDVLFVLEVFRKMNADGEFKFKPTLRCYNTILMSLSKFLLIDEMKTVYLELLNNQISPNIYTFNAMVNGYCKIGNVVEAELYASKIVQAGLHPDTFTYTSLILGHCRNKGVDNAYEVFLIMPQKGCQRNEVSYTNLIHGLCEAGRINEALKLFADMTEDNCCPTVRTYTVLIYALSGSGRKVEALNLFNEMKEKGCEPNVHTYTVLIDGLCKENKMDEARKMLSEMSEKGLIPSVVTYNALIDGYCKEGMIDDAFEILDLMESNSCGPNTRTYNELICGLCKKRKVHKAMALLNKMLERKLSPSLITYNSLIHGQCKVNDLESAYRLLSLMNENGLVPDQWTYSVFIDTLCKEGRVEEAGTLFDSVKAKGVKANEVIYTALIDGYCKVGKIDVAYSLLERMLNDACLPNSYTYNVLIEGLCKEKKMKEASSLVAKMLTMGVKPTVVTYTILIGEMLKDGAFDHALKVFNHMVSLGYQPDVCTYTAFLHAYFSQGMLEEVDDVIAKMNEEGILPDLVTYTVLIDGYARLGLTHRAFDFLKCMVDTGCKPSLYIVSILIKNLSHENRMKETRSEIGIDSVSNVNSVDIADVWKTLEYEIALKLFEKMVEHGCTIDVSIYGALIAGFCQQERLEEAQGLVHHMKERGMSPSEDIYNSLLDCCCKLGVYAEAVRLVDAMVENGLLPLLESYKLLVCGLYIEGSNEKAKAVFHGLLSCGYNYDEVAWKVLIDGLLKRDLVDECSELIDIMEEKDATAQADIACAALMRLAAANSTKGALEDHELRGLSVNHGELTQLSGLVNNLISVGLGCVATFAAVVLEDNVLMEKAWQDIGILRAHAWNKILQKGIEHTPSDKIDAAAAFLDSLKEPELPSLAESEKKPPIETLPPGRVSLSAPISVQRKHVPATQQQPGKLLLSEERQLVLHHHQNRVKPLQMRTIQVHQLSVLALIQLLYHPKVVQFYLRASQGT

SEQ ID NO: 362 - DNA, 1680 bp, Vitis vinifera
  CDS (1)..(1680)
atggccactccaaaaatcctaacgacacgcaacttcctctcctcacccagaggcggcttcctctgtttctccacatggatgactccacccacctcccactgccacgacccaatcctcacaaccatttccgaggccatcaaggtctcaccaacgaagcctctccactcctctctcaagcgtatcctgccttcactcacgcccaatcacctcatcgatctaatcaacctcaacccacactccctctccccaccctctcttctctccttcttcaaatggctttccactcaacaccactttcgcctctctattcactcctactgcactatgacccactttctctgcacccacaaaatgctttcggaggcccaatctcttctccaattcgtcgtctctcgaaaagggaagaactcggcttcttccgtcttcacttcagttcttgaagctagaggtacccatcaatcgaatttggtgttcagtgttttgatgaatgcttataccgattctggctatttctcggatgctattcagtgttttaggttggttagaaagcataatttgcaaattccatttcattcttgcggctacctttttgatagattgatgaaattgaatttgaccagtccagcgtgggcgttttatgaggaaattttggattgcgggtacccaccagatgtttgtaaattcaatgttttgatgcataggttgtgtaaggagcataaaataaatgaagcccagttgttgtttggtgaaattgggaagaggggcttgcggcctacagttgttagtttcaatactttgattaacgggtattgtaaatcagggaatttggatcaagggtttaggcttaagaggttcatgatggagaatagggtctttcctgatgtttttacttatagtgttttgattaatgggttatgtaaagagggtcagttggatgatgcgaataagttatttttggagatgtgtgacagaggcttagttccgaatgatgttactttcaccactttgatcaatgggcattgtgtaacgggcagagctgatttgggtatggaaatttatcagcaaatgttgaggaaaggtgtgaaaccggatgtgatcacttacaatactctgattaatggcctttgcaaggttggagatttgagagaagcaaagaagcttgtgattgagatgactcagaggggtttgaagcctgacaaatttacatatacaatgctcattgatggatgttgcaaggagggagatttagaatcagccctggaaattaggaaagaaatggttaaagaagggattgagctggataatgtggctttcacagccctcatttcagggttttgcagagagggacaagttatcgaagcagaaagaacactgagagagatgttggaagcaggtataaaaccagacgatgccacatatacgatggtcattcatgggttttgtaagaagggagatgttaagacgggttttaagttgctcaaggagatgcaatgtgatggccatgtaccaggggttgtaacctataatgtgcttctgaatgggctttgcaagcaagggcagatgaaaaatgctaatatgctcttagatgcaatgctaaatttaggagtggttcccgatgacattacatataacatcctacttgaaaggacactgcaagcatggaaacagggaggattttga

SEQ ID NO: 363 - protein, 559 aa, Vitis vinifera
MATPKILTTRNFLSSPRGGFLCFSTWMTPPTSHCHDPILTTISEAIKVSPTKPLHSSLKRILPSLTPNHLIDLINLNPHSLSPPSLLSFFKWLSTQHHFRLSIHSYCTMTHFLCTHKMLSEAQSLLQFVVSRKGKNSASSVFTSVLEARGTHQSNLVFSVLMNAYTDSGYFSDAIQCFRLVRKHNLQIPFHSCGYLFDRLMKLNLTSPAWAFYEEILDCGYPPDVCKFNVLMHRLCKEHKINEAQLLFGEIGKRGLRPTVVSFNTLINGYCKSGNLDQGFRLKRFMMENRVFPDVFTYSVLINGLCKEGQLDDANKLFLEMCDRGLVPNDVTFTTLINGHCVTGRADLGMEIYQQMLRKGVKPDVITYNTLINGLCKVGDLREAKKLVIEMTQRGLKPDKFTYTMLIDGCCKEGDLESALEIRKEMVKEGIELDNVAFTALISGFCREGQVIEAERTLREMLEAGIKPDDATYTMVIHGFCKKGDVKTGFKLLKEMQCDGHVPGVVTYNVLLNGLCKQGQMKNANMLLDAMLNLGVVPDDITYNILLERTLQAWKQGGF

SEQ ID NO: 364 - DNA, 2670 bp, Medicago truncatula
  CDS (1)..(2670)
atgaagctccgccatctccgtcgcgcacgtctctccctctcacctcttcaaagaaccttttccacttccaaatccaccaacgaaaacgacactcatttcatcacacacatttccgacattgttcgaggaaatctaagttggaaaatcgcattcaacgacccatcaatttcatccacattgaaaccccatcatgtcgaacaagtcttaatcaacaccttacatgattcaaagttagctttacgcttcttcaacttcctcggattacacaaaaacatgaaccacacgacaacctcgtttgctatcttagttcatgccctggttcaaaataagcttttttggcccgcgaattcgcttttgcatacccttctccttcgtgggtcggatccaaaatttgtttttgagaaatttcttgaatctcataagcaatgtaagttttcttccactttggggtttgattttttggttcatagttatttgcaaaatacaagagtttttgatgctgtagttgttttaagactcatgcttggtaatactttgttgcctgaggttagaactttgagtgcaattttaaatgggttattgagaattaggaaatttatattggtttgggaagtttttgatgagtctgtgaatgctggtgttaaacctgatccttatacttgttccgctgtaattcggagcttgtgtgagttaaaagatttttgtagagctaaggaaaagattttgtggatggaatctaataggtttgatttgagtattgtgacttataatgtattgattcatggtctgtgtaagggtggtggggttttggaagctcttgaggttagaaaatcgttgagggaaaagggtttgaaggaagatgttgttacatattgtacattggtgcttggattttgtagggtgcaacagtttgatgatggaatttgcctcatgaatgaaatggttgaattagggtttgttccaactgaggctgctgtatcggggttagtggatgggttgcgaaagaagggaaatattgacagtgcttatgatttggttgttaagttaggaaggtttggttttctaccaaatttgtttgtatataacgcgttaataaacgctttgtgcaaaggtgaggatttggataaagcagagttgctttataaaaatatgcattcgatgaacttgccgctgaatgatgttacttactctattctgattgattccttttgcaaaagggggatgttggatgttgctgaatcttattttggtagaatgatagaagatggtataagagaaaccatttatccctacaactctttgataaatggccattgtaagttcggggatttgagtgctgctgagtttctgtatacaaagatgatcaatgaagggttagagccaactgccactacctttacaacattgattagtggatattgtaaagacctacaagtagaaaaagcattcaagctatatagggagatgaatgagaaagaaattgctccaagtgtttatactttcactgcacttatttacggactttgcagtacaaatgagatggccgaagcatccaaacttttcgacgaaatggtggaaagaaaaatcaagccaactgaggtaacatataatgttatgattgaaggctattgtaaggctcataacatggataaagcctttgaattgcttgaagacatgctccataatggccttgttccagacacatatacatacagacctcttataagtggcctttgttctactggtagggtttcagcagctaaagattttattgatgatctccacaagaagaatctcaagttaaatgagatgtgctatagtgcacttctacatggttattgcggccaaggaagactgacggaggcactgagtgcttcttgtgagatgattcaacgaggaatcaacatggaccttgtttgccacgctgttcttattgatggtgcaatgaagcagcaagacatgaaaaggttatttggtctcttaaaaaagatgtatgatcagggattgagacctgatagtgtgatatatacaagtatgattgatgcatacagcaaagaaggatcttttaaaaaatccggtgaatgtttagatttaatggttactgagaaatgctttcctaatgttgtgacttatactgctttcatgaatggtttatgcaaagttggtgaaatcgatagagcgggtcacctttttgaaaaaatgctgactgcaaatatctctcctaattcagttacatatggttgttttcttgacagtcttacgaaggagggaaatatgaaggaagctacagaccttcaccatgagatgcttaaagggcttttagcaaacactgcaacatataacattcttatccgtggcttctgcaaattgggtagattaatcgaagccaccaaagttctttctgaaatgactgaaaatgggattttccctgactgtataacctattcaactataatttatgagcattgcagaagtggcgatgtaggagcagcagttgaactgtgggataccatgttaagaaaaggtgttgagccagattcagttgcatttaacttgctaatatatggttgctgtgttaatggagcactcgacaaggcatttgaattgcgtaatgacatgctgagtagagggttgaagccaagacaaattttacaattgcagaaggtgtaa

SEQ ID NO: 365 - protein, 889 aa, Medicago truncatula
MKLRHLRRARLSLSPLQRTFSTSKSTNENDTHFITHISDIVRGNLSWKIAFNDPSISSTLKPHHVEQVLINTLHDSKLALRFFNFLGLHKNMNHTTTSFAILVHALVQNKLFWPANSLLHTLLLRGSDPKFVFEKFLESHKQCKFSSTLGFDFLVHSYLQNTRVFDAVVVLRLMLGNTLLPEVRTLSAILNGLLRIRKFILVWEVFDESVNAGVKPDPYTCSAVIRSLCELKDFCRAKEKILWMESNRFDLSIVTYNVLIHGLCKGGGVLEALEVRKSLREKGLKEDVVTYCTLVLGFCRVQQFDDGICLMNEMVELGFVPTEAAVSGLVDGLRKKGNIDSAYDLVVKLGRFGFLPNLFVYNALINALCKGEDLDKAELLYKNMHSMNLPLNDVTYSILIDSFCKRGMLDVAESYFGRMIEDGIRETIYPYNSLINGHCKFGDLSAAEFLYTKMINEGLEPTATTFTTLISGYCKDLQVEKAFKLYREMNEKEIAPSVYTFTALIYGLCSTNEMAEASKLFDEMVERKIKPTEVTYNVMIEGYCKAHNMDKAFELLEDMLHNGLVPDTYTYRPLISGLCSTGRVSAAKDFIDDLHKKNLKLNEMCYSALLHGYCGQGRLTEALSASCEMIQRGINMDLVCHAVLIDGAMKQQDMKRLFGLLKKMYDQGLRPDSVIYTSMIDAYSKEGSFKKSGECLDLMVTEKCFPNVVTYTAFMNGLCKVGEIDRAGHLFEKMLTANISPNSVTYGCFLDSLTKEGNMKEATDLHHEMLKGLLANTATYNILIRGFCKLGRLIEATKVLSEMTENGIFPDCITYSTIIYEHCRSGDVGAAVELWDTMLRKGVEPDSVAFNLLIYGCCVNGALDKAFELRNDMLSRGLKPRQILQLQKV

SEQ ID NO: 366 - DNA, 2742 bp, Oryza sativa subsp
  CDS (1)..(2742)
atggcggagcaccacccgcctcgcctcccgccgtccgccgccggcgccgcggcgacgtcgtggccggagctcctcacgccgttcgacctctcccgcctccgcgccacgctcgcctcccgcccgctcaccccgcgccgcctcggccgcctcctcgcgctcccgctctccccggccacctccctcctcctcctcacctggtacgcctcctcccacccggcactctcctccctcccgctccgccctctcctcgccggcggcgaccccgaccgcgccctctccctcctcgactccctcccgcccggcttcctcccactccgcgagtccctcctcctcccgctgctccgatctttgcctcccggtcgcgccctccacctgctcgaccaattgccccgccgcttcggtgttcagccgtcgttccgctcctacaacgtcgtcctgtcagtgctcgccagggcggactgccacgccgacgcgctcgcgctctaccgccggatggtccacagggaccgcgtcccgcccaccaccttcacgttcggcgtcgccgcgcgggcgctctgccgcctcggccgcgccgacgaggcgctcgcgctgctccgcgggatggcgcggcacgggtgcgtccccgacgccgtgctctaccagacggtgatccacgcgctgtgcgatcagggaggggtcaccgaggccgccacgctgctcaacgagatgctcctcatgggttgcgccgcggacgtgaacacgttcgacgatgtcgtgcgtgggatgtgcggcctcgggcgggtacgcgaggcggcgaggctggttgacaggatgatgacgaaaggctgcatgcccggcgtgatgacgtatggtttcctcctgcagggactgtgcagggtgaggcaggctgatgaggcacgggcaatgctcgggagggtgccggagctgaatgtcgtgttgtttaacacggtgattggcggctgtctcgcagaggggaagctagcagaggctacagagctgtatgagacaatgggtttgaagggctgccaaccagacgcgcacacctacagtatattgatgcatggtctttgcaagcttggaaggatcggttccgctgtgcgattgcttagagaaatggagaagaagggatttgctccgaacgtagtcacctacacgatcgtgctacattccttttgcaagaatggcatgtgggatgacacaagagcattgctggaggagatgtcagcaaagggcttgactttgaattcacaagggtacaatggaatgatatatgcactatgcaaggatggcaggatggacgaggcgatggggctcattcaagagatgagaagtcaagggtgtaaccctgatatttgctcatataatacaataatttatcacttgtgcaacaatgaacagatggaggaagcagaacatatgtttgaaaacttacttgaggagggtgttgttgcaaatggtataacttacaatacaatcattcatgcactgctgcgtgatggaaggtggcaggatgctgtgagacttgcgaaggaaatgatacttcatggttgctcacttgatgttgttagctacaacgggctgataaaagccatgtgcaaagatgggaatgttgatcggagccttgtgcttcttgaagaaatggcagaaaagggtattaagccaaataatgtttcatacaacattctgatcagtgagctttgtaaggagagaagggtacgtgatgctctagagctctcaaagcagatgttgaatcaagggcttgctcctgacattgtcacttacaatacactcataaatggattatgcaaaatgggatggatgcacgccgctctcaatctcctagagaagctacacaatgaaaatgtgcatcctgatattattacatacaatattctcattagttggcactgcaaagtcagattgcttgatgatgctgctatgcttctaaacagggcaatggcagctgtatgtccagtgggtgatcgtagaataatgcagattcttcctgacaagaatttcaagttgtacttacatacaaaaggagatgatttccaacactcactcggctgtgtgaagccatcatgtcctgctgggaaggatcgatgtgaaagaaagactgggcggtgctggcgtgctgctcgccgccggccaggacaggggggcgaacagcttgagaggatcatccgggctctagtgcgccgtactcgacacagcaggggccgtggtgcgggcattgccggccgtgccctcggtctcctccccctagcttcgctggacatggaggacaacaccacgatgatggcgccactgcccaaaggaacaccagagccggcaacaccgactccaacaccctcgcgactcgccgagggcctccgatggtgcccgtcatgtgcgctgcaccagaatgaattctggtggagtcaccgcatcactgcgagtcccatgggtggacacatcttcgccgcgccatcaccatcgccggactactcaccagagacgccgctgcacatacctacaccggttattccgctggagttcctcctcattggaaccctcgctgcacgtcgtggagccccgcccttctacatggcagcatggggctccggcgagagctccgcccctccaccgacccctctattccccgacccccgccgcatcatcaagaacgggcatgtcccggccaagacaagcggcagtggcaagcctagtcgtcctccatcctcgagtgagtgggaggtctga

SEQ ID NO: 367 - protein, 913 aa, Oryza sativa subsp
MAEHHPPRLPPSAAGAAATSWPELLTPFDLSRLRATLASRPLTPRRLGRLLALPLSPATSLLLLTWYASSHPALSSLPLRPLLAGGDPDRALSLLDSLPPGFLPLRESLLLPLLRSLPPGRALHLLDQLPRRFGVQPSFRSYNVVLSVLARADCHADALALYRRMVHRDRVPPTTFTFGVAARALCRLGRADEALALLRGMARHGCVPDAVLYQTVIHALCDQGGVTEAATLLNEMLLMGCAADVNTFDDVVRGMCGLGRVREAARLVDRMMTKGCMPGVMTYGFLLQGLCRVRQADEARAMLGRVPELNVVLFNTVIGGCLAEGKLAEATELYETMGLKGCQPDAHTYSILMHGLCKLGRIGSAVRLLREMEKKGFAPNVVTYTIVLHSFCKNGMWDDTRALLEEMSAKGLTLNSQGYNGMIYALCKDGRMDEAMGLIQEMRSQGCNPDICSYNTIIYHLCNNEQMEEAEHMFENLLEEGVVANGITYNTIIHALLRDGRWQDAVRLAKEMILHGCSLDVVSYNGLIKAMCKDGNVDRSLVLLEEMAEKGIKPNNVSYNILISELCKERRVRDALELSKQMLNQGLAPDIVTYNTLINGLCKMGWMHAALNLLEKLHNENVHPDIITYNILISWHCKVRLLDDAAMLLNRAMAAVCPVGDRRIMQILPDKNFKLYLHTKGDDFQHSLGCVKPSCPAGKDRCERKTGRCWRAARRRPGQGGEQLERIIRALVRRTRHSRGRGAGIAGRALGLLPLASLDMEDNTTMMAPLPKGTPEPATPTPTPSRLAEGLRWCPSCALHQNEFWWSHRITASPMGGHIFAAPSPSPDYSPETPLHIPTPVIPLEFLLIGTLAARRGAPPFYMAAWGSGESSAPPPTPLFPDPRRIIKNGHVPAKTSGSGKPSRPPSSSEWEV

SEQ ID NO: 368 - DNA, 1830 bp, Oryza sativa
  CDS (1)..(1830)
atgcagagggctctccgcctccgccaccgcccgcggcggccgcctcctgttcctgcccaggcaccgccgccgtcccctcgcccatggtacgccgcgccaccaccgccgccgcaggccgcggcggccgatcccctcctcgtcgccgcctccgaggtcgcgctcgccctccccgtccacccggcgccgctcccgtccgccgcgccggcaccgctcctccgcctcctccccgccttcacctccgaccacttcctctccctcctccgcctcaacccgctctccctcccgcccctcccgctccactccctcttccgcctcctcctcgtcgcctctcctccgggcctcttccgccacaccccggcctctttcctctccatggcgtgccacctcctccgccaccgccttccgcacctggctcatccgctcctacgcctcctcgcctcccgtctcggccgctcctccccgccgcgcgtcctccctctcctcctctccgccgccgccgccgcccccggcgacccggcgtctcttttgtctgcactctcctcggcctacgccgaggagggcctcctccccgacgcgtgcaccctcgtcctcctcgccctccgccgtggcatccgcctcgagcccacctcgtgtactggtctcatgagccggttccccactgctcccgaagcctgcgccttctatctgcaactgcttgacgcgggcctgcccccggaggccaagctgttcaacgttctgatgcgtgaccttgtcagattgggtgagcttgcaagtgcacagaacgtgttcgacgaaatgcagagcaggggcgtgcggcggacggttgtcagctttaacaccatgatttcggggatgtgcagggctggtgatctggacggtgcggaaactctgcacagaaggatgtcggaggcaggtgtcacgccggatgtgtacacttatggtgctttgatacagggattgtgcagggtggggaggatagaagatgcaagaggggtgtttgagaaaatgtgcgggagaggtatgaagcccaatgcagttgtgttcacgattttgatagacgcacattgcaagaagggtgatgcagagactatgctggagctgcaccgggagatgagagaaaggggtgtgaggccagatgcggtaacgtacaatgcaatagtcaatgggctctgccgggcaagagatttgaagtctgctagtggaattgtggtggagatgaggagtgctggtctcaggccagacacggttacttatactaccctcattgatggttattgcaaggaagaagagttagacatggcgatggagattaaacagaatatggtggctgaaggggttggattggatgaggtgacatatacagcactcatatcagggctgagcaaggcagggcgatcagctgatgccgagagagttctgggtgagatgatggaggctggtttggagcctgataacacgacctacacaatggtgattgatgctttctgtaggaaaggggacgtgaagacaggccttagactcctgaaggaaatgcagaataagggtagaaaaccaggagttgtgacatataatgttattatgaatggtttctgcaagctggggcagatgaagaatgcagacatgcttcttaatgcaatgattaatataggtgtatctccagatgatatcacatacaacattctcttggatgggcattgcaagcatggaaaagttacagatattgaagaactgaagagtgcaaaaggaacagtgccagatttgggtgtctatacttctatagtcggtgaaattgtcaagaagaaaacaactaagacttaccatgacagataa

SEQ ID NO: 369 - protein, 609 aa, Oryza sativa
MQRALRLRHRPRRPPPVPAQAPPPSPRPWYAAPPPPPQAAAADPLLVAASEVALALPVHPAPLPSAAPAPLLRLLPAFTSDHFLSLLRLNPLSLPPLPLHSLFRLLLVASPPGLFRHTPASFLSMACHLLRHRLPHLAHPLLRLLASRLGRSSPPRVLPLLLSAAAAAPGDPASLLSALSSAYAEEGLLPDACTLVLLALRRGIRLEPTSCTGLMSRFPTAPEACAFYLQLLDAGLPPEAKLFNVLMRDLVRLGELASAQNVFDEMQSRGVRRTVVSFNTMISGMCRAGDLDGAETLHRRMSEAGVTPDVYTYGALIQGLCRVGRIEDARGVFEKMCGRGMKPNAVVFTILIDAHCKKGDAETMLELHREMRERGVRPDAVTYNAIVNGLCRARDLKSASGIVVEMRSAGLRPDTVTYTTLIDGYCKEEELDMAMEIKQNMVAEGVGLDEVTYTALISGLSKAGRSADAERVLGEMMEAGLEPDNTTYTMVIDAFCRKGDVKTGLRLLKEMQNKGRKPGVVTYNVIMNGFCKLGQMKNADMLLNAMINIGVSPDDITYNILLDGHCKHGKVTDIEELKSAKGTVPDLGVYTSIVGEIVKKKTTKTYHDR

SEQ ID NO: 370 - DNA, 1749 bp, Zea mays
  CDS (1)..(1749)
atgtcacattttgtggacataagatgctgcggatgtggtatttggcctgccccggtaatcataaacgcgtctgcgcgctctttccggataagagcacggtctgtctctttggattatcccagtaggactgagcagaagaatgagactaatctagtggtggtacgaccagagcgaaggctgcgggatgattttgtcgatgcaggtgcagaccatggaagtggcagagcaactgcagatttcaagaaggcagttccatccttcgatgctaatctgagaaacctgttggatgagcaactaaaaccaggaaggcccttggatcataactcgggcaaggtggcaaatagtgcatgcttttcaaagcataaaaccggctgttatgcttacagcctccgcaggcactgcaacaatgggaagctcattcaagcttgccgcatcatcgatgagatggtgttacatggccaagtaccagattcaaagtgttgtgttagattaattcgtggccttgtgagaactggtaatacaaataaagctaggcatgttcttgaggtcatggtgctctcaggtggggttcctgacaccatcacctgcaacatgttgattgggcaactttgctgtgaagggcagctgagttctgcgatgaaagtattggaggatatgaggtttactggttgctctcctagtggcatcactttcaatactttgattaggtgcatgtgcagccatcatttgtatgacagggcagtctccttttggaaagagcagctgaaaataggttggccaccatatgagatgacgagcaccttgcttgttgacctcatatgcaaacaatgtggtcccatgcgggctctggaagtattagatgaacttgatttggagggatgtcaaccacatgttgtcagctacaacactcttatcagtgcgtcatgcaaagcaggctgtttgaaggatgcaaagttgatattaactcgtctttcagctgaaggccttgagccaaatggtacaacctattgcatcttgcttcattccctgtgtgacaagagaaggtggtctgaagtaggtgatttgctcgcacacatgaagcaggcaaatcataagcctgatgttactgcctacaatatctttataaactacttttgtaggtatggacatctggatcaggcaattgatgttctagagatgatggtgagtgagaaatgctttcctgatatagtgacatacaacacacttctgaatgccatctctaaaagggggatggttcaagaagctcttgggattttccattccatcagagaaaatggatgccaggtggttcgcattacatacaacaccctcatagatgctttagcaaaaaggggtgatattattaatgctatgactctatttgatgaaatgattgttgatgggatcaatcctgatgatgtcacttatggttcacttattatggggttctgtaagaagaacatggccaaagaagcactggagcttttgaatcagatgcttgctcttggatttgaggttaaagcaactacattttccatgatgatccaagcattgtgcaaaggttgtaaagctgaagctgctgctgaaatactacgagtaatggtatcaagaaatgtcaaccacaggagtgcattttatctgtctatagtcacaagggttgctaagtcaggtcggcttaaagaggctcaaattctacaccaggaactatacagagcaaggtccctaaagaggattcttaatttattttaa

SEQ ID NO: 371 - protein, 582 aa, Zea mays
MSHFVDIRCCGCGIWPAPVIINASARSFRIRARSVSLDYPSRTEQKNETNLVVVRPERRLRDDFVDAGADHGSGRATADFKKAVPSFDANLRNLLDEQLKPGRPLDHNSGKVANSACFSKHKTGCYAYSLRRHCNNGKLIQACRIIDEMVLHGQVPDSKCCVRLIRGLVRTGNTNKARHVLEVMVLSGGVPDTITCNMLIGQLCCEGQLSSAMKVLEDMRFTGCSPSGITFNTLIRCMCSHHLYDRAVSFWKEQLKIGWPPYEMTSTLLVDLICKQCGPMRALEVLDELDLEGCQPHVVSYNTLISASCKAGCLKDAKLILTRLSAEGLEPNGTTYCILLHSLCDKRRWSEVGDLLAHMKQANHKPDVTAYNIFINYFCRYGHLDQAIDVLEMMVSEKCFPDIVTYNTLLNAISKRGMVQEALGIFHSIRENGCQVVRITYNTLIDALAKRGDIINAMTLFDEMIVDGINPDDVTYGSLIMGFCKKNMAKEALELLNQMLALGFEVKATTFSMMIQALCKGCKAEAAAEILRVMVSRNVNHRSAFYLSIVTRVAKSGRLKEAQILHQELYRARSLKRILNLF

SEQ ID NO: 372 - DNA, 1752 bp, Glycine max
  CDS (1)..(1752)
atggttataggcaaacttactggacctgtacaaggttcagtcttccagtcattgagcatatctacaatttcagagcttttgagtaaccaacactggtcagagctcaaaccccattttagaacaaccaaacctgcaatattccttgaccaattgttcaatgcgggggttgattcagagcttgttttaaggttctttcagtggtctcagaaagagttcaggatttcatatggtcttgaaacaactggcaaagttttacatcttctagcaaattcaaaaaagtactctaaagtcaggtcctttttggataaacttgtgaagaatgagaaacatactgtttcttctgtttttcactctcttttgttgggtggtgatcgaccttgtgcaaatgctctaataactgatatgttggtcctagcatatgtgacaaatttagaaatccactctgcctgtgaagtatttaggcgagttcaagattatggatttaagttatcactgaattcatgcaatccgttgttgagtgctttggtgaaggggaatgaaacaggggaaatgcaatatgtgtacaaggagatgataaagaggagaattcagcctaacttgaccacatttaatattttcatcaatggtctctgtaaagctggtaagttgaataaggcagaggatgttattgaagacatcaaagcctggggattttccccaaacatagttacttataacactttgattgatgggcattgcaagaagggcagtgccggaaaaatgtacagagctgatgccattttgaaggaaatgcttgctaataaaatttgtccgaatgagattacctttaacactcttattgatggtttttgtaaggatgagaatgtgttggctgcaaagaatgcttttgaagagatgcaaaggcagggactgaaacctaatatagttacttacaactcactgataaatggtttatctaataatgggaaactacatgaggctattgctttgtgggataagatggttggcttgggtttgaagccaaatattgttacttttaatgctctaattaatgggttttgtaagaagaagatgattaaggaagcaagaaaactcttcgatgatatagctgaacaagatttggttcccaatgcaataacattcaatacaatgattgatgcattctgcaaagccgggatgatggaagaaggatttgcactgcctaattcaatgctagatgaaggcatttttccaaatgtttcaacctataattgcttaattgcagggttatgcagaaatcagaatgtaagagctgcaaagaagcttcttaatgaaatggagaactatgaattgaaagccgatgttgtaacatataacatcttaataggtgggtggtgcaaagatggtgaaccaagtaaggcagaaaaattacttggtgaaatgctcaacgttggtgtcaaacctaatcatgtaacatataatacattgatggatggatattgtatggagggaaatctcaaggcagcattgaaggtgaggacccagatggagaaagaagggaagcgtgcaaatgttgtcacatataatgtgttgattaaaggattttgtaaaacaggcaagctagaggatgcaaacaggcttctcaatgagatgttggaaaagggtttgaaccctaatcgtactacctacgatgtagtaagactggaaatgttggagaaaggttttattccggacatagagggacacttgtataatatttctagcatgtcttaa

SEQ ID NO: 373 - protein, 583 aa, Glycine max
MVIGKLTGPVQGSVFQSLSISTISELLSNQHWSELKPHFRTTKPAIFLDQLFNAGVDSELVLRFFQWSQKEFRISYGLETTGKVLHLLANSKKYSKVRSFLDKLVKNEKHTVSSVFHSLLLGGDRPCANALITDMLVLAYVTNLEIHSACEVFRRVQDYGFKLSLNSCNPLLSALVKGNETGEMQYVYKEMIKRRIQPNLTTFNIFINGLCKAGKLNKAEDVIEDIKAWGFSPNIVTYNTLIDGHCKKGSAGKMYRADAILKEMLANKICPNEITFNTLIDGFCKDENVLAAKNAFEEMQRQGLKPNIVTYNSLINGLSNNGKLHEAIALWDKMVGLGLKPNIVTFNALINGFCKKKMIKEARKLFDDIAEQDLVPNAITFNTMIDAFCKAGMMEEGFALPNSMLDEGIFPNVSTYNCLIAGLCRNQNVRAAKKLLNEMENYELKADVVTYNILIGGWCKDGEPSKAEKLLGEMLNVGVKPNHVTYNTLMDGYCMEGNLKAALKVRTQMEKEGKRANVVTYNVLIKGFCKTGKLEDANRLLNEMLEKGLNPNRTTYDVVRLEMLEKGFIPDIEGHLYNISSMS

SEQ ID NO: 374 - DNA, 1911 bp, Zea mays
  CDS (1)..(1911)
atgatgacgcgttgcggtgtacaactcctggtggcacgggggatctcctcatcaccatgcctttctcggaggatcaaccaaacggaaagtgaaattgttcggatgtttcatcctccaattcgtcagagtgaggaagcaatagcaaccattgtgccaaggtacacatattctatgcgtgtcttggatgagaggttcattaggatcctgaagatattcaagtggggccctgatgctgagaaggcgctggaggttctcatgcttagagttgatcactggttggtacgagaggttatgaaaactgacgttggggtcaatgtgaagatgcagttcttcagatgggctgcaaagcggaggaattatgagcatgacacatccacttacatggcattgatacattgtttggaagtagtggagcagtatggtgagatgtggaagatgatccaagaaatggtacggaatcccatttgtgttgttaccccaacagaactttcagatgtagttcggaagctggggaatgctaagatggtcagcaaggcaattgcaatcttctaccagatcaaaacgcggaagtgtcagccaactgcacaggcatataacagcatgataataatgttgatgcatgagggccaatatgagaaagtccatcaactatacaatgagatgagcactgagggtcattgcttcccagacactatgacatatagtgcattgatttctgccttttgcaaattaggtcgacgtgattcagcaattcagttgttgaatgagatgaaggagatcggtatgcagccaactactaagatatatacaatgttaatagctttgttcttcaaattcaatgatgctcatggagcattgagtttgtttgaagaaatgaggcatcagtattgccgaccggatgtgtttacttacactgagctaatcagaggccttggtaaagctggcagaatagatgaagcatatcacttcttctgtgaaatgcagcgagaaggctgcaggccagacacagtttttatgaataatatgataaatttcttaggcaaggctggccgtttgaatgatgctacgaagttgtttcaggagatggaaacgttgcggtgcattcctagtgtggtgacatacaatactatcataaaagcactttttgaatcaaaatctcgtgcttctgaggttccatcttggtttgaaagaatgaaggcaagtggaatctcccccagttcgttcacctattctatccttattgatggattctgcaaaaccaacaggatggagaaggccatgatgctactggaagagatggatgaaaagggtttccctccatgtccagcggcatattgtagcctgattgatgctcttggaaaagccaagcgttatgatcttgcttgtgagctttttcaggaactaaaggaaaattgtggctcgtccagtgctcgggtatatgcagttatgattaaacacttaggaaaggctggacggcttgatgatgctataaatatgtttgacgaaatgaacaaacttggttgcgctcctgatgtttatgcgtacaatgctctcatgtctggattagcaagaacaggcatgattgatgaagctcttagtacgatgagaagaatgcaagagcatgggggtattcctgatatcaattcatacaatattatccttaatgggctggcaaaaacgggaggacctcaccgtgcaatggaaatgctttccaacatgaaacaatctacagtaagacctgatgttgtctcctataatactgtccttggtgccttgagtcatgctggcatgtttgaggaggcatcaaagctgatgaaagagatgaatacattggggtttgagtacgatcttattacatattcatctatacttgaggctattggaaaggttgatcatgaatgtgacccttaa

SEQ ID NO: 375 - protein, 636 aa, Zea mays
MMTRCGVQLLVARGISSSPCLSRRINQTESEIVRMFHPPIRQSEEAIATIVPRYTYSMRVLDERFIRILKIFKWGPDAEKALEVLMLRVDHWLVREVMKTDVGVNVKMQFFRWAAKRRNYEHDTSTYMALIHCLEVVEQYGEMWKMIQEMVRNPICVVTPTELSDVVRKLGNAKMVSKAIAIFYQIKTRKCQPTAQAYNSMIIMLMHEGQYEKVHQLYNEMSTEGHCFPDTMTYSALISAFCKLGRRDSAIQLLNEMKEIGMQPTTKIYTMLIALFFKFNDAHGALSLFEEMRHQYCRPDVFTYTELIRGLGKAGRIDEAYHFFCEMQREGCRPDTVFMNNMINFLGKAGRLNDATKLFQEMETLRCIPSVVTYNTIIKALFESKSRASEVPSWFERMKASGISPSSFTYSILIDGFCKTNRMEKAMMLLEEMDEKGFPPCPAAYCSLIDALGKAKRYDLACELFQELKENCGSSSARVYAVMIKHLGKAGRLDDAINMFDEMNKLGCAPDVYAYNALMSGLARTGMIDEALSTMRRMQEHGGIPDINSYNIILNGLAKTGGPHRAMEMLSNMKQSTVRPDVVSYNTVLGALSHAGMFEEASKLMKEMNTLGFEYDLITYSSILEAIGKVDHECDP

SEQ ID NO: 376 - DNA, 1794 bp, Zea mays
  CDS (1)..(1794)
atgctaagtgtcgaggctcacacgtactactactacccgaccgcgaggccgagacggaagctatgcgcctgcagaaacgtcttgcaagaaaccgccccgcgtgacgcggaggcaaatccctgccgccacggcgagaggaagagcaggagaaggggcgacggtgcttattacatcgacaaggacggcggcggcgtagccaggaccttcgaccggaagaaaatatccagaaagagggggggtgctatcaaagggcgtggatggaagtacggctccgggttcgtcgacggagtgttcccagtgctgagtccgatggcgcaggatgtgctagaactcgtgcagacgagggggaccgacgccgccagcgtctgggagtcactggacaagatccctcaagcacacgatctttgggacgacatcgtcaacgtcgccgtccagctccgcctgaaccggcaatgggagccgatcatcacagtctgcgagtgggtcctgcgccggagctcgttccgccccgacatcatctgctacaacctgctcatcgacgcgtacggccagaagcgtcagctgagcgaggcggaggcggcctacatggcgcttctggaggctcgctgcgtgcctacggaggacacctacgctctgctgctgcgcgcgtactgcggctccgggcagctgcaccgagccgagggcgtgatttcggagatgcagaggaacgggatccctcccactgcgactgtgtacaacgcgtacctggacggtctgctgaaagcgaggtgttcggagaaggcggttgaagtgtaccagaggatgaagaaggagcgctgcagaactaacaccgagacctacaccctgatgatcaacgtgtatgggaaagcaaatcagccgatgtcgtcgttgagagtgttcagggagatgaaatcggtcgggtgcaagcccaacatctgcacctacacggcgctggtgaacgcgttcgcgcgggaaggcctgtgcgagaaggcagaggaggtgttcgaggagatgcagcaggctgggcacgaacctgacgtgtacgcctacaatgctctgatggaagcttacagccgcgcagggctgccgcaaggggcgtcggagatcttctctttgatggaacacatggggtgcgagcctgatagagcctcttacaacatactggtggatgctttcggacgagctggtcttcaccaagaggcggaagcagcgttccaagagctgaagcagcagggcatgcggccgacgatgaagtcgcacatgctgctcctgtcggcgcacgccaggtccggcaacgtggcgaggtgcgaggaggtgatggcgcagctgcacaagtccgggctgcgcccggacaccttcgcgctcaacgccatgctcaacgcgtacggccgggccgggcggctggacgacatggagcggctcttcgcggccatggagcgcggcgacggcgcgatcgccggcgccccggacaccagcacgtacaacgtgatggtgaacgcgtacgggcgcgcggggtacctggaccggatggaggcggcgttccgctccctggcggcgcggggcctcgccgccgacgtggtgacgtggacgtcccgcatcggcgcgtacgccaggaagaaggagtacgggcagtgcctgcgggtcttcgaggagatggtggacgccgggtgctacccggacgccggcaccgccaaggtgctgctcgccgcgtgctccgacgagcgccaggtggagcaggtcaaggccattgtcaggtccatgcacaaggacgccaagacgctcttcgcattgtga

SEQ ID NO: 377 - protein, 597 aa, Zea mays
MLSVEAHTYYYYPTARPRRKLCACRNVLQETAPRDAEANPCRHGERKSRRRGDGAYYIDKDGGGVARTFDRKKISRKRGGAIKGRGWKYGSGFVDGVFPVLSPMAQDVLELVQTRGTDAASVWESLDKIPQAHDLWDDIVNVAVQLRLNRQWEPIITVCEWVLRRSSFRPDIICYNLLIDAYGQKRQLSEAEAAYMALLEARCVPTEDTYALLLRAYCGSGQLHRAEGVISEMQRNGIPPTATVYNAYLDGLLKARCSEKAVEVYQRMKKERCRTNTETYTLMINVYGKANQPMSSLRVFREMKSVGCKPNICTYTALVNAFAREGLCEKAEEVFEEMQQAGHEPDVYAYNALMEAYSRAGLPQGASEIFSLMEHMGCEPDRASYNILVDAFGRAGLHQEAEAAFQELKQQGMRPTMKSHMLLLSAHARSGNVARCEEVMAQLHKSGLRPDTFALNAMLNAYGRAGRLDDMERLFAAMERGDGAIAGAPDTSTYNVMVNAYGRAGYLDRMEAAFRSLAARGLAADVVTWTSRIGAYARKKEYGQCLRVFEEMVDAGCYPDAGTAKVLLAACSDERQVEQVKAIVRSMHKDAKTLFAL

SEQ ID NO: 378 - DNA, 2388 bp, Zea mays
  CDS (1)..(2388)
atgtcgcgaggggtcagctctggccgccgcacgtgtttggagctggagcggatcatcctaaatcggcaccgctccggaagcctcggccgagaggacgcgctcaacctgttcgatgaattgcttcctcaggccagaccggcatcggtgcacgccttcaatagtgtcctcaccgtcgtcgctcgcgccgactcctcgccgtcaccgcgtcacagcgctgcgctcgccgtgtcccttttcaataccatggcccggtccggcgtcaatatgatggccgccatcataggcatcatcatccgttgcttctgcactgttggccgcttggacctcgccttcgctgcctttgccctgctcctcaagacgggatggagggagcagaacgtgaccctcaaccagctaatcaagggtctctgtgatggcaacaggactgatgacgcaatggatatggtgttcagaagaatgccggagcttggctatacaccggatgttttctcctacaatactcttatcaaggggctctgcgtcgagaaaaagagtcaagaggctcttgagctgctgattcacatgacggccgatggcggatacaactgctctcccaatgtggtgtcgtataacacaatcatcgatggcttctttaaagaaggtgaagtcgacaaagcttacttcctgtttcatgaaatgattggccaggggcttccacctgatgttgtgacatacaactcactcattgatggcatgtgcaaggctcaagcaatggacaaggctgaagcaatcctacaacatatgtttgataaaggtgttatgccgaatacttggacatatagtatcatgatccgtggatattgctctttaggacagttggaagaggcagtgagactgctcaaaaagatgtctggtagtggtcttcaaccggatgttgtcacttacagtcttctgatacagtattattgcaagattggaagatgcgcagaagctaggagtgtctttgattcaatggttcggaagggtcaaaaacccaattctactatctatcacatcttgcttcatgggtacgccaccaaaggagctcttattgatgtgcgtgatctccttgatttgatgattcgagacggtattccgtttgaacatcgtgccttcaacatcttgatttgtgcatacgctaaacatggagcagtggataaggcaatgactgcatttacagaaatgcgacagaatggtttgaggccaaatgtagtcaactacaacacggtaattcacattctttgcaagaccggcagagtggaggatgctgtgtaccatttcaatcagatggtcagtgaagggttgtctcctgacaccataagttatacctcactaatacatggtctatgttccattggtgaatggaagaaggttgaggaactggcttttgaaatgatcaataggggcatccaccctgatgccatattcatgaacacaataatggacaacctatgcaaggaaggaagggttgtggaagcacaagatttctttgatatggttatacacattggtgtgaaaccagatgttgtttcatataatacactgatagatggatattgtttcgttgggaagatggatgaatcgattaagcaatttgatcgtatggtctccattggcttgagacctgacagttggacctataatgctctacttaatggctactttaagaatggaagggttgaagatgcattagctctttacagagaaatgttcaggaaggatgtaaaattttgtgctattacatctaacataatcctgcatgggttatttcaggctggaaggattgttgctgcaagggaattatacatgaaaatggttgacagaggaacacagttgagaatcgaaacatacaacacagttcttggaggactctgtgaaaatagttgtgttgatgaagcgctgagaatgtttgaggacttgcgttcaaaagaatttgagcttgatgtttggactttcaatatagtgattaatgcattgctgaaagttggtaggattgatgaagcaaagagcctgttttcagctatggtgctccgtggtccagtgcctcatgtgataacctacagcttaatgatcaaaagtcgtatagaagaaggtttgttagaggagtctgatgatctttttctatctatggagaagaatggctgtgctgccgactcacacatgctaaacgtcataattagaagactacttgaaaaaggagatgtgagaaaggctggaacctacctaaccaaaattgatgagaagaacttctccgttgaagcttccaccgctgcattgctgattcctattgtttcagagaagaagtaccagaaagaagtaaagtttcttcctgaaaaataccactctttcatggaacctagggatgattga

SEQ ID NO: 379 - protein, 795 aa, Zea mays
MSRGVSSGRRTCLELERIILNRHRSGSLGREDALNLFDELLPQARPASVHAFNSVLTVVARADSSPSPRHSAALAVSLFNTMARSGVNMMAAIIGIIIRCFCTVGRLDLAFAAFALLLKTGWREQNVTLNQLIKGLCDGNRTDDAMDMVFRRMPELGYTPDVFSYNTLIKGLCVEKKSQEALELLIHMTADGGYNCSPNVVSYNTIIDGFFKEGEVDKAYFLFHEMIGQGLPPDVVTYNSLIDGMCKAQAMDKAEAILQHMFDKGVMPNTWTYSIMIRGYCSLGQLEEAVRLLKKMSGSGLQPDVVTYSLLIQYYCKIGRCAEARSVFDSMVRKGQKPNSTIYHILLHGYATKGALIDVRDLLDLMIRDGIPFEHRAFNILICAYAKHGAVDKAMTAFTEMRQNGLRPNVVNYNTVIHILCKTGRVEDAVYHFNQMVSEGLSPDTISYTSLIHGLCSIGEWKKVEELAFEMINRGIHPDAIFMNTIMDNLCKEGRVVEAQDFFDMVIHIGVKPDVVSYNTLIDGYCFVGKMDESIKQFDRMVSIGLRPDSWTYNALLNGYFKNGRVEDALALYREMFRKDVKFCAITSNIILHGLFQAGRIVAARELYMKMVDRGTQLRIETYNTVLGGLCENSCVDEALRMFEDLRSKEFELDVWTFNIVINALLKVGRIDEAKSLFSAMVLRGPVPHVITYSLMIKSRIEEGLLEESDDLFLSMEKNGCAADSHMLNVIIRRLLEKGDVRKAGTYLTKIDEKNFSVEASTAALLIPIVSEKKYQKEVKFLPEKYHSFMEPRDD

SEQ ID NO: 380 - DNA, 23 bp, Artificial sequence
  primer
atgttcagaatcgaaattctaag

SEQ ID NO: 381 - DNA, 23 bp, Artificial sequence
  primer
ttatctgttccggtgatcttttg

SEQ ID NO: 382 - protein, 479 aa, Artificial sequence
  consensus sequence
  Variant (2)..(54): Xaa in position 2 to 54 is any amino acid
  Variant (55)..(60): Xaa in position 55 to 60 is any or no amino acid
  Variant (62)..(65): Xaa in position 62 to 65 is any amino acid
  Variant (67)..(73): Xaa in position 67 to 73 is any amino acid
  Variant (74)..(108): Xaa in position 74 to 108 is any or no amino acid
  Variant (110)..(119): Xaa in position 110 to 119 is any amino acid
  Variant (121)..(122): Xaa in position 121 to 122 is any amino acid
  Variant (124)..(133): Xaa in position 124 to 133 is any amino acid
  Variant (135)..(143): Xaa in position 135 to 143 is any amino acid
  Variant (144)..(146): Xaa in position 144 to 146 is any or no amino acid
  Variant (148)..(153): Xaa in position 148 to 153 is any amino acid
  Variant (155)..(160): Xaa in position 155 to 160 is any amino acid
  Variant (161)..(163): Xaa in position 161 to 163 is any or no amino acid
  Variant (165)..(167): Xaa in position 165 to 167 is any amino acid
  Variant (170)..(176): Xaa in position 170 to 176 is any amino acid
  Variant (179)..(191): Xaa in position 179 to 191 is any amino acid
  Variant (193)..(195): Xaa in position 193 to 195 is any amino acid
  Variant (197)..(199): Xaa in position 197 to 199 is any amino acid
  Variant (201)..(214): Xaa in position 201 to 214 is any amino acid
  Variant (216)..(226): Xaa in position 216 to 226 is any amino acid
  Variant (228)..(230): Xaa in position 228 to 230 is any amino acid
  Variant (232)..(238): Xaa in position 232 to 238 is any amino acid
  Variant (241)..(254): Xaa in position 241 to 254 is any amino acid
  Variant (255)..(255): Xaa in position 255 is any or no amino acid
  Variant (257)..(278): Xaa in position 257 to 278 is any amino acid
  Variant (280)..(290): Xaa in position 280 to 290 is any amino acid
  Variant (292)..(297): Xaa in position 292 to 297 is any amino acid
  Variant (299)..(312): Xaa in position 299 to 312 is any amino acid
  Variant (314)..(367): Xaa in position 314 to 367 is any amino acid
  Variant (369)..(371): Xaa in position 369 to 371 is any amino acid
  Variant (373)..(374): Xaa in position 373 to 374 is any amino acid
  Variant (376)..(379): Xaa in position 376 to 379 is any amino acid
  Variant (380)..(443): Xaa in position 380 to 443 is any or no amino acid
  Variant (445)..(449): Xaa in position 445 to 449 is any amino acid
  Variant (451)..(454): Xaa in position 451 to 454 is any amino acid
  Variant (456)..(459): Xaa in position 456 to 459 is any amino acid
  Variant (461)..(474): Xaa in position 461 to 474 is any amino acid
  Variant (475)..(478): Xaa in position 475 to 478 is any or no amino acid
AXXXXXXXXXXXXXXXXXXXXXXXXXXXXXXXXXXXXXXXXXXXXXXXXXXXXXXXXXXXLXXXXCXXXXXXXXXXXXXXXXXXXXXXXXXXXXXXXXXXXXXXXXXXAXXXXXXXXXXGXXPXXXXXXXXXXGXXXXXXXXXXXXAXXXXXXMXXXXXXXXXPXXXTYXXXXXXXCKXXXXXXXXXXXXXMXXXGXXXNXXXXXXXXXXXXXXGXXXXXXXXXXXMXXXGXXXXXXXYNXXXXXXXXXXXXXXXAXXXXXXXXXXXXXXXXXXXXXXIXXXXXXXXXXXAXXXXXXMXXXXXXXXXXXXXXLXXXXXXXXXXXXXXXXXXXXXXXXXXXXXXXXXXXXXXXXXXXXXXXXXXXXXXMXXXGXXPXXXXXXXXXXXXXXXXXXXXXXXXXXXXXXXXXXXXXXXXXXXXXXXXXXXXXXXXXXXXXXXXXXXXYXXXXXGXXXXGXXXXAXXXXXXXXXXXXXXXXXXY

SEQ ID NO: 383 - protein, 41 aa, Artificial sequence
  protein pattern
  Variant (2)..(2): Xaa in position 2 is Asn or Thr
  Variant (3)..(3): Xaa in position 3 is any amino acid
  Variant (4)..(4): Xaa in position 4 is Phe, Ile, Leu or Met
  Variant (5)..(5): Xaa in position 5 is Ile, Leu or Met
  Variant (6)..(6): Xaa in position 6 is Asp, Glu, Gly or Asn
  Variant (7)..(8): Xaa in position 7 to 8 is any amino acid
  Variant (9)..(9): Xaa in position 9 is Ala or Cys
  Variant (10)..(10): Xaa in position 10 is Lys or Arg
  Variant (11)..(16): Xaa in position 11 to 16 is any amino acid
  Variant (18)..(19): Xaa in position 18 to 19 is any amino acid
  Variant (20)..(20): Xaa in position 20 is any or no amino acid
  Variant (22)..(30): Xaa in position 22 to 30 is any amino acid
  Variant (31)..(31): Xaa in position 31 is any or no amino acid
  Variant (33)..(33): Xaa in position 33 is Asp, Asn or Ser
  Variant (34)..(35): Xaa in position 34 to 35 is any amino acid
  Variant (36)..(36): Xaa in position 36 is Ser or Thr
  Variant (38)..(38): Xaa in position 38 is Asn, Arg or Ser
  Variant (39)..(39): Xaa in position 39 is any amino acid
  Variant (40)..(40): Xaa in position 40 is Leu, Met or Val
  Variant (41)..(41): Xaa in position 41 is Ile, Leu or Met
YXXXXXXXXXXXXXXXAXXXLXXXXXXXXXXPXXXXYXXXX

SEQ ID NO: 384 - protein, 48 aa, Artificial sequence
  protein pattern
  Variant (2)..(12): Xaa in position 2 to 12 is any amino acid
  Variant (13)..(13): Xaa in position 13 is Ala, Cys, Gly or Ser
  Variant (14)..(19): Xaa in position 14 to 19 is any amino acid
  Variant (20)..(20): Xaa in position 20 is Leu or Met
  Variant (21)..(26): Xaa in position 21 to 26 is any amino acid
  Variant (28)..(28): Xaa in position 28 is Asp or Asn
  Variant (29)..(30): Xaa in position 29 to 30 is any amino acid
  Variant (31)..(31): Xaa in position 31 is Ala, Ser or Thr
  Variant (32)..(34): Xaa in position 32 to 34 is any amino acid
  Variant (36)..(36): Xaa in position 36 is Ile or Leu
  Variant (37)..(37): Xaa in position 37 is any amino acid
  Variant (38)..(38): Xaa in position 38 is Ala, Glu, Gly or Ser
  Variant (39)..(47): Xaa in position 39 to 47 is any amino acid
  Variant (48)..(48): Xaa in position 48 is Ala or Val
IXXXXXXXXXXXXXXXXXXXXXXXXXPXXXXXXXLXXXXXXXXXXXXX

SEQ ID NO: 385 - DNA, 621 bp, Arabidopsis thaliana
  CDS (1)..(621)
atggaaaccgtcgggcgtccacgtggcagacctcgaggttccaaaaacaaacctaaagctccaatctttgtcaccattgaccctcctatgagtccttacatcctcgaagtgccatccggaaacgatgtcgttgaagccctaaaccgtttctgccgcggtaaagccatcggcttttgcgtcctcagtggctcaggctccgttgctgatgtcactttgcgtcagccttctccggcagctcctggctcaaccattactttccacggaaagttcgatcttctctctgtctccgccactttcctccctcctctacctcctacctccttgtcccctcccgtctccaatttcttcaccgtctctctcgccggacctcaggggaaagtcatcggtggattcgtcgctggtcctctcgttgccgccggaactgtttacttcgtcgccactagtttcaagaacccttcctatcaccggttacctgctacggaggaagagcaaagaaactcggcggaaggggaagaggagggacaatcgccgccggtctctggaggtggtggagagtcgatgtacgtgggtggctctgatgtcatttgggatcccaacgccaaagctccatcgccgtactga

SEQ ID NO: 386 - protein, 206 aa, Arabidopsis thaliana
METVGRPRGRPRGSKNKPKAPIFVTIDPPMSPYILEVPSGNDVVEALNRFCRGKAIGFCVLSGSGSVADVTLRQPSPAAPGSTITFHGKFDLLSVSATFLPPLPPTSLSPPVSNFFTVSLAGPQGKVIGGFVAGPLVAAGTVYFVATSFKNPSYHRLPATEEEQRNSAEGEEEGQSPPVSGGGGESMYVGGSDVIWDPNAKAPSPY

SEQ ID NO: 387 - DNA, 1326 bp, Brassica napus
  CDS (279)..(1214)
cctcttacctttccccaaccttagagagagatcatttgacatatataagttacctttttctcttttcttggtgtttaatttagttctgttctcgccccttctttagctaatattggctcctcaaatctttaattttgacttcttgatctgagttcttgtttttatcttcacgctcttcctctcatcaatatatgagcgagaaggatcaagaatcaagaagttgatgtgtgccggcgaataaacagtggtgggatagagaactagtagatgcagcggcgatggaaggcggttacgagcaaggcggtggagctaattctagatacttccataacctcttcagacaggagattcaccatcaacagtttcaaccgcaaggcgggatcagcttgattgaccagcatcaccatcagcaacaacacgagcaccagcagcagcaaccgtcggatgattcaagagaatctgatcactcaaacaaagaccatcatcaaccgggtggaccagattcatcagaccgggctacatcaagctcagcaccagggaaacgtccacgtggacgtcctccaggatctaagaacaaagctaagccaccgatcatagtaacacgcgatagccccaatgcgcttagatctcacgttcttgaagtatctcccggagctgacatagttgagagtgtgtccacttacgctaggaggagagggagaggggtctccgttttaggaggaaacggcaccgtttctaacgtcactctccgtcagccagtcacttctggaaatggcgttggcgttggagccggaggagttgtgactttacatggaaggtttgagattctttcgttaacgggaaccgttttgccaccacctgcgccacctggggctggtggtctgtcgatttttctagccggagggcaaggtcaggtggttggaggagtcgtcgtggccccgcttgttgcatcagctccggttatactaatggctacttcgttctcaaatgcggttttcgagagactgcctatcgaggaggaagaggaagaaggcggtgatggacgaggaggaggaggaccaccgcagatgcagcaagctccatcagcatctccgccgtcgggagtgactggtcagggacagttaggacgtaatgtcggtggttatgggttttccgctgatcctcatttgcatggatggggagctggtacaccttcaagaccaccttttaattgaatcttatgtgttttaatcattttgtggagtcgtctttcatttgggatcttcggtaattattatttttagttgatatgcatatttgcgttttaatgtctaaaaaaaaaaaaaa

SEQ ID NO: 388 - protein, 311 aa, Brassica napus
MEGGYEQGGGANSRYFHNLFRQEIHHQQFQPQGGISLIDQHHHQQQHEHQQQQPSDDSRESDHSNKDHHQPGGPDSSDRATSSSAPGKRPRGRPPGSKNKAKPPIIVTRDSPNALRSHVLEVSPGADIVESVSTYARRRGRGVSVLGGNGTVSNVTLRQPVTSGNGVGVGAGGVVTLHGRFEILSLTGTVLPPPAPPGAGGLSIFLAGGQGQVVGGVVVAPLVASAPVILMATSFSNAVFERLPIEEEEEEGGDGRGGGGPPQMQQAPSASPPSGVTGQGQLGRNVGGYGFSADPHLHGWGAGTPSRPPFN

SEQ ID NO: 389 - DNA, 1165 bp, Brassica napus
  CDS (118)..(960)
gctatctcttacattaaatctaaacctaaatcattagaatccctaattacgttttaaaaatcccaactccctttttaaatatattttgtttgttttttttctcagtttgatattggcatggctggtctcgatctaggcacaacttctcgctacgttcacaacgtcgaaggcggcggtgttggccagttctccaccgacaaccaccacggagatgacgctggaggaaaccaccatcataaccataaccatcatcaaggtttggatttgatagcttctaatgacaactctggactaggcgatggcggcggaggagggagcggtgagctcgttatgcggcgtccacgtggccgtccagctggatcgaagaacaaaccgaaacctccaatgatcgtcacgcgcgagagcgcaaacactcttagggctcacatttttgaagtcggaagtggctgcgacgtcttcgagtgtatctccacttacgcgcggcggagacagcgagggatttgcgttctttccggaacaggaaccgtcactaacgtcagcatccgtcagccgacggcggtcggagctgttgtgactttgcgaggcactttcgagattctttccctctctggatcttttctcccgccgcctgctcctccaggagcgacgaacttgacgatattcctcgccggagctcagggacaagtcgttggaggtaacgtcgttggagaattgatggcggcggggccggtgatggtcatggcggcttcttttacgaacgtggcgtatgaaaggttgcctttggacgagcacgaggagcagttacaagtccaaagcggcggaggaaatatgtacacggaagccaccaacggaggtggaggcggaagcttgccgttcttcaatttaccaataagtttgcctcatatgggagttgaaaactggccggggaactcgtccggcgcctgtagggctccgttttagctactgttttaacaaacttaattttttttttttttcagattttctttgtgacggaatttaataatatatggagttatgatttttttttaaaacaattgttcatgtattgacctctcagtacatgcttcaagtttttttttacttaattatcgatttatatttaaagcttctaataaaataatattcgactaaaaaaaaaaaaaaa

SEQ ID NO: 390 - protein, 280 aa, Brassica napus
MAGLDLGTTSRYVHNVEGGGVGQFSTDNHHGDDAGGNHHHNHNHHQGLDLIASNDNSGLGDGGGGGSGELVMRRPRGRPAGSKNKPKPPMIVTRESANTLRAHIFEVGSGCDVFECISTYARRRQRGICVLSGTGTVTNVSIRQPTAVGAVVTLRGTFEILSLSGSFLPPPAPPGATNLTIFLAGAQGQVVGGNVVGELMAAGPVMVMAASFTNVAYERLPLDEHEEQLQVQSGGGNMYTEATNGGGGGSLPFFNLPISLPHMGVENWPGNSSGACRAPF

SEQ ID NO: 391 - DNA, 1124 bp, Brassica napus
  CDS (1)..(948)
atggcgaatccatggtggacaggacaagtgaatctctccggcctcgaaacgacgccgccgagttcctctcagttaaagacaccagatctccacatctccatgaatatggccatggactcaggtcataacaaccaccaccatcatcaccaagaagtcaacaccaacaacaacaacgaagacgatagagacaacttgagcggcgacgaccacgagccacgtgaaggagccgtggaagctcccacgcgccgaccacgtggacgtcctgctggttccaagaacaaaccaaagccaccaatctttgtcacgcgtgactctccaaacgctctcaagagccatgtcatggagatcgctagtgggactgacgtcatcgaaaccctagctactttcgctaggcggcgccaacgtggcatctgcatcttgagcggtaacggcacggtggctaacgtcacactccgtcaaccatcagtggctcccgttgcagctgcccctggtggtgcggctgtattggcgttacaagggaggtttgagattctttctctaaccggttctttcttacctggaccggctccacctggatccactggtttaactatttacttagctggtggtcaaggtcaggttgttggaggaagcgtggtggggccattgatggctgctggtccggtgatgctaatcgctgccacgttttctaatgcgacttatgagagattacctttggatgaggaagaagcggctgaaagaggtggcggtggaagcgacggaggagtggttccagggcagctcgggggcgtaggttccccgctgagtagtggtggcggtggaggccatgggaaccaaggacttcccgcgtataatatgcccggaaatcttgcttctaatggcggtggaggaggacagatgagcggccaagaagcttacggttgggctcaagctaggtcaggattttaacgttaagatggctttttatttacagcagttaacaataaagaattacgttgatgtctattatgataatgatgatgaaaactagttgctaccagtgagctatatagtgtgtgggtacattatattatgttctcttgactatattatatatgctaaatttcactaaaaaaaaaaaaaaa

SEQ ID NO: 392 - protein, 315 aa, Brassica napus
MANPWWTGQVNLSGLETTPPSSSQLKTPDLHISMNMAMDSGHNNHHHHHQEVNTNNNNEDDRDNLSGDDHEPREGAVEAPTRRPRGRPAGSKNKPKPPIFVTRDSPNALKSHVMEIASGTDVIETLATFARRRQRGICILSGNGTVANVTLRQPSVAPVAAAPGGAAVLALQGRFEILSLTGSFLPGPAPPGSTGLTIYLAGGQGQVVGGSVVGPLMAAGPVMLIAATFSNATYERLPLDEEEAAERGGGGSDGGVVPGQLGGVGSPLSSGGGGGHGNQGLPAYNMPGNLASNGGGGGQMSGQEAYGWAQARSGF

SEQ ID NO: 393 - DNA, 954 bp, Brassica napus
  CDS (1)..(783)
atggctggaggtacagctctaactccaacctctgtaggatccaagtcactactcccactgaggaaccatgaagcagtagcagagagaggcactaacaacaacaacaacatgaaagcattgcccaaaccggttcaaccagtttcatcaatcgaaggagagatggctaagaggccgcgaggtagaccagctggctccaagaacaaacccaaaccaccaatcattgtcactcacgacagtcccaattccctcagagctcacgccgttgagatcagctcgggtaatgacatctgcgagactttatcagattacgcaagaaggaaacagagaggtctctgcatactaagtgccaacggttgcgtcaacaatgtgacgttaaggcagccagcttcatcaggaggtattgtgacattacacggacgtttcgagatcctctcgttgcttggatcaatcctgcctccaccagcaccgcttgggatcactggtttgaccatttacttagccggccctcaaggccaggttgtgggtggaggagtggttggtgggctaatcgcatctggtcccgttgttctcatggctgcatctttcatgaacgctgtgtttgatcgtcttcctctggatgatgatgaagctgcttctatgcacaaccagcaatactaccagaatggaagatcccgtcccttagatgacattcatggattgcctcagaacctactcactaatggaaactcgggttctgatatctactcttggggggctgcgcagcgtgccatgtccaagccttaatccataacctatcttatctccatggttcatcatatcaacgtaccatatagttaatttaccttggaatcaaagatcaaaccataagtttggtgaaagaactgaaaagtaatcttcctctgtagtttgtacctgcaacagtaaaaaagaaaaaacttataaaaaaaaaaaaaa

SEQ ID NO: 394 - protein, 260 aa, Brassica napus
MAGGTALTPTSVGSKSLLPLRNHEAVAERGTNNNNNMKALPKPVQPVSSIEGEMAKRPRGRPAGSKNKPKPPIIVTHDSPNSLRAHAVEISSGNDICETLSDYARRKQRGLCILSANGCVNNVTLRQPASSGGIVTLHGRFEILSLLGSILPPPAPLGITGLTIYLAGPQGQVVGGGVVGGLIASGPVVLMAASFMNAVFDRLPLDDDEAASMHNQQYYQNGRSRPLDDIHGLPQNLLTNGNSGSDIYSWGAAQRAMSKP

SEQ ID NO: 395 - DNA, 1190 bp, Brassica napus
  CDS (260)..(1129)
ggcgtgaataatctgctcctctcttgccctaaagctgagttaaggtttaaacacacaatagcactcttttgatttatgtctctttgttctgtttttgtcggtttgtgtaaccgatcaactcaagctattggctccttactccctgaaatttgacttctctattggatttcaccaaagtttctctatatgaagcaatctttaccctcacaatttcattatatttgagccacaagaaaaagaaaaagtacatgcgtttgtgatggacggtggttatgatcaatccggtcactctagatacttccataatctctttaggcctgagcttcaccaccagcttcagccacagcctcagcctcaacctcagcttcagccccagcctcaacctcagcttgagtctgatgatgaatctgactccaacaacaagtatccggttcaacctgattccgaccaggttacctcgggctcaacttccgggaagcgtccacgtggacgtcctccagggtctaagaacaagccgaagccaccggtgattgtgacaagagatagccccaacgtgcttagatctcatgttcttgaagtctcatctggagccgacataattgagagcgtcaacaattacgctcgccgaagagggaaaggtgtctccattctcagtggtaacggcgcggtggctaacctcactctccgacagcgggtgacgactcatgggaacaatggtggaactgaagccggagctggagggattgtgactttacatggaaggtttgagattctttccatcactggtacggtgcttccgccgcccgcgccgccgggatgcggtggtttatctatctttgttgctggtgaacaaggtcggatgatcggaggaagagtggtggctccgcttgtggcttctggtcccgtgatactgatggctgcatcgttctccaacgcaacttttgaaaggcttccgcttgaagatgaaggaggtgaaggtgggggagacgtcggaggaggagttccaccgccagccacttcagaaacaccgccgtctggagtcgctcaaggagagctaagagttaatatgagtggttatgatcagttttccggctggggagacggagccgctgcaagaccatcattttagatttgaaatttatgtccgtaaattccctgtaaccaaaatttcaattgaaaaaaaaaaaaaa

SEQ ID NO: 396 - protein, 289 aa, Brassica napus
MDGGYDQSGHSRYFHNLFRPELHHQLQPQPQPQPQLQPQPQPQLESDDESDSNNKYPVQPDSDQVTSGSTSGKRPRGRPPGSKNKPKPPVIVTRDSPNVLRSHVLEVSSGADIIESVNNYARRRGKGVSILSGNGAVANLTLRQRVTTHGNNGGTEAGAGGIVTLHGRFEILSITGTVLPPPAPPGCGGLSIFVAGEQGRMIGGRVVAPLVASGPVILMAASFSNATFERLPLEDEGGEGGGDVGGGVPPPATSETPPSGVAQGELRVNMSGYDQFSGWGDGAAARPSF

SEQ ID NO: 397 - DNA, 1054 bp, Glycine max
  CDS (91)..(924)
tttttacaataacccaatcatagtctcactcgggattggttattcttattctaagagataatccaaatccaaacccaaaagaacaacacaatgaaaggagaatacgtagagcaacagcaacaacatcctaagagtgaaacaccacctagtatgttctcaaagcttcagcctcagcaccatcctttcccgcaccaccctttccaactctccgccgaggatgccaccaccatcaccccgagcaccgctcagaaggccaactcctccggcggcgacggcgcgaccatcgaggttgttcggcgtcccaggggacgtccgcccgggtccaaaaacaagcccaagccaccggttatcataacccgtgacccggaacccgctatgagtccctacattttagaagtgtctggcggaaacgacgtcgtcgaggccatcgcgcagttcagtcaccgcaagaacatgggaatctgcgtcctcacgggttctggaaccgtcgctaacgtcacgctccgtcaaccttccaccacgcccggcaccaccgttacttttcacggccgtttcgacatcctttctgtttccgccaccttccttccgcagcagtccggcgcttctccggcggttcccaacggattcgccatctcgctcgccggaccgcaggggcagatcgtcggaggacttgttgccggcgggctgatggctgccgggactgtttttgtgatcgctgcctcgttcaacaacccggcataccacaggcttccgccggaggaagagggcgcctccgccggagatggacattcgccgccagtctccggcggcggagacagcgggcatggacaggcggagtcgtgtggaatgtccatgtacagctgtcacttgccctctgatgtgatttgggctccaacggctagaccaccgccgccgccttactgatcgatcaatcacacgtcgagtttctgtttctttttcttctgaggttaactttgtggttattgtaatcaattctactatatgttgctctgtttaatttgatttagttggtgtagttaaaaaaaaaaaaaaa

SEQ ID NO: 398 - protein, 277 aa, Glycine max
MKGEYVEQQQQHPKSETPPSMFSKLQPQHHPFPHHPFQLSAEDATTITPSTAQKANSSGGDGATIEVVRRPRGRPPGSKNKPKPPVIITRDPEPAMSPYILEVSGGNDVVEAIAQFSHRKNMGICVLTGSGTVANVTLRQPSTTPGTTVTFHGRFDILSVSATFLPQQSGASPAVPNGFAISLAGPQGQIVGGLVAGGLMAAGTVFVIAASFNNPAYHRLPPEEEGASAGDGHSPPVSGGGDSGHGQAESCGMSMYSCHLPSDVIWAPTARPPPPPY

SEQ ID NO: 399 - DNA, 1167 bp, Oryza sativa (japonica cultivar-group)
  CDS (1)..(1167)
atggagcccgcgacggagaccacggcgacttcgccggctgcggctgccgctgcgcagccggaggcggaggcggaggcggaggcggagtcggcggcgacgccggtggcagtggcggcggcggcggcggcaacctatcagccgccagcgccggtggttccagtcgccgtggcaggtgcggcggcggggagagggaacgggaagaggaagagggggaggccgaggaagtacgggccggacgggagcctgctccggccgctgaaggcgaccccgatctcggcgtcggtgccggacgactccggcggggggcagtacacgccggcggcggcggtgggggccgtcatgaagcgcggcaggggccgccccgtcgggttcgtcagccgcgcgtcgccggtgtccgtggccgtgacggccgccacgtccaccgccgcggtggtcgtctcgtctccggccacccacacccagacgccgctcgggccgctaggtgaattggtagcatgtgcttctggtgcaaacttcacacctcatatcattaacgttgctgctggcgaggatgttaatatgaaggtcatatctttctcccaacaaggtccaagggcaatttgcattctgtctgctaatggggtgatttcaaatgttacattgcgtcagcaagatactttaggtggtacagtgacttatgagggccggtttgagctgctctccttatccggatcattcacgccaactgatagcggtggaacgagaagccgctccggtggaatgagcgtctcgttggcggccacggatggccgtgtcatcggaggcggagttgccggcctccttgtggctgcaagccctgttcaggttgtggtaggaagcttcctgccgagctaccagctggaccagaacgccaccaagaagcccgtcatcgagatcacgacggtgccgccgccgccgccggccatcggcttcaccatctccagcggcgaccctatggaggactcctacagcggcagccatggccagcaccgctccggcgccgccgcggcgacgacgacgacggcgaaggccaactcgacgtcggcgttcagggtggagaactggacgccaccggcgccgccggcggcggaggcggcgaggacgaagacgccgtcgtcggaggccaaagtcccagtccccggagcctga

SEQ ID NO: 400 - protein, 388 aa, Oryza sativa (japonica cultivar-group)
MEPATETTATSPAAAAAAQPEAEAEAEAESAATPVAVAAAAAATYQPPAPVVPVAVAGAAAGRGNGKRKRGRPRKYGPDGSLLRPLKATPISASVPDDSGGGQYTPAAAVGAVMKRGRGRPVGFVSRASPVSVAVTAATSTAAVVVSSPATHTQTPLGPLGELVACASGANFTPHIINVAAGEDVNMKVISFSQQGPRAICILSANGVISNVTLRQQDTLGGTVTYEGRFELLSLSGSFTPTDSGGTRSRSGGMSVSLAATDGRVIGGGVAGLLVAASPVQVVVGSFLPSYQLDQNATKKPVIEITTVPPPPPAIGFTISSGDPMEDSYSGSHGQHRSGAAAATTTTAKANSTSAFRVENWTPPAPPAAEAARTKTPSSEAKVPVPGA

SEQ ID NO: 401 - DNA, 951 bp, Oryza sativa (japonica cultivar-group)
  CDS (1)..(951)
atggatccggtcacggcatcaatacacggtcaccatcttcctccaccgttcaacacccgcgacttccatcaccatctccagcagcagcagcaccagctgcatctcaagaccgaggatgaccaaggcggcggcactccgggtgtcttcggcagccgcggcaccaagcgcgaccacgacgacgacgagaacagtggcaacggccatggaagcggtggtgacggcggtgacctcgcgctggtacccccctcgggtggcgggccggacggcgccgggagcgagagcgccacgcgccgcccgaggggacgcccggcggggtccaagaacaagccgaagccaccgatcatcatcaccagggacagcgccaacacgctccggacgcacgtcatggaggtggccggcggctgcgacatctccgagagcatcaccacgttcgcgcgacgccggcagcgcggggtttgcgtgctcagcggcgccggcaccgtcactaacgtcacgctgcggcagcccgcatcgcagggagcggtcgttgcgctccacggccggttcgagatactctccctctccggctccttcctcccgccgcccgccccgccggaggccacggggctcaccgtctacctggccggaggccagggccaggtcgtgggcggcagcgtcgtcggcgcgctgaccgcggctgggcctgtggtgataatggcggcgtcttttgcgaacgcggtgtacgagcggctgccgttggaggacgacgagctactggcggctcaagggcaagccgacagcgctgggttgctcgccgcggggcagcaagcggcgcagctcgccggcggggccgtcgatccaagcctcttccaaggactaccaccaaacctactcggaaacgtgcagctgccgccggaagccgcctacggatggaaccctggagccggcggtggccgcccggcgccgttctga

SEQ ID NO: 402 - protein, 316 aa, Oryza sativa (japonica cultivar-group)
MDPVTASIHGHHLPPPFNTRDFHHHLQQQQHQLHLKTEDDQGGGTPGVFGSRGTKRDHDDDENSGNGHGSGGDGGDLALVPPSGGGPDGAGSESATRRPRGRPAGSKNKPKPPIIITRDSANTLRTHVMEVAGGCDISESITTFARRRQRGVCVLSGAGTVTNVTLRQPASQGAVVALHGRFEILSLSGSFLPPPAPPEATGLTVYLAGGQGQVVGGSVVGALTAAGPVVIMAASFANAVYERLPLEDDELLAAQGQADSAGLLAAGQQAAQLAGGAVDPSLFQGLPPNLLGNVQLPPEAAYGWNPGAGGGRPAPF

SEQ ID NO: 403 - DNA, 1011 bp, Oryza sativa (japonica cultivar-group)
  CDS (1)..(1011)
atggccgggatggaccctggcgggggcggcgccggcgccggcagctcacggtacttccaccatctgctccgaccgcagcagccgtcgccgctgtcaccgctgtcgccgacatcccatgtcaagatggagcactccaagatgtcacccgacaagagccccgtgggcgagggagatcacgcgggagggagtggaagcggcggcgtcggcggtgaccaccagccgtcgtcgtcggccatggtgcccgtcgagggtggcagcggcagcgccggcggtagtggctcgggtgggccgacgcggcgcccgcgcgggcgcccgcccgggtccaagaacaagccgaagccgcccatcatcgtgacgcgcgacagcccgaacgcgctgcactcgcacgtgctcgaggtcgccggcggcgccgacgtcgtcgactgcgtggccgagtacgcccgccgccgagggcgcggcgtgtgcgtgctgagcggcggcggcgccgtcgtcaacgtggcgctgcggcagccgggcgcgtcgccgccgggcagcatggtggccacgctgcggggccggttcgagatcctatctctcacgggcacggtcctgccgcctcccgcgccacccggcgcgagcggcctcaccgtgttcctctccggcggccagggccaggtgatcggcggcagcgtggtgggcccgctggtcgccgcggggcccgtcgtcctgatggcggcctcattcgcgaacgccgtgtacgagcggctgccgctggagggcgaggaagaggaggtcgccgcgcccgccgccggaggcgaagcacaagatcaagtggcacaatcagctggacccccagggcagcaaccggcggcgtcacagtcctccggcgtgacaggaggcgacggcaccggcggcgccggtggcatgtcgctctacaacctcgccgggaatgtgggaggctatcagctccccggagacaacttcggaggttggagcggcgccggcgccggcggagtcaggccaccgttctga

SEQ ID NO: 404 - protein, 336 aa, Oryza sativa (japonica cultivar-group)
MAGMDPGGGGAGAGSSRYFHHLLRPQQPSPLSPLSPTSHVKMEHSKMSPDKSPVGEGDHAGGSGSGGVGGDHQPSSSAMVPVEGGSGSAGGSGSGGPTRRPRGRPPGSKNKPKPPIIVTRDSPNALHSHVLEVAGGADVVDCVAEYARRRGRGVCVLSGGGAVVNVALRQPGASPPGSMVATLRGRFEILSLTGTVLPPPAPPGASGLTVFLSGGQGQVIGGSVVGPLVAAGPVVLMAASFANAVYERLPLEGEEEEVAAPAAGGEAQDQVAQSAGPPGQQPAASQSSGVTGGDGTGGAGGMSLYNLAGNVGGYQLPGDNFGGWSGAGAGGVRPPF

SEQ ID NO: 405 - DNA, 801 bp, Oryza sativa (japonica cultivar-group)
  CDS (1)..(801)
atgggcttgccggagcagccgtccggctcgtcgggccccaaggcggagctcccggtggccaaggagccggaggcgagcccgacggggggcgcggcggcggaccacgccgacgagaacaacgaatccggcggcggcgagccgcgggagggcgccgtggtggcggcgcccaaccggcgcccccgcggccgcccgccgggctccaagaacaagccgaagccgcccatcttcgtgacgcgcgacagccccaacgcgctgcgcagccacgtcatggaggtggccggcggcgccgacgtcgccgacgccatcgcgcagttctcgcgccgccgccagcgcggcgtctgcgtgctcagcggcgccgggacggtcgccaacgtcgcgctgcgccagccgtcggcgcccggcgccgtcgtcgccctgcacggccgcttcgagatcctctccctcaccggcaccttcctccccggcccggcgcctccgggctccacggggctcaccgtctacctcgccggcggccagggccaggttgtcggcggcagcgtcgtggggtcgctcatcgccgcgggcccggtcatggtgatcgcgtccacgttcgccaacgccacctacgagcgcctgccattggaggaagaagaggagggctcaggcccgcccatgcccggcggcgccgagcccctcatggccggcggccacggcatcgccgacccttcggcgctgccaatgttcaacctgccgccgagcaacgggctcggcggcggcggcgacggtttcccatgggcggcgcacccccgcccaccgtactga

SEQ ID NO: 406 - protein, 266 aa, Oryza sativa (japonica cultivar-group)
MGLPEQPSGSSGPKAELPVAKEPEASPTGGAAADHADENNESGGGEPREGAVVAAPNRRPRGRPPGSKNKPKPPIFVTRDSPNALRSHVMEVAGGADVADAIAQFSRRRQRGVCVLSGAGTVANVALRQPSAPGAVVALHGRFEILSLTGTFLPGPAPPGSTGLTVYLAGGQGQVVGGSVVGSLIAAGPVMVIASTFANATYERLPLEEEEEGSGPPMPGGAEPLMAGGHGIADPSALPMFNLPPSNGLGGGGDGFPWAAHPRPPY

SEQ ID NO: 407 - DNA, 1185 bp, Oryza sativa (japonica cultivar-group)
  CDS (1)..(1185)
atggatgggagggagtccacagtggcgtcaggctccaacttctcctccttctatgtgcagcaccggggcattggcgtgccgggaggctccgggcacccggccgggctccacggcccgccgcccggtggatatcggcagcatcttgatgcagtctctgcggggtaccctttccagccccctcacattgggggttcccacattgggcagggttaccaccatgttgatgcctcagcccctgtcgcgcagcacggcagtggtggcggtggtggtggtatggacattggcatgggtgtcgaaatgagcgcggatgctaaaggggatcaggggagtggtgctggccaggatgagccggtgaagaagaagcgggggaggccgaggaagtataagcctgatggggcggtcacgctggggctctcgccgtcttcgtcgacgcctcactcgtcgacctcggcgatgggtacaatggtgaccacaccaggctcagggtttgggtcgggggcaggatcggggggttcggggtctggtgcccttacagagaagcgtggccgagggcggccacctgggtctggaaagatgcagcagttggcttctcttggaaaatggtttcttggttctgttggaacaggttttactcctcatgtgattattatttcaccaggagaggatgttgctgccaggataatgtccttctcacaacagggcccaagggcagtgtgcatcatctcagcgacaggagctgtatccacagcaacccttcatcaggattcaaactctggtggtgtggttacatatgagggtcgatttgaaatcctgtgcctgtctggatcatatttggtgatagaggaaggtggttcgcgaacccggagtggaggcctctgcatagctctgtgtggccctgaccacagggttattggtgggagtgtaggtggagtcctgacagcagctggaactgttcaggtgatagtggggagcttcatgtatggtgggacaaagaaaaataaagcgaaagctgagcaagagacggagaataacgaagagccaattggcggtgaggaggagacccccacaatggcactgccagatcacaacatgccgcatcatacgatgggtggatggtcggctgggttgatgaggcagatggactcaagaactccaaacatcgacatcaactctattcgcgagtaa

SEQ ID NO: 408 - protein, 394 aa, Oryza sativa (japonica cultivar-group)
MDGRESTVASGSNFSSFYVQHRGIGVPGGSGHPAGLHGPPPGGYRQHLDAVSAGYPFQPPHIGGSHIGQGYHHVDASAPVAQHGSGGGGGGMDIGMGVEMSADAKGDQGSGAGQDEPVKKKRGRPRKYKPDGAVTLGLSPSSSTPHSSTSAMGTMVTTPGSGFGSGAGSGGSGSGALTEKRGRGRPPGSGKMQQLASLGKWFLGSVGTGFTPHVIIISPGEDVAARIMSFSQQGPRAVCIISATGAVSTATLHQDSNSGGVVTYEGRFEILCLSGSYLVIEEGGSRTRSGGLCIALCGPDHRVIGGSVGGVLTAAGTVQVIVGSFMYGGTKKNKAKAEQETENNEEPIGGEEETPTMALPDHNMPHHTMGGWSAGLMRQMDSRTPNIDINSIRE

SEQ ID NO: 409 - DNA, 777 bp, Oryza sativa (japonica cultivar-group)
  CDS (1)..(777)
atggggagcatcgacggccactcgctgcagcagcatcaggggtactcccacggcggcggcgcgggagggagcaacgaggaggaggaggcgtcgccgccgcccggcggtggctcggctacggggtcggcgggccgccggccgagggggaggccgccgggctccaagaacaagccgaagccgcccgtcgtggtgacgcgggagagccccaacgcgatgcgttcccacgtgctggagatcgccagcggcgccgacatcgtcgaggccatcgcgggcttctcccgccgcaggcagcgcggcgtctccgtgctcagcgggagcggcgccgtcaccaacgtcacgctccggcagcccgcggggactggggccgccgccgtcgcgctgcgggggaggttcgagatattgtccatgtctggcgccttcctcccggcgccggcgccgccaggggccacggggctcgccgtgtacctcgccggcgggcaggggcaggtggtgggtgggagcgtcatgggggagctgatcgcgtcgggccccgtcatggtgatcgcggccacgttcggcaacgccacgtacgagaggctgccgctggaccaggaaggcgaggagggcgccgtgctgtccgggtcggagggcgccgccgcgcagatggagcagcagagcagcggaggcgccgtcgtgcccccgccgatgtacgccgccgtccagcagacgccgccgcacgacatgttcgggcagtgggggcatgcagcggtggctcggccgccgccgacatcgttctag

SEQ ID NO: 410 - protein, 258 aa, Oryza sativa (japonica cultivar-group)
MGSIDGHSLQQHQGYSHGGGAGGSNEEEEASPPPGGGSATGSAGRRPRGRPPGSKNKPKPPVVVTRESPNAMRSHVLEIASGADIVEAIAGFSRRRQRGVSVLSGSGAVTNVTLRQPAGTGAAAVALRGRFEILSMSGAFLPAPAPPGATGLAVYLAGGQGQVVGGSVMGELIASGPVMVIAATFGNATYERLPLDQEGEEGAVLSGSEGAAAQMEQQSSGGAVVPPPMYAAVQQTPPHDMFGQWGHAAVARPPPTSF

SEQ ID NO: 411 - DNA, 1140 bp, Oryza sativa (japonica cultivar-group)
  CDS (1)..(1140)
atggatggccgggagcagcagcagcagccgcgcgtgagctcgccgccgccggccggcggcggcgtgatgatgcctcagcacccctacggcgccgcgccggcgatgccgccggggtcggcgaatgttatgcacggggtgccgctctcgttcaaccccatggcgtcgccgaccgcctcgtcgcctatgaagcccgcggatatgtcggggaccatgtaccgcaccgatcccgtcgtgcagggcatgcagcagcagcccggttccggcggtggcggcacggcggtcggcggaggggagctcgtgaagaagaagagggggaggccgaggaagtatggtcctgacgggaacatcgggttgggactgaagcccgcggctgcagcagggacggaggccggcggaccttcaggtggtgcaggatcgaactcgaaccctgacgggaagcgcagagggcgacccccaggatccgggaaaaaaaaacagctagatgctttgggatcttccgggacatcttttactccccacataataacagtgaagcctaatgaggatgttgcttcaaaaataatggcattttcacaacaaggccctcgcactacatgcataatttcagcaaatggcgctctttgcacagcaacactacgtcaaccagcaacttctggtggtatagtaacatatgagggccactttgatattctctctctgtcgggctcatttctgctcgcagaggatggcgacactcgtagcagaacaggtggtttgagtgtggcacttgctggaagcgatggacgtatagttggaggttgtgttgctggaatgctgatggcagcaacgcccgtgcaggttgtagtggggagtttcattgctgaaggtaaaaaaggcaaggaagaacatctgaaacgtgagccaacatctgccccgacgccgaaccacgcagctggctttggcgcagccacggctgccagtcctccgtctgatggatcatcaagcgaccactccgatgacccagggagtcccatgggacctaatggcagcacattcaataattcaggtcatcccatgcattcttcgtatgctcctgttagctggtcgctatctgggaatcaaggccgttacgatcccgacctgaagatgatgaccgactag

SEQ ID NO: 412 - protein, 379 aa, Oryza sativa (japonica cultivar-group)
MDGREQQQQPRVSSPPPAGGGVMMPQHPYGAAPAMPPGSANVMHGVPLSFNPMASPTASSPMKPADMSGTMYRTDPVVQGMQQQPGSGGGGTAVGGGELVKKKRGRPRKYGPDGNIGLGLKPAAAAGTEAGGPSGGAGSNSNPDGKRRGRPPGSGKKKQLDALGSSGTSFTPHIITVKPNEDVASKIMAFSQQGPRTTCIISANGALCTATLRQPATSGGIVTYEGHFDILSLSGSFLLAEDGDTRSRTGGLSVALAGSDGRIVGGCVAGMLMAATPVQVVVGSFIAEGKKGKEEHLKREPTSAPTPNHAAGFGAATAASPPSDGSSSDHSDDPGSPMGPNGSTFNNSGHPMHSSYAPVSWSLSGNQGRYDPDLKMMTD

SEQ ID NO: 413 - DNA, 918 bp, Oryza sativa (japonica cultivar-group)
  CDS (1)..(918)
atggcaggtctcgacctcggcaccgccgcgacgcgctacgtccaccagctccaccacctccaccccgacctccagctgcagcacagctacgccaagcagcacgagccgtccgacgacgaccccaacggcagcggcggcggcggcaacagcaacggcgggccgtacggggaccatgacggcgggtcctcgtcgtcaggtcctgccaccgacggcgcggtcggcgggcccggcgacgtggtggcgcgccggccgcgggggcgcccgcctggctccaagaacaagccgaagccgccggtgatcatcacgcgggagagcgccaacacgctgcgcgcccacatcctggaggtcgggagcggctgcgacgtgttcgagtgcgtctccacgtacgcgcgccggcggcagcgcggcgtgtgcgtgctgagcggcagcggcgtggtcaccaacgtgacgctgcgtcagccgtcggcgcccgcgggcgccgtcgtgtcgctgcacgggaggttcgagatcctgtcgctctcgggctccttcctcccgccgccggctccccccggcgccaccagcctcaccatcttcctcgccgggggccagggacaggtcgtcggcggcaacgtcgtcggcgcgctctacgccgcgggcccggtcatcgtcatcgcggcgtccttcgccaacgtcgcctacgagcgcctcccactggaggaggaggaggcgccgccgccgcaggccggcctgcagatgcagcagcccggcggcggcgccgatgctggtggcatgggtggcgcgttcccgccggacccgtctgccgccggcctcccgttcttcaacctgccgctcaacaacatgcccggtggcggcggctcacagctccctcccggcgccgacggccatggctgggccggcgcacggccaccgttctga

SEQ ID NO: 414 - protein, 305 aa, Oryza sativa (japonica cultivar-group)
MAGLDLGTAATRYVHQLHHLHPDLQLQHSYAKQHEPSDDDPNGSGGGGNSNGGPYGDHDGGSSSSGPATDGAVGGPGDVVARRPRGRPPGSKNKPKPPVIITRESANTLRAHILEVGSGCDVFECVSTYARRRQRGVCVLSGSGVVTNVTLRQPSAPAGAVVSLHGRFEILSLSGSFLPPPAPPGATSLTIFLAGGQGQVVGGNVVGALYAAGPVIVIAASFANVAYERLPLEEEEAPPPQAGLQMQQPGGGADAGGMGGAFPPDPSAAGLPFFNLPLNNMPGGGGSQLPPGADGHGWAGARPPF

SEQ ID NO: 415 - DNA, 987 bp, Oryza sativa (japonica cultivar-group)
  CDS (1)..(987)
atggatccggtgacggcggcggcggcgcatgggggtgggcaccaccaccaccaccacttcggagcgccaccggtggcggcgttccaccaccacccgttccaccacggcggcggggcgcactacccggcggcgttccagcagtttcaggaggagcagcagcagcttgtggcggcggcggcggcggctggtgggatggcgaagcaggagctggtggatgagagcaacaacaccatcaacagcggcgggagcaacgggagcggcggggaggagcagaggcagcagtccggggaggagcagcaccagcaaggggcggcggcgccggtggtgatccggcgtcccaggggccgccccgccggctccaagaacaagcccaagcctccggtcatcatcacgcgcgacagcgccagcgcgctgcgggcgcacgtcctcgaggtcgcctccgggtgcgacctcgtcgacagcgtcgccacgttcgcgcgccgccgccaggtcggtgtctgcgtgctcagcgccaccggcgccgtcaccaacgtctccgtccggcagcccggcgcgggccccggcgccgtcgtcaacctcaccggccgcttcgacatcctctcgctgtccggctccttcctcccgccgccggcgcctccctccgccaccggcctcaccgtctacgtctccggcggccaggggcaggtcgtgggcggcacggtcgccggaccgctcatcgccgtcggccccgtcgtcatcatggccgcctcgttcgggaacgccgcctacgagcgcctcccgctcgaggacgacgagccgccgcagcacatggcgggcggcggccagtcctcgccgccgccgccgccgctgccattaccaccacaccagcagccgattcttcaagaccatctgccacacaacctgatgaacggaatccacctccccggcgacgccgcctacggctggaccagcggcggcggcggcggcggccgcgcggcgccgtactga

SEQ ID NO: 416 - protein, 328 aa, Oryza sativa (japonica cultivar-group)
MDPVTAAAAHGGGHHHHHHFGAPPVAAFHHHPFHHGGGAHYPAAFQQFQEEQQQLVAAAAAAGGMAKQELVDESNNTINSGGSNGSGGEEQRQQSGEEQHQQGAAAPVVIRRPRGRPAGSKNKPKPPVIITRDSASALRAHVLEVASGCDLVDSVATFARRRQVGVCVLSATGAVTNVSVRQPGAGPGAVVNLTGRFDILSLSGSFLPPPAPPSATGLTVYVSGGQGQVVGGTVAGPLIAVGPVVIMAASFGNAAYERLPLEDDEPPQHMAGGGQSSPPPPPLPLPPHQQPILQDHLPHNLMNGIHLPGDAAYGWTSGGGGGGRAAPY

SEQ ID NO: 417 - DNA, 1137 bp, Oryza sativa (japonica cultivar-group)
  CDS (1)..(1137)
atgcaaggaggggccatgtcggcggcggcgacggcgacggcgagcgaggcggcggcgtacggcggcgtgggcatgagcaagagcggggccctgcagcctcagccgccgcacggcgccgccgccgcggtgcgcctcgcctacacccacgacggcatcgcggtgtacaagcacacgccgccgccgccggtgtaccagacgccggccgccgtcgccgccccgtcgccgcccgtccgcggcaatggcggtgcgcccgcgtccgccgagcagcacaagcgcaagcgcggccgaccgcgcaagtacgccgtcacggacgtgccgctcgccgtcgtgccaccctcgccgccaaaggctgcggccgccgccggcgccagcgccgcccagtctccggcgacgcccacgctgccgccgggcttctcgtcgggcctggccgcgtacggaggcgccgcggcgagccagccggcgccacgtcaggctccgccggcatccgggcgcgtgctacctcacaagaagaggggccggccgccgggctccggcaacaaacagcagcagcggcctcagcacaagaaggcagcagctccaggatctagtgtgattggattgaagcctagcgtcatcacagtgcaagttggagaggatgtagtgtccagggtgatgtcctttactaagaatggatgggctgtttgtgttctctcagctaatggtgctgtatccaacatgacactgcgtcaagcaggttcttctggtgcaacaacagtaaattatgagggccattttgagattctttctttgtctggctcatatctgctgtcagaaagtgttggcctgagcagtcgagctgggggacttagtgtttcacttgctggtcctgacggacgtgttttaggtggcggagtagcaggacctctgaatgcagctacacctgttcaggtggtcattggaagctttctggctgatgtgaagaaggggcacaaacaggccatgccgagtggggctccgtatccaggtgtgagcactccaacatccagagggactcccagtggatcctcaggtgggcctggtagccccctaaaccaaagtgcaagtggctcatttaacaccagcaaccaacaagccttggctgacttcccatggagatga

SEQ ID NO: 418 - protein, 378 aa, Oryza sativa (japonica cultivar-group)
MQGGAMSAAATATASEAAAYGGVGMSKSGALQPQPPHGAAAAVRLAYTHDGIAVYKHTPPPPVYQTPAAVAAPSPPVRGNGGAPASAEQHKRKRGRPRKYAVTDVPLAVVPPSPPKAAAAAGASAAQSPATPTLPPGFSSGLAAYGGAAASQPAPRQAPPASGRVLPHKKRGRPPGSGNKQQQRPQHKKAAAPGSSVIGLKPSVITVQVGEDVVSRVMSFTKNGWAVCVLSANGAVSNMTLRQAGSSGATTVNYEGHFEILSLSGSYLLSESVGLSSRAGGLSVSLAGPDGRVLGGGVAGPLNAATPVQVVIGSFLADVKKGHKQAMPSGAPYPGVSTPTSRGTPSGSSGGPGSPLNQSASGSFNTSNQQALADFPWR

SEQ ID NO: 419 - DNA, 1119 bp, Oryza sativa (japonica cultivar-group)
  CDS (1)..(1119)
atggaggccaagtcgggggaagcgagcgttgcgccggtggccgtggcgaccgaggcaacggcggcgacggtgagcttccagccgcaggcggcggtggccgagcagggtagctcgagcggtggtgtgctggtgccgccgccgcctatggcggcgggaggaggaggagttgtggtggcggcggcgccggtggcgggggtggtgaaggtggggaagaagagggggaggccgaggaagtatgggccggacgggagcctgatccggccgctgaacgcgacgccgatctcggcgtcggtacccatggcggcctccgcggtggggccctacacgccggcgtcggcggtgggcgccgccatgaagcgcgggaggggtcgccccctcgacttcgcctccacggccaagctccatcaccaccaccaacaccagcaccatcaccagcagcagcagttcggcttccacttcgactccattggtgaaatggtggcttgttctgctggtgcgaattttactcctcacatcatcactgttgctcctggagaggatgtgactatgaaggtcatatcattttctcaacaaggaccacgagctatctgtattctatctgctaatggtgtgatatcaaacgttacactgcgtcaacctgattcctcgggtggcacattaacttacgagggacgttttgagttgctatctttgtctggatcgtttatgcctactgaaaacagcggaacacggagtcggtcaggtgggatgagcgtttctcttgccagcccagatggccgtgttgtcggtggtggagttgctggccttctggtggcagcaagtcctgttcagattgttgtcggaagcttcctaccaagctatcaaatggaacagaagaataagaagcctagggtggaagcggcacccgcccttgcacagactcctcctgctgttccaatctctagtaccgatacgcacagcagcgagcaagggcagcacagctccgtcgccccaagaacaacaaacatcgtaacctcagcatacaacccagaccagagctgggcatctcctgctcagtcgatacctgacagcgcgagaacaccatcgggcgatgtgaaggtcaccgcctctggagcctga

SEQ ID NO: 420 - protein, 372 aa, Oryza sativa (japonica cultivar-group)
MEAKSGEASVAPVAVATEATAATVSFQPQAAVAEQGSSSGGVLVPPPPMAAGGGGVVVAAAPVAGVVKVGKKRGRPRKYGPDGSLIRPLNATPISASVPMAASAVGPYTPASAVGAAMKRGRGRPLDFASTAKLHHHHQHQHHHQQQQFGFHFDSIGEMVACSAGANFTPHIITVAPGEDVTMKVISFSQQGPRAICILSANGVISNVTLRQPDSSGGTLTYEGRFELLSLSGSFMPTENSGTRSRSGGMSVSLASPDGRVVGGGVAGLLVAASPVQIVVGSFLPSYQMEQKNKKPRVEAAPALAQTPPAVPISSTDTHSSEQGQHSSVAPRTTNIVTSAYNPDQSWASPAQSIPDSARTPSGDVKVTASGA

SEQ ID NO: 421 - DNA, 870 bp, Oryza sativa (japonica cultivar-group)
  CDS (1)..(870)
atggcaggccttgatttgggcaccagctacctccaccaccaccaatcactgcatctccgccacgacgatggcggcgccggctccgacgacggcggccacgacgacctctcgccggggagcggcggtggcggcgggcccagcagcacggccggtggcgccgggatcggcggcggcgaggtcgtcgctcgccgcccccgcggccgcccgccgggctccaagaacaagcccaagccgccggtgatcatcaccagggagagcgccaacgcgctcagggcgcatatcctcgaggtagccgccggttgcgatgtgttcgaggcgctgacggcgtacgcgcgccgccggcagcgcggggtgtgcgtgctctcggcggcggggacagtggcgaacgtcacgctccggcagccgcagtcggcgcagcccgggccggcctcgccggcggtggcgacgctgcacggcaggttcgagatactctccctcgcgggctccttcctgcccccgcccgcgccgccgggcgccaccagcctcgccgcgttcctcgccggcgggcaggggcaggtcgtcggtggcagcgtcgccggcgcgctcatcgcggcggggcccgtcgtcgtcgtcgccgcgtcgttcagcaacgtggcgtacgagaggctgccgctcgaggacggcgacgaggtggtccccccggcgccggcagggagcgaccagggcggcggcggcagcggcggcatgccaccattaggcgttgatccgtcgggcggcgccgccaccggtgggctcccgttcttcaacatgccgttcgggatgccgccaatgccggtggacggccacgccggctggcctggcgccggcgtcgggaggccaccgttctcatga

(The sequence listing continues in the following parts.)

1-23. (canceled)

24. A process for the production of a fine chemical selected from the group consisting of the metabolites indicated in column 7 of Tables I, II and IV, comprising:
(a) increasing or generating one or more activities selected from the group consisting of activities as disclosed in paragraphs [0482.3.n.n], item 2, in a non-human organism or a part thereof, preferably a microorganism, a plant cell, a plant or a part thereof, as compared to a corresponding non-transformed wild type non-human organism or a part thereof; whereby n is a integer number from 1 to 20 and is found in the first column of Tables I, II and IV named “application number” and selected according to the respective metabolite indicated in column 7 of Tables I, II and IV; and
(b) growing the non-human organism or a part thereof under conditions which permit the production of the metabolite indicated in column 7 of Tables I, II and IV or a composition comprising the metabolite indicated in column 7 of Tables I, II and IV in said non-human organism or in the culture medium surrounding said non-human organism.

25. A process for the production of a fine chemical selected from the group consisting of the metabolites indicated in column 7 of Tables I, II and IV, which comprises:
(A)
(i) increasing or generating of the expression of;
(ii) increasing or generating the expression of an expression product of and/or
(iii) increasing or generating one or more activities of an expression product encoded by;
at least one respective nucleic acid molecule comprising a nucleic acid molecule selected from the group consisting of:
(a) a nucleic acid molecule encoding the polypeptide shown in column 5 or 8 of Table II, preferably Table II B, or a homolog or a fragment thereof;
(b) a nucleic acid molecule shown in column 5 or 8 of Table I, preferably Table I B, or a homolog or a fragment thereof (preferably the coding region thereof);
(c) a nucleic acid molecule, which, as a result of the degeneracy of the genetic code, can be derived from a polypeptide sequence depicted in column 5 or 8 of Table II, preferably Table II B;
(d) a nucleic acid molecule having at least 30%, 50%, 60%, 70%, 80%, 85%, 90%, 95%, 97%, 98%, 99% or 99.5% identity with the nucleic acid molecule sequence of a polynucleotide comprising the nucleic acid molecule shown in column 5 or 8 of Table I, preferably Table I B, or the coding region thereof;
(e) a nucleic acid molecule encoding a polypeptide having at least 30%, 50%, 60%, 70%, 80%, 85%, 90%, 95%, 97%, 98%, 99% or 99.5% identity with the amino acid sequence of the polypeptide encoded by the nucleic acid molecule of (a), (b), (c) or (d);
(f) a nucleic acid molecule which hybridizes with a nucleic acid molecule of (a), (b), (c), (d) or (e) under stringent hybridization conditions;
(g) a nucleic acid molecule encoding a polypeptide which can be isolated with the aid of monoclonal or polyclonal antibodies made against a polypeptide encoded by one of the nucleic acid molecules of (a), (b), (c), (d), (e) or (f);
(h) a nucleic acid molecule encoding a polypeptide comprising the consensus sequence or one or more polypeptide motifs as shown in column 8 of Table IV;
(i) a nucleic acid molecule encoding a polypeptide having the activity represented by a respective protein as depicted in column 5 of Table II;
(j) a nucleic acid molecule which comprises a polynucleotide, which is obtained by amplifying a cDNA library or a genomic library using the primers as depicted in column 8 of Table III; and
(k) a nucleic acid molecule which is obtainable by screening a suitable nucleic acid library, especially a cDNA library and/or a genomic library, under stringent hybridization conditions with a probe comprising a complementary sequence of a nucleic acid molecule of (a), (b), (c), (d), (e), (f), (g), (h), (i) or (j) or with a fragment thereof, having at least 15 nt, 20 nt, 30 nt, 50 nt, 100 nt, 200 nt, 500 nt, 1000 nt, 1500 nt, 2000 nt or 3000 nt of a nucleic acid molecule complementary to a nucleic acid molecule sequence characterized in (a), (b), (c), (d), (e), (f), (g), (h), (i) or (j); or a nucleic acid molecule comprising a sequence which is complementary thereto;
in a non-human organism or a part thereof, preferably a microorganism, a plant cell, a plant or a part thereof, as compared to a corresponding non-transformed wild type non-human organism or a part thereof; and
(B) growing the non-human organism or a part thereof under conditions which permit the production of the respective metabolite indicated in column 7 of Tables I, II and IV or a composition comprising the respective metabolite indicated in column 7 of Tables I, II and IV in said non-human organism or in the culture medium surrounding said non-human organism.

26. A process of claim 24, comprising of recovering the respective metabolite indicated in column 7 of Tables I, II and IV in its free or bound form.

27. A process for the production of a fine chemical selected from the group consisting of the metabolites indicated in column 7 of Tables I, II and IV, comprising:
(a) selecting a non-human organism or a part thereof expressing a polypeptide encoded by the nucleic acid molecule characterized in claim 25;
(b) mutagenizing the selected non-human organism or the part thereof;
(c) comparing the activity or the expression level of said polypeptide in the mutagenized non-human organism or the part thereof with the activity or the expression of said polypeptide of the selected non-human organisms or the part thereof;
(d) selecting the mutated non-human organisms or parts thereof, which comprise an increased activity or expression level of said polypeptide compared to the selected non-human organism or the part thereof;
(e) optionally, growing and cultivating the non-human organisms or the parts thereof; and
(f) recovering, and optionally isolating, the free or bound the respective metabolite indicated in column 7 of Tables I, II and IV produced by the selected mutated non-human organisms or parts thereof.

28. The process of claim 27, wherein the activity of said protein or the expression of said nucleic acid molecule is increased or generated transiently or stably.

29. An isolated nucleic acid molecule comprising a nucleic acid molecule selected from the group consisting of:
(a) a nucleic acid molecule encoding a polypeptide shown in Table II, column 5 or 8, preferably shown in Table II B, column 8, or a homolog or a fragment thereof;
(b) a nucleic acid molecule shown in Table I, column 5 or 8, preferably shown in Table I B, column 8, preferably the coding region thereof, or a homolog or a fragment thereof;
(c) a nucleic acid molecule, which, as a result of the degeneracy of the genetic code, can be derived from a polypeptide sequence depicted in column 5 or 8 of Table II, preferably in column 8 of Table II B;
(d) a nucleic acid molecule having at least 30%, 40%, 50%, 60%, 70%, 75%, 80%, 85%, 90%, 95%, 96%, 97%, 98%, 99% or 99.5% identity with the nucleic acid molecule sequence of a polynucleotide comprising the nucleic acid molecule shown in column 5 or 8 of Table I, preferably shown in column 8 of Table I B, preferably the coding region thereof;
(e) a nucleic acid molecule encoding a polypeptide having at least 30%, 40%, 50%, 60%, 70%, 75%, 80%, 85%, 90%, 95%, 96%, 97%, 98%, 99% or 99.5% identity with the amino acid sequence of the polypeptide encoded by the nucleic acid molecule of (a), (b), (c) or (d);
(f) a nucleic acid molecule which hybridizes with a nucleic acid molecule of (a), (b), (c), (d) or (e) under stringent hybridization conditions;
(g) a nucleic acid molecule encoding a polypeptide which can be isolated with the aid of monoclonal or polyclonal antibodies made against a polypeptide encoded by one of the nucleic acid molecules of (a), (b), (c), (d), (e) or (f);
(h) a nucleic acid molecule encoding a polypeptide comprising the consensus sequence or one or more polypeptide motifs as shown in column 8 of Table IV;
(i) a nucleic acid molecule encoding a polypeptide having the activity represented by a respective protein as depicted in column 5 of Table II;
(j) a nucleic acid molecule comprising a polynucleotide which is obtained by amplifying a cDNA library or a genomic library using the primers in Table III, column 8;
and
(k) a nucleic acid molecule which is obtainable by screening a suitable nucleic acid library, especially a cDNA library and/or a genomic library, under stringent hybridization conditions with a probe comprising one of the sequences of the nucleic acid molecule of (a), (b), (c), (d), (e), (f), (g), (h), (i) or (j) or with a fragment of at least 15 nt, 20 nt, 3Ont, 50 nt, 100 nt, 200 nt,500 nt, 1000 nt, 1500 nt, 2000 nt or 3000 nt of the nucleic acid molecule characterized in (a), (b), (c), (d), (e), (f), (g), (h), (i) or (j);
or a nucleic acid molecule comprising a sequence which is complementary thereto.

30. A nucleic acid construct which confers expression of the nucleic acid molecule of claim 29, comprising one or more regulatory elements.

31. An expression cassette comprising:
(a) a promoter, preferably selected from the group consisting of Big35S, PCUbi, Super and USP; and
(b) the nucleic acid molecule of claim 29.

32. A vector comprising the nucleic acid molecule of claim 29, a nucleic acid construct conferring expression of said nucleic acid molecule and comprising one or more regulatory elements, or an expression cassette comprising a promoter and said nucleic acid molecule.

33. A host cell or a plant organelle transformed with the nucleic acid molecule of claim 29, a nucleic acid construct conferring expression of said nucleic acid molecule and comprising one or more regulatory elements, an expression cassette comprising a promoter and said nucleic acid molecule, or a vector comprising said nucleic acid molecule, said nucleic acid construct, or said expression cassette.

34. The host cell of claim 33, wherein the host cell is a plant cell or a microorganism.

35. A process for producing a polypeptide, comprising expressing said polypeptide in the host cell of claim 33.

36. A polypeptide encoded by the nucleic acid molecule of claim 29, or produced by a process comprising expressing said polypeptide in a host cell transformed with said nucleic acid molecule.

37. An antibody, which binds specifically to the polypeptide of claim 36.

38. A plant tissue, propagation material, harvested material, or a plant or part thereof, comprising the host cell of claim 33.

39. A process for the identification of a compound conferring an increase in a respective metabolite indicated in column 7 of Tables I, II and IV production in a non-human organism, comprising:
(a) culturing a plant cell or tissue or microorganism or maintaining a plant expressing the polypeptide encoded by the nucleic acid molecule of claim 29, conferring an increase in the amount of the respective metabolite indicated in column 7 of Tables I, II and IV in a non-human organism or a part thereof and a readout system capable of interacting with the polypeptide under suitable conditions which permit the interaction of the polypeptide with said readout system in the presence of a compound or a sample comprising a plurality of compounds and capable of providing a detectable signal in response to the binding of a compound to said polypeptide under conditions which permit the expression of said readout system and of the polypeptide encoded by said nucleic acid molecule conferring an increase in the amount of the respective metabolite indicated in column 7 of Tables I, II and IV a non-human organism or a part thereof;
(b) identifying if the compound is an effective agonist by detecting the presence or absence or increase of a signal produced by said readout system.

40. A method for the production of an agricultural composition, comprising obtaining a compound according to the method of claim 39, and formulating said compound in a form acceptable for an application in agriculture.

41. A composition comprising the nucleic acid molecule of claim 29, a polypeptide encoded by said nucleic acid molecule, a nucleic acid construct conferring expression of said nucleic acid molecule and comprising one or more regulatory elements, an expression cassette comprising a promoter and said nucleic acid molecule, a vector comprising said nucleic acid molecule, said nucleic acid construct, or said expression cassette, a compound identified by said polypeptide, or an antibody which binds specifically to said polypeptide, and optionally an agricultural acceptable carrier.

42. A method for the identification of a nucleic acid molecule conferring an increase in the respective metabolite(s) indicated in column 7 of Tables I, II and IV after expression, comprising utilizing the nucleic acid molecule of claim 29.

43. A cosmetic, pharmaceutical, food or feed composition comprising the nucleic acid molecule of claim 29, a polypeptide encoded by said nucleic acid molecule, a nucleic acid construct conferring expression of said nucleic acid molecule and comprising one or more regulatory elements, an expression cassette comprising a promoter and said nucleic acid molecule, a vector comprising said nucleic acid molecule, said nucleic acid construct, or said expression cassette, an antibody which binds specifically to said polypeptide, a host cell transformed with said nucleic acid molecule, said nucleic acid construct, said expression cassette, or said vector, a plant or part thereof comprising said host cell, or a plant tissue, harvested material or propagation material of said plant.

44. A method for the production of a plant resistant to a herbicide inhibiting the production of the respective metabolite(s) indicated in column 7 of Tables I, II and IV, comprising utilizing the nucleic acid molecule of claim 29, a polypeptide encoded by said nucleic acid molecule, a nucleic acid construct conferring expression of said nucleic acid molecule and comprising one or more regulatory elements, an expression cassette comprising a promoter and said nucleic acid molecule, a vector comprising said nucleic acid molecule, said nucleic acid construct, or said expression cassette, a host cell transformed with said nucleic acid molecule, said nucleic acid construct, said expression cassette, or said vector, or a plant or plant tissue comprising said host cell.

45. A method for producing a plant with increased yield as compared to a corresponding non-transformed wild type plant, comprising:
(i) increasing or generating expression of;
(ii) increasing or generating expression of an expression product of; and/or
(iii) increasing or generating one or more activities of an expression product encoded by; at least one respective nucleic acid molecule comprising a nucleic acid molecule selected from the group consisting of:
(a) a nucleic acid molecule encoding the polypeptide shown in column 5 or 8 of Table II, preferably Table II B, or a homolog or a fragment thereof, in case in column 7 the metabolite from paragraph [0482.3.n.n], item 22; is indicated; whereby n is a integer number from 1 to 20 and is found in the first column of Tables I, II and IV named “application number” and selected according to respective the metabolites indicated in paragraph [0482.3.n.n], item 22;
(b) a nucleic acid molecule shown in column 5 or 8 of Table I, preferably Table I B, or a homolog or a fragment thereof (preferably the coding region thereof), in case in column 7 the metabolite from paragraph [0482.3.n.n], item 22; is indicated; whereby n is a integer number from 1 to 20 and is found in the first column of Tables I, II and IV named “application number” and selected according to respective the metabolites indicated in paragraph [0482.3.n.n], item 22;
(c) a nucleic acid molecule, which, as a result of the degeneracy of the genetic code, can be derived from a polypeptide sequence depicted in column 5 or 8 of Table II, preferably Table II B, in case in column 7 the metabolite from paragraph [0482.3.n.n], item 22; is indicated; whereby n is a integer number from 1 to 20 and is found in the first column of Tables I, II and IV named “application number” and selected according to respective the metabolites indicated in paragraph [0482.3.n.n], item 22;
(d) a nucleic acid molecule having at least 30%, 50%, 60%, 70%, 80%, 85%, 90%, 95%, 97%, 98%, 99% or 99.5% identity with the nucleic acid molecule sequence of a polynucleotide comprising the nucleic acid molecule shown in column 5 or 8 of Table I, preferably Table I B, or the coding region thereof, in case in column 7 the metabolite from paragraph [0482.3.n.n], item 22; is indicated; whereby n is a integer number from 1 to 20 and is found in the first column of Tables I, II and IV named “application number” and selected according to respective the metabolites indicated in paragraph [0482.3.n.n], item 22;
(e) a nucleic acid molecule encoding a polypeptide having at least 30%, 50%, 60%, 70%, 80%, 85%, 90%, 95%, 97%, 98%, 99% or 99.5% identity with the amino acid sequence of the polypeptide encoded by the nucleic acid molecule of (a), (b), (c) or (d);
(f) a nucleic acid molecule which hybridizes with a nucleic acid molecule of (a), (b), (c), (d) or (e) under stringent hybridization conditions;
(g) a nucleic acid molecule encoding a polypeptide which can be isolated with the aid of monoclonal or polyclonal antibodies made against a polypeptide encoded by one of the nucleic acid molecules of (a), (b), (c), (d), (e) or (f);
(h) a nucleic acid molecule encoding a polypeptide comprising the consensus sequence or one or more polypeptide motifs as shown in column 8 of Table IV, in case in column 7 the metabolite from paragraph [0482.3.n.n], item 22; is indicated; whereby n is a integer number from 1 to 20 and is found in the first column of Tables I, II and IV named “application number” and selected according to respective the metabolites indicated in paragraph [0482.3.n.n], item 22;
(i) a nucleic acid molecule encoding a polypeptide having the activity represented by a respective protein as depicted in column 5 of Table II, in case in column 7 the metabolite from paragraph [0482.3.n.n], item 22; is indicated; whereby n is a integer number from 1 to 20 and is found in the first column of Tables I, II and IV named
(j) a nucleic acid molecule which comprises a polynucleotide, which is obtained by amplifying a cDNA library or a genomic library using the primers as depicted in column 8 of Table III, in case in column 7 the metabolite from paragraph [0482.3.n.n], item 22; is indicated; whereby n is a integer number from 1 to 20 and is found in the first column of Tables I, II and IV named “application number” and selected according to respective the metabolites indicated in paragraph [0482.3.n.n], item 22 is indicated; and
(k) a nucleic acid molecule which is obtainable by screening a suitable nucleic acid library, especially a cDNA library and/or a genomic library, under stringent hybridization conditions with a probe comprising a complementary sequence of a nucleic acid molecule of (a), (b), (c), (d), (e), (f), (g), (h), (i) or (j) or with a fragment thereof, having at least 15 nt, 20 nt, 30 nt, 50 nt, 100 nt, 200 nt, 500 nt, 1000 nt, 1500 nt, 2000 nt or 3000 nt of a nucleic acid molecule complementary to a nucleic acid molecule sequence characterized in (a), (b), (c), (d), (e), (f), (g), (h), (i) or (j);
or a nucleic acid molecule comprising a sequence which is complementary thereto; in a plant cell, plant or a part thereof.

46. A method for producing a plant with increased yield according to claim 45, further comprising regenerating a plant having increased yield from the transformed plant cell, plant cell compartment, plant cell nucleus, plant cell or plant tissue.
